(19) United States
(12) Patent Application Publication
(10) Pub. No.: US 2007/0020637 A1
(43) Pub. Date: Jan. 25, 2007

(54) Full-length cDNA

(75) Inventors: Takao Isogai, Ibaraki (JP); Tomoyasu Sugiyama, Tokyo (JP); Tetsuji Otsuki, Tokyo (JP); Al Wakamatsu, Chiba (JP); Hiroyuki Sato, Osaka (JP); Shizuko Ishii, Hokkaido (JP); Junichi Yamamoto, Chiba (JP); Yuko Isono, Chiba (JP); Keiichi Nagai, Tokyo (JP); Ryotaro Irie, Saitama (JP)

Correspondence Address: FOLEY AND LARDNER;SUITE 500, 3000 K STREET NW, WASHINGTON, DC, 20007, US

(73) Assignee: RESEARCH ASSOCIATION FOR BIOTECHNOLOGY

(21) Appl. No.: 10/760,320

(22) Filed: Jan. 21, 2004

Related U.S. Application Data
(60) Provisional application No. 60/476,227, filed on Jun. 6, 2003.
(60) Provisional application No. 60/447,287, filed on Feb. 14, 2003.

(30) Foreign Application Priority Data
Jan. 21, 2003 (JP) 2003-102206
May 9, 2003 (JP) 2003-131392

(51) Int. Cl. C12Q 1/68; C07H 21/04

(52) U.S. Cl. 435/6; 536/23.1

(57) ABSTRACT

Novel full-length cDNAs are provided. 2,495 cDNA derived from human have been isolated. The full-length nucleotide sequences of the cDNA and amino acid sequences encoded by the nucleotide sequences have been determined. Because the cDNA of the present invention are full-length and contain the translation start site, they provide information useful for analyzing the functions of the polypeptide.

### FIELD OF THE INVENTION

[0001] The present invention relates to polynucleotides encoding novel polypeptides, the polypeptides encoded by these polynucleotides, and new uses of these.

### BACKGROUND OF THE INVENTION

[0002] The genomic DNAs of various living organisms are currently being sequenced and analyzed all over the world. The entire genomic sequences of more than 40 species of prokaryotes, a lower eukaryote, yeast, a multicellular eukaryote, C. elegans, and a higher plant, arabidopsis, and such have already been determined. Analysis of the human genome, presumed to have three billion base pairs, was advanced under global cooperative organization, and a draft sequence was disclosed in 2001. In 2003 the complete structure had been elucidated and publically disclosed. A genome is a blueprint for highly complicated living organisms. The aim in determining a genomic sequence is to reveal the function and regulation of all genes, and to understand living organisms as a network of interactions between genes, proteins, cells or individuals. Understanding living organisms through the genomic information of various species is not only academically important, but also socially significant from the viewpoint of industrial application.

[0003] However, simply determining a genomic sequence will not reveal the function of all genes. For example, in the case of yeast, the function of only approximately half of the 6000 genes predicted on the basis of genomic sequence have been deduced. The human genome has been estimated to contain about 30,000 to 40,000 genes. Further, 100,000 or more types of mRNAs are said to exist when variants produced by alternative splicing are taken into consideration. Therefore, it is desirable to establish “a high throughput system for analysis of gene functions” which allows rapid and efficient identification of the functions of vast amounts of genes obtained by genomic sequencing.

[0004] Many genes in the eukaryotic genome are split by introns into multiple exons. Thus, it is difficult to correctly predict the structure of an encoded protein based solely on genomic information. In contrast, cDNA, which is produced from mRNA that lacks introns, encodes a protein as a single continuous amino acid sequence and allows easy identification of the protein's primary structure. In human cDNA research to date, more than three million ESTs (Expression Sequence Tags) are publicly available, which presumably covers no less than 80% of all human genes.

[0005] EST information is utilized in a variety of ways, for example in analyzing the structure of the human genome, or in predicting exon regions of genomic sequences or their expression profiles. However, most human ESTs have been derived from regions proximal to the cDNA 3′-end, and little information is available from around the mRNA 5′-end. In human cDNAs, the full-length protein sequence of approximately 15,000 corresponding mRNAs have been deduced.

[0006] It is possible to identify the mRNA transcription start site on the genomic sequence based on the 5′-end sequence of a full-length cDNA, and to analyze factors involved in the stability of mRNA contained in that sequence, or in the regulation of its expression at the translation stage. Also, since the atg codon, or translation start site, is contained in the 5′-region of a full-length cDNA, translation to proteins will occur in the correct frame. Therefore, it is possible to produce a large amount of the protein encoded by the cDNA, or to analyze the biological activity of the expressed protein by utilizing an appropriate expression system. Thus, analysis of full-length cDNA provides valuable information which complements genome sequencing information. Also, full-length cDNA clones that can be expressed are extremely valuable in empirical analysis of gene function and in industrial application.

[0007] Therefore, if a novel human full-length cDNA can be isolated, it can be used for developing medicines for diseases in which its gene is involved. A protein encoded by such a gene can be used as a drug by itself. Thus, obtaining full-length cDNAs encoding novel human proteins is of great significance.

[0008] In particular, human secretory proteins or membrane proteins would be useful used as medicines in the same manner as tissue plasminogen activator (TPA), or as target proteins for medicines like membrane receptors. In addition, genes for signal transduction-related proteins (protein kinases, etc.), glycoprotein-related proteins, transcription-related proteins, and such, are genes whose relationships to human diseases have been elucidated. Moreover, genes for disease-related proteins form a gene group rich in genes whose relationships to human diseases have been elucidated.

[0009] Isolating novel full-length human cDNA clones, only a few of which have been isolated, is of great significance. The isolation of novel cDNA clones encoding secretory proteins or membrane proteins is especially desired since such proteins would be useful in themselves as medicines, and also their clones would potentially include genes involved in disease. In addition, genes encoding proteins involved in signal transduction, glycoprotein, transcription, or disease, are expected to be useful as target molecules for therapy, or as medicines in themselves. These genes form a gene group predicted to be strongly involved in disease. Thus, identification of full-length cDNA clones encoding these proteins has great significance.

### SUMMARY OF THE INVENTION

[0010] An objective of the present invention is to provide polynucleotides encoding novel polypeptides, polypeptides encoded by the polynucleotides, and novel usages of these.

[0011] The inventors have developed a method for efficiently cloning, from a cDNA library having a very high fullness-ratio, human full-length cDNAs predicted to be full-length cDNA clones, where that cDNA library is synthesized by an improved method (WO 01/04286) of oligo-capping (K. Maruyama and S. Sugano, Gene, 138: 171-174 (1994); Y. Suzuki et al., Gene, 200: 149-156 (1997)). The nucleotide sequences of cDNA clones whose fullness ratio is high, obtained by this method, were determined mainly from their 5′-end, and, if required, from their 3′-end.

[0012] Among the clones obtained, representative clones estimated to be novel and full-length were analyzed for their full-length nucleotide sequence. The determined full-length nucleotide sequences were analyzed using a BLAST homology search of the databases shown below. Homology searches of the present invention were carried out based on full-length cDNA information, including the entire coding region, and thus homology to every part of a polypeptide could be analyzed. Therefore, in the present invention, the reliability of homology searches has been greatly improved.

[1] SwissProt (http://www.ebi.ac.uk/ebi_docsSwissProt_db/swisshome.html),

[2] GenBank (http://www.ncbi.nlm.nih.gov/web/GenBank),

[3] UniGene (Human) (http://www.ncbi.nlm.nih.gov/UniGene),

[0013] [4] nr (a protein database, which has been constructed by combining data of coding sequences (CDS) in nucleotide sequences deposited in GenBank, and data of SwissProt, PDB (http://www.rcsb.org/pdb/index.html), PIR (http://pir.georgetown.edu/pirwww/pirhome.shtml), and PRF (http://www.prf.or.jp/en/); overlapping sequences have been removed.), and

[5] RefSeq (http://www.ncbi.nlm.nih.gov/LocusLink/refseq.html).

[0014] The gene expression profiles of cDNA clones whose full-length nucleotide sequence had been determined were studied by analyzing the large-scale cDNA database constructed based on the 5′-end nucleotide sequences of cDNAs obtained. The present inventors revealed the usefulness of the genes of the present invention based on these analysis results.

[0015] In the present invention, gene functions were revealed by analysis of expression profiles in silico, based on full-length nucleotide sequence information. The expression profiles used in the expression frequency analysis were studied based on databases containing a sufficient amount of fragment sequence data. Expression frequency analysis was carried out by referring, for these expression profiles, to the full-length nucleotide sequences of the many cDNA clones obtained in the present invention. Thus, highly reliable analysis was achieved by referring to the full-length nucleotide sequences of a wide variety of genes in a sufficiently large population for analysis (expression profiles). Namely, the results of expression frequency analysis using the full-length sequences of the present invention more precisely reflect gene expression frequency in tissues and cells from which a certain cDNA library was derived. Thus, the full-length cDNA nucleotide sequence information of the present invention made it possible to achieve highly reliable expression frequency analysis.

[0016] The full-length cDNA clones of the present invention were obtained by a method comprising the steps of [1] preparing libraries containing cDNAs with a high fullness ratio using oligo-capping, and [2] assembling 5′-end sequences and selecting those with the highest probability of completeness in length in the cluster formed (there are many clones longer in the 5′-end direction). The use of primers designed based on the 5′- and 3′-end sequences of polynucleotides provided by the present invention enable full-length cDNAs to be readily obtained without using such special techniques. Primers, which are designed for use in obtaining cDNAs capable of being expressed, are not limited to the 5′- and 3′-end sequences of a polynucleotide.

[0017] Specifically, the present invention relates to polynucleotides and proteins encoded by the polypeptides as follows.

[0018] [1] A polynucleotide selected from the group consisting of:
[0019] (a) a polynucleotide comprising a protein-coding region of the nucleotide sequence according to any one of SEQ ID NOs: 1-2188 and SEQ ID NOs: 4377-4683;
[0020] (b) a polynucleotide comprising the nucleotide sequence encoding a polypeptide that comprises the amino acid sequence of any one of SEQ ID NOs: 2189-4376 and SEQ ID NOs: 4684-4990;
[0021] (c) a polynucleotide comprising a nucleotide sequence encoding a polypeptide, which comprises the amino acid sequence selected from SEQ ID NO: SEQ ID NOs: 2189-4376 and SEQ ID NOs: 4684-4990 wherein one or more amino acids have been substituted, deleted, inserted, and/or added, and which is functionally equivalent to the polypeptide comprising the selected amino acid sequence as described above;
[0022] (d) a polynucleotide which hybridizes to a polynucleotide comprising the nucleotide sequence selected from SEQ ID NOs: 1-2188 and SEQ ID NOs: 4377-4683, and which comprises the nucleotide sequence encoding a polypeptide functionally equivalent to a polypeptide encoded by the selected nucleotide sequence as described above;
[0023] (e) a polynucleotide comprising a nucleotide sequence encoding a partial amino acid sequence of a polypeptide encoded by the polynucleotides according to any one of (a)-(d);
[0024] (f) a polynucleotide comprising a nucleotide sequence having at least 70% identity to the nucleotide sequence of any one of SEQ ID NOs: 1-2188 and SEQ ID NOs: 4377-4683; and
[0025] (g) a polynucleotide comprising a nucleotide sequence having at least 90% identity to the nucleotide sequence of any one of SEQ ID NOs: 1-2188 and SEQ ID NOs: 4377-4683.

[0026] [2] A polypeptide encoded by the polynucleotide according to [1], or a partial peptide thereof.

[0027] [3] An antibody which binds to the polypeptide or the peptide according to [2].

[0028] [4] An immunoassay method for the polypeptide or the peptide according to [2], which comprises the steps of:
[0029] (a) contacting the polypeptide or the peptide according to [2] with the antibody according to [3]; and
[0030] (b) observing the binding between the two.

[0031] [5] A vector comprising the polynucleotide according to [1].

[0032] [6] A transformant comprising the polynucleotide according to [1] or the vector according to [5].

[0033] [7] A transformant which comprises the polynucleotide according to [1] or vector according to [5] in an expressible manner.

[0034] [8] A method for producing the polypeptide or the peptide according to [2], which comprises the steps of:
[0035] (a) culturing the transformant according to [7]; and
[0036] (b) recovering the expression product.

[0037] [9] An oligonucleotide comprising 15 or more nucleotides, which comprises the nucleotide sequence according to any one of SEQ ID NOs: 1-2188 and SEQ ID NOs: 4377-4683, or a nucleotide sequence complementary to the complementary strand thereof.

[0038] [10] A primer for synthesizing a polynucleotide, which comprises the oligonucleotide according to [9].

[0039] [11] A probe for detecting a polynucleotide, which comprises the oligonucleotide according to [9].

[0040] [12] A polynucleotide according to any one of:
[0041] (a) an antisense polynucleotide comprising a nucleotide sequence complementary to the transcript of the polynucleotide according to [1];
[0042] (b) a polynucleotide with the ribozyme activity for specifically cleaving the transcript of the polynucleotide according to [1]; and
[0043] (c) a polynucleotide which downregulates the expression of the polynucleotide of [1] due to RNAi activity in a host cell.

[0044] [13] A method for detecting the polynucleotide according to [1], which comprises the steps of:
[0045] (a) incubating a target polynucleotide with the oligonucleotide according to [9] under conditions ensuring hybridization; and
[0046] (b) detecting the hybridization between the target polynucleotide and the oligonucleotide according to [9].

[0047] [14] A database of polynucleotides and/or polypeptides, which comprises information on at least one of the nucleotide sequences of SEQ ID NOs: 1-2188 and SEQ ID NOs: 4377-4683 and/or on at least one of the amino acid sequences of SEQ ID NOs: 2189-4376 and SEQ ID NOs: 4684-4990.

[0048] Herein, “polynucleotide” is defined as a molecule, such as a DNA or RNA, in which multiple nucleotides are polymerized. There is no limitation as to the number of polymerized nucleotides. If a polymer contains a relatively low number of nucleotides, it is also described as an “oligonucleotide”, which is included in the “polynucleotide” of the present invention. The polynucleotides or oligonucleotides of the present invention can be natural or chemically synthesized. Alternatively, they can be synthesized using a template polynucleotide in an enzymatic reaction such as PCR. Furthermore, the polynucleotides of the present invention may be modified chemically. Single-stranded and double-stranded polynucleotides are included in the present invention. In this specification, especially in the claims, when the polynucleotides are described merely as “polynucleotide”, it means not only single-stranded polynucleotides but also double-stranded polynucleotides. When it means a double-stranded polynucleotide, the nucleotide sequence of only one chain is indicated. However, based on the nucleotide sequence of a sense chain, the nucleotide sequence of the corresponding complementary strand is essentially determined.

[0049] All the cDNAs provided by the present invention are full-length cDNAs. “Full-length cDNAs” herein means cDNAs containing the ATG codon, which is the start point of translation therein. Untranslated regions upstream and downstream of the protein-coding region are both naturally contained in natural mRNAs and are not essential. It is preferable that the full-length cDNAs of the present invention contain a stop codon.

### BRIEF DESCRIPTION OF THE DRAWINGS

[0050] FIG. 1 shows the restriction map of the vector pME18SFL3.

### DETAILED DESCRIPTION OF THE INVENTION

[0051] All of the clones (2495 clones) of the present invention are novel and encode full-length polypeptides. Further, all of the clones are cDNAs with a high fullness ratio, and which were obtained by oligo-capping method. None of the clones are identical to any known human mRNAs (namely, they are novel clones) selected by searching 5′-end sequences and mRNA sequences with the annotation of “complete cds” in the GenBank and UniGene databases using BLAST homology [S. F. Altschul, W. Gish, W. Miller, E. W. Myers & D. J. Lipman, J. Mol. Biol., 215: 403-410 (1990); W. Gish & D. J. States, Nature Genet., 3: 266-272 (1993)]. They are also clones that were assumed to have a higher fullness ratio among members in assembled clusters. Most of the clones with a high fullness ratio in a cluster had nucleotide sequences longer in the 5′-end direction.

[0052] All of the full-length cDNAs of the present invention can be synthesized by a method such as PCR (Current protocols in Molecular Biology edit. Ausubel et al. (1987) Publish. John Wiley & Sons Section 6.1-6.4) using primer sets designed based on 5′-end and 3′-end sequences, or using primer sets of primers designed based on 5′-end sequences and a primer of oligo dT sequence corresponding to poly A sequence. Table 1 contains the clone names of 2,495 full-length cDNA clones of the present invention, SEQ ID NOs of the full-length nucleotide sequences, CDS portions deduced from the full-length nucleotide, sequences, and SEQ ID NOs of the translated amino acids. The positions of CDS are shown according to the rules set out in “DDBJ/EMBL/GenBank Feature Table Definition” (http://www.ncbi.nlm.nih.gov/collab/FT/index.html). The start position number corresponds to the first letter of “ATG”, the nucleotide triplet encoding methionine; the termination position number corresponds to the third letter of the stop codon. These are indicated by flanking with the mark “..”. However, in clones without a stop codon, the termination position is indicated by the mark “>”, according to the above rules.

TABLE 1

| | | | |
|---|---|---|---|
| 3NB692002685 | 1 | 777 . . . 1496 | 2189 |
| 3NB692002806 | 2 | 33 . . . 674 | 2190 |
| 3NB692008729 | 3 | 455 . . . 1189 | 2191 |
| ACTVT2000380 | 4 | 593 . . . 919 | 2192 |
| ADIPS2000088 | 5 | 59 . . . 1486 | 2193 |
| ADRGL2000172 | 6 | 237 . . . 638 | 2194 |
| ADRGL2003329 | 7 | 640 . . . 1014 | 2195 |
| ADRGL2009146 | 8 | 313 . . . 732 | 2196 |
| ADRGL2009691 | 9 | 294 . . . 767 | 2197 |
| ADRGL2009755 | 10 | 87 . . . 1265 | 2198 |
| ADRGL2012038 | 11 | 342 . . . 686 | 2199 |
| ADRGL2012179 | 12 | 254 . . . 625 | 2200 |
| ASTRO1000009 | 13 | 458 . . . 1552 | 2201 |
| ASTRO2002842 | 14 | 150 . . . 1490 | 2202 |
| ASTRO2003960 | 15 | 422 . . . 895 | 2203 |
| ASTRO2014923 | 16 | 65 . . . 1357 | 2204 |
| ASTRO2018373 | 17 | 123 . . . 512 | 2205 |
| ASTRO3000172 | 18 | 2582 . . . 2890 | 2206 |
| ASTRO3000177 | 19 | 2311 . . . 3978 | 2207 |
| ASTRO3000301 | 20 | 125 . . . 3832 | 2208 |
| ASTRO3000482 | 21 | 90 . . . 557 | 2209 |
| BLADE1000176 | 22 | 1787 . . . 2101 | 2210 |
| BLADE2001371 | 23 | 1009 . . . 1323 | 2211 |
| BLADE2001987 | 24 | 186 . . . 548 | 2212 |
| BLADE2002073 | 25 | 481 . . . 801 | 2213 |
| BLADE2002782 | 26 | 1341 . . . 1667 | 2214 |
| BLADE2002947 | 27 | 7 . . . 336 | 2215 |
| BLADE2003474 | 28 | 967 . . . 1272 | 2216 |
| BLADE2004089 | 29 | 60 . . . >2486 | 2217 |
| BLADE2004462 | 30 | 96 . . . 512 | 2218 |
| BLADE2004670 | 31 | 2037 . . . >2574 | 2219 |
| BLADE2005036 | 32 | 1293 . . . 1838 | 2220 |
| BLADE2005459 | 33 | 306 . . . 977 | 2221 |
| BLADE2007666 | 34 | 2289 . . . 2612 | 2222 |
| BLADE2007958 | 35 | 1147 . . . 1530 | 2223 |
| BLADE2008281 | 36 | 26 . . . 370 | 2224 |
| BLADE2008398 | 37 | 2742 . . . 3422 | 2225 |
| BLADE2008539 | 38 | 2857 . . . 4245 | 2226 |
| BNGH42003570 | 39 | 98 . . . 802 | 2227 |
| BNGH42007788 | 40 | 472 . . . 1782 | 2228 |
| BRACE1000186 | 41 | 333 . . . 821 | 2229 |
| BRACE1000258 | 42 | 10 . . . 2538 | 2230 |
| BRACE1000533 | 43 | 1483 . . . 1908 | 2231 |
| BRACE1000572 | 44 | 16 . . . 3435 | 2232 |
| BRACE2003639 | 45 | 481 . . . 1065 | 2233 |
| BRACE2005457 | 46 | 128 . . . 1237 | 2234 |
| BRACE2006319 | 47 | 603 . . . 1517 | 2235 |
| BRACE2008594 | 48 | 1221 . . . 1871 | 2236 |
| BRACE2010489 | 49 | 262 . . . >1693 | 2237 |
| BRACE2011747 | 50 | 983 . . . 1438 | 2238 |
| BRACE2014306 | 51 | 32 . . . 1402 | 2239 |
| BRACE2014475 | 52 | 598 . . . 906 | 2240 |
| BRACE2014657 | 53 | 404 . . . 814 | 2241 |
| BRACE2015058 | 54 | 670 . . . 1116 | 2242 |
| BRACE2015314 | 55 | 203 . . . 1822 | 2243 |
| BRACE2016981 | 56 | 51 . . . 1355 | 2244 |
| BRACE2018762 | 57 | 654 . . . 1739 | 2245 |
| BRACE2024627 | 58 | 438 . . . 950 | 2246 |
| BRACE2026836 | 59 | 134 . . . 1087 | 2247 |
| BRACE2027258 | 60 | 164 . . . >1851 | 2248 |
| BRACE2027970 | 61 | 1538 . . . 1990 | 2249 |
| BRACE2028970 | 62 | 2257 . . . 2685 | 2250 |
| BRACE2029112 | 63 | 832 . . . 1191 | 2251 |
| BRACE2029849 | 64 | 1039 . . . 1341 | 2252 |
| BRACE2030326 | 65 | 344 . . . 688 | 2253 |
| BRACE2030341 | 66 | 1209 . . . 1694 | 2254 |
| BRACE2030884 | 67 | 1248 . . . 1601 | 2255 |
| BRACE2031154 | 68 | 2 . . . 367 | 2256 |
| BRACE2031389 | 69 | 690 . . . 1271 | 2257 |
| BRACE2031527 | 70 | 367 . . . 684 | 2258 |
| BRACE2031531 | 71 | 120 . . . 635 | 2259 |
| BRACE2031899 | 72 | 46 . . . 381 | 2260 |
| BRACE2032044 | 73 | 403 . . . 732 | 2261 |
| BRACE2032329 | 74 | 1330 . . . 1761 | 2262 |
| BRACE2032385 | 75 | 20 . . . 613 | 2263 |
| BRACE2032538 | 76 | 189 . . . 515 | 2264 |
| BRACE2032823 | 77 | 1910 . . . 2212 | 2265 |
| BRACE2033720 | 78 | 28 . . . 537 | 2266 |
| BRACE2035381 | 79 | 1310 . . . 2758 | 2267 |
| BRACE2035441 | 80 | 98 . . . 1660 | 2268 |
| BRACE2036005 | 81 | 1584 . . . 1913 | 2269 |
| BRACE2036096 | 82 | 1173 . . . 1484 | 2270 |
| BRACE2036830 | 83 | 391 . . . 702 | 2271 |
| BRACE2036834 | 84 | 1436 . . . 1894 | 2272 |
| BRACE2037847 | 85 | 122 . . . 616 | 2273 |
| BRACE2038114 | 86 | 171 . . . 536 | 2274 |
| BRACE2038329 | 87 | 335 . . . 928 | 2275 |
| BRACE2038551 | 88 | 1913 . . . 2239 | 2276 |
| BRACE2039249 | 89 | 1085 . . . 1726 | 2277 |
| BRACE2039327 | 90 | 361 . . . 1419 | 2278 |
| BRACE2039475 | 91 | 307 . . . 753 | 2279 |
| BRACE2039734 | 92 | 16 . . . >1730 | 2280 |
| BRACE2040138 | 93 | 797 . . . 1216 | 2281 |
| BRACE2040325 | 94 | 356 . . . 757 | 2282 |
| BRACE2041009 | 95 | 29 . . . 1390 | 2283 |
| BRACE2041200 | 96 | 304 . . . 945 | 2284 |
| BRACE2041264 | 97 | 530 . . . 1105 | 2285 |
| BRACE2042550 | 98 | 15 . . . 1007 | 2286 |
| BRACE2043142 | 99 | 156 . . . 908 | 2287 |
| BRACE2043248 | 100 | 1099 . . . 1581 | 2288 |
| BRACE2043349 | 101 | 202 . . . 531 | 2289 |
| BRACE2043665 | 102 | 858 . . . 1565 | 2290 |
| BRACE2044286 | 103 | 125 . . . 2011 | 2291 |
| BRACE2044816 | 104 | 188 . . . 670 | 2292 |
| BRACE2044949 | 105 | 24 . . . 725 | 2293 |
| BRACE2045300 | 106 | 1174 . . . 1863 | 2294 |
| BRACE2045428 | 107 | 209 . . . 625 | 2295 |
| BRACE2045596 | 108 | 906 . . . 1583 | 2296 |
| BRACE2045772 | 109 | 31 . . . 777 | 2297 |
| BRACE2045947 | 110 | 499 . . . 1164 | 2298 |
| BRACE2045954 | 111 | 1558 . . . 1863 | 2299 |
| BRACE2046251 | 112 | 527 . . . 1360 | 2300 |
| BRACE2046295 | 113 | 436 . . . 1428 | 2301 |
| BRACE2047011 | 114 | 1453 . . . 1794 | 2302 |
| BRACE2047350 | 115 | 2840 . . . 3487 | 2303 |
| BRACE2047377 | 116 | 133 . . . 456 | 2304 |
| BRACE2047385 | 117 | 75 . . . 458 | 2305 |
| BRACE3000071 | 118 | 1729 . . . 2124 | 2306 |
| BRACE3000697 | 119 | 131 . . . 703 | 2307 |
| BRACE3000787 | 120 | 2208 . . . 2750 | 2308 |
| BRACE3000840 | 121 | 564 . . . 3611 | 2309 |
| BRACE3000973 | 122 | 887 . . . 1666 | 2310 |
| BRACE3001002 | 123 | 292 . . . 624 | 2311 |
| BRACE3001217 | 124 | 2924 . . . 3241 | 2312 |
| BRACE3001391 | 125 | 1803 . . . 3506 | 2313 |
| BRACE3001595 | 126 | 8 . . . 952 | 2314 |
| BRACE3001754 | 127 | 586 . . . 1188 | 2315 |
| BRACE3002298 | 128 | 67 . . . 375 | 2316 |
| BRACE3002390 | 129 | 136 . . . 537 | 2317 |
| BRACE3002508 | 130 | 3430 . . . 4104 | 2318 |
| BRACE3003004 | 131 | 692 . . . 1027 | 2319 |
| BRACE3003192 | 132 | 1044 . . . 3245 | 2320 |
| BRACE3003595 | 133 | 1654 . . . 4179 | 2321 |
| BRACE3003698 | 134 | 506 . . . 847 | 2322 |
| BRACE3004058 | 135 | 2267 . . . 3040 | 2323 |
| BRACE3004113 | 136 | 1887 . . . 2189 | 2324 |
| BRACE3004150 | 137 | 1537 . . . 2886 | 2325 |
| BRACE3004358 | 138 | 222 . . . 551 | 2326 |
| BRACE3004435 | 139 | 2782 . . . 3240 | 2327 |
| BRACE3004772 | 140 | 888 . . . 1577 | 2328 |
| BRACE3004783 | 141 | 132 . . . 644 | 2329 |
| BRACE3004843 | 142 | 183 . . . 500 | 2330 |
| BRACE3004880 | 143 | 885 . . . 1655 | 2331 |
| BRACE3005145 | 144 | 717 . . . 1484 | 2332 |
| BRACE3005225 | 145 | 76 . . . 495 | 2333 |
| BRACE3005430 | 146 | 3120 . . . 3524 | 2334 |
| BRACE3005499 | 147 | 205 . . . 531 | 2335 |
| BRACE3006185 | 148 | 220 . . . 648 | 2336 |
| BRACE3006226 | 149 | 580 . . . 951 | 2337 |
| BRACE3006462 | 150 | 1851 . . . 2213 | 2338 |
| BRACE3006872 | 151 | 1136 . . . 1957 | 2339 |
| BRACE3007322 | 152 | 2918 . . . >3227 | 2340 |
| BRACE3007472 | 153 | 190 . . . 573 | 2341 |
| BRACE3007480 | 154 | 93 . . . 962 | 2342 |
| BRACE3007559 | 155 | 1236 . . . 1592 | 2343 |
| BRACE3007625 | 156 | 36 . . . 3053 | 2344 |
| BRACE3007642 | 157 | 1857 . . . 2294 | 2345 |
| BRACE3007767 | 158 | 237 . . . 758 | 2346 |
| BRACE3008036 | 159 | 162 . . . 512 | 2347 |
| BRACE3008092 | 160 | 3356 . . . 3724 | 2348 |
| BRACE3008137 | 161 | 208 . . . 3699 | 2349 |
| BRACE3008384 | 162 | 123 . . . 1043 | 2350 |
| BRACE3008720 | 163 | 3014 . . . 3550 | 2351 |
| BRACE3008772 | 164 | 3900 . . . 4331 | 2352 |
| BRACE3009090 | 165 | 70 . . . 585 | 2353 |
| BRACE3009237 | 166 | 406 . . . 714 | 2354 |
| BRACE3009297 | 167 | 2724 . . . 3107 | 2355 |
| BRACE3009377 | 168 | 1359 . . . 1790 | 2356 |
| BRACE3009574 | 169 | 180 . . . 527 | 2357 |
| BRACE3009701 | 170 | 1011 . . . 1550 | 2358 |
| BRACE3009708 | 171 | 105 . . . 2867 | 2359 |
| BRACE3009724 | 172 | 2401 . . . 3282 | 2360 |
| BRACE3009747 | 173 | 2650 . . . 3171 | 2361 |
| BRACE3010397 | 174 | 1848 . . . 2660 | 2362 |
| BRACE3010428 | 175 | 269 . . . 628 | 2363 |
| BRACE3011271 | 176 | 689 . . . 1417 | 2364 |
| BRACE3011421 | 177 | 372 . . . 3209 | 2365 |
| BRACE3011505 | 178 | 688 . . . 1035 | 2366 |
| BRACE3012364 | 179 | 1980 . . . 2633 | 2367 |
| BRACE3012930 | 180 | 1128 . . . 1718 | 2368 |
| BRACE3013119 | 181 | 66 . . . 395 | 2369 |
| BRACE3013576 | 182 | 2120 . . . 2971 | 2370 |
| BRACE3013740 | 183 | 118 . . . 447 | 2371 |
| BRACE3013780 | 184 | 6 . . . 1124 | 2372 |
| BRACE3014005 | 185 | 1460 . . . 2374 | 2373 |
| BRACE3014068 | 186 | 29 . . . 373 | 2374 |
| BRACE3014231 | 187 | 928 . . . 1347 | 2375 |
| BRACE3014317 | 188 | 44 . . . 550 | 2376 |
| BRACE3014807 | 189 | 144 . . . 1202 | 2377 |
| BRACE3015027 | 190 | 1 . . . 1656 | 2378 |
| BRACE3015121 | 191 | 3019 . . . 4404 | 2379 |
| BRACE3015262 | 192 | 27 . . . 2195 | 2380 |
| BRACE3015521 | 193 | 2117 . . . 2827 | 2381 |
| BRACE3015894 | 194 | 285 . . . 773 | 2382 |
| BRACE3016884 | 195 | 303 . . . 2633 | 2383 |
| BRACE3018308 | 196 | 106 . . . 612 | 2384 |
| BRACE3018963 | 197 | 332 . . . 676 | 2385 |
| BRACE3019055 | 198 | 1065 . . . 1940 | 2386 |
| BRACE3019084 | 199 | 1644 . . . 2369 | 2387 |
| BRACE3020194 | 200 | 1727 . . . 2161 | 2388 |
| BRACE3020286 | 201 | 85 . . . 426 | 2389 |
| BRACE3020594 | 202 | 250 . . . 624 | 2390 |
| BRACE3022769 | 203 | 299 . . . 790 | 2391 |
| BRACE3023912 | 204 | 12 . . . 539 | 2392 |
| BRACE3024073 | 205 | 86 . . . 655 | 2393 |
| BRACE3024659 | 206 | 14 . . . 586 | 2394 |
| BRACE3024662 | 207 | 401 . . . 925 | 2395 |
| BRACE3025153 | 208 | 98 . . . 523 | 2396 |
| BRACE3025457 | 209 | 1204 . . . 2541 | 2397 |
| BRACE3025531 | 210 | 1319 . . . 2338 | 2398 |
| BRACE3025630 | 211 | 1329 . . . 1919 | 2399 |
| BRACE3026008 | 212 | 250 . . . 558 | 2400 |
| BRACE3026075 | 213 | 130 . . . 483 | 2401 |
| BRACE3026735 | 214 | 324 . . . 635 | 2402 |
| BRACE3027242 | 215 | 273 . . . 791 | 2403 |
| BRACE3027326 | 216 | 237 . . . 2372 | 2404 |
| BRACE3027478 | 217 | 32 . . . 529 | 2405 |
| BRACE3030103 | 218 | 320 . . . 682 | 2406 |
| BRACE3031838 | 219 | 1661 . . . 1981 | 2407 |
| BRACE3032983 | 220 | 155 . . . 484 | 2408 |
| BRACE3040856 | 221 | 187 . . . 585 | 2409 |
| BRACE3045033 | 222 | 24 . . . 566 | 2410 |
| BRALZ2011796 | 223 | 132 . . . 1361 | 2411 |
| BRALZ2012183 | 224 | 2172 . . . 2741 | 2412 |
| BRALZ2012848 | 225 | 218 . . . 754 | 2413 |
| BRALZ2014484 | 226 | 80 . . . 1411 | 2414 |
| BRALZ2016085 | 227 | 217 . . . >1672 | 2415 |
| BRALZ2016498 | 228 | 402 . . . 893 | 2416 |
| BRALZ2017359 | 229 | 47 . . . 973 | 2417 |
| BRAMY2001473 | 230 | 112 . . . 1701 | 2418 |
| BRAMY2003008 | 231 | 236 . . . 961 | 2419 |
| BRAMY2004771 | 232 | 240 . . . 2108 | 2420 |
| BRAMY2005052 | 233 | 211 . . . 1434 | 2421 |
| BRAMY2017528 | 234 | 447 . . . 1076 | 2422 |
| BRAMY2019300 | 235 | 338 . . . 2110 | 2423 |
| BRAMY2019963 | 236 | 206 . . . 640 | 2424 |
| BRAMY2019985 | 237 | 271 . . . 573 | 2425 |
| BRAMY2020058 | 238 | 1537 . . . 1962 | 2426 |
| BRAMY2020270 | 239 | 98 . . . 976 | 2427 |
| BRAMY2021498 | 240 | 71 . . . 1870 | 2428 |
| BRAMY2028856 | 241 | 16 . . . 333 | 2429 |
| BRAMY2028914 | 242 | 34 . . . 534 | 2430 |
| BRAMY2029602 | 243 | 216 . . . 731 | 2431 |
| BRAMY2030098 | 244 | 960 . . . 1298 | 2432 |
| BRAMY2030109 | 245 | 271 . . . 1296 | 2433 |
| BRAMY2030702 | 246 | 1008 . . . 1316 | 2434 |
| BRAMY2030703 | 247 | 132 . . . 611 | 2435 |
| BRAMY2030799 | 248 | 85 . . . 480 | 2436 |
| BRAMY2031317 | 249 | 313 . . . 2334 | 2437 |
| BRAMY2031377 | 250 | 214 . . . 642 | 2438 |
| BRAMY2031442 | 251 | 1492 . . . 1854 | 2439 |
| BRAMY2032014 | 252 | 1227 . . . 2054 | 2440 |
| BRAMY2032242 | 253 | 404 . . . 1150 | 2441 |
| BRAMY2032317 | 254 | 1649 . . . 1987 | 2442 |
| BRAMY2033003 | 255 | 736 . . . 1068 | 2443 |
| BRAMY2033116 | 256 | 1008 . . . 1721 | 2444 |
| BRAMY2033267 | 257 | 609 . . . 923 | 2445 |
| BRAMY2033594 | 258 | 2121 . . . 2447 | 2446 |
| BRAMY2034185 | 259 | 47 . . . 400 | 2447 |
| BRAMY2034920 | 260 | 222 . . . 620 | 2448 |
| BRAMY2034993 | 261 | 1613 . . . 2041 | 2449 |
| BRAMY2036387 | 262 | 1858 . . . 2160 | 2450 |
| BRAMY2036396 | 263 | 837 . . . 1169 | 2451 |
| BRAMY2036567 | 264 | 859 . . . 1338 | 2452 |
| BRAMY2036699 | 265 | 60 . . . 374 | 2453 |
| BRAMY2036913 | 266 | 86 . . . 433 | 2454 |
| BRAMY2037823 | 267 | 2163 . . . 2549 | 2455 |
| BRAMY2038100 | 268 | 515 . . . 997 | 2456 |
| BRAMY2038484 | 269 | 95 . . . 709 | 2457 |
| BRAMY2038846 | 270 | 1709 . . . 2356 | 2458 |
| BRAMY2038904 | 271 | 118 . . . 2274 | 2459 |
| BRAMY2039872 | 272 | 663 . . . 1148 | 2460 |
| BRAMY2040478 | 273 | 1754 . . . 2083 | 2461 |
| BRAMY2040592 | 274 | 954 . . . 1943 | 2462 |
| BRAMY2041261 | 275 | 124 . . . 441 | 2463 |
| BRAMY2041378 | 276 | 199 . . . 831 | 2464 |
| BRAMY2041542 | 277 | 2098 . . . 2412 | 2465 |
| BRAMY2042612 | 278 | 1319 . . . 1621 | 2466 |
| BRAMY2042641 | 279 | 271 . . . 672 | 2467 |
| BRAMY2042760 | 280 | 1306 . . . 2115 | 2468 |
| BRAMY2042918 | 281 | 956 . . . 1354 | 2469 |
| BRAMY2044078 | 282 | 123 . . . 569 | 2470 |
| BRAMY2044246 | 283 | 83 . . . 436 | 2471 |
| BRAMY2045036 | 284 | 2746 . . . 3069 | 2472 |
| BRAMY2046478 | 285 | 51 . . . 359 | 2473 |
| BRAMY2046742 | 286 | 819 . . . 1148 | 2474 |
| BRAMY2046989 | 287 | 47 . . . 1594 | 2475 |
| BRAMY2047169 | 288 | 1622 . . . 2083 | 2476 |
| BRAMY2047420 | 289 | 573 . . . 1055 | 2477 |
| BRAMY2047676 | 290 | 30 . . . 677 | 2478 |
| BRAMY2047746 | 291 | 109 . . . 1566 | 2479 |
| BRAMY2047751 | 292 | 859 . . . 2040 | 2480 |
| BRAMY2047765 | 293 | 2247 . . . 2549 | 2481 |
| BRAMY2047884 | 294 | 873 . . . 1199 | 2482 |
| BRAMY3000206 | 295 | 1072 . . . 1689 | 2483 |
| BRAMY3000213 | 296 | 2109 . . . 2888 | 2484 |
| BRAMY3001401 | 297 | 109 . . . 594 | 2485 |
| BRAMY3001794 | 298 | 51 . . . 1322 | 2486 |
| BRAMY3002312 | 299 | 58 . . . 372 | 2487 |
| BRAMY3002620 | 300 | 113 . . . 2752 | 2488 |
| BRAMY3002803 | 301 | 913 . . . 2823 | 2489 |
| BRAMY3002805 | 302 | 2036 . . . 2371 | 2490 |
| BRAMY3004224 | 303 | 414 . . . 1526 | 2491 |
| BRAMY3004672 | 304 | 1926 . . . 2402 | 2492 |
| BRAMY3004900 | 305 | 165 . . . 635 | 2493 |
| BRAMY3004919 | 306 | 539 . . . 3298 | 2494 |
| BRAMY3005091 | 307 | 592 . . . 1311 | 2495 |
| BRAMY3005932 | 308 | 2455 . . . 3075 | 2496 |
| BRAMY3006297 | 309 | 76 . . . 456 | 2497 |
| BRAMY3007206 | 310 | 720 . . . 1901 | 2498 |
| BRAMY3007609 | 311 | 744 . . . 1745 | 2499 |
| BRAMY3008466 | 312 | 1458 . . . 2342 | 2500 |
| BRAMY3008505 | 313 | 2733 . . . 3125 | 2501 |
| BRAMY3008650 | 314 | 656 . . . 958 | 2502 |
| BRAMY3009811 | 315 | 1842 . . . 2321 | 2503 |
| BRAMY3010411 | 316 | 707 . . . 1066 | 2504 |
| BRAMY4000095 | 317 | 736 . . . 2487 | 2505 |
| BRAMY4000229 | 318 | 1214 . . . 1957 | 2506 |
| BRAMY4000277 | 319 | 1027 . . . 2064 | 2507 |
| BRASW1000053 | 320 | 1315 . . . 1632 | 2508 |
| BRASW1000125 | 321 | 1099 . . . 1443 | 2509 |
| BRAWH1000127 | 322 | 622 . . . 1353 | 2510 |
| BRAWH2001395 | 323 | 696 . . . 1130 | 2511 |
| BRAWH2001671 | 324 | 1559 . . . 2077 | 2512 |
| BRAWH2001940 | 325 | 172 . . . 2208 | 2513 |
| BRAWH2001973 | 326 | 133 . . . 498 | 2514 |
| BRAWH2002560 | 327 | 176 . . . 2476 | 2515 |
| BRAWH2002761 | 328 | 555 . . . 1079 | 2516 |
| BRAWH2005315 | 329 | 161 . . . 1615 | 2517 |
| BRAWH2007658 | 330 | 45 . . . 1148 | 2518 |
| BRAWH2010000 | 331 | 275 . . . 2155 | 2519 |
| BRAWH2010084 | 332 | 1682 . . . 2191 | 2520 |
| BRAWH2010536 | 333 | 448 . . . 1284 | 2521 |
| BRAWH2012162 | 334 | 512 . . . 2068 | 2522 |
| BRAWH2012326 | 335 | 115 . . . 426 | 2523 |
| BRAWH2013294 | 336 | 762 . . . 1148 | 2524 |
| BRAWH2013871 | 337 | 756 . . . 1151 | 2525 |
| BRAWH2014414 | 338 | 266 . . . 2794 | 2526 |
| BRAWH2014645 | 339 | 940 . . . 1632 | 2527 |
| BRAWH2014662 | 340 | 285 . . . 1706 | 2528 |
| BRAWH2014876 | 341 | 148 . . . 840 | 2529 |
| BRAWH2014954 | 342 | 377 . . . >2183 | 2530 |
| BRAWH2016221 | 343 | 1235 . . . 1891 | 2531 |
| BRAWH2016439 | 344 | 2332 . . . 2754 | 2532 |
| BRAWH2016702 | 345 | 1328 . . . 2347 | 2533 |
| BRAWH2016724 | 346 | 846 . . . 1292 | 2534 |
| BRAWH3000078 | 347 | 290 . . . 805 | 2535 |
| BRAWH3000100 | 348 | 3063 . . . 5708 | 2536 |
| BRAWH3000314 | 349 | 1322 . . . 3064 | 2537 |
| BRAWH3000345 | 350 | 1135 . . . 1452 | 2538 |
| BRAWH3000491 | 351 | 590 . . . 913 | 2539 |
| BRAWH3001326 | 352 | 73 . . . 987 | 2540 |
| BRAWH3001475 | 353 | 75 . . . 377 | 2541 |
| BRAWH3001891 | 354 | 11 . . . 1141 | 2542 |
| BRAWH3002574 | 355 | 1585 . . . 2217 | 2543 |
| BRAWH3002600 | 356 | 104 . . . 1795 | 2544 |
| BRAWH3002819 | 357 | 2589 . . . 3233 | 2545 |
| BRAWH3002821 | 358 | 383 . . . 3064 | 2546 |
| BRAWH3003522 | 359 | 69 . . . 554 | 2547 |
| BRAWH3003555 | 360 | 1048 . . . 1545 | 2548 |
| BRAWH3003727 | 361 | 1386 . . . 1694 | 2549 |
| BRAWH3003801 | 362 | 2985 . . . 3470 | 2550 |
| BRAWH3003992 | 363 | 2123 . . . 2677 | 2551 |
| BRAWH3004453 | 364 | 1891 . . . 2346 | 2552 |
| BRAWH3004666 | 365 | 1158 . . . 1562 | 2553 |
| BRAWH3005132 | 366 | 2935 . . . 3333 | 2554 |
| BRAWH3005422 | 367 | 14 . . . 535 | 2555 |
| BRAWH3005912 | 368 | 1384 . . . 3516 | 2556 |
| BRAWH3005981 | 369 | 160 . . . 2685 | 2557 |
| BRAWH3006548 | 370 | 2431 . . . 2760 | 2558 |
| BRAWH3006792 | 371 | 681 . . . 1313 | 2559 |
| BRAWH3007221 | 372 | 854 . . . 1345 | 2560 |
| BRAWH3007506 | 373 | 986 . . . 1459 | 2561 |
| BRAWH3007592 | 374 | 2933 . . . 3331 | 2562 |
| BRAWH3007726 | 375 | 352 . . . 780 | 2563 |
| BRAWH3007783 | 376 | 779 . . . 1435 | 2564 |
| BRAWH3008341 | 377 | 1608 . . . 2198 | 2565 |
| BRAWH3008634 | 378 | 1099 . . . 1515 | 2566 |
| BRAWH3008697 | 379 | 605 . . . 1294 | 2567 |
| BRAWH3008931 | 380 | 11 . . . 469 | 2568 |
| BRAWH3009297 | 381 | 1581 . . . 2141 | 2569 |
| BRCAN2002562 | 382 | 215 . . . 880 | 2570 |
| BRCAN2002856 | 383 | 380 . . . 1114 | 2571 |
| BRCAN2002944 | 384 | 22 . . . 609 | 2572 |
| BRCAN2002948 | 385 | 42 . . . 431 | 2573 |
| BRCAN2003703 | 386 | 579 . . . 1157 | 2574 |
| BRCAN2003746 | 387 | 1773 . . . 2543 | 2575 |
| BRCAN2003987 | 388 | 142 . . . 447 | 2576 |
| BRCAN2004355 | 389 | 722 . . . 1024 | 2577 |
| BRCAN2005436 | 390 | 45 . . . 764 | 2578 |
| BRCAN2006063 | 391 | 547 . . . 1278 | 2579 |
| BRCAN2006290 | 392 | 117 . . . 419 | 2580 |
| BRCAN2006297 | 393 | 490 . . . 999 | 2581 |
| BRCAN2006450 | 394 | 3 . . . 320 | 2582 |
| BRCAN2007144 | 395 | 94 . . . 636 | 2583 |
| BRCAN2007409 | 396 | 2280 . . . >2620 | 2584 |
| BRCAN2007426 | 397 | 62 . . . 601 | 2585 |
| BRCAN2008528 | 398 | 311 . . . 1231 | 2586 |
| BRCAN2009203 | 399 | 1077 . . . 2408 | 2587 |
| BRCAN2009432 | 400 | 95 . . . 646 | 2588 |
| BRCAN2010376 | 401 | 227 . . . 571 | 2589 |
| BRCAN2011254 | 402 | 252 . . . 557 | 2590 |
| BRCAN2011602 | 403 | 224 . . . 748 | 2591 |
| BRCAN2012355 | 404 | 467 . . . 1009 | 2592 |
| BRCAN2012481 | 405 | 240 . . . 566 | 2593 |
| BRCAN2013655 | 406 | 268 . . . 606 | 2594 |
| BRCAN2013660 | 407 | 216 . . . 641 | 2595 |
| BRCAN2014143 | 408 | 15 . . . 584 | 2596 |
| BRCAN2014602 | 409 | 94 . . . 870 | 2597 |
| BRCAN2014881 | 410 | 279 . . . 758 | 2598 |
| BRCAN2015371 | 411 | 49 . . . 432 | 2599 |
| BRCAN2015464 | 412 | 491 . . . 955 | 2600 |
| BRCAN2016433 | 413 | 1679 . . . 1993 | 2601 |
| BRCAN2016619 | 414 | 77 . . . 2743 | 2602 |
| BRCAN2017442 | 415 | 82 . . . 492 | 2603 |
| BRCAN2017717 | 416 | 63 . . . 377 | 2604 |
| BRCAN2017905 | 417 | 38 . . . 532 | 2605 |
| BRCAN2018935 | 418 | 156 . . . 719 | 2606 |
| BRCAN2019387 | 419 | 9 . . . 314 | 2607 |
| BRCAN2020710 | 420 | 1738 . . . 2043 | 2608 |
| BRCAN2021028 | 421 | 94 . . . 1734 | 2609 |
| BRCAN2024451 | 422 | 184 . . . 1227 | 2610 |
| BRCAN2024563 | 423 | 1 . . . 384 | 2611 |
| BRCAN2025712 | 424 | 780 . . . 1187 | 2612 |
| BRCAN2028355 | 425 | 78 . . . 1805 | 2613 |
| BRCOC2000670 | 426 | 326 . . . 628 | 2614 |
| BRCOC2001505 | 427 | 1470 . . . 1904 | 2615 |
| BRCOC2003213 | 428 | 1821 . . . 3143 | 2616 |
| BRCOC2007034 | 429 | 404 . . . 931 | 2617 |
| BRCOC2014033 | 430 | 359 . . . 709 | 2618 |
| BRCOC2016525 | 431 | 153 . . . 1997 | 2619 |
| BRCOC2019934 | 432 | 5 . . . 385 | 2620 |
| BRCOC2020142 | 433 | 741 . . . 1130 | 2621 |
| BRHIP2000691 | 434 | 1545 . . . 1910 | 2622 |
| BRHIP2000819 | 435 | 1030 . . . 1611 | 2623 |
| BRHIP2000826 | 436 | 137 . . . 442 | 2624 |
| BRHIP2000920 | 437 | 836 . . . 1567 | 2625 |
| BRHIP2001074 | 438 | 553 . . . 1581 | 2626 |
| BRHIP2001805 | 439 | 70 . . . 528 | 2627 |
| BRHIP2001927 | 440 | 2 . . . 340 | 2628 |
| BRHIP2002122 | 441 | 530 . . . 1153 | 2629 |
| BRHIP2002172 | 442 | 673 . . . 2031 | 2630 |
| BRHIP2002346 | 443 | 159 . . . 1097 | 2631 |
| BRHIP2003242 | 444 | 72 . . . 575 | 2632 |
| BRHIP2003786 | 445 | 199 . . . 2013 | 2633 |
| BRHIP2003917 | 446 | 1870 . . . 2316 | 2634 |
| BRHIP2004312 | 447 | 1748 . . . 2200 | 2635 |
| BRHIP2004359 | 448 | 663 . . . 2027 | 2636 |
| BRHIP2004814 | 449 | 642 . . . 1778 | 2637 |
| BRHIP2004883 | 450 | 221 . . . 526 | 2638 |
| BRHIP2005236 | 451 | 709 . . . 1860 | 2639 |
| BRHIP2005354 | 452 | 569 . . . 1057 | 2640 |
| BRHIP2005600 | 453 | 492 . . . 1187 | 2641 |
| BRHIP2005719 | 454 | 445 . . . 909 | 2642 |
| BRHIP2005752 | 455 | 876 . . . 1919 | 2643 |
| BRHIP2005932 | 456 | 212 . . . 652 | 2644 |
| BRHIP2006800 | 457 | 178 . . . 774 | 2645 |
| BRHIP2007616 | 458 | 136 . . . 1614 | 2646 |
| BRHIP2007741 | 459 | 811 . . . 1122 | 2647 |
| BRHIP2009340 | 460 | 72 . . . 374 | 2648 |
| BRHIP2009414 | 461 | 828 . . . 1541 | 2649 |
| BRHIP2009474 | 462 | 38 . . . 469 | 2650 |
| BRHIP2013699 | 463 | 816 . . . 1328 | 2651 |
| BRHIP2014228 | 464 | 444 . . . 869 | 2652 |
| BRHIP2021615 | 465 | 282 . . . 1310 | 2653 |
| BRHIP2022221 | 466 | 2101 . . . 2478 | 2654 |
| BRHIP2024146 | 467 | 177 . . . 539 | 2655 |
| BRHIP2024165 | 468 | 923 . . . 1294 | 2656 |
| BRHIP2026061 | 469 | 282 . . . 1022 | 2657 |
| BRHIP2026288 | 470 | 668 . . . 1681 | 2658 |
| BRHIP2029176 | 471 | 778 . . . 1224 | 2659 |
| BRHIP2029393 | 472 | 2401 . . . 2931 | 2660 |
| BRHIP3000339 | 473 | 2793 . . . 3227 | 2661 |
| BRHIP3000526 | 474 | 107 . . . 2830 | 2662 |
| BRHIP3001283 | 475 | 626 . . . 1645 | 2663 |
| BRHIP3006683 | 476 | 292 . . . 630 | 2664 |
| BRHIP3007483 | 477 | 2669 . . . 3082 | 2665 |
| BRHIP3007586 | 478 | 1409 . . . 2047 | 2666 |
| BRHIP3008183 | 479 | 607 . . . 3861 | 2667 |
| BRHIP3008313 | 480 | 1604 . . . 2353 | 2668 |
| BRHIP3008344 | 481 | 1878 . . . 3719 | 2669 |
| BRHIP3008405 | 482 | 2679 . . . 3668 | 2670 |
| BRHIP3008565 | 483 | 1696 . . . 2055 | 2671 |
| BRHIP3008598 | 484 | 612 . . . 1079 | 2672 |
| BRHIP3008997 | 485 | 1196 . . . 1579 | 2673 |
| BRHIP3009099 | 486 | 74 . . . 892 | 2674 |
| BRHIP3009448 | 487 | 2785 . . . 3354 | 2675 |
| BRHIP3011241 | 488 | 220 . . . 642 | 2676 |
| BRHIP3013765 | 489 | 91 . . . 486 | 2677 |
| BRHIP3013897 | 490 | 2340 . . . 2843 | 2678 |
| BRHIP3015751 | 491 | 2103 . . . 2516 | 2679 |
| BRHIP3016213 | 492 | 402 . . . 1202 | 2680 |
| BRHIP3018797 | 493 | 2687 . . . 3004 | 2681 |
| BRHIP3020182 | 494 | 1515 . . . 2087 | 2682 |
| BRHIP3024118 | 495 | 67 . . . 1131 | 2683 |
| BRHIP3024533 | 496 | 236 . . . >3741 | 2684 |
| BRHIP3024725 | 497 | 1840 . . . 4176 | 2685 |
| BRHIP3025161 | 498 | 225 . . . 4517 | 2686 |
| BRHIP3025702 | 499 | 3307 . . . 3609 | 2687 |
| BRHIP3026097 | 500 | 1387 . . . 1773 | 2688 |
| BRHIP3027137 | 501 | 261 . . . 1673 | 2689 |
| BRHIP3027854 | 502 | 2503 . . . 3213 | 2690 |
| BRSSN2000684 | 503 | 166 . . . >1937 | 2691 |
| BRSSN2003086 | 504 | 1 . . . 342 | 2692 |
| BRSSN2004496 | 505 | 303 . . . 1469 | 2693 |
| BRSSN2004719 | 506 | 62 . . . 784 | 2694 |
| BRSSN2006892 | 507 | 1899 . . . 2396 | 2695 |
| BRSSN2008549 | 508 | 563 . . . 1564 | 2696 |
| BRSSN2008797 | 509 | 57 . . . 1571 | 2697 |
| BRSSN2011262 | 510 | 326 . . . 694 | 2698 |
| BRSSN2011738 | 511 | 1587 . . . 1928 | 2699 |
| BRSSN2013874 | 512 | 1430 . . . 1894 | 2700 |
| BRSSN2014299 | 513 | 641 . . . 1855 | 2701 |
| BRSSN2014424 | 514 | 861 . . . 2201 | 2702 |
| BRSSN2014556 | 515 | 359 . . . 679 | 2703 |
| BRSSN2018581 | 516 | 1440 . . . 1757 | 2704 |
| BRSSN2018925 | 517 | 31 . . . 372 | 2705 |
| BRSTN2000872 | 518 | 537 . . . 1649 | 2706 |
| BRSTN2001067 | 519 | 698 . . . 1048 | 2707 |
| BRSTN2001613 | 520 | 98 . . . 754 | 2708 |
| BRSTN2002400 | 521 | 82 . . . 1170 | 2709 |
| BRSTN2003835 | 522 | 25 . . . 420 | 2710 |
| BRSTN2004863 | 523 | 438 . . . 2264 | 2711 |
| BRSTN2004987 | 524 | 11 . . . 1093 | 2712 |
| BRSTN2005721 | 525 | 415 . . . 1302 | 2713 |
| BRSTN2006865 | 526 | 693 . . . 1559 | 2714 |
| BRSTN2007000 | 527 | 115 . . . 492 | 2715 |
| BRSTN2007284 | 528 | 96 . . . 608 | 2716 |
| BRSTN2008052 | 529 | 133 . . . 483 | 2717 |
| BRSTN2008283 | 530 | 179 . . . 484 | 2718 |
| BRSTN2008418 | 531 | 468 . . . 1013 | 2719 |
| BRSTN2008457 | 532 | 942 . . . 1331 | 2720 |
| BRSTN2009899 | 533 | 707 . . . 1135 | 2721 |
| BRSTN2010363 | 534 | 1125 . . . 1901 | 2722 |
| BRSTN2010500 | 535 | 703 . . . 1134 | 2723 |
| BRSTN2010750 | 536 | 247 . . . 1290 | 2724 |
| BRSTN2012320 | 537 | 300 . . . 686 | 2725 |
| BRSTN2012380 | 538 | 1068 . . . 1439 | 2726 |
| BRSTN2013741 | 539 | 648 . . . 1274 | 2727 |
| BRSTN2015015 | 540 | 1290 . . . 1610 | 2728 |
| BRSTN2016470 | 541 | 479 . . . 814 | 2729 |
| BRSTN2016678 | 542 | 97 . . . 486 | 2730 |
| BRSTN2017084 | 543 | 53 . . . 397 | 2731 |
| BRSTN2017110 | 544 | 128 . . . 562 | 2732 |
| BRSTN2017237 | 545 | 42 . . . 1466 | 2733 |
| BRSTN2017771 | 546 | 1018 . . . 1332 | 2734 |
| BRSTN2018083 | 547 | 309 . . . 641 | 2735 |
| BRSTN2019129 | 548 | 1004 . . . 1459 | 2736 |
| BRTHA1000311 | 549 | 210 . . . 680 | 2737 |
| BRTHA2000855 | 550 | 149 . . . >2176 | 2738 |
| BRTHA2001462 | 551 | 710 . . . 1555 | 2739 |
| BRTHA2002115 | 552 | 947 . . . 1267 | 2740 |
| BRTHA2002281 | 553 | 856 . . . 1767 | 2741 |
| BRTHA2002376 | 554 | 124 . . . 513 | 2742 |
| BRTHA2002442 | 555 | 28 . . . 630 | 2743 |
| BRTHA2002493 | 556 | 400 . . . 735 | 2744 |
| BRTHA2002608 | 557 | 1100 . . . 1495 | 2745 |
| BRTHA2002808 | 558 | 1010 . . . 1456 | 2746 |
| BRTHA2003030 | 559 | 501 . . . 875 | 2747 |
| BRTHA2003110 | 560 | 1429 . . . 2010 | 2748 |
| BRTHA2003116 | 561 | 78 . . . 476 | 2749 |
| BRTHA2003461 | 562 | 2179 . . . 2709 | 2750 |
| BRTHA2004821 | 563 | 1764 . . . 2273 | 2751 |
| BRTHA2004978 | 564 | 125 . . . 937 | 2752 |
| BRTHA2005579 | 565 | 44 . . . 2488 | 2753 |
| BRTHA2005956 | 566 | 1466 . . . 1882 | 2754 |
| BRTHA2006075 | 567 | 591 . . . 995 | 2755 |
| BRTHA2006146 | 568 | 24 . . . 569 | 2756 |
| BRTHA2006194 | 569 | 129 . . . 506 | 2757 |
| BRTHA2007122 | 570 | 297 . . . 2267 | 2758 |
| BRTHA2007422 | 571 | 114 . . . 632 | 2759 |
| BRTHA2007603 | 572 | 534 . . . 962 | 2760 |
| BRTHA2008316 | 573 | 124 . . . 429 | 2761 |
| BRTHA2008335 | 574 | 1205 . . . 1747 | 2762 |
| BRTHA2008527 | 575 | 54 . . . 680 | 2763 |
| BRTHA2008535 | 576 | 2076 . . . 2597 | 2764 |
| BRTHA2008955 | 577 | 427 . . . 1395 | 2765 |
| BRTHA2009311 | 578 | 47 . . . 502 | 2766 |
| BRTHA2009846 | 579 | 492 . . . 881 | 2767 |
| BRTHA2009972 | 580 | 134 . . . 493 | 2768 |
| BRTHA2010073 | 581 | 1064 . . . 1399 | 2769 |
| BRTHA2010608 | 582 | 926 . . . 1354 | 2770 |
| BRTHA2010884 | 583 | 76 . . . 1305 | 2771 |
| BRTHA2010907 | 584 | 78 . . . 806 | 2772 |
| BRTHA2011194 | 585 | 2370 . . . 2720 | 2773 |
| BRTHA2011351 | 586 | 18 . . . 905 | 2774 |
| BRTHA2011500 | 587 | 123 . . . 476 | 2775 |
| BRTHA2011641 | 588 | 47 . . . 562 | 2776 |
| BRTHA2012392 | 589 | 1425 . . . 2021 | 2777 |
| BRTHA2012562 | 590 | 1649 . . . 1963 | 2778 |
| BRTHA2012980 | 591 | 610 . . . 1290 | 2779 |
| BRTHA2013262 | 592 | 138 . . . 794 | 2780 |
| BRTHA2013460 | 593 | 379 . . . 732 | 2781 |
| BRTHA2013707 | 594 | 244 . . . 657 | 2782 |
| BRTHA2014792 | 595 | 221 . . . 1663 | 2783 |
| BRTHA2014828 | 596 | 667 . . . 1158 | 2784 |
| BRTHA2015406 | 597 | 162 . . . 1583 | 2785 |
| BRTHA2015478 | 598 | 111 . . . 419 | 2786 |
| BRTHA2015696 | 599 | 1109 . . . 1657 | 2787 |
| BRTHA2015878 | 600 | 433 . . . 1902 | 2788 |
| BRTHA2016215 | 601 | 1831 . . . 2280 | 2789 |
| BRTHA2016496 | 602 | 76 . . . 1527 | 2790 |
| BRTHA2016543 | 603 | 310 . . . 636 | 2791 |
| BRTHA2017353 | 604 | 68 . . . 1027 | 2792 |
| BRTHA2017985 | 605 | 166 . . . 474 | 2793 |
| BRTHA2018165 | 606 | 1224 . . . 1550 | 2794 |
| BRTHA2018344 | 607 | 1064 . . . 1402 | 2795 |
| BRTHA2018591 | 608 | 515 . . . 1195 | 2796 |
| BRTHA2018624 | 609 | 1253 . . . 2293 | 2797 |
| BRTHA2018707 | 610 | 1333 . . . 1791 | 2798 |
| BRTHA2019014 | 611 | 134 . . . 451 | 2799 |
| BRTHA2019022 | 612 | 189 . . . 494 | 2800 |
| BRTHA2019048 | 613 | 52 . . . 549 | 2801 |
| BRTHA3000273 | 614 | 128 . . . 694 | 2802 |
| BRTHA3000297 | 615 | 1553 . . . 2083 | 2803 |
| BRTHA3000633 | 616 | 40 . . . 858 | 2804 |
| BRTHA3001721 | 617 | 382 . . . 963 | 2805 |
| BRTHA3002401 | 618 | 944 . . . 1396 | 2806 |
| BRTHA3002427 | 619 | 871 . . . 2589 | 2807 |
| BRTHA3002933 | 620 | 835 . . . 1908 | 2808 |
| BRTHA3003074 | 621 | 545 . . . 2050 | 2809 |
| BRTHA3003343 | 622 | 1938 . . . 2639 | 2810 |
| BRTHA3003449 | 623 | 1281 . . . 2612 | 2811 |
| BRTHA3003474 | 624 | 6 . . . 410 | 2812 |
| BRTHA3003490 | 625 | 22 . . . 3783 | 2813 |
| BRTHA3004475 | 626 | 1777 . . . 2196 | 2814 |
| BRTHA3005046 | 627 | 14 . . . 415 | 2815 |
| BRTHA3006856 | 628 | 241 . . . 624 | 2816 |
| BRTHA3007113 | 629 | 656 . . . 1657 | 2817 |
| BRTHA3007148 | 630 | 70 . . . 960 | 2818 |
| BRTHA3007319 | 631 | 1348 . . . 1995 | 2819 |
| BRTHA3007769 | 632 | 17 . . . 4579 | 2820 |
| BRTHA3008143 | 633 | 1649 . . . 1987 | 2821 |
| BRTHA3008310 | 634 | 1333 . . . 2673 | 2822 |
| BRTHA3008386 | 635 | 599 . . . 1921 | 2823 |
| BRTHA3008520 | 636 | 1670 . . . 2659 | 2824 |
| BRTHA3008778 | 637 | 1533 . . . 3353 | 2825 |
| BRTHA3009037 | 638 | 175 . . . 3441 | 2826 |
| BRTHA3009090 | 639 | 188 . . . 4141 | 2827 |
| BRTHA3009291 | 640 | 174 . . . 782 | 2828 |
| BRTHA3010366 | 641 | 1998 . . . 3029 | 2829 |
| BRTHA3013884 | 642 | 1085 . . . 3331 | 2830 |
| BRTHA3015815 | 643 | 1172 . . . 2122 | 2831 |
| BRTHA3015910 | 644 | 944 . . . 2899 | 2832 |
| BRTHA3016845 | 645 | 403 . . . 771 | 2833 |
| BRTHA3016917 | 646 | 1674 . . . 3179 | 2834 |
| BRTHA3017047 | 647 | 146 . . . 1060 | 2835 |
| BRTHA3017589 | 648 | 14 . . . 793 | 2836 |
| BRTHA3017848 | 649 | 218 . . . 1342 | 2837 |
| BRTHA3018514 | 650 | 416 . . . 1567 | 2838 |
| BRTHA3018617 | 651 | 28 . . . 522 | 2839 |
| BRTHA3018656 | 652 | 247 . . . 1338 | 2840 |
| BRTHA3019105 | 653 | 266 . . . 682 | 2841 |
| CERVX1000042 | 654 | 3 . . . 536 | 2842 |
| CERVX2002006 | 655 | 874 . . . 1257 | 2843 |
| COLON1000030 | 656 | 607 . . . 1170 | 2844 |
| COLON2000470 | 657 | 9 . . . 656 | 2845 |
| COLON2000568 | 658 | 73 . . . 1506 | 2846 |
| COLON2001721 | 659 | 1274 . . . 1981 | 2847 |
| COLON2002443 | 660 | 13 . . . 447 | 2848 |
| COLON2002520 | 661 | 1243 . . . >3130 | 2849 |
| COLON2003043 | 662 | 3 . . . 311 | 2850 |
| COLON2004478 | 663 | 81 . . . 1565 | 2851 |
| COLON2005126 | 664 | 244 . . . 747 | 2852 |
| COLON2005772 | 665 | 286 . . . 816 | 2853 |
| COLON2006282 | 666 | 200 . . . 505 | 2854 |
| COLON2009499 | 667 | 13 . . . 345 | 2855 |
| CORDB1000140 | 668 | 346 . . . 897 | 2856 |
| CORDB2000061 | 669 | 12 . . . 329 | 2857 |
| CORDB2000541 | 670 | 495 . . . 1277 | 2858 |
| CTONG1000087 | 671 | 194 . . . 2326 | 2859 |
| CTONG1000088 | 672 | 2902 . . . 3252 | 2860 |
| CTONG1000288 | 673 | 1315 . . . 1875 | 2861 |
| CTONG1000302 | 674 | 168 . . . 485 | 2862 |
| CTONG1000341 | 675 | 29 . . . 1702 | 2863 |
| CTONG1000467 | 676 | 90 . . . 2312 | 2864 |
| CTONG1000488 | 677 | 2227 . . . 2892 | 2865 |
| CTONG1000508 | 678 | 1182 . . . 2615 | 2866 |
| CTONG1000540 | 679 | 778 . . . 1428 | 2867 |
| CTONG2000042 | 680 | 75 . . . 2603 | 2868 |
| CTONG2001877 | 681 | 11 . . . 721 | 2869 |
| CTONG2004062 | 682 | 121 . . . 2268 | 2870 |
| CTONG2006798 | 683 | 423 . . . >2466 | 2871 |
| CTONG2008233 | 684 | 655 . . . 1893 | 2872 |
| CTONG2009423 | 685 | 1433 . . . 1774 | 2873 |
| CTONG2009531 | 686 | 49 . . . 543 | 2874 |
| CTONG2010803 | 687 | 1352 . . . 2464 | 2875 |
| CTONG2013178 | 688 | 50 . . . 1366 | 2876 |
| CTONG2017500 | 689 | 57 . . . 878 | 2877 |
| CTONG2019248 | 690 | 3528 . . . 3938 | 2878 |
| CTONG2019652 | 691 | 229 . . . 540 | 2879 |
| CTONG2019704 | 692 | 176 . . . 799 | 2880 |
| CTONG2019788 | 693 | 1985 . . . 2311 | 2881 |
| CTONG2019833 | 694 | 1026 . . . 1328 | 2882 |
| CTONG2020026 | 695 | 152 . . . 2845 | 2883 |
| CTONG2020127 | 696 | 1343 . . . 1774 | 2884 |
| CTONG2020522 | 697 | 191 . . . 586 | 2885 |
| CTONG2020638 | 698 | 159 . . . 986 | 2886 |
| CTONG2020806 | 699 | 436 . . . 933 | 2887 |
| CTONG2021132 | 700 | 1883 . . . 2233 | 2888 |
| CTONG2022153 | 701 | 341 . . . 787 | 2889 |
| CTONG2022601 | 702 | 1301 . . . 1621 | 2890 |
| CTONG2023021 | 703 | 2277 . . . 2840 | 2891 |
| CTONG2023512 | 704 | 311 . . . 1624 | 2892 |
| CTONG2024206 | 705 | 322 . . . 2499 | 2893 |
| CTONG2024749 | 706 | 129 . . . 2198 | 2894 |
| CTONG2025496 | 707 | 151 . . . 3015 | 2895 |
| CTONG2025516 | 708 | 459 . . . 773 | 2896 |
| CTONG2025900 | 709 | 135 . . . 2399 | 2897 |
| CTONG2026920 | 710 | 363 . . . 689 | 2898 |
| CTONG2027327 | 711 | 396 . . . 719 | 2899 |
| CTONG2028124 | 712 | 761 . . . 2683 | 2900 |
| CTONG2028687 | 713 | 654 . . . 1967 | 2901 |
| CTONG3000084 | 714 | 1 . . . 3111 | 2902 |
| CTONG3000657 | 715 | 31 . . . 732 | 2903 |
| CTONG3000686 | 716 | 2605 . . . 3294 | 2904 |
| CTONG3000707 | 717 | 2912 . . . 3265 | 2905 |
| CTONG3000896 | 718 | 3245 . . . 3676 | 2906 |
| CTONG3001123 | 719 | 285 . . . 3392 | 2907 |
| CTONG3001370 | 720 | 26 . . . 3922 | 2908 |
| CTONG3001420 | 721 | 536 . . . 850 | 2909 |
| CTONG3001560 | 722 | 19 . . . 450 | 2910 |
| CTONG3002020 | 723 | 242 . . . 673 | 2911 |
| CTONG3002127 | 724 | 1264 . . . 2604 | 2912 |
| CTONG3002412 | 725 | 1782 . . . >3812 | 2913 |
| CTONG3002674 | 726 | 258 . . . >4088 | 2914 |
| CTONG3003179 | 727 | 2650 . . . 3144 | 2915 |
| CTONG3003483 | 728 | 3006 . . . 3332 | 2916 |
| CTONG3003652 | 729 | 229 . . . 3372 | 2917 |
| CTONG3003654 | 730 | 1865 . . . 2263 | 2918 |
| CTONG3003737 | 731 | 87 . . . 1832 | 2919 |
| CTONG3003905 | 732 | 75 . . . 3833 | 2920 |
| CTONG3003972 | 733 | 203 . . . 2167 | 2921 |
| CTONG3004072 | 734 | 110 . . . 3784 | 2922 |
| CTONG3004712 | 735 | 3159 . . . 3890 | 2923 |
| CTONG3005325 | 736 | 210 . . . 3044 | 2924 |
| CTONG3005648 | 737 | 180 . . . 1061 | 2925 |
| CTONG3005713 | 738 | 42 . . . 902 | 2926 |
| CTONG3005813 | 739 | 173 . . . 991 | 2927 |
| CTONG3006067 | 740 | 194 . . . 583 | 2928 |
| CTONG3006186 | 741 | 208 . . . 1869 | 2929 |
| CTONG3006650 | 742 | 299 . . . 649 | 2930 |
| CTONG3007444 | 743 | 1638 . . . 2039 | 2931 |
| CTONG3007528 | 744 | 177 . . . 962 | 2932 |
| CTONG3007586 | 745 | 27 . . . 3089 | 2933 |
| CTONG3007870 | 746 | 1402 . . . 2064 | 2934 |
| CTONG3008252 | 747 | 216 . . . 572 | 2935 |
| CTONG3008258 | 748 | 194 . . . 2320 | 2936 |
| CTONG3008496 | 749 | 1412 . . . 1774 | 2937 |
| CTONG3008566 | 750 | 2577 . . . 3113 | 2938 |
| CTONG3008639 | 751 | 102 . . . >4092 | 2939 |
| CTONG3008831 | 752 | 198 . . . 3077 | 2940 |
| CTONG3008894 | 753 | 1230 . . . 2411 | 2941 |
| CTONG3008951 | 754 | 3010 . . . 3438 | 2942 |
| CTONG3009028 | 755 | 25 . . . 3954 | 2943 |
| CTONG3009227 | 756 | 1948 . . . 2337 | 2944 |
| CTONG3009239 | 757 | 2907 . . . 3275 | 2945 |
| CTONG3009328 | 758 | 101 . . . 1291 | 2946 |
| CTONG3009385 | 759 | 795 . . . 2390 | 2947 |
| D30ST2002182 | 760 | 79 . . . 1308 | 2948 |
| D30ST2002648 | 761 | 215 . . . 1225 | 2949 |
| D30ST3000169 | 762 | 83 . . . 1204 | 2950 |
| DFNES1000107 | 763 | 651 . . . 986 | 2951 |
| DFNES2000146 | 764 | 56 . . . 520 | 2952 |
| DFNES2001108 | 765 | 435 . . . 854 | 2953 |
| DFNES2005266 | 766 | 285 . . . 926 | 2954 |
| DFNES2010502 | 767 | 108 . . . 479 | 2955 |
| DFNES2011239 | 768 | 80 . . . 1081 | 2956 |
| DFNES2011499 | 769 | 206 . . . 595 | 2957 |
| ERLTF2000324 | 770 | 66 . . . 641 | 2958 |
| FCBBF1000297 | 771 | 1409 . . . >2811 | 2959 |
| FCBBF2001183 | 772 | 951 . . . 1559 | 2960 |
| FCBBF2007510 | 773 | 474 . . . 1082 | 2961 |
| FCBBF3001977 | 774 | 1167 . . . 1535 | 2962 |
| FCBBF3002163 | 775 | 86 . . . 2905 | 2963 |
| FCBBF3003435 | 776 | 618 . . . 926 | 2964 |
| FCBBF3004502 | 777 | 145 . . . 2565 | 2965 |
| FCBBF3004847 | 778 | 378 . . . 830 | 2966 |
| FCBBF3006171 | 779 | 599 . . . 913 | 2967 |
| FCBBF3007242 | 780 | 93 . . . 416 | 2968 |
| FCBBF3007540 | 781 | 307 . . . 1269 | 2969 |
| FCBBF3008944 | 782 | 772 . . . 1377 | 2970 |
| FCBBF3009888 | 783 | 103 . . . 597 | 2971 |
| FCBBF3012170 | 784 | 89 . . . 1054 | 2972 |
| FCBBF3012288 | 785 | 1881 . . . 2906 | 2973 |
| FCBBF3013307 | 786 | 300 . . . >2766 | 2974 |
| FCBBF3013846 | 787 | 2050 . . . 2673 | 2975 |
| FCBBF3021576 | 788 | 304 . . . 678 | 2976 |
| FCBBF3021940 | 789 | 353 . . . 772 | 2977 |
| FCBBF3023443 | 790 | 1109 . . . 1495 | 2978 |
| FCBBF3023895 | 791 | 702 . . . 1409 | 2979 |
| FCBBF3025730 | 792 | 333 . . . 941 | 2980 |
| FCBBF3027717 | 793 | 218 . . . >4477 | 2981 |
| FCBBF4000076 | 794 | 225 . . . 566 | 2982 |
| FEBRA1000030 | 795 | 735 . . . 1358 | 2983 |
| FEBRA2000253 | 796 | 1692 . . . 2822 | 2984 |
| FEBRA2006396 | 797 | 442 . . . 1521 | 2985 |
| FEBRA2007544 | 798 | 321 . . . 1874 | 2986 |
| FEBRA2007708 | 799 | 356 . . . 1981 | 2987 |
| FEBRA2007793 | 800 | 407 . . . 973 | 2988 |
| FEBRA2007801 | 801 | 362 . . . 2185 | 2989 |
| FEBRA2008287 | 802 | 1110 . . . 2531 | 2990 |
| FEBRA2008311 | 803 | 80 . . . 1339 | 2991 |
| FEBRA2008360 | 804 | 428 . . . 997 | 2992 |
| FEBRA2008468 | 805 | 291 . . . 1496 | 2993 |
| FEBRA2010719 | 806 | 348 . . . 995 | 2994 |
| FEBRA2014213 | 807 | 407 . . . 1483 | 2995 |
| FEBRA2015588 | 808 | 1131 . . . 1916 | 2996 |
| FEBRA2020484 | 809 | 1160 . . . 1615 | 2997 |
| FEBRA2020582 | 810 | 289 . . . 729 | 2998 |
| FEBRA2020668 | 811 | 787 . . . 1839 | 2999 |
| FEBRA2020886 | 812 | 1749 . . . 2342 | 3000 |
| FEBRA2021339 | 813 | 441 . . . 914 | 3001 |
| FEBRA2021571 | 814 | 566 . . . 1591 | 3002 |
| FEBRA2021908 | 815 | 181 . . . 588 | 3003 |
| FEBRA2021966 | 816 | 102 . . . 476 | 3004 |
| FEBRA2024136 | 817 | 2261 . . . 2638 | 3005 |
| FEBRA2024150 | 818 | 15 . . . 950 | 3006 |
| FEBRA2024343 | 819 | 2284 . . . 3036 | 3007 |
| FEBRA2024744 | 820 | 918 . . . 1781 | 3008 |
| FEBRA2025427 | 821 | 201 . . . 548 | 3009 |
| FEBRA2026984 | 822 | 910 . . . 2496 | 3010 |
| FEBRA2027082 | 823 | 174 . . . 509 | 3011 |
| FEBRA2027297 | 824 | 1040 . . . 1396 | 3012 |
| FEBRA2027352 | 825 | 604 . . . 1065 | 3013 |
| FEBRA2028366 | 826 | 5 . . . 994 | 3014 |
| FEBRA2028477 | 827 | 2176 . . . 2685 | 3015 |
| FEBRA2028618 | 828 | 587 . . . 1054 | 3016 |
| HCASM2001301 | 829 | 628 . . . 1050 | 3017 |
| HCASM2002502 | 830 | 112 . . . 942 | 3018 |
| HCASM2002918 | 831 | 292 . . . >1851 | 3019 |
| HCASM2003212 | 832 | 304 . . . 6 | 3020 |
| HCASM2003415 | 833 | 23 . . . 3 | 3021 |
| HCASM2007047 | 834 | 79 . . . 2250 | 3022 |
| HCASM2007737 | 835 | 54 . . . 548 | 3023 |
| HCHON2000028 | 836 | 32 . . . 2239 | 3024 |
| HCHON2000212 | 837 | 1713 . . . 2087 | 3025 |
| HCHON2000244 | 838 | 698 . . . 1528 | 3026 |
| HCHON2000418 | 839 | 1185 . . . 1487 | 3027 |
| HCHON2000626 | 840 | 1168 . . . 1578 | 3028 |
| HCHON2001084 | 841 | 164 . . . 2017 | 3029 |
| HCHON2001217 | 842 | 169 . . . 2856 | 3030 |
| HCHON2001548 | 843 | 1460 . . . 1942 | 3031 |
| HCHON2001577 | 844 | 14 . . . 1726 | 3032 |
| HCHON2001712 | 845 | 143 . . . 1624 | 3033 |
| HCHON2002676 | 846 | 42 . . . 2069 | 3034 |
| HCHON2003532 | 847 | 614 . . . 1618 | 3035 |
| HCHON2004007 | 848 | 181 . . . 1917 | 3036 |
| HCHON2004531 | 849 | 299 . . . 1528 | 3037 |
| HCHON2004776 | 850 | 158 . . . 1723 | 3038 |
| HCHON2005921 | 851 | 174 . . . 860 | 3039 |
| HCHON2006250 | 852 | 517 . . . 2151 | 3040 |
| HCHON2006714 | 853 | 51 . . . 371 | 3041 |
| HCHON2007881 | 854 | 77 . . . 1801 | 3042 |
| HCHON2008112 | 855 | 929 . . . 1462 | 3043 |
| HCHON2008444 | 856 | 1810 . . . 2112 | 3044 |
| HEART1000010 | 857 | 967 . . . 1296 | 3045 |
| HEART1000074 | 858 | 151 . . . 1626 | 3046 |
| HEART1000088 | 859 | 1567 . . . 2016 | 3047 |
| HEART1000139 | 860 | 1408 . . . 2106 | 3048 |
| HEART2001680 | 861 | 59 . . . 1549 | 3049 |
| HEART2001756 | 862 | 155 . . . 1795 | 3050 |
| HEART2006131 | 863 | 8 . . . 1717 | 3051 |
| HEART2006909 | 864 | 4 . . . 927 | 3052 |
| HEART2007031 | 865 | 106 . . . 1374 | 3053 |
| HEART2010391 | 866 | 619 . . . 1173 | 3054 |
| HEART2010492 | 867 | 91 . . . 1617 | 3055 |
| HEART2010495 | 868 | 148 . . . >2295 | 3056 |
| HHDPC1000118 | 869 | 258 . . . 2489 | 3057 |
| HHDPC2001337 | 870 | 210 . . . 566 | 3058 |
| HLUNG1000017 | 871 | 227 . . . 1054 | 3059 |
| HLUNG2000014 | 872 | 175 . . . 816 | 3060 |
| HLUNG2001996 | 873 | 990 . . . 1562 | 3061 |
| HLUNG2002465 | 874 | 72 . . . 1796 | 3062 |
| HLUNG2002958 | 875 | 123 . . . 2234 | 3063 |
| HLUNG2003003 | 876 | 459 . . . 848 | 3064 |
| HLUNG2003872 | 877 | 542 . . . 1366 | 3065 |
| HLUNG2010464 | 878 | 256 . . . 972 | 3066 |
| HLUNG2011041 | 879 | 721 . . . 1422 | 3067 |
| HLUNG2011298 | 880 | 1669 . . . 1983 | 3068 |
| HLUNG2012049 | 881 | 264 . . . 755 | 3069 |
| HLUNG2012287 | 882 | 789 . . . 1139 | 3070 |
| HLUNG2012727 | 883 | 198 . . . 1046 | 3071 |
| HLUNG2013204 | 884 | 1196 . . . 1513 | 3072 |
| HLUNG2013304 | 885 | 329 . . . 649 | 3073 |
| HLUNG2013622 | 886 | 123 . . . 440 | 3074 |
| HLUNG2013851 | 887 | 224 . . . 787 | 3075 |
| HLUNG2014262 | 888 | 189 . . . 1886 | 3076 |
| HLUNG2014288 | 889 | 192 . . . 1106 | 3077 |
| HLUNG2014449 | 890 | 2235 . . . >2713 | 3078 |
| HLUNG2015617 | 891 | 1630 . . . 1968 | 3079 |
| HLUNG2017350 | 892 | 879 . . . 1766 | 3080 |
| HLUNG2017546 | 893 | 1666 . . . 2070 | 3081 |
| HLUNG2017806 | 894 | 29 . . . 577 | 3082 |
| HLUNG2019058 | 895 | 239 . . . 568 | 3083 |
| HSYRA2004858 | 896 | 150 . . . 467 | 3084 |
| HSYRA2005456 | 897 | 61 . . . 2415 | 3085 |
| HSYRA2005496 | 898 | 36 . . . 1211 | 3086 |
| HSYRA2006873 | 899 | 590 . . . 910 | 3087 |
| HSYRA2007667 | 900 | 424 . . . 1281 | 3088 |
| HSYRA2008376 | 901 | 329 . . . 2422 | 3089 |
| HSYRA2008714 | 902 | 249 . . . 1487 | 3090 |
| HSYRA2009075 | 903 | 237 . . . 2204 | 3091 |
| HSYRA2009102 | 904 | 119 . . . 1357 | 3092 |
| IMR322000127 | 905 | 847 . . . 2271 | 3093 |
| IMR322000917 | 906 | 287 . . . 1000 | 3094 |
| IMR322001380 | 907 | 14 . . . 790 | 3095 |
| IMR322002035 | 908 | 2228 . . . 2620 | 3096 |
| IMR322002110 | 909 | 176 . . . 553 | 3097 |
| IMR322003675 | 910 | 202 . . . 978 | 3098 |
| IMR322006222 | 911 | 516 . . . 845 | 3099 |
| IMR322006495 | 912 | 63 . . . 749 | 3100 |
| IMR322006886 | 913 | 565 . . . 1224 | 3101 |
| IMR322007225 | 914 | 24 . . . 467 | 3102 |
| IMR322016146 | 915 | 112 . . . 426 | 3103 |
| IMR322018117 | 916 | 37 . . . 528 | 3104 |
| KIDNE1000064 | 917 | 302 . . . 1963 | 3105 |
| KIDNE2000665 | 918 | 379 . . . 735 | 3106 |
| KIDNE2000722 | 919 | 227 . . . 571 | 3107 |
| KIDNE2000832 | 920 | 103 . . . 1554 | 3108 |
| KIDNE2000846 | 921 | 23 . . . 700 | 3109 |
| KIDNE2001361 | 922 | 953 . . . 2056 | 3110 |
| KIDNE2001847 | 923 | 86 . . . 1240 | 3111 |
| KIDNE2002252 | 924 | 96 . . . 2543 | 3112 |
| KIDNE2002991 | 925 | 644 . . . 952 | 3113 |
| KIDNE2003837 | 926 | 1732 . . . 2073 | 3114 |
| KIDNE2005543 | 927 | 2011 . . . 2484 | 3115 |
| KIDNE2006580 | 928 | 40 . . . 1617 | 3116 |
| KIDNE2010264 | 929 | 640 . . . 1158 | 3117 |
| KIDNE2011314 | 930 | 796 . . . 1098 | 3118 |
| KIDNE2011532 | 931 | 1097 . . . 1636 | 3119 |
| KIDNE2011635 | 932 | 148 . . . 2376 | 3120 |
| KIDNE2012945 | 933 | 301 . . . 1407 | 3121 |
| KIDNE2013095 | 934 | 162 . . . 749 | 3122 |
| LIVER2007415 | 935 | 308 . . . 1144 | 3123 |
| LYMPB1000141 | 936 | 85 . . . 396 | 3124 |
| LYMPB2000083 | 937 | 35 . . . 1084 | 3125 |
| MESAN2001979 | 938 | 1199 . . . 1855 | 3126 |
| MESAN2006563 | 939 | 264 . . . 1670 | 3127 |
| MESAN2012054 | 940 | 24 . . . 1892 | 3128 |
| MESAN2014295 | 941 | 1349 . . . 1687 | 3129 |
| MESAN2015515 | 942 | 381 . . . 803 | 3130 |
| MESAN2018576 | 943 | 65 . . . 370 | 3131 |
| MESTC1000042 | 944 | 235 . . . 738 | 3132 |
| MESTC2000153 | 945 | 350 . . . 820 | 3133 |
| NB9N41000340 | 946 | 625 . . . 1032 | 3134 |
| NCRRP1000129 | 947 | 147 . . . 521 | 3135 |
| NESOP2000744 | 948 | 652 . . . 1020 | 3136 |
| NESOP2001433 | 949 | 81 . . . 1580 | 3137 |
| NESOP2001656 | 950 | 369 . . . 707 | 3138 |
| NESOP2001694 | 951 | 240 . . . 731 | 3139 |
| NESOP2001752 | 952 | 624 . . . 935 | 3140 |
| NESOP2002738 | 953 | 1342 . . . 1890 | 3141 |
| NHNPC2000606 | 954 | 1635 . . . 1949 | 3142 |
| NHNPC2000877 | 955 | 27 . . . 443 | 3143 |
| NHNPC2001223 | 956 | 2476 . . . 2790 | 3144 |
| NHNPC2001816 | 957 | 1053 . . . 1421 | 3145 |
| NHNPC2002565 | 958 | 463 . . . 1134 | 3146 |
| NHNPC2002749 | 959 | 81 . . . 605 | 3147 |
| NOVAR2000136 | 960 | 174 . . . 1481 | 3148 |
| NOVAR2000710 | 961 | 59 . . . 466 | 3149 |
| NOVAR2000962 | 962 | 25 . . . 393 | 3150 |
| NOVAR2001108 | 963 | 49 . . . 1482 | 3151 |
| NOVAR2001783 | 964 | 44 . . . 490 | 3152 |
| NT2NE2003252 | 965 | 889 . . . 1899 | 3153 |
| NT2NE2005890 | 966 | 435 . . . 740 | 3154 |
| NT2NE2006531 | 967 | 295 . . . 1812 | 3155 |
| NT2NE2006909 | 968 | 661 . . . 1647 | 3156 |
| NT2NE2008060 | 969 | 1027 . . . 1404 | 3157 |
| NT2RI2003993 | 970 | 600 . . . 1136 | 3158 |
| NT2RI2004618 | 971 | 495 . . . 1253 | 3159 |
| NT2RI2005166 | 972 | 60 . . . 1436 | 3160 |
| NT2RI2006686 | 973 | 14 . . . 1909 | 3161 |
| NT2RI2008724 | 974 | 289 . . . 1917 | 3162 |
| NT2RI2009855 | 975 | 1615 . . . 2283 | 3163 |
| NT2RI2011422 | 976 | 110 . . . 1543 | 3164 |
| NT2RI2011683 | 977 | 206 . . . 754 | 3165 |
| NT2RI2012659 | 978 | 100 . . . 528 | 3166 |
| NT2RI2012990 | 979 | 85 . . . 561 | 3167 |
| NT2RI2013357 | 980 | 287 . . . 877 | 3168 |
| NT2RI2014247 | 981 | 1608 . . . 1967 | 3169 |
| NT2RI2014551 | 982 | 52 . . . >2076 | 3170 |
| NT2RI2014733 | 983 | 638 . . . 1204 | 3171 |
| NT2RI2016128 | 984 | 173 . . . 589 | 3172 |
| NT2RI2018311 | 985 | 680 . . . 1345 | 3173 |
| NT2RI2018883 | 986 | 316 . . . 846 | 3174 |
| NT2RI2019751 | 987 | 357 . . . 743 | 3175 |
| NT2RI2023303 | 988 | 1041 . . . 1451 | 3176 |
| NT2RI2025909 | 989 | 208 . . . 1119 | 3177 |
| NT2RI2025957 | 990 | 348 . . . 2432 | 3178 |
| NT2RI2027081 | 991 | 1254 . . . 1586 | 3179 |
| NT2RI2027396 | 992 | 109 . . . 426 | 3180 |
| NT2RI3000622 | 993 | 305 . . . 964 | 3181 |
| NT2RI3001263 | 994 | 2825 . . . 3241 | 3182 |
| NT2RI3001515 | 995 | 857 . . . 3373 | 3183 |
| NT2RI3002303 | 996 | 2269 . . . 2613 | 3184 |
| NT2RI3002842 | 997 | 50 . . . 934 | 3185 |
| NT2RI3002892 | 998 | 3 . . . 311 | 3186 |
| NT2RI3003031 | 999 | 111 . . . 413 | 3187 |
| NT2RI3003095 | 1000 | 1032 . . . 1412 | 3188 |
| NT2RI3003162 | 1001 | 865 . . . 1353 | 3189 |
| NT2RI3003382 | 1002 | 600 . . . 2642 | 3190 |
| NT2RI3003409 | 1003 | 2744 . . . 3340 | 3191 |
| NT2RI3004381 | 1004 | 2637 . . . 3314 | 3192 |
| NT2RI3004510 | 1005 | 178 . . . 1950 | 3193 |
| NT2RI3005202 | 1006 | 132 . . . 659 | 3194 |
| NT2RI3005403 | 1007 | 366 . . . 1073 | 3195 |
| NT2RI3005724 | 1008 | 194 . . . 637 | 3196 |
| NT2RI3006132 | 1009 | 82 . . . 684 | 3197 |
| NT2RI3006171 | 1010 | 300 . . . 1211 | 3198 |
| NT2RI3006284 | 1011 | 154 . . . 1911 | 3199 |
| NT2RI3006340 | 1012 | 335 . . . 5392 | 3200 |
| NT2RI3006376 | 1013 | 152 . . . 4081 | 3201 |
| NT2RI3006673 | 1014 | 197 . . . 3997 | 3202 |
| NT2RI3006796 | 1015 | 1047 . . . 1427 | 3203 |
| NT2RI3007065 | 1016 | 1707 . . . 2096 | 3204 |
| NT2RI3007158 | 1017 | 656 . . . >4499 | 3205 |
| NT2RI3007291 | 1018 | 10 . . . 1614 | 3206 |
| NT2RI3007543 | 1019 | 54 . . . 4181 | 3207 |
| NT2RI3007757 | 1020 | 225 . . . >5460 | 3208 |
| NT2RI3007978 | 1021 | 745 . . . 2505 | 3209 |
| NT2RI3008055 | 1022 | 2452 . . . 2838 | 3210 |
| NT2RI3008162 | 1023 | 81 . . . 2354 | 3211 |
| NT2RI3008652 | 1024 | 179 . . . 2323 | 3212 |
| NT2RI3008697 | 1025 | 334 . . . 1515 | 3213 |
| NT2RI3008974 | 1026 | 949 . . . 1434 | 3214 |
| NT2RI3009158 | 1027 | 228 . . . 1286 | 3215 |
| NT2RP7000359 | 1028 | 48 . . . 3902 | 3216 |
| NT2RP7000466 | 1029 | 72 . . . 2987 | 3217 |
| NT2RP7004027 | 1030 | 507 . . . 1787 | 3218 |
| NT2RP7004123 | 1031 | 638 . . . 1516 | 3219 |
| NT2RP7005118 | 1032 | 108 . . . 3179 | 3220 |
| NT2RP7005529 | 1033 | 156 . . . 2531 | 3221 |
| NT2RP7005846 | 1034 | 1536 . . . 2180 | 3222 |
| NT2RP7009030 | 1035 | 732 . . . 1199 | 3223 |
| NT2RP7009147 | 1036 | 434 . . . >2686 | 3224 |
| NT2RP7009867 | 1037 | 880 . . . 1317 | 3225 |
| NT2RP7010128 | 1038 | 264 . . . 755 | 3226 |
| NT2RP7010599 | 1039 | 988 . . . 2160 | 3227 |
| NT2RP7011570 | 1040 | 1694 . . . 2017 | 3228 |
| NT2RP7013795 | 1041 | 284 . . . 1117 | 3229 |
| NT2RP7014005 | 1042 | 375 . . . 2135 | 3230 |
| NT2RP7015512 | 1043 | 2441 . . . 2863 | 3231 |
| NT2RP7017365 | 1044 | 5 . . . 349 | 3232 |
| NT2RP7017474 | 1045 | 234 . . . 1598 | 3233 |
| NT2RP7017546 | 1046 | 182 . . . 1018 | 3234 |
| NT2RP8000137 | 1047 | 1335 . . . 1673 | 3235 |
| NT2RP8000296 | 1048 | 911 . . . 2878 | 3236 |
| NT2RP8000483 | 1049 | 2903 . . . 4729 | 3237 |
| NTONG2000413 | 1050 | 331 . . . 1863 | 3238 |
| NTONG2003852 | 1051 | 341 . . . 1087 | 3239 |
| NTONG2005277 | 1052 | 293 . . . 2059 | 3240 |
| NTONG2005969 | 1053 | 1128 . . . 1436 | 3241 |
| NTONG2006354 | 1054 | 96 . . . 674 | 3242 |
| NTONG2007249 | 1055 | 439 . . . 1386 | 3243 |
| NTONG2007517 | 1056 | 34 . . . 930 | 3244 |
| NTONG2008088 | 1057 | 133 . . . 468 | 3245 |
| NTONG2008672 | 1058 | 37 . . . 2067 | 3246 |
| OCBBF1000254 | 1059 | 203 . . . 514 | 3247 |
| OCBBF2001794 | 1060 | 23 . . . 454 | 3248 |
| OCBBF2002124 | 1061 | 2496 . . . 2807 | 3249 |
| OCBBF2003819 | 1062 | 1788 . . . >2890 | 3250 |
| OCBBF2004826 | 1063 | 304 . . . >4404 | 3251 |
| OCBBF2004883 | 1064 | 1087 . . . 1803 | 3252 |
| OCBBF2005428 | 1065 | 1010 . . . 1369 | 3253 |
| OCBBF2006005 | 1066 | 107 . . . 2752 | 3254 |
| OCBBF2006058 | 1067 | 143 . . . 568 | 3255 |
| OCBBF2006151 | 1068 | 53 . . . 817 | 3256 |
| OCBBF2006567 | 1069 | 2568 . . . 2924 | 3257 |
| OCBBF2006764 | 1070 | 157 . . . 2571 | 3258 |
| OCBBF2007028 | 1071 | 1589 . . . 2572 | 3259 |
| OCBBF2007068 | 1072 | 108 . . . 3338 | 3260 |
| OCBBF2007114 | 1073 | 589 . . . 963 | 3261 |
| OCBBF2007428 | 1074 | 177 . . . 527 | 3262 |
| OCBBF2007478 | 1075 | 2014 . . . 2361 | 3263 |
| OCBBF2007610 | 1076 | 1229 . . . 1963 | 3264 |
| OCBBF2008770 | 1077 | 224 . . . 2677 | 3265 |
| OCBBF2009788 | 1078 | 18 . . . 371 | 3266 |
| OCBBF2009926 | 1079 | 734 . . . 1177 | 3267 |
| OCBBF2010140 | 1080 | 66 . . . 2459 | 3268 |
| OCBBF2010416 | 1081 | 1243 . . . >3531 | 3269 |
| OCBBF2017516 | 1082 | 459 . . . 860 | 3270 |
| OCBBF2019327 | 1083 | 221 . . . 553 | 3271 |
| OCBBF2019823 | 1084 | 798 . . . 1796 | 3272 |
| OCBBF2020343 | 1085 | 293 . . . 859 | 3273 |
| OCBBF2020453 | 1086 | 168 . . . 488 | 3274 |
| OCBBF2020639 | 1087 | 907 . . . 1248 | 3275 |
| OCBBF2020741 | 1088 | 962 . . . 1555 | 3276 |
| OCBBF2020801 | 1089 | 1544 . . . 2017 | 3277 |
| OCBBF2020838 | 1090 | 593 . . . 1819 | 3278 |
| OCBBF2021020 | 1091 | 1232 . . . 2206 | 3279 |
| OCBBF2021286 | 1092 | 86 . . . 787 | 3280 |
| OCBBF2021323 | 1093 | 8 . . . 538 | 3281 |
| OCBBF2021788 | 1094 | 19 . . . 2793 | 3282 |
| OCBBF2022351 | 1095 | 157 . . . 1443 | 3283 |
| OCBBF2022574 | 1096 | 362 . . . 769 | 3284 |
| OCBBF2023162 | 1097 | 222 . . . 536 | 3285 |
| OCBBF2023643 | 1098 | 1236 . . . 1658 | 3286 |
| OCBBF2024719 | 1099 | 658 . . . 999 | 3287 |
| OCBBF2024781 | 1100 | 358 . . . 987 | 3288 |
| OCBBF2024850 | 1101 | 329 . . . 652 | 3289 |
| OCBBF2025028 | 1102 | 431 . . . 1504 | 3290 |
| OCBBF2025458 | 1103 | 10 . . . 486 | 3291 |
| OCBBF2025527 | 1104 | 627 . . . 980 | 3292 |
| OCBBF2025730 | 1105 | 614 . . . 949 | 3293 |
| OCBBF2026645 | 1106 | 1905 . . . 2216 | 3294 |
| OCBBF2027423 | 1107 | 25 . . . 360 | 3295 |
| OCBBF2027478 | 1108 | 1362 . . . 1796 | 3296 |
| OCBBF2028173 | 1109 | 764 . . . 1723 | 3297 |
| OCBBF2028935 | 1110 | 76 . . . 432 | 3298 |
| OCBBF2029901 | 1111 | 357 . . . 836 | 3299 |
| OCBBF2030354 | 1112 | 261 . . . 1646 | 3300 |
| OCBBF2030517 | 1113 | 1378 . . . 1842 | 3301 |
| OCBBF2030574 | 1114 | 54 . . . 605 | 3302 |
| OCBBF2030708 | 1115 | 409 . . . 2361 | 3303 |
| OCBBF2031167 | 1116 | 31 . . . >2709 | 3304 |
| OCBBF2031366 | 1117 | 1696 . . . 2055 | 3305 |
| OCBBF2032590 | 1118 | 395 . . . 1021 | 3306 |
| OCBBF2032599 | 1119 | 30 . . . 371 | 3307 |
| OCBBF2032611 | 1120 | 1 . . . 354 | 3308 |
| OCBBF2032671 | 1121 | 960 . . . 1355 | 3309 |
| OCBBF2033869 | 1122 | 882 . . . 1355 | 3310 |
| OCBBF2035110 | 1123 | 1534 . . . 3426 | 3311 |
| OCBBF2035214 | 1124 | 342 . . . 644 | 3312 |
| OCBBF2035564 | 1125 | 321 . . . 2228 | 3313 |
| OCBBF2035885 | 1126 | 76 . . . 420 | 3314 |
| OCBBF2035916 | 1127 | 1859 . . . 2524 | 3315 |
| OCBBF2036476 | 1128 | 1103 . . . 1873 | 3316 |
| OCBBF2036743 | 1129 | 526 . . . 2445 | 3317 |
| OCBBF2037068 | 1130 | 318 . . . 1067 | 3318 |
| OCBBF2037340 | 1131 | 526 . . . >3404 | 3319 |
| OCBBF2037398 | 1132 | 286 . . . 651 | 3320 |
| OCBBF2037547 | 1133 | 54 . . . 3860 | 3321 |
| OCBBF2037598 | 1134 | 1515 . . . >3057 | 3322 |
| OCBBF2037638 | 1135 | 754 . . . 2043 | 3323 |
| OCBBF2038317 | 1136 | 183 . . . 3575 | 3324 |
| OCBBF3000296 | 1137 | 1505 . . . 2095 | 3325 |
| OCBBF3000483 | 1138 | 37 . . . 471 | 3326 |
| OCBBF3002553 | 1139 | 27 . . . 581 | 3327 |
| OCBBF3002600 | 1140 | 2661 . . . 3005 | 3328 |
| OCBBF3003320 | 1141 | 20 . . . 1000 | 3329 |
| OCBBF3003592 | 1142 | 86 . . . 2827 | 3330 |
| OCBBF3004314 | 1143 | 687 . . . 1187 | 3331 |
| OCBBF3006802 | 1144 | 236 . . . 625 | 3332 |
| OCBBF3007516 | 1145 | 1479 . . . 1829 | 3333 |
| OCBBF3008230 | 1146 | 2923 . . . >3428 | 3334 |
| OCBBF3009279 | 1147 | 34 . . . 1065 | 3335 |
| PEBLM2000170 | 1148 | 434 . . . 811 | 3336 |
| PEBLM2000338 | 1149 | 1419 . . . 1865 | 3337 |
| PEBLM2001465 | 1150 | 856 . . . 1374 | 3338 |
| PEBLM2001488 | 1151 | 325 . . . 732 | 3339 |
| PEBLM2002594 | 1152 | 688 . . . 2121 | 3340 |
| PEBLM2002749 | 1153 | 275 . . . 820 | 3341 |
| PEBLM2002887 | 1154 | 948 . . . 1301 | 3342 |
| PEBLM2004497 | 1155 | 502 . . . 888 | 3343 |
| PEBLM2004666 | 1156 | 139 . . . 2397 | 3344 |
| PEBLM2005183 | 1157 | 9 . . . 2426 | 3345 |
| PEBLM2005697 | 1158 | 408 . . . 734 | 3346 |
| PEBLM2006113 | 1159 | 29 . . . 421 | 3347 |
| PEBLM2007112 | 1160 | 243 . . . 704 | 3348 |
| PEBLM2007140 | 1161 | 267 . . . 629 | 3349 |
| PEBLM2007834 | 1162 | 177 . . . 539 | 3350 |
| PERIC1000147 | 1163 | 83 . . . >2669 | 3351 |
| PERIC2000889 | 1164 | 1483 . . . 2079 | 3352 |
| PERIC2000914 | 1165 | 1557 . . . 1901 | 3353 |
| PERIC2001227 | 1166 | 936 . . . 1253 | 3354 |
| PERIC2001228 | 1167 | 2 . . . 754 | 3355 |
| PERIC2002766 | 1168 | 64 . . . 384 | 3356 |
| PERIC2003090 | 1169 | 158 . . . 802 | 3357 |
| PERIC2003452 | 1170 | 1555 . . . 1890 | 3358 |
| PERIC2003699 | 1171 | 100 . . . 435 | 3359 |
| PERIC2003720 | 1172 | 640 . . . 1512 | 3360 |
| PERIC2003834 | 1173 | 103 . . . 531 | 3361 |
| PERIC2004028 | 1174 | 751 . . . 1212 | 3362 |
| PERIC2004259 | 1175 | 1686 . . . 2042 | 3363 |
| PERIC2004379 | 1176 | 55 . . . 483 | 3364 |
| PERIC2004429 | 1177 | 12 . . . 377 | 3365 |
| PERIC2004909 | 1178 | 32 . . . 334 | 3366 |
| PERIC2005347 | 1179 | 26 . . . 499 | 3367 |
| PERIC2005370 | 1180 | 13 . . . 1041 | 3368 |
| PERIC2006035 | 1181 | 1 . . . 1134 | 3369 |
| PERIC2007914 | 1182 | 1492 . . . 2073 | 3370 |
| PERIC2008385 | 1183 | 348 . . . 722 | 3371 |
| PERIC2009086 | 1184 | 202 . . . 1749 | 3372 |
| PLACE5000001 | 1185 | 2536 . . . 3036 | 3373 |
| PLACE5000171 | 1186 | 334 . . . 2940 | 3374 |
| PLACE5000260 | 1187 | 242 . . . 742 | 3375 |
| PLACE5000282 | 1188 | 60 . . . 1739 | 3376 |
| PLACE6001185 | 1189 | 765 . . . 1337 | 3377 |
| PLACE6009006 | 1190 | 1018 . . . 1518 | 3378 |
| PLACE6012574 | 1191 | 368 . . . 1984 | 3379 |
| PLACE6019385 | 1192 | 617 . . . 1360 | 3380 |
| PLACE6019932 | 1193 | 20 . . . 847 | 3381 |
| PLACE6020031 | 1194 | 228 . . . 1586 | 3382 |
| PLACE7000514 | 1195 | 17 . . . 1246 | 3383 |
| PLACE7001022 | 1196 | 1733 . . . 2197 | 3384 |
| PLACE7001936 | 1197 | 272 . . . 697 | 3385 |
| PLACE7002641 | 1198 | 1254 . . . 2264 | 3386 |
| PLACE7006051 | 1199 | 145 . . . >3409 | 3387 |
| PLACE7008431 | 1200 | 223 . . . 1281 | 3388 |
| PLACE7008623 | 1201 | 1304 . . . 1762 | 3389 |
| PROST1000184 | 1202 | 734 . . . 1123 | 3390 |
| PROST1000528 | 1203 | 428 . . . 838 | 3391 |
| PROST1000559 | 1204 | 149 . . . 856 | 3392 |
| PROST2003428 | 1205 | 1031 . . . 1387 | 3393 |
| PROST2008993 | 1206 | 362 . . . 2008 | 3394 |
| PROST2015243 | 1207 | 1401 . . . 1802 | 3395 |
| PROST2016462 | 1208 | 435 . . . 2081 | 3396 |
| PROST2017367 | 1209 | 72 . . . 428 | 3397 |
| PROST2017413 | 1210 | 1163 . . . 1510 | 3398 |
| PROST2017700 | 1211 | 1337 . . . 1645 | 3399 |
| PROST2018030 | 1212 | 884 . . . 1255 | 3400 |
| PROST2018090 | 1213 | 117 . . . 1448 | 3401 |
| PROST2018511 | 1214 | 136 . . . 1803 | 3402 |
| PROST2018902 | 1215 | 288 . . . 653 | 3403 |
| PROST2018922 | 1216 | 556 . . . 888 | 3404 |
| PROST2019296 | 1217 | 415 . . . 777 | 3405 |
| PROST2019781 | 1218 | 139 . . . 441 | 3406 |
| PUAEN2002489 | 1219 | 410 . . . 1186 | 3407 |
| PUAEN2002616 | 1220 | 1790 . . . 2389 | 3408 |
| PUAEN2003079 | 1221 | 438 . . . 812 | 3409 |
| PUAEN2005588 | 1222 | 134 . . . 580 | 3410 |
| PUAEN2005930 | 1223 | 1673 . . . 3256 | 3411 |
| PUAEN2006328 | 1224 | 166 . . . 2064 | 3412 |
| PUAEN2006701 | 1225 | 277 . . . 837 | 3413 |
| PUAEN2007044 | 1226 | 51 . . . 521 | 3414 |
| PUAEN2007785 | 1227 | 23 . . . 1144 | 3415 |
| PUAEN2009174 | 1228 | 4 . . . 2547 | 3416 |
| PUAEN2009655 | 1229 | 237 . . . 2198 | 3417 |
| PUAEN2009795 | 1230 | 121 . . . 1716 | 3418 |
| PUAEN2009852 | 1231 | 953 . . . 1291 | 3419 |
| RECTM2000433 | 1232 | 33 . . . 536 | 3420 |
| RECTM2001347 | 1233 | 638 . . . 1609 | 3421 |
| SKMUS2000757 | 1234 | 289 . . . 606 | 3422 |
| SKMUS2003074 | 1235 | 291 . . . 692 | 3423 |
| SKMUS2004047 | 1236 | 628 . . . 1047 | 3424 |
| SKMUS2006394 | 1237 | 111 . . . 1469 | 3425 |
| SKNMC1000124 | 1238 | 194 . . . 1390 | 3426 |
| SKNMC2002402 | 1239 | 107 . . . 466 | 3427 |
| SKNMC2004457 | 1240 | 1304 . . . 1750 | 3428 |
| SKNMC2004643 | 1241 | 26 . . . 697 | 3429 |
| SKNMC2005772 | 1242 | 1187 . . . 1585 | 3430 |
| SKNMC2006998 | 1243 | 97 . . . 558 | 3431 |
| SKNMC2007504 | 1244 | 27 . . . 1190 | 3432 |
| SKNMC2007961 | 1245 | 170 . . . 472 | 3433 |
| SKNMC2009450 | 1246 | 103 . . . 411 | 3434 |
| SKNSH2000482 | 1247 | 1184 . . . 1561 | 3435 |
| SKNSH2009991 | 1248 | 1073 . . . 1378 | 3436 |
| SKNSH2010015 | 1249 | 1308 . . . 1613 | 3437 |
| SMINT1000192 | 1250 | 49 . . . 810 | 3438 |
| SMINT2001818 | 1251 | 616 . . . 1158 | 3439 |
| SMINT2002743 | 1252 | 995 . . . 1375 | 3440 |
| SMINT2006641 | 1253 | 1820 . . . 2185 | 3441 |
| SMINT2007391 | 1254 | 229 . . . 1197 | 3442 |
| SMINT2009902 | 1255 | 98 . . . 901 | 3443 |
| SMINT2010076 | 1256 | 81 . . . 1574 | 3444 |
| SMINT2010897 | 1257 | 230 . . . 535 | 3445 |
| SMINT2011311 | 1258 | 594 . . . 1121 | 3446 |
| SMINT2011888 | 1259 | 80 . . . 1543 | 3447 |
| SMINT2015787 | 1260 | 48 . . . 551 | 3448 |
| SPLEN2001599 | 1261 | 20 . . . 1297 | 3449 |
| SPLEN2002147 | 1262 | 607 . . . 1068 | 3450 |
| SPLEN2002467 | 1263 | 256 . . . 1566 | 3451 |
| SPLEN2002707 | 1264 | 234 . . . 545 | 3452 |
| SPLEN2006122 | 1265 | 162 . . . 1121 | 3453 |
| SPLEN2009548 | 1266 | 349 . . . 723 | 3454 |
| SPLEN2010912 | 1267 | 1159 . . . 2286 | 3455 |
| SPLEN2011422 | 1268 | 79 . . . 1008 | 3456 |
| SPLEN2012624 | 1269 | 1077 . . . 1784 | 3457 |
| SPLEN2012889 | 1270 | 1647 . . . 2018 | 3458 |
| SPLEN2014946 | 1271 | 161 . . . 547 | 3459 |
| SPLEN2015158 | 1272 | 567 . . . 947 | 3460 |
| SPLEN2015267 | 1273 | 81 . . . 1646 | 3461 |
| SPLEN2015679 | 1274 | 517 . . . >2171 | 3462 |
| SPLEN2016554 | 1275 | 200 . . . 3343 | 3463 |
| SPLEN2016863 | 1276 | 276 . . . 1352 | 3464 |
| SPLEN2017104 | 1277 | 264 . . . 1274 | 3465 |
| SPLEN2021701 | 1278 | 23 . . . 910 | 3466 |
| SPLEN2023733 | 1279 | 158 . . . 1264 | 3467 |
| SPLEN2023791 | 1280 | 144 . . . 746 | 3468 |
| SPLEN2024127 | 1281 | 198 . . . 584 | 3469 |
| SPLEN2025491 | 1282 | 1056 . . . 1466 | 3470 |
| SPLEN2027268 | 1283 | 1655 . . . 2161 | 3471 |
| SPLEN2028844 | 1284 | 271 . . . 840 | 3472 |
| SPLEN2028914 | 1285 | 253 . . . 855 | 3473 |
| SPLEN2029051 | 1286 | 234 . . . 596 | 3474 |
| SPLEN2029176 | 1287 | 531 . . . 998 | 3475 |
| SPLEN2029522 | 1288 | 1430 . . . 1771 | 3476 |
| SPLEN2029683 | 1289 | 1308 . . . 1682 | 3477 |
| SPLEN2029727 | 1290 | 2754 . . . 3068 | 3478 |
| SPLEN2029912 | 1291 | 216 . . . 653 | 3479 |
| SPLEN2030335 | 1292 | 382 . . . 1104 | 3480 |
| SPLEN2030479 | 1293 | 567 . . . 1061 | 3481 |
| SPLEN2031125 | 1294 | 24 . . . 407 | 3482 |
| SPLEN2031424 | 1295 | 641 . . . 1138 | 3483 |
| SPLEN2031547 | 1296 | 428 . . . 1645 | 3484 |
| SPLEN2031724 | 1297 | 385 . . . 765 | 3485 |
| SPLEN2031780 | 1298 | 78 . . . 1067 | 3486 |
| SPLEN2032154 | 1299 | 244 . . . 735 | 3487 |
| SPLEN2032321 | 1300 | 1893 . . . 2222 | 3488 |
| SPLEN2032813 | 1301 | 799 . . . 1134 | 3489 |
| SPLEN2033098 | 1302 | 1452 . . . 2051 | 3490 |
| SPLEN2033153 | 1303 | 109 . . . 471 | 3491 |
| SPLEN2033539 | 1304 | 1359 . . . 1682 | 3492 |
| SPLEN2033921 | 1305 | 2125 . . . 2478 | 3493 |
| SPLEN2034021 | 1306 | 147 . . . 482 | 3494 |
| SPLEN2034081 | 1307 | 536 . . . 1042 | 3495 |
| SPLEN2034678 | 1308 | 61 . . . 495 | 3496 |
| SPLEN2034781 | 1309 | 629 . . . 1618 | 3497 |
| SPLEN2036103 | 1310 | 1088 . . . 1627 | 3498 |
| SPLEN2036326 | 1311 | 1062 . . . 1973 | 3499 |
| SPLEN2036712 | 1312 | 179 . . . 529 | 3500 |
| SPLEN2036821 | 1313 | 932 . . . 1276 | 3501 |
| SPLEN2036932 | 1314 | 1724 . . . 2170 | 3502 |
| SPLEN2037194 | 1315 | 185 . . . 1984 | 3503 |
| SPLEN2037580 | 1316 | 1852 . . . 2301 | 3504 |
| SPLEN2037630 | 1317 | 1219 . . . 1542 | 3505 |
| SPLEN2037722 | 1318 | 71 . . . 1066 | 3506 |
| SPLEN2038055 | 1319 | 1738 . . . 2220 | 3507 |
| SPLEN2038180 | 1320 | 8 . . . 496 | 3508 |
| SPLEN2038345 | 1321 | 356 . . . 793 | 3509 |
| SPLEN2038407 | 1322 | 185 . . . 2005 | 3510 |
| SPLEN2039697 | 1323 | 791 . . . 1105 | 3511 |
| SPLEN2039936 | 1324 | 71 . . . 382 | 3512 |
| SPLEN2040222 | 1325 | 106 . . . 840 | 3513 |
| SPLEN2041304 | 1326 | 72 . . . 398 | 3514 |
| SPLEN2041310 | 1327 | 1402 . . . 1734 | 3515 |
| SPLEN2041645 | 1328 | 1624 . . . 1998 | 3516 |
| SPLEN2041720 | 1329 | 57 . . . 494 | 3517 |
| SPLEN2041977 | 1330 | 72 . . . 374 | 3518 |
| SPLEN2042303 | 1331 | 480 . . . 791 | 3519 |
| SPLEN2042598 | 1332 | 70 . . . 387 | 3520 |
| STOMA1000189 | 1333 | 1050 . . . 1436 | 3521 |
| STOMA2003444 | 1334 | 1664 . . . 1975 | 3522 |
| STOMA2004294 | 1335 | 38 . . . 607 | 3523 |
| STOMA2004925 | 1336 | 854 . . . 1285 | 3524 |
| STOMA2008546 | 1337 | 119 . . . 1060 | 3525 |
| SYNOV1000374 | 1338 | 204 . . . 659 | 3526 |
| SYNOV2005216 | 1339 | 1201 . . . >2283 | 3527 |
| SYNOV2005448 | 1340 | 1261 . . . 1653 | 3528 |
| SYNOV2005817 | 1341 | 412 . . . 1395 | 3529 |
| SYNOV2006430 | 1342 | 232 . . . 780 | 3530 |
| SYNOV2007965 | 1343 | 83 . . . 1375 | 3531 |
| SYNOV2012326 | 1344 | 30 . . . 476 | 3532 |
| SYNOV2014400 | 1345 | 389 . . . 988 | 3533 |
| SYNOV2016124 | 1346 | 1174 . . . 1476 | 3534 |
| SYNOV2017055 | 1347 | 981 . . . 1511 | 3535 |
| SYNOV2018921 | 1348 | 126 . . . 737 | 3536 |
| SYNOV2021320 | 1349 | 182 . . . 1792 | 3537 |
| SYNOV3000231 | 1350 | 81 . . . 1499 | 3538 |
| SYNOV3000302 | 1351 | 80 . . . 1423 | 3539 |
| SYNOV4000472 | 1352 | 103 . . . 540 | 3540 |
| SYNOV4000706 | 1353 | 121 . . . 2538 | 3541 |
| SYNOV4001326 | 1354 | 196 . . . 1086 | 3542 |
| SYNOV4001395 | 1355 | 959 . . . 2092 | 3543 |
| SYNOV4002346 | 1356 | 150 . . . 3797 | 3544 |
| SYNOV4002392 | 1357 | 148 . . . 951 | 3545 |
| SYNOV4002883 | 1358 | 1686 . . . 2240 | 3546 |
| SYNOV4003322 | 1359 | 2461 . . . 2859 | 3547 |
| SYNOV4004184 | 1360 | 2542 . . . 2889 | 3548 |
| SYNOV4004741 | 1361 | 776 . . . 1237 | 3549 |
| SYNOV4004823 | 1362 | 3332 . . . 3715 | 3550 |
| SYNOV4004914 | 1363 | 2753 . . . 3106 | 3551 |
| SYNOV4006256 | 1364 | 182 . . . 493 | 3552 |
| SYNOV4007012 | 1365 | 546 . . . 1007 | 3553 |
| SYNOV4007215 | 1366 | 78 . . . >3375 | 3554 |
| SYNOV4007360 | 1367 | 567 . . . 1364 | 3555 |
| SYNOV4007430 | 1368 | 47 . . . 448 | 3556 |
| SYNOV4007521 | 1369 | 6 . . . 935 | 3557 |
| SYNOV4007553 | 1370 | 1405 . . . 3759 | 3558 |
| SYNOV4007671 | 1371 | 548 . . . 1417 | 3559 |
| SYNOV4008336 | 1372 | 825 . . . 1256 | 3560 |
| SYNOV4008440 | 1373 | 115 . . . 3804 | 3561 |
| T1ESE2000116 | 1374 | 1455 . . . 1769 | 3562 |
| TBAES2001171 | 1375 | 871 . . . 1845 | 3563 |
| TBAES2001220 | 1376 | 155 . . . 547 | 3564 |
| TBAES2001229 | 1377 | 1496 . . . 1861 | 3565 |
| TBAES2001258 | 1378 | 369 . . . 677 | 3566 |
| TBAES2001492 | 1379 | 630 . . . 1241 | 3567 |
| TBAES2001751 | 1380 | 185 . . . 592 | 3568 |
| TBAES2002197 | 1381 | 5 . . . 1609 | 3569 |
| TBAES2003550 | 1382 | 1130 . . . 1549 | 3570 |
| TBAES2004055 | 1383 | 898 . . . 1935 | 3571 |
| TBAES2005157 | 1384 | 119 . . . 1573 | 3572 |
| TBAES2005543 | 1385 | 1197 . . . 1694 | 3573 |
| TBAES2006568 | 1386 | 169 . . . 996 | 3574 |
| TBAES2007964 | 1387 | 72 . . . 449 | 3575 |
| TCERX2000613 | 1388 | 427 . . . 1410 | 3576 |
| TCOLN2002278 | 1389 | 1064 . . . 1432 | 3577 |
| TESOP1000127 | 1390 | 358 . . . 708 | 3578 |
| TESOP2000801 | 1391 | 707 . . . 1216 | 3579 |
| TESOP2001122 | 1392 | 207 . . . 998 | 3580 |
| TESOP2001166 | 1393 | 290 . . . 1612 | 3581 |
| TESOP2001345 | 1394 | 33 . . . 350 | 3582 |
| TESOP2001605 | 1395 | 746 . . . 1651 | 3583 |
| TESOP2001818 | 1396 | 491 . . . 1456 | 3584 |
| TESOP2001849 | 1397 | 17 . . . 853 | 3585 |
| TESOP2001865 | 1398 | 6 . . . 368 | 3586 |
| TESOP2001953 | 1399 | 372 . . . 1871 | 3587 |
| TESOP2002273 | 1400 | 163 . . . 558 | 3588 |
| TESOP2002451 | 1401 | 99 . . . 1157 | 3589 |
| TESOP2002489 | 1402 | 18 . . . 365 | 3590 |
| TESOP2002539 | 1403 | 76 . . . 459 | 3591 |
| TESOP2002950 | 1404 | 1262 . . . 1747 | 3592 |
| TESOP2003273 | 1405 | 691 . . . 1032 | 3593 |
| TESOP2003753 | 1406 | 97 . . . 399 | 3594 |
| TESOP2004114 | 1407 | 510 . . . 1766 | 3595 |
| TESOP2005285 | 1408 | 510 . . . 1181 | 3596 |
| TESOP2005485 | 1409 | 62 . . . 994 | 3597 |
| TESOP2005579 | 1410 | 755 . . . 1729 | 3598 |
| TESOP2006041 | 1411 | 315 . . . 1538 | 3599 |
| TESOP2006060 | 1412 | 606 . . . 1040 | 3600 |
| TESOP2006068 | 1413 | 930 . . . 1382 | 3601 |
| TESOP2006670 | 1414 | 744 . . . 1235 | 3602 |
| TESOP2006746 | 1415 | 1158 . . . 1655 | 3603 |
| TESOP2007052 | 1416 | 28 . . . 351 | 3604 |
| TESOP2007262 | 1417 | 870 . . . 2078 | 3605 |
| TESOP2007636 | 1418 | 1053 . . . 1403 | 3606 |
| TESOP2007688 | 1419 | 210 . . . 863 | 3607 |
| TESOP2009121 | 1420 | 39 . . . >2370 | 3608 |
| TESOP2009555 | 1421 | 741 . . . 1565 | 3609 |
| TESTI1000257 | 1422 | 377 . . . 1870 | 3610 |
| TESTI1000319 | 1423 | 107 . . . 2773 | 3611 |
| TESTI1000330 | 1424 | 271 . . . 576 | 3612 |
| TESTI1000348 | 1425 | 802 . . . 1251 | 3613 |
| TESTI1000390 | 1426 | 1642 . . . 3522 | 3614 |
| TESTI1000491 | 1427 | 33 . . . 428 | 3615 |
| TESTI1000545 | 1428 | 836 . . . 3625 | 3616 |
| TESTI2000443 | 1429 | 682 . . . 2265 | 3617 |
| TESTI2000644 | 1430 | 864 . . . 1211 | 3618 |
| TESTI2002036 | 1431 | 114 . . . 1700 | 3619 |
| TESTI2002618 | 1432 | 42 . . . 881 | 3620 |
| TESTI2002928 | 1433 | 272 . . . 757 | 3621 |
| TESTI2003347 | 1434 | 285 . . . 1829 | 3622 |
| TESTI2003573 | 1435 | 326 . . . 1363 | 3623 |
| TESTI2004215 | 1436 | 300 . . . 2456 | 3624 |
| TESTI2004700 | 1437 | 614 . . . 1273 | 3625 |
| TESTI2005376 | 1438 | 412 . . . 2103 | 3626 |
| TESTI2005610 | 1439 | 426 . . . 1964 | 3627 |
| TESTI2005739 | 1440 | 514 . . . 1848 | 3628 |
| TESTI2005986 | 1441 | 204 . . . 551 | 3629 |
| TESTI2006041 | 1442 | 697 . . . 1047 | 3630 |
| TESTI2006643 | 1443 | 812 . . . 1882 | 3631 |
| TESTI2006648 | 1444 | 204 . . . 1919 | 3632 |
| TESTI2009474 | 1445 | 283 . . . 1536 | 3633 |
| TESTI2009477 | 1446 | 1176 . . . 1649 | 3634 |
| TESTI2009511 | 1447 | 154 . . . 663 | 3635 |
| TESTI2009812 | 1448 | 910 . . . 1308 | 3636 |
| TESTI2010400 | 1449 | 1814 . . . 2224 | 3637 |
| TESTI2013381 | 1450 | 351 . . . 695 | 3638 |
| TESTI2013382 | 1451 | 1332 . . . 1826 | 3639 |
| TESTI2014716 | 1452 | 64 . . . 1443 | 3640 |
| TESTI2014843 | 1453 | 148 . . . 1866 | 3641 |
| TESTI2016046 | 1454 | 152 . . . 2173 | 3642 |
| TESTI2017727 | 1455 | 83 . . . 541 | 3643 |
| TESTI2018838 | 1456 | 647 . . . 1147 | 3644 |
| TESTI2019042 | 1457 | 130 . . . 1011 | 3645 |
| TESTI2019648 | 1458 | 1044 . . . 1463 | 3646 |
| TESTI2023254 | 1459 | 206 . . . 1972 | 3647 |
| TESTI2023599 | 1460 | 200 . . . 565 | 3648 |
| TESTI2024567 | 1461 | 1072 . . . >1878 | 3649 |
| TESTI2026505 | 1462 | 69 . . . 1691 | 3650 |
| TESTI2027019 | 1463 | 608 . . . 1342 | 3651 |
| TESTI2031529 | 1464 | 386 . . . 1819 | 3652 |
| TESTI2034520 | 1465 | 59 . . . 1519 | 3653 |
| TESTI2034749 | 1466 | 973 . . . 1503 | 3654 |
| TESTI2034767 | 1467 | 374 . . . 1786 | 3655 |
| TESTI2034953 | 1468 | 703 . . . 1113 | 3656 |
| TESTI2034997 | 1469 | 179 . . . 547 | 3657 |
| TESTI2035107 | 1470 | 126 . . . 533 | 3658 |
| TESTI2035997 | 1471 | 826 . . . 1140 | 3659 |
| TESTI2036513 | 1472 | 1569 . . . 1895 | 3660 |
| TESTI2036684 | 1473 | 297 . . . 839 | 3661 |
| TESTI2037643 | 1474 | 3 . . . 599 | 3662 |
| TESTI2040018 | 1475 | 441 . . . >1825 | 3663 |
| TESTI2042450 | 1476 | 212 . . . 544 | 3664 |
| TESTI2044796 | 1477 | 913 . . . 1692 | 3665 |
| TESTI2044833 | 1478 | 265 . . . 633 | 3666 |
| TESTI2045920 | 1479 | 15 . . . 758 | 3667 |
| TESTI2045983 | 1480 | 103 . . . 609 | 3668 |
| TESTI2046347 | 1481 | 465 . . . 1022 | 3669 |
| TESTI2047071 | 1482 | 596 . . . 1012 | 3670 |
| TESTI2048465 | 1483 | 755 . . . 1315 | 3671 |
| TESTI2048603 | 1484 | 122 . . . 490 | 3672 |
| TESTI2048898 | 1485 | 6 . . . 374 | 3673 |
| TESTI2049206 | 1486 | 677 . . . 1003 | 3674 |
| TESTI2049246 | 1487 | 296 . . . 658 | 3675 |
| TESTI2049277 | 1488 | 765 . . . 1130 | 3676 |
| TESTI2049422 | 1489 | 69 . . . 941 | 3677 |
| TESTI2049452 | 1490 | 28 . . . 381 | 3678 |
| TESTI2049469 | 1491 | 313 . . . 1341 | 3679 |
| TESTI2049576 | 1492 | 1030 . . . 1773 | 3680 |
| TESTI2049857 | 1493 | 816 . . . 2057 | 3681 |
| TESTI2050137 | 1494 | 6 . . . 1283 | 3682 |
| TESTI2050681 | 1495 | 186 . . . 605 | 3683 |
| TESTI2050987 | 1496 | 313 . . . 1104 | 3684 |
| TESTI2051279 | 1497 | 338 . . . 922 | 3685 |
| TESTI2051488 | 1498 | 665 . . . 1171 | 3686 |
| TESTI2051543 | 1499 | 925 . . . 1491 | 3687 |
| TESTI2051767 | 1500 | 568 . . . 945 | 3688 |
| TESTI2051806 | 1501 | 60 . . . 1091 | 3689 |
| TESTI2051867 | 1502 | 779 . . . 1780 | 3690 |
| TESTI2052211 | 1503 | 264 . . . 1358 | 3691 |
| TESTI2052693 | 1504 | 929 . . . 1954 | 3692 |
| TESTI2052698 | 1505 | 451 . . . 1011 | 3693 |
| TESTI2052822 | 1506 | 103 . . . 459 | 3694 |
| TESTI2053242 | 1507 | 86 . . . 574 | 3695 |
| TESTI2053399 | 1508 | 81 . . . 503 | 3696 |
| TESTI2053526 | 1509 | 116 . . . 502 | 3697 |
| TESTI2053621 | 1510 | 977 . . . 1582 | 3698 |
| TESTI4000014 | 1511 | 30 . . . 4214 | 3699 |
| TESTI4000068 | 1512 | 1820 . . . 2359 | 3700 |
| TESTI4000079 | 1513 | 1263 . . . 3458 | 3701 |
| TESTI4000209 | 1514 | 24 . . . 1049 | 3702 |
| TESTI4000215 | 1515 | 230 . . . 922 | 3703 |
| TESTI4000250 | 1516 | 56 . . . 496 | 3704 |
| TESTI4000288 | 1517 | 546 . . . 1082 | 3705 |
| TESTI4000349 | 1518 | 1259 . . . 3469 | 3706 |
| TESTI4000462 | 1519 | 886 . . . 1497 | 3707 |
| TESTI4000530 | 1520 | 346 . . . 879 | 3708 |
| TESTI4000724 | 1521 | 110 . . . 1639 | 3709 |
| TESTI4000970 | 1522 | 458 . . . 2476 | 3710 |
| TESTI4001100 | 1523 | 55 . . . 723 | 3711 |
| TESTI4001106 | 1524 | 453 . . . 2180 | 3712 |
| TESTI4001148 | 1525 | 94 . . . 1947 | 3713 |
| TESTI4001176 | 1526 | 636 . . . 1178 | 3714 |
| TESTI4001201 | 1527 | 106 . . . 441 | 3715 |
| TESTI4001206 | 1528 | 500 . . . 916 | 3716 |
| TESTI4001527 | 1529 | 710 . . . 1468 | 3717 |
| TESTI4001561 | 1530 | 2780 . . . >3955 | 3718 |
| TESTI4001665 | 1531 | 4092 . . . 4538 | 3719 |
| TESTI4001923 | 1532 | 200 . . . 658 | 3720 |
| TESTI4002290 | 1533 | 1054 . . . 1497 | 3721 |
| TESTI4002491 | 1534 | 1553 . . . 1873 | 3722 |
| TESTI4002552 | 1535 | 2112 . . . 3710 | 3723 |
| TESTI4002647 | 1536 | 190 . . . >3607 | 3724 |
| TESTI4002703 | 1537 | 1531 . . . 2484 | 3725 |
| TESTI4002754 | 1538 | 157 . . . 600 | 3726 |
| TESTI4002878 | 1539 | 150 . . . 650 | 3727 |
| TESTI4004200 | 1540 | 4 . . . 498 | 3728 |
| TESTI4005628 | 1541 | 158 . . . 487 | 3729 |
| TESTI4005805 | 1542 | 4 . . . 468 | 3730 |
| TESTI4005857 | 1543 | 3018 . . . 3860 | 3731 |
| TESTI4005961 | 1544 | 3600 . . . 3911 | 3732 |
| TESTI4006053 | 1545 | 163 . . . 480 | 3733 |
| TESTI4006079 | 1546 | 1652 . . . 3514 | 3734 |
| TESTI4006112 | 1547 | 799 . . . 1635 | 3735 |
| TESTI4006137 | 1548 | 235 . . . 798 | 3736 |
| TESTI4006148 | 1549 | 358 . . . 1035 | 3737 |
| TESTI4006219 | 1550 | 138 . . . 479 | 3738 |
| TESTI4006326 | 1551 | 1194 . . . 2537 | 3739 |
| TESTI4006393 | 1552 | 2691 . . . 3194 | 3740 |
| TESTI4006412 | 1553 | 83 . . . 427 | 3741 |
| TESTI4006420 | 1554 | 1850 . . . 2674 | 3742 |
| TESTI4006546 | 1555 | 286 . . . 3543 | 3743 |
| TESTI4006802 | 1556 | 95 . . . 3277 | 3744 |
| TESTI4006819 | 1557 | 1355 . . . 1681 | 3745 |
| TESTI4007064 | 1558 | 5 . . . 4678 | 3746 |
| TESTI4007163 | 1559 | 2933 . . . 3799 | 3747 |
| TESTI4007203 | 1560 | 79 . . . 420 | 3748 |
| TESTI4007239 | 1561 | 36 . . . 4373 | 3749 |
| TESTI4007373 | 1562 | 77 . . . 493 | 3750 |
| TESTI4007382 | 1563 | 32 . . . 2785 | 3751 |
| TESTI4007404 | 1564 | 82 . . . 4038 | 3752 |
| TESTI4007489 | 1565 | 3867 . . . 4589 | 3753 |
| TESTI4007775 | 1566 | 1493 . . . 1870 | 3754 |
| TESTI4007778 | 1567 | 665 . . . 3337 | 3755 |
| TESTI4007799 | 1568 | 1200 . . . 2039 | 3756 |
| TESTI4007810 | 1569 | 1972 . . . 2739 | 3757 |
| TESTI4008007 | 1570 | 1375 . . . 1983 | 3758 |
| TESTI4008018 | 1571 | 2012 . . . 2338 | 3759 |
| TESTI4008050 | 1572 | 968 . . . 2101 | 3760 |
| TESTI4008219 | 1573 | 2148 . . . 2618 | 3761 |
| TESTI4008401 | 1574 | 288 . . . 731 | 3762 |
| TESTI4008429 | 1575 | 2906 . . . 4009 | 3763 |
| TESTI4008573 | 1576 | 199 . . . 528 | 3764 |
| TESTI4008797 | 1577 | 2518 . . . 3342 | 3765 |
| TESTI4008816 | 1578 | 661 . . . 3057 | 3766 |
| TESTI4008935 | 1579 | 2086 . . . 3030 | 3767 |
| TESTI4008993 | 1580 | 224 . . . 1048 | 3768 |
| TESTI4009022 | 1581 | 2341 . . . 2706 | 3769 |
| TESTI4009034 | 1582 | 4067 . . . 4510 | 3770 |
| TESTI4009123 | 1583 | 33 . . . 374 | 3771 |
| TESTI4009160 | 1584 | 51 . . . 2603 | 3772 |
| TESTI4009215 | 1585 | 1159 . . . 1467 | 3773 |
| TESTI4009283 | 1586 | 1816 . . . 2547 | 3774 |
| TESTI4009286 | 1587 | 4041 . . . 4886 | 3775 |
| TESTI4009374 | 1588 | 180 . . . 1592 | 3776 |
| TESTI4009406 | 1589 | 2151 . . . 3299 | 3777 |
| TESTI4009457 | 1590 | 364 . . . 858 | 3778 |
| TESTI4009563 | 1591 | 2555 . . . 3313 | 3779 |
| TESTI4009608 | 1592 | 531 . . . 908 | 3780 |
| TESTI4009638 | 1593 | 85 . . . 624 | 3781 |
| TESTI4009881 | 1594 | 583 . . . 3669 | 3782 |
| TESTI4010211 | 1595 | 46 . . . 405 | 3783 |
| TESTI4010377 | 1596 | 1057 . . . 1476 | 3784 |
| TESTI4010713 | 1597 | 106 . . . 3780 | 3785 |
| TESTI4010789 | 1598 | 2218 . . . 2778 | 3786 |
| TESTI4010817 | 1599 | 1062 . . . >3380 | 3787 |
| TESTI4010831 | 1600 | 486 . . . 3395 | 3788 |
| TESTI4010851 | 1601 | 92 . . . >4555 | 3789 |
| TESTI4010928 | 1602 | 197 . . . 769 | 3790 |
| TESTI4011118 | 1603 | 4088 . . . 4399 | 3791 |
| TESTI4011161 | 1604 | 1397 . . . 3091 | 3792 |
| TESTI4011246 | 1605 | 1723 . . . 2106 | 3793 |
| TESTI4011484 | 1606 | 201 . . . 2336 | 3794 |
| TESTI4011505 | 1607 | 1357 . . . 1815 | 3795 |
| TESTI4011745 | 1608 | 2319 . . . >4990 | 3796 |
| TESTI4011956 | 1609 | 162 . . . 2786 | 3797 |
| TESTI4012086 | 1610 | 177 . . . 731 | 3798 |
| TESTI4012329 | 1611 | 524 . . . 907 | 3799 |
| TESTI4012406 | 1612 | 141 . . . 611 | 3800 |
| TESTI4012448 | 1613 | 1666 . . . 3051 | 3801 |
| TESTI4012505 | 1614 | 1119 . . . 3005 | 3802 |
| TESTI4012556 | 1615 | 1928 . . . 2431 | 3803 |
| TESTI4012679 | 1616 | 1037 . . . 2071 | 3804 |
| TESTI4012702 | 1617 | 72 . . . 1529 | 3805 |
| TESTI4013369 | 1618 | 3026 . . . 3454 | 3806 |
| TESTI4013667 | 1619 | 351 . . . 659 | 3807 |
| TESTI4013675 | 1620 | 287 . . . 592 | 3808 |
| TESTI4013685 | 1621 | 2650 . . . 3045 | 3809 |
| TESTI4013735 | 1622 | 2964 . . . 3386 | 3810 |
| TESTI4013817 | 1623 | 2764 . . . 3237 | 3811 |
| TESTI4013830 | 1624 | 163 . . . 4938 | 3812 |
| TESTI4013924 | 1625 | 168 . . . 2039 | 3813 |
| TESTI4014159 | 1626 | 2462 . . . 2929 | 3814 |
| TESTI4014175 | 1627 | 836 . . . 2569 | 3815 |
| TESTI4014306 | 1628 | 2600 . . . 3031 | 3816 |
| TESTI4014392 | 1629 | 2506 . . . 2877 | 3817 |
| TESTI4014445 | 1630 | 23 . . . 364 | 3818 |
| TESTI4014694 | 1631 | 65 . . . 424 | 3819 |
| TESTI4014818 | 1632 | 1881 . . . 2957 | 3820 |
| TESTI4014924 | 1633 | 131 . . . 3898 | 3821 |
| TESTI4015263 | 1634 | 246 . . . 746 | 3822 |
| TESTI4015293 | 1635 | 2214 . . . 4253 | 3823 |
| TESTI4015471 | 1636 | 3317 . . . 3808 | 3824 |
| TESTI4015600 | 1637 | 2050 . . . 2508 | 3825 |
| TESTI4015646 | 1638 | 1674 . . . 2030 | 3826 |
| TESTI4015681 | 1639 | 2551 . . . 3006 | 3827 |
| TESTI4015688 | 1640 | 37 . . . 432 | 3828 |
| TESTI4016110 | 1641 | 2559 . . . 3257 | 3829 |
| TESTI4016238 | 1642 | 12 . . . 371 | 3830 |
| TESTI4016551 | 1643 | 2731 . . . 3495 | 3831 |
| TESTI4016812 | 1644 | 53 . . . 3097 | 3832 |
| TESTI4016822 | 1645 | 203 . . . 688 | 3833 |
| TESTI4016882 | 1646 | 131 . . . 958 | 3834 |
| TESTI4016925 | 1647 | 49 . . . 4704 | 3835 |
| TESTI4017001 | 1648 | 1 . . . 1251 | 3836 |
| TESTI4017137 | 1649 | 1822 . . . 2391 | 3837 |
| TESTI4017254 | 1650 | 295 . . . 645 | 3838 |
| TESTI4017543 | 1651 | 30 . . . 3824 | 3839 |
| TESTI4017575 | 1652 | 32 . . . 3679 | 3840 |
| TESTI4017848 | 1653 | 170 . . . 544 | 3841 |
| TESTI4017901 | 1654 | 50 . . . 361 | 3842 |
| TESTI4017961 | 1655 | 2224 . . . 2679 | 3843 |
| TESTI4018152 | 1656 | 1279 . . . 2082 | 3844 |
| TESTI4018208 | 1657 | 114 . . . 461 | 3845 |
| TESTI4018382 | 1658 | 819 . . . 1208 | 3846 |
| TESTI4018555 | 1659 | 980 . . . 1633 | 3847 |
| TESTI4018806 | 1660 | 156 . . . 587 | 3848 |
| TESTI4018835 | 1661 | 1223 . . . 3052 | 3849 |
| TESTI4018881 | 1662 | 1303 . . . 2754 | 3850 |
| TESTI4018886 | 1663 | 1235 . . . 2332 | 3851 |
| TESTI4019140 | 1664 | 622 . . . 2322 | 3852 |
| TESTI4019299 | 1665 | 122 . . . 1195 | 3853 |
| TESTI4019417 | 1666 | 247 . . . 618 | 3854 |
| TESTI4019566 | 1667 | 35 . . . 2755 | 3855 |
| TESTI4019843 | 1668 | 165 . . . 2381 | 3856 |
| TESTI4020092 | 1669 | 1074 . . . 1418 | 3857 |
| TESTI4020102 | 1670 | 1262 . . . 1693 | 3858 |
| TESTI4020806 | 1671 | 367 . . . 753 | 3859 |
| TESTI4020920 | 1672 | 846 . . . 2930 | 3860 |
| TESTI4021294 | 1673 | 1 . . . 3249 | 3861 |
| TESTI4021456 | 1674 | 445 . . . 900 | 3862 |
| TESTI4021478 | 1675 | 116 . . . 2476 | 3863 |
| TESTI4021491 | 1676 | 1532 . . . 1972 | 3864 |
| TESTI4022716 | 1677 | 577 . . . 3141 | 3865 |
| TESTI4022873 | 1678 | 166 . . . 3783 | 3866 |
| TESTI4022936 | 1679 | 54 . . . 854 | 3867 |
| TESTI4023546 | 1680 | 150 . . . 2882 | 3868 |
| TESTI4023555 | 1681 | 1769 . . . 2470 | 3869 |
| TESTI4023722 | 1682 | 729 . . . 1112 | 3870 |
| TESTI4023762 | 1683 | 471 . . . 2999 | 3871 |
| TESTI4023942 | 1684 | 47 . . . 361 | 3872 |
| TESTI4024344 | 1685 | 3 . . . 548 | 3873 |
| TESTI4024420 | 1686 | 96 . . . 3140 | 3874 |
| TESTI4024874 | 1687 | 418 . . . 918 | 3875 |
| TESTI4024890 | 1688 | 2189 . . . 2623 | 3876 |
| TESTI4024907 | 1689 | 1280 . . . 1729 | 3877 |
| TESTI4025731 | 1690 | 266 . . . 610 | 3878 |
| TESTI4025797 | 1691 | 56 . . . 2869 | 3879 |
| TESTI4025920 | 1692 | 76 . . . 3117 | 3880 |
| TESTI4026079 | 1693 | 3 . . . 323 | 3881 |
| TESTI4026192 | 1694 | 1 . . . 390 | 3882 |
| TESTI4026295 | 1695 | 145 . . . 498 | 3883 |
| TESTI4026456 | 1696 | 117 . . . 443 | 3884 |
| TESTI4026510 | 1697 | 1733 . . . 3232 | 3885 |
| TESTI4026524 | 1698 | 744 . . . 2759 | 3886 |
| TESTI4026700 | 1699 | 242 . . . 2626 | 3887 |
| TESTI4026762 | 1700 | 392 . . . 4093 | 3888 |
| TESTI4026785 | 1701 | 107 . . . 508 | 3889 |
| TESTI4027516 | 1702 | 3747 . . . 4265 | 3890 |
| TESTI4027557 | 1703 | 1469 . . . 2440 | 3891 |
| TESTI4027821 | 1704 | 1226 . . . 1855 | 3892 |
| TESTI4028059 | 1705 | 1786 . . . 3183 | 3893 |
| TESTI4028062 | 1706 | 53 . . . 529 | 3894 |
| TESTI4028429 | 1707 | 1 . . . 306 | 3895 |
| TESTI4028612 | 1708 | 357 . . . 4304 | 3896 |
| TESTI4028809 | 1709 | 1672 . . . 2172 | 3897 |
| TESTI4028823 | 1710 | 119 . . . >2529 | 3898 |
| TESTI4028880 | 1711 | 758 . . . 2320 | 3899 |
| TESTI4028983 | 1712 | 283 . . . 924 | 3900 |
| TESTI4029370 | 1713 | 79 . . . 447 | 3901 |
| TESTI4029671 | 1714 | 59 . . . 1408 | 3902 |
| TESTI4029836 | 1715 | 76 . . . 2982 | 3903 |
| TESTI4030069 | 1716 | 219 . . . 650 | 3904 |
| TESTI4030159 | 1717 | 34 . . . 621 | 3905 |
| TESTI4030505 | 1718 | 142 . . . 3492 | 3906 |
| TESTI4030603 | 1719 | 37 . . . 1011 | 3907 |
| TESTI4030669 | 1720 | 3 . . . 3041 | 3908 |
| TESTI4032895 | 1721 | 212 . . . 2701 | 3909 |
| TESTI4033433 | 1722 | 875 . . . 1519 | 3910 |
| TESTI4033690 | 1723 | 206 . . . >3057 | 3911 |
| TESTI4034172 | 1724 | 97 . . . 435 | 3912 |
| TESTI4034212 | 1725 | 296 . . . 1093 | 3913 |
| TESTI4034432 | 1726 | 4035 . . . >4449 | 3914 |
| TESTI4034632 | 1727 | 1306 . . . 2199 | 3915 |
| TESTI4034912 | 1728 | 201 . . . 3137 | 3916 |
| TESTI4035063 | 1729 | 894 . . . 3518 | 3917 |
| TESTI4035065 | 1730 | 1418 . . . 1927 | 3918 |
| TESTI4035498 | 1731 | 39 . . . 704 | 3919 |
| TESTI4035602 | 1732 | 39 . . . 389 | 3920 |
| TESTI4035637 | 1733 | 1 . . . 2937 | 3921 |
| TESTI4035649 | 1734 | 19 . . . 441 | 3922 |
| TESTI4036042 | 1735 | 3085 . . . 3465 | 3923 |
| TESTI4036909 | 1736 | 130 . . . 2910 | 3924 |
| TESTI4037066 | 1737 | 1285 . . . 4461 | 3925 |
| TESTI4037156 | 1738 | 1119 . . . 2738 | 3926 |
| TESTI4037188 | 1739 | 142 . . . 2280 | 3927 |
| TESTI4037244 | 1740 | 52 . . . 354 | 3928 |
| TESTI4037727 | 1741 | 250 . . . 3051 | 3929 |
| TESTI4038156 | 1742 | 163 . . . 489 | 3930 |
| TESTI4038223 | 1743 | 112 . . . 654 | 3931 |
| TESTI4038258 | 1744 | 83 . . . 403 | 3932 |
| TESTI4038339 | 1745 | 458 . . . 2428 | 3933 |
| TESTI4038492 | 1746 | 415 . . . 960 | 3934 |
| TESTI4038818 | 1747 | 1053 . . . 1442 | 3935 |
| TESTI4039038 | 1748 | 1270 . . . 2871 | 3936 |
| TESTI4039086 | 1749 | 1902 . . . 2606 | 3937 |
| TESTI4039659 | 1750 | 237 . . . 935 | 3938 |
| TESTI4040363 | 1751 | 255 . . . 677 | 3939 |
| TESTI4040800 | 1752 | 59 . . . 1144 | 3940 |
| TESTI4040939 | 1753 | 23 . . . 823 | 3941 |
| TESTI4040956 | 1754 | 1316 . . . 1630 | 3942 |
| TESTI4041053 | 1755 | 89 . . . 3331 | 3943 |
| TESTI4041099 | 1756 | 3010 . . . 3369 | 3944 |
| TESTI4041143 | 1757 | 318 . . . 644 | 3945 |
| TESTI4041519 | 1758 | 4 . . . 345 | 3946 |
| TESTI4041624 | 1759 | 6 . . . 458 | 3947 |
| TESTI4041903 | 1760 | 69 . . . 458 | 3948 |
| TESTI4041954 | 1761 | 130 . . . 498 | 3949 |
| TESTI4042098 | 1762 | 1523 . . . 2296 | 3950 |
| TESTI4042444 | 1763 | 1808 . . . 2239 | 3951 |
| TESTI4042711 | 1764 | 220 . . . 561 | 3952 |
| TESTI4043129 | 1765 | 1129 . . . 1629 | 3953 |
| TESTI4043203 | 1766 | 84 . . . 437 | 3954 |
| TESTI4043551 | 1767 | 2185 . . . 2754 | 3955 |
| TESTI4043947 | 1768 | 14 . . . 2920 | 3956 |
| TESTI4044035 | 1769 | 140 . . . 682 | 3957 |
| TESTI4044084 | 1770 | 6 . . . 491 | 3958 |
| TESTI4044123 | 1771 | 227 . . . 637 | 3959 |
| TESTI4044186 | 1772 | 263 . . . 844 | 3960 |
| TESTI4044234 | 1773 | 184 . . . 987 | 3961 |
| TESTI4044296 | 1774 | 1968 . . . 2684 | 3962 |
| TESTI4044682 | 1775 | 36 . . . 491 | 3963 |
| TESTI4045312 | 1776 | 375 . . . 734 | 3964 |
| TESTI4046253 | 1777 | 151 . . . 456 | 3965 |
| TESTI4046282 | 1778 | 79 . . . 3672 | 3966 |
| TESTI4046487 | 1779 | 1351 . . . 2883 | 3967 |
| TESTI4046819 | 1780 | 299 . . . 3535 | 3968 |
| TESTI4046884 | 1781 | 99 . . . >3063 | 3969 |
| TESTI4047069 | 1782 | 1554 . . . 1895 | 3970 |
| THYMU1000496 | 1783 | 324 . . . 1295 | 3971 |
| THYMU1000600 | 1784 | 390 . . . 809 | 3972 |
| THYMU2000932 | 1785 | 1767 . . . 2492 | 3973 |
| THYMU2001053 | 1786 | 1669 . . . 2070 | 3974 |
| THYMU2001090 | 1787 | 1738 . . . 2067 | 3975 |
| THYMU2003397 | 1788 | 1100 . . . 1543 | 3976 |
| THYMU2003632 | 1789 | 1483 . . . 1812 | 3977 |
| THYMU2003760 | 1790 | 304 . . . 612 | 3978 |
| THYMU2004693 | 1791 | 1445 . . . 1792 | 3979 |
| THYMU2005003 | 1792 | 1245 . . . 1697 | 3980 |
| THYMU2005190 | 1793 | 133 . . . 531 | 3981 |
| THYMU2005303 | 1794 | 909 . . . 1367 | 3982 |
| THYMU2005321 | 1795 | 81 . . . 473 | 3983 |
| THYMU2006420 | 1796 | 335 . . . 1147 | 3984 |
| THYMU2007060 | 1797 | 786 . . . >2283 | 3985 |
| THYMU2007179 | 1798 | 310 . . . >1233 | 3986 |
| THYMU2007658 | 1799 | 452 . . . 913 | 3987 |
| THYMU2008282 | 1800 | 1301 . . . 1741 | 3988 |
| THYMU2008725 | 1801 | 47 . . . 1876 | 3989 |
| THYMU2009134 | 1802 | 147 . . . 674 | 3990 |
| THYMU2009157 | 1803 | 1691 . . . 2095 | 3991 |
| THYMU2009425 | 1804 | 4 . . . 525 | 3992 |
| THYMU2011548 | 1805 | 70 . . . 1044 | 3993 |
| THYMU2011736 | 1806 | 1019 . . . 1939 | 3994 |
| THYMU2013386 | 1807 | 421 . . . 1773 | 3995 |
| THYMU2014353 | 1808 | 765 . . . 1100 | 3996 |
| THYMU2016204 | 1809 | 880 . . . 1923 | 3997 |
| THYMU2016523 | 1810 | 2076 . . . 2411 | 3998 |
| THYMU2019210 | 1811 | 55 . . . 1359 | 3999 |
| THYMU2019587 | 1812 | 1196 . . . 1633 | 4000 |
| THYMU2023711 | 1813 | 80 . . . 1486 | 4001 |
| THYMU2023967 | 1814 | 1000 . . . 1479 | 4002 |
| THYMU2025707 | 1815 | 18 . . . 527 | 4003 |
| THYMU2027497 | 1816 | 84 . . . 884 | 4004 |
| THYMU2027695 | 1817 | 52 . . . 1611 | 4005 |
| THYMU2027734 | 1818 | 581 . . . 1141 | 4006 |
| THYMU2028978 | 1819 | 283 . . . 642 | 4007 |
| THYMU2029676 | 1820 | 1209 . . . 1868 | 4008 |
| THYMU2029688 | 1821 | 45 . . . 368 | 4009 |
| THYMU2030068 | 1822 | 91 . . . 477 | 4010 |
| THYMU2030226 | 1823 | 207 . . . 710 | 4011 |
| THYMU2030264 | 1824 | 152 . . . 1756 | 4012 |
| THYMU2030637 | 1825 | 147 . . . 1865 | 4013 |
| THYMU2030796 | 1826 | 328 . . . 642 | 4014 |
| THYMU2031046 | 1827 | 23 . . . 703 | 4015 |
| THYMU2031218 | 1828 | 563 . . . 925 | 4016 |
| THYMU2031258 | 1829 | 127 . . . 681 | 4017 |
| THYMU2031341 | 1830 | 2050 . . . 2376 | 4018 |
| THYMU2031368 | 1831 | 498 . . . 821 | 4019 |
| THYMU2031579 | 1832 | 258 . . . 578 | 4020 |
| THYMU2031847 | 1833 | 145 . . . 492 | 4021 |
| THYMU2031890 | 1834 | 4 . . . 348 | 4022 |
| THYMU2032014 | 1835 | 880 . . . 1371 | 4023 |
| THYMU2032035 | 1836 | 186 . . . 533 | 4024 |
| THYMU2032080 | 1837 | 366 . . . 674 | 4025 |
| THYMU2032358 | 1838 | 230 . . . 604 | 4026 |
| THYMU2032437 | 1839 | 665 . . . 1090 | 4027 |
| THYMU2032655 | 1840 | 360 . . . 701 | 4028 |
| THYMU2032696 | 1841 | 1133 . . . 2215 | 4029 |
| THYMU2032825 | 1842 | 189 . . . 818 | 4030 |
| THYMU2033070 | 1843 | 22 . . . 441 | 4031 |
| THYMU2033079 | 1844 | 1706 . . . 2023 | 4032 |
| THYMU2033104 | 1845 | 1963 . . . 2298 | 4033 |
| THYMU2033308 | 1846 | 1067 . . . 1369 | 4034 |
| THYMU2033787 | 1847 | 1808 . . . 2656 | 4035 |
| THYMU2033816 | 1848 | 1947 . . . 2336 | 4036 |
| THYMU2034314 | 1849 | 1836 . . . 2189 | 4037 |
| THYMU2034374 | 1850 | 1119 . . . 1637 | 4038 |
| THYMU2034647 | 1851 | 1557 . . . 2051 | 4039 |
| THYMU2035064 | 1852 | 24 . . . 428 | 4040 |
| THYMU2035101 | 1853 | 17 . . . 334 | 4041 |
| THYMU2035319 | 1854 | 641 . . . 2161 | 4042 |
| THYMU2035388 | 1855 | 37 . . . 408 | 4043 |
| THYMU2035400 | 1856 | 96 . . . 494 | 4044 |
| THYMU2035735 | 1857 | 99 . . . 1619 | 4045 |
| THYMU2036058 | 1858 | 1381 . . . 1785 | 4046 |
| THYMU2036085 | 1859 | 2311 . . . 2922 | 4047 |
| THYMU2036252 | 1860 | 22 . . . 459 | 4048 |
| THYMU2036265 | 1861 | 1260 . . . 1568 | 4049 |
| THYMU2036459 | 1862 | 347 . . . 3121 | 4050 |
| THYMU2036653 | 1863 | 422 . . . 754 | 4051 |
| THYMU2037081 | 1864 | 78 . . . 533 | 4052 |
| THYMU2037208 | 1865 | 1156 . . . 1608 | 4053 |
| THYMU2037226 | 1866 | 375 . . . 4157 | 4054 |
| THYMU2037233 | 1867 | 2777 . . . 3235 | 4055 |
| THYMU2037348 | 1868 | 115 . . . 423 | 4056 |
| THYMU2037965 | 1869 | 167 . . . 598 | 4057 |
| THYMU2038189 | 1870 | 84 . . . 452 | 4058 |
| THYMU2038301 | 1871 | 1019 . . . 1417 | 4059 |
| THYMU2038369 | 1872 | 11 . . . 826 | 4060 |
| THYMU2038615 | 1873 | 597 . . . 1100 | 4061 |
| THYMU2038636 | 1874 | 19 . . . 387 | 4062 |
| THYMU2038739 | 1875 | 1446 . . . 1874 | 4063 |
| THYMU2038772 | 1876 | 50 . . . 532 | 4064 |
| THYMU2038797 | 1877 | 75 . . . 1304 | 4065 |
| THYMU2039305 | 1878 | 1607 . . . 1969 | 4066 |
| THYMU2039315 | 1879 | 26 . . . 1549 | 4067 |
| THYMU2039350 | 1880 | 86 . . . 1891 | 4068 |
| THYMU2039411 | 1881 | 423 . . . 800 | 4069 |
| THYMU2039780 | 1882 | 292 . . . 831 | 4070 |
| THYMU2039989 | 1883 | 1651 . . . 2124 | 4071 |
| THYMU2040140 | 1884 | 72 . . . 437 | 4072 |
| THYMU2040412 | 1885 | 660 . . . 1049 | 4073 |
| THYMU2040824 | 1886 | 13 . . . 693 | 4074 |
| THYMU2040975 | 1887 | 174 . . . 1262 | 4075 |
| THYMU2041007 | 1888 | 54 . . . 401 | 4076 |
| THYMU2041015 | 1889 | 251 . . . 1798 | 4077 |
| THYMU2041252 | 1890 | 301 . . . 798 | 4078 |
| THYMU3000028 | 1891 | 883 . . . 1701 | 4079 |
| THYMU3000036 | 1892 | 480 . . . 881 | 4080 |
| THYMU3000133 | 1893 | 312 . . . 2012 | 4081 |
| THYMU3000655 | 1894 | 148 . . . 774 | 4082 |
| THYMU3000826 | 1895 | 225 . . . 779 | 4083 |
| THYMU3001083 | 1896 | 2429 . . . 2761 | 4084 |
| THYMU3001234 | 1897 | 1340 . . . 2329 | 4085 |
| THYMU3001379 | 1898 | 599 . . . 2251 | 4086 |
| THYMU3001472 | 1899 | 1556 . . . 1870 | 4087 |
| THYMU3001991 | 1900 | 2453 . . . 2782 | 4088 |
| THYMU3002452 | 1901 | 1314 . . . 1697 | 4089 |
| THYMU3002661 | 1902 | 818 . . . 1348 | 4090 |
| THYMU3003212 | 1903 | 1292 . . . 1726 | 4091 |
| THYMU3003309 | 1904 | 2336 . . . 2866 | 4092 |
| THYMU3003763 | 1905 | 1011 . . . 1991 | 4093 |
| THYMU3004157 | 1906 | 579 . . . 899 | 4094 |
| THYMU3004835 | 1907 | 77 . . . 1282 | 4095 |
| THYMU3004866 | 1908 | 703 . . . 2709 | 4096 |
| THYMU3005696 | 1909 | 2267 . . . 2569 | 4097 |
| THYMU3006118 | 1910 | 924 . . . 1331 | 4098 |
| THYMU3006132 | 1911 | 237 . . . 1703 | 4099 |
| THYMU3006168 | 1912 | 2025 . . . 2813 | 4100 |
| THYMU3006172 | 1913 | 240 . . . 1823 | 4101 |
| THYMU3006371 | 1914 | 1600 . . . 2007 | 4102 |
| THYMU3006485 | 1915 | 1386 . . . 1796 | 4103 |
| THYMU3006811 | 1916 | 27 . . . 395 | 4104 |
| THYMU3006963 | 1917 | 386 . . . 784 | 4105 |
| THYMU3007137 | 1918 | 404 . . . 2878 | 4106 |
| THYMU3007368 | 1919 | 2076 . . . 2516 | 4107 |
| THYMU3007845 | 1920 | 1862 . . . 2281 | 4108 |
| THYMU3008171 | 1921 | 1204 . . . 1773 | 4109 |
| THYMU3008436 | 1922 | 225 . . . 2780 | 4110 |
| THYMU3009255 | 1923 | 186 . . . 524 | 4111 |
| TKIDN2000701 | 1924 | 1716 . . . 2306 | 4112 |
| TKIDN2002424 | 1925 | 42 . . . 377 | 4113 |
| TKIDN2002632 | 1926 | 350 . . . 730 | 4114 |
| TKIDN2003044 | 1927 | 1520 . . . 1840 | 4115 |
| TKIDN2004386 | 1928 | 1489 . . . 2130 | 4116 |
| TKIDN2005934 | 1929 | 158 . . . 571 | 4117 |
| TKIDN2005947 | 1930 | 144 . . . 533 | 4118 |
| TKIDN2006525 | 1931 | 613 . . . 1590 | 4119 |
| TKIDN2006852 | 1932 | 665 . . . 1294 | 4120 |
| TKIDN2007667 | 1933 | 1640 . . . >2145 | 4121 |
| TKIDN2009092 | 1934 | 665 . . . 1021 | 4122 |
| TKIDN2009641 | 1935 | 538 . . . 852 | 4123 |
| TKIDN2009889 | 1936 | 164 . . . 580 | 4124 |
| TKIDN2010934 | 1937 | 516 . . . 1220 | 4125 |
| TKIDN2012824 | 1938 | 434 . . . 745 | 4126 |
| TKIDN2013287 | 1939 | 331 . . . 663 | 4127 |
| TKIDN2014757 | 1940 | 223 . . . 537 | 4128 |
| TKIDN2014771 | 1941 | 244 . . . 642 | 4129 |
| TKIDN2015263 | 1942 | 43 . . . 396 | 4130 |
| TKIDN2015788 | 1943 | 841 . . . 1272 | 4131 |
| TKIDN2016309 | 1944 | 212 . . . 634 | 4132 |
| TKIDN2019116 | 1945 | 14 . . . 640 | 4133 |
| TLIVE2000023 | 1946 | 110 . . . 589 | 4134 |
| TLIVE2001327 | 1947 | 90 . . . 2918 | 4135 |
| TLIVE2001828 | 1948 | 155 . . . 589 | 4136 |
| TLIVE2001927 | 1949 | 557 . . . 895 | 4137 |
| TLIVE2002336 | 1950 | 3 . . . 1598 | 4138 |
| TLIVE2002338 | 1951 | 1005 . . . 1817 | 4139 |
| TLIVE2002690 | 1952 | 210 . . . 1490 | 4140 |
| TLIVE2003197 | 1953 | 88 . . . 474 | 4141 |
| TLIVE2003225 | 1954 | 60 . . . 1220 | 4142 |
| TLIVE2003381 | 1955 | 603 . . . 1097 | 4143 |
| TLIVE2003970 | 1956 | 230 . . . 640 | 4144 |
| TLIVE2004110 | 1957 | 68 . . . 424 | 4145 |
| TLIVE2004320 | 1958 | 1436 . . . 2650 | 4146 |
| TLIVE2004601 | 1959 | 242 . . . 586 | 4147 |
| TLIVE2005180 | 1960 | 1180 . . . 1518 | 4148 |
| TLIVE2006236 | 1961 | 59 . . . 409 | 4149 |
| TLIVE2006529 | 1962 | 572 . . . 1492 | 4150 |
| TLIVE2007132 | 1963 | 70 . . . 444 | 4151 |
| TLIVE2007528 | 1964 | 715 . . . 1110 | 4152 |
| TLIVE2007816 | 1965 | 214 . . . 669 | 4153 |
| TLIVE2008083 | 1966 | 1670 . . . 2002 | 4154 |
| TLIVE2008229 | 1967 | 17 . . . 1786 | 4155 |
| TLIVE2009541 | 1968 | 343 . . . 1413 | 4156 |
| TOVAR2000649 | 1969 | 192 . . . 605 | 4157 |
| TOVAR2001281 | 1970 | 71 . . . 403 | 4158 |
| TOVAR2001730 | 1971 | 94 . . . 672 | 4159 |
| TOVAR2002247 | 1972 | 317 . . . 1375 | 4160 |
| TOVAR2002549 | 1973 | 1301 . . . 1657 | 4161 |
| TRACH1000205 | 1974 | 89 . . . 928 | 4162 |
| TRACH2001443 | 1975 | 284 . . . 949 | 4163 |
| TRACH2001549 | 1976 | 190 . . . 1566 | 4164 |
| TRACH2001684 | 1977 | 1190 . . . 1684 | 4165 |
| TRACH2003070 | 1978 | 358 . . . 855 | 4166 |
| TRACH2004170 | 1979 | 349 . . . 795 | 4167 |
| TRACH2005066 | 1980 | 136 . . . 597 | 4168 |
| TRACH2005811 | 1981 | 1125 . . . 2234 | 4169 |
| TRACH2006049 | 1982 | 927 . . . 1247 | 4170 |
| TRACH2006387 | 1983 | 245 . . . 1258 | 4171 |
| TRACH2007059 | 1984 | 244 . . . 2031 | 4172 |
| TRACH2007834 | 1985 | 3 . . . 311 | 4173 |
| TRACH2008300 | 1986 | 414 . . . 752 | 4174 |
| TRACH2009310 | 1987 | 275 . . . 2413 | 4175 |
| TRACH2019248 | 1988 | 42 . . . 395 | 4176 |
| TRACH2019473 | 1989 | 179 . . . 1552 | 4177 |
| TRACH2020525 | 1990 | 1340 . . . 1912 | 4178 |
| TRACH2021398 | 1991 | 225 . . . 872 | 4179 |
| TRACH2021964 | 1992 | 105 . . . >2454 | 4180 |
| TRACH2022042 | 1993 | 985 . . . 1332 | 4181 |
| TRACH2022425 | 1994 | 80 . . . 1573 | 4182 |
| TRACH2022553 | 1995 | 38 . . . 1744 | 4183 |
| TRACH2022649 | 1996 | 55 . . . 1491 | 4184 |
| TRACH2023299 | 1997 | 24 . . . 1670 | 4185 |
| TRACH2023306 | 1998 | 157 . . . 1071 | 4186 |
| TRACH2025344 | 1999 | 1616 . . . 2086 | 4187 |
| TRACH2025507 | 2000 | 1483 . . . 1848 | 4188 |
| TRACH2025535 | 2001 | 561 . . . 1253 | 4189 |
| TRACH2025749 | 2002 | 655 . . . 1017 | 4190 |
| TRACH2025911 | 2003 | 189 . . . 680 | 4191 |
| TRACH2025932 | 2004 | 201 . . . 530 | 4192 |
| TRACH3000014 | 2005 | 33 . . . 2963 | 4193 |
| TRACH3000342 | 2006 | 3259 . . . 3672 | 4194 |
| TRACH3000558 | 2007 | 3058 . . . >3576 | 4195 |
| TRACH3000586 | 2008 | 1117 . . . 1662 | 4196 |
| TRACH3000926 | 2009 | 127 . . . 4203 | 4197 |
| TRACH3001427 | 2010 | 26 . . . 1021 | 4198 |
| TRACH3002064 | 2011 | 1457 . . . 1777 | 4199 |
| TRACH3002168 | 2012 | 730 . . . 2313 | 4200 |
| TRACH3002192 | 2013 | 24 . . . 464 | 4201 |
| TRACH3002650 | 2014 | 3122 . . . 3475 | 4202 |
| TRACH3002866 | 2015 | 90 . . . 1199 | 4203 |
| TRACH3002871 | 2016 | 1866 . . . 2183 | 4204 |
| TRACH3003379 | 2017 | 84 . . . 1916 | 4205 |
| TRACH3004068 | 2018 | 787 . . . 1104 | 4206 |
| TRACH3004537 | 2019 | 1535 . . . 2935 | 4207 |
| TRACH3004721 | 2020 | 1009 . . . 2847 | 4208 |
| TRACH3004786 | 2021 | 2629 . . . 3258 | 4209 |
| TRACH3004840 | 2022 | 79 . . . 714 | 4210 |
| TRACH3005294 | 2023 | 3984 . . . 4352 | 4211 |
| TRACH3005479 | 2024 | 90 . . . 3338 | 4212 |
| TRACH3005549 | 2025 | 81 . . . 845 | 4213 |
| TRACH3006038 | 2026 | 2846 . . . 3157 | 4214 |
| TRACH3006149 | 2027 | 2186 . . . 2494 | 4215 |
| TRACH3006228 | 2028 | 1016 . . . 3304 | 4216 |
| TRACH3006412 | 2029 | 1681 . . . 2196 | 4217 |
| TRACH3006470 | 2030 | 157 . . . 1983 | 4218 |
| TRACH3006889 | 2031 | 2712 . . . 3470 | 4219 |
| TRACH3007391 | 2032 | 3 . . . 308 | 4220 |
| TRACH3007479 | 2033 | 571 . . . 1602 | 4221 |
| TRACH3008093 | 2034 | 184 . . . 813 | 4222 |
| TRACH3008535 | 2035 | 2148 . . . 2456 | 4223 |
| TRACH3008629 | 2036 | 80 . . . 2737 | 4224 |
| TRACH3008713 | 2037 | 2044 . . . 2364 | 4225 |
| TRACH3009455 | 2038 | 1507 . . . 2718 | 4226 |
| TRACH3034731 | 2039 | 124 . . . 1233 | 4227 |
| TRACH3034762 | 2040 | 1177 . . . 1527 | 4228 |
| TRACH3035199 | 2041 | 234 . . . 1211 | 4229 |
| TRACH3035235 | 2042 | 3 . . . 350 | 4230 |
| TRACH3035482 | 2043 | 1879 . . . 2346 | 4231 |
| TRACH3035526 | 2044 | 17 . . . 1489 | 4232 |
| TRACH3036193 | 2045 | 172 . . . 4803 | 4233 |
| TRACH3036207 | 2046 | 268 . . . 1368 | 4234 |
| TRACH3036309 | 2047 | 50 . . . 691 | 4235 |
| TRACH3036456 | 2048 | 1214 . . . 1591 | 4236 |
| TRACH3036609 | 2049 | 3159 . . . 4154 | 4237 |
| TSTOM1000135 | 2050 | 201 . . . 1097 | 4238 |
| TSTOM2000442 | 2051 | 80 . . . 1633 | 4239 |
| TSTOM2000553 | 2052 | 170 . . . 1450 | 4240 |
| TSTOM2002672 | 2053 | 1088 . . . 1432 | 4241 |
| TUTER1000122 | 2054 | 10 . . . 363 | 4242 |
| TUTER2000425 | 2055 | 216 . . . 572 | 4243 |
| TUTER2000904 | 2056 | 18 . . . 773 | 4244 |
| TUTER2000916 | 2057 | 149 . . . 568 | 4245 |
| TUTER2001387 | 2058 | 1525 . . . 1908 | 4246 |
| TUTER2002729 | 2059 | 20 . . . 868 | 4247 |
| UTERU1000024 | 2060 | 15 . . . 1190 | 4248 |
| UTERU1000031 | 2061 | 86 . . . 1609 | 4249 |
| UTERU1000148 | 2062 | 1553 . . . 2005 | 4250 |
| UTERU1000249 | 2063 | 349 . . . 2499 | 4251 |
| UTERU1000337 | 2064 | 1062 . . . 1922 | 4252 |
| UTERU1000339 | 2065 | 18 . . . 341 | 4253 |
| UTERU2000649 | 2066 | 213 . . . 902 | 4254 |
| UTERU2001409 | 2067 | 236 . . . 553 | 4255 |
| UTERU2002410 | 2068 | 2655 . . . 2987 | 4256 |
| UTERU2002841 | 2069 | 1185 . . . 2021 | 4257 |
| UTERU2004688 | 2070 | 1487 . . . 2470 | 4258 |
| UTERU2004929 | 2071 | 2106 . . . 2462 | 4259 |
| UTERU2005004 | 2072 | 1795 . . . 2388 | 4260 |
| UTERU2005621 | 2073 | 98 . . . 1483 | 4261 |
| UTERU2006115 | 2074 | 128 . . . 1018 | 4262 |
| UTERU2006137 | 2075 | 1721 . . . 2068 | 4263 |
| UTERU2006568 | 2076 | 535 . . . 1458 | 4264 |
| UTERU2007444 | 2077 | 1104 . . . 1502 | 4265 |
| UTERU2007520 | 2078 | 1644 . . . 2126 | 4266 |
| UTERU2007724 | 2079 | 53 . . . 865 | 4267 |
| UTERU2008347 | 2080 | 123 . . . 1355 | 4268 |
| UTERU2014678 | 2081 | 1232 . . . 1585 | 4269 |
| UTERU2017762 | 2082 | 427 . . . 2319 | 4270 |
| UTERU2019491 | 2083 | 379 . . . 849 | 4271 |
| UTERU2019681 | 2084 | 1424 . . . 1840 | 4272 |
| UTERU2019706 | 2085 | 88 . . . 1656 | 4273 |
| UTERU2019940 | 2086 | 653 . . . 1228 | 4274 |
| UTERU2020491 | 2087 | 2042 . . . 2437 | 4275 |
| UTERU2020718 | 2088 | 355 . . . 1428 | 4276 |
| UTERU2021163 | 2089 | 1279 . . . 1620 | 4277 |
| UTERU2021380 | 2090 | 358 . . . 666 | 4278 |
| UTERU2022020 | 2091 | 1448 . . . 1789 | 4279 |
| UTERU2022981 | 2092 | 263 . . . 571 | 4280 |
| UTERU2023039 | 2093 | 172 . . . 681 | 4281 |
| UTERU2023175 | 2094 | 1231 . . . 2088 | 4282 |
| UTERU2023651 | 2095 | 647 . . . 1012 | 4283 |
| UTERU2023712 | 2096 | 399 . . . 758 | 4284 |
| UTERU2024002 | 2097 | 517 . . . 1026 | 4285 |
| UTERU2024656 | 2098 | 28 . . . 534 | 4286 |
| UTERU2025025 | 2099 | 814 . . . 2301 | 4287 |
| UTERU2025645 | 2100 | 263 . . . 1021 | 4288 |
| UTERU2025891 | 2101 | 1446 . . . 1787 | 4289 |
| UTERU2026025 | 2102 | 172 . . . 540 | 4290 |
| UTERU2026090 | 2103 | 65 . . . 1183 | 4291 |
| UTERU2026203 | 2104 | 612 . . . 1304 | 4292 |
| UTERU2027591 | 2105 | 427 . . . 747 | 4293 |
| UTERU2029953 | 2106 | 1415 . . . 1870 | 4294 |
| UTERU2030213 | 2107 | 1261 . . . 1950 | 4295 |
| UTERU2030280 | 2108 | 1134 . . . 1511 | 4296 |
| UTERU2031084 | 2109 | 162 . . . 728 | 4297 |
| UTERU2031268 | 2110 | 429 . . . 1985 | 4298 |
| UTERU2031521 | 2111 | 209 . . . 700 | 4299 |
| UTERU2031703 | 2112 | 1190 . . . 1654 | 4300 |
| UTERU2031851 | 2113 | 1192 . . . 1659 | 4301 |
| UTERU2033375 | 2114 | 887 . . . 2218 | 4302 |
| UTERU2033382 | 2115 | 1144 . . . 1614 | 4303 |
| UTERU2035114 | 2116 | 96 . . . 614 | 4304 |
| UTERU2035323 | 2117 | 1015 . . . 1467 | 4305 |
| UTERU2035328 | 2118 | 28 . . . >2438 | 4306 |
| UTERU2035331 | 2119 | 656 . . . 1255 | 4307 |
| UTERU2035452 | 2120 | 1393 . . . 1899 | 4308 |
| UTERU2035469 | 2121 | 261 . . . 707 | 4309 |
| UTERU2035503 | 2122 | 1539 . . . 1859 | 4310 |
| UTERU2035745 | 2123 | 1964 . . . 2272 | 4311 |
| UTERU2036089 | 2124 | 1131 . . . 2297 | 4312 |
| UTERU2037361 | 2125 | 1427 . . . 1849 | 4313 |
| UTERU2037577 | 2126 | 384 . . . 725 | 4314 |
| UTERU2038251 | 2127 | 76 . . . 1215 | 4315 |
| UTERU3000226 | 2128 | 1353 . . . 1691 | 4316 |
| UTERU3000645 | 2129 | 2681 . . . 3310 | 4317 |
| UTERU3000665 | 2130 | 1945 . . . 3624 | 4318 |
| UTERU3000828 | 2131 | 98 . . . 2986 | 4319 |
| UTERU3000899 | 2132 | 26 . . . 871 | 4320 |
| UTERU3001059 | 2133 | 2772 . . . 4715 | 4321 |
| UTERU3001240 | 2134 | 762 . . . 2021 | 4322 |
| UTERU3001542 | 2135 | 2792 . . . 3097 | 4323 |
| UTERU3001571 | 2136 | 2792 . . . 3466 | 4324 |
| UTERU3001572 | 2137 | 412 . . . 3990 | 4325 |
| UTERU3001585 | 2138 | 40 . . . 1551 | 4326 |
| UTERU3001652 | 2139 | 115 . . . 1590 | 4327 |
| UTERU3001766 | 2140 | 2128 . . . 2478 | 4328 |
| UTERU3001988 | 2141 | 28 . . . 801 | 4329 |
| UTERU3002209 | 2142 | 2047 . . . 2406 | 4330 |
| UTERU3002218 | 2143 | 221 . . . 3025 | 4331 |
| UTERU3002383 | 2144 | 248 . . . 571 | 4332 |
| UTERU3002667 | 2145 | 3011 . . . 3322 | 4333 |
| UTERU3002731 | 2146 | 161 . . . 472 | 4334 |
| UTERU3002768 | 2147 | 98 . . . 445 | 4335 |
| UTERU3002786 | 2148 | 1292 . . . 2065 | 4336 |
| UTERU3002993 | 2149 | 4072 . . . 4425 | 4337 |
| UTERU3003116 | 2150 | 3428 . . . 4126 | 4338 |
| UTERU3003135 | 2151 | 3370 . . . 3795 | 4339 |
| UTERU3003178 | 2152 | 1019 . . . 2077 | 4340 |
| UTERU3003465 | 2153 | 2851 . . . 3189 | 4341 |
| UTERU3003523 | 2154 | 176 . . . 3937 | 4342 |
| UTERU3003776 | 2155 | 711 . . . 1025 | 4343 |
| UTERU3004523 | 2156 | 1109 . . . 3427 | 4344 |
| UTERU3004616 | 2157 | 2480 . . . 3187 | 4345 |
| UTERU3004709 | 2158 | 718 . . . 1095 | 4346 |
| UTERU3004992 | 2159 | 2565 . . . 3077 | 4347 |
| UTERU3005049 | 2160 | 1561 . . . 2505 | 4348 |
| UTERU3005205 | 2161 | 101 . . . 1342 | 4349 |
| UTERU3005230 | 2162 | 1038 . . . 1445 | 4350 |
| UTERU3005460 | 2163 | 1872 . . . 2489 | 4351 |
| UTERU3005585 | 2164 | 1145 . . . 2395 | 4352 |
| UTERU3005907 | 2165 | 819 . . . 1709 | 4353 |
| UTERU3005970 | 2166 | 1 . . . 393 | 4354 |
| UTERU3006008 | 2167 | 2595 . . . 3236 | 4355 |
| UTERU3006308 | 2168 | 1490 . . . 2491 | 4356 |
| UTERU3007134 | 2169 | 2990 . . . 3532 | 4357 |
| UTERU3007419 | 2170 | 124 . . . 3792 | 4358 |
| UTERU3007640 | 2171 | 2823 . . . 3248 | 4359 |
| UTERU3007913 | 2172 | 138 . . . 1775 | 4360 |
| UTERU3008660 | 2173 | 3524 . . . 4030 | 4361 |
| UTERU3008671 | 2174 | 1920 . . . 2246 | 4362 |
| UTERU3009259 | 2175 | 2426 . . . 2917 | 4363 |
| UTERU3009490 | 2176 | 3200 . . . 3556 | 4364 |
| UTERU3009517 | 2177 | 2118 . . . 2786 | 4365 |
| UTERU3009690 | 2178 | 2674 . . . 2991 | 4366 |
| UTERU3009871 | 2179 | 111 . . . 1877 | 4367 |
| UTERU3009979 | 2180 | 1630 . . . 3504 | 4368 |
| UTERU3011063 | 2181 | 28 . . . 1614 | 4369 |
| UTERU3015086 | 2182 | 3216 . . . 3713 | 4370 |
| UTERU3015500 | 2183 | 985 . . . 2088 | 4371 |
| UTERU3016789 | 2184 | 553 . . . 1956 | 4372 |
| UTERU3018081 | 2185 | 180 . . . 3194 | 4373 |
| UTERU3018154 | 2186 | 1534 . . . 3186 | 4374 |
| UTERU3018616 | 2187 | 267 . . . 710 | 4375 |
| UTERU3018711 | 2188 | 3597 . . . 4106 | 4376 |
| 3NB692004724 | 4377 | 8 . . . 1486 | 4684 |
| ADRGL2000042 | 4378 | 133 . . . 996 | 4685 |
| ADRGL2000056 | 4379 | 158 . . . 748 | 4686 |
| BLADE2000579 | 4380 | 816 . . . 1703 | 4687 |
| BLADE2006830 | 4381 | 88 . . . 1872 | 4688 |
| BRACE2002589 | 4382 | 972 . . . 1334 | 4689 |
| BRACE2003609 | 4383 | 510 . . . 1895 | 4690 |
| BRACE2009318 | 4384 | 874 . . . 1242 | 4691 |
| BRACE2011677 | 4385 | 79 . . . 450 | 4692 |
| BRACE2029396 | 4386 | 38 . . . 421 | 4693 |
| BRACE2037299 | 4387 | 1170 . . . 1754 | 4694 |
| BRACE2039823 | 4388 | 153 . . . 866 | 4695 |
| BRACE2039832 | 4389 | 125 . . . 460 | 4696 |
| BRACE2043105 | 4390 | 96 . . . 494 | 4697 |
| BRACE3001058 | 4391 | 915 . . . 2912 | 4698 |
| BRACE3001113 | 4392 | 236 . . . 3196 | 4699 |
| BRACE3003026 | 4393 | 128 . . . 1453 | 4700 |
| BRACE3003053 | 4394 | 44 . . . >4212 | 4701 |
| BRACE3005107 | 4395 | 54 . . . 458 | 4702 |
| BRACE3009127 | 4396 | 151 . . . 2382 | 4703 |
| BRACE3010076 | 4397 | 1095 . . . 2828 | 4704 |
| BRACE3015829 | 4398 | 220 . . . 585 | 4705 |
| BRACE3021148 | 4399 | 29 . . . 637 | 4706 |
| BRALZ2017844 | 4400 | 173 . . . 1192 | 4707 |
| BRAMY2019111 | 4401 | 989 . . . 1768 | 4708 |
| BRAMY2035070 | 4402 | 287 . . . 2455 | 4709 |
| BRAMY2035449 | 4403 | 150 . . . 1418 | 4710 |
| BRAMY2035718 | 4404 | 353 . . . 1693 | 4711 |
| BRAMY2038516 | 4405 | 369 . . . 1835 | 4712 |
| BRAMY2039341 | 4406 | 127 . . . 1083 | 4713 |
| BRAMY2040159 | 4407 | 209 . . . 2440 | 4714 |
| BRAMY2041434 | 4408 | 125 . . . 550 | 4715 |
| BRAMY2045471 | 4409 | 148 . . . 2295 | 4716 |
| BRAMY3004800 | 4410 | 181 . . . 2736 | 4717 |
| BRAWH1000369 | 4411 | 412 . . . 1350 | 4718 |
| BRAWH2006207 | 4412 | 88 . . . 459 | 4719 |
| BRAWH2006395 | 4413 | 70 . . . 975 | 4720 |
| BRAWH2008993 | 4414 | 756 . . . 1061 | 4721 |
| BRAWH2009393 | 4415 | 179 . . . 529 | 4722 |
| BRAWH2010552 | 4416 | 72 . . . 572 | 4723 |
| BRAWH3007441 | 4417 | 2034 . . . 2531 | 4724 |
| BRAWH3009017 | 4418 | 733 . . . 1158 | 4725 |
| BRCAN2002473 | 4419 | 80 . . . 1060 | 4726 |
| BRCAN2002854 | 4420 | 36 . . . 842 | 4727 |
| BRCAN2003070 | 4421 | 1937 . . . 2254 | 4728 |
| BRCAN2014229 | 4422 | 249 . . . 1259 | 4729 |
| BRCOC2019841 | 4423 | 275 . . . 1591 | 4730 |
| BRHIP2002722 | 4424 | 411 . . . 2234 | 4731 |
| BRHIP2003272 | 4425 | 18 . . . 464 | 4732 |
| BRHIP2005271 | 4426 | 108 . . . 1286 | 4733 |
| BRHIP2005724 | 4427 | 107 . . . 1180 | 4734 |
| BRHIP2006617 | 4428 | 1568 . . . 2641 | 4735 |
| BRHIP2008389 | 4429 | 128 . . . 781 | 4736 |
| BRHIP2012360 | 4430 | 74 . . . 2800 | 4737 |
| BRHIP2017553 | 4431 | 362 . . . 2275 | 4738 |
| BRHIP2026877 | 4432 | 430 . . . 942 | 4739 |
| BRHIP3000017 | 4433 | 37 . . . 1515 | 4740 |
| BRHIP3000240 | 4434 | 290 . . . 1537 | 4741 |
| BRHIP3008314 | 4435 | 1622 . . . 2005 | 4742 |
| BRHIP3026052 | 4436 | 10 . . . 1632 | 4743 |
| BRSTN2013354 | 4437 | 286 . . . 1371 | 4744 |
| BRTHA2002133 | 4438 | 1448 . . . 1957 | 4745 |
| BRTHA2002702 | 4439 | 269 . . . 817 | 4746 |
| BRTHA2007060 | 4440 | 106 . . . 2979 | 4747 |
| BRTHA2010033 | 4441 | 823 . . . 1356 | 4748 |
| BRTHA2011321 | 4442 | 32 . . . 373 | 4749 |
| BRTHA2013426 | 4443 | 980 . . . 1588 | 4750 |
| BRTHA2013610 | 4444 | 71 . . . 1609 | 4751 |
| BRTHA2016318 | 4445 | 748 . . . 1581 | 4752 |
| BRTHA2017364 | 4446 | 52 . . . 1638 | 4753 |
| BRTHA2017972 | 4447 | 92 . . . 808 | 4754 |
| BRTHA2018011 | 4448 | 6 . . . 929 | 4755 |
| BRTHA2018443 | 4449 | 23 . . . 1774 | 4756 |
| BRTHA3000296 | 4450 | 2006 . . . 2521 | 4757 |
| BRTHA3003000 | 4451 | 1170 . . . 2510 | 4758 |
| BRTHA3008826 | 4452 | 2082 . . . 2402 | 4759 |
| CERVX2002013 | 4453 | 978 . . . 1301 | 4760 |
| CTONG1000113 | 4454 | 538 . . . 2541 | 4761 |
| CTONG2003348 | 4455 | 363 . . . 1745 | 4762 |
| CTONG2004000 | 4456 | 538 . . . 1869 | 4763 |
| CTONG2008721 | 4457 | 797 . . . 1909 | 4764 |
| CTONG2015596 | 4458 | 351 . . . 1490 | 4765 |
| CTONG2015633 | 4459 | 838 . . . 1305 | 4766 |
| CTONG2016942 | 4460 | 122 . . . 1387 | 4767 |
| CTONG2019822 | 4461 | 194 . . . 1681 | 4768 |
| CTONG2020374 | 4462 | 191 . . . 3052 | 4769 |
| CTONG2020378 | 4463 | 1693 . . . 2688 | 4770 |
| CTONG2020411 | 4464 | 23 . . . 3322 | 4771 |
| CTONG2020974 | 4465 | 968 . . . 1711 | 4772 |
| CTONG2024031 | 4466 | 256 . . . 2373 | 4773 |
| CTONG2028758 | 4467 | 268 . . . >2988 | 4774 |
| CTONG3001501 | 4468 | 233 . . . 1471 | 4775 |
| CTONG3002552 | 4469 | 3007 . . . >3950 | 4776 |
| CTONG3003598 | 4470 | 2111 . . . 2905 | 4777 |
| CTONG3004550 | 4471 | 310 . . . 2868 | 4778 |
| CTONG3004726 | 4472 | 84 . . . 2681 | 4779 |
| CTONG3009287 | 4473 | 745 . . . 2388 | 4780 |
| DFNES2011192 | 4474 | 209 . . . 1540 | 4781 |
| FCBBF1000509 | 4475 | 407 . . . 2356 | 4782 |
| FCBBF3010361 | 4476 | 253 . . . 1266 | 4783 |
| FCBBF3027854 | 4477 | 435 . . . >2218 | 4784 |
| FEBRA2000790 | 4478 | 483 . . . 839 | 4785 |
| FEBRA2001990 | 4479 | 57 . . . 1532 | 4786 |
| FEBRA2006519 | 4480 | 1794 . . . 3041 | 4787 |
| FEBRA2008692 | 4481 | 170 . . . 3094 | 4788 |
| FEBRA2014122 | 4482 | 216 . . . 2600 | 4789 |
| FEBRA2027609 | 4483 | 91 . . . 2169 | 4790 |
| FEBRA2028256 | 4484 | 365 . . . 2983 | 4791 |
| FEBRA2028516 | 4485 | 62 . . . 3109 | 4792 |
| HCASM2002754 | 4486 | 171 . . . 1508 | 4793 |
| HCASM2003018 | 4487 | 115 . . . >2321 | 4794 |
| HCASM2003099 | 4488 | 383 . . . 2119 | 4795 |
| HCASM2003357 | 4489 | 165 . . . 491 | 4796 |
| HCASM2008536 | 4490 | 201 . . . 629 | 4797 |
| HCASM2009424 | 4491 | 121 . . . 582 | 4798 |
| HCHON2000508 | 4492 | 59 . . . 2422 | 4799 |
| HCHON2000743 | 4493 | 218 . . . 883 | 4800 |
| HCHON2004858 | 4494 | 154 . . . 3285 | 4801 |
| HEART2009680 | 4495 | 63 . . . 1331 | 4802 |
| HLUNG2013350 | 4496 | 367 . . . 1299 | 4803 |
| HLUNG2015418 | 4497 | 73 . . . 2691 | 4804 |
| HLUNG2015548 | 4498 | 6 . . . 1598 | 4805 |
| HLUNG2016862 | 4499 | 295 . . . 699 | 4806 |
| HSYRA2005628 | 4500 | 454 . . . 1971 | 4807 |
| IMR322001879 | 4501 | 147 . . . 467 | 4808 |
| IMR322007078 | 4502 | 747 . . . 1979 | 4809 |
| IMR322008651 | 4503 | 145 . . . 1167 | 4810 |
| IMR322013396 | 4504 | 142 . . . 2238 | 4811 |
| IMR322013731 | 4505 | 81 . . . >1713 | 4812 |
| LIVER2000247 | 4506 | 1187 . . . 2191 | 4813 |
| MESAN2001770 | 4507 | 415 . . . 1770 | 4814 |
| MESAN2005303 | 4508 | 278 . . . 2362 | 4815 |
| MESAN2014412 | 4509 | 1589 . . . 3538 | 4816 |
| MESAN2015501 | 4510 | 553 . . . 2979 | 4817 |
| NT2RI2005772 | 4511 | 227 . . . 2035 | 4818 |
| NT2RI2008952 | 4512 | 187 . . . 1683 | 4819 |
| NT2RI2009583 | 4513 | 1127 . . . 2587 | 4820 |
| NT2RI2018448 | 4514 | 125 . . . 1030 | 4821 |
| NT2RI2027157 | 4515 | 603 . . . 2483 | 4822 |
| NT2RI3000174 | 4516 | 18 . . . 2501 | 4823 |
| NT2RI3001132 | 4517 | 281 . . . 3265 | 4824 |
| NT2RI3002557 | 4518 | 3660 . . . >3975 | 4825 |
| NT2RI3005928 | 4519 | 1784 . . . 2194 | 4826 |
| NT2RI3007167 | 4520 | 205 . . . 957 | 4827 |
| NT2RI3007443 | 4521 | 1024 . . . 3270 | 4828 |
| NT2RP7008435 | 4522 | 719 . . . 2437 | 4829 |
| NT2RP8000521 | 4523 | 635 . . . 1039 | 4830 |
| NTONG2008093 | 4524 | 81 . . . 635 | 4831 |
| OCBBF2003327 | 4525 | 35 . . . 1516 | 4832 |
| OCBBF2005433 | 4526 | 154 . . . 2565 | 4833 |
| OCBBF2006987 | 4527 | 447 . . . 3125 | 4834 |
| OCBBF2008144 | 4528 | 375 . . . >3049 | 4835 |
| OCBBF2009583 | 4529 | 443 . . . 1567 | 4836 |
| OCBBF2011669 | 4530 | 656 . . . 3346 | 4837 |
| OCBBF2019684 | 4531 | 161 . . . 1555 | 4838 |
| OCBBF2020048 | 4532 | 109 . . . 1152 | 4839 |
| OCBBF2024284 | 4533 | 70 . . . 3063 | 4840 |
| OCBBF2030116 | 4534 | 445 . . . 2574 | 4841 |
| OCBBF2032274 | 4535 | 46 . . . 1053 | 4842 |
| OCBBF2034637 | 4536 | 380 . . . 1897 | 4843 |
| OCBBF3000167 | 4537 | 139 . . . 1365 | 4844 |
| OCBBF3002654 | 4538 | 494 . . . 2284 | 4845 |
| OCBBF3003761 | 4539 | 316 . . . 2025 | 4846 |
| OCBBF3004972 | 4540 | 2394 . . . 3302 | 4847 |
| PERIC2007068 | 4541 | 174 . . . 1523 | 4848 |
| PLACE7000333 | 4542 | 1736 . . . 2470 | 4849 |
| PLACE7000502 | 4543 | 2490 . . . 4577 | 4850 |
| PROST2000452 | 4544 | 1462 . . . 2097 | 4851 |
| PROST2009320 | 4545 | 1640 . . . 2221 | 4852 |
| PROST2019487 | 4546 | 745 . . . 1149 | 4853 |
| PUAEN2006335 | 4547 | 123 . . . 1829 | 4854 |
| SKMUS2003194 | 4548 | 70 . . . 1317 | 4855 |
| SPLEN2004611 | 4549 | 1058 . . . 1651 | 4856 |
| SPLEN2016135 | 4550 | 70 . . . 699 | 4857 |
| SPLEN2016781 | 4551 | 1665 . . . 2444 | 4858 |
| SPLEN2016932 | 4552 | 597 . . . 1079 | 4859 |
| SPLEN2030847 | 4553 | 101 . . . 931 | 4860 |
| SPLEN2033490 | 4554 | 1418 . . . 1897 | 4861 |
| SPLEN2036702 | 4555 | 122 . . . 2467 | 4862 |
| SPLEN2037319 | 4556 | 20 . . . 364 | 4863 |
| SPLEN2039311 | 4557 | 343 . . . 768 | 4864 |
| SPLEN2039379 | 4558 | 4 . . . 2199 | 4865 |
| STOMA2003158 | 4559 | 593 . . . 1459 | 4866 |
| STOMA2004893 | 4560 | 1137 . . . >1566 | 4867 |
| SYNOV1000256 | 4561 | 2082 . . . 2927 | 4868 |
| SYNOV2001660 | 4562 | 917 . . . 1510 | 4869 |
| SYNOV2006620 | 4563 | 1036 . . . 1692 | 4870 |
| SYNOV2013637 | 4564 | 36 . . . 1085 | 4871 |
| SYNOV2021953 | 4565 | 375 . . . 1640 | 4872 |
| SYNOV4002744 | 4566 | 469 . . . 1302 | 4873 |
| SYNOV4003981 | 4567 | 36 . . . 2837 | 4874 |
| SYNOV4005739 | 4568 | 1425 . . . 2075 | 4875 |
| SYNOV4005889 | 4569 | 79 . . . 2793 | 4876 |
| TBAES2000932 | 4570 | 1943 . . . 2437 | 4877 |
| TESOP2000390 | 4571 | 218 . . . 1651 | 4878 |
| TESOP2001796 | 4572 | 129 . . . 1589 | 4879 |
| TESOP2005199 | 4573 | 108 . . . 1586 | 4880 |
| TESOP2006398 | 4574 | 2557 . . . >3253 | 4881 |
| TESOP2006865 | 4575 | 256 . . . 732 | 4882 |
| TESOP2007384 | 4576 | 168 . . . 1058 | 4883 |
| TESTI1000266 | 4577 | 346 . . . 807 | 4884 |
| TESTI2008901 | 4578 | 432 . . . 2120 | 4885 |
| TESTI2015626 | 4579 | 448 . . . 1605 | 4886 |
| TESTI2025924 | 4580 | 163 . . . 2028 | 4887 |
| TESTI2026647 | 4581 | 753 . . . 1556 | 4888 |
| TESTI2029252 | 4582 | 191 . . . 2293 | 4889 |
| TESTI2032643 | 4583 | 1810 . . . 2334 | 4890 |
| TESTI2034251 | 4584 | 188 . . . >1827 | 4891 |
| TESTI2035981 | 4585 | 814 . . . 1155 | 4892 |
| TESTI2036288 | 4586 | 86 . . . 475 | 4893 |
| TESTI2037830 | 4587 | 911 . . . 1228 | 4894 |
| TESTI2039060 | 4588 | 140 . . . 2080 | 4895 |
| TESTI2049956 | 4589 | 438 . . . 1856 | 4896 |
| TESTI2050780 | 4590 | 70 . . . 1470 | 4897 |
| TESTI4000137 | 4591 | 396 . . . 2435 | 4898 |
| TESTI4000155 | 4592 | 72 . . . 3518 | 4899 |
| TESTI4000183 | 4593 | 258 . . . 1160 | 4900 |
| TESTI4000214 | 4594 | 60 . . . 3710 | 4901 |
| TESTI4000319 | 4595 | 1609 . . . 2916 | 4902 |
| TESTI4001984 | 4596 | 651 . . . 1166 | 4903 |
| TESTI4005317 | 4597 | 607 . . . 2406 | 4904 |
| TESTI4006473 | 4598 | 166 . . . 4188 | 4905 |
| TESTI4008058 | 4599 | 849 . . . 2573 | 4906 |
| TESTI4008302 | 4600 | 933 . . . 2537 | 4907 |
| TESTI4010382 | 4601 | 160 . . . 4062 | 4908 |
| TESTI4011070 | 4602 | 978 . . . >3811 | 4909 |
| TESTI4011072 | 4603 | 255 . . . >3737 | 4910 |
| TESTI4011829 | 4604 | 2254 . . . >4540 | 4911 |
| TESTI4013365 | 4605 | 858 . . . 2717 | 4912 |
| TESTI4013602 | 4606 | 3496 . . . 3990 | 4913 |
| TESTI4013894 | 4607 | 367 . . . 1077 | 4914 |
| TESTI4014801 | 4608 | 1383 . . . 2555 | 4915 |
| TESTI4015012 | 4609 | 1699 . . . 3558 | 4916 |
| TESTI4015442 | 4610 | 12 . . . 3323 | 4917 |
| TESTI4017714 | 4611 | 318 . . . 2501 | 4918 |
| TESTI4019657 | 4612 | 1789 . . . 2925 | 4919 |
| TESTI4021482 | 4613 | 1 . . . 507 | 4920 |
| TESTI4024387 | 4614 | 404 . . . 1063 | 4921 |
| TESTI4025268 | 4615 | 3 . . . 1262 | 4922 |
| TESTI4025494 | 4616 | 282 . . . 2381 | 4923 |
| TESTI4025547 | 4617 | 5 . . . 964 | 4924 |
| TESTI4025865 | 4618 | 45 . . . 1421 | 4925 |
| TESTI4026207 | 4619 | 96 . . . 2540 | 4926 |
| TESTI4028938 | 4620 | 200 . . . 1711 | 4927 |
| TESTI4028958 | 4621 | 1336 . . . 2502 | 4928 |
| TESTI4029348 | 4622 | 116 . . . 613 | 4929 |
| TESTI4029528 | 4623 | 46 . . . 2544 | 4930 |
| TESTI4029690 | 4624 | 165 . . . 917 | 4931 |
| TESTI4031745 | 4625 | 1636 . . . 4002 | 4932 |
| TESTI4032090 | 4626 | 198 . . . 998 | 4933 |
| TESTI4032112 | 4627 | 815 . . . 1654 | 4934 |
| TESTI4036767 | 4628 | 62 . . . 1039 | 4935 |
| TESTI4038721 | 4629 | 2156 . . . 3292 | 4936 |
| TESTI4041086 | 4630 | 1946 . . . 3313 | 4937 |
| TESTI4046240 | 4631 | 981 . . . 1469 | 4938 |
| THYMU2004139 | 4632 | 407 . . . >2108 | 4939 |
| THYMU2004284 | 4633 | 922 . . . 1344 | 4940 |
| THYMU2006001 | 4634 | 230 . . . 1663 | 4941 |
| THYMU2028739 | 4635 | 408 . . . 1925 | 4942 |
| THYMU2030462 | 4636 | 1324 . . . 1725 | 4943 |
| THYMU2031139 | 4637 | 382 . . . 1890 | 4944 |
| THYMU2031249 | 4638 | 643 . . . 1713 | 4945 |
| THYMU2032976 | 4639 | 102 . . . 482 | 4946 |
| THYMU2033401 | 4640 | 221 . . . 646 | 4947 |
| THYMU2034279 | 4641 | 1718 . . . 2176 | 4948 |
| THYMU2035078 | 4642 | 396 . . . 902 | 4949 |
| THYMU2035710 | 4643 | 988 . . . 1443 | 4950 |
| THYMU2040925 | 4644 | 179 . . . 727 | 4951 |
| THYMU3000269 | 4645 | 1966 . . . 2742 | 4952 |
| THYMU3000360 | 4646 | 792 . . . 1241 | 4953 |
| THYMU3001428 | 4647 | 486 . . . 2294 | 4954 |
| TKIDN2008778 | 4648 | 1512 . . . 1862 | 4955 |
| TKIDN2012771 | 4649 | 2185 . . . 3315 | 4956 |
| TKIDN2018926 | 4650 | 59 . . . 388 | 4957 |
| TLIVE2001684 | 4651 | 1046 . . . 2137 | 4958 |
| TLIVE2002046 | 4652 | 255 . . . 1334 | 4959 |
| TLIVE2007607 | 4653 | 220 . . . 1746 | 4960 |
| TRACH1000212 | 4654 | 32 . . . 3826 | 4961 |
| TRACH2000862 | 4655 | 259 . . . 2160 | 4962 |
| TRACH2007483 | 4656 | 756 . . . 3095 | 4963 |
| TRACH2019672 | 4657 | 289 . . . 1350 | 4964 |
| TRACH2024408 | 4658 | 392 . . . >2211 | 4965 |
| TRACH2024559 | 4659 | 1450 . . . 1905 | 4966 |
| TRACH3000134 | 4660 | 293 . . . 2488 | 4967 |
| TRACH3000420 | 4661 | 17 . . . 3577 | 4968 |
| TRACH3002561 | 4662 | 2181 . . . 2603 | 4969 |
| TRACH3003683 | 4663 | 1157 . . . 1690 | 4970 |
| TRACH3003832 | 4664 | 6 . . . 2798 | 4971 |
| TRACH3007866 | 4665 | 183 . . . 2450 | 4972 |
| TUTER2000057 | 4666 | 27 . . . 833 | 4973 |
| UTERU2004299 | 4667 | 452 . . . 934 | 4974 |
| UTERU2008040 | 4668 | 286 . . . 1521 | 4975 |
| UTERU2011220 | 4669 | 453 . . . 842 | 4976 |
| UTERU2019534 | 4670 | 551 . . . 1021 | 4977 |
| UTERU2021820 | 4671 | 1545 . . . 2096 | 4978 |
| UTERU2028734 | 4672 | 217 . . . 1956 | 4979 |
| UTERU2032279 | 4673 | 1252 . . . 2037 | 4980 |
| UTERU2033577 | 4674 | 164 . . . 1009 | 4981 |
| UTERU2035978 | 4675 | 56 . . . 436 | 4982 |
| UTERU3000402 | 4676 | 798 . . . 1598 | 4983 |
| UTERU3000738 | 4677 | 792 . . . 1547 | 4984 |
| UTERU3001053 | 4678 | 2485 . . . >3535 | 4985 |
| UTERU3014791 | 4679 | 2452 . . . 3027 | 4986 |
| UTERU3015069 | 4680 | 2538 . . . 3986 | 4987 |
| UTERU3015412 | 4681 | 67 . . . 1464 | 4988 |
| UTERU3017176 | 4682 | 3512 . . . >3913 | 4989 |
| TESTI4038779 | 4683 | 202 . . . 1971 | 4990 |

[0053] Primers used to synthesize polynucleotides can be designed based on the nucleotide sequences of polynucleotides of the present invention, shown in SEQ ID NOs in Table 1 above. When synthesizing full-length cDNAs, an oligo dT primer can be used as the 3′-end primer. The length of the primer is usually 15-100 bp, and favorably between 15-35 bp. In the case of LA PCR, described below, a primer length of 25-35 bp provides a good result.

[0054] Methods for designing a primer that enables specific amplification based on a target nucleotide sequence are known to those skilled in the art (Current Protocols in Molecular Biology, Ausubel et al. edit, (1987) John Wiley & Sons, Section 6.1-6.4). In principle, primers based on 5′-end sequences are designed such that amplification products will include the translation start site. Accordingly, for example, when the 5′-end primer is designed based on the nucleotide sequence of the 5′ untranslated region (5′UTR), any part of the 5′-end, which ensures specificity to the cDNA of interest, can be selected as the primer.

[0055] When synthesizing a full-length cDNA, the target nucleotide sequence to be amplified can extend to several thousand bp in some cDNA. Such long nucleotides can be amplified using methods such as LA PCR (Long and Accurate PCR). The use of LA PCR is advantageous when synthesizing long DNA. In LA PCR, in which a special DNA polymerase having 3′->5′ exonuclease activity is used, misincorporated nucleotides can be removed. Accordingly, accurate synthesis of the complementary strand can be achieved even with a long nucleotide sequence. By using LA PCR, amplification of nucleotides 20 kb or longer can be achieved under desirable conditions (Takeshi Hayashi (1996) Jikken-Igaku Bessatsu, “Advanced Technologies in PCR” Youdo-sha).

[0056] Template DNAs for synthesizing the full-length cDNAs of the present invention can be obtained by using cDNA libraries prepared by various methods. The full-length cDNA clones of the present invention are clones with a high probability of completeness in length, obtained by a method comprising the steps of [1] preparing libraries containing cDNAs with a very high fullness ratio using oligo-capping, and [2] assembling 5′-end sequences and selecting those with the highest probability of completeness in length in clusters formed (there are many clones longer in the 5′-end direction).

[0057] However, the use of primers designed based on the full-length nucleotide sequences provided by the present invention enable full-length cDNAs to be easily obtained without using such a special technique.

[0058] The problem with commercially available cDNA libraries or those prepared by known methods is that mRNA contained in these libraries has a very low fullness ratio. Thus, it is difficult to screen full-length cDNA clones directly from the library using ordinary cloning methods. The present invention has revealed nucleotide sequences of novel full-length cDNA. If such a full-length nucleotide sequence is provided, it is possible to synthesize a target full-length cDNA by using enzymatic reactions such as PCR. In particular, a full-length-enriched cDNA library, synthesized by methods such as oligo-capping, is desirable to more reliably synthesize a full-length cDNA.

[0059] The present invention provides isolated polynucleotides comprising the nucleotide sequences of SEQ ID NO: 1 as shown in Table 1, or homologs thereof. As used herein, an “isolated polynucleotide” is a polynucleotide whose structure is not identical to that of any naturally occurring polynucleotide or to that of any fragment of a naturally occurring genomic polynucleotide spanning more than three separate genes. The term therefore includes, for example, (a) a DNA which comprises the sequence of part of a naturally occurring genomic DNA molecule in the genome of the organism in which it naturally occurs; (b) a polynucleotide incorporated into a vector or into the genomic DNA of a prokaryote or eukaryote such that the resulting molecule is not identical to any naturally occurring vector or genomic DNA; (c) a separate molecule such as a cDNA, a genomic fragment, a fragment produced by polymerase chain reaction (PCR), or a restriction fragment; and (d) a recombinant nucleotide sequence that is part of a hybrid gene, i.e., a gene encoding a fusion polypeptide. Specifically excluded from this definition are polynucleotides of DNA molecules present in mixtures of different (i) DNA molecules, (ii) transfected cells, or (iii) cell clones; e.g., as these occur in DNA libraries such as cDNA or genomic DNA libraries.

[0060] The 5′-end sequence of the full-length cDNA clones of this invention can be used to isolate the regulatory elements of transcription, including the promoter on the genome. A rough draft of the human genome (an analysis of the human genomic sequence with lower accuracy), which covers 90% of the genome, has been reported (Nature, Vol. 409, 814-823, 2001), and by the year 2003, analysis of the entire human genomic sequence will be finished. However, using software to analyze transcription start sites on the human genome, in which long introns exist, is difficult. In contrast, it is easy to specify transcription start sites in the genomic sequence using nucleotide sequences which include the 5′-end of the full-length cDNA clones of the present invention, and thus it is easy to obtain genomic regions involved in transcription regulation, which include promoters contained upstream of the transcription start site.

[0061] The polypeptides encoded by the full-length cDNAs of the invention can be prepared as recombinant polypeptides or as natural polypeptides. For example, a recombinant polypeptide can be prepared by inserting a polynucleotide encoding a polypeptide of the present invention into a vector, introducing the vector into an appropriate host cell, and purifying the polypeptide expressed within that transformed host cell, as described below. In contrast, a natural polypeptide can be prepared, for example, by utilizing an affinity column to which is attached an antibody against a polypeptide of the present invention (Current Protocols in Molecular Biology (1987) Ausubel et al. edit, John Wiley & Sons, Section 16.1-16.19). The antibody used for affinity purification may be either a polyclonal antibody, or a monoclonal antibody. Alternatively, in vitro translation (see, for example, “On the fidelity of mRNA translation in the nuclease-treated rabbit reticulocyte lysate system.” Dasso M. C., and Jackson R. J. (1989) Nucleic Acids Res. 17: 3129-3144) may be used for preparing a polypeptide of the invention.

[0062] The present invention provides substantially pure proteins encoded by the full-length cDNAs of the present invention. The term “substantially pure” herein used in reference to a given protein or polypeptide means that the protein or polypeptide is substantially free from other biological macromolecules. For example, the substantially pure protein or polypeptide is at least 75%, 80%, 85%, 95%, or 99% pure by dry weight. Purity can be measured by any appropriate standard method known in the art, for example, by column chromatography, polyacrylamide gel electrophoresis, or HPLC analysis.

[0063] Polypeptides functionally equivalent to the polypeptides of the present invention can be prepared based on the activities of the polypeptides of the present invention, clarified in the above-mentioned manner. Whether or not a particular polypeptide is functionally equivalent to a polypeptide of the present invention can be verified by using the biological activity of the polypeptide of the present invention as an index to examine whether that polypeptide has the said activity.

[0064] Polypeptides functionally equivalent to polypeptides of the present invention can be prepared by those skilled in the art, for example, by using a method for introducing mutations into a polypeptide amino acid sequence (for example, site-directed mutagenesis (Current Protocols in Molecular Biology, edit, Ausubel et al., (1987) John Wiley & Sons, Section 8.1-8.5). Such polypeptides can also be generated by spontaneous mutations. The present invention also includes polypeptides comprising the amino acid sequences shown in Table-1 in which one or more amino acids are substituted, deleted, inserted, and/or added, as long as the polypeptides have a function equivalent to that of a polypeptide identified in the Examples of the present invention, described later.

[0065] There are no limitations as to the number and site of amino acid mutation, as long as polypeptide function is maintained. The number of mutations typically corresponds to 30% or less, or 20% or less, or 10% or less, preferably 5% or less or 3% or less of the total amino acids, more preferably 2% or less or 1% or less of the total amino acids. Alternatively, herein, substitution of one or more amino acids includes substitution of several amino acids. As used herein, the term “several amino acids” means, for example, five amino acids, preferably four or three amino acids, more preferably two amino acids, and further preferably one amino acid.

[0066] Herein “conservative amino acid substitution” refers to substitution of an amino acid residue belonging to a group comprising a chemically similar side chain, with another amino acid in the same group. Groups of amino acid residues having similar side chains have been defined in the art. These groups include amino acids with basic side chains (e.g., lysine, arginine, histidine), acidic side chains (e.g., aspartic acid, glutamic acid), uncharged polar side chains (e.g., glycine, asparagine, glutamine, serine, threonine, tyrosine, cysteine) nonpolar side chains (e.g., alanine, valine, leucine, isoleucine, proline, phenylalanine, methionine, tryptophan), beta-branched side chains (e.g., threonine, valine, isoleucine) and aromatic side chains (e.g., tyrosine, phenylalanine, tryptophan, histidine).

[0067] In addition, polypeptides functionally equivalent to the polypeptides of the present invention can be isolated by using techniques of hybridization or gene amplification known to those skilled in the art. Specifically, using hybridization (Current Protocols in Molecular Biology, edit, Ausubel et al., (1987) John Wiley & Sons, Section 6.3-6.4)), those skilled in the art can usually isolate a polynucleotide highly homologous to a polynucleotide encoding the polypeptide identified in the present Example, based on the identified nucleotide sequence (Table 1) or a portion thereof, and obtain a functionally equivalent polypeptide from the isolated polynucleotide. The present invention includes polypeptides encoded by polynucleotides which hybridize with the polynucleotides encoding the polypeptides identified in the present Example, as long as the polypeptides are functionally equivalent to those identified in the present Example. Organisms from which the functionally equivalent polypeptides are isolated include but are not limited to vertebrates such as humans, mice, rats, rabbits, pigs and cows.

[0068] Washing conditions for hybridization for polynucleotide isolation encoding functionally equivalent polypeptides are usually “1×SSC, 0.1% SDS, 37° C.”; more stringent conditions are “0.5×SSC, 0.1% SDS, 42° C.”; and still more stringent conditions are “0.1×SSC, 0.1% SDS, 65° C.”. Alternatively, the following conditions can be given as hybridization conditions of the present invention. Namely, conditions in which hybridization is performed at “6×SSC, 40% Formamide, 25° C.”, and washing at “1×SSC, 55° C.” can be given. More preferable conditions are those in which hybridization is performed at “6×SSC, 40% Formamide, 37° C.”, and washing at “0.2×SSC, 55° C.”. Even more preferable are those in which hybridization is performed at “6×SSC, 50% Formamide, 37° C.”, and washing at “0.1×SSC, 62° C.”. The more stringent the hybridization conditions, the more frequently polynucleotides highly homologous to the probe sequence are isolated. Therefore, it is preferable to conduct hybridization under stringent conditions. Examples of stringent conditions in the present invention are, washing conditions of “0.5×SSC, 0.1% SDS, 42° C.”, or alternatively, hybridization conditions of “6×SSC, 40% Formamide, 37° C.”, and washing at “0.2×SSC, 55° C.”.

[0069] One skilled in the art can suitably select various conditions, such as SSC dilution ratio, formamide concentration, and temperature, to accomplish a similar stringency.

[0070] The above-mentioned combinations of SSC, SDS, and temperature conditions are indicated just as examples. Those skilled in the art can select hybridization conditions with similar stringency to those mentioned above by properly combining the above-mentioned or other factors that determine hybridization stringency (for example, probe concentration, probe length, and duration of hybridization reaction).

[0071] The amino acid sequences of polypeptides isolated by using hybridization techniques usually have high identity to those of the polypeptides of the present invention, shown in Table 1. The present invention encompasses polynucleotides comprising a nucleotide sequence with high identity to the nucleotide sequence of claim 1 (a). Furthermore, the present invention encompasses peptides, or polypeptides comprising an amino acid sequence with high identity to the amino acid sequence encoded by the polynucleotide of claim 1 (b). The term “high identity” indicates sequence identity of at least 40% or more; preferably 60% or more; and more preferably 70% or more. Even more preferable is identity of 90% or more, 93% or more, or 95% or more. Further more preferable is 97% or more, or 99% or more. Identity can be determined using the BLAST search algorithm.

[0072] As used herein, “percent identity” of amino acid sequences or nucleic acids is determined using the BLAST algorithm of Karlin and Altschul (Proc. Natl. Acad. Sci. USA 90:5873-5877, 1993). Such an algorithm is incorporated into the BLASTN and BLASTX programs of Altschul et al. (J. Mol. Biol. 215:403-410, 1990). BLAST nucleotide searches are performed with the BLASTN program, using for example, score=100, wordlength=12. BLAST protein searches are performed with the BLASTX program, using for example, score=50, wordlength=3. When utilizing the BLAST and Gapped BLAST programs, the default parameters of each program are used. See http://www.ncbi.nlm.nih.gov.

[0073] Using the gene amplification technique (PCR) (Current Protocols in Molecular Biology, edit, Ausubel et al., (1987) John Wiley & Sons, Section 6.1-6.4)) and primers designed based on the nucleotide sequences (Table 1) or portions thereof as identified in the present Example, it is possible to isolate polynucleotide fragments highly homologous to the polynucleotide sequences or portions thereof, and to obtain polypeptides functionally equivalent to a particular polypeptide identified in the present Example, based on the isolated polynucleotide fragment.

[0074] The present invention also provides polynucleotides containing at least 15 nucleotides complementary to a polynucleotide comprising a nucleotide sequence of SEQ ID NOs shown in Table 1, or the complementary strand thereof. Herein, the term “complementary strand” is defined as the other strand to one strand of a double stranded DNA composed of A:T and G:C base pairs. In addition, “complementary” is not only defined as sequences completely matching a continuous region of at least 15 nucleotides, but is also defined to include sequences comprising identity of at least 70%, favorably 80% or higher, more favorably 90% or higher, and most favorably 95% or higher within that region. Identity may be determined using the algorithm described herein.

[0075] Such polynucleotides includes probes and primers used for the detection and amplification of polynucleotides encoding the inventive polypeptides. When used as a primer, such a polynucleotide usually comprises 15 to 100 bp, and preferably of 15 to 35 bp. When used as a probe, such a polynucleotide comprises the whole or a part of the sequence of a polynucleotide of the present invention, and comprises at least 15 bp. When used as a primer, such a polynucleotide is complementary at the 3′-end, and restriction enzyme recognition sequences or tags can be added to the 5′-end.

[0076] Furthermore, polynucleotides of the present invention include antisense polynucleotides for suppressing the expression of a polypeptide of the present invention, which comprises an amino acid sequence of SEQ ID NOs shown in Table 1. To exert an antisense effect, an antisense polynucleotide has at least 15 bp or more, for example 50 bp or more, preferably 100 bp or more, and more preferably 500 bp or more, and usually has 3000 bp or less, and preferably 2000 bp or less. Antisense polynucleotides can be used in gene therapy of diseases caused by abnormalities of the polypeptides of the invention (abnormal function or abnormal expression). An antisense polynucleotide can be prepared, for example, using the phosphorothioate method (“Physicochemical properties of phosphorothioate oligodeoxynucleotides.” Stein (1988) Nucleic Acids Res. 16: 3209-3221) based on the sequence information of polynucleotides encoding a polypeptide of this invention (for example, the nucleotide sequences of SEQ ID NOs: 1 to 2188 and SEQ ID NOs: 4377 to 4683).

[0077] The present invention also includes polynucleotides that can use ribozyme or RNA interference (RNAi) activity to downregulate expression of a polynucleotide of the present invention, where such a polynucleotide can be designed based on the nucleotide sequence of the polynucleotide of the present invention.

[0078] A ribozyme is a polynucleotide that comprises 1) an antisense sequence of a polynucleotide of the present invention, and 2) the nucleotide sequence of a catalytic unit required for catalytic action. The antisense sequence constituting the ribozyme can be appropriately selected to be compatible with the structure of the ribozyme's catalytic unit. The ribozome's catalytic unit is well known in the art. For example, the hammer-head ribozyme (Rossi et al. (1991) Pharmac. Ther. 50: 245-254) and hairpin ribozyme (Hampel et al. (1990) Nucl. Acids Res. 18: 299-304, and U.S. Pat. No. 5,254,678) are known to have nucleotide sequence-specific cleaving activity. These ribozymes use this catalytic activity to cleave, at a specific position, polynucleotides which hybridize to the antisense sequence.

[0079] For example, the autolytic domain of a hammer-head ribozyme cleaves on the 3′ side of C15 in the sequence G13U14C15. Base pairing between U14 and A9 plays an important role in this activity, and A15 or U15 can be cleaved instead of C15 (Koizumi M, et al: FEBS Lett 228: 228, 1988). A restriction enzyme-like RNA-cleaving ribozyme that recognizes the target RNA sequences UC, UU, or UA can be produced by designing the ribozyme such that the substrate binding site complements the RNA sequence near the target site (Koizumi, M. et al., FEBS Lett, 239:285, 1988; Koizumi, M. and Otsuka, E., Protein, Nucleic acid, and Enzyme, 35:2191, 1990; Koizumi, M. et al., Nucl Acids Res, 17:7059, 1989). For example, the polynucleotides of the present invention (SEQ ID NOs: 1-2188 and SEQ ID NOs: 4377-4683) contain a number of potential target sites. The polynucleotides of the present invention can be cleaved at desired positions with a ribozyme which contains an appropriately selected antisense sequence.

[0080] The ribozyme preferably comprises RNA and may be synthesized chemically or produced by enzymatic reaction. Methods of chemical synthesizing RNA are known in the art. Alternatively, the ribozyme can be produced by using RNA polymerase to transcribe a polynucleotide encoding the ribozyme. To produce a ribozyme by transcription, a polynucleotide encoding the ribozyme is arranged downstream of a promotor recognized by an RNA polymerase. Such RNA polymerases include T7 RNA polymerase and SP6 RNA polymerase. Alternatively, a ribozyme can be expressed in a host cell by inserting a polynucleotide encoding the ribozyme into an appropriate vector, and then introducing the vector into a host cell. The vector contains a promotor that can direct the expression of the gene in the host cell.

[0081] The present invention also provides siRNA (small interfering RNA) that downregulates the expression of a polynucleotide of the present invention. siRNA is a technique for controlling gene expression that inhibits protein synthesis from an mRNA by using a double-stranded RNA which comprises the same nucleotide sequence as that mRNA (Fire et al. (1998) Nature 391: 806-811). The effect of downregulating gene expression using double-stranded RNA is called “the RNAi effect”. siRNA has been reported to effectively control gene expression in mice (Zamore et al. (2000) Cell 101:25-33; Gura (2000) Nature 404: 804-808). Thus the introduction of such a double-stranded RNA into cells can result in selective downregulation of target gene expression.

[0082] There is no limitation as to the length of the siRNAs. The double-stranded RNAs introduced into cells are enzymatically digested inside these cells, starting from their original 3′ end and forming fragments of 21 bp to 23 bp. The enzyme that digests the double-stranded RNA is called ‘dicer’. The resulting double-stranded RNA fragments recognize and bind to target nucleotide sequences which comprise the same sequence. The nucleotide sequence is then cleaved by the activity of RNase III-like nuclease (Hammond et al. (2000) Nature, 404: 293-298; Zamore et al. (2000) Cell 101: 25-33).

[0083] siRNA is introduced into cells to downregulate gene expression using RNAi activity. siRNA can be introduced into cells using the same methods as for ribozymes. Specifically, chemically-synthesized, double-stranded RNA can be introduced into cells. When synthesized RNA, including antisense RNA and siRNA, is intended for introduction into cells, it can be pre-modified to prevent degradation by nuclease. For example, thiolated RNA is protected from nuclease degradation.

[0084] Alternatively, siRNA can be expressed in cells. For example, siRNA can be expressed in cells by inserting a sense sequence and its corresponding antisense sequence into a vector, and then transforming cells with that vector. When the two strands are adjacent, the expressed double-stranded RNA will have a hairpin-loop structure. When the two strands are expressed under the control of different promotors, the resulting double-stranded RNA will comprise two separate strands. Promotors generally used for the expression of siRNA include the U6 promotor.

[0085] The nucleotide sequence of an antisense polynucleotide, ribozyme, or siRNA of the present invention may be completely identical or complementary to any one of the nucleotide sequences of SEQ ID NOs: 1-2188 and SEQ ID NOs: 4377-4683, or may have high homology to these nucleotide sequences. The phrase “high homology” to an antisense polynucleotide, ribozyme, or siRNA nucleotide sequence typically means 90% or higher homology, preferably 95% or higher homology, more preferably 98% or higher homology, and still more preferably 99% or higher homology. The homology of a nucleotide sequence can be estimated, for example, by a method described herein.

[0086] One skilled in the art can design siRNA based on the nucleotide sequence of a gene whose expression is to be downregulated. The typical methods for designing siRNA include, for example, those described below. To begin with, it is advantageous to avoid using as target sequences: 1) 5′- or 3′-untranslated regions, and 2) regions adjacent to the start codon.

[0087] These regions often serve as binding regions for transcriptional regulatory proteins. In addition, these regions may also contain nucleotide sequences conserved among various mRNAs, and thus they may act to inhibit the expression of genes other than the gene of interest.

[0088] Thus, it may be advantageous to arrange the target sequence, for example, within the ORF downstream of the start codon. It is preferable to adjust the number of nucleotides between the start codon and the target sequence, for example, to 50 nucleotides or more. Typically, the nucleotide sequence of an siRNA is designed so that it starts from an aa sequence and comprises 19-21 consecutive nucleotides. A dinucleotide overhang is added to one end of siRNA. The nucleotide sequence of such an overhang may include doublets, dTdT or UU sequences. The GC content of a nucleotide sequence constituting siRNA is preferably about 50%. G and C nucleotide residues are preferably uniformly distributed throughout the siRNA.

[0089] The action of siRNA is based on sequence-specific mRNA hybridization. Thus, to achieve downregulation specific to a particular gene, it is essential to make the target nucleotide sequence as specific as possible to that gene. It is thus preferable to use homology searches to confirm that the proposed target nucleotide sequence exhibits negligible homology with other genes. Nucleotide sequence homology can be determined using established algorithms.

[0090] As long as an siRNA of the present invention down-regulates the expression of a polynucleotide of the present invention, it is not limited to nucleotide sequences obtained using the typical design method described above. For example, even if the target sequence is not specific to the nucleotide sequence of a particular gene, it can specifically downregulate the expression of a gene of interest in cells which do not express genes comprising homologous nucleotide sequences. Furthermore, double-stranded RNA having RNAi activity can be obtained without using the above-described methods typically used to select a target sequence.

[0091] The polynucleotides or antisense polynucleotides, ribozymes, and siRNAs of the present invention can be used in, for example, gene therapy. Preferable target diseases may be, for example, cancers or various inflammatory diseases. Such molecules can be used for gene therapy, for example, by administrating them to patients in vivo or ex vivo using viral vectors such as retroviral vectors, adenoviral vectors, and adeno-related viral vectors, or non-viral vectors such as liposomes.

[0092] The present invention also includes partial peptides of the polypeptides of the invention. Such a partial peptide comprises a polypeptide generated as a result of removing a signal peptide from a secretory protein. If a polypeptide of the present invention has activity as a receptor or ligand, the partial peptide may function as a competitive inhibitor of the polypeptide, and may bind to the receptor (or ligand). In addition, the present invention includes an antigen peptide for raising antibodies. For the peptides to be specific to a polypeptide of the present invention, the peptides comprise at least seven amino acids, preferably eight amino acids or more, more preferably nine amino acids or more, and even more preferably ten amino acids or more. The peptide can be used to prepare an antibody against or competitive inhibitor of a polypeptide of the present invention, and can also be used to screen for a receptor that binds to the polypeptide of this invention. The partial peptides of this invention can be produced, for example, by genetic engineering methods, known methods for synthesizing peptides, or by digesting a polypeptide of the invention with an appropriate peptidase.

[0093] The present invention also relates to a vector into which a polynucleotide of the invention is inserted. Vectors of the present invention are not limited as long as they can contain the inserted polynucleotide stably. For example, if E. coli is used as a host, vectors such as pBluescript vector (Stratagene) are preferred cloning vectors. To produce a polypeptide of the invention, expression vectors are especially useful. Any expression vector can be used as long as it is capable of expressing the polypeptide in vitro, in E. coli, in cultured cells, or in vivo. For example, pBEST vector (Promega) is preferable for in vitro expression, pET vector (Invitrogen) for E. coli, pME18S-FL3 vector (GenBank Accession No. AB009864) for cultured cells, and pME18S vector (Mol. Cell. Biol. (1988) 8: 466-472) for in vivo expression. To insert a polynucleotide of the present invention, ligation utilizing restriction sites can be performed according to standard methods (Current Protocols in Molecular Biology (1987) Ausubel et al. edit, John Wiley & Sons, Section 11.4-11.11).

[0094] The GATEWAY™ system (Invitrogen), which is an expression vector construction system for polypeptide expression, can also be used (Experimental Medicine, Vol. 18, No. 19 (December), p2716-2717, 2000). This system includes two types of site-specific recombinases (BP CLONASE™ and LR CLONASE™) derived from lambda phage and uses BP CLONASE™-specific recombination sites for the Entry Vector, and LR CLONASE™-specific recombination sites for the Destination Vector, which may comprise a tag useful for polypeptide purification. With this system, an expression vector can be obtained by using homologous recombination.

[0095] First, a polynucleotide fragment of interest is inserted into the entry vector using the first recombination. Then, a second recombination is allowed to take place between the entry vector, where the polynucleotide fragment of interest has been inserted, and the destination vector. Thus, the expression vector can be prepared rapidly and efficiently. Using the above-mentioned typical restriction enzyme/ligase reaction method, expression vector construction and expression of a polypeptide of interest takes about seven to ten days. However, using the GATEWAY™ system, the polypeptide of interest can be expressed and prepared in only three to four days. Thus, the system ensures a high-throughput functional analysis for expressed polypeptides (http://biotech.nikkeibp.co.jp/netlink/lto/gateway/).

[0096] The present invention also relates to a transformant carrying a vector of the present invention. Any cell can be used as a host into which a vector of this invention is inserted, and various kinds of host cells can be used depending on the purpose. For example, COS cells or CHO cells can be used for strong expression of the polypeptide in eukaryotic cells.

[0097] Introduction of such a vector into host cells can be performed, for example, by calcium phosphate precipitation, electroporation (Current Protocols in Molecular Biology (1987) Ausubel et al. edit, John Wiley & Sons, Section 9.1-9.9), lipofectamine method (GIBCO-BRL), or microinjection, etc.

[0098] Further, a polynucleotide containing at least 15 nucleotides comprising a nucleotide sequence of any one of the polynucleotides comprising the nucleotide sequences of SEQ ID NOs shown in Table 1, or the complementary strand thereof, can be used not only as a primer for synthesizing full-length cDNAs, but also for testing and diagnosing abnormalities of the polypeptide encoded by the full-length cDNA of the present invention. For example, by utilizing polymerase chain reaction (genomic DNA-PCR, or RT-PCR) using a polynucleotide of this invention as a primer, a polynucleotide encoding a polypeptide of the invention can be amplified. It is also possible to obtain the regulatory region of expression in the 5′-upstream by using PCR or hybridization, since the transcription start site within the genomic sequence can be easily specified based on the 5′-end sequence of the full-length cDNA. The obtained genomic region can be used for detection and/or diagnosis of sequence abnormality using RFLP analysis, SSCP, or sequencing. Where expression of an mRNA of the present invention varies according to a specific disease, analysis of the amount of mRNA expression using a polynucleotide of the present invention as a probe or a primer enables detection and diagnosis of that disease.

[0099] The present invention also relates to antibodies that bind to a polypeptide of the present invention. There are no limitations as to the form of the antibodies of this invention. They include polyclonal antibodies, monoclonal antibodies, or portions thereof that can bind to an antigen. They also include antibodies of all classes. Furthermore, special antibodies such as humanized antibodies and chimeric antibodies are also included.

[0100] A polyclonal antibody of this invention can be obtained according to the standard method of synthesizing an oligopeptide corresponding to an amino acid sequence, and immunizing rabbits with that peptide (Current Protocols in Molecular Biology (1987) Ausubel et al. edit, John Wiley & Sons, Section 11.12-11.13). A monoclonal antibody of the present invention can be obtained according to the standard method of purifying a polypeptide expressed in E. coli, immunizing mice with that polypeptide, and producing a hybridoma cell by fusing spleen cells and myeloma cells (Current Protocols in Molecular Biology (1987) Ausubel et al. edit, John Wiley & Sons, Section 11.4-11.11).

[0101] An antibody binding to a polypeptide of the present invention can be used for purification of the polypeptide of the invention, and also for detection and/or diagnosis of abnormalities of the expression and structure of that polypeptide. Specifically, polypeptides can be extracted, for example, from tissues, blood, or cells, and a polypeptide of this invention can then be detected for the above purpose using Western blotting, immunoprecipitation, or ELISA.

[0102] Furthermore, an antibody binding to a polypeptide of the present invention can be utilized for treating a disease associated with that polypeptide. If the antibody is used to treat patients, human antibodies, humanized antibodies, or chimeric antibodies are preferred due to their low antigenicity. Human antibodies can be prepared by immunizing a mouse whose immune system is replaced with that of a human (e.g., see “Functional transplant of megabase human immunoglobulin loci recapitulates human antibody response in mice” Mendez, M. J. et al. (1997) Nat. Genet. 15: 146-156). These humanized antibodies can be prepared by recombination of the hypervariable region of a monoclonal antibody (Methods in Enzymology (1991) 203: 99-121).

[0103] The cDNAs (clones) of the present invention include polypeptide sequences encoding proteins whose function can be predicted, such as, for example, secretory and/or membrane proteins, glycoprotein-related proteins, signal transduction-related proteins, transcription-related proteins, disease-related proteins, enzyme and/or metabolism-related proteins, cell division- and/or cell proliferation-related proteins, cytoskeleton-related proteins, nuclear protein and/or RNA synthesis-related proteins, protein synthesis and/or transport-related proteins, cellular defense-related proteins, development and/or differentiation-related proteins, DNA- and/or RNA-binding proteins, ATP- and/or GTP-binding proteins. The results of cDNA homology searches can be used to estimate whether a cDNA sequence comprises the function of an above-described protein. Specifically, the function of a polypeptide encoded by a cDNA of the present invention can be inferred by (a) searching for a known gene or protein which is homologous to the complete or partial nucleotide sequence of the full-length cDNA of the present invention, and (b) comparing the function of the gene and that of the protein encoded by the gene.

[0104] Alternatively, the function of a polypeptide encoded by a cDNA of the present invention can be predicted when a signal sequence, transmembrane domain, nuclear translocation signal, glycosylation signal, phosphorylation site, zinc-finger motif, SH3 domain, or such is found in the amino acid sequence. In particular, partial sequence structures such as motif and domain structures are commonly found in a number of proteins, and comprise a minimal functional protein structure. The Pfam database identifies a total of 4,832 types of motifs and domains, including both those whose functions have been clarified and those whose functions remain unclear (http://www.sanger.ac.uk/Software/Pfam/index.shtml) Version 7.7 (the latest version as of December 2002).

[0105] A specific example of motif/domain function is shown below. The ITAM motif (immunoreceptor tyrosine-based activation motif) is found in the intracellular region of the T cell receptor which is expressed on the cell membrane of T cells participating in an immune response (Flaswinkel, H. et al. Semin Immunol 1995 February, 7(1):21-7). The ITAM motif has a tandem YXXL structure (tyrosine-arbitrary amino acid-arbitrary amino acid-leucine). On extracellular stimulus by an antigen or antibody, the tyrosine in the motif is phosphorylated by an enzyme (LCK) with a kinase domain. Then, ZAP70 binds to the phosphorylated tyrosine via the SH2 domain, resulting in downstream signal transduction (Bu, J. Y. et al., Proc Natl Acad Sci USA 1995 May 23, 92(11):5106-10; Neumeister, E. N. et al., Mol Cell Biol 1995 June, 15(6):3171-8).

[0106] A similar phenomenon has been found in mast cells as well as in T cells (Chen, T. et al., J Biol Chem 1996 Oct. 11, 271(41):25308-15). Thus, at the molecular level, such a phenomenon is the first step in the activation of immune cells in immunologic diseases such as allergies, atopic dermatitis, and asthma.

[0107] Even in a simple exemplary scheme such as the one described above, there are three major motif/domain structures—ITAM, the SH2 domain, and the protein kinase domain—each of which play an important role. The mechanism of this scheme can be interpreted using these three structures. Thus, collecting, categorizing and elucidating the function of molecules that comprise common motif/domain structures is exceedingly important in understanding the molecular-based mechanisms of various cellular functions, including and in addition to the immune response described herein. Searching for motif/domain structures is highly important as the first step in elucidating the functions of unknown polypeptides. It is also understood that an entire polypeptide structure is comprised by minimal structures such as motifs and domains, thus providing the overall function of an entire polypeptide.

[0108] The overall function of a polypeptide in cells can be accurately predicted at the molecular level using data obtained by domain and motif structure analysis. In addition, a fusion polypeptide comprising a partial amino acid sequence and a GFP protein or the like may be prepared, and then introduced into cultured cells. For example, if a polypeptide is localized on the cell membrane, it may function as a receptor or ion channel. Alternatively, if a polypeptide is localized in the nucleus, it can be predicted to serve as a polynucleotide-binding protein or to participate in transcription. Thus, the function of a polypeptide can also be predicted by determining its localization.

[0109] The function of a full-length cDNA obtained in the present invention can be predicted by carrying out the above-described analysis using its entire nucleotide sequence and the amino acid sequence it encodes. Even when the full-length cDNA nucleotide sequence is not available, a partial sequence thereof (preferably 300 nucleotides or more) often enables function to be predicted. However, function predicted based on information yielded in a partial sequence homology search will not necessarily be the same as that based on a full-length sequence. Functional prediction based on a full-length nucleotide sequence is obviously preferable.

[0110] A more specific method for predicting function involves homology searches of databases such as GenBank, Swiss-Prot, UniGene, nr and RefSeq, using BLAST or FASTA. The functions of polypeptides encoded by the cDNAs of the present invention can be predicted based on hit genes and the function of polypeptides encoded by these genes. Polypeptide functions can be predicted from the amino acid sequences deduced from the structure of the full-length nucleotide sequences. In this way, signal sequences and transmembrane domains can be predicted from amino acid sequences using PSORT [K. Nakai & M. Kanehisa, Genomics, 14: 897-911 (1992)], SOSUI [T. Hirokawa et al., Bioinformatics, 14, 378-379 (1998)] (Mitsui Knowledge Industry Co., Ltd.), MEMSAT [D. T. Jones, W. R. Taylor & J. M. Thornton, Biochemistry, 33, 3038-3049 (1994)], and the like. Alternatively, motifs and domains can be predicted from amino acid sequences by carrying out searches using Pfam, PROSITE (http://www.expasy.ch/prosite/), or such. The above-described procedures facilitate more accurate prediction of polypeptide function.

[0111] The databases GenBank, Swiss-Prot, UniGene, nr and RefSeq were searched as described above for homology to the 2,495 full-length clone sequences of the present invention whose full-length nucleotide had been determined (see Example 4 and the results of homology searches). In addition, the amino acid sequences deduced from the full-length nucleotide sequences were analyzed by database searches for signal sequences and transmembrane domains using PSORT and SOSUI (see Example 5). The clones were categorized into the fourteen functional categories shown below, based on 1) the results of annotation-based functional prediction (by referring to keywords in the hit data of Swiss-Prot, or to Definitions and Reference information in the hit data of GenBank, UniGene, nr or RefSeq), 2) the results of PSORT searches for signal sequences using the deduced ORFs and 3) the results of SOSUI searches for transmembrane domains using the deduced ORFs. As a result, 1,229 clones were estimated to encode proteins belonging to the categories described below.

Secretory and/or membrane protein (741 clones)

Glycoprotein-related protein (130 clones)

Signal transduction-related protein (111 clones)

Transcription-related protein (102 clones)

Disease-related protein (426 clones)

Enzyme and/or metabolism-related protein (230 clones)

Cell division- and/or cell proliferation-related protein (52 clones)

Cytoskeleton-related protein (61 clones)

Nuclear protein and/or RNA synthesis-related protein (58 clones)

Protein synthesis- and/or transport-related protein (72 clones)

Cellular defense-related protein (seven clones)

Development and/or differentiation-related protein (14 clones)

DNA- and/or RNA-binding protein (129 clones)

ATP- and/or GTP-binding protein (92 clones)

[0112] The clones predicted to belong to the category of secretory protein and/or membrane protein are the following 659 clones.

[0113] ACTVT2000380, ADIPS2000088, ADRGL2000172, ADRGL2003329, ADRGL2009146, ASTRO2014923, ASTRO3000301, BLADE1000176, BLADE2002073, BLADE2002947, BLADE2004462, BLADE2004670, BLADE2005036, BLADE2008539, BNGH42003570, BRACE1000186, BRACE2005457, BRACE2014306, BRACE2016981, BRACE2029112, BRACE2030884, BRACE2031527, BRACE2031531, BRACE2031899, BRACE2032385, BRACE2036005, BRACE2039249, BRACE2039327, BRACE2040138, BRACE2041200, BRACE2043142, BRACE2043665, BRACE2046295, BRACE3000697, BRACE3001391, BRACE3002298, BRACE3003004, BRACE3003595, BRACE3004058, BRACE3004113, BRACE3004772, BRACE3004843, BRACE3006462, BRACE3008137, BRACE3008384, BRACE3009574, BRACE3009708, BRACE3010397, BRACE3011271, BRACE3011505, BRACE3013740, BRACE3014005, BRACE3014068, BRACE3014807, BRACE3016884, BRACE3018963, BRACE3019084, BRACE3020286, BRACE3020594, BRACE3024662, BRACE3025531, BRACE3025630, BRACE3026008, BRACE3026735, BRACE3027326, BRACE3031838, BRACE3040856, BRALZ2016085, BRAMY2001473, BRAMY2004771, BRAMY2005052, BRAMY2017528, BRAMY2019300, BRAMY2019963, BRAMY2021498, BRAMY2028856, BRAMY2033003, BRAMY2033116, BRAMY2033594, BRAMY2036396, BRAMY2039872, BRAMY2040592, BRAMY2041542, BRAMY2045036, BRAMY2047420, BRAMY2047751, BRAMY2047765, BRAMY3002312, BRAMY3004224, BRAMY3004919, BRAMY3007206, BRAMY3007609, BRAMY3008505, BRAMY4000095, BRASW1000125, BRAWH1000127, BRAWH2002560, BRAWH2002761, BRAWH2007658, BRAWH2014414, BRAWH2014954, BRAWH2016221, BRAWH2016439, BRAWH2016702, BRAWH3000078, BRAWH3000314, BRAWH3001475, BRAWH3001891, BRAWH3002600, BRAWH3003555, BRAWH3003727, BRAWH3003992, BRAWH3004453, BRAWH3004666, BRAWH3005132, BRAWH3005912, BRAWH3006548, BRAWH3007221, BRAWH3007506, BRAWH3007592, BRAWH3008634, BRCAN2002948, BRCAN2006063, BRCAN2009203, BRCAN2010376, BRCAN2012355, BRCAN2012481, BRCAN2013655, BRCAN2014143, BRCAN2016619, BRCAN2024451, BRCOC2007034, BRCOC2019934, BRHIP2000691, BRHIP2001805, BRHIP2002172, BRHIP2004814, BRHIP2004883, BRHIP2005236, BRHIP2005752, BRHIP2009414, BRHIP2013699, BRHIP2026288, BRHIP3000526, BRHIP3007483, BRHIP3007586, BRHIP3008598, BRHIP3009448, BRHIP3015751, BRHIP3024118, BRHIP3026097, BRSSN2003086, BRSSN2004496, BRSSN2008549, BRSSN2011738, BRSSN2014424, BRSSN2018925, BRSTN2000872, BRSTN2003835, BRSTN2007000, BRSTN2010363, BRSTN2012380, BRSTN2015015, BRSTN2016470, BRSTN2016678, BRSTN2017110, BRTHA2002376, BRTHA2002493, BRTHA2002608, BRTHA2002808, BRTHA2003110, BRTHA2003461, BRTHA2005579, BRTHA2006075, BRTHA2008527, BRTHA2011194, BRTHA2012980, BRTHA2013460, BRTHA2015696, BRTHA2015878, BRTHA2016215, BRTHA2016496, BRTHA2017985, BRTHA2018344, BRTHA2018624, BRTHA3000633, BRTHA3002427, BRTHA3003474, BRTHA3007148, BRTHA3008386, BRTHA3008778, BRTHA3009037, BRTHA3009090, BRTHA3009291, BRTHA3016845, BRTHA3017047, BRTHA3017589, BRTHA3017848, BRTHA3018656, CERVX2002006, COLON2000568, COLON2002443, COLON2004478, COLON2005126, COLON2005772, CTONG1000302, CTONG1000341, CTONG1000488, CTONG1000508, CTONG2000042, CTONG2004062, CTONG2008233, CTONG2009423, CTONG2009531, CTONG2010803, CTONG2013178, CTONG2019652, CTONG2019788, CTONG2020127, CTONG2020522, CTONG2020638, CTONG2022601, CTONG2023512, CTONG2024749, CTONG2025496, CTONG2026920, CTONG2027327, CTONG2028124, CTONG2028687, CTONG3000707, CTONG3001370, CTONG3001560, CTONG3002020, CTONG3003179, CTONG3003483, CTONG3003737, CTONG3005648, CTONG3008252, CTONG3008258, CTONG3008496, CTONG3008566, CTONG3008951, CTONG3009227, CTONG3009239, CTONG3009328, CTONG3009385, D3OST2002182, D3OST2002648, DFNES1000107, DFNES2000146, DFNES2005266, DFNES2010502, FCBBF2001183, FCBBF2007510, FCBBF3003435, FCBBF3004502, FCBBF3009888, FCBBF3012170, FCBBF3021576, FCBBF3023895, FCBBF4000076, FEBRA1000030, FEBRA2007708, FEBRA2008311, FEBRA2008468, FEBRA2020668, FEBRA2025427, FEBRA2027082, HCASM2002502, HCASM2003212, HCASM2007047, HCHON2000212, HCHON2001084, HCHON2001548, HCHON2001577, HCHON2001712, HCHON2002676, HCHON2004007, HCHON2004776, HCHON2005921, HEART1000010, HEART2001680, HEART2010492, HLUNG2000014, HLUNG2003872, HLUNG2010464, HLUNG2015617, HLUNG2017350, HSYRA2005496, HSYRA2006873, HSYRA2008714, HSYRA2009102, IMR322002110, IMR322006222, KIDNE1000064, KIDNE2000832, KIDNE2000846, KIDNE2006580, KIDNE2010264, KIDNE2011635, KIDNE2012945, KIDNE2013095, LIVER2007415, LYMPB2000083, MESAN2001979, MESAN2012054, MESTC1000042, NHNPC2000606, NHNPC2001223, NOVAR2000136, NOVAR2001108, NT2RI2008724, NT2RI2009855, NT2RI2025909, NT2RI3001263, NT2RI3003095, NT2RI3003382, NT2RI3003409, NT2RI3005403, NT2RI3006171, NT2RI3006673, NT2RI3007065, NT2RI3007543, NT2RI3007978, NT2RP7000359, NT2RP7000466, NT2RP7004027, NT2RP7009030, NT2RP7014005, NTONG2000413, OCBBF2006151, OCBBF2006567, OCBBF2006764, OCBBF2007114, OCBBF2007428, OCBBF2009926, OCBBF2010140, OCBBF2017516, OCBBF2021788, OCBBF2024719, OCBBF2025458, OCBBF2030517, OCBBF2030574, OCBBF2031167, OCBBF2032590, OCBBF2033869, OCBBF2037598, OCBBF2038317, OCBBF3000483, OCBBF3003320, OCBBF3004314, PEBLM2000170, PEBLM2000338, PEBLM2002594, PEBLM2006113, PEBLM2007834, PERIC2001227, PERIC2003452, PERIC2003720, PERIC2004909, PERIC2005347, PERIC2006035, PERIC2007914, PLACE5000171, PLACE5000260, PLACE5000282, PLACE6012574, PLACE6019932, PLACE6020031, PLACE7000514, PLACE7001022, PROST1000184, PROST1000528, PROST1000559, PROST2003428, PROST2018090, PROST2018902, PROST2018922, PUAEN2002489, PUAEN2005588, PUAEN2006701, PUAEN2009174, PUAEN2009795, RECTM2000433, RECTM2001347, SKMUS2000757, SKNMC2002402, SMINT2002743, SMINT2009902, SMINT2011888, SMINT2015787, SPLEN2001599, SPLEN2009548, SPLEN2012889, SPLEN2015158, SPLEN2015267, SPLEN2015679, SPLEN2021701, SPLEN2023733, SPLEN2023791, SPLEN2025491, SPLEN2029522, SPLEN2029683, SPLEN2030335, SPLEN2030479, SPLEN2031125, SPLEN2031424, SPLEN2031547, SPLEN2031724, SPLEN2031780, SPLEN2032813, SPLEN2033098, SPLEN2034021, SPLEN2034781, SPLEN2036326, SPLEN2036821, SPLEN2037722, SPLEN2038180, SPLEN2038345, SPLEN2038407, SPLEN2040222, SPLEN2041304, SPLEN2042598, STOMA2004294, STOMA2008546, SYNOV2005817, SYNOV2012326, SYNOV2014400, SYNOV2016124, SYNOV4002883, SYNOV4003322, SYNOV4004184, SYNOV4004741, SYNOV4004914, SYNOV4006256, SYNOV4007430, SYNOV4007553, SYNOV4007671, SYNOV4008336, SYNOV4008440, TBAES2001258, TCERX2000613, TESOP2001345, TESOP2001865, TESOP2002273, TESOP2002539, TESOP2004114, TESOP2005485, TESOP2005579, TESOP2006041, TESOP2007052, TESOP2007262, TESOP2007636, TESTI1000257, TESTI1000348, TESTI2000644, TESTI2002036, TESTI2002618, TESTI2002928, TESTI2003347, TESTI2005610, TESTI2006648, TESTI2013382, TESTI2024567, TESTI2027019, TESTI2034767, TESTI2034953, TESTI2034997, TESTI2035997, TESTI2036684, TESTI2042450, TESTI2047071, TESTI2048898, TESTI2051767, TESTI2052822, TESTI4000215, TESTI4000724, TESTI4001100, TESTI4001527, TESTI4001561, TESTI4001665, TESTI4001923, TESTI4002552, TESTI4002754, TESTI4005805, TESTI4005961, TESTI4006053, TESTI4006137, TESTI4007064, TESTI4007163, TESTI4007239, TESTI4007382, TESTI4008050, TESTI4008401, TESTI4008429, TESTI4008797, TESTI4009608, TESTI4012448, TESTI4013369, TESTI4013667, TESTI4013830, TESTI4014392, TESTI4016238, TESTI4017575, TESTI4017901, TESTI4018835, TESTI4019566, TESTI4020092, TESTI4020102, TESTI4021478, TESTI4023722, TESTI4024420, TESTI4024874, TESTI4024890, TESTI4025797, TESTI4026456, TESTI4026785, TESTI4027821, TESTI4028062, TESTI4028429, TESTI4028823, TESTI4028880, TESTI4029836, TESTI4030159, TESTI4030505, TESTI4034172, TESTI4035065, TESTI4035649, TESTI4037244, TESTI4041053, TESTI4042711, TESTI4046487, TESTI4046819, THYMU2001053, THYMU2003632, THYMU2003760, THYMU2005003, THYMU2005303, THYMU2005321, THYMU2007658, THYMU2008725, THYMU2009425, THYMU2011548, THYMU2013386, THYMU2014353, THYMU2019210, THYMU2023711, THYMU2027497, THYMU2027695, THYMU2029676, THYMU2030068, THYMU2032035, THYMU2032437, THYMU2032655, THYMU2033079, THYMU2033308, THYMU2033816, THYMU2034314, THYMU2035064, THYMU2036085, THYMU2036459, THYMU2037226, THYMU2037348, THYMU2038772, THYMU2038797, THYMU2039780, THYMU2040412, THYMU2041015, THYMU3000028, THYMU3000036, THYMU3004835, THYMU3005696, THYMU3006168, THYMU3006811, THYMU3007137, THYMU3007368, THYMU3007845, TKIDN2002424, TKIDN2002632, TKIDN2006525, TKIDN2009092, TKIDN2009889, TKIDN2014771, TKIDN2019116, TLIVE2000023, TLIVE2001828, TLIVE2001927, TLIVE2002336, TLIVE2002690, TLIVE2003381, TLIVE2004110, TLIVE2008229, TOVAR2001281, TRACH1000205, TRACH2001549, TRACH2001684, TRACH2006387, TRACH2007059, TRACH2007834, TRACH2008300, TRACH2020525, TRACH2021964, TRACH2022553, TRACH2025535, TRACH2025911, TRACH3000014, TRACH3002064, TRACH3002168, TRACH3002650, TRACH3004786, TRACH3005294, TRACH3005549, TRACH3006149, TRACH3007391, TRACH3008629, TRACH3035199, TRACH3035526, TRACH3036193, TSTOM2000442, TSTOM2000553, TUTER2000916, UTERU1000339, UTERU2004688, UTERU2004929, UTERU2006137, UTERU2006568, UTERU2007444, UTERU2017762, UTERU2020718, UTERU2022020, UTERU2025025, UTERU2025645, UTERU2025891, UTERU2026090, UTERU2026203, UTERU2027591, UTERU2029953, UTERU2031851, UTERU2035323, UTERU2035469, UTERU3000645, UTERU3000899, UTERU3001240, UTERU3001571, UTERU3001585, UTERU3001652, UTERU3001988, UTERU3002209, UTERU3002383, UTERU3002786, UTERU3003116, UTERU3003776, UTERU3006308, UTERU3008671, UTERU3009690, UTERU3009979, UTERU3011063, UTERU3015500, UTERU3016789

[0114] The following 82 clones are also predicted to belong to the category of secretory protein and/or membrane protein.

[0115] BLADE2006830, BRACE2002589, BRACE2009318, BRACE2011677, BRACE2029396, BRACE2039823, BRACE2039832, BRAMY2019111, BRAMY2038516, BRAMY2045471, BRAWH2006395, BRAWH2008993, BRCOC2019841, BRHIP2003272, BRHIP2005271, BRHIP2005724, BRHIP2008389, BRHIP2026877, BRHIP3000240, BRTHA2011321, BRTHA2018011, BRTHA2018443, BRTHA3008826, CTONG2015633, CTONG2016942, CTONG2019822, FEBRA2000790, FEBRA2006519, FEBRA2028256, FEBRA2028516, HCASM2002754, HEART2009680, HLUNG2013350, HLUNG2015418, IMR322013396, LIVER2000247, NT2RI2009583, NT2RI2027157, NT2RP7008435, OCBBF2003327, OCBBF2030116, PLACE7000502, PROST2000452, PROST2019487, SPLEN2016932, SPLEN2037319, SYNOV2001660, SYNOV2013637, SYNOV4003981, SYNOV4005889, TBAES2000932, TESTI2015626, TESTI2029252, TESTI2032643, TESTI2039060, TESTI2050780, TESTI4000137, TESTI4000155, TESTI4006473, TESTI4011070, TESTI4013365, TESTI4013894, TESTI4014801, TESTI4032090, TESTI4041086, THYMU2004284, THYMU2030462, THYMU2033401, THYMU2034279, THYMU2035710, THYMU2040925, TKIDN2008778, TKIDN2012771, TKIDN2018926, TLIVE2007607, TRACH2019672, TRACH3000420, TRACH3003683, UTERU2011220, UTERU2021820, UTERU2032279, UTERU3015069

[0116] The clones predicted to belong to the category of glycoprotein-related protein are the following 115 clones.

[0117] ADIPS2000088, BNGH42003570, BRACE2005457, BRACE2014306, BRACE2029112, BRACE2039249, BRACE2046295, BRACE3001391, BRACE3011271, BRACE3016884, BRAMY2005052, BRAMY3004919, BRAMY4000095, BRAMY4000277, BRAWH1000127, BRAWH2007658, BRAWH2014414, BRAWH2016221, BRAWH3002600, BRCAN2006063, BRSSN2004496, BRTHA2008527, BRTHA2012980, BRTHA2016496, BRTHA3002427, BRTHA3017848, COLON2000568, COLON2004478, COLON2005772, CTONG1000341, CTONG2000042, CTONG2009423, CTONG2023512, CTONG2024749, CTONG2025496, CTONG3001370, CTONG3003737, D3OST2002648, DFNES2000146, DFNES2005266, FCBBF3012170, FEBRA1000030, FEBRA2008311, FEBRA2008468, HCHON2001712, HEART1000010, HEART2001680, HSYRA2005496, KIDNE2012945, LYMPB2000083, NESOP2001433, NOVAR2000136, NOVAR2001108, NT2RI3006171, NT2RI3006673, NT2RP7004027, OCBBF2033869, PLACE5000171, PROST1000184, PUAEN2009795, SMINT2010076, SMINT2011888, SMINT2015787, SPLEN2015267, SPLEN2021701, SPLEN2030335, SYNOV2005817, SYNOV2014400, SYNOV3000231, SYNOV3000302, TESOP2004114, TESOP2005485, TESTI1000257, TESTI2002036, TESTI2002618, TESTI2024567, TESTI2027019, TESTI4001527, TESTI4007163, TESTI4012406, TESTI4013830, TESTI4020092, TESTI4023546, TESTI4028823, TESTI4028880, TESTI4046819, THYMU2005303, THYMU2008725, THYMU2009425, THYMU2011548, THYMU2019210, THYMU2023711, THYMU2027497, THYMU2027695, THYMU2038797, THYMU3004835, TLIVE2003381, TRACH2006387, TRACH2007059, TRACH2022425, TRACH2022553, TRACH2022649, TRACH3002168, TRACH3008629, TRACH3035526, TSTOM2000442, UTERU2008347, UTERU2025025, UTERU2035469, UTERU3000899, UTERU3001240, UTERU3003116, UTERU3006308, UTERU3008671, UTERU3015500.

[0118] The following 15 clones are also predicted to belong to the category of glycoprotein-related protein.

BRAMY2019111, BRHIP2026877, BRTHA2018011, FEBRA2028256, HEART2009680, HLUNG2015418, NT2RI2009583, NT2RP7008435, OCBBF2003327, TESTI2032643, TESTI2039060, TESTI4011070, THYMU2035710, TRACH3003683, UTERU2032279

[0119] The clones predicted to belong to the category of signal transduction-related protein are the following 80 clones.

[0120] BNGH42007788, BRACE2008594, BRACE2030341, BRACE2044286, BRACE3002508, BRACE3003595, BRACE3006872, BRACE3011421, BRACE3015027, BRACE3027326, BRAMY2036567, BRAMY2038904, BRAMY3000213, BRAMY3002803, BRAMY3005091, BRAMY3005932, BRAMY4000095, BRAMY4000229, BRCAN2003703, BRCAN2014602, BRCAN2016619, BRCAN2028355, BRHIP2000819, BRHIP3025161, BRSSN2004719, BRSTN2008418, BRTHA2002281, BRTHA2015406, CTONG2006798, CTONG3000084, CTONG3002412, D3OST3000169, FCBBF3007540, HCASM2001301, HCHON2006250, HCHON2008112, HLUNG2002465, KIDNE2001847, NESOP2001694, NT2NE2003252, NT2RI2005166, NT2RI3007757, NT2RI3008652, NT2RP7005529, NT2RP7009147, NT2RP7013795, NT2RP8000483, OCBBF2004826, OCBBF2007028, OCBBF2022351, OCBBF2030354, OCBBF2037547, PLACE6019385, PLACE7008431, PROST2016462, PROST2018511, PUAEN2009852, SPLEN2036932, SYNOV2021320, TESOP2000801, TESOP2001166, TESTI2005739, TESTI2026505, TESTI2050137, TESTI4011745, TESTI4012505, TESTI4018208, TESTI4028059, THYMU2007060, THYMU2031046, THYMU2032014, THYMU2039305, THYMU3008436, TLIVE2001327, TRACH2009310, TRACH2025535, TRACH3009455, UTERU2025025, UTERU2036089, UTERU3016789

[0121] The following 31 clones are also predicted to belong to the category of signal transduction-related protein.

[0122] BRAMY3004800, BRAWH3009017, BRHIP2026877, BRTHA2013610, BRTHA2017972, BRTHA3003000, CTONG2020974, FEBRA2001990, FEBRA2008692, NT2RI2005772, NT2RI3007443, NTONG2008093, OCBBF2005433, OCBBF2024284, OCBBF2034637, OCBBF3002654, SPLEN2036702, SPLEN2039379, TESOP2000390, TESTI2025924, TESTI2049956, TESTI4000319, TESTI4019657, TESTI4021482, TESTI4024387, TESTI4025268, TESTI4031745, THYMU2004139, THYMU2031249, UTERU2008040, UTERU3000738

[0123] The clones predicted to belong to the category of transcription-related protein are the following 38 clones.

[0124] BRACE2030326, BRACE3001002, BRACE3045033, BRHIP3025161, BRSSN2014299, BRTHA2014792, BRTHA3001721, CTONG2025516, FEBRA2007544, FEBRA2007801, HEART1000074, IMR322000127, IMR322000917, NT2NE2006531, NT2RI2006686, NT2RI3009158, OCBBF2020838, OCBBF2036743, PEBLM2002887, SKNMC2007504, SPLEN2012624, TESTI2026505, TESTI2040018, TESTI2044796, TESTI2050987, TESTI4001176, TESTI4007810, TESTI4014175, TESTI4017543, TESTI4026524, TESTI4036909, THYMU2006420, THYMU2037233, THYMU3004866, TRACH3000558, TUTER2000425, UTERU2035328, UTERU3009490

[0125] The following 64 clones are also predicted to belong to the category of transcription-related protein.

[0126] BRACE2003609, BRACE3001058, BRACE3001113, BRALZ2017844, BRAMY2035070, BRAMY2035449, BRAMY2035718, BRAMY2039341, BRAWH2006207, BRHIP2017553, CERVX2002013, CTONG1000113, CTONG2003348, CTONG2008721, CTONG2020378, CTONG2020411, CTONG2028758, CTONG3004726, DFNES2011192, FCBBF3010361, FEBRA2014122, FEBRA2027609, HCASM2003018, HCHON2004858, HSYRA2005628, MESAN2005303, MESAN2014412, MESAN2015501, NT2RI2008952, NT2RI2018448, NT2RI3001132, OCBBF2008144, OCBBF2009583, OCBBF2011669, OCBBF2019684, OCBBF2032274, OCBBF3000167, SPLEN2004611, SPLEN2016135, SPLEN2016781, SYNOV2021953, SYNOV4002744, TESOP2001796, TESOP2005199, TESOP2006398, TESOP2006865, TESTI2034251, TESTI4000183, TESTI4000214, TESTI4008302, TESTI4015442, TESTI4025494, TESTI4025547, TESTI4028938, TESTI4032112, THYMU2006001, THYMU2028739, TRACH2007483, TRACH3000134, TRACH3003832, TUTER2000057, UTERU2033577, UTERU3001053, TESTI4038779

[0127] The clones predicted to belong to the category of disease-related protein are the following 342 clones.

[0128] 3NB692002806, ADIPS2000088, BLADE2005036, BRACE2005457, BRACE2008594, BRACE2014306, BRACE2016981, BRACE2018762, BRACE2035381, BRACE2038551, BRACE2039249, BRACE2045300, BRACE3000840, BRACE3001002, BRACE3001391, BRACE3001754, BRACE3002508, BRACE3003595, BRACE3004058, BRACE3004150, BRACE3004772, BRACE3008137, BRACE3008384, BRACE3009708, BRACE3010397, BRACE3011271, BRACE3011421, BRACE3014807, BRACE3015027, BRACE3015521, BRACE3018963, BRACE3020594, BRACE3027326, BRALZ2017359, BRAMY2005052, BRAMY2038904, BRAMY2047751, BRAMY3000213, BRAMY3005091, BRAMY3007609, BRAMY4000095, BRAMY4000229, BRAMY4000277, BRAWH2001395, BRAWH2002560, BRAWH2010000, BRAWH2010536, BRAWH2014414, BRAWH3000100, BRAWH3000491, BRAWH3001326, BRAWH3002574, BRAWH3005912, BRAWH3008341, BRCAN2002562, BRCAN2002856, BRCAN2002948, BRCAN2003746, BRCAN2006063, BRCAN2009203, BRCAN2014602, BRCAN2016619, BRCAN2017442, BRCAN2024451, BRCOC2001505, BRCOC2003213, BRHIP2000819, BRHIP2001805, BRHIP2009414, BRHIP2024165, BRHIP2026288, BRHIP3000339, BRHIP3008405, BRHIP3009448, BRHIP3027137, BRHIP3027854, BRSSN2000684, BRSSN2004719, BRSSN2014424, BRSTN2001613, BRSTN2004987, BRSTN2008418, BRTHA2002608, BRTHA2003110, BRTHA2007122, BRTHA2007603, BRTHA2008527, BRTHA2012980, BRTHA2014792, BRTHA3001721, BRTHA3002427, BRTHA3003074, BRTHA3003449, BRTHA3008778, BRTHA3009037, BRTHA3009090, BRTHA3015815, BRTHA3016917, BRTHA3017848, COLON2000568, COLON2002520, CTONG1000341, CTONG2000042, CTONG2009423, CTONG2010803, CTONG2017500, CTONG2023021, CTONG2025496, CTONG2025516, CTONG3000084, CTONG3002412, CTONG3008639, D3OST2002182, D3OST2002648, DFNES2001108, FCBBF3009888, FEBRA2007708, FEBRA2008468, FEBRA2024744, HCASM2001301, HCASM2007737, HCHON2001712, HCHON2002676, HCHON2003532, HCHON2004007, HCHON2004531, HCHON2008112, HCHON2008444, HEART1000010, HEART1000139, HEART2001680, HEART2010495, HLUNG2002465, HSYRA2005496, IMR322000127, IMR322001380, IMR322006495, KIDNE2001847, KIDNE2012945, NESOP2001694, NOVAR2001108, NT2NE2003252, NT2NE2006531, NT2NE2006909, NT2RI2006686, NT2RI2025909, NT2RI3001515, NT2RI3006171, NT2RI3006340, NT2RI3006673, NT2RI3007757, NT2RI3008652, NT2RP7000359, NT2RP7005118, NT2RP7005529, NT2RP7010599, NTONG2000413, OCBBF2006058, OCBBF2020801, OCBBF2021788, OCBBF2031167, OCBBF2033869, OCBBF2036743, OCBBF2037068, OCBBF2037340, OCBBF3003320, PEBLM2000170, PEBLM2002887, PERIC2003720, PERIC2007914, PERIC2008385, PERIC2009086, PLACE5000282, PLACE6019385, PROST1000184, PROST2003428, PROST2016462, PROST2017367, PROST2018090, PROST2018511, PUAEN2002489, PUAEN2009795, SKNMC2007504, SMINT2010076, SPLEN2002467, SPLEN2006122, SPLEN2011422, SPLEN2012624, SPLEN2021701, SPLEN2031547, SPLEN2033098, SPLEN2036326, SPLEN2036821, SPLEN2036932, SYNOV2005817, SYNOV2012326, SYNOV2014400, SYNOV2021320, SYNOV3000231, SYNOV3000302, SYNOV4002883, SYNOV4004741, SYNOV4007360, SYNOV4007521, SYNOV4007553, SYNOV4007671, SYNOV4008440, TBAES2001229, TBAES2001258, TESOP2004114, TESOP2005485, TESOP2009121, TESTI1000257, TESTI1000319, TESTI2000644, TESTI2002618, TESTI2005610, TESTI2024567, TESTI2026505, TESTI2050987, TESTI2051867, TESTI2053399, TESTI2053621, TESTI4000014, TESTI4000079, TESTI4000288, TESTI4000349, TESTI4000724, TESTI4001148, TESTI4001176, TESTI4001527, TESTI4001561, TESTI4002491, TESTI4006420, TESTI4006819, TESTI4007163, TESTI4007778, TESTI4007810, TESTI4008050, TESTI4008429, TESTI4009160, TESTI4009457, TESTI4009881, TESTI4010851, TESTI4011745, TESTI4011956, TESTI4012406, TESTI4012448, TESTI4012505, TESTI4012679, TESTI4013369, TESTI4013924, TESTI4014175, TESTI4016110, TESTI4016822, TESTI4016925, TESTI4017901, TESTI4018835, TESTI4018881, TESTI4018886, TESTI4020092, TESTI4021478, TESTI4022873, TESTI4023546, TESTI4026524, TESTI4027557, TESTI4028059, TESTI4028429, TESTI4028880, TESTI4030069, TESTI4034632, TESTI4034912, TESTI4035063, TESTI4035498, TESTI4036909, TESTI4037156, TESTI4040363, THYMU1000496, THYMU2005303, THYMU2008725, THYMU2019210, THYMU2027497, THYMU2027695, THYMU2027734, THYMU2031046, THYMU2033104, THYMU2035319, THYMU2037233, THYMU2041015, THYMU3001083, THYMU3001234, THYMU3001379, THYMU3003309, THYMU3004835, THYMU3006118, THYMU3007137, THYMU3008436, TKIDN2000701, TKIDN2006852, TLIVE2001327, TRACH2001549, TRACH2007059, TRACH2022425, TRACH2022649, TRACH3000558, TRACH3002168, TRACH3004721, TRACH3004786, TRACH3005549, TRACH3007479, TRACH3008629, TRACH3009455, TRACH3035526, TSTOM2000442, TUTER2000904, UTERU1000337, UTERU2005621, UTERU2007724, UTERU2017762, UTERU2019491, UTERU2019706, UTERU2025025, UTERU2026090, UTERU2027591, UTERU2035328, UTERU3000645, UTERU3000828, UTERU3000899, UTERU3001240, UTERU3001572, UTERU3001585, UTERU3001652, UTERU3003116, UTERU3003135, UTERU3005907, UTERU3007640, UTERU3008671, UTERU3009490, UTERU3009690, UTERU3009979, UTERU3015500, UTERU3016789

[0129] The following 84 clones are also predicted to belong to the category of disease-related protein.

[0130] BRACE3001113, BRACE3010076, BRAMY2039341, BRAMY3004800, BRAWH3009017, BRCAN2002473, BRCAN2002854, BRCAN2003070, BRHIP2005271, BRHIP2017553, BRHIP2026877, BRHIP3000240, BRHIP3008314, BRHIP3026052, BRSTN2013354, BRTHA2016318, BRTHA2017972, BRTHA3003000, CERVX2002013, CTONG1000113, CTONG2008721, CTONG2020411, CTONG3004550, FCBBF1000509, FEBRA2008692, HCASM2008536, HCHON2004858, HEART2009680, HLUNG2015548, HSYRA2005628, IMR322008651, IMR322013396, MESAN2001770, NT2RI2009583, NT2RI3007443, OCBBF2003327, OCBBF2009583, OCBBF2011669, OCBBF2024284, OCBBF2032274, OCBBF3000167, OCBBF3002654, PLACE7000502, PROST2000452, PROST2009320, SPLEN2004611, STOMA2003158, SYNOV1000256, SYNOV4002744, SYNOV4003981, TBAES2000932, TESOP2000390, TESOP2001796, TESOP2005199, TESTI2015626, TESTI2025924, TESTI2026647, TESTI2039060, TESTI4000183, TESTI4006473, TESTI4011070, TESTI4017714, TESTI4019657, TESTI4021482, TESTI4024387, TESTI4025494, TESTI4025547, TESTI4028938, TESTI4031745, TESTI4032112, THYMU2004284, THYMU2028739, THYMU2031139, THYMU2031249, THYMU2035710, THYMU3000269, TLIVE2001684, TLIVE2002046, TRACH2024408, TRACH3003683, UTERU2021820, UTERU2032279, UTERU2033577, UTERU3000738

[0131] In particular, hit data of the following 338 clones for Swiss-Prot, or GenBank, UniGene, nr or RefSeq corresponded to genes or proteins which had been deposited in the Online Mendelian Inheritance in Man (OMIM), which is the human gene and disease database (the OMIM Number is shown in the parenthesis after the Clone Name).

[0132] 3NB692002806 (261630), ADIPS2000088 (147120), BLADE2005036 (114850), BRACE2005457 (274600; 603545; 600791), BRACE2008594 (601959), BRACE2014306 (193002), BRACE2016981 (602701), BRACE2018762 (604800), BRACE2035381 (606088), BRACE2038551 (601961), BRACE2039249 (602273), BRACE2045300 (601442), BRACE3000840 (600355), BRACE3001002 (300236), BRACE3001391 (601313; 173900), BRACE3001754 (185641), BRACE3002508 (606417), BRACE3003595 (602941), BRACE3004058 (250800), BRACE3004150 (601035), BRACE3004772 (603143), BRACE3008137 (602187), BRACE3008384 (603264), BRACE3009708 (182340), BRACE3010397 (602187), BRACE3011271 (602187), BRACE3011421 (602187), BRACE3014807 (605784), BRACE3015027 (602187), BRACE3015521 (605888), BRACE3018963 (605744), BRACE3020594 (400023), BRACE3027326 (602187), BRALZ2017359 (604331), BRAMY2005052 (602621), BRAMY2038904 (605671), BRAMY2047751 (602512), BRAMY3000213 (605448), BRAMY3005091 (600286), BRAMY3007609 (300315), BRAMY4000095 (602187), BRAMY4000229 (602159), BRAMY4000277 (602187), BRAWH2001395 (159430), BRAWH2002560 (602865), BRAWH2010000 (602581), BRAWH2010536 (604010), BRAWH2014414 (603006), BRAWH3000100 (601403), BRAWH3000491 (602187), BRAWH3001326 (602187), BRAWH3002574 (602187), BRAWH3005912 (602187), BRAWH3008341 (602187), BRCAN2002562 (602187), BRCAN2002856 (602712), BRCAN2002948 (603534), BRCAN2003746 (311870), BRCAN2006063 (603196; 601369), BRCAN2009203 (603143), BRCAN2014602 (601441), BRCAN2016619 (602187), BRCAN2017442 (604455), BRCAN2024451 (602513), BRCOC2001505 (159430), BRCOC2003213 (602187), BRHIP2000819 (605000), BRHIP2001805 (603219), BRHIP2009414 (602187), BRHIP2024165 (604402), BRHIP2026288 (602187), BRHIP3000339 (159430), BRHIP3008405 (602187), BRHIP3009448 (602187), BRHIP3027137 (600249), BRHIP3027854 (601060), BRSSN2000684 (603505), BRSSN2004719 (600560), BRSSN2014424 (606105), BRSTN2001613 (164020), BRSTN2004987 (604733), BRSTN2008418 (602187), BRTHA2002608 (600463), BRTHA2003110 (602187), BRTHA2007122 (106410), BRTHA2007603 (605846), BRTHA2008527 (152790; 176410), BRTHA2012980 (300119), BRTHA2014792 (601674), BRTHA3001721 (604902), BRTHA3002427 (602187), BRTHA3003074 (605367), BRTHA3003449 (160745), BRTHA3008778 (602187), BRTHA3009037 (602187), BRTHA3009090 (603197), BRTHA3015815 (600902), BRTHA3016917 (604137), BRTHA3017848 (603377; 212140), COLON2000568 (147000), COLON2002520 (602187), CTONG1000341 (188040), CTONG2000042 (103950), CTONG2009423 (182137), CTONG2010803 (602189), CTONG2023021 (602498), CTONG2025496 (103950), CTONG2025516 (601679), CTONG3000084 (600888), CTONG3002412 (601403), CTONG3008639 (601797), D3OST2002182 (603590), D3OST2002648 (603071), DFNES2001108 (603560), FCBBF3009888 (602470), FEBRA2007708 (126650; 214700), FEBRA2008468 (278000), HCASM2001301 (602399), HCASM2007737 (601504), HCHON2001712 (109190), HCHON2002676 (252800), HCHON2003532 (172490), HCHON2004007 (605866), HCHON2004531 (602187), HCHON2008112 (605837), HCHON2008444 (602187), HEART1000010 (602187), HEART1000139 (191045; 115195), HEART2001680 (146900), HEART2010495 (157132), HLUNG2002465 (605216), HSYRA2005496 (131195; 187300), IMR322000127 (604077), IMR322001380 (605652), IMR322006495 (605607), KIDNE2012945 (600270), NOVAR2001108 (147120), NT2NE2003252 (602913), NT2NE2006531 (602277), NT2NE2006909 (602187), NT2RI2006686 (602700), NT2RI2025909 (212138), NT2RI3001515 (300362), NT2RI3006171 (114890), NT2RI3006340 (602187), NT2RI3006673 (602187), NT2RI3007757 (605396), NT2RI3008652 (602654), NT2RP7000359 (603271), NT2RP7005118 (603379), NT2RP7005529 (600888), NT2RP7010599 (603684), NTONG2000413 (602262), OCBBF2006058 (604773), OCBBF2020801 (602187), OCBBF2021788 (602597), OCBBF2031167 (603709), OCBBF2033869 (600270), OCBBF2036743 (604075), OCBBF2037068 (602187), OCBBF2037340 (602187), OCBBF3003320 (605868), PEBLM2000170 (602187), PEBLM2002887 (602187), PERIC2003720 (600381), PERIC2007914 (400009), PERIC2008385 (604455), PERIC2009086 (600134; 605158), PLACE5000282 (130160), PLACE6019385 (602448), PROST1000184 (192321), PROST2003428 (602187), PROST2016462 (602187), PROST2017367 (600585), PROST2018090 (312610), PROST2018511 (602187), PUAEN2002489 (604658), PUAEN2009795 (601456), SKNMC2007504 (602187), SMINT2010076 (146900), SPLEN2002467 (605652), SPLEN2006122 (604739), SPLEN2011422 (114213), SPLEN2012624 (602187), SPLEN2021701 (142800), SPLEN2031547 (602187), SPLEN2033098 (602746), SPLEN2036326 (602101), SPLEN2036821 (212138), SPLEN2036932 (605577), SYNOV2005817 (123889), SYNOV2012326 (604336), SYNOV2014400 (135820), SYNOV2021320 (602104), SYNOV3000231 (147100), SYNOV3000302 (147100), SYNOV4002883 (602187), SYNOV4004741 (602187), SYNOV4007360 (602187), SYNOV4007521 (605830), SYNOV4007553 (603028), SYNOV4007671 (602187), SYNOV4008440 (602187), TBAES2001229 (602187), TBAES2001258 (142440), TESOP2004114 (601865), TESOP2005485 (147170), TESOP2009121 (117143), TESTI1000257 (138170), TESTI1000319 (602187), TESTI2000644 (601392), TESTI2002618 (601533), TESTI2005610 (601040), TESTI2024567 (601116), TESTI2026505 (305400), TESTI2050987 (605968), TESTI2051867 (180479), TESTI2053399 (605819), TESTI2053621 (600364; 602093), TESTI4000014 (602187), TESTI4000079 (603560), TESTI4000288 (602187), TESTI4000349 (604506), TESTI4000724 (603878), TESTI4001148 (602187), TESTI4001176 (601430), TESTI4001527 (602187), TESTI4001561 (602187), TESTI4002491 (602187), TESTI4006420 (605612), TESTI4006819 (602187), TESTI4007163 (602187), TESTI4007778 (602187), TESTI4007810 (600940), TESTI4008050 (602187), TESTI4008429 (602187), TESTI4009160 (602187), TESTI4009457 (606185), TESTI4009881 (602187), TESTI4010851 (602187), TESTI4011745 (602187), TESTI4011956 (602187), TESTI4012406 (602187), TESTI4012448 (185261), TESTI4012505 (602143), TESTI4012679 (601933), TESTI4013369 (602187), TESTI4013924 (602187), TESTI4014175 (602187), TESTI4016110 (602187), TESTI4016822 (601792), TESTI4016925 (602187), TESTI4017901 (104221), TESTI4018835 (602187), TESTI4018881 (605070), TESTI4018886 (602187), TESTI4020092 (156225), TESTI4021478 (605868), TESTI4022873 (602187), TESTI4023546 (602187), TESTI4026524 (603277), TESTI4027557 (602187), TESTI4028059 (232800; 171850), TESTI4028429 (602187), TESTI4028880 (138170), TESTI4030069 (604603), TESTI4034632 (606251), TESTI4034912 (602187), TESTI4035063 (602187), TESTI4035498 (602187), TESTI4036909 (602187), TESTI4037156 (606026), TESTI4040363 (185641), THYMU1000496 (603060), THYMU2005303 (186910), THYMU2008725 (176882), THYMU2019210 (142830), THYMU2027497 (182139), THYMU2027695 (147100), THYMU2027734 (145505), THYMU2031046 (604207), THYMU2033104 (605349), THYMU2035319 (604739), THYMU2037233 (605121), THYMU2041015 (602187), THYMU3001083 (602187), THYMU3001234 (602187), THYMU3001379 (602187), THYMU3003309 (300359), THYMU3004835 (602187), THYMU3006118 (603708), THYMU3007137 (602187), THYMU3008436 (602187), TKIDN2000701 (600465), TKIDN2006852 (603602), TLIVE2001327 (601403), TRACH2001549 (603197), TRACH2007059 (602187), TRACH2022425 (146900), TRACH2022649 (147100), TRACH3000558 (600140), TRACH3002168 (155735), TRACH3004721 (602187), TRACH3004786 (602187), TRACH3005549 (602187), TRACH3007479 (602308), TRACH3008629 (600976), TRACH3009455 (171833), TRACH3035526 (147000), TSTOM2000442 (147100), TUTER2000904 (602187), UTERU1000337 (602187), UTERU2005621 (603505), UTERU2007724 (602373), UTERU2017762 (601053), UTERU2019491 (603762), UTERU2019706 (600114), UTERU2025025 (191315; 164970; 256000), UTERU2026090 (605497), UTERU2027591 (600150), UTERU2035328 (605409), UTERU3000645 (602909), UTERU3000828 (602187), UTERU3000899 (603062), UTERU3001240 (602187), UTERU3001572 (602187), UTERU3001585 (602187), UTERU3001652 (602715), UTERU3003116 (602187), UTERU3003135 (602187), UTERU3005907 (190196), UTERU3007640 (603215), UTERU3008671 (182120), UTERU3009490 (604585), UTERU3009690 (104221), UTERU3009979 (600441), UTERU3015500 (606667), UTERU3016789 (602104)

[0133] Additionally, hit data of the following 84 clones for Swiss-Prot, nr or RefSeq corresponded to genes or proteins which had been deposited in the Online Mendelian Inheritance in Man (OMIM), which is the human gene and disease database (the OMIM Number is shown in the parenthesis after the Clone Name).

[0134] BRACE3001113 (603971), BRACE3010076 (142695), BRAMY2039341 (604077), BRAMY3004800 (602187), BRAWH3009017 (602187), BRCAN2002473 (602187), BRCAN2002854 (602895), BRCAN2003070 (605574), BRHIP2005271 (600267), BRHIP2017553 (602187), BRHIP2026877 (600341), BRHIP3000240 (601142), BRHIP3008314 (604480), BRHIP3026052 (601645), BRSTN2013354 (602187), BRTHA2016318 (605442), BRTHA2017972 (602932), BRTHA3003000 (605276), CERVX2002013 (602903), CTONG1000113 (602277), CTONG2008721 (605317), CTONG2020411 (601930), CTONG3004550 (605611), FCBBF1000509 (601933), FEBRA2008692 (604034), HCASM2008536 (194360), HCHON2004858 (602187), HEART2009680 (601970), HLUNG2015548 (146690), HSYRA2005628 (602187), IMR322008651 (179617), IMR322013396 (600053), MESAN2001770 (600495), NT2RI2009583 (605949), NT2RI3007443 (602448), OCBBF2003327 (605008), OCBBF2009583 (602277), OCBBF2011669 (602187), OCBBF2024284 (176981), OCBBF2032274 (603975), OCBBF3000167 (194558), OCBBF3002654 (601893), PLACE7000502 (164951), PROST2000452 (602060), PROST2009320 (605903), SPLEN2004611 (602228), STOMA2003158 (602244), SYNOV1000256 (606021), SYNOV4002744 (602187), SYNOV4003981 (604283), TBAES2000932 (606212), TESOP2000390 (602187), TESOP2001796 (602187), TESOP2005199 (194531), TESTI2015626 (601249), TESTI2025924 (600863), TESTI2026647 (601235), TESTI2039060 (154360), TESTI4000183 (601276), TESTI4006473 (602187), TESTI4011070 (602187), TESTI4017714 (602187), TESTI4019657 (602052), TESTI4021482 (164730), TESTI4024387 (602187), TESTI4025494 (602187), TESTI4025547 (605308), TESTI4028938 (603899), TESTI4031745 (602448), TESTI4032112 (603246), THYMU2004284 (314370), THYMU2028739 (604191), THYMU2031139 (605009), THYMU2031249 (311550), THYMU2035710 (601890), THYMU3000269 (600857), TLIVE2001684 (120700), TLIVE2002046 (125270), TRACH2024408 (106410), TRACH3003683 (150205), UTERU2021820 (126141), UTERU2032279 (600942), UTERU2033577 (603397), UTERU3000738 (602187)

[0135] The clones predicted to belong to the category of enzyme and/or metabolism-related protein are the following 171 clones.

[0136] 3NB692002806, ASTRO2002842, BLADE2005036, BRACE2008594, BRACE2030341, BRACE2035381, BRACE2038551, BRACE2039249, BRACE2041200, BRACE2045772, BRACE3004058, BRACE3009708, BRACE3011421, BRACE3016884, BRACE3024073, BRACE3025630, BRAMY2033267, BRAMY2039872, BRAMY3002803, BRAMY3004919, BRAMY3005091, BRAMY3005932, BRAMY4000095, BRAWH3002574, BRAWH3008341, BRCAN2003703, BRCAN2003746, BRCAN2009432, BRCAN2014602, BRCAN2017442, BRCAN2028355, BRCOC2003213, BRHIP2024165, BRHIP3008405, BRHIP3027137, BRHIP3027854, BRSTN2000872, BRSTN2004863, BRSTN2004987, BRSTN2008418, BRTHA2002608, BRTHA2009311, BRTHA2015406, BRTHA2016496, BRTHA3008778, BRTHA3009090, BRTHA3015815, BRTHA3016917, CTONG2004062, CTONG2006798, CTONG2013178, CTONG2028124, CTONG3009028, D3OST2002182, DFNES2001108, DFNES2005266, FCBBF3013307, FCBBF3023895, FEBRA2008468, FEBRA2026984, HCASM2001301, HCHON2002676, HCHON2003532, HCHON2004007, HEART2006131, HEART2010492, HHDPC1000118, HLUNG2011298, HLUNG2013204, HSYRA2008714, KIDNE2001361, KIDNE2006580, NT2NE2003252, NT2NE2006909, NT2RI2004618, NT2RI2025909, NT2RI3006673, NT2RI3007978, NT2RI3008974, NT2RP7000359, NT2RP7004027, NT2RP7010599, NT2RP7014005, NTONG2000413, NTONG2008672, OCBBF2006005, OCBBF2006058, OCBBF2006151, OCBBF2019823, OCBBF2025527, OCBBF2030354, OCBBF2031167, OCBBF3003320, PEBLM2005183, PERIC2000889, PERIC2008385, PLACE6019385, PLACE7008431, PROST2017367, PUAEN2007044, PUAEN2009655, PUAEN2009852, SKNMC2006998, SKNMC2007504, SMINT1000192, SPLEN2010912, SYNOV2012326, SYNOV4002883, TBAES2001258, TESOP2000801, TESOP2004114, TESTI2005610, TESTI2005739, TESTI2016046, TESTI4000079, TESTI4000209, TESTI4000288, TESTI4000349, TESTI4001176, TESTI4001527, TESTI4001561, TESTI4002552, TESTI4006148, TESTI4006819, TESTI4007810, TESTI4008429, TESTI4010851, TESTI4012406, TESTI4012448, TESTI4013369, TESTI4013817, TESTI4014175, TESTI4016822, TESTI4018152, TESTI4018835, TESTI4019566, TESTI4021478, TESTI4022716, TESTI4023546, TESTI4026510, TESTI4026524, TESTI4028059, TESTI4029836, TESTI4034632, TESTI4036909, TESTI4046819, THYMU2008725, THYMU2027734, THYMU2031046, THYMU2031258, THYMU3001234, THYMU3003212, THYMU3004157, THYMU3004835, THYMU3006118, THYMU3008436, TKIDN2006852, TLIVE2002336, TRACH2001549, TRACH2009310, TRACH3007479, TRACH3036193, UTERU1000337, UTERU2019491, UTERU2025025, UTERU2026203, UTERU3000665, UTERU3001240, UTERU3001585, UTERU3003116, UTERU3005907

[0137] The following 59 clones are also predicted to belong to the category of enzyme and/or metabolism-related protein.

[0138] BRACE2039823, BRACE3010076, BRAMY2038516, BRAWH1000369, BRCAN2003070, BRHIP2005271, BRHIP2012360, BRHIP2026877, BRHIP3008314, BRTHA2013610, BRTHA2017364, BRTHA2017972, BRTHA2018011, BRTHA2018443, BRTHA3003000, CTONG2016942, FCBBF1000509, FEBRA2008692, HCASM2003099, HLUNG2015548, MESAN2005303, NT2RI3000174, NT2RI3007443, NT2RP7008435, NTONG2008093, OCBBF2003327, OCBBF2034637, OCBBF3002654, PROST2000452, SPLEN2039311, SPLEN2039379, STOMA2003158, TESOP2000390, TESTI2015626, TESTI2025924, TESTI2026647, TESTI2032643, TESTI2036288, TESTI2039060, TESTI4006473, TESTI4011070, TESTI4014801, TESTI4017714, TESTI4019657, TESTI4021482, TESTI4031745, THYMU2004139, THYMU2004284, THYMU2031139, THYMU2031249, THYMU2040925, THYMU3000269, TLIVE2002046, TLIVE2007607, TRACH2024559, TRACH3003683, TRACH3007866, UTERU2021820, UTERU3000738

[0139] The clones predicted to belong to the category of cell division and/or cell proliferation-related protein are the following 42 clones.

[0140] BLADE2002782, BRACE2042550, BRACE2043248, BRACE3000840, BRALZ2017359, BRAMY2038484, BRAMY2046989, BRAWH2010536, BRAWH2014954, BRAWH3000100, BRHIP2000819, BRHIP2001927, BRHIP2009414, BRSSN2000684, CTONG3002412, CTONG3008258, CTONG3008639, FCBBF3002163, HCASM2001301, IMR322006495, NT2RI2006686, OCBBF2021020, OCBBF2037068, OCBBF3004314, PLACE5000282, PLACE6019385, PLACE7002641, PUAEN2006328, SPLEN2033098, TESOP2009121, TESTI1000545, TESTI2003573, TESTI2005610, TESTI4007810, TESTI4017901, THYMU2034374, THYMU2039315, TLIVE2001327, TRACH2025507, UTERU2005621, UTERU3009690, UTERU3009979

[0141] The following ten clones are also predicted to belong to the category of cell division and/or cell proliferation-related protein.

BRCAN2003070, BRTHA3003000, NT2RI3007443, PLACE7000502, SPLEN2004611, STOMA2003158, SYNOV4003981, TESTI4031745, THYMU2004139, THYMU2035078

[0142] The clones predicted to belong to the category of cytoskeleton-related protein are the following 55 clones.

[0143] ASTRO1000009, BLADE2004089, BRACE2026836, BRACE2045300, BRACE3006872, BRAMY3008466, BRAWH2001395, BRAWH2005315, BRAWH3002600, BRCOC2001505, BRHIP2000819, BRHIP3000339, BRHIP3008405, BRTHA2007122, BRTHA3003449, COLON2002520, CORDB2000541, FCBBF3021940, HCHON2001577, HEART1000139, HEART2010495, NT2RI3006340, NT2RP7000359, NTONG2005277, OCBBF2007068, OCBBF3003592, PERIC2000889, PLACE5000282, PROST1000559, SKMUS2006394, SPLEN2011422, SPLEN2015679, TESTI2049857, TESTI4000288, TESTI4001148, TESTI4007778, TESTI4009160, TESTI4009881, TESTI4011956, TESTI4013924, TESTI4016925, TESTI4018886, TESTI4022873, TESTI4034912, TESTI4035063, TESTI4037727, THYMU1000496, THYMU2035735, THYMU3001083, THYMU3001234, TKIDN2000701, UTERU2007724, UTERU2008347, UTERU2035745, UTERU3003178

[0144] The following six clones are also predicted to belong to the category of cytoskeleton-related protein.

HLUNG2015418, SPLEN2030847, SPLEN2036702, TESTI4025268, TESTI4026207, TRACH2024408

[0145] The clones predicted to belong to the category of nuclear protein and/or RNA synthesis-related protein are the following 42 clones.

[0146] BLADE2007958, BRACE2010489, BRACE2045300, BRACE3004150, BRACE3005430, BRACE3011421, BRAMY2046989, BRAMY3005932, BRCAN2002562, BRHIP2021615, BRSTN2001613, BRSTN2004987, COLON2000470, CTONG3009028, FCBBF3013307, HCHON2004531, IMR322006495, OCBBF2020801, PEBLM2005183, PUAEN2007044, SKNMC1000124, SMINT1000192, SPLEN2006122, SPLEN2010912, TESOP2009121, TESTI4009374, TESTI4009457, TESTI4013830, TESTI4019566, TESTI4022716, THYMU2033104, THYMU2035319, THYMU2038301, THYMU2040975, THYMU3001379, TRACH3004721, TRACH3036609, UTERU2026025, UTERU3000828, UTERU3001572, UTERU3003135, UTERU3004992

[0147] The following 16 clones are also predicted to belong to the category of nuclear protein and/or RNA synthesis-related protein.

BRACE3010076, BRCAN2002854, BRHIP2006617, BRHIP2012360, BRHIP3026052, BRSTN2013354, BRTHA2017364, HCASM2003099, HCASM2008536, IMR322008651, NT2RI3000174, STOMA2003158, TESTI2026647, TESTI4006473, TESTI4021482, THYMU2035078

[0148] The clones predicted to belong to the category of protein synthesis and/or transport-related protein are the following 57 clones.

[0149] ASTRO2002842, BLADE2005036, BRACE3025630, BRAMY2033003, BRAMY3007609, BRAWH3000491, BRAWH3002574, BRAWH3008341, BRCAN2002856, BRCAN2002948, BRCOC2003213, BRSTN2004987, BRTHA2016496, BRTHA3013884, BRTHA3016917, CTONG2000042, CTONG2013178, CTONG2023512, CTONG2024749, CTONG2025496, CTONG3001370, DFNES2005266, FEBRA2026984, HCASM2007737, HCHON2008444, HEART1000010, KIDNE2000846, NT2NE2006909, NT2RI2011422, NT2RP7004027, NTONG2000413, OCBBF2031167, TBAES2001229, TBAES2001258, TESTI1000319, TESTI2005610, TESTI2051867, TESTI4000209, TESTI4000349, TESTI4001106, TESTI4002491, TESTI4008050, TESTI4010851, TESTI4012406, TESTI4012448, TESTI4013924, TESTI4028429, TESTI4034912, THYMU2009157, TLIVE2008229, TRACH3007479, TRACH3008713, TRACH3036193, UTERU2019940, UTERU3001988, UTERU3003116, UTERU3007419

[0150] The following 15 clones are also predicted to belong to the category of protein synthesis and/or transport-related protein.

BRTHA2007060, BRTHA2018011, CTONG2016942, MESAN2001770, MESAN2005303, NT2RP7008435, OCBBF2003327, PROST2000452, TESOP2001796, TESTI4017714, THYMU2004284, THYMU2031139, TRACH2024559, TRACH3007866, UTERU2021820

[0151] The clones predicted to belong to the category of cellular defense-related protein are the following three clones.

BRACE3005430, HCHON2004531, TESTI4007810

[0152] The following four clones are also predicted to belong to the category of cellular defense-related protein.

BRHIP2012360, FCBBF3027854, HCASM2008536, UTERU2032279

[0153] The clones predicted to belong to the category of development and/or differentiation-related protein are the following nine clones.

BRACE3009747, BRTHA2005579, BRTHA3003343, IMR322000917, PEBLM2000170, TESOP2001122, TESOP2001953, TESTI2040018, UTERU3006308

[0154] The following five clones are also predicted to belong to the category of development and/or differentiation-related protein.

BRALZ2017844, CTONG2020378, HCHON2004858, OCBBF2019684, THYMU2006001

[0155] The clones predicted to belong to the category of DNA-binding and/or RNA-binding protein are the following 55 clones.

[0156] 3NB692002685, BLADE2007958, BRACE2030326, BRACE2045596, BRACE3001002, BRACE3004150, BRACE3009747, BRACE3045033, BRCAN2002562, BRHIP2021615, BRSSN2014299, BRSTN2001613, BRSTN2004987, BRTHA2014792, BRTHA3001721, BRTHA3003343, CTONG2025516, CTONG3008831, CTONG3009028, FCBBF3013307, FEBRA2007544, FEBRA2007801, HEART1000074, IMR322000127, IMR322000917, NT2NE2006531, NT2RI3009158, OCBBF2020838, OCBBF2036743, PEBLM2002887, PEBLM2005183, SKNMC2007504, SMINT1000192, SPLEN2006122, TBAES2001229, TESTI2014716, TESTI2040018, TESTI2044796, TESTI4009374, TESTI4012679, TESTI4014175, TESTI4017543, TESTI4026510, TESTI4026524, THYMU2006420, THYMU2035319, THYMU2037233, THYMU2040975, THYMU3004866, TLIVE2008229, TRACH3036609, TUTER2000425, UTERU2026025, UTERU2035328, UTERU3009490

[0157] The following 74 clones are also predicted to belong to the category of DNA-binding and/or RNA-binding protein.

[0158] BRACE2003609, BRACE3001058, BRACE3001113, BRACE3010076, BRALZ2017844, BRAMY2035070, BRAMY2035449, BRAMY2035718, BRAMY2039341, BRAWH1000369, BRAWH2006207, BRCAN2002854, BRHIP2012360, BRHIP2017553, BRSTN2013354, BRTHA2017364, CERVX2002013, CTONG1000113, CTONG2008721, CTONG2020378, CTONG2020411, CTONG2028758, CTONG3004726, DFNES2011192, FEBRA2014122, FEBRA2027609, HCASM2003018, HCASM2009424, HCHON2004858, HSYRA2005628, IMR322008651, MESAN2001770, MESAN2005303, MESAN2014412, MESAN2015501, NT2RI2008952, NT2RI2018448, NT2RI3000174, NT2RI3001132, OCBBF2008144, OCBBF2009583, OCBBF2011669, OCBBF2019684, OCBBF2032274, OCBBF3000167, SPLEN2004611, SPLEN2016135, SPLEN2016781, SYNOV2021953, SYNOV4002744, TESOP2005199, TESOP2006398, TESOP2006865, TESTI2026647, TESTI2034251, TESTI4000183, TESTI4000214, TESTI4006473, TESTI4008302, TESTI4015442, TESTI4025494, TESTI4025547, TESTI4028938, TESTI4032112, THYMU2006001, THYMU2035078, TRACH2007483, TRACH3000134, TRACH3002561, TRACH3003832, TUTER2000057, UTERU2033577, UTERU3001053, TESTI4038779

[0159] The clones predicted to belong to the category of ATP binding and/or GTP-binding protein are the following 68 clones.

[0160] BNGH42007788, BRACE2008594, BRACE2047377, BRACE3005430, BRACE3008720, BRACE3009708, BRACE3015521, BRACE3024073, BRAMY4000095, BRCAN2009432, BRCOC2003213, BRHIP3008405, BRSTN2013741, BRTHA3003449, BRTHA3015815, BRTHA3016917, COLON2002520, FEBRA2026984, HCASM2001301, HCHON2004007, HSYRA2008714, KIDNE2001361, KIDNE2001847, NESOP2001694, NT2RI2005166, NT2RP7013795, OCBBF3003320, OCBBF3003592, PEBLM2002594, PERIC2000889, PLACE6019385, SMINT1000192, SPLEN2037194, TESOP2000801, TESTI2006648, TESTI4000288, TESTI4001148, TESTI4001176, TESTI4002552, TESTI4007810, TESTI4008429, TESTI4009160, TESTI4009881, TESTI4011956, TESTI4013817, TESTI4014175, TESTI4016925, TESTI4018208, TESTI4018835, TESTI4019566, TESTI4021478, TESTI4022873, TESTI4026524, TESTI4029836, TESTI4035498, TESTI4036909, TESTI4037727, THYMU1000496, THYMU2033079, THYMU3001083, THYMU3001234, THYMU3001379, TRACH2009310, UTERU2019706, UTERU2025025, UTERU2035745, UTERU3000665, UTERU3000828

[0161] The following 24 clones are also predicted to belong to the category of ATP binding and/or GTP-binding protein.

[0162] BRHIP2026877, BRTHA2017364, BRTHA2018443, IMR322008651, IMR322013731, NT2RI3007443, NTONG2008093, OCBBF3002654, TESOP2000390, TESOP2007384, TESTI2025924, TESTI2026647, TESTI2049956, TESTI4005317, TESTI4006473, TESTI4021482, TESTI4026207, TESTI4031745, THYMU2004139, THYMU2031249, TRACH2000862, TRACH2024559, TRACH3000420, UTERU3000738

[0163] The 119 clones shown below are clones which were unassignable to any of the above-mentioned categories, but have been predicted to have some function based on homology search using their full-length nucleotide sequences. Clone Name and Definition in the result of homology search, demarcated by a double slash mark (//), are shown below.

ADRGL2009691//Mus musculus D11lgp1 mRNA, complete cds.

ADRGL2009755//Homo sapiens brain and reproductive organ-expressed protein (BRE) mRNA, complete cds.

ASTRO3000177//Drosophila melanogaster BcDNA.GH03694 (BcDNA.GH03694) mRNA, complete cds.

BLADE2008398//Homo sapiens LRR FLI-I interacting protein 2 (LRRFIP2) mRNA, complete cds.

BRACE2006319//Homo sapiens mRNA for Fln29, complete cds.

BRACE2027258//Homo sapiens E2a-Pbx1-associated protein (EB-1) mRNA, partial cds.

BRACE2038329//Rattus norvegicus CBL-B (Cbl-b) mRNA, partial cds.

BRACE2046251//Homo sapiens hucep-10 mRNA for cerebral protein-10, complete cds.

BRACE3003192//latent transforming growth factor beta binding protein 3 [Homo sapiens]

BRACE3007625//espin [Rattus norvegicus]

BRACE3009297//mdgl-1 [Mus musculus]

BRACE3015262//espin [Mus musculus]

BRACE3025457//testis-specific protein TSP-NY [Homo sapiens]

BRALZ2016498//Homo sapiens FKSG76 (FKSG76) mRNA, complete cds.

BRAMY2030109//Homo sapiens hucep-4 mRNA for cerebral protein-4, complete cds.

BRAMY2031317//Mus musculus semaphorin cytoplasmic domain-associated protein 3A (Semcap3) mRNA, complete cds.

BRAMY2047746//nasopharyngeal carcinoma susceptibility protein [Homo sapiens]

BRAMY3001794//Rattus norvegicus Circadian Oscillatory Protein (SCOP) (Scop)

BRAWH2001940//H. sapiens gene from PAC 1026E2, partial.

BRAWH2012162//KE03 protein [Homo sapiens]

BRAWH2016724//MAP2=HMW-MAP2 {alternatively spliced} [rats, brain, mRNA Partial, 267 nt].

BRAWH3002821//synaptotagmin-like 2 [Mus musculus]

BRCAN2002944//Mus musculus huntington yeast partner C (Hypc) mRNA, complete cds.

BRCAN2013660//Arabidopsis thaliana putative protein (F4F15.330) mRNA, complete cds.

BRHIP2002122//Homo sapiens B aggressive lymphoma long isoform (BAL) mRNA, complete cds.

BRHIP2003786//CCA3 [Rattus norvegicus]

BRHIP2004359//ELAC PROTEIN.

BRHIP2007616//plexin 2

BRHIP2029393//COBW-like protein [Homo sapiens]

BRHIP3008313//testis specific ankyrin-like protein 1 [Homo sapiens]

BRSSN2013874//TEMO [Rattus norvegicus]

BRSTN2017771//Homo sapiens putative BTK-binding protein mRNA, complete cds.

BRTHA2012392//Homo sapiens HCDI (HCDI) mRNA, complete cds.

BRTHA3002933//uroplakin 3 [Homo sapiens]

BRTHA3008310//Mus musculus mRNA for iroquois homeobox protein 6 (Irx6 gene).

BRTHA3008520//sporulation-induced transcript 4-associated protein; hypothetical protein FLJ11058 [Homo sapiens]

COLON2001721//GLUT4 vesicle protein [Mus musculus]

CTONG1000467//Mus musculus mRNA for Deltex3, complete cds.

CTONG2020026//Drosophila melanogaster BcDNA.GH09358 (BcDNA.GH09358) mRNA, complete cds.

CTONG3001123//Mus musculus Pax transcription activation domain interacting protein PTIP mRNA, complete cds.

CTONG3002127//granuphilin [Mus musculus]

CTONG3004072//GL002 protein [Homo sapiens]

CTONG3006186//syntaxin binding protein 4 [Mus musculus]

CTONG3008894//Mus musculus SH3-domain binding protein 5

FCBBF1000297//Human protein immuno-reactive with anti-PTH polyclonal antibodies mRNA, partial cds.

HCHON2000028//Homo sapiens 7h3 protein mRNA, partial cds.

HCHON2000626//X-linked protein STS1769.

HCHON2001217//Homo sapiens cullin CUL4B (CUL4B) mRNA, complete cds.

HEART2006909//Hemolysin C.

HLUNG2011041//basic proline-rich peptide IB-8a—human (fragments)

HLUNG2014288//Mus musculus RP42 mRNA, complete cds.

IMR322006886//Homo sapiens hepatocellular carcinoma-associated antigen 127 (HCA127) mRNA, complete cds.

KIDNE2002252//Drosophila melanogaster BcDNA.GH09358 (BcDNA.GH09358) mRNA, complete cds.

KIDNE2011532//similar to melanoma-associated chondroitin sulfate proteoglycan 4

NT2RI2012990//76.5 KDA PROTEIN C21ORF13.

NT2RI2025957//LU1 protein [Homo sapiens]

NT2RI3006284//Homo sapiens chorea-acanthocytosis (CHAC) mRNA, complete cds.

NT2RI3008697//erythroblast macrophage protein [Mus musculus]

NT2RP8000296//similar to Kelch proteins

NTONG2007517//RING CANAL PROTEIN (KELCH PROTEIN).

OCBBF2002124//p40 [Homo sapiens]

OCBBF2007610//PSD-95/SAP90-associated protein-4 [Rattus norvegicus].

OCBBF2021323//Mus musculus GTRGEO22 (Gtrgeo22) mRNA, complete cds.

OCBBF2028173//JM11 protein [Homo sapiens]

PEBLM2001465//diphthamide biosynthesis; Dph5p [Saccharomyces cerevisiae]

PERIC2004028//Mus musculus erythroblast macrophage protein EMP mRNA, complete cds.

PLACE7006051//cytoplasmic dynein heavy chain 2 [Rattus norvegicus]

PROST2008993//Mus musculus Pax transcription activation domain interacting protein PTIP mRNA, complete cds.

PUAEN2003079//nasopharyngeal carcinoma susceptibility protein [Homo sapiens]

SPLEN2002147//Halocynthia roretzi mRNA for HrPET-3, complete cds.

SPLEN2032154//NDRG1 PROTEIN (DIFFERENTIATION-RELATED GENE 1 PROTEIN) (DRG1) (REDUCING AGENTS AND TUNICAMYCIN-RESPONSIVE PROTEIN) (RTP) (NICKEL-SPECIFIC INDUCTION PROTEIN CAP43).

SYNOV2005216//Homo sapiens laryngeal carcinoma related protein 1 mRNA, complete cds.

SYNOV2007965//Homo sapiens mRNA for H-1(3)mbt-like protein, alternative variant a.

SYNOV4000706//B cell phosphoinositide 3-kinase adaptor [Mus musculus]

TBAES2004055//NY-REN-50 antigen

TESOP2001605//Homo sapiens laryngeal carcinoma related protein 1 mRNA, complete cds.

TESOP2005285//Homo sapiens partial mRNA for chr2 synaptotagmin (CHR2SYT gene).

TESTI2004215//Maackia amurensis early nodulin (ENOD2) mRNA, partial cds.

TESTI2009477//TRICHOHYALIN.

TESTI2034520//Rattus norvegicus SMC (segregation of mitotic chromosomes 1)-like 1 (yeast) (Smc1l1), mRNA

TESTI2052693//brk kinase substrate [Homo sapiens].

TESTI4006079//MUF1 protein; likely ortholog of mouse MUF1; elongin BC-interacting leucine-rich repeat protein [Homo sapiens]

TESTI4006393//neural specific sr protein NSSR 2 [Mus musculus]

TESTI4006546//colon cancer antigen NY-CO-45 [Homo sapiens].

TESTI4006802//mesothelin; megakaryocyte potentiating factor [Mus musculus]

TESTI4008018//DAZ associated protein 2; KIAA0058 gene product [Homo sapiens]

TESTI4009286//Homo sapiens HOTTL protein mRNA, complete cds

TESTI4009563//testis specific ankyrin-like protein 1 [Homo sapiens]

TESTI4010831//yeast Sec31p homolog; ABP125 [Homo sapiens]

TESTI4011484//Sec23-interacting protein p125 [Homo sapiens]

TESTI4014818//AD-012 protein [Homo sapiens]

TESTI4014924//selective hybridizing clone [Mus musculus]

TESTI4019140//Mi-2 histone deacetylase complex protein 66 [Xenopus laevis]

TESTI4019843//Rattus norvegicus huntingtin-associated protein interacting protein (duo) (Hapip), mRNA.

TESTI4023762//Trichohyalin.

TESTI4025920//B29 protein [Homo sapiens]

TESTI4039659//DnaJ homolog subfamily B member 8 (mDJ6).

TESTI4044186//leucine-rich, glioma inactivated 1 [Mus musculus]

THYMU2011736//latent transforming growth factor beta binding protein 3

THYMU2032825//Mus musculus mRNA for Drctnnb1a, complete cds.

THYMU2038369//Mus musculus GTRGEO22 (Gtrgeo22) mRNA, complete cds.

THYMU3001991//ART-4 protein [Homo sapiens]

THYMU3006172//membrane bound C2 domain containing protein [Rattus norvegicus]

TLIVE2003225//CUB and Sushi multiple domains 1 [Homo sapiens]

TLIVE2004320//Homo sapiens PC2-glutamine-rich-associated protein (PCQAP) mRNA, complete cds.

TOVAR2002247//Homo sapiens partial partial mRNA for NICE-4 protein, clone 3114f17.

TRACH2023299//growth factor receptor bound protein 2-associated protein 2 [Mus musculus]

TRACH3000926//cardiac morphogenesis [Mus musculus]

TRACH3001427//p47 [Homo sapiens]

TRACH3006412//Homo sapiens COP9 constitutive photomorphogenic homolog subunit 7B

TRACH3034731//Ras association (RalGDS/AF-6) domain family 2

TUTER2002729//D6MM5E protein [Mus musculus]

UTERU1000031//G. gallus mRNA for tom-1B protein.

UTERU2006115//ALPHA-ADAPTIN A (CLATHRIN ASSEMBLY PROTEIN COMPLEX 2 ALPHA-A LARGE CHAIN) (100 KDA COATED VESICLE PROTEIN A) (PLASMA MEMBRANE ADAPTOR HA2/AP2 ADAPTIN ALPHA A SUBUNIT).

UTERU2031268//NY-REN-25 antigen [Homo sapiens].

UTERU2035452//NG3 [Homo sapiens]

UTERU3001059//ABC1 protein homolog, mitochondrial precursor.

UTERU3005585//rhophilin-like protein [Homo sapiens]

UTERU3009871//feminization 1 homolog a (C. elegans)

[0164] The 14 clones shown below are clones which were unassignable to any of the above-mentioned categories, but have been predicted to have some function based on homology search using their full-length nucleotide sequences. Clone Name and Definition in the result of homology search, demarcated by a double slash mark (//), are shown below.

ADRGL2000042//Homo sapiens CTCL tumor antigen se20-4 mRNA, complete cds.

BRACE3009127//oxysterol binding protein 2; oxysterol binding protein-like 1 [Homo sapiens]

BRACE3021148//DC12 protein [Homo sapiens]

BRAMY2040159//Homo sapiens MRIP-1 mRNA, complete cds.

BRAWH3007441//CAT56 protein [Homo sapiens]

CTONG3001501//Mus musculus glucocorticoid-induced gene 1 mRNA, complete cds.

HCHON2000508//Homo sapiens prostate antigen PARIS-1 mRNA, complete cds.

OCBBF2020048//95 kDa retinoblastoma protein binding protein; KIAA0661 gene product

PERIC2007068//Mus musculus mRNA for 1A13 protein.

TESTI4010382//cytoplasmic-dynein heavy chain 2 [Rattus norvegicus]

TESTI4011072//tudor domain containing 1 [Mus musculus]

TESTI4046240//sirtuin 7

UTERU2019534//Golgi apparatus protein 1 [Homo sapiens]

UTERU2028734//Mus musculus slp2-a mRNA for synaptotagmin-like protein 2-a delta 2S-III, complete cds.

[0165] Further, a polypeptide will not always belong solely to a single category of the above-described functional categories, and therefore, a polypeptide may belong to any of the predicted functional categories. Further analyses may yield additional functions for clones classified into these functional categories.

[0166] Detailed descriptions concerning each domain or motif can be found in websites linked from the websites of Pfam, InterPro (http://www.ebi.ac.uk/interpro/), PROSITE (http://www.expasy.ch/cgi-bin/prosite-list.pl), or such. This information can be found based on domain/motif names, and accession numbers of hit data obtained through domain searches of Pfam (http://www.sanger.ac.uk/Software/Pfam/index.shtml) (see Example 5) for amino acid sequences deduced from the 2,495 full-length clones of the present invention whose full-length nucleotide sequences have been determined. PROSITE in particular enables comparison of unique functional categories. The functions of polypeptides encoded by the 914 clones with hit data in Pfam were predicted and classified into the 13 functional categories described below. As a result, 661 clones were estimated to encode proteins belonging to these categories.

[0167] Secretory and/or membrane protein (87 clones)

[0168] Glycoprotein-related protein (85 clones)

[0169] Signal transduction-related protein (154 clones)

[0170] Transcription-related protein (115 clones)

[0171] Enzyme and/or metabolism-related protein (265 clones)

[0172] Cell division- and/or cell proliferation-related protein (13 clones)

[0173] Cytoskeleton-related protein (40 clones)

[0174] Nuclear protein and/or RNA synthesis-related protein (31 clones)

[0175] Protein synthesis- and/or transport-related protein (46 clones)

[0176] Cellular defense-related protein (seven clones)

[0177] Development and/or differentiation-related protein (two clones)

[0178] DNA- and/or RNA-binding protein (179 clones)

[0179] ATP- and/or GTP-binding protein (36 clones)

[0180] The clones predicted to belong to the category of secretory protein and/or membrane protein are the following 64 clones.

[0181] ASTRO2014923, ASTRO3000301, BRACE2005457, BRACE2014306, BRACE3001391, BRACE3014005, BRALZ2016085, BRAMY2040592, BRAWH2014662, BRHIP2004814, BRHIP3024118, BRTHA3002427, BRTHA3017848, BRTHA3018656, CTONG2009423, CTONG2013178, D3OST2002648, FEBRA2007708, FEBRA2008311, HCHON2001084, HCHON2001712, HCHON2004531, HCHON2005921, HSYRA2009102, KIDNE1000064, KIDNE2000832, NT2RI3006376, OCBBF2031167, OCBBF2035110, OCBBF2038317, PEBLM2002594, PERIC1000147, PERIC2009086, PROST1000184, SPLEN2012624, SPLEN2031547, SPLEN2033098, SPLEN2036326, TESTI1000257, TESTI1000390, TESTI2000644, TESTI2002036, TESTI2002928, TESTI2006648, TESTI2024567, TESTI2034520, TESTI4000014, TESTI4000724, TESTI4007163, TESTI4009881, TESTI4028880, THYMU2009425, THYMU2011548, THYMU2033079, THYMU2041015, TLIVE2000023, TLIVE2003381, TLIVE2007132, TRACH2006387, TRACH2007059, TRACH3004786, UTERU3000645, UTERU3004616, UTERU3006308

[0182] The following 23 clones are also predicted to belong to the category of secretory protein and/or membrane protein.

[0183] BRACE2029396, BRACE3005107, BRACE3010076, BRAMY2019111, BRAMY3004800, BRHIP3000017, FCBBF1000509, HCHON2000508, HEART2009680, IMR322013396, NT2RI2009583, NT2RI3000174, NT2RP8000521, OCBBF2030116, TESTI2029252, TESTI4013894, TESTI4032112, TESTI4041086, THYMU2035710, TKIDN2012771, TRACH3000420, UTERU2004299, TESTI4038779

[0184] The clones predicted to belong to the category of glycoprotein-related protein are the following 77 clones.

[0185] ADIPS2000088, BRACE2043142, BRACE2046295, BRACE3014005, BRAMY2005052, BRAMY4000277, BRAWH2007658, BRCAN2006063, BRSTN2004863, BRTHA3017589, BRTHA3017848, COLON2000568, COLON2004478, CTONG2000042, CTONG2013178, CTONG2024206, CTONG2024749, CTONG2025496, CTONG3001370, CTONG3003737, D3OST2002182, FEBRA2007708, HCHON2001084, HCHON2002676, HCHON2004531, HEART2001680, HLUNG2014262, LYMPB2000083, NESOP2001433, NOVAR2001108, NT2RI3006171, NT2RI3006340, NT2RI3007978, NT2RP7014005, OCBBF2010140, OCBBF2037598, PLACE5000171, PLACE6012574, PLACE7006051, PUAEN2009174, SMINT2002743, SMINT2010076, SMINT2011888, SMINT2015787, SPLEN2001599, SPLEN2015267, SPLEN2021701, SPLEN2037722, STOMA2004294, SYNOV3000231, SYNOV3000302, SYNOV4007521, SYNOV4007671, TBAES2003550, TESOP2005485, TESTI2005610, TESTI4006326, TESTI4021294, THYMU2005303, THYMU2019210, THYMU2023711, THYMU2027695, TRACH2007059, TRACH2022425, TRACH2022553, TRACH2022649, TRACH3002168, TRACH3005479, TRACH3005549, TRACH3006470, TRACH3035526, TRACH3036609, TSTOM2000442, UTERU2026090, UTERU3004616, UTERU3004992, UTERU3006308

[0186] The following eight clones are also predicted to belong to the category of glycoprotein-related protein.

BRAWH2006395, BRHIP3000017, NT2RI3007443, OCBBF3002654, TESTI2039060, TESTI4013894, TESTI4031745, TLIVE2001684

[0187] The clones predicted to belong to the category of signal transduction-related protein are the following 116 clones.

[0188] BLADE2007958, BNGH42007788, BRACE1000258, BRACE2008594, BRACE2041009, BRACE3001391, BRACE3006872, BRACE3011421, BRACE3024073, BRACE3027326, BRALZ2014484, BRAMY2001473, BRAMY2036567, BRAMY2042760, BRAMY2047751, BRAMY3001794, BRAMY3002803, BRAMY3005091, BRAMY3008466, BRAMY4000095, BRAWH3001326, BRAWH3002821, BRAWH3005912, BRCAN2002856, BRCAN2009432, BRCAN2016619, BRCAN2024451, BRCAN2028355, BRHIP2000819, BRHIP2005932, BRHIP3008405, BRHIP3025161, BRSSN2000684, BRSSN2004719, BRSTN2008418, BRSTN2013741, BRTHA3009037, BRTHA3013884, COLON2001721, CTONG2006798, CTONG3000084, CTONG3000657, CTONG3002127, D3OST3000169, DFNES2001108, DFNES2011499, FCBBF3007540, HCASM2001301, HCHON2000028, HCHON2006250, HHDPC1000118, HLUNG2001996, HLUNG2002465, KIDNE2001847, MESAN2006563, NHNPC2001816, NT2NE2003252, NT2RI2005166, NT2RI3000622, NT2RI3006673, NT2RP7005118, NT2RP7005529, NT2RP7009147, NT2RP7013795, NT2RP8000483, NTONG2003852, OCBBF2004826, OCBBF2004883, OCBBF2007028, OCBBF2008770, OCBBF2022351, OCBBF2037340, OCBBF2037547, PEBLM2004666, PLACE7008431, PROST2016462, PROST2018511, PUAEN2002616, PUAEN2005930, PUAEN2006328, PUAEN2009852, SYNOV2021320, TESOP2000801, TESOP2001166, TESTI2006648, TESTI2026505, TESTI2050137, TESTI2052693, TESTI4000079, TESTI4010713, TESTI4010831, TESTI4011956, TESTI4016882, TESTI4019843, TESTI4028059, THYMU2032014, THYMU2037226, THYMU2038615, THYMU3001234, THYMU3006172, THYMU3008436, TLIVE2009541, TRACH2009310, TRACH2021398, TRACH2023299, TRACH2025535, TRACH3009455, TRACH3034731, TSTOM2000553, UTERU1000337, UTERU2005621, UTERU2025025, UTERU2036089, UTERU2038251, UTERU3003523, UTERU3007419

[0189] The following 38 clones are also predicted to belong to the category of signal transduction-related protein.

[0190] BLADE2000579, BRACE3001058, BRACE3003053, BRACE3009127, BRAMY2040159, BRAMY3004800, BRAWH3009017, BRCAN2014229, BRHIP2026877, BRTHA2013610, CTONG3004550, FEBRA2001990, FEBRA2008692, HCHON2000508, MESAN2001770, NT2RI2005772, NT2RI3007443, NTONG2008093, OCBBF2005433, OCBBF2024284, OCBBF2034637, OCBBF3002654, TESOP2000390, TESTI2025924, TESTI2049956, TESTI4000319, TESTI4005317, TESTI4021482, TESTI4025268, TESTI4031745, THYMU2004139, THYMU2031249, TRACH2024408, UTERU2008040, UTERU2028734, UTERU3000402, UTERU3000738, UTERU3015412

[0191] The clones predicted to belong to the category of transcription-related protein are the following 27 clones.

[0192] BRACE2006319, BRACE3013576, BRAMY203010.9, BRAWH3005912, BRHIP3025161, CORDB1000140, CTONG1000467, HEART2001756, IMR322000127, IMR322000917, KIDNE1000064, NOVAR2000136, NT2NE2006531, NT2RI3007158, NT2RP7000466, OCBBF2036743, OCBBF3009279, PLACE6019385, TESTI2026505, TESTI2044796, TESTI2050987, TESTI4017001, TESTI4019140, TESTI4034912, THYMU2035735, TRACH2025749, TRACH3004840

[0193] The following 88 clones are also predicted to belong to the category of transcription-related protein.

[0194] BRACE2003609, BRACE3001058, BRACE3001113, BRACE3003026, BRAMY2035070, BRAMY2035449, BRAMY2035718, BRAMY2039341, BRAMY2045471, BRAWH3007441, BRHIP2017553, BRSTN2013354, CERVX2002013, CTONG1000113, CTONG2003348, CTONG2020374, CTONG2020378, CTONG2020411, CTONG2024031, CTONG2028758, CTONG3001501, CTONG3004726, DFNES2011192, FCBBF3027854, FEBRA2014122, FEBRA2027609, HCASM2003018, HCASM2003099, HCHON2000508, HCHON2000743, HCHON2004858, HSYRA2005628, MESAN2014412, MESAN2015501, NT2RI2008952, NT2RI2018448, NT2RI3000174, NT2RI3001132, NT2RI3002557, NT2RI3007167, NT2RI3007443, OCBBF2008144, OCBBF2009583, OCBBF2011669, OCBBF2019684, OCBBF2020048, OCBBF2024284, OCBBF2032274, OCBBF3000167, OCBBF3003761, SPLEN2016135, SPLEN2016781, SPLEN2036702, SYNOV2021953, SYNOV4002744, TESOP2001796, TESOP2005199, TESOP2006398, TESTI2008901, TESTI2034251, TESTI2037830, TESTI4000183, TESTI4000214, TESTI4006473, TESTI4008058, TESTI4008302, TESTI4013365, TESTI4014801, TESTI4015442, TESTI4017714, TESTI4025494, TESTI4025547, TESTI4028938, TESTI4029348, TESTI4031745, TESTI4032090, THYMU2006001, THYMU2028739, THYMU2031139, THYMU3001428, TRACH2007483, TRACH3000134, TRACH3003832, TRACH3007866, UTERU3001053, UTERU3014791, UTERU3017176, TESTI4038779

[0195] The clones predicted to belong to the category of enzyme and/or metabolism-related protein are the following 176 clones.

[0196] 3NB692002806, ASTRO1000009, BLADE2005036, BLADE2008539, BRACE2005457, BRACE2008594, BRACE2014475, BRACE2018762, BRACE2035381, BRACE2043142, BRACE2047011, BRACE3004058, BRACE3007625, BRACE3009708, BRACE3011421, BRACE3015262, BRACE3024073, BRACE3025630, BRACE3027478, BRAMY2047746, BRAMY2047751, BRAMY3002803, BRAMY3004919, BRAMY3005091, BRAMY4000095, BRAWH2010000, BRAWH2014414, BRAWH2014662, BRAWH2016702, BRAWH3002821, BRAWH3003727, BRCAN2021028, BRCAN2024451, BRCAN2028355, BRCOC2003213, BRHIP2004359, BRHIP2026288, BRHIP3008183, BRHIP3025161, BRHIP3027137, BRSSN2000684, BRSTN2000872, BRSTN2004863, BRSTN2004987, BRTHA2012980, BRTHA3002401, BRTHA3008778, BRTHA3009037, BRTHA3009090, BRTHA3015815, BRTHA3016917, BRTHA3017848, BRTHA3018656, COLON2001721, CTONG2004062, CTONG2006798, CTONG2013178, CTONG2028124, CTONG3002127, CTONG3005325, CTONG3005648, D3OST2002182, FCBBF3004502, FCBBF3013307, FEBRA2007708, FEBRA2008468, FEBRA2026984, HCASM2001301, HCASM2002918, HCHON2002676, HCHON2004007, HCHON2004531, HEART2006131, HHDPC1000118, HLUNG1000017, KIDNE2000832, KIDNE2006580, MESAN2012054, NOVAR2000136, NT2NE2003252, NT2NE2006909, NT2RI2004618, NT2RI3004510, NT2RI3006673, NT2RI3007978, NT2RI3008652, NT2RP7010599, NT2RP7014005, NT2RP7017474, NTONG2000413, OCBBF2004826, OCBBF2006058, OCBBF2019823, OCBBF2025527, OCBBF2031167, OCBBF2037340, OCBBF2037547, OCBBF2037638, PERIC2009086, PLACE7002641, PLACE7008431, PROST2017367, PUAEN2007044, PUAEN2009795, PUAEN2009852, SPLEN2010912, SPLEN2015679, SPLEN2030335, SYNOV4002392, SYNOV4002883, TBAES2003550, TESOP2000801, TESOP2004114, TESOP2009121, TESTI1000257, TESTI1000545, TESTI2002618, TESTI2006648, TESTI2040018, TESTI2049469, TESTI2053621, TESTI4000288, TESTI4000349, TESTI4001148, TESTI4001527, TESTI4001561, TESTI4002552, TESTI4006819, TESTI4007382, TESTI4007810, TESTI4008429, TESTI4010713, TESTI4010851, TESTI4012448, TESTI4012679, TESTI4013369, TESTI4016925, TESTI4018835, TESTI4020920, TESTI4021478, TESTI4022716, TESTI4026510, TESTI4028059, TESTI4029836, TESTI4032895, TESTI4034432, TESTI4036909, THYMU2006420, THYMU3000133, THYMU3001379, THYMU3004835, THYMU3006172, THYMU3008436, TLIVE2002336, TRACH2006387, TRACH2009310, TRACH2019473, TRACH2022425, TRACH2023299, TRACH3005479, TRACH3006470, TRACH3007479, TRACH3008093, TRACH3008629, TRACH3036193, TSTOM2000553, UTERU2005621, UTERU2017762, UTERU2025025, UTERU2033375, UTERU3000828, UTERU3001240, UTERU3001585, UTERU3003116, UTERU3005460, UTERU3005907

[0197] The following 89 clones are also predicted to belong to the category of enzyme and/or metabolism-related protein.

[0198] BLADE2000579, BRACE2039823, BRACE3003053, BRAMY2038516, BRAMY2040159, BRAWH1000369, BRCAN2003070, BRCAN2014229, BRCOC2019841, BRHIP2005724, BRHIP2008389, BRHIP2026877, BRHIP3000240, BRHIP3026052, BRTHA2002133, BRTHA2002702, BRTHA2007060, BRTHA2010033, BRTHA2013426, BRTHA2013610, BRTHA2017364, BRTHA2018011, BRTHA3000296, CTONG2004000, CTONG2016942, CTONG2020374, CTONG2024031, CTONG3002552, CTONG3003598, CTONG3004550, FCBBF1000509, FEBRA2008692, HCASM2002754, HCASM2003099, HCASM2003357, HLUNG2015418, HLUNG2015548, IMR322013731, MESAN2005303, NT2RI2005772, NT2RI2008952, NT2RI3000174, NT2RI3007443, NT2RP7008435, NTONG2008093, OCBBF2006987, OCBBF2034637, OCBBF3002654, PLACE7000333, PLACE7000502, PROST2000452, SPLEN2039311, STOMA2003158, SYNOV2013637, TESOP2000390, TESTI2015626, TESTI2025924, TESTI2026647, TESTI2035981, TESTI2036288, TESTI2039060, TESTI2049956, TESTI4000155, TESTI4001984, TESTI4006473, TESTI4010382, TESTI4011072, TESTI4014801, TESTI4017714, TESTI4021482, TESTI4025547, TESTI4025865, TESTI4026207, TESTI4028958, TESTI4029690, TESTI4031745, TESTI4032090, THYMU2004139, THYMU2031139, THYMU2031249, THYMU2040925, TKIDN2012771, TLIVE2002046, TLIVE2007607, TRACH3000420, TRACH3007866, UTERU2019534, UTERU2028734, UTERU3000738

[0199] The clones predicted to belong to the category of cell division and/or cell proliferation-related protein are the following ten clones.

BRAWH2001940, CTONG3001123, HCHON2001217, PROST2008993, TBAES2001171, TESTI4021294, TESTI4035498, UTERU1000024, UTERU3002993, UTERU3003523

[0200] The following three clones are also predicted to belong to the category of cell division and/or cell proliferation-related protein.

BRACE2029396, BRAWH2010552, TESTI4013365

[0201] The clones predicted to belong to the category of cytoskeleton-related protein are the following 36 clones.

[0202] BRACE2026836, BRACE2045300, BRAWH3000314, BRSTN2004863, BRTHA2004978, BRTHA3003449, BRTHA3005046, COLON2002520, CORDB2000541, CTONG3002674, FCBBF3012288, HCHON2001577, HLUNG2017350, HSYRA2005456, HSYRA2009075, NT2RI3006340, NT2RI3006673, NT2RI3007291, OCBBF2037598, PLACE5000282, TESTI2003347, TESTI2034767, TESTI4000288, TESTI4007778, TESTI4009160, TESTI4018886, TESTI4030603, TESTI4034632, TESTI4035063, THYMU1000496, THYMU2008725, TRACH2005811, TRACH2007059, UTERU2007724, UTERU2035745, UTERU3004616

[0203] The following four clones are also predicted to belong to the category of cytoskeleton-related protein.

NT2RI2005772, OCBBF2006987, SPLEN2030847, TESTI4026207

[0204] The clones predicted to belong to the category of nuclear protein and/or RNA synthesis-related protein are the following 20 clones.

[0205] BRACE3024073, BRAWH2001940, BRCOC2003213, BRSTN2004987, BRTHA3016917, CTONG3009028, FCBBF3013307, FEBRA2026984, SPLEN2010912, TBAES2001171, TESTI2040018, TESTI4019566, TESTI4022716, TESTI4026510, TESTI4036909, THYMU3000133, TRACH2023299, TRACH3036193, UTERU1000024, UTERU3002993

[0206] The following eleven clones are also predicted to belong to the category of nuclear protein and/or RNA synthesis-related protein.

BRACE3003053, BRCAN2002473, BRTHA2017364, NT2RI2008952, NT2RI3000174, TESTI2026647, TESTI2035981, TESTI4000155, TESTI4006473, TESTI4010382, TESTI4025547

[0207] The clones predicted to belong to the category of protein synthesis and/or transport-related protein are the following 29 clones.

[0208] BRACE2014306, BRACE3008720, BRAWH3000491, BRCAN2009432, BRHIP2000920, BRTHA3013884, CTONG2013178, HCHON2004531, HLUNG1000017, HLUNG2013851, HSYRA2005496, NT2NE2006909, NT2RI3006340, OCBBF2007068, OCBBF2031167, PUAEN2009795, TBAES2001229, TBAES2004055, TESTI2051867, TESTI4000014, TESTI4000349, TESTI4009608, TESTI4010851, TESTI4034632, TRACH3007479, TRACH3036193, UTERU2017762, UTERU2019940, UTERU2033375

[0209] The following 17 clones are also predicted to belong to the category of protein synthesis and/or transport-related protein.

BLADE2000579, BRACE3003053, BRCAN2003070, BRTHA2018011, BRTHA3000296, CTONG2016942, MESAN2005303, NT2RI3002557, NT2RP7008435, PERIC2007068, PLACE7000502, PROST2000452, TESTI4001984, TESTI4017714, THYMU2004284, TRACH3000420, TRACH3007866

[0210] The clones predicted to belong to the category of cellular defense-related protein are the following four clones.

BRTHA2015878, CTONG3000084, NT2RI3002842, PEBLM2004666

[0211] The following three clones are also predicted to belong to the category of cellular defense-related protein.

BRCAN2002473, NT2RI3007167, TRACH3002561

[0212] The clones predicted to belong to the category of development and/or differentiation-related protein are the following one clone.

TESTI4014924

[0213] The clones predicted to belong to the category of DNA-binding and/or RNA-binding protein are the following 67 clones.

[0214] BRACE2006319, BRACE2047011, BRACE3004150, BRACE3013576, BRACE3024073, BRAMY2030109, BRAWH3005912, BRCAN2002562, BRCOC2003213, BRHIP2021615, BRHIP3008183, BRHIP3025161, BRSTN2004987, BRTHA2018707, BRTHA3016917, CORDB1000140, CTONG1000467, CTONG3000084, CTONG3003972, CTONG3008831, CTONG3009028, FCBBF3013307, FEBRA2026984, HEART2001756, HLUNG2013851, IMR322000127, IMR322000917, KIDNE1000064, NT2NE2006531, NT2RI3003382, NT2RI3007158, NT2RP7000466, NT2RP7004123, OCBBF2036743, OCBBF3009279, PLACE6019385, SPLEN2006122, SPLEN2010912, TESOP2009121, TESTI1000390, TESTI2014716, TESTI2026505, TESTI2040018, TESTI2044796, TESTI2050987, TESTI4007810, TESTI4009374, TESTI4011745, TESTI4012679, TESTI4017001, TESTI4019140, TESTI4019566, TESTI4022716, TESTI4026510, TESTI4034432, TESTI4034912, TESTI4036909, THYMU2035319, THYMU2035735, THYMU3000133, TLIVE2002336, TRACH2023299, TRACH2025749, TRACH3004840, TRACH3036193, UTERU2026025, UTERU3009490

[0215] The following 112 clones are also predicted to belong to the category of DNA-binding and/or RNA-binding protein.

[0216] BLADE2006830, BRACE2003609, BRACE3001058, BRACE3001113, BRACE3003026, BRACE3003053, BRACE3010076, BRAMY2035070, BRAMY2035449, BRAMY2039341, BRAMY2045471, BRAWH1000369, BRAWH3007441, BRHIP2017553, BRSTN2013354, BRTHA2002133, BRTHA2002702, BRTHA2017364, BRTHA2017972, CERVX2002013, CTONG1000113, CTONG2003348, CTONG2015596, CTONG2020374, CTONG2020378, CTONG2020411, CTONG2024031, CTONG2028758, CTONG3001501, CTONG3004726, DFNES2011192, FCBBF1000509, FCBBF3027854, FEBRA2014122, FEBRA2027609, HCASM2003018, HCASM2003099, HCASM2009424, HCHON2000508, HCHON2000743, HCHON2004858, HSYRA2005628, IMR322013731, MESAN2014412, MESAN2015501, NT2RI2008952, NT2RI2018448, NT2RI2027157, NT2RI3000174, NT2RI3001132, NT2RI3002557, NT2RI3007167, NT2RI3007443, OCBBF2006987, OCBBF2008144, OCBBF2009583, OCBBF2011669, OCBBF2019684, OCBBF2020048, OCBBF2024284, OCBBF2032274, OCBBF2034637, OCBBF3000167, OCBBF3003761, PERIC2007068, SPLEN2016135, SPLEN2016781, SPLEN2036702, STOMA2003158, SYNOV2021953, SYNOV4002744, TESOP2001796, TESOP2005199, TESOP2006398, TESTI2008901, TESTI2026647, TESTI2034251, TESTI2035981, TESTI2037830, TESTI4000155, TESTI4000183, TESTI4000214, TESTI4006473, TESTI4008058, TESTI4008302, TESTI4010382, TESTI4013365, TESTI4014801, TESTI4015442, TESTI4017714, TESTI4025494, TESTI4025547, TESTI4026207, TESTI4028938, TESTI4028958, TESTI4029348, TESTI4031745, TESTI4032090, THYMU2006001, THYMU2028739, THYMU2031139, THYMU3001428, TKIDN2012771, TLIVE2007607, TRACH2007483, TRACH3000134, TRACH3003832, TRACH3007866, UTERU3001053, UTERU3014791, UTERU3017176, TESTI4038779

[0217] The clones predicted to belong to the category of ATP binding and/or GTP-binding protein are the following 28 clones.

[0218] BRACE3008720, BRACE3009708, BRAMY2047746, BRAMY3004919, BRAWH2014662, BRAWH2016702, BRCAN2009432, BRCAN2024451, BRSTN2013741, BRTHA3008778, BRTHA3009090, CTONG2004062, CTONG2028124, HCHON2004007, OCBBF2037340, SPLEN2030335, TESTI4000288, TESTI4001148, TESTI4002552, TESTI4008429, TESTI4018835, TESTI4021478, TESTI4029836, THYMU2036459, THYMU3001379, TRACH2001549, UTERU3000828, UTERU3001240

[0219] The following eight clones are also predicted to belong to the category of ATP binding and/or GTP-binding protein. BRCAN2014229, BRHIP2008389, CTONG3004550, FEBRA2001990, IMR322013396, IMR322013731, MESAN2001770, TESTI4000319

[0220] The following 208 clones have hit data in Pfam (see Example 5), and each has a functional domain or motif. It is currently unclear as to which of the above-described categories each of these clones belong. However, if data on polypeptides with a similar domain or motif can be accumulated, and their functions clarified in more detail, they may be classified into any of the above-described categories.

[0221] 3NB692002685, 3NB692008729, ASTRO2003960, BNGH42003570, BRACE2010489, BRACE2015314, BRACE2016981, BRACE2027258, BRACE2030341, BRACE2035441, BRACE2038329, BRACE2042550, BRACE2044286, BRACE3000071, BRACE3000973, BRACE3001002, BRACE3003192, BRACE3604772, BRACE3004880, BRACE3008137, BRACE3008384, BRACE3009090, BRACE3010397, BRACE3015521, BRACE3016884, BRACE3019084, BRAMY2004771, BRAMY2019300, BRAMY2021498, BRAMY2031317, BRAMY2039872, BRAMY2046989, BRAMY3004224, BRAMY3005932, BRAWH1000127, BRAWH2001395, BRAWH2014954, BRAWH3000078, BRAWH3001891, BRAWH3002574, BRAWH3002600, BRAWH3008341, BRCAN2002948, BRCAN2009203, BRCAN2015464, BRCAN2017717, BRCOC2001505, BRCOC2016525, BRHIP2003786, BRHIP2005236, BRHIP2007616, BRHIP2009414, BRHIP3000339, BRHIP3008313, BRSTN2001067, BRTHA2000855, BRTHA2005579, BRTHA2007122, BRTHA2008527, BRTHA2009311, BRTHA2010884, BRTHA2013262, BRTHA2014792, BRTHA2015406, BRTHA2016496, BRTHA2018591, BRTHA2018624, BRTHA2019048, BRTHA3003074, BRTHA3008310, CTONG1000341, CTONG2001877, CTONG2008233, CTONG2017500, CTONG2020026, CTONG2028687, CTONG3000686, CTONG3004072, CTONG3006067, CTONG3006186, CTONG3009385, DFNES2000146, DFNES2005266, FCBBF3009888, FCBBF3012170, FEBRA2000253, FEBRA2007801, FEBRA2021571, FEBRA2024150, HCHON2004776, HEART1000139, HEART2006909, HEART2010495, HLUNG2000014, HLUNG2002958, HLUNG2011298, IMR322006495, KIDNE2000846, KIDNE2001361, KIDNE2011635, KIDNE2012945, NESOP2001656, NT2RI2008724, NT2RI2025909, NT2RI2025957, NT2RI3007543, NT2RP7000359, NT2RP7004027, NT2RP7011570, NT2RP8000296, NTONG2005277, NTONG2006354, NTONG2007517, OCBBF2006764, OCBBF2010416, OCBBF2020838, OCBBF2021323, OCBBF2033869, PERIC2001228, PERIC2003720, PLACE6020031, PLACE7000514, PROST2018090, RECTM2000433, SKMUS2006394, SMINT1000192, SPLEN2002147, SPLEN2002467, SPLEN2031780, SPLEN2034081, SPLEN2036821, SYNOV2005448, SYNOV2005817, SYNOV2006430, SYNOV2014400, SYNOV4007553, SYNOV4008440, TESOP2001953, TESTI2000443, TESTI2004700, TESTI2027019, TESTI4000462, TESTI4000970, TESTI4002491, TESTI4006546, TESTI4007064, TESTI4011484, TESTI4012406, TESTI4015471, TESTI4016110, TESTI4017137, TESTI4017575, TESTI4018152, TESTI4018555, TESTI4020092, TESTI4023555, TESTI4025920, TESTI4026192, TESTI4027557, TESTI4028429, TESTI4028612, TESTI4028983, TESTI4030505, TESTI4038492, TESTI4039659, TESTI4041053, TESTI4044084, TESTI4046487, TESTI4046819, THYMU2004693, THYMU2011736, THYMU2016204, THYMU2027734, THYMU2038369, THYMU2038797, THYMU3000028, THYMU3003212, THYMU3003763, THYMU3007137, THYMU3008171, TLIVE2002338, TLIVE2002690, TLIVE2003225, TLIVE2008229, TRACH2001443, TRACH3001427, TRACH3003379, TRACH3008713, TRACH3035235, TUTER2000425, UTERU1000031, UTERU2006115, UTERU2006568, UTERU2019706, UTERU2035328, UTERU2035331, UTERU2035452, UTERU3001652, UTERU3001766, UTERU3001988, UTERU3002667, UTERU3003178, UTERU3005585, UTERU3007640, UTERU3008660, UTERU3009871, UTERU3009979, UTERU3015500

[0222] Likewise, the following 45 clones also had hit data in Pfam (see Example 5), although it remains unclear as to which of the above-described categories each clone belongs. When data on polypeptides with a similar domain or motif are accumulated, and their functions are clarified in more detail, these clones may also be classified into any of the above-described categories.

3NB692004724//KRAB box//Integrase core domain

ADRGL2000042//Nucleosome assembly protein (NAP)

BRACE2037299//Integrase core domain

BRALZ2017844//Homeobox domain

BRAWH2006207//KRAB box

BRCAN2002854//SAP domain

BRHIP2006617//TPR Domain//TPR Domain

BRHIP2012360//XPG N-terminal domain//XPG I-region

BRHIP3008314//Sir2 family

BRTHA2016318//KE2 family protein

CTONG2019822//Hepatitis C virus core protein

FCBBF3010361//Fork head domain

FEBRA2006519//Thrombospondin type 1 domain//Thrombospondin type 1 domain

[0223] FEBRA2028256//EGF-like domain//EGF-like domain//EGF-like domain//EGF-like domain//EGF-like domain//TB domain//EGF-like domain//EGF-like domain//EGF-like domain//EGF-like domain//EB module//Squash family of serine protease inhibitors//EGF-like domain//EGF-like domain

FEBRA2028516//GRIP domain

HCASM2008536//XRCC1 N terminal domain

IMR322007078//UBA domain

IMR322008651//Helix-hairpin-helix motif.

LIVER2000247//Sodium

OCBBF2003327//Thrombospondin type 1 domain//Thrombospondin type 1 domain//Thrombospondin type 1 domain

PROST2009320//LIM domain containing proteins//LIM domain containing proteins

PUAEN2006335//Formin Homology 2 Domain

SKMUS2003194//SAP domain

SPLEN2039379//Transthyretin precursor (formerly prealbumin)

SYNOV1000256//Leucine Rich Repeat//BAH domain//Leucine Rich Repeat//Leucine Rich Repeat//Leucine Rich Repeat

SYNOV2006620//Nuclear transition protein 2

SYNOV4003981//Somatomedin B domain//WAP-type (Whey Acidic Protein) ‘four-disulfide core’//Hemopexin//Hemopexin

SYNOV4005889//Apolipoprotein A1/A4/E family

TESOP2006865//KRAB box

TESTI1000266//Integrase core domain

TESTI2050780//Kazal-type serine protease inhibitor domain

TESTI4000137//Domain of unknown function

TESTI4024387//GDP dissociation inhibitor

TESTI4029528//RanBP1 domain.

TESTI4038721//Squash family of serine protease inhibitors

TESTI4046240//Sir2 family

THYMU2035078//Domain of unknown function DUF27

THYMU3000269//FAD binding domain

THYMU3000360//Integrase core domain

TRACH1000212//TSC-22/dip/bun family

TRACH2000862//Guanylate-binding protein

TRACH2019672//CRAL/TRIO domain.

TRACH2024559//IQ calmodulin-binding motif//IQ calmodulin-binding motif

UTERU2032279//Serpins (serine protease inhibitors)

UTERU2033577//KRAB box

[0224] The function of a motif or domain may sometimes belong to more than one of the above-described functional categories, and there is also the possibility that such a motif or domain may be predicted to belong to every functional category. As new polypeptide data are accumulated and novel domains and motifs are found, a new functional domain or motif may be identified by re-analyzing deduced amino acid sequences in homology searches using updated databases. Thus in the future, the remaining clones, for which there are currently no hit data, may be classified into any of the above-described categories.

[0225] Since the polypeptides encoded by clones of the present invention contain full-length amino acid sequences, it is possible to analyze their biological activity and effect on cellular conditions such as cell proliferation and differentiation, by expressing the polypeptides as recombinant polypeptides using an appropriate expression system, injecting the recombinant into a cell, or raising a specific antibody against that polypeptide.

[0226] The biological activities of respective polypeptides can be analyzed by the methods as shown below.

Secretory Protein, Transmembrane Protein:

[0227] “Ion Channels” (Ed., R. H. Ashley, 1995) of “The Practical Approach Series” (IRL PRESS),
[0228] “Growth Factors” (Eds., I. McKay, I. Leigh, 1993),
[0229] “Extracellular Matrix” (Eds., M. A. Haralson, J. R. Hassell, 1995);
   Glycoprotein-Related Protein:
[0230] “Glycobiology” (Eds., M. Fukuda, A. Kobata, 1993) of “The Practical Approach Series” (IRL PRESS),
[0231] “Glycoprotein Analysis in Biomedicine” (Ed., Elizabeth F. Hounsell, 1993) of “Method in Molecular Biology” (Humana Press) series;
   Signal Transduction-Related Protein:
[0232] “Signal Transduction” (Ed., G. Milligan, 1992) of “The Practical Approach Series” (IRL PRESS),
[0233] “Protein Phosphorylation” (Ed., D. G. Hardie, 1993), or
[0234] “Signal Transduction Protocols” (Eds., David A. Kendall, Stephen J. Hill, 1995) of “Method in Molecular Biology” (Humana Press) series;
   Transcription-Related Protein:
[0235] “Gene Transcription” (Eds., B. D. Hames, S. J. Higgins, 1993) of “The Practical Approach Series” (IRL PRESS),
[0236] “Transcription Factors” (Ed., D. S. Latchman, 1993);
   Enzyme and/or Metabolism-Related Protein:
[0237] “Enzyme Assays” (Eds., ROBERT EISENTHAL and MICHAEL J. DANSON, 1992) of “The Practical Approach Series” (IRL PRESS);
   Cell Division and/or Cell Proliferation-Related Protein:
[0238] “Cell Growth, Differentiation and Senescence” (Ed., GEORGE STUDZINSKI, 2000) of “The Practical Approach Series” (IRL PRESS);
   Cytoskeleton-Related Protein:
[0239] “Cytoskeleton: Signalling and Cell Regulation” (Eds., KERMIT L. CARRAWAY and CAROLIE A. CAROTHERS CARRAWAY, 2000) of “The Practical Approach Series” (IRL PRESS),
[0240] “Cytoskeleton Methods and Protocols” (Ed., Gavin, Ray H., 2000) of “Method in Molecular Biology” (Humana Press) series;
   Nuclear Protein and/or RNA Synthesis-Related Protein:
[0241] “Nuclear Receptors” (Ed., DIDIER PICARD, 1999) of “The Practical Approach Series” (IRL PRESS),
[0242] “RNA Processing” (Eds., STEPHEN J. HIGGINS and B. DAVID HAMES, 1994);
   Protein Synthesis and/or Transport-Related Protein:
[0243] “Membrane Transport” (Ed., STEPHEN A. BALDWIN, 2000) of “The Practical Approach Series” (IRL PRESS),
[0244] “Protein Synthesis Methods and Protocols” (Eds., Martin, Robin, 1998) of “Method in Molecular Biology” (Humana Press) series;
   Cellular Defense-Related Protein:
[0245] “DNA Repair Protocols” (Henderson, Daryl S., 1999) of “Method in Molecular Biology” (Humana Press) series,
[0246] “Chaperonin Protocols” (Eds., Schneider, Christine, 2000);
   Development and/or Differentiation-Related Protein:
[0247] “Developmental Biology Protocols” (Eds., ROBERT EISENTHAL and MICHAEL J. DANSON, 1992) of “Method in Molecular Biology” (Humana Press) series;
   DNA- and/or RNA-Binding Protein:
[0248] “DNA-Protein Interactions Principles and Protocols” (Eds., Kneale, G. Geoff, 1994) of “Method in Molecular Biology” (Humana Press) series,
[0249] “RNA-Protein Interaction Protocols” (Eds., Haynes, Susan R., 1999);
   ATP- and/or GTP-Binding Protein:
[0250] “Signal Transduction Protocols” (Eds., David A. Kendall, Stephen J. Hill, 1995) of “Method in Molecular Biology” (Humana Press) series.

[0251] When other techniques are used, the activity of a polypeptide can be analyzed according to the description in Methods in Enzymology (Academic Press).

[0252] In the above-described categorization, a clone predicted to belong to the secretory and/or membrane protein category refers to a clone having hit data in a homology search with some annotation to suggest that the clone encodes a secretory and/or membrane protein, such as a growth factor, cytokine, hormone, signal, transmembrane, membrane, extracellular matrix, receptor, G-protein coupled receptor, ionic channel, voltage-gated channel, calcium channel, cell adhesion, collagen, and connective tissue protein; or a clone in which the results of PSORT and SOSUI analyses for deduced ORF suggest the presence of a nucleotide sequence encoding a signal sequence or transmembrane region; or a clone in which the results of a domain/motif search with Pfam suggest the presence of domains/motifs that suggest receptors, ion channels, hormones, or growth factors, for example, seven-transmembrane receptors, pancreatic hormone peptides, ion transport proteins, or fibroblast growth factors.

[0253] A clone predicted to belong to the glycoprotein-related protein category means a clone having hit data in a homology search with some annotation, such as glycoprotein, suggesting that the clone encodes a glycoprotein-related protein; or a clone in which the results of a domain/motif search with Pfam indicate the presence of domains and motifs such as a glycoprotein or glycosyltransferase that suggest the involvement of glycobiology, for example, immunoglobulin domain or glycosyl transferases group 1.

[0254] A clone predicted to belong to the signal transduction-related protein category means a clone having hit data in a homology search with some annotation, such as serine/threonine-protein kinase, tyrosine-protein kinase, SH3 domain, and SH2 domain, suggesting that the clone encodes a signal transduction-related protein; or a clone in which the results of a domain/motif search with Pfam suggest the presence of domains and motifs that suggest a protein kinase, dephosphoenzyme, SH2 domain, or small G protein, for example, eukaryotic protein kinase domain, protein phosphatase 2C, or Ras family.

[0255] A clone predicted to belong to the transcription-related protein category means a clone having hit data in a homology search with some annotation, such as transcription regulation, zinc finger, and homeobox, suggesting that the clone encodes a transcription-related protein; or a clone in which the results of a domain/motif search with Pfam suggest the presence of domains and motifs that suggest a transcription factor or transcription-controlling protein, for example, bZIP transcription factor, Zinc finger, or C2H2 type.

[0256] A clone predicted to belong to the category of disease-related protein means a clone having hit data in a homology search with some annotation, such as disease mutation and syndrome, suggesting that the clone encodes a disease-related protein; or a clone whose full-length nucleotide sequence has hit data in Swiss-Prot, GenBank, UniGene, nr or RefSeq, where that hit data corresponds to genes or polypeptides which have been deposited in the Online Mendelian Inheritance in Man (OMIM) (http://www.ncbi.nlm.nih.gov/Omim/), the human gene and disease database described later; or a clone in which the results of a domain/motif search with Pfam suggest the presence of domains and motifs, that suggest proteins with disease-specific expression or proteins involved in increasing or decreasing expression (depending on the disease), for example, Wilm's tumor protein or von Hippel-Lindau disease tumor suppressor protein.

[0257] A clone predicted to belong to the category of enzyme and/or metabolism-related protein means a clone having hit data in a homology search with some annotation, such as metabolism, oxidoreductase, and E. C. No. (Enzyme commission number), suggesting that the clone encodes an enzyme and/or metabolism-related protein; or a clone in which the results of a domain/motif search with Pfam suggests the presence of domains and motifs that suggest transferase, synthase, or hydrolase, for example, aldehyde dehydrogenase family, chitin synthase, or glucose-6-phosphate dehydrogenase.

[0258] A clone predicted to belong to the category of cell division and/or cell proliferation-related protein means a clone having hit data in a homology search with some annotation, such as cell division, cell cycle, mitosis, chromosomal protein, cell growth, and apoptosis, suggesting that the clone encodes a cell division and/or cell proliferation-related protein; or a clone in which the results of a domain/motif search with Pfam suggest the presence of domains and motifs that suggest cyclin or cell proliferation-controlling protein, for example, cyclin or cell division protein.

[0259] A clone predicted to belong to the category of cytoskeleton-related protein means a clone having hit data in a homology search with some annotation, such as structural protein, cytoskeleton, actin-binding, and microtubles, suggesting that the clone encodes a cytoskeleton-related protein; or a clone in which the results of a domain/motif search with Pfam suggest the presence of domains and motifs that suggest actin, kinesin, or fibronectin, for example, actin, fibronectin type I domain, or kinesin motor domain.

[0260] A clone predicted to belong to the category of nuclear protein and/or RNA synthesis-related protein means a clone having hit data in a homology search with some annotation, such as nuclear protein, RNA splicing, RNA processing, RNA helicase, and polyadenylation, suggesting that the clone encodes a nuclear protein and/or RNA synthesis-related protein; or a clone in which the results of a domain/motif search with Pfam suggest the presence of domains and motifs that suggest splicing factor, RNA synthase, or helicase, for example, hepatitis C virus RNA dependent RNA polymerase or DEAD/DEAH box helicase.

[0261] A clone predicted to belong to the category of protein synthesis and/or transport-related protein means a clone having hit data in a homology search with some annotation, such as translation regulation, protein biosynthesis, amino-acid biosynthesis, ribosomal protein, protein transport, and signal recognition particle, suggesting that the clone encodes a protein synthesis and/or transport-related protein; or a clone in which the results of a domain/motif search with Pfam suggest the presence of domains and motifs that suggest translation-relating protein, ubiquitin-relating protein, or ribosomal protein, for example, translation initiation factor SUI1, ubiquitin family, or ribosomal protein L16.

[0262] A clone predicted to belong to the category of cellular defense-related protein means a clone having hit data in a homology search with some annotation, such as heat shock, DNA repair, and DNA damage, suggesting that the clone encodes a cellular defense-related protein; or a clone in which the results of a domain/motif search with Pfam suggest the presence of domains and motifs that suggest chaperonin or DNA repair protein, for example, HSP90 protein or DNA mismatch repair protein.

[0263] A clone predicted to belong to the category of development and/or differentiation-related proteins means a clone having hit data in a homology search with some annotation, such as developmental protein, suggesting that the clone encodes a development and/or differentiation-related protein; or a clone in which the results of a domain/motif search with Pfam suggest the presence of domains and motifs that suggest organogenesis-relating protein, for example, floricaula/leafy protein.

[0264] A clone predicted to belong to the category of DNA- and/or RNA-binding protein means a clone having hit data in a homology search with some annotation, such as DNA-binding, RNA-binding, and such; or a clone in which the results of a domain/motif search with Pfam suggest the presence of domains and motifs that suggest DNA/RNA-relating enzyme group including transcription factor and DNA ligase or Zinc-finger relating protein, for example, transcription factor WhiB, B-box zinc finger, or tRNA synthetases class I (C).

[0265] A clone predicted to belong to the category of ATP- and/or GTP-binding protein means a clone having hit data in a homology search with some annotation, such as ATP-binding, GTP-binding, and such; or a clone in which the results of a domain/motif search with Pfam suggest the presence of domains and motifs that suggest ATP/GTP-relating enzyme group including ATPase or G protein, for example, E1-E2 ATPase or Ras family.

[0266] It is possible to perform functional analysis of a protein involved in a disease as described above. It is also possible to analyze correlation between a protein's expression or activity and a certain disease by using a specific antibody obtained by using the expressed protein. Alternatively, it is possible to utilize the OMIM database, which is a database of human genes and diseases, to analyze the protein. New information is constantly being deposited into this database. Therefore, it is possible that one skilled in the art will find a new relationship between a particular disease and a gene of the present invention by using the most up-to-date database. Proteins involved in diseases are useful for developing diagnostic markers or medicines for regulation of their expression and activity, or as gene therapy targets.

[0267] The proteins may have a variety of functions, including but not limited to the above 14 categories, such as secretory proteins, membrane proteins, signal transduction-related proteins, glycoprotein-related proteins, or transcription-related proteins. When searching OMIM using these keywords, the proteins are revealed to be involved in a great number of diseases (the results of the OMIM search for secretory and membrane proteins are shown below as an Example). Associations between proteins related to signal transduction or transcription and diseases are reported in “Transcription Factor Research-19991 (Fujii, Tamura, Morohashi, Kageyama, and Satake edit, (1999) Jikken-Igaku Zoukan, Vol. 17, No. 3), and “Gene Medicine” (1999) Vol. 3, No. 2). As another example and as described in “Biology of Cancer”, many proteins are involved in cancers, including enzymes and/or metabolism-related proteins, cytoskeleton-related proteins, cell division and/or cell proliferation-related proteins as well as secretory proteins, membrane proteins, signal transduction-related proteins, glycoprotein-related proteins, transcription-related proteins, (S. Matsubara, 1992) of Life Science series (Shokabo). As the above example clearly demonstrates, not only disease-related proteins but also secretory proteins, membrane proteins, signal transduction-related proteins, glycoprotein-related proteins, and transcription-related proteins are often involved in diseases, and thus such proteins can be useful targets in the field of medical industry.

[0268] The results of the OMIM search for secretory and membrane proteins are shown below. The keywords used were:

(1) secretion protein,

(2) membrane protein,

(3) channel, and

(4) extracellular matrix.

[0269] Only the OMIM accession numbers are shown in the search results. The first 50 accession numbers displayed in the search results are provided. Using this number, data showing the relationship between a disease and a gene or protein can be seen. OMIM data is renewed daily.

1) Secretion Protein

[0270] When searching under these keywords, 436 genes were registered as being associated with disease. The OMIM numbers for 50 of these genes are as follows.

[0271] *604667, *104760, *176860, *139320, *118910, *151675, *107400, *604029, #200100, *177061, *600946, *601693, *139250, *176880, *600998, *603850, *605083, *147572, *179513, *606055, *604028, *125950, *157147, *246700, *602926, *600560, *602421, *603215, 185860, *600174, *179512, *109270, *179511, *179510, *179509, *601146, *604710, *177020, *138120, *170280, *600626, *164160, *168470, *154545, *603831, *601652, *104311, *601489, *603062, *102720

2) Membrane Protein

[0272] When searching under these keywords, 1873 genes were registered as being associated with disease. The OMIM numbers for 50 of these genes are as follows.

[0273] *130500, *605704, *305360, *153330, *109270, *173610, *170995, *120920, *170993, *309060, *104776, *602333, *605703, *602690, *605943, *159430, *600897, *606867, *133090, *601178, *602413, *602003, *604405, *605940, *603237, *109280, *606958, *600378, *606959, *602173, *107776, *602334, *125305, *602335, *309845, *601134, *605731, *606795, *185881, *607178, *603177, *154045, *603214, *603718, *606909, *600594, *603241, *606629, *603657, *600182

3) Channel (Member of Membrane Proteins)

[0274] When searching under these keywords, 449 genes were registered as being associated with disease. The OMIM numbers for 50 of these genes are as follows.

[0275] *176266, *600724, *605427, *182390, *123825, *114208, *114206, *114205, *176267, *600053, *601784, *603749, *182392, *600937, *603415, *114204, *114209, *114207, *607370, *604528, *604527, *601011, *600760, *192500, *118425, *600228, *600359, *176261, *602235, *600761, *182389, *300008, *600877, *605692, *300338, *602232, *603537, *182391, *176263, *602343, *601328, *605874, *604385, *603939, *602208, *601534, *601958, *603220, *600504, *607368

4) Extracellular Matrix

[0276] When searching under these keywords, 267 genes were registered as being associated with disease. The OMIM numbers for 50 of these genes are as follows.

[0277] *605912, *602201, *603479, *604633, *601418, *601548, *115437, *154870, *120361, *602285, *600754, *602262, *134797, *602261, *603320, *603321, *604871, *604629, *601807, #154700, *128239, *600310, *605470, *185250, *178990, *603767, *120360, *185261, *116935, *607056, *253700, *190180, *600985, *188826, *193300, *276901, *308700, *120150, *602109, *120324, *600514, #177170, #247100, #116920, #200610, *605127, *601313, *601652, *120180, *154790

[0278] In addition to these, various keywords shown in the above-mentioned categorizations or others can be used in an OMIM search to reveal involvement in disease.

[0279] Further, the use of nucleotide sequences of cDNAs of the present invention enables the expression frequency of genes corresponding to those cDNAs to be analyzed. Gene function can be predicted based on information obtained by expression frequency analysis.

[0280] There are several methods for analyzing the expression level of genes involved in disease. Differences in gene expression levels between diseased and normal tissues can be studied by analytical methods using, for example, Northern blotting, RT-PCR, DNA microarrays, etc. (Experimental Medicine, Vol. 17, No. 8, 980-1056 (1999); Cell Engineering (additional volume) DNA Microarray and Advanced PCR Methods, Muramatsu & Nawa (eds.), Shujunsya (2000)). In addition to these analysis methods, computer analysis can be used to compare the nucleotide sequences of expressed genes, and hence to analyze expression frequency. For example, in the “BODYMAP” database, gene clones are randomly extracted from cDNA libraries of various tissues and/or cells, clones homologous to each other are assigned to a single cluster based on 3′-end nucleotide sequence homology information, genes are then classified into clusters, and the number of clones in each cluster is compared to gain information on expression frequency (http://bodymap.ims.u-tokyo.ac.jp/).

[0281] When these analytical methods result in observation of an explicit difference between gene expression levels in diseased tissues and normal tissues, it can be concluded that the gene is closely involved in the disease or disorder. When gene expression is explicitly different between normal cells and cells reproducing specific disease-associated features, even if they are not diseased tissues, it can be concluded that the gene is closely involved in a disease or disorder.

[0282] Of the 2,495 clones whose full-length nucleotide sequences were revealed, genes involved in a particular pathology or function were selected using the database shown below (see Example 7; “Expression frequency analysis in silico”). The database used in the analyses of the present invention contains the nucleotide sequences of 1,402,069 clones, a sufficiently large population for analysis. Sequence information in the database was obtained by randomly selecting cDNA clones from cDNA libraries derived from the various tissues and cells shown in Example 1, and determining the 5′-end sequences thereof.

[0283] The nucleotide sequence of each clone in this database was then categorized (clustered) based on nucleotide sequence homology determined with a search program. The number of clones belonging to each cluster of each library was determined and normalized; and the ratio of a certain gene in a cDNA library was determined. This analysis provided information on the expression frequency of a gene in the tissue or cell that was the source of the cDNA library.

[0284] In order to analyze the expression of genes corresponding to the nucleotide sequences of cDNAs of the present invention in tissues and cells, the libraries from the tissues or cells, which had been used in large-scale cDNA analyses, were taken as subjects for comparison of expression levels between different tissues or cells. Namely, expression frequency was analyzed by comparing the previously normalized values between tissues or cells from which were derived the 600 or more cDNA clones whose nucleotide sequences had been analyzed. This analysis showed that the cDNA clones corresponded to the genes involved in the pathologies and functions indicated below. Each value in Tables 2 to 24 indicated below represents a relative expression frequency; a higher value indicates a higher expression level. Genes included in these Tables do not indicate such a big difference between compared libraries, but when compared with other tissue- or gene-derived libraries based on Example 9, they indicate a significant difference. Thus, these genes are specific to a tissue or cell, and can be considered useful diagnostic markers for disease, as well as useful for analyzing molecular mechanisms.

Osteoporosis-Related Genes

[0285] Osteoporosis is a pathology in which bones are easily broken owing to an overall decrease in bone components. The onset involves the balance between the functions of osteoblast producing bone and osteoclast absorbing bone, namely bone metabolism. Genes involved in the increase of osteoclasts differentiating from precursor cells of monocyte/macrophage line (Molecular Medicine 38. 642-648. (2001)) are thus genes involved in osteoporosis relevant to bone metabolism.

[0286] Nucleotide sequence-based analysis was carried out to identify genes whose expression frequencies were higher or lower in CD34+ cells (cells expressing glycoprotein CD34) treated with osteoclast differentiation factor (Molecular Medicine 38. 642-648. (2001)), compared to untreated CD34+ cells, which are precursor cells in monocyte/macrophage lines. The result of comparative analysis of frequency between the cDNA libraries prepared from the RNA of CD34+ cells (CD34C), and from the RNA of CD34+ cells treated with the osteoclast differentiation factor (D30ST, D60ST or D90ST) (Table 2), showed that the genes whose expression levels differed between the two were 15 and two clones indicated below.

BRACE3013780, BRAMY2047420, BRSTN2016470, CTONG3008894, D3OST2002182, D3OST2002648, D3OST3000169, PEBLM2005183, PUAEN2009655, TESTI4000014, TESTI4010851, TRACH2023299, TRACH2025535, TRACH3001427, UTERU20.06137 HCHON2000508, TESTI2015626

[0287] These clones are involved in osteoporosis.

Genes Involved in Neural Cell Differentiation

[0288] Genes involved in neural cell differentiation are useful for treating neurological disease. Genes with varying expression levels in response to induction of cellular differentiation in neural cells are thought to be involved in neurological disease.

[0289] A survey was performed for genes whose expression levels varied in response to induction of differentiation (stimulation by retinoic acid (RA) or growth inhibitor treatment after RA stimulation) in cultured cells of a neural strain, NT2. The result of comparative analysis of cDNA libraries derived from undifferentiated NT2 cells (NT2RM) and cells subjected to differentiation treatment (NT2RP, NT2RI or NT2NE) (Table 3) showed that the genes whose expression levels differed between the two were 174 and 30 clones indicated below.

[0290] BNGH42007788, BRACE1000186, BRACE2006319, BRACE2014306, BRACE2015058, BRACE2044286, BRACE3010428, BRAMY2044078, BRAWH2014645, BRAWH2014662, BRAWH3002574, BRAWH3003992, BRAWH3005981, BRAWH3007592, BRCAN2009432, BRCAN2016619, BRCAN2028355, BRHIP2001074, BRHIP2007741, BRHIP2014228, BRHIP2024146, BRHIP3007586, BRHIP3018797, BRTHA2003461, BRTHA3000633, BRTHA3003490, COLON2001721, CTONG1000087, CTONG2008233, CTONG2020638, CTONG2028124, CTONG3003905, CTONG3008894, CTONG3009028, CTONG3009239, DFNES2011499, FCBBF3001977, FEBRA1000030, FEBRA2006396, FEBRA2007801, HCHON2000028, HCHON2000244, HCHON2001084, HCHON2001217, HCHON2001548, HCHON2006250, HEART1000074, HHDPC1000118, HSYRA2009075, IMR322000127, IMR322001380, KIDNE2000665, KIDNE2002252, MESAN2006563, MESAN2012054, MESAN2015515, NT2NE2003252, NT2NE2005890, NT2NE2006531, NT2NE2006909, NT2NE2008060, NT2RI2003993, NT2RI2004618, NT2RI2005166, NT2RI2006686, NT2RI2008724, NT2RI2009855, NT2RI2011422, NT2RI2011683, NT2RI2012659, NT2RI2012990, NT2RI2013357, NT2RI2014247, NT2RI2014551, NT2RI2014733, NT2RI2016128, NT2RI2018311, NT2RI2018883, NT2RI2019751, NT2RI2023303, NT2RI2025909, NT2RI2025957, NT2RI2027081, NT2RI2027396, NT2RI3000622, NT2RI3001263, NT2RI3001515, NT2RI3002303, NT2RI3002842, NT2RI3002892, NT2RI3003031, NT2RI3003095, NT2RI3003162, NT2RI3003382, NT2RI3003409, NT2RI3004381, NT2RI3004510, NT2RI3005202, NT2RI3005403, NT2RI3005724, NT2RI3006132, NT2RI3006171, NT2RI3006284, NT2RI3006340, NT2RI3006376, NT2RI3006673, NT2RI3006796, NT2RI3007065, NT2RI3007158, NT2RI3007291, NT2RI3007543, NT2RI3007757, NT2RI3007978, NT2RI3008055, NT2RI3008162, NT2RI3008652, NT2RI3008697, NT2RI3008974, NT2RI3009158, NT2RP7000359, NT2RP7000466, NT2RP7004027, NT2RP7004123, NT2RP7005118, NT2RP7005529, NT2RP7005846, NT2RP7009030, NT2RP7009147, NT2RP7009867, NT2RP7010128, NT2RP7010599, NT2RP7011570, NT2RP7013795, NT2RP7014005, NT2RP7015512, NT2RP7017365, NT2RP7017474, NT2RP7017546, NT2RP8000137, NT2RP8000296, NT2RP8000483, NTONG2005969, OCBBF2007028, OCBBF2037068, PLACE7000514, PUAEN2007044, SPLEN2002467, SPLEN2006122, SPLEN2028914, SPLEN2031547, SYNOV4002346, SYNOV4007671, SYNOV4008440, TESOP2002273, TESTI2003573, TESTI4000014, TESTI4009286, TESTI4010851, TESTI4012702, TESTI4029671, TESTI4037156, THYMU3000133, TRACH1000205, TRACH2005811, TRACH2007834, TRACH2025535, TRACH3001427, TRACH3002192, TRACH3004721, TRACH3008093, TRACH3008535, TRACH3008713, UTERU2002410, UTERU2023175

[0291] ADRGL2000042, BRACE2003609, BRACE3003026, BRHIP3000017, CTONG2020411, FCBBF1000509, FCBBF3027854, FEBRA2028516, HCHON2000508, IMR322001879, NT2RI2005772, NT2RI2008952, NT2RI2009583, NT2RI2018448, NT2RI2027157, NT2RI3000174, NT2RI3001132, NT2RI3002557, NT2RI3005928, NT2RI3007167, NT2RI3007443, NT2RP7008435, NT2RP8000521, OCBBF2006987, PERIC2007068, TESTI2015626, TESTI4015442, TLIVE2002046, TRACH3000134, TUTER2000057

[0292] These genes are neurological disease-related genes.

Genes Involved in Alzheimer's Disease

[0293] Alzheimer's disease is a cranial neurological disease characterized by memory loss. As the disease advances, patients can no longer support themselves and require nursing. Alzheimer's disease eventually leads to brain atrophication. Environmental factors such as stress, and vascular factors such as hypertension and cholesterolemia, are assumed but not confirmed to contribute to the onset of Alzheimer's disease. Genes whose expression levels differ between normal brain tissues and tissues affected with Alzheimer's disease are expected to be involved in Alzheimer's disease. Such genes can be used to elucidate the disease's onset mechanism and in genetic diagnosis. cDNA libraries derived from the cerebral cortex of Alzheimer patients (BRALZ and BRASW) and a library derived from the whole tissues of a normal brain (BRAWH) were analyzed and compared (Table 4). Genes whose expression levels differed between the two were the 250 clones and 41 clones listed below.

[0294] ASTRO1000009, BLADE2008398, BRACE1000186, BRACE1000258, BRACE1000533, BRACE2005457, BRACE2010489, BRACE2014657, BRACE2035381, BRACE2044286, BRACE2045954, BRACE3000787, BRACE3003192, BRACE3005499, BRACE3007480, BRACE3009237, BRACE3009724, BRACE3009747, BRACE3010428, BRACE3011271, BRACE3011421, BRACE3012364, BRACE3022769, BRACE3026735, BRACE3031838, BRALZ2011796, BRALZ2012183, BRALZ2012848, BRALZ2014484, BRALZ2016085, BRALZ2016498, BRALZ2017359, BRAMY2003008, BRAMY2005052, BRAMY2019300, BRAMY2019963, BRAMY2036567, BRAMY2037823, BRAMY2040592, BRAMY3002803, BRAMY3004224, BRAMY3005091, BRASW1000053, BRASW1000125, BRAWH1000127, BRAWH2001395, BRAWH2001671, BRAWH2001940, BRAWH2001973, BRAWH2002560, BRAWH2002761, BRAWH2005315, BRAWH2007658, BRAWH2010000, BRAWH2010084, BRAWH2010536, BRAWH2012162, BRAWH2012326, BRAWH2013294, BRAWH2013871, BRAWH2014414, BRAWH2014645, BRAWH2014662, BRAWH2014876, BRAWH2014954, BRAWH2016221, BRAWH2016439, BRAWH2016702, BRAWH2016724, BRAWH3000078, BRAWH3000100, BRAWH3000314, BRAWH3000491, BRAWH3001326, BRAWH3001475, BRAWH3001891, BRAWH3002574, BRAWH3002600, BRAWH3002819, BRAWH3002821, BRAWH3003522, BRAWH3003555, BRAWH3003727, BRAWH3003801, BRAWH3003992, BRAWH3004453, BRAWH3004666, BRAWH3005132, BRAWH3005422, BRAWH3005912, BRAWH3005981, BRAWH3006548, BRAWH3006792, BRAWH3007221, BRAWH3007506, BRAWH3007592, BRAWH3007726, BRAWH3007783, BRAWH3008341, BRAWH3008697, BRAWH3008931, BRAWH3009297, BRCOC2003213, BRCOC2014033, BRCOC2020142, BRHIP2000920, BRHIP2005719, BRHIP2007741, BRHIP2014228, BRHIP2024146, BRHIP2026288, BRHIP3000339, BRHIP3006683, BRHIP3007586, BRHIP3008405, BRHIP3018797, BRSSN2000684, BRSSN2011738, BRSSN2014299, BRSTN2008052, BRSTN2015015, BRSTN2016470, BRTHA1000311, BRTHA2008335, BRTHA3002427, BRTHA3003490, BRTHA3008520, BRTHA3017848, COLON2001721, CTONG2017500, CTONG2028124, CTONG3000657, CTONG3001123, CTONG3009328, FCBBF2001183, FCBBF3001977, FEBRA2007544, FEBRA2007801, FEBRA2020886, FEBRA2028618, HCASM2007047, HCHON2000244, HCHON2000626, HCHON2001217, HCHON2002676, HCHON2006250, HEART1000074, HHDPC1000118, HLUNG2002465, IMR322000127, IMR322001380, IMR322002035, KIDNE2006580, MESAN2006563, MESAN2012054, MESTC1000042, NOVAR2001783, NT2NE2006909, NT2RI2008724, NT2RI2012659, NT2RI2014733, NT2RI3002892, NT2RI3006284, NT2RI3006673, NT2RI3007543, NT2RI3008055, NT2RP7005529, NT2RP7009147, NT2RP7014005, NT2RP7017474, NTONG2005969, OCBBF200179.4, OCBBF2006005, OCBBF2006764, OCBBF2007028, OCBBF2007114, OCBBF2010140, OCBBF2021286, OCBBF2023162, OCBBF2024850, OCBBF2028935, OCBBF2036743, OCBBF2038317, OCBBF3000483, OCBBF3008230, PEBLM2004666, PLACE6001185, PUAEN2005930, PUAEN2006701, PUAEN2007044, PUAEN2009655, SMINT2001818, SPLEN2028914, SPLEN2031424, SPLEN2031547, SPLEN2034781, SPLEN2036932, SYNOV2014400, SYNOV4002346, SYNOV4002883, SYNOV4007430, SYNOV4007671, SYNOV4008440, TESOP2002273, TESOP2002451, TESTI4000014, TESTI4000209, TESTI4001100, TESTI4006137, TESTI4008797, TESTI4009286, TESTI4010851, TESTI4013817, TESTI4014694, TESTI4021478, TESTI4022936, TESTI4024420, TESTI4027821, THYMU2001090, THYMU2033308, THYMU2035735, THYMU2039315, THYMU3001234, THYMU3008171, TKIDN2009641, TKIDN2009889, TKIDN2015788, TRACH1000205, TRACH2001549, TRACH2005811, TRACH2006049, TRACH2007834, TRACH2008300, TRACH2025535, TRACH3001427, TRACH3002192, TRACH3004068, TRACH3004721, TRACH3005294, TRACH3007479, TRACH3008093, TRACH3009455, UTERU2005621, UTERU2006115, UTERU2019706, UTERU2023039, UTERU2026203, UTERU3005230, UTERU3007640, UTERU3009871

[0295] ADRGL2000042, BLADE2006830, BRACE2003609, BRALZ2017844, BRAMY3004800, BRAWH1000369, BRAWH2006207, BRAWH2006395, BRAWH2008993, BRAWH2009393, BRAWH2010552, BRAWH3007441, BRAWH3009017, BRHIP2005271, BRHIP3000017, BRHIP3026052, BRTHA2018443, BRTHA3003000, CTONG2020374, CTONG2020378, CTONG2024031, FCBBF1000509, FEBRA2001990, FEBRA2006519, FEBRA2028516, HCHON2000743, IMR322001879, NT2RI2009583, OCBBF2008144, PERIC2007068, PUAEN2006335, SPLEN2039379, TESTI4001984, TESTI4008058, TESTI4025268, TESTI4032090, THYMU3000360, TLIVE2002046, TRACH3000134, UTERU2021820, UTERU2028734

[0296] These genes are involved in Alzheimer's disease.

Genes Involved in Parkinson's Disease

[0297] Parkinson's disease is a cranial neurological disease characterized by impaired production of the neurotransmitter dopamine in the substantia nigra in the brain. This results in dyskinesia, such as hand tremors, and impaired body movement due to muscular rigidity. Normally, the number of brain neurons gradually decreases with age. However, compared to healthy people, patients with Parkinson's disease experience a rapid and marked decrease in the number of neurons in their substantia nigra. Genes whose expression levels differ between tissues of the whole brain and the nigra are expected to be involved in Parkinson's disease. These genes exhibit nigra-specific alterations in their expression levels, and can be used to elucidate the disease onset mechanism and in gene diagnosis. cDNA libraries derived from the substantia nigra (BRSSN) and a library derived from whole tissues of a normal brain (BRAWH) were analyzed and compared (Table 5). Genes whose expression levels differed between the two were the 250 clones and 40 clones listed below.

[0298] ASTRO1000009, BLADE2008398, BRACE1000186, BRACE1000258, BRACE1000533, BRACE2005457, BRACE2010489, BRACE2014657, BRACE2035381, BRACE2044286, BRACE2045954, BRACE3000787, BRACE3003192, BRACE3005499, BRACE3007480, BRACE3009237, BRACE3009724, BRACE3009747, BRACE3010428, BRACE3011271, BRACE3011421, BRACE3012364, BRACE3013780, BRACE3022769, BRACE3026735, BRACE3031838, BRALZ2011796, BRAMY2003008, BRAMY2005052, BRAMY2019300, BRAMY2019963, BRAMY2036567, BRAMY2037823, BRAMY2040592, BRAMY2047420, BRAMY3002803, BRAMY3004224, BRAMY3005091, BRAWH1000127, BRAWH2001395, BRAWH2001671, BRAWH2001940, BRAWH2001973, BRAWH2002560, BRAWH2002761, BRAWH2005315, BRAWH2007658, BRAWH2010000, BRAWH2010084, BRAWH2010536, BRAWH2012162, BRAWH2012326, BRAWH2013294, BRAWH2013871, BRAWH2014414, BRAWH2014645, BRAWH2014662, BRAWH2014876, BRAWH2014954, BRAWH2016221, BRAWH2016439, BRAWH2016702, BRAWH2016724, BRAWH3000078, BRAWH3000100, BRAWH3000314, BRAWH3000491, BRAWH3001326, BRAWH3001475, BRAWH3001891, BRAWH3002574, BRAWH3002600, BRAWH3002819, BRAWH3002821, BRAWH3003522, BRAWH3003555, BRAWH3003727, BRAWH3003801, BRAWH3003992, BRAWH3004453, BRAWH3004666, BRAWH3005132, BRAWH3005422, BRAWH3005912, BRAWH3005981, BRAWH3006548, BRAWH3006792, BRAWH3007221, BRAWH3007506, BRAWH3007592, BRAWH3007726, BRAWH3007783, BRAWH3008341, BRAWH3008697, BRAWH3008931, BRAWH3009297, BRCOC2003213, BRCOC2014033, BRCOC2020142, BRHIP2000920, BRHIP2005719, BRHIP2007741, BRHIP2014228, BRHIP2024146, BRHIP3000339, BRHIP3006683, BRHIP3007586, BRHIP3008405, BRHIP3018797, BRSSN2000684, BRSSN2003086, BRSSN2004496, BRSSN2004719, BRSSN2006892, BRSSN2008549, BRSSN2008797, BRSSN2011262, BRSSN2011738, BRSSN2013874, BRSSN2014299, BRSSN2014424, BRSSN2014556, BRSSN2018581, BRSSN2018925, BRSTN2008052, BRSTN2015015, BRSTN2016470, BRTHA1000311, BRTHA2003461, BRTHA2008335, BRTHA3002427, BRTHA3003490, BRTHA3008520, BRTHA3017848, COLON2001721, CTONG2017500, CTONG2028124, CTONG3000657, CTONG3001123, CTONG3009328, FCBBF2001183, FCBBF3001977, FEBRA2007544, FEBRA2007801, FEBRA2020886, FEBRA2024136, FEBRA2025427, FEBRA2028618, HCASM2007047, HCHON2000244, HCHON2000626, HCHON2001217, HCHON2002676, HCHON2006250, HEART1000074, HHDPC1000118, HLUNG2002465, IMR322000127, IMR322002035, KIDNE2006580, MESAN2006563, MESAN2012054, MESTC1000042, NOVAR2001783, NT2NE2006909, NT2RI2008724, NT2RI2012659, NT2RI2014733, NT2RI3002892, NT2RI3006284, NT2RI3006673, NT2RI3007543, NT2RI3008055, NT2RP7005529, NT2RP7009147, NT2RP7014005, NT2RP7017474, OCBBF2001794, OCBBF2006005, OCBBF2006764, OCBBF2007028, OCBBF2010140, OCBBF2021286, OCBBF2024850, OCBBF2028935, OCBBF2036743, OCBBF2038317, OCBBF3000483, OCBBF3008230, PEBLM2004666, PLACE6001185, PUAEN2005930, PUAEN2006701, PUAEN2007044, PUAEN2009655, SPLEN2028914, SPLEN2031424, SPLEN2031547, SPLEN2034781, SPLEN2036932, SYNOV2014400, SYNOV4002346, SYNOV4002883, SYNOV4007430, SYNOV4008440, TESOP2002451, TESTI4000014, TESTI4000209, TESTI4001100, TESTI4006137, TESTI4008797, TESTI4009286, TESTI4010851, TESTI4013817, TESTI4014694, TESTI4021478, TESTI4022936, TESTI4024420, TESTI4027821, TESTI4037156, THYMU2001090, THYMU2033308, THYMU2035735, THYMU2039315, THYMU3001234, THYMU3008171, TKIDN2009641, TKIDN2009889, TKIDN2015788, TRACH1000205, TRACH2001549, TRACH2005811, TRACH2006049, TRACH2007834, TRACH2008300, TRACH2025535, TRACH3001427, TRACH3002192, TRACH3004721, TRACH3005294, TRACH3007479, TRACH3008093, TRACH3009455, UTERU2006115, UTERU2019706, UTERU2023039, UTERU2026203, UTERU3005230, UTERU3007640, UTERU3009871

[0299] ADRGL2000042, BLADE2006830, BRACE2003609, BRAMY3004800, BRAWH1000369, BRAWH2006207, BRAWH2006395, BRAWH2008993, BRAWH2009393, BRAWH2010552, BRAWH3007441, BRAWH3009017, BRHIP2005271, BRHIP3000017, BRTHA2018443, BRTHA3003000, CTONG2020374, CTONG2020378, CTONG2024031, FCBBF1000509, FEBRA2001990, FEBRA2006519, FEBRA2028516, HCHON2000743, IMR322001879, NT2RI2009583, OCBBF2008144, PERIC2007068, PUAEN2006335, SPLEN2039379, TESTI2015626, TESTI4001984, TESTI4008058, TESTI4025268, TESTI4032090, THYMU3000360, TLIVE2002046, TRACH3000134, UTERU2021820, UTERU2028734

[0300] These genes are involved in Parkinson's disease.

Genes Involved in Short-Term Memory and Dementia

[0301] In the brain, the hippocampus is a highly important memory-related area. The hippocampus functions to establish a memory by judging whether acquired information is necessary, and then accumulating the memory in another area of the brain. According to clinical findings, patients can retain a new memory for only about five minutes with an abnormal, or at worst without a hippocampus. Some dementia patients are presumed to have hippocampus abnormalities. Thus, genes whose expression levels differ between tissues of the whole brain and the hippocampus are expected to be involved in memory or dementia. Such genes can be used to elucidate the mechanism underlying memory, and in gene diagnosis. cDNA libraries derived from the hippocampus (BRHIP) and from the whole tissues of a normal brain (BRAWH) were analyzed and compared (Table 6). Genes whose expression levels differed between the two were the 370 clones and 59 clones listed below.

[0302] ASTRO1000009, BLADE2001371, BLADE2008398, BNGH42007788, BRACE1000186, BRACE1000258, BRACE1000533, BRACE2005457, BRACE2010489, BRACE2014657, BRACE2015058, BRACE2018762, BRACE2030341, BRACE2035381, BRACE2044286, BRACE2045954, BRACE3000787, BRACE3003192, BRACE3005499, BRACE3007480, BRACE3009237, BRACE3009724, BRACE3009747, BRACE3010428, BRACE3011271, BRACE3011421, BRACE3012364, BRACE3018963, BRACE3022769, BRACE3026735, BRACE3031838, BRALZ2011796, BRAMY2003008, BRAMY2005052, BRAMY2019300, BRAMY2019963, BRAMY2031317, BRAMY2036567, BRAMY2037823, BRAMY2040592, BRAMY2044078, BRAMY3002803, BRAMY3004224, BRAMY3005091, BRAMY3009811, BRAWH1000127, BRAWH2001395, BRAWH2001671, BRAWH2001940, BRAWH2001973, BRAWH2002560, BRAWH2002761, BRAWH2005315, BRAWH2007658, BRAWH2010000, BRAWH2010084, BRAWH2010536, BRAWH2012162, BRAWH2012326, BRAWH2013294, BRAWH2013871, BRAWH2014414, BRAWH2014645, BRAWH2014662, BRAWH2014876, BRAWH2014954, BRAWH2016221, BRAWH2016439, BRAWH2016702, BRAWH2016724, BRAWH3000078, BRAWH3000100, BRAWH3000314, BRAWH3000491, BRAWH3001326, BRAWH3001475, BRAWH3001891, BRAWH3002574, BRAWH3002600, BRAWH3002819, BRAWH3002821, BRAWH3003522, BRAWH3003555, BRAWH3003727, BRAWH3003801, BRAWH3003992, BRAWH3004453, BRAWH3004666, BRAWH3005132, BRAWH3005422, BRAWH3005912, BRAWH3005981, BRAWH3006548, BRAWH3006792, BRAWH3007221, BRAWH3007506, BRAWH3007592, BRAWH3007726, BRAWH3007783, BRAWH3008341, BRAWH3008697, BRAWH3008931, BRAWH3009297, BRCAN2020710, BRCAN2028355, BRCOC2003213, BRCOC2014033, BRCOC2020142, BRHIP2000691, BRHIP2000819, BRHIP2000826, BRHIP2000920, BRHIP2001074, BRHIP2001805, BRHIP2001927, BRHIP2002122, BRHIP2002172, BRHIP2002346, BRHIP2003242, BRHIP2003786, BRHIP2003917, BRHIP2004312, BRHIP2004359, BRHIP2004814, BRHIP2004883, BRHIP2005236, BRHIP2005354, BRHIP2005600, BRHIP2005719, BRHIP2005752, BRHIP2005932, BRHIP2006800, BRHIP2007616, BRHIP2007741, BRHIP2009340, BRHIP2009414, BRHIP2009474, BRHIP2013699, BRHIP2014228, BRHIP2021615, BRHIP2022221, BRHIP2024146, BRHIP2024165, BRHIP2026061, BRHIP2026288, BRHIP2029176, BRHIP2029393, BRHIP3000339, BRHIP3000526, BRHIP3001283, BRHIP3006683, BRHIP3007483, BRHIP3007586, BRHIP3008183, BRHIP3008313, BRHIP3008344, BRHIP3008405, BRHIP3008565, BRHIP3008598, BRHIP3008997, BRHIP3009099, BRHIP3009448, BRHIP3011241, BRHIP3013765, BRHIP3013897, BRHIP3015751, BRHIP3016213, BRHIP3018797, BRHIP3020182, BRHIP3024118, BRHIP3024533, BRHIP3024725, BRHIP3025161, BRHIP3025702, BRHIP3026097, BRHIP3027137, BRHIP3027854, BRSSN2000684, BRSSN2004719, BRSSN2008549, BRSSN2011738, BRSSN2014299, BRSTN2008052, BRSTN2015015, BRSTN2016470, BRSTN2018083, BRTHA1000311, BRTHA2002442, BRTHA2008335, BRTHA3000297, BRTHA3001721, BRTHA3002427, BRTHA3003490, BRTHA3005046, BRTHA3008520, BRTHA3008778, BRTHA3009090, BRTHA3015910, BRTHA3017848, COLON2001721, CTONG1000087, CTONG1000088, CTONG1000467, CTONG2000042, CTONG2008233, CTONG2009423, CTONG2017500, CTONG2019788, CTONG2028124, CTONG3000657, CTONG3001123, CTONG3001370, CTONG3002412, CTONG3004072, CTONG3008894, CTONG3009239, CTONG3009328, DFNES2011499, FCBBF2001183, FCBBF3001977, FEBRA2000253, FEBRA2007544, FEBRA2007801, FEBRA2008287, FEBRA2010719, FEBRA2020886, FEBRA2028618, HCASM2007047, HCHON2000028, HCHON2000244, HCHON2000626, HCHON2001217, HCHON2002676, HCHON2005921, HCHON2006250, HEART1000074, HEART2007031, HHDPC1000118, HLUNG2002465, HLUNG2003003, IMR322000127, IMR322001380, IMR322002035, KIDNE2005543, KIDNE2006580, MESAN2006563, MESAN2012054, MESTC1000042, NOVAR2001783, NT2NE2006909, NT2RI2008724, NT2RI2012659, NT2RI2014733, NT2RI2018311, NT2RI3001515, NT2RI3002892, NT2RI3004510, NT2RI3005724, NT2RI3006284, NT2RI3006673, NT2RI3007291, NT2RI3007543, NT2RI3008055, NT2RP7005529, NT2RP7009147, NT2RP7014005, NT2RP7017474, OCBBF2001794, OCBBF2003819, OCBBF2006005, OCBBF2006151, OCBBF2006764, OCBBF2007028, OCBBF2007068, OCBBF2010140, OCBBF2020741, OCBBF2021286, OCBBF2024719, OCBBF2024850, OCBBF2028935, OCBBF2036743, OCBBF2038317, OCBBF3000296, OCBBF3000483, OCBBF3008230, PEBLM2004666, PLACE6001185, PUAEN2005930, PUAEN2006701, PUAEN2007044, PUAEN2009655, SPLEN2010912, SPLEN2012624, SPLEN2028914, SPLEN2031424, SPLEN2031547, SPLEN2034781, SPLEN2036932, SYNOV2014400, SYNOV4002346, SYNOV4002883, SYNOV4007430, SYNOV4008440, TESOP2002451, TESTI2049246, TESTI4000014, TESTI4000209, TESTI4001100, TESTI4006137, TESTI4008797, TESTI4009286, TESTI4010377, TESTI4010851, TESTI4010928, TESTI4011161, TESTI4013817, TESTI4014159, TESTI4014694, TESTI4014818, TESTI4021478, TESTI4022936, TESTI4024420, TESTI4027821, TESTI4037156, THYMU2001090, THYMU2023967, THYMU2025707, THYMU2031341, THYMU2033308, THYMU2035735, THYMU2037226, THYMU2039315, THYMU3001234, THYMU3001379, THYMU3004835, THYMU3007137, THYMU3008171, TKIDN2009641, TKIDN2009889, TKIDN2015788, TRACH1000205, TRACH2001549, TRACH2005811, TRACH2006049, TRACH2007834, TRACH2008300, TRACH2025535, TRACH3000014, TRACH3001427, TRACH3002192, TRACH3004721, TRACH3005294, TRACH3007479, TRACH3008093, TRACH3009455, TUTER1000122, TUTER2000904, UTERU2004929, UTERU2006115, UTERU2019706, UTERU2021163, UTERU2023039, UTERU2026203, UTERU2030213, UTERU3001572, UTERU3003135, UTERU3005230, UTERU3007640, UTERU3009259, UTERU3009871

[0303] ADRGL2000042, BLADE2006830, BRACE2003609, BRAMY3004800, BRAWH1000369, BRAWH2006207, BRAWH2006395, BRAWH2008993, BRAWH2009393, BRAWH2010552, BRAWH3007441, BRAWH3009017, BRHIP2002722, BRHIP2003272, BRHIP2005271, BRHIP2005724, BRHIP2006617, BRHIP2008389, BRHIP2012360, BRHIP2017553, BRHIP2026877, BRHIP3000017, BRHIP3000240, BRHIP3008314, BRHIP3026052, BRTHA2018443, BRTHA3003000, CTONG2020374, CTONG2020378, CTONG2024031, CTONG3004726, FCBBF1000509, FEBRA2001990, FEBRA2006519, FEBRA2028516, HCHON2000743, IMR322001879, NT2RI2009583, OCBBF2006987, OCBBF2008144, OCBBF2030116, PERIC2007068, PUAEN2006335, SPLEN2039379, TESTI2015626, TESTI4000214, TESTI4001984, TESTI4008058, TESTI4013894, TESTI4025268, TESTI4025547, TESTI4026207, TESTI4032090, THYMU3000360, TLIVE2002046, TRACH3000134, UTERU2008040, UTERU2021820, UTERU2028734

[0304] These genes are involved in memory and dementia.

Genes Involved in Equilibrium Sense and Movement Function

[0305] The cerebellum is the center of equilibrium sense, muscular movement, and motor learning. This area is thought to be involved in motor control, and smooth movements are achieved unconsciously due to cerebellum action. Recent studies have elucidated that the cerebellum participates in not only simple movements but also in establishing higher-order movements such as reading and writing. Thus, genes whose expression levels differ between tissues of the whole brain and the cerebellum are expected to be involved in equilibrium sense or motor function, which can be useful for elucidating the molecular mechanism controlled by the brain. cDNA libraries derived from the cerebellum (BRACE) and from the whole tissues of a normal brain (BRAWH) were analyzed and compared (Table 7). Genes whose expression levels differed between the two were the 488 clones and 66 clones listed below.

[0306] ADRGL2009146, ADRGL2012038, ASTRO1000009, ASTRO2003960, BLADE1000176, BLADE2004089, BLADE2008398, BRACE1000186, BRACE1000258, BRACE1000533, BRACE1000572, BRACE2003639, BRACE2005457, BRACE2006319, BRACE2008594, BRACE2010489, BRACE2011747, BRACE2014306, BRACE2014475, BRACE2014657, BRACE2015058, BRACE2015314, BRACE2016981, BRACE2018762, BRACE2024627, BRACE2026836, BRACE2027258, BRACE2027970, BRACE2028970, BRACE2029112, BRACE2029849, BRACE2030326, BRACE2030341, BRACE2030884, BRACE2031154, BRACE2031389, BRACE2031527, BRACE2031531, BRACE2031899, BRACE2032044, BRACE2032329, BRACE2032385, BRACE2032538, BRACE2032823, BRACE2033720, BRACE2035381, BRACE2035441, BRACE2036005, BRACE2036096, BRACE2036830, BRACE2036834, BRACE2037847, BRACE2038114, BRACE2038329, BRACE2038551, BRACE2039249, BRACE2039327, BRACE2039475, BRACE2039734, BRACE2040138, BRACE2040325, BRACE2041009, BRACE2041200, BRACE2041264, BRACE2042550, BRACE2043142, BRACE2043248, BRACE2043349, BRACE2043665, BRACE2044286, BRACE2044816, BRACE2044949, BRACE2045300, BRACE2045428, BRACE2045596, BRACE2045772, BRACE2045947, BRACE2045954, BRACE2046251, BRACE2046295, BRACE2047011, BRACE2047350, BRACE2047377, BRACE2047385, BRACE3000071, BRACE3000697, BRACE3000787, BRACE3000840, BRACE3000973, BRACE3001002, BRACE3001217, BRACE3001391, BRACE3001595, BRACE3001754, BRACE3002298, BRACE3002390, BRACE3002508, BRACE3003004, BRACE3003192, BRACE3003595, BRACE3003698, BRACE3004058, BRACE3004113, BRACE3004150, BRACE3004358, BRACE3004435, BRACE3004772, BRACE3004783, BRACE3004843, BRACE3004880, BRACE3005145, BRACE3005225, BRACE3005430, BRACE3005499, BRACE3006185, BRACE3006226, BRACE3006462, BRACE3006872, BRACE3007322, BRACE3007472, BRACE3007480, BRACE3007559, BRACE3007625, BRACE3007642, BRACE3007767, BRACE3008036, BRACE3008092, BRACE3008137, BRACE3008384, BRACE3008720, BRACE3008772, BRACE3009090, BRACE3009237, BRACE3009297, BRACE3009377, BRACE3009574, BRACE3009701, BRACE3009708, BRACE3009724, BRACE3009747, BRACE3010397, BRACE3010428, BRACE3011271, BRACE3011421, BRACE3011505, BRACE3012364, BRACE3012930, BRACE3013119, BRACE3013576, BRACE3013740, BRACE3013780, BRACE3014005, BRACE3014068, BRACE3014231, BRACE3014317, BRACE3014807, BRACE3015027, BRACE3015121, BRACE3015262, BRACE3015521, BRACE3015894, BRACE3016884, BRACE3018308, BRACE3018963, BRACE3019055, BRACE3019084, BRACE3020194, BRACE3020286, BRACE3020594, BRACE3022769, BRACE3023912, BRACE3024073, BRACE3024659, BRACE3024662, BRACE3025153, BRACE3025457, BRACE3025531, BRACE3025630, BRACE3026008, BRACE3026075, BRACE3026735, BRACE3027242, BRACE3027326, BRACE3027478, BRACE3030103, BRACE3031838, BRACE3032983, BRACE3040856, BRACE3045033, BRALZ2011796, BRAMY2003008, BRAMY2005052, BRAMY2019300, BRAMY2019963, BRAMY2020058, BRAMY2030098, BRAMY2031317, BRAMY2036567, BRAMY2037823, BRAMY2039872, BRAMY2040592, BRAMY2044078, BRAMY2047420, BRAMY3002620, BRAMY3002803, BRAMY3004224, BRAMY3005091, BRAMY3005932, BRAMY4000229, BRAWH1000127, BRAWH2001395, BRAWH2001671, BRAWH2001940, BRAWH2001973, BRAWH2002560, BRAWH2002761, BRAWH2005315, BRAWH2007658, BRAWH2010000, BRAWH2010084, BRAWH2010536, BRAWH2012162, BRAWH2012326, BRAWH2013294, BRAWH2013871, BRAWH2014414, BRAWH2014645, BRAWH2014662, BRAWH2014876, BRAWH2014954, BRAWH2016221, BRAWH2016439, BRAWH2016702, BRAWH2016724, BRAWH3000078, BRAWH3000100, BRAWH3000314, BRAWH3000491, BRAWH3001326, BRAWH3001475, BRAWH3001891, BRAWH3002574, BRAWH3002600, BRAWH3002819, BRAWH3002821, BRAWH3003522, BRAWH3003555, BRAWH3003727, BRAWH3003801, BRAWH3003992, BRAWH3004453, BRAWH3004666, BRAWH3005132, BRAWH3005422, BRAWH3005912, BRAWH3005981, BRAWH3006548, BRAWH3006792, BRAWH3007221, BRAWH3007506, BRAWH3007592, BRAWH3007726, BRAWH3007783, BRAWH3008341, BRAWH3008697, BRAWH3008931, BRAWH3009297, BRCAN2009432, BRCAN2010376, BRCAN2015371, BRCAN2020710, BRCOC2003213, BRCOC2007034, BRCOC2014033, BRCOC2020142, BRHIP2000920, BRHIP2004359, BRHIP2005719, BRHIP2005752, BRHIP2007741, BRHIP2013699, BRHIP2014228, BRHIP2024146, BRHIP3000339, BRHIP3006683, BRHIP3007586, BRHIP3008313, BRHIP3008405, BRHIP3018797, BRSSN2000684, BRSSN2006892, BRSSN2011262, BRSSN2011738, BRSSN2014299, BRSTN2008052, BRSTN2010750, BRSTN2015015, BRSTN2016470, BRTHA1000311, BRTHA2008335, BRTHA2008955, BRTHA2011194, BRTHA3001721, BRTHA3002427, BRTHA3003490, BRTHA3008520, BRTHA3009090, BRTHA3017848, COLON2001721, CTONG2008233, CTONG2017500, CTONG2028124, CTONG3000657, CTONG3001123, CTONG3005813, CTONG3008894, CTONG3009328, DFNES2011499, FCBBF2001183, FCBBF3001977, FEBRA2006396, FEBRA2007544, FEBRA2007708, FEBRA2007801, FEBRA2008287, FEBRA2020886, FEBRA2021966, FEBRA2026984, FEBRA2028618, HCASM2007047, HCHON2000244, HCHON2000626, HCHON2001217, HCHON2002676, HCHON2005921, HCHON2006250, HEART1000074, HHDPC1000118, HLUNG2002465, IMR322000127, IMR322001380, IMR322002035, KIDNE2000665, KIDNE2006580, MESAN2006563, MESAN2012054, MESTC1000042, NB9N41000340, NESOP2001752, NOVAR2001783, NT2NE2006909, NT2RI2005166, NT2RI2008724, NT2RI2012659, NT2RI2014733, NT2RI2019751, NT2RI3002892, NT2RI3003382, NT2RI3004510, NT2RI3005724, NT2RI3006284, NT2RI3006673, NT2RI3007291, NT2RI3007543, NT2RI3008055, NT2RP7004123, NT2RP7005529, NT2RP7009147, NT2RP7010599, NT2RP7014005, NT2RP7017474, NTONG2005969, OCBBF2001794, OCBBF2003819, OCBBF2006005, OCBBF2006151, OCBBF2006764, OCBBF2007028, OCBBF2010140, OCBBF2020343, OCBBF2020741, OCBBF2021286, OCBBF2022351, OCBBF2024850, OCBBF2025527, OCBBF2028935, OCBBF2036743, OCBBF2038317, OCBBF3000483, OCBBF3007516, OCBBF3008230, PEBLM2004666, PERIC2000889, PLACE6001185, PUAEN2002489, PUAEN2005930, PUAEN2006701, PUAEN2007044, PUAEN2009655, SPLEN2010912, SPLEN2012624, SPLEN2027268, SPLEN2028914, SPLEN2031424, SPLEN2031547, SPLEN2034781, SPLEN2036932, SPLEN2037194, SYNOV2014400, SYNOV4002346, SYNOV4002883, SYNOV4007430, SYNOV4007671, SYNOV4008440, TESOP2002273, TESOP2002451, TESOP2002950, TESTI1000330, TESTI4000014, TESTI4000209, TESTI4000349, TESTI4001100, TESTI4001561, TESTI4006137, TESTI4008797, TESTI4009286, TESTI4010851, TESTI4011161, TESTI4013675, TESTI4013817, TESTI4014159, TESTI4014306, TESTI4014694, TESTI4021478, TESTI4022936, TESTI4024420, TESTI4027821, TESTI4037156, TESTI4046819, THYMU2001090, THYMU2016523, THYMU2023967, THYMU2030264, THYMU2033308, THYMU2035735, THYMU2039315, THYMU2039780, THYMU3001083, THYMU3001234, THYMU3003309, THYMU3006485, THYMU3008171, TKIDN2009641, TKIDN2009889, TKIDN2015788, TRACH1000205, TRACH2001549, TRACH2005811, TRACH2006049, TRACH2007834, TRACH2008300, TRACH2025535, TRACH3001427, TRACH3002192, TRACH3004721, TRACH3005294, TRACH3006038, TRACH3006412, TRACH3007479, TRACH3008093, TRACH3009455, TUTER2000904, UTERU2002410, UTERU2006115, UTERU2007520, UTERU2019706, UTERU2023039, UTERU2026203, UTERU3000226, UTERU3001572, UTERU3005230, UTERU3005460, UTERU3005970, UTERU3006308, UTERU3007419, UTERU3007640, UTERU3007913, UTERU3009871

[0307] ADRGL2000042, BLADE2006830, BRACE2002589, BRACE2003609, BRACE2009318, BRACE2011677, BRACE2029396, BRACE2037299, BRACE2039823, BRACE2039832, BRACE2043105, BRACE3001058, BRACE3001113, BRACE3003026, BRACE3003053, BRACE3009127, BRACE3010076, BRACE3015829, BRACE3021148, BRAMY3004800, BRAWH1000369, BRAWH2006207, BRAWH2006395, BRAWH2008993, BRAWH2009393, BRAWH2010552, BRAWH3007441, BRAWH3009017, BRCOC2019841, BRHIP2005271, BRHIP3000017, BRHIP3000240, BRTHA2018443, BRTHA3003000, CTONG2020374, CTONG2020378, CTONG2024031, FCBBF1000509, FEBRA2001990, FEBRA2006519, FEBRA2028516, HCHON2000743, IMR322001879, NT2RI2009583, NT2RP8000521, OCBBF2008144, OCBBF2011669, PERIC2007068, PUAEN2006335, SPLEN2039379, SYNOV2021953, TESTI2015626, TESTI4001984, TESTI4008058, TESTI4013894, TESTI4025268, TESTI4032090, THYMU2004284, THYMU2040925, THYMU3000360, TLIVE2002046, TRACH3000134, UTERU2008040, UTERU2011220, UTERU2021820, UTERU2028734

[0308] These genes are involved in equilibrium sense or motor function.

Genes Involved in Signaling from Sensory Organs

[0309] The thalamus is an area which comprises many neurons strongly connected to the cerebrum, and which transmits sensory information from the spinal cord or such to the responsible area of the cerebrum. The thalamus also controls the direction of movement from the cerebrum. For example, the thalamus resolves vision into the elements of size, shape, and color, and resolves sound into volume and sweetness or harshness to the ear, and then transmits this information to the sensory area of the cerebral cortex. Thus, genes whose expression levels differ between tissues of the whole brain and the thalamus are expected to be involved in signaling from sensory organs. These genes can be used to elucidate the molecular mechanism underlying signaling controlled by the brain. cDNA libraries derived from the thalamus (BRTHA) and from whole tissues of a normal brain (BRAWH) were analyzed and compared (Table 8). Genes whose expression levels differed between the two were the 412 clones and 56 clones listed below.

[0310] ASTRO1000009, ASTRO3000482, BLADE2008398, BRACE1000186, BRACE1000258, BRACE1000533, BRACE2005457, BRACE2010489, BRACE2014306, BRACE2014657, BRACE2015058, BRACE2031154, BRACE2035381, BRACE2044286, BRACE2045954, BRACE3000787, BRACE3003192, BRACE3005499, BRACE3007480, BRACE3008384, BRACE3009237, BRACE3009724, BRACE3009747, BRACE3010397, BRACE3010428, BRACE3011271, BRACE3011421, BRACE3012364, BRACE3022769, BRACE3026735, BRACE3027478, BRACE3031838, BRALZ2011796, BRAMY2003008, BRAMY2005052, BRAMY2019300, BRAMY2019963, BRAMY2028914, BRAMY2031317, BRAMY2036567, BRAMY2037823, BRAMY2040592, BRAMY2044078, BRAMY3002803, BRAMY3004224, BRAMY3005091, BRAMY4000229, BRAWH1000127, BRAWH2001395, BRAWH2001671, BRAWH2001940, BRAWH2001973, BRAWH2002560, BRAWH2002761, BRAWH2005315, BRAWH2007658, BRAWH2010000, BRAWH2010084, BRAWH2010536, BRAWH2012162, BRAWH2012326, BRAWH2013294, BRAWH2013871, BRAWH2014414, BRAWH2014645, BRAWH2014662, BRAWH2014876, BRAWH2014954, BRAWH2016221, BRAWH2016439, BRAWH2016702, BRAWH2016724, BRAWH3000078, BRAWH3000100, BRAWH3000314, BRAWH3000491, BRAWH3001326, BRAWH3001475, BRAWH3001891, BRAWH3002574, BRAWH3002600, BRAWH3002819, BRAWH3002821, BRAWH3003522, BRAWH3003555, BRAWH3003727, BRAWH3003801, BRAWH3003992, BRAWH3004453, BRAWH3004666, BRAWH3005132, BRAWH3005422, BRAWH3005912, BRAWH3005981, BRAWH3006548, BRAWH3006792, BRAWH3007221, BRAWH3007506, BRAWH3007592, BRAWH3007726, BRAWH3007783, BRAWH3008341, BRAWH3008697, BRAWH3008931, BRAWH3009297, BRCAN2006297, BRCOC2003213, BRCOC2014033, BRCOC2020142, BRHIP2000819, BRHIP2000920, BRHIP2005719, BRHIP2007741, BRHIP2009474, BRHIP2013699, BRHIP2014228, BRHIP2022221, BRHIP2024146, BRHIP3000339, BRHIP3006683, BRHIP3007586, BRHIP3008405, BRHIP3018797, BRSSN2000684, BRSSN2008549, BRSSN2008797, BRSSN2011738, BRSSN2014299, BRSTN2004863, BRSTN2008052, BRSTN2015015, BRSTN2016470, BRTHA1000311, BRTHA2000855, BRTHA2001462, BRTHA2002115, BRTHA2002281, BRTHA2002376, BRTHA2002442, BRTHA2002493, BRTHA2002608, BRTHA2002808, BRTHA2003030, BRTHA2003110, BRTHA2003116, BRTHA2003461, BRTHA2004821, BRTHA2004978, BRTHA2005579, BRTHA2005956, BRTHA2006075, BRTHA2006146, BRTHA2006194, BRTHA2007122, BRTHA2007422, BRTHA2007603, BRTHA2008316, BRTHA2008335, BRTHA2008527, BRTHA2008535, BRTHA2008955, BRTHA2009311, BRTHA2009846, BRTHA2009972, BRTHA2010073, BRTHA2010608, BRTHA2010884, BRTHA2010907, BRTHA2011194, BRTHA2011351, BRTHA2011500, BRTHA2011641, BRTHA2012392, BRTHA2012562, BRTHA2012980, BRTHA2013262, BRTHA2013460, BRTHA2013707, BRTHA2014792, BRTHA2014828, BRTHA2015406, BRTHA2015478, BRTHA2015696, BRTHA2015878, BRTHA2016215, BRTHA2016496, BRTHA2016543, BRTHA2017353, BRTHA2017985, BRTHA2018165, BRTHA2018344, BRTHA2018591, BRTHA2018624, BRTHA2018707, BRTHA2019014, BRTHA2019022, BRTHA2019048, BRTHA3000273, BRTHA3000297, BRTHA3000633, BRTHA3001721, BRTHA3002401, BRTHA3002427, BRTHA3002933, BRTHA3003074, BRTHA3003343, BRTHA3003449, BRTHA3003474, BRTHA3003490, BRTHA3004475, BRTHA3005046, BRTHA3006856, BRTHA3007113, BRTHA3007148, BRTHA3007319, BRTHA3007769, BRTHA3008143, BRTHA3008310, BRTHA3008386, BRTHA3008520, BRTHA3008778, BRTHA3009037, BRTHA3009090, BRTHA3009291, BRTHA3010366, BRTHA3013884, BRTHA3015815, BRTHA3015910, BRTHA3016845, BRTHA3016917, BRTHA3017047, BRTHA3017589, BRTHA3017848, BRTHA3018514, BRTHA3018617, BRTHA3018656, BRTHA3019105, COLON2001721, CTONG1000087, CTONG2008233, CTONG2017500, CTONG2019788, CTONG2023021, CTONG2028124, CTONG3000657, CTONG3001123, CTONG3008894, CTONG3009028, CTONG3009239, CTONG3009328, FCBBF2001183, FCBBF3001977, FCBBF3021576, FEBRA2007544, FEBRA2007801, FEBRA2008287, FEBRA2008360, FEBRA2020886, FEBRA2028618, HCASM2007047, HCHON2000028, HCHON2000212, HCHON2000244, HCHON2000626, HCHON2001084, HCHON2001217, HCHON2002676, HCHON2005921, HCHON2006250, HEART1000074, HEART2007031, HHDPC1000118, HLUNG2001996, HLUNG2002465, IMR322000127, IMR322001380, IMR322002035, KIDNE2002252, KIDNE2005543, KIDNE2006580, KIDNE2011314, MESAN2006563, MESAN2012054, MESTC1000042, NOVAR2001783, NT2NE2006909, NT2RI2008724, NT2RI2012659, NT2RI2014733, NT2RI3002842, NT2RI3002892, NT2RI3005403, NT2RI3006284, NT2RI3006673, NT2RI3007543, NT2RI3008055, NT2RP7004123, NT2RP7005529, NT2RP7009147, NT2RP7014005, NT2RP7017474, NTONG2005969, NTONG2008088, OCBBF2001794, OCBBF2006005, OCBBF2006764, OCBBF2007028, OCBBF2010140, OCBBF2020639, OCBBF2021286, OCBBF2024719, OCBBF2024850, OCBBF2028935, OCBBF2036743, OCBBF2038317, OCBBF3000483, OCBBF3008230, PEBLM2004666, PLACE6001185, PUAEN2002489, PUAEN2005930, PUAEN2006701, PUAEN2007044, PUAEN2009655, RECTM2001347, SKMUS2000757, SPLEN2006122, SPLEN2010912, SPLEN2025491, SPLEN2028914, SPLEN2031424, SPLEN2031547, SPLEN2032154, SPLEN2034781, SPLEN2036821, SPLEN2036932, SYNOV1000374, SYNOV2014400, SYNOV4002346, SYNOV4002883, SYNOV4007430, SYNOV4007671, SYNOV4008440, TESOP2002451, TESTI2049246, TESTI4000014, TESTI4000209, TESTI4001100, TESTI4002290, TESTI4006137, TESTI4008797, TESTI4009286, TESTI4010851, TESTI4012702, TESTI4013817, TESTI4014159, TESTI4014694, TESTI4021478, TESTI4022936, TESTI4024420, TESTI4027821, TESTI4037156, THYMU2001090, THYMU2025707, THYMU2032825, THYMU2033308, THYMU2033787, THYMU2035735, THYMU2039315, THYMU2040975, THYMU3001234, THYMU3001379, THYMU3004835, THYMU3008171, TKIDN2009641, TKIDN2009889, TKIDN2015788, TLIVE2001327, TRACH1000205, TRACH2001549, TRACH2005811, TRACH2006049, TRACH2007834, TRACH2008300, TRACH2023299, TRACH2025535, TRACH3001427, TRACH3002192, TRACH3004068, TRACH3004721, TRACH3005294, TRACH3007479, TRACH3008093, TRACH3009455, TSTOM1000135, TUTER2000904, UTERU2002410, UTERU2006115, UTERU2019706, UTERU2019940, UTERU2023039, UTERU2023175, UTERU2026203, UTERU2030280, UTERU3000899, UTERU3001571, UTERU3001572, UTERU3004709, UTERU3005230, UTERU3005907, UTERU3007640, UTERU3009871

[0311] ADRGL2000042, BLADE2006830, BRACE2003609, BRAMY3004800, BRAWH1000369, BRAWH2006207, BRAWH2006395, BRAWH2008993, BRAWH2009393, BRAWH2010552, BRAWH3007441, BRAWH3009017, BRHIP2005271, BRHIP3000017, BRTHA2002133, BRTHA2002702, BRTHA2007060, BRTHA2010033, BRTHA2011321, BRTHA2013426, BRTHA2013610, BRTHA2016318, BRTHA2017364, BRTHA2017972, BRTHA2018011, BRTHA2018443, BRTHA3000296, BRTHA3003000, BRTHA3008826, CTONG2008721, CTONG2020374, CTONG2020378, CTONG2024031, FCBBF1000509, FEBRA2001990, FEBRA2006519, FEBRA2028516, HCHON2000743, HSYRA2005628, IMR322001879, NT2RI2009583, OCBBF2008144, PERIC2007068, PUAEN2006335, SPLEN2016932, SPLEN2039379, SYNOV2006620, TESTI4001984, TESTI4008058, TESTI4025268, TESTI4032090, THYMU3000360, TLIVE2002046, TRACH3000134, UTERU2021820, UTERU2028734

[0312] These genes are involved in signaling from sensory organs.

Genes Involved in Emotional Reaction

[0313] The amygdala is the center of emotion in the brain. Information passing through the amygdala induces an emotional reaction, for example, panic or fear. When a strong fear reaction is produced due to the emotional evaluation of stimulus in the amygdala, the amygdala transmits an alert signal to each area of the brain. This results in various reactions such as sweating palms, palpitation, elevated blood pressure, and rapid secretion of adrenaline. In other words, the amygdala transmits signals which cause the body to be on the alert and is a tissue involved in a kind of defense instinct. Thus, genes whose expression levels differ between tissues of the whole brain and the amygdala are expected to be involved in emotional reaction. Such genes can be used to elucidate the molecular mechanism underlying emotional reaction, fear, or panic. cDNA libraries derived from the amygdale (BRAMY) and from whole tissues of a normal brain (BRAWH) were analyzed and compared (Table 9). Genes whose expression levels differed between the two were the 383 clones and 55 clones listed below.

[0314] ASTRO1000009, BLADE2008398, BRACE1000186, BRACE1000258, BRACE1000533, BRACE2005457, BRACE2006319, BRACE2010489, BRACE2014657, BRACE2015058, BRACE2027258, BRACE2030341, BRACE2031389, BRACE2035381, BRACE2044286, BRACE2045954, BRACE3000787, BRACE3000973, BRACE3003192, BRACE3005499, BRACE3007480, BRACE3008036, BRACE3009237, BRACE3009724, BRACE3009747, BRACE3010428, BRACE3011271, BRACE3011421, BRACE3012364, BRACE3013780, BRACE3022769, BRACE3026735, BRACE3027478, BRACE3031838, BRALZ2011796, BRAMY2001473, BRAMY2003008, BRAMY2004771, BRAMY2005052, BRAMY2017528, BRAMY2019300, BRAMY2019963, BRAMY2019985, BRAMY2020058, BRAMY2020270, BRAMY2021498, BRAMY2028856, BRAMY2028914, BRAMY2029602, BRAMY2030098, BRAMY2030109, BRAMY2030702, BRAMY2030703, BRAMY2030799, BRAMY2031317, BRAMY2031377, BRAMY2031442, BRAMY2032014, BRAMY2032242, BRAMY2032317, BRAMY2033003, BRAMY2033116, BRAMY2033267, BRAMY2033594, BRAMY2034185, BRAMY2034920, BRAMY2034993, BRAMY2036387, BRAMY2036396, BRAMY2036567, BRAMY2036699, BRAMY2036913, BRAMY2037823, BRAMY2038100, BRAMY2038484, BRAMY2038846, BRAMY2038904, BRAMY2039872, BRAMY2040478, BRAMY2040592, BRAMY2041261, BRAMY2041378, BRAMY2041542, BRAMY2042612, BRAMY2042641, BRAMY2042760, BRAMY2042918, BRAMY2044078, BRAMY2044246, BRAMY2045036, BRAMY2046478, BRAMY2046742, BRAMY2046989, BRAMY2047169, BRAMY2047420, BRAMY2047676, BRAMY2047746, BRAMY2047751, BRAMY2047765, BRAMY2047884, BRAMY3000206, BRAMY3000213, BRAMY3001401, BRAMY3001794, BRAMY3002312, BRAMY3002620, BRAMY3002803, BRAMY3002805, BRAMY3004224, BRAMY3004672, BRAMY3004900, BRAMY3004919, BRAMY3005091, BRAMY3005932, BRAMY3006297, BRAMY3007206, BRAMY3007609, BRAMY3008466, BRAMY3008505, BRAMY3008650, BRAMY3009811, BRAMY3010411, BRAMY4000095, BRAMY4000229, BRAMY4000277, BRAWH1000127, BRAWH2001395, BRAWH2001671, BRAWH2001940, BRAWH2001973, BRAWH2002560, BRAWH2002761, BRAWH2005315, BRAWH2007658, BRAWH2010000, BRAWH2010084, BRAWH2010536, BRAWH2012162, BRAWH2012326, BRAWH2013294, BRAWH2013871, BRAWH2014414, BRAWH2014645, BRAWH2014662, BRAWH2014876, BRAWH2014954, BRAWH2016221, BRAWH2016439, BRAWH2016702, BRAWH2016724, BRAWH3000078, BRAWH3000100, BRAWH3000314, BRAWH3000491, BRAWH3001326, BRAWH3001475, BRAWH3001891, BRAWH3002574, BRAWH3002600, BRAWH3002819, BRAWH3002821, BRAWH3003522, BRAWH3003555, BRAWH3003727, BRAWH3003801, BRAWH3003992, BRAWH3004453, BRAWH3004666, BRAWH3005132, BRAWH3005422, BRAWH3005912, BRAWH3005981, BRAWH3006548, BRAWH3006792, BRAWH3007221, BRAWH3007506, BRAWH3007592, BRAWH3007726, BRAWH3007783, BRAWH3008341, BRAWH3008697, BRAWH3008931, BRAWH3009297, BRCAN2014881, BRCAN2017717, BRCOC2000670, BRCOC2003213, BRCOC2014033, BRCOC2020142, BRHIP2000920, BRHIP2005719, BRHIP2007741, BRHIP2014228, BRHIP2024146, BRHIP2026061, BRHIP3000339, BRHIP3001283, BRHIP3006683, BRHIP3007586, BRHIP3008405, BRHIP3018797, BRSSN2000684, BRSSN2004496, BRSSN2011738, BRSSN2014299, BRSTN2008052, BRSTN2010750, BRSTN2015015, BRSTN2016470, BRTHA1000311, BRTHA2008335, BRTHA2011641, BRTHA3001721, BRTHA3002427, BRTHA3003490, BRTHA3004475, BRTHA3008520, BRTHA3009090, BRTHA3017848, COLON2001721, CTONG1000087, CTONG2008233, CTONG2017500, CTONG2028124, CTONG3000657, CTONG3001123, CTONG3008894, CTONG3009239, CTONG3009328, FCBBF2001183, FCBBF3001977, FEBRA2007544, FEBRA2007801, FEBRA2008287, FEBRA2010719, FEBRA2020886, FEBRA2025427, FEBRA2028618, HCASM2007047, HCHON2000244, HCHON2000626, HCHON2001217, HCHON2002676, HCHON2006250, HCHON2008112, HEART1000074, HHDPC1000118, HLUNG2002465, HSYRA2009075, IMR322000127, IMR322001380, IMR322002035, KIDNE2000665, KIDNE2006580, MESAN2006563, MESAN2012054, MESAN2015515, MESTC1000042, NOVAR2001783, NT2NE2005890, NT2NE2006909, NT2RI2008724, NT2RI2012659, NT2RI2014733, NT2RI3001515, NT2RI3002892, NT2RI3005724, NT2RI3006284, NT2RI3006673, NT2RI3007543, NT2RI3008055, NT2RP7005529, NT2RP7009147, NT2RP7014005, NT2RP7017474, NTONG2005969, OCBBF1000254, OCBBF2001794, OCBBF2006005, OCBBF2006764, OCBBF2007028, OCBBF2007114, OCBBF2010140, OCBBF2021286, OCBBF2023162, OCBBF2024850, OCBBF2028935, OCBBF2035214, OCBBF2036743, OCBBF2038317, OCBBF3000483, OCBBF3008230, PEBLM2004666, PERIC2000889, PERIC2003720, PLACE6001185, PUAEN2005930, PUAEN2006701, PUAEN2007044, PUAEN2009174, PUAEN2009655, SKNMC2002402, SKNSH2000482, SPLEN2001599, SPLEN2002467, SPLEN2028914, SPLEN2029912, SPLEN2031424, SPLEN2031547, SPLEN2034781, SPLEN2036932, SPLEN2038345, SYNOV2014400, SYNOV4002346, SYNOV4002883, SYNOV4007430, SYNOV4007671, SYNOV4008440, TESOP2002451, TESTI2009474, TESTI4000014, TESTI4000209, TESTI4001100, TESTI4006137, TESTI4008797, TESTI4009286, TESTI4010851, TESTI4013817, TESTI4014159, TESTI4014694, TESTI4021478, TESTI4022936, TESTI4024420, TESTI4027821, TESTI4029836, TESTI4037156, TESTI4037188, THYMU2001090, THYMU2014353, THYMU2033308, THYMU2035735, THYMU2037226, THYMU2039315, THYMU3001234, THYMU3001379, THYMU3004835, THYMU3008171, TKIDN2009641, TKIDN2009889, TKIDN2015788, TLIVE2004320, TRACH1000205, TRACH2001549, TRACH2001684, TRACH2005811, TRACH2006049, TRACH2007834, TRACH2008300, TRACH2025344, TRACH2025535, TRACH2025911, TRACH3001427, TRACH3002192, TRACH3004068, TRACH3004721, TRACH3005294, TRACH3007479, TRACH3008093, TRACH3009455, TUTER2000904, UTERU2002410, UTERU2004929, UTERU2006115, UTERU2007520, UTERU2019706, UTERU2023039, UTERU2026203, UTERU3001572, UTERU3001766, UTERU3005230, UTERU3007640, UTERU3009517, UTERU3009871

[0315] ADRGL2000042, BLADE2006830, BRACE2003609, BRACE2039823, BRAMY2019111, BRAMY2035070, BRAMY2035449, BRAMY2035718, BRAMY2038516, BRAMY2039341, BRAMY2040159, BRAMY2041434, BRAMY2045471, BRAMY3004800, BRAWH1000369, BRAWH2006207, BRAWH2006395, BRAWH2008993, BRAWH2009393, BRAWH2010552, BRAWH3007441, BRAWH3009017, BRHIP2005271, BRHIP3000017, BRTHA2018443, BRTHA3003000, CTONG2020374, CTONG2020378, CTONG2024031, FCBBF1000509, FEBRA2001990, FEBRA2006519, FEBRA2028516, HCHON2000508, HCHON2000743, IMR322001879, NT2RI2009583, OCBBF2008144, PERIC2007068, PUAEN2006335, SPLEN2039379, TESTI2015626, TESTI2026647, TESTI4001984, TESTI4008058, TESTI4013894, TESTI4025268, TESTI4032090, THYMU3000360, TKIDN2018926, TLIVE2002046, TRACH3000134, UTERU2008040, UTERU2021820, UTERU2028734

[0316] These genes are involved in emotional reaction.

Cancer-Related Genes

[0317] Cancer tissues are assumed to express a distinct set of genes distinct from normal tissues, and thus expression of these genes can contribute to carcinogenesis in tissues and cells. Thus, genes whose expression patterns in cancer tissues differ from those in normal tissues are cancer-related genes. A search was carried out for genes whose expression levels in cancer tissues differed from those in normal tissues.

[0318] The result of comparative analysis of cDNA libraries derived from breast tumor (TBAES) and normal breast (BEAST) (Table 10) showed that the genes whose expression levels differed between the two were the 35 and four clones listed below.

[0319] ASTRO2002842, BRACE3016884, BRSSN2011262, BRTHA2008335, HCHON2000244, HCHON2006250, HEART1000010, MESAN2012054, NT2RP7000466, NT2RP7009147, OCBBF2021020, PEBLM2002749, PEBLM2004666, SPLEN2001599, SPLEN2031547, STOMA1000189, TBAES2001171, TBAES2001220, TBAES2001229, TBAES2001258, TBAES2001492, TBAES2001751, TBAES2002197, TBAES2003550, TBAES2004055, TBAES2005157, TBAES2005543, TBAES2006568, TBAES2007964, TESTI4000014, TESTI4037156, TRACH3002192, TRACH3004068, TSTOM2000553, UTERU2002410 BRAWH2006395, NT2RI2009583, STOMA2004893, TBAES2000932

[0320] The result of comparative analysis of cDNA libraries derived from cervical tumor (TCERX) and normal cervical duct (CERVX) (Table 11) showed that the genes whose expression levels differed between the two were twelve and two clones listed below.

BLADE2007666, BRAMY2047420, BRCAN2007409, BRSTN2016470, CERVX1000042, CERVX2002006, MESAN2006563, PROST2018090, TCERX2000613, TESTI4037156, THYMU2031341, UTERU2004688 CERVX2002013, NT2RI2009583

[0321] The result of comparative analysis of cDNA libraries derived from colon tumor (TCOLN) and normal colon (COLON) (Table 12) showed that the genes whose expression levels differed between the two were the 24 and four clones listed below.

[0322] BRACE3015027, BRAMY2040592, BRSTN2016470, COLON1000030, COLON2000470, COLON2000568, COLON2001721, COLON2002443, COLON2002520, COLON2003043, COLON2004478, COLON2005126, COLON2005772, COLON2006282, COLON2009499, OCBBF2028935, PLACE7000514, RECTM2000433, SYNOV4007671, TCOLN2002278, TESTI2052693, TESTI4037156, THYMU2031368, TRACH2025535 CTONG1000113, NT2RI2009583, NT2RI2018448, TESTI2015626

[0323] The result of comparative analysis of cDNA libraries derived from esophageal tumor (TESOP) and normal esophagus (NESOP) (Table 13) showed that the genes whose expression levels differed between the two were the 56 and ten clones listed below.

[0324] BRACE2030341, BRAMY2047420, BRHIP2003917, BRTHA2003461, CTONG2013178, D3OST3000169, FEBRA2025427, HCHON2000244, HHDPC1000118, NESOP2000744, NESOP2001433, NESOP2001656, NESOP2001694, NESOP2001752, NESOP2002738, NT2RI3006284, NT2RP7009147, PLACE6019932, SYNOV2005216, TESOP1000127, TESOP2000801, TESOP2001122, TESOP2001166, TESOP2001345, TESOP2001605, TESOP2001818, TESOP2001849, TESOP2001865, TESOP2001953, TESOP2002273, TESOP2002451, TESOP2002489, TESOP2002539, TESOP2002950, TESOP2003273, TESOP2003753, TESOP2004114, TESOP2005285, TESOP2005485, TESOP2005579, TESOP2006041, TESOP2006060, TESOP2006068, TESOP2006670, TESOP2006746, TESOP2007052, TESOP2007262, TESOP2007636, TESOP2007688, TESOP2009121, TESOP2009555, TESTI4009286, TESTI4010851, THYMU2040975, TRACH2005811, UTERU2023175 CTONG2016942, NT2RI2009583, TESOP2000390, TESOP2001796, TESOP2005199, TESOP2006398, TESOP2006865, TESOP2007384, TESTI2015626, TRACH2000862

[0325] The result of comparative analysis of cDNA libraries derived from kidney tumor (TKIDN) and normal kidney (KIDNE) (Table 14) showed that the genes whose expression levels differed between the two were the 96 and 13 clones listed below.

[0326] ASTRO2018373, BRACE1000186, BRACE2014306, BRACE2015058, BRACE2016981, BRACE2043665, BRACE3008036, BRACE3010428, BRACE3022769, BRAMY2019963, BRAMY2044078, BRAWH1000127, BRAWH2001395, BRAWH2001671, BRAWH2013294, BRAWH2014645, BRHIP2024146, BRHIP3000339, BRSSN2000684, BRSSN2004719, BRSSN2018581, BRSTN2016470, BRTHA1000311, BRTHA3002427, CTONG1000087, CTONG2028124, CTONG3000657, CTONG3008894, FCBBF2001183, FEBRA2008287, HCASM2001301, HCHON2000028, HCHON2000244, HEART1000074, HHDPC1000118, HSYRA2008376, KIDNE1000064, KIDNE2000665, KIDNE2000722, KIDNE2000832, KIDNE2000846, KIDNE2001361, KIDNE2001847, KIDNE2002252, KIDNE2002991, KIDNE2003837, KIDNE2005543, KIDNE2006580, KIDNE2010264, KIDNE2011314, KIDNE2011532, KIDNE2011635, KIDNE2012945, KIDNE2013095, NESOP2001656, NTONG2005969, PEBLM2004666, SKMUS2000757, STOMA1000189, SYNOV4007671, TBAES2001258, TESTI4000014, TESTI4001100, TESTI4012702, TESTI4046819, THYMU2032014, TKIDN2000701, TKIDN2002424, TKIDN2002632, TKIDN2003044, TKIDN2004386, TKIDN2005934, TKIDN2005947, TKIDN2006525, TKIDN2006852, TKIDN2007667, TKIDN2009092, TKIDN2009641, TKIDN2009889, TKIDN2010934, TKIDN2012824, TKIDN2013287, TKIDN2014757, TKIDN2014771, TKIDN2015263, TKIDN2015788, TKIDN2016309, TKIDN2019116, TRACH2001443, TRACH2001684, TRACH2007834, TRACH2008300, TRACH3001427, UTERU2002410, UTERU2023175, UTERU3001572

BLADE2006830, BRALZ2017844, CTONG2028758, FCBBF1000509, FEBRA2001990, FEBRA2028516, HCHON2000508, MESAN2005303, NT2RI2009583, TESTI2015626, TKIDN2008778, TKIDN2012771, TKIDN2018926

[0327] The result of comparative analysis of cDNA libraries derived from liver tumor (TLIVE) and normal liver (LIVER) (Table 15) showed that the genes whose expression levels differed between the two were the 35 and six clones listed below.

[0328] BRCAN2018935, BRSTN2016470, BRTHA2012980, BRTHA3002427, CTONG2028124, LIVER2007415, NT2RI2008724, SPLEN2012624, SPLEN2033098, TESOP2002451, TLIVE2000023, TLIVE2001327, TLIVE2001828, TLIVE2001927, TLIVE2002336, TLIVE2002338, TLIVE2002690, TLIVE2003197, TLIVE2003225, TLIVE2003381, TLIVE2003970, TLIVE2004110, TLIVE2004320, TLIVE2004601, TLIVE2005180, TLIVE2006236, TLIVE2006529, TLIVE2007132, TLIVE2007528, TLIVE2007816, TLIVE2008083, TLIVE2008229, TLIVE2009541, UTERU2002410, UTERU2005621

LIVER2000247, NT2RI2009583, TESTI2015626, TLIVE2001684, TLIVE2002046, TLIVE2007607

[0329] The result of comparative analysis of cDNA libraries derived from lung tumor (TLUNG) and normal lung (HLUNG) (Table 16) showed that the genes whose expression levels differed between the two were the 47 and nine clones listed below.

[0330] BRCAN2021028, BRHIP2000819, BRSTN2016470, CTONG1000087, CTONG2028124, HCHON2006250, HEART1000074, HLUNG1000017, HLUNG2000014, HLUNG2001996, HLUNG2002465, HLUNG2002958, HLUNG2003003, HLUNG2003872, HLUNG2010464, HLUNG2011041, HLUNG2011298, HLUNG2012049, HLUNG2012287, HLUNG2012727, HLUNG2013204, HLUNG2013304, HLUNG2013622, HLUNG2013851, HLUNG2014262, HLUNG2014288, HLUNG2014449, HLUNG2015617, HLUNG2017350, HLUNG2017546, HLUNG2017806, HLUNG2019058, HSYRA2008376, KIDNE2012945, NT2RI2003993, NT2RP7013795, OCBBF3000483, SPLEN2028914, SPLEN2031547, SYNOV4007671, TESOP1000127, TESTI2003573, TESTI4000014, TESTI4037156, TRACH2005811, TRACH3004068, UTERU2005621

FEBRA2028516, HCHON2000508, HLUNG2013350, HLUNG2015418, HLUNG2015548, HLUNG2016862, NT2RI2009583, TESTI2015626, TRACH2019672

[0331] The result of comparative analysis of cDNA libraries derived from ovary tumor (TOVER) and normal ovary (NOVER) (Table 17A) showed the genes whose expression levels differed between the two were the 16 clones listed below.

CTONG2019788, FEBRA2014213, HLUNG2017546, NOVAR2000136, NOVAR2000710, NOVAR2000962, NOVAR2001108, NOVAR2001783, OCBBF3007516, TESTI2052693, TOVAR2000649, TOVAR2001281, TOVAR2001730, TOVAR2002247, TOVAR2002549, TRACH3004068

[0332] The result of comparative analysis of cDNA libraries derived from ovary tumor (TOVER) and normal ovary (NOVER) (Table 17B) showed the gene whose expression level was different between the two was the one clone described below. There was no difference in expression levels of this gene between normal and diseased ovaries, however there was a significant difference in the expression level in both tumorous and normal ovaries when compared with in other tissues. Thus, this gene is an ovary-specific gene and can be used as a diagnostic marker due to its association with disease.

TESTI2015626

[0333] The result of comparative analysis of cDNA libraries derived from stomach tumor (TSTOM) and normal stomach (STOMA) (Table 18) showed that the genes whose expression levels differed between the two were the 31 and five clones listed below.

[0334] BRACE2024627, BRAWH2014645, BRCAN2028355, BRHIP2000819, BRSTN2016470, BRTHA3003490, COLON2002443, HEART1000010, HLUNG2002465, KIDNE2001847, NT2RP7000466, PUAEN2006328, SMINT2001818, STOMA1000189, STOMA2003444, STOMA2004294, STOMA2004925, STOMA2008546, SYNOV4007671, TESTI4000014, TESTI4010851, THYMU2035735, TRACH2001549, TRACH2005811, TRACH2025535, TSTOM1000135, TSTOM2000442, TSTOM2000553, TSTOM2002672, UTERU2006115, UTERU3001572

FEBRA2008692, NT2RI2009583, STOMA2003158, STOMA2004893, TESTI2015626

[0335] The result of comparative analysis of cDNA libraries derived from uterine tumor (TUTER) and normal uterus (UTERU) (Table 19) showed that the genes whose expression levels differed between the two were the 244 and 34 clones listed below.

[0336] BNGH42007788, BRACE1000186, BRACE2030341, BRACE3008772, BRACE3009747, BRACE3010428, BRACE3027478, BRALZ2017359, BRAWH2014645, BRAWH3000314, BRAWH3001326, BRAWH3002574, BRAWH3002821, BRAWH3003727, BRAWH3007592, BRCAN2009432, BRCAN2028355, BRHIP3007586, BRHIP3008344, BRHIP3008565, BRSSN2006892, BRSTN2001067, BRSTN2016470, BRTHA2010608, BRTHA3003074, CTONG1000087, CTONG1000467, CTONG2028124, CTONG3001123, CTONG3008894, CTONG3009028, CTONG3009239, FCBBF3004847, FEBRA2026984, FEBRA2028618, HCHON2000244, HCHON2000418, HCHON2000626, HCHON2001084, HCHON2001217, HCHON2005921, HCHON2006250, HCHON2008444, HLUNG2003003, HSYRA2008376, KIDNE2002252, MESAN2014295, NOVAR2000710, NT2RI2008724, NT2RI2014247, NT2RI2014733, NT2RI3002892, NT2RI3005724, NT2RI3006284, NT2RI3006340, NT2RI3006673, NT2RI3007291, NT2RI3007543, NT2RP7004123, NT2RP7005529, NT2RP7009147, NT2RP7017474, OCBBF2007028, OCBBF2020741, OCBBF2024850, OCBBF2036743, OCBBF3000483, PLACE6001185, PLACE7000514, PUAEN2007044, PUAEN2009655, SKNSH2000482, SPLEN2006122, SPLEN2016554, SPLEN2031547, SPLEN2036932, STOMA1000189, STOMA2004925, SYNOV2017055, SYNOV4001395, SYNOV4002346, SYNOV4008440, TCERX2000613, TESOP2002273, TESTI4000014, TESTI4008797, TESTI4009286, TESTI4012702, TESTI4013675, TESTI4014159, TESTI4018886, TESTI4029671, TESTI4037156, THYMU2008725, THYMU2031890, THYMU2033070, THYMU2035735, THYMU3001472, TRACH1000205, TRACH2001443, TRACH2001549, TRACH2005811, TRACH2007834, TRACH2008300, TRACH3002192, TRACH3003379, TRACH3004068, TRACH3004721, TRACH3007479, TUTER1000122, TUTER2000425, TUTER2000904, TUTER2000916, TUTER2001387, TUTER2002729, UTERU1000024, UTERU1000031, UTERU1000148, UTERU1000249, UTERU1000337, UTERU1000339, UTERU2000649, UTERU2001409, UTERU2002410, UTERU2002841, UTERU2004688, UTERU2004929, UTERU2005004, UTERU2005621, UTERU2006115, UTERU2006137, UTERU2006568, UTERU2007444, UTERU2007520, UTERU2007724, UTERU2008347, UTERU2014678, UTERU2017762, UTERU2019491, UTERU2019681, UTERU2019706, UTERU2019940, UTERU2020491, UTERU2020718, UTERU2021163, UTERU2021380, UTERU2022020, UTERU2022981, UTERU2023039, UTERU2023175, UTERU2023651, UTERU2023712, UTERU2024002, UTERU2024656, UTERU2025025, UTERU2025645, UTERU2025891, UTERU2026025, UTERU2026090, UTERU2026203, UTERU2027591, UTERU2029953, UTERU2030213, UTERU2030280, UTERU2031084, UTERU2031268, UTERU2031521, UTERU2031703, UTERU2031851, UTERU2033375, UTERU2033382, UTERU2035114, UTERU2035323, UTERU2035328, UTERU2035331, UTERU2035452, UTERU2035469, UTERU2035503, UTERU2035745, UTERU2036089, UTERU2037361, UTERU2037577, UTERU2038251, UTERU3000226, UTERU3000645, UTERU3000665, UTERU3000828, UTERU3000899, UTERU3001059, UTERU3001240, UTERU3001542, UTERU3001571, UTERU3001572, UTERU3001585, UTERU3001652, UTERU3001766, UTERU3001988, UTERU3002209, UTERU3002218, UTERU3002383, UTERU3002667, UTERU3002731, UTERU3002768, UTERU3002786, UTERU3002993, UTERU3003116, UTERU3003135, UTERU3003178, UTERU3003465, UTERU3003523, UTERU3003776, UTERU3004523, UTERU3004616, UTERU3004709, UTERU3004992, UTERU3005049, UTERU3005205, UTERU3005230, UTERU3005460, UTERU3005585, UTERU3005907, UTERU3005970, UTERU3006008, UTERU3006308, UTERU3007134, UTERU3007419, UTERU3007640, UTERU3007913, UTERU3008660, UTERU3008671, UTERU3009259, UTERU3009490, UTERU3009517, UTERU3009690, UTERU3009871, UTERU3009979, UTERU3011063, UTERU3015086, UTERU3015500, UTERU3016789, UTERU3018081, UTERU3018154, UTERU3018616, UTERU3018711

[0337] ADRGL2000042, BRHIP3000017, CTONG2003348, CTONG2019822, CTONG2020378, CTONG2020411, CTONG2024031, FEBRA2028516, HCASM2008536, HCHON2000743, IMR322001879, MESAN2005303, NT2RI2009583, OCBBF2008144, PERIC2007068, SPLEN2039379, TESTI2015626, TESTI4013894, TUTER2000057, UTERU2004299, UTERU2008040, UTERU2011220, UTERU2019534, UTERU2021820, UTERU2028734, UTERU2032279, UTERU2033577, UTERU2035978, UTERU3000402, UTERU3000738, UTERU3001053, UTERU3014791, UTERU3015412, UTERU3017176

[0338] The result of comparative analysis of cDNA libraries derived from tongue cancer (CTONG) and normal tongue (NTONG) (Table 20) showed that the genes whose expression levels differed between the two were the 166 and 31 clones listed below.

[0339] BNGH42007788, BRACE1000186, BRACE2006319, BRACE3010428, BRACE3012364, BRAMY2020058, BRAMY3002803, BRAWH2001671, BRAWH2014645, BRAWH3002574, BRCAN2009432, BRCAN2015371, BRCAN2020710, BRHIP2004814, BRHIP3018797, BRTHA2003461, BRTHA3003490, CTONG1000087, CTONG1000088, CTONG1000288, CTONG1000302, CTONG1000341, CTONG1000467, CTONG1000488, CTONG1000508, CTONG1000540, CTONG2000042, CTONG2001877, CTONG2004062, CTONG2006798, CTONG2008233, CTONG2009423, CTONG2009531, CTONG2010803, CTONG2013178, CTONG2017500, CTONG2019248, CTONG2019652, CTONG2019704, CTONG2019788, CTONG2019833, CTONG2020127, CTONG2020522, CTONG2020638, CTONG2020806, CTONG2021132, CTONG2022153, CTONG2022601, CTONG2023021, CTONG2023512, CTONG2024206, CTONG2024749, CTONG2025496, CTONG2025516, CTONG2025900, CTONG2026920, CTONG2027327, CTONG2028124, CTONG2028687, CTONG3000084, CTONG3000657, CTONG3000686, CTONG3000707, CTONG3000896, CTONG3001123, CTONG3001370, CTONG3001420, CTONG3001560, CTONG3002020, CTONG3002127, CTONG3002412, CTONG3002674, CTONG3003179, CTONG3003483, CTONG3003652, CTONG3003654, CTONG3003737, CTONG3003905, CTONG3003972, CTONG3004072, CTONG3004712, CTONG3005325, CTONG3005648, CTONG3005713, CTONG3005813, CTONG3006067, CTONG3006186, CTONG3006650, CTONG3007444, CTONG3007528, CTONG3007586, CTONG3007870, CTONG3008252, CTONG3008258, CTONG3008496, CTONG3008566, CTONG3008639, CTONG3008831, CTONG3008894, CTONG3008951, CTONG3009028, CTONG3009227, CTONG3009239, CTONG3009328, CTONG3009385, FEBRA2007544, FEBRA2007801, FEBRA2021966, FEBRA2025427, HCHON2000028, HCHON2001217, HHDPC1000118, HSYRA2008376, KIDNE2001847, KIDNE2002252, MESAN2006563, NT2RI2008724, NT2RI2018883, NT2RI3000622, NT2RI3006284, NT2RI3006673, NT2RI3007543, NT2RI3007757, NT2RP7004123, NT2RP7009147, NT2RP7014005, NTONG2000413, NTONG2003852, NTONG2005277, NTONG2005969, NTONG2006354, NTONG2007249, NTONG2007517, NTONG2008088, NTONG2008672, OCBBF2001794, OCBBF2006151, PEBLM2004666, PEBLM2005183, SPLEN2002467, SPLEN2029912, SPLEN2031547, SYNOV4007671, SYNOV4008440, TBAES2002197, TESOP2002273, TESTI2009474, TESTI4000014, TESTI4000209, TESTI4008018, TESTI4009286, TESTI4010851, TESTI4012702, TESTI4013675, THYMU2031847, THYMU2033308, TLIVE2002690, TRACH2005811, TRACH2007059, TRACH2025535, TRACH3001427, TSTOM2000553, UTERU2005621, UTERU2017762, UTERU2023175, UTERU3001572

[0340] BLADE2006830, BRHIP3000017, CTONG1000113, CTONG2003348, CTONG2004000, CTONG2008721, CTONG2015596, CTONG2015633, CTONG2016942, CTONG2019822, CTONG2020374, CTONG2020378, CTONG2020411, CTONG2020974, CTONG2024031, CTONG2028758, CTONG3001501, CTONG3002552, CTONG3003598, CTONG3004550, CTONG3004726, CTONG3009287, FEBRA2008692, FEBRA2028516, HCHON2000508, NT2RI2009583, NTONG2008093, PERIC2007068, TESOP2007384, TLIVE2002046, TRACH2000862

[0341] These genes are involved in cancer.

[0342] Expression frequency analysis is used when searching for genes involved in development and differentiation, where the expression levels of genes in developing and/or differentiating tissues and/or cells are compared with those in adult tissues and/or cells. Genes involved in tissue development and/or differentiation are genes which participate in tissue construction and function expression. These genes are thus useful genes available for medicine aiming at regeneration of injured tissues.

[0343] By using information on gene expression frequency gained from the database of the nucleotide sequences of the 1,402,069 clones as described above, genes whose expression frequencies differed between developing and/or differentiating tissues and/or cells, and adult tissues and/or cells, were analyzed.

[0344] The result of comparative analysis of cDNA libraries derived from fetal brain (FCBBF, FEBRA or OCBBF) and adult brain (BRACE, BRALZ, BRAMY, BRAWH, BRCAN, BRCOC, BRHIP, BRSSN, BRSTN or BRTHA) (Table 21) showed that the genes whose expression levels differed between the two were the 1,035 and 139 clones listed below.

[0345] ADRGL2009146, ADRGL2012038, ADRGL2012179, ASTRO1000009, ASTRO2003960, ASTRO3000482, BLADE1000176, BLADE2001371, BLADE2004089, BLADE2008398, BNGH42007788, BRACE1000186, BRACE1000258, BRACE1000533, BRACE1000572, BRACE2003639, BRACE2005457, BRACE2006319, BRACE2008594, BRACE2010489, BRACE2011747, BRACE2014306, BRACE2014475, BRACE2014657, BRACE2015058, BRACE2015314, BRACE2016981, BRACE2018762, BRACE2024627, BRACE2026836, BRACE2027258, BRACE2027970, BRACE2028970, BRACE2029112, BRACE2029849, BRACE2030326, BRACE2030341, BRACE2030884, BRACE2031154, BRACE2031389, BRACE2031527, BRACE2031531, BRACE2031899, BRACE2032044, BRACE2032329, BRACE2032385, BRACE2032538, BRACE2032823, BRACE2033720, BRACE2035381, BRACE2035441, BRACE2036005, BRACE2036096, BRACE2036830, BRACE2036834, BRACE2037847, BRACE2038114, BRACE2038329, BRACE2038551, BRACE2039249, BRACE2039327, BRACE2039475, BRACE2039734, BRACE2040138, BRACE2040325, BRACE2041009, BRACE2041200, BRACE2041264, BRACE2042550, BRACE2043142, BRACE2043248, BRACE2043349, BRACE2043665, BRACE2044286, BRACE2044816, BRACE2044949, BRACE2045300, BRACE2045428, BRACE2045596, BRACE2045772, BRACE2045947, BRACE2045954, BRACE2046251, BRACE2046295, BRACE2047011, BRACE2047350, BRACE2047377, BRACE2047385, BRACE3000071, BRACE3000697, BRACE3000787, BRACE3000840, BRACE3000973, BRACE3001002, BRACE3001217, BRACE3001391, BRACE3001595, BRACE3001754, BRACE3002298, BRACE3002390, BRACE3002508, BRACE3003004, BRACE3003192, BRACE3003595, BRACE3003698, BRACE3004058, BRACE3004113, BRACE3004150, BRACE3004358, BRACE3004435, BRACE3004772, BRACE3004783, BRACE3004843, BRACE3004880, BRACE3005145, BRACE3005225, BRACE3005430, BRACE3005499, BRACE3006185, BRACE3006226, BRACE3006462, BRACE3006872, BRACE3007322, BRACE3007472, BRACE3007480, BRACE3007559, BRACE3007625, BRACE3007642, BRACE3007767, BRACE3008036, BRACE3008092, BRACE3008137, BRACE3008384, BRACE3008720, BRACE3008772, BRACE3009090, BRACE3009237, BRACE3009297, BRACE3009377, BRACE3009574, BRACE3009701, BRACE3009708, BRACE3009724, BRACE3009747, BRACE3010397, BRACE3010428, BRACE3011271, BRACE3011421, BRACE3011505, BRACE3012364, BRACE3012930, BRACE3013119, BRACE3013576, BRACE3013740, BRACE3013780, BRACE3014005, BRACE3014068, BRACE3014231, BRACE3014317, BRACE3014807, BRACE3015027, BRACE3015121, BRACE3015262, BRACE3015521, BRACE3015894, BRACE3016884, BRACE3018308, BRACE3018963, BRACE3019055, BRACE3019084, BRACE3020194, BRACE3020286, BRACE3020594, BRACE3022769, BRACE3023912, BRACE3024073, BRACE3024659, BRACE3024662, BRACE3025153, BRACE3025457, BRACE3025531, BRACE3025630, BRACE3026008, BRACE3026075, BRACE3026735, BRACE3027242, BRACE3027326, BRACE3027478, BRACE3030103, BRACE3031838, BRACE3032983, BRACE3040856, BRACE3045033, BRALZ2011796, BRALZ2012183, BRALZ2012848, BRALZ2014484, BRALZ2016085, BRALZ2016498, BRALZ2017359, BRAMY2001473, BRAMY2003008, BRAMY2004771, BRAMY2005052, BRAMY2017528, BRAMY2019300, BRAMY2019963, BRAMY2019985, BRAMY2020058, BRAMY2020270, BRAMY2021498, BRAMY2028856, BRAMY2028914, BRAMY2029602, BRAMY2030098, BRAMY2030109, BRAMY2030702, BRAMY2030703, BRAMY2030799, BRAMY2031317, BRAMY2031377, BRAMY2031442, BRAMY2032014, BRAMY2032242, BRAMY2032317, BRAMY2033003, BRAMY2033116, BRAMY2033267, BRAMY2033594, BRAMY2034185, BRAMY2034920, BRAMY2034993, BRAMY2036387, BRAMY2036396, BRAMY2036567, BRAMY2036699, BRAMY2036913, BRAMY2037823, BRAMY2038100, BRAMY2038484, BRAMY2038846, BRAMY2038904, BRAMY2039872, BRAMY2040478, BRAMY2040592, BRAMY2041261, BRAMY2041378, BRAMY2041542, BRAMY2042612, BRAMY2042641, BRAMY2042760, BRAMY2042918, BRAMY2044078, BRAMY2044246, BRAMY2045036, BRAMY2046478, BRAMY2046742, BRAMY2046989, BRAMY2047169, BRAMY2047420, BRAMY2047676, BRAMY2047746, BRAMY2047751, BRAMY2047765, BRAMY2047884, BRAMY3000206, BRAMY3000213, BRAMY3001401, BRAMY3001794, BRAMY3002312, BRAMY3002620, BRAMY3002803, BRAMY3002805, BRAMY3004224, BRAMY3004672, BRAMY3004900, BRAMY3004919, BRAMY3005091, BRAMY3005932, BRAMY3006297, BRAMY3007206, BRAMY3007609, BRAMY3008466, BRAMY3008505, BRAMY3008650, BRAMY3009811, BRAMY3010411, BRAMY4000095, BRAMY4000229, BRAMY4000277, BRASW1000125, BRAWH1000127, BRAWH2001395, BRAWH2001671, BRAWH2001940, BRAWH2001973, BRAWH2002560, BRAWH2002761, BRAWH2005315, BRAWH2007658, BRAWH2010000, BRAWH2010084, BRAWH2010536, BRAWH2012162, BRAWH2012326, BRAWH2013294, BRAWH2013871, BRAWH2014414, BRAWH2014645, BRAWH2014662, BRAWH2014876, BRAWH2014954, BRAWH2016221, BRAWH2016439, BRAWH2016702, BRAWH2016724, BRAWH3000078, BRAWH3000100, BRAWH3000314, BRAWH3000491, BRAWH3001326, BRAWH3001475, BRAWH3001891, BRAWH3002574, BRAWH3002600, BRAWH3002819, BRAWH3002821, BRAWH3003522, BRAWH3003555, BRAWH3003727, BRAWH3003801, BRAWH3003992, BRAWH3004453, BRAWH3004666, BRAWH3005132, BRAWH3005422, BRAWH3005912, BRAWH3005981, BRAWH3006548, BRAWH3006792, BRAWH3007221, BRAWH3007506, BRAWH3007592, BRAWH3007726, BRAWH3007783, BRAWH3008341, BRAWH3008697, BRAWH3008931, BRAWH3009297, BRCAN2002562, BRCAN2002856, BRCAN2002944, BRCAN2002948, BRCAN2003703, BRCAN2003746, BRCAN2003987, BRCAN2004355, BRCAN2005436, BRCAN2006063, BRCAN2006290, BRCAN2006297, BRCAN2006450, BRCAN2007144, BRCAN2007409, BRCAN2007426, BRCAN2008528, BRCAN2009203, BRCAN2009432, BRCAN2010376, BRCAN2011254, BRCAN2011602, BRCAN2012355, BRCAN2012481, BRCAN2013655, BRCAN2013660, BRCAN2014143, BRCAN2014602, BRCAN2014881, BRCAN2015371, BRCAN2015464, BRCAN2016433, BRCAN2016619, BRCAN2017442, BRCAN2017717, BRCAN2017905, BRCAN2018935, BRCAN2019387, BRCAN2020710, BRCAN2021028, BRCAN2024451, BRCAN2024563, BRCAN2025712, BRCAN2028355, BRCOC2000670, BRCOC2003213, BRCOC2007034, BRCOC2014033, BRCOC2016525, BRCOC2019934, BRCOC2020142, BRHIP2000691, BRHIP2000819, BRHIP2000826, BRHIP2000920, BRHIP2001074, BRHIP2001805, BRHIP2001927, BRHIP2002122, BRHIP2002172, BRHIP2002346, BRHIP2003242, BRHIP2003786, BRHIP2003917, BRHIP2004312, BRHIP2004359, BRHIP2004814, BRHIP2004883, BRHIP2005236, BRHIP2005354, BRHIP2005600, BRHIP2005719, BRHIP2005752, BRHIP2005932, BRHIP2006800, BRHIP2007616, BRHIP2007741, BRHIP2009340, BRHIP2009414, BRHIP2009474, BRHIP2013699, BRHIP2014228, BRHIP2021615, BRHIP2022221, BRHIP2024146, BRHIP2024165, BRHIP2026061, BRHIP2026288, BRHIP2029176, BRHIP2029393, BRHIP3000339, BRHIP3000526, BRHIP3001283, BRHIP3006683, BRHIP3007483, BRHIP3007586, BRHIP3008183, BRHIP3008313, BRHIP3008344, BRHIP3008405, BRHIP3008565, BRHIP3008598, BRHIP3008997, BRHIP3009099, BRHIP3009448, BRHIP3011241, BRHIP3013765, BRHIP3013897, BRHIP3015751, BRHIP3016213, BRHIP3018797, BRHIP3020182, BRHIP3024118, BRHIP3024533, BRHIP3024725, BRHIP3025161, BRHIP3025702, BRHIP3026097, BRHIP3027137, BRHIP3027854, BRSSN2000684, BRSSN2003086, BRSSN2004496, BRSSN2004719, BRSSN2006892, BRSSN2008549, BRSSN2008797, BRSSN2011262, BRSSN2011738, BRSSN2013874, BRSSN2014299, BRSSN2014424, BRSSN2014556, BRSSN2018581, BRSSN2018925, BRSTN2000872, BRSTN2001067, BRSTN2001613, BRSTN2002400, BRSTN2003835, BRSTN2004863, BRSTN2004987, BRSTN2005721, BRSTN2006865, BRSTN2007000, BRSTN2007284, BRSTN2008052, BRSTN2008283, BRSTN2008418, BRSTN2008457, BRSTN2010363, BRSTN2010500, BRSTN2010750, BRSTN2012320, BRSTN2012380, BRSTN2015015, BRSTN2016470, BRSTN2016678, BRSTN2017237, BRSTN2017771, BRSTN2018083, BRSTN2019129, BRTHA1000311, BRTHA2000855, BRTHA2001462, BRTHA2002115, BRTHA2002281, BRTHA2002376, BRTHA2002442, BRTHA2002493, BRTHA2002608, BRTHA2002808, BRTHA2003030, BRTHA2003110, BRTHA2003116, BRTHA2003461, BRTHA2004821, BRTHA2004978, BRTHA2005579, BRTHA2005956, BRTHA2006075, BRTHA2006146, BRTHA2006194, BRTHA2007122, BRTHA2007422, BRTHA2007603, BRTHA2008316, BRTHA2008335, BRTHA2008527, BRTHA2008535, BRTHA2008955, BRTHA2009311, BRTHA2009846, BRTHA2009972, BRTHA2010073, BRTHA2010608, BRTHA2010884, BRTHA2010907, BRTHA2011194, BRTHA2011351, BRTHA2011500, BRTHA2011641, BRTHA2012392, BRTHA2012562, BRTHA2012980, BRTHA2013262, BRTHA2013460, BRTHA2013707, BRTHA2014792, BRTHA2014828, BRTHA2015406, BRTHA2015478, BRTHA2015696, BRTHA2015878, BRTHA2016215, BRTHA2016496, BRTHA2016543, BRTHA2017353, BRTHA2017985, BRTHA2018165, BRTHA2018344, BRTHA2018591, BRTHA2018624, BRTHA2018707, BRTHA2019014, BRTHA2019022, BRTHA2019048, BRTHA3000273, BRTHA3000297, BRTHA3000633, BRTHA3001721, BRTHA3002401, BRTHA3002427, BRTHA3002933, BRTHA3003074, BRTHA3003343, BRTHA3003449, BRTHA3003474, BRTHA3003490, BRTHA3004475, BRTHA3005046, BRTHA3006856, BRTHA3007113, BRTHA3007148, BRTHA3007319, BRTHA3007769, BRTHA3008143, BRTHA3008310, BRTHA3008386, BRTHA3008520, BRTHA3008778, BRTHA3009037, BRTHA3009090, BRTHA3009291, BRTHA3010366, BRTHA3013884, BRTHA3015815, BRTHA3015910, BRTHA3016845, BRTHA3016917, BRTHA3017047, BRTHA3017589, BRTHA3017848, BRTHA3018514, BRTHA3018617, BRTHA3018656, BRTHA3019105, COLON2001721, CTONG1000087, CTONG1000088, CTONG1000467, CTONG2000042, CTONG2008233, CTONG2009423, CTONG2017500, CTONG2019248, CTONG2019788, CTONG2020522, CTONG2023021, CTONG2028124, CTONG3000657, CTONG3001123, CTONG3001370, CTONG3002412, CTONG3004072, CTONG3005813, CTONG3008894, CTONG3009028, CTONG3009239, CTONG3009328, DFNES2000146, DFNES2011239, DFNES2011499, FCBBF1000297, FCBBF2001183, FCBBF3001977, FCBBF3002163, FCBBF3003435, FCBBF3004502, FCBBF3004847, FCBBF3006171, FCBBF3007242, FCBBF3007540, FCBBF3008944, FCBBF3009888, FCBBF3012170, FCBBF3012288, FCBBF3013307, FCBBF3013846, FCBBF3021576, FCBBF3021940, FCBBF3023443, FCBBF3023895, FCBBF3025730, FCBBF3027717, FCBBF4000076, FEBRA1000030, FEBRA2000253, FEBRA2006396, FEBRA2007544, FEBRA2007708, FEBRA2007793, FEBRA2007801, FEBRA2008287, FEBRA2008311, FEBRA2008360, FEBRA2008468, FEBRA2010719, FEBRA2014213, FEBRA2015588, FEBRA2020484, FEBRA2020582, FEBRA2020668, FEBRA2020886, FEBRA2021339, FEBRA2021571, FEBRA2021908, FEBRA2021966, FEBRA2024136, FEBRA2024150, FEBRA2024343, FEBRA2024744, FEBRA2025427, FEBRA2026984, FEBRA2027082, FEBRA2027297, FEBRA2027352, FEBRA2028366, FEBRA2028477, FEBRA2028618, HCASM2007047, HCHON2000028, HCHON2000212, HCHON2000244, HCHON2000626, HCHON2001084, HCHON2001217, HCHON2002676, HCHON2005921, HCHON2006250, HCHON2007881, HCHON2008112, HEART1000074, HEART2007031, HHDPC1000118, HLUNG2001996, HLUNG2002465, HLUNG2003003, HSYRA2009075, IMR322000127, IMR322000917, IMR322001380, IMR322002035, KIDNE2000665, KIDNE2002252, KIDNE2005543, KIDNE2006580, KIDNE2011314, MESAN2006563, MESAN2012054, MESAN2015515, MESTC1000042, NB9N41000340, NESOP2001752, NHNPC2001223, NOVAR2001783, NT2NE2005890, NT2NE2006909, NT2NE2008060, NT2RI2003993, NT2RI2005166, NT2RI2008724, NT2RI2012659, NT2RI2014733, NT2RI2018311, NT2RI2019751, NT2RI3000622, NT2RI3001515, NT2RI3002842, NT2RI3002892, NT2RI3003382, NT2RI3004510, NT2RI3005403, NT2RI3005724, NT2RI3006284, NT2RI3006673, NT2RI3007291, NT2RI3007543, NT2RI3008055, NT2RP7004123, NT2RP7005529, NT2RP7009030, NT2RP7009147, NT2RP7010599, NT2RP7014005, NT2RP7015512, NT2RP7017474, NTONG2000413, NTONG2005969, NTONG2008088, OCBBF1000254, OCBBF2001794, OCBBF2002124, OCBBF2003819, OCBBF2004826, OCBBF2004883, OCBBF2005428, OCBBF2006005, OCBBF2006058, OCBBF2006151, OCBBF2006567, OCBBF2006764, OCBBF2007028, OCBBF2007068, OCBBF2007114, OCBBF2007428, OCBBF2007478, OCBBF2007610, OCBBF2008770, OCBBF2009788, OCBBF2009926, OCBBF2010140, OCBBF2010416, OCBBF2017516, OCBBF2019327, OCBBF2019823, OCBBF2020343, OCBBF2020453, OCBBF2020639, OCBBF2020741, OCBBF2020801, OCBBF2020838, OCBBF2021020, OCBBF2021286, OCBBF2021323, OCBBF2021788, OCBBF2022351, OCBBF2022574, OCBBF2023162, OCBBF2023643, OCBBF2024719, OCBBF2024781, OCBBF2024850, OCBBF2025028, OCBBF2025458, OCBBF2025527, OCBBF2025730, OCBBF2026645, OCBBF2027423, OCBBF2027478, OCBBF2028173, OCBBF2028935, OCBBF2029901, OCBBF2030354, OCBBF2030517, OCBBF2030574, OCBBF2030708, OCBBF2031167, OCBBF2031366, OCBBF2032590, OCBBF2032599, OCBBF2032611, OCBBF2032671, OCBBF2033869, OCBBF2035110, OCBBF2035214, OCBBF2035564, OCBBF2035885, OCBBF2035916, OCBBF2036476, OCBBF2036743, OCBBF2037068, OCBBF2037340, OCBBF2037398, OCBBF2037547, OCBBF2037598, OCBBF2037638, OCBBF2038317, OCBBF3000296, OCBBF3000483, OCBBF3002553, OCBBF3002600, OCBBF3003320, OCBBF3003592, OCBBF3004314, OCBBF3006802, OCBBF3007516, OCBBF3008230, OCBBF3009279, PEBLM2004666, PERIC2000889, PERIC2002766, PERIC2003720, PLACE6001185, PLACE6019385, PUAEN2002489, PUAEN2005930, PUAEN2006701, PUAEN2007044, PUAEN2009174, PUAEN2009655, RECTM2001347, SKMUS2000757, SKNMC2002402, SKNSH2000482, SMINT2001818, SPLEN2001599, SPLEN2002467, SPLEN2006122, SPLEN2010912, SPLEN2012624, SPLEN2025491, SPLEN2027268, SPLEN2028914, SPLEN2029912, SPLEN2031424, SPLEN2031547, SPLEN2032154, SPLEN2034781, SPLEN2036821, SPLEN2036932, SPLEN2037194, SPLEN2038345, SPLEN2042303, SYNOV1000374, SYNOV2005216, SYNOV2014400, SYNOV4002346, SYNOV4002883, SYNOV4007430, SYNOV4007671, SYNOV4008440, TESOP2001605, TESOP2002273, TESOP2002451, TESOP2002950, TESTI1000330, TESTI2003573, TESTI2009474, TESTI2049246, TESTI4000014, TESTI4000209, TESTI4000349, TESTI4001100, TESTI4001561, TESTI4002290, TESTI4002647, TESTI4005857, TESTI4006137, TESTI4006326, TESTI4008797, TESTI4009286, TESTI4010377, TESTI4010851, TESTI4010928, TESTI4011161, TESTI4012702, TESTI4013675, TESTI4013817, TESTI4014159, TESTI4014175, TESTI4014306, TESTI4014694, TESTI4014818, TESTI4019843, TESTI4021478, TESTI4022936, TESTI4024420, TESTI4027821, TESTI4029836, TESTI4037156, TESTI4037188, TESTI4046819, THYMU2001090, THYMU2011736, THYMU2014353, THYMU2016204, THYMU2016523, THYMU2023967, THYMU2025707, THYMU2030264, THYMU2031341, THYMU2031890, THYMU2032696, THYMU2032825, THYMU2033308, THYMU2033787, THYMU2034374, THYMU2035735, THYMU2037226, THYMU2039315, THYMU2039780, THYMU2040975, THYMU3001083, THYMU3001234, THYMU3001379, THYMU3003309, THYMU3004835, THYMU3006485, THYMU3007137, THYMU3008171, TKIDN2009641, TKIDN2009889, TKIDN2010934, TKIDN2013287, TKIDN2015788, TLIVE2001327, TLIVE2004320, TRACH1000205, TRACH2001443, TRACH2001549, TRACH2001684, TRACH2005811, TRACH2006049, TRACH2007834, TRACH2008300, TRACH2023299, TRACH2025344, TRACH2025535, TRACH2025911, TRACH3000014, TRACH3001427, TRACH3002192, TRACH3004068, TRACH3004721, TRACH3005294, TRACH3006038, TRACH3006412, TRACH3007479, TRACH3008093, TRACH3009455, TSTOM1000135, TUTER1000122, TUTER2000904, UTERU2002410, UTERU2004929, UTERU2005621, UTERU2006115, UTERU2007520, UTERU2014678, UTERU2019706, UTERU2019940, UTERU2021163, UTERU2023039, UTERU2023175, UTERU2026203, UTERU2030213, UTERU2030280, UTERU3000226, UTERU3000899, UTERU3001571, UTERU3001572, UTERU3001766, UTERU3003135, UTERU3004709, UTERU3005230, UTERU3005460, UTERU3005907, UTERU3005970, UTERU3006308, UTERU3007419, UTERU3007640, UTERU3007913, UTERU3009259, UTERU3009517, UTERU3009871

[0346] ADRGL2000042, BLADE2006830, BRACE2002589, BRACE2003609, BRACE2009318, BRACE2011677, BRACE2029396, BRACE2037299, BRACE2039823, BRACE2039832, BRACE2043105, BRACE3001058, BRACE3001113, BRACE3003026, BRACE3003053, BRACE3009127, BRACE3010076, BRACE3015829, BRACE3021148, BRALZ2017844, BRAMY2019111, BRAMY2035070, BRAMY2035449, BRAMY2035718, BRAMY2038516, BRAMY2039341, BRAMY2040159, BRAMY2041434, BRAMY2045471, BRAMY3004800, BRAWH1000369, BRAWH2006207, BRAWH2006395, BRAWH2008993, BRAWH2009393, BRAWH2010552, BRAWH3007441, BRAWH3009017, BRCAN2002473, BRCAN2002854, BRCAN2003070, BRCAN2014229, BRCOC2019841, BRHIP2002722, BRHIP2003272, BRHIP2005271, BRHIP2005724, BRHIP2006617, BRHIP2008389, BRHIP2012360, BRHIP2017553, BRHIP2026877, BRHIP3000017, BRHIP3000240, BRHIP3008314, BRHIP3026052, BRSTN2013354, BRTHA2002133, BRTHA2002702, BRTHA2007060, BRTHA2010033, BRTHA2011321, BRTHA2013426, BRTHA2013610, BRTHA2016318, BRTHA2017364, BRTHA2017972, BRTHA2018011, BRTHA2018443, BRTHA3000296, BRTHA3003000, BRTHA3008826, CTONG2008721, CTONG2020374, CTONG2020378, CTONG2020411, CTONG2024031, CTONG3004726, FCBBF1000509, FCBBF3010361, FCBBF3027854, FEBRA2000790, FEBRA2001990, FEBRA2006519, FEBRA2008692, FEBRA2014122, FEBRA2027609, FEBRA2028516, HCASM2003018, HCHON2000508, HCHON2000743, HCHON2004858, HSYRA2005628, IMR322001879, NT2RI2009583, NT2RP8000521, OCBBF2003327, OCBBF2005433, OCBBF2006987, OCBBF2008144, OCBBF2009583, OCBBF2011669, OCBBF2019684, OCBBF2020048, OCBBF2030116, OCBBF2032274, OCBBF2034637, OCBBF3002654, OCBBF3003761, OCBBF3004972, PERIC2007068, PUAEN2006335, SPLEN2016932, SPLEN2039379, SYNOV2006620, SYNOV2021953, TESTI1000266, TESTI2015626, TESTI2026647, TESTI4000214, TESTI4001984, TESTI4008058, TESTI4013894, TESTI4015442, TESTI4017714, TESTI4025268, TESTI4025547, TESTI4026207, TESTI4032090, THYMU2004284, THYMU2040925, THYMU3000360, TKIDN2018926, TLIVE2002046, TRACH3000134, UTERU2008040, UTERU2011220, UTERU2021820, UTERU2028734

[0347] The result of comparative analysis of cDNA libraries derived from fetal heart (FEHRT) and adult heart (HEART) (Table 22) showed that the genes whose expression levels differed between the two were the 34 and two clones listed below.

[0348] BRAMY2040592, BRAWH2001671, BRSTN2016470, CTONG2017500, CTONG2028124, CTONG3000657, D3OST3000169, FEBRA2008287, HCHON2000244, HCHON2000626, HEART1000010, HEART1000074, HEART1000088, HEART1000139, HEART2001680, HEART2001756, HEART2006131, HEART2006909, HEART2007031, HEART2010391, HEART2010492, HEART2010495, KIDNE2000665, NB9N41000340, NT2RI2003993, NT2RI3002892, OCBBF2024850, SKMUS2006394, SMINT2001818, TESTI4000209, TKIDN2015788, TRACH3002192, TRACH3005294, TRACH3007479 HEART2009680, THYMU2004284

[0349] The result of comparative analysis of cDNA libraries derived from fetal kidney (FEKID) and adult kidney (KIDNE) (Table 23) showed that the genes whose expression levels differed between the two were the 40 and two clones listed below.

[0350] BRACE2043665, BRACE3010428, BRSTN2016470, CTONG1000087, CTONG2028124, CTONG3008894, HCASM2003415, HCHON2000244, HEART1000074, HHDPC1000118, KIDNE1000064, KIDNE2000665, KIDNE2000722, KIDNE2000832, KIDNE2000846, KIDNE2001361, KIDNE2001847, KIDNE2002252, KIDNE2002991, KIDNE2003837, KIDNE2005543, KIDNE2006580, KIDNE2010264, KIDNE2011314, KIDNE2011532, KIDNE2011635, KIDNE2012945, KIDNE2013095, PEBLM2004666, PLACE6019385, STOMA1000189, SYNOV4007671, TBAES2001258, TESOP2002451, TESTI4000014, TESTI4012702, THYMU2032014, TRACH2001684, TRACH2007834, UTERU2023175 NT2RI2009583, OCBBF2008144

[0351] The result of comparative analysis of cDNA libraries derived from fetal lung (FELNG) and adult lung (HLUNG) (Table 24) showed that the genes whose expression levels differed between the two were the 51 and eight clones listed below.

[0352] BRAWH3007592, BRCAN2021028, BRHIP2000819, BRSTN2016470, CTONG1000087, CTONG2028124, HCASM2007047, HEART1000074, HLUNG1000017, HLUNG2000014, HLUNG2001996, HLUNG2002465, HLUNG2002958, HLUNG2003003, HLUNG2003872, HLUNG2010464, HLUNG2011041, HLUNG2011298, HLUNG2012049, HLUNG2012287, HLUNG2012727, HLUNG2013204, HLUNG2013304, HLUNG2013622, HLUNG2013851, HLUNG2014262, HLUNG2014288, HLUNG2014449, HLUNG2015617, HLUNG2017350, HLUNG2017546, HLUNG2017806, HLUNG2019058, HSYRA2008376, KIDNE2012945, NT2RI2003993, NT2RI3007543, OCBBF3000483, SMINT1000192, SPLEN2028914, SPLEN2031547, STOMA1000189, SYNOV4007671, TESOP1000127, TESTI2003573, TESTI4000014, TESTI4037156, TRACH2005811, TRACH3004068, UTERU2005621, UTERU2023175

FEBRA2028516, HCHON2000508, HLUNG2013350, HLUNG2015418, HLUNG2015548, HLUNG2016862, TESTI2015626, TRACH2019672

[0353] These genes are involved in regeneration of tissues and/or cells.

[0354] For example, if a polypeptide encoded by a cDNA of the present invention is a regulatory factor for cellular conditions such as growth and differentiation, it can be used for developing medicines as follows. The polypeptide or antibody provided by the present invention is injected into cells using microinjection, and then low molecular weight compounds and such can be screened by using, as an index, change in cellular conditions (such as growth and differentiation), or activation/inhibition of a particular gene in the cell. The screening can be performed as follows.

[0355] A polypeptide of the present invention is first expressed and purified as a recombinant. This purified polypeptide is then microinjected into cells such as various cell lines, or primary culture cells, and cellular changes such as growth and differentiation are examined. Alternatively, induction of a gene whose expression is known to be involved in the change of a particular cellular condition may be detected using mRNA or polypeptide amounts. Alternatively, the amount of an intracellular molecule (low molecular weight compounds, etc.) may be detected, where that amount is changed by the function of a gene product (polypeptide) known to influence change in a particular cellular condition. The compounds to be screened (including both low and high molecular compounds) can be added to culture media and screened using, as an index, their ability to change a cellular condition.

[0356] Cell lines introduced with a gene of the present invention can be used for screening, even without microinjection. If the product of a gene of the present invention is revealed to be involved in a particular change in cellular conditions, the change in that product can be used as an index for screening. Once a compound which can activate or inhibit the function of a polypeptide of the present invention has been developed using this screening, such a compound can be practically applied in medicines.

[0357] If a polypeptide encoded by a cDNA of the present invention is a secretory or membrane protein, or a protein involved in signal transduction, glycoproteins, transcription, or disease, it can be used in functional assays for developing medicines as described below.

[0358] In case of a membrane protein, the polypeptide is very likely to function as a receptor or ligand on the cell surface. Therefore, it is possible to reveal new ligand-receptor relationships by screening membrane proteins of the present invention, based on binding activity with known or new ligands or receptors. Screening can be performed according to known methods.

[0359] For example, a ligand against a polypeptide of the present invention can be screened in the following manner. Namely, a ligand that binds to a specific polypeptide can be screened using a method comprising the steps of: (a) contacting a test sample with a polypeptide of the present invention, or partial peptide thereof, or cells expressing such, and (b) selecting a test sample that binds to said polypeptide, said partial peptide, or said cells.

[0360] Screening using cells expressing receptor polypeptides of the present invention can also be performed, for example, as follows. Receptors capable of binding to a specific polypeptide can be screened by (a) attaching sample cells to a polypeptide of the present invention or its partial peptide, and (b) selecting cells that can bind to the said polypeptide or its partial peptide.

[0361] For example, screening can be carried out as follows: a polypeptide of the present invention is first expressed, the recombinant polypeptide is purified and labeled, a binding assay is performed using various cell lines or primary cultured cells, and cells that express the receptor are selected (Growth and differentiation factors and their receptors, Shin-Seikagaku Jikken Kouza Vol. 7 (1991) Honjyo, Arai, Taniguchi, and Muramatsu edit, p203-236, Tokyo-Kagaku-Doujin). A polypeptide of the present invention can be labeled with RI such as ¹²⁵I, and enzyme (alkaline phosphatase etc.).

[0362] Alternatively, a polypeptide of the present invention may be used without labeling and then detected by using a labeled antibody against that polypeptide. Cells expressing a receptor polypeptide of the present invention, and selected using the above screening methods, can be applied as mentioned below to screen agonists or antagonists of that receptor.

[0363] Once a ligand binding to a polypeptide of the present invention, a receptor of that polypeptide, or cells expressing that receptor have been obtained by screening as described above, a compound binding to that ligand or receptor can be screened. It is also possible to screen a compound that can inhibit both bindings (agonists or antagonists of the receptor, for example) by using this binding activity as an index.

[0364] When a polypeptide of the present invention is a receptor, the screening method comprises the steps of (a) contacting the ligand with a polypeptide of the present invention, or cells expressing that polypeptide, in the presence of a test sample, (b) detecting binding activity between that polypeptide or cells expressing that polypeptide and the ligand, and (c) selecting a compound that can reduce that binding activity when compared to activity in the absence of the test sample. Furthermore, when a polypeptide of the present invention is a ligand, the screening method comprises the steps of (a) contacting the polypeptide of the present invention with its receptor or cells expressing that receptor, in the presence of a test sample, (b) detecting binding activity between the polypeptide and its receptor, or cells expressing that receptor, and (c) selecting a compound that can reduce that binding activity compared to activity in the absence of the test sample.

[0365] Examples of test samples to screen include, but are not limited to, cell extracts, expressed gene library products, synthesized low molecular compounds, synthesized peptides, and natural compounds. A compound that is isolated by the above screening can also be used as a test sample, using binding activity with a polypeptide of the present invention as an index.

[0366] A compound isolated using this screening may be a candidate agonist or antagonist of a polypeptide or polypeptide receptor of the present invention. By monitoring changes in intracellular signals, such as phosphorylation due to reduced binding between a polypeptide and its receptor, it is possible to identify whether the obtained compound is an agonist or antagonist of the polypeptide receptor of the present invention. Also, the screened compound may be a candidate for a compound that can inhibit interaction between a polypeptide and its associated molecules (including receptors) in vivo. The polypeptides of this invention, recepters that bind to those polypeptides or ligands, and compounds thereof, can be applied in the development of preventative, therapeutic or testing agents for diseases in which the polypeptides of the present invention are involved.

[0367] Secretory proteins may regulate cellular conditions such as growth and differentiation. A novel factor that regulates cellular conditions can be found by i) adding a secretory protein of the present invention to a certain kind of cell, and ii) screening using as an index cellular changes in growth or differentiation, or activation of a particular gene.

[0368] Screening can be performed, for example, as follows. First, a polypeptide of the present invention is expressed and purified in a recombinant form. Then, the purified polypeptide is added to various cell lines or primary cultured cells, and changes in cell growth and differentiation are monitored. The induction of a particular gene known to be involved in a certain cellular change is detected using mRNA and polypeptide amounts. Alternatively, detection can be carried out using the amount of an intracellular molecule (low-molecular-weight compounds, etc.) changed by the action of a gene product (polypeptide) which influences a certain cellular change.

[0369] If screening reveals that a polypeptide of the present invention can regulate cellular conditions or functions, it is possible to apply that polypeptide as a pharmaceutical and diagnostic medicine for related diseases, either directly or by altering a part of it into an appropriate composition.

[0370] As for membrane proteins as described above, a secretory protein provided by the present invention may be used to explore a novel ligand-receptor interaction by screening based on binding activity to a known or new ligand or receptor. A similar method can be used to identify an agonist or antagonist. Compounds obtained by these methods are candidate compounds for inhibiting the interaction between the polypeptide of the present invention and an interacting molecule (including receptors). These compounds may be applied as preventive, therapeutic, or testing agents for diseases in which the polypeptide plays a role.

[0371] Proteins involved in signal transduction or transcription may be factors that affect a certain polypeptide or gene in response to intra- or extra-cellular stimuli. A novel factor able to affect a polypeptide or gene can be found by expressing a polypeptide provided by the present invention in a certain type of cell, and screening using as an index the activation of a certain intracellular polypeptide or gene.

[0372] Screening may be performed as follows. First, a transformed cell line which expresses a polypeptide of the present invention is obtained. Then, changes in a certain gene between the transformed and the original untransformed cell lines are detected using mRNA or polypeptide amounts. Alternatively, detection may be carried out using the amount of an intracellular molecule (low molecular weight compounds, etc.) changed by the function of a certain gene product (polypeptide). Furthermore, change in expression of a certain gene can be detected by estimating the activity of a marker gene product (polypeptide), where the polypeptide of the present invention is expressed in a cell that has been introduced with a fusion gene comprising a regulatory region of the certain gene and a marker gene (luciferase, β-galactosidase, etc.).

[0373] If the polypeptide or gene influenced by a protein of the present invention is involved in disease, it is possible to screen a gene or compound that can regulate that polypeptide or gene's expression and/or activity, either directly or indirectly, by utilizing a polypeptide of the present invention.

[0374] For example, a polypeptide of the present invention is expressed and purified as a recombinant polypeptide, and a polypeptide or gene that interacts with that polypeptide is purified and screened based on binding. Alternatively, changes in binding activity can be monitored after adding a candidate inhibitor compound. In another method, the 5′-upstream transcription regulatory region of a gene that encodes a polypeptide of the present invention and that can regulate the expression of another gene, is obtained. The gene is fused with a marker gene and then introduced into a cell, compounds and the like are added, and a factor which can regulate expression of that gene can be discovered.

[0375] A compound obtained by this screening can be used for developing pharmaceutical medicines for a disease in which a polypeptide of the present invention is involved. Similarly, if a regulatory factor obtained by screening turns out to be a polypeptide, compounds that can newly affect the expression or activity of this polypeptide may be used as a medicine for diseases in which the polypeptide of the present invention is involved.

[0376] If a polypeptide of the present invention has enzymatic activity, regardless of whether it is a secretory protein, membrane protein, or a protein involved in signal transduction, glycoprotein, transcription, or disease, screening may be performed by adding a compound to the polypeptide of the present invention under suitable conditions, and monitoring that compound's change. This enzymatic activity may also be used as an index to screen a compound that inhibits the polypeptide activity.

[0377] In an example of this screening, a polypeptide of the present invention is expressed and the recombinant polypeptide is purified. Then, compounds are contacted with the purified polypeptide, and the amount of compound and reaction product is examined. Alternatively, inhibitor candidate compounds are added, then a compound (substrate) that reacts with the purified polypeptide is added, and change in the amount of substrate and reaction product is examined.

[0378] A compound obtained by screening may be used as a medicine for diseases in which a polypeptide of the present invention is involved. Also such a compound can be applied in tests that examine, for example, whether a polypeptide of the invention functions normally in vivo.

[0379] Whether a secretory protein, membrane protein, signal transduction-related protein, glycoprotein-related protein, or transcription-related protein of the present invention is a novel protein involved in disease or not is determined using different method to that described above. In this method, a specific antibody against a polypeptide of the present invention is obtained, and the relationship between the expression or activity of the polypeptide and a certain disease is examined. Alternatively, analysis can use the methods in “Molecular Diagnosis of Genetic Diseases” as a reference (Elles R. edit, (1996) in the series of “Method in Molecular Biology” (Humana Press).

[0380] Proteins involved in disease are very useful in developing drugs which regulate their expression and activity, and become targets of the above-mentioned screenings. They are also useful in the medicinal industry as diagnostic markers for their related disease, or as gene therapy targets.

[0381] A compound isolated as mentioned above can be administered to patients as is, or after being formulated into a pharmaceutical composition according to known methods. Specific examples of pharmaceutically acceptable carriers or vehicles include sterilized water, saline, plant oils, emulsifiers, suspending agents and the like, where they are mixed with the compound appropriately. The pharmaceutical compositions can be administered to patients by a method known to those skilled in the art, such as intraarterial, intravenous, or subcutaneous injection. Dosage may vary depending on the weight or age of a patient, or the method of administration, but those skilled in the art can properly choose an appropriate dosage. If a compound is encoded by a polynucleotide, the polynucleotide can be cloned into a gene therapy vector, and used for gene therapy. Those skilled in the art can properly choose the dosage of the polynucleotide and the method of its administration, and these may vary depending on the weight, age or symptoms of a patient.

[0382] The present invention further relates to databases comprising at least one sequence of a polynucleotide and/or polypeptide, or a medium recorded in such databases, selected from the sequence data of the nucleotides and/or amino acids indicated in Table 1. The term “database” means a set of accumulated, machine-searchable and readable nucleotide sequence information. The databases of the present invention comprise at least one of the novel nucleotide sequences of the polynucleotides provided by the present invention. The databases of the present invention can consist only of the sequence data of the novel polynucleotides provided by the present invention, or can comprise other information on known nucleotide sequences of full-length cDNAs or ESTs. The databases of the present invention can be comprised of not only information on nucleotide sequences, but also information on gene functions as revealed by the present invention. Additional information such as the names of DNA clones carrying the full-length cDNAs can be recorded or linked together with the sequence data in the databases.

[0383] The database of the present invention is useful for gaining complete gene sequence information from the partial sequence information of a gene of interest. The database of the present invention comprises nucleotide sequence information of full-length cDNAs. Consequently, by comparing information in this database with the nucleotide sequence of a partial gene fragment yielded by differential display method or subtraction method, information on the full-length nucleotide sequence of interest can be gained from the sequence of the partial fragment as a starting clue.

[0384] Sequence information of the full-length cDNAs constituting the database of the present invention contains information on not only complete sequences, but also on gene expression frequency and gene homology to known genes and polypeptides. This extra information facilitates rapid functional analyses of partial gene fragments. Further, information on human genes is accumulated in the database of the present invention, and therefore, the database is useful for isolating a human homologue of a gene originating from another species. The human homologue can be isolated based on the nucleotide sequence of the gene from the original species.

[0385] At present, information on a wide variety of gene fragments can be obtained by differential display method and subtraction method. In general, these gene fragments are utilized as tools for isolating the full-length sequences thereof. When the gene fragment corresponds to a known gene, the full-length sequence is easily obtained by comparing the partial sequence with the information in known databases. However, when there is no information corresponding to the partial sequence of interest in known databases, cDNA cloning should be carried out for the full-length cDNA. It is often difficult to obtain the full-length nucleotide sequence using partial sequence information as an initial clue. If the full-length gene is not available, the amino acid sequence of the polypeptide encoded by that gene remains unidentified. Thus the database of the present invention can contribute to the identification of full-length cDNAs corresponding to gene fragments, which cannot be revealed using databases of known genes.

[0386] The present invention has provided 2,495 polynucleotides. In humans, where isolation of full-length cDNA has not progressed, the provision of new full-length cDNAs has great significance. Secretory proteins, membrane proteins, signal transduction-related proteins, glycoprotein-related proteins, transcription-related proteins, and, so on are known to be involved in many diseases. The genes and proteins involved in diseases are useful for developing diagnostic markers or medicines for regulation of their expression and activity, or as a gene therapy target.

[0387] In particular, cDNA encoding secretory proteins of the present invention are extremely important to the industry since these proteins are expected to be useful as pharmaceutical agents, and many disease-related genes can be included with them. In addition, membrane proteins, signal transduction-related proteins, transcription-related proteins, disease-related proteins, and genes encoding these proteins can be used as disease indexes, etc. These cDNAs are also very important to the industry, and are expected to be effective in treating diseases and the like by regulating the activity or expression of the proteins they encode.

[0388] Human cDNAs involved in various diseases, morbid states, or functions were isolated in the present invention. The cDNAs of the present invention include, for example, genes that can be useful as diagnostic markers or therapeutic targets for the diseases or morbid states shown below. These diseases receive widespread attention, and require the development of new technology for treatment and diagnosis.
[0389] osteoporosis
[0390] neurologic diseases
[0391] Alzheimer's disease
[0392] Parkinson's disease
[0393] dementia
[0394] various cancers

[0395] In addition, human cDNAs involved in the functions shown below were isolated in the present invention. These genes can be used to elucidate the mechanisms of various functions, and in therapeutic methods which enhance or repress those functions. For example, genes participating in tissue generation and functional expression can be used in regenerative medicines.
[0396] emotional reaction
[0397] tissue generation and functional expression
[0398] motor function controlled by the brain, signaling function controlled by the brain
[0399] emotional reaction, fear response, and panic

[0400] Furthermore, information on the nucleotide sequence of the full-length cDNAs or their full-length amino acid sequences as provided by the present invention can be used to isolate human genes based on partial sequence information obtained by functional analysis of various genes, or from sequence information of genes from non-human organisms.

[0401] Any patents, patent applications, and publications cited herein are incorporated by reference.

[0402] The present invention is illustrated more specifically with reference to the following examples, but is not to be construed as being limited thereto.

### EXAMPLE 1

### Preparation of cDNA Library by Oligo-Capping

(1) Extraction and Purchase of mRNA

[0403] Total RNAs as mRNA sources were extracted from human tissues (shown below) by the method described in the reference (J. Sambrook, E. F. Fritsch & T. Maniatis, Molecular Cloning Second edition, Cold Spring harbor Laboratory Press, 1989). Further, by the method described in the reference (J. Sambrook, E. F. Fritsch & T. Maniatis, Molecular Cloning Second edition, Cold Spring harbor Laboratory Press, 1989), total RNAs as mRNA sources were extracted from human culture cells and human primary culture cells (shown below) cultivated by the methods described in the catalogs.

[0404] The library names and origins are indicated below in the order of -Library name: Origin”. When a library was prepared by the subtraction method, the item is followed by a description of how to prepare the subtracted library.

<Extraction of mRNA from Human Tissues>

NTONG: Normal tongue;

CTONG: Tongue cancer;

FCBBF: Fetal brain;

OCBBF: Fetal brain;

PLACE: Placenta;

SYNOV: Synovial membrane tissue (from rheumatioid arthritis);

CORDB: Cord blood.

<Extraction of mRNA from Culture Cells>

BNGH4: H4 cells (ATCC #HTB-148);

IMR32: IMR32 cells (ATCC #CCL-127);

SKNMC: SK-N-MC cells (ATCC #HTB-10);

3NB69: NB69 cells (RCB #RCB0480);

BGGI1: GI1 cells (RCB #RCB0763);

NB9N4: NB9 cells (RCB #RCB0477);

SKNSH: SK-N-SH cells (RCB #RCB0426);

AHMSC: Human mesenchymal cells (HMSC);

CHONS: Chondrocytes;

ERLTF: TF-1 cells (Erythroleukemia);

HELAC: HeLa cells;

JCMLC: Myelogenous leukemia cells;

MESTC: Mesenchyme stem cells;

N1ESE: Mesenchymal stem cells;

NCRRM: Embryonal carcinomas;

NCRRP: Embryonal carcinomas treated with retinoic acid (RA) to induce the differentiation;

T1ESE: Mesenchymal stem cells treated with trichostatin and 5-azacytidine to induce the differentiation;

NT2RM: NT2 cells (STARATAGENE #204101);

NT2RP: NT2 cells treated with RA for 5 weeks to induce the differentiation;

NT2RI: NT2 cells treated with RA for 5 weeks to induce the differentiation, followed by the treatment with the growth inhibitor for 2 weeks;

NT2NE: NT2 cells were treated with RA and the growth inhibitor for the neuronal differentiation, and the resultant neurons were concentrated and harvested (NT2 Neuron);

[0405] NTISM: NT2 cells (STARATAGENE #204101) were treated with RA for five weeks to induce the differentiation, and then treated with the growth inhibitor for two weeks; mRNA was prepared from the cells and a cDNA library was constructed from the mRNA; the cDNA libraries whose nucleotide sequences were shared by those of mRNAs from undifferentiated NT2 cells were subtracted by using a Subtract Kit (Invitrogen #K4320-01); the subtracted library (NT2RI-NT2RM) was provided by this procedure.

[0406] RCB indicates that the cell was provided by the Cell Bank, RIKEN GENE BANK, The Institute of Physical and Chemical Research; ATCC indicates that the cell was provided by American Type Culture Collection.

<Extraction of mRNA from Primary Culture Cells>

ASTRO: Normal human astrocyte NHA5732, Takara Shuzo #CC2565;

DFNES: Normal human dermal fibroblast (neonatal skin); NHDF-Neo NHDF2564, Takara Shuzo #CC2509;

MESAN: Normal human mesangial cell NHMC56046-2, Takara Shuzo #CC2559;

NHNPC: Normal human neural progenitor cell NHNP5958, Takara Shuzo #CC2599;

PEBLM: Normal human peripheral blood mononuclear cell HPBMC5939, Takara Shuzo #CC2702;

HSYRA: Human synoviocyte HS-RA (from rheumatoid arthritis), Toyobo #T404K-05;

PUAEN: Normal human pulmonary artery endothelial cells, Toyobo #T302K-05;

UMVEN: Normal human umbilical vein endothelial cell HUVEC, Toyobo #T200K-05;

HCASM: Normal human coronary artery smooth muscle cell HCASMC, Toyobo #T305K-05;

HCHON: Normal human chondrocyte HC, Toyobo #T402K-05;

HHDPC: Normal human dermal papilla cell HDPC, Toyobo #THPCK-001;

CD34C: CD34+ cells (AllCells, LLC #CB14435M);

D3OST: CD34+ cells treated with the osteoclast differentiation factor (ODF) for three days to induce the differentiation;

D6OST: CD34+ cells treated with ODF for six days to induce the differentiation;

D9OST: CD34+ cells treated with ODF for nine days to induce the differentiation;

ACTVT: Activated T-cells;

LYMPB: Lymphoblasts (EB virus transferred B cells);

NETRP: Neutrophils.

[0407] Total RNAs extracted from the following human tissues were then purchased and used as mRNA sources. Library names and the origins are indicated below in the order of “Library name: Origin”. When a library was prepared by the subtraction method, the item is followed by a description of how to prepare the subtracted library.

<Purchase of Total RNA Containing mRNA Extracted from Human Tissues>

ADRGL: Adrenal gland, CLONTECH #64016-1;

BRACE: Brain (cerebellum), CLONTECH #64035-1;

BRAWH: Whole brain, CLONTECH #64020-1;

FEBRA: Fetal brain, CLONTECH #64019-1;

FELIV: Fetal liver, CLONTECH #64018-1;

HEART: Heart, CLONTECH #64025-1;

HLUNG: Lung, CLONTECH #64023-1;

KIDNE: Kidney, CLONTECH #64030-1;

LIVER: Liver, CLONTECH #64022-1;

MAMGL: Mammary Gland, CLONTECH #64037-1;

PANCR: Pancreas, CLONTECH #64031-1;

PROST: Prostate, CLONTECH #64038-1;

SALGL: Salivary Gland, CLONTECH #64026-1;

SKMUS: Skeletal Muscle, CLONTECH #64033-1;

SMINT: Small Intestine, CLONTECH #64039-1;

SPLEN: Spleen, CLONTECH #64034-1;

STOMA: Stomach, CLONTECH #64090-1;

TBAES: Breast (Tumor), CLONTECH #64015-1;

TCERX: Cervix (Tumor), CLONTECH #64010-1;

TCOLN: Colon (Tumor), CLONTECH #64014-1;

TESTI: Testis, CLONTECH #64027-1;

THYMU: Thymus, CLONTECH #64028-1;

TLUNG: Lung (Tumor), CLONTECH #64013-1;

TOVAR: Ovary (Tumor), CLONTECH #64011-1;

TRACH: Trachea, CLONTECH #64091-1;

TUTER: Uterus (Tumor), CLONTECH #64008-1;

UTERU: Uterus, CLONTECH #64029-1;

ADIPS: Adipose, Invitrogen #D6005-01;

BLADE: Bladder, Invitrogen #D6020-01;

BRALZ: Cerebral cortex from an Alzheimer patient (Brain, cortex, Alzheimer), Invitrogen #D6830-01;

CERVX: Cervix, Invitrogen #D6047-01;

COLON: Colon, Invitrogen #D6050-0;

NESOP: Esophagus, Invitrogen #D6060-01;

PERIC: Pericardium, Invitrogen #D6105-01;

RECTM: Rectum, Invitrogen #D6110-01;

TESOP: Esophageal (Tumor), Invitrogen #D6860-01;

TKIDN: Kidney (Tumor), Invitrogen #D6870-01;

TLIVE: Liver (Tumor), Invitrogen #D6880-01;

TSTOM: Stomach (Tumor), Invitrogen #D6920-01;

BEAST: Adult breast, STARATAGENE #735044;

FEHRT: Fetal heart, STARATAGENE #738012;

FEKID: Fetal kidney, STARATAGENE #738014;

FELNG: Fetal lung, STARATAGENE #738020;

NOVAR: Adult ovary, STARATAGENE #735260;

[0408] BRASW: subtracted library (BRALZ-BRAWH). A cDNA library was constructed from mRNA prepared from tissues of cerebral cortex obtained from an Alzheimer patient [BRALZ: Cerebral cortex from an Alzheimer patient (Brain, cortex, Alzheimer), Invitrogen #D6830-01]; the cDNA libraries whose nucleotide sequences were shared by those of mRNAs from whole brain tissue [BRAWH: Whole brain, CLONTECH #64020-1] were subtracted using a Subtract Kit (Invitrogen #K4320-01).

[0409] Further, mRNAs extracted and purified as poly A(+) RNAs from the human tissues shown below were purchased. A cDNA library was prepared from an RNA mixture in which the poly A(+) RNA from each tissue was combined with poly A(−) RNA. The poly A(−) RNA was prepared by removing poly A(+) RNA from the total RNA of whole brain tissue (CLONTECH #64020-1) by using oligo dT cellulose. The library names and origins are indicated below in the order of “Library name: Origin”.

<Purchase of mRNAs of Human Tissues as Poly A(+) RNAs>

BRAMY: Brain (amygdala), CLONTECH #6574-1;

BRCAN: Brain (caudate nucleus), CLONTECH #6575-1;

BRCOC: Brain (corpus callosum), CLONTECH #6577-1;

BRHIP: Brain (hippocampus), CLONTECH #6578-1;

BRSSN: Brain (substantia nigra), CLONTECH #6580-1;

BRSTN: Brain (subthalamic nucleus), CLONTECH #6581-1;

BRTHA: Brain (thalamus), CLONTECH #6582-1.

(2) Preparation of cDNA Libraries

[0410] A cDNA library was prepared from each RNA using the improved method (WO 01/04286) of oligo capping [M. Maruyama and S. Sugano, Gene, 138: 171-174 (1994)]. A series of procedures, BAP (Bacterial Alkaline Phosphatase) treatment, TAP (Tobacco Acid Pyrophosphatase) treatment, RNA ligation, first strand cDNA synthesis and RNA removal, were carried out using the oligo-cap linker (agcaucgagu cggccuuguu ggccuacugg/SEQ ID NO: 4991) and oligo dT primer (gcggctgaag acggcctatg tggccttttt tttttttttt tt/SEQ ID NO: 4992), as described in WO 01/04286. The single-stranded cDNA was then converted to a double-stranded cDNA by PCR (polymerase chain reaction) using 5′ (agcatcgagt cggccttgtt g/SEQ ID NO: 4993) and 3′ (gcggctgaag acggcctatg t/SEQ ID NO: 4994) PCR primers, and then digested with SfiI. Then, a fraction of cDNA fragments, typically 2-kb or longer (3-kb or longer in some cases), was unidirectionally cloned into a DraIII-digested pME18SFL3 vector (FIG. 1) (GenBank AB009864, Expression vector); and the cDNA library was thus prepared.

[0411] Shown below are the names of cDNA libraries used in the analysis of full-length cDNA sequences, and their origins. The Library Name is provided with the Type, Origin, and such of the library source, demarcated by a slash mark (/) within parentheses.

3NB69 (culture cells/NB69 cells (RCB #RCB0480))

ACTVT (primary culture cells/Activated T-cells (Activated T-cell))

ADIPS (Tissues/Adipose (Invitrogen #D6005-01))

ADRGL (Tissues/Adrenal gland (CLONTECH #64016-1))

ASTRO (primary culture cells/Normal Human Astrocyte NHA5732 (Takara Shuzo #CC2565))

BLADE (Tissues/Bladder (Invitrogen #D6020-01))

BNGH4 (culture cells/H4 cells (ATCC #HTB-148))

BRACE (Tissues/Brain (cerebellum) (CLONTECH #64035-1))

BRALZ (Tissues/Cerebral cortex from an Alzheimer patient (Brain, cortex, Alzheimer) (Invitrogen #D6830-01))

BRAMY (Tissues/Brain (amygdala) (CLONTECH #6574-1))

BRASW (Tissues/subtracted library (BRALZ-BRAWH). The cDNAs from tissues of cerebral cortex obtained from an Alzheimer patient whose nucleotide sequences were shared by those of mRNAs from whole brain tissue were subtracted.

BRAWH (Tissues/Whole brain (CLONTECH #64020-1))

BRCAN (Tissues/Brain (caudate nucleus) (CLONTECH #6575-1))

BRCOC (Tissues/Brain (corpus callosum) (CLONTECH #6577-1))

BRHIP (Tissues/Brain (hippocampus) (CLONTECH #6578-1))

BRSSN (Tissues/Brain (substantia nigra) (CLONTECH #6580-1))

BRSTN (Tissues/Brain (subthalamic nucleus) (CLONTECH #6581-1))

BRTHA (Tissues/Brain (thalamus) (CLONTECH #6582-1))

CERVX (Tissues/Cervix (Invitrogen #D6047-01))

COLON (Tissues/Colon (Invitrogen #D6050-0))

CORDB (Tissues/Cord blood)

CTONG (Tissues/Tongue Cancer)

D3OST (primary culture cells/CD34+ cells (treated with ODF for three days to induce the differentiation))

DFNES (primary culture cells/Normal human dermal fibroblasts (neonatal skin); NHDF-Neo NHDF2564 (Takara Shuzo #CC2509))

ERLTF (culture cells/TF-1 cells (Erythroleukemia))

FCBBF (Tissues/Fetal brain)

FEBRA (Tissues/Fetal brain (CLONTECH #64019-1))

HCASM (primary culture cells/Normal human coronary artery smooth muscle cell HCASMC (Toyobo #T305K-05))

HCHON (primary culture cells/Normal human chondrocyte HC (Toyobo #T402K-05))

HEART (Tissues/Heart (CLONTECH #64025-1))

HHDPC (primary culture cells/Normal human dermal papilla cell HDPC (Toyobo #THPCK-001))

HLUNG (Tissues/Lung (CLONTECH #64023-1))

HSYRA (primary culture cells/Human synoviocyte HS-RA (from rheumatoid arthritis)(Toyobo #T404K-05))

IMR32 (culture cells/IMR32 cells (ATCC #CCL-127))

KIDNE (Tissues/Kidney (CLONTECH #64030-1))

LIVER (Tissues/Liver (CLONTECH #64022-1))

LYMPB (primary culture cells/Lymphoblasts (EB virus transferred B cells))

MESAN (primary culture cells/Normal human mesangial cell NHMC56046-2 (Takara Shuzo #CC2559))

MESTC (culture cells/Mesenchyme stem cells)

NB9N4 (culture cells/NB9 cells (RCB #RCB0477))

NCRRP (culture cells/Embryonal carcinomas treated with RA to induce the differentiation)

NESOP (Tissues/Esophagus (Invitrogen #D6060-01))

NHNPC (primary culture cells/Normal human neural progenitor cell NHNP5958 (Takara Shuzo #CC2599))

NOVAR (Tissues/Adult ovary (STARATAGENE #735260))

NT2NE (culture cells/NT2 cells were treated with RA and the growth inhibitor for the neuronal differentiation, and the resultant neurons were concentrated and harvested (NT2 Neuron))

NT2RI (culture cells/NT2 cells treated with RA for five weeks to induce the differentiation, followed by the treatment with the growth inhibitor for 2 weeks)

NT2RP (culture cells/NT2 cells treated with RA for five weeks to induce the differentiation)

NTONG (Tissues/Normal tongue)

OCBBF (Tissues/Fetal brain)

PEBLM (primary culture cells/Normal human peripheral blood mononuclear cell HPBMC5939 (Takara Shuzo #CC2702))

PERIC (Tissues/Pericardium (Invitrogen #D6105-01))

PLACE (Tissues/Placenta)

PROST (Tissues/Prostate (CLONTECH #64038-1))

PUAEN (primary culture cells/Normal human pulmonary artery endothelial cells (Toyobo #T302K-05))

RECTM (Tissues/Rectum (Invitrogen #D6110-01))

SKMUS (Tissues/Skeletal Muscle (CLONTECH #64033-1))

SKNMC (culture cells/SK-N-MC cells (ATCC #HTB-10))

SKNSH (culture cells/SK-N-SH cells (RCB #RCB0426))

SMINT (Tissues/Small Intestine (CLONTECH #64039-1))

SPLEN (Tissues/Spleen (CLONTECH #64034-1))

STOMA (Tissues/Stomach (CLONTECH #64090-1))

SYNOV (Tissues/Synovial membrane tissue (from rheumatoid arthritis))

T1ESE (culture cells/Mesenchymal stem cell (treated with trichostatin and 5-azacytidine to induce the differentiation))

TBAES (Tissues/Breast (Tumor) (CLONTECH #64015-1))

TCERX (Tissues/Cervix (Tumor) (CLONTECH #64010-1))

TCOLN (Tissues/Colon (Tumor) (CLONTECH #64014-1))

TESOP (Tissues/Esophageal (Tumor) (Invitrogen #D6860-01))

TESTI (Tissues/Testis (CLONTECH #64027-1))

THYMU (Tissues/Thymus (CLONTECH #64028-1))

TKIDN (Tissues/Kidney (Tumor) (Invitrogen #D6870-01))

TLIVE (Tissues/Liver (Tumor) (Invitrogen #D6880-01))

TOVAR (Tissues/Ovary (Tumor) (CLONTECH #64011-1))

TRACH (Tissues/Trachea (CLONTECH #64091-1))

TSTOM (Tissues/Stomach (Tumor) (Invitrogen #D6920-01))

TUTER (Tissues/Uterus (Tumor) (CLONTECH #64008-1))

UTERU (Tissues/Uterus (CLONTECH #64029-1))

[0412] cDNA libraries with a high fullness ratio (the fullness ratio of 5′-end was 90% on average, calculated for each cDNA library using the protein coding region found in known mRNA species as an index) prepared by the improved oligo-capping method were constructed using a eukaryotic expression vector pME18SFL3. The vector contained SRα promoter and SV40 small t intron upstream of the cloning site, and SV40 polyA added signal sequence site downstream. As the cloning site of pME18SFL3 has asymmetrical DraIII sites, and the ends of cDNA fragments contain SfiI sites complementary to the DraIII sites, the cloned cDNA fragments can be inserted downstream of the SRα promoter unidirectionally. Therefore, clones containing full-length cDNA can be expressed transiently by introducing the obtained plasmid directly into COS cells, etc. Thus, clones can be analyzed very easily using the clone gene product proteins, or those proteins' biological activities.

(3) Assessment of 5′-End Completeness of Clones Derived from a cDNA Library Prepared by Oligo-Capping

[0413] With respect to the plasmid DNAs of clones derived from the libraries, the nucleotide sequences of cDNA 5′-ends (3′-ends as well in some cases) were determined in a DNA sequencer (ABI PRISM 3700, PE Biosystems), after sequencing reaction were conducted using a DNA sequencing reagent (BigDye Terminator Cycle Sequencing FS Ready Reaction Kit, PE Biosystems) according to the manual. A database was constructed based on the obtained data.

[0414] The 5′-end completeness of about 1,110,000 clones derived from the human cDNA libraries prepared by the improved oligo-capping method was determined using the following method. The clones whose 5′-end sequences were consistent with those of known human mRNA in the public database were judged to be “full-length” if they had a longer 5′-end sequence than that of the known human mRNA. Even if the 5′-end sequence was shorter, clones containing the translation initiation codon were judged to comprise the “full-length” sequence. Clones which did not comprise the translation initiation codon were judged to be “not-full-length”. The fullness ratio ((the number of full-length clones)/(the number of full-length and not-full-length clones)) at the 5′-end of the cDNA clones was determined by comparison with known human mRNA. The fullness ratio of the 5′-ends was found to be 90%. The result indicates that the fullness ratio at the 5′-end sequence was extremely high in human cDNA clones obtained by the oligo-capping method.

### EXAMPLE 2

### Sequencing Analysis of cDNA Ends and Selection of Full-Length Clones

[0415] With respect to the plasmid DNAs of clones obtained from each cDNA library, the 5′-end nucleotide sequences of the cDNAs were determined in a DNA sequencer (ABI PRISM 3700, PE Biosystems), after sequencing reaction was conducted by using a DNA sequencing reagent (Dye Terminator Cycle Sequencing FS Ready Reaction Kit, dRhodamine Terminator Cycle Sequencing FS Ready Reaction Kit or BigDye Terminator Cycle Sequencing FS Ready Reaction Kit, PE Biosystems) according to the manual. A database was constructed using the data obtained.

[0416] For the analyzed 5′-end sequences of cDNA clones, the data with the annotation of “complete cds” in the GenBank and UniGene were searched by BLAST homology search. When identical to certain human mRNA sequences, such cDNA clones were excluded. Then, clustering was carried out. When the identity was 90% or higher, and the length of consensus sequence was 50 base pairs or longer, the cDNA clones were assumed to belong to an identical cluster, and thus clustered. cDNA clones longer in the 5′ direction were selected from the members belonging to a cluster; if required, the 3′-end sequences of the selected clones were determined by the same analysis method as used to determine the 5′-end sequences. The data of the end sequences obtained were analyzed, and then the clones forming a sequence contig at 5′- and 3′-ends were excluded. Further, as mentioned above, the data was analyzed again by BLAST homology search; when identical to certain human mRNA sequences (including sequences patented and applied for), the cDNA clones were excluded. Thus, the cDNAs clones to be analyzed for their nucleotide sequence were obtained.

### EXAMPLE 3

### Analysis of the Full-Length Nucleotide Sequences

[0417] The full-length nucleotide sequences of the selected clones were determined. The nucleotide sequence determination was mainly performed by primer walking method comprising the dideoxy terminator method using custom-made synthetic DNA primers. Namely, the nucleotide sequences of the DNAs were determined in a sequencer from PE Biosystems, after sequencing reaction was carried out with a DNA sequencing reagent from the same supplier using the custom-made synthetic DNA primers according to the manual. A part of the clones were analyzed with a DNA sequencer from Licor.

[0418] Further, the nucleotide sequences of a part of the clones were determined by the shotgun method where the plasmids containing the cDNAs were digested at random were used, instead of the use of custom-made primers, by the same method in the DNA sequencer. The full-length nucleotide sequences were finally determined by completely assembling the partial nucleotide sequences obtained by the above method.

[0419] Then, the regions translatable to proteins were deduced from the determined full-length nucleotide sequences, and thereby the amino acid sequences were determined. SEQ ID NOs corresponding to the respective sequences are shown in Table 1.

### EXAMPLE 4

### Functional Prediction by Homology Search

[0420] GenBank, SwissProt, UniGene, RefSeq, and nr were searched using BLAST for the determined nucleotide sequences (SEQ ID NOs: 1-2188) and the ORF amino acid sequences deduced to encode the polypeptides (SEQ ID NOs: 2189-4376). SwissProt, RefSeq, and nr were searched using BLAST for the nucleotide sequences of SEQ ID NOs: 4377-4683, and the amino acid sequences of SEQ ID NOs: 4684-4990. Of the hit data which met the criteria described below, representative hit data were selected. This representative data is hit data with a higher homology and that enables relatively easy functional prediction for nucleotide sequences and deduced amino acid sequences. The results of the homology search are shown at the end of this specification.

[0421] Hit data whose P value or E value is 10⁻⁴ or less

[0422] For analysis using an amino acid database, hit data whose P value or E value is 10⁻⁴ or less, where the length of consensus sequence×homology=30 or higher,

[0423] Thus, only representative data are indicated and molecules exhibiting homology to each clone are not limited thereto. For some clones, hit data that do not meet the above-described criteria in BLAST search are not shown.

### EXAMPLE 5

### Search for Signal Sequence, Transmembrane Domain and Other Functional Domains in the Deduced Amino Acid Sequences

[0424] With respect to the amino acid sequences deduced from the full-length nucleotide sequences, the prediction was made for the presence of signal sequence at the amino terminus, the presence of transmembrane domain, and the presence of functional protein domains (motifs). The signal sequence at the amino terminus was searched for by PSORT [K. Nakai & M. Kanehisa, Genomics, 14: 897-911 (1992)]; the transmembrane domain, by SOSUI [T. Hirokawa et al., Bioinformatics, 14: 378-379 (1998)] (Mitsui Knowledge Industry); the function domain, by Pfam (Version 5.5) (http://www.sanger.ac.uk/Software/Pfam/index.shtml). The amino acid sequence in which the signal sequence at the amino terminus or transmembrane domain had been predicted to be present by PSORT or SOSUI were assumed to be a secretory or membrane protein. Further, when the amino acid sequence hit a certain functional domain by the Pfam functional domain search, the protein function can be predicted based on the hit data, for example, by referring to the function categories on the PROSITE (http://www.expasy.ch/cgi-bin/prosite-list.pl). In addition, the functional domain search can also be carried out on the PROSITE.

[0425] The search results obtained with the respective programs are shown below.

[0426] The 161 clones whose deduced amino acid sequences were detected to have the signal sequences by PSORT are as follows.

[0427] ADIPS2000088, ADRGL2000172, ADRGL2009146, BNGH42003570, BRACE2030341, BRACE2031531, BRACE2039327, BRACE2041200, BRACE2043142, BRACE3004113, BRACE3004843, BRACE3010397, BRACE3011505, BRACE3026735, BRACE3040856, BRAMY2004771, BRAMY2005052, BRAMY2019300, BRAMY2019963, BRAMY3007206, BRAMY3007609, BRAMY3008505, BRAWH2002560, BRAWH3001475, BRAWH3003992, BRAWH3004666, BRAWH3006548, BRCAN2002948, BRCAN2010376, BRCAN2012481, BRHIP2005236, BRHIP2026288, BRHIP3008598, BRSSN2014424, BRSTN2007000, BRSTN2010363, BRSTN2016470, BRTHA2002608, BRTHA2005579, BRTHA2016496, BRTHA2018344, BRTHA3000633, BRTHA3017047, COLON2000568, COLON2002443, COLON2005126, CTONG1000302, CTONG1000488, CTONG1000508, CTONG2000042, CTONG2008233, CTONG3000707, CTONG3001560, CTONG3003179, CTONG3003483, CTONG3003737, CTONG3005648, CTONG3008258, CTONG3009385, D3OST2002182, D3OST2002648, FCBBF2001183, FCBBF2007510, FCBBF3009888, FCBBF4000076, FEBRA2025427, HCASM2002502, HCHON2001577, HCHON2002676, HEART2001680, HSYRA2009102, IMR322002110, KIDNE2000846, KIDNE2006580, KIDNE2013095, LYMPB2000083, NOVAR2000136, NOVAR2001108, NT2RI2008724, NT2RI3005403, NT2RI3007065, NT2RP7000359, NT2RP7000466, NTONG2000413, OCBBF2006764, PLACE5000171, PLACE5000282, PLACE6012574, PROST2018090, PUAEN2002489, PUAEN2009795, RECTM2000433, SKMUS2000757, SKNMC2002402, SMINT2015787, SPLEN2009548, SPLEN2012624, SPLEN2012889, SPLEN2021701, SPLEN2030479, SPLEN2031125, SPLEN2034021, SPLEN2034781, SPLEN2037722, SPLEN2040222, STOMA2004294, SYNOV4002883, SYNOV4008336, TESOP2002273, TESOP2005485, TESOP2007636, TESTI2002618, TESTI2036684, TESTI2048898, TESTI4001561, TESTI4001665, TESTI4008401, TESTI4008797, TESTI4014392, TESTI4020102, TESTI4025797, TESTI4028429, TESTI4035065, TESTI4035649, TESTI4042711, TESTI4046487, THYMU2001053, THYMU2003632, THYMU2005321, THYMU2013386, THYMU2014353, THYMU2019210, THYMU2027497, THYMU2027695, THYMU2029676, THYMU2039780, THYMU2040412, THYMU3004835, THYMU3005696, THYMU3007845, TKIDN2002424, TKIDN2019116, TLIVE2002690, TRACH2007834, TRACH3002650, TRACH3004786, TRACH3006149, TRACH3035199, TRACH3035526, UTERU1000339, UTERU2025645, UTERU2026090, UTERU3000645, UTERU3000899, UTERU3001585, UTERU3002209, UTERU3002383, UTERU3003776, UTERU3009690, UTERU3009979, UTERU3015500

[0428] Deduced amino acid sequences of following 20 clones were also detected to have the signal sequences by PSORT.

[0429] BRACE2002589, BRACE2009318, BRACE2039823, BRAWH2006395, BRAWH2008993, BRCOC2019841, BRHIP2005271, BRTHA2011321, FEBRA2028256, HCASM2003099, PROST2000452, PROST2019487, SPLEN2016932, STOMA2003158, SYNOV2001660, SYNOV4003981, TESTI2015626, TESTI4000319, TKIDN2018926, UTERU2032279

[0430] The 523 clones whose deduced amino acid sequences were detected to have the transmembrane domains by SOSUI are as follows. Numerals indicate the numbers of transmembrane domains detected in the deduced amino acid sequences. Of the search result, the Clone Name and the Number of transmembrane domains are demarcated by a double slash mark (//).

[0431] ACTVT2000380//1, ADRGL2003329//2, ASTRO2014923//6, ASTRO3000301//1, BLADE1000176//1, BLADE2002073//1, BLADE2002947//2, BLADE2004462//2, BLADE2004670//1, BLADE2008539//1, BNGH42003570//1, BRACE1000186//1, BRACE2005457//8, BRACE2014306//11, BRACE2016981//1, BRACE2030341//1, BRACE2030884//3, BRACE2031527//1, BRACE2031899//2, BRACE2032385//3,

[0432] BRACE2036005//1, BRACE2040138//2, BRACE2043142//4, BRACE2043665//1, BRACE3000697//4, BRACE3001391//3, BRACE3002298//1, BRACE3003004//1, BRACE3004113//1, BRACE3004843//1, BRACE3006462//3, BRACE3008384//6, BRACE3009574//1, BRACE3009708//6, BRACE3010397//2, BRACE3011505//2, BRACE3013740//3, BRACE3014005//8, BRACE3014068//3, BRACE3014807//3,

[0433] BRACE3020286//3, BRACE3020594//2, BRACE3024662//1, BRACE3025531//1, BRACE3026008//2, BRACE3031838//1, BRACE3040856//3, BRALZ2016085//10, BRAMY2004771//2, BRAMY2005052//2, BRAMY2017528//1, BRAMY2019300//2, BRAMY2019963//1, BRAMY2028856//2, BRAMY2033003//2, BRAMY2033116//2, BRAMY2033594//1, BRAMY2036396//2, BRAMY2039872//2, BRAMY2040592//2,

[0434] BRAMY2041542//1, BRAMY2045036//1, BRAMY2047420//1, BRAMY2047765//3, BRAMY3002312//1, BRAMY3004224//2, BRAMY3004919//5, BRAMY3008505//2, BRASW1000125//2, BRAWH2002560//1, BRAWH2002761//3, BRAWH2007658//2, BRAWH2014414//1, BRAWH2016439//1, BRAWH2016702//3, BRAWH3000078//2, BRAWH3000314//1, BRAWH3001891//6, BRAWH3002600//1, BRAWH3003555//2,

[0435] BRAWH3003727//1, BRAWH3004453//1, BRAWH3004666//2, BRAWH3005132//1, BRAWH3005912//1, BRAWH3006548//2, BRAWH3007221//2, BRAWH3007506//2, BRAWH3007592//1, BRAWH3008634//1, BRCAN2012355//5, BRCAN2012481//1, BRCAN2013655//3, BRCAN2014143//5, BRCAN2028355//4, BRCOC2007034//2, BRCOC2019934//2, BRHIP2000691//1, BRHIP2001805//1, BRHIP2002172//8,

[0436] BRHIP2004814//1, BRHIP2004883//2, BRHIP2005752//2, BRHIP2009414//7, BRHIP2013699//1, BRHIP2026288//2, BRHIP3000526//1, BRHIP3007483//2, BRHIP3007586//1, BRHIP3008598//3, BRHIP3015751//1, BRHIP3024118//7, BRHIP3026097//1, BRSSN2003086//1, BRSSN2008549//1, BRSSN2011738//2, BRSSN2014424//9, BRSSN2018925//2, BRSTN2003835//1, BRSTN2007000//1,

[0437] BRSTN2012380//1, BRSTN2015015//2, BRSTN2016678//3, BRSTN2017110//2, BRTHA2002281//2, BRTHA2002376//2, BRTHA2002493//1, BRTHA2002608//2, BRTHA2002808//1, BRTHA2003110//2, BRTHA2003461//3, BRTHA2006075//2, BRTHA2011194//1, BRTHA2012980//2, BRTHA2013460//2, BRTHA2015696//2, BRTHA2015878//2, BRTHA2016215//1, BRTHA2017985//1, BRTHA2018344//3,

[0438] BRTHA2018624//1, BRTHA3000633//2, BRTHA3002427//12, BRTHA3003474//2, BRTHA3007148//3, BRTHA3008386//4, BRTHA3008778//1, BRTHA3009090//1, BRTHA3009291//2, BRTHA3016845//2, BRTHA3017047//2, BRTHA3017589//2, BRTHA3017848//8, BRTHA3018656//9, CERVX2002006//1, COLON2002443//1, COLON2005126//2, CTONG1000302//1, CTONG1000341//1, CTONG2004062//4,

[0439] CTONG2008233//2, CTONG2009423//3, CTONG2009531//1, CTONG2013178//1, CTONG2019652//1, CTONG2019788//1, CTONG2020127//1, CTONG2020522//1, CTONG2020638//6, CTONG2022601//2, CTONG2023512//2, CTONG2026920//1, CTONG2027327//1, CTONG2028124//3, CTONG2028687//2, CTONG3001560//4, CTONG3002020//2, CTONG3002412//3, CTONG3003483//2, CTONG3003737//1,

[0440] CTONG3008252//1, CTONG3008496//2, CTONG3008566//1, CTONG3008951//2, CTONG3009227//1, CTONG3009239//3, CTONG3009328//5, CTONG3009385//4, D3OST2002648//6, DFNES1000107//1, DFNES2010502//3, FCBBF2001183//2, FCBBF2007510//2, FCBBF3003435//1, FCBBF3004502//10, FCBBF3009888//1, FCBBF3012170//1, FCBBF3021576//1, FCBBF3023895//1, FEBRA2007544//1,

[0441] FEBRA2007708//13, FEBRA2008311//7, FEBRA2020668//2, FEBRA2025427//1, FEBRA2027082//1, HCASM2003212//1, HCASM2007047//9, HCHON2000212//1, HCHON2001084//12, HCHON2001548//1, HCHON2001712//9, HCHON2004007//3, HCHON2005921//4, HLUNG2000014//1, HLUNG2003872//5, HLUNG2010464//4, HLUNG2015617//2, HLUNG2017350//4, HSYRA2005496//2, HSYRA2006873//1,

[0442] HSYRA2008714//6, HSYRA2009102//10, IMR322000127//2, IMR322002110//1, IMR322006222//1, KIDNE1000064//10, KIDNE2000832//10, KIDNE2000846//5, KIDNE2006580//1, KIDNE2010264//1, KIDNE2011635//12, KIDNE2012945//1, KIDNE2013095//3, LIVER2007415//1, LYMPB2000083//3, MESAN2001979//3, MESAN2012054//2, MESTC1000042//1, NHNPC2000606//1, NHNPC2001223//1,

[0443] NT2RI2008724//1, NT2RI2009855//3, NT2RI3001263//1, NT2RI3003095//3, NT2RI3003382//1, NT2RI3003409//1, NT2RI3005403//2, NT2RI3006673//1, NT2RI3007065//3, NT2RI3007543//2, NT2RI3007978//2, NT2RP7000466//1, NT2RP7009030//1, NT2RP7014005//2, NTONG2000413//1, OCBBF2006151//5, OCBBF2006567//1, OCBBF2006764//1, OCBBF2007114//1, OCBBF2007428//1,

[0444] OCBBF2009926//2, OCBBF2010140//13, OCBBF2017516//2, OCBBF2021788//1, OCBBF2024719//1, OCBBF2025458//2, OCBBF2030517//2, OCBBF2030574//3, OCBBF2031167//1, OCBBF2033869//2, OCBBF2038317//2, OCBBF3000483//1, OCBBF3003320//6, OCBBF3004314//1, PEBLM2000170//1, PEBLM2000338//2, PEBLM2002594//2, PEBLM2006113//1, PEBLM2007834//1, PERIC2001227//1,

[0445] PERIC2003452//3, PERIC2004909//2, PERIC2006035//7, PERIC2007914//3, PLACE5000171//1, PLACE5000260//2, PLACE6012574//2, PLACE7000514//1, PLACE7001022//1, PROST1000184//2, PROST1000528//2, PROST1000559//1, PROST2018902//1, PROST2018922//1, PUAEN2002489//4, PUAEN2005588//1, PUAEN2006701//3, PUAEN2009174//1, PUAEN2009852//1, RECTM2001347//2,

[0446] SMINT1000192//1, SMINT2002743//2, SMINT2009902//4, SMINT2015787//2, SPLEN2001599//1, SPLEN2009548//2, SPLEN2012889//3, SPLEN2015158//1, SPLEN2015679//1, SPLEN2021701//2, SPLEN2023733//7, SPLEN2023791//1, SPLEN2025491//1, SPLEN2029522//1, SPLEN2029683//2, SPLEN2030335//1, SPLEN2030479//1, SPLEN2031125//2, SPLEN2031424//2, SPLEN2031547//6,

[0447] SPLEN2031724//3, SPLEN2031780//2, SPLEN2032813//2, SPLEN2033098//1, SPLEN2036326//4, SPLEN2037722//2, SPLEN2038180//2, SPLEN2038345//1, SPLEN2040222//4, SPLEN2041304//1, SPLEN2042598//3, STOMA2008546//3, SYNOV2005817//2, SYNOV2012326//2, SYNOV2016124//1, SYNOV2021320//2, SYNOV4003322//3, SYNOV4004184//1, SYNOV4004741//3, SYNOV4004914//1,

[0448] SYNOV4006256//2, SYNOV4007430//1, SYNOV4007553//2, SYNOV4007671//1, SYNOV4008336//2, SYNOV4008440//4, TCERX2000613//1, TESOP2000801//1, TESOP2001345//2, TESOP2001865//2, TESOP2002273//2, TESOP2002539//3, TESOP2005579//1, TESOP2006041//1, TESOP2007052//1, TESOP2007262//1, TESOP2007636//2, TESTI1000257//11, TESTI1000348//3, TESTI2002036//6,

[0449] TESTI2002618//2, TESTI2002928//1, TESTI2003347//2, TESTI2005610//1, TESTI2006648//6, TESTI2013382//3, TESTI2024567//5, TESTI2034953//1, TESTI2034997//1, TESTI2035997//1, TESTI2042450//1, TESTI2047071//2, TESTI2048898//2, TESTI2051767//3, TESTI2052822//1, TESTI4000215//2, TESTI4000724//11, TESTI4001176//1, TESTI4001561//2, TESTI4001923//1,

[0450] TESTI4002552//4, TESTI4002754//3, TESTI4005805//1, TESTI4005961//1, TESTI4006053//1, TESTI4006137//2, TESTI4007064//3, TESTI4007163//3, TESTI4007239//1, TESTI4007382//1, TESTI4008401//1, TESTI4009608//1, TESTI4013369//3, TESTI4013667//2, TESTI4013830//3, TESTI4016238//2, TESTI4017575//2, TESTI4017901//2, TESTI4018835//2, TESTI4019566//2,

[0451] TESTI4020092//1, TESTI4020102//2, TESTI4021478//7, TESTI4023722//2, TESTI4024420//1, TESTI4024874//3, TESTI4024890//2, TESTI4026456//1, TESTI4026785//1, TESTI4027821//1, TESTI4028062//1, TESTI4028429//1, TESTI4028823//4, TESTI4028880//11, TESTI4029836//7, TESTI4030159//3, TESTI4030505//2, TESTI4034172//3, TESTI4035649//2, TESTI4037244//1,

[0452] TESTI4041053//2, TESTI4042711//2, TESTI4046487//1, THYMU2003632//4, THYMU2003760//1, THYMU2005003//2, THYMU2005303//1, THYMU2007658//2, THYMU2009425//3, THYMU2011548//6, THYMU2013386//2, THYMU2014353//2, THYMU2019210//2, THYMU2030068//3, THYMU2032035//2, THYMU2032437//1, THYMU2032655//1, THYMU2033308//1, THYMU2033816//4, THYMU2034314//1,

[0453] THYMU2035064//2, THYMU2036085//6, -THYMU2037226//3, THYMU2037233//1, THYMU2037348//2, THYMU2038772//1, THYMU2038797//1, THYMU2040412//1, THYMU2041015//12, THYMU3000028//1, THYMU3000036//2, THYMU3004835//1, THYMU3006168//8, THYMU3006811//2, THYMU3007368//1, TKIDN2002424//2, TKIDN2002632//1, TKIDN2006525//2, TKIDN2009092//1, TKIDN2009889//1,

[0454] TKIDN2014771//2, TKIDN2019116//4, TLIVE2000023//5, TLIVE2001828//2, TLIVE2001927//2, TLIVE2002336//1, TLIVE2002690//2, TLIVE2003381//4, TLIVE2004110//1, TOVAR2001281//1, TRACH1000205//6, TRACH2001549//1, TRACH2001684//2, TRACH2006387//6, TRACH2007059//1, TRACH2008300//1, TRACH2020525//4, TRACH2021964//2, TRACH2022553//2, TRACH2025535//1,

[0455] TRACH2025911//1, TRACH3000014//1, TRACH3002064//1, TRACH3002650//2, TRACH3004786//4, TRACH3005294//1, TRACH3006149//1, TRACH3007391//1, TRACH3008629//2, TRACH3035199//3, TRACH3036193//1, TSTOM2000442//2, TUTER2000916//1, UTERU2004688//1, UTERU2004929//1, UTERU2006137//1, UTERU2006568//1, UTERU2007444//1, UTERU2020718//2, UTERU2022020//1,

[0456] UTERU2025025//1, UTERU2025891//2, UTERU2026090//1, UTERU2026203//3, UTERU2027591//1, UTERU2029953//3, UTERU2031851//2, UTERU2035323//3, UTERU2035469//1, UTERU3000645//4, UTERU3000899//2, UTERU3001240//4, UTERU3001571//2, UTERU3001585//2, UTERU3002209//3, UTERU3002786//1, UTERU3003116//1, UTERU3003776//1, UTERU3006308//3, UTERU3008671//1,

UTERU3009690//1, UTERU3011063//10, UTERU3016789//2

[0457] Deduced amino acid sequences of following 70 clones were also detected to have the transmembrane domains by SOSUI.

[0458] BLADE2006830//8, BRACE2002589//1, BRACE2011677//2, BRACE2029396//2, BRACE2039823//3, BRACE2039832//1, BRAMY2019111//5, BRAMY2045471//2, BRAWH2008993//1, BRHIP2003272//1, BRHIP2005724//1, BRHIP2008389//3, BRTHA2011321//2, BRTHA2017972//1, BRTHA2018011//2, BRTHA2018443//6, BRTHA3008826//1, CTONG2003348//1, CTONG2015633//2, CTONG2016942//1,

[0459] CTONG2019822//9, CTONG2020974//1, FEBRA2000790//1, FEBRA2006519//1, FEBRA2008692//1, FEBRA2028516//2, HCASM2002754//4, HCASM2003099//3, HEART2009680//7, HLUNG2013350//1, HLUNG2015418//3, IMR322013396//2, LIVER2000247//4, NT2RI2009583//8, NT2RI2027157//6, OCBBF2030116//2, PLACE7000502//2, PROST2019487//2, SPLEN2016932//1, SPLEN2037319//2,

[0460] SYNOV2001660//1, SYNOV2013637//4, SYNOV4003981//1, SYNOV4005889//1, TBAES2000932//1, TESOP2001796//2, TESOP2006865//1, TESTI2029252//9, TESTI2032643//3, TESTI2050780//6, TESTI4000137//3, TESTI4000155//1, TESTI4006473//1, TESTI4013894//4, TESTI4014801//1, TESTI4032090//2, TESTI4041086//10, THYMU2004284//1, THYMU2030462//1, THYMU2033401//4,

THYMU2034279//1, THYMU2035710//1, THYMU2040925//3, TKIDN2008778//1, TKIDN2012771//4, TRACH3000420//7, UTERU2011220//1, UTERU2021820//2, UTERU2032279//2, UTERU3015069//2

[0461] The 664 clones whose deduced amino acid sequences were detected to have functional domains with Pfam are as follows. The search result is indicated as “Clone Name//Functional Domain Name”. When the clone has Multiple Hit Functional Domains, they are listed and demarcated by a double slash mark (//). When the clone has multiple hits of an identical functional domain, each is listed without abridgment.

3NB692002685//R3H domain

3NB692002806//short chain dehydrogenase

3NB692008729//Hr1 repeat motif

ADIPS2000088//Immunoglobulin domain//Immunoglobulin domain//Immunoglobulin domain//Immunoglobulin domain

ASTRO1000009//Delta-aminolevulinic acid dehydratase//FERM domain (Band 4.1 family)

ASTRO2003960//F-box domain.

ASTRO2014923//Ion transport protein

ASTRO3000301//Transmembrane 4 family//Adenovirus E3 region protein CR2

BLADE2005036//Zinc carboxypeptidase

BLADE2007958//WD domain, G-beta repeat//WD domain, G-beta repeat//WD domain, G-beta repeat

BLADE2008539//Carbohydrate phosphorylases

BNGH42003570//EB module//Furin-like cysteine rich region//Thrombospondin type 1 domain

BNGH42007788//WD domain, G-beta repeat//WD domain, G-beta repeat//WD domain, G-beta repeat//WD domain, G-beta repeat//WD domain, G-beta repeat//WD domain, G-beta repeat

BRACE1000258//PH domain//PH domain

BRACE2005457//Sulfate transporter family//Xanthine/uracil permeases family

BRACE2006319//TRAF-type zinc finger//Squash family of serine protease inhibitors//TRAF-type zinc finger

BRACE2008594//Eukaryotic protein kinase domain

BRACE2010489//LysM domain

BRACE2014306//Vesicular monoamine transporter//Ribosomal protein L23//Sugar (and other) transporter//LacY proton/sugar symporter

BRACE2014475//Amidase

BRACE2015314//Bacterial mutT protein

BRACE2016981//Fanconi anaemia group C protein//Bacterial flagellin N-terminus

BRACE2018762//WH1 domain//RanBP1 domain.//Streptomyces extracellular neutral protein//Formyl transferase//K-box region//Tropomyosins

BRACE2026836//Calponin homology (CH) domain

BRACE2027258//Ank repeat//Ank repeat//Ank repeat//Ank repeat//Ank repeat

BRACE2030341//Kinase associated domain 1

BRACE2035381//Lysophospholipase catalytic domain

BRACE2035441//Spectrin repeat//Spectrin repeat//Spectrin repeat

BRACE2038329//TS-N domain//UBA domain

BRACE2041009//TBC domain

BRACE2042550//Thrombospondin type 1 domain//Trypsin Inhibitor like cysteine rich domain//von Willebrand factor type C domain//Thrombospondin type 1 domain

BRACE2043142//Glucose-6-phosphate dehydrogenase

BRACE2044286//CRAL/TRIO domain.//Spectrin repeat

BRACE2045300//Cofilin/tropomyosin-type actin-binding proteins

BRACE2046295//Immunoglobulin domain//EGF-like domain

BRACE2047011//DNA polymerase family B

BRACE3000071//Ank repeat//Ank repeat//Ank repeat

BRACE3000973//Leucine Rich Repeat

BRACE3001002//Lipoprotein

BRACE3001391//Latrophilin/CL-1-like GPS domain//PLAT/LH2 domain//Regulator of G protein signaling domain

[0462] BRACE3003192//EGF-like domain//EGF-like domain//EGF-like domain//EGF-like domain//Metallothionein//Keratin, high sulfur B2 protein//EGF-like domain//EGF-like domain//EGF-like domain//EGF-like domain//TB domain//EGF-like domain//EGF-like domain//EGF-like domain//TB domain//EGF-like domain//EGF-like domain

BRACE3004058//FAD/NAD-binding Cytochrome reductase//Oxidoreductase FAD/NAD-binding domain

BRACE3004150//RNA recognition motif. (a.k.a. RRM, RBD, or RNP domain)//RNA recognition motif. (a.k.a. RRM, RBD, or RNP domain)//RNA recognition motif. (a.k.a. RRM, RBD, or RNP domain)

BRACE3004772//SAM domain (Sterile alpha motif)

BRACE3004880//GLTT repeat (12 copies)//GLTT repeat (12 copies)//GLTT repeat (12 copies)//Keratin, high sulfur B2 protein

BRACE3006872//WD domain, G-beta repeat//WD domain, G-beta repeat//WD domain, G-beta repeat

BRACE3007625//Ank repeat//Ank repeat//Ank repeat//Ank repeat//Ank repeat//Ank repeat//Ank repeat//Cytochrome P450

BRACE3008137//PDZ domain (Also known as DHR or GLGF).//PDZ domain (Also known as DHR or GLGF).//PDZ domain (Also known as DHR or GLGF).//PDZ domain (Also known as DHR or GLGF).

BRACE3008384//Rhomboid family

BRACE3008720//GTP1/OBG family//ADP-ribosylation factor family

BRACE3009090//Beige/BEACH domain

BRACE3009708//E1-E2 ATPase//Na+/K+ATPase C-terminus

BRACE3010397//SCP-like extracellular protein

BRACE3011421//Phorbol esters/diacylglycerol binding dom//Diacylglycerol kinase catalytic domain (presumed)//Diacylglycerol kinase accessory domain (presumed)//Ank repeat//Ank repeat

BRACE3013576//Hemagglutinin//SPRY domain//Zinc finger, C3HC4 type (RING finger)

BRACE3014005//Putative integral membrane protein

BRACE3015262//Cytochrome P450

BRACE3015521//EF hand

BRACE3016884//Keratin, high sulfur B2 protein//Flagellar L-ring protein

BRACE3019084//SAM domain (Sterile alpha motif)

BRACE3024073//4Fe-4S iron sulfur cluster binding protein//lactate/malate dehydrogenase//Viral (Superfamily 1) RNA helicase//Ras family

BRACE3025630//Subtilase family

BRACE3027326//LGN motif, putative GEF specific for G-alpha//Rap/ran-GAP

BRACE3027478//Permeases for cytosine/purines, uracil

BRALZ2014484//PH domain

BRALZ2016085//Presenilin//Sugar (and other) transporter//Monocarboxylate transporter

BRAMY2001473//Death domain//ZU5 domain

BRAMY2004771//Leucine Rich Repeat//Leucine rich repeat C-terminal domain//Leucine rich repeat N-terminal domain

BRAMY2005052//Immunoglobulin domain

BRAMY2019300//Leucine Rich Repeat//Leucine rich repeat C-terminal domain//Leucine rich repeat N-terminal domain

BRAMY2021498//Thrombospondin type 1 domain//DnaJ central domain (4 repeats)//Thrombospondin type 1 domain//Thrombospondin type 1 domain//Thrombospondin type 1 domain//Thrombospondin type 1 domain

BRAMY2030109//Phorbol esters/diacylglycerol binding domain (C1 domain)//PHD-finger

BRAMY2031317//PDZ domain (Also known as DHR or GLGF).

BRAMY2036567//SH3 domain

BRAMY2039872//Interferon alpha/beta domain

BRAMY2040592//Transient receptor

BRAMY2042760//PH domain//PH domain

BRAMY2046989//TPR Domain//TPR Domain//TPR Domain//TPR Domain//TPR Domain//TPR Domain

BRAMY2047746//Sodium and potassium ATPases//Ank repeat//Ank repeat//Ank repeat

BRAMY2047751//Regulator of G protein signaling domain//Raf-like Ras-binding domain//Raf-like Ras-binding domain

BRAMY3001794//Geminivirus coat protein//PH domain//Leucine Rich Repeat//Leucine Rich Repeat//Leucine Rich Repeat//Leucine Rich Repeat//Leucine Rich Repeat

BRAMY3002803//P21-Rho-binding domain//Eukaryotic protein kinase domain//Eukaryotic protein kinase domain

BRAMY3004224//Leucine rich repeat N-terminal domain//Leucine Rich Repeat//Leucine Rich Repeat//Leucine Rich Repeat//Leucine Rich Repeat//Leucine Rich Repeat//Leucine rich repeat C-terminal domain

BRAMY3004919//Copper/zinc superoxide dismutase (SODC)//Adenylate and Guanylate cyclase catalytic domain//Adenylate and Guanylate cyclase catalytic domain

BRAMY3005091//Phosphatidylinositol 3- and 4-kinases

BRAMY3005932//Ank repeat

BRAMY3008466//WD domain, G-beta repeat//WD domain, G-beta repeat//WD domain, G-beta repeat//WD domain, G-beta repeat//WD domain, G-beta repeat//WD domain, G-beta repeat

BRAMY4000095//Eukaryotic protein kinase domain

BRAMY4000277//Immunoglobulin domain//Immunoglobulin domain

BRAWH1000127//Plexin repeat//Thrombospondin type 1 domain

BRAWH2001395//Myelin basic protein

BRAWH2001940//NOL1/NOP2/sun family

BRAWH2007658//Immunoglobulin domain

BRAWH2010000//Xylose isomerase

BRAWH2014414//Cadherin domain//Cadherin domain//Cadherin domain//Fructose-bisphosphate aldolase class-//Cadherin domain//Cadherin domain//Cadherin cytoplasmic region

BRAWH2014662//K+ channel tetramerisation domain//ATP synthase Alpha chain, C terminal

BRAWH2014954//PDZ domain (Also known as DHR or GLGF).//PDZ domain (Also known as DHR or GLGF).

BRAWH2016702//AMP-binding enzyme

BRAWH3000078//Adaptin N terminal region//Activin types I and II receptor domain

BRAWH3000314//Fibronectin type III domain

BRAWH3000491//Ribosomal protein S12e

BRAWH3001326//Protein phosphatase 2C

BRAWH3001891//YCF9

BRAWH3002574//Calpain large subunit, domain III//EF hand

BRAWH3002600//Cadherin domain//Cadherin domain//Cadherin domain

BRAWH3002821//C2 domain//C2 domain

BRAWH3003727//ribonuclease.

BRAWH3005912//bZIP transcription factor//bZIP transcription factor//Troponin//TBC domain

BRAWH3008341//Pentaxin family

BRCAN2002562//RNA recognition motif. (a.k.a. RRM, RBD, or RNP domain)

BRCAN2002856//Phosphotyrosine interaction domain (PTB/PID).

BRCAN2002948//Adaptin N terminal region

BRCAN2006063//von Willebrand factor type A domain

BRCAN2009203//SAM domain (Sterile alpha motif)

BRCAN2009432//ADP-ribosylation factor family//Ras family

BRCAN2015464//Gag P30 core shell protein

BRCAN2016619//SH3 domain

BRCAN2017717//Squash family of serine protease inhibitors

BRCAN2021028//Aminopeptidase I zinc metalloprotease (M18)

BRCAN2024451//Raf-like Ras-binding domain//Leptin//Raf-like Ras-binding domain//LGN motif, putative GEF specific for G-alpha GTPase

BRCAN2028355//Eukaryotic protein kinase domain

BRCOC2001505//Myelin basic protein

BRCOC2003213//ATP synthase, Delta/Epsilon chain//tRNA synthetase class II core domain (G, H, P, S and T)

BRCOC2016525//Ank repeat//Ank repeat//Ank repeat//Ank repeat//Ank repeat//Ank repeat//Ank repeat

BRHIP2000819//WD domain, G-beta repeat

BRHIP2000920//Ribosomal protein S9/S16

BRHIP2003786//Ank repeat//Ank repeat//Ank repeat//BTB/POZ domain

BRHIP2004359//Metallo-beta-lactamase superfamily

BRHIP2004814//Phosphate transporter family

BRHIP2005236//Galactose binding lectin domain//Latrophilin Cytoplasmic C-terminal region

BRHIP2005932//PH domain

BRHIP2007616//Sema domain

BRHIP2009414//Uncharacterized protein family

BRHIP2021615//RNA recognition motif. (a.k.a. RRM, RBD, or RNP domain)//RNA recognition motif. (a.k.a. RRM, RBD, or RNP domain)

BRHIP2026288//Prolyl oligopeptidase family//alpha/beta hydrolase fold

BRHIP3000339//Myelin basic protein

BRHIP3008183//Adaptin N terminal region//tRNA (Guanine-1)-methyltransferase

BRHIP3008313//Ank repeat

BRHIP3008405//PH domain

BRHIP3024118//Sodium:galactoside symporter family//Monocarboxylate transporter

BRHIP3025161//Phosphotriesterase family//RhoGEF domain//PH domain//Thaumatin family//GATA zinc finger//FYVE zinc finger//PH domain

BRHIP3027137//Aldehyde dehydrogenase family

BRSSN2000684//Protein-tyrosine phosphatase//Dual specificity phosphatase, catalytic domain

BRSSN2004719//Src homology domain 2

BRSTN2000872//Thioredoxin//Thioredoxin

BRSTN2001067//Rifin/stevor family

BRSTN2004863//Chitin synthase//Glycosyl transferases//Similarity to lectin domain of ricin beta-chain, 3 copies.

BRSTN2004987//tRNA synthetases class I (W and Y)

BRSTN2008418//RhoGAP domain

BRSTN2013741//Ras family

BRTHA2000855//Extracellular link domain

BRTHA2004978//Collagen triple helix repeat (20 copies)

[0463] BRTHA2005579//von Willebrand factor type C domain//von Willebrand factor type C domain//von Willebrand factor type C domain//von Willebrand factor type C domain//von Willebrand factor type C domain//von Willebrand factor type C domain//von Willebrand factor type C domain//von Willebrand factor type C domain//von Willebrand factor type C domain//von Willebrand factor type C domain//von Willebrand factor type C domain//von Willebrand factor type C domain

BRTHA2007122//Ank repeat//Ank repeat//Ank repeat//Ank repeat//SAM domain (Sterile alpha motif)

BRTHA2008527//Leucine Rich Repeat//Leucine Rich Repeat//Leucine Rich Repeat//Leucine Rich Repeat//Leucine Rich Repeat

BRTHA2009311//Vertebrate galactoside-binding lectins

BRTHA2010884//Thrombospondin type 1 domain//CUB domain

BRTHA2012980//Cytochrome P450

BRTHA2013262//Keratin, high sulfur B2 protein

BRTHA2014792//SET domain

BRTHA2015406//UBA domain

BRTHA2015878//Gram-negative pili assembly chaperone

BRTHA2016496//Peptidase C13 family

BRTHA2018591//GTPase of unknown function

BRTHA2018624//Galactose binding lectin domain//Activin types I and II receptor domain//Galactose binding lectin domain

BRTHA2018707//RNA recognition motif. (a.k.a. RRM, RBD, or RNP domain)

BRTHA2019048//Domain of unknown function DUF71

BRTHA3002401//Ornithine decarboxylase antizyme

BRTHA3002427//Sulfate transporter family//Sodium:neurotransmitter symporter family

BRTHA3003074//Fanconi anaemia group C protein

BRTHA3003449//Myosin head (motor domain)

BRTHA3005046//Collagen triple helix repeat (20 copies)

BRTHA3008310//Homeobox domain

BRTHA3008778//AMP-binding enzyme

BRTHA3009037//C2 domain//PDZ domain (Also known as DHR or GLGF).//Regulator of G protein signaling domain//Regulator of G protein signaling domain

BRTHA3009090//Cyclic nucleotide-binding domain//Cyclic nucleotide-binding domain//Cyclic nucleotide-binding domain//Glutathione S-transferases.//Uncharacterized protein family UPF0028

BRTHA3013884//Domain associated with PX domains//PX domain//60s Acidic ribosomal protein

BRTHA3015815//AIR synthase related protein

BRTHA3016917//tRNA synthetases class I (C)//tRNA synthetases class I (I, L, M and V)

BRTHA3017589//Immunoglobulin domain//Immunoglobulin domain//Hantavirus glycoprotein G2

BRTHA3017848//Glucose-6-phosphate dehydrogenase//Sugar (and other) transporter

BRTHA3018656//Divalent cation transporter//Divalent cation transporter

COLON2000568//Immunoglobulin domain//Cellulose binding domain//Immunoglobulin domain//Immunoglobulin domain//Immunoglobulin domain//Immunoglobulin domain

COLON2001721//C2 domain

COLON2002520//Myosin head (motor domain)//IQ calmodulin-binding motif

COLON2004478//Immunoglobulin domain//Immunoglobulin domain//Immunoglobulin domain//Immunoglobulin domain//Immunoglobulin domain

CORDB1000140//TRAF-type zinc finger

CORDB2000541//F-actin capping protein, beta subunit

CTONG1000341//EGF-like domain//EGF-like domain//Metallothionein//EGF-like domain//EB module//EGF-like domain//EGF-like domain//EGF-like domain

CTONG1000467//Zinc finger, C3HC4 type (RING finger)

CTONG2000042//Bacterial regulatory proteins, gntR family//Alpha-2-macroglobulin family N-terminal region//Alpha-2-macroglobulin family

CTONG2001877//MutT-like domain

CTONG2004062//E1-E2 ATPase

CTONG2006798//Eukaryotic protein kinase domain//Eukaryotic protein kinase domain

CTONG2008233//DnaJ domain

CTONG2009423//7 transmembrane receptor (rhodopsin family)

CTONG2013178//SEA domain//Trypsin

CTONG2017500//F-box domain.

CTONG2020026//Herpesvirus VP23 like capsid protein

CTONG2024206//Neuregulin family//von Willebrand factor type A domain//EGF-like domain//Response regulator receiver domain//von Willebrand factor type A domain//von Willebrand factor type A domain

CTONG2024749//Alpha-2-macroglobulin family

CTONG2025496//Alpha-2-macroglobulin family N-terminal region//Alpha-2-macroglobulin family

CTONG2028124//AMP-binding enzyme

CTONG2028687//TPR Domain//TPR Domain

CTONG3000084//DNA mismatch repair protein//RhoGEF domain//PH domain//SH3 domain

CTONG3000657//SH3 domain

CTONG3000686//TPR Domain//TPR Domain//TPR Domain//TPR Domain

CTONG3001123//BRCA1 C Terminus (BRCT) domain//BRCA1 C Terminus (BRCT) domain//BRCA1 C Terminus (BRCT) domain//BRCA1 C Terminus (BRCT) domain//BRCA1 C Terminus (BRCT) domain

CTONG3001370//Alpha-2-macroglobulin family N-terminal region//Alpha-2-macroglobulin family

CTONG3002127//C2 domain//C2 domain

CTONG3002674//Calponin homology (CH) domain

[0464] CTONG3003737//Leucine rich repeat N-terminal domain//Leucine Rich Repeat//Leucine Rich Repeat//Leucine Rich Repeat//Leucine Rich Repeat//Leucine Rich Repeat//Leucine Rich Repeat//Leucine Rich Repeat//Leucine Rich Repeat//Leucine Rich Repeat//Leucine Rich Repeat//Leucine Rich Repeat//Leucine Rich Repeat//Leucine Rich Repeat//Leucine Rich Repeat//Leucine Rich Repeat//Leucine rich repeat C-terminal domain//Fusion glycoprotein F0.

CTONG3003972//RNA recognition motif. (a.k.a. RRM, RBD, or RNP domain)

CTONG3004072//Beta type Zein//Keratin, high sulfur B2 protein

CTONG3005325//TS-N domain//UBA domain//Transposase

CTONG3005648//Putative undecaprenyl diphosphate synthase

CTONG3006067//DnaJ central domain (4 repeats)

CTONG3006186//PDZ domain (Also known as DHR or GLGF)//Apolipoprotein A1/A4/E family//WW domain

CTONG3008831//RNA recognition motif. (a.k.a. RRM, RBD, or RNP domain)

CTONG3009028//Helicases conserved C-terminal domain

CTONG3009385//TPR Domain//TPR Domain//TPR Domain//TPR Domain//TPR Domain//TPR Domain//TPR Domain//TPR Domain//TPR Domain//TPR Domain

D3OST2002182//Glycosyl transferase family 8

D3OST2002648//7 transmembrane receptor (rhodopsin family)//7 transmembrane receptor (rhodopsin family)

D3OST3000169//SH3 domain//SAM domain (Sterile alpha motif)

DFNES2000146//Plexin repeat//Thrombospondin type 1 domain

DFNES2001108//PH domain

DFNES2005266//Thrombospondin type 1 domain

DFNES2011499//WD domain, G-beta repeat

FCBBF3004502//Terpene synthase family//YCF9

FCBBF3007540//RhoGEF domain//PH domain

FCBBF3009888//Keratin, high sulfur B2 protein//u-PAR/Ly-6 domain

FCBBF3012170//Thrombospondin type 1 domain

FCBBF3012288//Fibronectin type III domain

FCBBF3013307//DEAD/DEAH box helicase//Helicases conserved C-terminal domain

FEBRA2000253//Flagellar L-ring protein

FEBRA2007708//Fusion glycoprotein F0.//Xanthine/uracil permeases family//Sulfate transporter family

FEBRA2007801//IBR domain

FEBRA2008311//7 transmembrane receptor (rhodopsin family)//7 transmembrane receptor (rhodopsin family)

FEBRA2008468//alpha/beta hydrolase fold

FEBRA2021571//von Willebrand factor type D domain

FEBRA2024150//DENN (AEX-3) domain

FEBRA2026984//tRNA synthetases class I (W and Y)//Putative tRNA binding domain

HCASM2001301//Eukaryotic protein kinase domain

HCASM2002918//ATP synthase Alpha chain, C terminal

HCHON2000028//RhoGAP domain

HCHON2001084//FecCD transport family//Sugar (and other) transporter

HCHON2001217//Cullin family

HCHON2001577//Collagen triple helix repeat (20 copies)//Heavy-metal-associated domain

HCHON2001712//Sodium:dicarboxylate symporter family

HCHON2002676//Glycosyl hydrolases family 39

HCHON2004007//E1-E2 ATPase

HCHON2004531//Ubiquitin family//UBA domain//Integrins, beta chain//UBA domain

HCHON2004776//Protein of unknown function DUF93

HCHON2005921//PMP-22/EMP/MP20/Claudin family

HCHON2006250//WD domain, G-beta repeat//WD domain, G-beta repeat//WD domain, G-beta repeat//WD domain, G-beta repeat

HEART1000139//Troponin

HEART2001680//Immunoglobulin domain//Immunoglobulin domain//Immunoglobulin domain//Immunoglobulin domain//Immunoglobulin domain

HEART2001756//Bacterial transcriptional regulator

HEART2006131//Thiamine pyrophosphate enzymes

HEART2006909//CBS domain//CBS domain

HEART2010495//Tau and MAP proteins, tubulin-binding

HHDPC1000118//Adenylate kinase//Shikimate kinase//Deoxynucleoside kinase//Pyridoxal-phosphate dependent enzyme

HLUNG1000017//Reprolysin family propeptide

HLUNG2000014//Lectin C-type domain

HLUNG2001996//SH3 domain

HLUNG2002465//PH domain//RhoGEF domain//SH3 domain

HLUNG2002958//EF hand

HLUNG2011298//Oxidoreductase FAD/NAD-binding domain

HLUNG2013851//Pumilio-family RNA binding domains (aka PUM-HD, Pumilio homology domain)//Pumilio-family RNA binding domains (aka PUM-HD, Pumilio homology domain)

HLUNG2014262//von Willebrand factor type A domain//von Willebrand factor type A domain

HLUNG2017350//Connexin

HSYRA2005456//Fibronectin type III domain

HSYRA2005496//emp24/gp25L/p24 family

HSYRA2009075//Fibronectin type III domain

HSYRA2009102//Integral membrane protein DUF6

IMR322000127//Zinc finger, C2H2 type

IMR322000917//Zinc finger, C2H2 type

IMR322006495//Tropomyosins

KIDNE1000064//Integral membrane protein DUF7//Sugar (and other) transporter//Transmembrane 4 family//Zn-finger in Ran binding protein and others.

KIDNE2000832//Amino acid permease//Transmembrane amino acid transporter protein//Sodium/hydrogen exchanger family

KIDNE2000846//Sodium:neurotransmitter symporter family

KIDNE2001361//Domain of unknown function DUF19

KIDNE2001847//RhoGAP domain//SH3 domain

KIDNE2006580//Cytochrome P450

KIDNE2011635//Sodium:solute symporter family

KIDNE2012945//CUB domain//Pentaxin family

LYMPB2000083//Class I Histocompatibility antigen, domains alpha 1 and 2//Class I Histocompatibility antigen, domains alpha 1 and 2//Immunoglobulin domain

MESAN2006563//PH domain

MESAN2012054//PQQ enzyme repeat//PQQ enzyme repeat

NESOP2001433//Immunoglobulin domain//Immunoglobulin domain//Immunoglobulin domain//Immunoglobulin domain//Immunoglobulin domain

NESOP2001656//Polyomavirus coat protein

NHNPC2001816//Regulator of G protein signaling domain

NOVAR2000136//Thioredoxin//CTF/NF-I family//Calsequestrin

NOVAR2001108//Immunoglobulin domain//Immunoglobulin domain//Immunoglobulin domain//Immunoglobulin domain

NT2NE2003252//Eukaryotic protein kinase domain

NT2NE2006531//KRAB box//PHD-finger//Transcription factor S-II (TFIIS)//Zinc finger, C2H2 type

NT2NE2006909//Influenza Matrix protein (M1)//metallopeptidase family M24

NT2RI2004618//Cytosolic long-chain acyl-CoA thioestease

NT2RI2005166//F-box domain.//WD domain, G-beta repeat

NT2RI2008724//GGL domain

NT2RI2025909//Mitochondrial carrier proteins//Mitochondrial carrier proteins//Mitochondrial carrier proteins

NT2RI2025957//PDZ domain (Also known as DHR or GLGF).

NT2RI3000622//TBC domain

NT2RI3002842//Hsp20/alpha crystallin family

NT2RI3003382//Rotavirus RNA-binding Protein 53 (NS53)

NT2RI3004510//Pyridine nucleotide-disulphide oxidoreductase//FAD binding domain//Flavin containing amine oxidase//Phytoene dehydrogenase related enzyme

NT2RI3006171//Immunoglobulin domain//Immunoglobulin domain//Immunoglobulin domain//Immunoglobulin domain

[0465] NT2RI3006340//Immunoglobulin domain//Immunoglobulin domain//Fibronectin type III domain//Fibronectin type III domain//Fibronectin type III domain//Fibronectin type III domain//Fibronectin type III domain//Immunoglobulin domain//Ribosomal protein S14p/S29e //Immunoglobulin domain//Immunoglobulin domain

NT2RI3006376//DENN (AEX-3) domain//PLAT/LH2 domain

NT2RI3006673//Fibronectin type III domain//Fibronectin type III domain//Fibronectin type III domain//Protein-tyrosine phosphatase//Dual specificity phosphatase, catalytic domain//Protein-tyrosine phosphatase

NT2RI3007158//FYVE zinc finger

NT2RI3007291//Collagen triple helix repeat (20 copies)

NT2RI3007543//DnaJ domain

NT2RI3007978//Glutamine amidotransferase class-I

NT2RI3008652//FERM domain (Band 4.1 family)//Uncharacterised protein family UPF0058//Biopterin-dependent aromatic amino acid hydroxylase

NT2RP7000359//FERM domain (Band 4.1 family)//Insulin-like growth factor binding proteins//PDZ domain (Also known as DHR or GLGF).

NT2RP7000466//CUB domain//CXXC zinc finger//EGF-like domain//Granulins//Keratin, high sulfur B2 protein//Trypsin Inhibitor like cysteine rich domain

NT2RP7004027//CUB domain//Sushi domain (SCR repeat)

NT2RP7004123//Hepatitis delta virus delta antigen

NT2RP7005118//GTPase-activator protein for Ras-like GTPase//IQ calmodulin-binding motif//WW domain

NT2RP7005529//PH domain//RhoGEF domain

NT2RP7009147//WD domain, G-beta repeat//WD domain, G-beta repeat//WD domain, G-beta repeat

NT2RP7010599//Lipase

NT2RP7011570//Gag P30 core shell protein

NT2RP7013795//WD domain, G-beta repeat//WD domain, G-beta repeat

NT2RP7014005//Glutamine amidotransferase class-I

NT2RP7017474//Phosphoglucose isomerase

NT2RP8000296//BTB/POZ domain//Kelch motif//Kelch motif//Kelch motif//Kelch motif//Kelch motif//Kelch motif

NT2RP8000483//RhoGAP domain

NTONG2000413//Astacin (Peptidase family M12A)//Hemopexin//Matrixin

NTONG2003852//Phosphotyrosine interaction domain (PTB/PID).

NTONG2005277//Ank repeat//Ank repeat//Ank repeat//Ank repeat//Ank repeat//Ank repeat//Ank repeat//Ank repeat

NTONG2006354//Ank repeat

NTONG2007517//BTB/POZ domain

OCBBF2004826//PH domain//Raf-like Ras-binding domain//Transaldolase//PDZ domain (Also known as DHR or GLGF).//RhoGEF domain

OCBBF2004883//WD domain, G-beta repeat//WD domain, G-beta repeat//WD domain, G-beta repeat//WD domain, G-beta repeat//WD domain, G-beta repeat

OCBBF2006058//Acyl-CoA dehydrogenase

OCBBF2006764//Sushi domain (SCR repeat)//CUB domain//Sushi domain (SCR repeat)//CUB domain//Sushi domain (SCR repeat)

OCBBF2007028//SH3 domain

[0466] OCBBF2007068//Ank repeat//Ank repeat//Ank repeat//Ank repeat//Ank repeat//Ank repeat//Ank repeat//Ank repeat//Ank repeat//Ank repeat//Ank repeat//Ank repeat//Ank repeat//Ank repeat//Ank repeat//Ank repeat//Ank repeat//Ank repeat//Ank repeat//Ank repeat//Ank repeat//Ank repeat//Ank repeat//Ank repeat//Ribosomal protein L34//Ank repeat//Ank repeat//Ank repeat//Ank repeat

OCBBF2008770//TBC domain

OCBBF2010140//Alphavirus E1 glycoprotein

OCBBF2010416//Major intrinsic protein

OCBBF2019823//lactate/malate dehydrogenase

OCBBF2020838//Fork head domain

OCBBF2021323//Regulatory subunit of type II PKA R-subunit

OCBBF2022351//WD domain, G-beta repeat//WD domain, G-beta repeat//WD domain, G-beta repeat//WD domain, G-beta repeat//WD domain, G-beta repeat//WD domain, G-beta repeat

OCBBF2025527//NAD-dependent glycerol-3-phosphate dehydrogenase

OCBBF2031167//Reprolysin family propeptide//Pancreatic hormone peptides//Reprolysin (M12B) family zinc metalloprotease//Disintegrin//Beta defensin//Radical activating enzymes//EB module//EGF-like domain//Delta serrate ligand

OCBBF2033869//CUB domain

OCBBF2035110//PLAT/LH2 domain

[0467] OCBBF2036743//KRAB box//Zinc finger, C2H2 type//Zinc finger, C2H2 type//Zinc finger, C2H2 type//Zinc finger, C2H2 type//Zinc finger, C2H2 type//Zinc finger, C2H2 type//Zinc finger, C2H2 type//Zinc finger, C2H2 type//PHD-finger//Zinc finger, C2H2 type//Zinc finger, C2H2 type//Zinc finger, C2H2 type//Transcription factor S-II (TFIIS)//Zinc finger, C2H2 type//Zinc finger, C2H2 type//Zinc finger, C2H2 type//Zinc finger, C2H2 type//Zinc finger, C2H2 type

OCBBF2037340//Alpha crystallin A chain, N terminal//Archaeal ATPase//Dual specificity phosphatase, catalytic domain

OCBBF2037547//PH domain//Raf-like Ras-binding domain//Transaldolase//PDZ domain (Also known as DHR or GLGF).//RhoGEF domain//PH domain

OCBBF2037598//Immunoglobulin domain//Immunoglobulin domain//Immunoglobulin domain//Fibronectin type III domain//Fibronectin type III domain

OCBBF2037638//Pyridine nucleotide-disulphide oxidoreductase//Pyridine nucleotide-disulphide oxidoreductase

OCBBF2038317//Syndecan domain//BNR repeat//BNR repeat//BNR repeat//BNR repeat//BNR repeat//PKD domain

OCBBF3009279//KH domain//Zinc finger, C3HC4 type (RING finger)

PEBLM2002594//ABC transporter//Aldehyde oxidase and xanthine dehydrogenase, C terminus

PEBLM2004666//WD domain, G-beta repeat//Gram-negative pili assembly chaperone//WD domain, G-beta repeat//WD domain, G-beta repeat//WD domain, G-beta repeat//WD domain, G-beta repeat//WD domain, G-beta repeat

PERIC1000147//Syndecan domain

PERIC2001228//Leucine Rich Repeat//Leucine Rich Repeat//Leucine Rich Repeat//Leucine Rich Repeat//Leucine Rich Repeat//Leucine Rich Repeat//Leucine Rich Repeat

PERIC2003720//Ezrin/radixin/moesin family

PERIC2009086//7 transmembrane receptor (rhodopsin family)//Peroxidase

PLACE5000171//Chitin binding Peritrophin-A domain//HYR domain//Plant PEC family metallothionein//Sushi domain (SCR repeat)//von Willebrand factor type A domain

PLACE5000282//Collagen triple helix repeat (20 copies)//Heavy-metal-associated domain

PLACE6012574//ENV polyprotein (coat polyprotein)

PLACE6019385//REV protein (anti-repression trans-activator protein)

PLACE6020031//Ank repeat//Ank repeat

PLACE7000514//Filamin/ABP280 repeat.

PLACE7002641//LPP20 lipoprotein precursor//HRDC domain//Dihydrodipicolinate synthetase family

PLACE7006051//ENV polyprotein (coat polyprotein)

PLACE7008431//Phosphatidylinositol-4-phosphate 5-Kinase

PROST1000184//7 transmembrane receptor (Secretin family)

PROST2008993//BRCA1 C Terminus (BRCT) domain

PROST2016462//WW domain//PH domain//RhoGAP domain

PROST2017367//Transglutaminase family

PROST2018090//Sushi domain (SCR repeat)//Sushi domain (SCR repeat)//Chitin binding Peritrophin-A domain//HYR domain//Sushi domain (SCR repeat)

PROST2018511//Ras association (RalGDS/AF-6) domain//PH domain//Src homology domain 2

PUAEN2002616//Src homology domain 2

PUAEN2005930//Extracellular link domain//PH domain

PUAEN2006328//TBC domain

PUAEN2007044//TruB family pseudouridylate synthase (N terminal domain)

PUAEN2009174//L1 (late) protein//Alpha-2-macroglobulin family

PUAEN2009795//Ribosomal protein S3, C-terminal domain//EGF-like domain//C1q domain

PUAEN2009852//Eukaryotic protein kinase domain

RECTM2000433//Jacalin-like lectin domain

SKMUS2006394//Ank repeat//Ank repeat//Ank repeat//Ank repeat//Ank repeat//Ank repeat//Ank repeat

SMINT1000192//Small hydrophilic plant seed proteins

SMINT2002743//ENV polyprotein (coat polyprotein)

SMINT2010076//Immunoglobulin domain//Immunoglobulin domain//Immunoglobulin domain//Immunoglobulin domain//Immunoglobulin domain

SMINT2011888//Immunoglobulin domain//Cellulose binding domain//Immunoglobulin domain//Immunoglobulin domain//Immunoglobulin domain//Immunoglobulin domain

SMINT2015787//Serum amyloid A protein//Immunoglobulin domain

SPLEN2001599//Immunoglobulin domain

SPLEN2002147//Phosphatidylinositol transfer protein

SPLEN2002467//DB module//F-box domain.//Leucine Rich Repeat

SPLEN2006122//RNA recognition motif. (a.k.a. RRM, RBD, or RNP domain)//RNA recognition motif. (a.k.a. RRM, RBD, or RNP domain)

SPLEN2010912//DEAD/DEAH box helicase//Helicases conserved C-terminal domain

SPLEN2012624//Ank repeat//Ank repeat//Ank repeat//Sodium:neurotransmitter symporter family

SPLEN2015267//Immunoglobulin domain//Immunoglobulin domain//Immunoglobulin domain//Immunoglobulin domain

SPLEN2015679//ATP synthase delta (OSCP) subunit

SPLEN2021701//Class I Histocompatibility antigen, domains alpha 1 and 2//Class I Histocompatibility antigen, domains alpha 1 and 2//Immunoglobulin domain

SPLEN2030335//AMP-binding enzyme

SPLEN2031547//Integral membrane protein//Integral membrane protein

SPLEN2031780//Domain of unknown function DUF139//Domain of unknown function DUF139

SPLEN2033098//TNFR/NGFR cysteine-rich region

SPLEN2034081//Insulin-like growth factor binding proteins

SPLEN2036326//GPR1/FUN34/yaaH family//PMP-22/EMP/MP20/Claudin family

SPLEN2036821//Mitochondrial carrier proteins

SPLEN2037722//Immunoglobulin domain//Immunoglobulin domain

STOMA2004294//Immunoglobulin domain

SYNOV2005448//Apidaecin

SYNOV2005817//Domain of unknown function DUF19//Tissue factor

SYNOV2006430//Nitrogen regulatory protein P-II

SYNOV2014400//EGF-like domain//Granulins//Granulins//EGF-like domain

SYNOV2021320//Src homology domain 2

SYNOV3000231//Immunoglobulin domain//Immunoglobulin domain//Immunoglobulin domain//Immunoglobulin domain

SYNOV3000302//Immunoglobulin domain//Immunoglobulin domain//Immunoglobulin domain//Immunoglobulin domain

SYNOV4002392//lactate/malate dehydrogenase

SYNOV4002883//Adenosylmethionine decarboxylase

SYNOV4007521//Immunoglobulin domain//Immunoglobulin domain

[0468] SYNOV4007553//Leucine Rich Repeat//Leucine Rich Repeat//Leucine Rich Repeat//Leucine Rich Repeat//Leucine Rich Repeat//Leucine Rich Repeat//Leucine Rich Repeat//Leucine Rich Repeat//Leucine Rich Repeat//Leucine Rich Repeat//Leucine Rich Repeat//Leucine Rich Repeat//Leucine rich repeat C-terminal domain//TIR domain

SYNOV4007671//Syntaxin//Fusion glycoprotein F0.

SYNOV4008440//Adaptin N terminal region

TBAES2001171//NOL1/NOP2/sun family

TBAES2001229//Ribosomal protein L23

TBAES2003550//Glucose-6-phosphate dehydrogenase

TBAES2004055//Ribosomal protein S11

TESOP2000801//Eukaryotic protein kinase domain

TESOP2001166//Src homology domain 2

TESOP2001953//Leucine Rich Repeat//Leucine Rich Repeat//Leucine Rich Repeat//Leucine Rich Repeat//Leucine Rich Repeat//Leucine Rich Repeat//Leucine Rich Repeat

TESOP2004114//Lysyl hydrolase//Lysyl hydrolase

TESOP2005485//Immunoglobulin domain//Immunoglobulin domain

TESOP2009121//DNA polymerase (viral) C-terminal domain

TESTI1000257//GntP family permease//Sugar (and other) transporter

TESTI1000390//Bromodomain//Atrial natriuretic peptide

TESTI1000545//TPR Domain//TPR Domain//TPR Domain//LPP20 lipoprotein precursor//HRDC domain//Adaptin N terminal region//Dihydrodipicolinate synthetase family

TESTI2000443//Leucine Rich Repeat//Leucine Rich Repeat//Leucine Rich Repeat

TESTI2000644//Small cytokines (intecrine/chemokine), interleukin-8 like

TESTI2002036//Ion transport protein//Transmembrane region cyclic Nucleotide Gated Channel

TESTI2002618//Reprolysin (M12B) family zinc metalloprotease//Reprolysin family propeptide

TESTI2002928//Syndecan domain

TESTI2003347//Connexin//Cytochrome b559, alpha (gene psbE) and beta (gene psbF) subunits.

TESTI2004700//Leucine Rich Repeat//Leucine Rich Repeat//Leucine Rich Repeat//Leucine Rich Repeat

TESTI2005610//CD36 family

TESTI2006648//Ion transport protein//ABC transporter transmembrane region.//PEP-utilizing enzymes//Phosphoribulokinase//Elongation factor Tu family

TESTI2014716//RNA recognition motif. (a.k.a. RRM, RBD, or RNP domain)//RNA recognition motif. (a.k.a. RRM, RBD, or RNP domain)//RNA recognition motif. (a.k.a. RRM, RBD, or RNP domain)

TESTI2024567//7 transmembrane receptor (metabotropic glutamate family)

TESTI2026505//Domain of unknown function DUF123//FYVE zinc finger//PH domain//RhoGEF domain

TESTI2027019//Leucine Rich Repeat

TESTI2034520//ABC transporter

[0469] TESTI2034767//Collagen triple helix repeat (20 copies)//Collagen triple helix repeat (20 copies)//Collagen triple helix repeat (20 copies)//Collagen triple helix repeat (20 copies)//Collagen triple helix repeat (20 copies)//Collagen triple helix repeat (20 copies)//Collagen triple helix repeat (20 copies)

TESTI2040018//Hepatitis C virus RNA dependent RNA polymerase

TESTI2044796//Zinc finger, C3HC4 type (RING finger)

TESTI2049469//Chitinases class I

TESTI2050137//Phosphotyrosine interaction domain (PTB/PID)//Src homology domain 2

TESTI2050987//Zinc finger, C3HC4 type (RING finger)//SPRY domain

TESTI2051867//Ribosomal protein L4/L1 family

TESTI2052693//Src homology domain 2

TESTI2053621//EF hand//EF hand//Glutathione peroxidases//EF hand

TESTI4000014//PPR repeat//PPR repeat//PPR repeat//PPR repeat//PPR repeat//ENTH domain//PPR repeat//PPR repeat//PPR repeat//Ribosomal protein L22p/L17e//Interleukin 10//PPR repeat

TESTI4000079//Phosphopantetheine attachment site//PH domain

TESTI4000288//Dynamin GTPase effector domain

TESTI4000349//HECT-domain (ubiquitin-transferase).

TESTI4000462//Keratin, high sulfur B2 protein

TESTI4000724//Vesicular monoamine transporter//Sugar (and other) transporter//Monocarboxylate transporter

TESTI4000970//Ezrin/radixin/moesin family

TESTI4001148//Enol-ase//ATP synthase delta (OSCP) subunit

TESTI4001527//UDP-glucoronosyl and UDP-glucosyl transferase

TESTI4001561//Acyltransferase

TESTI4002491//NSF attachment protein

TESTI4002552//E1-E2 ATPase//Na+/K+ ATPase C-terminus

TESTI4006326//von Willebrand factor type A domain

TESTI4006546//Tudor domain//Tudor domain//Tudor domain

TESTI4006819//Enol-ase

TESTI4007064//DENN (AEX-3) domain//PPR repeat//LIM domain containing proteins

TESTI4007163//Sodium:neurotransmitter symporter family

TESTI4007382//Nickel-dependent hydrogenases

TESTI4007778//Calponin homology (CH) domain//Calponin homology (CH) domain//Spectrin repeat//Spectrin repeat//Spectrin repeat//Spectrin repeat//EF hand//EF hand

TESTI4007810//DNA ligase

TESTI4008429//E1-E2 ATPase//Domain of unknown function

TESTI4009160//Kinesin motor domain//Kinesin motor domain

TESTI4009374//RNA recognition motif. (a.k.a. RRM, RBD, or RNP domain)//Ham1 family//RNA recognition motif. (a.k.a. RRM, RBD, or RNP domain)//RNA recognition motif. (a.k.a. RRM, RBD, or RNP domain)//Double-stranded RNA binding motif

TESTI4009608//emp24/gp25L/p24 family

TESTI4009881//Bacterial type II secretion system protein

TESTI4010713//C2 domain

TESTI4010831//WD domain, G-beta repeat

TESTI4010851//Ubiquitin carboxyl-terminal hydrolases//Ubiquitin carboxyl-terminal hydrolase f//eIF4-gamma/eIF5/eIF2-epsilon//Rifin/stevor family

TESTI4011484//SAM domain (Sterile alpha motif)

TESTI4011745//Bromodomain

TESTI4011956//PH domain

TESTI4012406//Kringle domain

TESTI4012448//Matrixin//Hemopexin//Hemopexin//Hemopexin//Hemopexin

TESTI4012679//DNA photolyase

TESTI4013369//ATP synthase subunit C

TESTI4014924//Floricaula/Leafy protein

TESTI4015471//Tropomyosins

TESTI4016110//DnaJ domain

TESTI4016882//SH3 domain//SH3 domain

TESTI4016925//Aminotransferases class-III//Pyridoxal-phosphate dependent enzyme

TESTI4017001//bZIP transcription factor

TESTI4017137//Keratin, high sulfur B2 protein

TESTI4017575//MSP (Major sperm protein) domain

TESTI4018152//FERM domain (Band 4.1 family)

TESTI4018555//Granulins

TESTI4018835//E1-E2 ATPase//E1-E2 ATPase

TESTI4018886//Fibronectin type III domain//Fibronectin type III domain//Fibronectin type III domain

TESTI4019140//GATA zinc finger

TESTI4019566//Helicases conserved C-terminal domain//Tudor domain

TESTI4019843//SH3 domain//RhoGEF domain//PH domain

TESTI4020092//Laminin G domain

TESTI4020920//D-isomer specific 2-hydroxyacid dehydrogenase, catalytic domain

TESTI4021294//Cyclin//Immunoglobulin domain

TESTI4021478//E1-E2 ATPase//E1-E2 ATPase//E1-E2 ATPase

TESTI4022716//DEAD/DEAH box helicase//Helicases conserved C-terminal domain

TESTI4023555//Lectin C-type domain

TESTI4025920//Adaptin N terminal region

TESTI4026192//Domain of unknown function

TESTI4026510//DEAD/DEAH box helicase//Helicases conserved C-terminal domain

TESTI4027557//Vertebrate galactoside-binding lectins//Vertebrate galactoside-binding lectins

TESTI4028059//Phosphofructokinase//Phosphofructokinase

TESTI4028429//WAP-type (Whey Acidic Protein) ‘four-disulfide core’

TESTI4028612//Major intrinsic protein

TESTI4028880//Sugar (and other) transporter//Sodium:galactoside symporter family

TESTI4028983//Serum amyloid A protein TESTI4029836//E1-E2 ATPase//E1-E2 ATPase//Neuraxin and MAP1B proteins//E1-E2 ATPase//Cof family

TESTI4030505//Metallothionein family 5

TESTI4030603//Collagen triple helix repeat (20 copies)

TESTI4032895//ATP synthase, Delta/Epsilon chain//Tropomyosins//Protein of unknown function

TESTI4034432//Peptidyl-tRNA hydrolase domain

TESTI4034632//Ribosomal protein S3, C-terminal domain//Similarity to lectin domain of ricin beta-chain, 3 copies

TESTI4034912//Adhesin lipoprotein//Vesiculovirus phosphoprotein

TESTI4035063//Myosin tail//CAP-Gly domain

TESTI4035498//Cell division protein

TESTI4036909//Viral (Superfamily 1) RNA helicase//Heavy-metal-associated domain//Viral (Superfamily 1) RNA helicase

TESTI4038492//Serum amyloid A protein

TESTI4039659//DnaJ domain

[0470] TESTI4041053//Ank repeat//Ank repeat//Ank repeat//Ank repeat//Armadillo/beta-catenin-like repeats//Armadillo/beta-catenin-like repeats//Armadillo/beta-catenin-like repeats//Armadillo/beta-catenin-like repeats//Armadillo/beta-catenin-like repeats//Armadillo/beta-catenin-like repeats

TESTI4044084//Domain of unknown function

TESTI4046487//Hantavirus nucleocapsid protein

TESTI4046819//Metallothionein//PTS HPr component phosphorylation sites

THYMU1000496//Kinesin motor domain

THYMU2004693//CX module

THYMU2005303//Immunoglobulin domain

THYMU2006420//NAD(P) transhydrogenase beta subunit

THYMU2008725//Similarity to lectin domain of ricin beta-chain, 3 copies.//Fibronectin type III domain//Fibronectin type III domain//Fibronectin type III domain//Fibronectin type III domain

THYMU2009425//7 transmembrane receptor (rhodopsin family)

THYMU2011548//7 transmembrane receptor (rhodopsin family)

THYMU2011736//EGF-like domain//EGF-like domain//EB module//EGF-like domain//TB domain//EGF-like domain//EGF-like domain

THYMU2016204//Metallothionein

THYMU2019210//Class I Histocompatibility antigen, domains alpha 1 and 2//Class I Histocompatibility antigen, domains alpha 1 and 2//Immunoglobulin domain

THYMU2023711//Immunoglobulin domain//Immunoglobulin domain//Immunoglobulin domain//Immunoglobulin domain

THYMU2027695//Immunoglobulin domain//Immunoglobulin domain//Immunoglobulin domain//Immunoglobulin domain

THYMU2027734//Parvovirus coat protein VP2

THYMU2032014//SH3 domain

THYMU2033079//ABC transporter

THYMU2035319//RNA recognition motif. (a.k.a. RRM, RBD, or RNP domain)//RNA recognition motif. (a.k.a. RRM, RBD, or RNP domain)//RNA recognition motif. (a.k.a. RRM, RBD, or RNP domain)

THYMU2035735//FHA domain//SNAP-25 family//Borrelia ORF-A

THYMU2036459//GTP1/OBG family

THYMU2037226//SH3 domain//TPR Domain//TPR Domain//TPR Domain//TPR Domain

THYMU2038369//Regulatory subunit of type II PKA R-subunit

THYMU2038615//PH domain

THYMU2038797//Lectin C-type domain

THYMU2041015//Sodium:galactoside symporter family//LacY proton/sugar symporter//Domain of unknown function//Monocarboxylate transporter//Polysaccharide biosynthesis protein//Sugar (and other) transporter

THYMU3000028//Zona pellucida-like domain

THYMU3000133//Viral (Superfamily 1) RNA helicase

THYMU3001234//PH domain

THYMU3001379//3′5′-cyclic nucleotide phosphodiesterase//Elongation factor Tu family

THYMU3003212//Cytidine and deoxycytidylate deaminase zinc-binding region

THYMU3003763//Leucine rich repeat N-terminal domain//Polyomavirus coat protein

THYMU3004835//Galactosyltransferase

THYMU3006172//C2 domain//C2 domain

THYMU3007137//PDZ domain (Also known as DHR or GLGF).//PDZ domain (Also known as DHR or GLGF).

THYMU3008171//TPR Domain

THYMU3008436//Phosphofructokinase//Phosphofructokinase

TLIVE2000023//Integral membrane protein

TLIVE2002336//Metalloenzyme superfamily//Sulfatase//Type I phosphodiesterase/nucleotide pyrophosphatase

TLIVE2002338//Transforming growth factor beta like domain

TLIVE2002690//von Willebrand factor type D domain

TLIVE2003225//CUB domain//Sushi domain (SCR repeat)//CUB domain//Sushi domain (SCR repeat)

TLIVE2003381//7 transmembrane receptor (metabotropic glutamate family)

TLIVE2007132//Syndecan domain

TLIVE2008229//TPR Domain//TPR Domain

TLIVE2009541//TBC domain

TRACH2001443//TIR domain

TRACH2001549//Cyclic nucleotide-binding domain

TRACH2005811//Kinesin motor domain

TRACH2006387//NADH-ubiquinone oxidoreductase chain 4//7 transmembrane receptor (rhodopsin family)

TRACH2007059//DnaJ domain//Integrins, beta chain//PA domain

TRACH2009310//Armadillo/beta-catenin-like repeats//Eukaryotic protein kinase domain//RIO1/ZK632.3/MJ0444 family

TRACH2019473//Iron/manganese superoxide dismutases (SODM)

TRACH2021398//RhoGAP domain

TRACH2022425//Immunoglobulin domain//Subtilase family//Immunoglobulin domain//Immunoglobulin domain//Immunoglobulin domain//Immunoglobulin domain

TRACH2022553//Immunoglobulin domain//Immunoglobulin domain//Immunoglobulin domain//Immunoglobulin domain

TRACH2022649//Immunoglobulin domain//Immunoglobulin domain//Immunoglobulin domain//Immunoglobulin domain

TRACH2023299//Squalene and phytoene synthases//PH domain//tRNA synthetases class I (E and Q)

TRACH2025535//PH domain

TRACH2025749//Zinc finger, C3HC4 type (RING finger)

TRACH3001427//UBX domain

TRACH3002168//Immunoglobulin domain//Immunoglobulin domain//Immunoglobulin domain

TRACH3003379//Protein phosphatase 2A regulatory B subunit

TRACH3004786//PMP-22/EMP/MP20/Claudin family

TRACH3004840//Rop protein

TRACH3005479//Glycosyl transferases group 1

TRACH3005549//Immunoglobulin domain//Immunoglobulin domain

TRACH3006470//Glycosyl transferases group 1

TRACH3007479//WW domain//HECT-domain (ubiquitin-transferase).

TRACH3008093//Putative undecaprenyl diphosphate synthase

TRACH3008629//Cadherin domain//Cadherin domain//Cadherin domain//Cadherin domain//Cadherin domain//PQQ enzyme repeat

TRACH3008713//NSF attachment protein

TRACH3009455//Src homology domain 2//FERM domain (Band 4.1 family)//Src homology domain 2

TRACH3034731//Ras association (RalGDS/AF-6) domain

TRACH3035235//S-100/ICaBP type calcium binding domain

TRACH3035526//Immunoglobulin domain//Cellulose binding domain//Immunoglobulin domain//Immunoglobulin domain//Immunoglobulin domain//Immunoglobulin domain

TRACH3036193//picornavirus capsid protein//Thaumatin family//Picornavirus core protein 2A//Picornavirus 2B protein//Extracellular link domain//RNA helicase//3C cysteine protease (picornain 3C)//RNA dependent RNA polymerase

TRACH3036609//Immunoglobulin domain

TSTOM2000442//Immunoglobulin domain//Immunoglobulin domain//Immunoglobulin domain//Immunoglobulin domain

TSTOM2000553//C2 domain

TUTER2000425//KRAB box

UTERU1000024//NOL1/NOP2/sun family//NOL1/NOP2/sun family

UTERU1000031//ENTH domain//VHS domain

UTERU1000337//Protein phosphatase 2C

UTERU2005621//Protein-tyrosine phosphatase//Dual specificity phosphatase, catalytic domain

UTERU2006115//Adaptin N terminal region

UTERU2006568//IBR domain

UTERU2007724//Calponin homology (CH) domain//Calponin family//Calponin family//Calponin family

UTERU2017762//Ubiquitin family

UTERU2019706//TCP-1/cpn60 chaperonin family//TCP-1/cpn60 chaperonin family

UTERU2019940//Ribosomal protein L30p/L7e

UTERU2025025//Eukaryotic protein kinase domain

UTERU2026025//RNA recognition motif. (a.k.a. RRM, RBD, or RNP domain)

UTERU2026090//Lectin (probable mannose binding)

UTERU2033375//Ubiquitin carboxyl-terminal hydrolase family 2

UTERU2035328//WW domain//WW domain//WW domain//FF domain//FF domain//FF domain

UTERU2035331//Fibrillar collagen C-terminal domain

UTERU2035452//EGF-like domain//Metallothionein//EGF-like domain

UTERU2035745//Myosin head (motor domain)//Aldehyde oxidase and xanthine dehydrogenase, C terminus

UTERU2036089//RhoGAP domain

UTERU2038251//PH domain

UTERU3000645//PMP-22/EMP/MP20/Claudin family

UTERU3000828//315′-cyclic nucleotide phosphodiesterase//Elongation factor Tu family//Elongation factor G C-terminus

UTERU3001240//Copper/zinc superoxide dismutase (SODC)//Adenylate and Guanylate cyclase catalytic domain

UTERU3001585//Cytochrome P450

UTERU3001652//Wiskott Aldrich syndrome homology region 2

UTERU3001766//Apidaecin

UTERU3001988//TPR Domain

UTERU3002667//Polyomavirus coat protein

UTERU3002993//NOL1/NOP2/sun family

UTERU3003116//Urease//EGF-like domain

UTERU3003178//TPR Domain//TPR Domain//TPR Domain//TPR Domain//PPR repeat

UTERU3003523//PH domain//Fibroblast growth factor

UTERU3004616//Disintegrin

UTERU3004992//Immunoglobulin domain

UTERU3005460//Penicillin amidase//Bacterial regulatory proteins, lacI family

UTERU3005585//PDZ domain (Also known as DHR or GLGF).

UTERU3005907//Transglutaminase family

UTERU3006308//Integrins, beta chain//Plexin repeat//Immunoglobulin domain

UTERU3007419//PH domain

UTERU3007640//NSF attachment protein

UTERU3008660//TPR Domain//TPR Domain

UTERU3009490//Bromodomain

UTERU3009871//Ank repeat//Ank repeat//Ank repeat//Ank repeat//TPR Domain//Ank repeat//Ank repeat

UTERU3009979//EGF-like domain//EGF-like domain//EGF-like domain//Trypsin Inhibitor like cysteine rich domain//EGF-like domain//Laminin G domain//Thrombospondin N-terminal -like domains//Laminin G domain

UTERU3015500//Leucine rich repeat N-terminal domain//Leucine Rich Repeat//Leucine Rich Repeat//Leucine Rich Repeat//Leucine Rich Repeat//Leucine Rich Repeat//Leucine Rich Repeat//Leucine Rich Repeat//Leucine Rich Repeat//Leucine Rich Repeat

[0471] Deduced amino acid sequences of following 250 clones were also detected to have functional domains with Pfam.

3NB692004724//KRAB box//Integrase core domain

ADRGL2000042//Nucleosome assembly protein (NAP)

BLADE2000579//Src homology domain 2//Peptidase family C9

BLADE2006830//HSF-type DNA-binding domain

[0472] BRACE2003609//Zinc finger, C2H2 type//Zinc finger, C2H2 type//Zinc finger, C2H2 type//Zinc finger, C2H2 type//PHD-finger//Zinc finger, C2H2 type//Zinc finger, C2H2 type//Zinc finger, C2H2 type//Transcription factor S-II (TFIIS)//Zinc finger, C2H2 type//Zinc finger, C2H2 type//Zinc finger, C2H2 type//Zinc finger, C2H2 type//Zinc finger, C2H2 type//Zinc finger, C2H2 type

BRACE2029396//Somatotropin hormone family

BRACE2037299//Integrase core domain

BRACE2039823//CDP-alcohol phosphatidyltransferase

[0473] BRACE3001058//Zinc finger, C2H2 type//Zinc finger, C2H2 type//Zinc finger, C2H2 type//Zinc finger, C2H2 type//Zinc finger, C2H2 type//Zinc finger, C2H2 type//Zinc finger, C2H2 type//Zinc finger, C2H2 type//Zinc finger, C2H2 type//Zinc finger, C2H2 type//Zinc finger, C2H2 type//Zinc finger, C2H2 type//Zinc finger, C2H2 type//Putative zinc finger in N-recognin//Zinc finger, C2H2 type//Zinc finger, C2H2 type//Transcription factor S-II (TFIIS)//Src homology domain 2//Zinc finger, C2H2 type//Zinc finger, C2H2 type//Src homology domain 2//Zinc finger, C2H2 type

[0474] BRACE3001113//Zinc finger, C2H2 type//Zinc finger, C2H2 type//Zinc finger, C2H2 type//Zinc finger, C2H2 type//Zinc finger, C2H2 type//Zinc finger, C2H2 type//Zinc finger, C2H2 type//Zinc finger, C2H2 type//Zinc finger, C2H2 type//Zinc finger, C2H2 type//Zinc finger, C2H2 type//Zinc finger, C2H2 type//Zinc finger, C2H2 type//Zinc finger, C2H2 type//Zinc finger, C2H2 type//Zinc finger, C2H2 type//Zinc finger, C2H2 type//Zinc finger, C2H2 type//Putative zinc finger in N-recognin//Zinc finger, C2H2 type//PHD-finger//Zinc finger, C2H2 type

BRACE3003026//Phorbol esters/diacylglycerol binding domain (C1 domain)//Zinc finger, C3HC4 type (RING finger)//PHD-finger

BRACE3003053//Influenza RNA-dependent RNA polymerase subunit//Reprolysin family propeptide//Leptin

BRACE3005107//Small cytokines (intecrine/chemokine), interleukin-8 like

BRACE3009127//PH domain//Oxysterol-binding protein

BRACE3010076//KH domain//KH domain//Domain of unknown function//KH domain//KH domain//KH domain//Small cytokines (intecrine/chemokine), interleukin-8 like//Fanconi anaemia group C protein//KH domain//KH domain

BRALZ2017844//Homeobox domain

BRAMY2019111//Ion transport protein

[0475] BRAMY2035070//Zinc finger, C2H2 type//Zinc finger, C2H2 type//PHD-finger//Zinc finger, C2H2 type//Zinc finger, C2H2 type//Zinc finger, C2H2 type//Zinc finger, C2H2 type//Zinc finger, C2H2 type//Zinc finger, C2H2 type//Zinc finger, C2H2 type//Zinc finger, C2H2 type//Zinc finger, C2H2 type//Zinc finger, C2H2 type//Zinc finger, C2H2 type//Zinc finger, C2H2 type//Zinc finger, C2H2 type//Zinc finger, C2H2 type//Zinc finger, C2H2 type//Zinc finger, C2H2 type//Zinc finger, C2H2 type//Zinc finger, C2H2 type

BRAMY2035449//KRAB box//Zinc finger, C2H2 type//Zinc finger, C2H2 type//Zinc finger, C2H2 type//Zinc finger, C2H2 type//Zinc finger, C2H2 type//Zinc finger, C2H2 type//Zinc finger, C2H2 type//Zinc finger, C2H2 type

BRAMY2035718//HMG (high mobility group) box//CTF/NF-I family

BRAMY2038516//Thioredoxin//Thioredoxin

BRAMY2039341//Zinc finger, C2H2 type//Zinc finger, C2H2 type//Zinc finger, C2H2 type//Zinc finger, C2H2 type//Transcription factor S-II (TFIIS)//Zinc finger, C2H2 type//Zinc finger, C2H2 type//Zinc finger, C2H2 type//Zinc finger, C2H2 type

BRAMY2040159//Chalcone and stilbene synthases//Adaptor complexes medium subunit family//PH domain//Putative GTP-ase activating protein for Arf//Ank repeat//Ank repeat

BRAMY2045471//DHHC zinc finger domain

BRAMY3004800//Synaptobrevin//RhoGEF domain

BRAWH1000369//DNA polymerase family A

BRAWH2006207//KRAB box

BRAWH2006395//Immunoglobulin domain//Thrombospondin type 1 domain

BRAWH2010552//Cyclin

BRAWH3007441//Zinc finger C-x8-C-x5-C-x3-H type (and similar)

BRAWH3009017//WD domain, G-beta repeat//WD domain, G-beta repeat

BRCAN2002473//Tropomyosins//Tropomyosins//UvrB/uvrC motif//Tropomyosins

BRCAN2002854//SAP domain

BRCAN2003070//Ubiquitin-conjugating enzyme

BRCAN2014229//SRP54-type protein//SRP54-type protein//Shikimate kinase//Adenylate kinase//ATPases associated with various cellular activities (AAA)

BRCOC2019841//Purple acid phosphatase

BRHIP2005724//alpha/beta hydrolase fold

BRHIP2006617//TPR Domain//TPR Domain

BRHIP2008389//Adenylate and Guanylate cyclase catalytic domain

BRHIP2012360//XPG N-terminal domain//XPG I-region

[0476] BRHIP2017553//Zinc finger, C2H2 type//Zinc finger, C2H2 type//Zinc finger, C2H2 type//Zinc finger, C2H2 type//Zinc finger, C2H2 type//Zinc finger, C2H2 type//Zinc finger, C2H2 type//Zinc finger, C2H2 type//Zinc finger, C2H2 type//Zinc finger, C2H2 type//Zinc finger, C2H2 type//Zinc finger, C2H2 type//Zinc finger, C2H2 type//Zinc finger, C2H2 type//Zinc finger, C2H2 type//Zinc finger, C2H2 type//Zinc finger, C2H2 type

BRHIP2026877//Eukaryotic protein kinase domain

BRHIP3000017//Integrins, beta chain//Uncharacterized protein family UPF0004

BRHIP3000240//Aldo/keto reductase family//Aldo/keto reductase family

BRHIP3008314//Sir2 family

BRHIP3026052//Protein phosphatase 2A regulatory B subunit (B56 family)

BRSTN2013354//Ets-domain

BRTHA2002133//Reverse transcriptase (RNA-dependent DNA polymerase)

BRTHA2002702//RNase H

BRTHA2007060//Transposase

BRTHA2010033//AP endonuclease family 1

BRTHA2013426//AP endonuclease family 1

BRTHA2013610//Deoxynucleoside kinase

BRTHA2016318//KE2 family protein

BRTHA2017364//DEAD/DEAH box helicase//Helicases conserved C-terminal domain

BRTHA2017972//Dwarfin

BRTHA2018011//Trypsin

BRTHA3000296//Peptidase family M20/M25/M40

CERVX2002013//Zinc finger, C2H2 type//Zinc finger, C2H2 type

[0477] CTONG1000113//KRAB box//Zinc finger, C2H2 type//Zinc finger, C2H2 type//Integrase core domain//Zinc finger, C2H2 type//Zinc finger, C2H2 type//Zinc finger, C2H2 type//Zinc finger, C2H2 type//Zinc finger, C2H2 type//Zinc finger, C2H2 type//Zinc finger, C2H2 type//Zinc finger, C2H2 type//Zinc finger, C2H2 type//Zinc finger, C2H2 type//Zinc finger, C2H2 type//Zinc finger, C2H2 type//Zinc finger, C2H2 type//Zinc finger, C2H2 type

CTONG2003348//bZIP transcription factor//Importin beta binding domain

CTONG2004000//Acyl-CoA dehydrogenase

CTONG2015596//Myb-like DNA-binding domain

CTONG2016942//Trypsin

CTONG2019822//Hepatitis C virus core protein

CTONG2020374//MORN motif//MORN motif//MORN motif//MORN motif//MORN motif//MORN motif//MORN motif//Penicillin amidase//Bacterial regulatory proteins, lacI family//Vacuolar sorting protein 9 (VPS9) domain

CTONG2020378//Zinc finger, C2H2 type//Zinc finger, C2H2 type//Zinc finger, C2H2 type//Zinc finger, C2H2 type//Zinc finger, C2H2 type//Zinc finger, C2H2 type//Zinc finger, C2H2 type//Zinc finger, C2H2 type//Zinc finger, C2H2 type

CTONG2020411//Zinc finger, C2H2 type//Zinc finger, C2H2 type//Zinc finger, C2H2 type//Zinc finger, C2H2 type//Zinc finger, C2H2 type//Zinc finger, C2H2 type

CTONG2024031//MORN motif//MORN motif//MORN motif//MORN motif//MORN motif//MORN motif//MORN motif//Penicillin amidase//Bacterial regulatory proteins, lacI family

CTONG2028758//Zinc finger, C2H2 type//Zinc finger, C2H2 type//Homeobox domain//Zinc finger, C2H2 type//Homeobox domain//Zinc finger, C2H2 type

CTONG3001501//Zinc finger, C2H2 type

CTONG3002552//AP endonuclease family 1

CTONG3003598//AP endonuclease family 1

CTONG3004550//Phosphoribosyl-ATP pyrophosphohydrolase//Death domain

[0478] CTONG3004726//KRAB box//Zinc finger, C2H2 type//Zinc finger, C2H2 type//Zinc finger, C2H2 type//Zinc finger, C2H2 type//Zinc finger, C2H2 type//Zinc finger, C2H2 type//Zinc finger, C2H2 type//Zinc finger, C2H2 type//Zinc finger, C2H2 type//Zinc finger, C2H2 type//Zinc finger, C2H2 type//Zinc finger, C2H2 type//Zinc finger, C2H2 type//Zinc finger, C2H2 type//Zinc finger, C2H2 type//Transcription factor S-II (TFIIS)//Zinc finger, C2H2 type//Zinc finger, C2H2 type//Zinc finger, C2H2 type//Zinc finger, C2H2 type//Zinc finger, C2H2 type//Zinc finger, C2H2 type

DFNES2011192//KRAB box//Zinc finger, C2H2 type//Zinc finger, C2H2 type//Zinc finger, C2H2 type//Zinc finger, C2H2 type//. Zinc finger, C2H2 type//Zinc finger, C2H2 type//Zinc finger, C2H2 type

FCBBF1000509//SAM domain (Sterile alpha motif)//SURF4 family//SAM domain (Sterile alpha motif)//DNA photolyase

FCBBF3010361//Fork head domain

FCBBF3027854//Zinc finger, C2H2 type

FEBRA2001990//RasGEF domain

FEBRA2006519//Thrombospondin type 1 domain//Thrombospondin type 1 domain

FEBRA2008692//PQQ enzyme repeat//wnt family of developmental signaling proteins//Eukaryotic protein kinase domain//Ribulose bisphosphate carboxylase, large chain

FEBRA2014122//Zinc finger, C2H2 type//Zinc finger, C2H2 type//Zinc finger, C2H2 type//Sodium//Zinc finger, C2H2 type

[0479] FEBRA2027609//Zinc finger, C2H2 type//Rubredoxin//Zinc finger, C2H2 type//Zinc finger, C2H2 type//Zinc finger, C2H2 type//Zinc finger, C2H2 type//Zinc finger, C2H2 type//Zinc finger, C2H2 type//Zinc finger, C2H2 type//Putative zinc finger in N-recognin//Zinc finger, C2H2 type//Zinc finger, C2H2 type//Zinc finger, C2H2 type//Zinc finger, C2H2 type//Zinc finger, C2H2 type//Zinc finger, C2H2 type//Zinc finger, C2H2 type//Zinc finger, C2H2 type//Zinc finger, C2H2 type//Zinc finger, C2H2 type//Zinc finger, C2H2 type

[0480] FEBRA2028256//EGF-like domain//EGF-like domain//EGF-like domain//EGF-like domain//EGF-like domain//TB domain//EGF-like domain//EGF-like domain//EGF-like domain//EGF-like domain//EB module//Squash family of serine protease inhibitors//EGF-like domain//EGF-like domain

FEBRA2028516//GRIP domain

HCASM2002754//Sterol desaturase

HCASM2003018//PHD-finger//Zinc finger//Zinc finger//Zinc finger//Zinc finger//Zinc finger//Zinc finger//Zinc finger//Zinc finger//Zinc finger//Zinc finger//Zinc finger//Zinc finger

HCASM2003099//Histone deacetylase family//Zn-finger in ubiquitin-hydrolases and other proteins

HCASM2003357//Coproporphyrinogen III oxidase

HCASM2008536//XRCC1 N terminal domain

HCASM2009424//RFX DNA-binding domain

HCHON2000508//PH domain//bZIP transcription factor//bZIP transcription factor//Outer membrane efflux protein//Troponin

HCHON2000743//SCAN domain

[0481] HCHON2004858//SCAN domain//Myb-like DNA-binding domain//Zinc finger, C2H2 type//Zinc finger, C2H2 type//Zinc finger, C2H2 type//Zinc finger, C2H2 type//Zinc finger, C2H2 type//Zinc finger, C2H2 type//Zinc finger, C2H2 type//Zinc finger, C2H2 type//Zinc finger, C2H2 type//Transcription factor S-II (TFIIS)//Zinc finger, C2H2 type

HEART2009680//Bacteriorhodopsin//7 transmembrane receptor (Secretin family)

HLUNG2015418//Cadherin domain//Cadherin domain//Cadherin domain//Cadherin domain//PQQ enzyme repeat

[0482] HLUNG2015548//IMP dehydrogenase/GMP reductase N terminus//CBS domain//CBS domain//Dihydroorotate dehydrogenase//Histidine biosynthesis protein//FMN-dependent dehydrogenase//Conserved region in glutamate synthase//IMP dehydrogenase/GMP reductase C terminus

[0483] HSYRA2005628//KRAB box//Zinc finger, C2H2 type//PHD-finger//Zinc finger, C2H2 type//Zinc finger, C2H2 type//Zinc finger, C2H2 type//Zinc finger, C2H2 type//Zinc finger, C2H2 type//Zinc finger, C2H2 type//Zinc finger, C2H2 type//Zinc finger, C2H2 type//Zinc finger, C2H2 type

IMR322007078//UBA domain

IMR322008651//Helix-hairpin-helix motif.

IMR322013396//Transmembrane region cyclic Nucleotide Gated Channel//Cyclic nucleotide-binding domain

IMR322013731//ATPases associated with various cellular activities (AAA)//Bromodomain

LIVER2000247//Sodium

MESAN2001770//Regulatory subunit of type II PKA R-subunit//eIF4-gamma/eIF5/eIF2-epsilon

MESAN2005303//Ank repeat//HECT-domain (ubiquitin-transferase).

MESAN2014412//Zinc finger, C2H2 type//Zinc finger, C2H2 type//Zinc finger, C2H2 type//Zinc finger, C2H2 type//Zinc finger, C2H2 type//Zinc finger, C2H2 type

[0484] MESAN2015501//Zinc finger, C2H2 type//Zinc finger, C2H2 type//Zinc finger, C2H2 type//Zinc finger, C2H2 type//Zinc finger, C2H2 type//Transcription factor S-II (TFIIS)//Zinc finger, C2H2 type//Zinc finger, C2H2 type//Zinc finger, C2H2 type//Zinc finger, C2H2 type//Zinc finger, C2H2 type//Zinc finger, C2H2 type//Zinc finger, C2H2 type//Zinc finger, C2H2 type//Zinc finger, C2H2 type//Zinc finger, C2H2 type//Zinc finger, C2H2 type//Zinc finger, C2H2 type//Zinc finger, C2H2 type//Zinc finger, C2H2 type//Zinc finger, C2H2 type//Zinc finger, C2H2 type//Zinc finger, C2H2 type

NT2RI2005772//Guanylate kinase//I/LWEQ domain//PDZ domain (Also known as DHR or GLGF).//SH3 domain

NT2RI2008952//FYVE zinc finger//PHD-finger//Plant PEC family metallothionein//RNA polymerases M/15 Kd subunits//TRAF-type zinc finger//Transcription factor S-II (TFIIS)//Zinc finger, C2H2 type

NT2RI2009583//7 transmembrane receptor (metabotropic glutamate family)//GPR1/FUN34/yaaH family

NT2RI2018448//Zinc finger, C2H2 type//Zinc finger, C2H2 type//Zinc finger, C2H2 type

NT2RI2027157//Reeler domain//HSF-type DNA-binding domain

NT2RI3000174//SNF2 and others N-terminal domain//Small cytokines (intecrine/chemokine), interleukin-8 like//Helicases conserved C-terminal domain//Zn-finger in Ran binding protein and others.//HNH endonuclease

NT2RI3001132//Zinc finger, C3HC4 type (RING finger)//PHD-finger

NT2RI3002557//Ribosomal protein L36//bZIP transcription factor

NT2RI3007167//Cold-shock′ DNA-binding domain//Zinc knuckle//Zinc knuckle

NT2RI3007443//Alpha-2-macroglobulin family//Eukaryotic protein kinase domain//REV protein (anti-repression trans-activator protein)

NT2RP7008435//Anenome neurotoxin//CUB domain//Low-density lipoprotein receptor domain class A//Trypsin

NT2RP8000521//Small cytokines (intecrine/chemokine), interleukin-8 like

NTONG2008093//Adenylylsulfate kinase//6-phosphofructo-2-kinase

OCBBF2003327//Thrombospondin type 1 domain//Thrombospondin type 1 domain//Thrombospondin type 1 domain

OCBBF2005433//SH3 domain//WW domain//PH domain//RhoGAP domain

OCBBF2006987//Collagen triple helix repeat (20 copies)//Eukaryotic DNA topoisomerase I

[0485] OCBBF2008144//KRAB box//Zinc finger, C2H2 type//Zinc finger, C2H2 type//Zinc finger, C2H2 type//Zinc finger, C2H2 type//Zinc finger, C2H2 type//Zinc finger, C2H2 type//Zinc finger, C2H2 type//Zinc finger, C2H2 type//Zinc finger, C2H2 type//Zinc finger, C2H2 type//Zinc finger, C2H2 type//Transcription factor S-II (TFIIS)//Zinc finger, C2H2 type//Zinc finger, C2H2 type//Zinc finger, C2H2 type//Zinc finger, C2H2 type//Zinc finger, C2H2 type//PHD-finger//Zinc finger, C2H2 type//Zinc finger, C2H2 type//Zinc finger, C2H2 type//Zinc finger, C2H2 type//Zinc finger, C2H2 type//Zinc finger, C2H2 type//Zinc finger, C2H2 type

OCBBF2009583//KRAB box//Zinc finger, C2H2 type//Zinc finger, C2H2 type//Zinc finger, C2H2 type//Zinc finger, C2H2 type//Zinc finger, C2H2 type

[0486] OCBBF2011669//Zinc finger, C2H2 type//Zinc finger, C2H2 type//Zinc finger, C2H2 type//Zinc finger, C2H2 type//Zinc finger, C2H2 type//Zinc finger, C2H2 type//Zinc finger, C2H2 type//Zinc finger, C2H2 type//Zinc finger, C2H2 type//Zinc finger, C2H2 type//Zinc finger, C2H2 type//Zinc finger, C2H2 type//Zinc finger, C2H2 type//Zinc finger, C2H2 type//Zinc finger, C2H2 type//Zinc finger, C2H2 type//Zinc finger, C2H2 type//Zinc finger, C2H2 type//Putative zinc finger in N-recognin//Zinc finger, C2H2 type//PHD-finger//Zinc finger, C2H2 type

[0487] OCBBF2019684//Zinc finger, C2H2 type//Zinc finger, C2H2 type//Transcription factor S-II (TFIIS)//Zinc finger, C2H2 type//Zinc finger, C2H2 type//PHD-finger//Zinc finger, C2H2 type//Zinc finger, C2H2 type//Zinc finger, C2H2 type//Zinc finger, C2H2 type//Zinc finger, C2H2 type//Zinc finger, C2H2 type//Zinc finger, C2H2 type//Zinc finger, C2H2 type//Zinc finger, C2H2 type//Zinc finger, C2H2 type

OCBBF2020048//Protein of unknown function DUF98//Zinc finger, C3HC4 type (RING finger)

[0488] OCBBF2024284//Hemagglutinin//PHD-finger//Zinc finger//Zinc finger//Zinc finger//Zinc finger//Zinc finger//Zinc finger//Zinc finger//Zinc finger//Zinc finger//Zinc finger//Zinc finger//Zinc finger//WD domain, G-beta repeat//WD domain, G-beta repeat//WD domain, G-beta repeat

OCBBF2030116//Hr1 repeat motif//Transthyretin precursor (formerly prealbumin)//Tau and MAP proteins, tubulin-binding//Transient receptor//Syntaxin

OCBBF2032274//Zinc finger, C2H2 type//Zinc finger, C2H2 type//Zinc finger, C2H2 type//Transcription factor S-II (TFIIS)//Zinc finger, C2H2 type//Zinc finger, C2H2 type//Zinc finger, C2H2 type//Zinc finger, C2H2 type//Zinc finger, C2H2 type

OCBBF2034637//Prokaryotic DNA topoisomerase//Protein of unknown function//Eukaryotic protein kinase domain

[0489] OCBBF3000167//Zinc finger, C2H2 type//Zinc finger, C2H2 type//Zinc finger, C2H2 type//Zinc finger, C2H2 type//Zinc finger, C2H2 type//Zinc finger, C2H2 type//Zinc finger, C2H2 type//Zinc finger, C2H2 type//Zinc finger, C2H2 type//Zinc finger, C2H2 type//Zinc finger, C2H2 type//Zinc finger, C2H2 type//Zinc finger, C2H2 type//Zinc finger, C2H2 type

OCBBF3002654//SH3 domain//Immunoglobulin domain//Eukaryotic protein kinase domain

OCBBF3003761//KH domain//KH domain//Zinc finger, C3HC4 type (RING finger)

PERIC2007068//ELM2 domain//Myb-like DNA-binding domain//Eukaryotic initiation factor 1A//Myb-like DNA-binding domain

PLACE7000333//AP endonuclease family 1

PLACE7000502//Ank repeat//Ank repeat//Ank repeat//Ank repeat//Ank repeat//Peptidase family C9

PROST2000452//Trypsin

PROST2009320//LIM domain containing proteins//LIM domain containing proteins

PUAEN2006335//Formin Homology 2 Domain

SKMUS2003194//SAP domain

SPLEN2016135//Zinc finger, C2H2 type//Zinc finger, C2H2 type//Phorbol esters/diacylglycerol binding domain (C1 domain)//Zinc finger, C2H2 type

SPLEN2016781//Transcription factor S-II (TFIIS)//Zinc finger, C2H2 type//Zinc finger, C2H2 type//Zinc finger, C2H2 type

SPLEN2030847//Kinesin motor domain//Kinesin motor domain//GGL domain

SPLEN2036702//REJ domain//Phorbol esters/diacylglycerol binding domain (C1 domain)//PHD-finger

SPLEN2039311//dUTPase

SPLEN2039379//Transthyretin precursor (formerly prealbumin)

STOMA2003158//Deoxyribonuclease I (DNase I)

SYNOV1000256//Leucine Rich Repeat//BAH domain//Leucine Rich Repeat//Leucine Rich Repeat//Leucine Rich Repeat

SYNOV2006620//Nuclear transition protein 2

SYNOV2013637//Chalcone and stilbene synthases

SYNOV2021953//Zinc finger, C2H2 type//Zinc finger, C2H2 type//Zinc finger, C2H2 type//Zinc finger, C2H2 type

SYNOV4002744//Zinc finger, C2H2 type//Zinc finger, C2H2 type//Zinc finger, C2H2 type//Zinc finger, C2H2 type

SYNOV4003981//Somatomedin B domain//WAP-type (Whey Acidic Protein) ‘four-disulfide core’//Hemopexin//Hemopexin

SYNOV4005889//Apolipoprotein A1/A4/E family

TESOP2000390//Eukaryotic protein kinase domain

TESOP2001796//Zinc finger, C3HC4 type (RING finger)//PHD-finger//IBR domain

[0490] TESOP2005199//KRAB box//Zinc finger, C2H2 type//Zinc finger, C2H2 type//Zinc finger, C2H2 type//Transcription factor S-II (TFIIS)//Zinc finger, C2H2 type//Zinc finger, C2H2 type//PHD-finger//Zinc finger, C2H2 type//Zinc finger, C2H2 type//Zinc finger, C2H2 type//Zinc finger, C2H2 type//TRAF-type zinc finger//Zinc finger, C2H2 type

TESOP2006398//Zinc finger, C2H2 type

TESOP2006865//KRAB box

TESTI1000266//Integrase core domain

TESTI2008901//Transcription factor WhiB

TESTI2015626//Phosphoribosyl transferase domain

TESTI2025924//Eukaryotic protein kinase domain

TESTI2026647//DEAD/DEAH box helicase//Helicases conserved C-terminal domain

TESTI2029252//Ion transport protein//Polysaccharide biosynthesis protein

[0491] TESTI2034251//Zinc finger, C2H2 type//Zinc finger, C2H2 type//Zinc finger, C2H2 type//Zinc finger, C2H2 type//Transcription factor S-II (TFIIS)//Zinc finger, C2H2 type//Zinc finger, C2H2 type//Zinc finger, C2H2 type//Zinc finger, C2H2 type//Zinc finger, C2H2 type//Zinc finger, C2H2 type//Zinc finger, C2H2 type//Zinc finger, C2H2 type//Zinc finger, C2H2 type//Zinc finger, C2H2 type//Zinc finger, C2H2 type//Zinc finger, C2H2 type//Zinc finger, C2H2 type//Zinc finger, C2H2 type

TESTI2035981//RNA polymerase alpha subunit

TESTI2036288//Aldo/keto reductase family

TESTI2037830//Zinc finger, C2H2 type//Zinc finger, C2H2 type

TESTI2039060//D-ala D-ala ligase//Glycosyl hydrolases family 31

TESTI2049956//WD domain, G-beta repeat//WD domain, G-beta repeat//PQQ enzyme repeat//WD domain, G-beta repeat//WD domain, G-beta repeat//WD domain, G-beta repeat//WD domain, G-beta repeat

TESTI2050780//Kazal-type serine protease inhibitor domain

TESTI4000137//Domain of unknown function

TESTI4000155//Viral RNA dependent RNA polymerase

TESTI4000183//KRAB box//Zinc finger, C2H2 type//Zinc finger, C2H2 type//Zinc finger, C2H2 type

TESTI4000214//Zinc finger, C3HC4 type (RING finger)//DENN (AEX-3) domain

TESTI4000319//RasGEF domain

TESTI4001984//Retroviral aspartyl protease//G-patch domain

TESTI4005317//Bacterial flagellin C-terminus//Phosphotyrosine interaction domain (PTB/PID)

TESTI4006473//Sigma-54 transcription factors//DEAD/DEAH box helicase//DEAD/DEAH box helicase//Ank repeat//Ank repeat//Helicases conserved C-terminal domain

TESTI4008058//Zn-finger in Ran binding protein and others.//Zinc finger, CCHC class

TESTI4008302//Zinc finger, C2H2 type//Zinc finger, C2H2 type//Zinc finger, C2H2 type//Zinc finger, C2H2 type//PHD-finger//Zinc finger, C2H2 type//Zinc finger, C2H2 type//Zinc finger, C2H2 type//Zinc finger, C2H2 type//Zinc finger, C2H2 type

TESTI4010382//Luteovirus (ORF3) RNA-directed RNA-polymerase//Ezrin/radixin/moesin family

TESTI4011072//Tudor domain//Tudor domain//Staphylococcal nuclease homologues//Tudor domain//Tudor domain

TESTI4013365//MYND finger

TESTI4013894//Synaptophysin/synaptoporin

TESTI4014801//Zinc finger, C2H2 type//N2,N2-dimethylguanosine tRNA methyltransferase

TESTI4015442//Homeobox domain//Zinc finger, C2H2 type//Homeobox domain//Zinc finger, C2H2 type//Zinc finger, C2H2 type//Zinc finger, C2H2 type

TESTI4017714//Transcriptional regulatory protein, C terminal//Prolyl oligopeptidase family

TESTI4021482//Eukaryotic protein kinase domain

TESTI4024387//GDP dissociation inhibitor

TESTI4025268//WD domain, G-beta repeat//WD domain, G-beta repeat

[0492] TESTI4025494//KRAB box//Zinc finger, C2H2 type//Zinc finger, C2H2 type//Zinc finger, C2H2 type//Zinc finger, C2H2 type//Zinc finger, C2H2 type//Zinc finger, C2H2 type//Zinc finger, C2H2 type//Zinc finger, C2H2 type//Zinc finger, C2H2 type//Zinc finger, C2H2 type//TRAF-type zinc finger//Zinc finger, C2H2 type//Zinc finger, C2H2 type//Zinc finger, C2H2 type//Zinc finger, C2H2 type//Zinc finger, C2H2 type

TESTI4025547//Type II intron maturase//Zinc finger, C2H2 type//Zinc finger, C2H2 type//Zinc finger, C2H2 type

TESTI4025865//Lipoate-protein ligase B//KE2 family protein

TESTI4026207//Kinesin motor domain//DNA gyrase/topoisomerase IV, subunit A

[0493] TESTI4028938//KRAB box//Zinc finger, C2H2 type//Zinc finger, C2H2 type//Zinc finger, C2H2 type//Zinc finger, C2H2 type//Zinc finger, C2H2 type//Zinc finger, C2H2 type//Zinc finger, C2H2 type//Zinc finger, C2H2 type//Zinc finger, C2H2 type//Zinc finger, C2H2 type//DM DNA binding domain//Zinc finger, C2H2 type//Zinc finger, C2H2 type

TESTI4028958//DNA gyrase/topoisomerase IV, subunit A//Apolipoprotein A1/A4/E family

TESTI4029348//Trans-activation protein X

TESTI4029528//RanBP1 domain.

TESTI4029690//Leucine Rich Repeat//Leucine Rich Repeat//Leucine Rich Repeat//Cytochrome c oxidase subunit VIa//IQ calmodulin-binding motif

TESTI4031745//Alpha-2-macroglobulin family//Eukaryotic protein kinase domain//REV protein (anti-repression trans-activator protein)

TESTI4032090//RNase H//Integrase Zinc binding domain//Integrase core domain

TESTI4032112//Syndecan domain

TESTI4038721//Squash family of serine protease inhibitors

TESTI4041086//Transmembrane amino acid transporter protein

TESTI4046240//Sir2 family

THYMU2004139//Eukaryotic protein kinase domain

THYMU2004284//Repeat in ubiquitin-activating (UBA) proteins

THYMU2006001//Zinc finger, C3HC4 type (RING finger)//CONSTANS family zinc finger//B-box zinc finger.//SPRY domain

THYMU2028739//SCAN domain//KRAB box//Myb-like DNA-binding domain

THYMU2031139//Reprolysin (M12B) family zinc metalloprotease//Thrombospondin type 1 domain//EB module//Plant PEC family metallothionein//A20-like zinc finger

THYMU2031249//C-type lysozyme/alpha-lactalbumin family//Eukaryotic protein kinase domain

THYMU2035078//Domain of unknown function DUF27

THYMU2035710//ATP1G1/PLM/MAT8 family

THYMU2040925//CDP-alcohol phosphatidyltransferase

THYMU3000269//FAD binding domain

THYMU3000360//Integrase core domain

THYMU3001428//Zinc finger, C3HC4 type (RING finger)//PHD-finger

TKIDN2012771//DNA polymerase (viral) C-terminal domain//MttB family UPF0032

TLIVE2001684//Alpha-2-macroglobulin family//Alpha-2-macroglobulin family

TLIVE2002046//HMG (high mobility group) box//Uroporphyrinogen decarboxylase (URO-D)//Delta-aminolevulinic acid dehydratase

TLIVE2007607//DNA polymerase (viral) C-terminal domain//Cytochrome P450

TRACH1000212//TSC-22/dip/bun family

TRACH2000862//Guanylate-binding protein

TRACH2007483//Zinc finger, C2H2 type//Zinc finger, C2H2 type//Zinc finger, C2H2 type//Zinc finger, C2H2 type//Zinc finger, C2H2 type

TRACH2019672//CRAL/TRIO domain.

TRACH2024408//Death domain

TRACH2024559//IQ calmodulin-binding motif//IQ calmodulin-binding motif

[0494] TRACH3000134//KRAB box//Zinc finger, C2H2 type//Zinc finger, C2H2 type//Zinc-finger, C2H2 type//Zinc finger, C2H2 type//Zinc finger, C2H2 type//Zinc finger, C2H2 type//Zinc finger, C2H2 type//Zinc finger, C2H2 type//Zinc finger, C2H2 type//PHD-finger//Zinc finger, C2H2 type//Zinc finger, C2H2 type//Zinc finger, C2H2 type//DnaJ central domain (4 repeats)//Zinc finger, C2H2 type//Zinc finger, C2H2 type//Zinc finger, C2H2 type//Zinc finger, C2H2 type//Zinc finger, C2H2 type//Zinc finger, C2H2 type//Zinc finger, C2H2 type

TRACH3000420//ABC transporter//Papain family cysteine protease//ABC transporter

TRACH3002561//‘Cold-shock’ DNA-binding domain

TRACH3003832//PHD-finger

TRACH3007866//Transcriptional regulatory protein, C terminal//PAC motif//Dipeptidyl peptidase IV (DPP IV) N-terminal region//Prolyl oligopeptidase family

UTERU2004299//ATP P2X receptor

UTERU2008040//Phorbol esters/diacylglycerol binding domain (C1 domain)//SH3 domain

UTERU2019534//Cysteine rich repeat//Cysteine rich repeat//Carboxylesterases

UTERU2028734//C2 domain//C2 domain

UTERU2032279//Serpins (serine protease inhibitors)

UTERU2033577//KRAB box

UTERU3000402//WD domain, G-beta repeat//WD domain, G-beta repeat

UTERU3000738//Eukaryotic protein kinase domain

UTERU3001053//Zinc finger, C2H2 type//Zinc finger, C2H2 type//Zinc finger, C2H2 type//Zinc finger, C2H2 type//Zinc finger, C2H2 type//Zinc finger, C2H2 type//Transcription factor S-II (TFIIS)//Zinc finger, C2H2 type//Zinc finger, C2H2 type

UTERU3014791//LIM domain containing proteins//PHD-finger//LIM domain containing proteins

UTERU3015412//WD domain, G-beta repeat//WD domain, G-beta repeat//WD domain, G-beta repeat//Keratin, high sulfur B2 protein

UTERU3017176//K-box region//bZIP transcription factor

TESTI4038779//K+channel tetramerisation domain//BTB/POZ domain//Zinc finger, C2H2 type//Zinc finger, C2H2 type//Rubredoxin//PHD-finger//Zinc finger, C2H2 type

### EXAMPLE 6

### Functional Categorization Based on Homology Search of the Full-Length Nucleotide Sequences and Deduced Amino Acid Sequences

[0495] The functional prediction and categorization of the proteins encoded by the clones were carried out based on the result of homology search of the databases of GenBank, Swiss-Prot, UniGene, nr, and RefSeq (see the Homology Search Result Data) for the full-length nucleotide sequences and deduced amino acid sequences.

[0496] A clone predicted to belong to the category of secretory protein/membrane protein means a clone having hit data with some annotation, such as growth factor, cytokine, hormone, signal, transmembrane, membrane, extracellular matrix, receptor, G-protein coupled receptor, ionic channel, voltage-gated channel, calcium channel, cell adhesion, collagen, and connective tissue, suggesting that it is a secretory or membrane protein, or means a clone in which the presence of nucleotide sequence encoding a signal sequence or transmembrane domain was suggested by the results of PSORT and SOSUI analyses for deduced ORF.

[0497] A clone predicted to belong to the category of glycoprotein-related protein means a clone having hit data with some annotation, such as glycoprotein, suggesting that the clone encodes a glycoprotein-related protein.

[0498] A clone predicted to belong to the category of signal transduction-related protein means a clone having hit data with some annotation, such as serine/threonine-protein kinase, tyrosine-protein kinase, SH3 domain, and SH2 domain, suggesting that the clone encodes a signal transduction-related protein.

[0499] A clone predicted to belong to the category of transcription-related protein means a clone having hit data with some annotation, such as transcription regulation, zinc finger, and homeobox, suggesting that the clone encodes a transcription-related protein.

[0500] A clone predicted to belong to the category of disease-related protein means a clone having hit data with some annotation, such as disease mutation and syndrome, suggesting that the clone encodes a disease-related protein, or means a clone whose full-length nucleotide sequence has hit data for Swiss-Prot, GenBank, or UniGene, where the hit data corresponds to genes or proteins which have been deposited in the Online Mendelian Inheritance in Man (OMIM) (http://www.ncbi.nlm.nih.gov/Omim/), which is the human gene and disease database.

[0501] A clone predicted to belong to the category of enzyme and/or metabolism-related protein means a clone having hit data with some annotation, such as metabolism, oxidoreductase, and E. C. No. (Enzyme commission number), suggesting that the clone encodes an enzyme and/or metabolism-related protein.

[0502] A clone predicted to belong to the category of cell division and/or cell proliferation-related protein means a clone having hit data with some annotation, such as cell division, cell cycle, mitosis, chromosomal protein, cell growth, and apoptosis, suggesting that the clone encodes a cell division and/or cell proliferation-related protein.

[0503] A clone predicted to belong to the category of cytoskeleton-related protein means a clone having hit data with some annotation, such as structural protein, cytoskeleton, actin-binding, and microtubles, suggesting that the clone encodes a cytoskeleton-related protein.

[0504] A clone which is predicted to belong to the category of nuclear protein and/or RNA synthesis-related protein means a clone having hit data with some annotation, such as nuclear protein, RNA splicing, RNA processing, RNA helicase, and polyadenylation, suggesting that the clone encodes a nuclear protein and/or RNA synthesis-related protein.

[0505] A clone predicted to belong to the category of protein synthesis and/or transport-related protein means a clone having hit data with some annotation, such as translation regulation, protein biosynthesis, amino-acid biosynthesis, ribosomal protein, protein transport, and signal recognition particle, suggesting that the clone encodes a protein synthesis and/or transport-related protein.

[0506] A clone predicted to belong to the category of cellular defense-related protein means a clone having hit data with some annotation, such as heat shock, DNA repair, and DNA damage, suggesting that the clone encodes a cellular defense-related protein.

[0507] A clone predicted to belong to the category of development and/or differentiation-related proteins means a clone having hit data with some annotation, such as developmental protein, suggesting that the clone encodes a development and/or differentiation-related protein.

[0508] A clone predicted to belong to the category of DNA-binding and/or RNA-binding protein means a clone having hit data with some annotation, such as DNA-binding, RNA-binding, etc.

[0509] A clone predicted to belong to the category of ATP-binding and/or GTP-binding protein means a clone having hit data with some annotation, such as ATP-binding, GTP-binding, etc.

[0510] In this functional categorization, when a single clone corresponded to multiple categories of those shown above, the clone was assigned to the multiple categories. However, the function of a protein is not restricted to the functional categories in this classification, and there is the possibility that other functions are newly assigned to the protein.

[0511] The clones predicted to belong to the category of secretory protein and/or membrane protein are the following 659 clones.

[0512] ACTVT2000380, ADIPS2000088, ADRGL2000172, ADRGL2003329, ADRGL2009146, ASTRO2014923, ASTRO3000301, BLADE1000176, BLADE2002073, BLADE2002947, BLADE2004462, BLADE2004670, BLADE2005036, BLADE2008539, BNGH42003570, BRACE1000186, BRACE2005457, BRACE2014306, BRACE2016981, BRACE2029112, BRACE2030884, BRACE2031527, BRACE2031531, BRACE2031899, BRACE2032385, BRACE2036005, BRACE2039249, BRACE2039327, BRACE2040138, BRACE2041200, BRACE2043142, BRACE2043665, BRACE2046295, BRACE3000697, BRACE3001391, BRACE3002298, BRACE3003004, BRACE3003595, BRACE3004058, BRACE3004113, BRACE3004772, BRACE3004843, BRACE3006462, BRACE3008137, BRACE3008384, BRACE3009574, BRACE3009708, BRACE3010397, BRACE3011271, BRACE3011505, BRACE3013740, BRACE3014005, BRACE3014068, BRACE3014807, BRACE3016884, BRACE3018963, BRACE3019084, BRACE3020286, BRACE3020594, BRACE3024662, BRACE3025531, BRACE3025630, BRACE3026008, BRACE3026735, BRACE3027326, BRACE3031838, BRACE3040856, BRALZ2016085, BRAMY2001473, BRAMY2004771, BRAMY2005052, BRAMY2017528, BRAMY2019300, BRAMY2019963, BRAMY2021498, BRAMY2028856, BRAMY2033003, BRAMY2033116, BRAMY2033594, BRAMY2036396, BRAMY2039872, BRAMY2040592, BRAMY2041542, BRAMY2045036, BRAMY2047420, BRAMY2047751, BRAMY2047765, BRAMY3002312, BRAMY3004224, BRAMY3004919, BRAMY3007206, BRAMY3007609, BRAMY3008505, BRAMY4000095, BRASW1000125, BRAWH1000127, BRAWH2002560, BRAWH2002761, BRAWH2007658, BRAWH2014414, BRAWH2014954, BRAWH2016221, BRAWH2016439, BRAWH2016702, BRAWH3000078, BRAWH3000314, BRAWH3001475, BRAWH3001891, BRAWH3002600, BRAWH3003555, BRAWH3003727, BRAWH3003992, BRAWH3004453, BRAWH3004666, BRAWH3005132, BRAWH3005912, BRAWH3006548, BRAWH3007221, BRAWH3007506, BRAWH3007592, BRAWH3008634, BRCAN2002948, BRCAN2006063, BRCAN2009203, BRCAN2010376, BRCAN2012355, BRCAN2012481, BRCAN2013655, BRCAN2014143, BRCAN2016619, BRCAN2024451, BRCOC2007034, BRCOC2019934, BRHIP2000691, BRHIP2001805, BRHIP2002172, BRHIP2004814, BRHIP2004883, BRHIP2005236, BRHIP2005752, BRHIP2009414, BRHIP2013699, BRHIP2026288, BRHIP3000526, BRHIP3007483, BRHIP3007586, BRHIP3008598, BRHIP3009448, BRHIP3015751, BRHIP3024118, BRHIP3026097, BRSSN2003086, BRSSN2004496, BRSSN2008549, BRSSN2011738, BRSSN2014424, BRSSN2018925, BRSTN2000872, BRSTN2003835, BRSTN2007000, BRSTN2010363, BRSTN2012380, BRSTN2015015, BRSTN2016470, BRSTN2016678, BRSTN2017110, BRTHA2002376, BRTHA2002493, BRTHA2002608, BRTHA2002808, BRTHA2003110, BRTHA2003461, BRTHA2005579, BRTHA2006075, BRTHA2008527, BRTHA2011194, BRTHA2012980, BRTHA2013460, BRTHA2015696, BRTHA2015878, BRTHA2016215, BRTHA2016496, BRTHA2017985, BRTHA2018344, BRTHA2018624, BRTHA3000633, BRTHA3002427, BRTHA3003474, BRTHA3007148, BRTHA3008386, BRTHA3008778, BRTHA3009037, BRTHA3009090, BRTHA3009291, BRTHA3016845, BRTHA3017047, BRTHA3017589, BRTHA3017848, BRTHA3018656, CERVX2002006, COLON2000568, COLON2002443, COLON2004478, COLON2005126, COLON2005772, CTONG1000302, CTONG1000341, CTONG1000488, CTONG1000508, CTONG2000042, CTONG2004062, CTONG2008233, CTONG2009423, CTONG2009531, CTONG2010803, CTONG2013178, CTONG2019652, CTONG2019788, CTONG2020127, CTONG2020522, CTONG2020638, CTONG2022601, CTONG2023512, CTONG2024749, CTONG2025496, CTONG2026920, CTONG2027327, CTONG2028124, CTONG2028687, CTONG3000707, CTONG3001370, CTONG3001560, CTONG3002020, CTONG3003179, CTONG3003483, CTONG3003737, CTONG3005648, CTONG3008252, CTONG3008258, CTONG3008496, CTONG3008566, CTONG3008951, CTONG3009227, CTONG3009239, CTONG3009328, CTONG3009385, D3OST2002182, D3OST2002648, DFNES1000107, DFNES2000146, DFNES2005266, DFNES2010502, FCBBF2001183, FCBBF2007510, FCBBF3003435, FCBBF3004502, FCBBF3009888, FCBBF3012170, FCBBF3021576, FCBBF3023895, FCBBF4000076, FEBRA1000030, FEBRA2007708, FEBRA2008311, FEBRA2008468, FEBRA2020668, FEBRA2025427, FEBRA2027082, HCASM2002502, HCASM2003212, HCASM2007047, HCHON2000212, HCHON2001084, HCHON2001548, HCHON2001577, HCHON2001712, HCHON2002676, HCHON2004007, HCHON2004776, HCHON2005921, HEART1000010, HEART2001680, HEART2010492, HLUNG2000014, HLUNG2003872, HLUNG2010464, HLUNG2015617, HLUNG2017350, HSYRA2005496, HSYRA2006873, HSYRA2008714, HSYRA2009102, IMR322002110, IMR322006222, KIDNE1000064, KIDNE2000832, KIDNE2000846, KIDNE2006580, KIDNE2010264, KIDNE2011635, KIDNE2012945, KIDNE2013095, LIVER2007415, LYMPB2000083, MESAN2001979, MESAN2012054, MESTC1000042, NHNPC2000606, NHNPC2001223, NOVAR2000136, NOVAR2001108, NT2RI2008724, NT2RI2009855, NT2RI2025909, NT2RI3001263, NT2RI3003095, NT2RI3003382, NT2RI3003409, NT2RI3005403, NT2RI3006171, NT2RI3006673, NT2RI3007065, NT2RI3007543, NT2RI3007978, NT2RP7000359, NT2RP7000466, NT2RP7004027, NT2RP7009030, NT2RP7014005, NTONG2000413, OCBBF2006151, OCBBF2006567, OCBBF2006764, OCBBF2007114, OCBBF2007428, OCBBF2009926, OCBBF2010140, OCBBF2017516, OCBBF2021788, OCBBF2024719, OCBBF2025458, OCBBF2030517, OCBBF2030574, OCBBF2031167, OCBBF2032590, OCBBF2033869, OCBBF2037598, OCBBF2038317, OCBBF3000483, OCBBF3003320, OCBBF3004314, PEBLM2000170, PEBLM2000338, PEBLM2002594, PEBLM2006113, PEBLM2007834, PERIC2001227, PERIC2003452, PERIC2003720, PERIC2004909, PERIC2005347, PERIC2006035, PERIC2007914, PLACE5000171, PLACE5000260, PLACE5000282, PLACE6012574, PLACE6019932, PLACE6020031, PLACE7000514, PLACE7001022, PROST1000184, PROST1000528, PROST1000559, PROST2003428, PROST2018090, PROST2018902, PROST2018922, PUAEN2002489, PUAEN2005588, PUAEN2006701, PUAEN2009174, PUAEN2009795, RECTM2000433, RECTM2001347, SKMUS2000757, SKNMC2002402, SMINT2002743, SMINT2009902, SMINT2011888, SMINT2015787, SPLEN2001599, SPLEN2009548, SPLEN2012889, SPLEN2015158, SPLEN2015267, SPLEN2015679, SPLEN2021701, SPLEN2023733, SPLEN2023791, SPLEN2025491, SPLEN2029522, SPLEN2029683, SPLEN2030335, SPLEN2030479, SPLEN2031125, SPLEN2031424, SPLEN2031547, SPLEN2031724, SPLEN2031780, SPLEN2032813, SPLEN2033098, SPLEN2034021, SPLEN2034781, SPLEN2036326, SPLEN2036821, SPLEN2037722, SPLEN2038180, SPLEN2038345, SPLEN2038407, SPLEN2040222, SPLEN2041304, SPLEN2042598, STOMA2004294, STOMA2008546, SYNOV2005817, SYNOV2012326, SYNOV2014400, SYNOV2016124, SYNOV4002883, SYNOV4003322, SYNOV4004184, SYNOV4004741, SYNOV4004914, SYNOV4006256, SYNOV4007430, SYNOV4007553, SYNOV4007671, SYNOV4008336, SYNOV4008440, TBAES2001258, TCERX2000613, TESOP2001345, TESOP2001865, TESOP2002273, TESOP2002539, TESOP2004114, TESOP2005485, TESOP2005579, TESOP2006041, TESOP2007052, TESOP2007262, TESOP2007636, TESTI1000257, TESTI1000348, TESTI2000644, TESTI2002036, TESTI2002618, TESTI2002928, TESTI2003347, TESTI2005610, TESTI2006648, TESTI2013382, TESTI2024567, TESTI2027019, TESTI2034767, TESTI2034953, TESTI2034997, TESTI2035997, TESTI2036684, TESTI2042450, TESTI2047071, TESTI2048898, TESTI2051767, TESTI2052822, TESTI4000215, TESTI4000724, TESTI4001100, TESTI4001527, TESTI4001561, TESTI4001665, TESTI4001923, TESTI4002552, TESTI4002754, TESTI4005805, TESTI4005961, TESTI4006053, TESTI4006137, TESTI4007064, TESTI4007163, TESTI4007239, TESTI4007382, TESTI4008050, TESTI4008401, TESTI4008429, TESTI4008797, TESTI4009608, TESTI4012448, TESTI4013369, TESTI4013667, TESTI4013830, TESTI4014392, TESTI4016238, TESTI4017575, TESTI4017901, TESTI4018835, TESTI4019566, TESTI4020092, TESTI4020102, TESTI4021478, TESTI4023722, TESTI4024420, TESTI4024874, TESTI4024890, TESTI4025797, TESTI4026456, TESTI4026785, TESTI4027821, TESTI4028062, TESTI4028429, TESTI4028823, TESTI4028880, TESTI4029836, TESTI4030159, TESTI4030505, TESTI4034172, TESTI4035065, TESTI4035649, TESTI4037244, TESTI4041053, TESTI4042711, TESTI4046487, TESTI4046819, THYMU2001053, THYMU2003632, THYMU2003760, THYMU2005003, THYMU2005303, THYMU2005321, THYMU2007658, THYMU2008725, THYMU2009425, THYMU2011548, THYMU2013386, THYMU2014353, THYMU2019210, THYMU2023711, THYMU2027497, THYMU2027695, THYMU2029676, THYMU2030068, THYMU2032035, THYMU2032437, THYMU2032655, THYMU2033079, THYMU2033308, THYMU2033816, THYMU2034314, THYMU2035064, THYMU2036085, THYMU2036459, THYMU2037226, THYMU2037348, THYMU2038772, THYMU2038797, THYMU2039780, THYMU2040412, THYMU2041015, THYMU3000028, THYMU3000036, THYMU3004835, THYMU3005696, THYMU3006168, THYMU3006811, THYMU3007137, THYMU3007368, THYMU3007845, TKIDN2002424, TKIDN2002632, TKIDN2006525, TKIDN2009092, TKIDN2009889, TKIDN2014771, TKIDN2019116, TLIVE2000023, TLIVE2001828, TLIVE2001927, TLIVE2002336, TLIVE2002690, TLIVE2003381, TLIVE2004110, TLIVE2008229, TOVAR2001281, TRACH1000205, TRACH2001549, TRACH2001684, TRACH2006387, TRACH2007059, TRACH2007834, TRACH2008300, TRACH2020525, TRACH2021964, TRACH2022553, TRACH2025535, TRACH2025911, TRACH3000014, TRACH3002064, TRACH3002168, TRACH3002650, TRACH3004786, TRACH3005294, TRACH3005549, TRACH3006149, TRACH3007391, TRACH3008629, TRACH3035199, TRACH3035526, TRACH3036193, TSTOM2000442, TSTOM2000553, TUTER2000916, UTERU1000339, UTERU2004688, UTERU2004929, UTERU2006137, UTERU2006568, UTERU2007444, UTERU2017762, UTERU2020718, UTERU2022020, UTERU2025025, UTERU2025645, UTERU2025891, UTERU2026090, UTERU2026203, UTERU2027591, UTERU2029953, UTERU2031851, UTERU2035323, UTERU2035469, UTERU3000645, UTERU3000899, UTERU3001240, UTERU3001571, UTERU3001585, UTERU3001652, UTERU3001988, UTERU3002209, UTERU3002383, UTERU3002786, UTERU3003116, UTERU3003776, UTERU3006308, UTERU3008671, UTERU3009690, UTERU3009979, UTERU3011063, UTERU3015500, UTERU3016789

[0513] The following 82 clones are also predicted to belong to the category of secretory protein and/or membrane protein.

[0514] BLADE2006830, BRACE2002589, BRACE2009318, BRACE2011677, BRACE2029396, BRACE2039823, BRACE2039832, BRAMY2019111, BRAMY2038516, BRAMY2045471, BRAWH2006395, BRAWH2008993, BRCOC2019841, BRHIP2003272, BRHIP2005271, BRHIP2005724, BRHIP2008389, BRHIP2026877, BRHIP3000240, BRTHA2011321, BRTHA2018011, BRTHA2018443, BRTHA3008826, CTONG2015633, CTONG2016942, CTONG2019822, FEBRA2000790, FEBRA2006519, FEBRA2028256, FEBRA2028516, HCASM2002754, HEART2009680, HLUNG2013350, HLUNG2015418, IMR322013396, LIVER2000247, NT2RI2009583, NT2RI2027157, NT2RP7008435, OCBBF2003327, OCBBF2030116, PLACE7000502, PROST2000452, PROST2019487, SPLEN2016932, SPLEN2037319, SYNOV2001660, SYNOV2013637, SYNOV4003981, SYNOV4005889, TBAES2000932, TESTI2015626, TESTI2029252, TESTI2032643, TESTI2039060, TESTI2050780, TESTI4000137, TESTI4000155, TESTI4006473, TESTI4011070, TESTI4013365, TESTI4013894, TESTI4014801, TESTI4032090, TESTI4041086, THYMU2004284, THYMU2030462, THYMU2033401, THYMU2034279, THYMU2035710, THYMU2040925, TKIDN2008778, TKIDN2012771, TKIDN2018926, TLIVE2007607, TRACH2019672, TRACH3000420, TRACH3003683, UTERU2011220, UTERU2021820, UTERU2032279, UTERU3015069

[0515] The clones predicted to belong to the category of glycoprotein-related protein are the following 115 clones.

[0516] ADIPS2000088, BNGH42003570, BRACE2005457, BRACE2014306, BRACE2029112, BRACE2039249, BRACE2046295, BRACE3001391, BRACE3011271, BRACE3016884, BRAMY2005052, BRAMY3004919, BRAMY4000095, BRAMY4000277, BRAWH1000127, BRAWH2007658, BRAWH2014414, BRAWH2016221, BRAWH3002600, BRCAN2006063, BRSSN2004496, BRTHA2008527, BRTHA2012980, BRTHA2016496, BRTHA3002427, BRTHA3017848, COLON2000568, COLON2004478, COLON2005772, CTONG1000341, CTONG2000042, CTONG2009423, CTONG2023512, CTONG2024749, CTONG2025496, CTONG3001370, CTONG3003737, D3OST2002648, DFNES2000146, DFNES2005266, FCBBF3012170, FEBRA1000030, FEBRA2008311, FEBRA2008468, HCHON2001712, HEART1000010, HEART2001680, HSYRA2005496, KIDNE2012945, LYMPB2000083, NESOP2001433, NOVAR2000136, NOVAR2001108, NT2RI3006171, NT2RI3006673, NT2RP7004027, OCBBF2033869, PLACE5000171, PROST1000184, PUAEN2009795, SMINT2010076, SMINT2011888, SMINT2015787, SPLEN2015267, SPLEN2021701, SPLEN2030335, SYNOV2005817, SYNOV2014400, SYNOV3000231, SYNOV3000302, TESOP2004114, TESOP2005485, TESTI1000257, TESTI2002036, TESTI2002618, TESTI2024567, TESTI2027019, TESTI4001527, TESTI4007163, TESTI4012406, TESTI4013830, TESTI4020092, TESTI4023546, TESTI4028823, TESTI4028880, TESTI4046819, THYMU2005303, THYMU2008725, THYMU2009425, THYMU2011548, THYMU2019210, THYMU2023711, THYMU2027497, THYMU2027695, THYMU2038797, THYMU3004835, TLIVE2003381, TRACH2006387, TRACH2007059, TRACH2022425, TRACH2022553, TRACH2022649, TRACH3002168, TRACH3008629, TRACH3035526, TSTOM2000442, UTERU2008347, UTERU2025025, UTERU2035469, UTERU3000899, UTERU3001240, UTERU3003116, UTERU3006308, UTERU3008671, UTERU3015500

[0517] The following 15 clones are also predicted to belong to the category of glycoprotein-related protein.

BRAMY2019111, BRHIP2026877, BRTHA2018011, FEBRA2028256, HEART2009680, HLUNG2015418, NT2RI2009583, NT2RP7008435, OCBBF2003327, TESTI2032643, TESTI2039060, TESTI4011070, THYMU2035710, TRACH3003683, UTERU2032279

[0518] The clones predicted to belong to the category of signal transduction-related protein are the following 80 clones.

[0519] BNGH42007788, BRACE2008594, BRACE2030341, BRACE2044286, BRACE3002508, BRACE3003595, BRACE3006872, BRACE3011421, BRACE3015027, BRACE3027326, BRAMY2036567, BRAMY2038904, BRAMY3000213, BRAMY3002803, BRAMY3005091, BRAMY3005932, BRAMY4000095, BRAMY4000229, BRCAN2003703, BRCAN2014602, BRCAN2016619, BRCAN2028355, BRHIP2000819, BRHIP3025161, BRSSN2004719, BRSTN2008418, BRTHA2002281, BRTHA2015406, CTONG2006798, CTONG3000084, CTONG3002412, D3OST3000169, FCBBF3007540, HCASM2001301, HCHON2006250, HCHON2008112, HLUNG2002465, KIDNE2001847, NESOP2001694, NT2NE2003252, NT2RI2005166, NT2RI3007757, NT2RI3008652, NT2RP7005529, NT2RP7009147, NT2RP7013795, NT2RP8000483, OCBBF2004826, OCBBF2007028, OCBBF2022351, OCBBF2030354, OCBBF2037547, PLACE6019385, PLACE7008431, PROST2016462, PROST2018511, PUAEN2009852, SPLEN2036932, SYNOV2021320, TESOP2000801, TESOP2001166, TESTI2005739, TESTI2026505, TESTI2050137, TESTI4011745, TESTI4012505, TESTI4018208, TESTI4028059, THYMU2007060, THYMU2031046, THYMU2032014, THYMU2039305, THYMU3008436, TLIVE2001327, TRACH2009310, TRACH2025535, TRACH3009455, UTERU2025025, UTERU2036089, UTERU3016789

[0520] The following 31 clones are also predicted to belong to the category of signal transduction-related protein.

[0521] BRAMY3004800, BRAWH3009017, BRHIP2026877, BRTHA2013610, BRTHA2017972, BRTHA3003000, CTONG2020974, FEBRA2001990, FEBRA2008692, NT2RI2005772, NT2RI3007443, NTONG2008093, OCBBF2005433, OCBBF2024284, OCBBF2034637, OCBBF3002654, SPLEN2036702, SPLEN2039379, TESOP2000390, TESTI2025924, TESTI2049956, TESTI4000319, TESTI4019657, TESTI4021482, TESTI4024387, TESTI4025268, TESTI4031745, THYMU2004139, THYMU2031249, UTERU2008040, UTERU3000738

[0522] The clones predicted to belong to the category of transcription-related protein are the following 38 clones.

[0523] BRACE2030326, BRACE3001002, BRACE3045033, BRHIP3025161, BRSSN2014299, BRTHA2014792, BRTHA3001721, CTONG2025516, FEBRA2007544, FEBRA2007801, HEART1000074, IMR322000127, IMR322000917, NT2NE2006531, NT2RI2006686, NT2RI3009158, OCBBF2020838, OCBBF2036743, PEBLM2002887, SKNMC2007504, SPLEN2012624, TESTI2026505, TESTI2040018, TESTI2044796, TESTI2050987, TESTI4001176, TESTI4007810, TESTI4014175, TESTI4017543, TESTI4026524, TESTI4036909, THYMU2006420, THYMU2037233, THYMU3004866, TRACH3000558, TUTER2000425, UTERU2035328, UTERU3009490

[0524] The following 64 clones are also predicted to belong to the category of transcription-related protein.

[0525] BRACE2003609, BRACE3001058, BRACE3001113, BRALZ2017844, BRAMY2035070, BRAMY2035449, BRAMY2035718, BRAMY2039341, BRAWH2006207, BRHIP2017553, CERVX2002013, CTONG1000113, CTONG2003348, CTONG2008721, CTONG2020378, CTONG2020411, CTONG2028758, CTONG3004726, DFNES2011192, FCBBF3010361, FEBRA2014122, FEBRA2027609, HCASM2003018, HCHON2004858, HSYRA2005628, MESAN2005303, MESAN2014412, MESAN2015501, NT2RI2008952, NT2RI2018448, NT2RI3001132, OCBBF2008144, OCBBF2009583, OCBBF2011669, OCBBF2019684, OCBBF2032274, OCBBF3000167, SPLEN2004611, SPLEN2016135, SPLEN2016781, SYNOV2021953, SYNOV4002744, TESOP2001796, TESOP2005199, TESOP2006398, TESOP2006865, TESTI2034251, TESTI4000183, TESTI4000214, TESTI4008302, TESTI4015442, TESTI4025494, TESTI4025547, TESTI4028938, TESTI4032112, THYMU2006001, THYMU2028739, TRACH2007483, TRACH3000134, TRACH3003832, TUTER2000057, UTERU2033577, UTERU3001053, TESTI4038779

[0526] The clones predicted to belong to the category of disease-related protein are the following 342 clones.

[0527] 3NB692002806, ADIPS2000088, BLADE2005036, BRACE2005457, BRACE2008594, BRACE2014306, BRACE2016981, BRACE2018762, BRACE2035381, BRACE2038551, BRACE2039249, BRACE2045300, BRACE3000840, BRACE3001002, BRACE3001391, BRACE3001754, BRACE3002508, BRACE3003595, BRACE3004058, BRACE3004150, BRACE3004772, BRACE3008137, BRACE3008384, BRACE3009708, BRACE3010397, BRACE3011271, BRACE3011421, BRACE3014807, BRACE3015027, BRACE3015521, BRACE3018963, BRACE3020594, BRACE3027326, BRALZ2017359, BRAMY2005052, BRAMY2038904, BRAMY2047751, BRAMY3000213, BRAMY3005091, BRAMY3007609, BRAMY4000095, BRAMY4000229, BRAMY4000277, BRAWH2001395, BRAWH2002560, BRAWH2010000, BRAWH2010536, BRAWH2014414, BRAWH3000100, BRAWH3000491, BRAWH3001326, BRAWH3002574, BRAWH3005912, BRAWH3008341, BRCAN2002562, BRCAN2002856, BRCAN2002948, BRCAN2003746, BRCAN2006063, BRCAN2009203, BRCAN2014602, BRCAN2016619, BRCAN2017442, BRCAN2024451, BRCOC2001505, BRCOC2003213, BRHIP2000819, BRHIP2001805, BRHIP2009414, BRHIP2024165, BRHIP2026288, BRHIP3000339, BRHIP3008405, BRHIP3009448, BRHIP3027137, BRHIP3027854, BRSSN2000684, BRSSN2004719, BRSSN2014424, BRSTN2001613, BRSTN2004987, BRSTN2008418, BRTHA2002608, BRTHA2003110, BRTHA2007122, BRTHA2007603, BRTHA2008527, BRTHA2012980, BRTHA2014792, BRTHA3001721, BRTHA3002427, BRTHA3003074, BRTHA3003449, BRTHA3008778, BRTHA3009037, BRTHA3009090, BRTHA3015815, BRTHA3016917, BRTHA3017848, COLON2000568, COLON2002520, CTONG1000341, CTONG2000042, CTONG2009423, CTONG2010803, CTONG2017500, CTONG2023021, CTONG2025496, CTONG2025516, CTONG3000084, CTONG3002412, CTONG3008639, D3OST2002182, D3OST2002648, DFNES2001108, FCBBF3009888, FEBRA2007708, FEBRA2008468, FEBRA2024744, HCASM2001301, HCASM2007737, HCHON2001712, HCHON2002676, HCHON2003532, HCHON2004007, HCHON2004531, HCHON2008112, HCHON2008444, HEART1000010, HEART1000139, HEART2001680, HEART2010495, HLUNG2002465, HSYRA2005496, IMR322000127, IMR322001380, IMR322006495, KIDNE2001847, KIDNE2012945, NESOP2001694, NOVAR2001108, NT2NE2003252, NT2NE2006531, NT2NE2006909, NT2RI2006686, NT2RI2025909, NT2RI3001515, NT2RI3006171, NT2RI3006340, NT2RI3006673, NT2RI3007757, NT2RI3008652, NT2RP7000359, NT2RP7005118, NT2RP7005529, NT2RP7010599, NTONG2000413, OCBBF2006058, OCBBF2020801, OCBBF2021788, OCBBF2031167, OCBBF2033869, OCBBF2036743, OCBBF2037068, OCBBF2037340, OCBBF3003320, PEBLM2000170, PEBLM2002887, PERIC2003720, PERIC2007914, PERIC2008385, PERIC2009086, PLACE5000282, PLACE6019385, PROST1000184, PROST2003428, PROST2016462, PROST2017367, PROST2018090, PROST2018511, PUAEN2002489, PUAEN2009795, SKNMC2007504, SMINT2010076, SPLEN2002467, SPLEN2006122, SPLEN2011422, SPLEN2012624, SPLEN2021701, SPLEN2031547, SPLEN2033098, SPLEN2036326, SPLEN2036821, SPLEN2036932, SYNOV2005817, SYNOV2012326, SYNOV2014400, SYNOV2021320, SYNOV3000231, SYNOV3000302, SYNOV4002883, SYNOV4004741, SYNOV4007360, SYNOV4007521, SYNOV4007553, SYNOV4007671, SYNOV4008440, TBAES2001229, TBAES2001258, TESOP2004114, TESOP2005485, TESOP2009121, TESTI1000257, TESTI1000319, TESTI2000644, TESTI2002618, TESTI2005610, TESTI2024567, TESTI2026505, TESTI2050987, TESTI2051867, TESTI2053399, TESTI2053621, TESTI4000014, TESTI4000079, TESTI4000288, TESTI4000349, TESTI4000724, TESTI4001148, TESTI4001176, TESTI4001527, TESTI4001561, TESTI4002491, TESTI4006420, TESTI4006819, TESTI4007163, TESTI4007778, TESTI4007810, TESTI4008050, TESTI4008429, TESTI4009160, TESTI4009457, TESTI4009881, TESTI4010851, TESTI4011745, TESTI4011956, TESTI4012406, TESTI4012448, TESTI4012505, TESTI4012679, TESTI4013369, TESTI4013924, TESTI4014175, TESTI4016110, TESTI4016822, TESTI4016925, TESTI4017901, TESTI4018835, TESTI4018881, TESTI4018886, TESTI4020092, TESTI4021478, TESTI4022873, TESTI4023546, TESTI4026524, TESTI4027557, TESTI4028059, TESTI4028429, TESTI4028880, TESTI4030069, TESTI4034632, TESTI4034912, TESTI4035063, TESTI4035498, TESTI4036909, TESTI4037156, TESTI4040363, THYMU1000496, THYMU2005303, THYMU2008725, THYMU2019210, THYMU2027497, THYMU2027695, THYMU2027734, THYMU2031046, THYMU2033104, THYMU2035319, THYMU2037233, THYMU2041015, THYMU3001083, THYMU3001234, THYMU3001379, THYMU3003309, THYMU3004835, THYMU3006118, THYMU3007137, THYMU3008436, TKIDN2000701, TKIDN2006852, TLIVE2001327, TRACH2001549, TRACH2007059, TRACH2022425, TRACH2022649, TRACH3000558, TRACH3002168, TRACH3004721, TRACH3004786, TRACH3005549, TRACH3007479, TRACH3008629, TRACH3009455, TRACH3035526, TSTOM2000442, TUTER2000904, UTERU1000337, UTERU2005621, UTERU2007724, UTERU2017762, UTERU2019491, UTERU2019706, UTERU2025025, UTERU2026090, UTERU2027591, UTERU2035328, UTERU3000645, UTERU3000828, UTERU3000899, UTERU3001240, UTERU3001572, UTERU3001585, UTERU3001652, UTERU3003116, UTERU3003135, UTERU3005907, UTERU3007640, UTERU3008671, UTERU3009490, UTERU3009690, UTERU3009979, UTERU3015500, UTERU3016789

[0528] The following 84 clones are also predicted to belong to the category of disease-related protein.

[0529] BRACE3001113, BRACE3010076, BRAMY2039341, BRAMY3004800, BRAWH3009017, BRCAN2002473, BRCAN2002854, BRCAN2003070, BRHIP2005271, BRHIP2017553, BRHIP2026877, BRHIP3000240, BRHIP3008314, BRHIP3026052, BRSTN2013354, BRTHA2016318, BRTHA2017972, BRTHA3003000, CERVX2002013, CTONG1000113, CTONG2008721, CTONG2020411, CTONG3004550, FCBBF1000509, FEBRA2008692, HCASM2008536, HCHON2004858, HEART2009680, HLUNG2015548, HSYRA2005628, IMR322008651, IMR322013396, MESAN2001770, NT2RI2009583, NT2RI3007443, OCBBF2003327, OCBBF2009583, OCBBF2011669, OCBBF2024284, OCBBF2032274, OCBBF3000167, OCBBF3002654, PLACE7000502, PROST2000452, PROST2009320, SPLEN2004611, STOMA2003158, SYNOV1000256, SYNOV4002744, SYNOV4003981, TBAES2000932, TESOP2000390, TESOP2001796, TESOP2005199, TESTI2015626, TESTI2025924, TESTI2026647, TESTI2039060, TESTI4000183, TESTI4006473, TESTI4011070, TESTI4017714, TESTI4019657, TESTI4021482, TESTI4024387, TESTI4025494, TESTI4025547, TESTI4028938, TESTI4031745, TESTI4032112, THYMU2004284, THYMU2028739, THYMU2031139, THYMU2031249, THYMU2035710, THYMU3000269, TLIVE2001684, TLIVE2002046, TRACH2024408, TRACH3003683, UTERU2021820, UTERU2032279, UTERU2033577, UTERU3000738

[0530] In particular, hit data of the following 338 clones for Swiss-Prot, or GenBank, UniGene, nr, or RefSeq corresponded to genes or proteins which had been deposited in the Online Mendelian Inheritance in Man (OMIM), which is the human gene and disease database (the OMIM Number is shown in the parenthesis after the Clone Name).

3NB692002806 (261630), ADIPS2000088 (147120), BLADE2005036 (114850), BRACE2005457 (274600; 603545; 600791), BRACE2008594 (601959), BRACE2014306 (193002), BRACE2016981 (602701), BRACE2018762 (604800), BRACE2035381 (606088), BRACE2038551 (601961),

[0531] BRACE2039249 (602273), BRACE2045300 (601442), BRACE3000840 (600355), BRACE3001002 (300236), BRACE3001391 (601313; 173900), BRACE3001754 (185641), BRACE3002508 (606417), BRACE3003595 (602941), BRACE3004058 (250800), BRACE3004150 (601035), BRACE3004772 (603143), BRACE3008137 (602187), BRACE3008384 (603264), BRACE3009708 (182340), BRACE3010397 (602187), BRACE3011271 (602187), BRACE3011421 (602187), BRACE3014807 (605784), BRACE3015027 (602187), BRACE3015521 (605888), BRACE3018963 (605744), BRACE3020594 (400023), BRACE3027326 (602187), BRALZ2017359 (604331), BRAMY2005052 (602621), BRAMY2038904 (605671), BRAMY2047751 (602512), BRAMY3000213 (605448), BRAMY3005091 (600286), BRAMY3007609 (300315), BRAMY4000095 (602187), BRAMY4000229 (602159), BRAMY4000277 (602187), BRAWH2001395 (159430), BRAWH2002560 (602865), BRAWH2010000 (602581), BRAWH2010536 (604010), BRAWH2014414 (603006), BRAWH3000100 (601403), BRAWH3000491 (602187), BRAWH3001326 (602187), BRAWH3002574 (602187), BRAWH3005912 (602187), BRAWH3008341 (602187), BRCAN2002562 (602187), BRCAN2002856 (602712), BRCAN2002948 (603534), BRCAN2003746 (311870), BRCAN2006063 (603196; 601369), BRCAN2009203 (603143), BRCAN2014602 (601441), BRCAN2016619 (602187), BRCAN2017442 (604455), BRCAN2024451 (602513), BRCOC2001505 (159430), BRCOC2003213 (602187), BRHIP2000819 (605000), BRHIP2001805 (603219), BRHIP2009414 (602187), BRHIP2024165 (604402), BRHIP2026288 (602187), BRHIP3000339 (159430), BRHIP3008405 (602187), BRHIP3009448 (602187), BRHIP3027137 (600249), BRHIP3027854 (601060), BRSSN2000684 (603505), BRSSN2004719 (600560), BRSSN2014424 (606105), BRSTN2001613 (164020), BRSTN2004987 (604733), BRSTN2008418 (602187), BRTHA2002608 (600463), BRTHA2003110 (602187), BRTHA2007122 (106410), BRTHA2007603 (605846), BRTHA2008527 (152790; 176410), BRTHA2012980 (300119), BRTHA2014792 (601674), BRTHA3001721 (604902),

[0532] BRTHA3002427 (602187), BRTHA3003074 (605367), BRTHA3003449 (160745), BRTHA3008778 (602187), BRTHA3009037 (602187), BRTHA3009090 (603197), BRTHA3015815 (600902), BRTHA3016917 (604137), BRTHA3017848 (603377; 212140), COLON2000568 (147000), COLON2002520 (602187), CTONG1000341 (188040), CTONG2000042 (103950), CTONG2009423 (182137), CTONG2010803 (602189), CTONG2023021 (602498), CTONG2025496 (103950), CTONG2025516 (601679), CTONG3000084 (600888), CTONG3002412 (601403), CTONG3008639 (601797), D3OST2002182 (603590), D3OST2002648 (603071), DFNES2001108 (603560), FCBBF3009888 (602470), FEBRA2007708 (126650; 214700), FEBRA2008468 (278000), HCASM2001301 (602399), HCASM2007737 (601504), HCHON2001712 (109190),

[0533] HCHON2002676 (252800), HCHON2003532 (172490), HCHON2004007 (605866), HCHON2004531 (602187), HCHON2008112 (605837), HCHON2008444 (602187), HEART1000010 (602187), HEART1000139 (191045; 115195), HEART2001680 (146900), HEART2010495 (157132), HLUNG2002465 (605216), HSYRA2005496 (131195; 187300), IMR322000127 (604077), IMR322001380 (605652), IMR322006495 (605607), KIDNE2012945 (600270), NOVAR2001108 (147120), NT2NE2003252 (602913), NT2NE2006531 (602277), NT2NE2006909 (602187),

[0534] NT2RI2006686 (602700), NT2RI2025909 (212138), NT2RI3001515 (300362), NT2RI3006171 (114890), NT2RI3006340 (602187), NT2RI3006673 (602187), NT2RI3007757 (605396), NT2RI3008652 (602654), NT2RP7000359 (603271), NT2RP7005118 (603379), NT2RP7005529 (600888), NT2RP7010599 (603684), NTONG2000413 (602262), OCBBF2006058 (604773), OCBBF2020801 (602187), OCBBF2021788 (602597), OCBBF2031167 (603709), OCBBF2033869 (600270), OCBBF2036743 (604075), OCBBF2037068 (602187), OCBBF2037340 (602187), OCBBF3003320 (605868), PEBLM2000170 (602187), PEBLM2002887 (602187), PERIC2003720 (600381), PERIC2007914 (400009), PERIC2008385 (604455), PERIC2009086 (600134; 605158), PLACE5000282 (130160), PLACE6019385 (602448), PROST1000184 (192321), PROST2003428 (602187), PROST2016462 (602187), PROST2017367 (600585), PROST2018090 (312610), PROST2018511 (602187), PUAEN2002489 (604658), PUAEN2009795 (601456), SKNMC2007504 (602187), SMINT2010076 (146900), SPLEN2002467 (605652), SPLEN2006122 (604739), SPLEN2011422 (114213), SPLEN2012624 (602187), SPLEN2021701 (142800), SPLEN2031547 (602187), SPLEN2033098 (602746), SPLEN2036326 (602101), SPLEN2036821 (212138), SPLEN2036932 (605577), SYNOV2005817 (123889), SYNOV2012326 (604336), SYNOV2014400 (135820), SYNOV2021320 (602104), SYNOV3000231 (147100), SYNOV3000302 (147100), SYNOV4002883 (602187), SYNOV4004741 (602187), SYNOV4007360 (602187), SYNOV4007521 (605830), SYNOV4007553 (603028), SYNOV4007671 (602187), SYNOV4008440 (602187), TBAES2001229 (602187), TBAES2001258 (142440), TESOP2004114 (601865), TESOP2005485 (147170), TESOP2009121 (117143), TESTI1000257 (138170), TESTI1000319 (602187), TESTI2000644 (60-1392), TESTI2002618 (601533), TESTI2005610 (601040), TESTI2024567 (601116), TESTI2026505 (305400), TESTI2050987 (605968), TESTI2051867 (180479), TESTI2053399 (605819), TESTI2053621 (600364; 602093), TESTI4000014 (602187), TESTI4000079 (603560), TESTI4000288 (602187), TESTI4000349 (604506), TESTI4000724 (603878), TESTI4001148 (602187), TESTI4001176 (601430), TESTI4001527 (602187), TESTI4001561 (602187), TESTI4002491 (602187), TESTI4006420 (605612), TESTI4006819 (602187), TESTI4007163 (602187), TESTI4007778 (602187), TESTI4007810 (600940), TESTI4008050 (602187), TESTI4008429 (602187), TESTI4009160 (602187), TESTI4009457 (606185), TESTI4009881 (602187), TESTI4010851 (602187), TESTI4011745 (602187), TESTI4011956 (602187), TESTI4012406 (602187), TESTI4012448 (185261), TESTI4012505 (602143), TESTI4012679 (601933), TESTI4013369 (602187), TESTI4013924 (602187), TESTI4014175 (602187), TESTI4016110 (602187), TESTI4016822 (601792), TESTI4016925 (602187), TESTI4017901 (104221), TESTI4018835 (602187), TESTI4018881 (605070), TESTI4018886 (602187), TESTI4020092 (156225), TESTI4021478 (605868), TESTI4022873 (602187), TESTI4023546 (602187), TESTI4026524 (603277), TESTI4027557 (602187), TESTI4028059 (232800; 171850), TESTI4028429 (602187), TESTI4028880 (138170), TESTI4030069 (604603), TESTI4034632 (606251), TESTI4034912 (602187), TESTI4035063 (602187), TESTI4035498 (602187), TESTI4036909 (602187), TESTI4037156 (606026), TESTI4040363 (185641), THYMU1000496 (603060), THYMU2005303 (186910), THYMU2008725 (176882), THYMU2019210 (142830), THYMU2027497 (182139), THYMU2027695 (147100), THYMU2027734 (145505), THYMU2031046 (604207), THYMU2033104 (605349), THYMU2035319 (604739), THYMU2037233 (605121), THYMU2041015 (602187), THYMU3001083 (602187), THYMU3001234 (602187), THYMU3001379 (602187), THYMU3003309 (300359), THYMU3004835 (602187), THYMU3006118 (603708), THYMU3007137 (602187), THYMU3008436 (602187), TKIDN2000701 (600465), TKIDN2006852 (603602), TLIVE2001327 (601403), TRACH2001549 (603197), TRACH2007059 (602187), TRACH2022425 (146900), TRACH2022649 (147100), TRACH3000558 (600140), TRACH3002168 (155735), TRACH3004721 (602187), TRACH3004786 (602187), TRACH3005549 (602187), TRACH3007479 (602308), TRACH3008629 (600976), TRACH3009455 (171833), TRACH3035526 (147000), TSTOM2000442 (147100), TUTER2000904 (602187), UTERU1000337 (602187), UTERU2005621 (603505), UTERU2007724 (602373), UTERU2017762 (601053), UTERU2019491 (603762), UTERU2019706 (600114), UTERU2025025 (191315; 164970; 256000), UTERU2026090 (605497), UTERU2027591 (600150),

[0535] UTERU2035328 (605409), UTERU3000645 (602909), UTERU3000828 (602187), UTERU3000899 (603062), UTERU3001240 (602187), UTERU3001572 (602187), UTERU3001585 (602187), UTERU3001652 (602715), UTERU3003116 (602187), UTERU3003135 (602187), UTERU3005907 (190196), UTERU3007640 (603215), UTERU3008671 (182120), UTERU3009490 (604585), UTERU3009690 (104221), UTERU3009979 (600441), UTERU3015500 (606667), UTERU3016789 (602104)

[0536] Additionally, hit data of the following 84 clones for Swiss-Prot, or nr or RefSeq corresponded to genes or proteins which had been deposited in the Online Mendelian Inheritance in Man (OMIM), which is the human gene and disease database (the OMIM Number is shown in the parenthesis after the Clone Name).

[0537] BRACE3001113 (603971), BRACE3010076 (142695), BRAMY2039341 (604077), BRAMY3004800 (602187), BRAWH3009017 (602187), BRCAN2002473 (602187), BRCAN2002854 (602895), BRCAN2003070 (605574), BRHIP2005271 (600267), BRHIP2017553 (602187), BRHIP2026877 (600341), BRHIP3000240 (601142), BRHIP3008314 (604480), BRHIP3026052 (601645), BRSTN2013354 (602187), BRTHA2016318 (605442), BRTHA2017972 (602932), BRTHA3003000 (605276), CERVX2002013 (602903), CTONG1000113 (602277), CTONG2008721 (605317), CTONG2020411 (601930), CTONG3004550 (605611), FCBBF1000509 (601933), FEBRA2008692 (604034), HCASM2008536 (194360), HCHON2004858 (602187), HEART2009680 (601970), HLUNG2015548 (146690), HSYRA2005628 (602187), IMR322008651 (179617), IMR322013396 (600053), MESAN2001770 (600495), NT2RI2009583 (605949), NT2RI3007443 (602448), OCBBF2003327 (605008), OCBBF2009583 (602277), OCBBF2011669 (602187), OCBBF2024284 (176981), OCBBF2032274 (603975), OCBBF3000167 (194558), OCBBF3002654 (601893), PLACE7000502 (164951), PROST2000452 (602060), PROST2009320 (605903), SPLEN2004611 (602228), STOMA2003158 (602244), SYNOV1000256 (606021), SYNOV4002744 (602187), SYNOV4003981 (604283), TBAES2000932 (606212), TESOP2000390 (602187), TESOP2001796 (602187), TESOP2005199 (194531), TESTI2015626 (601249), TESTI2025924 (600863), TESTI2026647 (601235), TESTI2039060 (154360), TESTI4000183 (601276), TESTI4006473 (602187), TESTI4011070 (602187), TESTI4017714 (602187), TESTI4019657 (602052), TESTI4021482 (164730), TESTI4024387 (602187), TESTI4025494 (602187), TESTI4025547 (605308), TESTI4028938 (603899), TESTI4031745 (602448), TESTI4032112 (603246), THYMU2004284 (314370), THYMU2028739 (604191), THYMU2031139 (605009), THYMU2031249 (311550), THYMU2035710 (601890), THYMU3000269 (600857), TLIVE2001684 (120700), TLIVE2002046 (125270), TRACH2024408 (106410), TRACH3003683 (150205), UTERU2021820 (126141), UTERU2032279 (600942), UTERU2033577 (603397), UTERU3000738 (602187)

[0538] The clones predicted to belong to the category of enzyme and/or metabolism-related protein are the following 171 clones.

[0539] 3NB692002806, ASTRO2002842, BLADE2005036, BRACE2008594, BRACE2030341, BRACE2035381, BRACE2038551, BRACE2039249, BRACE2041200, BRACE2045772, BRACE3004058, BRACE3009708, BRACE3011421, BRACE3016884, BRACE3024073, BRACE3025630, BRAMY2033267, BRAMY2039872, BRAMY3002803, BRAMY3004919, BRAMY3005091, BRAMY3005932, BRAMY4000095, BRAWH3002574, BRAWH3008341, BRCAN2003703, BRCAN2003746, BRCAN2009432, BRCAN2014602, BRCAN2017442, BRCAN2028355, BRCOC2003213, BRHIP2024165, BRHIP3008405, BRHIP3027137, BRHIP3027854, BRSTN2000872, BRSTN2004863, BRSTN2004987, BRSTN2008418, BRTHA2002608, BRTHA2009311, BRTHA2015406, BRTHA2016496, BRTHA3008778, BRTHA3009090, BRTHA3015815, BRTHA3016917, CTONG2004062, CTONG2006798, CTONG2013178, CTONG2028124, CTONG3009028, D3OST2002182, DFNES2001108, DFNES2005266, FCBBF3013307, FCBBF3023895, FEBRA2008468, FEBRA2026984, HCASM2001301, HCHON2002676, HCHON2003532, HCHON2004007, HEART2006131, HEART2010492, HHDPC1000118, HLUNG2011298, HLUNG2013204, HSYRA2008714, KIDNE2001361, KIDNE2006580, NT2NE2003252, NT2NE2006909, NT2RI2004618, NT2RI2025909, NT2RI3006673, NT2RI3007978, NT2RI3008974, NT2RP7000359, NT2RP7004027, NT2RP7010599, NT2RP7014005, NTONG2000413, NTONG2008672, OCBBF2006005, OCBBF2006058, OCBBF2006151, OCBBF2019823, OCBBF2025527, OCBBF2030354, OCBBF2031167, OCBBF3003320, PEBLM2005183, PERIC2000889, PERIC2008385, PLACE6019385, PLACE7008431, PROST2017367, PUAEN2007044, PUAEN2009655, PUAEN2009852, SKNMC2006998, SKNMC2007504, SMINT1000192, SPLEN2010912, SYNOV2012326, SYNOV4002883, TBAES2001258, TESOP2000801, TESOP2004114, TESTI2005610, TESTI2005739, TESTI2016046, TESTI4000079, TESTI4000209, TESTI4000288, TESTI4000349, TESTI4001176, TESTI4001527, TESTI4001561, TESTI4002552, TESTI4006148, TESTI4006819, TESTI4007810, TESTI4008429, TESTI4010851, TESTI4012406, TESTI4012448, TESTI4013369, TESTI4013817, TESTI4014175, TESTI4016822, TESTI4018152, TESTI4018835, TESTI4019566, TESTI4021478, TESTI4022716, TESTI4023546, TESTI4026510, TESTI4026524, TESTI4028059, TESTI4029836, TESTI4034632, TESTI4036909, TESTI4046819, THYMU2008725, THYMU2027734, THYMU2031046, THYMU2031258, THYMU3001234, THYMU3003212, THYMU3004157, THYMU3004835, THYMU3006118, THYMU3008436, TKIDN2006852, TLIVE2002336, TRACH2001549, TRACH2009310, TRACH3007479, TRACH3036193, UTERU1000337, UTERU2019491, UTERU2025025, UTERU2026203, UTERU3000665, UTERU3001240, UTERU3001585, UTERU3003116, UTERU3005907

[0540] The following 59 clones are also predicted to belong to the category of enzyme and/or metabolism-related protein.

[0541] BRACE2039823, BRACE3010076, BRAMY2038516, BRAWH1000369, BRCAN2003070, BRHIP2005271, BRHIP2012360, BRHIP2026877, BRHIP3008314, BRTHA2013610, BRTHA2017364, BRTHA2017972, BRTHA2018011, BRTHA2018443, BRTHA3003000, CTONG2016942, FCBBF1000509, FEBRA2008692, HCASM2003099, HLUNG2015548, MESAN2005303, NT2RI3000174, NT2RI3007443, NT2RP7008435, NTONG2008093, OCBBF2003327, OCBBF2034637, OCBBF3002654, PROST2000452, SPLEN2039311, SPLEN2039379, STOMA2003158, TESOP2000390, TESTI2015626, TESTI2025924, TESTI2026647, TESTI2032643, TESTI2036288, TESTI2039060, TESTI4006473, TESTI4011070, TESTI4014801, TESTI4017714, TESTI4019657, TESTI4021482, TESTI4031745, THYMU2004139, THYMU2004284, THYMU2031139, THYMU2031249, THYMU2040925, THYMU3000269, TLIVE2002046, TLIVE2007607, TRACH2024559, TRACH3003683, TRACH3007866, UTERU2021820, UTERU3000738

[0542] The clones predicted to belong to the category of cell division and/or cell proliferation-related protein are the following 42 clones.

[0543] BLADE2002782, BRACE2042550, BRACE2043248, BRACE3000840, BRALZ2017359, BRAMY2038484, BRAMY2046989, BRAWH2010536, BRAWH2014954, BRAWH3000100, BRHIP2000819, BRHIP2001927, BRHIP2009414, BRSSN2000684, CTONG3002412, CTONG3008258, CTONG3008639, FCBBF3002163, HCASM2001301, IMR322006495, NT2RI2006686, OCBBF2021020, OCBBF2037068, OCBBF3004314, PLACE5000282, PLACE6019385, PLACE7002641, PUAEN2006328, SPLEN2033098, TESOP2009121, TESTI1000545, TESTI2003573, TESTI2005610, TESTI4007810, TESTI4017901, THYMU2034374, THYMU2039315, TLIVE2001327, TRACH2025507, UTERU2005621, UTERU3009690, UTERU3009979

[0544] The following ten clones are also predicted to belong to the category of cell division and/or cell proliferation-related protein.

BRCAN2003070, BRTHA3003000, NT2RI3007443, PLACE7000502, SPLEN2004611, STOMA2003158, SYNOV4003981, TESTI4031745, THYMU2004139, THYMU2035078

[0545] The clones predicted to belong to the category of cytoskeleton-related protein are the following 55 clones.

[0546] ASTRO1000009, BLADE2004089, BRACE2026836, BRACE2045300, BRACE3006872, BRAMY3008466, BRAWH2001395, BRAWH2005315, BRAWH3002600, BRCOC2001505, BRHIP2000819, BRHIP3000339, BRHIP3008405, BRTHA2007122, BRTHA3003449, COLON2002520, CORDB2000541, FCBBF3021940, HCHON2001577, HEART1000139, HEART2010495, NT2RI3006340, NT2RP7000359, NTONG2005277, OCBBF2007068, OCBBF3003592, PERIC2000889, PLACE5000282, PROST1000559, SKMUS2006394, SPLEN2011422, SPLEN2015679, TESTI2049857, TESTI4000288, TESTI4001148, TESTI4007778, TESTI4009160, TESTI4009881, TESTI4011956, TESTI4013924, TESTI4016925, TESTI4018886, TESTI4022873, TESTI4034912, TESTI4035063, TESTI4037727, THYMU1000496, THYMU2035735, THYMU3001083, THYMU3001234, TKIDN2000701, UTERU2007724, UTERU2008347, UTERU2035745, UTERU3003178

[0547] The following six clones are also predicted to belong to the category of cytoskeleton-related protein.

HLUNG2015418, SPLEN2030847, SPLEN2036702, TESTI4025268, TESTI4026207, TRACH2024408

[0548] The clones predicted to belong to the category of nuclear protein and/or RNA synthesis-related protein are the following 42 clones.

[0549] BLADE2007958, BRACE2010489, BRACE2045300, BRACE3004150, BRACE3005430, BRACE3011421, BRAMY2046989, BRAMY3005932, BRCAN2002562, BRHIP2021615, BRSTN2001613, BRSTN2004987, COLON2000470, CTONG3009028, FCBBF3013307, HCHON2004531, IMR322006495, OCBBF2020801, PEBLM2005183, PUAEN2007044, SKNMC1000124, SMINT1000192, SPLEN2006122, SPLEN2010912, TESOP2009121, TESTI4009374, TESTI4009457, TESTI4013830, TESTI4019566, TESTI4022716, THYMU2033104, THYMU2035319, THYMU2038301, THYMU2040975, THYMU3001379, TRACH3004721, TRACH3036609, UTERU2026025, UTERU3000828, UTERU3001572, UTERU3003135, UTERU3004992

[0550] The following 16 clones are also predicted to belong to the category of nuclear protein and/or RNA synthesis-related protein.

BRACE3010076, BRCAN2002854, BRHIP2006617, BRHIP2012360, BRHIP3026052, BRSTN2013354, BRTHA2017364, HCASM2003099, HCASM2008536, IMR322008651, NT2RI3000174, STOMA2003158, TESTI2026647, TESTI4006473, TESTI4021482, THYMU2035078

[0551] The clones predicted to belong to the category of protein synthesis and/or transport-related protein are the following 57 clones.

[0552] ASTRO2002842, BLADE2005036, BRACE3025630, BRAMY2033003, BRAMY3007609, BRAWH3000491, BRAWH3002574, BRAWH3008341, BRCAN2002856, BRCAN2002948, BRCOC2003213, BRSTN2004987, BRTHA2016496, BRTHA3013884, BRTHA3016917, CTONG2000042, CTONG2013178, CTONG2023512, CTONG2024749, CTONG2025496, CTONG3001370, DFNES2005266, FEBRA2026984, HCASM2007737, HCHON2008444, HEART1000010, KIDNE2000846, NT2NE2006909, NT2RI2011422, NT2RP7004027, NTONG2000413, OCBBF2031167, TBAES2001229, TBAES2001258, TESTI1000319, TESTI2005610, TESTI2051867, TESTI4000209, TESTI4000349, TESTI4001106, TESTI4002491, TESTI4008050, TESTI4010851, TESTI4012406, TESTI4012448, TESTI4013924, TESTI4028429, TESTI4034912, THYMU2009157, TLIVE2008229, TRACH3007479, TRACH3008713, TRACH3036193, UTERU2019940, UTERU3001988, UTERU3003116, UTERU3007419

[0553] The following 15 clones are also predicted to belong to the category of protein synthesis and/or transport-related protein.

BRTHA2007060, BRTHA2018011, CTONG2016942, MESAN2001770, MESAN2005303, NT2RP7008435, OCBBF2003327, PROST2000452, TESOP2001796, TESTI4017714, THYMU2004284, THYMU2031139, TRACH2024559, TRACH3007866, UTERU2021820

[0554] The clones predicted to belong to the category of cellular defense-related protein are the following three clones.

BRACE3005430, HCHON2004531, TESTI4007810

[0555] The following four clones are also predicted to belong to the category of cellular defense-related protein.

BRHIP2012360, FCBBF3027854, HCASM2008536, UTERU2032279

[0556] The clones predicted to belong to the category of development and/or differentiation-related protein are the following nine clones.

BRACE3009747, BRTHA2005579, BRTHA3003343, IMR322000917, PEBLM2000170, TESOP2001122, TESOP2001953, TESTI2040018, UTERU3006308

[0557] The following five clones are also predicted to belong to the category of development and/or differentiation-related protein.

BRALZ2017844, CTONG2020378, HCHON2004858, OCBBF2019684, THYMU2006001

[0558] The clones predicted to belong to the category of DNA-binding and/or RNA-binding protein are the following 55 clones.

[0559] 3NB692002685, BLADE2007958, BRACE2030326, BRACE2045596, BRACE3001002, BRACE3004150, BRACE3009747, BRACE3045033, BRCAN2002562, BRHIP2021615, BRSSN2014299, BRSTN2001613, BRSTN2004987, BRTHA2014792, BRTHA3001721, BRTHA3003343, CTONG2025516, CTONG3008831, CTONG3009028, FCBBF3013307, FEBRA2007544, FEBRA2007801, HEART1000074, IMR322000127, IMR322000917, NT2NE2006531, NT2RI3009158, OCBBF2020838, OCBBF2036743, PEBLM2002887, PEBLM2005183, SKNMC2007504, SMINT1000192, SPLEN2006122, TBAES2001229, TESTI2014716, TESTI2040018, TESTI2044796, TESTI4009.374, TESTI4012679, TESTI4014175, TESTI4017543, TESTI4026510, TESTI4026524, THYMU2006420, THYMU2035319, THYMU2037233, THYMU2040975, THYMU3004866, TLIVE2008229, TRACH3036609, TUTER2000425, UTERU2026025, UTERU2035328, UTERU3009490

[0560] The following 74 clones are also predicted to belong to the category of DNA-binding and/or RNA-binding protein.

[0561] BRACE2003609, BRACE3001058, BRACE3001113, BRACE3010076, BRALZ2017844, BRAMY2035070, BRAMY2035449, BRAMY2035718, BRAMY2039341, BRAWH1000369, BRAWH2006207, BRCAN2002854, BRHIP2012360, BRHIP2017553, BRSTN2013354, BRTHA2017364, CERVX2002013, CTONG1000113, CTONG2008721, CTONG2020378, CTONG2020411, CTONG2028758, CTONG3004726, DFNES2011192, FEBRA2014122, FEBRA2027609, HCASM2003018, HCASM2009424, HCHON2004858, HSYRA2005628, IMR322008651, MESAN2001770, MESAN2005303, MESAN2014412, MESAN2015501, NT2RI2008952, NT2RI2018448, NT2RI3000174, NT2RI3001132, OCBBF2008144, OCBBF2009583, OCBBF2011669, OCBBF2019684, OCBBF2032274, OCBBF3000167, SPLEN2004611, SPLEN2016135, SPLEN2016781, SYNOV2021953, SYNOV4002744, TESOP2005199, TESOP2006398, TESOP2006865, TESTI2026647, TESTI2034251, TESTI4000183, TESTI4000214, TESTI4006473, TESTI4008302, TESTI4015442, TESTI4025494, TESTI4025547, TESTI4028938, TESTI4032112, THYMU2006001, THYMU2035078, TRACH2007483, TRACH3000134, TRACH3002561, TRACH3003832, TUTER2000057, UTERU2033577, UTERU3001053, TESTI4038779

[0562] The clones predicted to belong to the category of ATP binding and/or GTP-binding protein are the following 68 clones.

[0563] BNGH42007788, BRACE2008594, BRACE2047377, BRACE3005430, BRACE3008720, BRACE3009708, BRACE3015521, BRACE3024073, BRAMY4000095, BRCAN2009432, BRCOC2003213, BRHIP3008405, BRSTN2013741, BRTHA3003449, BRTHA3015815, BRTHA3016917, COLON2002520, FEBRA2026984, HCASM2001301, HCHON2004007, HSYRA2008714, KIDNE2001361, KIDNE2001847, NESOP2001694, NT2RI2005166, NT2RP7013795, OCBBF3003320, OCBBF3003592, PEBLM2002594, PERIC2000889, PLACE6019385, SMINT1000192, SPLEN2037194, TESOP2000801, TESTI2006648, TESTI4000288, TESTI4001148, TESTI4001176, TESTI4002552, TESTI4007810, TESTI4008429, TESTI4009160, TESTI4009881, TESTI4011956, TESTI4013817, TESTI4014175, TESTI4016925, TESTI4018208, TESTI4018835, TESTI4019566, TESTI4021478, TESTI4022873, TESTI4026524, TESTI4029836, TESTI4035498, TESTI4036909, TESTI4037727, THYMU1000496, THYMU2033079, THYMU3001083, THYMU3001234, THYMU3001379, TRACH2009310, UTERU2019706, UTERU2025025, UTERU2035745, UTERU3000665, UTERU3000828

[0564] The following 24 clones are also predicted to belong to the category of ATP binding and/or GTP-binding protein.

[0565] BRHIP2026877, BRTHA2017364, BRTHA2018443, IMR322008651, IMR322013731, NT2RI3007443, NTONG2008093, OCBBF3002654, TESOP2000390, TESOP2007384, TESTI2025924, TESTI2026647, TESTI2049956, TESTI4005317, TESTI4006473, TESTI4021482, TESTI4026207, TESTI4031745, THYMU2004139, THYMU2031249, TRACH2000862, TRACH2024559, TRACH3000420, UTERU3000738

[0566] The 119 clones shown below are clones which were unassignable to any of the above-mentioned categories, but have been predicted to have some functions based on homology search using their full-length nucleotide sequences. Clone Name and Definition in the result of homology search, demarcated by a double slash mark (//), are shown below.

ADRGL2009691//Mus musculus D11lgp1 mRNA, complete cds.

ADRGL2009755//Homo sapiens brain and reproductive organ-expressed protein (BRE) mRNA, complete cds.

ASTRO3000177//Drosophila melanogaster BcDNA.GH03694 (BcDNA.GH03694) mRNA, complete cds.

BLADE2008398//Homo sapiens LRR FLI-I interacting protein 2 (LRRFIP2) mRNA, complete cds.

BRACE2006319//Homo sapiens mRNA for Fln29, complete cds.

BRACE2027258//Homo sapiens E2a-Pbx1-associated protein (EB-1) mRNA, partial cds.

BRACE2038329//Rattus norvegicus CBL-B (Cbl-b) mRNA, partial cds.

BRACE2046251//Homo sapiens hucep-10 mRNA for cerebral protein-10, complete cds.

BRACE3003192//latent transforming growth factor beta binding protein 3 [Homo sapiens]

BRACE3007625//espin [Rattus norvegicus]

BRACE3009297//mdgl-1 [Mus musculus]

BRACE3015262//espin [Mus musculus]

BRACE3025457//testis-specific protein TSP-NY [Homo sapiens]

BRALZ2016498//Homo sapiens FKSG76 (FKSG76) mRNA, complete cds.

BRAMY2030109//Homo sapiens hucep-4 mRNA for cerebral protein-4, complete cds.

BRAMY2031317//Mus musculus semaphorin cytoplasmic domain-associated protein 3A (Semcap3) mRNA, complete cds.

BRAMY2047746//nasopharyngeal carcinoma susceptibility protein [Homo sapiens]

BRAMY3001794//Rattus norvegicus Circadian Oscillatory Protein (SCOP) (Scop)

BRAWH2001940//H. sapiens gene from PAC 1026E2, partial.

BRAWH2012162//KE03 protein [Homo sapiens]

BRAWH2016724//MAP2=HMW−MAP2 {alternatively spliced} [rats, brain, mRNA Partial, 267 nt].

BRAWH3002821//synaptotagmin-like 2 [Mus musculus]

BRCAN2002944//Mus musculus huntington yeast partner C (Hypc) mRNA, complete cds.

BRCAN2013660//Arabidopsis thaliana putative protein (F4F15.330) mRNA, complete cds.

BRHIP2002122//Homo sapiens B aggressive lymphoma long isoform (BAL) mRNA, complete cds.

BRHIP2003786//CCA3 [Rattus norvegicus]

BRHIP2004359//ELAC PROTEIN.

BRHIP2007616//plexin 2

BRHIP2029393//COBW-like protein [Homo sapiens]

BRHIP3008313//testis specific ankyrin-like protein 1 [Homo sapiens]

BRSSN2013874//TEMO [Rattus norvegicus]

BRSTN2017771//Homo sapiens putative BTK-binding protein mRNA, complete cds.

BRTHA2012392//Homo sapiens HCDI (HCDI) mRNA, complete cds.

BRTHA3002933//uroplakin 3 [Homo sapiens]

BRTHA3008310//Mus musculus mRNA for iroquois homeobox protein 6 (Irx6 gene).

BRTHA3008520//sporulation-induced transcript 4-associated protein; hypothetical protein FLJ11058 [Homo sapiens]

COLON2001721//GLUT4 vesicle protein [Mus musculus]

CTONG1000467//Mus musculus mRNA for Deltex3, complete cds.

CTONG2020026//Drosophila melanogaster BcDNA.GH09358 (BcDNA.GH09358) mRNA, complete cds.

CTONG3001123//Mus musculus Pax transcription activation domain interacting protein PTIP mRNA, complete cds.

CTONG3002127//granuphilin [Mus musculus]

CTONG3004072//GL002 protein [Homo sapiens]

CTONG3006186//syntaxin binding protein 4 [Mus musculus]

CTONG3008894//Mus musculus SH3-domain binding protein 5

FCBBF1000297//Human protein immuno-reactive with anti-PTH polyclonal antibodies mRNA, partial cds.

HCHON2000028//Homo sapiens 7h3 protein mRNA, partial cds.

HCHON2000626//X-linked protein STS1769.

HCHON2001217//Homo sapiens cullin CUL4B (CUL4B) mRNA, complete cds.

HEART2006909//Hemolysin C.

HLUNG2011041//basic proline-rich peptide IB-8a—human (fragments)

HLUNG2014288//Mus musculus RP42 mRNA, complete cds.

IMR322006886//Homo sapiens hepatocellular carcinoma-associated antigen 127 (HCA127) mRNA, complete cds.

KIDNE2002252//Drosophila melanogaster BcDNA.GH09358 (BcDNA.GH09358) mRNA, complete cds.

KIDNE2011532//similar to melanoma-associated chondroitin sulfate proteoglycan 4

NT2RI2012990//76.5 KDA PROTEIN C21ORF13.

NT2RI2025957//LU1 protein [Homo sapiens]

NT2RI3006284//Homo sapiens chorea-acanthocytosis (CHAC) mRNA, complete cds.

NT2RI3008697//erythroblast macrophage protein [Mus musculus]

NT2RP8000296//similar to Kelch proteins

NTONG2007517//RING CANAL PROTEIN (KELCH PROTEIN).

OCBBF2002124//p40 [Homo sapiens]

OCBBF2007610//PSD-95/SAP90-associated protein-4 [Rattus norvegicus].

OCBBF2021323//Mus musculus GTRGEO22 (Gtrgeo22) mRNA, complete cds.

OCBBF2028173//JM11 protein [Homo sapiens]

PEBLM2001465//diphthamide biosynthesis; Dph5p [Saccharomyces cerevisiae]

PERIC2004028//Mus musculus erythroblast macrophage protein EMP mRNA, complete cds.

PLACE7006051//cytoplasmic dynein heavy chain 2 [Rattus norvegicus]

PROST2008993//Mus musculus Pax transcription activation domain interacting protein PTIP mRNA, complete cds.

PUAEN2003079//nasopharyngeal carcinoma susceptibility protein [Homo sapiens]

SPLEN2002147//Halocynthia roretzi mRNA for HrPET-3, complete cds.

SPLEN2032154//NDRG1 PROTEIN (DIFFERENTIATION-RELATED GENE 1 PROTEIN) (DRG1) (REDUCING AGENTS AND TUNICAMYCIN-RESPONSIVE PROTEIN) (RTP) (NICKEL-SPECIFIC INDUCTION PROTEIN CAP43).

SYNOV2005216//Homo sapiens laryngeal carcinoma related protein 1 mRNA, complete cds.

SYNOV2007965//Homo sapiens mRNA for H-1(3)mbt-like protein, alternative variant a.

SYNOV4000706//B cell phosphoinositide 3-kinase adaptor [Mus musculus]

TBAES2004055//NY-REN-50 antigen

TESOP2001605//Homo sapiens laryngeal carcinoma related protein 1 mRNA, complete cds.

TESOP2005285//Homo sapiens partial mRNA for chr2 synaptotagmin (CHR2SYT gene).

TESTI2004215//Maackia amurensis early nodulin (ENOD2) mRNA, partial cds.

TESTI2009477//TRICHOHYALIN.

TESTI2034520//Rattus norvegicus SMC (segregation of mitotic chromosomes 1)-like 1 (yeast) (Smc111), mRNA

TESTI2052693//brk kinase substrate [Homo sapiens].

TESTI4006079//MUF1 protein; likely ortholog of mouse MUF1; elongin BC-interacting leucine-rich repeat protein [Homo sapiens]

TESTI4006393//neural specific sr protein NSSR 2 [Mus musculus]

TESTI4006546//colon cancer antigen NY-CO-45 [Homo sapiens].

TESTI4006802//mesothelin; megakaryocyte potentiating factor [Mus musculus]

TESTI4008018//DAZ associated protein 2; KIAA0058 gene product [Homo sapiens]

TESTI4009286//Homo sapiens HOTTL protein mRNA, complete cds

TESTI4009563//testis specific ankyrin-like protein 1 [Homo sapiens]

TESTI4010831//yeast Sec31p homolog; ABP125 [Homo sapiens]

TESTI4011484//Sec23-interacting protein p125 [Homo sapiens]

TESTI4014818//AD-012 protein [Homo sapiens]

TESTI4014924//selective hybridizing clone [Mus musculus]

TESTI4019140//Mi-2 histone deacetylase complex protein 66 [Xenopus laevis]

TESTI4019843//Rattus norvegicus huntingtin-associated protein interacting protein (duo) (Hapip), mRNA.

TESTI4023762//Trichohyalin.

TESTI4025920//B29 protein [Homo sapiens]

TESTI4039659//DnaJ homolog subfamily B member 8 (mDJ6).

TESTI4044186//leucine-rich, glioma inactivated 1 [Mus musculus]

THYMU2011736//latent transforming growth factor beta binding protein 3

THYMU2032825//Mus musculus mRNA for Drctnnb1a, complete cds.

THYMU2038369//Mus musculus GTRGEO22 (Gtrgeo22) mRNA, complete cds.

THYMU3001991//ART-4 protein [Homo sapiens]

THYMU3006172//membrane bound C2 domain containing protein [Rattus norvegicus]

TLIVE2003225//CUB and Sushi multiple domains 1 [Homo sapiens]

TLIVE2004320//Homo sapiens PC2-glutamine-rich-associated protein (PCQAP) mRNA, complete cds.

TOVAR2002247//Homo sapiens partial partial mRNA for NICE-4 protein, clone 3114f17.

TRACH2023299//growth factor receptor bound protein 2-associated protein 2 [Mus musculus]

TRACH3000926//cardiac morphogenesis [Mus musculus]

TRACH3001427//p47 [Homo sapiens]

TRACH3006412//Homo sapiens COP9 constitutive photomorphogenic homolog subunit 7B

TRACH3034731//Ras association (RalGDS/AF-6) domain family 2

TUTER2002729//D6MM5E protein [Mus musculus]

UTERU1000031//G. gallus mRNA for tom-1B protein.

UTERU2006115//ALPHA-ADAPTIN A (CLATHRIN ASSEMBLY PROTEIN COMPLEX 2 ALPHA-A LARGE CHAIN) (100 KDA COATED VESICLE PROTEIN A). (PLASMA MEMBRANE ADAPTOR HA2/AP2 ADAPTIN ALPHA A SUBUNIT).

UTERU2031268//NY-REN-25 antigen [Homo sapiens].

UTERU2035452//NG3 [Homo sapiens]

UTERU3001059//ABC1 protein homolog, mitochondrial precursor.

UTERU3005585//rhophilin-like protein [Homo sapiens]

UTERU3009871//feminization 1 homolog a (C. elegans)

[0567] Similarly, the 14 clones shown below are clones which were unassignable to any of the above-mentioned categories, but have been predicted to have some functions based on homology search using their full-length nucleotide sequences. Clone Name and Definition in the result of homology search, demarcated by a double slash mark (//), are shown below.

ADRGL2000042//Homo sapiens CTCL tumor antigen se20-4 mRNA, complete cds.

BRACE3009127//oxysterol binding protein 2; oxysterol binding protein-like 1 [Homo sapiens]

BRACE3021148//DC12 protein [Homo sapiens]

BRAMY2040159//Homo sapiens MRIP-1 mRNA, complete cds.

BRAWH3007441//CAT56 protein [Homo sapiens]

CTONG3001501//Mus musculus glucocorticoid-induced gene 1 mRNA, complete cds.

HCHON2000508//Homo sapiens prostate antigen PARIS-1 mRNA, complete cds.

OCBBF2020048//95 kDa retinoblastoma protein binding protein; KIAA0661 gene product

PERIC2007068//Mus musculus mRNA for 1A13 protein.

TESTI4010382//cytoplasmic dynein heavy chain 2 [Rattus norvegicus]

TESTI4011072//tudor domain containing 1 [Mus musculus]

TESTI4046240//sirtuin 7

UTERU2019534//Golgi apparatus protein 1 [Homo sapiens]

UTERU2028734//Mus musculus slp2-a mRNA for synaptotagmin-like protein 2-a delta 2S-III, complete cds.

[0568] So far no information suggesting the function of the remaining 1,061 clones has been provided by the homology search. The functions of these clones may be clarified when an updated database becomes available in future. Clone names are shown below.

[0569] 3NB692008729, ADRGL2012038, ADRGL2012179, ASTRO2003960, ASTRO2018373, ASTRO3000172, ASTRO3000482, BLADE2001371, BLADE2001987, BLADE2003474, BLADE2005459, BLADE2007666, BLADE2008281, BRACE1000258, BRACE1000533, BRACE1000572, BRACE2003639, BRACE2011747, BRACE2014475, BRACE2014657, BRACE2015058, BRACE2015314, BRACE2024627, BRACE2027970, BRACE2028970, BRACE2029849, BRACE2031154, BRACE2031389, BRACE2032044, BRACE2032329, BRACE2032538, BRACE2032823, BRACE2033720, BRACE2035441, BRACE2036096, BRACE2036830, BRACE2036834, BRACE2037847, BRACE2038114, BRACE2039475, BRACE2039734, BRACE2040325, BRACE2041009, BRACE2041264, BRACE2043349, BRACE2044816, BRACE2044949, BRACE2045428, BRACE2045947, BRACE2045954, BRACE2047011, BRACE2047350, BRACE2047385, BRACE3000071, BRACE3000787, BRACE3000973, BRACE3001217, BRACE3001595, BRACE3002390, BRACE3003698, BRACE3004358, BRACE3004435, BRACE3004783, BRACE3004880, BRACE3005145, BRACE3005225, BRACE3005499, BRACE3006185, BRACE3006226, BRACE3007322, BRACE3007472, BRACE3007480, BRACE3007559, BRACE3007642, BRACE3007767, BRACE3008036, BRACE3008092, BRACE3008772, BRACE3009090, BRACE3009237, BRACE3009377, BRACE3009701, BRACE3009724, BRACE3010428, BRACE3012364, BRACE3012930, BRACE3013119, BRACE3013576, BRACE3013780, BRACE3014231, BRACE3014317, BRACE3015121, BRACE3015894, BRACE3018308, BRACE3019055, BRACE3020194, BRACE3022769, BRACE3023912, BRACE3024659, BRACE3025153, BRACE3026075, BRACE3027242, BRACE3027478, BRACE3030103, BRACE3032983, BRALZ2011796, BRALZ2012183, BRALZ2012848, BRALZ2014484, BRAMY2003008, BRAMY2019985, BRAMY2020058, BRAMY2020270, BRAMY2028914, BRAMY2029602, BRAMY2030098, BRAMY2030702, BRAMY2030703, BRAMY2030799, BRAMY2031377, BRAMY2031442, BRAMY2032014, BRAMY2032242, BRAMY2032317, BRAMY2034185, BRAMY2034920, BRAMY2034993, BRAMY2036387, BRAMY2036699, BRAMY2036913, BRAMY2037823, BRAMY2038100, BRAMY2038846, BRAMY2040478, BRAMY2041261, BRAMY2041378, BRAMY2042612, BRAMY2042641, BRAMY2042760, BRAMY2042918, BRAMY2044078, BRAMY2044246, BRAMY2046478, BRAMY2046742, BRAMY2047169, BRAMY2047676, BRAMY2047884, BRAMY3000206, BRAMY3001401, BRAMY3002620, BRAMY3002805, BRAMY3004672, BRAMY3004900, BRAMY3006297, BRAMY3008650, BRAMY3009811, BRAMY3010411, BRASW1000053, BRAWH2001671, BRAWH2001973, BRAWH2010084, BRAWH2012326, BRAWH2013294, BRAWH2013871, BRAWH2014645, BRAWH2014662, BRAWH2014876, BRAWH3000345, BRAWH3002819, BRAWH3003522, BRAWH3003801, BRAWH3005422, BRAWH3005981, BRAWH3006792, BRAWH3007726, BRAWH3007783, BRAWH3008697, BRAWH3008931, BRAWH3009297, BRCAN2003987, BRCAN2004355, BRCAN2005436, BRCAN2006290, BRCAN2006297, BRCAN2006450, BRCAN2007144, BRCAN2007409, BRCAN2007426, BRCAN2008528, BRCAN2011254, BRCAN2011602, BRCAN2014881, BRCAN2015371, BRCAN2015464, BRCAN2016433, BRCAN2017717, BRCAN2017905, BRCAN2018935, BRCAN2019387, BRCAN2020710, BRCAN2021028, BRCAN2024563, BRCAN2025712, BRCOC2000670, BRCOC2014033, BRCOC2016525, BRCOC2020142, BRHIP2000826, BRHIP2000920, BRHIP2001074, BRHIP2002346, BRHIP2003242, BRHIP2003917, BRHIP2004312, BRHIP2005354, BRHIP2005600, BRHIP2005719, BRHIP2005932, BRHIP2006800, BRHIP2007741, BRHIP2009340, BRHIP2009474, BRHIP2014228, BRHIP2022221, BRHIP2024146, BRHIP2026061, BRHIP2029176, BRHIP3001283, BRHIP3006683, BRHIP3008183, BRHIP3008344, BRHIP3008565, BRHIP3008997, BRHIP3009099, BRHIP3011241, BRHIP3013765, BRHIP3013897, BRHIP3016213, BRHIP3018797, BRHIP3020182, BRHIP3024533, BRHIP3024725, BRHIP3025702, BRSSN2006892, BRSSN2008797, BRSSN2011262, BRSSN2014556, BRSSN2018581, BRSTN2001067, BRSTN2002400, BRSTN2005721, BRSTN2006865, BRSTN2007284, BRSTN2008052, BRSTN2008283, BRSTN2008457, BRSTN2009899, BRSTN2010500, BRSTN2010750, BRSTN2012320, BRSTN2017084, BRSTN2017237, BRSTN2018083, BRSTN2019129, BRTHA1000311, BRTHA2000855, BRTHA2001462, BRTHA2002115, BRTHA2002442, BRTHA2003030, BRTHA2003116, BRTHA2004821, BRTHA2004978, BRTHA2005956, BRTHA2006146, BRTHA2006194, BRTHA2007422, BRTHA2008316, BRTHA2008335, BRTHA2008535, BRTHA2008955, BRTHA2009846, BRTHA2009972, BRTHA2010073, BRTHA2010608, BRTHA2010884, BRTHA2010907, BRTHA2011351, BRTHA2011500, BRTHA2011641, BRTHA2012562, BRTHA2013262, BRTHA2013707, BRTHA2014828, BRTHA2015478, BRTHA2016543, BRTHA2017353, BRTHA2018165, BRTHA2018591, BRTHA2018707, BRTHA2019014, BRTHA2019022, BRTHA2019048, BRTHA3000273, BRTHA3000297, BRTHA3002401, BRTHA3003490, BRTHA3004475, BRTHA3005046, BRTHA3006856, BRTHA3007113, BRTHA3007319, BRTHA3007769, BRTHA3008143, BRTHA3010366, BRTHA3015910, BRTHA3018514, BRTHA3018617, BRTHA3019105, CERVX1000042, COLON1000030, COLON2003043, COLON2006282, COLON2009499, CORDB1000140, CORDB2000061, CTONG1000087, CTONG1000088, CTONG1000288, CTONG1000540, CTONG2001877, CTONG2019248, CTONG2019704, CTONG2019833, CTONG2020806, CTONG2021132, CTONG2022153, CTONG2024206, CTONG2025900, CTONG3000657, CTONG3000686, CTONG3000896, CTONG3001420, CTONG3002674, CTONG3003652, CTONG3003654, CTONG3003905, CTONG3003972, CTONG3004712, CTONG3005325, CTONG3005713, CTONG3005813, CTONG3006067, CTONG3006650, CTONG3007444, CTONG3007528, CTONG3007586, CTONG3007870, DFNES2011239, DFNES2011499, ERLTF2000324, FCBBF3001977, FCBBF3004847, FCBBF3006171, FCBBF3007242, FCBBF3008944, FCBBF3012288, FCBBF3013846, FCBBF3023443, FCBBF3025730, FCBBF3027717, FEBRA2000253, FEBRA2006396, FEBRA2007793, FEBRA2008287, FEBRA2008360, FEBRA2010719, FEBRA2014213, FEBRA2015588, FEBRA2020484, FEBRA2020582, FEBRA2020886, FEBRA2021339, FEBRA2021571, FEBRA2021908, FEBRA2021966, FEBRA2024136, FEBRA2024150, FEBRA2024343, FEBRA2027297, FEBRA2027352, FEBRA2028366, FEBRA2028477, FEBRA2028618, HCASM2002918, HCASM2003415, HCHON2000244, HCHON2000418, HCHON2006714, HCHON2007881, HEART1000088, HEART2001756, HEART2007031, HEART2010391, HHDPC2001337, HLUNG1000017, HLUNG2001996, HLUNG2002958, HLUNG2003003, HLUNG2012049, HLUNG2012287, HLUNG2012727, HLUNG2013304, HLUNG2013622, HLUNG2013851, HLUNG2014262, HLUNG2014449, HLUNG2017546, HLUNG2017806, HLUNG2019058, HSYRA2004858, HSYRA2005456, HSYRA2007667, HSYRA2008376, HSYRA2009075, IMR322002035, IMR322003675, IMR322007225, IMR322016146, IMR322018117, KIDNE2000665, KIDNE2000722, KIDNE2002991, KIDNE2003837, KIDNE2005543, KIDNE2011314, LYMPB1000141, MESAN2006563, MESAN2014295, MESAN2015515, MESAN2018576, MESTC2000153, NB9N41000340, NCRRP1000129, NESOP2000744, NESOP2001656, NESOP2001752, NESOP2002738, NHNPC2000877, NHNPC2001816, NHNPC2002565, NHNPC2002749, NOVAR2000710, NOVAR2000962, NOVAR2001783, NT2NE2005890, NT2NE2008060, NT2RI2003993, NT2RI2011683, NT2RI2012659, NT2RI2013357, NT2RI2014247, NT2RI2014551, NT2RI2014733, NT2RI2016128, NT2RI2018311, NT2RI2018883, NT2RI2019751, NT2RI2023303, NT2RI2027081, NT2RI2027396, NT2RI3000622, NT2RI3002303, NT2RI3002842, NT2RI3002892, NT2RI3003031, NT2RI3003162, NT2RI3004381, NT2RI3004510, NT2RI3005202, NT2RI3005724, NT2RI3006132, NT2RI3006376, NT2RI3006796, NT2RI3007158, NT2RI3007291, NT2RI3008055, NT2RI3008162, NT2RP7004123, NT2RP7005846, NT2RP7009867, NT2RP7010128, NT2RP7011570, NT2RP7015512, NT2RP7017365, NT2RP7017474, NT2RP7017546, NT2RP8000137, NTONG2003852, NTONG2005969, NTONG2006354, NTONG2007249, NTONG2008088, OCBBF1000254, OCBBF2001794, OCBBF2003819, OCBBF2004883, OCBBF2005428, OCBBF2007478, OCBBF2008770, OCBBF2009788, OCBBF2010416, OCBBF2019327, OCBBF2020343, OCBBF2020453, OCBBF2020639, OCBBF2020741, OCBBF2021286, OCBBF2022574, OCBBF2023162, OCBBF2023643, OCBBF2024781, OCBBF2024850, OCBBF2025028, OCBBF2025730, OCBBF2026645, OCBBF2027423, OCBBF2027478, OCBBF2028935, OCBBF2029901, OCBBF2030708, OCBBF2031366, OCBBF2032599, OCBBF2032611, OCBBF2032671, OCBBF2035110, OCBBF2035214, OCBBF2035564, OCBBF2035885, OCBBF2035916, OCBBF2036476, OCBBF2037398, OCBBF2037638, OCBBF3000296, OCBBF3002553, OCBBF3002600, OCBBF3006802, OCBBF3007516, OCBBF3008230, OCBBF3009279, PEBLM2001488, PEBLM2002749, PEBLM2004497, PEBLM2004666, PEBLM2005697, PEBLM2007112, PEBLM2007140, PERIC1000147, PERIC2000914, PERIC2001228, PERIC2002766, PERIC2003090, PERIC2003699, PERIC2003834, PERIC2004259, PERIC2004379, PERIC2004429, PERIC2005370, PLACE5000001, PLACE6001185, PLACE6009006, PLACE7001936, PLACE7008623, PROST2015243, PROST2017413, PROST2017700, PROST2018030, PROST2019296, PROST2019781, PUAEN2002616, PUAEN2005930, PUAEN2007785, SKMUS2003074, SKMUS2004047, SKNMC2004457, SKNMC2004643, SKNMC2005772, SKNMC2007961, SKNMC2009450, SKNSH2000482, SKNSH2009991, SKNSH2010015, SMINT2001818, SMINT2006641, SMINT2007391, SMINT2010897, SMINT2011311, SPLEN2002707, SPLEN2014946, SPLEN2016554, SPLEN2016863, SPLEN2017104, SPLEN2024127, SPLEN2027268, SPLEN2028844, SPLEN2028914, SPLEN2029051, SPLEN2029176, SPLEN2029727, SPLEN2029912, SPLEN2032321, SPLEN2033153, SPLEN2033539, SPLEN2033921, SPLEN2034081, SPLEN2034678, SPLEN2036103, SPLEN2036712, SPLEN2037580, SPLEN2037630, SPLEN2038055, SPLEN2039697, SPLEN2039936, SPLEN2041310, SPLEN2041645, SPLEN2041720, SPLEN2041977, SPLEN2042303, STOMA1000189, STOMA2003444, STOMA2004925, SYNOV1000374, SYNOV2005448, SYNOV2006430, SYNOV2017055, SYNOV2018921, SYNOV4000472, SYNOV4001326, SYNOV4001395, SYNOV4002346, SYNOV4002392, SYNOV4004823, SYNOV4007012, SYNOV4007215, T1ESE2000116, TBAES2001171, TBAES2001220, TBAES2001492, TBAES2001751, TBAES2002197, TBAES2003550, TBAES2005157, TBAES2005543, TBAES2006568, TBAES2007964, TCOLN2002278, TESOP1000127, TESOP2001818, TESOP2001849, TESOP2002451, TESOP2002489, TESOP2002950, TESOP2003273, TESOP2003753, TESOP2006060, TESOP2006068, TESOP2006670, TESOP2006746, TESOP2007688, TESOP2009555, TESTI1000330, TESTI1000390, TESTI1000491, TESTI2000443, TESTI2004700, TESTI2005376, TESTI2005986, TESTI2006041, TESTI2006643, TESTI2009474, TESTI2009511, TESTI2009812, TESTI2010400, TESTI2013381, TESTI2014843, TESTI2017727, TESTI2018838, TESTI2019042, TESTI2019648, TESTI2023254, TESTI2023599, TESTI2031529, TESTI2034749, TESTI2035107, TESTI2036513, TESTI2037643, TESTI2044833, TESTI2045920, TESTI2045983, TESTI2046347, TESTI2048465, TESTI2048603, TESTI2049206, TESTI2049246, TESTI2049277, TESTI2049422, TESTI2049452, TESTI2049469, TESTI2049576, TESTI2050681, TESTI2051279, TESTI2051488, TESTI2051543, TESTI2051806, TESTI2052211, TESTI2052698, TESTI2053242, TESTI2053526, TESTI4000068, TESTI4000250, TESTI4000462, TESTI4000530, TESTI4000970, TESTI4001201, TESTI4001206, TESTI4002290, TESTI4002647, TESTI4002703, TESTI4002878, TESTI4004200, TESTI4005628, TESTI4005857, TESTI4006112, TESTI4006219, TESTI4006326, TESTI4006412, TESTI4007203, TESTI4007373, TESTI4007404, TESTI4007489, TESTI4007775, TESTI4007799, TESTI4008007, TESTI4008219, TESTI4008573, TESTI4008816, TESTI4008935, TESTI4008993, TESTI4009022, TESTI4009034, TESTI4009123, TESTI4009215, TESTI4009283, TESTI4009406, TESTI4009638, TESTI4010211, TESTI4010377, TESTI4010713, TESTI4010789, TESTI4010817, TESTI4010928, TESTI4011118, TESTI4011161, TESTI4011246, TESTI4011505, TESTI4012086, TESTI4012329, TESTI4012556, TESTI4012702, TESTI4013675, TESTI4013685, TESTI4013735, TESTI4014159, TESTI4014306, TESTI4014445, TESTI4014694, TESTI4015263, TESTI4015293, TESTI4015471, TESTI4015600, TESTI4015646, TESTI4015681, TESTI4015688, TESTI4016551, TESTI4016812, TESTI4016882, TESTI4017001, TESTI4017137, TESTI4017254, TESTI4017848, TESTI4017961, TESTI4018382, TESTI4018555, TESTI4018806, TESTI4019299, TESTI4019417, TESTI4020806, TESTI4020920, TESTI4021294, TESTI4021456, TESTI4021491, TESTI4022936, TESTI4023555, TESTI4023942, TESTI4024344, TESTI4024907, TESTI4025731, TESTI4026079, TESTI4026192, TESTI4026295, TESTI4026700, TESTI4026762, TESTI4027516, TESTI4028612, TESTI4028809, TESTI4028983, TESTI4029370, TESTI4029671, TESTI4030603, TESTI4030669, TESTI4032895, TESTI4033433, TESTI4033690, TESTI4034212, TESTI4034432, TESTI4035602, TESTI4035637, TESTI4036042, TESTI4037066, TESTI4037188, TESTI4038156, TESTI4038223, TESTI4038258, TESTI4038339, TESTI4038492, TESTI4038818, TESTI4039038, TESTI4039086, TESTI4040800, TESTI4040939, TESTI4040956, TESTI4041099, TESTI4041143, TESTI4041519, TESTI4041624, TESTI4041903, TESTI4041954, TESTI4042098, TESTI4042444, TESTI4043129, TESTI4043203, TESTI4043551, TESTI4043947, TESTI4044035, TESTI4044084, TESTI4044123, TESTI4044234, TESTI4044296, TESTI4044682, TESTI4045312, TESTI4046253, TESTI4046282, TESTI4046884, TESTI4047069, THYMU1000600, THYMU2000932, THYMU2001090, THYMU2003397, THYMU2004693, THYMU2005190, THYMU2007179, THYMU2008282, THYMU2009134, THYMU2016204, THYMU2016523, THYMU2019587, THYMU2023967, THYMU2025707, THYMU2028978, THYMU2029688, THYMU2030226, THYMU2030264, THYMU2030637, THYMU2030796, THYMU2031218, THYMU2031341, THYMU2031368, THYMU2031579, THYMU2031847, THYMU2031890, THYMU2032080, THYMU2032358, THYMU2032696, THYMU2033070, THYMU2033787, THYMU2034647, THYMU2035101, THYMU2035388, THYMU2035400, THYMU2036058, THYMU2036252, THYMU2036265, THYMU2036653, THYMU2037081, THYMU2037208, THYMU2037965, THYMU2038189, THYMU2038615, THYMU2038636, THYMU2038739, THYMU2039350, THYMU2039411, THYMU2039989, THYMU2040140, THYMU2040824, THYMU2041007, THYMU2041252, THYMU3000133, THYMU3000655, THYMU3000826, THYMU3001472, THYMU3002452, THYMU3002661, THYMU3003763, THYMU3006132, THYMU3006371, THYMU3006485, THYMU3006963, THYMU3008171, THYMU3009255, TKIDN2003044, TKIDN2004386, TKIDN2005934, TKIDN2005947, TKIDN2007667, TKIDN2009641, TKIDN2010934, TKIDN2012824, TKIDN2013287, TKIDN2014757, TKIDN2015263, TKIDN2015788, TKIDN2016309, TLIVE2002338, TLIVE2003197, TLIVE2003970, TLIVE2004601, TLIVE2005180, TLIVE2006236, TLIVE2006529, TLIVE2007132, TLIVE2007528, TLIVE2007816, TLIVE2008083, TLIVE2009541, TOVAR2000649, TOVAR2001730, TOVAR2002549, TRACH2001443, TRACH2003070, TRACH2004170, TRACH2005066, TRACH2005811, TRACH2006049, TRACH2019248, TRACH2019473, TRACH2021398, TRACH2022042, TRACH2023306, TRACH2025344, TRACH2025749, TRACH2025932, TRACH3000342, TRACH3000586, TRACH3002192, TRACH3002866, TRACH3002871, TRACH3003379, TRACH3004068, TRACH3004537, TRACH3004840, TRACH3005479, TRACH3006038, TRACH3006228, TRACH3006470, TRACH3006889, TRACH3008093, TRACH3008535, TRACH3034762, TRACH3035235, TRACH3035482, TRACH3036207, TRACH3036309, TRACH3036456, TSTOM1000135, TSTOM2002672, TUTER1000122, TUTER2001387, UTERU1000024, UTERU1000148, UTERU1000249, UTERU2000649, UTERU2001409, UTERU2002410, UTERU2002841, UTERU2005004, UTERU2007520, UTERU2014678, UTERU2019681, UTERU2020491, UTERU2021163, UTERU2021380, UTERU2022981, UTERU2023039, UTERU2023175, UTERU2023651, UTERU2023712, UTERU2024002, UTERU2024656, UTERU2030213, UTERU2030280, UTERU2031084, UTERU2031521, UTERU2031703, UTERU2033375, UTERU2033382, UTERU2035114, UTERU2035331, UTERU2035503, UTERU2037361, UTERU2037577, UTERU2038251, UTERU3000226, UTERU3001542, UTERU3001766, UTERU3002218, UTERU3002667, UTERU3002731, UTERU3002768, UTERU3002993, UTERU3003465, UTERU3003523, UTERU3004523, UTERU3004616, UTERU3004709, UTERU3005049, UTERU3005205, UTERU3005230, UTERU3005460, UTERU3005970, UTERU3006008, UTERU3007134, UTERU3007913, UTERU3008660, UTERU3009259, UTERU3009517, UTERU3015086, UTERU3018081, UTERU3018154, UTERU3018616, UTERU3018711

[0570] Likewise, so far no information suggesting the function of the 72 clones shown below has been provided by the homology search. The functions of these clones may be clarified when an updated database becomes available in future. Clone names are shown below.

[0571] 3NB692004724, ADRGL2000056, BLADE2000579, BRACE2037299, BRACE2043105, BRACE3003026, BRACE3003053, BRACE3005107, BRACE3015829, BRAMY2041434, BRAWH2009393, BRAWH2010552, BRCAN2014229, BRHIP2002722, BRHIP3000017, BRTHA2002133, BRTHA2002702, BRTHA2010033, BRTHA2013426, BRTHA3000296, CTONG2004000, CTONG2015596, CTONG2020374, CTONG2024031, CTONG3002552, CTONG3003598, CTONG3009287, HCASM2003357, HCHON2000743, HLUNG2016862, IMR322001879, IMR322007078, NT2RI3002557, NT2RI3005928, NT2RI3007167, NT2RP8000521, OCBBF2006987, OCBBF3003761, OCBBF3004972, PLACE7000333, PUAEN2006335, SKMUS2003194, SPLEN2033490, STOMA2004893, SYNOV2006620, SYNOV4005739, TESTI1000266, TESTI2008901, TESTI2035981, TESTI2037830, TESTI4001984, TESTI4008058, TESTI4011829, TESTI4013602, TESTI4015012, TESTI4025865, TESTI4028958, TESTI4029348, TESTI4029528, TESTI4029690, TESTI4036767, TESTI4038721, THYMU2032976, THYMU3000360, THYMU3001428, TRACH1000212, UTERU2004299, UTERU2035978, UTERU3000402, UTERU3014791, UTERU3015412, UTERU3017176

### EXAMPLE 7

### Functional Categorization Based on a Functional Domain Search for Deduced Amino Acid Sequences

[0572] Domains and motifs are minimal functional structures of polypeptides. The structure of a polypeptide is constituted by a collection of such minimal structures, and thus the overall function of a polypeptide is ensured by the resulting structure. Thus, the overall function of a polypeptide can be predicted relatively accurately using data obtained by analysis of domain and motif structures. Furthermore, classifying these results into functional categories in a database allows clones comprising specific functions to be easily selected. Thus, such databases are highly useful in the functional analysis of each clone.

[0573] Pfam was used to undertake a domain search for the amino acid sequences deduced from the full-length nucleotide sequences (see Example 5). Based on these results, the proteins encoded by clones 664 and 250 were categorized and their functions predicted. This was performed by referring to domain and motif names, accession numbers for hit data, and detailed descriptions in Pfam (http://www.sanger.ac.uk/Software/Pfam/index.shtml) as well as functional categorizations in PROSITE (http://www.expasy.ch/cgi-bin/prosite-list.pl).

[0574] A clone predicted to belong to the category of secretory and/or membrane protein means a clone having domains and motifs, for example, seven-transmembrane receptor, pancreatic hormone peptides, ion transport protein, or fibroblast growth factor, which suggest receptor, ion channel, hormone, or growth factor.

[0575] A clone predicted to belong to the category of glycoprotein-related protein means a clone having domains and motifs, for example, immunoglobulin domain or glycosyl transferases group 1, which suggest involvement in glycobiology, such as glycoprotein or glycosyltransferase.

[0576] A clone predicted to belong to the category of signal transduction-related protein means a clone having domains and motifs, for example, eukaryotic protein kinase domain, protein phosphatase 2C, or Ras family, which suggest protein kinase, dephosphoenzyme, SH2 domain, or small G protein.

[0577] A clone predicted to belong to the category of transcription-related protein means a clone having domains and motifs, for example, bZIP transcription factor, Zinc finger, or C2H2 type, which suggest transcription factor or transcription-controlling protein.

[0578] A clone predicted to belong to the category of disease-related protein means a clone having domains and motifs, for example, Wilm's tumor protein or von Hippel-Lindau disease tumor suppressor protein, which suggest proteins with disease-specific expression or that promote or suppress expression, depending on the disease.

[0579] A clone predicted to belong to the category of enzyme and/or metabolism-related protein means a clone having domains and motifs, for example, aldehyde dehydrogenase family, chitin synthase, or glucose-6-phosphate dehydrogenase, which suggest transferase, synthase, or hydrolase.

[0580] A clone predicted to belong to the category of cell division- and/or cell proliferation-related protein means a clone having domains and motifs, for example, cyclin or cell division protein, which suggest cyclin or cell proliferation-controlling protein.

[0581] A clone predicted to belong to the category of cytoskeleton-related protein means a clone having domains and motifs, for example, actin, fibronectin type I domain, or kinesin motor domain, which suggest actin, kinesin, or fibronectin.

[0582] A clone predicted to belong to the category of nuclear protein and/or RNA synthesis-related protein means a clone having domains and motifs, for example, hepatitis C virus RNA dependent RNA polymerase or DEAD/DEAH box helicase, which suggest splicing factor, RNA synthase, or helicase.

[0583] A clone predicted to belong to the category of protein synthesis and/or transport-related protein means a clone having domains and motifs, for example, translation initiation factor SUI1, ubiquitin family, or ribosomal protein L16, which suggest translation-related protein, ubiquitin-related protein, or ribosomal protein.

[0584] A clone predicted to belong to the category of cellular defense-related protein means a clone having domains and motifs, for example, HSP90 protein or DNA mismatch repair protein, which suggest chaperonin or DNA repair protein.

[0585] A clone predicted to belong to the category of development- and/or differentiation-related proteins means a clone having domains and motifs, for example, floricaula/leafy protein, which suggest organogenesis-related protein.

[0586] A clone predicted to belong to the category of DNA- and/or RNA-binding protein means a clone having domains and motifs, for example, transcription factor WhiB, B-box zinc finger, or tRNA synthetases class I (C), which suggest DNA/RNA-relating enzyme group including transcription factor and DNA ligase or Zinc-finger related protein.

[0587] A clone predicted to belong to the category of ATP- and/or GTP-binding protein means a clone having domains and motifs, for example, E1-E2 ATPase or Ras family, which suggest ATP/GTP-related enzyme group including ATPase or G protein.

[0588] During this functional categorization, if a clone met every criterion of multiple categories as described above, it was grouped into multiple categories. However, the function of a polypeptide is not limited to these functional categories.

[0589] The clones predicted to belong to the category of secretory protein and/or membrane protein are the following 64 clones.

[0590] ASTRO2014923, ASTRO3000301, BRACE2005457, BRACE2014306, BRACE3001391, BRACE3014005, BRALZ2016085, BRAMY2040592, BRAWH2014662, BRHIP2004814, BRHIP3024118, BRTHA3002427, BRTHA3017848, BRTHA3018656, CTONG2009423, CTONG2013178, D3OST2002648, FEBRA2007708, FEBRA2008311, HCHON2001084, HCHON2001712, HCHON2004531, HCHON2005921, HSYRA2009102, KIDNE1000064, KIDNE2000832, NT2RI3006376, OCBBF2031167, OCBBF2035110, OCBBF2038317, PEBLM2002594, PERIC1000147, PERIC2009086, PROST1000184, SPLEN2012624, SPLEN2031547, SPLEN2033098, SPLEN2036326, TESTI1000257, TESTI1000390, TESTI2000644, TESTI2002036, TESTI2002928, TESTI2006648, TESTI2024567, TESTI2034520, TESTI4000014, TESTI4000724, TESTI4007163, TESTI4009881, TESTI4028880, THYMU2009425, THYMU2011548, THYMU2033079, THYMU2041015, TLIVE2000023, TLIVE2003381, TLIVE2007132, TRACH2006387, TRACH2007059, TRACH3004786, UTERU3000645, UTERU3004616, UTERU3006308

[0591] The following 23 clones are also predicted to belong to the category of secretory protein and/or membrane protein.

[0592] BRACE2029396, BRACE3005107, BRACE3010076, BRAMY2019111, BRAMY3004800, BRHIP3000017, FCBBF1000509, HCHON2000508, HEART2009680, IMR322013396, NT2RI2009583, NT2RI3000174, NT2RP8000521, OCBBF2030116, TESTI2029252, TESTI4013894, TESTI4032112, TESTI4041086, THYMU2035710, TKIDN2012771, TRACH3000420, UTERU2004299, TESTI4038779

[0593] The clones predicted to belong to the category of glycoprotein-related protein are the following 77 clones.

[0594] ADIPS2000088, BRACE2043142, BRACE2046295, BRACE3014005, BRAMY2005052, BRAMY4000277, BRAWH2007658, BRCAN2006063, BRSTN2004863, BRTHA3017589, BRTHA3017848, COLON2000568, COLON2004478, CTONG2000042, CTONG2013178, CTONG2024206, CTONG2024749, CTONG2025496, CTONG3001370, CTONG3003737, D3OST2002182, FEBRA2007708, HCHON2001084, HCHON2002676, HCHON2004531, HEART2001680, HLUNG2014262, LYMPB2000083, NESOP2001433, NOVAR2001108, NT2RI3006171, NT2RI3006340, NT2RI3007978, NT2RP7014005, OCBBF2010140, OCBBF2037598, PLACE5000171, PLACE6012574, PLACE7006051, PUAEN2009174, SMINT2002743, SMINT2010076, SMINT2011888, SMINT2015787, SPLEN2001599, SPLEN2015267, SPLEN2021701, SPLEN2037722, STOMA2004294, SYNOV3000231, SYNOV3000302, SYNOV4007521, SYNOV4007671, TBAES2003550, TESOP2005485, TESTI2005610, TESTI4006326, TESTI4021294, THYMU2005303, THYMU2019210, THYMU2023711, THYMU2027695, TRACH2007059, TRACH2022425, TRACH2022553, TRACH2022649, TRACH3002168, TRACH3005479, TRACH3005549, TRACH3006470, TRACH3035526, TRACH3036609, TSTOM2000442, UTERU2026090, UTERU3004616, UTERU3004992, UTERU3006308

[0595] The following eight clones are also predicted to belong to the category of glycoprotein-related protein.

BRAWH2006395, BRHIP3000017, NT2RI3007443, OCBBF3002654, TESTI2039060, TESTI4013894, TESTI4031745, TLIVE2001684

[0596] The clones predicted to belong to the category of signal transduction-related protein are the following 116 clones.

[0597] BLADE2007958, BNGH42007788, BRACE1000258, BRACE2008594, BRACE2041009, BRACE3001391, BRACE3006872, BRACE3011421, BRACE3024073, BRACE3027326, BRALZ2014484, BRAMY2001473, BRAMY2036567, BRAMY2042760, BRAMY2047751, BRAMY3001794, BRAMY3002803, BRAMY3005091, BRAMY3008466, BRAMY4000095, BRAWH3001326, BRAWH3002821, BRAWH3005912, BRCAN2002856, BRCAN2009432, BRCAN2016619, BRCAN2024451, BRCAN2028355, BRHIP2000819, BRHIP2005932, BRHIP3008405, BRHIP3025161, BRSSN2000684, BRSSN2004719, BRSTN2008418, BRSTN2013741, BRTHA3009037, BRTHA3013884, COLON2001721, CTONG2006798, CTONG3000084, CTONG3000657, CTONG3002127, D3OST3000169, DFNES2001108, DFNES2011499, FCBBF3007540, HCASM2001301, HCHON2000028, HCHON2006250, HHDPC1000118, HLUNG2001996, HLUNG2002465, KIDNE2001847, MESAN2006563, NHNPC2001816, NT2NE2003252, NT2RI2005166, NT2RI3000622, NT2RI3006673, NT2RP7005118, NT2RP7005529, NT2RP7009147, NT2RP7013795, NT2RP8000483, NTONG2003852, OCBBF2004826, OCBBF2004883, OCBBF2007028, OCBBF2008770, OCBBF2022351, OCBBF2037340, OCBBF2037547, PEBLM2004666, PLACE7008431, PROST2016462, PROST2018511, PUAEN2002616, PUAEN2005930, PUAEN2006328, PUAEN2009852, SYNOV2021320, TESOP2000801, TESOP2001166, TESTI2006648, TESTI2026505, TESTI2050137, TESTI2052693, TESTI4000079, TESTI4010713, TESTI4010831, TESTI4011956, TESTI4016882, TESTI4019843, TESTI4028059, THYMU2032014, THYMU2037226, THYMU2038615, THYMU3001234, THYMU3006172, THYMU3008436, TLIVE2009541, TRACH2009310, TRACH2021398, TRACH2023299, TRACH2025535, TRACH3009455, TRACH3034731, TSTOM2000553, UTERU1000337, UTERU2005621, UTERU2025025, UTERU2036089, UTERU2038251, UTERU3003523, UTERU3007419

[0598] The following 38 clones are also predicted to belong to the category of signal transduction-related protein.

[0599] BLADE2000579, BRACE3001058, BRACE3003053, BRACE3009127, BRAMY2040159, BRAMY3004800, BRAWH3009017, BRCAN2014229, BRHIP2026877, BRTHA2013610, CTONG3004550, FEBRA2001990, FEBRA2008692, HCHON2000508, MESAN2001770, NT2RI2005772, NT2RI3007443, NTONG2008093, OCBBF2005433, OCBBF2024284, OCBBF2034637, OCBBF3002654, TESOP2000390, TESTI2025924, TESTI2049956, TESTI4000319, TESTI4005317, TESTI4021482, TESTI4025268, TESTI4031745, THYMU2004139, THYMU2031249, TRACH2024408, UTERU2008040, UTERU2028734, UTERU3000402, UTERU3000738, UTERU3015412

[0600] The clones predicted to belong to the category of transcription-related protein are the following 27 clones.

[0601] BRACE2006319, BRACE3013576, BRAMY2030109, BRAWH3005912, BRHIP3025161, CORDB1000140, CTONG1000467, HEART2001756, IMR322000127, IMR322000917, KIDNE1000064, NOVAR2000136, NT2NE2006531, NT2RI3007158, NT2RP7000466, OCBBF2036743, OCBBF3009279, PLACE6019385, TESTI2026505, TESTI2044796, TESTI2050987, TESTI4017001, TESTI4019140, TESTI4034912, THYMU2035735, TRACH2025749, TRACH3004840

[0602] The following 88 clones are also predicted to belong to the category of transcription-related protein.

[0603] BRACE2003609, BRACE3001058, BRACE3001113, BRACE3003026, BRAMY2035070, BRAMY2035449, BRAMY2035718, BRAMY2039341, BRAMY2045471, BRAWH3007441, BRHIP2017553, BRSTN2013354, CERVX2002013, CTONG1000113, CTONG2003348, CTONG2020374, CTONG2020378, CTONG2020411, CTONG2024031, CTONG2028758, CTONG3001501, CTONG3004726, DFNES2011192, FCBBF3027854, FEBRA2014122, FEBRA2027609, HCASM2003018, HCASM2003099, HCHON2000508, HCHON2000743, HCHON2004858, HSYRA2005628, MESAN2014412, MESAN2015501, NT2RI2008952, NT2RI2018448, NT2RI3000174, NT2RI3001132, NT2RI3002557, NT2RI3007167, NT2RI3007443, OCBBF2008144, OCBBF2009583, OCBBF2011669, OCBBF2019684, OCBBF2020048, OCBBF2024284, OCBBF2032274, OCBBF3000167, OCBBF3003761, SPLEN2016135, SPLEN2016781, SPLEN2036702, SYNOV2021953, SYNOV4002744, TESOP2001796, TESOP2005199, TESOP2006398, TESTI2008901, TESTI2034251, TESTI2037830, TESTI4000183, TESTI4000214, TESTI4006473, TESTI4008058, TESTI4008302, TESTI4013365, TESTI4014801, TESTI4015442, TESTI4017714, TESTI4025494, TESTI4025547, TESTI4028938, TESTI4029348, TESTI4031745, TESTI4032090, THYMU2006001, THYMU2028739, THYMU2031139, THYMU3001428, TRACH2007483, TRACH3000134, TRACH3003832, TRACH3007866, UTERU3001053, UTERU3014791, UTERU3017176, TESTI4038779

[0604] The clones predicted to belong to the category of enzyme and/or metabolism-related protein are the following 176 clones.

[0605] 3NB692002806, ASTRO1000009, BLADE2005036, BLADE2008539, BRACE2005457, BRACE2008594, BRACE2014475, BRACE2018762, BRACE2035381, BRACE2043142, BRACE2047011, BRACE3004058, BRACE3007625, BRACE3009708, BRACE3011421, BRACE3015262, BRACE3024073, BRACE3025630, BRACE3027478, BRAMY2047746, BRAMY2047751, BRAMY3002803, BRAMY3004919, BRAMY3005091, BRAMY4000095, BRAWH2010000, BRAWH2014414, BRAWH2014662, BRAWH2016702, BRAWH3002821, BRAWH3003727, BRCAN2021028, BRCAN2024451, BRCAN2028355, BRCOC2003213, BRHIP2004359, BRHIP2026288, BRHIP3008183, BRHIP3025161, BRHIP3027137, BRSSN2000684, BRSTN2000872, BRSTN2004863, BRSTN2004987, BRTHA2012980, BRTHA3002401, BRTHA3008778, BRTHA3009037, BRTHA3009090, BRTHA3015815, BRTHA3016917, BRTHA3017848, BRTHA3018656, COLON2001721, CTONG2004062, CTONG2006798, CTONG2013178, CTONG2028124, CTONG3002127, CTONG3005325, CTONG3005648, D3OST2002182, FCBBF3004502, FCBBF3013307, FEBRA2007708, FEBRA2008468, FEBRA2026984, HCASM2001301, HCASM2002918, HCHON2002676, HCHON2004007, HCHON2004531, HEART2006131, HHDPC1000118, HLUNG1000017, KIDNE2000832, KIDNE2006580, MESAN2012054, NOVAR2000136, NT2NE2003252, NT2NE2006909, NT2RI2004618, NT2RI3004510, NT2RI3006673, NT2RI3007978, NT2RI3008652, NT2RP7010599, NT2RP7014005, NT2RP7017474, NTONG2000413, OCBBF2004826, OCBBF2006058, OCBBF2019823, OCBBF2025527, OCBBF2031167, OCBBF2037340, OCBBF2037547, OCBBF2037638, PERIC2009086, PLACE7002641, PLACE7008431, PROST2017367, PUAEN2007044, PUAEN2009795, PUAEN2009852, SPLEN2010912, SPLEN2015679, SPLEN2030335, SYNOV4002392, SYNOV4002883, TBAES2003550, TESOP2000801, TESOP2004114, TESOP2009121, TESTI1000257, TESTI1000545, TESTI2002618, TESTI2006648, TESTI2040018, TESTI2049469, TESTI2053621, TESTI4000288, TESTI4000349, TESTI4001148, TESTI4001527, TESTI4001561, TESTI4002552, TESTI4006819, TESTI4007382, TESTI4007810, TESTI4008429, TESTI4010713, TESTI4010851, TESTI4012448, TESTI4012679, TESTI4013369, TESTI4016925, TESTI4018835, TESTI4020920, TESTI4021478, TESTI4022716, TESTI4026510, TESTI4028059, TESTI4029836, TESTI4032895, TESTI4034432, TESTI4036909, THYMU2006420, THYMU3000133, THYMU3001379, THYMU3004835, THYMU3006172, THYMU3008436, TLIVE2002336, TRACH2006387, TRACH2009310, TRACH2019473, TRACH2022425, TRACH2023299, TRACH3005479, TRACH3006470, TRACH3007479, TRACH3008093, TRACH3008629, TRACH3036193, TSTOM2000553, UTERU2005621, UTERU2017762, UTERU2025025, UTERU2033375, UTERU3000828, UTERU3001240, UTERU3001585, UTERU3003116, UTERU3005460, UTERU3005907

[0606] The following 89 clones are also predicted to belong to the category of enzyme and/or metabolism-related protein.

[0607] BLADE2000579, BRACE2039823, BRACE3003053, BRAMY2038516, BRAMY2040159, BRAWH1000369, BRCAN2003070, BRCAN2014229, BRCOC2019841, BRHIP2005724, BRHIP2008389, BRHIP2026877, BRHIP3000240, BRHIP3026052, BRTHA2002133, BRTHA2002702, BRTHA2007060, BRTHA2010033, BRTHA2013426, BRTHA2013610, BRTHA2017364, BRTHA2018011, BRTHA3000296, CTONG2004000, CTONG2016942, CTONG2020374, CTONG2024031, CTONG3002552, CTONG3003598, CTONG3004550, FCBBF1000509, FEBRA2008692, HCASM2002754, HCASM2003099, HCASM2003357, HLUNG2015418, HLUNG2015548, IMR322013731, MESAN2005303, NT2RI2005772, NT2RI2008952, NT2RI3000174, NT2RI3007443, NT2RP7008435, NTONG2008093, OCBBF2006987, OCBBF2034637, OCBBF3002654, PLACE7000333, PLACE7000502, PROST2000452, SPLEN2039311, STOMA2003158, SYNOV2013637, TESOP2000390, TESTI2015626, TESTI2025924, TESTI2026647, TESTI2035981, TESTI2036288, TESTI2039060, TESTI2049956, TESTI4000155, TESTI4001984, TESTI4006473, TESTI4010382, TESTI4011072, TESTI4014801, TESTI4017714, TESTI4021482, TESTI4025547, TESTI4025865, TESTI4026207, TESTI4028958, TESTI4029690, TESTI4031745, TESTI4032090, THYMU2004139, THYMU2031139, THYMU2031249, THYMU2040925, TKIDN2012771, TLIVE2002046, TLIVE2007607, TRACH3000420, TRACH3007866, UTERU2019534, UTERU2028734, UTERU3000738

[0608] The clones predicted to belong to the category of cell division and/or cell proliferation-related protein are the following ten clones.

BRAWH2001940, CTONG3001123, HCHON2001217, PROST2008993, TBAES2001171, TESTI4021294, TESTI4035498, UTERU1000024, UTERU3002993, UTERU3003523

[0609] The following three clones are also predicted to belong to the category of cell division and/or cell proliferation-related protein.

BRACE2029396, BRAWH2010552, TESTI4013365

[0610] The clones predicted to belong to the category of cytoskeleton-related protein are the following 36 clones.

[0611] BRACE2026836, BRACE2045300, BRAWH3000314, BRSTN2004863, BRTHA2004978, BRTHA3003449, BRTHA3005046, COLON2002520, CORDB2000541, CTONG3002674, FCBBF3012288, HCHON2001577, HLUNG2017350, HSYRA2005456, HSYRA2009075, NT2RI3006340, NT2RI3006673, NT2RI3007291, OCBBF2037598, PLACE5000282, TESTI2003347, TESTI2034767, TESTI4000288, TESTI4007778, TESTI4009160, TESTI4018886, TESTI4030603, TESTI4034632, TESTI4035063, THYMU1000496, THYMU2008725, TRACH2005811, TRACH2007059, UTERU2007724, UTERU2035745, UTERU3004616

[0612] The following four clones are also predicted to belong to the category of cytoskeleton-related protein.

NT2RI2005772, OCBBF2006987, SPLEN2030847, TESTI4026207

[0613] The clones predicted to belong to the category of nuclear protein and/or RNA synthesis-related protein are the following 20 clones.

[0614] BRACE3024073, BRAWH2001940, BRCOC2003213, BRSTN2004987, BRTHA3016917, CTONG3009028, FCBBF3013307, FEBRA2026984, SPLEN2010912, TBAES2001171, TESTI2040018, TESTI4019566, TESTI4022716, TESTI4026510, TESTI4036909, THYMU3000133, TRACH2023299, TRACH3036193, UTERU1000024, UTERU3002993

[0615] The following eleven clones are also predicted to belong to the category of nuclear protein and/or RNA synthesis-related protein.

BRACE3003053, BRCAN2002473, BRTHA2017364, NT2RI2008952, NT2RI3000174, TESTI2026647, TESTI2035981, TESTI4000155, TESTI4006473, TESTI4010382, TESTI4025547

[0616] The clones predicted to belong to the category of protein synthesis and/or transport-related protein are the following 29 clones.

[0617] BRACE2014306, BRACE3008720, BRAWH3000491, BRCAN2009432, BRHIP2000920, BRTHA3013884, CTONG2013178, HCHON2004531, HLUNG1000017, HLUNG2013851, HSYRA2005496, NT2NE2006909, NT2RI3006340, OCBBF2007068, OCBBF2031167, PUAEN2009795, TBAES2001229, TBAES2004055, TESTI2051867, TESTI4000014, TESTI4000349, TESTI4009608, TESTI4010851, TESTI4034632, TRACH3007479, TRACH3036193, UTERU2017762, UTERU2019940, UTERU2033375

[0618] The following 17 clones are also predicted to belong to the category of protein synthesis and/or transport-related protein.

BLADE2000579, BRACE3003053, BRCAN2003070, BRTHA2018011, BRTHA3000296, CTONG2016942, MESAN2005303, NT2RI3002557, NT2RP7008435, PERIC2007068, PLACE7000502, PROST2000452, TESTI4001984, TESTI4017714, THYMU2004284, TRACH3000420, TRACH3007866

[0619] The clones predicted to belong to the category of cellular defense-related protein are the following four clones.

BRTHA2015878, CTONG3000084, NT2RI3002842, PEBLM2004666

[0620] The following three clones are also predicted to belong to the category of cellular defense-related protein.

BRCAN2002473, NT2RI3007167, TRACH3002561

[0621] The clone predicted to belong to the category of development and/or differentiation-related protein is the following one clone.

TESTI4014924

[0622] The clones predicted to belong to the category of DNA-binding and/or RNA-binding protein are the following 67 clones.

[0623] BRACE2006319, BRACE2047011, BRACE3004150, BRACE3013576, BRACE3024073, BRAMY2030109, BRAWH3005912, BRCAN2002562, BRCOC2003213, BRHIP2021615, BRHIP3008183, BRHIP3025161, BRSTN2004987, BRTHA2018707, BRTHA3016917, CORDB1000140, CTONG1000467, CTONG3000084, CTONG3003972, CTONG3008831, CTONG3009028, FCBBF3013307, FEBRA2026984, HEART2001756, HLUNG2013851, IMR322000127, IMR322000917, KIDNE1000064, NT2NE2006531, NT2RI3003382, NT2RI3007158, NT2RP7000466, NT2RP7004123, OCBBF2036743, OCBBF3009279, PLACE6019385, SPLEN2006122, SPLEN2010912, TESOP2009121, TESTI1000390, TESTI2014716, TESTI2026505, TESTI2040018, TESTI2044796, TESTI2050987, TESTI4007810, TESTI4009374, TESTI4011745, TESTI4012679, TESTI4017001, TESTI4019140, TESTI4019566, TESTI4022716, TESTI4026510, TESTI4034432, TESTI4034912, TESTI4036909, THYMU2035319, THYMU2035735, THYMU3000133, TLIVE2002336, TRACH2023299, TRACH2025749, TRACH3004840, TRACH3036193, UTERU2026025, UTERU3009490

[0624] The following 112 clones are also predicted to belong to the category of DNA-binding and/or RNA-binding protein.

[0625] BLADE2006830, BRACE2003609, BRACE3001058, BRACE3001113, BRACE3003026, BRACE3003053, BRACE3010076, BRAMY2035070, BRAMY2035449, BRAMY2039341, BRAMY2045471, BRAWH1000369, BRAWH3007441, BRHIP2017553, BRSTN2013354, BRTHA2002133, BRTHA2002702, BRTHA2017364, BRTHA2017972, CERVX2002013, CTONG1000113, CTONG2003348, CTONG2015596, CTONG2020374, CTONG2020378, CTONG2020411, CTONG2024031, CTONG2028758, CTONG3001501, CTONG3004726, DFNES2011192, FCBBF1000509, FCBBF3027854, FEBRA2014122, FEBRA2027609, HCASM2003018, HCASM2003099, HCASM2009424, HCHON2000508, HCHON2000743, HCHON2004858, HSYRA2005628, IMR322013731, MESAN2014412, MESAN2015501, NT2RI2008952, NT2RI2018448, NT2RI2027157, NT2RI3000174, NT2RI3001132, NT2RI3002557, NT2RI3007167, NT2RI3007443, OCBBF2006987, OCBBF2008144, OCBBF2009583, OCBBF2011669, OCBBF2019684, OCBBF2020048, OCBBF2024284, OCBBF2032274, OCBBF2034637, OCBBF3000167, OCBBF3003761, PERIC2007068, SPLEN2016135, SPLEN2016781, SPLEN2036702, STOMA2003158, SYNOV2021953, SYNOV4002744, TESOP2001796, TESOP2005199, TESOP2006398, TESTI2008901, TESTI2026647, TESTI2034251, TESTI2035981, TESTI2037830, TESTI4000155, TESTI4000183, TESTI4000214, TESTI4006473, TESTI4008058, TESTI4008302, TESTI4010382, TESTI4013365, TESTI4014801, TESTI4015442, TESTI4017714, TESTI4025494, TESTI4025547, TESTI4026207, TESTI4028938, TESTI4028958, TESTI4029348, TESTI4031745, TESTI4032090, THYMU2006001, THYMU2028739, THYMU2031139, THYMU3001428, TKIDN2012771, TLIVE2007607, TRACH2007483, TRACH3000134, TRACH3003832, TRACH3007866, UTERU3001053, UTERU3014791, UTERU3017176, TESTI4038779

[0626] The clones predicted to belong to the category of ATP binding and/or GTP-binding protein are the following 28 clones.

[0627] BRACE3008720, BRACE3009708, BRAMY2047746, BRAMY3004919, BRAWH2014662, BRAWH2016702, BRCAN2009432, BRCAN2024451, BRSTN2013741, BRTHA3008778, BRTHA3009090, CTONG2004062, CTONG2028124, HCHON2004007, OCBBF2037340, SPLEN2030335, TESTI4000288, TESTI4001148, TESTI4002552, TESTI4008429, TESTI4018835, TESTI4021478, TESTI4029836, THYMU2036459, THYMU3001379, TRACH2001549, UTERU3000828, UTERU3001240

[0628] The following eight clones are also predicted to belong to the category of ATP binding and/or GTP-binding protein.

BRCAN2014229, BRHIP2008389, CTONG3004550, FEBRA2001990, IMR322013396, IMR322013731, MESAN2001770, TESTI4000319

[0629] Although the 208 clones described below have hit data in Pfam, it remains unclear as to which of the above-described categories each of these clones belong. However, if data for proteins having a similar domain or motif are accumulated and their functions clarified in more detail, in the future these clones can be classified into any of the above-described categories. The Clone Name and Functional Domain Name are indicated as “Clone Name//Functional Domain Name”. When a clone had hit data in multiple functional domains, all data were represented, with each marked with a double slash (//).

[0630] In addition, even when a clone had multiple hit data in an identical functional domain, these data are fully represented without abridgment.

3NB692002685//R3H domain

3NB692008729//Hr1 repeat motif

ASTRO2003960//F-box domain.

BNGH42003570//EB module//Furin-like cysteine rich region//Thrombospondin type 1 domain

BRACE2010489//LysM domain

BRACE2015314//Bacterial mutT protein

BRACE2016981//Fanconi anaemia group C protein//Bacterial flagellin N-terminus

BRACE2027258//Ank repeat//Ank repeat//Ank repeat//Ank repeat//Ank repeat

BRACE2030341//Kinase associated domain 1

BRACE2035441//Spectrin repeat//Spectrin repeat//Spectrin repeat

BRACE2038329//TS-N domain//UBA domain

BRACE2042550//Thrombospondin type 1 domain//Trypsin Inhibitor like cysteine rich domain//von Willebrand factor type C domain//Thrombospondin type 1 domain

BRACE2044286//CRAL/TRIO domain.//Spectrin repeat

BRACE3000071//Ank repeat//Ank repeat//Ank repeat

BRACE3000973//Leucine Rich Repeat

BRACE3001002//Lipoprotein

[0631] BRACE3003192//EGF-like domain//EGF-like domain//EGF-like domain//EGF-like domain//Metallothionein//Keratin, high sulfur B2 protein//EGF-like domain//EGF-like domain//EGF-like domain//EGF-like domain//TB domain//EGF-like domain//EGF-like domain//EGF-like domain//TB domain//EGF-like domain//EGF-like domain

BRACE3004772//SAM domain (Sterile alpha motif)

BRACE3004880//GLTT repeat (12 copies)//GLTT repeat (12 copies)//GLTT repeat (12 copies)//Keratin, high sulfur B2 protein

BRACE3008137//PDZ domain (Also known as DHR or GLGF).//PDZ domain (Also known as DHR or GLGF).//PDZ domain (Also known as DHR or GLGF).//PDZ domain (Also known as DHR or GLGF).

BRACE3008384//Rhomboid family

BRACE3009090//Beige/BEACH domain

BRACE3010397//SCP-like extracellular protein

BRACE3015521//EF hand

BRACE3016884//Keratin, high sulfur B2 protein//Flagellar L-ring protein

BRACE3019084//SAM domain (Sterile alpha motif)

BRAMY2004771//Leucine Rich Repeat//Leucine rich repeat C-terminal domain//Leucine rich repeat N-terminal domain

[0632] BRAMY2019300//Leucine Rich Repeat//Leucine rich repeat C-terminal domain//Leucine rich repeat N-terminal domain BRAMY2021498//Thrombospondin type 1 domain//DnaJ central domain (4 repeats)//Thrombospondin type 1 domain//Thrombospondin type 1 domain//Thrombospondin type 1 domain//Thrombospondin type 1 domain

BRAMY2031317//PDZ domain (Also known as DHR or GLGF).

BRAMY2039872//Interferon alpha/beta domain

BRAMY2046989//TPR Domain//TPR Domain//TPR Domain//TPR Domain//TPR Domain//TPR Domain

BRAMY3004224//Leucine rich repeat N-terminal domain//Leucine Rich Repeat//Leucine Rich Repeat//Leucine Rich Repeat//Leucine Rich Repeat//Leucine Rich Repeat//Leucine rich repeat C-terminal domain

BRAMY3005932//Ank repeat

BRAWH1000127//Plexin repeat//Thrombospondin type 1 domain

BRAWH2001395//Myelin basic protein

BRAWH2014954//PDZ domain (Also known as DHR or GLGF).//PDZ domain (Also known as DHR or GLGF).

BRAWH3000078//Adaptin N terminal region//Activin types I and II receptor domain

BRAWH3001891//YCF9

BRAWH3002574//Calpain large subunit, domain III//EF hand

BRAWH3002600//Cadherin domain//Cadherin domain//Cadherin domain

BRAWH3008341//Pentaxin family

BRCAN2002948//Adaptin N terminal region

BRCAN2009203//SAM domain (Sterile alpha motif)

BRCAN2015464//Gag P30 core shell protein

BRCAN2017717//Squash family of serine protease inhibitors

BRCOC2001505//Myelin basic protein

BRCOC2016525//Ank repeat//Ank repeat//Ank repeat//Ank repeat//Ank repeat//Ank repeat//Ank repeat

BRHIP2003786//Ank repeat//Ank repeat//Ank repeat//BTB/POZ domain

BRHIP2005236//Galactose binding lectin domain//Latrophilin Cytoplasmic C-terminal region

BRHIP2007616//Sema domain

BRHIP2009414//Uncharacterized protein family

BRHIP3000339//Myelin basic protein

BRHIP3008313//Ank repeat

BRSTN2001067//Rifin/stevor family

BRTHA2000855//Extracellular link domain

[0633] BRTHA2005579//von Willebrand factor type C domain//von Willebrand factor type C domain//von Willebrand factor type C domain//von Willebrand factor type C domain//von Willebrand factor type C domain//von Willebrand factor type C domain//von Willebrand factor type C domain//von Willebrand factor type C domain//von Willebrand factor type C domain//von Willebrand factor type C domain//von Willebrand factor type C domain//von Willebrand factor type C domain

BRTHA2007122//Ank repeat//Ank repeat//Ank repeat//Ank repeat//SAM domain (Sterile alpha motif)

BRTHA2008527//Leucine Rich Repeat//Leucine Rich Repeat//Leucine Rich Repeat//Leucine Rich Repeat//Leucine Rich Repeat

BRTHA2009311//Vertebrate galactoside-binding lectins

BRTHA2010884//Thrombospondin type 1 domain//CUB domain

BRTHA2013262//Keratin, high sulfur B2 protein

BRTHA2014792//SET domain

BRTHA2015406//UBA domain

BRTHA2016496//Peptidase C13 family

BRTHA2018591//GTPase of unknown function

BRTHA2018624//Galactose binding lectin domain//Activin types I and II receptor domain//Galactose binding lectin domain

BRTHA2019048//Domain of unknown function DUF71

BRTHA3003074//Fanconi anaemia group C protein

BRTHA3008310//Homeobox domain

CTONG1000341//EGF-like domain//EGF-like domain//Metallothionein//EGF-like domain//EB module//EGF-like domain//EGF-like domain//EGF-like domain

CTONG2001877//MutT-like domain

CTONG2008233//DnaJ domain

CTONG2017500//F-box domain.

CTONG2020026//Herpesvirus VP23 like capsid protein

CTONG2028687//TPR Domain//TPR Domain

CTONG3000686//TPR Domain//TPR Domain//TPR Domain//TPR Domain

CTONG3004072//Beta type Zein//Keratin, high sulfur B2 protein

CTONG3006067//DnaJ central domain (4 repeats)

CTONG3006186//PDZ domain (Also known as DHR or GLGF)//Apolipoprotein A1/A4/E family//WW domain

CTONG3009385//TPR Domain//TPR Domain//TPR Domain//TPR Domain//TPR Domain//TPR Domain//TPR Domain//TPR Domain//TPR Domain//TPR Domain

DFNES2000146//Plexin repeat//Thrombospondin type 1 domain

DFNES2005266//Thrombospondin type 1 domain

FCBBF3009888//Keratin, high sulfur B2 protein//u-PAR/Ly-6 domain

FCBBF3012170//Thrombospondin type 1 domain

FEBRA2000253//Flagellar L-ring protein

FEBRA2007801//IBR domain

FEBRA2021571//von Willebrand factor type D domain

FEBRA2024150//DENN (AEX-3) domain

HCHON2004776//Protein of unknown function DUF93

HEART1000139//Troponin

HEART2006909//CBS domain//CBS domain

HEART2010495//Tau and MAP proteins, tubulin-binding

HLUNG2000014//Lectin C-type domain

HLUNG2002958//EF hand

HLUNG2011298//Oxidoreductase FAD/NAD-binding domain

IMR322006495//Tropomyosins

KIDNE2000846//Sodium:neurotransmitter symporter family

KIDNE2001361//Domain of unknown function DUF19

KIDNE2011635//Sodium:solute symporter family

KIDNE2012945//CUB domain//Pentaxin family

NESOP2001656//Polyomavirus coat protein

NT2RI2008724//GGL domain

NT2RI2025909//Mitochondrial carrier proteins//Mitochondrial carrier proteins//Mitochondrial carrier proteins

NT2RI2025957//PDZ domain (Also known as DHR or GLGF).

NT2RI3007543//DnaJ domain

NT2RP7000359//FERM domain (Band 4.1 family)//Insulin-like growth factor binding proteins//PDZ domain (Also known as DHR or GLGF).

NT2RP7004027//CUB domain//Sushi domain (SCR repeat)

NT2RP7011570//Gag P30 core shell protein

NT2RP8000296//BTB/POZ domain//Kelch motif//Kelch motif//Kelch motif//Kelch motif//Kelch motif//Kelch motif

NTONG2005277//Ank repeat//Ank repeat//Ank repeat//Ank repeat//Ank repeat//Ank repeat//Ank repeat//Ank repeat

NTONG2006354//Ank repeat

NTONG2007517//BTB/POZ domain

OCBBF2006764//Sushi domain (SCR repeat)//CUB domain//Sushi domain (SCR repeat)//CUB domain//Sushi domain (SCR repeat)

OCBBF2010416//Major intrinsic protein

OCBBF2020838//Fork head domain

OCBBF2021323//Regulatory subunit of type II PKA R-subunit

OCBBF2033869//CUB domain

PERIC2001228//Leucine Rich Repeat//Leucine Rich Repeat//Leucine Rich Repeat//Leucine Rich Repeat//Leucine Rich Repeat//Leucine Rich Repeat//Leucine Rich Repeat

PERIC2003720//Ezrin/radixin/moesin family

PLACE6020031//Ank repeat//Ank repeat

PLACE7000514//Filamin/ABP280 repeat.

PROST2018090//Sushi domain (SCR repeat)//Sushi domain (SCR repeat)//Chitin binding Peritrophin-A domain//HYR domain//Sushi domain (SCR repeat)

RECTM2000433//Jacalin-like lectin domain

SKMUS2006394//Ank repeat//Ank repeat//Ank repeat//Ank repeat//Ank repeat//Ank repeat//Ank repeat

SMINT1000192//Small hydrophilic plant seed proteins

SPLEN2002147//Phosphatidylinositol transfer protein

SPLEN2002467//DB module//F-box domain.//Leucine Rich Repeat

SPLEN2031780//Domain of unknown function DUF139//Domain of unknown function DUF139

SPLEN2034081//Insulin-like growth factor binding proteins

SPLEN2036821//Mitochondrial carrier proteins

SYNOV2005448//Apidaecin

SYNOV2005817//Domain of unknown function DUF19//Tissue factor

SYNOV2006430//Nitrogen regulatory protein P-II

SYNOV2014400//EGF-like domain//Granulins//Granulins//EGF-like domain

[0634] SYNOV4007553//Leucine Rich Repeat//Leucine Rich Repeat//Leucine Rich Repeat//Leucine Rich Repeat//Leucine Rich Repeat//Leucine Rich Repeat//Leucine Rich Repeat//Leucine Rich Repeat//Leucine Rich Repeat//Leucine Rich Repeat//Leucine Rich Repeat//Leucine Rich Repeat//Leucine rich repeat C-terminal domain//TIR domain

SYNOV4008440//Adaptin N terminal region

TESOP2001953//Leucine Rich Repeat//Leucine Rich Repeat//Leucine Rich Repeat//Leucine Rich Repeat//Leucine Rich Repeat//Leucine Rich Repeat//Leucine Rich Repeat

TESTI2000443//Leucine Rich Repeat//Leucine Rich Repeat//Leucine Rich Repeat

TESTI2004700//Leucine Rich Repeat//Leucine Rich Repeat//Leucine Rich Repeat//Leucine Rich Repeat

TESTI2027019//Leucine Rich Repeat

TESTI4000462//Keratin, high sulfur B2 protein

TESTI4000970//Ezrin/radixin/moesin family

TESTI4002491//NSF attachment protein

TESTI4006546//Tudor domain//Tudor domain//Tudor domain

TESTI4007064//DENN (AEX-3) domain//PPR repeat//LIM domain containing proteins

TESTI4011484//SAM domain (Sterile alpha motif)

TESTI4012406//Kringle domain

TESTI4015471//Tropomyosins

TESTI4016110//DnaJ domain

TESTI4017137//Keratin, high sulfur B2 protein

TESTI4017575//MSP (Major sperm protein) domain

TESTI4018152//FERM domain (Band 4.1 family)

TESTI4018555//Granulins

TESTI4020092//Laminin G domain

TESTI4023555//Lectin C-type domain

TESTI4025920//Adaptin N terminal region

TESTI4026192//Domain of unknown function

TESTI4027557//Vertebrate galactoside-binding lectins//Vertebrate galactoside-binding lectins

TESTI4028429//WAP-type (Whey Acidic Protein) ‘four-disulfide core’

TESTI4028612//Major intrinsic protein

TESTI4028983//Serum amyloid A protein

TESTI4030505//Metallothionein family 5

TESTI4038492//Serum amyloid A protein

TESTI4039659//DnaJ domain

[0635] TESTI4041053//Ank repeat//Ank repeat//Ank repeat//Ank repeat//Armadillo/beta-catenin-like repeats//Armadillo/beta-catenin-like repeats//Armadillo/beta-catenin-like repeats//Armadillo/beta-catenin-like repeats//Armadillo/beta-catenin-like repeats//Armadillo/beta-catenin-like repeats

TESTI4044084//Domain of unknown function

TESTI4046487//Hantavirus nucleocapsid protein

TESTI4046819//Metallothionein//PTS HPr component phosphorylation sites

THYMU2004693//CX module

THYMU2011736//EGF-like domain//EGF-like domain//EB module//EGF-like domain//TB domain//EGF-like domain//EGF-like domain

THYMU2016204//Metallothionein

THYMU2027734//Parvovirus coat protein VP2

THYMU2038369//Regulatory subunit of type II PKA R-subunit

THYMU2038797//Lectin C-type domain

THYMU3000028//Zona pellucida-like domain

THYMU3003212//Cytidine and deoxycytidylate deaminase zinc-binding region

THYMU3003763//Leucine rich repeat N-terminal domain//Polyomavirus coat protein

THYMU3007137//PDZ domain (Also known as DHR or GLGF).//PDZ domain (Also known as DHR or GLGF).

THYMU3008171//TPR Domain

TLIVE2002338//Transforming growth factor beta like domain

TLIVE2002690//von Willebrand factor type D domain

TLIVE2003225//CUB domain//Sushi domain (SCR repeat)//CUB domain//Sushi domain (SCR repeat)

TLIVE2008229//TPR Domain//TPR Domain

TRACH2001443//TIR domain

TRACH3001427//UBX domain

TRACH3003379//Protein phosphatase 2A regulatory B subunit

TRACH3008713//NSF attachment protein

TRACH3035235//S-100/ICaBP type calcium binding domain

TUTER2000425//KRAB box

UTERU1000031//ENTH domain//VHS domain

UTERU2006115//Adaptin N terminal region

UTERU2006568//IBR domain

UTERU2019706//TCP-1/cpn60 chaperonin family//TCP-1/cpn60 chaperonin family

UTERU2035328//WW domain//WW domain//WW domain//FF domain//FF domain//FF domain

UTERU2035331//Fibrillar collagen C-terminal domain

UTERU2035452//EGF-like domain//Metallothionein//EGF-like domain

UTERU3001652//Wiskott Aldrich syndrome homology region 2

UTERU3001766//Apidaecin

UTERU3001988//TPR Domain

UTERU3002667//Polyomavirus coat protein

UTERU3003178//TPR Domain//TPR Domain//TPR Domain//TPR Domain//PPR repeat

UTERU3005585//PDZ domain (Also known as DHR or GLGF).

UTERU3007640//NSF attachment protein

UTERU3008660//TPR Domain//TPR Domain

UTERU3009871//Ank repeat//Ank repeat//Ank repeat//Ank repeat//TPR Domain//Ank repeat//Ank repeat

UTERU3009979//EGF-like domain//EGF-like domain//EGF-like domain//Trypsin Inhibitor like cysteine rich domain//EGF-like domain//Laminin G domain//Thrombospondin N-terminal -like domains//Laminin G domain

UTERU3015500//Leucine rich repeat N-terminal domain//Leucine Rich Repeat//Leucine Rich Repeat//Leucine Rich Repeat//Leucine Rich Repeat//Leucine Rich Repeat//Leucine Rich Repeat//Leucine Rich Repeat//Leucine Rich Repeat//Leucine Rich Repeat

[0636] Likewise, although the 45 clones described below have hit data in Pfam (see Example 5), it remains unclear as to which of the above-described categories each of the clones belong. However, if data for proteins comprising a similar domain or motif are accumulated and their functions are clarified in more detail, in the future these clones can be classified into any of the categories described above.

3NB692004724//KRAB box//Integrase core domain

ADRGL2000042//Nucleosome assembly protein (NAP)

BRACE2037299//Integrase core domain

BRALZ2017844//Homeobox domain

BRAWH2006207//KRAB box

BRCAN2002854//SAP domain

BRHIP2006617//TPR Domain//TPR Domain

BRHIP2012360//XPG N-terminal domain//XPG I-region

BRHIP3008314//Sir2 family

BRTHA2016318//KE2 family protein

CTONG2019822//Hepatitis C virus core protein

FCBBF3010361//Fork head domain

FEBRA2006519//Thrombospondin type 1 domain//Thrombospondin type 1 domain

[0637] FEBRA2028256//EGF-like domain//EGF-like domain//EGF-like domain//EGF-like domain//EGF-like domain//TB domain//EGF-like domain//EGF-like domain//EGF-like domain//EGF-like domain//EB module//Squash family of serine protease inhibitors//EGF-like domain//EGF-like domain

FEBRA2028516//GRIP domain

HCASM2008536//XRCC1 N terminal domain

IMR322007078//UBA domain

IMR322008651//Helix-hairpin-helix motif.

LIVER2000247//Sodium

OCBBF2003327//Thrombospondin type 1 domain//Thrombospondin type 1 domain//Thrombospondin type 1 domain

PROST2009320//LIM domain containing proteins//LIM domain containing proteins

PUAEN2006335//Formin Homology 2 Domain

SKMUS2003194//SAP domain

SPLEN2039379//Transthyretin precursor (formerly prealbumin)

SYNOV1000256//Leucine Rich Repeat//BAH domain//Leucine Rich Repeat//Leucine Rich Repeat//Leucine Rich Repeat

SYNOV2006620//Nuclear transition protein 2

SYNOV4003981//Somatomedin B domain//WAP-type (Whey Acidic Protein) ‘four-disulfide core’//Hemopexin//Hemopexin

SYNOV4005889//Apolipoprotein A1/A4/E family

TESOP2006865//KRAB box

TESTI1000266//Integrase core domain

TESTI2050780//Kazal-type serine protease inhibitor domain

TESTI4000137//Domain of unknown function

TESTI4024387//GDP dissociation inhibitor

TESTI4029528//RanBP1 domain.

TESTI4038721//Squash family of serine protease inhibitors

TESTI4046240//Sir2 family

THYMU2035078//Domain of unknown function DUF27

THYMU3000269//FAD binding domain

THYMU3000360//Integrase core domain

TRACH1000212//TSC-22/dip/bun family

TRACH2000862//Guanylate-binding protein

TRACH2019672//CRAL/TRIO domain.

TRACH2024559//IQ calmodulin-binding motif//IQ calmodulin-binding motif

UTERU2032279//Serpins (serine protease inhibitors)

UTERU2033577//KRAB box

[0638] In addition, when data for proteins are accumulated and novel domains and motifs are found, in the future the remaining clones, which had no hit data in the search with Pfam, can be classified into any of the above-described categories if a new functional domain or motif is identified by re-analyzing the deduced amino acid sequences of the clones using a homology search against an updated database.

### EXAMPLE 8

### Expression Frequency Analysis In Silico

[0639] The cDNA libraries derived from various tissues and cells as indicated in Example 1 were prepared, and cDNA clones were selected from each library at random. The 5′-end sequences were determined and the database was constructed based on the data. The database was constructed based on the nucleotide sequences of 1,402,069 clones, and thus the population of the database is large enough for the analysis.

[0640] Then, clones having a homologous sequence are categorized into a single cluster (clustering) by searching the nucleotide sequences of respective clones in this database with the program of nucleotide sequence homology search; the number of clones belonging to each cluster was determined and normalized for every library; thus, the ratio of a certain gene in each cDNA library was determined. This analysis gave the information of the expression frequency of genes in tissues and cells which were sources of the cDNA libraries.

[0641] Then, in order to analyze the expression of a gene containing the nucleotide sequence of the cDNA of the present invention in tissues and cells, the library derived from a tissue or a cell used in the large-scale cDNA analysis was subjected to the comparison of the expression levels between tissues or cells. Namely, the expression frequency was analyzed by comparing the previously normalized values between tissues and/or cells for which the nucleotide sequences of 600 or more cDNA clones had been analyzed. By this analysis, some of the genes were revealed to be involved in the pathology and functions indicated below. Each value in Tables 2 to 24 shown below represents a relative expression frequency; the higher the value, the higher the expression level. The genes which are included a part of the Tables indicate not so big difference between compared libraries, but when compared with other libraries from another tissue or cell based on Example 9, they indicate significant difference. Thus, the genes are specific in each tissue or cell, and can be considered to be useful as diagnosing markers for the disease as well as useful for analyzing molecular mechanisms.

Osteoporosis-Related Genes

[0642] Osteoporosis is a pathology in which bones are easily broken owing to overall decrease in components of bone. The onset involves the balance between the functions of osteoblast producing bone and osteoclast absorbing bone, namely bone metabolism. Thus, the genes involved in the increase of osteoclasts differentiating from precursor cells of monocyte/macrophage line (Molecular Medicine 38. 642-648. (2001)) are genes involved in osteoporosis relevant to bone metabolism.

[0643] A nucleotide sequence information-based analysis was carried out to identify the genes whose expression frequencies are higher or lower in CD34+ cell (cell expressing a glycoprotein CD34) treated with the osteoclast differentiation factor (Molecular Medicine 38. 642-648. (2001)) than in the untreated CD34+ cell, which is the precursor cell of monocyte/macrophage line. The result of comparative analysis for the frequency between the two cDNA libraries prepared from the RNA of CD34+ cells (CD34C) and from the RNA of CD34+ cells treated with the osteoclast differentiation factor (D30ST, D60ST or D90ST) showed that the genes whose expression levels were different between the two were the following 15 and 2 clones (Table 2).

BRACE3013780, BRAMY2047420, BRSTN2016470, CTONG3008894, D3OST2002182, D3OST2002648, D3OST3000169, PEBLM2005183, PUAEN2009655, TESTI4000014, TESTI4010851, TRACH2023299, TRACH2025535, TRACH3001427, UTERU2006137

HCHON2000508, TESTI2015626

[0644] These genes are involved in osteoporosis.

Genes Involved in Neural Cell Differentiation

[0645] Genes involved in neural cell differentiation are useful for treating neurological diseases. Genes with varying expression levels in response to induction of cellular differentiation in neural cells are thought to be involved in neurological diseases.

[0646] A survey was performed for genes whose expression levels are varied in response to induction of differentiation (stimulation by retinoic acid (RA) or growth inhibitor treatment after RA stimulation) in cultured cells of a neural strain, NT2. The result of comparative analysis of cDNA libraries derived from undifferentiated NT2 cells (NT2RM) and the cells subjected to the differentiation treatment (NT2RP, NT2RI or NT2NE) showed that the genes whose expression levels were different between the two were the following 174 and 30 clones (Table 3).

[0647] BNGH42007788, BRACE1000186, BRACE2006319, BRACE2014306, BRACE2015058, BRACE2044286, BRACE3010428, BRAMY2044078, BRAWH2014645, BRAWH2014662, BRAWH3002574, BRAWH3003992, BRAWH3005981, BRAWH3007592, BRCAN2009432, BRCAN2016619, BRCAN2028355, BRHIP2001074, BRHIP2007741, BRHIP2014228, BRHIP2024146, BRHIP3007586, BRHIP3018797, BRTHA2003461, BRTHA3000633, BRTHA3003490, COLON2001721, CTONG1000087, CTONG2008233, CTONG2020638, CTONG2028124, CTONG3003905, CTONG3008894, CTONG3009028, CTONG3009239, DFNES2011499, FCBBF3001977, FEBRA1000030, FEBRA2006396, FEBRA2007801, HCHON2000028, HCHON2000244, HCHON2001084, HCHON2001217, HCHON2001548, HCHON2006250, HEART1000074, HHDPC1000118, HSYRA2009075, IMR322000127, IMR322001380, KIDNE2000665, KIDNE2002252, MESAN2006563, MESAN2012054, MESAN2015515, NT2NE2003252, NT2NE2005890, NT2NE2006531, NT2NE2006909, NT2NE2008060, NT2RI2003993, NT2RI2004618, NT2RI2005166, NT2RI2006686, NT2RI2008724, NT2RI2009855, NT2RI2011422, NT2RI2011683, NT2RI2012659, NT2RI2012990, NT2RI2013357, NT2RI2014247, NT2RI2014551, NT2RI2014733, NT2RI2016128, NT2RI2018311, NT2RI2018883, NT2RI2019751, NT2RI2023303, NT2RI2025909, NT2RI2025957, NT2RI2027081, NT2RI2027396, NT2RI3000622, NT2RI3001263, NT2RI3001515, NT2RI3002303, NT2RI3002842, NT2RI3002892, NT2RI3003031, NT2RI3003095, NT2RI3003162, NT2RI3003382, NT2RI3003409, NT2RI3004381, NT2RI3004510, NT2RI3005202, NT2RI3005403, NT2RI3005724, NT2RI3006132, NT2RI3006171, NT2RI3006284, NT2RI3006340, NT2RI3006376, NT2RI3006673, NT2RI3006796, NT2RI3007065, NT2RI3007158, NT2RI3007291, NT2RI3007543, NT2RI3007757, NT2RI3007978, NT2RI3008055, NT2RI3008162, NT2RI3008652, NT2RI3008697, NT2RI3008974, NT2RI3009158, NT2RP7000359, NT2RP7000466, NT2RP7004027, NT2RP7004123, NT2RP7005118, NT2RP7005529, NT2RP7005846, NT2RP7009030, NT2RP7009147, NT2RP7009867, NT2RP7010128, NT2RP7010599, NT2RP7011570, NT2RP7013795, NT2RP7014005, NT2RP7015512, NT2RP7017365, NT2RP7017474, NT2RP7017546, NT2RP8000137, NT2RP8000296, NT2RP8000483, NTONG2005969, OCBBF2007028, OCBBF2037068, PLACE7000514, PUAEN2007044, SPLEN2002467, SPLEN2006122, SPLEN2028914, SPLEN2031547, SYNOV4002346, SYNOV4007671, SYNOV4008440, TESOP2002273, TESTI2003573, TESTI4000014, TESTI4009286, TESTI4010851, TESTI4012702, TESTI4029671, TESTI4037156, THYMU3000133, TRACH1000205, TRACH2005811, TRACH2007834, TRACH2025535, TRACH3001427, TRACH3002192, TRACH3004721, TRACH3008093, TRACH3008535, TRACH3008713, UTERU2002410, UTERU2023175

[0648] ADRGL2000042, BRACE2003609, BRACE3003026, BRHIP3000017, CTONG2020411, FCBBF1000509, FCBBF3027854, FEBRA2028516, HCHON2000508, IMR322001879, NT2RI2005772, NT2RI2008952, NT2RI2009583, NT2RI2018448, NT2RI2027157, NT2RI3000174, NT2RI3001132, NT2RI3002557, NT2RI3005928, NT2RI3007167, NT2RI3007443, NT2RP7008435, NT2RP8000521, OCBBF2006987, PERIC2007068, TESTI2015626, TESTI4015442, TLIVE2002046, TRACH3000134, TUTER2000057

[0649] These genes are neurological disease-related genes.

Genes Involved in Alzheimer's Disease

[0650] Alzheimer's disease is a cranial neurological disease that is characterized by memory loss. As the disease advances, patients can no longer support themselves and require nursing. Alzheimer's disease eventually leads to atrophication of the brain itself. Environmental factors such as stress, and vascular factors such as hypertension and cholesterolemia, are assumed, but not confirmed, to contribute to the onset of Alzheimer's disease. Genes whose expression levels differ between normal brain tissues and tissues affected with Alzheimer's disease are expected to be involved in Alzheimer's disease. Such genes can be used to elucidate the disease's onset mechanism and in genetic diagnosis. cDNA libraries derived from the cerebral cortex of Alzheimer patients (BRALZ and BRASW), and a library derived from whole tissues of a normal brain (BRAWH) were analyzed and compared (Table 4). The results showed that genes whose expression levels differed between the two are the following 250 and 41 clones listed below.

[0651] ASTRO1000009, BLADE2008398, BRACE1000186, BRACE1000258, BRACE1000533, BRACE2005457, BRACE2010489, BRACE2014657, BRACE2035381, BRACE2044286, BRACE2045954, BRACE3000787, BRACE3003192, BRACE3005499, BRACE3007480, BRACE3009237, BRACE3009724, BRACE3009747, BRACE3010428, BRACE3011271, BRACE3011421, BRACE3012364, BRACE3022769, BRACE3026735, BRACE3031838, BRALZ2011796, BRALZ2012183, BRALZ2012848, BRALZ2014484, BRALZ2016085, BRALZ2016498, BRALZ2017359, BRAMY2003008, BRAMY2005052, BRAMY2019300, BRAMY2019963, BRAMY2036567, BRAMY2037823, BRAMY2040592, BRAMY3002803, BRAMY3004224, BRAMY3005091, BRASW1000053, BRASW1000125, BRAWH1000127, BRAWH2001395, BRAWH2001671, BRAWH2001940, BRAWH2001973, BRAWH2002560, BRAWH2002761, BRAWH2005315, BRAWH2007658, BRAWH2010000, BRAWH2010084, BRAWH2010536, BRAWH2012162, BRAWH2012326, BRAWH2013294, BRAWH2013871, BRAWH2014414, BRAWH2014645, BRAWH2014662, BRAWH2014876, BRAWH2014954, BRAWH2016221, BRAWH2016439, BRAWH2016702, BRAWH2016724, BRAWH3000078, BRAWH3000100, BRAWH3000314, BRAWH3000491, BRAWH3001326, BRAWH3001475, BRAWH3001891, BRAWH3002574, BRAWH3002600, BRAWH3002819, BRAWH3002821, BRAWH3003522, BRAWH3003555, BRAWH3003727, BRAWH3003801, BRAWH3003992, BRAWH3004453, BRAWH3004666, BRAWH3005132, BRAWH3005422, BRAWH3005912, BRAWH3005981, BRAWH3006548, BRAWH3006792, BRAWH3007221, BRAWH3007506, BRAWH3007592, BRAWH3007726, BRAWH3007783, BRAWH3008341, BRAWH3008697, BRAWH3008931, BRAWH3009297, BRCOC2003213, BRCOC2014033, BRCOC2020142, BRHIP2000920, BRHIP2005719, BRHIP2007741, BRHIP2014228, BRHIP2024146, BRHIP2026288, BRHIP3000339, BRHIP3006683, BRHIP3007586, BRHIP3008405, BRHIP3018797, BRSSN2000684, BRSSN2011738, BRSSN2014299, BRSTN2008052, BRSTN2015015, BRSTN2016470, BRTHA1000311, BRTHA2008335, BRTHA3002427, BRTHA3003490, BRTHA3008520, BRTHA3017848, COLON2001721, CTONG2017500, CTONG2028124, CTONG3000657, CTONG3001123, CTONG3009328, FCBBF2001183, FCBBF3001977, FEBRA2007544, FEBRA2007801, FEBRA2020886, FEBRA2028618, HCASM2007047, HCHON2000244, HCHON2000626, HCHON2001217, HCHON2002676, HCHON2006250, HEART1000074, HHDPC1000118, HLUNG2002465, IMR322000127, IMR322001380, IMR322002035, KIDNE2006580, MESAN2006563, MESAN2012054, MESTC1000042, NOVAR2001783, NT2NE2006909, NT2RI2008724, NT2RI2012659, NT2RI2014733, NT2RI3002892, NT2RI3006284, NT2RI3006673, NT2RI3007543, NT2RI3008055, NT2RP7005529, NT2RP7009147, NT2RP7014005, NT2RP7017474, NTONG2005969, OCBBF2001794, OCBBF2006005, OCBBF2006764, OCBBF2007028, OCBBF2007114, OCBBF2010140, OCBBF2021286, OCBBF2023162, OCBBF2024850, OCBBF2028935, OCBBF2036743, OCBBF2038317, OCBBF3000483, OCBBF3008230, PEBLM2004666, PLACE6001185, PUAEN2005930, PUAEN2006701, PUAEN2007044, PUAEN2009655, SMINT2001818, SPLEN2028914, SPLEN2031424, SPLEN2031547, SPLEN2034781, SPLEN2036932, SYNOV2014400, SYNOV4002346, SYNOV4002883, SYNOV4007430, SYNOV4007671, SYNOV4008440, TESOP2002273, TESOP2002451, TESTI4000014, TESTI4000209, TESTI4001100, TESTI4006137, TESTI4008797, TESTI4009286, TESTI4010851, TESTI4013817, TESTI4014694, TESTI4021478, TESTI4022936, TESTI4024420, TESTI4027821, THYMU2001090, THYMU2033308, THYMU2035735, THYMU2039315, THYMU3001234, THYMU3008171, TKIDN2009641, TKIDN2009889, TKIDN2015788, TRACH1000205, TRACH2001549, TRACH2005811, TRACH2006049, TRACH2007834, TRACH2008300, TRACH2025535, TRACH3001427, TRACH3002192, TRACH3004068, TRACH3004721, TRACH3005294, TRACH3007479, TRACH3008093, TRACH3009455, UTERU2005621, UTERU2006115, UTERU2019706, UTERU2023039, UTERU2026203, UTERU3005230, UTERU3007640, UTERU3009871

[0652] ADRGL2000042, BLADE2006830, BRACE2003609, BRALZ2017844, BRAMY3004800, BRAWH1000369, BRAWH2006207, BRAWH2006395, BRAWH2008993, BRAWH2009393, BRAWH2010552, BRAWH3007441, BRAWH3009017, BRHIP2005271, BRHIP3000017, BRHIP3026052, BRTHA2018443, BRTHA3003000, CTONG2020374, CTONG2020378, CTONG2024031, FCBBF1000509, FEBRA2001990, FEBRA2006519, FEBRA2028516, HCHON2000743, IMR322001879, NT2RI2009583, OCBBF2008144, PERIC2007068, PUAEN2006335, SPLEN2039379, TESTI4001984, TESTI4008058, TESTI4025268, TESTI4032090, THYMU3000360, TLIVE2002046, TRACH3000134, UTERU2021820, UTERU2028734

[0653] These genes are involved in Alzheimer's disease.

Genes Involved in Parkinson's Disease

[0654] Parkinson's disease is a cranial neurological disease characterized by impaired production of the neurotransmitter dopamine in the substantia nigra in the brain. This results in dyskinesia, such as hand tremors, and impaired body movement due to muscular rigidity. Normally, the number of brain neurons gradually decreases with age. However, compared to healthy people, patients with Parkinson's disease experience a rapid and marked decrease in the number of neurons in their substantia nigra. Genes whose expression levels differ between tissues of the whole brain and the nigra are expected to be involved in Parkinson's disease. These genes exhibit nigra-specific alterations in their expression levels, and can be used to elucidate the disease onset mechanism and in gene diagnosis. cDNA libraries derived from the substantia nigra (BRSSN) and a library derived from whole tissues of a normal brain (BRAWH) were analyzed and compared (Table 5). Genes whose expression levels differed between the two were the 250 clones and 40 clones listed below.

[0655] ASTRO1000009, BLADE2008398, BRACE1000186, BRACE1000258, BRACE1000533, BRACE2005457, BRACE2010489, BRACE2014657, BRACE2035381, BRACE2044286, BRACE2045954, BRACE3000787, BRACE3003192, BRACE3005499, BRACE3007480, BRACE3009237, BRACE3009724, BRACE3009747, BRACE3010428, BRACE3011271, BRACE3011421, BRACE3012364, BRACE3013780, BRACE3022769, BRACE3026735, BRACE3031838, BRALZ2011796, BRAMY2003008, BRAMY2005052, BRAMY2019300, BRAMY2019963, BRAMY2036567, BRAMY2037823, BRAMY2040592, BRAMY2047420, BRAMY3002803, BRAMY3004224, BRAMY3005091, BRAWH1000127, BRAWH2001395, BRAWH2001671, BRAWH2001940, BRAWH2001973, BRAWH2002560, BRAWH2002761, BRAWH2005315, BRAWH2007658, BRAWH2010000, BRAWH2010084, BRAWH2010536, BRAWH2012162, BRAWH2012326, BRAWH2013294, BRAWH2013871, BRAWH2014414, BRAWH2014645, BRAWH2014662, BRAWH2014876, BRAWH2014954, BRAWH2016221, BRAWH2016439, BRAWH2016702, BRAWH2016724, BRAWH3000078, BRAWH3000100, BRAWH3000314, BRAWH3000491, BRAWH3001326, BRAWH3001475, BRAWH3001891, BRAWH3002574, BRAWH3002600, BRAWH3002819, BRAWH3002821, BRAWH3003522, BRAWH3003555, BRAWH3003727, BRAWH3003801, BRAWH3003992, BRAWH3004453, BRAWH3004666, BRAWH3005132, BRAWH3005422, BRAWH3005912, BRAWH3005981, BRAWH3006548, BRAWH3006792, BRAWH3007221, BRAWH3007506, BRAWH3007592, BRAWH3007726, BRAWH3007783, BRAWH3008341, BRAWH3008697, BRAWH3008931, BRAWH3009297, BRCOC2003213, BRCOC2014033, BRCOC2020142, BRHIP2000920, BRHIP2005719, BRHIP2007741, BRHIP2014228, BRHIP2024146, BRHIP3000339, BRHIP3006683, BRHIP3007586, BRHIP3008405, BRHIP3018797, BRSSN2000684, BRSSN2003086, BRSSN2004496, BRSSN2004719, BRSSN2006892, BRSSN2008549, BRSSN2008797, BRSSN2011262, BRSSN2011738, BRSSN2013874, BRSSN2014299, BRSSN2014424, BRSSN2014556, BRSSN2018581, BRSSN2018925, BRSTN2008052, BRSTN2015015, BRSTN2016470, BRTHA1000311, BRTHA2003461, BRTHA2008335, BRTHA3002427, BRTHA3003490, BRTHA3008520, BRTHA3017848, COLON2001721, CTONG2017500, CTONG2028124, CTONG3000657, CTONG3001123, CTONG3009328, FCBBF2001183, FCBBF3001977, FEBRA2007544, FEBRA2007801, FEBRA2020886, FEBRA2024136, FEBRA2025427, FEBRA2028618, HCASM2007047, HCHON2000244, HCHON2000626, HCHON2001217, HCHON2002676, HCHON2006250, HEART1000074, HHDPC1000118, HLUNG2002465, IMR322000127, IMR322002035, KIDNE2006580, MESAN2006563, MESAN2012054, MESTC1000042, NOVAR2001783, NT2NE2006909, NT2RI2008724, NT2RI2012659, NT2RI2014733, NT2RI3002892, NT2RI3006284, NT2RI3006673, NT2RI3007543, NT2RI3008055, NT2RP7005529, NT2RP7009147, NT2RP7014005, NT2RP7017474, OCBBF2001794, OCBBF2006005, OCBBF2006764, OCBBF2007028, OCBBF2010140, OCBBF2021286, OCBBF2024850, OCBBF2028935, OCBBF2036743, OCBBF2038317, OCBBF3000483, OCBBF3008230, PEBLM2004666, PLACE6001185, PUAEN2005930, PUAEN2006701, PUAEN2007044, PUAEN2009655, SPLEN2028914, SPLEN2031424, SPLEN2031547, SPLEN2034781, SPLEN2036932, SYNOV2014400, SYNOV4002346, SYNOV4002883, SYNOV4007430, SYNOV4008440, TESOP2002451, TESTI4000014, TESTI4000209, TESTI4001100, TESTI4006137, TESTI4008797, TESTI4009286, TESTI4010851, TESTI4013817, TESTI4014694, TESTI4021478, TESTI4022936, TESTI4024420, TESTI4027821, TESTI4037156, THYMU2001090, THYMU2033308, THYMU2035735, THYMU2039315, THYMU3001234, THYMU3008171, TKIDN2009641, TKIDN2009889, TKIDN2015788, TRACH1000205, TRACH2001549, TRACH2005811, TRACH2006049, TRACH2007834, TRACH2008300, TRACH2025535, TRACH3001427, TRACH3002192, TRACH3004721, TRACH3005294, TRACH3007479, TRACH3008093, TRACH3009455, UTERU2006115, UTERU2019706, UTERU2023039, UTERU2026203, UTERU3005230, UTERU3007640, UTERU3009871

[0656] ADRGL2000042, BLADE2006830, BRACE2003609, BRAMY3004800, BRAWH1000369, BRAWH2006207, BRAWH2006395, BRAWH2008993, BRAWH2009393, BRAWH2010552, BRAWH3007441, BRAWH3009017, BRHIP2005271, BRHIP3000017, BRTHA2018443, BRTHA3003000, CTONG2020374, CTONG2020378, CTONG2024031, FCBBF1000509, FEBRA2001990, FEBRA2006519, FEBRA2028516, HCHON2000743, IMR322001879, NT2RI2009583, OCBBF2008144, PERIC2007068, PUAEN2006335, SPLEN2039379, TESTI2015626, TESTI4001984, TESTI4008058, TESTI4025268, TESTI4032090, THYMU3000360, TLIVE2002046, TRACH3000134, UTERU2021820, UTERU2028734

[0657] These genes are involved in Parkinson's disease.

Genes Involved in Short-Term Memory and Dementia

[0658] In the brain, the hippocampus is a highly important memory-related area. The hippocampus functions to establish a memory by judging whether acquired information is necessary, and then accumulating the memory in another area of the brain. According to clinical findings, patients can retain a new memory for only about five minutes with an abnormal, or at the worst without a hippocampus. Some dementia patients are presumed to have hippocampus abnormalities. Thus, genes whose expression levels differ between tissues of the whole brain and the hippocampus are expected to be involved in memory or dementia. Such genes can be used to elucidate the mechanism underlying the memory and in gene diagnosis. cDNA libraries derived from the hippocampus (BRHIP) and from the whole tissues of a normal brain (BRAWH) were analyzed and compared (Table 6). Genes whose expression levels differed between the two were the 370 clones and 59 clones listed below.

[0659] ASTRO1000009, BLADE2001371, BLADE2008398, BNGH42007788, BRACE1000186, BRACE1000258, BRACE1000533, BRACE2005457, BRACE2010489, BRACE2014657, BRACE2015058, BRACE2018762, BRACE2030341, BRACE2035381, BRACE2044286, BRACE2045954, BRACE3000787, BRACE3003192, BRACE3005499, BRACE3007480, BRACE3009237, BRACE3009724, BRACE3009747, BRACE3010428, BRACE3011271, BRACE3011421, BRACE3012364, BRACE3018963, BRACE3022769, BRACE3026735, BRACE3031838, BRALZ2011796, BRAMY2003008, BRAMY2005052, BRAMY2019300, BRAMY2019963, BRAMY2031317, BRAMY2036567, BRAMY2037823, BRAMY2040592, BRAMY2044078, BRAMY3002803, BRAMY3004224, BRAMY3005091, BRAMY3009811, BRAWH1000127, BRAWH2001395, BRAWH2001671, BRAWH2001940, BRAWH2001973, BRAWH2002560, BRAWH2002761, BRAWH2005315, BRAWH2007658, BRAWH2010000, BRAWH2010084, BRAWH2010536, BRAWH2012162, BRAWH2012326, BRAWH2013294, BRAWH2013871, BRAWH2014414, BRAWH2014645, BRAWH2014662, BRAWH2014876, BRAWH2014954, BRAWH2016221, BRAWH2016439, BRAWH2016702, BRAWH2016724, BRAWH3000078, BRAWH3000100, BRAWH3000314, BRAWH3000491, BRAWH3001326, BRAWH3001475, BRAWH3001891, BRAWH3002574, BRAWH3002600, BRAWH3002819, BRAWH3002821, BRAWH3003522, BRAWH3003555, BRAWH3003727, BRAWH3003801, BRAWH3003992, BRAWH3004453, BRAWH3004666, BRAWH3005132, BRAWH3005422, BRAWH3005912, BRAWH3005981, BRAWH3006548, BRAWH3006792, BRAWH3007221, BRAWH3007506, BRAWH3007592, BRAWH3007726, BRAWH3007783, BRAWH3008341, BRAWH3008697, BRAWH3008931, BRAWH3009297, BRCAN2020710, BRCAN2028355, BRCOC2003213, BRCOC2014033, BRCOC2020142, BRHIP2000691, BRHIP2000819, BRHIP2000826, BRHIP2000920, BRHIP2001074, BRHIP2001805, BRHIP2001927, BRHIP2002122, BRHIP2002172, BRHIP2002346, BRHIP2003242, BRHIP2003786, BRHIP2003917, BRHIP2004312, BRHIP2004359, BRHIP2004814, BRHIP2004883, BRHIP2005236, BRHIP2005354, BRHIP2005600, BRHIP2005719, BRHIP2005752, BRHIP2005932, BRHIP2006800, BRHIP2007616, BRHIP2007741, BRHIP2009340, BRHIP2009414, BRHIP2009474, BRHIP2013699, BRHIP2014228, BRHIP2021615, BRHIP2022221, BRHIP2024146, BRHIP2024165, BRHIP2026061, BRHIP2026288, BRHIP2029176, BRHIP2029393, BRHIP3000339, BRHIP3000526, BRHIP3001283, BRHIP3006683, BRHIP3007483, BRHIP3007586, BRHIP3008183, BRHIP3008313, BRHIP3008344, BRHIP3008405, BRHIP3008565, BRHIP3008598, BRHIP3008997, BRHIP3009099, BRHIP3009448, BRHIP3011241, BRHIP3013765, BRHIP3013897, BRHIP3015751, BRHIP3016213, BRHIP3018797, BRHIP3020182, BRHIP3024118, BRHIP3024533, BRHIP3024725, BRHIP3025161, BRHIP3025702, BRHIP3026097, BRHIP3027137, BRHIP3027854, BRSSN2000684, BRSSN2004719, BRSSN2008549, BRSSN2011738, BRSSN2014299, BRSTN2008052, BRSTN2015015, BRSTN2016470, BRSTN2018083, BRTHA1000311, BRTHA2002442, BRTHA2008335, BRTHA3000297, BRTHA3001721, BRTHA3002427, BRTHA3003490, BRTHA3005046, BRTHA3008520, BRTHA3008778, BRTHA3009090, BRTHA3015910, BRTHA3017848, COLON2001721, CTONG1000087, CTONG1000088, CTONG1000467, CTONG2000042, CTONG2008233, CTONG2009423, CTONG2017500, CTONG2019788, CTONG2028124, CTONG3000657, CTONG3001123, CTONG3001370, CTONG3002412, CTONG3004072, CTONG3008894, CTONG3009239, CTONG3009328, DFNES2011499, FCBBF2001183, FCBBF3001977, FEBRA2000253, FEBRA2007544, FEBRA2007801, FEBRA2008287, FEBRA2010719, FEBRA2020886, FEBRA2028618, HCASM2007047, HCHON2000028, HCHON2000244, HCHON2000626, HCHON2001217, HCHON2002676, HCHON2005921, HCHON2006250, HEART1000074, HEART2007031, HHDPC1000118, HLUNG2002465, HLUNG2003003, IMR322000127, IMR322001380, IMR322002035, KIDNE2005543, KIDNE2006580, MESAN2006563, MESAN2012054, MESTC1000042, NOVAR2001783, NT2NE2006909, NT2RI2008724, NT2RI2012659, NT2RI2014733, NT2RI2018311, NT2RI3001515, NT2RI3002892, NT2RI3004510, NT2RI3005724, NT2RI3006284, NT2RI3006673, NT2RI3007291, NT2RI3007543, NT2RI3008055, NT2RP7005529, NT2RP7009147, NT2RP7014005, NT2RP7017474, OCBBF2001794, OCBBF2003819, OCBBF2006005, OCBBF2006151, OCBBF2006764, OCBBF2007028, OCBBF2007068, OCBBF2010140, OCBBF2020741, OCBBF2021286, OCBBF2024719, OCBBF2024850, OCBBF2028935, OCBBF2036743, OCBBF2038317, OCBBF3000296, OCBBF3000483, OCBBF3008230, PEBLM2004666, PLACE6001185, PUAEN2005930, PUAEN2006701, PUAEN2007044, PUAEN2009655, SPLEN2010912, SPLEN2012624, SPLEN2028914, SPLEN2031424, SPLEN2031547, SPLEN2034781, SPLEN2036932, SYNOV2014400, SYNOV4002346, SYNOV4002883, SYNOV4007430, SYNOV4008440, TESOP2002451, TESTI2049246, TESTI4000014, TESTI4000209, TESTI4001100, TESTI4006137, TESTI4008797, TESTI4009286, TESTI4010377, TESTI4010851, TESTI4010928, TESTI4011161, TESTI4013817, TESTI4014159, TESTI4014694, TESTI4014818, TESTI4021478, TESTI4022936, TESTI4024420, TESTI4027821, TESTI4037156, THYMU2001090, THYMU2023967, THYMU2025707, THYMU2031341, THYMU2033308, THYMU2035735, THYMU2037226, THYMU2039315, THYMU3001234, THYMU3001379, THYMU3004835, THYMU3007137, THYMU3008171, TKIDN2009641, TKIDN2009889, TKIDN2015788, TRACH1000205, TRACH2001549, TRACH2005811, TRACH2006049, TRACH2007834, TRACH2008300, TRACH2025535, TRACH3000014, TRACH3001427, TRACH3002192, TRACH3004721, TRACH3005294, TRACH3007479, TRACH3008093, TRACH3009455, TUTER1000122, TUTER2000904, UTERU2004929, UTERU2006115, UTERU2019706, UTERU2021163, UTERU2023039, UTERU2026203, UTERU2030213, UTERU3001572, UTERU3003135, UTERU3005230, UTERU3007640, UTERU3009259, UTERU3009871

[0660] ADRGL2000042, BLADE2006830, BRACE2003609, BRAMY3004800, BRAWH1000369, BRAWH2006207, BRAWH2006395, BRAWH2008993, BRAWH2009393, BRAWH2010552, BRAWH3007441, BRAWH3009017, BRHIP2002722, BRHIP2003272, BRHIP2005271, BRHIP2005724, BRHIP2006617, BRHIP2008389, BRHIP2012360, BRHIP2017553, BRHIP2026877, BRHIP3000017, BRHIP3000240, BRHIP3008314, BRHIP3026052, BRTHA2018443, BRTHA3003000, CTONG2020374, CTONG2020378, CTONG2024031, CTONG3004726, FCBBF1000509, FEBRA2001990, FEBRA2006519, FEBRA2028516, HCHON2000743, IMR322001879, NT2RI2009583, OCBBF2006987, OCBBF2008144, OCBBF2030116, PERIC2007068, PUAEN2006335, SPLEN2039379, TESTI2015626, TESTI4000214, TESTI4001984, TESTI4008058, TESTI4013894, TESTI4025268, TESTI4025547, TESTI4026207, TESTI4032090, THYMU3000360, TLIVE2002046, TRACH3000134, UTERU2008040, UTERU2021820, UTERU2028734

[0661] These genes are involved in memory and dementia.

Genes Involved in Equilibrium Sense and Movement Function

[0662] The cerebellum is the center of equilibrium sense, muscular movement, and motor learning. This area is thought to be involved in motor control, and smooth movements are achieved unconsciously due to cerebellum action. Recent studies have elucidated that the cerebellum participates in not only simple movements but also in establishing higher-order movements such as reading and writing. Thus, genes whose expression levels differ between tissues of the whole brain and the cerebellum are expected to be involved in equilibrium sense or motor function, which can be useful for elucidating the molecular mechanism controlled by the brain. cDNA libraries derived from the cerebellum (BRACE) and from the whole tissues of a normal brain (BRAWH) were analyzed and compared (Table 7). Genes whose expression levels differed between the two were the 488 clones and 66 clones listed below.

[0663] ADRGL2009146, ADRGL2012038, ASTRO1000009, ASTRO2003960, BLADE1000176, BLADE2004089, BLADE2008398, BRACE1000186, BRACE1000258, BRACE1000533, BRACE1000572, BRACE2003639, BRACE2005457, BRACE2006319, BRACE2008594, BRACE201.0489, BRACE2011747, BRACE2014306, BRACE2014475, BRACE2014657, BRACE2015058, BRACE2015314, BRACE2016981, BRACE2018762, BRACE2024627, BRACE2026836, BRACE2027258, BRACE2027970, BRACE2028970, BRACE2029112, BRACE2029849, BRACE2030326, BRACE2030341, BRACE2030884, BRACE2031154, BRACE2031389, BRACE2031527, BRACE2031531, BRACE2031899, BRACE2032044, BRACE2032329, BRACE2032385, BRACE2032538, BRACE2032823, BRACE2033720, BRACE2035381, BRACE2035441, BRACE2036005, BRACE2036096, BRACE2036830, BRACE2036834, BRACE2037847, BRACE2038114, BRACE2038329, BRACE2038551, BRACE2039249, BRACE2039327, BRACE2039475, BRACE2039734, BRACE2040138, BRACE2040325, BRACE2041009, BRACE2041200, BRACE2041264, BRACE2042550, BRACE2043142, BRACE2043248, BRACE2043349, BRACE2043665, BRACE2044286, BRACE2044816, BRACE2044949, BRACE2045300, BRACE2045428, BRACE2045596, BRACE2045772, BRACE2045947, BRACE2045954, BRACE2046251, BRACE2046295, BRACE2047011, BRACE2047350, BRACE2047377, BRACE2047385, BRACE3000071, BRACE3000697, BRACE3000787, BRACE3000840, BRACE3000973, BRACE3001002, BRACE3001217, BRACE3001391, BRACE3001595, BRACE3001754, BRACE3002298, BRACE3002390, BRACE3002508, BRACE3003004, BRACE3003192, BRACE3003595, BRACE3003698, BRACE3004058, BRACE3004113, BRACE3004150, BRACE3004358, BRACE3004435, BRACE3004772, BRACE3004783, BRACE3004843, BRACE3004880, BRACE3005145, BRACE3005225, BRACE3005430, BRACE3005499, BRACE3006185, BRACE3006226, BRACE3006462, BRACE3006872, BRACE3007322, BRACE3007472, BRACE3007480, BRACE3007559, BRACE3007625, BRACE3007642, BRACE3007767, BRACE3008036, BRACE3008092, BRACE3008137, BRACE3008384, BRACE3008720, BRACE3008772, BRACE3009090, BRACE3009237, BRACE3009297, BRACE3009377, BRACE3009574, BRACE3009701, BRACE3009708, BRACE3009724, BRACE3009747, BRACE3010397, BRACE3010428, BRACE3011271, BRACE3011421, BRACE3011505, BRACE3012364, BRACE3012930, BRACE3013119, BRACE3013576, BRACE3013740, BRACE3013780, BRACE3014005, BRACE3014068, BRACE3014231, BRACE3014317, BRACE3014807, BRACE3015027, BRACE3015121, BRACE3015262, BRACE3015521, BRACE3015894, BRACE3016884, BRACE3018308, BRACE3018963, BRACE3019055, BRACE3019084, BRACE3020194, BRACE3020286, BRACE3020594, BRACE3022769, BRACE3023912, BRACE3024073, BRACE3024659, BRACE3024662, BRACE3025153, BRACE3025457, BRACE3025531, BRACE3025630, BRACE3026008, BRACE3026075, BRACE3026735, BRACE3027242, BRACE3027326, BRACE3027478, BRACE3030103, BRACE3031838, BRACE3032983, BRACE3040856, BRACE3045033, BRALZ2011796, BRAMY2003008, BRAMY2005052, BRAMY2019300, BRAMY2019963, BRAMY2020058, BRAMY2030098, BRAMY2031317, BRAMY2036567, BRAMY2037823, BRAMY2039872, BRAMY2040592, BRAMY2044078, BRAMY2047420, BRAMY3002620, BRAMY3002803, BRAMY3004224, BRAMY3005091, BRAMY3005932, BRAMY4000229, BRAWH1000127, BRAWH2001395, BRAWH2001671, BRAWH2001940, BRAWH2001973, BRAWH2002560, BRAWH2002761, BRAWH2005315, BRAWH2007658, BRAWH2010000, BRAWH2010084, BRAWH2010536, BRAWH2012162, BRAWH2012326, BRAWH2013294, BRAWH2013871, BRAWH2014414, BRAWH2014645, BRAWH2014662, BRAWH2014876, BRAWH2014954, BRAWH2016221, BRAWH2016439, BRAWH2016702, BRAWH2016724, BRAWH3000078, BRAWH3000100, BRAWH3000314, BRAWH3000491, BRAWH3001326, BRAWH3001475, BRAWH3001891, BRAWH3002574, BRAWH3002600, BRAWH3002819, BRAWH3002821, BRAWH3003522, BRAWH3003555, BRAWH3003727, BRAWH3003801, BRAWH3003992, BRAWH3004453, BRAWH3004666, BRAWH3005132, BRAWH3005422, BRAWH3005912, BRAWH3005981, BRAWH3006548, BRAWH3006792, BRAWH3007221, BRAWH3007506, BRAWH3007592, BRAWH3007726, BRAWH3007783, BRAWH3008341, BRAWH3008697, BRAWH3008931, BRAWH3009297, BRCAN2009432, BRCAN2010376, BRCAN2015371, BRCAN2020710, BRCOC2003213, BRCOC2007034, BRCOC2014033, BRCOC2020142, BRHIP2000920, BRHIP2004359, BRHIP2005719, BRHIP2005752, BRHIP2007741, BRHIP2013699, BRHIP2014228, BRHIP2024146, BRHIP3000339, BRHIP3006683, BRHIP3007586, BRHIP3008313, BRHIP3008405, BRHIP3018797, BRSSN2000684, BRSSN2006892, BRSSN2011262, BRSSN2011738, BRSSN2014299, BRSTN2008052, BRSTN2010750, BRSTN2015015, BRSTN2016470, BRTHA1000311, BRTHA2008335, BRTHA2008955, BRTHA2011194, BRTHA3001721, BRTHA3002427, BRTHA3003490, BRTHA3008520, BRTHA3009090, BRTHA3017848, COLON2001721, CTONG2008233, CTONG2017500, CTONG2028124, CTONG3000657, CTONG3001123, CTONG3005813, CTONG3008894, CTONG3009328, DFNES2011499, FCBBF2001183, FCBBF3001977, FEBRA2006396, FEBRA2007544, FEBRA2007708, FEBRA2007801, FEBRA2008287, FEBRA2020886, FEBRA2021966, FEBRA2026984, FEBRA2028618, HCASM2007047, HCHON2000244, HCHON2000626, HCHON2001217, HCHON2002676, HCHON2005921, HCHON2006250, HEART1000074, HHDPC1000118, HLUNG2002465, IMR322000127, IMR322001380, IMR322002035, KIDNE2000665, KIDNE2006580, MESAN2006563, MESAN2012054, MESTC1000042, NB9N41000340, NESOP2001752, NOVAR2001783, NT2NE2006909, NT2RI2005166, NT2RI2008724, NT2RI2012659, NT2RI2014733, NT2RI2019751, NT2RI3002892, NT2RI3003382, NT2RI3004510, NT2RI3005724, NT2RI3006284, NT2RI3006673, NT2RI3007291, NT2RI3007543, NT2RI3008055, NT2RP7004123, NT2RP7005529, NT2RP7009147, NT2RP7010599, NT2RP7014005, NT2RP7017474, NTONG2005969, OCBBF2001794, OCBBF2003819, OCBBF2006005, OCBBF2006151, OCBBF2006764, OCBBF2007028, OCBBF2010140, OCBBF2020343, OCBBF2020741, OCBBF2021286, OCBBF2022351, OCBBF2024850, OCBBF2025527, OCBBF2028935, OCBBF2036743, OCBBF2038317, OCBBF3000483, OCBBF3007516, OCBBF3008230, PEBLM2004666, PERIC2000889, PLACE6001185, PUAEN2002489, PUAEN2005930, PUAEN2006701, PUAEN2007044, PUAEN2009655, SPLEN2010912, SPLEN2012624, SPLEN2027268, SPLEN2028914, SPLEN2031424, SPLEN2031547, SPLEN2034781, SPLEN2036932, SPLEN2037194, SYNOV2014400, SYNOV4002346, SYNOV4002883, SYNOV4007430, SYNOV4007671, SYNOV4008440, TESOP2002273, TESOP2002451, TESOP2002950, TESTI1000330, TESTI4000014, TESTI4000209, TESTI4000349, TESTI4001100, TESTI4001561, TESTI4006137, TESTI4008797, TESTI4009286, TESTI4010851, TESTI4011161, TESTI4013675, TESTI4013817, TESTI4014159, TESTI4014306, TESTI4014694, TESTI4021478, TESTI4022936, TESTI4024420, TESTI4027821, TESTI4037156, TESTI4046819, THYMU2001090, THYMU2016523, THYMU2023967, THYMU2030264, THYMU2033308, THYMU2035735, THYMU2039315, THYMU2039780, THYMU3001083, THYMU3001234, THYMU3003309, THYMU3006485, THYMU3008171, TKIDN2009641, TKIDN2009889, TKIDN2015788, TRACH1000205, TRACH2001549, TRACH2005811, TRACH2006049, TRACH2007834, TRACH2008300, TRACH2025535, TRACH3001427, TRACH3002192, TRACH3004721, TRACH3005294, TRACH3006038, TRACH3006412, TRACH3007479, TRACH3008093, TRACH3009455, TUTER2000904, UTERU2002410, UTERU2006115, UTERU2007520, UTERU2019706, UTERU2023039, UTERU2026203, UTERU3000226, UTERU3001572, UTERU3005230, UTERU3005460, UTERU3005970, UTERU3006308, UTERU3007419, UTERU3007640, UTERU3007913, UTERU3009871

[0664] ADRGL2000042, BLADE2006830, BRACE2002589, BRACE2003609, BRACE2009318, BRACE2011677, BRACE2029396, BRACE2037299, BRACE2039823, BRACE2039832, BRACE2043105, BRACE3001058, BRACE3001113, BRACE3003026, BRACE3003053, BRACE3009127, BRACE3010076, BRACE3015829, BRACE3021148, BRAMY3004800, BRAWH1000369, BRAWH2006207, BRAWH2006395, BRAWH2008993, BRAWH2009393, BRAWH2010552, BRAWH3007441, BRAWH3009017, BRCOC2019841, BRHIP2005271, BRHIP3000017, BRHIP3000240, BRTHA2018443, BRTHA3003000, CTONG2020374, CTONG2020378, CTONG2024031, FCBBF1000509, FEBRA2001990, FEBRA2006519, FEBRA2028516, HCHON2000743, IMR322001879, NT2RI2009583, NT2RP8000521, OCBBF2008144, OCBBF2011669, PERIC2007068, PUAEN2006335, SPLEN2039379, SYNOV2021953, TESTI2015626, TESTI4001984, TESTI4008058, TESTI4013894, TESTI4025268, TESTI4032090, THYMU2004284, THYMU2040925, THYMU3000360, TLIVE2002046, TRACH3000134, UTERU2008040, UTERU2011220, UTERU2021820, UTERU2028734

[0665] These genes are involved in equilibrium sense or motor function.

Genes Involved in Signaling from Sensory Organs

[0666] The thalamus is an area which comprises many neurons strongly connected to the cerebrum, and which transmits sensory information from the spinal cord or such to the responsible area of the cerebrum. The thalamus also controls the direction of movement from the cerebrum. For example, the thalamus resolves vision into the elements of size, shape, and color, and resolves sound into volume and sweetness or harshness to the ear, and then transmits this information to the sensory area of the cerebral cortex. Thus, genes whose expression levels differ between tissues of the whole brain and the thalamus are expected to be involved in signaling from sensory organs. These genes can be used to elucidate the molecular mechanism underlying signaling controlled by the brain. cDNA libraries derived from the thalamus (BRTHA) and from whole tissues of a normal brain (BRAWH) were analyzed and compared (Table 8). Genes whose expression levels differed between the two were the 412 clones and 56 clones listed below.

[0667] ASTRO1000009, ASTRO3000482, BLADE2008398, BRACE1000186, BRACE1000258, BRACE1000533, BRACE2005457, BRACE2010489, BRACE2014306, BRACE2014657, BRACE2015058, BRACE2031154, BRACE2035381, BRACE2044286, BRACE2045954, BRACE3000787, BRACE3003192, BRACE3005499, BRACE3007480, BRACE3008384, BRACE3009237, BRACE3009724, BRACE3009747, BRACE3010397, BRACE3010428, BRACE3011271, BRACE3011421, BRACE3012364, BRACE3022769, BRACE3026735, BRACE3027478, BRACE3031838, BRALZ2011796, BRAMY2003008, BRAMY2005052, BRAMY2019300, BRAMY2019963, BRAMY2028914, BRAMY2031317, BRAMY2036567, BRAMY2037823, BRAMY2040592, BRAMY2044078, BRAMY3002803, BRAMY3004224, BRAMY3005091, BRAMY4000229, BRAWH1000127, BRAWH2001395, BRAWH2001671, BRAWH2001940, BRAWH2001973, BRAWH2002560, BRAWH2002761, BRAWH2005315, BRAWH2007658, BRAWH2010000, BRAWH2010084, BRAWH2010536, BRAWH2012162, BRAWH2012326, BRAWH2013294, BRAWH2013871, BRAWH2014414, BRAWH2014645, BRAWH2014662, BRAWH2014876, BRAWH2014954, BRAWH2016221, BRAWH2016439, BRAWH2016702, BRAWH2016724, BRAWH3000078, BRAWH3000100, BRAWH3000314, BRAWH3000491, BRAWH3001326, BRAWH3001475, BRAWH3001891, BRAWH3002574, BRAWH3002600, BRAWH3002819, BRAWH3002821, BRAWH3003522, BRAWH3003555, BRAWH3003727, BRAWH3003801, BRAWH3003992, BRAWH3004453, BRAWH3004666, BRAWH3005132, BRAWH3005422, BRAWH3005912, BRAWH3005981, BRAWH3006548, BRAWH3006792, BRAWH3007221, BRAWH3007506, BRAWH3007592, BRAWH3007726, BRAWH3007783, BRAWH3008341, BRAWH3008697, BRAWH3008931, BRAWH3009297, BRCAN2006297, BRCOC2003213, BRCOC2014033, BRCOC2020142, BRHIP2000819, BRHIP2000920, BRHIP2005719, BRHIP2007741, BRHIP2009474, BRHIP2013699, BRHIP2014228, BRHIP2022221, BRHIP2024146, BRHIP3000339, BRHIP3006683, BRHIP3007586, BRHIP3008405, BRHIP3018797, BRSSN2000684, BRSSN2008549, BRSSN2008797, BRSSN2011738, BRSSN2014299, BRSTN2004863, BRSTN2008052, BRSTN2015015, BRSTN2016470, BRTHA1000311, BRTHA2000855, BRTHA2001462, BRTHA2002115, BRTHA2002281, BRTHA2002376, BRTHA2002442, BRTHA2002493, BRTHA2002608, BRTHA2002808, BRTHA2003030, BRTHA2003110, BRTHA2003116, BRTHA2003461, BRTHA2004821, BRTHA2004978, BRTHA2005579, BRTHA2005956, BRTHA2006075, BRTHA2006146, BRTHA2006194, BRTHA2007122, BRTHA2007422, BRTHA2007603, BRTHA2008316, BRTHA2008335, BRTHA2008527, BRTHA2008535, BRTHA2008955, BRTHA2009311, BRTHA2009846, BRTHA2009972, BRTHA2010073, BRTHA2010608, BRTHA2010884, BRTHA2010907, BRTHA2011194, BRTHA2011351, BRTHA2011500, BRTHA2011641, BRTHA2012392, BRTHA2012562, BRTHA2012980, BRTHA2013262, BRTHA2013460, BRTHA2013707, BRTHA2014792, BRTHA2014828, BRTHA2015406, BRTHA2015478, BRTHA2015696, BRTHA2015878, BRTHA2016215, BRTHA2016496, BRTHA2016543, BRTHA2017353, BRTHA2017985, BRTHA2018165, BRTHA2018344, BRTHA2018591, BRTHA2018624, BRTHA2018707, BRTHA2019014, BRTHA2019022, BRTHA2019048, BRTHA3000273, BRTHA3000297, BRTHA3000633, BRTHA3001721, BRTHA3002401, BRTHA3002427, BRTHA3002933, BRTHA3003074, BRTHA3003343, BRTHA3003449, BRTHA3003474, BRTHA3003490, BRTHA3004475, BRTHA3005046, BRTHA3006856, BRTHA3007113, BRTHA3007148, BRTHA3007319, BRTHA3007769, BRTHA3008143, BRTHA3008310, BRTHA3008386, BRTHA3008520, BRTHA3008778, BRTHA3009037, BRTHA3009090, BRTHA3009291, BRTHA3010366, BRTHA3013884, BRTHA3015815, BRTHA3015910, BRTHA3016845, BRTHA3016917, BRTHA3017047, BRTHA3017589, BRTHA3017848, BRTHA3018514, BRTHA3018617, BRTHA3018656, BRTHA3019105, COLON2001721, CTONG1000087, CTONG2008233, CTONG2017500, CTONG2019788, CTONG2023021, CTONG2028124, CTONG3000657, CTONG3001123, CTONG3008894, CTONG3009028, CTONG3009239, CTONG3009328, FCBBF2001183, FCBBF3001977, FCBBF3021576, FEBRA2007544, FEBRA2007801, FEBRA2008287, FEBRA2008360, FEBRA2020886, FEBRA2028618, HCASM2007047, HCHON2000028, HCHON2000212, HCHON2000244, HCHON2000626, HCHON2001084, HCHON2001217, HCHON2002676, HCHON2005921, HCHON2006250, HEART1000074, HEART2007031, HHDPC1000118, HLUNG2001996, HLUNG2002465, IMR322000127, IMR322001380, IMR322002035, KIDNE2002252, KIDNE2005543, KIDNE2006580, KIDNE2011314, MESAN2006563, MESAN2012054, MESTC1000042, NOVAR2001783, NT2NE2006909, NT2RI2008724, NT2RI2012659, NT2RI2014733, NT2RI3002842, NT2RI3002892, NT2RI3005403, NT2RI3006284, NT2RI3006673, NT2RI3007543, NT2RI3008055, NT2RP7004123, NT2RP7005529, NT2RP7009147, NT2RP7014005, NT2RP7017474, NTONG2005969, NTONG2008088, OCBBF2001794, OCBBF2006005, OCBBF2006764, OCBBF2007028, OCBBF2010140, OCBBF2020639, OCBBF2021286, OCBBF2024719, OCBBF2024850, OCBBF2028935, OCBBF2036743, OCBBF2038317, OCBBF3000483, OCBBF3008230, PEBLM2004666, PLACE6001185, PUAEN2002489, PUAEN2005930, PUAEN2006701, PUAEN2007044, PUAEN2009655, RECTM2001347, SKMUS2000757, SPLEN2006122, SPLEN2010912, SPLEN2025491, SPLEN2028914, SPLEN2031424, SPLEN2031547, SPLEN2032154, SPLEN2034781, SPLEN2036821, SPLEN2036932, SYNOV1000374, SYNOV2014400, SYNOV4002346, SYNOV4002883, SYNOV4007430, SYNOV4007671, SYNOV4008440, TESOP2002451, TESTI2049246, TESTI4000014, TESTI4000209, TESTI4001100, TESTI4002290, TESTI4006137, TESTI4008797, TESTI4009286, TESTI4010851, TESTI4012702, TESTI4013817, TESTI4014159, TESTI4014694, TESTI4021478, TESTI4022936, TESTI4024420, TESTI4027821, TESTI4037156, THYMU2001090, THYMU2025707, THYMU2032825, THYMU2033308, THYMU2033787, THYMU2035735, THYMU2039315, THYMU2040975, THYMU3001234, THYMU3001379, THYMU3004835, THYMU3008171, TKIDN2009641, TKIDN2009889, TKIDN2015788, TLIVE2001327, TRACH1000205, TRACH2001549, TRACH2005811, TRACH2006049, TRACH2007834, TRACH2008300, TRACH2023299, TRACH2025535, TRACH3001427, TRACH3002192, TRACH3004068, TRACH3004721, TRACH3005294, TRACH3007479, TRACH3008093, TRACH3009455, TSTOM1000135, TUTER2000904, UTERU2002410, UTERU2006115, UTERU2019706, UTERU2019940, UTERU2023039, UTERU2023175, UTERU2026203, UTERU2030280, UTERU3000899, UTERU3001571, UTERU3001572, UTERU3004709, UTERU3005230, UTERU3005907, UTERU3007640, UTERU3009871

[0668] ADRGL2000042, BLADE2006830, BRACE2003609, BRAMY3004800, BRAWH1000369, BRAWH2006207, BRAWH2006395, BRAWH2008993, BRAWH2009393, BRAWH2010552, BRAWH3007441, BRAWH3009017, BRHIP2005271, BRHIP3000017, BRTHA2002133, BRTHA2002702, BRTHA2007060, BRTHA2010033, BRTHA2011321, BRTHA2013426, BRTHA2013610, BRTHA2016318, BRTHA2017364, BRTHA2017972, BRTHA2018011, BRTHA2018443, BRTHA3000296, BRTHA3003000, BRTHA3008826, CTONG2008721, CTONG2020374, CTONG2020378, CTONG2024031, FCBBF1000509, FEBRA2001990, FEBRA2006519, FEBRA2028516, HCHON2000743, HSYRA2005628, IMR322001879, NT2RI2009583, OCBBF2008144, PERIC2007068, PUAEN2006335, SPLEN2016932, SPLEN2039379, SYNOV2006620, TESTI4001984, TESTI4008058, TESTI4025268, TESTI4032090, THYMU3000360, TLIVE2002046, TRACH3000134, UTERU2021820, UTERU2028734

[0669] These genes are involved in signaling from sensory organs.

Genes Involved in Emotional Reaction

[0670] The amygdala is the center of emotion in the brain. Information passing through the amygdala induces an emotional reaction, for example, panic or fear. When a strong fear reaction is produced due to the emotional evaluation of stimulus in the amygdala, the amygdala transmits an alert signal to each area of the brain. This results in various reactions such as sweating palms, palpitation, elevated blood pressure, and rapid secretion of adrenaline. In other words, the amygdala transmits signals which cause the body to be on the alert and is a tissue involved in a kind of defense instinct. Thus, genes whose expression levels differ between tissues of the whole brain and the amygdala are expected to be involved in emotional reaction. Such genes can be used to elucidate the molecular mechanism underlying emotional reaction, fear, or panic. cDNA libraries derived from the amygdale (BRAMY) and from whole tissues of a normal brain (BRAWH) were analyzed and compared (Table 9). Genes whose expression levels differed between the two were the 383 clones and 55 clones listed below.

[0671] ASTRO1000009, BLADE2008398, BRACE1000186, BRACE1000258, BRACE1000533, BRACE2005457, BRACE2006319, BRACE2010489, BRACE2014657, BRACE2015058, BRACE2027258, BRACE2030341, BRACE2031389, BRACE2035381, BRACE2044286, BRACE2045954, BRACE3000787, BRACE3000973, BRACE3003192, BRACE3005499, BRACE3007480, BRACE3008036, BRACE3009237, BRACE3009724, BRACE3009747, BRACE3010428, BRACE3011271, BRACE3011421, BRACE3012364, BRACE3013780, BRACE3022769, BRACE3026735, BRACE3027478, BRACE3031838, BRALZ2011796, BRAMY2001473, BRAMY2003008, BRAMY2004771, BRAMY2005052, BRAMY2017528, BRAMY2019300, BRAMY2019963, BRAMY2019985, BRAMY2020058, BRAMY2020270, BRAMY2021498, BRAMY2028856, BRAMY2028914, BRAMY2029602, BRAMY2030098, BRAMY2030109, BRAMY2030702, BRAMY2030703, BRAMY2030799, BRAMY2031317, BRAMY2031377, BRAMY2031442, BRAMY2032014, BRAMY2032242, BRAMY2032317, BRAMY2033003, BRAMY2033116, BRAMY2033267, BRAMY2033594, BRAMY2034185, BRAMY2034920, BRAMY2034993, BRAMY2036387, BRAMY2036396, BRAMY2036567, BRAMY2036699, BRAMY2036913, BRAMY2037823, BRAMY2038100, BRAMY2038484, BRAMY2038846, BRAMY2038904, BRAMY2039872, BRAMY2040478, BRAMY2040592, BRAMY2041261, BRAMY2041378, BRAMY2041542, BRAMY2042612, BRAMY2042641, BRAMY2042760, BRAMY2042918, BRAMY2044078, BRAMY2044246, BRAMY2045036, BRAMY2046478, BRAMY2046742, BRAMY2046989, BRAMY2047169, BRAMY2047420, BRAMY2047676, BRAMY2047746, BRAMY2047751, BRAMY2047765, BRAMY2047884, BRAMY3000206, BRAMY3000213, BRAMY3001401, BRAMY3001794, BRAMY3002312, BRAMY3002620, BRAMY3002803, BRAMY3002805, BRAMY3004224, BRAMY3004672, BRAMY3004900, BRAMY3004919, BRAMY3005091, BRAMY3005932, BRAMY3006297, BRAMY3007206, BRAMY3007609, BRAMY3008466, BRAMY3008505, BRAMY3008650, BRAMY3009811, BRAMY3010411, BRAMY4000095, BRAMY4000229, BRAMY4000277, BRAWH1000127, BRAWH2001395, BRAWH2001671, BRAWH2001940, BRAWH2001973, BRAWH2002560, BRAWH2002761, BRAWH2005315, BRAWH2007658, BRAWH2010000, BRAWH2010084, BRAWH2010536, BRAWH2012162, BRAWH2012326, BRAWH2013294, BRAWH2013871, BRAWH2014414, BRAWH2014645, BRAWH2014662, BRAWH2014876, BRAWH2014954, BRAWH2016221, BRAWH2016439, BRAWH2016702, BRAWH2016724, BRAWH3000078, BRAWH3000100, BRAWH3000314, BRAWH3000491, BRAWH3001326, BRAWH3001475, BRAWH3001891, BRAWH3002574, BRAWH3002600, BRAWH3002819, BRAWH3002821, BRAWH3003522, BRAWH3003555, BRAWH3003727, BRAWH3003801, BRAWH3003992, BRAWH3004453, BRAWH3004666, BRAWH3005132, BRAWH3005422, BRAWH3005912, BRAWH3005981, BRAWH3006548, BRAWH3006792, BRAWH3007221, BRAWH3007506, BRAWH3007592, BRAWH3007726, BRAWH3007783, BRAWH3008341, BRAWH3008697, BRAWH3008931, BRAWH3009297, BRCAN2014881, BRCAN2017717, BRCOC2000670, BRCOC2003213, BRCOC2014033, BRCOC2020142, BRHIP2000920, BRHIP2005719, BRHIP2007741, BRHIP2014228, BRHIP2024146, BRHIP2026061, BRHIP3000339, BRHIP3001283, BRHIP3006683, BRHIP3007586, BRHIP3008405, BRHIP3018797, BRSSN2000684, BRSSN2004496, BRSSN2011738, BRSSN2014299, BRSTN2008052, BRSTN2010750, BRSTN2015015, BRSTN2016470, BRTHA1000311, BRTHA2008335, BRTHA2011641, BRTHA3001721, BRTHA3002427, BRTHA3003490, BRTHA3004475, BRTHA3008520, BRTHA3009090, BRTHA3017848, COLON2001721, CTONG1000087, CTONG2008233, CTONG2017500, CTONG2028124, CTONG3000657, CTONG3001123, CTONG3008894, CTONG3009239, CTONG3009328, FCBBF2001183, FCBBF3001977, FEBRA2007544, FEBRA2007801, FEBRA2008287, FEBRA2010719, FEBRA2020886, FEBRA2025427, FEBRA2028618, HCASM2007047, HCHON2000244, HCHON2000626, HCHON2001217, HCHON2002676, HCHON2006250, HCHON2008112, HEART1000074, HHDPC1000118, HLUNG2002465, HSYRA2009075, IMR322000127, IMR322001380, IMR322002035, KIDNE2000665, KIDNE2006580, MESAN2006563, MESAN2012054, MESAN2015515, MESTC1000042, NOVAR2001783, NT2NE2005890, NT2NE2006909, NT2RI2008724, NT2RI2012659, NT2RI2014733, NT2RI3001515, NT2RI3002892, NT2RI3005724, NT2RI3006284, NT2RI3006673, NT2RI3007543, NT2RI3008055, NT2RP7005529, NT2RP7009147, NT2RP7014005, NT2RP7017474, NTONG2005969, OCBBF1000254, OCBBF2001794, OCBBF2006005, OCBBF2006764, OCBBF2007028, OCBBF2007114, OCBBF2010140, OCBBF2021286, OCBBF2023162, OCBBF2024850, OCBBF2028935, OCBBF2035214, OCBBF2036743, OCBBF2038317, OCBBF3000483, OCBBF3008230, PEBLM2004666, PERIC2000889, PERIC2003720, PLACE6001185, PUAEN2005930, PUAEN2006701, PUAEN2007044, PUAEN2009174, PUAEN2009655, SKNMC2002402, SKNSH2000482, SPLEN2001599, SPLEN2002467, SPLEN2028914, SPLEN2029912, SPLEN2031424, SPLEN2031547, SPLEN2034781, SPLEN2036932, SPLEN2038345, SYNOV2014400, SYNOV4002346, SYNOV4002883, SYNOV4007430, SYNOV4007671, SYNOV4008440, TESOP2002451, TESTI2009474, TESTI4000014, TESTI4000209, TESTI4001100, TESTI4006137, TESTI4008797, TESTI4009286, TESTI4010851, TESTI4013817, TESTI4014159, TESTI4014694, TESTI4021478, TESTI4022936, TESTI4024420, TESTI4027821, TESTI4029836, TESTI4037156, TESTI4037188, THYMU2001090, THYMU2014353, THYMU2033308, THYMU2035735, THYMU2037226, THYMU2039315, THYMU3001234, THYMU3001379, THYMU3004835, THYMU3008171, TKIDN2009641, TKIDN2009889, TKIDN2015788, TLIVE2004320, TRACH1000205, TRACH2001549, TRACH2001684, TRACH2005811, TRACH2006049, TRACH2007834, TRACH2008300, TRACH2025344, TRACH2025535, TRACH2025911, TRACH3001427, TRACH3002192, TRACH3004068, TRACH3004721, TRACH3005294, TRACH3007479, TRACH3008093, TRACH3009455, TUTER2000904, UTERU2002410, UTERU2004929, UTERU2006115, UTERU2007520, UTERU2019706, UTERU2023039, UTERU2026203, UTERU3001572, UTERU3001766, UTERU3005230, UTERU3007640, UTERU3009517, UTERU3009871

[0672] ADRGL2000042, BLADE2006830, BRACE2003609, BRACE2039823, BRAMY2019111, BRAMY2035070, BRAMY2035449, BRAMY2035718, BRAMY2038516, BRAMY2039341, BRAMY2040159, BRAMY2041434, BRAMY2045471, BRAMY3004800, BRAWH1000369, BRAWH2006207, BRAWH2006395, BRAWH2008993, BRAWH2009393, BRAWH2010552, BRAWH3007441, BRAWH3009017, BRHIP2005271, BRHIP3000017, BRTHA2018443, BRTHA3003000, CTONG2020374, CTONG2020378, CTONG2024031, FCBBF1000509, FEBRA2001990, FEBRA2006519, FEBRA2028516, HCHON2000508, HCHON2000743, IMR322001879, NT2RI2009583, OCBBF2008144, PERIC2007068, PUAEN2006335, SPLEN2039379, TESTI2015626, TESTI2026647, TESTI4001984, TESTI4008058, TESTI4013894, TESTI4025268, TESTI4032090, THYMU3000360, TKIDN2018926, TLIVE2002046, TRACH3000134, UTERU2008040, UTERU2021820, UTERU2028734

[0673] These genes are involved in emotional reaction.

Cancer-Related Genes

[0674] Cancer tissues are assumed to express a distinct set of genes distinct from normal tissues, and thus expression of these genes can contribute to carcinogenesis in tissues and cells. Thus, genes whose expression patterns in cancer tissues differ from those in normal tissues are cancer-related genes. A search was carried out for genes whose expression levels in cancer tissues differed from those in normal tissues.

[0675] The result of comparative analysis of cDNA libraries derived from breast tumor (TBAES) and normal breast (BEAST) (Table 10) showed that the genes whose expression levels differed between the two were 35 and four clones as described below.

[0676] ASTRO2002842, BRACE3016884, BRSSN2011262, BRTHA2008335, HCHON2000244, HCHON2006250, HEART1000010, MESAN2012054, NT2RP7000466, NT2RP7009147, OCBBF2021020, PEBLM2002749, PEBLM2004666, SPLEN2001599, SPLEN2031547, STOMA1000189, TBAES2001171, TBAES2001220, TBAES2001229, TBAES2001258, TBAES2001492, TBAES2001751, TBAES2002197, TBAES2003550, TBAES2004055, TBAES2005157, TBAES2005543, TBAES2006568, TBAES2007964, TESTI4000014, TESTI4037156, TRACH3002192, TRACH3004068, TSTOM2000553, UTERU2002410

BRAWH2006395, NT2RI2009583, STOMA2004893, TBAES2000932

[0677] The result of comparative analysis of cDNA libraries derived from cervical tumor (TCERX) and normal cervical duct (CERVX) (Table 11) showed that the genes whose expression levels differed between the two were twelve and two clones as described below.

BLADE2007666, BRAMY2047420, BRCAN2007409, BRSTN2016470, CERVX1000042, CERVX2002006, MESAN2006563, PROST2018090, TCERX2000613, TESTI4037156, THYMU2031341, UTERU2004688 CERVX2002013, NT2RI2009583

[0678] The result of comparative analysis of cDNA libraries derived from colon tumor (TCOLN) and normal colon (COLON) (Table 12) showed that the genes whose expression levels were different between the two were 24 and four clones as described below.

[0679] BRACE3015027, BRAMY2040592, BRSTN2016470, COLON1000030, COLON2000470, COLON2000568, COLON2001721, COLON2002443, COLON2002520, COLON2003043, COLON2004478, COLON2005126, COLON2005772, COLON2006282, COLON2009499, OCBBF2028935, PLACE7000514, RECTM2000433, SYNOV4007671, TCOLN2002278, TESTI2052693, TESTI4037156, THYMU2031368, TRACH2025535 CTONG1000113, NT2RI2009583, NT2RI2018448, TESTI2015626

[0680] The result of comparative analysis of cDNA libraries derived from esophageal tumor (TESOP) and normal esophagus (NESOP) (Table 13) showed that the genes whose expression levels were different between the two were 56 and ten clones as described below.

[0681] BRACE2030341, BRAMY2047420, BRHIP2003917, BRTHA2003461, CTONG2013178, D3OST3000169, FEBRA2025427, HCHON2000244, HHDPC1000118, NESOP2000744, NESOP2001433, NESOP2001656, NESOP2001694, NESOP2001752, NESOP2002738, NT2RI3006284, NT2RP7009147, PLACE6019932, SYNOV2005216, TESOP1000127, TESOP2000801, TESOP2001122, TESOP2001166, TESOP2001345, TESOP2001605, TESOP2001818, TESOP2001849, TESOP2001865, TESOP2001953, TESOP2002273, TESOP2002451, TESOP2002489, TESOP2002539, TESOP2002950, TESOP2003273, TESOP2003753, TESOP2004114, TESOP2005285, TESOP2005485, TESOP2005579, TESOP2006041, TESOP2006060, TESOP2006068, TESOP2006670, TESOP2006746, TESOP2007052, TESOP2007262, TESOP2007636, TESOP2007688, TESOP2009121, TESOP2009555, TESTI4009286, TESTI4010851, THYMU2040975, TRACH2005811, UTERU2023175 CTONG2016942, NT2RI2009583, TESOP2000390, TESOP2001796, TESOP2005199, TESOP2006398, TESOP2006865, TESOP2007384, TESTI2015626, TRACH2000862

[0682] The result of comparative analysis of cDNA libraries derived from kidney tumor (TKIDN) and normal kidney (KIDNE) (Table 14) showed that the genes whose expression levels were different between the two were 96 and 13 clones as described below.

[0683] ASTRO2018373, BRACE1000186, BRACE2014306, BRACE2015058, BRACE2016981, BRACE2043665, BRACE3008036, BRACE3010428, BRACE3022769, BRAMY2019963, BRAMY2044078, BRAWH1000127, BRAWH2001395, BRAWH2001671, BRAWH2013294, BRAWH2014645, BRHIP2024146, BRHIP3000339, BRSSN2000684, BRSSN2004719, BRSSN2018581, BRSTN2016470, BRTHA1000311, BRTHA3002427, CTONG1000087, CTONG2028124, CTONG3000657, CTONG3008894, FCBBF2001183, FEBRA2008287, HCASM2001301, HCHON2000028, HCHON2000244, HEART1000074, HHDPC1000118, HSYRA2008376, KIDNE1000064, KIDNE2000665, KIDNE2000722, KIDNE2000832, KIDNE2000846, KIDNE2001361, KIDNE2001847, KIDNE2002252, KIDNE2002991, KIDNE2003837, KIDNE2005543, KIDNE2006580, KIDNE2010264, KIDNE2011314, KIDNE2011532, KIDNE2011635, KIDNE2012945, KIDNE2013095, NESOP2001656, NTONG2005969, PEBLM2004666, SKMUS2000757, STOMA1000189, SYNOV4007671, TBAES2001258, TESTI4000014, TESTI4001100, TESTI4012702, TESTI4046819, THYMU2032014, TKIDN2000701, TKIDN2002424, TKIDN2002632, TKIDN2003044, TKIDN2004386, TKIDN2005934, TKIDN2005947, TKIDN2006525, TKIDN2006852, TKIDN2007667, TKIDN2009092, TKIDN2009641, TKIDN2009889, TKIDN2010934, TKIDN2012824, TKIDN2013287, TKIDN2014757, TKIDN2014771, TKIDN2015263, TKIDN2015788, TKIDN2016309, TKIDN2019116, TRACH2001443, TRACH2001684, TRACH2007834, TRACH2008300, TRACH3001427, UTERU2002410, UTERU2023175, UTERU3001572

BLADE2006830, BRALZ2017844, CTONG2028758, FCBBF1000509, FEBRA2001990, FEBRA2028516, HCHON2000508, MESAN2005303, NT2RI2009583, TESTI2015626, TKIDN2008778, TKIDN2012771, TKIDN2018926

[0684] The result of comparative analysis of cDNA libraries derived from liver tumor (TLIVE) and normal liver (LIVER) (Table 15) showed that the genes whose expression levels were different between the two were 35 and six clones as described below.

[0685] BRCAN2018935, BRSTN2016470, BRTHA2012980, BRTHA3002427, CTONG2028124, LIVER2007415, NT2RI2008724, SPLEN2012624, SPLEN2033098, TESOP2002451, TLIVE2000023, TLIVE2001327, TLIVE2001828, TLIVE2001927, TLIVE2002336, TLIVE2002338, TLIVE2002690, TLIVE2003197, TLIVE2003225, TLIVE2003381, TLIVE2003970, TLIVE2004110, TLIVE2004320, TLIVE2004601, TLIVE2005180, TLIVE2006236, TLIVE2006529, TLIVE2007132, TLIVE2007528, TLIVE2007816, TLIVE2008083, TLIVE2008229, TLIVE2009541, UTERU2002410, UTERU2005621

LIVER2000247, NT2RI2009583, TESTI2015626, TLIVE2001684, TLIVE2002046, TLIVE2007607

[0686] The result of comparative analysis of cDNA libraries derived from lung tumor (TLUNG) and normal lung (HLUNG) (Table 16) showed that the genes whose expression levels were different between the two were 47 and nine clones as described below.

[0687] BRCAN2021028, BRHIP2000819, BRSTN2016470, CTONG1000087, CTONG2028124, HCHON2006250, HEART1000074, HLUNG1000017, HLUNG2000014, HLUNG2001996, HLUNG2002465, HLUNG2002958, HLUNG2003003, HLUNG2003872, HLUNG2010464, HLUNG2011041, HLUNG2011298, HLUNG2012049, HLUNG2012287, HLUNG2012727, HLUNG2013204, HLUNG2013304, HLUNG2013622, HLUNG2013851, HLUNG2014262, HLUNG2014288, HLUNG2014449, HLUNG2015617, HLUNG2017350, HLUNG2017546, HLUNG2017806, HLUNG2019058, HSYRA2008376, KIDNE2012945, NT2RI2003993, NT2RP7013795, OCBBF3000483, SPLEN2028914, SPLEN2031547, SYNOV4007671, TESOP1000127, TESTI2003573, TESTI4000014, TESTI4037156, TRACH2005811, TRACH3004068, UTERU2005621

FEBRA2028516, HCHON2000508, HLUNG2013350, HLUNG2015418, HLUNG2015548, HLUNG2016862, NT2RI2009583, TESTI2015626, TRACH2019672

[0688] The result of comparative analysis of cDNA libraries derived from ovary tumor (TOVER) and normal ovary (NOVER) (Table 17A) showed the genes whose expression levels were different between the two were 16 clones as described below.

CTONG2019788, FEBRA2014213, HLUNG2017546, NOVAR2000136, NOVAR2000710, NOVAR2000962, NOVAR2001108, NOVAR2001783, OCBBF3007516, TESTI2052693, TOVAR2000649, TOVAR2001281, TOVAR2001730, TOVAR2002247, TOVAR2002549, TRACH3004068

[0689] The result of comparative analysis of cDNA libraries derived from ovary tumor (TOVER) and normal ovary (NOVER) (Table 17B) showed the gene whose expression levels were different between the two was one clone as described below. The gene has no different expression levels between normal and diseased ovary. However, the gene showed significantly different expression level in both ovary tumor and normal ovary, compared with other tissues. Thus, the gene are ovary-specific gene and can be used as diagnostic marker because its association with the disease.

TESTI2015626

[0690] The result of comparative analysis of cDNA libraries derived from stomach tumor (TSTOM) and normal stomach (STOMA) (Table 18) showed that the genes whose expression levels were different between the two were 31 and five clones as described below.

[0691] BRACE2024627, BRAWH2014645, BRCAN2028355, BRHIP2000819, BRSTN2016470, BRTHA3003490, COLON2002443, HEART1000010, HLUNG2002465, KIDNE2001847, NT2RP7000466, PUAEN2006328, SMINT2001818, STOMA1000189, STOMA2003444, STOMA2004294, STOMA2004925, STOMA2008546, SYNOV4007671, TESTI4000014, TESTI4010851, THYMU2035735, TRACH2001549, TRACH2005811, TRACH2025535, TSTOM1000135, TSTOM2000442, TSTOM2000553, TSTOM2002672, UTERU2006115, UTERU3001572

[0692] The following five clones also had different expression levels between the two.

FEBRA2008692, NT2RI2009583, STOMA2003158, STOMA2004893, TESTI2015626

[0693] The result of comparative analysis of cDNA libraries derived from uterine tumor (TUTER) and normal uterus (UTERU) (Table 19) showed that the genes whose expression levels were different between the two were 244 and 34 clones as described below.

[0694] BNGH42007788, BRACE1000186, BRACE2030341, BRACE3008772, BRACE3009747, BRACE3010428, BRACE3027478, BRALZ2017359, BRAWH2014645, BRAWH3000314, BRAWH3001326, BRAWH3002574, BRAWH3002821, BRAWH3003727, BRAWH3007592, BRCAN2009432, BRCAN2028355, BRHIP3007586, BRHIP3008344, BRHIP3008565, BRSSN2006892, BRSTN2001067, BRSTN2016470, BRTHA2010608, BRTHA3003074, CTONG1000087, CTONG1000467, CTONG2028124, CTONG3001123, CTONG3008894, CTONG3009028, CTONG3009239, FCBBF3004847, FEBRA2026984, FEBRA2028618, HCHON2000244, HCHON2000418, HCHON2000626, HCHON2001084, HCHON2001217, HCHON2005921, HCHON2006250, HCHON2008444, HLUNG2003003, HSYRA2008376, KIDNE2002252, MESAN2014295, NOVAR2000710, NT2RI2008724, NT2RI2014247, NT2RI2014733, NT2RI3002892, NT2RI3005724, NT2RI3006284, NT2RI3006340, NT2RI3006673, NT2RI3007291, NT2RI3007543, NT2RP7004123, NT2RP7005529, NT2RP7009147, NT2RP7017474, OCBBF2007028, OCBBF2020741, OCBBF2024850, OCBBF2036743, OCBBF3000483, PLACE6001185, PLACE7000514, PUAEN2007044, PUAEN2009655, SKNSH2000482, SPLEN2006122, SPLEN2016554, SPLEN2031547, SPLEN2036932, STOMA1000189, STOMA2004925, SYNOV2017055, SYNOV4001395, SYNOV4002346, SYNOV4008440, TCERX2000613, TESOP2002273, TESTI4000014, TESTI4008797, TESTI4009286, TESTI4012702, TESTI4013675, TESTI4014159, TESTI4018886, TESTI4029671, TESTI4037156, THYMU2008725, THYMU2031890, THYMU2033070, THYMU2035735, THYMU3001472, TRACH1000205, TRACH2001443, TRACH2001549, TRACH2005811, TRACH2007834, TRACH2008300, TRACH3002192, TRACH3003379, TRACH3004068, TRACH3004721, TRACH3007479, TUTER1000122, TUTER2000425, TUTER2000904, TUTER2000916, TUTER2001387, TUTER2002729, UTERU1000024, UTERU1000031, UTERU1000148, UTERU1000249, UTERU1000337, UTERU1000339, UTERU2000649, UTERU2001409, UTERU2002410, UTERU2002841, UTERU2004688, UTERU2004929, UTERU2005004, UTERU2005621, UTERU2006115, UTERU2006137, UTERU2006568, UTERU2007444, UTERU2007520, UTERU2007724, UTERU2008347, UTERU2014678, UTERU2017762, UTERU2019491, UTERU2019681, UTERU2019706, UTERU2019940, UTERU2020491, UTERU2020718, UTERU2021163, UTERU2021380, UTERU2022020, UTERU2022981, UTERU2023039, UTERU2023175, UTERU2023651, UTERU2023712, UTERU2024002, UTERU2024656, UTERU2025025, UTERU2025645, UTERU2025891, UTERU2026025, UTERU2026090, UTERU2026203, UTERU2027591, UTERU2029953, UTERU2030213, UTERU2030280, UTERU2031084, UTERU2031268, UTERU2031521, UTERU2031703, UTERU2031851, UTERU2033375, UTERU2033382, UTERU2035114, UTERU2035323, UTERU2035328, UTERU2035331, UTERU2035452, UTERU2035469, UTERU2035503, UTERU2035745, UTERU2036089, UTERU2037361, UTERU2037577, UTERU2038251, UTERU3000226, UTERU3000645, UTERU3000665, UTERU3000828, UTERU3000899, UTERU3001059, UTERU3001240, UTERU3001542, UTERU3001571, UTERU3001572, UTERU3001585, UTERU3001652, UTERU3001766, UTERU3001988, UTERU3002209, UTERU3002218, UTERU3002383, UTERU3002667, UTERU3002731, UTERU3002768, UTERU3002786, UTERU3002993, UTERU3003116, UTERU3003135, UTERU3003178, UTERU3003465, UTERU3003523, UTERU3003776, UTERU3004523, UTERU3004616, UTERU3004709, UTERU3004992, UTERU3005049, UTERU3005205, UTERU3005230, UTERU3005460, UTERU3005585, UTERU3005907, UTERU3005970, UTERU3006008, UTERU3006308, UTERU3007134, UTERU3007419, UTERU3007640, UTERU3007913, UTERU3008660, UTERU3008671, UTERU3009259, UTERU3009490, UTERU3009517, UTERU3009690, UTERU3009871, UTERU3009979, UTERU3011063, UTERU3015086, UTERU3015500, UTERU3016789, UTERU3018081, UTERU3018154, UTERU3018616, UTERU3018711

[0695] ADRGL2000042, BRHIP3000017, CTONG2003348, CTONG2019822, CTONG2020378, CTONG2020411, CTONG2024031, FEBRA2028516, HCASM2008536, HCHON2000743, IMR322001879, MESAN2005303, NT2RI2009583, OCBBF2008144, PERIC2007068, SPLEN2039379, TESTI2015626, TESTI4013894, TUTER2000057, UTERU2004299, UTERU2008040, UTERU2011220, UTERU2019534, UTERU2021820, UTERU2028734, UTERU2032279, UTERU2033577, UTERU2035978, UTERU3000402, UTERU3000738, UTERU3001053, UTERU3014791, UTERU3015412, UTERU3017176

[0696] The result of comparative analysis of cDNA libraries derived from tongue cancer (CTONG) and normal tongue (NTONG) (Table 20) showed that the genes whose expression levels were different between the two were 166 and 31 clones as described below.

[0697] BNGH42007788, BRACE1000186, BRACE2006319, BRACE3010428, BRACE3012364, BRAMY2020058, BRAMY3002803, BRAWH2001671, BRAWH2014645, BRAWH3002574, BRCAN2009432, BRCAN2015371, BRCAN2020710, BRHIP2004814, BRHIP3018797, BRTHA2003461, BRTHA3003490, CTONG1000087, CTONG1000088, CTONG1000288, CTONG1000302, CTONG1000341, CTONG1000467, CTONG1000488, CTONG1000508, CTONG1000540, CTONG2000042, CTONG2001877, CTONG2004062, CTONG2006798, CTONG2008233, CTONG2009423, CTONG2009531, CTONG2010803, CTONG2013178, CTONG2017500, CTONG2019248, CTONG2019652, CTONG2019704, CTONG2019788, CTONG2019833, CTONG2020127, CTONG2020522, CTONG2020638, CTONG2020806, CTONG2021132, CTONG2022153, CTONG2022601, CTONG2023021, CTONG2023512, CTONG2024206, CTONG2024749, CTONG2025496, CTONG2025516, CTONG2025900, CTONG2026920, CTONG2027327, CTONG2028124, CTONG2028687, CTONG3000084, CTONG3000657, CTONG3000686, CTONG3000707, CTONG3000896, CTONG3001123, CTONG3001370, CTONG3001420, CTONG3001560, CTONG3002020, CTONG3002127, CTONG3002412, CTONG3002674, CTONG3003179, CTONG3003483, CTONG3003652, CTONG3003654, CTONG3003737, CTONG3003905, CTONG3003972, CTONG3004072, CTONG3004712, CTONG3005325, CTONG3005648, CTONG3005713, CTONG3005813, CTONG3006067, CTONG3006186, CTONG3006650, CTONG3007444, CTONG3007528, CTONG3007586, CTONG3007870, CTONG3008252, CTONG3008258, CTONG3008496, CTONG3008566, CTONG3008639, CTONG3008831, CTONG3008894, CTONG3008951, CTONG3009028, CTONG3009227, CTONG3009239, CTONG3009328, CTONG3009385, FEBRA2007544, FEBRA2007801, FEBRA2021966, FEBRA2025427, HCHON2000028, HCHON2001217, HHDPC1000118, HSYRA2008376, KIDNE2001847, KIDNE2002252, MESAN2006563, NT2RI2008724, NT2RI2018883, NT2RI3000622, NT2RI3006284, NT2RI3006673, NT2RI3007543, NT2RI3007757, NT2RP7004123, NT2RP7009147, NT2RP7014005, NTONG2000413, NTONG2003852, NTONG2005277, NTONG2005969, NTONG2006354, NTONG2007249, NTONG2007517, NTONG2008088, NTONG2008672, OCBBF2001794, OCBBF2006151, PEBLM2004666, PEBLM2005183, SPLEN2002467, SPLEN2029912, SPLEN2031547, SYNOV4007671, SYNOV4008440, TBAES2002197, TESOP2002273, TESTI2009474, TESTI4000014, TESTI4000209, TESTI4008018, TESTI4009286, TESTI4010851, TESTI4012702, TESTI4013675, THYMU2031847, THYMU2033308, TLIVE2002690, TRACH2005811, TRACH2007059, TRACH2025535, TRACH3001427, TSTOM2000553, UTERU2005621, UTERU2017762, UTERU2023175, UTERU3001572

[0698] BLADE2006830, BRHIP3000017, CTONG1000113, CTONG2003348, CTONG2004000, CTONG2008721, CTONG2015596, CTONG2015633, CTONG2016942, CTONG2019822, CTONG2020374, CTONG2020378, CTONG2020411, CTONG2020974, CTONG2024031, CTONG2028758, CTONG3001501, CTONG3002552, CTONG3003598, CTONG3004550, CTONG3004726, CTONG3009287, FEBRA2008692, FEBRA2028516, HCHON2000508, NT2RI2009583, NTONG2008093, PERIC2007068, TESOP2007384, TLIVE2002046, TRACH2000862

[0699] These genes are involved in cancer.

[0700] Further, there is a method to search for genes involved in development and differentiation, which is the expression frequency analysis in which the expression levels of genes are compared between developing and/or differentiating tissues and/or cells and adult tissues and/or cells. The genes involved in tissue development and/or differentiation are genes participating in tissue construction and expression of function, and thus are useful genes, which are available for regenerative medicine aiming at convenient regeneration of injured tissues.

[0701] By using the information of gene expression frequency gained from the database of nucleotide sequences of 1,402,069 clones as described above, genes whose expression frequencies were different between developing and/or differentiating tissues and/or cells and adult tissues and/or cells were analyzed.

[0702] The result of comparative analysis of cDNA libraries derived from fetal brain (FCBBF, FEBRA or OCBBF) and adult brain (BRACE, BRALZ, BRAMY, BRAWH, BRCAN, BRCOC, BRHIP, BRSSN, BRSTN or BRTHA) (Table 21) showed that the genes whose expression levels were different between the two were 1,035 and 139 clones as described below.

[0703] ADRGL2009146, ADRGL2012038, ADRGL2012179, ASTRO1000009, ASTRO2003960, ASTRO3000482, BLADE1000176, BLADE2001371, BLADE2004089, BLADE2008398, BNGH42007788, BRACE1000186, BRACE1000258, BRACE1000533, BRACE1000572, BRACE2003639, BRACE2005457, BRACE2006319, BRACE2008594, BRACE2010489, BRACE2011747, BRACE2014306, BRACE2014475, BRACE2014657, BRACE2015058, BRACE2015314, BRACE2016981, BRACE2018762, BRACE2024627, BRACE2026836, BRACE2027258, BRACE2027970, BRACE2028970, BRACE2029112, BRACE2029849, BRACE2030326, BRACE2030341, BRACE2030884, BRACE2031154, BRACE2031389, BRACE2031527, BRACE2031531, BRACE2031899, BRACE2032044, BRACE2032329, BRACE2032385, BRACE2032538, BRACE2032823, BRACE2033720, BRACE2035381, BRACE2035441, BRACE2036005, BRACE2036096, BRACE2036830, BRACE2036834, BRACE2037847, BRACE2038114, BRACE2038329, BRACE2038551, BRACE2039249, BRACE2039327, BRACE2039475, BRACE2039734, BRACE2040138, BRACE2040325, BRACE2041009, BRACE2041200, BRACE2041264, BRACE2042550, BRACE2043142, BRACE2043248, BRACE2043349, BRACE2043665, BRACE2044286, BRACE2044816, BRACE2044949, BRACE2045300, BRACE2045428, BRACE2045596, BRACE2045772, BRACE2045947, BRACE2045954, BRACE2046251, BRACE2046295, BRACE2047011, BRACE2047350, BRACE2047377, BRACE2047385, BRACE3000071, BRACE3000697, BRACE3000787, BRACE3000840, BRACE3000973, BRACE3001002, BRACE3001217, BRACE3001391, BRACE3001595, BRACE3001754, BRACE3002298, BRACE3002390, BRACE3002508, BRACE3003004, BRACE3003192, BRACE3003595, BRACE3003698, BRACE3004058, BRACE3004113, BRACE3004150, BRACE3004358, BRACE3004435, BRACE3004772, BRACE3004783, BRACE3004843, BRACE3004880, BRACE3005145, BRACE3005225, BRACE3005430, BRACE3005499, BRACE3006185, BRACE3006226, BRACE3006462, BRACE3006872, BRACE3007322, BRACE3007472, BRACE3007480, BRACE3007559, BRACE3007625, BRACE3007642, BRACE3007767, BRACE3008036, BRACE3008092, BRACE3008137, BRACE3008384, BRACE3008720, BRACE3008772, BRACE3009090, BRACE3009237, BRACE3009297, BRACE3009377, BRACE3009574, BRACE3009701, BRACE3009708, BRACE3009724, BRACE3009747, BRACE3010397, BRACE3010428, BRACE3011271, BRACE3011421, BRACE3011505, BRACE3012364, BRACE3012930, BRACE3013119, BRACE3013576, BRACE3013740, BRACE3013780, BRACE3014005, BRACE3014068, BRACE3014231, BRACE3014317, BRACE3014807, BRACE3015027, BRACE3015121, BRACE3015262, BRACE3015521, BRACE3015894, BRACE3016884, BRACE3018308, BRACE3018963, BRACE3019055, BRACE3019084, BRACE3020194, BRACE3020286, BRACE3020594, BRACE3022769, BRACE3023912, BRACE3024073, BRACE3024659, BRACE3024662, BRACE3025153, BRACE3025457, BRACE3025531, BRACE3025630, BRACE3026008, BRACE3026075, BRACE3026735, BRACE3027242, BRACE3027326, BRACE3027478, BRACE3030103, BRACE3031838, BRACE3032983, BRACE3040856, BRACE3045033, BRALZ2011796, BRALZ2012183, BRALZ2012848, BRALZ2014484, BRALZ2016085, BRALZ2016498, BRALZ2017359, BRAMY2001473, BRAMY2003008, BRAMY2004771, BRAMY2005052, BRAMY2017528, BRAMY2019300, BRAMY2019963, BRAMY2019985, BRAMY2020058, BRAMY2020270, BRAMY2021498, BRAMY2028856, BRAMY2028914, BRAMY2029602, BRAMY2030098, BRAMY2030109, BRAMY2030702, BRAMY2030703, BRAMY2030799, BRAMY2031317, BRAMY2031377, BRAMY2031442, BRAMY2032014, BRAMY2032242, BRAMY2032317, BRAMY2033003, BRAMY2033116, BRAMY2033267, BRAMY2033594, BRAMY2034185, BRAMY2034920, BRAMY2034993, BRAMY2036387, BRAMY2036396, BRAMY2036567, BRAMY2036699, BRAMY2036913, BRAMY2037823, BRAMY2038100, BRAMY2038484, BRAMY2038846, BRAMY2038904, BRAMY2039872, BRAMY2040478, BRAMY2040592, BRAMY2041261, BRAMY2041378, BRAMY2041542, BRAMY2042612, BRAMY2042641, BRAMY2042760, BRAMY2042918, BRAMY2044078, BRAMY2044246, BRAMY2045036, BRAMY2046478, BRAMY2046742, BRAMY2046989, BRAMY2047169, BRAMY2047420, BRAMY2047676, BRAMY2047746, BRAMY2047751, BRAMY2047765, BRAMY2047884, BRAMY3000206, BRAMY3000213, BRAMY3001401, BRAMY3001794, BRAMY3002312, BRAMY3002620, BRAMY3002803, BRAMY3002805, BRAMY3004224, BRAMY3004672, BRAMY3004900, BRAMY3004919, BRAMY3005091, BRAMY3005932, BRAMY3006297, BRAMY3007206, BRAMY3007609, BRAMY3008466, BRAMY3008505, BRAMY3008650, BRAMY3009811, BRAMY3010411, BRAMY4000095, BRAMY4000229, BRAMY4000277, BRASW1000125, BRAWH1000127, BRAWH2001395, BRAWH2001671, BRAWH2001940, BRAWH2001973, BRAWH2002560, BRAWH2002761, BRAWH2005315, BRAWH2007658, BRAWH2010000, BRAWH2010084, BRAWH2010536, BRAWH2012162, BRAWH2012326, BRAWH2013294, BRAWH2013871, BRAWH2014414, BRAWH2014645, BRAWH2014662, BRAWH2014876, BRAWH2014954, BRAWH2016221, BRAWH2016439, BRAWH2016702, BRAWH2016724, BRAWH3000078, BRAWH3000100, BRAWH3000314, BRAWH3000491, BRAWH3001326, BRAWH3001475, BRAWH3001891, BRAWH3002574, BRAWH3002600, BRAWH3002819, BRAWH3002821, BRAWH3003522, BRAWH3003555, BRAWH3003727, BRAWH3003801, BRAWH3003992, BRAWH3004453, BRAWH3004666, BRAWH3005132, BRAWH3005422, BRAWH3005912, BRAWH3005981, BRAWH3006548, BRAWH3006792, BRAWH3007221, BRAWH3007506, BRAWH3007592, BRAWH3007726, BRAWH3007783, BRAWH3008341, BRAWH3008697, BRAWH3008931, BRAWH3009297, BRCAN2002562, BRCAN2002856, BRCAN2002944, BRCAN2002948, BRCAN2003703, BRCAN2003746, BRCAN2003987, BRCAN2004355, BRCAN2005436, BRCAN2006063, BRCAN2006290, BRCAN2006297, BRCAN2006450, BRCAN2007144, BRCAN2007409, BRCAN2007426, BRCAN2008528, BRCAN2009203, BRCAN2009432, BRCAN2010376, BRCAN2011254, BRCAN2011602, BRCAN2012355, BRCAN2012481, BRCAN2013655, BRCAN2013660, BRCAN2014143, BRCAN2014602, BRCAN2014881, BRCAN2015371, BRCAN2015464, BRCAN2016433, BRCAN2016619, BRCAN2017442, BRCAN2017717, BRCAN2017905, BRCAN2018935, BRCAN2019387, BRCAN2020710, BRCAN2021028, BRCAN2024451, BRCAN2024563, BRCAN2025712, BRCAN2028355, BRCOC2000670, BRCOC2003213, BRCOC2007034, BRCOC2014033, BRCOC2016525, BRCOC2019934, BRCOC2020142, BRHIP2000691, BRHIP2000819, BRHIP2000826, BRHIP2000920, BRHIP2001074, BRHIP2001805, BRHIP2001927, BRHIP2002122, BRHIP2002172, BRHIP2002346, BRHIP2003242, BRHIP2003786, BRHIP2003917, BRHIP2004312, BRHIP2004359, BRHIP2004814, BRHIP2004883, BRHIP2005236, BRHIP2005354, BRHIP2005600, BRHIP2005719, BRHIP2005752, BRHIP2005932, BRHIP2006800, BRHIP2007616, BRHIP2007741, BRHIP2009340, BRHIP2009414, BRHIP2009474, BRHIP2013699, BRHIP2014228, BRHIP2021615, BRHIP2022221, BRHIP2024146, BRHIP2024165, BRHIP2026061, BRHIP2026288, BRHIP2029176, BRHIP2029393, BRHIP3000339, BRHIP3000526, BRHIP3001283, BRHIP3006683, BRHIP3007483, BRHIP3007586, BRHIP3008183, BRHIP3008313, BRHIP3008344, BRHIP3008405, BRHIP3008565, BRHIP3008598, BRHIP3008997, BRHIP3009099, BRHIP3009448, BRHIP3011241, BRHIP3013765, BRHIP3013897, BRHIP3015751, BRHIP3016213, BRHIP3018797, BRHIP3020182, BRHIP3024118, BRHIP3024533, BRHIP3024725, BRHIP3025161, BRHIP3025702, BRHIP3026097, BRHIP3027137, BRHIP3027854, BRSSN2000684, BRSSN2003086, BRSSN2004496, BRSSN2004719, BRSSN2006892, BRSSN2008549, BRSSN2008797, BRSSN2011262, BRSSN2011738, BRSSN2013874, BRSSN2014299, BRSSN2014424, BRSSN2014556, BRSSN2018581, BRSSN2018925, BRSTN2000872, BRSTN2001067, BRSTN2001613, BRSTN2002400, BRSTN2003835, BRSTN2004863, BRSTN2004987, BRSTN2005721, BRSTN2006865, BRSTN2007000, BRSTN2007284, BRSTN2008052, BRSTN2008283, BRSTN2008418, BRSTN2008457, BRSTN2010363, BRSTN2010500, BRSTN2010750, BRSTN2012320, BRSTN2012380, BRSTN2015015, BRSTN2016470, BRSTN2016678, BRSTN2017237, BRSTN2017771, BRSTN2018083, BRSTN2019129, BRTHA1000311, BRTHA2000855, BRTHA2001462, BRTHA2002115, BRTHA2002281, BRTHA2002376, BRTHA2002442, BRTHA2002493, BRTHA2002608, BRTHA2002808, BRTHA2003030, BRTHA2003110, BRTHA2003116, BRTHA2003461, BRTHA2004821, BRTHA2004978, BRTHA2005579, BRTHA2005956, BRTHA2006075, BRTHA2006146, BRTHA2006194, BRTHA2007122, BRTHA2007422, BRTHA2007603, BRTHA2008316, BRTHA2008335, BRTHA2008527, BRTHA2008535, BRTHA2008955, BRTHA2009311, BRTHA2009846, BRTHA2009972, BRTHA2010073, BRTHA2010608, BRTHA2010884, BRTHA2010907, BRTHA2011194, BRTHA2011351, BRTHA2011500, BRTHA2011641, BRTHA2012392, BRTHA2012562, BRTHA2012980, BRTHA2013262, BRTHA2013460, BRTHA2013707, BRTHA2014792, BRTHA2014828, BRTHA2015406, BRTHA2015478, BRTHA2015696, BRTHA2015878, BRTHA2016215, BRTHA2016496, BRTHA2016543, BRTHA2017353, BRTHA2017985, BRTHA2018165, BRTHA2018344, BRTHA2018591, BRTHA2018624, BRTHA2018707, BRTHA2019014, BRTHA2019022, BRTHA2019048, BRTHA3000273, BRTHA3000297, BRTHA3000633, BRTHA3001721, BRTHA3002401, BRTHA3002427, BRTHA3002933, BRTHA3003074, BRTHA3003343, BRTHA3003449, BRTHA3003474, BRTHA3003490, BRTHA3004475, BRTHA3005046, BRTHA3006856, BRTHA3007113, BRTHA3007148, BRTHA3007319, BRTHA3007769, BRTHA3008143, BRTHA3008310, BRTHA3008386, BRTHA3008520, BRTHA3008778, BRTHA3009037, BRTHA3009090, BRTHA3009291, BRTHA3010366, BRTHA3013884, BRTHA3015815, BRTHA3015910, BRTHA3016845, BRTHA3016917, BRTHA3017047, BRTHA3017589, BRTHA3017848, BRTHA3018514, BRTHA3018617, BRTHA3018656, BRTHA3019105, COLON2001721, CTONG1000087, CTONG1000088, CTONG1000467, CTONG2000042, CTONG2008233, CTONG2009423, CTONG2017500, CTONG2019248, CTONG2019788, CTONG2020522, CTONG2023021, CTONG2028124, CTONG3000657, CTONG3001123, CTONG3001370, CTONG3002412, CTONG3004072, CTONG3005813, CTONG3008894, CTONG3009028, CTONG3009239, CTONG3009328, DFNES2000146, DFNES2011239, DFNES2011499, FCBBF1000297, FCBBF2001183, FCBBF3001977, FCBBF3002163, FCBBF3003435, FCBBF3004502, FCBBF3004847, FCBBF3006171, FCBBF3007242, FCBBF3007540, FCBBF3008944, FCBBF3009888, FCBBF3012170, FCBBF3012288, FCBBF3013307, FCBBF3013846, FCBBF3021576, FCBBF3021940, FCBBF3023443, FCBBF3023895, FCBBF3025730, FCBBF3027717, FCBBF4000076, FEBRA1000030, FEBRA2000253, FEBRA2006396, FEBRA2007544, FEBRA2007708, FEBRA2007793, FEBRA2007801, FEBRA2008287, FEBRA2008311, FEBRA2008360, FEBRA2008468, FEBRA2010719, FEBRA2014213, FEBRA2015588, FEBRA2020484, FEBRA2020582, FEBRA2020668, FEBRA2020886, FEBRA2021339, FEBRA2021571, FEBRA2021908, FEBRA2021966, FEBRA2024136, FEBRA2024150, FEBRA2024343, FEBRA2024744, FEBRA2025427, FEBRA2026984, FEBRA2027082, FEBRA2027297, FEBRA2027352, FEBRA2028366, FEBRA2028477, FEBRA2028618, HCASM2007047, HCHON2000028, HCHON2000212, HCHON2000244, HCHON2000626, HCHON2001084, HCHON2001217, HCHON2002676, HCHON2005921, HCHON2006250, HCHON2007881, HCHON2008112, HEART1000074, HEART2007031, HHDPC1000118, HLUNG2001996, HLUNG2002465, HLUNG2003003, HSYRA2009075, IMR322000127, IMR322000917, IMR322001380, IMR322002035, KIDNE2000665, KIDNE2002252, KIDNE2005543, KIDNE2006580, KIDNE2011314, MESAN2006563, MESAN2012054, MESAN2015515, MESTC1000042, NB9N41000340, NESOP2001752, NHNPC2001223, NOVAR2001783, NT2NE2005890, NT2NE2006909, NT2NE2008060, NT2RI2003993, NT2RI2005166, NT2RI2008724, NT2RI2012659, NT2RI2014733, NT2RI2018311, NT2RI2019751, NT2RI3000622, NT2RI3001515, NT2RI3002842, NT2RI3002892, NT2RI3003382, NT2RI3004510, NT2RI3005403, NT2RI3005724, NT2RI3006284, NT2RI3006673, NT2RI3007291, NT2RI3007543, NT2RI3008055, NT2RP7004123, NT2RP7005529, NT2RP7009030, NT2RP7009147, NT2RP7010599, NT2RP7014005, NT2RP7015512, NT2RP7017474, NTONG2000413, NTONG2005969, NTONG2008088, OCBBF1000254, OCBBF2001794, OCBBF2002124, OCBBF2003819, OCBBF2004826, OCBBF2004883, OCBBF2005428, OCBBF2006005, OCBBF2006058, OCBBF2006151, OCBBF2006567, OCBBF2006764, OCBBF2007028, OCBBF2007068, OCBBF2007114, OCBBF2007428, OCBBF2007478, OCBBF2007610, OCBBF2008770, OCBBF2009788, OCBBF2009926, OCBBF2010140, OCBBF2010416, OCBBF2017516, OCBBF2019327, OCBBF2019823, OCBBF2020343, OCBBF2020453, OCBBF2020639, OCBBF2020741, OCBBF2020801, OCBBF2020838, OCBBF2021020, OCBBF2021286, OCBBF2021323, OCBBF2021788, OCBBF2022351, OCBBF2022574, OCBBF2023162, OCBBF2023643, OCBBF2024719, OCBBF2024781, OCBBF2024850, OCBBF2025028, OCBBF2025458, OCBBF2025527, OCBBF2025730, OCBBF2026645, OCBBF2027423, OCBBF2027478, OCBBF2028173, OCBBF2028935, OCBBF2029901, OCBBF2030354, OCBBF2030517, OCBBF2030574, OCBBF2030708, OCBBF2031167, OCBBF2031366, OCBBF2032590, OCBBF2032599, OCBBF2032611, OCBBF2032671, OCBBF2033869, OCBBF2035110, OCBBF2035214, OCBBF2035564, OCBBF2035885, OCBBF2035916, OCBBF2036476, OCBBF2036743, OCBBF2037068, OCBBF2037340, OCBBF2037398, OCBBF2037547, OCBBF2037598, OCBBF2037638, OCBBF2038317, OCBBF3000296, OCBBF3000483, OCBBF3002553, OCBBF3002600, OCBBF3003320, OCBBF3003592, OCBBF3004314, OCBBF3006802, OCBBF3007516, OCBBF3008230, OCBBF3009279, PEBLM2004666, PERIC2000889, PERIC2002766, PERIC2003720, PLACE6001185, PLACE6019385, PUAEN2002489, PUAEN2005930, PUAEN2006701, PUAEN2007044, PUAEN2009174, PUAEN2009655, RECTM2001347, SKMUS2000757, SKNMC2002402, SKNSH2000482, SMINT2001818, SPLEN2001599, SPLEN2002467, SPLEN2006122, SPLEN2010912, SPLEN2012624, SPLEN2025491, SPLEN2027268, SPLEN2028914, SPLEN2029912, SPLEN2031424, SPLEN2031547, SPLEN2032154, SPLEN2034781, SPLEN2036821, SPLEN2036932, SPLEN2037194, SPLEN2038345, SPLEN2042303, SYNOV1000374, SYNOV2005216, SYNOV2014400, SYNOV4002346, SYNOV4002883, SYNOV4007430, SYNOV4007671, SYNOV4008440, TESOP2001605, TESOP2002273, TESOP2002451, TESOP2002950, TESTI1000330, TESTI2003573, TESTI2009474, TESTI2049246, TESTI4000014, TESTI4000209, TESTI4000349, TESTI4001100, TESTI4001561, TESTI4002290, TESTI4002647, TESTI4005857, TESTI4006137, TESTI4006326, TESTI4008797, TESTI4009286, TESTI4010377, TESTI4010851, TESTI4010928, TESTI4011161, TESTI4012702, TESTI4013675, TESTI4013817, TESTI4014159, TESTI4014175, TESTI4014306, TESTI4014694, TESTI4014818, TESTI4019843, TESTI4021478, TESTI4022936, TESTI4024420, TESTI4027821, TESTI4029836, TESTI4037156, TESTI4037188, TESTI4046819, THYMU2001090, THYMU2011736, THYMU2014353, THYMU2016204, THYMU2016523, THYMU2023967, THYMU2025707, THYMU2030264, THYMU2031341, THYMU2031890, THYMU2032696, THYMU2032825, THYMU2033308, THYMU2033787, THYMU2034374, THYMU2035735, THYMU2037226, THYMU2039315, THYMU2039780, THYMU2040975, THYMU3001083, THYMU3001234, THYMU3001379, THYMU3003309, THYMU3004835, THYMU3006485, THYMU3007137, THYMU3008171, TKIDN2009641, TKIDN2009889, TKIDN2010934, TKIDN2013287, TKIDN2015788, TLIVE2001327, TLIVE2004320, TRACH1000205, TRACH2001443, TRACH2001549, TRACH2001684, TRACH2005811, TRACH2006049, TRACH2007834, TRACH2008300, TRACH2023299, TRACH2025344, TRACH2025535, TRACH2025911, TRACH3000014, TRACH3001427, TRACH3002192, TRACH3004068, TRACH3004721, TRACH3005294, TRACH3006038, TRACH3006412, TRACH3007479, TRACH3008093, TRACH3009455, TSTOM1000135, TUTER1000122, TUTER2000904, UTERU2002410, UTERU2004929, UTERU2005621, UTERU2006115, UTERU2007520, UTERU2014678, UTERU2019706, UTERU2019940, UTERU2021163, UTERU2023039, UTERU2023175, UTERU2026203, UTERU2030213, UTERU2030280, UTERU3000226, UTERU3000899, UTERU3001571, UTERU3001572, UTERU3001766, UTERU3003135, UTERU3004709, UTERU3005230, UTERU3005460, UTERU3005907, UTERU3005970, UTERU3006308, UTERU3007419, UTERU3007640, UTERU3007913, UTERU3009259, UTERU3009517, UTERU3009871

[0704] ADRGL2000042, BLADE2006830, BRACE2002589, BRACE2003609, BRACE2009318, BRACE2011677, BRACE2029396, BRACE2037299, BRACE2039823, BRACE2039832, BRACE2043105, BRACE3001058, BRACE3001113, BRACE3003026, BRACE3003053, BRACE3009127, BRACE3010076, BRACE3015829, BRACE3021148, BRALZ2017844, BRAMY2019111, BRAMY2035070, BRAMY2035449, BRAMY2035718, BRAMY2038516, BRAMY2039341, BRAMY2040159, BRAMY2041434, BRAMY2045471, BRAMY3004800, BRAWH1000369, BRAWH2006207, BRAWH2006395, BRAWH2008993, BRAWH2009393, BRAWH2010552, BRAWH3007441, BRAWH3009017, BRCAN2002473, BRCAN2002854, BRCAN2003070, BRCAN2014229, BRCOC2019841, BRHIP2002722, BRHIP2003272, BRHIP2005271, BRHIP2005724, BRHIP2006617, BRHIP2008389, BRHIP2012360, BRHIP2017553, BRHIP2026877, BRHIP3000017, BRHIP3000240, BRHIP3008314, BRHIP3026052, BRSTN2013354, BRTHA2002133, BRTHA2002702, BRTHA2007060, BRTHA2010033, BRTHA2011321, BRTHA2013426, BRTHA2013610, BRTHA2016318, BRTHA2017364, BRTHA2017972, BRTHA2018011, BRTHA2018443, BRTHA3000296, BRTHA3003000, BRTHA3008826, CTONG2008721, CTONG2020374, CTONG2020378, CTONG2020411, CTONG2024031, CTONG3004726, FCBBF1000509, FCBBF3010361, FCBBF3027854, FEBRA2000790, FEBRA2001990, FEBRA2006519, FEBRA2008692, FEBRA2014122, FEBRA2027609, FEBRA2028516, HCASM2003018, HCHON2000508, HCHON2000743, HCHON2004858, HSYRA2005628, IMR322001879, NT2RI2009583, NT2RP8000521, OCBBF2003327, OCBBF2005433, OCBBF2006987, OCBBF2008144, OCBBF2009583, OCBBF2011669, OCBBF2019684, OCBBF2020048, OCBBF2030116, OCBBF2032274, OCBBF2034637, OCBBF3002654, OCBBF3003761, OCBBF3004972, PERIC2007068, PUAEN2006335, SPLEN2016932, SPLEN2039379, SYNOV2006620, SYNOV2021953, TESTI1000266, TESTI2015626, TESTI2026647, TESTI4000214, TESTI4001984, TESTI4008058, TESTI4013894, TESTI4015442, TESTI4017714, TESTI4025268, TESTI4025547, TESTI4026207, TESTI4032090, THYMU2004284, THYMU2040925, THYMU3000360, TKIDN2018926, TLIVE2002046, TRACH3000134, UTERU2008040, UTERU2011220, UTERU2021820, UTERU2028734

[0705] The result of comparative analysis of cDNA libraries derived from fetal heart (FEHRT) and adult heart (HEART) (Table 22) showed that the genes whose expression levels were different between the two were 34 and two clones as described below.

[0706] BRAMY2040592, BRAWH2001671, BRSTN2016470, CTONG2017500, CTONG2028124, CTONG3000657, D3OST3000169, FEBRA2008287, HCHON2000244, HCHON2000626, HEART1000010, HEART1000074, HEART1000088, HEART1000139, HEART2001680, HEART2001756, HEART2006131, HEART2006909, HEART2007031, HEART2010391, HEART2010492, HEART2010495, KIDNE2000665, NB9N41000340, NT2RI2003993, NT2RI3002892, OCBBF2024850, SKMUS2006394, SMINT2001818, TESTI4000209, TKIDN2015788, TRACH3002192, TRACH3005294, TRACH3007479 HEART2009680, THYMU2004284

[0707] The result of comparative analysis of cDNA libraries derived from fetal kidney (FEKID) and adult kidney (KIDNE) (Table 23) showed that the genes whose expression levels were different between the two were 40 and two clones as described below.

[0708] BRACE2043665, BRACE3010428, BRSTN2016470, CTONG1000087, CTONG2028124, CTONG3008894, HCASM2003415, HCHON2000244, HEART1000074, HHDPC1000118, KIDNE1000064, KIDNE2000665, KIDNE2000722, KIDNE2000832, KIDNE2000846, KIDNE2001361, KIDNE2001847, KIDNE2002252, KIDNE2002991, KIDNE2003837, KIDNE2005543, KIDNE2006580, KIDNE2010264, KIDNE2011314, KIDNE2011532, KIDNE2011635, KIDNE2012945, KIDNE2013095, PEBLM2004666, PLACE6019385, STOMA1000189, SYNOV4007671, TBAES2001258, TESOP2002451, TESTI4000014, TESTI4012702, THYMU2032014, TRACH2001684, TRACH2007834, UTERU2023175 NT2RI2009583, OCBBF2008144

[0709] The result of comparative analysis of cDNA libraries derived from fetal lung (FELNG) and adult lung (HLUNG) (Table 24) showed that the genes whose expression levels were different between the two were 51 and eight clones as described below.

[0710] BRAWH3007592, BRCAN2021028, BRHIP2000819, BRSTN2016470, CTONG1000087, CTONG2028124, HCASM2007047, HEART1000074, HLUNG1000017, HLUNG2000014, HLUNG2001996, HLUNG2002465, HLUNG2002958, HLUNG2003003, HLUNG2003872, HLUNG2010464, HLUNG2011041, HLUNG2011298, HLUNG2012049, HLUNG2012287, HLUNG2012727, HLUNG2013204, HLUNG2013304, HLUNG2013622, HLUNG2013851, HLUNG2014262, HLUNG2014288, HLUNG2014449, HLUNG2015617, HLUNG2017350, HLUNG2017546, HLUNG2017806, HLUNG2019058, HSYRA2008376, KIDNE2012945, NT2RI2003993, NT2RI3007543, OCBBF3000483, SMINT1000192, SPLEN2028914, SPLEN2031547, STOMA1000189, SYNOV4007671, TESOP1000127, TESTI2003573, TESTI4000014, TESTI4037156, TRACH2005811, TRACH3004068, UTERU2005621, UTERU2023175

FEBRA2028516, HCHON2000508, HLUNG2013350, HLUNG2015418, HLUNG2015548, HLUNG2016862, TESTI2015626, TRACH2019672

[0711] These genes are involved in regeneration of tissues and/or cells.

[0712] A nucleotide sequence information-based analysis was carried out to identify the genes whose expression frequencies are higher or lower in CD34+ cell (cell expressing a glycoprotein CD34) treated with the osteoclast differentiation factor (Molecular Medicine 38. 642-648. (2001)) than in the untreated CD34+ cell, which is the precursor cell of monocyte/macrophage line. The result of comparative analysis for the frequency between the two cDNA libraries prepared from the RNA of CD34+ cells (CD34C) and from the RNA of CD34+ cells treated with the osteoclast differentiation factor (D30ST, D60ST or D90ST) showed following genes whose expression levels were different between the two.

TABLE 2

| Clone ID | CD34C | D30ST | D60ST | D90ST |
|---|---|---|---|---|
| BRACE3013780 | 0.000 | 55.996 | 0.000 | 0.000 |
| BRAMY2047420 | 42.545 | 0.000 | 0.000 | 0.000 |
| BRSTN2016470 | 0.000 | 2.555 | 0.000 | 0.000 |
| CTONG3008894 | 0.000 | 8.487 | 0.000 | 0.000 |
| D30ST2002182 | 0.000 | 86.773 | 0.000 | 0.000 |
| D30ST2002648 | 0.000 | 17.515 | 0.000 | 0.000 |
| D30ST3000169 | 20.553 | 28.566 | 0.000 | 19.796 |
| PEBLM2005183 | 0.000 | 0.000 | 0.000 | 50.747 |
| PUAEN2009655 | 0.000 | 0.000 | 0.000 | 49.285 |
| TESTI4000014 | 7.500 | 0.000 | 0.000 | 0.000 |
| TESTI4010851 | 0.000 | 0.000 | 0.000 | 7.372 |
| TRACH2023299 | 0.000 | 74.521 | 0.000 | 0.000 |
| TRACH2025535 | 0.000 | 6.778 | 0.000 | 0.000 |
| TRACH3001427 | 0.000 | 0.000 | 0.000 | 12.519 |
| UTERU2006137 | 0.000 | 90.731 | 0.000 | 0.000 |
| HCHON2000508 | 0.000 | 4.360 | 50.138 | 0.000 |
| TESTI2015626 | 0.000 | 0.000 | 0.000 | 4.435 |

[0713] A survey was performed for genes whose expression levels are varied in response to induction of differentiation (stimulation by retinoic acid (RA) or growth inhibitor treatment after RA stimulation) in cultured cells of a neural strain, NT2. The result of comparative analysis of cDNA libraries derived from undifferentiated NT2 cells (NT2RM) and the cells subjected to the differentiation treatment (NT2RP, NT2R1 or NT2NE) showed following genes whose expression levels were different between the two.

TABLE 3

| Clone ID | NT2RM | NT2RP | NT2RI | NT2NE |
|---|---|---|---|---|
| BNGH42007788 | 0.000 | 7.419 | 0.000 | 0.000 |
| BRACE1000186 | 0.000 | 5.211 | 0.000 | 7.836 |
| BRACE2006319 | 0.000 | 8.450 | 0.000 | 0.000 |
| BRACE2014306 | 0.000 | 0.000 | 0.000 | 17.640 |
| BRACE2015058 | 0.000 | 10.567 | 0.000 | 0.000 |
| BRACE2044286 | 0.000 | 0.000 | 33.923 | 0.000 |
| BRACE3010428 | 0.000 | 0.000 | 2.080 | 0.000 |
| BRAMY2044078 | 0.000 | 10.567 | 0.000 | 0.000 |
| BRAWH2014645 | 0.000 | 7.643 | 1.921 | 0.000 |
| BRAWH2014662 | 0.000 | 0.000 | 0.000 | 56.250 |
| BRAWH3002574 | 0.000 | 0.000 | 12.014 | 0.000 |
| BRAWH3003992 | 0.000 | 34.956 | 0.000 | 0.000 |
| BRAWH3005981 | 0.000 | 70.676 | 0.000 | 0.000 |
| BRAWH3007592 | 0.000 | 8.644 | 3.259 | 0.000 |
| BRCAN2009432 | 0.000 | 3.173 | 0.000 | 0.000 |
| BRCAN2016619 | 0.000 | 0.000 | 23.940 | 0.000 |
| BRCAN2028355 | 0.000 | 0.000 | 0.000 | 5.354 |
| BRHIP2001074 | 0.000 | 47.218 | 0.000 | 0.000 |
| BRHIP2007741 | 0.000 | 0.000 | 6.309 | 6.291 |
| BRHIP2014228 | 0.000 | 35.475 | 0.000 | 0.000 |
| BRHIP2024146 | 0.000 | 0.000 | 1.106 | 0.000 |
| BRHIP3007586 | 0.000 | 0.000 | 0.000 | 12.507 |
| BRHIP3018797 | 0.000 | 0.000 | 4.869 | 0.000 |
| BRTHA2003461 | 0.000 | 0.000 | 3.989 | 0.000 |
| BRTHA3000633 | 0.000 | 0.000 | 62.102 | 0.000 |
| BRTHA3003490 | 0.000 | 3.913 | 0.000 | 0.000 |
| COLON2001721 | 0.000 | 0.000 | 10.053 | 0.000 |
| CTONG1000087 | 0.000 | 5.041 | 5.701 | 3.790 |
| CTONG2008233 | 0.000 | 8.275 | 2.496 | 7.466 |
| CTONG2020638 | 0.000 | 0.000 | 22.499 | 0.000 |
| CTONG2028124 | 0.000 | 1.211 | 0.913 | 0.000 |
| CTONG3003905 | 0.000 | 47.197 | 0.000 | 0.000 |
| CTONG3008894 | 0.000 | 7.008 | 9.247 | 2.634 |
| CTONG3009028 | 0.000 | 0.000 | 2.924 | 0.000 |
| CTONG3009239 | 0.000 | 0.000 | 2.624 | 0.000 |
| DFNES2011499 | 0.000 | 0.000 | 22.548 | 0.000 |
| FCBBF3001977 | 0.000 | 17.952 | 13.536 | 0.000 |
| FEBRA1000030 | 0.000 | 0.000 | 0.000 | 59.247 |
| FEBRA2006396 | 0.000 | 0.000 | 14.606 | 0.000 |
| FEBRA2007801 | 0.000 | 5.950 | 0.000 | 0.000 |
| HCHON2000028 | 0.000 | 0.000 | 5.766 | 0.000 |
| HCHON2000244 | 0.000 | 3.171 | 1.195 | 0.000 |
| HCHON2001084 | 0.000 | 0.000 | 4.173 | 0.000 |
| HCHON2001217 | 0.000 | 2.509 | 5.674 | 0.000 |
| HCHON2001548 | 0.000 | 27.583 | 0.000 | 0.000 |
| HCHON2006250 | 0.000 | 3.771 | 0.000 | 0.000 |
| HEART1000074 | 0.000 | 1.830 | 0.000 | 0.000 |
| HHDPC1000118 | 0.000 | 10.102 | 3.809 | 15.191 |
| HSYRA2009075 | 0.000 | 2.899 | 0.000 | 0.000 |
| IMR322000127 | 0.000 | 3.733 | 0.000 | 0.000 |
| IMR322001380 | 0.000 | 0.000 | 3.602 | 7.184 |
| KIDNE2000665 | 0.000 | 0.000 | 0.000 | 7.016 |
| KIDNE2002252 | 0.000 | 0.000 | 3.961 | 0.000 |
| MESAN2006563 | 0.000 | 1.664 | 2.510 | 0.000 |
| MESAN2012054 | 0.000 | 0.000 | 4.636 | 0.000 |
| MESAN2015515 | 0.000 | 6.402 | 0.000 | 0.000 |
| NT2NE2003252 | 0.000 | 0.000 | 0.000 | 100.000 |
| NT2NE2005890 | 0.000 | 0.000 | 0.000 | 64.265 |
| NT2NE2006531 | 0.000 | 0.000 | 0.000 | 100.000 |
| NT2NE2006909 | 0.000 | 0.000 | 0.000 | 1.034 |
| NT2NE2008060 | 0.000 | 0.000 | 0.000 | 74.472 |
| NT2RI2003993 | 0.000 | 0.000 | 6.899 | 0.000 |
| NT2RI2004618 | 0.000 | 0.000 | 100.000 | 0.000 |
| NT2RI2005166 | 0.000 | 0.000 | 47.393 | 0.000 |
| NT2RI2006686 | 0.000 | 0.000 | 21.246 | 0.000 |
| NT2RI2008724 | 0.000 | 0.000 | 3.337 | 0.000 |
| NT2RI2009855 | 0.000 | 0.000 | 100.000 | 0.000 |
| NT2RI2011422 | 0.000 | 0.000 | 100.000 | 0.000 |
| NT2RI2011683 | 0.000 | 0.000 | 100.000 | 0.000 |
| NT2RI2012659 | 0.000 | 0.000 | 24.645 | 0.000 |
| NT2RI2012990 | 0.000 | 0.000 | 24.360 | 0.000 |
| NT2RI2013357 | 0.000 | 0.000 | 73.545 | 0.000 |
| NT2RI2014247 | 0.000 | 0.000 | 27.718 | 0.000 |
| NT2RI2014551 | 0.000 | 0.000 | 100.000 | 0.000 |
| NT2RI2014733 | 0.000 | 0.000 | 45.319 | 0.000 |
| NT2RI2016128 | 0.000 | 0.000 | 100.000 | 0.000 |
| NT2RI2018311 | 0.000 | 0.000 | 78.082 | 0.000 |
| NT2RI2018883 | 0.000 | 0.000 | 49.384 | 0.000 |
| NT2RI2019751 | 0.000 | 0.000 | 71.913 | 0.000 |
| NT2RI2023303 | 0.000 | 0.000 | 100.000 | 0.000 |
| NT2RI2025909 | 0.000 | 0.000 | 100.000 | 0.000 |
| NT2RI2025957 | 0.000 | 0.000 | 100.000 | 0.000 |
| NT2RI2027081 | 0.000 | 0.000 | 100.000 | 0.000 |
| NT2RI2027396 | 0.000 | 0.000 | 100.000 | 0.000 |
| NT2RI3000622 | 0.000 | 0.000 | 15.558 | 0.000 |
| NT2RI3001263 | 0.000 | 0.000 | 100.000 | 0.000 |
| NT2RI3001515 | 0.000 | 0.000 | 19.682 | 0.000 |
| NT2RI3002303 | 0.000 | 0.000 | 100.000 | 0.000 |
| NT2RI3002842 | 0.000 | 45.164 | 34.054 | 0.000 |
| NT2RI3002892 | 0.000 | 4.241 | 3.198 | 0.000 |
| NT2RI3003031 | 0.000 | 0.000 | 100.000 | 0.000 |
| NT2RI3003095 | 0.000 | 0.000 | 100.000 | 0.000 |
| NT2RI3003162 | 0.000 | 0.000 | 100.000 | 0.000 |
| NT2RI3003382 | 0.000 | 0.000 | 71.913 | 0.000 |
| NT2RI3003409 | 0.000 | 0.000 | 100.000 | 0.000 |
| NT2RI3004381 | 0.000 | 0.000 | 100.000 | 0.000 |
| NT2RI3004510 | 0.000 | 0.000 | 51.230 | 0.000 |
| NT2RI3005202 | 0.000 | 0.000 | 100.000 | 0.000 |
| NT2RI3005403 | 0.000 | 0.000 | 62.102 | 0.000 |
| NT2RI3005724 | 0.000 | 14.284 | 10.770 | 0.000 |
| NT2RI3006132 | 0.000 | 0.000 | 100.000 | 0.000 |
| NT2RI3006171 | 0.000 | 0.000 | 100.000 | 0.000 |
| NT2RI3006284 | 0.000 | 0.000 | 3.760 | 0.000 |
| NT2RI3006340 | 0.000 | 0.000 | 14.839 | 0.000 |
| NT2RI3006376 | 0.000 | 0.000 | 100.000 | 0.000 |
| NT2RI3006673 | 0.000 | 0.000 | 18.135 | 0.000 |
| NT2RI3006796 | 0.000 | 0.000 | 100.000 | 0.000 |
| NT2RI3007065 | 0.000 | 0.000 | 100.000 | 0.000 |
| NT2RI3007158 | 0.000 | 0.000 | 100.000 | 0.000 |
| NT2RI3007291 | 0.000 | 0.000 | 22.746 | 0.000 |
| NT2RI3007543 | 0.000 | 0.000 | 1.542 | 6.150 |
| NT2RI3007757 | 0.000 | 30.480 | 45.964 | 0.000 |
| NT2RI3007978 | 0.000 | 0.000 | 100.000 | 0.000 |
| NT2RI3008055 | 0.000 | 0.000 | 40.142 | 0.000 |
| NT2RI3008162 | 0.000 | 0.000 | 100.000 | 0.000 |
| NT2RI3008652 | 0.000 | 0.000 | 100.000 | 0.000 |
| NT2RI3008697 | 0.000 | 0.000 | 100.000 | 0.000 |
| NT2RI3008974 | 0.000 | 0.000 | 100.000 | 0.000 |
| NT2RI3009158 | 0.000 | 0.000 | 45.727 | 0.000 |
| NT2RP7000359 | 0.000 | 100.000 | 0.000 | 0.000 |
| NT2RP7000466 | 0.000 | 2.098 | 3.164 | 0.000 |
| NT2RP7004027 | 0.000 | 100.000 | 0.000 | 0.000 |
| NT2RP7004123 | 0.000 | 4.625 | 0.000 | 0.000 |
| NT2RP7005118 | 0.000 | 100.000 | 0.000 | 0.000 |
| NT2RP7005529 | 0.000 | 35.588 | 0.000 | 0.000 |
| NT2RP7005846 | 0.000 | 100.000 | 0.000 | 0.000 |
| NT2RP7009030 | 0.000 | 46.373 | 0.000 | 0.000 |
| NT2RP7009147 | 0.000 | 7.679 | 2.895 | 0.000 |
| NT2RP7009867 | 0.000 | 100.000 | 0.000 | 0.000 |
| NT2RP7010128 | 0.000 | 100.000 | 0.000 | 0.000 |
| NT2RP7010599 | 0.000 | 77.250 | 0.000 | 0.000 |
| NT2RP7011570 | 0.000 | 100.000 | 0.000 | 0.000 |
| NT2RP7013795 | 0.000 | 10.432 | 0.000 | 0.000 |
| NT2RP7014005 | 0.000 | 14.022 | 21.145 | 0.000 |
| NT2RP7015512 | 0.000 | 31.156 | 0.000 | 0.000 |
| NT2RP7017365 | 0.000 | 100.000 | 0.000 | 0.000 |
| NT2RP7017474 | 0.000 | 45.366 | 0.000 | 0.000 |
| NT2RP7017546 | 0.000 | 100.000 | 0.000 | 0.000 |
| NT2RP8000137 | 0.000 | 100.000 | 0.000 | 0.000 |
| NT2RP8000296 | 0.000 | 100.000 | 0.000 | 0.000 |
| NT2RP8000483 | 0.000 | 100.000 | 0.000 | 0.000 |
| NTONG2005969 | 0.000 | 15.484 | 0.000 | 0.000 |
| OCBBF2007028 | 0.000 | 0.000 | 2.509 | 0.000 |
| OCBBF2037068 | 0.000 | 0.000 | 27.189 | 54.224 |
| PLACE7000514 | 0.000 | 0.000 | 8.644 | 0.000 |
| PUAEN2007044 | 0.000 | 3.455 | 13.024 | 0.000 |
| SPLEN2002467 | 0.000 | 7.852 | 0.000 | 0.000 |
| SPLEN2006122 | 0.000 | 0.000 | 1.530 | 0.000 |
| SPLEN2028914 | 0.000 | 6.730 | 10.149 | 0.000 |
| SPLEN2031547 | 0.000 | 0.000 | 2.861 | 0.000 |
| SYNOV4002346 | 0.000 | 0.000 | 10.899 | 0.000 |
| SYNOV4007671 | 42.189 | 0.000 | 0.000 | 2.657 |
| SYNOV4008440 | 0.000 | 0.000 | 2.681 | 0.000 |
| TESOP2002273 | 0.000 | 9.782 | 0.000 | 0.000 |
| TESTI2003573 | 0.000 | 0.000 | 13.573 | 0.000 |
| TESTI4000014 | 0.000 | 3.443 | 0.974 | 0.000 |
| TESTI4009286 | 0.000 | 1.747 | 0.000 | 0.000 |
| TESTI4010851 | 0.000 | 5.270 | 1.987 | 0.000 |
| TESTI4012702 | 0.000 | 0.000 | 3.961 | 0.000 |
| TESTI4029671 | 0.000 | 44.826 | 0.000 | 0.000 |
| TESTI4037156 | 0.000 | 4.669 | 1.509 | 2.006 |
| THYMU3000133 | 0.000 | 34.767 | 8.738 | 0.000 |
| TRACH1000205 | 0.000 | 0.000 | 7.152 | 0.000 |
| TRACH2005811 | 0.000 | 0.000 | 0.000 | 3.822 |
| TRACH2007834 | 0.000 | 3.647 | 1.833 | 0.000 |
| TRACH2025535 | 0.000 | 1.399 | 3.165 | 4.208 |
| TRACH3001427 | 0.000 | 8.951 | 1.687 | 3.365 |
| TRACH3002192 | 0.000 | 0.000 | 2.267 | 4.520 |
| TRACH3004721 | 0.000 | 14.013 | 5.283 | 10.536 |
| TRACH3008093 | 0.000 | 0.000 | 8.902 | 0.000 |
| TRACH3008535 | 0.000 | 68.270 | 0.000 | 0.000 |
| TRACH3008713 | 0.000 | 68.270 | 0.000 | 0.000 |
| UTERU2002410 | 0.000 | 0.000 | 1.067 | 0.000 |
| UTERU2023175 | 0.000 | 7.176 | 0.000 | 5.396 |
| ADRGL2000042 | 0.000 | 0.000 | 0.000 | 9.204 |
| BRACE2003609 | 0.000 | 21.907 | 0.000 | 32.942 |
| BRACE3003026 | 0.000 | 0.000 | 59.349 | 0.000 |
| BRHIP3000017 | 0.000 | 0.000 | 8.013 | 0.000 |
| CTONG2020411 | 0.000 | 16.593 | 25.022 | 0.000 |
| FCBBF1000509 | 0.000 | 0.000 | 0.000 | 6.762 |
| FCBBF3027854 | 0.000 | 0.000 | 28.447 | 0.000 |
| FEBRA2028516 | 0.000 | 11.027 | 6.236 | 0.000 |
| HCHON2000508 | 0.000 | 0.900 | 0.000 | 0.000 |
| IMR322001879 | 0.000 | 0.000 | 35.028 | 0.000 |
| NT2RI2005772 | 0.000 | 0.000 | 100.000 | 0.000 |
| NT2RI2008952 | 0.000 | 0.000 | 100.000 | 0.000 |
| NT2RI2009583 | 0.000 | 0.000 | 0.813 | 0.811 |
| NT2RI2018448 | 0.000 | 15.176 | 11.442 | 0.000 |
| NT2RI2027157 | 0.000 | 0.000 | 100.000 | 0.000 |
| NT2RI3000174 | 0.000 | 0.000 | 61.866 | 0.000 |
| NT2RI3001132 | 0.000 | 0.000 | 100.000 | 0.000 |
| NT2RI3002557 | 0.000 | 0.000 | 100.000 | 0.000 |
| NT2RI3005928 | 0.000 | 0.000 | 100.000 | 0.000 |
| NT2RI3007167 | 0.000 | 0.000 | 100.000 | 0.000 |
| NT2RI3007443 | 0.000 | 0.000 | 100.000 | 0.000 |
| NT2RP7008435 | 0.000 | 100.000 | 0.000 | 0.000 |
| NT2RP8000521 | 0.000 | 62.933 | 0.000 | 0.000 |
| OCBBF2006987 | 0.000 | 62.306 | 0.000 | 0.000 |
| PERIC2007068 | 0.000 | 3.719 | 2.804 | 0.000 |
| TESTI2015626 | 9.463 | 0.000 | 0.000 | 2.384 |
| TESTI4015442 | 0.000 | 48.593 | 0.000 | 0.000 |
| TLIVE2002046 | 0.000 | 0.000 | 3.298 | 0.000 |
| TRACH3000134 | 0.000 | 43.581 | 0.000 | 0.000 |
| TUTER2000057 | 0.000 | 0.000 | 7.539 | 0.000 |

[0714] The result of comparative analysis of cDNA libraries derived from the cerebral cortex of Alzheimer patients (BRALZ and BRASW), and from whole tissues of a normal brain (BRAWH) showed the following genes whose expression levels differed between the two.

TABLE 4

| Clone ID | BRAWH | BRALZ | BRASW |
|---|---|---|---|
| ASTRO1000009 | 2.611 | 0.000 | 0.000 |
| BLADE2008398 | 12.401 | 0.000 | 0.000 |
| BRACE1000186 | 4.324 | 0.000 | 0.000 |
| BRACE1000258 | 31.956 | 0.000 | 0.000 |
| BRACE1000533 | 11.795 | 0.000 | 0.000 |
| BRACE2005457 | 58.488 | 0.000 | 0.000 |
| BRACE2010489 | 63.510 | 0.000 | 0.000 |
| BRACE2014657 | 15.451 | 0.000 | 0.000 |
| BRACE2035381 | 10.177 | 0.000 | 0.000 |
| BRACE2044286 | 18.667 | 0.000 | 0.000 |
| BRACE2045954 | 27.309 | 0.000 | 0.000 |
| BRACE3000787 | 32.844 | 0.000 | 0.000 |
| BRACE3003192 | 58.488 | 0.000 | 0.000 |
| BRACE3005499 | 31.276 | 0.000 | 0.000 |
| BRACE3007480 | 19.471 | 0.000 | 0.000 |
| BRACE3009237 | 18.139 | 0.000 | 0.000 |
| BRACE3009724 | 58.488 | 0.000 | 0.000 |
| BRACE3009747 | 2.237 | 0.000 | 0.000 |
| BRACE3010428 | 6.868 | 0.000 | 0.000 |
| BRACE3011271 | 11.036 | 0.000 | 0.000 |
| BRACE3011421 | 28.251 | 0.000 | 0.000 |
| BRACE3012364 | 8.506 | 0.000 | 0.000 |
| BRACE3022769 | 4.285 | 0.000 | 0.000 |
| BRACE3026735 | 24.173 | 0.000 | 0.000 |
| BRACE3031838 | 58.488 | 0.000 | 0.000 |
| BRALZ2011796 | 5.511 | 39.830 | 0.000 |
| BRALZ2012183 | 0.000 | 100.000 | 0.000 |
| BRALZ2012848 | 0.000 | 100.000 | 0.000 |
| BRALZ2014484 | 0.000 | 100.000 | 0.000 |
| BRALZ2016085 | 0.000 | 100.000 | 0.000 |
| BRALZ2016498 | 0.000 | 100.000 | 0.000 |
| BRALZ2017359 | 0.000 | 75.184 | 0.000 |
| BRAMY2003008 | 26.445 | 0.000 | 0.000 |
| BRAMY2005052 | 11.612 | 0.000 | 0.000 |
| BRAMY2019300 | 49.811 | 0.000 | 0.000 |
| BRAMY2019963 | 20.428 | 0.000 | 0.000 |
| BRAMY2036567 | 7.474 | 0.000 | 0.000 |
| BRAMY2037823 | 29.664 | 0.000 | 0.000 |
| BRAMY2040592 | 3.482 | 12.582 | 0.000 |
| BRAMY3002803 | 14.428 | 0.000 | 0.000 |
| BRAMY3004224 | 33.027 | 0.000 | 0.000 |
| BRAMY3005091 | 19.193 | 0.000 | 0.000 |
| BRASW1000053 | 0.000 | 0.000 | 100.000 |
| BRASW1000125 | 0.000 | 0.000 | 99.054 |
| BRAWH1000127 | 15.983 | 0.000 | 0.000 |
| BRAWH2001395 | 14.290 | 3.037 | 0.000 |
| BRAWH2001671 | 7.605 | 0.000 | 0.000 |
| BRAWH2001940 | 37.398 | 0.000 | 0.000 |
| BRAWH2001973 | 37.398 | 0.000 | 0.000 |
| BRAWH2002560 | 6.454 | 0.000 | 0.000 |
| BRAWH2002761 | 100.000 | 0.000 | 0.000 |
| BRAWH2005315 | 100.000 | 0.000 | 0.000 |
| BRAWH2007658 | 58.101 | 0.000 | 0.000 |
| BRAWH2010000 | 18.745 | 0.000 | 0.000 |
| BRAWH2010084 | 100.000 | 0.000 | 0.000 |
| BRAWH2010536 | 14.718 | 0.000 | 0.000 |
| BRAWH2012162 | 36.060 | 0.000 | 0.000 |
| BRAWH2012326 | 100.000 | 0.000 | 0.000 |
| BRAWH2013294 | 39.442 | 0.000 | 0.000 |
| BRAWH2013871 | 37.485 | 0.000 | 0.000 |
| BRAWH2014414 | 17.865 | 0.000 | 0.000 |
| BRAWH2014645 | 4.228 | 0.000 | 0.000 |
| BRAWH2014662 | 15.521 | 0.000 | 0.000 |
| BRAWH2014876 | 10.473 | 0.000 | 0.000 |
| BRAWH2014954 | 58.488 | 0.000 | 0.000 |
| BRAWH2016221 | 47.417 | 0.000 | 0.000 |
| BRAWH2016439 | 100.000 | 0.000 | 0.000 |
| BRAWH2016702 | 73.807 | 0.000 | 0.000 |
| BRAWH2016724 | 35.119 | 0.000 | 0.000 |
| BRAWH3000078 | 100.000 | 0.000 | 0.000 |
| BRAWH3000100 | 100.000 | 0.000 | 0.000 |
| BRAWH3000314 | 71.553 | 0.000 | 0.000 |
| BRAWH3000491 | 100.000 | 0.000 | 0.000 |
| BRAWH3001326 | 45.606 | 0.000 | 0.000 |
| BRAWH3001475 | 100.000 | 0.000 | 0.000 |
| BRAWH3001891 | 34.539 | 0.000 | 0.000 |
| BRAWH3002574 | 13.222 | 0.000 | 0.000 |
| BRAWH3002600 | 36.800 | 0.000 | 0.000 |
| BRAWH3002819 | 100.000 | 0.000 | 0.000 |
| BRAWH3002821 | 21.953 | 0.000 | 0.000 |
| BRAWH3003522 | 100.000 | 0.000 | 0.000 |
| BRAWH3003555 | 15.229 | 0.000 | 0.000 |
| BRAWH3003727 | 10.055 | 0.000 | 0.000 |
| BRAWH3003801 | 100.000 | 0.000 | 0.000 |
| BRAWH3003992 | 29.008 | 0.000 | 0.000 |
| BRAWH3004453 | 100.000 | 0.000 | 0.000 |
| BRAWH3004666 | 49.499 | 0.000 | 0.000 |
| BRAWH3005132 | 49.811 | 0.000 | 0.000 |
| BRAWH3005422 | 100.000 | 0.000 | 0.000 |
| BRAWH3005912 | 100.000 | 0.000 | 0.000 |
| BRAWH3005981 | 29.324 | 0.000 | 0.000 |
| BRAWH3006548 | 71.018 | 0.000 | 0.000 |
| BRAWH3006792 | 49.499 | 0.000 | 0.000 |
| BRAWH3007221 | 100.000 | 0.000 | 0.000 |
| BRAWH3007506 | 100.000 | 0.000 | 0.000 |
| BRAWH3007592 | 8.966 | 0.000 | 0.000 |
| BRAWH3007726 | 54.530 | 0.000 | 0.000 |
| BRAWH3007783 | 100.000 | 0.000 | 0.000 |
| BRAWH3008341 | 100.000 | 0.000 | 0.000 |
| BRAWH3008697 | 100.000 | 0.000 | 0.000 |
| BRAWH3008931 | 3.463 | 0.000 | 0.000 |
| BRAWH3009297 | 58.488 | 0.000 | 0.000 |
| BRCOC2003213 | 10.381 | 0.000 | 0.000 |
| BRCOC2014033 | 15.633 | 0.000 | 0.000 |
| BRCOC2020142 | 22.014 | 0.000 | 0.000 |
| BRHIP2000920 | 36.630 | 0.000 | 0.000 |
| BRHIP2005719 | 49.499 | 0.000 | 0.000 |
| BRHIP2007741 | 6.943 | 0.000 | 0.000 |
| BRHIP2014228 | 29.439 | 0.000 | 0.000 |
| BRHIP2024146 | 3.042 | 12.091 | 0.000 |
| BRHIP2026288 | 0.000 | 77.982 | 0.000 |
| BRHIP3000339 | 14.290 | 3.037 | 0.000 |
| BRHIP3006683 | 24.100 | 0.000 | 0.000 |
| BRHIP3007586 | 17.255 | 0.000 | 0.000 |
| BRHIP3008405 | 35.187 | 0.000 | 0.000 |
| BRHIP3018797 | 30.810 | 4.840 | 0.000 |
| BRSSN2000684 | 23.433 | 0.000 | 0.000 |
| BRSSN2011738 | 31.553 | 0.000 | 0.000 |
| BRSSN2014299 | 3.695 | 0.000 | 0.000 |
| BRSTN2008052 | 32.844 | 0.000 | 0.000 |
| BRSTN2015015 | 14.017 | 0.000 | 0.000 |
| BRSTN2016470 | 0.438 | 7.909 | 0.000 |
| BRTHA1000311 | 11.803 | 0.000 | 0.000 |
| BRTHA2008335 | 16.281 | 0.000 | 0.000 |
| BRTHA3002427 | 8.577 | 0.000 | 0.000 |
| BRTHA3003490 | 1.623 | 0.000 | 0.000 |
| BRTHA3008520 | 47.417 | 0.000 | 0.000 |
| BRTHA3017848 | 47.417 | 0.000 | 0.000 |
| COLON2001721 | 11.065 | 0.000 | 0.000 |
| CTONG2017500 | 2.649 | 0.000 | 0.000 |
| CTONG2028124 | 0.503 | 0.000 | 0.000 |
| CTONG3000657 | 3.880 | 0.000 | 0.000 |
| CTONG3001123 | 7.847 | 0.000 | 0.000 |
| CTONG3009328 | 11.993 | 43.334 | 0.000 |
| FCBBF2001183 | 16.537 | 5.975 | 0.000 |
| FCBBF3001977 | 7.448 | 0.000 | 0.000 |
| FEBRA2007544 | 14.689 | 0.000 | 0.000 |
| FEBRA2007801 | 4.937 | 0.000 | 0.000 |
| FEBRA2020886 | 12.124 | 0.000 | 0.000 |
| FEBRA2028618 | 5.082 | 0.000 | 0.000 |
| HCASM2007047 | 3.431 | 0.000 | 0.000 |
| HCHON2000244 | 0.658 | 0.000 | 0.000 |
| HCHON2000626 | 2.351 | 0.000 | 0.000 |
| HCHON2001217 | 3.123 | 0.000 | 0.000 |
| HCHON2002676 | 13.647 | 0.000 | 0.000 |
| HCHON2006250 | 1.565 | 0.000 | 0.000 |
| HEART1000074 | 0.759 | 0.000 | 0.000 |
| HHDPC1000118 | 2.096 | 0.000 | 0.000 |
| HLUNG2002465 | 1.209 | 0.000 | 0.000 |
| IMR322000127 | 3.098 | 5.597 | 0.000 |
| IMR322001380 | 0.000 | 7.163 | 0.000 |
| IMR322002035 | 36.176 | 0.000 | 0.000 |
| KIDNE2006580 | 7.013 | 0.000 | 0.000 |
| MESAN2006563 | 0.691 | 0.000 | 0.000 |
| MESAN2012054 | 12.754 | 0.000 | 0.000 |
| MESTC1000042 | 2.245 | 0.000 | 0.000 |
| NOVAR2001783 | 4.027 | 0.000 | 0.000 |
| NT2NE2006909 | 0.285 | 0.000 | 0.000 |
| NT2RI2008724 | 1.836 | 0.000 | 0.000 |
| NT2RI2012659 | 13.562 | 0.000 | 0.000 |
| NT2RI2014733 | 24.938 | 0.000 | 0.000 |
| NT2RI3002892 | 8.799 | 0.000 | 0.000 |
| NT2RI3006284 | 4.138 | 0.000 | 0.000 |
| NT2RI3006673 | 19.959 | 0.000 | 0.000 |
| NT2RI3007543 | 1.697 | 0.000 | 0.000 |
| NT2RI3008055 | 44.179 | 0.000 | 0.000 |
| NT2RP7005529 | 14.766 | 0.000 | 0.000 |
| NT2RP7009147 | 14.337 | 0.000 | 0.000 |
| NT2RP7014005 | 5.818 | 0.000 | 0.000 |
| NT2RP7017474 | 18.823 | 0.000 | 0.000 |
| NTONG2005969 | 0.000 | 11.607 | 0.000 |
| OCBBF2001794 | 4.728 | 0.000 | 0.000 |
| OCBBF2006005 | 9.535 | 0.000 | 0.000 |
| OCBBF2006764 | 15.345 | 0.000 | 0.000 |
| OCBBF2007028 | 9.665 | 0.000 | 0.000 |
| OCBBF2007114 | 0.000 | 38.623 | 0.000 |
| OCBBF2010140 | 32.508 | 0.000 | 0.000 |
| OCBBF2021286 | 18.456 | 0.000 | 0.000 |
| OCBBF2023162 | 0.000 | 37.152 | 0.000 |
| OCBBF2024850 | 4.445 | 0.000 | 0.000 |
| OCBBF2028935 | 5.789 | 4.183 | 0.000 |
| OCBBF2036743 | 11.053 | 0.000 | 0.000 |
| OCBBF2038317 | 19.713 | 0.000 | 0.000 |
| OCBBF3000483 | 11.973 | 0.000 | 0.000 |
| OCBBF3008230 | 29.840 | 0.000 | 0.000 |
| PEBLM2004666 | 3.715 | 0.000 | 0.000 |
| PLACE6001185 | 21.358 | 0.000 | 0.000 |
| PUAEN2005930 | 18.362 | 0.000 | 0.000 |
| PUAEN2006701 | 2.249 | 8.128 | 0.000 |
| PUAEN2007044 | 8.600 | 0.000 | 0.000 |
| PUAEN2009655 | 18.275 | 0.000 | 0.000 |
| SMINT2001818 | 0.000 | 3.387 | 0.000 |
| SPLEN2028914 | 2.792 | 0.000 | 0.000 |
| SPLEN2031424 | 15.229 | 0.000 | 0.000 |
| SPLEN2031547 | 1.574 | 5.689 | 0.000 |
| SPLEN2034781 | 27.984 | 0.000 | 0.000 |
| SPLEN2036932 | 2.932 | 0.000 | 0.000 |
| SYNOV2014400 | 12.977 | 0.000 | 0.000 |
| SYNOV4002346 | 5.997 | 0.000 | 0.000 |
| SYNOV4002883 | 23.940 | 0.000 | 0.000 |
| SYNOV4007430 | 31.677 | 0.000 | 0.000 |
| SYNOV4007671 | 0.000 | 2.649 | 0.000 |
| SYNOV4008440 | 1.475 | 0.000 | 0.000 |
| TESOP2002273 | 0.000 | 14.666 | 0.000 |
| TESOP2002451 | 2.375 | 0.000 | 0.000 |
| TESTI4000014 | 1.964 | 0.000 | 0.000 |
| TESTI4000209 | 2.649 | 0.000 | 0.000 |
| TESTI4001100 | 4.098 | 0.000 | 0.000 |
| TESTI4006137 | 25.755 | 0.000 | 0.000 |
| TESTI4008797 | 12.429 | 0.000 | 0.000 |
| TESTI4009286 | 1.450 | 0.000 | 0.000 |
| TESTI4010851 | 3.280 | 0.000 | 0.000 |
| TESTI4013817 | 27.163 | 0.000 | 0.000 |
| TESTI4014694 | 2.229 | 0.000 | 0.000 |
| TESTI4021478 | 22.098 | 0.000 | 0.000 |
| TESTI4022936 | 26.445 | 0.000 | 0.000 |
| TESTI4024420 | 37.398 | 0.000 | 0.000 |
| TESTI4027821 | 60.471 | 0.000 | 0.000 |
| THYMU2001090 | 21.252 | 0.000 | 0.000 |
| THYMU2033308 | 13.964 | 0.000 | 0.000 |
| THYMU2035735 | 1.319 | 0.000 | 0.000 |
| THYMU2039315 | 54.530 | 0.000 | 0.000 |
| THYMU3001234 | 11.085 | 0.000 | 0.000 |
| THYMU3008171 | 20.170 | 0.000 | 0.000 |
| TKIDN2009641 | 5.782 | 0.000 | 0.000 |
| TKIDN2009889 | 35.077 | 0.000 | 0.000 |
| TKIDN2015788 | 5.261 | 9.505 | 0.000 |
| TRACH1000205 | 19.677 | 0.000 | 0.000 |
| TRACH2001549 | 8.457 | 0.000 | 0.000 |
| TRACH2005811 | 2.109 | 0.000 | 0.000 |
| TRACH2006049 | 47.167 | 0.000 | 0.000 |
| TRACH2007834 | 0.504 | 0.000 | 0.000 |
| TRACH2008300 | 10.186 | 6.135 | 0.000 |
| TRACH2025535 | 5.806 | 0.000 | 0.000 |
| TRACH3001427 | 5.571 | 3.355 | 0.000 |
| TRACH3002192 | 4.989 | 2.253 | 0.000 |
| TRACH3004068 | 0.000 | 5.150 | 0.000 |
| TRACH3004721 | 8.721 | 0.000 | 0.000 |
| TRACH3005294 | 7.428 | 0.000 | 0.000 |
| TRACH3007479 | 1.075 | 0.000 | 0.000 |
| TRACH3008093 | 2.449 | 0.000 | 0.000 |
| TRACH3009455 | 47.167 | 0.000 | 0.000 |
| UTERU2005621 | 0.000 | 8.145 | 0.000 |
| UTERU2006115 | 7.837 | 0.000 | 0.000 |
| UTERU2019706 | 45.606 | 0.000 | 0.000 |
| UTERU2023039 | 45.606 | 0.000 | 0.000 |
| UTERU2026203 | 45.606 | 0.000 | 0.000 |
| UTERU3005230 | 24.419 | 0.000 | 0.000 |
| UTERU3007640 | 45.606 | 0.000 | 0.000 |
| UTERU3009871 | 36.230 | 0.000 | 0.000 |
| ADRGL2000042 | 2.540 | 0.000 | 0.000 |
| BLADE2006830 | 1.681 | 0.000 | 0.000 |
| BRACE2003609 | 9.090 | 0.000 | 0.000 |
| BRALZ2017844 | 0.000 | 49.396 | 0.000 |
| BRAMY3004800 | 38.061 | 0.000 | 0.000 |
| BRAWH1000369 | 100.000 | 0.000 | 0.000 |
| BRAWH2006207 | 12.943 | 0.000 | 0.000 |
| BRAWH2006395 | 12.446 | 0.000 | 0.000 |
| BRAWH2008993 | 49.811 | 0.000 | 0.000 |
| BRAWH2009393 | 100.000 | 0.000 | 0.000 |
| BRAWH2010552 | 58.488 | 0.000 | 0.000 |
| BRAWH3007441 | 100.000 | 0.000 | 0.000 |
| BRAWH3009017 | 100.000 | 0.000 | 0.000 |
| BRHIP2005271 | 7.083 | 0.000 | 0.000 |
| BRHIP3000017 | 8.819 | 0.000 | 0.000 |
| BRHIP3026052 | 0.000 | 54.140 | 0.000 |
| BRTHA2018443 | 22.098 | 0.000 | 0.000 |
| BRTHA3003000 | 17.150 | 0.000 | 0.000 |
| CTONG2020374 | 31.081 | 0.000 | 0.000 |
| CTONG2020378 | 16.140 | 0.000 | 0.000 |
| CTONG2024031 | 2.584 | 0.000 | 0.000 |
| FCBBF1000509 | 3.732 | 0.000 | 0.000 |
| FEBRA2001990 | 18.144 | 0.000 | 0.000 |
| FEBRA2006519 | 11.891 | 0.000 | 0.000 |
| FEBRA2028516 | 8.007 | 0.000 | 0.000 |
| HCHON2000743 | 6.105 | 0.000 | 0.000 |
| IMR322001879 | 9.638 | 0.000 | 0.000 |
| NT2RI2009583 | 0.224 | 0.808 | 0.000 |
| OCBBF2008144 | 5.768 | 0.000 | 0.000 |
| PERIC2007068 | 3.086 | 0.000 | 0.000 |
| PUAEN2006335 | 12.682 | 0.000 | 0.000 |
| SPLEN2039379 | 5.792 | 0.000 | 0.000 |
| TESTI4001984 | 60.471 | 0.000 | 0.000 |
| TESTI4008058 | 8.814 | 0.000 | 0.000 |
| TESTI4025268 | 60.471 | 0.000 | 0.000 |
| TESTI4032090 | 60.471 | 0.000 | 0.000 |
| THYMU3000360 | 39.314 | 0.000 | 0.000 |
| TLIVE2002046 | 5.445 | 0.000 | 0.000 |
| TRACH3000134 | 36.165 | 0.000 | 0.000 |
| UTERU2021820 | 24.929 | 0.000 | 0.000 |
| UTERU2028734 | 21.953 | 0.000 | 0.000 |

[0715] The result of comparative analysis of cDNA libraries derived from the substantia nigra (BRSSN), and from whole tissues of a normal brain (BRAWH) showed following genes whose expression levels differed between the two.

TABLE 5

| Clone ID | BRAWH | BRSSN |
|---|---|---|
| ASTRO1000009 | 2.611 | 0.000 |
| BLADE2008398 | 12.401 | 0.000 |
| BRACE1000186 | 4.324 | 0.000 |
| BRACE1000258 | 31.956 | 0.000 |
| BRACE1000533 | 11.795 | 8.780 |
| BRACE2005457 | 58.488 | 0.000 |
| BRACE2010489 | 63.510 | 0.000 |
| BRACE2014657 | 15.451 | 0.000 |
| BRACE2035381 | 10.177 | 0.000 |
| BRACE2044286 | 18.667 | 0.000 |
| BRACE2045954 | 27.309 | 0.000 |
| BRACE3000787 | 32.844 | 0.000 |
| BRACE3003192 | 58.488 | 0.000 |
| BRACE3005499 | 31.276 | 0.000 |
| BRACE3007480 | 19.471 | 0.000 |
| BRACE3009237 | 18.139 | 0.000 |
| BRACE3009724 | 58.488 | 0.000 |
| BRACE3009747 | 2.237 | 8.327 |
| BRACE3010428 | 6.868 | 4.261 |
| BRACE3011271 | 11.036 | 0.000 |
| BRACE3011421 | 28.251 | 0.000 |
| BRACE3012364 | 8.506 | 0.000 |
| BRACE3013780 | 0.000 | 17.852 |
| BRACE3022769 | 4.285 | 5.316 |
| BRACE3026735 | 24.173 | 0.000 |
| BRACE3031838 | 58.488 | 0.000 |
| BRALZ2011796 | 5.511 | 20.514 |
| BRAMY2003008 | 26.445 | 0.000 |
| BRAMY2005052 | 11.612 | 0.000 |
| BRAMY2019300 | 49.811 | 0.000 |
| BRAMY2019963 | 20.428 | 0.000 |
| BRAMY2036567 | 7.474 | 0.000 |
| BRAMY2037823 | 29.664 | 0.000 |
| BRAMY2040592 | 3.482 | 0.000 |
| BRAMY2047420 | 0.000 | 3.770 |
| BRAMY3002803 | 14.428 | 0.000 |
| BRAMY3004224 | 33.027 | 0.000 |
| BRAMY3005091 | 19.193 | 0.000 |
| BRAWH1000127 | 15.983 | 35.693 |
| BRAWH2001395 | 14.290 | 12.514 |
| BRAWH2001671 | 7.605 | 0.000 |
| BRAWH2001940 | 37.398 | 0.000 |
| BRAWH2001973 | 37.398 | 0.000 |
| BRAWH2002560 | 6.454 | 12.010 |
| BRAWH2002761 | 100.000 | 0.000 |
| BRAWH2005315 | 100.000 | 0.000 |
| BRAWH2007658 | 58.101 | 0.000 |
| BRAWH2010000 | 18.745 | 0.000 |
| BRAWH2010084 | 100.000 | 0.000 |
| BRAWH2010536 | 14.718 | 0.000 |
| BRAWH2012162 | 36.060 | 0.000 |
| BRAWH2012326 | 100.000 | 0.000 |
| BRAWH2013294 | 39.442 | 0.000 |
| BRAWH2013871 | 37.485 | 0.000 |
| BRAWH2014414 | 17.865 | 0.000 |
| BRAWH2014645 | 4.228 | 0.000 |
| BRAWH2014662 | 15.521 | 0.000 |
| BRAWH2014876 | 10.473 | 0.000 |
| BRAWH2014954 | 58.488 | 0.000 |
| BRAWH2016221 | 47.417 | 0.000 |
| BRAWH2016439 | 100.000 | 0.000 |
| BRAWH2016702 | 73.807 | 0.000 |
| BRAWH2016724 | 35.119 | 0.000 |
| BRAWH3000078 | 100.000 | 0.000 |
| BRAWH3000100 | 100.000 | 0.000 |
| BRAWH3000314 | 71.553 | 0.000 |
| BRAWH3000491 | 100.000 | 0.000 |
| BRAWH3001326 | 45.606 | 0.000 |
| BRAWH3001475 | 100.000 | 0.000 |
| BRAWH3001891 | 34.539 | 0.000 |
| BRAWH3002574 | 13.222 | 0.000 |
| BRAWH3002600 | 36.800 | 0.000 |
| BRAWH3002819 | 100.000 | 0.000 |
| BRAWH3002821 | 21.953 | 0.000 |
| BRAWH3003522 | 100.000 | 0.000 |
| BRAWH3003555 | 15.229 | 0.000 |
| BRAWH3003727 | 10.055 | 0.000 |
| BRAWH3003801 | 100.000 | 0.000 |
| BRAWH3003992 | 29.008 | 0.000 |
| BRAWH3004453 | 100.000 | 0.000 |
| BRAWH3004666 | 49.499 | 0.000 |
| BRAWH3005132 | 49.811 | 0.000 |
| BRAWH3005422 | 100.000 | 0.000 |
| BRAWH3005912 | 100.000 | 0.000 |
| BRAWH3005981 | 29.324 | 0.000 |
| BRAWH3006548 | 71.018 | 0.000 |
| BRAWH3006792 | 49.499 | 0.000 |
| BRAWH3007221 | 100.000 | 0.000 |
| BRAWH3007506 | 100.000 | 0.000 |
| BRAWH3007592 | 8.966 | 0.000 |
| BRAWH3007726 | 54.530 | 0.000 |
| BRAWH3007783 | 100.000 | 0.000 |
| BRAWH3008341 | 100.000 | 0.000 |
| BRAWH3008697 | 100.000 | 0.000 |
| BRAWH3008931 | 3.463 | 12.891 |
| BRAWH3009297 | 58.488 | 0.000 |
| BRCOC2003213 | 10.381 | 0.000 |
| BRCOC2014033 | 15.633 | 0.000 |
| BRCOC2020142 | 22.014 | 0.000 |
| BRHIP2000920 | 36.630 | 0.000 |
| BRHIP2005719 | 49.499 | 0.000 |
| BRHIP2007741 | 6.943 | 0.000 |
| BRHIP2014228 | 29.439 | 0.000 |
| BRHIP2024146 | 3.042 | 10.190 |
| BRHIP3000339 | 14.290 | 12.514 |
| BRHIP3006683 | 24.100 | 0.000 |
| BRHIP3007586 | 17.255 | 0.000 |
| BRHIP3008405 | 35.187 | 0.000 |
| BRHIP3018797 | 30.810 | 0.000 |
| BRSSN2000684 | 23.433 | 17.444 |
| BRSSN2003086 | 0.000 | 100.000 |
| BRSSN2004496 | 0.000 | 78.696 |
| BRSSN2004719 | 0.000 | 39.002 |
| BRSSN2006892 | 0.000 | 57.631 |
| BRSSN2008549 | 0.000 | 63.611 |
| BRSSN2008797 | 0.000 | 77.045 |
| BRSSN2011262 | 0.000 | 10.489 |
| BRSSN2011738 | 31.553 | 39.146 |
| BRSSN2013874 | 0.000 | 100.000 |
| BRSSN2014299 | 3.695 | 13.753 |
| BRSSN2014424 | 0.000 | 61.866 |
| BRSSN2014556 | 0.000 | 100.000 |
| BRSSN2018581 | 0.000 | 50.137 |
| BRSSN2018925 | 0.000 | 100.000 |
| BRSTN2008052 | 32.844 | 0.000 |
| BRSTN2015015 | 14.017 | 0.000 |
| BRSTN2016470 | 0.438 | 0.000 |
| BRTHA1000311 | 11.803 | 10.982 |
| BRTHA2003461 | 0.000 | 8.169 |
| BRTHA2008335 | 16.281 | 0.000 |
| BRTHA3002427 | 8.577 | 10.641 |
| BRTHA3003490 | 1.623 | 0.000 |
| BRTHA3008520 | 47.417 | 0.000 |
| BRTHA3017848 | 47.417 | 0.000 |
| COLON2001721 | 11.065 | 0.000 |
| CTONG2017500 | 2.649 | 0.000 |
| CTONG2028124 | 0.503 | 0.000 |
| CTONG3000657 | 3.880 | 0.000 |
| CTONG3001123 | 7.847 | 0.000 |
| CTONG3009328 | 11.993 | 0.000 |
| FCBBF2001183 | 16.537 | 6.155 |
| FCBBF3001977 | 7.448 | 0.000 |
| FEBRA2007544 | 14.689 | 0.000 |
| FEBRA2007801 | 4.937 | 0.000 |
| FEBRA2020886 | 12.124 | 0.000 |
| FEBRA2024136 | 0.000 | 42.701 |
| FEBRA2025427 | 0.000 | 9.226 |
| FEBRA2028618 | 5.082 | 0.000 |
| HCASM2007047 | 3.431 | 0.000 |
| HCHON2000244 | 0.658 | 0.000 |
| HCHON2000626 | 2.351 | 4.375 |
| HCHON2001217 | 3.123 | 0.000 |
| HCHON2002676 | 13.647 | 0.000 |
| HCHON2006250 | 1.565 | 0.000 |
| HEART1000074 | 0.759 | 0.000 |
| HHDPC1000118 | 2.096 | 0.000 |
| HLUNG2002465 | 1.209 | 0.000 |
| IMR322000127 | 3.098 | 0.000 |
| IMR322002035 | 36.176 | 0.000 |
| KIDNE2006580 | 7.013 | 0.000 |
| MESAN2006563 | 0.691 | 2.570 |
| MESAN2012054 | 12.754 | 0.000 |
| MESTC1000042 | 2.245 | 0.000 |
| NOVAR2001783 | 4.027 | 0.000 |
| NT2NE2006909 | 0.285 | 0.000 |
| NT2RI2008724 | 1.836 | 0.000 |
| NT2RI2012659 | 13.562 | 0.000 |
| NT2RI2014733 | 24.938 | 0.000 |
| NT2RI3002892 | 8.799 | 0.000 |
| NT2RI3006284 | 4.138 | 0.000 |
| NT2RI3006673 | 19.959 | 0.000 |
| NT2RI3007543 | 1.697 | 0.000 |
| NT2RI3008055 | 44.179 | 0.000 |
| NT2RP7005529 | 14.766 | 0.000 |
| NT2RP7009147 | 14.337 | 0.000 |
| NT2RP7014005 | 5.818 | 0.000 |
| NT2RP7017474 | 18.823 | 0.000 |
| OCBBF2001794 | 4.728 | 0.000 |
| OCBBF2006005 | 9.535 | 0.000 |
| OCBBF2006764 | 15.345 | 0.000 |
| OCBBF2007028 | 9.665 | 0.000 |
| OCBBF2010140 | 32.508 | 0.000 |
| OCBBF2021286 | 18.456 | 0.000 |
| OCBBF2024850 | 4.445 | 0.000 |
| OCBBF2028935 | 5.789 | 8.618 |
| OCBBF2036743 | 11.053 | 0.000 |
| OCBBF2038317 | 19.713 | 0.000 |
| OCBBF3000483 | 11.973 | 0.000 |
| OCBBF3008230 | 29.840 | 0.000 |
| PEBLM2004666 | 3.715 | 0.000 |
| PLACE6001185 | 21.358 | 0.000 |
| PUAEN2005930 | 18.362 | 0.000 |
| PUAEN2006701 | 2.249 | 0.000 |
| PUAEN2007044 | 8.600 | 0.000 |
| PUAEN2009655 | 18.275 | 0.000 |
| SPLEN2028914 | 2.792 | 0.000 |
| SPLEN2031424 | 15.229 | 0.000 |
| SPLEN2031547 | 1.574 | 0.000 |
| SPLEN2034781 | 27.984 | 0.000 |
| SPLEN2036932 | 2.932 | 0.000 |
| SYNOV2014400 | 12.977 | 0.000 |
| SYNOV4002346 | 5.997 | 0.000 |
| SYNOV4002883 | 23.940 | 0.000 |
| SYNOV4007430 | 31.677 | 0.000 |
| SYNOV4008440 | 1.475 | 0.000 |
| TESOP2002451 | 2.375 | 0.000 |
| TESTI4000014 | 1.964 | 0.665 |
| TESTI4000209 | 2.649 | 0.000 |
| TESTI4001100 | 4.098 | 0.000 |
| TESTI4006137 | 25.755 | 0.000 |
| TESTI4008797 | 12.429 | 0.000 |
| TESTI4009286 | 1.450 | 0.000 |
| TESTI4010851 | 3.280 | 2.035 |
| TESTI4013817 | 27.163 | 0.000 |
| TESTI4014694 | 2.229 | 0.000 |
| TESTI4021478 | 22.098 | 0.000 |
| TESTI4022936 | 26.445 | 0.000 |
| TESTI4024420 | 37.398 | 0.000 |
| TESTI4027821 | 60.471 | 0.000 |
| TESTI4037156 | 0.000 | 2.060 |
| THYMU2001090 | 21.252 | 0.000 |
| THYMU2033308 | 13.964 | 0.000 |
| THYMU2035735 | 1.319 | 0.000 |
| THYMU2039315 | 54.530 | 0.000 |
| THYMU3001234 | 11.085 | 0.000 |
| THYMU3008171 | 20.170 | 0.000 |
| TKIDN2009641 | 5.782 | 21.519 |
| TKIDN2009889 | 35.077 | 0.000 |
| TKIDN2015788 | 5.261 | 0.000 |
| TRACH1000205 | 19.677 | 0.000 |
| TRACH2001549 | 8.457 | 0.000 |
| TRACH2005811 | 2.109 | 0.000 |
| TRACH2006049 | 47.167 | 0.000 |
| TRACH2007834 | 0.504 | 1.877 |
| TRACH2008300 | 10.186 | 0.000 |
| TRACH2025535 | 5.806 | 0.000 |
| TRACH3001427 | 5.571 | 0.000 |
| TRACH3002192 | 4.989 | 2.321 |
| TRACH3004721 | 8.721 | 0.000 |
| TRACH3005294 | 7.428 | 0.000 |
| TRACH3007479 | 1.075 | 0.000 |
| TRACH3008093 | 2.449 | 0.000 |
| TRACH3009455 | 47.167 | 0.000 |
| UTERU2006115 | 7.837 | 0.000 |
| UTERU2019706 | 45.606 | 0.000 |
| UTERU2023039 | 45.606 | 0.000 |
| UTERU2026203 | 45.606 | 0.000 |
| UTERU3005230 | 24.419 | 0.000 |
| UTERU3007640 | 45.606 | 0.000 |
| UTERU3009871 | 36.230 | 0.000 |
| ADRGL2000042 | 2.540 | 18.905 |
| BLADE2006830 | 1.681 | 0.000 |
| BRACE2003609 | 9.090 | 0.000 |
| BRAMY3004800 | 38.061 | 0.000 |
| BRAWH1000369 | 100.000 | 0.000 |
| BRAWH2006207 | 12.943 | 48.175 |
| BRAWH2006395 | 12.446 | 0.000 |
| BRAWH2008993 | 49.811 | 0.000 |
| BRAWH2009393 | 100.000 | 0.000 |
| BRAWH2010552 | 58.488 | 0.000 |
| BRAWH3007441 | 100.000 | 0.000 |
| BRAWH3009017 | 100.000 | 0.000 |
| BRHIP2005271 | 7.083 | 0.000 |
| BRHIP3000017 | 8.819 | 0.000 |
| BRTHA2018443 | 22.098 | 0.000 |
| BRTHA3003000 | 17.150 | 63.832 |
| CTONG2020374 | 31.081 | 0.000 |
| CTONG2020378 | 16.140 | 0.000 |
| CTONG2024031 | 2.584 | 0.000 |
| FCBBF1000509 | 3.732 | 6.945 |
| FEBRA2001990 | 18.144 | 0.000 |
| FEBRA2006519 | 11.891 | 0.000 |
| FEBRA2028516 | 8.007 | 0.000 |
| HCHON2000743 | 6.105 | 0.000 |
| IMR322001879 | 9.638 | 0.000 |
| NT2RI2009583 | 0.224 | 1.665 |
| OCBBF2008144 | 5.768 | 0.000 |
| PERIC2007068 | 3.086 | 0.000 |
| PUAEN2006335 | 12.682 | 0.000 |
| SPLEN2039379 | 5.792 | 0.000 |
| TESTI2015626 | 0.000 | 1.224 |
| TESTI4001984 | 60.471 | 0.000 |
| TESTI400805$$ | 8.814 | 0.000 |
| TESTI4025268 | 60.471 | 0.000 |
| TESTI4032090 | 60.471 | 0.000 |
| THYMU3000360 | 39.314 | 0.000 |
| TLIVE2002046 | 5.445 | 0.000 |
| TRACH3000134 | 36.165 | 0.000 |
| UTERU2021820 | 24.929 | 0.000 |
| UTERU2028734 | 21.953 | 0.000 |

[0716] The result of comparative analysis of cDNA libraries derived from the hippocampus (BRHIP), and from whole tissues of a normal brain (BRAWH) showed following genes whose expression levels differed between the two.

TABLE 6

| Clone ID | BRAWH | BRHIP |
|---|---|---|
| ASTRO1000009 | 2.611 | 0.000 |
| BLADE2001371 | 0.000 | 12.691 |
| BLADE2008398 | 12.401 | 18.978 |
| BNGH42007788 | 0.000 | 3.141 |
| BRACE1000186 | 4.324 | 2.206 |
| BRACE1000258 | 31.956 | 0.000 |
| BRACE1000533 | 11.795 | 9.627 |
| BRACE2005457 | 58.488 | 0.000 |
| BRACE2010489 | 63.510 | 10.799 |
| BRACE2014657 | 15.451 | 0.000 |
| BRACE2015058 | 0.000 | 8.947 |
| BRACE2018762 | 0.000 | 58.973 |
| BRACE2030341 | 0.000 | 7.057 |
| BRACE2035381 | 10.177 | 20.766 |
| BRACE2044286 | 18.667 | 0.000 |
| BRACE2045954 | 27.309 | 0.000 |
| BRACE3000787 | 32.844 | 0.000 |
| BRACE3003192 | 58.488 | 0.000 |
| BRACE3005499 | 31.276 | 0.000 |
| BRACE3007480 | 19.471 | 52.973 |
| BRACE3009237 | 18.139 | 37.013 |
| BRACE3009724 | 58.488 | 0.000 |
| BRACE3009747 | 2.237 | 2.283 |
| BRACE3010428 | 6.868 | 2.336 |
| BRACE3011271 | 11.036 | 11.259 |
| BRACE3011421 | 28.251 | 0.000 |
| BRACE3012364 | 8.506 | 4.339 |
| BRACE3018963 | 0.000 | 58.973 |
| BRACE3022769 | 4.285 | 4.372 |
| BRACE3026735 | 24.173 | 0.000 |
| BRACE3031838 | 58.488 | 0.000 |
| BRALZ2011796 | 5.511 | 0.000 |
| BRAMY2003008 | 26.445 | 0.000 |
| BRAMY2005052 | 11.612 | 0.000 |
| BRAMY2019300 | 49.811 | 0.000 |
| BRAMY2019963 | 20.428 | 6.947 |
| BRAMY2031317 | 0.000 | 16.004 |
| BRAMY2036567 | 7.474 | 7.626 |
| BRAMY2037823 | 29.664 | 0.000 |
| BRAMY2040592 | 3.482 | 7.105 |
| BRAMY2044078 | 0.000 | 8.947 |
| BRAMY3002803 | 14.428 | 44.161 |
| BRAMY3004224 | 33.027 | 33.695 |
| BRAMY3005091 | 19.193 | 0.000 |
| BRAMY3009811 | 0.000 | 66.943 |
| BRAWH1000127 | 15.983 | 3.261 |
| BRAWH2001395 | 14.290 | 22.297 |
| BRAWH2001671 | 7.605 | 11.638 |
| BRAWH2001940 | 37.398 | 38.155 |
| BRAWH2001973 | 37.398 | 38.155 |
| BRAWH2002560 | 6.454 | 3.292 |
| BRAWH2002761 | 100.000 | 0.000 |
| BRAWH2005315 | 100.000 | 0.000 |
| BRAWH2007658 | 58.101 | 0.000 |
| BRAWH2010000 | 1$$.745 | 3$$.249 |
| BRAWH2010084 | 100.000 | 0.000 |
| BRAWH2010536 | 14.718 | 0.000 |
| BRAWH2012162 | 36.060 | 0.000 |
| BRAWH2012326 | 100.000 | 0.000 |
| BRAWH2013294 | 39.442 | 10.060 |
| BRAWH2013871 | 37.485 | 0.000 |
| BRAWH2014414 | 17.865 | 18.227 |
| BRAWH2014645 | 4.228 | 1.078 |
| BRAWH2014662 | 15.521 | 0.000 |
| BRAWH2014876 | 10.473 | 0.000 |
| BRAWH2014954 | 58.488 | 0.000 |
| BRAWH2016221 | 47.417 | 0.000 |
| BRAWH2016439 | 100.000 | 0.000 |
| BRAWH2016702 | 73.807 | 0.000 |
| BRAWH2016724 | 35.119 | 0.000 |
| BRAWH3000078 | 100.000 | 0.000 |
| BRAWH3000100 | 100.000 | 0.000 |
| BRAWH3000314 | 71.553 | 0.000 |
| BRAWH3000491 | 100.000 | 0.000 |
| BRAWH3001326 | 45.606 | 0.000 |
| BRAWH3001475 | 100.000 | 0.000 |
| BRAWH3001891 | 34.539 | 0.000 |
| BRAWH3002574 | 13.222 | 0.000 |
| BRAWH3002600 | 36.800 | 0.000 |
| BRAWH3002819 | 100.000 | 0.000 |
| BRAWH3002821 | 21.953 | 0.000 |
| BRAWH3003522 | 100.000 | 0.000 |
| BRAWH3003555 | 15.229 | 0.000 |
| BRAWH3003727 | 10.055 | 10.259 |
| BRAWH3003801 | 100.000 | 0.000 |
| BRAWH3003992 | 29.008 | 0.000 |
| BRAWH3004453 | 100.000 | 0.000 |
| BRAWH3004666 | 49.499 | 50.501 |
| BRAWH3005132 | 49.811 | 0.000 |
| BRAWH3005422 | 100.000 | 0.000 |
| BRAWH3005912 | 100.000 | 0.000 |
| BRAWH3005981 | 29.324 | 0.000 |
| BRAWH3006548 | 71.018 | 28.982 |
| BRAWH3006792 | 49.499 | 50.501 |
| BRAWH3007221 | 100.000 | 0.000 |
| BRAWH3007506 | 100.000 | 0.000 |
| BRAWH3007592 | 8.966 | 3.659 |
| BRAWH3007726 | 54.530 | 0.000 |
| BRAWH3007783 | 100.000 | 0.000 |
| BRAWH3008341 | 100.000 | 0.000 |
| BRAWH3008697 | 100.000 | 0.000 |
| BRAWH3008931 | 3.463 | 10.601 |
| BRAWH3009297 | 58.488 | 0.000 |
| BRCAN2020710 | 0.000 | 22.176 |
| BRCAN2028355 | 0.000 | 1.507 |
| BRCOC2003213 | 10.381 | 0.000 |
| BRCOC2014033 | 15.633 | 15.950 |
| BRCOC2020142 | 22.014 | 0.000 |
| BRHIP2000691 | 0.000 | 100.000 |
| BRHIP2000819 | 0.000 | 2.204 |
| BRHIP2000826 | 0.000 | 100.000 |
| BRHIP2000920 | 36.630 | 37.371 |
| BRHIP2001074 | 0.000 | 39.976 |
| BRHIP2001805 | 0.000 | 14.757 |
| BRHIP2001927 | 0.000 | 100.000 |
| BRHIP2002122 | 0.000 | 100.000 |
| BRHIP2002172 | 0.000 | 100.000 |
| BRHIP2002346 | 0.000 | 100.000 |
| BRHIP2003242 | 0.000 | 100.000 |
| BRHIP2003786 | 0.000 | 100.000 |
| BRHIP2003917 | 0.000 | 11.981 |
| BRHIP2004312 | 0.000 | 100.000 |
| BRHIP2004359 | 0.000 | 24.839 |
| BRHIP2004814 | 0.000 | 35.391 |
| BRHIP2004883 | 0.000 | 100.000 |
| BRHIP2005236 | 0.000 | 100.000 |
| BRHIP2005354 | 0.000 | 100.000 |
| BRHIP2005600 | 0.000 | 100.000 |
| BRHIP2005719 | 49.499 | 50.501 |
| BRHIP2005752 | 0.000 | 58.973 |
| BRHIP2005932 | 0.000 | 100.000 |
| BRHIP2006800 | 0.000 | 100.000 |
| BRHIP2007616 | 0.000 | 100.000 |
| BRHIP2007741 | 6.943 | 3.542 |
| BRHIP2009340 | 0.000 | 100.000 |
| BRHIP2009414 | 0.000 | 100.000 |
| BRHIP2009474 | 0.000 | 47.917 |
| BRHIP2013699 | 0.000 | 21.770 |
| BRHIP2014228 | 29.439 | 15.017 |
| BRHIP2021615 | 0.000 | 100.000 |
| BRHIP2022221 | 0.000 | 47.917 |
| BRHIP2024146 | 3.042 | 5.897 |
| BRHIP2024165 | 0.000 | 100.000 |
| BRHIP2026061 | 0.000 | 31.199 |
| BRHIP2026288 | 0.000 | 22.018 |
| BRHIP2029176 | 0.000 | 100.000 |
| BRHIP2029393 | 0.000 | 100.000 |
| BRHIP3000339 | 14.290 | 22.297 |
| BRHIP3000526 | 0.000 | 100.000 |
| BRHIP3001283 | 0.000 | 50.312 |
| BRHIP3006683 | 24.100 | 49.175 |
| BRHIP3007483 | 0.000 | 100.000 |
| BRHIP3007586 | 17.255 | 24.645 |
| BRHIP3008183 | 0.000 | 100.000 |
| BRHIP3008313 | 0.000 | 29.118 |
| BRHIP3008344 | 0.000 | 46.104 |
| BRHIP3008405 | 35.187 | 17.949 |
| BRHIP3008565 | 0.000 | 46.104 |
| BRHIP3008598 | 0.000 | 100.000 |
| BRHIP3008997 | 0.000 | 100.000 |
| BRHIP3009099 | 0.000 | 35.577 |
| BRHIP3009448 | 0.000 | 100.000 |
| BRHIP3011241 | 0.000 | 100.000 |
| BRHIP3013765 | 0.000 | 100.000 |
| BRHIP3013897 | 0.000 | 100.000 |
| BRHIP3015751 | 0.000 | 100.000 |
| BRHIP3016213 | 0.000 | 100.000 |
| BRHIP3018797 | 30.810 | 9.567 |
| BRHIP3020182 | 0.000 | 100.000 |
| BRHIP3024118 | 0.000 | 100.000 |
| BRHIP3024533 | 0.000 | 100.000 |
| BRHIP3024725 | 0.000 | 100.000 |
| BRHIP3025161 | 0.000 | 100.000 |
| BRHIP3025702 | 0.000 | 100.000 |
| BRHIP3026097 | 0.000 | 100.000 |
| BRHIP3027137 | 0.000 | 100.000 |
| BRHIP3027854 | 0.000 | 100.000 |
| BRSSN2000684 | 23.433 | 19.126 |
| BRSSN2004719 | 0.000 | 10.691 |
| BRSSN2008549 | 0.000 | 17.436 |
| BRSSN2011738 | 31.553 | 0.000 |
| BRSSN2014299 | 3.695 | 3.770 |
| BRSTN2008052 | 32.844 | 0.000 |
| BRSTN2015015 | 14.017 | 0.000 |
| BRSTN2016470 | 0.438 | 0.447 |
| BRSTN2018083 | 0.000 | 22.055 |
| BRTHA1000311 | 11.803 | 6.021 |
| BRTHA2002442 | 0.000 | 31.507 |
| BRTHA2008335 | 16.281 | 8.305 |
| BRTHA3000297 | 0.000 | 47.917 |
| BRTHA3001721 | 0.000 | 12.017 |
| BRTHA3002427 | 8.577 | 2.917 |
| BRTHA3003490 | 1.623 | 0.000 |
| BRTHA3005046 | 0.000 | 47.917 |
| BRTHA3008520 | 47.417 | 0.000 |
| BRTHA3008778 | 0.000 | 25.346 |
| BRTHA3009090 | 0.000 | 12.008 |
| BRTHA3015910 | 0.000 | 15.221 |
| BRTHA3017848 | 47.417 | 0.000 |
| COLON2001721 | 11.065 | 5.644 |
| CTONG1000087 | 0.000 | 1.067 |
| CTONG1000088 | 0.000 | 2.981 |
| CTONG1000467 | 0.000 | 8.766 |
| CTONG2000042 | 0.000 | 3.574 |
| CTONG2008233 | 0.000 | 0.701 |
| CTONG2009423 | 0.000 | 35.391 |
| CTONG2017500 | 2.649 | 0.000 |
| CTONG2019788 | 0.000 | 3.120 |
| CTONG2028124 | 0.503 | 1.026 |
| CTONG3000657 | 3.880 | 11.875 |
| CTONG3001123 | 7.847 | 0.000 |
| CTONG3001370 | 0.000 | 3.574 |
| CTONG3002412 | 0.000 | 10.918 |
| CTONG3004072 | 0.000 | 19.915 |
| CTONG3008894 | 0.000 | 2.966 |
| CTONG3009239 | 0.000 | 2.946 |
| CTONG3009328 | 11.993 | 0.000 |
| DFNES2011499 | 0.000 | 6.330 |
| FCBBF2001183 | 16.537 | 11.810 |
| FCBBF3001977 | 7.448 | 7.599 |
| FEBRA2000253 | 0.000 | 14.934 |
| FEBRA2007544 | 14.689 | 4.995 |
| FEBRA2007801 | 4.937 | 7.556 |
| FEBRA2008287 | 0.000 | 3.007 |
| FEBRA2010719 | 0.000 | 17.703 |
| FEBRA2020886 | 12.124 | 12.369 |
| FEBRA2028618 | 5.082 | 0.000 |
| HCASM2007047 | 3.431 | 0.000 |
| HCHON2000028 | 0.000 | 1.619 |
| HCHON2000244 | 0.658 | 0.671 |
| HCHON2000626 | 2.351 | 0.000 |
| HCHON2001217 | 3.123 | 2.124 |
| HCHON2002676 | 13.647 | 0.000 |
| HCHON2005921 | 0.000 | 12.694 |
| HCHON2006250 | 1.565 | 0.000 |
| HEART1000074 | 0.759 | 0.000 |
| HEART2007031 | 0.000 | 11.593 |
| HHDPC1000118 | 2.096 | 6.415 |
| HLUNG2002465 | 1.209 | 3.702 |
| HLUNG2003003 | 0.000 | 16.306 |
| IMR322000127 | 3.098 | 3.161 |
| IMR322001380 | 0.000 | 2.022 |
| IMR322002035 | 36.176 | 0.000 |
| KIDNE2005543 | 0.000 | 18.168 |
| KIDNE2006580 | 7.013 | 14.310 |
| MESAN2006563 | 0.691 | 0.000 |
| MESAN2012054 | 12.754 | 15.615 |
| MESTC1000042 | 2.245 | 0.000 |
| NOVAR2001783 | 4.027 | 0.000 |
| NT2NE2006909 | 0.285 | 0.000 |
| NT2RI2008724 | 1.836 | 1.874 |
| NT2RI2012659 | 13.562 | 0.000 |
| NT2RI2014733 | 24.938 | 0.000 |
| NT2RI2018311 | 0.000 | 21.918 |
| NT2RI3001515 | 0.000 | 11.050 |
| NT2RI3002892 | 8.799 | 16.159 |
| NT2RI3004510 | 0.000 | 28.761 |
| NT2RI3005724 | 0.000 | 12.093 |
| NT2RI3006284 | 4.138 | 0.000 |
| NT2RI3006673 | 19.959 | 10.182 |
| NT2RI3007291 | 0.000 | 12.770 |
| NT2RI3007543 | 1.697 | 0.866 |
| NT2RI3008055 | 44.179 | 0.000 |
| NT2RP7005529 | 14.766 | 15.065 |
| NT2RP7009147 | 14.337 | 1.625 |
| NT2RP7014005 | 5.818 | 0.000 |
| NT2RP7017474 | 18.823 | 0.000 |
| OCBBF2001794 | 4.728 | 0.000 |
| OCBBF2003819 | 0.000 | 21.496 |
| OCBBF2006005 | 9.535 | 9.728 |
| OCBBF2006151 | 0.000 | 11.764 |
| OCBBF2006764 | 15.345 | 0.000 |
| OCBBF2007028 | 9.665 | 11.269 |
| OCBBF2007068 | 0.000 | 45.093 |
| OCBBF2010140 | 32.508 | 0.000 |
| OCBBF2020741 | 0.000 | 28.789 |
| OCBBF2021286 | 18.456 | 18.829 |
| OCBBF2024719 | 0.000 | 30.261 |
| OCBBF2024850 | 4.445 | 4.535 |
| OCBBF2028935 | 5.789 | 7.087 |
| OCBBF2036743 | 11.053 | 0.000 |
| OCBBF2038317 | 19.713 | 0.000 |
| OCBBF3000296 | 0.000 | 19.328 |
| OCBBF3000483 | 11.973 | 8.143 |
| OCBBF3008230 | 29.840 | 0.000 |
| PEBLM2004666 | 3.715 | 0.000 |
| PLACE6001185 | 21.358 | 0.000 |
| PUAEN2005930 | 18.362 | 9.367 |
| PUAEN2006701 | 2.249 | 2.295 |
| PUAEN2007044 | 8.600 | 0.000 |
| PUAEN2009655 | 18.275 | 7.458 |
| SPLEN2010912 | 0.000 | 12.636 |
| SPLEN2012624 | 0.000 | 10.317 |
| SPLEN2028914 | 2.792 | 0.000 |
| SPLEN2031424 | 15.229 | 0.000 |
| SPLEN2031547 | 1.574 | 11.244 |
| SPLEN2034781 | 27.984 | 0.000 |
| SPLEN2036932 | 2.932 | 5.982 |
| SYNOV2014400 | 12.977 | 13.240 |
| SYNOV4002346 | 5.997 | 0.000 |
| SYNOV4002883 | 23.940 | 24.425 |
| SYNOV4007430 | 31.677 | 0.000 |
| SYNOV4008440 | 1.475 | 3.010 |
| TESOP2002451 | 2.375 | 0.000 |
| TESTI2049246 | 0.000 | 53.653 |
| TESTI4000014 | 1.964 | 2.551 |
| TESTI4000209 | 2.649 | 0.000 |
| TESTI4001100 | 4.098 | 4.180 |
| TESTI4006137 | 25.755 | 0.000 |
| TESTI4008797 | 12.429 | 12.681 |
| TESTI4009286 | 1.450 | 1.479 |
| TESTI4010377 | 0.000 | 60.949 |
| TESTI4010851 | 3.280 | 3.904 |
| TESTI4010928 | 0.000 | 34.221 |
| TESTI4011161 | 0.000 | 21.496 |
| TESTI4013817 | 27.163 | 27.712 |
| TESTI4014159 | 0.000 | 23.916 |
| TESTI4014694 | 2.229 | 0.000 |
| TESTI4014818 | 0.000 | 60.949 |
| TESTI4021478 | 22.098 | 0.000 |
| TESTI4022936 | 26.445 | 0.000 |
| TESTI4024420 | 37.398 | 38.155 |
| TESTI4027821 | 60.471 | 0.000 |
| TESTI4037156 | 0.000 | 0.282 |
| THYMU2001090 | 21.252 | 0.000 |
| THYMU2023967 | 0.000 | 31.165 |
| THYMU2025707 | 0.000 | 9.440 |
| THYMU2031341 | 0.000 | 7.040 |
| THYMU2033308 | 13.964 | 0.000 |
| THYMU2035735 | 1.319 | 2.692 |
| THYMU2037226 | 0.000 | 34.964 |
| THYMU2039315 | 54.530 | 0.000 |
| THYMU3001234 | 11.085 | 0.000 |
| THYMU3001379 | 0.000 | 25.695 |
| THYMU3004835 | 0.000 | 20.041 |
| THYMU3007137 | 0.000 | 37.956 |
| THYMU3008171 | 20.170 | 20.579 |
| TKIDN2009641 | 5.782 | 0.000 |
| TKIDN2009889 | 35.077 | 0.000 |
| TKIDN2015788 | 5.261 | 2.684 |
| TRACH1000205 | 19.677 | 4.015 |
| TRACH2001549 | 8.457 | 21.569 |
| TRACH2005811 | 2.109 | 2.152 |
| TRACH2006049 | 47.167 | 0.000 |
| TRACH2007834 | 0.504 | 0.515 |
| TRACH2008300 | 10.186 | 13.857 |
| TRACH2025535 | 5.806 | 2.369 |
| TRACH3000014 | 0.000 | 18.547 |
| TRACH3001427 | 5.571 | 2.842 |
| TRACH3002192 | 4.989 | 6.999 |
| TRACH3004721 | 8.721 | 2.966 |
| TRACH3005294 | 7.428 | 0.000 |
| TRACH3007479 | 1.075 | 0.000 |
| TRACH3008093 | 2.449 | 0.000 |
| TRACH3009455 | 47.167 | 0.000 |
| TUTER1000122 | 0.000 | 3.330 |
| TUTER2000904 | 0.000 | 5.697 |
| UTERU2004929 | 0.000 | 11.843 |
| UTERU2006115 | 7.837 | 0.000 |
| UTERU2019706 | 45.606 | 0.000 |
| UTERU2021163 | 0.000 | 46.104 |
| UTERU2023039 | 45.606 | 0.000 |
| UTERU2026203 | 45.606 | 0.000 |
| UTERU2030213 | 0.000 | 25.133 |
| UTERU3001572 | 0.000 | 1.862 |
| UTERU3003135 | 0.000 | 33.486 |
| UTERU3005230 | 24.419 | 0.000 |
| UTERU3007640 | 45.606 | 0.000 |
| UTERU3009259 | 0.000 | 46.104 |
| UTERU3009871 | 36.230 | 18.482 |
| ADRGL2000042 | 2.540 | 0.000 |
| BLADE2006830 | 1.681 | 0.000 |
| BRACE2003609 | 9.090 | 0.000 |
| BRAMY3004800 | 38.061 | 46.598 |
| BRAWH1000369 | 100.000 | 0.000 |
| BRAWH2006207 | 12.943 | 0.000 |
| BRAWH2006395 | 12.446 | 0.000 |
| BRAWH2008993 | 49.811 | 0.000 |
| BRAWH2009393 | 100.000 | 0.000 |
| BRAWH2010552 | 58.488 | 0.000 |
| BRAWH3007441 | 100.000 | 0.000 |
| BRAWH3009017 | 100.000 | 0.000 |
| BRHIP2002722 | 0.000 | 100.000 |
| BRHIP2003272 | 0.000 | 100.000 |
| BRHIP2005271 | 7.083 | 14.453 |
| BRHIP2005724 | 0.000 | 100.000 |
| BRHIP2006617 | 0.000 | 100.000 |
| BRHIP2008389 | 0.000 | 100.000 |
| BRHIP2012360 | 0.000 | 100.000 |
| BRHIP2017553 | 0.000 | 100.000 |
| BRHIP2026877 | 0.000 | 30.781 |
| BRHIP3000017 | 8.819 | 4.499 |
| BRHIP3000240 | 0.000 | 32.393 |
| BRHIP3008314 | 0.000 | 100.000 |
| BRHIP3026052 | 0.000 | 45.860 |
| BRTHA2018443 | 22.098 | 0.000 |
| BRTHA3003000 | 17.150 | 0.000 |
| CTONG2020374 | 31.081 | 0.000 |
| CTONG2020378 | 16.140 | 16.467 |
| CTONG2024031 | 2.584 | 0.000 |
| CTONG3004726 | 0.000 | 17.278 |
| FCBBF1000509 | 3.732 | 5.711 |
| FEBRA2001990 | 18.144 | 7.404 |
| FEBRA2006519 | 11.891 | 0.000 |
| FEBRA2028516 | 8.007 | 4.668 |
| HCHON2000743 | 6.105 | 0.000 |
| IMR322001879 | 9.638 | 9.833 |
| NT2RI2009583 | 0.224 | 0.228 |
| OCBBF2006987 | 0.000 | 13.187 |
| OCBBF2008144 | 5.768 | 2.942 |
| OCBBF2030116 | 0.000 | 45.093 |
| PERIC2007068 | 3.086 | 4.723 |
| PUAEN2006335 | 12.682 | 0.000 |
| SPLEN2039379 | 5.792 | 8.864 |
| TESTI2015626 | 0.000 | 0.336 |
| TESTI4000214 | 0.000 | 7.979 |
| TESTI4001984 | 60.471 | 0.000 |
| TESTI4008058 | 8.814 | 0.000 |
| TESTI4013894 | 0.000 | 14.289 |
| TESTI4025268 | 60.471 | 0.000 |
| TESTI4025547 | 0.000 | 60.949 |
| TESTI4026207 | 0.000 | 60.949 |
| TESTI4032090 | 60.471 | 0.000 |
| THYMU3000360 | 39.314 | 0.000 |
| TLIVE2002046 | 5.445 | 1.852 |
| TRACH3000134 | 36.165 | 0.000 |
| UTERU2008040 | 0.000 | 24.014 |
| UTERU2021820 | 24.929 | 0.000 |
| UTERU2028734 | 21.953 | 0.000 |

[0717] The result of comparative analysis of cDNA libraries derived from the cerebellum (BRACE), and from whole tissues of a normal brain (BRAWH) showed following genes whose expression levels differed between the two.

TABLE 7

| Clone ID | BRAWH | BRACE |
|---|---|---|
| ADRGL2009146 | 0.000 | 10.913 |
| ADRGL2012038 | 0.000 | 1.459 |
| ASTRO1000009 | 2.611 | 0.000 |
| ASTRO2003960 | 0.000 | 17.003 |
| BLADE1000176 | 0.000 | 16.822 |
| BLADE2004089 | 0.000 | 7.034 |
| BLADE2008398 | 12.401 | 4.401 |
| BRACE1000186 | 4.324 | 1.535 |
| BRACE1000258 | 31.956 | 68.044 |
| BRACE1000533 | 11.795 | 11.720 |
| BRACE1000572 | 0.000 | 100.000 |
| BRACE2003639 | 0.000 | 100.000 |
| BRACE2005457 | 58.488 | 41.512 |
| BRACE2006319 | 0.000 | 4.977 |
| BRACE2008594 | 0.000 | 100.000 |
| BRACE2010489 | 63.510 | 15.026 |
| BRACE2011747 | 0.000 | 100.000 |
| BRACE2014306 | 0.000 | 6.909 |
| BRACE2014475 | 0.000 | 100.000 |
| BRACE2014657 | 15.451 | 76.765 |
| BRACE2015058 | 0.000 | 6.224 |
| BRACE2015314 | 0.000 | 100.000 |
| BRACE2016981 | 0.000 | 16.089 |
| BRACE2018762 | 0.000 | 41.027 |
| BRACE2024627 | 0.000 | 8.689 |
| BRACE2026836 | 0.000 | 4.898 |
| BRACE2027258 | 0.000 | 23.981 |
| BRACE2027970 | 0.000 | 45.981 |
| BRACE2028970 | 0.000 | 100.000 |
| BRACE2029112 | 0.000 | 100.000 |
| BRACE2029849 | 0.000 | 100.000 |
| BRACE2030326 | 0.000 | 100.000 |
| BRACE2030341 | 0.000 | 4.909 |
| BRACE2030884 | 0.000 | 100.000 |
| BRACE2031154 | 0.000 | 39.025 |
| BRACE2031389 | 0.000 | 7.220 |
| BRACE2031527 | 0.000 | 100.000 |
| BRACE2031531 | 0.000 | 100.000 |
| BRACE2031899 | 0.000 | 100.000 |
| BRACE2032044 | 0.000 | 100.000 |
| BRACE2032329 | 0.000 | 100.000 |
| BRACE2032385 | 0.000 | 100.000 |
| BRACE2032538 | 0.000 | 100.000 |
| BRACE2032823 | 0.000 | 100.000 |
| BRACE2033720 | 0.000 | 100.000 |
| BRACE2035381 | 10.177 | 36.117 |
| BRACE2035441 | 0.000 | 100.000 |
| BRACE2036005 | 0.000 | 100.000 |
| BRACE2036096 | 0.000 | 100.000 |
| BRACE2036830 | 0.000 | 100.000 |
| BRACE2036834 | 0.000 | 100.000 |
| BRACE2037847 | 0.000 | 100.000 |
| BRACE2038114 | 0.000 | 100.000 |
| BRACE2038329 | 0.000 | 100.000 |
| BRACE2038551 | 0.000 | 100.000 |
| BRACE2039249 | 0.000 | 100.000 |
| BRACE2039327 | 0.000 | 100.000 |
| BRACE2039475 | 0.000 | 100.000 |
| BRACE2039734 | 0.000 | 100.000 |
| BRACE2040138 | 0.000 | 100.000 |
| BRACE2040325 | 0.000 | 100.000 |
| BRACE2041009 | 0.000 | 100.000 |
| BRACE2041200 | 0.000 | 38.787 |
| BRACE2041264 | 0.000 | 100.000 |
| BRACE2042550 | 0.000 | 100.000 |
| BRACE2043142 | 0.000 | 52.057 |
| BRACE2043248 | 0.000 | 100.000 |
| BRACE2043349 | 0.000 | 100.000 |
| BRACE2043665 | 0.000 | 16.915 |
| BRACE2044286 | 18.667 | 26.499 |
| BRACE2044816 | 0.000 | 100.000 |
| BRACE2044949 | 0.000 | 2.766 |
| BRACE2045300 | 0.000 | 100.000 |
| BRACE2045428 | 0.000 | 100.000 |
| BRACE2045596 | 0.000 | 100.000 |
| BRACE2045772 | 0.000 | 2.055 |
| BRACE2045947 | 0.000 | 100.000 |
| BRACE2045954 | 27.309 | 38.766 |
| BRACE2046251 | 0.000 | 100.000 |
| BRACE2046295 | 0.000 | 100.000 |
| BRACE2047011 | 0.000 | 100.000 |
| BRACE2047350 | 0.000 | 45.981 |
| BRACE2047377 | 0.000 | 100.000 |
| BRACE2047385 | 0.000 | 100.000 |
| BRACE3000071 | 0.000 | 9.532 |
| BRACE3000697 | 0.000 | 100.000 |
| BRACE3000787 | 32.844 | 15.541 |
| BRACE3000840 | 0.000 | 100.000 |
| BRACE3000973 | 0.000 | 28.699 |
| BRACE3001002 | 0.000 | 100.000 |
| BRACE3001217 | 0.000 | 100.000 |
| BRACE3001391 | 0.000 | 100.000 |
| BRACE3001595 | 0.000 | 100.000 |
| BRACE3001754 | 0.000 | 38.787 |
| BRACE3002298 | 0.000 | 100.000 |
| BRACE3002390 | 0.000 | 100.000 |
| BRACE3002508 | 0.000 | 100.000 |
| BRACE3003004 | 0.000 | 100.000 |
| BRACE3003192 | 58.488 | 41.512 |
| BRACE3003595 | 0.000 | 100.000 |
| BRACE3003698 | 0.000 | 45.981 |
| BRACE3004058 | 0.000 | 100.000 |
| BRACE3004113 | 0.000 | 100.000 |
| BRACE3004150 | 0.000 | 2.757 |
| BRACE3004358 | 0.000 | 100.000 |
| BRACE3004435 | 0.000 | 100.000 |
| BRACE3004772 | 0.000 | 100.000 |
| BRACE3004783 | 0.000 | 100.000 |
| BRACE3004843 | 0.000 | 22.581 |
| BRACE3004880 | 0.000 | 100.000 |
| BRACE3005145 | 0.000 | 100.000 |
| BRACE3005225 | 0.000 | 100.000 |
| BRACE3005430 | 0.000 | 100.000 |
| BRACE3005499 | 31.276 | 22.199 |
| BRACE3006185 | 0.000 | 100.000 |
| BRACE3006226 | 0.000 | 100.000 |
| BRACE3006462 | 0.000 | 100.000 |
| BRACE3006872 | 0.000 | 100.000 |
| BRACE3007322 | 0.000 | 100.000 |
| BRACE3007472 | 0.000 | 100.000 |
| BRACE3007480 | 19.471 | 13.820 |
| BRACE3007559 | 0.000 | 100.000 |
| BRACE3007625 | 0.000 | 100.000 |
| BRACE3007642 | 0.000 | 100.000 |
| BRACE3007767 | 0.000 | 100.000 |
| BRACE3008036 | 0.000 | 13.098 |
| BRACE3008092 | 0.000 | 100.000 |
| BRACE3008137 | 0.000 | 100.000 |
| BRACE3008384 | 0.000 | 56.141 |
| BRACE3008720 | 0.000 | 100.000 |
| BRACE3008772 | 0.000 | 37.308 |
| BRACE3009090 | 0.000 | 100.000 |
| BRACE3009237 | 18.139 | 12.875 |
| BRACE3009297 | 0.000 | 100.000 |
| BRACE3009377 | 0.000 | 100.000 |
| BRACE3009574 | 0.000 | 100.000 |
| BRACE3009701 | 0.000 | 100.000 |
| BRACE3009708 | 0.000 | 100.000 |
| BRACE3009724 | 58.488 | 41.512 |
| BRACE3009747 | 2.237 | 1.588 |
| BRACE3010397 | 0.000 | 24.243 |
| BRACE3010428 | 6.868 | 3.250 |
| BRACE3011271 | 11.036 | 39.165 |
| BRACE3011421 | 28.251 | 40.103 |
| BRACE3011505 | 0.000 | 100.000 |
| BRACE3012364 | 8.506 | 6.038 |
| BRACE3012930 | 0.000 | 38.787 |
| BRACE3013119 | 0.000 | 100.000 |
| BRACE3013576 | 0.000 | 100.000 |
| BRACE3013740 | 0.000 | 100.000 |
| BRACE3013780 | 0.000 | 3.404 |
| BRACE3014005 | 0.000 | 100.000 |
| BRACE3014068 | 0.000 | 100.000 |
| BRACE3014231 | 0.000 | 100.000 |
| BRACE3014317 | 0.000 | 100.000 |
| BRACE3014807 | 0.000 | 100.000 |
| BRACE3015027 | 0.000 | 9.209 |
| BRACE3015121 | 0.000 | 100.000 |
| BRACE3015262 | 0.000 | 100.000 |
| BRACE3015521 | 0.000 | 100.000 |
| BRACE3015894 | 0.000 | 100.000 |
| BRACE3016884 | 0.000 | 9.165 |
| BRACE3018308 | 0.000 | 100.000 |
| BRACE3018963 | 0.000 | 41.027 |
| BRACE3019055 | 0.000 | 100.000 |
| BRACE3019084 | 0.000 | 100.000 |
| BRACE3020194 | 0.000 | 100.000 |
| BRACE3020286 | 0.000 | 100.000 |
| BRACE3020594 | 0.000 | 100.000 |
| BRACE3022769 | 4.285 | 9.124 |
| BRACE3023912 | 0.000 | 100.000 |
| BRACE3024073 | 0.000 | 100.000 |
| BRACE3024659 | 0.000 | 100.000 |
| BRACE3024662 | 0.000 | 100.000 |
| BRACE3025153 | 0.000 | 100.000 |
| BRACE3025457 | 0.000 | 100.000 |
| BRACE3025531 | 0.000 | 100.000 |
| BRACE3025630 | 0.000 | 100.000 |
| BRACE3026008 | 0.000 | 100.000 |
| BRACE3026075 | 0.000 | 100.000 |
| BRACE3026735 | 24.173 | 51.471 |
| BRACE3027242 | 0.000 | 100.000 |
| BRACE3027326 | 0.000 | 100.000 |
| BRACE3027478 | 0.000 | 11.360 |
| BRACE3030103 | 0.000 | 100.000 |
| BRACE3031838 | 58.488 | 41.512 |
| BRACE3032983 | 0.000 | 100.000 |
| BRACE3040856 | 0.000 | 100.000 |
| BRACE3045033 | 0.000 | 100.000 |
| BRALZ2011796 | 5.511 | 3.912 |
| BRAMY2003008 | 26.445 | 0.000 |
| BRAMY2005052 | 11.612 | 8.242 |
| BRAMY2019300 | 49.811 | 0.000 |
| BRAMY2019963 | 20.428 | 0.000 |
| BRAMY2020058 | 0.000 | 19.826 |
| BRAMY2030098 | 0.000 | 29.935 |
| BRAMY2031317 | 0.000 | 33.400 |
| BRAMY2036567 | 7.474 | 26.525 |
| BRAMY2037823 | 29.664 | 21.055 |
| BRAMY2039872 | 0.000 | 14.071 |
| BRAMY2040592 | 3.482 | 0.000 |
| BRAMY2044078 | 0.000 | 6.224 |
| BRAMY2047420 | 0.000 | 0.719 |
| BRAMY3002620 | 0.000 | 41.329 |
| BRAMY3002803 | 14.428 | 0.000 |
| BRAMY3004224 | 33.027 | 0.000 |
| BRAMY3005091 | 19.193 | 13.622 |
| BRAMY3005932 | 0.000 | 41.329 |
| BRAMY4000229 | 0.000 | 25.113 |
| BRAWH1000127 | 15.983 | 4.538 |
| BRAWH2001395 | 14.290 | 3.580 |
| BRAWH2001671 | 7.605 | 8.097 |
| BRAWH2001940 | 37.398 | 0.000 |
| BRAWH2001973 | 37.398 | 0.000 |
| BRAWH2002560 | 6.454 | 0.000 |
| BRAWH2002761 | 100.000 | 0.000 |
| BRAWH2005315 | 100.000 | 0.000 |
| BRAWH2007658 | 58.101 | 0.000 |
| BRAWH2010000 | 18.745 | 0.000 |
| BRAWH2010084 | 100.000 | 0.000 |
| BRAWH2010536 | 14.718 | 0.000 |
| BRAWH2012162 | 36.060 | 0.000 |
| BRAWH2012326 | 100.000 | 0.000 |
| BRAWH2013294 | 39.442 | 13.997 |
| BRAWH2013871 | 37.485 | 0.000 |
| BRAWH2014414 | 17.865 | 0.000 |
| BRAWH2014645 | 4.228 | 3.751 |
| BRAWH2014662 | 15.521 | 11.016 |
| BRAWH2014876 | 10.473 | 7.433 |
| BRAWH2014954 | 58.488 | 41.512 |
| BRAWH2016221 | 47.417 | 0.000 |
| BRAWH2016439 | 100.000 | 0.000 |
| BRAWH2016702 | 73.807 | 26.193 |
| BRAWH2016724 | 35.119 | 0.000 |
| BRAWH3000078 | 100.000 | 0.000 |
| BRAWH3000100 | 100.000 | 0.000 |
| BRAWH3000314 | 71.553 | 0.000 |
| BRAWH3000491 | 100.000 | 0.000 |
| BRAWH3001326 | 45.606 | 0.000 |
| BRAWH3001475 | 100.000 | 0.000 |
| BRAWH3001891 | 34.539 | 36.772 |
| BRAWH3002574 | 13.222 | 0.000 |
| BRAWH3002600 | 36.800 | 26.120 |
| BRAWH3002819 | 100.000 | 0.000 |
| BRAWH3002821 | 21.953 | 0.000 |
| BRAWH3003522 | 100.000 | 0.000 |
| BRAWH3003555 | 15.229 | 5.405 |
| BRAWH3003727 | 10.055 | 21.411 |
| BRAWH3003801 | 100.000 | 0.000 |
| BRAWH3003992 | 29.008 | 0.000 |
| BRAWH3004453 | 100.000 | 0.000 |
| BRAWH3004666 | 49.499 | 0.000 |
| BRAWH3005132 | 49.811 | 0.000 |
| BRAWH3005422 | 100.000 | 0.000 |
| BRAWH3005912 | 100.000 | 0.000 |
| BRAWH3005981 | 29.324 | 0.000 |
| BRAWH3006548 | 71.018 | 0.000 |
| BRAWH3006792 | 49.499 | 0.000 |
| BRAWH3007221 | 100.000 | 0.000 |
| BRAWH3007506 | 100.000 | 0.000 |
| BRAWH3007592 | 8.966 | 6.364 |
| BRAWH3007726 | 54.530 | 0.000 |
| BRAWH3007783 | 100.000 | 0.000 |
| BRAWH3008341 | 100.000 | 0.000 |
| BRAWH3008697 | 100.000 | 0.000 |
| BRAWH3008931 | 3.463 | 4.916 |
| BRAWH3009297 | 58.488 | 41.512 |
| BRCAN2009432 | 0.000 | 1.869 |
| BRCAN2010376 | 0.000 | 23.627 |
| BRCAN2015371 | 0.000 | 15.560 |
| BRCAN2020710 | 0.000 | 7.714 |
| BRCOC2003213 | 10.381 | 7.368 |
| BRCOC2007034 | 0.000 | 16.691 |
| BRCOC2014033 | 15.633 | 0.000 |
| BRCOC2020142 | 22.014 | 0.000 |
| BRHIP2000920 | 36.630 | 25.999 |
| BRHIP2004359 | 0.000 | 34.560 |
| BRHIP2005719 | 49.499 | 0.000 |
| BRHIP2005752 | 0.000 | 41.027 |
| BRHIP2007741 | 6.943 | 3.696 |
| BRHIP2013699 | 0.000 | 15.145 |
| BRHIP2014228 | 29.439 | 10.447 |
| BRHIP2024146 | 3.042 | 0.864 |
| BRHIP3000339 | 14.290 | 3.580 |
| BRHIP3006683 | 24.100 | 0.000 |
| BRHIP3007586 | 17.255 | 7.348 |
| BRHIP3008313 | 0.000 | 20.257 |
| BRHIP3008405 | 35.187 | 12.487 |
| BRHIP3018797 | 30.810 | 3.803 |
| BRSSN2000684 | 23.433 | 0.000 |
| BRSSN2006892 | 0.000 | 10.990 |
| BRSSN2011262 | 0.000 | 2.000 |
| BRSSN2011738 | 31.553 | 7.465 |
| BRSSN2014299 | 3.695 | 2.623 |
| BRSTN2008052 | 32.844 | 15.541 |
| BRSTN2010750 | 0.000 | 7.220 |
| BRSTN2015015 | 14.017 | 19.897 |
| BRSTN2016470 | 0.438 | 7.146 |
| BRTHA1000311 | 11.803 | 10.472 |
| BRTHA2008335 | 16.281 | 0.000 |
| BRTHA2008955 | 0.000 | 39.025 |
| BRTHA2011194 | 0.000 | 39.025 |
| BRTHA3001721 | 0.000 | 8.360 |
| BRTHA3002427 | 8.577 | 2.029 |
| BRTHA3003490 | 1.623 | 2.304 |
| BRTHA3008520 | 47.417 | 0.000 |
| BRTHA3009090 | 0.000 | 8.354 |
| BRTHA3017848 | 47.417 | 0.000 |
| COLON2001721 | 11.065 | 19.633 |
| CTONG2008233 | 0.000 | 3.412 |
| CTONG2017500 | 2.649 | 0.000 |
| CTONG2028124 | 0.503 | 2.854 |
| CTONG3000657 | 3.880 | 5.508 |
| CTONG3001123 | 7.847 | 0.000 |
| CTONG3005813 | 0.000 | 27.592 |
| CTONG3008894 | 0.000 | 1.032 |
| CTONG3009328 | 11.993 | 0.000 |
| DFNES2011499 | 0.000 | 4.403 |
| FCBBF2001183 | 16.537 | 5.869 |
| FCBBF3001977 | 7.448 | 10.573 |
| FEBRA2006396 | 0.000 | 5.705 |
| FEBRA2007544 | 14.689 | 41.703 |
| FEBRA2007708 | 0.000 | 6.066 |
| FEBRA2007801 | 4.937 | 1.752 |
| FEBRA2008287 | 0.000 | 4.184 |
| FEBRA2020886 | 12.124 | 0.000 |
| FEBRA2021966 | 0.000 | 3.062 |
| FEBRA2026984 | 0.000 | 12.446 |
| FEBRA2028618 | 5.082 | 10.821 |
| HCASM2007047 | 3.431 | 0.000 |
| HCHON2000244 | 0.658 | 0.934 |
| HCHON2000626 | 2.351 | 0.834 |
| HCHON2001217 | 3.123 | 2.216 |
| HCHON2002676 | 13.647 | 0.000 |
| HCHON2005921 | 0.000 | 2.944 |
| HCHON2006250 | 1.565 | 0.000 |
| HEART1000074 | 0.759 | 1.078 |
| HHDPC1000118 | 2.096 | 0.000 |
| HLUNG2002465 | 1.209 | 0.000 |
| IMR322000127 | 3.098 | 4.398 |
| IMR322001380 | 0.000 | 2.814 |
| IMR322002035 | 36.176 | 0.000 |
| KIDNE2000665 | 0.000 | 1.374 |
| KIDNE2006580 | 7.013 | 14.933 |
| MESAN2006563 | 0.691 | 1.470 |
| MESAN2012054 | 12.754 | 5.432 |
| MESTC1000042 | 2.245 | 0.797 |
| NB9N41000340 | 0.000 | 2.059 |
| NESOP2001752 | 0.000 | 3.228 |
| NOVAR2001783 | 4.027 | 0.000 |
| NT2NE2006909 | 0.285 | 0.000 |
| NT2RI2005166 | 0.000 | 18.511 |
| NT2RI2008724 | 1.836 | 0.000 |
| NT2RI2012659 | 13.562 | 48.128 |
| NT2RI2014733 | 24.938 | 0.000 |
| NT2RI2019751 | 0.000 | 28.087 |
| NT2RI3002892 | 8.799 | 9.992 |
| NT2RI3003382 | 0.000 | 28.087 |
| NT2RI3004510 | 0.000 | 20.009 |
| NT2RI3005724 | 0.000 | 42.065 |
| NT2RI3006284 | 4.138 | 1.469 |
| NT2RI3006673 | 19.959 | 0.000 |
| NT2RI3007291 | 0.000 | 35.535 |
| NT2RI3007543 | 1.697 | 1.204 |
| NT2RI3008055 | 44.179 | 15.678 |
| NT2RP7004123 | 0.000 | 1.362 |
| NT2RP7005529 | 14.766 | 5.240 |
| NT2RP7009147 | 14.337 | 0.000 |
| NT2RP7010599 | 0.000 | 22.750 |
| NT2RP7014005 | 5.818 | 0.000 |
| NT2RP7017474 | 18.823 | 13.360 |
| NTONG2005969 | 0.000 | 4.560 |
| OCBBF2001794 | 4.728 | 0.000 |
| OCBBF2003819 | 0.000 | 14.955 |
| OCBBF2006005 | 9.535 | 0.000 |
| OCBBF2006151 | 0.000 | 4.092 |
| OCBBF2006764 | 15.345 | 21.782 |
| OCBBF2007028 | 9.665 | 8.820 |
| OCBBF2010140 | 32.508 | 0.000 |
| OCBBF2020343 | 0.000 | 36.360 |
| OCBBF2020741 | 0.000 | 20.028 |
| OCBBF2021286 | 18.456 | 6.550 |
| OCBBF2022351 | 0.000 | 36.360 |
| OCBBF2024850 | 4.445 | 1.577 |
| OCBBF2025527 | 0.000 | 36.360 |
| OCBBF2028935 | 5.789 | 1.643 |
| OCBBF2036743 | 11.053 | 15.690 |
| OCBBF2038317 | 19.713 | 0.000 |
| OCBBF3000483 | 11.973 | 14.163 |
| OCBBF3007516 | 0.000 | 2.684 |
| OCBBF3008230 | 29.840 | 0.000 |
| PEBLM2004666 | 3.715 | 0.000 |
| PERIC2000889 | 0.000 | 6.314 |
| PLACE6001185 | 21.358 | 15.159 |
| PUAEN2002489 | 0.000 | 9.262 |
| PUAEN2005930 | 18.362 | 0.000 |
| PUAEN2006701 | 2.249 | 0.000 |
| PUAEN2007044 | 8.600 | 5.087 |
| PUAEN2009655 | 18.275 | 0.000 |
| SPLEN2010912 | 0.000 | 26.371 |
| SPLEN2012624 | 0.000 | 7.178 |
| SPLEN2027268 | 0.000 | 14.361 |
| SPLEN2028914 | 2.792 | 0.000 |
| SPLEN2031424 | 15.229 | 5.405 |
| SPLEN2031547 | 1.574 | 5.587 |
| SPLEN2034781 | 27.984 | 0.000 |
| SPLEN2036932 | 2.932 | 2.081 |
| SPLEN2037194 | 0.000 | 28.977 |
| SYNOV2014400 | 12.977 | 0.000 |
| SYNOV4002346 | 5.997 | 0.000 |
| SYNOV4002883 | 23.940 | 0.000 |
| SYNOV4007430 | 31.677 | 0.000 |
| SYNOV4007671 | 0.000 | 0.520 |
| SYNOV4008440 | 1.475 | 2.094 |
| TESOP2002273 | 0.000 | 2.881 |
| TESOP2002451 | 2.375 | 3.372 |
| TESOP2002950 | 0.000 | 9.399 |
| TESTI1000330 | 0.000 | 52.057 |
| TESTI4000014 | 1.964 | 2.028 |
| TESTI4000209 | 2.649 | 0.000 |
| TESTI4000349 | 0.000 | 36.899 |
| TESTI4001100 | 4.098 | 8.725 |
| TESTI4001561 | 0.000 | 28.578 |
| TESTI4006137 | 25.755 | 0.000 |
| TESTI4008797 | 12.429 | 0.000 |
| TESTI4009286 | 1.450 | 0.000 |
| TESTI4010851 | 3.280 | 2.716 |
| TESTI4011161 | 0.000 | 14.955 |
| TESTI4013675 | 0.000 | 14.015 |
| TESTI4013817 | 27.163 | 0.000 |
| TESTI4014159 | 0.000 | 16.638 |
| TESTI4014306 | 0.000 | 52.057 |
| TESTI4014694 | 2.229 | 0.791 |
| TESTI4021478 | 22.098 | 0.000 |
| TESTI4022936 | 26.445 | 0.000 |
| TESTI4024420 | 37.398 | 0.000 |
| TESTI4027821 | 60.471 | 0.000 |
| TESTI4037156 | 0.000 | 0.982 |
| TESTI4046819 | 0.000 | 14.013 |
| THYMU2001090 | 21.252 | 0.000 |
| THYMU2016523 | 0.000 | 23.416 |
| THYMU2023967 | 0.000 | 43.363 |
| THYMU2030264 | 0.000 | 45.981 |
| THYMU2033308 | 13.964 | 0.000 |
| THYMU2035735 | 1.319 | 0.936 |
| THYMU2039315 | 54.530 | 0.000 |
| THYMU2039780 | 0.000 | 45.981 |
| THYMU3001083 | 0.000 | 45.981 |
| THYMU3001234 | 11.085 | 7.868 |
| THYMU3003309 | 0.000 | 20.635 |
| THYMU3006485 | 0.000 | 45.981 |
| THYMU3008171 | 20.170 | 14.316 |
| TKIDN2009641 | 5.782 | 4.104 |
| TKIDN2009889 | 35.077 | 0.000 |
| TKIDN2015788 | 5.261 | 0.000 |
| TRACH1000205 | 19.677 | 8.380 |
| TRACH2001549 | 8.457 | 0.000 |
| TRACH2005811 | 2.109 | 0.000 |
| TRACH2006049 | 47.167 | 0.000 |
| TRACH2007834 | 0.504 | 0.000 |
| TRACH2008300 | 10.186 | 3.615 |
| TRACH2025535 | 5.806 | 2.472 |
| TRACH3001427 | 5.571 | 3.295 |
| TRACH3002192 | 4.989 | 3.541 |
| TRACH3004721 | 8.721 | 4.127 |
| TRACH3005294 | 7.428 | 0.000 |
| TRACH3006038 | 0.000 | 38.787 |
| TRACH3006412 | 0.000 | 38.787 |
| TRACH3007479 | 1.075 | 0.000 |
| TRACH3008093 | 2.449 | 3.477 |
| TRACH3009455 | 47.167 | 0.000 |
| TUTER2000904 | 0.000 | 5.944 |
| UTERU2002410 | 0.000 | 0.417 |
| UTERU2006115 | 7.837 | 5.563 |
| UTERU2007520 | 0.000 | 4.761 |
| UTERU2019706 | 45.606 | 0.000 |
| UTERU2023039 | 45.606 | 0.000 |
| UTERU2026203 | 45.606 | 0.000 |
| UTERU3000226 | 0.000 | 37.308 |
| UTERU3001572 | 0.000 | 2.591 |
| UTERU3005230 | 24.419 | 17.332 |
| UTERU3005460 | 0.000 | 37.308 |
| UTERU3005970 | 0.000 | 37.308 |
| UTERU3006308 | 0.000 | 37.308 |
| UTERU3007419 | 0.000 | 37.308 |
| UTERU3007640 | 45.606 | 0.000 |
| UTERU3007913 | 0.000 | 12.951 |
| UTERU3009871 | 36.230 | 0.000 |
| ADRGL2000042 | 2.540 | 7.210 |
| BLADE2006830 | 1.681 | 2.386 |
| BRACE2002589 | 0.000 | 100.000 |
| BRACE2003609 | 9.090 | 6.452 |
| BRACE2009318 | 0.000 | 100.000 |
| BRACE2011677 | 0.000 | 100.000 |
| BRACE2029396 | 0.000 | 100.000 |
| BRACE2037299 | 0.000 | 100.000 |
| BRACE2039823 | 0.000 | 41.329 |
| BRACE2039832 | 0.000 | 100.000 |
| BRACE2043105 | 0.000 | 100.000 |
| BRACE3001058 | 0.000 | 100.000 |
| BRACE3001113 | 0.000 | 18.680 |
| BRACE3003026 | 0.000 | 11.590 |
| BRACE3003053 | 0.000 | 36.360 |
| BRACE3009127 | 0.000 | 100.000 |
| BRACE3010076 | 0.000 | 100.000 |
| BRACE3015829 | 0.000 | 100.000 |
| BRACE3021148 | 0.000 | 100.000 |
| BRAMY3004800 | 38.061 | 0.000 |
| BRAWH1000369 | 100.000 | 0.000 |
| BRAWH2006207 | 12.943 | 9.187 |
| BRAWH2006395 | 12.446 | 0.000 |
| BRAWH2008993 | 49.811 | 0.000 |
| BRAWH2009393 | 100.000 | 0.000 |
| BRAWH2010552 | 58.488 | 41.512 |
| BRAWH3007441 | 100.000 | 0.000 |
| BRAWH3009017 | 100.000 | 0.000 |
| BRCOC2019841 | 0.000 | 16.691 |
| BRHIP2005271 | 7.083 | 0.000 |
| BRHIP3000017 | 8.819 | 0.000 |
| BRHIP3000240 | 0.000 | 67.607 |
| BRTHA2018443 | 22.098 | 0.000 |
| BRTHA3003000 | 17.150 | 0.000 |
| CTONG2020374 | 31.081 | 11.030 |
| CTONG2020378 | 16.140 | 0.000 |
| CTONG2024031 | 2.584 | 3.669 |
| FCBBF1000509 | 3.732 | 0.000 |
| FEBRA2001990 | 18.144 | 15.453 |
| FEBRA2006519 | 11.891 | 25.320 |
| FEBRA2028516 | 8.007 | 1.624 |
| HCHON2000743 | 6.105 | 8.667 |
| IMR322001879 | 9.638 | 0.000 |
| NT2RI2009583 | 0.224 | 5.399 |
| NT2RP8000521 | 0.000 | 37.067 |
| OCBBF2008144 | 5.768 | 4.094 |
| OCBBF2011669 | 0.000 | 36.360 |
| PERIC2007068 | 3.086 | 8.761 |
| PUAEN2006335 | 12.682 | 0.000 |
| SPLEN2039379 | 5.792 | 10.278 |
| SYNOV2021953 | 0.000 | 6.793 |
| TESTI2015626 | 0.000 | 0.467 |
| TESTI4001984 | 60.471 | 0.000 |
| TESTI4008058 | 8.814 | 0.000 |
| TESTI4013894 | 0.000 | 19.881 |
| TESTI4025268 | 60.471 | 0.000 |
| TESTI4032090 | 60.471 | 0.000 |
| THYMU2004284 | 0.000 | 4.768 |
| THYMU2040925 | 0.000 | 45.981 |
| THYMU3000360 | 39.314 | 27.904 |
| TLIVE2002046 | 5.445 | 7.729 |
| TRACH3000134 | 36.165 | 0.000 |
| UTERU2008040 | 0.000 | 8.353 |
| UTERU2011220 | 0.000 | 1.389 |
| UTERU2021820 | 24.929 | 17.694 |
| UTERU2028734 | 21.953 | 0.000 |

[0718] The result of comparative analysis of cDNA libraries derived from the thalamus (BRTHA), and from whole tissues of a normal brain (BRAWH) showed following genes whose expression levels differed between the two.

TABLE 8

| Clone ID | BRAWH | BRTHA |
|---|---|---|
| ASTRO1000009 | 2.611 | 0.000 |
| ASTRO3000482 | 0.000 | 24.247 |
| BLADE2008398 | 12.401 | 13.752 |
| BRACE1000186 | 4.324 | 0.000 |
| BRACE1000258 | 31.956 | 0.000 |
| BRACE1000533 | 11.795 | 5.232 |
| BRACE2005457 | 58.488 | 0.000 |
| BRACE2010489 | 63.510 | 0.000 |
| BRACE2014306 | 0.000 | 5.398 |
| BRACE2014657 | 15.451 | 0.000 |
| BRACE2015058 | 0.000 | 19.449 |
| BRACE2031154 | 0.000 | 60.975 |
| BRACE2035381 | 10.177 | 11.286 |
| BRACE2044286 | 18.667 | 0.000 |
| BRACE2045954 | 27.309 | 0.000 |
| BRACE3000787 | 32.844 | 12.141 |
| BRACE3003192 | 58.488 | 0.000 |
| BRACE3005499 | 31.276 | 0.000 |
| BRACE3007480 | 19.471 | 7.197 |
| BRACE3008384 | 0.000 | 43.859 |
| BRACE3009237 | 18.139 | 20.116 |
| BRACE3009724 | 58.488 | 0.000 |
| BRACE3009747 | 2.237 | 2.481 |
| BRACE3010397 | 0.000 | 75.757 |
| BRACE3010428 | 6.868 | 2.539 |
| BRACE3011271 | 11.036 | 0.000 |
| BRACE3011421 | 28.251 | 0.000 |
| BRACE3012364 | 8.506 | 9.433 |
| BRACE3022769 | 4.285 | 4.752 |
| BRACE3026735 | 24.173 | 0.000 |
| BRACE3027478 | 0.000 | 35.497 |
| BRACE3031838 | 58.488 | 0.000 |
| BRALZ2011796 | 5.511 | 6.112 |
| BRAMY2003008 | 26.445 | 0.000 |
| BRAMY2005052 | 11.612 | 25.755 |
| BRAMY2019300 | 49.811 | 0.000 |
| BRAMY2019963 | 20.428 | 7.551 |
| BRAMY2028914 | 0.000 | 19.645 |
| BRAMY2031317 | 0.000 | 34.791 |
| BRAMY2036567 | 7.474 | 0.000 |
| BRAMY2037823 | 29.664 | 0.000 |
| BRAMY2040592 | 3.482 | 0.000 |
| BRAMY2044078 | 0.000 | 19.449 |
| BRAMY3002803 | 14.428 | 0.000 |
| BRAMY3004224 | 33.027 | 0.000 |
| BRAMY3005091 | 19.193 | 0.000 |
| BRAMY4000229 | 0.000 | 39.237 |
| BRAWH1000127 | 15.983 | 7.090 |
| BRAWH2001395 | 14.290 | 11.652 |
| BRAWH2001671 | 7.605 | 12.650 |
| BRAWH2001940 | 37.398 | 0.000 |
| BRAWH2001973 | 37.398 | 0.000 |
| BRAWH2002560 | 6.454 | 0.000 |
| BRAWH2002761 | 100.000 | 0.000 |
| BRAWH2005315 | 100.000 | 0.000 |
| BRAWH2007658 | 58.101 | 0.000 |
| BRAWH2010000 | 18.745 | 0.000 |
| BRAWH2010084 | 100.000 | 0.000 |
| BRAWH2010536 | 14.718 | 0.000 |
| BRAWH2012162 | 36.060 | 0.000 |
| BRAWH2012326 | 100.000 | 0.000 |
| BRAWH2013294 | 39.442 | 0.000 |
| BRAWH2013871 | 37.485 | 0.000 |
| BRAWH2014414 | 17.865 | 9.906 |
| BRAWH2014645 | 4.228 | 1.172 |
| BRAWH2014662 | 15.521 | 17.212 |
| BRAWH2014876 | 10.473 | 58.068 |
| BRAWH2014954 | 58.488 | 0.000 |
| BRAWH2016221 | 47.417 | 52.583 |
| BRAWH2016439 | 100.000 | 0.000 |
| BRAWH2016702 | 73.807 | 0.000 |
| BRAWH2016724 | 35.119 | 0.000 |
| BRAWH3000078 | 100.000 | 0.000 |
| BRAWH3000100 | 100.000 | 0.000 |
| BRAWH3000314 | 71.553 | 0.000 |
| BRAWH3000491 | 100.000 | 0.000 |
| BRAWH3001326 | 45.606 | 0.000 |
| BRAWH3001475 | 100.000 | 0.000 |
| BRAWH3001891 | 34.539 | 0.000 |
| BRAWH3002574 | 13.222 | 0.000 |
| BRAWH3002600 | 36.800 | 0.000 |
| BRAWH3002819 | 100.000 | 0.000 |
| BRAWH3002821 | 21.953 | 0.000 |
| BRAWH3003522 | 100.000 | 0.000 |
| BRAWH3003555 | 15.229 | 8.444 |
| BRAWH3003727 | 10.055 | 0.000 |
| BRAWH3003801 | 100.000 | 0.000 |
| BRAWH3003992 | 29.008 | 0.000 |
| BRAWH3004453 | 100.000 | 0.000 |
| BRAWH3004666 | 49.499 | 0.000 |
| BRAWH3005132 | 49.811 | 0.000 |
| BRAWH3005422 | 100.000 | 0.000 |
| BRAWH3005912 | 100.000 | 0.000 |
| BRAWH3005981 | 29.324 | 0.000 |
| BRAWH3006548 | 71.018 | 0.000 |
| BRAWH3006792 | 49.499 | 0.000 |
| BRAWH3007221 | 100.000 | 0.000 |
| BRAWH3007506 | 100.000 | 0.000 |
| BRAWH3007592 | 8.966 | 0.000 |
| BRAWH3007726 | 54.530 | 0.000 |
| BRAWH3007783 | 100.000 | 0.000 |
| BRAWH3008341 | 100.000 | 0.000 |
| BRAWH3008697 | 100.000 | 0.000 |
| BRAWH3008931 | 3.463 | 0.000 |
| BRAWH3009297 | 58.488 | 0.000 |
| BRCAN2006297 | 0.000 | 15.966 |
| BRCOC2003213 | 10.381 | 0.000 |
| BRCOC2014033 | 15.633 | 0.000 |
| BRCOC2020142 | 22.014 | 0.000 |
| BRHIP2000819 | 0.000 | 4.791 |
| BRHIP2000920 | 36.630 | 0.000 |
| BRHIP2005719 | 49.499 | 0.000 |
| BRHIP2007741 | 6.943 | 5.775 |
| BRHIP2009474 | 0.000 | 52.083 |
| BRHIP2013699 | 0.000 | 23.663 |
| BRHIP2014228 | 29.439 | 0.000 |
| BRHIP2022221 | 0.000 | 52.083 |
| BRHIP2024146 | 3.042 | 7.759 |
| BRHIP3000339 | 14.290 | 11.652 |
| BRHIP3006683 | 24.100 | 26.726 |
| BRHIP3007586 | 17.255 | 11.481 |
| BRHIP3008405 | 35.187 | 0.000 |
| BRHIP3018797 | 30.810 | 10.399 |
| BRSSN2000684 | 23.433 | 10.395 |
| BRSSN2008549 | 0.000 | 18.953 |
| BRSSN2008797 | 0.000 | 22.955 |
| BRSSN2011738 | 31.553 | 0.000 |
| BRSSN2014299 | 3.695 | 0.000 |
| BRSTN2004863 | 0.000 | 11.049 |
| BRSTN2008052 | 32.844 | 12.141 |
| BRSTN2015015 | 14.017 | 15.544 |
| BRSTN2016470 | 0.438 | 0.000 |
| BRTHA1000311 | 11.803 | 9.817 |
| BRTHA2000855 | 0.000 | 100.000 |
| BRTHA2001462 | 0.000 | 100.000 |
| BRTHA2002115 | 0.000 | 100.000 |
| BRTHA2002281 | 0.000 | 100.000 |
| BRTHA2002376 | 0.000 | 100.000 |
| BRTHA2002442 | 0.000 | 68.493 |
| BRTHA2002493 | 0.000 | 100.000 |
| BRTHA2002608 | 0.000 | 100.000 |
| BRTHA2002808 | 0.000 | 12.857 |
| BRTHA2003030 | 0.000 | 100.000 |
| BRTHA2003110 | 0.000 | 100.000 |
| BRTHA2003116 | 0.000 | 100.000 |
| BRTHA2003461 | 0.000 | 2.434 |
| BRTHA2004821 | 0.000 | 100.000 |
| BRTHA2004978 | 0.000 | 100.000 |
| BRTHA2005579 | 0.000 | 100.000 |
| BRTHA2005956 | 0.000 | 100.000 |
| BRTHA2006075 | 0.000 | 100.000 |
| BRTHA2006146 | 0.000 | 100.000 |
| BRTHA2006194 | 0.000 | 100.000 |
| BRTHA2007122 | 0.000 | 100.000 |
| BRTHA2007422 | 0.000 | 100.000 |
| BRTHA2007603 | 0.000 | 100.000 |
| BRTHA2008316 | 0.000 | 100.000 |
| BRTHA2008335 | 16.281 | 9.028 |
| BRTHA2008527 | 0.000 | 100.000 |
| BRTHA2008535 | 0.000 | 100.000 |
| BRTHA2008955 | 0.000 | 60.975 |
| BRTHA2009311 | 0.000 | 100.000 |
| BRTHA2009846 | 0.000 | 100.000 |
| BRTHA2009972 | 0.000 | 100.000 |
| BRTHA2010073 | 0.000 | 100.000 |
| BRTHA2010608 | 0.000 | 48.181 |
| BRTHA2010884 | 0.000 | 100.000 |
| BRTHA2010907 | 0.000 | 100.000 |
| BRTHA2011194 | 0.000 | 60.975 |
| BRTHA2011351 | 0.000 | 100.000 |
| BRTHA2011500 | 0.000 | 100.000 |
| BRTHA2011641 | 0.000 | 52.395 |
| BRTHA2012392 | 0.000 | 38.390 |
| BRTHA2012562 | 0.000 | 100.000 |
| BRTHA2012980 | 0.000 | 13.890 |
| BRTHA2013262 | 0.000 | 100.000 |
| BRTHA2013460 | 0.000 | 100.000 |
| BRTHA2013707 | 0.000 | 100.000 |
| BRTHA2014792 | 0.000 | 100.000 |
| BRTHA2014828 | 0.000 | 100.000 |
| BRTHA2015406 | 0.000 | 100.000 |
| BRTHA2015478 | 0.000 | 100.000 |
| BRTHA2015696 | 0.000 | 100.000 |
| BRTHA2015878 | 0.000 | 100.000 |
| BRTHA2016215 | 0.000 | 38.930 |
| BRTHA2016496 | 0.000 | 100.000 |
| BRTHA2016543 | 0.000 | 100.000 |
| BRTHA2017353 | 0.000 | 100.000 |
| BRTHA2017985 | 0.000 | 49.749 |
| BRTHA2018165 | 0.000 | 100.000 |
| BRTHA2018344 | 0.000 | 100.000 |
| BRTHA2018591 | 0.000 | 100.000 |
| BRTHA2018624 | 0.000 | 100.000 |
| BRTHA2018707 | 0.000 | 57.080 |
| BRTHA2019014 | 0.000 | 100.000 |
| BRTHA2019022 | 0.000 | 100.000 |
| BRTHA2019048 | 0.000 | 100.000 |
| BRTHA3000273 | 0.000 | 57.080 |
| BRTHA3000297 | 0.000 | 52.083 |
| BRTHA3000633 | 0.000 | 37.898 |
| BRTHA3001721 | 0.000 | 13.062 |
| BRTHA3002401 | 0.000 | 100.000 |
| BRTHA3002427 | 8.577 | 15.852 |
| BRTHA3002933 | 0.000 | 100.000 |
| BRTHA3003074 | 0.000 | 37.459 |
| BRTHA3003343 | 0.000 | 100.000 |
| BRTHA3003449 | 0.000 | 100.000 |
| BRTHA3003474 | 0.000 | 100.000 |
| BRTHA3003490 | 1.623 | 1.800 |
| BRTHA3004475 | 0.000 | 52.395 |
| BRTHA3005046 | 0.000 | 52.083 |
| BRTHA3006856 | 0.000 | 100.000 |
| BRTHA3007113 | 0.000 | 100.000 |
| BRTHA3007148 | 0.000 | 100.000 |
| BRTHA3007319 | 0.000 | 100.000 |
| BRTHA3007769 | 0.000 | 100.000 |
| BRTHA3008143 | 0.000 | 100.000 |
| BRTHA3008310 | 0.000 | 100.000 |
| BRTHA3008386 | 0.000 | 100.000 |
| BRTHA3008520 | 47.417 | 52.583 |
| BRTHA3008778 | 0.000 | 27.551 |
| BRTHA3009037 | 0.000 | 100.000 |
| BRTHA3009090 | 0.000 | 13.052 |
| BRTHA3009291 | 0.000 | 100.000 |
| BRTHA3010366 | 0.000 | 100.000 |
| BRTHA3013884 | 0.000 | 100.000 |
| BRTHA3015815 | 0.000 | 100.000 |
| BRTHA3015910 | 0.000 | 33.089 |
| BRTHA3016845 | 0.000 | 100.000 |
| BRTHA3016917 | 0.000 | 100.000 |
| BRTHA3017047 | 0.000 | 100.000 |
| BRTHA3017589 | 0.000 | 100.000 |
| BRTHA3017848 | 47.417 | 52.583 |
| BRTHA3018514 | 0.000 | 100.000 |
| BRTHA3018617 | 0.000 | 100.000 |
| BRTHA3018656 | 0.000 | 100.000 |
| BRTHA3019105 | 0.000 | 100.000 |
| COLON2001721 | 11.065 | 0.000 |
| CTONG1000087 | 0.000 | 3.479 |
| CTONG2008233 | 0.000 | 3.046 |
| CTONG2017500 | 2.649 | 2.938 |
| CTONG2019788 | 0.000 | 3.391 |
| CTONG2023021 | 0.000 | 37.320 |
| CTONG2028124 | 0.503 | 1.672 |
| CTONG3000657 | 3.880 | 8.605 |
| CTONG3001123 | 7.847 | 0.000 |
| CTONG3008894 | 0.000 | 2.418 |
| CTONG3009028 | 0.000 | 1.785 |
| CTONG3009239 | 0.000 | 1.601 |
| CTONG3009328 | 11.993 | 0.000 |
| FCBBF2001183 | 16.537 | 9.169 |
| FCBBF3001977 | 7.448 | 0.000 |
| FCBBF3021576 | 0.000 | 19.062 |
| FEBRA2007544 | 14.689 | 2.715 |
| FEBRA2007801 | 4.937 | 5.475 |
| FEBRA2008287 | 0.000 | 6.537 |
| FEBRA2008360 | 0.000 | 11.338 |
| FEBRA2020886 | 12.124 | 0.000 |
| FEBRA2028618 | 5.082 | 0.000 |
| HCASM2007047 | 3.431 | 0.000 |
| HCHON2000028 | 0.000 | 5.278 |
| HCHON2000212 | 0.000 | 19.062 |
| HCHON2000244 | 0.658 | 0.000 |
| HCHON2000626 | 2.351 | 1.304 |
| HCHON2001084 | 0.000 | 2.546 |
| HCHON2001217 | 3.123 | 5.771 |
| HCHON2002676 | 13.647 | 0.000 |
| HCHON2005921 | 0.000 | 9.198 |
| HCHON2006250 | 1.565 | 1.735 |
| HEART1000074 | 0.759 | 0.000 |
| HEART2007031 | 0.000 | 12.601 |
| HHDPC1000118 | 2.096 | 0.000 |
| HLUNG2001996 | 0.000 | 23.216 |
| HLUNG2002465 | 1.209 | 1.341 |
| IMR322000127 | 3.098 | 0.000 |
| IMR322001380 | 0.000 | 2.198 |
| IMR322002035 | 36.176 | 0.000 |
| KIDNE2002252 | 0.000 | 2.417 |
| KIDNE2005543 | 0.000 | 19.748 |
| KIDNE2006580 | 7.013 | 7.777 |
| KIDNE2011314 | 0.000 | 24.133 |
| MESAN2006563 | 0.691 | 1.532 |
| MESAN2012054 | 12.754 | 0.000 |
| MESTC1000042 | 2.245 | 0.000 |
| NOVAR2001783 | 4.027 | 0.000 |
| NT2NE2006909 | 0.285 | 0.000 |
| NT2RI2008724 | 1.836 | 4.073 |
| NT2RI2012659 | 13.562 | 0.000 |
| NT2RI2014733 | 24.938 | 0.000 |
| NT2RI3002842 | 0.000 | 20.781 |
| NT2RI3002892 | 8.799 | 13.661 |
| NT2RI3005403 | 0.000 | 37.898 |
| NT2RI3006284 | 4.138 | 0.000 |
| NT2RI3006673 | 19.959 | 0.000 |
| NT2RI3007543 | 1.697 | 0.000 |
| NT2RI3008055 | 44.179 | 0.000 |
| NT2RP7004123 | 0.000 | 2.128 |
| NT2RP7005529 | 14.766 | 0.000 |
| NT2RP7009147 | 14.337 | 3.533 |
| NT2RP7014005 | 5.818 | 0.000 |
| NT2RP7017474 | 18.823 | 0.000 |
| NTONG2005969 | 0.000 | 3.562 |
| NTONG2008088 | 0.000 | 11.332 |
| OCBBF2001794 | 4.728 | 0.000 |
| OCBBF2006005 | 9.535 | 21.147 |
| OCBBF2006764 | 15.345 | 0.000 |
| OCBBF2007028 | 9.665 | 18.374 |
| OCBBF2010140 | 32.508 | 0.000 |
| OCBBF2020639 | 0.000 | 25.048 |
| OCBBF2021286 | 18.456 | 10.233 |
| OCBBF2024719 | 0.000 | 32.892 |
| OCBBF2024850 | 4.445 | 7.393 |
| OCBBF2028935 | 5.789 | 2.568 |
| OCBBF2036743 | 11.053 | 12.257 |
| OCBBF2038317 | 19.713 | 10.930 |
| OCBBF3000483 | 11.973 | 0.000 |
| OCBBF3008230 | 29.840 | 33.091 |
| PEBLM2004666 | 3.715 | 0.000 |
| PLACE6001185 | 21.358 | 0.000 |
| PUAEN2002489 | 0.000 | 21.707 |
| PUAEN2005930 | 18.362 | 10.181 |
| PUAEN2006701 | 2.249 | 0.000 |
| PUAEN2007044 | 8.600 | 1.590 |
| PUAEN2009655 | 18.275 | 0.000 |
| RECTM2001347 | 0.000 | 4.600 |
| SKMUS2000757 | 0.000 | 5.480 |
| SPLEN2006122 | 0.000 | 0.934 |
| SPLEN2010912 | 0.000 | 13.734 |
| SPLEN2025491 | 0.000 | 38.930 |
| SPLEN2028914 | 2.792 | 0.000 |
| SPLEN2031424 | 15.229 | 8.444 |
| SPLEN2031547 | 1.574 | 1.746 |
| SPLEN2032154 | 0.000 | 38.930 |
| SPLEN2034781 | 27.984 | 0.000 |
| SPLEN2036821 | 0.000 | 38.930 |
| SPLEN2036932 | 2.932 | 0.000 |
| SYNOV1000374 | 0.000 | 22.005 |
| SYNOV2014400 | 12.977 | 0.000 |
| SYNOV4002346 | 5.997 | 0.000 |
| SYNOV4002883 | 23.940 | 0.000 |
| SYNOV4007430 | 31.677 | 0.000 |
| SYNOV4007671 | 0.000 | 0.813 |
| SYNOV4008440 | 1.475 | 3.272 |
| TESOP2002451 | 2.375 | 0.000 |
| TESTI2049246 | 0.000 | 29.159 |
| TESTI4000014 | 1.964 | 1.188 |
| TESTI4000209 | 2.649 | 2.938 |
| TESTI4001100 | 4.098 | 4.544 |
| TESTI4002290 | 0.000 | 62.915 |
| TESTI4006137 | 25.755 | 28.561 |
| TESTI4008797 | 12.429 | 27.567 |
| TESTI4009286 | 1.450 | 0.804 |
| TESTI4010851 | 3.280 | 3.031 |
| TESTI4012702 | 0.000 | 2.417 |
| TESTI4013817 | 27.163 | 0.000 |
| TESTI4014159 | 0.000 | 25.996 |
| TESTI4014694 | 2.229 | 0.000 |
| TESTI4021478 | 22.098 | 49.012 |
| TESTI4022936 | 26.445 | 0.000 |
| TESTI4024420 | 37.398 | 0.000 |
| TESTI4027821 | 60.471 | 0.000 |
| TESTI4037156 | 0.000 | 0.307 |
| THYMU2001090 | 21.252 | 47.135 |
| THYMU2025707 | 0.000 | 20.521 |
| THYMU2032825 | 0.000 | 20.620 |
| THYMU2033308 | 13.964 | 0.000 |
| THYMU2033787 | 0.000 | 57.080 |
| THYMU2035735 | 1.319 | 0.000 |
| THYMU2039315 | 54.530 | 0.000 |
| THYMU2040975 | 0.000 | 1.948 |
| THYMU3001234 | 11.085 | 12.293 |
| THYMU3001379 | 0.000 | 27.929 |
| THYMU3004835 | 0.000 | 21.784 |
| THYMU3008171 | 20.170 | 0.000 |
| TKIDN2009641 | 5.782 | 12.823 |
| TKIDN2009889 | 35.077 | 0.000 |
| TKIDN2015788 | 5.261 | 2.917 |
| TLIVE2001327 | 0.000 | 5.201 |
| TRACH1000205 | 19.677 | 0.000 |
| TRACH2001549 | 8.457 | 4.689 |
| TRACH2005811 | 2.109 | 3.508 |
| TRACH2006049 | 47.167 | 0.000 |
| TRACH2007834 | 0.504 | 0.559 |
| TRACH2008300 | 10.1 [symbol] 6 | 11.296 |
| TRACH2023299 | 0.000 | 14.157 |
| TRACH2025535 | 5.806 | 1.288 |
| TRACH3001427 | 5.571 | 1.030 |
| TRACH3002192 | 4.989 | 2.766 |
| TRACH3004068 | 0.000 | 1.581 |
| TRACH3004721 | 8.721 | 3.224 |
| TRACH3005294 | 7.428 | 0.000 |
| TRACH3007479 | 1.075 | 0.000 |
| TRACH3008093 | 2.449 | 2.716 |
| TRACH3009455 | 47.167 | 0.000 |
| TSTOM1000135 | 0.000 | 9.361 |
| TUTER2000904 | 0.000 | 3.096 |
| UTERU2002410 | 0.000 | 1.302 |
| UTERU2006115 | 7.837 | 17.383 |
| UTERU2019706 | 45.606 | 0.000 |
| UTERU2019940 | 0.000 | 48.181 |
| UTERU2023039 | 45.606 | 0.000 |
| UTERU2023175 | 0.000 | 1.651 |
| UTERU2026203 | 45.606 | 0.000 |
| UTERU2030280 | 0.000 | 48.181 |
| UTERU3000899 | 0.000 | 31.292 |
| UTERU3001571 | 0.000 | 48.181 |
| UTERU3001572 | 0.000 | 6.073 |
| UTERU3004709 | 0.000 | 48.181 |
| UTERU3005230 | 24.419 | 0.000 |
| UTERU3005907 | 0.000 | 14.514 |
| UTERU3007640 | 45.606 | 0.000 |
| UTERU3009871 | 36.230 | 0.000 |
| ADRGL2000042 | 2.540 | 0.000 |
| BLADE2006830 | 1.681 | 0.000 |
| BRACE2003609 | 9.090 | 0.000 |
| BRAMY3004800 | 38.061 | 0.000 |
| BRAWH1000369 | 100.000 | 0.000 |
| BRAWH2006207 | 12.943 | 0.000 |
| BRAWH2006395 | 12.446 | 0.000 |
| BRAWH2008993 | 49.811 | 0.000 |
| BRAWH2009393 | 100.000 | 0.000 |
| BRAWH2010552 | 58.488 | 0.000 |
| BRAWH3007441 | 100.000 | 0.000 |
| BRAWH3009017 | 100.000 | 0.000 |
| BRHIP2005271 | 7.083 | 7.855 |
| BRHIP3000017 | 8.819 | 0.000 |
| BRTHA2002133 | 0.000 | 100.000 |
| BRTHA2002702 | 0.000 | 100.000 |
| BRTHA2007060 | 0.000 | 100.000 |
| BRTHA2010033 | 0.000 | 100.000 |
| BRTHA2011321 | 0.000 | 100.000 |
| BRTHA2013426 | 0.000 | 100.000 |
| BRTHA2013610 | 0.000 | 100.000 |
| BRTHA2016318 | 0.000 | 100.000 |
| BRTHA2017364 | 0.000 | 100.000 |
| BRTHA2017972 | 0.000 | 37.427 |
| BRTHA2018011 | 0.000 | 100.000 |
| BRTHA2018443 | 22.098 | 49.012 |
| BRTHA3000296 | 0.000 | 100.000 |
| BRTHA3003000 | 17.150 | 19.019 |
| BRTHA3008826 | 0.000 | 100.000 |
| CTONG2008721 | 0.000 | 37.320 |
| CTONG2020374 | 31.081 | 0.000 |
| CTONG2020378 | 16.140 | 0.000 |
| CTONG2024031 | 2.584 | 0.000 |
| FCBBF1000509 | 3.732 | 6.208 |
| FEBRA2001990 | 18.144 | 8.048 |
| FEBRA2006519 | 11.891 | 0.000 |
| FEBRA2028516 | 8.007 | 1.268 |
| HCHON2000743 | 6.105 | 6.771 |
| HSYRA2005628 | 0.000 | 7.437 |
| IMR322001879 | 9.638 | 0.000 |
| NT2RI2009583 | 0.224 | 1.489 |
| OCBBF2008144 | 5.768 | 3.198 |
| PERIC2007068 | 3.086 | 1.711 |
| PUAEN2006335 | 12.682 | 0.000 |
| SPLEN2016932 | 0.000 | 38.930 |
| SPLEN2039379 | 5.792 | 3.212 |
| SYNOV2006620 | 0.000 | 33.957 |
| TESTI4001984 | 60.471 | 0.000 |
| TESTI4008058 | 8.814 | 0.000 |
| TESTI4025268 | 60.471 | 0.000 |
| TESTI4032090 | 60.471 | 0.000 |
| THYMU3000360 | 39.314 | 0.000 |
| TLIVE2002046 | 5.445 | 12.076 |
| TRACH3000134 | 36.165 | 0.000 |
| UTERU2021820 | 24.929 | 27.645 |
| UTERU2028734 | 21.953 | 0.000 |

[0719] The result of comparative analysis of cDNA libraries derived from the amygdale (BRAMY), and from whole tissues of a normal brain (BRAWH) showed following genes whose expression levels differed between the two.

TABLE 9

| Clone ID | BRAWH | BRAMY |
|---|---|---|
| ASTRO1000009 | 2.611 | 0.000 |
| BLADE2008398 | 12.401 | 0.000 |
| BRACE1000186 | 4.324 | 0.000 |
| BRACE1000258 | 31.956 | 0.000 |
| BRACE1000533 | 11.795 | 4.754 |
| BRACE2005457 | 58.488 | 0.000 |
| BRACE2006319 | 0.000 | 3.532 |
| BRACE2010489 | 63.510 | 10.665 |
| BRACE2014657 | 15.451 | 7.784 |
| BRACE2015058 | 0.000 | 8.836 |
| BRACE2027258 | 0.000 | 34.044 |
| BRACE2030341 | 0.000 | 6.969 |
| BRACE2031389 | 0.000 | 30.747 |
| BRACE20353$$1 | 10.177 | 10.254 |
| BRACE2044286 | 18.667 | 0.000 |
| BRACE2045954 | 27.309 | 0.000 |
| BRACE3000787 | 32.844 | 0.000 |
| BRACE3000973 | 0.000 | 13.581 |
| BRACE3003192 | 58.488 | 0.000 |
| BRACE3005499 | 31.276 | 0.000 |
| BRACE3007480 | 19.471 | 6.540 |
| BRACE3008036 | 0.000 | 18.594 |
| BRACE3009237 | 18.139 | 0.000 |
| BRACE3009724 | 58.488 | 0.000 |
| BRACE3009747 | 2.237 | 0.000 |
| BRACE3010428 | 6.868 | 3.460 |
| BRACE3011271 | 11.036 | 11.120 |
| BRACE3011421 | 28.251 | 0.000 |
| BRACE3012364 | 8.506 | 0.000 |
| BRACE3013780 | 0.000 | 4.833 |
| BRACE3022769 | 4.285 | 4.318 |
| BRACE3026735 | 24.173 | 24.356 |
| BRACE3027478 | 0.000 | 16.126 |
| BRACE3031838 | 58.488 | 0.000 |
| BRALZ2011796 | 5.511 | 0.000 |
| BRAMY2001473 | 0.000 | 100.000 |
| BRAMY2003008 | 26.445 | 26.646 |
| BRAMY2004771 | 0.000 | 100.000 |
| BRAMY2005052 | 11.612 | 46.801 |
| BRAMY2017528 | 0.000 | 100.000 |
| BRAMY2019300 | 49.811 | 50.189 |
| BRAMY2019963 | 20.428 | 6.861 |
| BRAMY2019985 | 0.000 | 100.000 |
| BRAMY2020058 | 0.000 | 28.146 |
| BRAMY2020270 | 0.000 | 100.000 |
| BRAMY2021498 | 0.000 | 100.000 |
| BRAMY2028856 | 0.000 | 100.000 |
| BRAMY2028914 | 0.000 | 17.849 |
| BRAMY2029602 | 0.000 | 100.000 |
| BRAMY2030098 | 0.000 | 42.496 |
| BRAMY2030109 | 0.000 | 100.000 |
| BRAMY2030702 | 0.000 | 100.000 |
| BRAMY2030703 | 0.000 | 100.000 |
| BRAMY2030799 | 0.000 | 100.000 |
| BRAMY2031317 | 0.000 | 15.805 |
| BRAMY2031377 | 0.000 | 100.000 |
| BRAMY2031442 | 0.000 | 100.000 |
| BRAMY2032014 | 0.000 | 100.000 |
| BRAMY2032242 | 0.000 | 100.000 |
| BRAMY2032317 | 0.000 | 60.652 |
| BRAMY2033003 | 0.000 | 100.000 |
| BRAMY2033116 | 0.000 | 100.000 |
| BRAMY2033267 | 0.000 | 100.000 |
| BRAMY2033594 | 0.000 | 100.000 |
| BRAMY2034185 | 0.000 | 100.000 |
| BRAMY2034920 | 0.000 | 100.000 |
| BRAMY2034993 | 0.000 | 100.000 |
| BRAMY2036387 | 0.000 | 13.490 |
| BRAMY2036396 | 0.000 | 100.000 |
| BRAMY2036567 | 7.474 | 22.594 |
| BRAMY2036699 | 0.000 | 100.000 |
| BRAMY2036913 | 0.000 | 100.000 |
| BRAMY2037823 | 29.664 | 29.890 |
| BRAMY2038100 | 0.000 | 100.000 |
| BRAMY2038484 | 0.000 | 100.000 |
| BRAMY2038846 | 0.000 | 47.355 |
| BRAMY2038904 | 0.000 | 60.652 |
| BRAMY2039872 | 0.000 | 19.976 |
| BRAMY2040478 | 0.000 | 100.000 |
| BRAMY2040592 | 3.482 | 7.017 |
| BRAMY2041261 | 0.000 | 100.000 |
| BRAMY2041378 | 0.000 | 100.000 |
| BRAMY2041542 | 0.000 | 100.000 |
| BRAMY2042612 | 0.000 | 100.000 |
| BRAMY2042641 | 0.000 | 100.000 |
| BRAMY2042760 | 0.000 | 100.000 |
| BRAMY2042918 | 0.000 | 100.000 |
| BRAMY2044078 | 0.000 | 8.836 |
| BRAMY2044246 | 0.000 | 100.000 |
| BRAMY2045036 | 0.000 | 100.000 |
| BRAMY2046478 | 0.000 | 100.000 |
| BRAMY2046742 | 0.000 | 100.000 |
| BRAMY2046989 | 0.000 | 100.000 |
| BRAMY2047169 | 0.000 | 100.000 |
| BRAMY2047420 | 0.000 | 2.041 |
| BRAMY2047676 | 0.000 | 100.000 |
| BRAMY2047746 | 0.000 | 100.000 |
| BRAMY2047751 | 0.000 | 100.000 |
| BRAMY2047765 | 0.000 | 100.000 |
| BRAMY2047884 | 0.000 | 100.000 |
| BRAMY3000206 | 0.000 | 100.000 |
| BRAMY3000213 | 0.000 | 100.000 |
| BRAMY3001401 | 0.000 | 100.000 |
| BRAMY3001794 | 0.000 | 100.000 |
| BRAMY3002312 | 0.000 | 100.000 |
| BRAMY3002620 | 0.000 | 58.671 |
| BRAMY3002803 | 14.428 | 14.538 |
| BRAMY3002805 | 0.000 | 100.000 |
| BRAMY3004224 | 33.027 | 33.278 |
| BRAMY3004672 | 0.000 | 100.000 |
| BRAMY3004900 | 0.000 | 100.000 |
| BRAMY3004919 | 0.000 | 100.000 |
| BRAMY3005091 | 19.193 | 19.339 |
| BRAMY3005932 | 0.000 | 58.671 |
| BRAMY3006297 | 0.000 | 100.000 |
| BRAMY3007206 | 0.000 | 100.000 |
| BRAMY3007609 | 0.000 | 100.000 |
| BRAMY3008466 | 0.000 | 100.000 |
| BRAMY3008505 | 0.000 | 100.000 |
| BRAMY3008650 | 0.000 | 100.000 |
| BRAMY3009811 | 0.000 | 33.057 |
| BRAMY3010411 | 0.000 | 100.000 |
| BRAMY4000095 | 0.000 | 14.721 |
| BRAMY4000229 | 0.000 | 35.650 |
| BRAMY4000277 | 0.000 | 100.000 |
| BRAWH1000127 | 15.983 | 9.663 |
| BRAWH2001395 | 14.290 | 2.541 |
| BRAWH2001671 | 7.605 | 0.000 |
| BRAWH2001940 | 37.398 | 0.000 |
| BRAWH2001973 | 37.398 | 0.000 |
| BRAWH2002560 | 6.454 | 6.503 |
| BRAWH2002761 | 100.000 | 0.000 |
| BRAWH2005315 | 100.000 | 0.000 |
| BRAWH2007658 | 58.101 | 0.000 |
| BRAWH2010000 | 18.745 | 0.000 |
| BRAWH2010084 | 100.000 | 0.000 |
| BRAWH2010536 | 14.718 | 0.000 |
| BRAWH2012162 | 36.060 | 0.000 |
| BRAWH2012326 | 100.000 | 0.000 |
| BRAWH2013294 | 39.442 | 0.000 |
| BRAWH2013871 | 37.485 | 0.000 |
| BRAWH2014414 | 17.865 | 54.002 |
| BRAWH2014645 | 4.228 | 2.130 |
| BRAWH2014662 | 15.521 | 0.000 |
| BRAWH2014876 | 10.473 | 0.000 |
| BRAWH2014954 | 58.488 | 0.000 |
| BRAWH2016221 | 47.417 | 0.000 |
| BRAWH2016439 | 100.000 | 0.000 |
| BRAWH2016702 | 73.807 | 0.000 |
| BRAWH2016724 | 35.119 | 0.000 |
| BRAWH3000078 | 100.000 | 0.000 |
| BRAWH3000100 | 100.000 | 0.000 |
| BRAWH3000314 | 71.553 | 0.000 |
| BRAWH3000491 | 100.000 | 0.000 |
| BRAWH3001326 | 45.606 | 0.000 |
| BRAWH3001475 | 100.000 | 0.000 |
| BRAWH3001891 | 34.539 | 17.401 |
| BRAWH3002574 | 13.222 | 0.000 |
| BRAWH3002600 | 36.800 | 37.080 |
| BRAWH3002819 | 100.000 | 0.000 |
| BRAWH3002821 | 21.953 | 0.000 |
| BRAWH3003522 | 100.000 | 0.000 |
| BRAWH3003555 | 15.229 | 0.000 |
| BRAWH3003727 | 10.055 | 0.000 |
| BRAWH3003801 | 100.000 | 0.000 |
| BRAWH3003992 | 29.008 | 0.000 |
| BRAWH3004453 | 100.000 | 0.000 |
| BRAWH3004666 | 49.499 | 0.000 |
| BRAWH3005132 | 49.811 | 50.189 |
| BRAWH3005422 | 100.000 | 0.000 |
| BRAWH3005912 | 100.000 | 0.000 |
| BRAWH3005981 | 29.324 | 0.000 |
| BRAWH3006548 | 71.018 | 0.000 |
| BRAWH3006792 | 49.499 | 0.000 |
| BRAWH3007221 | 100.000 | 0.000 |
| BRAWH3007506 | 100.000 | 0.000 |
| BRAWH3007592 | 8.966 | 1.807 |
| BRAWH3007726 | 54.530 | 0.000 |
| BRAWH3007783 | 100.000 | 0.000 |
| BRAWH3008341 | 100.000 | 0.000 |
| BRAWH3008697 | 100.000 | 0.000 |
| BRAWH3008931 | 3.463 | 6.980 |
| BRAWH3009297 | 58.488 | 0.000 |
| BRCAN2014881 | 0.000 | 30.516 |
| BRCAN2017717 | 0.000 | 10.719 |
| BRCOC2000670 | 0.000 | 22.144 |
| BRCOC2003213 | 10.381 | 0.000 |
| BRCOC2014033 | 15.633 | 0.000 |
| BRCOC2020142 | 22.014 | 0.000 |
| BRHIP2000920 | 36.630 | 0.000 |
| BRHIP2005719 | 49.499 | 0.000 |
| BRHIP2007741 | 6.943 | 8.745 |
| BRHIP2014228 | 29.439 | 0.000 |
| BRHIP2024146 | 3.042 | 2.759 |
| BRHIP2026061 | 0.000 | 30.812 |
| BRHIP3000339 | 14.290 | 2.541 |
| BRHIP3001283 | 0.000 | 49.688 |
| BRHIP3006683 | 24.100 | 0.000 |
| BRHIP3007586 | 17.255 | 3.477 |
| BRHIP3008405 | 35.187 | 0.000 |
| BRHIP3018797 | 30.810 | 9.448 |
| BRSSN2000684 | 23.433 | 0.000 |
| BRSSN2004496 | 0.000 | 21.304 |
| BRSSN2011738 | 31.553 | 0.000 |
| BRSSN2014299 | 3.695 | 0.000 |
| BRSTN2008052 | 32.844 | 0.000 |
| BRSTN2010750 | 0.000 | 30.747 |
| BRSTN2015015 | 14.017 | 0.000 |
| BRSTN2016470 | 0.438 | 0.441 |
| BRTHA1000311 | 11.803 | 14.866 |
| BRTHA2008335 | 16.281 | 0.000 |
| BRTHA2011641 | 0.000 | 47.605 |
| BRTHA3001721 | 0.000 | 23.737 |
| BRTHA3002427 | 8.577 | 5.761 |
| BRTHA3003490 | 1.623 | 0.000 |
| BRTHA3004475 | 0.000 | 47.605 |
| BRTHA3008520 | 47.417 | 0.000 |
| BRTHA3009090 | 0.000 | 11.859 |
| BRTHA3017848 | 47.417 | 0.000 |
| COLON2001721 | 11.065 | 11.149 |
| CTONG1000087 | 0.000 | 3.161 |
| CTONG2008233 | 0.000 | 0.692 |
| CTONG2017500 | 2.649 | 2.669 |
| CTONG2028124 | 0.503 | 0.506 |
| CTONG3000657 | 3.880 | 0.000 |
| CTONG3001123 | 7.847 | 0.000 |
| CTONG3008894 | 0.000 | 4.395 |
| CTONG3009239 | 0.000 | 4.364 |
| CTONG3009328 | 11.993 | 0.000 |
| FCBBF20011$$3 | 16.537 | 9.998 |
| FCBBF3001977 | 7.448 | 15.010 |
| FEBRA2007544 | 14.689 | 0.000 |
| FEBRA2007801 | 4.937 | 0.000 |
| FEBRA2008287 | 0.000 | 2.970 |
| FEBRA2010719 | 0.000 | 17.484 |
| FEBRA2020886 | 12.124 | 0.000 |
| FEBRA2025427 | 0.000 | 4.995 |
| FEBRA2028618 | 5.082 | 5.121 |
| HCASM2007047 | 3.431 | 0.000 |
| HCHON2000244 | 0.658 | 0.663 |
| HCHON2000626 | 2.351 | 0.000 |
| HCHON2001217 | 3.123 | 0.000 |
| HCHON2002676 | 13.647 | 0.000 |
| HCHON2006250 | 1.565 | 0.000 |
| HCHON2008112 | 0.000 | 13.736 |
| HEART1000074 | 0.759 | 0.000 |
| HHDPC1000118 | 2.096 | 0.000 |
| HLUNG2002465 | 1.209 | 4.875 |
| HSYRA2009075 | 0.000 | 1.212 |
| IMR322000127 | 3.098 | 10.926 |
| IMR322001380 | 0.000 | 11.984 |
| IMR322002035 | 36.176 | 0.000 |
| KIDNE2000665 | 0.000 | 1.951 |
| KIDNE2006580 | 7.013 | 7.066 |
| MESAN2006563 | 0.691 | 0.000 |
| MESAN2012054 | 12.754 | 0.000 |
| MESAN2015515 | 0.000 | 2.677 |
| MESTC1000042 | 2.245 | 0.000 |
| NOVAR2001783 | 4.027 | 0.000 |
| NT2NE2005890 | 0.000 | 35.735 |
| NT2NE2006909 | 0.285 | 0.287 |
| NT2RI2008724 | 1.836 | 1.850 |
| NT2RI2012659 | 13.562 | 13.665 |
| NT2RI2014733 | 24.938 | 0.000 |
| NT2RI3001515 | 0.000 | 21.825 |
| NT2RI3002$$92 | 8.799 | 1.773 |
| NT2RI3005724 | 0.000 | 5.972 |
| NT2RI3006284 | 4.138 | 0.000 |
| NT2RI3006673 | 19.959 | 10.055 |
| NT2RI3007543 | 1.697 | 0.855 |
| NT2RI3008055 | 44.179 | 0.000 |
| NT2RP7005529 | 14.766 | 7.439 |
| NT2RP7009147 | 14.337 | 0.000 |
| NT2RP7014005 | 5.818 | 0.000 |
| NT2RP7017474 | 18.823 | 0.000 |
| NTONG2005969 | 0.000 | 6.473 |
| OCBBF1000254 | 0.000 | 44.784 |
| OCBBF2001794 | 4.728 | 4.764 |
| OCBBF2006005 | 9.535 | 0.000 |
| OCBBF2006764 | 15.345 | 15.461 |
| OCBBF2007028 | 9.665 | 6.956 |
| OCBBF2007114 | 0.000 | 21.540 |
| OCBBF2010140 | 32.508 | 0.000 |
| OCBBF2021286 | 18.456 | 0.000 |
| OCBBF2023162 | 0.000 | 31.080 |
| OCBBF2024850 | 4.445 | 2.239 |
| OCBBF2028935 | 5.789 | 1.167 |
| OCBBF2035214 | 0.000 | 44.784 |
| OCBBF2036743 | 11.053 | 11.137 |
| OCBBF2038317 | 19.713 | 0.000 |
| OCBBF3000483 | 11.973 | 4.021 |
| OCBBF3008230 | 29.840 | 0.000 |
| PEBLM2004666 | 3.715 | 3.744 |
| PERIC2000889 | 0.000 | 8.963 |
| PERIC2003720 | 0.000 | 13.012 |
| PLACE6001185 | 21.358 | 0.000 |
| PUAEN2005930 | 18.362 | 0.000 |
| PUAEN2006701 | 2.249 | 0.000 |
| PUAEN2007044 | 8.600 | 1.444 |
| PUAEN2009174 | 0.000 | 2.856 |
| PUAEN2009655 | 18.275 | 0.000 |
| SKNMC2002402 | 0.000 | 7.428 |
| SKNSH2000482 | 0.000 | 9.821 |
| SPLEN2001599 | 0.000 | 7.190 |
| SPLEN2002467 | 0.000 | 6.565 |
| SPLEN2028914 | 2.792 | 0.000 |
| SPLEN2029912 | 0.000 | 1.646 |
| SPLEN2031424 | 15.229 | 0.000 |
| SPLEN2031547 | 1.574 | 4.759 |
| SPLEN2034781 | 27.984 | 0.000 |
| SPLEN2036932 | 2.932 | 0.000 |
| SPLEN2038345 | 0.000 | 29.627 |
| SYNOV2014400 | 12.977 | 0.000 |
| SYNOV4002346 | 5.997 | 0.000 |
| SYNOV4002883 | 23.940 | 0.000 |
| SYNOV4007430 | 31.677 | 0.000 |
| SYNOV4007671 | 0.000 | 0.739 |
| SYNOV4008440 | 1.475 | 0.000 |
| TESOP2002451 | 2.375 | 0.000 |
| TESTI2009474 | 0.000 | 2.036 |
| TESTI4000014 | 1.964 | 1.799 |
| TESTI4000209 | 2.649 | 2.669 |
| TESTI4001100 | 4.098 | 4.129 |
| TESTI4006137 | 25.755 | 0.000 |
| TESTI4008797 | 12.429 | 0.000 |
| TESTI4009286 | 1.450 | 0.000 |
| TESTI4010851 | 3.280 | 2.203 |
| TESTI4013817 | 27.163 | 27.369 |
| TESTI4014159 | 0.000 | 11.810 |
| TESTI4014694 | 2.229 | 0.000 |
| TESTI4021478 | 22.098 | 0.000 |
| TESTI4022936 | 26.445 | 26.646 |
| TESTI4024420 | 37.398 | 0.000 |
| TESTI4027821 | 60.471 | 0.000 |
| TESTI4029836 | 0.000 | 60.652 |
| TESTI4037156 | 0.000 | 1.394 |
| TESTI4037188 | 0.000 | 60.652 |
| THYMU2001090 | 21.252 | 0.000 |
| THYMU2014353 | 0.000 | 37.663 |
| THYMU2033308 | 13.964 | 0.000 |
| THYMU2035735 | 1.319 | 0.000 |
| THYMU2037226 | 0.000 | 17.265 |
| THYMU2039315 | 54.530 | 0.000 |
| THYMU3001234 | 11.085 | 0.000 |
| THYMU3001379 | 0.000 | 25.376 |
| THYMU3004835 | 0.000 | 19.793 |
| THYMU3008171 | 20.170 | 0.000 |
| TKIDN2009641 | 5.782 | 5.826 |
| TKIDN2009889 | 35.077 | 0.000 |
| TKIDN2015788 | 5.261 | 5.301 |
| TLIVE2004320 | 0.000 | 12.783 |
| TRACH1000205 | 19.677 | 3.965 |
| TRACH2001549 | 8.457 | 4.260 |
| TRACH2001684 | 0.000 | 17.948 |
| TRACH2005811 | 2.109 | 0.000 |
| TRACH2006049 | 47.167 | 0.000 |
| TRACH2007834 | 0.504 | 1.016 |
| TRACH2008300 | 10.186 | 11.974 |
| TRACH2025344 | 0.000 | 19.846 |
| TRACH2025535 | 5.806 | 0.000 |
| TRACH2025911 | 0.000 | 47.355 |
| TRACH3001427 | 5.571 | 3.742 |
| TRACH3002192 | 4.989 | 1.885 |
| TRACH3004068 | 0.000 | 1.436 |
| TRACH3004721 | 8.721 | 5.858 |
| TRACH3005294 | 7.428 | 0.000 |
| TRACH3007479 | 1.075 | 1.084 |
| TRACH3008093 | 2.449 | 0.000 |
| TRACH3009455 | 47.167 | 0.000 |
| TUTER2000904 | 0.000 | 2.813 |
| UTERU2002410 | 0.000 | 0.592 |
| UTERU2004929 | 0.000 | 11.697 |
| UTERU2006115 | 7.837 | 0.000 |
| UTERU2007520 | 0.000 | 6.758 |
| UTERU2019706 | 45.606 | 0.000 |
| UTERU2023039 | 45.606 | 0.000 |
| UTERU2026203 | 45.606 | 0.000 |
| UTERU3001572 | 0.000 | 1.839 |
| UTERU3001766 | 0.000 | 45.794 |
| UTERU3005230 | 24.419 | 0.000 |
| UTERU3007640 | 45.606 | 0.000 |
| UTERU3009517 | 0.000 | 45.794 |
| UTERU3009871 | 36.230 | 0.000 |
| ADRGL2000042 | 2.540 | 5.118 |
| BLADE2006830 | 1.681 | 0.000 |
| BRACE2003609 | 9.090 | 18.317 |
| BRACE2039823 | 0.000 | 58.671 |
| BRAMY2019111 | 0.000 | 30.516 |
| BRAMY2035070 | 0.000 | 54.718 |
| BRAMY2035449 | 0.000 | 100.000 |
| BRAMY2035718 | 0.000 | 100.000 |
| BRAMY2038516 | 0.000 | 12.770 |
| BRAMY2039341 | 0.000 | 100.000 |
| BRAMY2040159 | 0.000 | 100.000 |
| BRAMY2041434 | 0.000 | 100.000 |
| BRAMY2045471 | 0.000 | 100.000 |
| BRAMY3004800 | 38.061 | 15.340 |
| BRAWH1000369 | 100.000 | 0.000 |
| BRAWH2006207 | 12.943 | 0.000 |
| BRAWH2006395 | 12.446 | 0.000 |
| BRAWH2008993 | 49.811 | 50.189 |
| BRAWH2009393 | 100.000 | 0.000 |
| BRAWH2010552 | 58.488 | 0.000 |
| BRAWH3007441 | 100.000 | 0.000 |
| BRAWH3009017 | 100.000 | 0.000 |
| BRHIP2005271 | 7.083 | 7.137 |
| BRHIP3000017 | 8.819 | 0.000 |
| BRTHA2018443 | 22.098 | 0.000 |
| BRTHA3003000 | 17.150 | 0.000 |
| CTONG2020374 | 31.081 | 0.000 |
| CTONG2020378 | 16.140 | 0.000 |
| CTONG2024031 | 2.584 | 0.000 |
| FCBBF1000509 | 3.732 | 13.160 |
| FEBRA2001990 | 18.144 | 7.313 |
| FEBRA2006519 | 11.891 | 11.982 |
| FEBRA2028516 | 8.007 | 2.305 |
| HCHON2000508 | 0.000 | 0.376 |
| HCHON2000743 | 6.105 | 0.000 |
| IMR322001879 | 9.638 | 0.000 |
| NT2RI2009583 | 0.224 | 0.902 |
| OCBBF2008144 | 5.768 | 2.906 |
| PERIC2007068 | 3.086 | 0.000 |
| PUAEN2006335 | 12.682 | 0.000 |
| SPLEN2039379 | 5.792 | 11.672 |
| TESTI2015626 | 0.000 | 0.331 |
| TESTI2026647 | 0.000 | 23.811 |
| TESTI4001984 | 60.471 | 0.000 |
| TESTI4008058 | 8.814 | 0.000 |
| TESTI4013894 | 0.000 | 14.112 |
| TESTI4025268 | 60.471 | 0.000 |
| TESTI4032090 | 60.471 | 0.000 |
| THYMU3000360 | 39.314 | 0.000 |
| TKIDN2018926 | 0.000 | 21.396 |
| TLIVE2002046 | 5.445 | 10.972 |
| TRACH3000134 | 36.165 | 0.000 |
| UTERU2008040 | 0.000 | 11.858 |
| UTERU2021820 | 24.929 | 0.000 |
| UTERU2028734 | 21.953 | 0.000 |

[0720] The result of comparative analysis of cDNA libraries derived from breast tumor (TBAES), and normal breast (BEAST) showed the following genes whose expression levels differed between the two.

TABLE 10

| Clone ID | BEAST | TBAES |
|---|---|---|
| ASTRO2002842 | 0.000 | 67.001 |
| BRACE3016884 | 0.000 | 90.835 |
| BRSSN2011262 | 61.476 | 0.000 |
| BRTHA2008335 | 0.000 | 57.267 |
| HCHON2000244 | 0.000 | 4.627 |
| HCHON2006250 | 0.000 | 11.007 |
| HEART1000010 | 0.000 | 24.034 |
| MESAN2012054 | 0.000 | 35.889 |
| NT2RP7000466 | 0.000 | 85.728 |
| NT2RP7009147 | 0.000 | 11.206 |
| OCBBF2021020 | 0.000 | 18.756 |
| PEBLM2002749 | 0.000 | 48.344 |
| PEBLM2004666 | 0.000 | 26.137 |
| SPLEN2001599 | 0.000 | 50.196 |
| SPLEN2031547 | 0.000 | 11.076 |
| STOMA1000189 | 0.000 | 22.002 |
| TBAES2001171 | 0.000 | 100.000 |
| TBAES2001220 | 0.000 | 100.000 |
| TBAES2001229 | 0.000 | 100.000 |
| TBAES2001258 | 0.000 | 66.863 |
| TBAES2001492 | 0.000 | 100.000 |
| TBAES2001751 | 0.000 | 100.000 |
| TBAES2002197 | 0.000 | 54.528 |
| TBAES2003550 | 0.000 | 100.000 |
| TBAES2004055 | 0.000 | 100.000 |
| TBAES2005157 | 0.000 | 100.000 |
| TBAES2005543 | 0.000 | 100.000 |
| TBAES2006568 | 0.000 | 100.000 |
| TBAES2007964 | 0.000 | 100.000 |
| TESTI4000014 | 0.000 | 1.256 |
| TESTI4037156 | 0.000 | 3.893 |
| TRACH3002192 | 0.000 | 4.387 |
| TRACH3004068 | 0.000 | 10.026 |
| TSTOM2000553 | 0.000 | 11.859 |
| UTERU2002410 | 0.000 | 8.261 |
| BRAWH2006395 | 0.000 | 87.554 |
| NT2RI2009583 | 4.881 | 0.000 |
| STOMA2004893 | 0.000 | 50.829 |
| TBAES2000932 | 0.000 | 100.000 |

[0721] The result of comparative analysis of cDNA libraries derived cervical tumor (TCERX), and normal cervical duct (CERVX) showed the following genes whose expression levels differed between the two.

TABLE 11

| Clone ID | CERVX | TCERX |
|---|---|---|
| BLADE2007666 | 70.405 | 0.000 |
| BRAMY2047420 | 0.000 | 21.378 |
| BRCAN2007409 | 0.000 | 63.318 |
| BRSTN2016470 | 0.000 | 9.238 |
| CERVX1000042 | 100.000 | 0.000 |
| CERVX2002006 | 100.000 | 0.000 |
| MESAN2006563 | 14.270 | 0.000 |
| PROST2018090 | 44.955 | 0.000 |
| TCERX2000613 | 0.000 | 85.503 |
| TESTI4037156 | 0.000 | 5.840 |
| THYMU2031341 | 71.304 | 0.000 |
| UTERU2004688 | 22.977 | 70.393 |
| CERVX2002013 | 100.000 | 0.000 |
| NT2RI2009583 | 0.000 | 9.443 |

[0722] The result of comparative analysis of cDNA libraries derived from colon tumor (TCOLN), and normal colon (COLON) showed the following genes whose expression levels differed between the two.

TABLE 12

| Clone ID | COLON | TCOLN |
|---|---|---|
| BRACE3015027 | 0.000 | 55.019 |
| BRAMY2040592 | 24.447 | 0.000 |
| BRSTN2016470 | 6.147 | 9.281 |
| COLON1000030 | 100.000 | 0.000 |
| COLON2000470 | 50.006 | 0.000 |
| COLON2000568 | 100.000 | 0.000 |
| COLON2001721 | 38.840 | 0.000 |
| COLON2002443 | 31.658 | 0.000 |
| COLON2002520 | 100.000 | 0.000 |
| COLON2003043 | 100.000 | 0.000 |
| COLON2004478 | 100.000 | 0.000 |
| COLON2005126 | 100.000 | 0.000 |
| COLON2005772 | 100.000 | 0.000 |
| COLON2006282 | 100.000 | 0.000 |
| COLON2009499 | 100.000 | 0.000 |
| OCBBF2028935 | 8.128 | 0.000 |
| PLACE7000514 | 33.393 | 0.000 |
| RECTM2000433 | 24.395 | 0.000 |
| SYNOV4007671 | 5.146 | 0.000 |
| TCOLN2002278 | 0.000 | 100.000 |
| TESTI2052693 | 23.507 | 35.495 |
| TESTI4037156 | 1.943 | 0.000 |
| THYMU2031368 | 0.000 | 96.216 |
| TRACH2025535 | 16.304 | 0.000 |
| CTONG1000113 | 79.033 | 0.000 |
| NT2RI2009583 | 0.000 | 4.744 |
| NT2RI2018448 | 44.206 | 0.000 |
| TESTI2015626 | 2.309 | 0.000 |

[0723] The result of comparative analysis of cDNA libraries derived from esophageal tumor (TESOP), and normal esophagus (NESOP) showed the following genes whose expression levels differed between the two.

TABLE 13

| Clone ID | NESOP | TESOP |
|---|---|---|
| BRACE2030341 | 0.000 | 47.323 |
| BRAMY2047420 | 21.553 | 0.000 |
| BRHIP2003917 | 0.000 | 80.343 |
| BRTHA2003461 | 0.000 | 15.017 |
| CTONG2013178 | 0.000 | 64.748 |
| D3OST3000169 | 0.000 | 6.696 |
| FEBRA2025427 | 0.000 | 16.960 |
| HCHON2000244 | 0.000 | 4.501 |
| HHDPC1000118 | 0.000 | 14.339 |
| NESOP2000744 | 100.000 | 0.000 |
| NESOP2001433 | 100.000 | 0.000 |
| NESOP2001656 | 85.181 | 0.000 |
| NESOP2001694 | 100.000 | 0.000 |
| NESOP2001752 | 96.772 | 0.000 |
| NESOP2002738 | 100.000 | 0.000 |
| NT2RI3006284 | 0.000 | 14.156 |
| NT2RP7009147 | 33.894 | 0.000 |
| PLACE6019932 | 92.281 | 0.000 |
| SYNOV2005216 | 0.000 | 66.809 |
| TESOP1000127 | 0.000 | 65.101 |
| TESOP2000801 | 0.000 | 100.000 |
| TESOP2001122 | 0.000 | 100.000 |
| TESOP2001166 | 0.000 | 100.000 |
| TESOP2001345 | 0.000 | 100.000 |
| TESOP2001605 | 0.000 | 66.809 |
| TESOP2001818 | 0.000 | 100.000 |
| TESOP2001849 | 0.000 | 100.000 |
| TESOP2001865 | 0.000 | 100.000 |
| TESOP2001953 | 0.000 | 89.137 |
| TESOP2002273 | 0.000 | 27.770 |
| TESOP2002451 | 0.000 | 16.251 |
| TESOP2002489 | 0.000 | 100.000 |
| TESOP2002539 | 0.000 | 100.000 |
| TESOP2002950 | 0.000 | 90.601 |
| TESOP2003273 | 0.000 | 100.000 |
| TESOP2003753 | 0.000 | 100.000 |
| TESOP2004114 | 0.000 | 100.000 |
| TESOP2005285 | 0.000 | 100.000 |
| TESOP2005485 | 0.000 | 100.000 |
| TESOP2005579 | 0.000 | 100.000 |
| TESOP2006041 | 0.000 | 100.000 |
| TESOP2006060 | 0.000 | 100.000 |
| TESOP2006068 | 0.000 | 100.000 |
| TESOP2006670 | 0.000 | 79.728 |
| TESOP2006746 | 0.000 | 100.000 |
| TESOP2007052 | 0.000 | 100.000 |
| TESOP2007262 | 0.000 | 100.000 |
| TESOP2007636 | 0.000 | 100.000 |
| TESOP2007688 | 0.000 | 100.000 |
| TESOP2009121 | 0.000 | 100.000 |
| TESOP2009555 | 0.000 | 100.000 |
| TESTI4009286 | 15.424 | 9.920 |
| TESTI4010851 | 0.000 | 3.740 |
| THYMU2040975 | 0.000 | 12.019 |
| TRACH2005811 | 0.000 | 14.431 |
| UTERU2023175 | 0.000 | 10.186 |
| CTONG2016942 | 0.000 | 78.602 |
| NT2RI2009583 | 0.000 | 1.531 |
| TESOP2000390 | 0.000 | 100.000 |
| TESOP2001796 | 0.000 | 100.000 |
| TESOP2005199 | 0.000 | 100.000 |
| TESOP2006398 | 0.000 | 100.000 |
| TESOP2006865 | 0.000 | 100.000 |
| TESOP2007384 | 0.000 | 13.734 |
| TESTI2015626 | 0.000 | 2.250 |
| TRACH2000862 | 0.000 | 39.606 |

[0724] The result of comparative analysis of cDNA libraries derived from kidney tumor (TKIDN), and normal kidney (KIDNE) showed the following genes whose expression levels differed between the two.

TABLE 14

| Clone ID | KIDNE | TKIDN |
|---|---|---|
| ASTRO2018373 | 0.000 | 51.654 |
| BRACE1000186 | 0.000 | 16.007 |
| BRACE2014306 | 0.000 | 18.017 |
| BRACE2015058 | 0.000 | 16.230 |
| BRACE2016981 | 0.000 | 83.911 |
| BRACE2043665 | 83.085 | 0.000 |
| BRACE3008036 | 0.000 | 68.309 |
| BRACE3010428 | 3.991 | 0.000 |
| BRACE3022769 | 0.000 | 5.287 |
| BRAMY2019963 | 0.000 | 25.206 |
| BRAMY2044078 | 0.000 | 16.230 |
| BRAWH1000127 | 0.000 | 11.833 |
| BRAWH2001395 | 0.000 | 9.335 |
| BRAWH2001671 | 0.000 | 14.075 |
| BRAWH2013294 | 0.000 | 36.500 |
| BRAWH2014645 | 0.000 | 3.913 |
| BRHIP2024146 | 0.000 | 7.882 |
| BRHIP3000339 | 0.000 | 9.335 |
| BRSSN2000684 | 0.000 | 17.348 |
| BRSSN2004719 | 0.000 | 19.395 |
| BRSSN2018581 | 0.000 | 49.863 |
| BRSTN2016470 | 0.763 | 0.810 |
| BRTHA1000311 | 0.000 | 10.923 |
| BRTHA3002427 | 0.000 | 10.582 |
| CTONG1000087 | 3.646 | 0.000 |
| CTONG2028124 | 3.504 | 0.000 |
| CTONG3000657 | 0.000 | 14.362 |
| CTONG3008894 | 2.534 | 0.000 |
| FCBBF2001183 | 0.000 | 12.243 |
| FEBRA2008287 | 0.000 | 10.911 |
| HCASM2001301 | 0.000 | 35.796 |
| HCHON2000028 | 0.000 | 5.873 |
| HCHON2000244 | 4.587 | 0.000 |
| HEART1000074 | 2.646 | 0.000 |
| HHDPC1000118 | 7.307 | 0.000 |
| HSYRA2008376 | 0.000 | 5.788 |
| KIDNE1000064 | 100.000 | 0.000 |
| KIDNE2000665 | 13.498 | 0.000 |
| KIDNE2000722 | 100.000 | 0.000 |
| KIDNE2000832 | 32.592 | 0.000 |
| KIDNE2000846 | 100.000 | 0.000 |
| KIDNE2001361 | 80.699 | 0.000 |
| KIDNE2001847 | 12.687 | 0.000 |
| KIDNE2002252 | 7.600 | 0.000 |
| KIDNE2002991 | 100.000 | 0.000 |
| KIDNE2003837 | 100.000 | 0.000 |
| KIDNE2005543 | 62.084 | 0.000 |
| KIDNE2006580 | 48.900 | 0.000 |
| KIDNE2010264 | 100.000 | 0.000 |
| KIDNE2011314 | 75.867 | 0.000 |
| KIDNE2011532 | 100.000 | 0.000 |
| KIDNE2011635 | 48.502 | 51.498 |
| KIDNE2012945 | 48.732 | 0.000 |
| KIDNE2013095 | 100.000 | 0.000 |
| NESOP2001656 | 0.000 | 14.819 |
| NTONG2005969 | 0.000 | 11.891 |
| PEBLM2004666 | 12.953 | 0.000 |
| SKMUS2000757 | 0.000 | 18.292 |
| STOMA1000189 | 16.356 | 0.000 |
| SYNOV4007671 | 2.556 | 5.427 |
| TBAES2001258 | 33.137 | 0.000 |
| TESTI4000014 | 1.245 | 0.000 |
| TESTI4001100 | 0.000 | 15.168 |
| TESTI4012702 | 7.600 | 0.000 |
| TESTI4046819 | 0.000 | 73.082 |
| THYMU2032014 | 57.532 | 0.000 |
| TKIDN2000701 | 0.000 | 84.991 |
| TKIDN2002424 | 0.000 | 100.000 |
| TKIDN2002632 | 0.000 | 100.000 |
| TKIDN2003044 | 0.000 | 100.000 |
| TKIDN2004386 | 0.000 | 100.000 |
| TKIDN2005934 | 0.000 | 100.000 |
| TKIDN2005947 | 0.000 | 100.000 |
| TKIDN2006525 | 0.000 | 100.000 |
| TKIDN2006852 | 0.000 | 100.000 |
| TKIDN2007667 | 0.000 | 100.000 |
| TKIDN2009092 | 0.000 | 100.000 |
| TKIDN2009641 | 0.000 | 21.402 |
| TKIDN2009889 | 0.000 | 64.923 |
| TKIDN2010934 | 0.000 | 74.873 |
| TKIDN2012824 | 0.000 | 100.000 |
| TKIDN2013287 | 0.000 | 64.067 |
| TKIDN2014757 | 0.000 | 100.000 |
| TKIDN2014771 | 0.000 | 100.000 |
| TKIDN2015263 | 0.000 | 100.000 |
| TKIDN2015788 | 0.000 | 9.737 |
| TKIDN2016309 | 0.000 | 100.000 |
| TKIDN2019116 | 0.000 | 100.000 |
| TRACH2001443 | 0.000 | 34.396 |
| TRACH2001684 | 62.100 | 0.000 |
| TRACH2007834 | 1.758 | 3.734 |
| TRACH2008300 | 0.000 | 6.284 |
| TRACH3001427 | 0.000 | 3.437 |
| UTERU2002410 | 0.000 | 2.173 |
| UTERU2023175 | 5.190 | 0.000 |
| UTERU3001572 | 0.000 | 6.758 |
| BLADE2006830 | 0.000 | 6.222 |
| BRALZ2017844 | 0.000 | 50.604 |
| CTONG2028758 | 0.000 | 59.532 |
| FCBBF1000509 | 0.000 | 6.907 |
| FEBRA2001990 | 0.000 | 13.433 |
| FEBRA2028516 | 0.000 | 4.234 |
| HCHON2000508 | 0.000 | 1.382 |
| MESAN2005303 | 0.000 | 29.326 |
| NT2RI2009583 | 10.920 | 0.828 |
| TESTI2015626 | 0.000 | 4.869 |
| TKIDN2008778 | 0.000 | 100.000 |
| TKIDN2012771 | 0.000 | 100.000 |
| TKIDN2018926 | 0.000 | 78.604 |

[0725] The result of comparative analysis of cDNA libraries derived from liver tumor (TLIVE), and normal liver (LIVER) showed the following genes whose expression levels differed between the two.

TABLE 15

| Clone ID | LIVER | TLIVE |
|---|---|---|
| BRCAN2018935 | 79.072 | 0.000 |
| BRSTN2016470 | 1.897 | 0.000 |
| BRTHA2012980 | 0.000 | 86.110 |
| BRTHA3002427 | 0.000 | 19.655 |
| CTONG2028124 | 0.000 | 3.455 |
| LIVER2007415 | 100.000 | 0.000 |
| NT2RI2008724 | 0.000 | 12.626 |
| SPLEN2012624 | 43.831 | 0.000 |
| SPLEN2033098 | 0.000 | 34.211 |
| TESOP2002451 | 0.000 | 16.330 |
| TLIVE2000023 | 0.000 | 100.000 |
| TLIVE2001327 | 0.000 | 64.491 |
| TLIVE2001828 | 0.000 | 89.183 |
| TLIVE2001927 | 0.000 | 100.000 |
| TLIVE2002336 | 0.000 | 100.000 |
| TLIVE2002338 | 0.000 | 100.000 |
| TLIVE2002690 | 0.000 | 41.431 |
| TLIVE2003197 | 0.000 | 100.000 |
| TLIVE2003225 | 0.000 | 100.000 |
| TLIVE2003381 | 0.000 | 100.000 |
| TLIVE2003970 | 0.000 | 15.901 |
| TLIVE2004110 | 0.000 | 70.982 |
| TLIVE2004320 | 0.000 | 87.217 |
| TLIVE2004601 | 0.000 | 100.000 |
| TLIVE2005180 | 0.000 | 100.000 |
| TLIVE2006236 | 0.000 | 100.000 |
| TLIVE2006529 | 0.000 | 100.000 |
| TLIVE2007132 | 0.000 | 100.000 |
| TLIVE2007528 | 0.000 | 100.000 |
| TLIVE2007816 | 0.000 | 100.000 |
| TLIVE2008083 | 0.000 | 100.000 |
| TLIVE2008229 | 0.000 | 91.317 |
| TLIVE2009541 | 0.000 | 100.000 |
| UTERU2002410 | 0.000 | 4.037 |
| UTERU2005621 | 19.540 | 0.000 |
| LIVER2000247 | 100.000 | 0.000 |
| NT2RI2009583 | 1.939 | 4.615 |
| TESTI2015626 | 0.000 | 2.261 |
| TLIVE2001684 | 0.000 | 100.000 |
| TLIVE2002046 | 0.000 | 12.478 |
| TLIVE2007607 | 0.000 | 100.000 |

[0726] The result of comparative analysis of cDNA libraries derived from lung tumor (TLUNG), and normal lung (HLUNG) showed the following genes whose expression levels differed between the two.

TABLE 16

| Clone ID | HLUNG | TLUNG |
|---|---|---|
| BRCAN2021028 | 38.589 | 0.000 |
| BRHIP2000819 | 7.923 | 0.000 |
| BRSTN2016470 | 0.803 | 0.000 |
| CTONG1000087 | 3.835 | 0.000 |
| CTONG2028124 | 9.217 | 0.000 |
| HCHON2006250 | 0.000 | 32.381 |
| HEART1000074 | 2.784 | 0.000 |
| HLUNG1000017 | 100.000 | 0.000 |
| HLUNG2000014 | 100.000 | 0.000 |
| HLUNG2001996 | 76.784 | 0.000 |
| HLUNG2002465 | 4.436 | 0.000 |
| HLUNG2002958 | 100.000 | 0.000 |
| HLUNG2003003 | 29.311 | 0.000 |
| HLUNG2003872 | 100.000 | 0.000 |
| HLUNG2010464 | 100.000 | 0.000 |
| HLUNG2011041 | 100.000 | 0.000 |
| HLUNG2011298 | 35.254 | 0.000 |
| HLUNG2012049 | 100.000 | 0.000 |
| HLUNG2012287 | 100.000 | 0.000 |
| HLUNG2012727 | 100.000 | 0.000 |
| HLUNG2013204 | 100.000 | 0.000 |
| HLUNG2013304 | 100.000 | 0.000 |
| HLUNG2013622 | 100.000 | 0.000 |
| HLUNG2013851 | 100.000 | 0.000 |
| HLUNG2014262 | 100.000 | 0.000 |
| HLUNG2014288 | 100.000 | 0.000 |
| HLUNG2014449 | 100.000 | 0.000 |
| HLUNG2015617 | 100.000 | 0.000 |
| HLUNG2017350 | 100.000 | 0.000 |
| HLUNG2017546 | 12.944 | 0.000 |
| HLUNG2017806 | 100.000 | 0.000 |
| HLUNG2019058 | 100.000 | 0.000 |
| HSYRA2008376 | 11.470 | 0.000 |
| KIDNE2012945 | 51.268 | 0.000 |
| NT2RI2003993 | 13.924 | 0.000 |
| NT2RP7013795 | 0.000 | 89.568 |
| OCBBF3000483 | 14.638 | 0.000 |
| SPLEN2028914 | 10.242 | 0.000 |
| SPLEN2031547 | 5.775 | 0.000 |
| SYNOV4007671 | 2.689 | 0.000 |
| TESOP1000127 | 34.899 | 0.000 |
| TESTI2003573 | 27.394 | 0.000 |
| TESTI4000014 | 0.655 | 0.000 |
| TESTI4037156 | 2.030 | 0.000 |
| TRACH2005811 | 3.868 | 0.000 |
| TRACH3004068 | 5.227 | 0.000 |
| UTERU2005621 | 8.268 | 0.000 |
| FEBRA2028516 | 4.195 | 0.000 |
| HCHON2000508 | 1.370 | 0.000 |
| HLUNG2013350 | 100.000 | 0.000 |
| HLUNG2015418 | 76.605 | 0.000 |
| HLUNG2015548 | 100.000 | 0.000 |
| HLUNG2016862 | 100.000 | 0.000 |
| NT2RI2009583 | 0.000 | 13.890 |
| TESTI2015626 | 2.412 | 0.000 |
| TRACH2019672 | 76.605 | 0.000 |

[0727] The result of comparative analysis of cDNA libraries derived from ovary tumor (TOVER), and normal ovary (NOVER) showed the following genes whose expression levels differed between the two.

TABLE 17A

| Clone ID | NOVAR | TOVAR |
|---|---|---|
| CTONG2019788 | 72.878 | 0.000 |
| FEBRA2014213 | 0.000 | 85.773 |
| HLUNG2017546 | 84.114 | 0.000 |
| NOVAR2000136 | 100.000 | 0.000 |
| NOVAR2000710 | 83.961 | 0.000 |
| NOVAR2000962 | 100.000 | 0.000 |
| NOVAR2001108 | 100.000 | 0.000 |
| NOVAR2001783 | 95.973 | 0.000 |
| OCBBF3007516 | 90.145 | 0.000 |
| TESTI2052693 | 39.903 | 0.000 |
| TOVAR2000649 | 0.000 | 100.000 |
| TOVAR2001281 | 0.000 | 100.000 |
| TOVAR2001730 | 0.000 | 100.000 |
| TOVAR2002247 | 0.000 | 100.000 |
| TOVAR2002549 | 0.000 | 100.000 |
| TRACH3004068 | 0.000 | 31.044 |

[0728] The result of comparative analysis of cDNA libraries derived from ovary tumor (TOVER), and normal ovary (NOVER) showed the following genes whose expression levels differed between the two.

TABLE 17B

| Clone ID | NOVAR | TOVAR |
|---|---|---|
| TESTI2015626 | 7.838 | 7.163 |

[0729] The gene has no different expression levels between normal and diseased ovary. However, the gene showed significantly different expression level in both ovary tumor and normal ovary, compared with other tissues (as in Example 9). Thus, the gene are ovary-specific gene and can be used as diagnostic marker because its association with the disease.

[0730] The result of comparative analysis of cDNA libraries derived from stomach tumor (TSTOM) and normal stomach (STOMA) showed the following genes whose expression levels differed between the two.

TABLE 18

| Clone ID | STOMA | TSTOM |
|---|---|---|
| BRACE2024627 | 83.309 | 0.000 |
| BRAWH2014645 | 0.000 | 22.702 |
| BRCAN2028355 | 0.000 | 31.728 |
| BRHIP2000819 | 14.701 | 46.392 |
| BRSTN2016470 | 1.490 | 0.000 |
| BRTHA3003490 | 0.000 | 34.864 |
| COLON2002443 | 30.687 | 0.000 |
| HEART1000010 | 23.250 | 0.000 |
| HLUNG2002465 | 8.231 | 0.000 |
| KIDNE2001847 | 0.000 | 78.156 |
| NT2RP7000466 | 5.924 | 0.000 |
| PUAEN2006328 | 0.000 | 79.193 |
| SMINT2001818 | 12.758 | 0.000 |
| STOMA1000189 | 10.642 | 0.000 |
| STOMA2003444 | 91.236 | 0.000 |
| STOMA2004294 | 100.000 | 0.000 |
| STOMA2004925 | 85.088 | 0.000 |
| STOMA2008546 | 100.000 | 0.000 |
| SYNOV4007671 | 4.989 | 0.000 |
| TESTI4000014 | 0.000 | 3.835 |
| TESTI4010851 | 3.720 | 0.000 |
| THYMU2035735 | 0.000 | 28.332 |
| TRACH2001549 | 28.775 | 0.000 |
| TRACH2005811 | 0.000 | 22.648 |
| TRACH2025535 | 0.000 | 12.468 |
| TSTOM1000135 | 0.000 | 90.639 |
| TSTOM2000442 | 0.000 | 100.000 |
| TSTOM2000553 | 0.000 | 36.203 |
| TSTOM2002672 | 0.000 | 100.000 |
| UTERU2006115 | 53.335 | 0.000 |
| UTERU3001572 | 12.423 | 0.000 |
| FEBRA2008692 | 0.000 | 52.692 |
| NT2RI2009583 | 7.613 | 0.000 |
| STOMA2003158 | 41.655 | 0.000 |
| STOMA2004893 | 49.171 | 0.000 |
| TESTI2015626 | 2.238 | 0.000 |

[0731] The result of comparative analysis of cDNA libraries derived from uterine tumor (TUTER) and normal uterus (UTERU) showed the following genes whose expression levels differed between the two.

TABLE 19

| Clone ID | UTERU | TUTER |
|---|---|---|
| BNGH42007788 | 3.672 | 0.000 |
| BRACE1000186 | 2.579 | 0.000 |
| BRACE2030341 | 16.499 | 0.000 |
| BRACE3008772 | 62.692 | 0.000 |
| BRACE3009747 | 2.668 | 0.000 |
| BRACE3010428 | 5.461 | 0.000 |
| BRACE3027478 | 19.089 | 0.000 |
| BRALZ2017359 | 24.816 | 0.000 |
| BRAWH2014645 | 2.522 | 0.000 |
| BRAWH3000314 | 28.447 | 0.000 |
| BRAWH3001326 | 54.394 | 0.000 |
| BRAWH3002574 | 7.885 | 0.000 |
| BRAWH3002821 | 26.183 | 0.000 |
| BRAWH3003727 | 11.993 | 0.000 |
| BRAWH3007592 | 4.277 | 0.000 |
| BRCAN2009432 | 3.141 | 29.345 |
| BRCAN2028355 | 1.762 | 0.000 |
| BRHIP3007586 | 4.116 | 0.000 |
| BRHIP3008344 | 53.896 | 0.000 |
| BRHIP3008565 | 53.896 | 0.000 |
| BRSSN2006892 | 18.468 | 0.000 |
| BRSTN2001067 | 7.384 | 0.000 |
| BRSTN2016470 | 0.522 | 0.000 |
| BRTHA2010608 | 51.819 | 0.000 |
| BRTHA3003074 | 13.429 | 0.000 |
| CTONG1000087 | 2.494 | 0.000 |
| CTONG1000467 | 10.248 | 0.000 |
| CTONG2028124 | 2.997 | 0.000 |
| CTONG3001123 | 9.359 | 0.000 |
| CTONG3008894 | 0.867 | 0.000 |
| CTONG3009028 | 3.839 | 0.000 |
| CTONG3009239 | 1.722 | 0.000 |
| FCBBF3004847 | 39.231 | 0.000 |
| FEBRA2026984 | 20.914 | 0.000 |
| FEBRA2028618 | 6.061 | 0.000 |
| HCHON2000244 | 1.569 | 0.000 |
| HCHON2000418 | 15.860 | 0.000 |
| HCHON2000626 | 5.608 | 0.000 |
| HCHON2001084 | 2.739 | 0.000 |
| HCHON2001217 | 4.966 | 0.000 |
| HCHON2005921 | 24.732 | 0.000 |
| HCHON2006250 | 0.000 | 34.872 |
| HCHON2008444 | 15.860 | 0.000 |
| HLUNG2003003 | 28.594 | 0.000 |
| HSYRA2008376 | 1.865 | 0.000 |
| KIDNE2002252 | 2.600 | 0.000 |
| MESAN2014295 | 24.337 | 0.000 |
| NOVAR2000710 | 4.201 | 0.000 |
| NT2RI2008724 | 2.190 | 0.000 |
| NT2RI2014247 | 18.191 | 0.000 |
| NT2RI2014733 | 29.743 | 0.000 |
| NT2RI3002892 | 18.890 | 0.000 |
| NT2RI3005724 | 7.069 | 0.000 |
| NT2RI3006284 | 0.000 | 46.111 |
| NT2RI3006340 | 19.479 | 0.000 |
| NT2RI3006673 | 11.902 | 0.000 |
| NT2RI3007291 | 14.928 | 0.000 |
| NT2RI3007543 | 1.012 | 0.000 |
| NT2RP7004123 | 2.289 | 0.000 |
| NT2RP7005529 | 8. [symbol] 06 | 0.000 |
| NT2RP7009147 | 1.900 | 0.000 |
| NT2RP7017474 | 22.450 | 0.000 |
| OCBBF2007028 | 8.234 | 0.000 |
| OCBBF2020741 | 33.655 | 0.000 |
| OCBBF2024850 | 26.505 | 0.000 |
| OCBBF2036743 | 13.183 | 0.000 |
| OCBBF3000483 | 9.520 | 0.000 |
| PLACE6001185 | 25.473 | 0.000 |
| PLACE7000514 | 5.673 | 0.000 |
| PUAEN2007044 | 1.710 | 0.000 |
| PUAEN2009655 | 4.359 | 0.000 |
| SKNSH2000482 | 23.251 | 0.000 |
| SPLEN2006122 | 0.000 | 18.769 |
| SPLEN2016554 | 22.228 | 0.000 |
| SPLEN2031547 | 5.633 | 0.000 |
| SPLEN2036932 | 3.497 | 0.000 |
| STOMA1000189 | 1.865 | 0.000 |
| STOMA2004925 | 14.912 | 0.000 |
| SYNOV2017055 | 20.136 | 0.000 |
| SYNOV4001395 | 21.660 | 0.000 |
| SYNOV4002346 | 7.153 | 0.000 |
| SYNOV4008440 | 1.759 | 0.000 |
| TCERX2000613 | 14.497 | 0.000 |
| TESOP2002273 | 4.841 | 0.000 |
| TESTI4000014 | 0.639 | 0.000 |
| TESTI4008797 | 14.824 | 0.000 |
| TESTI4009286 | 2.594 | 0.000 |
| TESTI4012702 | 2.600 | 0.000 |
| TESTI4013675 | 35.326 | 0.000 |
| TESTI4014159 | 13.979 | 0.000 |
| TESTI4018886 | 64.596 | 0.000 |
| TESTI4029671 | 22.183 | 0.000 |
| TESTI4037156 | 1.320 | 0.000 |
| THYMU2008725 | 15.552 | 0.000 |
| THYMU2031890 | 21.176 | 0.000 |
| THYMU2033070 | 58.853 | 0.000 |
| THYMU2035735 | 11.014 | 0.000 |
| THYMU3001472 | 20.097 | 0.000 |
| TRACH1000205 | 4.694 | 0.000 |
| TRACH2001443 | 11.083 | 0.000 |
| TRACH2001549 | 5.043 | 0.000 |
| TRACH2005811 | 1.258 | 0.000 |
| TRACH2007834 | 0.602 | 0.000 |
| TRACH2008300 | 2.025 | 0.000 |
| TRACH3002192 | 4.463 | 0.000 |
| TRACH3003379 | 29.185 | 0.000 |
| TRACH3004068 | 1.700 | 0.000 |
| TRACH3004721 | 3.467 | 0.000 |
| TRACH3007479 | 3.848 | 0.000 |
| TUTER1000122 | 0.000 | 72.738 |
| TUTER2000425 | 0.000 | 100.000 |
| TUTER2000904 | 3.330 | 62.217 |
| TUTER2000916 | 0.000 | 100.000 |
| TUTER2001387 | 0.000 | 100.000 |
| TUTER2002729 | 0.000 | 100.000 |
| UTERU1000024 | 100.000 | 0.000 |
| UTERU1000031 | 100.000 | 0.000 |
| UTERU1000148 | 100.000 | 0.000 |
| UTERU1000249 | 100.000 | 0.000 |
| UTERU1000337 | 100.000 | 0.000 |
| UTERU1000339 | 100.000 | 0.000 |
| UTERU2000649 | 100.000 | 0.000 |
| UTERU2001409 | 100.000 | 0.000 |
| UTERU2002410 | 0.700 | 13.085 |
| UTERU2002841 | 64.596 | 0.000 |
| UTERU2004688 | 6.630 | 0.000 |
| UTERU2004929 | 13.845 | 0.000 |
| UTERU2005004 | 41.697 | 0.000 |
| UTERU2005621 | 5.377 | 0.000 |
| UTERU2006115 | 9.347 | 0.000 |
| UTERU2006137 | 9.269 | 0.000 |
| UTERU2006568 | 100.000 | 0.000 |
| UTERU2007444 | 64.596 | 0.000 |
| UTERU2007520 | 15.999 | 0.000 |
| UTERU2007724 | 15.672 | 0.000 |
| UTERU2008347 | 100.000 | 0.000 |
| UTERU2014678 | 48.981 | 0.000 |
| UTERU2017762 | 39.037 | 0.000 |
| UTERU2019491 | 100.000 | 0.000 |
| UTERU2019681 | 100.000 | 0.000 |
| UTERU2019706 | 54.394 | 0.000 |
| UTERU2019940 | 51.819 | 0.000 |
| UTERU2020491 | 100.000 | 0.000 |
| UTERU2020718 | 100.000 | 0.000 |
| UTERU2021163 | 53.896 | 0.000 |
| UTERU2021380 | 100.000 | 0.000 |
| UTERU2022020 | 100.000 | 0.000 |
| UTERU2022981 | 100.000 | 0.000 |
| UTERU2023039 | 54.394 | 0.000 |
| UTERU2023175 | 7.103 | 0.000 |
| UTERU2023651 | 29.963 | 0.000 |
| UTERU2023712 | 100.000 | 0.000 |
| UTERU2024002 | 100.000 | 0.000 |
| UTERU2024656 | 51.568 | 0.000 |
| UTERU2025025 | 100.000 | 0.000 |
| UTERU2025645 | 100.000 | 0.000 |
| UTERU2025891 | 100.000 | 0.000 |
| UTERU2026025 | 100.000 | 0.000 |
| UTERU2026090 | 100.000 | 0.000 |
| UTERU2026203 | 54.394 | 0.000 |
| UTERU2027591 | 100.000 | 0.000 |
| UTERU2029953 | 100.000 | 0.000 |
| UTERU2030213 | 58.763 | 0.000 |
| UTERU2030280 | 51.819 | 0.000 |
| UTERU2031084 | 25.928 | 0.000 |
| UTERU2031268 | 100.000 | 0.000 |
| UTERU2031521 | 100.000 | 0.000 |
| UTERU2031703 | 100.000 | 0.000 |
| UTERU2031851 | 100.000 | 0.000 |
| UTERU2033375 | 1.385 | 0.000 |
| UTERU2033382 | 100.000 | 0.000 |
| UTERU2035114 | 51.568 | 0.000 |
| UTERU2035323 | 100.000 | 0.000 |
| UTERU2035328 | 100.000 | 0.000 |
| UTERU2035331 | 100.000 | 0.000 |
| UTERU2035452 | 100.000 | 0.000 |
| UTERU2035469 | 100.000 | 0.000 |
| UTERU2035503 | 100.000 | 0.000 |
| UTERU2035745 | 100.000 | 0.000 |
| UTERU2036089 | 100.000 | 0.000 |
| UTERU2037361 | 100.000 | 0.000 |
| UTERU2037577 | 100.000 | 0.000 |
| UTERU2038251 | 100.000 | 0.000 |
| UTERU3000226 | 62.692 | 0.000 |
| UTERU3000645 | 34.742 | 0.000 |
| UTERU3000665 | 100.000 | 0.000 |
| UTERU3000828 | 100.000 | 0.000 |
| UTERU3000899 | 33.654 | 0.000 |
| UTERU3001059 | 100.000 | 0.000 |
| UTERU3001240 | 100.000 | 0.000 |
| UTERU3001542 | 58.853 | 0.000 |
| UTERU3001571 | 51.819 | 0.000 |
| UTERU3001572 | 19.596 | 0.000 |
| UTERU3001585 | 100.000 | 0.000 |
| UTERU3001652 | 100.000 | 0.000 |
| UTERU3001766 | 54.206 | 0.000 |
| UTERU3001988 | 100.000 | 0.000 |
| UTERU3002209 | 100.000 | 0.000 |
| UTERU3002218 | 51.568 | 0.000 |
| UTERU3002383 | 100.000 | 0.000 |
| UTERU3002667 | 100.000 | 0.000 |
| UTERU3002731 | 100.000 | 0.000 |
| UTERU3002768 | 100.000 | 0.000 |
| UTERU3002786 | 51.568 | 0.000 |
| UTERU3002993 | 100.000 | 0.000 |
| UTERU3003116 | 100.000 | 0.000 |
| UTERU3003135 | 39.146 | 0.000 |
| UTERU3003178 | 100.000 | 0.000 |
| UTERU3003465 | 100.000 | 0.000 |
| UTERU3003523 | 100.000 | 0.000 |
| UTERU3003776 | 100.000 | 0.000 |
| UTERU3004523 | 100.000 | 0.000 |
| UTERU3004616 | 100.000 | 0.000 |
| UTERU3004709 | 51.819 | 0.000 |
| UTERU3004992 | 100.000 | 0.000 |
| UTERU3005049 | 58.853 | 0.000 |
| UTERU3005205 | 100.000 | 0.000 |
| UTERU3005230 | 58.249 | 0.000 |
| UTERU3005460 | 62.692 | 0.000 |
| UTERU3005585 | 100.000 | 0.000 |
| UTERU3005907 | 15.610 | 0.000 |
| UTERU3005970 | 62.692 | 0.000 |
| UTERU3006008 | 100.000 | 0.000 |
| UTERU3006308 | 62.692 | 0.000 |
| UTERU3007134 | 100.000 | 0.000 |
| UTERU3007419 | 62.692 | 0.000 |
| UTERU3007640 | 54.394 | 0.000 |
| UTERU3007913 | 87.049 | 0.000 |
| UTERU3008660 | 100.000 | 0.000 |
| UTERU3008671 | 100.000 | 0.000 |
| UTERU3009259 | 53.896 | 0.000 |
| UTERU3009490 | 100.000 | 0.000 |
| UTERU3009517 | 54.206 | 0.000 |
| UTERU3009690 | 100.000 | 0.000 |
| UTERU3009871 | 21.605 | 0.000 |
| UTERU3009979 | 100.000 | 0.000 |
| UTERU3011063 | 100.000 | 0.000 |
| UTERU3015086 | 100.000 | 0.000 |
| UTERU3015500 | 100.000 | 0.000 |
| UTERU3016789 | 100.000 | 0.000 |
| UTERU3018081 | 40.205 | 0.000 |
| UTERU3018154 | 100.000 | 0.000 |
| UTERU3018616 | 25.167 | 0.000 |
| UTERU3018711 | 86.466 | 0.000 |
| ADRGL2000042 | 3.029 | 0.000 |
| BRHIP3000017 | 15.777 | 0.000 |
| CTONG2003348 | 39.037 | 0.000 |
| CTONG2019822 | 7.755 | 0.000 |
| CTONG2020378 | 19.250 | 0.000 |
| CTONG2020411 | 32.844 | 0.000 |
| CTONG2024031 | 6.165 | 0.000 |
| FEBRA2028516 | 1.364 | 0.000 |
| HCASM2008536 | 15.228 | 0.000 |
| HCHON2000743 | 7.282 | 0.000 |
| IMR322001879 | 11.495 | 0.000 |
| MESAN2005303 | 9.449 | 0.000 |
| NT2RI2009583 | 0.267 | 0.000 |
| OCBBF2008144 | 3.440 | 0.000 |
| PERIC2007068 | 5.521 | 0.000 |
| SPLEN2039379 | 10.362 | 0.000 |
| TESTI2015626 | 0.784 | 7.329 |
| TESTI4013894 | 33.408 | 0.000 |
| TUTER2000057 | 0.000 | 92.461 |
| UTERU2004299 | 100.000 | 0.000 |
| UTERU2008040 | 14.037 | 0.000 |
| UTERU2011220 | 4.669 | 0.000 |
| UTERU2019534 | 100.000 | 0.000 |
| UTERU2021820 | 29.732 | 0.000 |
| UTERU2028734 | 26.183 | 0.000 |
| UTERU2032279 | 100.000 | 0.000 |
| UTERU2033577 | 100.000 | 0.000 |
| UTERU2035978 | 100.000 | 0.000 |
| UTERU3000402 | 100.000 | 0.000 |
| UTERU3000738 | 41.697 | 0.000 |
| UTERU3001053 | 100.000 | 0.000 |
| UTERU3014791 | 100.000 | 0.000 |
| UTERU3015412 | 100.000 | 0.000 |
| UTERU3017176 | 100.000 | 0.000 |

[0732] The result of comparative analysis of cDNA libraries derived from tongue cancer (CTONG) and normal tongue (NTONG) showed the following genes whose expression levels differed between the two.

TABLE 20

| Clone ID | NTONG | CTONG |
|---|---|---|
| BNGH42007788 | 0.000 | 5.734 |
| BRACE1000186 | 15.935 | 0.000 |
| BRACE2006319 | 0.000 | 6.530 |
| BRACE3010428 | 0.000 | 6.396 |
| BRACE3012364 | 0.000 | 7.922 |
| BRAMY2020058 | 0.000 | 52.028 |
| BRAMY3002803 | 0.000 | 26.873 |
| BRAWH2001671 | 0.000 | 7.082 |
| BRAWH2014645 | 0.000 | 1.969 |
| BRAWH3002574 | 0.000 | 12.314 |
| BRCAN2009432 | 0.000 | 4.905 |
| BRCAN2015371 | 0.000 | 20.417 |
| BRCAN2020710 | 0.000 | 20.242 |
| BRHIP2004814 | 0.000 | 64.609 |
| BRHIP3018797 | 0.000 | 2.495 |
| BRTHA2003461 | 0.000 | 4.088 |
| BRTHA3003490 | 11.964 | 0.000 |
| CTONG1000087 | 0.000 | 3.895 |
| CTONG1000088 | 0.000 | 5.442 |
| CTONG1000288 | 11.209 | 84.986 |
| CTONG1000302 | 0.000 | 100.000 |
| CTONG1000341 | 0.000 | 51.706 |
| CTONG1000467 | 0.000 | 16.004 |
| CTONG1000488 | 0.000 | 100.000 |
| CTONG1000508 | 0.000 | 100.000 |
| CTONG1000540 | 0.000 | 100.000 |
| CTONG2000042 | 0.000 | 65.252 |
| CTONG2001877 | 0.000 | 100.000 |
| CTONG2004062 | 0.000 | 100.000 |
| CTONG2006798 | 0.000 | 17.972 |
| CTONG2008233 | 0.000 | 8.953 |
| CTONG2009423 | 0.000 | 64.609 |
| CTONG2009531 | 0.000 | 100.000 |
| CTONG2010803 | 0.000 | 20.971 |
| CTONG2013178 | 0.000 | 35.252 |
| CTONG2017500 | 0.000 | 4.934 |
| CTONG2019248 | 0.000 | 28.179 |
| CTONG2019652 | 0.000 | 100.000 |
| CTONG2019704 | 0.000 | 62.446 |
| CTONG2019788 | 0.000 | 11.390 |
| CTONG2019833 | 0.000 | 100.000 |
| CTONG2020127 | 0.000 | 100.000 |
| CTONG2020522 | 0.000 | 42.683 |
| CTONG2020638 | 0.000 | 23.060 |
| CTONG2020806 | 0.000 | 100.000 |
| CTONG2021132 | 0.000 | 100.000 |
| CTONG2022153 | 0.000 | 100.000 |
| CTONG2022601 | 0.000 | 100.000 |
| CTONG2023021 | 0.000 | 62.680 |
| CTONG2023512 | 0.000 | 100.000 |
| CTONG2024206 | 0.000 | 100.000 |
| CTONG2024749 | 0.000 | 100.000 |
| CTONG2025496 | 0.000 | 100.000 |
| CTONG2025516 | 0.000 | 100.000 |
| CTONG2025900 | 0.000 | 100.000 |
| CTONG2026920 | 0.000 | 100.000 |
| CTONG2027327 | 0.000 | 52.760 |
| CTONG2028124 | 3.704 | 0.936 |
| CTONG2028687 | 0.000 | 100.000 |
| CTONG30000 [symbol] 4 | 0.000 | 51.585 |
| CTONG3000657 | 0.000 | 7.226 |
| CTONG3000686 | 0.000 | 100.000 |
| CTONG3000707 | 0.000 | 100.000 |
| CTONG3000896 | 0.000 | 100.000 |
| CTONG3001123 | 0.000 | 14.616 |
| CTONG3001370 | 0.000 | 65.252 |
| CTONG3001420 | 0.000 | 51.138 |
| CTONG3001560 | 0.000 | 100.000 |
| CTONG3002020 | 0.000 | 100.000 |
| CTONG3002127 | 0.000 | 62.446 |
| CTONG3002412 | 0.000 | 19.932 |
| CTONG3002674 | 0.000 | 41.611 |
| CTONG3003179 | 0.000 | 100.000 |
| CTONG3003483 | 0.000 | 100.000 |
| CTONG3003652 | 0.000 | 100.000 |
| CTONG3003654 | 0.000 | 100.000 |
| CTONG3003737 | 0.000 | 100.000 |
| CTONG3003905 | 0.000 | 36.474 |
| CTONG3003972 | 0.000 | 51.706 |
| CTONG3004072 | 0.000 | 36.356 |
| CTONG3004712 | 0.000 | 100.000 |
| CTONG3005325 | 0.000 | 100.000 |
| CTONG3005648 | 0.000 | 100.000 |
| CTONG3005713 | 0.000 | 100.000 |
| CTONG3005813 | 0.000 | 72.408 |
| CTONG3006067 | 0.000 | 74.021 |
| CTONG3006186 | 0.000 | 100.000 |
| CTONG3006650 | 0.000 | 100.000 |
| CTONG3007444 | 0.000 | 100.000 |
| CTONG3007528 | 0.000 | 100.000 |
| CTONG3007586 | 0.000 | 100.000 |
| CTONG3007870 | 0.000 | 100.000 |
| CTONG3008252 | 0.000 | 100.000 |
| CTONG3008258 | 0.000 | 100.000 |
| CTONG3008496 | 0.000 | 100.000 |
| CTONG3008566 | 0.000 | 100.000 |
| CTONG3008639 | 0.000 | 100.000 |
| CTONG3008831 | 0.000 | 100.000 |
| CTONG3008894 | 0.000 | 2.708 |
| CTONG3008951 | 0.000 | 100.000 |
| CTONG3009028 | 0.000 | 5.995 |
| CTONG3009227 | 0.000 | 100.000 |
| CTONG3009239 | 0.000 | 5.378 |
| CTONG3009328 | 0.000 | 44.674 |
| CTONG3009385 | 0.000 | 100.000 |
| FEBRA2007544 | 0.000 | 4.560 |
| FEBRA2007801 | 0.000 | 4.598 |
| FEBRA2021966 | 31.791 | 0.000 |
| FEBRA2025427 | 0.000 | 9.234 |
| HCHON2000028 | 0.000 | 2.955 |
| HCHON2001217 | 0.000 | 3.877 |
| HHDPC1000118 | 0.000 | 3.904 |
| HSYRA2008376 | 11.524 | 0.000 |
| KIDNE2001847 | 0.000 | 6.778 |
| KIDNE2002252 | 0.000 | 4.060 |
| MESAN2006563 | 0.000 | 2.572 |
| NT2RI2008724 | 0.000 | 3.421 |
| NT2RI2018883 | 0.000 | 50.616 |
| NT2RI3000622 | 63.099 | 0.000 |
| NT2RI3006284 | 0.000 | 3.854 |
| NT2RI3006673 | 0.000 | 18.588 |
| NT2RI3007543 | 6.253 | 7.901 |
| NT2RI3007757 | 0.000 | 23.555 |
| NT2RP7004123 | 0.000 | 3.574 |
| NT2RP7009147 | 0.000 | 2.967 |
| NT2RP7014005 | 0.000 | 10.836 |
| NTONG2000413 | 79.538 | 0.000 |
| NTONG2003852 | 49.507 | 0.000 |
| NTONG2005277 | 100.000 | 0.000 |
| NTONG2005969 | 23.675 | 0.000 |
| NTONG2006354 | 100.000 | 0.000 |
| NTONG2007249 | 100.000 | 0.000 |
| NTONG2007517 | 100.000 | 0.000 |
| NTONG2008088 | 75.309 | 0.000 |
| NTONG2008672 | 100.000 | 0.000 |
| OCBBF2001794 | 34.843 | 0.000 |
| OCBBF2006151 | 0.000 | 10.738 |
| PEBLM2004666 | 0.000 | 6.920 |
| PEBLM2005183 | 0.000 | 7.010 |
| SPLEN2002467 | 0.000 | 6.068 |
| SPLEN2029912 | 0.000 | 6.085 |
| SPLEN2031547 | 0.000 | 2.932 |
| SYNOV4007671 | 0.000 | 1.365 |
| SYNOV4008440 | 0.000 | 2.748 |
| TBAES2002197 | 0.000 | 28.875 |
| TESOP2002273 | 0.000 | 7.560 |
| TESTI2009474 | 0.000 | 3.763 |
| TESTI4000014 | 2.632 | 0.665 |
| TESTI4000209 | 0.000 | 4.934 |
| TESTI4008018 | 0.000 | 74.021 |
| TESTI4009286 | 0.000 | 1.350 |
| TESTI4010851 | 0.000 | 1.018 |
| TESTI4012702 | 0.000 | 4.060 |
| TESTI4013675 | 0.000 | 18.389 |
| THYMU2031847 | 0.000 | 69.076 |
| THYMU2033308 | 0.000 | 26.010 |
| TLIVE2002690 | 44.414 | 0.000 |
| TRACH2005811 | 0.000 | 3.928 |
| TRACH2007059 | 0.000 | 62.446 |
| TRACH2025535 | 0.000 | 2.163 |
| TRACH3001427 | 0.000 | 1.729 |
| TSTOM2000553 | 0.000 | 12.559 |
| UTERU2005621 | 0.000 | 8.397 |
| UTERU2017762 | 0.000 | 60.963 |
| UTERU2023175 | 0.000 | 2.773 |
| UTERU3001572 | 0.000 | 6.800 |
| BLADE2006830 | 24.778 | 0.000 |
| BRHIP3000017 | 0.000 | 8.213 |
| CTONG1000113 | 0.000 | 20.967 |
| CTONG2003348 | 0.000 | 60.963 |
| CTONG2004000 | 0.000 | 100.000 |
| CTONG2008721 | 0.000 | 62.680 |
| CTONG2015596 | 0.000 | 100.000 |
| CTONG2015633 | 0.000 | 100.000 |
| CTONG2016942 | 0.000 | 21.398 |
| CTONG2019822 | 0.000 | 12.111 |
| CTONG2020374 | 0.000 | 57.889 |
| CTONG2020378 | 0.000 | 30.063 |
| CTONG2020411 | 0.000 | 12.823 |
| CTONG2020974 | 0.000 | 74.021 |
| CTONG2024031 | 0.000 | 19.255 |
| CTONG2028758 | 0.000 | 29.955 |
| CTONG3001501 | 0.000 | 100.000 |
| CTONG3002552 | 0.000 | 100.000 |
| CTONG3003598 | 0.000 | 100.000 |
| CTONG3004550 | 0.000 | 100.000 |
| CTONG3004726 | 0.000 | 31.543 |
| CTONG3009287 | 0.000 | 100.000 |
| FEBRA2008692 | 0.000 | 13.709 |
| FEBRA2028516 | 0.000 | 4.261 |
| HCHON2000508 | 2.752 | 9.042 |
| NT2RI2009583 | 4.947 | 0.833 |
| NTONG2008093 | 100.000 | 0.000 |
| PERIC2007068 | 0.000 | 2.874 |
| TESOP2007384 | 44.382 | 37.388 |
| TLIVE2002046 | 0.000 | 3.380 |
| TRACH2000862 | 0.000 | 53.910 |

[0733] The result of comparative analysis of cDNA libraries derived from fetal brain (FCBBF, FEBRA, or OCBBF) and adult brain (BRACE, BRALZ, BRAMY, BRAWH, BRCAN, BRCOC, BRHIP, BRSSN, BRSTN, or BRTHA) showed the following genes whose expression levels differed between the two.

TABLE 21

| Clone ID | FCBBF | FEBRA | OCBBF | BRACE | BRALZ | BRAMY | BRAWH | BRCAN | BRCOC | BRHIP | BRSSN | BRSTN | BRTHA |
|---|---|---|---|---|---|---|---|---|---|---|---|---|---|
| ADRGL2009146 | 0.000 | 0.000 | 0.000 | 10.913 | 0.000 | 0.000 | 0.000 | 0.000 | 0.000 | 0.000 | 0.000 | 0.000 | 0.000 |
| ADRGL2012038 | 0.000 | 0.000 | 0.000 | 1.459 | 0.000 | 0.000 | 0.000 | 0.000 | 0.000 | 0.000 | 0.000 | 0.000 | 0.000 |
| ADRGL2012179 | 0.000 | 0.000 | 17.655 | 0.000 | 0.000 | 0.000 | 0.000 | 0.000 | 0.000 | 0.000 | 0.000 | 0.000 | 0.000 |
| ASTRO1000009 | 0.000 | 0.000 | 0.000 | 0.000 | 0.000 | 0.000 | 2.611 | 0.000 | 0.000 | 0.000 | 0.000 | 0.000 | 0.000 |
| ASTRO2003960 | 0.000 | 0.000 | 0.000 | 17.003 | 0.000 | 0.000 | 0.000 | 0.000 | 0.000 | 0.000 | 0.000 | 0.000 | 0.000 |
| ASTRO3000482 | 0.000 | 0.000 | 0.000 | 0.000 | 0.000 | 0.000 | 0.000 | 0.000 | 0.000 | 0.000 | 0.000 | 0.000 | 24.247 |
| BLADE1000176 | 0.000 | 0.000 | 0.000 | 16.822 | 0.000 | 0.000 | 0.000 | 0.000 | 0.000 | 0.000 | 0.000 | 0.000 | 0.000 |
| BLADE2001371 | 0.000 | 0.000 | 0.000 | 0.000 | 0.000 | 0.000 | 0.000 | 0.000 | 0.000 | 12.691 | 0.000 | 0.000 | 0.000 |
| BLADE2004089 | 0.000 | 0.000 | 12.311 | 7.034 | 0.000 | 0.000 | 0.000 | 0.000 | 0.000 | 0.000 | 0.000 | 0.000 | 0.000 |
| BLADE2008398 | 0.000 | 0.000 | 0.000 | 4.401 | 0.000 | 0.000 | 12.401 | 0.000 | 0.000 | 18.978 | 0.000 | 0.000 | 13.752 |
| BNGH42007788 | 5.687 | 0.000 | 0.000 | 0.000 | 0.000 | 0.000 | 0.000 | 0.000 | 0.000 | 3.141 | 0.000 | 0.000 | 0.000 |
| BRACE1000186 | 0.000 | 0.000 | 0.000 | 1.535 | 0.000 | 0.000 | 4.324 | 0.000 | 0.000 | 2.206 | 0.000 | 7.796 | 0.000 |
| BRACE1000258 | 0.000 | 0.000 | 0.000 | 68.044 | 0.000 | 0.000 | 31.956 | 0.000 | 0.000 | 0.000 | 0.000 | 0.000 | 0.000 |
| BRACE1000533 | 8.716 | 11.762 | 11.722 | 11.720 | 0.000 | 4.754 | 11.795 | 0.000 | 0.000 | 9.627 | 8.780 | 0.000 | 5.232 |
| BRACE1000572 | 0.000 | 0.000 | 0.000 | 100.000 | 0.000 | 0.000 | 0.000 | 0.000 | 0.000 | 0.000 | 0.000 | 0.000 | 0.000 |
| BRACE2003639 | 0.000 | 0.000 | 0.000 | 100.000 | 0.000 | 0.000 | 0.000 | 0.000 | 0.000 | 0.000 | 0.000 | 0.000 | 0.000 |
| BRACE2005457 | 0.000 | 0.000 | 0.000 | 41.512 | 0.000 | 0.000 | 58.488 | 0.000 | 0.000 | 0.000 | 0.000 | 0.000 | 0.000 |
| BRACE2006319 | 6.477 | 17.479 | 8.711 | 4.977 | 0.000 | 3.532 | 0.000 | 0.000 | 0.000 | 0.000 | 0.000 | 0.000 | 0.000 |
| BRACE2008594 | 0.000 | 0.000 | 0.000 | 100.000 | 0.000 | 0.000 | 0.000 | 0.000 | 0.000 | 0.000 | 0.000 | 0.000 | 0.000 |
| BRACE2010489 | 0.000 | 0.000 | 0.000 | 15.026 | 0.000 | 10.665 | 63.510 | 0.000 | 0.000 | 10.799 | 0.000 | 0.000 | 0.000 |
| BRACE2011747 | 0.000 | 0.000 | 0.000 | 100.000 | 0.000 | 0.000 | 0.000 | 0.000 | 0.000 | 0.000 | 0.000 | 0.000 | 0.000 |
| BRACE2014306 | 0.000 | 0.000 | 0.000 | 6.909 | 0.000 | 0.000 | 0.000 | 0.000 | 34.486 | 0.000 | 0.000 | 17.550 | 5.398 |
| BRACE2014475 | 0.000 | 0.000 | 0.000 | 100.000 | 0.000 | 0.000 | 0.000 | 0.000 | 0.000 | 0.000 | 0.000 | 0.000 | 0.000 |
| BRACE2014657 | 0.000 | 0.000 | 0.000 | 76.765 | 0.000 | 7.784 | 15.451 | 0.000 | 0.000 | 0.000 | 0.000 | 0.000 | 0.000 |
| BRACE2015058 | 24.301 | 0.000 | 5.447 | 6.224 | 0.000 | 8.836 | 0.000 | 0.000 | 0.000 | 8.947 | 0.000 | 0.000 | 19.449 |
| BRACE2015314 | 0.000 | 0.000 | 0.000 | 100.000 | 0.000 | 0.000 | 0.000 | 0.000 | 0.000 | 0.000 | 0.000 | 0.000 | 0.000 |
| BRACE2016981 | 0.000 | 0.000 | 0.000 | 16.089 | 0.000 | 0.000 | 0.000 | 0.000 | 0.000 | 0.000 | 0.000 | 0.000 | 0.000 |
| BRACE2018762 | 0.000 | 0.000 | 0.000 | 41.027 | 0.000 | 0.000 | 0.000 | 0.000 | 0.000 | 58.973 | 0.000 | 0.000 | 0.000 |
| BRACE2024627 | 0.000 | 0.000 | 0.000 | 8.689 | 0.000 | 0.000 | 0.000 | 0.000 | 0.000 | 0.000 | 0.000 | 0.000 | 0.000 |
| BRACE2026836 | 0.000 | 0.000 | 0.000 | 4.898 | 0.000 | 0.000 | 0.000 | 0.000 | 0.000 | 0.000 | 0.000 | 0.000 | 0.000 |
| BRACE2027258 | 0.000 | 0.000 | 41.974 | 23.981 | 0.000 | 34.044 | 0.000 | 0.000 | 0.000 | 0.000 | 0.000 | 0.000 | 0.000 |
| BRACE2027970 | 0.000 | 0.000 | 0.000 | 45.981 | 0.000 | 0.000 | 0.000 | 0.000 | 0.000 | 0.000 | 0.000 | 0.000 | 0.000 |
| BRACE2028970 | 0.000 | 0.000 | 0.000 | 100.000 | 0.000 | 0.000 | 0.000 | 0.000 | 0.000 | 0.000 | 0.000 | 0.000 | 0.000 |
| BRACE2029112 | 0.000 | 0.000 | 0.000 | 100.000 | 0.000 | 0.000 | 0.000 | 0.000 | 0.000 | 0.000 | 0.000 | 0.000 | 0.000 |
| BRACE2029849 | 0.000 | 0.000 | 0.000 | 100.000 | 0.000 | 0.000 | 0.000 | 0.000 | 0.000 | 0.000 | 0.000 | 0.000 | 0.000 |
| BRACE2030326 | 0.000 | 0.000 | 0.000 | 100.000 | 0.000 | 0.000 | 0.000 | 0.000 | 0.000 | 0.000 | 0.000 | 0.000 | 0.000 |
| BRACE2030341 | 0.000 | 17.242 | 0.000 | 4.909 | 0.000 | 6.969 | 0.000 | 0.000 | 0.000 | 7.057 | 0.000 | 0.000 | 0.000 |
| BRACE2030884 | 0.000 | 0.000 | 0.000 | 100.000 | 0.000 | 0.000 | 0.000 | 0.000 | 0.000 | 0.000 | 0.000 | 0.000 | 0.000 |
| BRACE2031154 | 0.000 | 0.000 | 0.000 | 39.025 | 0.000 | 0.000 | 0.000 | 0.000 | 0.000 | 0.000 | 0.000 | 0.000 | 60.975 |
| BRACE2031389 | 0.000 | 25.357 | 0.000 | 7.220 | 0.000 | 30.747 | 0.000 | 0.000 | 0.000 | 0.000 | 0.000 | 36.677 | 0.000 |
| BRACE2031527 | 0.000 | 0.000 | 0.000 | 100.000 | 0.000 | 0.000 | 0.000 | 0.000 | 0.000 | 0.000 | 0.000 | 0.000 | 0.000 |
| BRACE2031531 | 0.000 | 0.000 | 0.000 | 100.000 | 0.000 | 0.000 | 0.000 | 0.000 | 0.000 | 0.000 | 0.000 | 0.000 | 0.000 |
| BRACE2031899 | 0.000 | 0.000 | 0.000 | 100.000 | 0.000 | 0.000 | 0.000 | 0.000 | 0.000 | 0.000 | 0.000 | 0.000 | 0.000 |
| BRACE2032044 | 0.000 | 0.000 | 0.000 | 100.000 | 0.000 | 0.000 | 0.000 | 0.000 | 0.000 | 0.000 | 0.000 | 0.000 | 0.000 |
| BRACE2032329 | 0.000 | 0.000 | 0.000 | 100.000 | 0.000 | 0.000 | 0.000 | 0.000 | 0.000 | 0.000 | 0.000 | 0.000 | 0.000 |
| BRACE2032385 | 0.000 | 0.000 | 0.000 | 100.000 | 0.000 | 0.000 | 0.000 | 0.000 | 0.000 | 0.000 | 0.000 | 0.000 | 0.000 |
| BRACE2032538 | 0.000 | 0.000 | 0.000 | 100.000 | 0.000 | 0.000 | 0.000 | 0.000 | 0.000 | 0.000 | 0.000 | 0.000 | 0.000 |
| BRACE2032823 | 0.000 | 0.000 | 0.000 | 100.000 | 0.000 | 0.000 | 0.000 | 0.000 | 0.000 | 0.000 | 0.000 | 0.000 | 0.000 |
| BRACE2033720 | 0.000 | 0.000 | 0.000 | 100.000 | 0.000 | 0.000 | 0.000 | 0.000 | 0.000 | 0.000 | 0.000 | 0.000 | 0.000 |
| BRACE2035381 | 0.000 | 0.000 | 0.000 | 36.117 | 0.000 | 10.254 | 10.177 | 0.000 | 0.000 | 20.766 | 0.000 | 0.000 | 11.286 |
| BRACE2035441 | 0.000 | 0.000 | 0.000 | 100.000 | 0.000 | 0.000 | 0.000 | 0.000 | 0.000 | 0.000 | 0.000 | 0.000 | 0.000 |
| BRACE2036005 | 0.000 | 0.000 | 0.000 | 100.000 | 0.000 | 0.000 | 0.000 | 0.000 | 0.000 | 0.000 | 0.000 | 0.000 | 0.000 |
| BRACE2036096 | 0.000 | 0.000 | 0.000 | 100.000 | 0.000 | 0.000 | 0.000 | 0.000 | 0.000 | 0.000 | 0.000 | 0.000 | 0.000 |
| BRACE2036830 | 0.000 | 0.000 | 0.000 | 100.000 | 0.000 | 0.000 | 0.000 | 0.000 | 0.000 | 0.000 | 0.000 | 0.000 | 0.000 |
| BRACE2036834 | 0.000 | 0.000 | 0.000 | 100.000 | 0.000 | 0.000 | 0.000 | 0.000 | 0.000 | 0.000 | 0.000 | 0.000 | 0.000 |
| BRACE2037847 | 0.000 | 0.000 | 0.000 | 100.000 | 0.000 | 0.000 | 0.000 | 0.000 | 0.000 | 0.000 | 0.000 | 0.000 | 0.000 |
| BRACE2038114 | 0.000 | 0.000 | 0.000 | 100.000 | 0.000 | 0.000 | 0.000 | 0.000 | 0.000 | 0.000 | 0.000 | 0.000 | 0.000 |
| BRACE2038329 | 0.000 | 0.000 | 0.000 | 100.000 | 0.000 | 0.000 | 0.000 | 0.000 | 0.000 | 0.000 | 0.000 | 0.000 | 0.000 |
| BRACE2038551 | 0.000 | 0.000 | 0.000 | 100.000 | 0.000 | 0.000 | 0.000 | 0.000 | 0.000 | 0.000 | 0.000 | 0.000 | 0.000 |
| BRACE2039249 | 0.000 | 0.000 | 0.000 | 100.000 | 0.000 | 0.000 | 0.000 | 0.000 | 0.000 | 0.000 | 0.000 | 0.000 | 0.000 |
| BRACE2039327 | 0.000 | 0.000 | 0.000 | 100.000 | 0.000 | 0.000 | 0.000 | 0.000 | 0.000 | 0.000 | 0.000 | 0.000 | 0.000 |
| BRACE2039475 | 0.000 | 0.000 | 0.000 | 100.000 | 0.000 | 0.000 | 0.000 | 0.000 | 0.000 | 0.000 | 0.000 | 0.000 | 0.000 |
| BRACE2039734 | 0.000 | 0.000 | 0.000 | 100.000 | 0.000 | 0.000 | 0.000 | 0.000 | 0.000 | 0.000 | 0.000 | 0.000 | 0.000 |
| BRACE2040138 | 0.000 | 0.000 | 0.000 | 100.000 | 0.000 | 0.000 | 0.000 | 0.000 | 0.000 | 0.000 | 0.000 | 0.000 | 0.000 |
| BRACE2040325 | 0.000 | 0.000 | 0.000 | 100.000 | 0.000 | 0.000 | 0.000 | 0.000 | 0.000 | 0.000 | 0.000 | 0.000 | 0.000 |
| BRACE2041009 | 0.000 | 0.000 | 0.000 | 100.000 | 0.000 | 0.000 | 0.000 | 0.000 | 0.000 | 0.000 | 0.000 | 0.000 | 0.000 |
| BRACE2041200 | 0.000 | 0.000 | 0.000 | 38.787 | 0.000 | 0.000 | 0.000 | 0.000 | 0.000 | 0.000 | 0.000 | 0.000 | 0.000 |
| BRACE2041264 | 0.000 | 0.000 | 0.000 | 100.000 | 0.000 | 0.000 | 0.000 | 0.000 | 0.000 | 0.000 | 0.000 | 0.000 | 0.000 |
| BRACE2042550 | 0.000 | 0.000 | 0.000 | 100.000 | 0.000 | 0.000 | 0.000 | 0.000 | 0.000 | 0.000 | 0.000 | 0.000 | 0.000 |
| BRACE2043142 | 0.000 | 0.000 | 0.000 | 52.057 | 0.000 | 0.000 | 0.000 | 0.000 | 0.000 | 0.000 | 0.000 | 0.000 | 0.000 |
| BRACE2043248 | 0.000 | 0.000 | 0.000 | 100.000 | 0.000 | 0.000 | 0.000 | 0.000 | 0.000 | 0.000 | 0.000 | 0.000 | 0.000 |
| BRACE2043349 | 0.000 | 0.000 | 0.000 | 100.000 | 0.000 | 0.000 | 0.000 | 0.000 | 0.000 | 0.000 | 0.000 | 0.000 | 0.000 |
| BRACE2043665 | 0.000 | 0.000 | 0.000 | 16.915 | 0.000 | 0.000 | 0.000 | 0.000 | 0.000 | 0.000 | 0.000 | 0.000 | 0.000 |
| BRACE2044286 | 0.000 | 0.000 | 0.000 | 26.499 | 0.000 | 0.000 | 18.667 | 0.000 | 0.000 | 0.000 | 0.000 | 0.000 | 0.000 |
| BRACE2044816 | 0.000 | 0.000 | 0.000 | 100.000 | 0.000 | 0.000 | 0.000 | 0.000 | 0.000 | 0.000 | 0.000 | 0.000 | 0.000 |
| BRACE2044949 | 0.000 | 0.000 | 0.000 | 2.766 | 0.000 | 0.000 | 0.000 | 0.000 | 0.000 | 0.000 | 0.000 | 0.000 | 0.000 |
| BRACE2045300 | 0.000 | 0.000 | 0.000 | 100.000 | 0.000 | 0.000 | 0.000 | 0.000 | 0.000 | 0.000 | 0.000 | 0.000 | 0.000 |
| BRACE2045428 | 0.000 | 0.000 | 0.000 | 100.000 | 0.000 | 0.000 | 0.000 | 0.000 | 0.000 | 0.000 | 0.000 | 0.000 | 0.000 |
| BRACE2045596 | 0.000 | 0.000 | 0.000 | 100.000 | 0.000 | 0.000 | 0.000 | 0.000 | 0.000 | 0.000 | 0.000 | 0.000 | 0.000 |
| BRACE2045772 | 0.000 | 0.000 | 0.000 | 2.055 | 0.000 | 0.000 | 0.000 | 0.000 | 0.000 | 0.000 | 0.000 | 0.000 | 0.000 |
| BRACE2045947 | 0.000 | 0.000 | 0.000 | 100.000 | 0.000 | 0.000 | 0.000 | 0.000 | 0.000 | 0.000 | 0.000 | 0.000 | 0.000 |
| BRACE2045954 | 0.000 | 0.000 | 33.925 | 38.766 | 0.000 | 0.000 | 27.309 | 0.000 | 0.000 | 0.000 | 0.000 | 0.000 | 0.000 |
| BRACE2046251 | 0.000 | 0.000 | 0.000 | 100.000 | 0.000 | 0.000 | 0.000 | 0.000 | 0.000 | 0.000 | 0.000 | 0.000 | 0.000 |
| BRACE2046295 | 0.000 | 0.000 | 0.000 | 100.000 | 0.000 | 0.000 | 0.000 | 0.000 | 0.000 | 0.000 | 0.000 | 0.000 | 0.000 |
| BRACE2047011 | 0.000 | 0.000 | 0.000 | 100.000 | 0.000 | 0.000 | 0.000 | 0.000 | 0.000 | 0.000 | 0.000 | 0.000 | 0.000 |
| BRACE2047350 | 0.000 | 0.000 | 0.000 | 45.981 | 0.000 | 0.000 | 0.000 | 0.000 | 0.000 | 0.000 | 0.000 | 0.000 | 0.000 |
| BRACE2047377 | 0.000 | 0.000 | 0.000 | 100.000 | 0.000 | 0.000 | 0.000 | 0.000 | 0.000 | 0.000 | 0.000 | 0.000 | 0.000 |
| BRACE2047385 | 0.000 | 0.000 | 0.000 | 100.000 | 0.000 | 0.000 | 0.000 | 0.000 | 0.000 | 0.000 | 0.000 | 0.000 | 0.000 |
| BRACE3000071 | 0.000 | 0.000 | 0.000 | 9.532 | 0.000 | 0.000 | 0.000 | 0.000 | 0.000 | 0.000 | 0.000 | 0.000 | 0.000 |
| BRACE3000697 | 0.000 | 0.000 | 0.000 | 100.000 | 0.000 | 0.000 | 0.000 | 0.000 | 0.000 | 0.000 | 0.000 | 0.000 | 0.000 |
| BRACE3000787 | 0.000 | 0.000 | 0.000 | 15.541 | 0.000 | 0.000 | 32.844 | 0.000 | 0.000 | 0.000 | 0.000 | 39.475 | 12.141 |
| BRACE3000840 | 0.000 | 0.000 | 0.000 | 100.000 | 0.000 | 0.000 | 0.000 | 0.000 | 0.000 | 0.000 | 0.000 | 0.000 | 0.000 |
| BRACE3000973 | 0.000 | 0.000 | 0.000 | 28.699 | 0.000 | 13.581 | 0.000 | 0.000 | 0.000 | 0.000 | 0.000 | 0.000 | 0.000 |
| BRACE3001002 | 0.000 | 0.000 | 0.000 | 100.000 | 0.000 | 0.000 | 0.000 | 0.000 | 0.000 | 0.000 | 0.000 | 0.000 | 0.000 |
| BRACE3001217 | 0.000 | 0.000 | 0.000 | 100.000 | 0.000 | 0.000 | 0.000 | 0.000 | 0.000 | 0.000 | 0.000 | 0.000 | 0.000 |
| BRACE3001391 | 0.000 | 0.000 | 0.000 | 100.000 | 0.000 | 0.000 | 0.000 | 0.000 | 0.000 | 0.000 | 0.000 | 0.000 | 0.000 |
| BRACE3001595 | 0.000 | 0.000 | 0.000 | 100.000 | 0.000 | 0.000 | 0.000 | 0.000 | 0.000 | 0.000 | 0.000 | 0.000 | 0.000 |
| BRACE3001754 | 0.000 | 0.000 | 0.000 | 38.787 | 0.000 | 0.000 | 0.000 | 0.000 | 0.000 | 0.000 | 0.000 | 0.000 | 0.000 |
| BRACE3002298 | 0.000 | 0.000 | 0.000 | 100.000 | 0.000 | 0.000 | 0.000 | 0.000 | 0.000 | 0.000 | 0.000 | 0.000 | 0.000 |
| BRACE3002390 | 0.000 | 0.000 | 0.000 | 100.000 | 0.000 | 0.000 | 0.000 | 0.000 | 0.000 | 0.000 | 0.000 | 0.000 | 0.000 |
| BRACE3002508 | 0.000 | 0.000 | 0.000 | 100.000 | 0.000 | 0.000 | 0.000 | 0.000 | 0.000 | 0.000 | 0.000 | 0.000 | 0.000 |
| BRACE3003004 | 0.000 | 0.000 | 0.000 | 100.000 | 0.000 | 0.000 | 0.000 | 0.000 | 0.000 | 0.000 | 0.000 | 0.000 | 0.000 |
| BRACE3003192 | 0.000 | 0.000 | 0.000 | 41.512 | 0.000 | 0.000 | 58.488 | 0.000 | 0.000 | 0.000 | 0.000 | 0.000 | 0.000 |
| BRACE3003595 | 0.000 | 0.000 | 0.000 | 100.000 | 0.000 | 0.000 | 0.000 | 0.000 | 0.000 | 0.000 | 0.000 | 0.000 | 0.000 |
| BRACE3003698 | 0.000 | 0.000 | 0.000 | 45.981 | 0.000 | 0.000 | 0.000 | 0.000 | 0.000 | 0.000 | 0.000 | 0.000 | 0.000 |
| BRACE3004058 | 0.000 | 0.000 | 0.000 | 100.000 | 0.000 | 0.000 | 0.000 | 0.000 | 0.000 | 0.000 | 0.000 | 0.000 | 0.000 |
| BRACE3004113 | 0.000 | 0.000 | 0.000 | 100.000 | 0.000 | 0.000 | 0.000 | 0.000 | 0.000 | 0.000 | 0.000 | 0.000 | 0.000 |
| BRACE3004150 | 7.175 | 0.000 | 0.000 | 2.757 | 0.000 | 0.000 | 0.000 | 0.000 | 0.000 | 0.000 | 0.000 | 0.000 | 0.000 |
| BRACE3004358 | 0.000 | 0.000 | 0.000 | 100.000 | 0.000 | 0.000 | 0.000 | 0.000 | 0.000 | 0.000 | 0.000 | 0.000 | 0.000 |
| BRACE3004435 | 0.000 | 0.000 | 0.000 | 100.000 | 0.000 | 0.000 | 0.000 | 0.000 | 0.000 | 0.000 | 0.000 | 0.000 | 0.000 |
| BRACE3004772 | 0.000 | 0.000 | 0.000 | 100.000 | 0.000 | 0.000 | 0.000 | 0.000 | 0.000 | 0.000 | 0.000 | 0.000 | 0.000 |
| BRACE3004783 | 0.000 | 0.000 | 0.000 | 100.000 | 0.000 | 0.000 | 0.000 | 0.000 | 0.000 | 0.000 | 0.000 | 0.000 | 0.000 |
| BRACE3004843 | 0.000 | 0.000 | 0.000 | 22.581 | 0.000 | 0.000 | 0.000 | 0.000 | 0.000 | 0.000 | 0.000 | 0.000 | 0.000 |
| BRACE3004880 | 0.000 | 0.000 | 0.000 | 100.000 | 0.000 | 0.000 | 0.000 | 0.000 | 0.000 | 0.000 | 0.000 | 0.000 | 0.000 |
| BRACE3005145 | 0.000 | 0.000 | 0.000 | 100.000 | 0.000 | 0.000 | 0.000 | 0.000 | 0.000 | 0.000 | 0.000 | 0.000 | 0.000 |
| BRACE3005225 | 0.000 | 0.000 | 0.000 | 100.000 | 0.000 | 0.000 | 0.000 | 0.000 | 0.000 | 0.000 | 0.000 | 0.000 | 0.000 |
| BRACE3005430 | 0.000 | 0.000 | 0.000 | 100.000 | 0.000 | 0.000 | 0.000 | 0.000 | 0.000 | 0.000 | 0.000 | 0.000 | 0.000 |
| BRACE3005499 | 0.000 | 0.000 | 0.000 | 22.199 | 0.000 | 0.000 | 31.276 | 0.000 | 0.000 | 0.000 | 0.000 | 0.000 | 0.000 |
| BRACE3006185 | 0.000 | 0.000 | 0.000 | 100.000 | 0.000 | 0.000 | 0.000 | 0.000 | 0.000 | 0.000 | 0.000 | 0.000 | 0.000 |
| BRACE3006226 | 0.000 | 0.000 | 0.000 | 100.000 | 0.000 | 0.000 | 0.000 | 0.000 | 0.000 | 0.000 | 0.000 | 0.000 | 0.000 |
| BRACE3006462 | 0.000 | 0.000 | 0.000 | 100.000 | 0.000 | 0.000 | 0.000 | 0.000 | 0.000 | 0.000 | 0.000 | 0.000 | 0.000 |
| BRACE3006872 | 0.000 | 0.000 | 0.000 | 100.000 | 0.000 | 0.000 | 0.000 | 0.000 | 0.000 | 0.000 | 0.000 | 0.000 | 0.000 |
| BRACE3007322 | 0.000 | 0.000 | 0.000 | 100.000 | 0.000 | 0.000 | 0.000 | 0.000 | 0.000 | 0.000 | 0.000 | 0.000 | 0.000 |
| BRACE3007472 | 0.000 | 0.000 | 0.000 | 100.000 | 0.000 | 0.000 | 0.000 | 0.000 | 0.000 | 0.000 | 0.000 | 0.000 | 0.000 |
| BRACE3007480 | 0.000 | 0.000 | 0.000 | 13.820 | 0.000 | 6.540 | 19.471 | 0.000 | 0.000 | 52.973 | 0.000 | 0.000 | 7.197 |
| BRACE3007559 | 0.000 | 0.000 | 0.000 | 100.000 | 0.000 | 0.000 | 0.000 | 0.000 | 0.000 | 0.000 | 0.000 | 0.000 | 0.000 |
| BRACE3007625 | 0.000 | 0.000 | 0.000 | 100.000 | 0.000 | 0.000 | 0.000 | 0.000 | 0.000 | 0.000 | 0.000 | 0.000 | 0.000 |
| BRACE3007642 | 0.000 | 0.000 | 0.000 | 100.000 | 0.000 | 0.000 | 0.000 | 0.000 | 0.000 | 0.000 | 0.000 | 0.000 | 0.000 |
| BRACE3007767 | 0.000 | 0.000 | 0.000 | 100.000 | 0.000 | 0.000 | 0.000 | 0.000 | 0.000 | 0.000 | 0.000 | 0.000 | 0.000 |
| BRACE3008036 | 0.000 | 0.000 | 0.000 | 13.098 | 0.000 | 18.594 | 0.000 | 0.000 | 0.000 | 0.000 | 0.000 | 0.000 | 0.000 |
| BRACE3008092 | 0.000 | 0.000 | 0.000 | 100.000 | 0.000 | 0.000 | 0.000 | 0.000 | 0.000 | 0.000 | 0.000 | 0.000 | 0.000 |
| BRACE3008137 | 0.000 | 0.000 | 0.000 | 100.000 | 0.000 | 0.000 | 0.000 | 0.000 | 0.000 | 0.000 | 0.000 | 0.000 | 0.000 |
| BRACE3008384 | 0.000 | 0.000 | 0.000 | 56.141 | 0.000 | 0.000 | 0.000 | 0.000 | 0.000 | 0.000 | 0.000 | 0.000 | 43.859 |
| BRACE3008720 | 0.000 | 0.000 | 0.000 | 100.000 | 0.000 | 0.000 | 0.000 | 0.000 | 0.000 | 0.000 | 0.000 | 0.000 | 0.000 |
| BRACE3008772 | 0.000 | 0.000 | 0.000 | 37.308 | 0.000 | 0.000 | 0.000 | 0.000 | 0.000 | 0.000 | 0.000 | 0.000 | 0.000 |
| BRACE3009090 | 0.000 | 0.000 | 0.000 | 100.000 | 0.000 | 0.000 | 0.000 | 0.000 | 0.000 | 0.000 | 0.000 | 0.000 | 0.000 |
| BRACE3009237 | 0.000 | 0.000 | 0.000 | 12.875 | 0.000 | 0.000 | 18.139 | 0.000 | 0.000 | 37.013 | 0.000 | 0.000 | 20.116 |
| BRACE3009297 | 0.000 | 0.000 | 0.000 | 100.000 | 0.000 | 0.000 | 0.000 | 0.000 | 0.000 | 0.000 | 0.000 | 0.000 | 0.000 |
| BRACE3009377 | 0.000 | 0.000 | 0.000 | 100.000 | 0.000 | 0.000 | 0.000 | 0.000 | 0.000 | 0.000 | 0.000 | 0.000 | 0.000 |
| BRACE3009574 | 0.000 | 0.000 | 0.000 | 100.000 | 0.000 | 0.000 | 0.000 | 0.000 | 0.000 | 0.000 | 0.000 | 0.000 | 0.000 |
| BRACE3009701 | 0.000 | 0.000 | 0.000 | 100.000 | 0.000 | 0.000 | 0.000 | 0.000 | 0.000 | 0.000 | 0.000 | 0.000 | 0.000 |
| BRACE3009708 | 0.000 | 0.000 | 0.000 | 100.000 | 0.000 | 0.000 | 0.000 | 0.000 | 0.000 | 0.000 | 0.000 | 0.000 | 0.000 |
| BRACE3009724 | 0.000 | 0.000 | 0.000 | 41.512 | 0.000 | 0.000 | 58.488 | 0.000 | 0.000 | 0.000 | 0.000 | 0.000 | 0.000 |
| BRACE3009747 | 4.133 | 0.000 | 2.779 | 1.588 | 0.000 | 0.000 | 2.237 | 0.000 | 0.000 | 2.283 | 8.327 | 0.000 | 2.481 |
| BRACE3010397 | 0.000 | 0.000 | 0.000 | 24.243 | 0.000 | 0.000 | 0.000 | 0.000 | 0.000 | 0.000 | 0.000 | 0.000 | 75.757 |
| BRACE3010428 | 6.344 | 2.854 | 4.266 | 3.250 | 0.000 | 3.460 | 6.868 | 0.000 | 0.000 | 2.336 | 4.261 | 0.000 | 2.539 |
| BRACE3011271 | 0.000 | 0.000 | 27.420 | 39.165 | 0.000 | 11.120 | 11.036 | 0.000 | 0.000 | 11.259 | 0.000 | 0.000 | 0.000 |
| BRACE3011421 | 0.000 | 0.000 | 0.000 | 40.103 | 0.000 | 0.000 | 28.251 | 0.000 | 0.000 | 0.000 | 0.000 | 0.000 | 0.000 |
| BRACE3011505 | 0.000 | 0.000 | 0.000 | 100.000 | 0.000 | 0.000 | 0.000 | 0.000 | 0.000 | 0.000 | 0.000 | 0.000 | 0.000 |
| BRACE3012364 | 0.000 | 10.603 | 0.000 | 6.038 | 0.000 | 0.000 | 8.506 | 0.000 | 15.067 | 4.339 | 0.000 | 0.000 | 9.433 |
| BRACE3012930 | 0.000 | 0.000 | 0.000 | 38.787 | 0.000 | 0.000 | 0.000 | 0.000 | 0.000 | 0.000 | 0.000 | 0.000 | 0.000 |
| BRACE3013119 | 0.000 | 0.000 | 0.000 | 100.000 | 0.000 | 0.000 | 0.000 | 0.000 | 0.000 | 0.000 | 0.000 | 0.000 | 0.000 |
| BRACE3013576 | 0.000 | 0.000 | 0.000 | 100.000 | 0.000 | 0.000 | 0.000 | 0.000 | 0.000 | 0.000 | 0.000 | 0.000 | 0.000 |
| BRACE3013740 | 0.000 | 0.000 | 0.000 | 100.000 | 0.000 | 0.000 | 0.000 | 0.000 | 0.000 | 0.000 | 0.000 | 0.000 | 0.000 |
| BRACE3013780 | 0.000 | 11.957 | 5.958 | 3.404 | 0.000 | 4.833 | 0.000 | 0.000 | 0.000 | 0.000 | 17.852 | 0.000 | 0.000 |
| BRACE3014005 | 0.000 | 0.000 | 0.000 | 100.000 | 0.000 | 0.000 | 0.000 | 0.000 | 0.000 | 0.000 | 0.000 | 0.000 | 0.000 |
| BRACE3014068 | 0.000 | 0.000 | 0.000 | 100.000 | 0.000 | 0.000 | 0.000 | 0.000 | 0.000 | 0.000 | 0.000 | 0.000 | 0.000 |
| BRACE3014231 | 0.000 | 0.000 | 0.000 | 100.000 | 0.000 | 0.000 | 0.000 | 0.000 | 0.000 | 0.000 | 0.000 | 0.000 | 0.000 |
| BRACE3014317 | 0.000 | 0.000 | 0.000 | 100.000 | 0.000 | 0.000 | 0.000 | 0.000 | 0.000 | 0.000 | 0.000 | 0.000 | 0.000 |
| BRACE3014807 | 0.000 | 0.000 | 0.000 | 100.000 | 0.000 | 0.000 | 0.000 | 0.000 | 0.000 | 0.000 | 0.000 | 0.000 | 0.000 |
| BRACE3015027 | 4.794 | 0.000 | 6.448 | 9.209 | 0.000 | 0.000 | 0.000 | 0.000 | 0.000 | 0.000 | 0.000 | 0.000 | 0.000 |
| BRACE3015121 | 0.000 | 0.000 | 0.000 | 100.000 | 0.000 | 0.000 | 0.000 | 0.000 | 0.000 | 0.000 | 0.000 | 0.000 | 0.000 |
| BRACE3015262 | 0.000 | 0.000 | 0.000 | 100.000 | 0.000 | 0.000 | 0.000 | 0.000 | 0.000 | 0.000 | 0.000 | 0.000 | 0.000 |
| BRACE3015521 | 0.000 | 0.000 | 0.000 | 100.000 | 0.000 | 0.000 | 0.000 | 0.000 | 0.000 | 0.000 | 0.000 | 0.000 | 0.000 |
| BRACE3015894 | 0.000 | 0.000 | 0.000 | 100.000 | 0.000 | 0.000 | 0.000 | 0.000 | 0.000 | 0.000 | 0.000 | 0.000 | 0.000 |
| BRACE3016884 | 0.000 | 0.000 | 0.000 | 9.165 | 0.000 | 0.000 | 0.000 | 0.000 | 0.000 | 0.000 | 0.000 | 0.000 | 0.000 |
| BRACE3018308 | 0.000 | 0.000 | 0.000 | 100.000 | 0.000 | 0.000 | 0.000 | 0.000 | 0.000 | 0.000 | 0.000 | 0.000 | 0.000 |
| BRACE3018963 | 0.000 | 0.000 | 0.000 | 41.027 | 0.000 | 0.000 | 0.000 | 0.000 | 0.000 | 58.973 | 0.000 | 0.000 | 0.000 |
| BRACE3019055 | 0.000 | 0.000 | 0.000 | 100.000 | 0.000 | 0.000 | 0.000 | 0.000 | 0.000 | 0.000 | 0.000 | 0.000 | 0.000 |
| BRACE3019084 | 0.000 | 0.000 | 0.000 | 100.000 | 0.000 | 0.000 | 0.000 | 0.000 | 0.000 | 0.000 | 0.000 | 0.000 | 0.000 |
| BRACE3020194 | 0.000 | 0.000 | 0.000 | 100.000 | 0.000 | 0.000 | 0.000 | 0.000 | 0.000 | 0.000 | 0.000 | 0.000 | 0.000 |
| BRACE3020286 | 0.000 | 0.000 | 0.000 | 100.000 | 0.000 | 0.000 | 0.000 | 0.000 | 0.000 | 0.000 | 0.000 | 0.000 | 0.000 |
| BRACE3020594 | 0.000 | 0.000 | 0.000 | 100.000 | 0.000 | 0.000 | 0.000 | 0.000 | 0.000 | 0.000 | 0.000 | 0.000 | 0.000 |
| BRACE3022769 | 2.639 | 24.924 | 10.646 | 9.124 | 0.000 | 4.318 | 4.285 | 3.277 | 0.000 | 4.372 | 5.316 | 0.000 | 4.752 |
| BRACE3023912 | 0.000 | 0.000 | 0.000 | 100.000 | 0.000 | 0.000 | 0.000 | 0.000 | 0.000 | 0.000 | 0.000 | 0.000 | 0.000 |
| BRACE3024073 | 0.000 | 0.000 | 0.000 | 100.000 | 0.000 | 0.000 | 0.000 | 0.000 | 0.000 | 0.000 | 0.000 | 0.000 | 0.000 |
| BRACE3024659 | 0.000 | 0.000 | 0.000 | 100.000 | 0.000 | 0.000 | 0.000 | 0.000 | 0.000 | 0.000 | 0.000 | 0.000 | 0.000 |
| BRACE3024662 | 0.000 | 0.000 | 0.000 | 100.000 | 0.000 | 0.000 | 0.000 | 0.000 | 0.000 | 0.000 | 0.000 | 0.000 | 0.000 |
| BRACE3025153 | 0.000 | 0.000 | 0.000 | 100.000 | 0.000 | 0.000 | 0.000 | 0.000 | 0.000 | 0.000 | 0.000 | 0.000 | 0.000 |
| BRACE3025457 | 0.000 | 0.000 | 0.000 | 100.000 | 0.000 | 0.000 | 0.000 | 0.000 | 0.000 | 0.000 | 0.000 | 0.000 | 0.000 |
| BRACE3025531 | 0.000 | 0.000 | 0.000 | 100.000 | 0.000 | 0.000 | 0.000 | 0.000 | 0.000 | 0.000 | 0.000 | 0.000 | 0.000 |
| BRACE3025630 | 0.000 | 0.000 | 0.000 | 100.000 | 0.000 | 0.000 | 0.000 | 0.000 | 0.000 | 0.000 | 0.000 | 0.000 | 0.000 |
| BRACE3026008 | 0.000 | 0.000 | 0.000 | 100.000 | 0.000 | 0.000 | 0.000 | 0.000 | 0.000 | 0.000 | 0.000 | 0.000 | 0.000 |
| BRACE3026075 | 0.000 | 0.000 | 0.000 | 100.000 | 0.000 | 0.000 | 0.000 | 0.000 | 0.000 | 0.000 | 0.000 | 0.000 | 0.000 |
| BRACE3026735 | 0.000 | 0.000 | 0.000 | 51.471 | 0.000 | 24.356 | 24.173 | 0.000 | 0.000 | 0.000 | 0.000 | 0.000 | 0.000 |
| BRACE3027242 | 0.000 | 0.000 | 0.000 | 100.000 | 0.000 | 0.000 | 0.000 | 0.000 | 0.000 | 0.000 | 0.000 | 0.000 | 0.000 |
| BRACE3027326 | 0.000 | 0.000 | 0.000 | 100.000 | 0.000 | 0.000 | 0.000 | 0.000 | 0.000 | 0.000 | 0.000 | 0.000 | 0.000 |
| BRACE3027478 | 0.000 | 0.000 | 0.000 | 11.360 | 0.000 | 16.126 | 0.000 | 0.000 | 0.000 | 0.000 | 0.000 | 0.000 | 35.497 |
| BRACE3030103 | 0.000 | 0.000 | 0.000 | 100.000 | 0.000 | 0.000 | 0.000 | 0.000 | 0.000 | 0.000 | 0.000 | 0.000 | 0.000 |
| BRACE3031838 | 0.000 | 0.000 | 0.000 | 41.512 | 0.000 | 0.000 | 58.488 | 0.000 | 0.000 | 0.000 | 0.000 | 0.000 | 0.000 |
| BRACE3032983 | 0.000 | 0.000 | 0.000 | 100.000 | 0.000 | 0.000 | 0.000 | 0.000 | 0.000 | 0.000 | 0.000 | 0.000 | 0.000 |
| BRACE3040856 | 0.000 | 0.000 | 0.000 | 100.000 | 0.000 | 0.000 | 0.000 | 0.000 | 0.000 | 0.000 | 0.000 | 0.000 | 0.000 |
| BRACE3045033 | 0.000 | 0.000 | 0.000 | 100.000 | 0.000 | 0.000 | 0.000 | 0.000 | 0.000 | 0.000 | 0.000 | 0.000 | 0.000 |
| BRALZ2011796 | 0.000 | 0.000 | 0.000 | 3.912 | 39.830 | 0.000 | 5.511 | 0.000 | 19.525 | 0.000 | 20.514 | 0.000 | 6.112 |
| BRALZ2012183 | 0.000 | 0.000 | 0.000 | 0.000 | 100.000 | 0.000 | 0.000 | 0.000 | 0.000 | 0.000 | 0.000 | 0.000 | 0.000 |
| BRALZ2012848 | 0.000 | 0.000 | 0.000 | 0.000 | 100.000 | 0.000 | 0.000 | 0.000 | 0.000 | 0.000 | 0.000 | 0.000 | 0.000 |
| BRALZ2014484 | 0.000 | 0.000 | 0.000 | 0.000 | 100.000 | 0.000 | 0.000 | 0.000 | 0.000 | 0.000 | 0.000 | 0.000 | 0.000 |
| BRALZ2016085 | 0.000 | 0.000 | 0.000 | 0.000 | 100.000 | 0.000 | 0.000 | 0.000 | 0.000 | 0.000 | 0.000 | 0.000 | 0.000 |
| BRALZ2016498 | 0.000 | 0.000 | 0.000 | 0.000 | 100.000 | 0.000 | 0.000 | 0.000 | 0.000 | 0.000 | 0.000 | 0.000 | 0.000 |
| BRALZ2017359 | 0.000 | 0.000 | 0.000 | 0.000 | 75.184 | 0.000 | 0.000 | 0.000 | 0.000 | 0.000 | 0.000 | 0.000 | 0.000 |
| BRAMY2001473 | 0.000 | 0.000 | 0.000 | 0.000 | 0.000 | 100.000 | 0.000 | 0.000 | 0.000 | 0.000 | 0.000 | 0.000 | 0.000 |
| BRAMY2003008 | 0.000 | 0.000 | 0.000 | 0.000 | 0.000 | 26.646 | 26.445 | 0.000 | 0.000 | 0.000 | 0.000 | 0.000 | 0.000 |
| BRAMY2004771 | 0.000 | 0.000 | 0.000 | 0.000 | 0.000 | 100.000 | 0.000 | 0.000 | 0.000 | 0.000 | 0.000 | 0.000 | 0.000 |
| BRAMY2005052 | 0.000 | 0.000 | 0.000 | 8.242 | 0.000 | 46.801 | 11.612 | 0.000 | 0.000 | 0.000 | 0.000 | 0.000 | 25.755 |
| BRAMY2017528 | 0.000 | 0.000 | 0.000 | 0.000 | 0.000 | 100.000 | 0.000 | 0.000 | 0.000 | 0.000 | 0.000 | 0.000 | 0.000 |
| BRAMY2019300 | 0.000 | 0.000 | 0.000 | 0.000 | 0.000 | 50.189 | 49.811 | 0.000 | 0.000 | 0.000 | 0.000 | 0.000 | 0.000 |
| BRAMY2019963 | 0.000 | 0.000 | 25.378 | 0.000 | 0.000 | 6.861 | 20.428 | 0.000 | 0.000 | 6.947 | 0.000 | 0.000 | 7.551 |
| BRAMY2019985 | 0.000 | 0.000 | 0.000 | 0.000 | 0.000 | 100.000 | 0.000 | 0.000 | 0.000 | 0.000 | 0.000 | 0.000 | 0.000 |
| BRAMY2020058 | 0.000 | 0.000 | 0.000 | 19.826 | 0.000 | 28.146 | 0.000 | 0.000 | 0.000 | 0.000 | 0.000 | 0.000 | 0.000 |
| BRAMY2020270 | 0.000 | 0.000 | 0.000 | 0.000 | 0.000 | 100.000 | 0.000 | 0.000 | 0.000 | 0.000 | 0.000 | 0.000 | 0.000 |
| BRAMY2021498 | 0.000 | 0.000 | 0.000 | 0.000 | 0.000 | 100.000 | 0.000 | 0.000 | 0.000 | 0.000 | 0.000 | 0.000 | 0.000 |
| BRAMY2028856 | 0.000 | 0.000 | 0.000 | 0.000 | 0.000 | 100.000 | 0.000 | 0.000 | 0.000 | 0.000 | 0.000 | 0.000 | 0.000 |
| BRAMY2028914 | 0.000 | 0.000 | 0.000 | 0.000 | 0.000 | 17.849 | 0.000 | 0.000 | 0.000 | 0.000 | 0.000 | 0.000 | 19.645 |
| BRAMY2029602 | 0.000 | 0.000 | 0.000 | 0.000 | 0.000 | 100.000 | 0.000 | 0.000 | 0.000 | 0.000 | 0.000 | 0.000 | 0.000 |
| BRAMY2030098 | 0.000 | 0.000 | 0.000 | 29.935 | 0.000 | 42.496 | 0.000 | 0.000 | 0.000 | 0.000 | 0.000 | 0.000 | 0.000 |
| BRAMY2030109 | 0.000 | 0.000 | 0.000 | 0.000 | 0.000 | 100.000 | 0.000 | 0.000 | 0.000 | 0.000 | 0.000 | 0.000 | 0.000 |
| BRAMY2030702 | 0.000 | 0.000 | 0.000 | 0.000 | 0.000 | 100.000 | 0.000 | 0.000 | 0.000 | 0.000 | 0.000 | 0.000 | 0.000 |
| BRAMY2030703 | 0.000 | 0.000 | 0.000 | 0.000 | 0.000 | 100.000 | 0.000 | 0.000 | 0.000 | 0.000 | 0.000 | 0.000 | 0.000 |
| BRAMY2030799 | 0.000 | 0.000 | 0.000 | 0.000 | 0.000 | 100.000 | 0.000 | 0.000 | 0.000 | 0.000 | 0.000 | 0.000 | 0.000 |
| BRAMY2031317 | 0.000 | 0.000 | 0.000 | 33.400 | 0.000 | 15.805 | 0.000 | 0.000 | 0.000 | 16.004 | 0.000 | 0.000 | 34.791 |
| BRAMY2031377 | 0.000 | 0.000 | 0.000 | 0.000 | 0.000 | 100.000 | 0.000 | 0.000 | 0.000 | 0.000 | 0.000 | 0.000 | 0.000 |
| BRAMY2031442 | 0.000 | 0.000 | 0.000 | 0.000 | 0.000 | 100.000 | 0.000 | 0.000 | 0.000 | 0.000 | 0.000 | 0.000 | 0.000 |
| BRAMY2032014 | 0.000 | 0.000 | 0.000 | 0.000 | 0.000 | 100.000 | 0.000 | 0.000 | 0.000 | 0.000 | 0.000 | 0.000 | 0.000 |
| BRAMY2032242 | 0.000 | 0.000 | 0.000 | 0.000 | 0.000 | 100.000 | 0.000 | 0.000 | 0.000 | 0.000 | 0.000 | 0.000 | 0.000 |
| BRAMY2032317 | 0.000 | 0.000 | 0.000 | 0.000 | 0.000 | 60.652 | 0.000 | 0.000 | 0.000 | 0.000 | 0.000 | 0.000 | 0.000 |
| BRAMY2033003 | 0.000 | 0.000 | 0.000 | 0.000 | 0.000 | 100.000 | 0.000 | 0.000 | 0.000 | 0.000 | 0.000 | 0.000 | 0.000 |
| BRAMY2033116 | 0.000 | 0.000 | 0.000 | 0.000 | 0.000 | 100.000 | 0.000 | 0.000 | 0.000 | 0.000 | 0.000 | 0.000 | 0.000 |
| BRAMY2033267 | 0.000 | 0.000 | 0.000 | 0.000 | 0.000 | 100.000 | 0.000 | 0.000 | 0.000 | 0.000 | 0.000 | 0.000 | 0.000 |
| BRAMY2033594 | 0.000 | 0.000 | 0.000 | 0.000 | 0.000 | 100.000 | 0.000 | 0.000 | 0.000 | 0.000 | 0.000 | 0.000 | 0.000 |
| BRAMY2034185 | 0.000 | 0.000 | 0.000 | 0.000 | 0.000 | 100.000 | 0.000 | 0.000 | 0.000 | 0.000 | 0.000 | 0.000 | 0.000 |
| BRAMY2034920 | 0.000 | 0.000 | 0.000 | 0.000 | 0.000 | 100.000 | 0.000 | 0.000 | 0.000 | 0.000 | 0.000 | 0.000 | 0.000 |
| BRAMY2034993 | 0.000 | 0.000 | 0.000 | 0.000 | 0.000 | 100.000 | 0.000 | 0.000 | 0.000 | 0.000 | 0.000 | 0.000 | 0.000 |
| BRAMY2036387 | 0.000 | 0.000 | 0.000 | 0.000 | 0.000 | 13.490 | 0.000 | 0.000 | 0.000 | 0.000 | 0.000 | 0.000 | 0.000 |
| BRAMY2036396 | 0.000 | 0.000 | 0.000 | 0.000 | 0.000 | 100.000 | 0.000 | 0.000 | 0.000 | 0.000 | 0.000 | 0.000 | 0.000 |
| BRAMY2036567 | 0.000 | 18.633 | 0.000 | 26.525 | 0.000 | 22.594 | 7.474 | 17.148 | 0.000 | 7.626 | 0.000 | 0.000 | 0.000 |
| BRAMY2036699 | 0.000 | 0.000 | 0.000 | 0.000 | 0.000 | 100.000 | 0.000 | 0.000 | 0.000 | 0.000 | 0.000 | 0.000 | 0.000 |
| BRAMY2036913 | 0.000 | 0.000 | 0.000 | 0.000 | 0.000 | 100.000 | 0.000 | 0.000 | 0.000 | 0.000 | 0.000 | 0.000 | 0.000 |
| BRAMY2037823 | 0.000 | 0.000 | 0.000 | 21.055 | 0.000 | 29.890 | 29.664 | 0.000 | 0.000 | 0.000 | 0.000 | 0.000 | 0.000 |
| BRAMY2038100 | 0.000 | 0.000 | 0.000 | 0.000 | 0.000 | 100.000 | 0.000 | 0.000 | 0.000 | 0.000 | 0.000 | 0.000 | 0.000 |
| BRAMY2038484 | 0.000 | 0.000 | 0.000 | 0.000 | 0.000 | 100.000 | 0.000 | 0.000 | 0.000 | 0.000 | 0.000 | 0.000 | 0.000 |
| BRAMY2038846 | 0.000 | 0.000 | 0.000 | 0.000 | 0.000 | 47.355 | 0.000 | 0.000 | 0.000 | 0.000 | 0.000 | 0.000 | 0.000 |
| BRAMY2038904 | 0.000 | 0.000 | 0.000 | 0.000 | 0.000 | 60.652 | 0.000 | 0.000 | 0.000 | 0.000 | 0.000 | 0.000 | 0.000 |
| BRAMY2039872 | 0.000 | 49.422 | 0.000 | 14.071 | 0.000 | 19.976 | 0.000 | 0.000 | 0.000 | 0.000 | 0.000 | 0.000 | 0.000 |
| BRAMY2040478 | 0.000 | 0.000 | 0.000 | 0.000 | 0.000 | 100.000 | 0.000 | 0.000 | 0.000 | 0.000 | 0.000 | 0.000 | 0.000 |
| BRAMY2040592 | 0.000 | 0.000 | 0.000 | 0.000 | 12.582 | 7.017 | 3.482 | 0.000 | 0.000 | 7.105 | 0.000 | 0.000 | 0.000 |
| BRAMY2041261 | 0.000 | 0.000 | 0.000 | 0.000 | 0.000 | 100.000 | 0.000 | 0.000 | 0.000 | 0.000 | 0.000 | 0.000 | 0.000 |
| BRAMY2041378 | 0.000 | 0.000 | 0.000 | 0.000 | 0.000 | 100.000 | 0.000 | 0.000 | 0.000 | 0.000 | 0.000 | 0.000 | 0.000 |
| BRAMY2041542 | 0.000 | 0.000 | 0.000 | 0.000 | 0.000 | 100.000 | 0.000 | 0.000 | 0.000 | 0.000 | 0.000 | 0.000 | 0.000 |
| BRAMY2042612 | 0.000 | 0.000 | 0.000 | 0.000 | 0.000 | 100.000 | 0.000 | 0.000 | 0.000 | 0.000 | 0.000 | 0.000 | 0.000 |
| BRAMY2042641 | 0.000 | 0.000 | 0.000 | 0.000 | 0.000 | 100.000 | 0.000 | 0.000 | 0.000 | 0.000 | 0.000 | 0.000 | 0.000 |
| BRAMY2042760 | 0.000 | 0.000 | 0.000 | 0.000 | 0.000 | 100.000 | 0.000 | 0.000 | 0.000 | 0.000 | 0.000 | 0.000 | 0.000 |
| BRAMY2042918 | 0.000 | 0.000 | 0.000 | 0.000 | 0.000 | 100.000 | 0.000 | 0.000 | 0.000 | 0.000 | 0.000 | 0.000 | 0.000 |
| BRAMY2044078 | 24.301 | 0.000 | 5.447 | 6.224 | 0.000 | 8.836 | 0.000 | 0.000 | 0.000 | 8.947 | 0.000 | 0.000 | 19.449 |
| BRAMY2044246 | 0.000 | 0.000 | 0.000 | 0.000 | 0.000 | 100.000 | 0.000 | 0.000 | 0.000 | 0.000 | 0.000 | 0.000 | 0.000 |
| BRAMY2045036 | 0.000 | 0.000 | 0.000 | 0.000 | 0.000 | 100.000 | 0.000 | 0.000 | 0.000 | 0.000 | 0.000 | 0.000 | 0.000 |
| BRAMY2046478 | 0.000 | 0.000 | 0.000 | 0.000 | 0.000 | 100.000 | 0.000 | 0.000 | 0.000 | 0.000 | 0.000 | 0.000 | 0.000 |
| BRAMY2046742 | 0.000 | 0.000 | 0.000 | 0.000 | 0.000 | 100.000 | 0.000 | 0.000 | 0.000 | 0.000 | 0.000 | 0.000 | 0.000 |
| BRAMY2046989 | 0.000 | 0.000 | 0.000 | 0.000 | 0.000 | 100.000 | 0.000 | 0.000 | 0.000 | 0.000 | 0.000 | 0.000 | 0.000 |
| BRAMY2047169 | 0.000 | 0.000 | 0.000 | 0.000 | 0.000 | 100.000 | 0.000 | 0.000 | 0.000 | 0.000 | 0.000 | 0.000 | 0.000 |
| BRAMY2047420 | 0.000 | 0.000 | 0.000 | 0.719 | 0.000 | 2.041 | 0.000 | 0.000 | 0.000 | 0.000 | 3.770 | 0.000 | 0.000 |
| BRAMY2047676 | 0.000 | 0.000 | 0.000 | 0.000 | 0.000 | 100.000 | 0.000 | 0.000 | 0.000 | 0.000 | 0.000 | 0.000 | 0.000 |
| BRAMY2047746 | 0.000 | 0.000 | 0.000 | 0.000 | 0.000 | 100.000 | 0.000 | 0.000 | 0.000 | 0.000 | 0.000 | 0.000 | 0.000 |
| BRAMY2047751 | 0.000 | 0.000 | 0.000 | 0.000 | 0.000 | 100.000 | 0.000 | 0.000 | 0.000 | 0.000 | 0.000 | 0.000 | 0.000 |
| BRAMY2047765 | 0.000 | 0.000 | 0.000 | 0.000 | 0.000 | 100.000 | 0.000 | 0.000 | 0.000 | 0.000 | 0.000 | 0.000 | 0.000 |
| BRAMY2047884 | 0.000 | 0.000 | 0.000 | 0.000 | 0.000 | 100.000 | 0.000 | 0.000 | 0.000 | 0.000 | 0.000 | 0.000 | 0.000 |
| BRAMY3000206 | 0.000 | 0.000 | 0.000 | 0.000 | 0.000 | 100.000 | 0.000 | 0.000 | 0.000 | 0.000 | 0.000 | 0.000 | 0.000 |
| BRAMY3000213 | 0.000 | 0.000 | 0.000 | 0.000 | 0.000 | 100.000 | 0.000 | 0.000 | 0.000 | 0.000 | 0.000 | 0.000 | 0.000 |
| BRAMY3001401 | 0.000 | 0.000 | 0.000 | 0.000 | 0.000 | 100.000 | 0.000 | 0.000 | 0.000 | 0.000 | 0.000 | 0.000 | 0.000 |
| BRAMY3001794 | 0.000 | 0.000 | 0.000 | 0.000 | 0.000 | 100.000 | 0.000 | 0.000 | 0.000 | 0.000 | 0.000 | 0.000 | 0.000 |
| BRAMY3002312 | 0.000 | 0.000 | 0.000 | 0.000 | 0.000 | 100.000 | 0.000 | 0.000 | 0.000 | 0.000 | 0.000 | 0.000 | 0.000 |
| BRAMY3002620 | 0.000 | 0.000 | 0.000 | 41.329 | 0.000 | 58.671 | 0.000 | 0.000 | 0.000 | 0.000 | 0.000 | 0.000 | 0.000 |
| BRAMY3002803 | 0.000 | 0.000 | 0.000 | 0.000 | 0.000 | 14.538 | 14.428 | 0.000 | 0.000 | 44.161 | 0.000 | 0.000 | 0.000 |
| BRAMY3002805 | 0.000 | 0.000 | 0.000 | 0.000 | 0.000 | 100.000 | 0.000 | 0.000 | 0.000 | 0.000 | 0.000 | 0.000 | 0.000 |
| BRAMY3004224 | 0.000 | 0.000 | 0.000 | 0.000 | 0.000 | 33.278 | 33.027 | 0.000 | 0.000 | 33.695 | 0.000 | 0.000 | 0.000 |
| BRAMY3004672 | 0.000 | 0.000 | 0.000 | 0.000 | 0.000 | 100.000 | 0.000 | 0.000 | 0.000 | 0.000 | 0.000 | 0.000 | 0.000 |
| BRAMY3004900 | 0.000 | 0.000 | 0.000 | 0.000 | 0.000 | 100.000 | 0.000 | 0.000 | 0.000 | 0.000 | 0.000 | 0.000 | 0.000 |
| BRAMY3004919 | 0.000 | 0.000 | 0.000 | 0.000 | 0.000 | 100.000 | 0.000 | 0.000 | 0.000 | 0.000 | 0.000 | 0.000 | 0.000 |
| BRAMY3005091 | 0.000 | 47.846 | 0.000 | 13.622 | 0.000 | 19.339 | 19.193 | 0.000 | 0.000 | 0.000 | 0.000 | 0.000 | 0.000 |
| BRAMY3005932 | 0.000 | 0.000 | 0.000 | 41.329 | 0.000 | 58.671 | 0.000 | 0.000 | 0.000 | 0.000 | 0.000 | 0.000 | 0.000 |
| BRAMY3006297 | 0.000 | 0.000 | 0.000 | 0.000 | 0.000 | 100.000 | 0.000 | 0.000 | 0.000 | 0.000 | 0.000 | 0.000 | 0.000 |
| BRAMY3007206 | 0.000 | 0.000 | 0.000 | 0.000 | 0.000 | 100.000 | 0.000 | 0.000 | 0.000 | 0.000 | 0.000 | 0.000 | 0.000 |
| BRAMY3007609 | 0.000 | 0.000 | 0.000 | 0.000 | 0.000 | 100.000 | 0.000 | 0.000 | 0.000 | 0.000 | 0.000 | 0.000 | 0.000 |
| BRAMY3008466 | 0.000 | 0.000 | 0.000 | 0.000 | 0.000 | 100.000 | 0.000 | 0.000 | 0.000 | 0.000 | 0.000 | 0.000 | 0.000 |
| BRAMY3008505 | 0.000 | 0.000 | 0.000 | 0.000 | 0.000 | 100.000 | 0.000 | 0.000 | 0.000 | 0.000 | 0.000 | 0.000 | 0.000 |
| BRAMY3008650 | 0.000 | 0.000 | 0.000 | 0.000 | 0.000 | 100.000 | 0.000 | 0.000 | 0.000 | 0.000 | 0.000 | 0.000 | 0.000 |
| BRAMY3009811 | 0.000 | 0.000 | 0.000 | 0.000 | 0.000 | 33.057 | 0.000 | 0.000 | 0.000 | 66.943 | 0.000 | 0.000 | 0.000 |
| BRAMY3010411 | 0.000 | 0.000 | 0.000 | 0.000 | 0.000 | 100.000 | 0.000 | 0.000 | 0.000 | 0.000 | 0.000 | 0.000 | 0.000 |
| BRAMY4000095 | 0.000 | 0.000 | 0.000 | 0.000 | 0.000 | 14.721 | 0.000 | 33.520 | 51.759 | 0.000 | 0.000 | 0.000 | 0.000 |
| BRAMY4000229 | 0.000 | 0.000 | 0.000 | 25.113 | 0.000 | 35.650 | 0.000 | 0.000 | 0.000 | 0.000 | 0.000 | 0.000 | 39.237 |
| BRAMY4000277 | 0.000 | 0.000 | 0.000 | 0.000 | 0.000 | 100.000 | 0.000 | 0.000 | 0.000 | 0.000 | 0.000 | 0.000 | 0.000 |
| BRASW1000125 | 0.000 | 0.000 | 0.000 | 0.000 | 0.000 | 0.000 | 0.000 | 0.000 | 0.000 | 0.000 | 0.000 | 0.946 | 0.000 |
| BRAWH1000127 | 0.000 | 7.969 | 3.971 | 4.538 | 0.000 | 9.663 | 15.983 | 0.000 | 0.000 | 3.261 | 35.693 | 0.000 | 7.090 |
| BRAWH2001395 | 0.000 | 0.000 | 0.000 | 3.580 | 3.037 | 2.541 | 14.290 | 5.785 | 10.422 | 22.297 | 12.514 | 4.546 | 11.652 |
| BRAWH2001671 | 0.000 | 0.000 | 0.000 | 8.097 | 0.000 | 0.000 | 7.605 | 0.000 | 0.000 | 11.638 | 0.000 | 0.000 | 12.650 |
| BRAWH2001940 | 0.000 | 0.000 | 0.000 | 0.000 | 0.000 | 0.000 | 37.398 | 0.000 | 0.000 | 38.155 | 0.000 | 0.000 | 0.000 |
| BRAWH2001973 | 0.000 | 0.000 | 0.000 | 0.000 | 0.000 | 0.000 | 37.398 | 0.000 | 0.000 | 38.155 | 0.000 | 0.000 | 0.000 |
| BRAWH2002560 | 11.923 | 24.132 | 24.052 | 0.000 | 0.000 | 6.503 | 6.454 | 0.000 | 0.000 | 3.292 | 12.010 | 11.635 | 0.000 |
| BRAWH2002761 | 0.000 | 0.000 | 0.000 | 0.000 | 0.000 | 0.000 | 100.000 | 0.000 | 0.000 | 0.000 | 0.000 | 0.000 | 0.000 |
| BRAWH2005315 | 0.000 | 0.000 | 0.000 | 0.000 | 0.000 | 0.000 | 100.000 | 0.000 | 0.000 | 0.000 | 0.000 | 0.000 | 0.000 |
| BRAWH2007658 | 0.000 | 0.000 | 0.000 | 0.000 | 0.000 | 0.000 | 58.101 | 0.000 | 0.000 | 0.000 | 0.000 | 41.899 | 0.000 |
| BRAWH2010000 | 0.000 | 0.000 | 0.000 | 0.000 | 0.000 | 0.000 | 18.745 | 43.006 | 0.000 | 38.249 | 0.000 | 0.000 | 0.000 |
| BRAWH2010084 | 0.000 | 0.000 | 0.000 | 0.000 | 0.000 | 0.000 | 100.000 | 0.000 | 0.000 | 0.000 | 0.000 | 0.000 | 0.000 |
| BRAWH2010536 | 0.000 | 0.000 | 0.000 | 0.000 | 0.000 | 0.000 | 14.718 | 0.000 | 0.000 | 0.000 | 0.000 | 0.000 | 0.000 |
| BRAWH2012162 | 0.000 | 0.000 | 0.000 | 0.000 | 0.000 | 0.000 | 36.060 | 0.000 | 0.000 | 0.000 | 0.000 | 0.000 | 0.000 |
| BRAWH2012326 | 0.000 | 0.000 | 0.000 | 0.000 | 0.000 | 0.000 | 100.000 | 0.000 | 0.000 | 0.000 | 0.000 | 0.000 | 0.000 |
| BRAWH2013294 | 0.000 | 0.000 | 0.000 | 13.997 | 0.000 | 0.000 | 39.442 | 0.000 | 0.000 | 10.060 | 0.000 | 0.000 | 0.000 |
| BRAWH2013871 | 0.000 | 0.000 | 0.000 | 0.000 | 0.000 | 0.000 | 37.485 | 0.000 | 0.000 | 0.000 | 0.000 | 0.000 | 0.000 |
| BRAWH2014414 | 0.000 | 0.000 | 0.000 | 0.000 | 0.000 | 54.002 | 17.865 | 0.000 | 0.000 | 18.227 | 0.000 | 0.000 | 9.906 |
| BRAWH2014645 | 0.000 | 2.635 | 6.566 | 3.751 | 0.000 | 2.130 | 4.228 | 0.000 | 3.745 | 1.078 | 0.000 | 0.000 | 1.172 |
| BRAWH2014662 | 0.000 | 0.000 | 0.000 | 11.016 | 0.000 | 0.000 | 15.521 | 0.000 | 0.000 | 0.000 | 0.000 | 0.000 | 17.212 |
| BRAWH2014876 | 0.000 | 0.000 | 0.000 | 7.433 | 0.000 | 0.000 | 10.473 | 24.026 | 0.000 | 0.000 | 0.000 | 0.000 | 58.068 |
| BRAWH2014954 | 0.000 | 0.000 | 0.000 | 41.512 | 0.000 | 0.000 | 58.488 | 0.000 | 0.000 | 0.000 | 0.000 | 0.000 | 0.000 |
| BRAWH2016221 | 0.000 | 0.000 | 0.000 | 0.000 | 0.000 | 0.000 | 47.417 | 0.000 | 0.000 | 0.000 | 0.000 | 0.000 | 52.583 |
| BRAWH2016439 | 0.000 | 0.000 | 0.000 | 0.000 | 0.000 | 0.000 | 100.000 | 0.000 | 0.000 | 0.000 | 0.000 | 0.000 | 0.000 |
| BRAWH2016702 | 0.000 | 0.000 | 0.000 | 26.193 | 0.000 | 0.000 | 73.807 | 0.000 | 0.000 | 0.000 | 0.000 | 0.000 | 0.000 |
| BRAWH2016724 | 64.881 | 0.000 | 0.000 | 0.000 | 0.000 | 0.000 | 35.119 | 0.000 | 0.000 | 0.000 | 0.000 | 0.000 | 0.000 |
| BRAWH3000078 | 0.000 | 0.000 | 0.000 | 0.000 | 0.000 | 0.000 | 100.000 | 0.000 | 0.000 | 0.000 | 0.000 | 0.000 | 0.000 |
| BRAWH3000100 | 0.000 | 0.000 | 0.000 | 0.000 | 0.000 | 0.000 | 100.000 | 0.000 | 0.000 | 0.000 | 0.000 | 0.000 | 0.000 |
| BRAWH3000314 | 0.000 | 0.000 | 0.000 | 0.000 | 0.000 | 0.000 | 71.553 | 0.000 | 0.000 | 0.000 | 0.000 | 0.000 | 0.000 |
| BRAWH3000491 | 0.000 | 0.000 | 0.000 | 0.000 | 0.000 | 0.000 | 100.000 | 0.000 | 0.000 | 0.000 | 0.000 | 0.000 | 0.000 |
| BRAWH3001326 | 0.000 | 0.000 | 0.000 | 0.000 | 0.000 | 0.000 | 45.606 | 0.000 | 0.000 | 0.000 | 0.000 | 0.000 | 0.000 |
| BRAWH3001475 | 0.000 | 0.000 | 0.000 | 0.000 | 0.000 | 0.000 | 100.000 | 0.000 | 0.000 | 0.000 | 0.000 | 0.000 | 0.000 |
| BRAWH3001891 | 0.000 | 0.000 | 0.000 | 36.772 | 0.000 | 17.401 | 34.539 | 0.000 | 0.000 | 0.000 | 0.000 | 0.000 | 0.000 |
| BRAWH3002574 | 0.000 | 0.000 | 8.213 | 0.000 | 0.000 | 0.000 | 13.222 | 0.000 | 0.000 | 0.000 | 0.000 | 0.000 | 0.000 |
| BRAWH3002600 | 0.000 | 0.000 | 0.000 | 26.120 | 0.000 | 37.080 | 36.800 | 0.000 | 0.000 | 0.000 | 0.000 | 0.000 | 0.000 |
| BRAWH3002819 | 0.000 | 0.000 | 0.000 | 0.000 | 0.000 | 0.000 | 100.000 | 0.000 | 0.000 | 0.000 | 0.000 | 0.000 | 0.000 |
| BRAWH3002821 | 0.000 | 0.000 | 27.272 | 0.000 | 0.000 | 0.000 | 21.953 | 0.000 | 0.000 | 0.000 | 0.000 | 0.000 | 0.000 |
| BRAWH3003522 | 0.000 | 0.000 | 0.000 | 0.000 | 0.000 | 0.000 | 100.000 | 0.000 | 0.000 | 0.000 | 0.000 | 0.000 | 0.000 |
| BRAWH3003555 | 0.000 | 0.000 | 0.000 | 5.405 | 0.000 | 0.000 | 15.229 | 0.000 | 0.000 | 0.000 | 0.000 | 0.000 | 8.444 |
| BRAWH3003727 | 0.000 | 0.000 | 12.492 | 21.411 | 0.000 | 0.000 | 10.055 | 0.000 | 0.000 | 10.259 | 0.000 | 0.000 | 0.000 |
| BRAWH3003801 | 0.000 | 0.000 | 0.000 | 0.000 | 0.000 | 0.000 | 100.000 | 0.000 | 0.000 | 0.000 | 0.000 | 0.000 | 0.000 |
| BRAWH3003992 | 0.000 | 0.000 | 36.036 | 0.000 | 0.000 | 0.000 | 29.008 | 0.000 | 0.000 | 0.000 | 0.000 | 0.000 | 0.000 |
| BRAWH3004453 | 0.000 | 0.000 | 0.000 | 0.000 | 0.000 | 0.000 | 100.000 | 0.000 | 0.000 | 0.000 | 0.000 | 0.000 | 0.000 |
| BRAWH3004666 | 0.000 | 0.000 | 0.000 | 0.000 | 0.000 | 0.000 | 49.499 | 0.000 | 0.000 | 50.501 | 0.000 | 0.000 | 0.000 |
| BRAWH3005132 | 0.000 | 0.000 | 0.000 | 0.000 | 0.000 | 50.189 | 49.811 | 0.000 | 0.000 | 0.000 | 0.000 | 0.000 | 0.000 |
| BRAWH3005422 | 0.000 | 0.000 | 0.000 | 0.000 | 0.000 | 0.000 | 100.000 | 0.000 | 0.000 | 0.000 | 0.000 | 0.000 | 0.000 |
| BRAWH3005912 | 0.000 | 0.000 | 0.000 | 0.000 | 0.000 | 0.000 | 100.000 | 0.000 | 0.000 | 0.000 | 0.000 | 0.000 | 0.000 |
| BRAWH3005981 | 0.000 | 0.000 | 0.000 | 0.000 | 0.000 | 0.000 | 29.324 | 0.000 | 0.000 | 0.000 | 0.000 | 0.000 | 0.000 |
| BRAWH3006548 | 0.000 | 0.000 | 0.000 | 0.000 | 0.000 | 0.000 | 71.018 | 0.000 | 0.000 | 28.982 | 0.000 | 0.000 | 0.000 |
| BRAWH3006792 | 0.000 | 0.000 | 0.000 | 0.000 | 0.000 | 0.000 | 49.499 | 0.000 | 0.000 | 50.501 | 0.000 | 0.000 | 0.000 |
| BRAWH3007221 | 0.000 | 0.000 | 0.000 | 0.000 | 0.000 | 0.000 | 100.000 | 0.000 | 0.000 | 0.000 | 0.000 | 0.000 | 0.000 |
| BRAWH3007506 | 0.000 | 0.000 | 0.000 | 0.000 | 0.000 | 0.000 | 100.000 | 0.000 | 0.000 | 0.000 | 0.000 | 0.000 | 0.000 |
| BRAWH3007592 | 0.000 | 0.000 | 6.683 | 6.364 | 0.000 | 1.807 | 8.966 | 0.000 | 0.000 | 3.659 | 0.000 | 0.000 | 0.000 |
| BRAWH3007726 | 0.000 | 0.000 | 0.000 | 0.000 | 0.000 | 0.000 | 54.530 | 0.000 | 0.000 | 0.000 | 0.000 | 0.000 | 0.000 |
| BRAWH3007783 | 0.000 | 0.000 | 0.000 | 0.000 | 0.000 | 0.000 | 100.000 | 0.000 | 0.000 | 0.000 | 0.000 | 0.000 | 0.000 |
| BRAWH3008341 | 0.000 | 0.000 | 0.000 | 0.000 | 0.000 | 0.000 | 100.000 | 0.000 | 0.000 | 0.000 | 0.000 | 0.000 | 0.000 |
| BRAWH3008697 | 0.000 | 0.000 | 0.000 | 0.000 | 0.000 | 0.000 | 100.000 | 0.000 | 0.000 | 0.000 | 0.000 | 0.000 | 0.000 |
| BRAWH3008931 | 0.000 | 0.000 | 4.303 | 4.916 | 0.000 | 6.980 | 3.463 | 15.892 | 0.000 | 10.601 | 12.891 | 0.000 | 0.000 |
| BRAWH3009297 | 0.000 | 0.000 | 0.000 | 41.512 | 0.000 | 0.000 | 58.488 | 0.000 | 0.000 | 0.000 | 0.000 | 0.000 | 0.000 |
| BRCAN2002562 | 0.000 | 0.000 | 0.000 | 0.000 | 0.000 | 0.000 | 0.000 | 100.000 | 0.000 | 0.000 | 0.000 | 0.000 | 0.000 |
| BRCAN2002856 | 0.000 | 0.000 | 0.000 | 0.000 | 0.000 | 0.000 | 0.000 | 39.306 | 60.694 | 0.000 | 0.000 | 0.000 | 0.000 |
| BRCAN2002944 | 0.000 | 0.000 | 0.000 | 0.000 | 0.000 | 0.000 | 0.000 | 73.343 | 0.000 | 0.000 | 0.000 | 0.000 | 0.000 |
| BRCAN2002948 | 0.000 | 0.000 | 0.000 | 0.000 | 0.000 | 0.000 | 0.000 | 100.000 | 0.000 | 0.000 | 0.000 | 0.000 | 0.000 |
| BRCAN2003703 | 0.000 | 0.000 | 0.000 | 0.000 | 0.000 | 0.000 | 0.000 | 100.000 | 0.000 | 0.000 | 0.000 | 0.000 | 0.000 |
| BRCAN2003746 | 0.000 | 0.000 | 0.000 | 0.000 | 0.000 | 0.000 | 0.000 | 100.000 | 0.000 | 0.000 | 0.000 | 0.000 | 0.000 |
| BRCAN2003987 | 0.000 | 0.000 | 0.000 | 0.000 | 0.000 | 0.000 | 0.000 | 100.000 | 0.000 | 0.000 | 0.000 | 0.000 | 0.000 |
| BRCAN2004355 | 0.000 | 0.000 | 0.000 | 0.000 | 0.000 | 0.000 | 0.000 | 100.000 | 0.000 | 0.000 | 0.000 | 0.000 | 0.000 |
| BRCAN2005436 | 0.000 | 0.000 | 0.000 | 0.000 | 0.000 | 0.000 | 0.000 | 100.000 | 0.000 | 0.000 | 0.000 | 0.000 | 0.000 |
| BRCAN2006063 | 0.000 | 0.000 | 0.000 | 0.000 | 0.000 | 0.000 | 0.000 | 100.000 | 0.000 | 0.000 | 0.000 | 0.000 | 0.000 |
| BRCAN2006290 | 0.000 | 0.000 | 0.000 | 0.000 | 0.000 | 0.000 | 0.000 | 100.000 | 0.000 | 0.000 | 0.000 | 0.000 | 0.000 |
| BRCAN2006297 | 0.000 | 0.000 | 0.000 | 0.000 | 0.000 | 0.000 | 0.000 | 33.031 | 51.004 | 0.000 | 0.000 | 0.000 | 15.966 |
| BRCAN2006450 | 0.000 | 0.000 | 0.000 | 0.000 | 0.000 | 0.000 | 0.000 | 100.000 | 0.000 | 0.000 | 0.000 | 0.000 | 0.000 |
| BRCAN2007144 | 0.000 | 0.000 | 0.000 | 0.000 | 0.000 | 0.000 | 0.000 | 100.000 | 0.000 | 0.000 | 0.000 | 0.000 | 0.000 |
| BRCAN2007409 | 0.000 | 0.000 | 3.727 | 0.000 | 0.000 | 0.000 | 0.000 | 6.883 | 10.629 | 0.000 | 0.000 | 0.000 | 0.000 |
| BRCAN2007426 | 0.000 | 0.000 | 0.000 | 0.000 | 0.000 | 0.000 | 0.000 | 100.000 | 0.000 | 0.000 | 0.000 | 0.000 | 0.000 |
| BRCAN2008528 | 0.000 | 0.000 | 0.000 | 0.000 | 0.000 | 0.000 | 0.000 | 100.000 | 0.000 | 0.000 | 0.000 | 0.000 | 0.000 |
| BRCAN2009203 | 0.000 | 0.000 | 0.000 | 0.000 | 0.000 | 0.000 | 0.000 | 100.000 | 0.000 | 0.000 | 0.000 | 0.000 | 0.000 |
| BRCAN2009432 | 0.000 | 0.000 | 0.000 | 1.869 | 0.000 | 0.000 | 0.000 | 3.021 | 0.000 | 0.000 | 0.000 | 0.000 | 0.000 |
| BRCAN2010376 | 0.000 | 0.000 | 0.000 | 23.627 | 0.000 | 0.000 | 0.000 | 76.373 | 0.000 | 0.000 | 0.000 | 0.000 | 0.000 |
| BRCAN2011254 | 0.000 | 0.000 | 0.000 | 0.000 | 0.000 | 0.000 | 0.000 | 100.000 | 0.000 | 0.000 | 0.000 | 0.000 | 0.000 |
| BRCAN2011602 | 0.000 | 0.000 | 0.000 | 0.000 | 0.000 | 0.000 | 0.000 | 100.000 | 0.000 | 0.000 | 0.000 | 0.000 | 0.000 |
| BRCAN2012355 | 0.000 | 0.000 | 0.000 | 0.000 | 0.000 | 0.000 | 0.000 | 100.000 | 0.000 | 0.000 | 0.000 | 0.000 | 0.000 |
| BRCAN2012481 | 0.000 | 0.000 | 0.000 | 0.000 | 0.000 | 0.000 | 0.000 | 100.000 | 0.000 | 0.000 | 0.000 | 0.000 | 0.000 |
| BRCAN2013655 | 0.000 | 0.000 | 0.000 | 0.000 | 0.000 | 0.000 | 0.000 | 100.000 | 0.000 | 0.000 | 0.000 | 0.000 | 0.000 |
| BRCAN2013660 | 0.000 | 0.000 | 0.000 | 0.000 | 0.000 | 0.000 | 0.000 | 100.000 | 0.000 | 0.000 | 0.000 | 0.000 | 0.000 |
| BRCAN2014143 | 0.000 | 0.000 | 0.000 | 0.000 | 0.000 | 0.000 | 0.000 | 100.000 | 0.000 | 0.000 | 0.000 | 0.000 | 0.000 |
| BRCAN2014602 | 0.000 | 0.000 | 0.000 | 0.000 | 0.000 | 0.000 | 0.000 | 100.000 | 0.000 | 0.000 | 0.000 | 0.000 | 0.000 |
| BRCAN2014881 | 0.000 | 0.000 | 0.000 | 0.000 | 0.000 | 30.516 | 0.000 | 69.484 | 0.000 | 0.000 | 0.000 | 0.000 | 0.000 |
| BRCAN2015371 | 0.000 | 0.000 | 0.000 | 15.560 | 0.000 | 0.000 | 0.000 | 25.149 | 0.000 | 0.000 | 0.000 | 0.000 | 0.000 |
| BRCAN2015464 | 0.000 | 0.000 | 0.000 | 0.000 | 0.000 | 0.000 | 0.000 | 100.000 | 0.000 | 0.000 | 0.000 | 0.000 | 0.000 |
| BRCAN2016433 | 0.000 | 0.000 | 0.000 | 0.000 | 0.000 | 0.000 | 0.000 | 100.000 | 0.000 | 0.000 | 0.000 | 0.000 | 0.000 |
| BRCAN2016619 | 0.000 | 0.000 | 0.000 | 0.000 | 0.000 | 0.000 | 0.000 | 30.224 | 0.000 | 0.000 | 0.000 | 0.000 | 0.000 |
| BRCAN2017442 | 0.000 | 0.000 | 0.000 | 0.000 | 0.000 | 0.000 | 0.000 | 100.000 | 0.000 | 0.000 | 0.000 | 0.000 | 0.000 |
| BRCAN2017717 | 0.000 | 26.519 | 0.000 | 0.000 | 0.000 | 10.719 | 0.000 | 24.406 | 0.000 | 0.000 | 0.000 | 38.357 | 0.000 |
| BRCAN2017905 | 0.000 | 0.000 | 0.000 | 0.000 | 0.000 | 0.000 | 0.000 | 100.000 | 0.000 | 0.000 | 0.000 | 0.000 | 0.000 |
| BRCAN2018935 | 0.000 | 0.000 | 0.000 | 0.000 | 0.000 | 0.000 | 0.000 | 20.928 | 0.000 | 0.000 | 0.000 | 0.000 | 0.000 |
| BRCAN2019387 | 0.000 | 0.000 | 0.000 | 0.000 | 0.000 | 0.000 | 0.000 | 100.000 | 0.000 | 0.000 | 0.000 | 0.000 | 0.000 |
| BRCAN2020710 | 0.000 | 0.000 | 0.000 | 7.714 | 0.000 | 0.000 | 0.000 | 49.868 | 0.000 | 22.176 | 0.000 | 0.000 | 0.000 |
| BRCAN2021028 | 0.000 | 0.000 | 0.000 | 0.000 | 0.000 | 0.000 | 0.000 | 24.138 | 37.272 | 0.000 | 0.000 | 0.000 | 0.000 |
| BRCAN2024451 | 0.000 | 0.000 | 0.000 | 0.000 | 0.000 | 0.000 | 0.000 | 100.000 | 0.000 | 0.000 | 0.000 | 0.000 | 0.000 |
| BRCAN2024563 | 0.000 | 0.000 | 0.000 | 0.000 | 0.000 | 0.000 | 0.000 | 100.000 | 0.000 | 0.000 | 0.000 | 0.000 | 0.000 |
| BRCAN2025712 | 0.000 | 0.000 | 0.000 | 0.000 | 0.000 | 0.000 | 0.000 | 100.000 | 0.000 | 0.000 | 0.000 | 0.000 | 0.000 |
| BRCAN2028355 | 0.000 | 0.000 | 0.000 | 0.000 | 0.000 | 0.000 | 0.000 | 3.389 | 0.000 | 1.507 | 0.000 | 0.000 | 0.000 |
| BRCOC2000670 | 0.000 | 0.000 | 0.000 | 0.000 | 0.000 | 22.144 | 0.000 | 0.000 | 77.856 | 0.000 | 0.000 | 0.000 | 0.000 |
| BRCOC2003213 | 0.000 | 0.000 | 0.000 | 7.368 | 0.000 | 0.000 | 10.381 | 0.000 | 36.777 | 0.000 | 0.000 | 0.000 | 0.000 |
| BRCOC2007034 | 0.000 | 0.000 | 0.000 | 16.691 | 0.000 | 0.000 | 0.000 | 0.000 | 83.309 | 0.000 | 0.000 | 0.000 | 0.000 |
| BRCOC2014033 | 0.000 | 0.000 | 0.000 | 0.000 | 0.000 | 0.000 | 15.633 | 0.000 | 55.382 | 15.950 | 0.000 | 0.000 | 0.000 |
| BRCOC2016525 | 0.000 | 0.000 | 0.000 | 0.000 | 0.000 | 0.000 | 0.000 | 0.000 | 100.000 | 0.000 | 0.000 | 0.000 | 0.000 |
| BRCOC2019934 | 0.000 | 0.000 | 0.000 | 0.000 | 0.000 | 0.000 | 0.000 | 0.000 | 100.000 | 0.000 | 0.000 | 0.000 | 0.000 |
| BRCOC2020142 | 0.000 | 0.000 | 0.000 | 0.000 | 0.000 | 0.000 | 22.014 | 0.000 | 77.986 | 0.000 | 0.000 | 0.000 | 0.000 |
| BRHIP2000691 | 0.000 | 0.000 | 0.000 | 0.000 | 0.000 | 0.000 | 0.000 | 0.000 | 0.000 | 100.000 | 0.000 | 0.000 | 0.000 |
| BRHIP2000819 | 0.000 | 0.000 | 0.000 | 0.000 | 0.000 | 0.000 | 0.000 | 0.000 | 0.000 | 2.204 | 0.000 | 0.000 | 4.791 |
| BRHIP2000826 | 0.000 | 0.000 | 0.000 | 0.000 | 0.000 | 0.000 | 0.000 | 0.000 | 0.000 | 100.000 | 0.000 | 0.000 | 0.000 |
| BRHIP2000920 | 0.000 | 0.000 | 0.000 | 25.999 | 0.000 | 0.000 | 36.630 | 0.000 | 0.000 | 37.371 | 0.000 | 0.000 | 0.000 |
| BRHIP2001074 | 0.000 | 0.000 | 0.000 | 0.000 | 0.000 | 0.000 | 0.000 | 0.000 | 0.000 | 39.976 | 0.000 | 0.000 | 0.000 |
| BRHIP2001805 | 0.000 | 0.000 | 0.000 | 0.000 | 0.000 | 0.000 | 0.000 | 0.000 | 0.000 | 14.757 | 0.000 | 0.000 | 0.000 |
| BRHIP2001927 | 0.000 | 0.000 | 0.000 | 0.000 | 0.000 | 0.000 | 0.000 | 0.000 | 0.000 | 100.000 | 0.000 | 0.000 | 0.000 |
| BRHIP2002122 | 0.000 | 0.000 | 0.000 | 0.000 | 0.000 | 0.000 | 0.000 | 0.000 | 0.000 | 100.000 | 0.000 | 0.000 | 0.000 |
| BRHIP2002172 | 0.000 | 0.000 | 0.000 | 0.000 | 0.000 | 0.000 | 0.000 | 0.000 | 0.000 | 100.000 | 0.000 | 0.000 | 0.000 |
| BRHIP2002346 | 0.000 | 0.000 | 0.000 | 0.000 | 0.000 | 0.000 | 0.000 | 0.000 | 0.000 | 100.000 | 0.000 | 0.000 | 0.000 |
| BRHIP2003242 | 0.000 | 0.000 | 0.000 | 0.000 | 0.000 | 0.000 | 0.000 | 0.000 | 0.000 | 100.000 | 0.000 | 0.000 | 0.000 |
| BRHIP2003786 | 0.000 | 0.000 | 0.000 | 0.000 | 0.000 | 0.000 | 0.000 | 0.000 | 0.000 | 100.000 | 0.000 | 0.000 | 0.000 |
| BRHIP2003917 | 0.000 | 0.000 | 0.000 | 0.000 | 0.000 | 0.000 | 0.000 | 0.000 | 0.000 | 11.981 | 0.000 | 0.000 | 0.000 |
| BRHIP2004312 | 0.000 | 0.000 | 0.000 | 0.000 | 0.000 | 0.000 | 0.000 | 0.000 | 0.000 | 100.000 | 0.000 | 0.000 | 0.000 |
| BRHIP2004359 | 0.000 | 0.000 | 0.000 | 34.560 | 0.000 | 0.000 | 0.000 | 0.000 | 0.000 | 24.839 | 0.000 | 0.000 | 0.000 |
| BRHIP2004814 | 0.000 | 0.000 | 0.000 | 0.000 | 0.000 | 0.000 | 0.000 | 0.000 | 0.000 | 35.391 | 0.000 | 0.000 | 0.000 |
| BRHIP2004883 | 0.000 | 0.000 | 0.000 | 0.000 | 0.000 | 0.000 | 0.000 | 0.000 | 0.000 | 100.000 | 0.000 | 0.000 | 0.000 |
| BRHIP2005236 | 0.000 | 0.000 | 0.000 | 0.000 | 0.000 | 0.000 | 0.000 | 0.000 | 0.000 | 100.000 | 0.000 | 0.000 | 0.000 |
| BRHIP2005354 | 0.000 | 0.000 | 0.000 | 0.000 | 0.000 | 0.000 | 0.000 | 0.000 | 0.000 | 100.000 | 0.000 | 0.000 | 0.000 |
| BRHIP2005600 | 0.000 | 0.000 | 0.000 | 0.000 | 0.000 | 0.000 | 0.000 | 0.000 | 0.000 | 100.000 | 0.000 | 0.000 | 0.000 |
| BRHIP2005719 | 0.000 | 0.000 | 0.000 | 0.000 | 0.000 | 0.000 | 49.499 | 0.000 | 0.000 | 50.501 | 0.000 | 0.000 | 0.000 |
| BRHIP2005752 | 0.000 | 0.000 | 0.000 | 41.027 | 0.000 | 0.000 | 0.000 | 0.000 | 0.000 | 58.973 | 0.000 | 0.000 | 0.000 |
| BRHIP2005932 | 0.000 | 0.000 | 0.000 | 0.000 | 0.000 | 0.000 | 0.000 | 0.000 | 0.000 | 100.000 | 0.000 | 0.000 | 0.000 |
| BRHIP2006800 | 0.000 | 0.000 | 0.000 | 0.000 | 0.000 | 0.000 | 0.000 | 0.000 | 0.000 | 100.000 | 0.000 | 0.000 | 0.000 |
| BRHIP2007616 | 0.000 | 0.000 | 0.000 | 0.000 | 0.000 | 0.000 | 0.000 | 0.000 | 0.000 | 100.000 | 0.000 | 0.000 | 0.000 |
| BRHIP2007741 | 3.207 | 4.327 | 4.313 | 3.696 | 0.000 | 8.745 | 6.943 | 0.000 | 0.000 | 3.542 | 0.000 | 0.000 | 5.775 |
| BRHIP2009340 | 0.000 | 0.000 | 0.000 | 0.000 | 0.000 | 0.000 | 0.000 | 0.000 | 0.000 | 100.000 | 0.000 | 0.000 | 0.000 |
| BRHIP2009414 | 0.000 | 0.000 | 0.000 | 0.000 | 0.000 | 0.000 | 0.000 | 0.000 | 0.000 | 100.000 | 0.000 | 0.000 | 0.000 |
| BRHIP2009474 | 0.000 | 0.000 | 0.000 | 0.000 | 0.000 | 0.000 | 0.000 | 0.000 | 0.000 | 47.917 | 0.000 | 0.000 | 52.083 |
| BRHIP2013699 | 39.421 | 0.000 | 0.000 | 15.145 | 0.000 | 0.000 | 0.000 | 0.000 | 0.000 | 21.770 | 0.000 | 0.000 | 23.663 |
| BRHIP2014228 | 0.000 | 0.000 | 0.000 | 10.447 | 0.000 | 0.000 | 29.439 | 0.000 | 0.000 | 15.017 | 0.000 | 0.000 | 0.000 |
| BRHIP2021615 | 0.000 | 0.000 | 0.000 | 0.000 | 0.000 | 0.000 | 0.000 | 0.000 | 0.000 | 100.000 | 0.000 | 0.000 | 0.000 |
| BRHIP2022221 | 0.000 | 0.000 | 0.000 | 0.000 | 0.000 | 0.000 | 0.000 | 0.000 | 0.000 | 47.917 | 0.000 | 0.000 | 52.083 |
| BRHIP2024146 | 0.000 | 0.000 | 0.000 | 0.864 | 12.091 | 2.759 | 3.042 | 11.166 | 16.165 | 5.897 | 10.190 | 6.581 | 7.759 |
| BRHIP2024165 | 0.000 | 0.000 | 0.000 | 0.000 | 0.000 | 0.000 | 0.000 | 0.000 | 0.000 | 100.000 | 0.000 | 0.000 | 0.000 |
| BRHIP2026061 | 0.000 | 0.000 | 37.989 | 0.000 | 0.000 | 30.812 | 0.000 | 0.000 | 0.000 | 31.199 | 0.000 | 0.000 | 0.000 |
| BRHIP2026288 | 0.000 | 0.000 | 0.000 | 0.000 | 77.982 | 0.000 | 0.000 | 0.000 | 0.000 | 22.018 | 0.000 | 0.000 | 0.000 |
| BRHIP2029176 | 0.000 | 0.000 | 0.000 | 0.000 | 0.000 | 0.000 | 0.000 | 0.000 | 0.000 | 100.000 | 0.000 | 0.000 | 0.000 |
| BRHIP2029393 | 0.000 | 0.000 | 0.000 | 0.000 | 0.000 | 0.000 | 0.000 | 0.000 | 0.000 | 100.000 | 0.000 | 0.000 | 0.000 |
| BRHIP3000339 | 0.000 | 0.000 | 0.000 | 3.580 | 3.037 | 2.541 | 14.290 | 5.785 | 10.422 | 22.297 | 12.514 | 4.546 | 11.652 |
| BRHIP3000526 | 0.000 | 0.000 | 0.000 | 0.000 | 0.000 | 0.000 | 0.000 | 0.000 | 0.000 | 100.000 | 0.000 | 0.000 | 0.000 |
| BRHIP3001283 | 0.000 | 0.000 | 0.000 | 0.000 | 0.000 | 49.688 | 0.000 | 0.000 | 0.000 | 50.312 | 0.000 | 0.000 | 0.000 |
| BRHIP3006683 | 0.000 | 0.000 | 0.000 | 0.000 | 0.000 | 0.000 | 24.100 | 0.000 | 0.000 | 49.175 | 0.000 | 0.000 | 26.726 |
| BRHIP3007483 | 0.000 | 0.000 | 0.000 | 0.000 | 0.000 | 0.000 | 0.000 | 0.000 | 0.000 | 100.000 | 0.000 | 0.000 | 0.000 |
| BRHIP3007586 | 6.375 | 0.000 | 0.000 | 7.348 | 0.000 | 3.477 | 17.255 | 0.000 | 0.000 | 24.645 | 0.000 | 0.000 | 11.481 |
| BRHIP3008183 | 0.000 | 0.000 | 0.000 | 0.000 | 0.000 | 0.000 | 0.000 | 0.000 | 0.000 | 100.000 | 0.000 | 0.000 | 0.000 |
| BRHIP3008313 | 0.000 | 0.000 | 0.000 | 20.257 | 0.000 | 0.000 | 0.000 | 0.000 | 0.000 | 29.118 | 0.000 | 0.000 | 0.000 |
| BRHIP3008344 | 0.000 | 0.000 | 0.000 | 0.000 | 0.000 | 0.000 | 0.000 | 0.000 | 0.000 | 46.104 | 0.000 | 0.000 | 0.000 |
| BRHIP3008405 | 0.000 | 0.000 | 0.000 | 12.487 | 0.000 | 0.000 | 35.187 | 0.000 | 0.000 | 17.949 | 0.000 | 0.000 | 0.000 |
| BRHIP3008565 | 0.000 | 0.000 | 0.000 | 0.000 | 0.000 | 0.000 | 0.000 | 0.000 | 0.000 | 46.104 | 0.000 | 0.000 | 0.000 |
| BRHIP3008598 | 0.000 | 0.000 | 0.000 | 0.000 | 0.000 | 0.000 | 0.000 | 0.000 | 0.000 | 100.000 | 0.000 | 0.000 | 0.000 |
| BRHIP3008997 | 0.000 | 0.000 | 0.000 | 0.000 | 0.000 | 0.000 | 0.000 | 0.000 | 0.000 | 100.000 | 0.000 | 0.000 | 0.000 |
| BRHIP3009099 | 64.423 | 0.000 | 0.000 | 0.000 | 0.000 | 0.000 | 0.000 | 0.000 | 0.000 | 35.577 | 0.000 | 0.000 | 0.000 |
| BRHIP3009448 | 0.000 | 0.000 | 0.000 | 0.000 | 0.000 | 0.000 | 0.000 | 0.000 | 0.000 | 100.000 | 0.000 | 0.000 | 0.000 |
| BRHIP3011241 | 0.000 | 0.000 | 0.000 | 0.000 | 0.000 | 0.000 | 0.000 | 0.000 | 0.000 | 100.000 | 0.000 | 0.000 | 0.000 |
| BRHIP3013765 | 0.000 | 0.000 | 0.000 | 0.000 | 0.000 | 0.000 | 0.000 | 0.000 | 0.000 | 100.000 | 0.000 | 0.000 | 0.000 |
| BRHIP3013897 | 0.000 | 0.000 | 0.000 | 0.000 | 0.000 | 0.000 | 0.000 | 0.000 | 0.000 | 100.000 | 0.000 | 0.000 | 0.000 |
| BRHIP3015751 | 0.000 | 0.000 | 0.000 | 0.000 | 0.000 | 0.000 | 0.000 | 0.000 | 0.000 | 100.000 | 0.000 | 0.000 | 0.000 |
| BRHIP3016213 | 0.000 | 0.000 | 0.000 | 0.000 | 0.000 | 0.000 | 0.000 | 0.000 | 0.000 | 100.000 | 0.000 | 0.000 | 0.000 |
| BRHIP3018797 | 4.950 | 3.339 | 8.321 | 3.803 | 4.840 | 9.448 | 30.810 | 0.000 | 0.000 | 9.567 | 0.000 | 4.830 | 10.399 |
| BRHIP3020182 | 0.000 | 0.000 | 0.000 | 0.000 | 0.000 | 0.000 | 0.000 | 0.000 | 0.000 | 100.000 | 0.000 | 0.000 | 0.000 |
| BRHIP3024118 | 0.000 | 0.000 | 0.000 | 0.000 | 0.000 | 0.000 | 0.000 | 0.000 | 0.000 | 100.000 | 0.000 | 0.000 | 0.000 |
| BRHIP3024533 | 0.000 | 0.000 | 0.000 | 0.000 | 0.000 | 0.000 | 0.000 | 0.000 | 0.000 | 100.000 | 0.000 | 0.000 | 0.000 |
| BRHIP3024725 | 0.000 | 0.000 | 0.000 | 0.000 | 0.000 | 0.000 | 0.000 | 0.000 | 0.000 | 100.000 | 0.000 | 0.000 | 0.000 |
| BRHIP3025161 | 0.000 | 0.000 | 0.000 | 0.000 | 0.000 | 0.000 | 0.000 | 0.000 | 0.000 | 100.000 | 0.000 | 0.000 | 0.000 |
| BRHIP3025702 | 0.000 | 0.000 | 0.000 | 0.000 | 0.000 | 0.000 | 0.000 | 0.000 | 0.000 | 100.000 | 0.000 | 0.000 | 0.000 |
| BRHIP3026097 | 0.000 | 0.000 | 0.000 | 0.000 | 0.000 | 0.000 | 0.000 | 0.000 | 0.000 | 100.000 | 0.000 | 0.000 | 0.000 |
| BRHIP3027137 | 0.000 | 0.000 | 0.000 | 0.000 | 0.000 | 0.000 | 0.000 | 0.000 | 0.000 | 100.000 | 0.000 | 0.000 | 0.000 |
| BRHIP3027854 | 0.000 | 0.000 | 0.000 | 0.000 | 0.000 | 0.000 | 0.000 | 0.000 | 0.000 | 100.000 | 0.000 | 0.000 | 0.000 |
| BRSSN2000684 | 0.000 | 0.000 | 0.000 | 0.000 | 0.000 | 0.000 | 23.433 | 0.000 | 0.000 | 19.126 | 17.444 | 0.000 | 10.395 |
| BRSSN2003086 | 0.000 | 0.000 | 0.000 | 0.000 | 0.000 | 0.000 | 0.000 | 0.000 | 0.000 | 0.000 | 100.000 | 0.000 | 0.000 |
| BRSSN2004496 | 0.000 | 0.000 | 0.000 | 0.000 | 0.000 | 21.304 | 0.000 | 0.000 | 0.000 | 0.000 | 78.696 | 0.000 | 0.000 |
| BRSSN2004719 | 0.000 | 0.000 | 0.000 | 0.000 | 0.000 | 0.000 | 0.000 | 12.020 | 0.000 | 10.691 | 39.002 | 18.892 | 0.000 |
| BRSSN2006892 | 0.000 | 0.000 | 0.000 | 10.990 | 0.000 | 0.000 | 0.000 | 0.000 | 0.000 | 0.000 | 57.631 | 0.000 | 0.000 |
| BRSSN2008549 | 0.000 | 0.000 | 0.000 | 0.000 | 0.000 | 0.000 | 0.000 | 0.000 | 0.000 | 17.436 | 63.611 | 0.000 | 18.953 |
| BRSSN2008797 | 0.000 | 0.000 | 0.000 | 0.000 | 0.000 | 0.000 | 0.000 | 0.000 | 0.000 | 0.000 | 77.045 | 0.000 | 22.955 |
| BRSSN2011262 | 0.000 | 0.000 | 0.000 | 2.000 | 0.000 | 0.000 | 0.000 | 0.000 | 0.000 | 0.000 | 10.489 | 0.000 | 0.000 |
| BRSSN2011738 | 0.000 | 0.000 | 13.066 | 7.465 | 0.000 | 0.000 | 31.553 | 0.000 | 0.000 | 0.000 | 39.146 | 0.000 | 0.000 |
| BRSSN2013874 | 0.000 | 0.000 | 0.000 | 0.000 | 0.000 | 0.000 | 0.000 | 0.000 | 0.000 | 0.000 | 100.000 | 0.000 | 0.000 |
| BRSSN2014299 | 0.000 | 0.000 | 0.000 | 2.623 | 0.000 | 0.000 | 3.695 | 0.000 | 0.000 | 3.770 | 13.753 | 0.000 | 0.000 |
| BRSSN2014424 | 0.000 | 0.000 | 0.000 | 0.000 | 0.000 | 0.000 | 0.000 | 38.134 | 0.000 | 0.000 | 61.866 | 0.000 | 0.000 |
| BRSSN2014556 | 0.000 | 0.000 | 0.000 | 0.000 | 0.000 | 0.000 | 0.000 | 0.000 | 0.000 | 0.000 | 100.000 | 0.000 | 0.000 |
| BRSSN2018581 | 0.000 | 0.000 | 0.000 | 0.000 | 0.000 | 0.000 | 0.000 | 0.000 | 0.000 | 0.000 | 50.137 | 0.000 | 0.000 |
| BRSSN2018925 | 0.000 | 0.000 | 0.000 | 0.000 | 0.000 | 0.000 | 0.000 | 0.000 | 0.000 | 0.000 | 100.000 | 0.000 | 0.000 |
| BRSTN2000872 | 0.000 | 0.000 | 0.000 | 0.000 | 0.000 | 0.000 | 0.000 | 0.000 | 0.000 | 0.000 | 0.000 | 100.000 | 0.000 |
| BRSTN2001067 | 0.000 | 0.000 | 0.000 | 0.000 | 0.000 | 0.000 | 0.000 | 0.000 | 0.000 | 0.000 | 0.000 | 44.646 | 0.000 |
| BRSTN2001613 | 0.000 | 0.000 | 0.000 | 0.000 | 0.000 | 0.000 | 0.000 | 0.000 | 0.000 | 0.000 | 0.000 | 100.000 | 0.000 |
| BRSTN2002400 | 0.000 | 0.000 | 0.000 | 0.000 | 0.000 | 0.000 | 0.000 | 0.000 | 0.000 | 0.000 | 0.000 | 100.000 | 0.000 |
| BRSTN2003835 | 0.000 | 0.000 | 0.000 | 0.000 | 0.000 | 0.000 | 0.000 | 0.000 | 0.000 | 0.000 | 0.000 | 100.000 | 0.000 |
| BRSTN2004863 | 0.000 | 0.000 | 0.000 | 0.000 | 0.000 | 0.000 | 0.000 | 0.000 | 35.295 | 0.000 | 0.000 | 35.924 | 11.049 |
| BRSTN2004987 | 0.000 | 0.000 | 0.000 | 0.000 | 0.000 | 0.000 | 0.000 | 0.000 | 0.000 | 0.000 | 0.000 | 100.000 | 0.000 |
| BRSTN2005721 | 0.000 | 0.000 | 0.000 | 0.000 | 0.000 | 0.000 | 0.000 | 0.000 | 0.000 | 0.000 | 0.000 | 100.000 | 0.000 |
| BRSTN2006865 | 0.000 | 0.000 | 0.000 | 0.000 | 0.000 | 0.000 | 0.000 | 0.000 | 0.000 | 0.000 | 0.000 | 100.000 | 0.000 |
| BRSTN2007000 | 0.000 | 0.000 | 0.000 | 0.000 | 0.000 | 0.000 | 0.000 | 0.000 | 0.000 | 0.000 | 0.000 | 100.000 | 0.000 |
| BRSTN2007284 | 0.000 | 0.000 | 0.000 | 0.000 | 0.000 | 0.000 | 0.000 | 38.885 | 0.000 | 0.000 | 0.000 | 61.115 | 0.000 |
| BRSTN2008052 | 0.000 | 0.000 | 0.000 | 15.541 | 0.000 | 0.000 | 32.844 | 0.000 | 0.000 | 0.000 | 0.000 | 39.475 | 12.141 |
| BRSTN2008283 | 0.000 | 0.000 | 0.000 | 0.000 | 0.000 | 0.000 | 0.000 | 0.000 | 0.000 | 0.000 | 0.000 | 100.000 | 0.000 |
| BRSTN2008418 | 0.000 | 0.000 | 0.000 | 0.000 | 0.000 | 0.000 | 0.000 | 0.000 | 0.000 | 0.000 | 0.000 | 100.000 | 0.000 |
| BRSTN2008457 | 0.000 | 0.000 | 0.000 | 0.000 | 0.000 | 0.000 | 0.000 | 0.000 | 0.000 | 0.000 | 0.000 | 100.000 | 0.000 |
| BRSTN2010363 | 0.000 | 0.000 | 0.000 | 0.000 | 0.000 | 0.000 | 0.000 | 0.000 | 0.000 | 0.000 | 0.000 | 100.000 | 0.000 |
| BRSTN2010500 | 0.000 | 0.000 | 0.000 | 0.000 | 0.000 | 0.000 | 0.000 | 0.000 | 0.000 | 0.000 | 0.000 | 100.000 | 0.000 |
| BRSTN2010750 | 0.000 | 25.357 | 0.000 | 7.220 | 0.000 | 30.747 | 0.000 | 0.000 | 0.000 | 0.000 | 0.000 | 36.677 | 0.000 |
| BRSTN2012320 | 0.000 | 0.000 | 0.000 | 0.000 | 0.000 | 0.000 | 0.000 | 0.000 | 0.000 | 0.000 | 0.000 | 100.000 | 0.000 |
| BRSTN2012380 | 0.000 | 0.000 | 0.000 | 0.000 | 0.000 | 0.000 | 0.000 | 0.000 | 0.000 | 0.000 | 0.000 | 100.000 | 0.000 |
| BRSTN2015015 | 0.000 | 0.000 | 0.000 | 19.897 | 0.000 | 0.000 | 14.017 | 0.000 | 0.000 | 0.000 | 0.000 | 50.541 | 15.544 |
| BRSTN2016470 | 0.000 | 0.546 | 0.000 | 7.146 | 7.909 | 0.441 | 0.438 | 1.004 | 0.000 | 0.447 | 0.000 | 5.524 | 0.000 |
| BRSTN2016678 | 0.000 | 0.000 | 0.000 | 0.000 | 0.000 | 0.000 | 0.000 | 0.000 | 0.000 | 0.000 | 0.000 | 33.084 | 0.000 |
| BRSTN2017237 | 0.000 | 0.000 | 0.000 | 0.000 | 0.000 | 0.000 | 0.000 | 0.000 | 0.000 | 0.000 | 0.000 | 100.000 | 0.000 |
| BRSTN2017771 | 0.000 | 0.000 | 0.000 | 0.000 | 0.000 | 0.000 | 0.000 | 0.000 | 0.000 | 0.000 | 0.000 | 100.000 | 0.000 |
| BRSTN2018083 | 0.000 | 0.000 | 0.000 | 0.000 | 0.000 | 0.000 | 0.000 | 0.000 | 0.000 | 22.055 | 0.000 | 77.945 | 0.000 |
| BRSTN2019129 | 0.000 | 0.000 | 0.000 | 0.000 | 0.000 | 0.000 | 0.000 | 0.000 | 0.000 | 0.000 | 0.000 | 100.000 | 0.000 |
| BRTHA1000311 | 0.000 | 0.000 | 7.331 | 10.472 | 0.000 | 14.866 | 11.803 | 6.770 | 0.000 | 6.021 | 10.982 | 0.000 | 9.817 |
| BRTHA2000855 | 0.000 | 0.000 | 0.000 | 0.000 | 0.000 | 0.000 | 0.000 | 0.000 | 0.000 | 0.000 | 0.000 | 0.000 | 100.000 |
| BRTHA2001462 | 0.000 | 0.000 | 0.000 | 0.000 | 0.000 | 0.000 | 0.000 | 0.000 | 0.000 | 0.000 | 0.000 | 0.000 | 100.000 |
| BRTHA2002115 | 0.000 | 0.000 | 0.000 | 0.000 | 0.000 | 0.000 | 0.000 | 0.000 | 0.000 | 0.000 | 0.000 | 0.000 | 100.000 |
| BRTHA2002281 | 0.000 | 0.000 | 0.000 | 0.000 | 0.000 | 0.000 | 0.000 | 0.000 | 0.000 | 0.000 | 0.000 | 0.000 | 100.000 |
| BRTHA2002376 | 0.000 | 0.000 | 0.000 | 0.000 | 0.000 | 0.000 | 0.000 | 0.000 | 0.000 | 0.000 | 0.000 | 0.000 | 100.000 |
| BRTHA2002442 | 0.000 | 0.000 | 0.000 | 0.000 | 0.000 | 0.000 | 0.000 | 0.000 | 0.000 | 31.507 | 0.000 | 0.000 | 68.493 |
| BRTHA2002493 | 0.000 | 0.000 | 0.000 | 0.000 | 0.000 | 0.000 | 0.000 | 0.000 | 0.000 | 0.000 | 0.000 | 0.000 | 100.000 |
| BRTHA2002608 | 0.000 | 0.000 | 0.000 | 0.000 | 0.000 | 0.000 | 0.000 | 0.000 | 0.000 | 0.000 | 0.000 | 0.000 | 100.000 |
| BRTHA2002808 | 0.000 | 0.000 | 0.000 | 0.000 | 0.000 | 0.000 | 0.000 | 0.000 | 0.000 | 0.000 | 0.000 | 0.000 | 12.857 |
| BRTHA2003030 | 0.000 | 0.000 | 0.000 | 0.000 | 0.000 | 0.000 | 0.000 | 0.000 | 0.000 | 0.000 | 0.000 | 0.000 | 100.000 |
| BRTHA2003110 | 0.000 | 0.000 | 0.000 | 0.000 | 0.000 | 0.000 | 0.000 | 0.000 | 0.000 | 0.000 | 0.000 | 0.000 | 100.000 |
| BRTHA2003116 | 0.000 | 0.000 | 0.000 | 0.000 | 0.000 | 0.000 | 0.000 | 0.000 | 0.000 | 0.000 | 0.000 | 0.000 | 100.000 |
| BRTHA2003461 | 4.055 | 0.000 | 0.000 | 0.000 | 0.000 | 0.000 | 0.000 | 0.000 | 7.775 | 0.000 | 8.169 | 0.000 | 2.434 |
| BRTHA2004821 | 0.000 | 0.000 | 0.000 | 0.000 | 0.000 | 0.000 | 0.000 | 0.000 | 0.000 | 0.000 | 0.000 | 0.000 | 100.000 |
| BRTHA2004978 | 0.000 | 0.000 | 0.000 | 0.000 | 0.000 | 0.000 | 0.000 | 0.000 | 0.000 | 0.000 | 0.000 | 0.000 | 100.000 |
| BRTHA2005579 | 0.000 | 0.000 | 0.000 | 0.000 | 0.000 | 0.000 | 0.000 | 0.000 | 0.000 | 0.000 | 0.000 | 0.000 | 100.000 |
| BRTHA2005956 | 0.000 | 0.000 | 0.000 | 0.000 | 0.000 | 0.000 | 0.000 | 0.000 | 0.000 | 0.000 | 0.000 | 0.000 | 100.000 |
| BRTHA2006075 | 0.000 | 0.000 | 0.000 | 0.000 | 0.000 | 0.000 | 0.000 | 0.000 | 0.000 | 0.000 | 0.000 | 0.000 | 100.000 |
| BRTHA2006146 | 0.000 | 0.000 | 0.000 | 0.000 | 0.000 | 0.000 | 0.000 | 0.000 | 0.000 | 0.000 | 0.000 | 0.000 | 100.000 |
| BRTHA2006194 | 0.000 | 0.000 | 0.000 | 0.000 | 0.000 | 0.000 | 0.000 | 0.000 | 0.000 | 0.000 | 0.000 | 0.000 | 100.000 |
| BRTHA2007122 | 0.000 | 0.000 | 0.000 | 0.000 | 0.000 | 0.000 | 0.000 | 0.000 | 0.000 | 0.000 | 0.000 | 0.000 | 100.000 |
| BRTHA2007422 | 0.000 | 0.000 | 0.000 | 0.000 | 0.000 | 0.000 | 0.000 | 0.000 | 0.000 | 0.000 | 0.000 | 0.000 | 100.000 |
| BRTHA2007603 | 0.000 | 0.000 | 0.000 | 0.000 | 0.000 | 0.000 | 0.000 | 0.000 | 0.000 | 0.000 | 0.000 | 0.000 | 100.000 |
| BRTHA2008316 | 0.000 | 0.000 | 0.000 | 0.000 | 0.000 | 0.000 | 0.000 | 0.000 | 0.000 | 0.000 | 0.000 | 0.000 | 100.000 |
| BRTHA2008335 | 0.000 | 0.000 | 0.000 | 0.000 | 0.000 | 0.000 | 16.281 | 0.000 | 0.000 | 8.305 | 0.000 | 0.000 | 9.028 |
| BRTHA2008527 | 0.000 | 0.000 | 0.000 | 0.000 | 0.000 | 0.000 | 0.000 | 0.000 | 0.000 | 0.000 | 0.000 | 0.000 | 100.000 |
| BRTHA2008535 | 0.000 | 0.000 | 0.000 | 0.000 | 0.000 | 0.000 | 0.000 | 0.000 | 0.000 | 0.000 | 0.000 | 0.000 | 100.000 |
| BRTHA2008955 | 0.000 | 0.000 | 0.000 | 39.025 | 0.000 | 0.000 | 0.000 | 0.000 | 0.000 | 0.000 | 0.000 | 0.000 | 60.975 |
| BRTHA2009311 | 0.000 | 0.000 | 0.000 | 0.000 | 0.000 | 0.000 | 0.000 | 0.000 | 0.000 | 0.000 | 0.000 | 0.000 | 100.000 |
| BRTHA2009846 | 0.000 | 0.000 | 0.000 | 0.000 | 0.000 | 0.000 | 0.000 | 0.000 | 0.000 | 0.000 | 0.000 | 0.000 | 100.000 |
| BRTHA2009972 | 0.000 | 0.000 | 0.000 | 0.000 | 0.000 | 0.000 | 0.000 | 0.000 | 0.000 | 0.000 | 0.000 | 0.000 | 100.000 |
| BRTHA2010073 | 0.000 | 0.000 | 0.000 | 0.000 | 0.000 | 0.000 | 0.000 | 0.000 | 0.000 | 0.000 | 0.000 | 0.000 | 100.000 |
| BRTHA2010608 | 0.000 | 0.000 | 0.000 | 0.000 | 0.000 | 0.000 | 0.000 | 0.000 | 0.000 | 0.000 | 0.000 | 0.000 | 48.181 |
| BRTHA2010884 | 0.000 | 0.000 | 0.000 | 0.000 | 0.000 | 0.000 | 0.000 | 0.000 | 0.000 | 0.000 | 0.000 | 0.000 | 100.000 |
| BRTHA2010907 | 0.000 | 0.000 | 0.000 | 0.000 | 0.000 | 0.000 | 0.000 | 0.000 | 0.000 | 0.000 | 0.000 | 0.000 | 100.000 |
| BRTHA2011194 | 0.000 | 0.000 | 0.000 | 39.025 | 0.000 | 0.000 | 0.000 | 0.000 | 0.000 | 0.000 | 0.000 | 0.000 | 60.975 |
| BRTHA2011351 | 0.000 | 0.000 | 0.000 | 0.000 | 0.000 | 0.000 | 0.000 | 0.000 | 0.000 | 0.000 | 0.000 | 0.000 | 100.000 |
| BRTHA2011500 | 0.000 | 0.000 | 0.000 | 0.000 | 0.000 | 0.000 | 0.000 | 0.000 | 0.000 | 0.000 | 0.000 | 0.000 | 100.000 |
| BRTHA2011641 | 0.000 | 0.000 | 0.000 | 0.000 | 0.000 | 47.605 | 0.000 | 0.000 | 0.000 | 0.000 | 0.000 | 0.000 | 52.395 |
| BRTHA2012392 | 0.000 | 0.000 | 0.000 | 0.000 | 0.000 | 0.000 | 0.000 | 0.000 | 0.000 | 0.000 | 0.000 | 0.000 | 38.390 |
| BRTHA2012562 | 0.000 | 0.000 | 0.000 | 0.000 | 0.000 | 0.000 | 0.000 | 0.000 | 0.000 | 0.000 | 0.000 | 0.000 | 100.000 |
| BRTHA2012980 | 0.000 | 0.000 | 0.000 | 0.000 | 0.000 | 0.000 | 0.000 | 0.000 | 0.000 | 0.000 | 0.000 | 0.000 | 13.890 |
| BRTHA2013262 | 0.000 | 0.000 | 0.000 | 0.000 | 0.000 | 0.000 | 0.000 | 0.000 | 0.000 | 0.000 | 0.000 | 0.000 | 100.000 |
| BRTHA2013460 | 0.000 | 0.000 | 0.000 | 0.000 | 0.000 | 0.000 | 0.000 | 0.000 | 0.000 | 0.000 | 0.000 | 0.000 | 100.000 |
| BRTHA2013707 | 0.000 | 0.000 | 0.000 | 0.000 | 0.000 | 0.000 | 0.000 | 0.000 | 0.000 | 0.000 | 0.000 | 0.000 | 100.000 |
| BRTHA2014792 | 0.000 | 0.000 | 0.000 | 0.000 | 0.000 | 0.000 | 0.000 | 0.000 | 0.000 | 0.000 | 0.000 | 0.000 | 100.000 |
| BRTHA2014828 | 0.000 | 0.000 | 0.000 | 0.000 | 0.000 | 0.000 | 0.000 | 0.000 | 0.000 | 0.000 | 0.000 | 0.000 | 100.000 |
| BRTHA2015406 | 0.000 | 0.000 | 0.000 | 0.000 | 0.000 | 0.000 | 0.000 | 0.000 | 0.000 | 0.000 | 0.000 | 0.000 | 100.000 |
| BRTHA2015478 | 0.000 | 0.000 | 0.000 | 0.000 | 0.000 | 0.000 | 0.000 | 0.000 | 0.000 | 0.000 | 0.000 | 0.000 | 100.000 |
| BRTHA2015696 | 0.000 | 0.000 | 0.000 | 0.000 | 0.000 | 0.000 | 0.000 | 0.000 | 0.000 | 0.000 | 0.000 | 0.000 | 100.000 |
| BRTHA2015878 | 0.000 | 0.000 | 0.000 | 0.000 | 0.000 | 0.000 | 0.000 | 0.000 | 0.000 | 0.000 | 0.000 | 0.000 | 100.000 |
| BRTHA2016215 | 0.000 | 0.000 | 0.000 | 0.000 | 0.000 | 0.000 | 0.000 | 0.000 | 0.000 | 0.000 | 0.000 | 0.000 | 38.930 |
| BRTHA2016496 | 0.000 | 0.000 | 0.000 | 0.000 | 0.000 | 0.000 | 0.000 | 0.000 | 0.000 | 0.000 | 0.000 | 0.000 | 100.000 |
| BRTHA2016543 | 0.000 | 0.000 | 0.000 | 0.000 | 0.000 | 0.000 | 0.000 | 0.000 | 0.000 | 0.000 | 0.000 | 0.000 | 100.000 |
| BRTHA2017353 | 0.000 | 0.000 | 0.000 | 0.000 | 0.000 | 0.000 | 0.000 | 0.000 | 0.000 | 0.000 | 0.000 | 0.000 | 100.000 |
| BRTHA2017985 | 0.000 | 0.000 | 0.000 | 0.000 | 0.000 | 0.000 | 0.000 | 0.000 | 0.000 | 0.000 | 0.000 | 0.000 | 49.749 |
| BRTHA2018165 | 0.000 | 0.000 | 0.000 | 0.000 | 0.000 | 0.000 | 0.000 | 0.000 | 0.000 | 0.000 | 0.000 | 0.000 | 100.000 |
| BRTHA2018344 | 0.000 | 0.000 | 0.000 | 0.000 | 0.000 | 0.000 | 0.000 | 0.000 | 0.000 | 0.000 | 0.000 | 0.000 | 100.000 |
| BRTHA2018591 | 0.000 | 0.000 | 0.000 | 0.000 | 0.000 | 0.000 | 0.000 | 0.000 | 0.000 | 0.000 | 0.000 | 0.000 | 100.000 |
| BRTHA2018624 | 0.000 | 0.000 | 0.000 | 0.000 | 0.000 | 0.000 | 0.000 | 0.000 | 0.000 | 0.000 | 0.000 | 0.000 | 100.000 |
| BRTHA2018707 | 0.000 | 0.000 | 0.000 | 0.000 | 0.000 | 0.000 | 0.000 | 0.000 | 0.000 | 0.000 | 0.000 | 0.000 | 57.080 |
| BRTHA2019014 | 0.000 | 0.000 | 0.000 | 0.000 | 0.000 | 0.000 | 0.000 | 0.000 | 0.000 | 0.000 | 0.000 | 0.000 | 100.000 |
| BRTHA2019022 | 0.000 | 0.000 | 0.000 | 0.000 | 0.000 | 0.000 | 0.000 | 0.000 | 0.000 | 0.000 | 0.000 | 0.000 | 100.000 |
| BRTHA2019048 | 0.000 | 0.000 | 0.000 | 0.000 | 0.000 | 0.000 | 0.000 | 0.000 | 0.000 | 0.000 | 0.000 | 0.000 | 100.000 |
| BRTHA3000273 | 0.000 | 0.000 | 0.000 | 0.000 | 0.000 | 0.000 | 0.000 | 0.000 | 0.000 | 0.000 | 0.000 | 0.000 | 57.080 |
| BRTHA3000297 | 0.000 | 0.000 | 0.000 | 0.000 | 0.000 | 0.000 | 0.000 | 0.000 | 0.000 | 47.917 | 0.000 | 0.000 | 52.083 |
| BRTHA3000633 | 0.000 | 0.000 | 0.000 | 0.000 | 0.000 | 0.000 | 0.000 | 0.000 | 0.000 | 0.000 | 0.000 | 0.000 | 37.898 |
| BRTHA3001721 | 0.000 | 0.000 | 14.633 | 8.360 | 0.000 | 23.737 | 0.000 | 0.000 | 0.000 | 12.017 | 0.000 | 0.000 | 13.062 |
| BRTHA3002401 | 0.000 | 0.000 | 0.000 | 0.000 | 0.000 | 0.000 | 0.000 | 0.000 | 0.000 | 0.000 | 0.000 | 0.000 | 100.000 |
| BRTHA3002427 | 0.000 | 0.000 | 3.551 | 2.029 | 0.000 | 5.761 | 8.577 | 0.000 | 10.128 | 2.917 | 10.641 | 10.308 | 15.852 |
| BRTHA3002933 | 0.000 | 0.000 | 0.000 | 0.000 | 0.000 | 0.000 | 0.000 | 0.000 | 0.000 | 0.000 | 0.000 | 0.000 | 100.000 |
| BRTHA3003074 | 0.000 | 0.000 | 0.000 | 0.000 | 0.000 | 0.000 | 0.000 | 0.000 | 0.000 | 0.000 | 0.000 | 0.000 | 37.459 |
| BRTHA3003343 | 0.000 | 0.000 | 0.000 | 0.000 | 0.000 | 0.000 | 0.000 | 0.000 | 0.000 | 0.000 | 0.000 | 0.000 | 100.000 |
| BRTHA3003449 | 0.000 | 0.000 | 0.000 | 0.000 | 0.000 | 0.000 | 0.000 | 0.000 | 0.000 | 0.000 | 0.000 | 0.000 | 100.000 |
| BRTHA3003474 | 0.000 | 0.000 | 0.000 | 0.000 | 0.000 | 0.000 | 0.000 | 0.000 | 0.000 | 0.000 | 0.000 | 0.000 | 100.000 |
| BRTHA3003490 | 0.000 | 0.000 | 8.067 | 2.304 | 0.000 | 0.000 | 1.623 | 3.724 | 0.000 | 0.000 | 0.000 | 0.000 | 1.800 |
| BRTHA3004475 | 0.000 | 0.000 | 0.000 | 0.000 | 0.000 | 47.605 | 0.000 | 0.000 | 0.000 | 0.000 | 0.000 | 0.000 | 52.395 |
| 8RTHA3005046 | 0.000 | 0.000 | 0.000 | 0.000 | 0.000 | 0.000 | 0.000 | 0.000 | 0.000 | 47.917 | 0.000 | 0.000 | 52.083 |
| BRTHA3006856 | 0.000 | 0.000 | 0.000 | 0.000 | 0.000 | 0.000 | 0.000 | 0.000 | 0.000 | 0.000 | 0.000 | 0.000 | 100.000 |
| BRTHA3007113 | 0.000 | 0.000 | 0.000 | 0.000 | 0.000 | 0.000 | 0.000 | 0.000 | 0.000 | 0.000 | 0.000 | 0.000 | 100.000 |
| BRTHA3007148 | 0.000 | 0.000 | 0.000 | 0.000 | 0.000 | 0.000 | 0.000 | 0.000 | 0.000 | 0.000 | 0.000 | 0.000 | 100.000 |
| BRTHA3007319 | 0.000 | 0.000 | 0.000 | 0.000 | 0.000 | 0.000 | 0.000 | 0.000 | 0.000 | 0.000 | 0.000 | 0.000 | 100.000 |
| BRTHA3007769 | 0.000 | 0.000 | 0.000 | 0.000 | 0.000 | 0.000 | 0.000 | 0.000 | 0.000 | 0.000 | 0.000 | 0.000 | 100.000 |
| BRTHA3008143 | 0.000 | 0.000 | 0.000 | 0.000 | 0.000 | 0.000 | 0.000 | 0.000 | 0.000 | 0.000 | 0.000 | 0.000 | 100.000 |
| BRTHA3008310 | 0.000 | 0.000 | 0.000 | 0.000 | 0.000 | 0.000 | 0.000 | 0.000 | 0.000 | 0.000 | 0.000 | 0.000 | 100.000 |
| BRTHA3008386 | 0.000 | 0.000 | 0.000 | 0.000 | 0.000 | 0.000 | 0.000 | 0.000 | 0.000 | 0.000 | 0.000 | 0.000 | 100.000 |
| BRTHA3008520 | 0.000 | 0.000 | 0.000 | 0.000 | 0.000 | 0.000 | 47.417 | 0.000 | 0.000 | 0.000 | 0.000 | 0.000 | 52.583 |
| BRTHA3008778 | 0.000 | 0.000 | 30.863 | 0.000 | 0.000 | 0.000 | 0.000 | 0.000 | 0.000 | 25.346 | 0.000 | 0.000 | 27.551 |
| BRTHA3009037 | 0.000 | 0.000 | 0.000 | 0.000 | 0.000 | 0.000 | 0.000 | 0.000 | 0.000 | 0.000 | 0.000 | 0.000 | 100.000 |
| BRTHA3009090 | 0.000 | 29.341 | 0.000 | 8.354 | 0.000 | 11.859 | 0.000 | 0.000 | 0.000 | 12.008 | 0.000 | 0.000 | 13.052 |
| BRTHA3009291 | 0.000 | 0.000 | 0.000 | 0.000 | 0.000 | 0.000 | 0.000 | 0.000 | 0.000 | 0.000 | 0.000 | 0.000 | 100.000 |
| BRTHA3010366 | 0.000 | 0.000 | 0.000 | 0.000 | 0.000 | 0.000 | 0.000 | 0.000 | 0.000 | 0.000 | 0.000 | 0.000 | 100.000 |
| BRTHA3013884 | 0.000 | 0.000 | 0.000 | 0.000 | 0.000 | 0.000 | 0.000 | 0.000 | 0.000 | 0.000 | 0.000 | 0.000 | 100.000 |
| BRTHA3015815 | 0.000 | 0.000 | 0.000 | 0.000 | 0.000 | 0.000 | 0.000 | 0.000 | 0.000 | 0.000 | 0.000 | 0.000 | 100.000 |
| BRTHA3015910 | 0.000 | 0.000 | 0.000 | 0.000 | 0.000 | 0.000 | 0.000 | 0.000 | 0.000 | 15.221 | 0.000 | 0.000 | 33.089 |
| BRTHA3016845 | 0.000 | 0.000 | 0.000 | 0.000 | 0.000 | 0.000 | 0.000 | 0.000 | 0.000 | 0.000 | 0.000 | 0.000 | 100.000 |
| BRTHA3016917 | 0.000 | 0.000 | 0.000 | 0.000 | 0.000 | 0.000 | 0.000 | 0.000 | 0.000 | 0.000 | 0.000 | 0.000 | 100.000 |
| BRTHA3017047 | 0.000 | 0.000 | 0.000 | 0.000 | 0.000 | 0.000 | 0.000 | 0.000 | 0.000 | 0.000 | 0.000 | 0.000 | 100.000 |
| BRTHA3017589 | 0.000 | 0.000 | 0.000 | 0.000 | 0.000 | 0.000 | 0.000 | 0.000 | 0.000 | 0.000 | 0.000 | 0.000 | 100.000 |
| BRTHA3017848 | 0.000 | 0.000 | 0.000 | 0.000 | 0.000 | 0.000 | 47.417 | 0.000 | 0.000 | 0.000 | 0.000 | 0.000 | 52.583 |
| BRTHA3018514 | 0.000 | 0.000 | 0.000 | 0.000 | 0.000 | 0.000 | 0.000 | 0.000 | 0.000 | 0.000 | 0.000 | 0.000 | 100.000 |
| BRTHA3018617 | 0.000 | 0.000 | 0.000 | 0.000 | 0.000 | 0.000 | 0.000 | 0.000 | 0.000 | 0.000 | 0.000 | 0.000 | 100.000 |
| BRTHA3018656 | 0.000 | 0.000 | 0.000 | 0.000 | 0.000 | 0.000 | 0.000 | 0.000 | 0.000 | 0.000 | 0.000 | 0.000 | 100.000 |
| BRTHA3019105 | 0.000 | 0.000 | 0.000 | 0.000 | 0.000 | 0.000 | 0.000 | 0.000 | 0.000 | 0.000 | 0.000 | 0.000 | 100.000 |
| COLON2001721 | 0.000 | 0.000 | 0.000 | 19.633 | 0.000 | 11.149 | 11.065 | 0.000 | 0.000 | 5.644 | 0.000 | 0.000 | 0.000 |
| CTONG1000087 | 1.932 | 2.607 | 1.299 | 0.000 | 0.000 | 3.161 | 0.000 | 2.399 | 0.000 | 1.067 | 0.000 | 0.000 | 3.479 |
| CTONG1000088 | 0.000 | 0.000 | 0.000 | 0.000 | 0.000 | 0.000 | 0.000 | 0.000 | 0.000 | 2.981 | 0.000 | 0.000 | 0.000 |
| CTONG1000467 | 0.000 | 0.000 | 0.000 | 0.000 | 0.000 | 0.000 | 0.000 | 0.000 | 30.440 | 8.766 | 0.000 | 0.000 | 0.000 |
| CTONG2000042 | 0.000 | 0.000 | 0.000 | 0.000 | 0.000 | 0.000 | 0.000 | 0.000 | 0.000 | 3.574 | 0.000 | 0.000 | 0.000 |
| CTONG2008233 | 1.269 | 1.712 | 2.559 | 3.412 | 0.000 | 0.692 | 0.000 | 1.575 | 2.433 | 0.701 | 0.000 | 0.000 | 3.046 |
| CTONG2009423 | 0.000 | 0.000 | 0.000 | 0.000 | 0.000 | 0.000 | 0.000 | 0.000 | 0.000 | 35.391 | 0.000 | 0.000 | 0.000 |
| CTONG2017500 | 0.000 | 0.000 | 3.291 | 0.000 | 0.000 | 2.669 | 2.649 | 0.000 | 0.000 | 0.000 | 0.000 | 0.000 | 2.938 |
| CTONG2019248 | 27.950 | 0.000 | 0.000 | 0.000 | 0.000 | 0.000 | 0.000 | 0.000 | 0.000 | 0.000 | 0.000 | 0.000 | 0.000 |
| CTONG2019788 | 0.000 | 0.000 | 3.798 | 0.000 | 0.000 | 0.000 | 0.000 | 0.000 | 0.000 | 3.120 | 0.000 | 0.000 | 3.391 |
| CTONG2020522 | 42.337 | 0.000 | 0.000 | 0.000 | 0.000 | 0.000 | 0.000 | 0.000 | 0.000 | 0.000 | 0.000 | 0.000 | 0.000 |
| CTONG2023021 | 0.000 | 0.000 | 0.000 | 0.000 | 0.000 | 0.000 | 0.000 | 0.000 | 0.000 | 0.000 | 0.000 | 0.000 | 37.320 |
| CTONG2028124 | 1.857 | 2.506 | 1.249 | 2.854 | 0.000 | 0.506 | 0.503 | 2.306 | 1.780 | 1.026 | 0.000 | 0.000 | 1.672 |
| CTONG3000657 | 0.000 | 0.000 | 0.000 | 5.508 | 0.000 | 0.000 | 3.880 | 8.901 | 0.000 | 11.875 | 0.000 | 0.000 | 8.605 |
| CTONG3001123 | 0.000 | 0.000 | 0.000 | 0.000 | 0.000 | 0.000 | 7.847 | 0.000 | 0.000 | 0.000 | 0.000 | 0.000 | 0.000 |
| CTONG3001370 | 0.000 | 0.000 | 0.000 | 0.000 | 0.000 | 0.000 | 0.000 | 0.000 | 0.000 | 3.574 | 0.000 | 0.000 | 0.000 |
| CTONG3002412 | 0.000 | 0.000 | 0.000 | 0.000 | 0.000 | 0.000 | 0.000 | 0.000 | 0.000 | 10.918 | 0.000 | 0.000 | 0.000 |
| CTONG3004072 | 0.000 | 0.000 | 0.000 | 0.000 | 0.000 | 0.000 | 0.000 | 0.000 | 0.000 | 19.915 | 0.000 | 0.000 | 0.000 |
| CTONG3005813 | 0.000 | 0.000 | 0.000 | 27.592 | 0.000 | 0.000 | 0.000 | 0.000 | 0.000 | 0.000 | 0.000 | 0.000 | 0.000 |
| CTONG3008894 | 2.686 | 0.000 | 12.642 | 1.032 | 0.000 | 4.395 | 0.000 | 0.000 | 0.000 | 2.966 | 0.000 | 0.000 | 2.418 |
| CTONG3009028 | 0.000 | 0.000 | 0.000 | 0.000 | 0.000 | 0.000 | 0.000 | 0.000 | 0.000 | 0.000 | 0.000 | 0.000 | 1.785 |
| CTONG3009239 | 8.002 | 0.000 | 0.000 | 0.000 | 0.000 | 4.364 | 0.000 | 0.000 | 5.115 | 2.946 | 0.000 | 0.000 | 1.601 |
| CTONG3009328 | 0.000 | 0.000 | 0.000 | 0.000 | 43.334 | 0.000 | 11.993 | 0.000 | 0.000 | 0.000 | 0.000 | 0.000 | 0.000 |
| DFNES2000146 | 20.566 | 0.000 | 13.829 | 0.000 | 0.000 | 0.000 | 0.000 | 0.000 | 0.000 | 0.000 | 0.000 | 0.000 | 0.000 |
| DFNES2011239 | 13.804 | 0.000 | 0.000 | 0.000 | 0.000 | 0.000 | 0.000 | 0.000 | 0.000 | 0.000 | 0.000 | 0.000 | 0.000 |
| DFNES2011499 | 0.000 | 0.000 | 0.000 | 4.403 | 0.000 | 0.000 | 0.000 | 0.000 | 0.000 | 6.330 | 0.000 | 0.000 | 0.000 |
| FCBBF1000297 | 100.000 | 0.000 | 0.000 | 0.000 | 0.000 | 0.000 | 0.000 | 0.000 | 0.000 | 0.000 | 0.000 | 0.000 | 0.000 |
| FCBBF2001183 | 6.110 | 4.122 | 8.217 | 5.869 | 5.975 | 9.998 | 16.537 | 3.794 | 0.000 | 11.810 | 6.155 | 0.000 | 9.169 |
| FCBBF3001977 | 13.761 | 0.000 | 9.253 | 10.573 | 0.000 | 15.010 | 7.448 | 0.000 | 0.000 | 7.599 | 0.000 | 0.000 | 0.000 |
| FCBBF3002163 | 100.000 | 0.000 | 0.000 | 0.000 | 0.000 | 0.000 | 0.000 | 0.000 | 0.000 | 0.000 | 0.000 | 0.000 | 0.000 |
| FCBBF3003435 | 33.081 | 0.000 | 0.000 | 0.000 | 0.000 | 0.000 | 0.000 | 0.000 | 0.000 | 0.000 | 0.000 | 0.000 | 0.000 |
| FCBBF3004502 | 100.000 | 0.000 | 0.000 | 0.000 | 0.000 | 0.000 | 0.000 | 0.000 | 0.000 | 0.000 | 0.000 | 0.000 | 0.000 |
| FCBBF3004847 | 60.769 | 0.000 | 0.000 | 0.000 | 0.000 | 0.000 | 0.000 | 0.000 | 0.000 | 0.000 | 0.000 | 0.000 | 0.000 |
| FCBBF3006171 | 100.000 | 0.000 | 0.000 | 0.000 | 0.000 | 0.000 | 0.000 | 0.000 | 0.000 | 0.000 | 0.000 | 0.000 | 0.000 |
| FCBBF3007242 | 100.000 | 0.000 | 0.000 | 0.000 | 0.000 | 0.000 | 0.000 | 0.000 | 0.000 | 0.000 | 0.000 | 0.000 | 0.000 |
| FCBBF3007540 | 100.000 | 0.000 | 0.000 | 0.000 | 0.000 | 0.000 | 0.000 | 0.000 | 0.000 | 0.000 | 0.000 | 0.000 | 0.000 |
| FCBBF3008944 | 100.000 | 0.000 | 0.000 | 0.000 | 0.000 | 0.000 | 0.000 | 0.000 | 0.000 | 0.000 | 0.000 | 0.000 | 0.000 |
| FCBBF3009888 | 100.000 | 0.000 | 0.000 | 0.000 | 0.000 | 0.000 | 0.000 | 0.000 | 0.000 | 0.000 | 0.000 | 0.000 | 0.000 |
| FCBBF3012170 | 100.000 | 0.000 | 0.000 | 0.000 | 0.000 | 0.000 | 0.000 | 0.000 | 0.000 | 0.000 | 0.000 | 0.000 | 0.000 |
| FCBBF3012288 | 73.865 | 0.000 | 0.000 | 0.000 | 0.000 | 0.000 | 0.000 | 0.000 | 0.000 | 0.000 | 0.000 | 0.000 | 0.000 |
| FCBBF3013307 | 100.000 | 0.000 | 0.000 | 0.000 | 0.000 | 0.000 | 0.000 | 0.000 | 0.000 | 0.000 | 0.000 | 0.000 | 0.000 |
| FCBBF3013846 | 100.000 | 0.000 | 0.000 | 0.000 | 0.000 | 0.000 | 0.000 | 0.000 | 0.000 | 0.000 | 0.000 | 0.000 | 0.000 |
| FCBBF3021576 | 15.878 | 0.000 | 10.677 | 0.000 | 0.000 | 0.000 | 0.000 | 0.000 | 0.000 | 0.000 | 0.000 | 0.000 | 19.062 |
| FCBBF3021940 | 46.137 | 0.000 | 0.000 | 0.000 | 0.000 | 0.000 | 0.000 | 0.000 | 0.000 | 0.000 | 0.000 | 0.000 | 0.000 |
| FCBBF3023443 | 100.000 | 0.000 | 0.000 | 0.000 | 0.000 | 0.000 | 0.000 | 0.000 | 0.000 | 0.000 | 0.000 | 0.000 | 0.000 |
| FCBBF3023895 | 100.000 | 0.000 | 0.000 | 0.000 | 0.000 | 0.000 | 0.000 | 0.000 | 0.000 | 0.000 | 0.000 | 0.000 | 0.000 |
| FCBBF3025730 | 36.577 | 0.000 | 24.596 | 0.000 | 0.000 | 0.000 | 0.000 | 0.000 | 0.000 | 0.000 | 0.000 | 0.000 | 0.000 |
| FCBBF3027717 | 100.000 | 0.000 | 0.000 | 0.000 | 0.000 | 0.000 | 0.000 | 0.000 | 0.000 | 0.000 | 0.000 | 0.000 | 0.000 |
| FCBBF4000076 | 100.000 | 0.000 | 0.000 | 0.000 | 0.000 | 0.000 | 0.000 | 0.000 | 0.000 | 0.000 | 0.000 | 0.000 | 0.000 |
| FEBRA1000030 | 0.000 | 40.753 | 0.000 | 0.000 | 0.000 | 0.000 | 0.000 | 0.000 | 0.000 | 0.000 | 0.000 | 0.000 | 0.000 |
| FEBRA2000253 | 0.000 | 36.491 | 36.369 | 0.000 | 0.000 | 0.000 | 0.000 | 0.000 | 0.000 | 14.934 | 0.000 | 0.000 | 0.000 |
| FEBRA2006396 | 29.698 | 20.037 | 29.955 | 5.705 | 0.000 | 0.000 | 0.000 | 0.000 | 0.000 | 0.000 | 0.000 | 0.000 | 0.000 |
| FEBRA2007544 | 4.523 | 12.206 | 9.124 | 41.703 | 0.000 | 0.000 | 14.689 | 0.000 | 0.000 | 4.995 | 0.000 | 0.000 | 2.715 |
| FEBRA2007708 | 0.000 | 21.306 | 0.000 | 6.066 | 0.000 | 0.000 | 0.000 | 0.000 | 0.000 | 0.000 | 0.000 | 0.000 | 0.000 |
| FEBRA2007793 | 0.000 | 50.083 | 49.917 | 0.000 | 0.000 | 0.000 | 0.000 | 0.000 | 0.000 | 0.000 | 0.000 | 0.000 | 0.000 |
| FEBRA2007801 | 4.561 | 6.154 | 0.000 | 1.752 | 0.000 | 0.000 | 4.937 | 0.000 | 8.745 | 7.556 | 0.000 | 0.000 | 5.475 |
| FEBRA2008287 | 0.000 | 7.348 | 3.662 | 4.184 | 0.000 | 2.970 | 0.000 | 0.000 | 0.000 | 3.007 | 0.000 | 0.000 | 6.537 |
| FEBRA2008311 | 0.000 | 100.000 | 0.000 | 0.000 | 0.000 | 0.000 | 0.000 | 0.000 | 0.000 | 0.000 | 0.000 | 0.000 | 0.000 |
| FEBRA2008360 | 37.775 | 25.486 | 25.401 | 0.000 | 0.000 | 0.000 | 0.000 | 0.000 | 0.000 | 0.000 | 0.000 | 0.000 | 11.338 |
| FEBRA2008468 | 0.000 | 100.000 | 0.000 | 0.000 | 0.000 | 0.000 | 0.000 | 0.000 | 0.000 | 0.000 | 0.000 | 0.000 | 0.000 |
| FEBRA2010719 | 0.000 | 43.257 | 21.556 | 0.000 | 0.000 | 17.484 | 0.000 | 0.000 | 0.000 | 17.703 | 0.000 | 0.000 | 0.000 |
| FEBRA2014213 | 0.000 | 9.817 | 0.000 | 0.000 | 0.000 | 0.000 | 0.000 | 0.000 | 0.000 | 0.000 | 0.000 | 0.000 | 0.000 |
| FEBRA2015588 | 0.000 | 100.000 | 0.000 | 0.000 | 0.000 | 0.000 | 0.000 | 0.000 | 0.000 | 0.000 | 0.000 | 0.000 | 0.000 |
| FEBRA2020484 | 13.507 | 63.788 | 22.706 | 0.000 | 0.000 | 0.000 | 0.000 | 0.000 | 0.000 | 0.000 | 0.000 | 0.000 | 0.000 |
| FEBRA2020582 | 42.565 | 57.435 | 0.000 | 0.000 | 0.000 | 0.000 | 0.000 | 0.000 | 0.000 | 0.000 | 0.000 | 0.000 | 0.000 |
| FEBRA2020668 | 0.000 | 100.000 | 0.000 | 0.000 | 0.000 | 0.000 | 0.000 | 0.000 | 0.000 | 0.000 | 0.000 | 0.000 | 0.000 |
| FEBRA2020886 | 0.000 | 60.446 | 15.061 | 0.000 | 0.000 | 0.000 | 12.124 | 0.000 | 0.000 | 12.369 | 0.000 | 0.000 | 0.000 |
| FEBRA2021339 | 0.000 | 79.225 | 0.000 | 0.000 | 0.000 | 0.000 | 0.000 | 0.000 | 0.000 | 0.000 | 0.000 | 0.000 | 0.000 |
| FEBRA2021571 | 0.000 | 100.000 | 0.000 | 0.000 | 0.000 | 0.000 | 0.000 | 0.000 | 0.000 | 0.000 | 0.000 | 0.000 | 0.000 |
| FEBRA2021908 | 0.000 | 100.000 | 0.000 | 0.000 | 0.000 | 0.000 | 0.000 | 0.000 | 0.000 | 0.000 | 0.000 | 0.000 | 0.000 |
| FEBRA2021966 | 7.969 | 10.753 | 0.000 | 3.062 | 0.000 | 0.000 | 0.000 | 0.000 | 0.000 | 0.000 | 0.000 | 0.000 | 0.000 |
| FEBRA2024136 | 0.000 | 28.600 | 0.000 | 0.000 | 0.000 | 0.000 | 0.000 | 0.000 | 0.000 | 0.000 | 42.701 | 0.000 | 0.000 |
| FEBRA2024150 | 0.000 | 55.970 | 0.000 | 0.000 | 0.000 | 0.000 | 0.000 | 0.000 | 0.000 | 0.000 | 0.000 | 0.000 | 0.000 |
| FEBRA2024343 | 0.000 | 100.000 | 0.000 | 0.000 | 0.000 | 0.000 | 0.000 | 0.000 | 0.000 | 0.000 | 0.000 | 0.000 | 0.000 |
| FEBRA2024744 | 0.000 | 100.000 | 0.000 | 0.000 | 0.000 | 0.000 | 0.000 | 0.000 | 0.000 | 0.000 | 0.000 | 0.000 | 0.000 |
| FEBRA2025427 | 4.579 | 24.717 | 3.079 | 0.000 | 0.000 | 4.995 | 0.000 | 0.000 | 0.000 | 0.000 | 9.226 | 0.000 | 0.000 |
| FEBRA2026984 | 0.000 | 43.714 | 0.000 | 12.446 | 0.000 | 0.000 | 0.000 | 0.000 | 0.000 | 0.000 | 0.000 | 0.000 | 0.000 |
| FEBRA2027082 | 0.000 | 100.000 | 0.000 | 0.000 | 0.000 | 0.000 | 0.000 | 0.000 | 0.000 | 0.000 | 0.000 | 0.000 | 0.000 |
| FEBRA2027297 | 0.000 | 100.000 | 0.000 | 0.000 | 0.000 | 0.000 | 0.000 | 0.000 | 0.000 | 0.000 | 0.000 | 0.000 | 0.000 |
| FEBRA2027352 | 0.000 | 100.000 | 0.000 | 0.000 | 0.000 | 0.000 | 0.000 | 0.000 | 0.000 | 0.000 | 0.000 | 0.000 | 0.000 |
| FEBRA2028366 | 0.000 | 100.000 | 0.000 | 0.000 | 0.000 | 0.000 | 0.000 | 0.000 | 0.000 | 0.000 | 0.000 | 0.000 | 0.000 |
| FEBRA2028477 | 0.000 | 100.000 | 0.000 | 0.000 | 0.000 | 0.000 | 0.000 | 0.000 | 0.000 | 0.000 | 0.000 | 0.000 | 0.000 |
| FEBRA2028618 | 9.389 | 12.669 | 6.313 | 10.821 | 0.000 | 5.121 | 5.082 | 0.000 | 0.000 | 0.000 | 0.000 | 0.000 | 0.000 |
| HCASM2007047 | 0.000 | 0.000 | 0.000 | 0.000 | 0.000 | 0.000 | 3.431 | 0.000 | 0.000 | 0.000 | 0.000 | 0.000 | 0.000 |
| HCHON2000028 | 0.000 | 0.000 | 0.000 | 0.000 | 0.000 | 0.000 | 0.000 | 0.000 | 5.620 | 1.619 | 0.000 | 0.000 | 5.278 |
| HCHON2000212 | 15.878 | 0.000 | 10.677 | 0.000 | 0.000 | 0.000 | 0.000 | 0.000 | 0.000 | 0.000 | 0.000 | 0.000 | 19.062 |
| HCHON2000244 | 1.215 | 4.920 | 0.000 | 0.934 | 0.000 | 0.663 | 0.658 | 0.000 | 0.000 | 0.671 | 0.000 | 0.000 | 0.000 |
| HCHON2000626 | 0.000 | 0.000 | 0.000 | 0.834 | 0.000 | 0.000 | 2.351 | 8.091 | 4.164 | 0.000 | 4.375 | 0.000 | 1.304 |
| HCHON2001084 | 0.000 | 0.000 | 0.000 | 0.000 | 0.000 | 0.000 | 0.000 | 5.268 | 0.000 | 0.000 | 0.000 | 0.000 | 2.546 |
| HCHON2001217 | 3.846 | 2.595 | 2.586 | 2.216 | 0.000 | 0.000 | 3.123 | 0.000 | 0.000 | 2.124 | 0.000 | 0.000 | 5.771 |
| HCHON2002676 | 0.000 | 0.000 | 0.000 | 0.000 | 0.000 | 0.000 | 13.647 | 0.000 | 0.000 | 0.000 | 0.000 | 0.000 | 0.000 |
| HCHON2005921 | 0.000 | 0.000 | 5.152 | 2.944 | 0.000 | 0.000 | 0.000 | 0.000 | 0.000 | 12.694 | 0.000 | 0.000 | 9.198 |
| HCHON2006250 | 0.000 | 0.000 | 0.000 | 0.000 | 0.000 | 0.000 | 1.565 | 0.000 | 0.000 | 0.000 | 0.000 | 0.000 | 1.735 |
| HCHON2007881 | 0.000 | 0.000 | 16.411 | 0.000 | 0.000 | 0.000 | 0.000 | 0.000 | 0.000 | 0.000 | 0.000 | 0.000 | 0.000 |
| HCHON2008112 | 0.000 | 0.000 | 0.000 | 0.000 | 0.000 | 13.736 | 0.000 | 0.000 | 0.000 | 0.000 | 0.000 | 0.000 | 0.000 |
| HEART1000074 | 0.000 | 0.000 | 2.829 | 1.078 | 0.000 | 0.000 | 0.759 | 1.742 | 0.000 | 0.000 | 0.000 | 0.000 | 0.000 |
| HEART2007031 | 0.000 | 0.000 | 0.000 | 0.000 | 0.000 | 0.000 | 0.000 | 0.000 | 0.000 | 11.593 | 0.000 | 0.000 | 12.601 |
| HHDPC1000118 | 15.487 | 5.225 | 0.000 | 0.000 | 0.000 | 0.000 | 2.096 | 0.000 | 0.000 | 6.415 | 0.000 | 0.000 | 0.000 |
| HLUNG2001996 | 0.000 | 0.000 | 0.000 | 0.000 | 0.000 | 0.000 | 0.000 | 0.000 | 0.000 | 0.000 | 0.000 | 0.000 | 23.216 |
| HLUNG2002465 | 0.000 | 0.000 | 0.000 | 0.000 | 0.000 | 4.875 | 1.209 | 2.775 | 4.285 | 3.702 | 0.000 | 0.000 | 1.341 |
| HLUNG2003003 | 0.000 | 0.000 | 0.000 | 0.000 | 0.000 | 0.000 | 0.000 | 0.000 | 0.000 | 16.306 | 0.000 | 0.000 | 0.000 |
| HSYRA2009075 | 0.000 | 0.000 | 0.000 | 0.000 | 0.000 | 1.212 | 0.000 | 0.000 | 0.000 | 0.000 | 0.000 | 0.000 | 0.000 |
| IMR322000127 | 8.585 | 11.585 | 1.924 | 4.398 | 5.597 | 10.926 | 3.098 | 0.000 | 5.488 | 3.161 | 0.000 | 0.000 | 0.000 |
| IMR322000917 | 43.645 | 0.000 | 14.674 | 0.000 | 0.000 | 0.000 | 0.000 | 0.000 | 0.000 | 0.000 | 0.000 | 0.000 | 0.000 |
| IMR322001380 | 7.324 | 9.883 | 0.000 | 2.814 | 7.163 | 11.984 | 0.000 | 9.096 | 0.000 | 2.022 | 0.000 | 21.443 | 2.198 |
| IMR322002035 | 0.000 | 0.000 | 0.000 | 0.000 | 0.000 | 0.000 | 36.176 | 0.000 | 0.000 | 0.000 | 0.000 | 0.000 | 0.000 |
| KIDNE2000665 | 3.576 | 0.000 | 2.405 | 1.374 | 0.000 | 1.951 | 0.000 | 0.000 | 0.000 | 0.000 | 0.000 | 0.000 | 0.000 |
| KIDNE2002252 | 0.000 | 0.000 | 2.708 | 0.000 | 0.000 | 0.000 | 0.000 | 0.000 | 0.000 | 0.000 | 0.000 | 0.000 | 2.417 |
| KIDNE2005543 | 0.000 | 0.000 | 0.000 | 0.000 | 0.000 | 0.000 | 0.000 | 0.000 | 0.000 | 18.168 | 0.000 | 0.000 | 19.748 |
| KIDNE2006580 | 0.000 | 0.000 | 0.000 | 14.933 | 0.000 | 7.066 | 7.013 | 0.000 | 0.000 | 14.310 | 0.000 | 0.000 | 7.777 |
| KIDNE2011314 | 0.000 | 0.000 | 0.000 | 0.000 | 0.000 | 0.000 | 0.000 | 0.000 | 0.000 | 0.000 | 0.000 | 0.000 | 24.133 |
| MESAN2006563 | 3.827 | 0.000 | 2.573 | 1.470 | 0.000 | 0.000 | 0.691 | 0.000 | 0.000 | 0.000 | 2.570 | 0.000 | 1.532 |
| MESAN2012054 | 4.713 | 0.000 | 3.169 | 5.432 | 0.000 | 0.000 | 12.754 | 0.000 | 0.000 | 15.615 | 0.000 | 0.000 | 0.000 |
| MESAN2015515 | 0.000 | 0.000 | 0.000 | 0.000 | 0.000 | 2.677 | 0.000 | 0.000 | 0.000 | 0.000 | 0.000 | 0.000 | 0.000 |
| MESTC1000042 | 0.000 | 0.000 | 0.000 | 0.797 | 0.000 | 0.000 | 2.245 | 0.000 | 0.000 | 0.000 | 0.000 | 0.000 | 0.000 |
| NB9N41000340 | 0.000 | 0.000 | 0.000 | 2.059 | 0.000 | 0.000 | 0.000 | 0.000 | 0.000 | 0.000 | 0.000 | 5.229 | 0.000 |
| NESOP2001752 | 0.000 | 0.000 | 0.000 | 3.228 | 0.000 | 0.000 | 0.000 | 0.000 | 0.000 | 0.000 | 0.000 | 0.000 | 0.000 |
| NHNPC2001223 | 6.894 | 0.000 | 0.000 | 0.000 | 0.000 | 0.000 | 0.000 | 0.000 | 0.000 | 0.000 | 0.000 | 0.000 | 0.000 |
| NOVAR2001783 | 0.000 | 0.000 | 0.000 | 0.000 | 0.000 | 0.000 | 4.027 | 0.000 | 0.000 | 0.000 | 0.000 | 0.000 | 0.000 |
| NT2NE2005890 | 0.000 | 0.000 | 0.000 | 0.000 | 0.000 | 35.735 | 0.000 | 0.000 | 0.000 | 0.000 | 0.000 | 0.000 | 0.000 |
| NT2NE2006909 | 0.527 | 0.711 | 0.000 | 0.000 | 0.000 | 0.287 | 0.285 | 1.964 | 0.000 | 0.000 | 0.000 | 0.000 | 0.000 |
| NT2NE2008060 | 0.000 | 0.000 | 25.528 | 0.000 | 0.000 | 0.000 | 0.000 | 0.000 | 0.000 | 0.000 | 0.000 | 0.000 | 0.000 |
| NT2RI2003993 | 0.000 | 9.464 | 0.000 | 0.000 | 0.000 | 0.000 | 0.000 | 0.000 | 0.000 | 0.000 | 0.000 | 0.000 | 0.000 |
| NT2RI2005166 | 0.000 | 0.000 | 0.000 | 18.511 | 0.000 | 0.000 | 0.000 | 0.000 | 0.000 | 0.000 | 0.000 | 0.000 | 0.000 |
| NT2RI2008724 | 3.393 | 0.000 | 0.000 | 0.000 | 0.000 | 1.850 | 1.836 | 0.000 | 0.000 | 1.874 | 0.000 | 0.000 | 4.073 |
| NT2RI2012659 | 0.000 | 0.000 | 0.000 | 48.128 | 0.000 | 13.665 | 13.562 | 0.000 | 0.000 | 0.000 | 0.000 | 0.000 | 0.000 |
| NT2RI2014733 | 0.000 | 0.000 | 0.000 | 0.000 | 0.000 | 0.000 | 24.938 | 0.000 | 0.000 | 0.000 | 0.000 | 0.000 | 0.000 |
| NT2RI2018311 | 0.000 | 0.000 | 0.000 | 0.000 | 0.000 | 0.000 | 0.000 | 0.000 | 0.000 | 21.918 | 0.000 | 0.000 | 0.000 |
| NT2RI2019751 | 0.000 | 0.000 | 0.000 | 28.087 | 0.000 | 0.000 | 0.000 | 0.000 | 0.000 | 0.000 | 0.000 | 0.000 | 0.000 |
| NT2RI3000622 | 0.000 | 21.343 | 0.000 | 0.000 | 0.000 | 0.000 | 0.000 | 0.000 | 0.000 | 0.000 | 0.000 | 0.000 | 0.000 |
| NT2RI3001515 | 0.000 | 0.000 | 40.364 | 0.000 | 0.000 | 21.825 | 0.000 | 0.000 | 0.000 | 11.050 | 0.000 | 0.000 | 0.000 |
| NT2RI3002842 | 0.000 | 0.000 | 0.000 | 0.000 | 0.000 | 0.000 | 0.000 | 0.000 | 0.000 | 0.000 | 0.000 | 0.000 | 20.781 |
| NT2RI3002892 | 0.000 | 4.387 | 0.000 | 9.992 | 0.000 | 1.773 | 8.799 | 4.037 | 0.000 | 16.159 | 0.000 | 0.000 | 13.661 |
| NT2RI3003382 | 0.000 | 0.000 | 0.000 | 28.087 | 0.000 | 0.000 | 0.000 | 0.000 | 0.000 | 0.000 | 0.000 | 0.000 | 0.000 |
| NT2RI3004510 | 0.000 | 0.000 | 0.000 | 20.009 | 0.000 | 0.000 | 0.000 | 0.000 | 0.000 | 28.761 | 0.000 | 0.000 | 0.000 |
| NT2RI3005403 | 0.000 | 0.000 | 0.000 | 0.000 | 0.000 | 0.000 | 0.000 | 0.000 | 0.000 | 0.000 | 0.000 | 0.000 | 37.898 |
| NT2RI3005724 | 0.000 | 0.000 | 0.000 | 42.065 | 0.000 | 5.972 | 0.000 | 0.000 | 0.000 | 12.093 | 0.000 | 0.000 | 0.000 |
| NT2RI3006284 | 0.000 | 0.000 | 0.000 | 1.469 | 0.000 | 0.000 | 4.138 | 0.000 | 0.000 | 0.000 | 0.000 | 0.000 | 0.000 |
| NT2RI3006673 | 0.000 | 0.000 | 0.000 | 0.000 | 0.000 | 10.055 | 19.959 | 0.000 | 0.000 | 10.182 | 0.000 | 0.000 | 0.000 |
| NT2RI3007291 | 0.000 | 0.000 | 0.000 | 35.535 | 0.000 | 0.000 | 0.000 | 0.000 | 0.000 | 12.770 | 0.000 | 0.000 | 0.000 |
| NT2RI3007543 | 0.000 | 0.000 | 3.162 | 1.204 | 0.000 | 0.855 | 1.697 | 0.000 | 0.000 | 0.866 | 0.000 | 3.059 | 0.000 |
| NT2RI3008055 | 0.000 | 0.000 | 0.000 | 15.678 | 0.000 | 0.000 | 44.179 | 0.000 | 0.000 | 0.000 | 0.000 | 0.000 | 0.000 |
| NT2RP7004123 | 7.090 | 0.000 | 0.000 | 1.362 | 0.000 | 0.000 | 0.000 | 4.403 | 0.000 | 0.000 | 0.000 | 0.000 | 2.128 |
| NT2RP7005529 | 0.000 | 0.000 | 0.000 | 5.240 | 0.000 | 7.439 | 14.766 | 0.000 | 0.000 | 15.065 | 0.000 | 0.000 | 0.000 |
| NT2RP7009030 | 17.773 | 0.000 | 35.854 | 0.000 | 0.000 | 0.000 | 0.000 | 0.000 | 0.000 | 0.000 | 0.000 | 0.000 | 0.000 |
| NT2RP7009147 | 0.000 | 0.000 | 1.979 | 0.000 | 0.000 | 0.000 | 14.337 | 0.000 | 5.643 | 1.625 | 0.000 | 0.000 | 3.533 |
| NT2RP7010599 | 0.000 | 0.000 | 0.000 | 22.750 | 0.000 | 0.000 | 0.000 | 0.000 | 0.000 | 0.000 | 0.000 | 0.000 | 0.000 |
| NT2RP7014005 | 0.000 | 0.000 | 0.000 | 0.000 | 0.000 | 0.000 | 5.818 | 0.000 | 0.000 | 0.000 | 0.000 | 0.000 | 0.000 |
| NT2RP7015512 | 11.941 | 0.000 | 0.000 | 0.000 | 0.000 | 0.000 | 0.000 | 0.000 | 0.000 | 0.000 | 0.000 | 0.000 | 0.000 |
| NT2RP7017474 | 0.000 | 0.000 | 0.000 | 13.360 | 0.000 | 0.000 | 18.823 | 0.000 | 0.000 | 0.000 | 0.000 | 0.000 | 0.000 |
| NTONG2000413 | 0.000 | 0.000 | 13.407 | 0.000 | 0.000 | 0.000 | 0.000 | 0.000 | 0.000 | 0.000 | 0.000 | 0.000 | 0.000 |
| NTONG2005969 | 0.000 | 8.008 | 0.000 | 4.560 | 11.607 | 6.473 | 0.000 | 14.740 | 0.000 | 0.000 | 0.000 | 0.000 | 3.562 |
| NTONG2008088 | 0.000 | 0.000 | 0.000 | 0.000 | 0.000 | 0.000 | 0.000 | 0.000 | 0.000 | 0.000 | 0.000 | 0.000 | 11.332 |
| OCBBF1000254 | 0.000 | 0.000 | 55.216 | 0.000 | 0.000 | 44.784 | 0.000 | 0.000 | 0.000 | 0.000 | 0.000 | 0.000 | 0.000 |
| OCBBF2001794 | 0.000 | 11.785 | 11.746 | 0.000 | 0.000 | 4.764 | 4.728 | 0.000 | 0.000 | 0.000 | 0.000 | 0.000 | 0.000 |
| OCBBF2002124 | 0.000 | 0.000 | 100.000 | 0.000 | 0.000 | 0.000 | 0.000 | 0.000 | 0.000 | 0.000 | 0.000 | 0.000 | 0.000 |
| OCBBF2003819 | 0.000 | 0.000 | 26.175 | 14.955 | 0.000 | 0.000 | 0.000 | 0.000 | 0.000 | 21.496 | 0.000 | 0.000 | 0.000 |
| OCBBF2004826 | 0.000 | 0.000 | 100.000 | 0.000 | 0.000 | 0.000 | 0.000 | 0.000 | 0.000 | 0.000 | 0.000 | 0.000 | 0.000 |
| OCBBF2004883 | 0.000 | 0.000 | 100.000 | 0.000 | 0.000 | 0.000 | 0.000 | 0.000 | 0.000 | 0.000 | 0.000 | 0.000 | 0.000 |
| OCBBF2005428 | 6.090 | 0.000 | 4.095 | 0.000 | 0.000 | 0.000 | 0.000 | 7.563 | 0.000 | 0.000 | 0.000 | 0.000 | 0.000 |
| OCBBF2006005 | 0.000 | 0.000 | 5.922 | 0.000 | 0.000 | 0.000 | 9.535 | 0.000 | 0.000 | 9.728 | 0.000 | 0.000 | 21.147 |
| OCBBF2006058 | 0.000 | 0.000 | 100.000 | 0.000 | 0.000 | 0.000 | 0.000 | 0.000 | 0.000 | 0.000 | 0.000 | 0.000 | 0.000 |
| OCBBF2006151 | 0.000 | 0.000 | 7.162 | 4.092 | 0.000 | 0.000 | 0.000 | 0.000 | 20.423 | 11.764 | 0.000 | 0.000 | 0.000 |
| OCBBF2006567 | 0.000 | 0.000 | 100.000 | 0.000 | 0.000 | 0.000 | 0.000 | 0.000 | 0.000 | 0.000 | 0.000 | 0.000 | 0.000 |
| OCBBF2006764 | 28.349 | 0.000 | 19.063 | 21.782 | 0.000 | 15.461 | 15.345 | 0.000 | 0.000 | 0.000 | 0.000 | 0.000 | 0.000 |
| OCBBF2007028 | 5.102 | 3.442 | 15.437 | 8.820 | 0.000 | 6.956 | 9.665 | 0.000 | 0.000 | 11.269 | 0.000 | 0.000 | 18.374 |
| OCBBF2007068 | 0.000 | 0.000 | 54.907 | 0.000 | 0.000 | 0.000 | 0.000 | 0.000 | 0.000 | 45.093 | 0.000 | 0.000 | 0.000 |
| OCBBF2007114 | 0.000 | 0.000 | 39.836 | 0.000 | 38.623 | 21.540 | 0.000 | 0.000 | 0.000 | 0.000 | 0.000 | 0.000 | 0.000 |
| OCBBF2007428 | 0.000 | 0.000 | 100.000 | 0.000 | 0.000 | 0.000 | 0.000 | 0.000 | 0.000 | 0.000 | 0.000 | 0.000 | 0.000 |
| OCBBF2007478 | 0.000 | 0.000 | 100.000 | 0.000 | 0.000 | 0.000 | 0.000 | 0.000 | 0.000 | 0.000 | 0.000 | 0.000 | 0.000 |
| OCBBF2007610 | 0.000 | 0.000 | 100.000 | 0.000 | 0.000 | 0.000 | 0.000 | 0.000 | 0.000 | 0.000 | 0.000 | 0.000 | 0.000 |
| OCBBF2008770 | 24.703 | 33.334 | 33.223 | 0.000 | 0.000 | 0.000 | 0.000 | 0.000 | 0.000 | 0.000 | 0.000 | 0.000 | 0.000 |
| OCBBF2009788 | 0.000 | 0.000 | 100.000 | 0.000 | 0.000 | 0.000 | 0.000 | 0.000 | 0.000 | 0.000 | 0.000 | 0.000 | 0.000 |
| OCBBF2009926 | 0.000 | 0.000 | 100.000 | 0.000 | 0.000 | 0.000 | 0.000 | 0.000 | 0.000 | 0.000 | 0.000 | 0.000 | 0.000 |
| OCBBF2010140 | 0.000 | 0.000 | 40.385 | 0.000 | 0.000 | 0.000 | 32.508 | 0.000 | 0.000 | 0.000 | 0.000 | 0.000 | 0.000 |
| OCBBF2010416 | 0.000 | 0.000 | 100.000 | 0.000 | 0.000 | 0.000 | 0.000 | 0.000 | 0.000 | 0.000 | 0.000 | 0.000 | 0.000 |
| OCBBF2017516 | 0.000 | 0.000 | 100.000 | 0.000 | 0.000 | 0.000 | 0.000 | 0.000 | 0.000 | 0.000 | 0.000 | 0.000 | 0.000 |
| OCBBF2019327 | 0.000 | 0.000 | 100.000 | 0.000 | 0.000 | 0.000 | 0.000 | 0.000 | 0.000 | 0.000 | 0.000 | 0.000 | 0.000 |
| OCBBF2019823 | 0.000 | 0.000 | 100.000 | 0.000 | 0.000 | 0.000 | 0.000 | 0.000 | 0.000 | 0.000 | 0.000 | 0.000 | 0.000 |
| OCBBF2020343 | 0.000 | 0.000 | 63.640 | 36.360 | 0.000 | 0.000 | 0.000 | 0.000 | 0.000 | 0.000 | 0.000 | 0.000 | 0.000 |
| OCBBF2020453 | 0.000 | 0.000 | 100.000 | 0.000 | 0.000 | 0.000 | 0.000 | 0.000 | 0.000 | 0.000 | 0.000 | 0.000 | 0.000 |
| OCBBF2020639 | 0.000 | 0.000 | 56.118 | 0.000 | 0.000 | 0.000 | 0.000 | 0.000 | 0.000 | 0.000 | 0.000 | 0.000 | 25.048 |
| OCBBF2020741 | 0.000 | 0.000 | 17.527 | 20.028 | 0.000 | 0.000 | 0.000 | 0.000 | 0.000 | 28.789 | 0.000 | 0.000 | 0.000 |
| OCBBF2020801 | 0.000 | 0.000 | 59.836 | 0.000 | 0.000 | 0.000 | 0.000 | 0.000 | 0.000 | 0.000 | 0.000 | 0.000 | 0.000 |
| OCBBF2020838 | 0.000 | 0.000 | 100.000 | 0.000 | 0.000 | 0.000 | 0.000 | 0.000 | 0.000 | 0.000 | 0.000 | 0.000 | 0.000 |
| OCBBF2021020 | 0.000 | 0.000 | 3.312 | 0.000 | 0.000 | 0.000 | 0.000 | 0.000 | 0.000 | 0.000 | 0.000 | 0.000 | 0.000 |
| OCBBF2021286 | 0.000 | 23.004 | 22.928 | 6.550 | 0.000 | 0.000 | 18.456 | 0.000 | 0.000 | 18.829 | 0.000 | 0.000 | 10.233 |
| OCBBF2021323 | 0.000 | 0.000 | 100.000 | 0.000 | 0.000 | 0.000 | 0.000 | 0.000 | 0.000 | 0.000 | 0.000 | 0.000 | 0.000 |
| OCBBF2021788 | 0.000 | 0.000 | 100.000 | 0.000 | 0.000 | 0.000 | 0.000 | 0.000 | 0.000 | 0.000 | 0.000 | 0.000 | 0.000 |
| OCBBF2022351 | 0.000 | 0.000 | 63.640 | 36.360 | 0.000 | 0.000 | 0.000 | 0.000 | 0.000 | 0.000 | 0.000 | 0.000 | 0.000 |
| OCBBF2022574 | 0.000 | 0.000 | 100.000 | 0.000 | 0.000 | 0.000 | 0.000 | 0.000 | 0.000 | 0.000 | 0.000 | 0.000 | 0.000 |
| OCBBF2023162 | 18.995 | 0.000 | 12.773 | 0.000 | 37.152 | 31.080 | 0.000 | 0.000 | 0.000 | 0.000 | 0.000 | 0.000 | 0.000 |
| OCBBF2023643 | 0.000 | 0.000 | 100.000 | 0.000 | 0.000 | 0.000 | 0.000 | 0.000 | 0.000 | 0.000 | 0.000 | 0.000 | 0.000 |
| OCBBF2024719 | 0.000 | 0.000 | 36.847 | 0.000 | 0.000 | 0.000 | 0.000 | 0.000 | 0.000 | 30.261 | 0.000 | 0.000 | 32.892 |
| OCBBF2024781 | 0.000 | 0.000 | 100.000 | 0.000 | 0.000 | 0.000 | 0.000 | 0.000 | 0.000 | 0.000 | 0.000 | 0.000 | 0.000 |
| OCBBF2024850 | 0.000 | 0.000 | 5.522 | 1.577 | 0.000 | 2.239 | 4.445 | 0.000 | 0.000 | 4.535 | 0.000 | 8.013 | 7.393 |
| OCBBF2025028 | 0.000 | 0.000 | 100.000 | 0.000 | 0.000 | 0.000 | 0.000 | 0.000 | 0.000 | 0.000 | 0.000 | 0.000 | 0.000 |
| OCBBF2025458 | 0.000 | 0.000 | 100.000 | 0.000 | 0.000 | 0.000 | 0.000 | 0.000 | 0.000 | 0.000 | 0.000 | 0.000 | 0.000 |
| OCBBF2025527 | 0.000 | 0.000 | 63.640 | 36.360 | 0.000 | 0.000 | 0.000 | 0.000 | 0.000 | 0.000 | 0.000 | 0.000 | 0.000 |
| OCBBF2025730 | 0.000 | 0.000 | 100.000 | 0.000 | 0.000 | 0.000 | 0.000 | 0.000 | 0.000 | 0.000 | 0.000 | 0.000 | 0.000 |
| OCBBF2026645 | 0.000 | 0.000 | 100.000 | 0.000 | 0.000 | 0.000 | 0.000 | 0.000 | 0.000 | 0.000 | 0.000 | 0.000 | 0.000 |
| OCBBF2027423 | 0.000 | 0.000 | 100.000 | 0.000 | 0.000 | 0.000 | 0.000 | 0.000 | 0.000 | 0.000 | 0.000 | 0.000 | 0.000 |
| OCBBF2027478 | 0.000 | 0.000 | 100.000 | 0.000 | 0.000 | 0.000 | 0.000 | 0.000 | 0.000 | 0.000 | 0.000 | 0.000 | 0.000 |
| OCBBF2028173 | 0.000 | 0.000 | 100.000 | 0.000 | 0.000 | 0.000 | 0.000 | 0.000 | 0.000 | 0.000 | 0.000 | 0.000 | 0.000 |
| OCBBF2028935 | 0.000 | 2.886 | 1.438 | 1.643 | 4.183 | 1.167 | 5.789 | 0.000 | 0.000 | 7.087 | 8.618 | 8.349 | 2.568 |
| OCBBF2029901 | 0.000 | 0.000 | 100.000 | 0.000 | 0.000 | 0.000 | 0.000 | 0.000 | 0.000 | 0.000 | 0.000 | 0.000 | 0.000 |
| OCBBF2030354 | 0.000 | 0.000 | 100.000 | 0.000 | 0.000 | 0.000 | 0.000 | 0.000 | 0.000 | 0.000 | 0.000 | 0.000 | 0.000 |
| OCBBF2030517 | 0.000 | 0.000 | 100.000 | 0.000 | 0.000 | 0.000 | 0.000 | 0.000 | 0.000 | 0.000 | 0.000 | 0.000 | 0.000 |
| OCBBF2030574 | 0.000 | 0.000 | 100.000 | 0.000 | 0.000 | 0.000 | 0.000 | 0.000 | 0.000 | 0.000 | 0.000 | 0.000 | 0.000 |
| OCBBF2030708 | 0.000 | 0.000 | 100.000 | 0.000 | 0.000 | 0.000 | 0.000 | 0.000 | 0.000 | 0.000 | 0.000 | 0.000 | 0.000 |
| OCBBF2031167 | 0.000 | 0.000 | 100.000 | 0.000 | 0.000 | 0.000 | 0.000 | 0.000 | 0.000 | 0.000 | 0.000 | 0.000 | 0.000 |
| OCBBF2031366 | 0.000 | 0.000 | 100.000 | 0.000 | 0.000 | 0.000 | 0.000 | 0.000 | 0.000 | 0.000 | 0.000 | 0.000 | 0.000 |
| OCBBF2032590 | 0.000 | 0.000 | 100.000 | 0.000 | 0.000 | 0.000 | 0.000 | 0.000 | 0.000 | 0.000 | 0.000 | 0.000 | 0.000 |
| OCBBF2032599 | 0.000 | 0.000 | 100.000 | 0.000 | 0.000 | 0.000 | 0.000 | 0.000 | 0.000 | 0.000 | 0.000 | 0.000 | 0.000 |
| OCBBF2032611 | 0.000 | 0.000 | 100.000 | 0.000 | 0.000 | 0.000 | 0.000 | 0.000 | 0.000 | 0.000 | 0.000 | 0.000 | 0.000 |
| OCBBF2032671 | 0.000 | 0.000 | 100.000 | 0.000 | 0.000 | 0.000 | 0.000 | 0.000 | 0.000 | 0.000 | 0.000 | 0.000 | 0.000 |
| OCBBF2033869 | 0.000 | 0.000 | 100.000 | 0.000 | 0.000 | 0.000 | 0.000 | 0.000 | 0.000 | 0.000 | 0.000 | 0.000 | 0.000 |
| OCBBF2035110 | 0.000 | 0.000 | 100.000 | 0.000 | 0.000 | 0.000 | 0.000 | 0.000 | 0.000 | 0.000 | 0.000 | 0.000 | 0.000 |
| OCBBF2035214 | 0.000 | 0.000 | 55.216 | 0.000 | 0.000 | 44.784 | 0.000 | 0.000 | 0.000 | 0.000 | 0.000 | 0.000 | 0.000 |
| OCBBF2035564 | 0.000 | 0.000 | 100.000 | 0.000 | 0.000 | 0.000 | 0.000 | 0.000 | 0.000 | 0.000 | 0.000 | 0.000 | 0.000 |
| OCBBF2035885 | 0.000 | 0.000 | 100.000 | 0.000 | 0.000 | 0.000 | 0.000 | 0.000 | 0.000 | 0.000 | 0.000 | 0.000 | 0.000 |
| OCBBF2035916 | 0.000 | 0.000 | 100.000 | 0.000 | 0.000 | 0.000 | 0.000 | 0.000 | 0.000 | 0.000 | 0.000 | 0.000 | 0.000 |
| OCBBF2036476 | 0.000 | 0.000 | 100.000 | 0.000 | 0.000 | 0.000 | 0.000 | 0.000 | 0.000 | 0.000 | 0.000 | 0.000 | 0.000 |
| OCBBF2036743 | 0.000 | 0.000 | 27.462 | 15.690 | 0.000 | 11.137 | 11.053 | 0.000 | 0.000 | 0.000 | 0.000 | 0.000 | 12.257 |
| OCBBF2037068 | 0.000 | 0.000 | 18.587 | 0.000 | 0.000 | 0.000 | 0.000 | 0.000 | 0.000 | 0.000 | 0.000 | 0.000 | 0.000 |
| OCBBF2037340 | 0.000 | 0.000 | 100.000 | 0.000 | 0.000 | 0.000 | 0.000 | 0.000 | 0.000 | 0.000 | 0.000 | 0.000 | 0.000 |
| OCBBF2037398 | 0.000 | 0.000 | 100.000 | 0.000 | 0.000 | 0.000 | 0.000 | 0.000 | 0.000 | 0.000 | 0.000 | 0.000 | 0.000 |
| OCBBF2037547 | 0.000 | 0.000 | 100.000 | 0.000 | 0.000 | 0.000 | 0.000 | 0.000 | 0.000 | 0.000 | 0.000 | 0.000 | 0.000 |
| OCBBF2037598 | 0.000 | 0.000 | 100.000 | 0.000 | 0.000 | 0.000 | 0.000 | 0.000 | 0.000 | 0.000 | 0.000 | 0.000 | 0.000 |
| OCBBF2037638 | 0.000 | 0.000 | 100.000 | 0.000 | 0.000 | 0.000 | 0.000 | 0.000 | 0.000 | 0.000 | 0.000 | 0.000 | 0.000 |
| OCBBF2038317 | 0.000 | 0.000 | 12.245 | 0.000 | 0.000 | 0.000 | 19.713 | 0.000 | 0.000 | 0.000 | 0.000 | 0.000 | 10.930 |
| OCBBF3000296 | 0.000 | 0.000 | 47.069 | 0.000 | 0.000 | 0.000 | 0.000 | 0.000 | 0.000 | 19.328 | 0.000 | 0.000 | 0.000 |
| OCBBF3000483 | 7.373 | 0.000 | 9.916 | 14.163 | 0.000 | 4.021 | 11.973 | 0.000 | 0.000 | 8.143 | 0.000 | 0.000 | 0.000 |
| OCBBF3002553 | 0.000 | 0.000 | 100.000 | 0.000 | 0.000 | 0.000 | 0.000 | 0.000 | 0.000 | 0.000 | 0.000 | 0.000 | 0.000 |
| OCBBF3002600 | 0.000 | 0.000 | 100.000 | 0.000 | 0.000 | 0.000 | 0.000 | 0.000 | 0.000 | 0.000 | 0.000 | 0.000 | 0.000 |
| OCBBF3003320 | 59.793 | 0.000 | 40.207 | 0.000 | 0.000 | 0.000 | 0.000 | 0.000 | 0.000 | 0.000 | 0.000 | 0.000 | 0.000 |
| OCBBF3003592 | 0.000 | 0.000 | 100.000 | 0.000 | 0.000 | 0.000 | 0.000 | 0.000 | 0.000 | 0.000 | 0.000 | 0.000 | 0.000 |
| OCBBF3004314 | 0.000 | 0.000 | 100.000 | 0.000 | 0.000 | 0.000 | 0.000 | 0.000 | 0.000 | 0.000 | 0.000 | 0.000 | 0.000 |
| OCBBF3006802 | 0.000 | 0.000 | 100.000 | 0.000 | 0.000 | 0.000 | 0.000 | 0.000 | 0.000 | 0.000 | 0.000 | 0.000 | 0.000 |
| OCBBF3007516 | 0.000 | 0.000 | 4.698 | 2.684 | 0.000 | 0.000 | 0.000 | 0.000 | 0.000 | 0.000 | 0.000 | 0.000 | 0.000 |
| OCBBF3008230 | 0.000 | 0.000 | 37.069 | 0.000 | 0.000 | 0.000 | 29.840 | 0.000 | 0.000 | 0.000 | 0.000 | 0.000 | 33.091 |
| OCBBF3009279 | 0.000 | 0.000 | 100.000 | 0.000 | 0.000 | 0.000 | 0.000 | 0.000 | 0.000 | 0.000 | 0.000 | 0.000 | 0.000 |
| PEBLM2004666 | 0.000 | 0.000 | 0.000 | 0.000 | 0.000 | 3.744 | 3.715 | 0.000 | 0.000 | 0.000 | 0.000 | 0.000 | 0.000 |
| PERIC2000889 | 0.000 | 0.000 | 0.000 | 6.314 | 0.000 | 8.963 | 0.000 | 0.000 | 0.000 | 0.000 | 0.000 | 0.000 | 0.000 |
| PERIC2002766 | 0.000 | 0.000 | 15.571 | 0.000 | 0.000 | 0.000 | 0.000 | 0.000 | 0.000 | 0.000 | 0.000 | 0.000 | 0.000 |
| PERIC2003720 | 0.000 | 0.000 | 0.000 | 0.000 | 0.000 | 13.012 | 0.000 | 0.000 | 0.000 | 0.000 | 0.000 | 0.000 | 0.000 |
| PLACE6001185 | 0.000 | 0.000 | 0.000 | 15.159 | 0.000 | 0.000 | 21.358 | 0.000 | 0.000 | 0.000 | 0.000 | 0.000 | 0.000 |
| PLACE6019385 | 0.000 | 0.000 | 5.039 | 0.000 | 0.000 | 0.000 | 0.000 | 0.000 | 0.000 | 0.000 | 0.000 | 0.000 | 0.000 |
| PUAEN2002489 | 24.108 | 0.000 | 8.106 | 9.262 | 0.000 | 0.000 | 0.000 | 0.000 | 0.000 | 0.000 | 0.000 | 0.000 | 21.707 |
| PUAEN2005930 | 0.000 | 0.000 | 0.000 | 0.000 | 0.000 | 0.000 | 18.362 | 0.000 | 0.000 | 9.367 | 0.000 | 0.000 | 10.181 |
| PUAEN2006701 | 0.000 | 0.000 | 0.000 | 0.000 | 8.128 | 0.000 | 2.249 | 0.000 | 15.938 | 2.295 | 0.000 | 0.000 | 0.000 |
| PUAEN2007044 | 0.000 | 0.000 | 3.561 | 5.087 | 0.000 | 1.444 | 8.600 | 0.000 | 0.000 | 0.000 | 0.000 | 0.000 | 1.590 |
| PUAEN2009174 | 0.000 | 0.000 | 0.000 | 0.000 | 0.000 | 2.856 | 0.000 | 0.000 | 0.000 | 0.000 | 0.000 | 0.000 | 0.000 |
| PUAEN2009655 | 0.000 | 0.000 | 0.000 | 0.000 | 0.000 | 0.000 | 18.275 | 0.000 | 0.000 | 7.458 | 0.000 | 0.000 | 0.000 |
| RECTM2001347 | 0.000 | 0.000 | 5.153 | 0.000 | 0.000 | 0.000 | 0.000 | 0.000 | 0.000 | 0.000 | 0.000 | 0.000 | 4.600 |
| SKMUS2000757 | 0.000 | 0.000 | 0.000 | 0.000 | 0.000 | 0.000 | 0.000 | 0.000 | 0.000 | 0.000 | 0.000 | 0.000 | 5.480 |
| SKNMC2002402 | 0.000 | 0.000 | 9.158 | 0.000 | 0.000 | 7.428 | 0.000 | 0.000 | 0.000 | 0.000 | 0.000 | 0.000 | 0.000 |
| SKNSH2000482 | 0.000 | 0.000 | 0.000 | 0.000 | 0.000 | 9.821 | 0.000 | 0.000 | 0.000 | 0.000 | 0.000 | 0.000 | 0.000 |
| SMINT2001818 | 0.000 | 0.000 | 0.000 | 0.000 | 3.387 | 0.000 | 0.000 | 0.000 | 0.000 | 0.000 | 0.000 | 0.000 | 0.000 |
| SPLEN2001599 | 0.000 | 17.788 | 0.000 | 0.000 | 0.000 | 7.190 | 0.000 | 0.000 | 0.000 | 0.000 | 0.000 | 0.000 | 0.000 |
| SPLEN2002467 | 6.019 | 0.000 | 4.047 | 0.000 | 0.000 | 6.565 | 0.000 | 0.000 | 0.000 | 0.000 | 0.000 | 0.000 | 0.000 |
| SPLEN2006122 | 0.000 | 2.099 | 0.000 | 0.000 | 0.000 | 0.000 | 0.000 | 0.000 | 0.000 | 0.000 | 0.000 | 0.000 | 0.934 |
| SPLEN2010912 | 0.000 | 0.000 | 15.386 | 26.371 | 0.000 | 0.000 | 0.000 | 0.000 | 0.000 | 12.636 | 0.000 | 0.000 | 13.734 |
| SPLEN2012624 | 0.000 | 0.000 | 0.000 | 7.178 | 0.000 | 0.000 | 0.000 | 0.000 | 0.000 | 10.317 | 0.000 | 0.000 | 0.000 |
| SPLEN2025491 | 0.000 | 0.000 | 0.000 | 0.000 | 0.000 | 0.000 | 0.000 | 0.000 | 0.000 | 0.000 | 0.000 | 0.000 | 38.930 |
| SPLEN2027268 | 0.000 | 50.440 | 0.000 | 14.361 | 0.000 | 0.000 | 0.000 | 0.000 | 0.000 | 0.000 | 0.000 | 0.000 | 0.000 |
| SPLEN2028914 | 0.000 | 0.000 | 3.469 | 0.000 | 0.000 | 0.000 | 2.792 | 0.000 | 0.000 | 0.000 | 0.000 | 0.000 | 0.000 |
| SPLEN2029912 | 0.000 | 0.000 | 0.000 | 0.000 | 0.000 | 1.646 | 0.000 | 0.000 | 0.000 | 0.000 | 0.000 | 0.000 | 0.000 |
| SPLEN2031424 | 0.000 | 0.000 | 0.000 | 5.405 | 0.000 | 0.000 | 15.229 | 0.000 | 0.000 | 0.000 | 0.000 | 0.000 | 8.444 |
| SPLEN2031547 | 0.000 | 0.000 | 11.735 | 5.587 | 5.689 | 4.759 | 1.574 | 0.000 | 0.000 | 11.244 | 0.000 | 0.000 | 1.746 |
| SPLEN2032154 | 0.000 | 0.000 | 0.000 | 0.000 | 0.000 | 0.000 | 0.000 | 0.000 | 0.000 | 0.000 | 0.000 | 0.000 | 38.930 |
| SPLEN2034781 | 0.000 | 0.000 | 0.000 | 0.000 | 0.000 | 0.000 | 27.984 | 0.000 | 0.000 | 0.000 | 0.000 | 0.000 | 0.000 |
| SPLEN2036821 | 0.000 | 0.000 | 0.000 | 0.000 | 0.000 | 0.000 | 0.000 | 0.000 | 0.000 | 0.000 | 0.000 | 0.000 | 38.930 |
| SPLEN2036932 | 0.000 | 21.926 | 0.000 | 2.081 | 0.000 | 0.000 | 2.932 | 6.726 | 31.158 | 5.982 | 0.000 | 0.000 | 0.000 |
| SPLEN2037194 | 0.000 | 0.000 | 0.000 | 28.977 | 0.000 | 0.000 | 0.000 | 0.000 | 0.000 | 0.000 | 0.000 | 0.000 | 0.000 |
| SPLEN2038345 | 0.000 | 0.000 | 0.000 | 0.000 | 0.000 | 29.627 | 0.000 | 0.000 | 0.000 | 0.000 | 0.000 | 0.000 | 0.000 |
| SPLEN2042303 | 0.000 | 0.000 | 32.557 | 0.000 | 0.000 | 0.000 | 0.000 | 0.000 | 0.000 | 0.000 | 0.000 | 0.000 | 0.000 |
| SYNOV1000374 | 0.000 | 0.000 | 0.000 | 0.000 | 0.000 | 0.000 | 0.000 | 0.000 | 0.000 | 0.000 | 0.000 | 0.000 | 22.005 |
| SYNOV2005216 | 0.000 | 0.000 | 12.130 | 0.000 | 0.000 | 0.000 | 0.000 | 0.000 | 0.000 | 0.000 | 0.000 | 0.000 | 0.000 |
| SYNOV2014400 | 0.000 | 0.000 | 0.000 | 0.000 | 0.000 | 0.000 | 12.977 | 0.000 | 0.000 | 13.240 | 0.000 | 0.000 | 0.000 |
| SYNOV4002346 | 0.000 | 0.000 | 0.000 | 0.000 | 0.000 | 0.000 | 5.997 | 0.000 | 0.000 | 0.000 | 0.000 | 0.000 | 0.000 |
| SYNOV4002883 | 0.000 | 0.000 | 0.000 | 0.000 | 0.000 | 0.000 | 23.940 | 0.000 | 0.000 | 24.425 | 0.000 | 0.000 | 0.000 |
| SYNOV4007430 | 0.000 | 0.000 | 0.000 | 0.000 | 0.000 | 0.000 | 31.677 | 0.000 | 0.000 | 0.000 | 0.000 | 0.000 | 0.000 |
| SYNOV4007671 | 1.354 | 1.827 | 0.000 | 0.520 | 2.649 | 0.739 | 0.000 | 0.000 | 0.000 | 0.000 | 0.000 | 0.000 | 0.813 |
| SYNOV4008440 | 0.000 | 7.355 | 1.833 | 2.094 | 0.000 | 0.000 | 1.475 | 3.384 | 0.000 | 3.010 | 0.000 | 0.000 | 3.272 |
| TESOP2001605 | 0.000 | 0.000 | 12.130 | 0.000 | 0.000 | 0.000 | 0.000 | 0.000 | 0.000 | 0.000 | 0.000 | 0.000 | 0.000 |
| TESOP2002273 | 7.498 | 0.000 | 15.126 | 2.881 | 14.666 | 0.000 | 0.000 | 0.000 | 0.000 | 0.000 | 0.000 | 0.000 | 0.000 |
| TESOP2002451 | 4.388 | 0.000 | 5.902 | 3.372 | 0.000 | 0.000 | 2.375 | 0.000 | 0.000 | 0.000 | 0.000 | 0.000 | 0.000 |
| TESOP2002950 | 0.000 | 0.000 | 0.000 | 9.399 | 0.000 | 0.000 | 0.000 | 0.000 | 0.000 | 0.000 | 0.000 | 0.000 | 0.000 |
| TESTI1000330 | 0.000 | 0.000 | 0.000 | 52.057 | 0.000 | 0.000 | 0.000 | 0.000 | 0.000 | 0.000 | 0.000 | 0.000 | 0.000 |
| TESTI2003573 | 0.000 | 0.000 | 0.000 | 0.000 | 0.000 | 0.000 | 0.000 | 0.000 | 0.000 | 0.000 | 0.000 | 26.931 | 0.000 |
| TESTI2009474 | 0.000 | 0.000 | 7.530 | 0.000 | 0.000 | 2.036 | 0.000 | 0.000 | 0.000 | 0.000 | 0.000 | 0.000 | 0.000 |
| TESTI2049246 | 0.000 | 0.000 | 0.000 | 0.000 | 0.000 | 0.000 | 0.000 | 0.000 | 0.000 | 53.653 | 0.000 | 0.000 | 29.159 |
| TESTI4000014 | 1.980 | 0.890 | 2.440 | 2.028 | 0.000 | 1.799 | 1.964 | 0.000 | 0.000 | 2.551 | 0.665 | 0.644 | 1.188 |
| TESTI4000209 | 0.000 | 0.000 | 3.291 | 0.000 | 0.000 | 2.669 | 2.649 | 0.000 | 0.000 | 0.000 | 0.000 | 0.000 | 2.938 |
| TESTI4000349 | 0.000 | 0.000 | 0.000 | 36.899 | 0.000 | 0.000 | 0.000 | 0.000 | 0.000 | 0.000 | 0.000 | 0.000 | 0.000 |
| TESTI4001100 | 7.570 | 10.215 | 10.181 | 8.725 | 0.000 | 4.129 | 4.098 | 0.000 | 0.000 | 4.180 | 0.000 | 0.000 | 4.544 |
| TESTI4001561 | 0.000 | 0.000 | 0.000 | 28.578 | 0.000 | 0.000 | 0.000 | 0.000 | 0.000 | 0.000 | 0.000 | 0.000 | 0.000 |
| TESTI4002290 | 0.000 | 0.000 | 0.000 | 0.000 | 0.000 | 0.000 | 0.000 | 0.000 | 0.000 | 0.000 | 0.000 | 0.000 | 62.915 |
| TESTI4002647 | 0.000 | 0.000 | 65.522 | 0.000 | 0.000 | 0.000 | 0.000 | 0.000 | 0.000 | 0.000 | 0.000 | 0.000 | 0.000 |
| TESTI4005857 | 0.000 | 79.225 | 0.000 | 0.000 | 0.000 | 0.000 | 0.000 | 0.000 | 0.000 | 0.000 | 0.000 | 0.000 | 0.000 |
| TESTI4006137 | 0.000 | 0.000 | 0.000 | 0.000 | 0.000 | 0.000 | 25.755 | 0.000 | 0.000 | 0.000 | 0.000 | 0.000 | 28.561 |
| TESTI4006326 | 0.000 | 0.000 | 48.724 | 0.000 | 0.000 | 0.000 | 0.000 | 0.000 | 0.000 | 0.000 | 0.000 | 0.000 | 0.000 |
| TESTI4008797 | 0.000 | 0.000 | 0.000 | 0.000 | 0.000 | 0.000 | 12.429 | 0.000 | 0.000 | 12.681 | 0.000 | 0.000 | 27.567 |
| TESTI4009286 | 1.339 | 0.000 | 0.000 | 0.000 | 0.000 | 0.000 | 1.450 | 0.000 | 0.000 | 1.479 | 0.000 | 0.000 | 0.804 |
| TESTI4010377 | 0.000 | 0.000 | 0.000 | 0.000 | 0.000 | 0.000 | 0.000 | 0.000 | 0.000 | 60.949 | 0.000 | 0.000 | 0.000 |
| TESTI4010851 | 5.050 | 6.814 | 4.075 | 2.716 | 0.000 | 2.203 | 3.280 | 0.000 | 0.000 | 3.904 | 2.035 | 0.000 | 3.031 |
| TESTI4010928 | 0.000 | 0.000 | 0.000 | 0.000 | 0.000 | 0.000 | 0.000 | 0.000 | 0.000 | 34.221 | 0.000 | 0.000 | 0.000 |
| TESTI4011161 | 0.000 | 0.000 | 26.175 | 14.955 | 0.000 | 0.000 | 0.000 | 0.000 | 0.000 | 21.496 | 0.000 | 0.000 | 0.000 |
| TESTI4012702 | 0.000 | 0.000 | 2.708 | 0.000 | 0.000 | 0.000 | 0.000 | 0.000 | 0.000 | 0.000 | 0.000 | 0.000 | 2.417 |
| TESTI4013675 | 0.000 | 0.000 | 0.000 | 14.015 | 0.000 | 0.000 | 0.000 | 0.000 | 0.000 | 0.000 | 0.000 | 0.000 | 0.000 |
| TESTI4013817 | 0.000 | 0.000 | 0.000 | 0.000 | 0.000 | 27.369 | 27.163 | 0.000 | 0.000 | 27.712 | 0.000 | 0.000 | 0.000 |
| TESTI4014159 | 0.000 | 0.000 | 0.000 | 16.638 | 0.000 | 11.810 | 0.000 | 0.000 | 0.000 | 23.916 | 0.000 | 0.000 | 25.996 |
| TESTI4014175 | 49.352 | 0.000 | 33.186 | 0.000 | 0.000 | 0.000 | 0.000 | 0.000 | 0.000 | 0.000 | 0.000 | 0.000 | 0.000 |
| TESTI4014306 | 0.000 | 0.000 | 0.000 | 52.057 | 0.000 | 0.000 | 0.000 | 0.000 | 0.000 | 0.000 | 0.000 | 0.000 | 0.000 |
| TESTI4014694 | 0.000 | 0.000 | 0.000 | 0.791 | 0.000 | 0.000 | 2.229 | 0.000 | 0.000 | 0.000 | 0.000 | 0.000 | 0.000 |
| TESTI4014818 | 0.000 | 0.000 | 0.000 | 0.000 | 0.000 | 0.000 | 0.000 | 0.000 | 0.000 | 60.949 | 0.000 | 0.000 | 0.000 |
| TESTI4019843 | 73.865 | 0.000 | 0.000 | 0.000 | 0.000 | 0.000 | 0.000 | 0.000 | 0.000 | 0.000 | 0.000 | 0.000 | 0.000 |
| TESTI4021478 | 0.000 | 0.000 | 0.000 | 0.000 | 0.000 | 0.000 | 22.098 | 0.000 | 0.000 | 0.000 | 0.000 | 0.000 | 49.012 |
| TESTI4022936 | 0.000 | 0.000 | 0.000 | 0.000 | 0.000 | 26.646 | 26.445 | 0.000 | 0.000 | 0.000 | 0.000 | 0.000 | 0.000 |
| TESTI4024420 | 0.000 | 0.000 | 0.000 | 0.000 | 0.000 | 0.000 | 37.398 | 0.000 | 0.000 | 38.155 | 0.000 | 0.000 | 0.000 |
| TESTI4027821 | 0.000 | 0.000 | 0.000 | 0.000 | 0.000 | 0.000 | 60.471 | 0.000 | 0.000 | 0.000 | 0.000 | 0.000 | 0.000 |
| TESTI4029836 | 0.000 | 0.000 | 0.000 | 0.000 | 0.000 | 60.652 | 0.000 | 0.000 | 0.000 | 0.000 | 0.000 | 0.000 | 0.000 |
| TESTI4037156 | 2.556 | 1.380 | 0.688 | 0.982 | 0.000 | 1.394 | 0.000 | 0.000 | 0.980 | 0.282 | 2.060 | 0.998 | 0.307 |
| TESTI4037188 | 0.000 | 0.000 | 0.000 | 0.000 | 0.000 | 60.652 | 0.000 | 0.000 | 0.000 | 0.000 | 0.000 | 0.000 | 0.000 |
| TESTI4046819 | 0.000 | 0.000 | 0.000 | 14.013 | 0.000 | 0.000 | 0.000 | 0.000 | 0.000 | 0.000 | 0.000 | 0.000 | 0.000 |
| THYMU2001090 | 0.000 | 0.000 | 0.000 | 0.000 | 0.000 | 0.000 | 21.252 | 0.000 | 0.000 | 0.000 | 0.000 | 0.000 | 47.135 |
| THYMU2011736 | 0.000 | 74.935 | 0.000 | 0.000 | 0.000 | 0.000 | 0.000 | 0.000 | 0.000 | 0.000 | 0.000 | 0.000 | 0.000 |
| THYMU2014353 | 0.000 | 0.000 | 0.000 | 0.000 | 0.000 | 37.663 | 0.000 | 0.000 | 0.000 | 0.000 | 0.000 | 0.000 | 0.000 |
| THYMU2016204 | 0.000 | 0.000 | 59.836 | 0.000 | 0.000 | 0.000 | 0.000 | 0.000 | 0.000 | 0.000 | 0.000 | 0.000 | 0.000 |
| THYMU2016523 | 0.000 | 0.000 | 0.000 | 23.416 | 0.000 | 0.000 | 0.000 | 0.000 | 0.000 | 0.000 | 0.000 | 0.000 | 0.000 |
| THYMU2023967 | 0.000 | 0.000 | 0.000 | 43.363 | 0.000 | 0.000 | 0.000 | 0.000 | 0.000 | 31.165 | 0.000 | 0.000 | 0.000 |
| THYMU2025707 | 0.000 | 0.000 | 0.000 | 0.000 | 0.000 | 0.000 | 0.000 | 0.000 | 0.000 | 9.440 | 0.000 | 0.000 | 20.521 |
| THYMU2030264 | 0.000 | 0.000 | 0.000 | 45.981 | 0.000 | 0.000 | 0.000 | 0.000 | 0.000 | 0.000 | 0.000 | 0.000 | 0.000 |
| THYMU2031341 | 0.000 | 0.000 | 4.286 | 0.000 | 0.000 | 0.000 | 0.000 | 0.000 | 0.000 | 7.040 | 0.000 | 0.000 | 0.000 |
| THYMU2031890 | 0.000 | 0.000 | 0.000 | 0.000 | 0.000 | 0.000 | 0.000 | 0.000 | 0.000 | 0.000 | 0.000 | 64.019 | 0.000 |
| THYMU2032696 | 0.000 | 0.000 | 0.000 | 0.000 | 0.000 | 0.000 | 0.000 | 2.411 | 0.000 | 0.000 | 0.000 | 3.789 | 0.000 |
| THYMU2032825 | 0.000 | 0.000 | 11.550 | 0.000 | 0.000 | 0.000 | 0.000 | 0.000 | 0.000 | 0.000 | 0.000 | 0.000 | 20.620 |
| THYMU2033308 | 0.000 | 0.000 | 0.000 | 0.000 | 0.000 | 0.000 | 13.964 | 0.000 | 0.000 | 0.000 | 0.000 | 0.000 | 0.000 |
| THYMU2033787 | 0.000 | 0.000 | 0.000 | 0.000 | 0.000 | 0.000 | 0.000 | 0.000 | 0.000 | 0.000 | 0.000 | 0.000 | 57.080 |
| THYMU2034374 | 23.239 | 0.000 | 0.000 | 0.000 | 0.000 | 0.000 | 0.000 | 0.000 | 0.000 | 0.000 | 0.000 | 0.000 | 0.000 |
| THYMU2035735 | 0.000 | 0.000 | 0.000 | 0.936 | 0.000 | 0.000 | 1.319 | 3.027 | 0.000 | 2.692 | 0.000 | 0.000 | 0.000 |
| THYMU2037226 | 0.000 | 0.000 | 0.000 | 0.000 | 0.000 | 17.265 | 0.000 | 0.000 | 0.000 | 34.964 | 0.000 | 0.000 | 0.000 |
| THYMU2039315 | 0.000 | 0.000 | 0.000 | 0.000 | 0.000 | 0.000 | 54.530 | 0.000 | 0.000 | 0.000 | 0.000 | 0.000 | 0.000 |
| THYMU2039780 | 0.000 | 0.000 | 0.000 | 45.981 | 0.000 | 0.000 | 0.000 | 0.000 | 0.000 | 0.000 | 0.000 | 0.000 | 0.000 |
| THYMU2040975 | 0.000 | 0.000 | 2.182 | 0.000 | 0.000 | 0.000 | 0.000 | 0.000 | 0.000 | 0.000 | 0.000 | 0.000 | 1.948 |
| THYMU3001083 | 0.000 | 0.000 | 0.000 | 45.981 | 0.000 | 0.000 | 0.000 | 0.000 | 0.000 | 0.000 | 0.000 | 0.000 | 0.000 |
| THYMU3001234 | 0.000 | 0.000 | 0.000 | 7.868 | 0.000 | 0.000 | 11.085 | 25.432 | 0.000 | 0.000 | 0.000 | 0.000 | 12.293 |
| THYMU3001379 | 0.000 | 0.000 | 0.000 | 0.000 | 0.000 | 25.376 | 0.000 | 0.000 | 0.000 | 25.695 | 0.000 | 0.000 | 27.929 |
| THYMU3003309 | 0.000 | 0.000 | 36.117 | 20.635 | 0.000 | 0.000 | 0.000 | 0.000 | 0.000 | 0.000 | 0.000 | 0.000 | 0.000 |
| THYMU3004835 | 0.000 | 0.000 | 0.000 | 0.000 | 0.000 | 19.793 | 0.000 | 0.000 | 0.000 | 20.041 | 0.000 | 0.000 | 21.784 |
| THYMU3006485 | 0.000 | 0.000 | 0.000 | 45.981 | 0.000 | 0.000 | 0.000 | 0.000 | 0.000 | 0.000 | 0.000 | 0.000 | 0.000 |
| THYMU3007137 | 0.000 | 0.000 | 0.000 | 0.000 | 0.000 | 0.000 | 0.000 | 0.000 | 0.000 | 37.956 | 0.000 | 0.000 | 0.000 |
| THYMU3008171 | 0.000 | 0.000 | 0.000 | 14.316 | 0.000 | 0.000 | 20.170 | 0.000 | 0.000 | 20.579 | 0.000 | 0.000 | 0.000 |
| TKIDN2009641 | 21.363 | 0.000 | 7.182 | 4.104 | 0.000 | 5.826 | 5.782 | 0.000 | 0.000 | 0.000 | 21.519 | 0.000 | 12.823 |
| TKIDN2009889 | 0.000 | 0.000 | 0.000 | 0.000 | 0.000 | 0.000 | 35.077 | 0.000 | 0.000 | 0.000 | 0.000 | 0.000 | 0.000 |
| TKIDN2010934 | 0.000 | 0.000 | 25.127 | 0.000 | 0.000 | 0.000 | 0.000 | 0.000 | 0.000 | 0.000 | 0.000 | 0.000 | 0.000 |
| TKIDN2013287 | 0.000 | 0.000 | 21.501 | 0.000 | 0.000 | 0.000 | 0.000 | 0.000 | 0.000 | 0.000 | 0.000 | 0.000 | 0.000 |
| TKIDN2015788 | 0.000 | 0.000 | 0.000 | 0.000 | 9.505 | 5.301 | 5.261 | 0.000 | 0.000 | 2.684 | 0.000 | 0.000 | 2.917 |
| TLIVE2001327 | 0.000 | 0.000 | 0.000 | 0.000 | 0.000 | 0.000 | 0.000 | 0.000 | 0.000 | 0.000 | 0.000 | 0.000 | 5.201 |
| TLIVE2004320 | 0.000 | 0.000 | 0.000 | 0.000 | 0.000 | 12.783 | 0.000 | 0.000 | 0.000 | 0.000 | 0.000 | 0.000 | 0.000 |
| TRACH1000205 | 0.000 | 0.000 | 4.889 | 8.380 | 0.000 | 3.965 | 19.677 | 0.000 | 0.000 | 4.015 | 0.000 | 0.000 | 0.000 |
| TRACH2001443 | 17.167 | 0.000 | 0.000 | 0.000 | 0.000 | 0.000 | 0.000 | 0.000 | 0.000 | 0.000 | 0.000 | 0.000 | 0.000 |
| TRACH2001549 | 0.000 | 0.000 | 0.000 | 0.000 | 0.000 | 4.260 | 8.457 | 0.000 | 0.000 | 21.569 | 0.000 | 0.000 | 4.689 |
| TRACH2001684 | 0.000 | 0.000 | 0.000 | 0.000 | 0.000 | 17.948 | 0.000 | 0.000 | 0.000 | 0.000 | 0.000 | 0.000 | 0.000 |
| TRACH2005811 | 1.948 | 7.887 | 0.000 | 0.000 | 0.000 | 0.000 | 2.109 | 2.419 | 0.000 | 2.152 | 0.000 | 0.000 | 3.508 |
| TRACH2006049 | 0.000 | 0.000 | 0.000 | 0.000 | 0.000 | 0.000 | 47.167 | 0.000 | 0.000 | 0.000 | 0.000 | 0.000 | 0.000 |
| TRACH2007834 | 0.000 | 1.257 | 0.627 | 0.000 | 0.000 | 1.016 | 0.504 | 0.000 | 0.000 | 0.515 | 1.877 | 0.000 | 0.559 |
| TRACH2008300 | 3.136 | 0.000 | 6.327 | 3.615 | 6.135 | 11.974 | 10.186 | 3.895 | 6.014 | 13.857 | 0.000 | 12.243 | 11.296 |
| TRACH2023299 | 0.000 | 0.000 | 0.000 | 0.000 | 0.000 | 0.000 | 0.000 | 0.000 | 0.000 | 0.000 | 0.000 | 0.000 | 14.157 |
| TRACH2025344 | 0.000 | 0.000 | 0.000 | 0.000 | 0.000 | 19.846 | 0.000 | 0.000 | 0.000 | 0.000 | 0.000 | 0.000 | 0.000 |
| TRACH2025535 | 3.218 | 0.000 | 0.000 | 2.472 | 0.000 | 0.000 | 5.806 | 1.332 | 0.000 | 2.369 | 0.000 | 0.000 | 1.288 |
| TRACH2025911 | 0.000 | 0.000 | 0.000 | 0.000 | 0.000 | 47.355 | 0.000 | 0.000 | 0.000 | 0.000 | 0.000 | 0.000 | 0.000 |
| TRACH3000014 | 0.000 | 0.000 | 0.000 | 0.000 | 0.000 | 0.000 | 0.000 | 0.000 | 0.000 | 18.547 | 0.000 | 0.000 | 0.000 |
| TRACH3001427 | 8.576 | 4.629 | 11.534 | 3.295 | 3.355 | 3.742 | 5.571 | 2.130 | 3.289 | 2.842 | 0.000 | 3.348 | 1.030 |
| TRACH3002192 | 2.304 | 3.109 | 8.522 | 3.541 | 2.253 | 1.885 | 4.989 | 2.861 | 0.000 | 6.999 | 2.321 | 0.000 | 2.766 |
| TRACH3004068 | 0.000 | 3.553 | 0.000 | 0.000 | 5.150 | 1.436 | 0.000 | 0.000 | 0.000 | 0.000 | 0.000 | 5.139 | 1.581 |
| TRACH3004721 | 0.000 | 0.000 | 3.611 | 4.127 | 0.000 | 5.858 | 8.721 | 6.669 | 0.000 | 2.966 | 0.000 | 0.000 | 3.224 |
| TRACH3005294 | 0.000 | 0.000 | 4.614 | 0.000 | 0.000 | 0.000 | 7.428 | 0.000 | 0.000 | 0.000 | 0.000 | 0.000 | 0.000 |
| TRACH3006038 | 0.000 | 0.000 | 0.000 | 38.787 | 0.000 | 0.000 | 0.000 | 0.000 | 0.000 | 0.000 | 0.000 | 0.000 | 0.000 |
| TRACH3006412 | 0.000 | 0.000 | 0.000 | 38.787 | 0.000 | 0.000 | 0.000 | 0.000 | 0.000 | 0.000 | 0.000 | 0.000 | 0.000 |
| TRACH3007479 | 0.000 | 0.000 | 0.000 | 0.000 | 0.000 | 1.084 | 1.075 | 0.000 | 0.000 | 0.000 | 0.000 | 0.000 | 0.000 |
| TRACH3008093 | 0.000 | 0.000 | 9.128 | 3.477 | 0.000 | 0.000 | 2.449 | 5.619 | 0.000 | 0.000 | 0.000 | 0.000 | 2.716 |
| TRACH3009455 | 0.000 | 0.000 | 0.000 | 0.000 | 0.000 | 0.000 | 47.167 | 0.000 | 0.000 | 0.000 | 0.000 | 0.000 | 0.000 |
| TSTOM1000135 | 0.000 | 0.000 | 0.000 | 0.000 | 0.000 | 0.000 | 0.000 | 0.000 | 0.000 | 0.000 | 0.000 | 0.000 | 9.361 |
| TUTER1000122 | 0.000 | 0.000 | 8.109 | 0.000 | 0.000 | 0.000 | 0.000 | 0.000 | 0.000 | 3.330 | 0.000 | 0.000 | 0.000 |
| TUTER2000904 | 5.158 | 0.000 | 0.000 | 5.944 | 0.000 | 2.813 | 0.000 | 0.000 | 0.000 | 5.697 | 0.000 | 0.000 | 3.096 |
| UTERU2002410 | 0.000 | 0.000 | 0.000 | 0.417 | 0.000 | 0.592 | 0.000 | 2.694 | 2.080 | 0.000 | 0.000 | 2.117 | 1.302 |
| UTERU2004929 | 21.446 | 0.000 | 0.000 | 0.000 | 0.000 | 11.697 | 0.000 | 0.000 | 0.000 | 11.843 | 0.000 | 0.000 | 0.000 |
| UTERU2005621 | 0.000 | 5.619 | 0.000 | 0.000 | 8.145 | 0.000 | 0.000 | 0.000 | 15.971 | 0.000 | 0.000 | 8.128 | 0.000 |
| UTERU2006115 | 0.000 | 0.000 | 0.000 | 5.563 | 0.000 | 0.000 | 7.837 | 0.000 | 0.000 | 0.000 | 0.000 | 0.000 | 17.383 |
| UTERU2007520 | 0.000 | 16.720 | 8.332 | 4.761 | 0.000 | 6.758 | 0.000 | 0.000 | 23.761 | 0.000 | 0.000 | 0.000 | 0.000 |
| UTERU2014678 | 0.000 | 0.000 | 51.019 | 0.000 | 0.000 | 0.000 | 0.000 | 0.000 | 0.000 | 0.000 | 0.000 | 0.000 | 0.000 |
| UTERU2019706 | 0.000 | 0.000 | 0.000 | 0.000 | 0.000 | 0.000 | 45.606 | 0.000 | 0.000 | 0.000 | 0.000 | 0.000 | 0.000 |
| UTERU2019940 | 0.000 | 0.000 | 0.000 | 0.000 | 0.000 | 0.000 | 0.000 | 0.000 | 0.000 | 0.000 | 0.000 | 0.000 | 48.181 |
| UTERU2021163 | 0.000 | 0.000 | 0.000 | 0.000 | 0.000 | 0.000 | 0.000 | 0.000 | 0.000 | 46.104 | 0.000 | 0.000 | 0.000 |
| UTERU2023039 | 0.000 | 0.000 | 0.000 | 0.000 | 0.000 | 0.000 | 45.606 | 0.000 | 0.000 | 0.000 | 0.000 | 0.000 | 0.000 |
| UTERU2023175 | 8.252 | 0.000 | 1.850 | 0.000 | 0.000 | 0.000 | 0.000 | 0.000 | 0.000 | 0.000 | 0.000 | 5.368 | 1.651 |
| UTERU2026203 | 0.000 | 0.000 | 0.000 | 0.000 | 0.000 | 0.000 | 45.606 | 0.000 | 0.000 | 0.000 | 0.000 | 0.000 | 0.000 |
| UTERU2030213 | 0.000 | 0.000 | 0.000 | 0.000 | 0.000 | 0.000 | 0.000 | 0.000 | 0.000 | 25.133 | 0.000 | 0.000 | 0.000 |
| UTERU2030280 | 0.000 | 0.000 | 0.000 | 0.000 | 0.000 | 0.000 | 0.000 | 0.000 | 0.000 | 0.000 | 0.000 | 0.000 | 48.181 |
| UTERU3000226 | 0.000 | 0.000 | 0.000 | 37.308 | 0.000 | 0.000 | 0.000 | 0.000 | 0.000 | 0.000 | 0.000 | 0.000 | 0.000 |
| UTERU3000899 | 0.000 | 0.000 | 35.054 | 0.000 | 0.000 | 0.000 | 0.000 | 0.000 | 0.000 | 0.000 | 0.000 | 0.000 | 31.292 |
| UTERU3001571 | 0.000 | 0.000 | 0.000 | 0.000 | 0.000 | 0.000 | 0.000 | 0.000 | 0.000 | 0.000 | 0.000 | 0.000 | 48.181 |
| UTERU3001572 | 0.000 | 9.102 | 2.268 | 2.591 | 0.000 | 1.839 | 0.000 | 0.000 | 12.934 | 1.862 | 0.000 | 0.000 | 6.073 |
| UTERU3001766 | 0.000 | 0.000 | 0.000 | 0.000 | 0.000 | 45.794 | 0.000 | 0.000 | 0.000 | 0.000 | 0.000 | 0.000 | 0.000 |
| UTERU3003135 | 0.000 | 0.000 | 0.000 | 0.000 | 0.000 | 0.000 | 0.000 | 0.000 | 0.000 | 33.486 | 0.000 | 0.000 | 0.000 |
| UTERU3004709 | 0.000 | 0.000 | 0.000 | 0.000 | 0.000 | 0.000 | 0.000 | 0.000 | 0.000 | 0.000 | 0.000 | 0.000 | 48.181 |
| UTERU3005230 | 0.000 | 0.000 | 0.000 | 17.332 | 0.000 | 0.000 | 24.419 | 0.000 | 0.000 | 0.000 | 0.000 | 0.000 | 0.000 |
| UTERU3005460 | 0.000 | 0.000 | 0.000 | 37.308 | 0.000 | 0.000 | 0.000 | 0.000 | 0.000 | 0.000 | 0.000 | 0.000 | 0.000 |
| UTERU3005907 | 0.000 | 0.000 | 0.000 | 0.000 | 0.000 | 0.000 | 0.000 | 0.000 | 0.000 | 0.000 | 0.000 | 0.000 | 14.514 |
| UTERU3005970 | 0.000 | 0.000 | 0.000 | 37.308 | 0.000 | 0.000 | 0.000 | 0.000 | 0.000 | 0.000 | 0.000 | 0.000 | 0.000 |
| UTERU3006308 | 0.000 | 0.000 | 0.000 | 37.308 | 0.000 | 0.000 | 0.000 | 0.000 | 0.000 | 0.000 | 0.000 | 0.000 | 0.000 |
| UTERU3007419 | 0.000 | 0.000 | 0.000 | 37.308 | 0.000 | 0.000 | 0.000 | 0.000 | 0.000 | 0.000 | 0.000 | 0.000 | 0.000 |
| UTERU3007640 | 0.000 | 0.000 | 0.000 | 0.000 | 0.000 | 0.000 | 45.606 | 0.000 | 0.000 | 0.000 | 0.000 | 0.000 | 0.000 |
| UTERU3007913 | 0.000 | 0.000 | 0.000 | 12.951 | 0.000 | 0.000 | 0.000 | 0.000 | 0.000 | 0.000 | 0.000 | 0.000 | 0.000 |
| UTERU3009259 | 0.000 | 0.000 | 0.000 | 0.000 | 0.000 | 0.000 | 0.000 | 0.000 | 0.000 | 46.104 | 0.000 | 0.000 | 0.000 |
| UTERU3009517 | 0.000 | 0.000 | 0.000 | 0.000 | 0.000 | 45.794 | 0.000 | 0.000 | 0.000 | 0.000 | 0.000 | 0.000 | 0.000 |
| UTERU3009871 | 0.000 | 0.000 | 0.000 | 0.000 | 0.000 | 0.000 | 36.230 | 0.000 | 0.000 | 18.482 | 0.000 | 0.000 | 0.000 |
| ADRGL2000042 | 0.000 | 0.000 | 0.000 | 7.210 | 0.000 | 5.118 | 2.540 | 0.000 | 0.000 | 0.000 | 18.905 | 0.000 | 0.000 |
| BLADE2006830 | 0.000 | 0.000 | 0.000 | 2.386 | 0.000 | 0.000 | 1.681 | 0.000 | 0.000 | 0.000 | 0.000 | 0.000 | 0.000 |
| BRACE2002589 | 0.000 | 0.000 | 0.000 | 100.000 | 0.000 | 0.000 | 0.000 | 0.000 | 0.000 | 0.000 | 0.000 | 0.000 | 0.000 |
| BRACE2003609 | 0.000 | 0.000 | 11.292 | 6.452 | 0.000 | 18.317 | 9.090 | 0.000 | 0.000 | 0.000 | 0.000 | 0.000 | 0.000 |
| BRACE2009318 | 0.000 | 0.000 | 0.000 | 100.000 | 0.000 | 0.000 | 0.000 | 0.000 | 0.000 | 0.000 | 0.000 | 0.000 | 0.000 |
| BRACE2011677 | 0.000 | 0.000 | 0.000 | 100.000 | 0.000 | 0.000 | 0.000 | 0.000 | 0.000 | 0.000 | 0.000 | 0.000 | 0.000 |
| BRACE2029396 | 0.000 | 0.000 | 0.000 | 100.000 | 0.000 | 0.000 | 0.000 | 0.000 | 0.000 | 0.000 | 0.000 | 0.000 | 0.000 |
| BRACE2037299 | 0.000 | 0.000 | 0.000 | 100.000 | 0.000 | 0.000 | 0.000 | 0.000 | 0.000 | 0.000 | 0.000 | 0.000 | 0.000 |
| BRACE2039823 | 0.000 | 0.000 | 0.000 | 41.329 | 0.000 | 58.671 | 0.000 | 0.000 | 0.000 | 0.000 | 0.000 | 0.000 | 0.000 |
| BRACE2039832 | 0.000 | 0.000 | 0.000 | 100.000 | 0.000 | 0.000 | 0.000 | 0.000 | 0.000 | 0.000 | 0.000 | 0.000 | 0.000 |
| BRACE2043105 | 0.000 | 0.000 | 0.000 | 100.000 | 0.000 | 0.000 | 0.000 | 0.000 | 0.000 | 0.000 | 0.000 | 0.000 | 0.000 |
| BRACE3001058 | 0.000 | 0.000 | 0.000 | 100.000 | 0.000 | 0.000 | 0.000 | 0.000 | 0.000 | 0.000 | 0.000 | 0.000 | 0.000 |
| BRACE3001113 | 48.624 | 0.000 | 32.696 | 18.680 | 0.000 | 0.000 | 0.000 | 0.000 | 0.000 | 0.000 | 0.000 | 0.000 | 0.000 |
| BRACE3003026 | 0.000 | 0.000 | 0.000 | 11.590 | 0.000 | 0.000 | 0.000 | 0.000 | 0.000 | 0.000 | 0.000 | 0.000 | 0.000 |
| BRACE3003053 | 0.000 | 0.000 | 63.640 | 36.360 | 0.000 | 0.000 | 0.000 | 0.000 | 0.000 | 0.000 | 0.000 | 0.000 | 0.000 |
| BRACE3009127 | 0.000 | 0.000 | 0.000 | 100.000 | 0.000 | 0.000 | 0.000 | 0.000 | 0.000 | 0.000 | 0.000 | 0.000 | 0.000 |
| BRACE3010076 | 0.000 | 0.000 | 0.000 | 100.000 | 0.000 | 0.000 | 0.000 | 0.000 | 0.000 | 0.000 | 0.000 | 0.000 | 0.000 |
| BRACE3015829 | 0.000 | 0.000 | 0.000 | 100.000 | 0.000 | 0.000 | 0.000 | 0.000 | 0.000 | 0.000 | 0.000 | 0.000 | 0.000 |
| BRACE3021148 | 0.000 | 0.000 | 0.000 | 100.000 | 0.000 | 0.000 | 0.000 | 0.000 | 0.000 | 0.000 | 0.000 | 0.000 | 0.000 |
| BRALZ2017844 | 0.000 | 0.000 | 0.000 | 0.000 | 49.396 | 0.000 | 0.000 | 0.000 | 0.000 | 0.000 | 0.000 | 0.000 | 0.000 |
| BRAMY2019111 | 0.000 | 0.000 | 0.000 | 0.000 | 0.000 | 30.516 | 0.000 | 69.484 | 0.000 | 0.000 | 0.000 | 0.000 | 0.000 |
| BRAMY2035070 | 0.000 | 0.000 | 0.000 | 0.000 | 0.000 | 54.718 | 0.000 | 0.000 | 0.000 | 0.000 | 0.000 | 0.000 | 0.000 |
| BRAMY2035449 | 0.000 | 0.000 | 0.000 | 0.000 | 0.000 | 100.000 | 0.000 | 0.000 | 0.000 | 0.000 | 0.000 | 0.000 | 0.000 |
| BRAMY2035718 | 0.000 | 0.000 | 0.000 | 0.000 | 0.000 | 100.000 | 0.000 | 0.000 | 0.000 | 0.000 | 0.000 | 0.000 | 0.000 |
| BRAMY2038516 | 0.000 | 0.000 | 0.000 | 0.000 | 0.000 | 12.770 | 0.000 | 87.230 | 0.000 | 0.000 | 0.000 | 0.000 | 0.000 |
| BRAMY2039341 | 0.000 | 0.000 | 0.000 | 0.000 | 0.000 | 100.000 | 0.000 | 0.000 | 0.000 | 0.000 | 0.000 | 0.000 | 0.000 |
| BRAMY2040159 | 0.000 | 0.000 | 0.000 | 0.000 | 0.000 | 100.000 | 0.000 | 0.000 | 0.000 | 0.000 | 0.000 | 0.000 | 0.000 |
| BRAMY2041434 | 0.000 | 0.000 | 0.000 | 0.000 | 0.000 | 100.000 | 0.000 | 0.000 | 0.000 | 0.000 | 0.000 | 0.000 | 0.000 |
| BRAMY2045471 | 0.000 | 0.000 | 0.000 | 0.000 | 0.000 | 100.000 | 0.000 | 0.000 | 0.000 | 0.000 | 0.000 | 0.000 | 0.000 |
| BRAMY3004800 | 0.000 | 0.000 | 0.000 | 0.000 | 0.000 | 15.340 | 38.061 | 0.000 | 0.000 | 46.598 | 0.000 | 0.000 | 0.000 |
| BRAWH1000369 | 0.000 | 0.000 | 0.000 | 0.000 | 0.000 | 0.000 | 100.000 | 0.000 | 0.000 | 0.000 | 0.000 | 0.000 | 0.000 |
| BRAWH2006207 | 0.000 | 0.000 | 0.000 | 9.187 | 0.000 | 0.000 | 12.943 | 29.695 | 0.000 | 0.000 | 48.175 | 0.000 | 0.000 |
| BRAWH2006395 | 0.000 | 0.000 | 0.000 | 0.000 | 0.000 | 0.000 | 12.446 | 0.000 | 0.000 | 0.000 | 0.000 | 0.000 | 0.000 |
| BRAWH2008993 | 0.000 | 0.000 | 0.000 | 0.000 | 0.000 | 50.189 | 49.811 | 0.000 | 0.000 | 0.000 | 0.000 | 0.000 | 0.000 |
| BRAWH2009393 | 0.000 | 0.000 | 0.000 | 0.000 | 0.000 | 0.000 | 100.000 | 0.000 | 0.000 | 0.000 | 0.000 | 0.000 | 0.000 |
| BRAWH2010552 | 0.000 | 0.000 | 0.000 | 41.512 | 0.000 | 0.000 | 58.488 | 0.000 | 0.000 | 0.000 | 0.000 | 0.000 | 0.000 |
| BRAWH3007441 | 0.000 | 0.000 | 0.000 | 0.000 | 0.000 | 0.000 | 100.000 | 0.000 | 0.000 | 0.000 | 0.000 | 0.000 | 0.000 |
| BRAWH3009017 | 0.000 | 0.000 | 0.000 | 0.000 | 0.000 | 0.000 | 100.000 | 0.000 | 0.000 | 0.000 | 0.000 | 0.000 | 0.000 |
| BRCAN2002473 | 0.000 | 0.000 | 0.000 | 0.000 | 0.000 | 0.000 | 0.000 | 100.000 | 0.000 | 0.000 | 0.000 | 0.000 | 0.000 |
| BRCAN2002854 | 0.000 | 0.000 | 0.000 | 0.000 | 0.000 | 0.000 | 0.000 | 100.000 | 0.000 | 0.000 | 0.000 | 0.000 | 0.000 |
| BRCAN2003070 | 0.000 | 0.000 | 0.000 | 0.000 | 0.000 | 0.000 | 0.000 | 100.000 | 0.000 | 0.000 | 0.000 | 0.000 | 0.000 |
| BRCAN2014229 | 0.000 | 0.000 | 0.000 | 0.000 | 0.000 | 0.000 | 0.000 | 100.000 | 0.000 | 0.000 | 0.000 | 0.000 | 0.000 |
| BRCOC2019841 | 0.000 | 0.000 | 0.000 | 16.691 | 0.000 | 0.000 | 0.000 | 0.000 | 83.309 | 0.000 | 0.000 | 0.000 | 0.000 |
| BRHIP2002722 | 0.000 | 0.000 | 0.000 | 0.000 | 0.000 | 0.000 | 0.000 | 0.000 | 0.000 | 100.000 | 0.000 | 0.000 | 0.000 |
| BRHIP2003272 | 0.000 | 0.000 | 0.000 | 0.000 | 0.000 | 0.000 | 0.000 | 0.000 | 0.000 | 100.000 | 0.000 | 0.000 | 0.000 |
| BRHIP2005271 | 0.000 | 0.000 | 0.000 | 0.000 | 0.000 | 7.137 | 7.083 | 0.000 | 0.000 | 14.453 | 0.000 | 0.000 | 7.855 |
| BRHIP2005724 | 0.000 | 0.000 | 0.000 | 0.000 | 0.000 | 0.000 | 0.000 | 0.000 | 0.000 | 100.000 | 0.000 | 0.000 | 0.000 |
| BRHIP2006617 | 0.000 | 0.000 | 0.000 | 0.000 | 0.000 | 0.000 | 0.000 | 0.000 | 0.000 | 100.000 | 0.000 | 0.000 | 0.000 |
| BRHIP2008389 | 0.000 | 0.000 | 0.000 | 0.000 | 0.000 | 0.000 | 0.000 | 0.000 | 0.000 | 100.000 | 0.000 | 0.000 | 0.000 |
| BRHIP2012360 | 0.000 | 0.000 | 0.000 | 0.000 | 0.000 | 0.000 | 0.000 | 0.000 | 0.000 | 100.000 | 0.000 | 0.000 | 0.000 |
| BRHIP2017553 | 0.000 | 0.000 | 0.000 | 0.000 | 0.000 | 0.000 | 0.000 | 0.000 | 0.000 | 100.000 | 0.000 | 0.000 | 0.000 |
| BRHIP2026877 | 0.000 | 0.000 | 0.000 | 0.000 | 0.000 | 0.000 | 0.000 | 69.219 | 0.000 | 30.781 | 0.000 | 0.000 | 0.000 |
| BRHIP3000017 | 8.146 | 0.000 | 5.478 | 0.000 | 0.000 | 0.000 | 8.819 | 0.000 | 15.620 | 4.499 | 0.000 | 0.000 | 0.000 |
| BRHIP3000240 | 0.000 | 0.000 | 0.000 | 67.607 | 0.000 | 0.000 | 0.000 | 0.000 | 0.000 | 32.393 | 0.000 | 0.000 | 0.000 |
| BRHIP3008314 | 0.000 | 0.000 | 0.000 | 0.000 | 0.000 | 0.000 | 0.000 | 0.000 | 0.000 | 100.000 | 0.000 | 0.000 | 0.000 |
| BRHIP3026052 | 0.000 | 0.000 | 0.000 | 0.000 | 54.140 | 0.000 | 0.000 | 0.000 | 0.000 | 45.860 | 0.000 | 0.000 | 0.000 |
| BRSTN2013354 | 0.000 | 0.000 | 0.000 | 0.000 | 0.000 | 0.000 | 0.000 | 0.000 | 0.000 | 0.000 | 0.000 | 100.000 | 0.000 |
| BRTHA2002133 | 0.000 | 0.000 | 0.000 | 0.000 | 0.000 | 0.000 | 0.000 | 0.000 | 0.000 | 0.000 | 0.000 | 0.000 | 100.000 |
| BRTHA2002702 | 0.000 | 0.000 | 0.000 | 0.000 | 0.000 | 0.000 | 0.000 | 0.000 | 0.000 | 0.000 | 0.000 | 0.000 | 100.000 |
| BRTHA2007060 | 0.000 | 0.000 | 0.000 | 0.000 | 0.000 | 0.000 | 0.000 | 0.000 | 0.000 | 0.000 | 0.000 | 0.000 | 100.000 |
| BRTHA2010033 | 0.000 | 0.000 | 0.000 | 0.000 | 0.000 | 0.000 | 0.000 | 0.000 | 0.000 | 0.000 | 0.000 | 0.000 | 100.000 |
| BRTHA2011321 | 0.000 | 0.000 | 0.000 | 0.000 | 0.000 | 0.000 | 0.000 | 0.000 | 0.000 | 0.000 | 0.000 | 0.000 | 100.000 |
| BRTHA2013426 | 0.000 | 0.000 | 0.000 | 0.000 | 0.000 | 0.000 | 0.000 | 0.000 | 0.000 | 0.000 | 0.000 | 0.000 | 100.000 |
| BRTHA2013610 | 0.000 | 0.000 | 0.000 | 0.000 | 0.000 | 0.000 | 0.000 | 0.000 | 0.000 | 0.000 | 0.000 | 0.000 | 100.000 |
| BRTHA2016318 | 0.000 | 0.000 | 0.000 | 0.000 | 0.000 | 0.000 | 0.000 | 0.000 | 0.000 | 0.000 | 0.000 | 0.000 | 100.000 |
| BRTHA2017364 | 0.000 | 0.000 | 0.000 | 0.000 | 0.000 | 0.000 | 0.000 | 0.000 | 0.000 | 0.000 | 0.000 | 0.000 | 100.000 |
| BRTHA2017972 | 0.000 | 0.000 | 0.000 | 0.000 | 0.000 | 0.000 | 0.000 | 0.000 | 0.000 | 0.000 | 0.000 | 0.000 | 37.427 |
| BRTHA2018011 | 0.000 | 0.000 | 0.000 | 0.000 | 0.000 | 0.000 | 0.000 | 0.000 | 0.000 | 0.000 | 0.000 | 0.000 | 100.000 |
| BRTHA2018443 | 0.000 | 0.000 | 0.000 | 0.000 | 0.000 | 0.000 | 22.098 | 0.000 | 0.000 | 0.000 | 0.000 | 0.000 | 49.012 |
| BRTHA3000296 | 0.000 | 0.000 | 0.000 | 0.000 | 0.000 | 0.000 | 0.000 | 0.000 | 0.000 | 0.000 | 0.000 | 0.000 | 100.000 |
| BRTHA3003000 | 0.000 | 0.000 | 0.000 | 0.000 | 0.000 | 0.000 | 17.150 | 0.000 | 0.000 | 0.000 | 63.832 | 0.000 | 19.019 |
| BRTHA3008826 | 0.000 | 0.000 | 0.000 | 0.000 | 0.000 | 0.000 | 0.000 | 0.000 | 0.000 | 0.000 | 0.000 | 0.000 | 100.000 |
| CTONG2008721 | 0.000 | 0.000 | 0.000 | 0.000 | 0.000 | 0.000 | 0.000 | 0.000 | 0.000 | 0.000 | 0.000 | 0.000 | 37.320 |
| CTONG2020374 | 0.000 | 0.000 | 0.000 | 11.030 | 0.000 | 0.000 | 31.081 | 0.000 | 0.000 | 0.000 | 0.000 | 0.000 | 0.000 |
| CTONG2020378 | 0.000 | 0.000 | 0.000 | 0.000 | 0.000 | 0.000 | 16.140 | 0.000 | 0.000 | 16.467 | 0.000 | 0.000 | 0.000 |
| CTONG2020411 | 12.719 | 0.000 | 0.000 | 0.000 | 0.000 | 0.000 | 0.000 | 0.000 | 0.000 | 0.000 | 0.000 | 0.000 | 0.000 |
| CTONG2024031 | 0.000 | 0.000 | 0.000 | 3.669 | 0.000 | 0.000 | 2.584 | 0.000 | 0.000 | 0.000 | 0.000 | 0.000 | 0.000 |
| CTONG3004726 | 0.000 | 0.000 | 21.039 | 0.000 | 0.000 | 0.000 | 0.000 | 0.000 | 0.000 | 17.278 | 0.000 | 0.000 | 0.000 |
| FCBBF1000509 | 6.894 | 0.000 | 0.000 | 0.000 | 0.000 | 13.160 | 3.732 | 17.123 | 19.830 | 5.711 | 6.945 | 6.728 | 6.208 |
| FCBBF3010361 | 100.000 | 0.000 | 0.000 | 0.000 | 0.000 | 0.000 | 0.000 | 0.000 | 0.000 | 0.000 | 0.000 | 0.000 | 0.000 |
| FCBBF3027854 | 14.460 | 0.000 | 0.000 | 0.000 | 0.000 | 0.000 | 0.000 | 0.000 | 0.000 | 0.000 | 0.000 | 0.000 | 0.000 |
| FEBRA2000790 | 0.000 | 100.000 | 0.000 | 0.000 | 0.000 | 0.000 | 0.000 | 0.000 | 0.000 | 0.000 | 0.000 | 0.000 | 0.000 |
| FEBRA2001990 | 0.000 | 9.046 | 4.508 | 15.453 | 0.000 | 7.313 | 18.144 | 16.650 | 0.000 | 7.404 | 0.000 | 0.000 | 8.048 |
| FEBRA2006519 | 0.000 | 29.644 | 0.000 | 25.320 | 0.000 | 11.982 | 11.891 | 0.000 | 0.000 | 0.000 | 0.000 | 0.000 | 0.000 |
| FEBRA2008692 | 0.000 | 6.116 | 0.000 | 0.000 | 0.000 | 0.000 | 0.000 | 0.000 | 0.000 | 0.000 | 0.000 | 0.000 | 0.000 |
| FEBRA2014122 | 0.000 | 66.741 | 33.259 | 0.000 | 0.000 | 0.000 | 0.000 | 0.000 | 0.000 | 0.000 | 0.000 | 0.000 | 0.000 |
| FEBRA2027609 | 0.000 | 100.000 | 0.000 | 0.000 | 0.000 | 0.000 | 0.000 | 0.000 | 0.000 | 0.000 | 0.000 | 0.000 | 0.000 |
| FEBRA2028516 | 0.000 | 2.851 | 2.842 | 1.624 | 0.000 | 2.305 | 8.007 | 0.000 | 0.000 | 4.668 | 0.000 | 0.000 | 1.268 |
| HCASM2003018 | 0.000 | 0.000 | 10.964 | 0.000 | 0.000 | 0.000 | 0.000 | 0.000 | 0.000 | 0.000 | 0.000 | 0.000 | 0.000 |
| HCHON2000508 | 0.000 | 0.000 | 0.464 | 0.000 | 0.000 | 0.376 | 0.000 | 0.000 | 0.000 | 0.000 | 0.000 | 0.000 | 0.000 |
| HCHON2000743 | 11.280 | 0.000 | 7.585 | 8.667 | 0.000 | 0.000 | 6.105 | 0.000 | 0.000 | 0.000 | 0.000 | 0.000 | 6.771 |
| HCHON2004858 | 0.000 | 0.000 | 16.411 | 0.000 | 0.000 | 0.000 | 0.000 | 0.000 | 0.000 | 0.000 | 0.000 | 0.000 | 0.000 |
| HSYRA2005628 | 0.000 | 0.000 | 0.000 | 0.000 | 0.000 | 0.000 | 0.000 | 0.000 | 0.000 | 0.000 | 0.000 | 0.000 | 7.437 |
| IMR322001879 | 0.000 | 0.000 | 0.000 | 0.000 | 0.000 | 0.000 | 9.638 | 0.000 | 0.000 | 9.833 | 0.000 | 0.000 | 0.000 |
| NT2RI2009583 | 0.000 | 0.000 | 0.000 | 5.399 | 0.808 | 0.902 | 0.224 | 1.540 | 0.793 | 0.228 | 1.665 | 1.613 | 1.489 |
| NT2RP8000521 | 0.000 | 0.000 | 0.000 | 37.067 | 0.000 | 0.000 | 0.000 | 0.000 | 0.000 | 0.000 | 0.000 | 0.000 | 0.000 |
| OCBBF2003327 | 0.000 | 0.000 | 100.000 | 0.000 | 0.000 | 0.000 | 0.000 | 0.000 | 0.000 | 0.000 | 0.000 | 0.000 | 0.000 |
| OCBBF2005433 | 0.000 | 0.000 | 100.000 | 0.000 | 0.000 | 0.000 | 0.000 | 0.000 | 0.000 | 0.000 | 0.000 | 0.000 | 0.000 |
| OCBBF2006987 | 0.000 | 0.000 | 16.058 | 0.000 | 0.000 | 0.000 | 0.000 | 0.000 | 0.000 | 13.187 | 0.000 | 0.000 | 0.000 |
| OCBBF2008144 | 0.000 | 0.000 | 7.165 | 4.094 | 0.000 | 2.906 | 5.768 | 0.000 | 0.000 | 2.942 | 0.000 | 0.000 | 3.198 |
| OCBBF2009583 | 0.000 | 0.000 | 100.000 | 0.000 | 0.000 | 0.000 | 0.000 | 0.000 | 0.000 | 0.000 | 0.000 | 0.000 | 0.000 |
| OCBBF2011669 | 0.000 | 0.000 | 63.640 | 36.360 | 0.000 | 0.000 | 0.000 | 0.000 | 0.000 | 0.000 | 0.000 | 0.000 | 0.000 |
| OCBBF2019684 | 0.000 | 0.000 | 100.000 | 0.000 | 0.000 | 0.000 | 0.000 | 0.000 | 0.000 | 0.000 | 0.000 | 0.000 | 0.000 |
| OCBBF2020048 | 0.000 | 0.000 | 65.522 | 0.000 | 0.000 | 0.000 | 0.000 | 0.000 | 0.000 | 0.000 | 0.000 | 0.000 | 0.000 |
| OCBBF2030116 | 0.000 | 0.000 | 54.907 | 0.000 | 0.000 | 0.000 | 0.000 | 0.000 | 0.000 | 45.093 | 0.000 | 0.000 | 0.000 |
| OCBBF2032274 | 0.000 | 0.000 | 100.000 | 0.000 | 0.000 | 0.000 | 0.000 | 0.000 | 0.000 | 0.000 | 0.000 | 0.000 | 0.000 |
| OCBBF2034637 | 0.000 | 0.000 | 100.000 | 0.000 | 0.000 | 0.000 | 0.000 | 0.000 | 0.000 | 0.000 | 0.000 | 0.000 | 0.000 |
| OCBBF3002654 | 0.000 | 0.000 | 100.000 | 0.000 | 0.000 | 0.000 | 0.000 | 0.000 | 0.000 | 0.000 | 0.000 | 0.000 | 0.000 |
| OCBBF3003761 | 0.000 | 0.000 | 100.000 | 0.000 | 0.000 | 0.000 | 0.000 | 0.000 | 0.000 | 0.000 | 0.000 | 0.000 | 0.000 |
| OCBBF3004972 | 0.000 | 0.000 | 100.000 | 0.000 | 0.000 | 0.000 | 0.000 | 0.000 | 0.000 | 0.000 | 0.000 | 0.000 | 0.000 |
| PERIC2007068 | 0.000 | 0.000 | 3.834 | 8.761 | 0.000 | 0.000 | 3.086 | 7.080 | 0.000 | 4.723 | 0.000 | 0.000 | 1.711 |
| PUAEN2006335 | 0.000 | 0.000 | 15.755 | 0.000 | 0.000 | 0.000 | 12.682 | 0.000 | 0.000 | 0.000 | 0.000 | 0.000 | 0.000 |
| SPLEN2016932 | 0.000 | 0.000 | 0.000 | 0.000 | 0.000 | 0.000 | 0.000 | 0.000 | 0.000 | 0.000 | 0.000 | 0.000 | 38.930 |
| SPLEN2039379 | 0.000 | 7.220 | 10.793 | 10.278 | 0.000 | 11.672 | 5.792 | 0.000 | 0.000 | 8.864 | 0.000 | 0.000 | 3.212 |
| SYNOV2006620 | 0.000 | 0.000 | 0.000 | 0.000 | 0.000 | 0.000 | 0.000 | 0.000 | 0.000 | 0.000 | 0.000 | 0.000 | 33.957 |
| SYNOV2021953 | 0.000 | 0.000 | 0.000 | 6.793 | 0.000 | 0.000 | 0.000 | 0.000 | 0.000 | 0.000 | 0.000 | 0.000 | 0.000 |
| TESTI1000266 | 0.000 | 0.000 | 65.522 | 0.000 | 0.000 | 0.000 | 0.000 | 0.000 | 0.000 | 0.000 | 0.000 | 0.000 | 0.000 |
| TESTI2015626 | 0.608 | 0.000 | 0.409 | 0.467 | 0.000 | 0.331 | 0.000 | 0.754 | 1.165 | 0.336 | 1.224 | 2.372 | 0.000 |
| TESTI2026647 | 0.000 | 0.000 | 0.000 | 0.000 | 0.000 | 23.811 | 0.000 | 0.000 | 0.000 | 0.000 | 0.000 | 0.000 | 0.000 |
| TESTI4000214 | 0.000 | 0.000 | 0.000 | 0.000 | 0.000 | 0.000 | 0.000 | 0.000 | 0.000 | 7.979 | 0.000 | 0.000 | 0.000 |
| TESTI4001984 | 0.000 | 0.000 | 0.000 | 0.000 | 0.000 | 0.000 | 60.471 | 0.000 | 0.000 | 0.000 | 0.000 | 0.000 | 0.000 |
| TESTI4008058 | 0.000 | 0.000 | 21.899 | 0.000 | 0.000 | 0.000 | 8.814 | 20.221 | 0.000 | 0.000 | 0.000 | 31.781 | 0.000 |
| TESTI4013894 | 0.000 | 0.000 | 0.000 | 19.881 | 0.000 | 14.112 | 0.000 | 0.000 | 0.000 | 14.289 | 0.000 | 0.000 | 0.000 |
| TESTI4015442 | 0.000 | 0.000 | 25.047 | 0.000 | 0.000 | 0.000 | 0.000 | 0.000 | 0.000 | 0.000 | 0.000 | 0.000 | 0.000 |
| TESTI4017714 | 0.000 | 0.000 | 48.724 | 0.000 | 0.000 | 0.000 | 0.000 | 0.000 | 0.000 | 0.000 | 0.000 | 0.000 | 0.000 |
| TESTI4025268 | 0.000 | 0.000 | 0.000 | 0.000 | 0.000 | 0.000 | 60.471 | 0.000 | 0.000 | 0.000 | 0.000 | 0.000 | 0.000 |
| TESTI4025547 | 0.000 | 0.000 | 0.000 | 0.000 | 0.000 | 0.000 | 0.000 | 0.000 | 0.000 | 60.949 | 0.000 | 0.000 | 0.000 |
| TESTI4026207 | 0.000 | 0.000 | 0.000 | 0.000 | 0.000 | 0.000 | 0.000 | 0.000 | 0.000 | 60.949 | 0.000 | 0.000 | 0.000 |
| TESTI4032090 | 0.000 | 0.000 | 0.000 | 0.000 | 0.000 | 0.000 | 60.471 | 0.000 | 0.000 | 0.000 | 0.000 | 0.000 | 0.000 |
| THYMU2004284 | 0.000 | 0.000 | 0.000 | 4.768 | 0.000 | 0.000 | 0.000 | 0.000 | 0.000 | 0.000 | 0.000 | 0.000 | 0.000 |
| THYMU2040925 | 0.000 | 0.000 | 0.000 | 45.981 | 0.000 | 0.000 | 0.000 | 0.000 | 0.000 | 0.000 | 0.000 | 0.000 | 0.000 |
| THYMU3000360 | 0.000 | 0.000 | 0.000 | 27.904 | 0.000 | 0.000 | 39.314 | 0.000 | 0.000 | 0.000 | 0.000 | 0.000 | 0.000 |
| TKIDN2018926 | 0.000 | 0.000 | 0.000 | 0.000 | 0.000 | 21.396 | 0.000 | 0.000 | 0.000 | 0.000 | 0.000 | 0.000 | 0.000 |
| TLIVE2002046 | 3.353 | 4.524 | 2.255 | 7.729 | 0.000 | 10.972 | 5.445 | 4.164 | 0.000 | 1.852 | 0.000 | 0.000 | 12.076 |
| TRACH3000134 | 0.000 | 0.000 | 0.000 | 0.000 | 0.000 | 0.000 | 36.165 | 0.000 | 0.000 | 0.000 | 0.000 | 0.000 | 0.000 |
| UTERU2008040 | 0.000 | 0.000 | 0.000 | 8.353 | 0.000 | 11.858 | 0.000 | 0.000 | 0.000 | 24.014 | 0.000 | 0.000 | 0.000 |
| UTERU2011220 | 0.000 | 0.000 | 0.000 | 1.389 | 0.000 | 0.000 | 0.000 | 0.000 | 0.000 | 0.000 | 0.000 | 0.000 | 0.000 |
| UTERU2021820 | 0.000 | 0.000 | 0.000 | 17.694 | 0.000 | 0.000 | 24.929 | 0.000 | 0.000 | 0.000 | 0.000 | 0.000 | 27.645 |
| UTERU2028734 | 0.000 | 0.000 | 27.272 | 0.000 | 0.000 | 0.000 | 21.953 | 0.000 | 0.000 | 0.000 | 0.000 | 0.000 | 0.000 |

[0734] The result of comparative analysis of cDNA libraries derived from fetal heart (FEHRT) and adult heart (HEART) showed the following genes whose expression levels differed between the two.

TABLE 22

| Clone ID | FEHRT | HEART |
|---|---|---|
| BRAMY2040592 | 0.000 | 23.231 |
| BRAWH2001671 | 0.000 | 25.367 |
| BRSTN2016470 | 0.000 | 1.460 |
| CTONG2017500 | 55.163 | 0.000 |
| CTONG2028124 | 0.000 | 3.353 |
| CTONG3000657 | 0.000 | 25.884 |
| D3OST3000169 | 10.191 | 0.000 |
| FEBRA2008287 | 61.381 | 0.000 |
| HCHON2000244 | 13.698 | 0.000 |
| HCHON2000626 | 0.000 | 7.842 |
| HEART1000010 | 0.000 | 22.793 |
| HEART1000074 | 0.000 | 5.064 |
| HEART1000088 | 0.000 | 49.759 |
| HEART1000139 | 0.000 | 66.452 |
| HEART2001680 | 0.000 | 100.000 |
| HEART2001756 | 0.000 | 100.000 |
| HEART2006131 | 0.000 | 100.000 |
| HEART2006909 | 0.000 | 100.000 |
| HEART2007031 | 0.000 | 75.806 |
| HEART2010391 | 0.000 | 100.000 |
| HEART2010492 | 0.000 | 100.000 |
| HEART2010495 | 0.000 | 49.759 |
| KIDNE2000665 | 0.000 | 12.914 |
| NB9N41000340 | 0.000 | 9.675 |
| NT2RI2003993 | 0.000 | 25.326 |
| NT2RI3002892 | 0.000 | 11.740 |
| OCBBF2024850 | 0.000 | 14.826 |
| SKMUS2006394 | 0.000 | 32.130 |
| SMINT2001818 | 0.000 | 6.254 |
| TESTI4000209 | 55.163 | 0.000 |
| TKIDN2015788 | 54.776 | 0.000 |
| TRACH3002192 | 12.987 | 0.000 |
| TRACH3005294 | 77.338 | 0.000 |
| TRACH3007479 | 0.000 | 7.175 |
| HEART2009680 | 100.000 | 0.000 |
| THYMU2004284 | 89.631 | 0.000 |

[0735] The result of comparative analysis of cDNA libraries derived from fetal kidney (FEKID) and adult kidney (KIDNE) showed the following genes whose expression levels differed between the two.

TABLE 23

| Clone ID | FEKID | KIDNE |
|---|---|---|
| BRACE2043665 | 0.000 | 83.085 |
| BRACE3010428 | 0.000 | 3.991 |
| BRSTN2016470 | 0.000 | 0.763 |
| CTONG1000087 | 0.000 | 3.646 |
| CTONG2028124 | 0.000 | 3.504 |
| CTONG3008894 | 0.000 | 2.534 |
| HCASM2003415 | 36.285 | 0.000 |
| HCHON2000244 | 0.000 | 4.587 |
| HEART1000074 | 0.000 | 2.646 |
| HHDPC1000118 | 0.000 | 7.307 |
| KIDNE1000064 | 0.000 | 100.000 |
| KIDNE2000665 | 41.875 | 13.498 |
| KIDNE2000722 | 0.000 | 100.000 |
| KIDNE2000832 | 67.408 | 32.592 |
| KIDNE2000846 | 0.000 | 100.000 |
| KIDNE2001361 | 0.000 | 80.699 |
| KIDNE2001847 | 0.000 | 12.687 |
| KIDNE2002252 | 0.000 | 7.600 |
| KIDNE2002991 | 0.000 | 100.000 |
| KIDNE2003837 | 0.000 | 100.000 |
| KIDNE2005543 | 0.000 | 62.084 |
| KIDNE2006580 | 0.000 | 48.900 |
| KIDNE2010264 | 0.000 | 100.000 |
| KIDNE2011314 | 0.000 | 75.867 |
| KIDNE2011532 | 0.000 | 100.000 |
| KIDNE2011635 | 0.000 | 48.502 |
| KIDNE2012945 | 0.000 | 48.732 |
| KIDNE2013095 | 0.000 | 100.000 |
| PEBLM2004666 | 0.000 | 12.953 |
| PLACE6019385 | 87.742 | 0.000 |
| STOMA1000189 | 0.000 | 16.356 |
| SYNOV4007671 | 0.000 | 2.556 |
| TBAES2001258 | 0.000 | 33.137 |
| TESOP2002451 | 51.382 | 0.000 |
| TESTI4000014 | 0.000 | 1.245 |
| TESTI4012702 | 0.000 | 7.600 |
| THYMU2032014 | 0.000 | 57.532 |
| TRACH2001684 | 0.000 | 62.100 |
| TRACH2007834 | 0.000 | 1.758 |
| UTERU2023175 | 0.000 | 5.190 |
| NT2RI2009583 | 10.920 | 4.840 |
| OCBBF2008144 | 0.000 | 62.383 |

[0736] The result of comparative analysis of cDNA libraries derived from fetal lung (FELNG) and adult lung (HLUNG) showed the following genes whose expression levels differed between the two.

TABLE 24

| Clone ID | FELNG | HLUNG |
|---|---|---|
| BRAWH3007592 | 38.566 | 0.000 |
| BRCAN2021028 | 0.000 | 38.589 |
| BRHIP2000819 | 0.000 | 7.923 |
| BRSTN2016470 | 4.707 | 0.803 |
| CTONG1000087 | 0.000 | 3.835 |
| CTONG2028124 | 10.809 | 9.217 |
| HCASM2007047 | 73.789 | 0.000 |
| HEART1000074 | 32.652 | 2.784 |
| HLUNG1000017 | 0.000 | 100.000 |
| HLUNG2000014 | 0.000 | 100.000 |
| HLUNG2001996 | 0.000 | 76.784 |
| HLUNG2002465 | 26.011 | 4.436 |
| HLUNG2002958 | 0.000 | 100.000 |
| HLUNG2003003 | 0.000 | 29.311 |
| HLUNG2003872 | 0.000 | 100.000 |
| HLUNG2010464 | 0.000 | 100.000 |
| HLUNG2011041 | 0.000 | 100.000 |
| HLUNG2011298 | 0.000 | 35.254 |
| HLUNG2012049 | 0.000 | 100.000 |
| HLUNG2012287 | 0.000 | 100.000 |
| HLUNG2012727 | 0.000 | 100.000 |
| HLUNG2013204 | 0.000 | 100.000 |
| HLUNG2013304 | 0.000 | 100.000 |
| HLUNG2013622 | 0.000 | 100.000 |
| HLUNG2013851 | 0.000 | 100.000 |
| HLUNG2014262 | 0.000 | 100.000 |
| HLUNG2014288 | 0.000 | 100.000 |
| HLUNG2014449 | 0.000 | 100.000 |
| HLUNG2015617 | 0.000 | 100.000 |
| HLUNG2017350 | 0.000 | 100.000 |
| HLUNG2017546 | 0.000 | 12.944 |
| HLUNG2017806 | 0.000 | 100.000 |
| HLUNG2019058 | 0.000 | 100.000 |
| HSYRA2008376 | 0.000 | 11.470 |
| KIDNE2012945 | 0.000 | 51.268 |
| NT2RI2003993 | 0.000 | 13.924 |
| NT2RI3007543 | 18.247 | 0.000 |
| OCBBF3000483 | 0.000 | 14.638 |
| SMINT1000192 | 64.044 | 0.000 |
| SPLEN2028914 | 0.000 | 10.242 |
| SPLEN2031547 | 0.000 | 5.775 |
| STOMA1000189 | 33.633 | 0.000 |
| SYNOV4007671 | 0.000 | 2.689 |
| TESOP1000127 | 0.000 | 34.899 |
| TESTI2003573 | 0.000 | 27.394 |
| TESTI4000014 | 0.000 | 0.655 |
| TESTI4037156 | 0.000 | 2.030 |
| TRACH2005811 | 0.000 | 3.868 |
| TRACH3004068 | 0.000 | 5.227 |
| UTERU2005621 | 0.000 | 8.268 |
| UTERU2023175 | 32.020 | 0.000 |
| FEBRA2028516 | 4.195 | 0.000 |
| HCHON2000508 | 1.370 | 0.000 |
| HLUNG2013350 | 100.000 | 0.000 |
| HLUNG2015418 | 76.605 | 0.000 |
| HLUNG2015548 | 100.000 | 0.000 |
| HLUNG2016862 | 100.000 | 0.000 |
| TESTI2015626 | 2.412 | 0.000 |
| TRACH2019672 | 76.605 | 0.000 |

### EXAMPLE 9

### In-Silico Expression Frequency Analysis Based on Large-Scale Analysis Data for 5′-End Sequences

[0737] Analyzing the expression level of a gene in various organs, tissues or cells is an exceedingly important step in clarifying the function of that organ, tissue, or cell, as well as in clarifying gene networks and in studying a causative gene of a morbid state. For example, if the expression level of a gene differs between a normal tissue and a malignant tissue, there is a possibility that that gene is involved in cancer. If tissue canceration can be suppressed by downregulating the expression of that gene, a compound comprising such downregulating activity can be used as an anticancer drug.

[0738] Various methods for analyzing gene expression frequency have been developed. For example, wet-type experiment-based methods include Northern blotting and RT-PCR, and of the use of gene chips and microarrays, where target samples synthesized from tissue or cell-derived RNA are hybridized to polynucleotides that comprise partial gene sequences synthesized on a base, or cDNA clones attached as plasmids directly to a base, and then signals are detected (Experiment Medicine, Vol. 17, No. 8, 980-1056 (1999), Eds., Muramatsu and Nawa, Cell Technology, Suppl. “DNA Microarray and New PCR Methods” (Shujunsha, 2000)). A method called “ATAC-PCR” is also available (Kato. K (1997) Nucleic Acids Res. 25, 4694-6), which comprises the steps of cleaving cDNA synthesized from tissue or cell-derived RNA, attaching adapters of different length depending on the type of tissue or cell, carrying out competitive PCR using a primer which contains a fluorescent dye and a sequence complementary to the adapter, and a primer specific to the gene, and then analyzing the expression level of the gene. In addition, an in-silico analysis-based method using sequence data is available. A database called BODYMAP (http://bodymap.ims.u-tokyo.ac.jp/) has been constructed by randomly extracting gene clones from cDNA libraries of various tissues and cells, combining clones homologous to one another as a cluster, classifying the genes in each cluster unit based on homology information on the nucleotide sequences of cDNA 3′ ends, and then obtaining information on gene expression frequency by comparing the number of clones in respective clusters.

[0739] Both experiment-based and in-silico analysis-based methods are widely accepted methods of gene expression analysis. These methods, and almost all other established methods for analyzing the frequency of gene expression, are based on analysis of 3′-end gene sequences. In human genes the 3′-untranslated regions (3′-UTR) are usually long, and thus there is controversy as to whether the results of such methods directly correspond to gene expression frequency and polypeptide expression pattern. However, the analysis method for gene expression frequency of the present invention is based on 5′-end gene sequences, and thus the expression pattern of each gene is a more accurate and faithful reproduction of the original in vivo pattern.

[0740] cDNA libraries in which the probability of cDNA completeness is exceedingly high were prepared from various tissues and cells as described in Example 1. cDNA clones were randomly selected from each library, the cDNA 5′-end sequences were determined, and a sequence database was constructed using this data. This database contains the nucleotide sequences of 1,402,069 clones, a sufficiently large population for analysis. The libraries used in the analysis, the number of cDNA clones whose 5′-end sequences were determined, and the weighted value for a single sequence in each library (100 divided by the number of sequences analyzed in each library) are described below.

TABLE 25

| | Number of clones | Weighted values |
|---|---|---|
| Library | whose 5′ ends | for single sequences |
| Names | were analyzed | (100/Number of sequences) |
| 3NB69 | 8182 | 0.012221951 |
| ACTVT | 684 | 0.14619883 |
| ADIPS | 614 | 0.16286645 |
| ADRGL | 10300 | 0.009708738 |
| AHMSC | 671 | 0.149031297 |
| ASTRO | 17226 | 0.005805178 |
| BEAST | 2736 | 0.036549708 |
| BGGI1 | 1904 | 0.052521008 |
| BLADE | 8503 | 0.011760555 |
| BNGH4 | 7739 | 0.012921566 |
| BRACE | 84087 | 0.001189244 |
| BRALZ | 16517 | 0.006054368 |
| BRAMY | 59232 | 0.001688277 |
| BRASW | 158 | 0.632911392 |
| BRAWH | 59682 | 0.001675547 |
| BRCAN | 26014 | 0.003844084 |
| BRCOC | 16847 | 0.005935775 |
| BRHIP | 58498 | 0.00170946 |
| BRSSN | 16035 | 0.006236358 |
| BRSTN | 16552 | 0.006041566 |
| BRTHA | 53818 | 0.001858114 |
| CD34C | 1421 | 0.070372977 |
| CERVX | 2888 | 0.034626039 |
| CHONS | 2694 | 0.037119525 |
| COLON | 8501 | 0.011763322 |
| CORDB | 711 | 0.140646976 |
| CTONG | 32043 | 0.003120806 |
| D3OST | 5112 | 0.019561815 |
| D6OST | 889 | 0.112485939 |
| D9OST | 4426 | 0.022593764 |
| DFNES | 10126 | 0.009874593 |
| ERLTF | 2178 | 0.045913682 |
| FCBBF | 32305 | 0.003095496 |
| FEBRA | 23941 | 0.004176935 |
| FEHRT | 2866 | 0.034891835 |
| FEKID | 2759 | 0.036245016 |
| FELIV | 186 | 0.537634409 |
| FELNG | 2775 | 0.036036036 |
| HCASM | 8989 | 0.011124708 |
| HCHON | 9432 | 0.010602205 |
| HEART | 8946 | 0.01117818 |
| HELAC | 680 | 0.147058824 |
| HHDPC | 8476 | 0.011798018 |
| HLUNG | 16272 | 0.006145526 |
| HSYRA | 7985 | 0.012523482 |
| IMR32 | 16914 | 0.005912262 |
| JCMLC | 2171 | 0.046061723 |
| KIDNE | 17119 | 0.005841463 |
| LIVER | 6885 | 0.014524328 |
| LYMPB | 2630 | 0.038022814 |
| MAMGL | 184 | 0.543478261 |
| MESAN | 16095 | 0.00621311 |
| MESTC | 691 | 0.1447178 |
| N1ESE | 2628 | 0.03805175 |
| NB9N4 | 1764 | 0.056689342 |
| NCRRM | 703 | 0.142247511 |
| NCRRP | 699 | 0.143061516 |
| NESOP | 2805 | 0.035650624 |
| NETRP | 9236 | 0.010827198 |
| NHNPC | 2392 | 0.04180602 |
| NOVAR | 2504 | 0.039936102 |
| NT2NE | 16468 | 0.006072383 |
| NT2RI | 32842 | 0.003044882 |
| NT2RM | 2074 | 0.048216008 |
| NT2RP | 24763 | 0.004038283 |
| NTISM | 181 | 0.552486188 |
| NTONG | 8098 | 0.012348728 |
| OCBBF | 48042 | 0.002081512 |
| PANCR | 182 | 0.549450549 |
| PEBLM | 7940 | 0.012594458 |
| PERIC | 8860 | 0.011286682 |
| PLACE | 33535 | 0.002981959 |
| PROST | 16829 | 0.005942124 |
| PUAEN | 10577 | 0.009454477 |
| RECTM | 2743 | 0.036456435 |
| SALGL | 185 | 0.540540541 |
| SKMUS | 8470 | 0.011806375 |
| SKNMC | 7656 | 0.013061651 |
| SKNSH | 8692 | 0.011504832 |
| SMINT | 16913 | 0.005912612 |
| SPLEN | 34307 | 0.002914857 |
| STOMA | 8770 | 0.011402509 |
| SYNOV | 27671 | 0.003613892 |
| T1ESE | 2687 | 0.037216226 |
| TBAES | 8484 | 0.011786893 |
| TCERX | 2828 | 0.035360679 |
| TCOLN | 2815 | 0.035523979 |
| TESOP | 8723 | 0.011463946 |
| TESTI | 91301 | 0.001095278 |
| THYMU | 71574 | 0.001397155 |
| TKIDN | 16123 | 0.00620232 |
| TLIVE | 8681 | 0.01151941 |
| TLUNG | 2884 | 0.034674064 |
| TOVAR | 2740 | 0.03649635 |
| TRACH | 53281 | 0.001876842 |
| TSTOM | 2779 | 0.035984167 |
| TUTER | 2678 | 0.037341299 |
| UMVEN | 633 | 0.157977883 |
| UTERU | 50040 | 0.00199 [symbol] 401 |

[0741] Using a nucleotide sequence homology search program, the nucleotide sequences of respective clones in this database were categorized (clustered) into groups, each of which contained homologous sequences. Cluster members (the number of clones whose 5′ ends were analyzed) were totalized and normalized for each library, resulting in an abundance ratio of genes in the cDNA library. In addition, 17,547 genes, including full-length cDNAs of the present invention, were assigned to a cluster using a nucleotide sequence homology search program.

[0742] In addition to the abundance ratio of the assigned genes in cDNA libraries, the sums of the weighted values for single sequences in each library were also calculated. For example, the expression of the clone BRACE2000753 was detectable in the BRACE, SPLEN, and THYMU libraries, based on expression analysis results. The single-sequence weighted values for these libraries are 0.001189244, 0.002914857, and 0.001397155 respectively, as seen in Table 1. Thus, their sum is 0.005501257. This parameter serves as an index for gene expression frequency in entire libraries. The higher this value, the greater the gene expression level. Listed below are the clone names of the 17,176 genes assigned to clusters, the number of cDNA clones whose 5′ end sequences were determined, and the sum of the weighted values for single sequences, cluster names, and the number of clones whose 5′ ends were analyzed.

LENGTHY TABLE REFERENCED HERE
US20070020637A1-20070125-T00001
Please refer to the end of the specification for access instructions.

[0743] This analysis yielded information on the expression frequencies of the 17,176 genes that include the cDNAs of the present invention, in all tissues and cells used as sources of the respective cDNA libraries and described in Example 1.

[0744] Of the 17,176 genes that include the cDNAs of the present invention, genes whose expression levels were high enough to detect in each of the 3NB69, ACTVT, ADIPS, ADRGL, AHMSC, ASTRO, and BEAST libraries were analyzed for expression frequency. The analysis results are described below. Each is a relative value, where the expression level over all tissues is taken as 100. The higher this value, the greater the level of expression.

| Clone Name | 3NB69 | ACTVT | ADIPS | ADRGL | AHMSC | ASTRO | BEAST |
|---|---|---|---|---|---|---|---|
| 3NB691000018 | 67.798 | 0 | 0 | 0 | 0 | 32.202 | 0 |
| 3NB692000281 | 1.606 | 0 | 0 | 0 | 19.579 | 0.763 | 0 |
| 3NB692000330 | 6.435 | 0 | 0 | 0 | 39.233 | 1.528 | 0 |
| 3NB692000374 | 15.821 | 0 | 0 | 0 | 0 | 3.757 | 0 |
| 3NB692000912 | 3.427 | 0 | 0 | 5.445 | 0 | 0 | 0 |
| 3NB692001022 | 18.151 | 0 | 0 | 0 | 0 | 4.311 | 0 |
| 3NB692001538 | 28.982 | 0 | 0 | 11.511 | 0 | 0 | 0 |
| ACTVT2000380 | 0 | 100 | 0 | 0 | 0 | 0 | 0 |
| ADIPS1000064 | 0 | 0 | 100 | 0 | 0 | 0 | 0 |
| ADIPS2000069 | 0 | 0 | 100 | 0 | 0 | 0 | 0 |
| ADIPS2000088 | 0 | 0 | 100 | 0 | 0 | 0 | 0 |
| ADIPS2000245 | 0 | 0 | 100 | 0 | 0 | 0 | 0 |
| ADIPS2000425 | 0 | 0 | 75.455 | 0 | 0 | 0 | 0 |
| ADRGL1000002 | 0 | 0 | 0 | 9.541 | 0 | 0 | 0 |
| ADRGL1000018 | 0 | 0 | 0 | 28.021 | 0 | 0 | 0 |
| ADRGL1000033 | 27.851 | 0 | 0 | 22.124 | 0 | 0 | 0 |
| ADRGL1000038 | 0 | 0 | 0 | 100 | 0 | 0 | 0 |
| ADRGL1000065 | 0 | 0 | 0 | 32.676 | 0 | 0 | 0 |
| ADRGL1000067 | 0 | 0 | 0 | 100 | 0 | 0 | 0 |
| ADRGL1000111 | 0 | 0 | 0 | 87.420 | 0 | 0 | 0 |
| ADRGL1000144 | 0 | 0 | 0 | 19.366 | 0 | 0 | 0 |
| ADRGL1000147 | 0 | 0 | 0 | 100 | 0 | 0 | 0 |
| ADRGL1000160 | 0 | 0 | 0 | 100 | 0 | 0 | 0 |
| ADRGL1000165 | 0 | 0 | 0 | 100 | 0 | 0 | 0 |
| ADRGL1000182 | 0 | 0 | 0 | 100 | 0 | 0 | 0 |
| ADRGL2000006 | 0 | 0 | 0 | 6.024 | 0 | 3.602 | 0 |
| ADRGL2000042 | 0 | 0 | 0 | 29.430 | 0 | 0 | 0 |
| ADRGL2000056 | 0 | 0 | 0 | 87.420 | 0 | 0 | 0 |
| ADRGL2000064 | 0 | 0 | 0 | 100 | 0 | 0 | 0 |
| ADRGL2000074 | 0 | 0 | 0 | 85.187 | 0 | 0 | 0 |
| ADRGL2000085 | 0 | 0 | 0 | 100 | 0 | 0 | 0 |
| ADRGL2000097 | 0 | 0 | 0 | 12.882 | 0 | 0 | 0 |
| ADRGL2000117 | 0 | 0 | 0 | 49.455 | 0 | 0 | 0 |
| ADRGL2000142 | 0 | 0 | 0 | 100 | 0 | 0 | 0 |
| ADRGL2000172 | 0 | 0 | 0 | 100 | 0 | 0 | 0 |
| ADRGL2000248 | 0 | 0 | 0 | 100 | 0 | 0 | 0 |
| ADRGL2000261 | 0 | 0 | 0 | 100 | 0 | 0 | 0 |
| ADRGL2000323 | 0 | 0 | 0 | 76.909 | 0 | 0 | 0 |
| ADRGL2000328 | 0 | 0 | 0 | 78.014 | 0 | 0 | 0 |
| ADRGL2000353 | 0 | 0 | 0 | 100 | 0 | 0 | 0 |
| ADRGL2000384 | 0 | 0 | 0 | 100 | 0 | 0 | 0 |
| ADRGL2000428 | 0 | 0 | 0 | 100 | 0 | 0 | 0 |
| ADRGL2000636 | 0 | 0 | 0 | 100 | 0 | 0 | 0 |
| ADRGL2000644 | 0 | 0 | 0 | 61.592 | 0 | 0 | 0 |
| ADRGL2000968 | 0 | 0 | 0 | 100 | 0 | 0 | 0 |
| ADRGL2001119 | 0 | 0 | 0 | 100 | 0 | 0 | 0 |
| ADRGL2001229 | 0 | 0 | 0 | 100 | 0 | 0 | 0 |
| ADRGL2001287 | 0 | 0 | 0 | 100 | 0 | 0 | 0 |
| ADRGL2001301 | 0 | 0 | 0 | 100 | 0 | 0 | 0 |
| ADRGL2001354 | 0 | 0 | 0 | 100 | 0 | 0 | 0 |
| ADRGL2001554 | 0 | 0 | 0 | 100 | 0 | 0 | 0 |
| ADRGL2001651 | 0 | 0 | 0 | 100 | 0 | 0 | 0 |
| ADRGL2001756 | 0 | 0 | 0 | 100 | 0 | 0 | 0 |
| ADRGL2001830 | 0 | 0 | 0 | 69.255 | 0 | 0 | 0 |
| ADRGL2001836 | 0 | 0 | 0 | 100 | 0 | 0 | 0 |
| ADRGL2001854 | 0 | 0 | 0 | 100 | 0 | 0 | 0 |
| ADRGL2002013 | 0 | 0 | 0 | 52.125 | 0 | 0 | 0 |
| ADRGL2002029 | 0 | 0 | 0 | 100 | 0 | 0 | 0 |
| ADRGL2002191 | 0 | 0 | 0 | 74.076 | 0 | 0 | 0 |
| ADRGL2002260 | 0 | 0 | 0 | 87.420 | 0 | 0 | 0 |
| ADRGL2002392 | 0 | 0 | 0 | 100 | 0 | 0 | 0 |
| ADRGL2002477 | 0 | 0 | 0 | 9.857 | 0 | 0 | 0 |
| ADRGL2002679 | 0 | 0 | 0 | 72.099 | 0 | 0 | 0 |
| ADRGL2002753 | 0 | 0 | 0 | 100 | 0 | 0 | 0 |
| ADRGL2002857 | 0 | 0 | 0 | 100 | 0 | 0 | 0 |
| ADRGL2003017 | 0 | 0 | 0 | 100 | 0 | 0 | 0 |
| ADRGL2003329 | 0 | 0 | 0 | 100 | 0 | 0 | 0 |
| ADRGL2003552 | 0 | 0 | 0 | 100 | 0 | 0 | 0 |
| ADRGL2003585 | 0 | 0 | 0 | 100 | 0 | 0 | 0 |
| ADRGL2003638 | 0 | 0 | 0 | 100 | 0 | 0 | 0 |
| ADRGL2003684 | 0 | 0 | 0 | 100 | 0 | 0 | 0 |
| ADRGL2003773 | 0 | 0 | 0 | 100 | 0 | 0 | 0 |
| ADRGL2003785 | 0 | 0 | 0 | 85.029 | 0 | 0 | 0 |
| ADRGL2004031 | 0 | 0 | 0 | 100 | 0 | 0 | 0 |
| ADRGL2004077 | 0 | 0 | 0 | 100 | 0 | 0 | 0 |
| ADRGL2004451 | 0 | 0 | 0 | 100 | 0 | 0 | 0 |
| ADRGL2004459 | 0 | 0 | 0 | 100 | 0 | 0 | 0 |
| ADRGL2004676 | 0 | 0 | 0 | 50.515 | 0 | 0 | 0 |
| ADRGL2004708 | 0 | 0 | 0 | 100 | 0 | 0 | 0 |
| ADRGL2004724 | 0 | 0 | 0 | 100 | 0 | 0 | 0 |
| ADRGL2004749 | 0 | 0 | 0 | 100 | 0 | 0 | 0 |
| ADRGL2004770 | 0 | 0 | 0 | 100 | 0 | 0 | 0 |
| ADRGL2004777 | 0 | 0 | 0 | 100 | 0 | 0 | 0 |
| ADRGL2004833 | 0 | 0 | 0 | 100 | 0 | 0 | 0 |
| ADRGL2005336 | 0 | 0 | 0 | 100 | 0 | 0 | 0 |
| ADRGL2005564 | 0 | 0 | 0 | 100 | 0 | 0 | 0 |
| ADRGL2005756 | 0 | 0 | 0 | 100 | 0 | 0 | 0 |
| ADRGL2005838 | 0 | 0 | 0 | 61.237 | 0 | 0 | 0 |
| ADRGL2005926 | 0 | 0 | 0 | 100 | 0 | 0 | 0 |
| ADRGL2005961 | 0 | 0 | 0 | 100 | 0 | 0 | 0 |
| ADRGL2006034 | 0 | 0 | 0 | 100 | 0 | 0 | 0 |
| ADRGL2006124 | 0 | 0 | 0 | 100 | 0 | 0 | 0 |
| ADRGL2006177 | 0 | 0 | 0 | 100 | 0 | 0 | 0 |
| ADRGL2006193 | 0 | 0 | 0 | 100 | 0 | 0 | 0 |
| ADRGL2006377 | 0 | 0 | 0 | 100 | 0 | 0 | 0 |
| ADRGL2006677 | 0 | 0 | 0 | 100 | 0 | 0 | 0 |
| ADRGL2006732 | 0 | 0 | 0 | 100 | 0 | 0 | 0 |
| ADRGL2006767 | 0 | 0 | 0 | 100 | 0 | 0 | 0 |
| ADRGL2006817 | 0 | 0 | 0 | 100 | 0 | 0 | 0 |
| ADRGL2006846 | 0 | 0 | 0 | 100 | 0 | 0 | 0 |
| ADRGL2006886 | 0 | 0 | 0 | 100 | 0 | 0 | 0 |
| ADRGL2007080 | 0 | 0 | 0 | 100 | 0 | 0 | 0 |
| ADRGL2007125 | 0 | 0 | 0 | 100 | 0 | 0 | 0 |
| ADRGL2007283 | 0 | 0 | 0 | 100 | 0 | 0 | 0 |
| ADRGL2007313 | 0 | 0 | 0 | 56.775 | 0 | 0 | 0 |
| ADRGL2007357 | 0 | 0 | 0 | 100 | 0 | 0 | 0 |
| ADRGL2007636 | 0 | 0 | 0 | 100 | 0 | 0 | 0 |
| ADRGL2007651 | 0 | 0 | 0 | 100 | 0 | 0 | 0 |
| ADRGL2007810 | 0 | 0 | 0 | 100 | 0 | 0 | 0 |
| ADRGL2007877 | 0 | 0 | 0 | 100 | 0 | 0 | 0 |
| ADRGL2007906 | 0 | 0 | 0 | 52.219 | 0 | 0 | 0 |
| ADRGL2007974 | 0 | 0 | 0 | 85.187 | 0 | 0 | 0 |
| ADRGL2008023 | 0 | 0 | 0 | 100 | 0 | 0 | 0 |
| ADRGL2008331 | 0 | 0 | 0 | 100 | 0 | 0 | 0 |
| ADRGL2008337 | 0 | 0 | 0 | 100 | 0 | 0 | 0 |
| ADRGL2008535 | 0 | 0 | 0 | 87.420 | 0 | 0 | 0 |
| ADRGL2008966 | 0 | 0 | 0 | 85.187 | 0 | 0 | 0 |
| ADRGL2009146 | 0 | 0 | 0 | 89.087 | 0 | 0 | 0 |
| ADRGL2009273 | 0 | 0 | 0 | 8.049 | 0 | 0 | 0 |
| ADRGL2009324 | 0 | 0 | 0 | 100 | 0 | 0 | 0 |
| ADRGL2009489 | 0 | 0 | 0 | 100 | 0 | 0 | 0 |
| ADRGL2009533 | 0 | 0 | 0 | 100 | 0 | 0 | 0 |
| ADRGL2009691 | 0 | 0 | 0 | 100 | 0 | 0 | 0 |
| ADRGL2009755 | 0 | 0 | 0 | 100 | 0 | 0 | 0 |
| ADRGL2010152 | 0 | 0 | 0 | 33.564 | 0 | 0 | 0 |
| ADRGL2010315 | 0 | 0 | 0 | 100 | 0 | 0 | 0 |
| ADRGL2010594 | 0 | 0 | 0 | 100 | 0 | 0 | 0 |
| ADRGL2010860 | 0 | 0 | 0 | 100 | 0 | 0 | 0 |
| ADRGL2010974 | 0 | 0 | 0 | 100 | 0 | 0 | 0 |
| ADRGL2011190 | 0 | 0 | 0 | 100 | 0 | 0 | 0 |
| ADRGL2011330 | 0 | 0 | 0 | 87.420 | 0 | 0 | 0 |
| ADRGL2012038 | 0 | 0 | 0 | 11.911 | 0 | 0 | 0 |
| ADRGL2012179 | 0 | 0 | 0 | 82.345 | 0 | 0 | 0 |
| AHMSC1000138 | 0 | 0 | 0 | 0 | 100 | 0 | 0 |
| ASTRO1000009 | 0 | 0 | 0 | 0 | 0 | 9.047 | 0 |
| ASTRO1000018 | 0 | 0 | 0 | 0 | 0 | 100 | 0 |
| ASTRO1000029 | 0 | 0 | 0 | 0 | 0 | 100 | 0 |
| ASTRO1000096 | 0 | 0 | 0 | 0 | 0 | 34.903 | 0 |
| ASTRO1000165 | 0 | 0 | 0 | 0 | 0 | 7.679 | 0 |
| ASTRO2000011 | 0 | 0 | 0 | 0 | 0 | 100 | 0 |
| ASTRO2000014 | 0 | 0 | 0 | 0 | 0 | 1.423 | 0 |
| ASTRO2000046 | 0 | 0 | 0 | 0 | 0 | 12.724 | 0 |
| ASTRO2000095 | 0 | 0 | 0 | 0 | 0 | 100 | 0 |
| ASTRO2000141 | 0 | 0 | 0 | 0 | 0 | 5.262 | 0 |
| ASTRO2000191 | 0 | 0 | 0 | 0 | 0 | 100 | 0 |
| ASTRO2000278 | 0 | 0 | 0 | 0 | 0 | 67.506 | 0 |
| ASTRO2000372 | 0 | 0 | 0 | 0 | 0 | 77.252 | 0 |
| ASTRO2000381 | 0 | 0 | 0 | 0 | 0 | 21.758 | 0 |
| ASTRO2000403 | 0 | 0 | 0 | 0 | 0 | 100 | 0 |
| ASTRO2000417 | 0 | 0 | 0 | 0 | 0 | 100 | 0 |
| ASTRO2000480 | 0 | 0 | 0 | 0 | 0 | 9.809 | 0 |
| ASTRO2000482 | 0 | 0 | 0 | 0 | 0 | 77.602 | 0 |
| ASTRO2000533 | 0 | 0 | 0 | 0 | 0 | 100 | 0 |
| ASTRO2000653 | 0 | 0 | 0 | 0 | 0 | 100 | 0 |
| ASTRO2000662 | 0 | 0 | 0 | 0 | 0 | 27.944 | 0 |
| ASTRO2000725 | 0 | 0 | 0 | 0 | 0 | 100 | 0 |
| ASTRO2000801 | 0 | 0 | 0 | 0 | 0 | 3.534 | 0 |
| ASTRO2000914 | 0 | 0 | 0 | 0 | 0 | 6.744 | 0 |
| ASTRO2001001 | 0 | 0 | 0 | 0 | 0 | 100 | 0 |
| ASTRO2001008 | 0 | 0 | 0 | 0 | 0 | 100 | 0 |
| ASTRO2001029 | 0 | 0 | 0 | 0 | 0 | 4.345 | 0 |
| ASTRO2001076 | 0 | 0 | 0 | 0 | 0 | 4.924 | 0 |
| ASTRO2001088 | 0 | 0 | 0 | 0 | 0 | 100 | 0 |
| ASTRO2001107 | 0 | 0 | 0 | 0 | 0 | 25.307 | 0 |
| ASTRO2001122 | 0 | 0 | 0 | 0 | 0 | 100 | 0 |
| ASTRO2001227 | 0 | 0 | 0 | 0 | 0 | 100 | 0 |
| ASTRO2001249 | 0 | 0 | 0 | 0 | 0 | 32.962 | 0 |
| ASTRO2001480 | 0 | 0 | 0 | 0 | 0 | 100 | 0 |
| ASTRO2001806 | 0 | 0 | 0 | 0 | 0 | 19.827 | 0 |
| ASTRO2001823 | 0 | 0 | 0 | 0 | 0 | 5.029 | 0 |
| ASTRO2002024 | 0 | 0 | 0 | 0 | 0 | 45.423 | 0 |
| ASTRO2002035 | 0 | 0 | 0 | 0 | 0 | 37.605 | 0 |
| ASTRO2002064 | 0 | 0 | 0 | 0 | 0 | 48.346 | 0 |
| ASTRO2002202 | 0 | 0 | 0 | 0 | 0 | 23.952 | 0 |
| ASTRO2002459 | 0 | 0 | 0 | 5.072 | 77.860 | 3.033 | 0 |
| ASTRO2002571 | 0 | 0 | 0 | 0 | 0 | 100 | 0 |
| ASTRO2002632 | 0 | 0 | 0 | 0 | 0 | 100 | 0 |
| ASTRO2002659 | 0 | 0 | 0 | 0 | 0 | 100 | 0 |
| ASTRO2002693 | 0 | 0 | 0 | 0 | 0 | 24.559 | 0 |
| ASTRO2002720 | 0 | 0 | 0 | 0 | 0 | 84.127 | 0 |
| ASTRO2002733 | 0 | 0 | 0 | 0 | 0 | 53.302 | 0 |
| ASTRO2002743 | 0 | 0 | 0 | 0 | 0 | 100 | 0 |
| ASTRO2002842 | 0 | 0 | 0 | 0 | 0 | 32.999 | 0 |
| ASTRO2003024 | 0 | 0 | 0 | 0 | 0 | 6.568 | 0 |
| ASTRO2003212 | 0 | 0 | 0 | 0 | 0 | 51.901 | 0 |
| ASTRO2003316 | 0 | 0 | 0 | 0 | 0 | 30.661 | 0 |
| ASTRO2003461 | 0 | 0 | 0 | 0 | 0 | 41.276 | 0 |
| ASTRO2003574 | 0 | 0 | 0 | 0 | 0 | 51.689 | 0 |
| ASTRO2003581 | 0 | 0 | 0 | 0 | 0 | 100 | 0 |
| ASTRO2003632 | 0 | 0 | 0 | 2.407 | 0 | 8.636 | 0 |
| ASTRO2003740 | 0 | 0 | 0 | 0 | 0 | 60.162 | 0 |
| ASTRO2003840 | 0 | 0 | 0 | 0 | 0 | 21.461 | 0 |
| ASTRO2003925 | 0 | 0 | 0 | 0 | 0 | 74.391 | 0 |
| ASTRO2003960 | 0 | 0 | 0 | 0 | 0 | 82.997 | 0 |
| ASTRO2004032 | 0 | 0 | 0 | 0 | 0 | 21.115 | 0 |
| ASTRO2004051 | 0 | 0 | 0 | 0 | 0 | 100 | 0 |
| ASTRO2004177 | 0 | 0 | 0 | 0 | 0 | 82.997 | 0 |
| ASTRO2004217 | 0 | 0 | 0 | 0 | 0 | 100 | 0 |
| ASTRO2004297 | 0 | 0 | 0 | 0 | 0 | 100 | 0 |
| ASTRO2004584 | 0 | 0 | 0 | 0 | 0 | 100 | 0 |
| ASTRO2004628 | 0 | 0 | 0 | 0 | 0 | 30.838 | 0 |
| ASTRO2004751 | 0 | 0 | 0 | 0 | 0 | 100 | 0 |
| ASTRO2004877 | 0 | 0 | 0 | 0 | 0 | 100 | 0 |
| ASTRO2004974 | 0 | 0 | 0 | 0 | 0 | 6.732 | 0 |
| ASTRO2005008 | 0 | 0 | 0 | 0 | 0 | 100 | 0 |
| ASTRO2005081 | 0 | 0 | 0 | 0 | 0 | 100 | 0 |
| ASTRO2005096 | 0 | 0 | 0 | 0 | 0 | 100 | 0 |
| ASTRO2005242 | 0 | 0 | 0 | 0 | 0 | 31.985 | 0 |
| ASTRO2005273 | 0 | 0 | 0 | 0 | 0 | 100 | 0 |
| ASTRO2005343 | 0 | 0 | 0 | 0 | 0 | 100 | 0 |
| ASTRO2005360 | 0 | 0 | 0 | 0 | 0 | 20.669 | 0 |
| ASTRO2005413 | 0 | 0 | 0 | 0 | 0 | 100 | 0 |
| ASTRO2005423 | 0 | 0 | 0 | 0 | 0 | 11.930 | 0 |
| ASTRO2005553 | 0 | 0 | 0 | 0 | 0 | 8.978 | 0 |
| ASTRO2005557 | 0 | 0 | 0 | 0 | 0 | 100 | 0 |
| ASTRO2005575 | 0 | 0 | 0 | 0 | 0 | 100 | 0 |
| ASTRO2005593 | 0 | 0 | 0 | 0 | 0 | 48.346 | 0 |
| ASTRO2005687 | 0 | 0 | 0 | 0 | 0 | 11.585 | 0 |
| ASTRO2005726 | 0 | 0 | 0 | 0 | 0 | 100 | 0 |
| ASTRO2005863 | 0 | 0 | 0 | 0 | 0 | 26.342 | 0 |
| ASTRO2005896 | 0 | 0 | 0 | 0 | 0 | 30.769 | 0 |
| ASTRO2005902 | 0 | 0 | 0 | 0 | 0 | 100 | 0 |
| ASTRO2006356 | 0 | 0 | 0 | 0 | 0 | 100 | 0 |
| ASTRO2006475 | 0 | 0 | 0 | 0 | 0 | 25.805 | 0 |
| ASTRO2006732 | 0 | 0 | 0 | 0 | 0 | 53.140 | 0 |
| ASTRO2006747 | 0 | 0 | 0 | 0 | 0 | 100 | 0 |
| ASTRO2006920 | 0 | 0 | 0 | 0 | 0 | 20.786 | 0 |
| ASTRO2006952 | 0 | 0 | 0 | 0 | 0 | 100 | 0 |
| ASTRO2007047 | 0 | 0 | 0 | 0 | 0 | 7.241 | 0 |
| ASTRO2007221 | 0 | 0 | 0 | 0 | 0 | 65.037 | 0 |
| ASTRO2007377 | 0 | 0 | 0 | 0 | 0 | 100 | 0 |
| ASTRO2007515 | 0 | 0 | 0 | 0 | 0 | 100 | 0 |
| ASTRO2007578 | 0 | 0 | 0 | 0 | 0 | 100 | 0 |
| ASTRO2007643 | 0 | 0 | 0 | 0 | 0 | 100 | 0 |
| ASTRO2007666 | 0 | 0 | 0 | 0 | 0 | 100 | 0 |
| ASTRO2007948 | 0 | 0 | 0 | 0 | 0 | 8.677 | 0 |
| ASTRO2007956 | 0 | 0 | 0 | 0 | 0 | 100 | 0 |
| ASTRO2007962 | 0 | 0 | 0 | 0 | 0 | 100 | 0 |
| ASTRO2008040 | 0 | 0 | 0 | 0 | 0 | 41.505 | 0 |
| ASTRO2008216 | 0 | 0 | 0 | 0 | 0 | 11.056 | 0 |
| ASTRO2008239 | 0 | 0 | 0 | 0 | 0 | 100 | 0 |
| ASTRO2008409 | 0 | 0 | 0 | 0 | 0 | 45.042 | 0 |
| ASTRO2008425 | 0 | 0 | 0 | 0 | 0 | 100 | 0 |
| ASTRO2008508 | 0 | 0 | 0 | 0 | 0 | 31.159 | 0 |
| ASTRO2008777 | 0 | 0 | 0 | 0 | 0 | 100 | 0 |
| ASTRO2008895 | 0 | 0 | 0 | 0 | 0 | 100 | 0 |
| ASTRO2008960 | 0 | 0 | 0 | 0 | 0 | 100 | 0 |
| ASTRO2008972 | 0 | 0 | 0 | 0 | 0 | 53.958 | 0 |
| ASTRO2009068 | 0 | 0 | 0 | 0 | 0 | 19.605 | 0 |
| ASTRO2009118 | 0 | 0 | 0 | 0 | 0 | 54.118 | 0 |
| ASTRO2009177 | 0 | 0 | 0 | 0 | 0 | 100 | 0 |
| ASTRO2009333 | 0 | 0 | 0 | 0 | 0 | 100 | 0 |
| ASTRO2009458 | 0 | 0 | 0 | 0 | 0 | 100 | 0 |
| ASTRO2009526 | 0 | 0 | 0 | 0 | 0 | 100 | 0 |
| ASTRO2009879 | 0 | 0 | 0 | 0 | 0 | 100 | 0 |
| ASTRO2010072 | 0 | 0 | 0 | 0 | 0 | 60.162 | 0 |
| ASTRO2010582 | 0 | 0 | 0 | 0 | 0 | 59.968 | 0 |
| ASTRO2010615 | 0 | 0 | 0 | 0 | 0 | 100 | 0 |
| ASTRO2010799 | 0 | 0 | 0 | 0 | 0 | 49.444 | 0 |
| ASTRO2010819 | 0 | 0 | 0 | 3.899 | 0 | 2.331 | 0 |
| ASTRO2010962 | 0 | 0 | 0 | 0 | 0 | 100 | 0 |
| ASTRO2010996 | 0 | 0 | 0 | 0 | 0 | 65.595 | 0 |
| ASTRO2011149 | 0 | 0 | 0 | 0 | 0 | 100 | 0 |
| ASTRO2011422 | 0 | 0 | 0 | 0 | 0 | 25.135 | 0 |
| ASTRO2011426 | 0 | 0 | 0 | 0 | 0 | 100 | 0 |
| ASTRO2011437 | 0 | 0 | 0 | 0 | 0 | 100 | 0 |
| ASTRO2011461 | 0 | 0 | 0 | 0 | 0 | 100 | 0 |
| ASTRO2011834 | 0 | 0 | 0 | 0 | 0 | 100 | 0 |
| ASTRO2011893 | 0 | 0 | 0 | 0 | 0 | 100 | 0 |
| ASTRO2012552 | 0 | 0 | 0 | 0 | 0 | 10.242 | 0 |
| ASTRO2013124 | 0 | 0 | 0 | 0 | 0 | 100 | 0 |
| ASTRO2013585 | 7.112 | 0 | 0 | 0 | 0 | 1.689 | 0 |
| ASTRO2013671 | 0 | 0 | 0 | 0 | 0 | 80.601 | 0 |
| ASTRO2013802 | 0 | 0 | 0 | 0 | 0 | 100 | 0 |
| ASTRO2014135 | 0 | 0 | 0 | 0 | 0 | 12.035 | 0 |
| ASTRO2014174 | 0 | 0 | 0 | 0 | 0 | 77.252 | 0 |
| ASTRO2014211 | 0 | 0 | 0 | 0 | 0 | 100 | 0 |
| ASTRO2014363 | 0 | 0 | 0 | 0 | 0 | 100 | 0 |
| ASTRO2014392 | 0 | 0 | 0 | 0 | 0 | 51.203 | 0 |
| ASTRO2014498 | 0 | 0 | 0 | 0 | 0 | 61.936 | 0 |
| ASTRO2014561 | 0 | 0 | 0 | 0 | 0 | 30.533 | 0 |
| ASTRO2014576 | 0 | 0 | 0 | 0 | 0 | 39.158 | 0 |
| ASTRO2014863 | 0 | 0 | 0 | 0 | 0 | 11.705 | 0 |
| ASTRO2014923 | 0 | 0 | 0 | 0 | 0 | 100 | 0 |
| ASTRO2014961 | 0 | 0 | 0 | 0 | 0 | 100 | 0 |
| ASTRO2015162 | 0 | 0 | 0 | 0 | 0 | 100 | 0 |
| ASTRO2015185 | 0 | 0 | 0 | 0 | 0 | 100 | 0 |
| ASTRO2015328 | 0 | 0 | 0 | 0 | 0 | 39.556 | 0 |
| ASTRO2015529 | 0 | 0 | 0 | 0 | 0 | 6.419 | 0 |
| ASTRO2015987 | 0 | 0 | 0 | 0 | 0 | 9.099 | 0 |
| ASTRO2016044 | 0 | 0 | 0 | 0 | 0 | 100 | 0 |
| ASTRO2016114 | 0 | 0 | 0 | 0 | 0 | 50.227 | 0 |
| ASTRO2016148 | 0 | 0 | 0 | 0 | 0 | 73.607 | 0 |
| ASTRO2016491 | 0 | 0 | 0 | 2.918 | 0 | 1.745 | 0 |
| ASTRO2016681 | 0 | 0 | 0 | 0 | 0 | 100 | 0 |
| ASTRO2016819 | 0 | 0 | 0 | 0 | 0 | 22.357 | 0 |
| ASTRO2016847 | 0 | 0 | 0 | 0 | 0 | 100 | 0 |
| ASTRO2016892 | 0 | 0 | 0 | 0 | 0 | 100 | 0 |
| ASTRO2017348 | 0 | 0 | 0 | 0 | 0 | 100 | 0 |
| ASTRO2017627 | 0 | 0 | 0 | 0 | 0 | 100 | 0 |
| ASTRO2018169 | 0 | 0 | 0 | 0 | 0 | 3.272 | 0 |
| ASTRO2018373 | 0 | 0 | 0 | 0 | 0 | 48.346 | 0 |
| ASTRO2018540 | 0 | 0 | 0 | 0 | 0 | 5.388 | 0 |
| ASTRO2019039 | 0 | 0 | 0 | 0 | 0 | 100 | 0 |
| ASTRO2019171 | 0 | 0 | 0 | 0 | 0 | 61.936 | 0 |
| ASTRO3000154 | 0 | 0 | 0 | 0 | 0 | 100 | 0 |
| ASTRO3000172 | 0 | 0 | 0 | 0 | 0 | 100 | 0 |
| ASTRO3000177 | 0 | 0 | 0 | 0 | 0 | 100 | 0 |
| ASTRO3000301 | 0 | 0 | 0 | 0 | 0 | 100 | 0 |
| ASTRO3000474 | 0 | 0 | 0 | 0 | 0 | 100 | 0 |
| ASTRO3000482 | 0 | 0 | 0 | 0 | 0 | 75.753 | 0 |
| BEAST2000454 | 0 | 0 | 0 | 0 | 0 | 0 | 100 |
| BGGI12000054 | 0 | 0 | 0 | 2.729 | 0 | 0.816 | 5.137 |
| BGGI12000616 | 0 | 0 | 0 | 5.181 | 0 | 0 | 0 |
| BGGI12001097 | 0 | 0 | 0 | 6.512 | 0 | 0 | 0 |
| BLADE2006830 | 0 | 0 | 0 | 0 | 0 | 5.824 | 0 |
| BNGH41000190 | 0 | 0 | 0 | 0 | 0 | 8.767 | 0 |
| BNGH41000198 | 0 | 0 | 0 | 24.076 | 0 | 0 | 0 |
| BNGH42000360 | 1.147 | 0 | 0 | 0.911 | 0 | 0 | 10.293 |
| BNGH42007460 | 0 | 0 | 0 | 5.839 | 0 | 0 | 0 |
| BNGH42007709 | 1.679 | 0 | 0 | 0 | 0 | 0.797 | 0 |
| BNGH42007788 | 0 | 0 | 0 | 0 | 0 | 10.666 | 0 |
| BRACE1000132 | 0 | 0 | 0 | 0 | 0 | 49.767 | 0 |
| BRACE2000148 | 0 | 0 | 0 | 20.686 | 0 | 0 | 0 |
| BRACE2000307 | 0 | 0 | 0 | 0 | 0 | 4.081 | 0 |
| BRACE2001143 | 0 | 0 | 0 | 8.607 | 0 | 0 | 0 |
| BRACE2001151 | 0 | 0 | 0 | 37.402 | 0 | 0 | 0 |
| BRACE2001692 | 0 | 0 | 58.856 | 0 | 0 | 0 | 0 |
| BRACE2002392 | 0 | 0 | 0 | 0 | 0 | 5.972 | 0 |
| BRACE2002441 | 0 | 0 | 0 | 0 | 0 | 11.706 | 0 |
| BRACE2002752 | 0 | 0 | 0 | 89.087 | 0 | 0 | 0 |
| BRACE2002860 | 0 | 0 | 0 | 14.588 | 0 | 0 | 0 |
| BRACE2003217 | 0 | 0 | 0 | 0 | 0 | 14.934 | 0 |
| BRACE2003254 | 0 | 0 | 0 | 0 | 0 | 3.137 | 0 |
| BRACE2003628 | 0 | 0 | 0 | 39.531 | 0 | 0 | 0 |
| BRACE2003785 | 0 | 0 | 0 | 0 | 0 | 3.367 | 0 |
| BRACE2003827 | 0 | 0 | 0 | 0 | 0 | 3.035 | 0 |
| BRACE2005151 | 0 | 0 | 0 | 12.175 | 0 | 0 | 0 |
| BRACE2005434 | 5.029 | 60.155 | 0 | 3.995 | 0 | 0 | 0 |
| BRACE2006537 | 0 | 0 | 0 | 6.236 | 0 | 0 | 0 |
| BRACE2006871 | 0 | 87.244 | 0 | 0 | 0 | 0 | 0 |
| BRACE2007089 | 0 | 0 | 0 | 4.906 | 0 | 0 | 0 |
| BRACE2007191 | 0 | 0 | 0 | 0 | 61.094 | 0 | 0 |
| BRACE2007671 | 0 | 0 | 0 | 0 | 0 | 5.357 | 0 |
| BRACE2007708 | 0 | 0 | 0 | 0 | 0 | 7.362 | 0 |
| BRACE2008097 | 0 | 0 | 0 | 27.819 | 0 | 0 | 0 |
| BRACE2008399 | 0 | 0 | 0 | 32.070 | 0 | 0 | 0 |
| BRACE2008402 | 0 | 0 | 0 | 24.298 | 0 | 0 | 0 |
| BRACE2008653 | 0 | 0 | 0 | 3.056 | 0 | 0 | 0 |
| BRACE2008706 | 0 | 0 | 0 | 19.039 | 0 | 0 | 0 |
| BRACE2008881 | 0 | 0 | 0 | 80.322 | 0 | 0 | 0 |
| BRACE2008968 | 4.241 | 0 | 0 | 3.369 | 0 | 0 | 0 |
| BRACE2009291 | 0 | 0 | 0 | 7.665 | 0 | 4.583 | 0 |
| BRACE2009517 | 0 | 0 | 0 | 0 | 0 | 9.397 | 0 |
| BRACE2009721 | 0 | 0 | 0 | 0 | 0 | 82.997 | 0 |
| BRACE2010642 | 0 | 0 | 0 | 89.087 | 0 | 0 | 0 |
| BRACE2013911 | 0 | 0 | 0 | 43.556 | 0 | 0 | 0 |
| BRACE2015412 | 0 | 0 | 0 | 70.543 | 0 | 0 | 0 |
| BRACE2017934 | 0 | 0 | 0 | 53.554 | 0 | 0 | 0 |
| BRACE2022638 | 5.437 | 0 | 0 | 0 | 0 | 2.582 | 0 |
| BRACE2028171 | 0 | 0 | 0 | 89.087 | 0 | 0 | 0 |
| BRACE2039624 | 0 | 0 | 0 | 5.606 | 0 | 6.704 | 0 |
| BRACE3010438 | 0 | 0 | 0 | 0 | 0 | 6.204 | 0 |
| BRALZ2009482 | 0 | 0 | 0 | 0 | 0 | 2.575 | 0 |
| BRALZ2014054 | 0 | 0 | 0 | 61.592 | 0 | 0 | 0 |
| BRAMY2000893 | 0 | 0 | 0 | 0 | 0 | 5.272 | 0 |
| BRAMY2000987 | 0 | 0 | 0 | 0 | 0 | 58.805 | 0 |
| BRAMY2004363 | 0 | 0 | 0 | 0 | 0 | 7.083 | 0 |
| BRAMY2004521 | 0 | 0 | 0 | 0 | 0 | 8.212 | 0 |
| BRAMY2012536 | 0 | 50.363 | 0 | 0 | 0 | 0 | 0 |
| BRAMY2016706 | 0 | 0 | 0 | 0 | 0 | 34.345 | 0 |
| BRAMY2019554 | 0 | 0 | 0 | 4.624 | 0 | 0 | 0 |
| BRAMY2022786 | 0 | 0 | 0 | 7.230 | 0 | 8.647 | 0 |
| BRAMY2028740 | 0 | 0 | 0 | 0 | 0 | 6.451 | 0 |
| BRAMY2030545 | 0 | 0 | 0 | 0 | 0 | 77.470 | 0 |
| BRAMY2032087 | 0 | 0 | 0 | 0 | 0 | 4.196 | 0 |
| BRAMY2040095 | 0 | 0 | 0 | 1.981 | 0 | 1.184 | 0 |
| BRAMY3002991 | 0 | 0 | 0 | 22.719 | 0 | 0 | 0 |
| BRAMY3010008 | 0 | 0 | 0 | 0 | 0 | 2.016 | 0 |
| BRAMY4000089 | 0 | 0 | 0 | 29.487 | 0 | 0 | 0 |
| BRAWH1000040 | 0 | 0 | 0 | 0 | 0 | 4.768 | 0 |
| BRAWH1000083 | 0 | 0 | 0 | 0 | 0 | 15.698 | 0 |
| BRAWH2000460 | 0 | 0 | 0 | 7.073 | 0 | 2.115 | 0 |
| BRAWH2000588 | 0 | 0 | 0 | 7.269 | 0 | 8.693 | 0 |
| BRAWH2000697 | 0 | 0 | 0 | 0 | 0 | 3.505 | 0 |
| BRAWH2000839 | 0 | 0 | 0 | 0 | 0 | 1.423 | 0 |
| BRAWH2000924 | 0 | 0 | 0 | 1.663 | 0 | 0.994 | 0 |
| BRAWH2001092 | 0 | 0 | 0 | 5.092 | 0 | 0.609 | 0 |
| BRAWH2004078 | 0 | 0 | 0 | 61.066 | 0 | 0 | 0 |
| BRAWH2005661 | 0 | 0 | 0 | 9.263 | 0 | 0 | 0 |
| BRAWH2009227 | 0 | 0 | 0 | 0 | 0 | 54.758 | 0 |
| BRAWH2010536 | 0 | 0 | 0 | 85.282 | 0 | 0 | 0 |
| BRAWH2017379 | 0 | 0 | 0 | 0 | 0 | 52.645 | 0 |
| BRAWH2017685 | 0 | 0 | 0 | 0 | 0 | 3.517 | 0 |
| BRAWH2018526 | 4.489 | 0 | 0 | 0 | 0 | 3.199 | 0 |
| BRAWH3000088 | 0 | 0 | 0 | 0 | 0 | 4.008 | 0 |
| BRAWH3002574 | 0 | 0 | 0 | 0 | 0 | 22.906 | 0 |
| BRAWH3002853 | 0 | 0 | 0 | 0 | 0 | 2.563 | 0 |
| BRAWH3008931 | 0 | 0 | 0 | 20.069 | 0 | 0 | 0 |
| BRCAN2003944 | 0 | 0 | 0 | 0 | 25.048 | 2.927 | 0 |
| BRCAN2011946 | 0 | 0 | 0 | 36.641 | 0 | 0 | 0 |
| BRCAN2016174 | 0 | 0 | 0 | 62.999 | 0 | 0 | 0 |
| BRCAN2026197 | 0 | 0 | 0 | 0 | 0 | 5.409 | 0 |
| BRCAN2028036 | 0 | 0 | 0 | 13.990 | 0 | 8.365 | 0 |
| BRHIP1000104 | 0 | 0 | 0 | 0 | 0 | 2.265 | 0 |
| BRHIP2000534 | 0 | 0 | 0 | 0 | 0 | 1.186 | 0 |
| BRHIP2000553 | 0 | 0 | 0 | 0 | 0 | 8.903 | 0 |
| BRHIP2007741 | 0 | 0 | 0 | 0 | 0 | 6.014 | 0 |
| BRHIP2023272 | 0 | 0 | 0 | 0 | 0 | 11.694 | 0 |
| BRHIP2023888 | 0 | 0 | 0 | 2.132 | 0 | 3.824 | 0 |
| BRHIP2027077 | 0 | 0 | 0 | 0 | 0 | 6.998 | 0 |
| BRHIP3000111 | 0 | 0 | 0 | 5.932 | 0 | 0 | 0 |
| BRHIP3020046 | 0 | 0 | 0 | 0 | 0 | 3.509 | 0 |
| BRSSN2001869 | 0 | 0 | 0 | 0 | 0 | 10.458 | 0 |
| BRSSN2011262 | 0 | 0 | 0 | 0 | 0 | 0 | 61.476 |
| BRSSN2014299 | 0 | 0 | 0 | 64.234 | 0 | 0 | 0 |
| BRSTN2001067 | 0 | 0 | 0 | 35.873 | 0 | 0 | 0 |
| BRSTN2011961 | 0 | 0 | 0 | 0 | 0 | 0 | 6.317 |
| BRSTN2012069 | 3.312 | 0.825 | 0.919 | 1.699 | 0 | 0.459 | 0 |
| BRSTN2012451 | 0 | 0 | 0 | 0 | 73.463 | 0 | 0 |
| BRSTN2013171 | 0 | 0 | 0 | 40.158 | 0 | 0 | 0 |
| BRSTN2013931 | 0 | 84.303 | 0 | 0 | 0 | 0 | 0 |
| BRSTN2016470 | 0 | 19.098 | 0 | 0 | 0 | 0 | 0 |
| BRTHA2005864 | 0 | 0 | 0 | 0 | 0 | 5.622 | 0 |
| BRTHA3003023 | 0 | 0 | 0 | 0 | 0 | 7.002 | 0 |
| BRTHA3003490 | 0 | 0 | 0 | 0 | 0 | 11.249 | 0 |
| BRTHA3003736 | 0 | 0 | 0 | 0 | 0 | 7.453 | 0 |
| BRTHA3007472 | 0 | 0 | 0 | 0 | 0 | 13.519 | 0 |
| CD34C3000252 | 0 | 0 | 0 | 0 | 0 | 2.844 | 0 |
| CTONG1000087 | 0 | 0 | 0 | 6.059 | 0 | 0 | 0 |
| CTONG1000094 | 2.841 | 0 | 0 | 0 | 0 | 1.349 | 0 |
| CTONG2000469 | 0 | 0 | 0 | 16.920 | 0 | 0 | 0 |
| CTONG2000561 | 0 | 0 | 0 | 0 | 0 | 12.572 | 0 |
| CTONG2002903 | 0 | 0 | 0 | 0 | 0 | 10.672 | 0 |
| CTONG2003094 | 0 | 0 | 0 | 0 | 0 | 12.696 | 0 |
| CTONG2003298 | 0 | 0 | 0 | 0 | 0 | 7.543 | 0 |
| CTONG2003764 | 0 | 0 | 0 | 75.675 | 0 | 0 | 0 |
| CTONG2004115 | 0 | 0 | 0 | 69.255 | 0 | 0 | 0 |
| CTONG2005278 | 0 | 0 | 0 | 0 | 0 | 19.970 | 0 |
| CTONG2005553 | 0 | 0 | 0 | 0 | 0 | 2.481 | 0 |
| CTONG2006932 | 0 | 0 | 0 | 0 | 0 | 3.813 | 0 |
| CTONG2008269 | 0 | 0 | 0 | 39.422 | 0 | 0 | 0 |
| CTONG2008506 | 0 | 0 | 0 | 0 | 0 | 3.260 | 0 |
| CTONG2010348 | 0 | 0 | 0 | 10.260 | 0 | 0 | 0 |
| CTONG2010649 | 0 | 0 | 0 | 0 | 0 | 5.418 | 0 |
| CTONG2011801 | 0 | 0 | 0 | 17.157 | 0 | 0 | 0 |
| CTONG2012452 | 2.597 | 0 | 0 | 2.063 | 0 | 2.467 | 0 |
| CTONG2012453 | 0 | 0 | 0 | 43.638 | 0 | 0 | 0 |
| CTONG2014705 | 0 | 0 | 0 | 0 | 0 | 65.037 | 0 |
| CTONG2015091 | 0 | 0 | 0 | 4.706 | 0 | 0 | 0 |
| CTONG2016185 | 0 | 0 | 0 | 0 | 0 | 9.007 | 0 |
| CTONG2016575 | 3.627 | 0 | 0 | 0 | 0 | 3.445 | 0 |
| CTONG2018383 | 0 | 0 | 0 | 0 | 0 | 15.662 | 0 |
| CTONG2018739 | 0 | 0 | 0 | 0 | 0 | 13.427 | 0 |
| CTONG2018898 | 0 | 0 | 0 | 0 | 0 | 1.669 | 0 |
| CTONG2020484 | 0 | 0 | 0 | 0 | 0 | 2.037 | 0 |
| CTONG2020560 | 0 | 0 | 0 | 0 | 0 | 10.395 | 0 |
| CTONG3009239 | 0 | 0 | 0 | 0 | 0 | 5.002 | 0 |
| D30ST2001670 | 0 | 0 | 0 | 21.620 | 0 | 0 | 0 |
| DFNES2000153 | 0 | 0 | 0 | 18.552 | 0 | 0 | 0 |
| DFNES2000292 | 0 | 0 | 0 | 0 | 0 | 13.003 | 0 |
| DFNES2000443 | 0 | 0 | 0 | 0 | 0 | 2.352 | 0 |
| DFNES2000526 | 0 | 0 | 0 | 0 | 0 | 28.724 | 0 |
| DFNES2001091 | 0 | 0 | 0 | 0 | 0 | 29.734 | 0 |
| DFNES2004371 | 0 | 0 | 0 | 0 | 0 | 5.466 | 0 |
| DFNES2007641 | 0 | 0 | 0 | 0 | 0 | 37.023 | 0 |
| FCBBF1000023 | 0 | 0 | 0 | 0 | 0 | 24.372 | 0 |
| FCBBF1000025 | 0 | 0 | 0 | 0 | 0 | 11.087 | 0 |
| FCBBF1000063 | 0 | 0 | 0 | 0 | 0 | 20.721 | 0 |
| FCBBF1000367 | 0 | 0 | 0 | 8.803 | 0 | 5.263 | 0 |
| FCBBF1000466 | 0 | 0 | 0 | 0 | 0 | 2.206 | 0 |
| FCBBF1000760 | 0 | 0 | 0 | 0 | 58.246 | 0 | 0 |
| FCBBF2000087 | 0 | 0 | 0 | 0 | 0 | 9.995 | 0 |
| FCBBF2000502 | 0 | 0 | 0 | 38.225 | 0 | 0 | 0 |
| FCBBF2000591 | 0 | 0 | 0 | 0 | 0 | 0.993 | 0 |
| FCBBF2000885 | 0 | 0 | 0 | 0 | 0 | 5.318 | 0 |
| FCBBF2001105 | 0 | 0 | 0 | 17.589 | 0 | 0 | 0 |
| FCBBF3001632 | 0 | 0 | 0 | 0 | 0 | 5.348 | 0 |
| FCBBF3003800 | 2.873 | 0 | 0 | 0 | 0 | 1.365 | 0 |
| FCBBF3004473 | 0 | 0 | 0 | 0 | 0 | 3.980 | 0 |
| FCBBF3005320 | 0 | 0 | 0 | 0 | 0 | 9.451 | 0 |
| FCBBF3005497 | 0 | 0 | 0 | 0 | 0 | 2.724 | 0 |
| FCBBF3016928 | 0 | 0 | 0 | 0 | 0 | 3.036 | 0 |
| FCBBF3019839 | 0 | 0 | 0 | 0 | 0 | 12.975 | 0 |
| FCBBF3023667 | 3.875 | 11.587 | 0 | 1.539 | 11.811 | 0 | 0 |
| FCBBF4000446 | 0 | 0 | 0 | 0 | 0 | 5.205 | 0 |
| FEBRA1000057 | 0 | 0 | 0 | 0 | 0 | 6.015 | 0 |
| FEBRA2000129 | 0 | 0 | 0 | 15.063 | 0 | 0 | 0 |
| FEBRA2000438 | 0 | 0 | 0 | 51.194 | 0 | 0 | 0 |
| FEBRA2000733 | 1.229 | 0 | 0 | 1.953 | 0 | 0.584 | 0 |
| FEBRA2000762 | 0 | 0 | 0 | 36.045 | 0 | 0 | 0 |
| FEBRA2000772 | 0 | 0 | 0 | 49.565 | 0 | 0 | 0 |
| FEBRA2000881 | 0 | 0 | 0 | 18.341 | 0 | 0 | 0 |
| FEBRA2001245 | 0 | 0 | 0 | 0 | 0 | 8.739 | 0 |
| FEBRA2001294 | 0 | 0 | 0 | 0 | 0 | 8.373 | 0 |
| FEBRA2001828 | 0 | 0 | 0 | 31.524 | 0 | 0 | 0 |
| FEBRA2002352 | 0 | 0 | 0 | 0 | 0 | 12.027 | 0 |
| FEBRA2002707 | 0 | 0 | 0 | 20.879 | 0 | 0 | 0 |
| FEBRA2002933 | 0 | 0 | 0 | 2.144 | 0 | 1.282 | 0 |
| FEBRA2003100 | 0 | 0 | 0 | 0 | 0 | 2.282 | 0 |
| FEBRA2003726 | 0 | 0 | 0 | 0 | 0 | 3.450 | 0 |
| FEBRA2003750 | 0 | 0 | 0 | 0 | 0 | 6.325 | 0 |
| FEBRA2003926 | 0 | 0 | 0 | 4.045 | 0 | 2.419 | 0 |
| FEBRA2004224 | 0 | 0 | 0 | 13.416 | 0 | 4.011 | 0 |
| FEBRA2004325 | 0 | 0 | 0 | 0 | 0 | 12.203 | 0 |
| FEBRA2004628 | 0 | 0 | 0 | 16.528 | 0 | 0 | 0 |
| FEBRA2005416 | 0 | 0 | 0 | 0 | 0 | 3.721 | 0 |
| FEBRA2005824 | 0 | 0 | 0 | 2.161 | 0 | 0 | 0 |
| FEBRA2006092 | 0 | 0 | 0 | 0 | 55.306 | 0 | 0 |
| FEBRA2006372 | 0 | 0 | 0 | 0 | 0 | 4.653 | 0 |
| FEBRA2006401 | 0 | 0 | 0 | 0 | 0 | 0.870 | 0 |
| FEBRA2006485 | 0 | 0 | 0 | 0 | 0 | 10.539 | 0 |
| FEBRA2006873 | 0 | 0 | 0 | 0 | 0 | 31.115 | 0 |
| FEBRA2007818 | 40.789 | 0 | 0 | 32.401 | 0 | 0 | 0 |
| FEBRA2008081 | 0 | 0 | 0 | 0 | 0 | 2.453 | 0 |
| FEBRA2008087 | 0 | 0 | 0 | 2.077 | 0 | 0.621 | 0 |
| FEBRA2008302 | 0 | 0 | 0 | 0 | 0 | 3.687 | 0 |
| FEBRA2008341 | 0 | 0 | 0 | 38.062 | 0 | 0 | 0 |
| FEBRA2008583 | 0.964 | 0 | 0 | 0 | 0 | 1.832 | 0 |
| FEBRA2014417 | 0 | 0 | 0 | 3.129 | 0 | 1.871 | 0 |
| FEBRA2018476 | 0 | 0 | 0 | 6.331 | 0 | 0 | 0 |
| FEBRA2022504 | 0 | 0 | 0 | 0 | 0 | 5.690 | 0 |
| FEBRA2025838 | 0 | 0 | 0 | 0 | 0 | 2.846 | 0 |
| FEBRA2028516 | 0 | 0 | 0 | 6.628 | 0 | 0 | 0 |
| FELIV1000153 | 1.203 | 0 | 0 | 0 | 0 | 0.571 | 0 |
| HCASM2005388 | 0 | 0 | 0 | 0 | 0 | 12.254 | 0 |
| HCASM2009588 | 0 | 0 | 0 | 0 | 93.054 | 0 | 0 |
| HCHON1000030 | 0 | 0 | 0 | 2.102 | 0 | 0.628 | 0 |
| HCHON1000131 | 0 | 0 | 0 | 23.773 | 0 | 0 | 0 |
| HCHON1000191 | 0 | 0 | 0 | 0 | 0 | 10.041 | 0 |
| HCHON2000056 | 0 | 0 | 0 | 3.287 | 0 | 0.983 | 0 |
| HCHON2000062 | 0 | 0 | 0 | 24.285 | 0 | 0 | 0 |
| HCHON2000295 | 0 | 0 | 0 | 0 | 0 | 3.035 | 0 |
| HCHON2000323 | 0 | 0 | 0 | 0 | 0 | 6.418 | 0 |
| HCHON2000373 | 0 | 0 | 0 | 0 | 0 | 35.114 | 0 |
| HCHON2000676 | 0 | 0 | 0 | 0 | 0 | 10.330 | 0 |
| HCHON2000698 | 0 | 0 | 0 | 0 | 0 | 9.931 | 0 |
| HCHON2000826 | 0 | 0 | 0 | 0 | 0 | 4.959 | 0 |
| HCHON2001039 | 0 | 0 | 0 | 0 | 0 | 3.866 | 0 |
| HCHON2001050 | 0 | 0 | 0 | 8.398 | 0 | 0 | 0 |
| HCHON2001110 | 0 | 0 | 0 | 47.801 | 0 | 0 | 0 |
| HCHON2001200 | 0 | 0 | 0 | 0 | 0 | 2.997 | 0 |
| HCHON2001217 | 0 | 0 | 0 | 0 | 0 | 3.606 | 0 |
| HCHON2001407 | 0 | 0 | 0 | 0 | 0 | 2.736 | 0 |
| HCHON2001434 | 0 | 0 | 0 | 0 | 0 | 5.293 | 0 |
| HEART1000074 | 11.074 | 0 | 0 | 4.399 | 0 | 0 | 0 |
| HEART1000149 | 0 | 0 | 0 | 5.441 | 0 | 0 | 0 |
| HHDPC1000083 | 0 | 0 | 0 | 0 | 0 | 6.782 | 0 |
| HHDPC1000163 | 0 | 0 | 0 | 0 | 0 | 8.714 | 0 |
| HHDPC2000102 | 0 | 0 | 0 | 0 | 0 | 16.450 | 0 |
| HHDPC2000115 | 0 | 0 | 0 | 15.158 | 0 | 0 | 0 |
| HHDPC2000455 | 0 | 0 | 0 | 0 | 0 | 1.904 | 0 |
| HHDPC2000456 | 0 | 0 | 0 | 0 | 0 | 5.379 | 0 |
| HHDPC2000656 | 0 | 0 | 0 | 0 | 0 | 29.616 | 0 |
| HHDPC2003439 | 1.855 | 0 | 0 | 0 | 0 | 3.525 | 0 |
| HHDPC2003983 | 2.031 | 0 | 0 | 0 | 0 | 2.894 | 0 |
| HHDPC2006862 | 0 | 0 | 0 | 0 | 0 | 25.931 | 0 |
| HLUNG1000055 | 0 | 0 | 0 | 0 | 0 | 1.875 | 0 |
| HLUNG1000076 | 0 | 0 | 0 | 4.875 | 0 | 0 | 0 |
| HLUNG1000105 | 0 | 0 | 0 | 61.237 | 0 | 0 | 0 |
| HLUNG2001439 | 0 | 0 | 0 | 0 | 0 | 3.055 | 0 |
| HLUNG2001507 | 0 | 0 | 0 | 0 | 0 | 52.047 | 0 |
| HLUNG2001518 | 7.976 | 0 | 0 | 6.336 | 0 | 0 | 0 |
| HLUNG2002648 | 0 | 0 | 0 | 20.943 | 0 | 0 | 0 |
| HLUNG2002916 | 0 | 0 | 0 | 49.989 | 0 | 0 | 0 |
| HSYRA1000062 | 0 | 0 | 0 | 0 | 0 | 1.484 | 0 |
| HSYRA1000119 | 0 | 0 | 0 | 5.328 | 0 | 1.593 | 0 |
| HSYRA1000148 | 0 | 0 | 0 | 38.210 | 0 | 0 | 0 |
| HSYRA2000135 | 0 | 0 | 0 | 0 | 0 | 13.703 | 0 |
| HSYRA2000159 | 0.879 | 0 | 0 | 0 | 0 | 2.089 | 0 |
| HSYRA2000232 | 0 | 0 | 0 | 8.569 | 0 | 0 | 0 |
| HSYRA2000248 | 0 | 0 | 0 | 3.938 | 0 | 2.355 | 0 |
| HSYRA2000828 | 0 | 0 | 0 | 0 | 0 | 4.936 | 0 |
| HSYRA2000925 | 0 | 0 | 0 | 1.284 | 0 | 0 | 0 |
| HSYRA2001003 | 0 | 0 | 0 | 0 | 0 | 29.743 | 0 |
| HSYRA2001138 | 0 | 0 | 0 | 0 | 22.675 | 4.416 | 0 |
| HSYRA2001153 | 0 | 0 | 0 | 0 | 0 | 31.673 | 0 |
| HSYRA2001232 | 0 | 0 | 0 | 0 | 0 | 13.403 | 0 |
| HSYRA2001476 | 0 | 0 | 0 | 0 | 0 | 1.673 | 0 |
| HSYRA2001595 | 0 | 0 | 0 | 0 | 0 | 1.974 | 0 |
| HSYRA2001631 | 0 | 0 | 0 | 0 | 0 | 20.202 | 0 |
| HSYRA2001638 | 0 | 0 | 0 | 0 | 0 | 7.836 | 0 |
| IMR321000158 | 5.552 | 0 | 0 | 0 | 0 | 2.637 | 0 |
| IMR321000219 | 2.047 | 0 | 0 | 0 | 0 | 2.917 | 0 |
| IMR321000266 | 0 | 0 | 0 | 0 | 0 | 19.609 | 0 |
| IMR322000730 | 2.000 | 0 | 0 | 1.588 | 0 | 0 | 0 |
| IMR322000791 | 0 | 0 | 0 | 30.062 | 0 | 0 | 0 |
| IMR322000973 | 0 | 0 | 0 | 0 | 0 | 8.381 | 0 |
| IMR322001435 | 0 | 0 | 0 | 0 | 0 | 3.255 | 0 |
| IMR322001600 | 0 | 0 | 0 | 0 | 0 | 1.116 | 0 |
| IMR322012529 | 0 | 0 | 0 | 0 | 0 | 16.315 | 0 |
| KIDNE2000085 | 0 | 0 | 0 | 5.958 | 0 | 0 | 0 |
| KIDNE2000574 | 0 | 0 | 0 | 0 | 0 | 2.593 | 0 |
| KIDNE2000665 | 0 | 0 | 0 | 11.217 | 0 | 0 | 0 |
| KIDNE2000909 | 0 | 0 | 0 | 0 | 0 | 7.113 | 0 |
| KIDNE2000947 | 0 | 0 | 0 | 0 | 0 | 8.756 | 0 |
| KIDNE2001467 | 0 | 0 | 0 | 0 | 0 | 3.612 | 0 |
| KIDNE2002839 | 0 | 0 | 0 | 0 | 0 | 25.434 | 0 |
| KIDNE2003941 | 0 | 0 | 0 | 0 | 0 | 1.748 | 0 |
| KIDNE2004054 | 0 | 0 | 0 | 0 | 0 | 45.226 | 0 |
| KIDNE2004534 | 0 | 0 | 0 | 0 | 0 | 12.932 | 0 |
| KIDNE2005676 | 0 | 0 | 0 | 0 | 0 | 4.874 | 0 |
| KIDNE2006030 | 0 | 0 | 0 | 0 | 0 | 14.787 | 0 |
| KIDNE2007352 | 0 | 0 | 0 | 2.409 | 0 | 1.440 | 0 |
| KIDNE2007811 | 0 | 0 | 0 | 0 | 0 | 29.682 | 0 |
| KIDNE2008048 | 0 | 0 | 0 | 0 | 0 | 1.859 | 0 |
| KIDNE2012440 | 0 | 0 | 0 | 0 | 0 | 6.133 | 0 |
| KIDNE2013845 | 0 | 0 | 0 | 0 | 0 | 3.872 | 0 |
| KIDNE2015710 | 0 | 0 | 0 | 0 | 0 | 0 | 40.832 |
| KIDNE2018352 | 0 | 0 | 0 | 0 | 0 | 12.355 | 0 |
| LIVER1000017 | 0 | 0 | 0 | 0 | 0 | 0 | 25.940 |
| LIVER1000067 | 0 | 0 | 0 | 0 | 0 | 0 | 30.284 |
| LIVER1000079 | 0 | 0 | 0 | 10.153 | 0 | 0 | 0 |
| LIVER1000104 | 0 | 0 | 0 | 0 | 0 | 0 | 26.973 |
| LIVER1000111 | 0 | 0 | 0 | 0 | 0 | 21.880 | 0 |
| LIVER1000132 | 0 | 0 | 0 | 0 | 0 | 5.201 | 0 |
| LIVER1000542 | 0 | 0 | 0 | 0 | 0 | 0 | 64.596 |
| LIVER2000037 | 0 | 0 | 0 | 0 | 0 | 0 | 78.666 |
| LIVER2000158 | 0 | 0 | 0 | 40.064 | 0 | 0 | 0 |
| LIVER2001608 | 0 | 0 | 0 | 0 | 0 | 4.550 | 0 |
| LIVER2002842 | 0 | 0 | 0 | 11.062 | 0 | 0 | 0 |
| LIVER2003800 | 0 | 0 | 0 | 0 | 0 | 0 | 90.963 |
| LIVER2006006 | 0 | 0 | 0 | 0 | 0 | 4.928 | 0 |
| MAMGL1000032 | 0 | 0 | 0 | 0 | 0 | 0.558 | 0 |
| MAMGL1000035 | 0 | 0 | 0 | 0 | 0 | 0.698 | 0 |
| MAMGL1000100 | 0 | 0 | 0 | 1.711 | 0 | 0 | 0 |
| MAMGL1000173 | 0 | 0 | 0 | 3.072 | 0 | 0 | 0 |
| MESAN1000050 | 0 | 0 | 0 | 0 | 0 | 11.124 | 0 |
| MESAN1000080 | 0 | 0 | 0 | 0 | 0 | 9.893 | 0 |
| MESAN2000149 | 0 | 0 | 0 | 0 | 0 | 8.511 | 0 |
| MESAN2000267 | 5.974 | 0 | 0 | 0 | 0 | 4.256 | 0 |
| MESAN2000572 | 7.457 | 0 | 0 | 0 | 0 | 10.626 | 0 |
| MESAN2000608 | 0 | 0 | 0 | 0 | 0 | 2.724 | 0 |
| MESAN2002086 | 0 | 0 | 0 | 2.412 | 0 | 5.769 | 0 |
| MESAN2002940 | 0 | 0 | 0 | 0 | 0 | 11.019 | 0 |
| MESAN2003444 | 0 | 0 | 0 | 0 | 0 | 12.906 | 0 |
| MESAN2003622 | 0 | 0 | 0 | 6.964 | 0 | 0 | 0 |
| MESAN2005766 | 0 | 0 | 0 | 0 | 0 | 3.417 | 0 |
| MESAN2006743 | 0 | 0 | 0 | 0 | 0 | 13.355 | 0 |
| MESAN2006953 | 0 | 0 | 0 | 0 | 0 | 47.513 | 0 |
| MESAN2008334 | 0 | 0 | 0 | 47.634 | 0 | 0 | 0 |
| MESAN2009580 | 0 | 0 | 0 | 0 | 0 | 3.848 | 0 |
| MESAN2013284 | 0 | 0 | 0 | 0 | 0 | 4.255 | 0 |
| MESAN2013845 | 0 | 0 | 0 | 0 | 0 | 19.332 | 0 |
| MESAN2018576 | 0 | 0 | 0 | 60.977 | 0 | 0 | 0 |
| NB9N41000340 | 0 | 0 | 0 | 8.403 | 0 | 0 | 0 |
| NHNPC2000062 | 0 | 0 | 0 | 12.143 | 0 | 0 | 0 |
| NHNPC2000187 | 3.301 | 0 | 0 | 0 | 0 | 1.568 | 0 |
| NHNPC2000206 | 0 | 0 | 0 | 0 | 0 | 4.758 | 0 |
| NHNPC2001931 | 0 | 0 | 0 | 0 | 0 | 3.307 | 0 |
| NOVAR1000091 | 0 | 0 | 0 | 0 | 0 | 6.709 | 0 |
| NOVAR2000038 | 0 | 0 | 0 | 3.599 | 0 | 0 | 0 |
| NT2NE1000163 | 0 | 0 | 39.372 | 0 | 0 | 2.807 | 0 |
| NT2NE2000056 | 0 | 0 | 0 | 0 | 0 | 2.722 | 0 |
| NT2NE2000174 | 2.783 | 0 | 0 | 0 | 33.939 | 0 | 0 |
| NT2NE2000259 | 0 | 0 | 0 | 16.299 | 0 | 9.746 | 0 |
| NT2NE2000260 | 0 | 0 | 0 | 0 | 0 | 0.419 | 0 |
| NT2NE2000383 | 0 | 0 | 0 | 0 | 0 | 5.265 | 0 |
| NT2NE2000384 | 0 | 0 | 0 | 0 | 0 | 15.948 | 0 |
| NT2NE2000575 | 5.261 | 0 | 0 | 2.786 | 0 | 0 | 0 |
| NT2NE2000636 | 0 | 0 | 0 | 0 | 0 | 25.020 | 0 |
| NT2NE2000707 | 0 | 0 | 0 | 0 | 0 | 2.319 | 0 |
| NT2NE2000809 | 0 | 0 | 0 | 19.640 | 0 | 0 | 0 |
| NT2NE2000963 | 0 | 0 | 0 | 0 | 0 | 0.795 | 0 |
| NT2NE2001000 | 0 | 0 | 0 | 4.987 | 0 | 0 | 0 |
| NT2NE2001048 | 0 | 0 | 0 | 8.673 | 0 | 0 | 0 |
| NT2NE2005688 | 0 | 0 | 0 | 0 | 0 | 2.587 | 0 |
| NT2NE2006458 | 0 | 0 | 0 | 0 | 0 | 4.897 | 0 |
| NT2NE2010842 | 0 | 0 | 0 | 0 | 0 | 3.267 | 0 |
| NT2NE2014104 | 0 | 0 | 0 | 0 | 0 | 5.815 | 0 |
| NT2RI1000035 | 0 | 0 | 0 | 0 | 0 | 65.595 | 0 |
| NT2RI1000048 | 0 | 0 | 0 | 0 | 0 | 2.942 | 0 |
| NT2RI2000064 | 0 | 0 | 0 | 6.238 | 0 | 0 | 0 |
| NT2RI2000282 | 4.618 | 0 | 0 | 0 | 0 | 3.290 | 0 |
| NT2RI2000284 | 0 | 39.777 | 0 | 5.283 | 0 | 0 | 0 |
| NT2RI2000578 | 2.439 | 0 | 0 | 1.938 | 0 | 0 | 0 |
| NT2RI2000671 | 0 | 0 | 0 | 6.095 | 0 | 0 | 0 |
| NT2RI2000727 | 0 | 0 | 0 | 0 | 0 | 0.896 | 0 |
| NT2RI2000974 | 0 | 0 | 0 | 0 | 0 | 7.473 | 0 |
| NT2RI2001054 | 0 | 0 | 0 | 0 | 52.921 | 0 | 0 |
| NT2RI2001342 | 0 | 0 | 0 | 0 | 0 | 5.469 | 0 |
| NT2RI2001385 | 0 | 0 | 0 | 22.829 | 0 | 0 | 0 |
| NT2RI2001540 | 2.076 | 0 | 5.533 | 2.639 | 0 | 0.394 | 0 |
| NT2RI2002091 | 0.978 | 1.170 | 0 | 1.554 | 4.772 | 2.091 | 0 |
| NT2RI2002117 | 0 | 0 | 0 | 27.298 | 0 | 0 | 0 |
| NT2RI2002152 | 0 | 0 | 0 | 0 | 0 | 4.357 | 0 |
| NT2RI2002316 | 0 | 0 | 0 | 0 | 0 | 2.778 | 0 |
| NT2RI2002654 | 0 | 0 | 0 | 0 | 0 | 2.035 | 0 |
| NT2RI2002822 | 0 | 0 | 0 | 0 | 0 | 34.766 | 0 |
| NT2RI2002958 | 0 | 0 | 0 | 0 | 0 | 3.336 | 0 |
| NT2RI2003051 | 0 | 0 | 0 | 5.932 | 0 | 3.547 | 0 |
| NT2RI2003304 | 0 | 0 | 0 | 0 | 0 | 1.818 | 0 |
| NT2RI2003338 | 0 | 0 | 0 | 0 | 0 | 3.508 | 0 |
| NT2RI2003407 | 0 | 0 | 0 | 0 | 0 | 4.193 | 0 |
| NT2RI2003420 | 0 | 0 | 0 | 0 | 0 | 5.335 | 0 |
| NT2RI2003556 | 0 | 33.196 | 0 | 2.204 | 0 | 1.318 | 0 |
| NT2RI2003678 | 0 | 0 | 0 | 0 | 0 | 6.597 | 0 |
| NT2RI2003738 | 2.552 | 15.264 | 0 | 1.014 | 0 | 0.606 | 0 |
| NT2RI2003751 | 0 | 0 | 0 | 0 | 0 | 4.800 | 0 |
| NT2RI2003993 | 0 | 0 | 0 | 21.997 | 0 | 13.153 | 0 |
| NT2RI2004230 | 0 | 0 | 0 | 0 | 0 | 3.975 | 0 |
| NT2RI2004535 | 0 | 0 | 0 | 0 | 0 | 13.264 | 0 |
| NT2RI2004884 | 0 | 0 | 0 | 0 | 0 | 2.677 | 0 |
| NT2RI2005335 | 0 | 0 | 0 | 0 | 0 | 2.682 | 0 |
| NT2RI2005353 | 0 | 0 | 0 | 0 | 0 | 3.991 | 0 |
| NT2RI2005405 | 0 | 0 | 0 | 0 | 0 | 3.890 | 0 |
| NT2RI2005710 | 0 | 0 | 0 | 0 | 0 | 18.085 | 0 |
| NT2RI2005723 | 0 | 0 | 0 | 0 | 0 | 1.739 | 0 |
| NT2RI2005814 | 0 | 0 | 0 | 0 | 0 | 4.512 | 0 |
| NT2RI2005818 | 0 | 0 | 0 | 0 | 0 | 8.824 | 0 |
| NT2RI2006072 | 0 | 0 | 0 | 0 | 0 | 2.651 | 0 |
| NT2RI2007054 | 0 | 0 | 0 | 0 | 0 | 0 | 28.320 |
| NT2RI2007084 | 0 | 0 | 0 | 6.304 | 0 | 0 | 0 |
| NT2RI2007384 | 0 | 0 | 0 | 0 | 0 | 4.501 | 0 |
| NT2RI2007445 | 0 | 0 | 0 | 0 | 0 | 6.212 | 0 |
| NT2RI2007572 | 0 | 0 | 0 | 0 | 0 | 2.589 | 0 |
| NT2RI2007593 | 0 | 0 | 0 | 0 | 0 | 22.830 | 0 |
| NT2RI2007629 | 0 | 0 | 0 | 11.680 | 0 | 6.984 | 0 |
| NT2RI2007879 | 0 | 0 | 0 | 0 | 0 | 5.499 | 0 |
| NT2RI2008045 | 5.664 | 0 | 0 | 0 | 0 | 5.380 | 0 |
| NT2RI2008141 | 0 | 0 | 0 | 0 | 0 | 7.408 | 0 |
| NT2RI2008233 | 0 | 0 | 0 | 0 | 0 | 65.595 | 0 |
| NT2RI2008396 | 0 | 0 | 0 | 2.554 | 0 | 4.582 | 0 |
| NT2RI2008526 | 0 | 0 | 0 | 0 | 0 | 5.313 | 0 |
| NT2RI2008598 | 0 | 0 | 0 | 0 | 0 | 29.063 | 0 |
| NT2RI2008656 | 0 | 0 | 0 | 0 | 0 | 9.409 | 0 |
| NT2RI2008724 | 0 | 0 | 0 | 0 | 0 | 6.363 | 0 |
| NT2RI2008749 | 0 | 0 | 0 | 3.276 | 0 | 0 | 0 |
| NT2RI2008791 | 0 | 0 | 0 | 20.281 | 0 | 0 | 0 |
| NT2RI2009194 | 0 | 0 | 0 | 0 | 0 | 3.405 | 0 |
| NT2RI2009233 | 0 | 0 | 0 | 0 | 0 | 7.815 | 0 |
| NT2RI2009269 | 0 | 0 | 0 | 0 | 0 | 3.424 | 0 |
| NT2RI2009583 | 0 | 0 | 0 | 0 | 0 | 0 | 4.881 |
| NT2RI2012350 | 0 | 0 | 0 | 2.319 | 0 | 0 | 0 |
| NT2RI3007543 | 0 | 0 | 0 | 0 | 0 | 2.940 | 0 |
| NT2RP6000123 | 5.711 | 0 | 0 | 0 | 0 | 1.356 | 0 |
| NT2RP7000906 | 0 | 0 | 0 | 0 | 0 | 4.520 | 0 |
| NT2RP7002028 | 0 | 0 | 0 | 0 | 0 | 6.962 | 0 |
| NT2RP7003319 | 0 | 0 | 0 | 0 | 0 | 3.161 | 0 |
| NT2RP7003632 | 0 | 0 | 0 | 0 | 0 | 0 | 35.519 |
| NT2RP7003960 | 0 | 0 | 0 | 0 | 0 | 5.740 | 0 |
| NT2RP7004123 | 0 | 0 | 0 | 0 | 0 | 6.649 | 0 |
| NT2RP7004173 | 5.571 | 0 | 0 | 4.425 | 0 | 0 | 0 |
| NT2RP7004204 | 0 | 0 | 0 | 0 | 0 | 5.908 | 0 |
| NT2RP7004373 | 0 | 0 | 0 | 6.820 | 0 | 0 | 0 |
| NT2RP7004428 | 0 | 0 | 0 | 0 | 0 | 11.684 | 0 |
| NT2RP7004728 | 0 | 0 | 0 | 9.107 | 0 | 0 | 0 |
| NT2RP7004751 | 0 | 0 | 0 | 0 | 0 | 1.622 | 0 |
| NT2RP7004790 | 0 | 0 | 0 | 0 | 0 | 27.039 | 0 |
| NT2RP7004946 | 0 | 0 | 0 | 0 | 0 | 5.965 | 0 |
| NT2RP7006075 | 0 | 0 | 0 | 15.181 | 0 | 0 | 0 |
| NT2RP7006141 | 0 | 0 | 0 | 0 | 0 | 0 | 16.109 |
| NT2RP7006263 | 0 | 0 | 0 | 0 | 0 | 13.951 | 0 |
| NT2RP7006619 | 0 | 0 | 0 | 25.579 | 0 | 0 | 0 |
| NT2RP7006717 | 0 | 0 | 0 | 0 | 0 | 4.559 | 0 |
| NT2RP7006986 | 0 | 0 | 0 | 0 | 0 | 13.015 | 0 |
| NT2RP7007154 | 0 | 0 | 0 | 0 | 50.720 | 1.976 | 0 |
| NT2RP7007177 | 0 | 0 | 0 | 0 | 0 | 4.718 | 0 |
| NT2RP7007387 | 0 | 0 | 0 | 0 | 0 | 7.111 | 0 |
| NT2RP7008190 | 0 | 0 | 0 | 0 | 0 | 4.596 | 0 |
| NT2RP7009097 | 0 | 0 | 0 | 0 | 0 | 6.229 | 0 |
| NT2RP7009259 | 0 | 0 | 0 | 3.255 | 0 | 3.893 | 0 |
| NT2RP7009481 | 0 | 0 | 0 | 23.730 | 0 | 0 | 0 |
| NT2RP7014910 | 8.721 | 0 | 0 | 0 | 0 | 4.142 | 0 |
| NT2RP7015512 | 0 | 0 | 0 | 0 | 0 | 22.394 | 0 |
| NT2RP7019835 | 0 | 0 | 0 | 0 | 92.689 | 0 | 0 |
| NT2RP8001604 | 0 | 0 | 0 | 0 | 0 | 24.040 | 0 |
| NTONG1000047 | 0 | 0 | 0 | 34.814 | 0 | 0 | 0 |
| NTONG1000098 | 0 | 0 | 0 | 0 | 0 | 4.415 | 0 |
| NTONG2000499 | 0 | 0 | 0 | 0 | 0 | 31.978 | 0 |
| NTONG2000876 | 10.157 | 0 | 0 | 0 | 0 | 4.824 | 0 |
| NTONG2000977 | 0 | 0 | 0 | 0 | 0 | 3.406 | 0 |
| NTONG2001550 | 0 | 0 | 0 | 0 | 0 | 24.117 | 0 |
| NTONG2001567 | 0 | 0 | 0 | 0 | 0 | 1.062 | 0 |
| NTONG2003839 | 0 | 0 | 0 | 0 | 0 | 18.168 | 0 |
| NTONG2004614 | 0 | 0 | 0 | 34.313 | 0 | 0 | 0 |
| NTONG2008483 | 0 | 0 | 0 | 0 | 0 | 5.536 | 0 |
| OCBBF1000114 | 0 | 0 | 0 | 14.771 | 0 | 0 | 0 |
| OCBBF2000013 | 0 | 0 | 0 | 0 | 0 | 6.742 | 0 |
| OCBBF2000522 | 0 | 0 | 0 | 0 | 0 | 8.761 | 0 |
| OCBBF2000846 | 0 | 0 | 0 | 0 | 0 | 2.535 | 0 |
| OCBBF2001492 | 0 | 0 | 0 | 0 | 0 | 2.377 | 0 |
| OCBBF2004418 | 0 | 0 | 0 | 82.345 | 0 | 0 | 0 |
| OCBBF2005476 | 0 | 0 | 0 | 54.176 | 0 | 0 | 0 |
| OCBBF2007354 | 0 | 0 | 0 | 0 | 0 | 3.481 | 0 |
| OCBBF2007829 | 0 | 0 | 0 | 3.181 | 0 | 0 | 0 |
| OCBBF2007892 | 0 | 0 | 0 | 0 | 0 | 14.759 | 0 |
| OCBBF2009301 | 0 | 0 | 0 | 0 | 0 | 7.182 | 0 |
| OCBBF2009772 | 0 | 0 | 0 | 0 | 0 | 4.080 | 0 |
| OCBBF2011914 | 0 | 0 | 0 | 21.128 | 0 | 12.633 | 0 |
| OCBBF2014064 | 0 | 0 | 0 | 15.828 | 0 | 0 | 0 |
| OCBBF2014292 | 0 | 0 | 0 | 0 | 0 | 7.177 | 0 |
| OCBBF2016729 | 0 | 0 | 0 | 0 | 0 | 31.583 | 0 |
| OCBBF2018707 | 0 | 0 | 0 | 0 | 0 | 7.792 | 0 |
| OCBBF2018956 | 0 | 0 | 0 | 0 | 0 | 5.864 | 0 |
| OCBBF2035226 | 0 | 51.258 | 0 | 0 | 0 | 0 | 0 |
| OCBBF2038317 | 0 | 0 | 0 | 57.112 | 0 | 0 | 0 |
| PEBLM2000147 | 0 | 0 | 0 | 0 | 0 | 8.840 | 0 |
| PEBLM2000308 | 0 | 0 | 0 | 0 | 0 | 13.737 | 0 |
| PEBLM2000395 | 0 | 0 | 0 | 0 | 0 | 3.153 | 0 |
| PEBLM2007774 | 0 | 0 | 0 | 1.745 | 0 | 2.087 | 0 |
| PERIC2007068 | 0 | 0 | 0 | 0 | 0 | 5.346 | 0 |
| PLACE6000145 | 0 | 0 | 0 | 6.005 | 0 | 3.591 | 0 |
| PLACE6000263 | 0 | 0 | 0 | 26.429 | 0 | 5.268 | 0 |
| PLACE6000348 | 0 | 0 | 0 | 0 | 0 | 49.326 | 0 |
| PLACE6000379 | 0 | 0 | 0 | 0 | 0 | 2.448 | 0 |
| PLACE6001064 | 0 | 0 | 0 | 0 | 0 | 1.988 | 0 |
| PLACE6001923 | 0 | 0 | 0 | 0 | 0 | 21.777 | 0 |
| PLACE6002084 | 0 | 0 | 0 | 10.700 | 0 | 5.118 | 0 |
| PLACE6002668 | 0 | 0 | 0 | 62.541 | 0 | 0 | 0 |
| PLACE6004005 | 0 | 0 | 0 | 5.721 | 0 | 0 | 0 |
| PLACE6004578 | 0 | 0 | 0 | 50.277 | 0 | 0 | 0 |
| PLACE6004993 | 0 | 0 | 0 | 0 | 0 | 66.064 | 0 |
| PLACE6006042 | 0 | 0 | 0 | 0 | 0 | 18.861 | 0 |
| PLACE6006549 | 0 | 0 | 0 | 0 | 0 | 2.767 | 0 |
| PLACE6007925 | 0 | 0 | 0 | 58.717 | 0 | 0 | 0 |
| PLACE6008793 | 0 | 0 | 0 | 9.187 | 0 | 0 | 0 |
| PLACE6010077 | 0 | 0 | 0 | 0 | 0 | 9.050 | 0 |
| PLACE6018487 | 0 | 0 | 64.866 | 0 | 0 | 0 | 0 |
| PLACE6020145 | 0 | 0 | 0 | 0 | 0 | 29.076 | 0 |
| PLACE7004103 | 0 | 0 | 0 | 0 | 0 | 4.481 | 0 |
| PROST1000085 | 0 | 0 | 0 | 0 | 0 | 23.969 | 0 |
| PROST1000120 | 0 | 0 | 0 | 0 | 0 | 11.425 | 0 |
| PROST1000526 | 0 | 0 | 0 | 0 | 0 | 17.507 | 0 |
| PROST1000564 | 0 | 0 | 0 | 0 | 0 | 9.315 | 0 |
| PROST2000138 | 0 | 0 | 0 | 0 | 0 | 0.300 | 0 |
| PROST2000176 | 0 | 0 | 0 | 0 | 0 | 0 | 55.365 |
| PROST2000760 | 0 | 0 | 0 | 0 | 0 | 9.719 | 0 |
| PROST2001739 | 0 | 0 | 0 | 76.613 | 0 | 0 | 0 |
| PROST2002927 | 0 | 0 | 0 | 62.033 | 0 | 0 | 0 |
| PROST2003232 | 0 | 59.533 | 0 | 7.907 | 0 | 0 | 0 |
| PROST2003517 | 0 | 0 | 0 | 15.255 | 0 | 9.121 | 0 |
| PROST2004095 | 0 | 0 | 0 | 0 | 0 | 3.243 | 0 |
| PROST2006536 | 0 | 0 | 0 | 0 | 0 | 7.688 | 0 |
| PROST2006737 | 0 | 0 | 0 | 14.044 | 0 | 0 | 0 |
| PROST2007612 | 23.293 | 0 | 0 | 0 | 0 | 11.064 | 0 |
| PROST2008489 | 0 | 0 | 0 | 3.753 | 0 | 4.488 | 0 |
| PROST2008770 | 0 | 0 | 0 | 4.520 | 0 | 0 | 0 |
| PROST2012007 | 0 | 0 | 0 | 0 | 0 | 7.864 | 0 |
| PROST2015710 | 0 | 0 | 0 | 0 | 0 | 42.668 | 0 |
| PROST2017203 | 0 | 0 | 0 | 7.524 | 0 | 0 | 0 |
| PROST2017692 | 0 | 0 | 0 | 0 | 0 | 2.553 | 0 |
| PUAEN1000057 | 0 | 0 | 0 | 11.896 | 0 | 0 | 0 |
| PUAEN1000065 | 0 | 0 | 0 | 11.643 | 0 | 0 | 0 |
| PUAEN1000161 | 0 | 0 | 0 | 0 | 0 | 19.985 | 0 |
| PUAEN1000322 | 9.325 | 0 | 0 | 0 | 0 | 4.429 | 0 |
| PUAEN2000374 | 2.335 | 0 | 0 | 0 | 0 | 1.109 | 0 |
| PUAEN2000497 | 0 | 0 | 0 | 0 | 0 | 8.932 | 0 |
| PUAEN2000535 | 0 | 0 | 0 | 0 | 0 | 2.786 | 0 |
| PUAEN2001882 | 0 | 0 | 0 | 0 | 0 | 38.043 | 0 |
| PUAEN2007044 | 0 | 0 | 0 | 8.305 | 0 | 0 | 0 |
| SALGL1000157 | 0 | 0 | 0 | 1.507 | 0 | 0 | 0 |
| SKMUS1000138 | 0 | 0 | 56.007 | 0 | 0 | 0 | 0 |
| SKMUS2000020 | 0 | 0 | 0 | 21.341 | 0 | 0 | 0 |
| SKMUS2000780 | 0 | 0 | 0 | 0 | 0 | 32.962 | 0 |
| SKMUS2000931 | 0 | 0 | 0 | 0 | 0 | 3.771 | 0 |
| SKMUS2000933 | 0 | 0 | 0 | 35.951 | 0 | 0 | 0 |
| SKMUS2001454 | 0 | 29.449 | 0 | 0 | 0 | 1.169 | 0 |
| SKNMC1000137 | 0 | 0 | 0 | 24.569 | 0 | 0 | 0 |
| SKNMC2000097 | 6.502 | 38.890 | 0 | 2.583 | 0 | 3.088 | 0 |
| SKNMC2000635 | 0 | 0 | 0 | 2.079 | 0 | 5.593 | 0 |
| SKNMC2000649 | 0 | 0 | 0 | 0 | 0 | 6.322 | 0 |
| SKNMC2000698 | 0 | 0 | 0 | 0 | 0 | 7.156 | 0 |
| SKNMC2000877 | 0 | 0 | 0 | 0 | 0 | 8.211 | 0 |
| SKNMC2001324 | 0 | 0 | 0 | 37.417 | 0 | 0 | 0 |
| SKNMC2001503 | 0 | 0 | 0 | 0 | 0 | 10.744 | 0 |
| SKNSH1000101 | 0 | 56.047 | 0 | 0 | 0 | 0 | 0 |
| SKNSH2000319 | 0 | 0 | 0 | 0 | 0 | 24.846 | 0 |
| SKNSH2001875 | 0 | 0 | 0 | 37.625 | 0 | 0 | 0 |
| SKNSH2002325 | 0 | 0 | 0 | 0 | 0 | 13.226 | 0 |
| SKNSH2002768 | 0 | 0 | 0 | 13.719 | 0 | 8.203 | 0 |
| SKNSH2008940 | 0 | 0 | 0 | 0 | 0 | 6.644 | 0 |
| SMINT1000117 | 0 | 0 | 0 | 7.621 | 0 | 0 | 0 |
| SMINT2000441 | 0 | 0 | 0 | 2.615 | 0 | 0 | 0 |
| SMINT2000468 | 0 | 0 | 0 | 0 | 0 | 15.854 | 0 |
| SMINT2000602 | 0 | 0 | 53.428 | 0 | 0 | 0 | 0 |
| SMINT2000659 | 0 | 0 | 0 | 1.610 | 0 | 0 | 0 |
| SMINT2002976 | 0 | 0 | 0 | 30.224 | 0 | 0 | 0 |
| SMINT2003074 | 9.999 | 0 | 0 | 7.943 | 0 | 0 | 0 |
| SMINT2003169 | 0 | 0 | 0 | 8.176 | 0 | 1.630 | 0 |
| SMINT2003340 | 0 | 0 | 0 | 17.024 | 0 | 0 | 0 |
| SMINT2004023 | 0 | 0 | 0 | 8.837 | 0 | 0 | 0 |
| SMINT2004144 | 0 | 0 | 0 | 0 | 0 | 0 | 9.901 |
| SMINT2004872 | 0 | 0 | 0 | 24.508 | 0 | 0 | 0 |
| SMINT2005368 | 0 | 0 | 0 | 6.805 | 0 | 4.069 | 0 |
| SMINT2005688 | 0 | 0 | 0 | 28.923 | 0 | 0 | 0 |
| SMINT2008960 | 4.990 | 0 | 0 | 3.964 | 0 | 0 | 0 |
| SMINT2011567 | 0 | 0 | 0 | 0 | 0 | 32.872 | 0 |
| SPLEN1000106 | 0 | 0 | 0 | 0 | 0 | 8.064 | 0 |
| SPLEN1000116 | 0 | 0 | 0 | 5.735 | 0 | 1.715 | 0 |
| SPLEN2000210 | 0 | 0 | 0 | 76.909 | 0 | 0 | 0 |
| SPLEN2000255 | 0 | 0 | 0 | 8.899 | 0 | 0 | 0 |
| SPLEN2000310 | 0 | 0 | 0 | 76.909 | 0 | 0 | 0 |
| SPLEN2000348 | 0 | 0 | 0 | 16.209 | 0 | 0 | 0 |
| SPLEN2000414 | 0 | 0 | 0 | 76.909 | 0 | 0 | 0 |
| SPLEN2000505 | 0 | 0 | 0 | 2.442 | 0 | 0 | 0 |
| SPLEN2000874 | 0 | 0 | 47.377 | 0 | 0 | 0 | 10.632 |
| SPLEN2002477 | 0 | 0 | 0 | 9.415 | 0 | 0 | 0 |
| SPLEN2004555 | 0 | 0 | 0 | 0 | 0 | 3.688 | 0 |
| SPLEN2006122 | 0 | 0 | 0 | 0 | 0 | 2.918 | 0 |
| SPLEN2006133 | 0 | 0 | 0 | 5.497 | 0 | 0 | 0 |
| SPLEN2006374 | 0 | 0 | 0 | 17.614 | 0 | 0 | 0 |
| SPLEN2008496 | 0 | 0 | 0 | 0 | 0 | 26.824 | 0 |
| SPLEN2009512 | 0 | 0 | 0 | 0 | 0 | 57.379 | 0 |
| SPLEN2010195 | 0 | 0 | 0 | 0 | 34.507 | 0 | 0 |
| SPLEN2015310 | 4.181 | 50.011 | 0 | 0 | 0 | 0 | 0 |
| SPLEN2017620 | 0 | 0 | 0 | 0 | 0 | 53.276 | 0 |
| SPLEN2017918 | 0 | 0 | 0 | 0 | 0 | 3.159 | 0 |
| SPLEN2019405 | 0 | 0 | 0 | 8.298 | 0 | 0 | 0 |
| SPLEN2019446 | 0 | 0 | 0 | 60.294 | 0 | 0 | 0 |
| SPLEN2019774 | 0 | 0 | 0 | 51.478 | 0 | 0 | 0 |
| SPLEN2031424 | 0 | 0 | 0 | 44.123 | 0 | 0 | 0 |
| SPLEN2031547 | 0 | 0 | 0 | 0 | 0 | 5.455 | 0 |
| SPLEN2032157 | 0 | 0 | 0 | 33.110 | 0 | 0 | 0 |
| SPLEN2032356 | 0 | 0 | 0 | 0 | 0 | 66.573 | 0 |
| SPLEN2039379 | 0 | 0 | 0 | 16.781 | 0 | 0 | 0 |
| SPLEN2042535 | 0 | 0 | 0 | 0 | 0 | 24.667 | 0 |
| STOMA1000047 | 0 | 0 | 0 | 18.360 | 0 | 0 | 0 |
| STOMA2006780 | 0 | 0 | 0 | 0 | 0 | 30.095 | 0 |
| SYNOV2001144 | 0 | 0 | 0 | 0 | 0 | 4.900 | 0 |
| SYNOV2001239 | 0 | 0 | 0 | 5.454 | 0 | 0 | 0 |
| SYNOV2001374 | 0 | 0 | 0 | 10.613 | 0 | 0 | 0 |
| SYNOV2009172 | 0 | 45.405 | 0 | 3.015 | 0 | 0 | 0 |
| TBAES2009387 | 0 | 0 | 0 | 3.097 | 0 | 0 | 0 |
| TESTI1000101 | 0 | 0 | 0 | 0 | 0 | 29.680 | 0 |
| TESTI2001099 | 0 | 0 | 0 | 0 | 0 | 1.698 | 0 |
| TESTI2001153 | 0 | 0 | 0 | 2.307 | 0 | 0 | 0 |
| TESTI2001269 | 0 | 0 | 0 | 0 | 0 | 5.674 | 0 |
| TESTI2001829 | 0 | 0 | 0 | 4.920 | 0 | 0 | 0 |
| TESTI2002149 | 0 | 0 | 0 | 0 | 0 | 5.795 | 0 |
| TESTI2003071 | 0 | 0 | 0 | 0 | 0 | 12.088 | 0 |
| TESTI2004031 | 2.924 | 0 | 0 | 2.323 | 0 | 2.778 | 0 |
| TESTI2004737 | 0 | 0 | 0 | 10.264 | 0 | 0 | 0 |
| TESTI2006051 | 0 | 0 | 41.159 | 0 | 0 | 0 | 0 |
| TESTI2006588 | 0 | 0 | 0 | 6.274 | 0 | 0 | 0 |
| TESTI2006872 | 0 | 0 | 0 | 0 | 0 | 19.038 | 0 |
| TESTI2007311 | 0 | 0 | 0 | 0 | 0 | 13.329 | 0 |
| TESTI2007998 | 0 | 0 | 0 | 0 | 0 | 5.478 | 0 |
| TESTI2008240 | 1.824 | 0 | 0 | 5.796 | 0 | 1.733 | 0 |
| TESTI2009577 | 0 | 0 | 0 | 0 | 0 | 6.123 | 0 |
| TESTI2009987 | 0 | 0 | 0 | 0 | 0 | 17.673 | 0 |
| TESTI2012778 | 2.696 | 0 | 0 | 0 | 0 | 1.920 | 0 |
| TESTI2013295 | 0 | 0 | 0 | 0 | 0 | 9.228 | 0 |
| TESTI2015213 | 3.744 | 0 | 0 | 0 | 0 | 1.778 | 0 |
| TESTI2017954 | 0 | 0 | 0 | 0 | 0 | 2.295 | 0 |
| TESTI2025422 | 0 | 0 | 0 | 28.764 | 0 | 0 | 0 |
| TESTI2026525 | 0 | 0 | 0 | 0 | 0 | 15.074 | 0 |
| TESTI2026647 | 0 | 0 | 0 | 68.465 | 0 | 0 | 0 |
| TESTI2027271 | 0 | 0 | 0 | 30.596 | 0 | 0 | 0 |
| TESTI2033441 | 0 | 0 | 0 | 6.358 | 0 | 0 | 0 |
| TESTI2046456 | 0 | 0 | 0 | 0 | 0 | 3.207 | 0 |
| TESTI4002799 | 0 | 0 | 0 | 0 | 0 | 1.530 | 0 |
| TESTI4013441 | 0 | 0 | 0 | 0.909 | 0 | 2.174 | 0 |
| TESTI4037156 | 0 | 0 | 0 | 0 | 0 | 1.917 | 0 |
| TESTI4043140 | 0 | 0 | 0 | 16.066 | 0 | 19.213 | 0 |
| THYMU1000002 | 0 | 0 | 0 | 0 | 0 | 2.051 | 0 |
| THYMU1000016 | 0 | 0 | 0 | 0 | 0 | 1.339 | 0 |
| THYMU1000374 | 0 | 0 | 0 | 8.679 | 0 | 0 | 0 |
| THYMU1000428 | 0 | 49.596 | 0 | 6.587 | 0 | 0 | 0 |
| THYMU2000382 | 0 | 0 | 0 | 0 | 0 | 4.200 | 0 |
| THYMU2000436 | 0 | 0 | 0 | 5.339 | 0 | 0 | 0 |
| THYMU2002023 | 0 | 0 | 0 | 77.651 | 0 | 0 | 0 |
| THYMU2002583 | 0 | 0 | 0 | 0 | 0 | 1.796 | 0 |
| THYMU2003419 | 0 | 0 | 0 | 2.910 | 0 | 0 | 0 |
| THYMU2003440 | 0 | 0 | 0 | 0 | 0 | 80.601 | 0 |
| THYMU2003542 | 0 | 0 | 0 | 12.522 | 0 | 0 | 0 |
| THYMU2003891 | 0 | 25.462 | 0 | 0 | 0 | 0 | 0 |
| THYMU2004344 | 0 | 0 | 0 | 7.402 | 0 | 0 | 0 |
| THYMU2005546 | 0 | 0 | 0 | 0 | 48.649 | 1.895 | 0 |
| THYMU2009658 | 2.555 | 30.564 | 0 | 4.059 | 0 | 1.214 | 0 |
| THYMU2010161 | 0 | 0 | 0 | 87.420 | 0 | 0 | 0 |
| THYMU2013136 | 0 | 0 | 0 | 0 | 0 | 2.834 | 0 |
| THYMU2013916 | 0 | 0 | 0 | 0 | 0 | 3.843 | 0 |
| THYMU2014067 | 0 | 0 | 0 | 87.420 | 0 | 0 | 0 |
| THYMU2015762 | 7.231 | 0 | 0 | 0 | 0 | 0 | 43.251 |
| THYMU2018126 | 0 | 63.479 | 0 | 0 | 0 | 0 | 0 |
| THYMU2033308 | 0 | 0 | 0 | 0 | 0 | 48.382 | 0 |
| THYMU2035735 | 0 | 0 | 0 | 0 | 0 | 4.571 | 0 |
| THYMU2039334 | 0 | 99.053 | 0 | 0 | 0 | 0 | 0 |
| THYMU3034671 | 0 | 0 | 0 | 13.819 | 0 | 0 | 0 |
| TKIDN1000001 | 0 | 0 | 0 | 0 | 0 | 38.560 | 0 |
| TKIDN2002738 | 0 | 0 | 40.764 | 0 | 0 | 0 | 0 |
| TKIDN2015423 | 0 | 0 | 0 | 0 | 0 | 2.206 | 0 |
| TLIVE2002046 | 0 | 0 | 0 | 10.517 | 0 | 0 | 0 |
| TRACH1000063 | 0 | 0 | 0 | 12.462 | 0 | 0 | 0 |
| TRACH1000181 | 0 | 0 | 0 | 0 | 0 | 16.414 | 0 |
| TRACH1000205 | 0 | 0 | 0 | 0 | 0 | 13.635 | 0 |
| TRACH2000079 | 3.951 | 0 | 0 | 3.139 | 0 | 9.384 | 0 |
| TRACH2000248 | 0 | 0 | 0 | 8.085 | 0 | 0 | 0 |
| TRACH2000321 | 0 | 0 | 0 | 5.694 | 0 | 1.702 | 0 |
| TRACH2000472 | 0 | 0 | 0 | 4.948 | 0 | 0 | 0 |
| TRACH2000972 | 0 | 0 | 0 | 10.302 | 0 | 0 | 0 |
| TRACH2001289 | 0 | 0 | 0 | 1.969 | 0 | 1.178 | 0 |
| TRACH2001432 | 0 | 0 | 0 | 0 | 0 | 11.562 | 0 |
| TRACH2001463 | 0 | 0 | 0 | 0 | 0 | 10.608 | 0 |
| TRACH2001523 | 0 | 0 | 0 | 9.851 | 0 | 5.890 | 0 |
| TRACH2001607 | 0 | 0 | 0 | 0 | 0 | 3.480 | 0 |
| TRACH2002092 | 0 | 0 | 0 | 16.265 | 0 | 0 | 0 |
| TRACH2002333 | 0 | 0 | 0 | 0 | 0 | 50.930 | 0 |
| TRACH2002537 | 0 | 0 | 0 | 0 | 0 | 3.213 | 0 |
| TRACH2003323 | 0 | 0 | 0 | 10.312 | 0 | 0 | 0 |
| TRACH2004499 | 0 | 0 | 0 | 0 | 0 | 10.181 | 0 |
| TRACH2007399 | 0 | 0 | 0 | 2.729 | 41.897 | 1.632 | 0 |
| TRACH2007969 | 0 | 0 | 0 | 29.409 | 0 | 0 | 0 |
| TRACH2012497 | 0 | 0 | 0 | 75.015 | 0 | 0 | 0 |
| TRACH2014077 | 0 | 0 | 0 | 0 | 0 | 11.785 | 0 |
| TRACH2014442 | 0 | 0 | 0 | 0 | 0 | 15.600 | 0 |
| TRACH2015823 | 0 | 0 | 0 | 0 | 0 | 7.579 | 0 |
| TRACH2015824 | 0 | 0 | 0 | 26.932 | 0 | 0 | 0 |
| TRACH2016835 | 0 | 0 | 0 | 0 | 0 | 63.939 | 0 |
| TRACH2018317 | 0 | 0 | 0 | 0 | 0 | 20.300 | 0 |
| TRACH2018446 | 0 | 0 | 0 | 0 | 0 | 14.489 | 0 |
| TRACH2025535 | 0 | 0 | 0 | 3.364 | 0 | 0 | 0 |
| TRACH3000692 | 0 | 0 | 0 | 0 | 0 | 16.238 | 0 |
| TRACH3004721 | 0 | 0 | 0 | 0 | 0 | 20.144 | 0 |
| TRACH3007625 | 8.574 | 0 | 0 | 6.811 | 0 | 4.073 | 0 |
| UMVEN2000133 | 0 | 0 | 0 | 0 | 0 | 2.031 | 0 |
| UMVEN2000354 | 0 | 0 | 0 | 0 | 0 | 5.708 | 0 |
| UMVEN2000453 | 0 | 0 | 0 | 3.025 | 0 | 0 | 0 |
| UTERU2000095 | 0 | 0 | 0 | 0 | 36.813 | 0 | 0 |
| UTERU2000263 | 0 | 0 | 0 | 0 | 0 | 3.550 | 0 |
| UTERU2000424 | 0 | 0 | 0 | 4.921 | 0 | 2.943 | 0 |
| UTERU2000541 | 0 | 0 | 0 | 36.544 | 0 | 0 | 0 |
| UTERU2001607 | 0 | 0 | 0 | 0 | 0 | 5.111 | 0 |
| UTERU2002662 | 0 | 0 | 0 | 0 | 0 | 6.164 | 0 |
| UTERU2004037 | 15.993 | 0 | 0 | 12.704 | 0 | 0 | 0 |
| UTERU2004197 | 0 | 0 | 0 | 0 | 0 | 6.967 | 0 |
| UTERU2005593 | 0 | 0 | 0 | 0 | 0 | 7.777 | 0 |
| UTERU2005621 | 0 | 0 | 0 | 0 | 0 | 7.810 | 0 |
| UTERU2007724 | 0 | 0 | 0 | 38.068 | 0 | 0 | 0 |
| UTERU2008085 | 1.976 | 0 | 0 | 1.570 | 0 | 0.313 | 1.970 |
| UTERU2010417 | 0 | 27.509 | 0 | 0 | 0 | 6.554 | 0 |
| UTERU2012252 | 0 | 0 | 0 | 0 | 0 | 74.391 | 0 |
| UTERU2013586 | 0 | 0 | 0 | 0 | 0 | 22.827 | 0 |
| UTERU2015062 | 0 | 0 | 0 | 82.930 | 0 | 0 | 0 |
| UTERU2015108 | 0 | 0 | 0 | 0 | 0 | 21.862 | 0 |
| UTERU2015653 | 0 | 0 | 0 | 0 | 51.890 | 2.021 | 0 |
| UTERU2024969 | 0 | 0 | 0 | 0 | 0 | 11.126 | 0 |

[0745] Genes whose expression levels were negligibly low in each of the above-described libraries are shown with their clone names below.

[0746] 3NB691000085, 3NB691000113, 3NB691000116, 3NB691000129, 3NB691000173, 3NB691000191, 3NB692000012, 3NB692000029, 3NB692000102, 3NB692000154, 3NB692000276, 3NB692000305, 3NB692000429, 3NB692000484, 3NB692000529, 3NB692000545, 3NB692000973, 3NB692001002, 3NB692001034, 3NB692001040, 3NB692001123, 3NB692001267, 3NB692001288, 3NB692001334, 3NB692001339, 3NB692001349, 3NB692001366, 3NB692001408, 3NB692001433, 3NB692001442, 3NB692001459, 3NB692001471, 3NB692001496, 3NB692001501, 3NB692001507, 3NB692001511, 3NB692001519, 3NB692001520, 3NB692001528, 3NB692001548, 3NB692001557, 3NB692001637, 3NB692001719, 3NB692001853, 3NB692001861, 3NB692002051, 3NB692002365, 3NB692002685, 3NB692002806, 3NB692003538, 3NB692004045, 3NB692004724, 3NB692005439, 3NB692006952, 3NB692008178, 3NB692008729, BGGI11000123, BGGI11000193, BGGI11000285, BGGI12000022, BGGI12000067, BGGI12000161, BGGI12000533, BGGI12000544, BGGI12000684, BGGI12000693, BGGI12000839, BGGI12001002, BGGI12001075, BGGI12001241, BGGI12001247, BGGI12001682, BGGI12001714, BLADE1000176, BLADE2000181, BLADE2000256, BLADE2000340, BLADE2000389, BLADE2000463, BLADE2000492, BLADE2000579, BLADE2000640, BLADE2000866, BLADE2000938, BLADE2001031, BLADE2001133, BLADE2001138, BLADE2001141, BLADE2001371, BLADE2001458, BLADE2001575, BLADE2001753, BLADE2001935, BLADE2001940, BLADE2001987, BLADE2002073, BLADE2002310, BLADE2002730, BLADE2002738, BLADE2002744, BLADE2002782, BLADE2002947, BLADE2002972, BLADE2003474, BLADE2003916, BLADE2004089, BLADE2004345, BLADE2004389, BLADE2004462, BLADE2004628, BLADE2004670, BLADE2004722, BLADE2004849, BLADE2005036, BLADE2005038, BLADE2005229, BLADE2005459, BLADE2005792, BLADE2006043, BLADE2006412, BLADE2006415, BLADE2006607, BLADE2006826, BLADE2006849, BLADE2006947, BLADE2007033, BLADE2007043, BLADE2007589, BLADE2007666, BLADE2007722, BLADE2007735, BLADE2007744, BLADE2007799, BLADE2007923, BLADE2007935, BLADE2007958, BLADE2008281, BLADE2008398, BLADE2008454, BLADE2008461, BLADE2008479, BLADE2008539, BLADE2008809, BLADE2008995, BLADE2009452, BLADE2009479, BLADE2009593, BNGH41000098, BNGH41000104, BNGH41000118, BNGH41000137, BNGH41000153, BNGH41000169, BNGH41000177, BNGH41000216, BNGH41000235, BNGH42000130, BNGH42000132, BNGH42000405, BNGH42000532, BNGH42000675, BNGH42000739, BNGH42000791, BNGH42000815, BNGH42000994, BNGH42001247, BNGH42001406, BNGH42001576, BNGH42001724, BNGH42002168, BNGH42002244, BNGH42002387, BNGH42002487, BNGH42002489, BNGH42003529, BNGH42003570, BNGH42003641, BNGH42004076, BNGH42004291, BNGH42004538, BNGH42004679, BNGH42005017, BNGH42005235, BNGH42005504, BNGH42005968, BNGH42006135, BNGH42006226, BNGH42006234, BNGH42007037, BNGH42007366, BNGH42007594, BNGH42007798, BNGH42008199, BNGH42008510, BNGH42008603, BNGH42008649, BNGH42008743, BNGH42008832, BNGH42008850, BNGH42008943, BNGH42009021, BNGH42009025, BRACE1000020, BRACE1000042, BRACE1000047, BRACE1000051, BRACE1000065, BRACE1000070, BRACE1000073, BRACE1000084, BRACE1000087, BRACE1000092, BRACE1000093, BRACE1000101, BRACE1000114, BRACE1000115, BRACE1000124, BRACE1000131, BRACE1000159, BRACE1000166, BRACE1000169, BRACE1000186, BRACE1000187, BRACE1000239, BRACE1000258, BRACE1000451, BRACE1000475, BRACE1000572, BRACE2000061, BRACE2000077, BRACE2000078, BRACE2000100, BRACE2000109, BRACE2000141, BRACE2000183, BRACE2000229, BRACE2000232, BRACE2000245, BRACE2000256, BRACE2000266, BRACE2000267, BRACE2000280, BRACE2000300, BRACE2000331, BRACE2000332, BRACE2000347, BRACE2000351, BRACE2000368, BRACE2000392, BRACE2000441, BRACE2000487, BRACE2000489, BRACE2000505, BRACE2000525, BRACE2000526, BRACE2000531, BRACE2000545, BRACE2000553, BRACE2000565, BRACE2000577, BRACE2000640, BRACE2000650, BRACE2000677, BRACE2000698, BRACE2000718, BRACE2000733, BRACE2000743, BRACE2000750, BRACE2000753, BRACE2000815, BRACE2000864, BRACE2000885, BRACE2000893, BRACE2000905, BRACE2000936, BRACE2000947, BRACE2000965, BRACE2000969, BRACE2000975, BRACE2000988, BRACE2001017, BRACE2001065, BRACE2001070, BRACE2001094, BRACE2001107, BRACE2001117, BRACE2001154, BRACE2001188, BRACE2001191, BRACE2001197, BRACE2001236, BRACE2001239, BRACE2001269, BRACE2001312, BRACE2001313, BRACE2001330, BRACE2001340, BRACE2001352, BRACE2001353, BRACE2001374, BRACE2001375, BRACE2001423, BRACE2001424, BRACE2001445, BRACE2001453, BRACE2001455, BRACE2001477, BRACE2001492, BRACE2001496, BRACE2001497, BRACE2001508, BRACE2001534, BRACE2001543, BRACE2001564, BRACE2001588, BRACE2001607, BRACE2001626, BRACE2001673, BRACE2001677, BRACE2001705, BRACE2001709, BRACE2001711, BRACE2001726, BRACE2001733, BRACE2001737, BRACE2001742, BRACE2001777, BRACE2001779, BRACE2001834, BRACE2001855, BRACE2001859, BRACE2001865, BRACE2001872, BRACE2001881, BRACE2001892, BRACE2001898, BRACE2001923, BRACE2001942, BRACE2001944, BRACE2001954, BRACE2001971, BRACE2001972, BRACE2001973, BRACE2002026, BRACE2002034, BRACE2002050, BRACE2002081, BRACE2002091, BRACE2002139, BRACE2002142, BRACE2002151, BRACE2002157, BRACE2002176, BRACE2002202, BRACE2002206, BRACE2002227, BRACE2002260, BRACE2002297, BRACE2002304, BRACE2002356, BRACE2002394, BRACE2002409, BRACE2002431, BRACE2002444, BRACE2002458, BRACE2002467, BRACE2002468, BRACE2002478, BRACE2002495, BRACE2002582, BRACE2002585, BRACE2002589, BRACE2002590, BRACE2002606, BRACE2002613, BRACE2002614, BRACE2002617, BRACE2002623, BRACE2002635, BRACE2002649, BRACE2002661, BRACE2002676, BRACE2002677, BRACE2002682, BRACE2002685, BRACE2002695, BRACE2002707, BRACE2002736, BRACE2002755, BRACE2002762, BRACE2002772, BRACE2002792, BRACE2002796, BRACE2002803, BRACE2002807, BRACE2002812, BRACE2002834, BRACE2002849, BRACE2002857, BRACE2002861, BRACE2002884, BRACE2002896, BRACE2002948, BRACE2003037, BRACE2003078, BRACE2003097, BRACE2003110, BRACE2003168, BRACE2003172, BRACE2003199, BRACE2003210, BRACE2003269, BRACE2003285, BRACE2003304, BRACE2003319, BRACE2003398, BRACE2003420, BRACE2003428, BRACE2003431, BRACE2003512, BRACE2003516, BRACE2003527, BRACE2003539, BRACE2003540, BRACE2003594, BRACE2003598, BRACE2003609, BRACE2003614, BRACE2003639, BRACE2003700, BRACE2003713, BRACE2003766, BRACE2003788, BRACE2003800, BRACE2003802, BRACE2003825, BRACE2003845, BRACE2003846, BRACE2003847, BRACE2003848, BRACE2003873, BRACE2003885, BRACE2003887, BRACE2003892, BRACE2003904, BRACE2003905, BRACE2003928, BRACE2003944, BRACE2003954, BRACE2003982, BRACE2003987, BRACE2005034, BRACE2005047, BRACE2005063, BRACE2005083, BRACE2005087, BRACE2005090, BRACE2005099, BRACE2005118, BRACE2005124, BRACE2005138, BRACE2005160, BRACE2005169, BRACE2005189, BRACE2005193, BRACE2005196, BRACE2005198, BRACE2005216, BRACE2005231, BRACE2005243, BRACE2005251, BRACE2005253, BRACE2005290, BRACE2005298, BRACE2005328, BRACE2005329, BRACE2005337, BRACE2005348, BRACE2005363, BRACE2005395, BRACE2005408, BRACE2005433, BRACE2005448, BRACE2005450, BRACE2005453, BRACE2005457, BRACE2005460, BRACE2005489, BRACE2005518, BRACE2005556, BRACE2005562, BRACE2005624, BRACE2005642, BRACE2005661, BRACE2005667, BRACE2005681, BRACE2005719, BRACE2005731, BRACE2005742, BRACE2005762, BRACE2005773, BRACE2005787, BRACE2005795, BRACE2005800, BRACE2005858, BRACE2005869, BRACE2005875, BRACE2005881, BRACE2005898, BRACE2005904, BRACE2005906, BRACE2005907, BRACE2005911, BRACE2005937, BRACE2005949, BRACE2005981, BRACE2005991, BRACE2006055, BRACE2006072, BRACE2006075, BRACE2006084, BRACE2006089, BRACE2006102, BRACE2006105, BRACE2006122, BRACE2006137, BRACE2006143, BRACE2006162, BRACE2006167, BRACE2006174, BRACE2006240, BRACE2006245, BRACE2006249, BRACE2006258, BRACE2006264, BRACE2006274, BRACE2006281, BRACE2006298, BRACE2006319, BRACE2006344, BRACE2006354, BRACE2006363, BRACE2006378, BRACE2006380, BRACE2006393, BRACE2006397, BRACE2006413, BRACE2006417, BRACE2006453, BRACE2006459, BRACE2006488, BRACE2006514, BRACE2006534, BRACE2006540, BRACE2006547, BRACE2006564, BRACE2006587, BRACE2006598, BRACE2006636, BRACE2006685, BRACE2006703, BRACE2006743, BRACE2006753, BRACE2006783, BRACE2006821, BRACE2006833, BRACE2006859, BRACE2006900, BRACE2006909, BRACE2006911, BRACE2006924, BRACE2006935, BRACE2006937, BRACE2006944, BRACE2006951, BRACE2006982, BRACE2006986, BRACE2007013, BRACE2007064, BRACE2007068, BRACE2007087, BRACE2007109, BRACE2007138, BRACE2007174, BRACE2007197, BRACE2007201, BRACE2007203, BRACE2007232, BRACE2007254, BRACE2007262, BRACE2007274, BRACE2007281, BRACE2007295, BRACE2007358, BRACE2007396, BRACE2007398, BRACE2007401, BRACE2007411, BRACE2007447, BRACE2007477, BRACE2007502, BRACE2007503, BRACE2007518, BRACE2007522, BRACE2007527, BRACE2007538, BRACE2007563, BRACE2007567, BRACE2007577, BRACE2007621, BRACE2007640, BRACE2007641, BRACE2007646, BRACE2007663, BRACE2007682, BRACE2007685, BRACE2007727, BRACE2007749, BRACE2007760, BRACE2007761, BRACE2007764, BRACE2007767, BRACE2007768, BRACE2007769, BRACE2007784, BRACE2007786, BRACE2007798, BRACE2007799, BRACE2007801, BRACE2007832, BRACE2007836, BRACE2007868, BRACE2007882, BRACE2007888, BRACE2007902, BRACE2007920, BRACE2007937, BRACE2007944, BRACE2007952, BRACE2008008, BRACE2008015, BRACE2008021, BRACE2008102, BRACE2008114, BRACE2008144, BRACE2008172, BRACE2008216, BRACE2008218, BRACE2008251, BRACE2008276, BRACE2008295, BRACE2008308, BRACE2008336, BRACE2008358, BRACE2008361, BRACE2008380, BRACE2008385, BRACE2008401, BRACE2008410, BRACE2008420, BRACE2008443, BRACE2008473, BRACE2008480, BRACE2008481, BRACE2008488, BRACE2008495, BRACE2008500, BRACE2008553, BRACE2008594, BRACE2008604, BRACE2008615, BRACE2008622, BRACE2008629, BRACE2008655, BRACE2008656, BRACE2008708, BRACE2008710, BRACE2008754, BRACE2008797, BRACE2008847, BRACE2008857, BRACE2008861, BRACE2008867, BRACE2008883, BRACE2008917, BRACE2008919, BRACE2008941, BRACE2008948, BRACE2008960, BRACE2008999, BRACE2009014, BRACE2009016, BRACE2009031, BRACE2009037, BRACE2009044, BRACE2009045, BRACE2009053, BRACE2009122, BRACE2009131, BRACE2009185, BRACE2009188, BRACE2009212, BRACE2009221, BRACE2009235, BRACE2009238, BRACE2009255, BRACE2009270, BRACE2009272, BRACE2009274, BRACE2009275, BRACE2009293, BRACE2009307, BRACE2009311, BRACE2009318, BRACE2009323, BRACE2009366, BRACE2009421, BRACE2009428, BRACE2009434, BRACE2009437, BRACE2009483, BRACE2009533, BRACE2009558, BRACE2009566, BRACE2009591, BRACE2009620, BRACE2009654, BRACE2009732, BRACE2009754, BRACE2009828, BRACE2009886, BRACE2009907, BRACE2009957, BRACE2010170, BRACE2010171, BRACE2010203, BRACE2010208, BRACE2010336, BRACE2010348, BRACE2010440, BRACE2010444, BRACE2010477, BRACE2010489, BRACE2010535, BRACE2010550, BRACE2010598, BRACE2010632, BRACE2010651, BRACE2010669, BRACE2010684, BRACE2010753, BRACE2010813, BRACE2010828, BRACE2010837, BRACE2010888, BRACE2010937, BRACE2010983, BRACE2011007, BRACE2011025, BRACE2011183, BRACE2011199, BRACE2011265, BRACE2011389, BRACE2011478, BRACE2011545, BRACE2011592, BRACE2011611, BRACE2011646, BRACE2011677, BRACE2011703, BRACE2011747, BRACE2011838, BRACE2011892, BRACE2011904, BRACE2011947, BRACE2012061, BRACE2012062, BRACE2012185, BRACE2012222, BRACE2012232, BRACE2012291, BRACE2012317, BRACE2012510, BRACE2012528, BRACE2012625, BRACE2012653, BRACE2012814, BRACE2012833, BRACE2012838, BRACE2012936, BRACE2012947, BRACE2013009, BRACE2013010, BRACE2013126, BRACE2013132, BRACE2013149, BRACE2013369, BRACE2013806, BRACE2013855, BRACE2014108, BRACE2014161, BRACE2014232, BRACE2014257, BRACE2014268, BRACE2014306, BRACE2014475, BRACE2014657, BRACE2014746, BRACE2014780, BRACE2014818, BRACE2014821, BRACE2014824, BRACE2014850, BRACE2014854, BRACE2015031, BRACE2015058, BRACE2015132, BRACE2015262, BRACE2015270, BRACE2015287, BRACE2015314, BRACE2015352, BRACE2015368, BRACE2015436, BRACE2015741, BRACE2015756, BRACE2015969, BRACE2015995, BRACE2016058, BRACE2016194, BRACE2016315, BRACE2016325, BRACE2016335, BRACE2016362, BRACE2016366, BRACE2016465, BRACE2016516, BRACE2016583, BRACE2016708, BRACE2016821, BRACE2016896, BRACE2016981, BRACE2017108, BRACE2017124, BRACE2017298, BRACE2017359, BRACE2017397, BRACE2017410, BRACE2017438, BRACE2017574, BRACE2017580, BRACE2017587, BRACE2017720, BRACE2017844, BRACE2017872, BRACE2017929, BRACE2017985, BRACE2017992, BRACE2018337, BRACE2018443, BRACE2018448, BRACE2018568, BRACE2018700, BRACE2018727, BRACE2018736, BRACE2018759, BRACE2018762, BRACE2018782, BRACE2018847, BRACE2019004, BRACE2019044, BRACE2019147, BRACE2019244, BRACE2019258, BRACE2019327, BRACE2019348, BRACE2019371, BRACE2019467, BRACE2019510, BRACE2019519, BRACE2019528, BRACE2019618, BRACE2019696, BRACE2019703, BRACE2019843, BRACE2019865, BRACE2019872, BRACE2019877, BRACE2020028, BRACE2020077, BRACE2020097, BRACE2020157, BRACE2020278, BRACE2020358, BRACE2020467, BRACE2020584, BRACE2020652, BRACE2020709, BRACE2020742, BRACE2020756, BRACE2020863, BRACE2020982, BRACE2021014, BRACE2021143, BRACE2021148, BRACE2021245, BRACE2021254, BRACE2021264, BRACE2021344, BRACE2021433, BRACE2021478, BRACE2021541, BRACE2021670, BRACE2021695, BRACE2021708, BRACE2021721, BRACE2021932, BRACE2021936, BRACE2022030, BRACE2022158, BRACE2022196, BRACE2022270, BRACE2022328, BRACE2022333, BRACE2022389, BRACE2022394, BRACE2022435, BRACE2022448, BRACE2022450, BRACE2022549, BRACE2022633, BRACE2022693, BRACE2022848, BRACE2022928, BRACE2022990, BRACE2023069, BRACE2023070, BRACE2023223, BRACE2023268, BRACE2023284, BRACE2023404, BRACE2023451, BRACE2023540, BRACE2023633, BRACE2023718, BRACE2023727, BRACE2023744, BRACE2023800, BRACE2023801, BRACE2024074, BRACE2024222, BRACE2024610, BRACE2024627, BRACE2024781, BRACE2024826, BRACE2025018, BRACE2025316, BRACE2025333, BRACE2025437, BRACE2025452, BRACE2025492, BRACE2025710, BRACE2025796, BRACE2025992, BRACE2026054, BRACE2026131, BRACE2026141, BRACE2026142, BRACE2026293, BRACE2026294, BRACE2026404, BRACE2026675, BRACE2026725, BRACE2026836, BRACE2026920, BRACE2026971, BRACE2027018, BRACE2027221, BRACE2027258, BRACE2027312, BRACE2027382, BRACE2027389, BRACE2027408, BRACE2027643, BRACE2027767, BRACE2027770, BRACE2027879, BRACE2027896, BRACE2027970, BRACE2028392, BRACE2028410, BRACE2028636, BRACE2028741, BRACE2028956, BRACE2028970, BRACE2029112, BRACE2029356, BRACE2029396, BRACE2029581, BRACE2029644, BRACE2029849, BRACE2030039, BRACE2030096, BRACE2030323, BRACE2030326, BRACE2030341, BRACE2030345, BRACE2030736, BRACE2030883, BRACE2030884, BRACE2031154, BRACE2031232, BRACE2031527, BRACE2031531, BRACE2031553, BRACE2031899, BRACE2032044, BRACE2032090, BRACE2032134, BRACE2032148, BRACE2032182, BRACE2032329, BRACE2032385, BRACE2032436, BRACE2032477, BRACE2032502, BRACE2032538, BRACE2032584, BRACE2032823, BRACE2033128, BRACE2033394, BRACE2033478, BRACE2033720, BRACE2033786, BRACE2034434, BRACE2034523, BRACE2034616, BRACE2034622, BRACE2034870, BRACE2035003, BRACE2035120, BRACE2035124, BRACE2035191, BRACE2035278, BRACE2035381, BRACE2035441, BRACE2035485, BRACE2036005, BRACE2036096, BRACE2036743, BRACE2036830, BRACE2036834, BRACE2036900, BRACE2037132, BRACE2037294, BRACE2037295, BRACE2037299, BRACE2037310, BRACE2037431, BRACE2037692, BRACE2037847, BRACE2038114, BRACE2038269, BRACE2038271, BRACE2038329, BRACE2038492, BRACE2038551, BRACE2038618, BRACE2039009, BRACE2039128, BRACE2039170, BRACE2039249, BRACE2039286, BRACE2039297, BRACE2039327, BRACE2039362, BRACE2039475, BRACE2039600, BRACE2039607, BRACE2039734, BRACE2039823, BRACE2039832, BRACE2039893, BRACE2039986, BRACE2040138, BRACE2040325, BRACE2040514, BRACE2040640, BRACE2040987, BRACE2041009, BRACE2041095, BRACE2041200, BRACE2041264, BRACE2041890, BRACE2041898, BRACE2042394, BRACE2042398, BRACE2042550, BRACE2042620, BRACE2042628, BRACE2042873, BRACE2043036, BRACE2043105, BRACE2043142, BRACE2043248, BRACE2043349, BRACE2043381, BRACE2043774, BRACE2043942, BRACE2044057, BRACE2044105, BRACE2044263, BRACE2044286, BRACE2044304, BRACE2044473, BRACE2044510, BRACE2044640, BRACE2044816, BRACE2044946, BRACE2044949, BRACE2045300, BRACE2045428, BRACE2045445, BRACE2045596, BRACE2045772, BRACE2045947, BRACE2045954, BRACE2046251, BRACE2046295, BRACE2046976, BRACE2047011, BRACE2047232, BRACE2047350, BRACE2047377, BRACE2047385, BRACE2047492, BRACE2047558, BRACE2047573, BRACE2047835, BRACE2047893, BRACE2047975, BRACE3000071, BRACE3000404, BRACE3000520, BRACE3000697, BRACE3000840, BRACE3000973, BRACE3001002, BRACE3001058, BRACE3001066, BRACE3001113, BRACE3001217, BRACE3001299, BRACE3001384, BRACE3001391, BRACE3001403, BRACE3001595, BRACE3001754, BRACE3001948, BRACE3001973, BRACE3002184, BRACE3002298, BRACE3002344, BRACE3002390, BRACE3002420, BRACE3002508, BRACE3002541, BRACE3002756, BRACE3003004, BRACE3003026, BRACE3003053, BRACE3003192, BRACE3003413, BRACE3003595, BRACE3003698, BRACE3003866, BRACE3003920, BRACE3004046, BRACE3004058, BRACE3004113, BRACE3004150, BRACE3004205, BRACE3004358, BRACE3004371, BRACE3004435, BRACE3004477, BRACE3004767, BRACE3004772, BRACE3004783, BRACE3004843, BRACE3004862, BRACE3004880, BRACE3004887, BRACE3004981, BRACE3004996, BRACE3004998, BRACE3005103, BRACE3005127, BRACE3005145, BRACE3005217, BRACE3005225, BRACE3005430, BRACE3005499, BRACE3005760, BRACE3005870, BRACE3005903, BRACE3005938, BRACE3005989, BRACE3006113, BRACE3006185, BRACE3006226, BRACE3006462, BRACE3006463, BRACE3006553, BRACE3006872, BRACE3006917, BRACE3007058, BRACE3007084, BRACE3007085, BRACE3007258, BRACE3007322, BRACE3007472, BRACE3007480, BRACE3007559, BRACE3007625, BRACE3007642, BRACE3007649, BRACE3007767, BRACE3007869, BRACE3008036, BRACE3008066, BRACE3008092, BRACE3008095, BRACE3008137, BRACE3008255, BRACE3008337, BRACE3008384, BRACE3008720, BRACE3008772, BRACE3009044, BRACE3009075, BRACE3009090, BRACE3009127, BRACE3009197, BRACE3009237, BRACE3009265, BRACE3009297, BRACE3009377, BRACE3009392, BRACE3009416, BRACE3009539, BRACE3009574, BRACE3009701, BRACE3009708, BRACE3009724, BRACE3009993, BRACE3010076, BRACE3010079, BRACE3010086, BRACE3010221, BRACE3010283, BRACE3010315, BRACE3010397, BRACE3010416, BRACE3010428, BRACE3010435, BRACE3010702, BRACE3010862, BRACE3011271, BRACE3011421, BRACE3011447, BRACE3011505, BRACE3011634, BRACE3011774, BRACE3012357, BRACE3012574, BRACE3012806, BRACE3012930, BRACE3013119, BRACE3013418, BRACE3013576, BRACE3013740, BRACE3013780, BRACE3013874, BRACE3013936, BRACE3013986, BRACE3014005, BRACE3014068, BRACE3014231, BRACE3014290, BRACE3014317, BRACE3014523, BRACE3014714, BRACE3014807, BRACE3014942, BRACE3015090, BRACE3015121, BRACE3015262, BRACE3015521, BRACE3015808, BRACE3015829, BRACE3015894, BRACE3015898, BRACE3016020, BRACE3016122, BRACE3016167, BRACE3016170, BRACE3016580, BRACE3016788, BRACE3016810, BRACE3016862, BRACE3016884, BRACE3017083, BRACE3017253, BRACE3018083, BRACE3018308, BRACE3018963, BRACE3019055, BRACE3019071, BRACE3019084, BRACE3019570, BRACE3019611, BRACE3019817, BRACE3019828, BRACE3019941, BRACE3020151, BRACE3020194, BRACE3020286, BRACE3020356, BRACE3020594, BRACE3020669, BRACE3020671, BRACE3020890, BRACE3021148, BRACE3021430, BRACE3021517, BRACE3021805, BRACE3022051, BRACE3022303, BRACE3022312, BRACE3022340, BRACE3022847, BRACE3023604, BRACE3023912, BRACE3024073, BRACE3024359, BRACE3024379, BRACE3024444, BRACE3024497, BRACE3024537, BRACE3024659, BRACE3024662, BRACE3024879, BRACE3025153, BRACE3025302, BRACE3025457, BRACE3025531, BRACE3025627, BRACE3025630, BRACE3025719, BRACE3026008, BRACE3026075, BRACE3026161, BRACE3026290, BRACE3026345, BRACE3026456, BRACE3026735, BRACE3026802, BRACE3026844, BRACE3026947, BRACE3026993, BRACE3027242, BRACE3027256, BRACE3027326, BRACE3027478, BRACE3027480, BRACE3027931, BRACE3027976, BRACE3028214, BRACE3028241, BRACE3028360, BRACE3028895, BRACE3028998, BRACE3029005, BRACE3029021, BRACE3029205, BRACE3029447, BRACE3030057, BRACE3030103, BRACE3030538, BRACE3030748, BRACE3030866, BRACE3031161, BRACE3031184, BRACE3031185, BRACE3031315, BRACE3031372, BRACE3031579, BRACE3031728, BRACE3031838, BRACE3031843, BRACE3032427, BRACE3032455, BRACE3032537, BRACE3032538, BRACE3032631, BRACE3032771, BRACE3032980, BRACE3032983, BRACE3033525, BRACE3034159, BRACE3034183, BRACE3034389, BRACE3034964, BRACE3034993, BRACE3035168, BRACE3035227, BRACE3036156, BRACE3036271, BRACE3037612, BRACE3037637, BRACE3037803, BRACE3038012, BRACE3038030, BRACE3038569, BRACE3038570, BRACE3038687, BRACE3038760, BRACE3039288, BRACE3039358, BRACE3039378, BRACE3039454, BRACE3040012, BRACE3040239, BRACE3040504, BRACE3040644, BRACE3040856, BRACE3040863, BRACE3041059, BRACE3041162, BRACE3041827, BRACE3042046, BRACE3042210, BRACE3042326, BRACE3042409, BRACE3042432, BRACE3042594, BRACE3043597, BRACE3044090, BRACE3044172, BRACE3044247, BRACE3044377, BRACE3044389, BRACE3044495, BRACE3045011, BRACE3045033, BRACE3045078, BRACE3045145, BRACE3045424, BRACE3045708, BRACE3045981, BRACE3046049, BRACE3046152, BRACE3046294, BRACE3046450, BRACE3046466, BRACE3046491, BRACE3046609, BRACE3046762, BRACE3046837, BRACE3046855, BRACE3046966, BRACE3047018, BRACE3047482, BRACE3047801, BRALZ1000047, BRALZ1000103, BRALZ2000189, BRALZ2000263, BRALZ2000988, BRALZ2001038, BRALZ2001279, BRALZ2001350, BRALZ2001445, BRALZ2001559, BRALZ2001743, BRALZ2001834, BRALZ2002174, BRALZ2002418, BRALZ2002477, BRALZ2003119, BRALZ2003330, BRALZ2003453, BRALZ2003525, BRALZ2004397, BRALZ2005467, BRALZ2005471, BRALZ2005888, BRALZ2005950, BRALZ2005992, BRALZ2006288, BRALZ2006474, BRALZ2006560, BRALZ2006734, BRALZ2006800, BRALZ2006976, BRALZ2007376, BRALZ2007545, BRALZ2007576, BRALZ2007661, BRALZ2007790, BRALZ2007793, BRALZ2007952, BRALZ2008031, BRALZ2008166, BRALZ2008462, BRALZ2008617, BRALZ2008696, BRALZ2008763, BRALZ2008869, BRALZ2008930, BRALZ2009446, BRALZ2009486, BRALZ2010186, BRALZ2010842, BRALZ2011337, BRALZ2011796, BRALZ2011880, BRALZ2012050, BRALZ2012183, BRALZ2012848, BRALZ2013621, BRALZ2013690, BRALZ2014316, BRALZ2014484, BRALZ2014951, BRALZ2015168, BRALZ2015811, BRALZ2016085, BRALZ2016498, BRALZ2017359, BRALZ2017531, BRALZ2017607, BRALZ2017620, BRALZ2017844, BRALZ2018342, BRALZ2018492, BRALZ2018834, BRALZ2019047, BRAMY1000095, BRAMY1000098, BRAMY1000130, BRAMY1000157, BRAMY1000173, BRAMY2000021, BRAMY2000025, BRAMY2000052, BRAMY2000076, BRAMY2000086, BRAMY2000151, BRAMY2000181, BRAMY2000196, BRAMY2000231, BRAMY2000277, BRAMY2000354, BRAMY2000388, BRAMY2000411, BRAMY2000508, BRAMY2000562, BRAMY2000585, BRAMY2000653, BRAMY2000814, BRAMY2000946, BRAMY2000981, BRAMY2001068, BRAMY2001114, BRAMY2001203, BRAMY2001282, BRAMY2001367, BRAMY2001427, BRAMY2001473, BRAMY2001678, BRAMY2002005, BRAMY2002044, BRAMY2002072, BRAMY2002158, BRAMY2002311, BRAMY2002339, BRAMY2002364, BRAMY2002369, BRAMY2002479, BRAMY2002493, BRAMY2002525, BRAMY2002584, BRAMY2002604, BRAMY2002621, BRAMY2002638, BRAMY2002739, BRAMY2002799, BRAMY2002853, BRAMY2002862, BRAMY2002956, BRAMY2003008, BRAMY2003037, BRAMY2003117, BRAMY2003287, BRAMY2003325, BRAMY2003529, BRAMY2003538, BRAMY2003585, BRAMY2003634, BRAMY2003653, BRAMY2003681, BRAMY2003893, BRAMY2003897, BRAMY2003898, BRAMY2003904, BRAMY2003926, BRAMY2003929, BRAMY2004031, BRAMY2004058, BRAMY2004183, BRAMY2004335, BRAMY2004351, BRAMY2004352, BRAMY2004387, BRAMY2004492, BRAMY2004524, BRAMY2004537, BRAMY2004542, BRAMY2004756, BRAMY2004771, BRAMY2005052, BRAMY2005064, BRAMY2005094, BRAMY2005151, BRAMY2005182, BRAMY2005244, BRAMY2005391, BRAMY2005488, BRAMY2005576, BRAMY2005648, BRAMY2005662, BRAMY2005708, BRAMY2005711, BRAMY2006092, BRAMY2006118, BRAMY2006149, BRAMY2006366, BRAMY2006375, BRAMY2006397, BRAMY2006411, BRAMY2006459, BRAMY2006466, BRAMY2006659, BRAMY2006779, BRAMY2006809, BRAMY2006879, BRAMY2007043, BRAMY2007078, BRAMY2007110, BRAMY2007185, BRAMY2007244, BRAMY2007249, BRAMY2007255, BRAMY2007287, BRAMY2007308, BRAMY2007411, BRAMY2007458, BRAMY2007486, BRAMY2007546, BRAMY2007567, BRAMY2007594, BRAMY2007610, BRAMY2007613, BRAMY2007653, BRAMY2007753, BRAMY2007859, BRAMY2008333, BRAMY2008382, BRAMY2008563, BRAMY2008583, BRAMY2008977, BRAMY2008979, BRAMY2009013, BRAMY2009023, BRAMY2009034, BRAMY2009105, BRAMY2009123, BRAMY2009192, BRAMY2009344, BRAMY2009349, BRAMY2009394, BRAMY2009489, BRAMY2009508, BRAMY2009528, BRAMY2009557, BRAMY2009612, BRAMY2009693, BRAMY2009934, BRAMY2010068, BRAMY2010135, BRAMY2010145, BRAMY2010171, BRAMY2010208, BRAMY2010239, BRAMY2010272, BRAMY2010290, BRAMY2010357, BRAMY2010366, BRAMY2010395, BRAMY2010441, BRAMY2010442, BRAMY2010464, BRAMY2010581, BRAMY2010798, BRAMY2010808, BRAMY2010919, BRAMY2011064, BRAMY2011105, BRAMY2011178, BRAMY2011196, BRAMY2011216, BRAMY2011253, BRAMY2011446, BRAMY2011480, BRAMY2011639, BRAMY2011679, BRAMY2011811, BRAMY2011841, BRAMY2011846, BRAMY2011849, BRAMY2011872, BRAMY2011961, BRAMY2012017, BRAMY2012091, BRAMY2012119, BRAMY2012162, BRAMY2012163, BRAMY2012277, BRAMY2012340, BRAMY2012426, BRAMY2012497, BRAMY2012517, BRAMY2012555, BRAMY2012568, BRAMY2012581, BRAMY2012691, BRAMY2012721, BRAMY2012731, BRAMY2012776, BRAMY2012880, BRAMY2012881, BRAMY2013169, BRAMY2013200, BRAMY2013216, BRAMY2013405, BRAMY2013414, BRAMY2013572, BRAMY2013590, BRAMY2013621, BRAMY2013659, BRAMY2013722, BRAMY2013736, BRAMY2013756, BRAMY2013944, BRAMY2013975, BRAMY2014019, BRAMY2014205, BRAMY2014387, BRAMY2014462, BRAMY2014469, BRAMY2014541, BRAMY2014754, BRAMY2014813, BRAMY2015211, BRAMY2015251, BRAMY2015311, BRAMY2015420, BRAMY2015503, BRAMY2015516, BRAMY2015550, BRAMY2015551, BRAMY2015559, BRAMY2015688, BRAMY2015705, BRAMY2015782, BRAMY2015833, BRAMY2015855, BRAMY2015890, BRAMY2015911, BRAMY2015925, BRAMY2016002, BRAMY2016009, BRAMY2016020, BRAMY2016070, BRAMY2016251, BRAMY2016325, BRAMY2016327, BRAMY2016386, BRAMY2016771, BRAMY2016892, BRAMY2016938, BRAMY2016953, BRAMY2017014, BRAMY2017249, BRAMY2017348, BRAMY2017450, BRAMY2017455, BRAMY2017528, BRAMY2017864, BRAMY2018027, BRAMY2018106, BRAMY2018122, BRAMY2018126, BRAMY2018272, BRAMY2018273, BRAMY2018279, BRAMY2018295, BRAMY2018308, BRAMY2018396, BRAMY2018467, BRAMY2018635, BRAMY2018785, BRAMY2019055, BRAMY2019111, BRAMY2019277, BRAMY2019300, BRAMY2019468, BRAMY2019509, BRAMY2019600, BRAMY2019643, BRAMY2019710, BRAMY2019963, BRAMY2019985, BRAMY2019989, BRAMY2020050, BRAMY2020058, BRAMY2020106, BRAMY2020270, BRAMY2020354, BRAMY2020355, BRAMY2020412, BRAMY2020427, BRAMY2020445, BRAMY2020466, BRAMY2020520, BRAMY2020574, BRAMY2020634, BRAMY2020713, BRAMY2021040, BRAMY2021063, BRAMY2021098, BRAMY2021139, BRAMY2021142, BRAMY2021276, BRAMY2021310, BRAMY2021388, BRAMY2021498, BRAMY2021523, BRAMY2021710, BRAMY2021732, BRAMY2021746, BRAMY2021825, BRAMY2021867, BRAMY2021962, BRAMY2021982, BRAMY2022052, BRAMY2022160, BRAMY2022168, BRAMY2022263, BRAMY2022301, BRAMY2022320, BRAMY2022383, BRAMY2022445, BRAMY2022454, BRAMY2022493, BRAMY2022525, BRAMY2022532, BRAMY2022723, BRAMY2022796, BRAMY2022929, BRAMY2022980, BRAMY2022984, BRAMY2023060, BRAMY2023110, BRAMY2023115, BRAMY2023161, BRAMY2023172, BRAMY2023238, BRAMY2023327, BRAMY2023358, BRAMY2023406, BRAMY2023482, BRAMY2023514, BRAMY2023719, BRAMY2023729, BRAMY2023786, BRAMY2023852, BRAMY2023863, BRAMY2023939, BRAMY2024004, BRAMY2024073, BRAMY2024312, BRAMY2024374, BRAMY2024390, BRAMY2024416, BRAMY2024449, BRAMY2024489, BRAMY2024497, BRAMY2024514, BRAMY2024530, BRAMY2024535, BRAMY2024545, BRAMY2024576, BRAMY2024593, BRAMY2024711, BRAMY2024715, BRAMY2024728, BRAMY2024827, BRAMY2024849, BRAMY2025024, BRAMY2025032, BRAMY2025121, BRAMY2025175, BRAMY2025218, BRAMY2025230, BRAMY2025272, BRAMY2025277, BRAMY2025495, BRAMY2025812, BRAMY2025996, BRAMY2026009, BRAMY2026091, BRAMY2026168, BRAMY2026300, BRAMY2026347, BRAMY2026395, BRAMY2026405, BRAMY2026533, BRAMY2026538, BRAMY2026685, BRAMY2026713, BRAMY2026778, BRAMY2026824, BRAMY2026899, BRAMY2026902, BRAMY2026904, BRAMY2026976, BRAMY2027073, BRAMY2027114, BRAMY2027140, BRAMY2027242, BRAMY2027396, BRAMY2027451, BRAMY2027461, BRAMY2027467, BRAMY2027587, BRAMY2027714, BRAMY2027717, BRAMY2027739, BRAMY2027752, BRAMY2027782, BRAMY2028072, BRAMY2028183, BRAMY2028188, BRAMY2028269, BRAMY2028282, BRAMY2028472, BRAMY2028491, BRAMY2028516, BRAMY2028565, BRAMY2028593, BRAMY2028682, BRAMY2028783, BRAMY2028796, BRAMY2028856, BRAMY2028914, BRAMY2029204, BRAMY2029602, BRAMY2029988, BRAMY2030098, BRAMY2030109, BRAMY2030206, BRAMY2030477, BRAMY2030607, BRAMY2030702, BRAMY2030703, BRAMY2030768, BRAMY2030799, BRAMY2030859, BRAMY2030915, BRAMY2031317, BRAMY2031377, BRAMY2031442, BRAMY2031516, BRAMY2032014, BRAMY2032231, BRAMY2032242, BRAMY2032290, BRAMY2032311, BRAMY2032317, BRAMY2032344, BRAMY2032589, BRAMY2032678, BRAMY2032696, BRAMY2032777, BRAMY2032994, BRAMY2033003, BRAMY2033116, BRAMY2033240, BRAMY2033267, BRAMY2033316, BRAMY2033332, BRAMY2033506, BRAMY2033594, BRAMY2033895, BRAMY2033914, BRAMY2034072, BRAMY2034185, BRAMY2034187, BRAMY2034305, BRAMY2034561, BRAMY2034920, BRAMY2034993, BRAMY2035070, BRAMY2035449, BRAMY2035545, BRAMY2035606, BRAMY2035718, BRAMY2035719, BRAMY2035801, BRAMY2035869, BRAMY2035923, BRAMY2036076, BRAMY2036079, BRAMY2036254, BRAMY2036266, BRAMY2036387, BRAMY2036396, BRAMY2036459, BRAMY2036567, BRAMY2036615, BRAMY2036699, BRAMY2036913, BRAMY2036918, BRAMY2036968, BRAMY2037147, BRAMY2037328, BRAMY2037609, BRAMY2037629, BRAMY2037800, BRAMY2037823, BRAMY2037971, BRAMY2038100, BRAMY2038128, BRAMY2038317, BRAMY2038475, BRAMY2038484, BRAMY2038516, BRAMY2038832, BRAMY2038846, BRAMY2038887, BRAMY2038904, BRAMY2039287, BRAMY2039300, BRAMY2039314, BRAMY2039341, BRAMY2039630, BRAMY2039695, BRAMY2039728, BRAMY2039872, BRAMY2040051, BRAMY2040159, BRAMY2040214, BRAMY2040478, BRAMY2040592, BRAMY2040915, BRAMY2041261, BRAMY2041347, BRAMY2041378, BRAMY2041384, BRAMY2041434, BRAMY2041507, BRAMY2041542, BRAMY2041738, BRAMY2042122, BRAMY2042131, BRAMY2042178, BRAMY2042195, BRAMY2042244, BRAMY2042549, BRAMY2042596, BRAMY2042612, BRAMY2042641, BRAMY2042711, BRAMY2042760, BRAMY2042804, BRAMY2042899, BRAMY2042918, BRAMY2043069, BRAMY2043103, BRAMY2043314, BRAMY2043345, BRAMY2044246, BRAMY2044317, BRAMY2044349, BRAMY2044686, BRAMY2044838, BRAMY2045036, BRAMY2045299, BRAMY2045471, BRAMY2045530, BRAMY2046109, BRAMY2046478, BRAMY2046489, BRAMY2046537, BRAMY2046667, BRAMY2046742, BRAMY2046871, BRAMY2046984, BRAMY2046989, BRAMY2047169, BRAMY2047280, BRAMY2047420, BRAMY2047676, BRAMY2047692, BRAMY2047746, BRAMY2047751, BRAMY2047765, BRAMY2047884, BRAMY2047948, BRAMY3000206, BRAMY3000210, BRAMY3000213, BRAMY3000224, BRAMY3000254, BRAMY3000307, BRAMY3000692, BRAMY3001356, BRAMY3001401, BRAMY3001409, BRAMY3001794, BRAMY3002120, BRAMY3002312, BRAMY3002329, BRAMY3002458, BRAMY3002508, BRAMY3002620, BRAMY3002803, BRAMY3002805, BRAMY3002886, BRAMY3003026, BRAMY3003109, BRAMY3003205, BRAMY3003310, BRAMY3003566, BRAMY3003723, BRAMY3004126, BRAMY3004224, BRAMY3004364, BRAMY3004377, BRAMY3004672, BRAMY3004800, BRAMY3004900, BRAMY3004919, BRAMY3005091, BRAMY3005184, BRAMY3005656, BRAMY3005912, BRAMY3005932, BRAMY3006032, BRAMY3006297, BRAMY3006761, BRAMY3007078, BRAMY3007206, BRAMY3007311, BRAMY3007350, BRAMY3007449, BRAMY3007471, BRAMY3007609, BRAMY3007723, BRAMY3007968, BRAMY3008044, BRAMY3008088, BRAMY3008096, BRAMY3008335, BRAMY3008466, BRAMY3008505, BRAMY3008650, BRAMY3008937, BRAMY3009158, BRAMY3009207, BRAMY3009491, BRAMY3009556, BRAMY3009782, BRAMY3009811, BRAMY3009904, BRAMY3010264, BRAMY3010321, BRAMY3010411, BRAMY3010492, BRAMY3010603, BRAMY3010654, BRAMY4000095, BRAMY4000229, BRAMY4000277, BRAMY4000915, BRAMY4000962, BRAMY4001173, BRAMY4001200, BRAMY4001234, BRAMY4001449, BRAMY4001652, BRAMY4001863, BRAMY4001913, BRAMY4002575, BRAMY4002628, BRASW1000053, BRASW1000125, BRAWH1000001, BRAWH1000002, BRAWH1000007, BRAWH1000037, BRAWH1000045, BRAWH1000093, BRAWH1000094, BRAWH1000116, BRAWH1000127, BRAWH1000130, BRAWH1000157, BRAWH1000162, BRAWH1000164, BRAWH1000168, BRAWH1000174, BRAWH1000180, BRAWH1000369, BRAWH2000034, BRAWH2000048, BRAWH2000071, BRAWH2000082, BRAWH2000093, BRAWH2000109, BRAWH2000131, BRAWH2000142, BRAWH2000169, BRAWH2000177, BRAWH2000218, BRAWH2000232, BRAWH2000248, BRAWH2000256, BRAWH2000274, BRAWH2000323, BRAWH2000353, BRAWH2000370, BRAWH2000409, BRAWH2000417, BRAWH2000443, BRAWH2000471, BRAWH2000476, BRAWH2000482, BRAWH2000488, BRAWH2000494, BRAWH2000500, BRAWH2000503, BRAWH2000522, BRAWH2000554, BRAWH2000595, BRAWH2000633, BRAWH2000636, BRAWH2000643, BRAWH2000651, BRAWH2000682, BRAWH2000686, BRAWH2000752, BRAWH2000859, BRAWH2000866, BRAWH2000892, BRAWH2000901, BRAWH2000926, BRAWH2000944, BRAWH2000984, BRAWH2001019, BRAWH2001037, BRAWH2001052, BRAWH2001103, BRAWH2001129, BRAWH2001137, BRAWH2001141, BRAWH2001159, BRAWH2001166, BRAWH2001171, BRAWH2001186, BRAWH2001203, BRAWH2001238, BRAWH2001239, BRAWH2001255, BRAWH2001321, BRAWH2001355, BRAWH2001378, BRAWH2001395, BRAWH2001406, BRAWH2001412, BRAWH2001418, BRAWH2001424, BRAWH2001436, BRAWH2001438, BRAWH2001439, BRAWH2001459, BRAWH2001461, BRAWH2001484, BRAWH2001492, BRAWH2001503, BRAWH2001519, BRAWH2001530, BRAWH2001535, BRAWH2001589, BRAWH2001662, BRAWH2001666, BRAWH2001671, BRAWH2001679, BRAWH2001686, BRAWH2001701, BRAWH2001842, BRAWH2001862, BRAWH2001873, BRAWH2001940, BRAWH2001973, BRAWH2002047, BRAWH2002060, BRAWH2002062, BRAWH2002125, BRAWH2002191, BRAWH2002318, BRAWH2002333, BRAWH2002352, BRAWH2002383, BRAWH2002549, BRAWH2002560, BRAWH2002601, BRAWH2002623, BRAWH2002630, BRAWH2002635, BRAWH2002662, BRAWH2002679, BRAWH2002725, BRAWH2002761, BRAWH2002811, BRAWH2002861, BRAWH2002911, BRAWH2002963, BRAWH2002967, BRAWH2002976, BRAWH2003000, BRAWH2003025, BRAWH2003135, BRAWH2003240, BRAWH2003307, BRAWH2003355, BRAWH2003366, BRAWH2003662, BRAWH2003689, BRAWH2003693, BRAWH2003818, BRAWH2003832, BRAWH2003948, BRAWH2003964, BRAWH2004044, BRAWH2004068, BRAWH2004095, BRAWH2004136, BRAWH2004217, BRAWH2004580, BRAWH2004731, BRAWH2004779, BRAWH2004842, BRAWH2004884, BRAWH2004923, BRAWH2005008, BRAWH2005068, BRAWH2005074, BRAWH2005225, BRAWH2005315, BRAWH2005517, BRAWH2005524, BRAWH2005533, BRAWH2005578, BRAWH2005812, BRAWH2005974, BRAWH2005998, BRAWH2006044, BRAWH2006083, BRAWH2006207, BRAWH2006301, BRAWH2006395, BRAWH2006405, BRAWH2006450, BRAWH2006493, BRAWH2006526, BRAWH2006543, BRAWH2006622, BRAWH2006760, BRAWH2006960, BRAWH2006989, BRAWH2006996, BRAWH2007069, BRAWH2007308, BRAWH2007406, BRAWH2007550, BRAWH2007570, BRAWH2007591, BRAWH2007605, BRAWH2007658, BRAWH2007664, BRAWH2007800, BRAWH2007808, BRAWH2007825, BRAWH2007862, BRAWH2007890, BRAWH2008058, BRAWH2008128, BRAWH2008219, BRAWH2008255, BRAWH2008292, BRAWH2008297, BRAWH2008366, BRAWH2008380, BRAWH2008540, BRAWH2008577, BRAWH2008706, BRAWH2008790, BRAWH2008903, BRAWH2008956, BRAWH2008993, BRAWH2009112, BRAWH2009238, BRAWH2009261, BRAWH2009263, BRAWH2009298, BRAWH2009304, BRAWH2009307, BRAWH2009360, BRAWH2009393, BRAWH2009485, BRAWH2009490, BRAWH2009558, BRAWH2009590, BRAWH2009626, BRAWH2009678, BRAWH2009695, BRAWH2009907, BRAWH2010000, BRAWH2010069, BRAWH2010084, BRAWH2010136, BRAWH2010318, BRAWH2010329, BRAWH2010354, BRAWH2010364, BRAWH2010552, BRAWH2010584, BRAWH2010618, BRAWH2010619, BRAWH2010754, BRAWH2010980, BRAWH2011066, BRAWH2011079, BRAWH2011096, BRAWH2011155, BRAWH2011166, BRAWH2011204, BRAWH2011286, BRAWH2011294, BRAWH2011343, BRAWH2011400, BRAWH2011762, BRAWH2011795, BRAWH2011796, BRAWH2011812, BRAWH2011823, BRAWH2011860, BRAWH2011920, BRAWH2011958, BRAWH2012054, BRAWH2012077, BRAWH2012161, BRAWH2012162, BRAWH2012164, BRAWH2012258, BRAWH2012277, BRAWH2012326, BRAWH2012538, BRAWH2012540, BRAWH2012619, BRAWH2012698, BRAWH2012749, BRAWH2012827, BRAWH2012866, BRAWH2012963, BRAWH2013047, BRAWH2013219, BRAWH2013294, BRAWH2013748, BRAWH2013866, BRAWH2013871, BRAWH2013914, BRAWH2013941, BRAWH2013955, BRAWH2014053, BRAWH2014188, BRAWH2014234, BRAWH2014379, BRAWH2014414, BRAWH2014473, BRAWH2014511, BRAWH2014645, BRAWH2014662, BRAWH2014717, BRAWH2014729, BRAWH2014876, BRAWH2014934, BRAWH2014954, BRAWH2015247, BRAWH2015349, BRAWH2015375, BRAWH2015385, BRAWH2015595, BRAWH2015728, BRAWH2015853, BRAWH2015866, BRAWH2016028, BRAWH2016106, BRAWH2016160, BRAWH2016166, BRAWH2016209, BRAWH2016221, BRAWH2016223, BRAWH2016269, BRAWH2016305, BRAWH2016439, BRAWH2016446, BRAWH2016514, BRAWH2016562, BRAWH2016655, BRAWH2016679, BRAWH2016702, BRAWH2016724, BRAWH2016785, BRAWH2016792, BRAWH2016800, BRAWH2017002, BRAWH2017103, BRAWH2017250, BRAWH2017294, BRAWH2017304, BRAWH2017305, BRAWH2017407, BRAWH2017433, BRAWH2017523, BRAWH2017534, BRAWH2017542, BRAWH2017635, BRAWH2017913, BRAWH2018206, BRAWH2018267, BRAWH2018282, BRAWH2018317, BRAWH2018506, BRAWH2018514, BRAWH2018527, BRAWH2018601, BRAWH2018729, BRAWH2018745, BRAWH2018875, BRAWH2019053, BRAWH2019055, BRAWH2019198, BRAWH3000078, BRAWH3000100, BRAWH3000166, BRAWH3000314, BRAWH3000329, BRAWH3000410, BRAWH3000446, BRAWH3000491, BRAWH3000604, BRAWH3000884, BRAWH3001053, BRAWH3001319, BRAWH3001326, BRAWH3001475, BRAWH3001636, BRAWH3001638, BRAWH3001712, BRAWH3001760, BRAWH3001783, BRAWH3001833, BRAWH3001879, BRAWH3001891, BRAWH3001918, BRAWH3002433, BRAWH3002467, BRAWH3002513, BRAWH3002600, BRAWH3002819, BRAWH3003019, BRAWH3003136, BRAWH3003244, BRAWH3003343, BRAWH3003411, BRAWH3003522, BRAWH3003573, BRAWH3003598, BRAWH3003727, BRAWH3003801, BRAWH3003975, BRAWH3004222, BRAWH3004335, BRAWH3004350, BRAWH3004453, BRAWH3004530, BRAWH3004666, BRAWH3005037, BRAWH3005047, BRAWH3005132, BRAWH3005146, BRAWH3005292, BRAWH3005300, BRAWH3005422, BRAWH3005534, BRAWH3005886, BRAWH3005892, BRAWH3005896, BRAWH3005912, BRAWH3005981, BRAWH3006547, BRAWH3006548, BRAWH3006761, BRAWH3006792, BRAWH3007129, BRAWH3007221, BRAWH3007441, BRAWH3007455, BRAWH3007506, BRAWH3007726, BRAWH3007783, BRAWH3008167, BRAWH3008341, BRAWH3008559, BRAWH3008697, BRAWH3008867, BRAWH3009017, BRAWH3009285, BRAWH3009297, BRAWH3009546, BRAWH3009961, BRAWH3010461, BRAWH3010560, BRAWH3010602, BRAWH3010657, BRAWH3010726, BRAWH3010833, BRAWH3011101, BRAWH3011331, BRAWH3011402, BRAWH3011577, BRAWH3011623, BRAWH3011637, BRAWH3011685, BRAWH3011907, BRAWH3011929, BRAWH3012005, BRAWH3012662, BRAWH3012779, BRAWH3013009, BRAWH3013049, BRAWH3013197, BRAWH3013264, BRAWH3013508, BRAWH3014609, BRAWH3014639, BRAWH3015017, BRAWH3015175, BRAWH3015260, BRAWH3015610, BRAWH3015825, BRAWH3016123, BRAWH3016271, BRAWH3016715, BRAWH3017259, BRAWH3017260, BRAWH3017477, BRAWH3017537, BRAWH3017980, BRAWH3018063, BRAWH3018369, BRAWH3018548, BRAWH3018969, BRAWH3019026, BRAWH3019529, BRAWH3019594, BRAWH3019629, BRAWH3019820, BRAWH3020200, BRAWH3020318, BRAWH3020486, BRAWH3020884, BRAWH3020928, BRAWH3021012, BRAWH3021545, BRAWH3021574, BRAWH3021580, BRAWH3021641, BRAWH3021643, BRAWH3021724, BRAWH3022347, BRAWH3022431, BRAWH3022459, BRAWH3022542, BRAWH3022719, BRAWH3022866, BRAWH3022900, BRAWH3023156, BRAWH3023168, BRAWH3023172, BRAWH3023274, BRAWH3023421, BRAWH3024231, BRAWH3024242, BRAWH3024469, BRAWH3024506, BRAWH3024613, BRAWH3024989, BRAWH3026349, BRAWH3026394, BRAWH3026529, BRAWH3027420, BRAWH3027440, BRAWH3027533, BRAWH3027574, BRAWH3027607, BRAWH3027616, BRAWH3027675, BRAWH3027806, BRAWH3027880, BRAWH3027927, BRAWH3028202, BRAWH3028223, BRAWH3028306, BRAWH3028461, BRAWH3028645, BRAWH3028754, BRAWH3028796, BRAWH3029254, BRAWH3029313, BRAWH3029538, BRAWH3029556, BRAWH3029806, BRAWH3030613, BRAWH3030772, BRAWH3030810, BRAWH3030892, BRAWH3030910, BRAWH3030950, BRAWH3031054, BRAWH3031710, BRAWH3031902, BRAWH3032298, BRAWH3032340, BRAWH3032571, BRAWH3032620, BRAWH3032930, BRAWH3033117, BRAWH3033293, BRAWH3033448, BRAWH3033513, BRAWH3034097, BRAWH3034114, BRAWH3034134, BRAWH3034668, BRAWH3034743, BRAWH3034775, BRAWH3034890, BRAWH3035154, BRAWH3035403, BRAWH3035904, BRAWH3035914, BRAWH3035936, BRAWH3036077, BRAWH3036247, BRAWH3036270, BRAWH3036561, BRAWH3036738, BRAWH3036951, BRAWH3037265, BRAWH3037394, BRAWH3037533, BRAWH3037979, BRAWH3038055, BRAWH3038230, BRAWH3038252, BRAWH3038324, BRCAN1000065, BRCAN1000076, BRCAN1000105, BRCAN1000149, BRCAN1000168, BRCAN2000148, BRCAN2000149, BRCAN2000209, BRCAN2000239, BRCAN2000346, BRCAN2000364, BRCAN2000383, BRCAN2000418, BRCAN2000523, BRCAN2000541, BRCAN2000563, BRCAN2000577, BRCAN2000620, BRCAN2000639, BRCAN2000763, BRCAN2000832, BRCAN2000923, BRCAN2001223, BRCAN2001866, BRCAN2002173, BRCAN2002416, BRCAN2002473, BRCAN2002562, BRCAN2002662, BRCAN2002826, BRCAN2002854, BRCAN2002856, BRCAN2002892, BRCAN2002944, BRCAN2002948, BRCAN2003070, BRCAN2003269, BRCAN2003389, BRCAN2003628, BRCAN2003703, BRCAN2003746, BRCAN2003814, BRCAN2003987, BRCAN2004173, BRCAN2004355, BRCAN2004371, BRCAN2004653, BRCAN2004699, BRCAN2005436, BRCAN2005449, BRCAN2006019, BRCAN2006051, BRCAN2006063, BRCAN2006117, BRCAN2006174, BRCAN2006290, BRCAN2006297, BRCAN2006323, BRCAN2006401, BRCAN2006411, BRCAN2006450, BRCAN2006955, BRCAN2007119, BRCAN2007144, BRCAN2007409, BRCAN2007426, BRCAN2007525, BRCAN2007700, BRCAN2008494, BRCAN2008528, BRCAN2008701, BRCAN2008894, BRCAN2009156, BRCAN2009168, BRCAN2009203, BRCAN2009432, BRCAN2010374, BRCAN2010376, BRCAN2010547, BRCAN2010581, BRCAN2010665, BRCAN2011254, BRCAN2011316, BRCAN2011602, BRCAN2012110, BRCAN2012355, BRCAN2012402, BRCAN2012408, BRCAN2012481, BRCAN2012613, BRCAN2012713, BRCAN2012929, BRCAN2013655, BRCAN2013660, BRCAN2014143, BRCAN2014229, BRCAN2014370, BRCAN2014602, BRCAN2014652, BRCAN2014788, BRCAN2014881, BRCAN2014952, BRCAN2015371, BRCAN2015402, BRCAN2015464, BRCAN2015719, BRCAN2015757, BRCAN2015886, BRCAN2016025, BRCAN2016046, BRCAN2016433, BRCAN2016619, BRCAN2016762, BRCAN2016814, BRCAN2017442, BRCAN2017905, BRCAN2018240, BRCAN2018269, BRCAN2018490, BRCAN2018566, BRCAN2018667, BRCAN2018748, BRCAN2018935, BRCAN2019002, BRCAN2019387, BRCAN2019653, BRCAN2019773, BRCAN2019907, BRCAN2020234, BRCAN2020331, BRCAN2020412, BRCAN2020467, BRCAN2020710, BRCAN2020880, BRCAN2021024, BRCAN2021028, BRCAN2021325, BRCAN2021452, BRCAN2021669, BRCAN2021718, BRCAN2022126, BRCAN2022191, BRCAN2022472, BRCAN2022474, BRCAN2023347, BRCAN2023724, BRCAN2024451, BRCAN2024563, BRCAN2024572, BRCAN2025009, BRCAN2025093, BRCAN2025349, BRCAN2025368, BRCAN2025712, BRCAN2025982, BRCAN2026117, BRCAN2026340, BRCAN2026711, BRCAN2027150, BRCAN2027310, BRCAN2027334, BRCAN2027355, BRCAN2027364, BRCAN2027513, BRCAN2027593, BRCAN2027970, BRCAN2028021, BRCAN2028040, BRCAN2028319, BRCAN2028338, BRCAN2028355, BRCAN2028378, BRCAN2028460, BRCAN2028545, BRCAN2028634, BRCAN2028702, BRCOC1000040, BRCOC1000087, BRCOC1000094, BRCOC2000004, BRCOC2000047, BRCOC2000152, BRCOC2000184, BRCOC2000186, BRCOC2000333, BRCOC2000360, BRCOC2000404, BRCOC2000487, BRCOC2000637, BRCOC2000670, BRCOC2000816, BRCOC2000850, BRCOC2001355, BRCOC2002085, BRCOC2002155, BRCOC2002323, BRCOC2002659, BRCOC2002664, BRCOC2002686, BRCOC2002751, BRCOC2002756, BRCOC2002777, BRCOC2002835, BRCOC2003100, BRCOC2003125, BRCOC2003187, BRCOC2003213, BRCOC2003513, BRCOC2003732, BRCOC2003740, BRCOC2004036, BRCOC2004175, BRCOC2004354, BRCOC2004455, BRCOC2004950, BRCOC2005542, BRCOC2005903, BRCOC2005951, BRCOC2006164, BRCOC2006189, BRCOC2006243, BRCOC2006270, BRCOC2006639, BRCOC2006942, BRCOC2007034, BRCOC2007593, BRCOC2007733, BRCOC2007769, BRCOC2008064, BRCOC2008225, BRCOC2008642, BRCOC2008993, BRCOC2009052, BRCOC2009196, BRCOC2009380, BRCOC2009638, BRCOC2009937, BRCOC2010115, BRCOC2010123, BRCOC2010510, BRCOC2010730, BRCOC2010980, BRCOC2010994, BRCOC2011010, BRCOC2011398, BRCOC2011418, BRCOC2011506, BRCOC2011769, BRCOC2011996, BRCOC2012172, BRCOC2012229, BRCOC2012386, BRCOC2012551, BRCOC2012813, BRCOC2013448, BRCOC2013573, BRCOC2013675, BRCOC2013780, BRCOC2014013, BRCOC2014033, BRCOC2014400, BRCOC2014748, BRCOC2014833, BRCOC2015597, BRCOC2015824, BRCOC2015908, BRCOC2015944, BRCOC2016525, BRCOC2016661, BRCOC2017061, BRCOC2017652, BRCOC2017856, BRCOC2018775, BRCOC2018877, BRCOC2019255, BRCOC2019549, BRCOC2019841, BRCOC2019896, BRCOC2019903, BRCOC2019910, BRCOC2019934, BRCOC2020122, BRCOC2020142, BRHIP1000058, BRHIP1000072, BRHIP1000108, BRHIP1000129, BRHIP1000174, BRHIP1000258, BRHIP2000021, BRHIP2000079, BRHIP2000087, BRHIP2000163, BRHIP2000210, BRHIP2000239, BRHIP2000245, BRHIP2000312, BRHIP2000359, BRHIP2000445, BRHIP2000506, BRHIP2000532, BRHIP2000621, BRHIP2000691, BRHIP2000819, BRHIP2000826, BRHIP2000920, BRHIP2001074, BRHIP2001099, BRHIP2001686, BRHIP2001782, BRHIP2001802, BRHIP2001805, BRHIP2001886, BRHIP2001927, BRHIP2002122, BRHIP2002143, BRHIP2002172, BRHIP2002339, BRHIP2002346, BRHIP2002510, BRHIP2002664, BRHIP2002722, BRHIP2002929, BRHIP2003048, BRHIP2003062, BRHIP2003242, BRHIP2003272, BRHIP2003748, BRHIP2003786, BRHIP2003828, BRHIP2003917, BRHIP2004312, BRHIP2004355, BRHIP2004359, BRHIP2004814, BRHIP2004883, BRHIP2004902, BRHIP2005010, BRHIP2005236, BRHIP2005271, BRHIP2005354, BRHIP2005600, BRHIP2005719, BRHIP2005724, BRHIP2005752, BRHIP2005932, BRHIP2006617, BRHIP2006782, BRHIP2006800, BRHIP2006819, BRHIP2006921, BRHIP2007305, BRHIP2007307, BRHIP2007616, BRHIP2007690, BRHIP2007928, BRHIP2007969, BRHIP2008269, BRHIP2008389, BRHIP2008607, BRHIP2008756, BRHIP2008909, BRHIP2009019, BRHIP2009177, BRHIP2009340, BRHIP2009351, BRHIP2009414, BRHIP2009474, BRHIP2009617, BRHIP2009685, BRHIP2010217, BRHIP2010309, BRHIP2010444, BRHIP2010487, BRHIP2010571, BRHIP2010593, BRHIP2010610, BRHIP2010723, BRHIP2010744, BRHIP2011080, BRHIP2011120, BRHIP2011199, BRHIP2011491, BRHIP2011508, BRHIP2011576, BRHIP2011616, BRHIP2011783, BRHIP2011838, BRHIP2011891, BRHIP2011933, BRHIP2012054, BRHIP2012059, BRHIP2012141, BRHIP2012314, BRHIP2012360, BRHIP2012545, BRHIP2012580, BRHIP2012627, BRHIP2012642, BRHIP2012750, BRHIP2012922, BRHIP2012923, BRHIP2012972, BRHIP2013286, BRHIP2013447, BRHIP2013510, BRHIP2013699, BRHIP2013723, BRHIP2013958, BRHIP2013972, BRHIP2014063, BRHIP2014228, BRHIP2014285, BRHIP2014291, BRHIP2014373, BRHIP201438.6, BRHIP2014387, BRHIP2014954, BRHIP2015153, BRHIP2015224, BRHIP2015245, BRHIP2015356, BRHIP2015360, BRHIP2015679, BRHIP2016005, BRHIP2016125, BRHIP2016788, BRHIP2016968, BRHIP2016990, BRHIP2017010, BRHIP2017315, BRHIP2017385, BRHIP2017404, BRHIP2017542, BRHIP2017553, BRHIP2017642, BRHIP2017714, BRHIP2017780, BRHIP2017945, BRHIP2018014, BRHIP2018369, BRHIP2018612, BRHIP2018635, BRHIP2018650, BRHIP2018712, BRHIP2018719, BRHIP2018805, BRHIP2018998, BRHIP2019007, BRHIP2019047, BRHIP2019149, BRHIP2019177, BRHIP2019186, BRHIP2019291, BRHIP2019494, BRHIP2019589, BRHIP2019641, BRHIP2019819, BRHIP2019884, BRHIP2019972, BRHIP2020182, BRHIP2020509, BRHIP2020573, BRHIP2020622, BRHIP2020695, BRHIP2020743, BRHIP2020799, BRHIP2020842, BRHIP2020859, BRHIP2020930, BRHIP2021102, BRHIP2021289, BRHIP2021495, BRHIP2021615, BRHIP2021744, BRHIP2021762, BRHIP2021858, BRHIP2021870, BRHIP2021929, BRHIP2022006, BRHIP2022054, BRHIP2022221, BRHIP2022228, BRHIP2022298, BRHIP2022326, BRHIP2022467, BRHIP2022708, BRHIP2022986, BRHIP2023071, BRHIP2023229, BRHIP2023292, BRHIP2023309, BRHIP2023369, BRHIP2023438, BRHIP2023695, BRHIP2023735, BRHIP2023762, BRHIP2023773, BRHIP2023860, BRHIP2023869, BRHIP2024046, BRHIP2024165, BRHIP2024201, BRHIP2024347, BRHIP2024398, BRHIP2024549, BRHIP2024742, BRHIP2024789, BRHIP2024911, BRHIP2024941, BRHIP2025245, BRHIP2025366, BRHIP2025448, BRHIP2025679, BRHIP2025739, BRHIP2025797, BRHIP2026021, BRHIP2026061, BRHIP2026155, BRHIP2026214, BRHIP2026288, BRHIP2026346, BRHIP2026557, BRHIP2026723, BRHIP2026877, BRHIP2027017, BRHIP2027054, BRHIP2027563, BRHIP2027685, BRHIP2027762, BRHIP2028187, BRHIP2028303, BRHIP2028330, BRHIP2028480, BRHIP2028583, BRHIP2028593, BRHIP2029176, BRHIP2029283, BRHIP2029393, BRHIP2029529, BRHIP2029643, BRHIP2029663, BRHIP3000017, BRHIP3000060, BRHIP3000070, BRHIP3000081, BRHIP3000131, BRHIP3000240, BRHIP3000377, BRHIP3000457, BRHIP3000475, BRHIP3000488, BRHIP3000526, BRHIP3000626, BRHIP3000859, BRHIP3000907, BRHIP3001076, BRHIP3001079, BRHIP3001141, BRHIP3001283, BRHIP3001338, BRHIP3001360, BRHIP3001481, BRHIP3001878, BRHIP3001964, BRHIP3002114, BRHIP3002124, BRHIP3002141, BRHIP3002363, BRHIP3002691, BRHIP3002920, BRHIP3002931, BRHIP3003063, BRHIP3003126, BRHIP3003306, BRHIP3003340, BRHIP3003395, BRHIP3003484, BRHIP3003644, BRHIP3003688, BRHIP3003795, BRHIP3003961, BRHIP3003984, BRHIP3004193, BRHIP3004215, BRHIP3004416, BRHIP3004710, BRHIP3004725, BRHIP3004774, BRHIP3004786, BRHIP3004863, BRHIP3004968, BRHIP3005037, BRHIP3005137, BRHIP3005142, BRHIP3005231, BRHIP3005307, BRHIP3005574, BRHIP3005673, BRHIP3005768, BRHIP3005801, BRHIP3005944, BRHIP3006279, BRHIP3006294, BRHIP3006390, BRHIP3006449, BRHIP3006683, BRHIP3006717, BRHIP3006786, BRHIP3006950, BRHIP3007172, BRHIP3007183, BRHIP3007195, BRHIP3007223, BRHIP3007239, BRHIP3007291, BRHIP3007409, BRHIP3007424, BRHIP3007483, BRHIP3007586, BRHIP3007609, BRHIP3007640, BRHIP3007960, BRHIP3008082, BRHIP3008183, BRHIP3008314, BRHIP3008320, BRHIP3008344, BRHIP3008405, BRHIP3008565, BRHIP3008598, BRHIP3008606, BRHIP3008691, BRHIP3008714, BRHIP3008997, BRHIP3009099, BRHIP3009140, BRHIP3009181, BRHIP3009318, BRHIP3009427, BRHIP3009448, BRHIP3009672, BRHIP3009753, BRHIP3010135, BRHIP3010289, BRHIP3010529, BRHIP3011082, BRHIP3011241, BRHIP3011269, BRHIP3011460, BRHIP3011567, BRHIP3011831, BRHIP3012185, BRHIP3012289, BRHIP3012357, BRHIP3012736, BRHIP3012745, BRHIP3012868, BRHIP3012997, BRHIP3013078, BRHIP3013271, BRHIP3013588, BRHIP3013698, BRHIP3013765, BRHIP3013897, BRHIP3014237, BRHIP3014675, BRHIP3015620, BRHIP3015751, BRHIP3015854, BRHIP3016032, BRHIP3016213, BRHIP3016302, BRHIP3016421, BRHIP3017109, BRHIP3017146, BRHIP3017256, BRHIP3017325, BRHIP3017558, BRHIP3017637, BRHIP3017855, BRHIP3018278, BRHIP3018784, BRHIP3019643, BRHIP3019824, BRHIP3019880, BRHIP3019956, BRHIP3020155, BRHIP3020182, BRHIP3020733, BRHIP3021019, BRHIP3021499, BRHIP3021534, BRHIP3021778, BRHIP3021987, BRHIP3022656, BRHIP3023922, BRHIP3024118, BRHIP3024533, BRHIP3024703, BRHIP3024725, BRHIP3024820, BRHIP3025161, BRHIP3025702, BRHIP3025795, BRHIP3025844, BRHIP3026052, BRHIP3026097, BRHIP3026231, BRHIP3026335, BRHIP3026651, BRHIP3027105, BRHIP3027137, BRHIP3027160, BRHIP3027191, BRHIP3027501, BRHIP3027594, BRHIP3027651, BRHIP3027854, BRHIP3027947, BRHIP3028570, BRHIP3028742, BRSSN1000056, BRSSN1000059, BRSSN1000092, BRSSN1000153, BRSSN2000097, BRSSN2000175, BRSSN2000197, BRSSN2000244, BRSSN2000293, BRSSN2000295, BRSSN2000312, BRSSN2000498, BRSSN2000518, BRSSN2000561, BRSSN2000566, BRSSN2000684, BRSSN2000715, BRSSN2000832, BRSSN2001213, BRSSN2001275, BRSSN2001342, BRSSN2001426, BRSSN2001503, BRSSN2001579, BRSSN2001758, BRSSN2001810, BRSSN2002857, BRSSN2002859, BRSSN2003012, BRSSN2003086, BRSSN2003093, BRSSN2003820, BRSSN2003841, BRSSN2003937, BRSSN2004142, BRSSN2004303, BRSSN2004304, BRSSN2004496, BRSSN2004657, BRSSN2004679, BRSSN2004686, BRSSN2004710, BRSSN2004719, BRSSN2005847, BRSSN2006133, BRSSN2006390, BRSSN2006575, BRSSN2006611, BRSSN2006644, BRSSN2006892, BRSSN2007076, BRSSN2007168, BRSSN2007202, BRSSN2007338, BRSSN2007464, BRSSN2007504, BRSSN2007819, BRSSN2008125, BRSSN2008419, BRSSN2008464, BRSSN2008549, BRSSN2008797, BRSSN2009119, BRSSN2009378, BRSSN2009389, BRSSN2009395, BRSSN2009518, BRSSN2009627, BRSSN2009630, BRSSN2009702, BRSSN2010019, BRSSN2010110, BRSSN2010587, BRSSN2010596, BRSSN2010830, BRSSN2011653, BRSSN2011738, BRSSN2011843, BRSSN2012081, BRSSN2012103, BRSSN2012157, BRSSN2012198, BRSSN2012254, BRSSN2012439, BRSSN2012622, BRSSN2012691, BRSSN2012838, BRSSN2013095, BRSSN2013544, BRSSN2013696, BRSSN2013702, BRSSN2013733, BRSSN2013753, BRSSN2013874, BRSSN2014112, BRSSN2014294, BRSSN2014424, BRSSN2014513, BRSSN2014556, BRSSN2014573, BRSSN2014610, BRSSN2014636, BRSSN2014685, BRSSN2015199, BRSSN2015238, BRSSN2015369, BRSSN2015493, BRSSN2015497, BRSSN2015554, BRSSN2015707, BRSSN2015773, BRSSN2015907, BRSSN2015982, BRSSN2016589, BRSSN2016768, BRSSN2016905, BRSSN2017297, BRSSN2017422, BRSSN2017530, BRSSN2017682, BRSSN2017757, BRSSN2018218, BRSSN2018440, BRSSN2018447, BRSSN2018581, BRSSN2018731, BRSSN2018771, BRSSN2018925, BRSTN1000083, BRSTN1000097, BRSTN2000058, BRSTN2000070, BRSTN2000220, BRSTN2000312, BRSTN2000367, BRSTN2000536, BRSTN2000872, BRSTN2001613, BRSTN2001801, BRSTN2002105, BRSTN2002400, BRSTN2002532, BRSTN2002691, BRSTN2003590, BRSTN2003835, BRSTN2004863, BRSTN2004869, BRSTN2004987, BRSTN2005721, BRSTN2006306, BRSTN2006466, BRSTN2006580, BRSTN2006583, BRSTN2006638, BRSTN2006865, BRSTN2007000, BRSTN2007118, BRSTN2007284, BRSTN2007765, BRSTN2008052, BRSTN2008283, BRSTN2008367, BRSTN2008418, BRSTN2008457, BRSTN2008475, BRSTN2008930, BRSTN2009247, BRSTN2010089, BRSTN2010107, BRSTN2010363, BRSTN2010416, BRSTN2010500, BRSTN2010569, BRSTN2010750, BRSTN2010923, BRSTN2011211, BRSTN2011597, BRSTN2011688, BRSTN2011799, BRSTN2012089, BRSTN2012174, BRSTN2012284, BRSTN2012320, BRSTN2012380, BRSTN2013354, BRSTN2013502, BRSTN2014490, BRSTN2014633, BRSTN2014751, BRSTN2014770, BRSTN2015015, BRSTN2015889, BRSTN2015978, BRSTN2016066, BRSTN2016335, BRSTN2016678, BRSTN2016892, BRSTN2016918, BRSTN2016992, BRSTN2017104, BRSTN2017151, BRSTN2017237, BRSTN2017379, BRSTN2017761, BRSTN2017771, BRSTN2017995, BRSTN2018077, BRSTN2018083, BRSTN2018596, BRSTN2018692, BRSTN2018712, BRSTN2019079, BRSTN2019129, BRTHA1000021, BRTHA1000063, BRTHA1000311, BRTHA2000057, BRTHA2000474, BRTHA2000514, BRTHA2000574, BRTHA2000855, BRTHA2000969, BRTHA2000972, BRTHA2001304, BRTHA2001370, BRTHA2001462, BRTHA2001717, BRTHA2001812, BRTHA2002091, BRTHA2002115, BRTHA2002133, BRTHA2002281, BRTHA2002376, BRTHA2002442, BRTHA2002493, BRTHA2002565, BRTHA2002608, BRTHA2002702, BRTHA2002721, BRTHA2002726, BRTHA2002741, BRTHA2002808, BRTHA2002896, BRTHA2002903, BRTHA2003030, BRTHA2003110, BRTHA2003116, BRTHA2003436, BRTHA2003759, BRTHA2003794, BRTHA2004361, BRTHA2004371, BRTHA2004582, BRTHA2004629, BRTHA2004639, BRTHA2004642, BRTHA2004812, BRTHA2004821, BRTHA2004978, BRTHA2004992, BRTHA2005005, BRTHA2005013, BRTHA2005448, BRTHA2005579, BRTHA2005831, BRTHA2005942, BRTHA2005956, BRTHA2006075, BRTHA2006146, BRTHA2006194, BRTHA2006232, BRTHA2006720, BRTHA2006735, BRTHA2006974, BRTHA2006975, BRTHA2007060, BRTHA2007122, BRTHA2007422, BRTHA2007603, BRTHA2007665, BRTHA2007998, BRTHA2008316, BRTHA2008335, BRTHA2008502, BRTHA2008513, BRTHA2008527, BRTHA2008535, BRTHA2008598, BRTHA2008669, BRTHA2008955, BRTHA2009311, BRTHA2009349, BRTHA2009486, BRTHA2009803, BRTHA2009846, BRTHA2009886, BRTHA2009972, BRTHA2010008, BRTHA2010033, BRTHA2010073, BRTHA2010097, BRTHA2010191, BRTHA2010397, BRTHA2010608, BRTHA2010672, BRTHA2010884, BRTHA2010907, BRTHA2011062, BRTHA2011194, BRTHA2011321, BRTHA2011351, BRTHA2011500, BRTHA2011641, BRTHA2011691, BRTHA2012129, BRTHA2012183, BRTHA2012189, BRTHA2012351, BRTHA2012392, BRTHA2012466, BRTHA2012555, BRTHA2012562, BRTHA2012714, BRTHA2012980, BRTHA2013054, BRTHA2013262, BRTHA2013275, BRTHA2013426, BRTHA2013460, BRTHA2013515, BRTHA2013540, BRTHA2013595, BRTHA2013610, BRTHA2013707, BRTHA2013942, BRTHA2014287, BRTHA2014334, BRTHA2014381, BRTHA2014578, BRTHA2014647, BRTHA2014663, BRTHA2014792, BRTHA2014828, BRTHA2014909, BRTHA2014975, BRTHA2014997, BRTHA2015406, BRTHA2015478, BRTHA2015696, BRTHA2015700, BRTHA2015853, BRTHA2015878, BRTHA2016179, BRTHA2016215, BRTHA2016267, BRTHA2016318, BRTHA2016496, BRTHA2016543, BRTHA2016552, BRTHA2016577, BRTHA2016765, BRTHA2016918, BRTHA2017178, BRTHA2017353, BRTHA2017364, BRTHA2017972, BRTHA2017985, BRTHA2018011, BRTHA2018129, BRTHA2018165, BRTHA2018304, BRTHA2018344, BRTHA2018420, BRTHA2018443, BRTHA2018504, BRTHA2018558, BRTHA2018591, BRTHA2018624, BRTHA2018706, BRTHA2018707, BRTHA2019014, BRTHA2019022, BRTHA2019048, BRTHA2019073, BRTHA2019726, BRTHA2019743, BRTHA2020400, BRTHA2020566, BRTHA2020642, BRTHA2020695, BRTHA2020721, BRTHA2020781, BRTHA2020811, BRTHA2020910, BRTHA2021212, BRTHA2021440, BRTHA2021450, BRTHA2022074, BRTHA2022914, BRTHA2022968, BRTHA2023402, BRTHA2023437, BRTHA2024177, BRTHA2024354, BRTHA2024712, BRTHA2025869, BRTHA2026071, BRTHA2026290, BRTHA2026311, BRTHA2027227, BRTHA2027229, BRTHA2027250, BRTHA2027546, BRTHA2028297, BRTHA2029969, BRTHA20.30036, BRTHA2030213, BRTHA2031517, BRTHA2031800, BRTHA2031917, BRTHA2032763, BRTHA2032845, BRTHA2033122, BRTHA2033155, BRTHA2033264, BRTHA2033320, BRTHA2033469, BRTHA2033683, BRTHA2034281, BRTHA2034576, BRTHA2034874, BRTHA2035448, BRTHA2035743, BRTHA2036055, BRTHA2036295, BRTHA2036660, BRTHA2037247, BRTHA2038279, BRTHA2038345, BRTHA2038353, BRTHA2038396, BRTHA3000252, BRTHA3000273, BRTHA3000296, BRTHA3000297, BRTHA3000325, BRTHA3000456, BRTHA3000633, BRTHA3000789, BRTHA3001221, BRTHA3001623, BRTHA3002265, BRTHA3002401, BRTHA3002411, BRTHA3002427, BRTHA3002864, BRTHA3002933, BRTHA3002955, BRTHA3003000, BRTHA3003074, BRTHA3003225, BRTHA3003339, BRTHA3003343, BRTHA3003417, BRTHA3003449, BRTHA3003474, BRTHA3003704, BRTHA3004307, BRTHA3004432, BRTHA3004475, BRTHA3004502, BRTHA3004610, BRTHA3005046, BRTHA3005735, BRTHA3005988, BRTHA3006318, BRTHA3006593, BRTHA3006856, BRTHA3007113, BRTHA3007130, BRTHA3007148, BRTHA3007319, BRTHA3007469, BRTHA3007532, BRTHA3007662, BRTHA3007685, BRTHA3007769, BRTHA3007922, BRTHA3008143, BRTHA3008293, BRTHA3008310, BRTHA3008386, BRTHA3008520, BRTHA3008608, BRTHA3008694, BRTHA3008778, BRTHA3008826, BRTHA3009037, BRTHA3009090, BRTHA3009291, BRTHA3009858, BRTHA3010135, BRTHA3010366, BRTHA3010469, BRTHA3010530, BRTHA3010540, BRTHA3010717, BRTHA3011149, BRTHA3011187, BRTHA3011194, BRTHA3011229, BRTHA3011265, BRTHA3011361, BRTHA3011510, BRTHA3011892, BRTHA3012265, BRTHA3013860, BRTHA3013882, BRTHA3013884, BRTHA3013981, BRTHA3014000, BRTHA3014105, BRTHA3014507, BRTHA3014547, BRTHA3014691, BRTHA3014835, BRTHA3014854, BRTHA3014908, BRTHA3014920, BRTHA3015815, BRTHA3016616, BRTHA3016835, BRTHA3016845, BRTHA3016917, BRTHA3017047, BRTHA3017589, BRTHA3017848, BRTHA3018409, BRTHA3018514, BRTHA3018617, BRTHA3018623, BRTHA3018656, BRTHA3019048, BRTHA3019105, BRTHA3019183, BRTHA3020000, BRTHA3020314, BRTHA3020369, BRTHA3021569, BRTHA3021708, BRTHA3021786, BRTHA3021971, BRTHA3022641, BRTHA3023403, BRTHA3023523, BRTHA3023590, BRTHA3023929, BRTHA3024233, BRTHA3024600, BRTHA3025073, BRTHA3025789, BRTHA3025826, BRTHA3026161, BRTHA3026180, BRTHA3026507, BRTHA3026556, BRTHA3026916, BRTHA3027171, BRTHA3027318, BRTHA3027638, BRTHA3027820, BRTHA3027879, BRTHA3027957, BRTHA3028339, BRTHA3028505, BRTHA3028782, CD34C2000051, CD34C2000152, CD34C2000175, CD34C2000443, CD34C3000125, CD34C3000314, CD34C3000424, CD34C3000494, CERVX1000042, CERVX2000812, CERVX2000968, CERVX2002006, CERVX2002013, CERVX2002430, CERVX2002770, CHONS1000058, CHONS2000172, CHONS2000797, CHONS2001287, CHONS2001382, CHONS2001797, CHONS2001834, CHONS2002419, CHONS2002829, COLON1000030, COLON1000084, COLON1000135, COLON2000470, COLON2000557, COLON2000568, COLON2001721, COLON2001829, COLON2001866, COLON2002443, COLON2002520, COLON2003043, COLON2003529, COLON2004318, COLON2004351, COLON2004478, COLON2004911, COLON2005126, COLON2005623, COLON2005735, COLON2005772, COLON2006263, COLON2006282, COLON2006417, COLON2007274, COLON2007733, COLON2008105, COLON2009337, COLON2009499, CORDB1000140, CORDB2000061, CORDB2000127, CORDB2000541, CTONG1000009, CTONG1000010, CTONG1000020, CTONG1000022, CTONG1000040, CTONG1000052, CTONG1000056, CTONG1000062, CTONG1000086, CTONG1000088, CTONG1000093, CTONG1000097, CTONG1000113, CTONG1000137, CTONG1000165, CTONG1000175, CTONG1000180, CTONG1000181, CTONG1000218, CTONG1000220, CTONG1000241, CTONG1000277, CTONG1000283, CTONG1000288, CTONG1000302, CTONG1000341, CTONG1000467, CTONG1000476, CTONG1000488, CTONG1000508, CTONG1000540, CTONG2000031, CTONG2000034, CTONG2000042, CTONG2000063, CTONG2000201, CTONG2000218, CTONG2000279, CTONG2000303, CTONG2000330, CTONG2000395, CTONG2000411, CTONG2000452, CTONG2000465, CTONG2000480, CTONG2000508, CTONG2000589, CTONG2000766, CTONG2000771, CTONG2000819, CTONG2000827, CTONG2000846, CTONG2000855, CTONG2000977, CTONG2001139, CTONG2001226, CTONG2001320, CTONG2001366, CTONG2001413, CTONG2001428, CTONG2001513, CTONG2001524, CTONG2001533, CTONG2001598, CTONG2001681, CTONG2001724, CTONG2001748, CTONG2001749, CTONG2001800, CTONG2001820, CTONG2001858, CTONG2001877, CTONG2001911, CTONG2001932, CTONG2001955, CTONG2002066, CTONG2002073, CTONG2002095, CTONG2002143, CTONG2002270, CTONG2002395, CTONG2002417, CTONG2002418, CTONG2002453, CTONG2002520, CTONG2002558, CTONG2002590, CTONG2002709, CTONG2002721, CTONG2002744, CTONG2002766, CTONG2002803, CTONG2002816, CTONG2002820, CTONG2002832, CTONG2002841, CTONG2002965, CTONG2002999, CTONG2003028, CTONG2003100, CTONG2003115, CTONG2003189, CTONG2003245, CTONG2003293, CTONG2003348, CTONG2003350, CTONG2003361, CTONG2003372, CTONG2003375, CTONG2003427, CTONG2003517, CTONG2003524, CTONG2003599, CTONG2003680, CTONG2003699, CTONG2003782, CTONG2003889, CTONG2003937, CTONG2003945, CTONG2004000, CTONG2004062, CTONG2004126, CTONG2004264, CTONG2004305, CTONG2004397, CTONG2004423, CTONG2004454, CTONG2004487, CTONG2004550, CTONG2004669, CTONG2004716, CTONG2004912, CTONG2004941, CTONG2004948, CTONG2005028, CTONG2005049, CTONG2005110, CTONG2005145, CTONG2005265, CTONG2005290, CTONG2005374, CTONG2005399, CTONG2005468, CTONG2005567, CTONG2005585, CTONG2005615, CTONG2005635, CTONG2005775, CTONG2005795, CTONG2005890, CTONG2005904, CTONG2005913, CTONG2006004, CTONG2006129, CTONG2006223, CTONG2006235, CTONG2006273, CTONG2006310, CTONG2006377, CTONG2006393, CTONG2006412, CTONG2006449, CTONG2006515, CTONG2006524, CTONG2006562, CTONG2006568, CTONG2006611, CTONG2006620, CTONG2006666, CTONG2006691, CTONG2006709, CTONG2006798, CTONG2006836, CTONG2006942, CTONG2006964, CTONG2007007, CTONG2007009, CTONG2007072, CTONG2007078, CTONG2007091, CTONG2007104, CTONG2007168, CTONG2007175, CTONG2007259, CTONG2007272, CTONG2007293, CTONG2007297, CTONG2007399, CTONG2007400, CTONG2007417, CTONG2007441, CTONG2007474, CTONG2007500, CTONG2007586, CTONG2007613, CTONG2007623, CTONG2007681, CTONG2007776, CTONG2007779, CTONG2007898, CTONG2007959, CTONG2007970, CTONG2008014, CTONG2008184, CTONG2008262, CTONG2008321, CTONG2008343, CTONG2008398, CTONG2008402, CTONG2008405, CTONG2008466, CTONG2008518, CTONG2008521, CTONG2008562, CTONG2008577, CTONG2008595, CTONG2008621, CTONG2008689, CTONG2008720, CTONG2008721, CTONG2008773, CTONG2008792, CTONG2008989, CTONG2009033, CTONG2009108, CTONG2009132, CTONG2009156, CTONG2009181, CTONG2009257, CTONG2009258, CTONG2009268, CTONG2009270, CTONG2009395, CTONG2009423, CTONG2009440, CTONG2009527, CTONG2009529, CTONG2009531, CTONG2009534, CTONG2009570, CTONG2009572, CTONG2009604, CTONG2009643, CTONG2009675, CTONG2009689, CTONG2009725, CTONG2009766, CTONG2009768, CTONG2009844, CTONG2009871, CTONG2009887, CTONG2009891, CTONG2009923, CTONG2009938, CTONG2009955, CTONG2009958, CTONG2009963, CTONG2010018, CTONG2010024, CTONG2010116, CTONG2010133, CTONG2010148, CTONG2010276, CTONG2010330, CTONG2010408, CTONG2010508, CTONG2010566, CTONG2010623, CTONG2010652, CTONG2010803, CTONG2010821, CTONG2011188, CTONG2011429, CTONG2011474, CTONG2011676, CTONG2011716, CTONG2011765, CTONG2011779, CTONG2011815, CTONG2011822, CTONG2011825, CTONG2011920, CTONG2011985, CTONG2012001, CTONG2012029, CTONG2012050, CTONG2012077, CTONG2012101, CTONG2012123, CTONG2012158, CTONG2012230, CTONG2012401, CTONG2012422, CTONG2012425, CTONG2012447, CTONG2012473, CTONG2012476, CTONG2012533, CTONG2012554, CTONG2012564, CTONG2012607, CTONG2012661, CTONG2012724, CTONG2012738, CTONG2012745, CTONG2012758, CTONG2012843, CTONG2012847, CTONG2012879, CTONG2012901, CTONG2012996, CTONG2013128, CTONG2013149, CTONG2013156, CTONG2013178, CTONG2013222, CTONG2013284, CTONG2013339, CTONG2013348, CTONG2013352, CTONG2013381, CTONG2013393, CTONG2013511, CTONG2013630, CTONG2013803, CTONG2013907, CTONG2013934, CTONG2013985, CTONG2013986, CTONG2014032, CTONG2014058, CTONG2014119, CTONG2014165, CTONG2014191, CTONG2014206, CTONG2014234, CTONG2014264, CTONG2014280, CTONG2014369, CTONG2014389, CTONG2014491, CTONG2014630, CTONG2014635, CTONG2014646, CTONG2014898, CTONG2014946, CTONG2014954, CTONG2014959, CTONG2014966, CTONG2014995, CTONG2015204, CTONG2015316, CTONG2015330, CTONG2015345, CTONG2015358, CTONG2015434, CTONG2015518, CTONG2015540, CTONG2015596, CTONG2015633, CTONG2015678, CTONG2015717, CTONG2015804, CTONG2015815, CTONG2015866, CTONG2015914, CTONG2015953, CTONG2016056, CTONG2016217, CTONG2016355, CTONG2016408, CTONG2016499, CTONG2016505, CTONG2016559, CTONG2016658, CTONG2016775, CTONG2016797, CTONG2016824, CTONG2016846, CTONG2016869, CTONG2016904, CTONG2016931, CTONG2016942, CTONG2016953, CTONG2017021, CTONG2017094, CTONG2017292, CTONG2017409, CTONG2017429, CTONG2017444, CTONG2017458, CTONG2017500, CTONG2017604, CTONG2017650, CTONG2017798, CTONG2017804, CTONG2017814, CTONG2017910, CTONG2017939, CTONG2017989, CTONG2017998, CTONG2018062, CTONG2018069, CTONG2018147, CTONG2018211, CTONG2018217, CTONG2018279, CTONG2018334, CTONG2018343, CTONG2018379, CTONG2018413, CTONG2018483, CTONG2018629, CTONG2018632, CTONG2018637, CTONG2018652, CTONG2018653, CTONG2018655, CTONG2018735, CTONG2018808, CTONG2018843, CTONG2018900, CTONG2018976, CTONG2019029, CTONG2019063, CTONG2019144, CTONG2019232, CTONG2019248, CTONG2019400, CTONG2019590, CTONG2019652, CTONG2019704, CTONG2019788, CTONG2019822, CTONG2019833, CTONG2020031, CTONG2020108, CTONG2020127, CTONG2020171, CTONG2020374, CTONG2020378, CTONG2020411, CTONG2020445, CTONG2020522, CTONG2020582, CTONG2020638, CTONG2020806, CTONG2020831, CTONG2020974, CTONG2021024, CTONG2021132, CTONG2021168, CTONG2021289, CTONG2022153, CTONG2022601, CTONG2022835, CTONG2023021, CTONG2023449, CTONG2023512, CTONG2024031, CTONG2024206, CTONG2024614, CTONG2024749, CTONG2025496, CTONG2025513, CTONG2025516, CTONG2025610, CTONG2025900, CTONG2026513, CTONG2026770, CTONG2026920, CTONG2026987, CTONG2027150, CTONG2027263, CTONG2027327, CTONG2027361, CTONG2027591, CTONG2027736, CTONG2027783, CTONG2027828, CTONG2027959, CTONG2028097, CTONG2028124, CTONG2028208, CTONG2028309, CTONG2028486, CTONG2028518, CTONG2028687, CTONG2028758, CTONG3000657, CTONG3000686, CTONG3000707, CTONG3000896, CTONG3001123, CTONG3001420, CTONG3001501, CTONG3001560, CTONG3001605, CTONG3001746, CTONG3002020, CTONG3002127, CTONG3002370, CTONG3002412, CTONG3002433, CTONG3002518, CTONG3002552, CTONG3002588, CTONG3002674, CTONG3002728, CTONG3002835, CTONG3002909, CTONG3002947, CTONG3002983, CTONG3003165, CTONG3003179, CTONG3003483, CTONG3003553, CTONG3003598, CTONG3003652, CTONG3003654, CTONG3003669, CTONG3003737, CTONG3003905, CTONG3003972, CTONG3004072, CTONG3004317, CTONG3004397, CTONG3004550, CTONG3004576, CTONG3004607, CTONG3004712, CTONG3004726, CTONG3005325, CTONG3005648, CTONG3005713, CTONG3005803, CTONG3005813, CTONG3006067, CTONG3006073, CTONG3006186, CTONG3006629, CTONG3006650, CTONG3006659, CTONG3007244, CTONG3007444, CTONG3007528, CTONG3007586, CTONG3007870, CTONG3008223, CTONG3008252, CTONG3008258, CTONG3008457, CTONG3008496, CTONG3008566, CTONG3008639, CTONG3008831, CTONG3008894, CTONG3008951, CTONG3008959, CTONG3009028, CTONG3009227, CTONG3009287, CTONG3009328, CTONG3009385, D3OST1000066, D3OST1000109, D3OST1000238, D3OST1000267, D3OST1000270, D3OST2000184, D3OST2000618, D3OST2000654, D3OST2000734, D3OST2001328, D3OST2001669, D3OST2001788, D3OST2002068, D3OST2002182, D3OST2002223, D3OST2002262, D3OST2002272, D3OST2002417, D3OST2002436, D3OST2002648, D3OST2003024, D3OST2003331, D3OST2003607, D3OST2003797, D3OST2004637, D3OST3000169, D3OST3000195, D3OST3000258, D3OST3000291, D3OST3000388, D3OST3000493, D6OST2000127, D6OST2000169, D6OST2000245, D6OST2000358, D6OST2000464, D6OST2000507, D9OST2000031, D9OST2000278, D9OST2000440, D9OST2000869, D9OST2001319, D9OST2001433, D9OST2002397, D9OST2002608, D9OST2002673, D9OST2003106, D9OST2003108, D9OST2003137, D9OST2003397, D9OST2003580, D9OST2003594, D9OST2003762, D9OST2003791, D9OST2003989, D9OST2004018, D9OST2004073, D9OST2004417, DFNES1000003, DFNES1000083, DFNES1000107, DFNES1000150, DFNES1000185, DFNES2000011, DFNES2000143, DFNES2000146, DFNES2000212, DFNES2000268, DFNES2000335, DFNES2000426, DFNES2000432, DFNES2000457, DFNES2000471, DFNES2000913, DFNES2001096, DFNES2001108, DFNES2001177, DFNES2001404, DFNES2001564, DFNES2001565, DFNES2001647, DFNES2001800, DFNES2001829, DFNES2002220, DFNES2002509, DFNES2002550, DFNES2002588, DFNES2002817, DFNES2002966, DFNES2003081, DFNES2003192, DFNES2003255, DFNES2003742, DFNES2004346, DFNES2004354, DFNES2004383, DFNES2004608, DFNES2004684, DFNES2005266, DFNES2005527, DFNES2005540, DFNES2005690, DFNES2005766, DFNES2005779, DFNES2005875, DFNES2006346, DFNES2006944, DFNES2007113, DFNES2007299, DFNES2007332, DFNES2007634, DFNES2007757, DFNES2008088, DFNES2008160, DFNES2008280, DFNES2008881, DFNES2009482, DFNES2010502, DFNES2011192, DFNES2011221, DFNES2011239, DFNES2011245, DFNES2011380, DFNES2011499, ERLTF1000021, ERLTF2000324, ERLTF2000465, FCBBF1000024, FCBBF1000027, FCBBF1000038, FCBBF1000053, FCBBF1000061, FCBBF1000069, FCBBF1000077, FCBBF1000115, FCBBF1000117, FCBBF1000118, FCBBF1000121, FCBBF1000125, FCBBF1000131, FCBBF1000139, FCBBF1000155, FCBBF1000157, FCBBF1000171, FCBBF1000174, FCBBF1000182, FCBBF1000197, FCBBF1000198, FCBBF1000206, FCBBF1000220, FCBBF1000232, FCBBF1000233, FCBBF1000243, FCBBF1000270, FCBBF1000272, FCBBF1000280, FCBBF1000294, FCBBF1000297, FCBBF1000305, FCBBF1000314, FCBBF1000322, FCBBF1000349, FCBBF1000374, FCBBF1000376, FCBBF1000377, FCBBF1000395, FCBBF1000397, FCBBF1000403, FCBBF1000412, FCBBF1000425, FCBBF1000437, FCBBF1000449, FCBBF1000476, FCBBF1000506, FCBBF1000509, FCBBF1000546, FCBBF1000550, FCBBF1000556, FCBBF1000563, FCBBF1000574, FCBBF1000581, FCBBF1000582, FCBBF1000598, FCBBF1000604, FCBBF1000618, FCBBF1000627, FCBBF1000671, FCBBF1000675, FCBBF1000684, FCBBF1000686, FCBBF1000687, FCBBF1000691, FCBBF1000732, FCBBF1000748, FCBBF2000038, FCBBF2000094, FCBBF2000105, FCBBF2000123, FCBBF2000195, FCBBF2000199, FCBBF2000214, FCBBF2000232, FCBBF2000259, FCBBF2000276, FCBBF2000291, FCBBF2000362, FCBBF2000379, FCBBF2000473, FCBBF2000566, FCBBF2000576, FCBBF2000677, FCBBF2000678, FCBBF2000685, FCBBF2000733, FCBBF2000782, FCBBF2000808, FCBBF2000815, FCBBF2000825, FCBBF2000940, FCBBF2000951, FCBBF2001001, FCBBF2001088, FCBBF2001116, FCBBF2001183, FCBBF2001188, FCBBF2001211, FCBBF2001238, FCBBF2001243, FCBBF2001291, FCBBF2001299, FCBBF2001309, FCBBF2001400, FCBBF2001427, FCBBF2001480, FCBBF2001529, FCBBF2001538, FCBBF2001594, FCBBF2001672, FCBBF2001675, FCBBF2001718, FCBBF2001720, FCBBF2001817, FCBBF2001868, FCBBF2002044, FCBBF2002111, FCBBF2002281, FCBBF2002349, FCBBF2002370, FCBBF2002541, FCBBF2002626, FCBBF2002801, FCBBF2002897, FCBBF2002898, FCBBF2002904, FCBBF2002928, FCBBF2002953, FCBBF2003083, FCBBF2003102, FCBBF2003269, FCBBF2003293, FCBBF2003297, FCBBF2003395, FCBBF2003528, FCBBF2003543, FCBBF2003549, FCBBF2003567, FCBBF2003636, FCBBF2003823, FCBBF2003895, FCBBF2004066, FCBBF2004090, FCBBF2004138, FCBBF2004217, FCBBF2004256, FCBBF2004373, FCBBF2004448, FCBBF2004671, FCBBF2004707, FCBBF2004788, FCBBF2005069, FCBBF2005122, FCBBF2005428, FCBBF2005439, FCBBF2005538, FCBBF2005637, FCBBF2005645, FCBBF2005658, FCBBF2005733, FCBBF2005909, FCBBF2005966, FCBBF2006131, FCBBF2006380, FCBBF2006418, FCBBF2006452, FCBBF2006634, FCBBF2006781, FCBBF2007012, FCBBF2007186, FCBBF2007265, FCBBF2007302, FCBBF2007556, FCBBF2007610, FCBBF2007633, FCBBF2007840, FCBBF3000102, FCBBF3000110, FCBBF3000115, FCBBF3000120, FCBBF3000168, FCBBF3000175, FCBBF3000227, FCBBF3000228, FCBBF3000229, FCBBF3000233, FCBBF3000269, FCBBF3000361, FCBBF3000367, FCBBF3000388, FCBBF3000434, FCBBF3000462, FCBBF3000473, FCBBF3000501, FCBBF3000518, FCBBF3000536, FCBBF3000550, FCBBF3000847, FCBBF3001018, FCBBF3001020, FCBBF3001081, FCBBF3001235, FCBBF3001281, FCBBF3001302, FCBBF3001377, FCBBF3001470, FCBBF3001594, FCBBF3001657, FCBBF3001818, FCBBF3001855, FCBBF3001890, FCBBF3001912, FCBBF3001914, FCBBF3001918, FCBBF3001924, FCBBF3001977, FCBBF3002163, FCBBF3002188, FCBBF3002190, FCBBF3002268, FCBBF3002475, FCBBF3002556, FCBBF3002592, FCBBF3002658, FCBBF3002782, FCBBF3002818, FCBBF3002925, FCBBF3003216, FCBBF3003305, FCBBF3003373, FCBBF3003435, FCBBF3003475, FCBBF3003481, FCBBF3003557, FCBBF3003787, FCBBF3003902, FCBBF3004021, FCBBF3004041, FCBBF3004261, FCBBF3004323, FCBBF3004390, FCBBF3004409, FCBBF3004502, FCBBF3004715, FCBBF3004842, FCBBF3004847, FCBBF3004955, FCBBF3005160, FCBBF3005218, FCBBF3005330, FCBBF3005444, FCBBF3005698, FCBBF3005729, FCBBF3006171, FCBBF3006249, FCBBF3006288, FCBBF3006399, FCBBF3006628, FCBBF3006821, FCBBF3007077, FCBBF3007150, FCBBF3007152, FCBBF3007242, FCBBF3007244, FCBBF3007248, FCBBF3007453, FCBBF3007462, FCBBF3007540, FCBBF3007597, FCBBF3007604, FCBBF3007631, FCBBF3007829, FCBBF3007855, FCBBF3007859, FCBBF3007860, FCBBF3008073, FCBBF3008100, FCBBF3008153, FCBBF3008159, FCBBF3008251, FCBBF3008311, FCBBF3008362, FCBBF3008382, FCBBF3008475, FCBBF3008556, FCBBF3008644, FCBBF3008689, FCBBF3008748, FCBBF3008870, FCBBF3008938, FCBBF3008944, FCBBF3009069, FCBBF3009101, FCBBF3009152, FCBBF3009256, FCBBF3009317, FCBBF3009428, FCBBF3009464, FCBBF3009479, FCBBF3009526, FCBBF3009541, FCBBF3009703, FCBBF3009717, FCBBF3009888, FCBBF3009949, FCBBF3009978, FCBBF3010008, FCBBF3010012, FCBBF3010124, FCBBF3010130, FCBBF3010142, FCBBF3010149, FCBBF3010211, FCBBF3010361, FCBBF3010508, FCBBF3010544, FCBBF3010586, FCBBF3010601, FCBBF3010665, FCBBF3010695, FCBBF3010729, FCBBF3010733, FCBBF3011003, FCBBF3011418, FCBBF3011485, FCBBF3011523, FCBBF3011570, FCBBF3011592, FCBBF3011867, FCBBF3011889, FCBBF3012170, FCBBF3012182, FCBBF3012288, FCBBF3012332, FCBBF3012347, FCBBF3012443, FCBBF3012588, FCBBF3012667, FCBBF3012842, FCBBF3012901, FCBBF3013041, FCBBF3013058, FCBBF3013205, FCBBF3013266, FCBBF3013307, FCBBF3013341, FCBBF3013506, FCBBF3013589, FCBBF3013623, FCBBF3013800, FCBBF3013846, FCBBF3014229, FCBBF3014260, FCBBF3014355, FCBBF3014567, FCBBF3014770, FCBBF3015100, FCBBF3015119, FCBBF3015131, FCBBF3015317, FCBBF3015727, FCBBF3015758, FCBBF3015809, FCBBF3015870, FCBBF3016018, FCBBF3016134, FCBBF3016178, FCBBF3016451, FCBBF3016618, FCBBF3016622, FCBBF3016644, FCBBF3016667, FCBBF3016987, FCBBF3017024, FCBBF3017059, FCBBF3017071, FCBBF3017123, FCBBF3017233, FCBBF3017255, FCBBF3017288, FCBBF3017396, FCBBF3017531, FCBBF3017535, FCBBF3017681, FCBBF3017729, FCBBF3017873, FCBBF3017918, FCBBF3017974, FCBBF3018067, FCBBF3018173, FCBBF3018453, FCBBF3018591, FCBBF3018753, FCBBF3018796, FCBBF3018826, FCBBF3018949, FCBBF3019085, FCBBF3019320, FCBBF3019437, FCBBF3019455, FCBBF3019564, FCBBF3019569, FCBBF3019570, FCBBF3019663, FCBBF3019714, FCBBF3019716, FCBBF3019784, FCBBF3019867, FCBBF3019961, FCBBF3020030, FCBBF3020138, FCBBF3020140, FCBBF3020163, FCBBF3020232, FCBBF3020599, FCBBF3021026, FCBBF3021191, FCBBF3021221, FCBBF3021501, FCBBF3021506, FCBBF3021524, FCBBF3021807, FCBBF3021940, FCBBF3021985, FCBBF3022005, FCBBF3022291, FCBBF3022311, FCBBF3022504, FCBBF3022566, FCBBF3022593, FCBBF3022765, FCBBF3022767, FCBBF3022894, FCBBF3023061, FCBBF3023078, FCBBF3023368, FCBBF3023372, FCBBF3023443, FCBBF3023599, FCBBF3023704, FCBBF3023887, FCBBF3023895, FCBBF3024002, FCBBF3024096, FCBBF3024225, FCBBF3024266, FCBBF3024364, FCBBF3024623, FCBBF3024793, FCBBF3024911, FCBBF3025098, FCBBF3025252, FCBBF3025280, FCBBF3025285, FCBBF3025417, FCBBF3025528, FCBBF3025568, FCBBF3025650, FCBBF3025674, FCBBF3025730, FCBBF3025737, FCBBF3025905, FCBBF3026021, FCBBF3026048, FCBBF3026251, FCBBF3026308, FCBBF3026651, FCBBF3026678, FCBBF3026692, FCBBF3027104, FCBBF3027199, FCBBF3027328, FCBBF3027559, FCBBF3027717, FCBBF3027755, FCBBF3027768, FCBBF3027854, FCBBF3027863, FCBBF3027903, FCBBF3028102, FCBBF3028143, FCBBF3028188, FCBBF3028202, FCBBF3028244, FCBBF3028472, FCBBF3028528, FCBBF3028582, FCBBF3028593, FCBBF3028671, FCBBF3028794, FCBBF4000017, FCBBF4000061, FCBBF4000076, FCBBF4000142, FCBBF4000173, FCBBF4000192, FCBBF4000193, FCBBF4000268, FCBBF4000282, FCBBF4000399, FCBBF4000415, FCBBF4000500, FCBBF4000529, FCBBF4000548, FCBBF5000041, FCBBF5000061, FCBBF5000165, FCBBF5000261, FCBBF5000325, FCBBF5000353, FCBBF5000384, FCBBF5000483, FCBBF5000495, FEBRA1000005, FEBRA1000008, FEBRA1000022, FEBRA1000030, FEBRA1000088, FEBRA1000138, FEBRA1000148, FEBRA1000149, FEBRA1000183, FEBRA1000188, FEBRA1000189, FEBRA1000190, FEBRA2000007, FEBRA2000021, FEBRA2000035, FEBRA2000053, FEBRA2000105, FEBRA2000126, FEBRA2000210, FEBRA2000220, FEBRA2000228, FEBRA2000253, FEBRA2000282, FEBRA2000286, FEBRA2000297, FEBRA2000311, FEBRA2000321, FEBRA2000333, FEBRA2000377, FEBRA2000378, FEBRA2000391, FEBRA2000394, FEBRA2000397, FEBRA2000399, FEBRA2000402, FEBRA2000404, FEBRA2000409, FEBRA2000415, FEBRA2000436, FEBRA2000452, FEBRA2000454, FEBRA2000462, FEBRA2000468, FEBRA2000491, FEBRA2000504, FEBRA2000510, FEBRA2000532, FEBRA2000536, FEBRA2000538, FEBRA2000575, FEBRA2000581, FEBRA2000656, FEBRA2000659, FEBRA2000680, FEBRA2000690, FEBRA2000727, FEBRA2000734, FEBRA2000740, FEBRA2000757, FEBRA2000771, FEBRA2000782, FEBRA2000787, FEBRA2000790, FEBRA2000793, FEBRA2000803, FEBRA2000805, FEBRA2000809, FEBRA2000815, FEBRA2000856, FEBRA2000862, FEBRA2000877, FEBRA2000880, FEBRA2000901, FEBRA2000909, FEBRA2000917, FEBRA2000928, FEBRA2000936, FEBRA2000937, FEBRA2000959, FEBRA2000972, FEBRA2001004, FEBRA2001012, FEBRA2001020, FEBRA2001093, FEBRA2001124, FEBRA2001133, FEBRA2001146, FEBRA2001161, FEBRA2001175, FEBRA2001197, FEBRA2001217, FEBRA2001227, FEBRA2001267, FEBRA2001334, FEBRA2001351, FEBRA2001383, FEBRA2001438, FEBRA2001440, FEBRA2001487, FEBRA2001492, FEBRA2001523, FEBRA2001561, FEBRA2001571, FEBRA2001581, FEBRA2001584, FEBRA2001590, FEBRA2001591, FEBRA2001610, FEBRA2001620, FEBRA2001659, FEBRA2001669, FEBRA2001698, FEBRA2001705, FEBRA2001706, FEBRA2001715, FEBRA2001745, FEBRA2001752, FEBRA2001772, FEBRA2001790, FEBRA2001814, FEBRA2001867, FEBRA2001914, FEBRA2001974, FEBRA2001989, FEBRA2001990, FEBRA2002009, FEBRA2002027, FEBRA2002086, FEBRA2002109, FEBRA2002191, FEBRA2002260, FEBRA2002399, FEBRA2002410, FEBRA2002429, FEBRA2002442, FEBRA2002456, FEBRA2002508, FEBRA2002525, FEBRA2002527, FEBRA2002552, FEBRA2002574, FEBRA2002601, FEBRA2002611, FEBRA2002628, FEBRA2002662, FEBRA2002682, FEBRA2002727, FEBRA2002781, FEBRA2002783, FEBRA2002792, FEBRA2002818, FEBRA2002858, FEBRA2002882, FEBRA2002897, FEBRA2002908, FEBRA2002931, FEBRA2002962, FEBRA2002986, FEBRA2003054, FEBRA2003115, FEBRA2003128, FEBRA2003155, FEBRA2003163, FEBRA2003181, FEBRA2003198, FEBRA2003253, FEBRA2003258, FEBRA2003275, FEBRA2003308, FEBRA2003327, FEBRA2003429, FEBRA2003436, FEBRA2003454, FEBRA2003468, FEBRA2003470, FEBRA2003520, FEBRA2003524, FEBRA2003541, FEBRA2003675, FEBRA2003707, FEBRA2003711, FEBRA2003822, FEBRA2003833, FEBRA2003897, FEBRA2003907, FEBRA2003930, FEBRA2004023, FEBRA2004026, FEBRA2004029, FEBRA2004042, FEBRA2004053, FEBRA2004056, FEBRA2004091, FEBRA2004110, FEBRA2004191, FEBRA2004202, FEBRA2004219, FEBRA2004237, FEBRA2004268, FEBRA2004293, FEBRA2004329, FEBRA2004331, FEBRA2004412, FEBRA2004443, FEBRA2004485, FEBRA2004490, FEBRA2004538, FEBRA2004592, FEBRA2004620, FEBRA2004651, FEBRA2004767, FEBRA2004813, FEBRA2004818, FEBRA2004840, FEBRA2004852, FEBRA2004867, FEBRA2004914, FEBRA2004933, FEBRA2004987, FEBRA2005014, FEBRA2005036, FEBRA2005079, FEBRA2005114, FEBRA2005216, FEBRA2005291, FEBRA2005361, FEBRA2005377, FEBRA2005380, FEBRA2005427, FEBRA2005458, FEBRA2005476, FEBRA2005572, FEBRA2005701, FEBRA2005726, FEBRA2005734, FEBRA2005752, FEBRA2005778, FEBRA2005787, FEBRA2005788, FEBRA2005995, FEBRA2005998, FEBRA2006055, FEBRA2006061, FEBRA2006112, FEBRA2006150, FEBRA2006165, FEBRA2006255, FEBRA2006270, FEBRA2006315, FEBRA2006346, FEBRA2006354, FEBRA2006357, FEBRA2006368, FEBRA2006370, FEBRA2006379, FEBRA2006396, FEBRA2006409, FEBRA2006418, FEBRA2006427, FEBRA2006476, FEBRA2006491, FEBRA2006519, FEBRA2006521, FEBRA2006553, FEBRA2006627, FEBRA2006664, FEBRA2006667, FEBRA2006726, FEBRA2006736, FEBRA2006793, FEBRA2006808, FEBRA2006817, FEBRA2006890, FEBRA2006942, FEBRA2006977, FEBRA2007017, FEBRA2007176, FEBRA2007200, FEBRA2007212, FEBRA2007247, FEBRA2007280, FEBRA2007414, FEBRA2007436, FEBRA2007449, FEBRA2007458, FEBRA2007534, FEBRA2007544, FEBRA2007551, FEBRA2007566, FEBRA2007589, FEBRA2007613, FEBRA2007620, FEBRA2007622, FEBRA2007708, FEBRA2007714, FEBRA2007793, FEBRA2007801, FEBRA2007823, FEBRA2007880, FEBRA2007900, FEBRA2007901, FEBRA2007931, FEBRA2007957, FEBRA2008009, FEBRA2008036, FEBRA2008086, FEBRA2008134, FEBRA2008135, FEBRA2008159, FEBRA2008165, FEBRA2008172, FEBRA2008201, FEBRA2008210, FEBRA2008255, FEBRA2008265, FEBRA2008266, FEBRA2008282, FEBRA2008287, FEBRA2008311, FEBRA2008360, FEBRA2008459, FEBRA2008468, FEBRA2008475, FEBRA2008481, FEBRA2008542, FEBRA2008660, FEBRA2008662, FEBRA2008681, FEBRA2008692, FEBRA2008741, FEBRA2008755, FEBRA2008836, FEBRA2008859, FEBRA2008861, FEBRA2008866, FEBRA2008881, FEBRA2008928, FEBRA2008983, FEBRA2009016, FEBRA2009022, FEBRA2009029, FEBRA2009074, FEBRA2009117, FEBRA2009120, FEBRA2009162, FEBRA2009185, FEBRA2009240, FEBRA2009265, FEBRA2009276, FEBRA2009289, FEBRA2009327, FEBRA2009328, FEBRA2009352, FEBRA2009362, FEBRA2009385, FEBRA2009416, FEBRA2009419, FEBRA2009437, FEBRA2009478, FEBRA2009507, FEBRA2009514, FEBRA2009541, FEBRA2009567, FEBRA2009588, FEBRA2009731, FEBRA2009754, FEBRA2009780, FEBRA2009846, FEBRA2009986, FEBRA2010141, FEBRA2010299, FEBRA2010484, FEBRA2010719, FEBRA2010746, FEBRA2010768, FEBRA2010802, FEBRA2011063, FEBRA2011090, FEBRA2011356, FEBRA2011392, FEBRA2011414, FEBRA2011593, FEBRA2011665, FEBRA2012090, FEBRA2012120, FEBRA2012181, FEBRA2012195, FEBRA2012397, FEBRA2012418, FEBRA2012507, FEBRA2012625, FEBRA2013019, FEBRA2013069, FEBRA2013274, FEBRA2013465, FEBRA2013570, FEBRA2013699, FEBRA2013905, FEBRA2013951, FEBRA2014010, FEBRA2014122, FEBRA2014198, FEBRA2014213, FEBRA2014297, FEBRA2014443, FEBRA2014578, FEBRA2014939, FEBRA2015076, FEBRA2015085, FEBRA2015175, FEBRA2015292, FEBRA2015588, FEBRA2016112, FEBRA2016398, FEBRA2016572, FEBRA2016583, FEBRA2016621, FEBRA2016654, FEBRA2016739, FEBRA2017024, FEBRA2017098, FEBRA2017138, FEBRA2017154, FEBRA2017200, FEBRA2017223, FEBRA2017333, FEBRA2017502, FEBRA2017533, FEBRA2017680, FEBRA2017736, FEBRA2017780, FEBRA2017811, FEBRA2017850, FEBRA2018051, FEBRA2018203, FEBRA2018407, FEBRA2018433, FEBRA2018746, FEBRA2019172, FEBRA2019242, FEBRA2019298, FEBRA2019389, FEBRA2019457, FEBRA2019519, FEBRA2019582, FEBRA2019637, FEBRA2019663, FEBRA2019690, FEBRA2019711, FEBRA2019867, FEBRA2020406, FEBRA2020566, FEBRA2020582, FEBRA2020668, FEBRA2020801, FEBRA2020845, FEBRA2020886, FEBRA2020977, FEBRA2021032, FEBRA2021134, FEBRA2021171, FEBRA2021339, FEBRA2021431, FEBRA2021497, FEBRA2021550, FEBRA2021571, FEBRA2021636, FEBRA2021864, FEBRA2021892, FEBRA2021908, FEBRA2021966, FEBRA2022013, FEBRA2022055, FEBRA2022148, FEBRA2022204, FEBRA2022255, FEBRA2022322, FEBRA2022601, FEBRA2022696, FEBRA2022729, FEBRA2022787, FEBRA2022911, FEBRA2022956, FEBRA2022963, FEBRA2022972, FEBRA2023227, FEBRA2023285, FEBRA2023351, FEBRA2023377, FEBRA2023399, FEBRA2023498, FEBRA2023550, FEBRA2023721, FEBRA2023927, FEBRA2023989, FEBRA2023990, FEBRA2024019, FEBRA2024136, FEBRA2024150, FEBRA2024343, FEBRA2024570, FEBRA2024693, FEBRA2024727, FEBRA2024744, FEBRA2024797, FEBRA2024987, FEBRA2025249, FEBRA2025427, FEBRA2025463, FEBRA2025477, FEBRA2026474, FEBRA2026582, FEBRA2026629, FEBRA2026769, FEBRA2026879, FEBRA2026890, FEBRA2026977, FEBRA2026984, FEBRA2027082, FEBRA2027297, FEBRA2027352, FEBRA2027364, FEBRA2027609, FEBRA2028158, FEBRA2028222, FEBRA2028366, FEBRA2028457, FEBRA2028477, FEBRA2028503, FEHRT2000325, FEHRT2000364, FEKID1000018, FELIV1000101, FELIV1000137, FELIV1000164, FELNG2000241, HCASM1000021, HCASM1000050, HCASM1000061, HCASM1000115, HCASM1000130, HCASM2000016, HCASM2000138, HCASM2000156, HCASM2000202, HCASM2000214, HCASM2000266, HCASM2000307, HCASM2000363, HCASM2000534, HCASM2000536, HCASM2000560, HCASM2000871, HCASM2001285, HCASM2001810, HCASM2001866, HCASM2001890, HCASM2002148, HCASM2002502, HCASM2002754, HCASM2002918, HCASM2003018, HCASM2003076, HCASM2003099, HCASM2003212, HCASM2003237, HCASM2003357, HCASM2003415, HCASM2005484, HCASM2006131, HCASM2006338, HCASM2006359, HCASM2006632, HCASM2007047, HCASM2007317, HCASM2007737, HCASM2007773, HCASM2008154, HCASM2008536, HCASM2009405, HCASM2009424, HCASM2009463, HCHON1000015, HCHON1000142, HCHON1000166, HCHON1000176, HCHON2000028, HCHON2000038, HCHON2000087, HCHON2000100, HCHON2000156, HCHON2000160, HCHON2000199, HCHON2000212, HCHON2000226, HCHON2000244, HCHON2000265, HCHON2000271, HCHON2000315, HCHON2000322, HCHON2000344, HCHON2000364, HCHON2000395, HCHON2000417, HCHON2000418, HCHON2000473, HCHON2000475, HCHON2000503, HCHON2000508, HCHON2000626, HCHON2000660, HCHON2000663, HCHON2000673, HCHON2000699, HCHON2000705, HCHON2000738, HCHON2000743, HCHON2000751, HCHON2000815, HCHON2000817, HCHON2000818, HCHON2000819, HCHON2000832, HCHON2000851, HCHON2000898, HCHON2000935, HCHON2000942, HCHON2000956, HCHON2000994, HCHON2001084, HCHON2001099, HCHON2001108, HCHON2001116, HCHON2001161, HCHON2001214, HCHON2001233, HCHON2001269, HCHON2001359, HCHON2001450, HCHON2001453, HCHON2001497, HCHON2001505, HCHON2001519, HCHON2001523, HCHON2001535, HCHON2001546, HCHON2001548, HCHON2001577, HCHON2001598, HCHON2001604, HCHON2001607, HCHON2001646, HCHON2001665, HCHON2001712, HCHON2001768, HCHON2001801, HCHON2001853, HCHON2002123, HCHON2002194, HCHON2002241, HCHON2002247, HCHON2002354, HCHON2002496, HCHON2002676, HCHON2002770, HCHON2002964, HCHON2002971, HCHON2003131, HCHON2003134, HCHON2003327, HCHON2003513, HCHON2003532, HCHON2003642, HCHON2003659, HCHON2003676, HCHON2004002, HCHON2004007, HCHON2004279, HCHON2004359, HCHON2004531, HCHON2004776, HCHON2004858, HCHON2005048, HCHON2005118, HCHON2005166, HCHON2005802, HCHON2005921, HCHON2005987, HCHON2006250, HCHON2006459, HCHON2006714, HCHON2006722, HCHON2006770, HCHON2006786, HCHON2006841, HCHON2006871, HCHON2007046, HCHON2007482, HCHON2007650, HCHON2007674, HCHON2007774, HCHON2007881, HCHON2008112, HCHON2008239, HCHON2008444, HCHON2008582, HCHON2008672, HCHON2008856, HCHON2008871, HCHON2008989, HCHON2009191, HCHON2009384, HCHON2009749, HCHON2009766, HCHON2009795, HCHON2010074, HCHON2010543, HEART1000010, HEART1000088, HEART1000099, HEART1000102, HEART1000118, HEART1000132, HEART1000139, HEART1000142, HEART1000151, HEART1000173, HEART1000185, HEART2000024, HEART2000035, HEART2000099, HEART2000298, HEART2000306, HEART2000309, HEART2000411, HEART2000418, HEART2000444, HEART2000448, HEART2000492, HEART2000506, HEART2000520, HEART2000541, HEART2000568, HEART2000611, HEART2000959, HEART2001680, HEART2001756, HEART2002129, HEART2002184, HEART2002220, HEART2002432, HEART2002531, HEART2002598, HEART2002717, HEART2003027, HEART2003168, HEART2003432, HEART2003440, HEART2003781, HEART2003836, HEART2003852, HEART2004570, HEART2004764, HEART2004931, HEART2004940, HEART2004941, HEART2004980, HEART2005244, HEART2005310, HEART2005581, HEART2005610, HEART2006131, HEART2006195, HEART2006310, HEART2006334, HEART2006487, HEART2006521, HEART2006557, HEART2006787, HEART2006789, HEART2006909, HEART2007031, HEART2007231, HEART2007443, HEART2007696, HEART2007767, HEART2008108, HEART2008111, HEART2008257, HEART2008509, HEART2008994, HEART2009000, HEART2009599, HEART2009680, HEART2010391, HEART2010492, HEART2010495, HELAC2000158, HELAC2000301, HHDPC1000001, HHDPC1000065, HHDPC1000114, HHDPC1000118, HHDPC2000055, HHDPC2000070, HHDPC2000104, HHDPC2000149, HHDPC2000258, HHDPC2000315, HHDPC2000462, HHDPC2000572, HHDPC2000692, HHDPC2001337, HHDPC2001432, HHDPC2001896, HHDPC2002963, HHDPC2003049, HHDPC2003113, HHDPC2003381, HHDPC2003472, HHDPC2004757, HHDPC2005185, HHDPC2005513, HHDPC2005742, HHDPC2005794, HHDPC2006460, HHDPC2006927, HHDPC2007267, HHDPC2007302, HHDPC2007775, HHDPC2008123, HHDPC2008185, HHDPC2008279, HHDPC2008297, HHDPC2008414, HHDPC2008474, HHDPC2008816, HHDPC2008843, HHDPC2009114, HHDPC2009178, HHDPC2009208, HHDPC2009272, HHDPC2009528, HLUNG1000017, HLUNG1000024, HLUNG1000030, HLUNG1000034, HLUNG1000037, HLUNG1000053, HLUNG1000064, HLUNG1000084, HLUNG1000091, HLUNG1000099, HLUNG1000104, HLUNG1000110, HLUNG1000151, HLUNG1000169, HLUNG2000004, HLUNG2000014, HLUNG2000027, HLUNG2000063, HLUNG2000068, HLUNG2000116, HLUNG2000125, HLUNG2000130, HLUNG2000142, HLUNG2000174, HLUNG2000176, HLUNG2000217, HLUNG2000232, HLUNG2000255, HLUNG2000281, HLUNG2000314, HLUNG2000315, HLUNG2000340, HLUNG2000362, HLUNG2000363, HLUNG2000412, HLUNG2000431, HLUNG2000480, HLUNG2000489, HLUNG2000501, HLUNG2000549, HLUNG2000557, HLUNG2000570, HLUNG2000751, HLUNG2000761, HLUNG2000777, HLUNG2000846, HLUNG2000870, HLUNG2000884, HLUNG2000926, HLUNG2000950, HLUNG2000955, HLUNG2000970, HLUNG2001013, HLUNG2001126, HLUNG2001144, HLUNG2001146, HLUNG2001214, HLUNG2001459, HLUNG2001633, HLUNG2001677, HLUNG2001712, HLUNG2001814, HLUNG2001996, HLUNG2002006, HLUNG2002050, HLUNG2002059, HLUNG2002085, HLUNG2002145, HLUNG2002295, HLUNG2002303, HLUNG2002334, HLUNG2002405, HLUNG2002429, HLUNG2002465, HLUNG2002562, HLUNG2002659, HLUNG2002707, HLUNG2002811, HLUNG2002942, HLUNG2002949, HLUNG2002958, HLUNG2002982, HLUNG2003003, HLUNG2003042, HLUNG2003049, HLUNG2003061, HLUNG2003162, HLUNG2003246, HLUNG2003306, HLUNG2003331, HLUNG2003335, HLUNG2003378, HLUNG2003497, HLUNG2003691, HLUNG2003710, HLUNG2003714, HLUNG2003716, HLUNG2003778, HLUNG2003833, HLUNG2003872, HLUNG2003918, HLUNG2003991, HLUNG2004014, HLUNG2004037, HLUNG2004067, HLUNG2004154, HLUNG2004159, HLUNG2004170, HLUNG2004217, HLUNG2004273, HLUNG2004388, HLUNG2004416, HLUNG2004521, HLUNG2004534, HLUNG2004684, HLUNG2004707, HLUNG2004774, HLUNG2004775, HLUNG2005012, HLUNG2005030, HLUNG2005045, HLUNG2005076, HLUNG2005133, HLUNG2005203, HLUNG2005230, HLUNG2005479, HLUNG2005524, HLUNG2005656, HLUNG2005738, HLUNG2005774, HLUNG2005813, HLUNG2005924, HLUNG2006026, HLUNG2006067, HLUNG2006094, HLUNG2006370, HLUNG2006397, HLUNG2006570, HLUNG2006599, HLUNG2006614, HLUNG2006671, HLUNG2006781, HLUNG2006812, HLUNG2006843, HLUNG2006852, HLUNG2006935, HLUNG2007041, HLUNG2007163, HLUNG2007210, HLUNG2007219, HLUNG2007245, HLUNG2007433, HLUNG2007931, HLUNG2008066, HLUNG2008139, HLUNG2008153, HLUNG2008225, HLUNG2008235, HLUNG2008247, HLUNG2008333, HLUNG2008348, HLUNG2008384, HLUNG2008396, HLUNG2008439, HLUNG2008479, HLUNG2008480, HLUNG2008521, HLUNG2008637, HLUNG2008833, HLUNG2008875, HLUNG2008885, HLUNG2008958, HLUNG2008959, HLUNG2009067, HLUNG2009215, HLUNG2009225, HLUNG2009253, HLUNG2009303, HLUNG2009413, HLUNG2009729, HLUNG2010181, HLUNG2010464, HLUNG2010562, HLUNG2010845, HLUNG2011041, HLUNG2011298, HLUNG2011461, HLUNG2011833, HLUNG2012049, HLUNG2012287, HLUNG2012315, HLUNG2012546, HLUNG2012600, HLUNG2012727, HLUNG2013097, HLUNG2013204, HLUNG2013304, HLUNG2013350, HLUNG2013622, HLUNG2013643, HLUNG2013784, HLUNG2013851, HLUNG2014262, HLUNG2014288, HLUNG2014449, HLUNG2014821, HLUNG2015184, HLUNG2015418, HLUNG2015548, HLUNG2015578, HLUNG2015617, HLUNG2016022, HLUNG2016862, HLUNG2017262, HLUNG2017286, HLUNG2017307, HLUNG2017350, HLUNG2017546, HLUNG2017806, HLUNG2018029, HLUNG2018282, HLUNG2018626, HLUNG2019058, HSYRA1000131, HSYRA1000137, HSYRA1000152, HSYRA1000178, HSYRA2000044, HSYRA2000137, HSYRA2000190, HSYRA2000221, HSYRA2000224, HSYRA2000237, HSYRA2000253, HSYRA2000255, HSYRA2000332, HSYRA2000371, HSYRA2000424, HSYRA2000507, HSYRA2000510, HSYRA2000605, HSYRA2000629, HSYRA2000640, HSYRA2000706, HSYRA2000743, HSYRA2000760, HSYRA2000787, HSYRA2000792, HSYRA2000832, HSYRA2000927, HSYRA2001103, HSYRA2001105, HSYRA2001142, HSYRA2001225, HSYRA2001255, HSYRA2001332, HSYRA2001353, HSYRA2001396, HSYRA2001420, HSYRA2001484, HSYRA2001552, HSYRA2001567, HSYRA2001574, HSYRA2001580, HSYRA2001615, HSYRA2001621, HSYRA2001983, HSYRA2002103, HSYRA2002590, HSYRA2002741, HSYRA2003168, HSYRA2004550, HSYRA2004858, HSYRA2005456, HSYRA2005496, HSYRA2005628, HSYRA2005970, HSYRA2006049, HSYRA2006873, HSYRA2007241, HSYRA2007338, HSYRA2007650, HSYRA2007667, HSYRA2008154, HSYRA2008714, HSYRA2009102, IMR321000155, IMR321000161, IMR321000165, IMR321000193, IMR321000207, IMR321000210, IMR321000230, IMR321000242, IMR321000253, IMR322000010, IMR322000072, IMR322000107, IMR322000121, IMR322000127, IMR322000144, IMR322000152, IMR322000164, IMR322000178, IMR322000223, IMR322000243, IMR322000302, IMR322000316, IMR322000374, IMR322000379, IMR322000383, IMR322000418, IMR322000518, IMR322000555, IMR322000604, IMR322000609, IMR322000656, IMR322000672, IMR322000742, IMR322000775, IMR322000811, IMR322000819, IMR322000838, IMR322000859, IMR322000863, IMR322000917, IMR322000918, IMR322000919, IMR322000935, IMR322000953, IMR322000984, IMR322001018, IMR322001049, IMR322001167, IMR322001185, IMR322001218, IMR322001245, IMR322001317, IMR322001318, IMR322001322, IMR322001332, IMR322001380, IMR322001438, IMR322001452, IMR322001491, IMR322001534, IMR322001541, IMR322001584, IMR322001665, IMR322001670, IMR322001710, IMR322001724, IMR322001879, IMR322002035, IMR322002110, IMR322002470, IMR322002993, IMR322003675, IMR322004768, IMR322005293, IMR322005833, IMR322006012, IMR322006222, IMR322006495, IMR322006520, IMR322006886, IMR322006947, IMR322007078, IMR322007225, IMR322007704, IMR322008651, IMR322009710, IMR322009807, IMR322010295, IMR322010953, IMR322011689, IMR322012314, IMR322013053, IMR322013396, IMR322013731, IMR322013805, IMR322015523, IMR322016146, IMR322017049, IMR322018117, IMR322018192, IMR322019070, JCMLC2000273, KIDNE1000008, KIDNE1000012, KIDNE1000015, KIDNE1000028, KIDNE1000036, KIDNE1000064, KIDNE1000104, KIDNE1000121, KIDNE1000143, KIDNE1000145, KIDNE1000152, KIDNE2000026, KIDNE2000041, KIDNE2000046, KIDNE2000051, KIDNE2000070, KIDNE2000167, KIDNE2000174, KIDNE2000192, KIDNE2000227, KIDNE2000244, KIDNE2000245, KIDNE2000252, KIDNE2000266, KIDNE2000287, KIDNE2000315, KIDNE2000317, KIDNE2000328, KIDNE2000330, KIDNE2000335, KIDNE2000349, KIDNE2000375, KIDNE2000383, KIDNE2000394, KIDNE2000403, KIDNE2000422, KIDNE2000493, KIDNE2000497, KIDNE2000510, KIDNE2000513, KIDNE2000517, KIDNE2000519, KIDNE2000555, KIDNE2000624, KIDNE2000678, KIDNE2000717, KIDNE2000721, KIDNE2000722, KIDNE2000777, KIDNE2000801, KIDNE2000832, KIDNE2000833, KIDNE2000846, KIDNE2000867, KIDNE2001117, KIDNE2001140, KIDNE2001162, KIDNE2001269, KIDNE2001361, KIDNE2001373, KIDNE2001636, KIDNE2001713, KIDNE2001802, KIDNE2001840, KIDNE2001847, KIDNE2001857, KIDNE2001873, KIDNE2001897, KIDNE2001931, KIDNE2001979, KIDNE2002015, KIDNE2002162, KIDNE2002168, KIDNE2002191, KIDNE2002198, KIDNE2002252, KIDNE2002262, KIDNE2002265, KIDNE2002438, KIDNE2002483, KIDNE2002725, KIDNE2002768, KIDNE2002795, KIDNE2002798, KIDNE2002845, KIDNE2002872, KIDNE2002882, KIDNE2002883, KIDNE2002980, KIDNE2002991, KIDNE2003185, KIDNE2003188, KIDNE2003233, KIDNE2003305, KIDNE2003316, KIDNE2003335, KIDNE2003357, KIDNE2003373, KIDNE2003377, KIDNE2003507, KIDNE2003752, KIDNE2003764, KIDNE2003837, KIDNE2003994, KIDNE2004034, KIDNE2004084, KIDNE2004095, KIDNE2004115, KIDNE2004233, KIDNE2004262, KIDNE2004279, KIDNE2004294, KIDNE2004295, KIDNE2004305, KIDNE2004344, KIDNE2004394, KIDNE2004411, KIDNE2004475, KIDNE2004519, KIDNE2004520, KIDNE2004531, KIDNE2004562, KIDNE2004579, KIDNE2004626, KIDNE2004681, KIDNE2004828, KIDNE2004846, KIDNE2004864, KIDNE2004879, KIDNE2004981, KIDNE2004985, KIDNE2004999, KIDNE2005038, KIDNE2005042, KIDNE2005062, KIDNE2005266, KIDNE2005296, KIDNE2005321, KIDNE2005327, KIDNE2005336, KIDNE2005400, KIDNE2005424, KIDNE2005477, KIDNE2005526, KIDNE2005543, KIDNE2005603, KIDNE2005629, KIDNE2005781, KIDNE2005798, KIDNE2005854, KIDNE2005908, KIDNE2005937, KIDNE2006009, KIDNE2006014, KIDNE2006039, KIDNE2006053, KIDNE2006062, KIDNE2006092, KIDNE2006145, KIDNE2006149, KIDNE2006210, KIDNE2006248, KIDNE2006299, KIDNE2006334, KIDNE2006353, KIDNE2006376, KIDNE2006378, KIDNE2006465, KIDNE2006580, KIDNE2006652, KIDNE2006687, KIDNE2006733, KIDNE2006760, KIDNE2006775, KIDNE2006811, KIDNE2006820, KIDNE2006880, KIDNE2007005, KIDNE2007040, KIDNE2007077, KIDNE2007186, KIDNE2007222, KIDNE2007328, KIDNE2007356, KIDNE2007422, KIDNE2007569, KIDNE2007810, KIDNE2007910, KIDNE2007944, KIDNE2007954, KIDNE2008022, KIDNE2008069, KIDNE2008072, KIDNE2008116, KIDNE2008117, KIDNE2008218, KIDNE2008315, KIDNE2008362, KIDNE2008378, KIDNE2008403, KIDNE2008404, KIDNE2008446, KIDNE2008473, KIDNE2008480, KIDNE2008649, KIDNE2008666, KIDNE2008697, KIDNE2008758, KIDNE2008788, KIDNE2008795, KIDNE2008824, KIDNE2008832, KIDNE2008869, KIDNE2008914, KIDNE2008975, KIDNE2008987, KIDNE2009019, KIDNE2009109, KIDNE2009180, KIDNE2009191, KIDNE2009332, KIDNE2009367, KIDNE2009426, KIDNE2009467, KIDNE2009490, KIDNE2009553, KIDNE2009605, KIDNE2009628, KIDNE2009647, KIDNE2009676, KIDNE2009723, KIDNE2010007, KIDNE2010049, KIDNE2010052, KIDNE2010084, KIDNE2010137, KIDNE2010151, KIDNE2010264, KIDNE2010265, KIDNE2010271, KIDNE2010419, KIDNE2010430, KIDNE2010574, KIDNE2010674, KIDNE2010739, KIDNE2010750, KIDNE2010762, KIDNE2010863, KIDNE2010973, KIDNE2010989, KIDNE2011200, KIDNE2011314, KIDNE2011508, KIDNE2011532, KIDNE2011635, KIDNE2011752, KIDNE2011782, KIDNE2011858, KIDNE2012009, KIDNE2012025, KIDNE2012188, KIDNE2012291, KIDNE2012316, KIDNE2012361, KIDNE2012453, KIDNE2012563, KIDNE2012601, KIDNE2012613, KIDNE2012710, KIDNE2012745, KIDNE2012775, KIDNE2012784, KIDNE2012945, KIDNE2013045, KIDNE2013095, KIDNE2013158, KIDNE2013218, KIDNE2013263, KIDNE2013346, KIDNE2013388, KIDNE2013413, KIDNE2013489, KIDNE2013639, KIDNE2013731, KIDNE2013734, KIDNE2013775, KIDNE2013801, KIDNE2013866, KIDNE2014087, KIDNE2014112, KIDNE2014119, KIDNE2014170, KIDNE2014184, KIDNE2014268, KIDNE2014290, KIDNE2014298, KIDNE2014320, KIDNE2014325, KIDNE2014415, KIDNE2014489, KIDNE2014496, KIDNE2014661, KIDNE2014717, KIDNE2014789, KIDNE2014808, KIDNE2014890, KIDNE2014978, KIDNE2015073, KIDNE2015221, KIDNE2015244, KIDNE2015313, KIDNE2015433, KIDNE2015445, KIDNE2015483, KIDNE2015515, KIDNE2015546, KIDNE2015556, KIDNE2015598, KIDNE2015660, KIDNE2015987, KIDNE2016000, KIDNE2016036, KIDNE2016096, KIDNE2016101, KIDNE2016142, KIDNE2016188, KIDNE2016327, KIDNE2016371, KIDNE2016388, KIDNE2016464, KIDNE2016539, KIDNE2016570, KIDNE2016918, KIDNE2017007, KIDNE2017040, KIDNE2017052, KIDNE2017151, KIDNE2017153, KIDNE2017315, KIDNE2017332, KIDNE2017343, KIDNE2017454, KIDNE2017603, KIDNE2017956, KIDNE2018071, KIDNE2018166, KIDNE2018167, KIDNE2018217, KIDNE2018254, KIDNE2018268, KIDNE2018269, KIDNE2018287, KIDNE2018294, KIDNE2018462, KIDNE2018493, KIDNE2018617, KIDNE2018678, KIDNE2018727, KIDNE2018863, KIDNE2018891, KIDNE2018989, KIDNE2018996, KIDNE2019074, KIDNE2019187, LIVER1000050, LIVER1000055, LIVER1000058, LIVER1000063, LIVER1000073, LIVER1000082, LIVER1000099, LIVER1000126, LIVER1000139, LIVER1000155, LIVER1000165, LIVER1000175, LIVER1000224, LIVER1000230, LIVER1000278, LIVER1000303, LIVER1000397, LIVER1000421, LIVER1000433, LIVER1000479, LIVER1000482, LIVER2000003, LIVER2000033, LIVER2000216, LIVER2000237, LIVER2000247, LIVER2000360, LIVER2000416, LIVER2000446, LIVER2000515, LIVER2000592, LIVER2000626, LIVER2000682, LIVER2000769, LIVER2000775, LIVER2001051, LIVER2001076, LIVER2001099, LIVER2001113, LIVER2001164, LIVER2001191, LIVER2001265, LIVER2001329, LIVER2001389, LIVER2001461, LIVER2001539, LIVER2001835, LIVER2002638, LIVER2002644, LIVER2002660, LIVER2002702, LIVER2003008, LIVER2003065, LIVER2003234, LIVER2003511, LIVER2003524, LIVER2003568, LIVER2003581, LIVER2003854, LIVER2004074, LIVER2004392, LIVER2004514, LIVER2004565, LIVER2005028, LIVER2005198, LIVER2005218, LIVER2005376, LIVER2005385, LIVER2005512, LIVER2005520, LIVER2005527, LIVER2005544, LIVER2005625, LIVER2005728, LIVER2005789, LIVER2005973, LIVER2005981, LIVER2006251, LIVER2006410, LIVER2006469, LIVER2006644, LIVER2006764, LIVER2007415, LIVER2007548, LIVER2007568, LIVER2007721, LIVER2007783, LIVER2008053, LIVER2008465, LIVER2008473, LIVER2008580, LIVER2008706, LIVER2008751, LIVER2008945, LIVER2008998, LIVER2009110, LIVER2009118, LIVER2009554, LYMPB1000141, LYMPB1000158, LYMPB2000083, MAMGL1000017, MAMGL1000083, MAMGL1000096, MAMGL1000132, MAMGL1000151, MAMGL1000178, MAMGL1000182, MAMGL1000184, MESAN1000032, MESAN1000035, MESAN1000079, MESAN1000101, MESAN1000121, MESAN1000126, MESAN1000147, MESAN1000180, MESAN2000023, MESAN2000026, MESAN2000067, MESAN2000092, MESAN2000167, MESAN2000264, MESAN2000291, MESAN2000337, MESAN2000434, MESAN2000457, MESAN2000462, MESAN2000501, MESAN2000620, MESAN2000711, MESAN2000815, MESAN2000894, MESAN2000909, MESAN2001154, MESAN2001450, MESAN2001627, MESAN2001770, MESAN2001979, MESAN2001980, MESAN2002113, MESAN2002122, MESAN2002147, MESAN2002186, MESAN2002424, MESAN2002519, MESAN2002687, MESAN2002709, MESAN2002724, MESAN2002790, MESAN2002844, MESAN2002978, MESAN2003035, MESAN2003037, MESAN2003039, MESAN2003058, MESAN2003101, MESAN2003190, MESAN2003322, MESAN2003490, MESAN2003529, MESAN2003646, MESAN2003662, MESAN2003709, MESAN2003851, MESAN2004138, MESAN2004288, MESAN2004575, MESAN2005284, MESAN2005303, MESAN2005371, MESAN2005633, MESAN2005689, MESAN2005724, MESAN2005808, MESAN2005811, MESAN2005957, MESAN2005958, MESAN2006022, MESAN2006043, MESAN2006328, MESAN2006401, MESAN2006563, MESAN2006580, MESAN2006599, MESAN2006971, MESAN2007032, MESAN2007440, MESAN2007597, MESAN2007755, MESAN2008222, MESAN2008415, MESAN2008460, MESAN2008536, MESAN2008679, MESAN2008729, MESAN2008821, MESAN2008926, MESAN2008936, MESAN2009019, MESAN2009081, MESAN2009105, MESAN2009311, MESAN2009418, MESAN2009503, MESAN2009522, MESAN2010031, MESAN2010114, MESAN2010312, MESAN2010321, MESAN2010664, MESAN2010681, MESAN2011545, MESAN2011597, MESAN2011627, MESAN2011632, MESAN2011977, MESAN2011984, MESAN2012054, MESAN2012113, MESAN2012586, MESAN2012708, MESAN2012735, MESAN2013019, MESAN2013022, MESAN2013183, MESAN2013211, MESAN2013283, MESAN2013611, MESAN2013674, MESAN2013908, MESAN2013936, MESAN2014192, MESAN2014295, MESAN2014298, MESAN2014412, MESAN2014624, MESAN2015277, MESAN2015365, MESAN2015391, MESAN2015401, MESAN2015501, MESAN2015515, MESAN2015708, MESAN2016159, MESAN2016304, MESAN2016409, MESAN2016552, MESAN2016965, MESAN2017133, MESAN2017152, MESAN2017373, MESAN2017417, MESAN2018209, MESAN2018670, MESAN2018699, MESTC1000042, MESTC1000147, MESTC2000150, MESTC2000153, MESTC2000170, N1ESE2000698, NB9N41000011, NB9N41000047, NB9N41000121, NB9N41000135, NB9N41000142, NB9N41000146, NB9N42000104, NB9N42000122, NB9N42000196, NB9N42000281, NB9N42000314, NB9N42000342, NB9N42000430, NB9N42000495, NB9N42001300, NCRRP1000129, NESOP1000010, NESOP1000087, NESOP1000108, NESOP2000231, NESOP2000452, NESOP2000499, NESOP2000504, NESOP2000744, NESOP2001144, NESOP2001433, NESOP2001656, NESOP2001694, NESOP2001752, NESOP2002352, NESOP2002418, NESOP2002487, NESOP2002738, NESOP2002780, NETRP1000034, NETRP1000082, NETRP2000086, NETRP2000182, NETRP2000439, NHNPC1000034, NHNPC1000037, NHNPC1000084, NHNPC1000101, NHNPC1000124, NHNPC2000212, NHNPC2000606, NHNPC2000877, NHNPC2001108, NHNPC2001223, NHNPC2001312, NHNPC2001816, NHNPC2002565, NHNPC2002749, NOVAR1000015, NOVAR1000102, NOVAR2000136, NOVAR2000352, NOVAR2000412, NOVAR2000710, NOVAR2000783, NOVAR2000962, NOVAR2001108, NOVAR2001620, NOVAR2001783, NOVAR2001876, NOVAR2002039, NT2NE1000004, NT2NE1000014, NT2NE1000018, NT2NE1000023, NT2NE1000024, NT2NE1000059, NT2NE1000063, NT2NE1000073, NT2NE1000083, NT2NE1000120, NT2NE1000122, NT2NE1000175, NT2NE1000181, NT2NE1000185, NT2NE2000038, NT2NE2000054, NT2NE2000057, NT2NE2000064, NT2NE2000109, NT2NE2000137, NT2NE2000156, NT2NE2000195, NT2NE2000222, NT2NE2000284, NT2NE2000299, NT2NE2000327, NT2NE2000353, NT2NE2000356, NT2NE2000369, NT2NE2000374, NT2NE2000386, NT2NE2000390, NT2NE2000392, NT2NE2000455, NT2NE2000470, NT2NE2000488, NT2NE2000517, NT2NE2000536, NT2NE2000546, NT2NE2000548, NT2NE2000550, NT2NE2000586, NT2NE2000612, NT2NE2000658, NT2NE2000706, NT2NE2000763, NT2NE2000802, NT2NE2000808, NT2NE2000864, NT2NE2000909, NT2NE2000913, NT2NE2000950, NT2NE2000951, NT2NE2000980, NT2NE2001005, NT2NE2001021, NT2NE2001040, NT2NE2001049, NT2NE2001142, NT2NE2001156, NT2NE2001176, NT2NE2001180, NT2NE2001181, NT2NE2001188, NT2NE2001191, NT2NE2001247, NT2NE2001252, NT2NE2001324, NT2NE2001326, NT2NE2001337, NT2NE2001364, NT2NE2001372, NT2NE2001397, NT2NE2001403, NT2NE2001428, NT2NE2001432, NT2NE2001435, NT2NE2001442, NT2NE2001524, NT2NE2001530, NT2NE2001545, NT2NE2001598, NT2NE2001617, NT2NE2001623, NT2NE2001626, NT2NE2001634, NT2NE2001648, NT2NE2001655, NT2NE2001660, NT2NE2001666, NT2NE2001677, NT2NE2001697, NT2NE2001698, NT2NE2001723, NT2NE2001725, NT2NE2001793, NT2NE2001874, NT2NE2001889, NT2NE2001923, NT2NE2002100, NT2NE2002162, NT2NE2002186, NT2NE2002285, NT2NE2002311, NT2NE2002620, NT2NE2002651, NT2NE2002732, NT2NE2002768, NT2NE2002791, NT2NE2002856, NT2NE2002870, NT2NE2003150, NT2NE2003185, NT2NE2003252, NT2NE2003280, NT2NE2003308, NT2NE2003309, NT2NE2003315, NT2NE2003393, NT2NE2003408, NT2NE2003457, NT2NE2003485, NT2NE2003540, NT2NE2003569, NT2NE2003571, NT2NE2003705, NT2NE2003752, NT2NE2003887, NT2NE2003921, NT2NE2004255, NT2NE2004378, NT2NE2004490, NT2NE2004519, NT2NE2004606, NT2NE2004716, NT2NE2004740, NT2NE2004787, NT2NE2004916, NT2NE2005035, NT2NE2005223, NT2NE2005276, NT2NE2005317, NT2NE2005323, NT2NE2005358, NT2NE2005371, NT2NE2005395, NT2NE2005419, NT2NE2005441, NT2NE2005517, NT2NE2005537, NT2NE2005555, NT2NE2005588, NT2NE2005676, NT2NE2005720, NT2NE2005784, NT2NE2005804, NT2NE2005821, NT2NE2005876, NT2NE2005890, NT2NE2005921, NT2NE2005968, NT2NE2006075, NT2NE2006087, NT2NE2006103, NT2NE2006217, NT2NE2006288, NT2NE2006382, NT2NE2006387, NT2NE2006427, NT2NE2006432, NT2NE2006478, NT2NE2006531, NT2NE2006659, NT2NE2006784, NT2NE2006813, NT2NE2006894, NT2NE2006909, NT2NE2006942, NT2NE2006958, NT2NE2007052, NT2NE2007220, NT2NE2007425, NT2NE2007725, NT2NE2007727, NT2NE2007786, NT2NE2007877, NT2NE2007967, NT2NE2008017, NT2NE2008060, NT2NE2008077, NT2NE2008213, NT2NE2008260, NT2NE2008378, NT2NE2008607, NT2NE2008639, NT2NE2008727, NT2NE2008783, NT2NE2008785, NT2NE2008803, NT2NE2008867, NT2NE2008961, NT2NE2008997, NT2NE2009138, NT2NE2009295, NT2NE2009426, NT2NE2009523, NT2NE2009608, NT2NE2009691, NT2NE2010056, NT2NE2010105, NT2NE2010150, NT2NE2010400, NT2NE2010632, NT2NE2010633, NT2NE2010654, NT2NE2010688, NT2NE2010781, NT2NE2010854, NT2NE2011033, NT2NE2011036, NT2NE2011107, NT2NE2011119, NT2NE2011154, NT2NE2011221, NT2NE2011411, NT2NE2011485, NT2NE2011650, NT2NE2011684, NT2NE2011687, NT2NE2011691, NT2NE2011758, NT2NE2011823, NT2NE2011896, NT2NE2011998, NT2NE2012113, NT2NE2012199, NT2NE2012243, NT2NE2012361, NT2NE2012448, NT2NE2012457, NT2NE2012493, NT2NE2012505, NT2NE2012533, NT2NE2012603, NT2NE2012747, NT2NE2012790, NT2NE2012847, NT2NE2012928, NT2NE2013019, NT2NE2013081, NT2NE2013189, NT2NE2013217, NT2NE2013547, NT2NE2014013, NT2NE2014028, NT2NE2014113, NT2NE2014176, NT2NE2014221, NT2NE2014525, NT2NE2014650, NT2NE2014651, NT2NE2014681, NT2NE2014758, NT2NE2014869, NT2NE2014950, NT2NE2015061, NT2NE2015262, NT2NE2015275, NT2NE2015362, NT2NE2015480, NT2NE2015511, NT2NE2015565, NT2NE2015626, NT2NE2015747, NT2NE2015860, NT2NE2015885, NT2NE2015904, NT2NE2015974, NT2NE2016041, NT2NE2016387, NT2NE2016419, NT2NE2016519, NT2NE2016608, NT2NE2016766, NT2NE2016774, NT2NE2016971, NT2NE2017259, NT2NE2017332, NT2NE2017397, NT2NE2017480, NT2NE2017492, NT2NE2017508, NT2NE2017562, NT2NE2017590, NT2NE2017612, NT2NE2017721, NT2NE2017752, NT2NE2017792, NT2NE2017982, NT2NE2018165, NT2NE2018176, NT2NE2018180, NT2NE2018273, NT2NE2018376, NT2NE2018472, NT2NE2018490, NT2NE2018594, NT2NE2018739, NT2NE2018916, NT2NE2019056, NT2NE2019076, NT2NE2019091, NT2NE2019099, NT2RI1000016, NT2RI1000027, NT2RI1000127, NT2RI1000164, NT2RI1000172, NT2RI2000004, NT2RI2000007, NT2RI2000107, NT2RI2000116, NT2RI2000117, NT2RI2000128, NT2RI2000133, NT2RI2000167, NT2RI2000173, NT2RI2000187, NT2RI2000255, NT2RI2000263, NT2RI2000270, NT2RI2000276, NT2RI2000294, NT2RI2000313, NT2RI2000341, NT2RI2000344, NT2RI2000348, NT2RI2000412, NT2RI2000421, NT2RI2000480, NT2RI2000575, NT2RI2000588, NT2RI2000597, NT2RI2000669, NT2RI2000685, NT2RI2000688, NT2RI2000689, NT2RI2000704, NT2RI2000738, NT2RI2000775, NT2RI2000822, NT2RI2000829, NT2RI2000841, NT2RI2000865, NT2RI2000932, NT2RI2000987, NT2RI2001010, NT2RI2001017, NT2RI2001030, NT2RI2001083, NT2RI2001091, NT2RI2001167, NT2RI2001178, NT2RI2001230, NT2RI2001235, NT2RI2001244, NT2RI2001307, NT2RI2001409, NT2RI2001410, NT2RI2001422, NT2RI2001425, NT2RI2001449, NT2RI2001450, NT2RI2001474, NT2RI2001519, NT2RI2001595, NT2RI2001621, NT2RI2001624, NT2RI2001657, NT2RI2001726, NT2RI2001731, NT2RI2001769, NT2RI2001782, NT2RI2001836, NT2RI2001846, NT2RI2001859, NT2RI2001866, NT2RI2001910, NT2RI2001952, NT2RI2002022, NT2RI2002041, NT2RI2002120, NT2RI2002153, NT2RI2002179, NT2RI2002243, NT2RI2002252, NT2RI2002260, NT2RI2002266, NT2RI2002270, NT2RI2002334, NT2RI2002359, NT2RI2002391, NT2RI2002447, NT2RI2002481, NT2RI2002507, NT2RI2002517, NT2RI2002530, NT2RI2002540, NT2RI2002549, NT2RI2002554, NT2RI2002564, NT2RI2002585, NT2RI2002592, NT2RI2002602, NT2RI2002699, NT2RI2002729, NT2RI2002802, NT2RI2002819, NT2RI2002847, NT2RI2002852, NT2RI2002865, NT2RI2002923, NT2RI2002926, NT2RI2002970, NT2RI2003011, NT2RI2003019, NT2RI2003067, NT2RI2003184, NT2RI2003205, NT2RI2003222, NT2RI2003301, NT2RI2003317, NT2RI2003344, NT2RI2003360, NT2RI2003361, NT2RI2003383, NT2RI2003392, NT2RI2003399, NT2RI2003419, NT2RI2003481, NT2RI2003487, NT2RI2003655, NT2RI2003667, NT2RI2003695, NT2RI2003884, NT2RI2003921, NT2RI2003973, NT2RI2004059, NT2RI2004078, NT2RI2004079, NT2RI2004093, NT2RI2004136, NT2RI2004157, NT2RI2004188, NT2RI2004190, NT2RI2004209, NT2RI2004284, NT2RI2004290, NT2RI2004304, NT2RI2004312, NT2RI2004381, NT2RI2004398, NT2RI2004410, NT2RI2004442, NT2RI2004468, NT2RI2004606, NT2RI2004608, NT2RI2004618, NT2RI2004783, NT2RI2004818, NT2RI2004840, NT2RI2004916, NT2RI2004962, NT2RI2004984, NT2RI2004985, NT2RI2005048, NT2RI2005061, NT2RI2005069, NT2RI2005087, NT2RI2005096, NT2RI2005115, NT2RI2005116, NT2RI2005130, NT2RI2005150, NT2RI2005166, NT2RI2005239, NT2RI2005246, NT2RI2005315, NT2RI2005358, NT2RI2005368, NT2RI2005382, NT2RI2005473, NT2RI2005520, NT2RI2005564, NT2RI2005579, NT2RI2005621, NT2RI2005628, NT2RI2005647, NT2RI2005670, NT2RI2005713, NT2RI2005772, NT2RI2005811, NT2RI2005816, NT2RI2005851, NT2RI2005966, NT2RI2006070, NT2RI2006071, NT2RI2006081, NT2RI2006126, NT2RI2006127, NT2RI2006183, NT2RI2006257, NT2RI2006271, NT2RI2006294, NT2RI2006345, NT2RI2006403, NT2RI2006412, NT2RI2006445, NT2RI2006487, NT2RI2006506, NT2RI2006553, NT2RI2006565, NT2RI2006640, NT2RI2006647, NT2RI2006659, NT2RI2006662, NT2RI2006667, NT2RI2006679, NT2RI2006682, NT2RI2006686, NT2RI2006703, NT2RI2006716, NT2RI2006735, NT2RI2006762, NT2RI2006788, NT2RI2006825, NT2RI2006838, NT2RI2006853, NT2RI2006855, NT2RI2006856, NT2RI2006943, NT2RI2006973, NT2RI2007046, NT2RI2007048, NT2RI2007096, NT2RI2007116, NT2RI2007133, NT2RI2007148, NT2RI2007214, NT2RI2007277, NT2RI2007303, NT2RI2007334, NT2RI2007377, NT2RI2007386, NT2RI2007406, NT2RI2007439, NT2RI2007468, NT2RI2007469, NT2RI2007498, NT2RI2007507, NT2RI2007589, NT2RI2007723, NT2RI2007729, NT2RI2007751, NT2RI2007754, NT2RI2007827, NT2RI2007853, NT2RI2007877, NT2RI2007884, NT2RI2007891, NT2RI2007956, NT2RI2007965, NT2RI2007987, NT2RI2008007, NT2RI2008050, NT2RI2008171, NT2RI2008188, NT2RI2008204, NT2RI2008221, NT2RI2008336, NT2RI2008455, NT2RI2008481, NT2RI2008502, NT2RI2008566, NT2RI2008622, NT2RI2008714, NT2RI2008801, NT2RI2008808, NT2RI2008812, NT2RI2008841, NT2RI2008942, NT2RI2008952, NT2RI2009005, NT2RI2009037, NT2RI2009065, NT2RI2009066, NT2RI2009083, NT2RI2009101, NT2RI2009103, NT2RI2009144, NT2RI2009151, NT2RI2009173, NT2RI2009215, NT2RI2009239, NT2RI2009259, NT2RI2009281, NT2RI2009289, NT2RI2009301, NT2RI2009402, NT2RI2009406, NT2RI2009517, NT2RI2009585, NT2RI2009595, NT2RI2009855, NT2RI2010283, NT2RI2010508, NT2RI2010795, NT2RI2011422, NT2RI2011450, NT2RI2011683, NT2RI2011803, NT2RI2012659, NT2RI2012726, NT2RI2012990, NT2RI2013345, NT2RI2013357, NT2RI2013373, NT2RI2014247, NT2RI2014551, NT2RI2014683, NT2RI2014733, NT2RI2015239, NT2RI2015342, NT2RI2015533, NT2RI2016128, NT2RI2016134, NT2RI2017529, NT2RI2018311, NT2RI2018363, NT2RI2018448, NT2RI2018883, NT2RI2018950, NT2RI2019751, NT2RI2019826, NT2RI2020390, NT2RI2020703, NT2RI2021463, NT2RI2021625, NT2RI2022468, NT2RI2022584, NT2RI2023303, NT2RI2023671, NT2RI2024008, NT2RI2024313, NT2RI2024460, NT2RI2024496, NT2RI2024935, NT2RI2025075, NT2RI2025255, NT2RI2025564, NT2RI2025565, NT2RI2025909, NT2RI2025957, NT2RI2025976, NT2RI2026758, NT2RI2027081, NT2RI2027157, NT2RI2027224, NT2RI2027323, NT2RI2027396, NT2RI2027484, NT2RI2027975, NT2RI2028213, NT2RI2028222, NT2RI2028537, NT2RI2028642, NT2RI3000174, NT2RI3000213, NT2RI3000423, NT2RI3000622, NT2RI3001132, NT2RI3001263, NT2RI3001279, NT2RI3001348, NT2RI3001445, NT2RI3001458, NT2RI3001515, NT2RI3001573, NT2RI3001967, NT2RI3002303, NT2RI3002557, NT2RI3002842, NT2RI3003027, NT2RI3003031, NT2RI3003095, NT2RI3003104, NT2RI3003162, NT2RI3003362, NT2RI3003382, NT2RI3003409, NT2RI3003738, NT2RI3003925, NT2RI3004133, NT2RI3004381, NT2RI3004510, NT2RI3005202, NT2RI3005403, NT2RI3005416, NT2RI3005724, NT2RI3005861, NT2RI3005923, NT2RI3005928, NT2RI3006132, NT2RI3006171, NT2RI3006284, NT2RI3006340, NT2RI3006376, NT2RI3006666, NT2RI3006673, NT2RI3006796, NT2RI3007065, NT2RI3007095, NT2RI3007158, NT2RI3007167, NT2RI3007213, NT2RI3007291, NT2RI3007443, NT2RI3007684, NT2RI3007757, NT2RI3007878, NT2RI3007978, NT2RI3008055, NT2RI3008162, NT2RI3008179, NT2RI3008228, NT2RI3008442, NT2RI3008652, NT2RI3008697, NT2RI3008974, NT2RI3009158, NT2RI3009480, NT2RI3009524, NT2RP6000005, NT2RP6000008, NT2RP6000017, NT2RP6000032, NT2RP6000033, NT2RP6000039, NT2RP6000043, NT2RP6000059, NT2RP6000060, NT2RP6000072, NT2RP6000077, NT2RP6000078, NT2RP6000085, NT2RP6000086, NT2RP6000100, NT2RP6000109, NT2RP6000110, NT2RP6000119, NT2RP6000127, NT2RP6000130, NT2RP6000140, NT2RP6000150, NT2RP7000041, NT2RP7000069, NT2RP7000076, NT2RP7000086, NT2RP7000109, NT2RP7000112, NT2RP7000173, NT2RP7000238, NT2RP7000259, NT2RP7000271, NT2RP7000311, NT2RP7000359, NT2RP7000364, NT2RP7000380, NT2RP7000391, NT2RP7000425, NT2RP7000477, NT2RP7000579, NT2RP7000586, NT2RP7000600, NT2RP7000624, NT2RP7000812, NT2RP7000926, NT2RP7001074, NT2RP7001080, NT2RP7001156, NT2RP7001166, NT2RP7001231, NT2RP7001283, NT2RP7001306, NT2RP7001319, NT2RP7001335, NT2RP7001364, NT2RP7001475, NT2RP7001532, NT2RP7001591, NT2RP7001602, NT2RP7001678, NT2RP7001856, NT2RP7001962, NT2RP7002064, NT2RP7002151, NT2RP7002163, NT2RP7002243, NT2RP7002282, NT2RP7002376, NT2RP7002379, NT2RP7002449, NT2RP7002450, NT2RP7002478, NT2RP7002554, NT2RP7002594, NT2RP7002603, NT2RP7002619, NT2RP7002650, NT2RP7002738, NT2RP7002779, NT2RP7002802, NT2RP7002829, NT2RP7002841, NT2RP7002875, NT2RP7002906, NT2RP7002978, NT2RP7002982, NT2RP7003025, NT2RP7003050, NT2RP7003055, NT2RP7003084, NT2RP7003091, NT2RP7003107, NT2RP7003134, NT2RP7003148, NT2RP7003203, NT2RP7003261, NT2RP7003439, NT2RP7003511, NT2RP7003629, NT2RP7003647, NT2RP7003680, NT2RP7003688, NT2RP7003724, NT2RP7004027, NT2RP7004080, NT2RP7004114, NT2RP7004196, NT2RP7004233, NT2RP7004260, NT2RP7004348, NT2RP7004352, NT2RP7004358, NT2RP7004396, NT2RP7004481, NT2RP7004541, NT2RP7004559, NT2RP7004641, NT2RP7004656, NT2RP7004687, NT2RP7004722, NT2RP7004766, NT2RP7004884, NT2RP7004911, NT2RP7004915, NT2RP7004925, NT2RP7004961, NT2RP7004964, NT2RP7004975, NT2RP7005118, NT2RP7005205, NT2RP7005219, NT2RP7005323, NT2RP7005468, NT2RP7005493, NT2RP7005513, NT2RP7005529, NT2RP7005629, NT2RP7005631, NT2RP7005669, NT2RP7005675, NT2RP7005750, NT2RP7005846, NT2RP7006033, NT2RP7006160, NT2RP7006162, NT2RP7006188, NT2RP7006223, NT2RP7006296, NT2RP7006304, NT2RP7006374, NT2RP7006395, NT2RP7006408, NT2RP7006457, NT2RP7006490, NT2RP7006539, NT2RP7006547, NT2RP7006601, NT2RP7006621, NT2RP7006636, NT2RP7006701, NT2RP7006853, NT2RP7006886, NT2RP7006887, NT2RP7006980, NT2RP7006995, NT2RP7007114, NT2RP7007221, NT2RP7007226, NT2RP7007252, NT2RP7007269, NT2RP7007310, NT2RP7007359, NT2RP7007381, NT2RP7007406, NT2RP7007480, NT2RP7007504, NT2RP7007530, NT2RP7007537, NT2RP7007580, NT2RP7007594, NT2RP7007610, NT2RP7007617, NT2RP7007643, NT2RP7007766, NT2RP7007842, NT2RP7007925, NT2RP7007930, NT2RP7007975, NT2RP7008013, NT2RP7008015, NT2RP7008133, NT2RP7008137, NT2RP7008142, NT2RP7008144, NT2RP7008161, NT2RP7008167, NT2RP7008315, NT2RP7008360, NT2RP7008396, NT2RP7008406, NT2RP7008435, NT2RP7008441, NT2RP7008454, NT2RP7008487, NT2RP7008543, NT2RP7008544, NT2RP7008550, NT2RP7008557, NT2RP7008623, NT2RP7008657, NT2RP7008714, NT2RP7008720, NT2RP7008855, NT2RP7008863, NT2RP7009012, NT2RP7009019, NT2RP7009030, NT2RP7009087, NT2RP7009108, NT2RP7009147, NT2RP7009149, NT2RP7009168, NT2RP7009215, NT2RP7009225, NT2RP7009236, NT2RP7009253, NT2RP7009267, NT2RP7009322, NT2RP7009363, NT2RP7009370, NT2RP7009373, NT2RP7009394, NT2RP7009397, NT2RP7009429, NT2RP7009439, NT2RP7009466, NT2RP7009482, NT2RP7009498, NT2RP7009502, NT2RP7009507, NT2RP7009577, NT2RP7009743, NT2RP7009867, NT2RP7010109, NT2RP7010128, NT2RP7010235, NT2RP7010275, NT2RP7010521, NT2RP7010599, NT2RP7010612, NT2RP7010817, NT2RP7011086, NT2RP7011132, NT2RP7011268, NT2RP7011318, NT2RP7011452, NT2RP7011570, NT2RP7011721, NT2RP7011909, NT2RP7012291, NT2RP7012516, NT2RP7012776, NT2RP7013002, NT2RP7013374, NT2RP7013499, NT2RP7013573, NT2RP7013729, NT2RP7013764, NT2RP7013795, NT2RP7013999, NT2RP7014005, NT2RP7014178, NT2RP7014348, NT2RP7014420, NT2RP7014583, NT2RP7014721, NT2RP7014743, NT2RP7014778, NT2RP7014906, NT2RP7015080, NT2RP7015431, NT2RP7015503, NT2RP7015676, NT2RP7015789, NT2RP7015996, NT2RP7016508, NT2RP7016574, NT2RP7016622, NT2RP7016911, NT2RP7017139, NT2RP7017284, NT2RP7017365, NT2RP7017474, NT2RP7017546, NT2RP7017567, NT2RP7017795, NT2RP7017971, NT2RP7018032, NT2RP7018126, NT2RP7018197, NT2RP7018206, NT2RP7018340, NT2RP7018586, NT2RP7018802, NT2RP7018871, NT2RP7019064, NT2RP7019135, NT2RP7019273, NT2RP7019367, NT2RP7019401, NT2RP7019445, NT2RP7019543, NT2RP7019682, NT2RP7020112, NT2RP7020123, NT2RP7020343, NT2RP7020379, NT2RP8000137, NT2RP8000296, NT2RP8000435, NT2RP8000483, NT2RP8000521, NT2RP8000633, NT2RP8001363, NT2RP8001407, NT2RP8001584, NT2RP8001605, NT2RP8003490, NT2RP8003657, NT2RP8003787, NT2RP8004306, NT2RP8005546, NT2RP8006452, NT2RP8006521, NT2RP8007416, NT2RP8007503, NT2RP8007715, NT2RP8007920, NT2RP8008057, NT2RP8009248, NTONG1000006, NTONG1000033, NTONG1000052, NTONG1000075, NTONG1000087, NTONG1000123, NTONG1000130, NTONG1000161, NTONG1000172, NTONG1000182, NTONG1000213, NTONG1000214, NTONG1000246, NTONG1000247, NTONG1000257, NTONG1000264, NTONG2000040, NTONG2000107, NTONG2000231, NTONG2000265, NTONG2000334, NTONG2000363, NTONG2000413, NTONG2000492, NTONG2000531, NTONG2000583, NTONG2000800, NTONG2000858, NTONG2000878, NTONG2000966, NTONG2000985, NTONG2001014, NTONG2001079, NTONG2001137, NTONG2001157, NTONG2001173, NTONG2001220, NTONG2001222, NTONG2001362, NTONG2001428, NTONG2001532, NTONG2001587, NTONG2001612, NTONG2001619, NTONG2001642, NTONG2001657, NTONG2001676, NTONG2001762, NTONG2002278, NTONG2002582, NTONG2002807, NTONG2002948, NTONG2002970, NTONG2002985, NTONG2003158, NTONG2003210, NTONG2003316, NTONG2003409, NTONG2003454, NTONG2003515, NTONG2003805, NTONG2003852, NTONG2003897, NTONG2003928, NTONG2004095, NTONG2004308, NTONG2004521, NTONG2004690, NTONG2004806, NTONG2004829, NTONG2004844, NTONG2004918, NTONG2004991, NTONG2005062, NTONG2005086, NTONG2005137, NTONG2005153, NTONG2005265, NTONG2005277, NTONG2005363, NTONG2005373, NTONG2005391, NTONG2005480, NTONG2005497, NTONG2005520, NTONG2005577, NTONG2005657, NTONG2005801, NTONG2005822, NTONG2005897, NTONG2005969, NTONG2006099, NTONG2006187, NTONG2006301, NTONG2006324, NTONG2006354, NTONG2006440, NTONG2006484, NTONG2006501, NTONG2006646, NTONG2006709, NTONG2006783, NTONG2007020, NTONG2007028, NTONG2007034, NTONG2007249, NTONG2007517, NTONG2007522, NTONG2007658, NTONG2007693, NTONG2007756, NTONG2008088, NTONG2008093, NTONG2008143, NTONG2008365, NTONG2008522, NTONG2008672, NTONG2008862, NTONG2008939, NTONG2008944, NTONG2009060, NTONG2009068, NTONG2009229, NTONG2009233, NTONG2009468, NTONG2009576, OCBBF1000016, OCBBF1000030, OCBBF1000042, OCBBF1000049, OCBBF1000054, OCBBF1000067, OCBBF1000080, OCBBF1000085, OCBBF1000086, OCBBF1000091, OCBBF1000104, OCBBF1000118, OCBBF1000119, OCBBF1000122, OCBBF1000130, OCBBF1000138, OCBBF1000145, OCBBF1000146, OCBBF1000153, OCBBF1000175, OCBBF1000185, OCBBF1000188, OCBBF1000192, OCBBF1000254, OCBBF1000315, OCBBF2000015, OCBBF2000126, OCBBF2000178, OCBBF2000231, OCBBF2000277, OCBBF2000287, OCBBF2000323, OCBBF2000452, OCBBF2000467, OCBBF2000677, OCBBF2000703, OCBBF2000712, OCBBF2000719, OCBBF2000824, OCBBF2000831, OCBBF2000904, OCBBF2000982, OCBBF2000986, OCBBF2000998, OCBBF2001075, OCBBF2001101, OCBBF2001124, OCBBF2001140, OCBBF2001166, OCBBF2001176, OCBBF2001186, OCBBF2001196, OCBBF2001210, OCBBF2001252, OCBBF2001307, OCBBF2001323, OCBBF2001389, OCBBF2001402, OCBBF2001408, OCBBF2001416, OCBBF2001473, OCBBF2001494, OCBBF2001527, OCBBF2001528, OCBBF2001586, OCBBF2001639, OCBBF2001681, OCBBF2001687, OCBBF2001706, OCBBF2001749, OCBBF2001794, OCBBF2001910, OCBBF2001931, OCBBF2001961, OCBBF2001983, OCBBF2002015, OCBBF2002083, OCBBF2002086, OCBBF2002124, OCBBF2002161, OCBBF2002290, OCBBF2002357, OCBBF2002376, OCBBF2002615, OCBBF2002626, OCBBF2002656, OCBBF2002663, OCBBF2002805, OCBBF2002865, OCBBF2002920, OCBBF2002980, OCBBF2003028, OCBBF2003052, OCBBF2003091, OCBBF2003246, OCBBF2003327, OCBBF2003518, OCBBF2003543, OCBBF2003593, OCBBF2003744, OCBBF2003819, OCBBF2003925, OCBBF2004038, OCBBF2004104, OCBBF2004147, OCBBF2004168, OCBBF2004235, OCBBF2004259, OCBBF2004273, OCBBF2004385, OCBBF2004478, OCBBF2004482, OCBBF2004533, OCBBF2004567, OCBBF2004612, OCBBF2004647, OCBBF2004669, OCBBF2004757, OCBBF2004826, OCBBF2004866, OCBBF2004883, OCBBF2004889, OCBBF2004930, OCBBF2004984, OCBBF2005066, OCBBF2005077, OCBBF2005161, OCBBF2005343, OCBBF2005349, OCBBF2005373, OCBBF2005420, OCBBF2005428, OCBBF2005433, OCBBF2005546, OCBBF2005843, OCBBF2005901, OCBBF2005956, OCBBF2006005, OCBBF2006030, OCBBF2006058, OCBBF2006113, OCBBF2006148, OCBBF2006151, OCBBF2006154, OCBBF2006172, OCBBF2006214, OCBBF2006241, OCBBF2006313, OCBBF2006388, OCBBF2006438, OCBBF2006567, OCBBF2006624, OCBBF2006639, OCBBF2006660, OCBBF2006764, OCBBF2006849, OCBBF2006859, OCBBF2006972, OCBBF2006987, OCBBF2007028, OCBBF2007039, OCBBF2007051, OCBBF2007068, OCBBF2007114, OCBBF2007121, OCBBF2007184, OCBBF2007194, OCBBF2007196, OCBBF2007224, OCBBF2007238, OCBBF2007414, OCBBF2007415, OCBBF2007428, OCBBF2007478, OCBBF2007485, OCBBF2007520, OCBBF2007555, OCBBF2007610, OCBBF2007622, OCBBF2007756, OCBBF2007762, OCBBF2007931, OCBBF2007946, OCBBF2008005, OCBBF2008041, OCBBF2008116, OCBBF2008138, OCBBF2008144, OCBBF2008283, OCBBF2008330, OCBBF2008340, OCBBF2008366, OCBBF2008466, OCBBF2008483, OCBBF2008511, OCBBF2008520, OCBBF2008569, OCBBF2008586, OCBBF2008640, OCBBF2008691, OCBBF2008701, OCBBF2008724, OCBBF2008760, OCBBF2008768, OCBBF2008770, OCBBF2008775, OCBBF2008790, OCBBF2008814, OCBBF2008822, OCBBF2009095, OCBBF2009115, OCBBF2009242, OCBBF2009352, OCBBF2009391, OCBBF2009424, OCBBF2009536, OCBBF2009571, OCBBF2009583, OCBBF2009603, OCBBF2009788, OCBBF2009836, OCBBF2009920, OCBBF2009926, OCBBF2010040, OCBBF2010140, OCBBF2010281, OCBBF2010313, OCBBF2010404, OCBBF2010416, OCBBF2010420, OCBBF2010557, OCBBF2010604, OCBBF2010709, OCBBF2010792, OCBBF2010819, OCBBF2010830, OCBBF2010841, OCBBF2010843, OCBBF2010858, OCBBF2010863, OCBBF2010871, OCBBF2010931, OCBBF2010945, OCBBF2010978, OCBBF2010989, OCBBF2011021, OCBBF2011073, OCBBF2011137, OCBBF2011160, OCBBF2011177, OCBBF2011228, OCBBF2011232, OCBBF2011283, OCBBF2011311, OCBBF2011536, OCBBF2011625, OCBBF2011669, OCBBF2011685, OCBBF2011706, OCBBF2011722, OCBBF2011759, OCBBF2011767, OCBBF2011855, OCBBF2011872, OCBBF2011887, OCBBF2011897, OCBBF2011960, OCBBF2011981, OCBBF2012001, OCBBF2012028, OCBBF2012039, OCBBF2012095, OCBBF2012139, OCBBF2012191, OCBBF2012262, OCBBF2012320, OCBBF2012436, OCBBF2012525, OCBBF2012553, OCBBF2012678, OCBBF2012704, OCBBF2012714, OCBBF2012755, OCBBF2012812, OCBBF2012821, OCBBF2012881, OCBBF2012908, OCBBF2012936, OCBBF2012990, OCBBF2013011, OCBBF2013049, OCBBF2013091, OCBBF2013123, OCBBF2013127, OCBBF2013149, OCBBF2013208, OCBBF2013285, OCBBF2013319, OCBBF2013324, OCBBF2013366, OCBBF2013481, OCBBF2013507, OCBBF2013721, OCBBF2013789, OCBBF2013843, OCBBF2013883, OCBBF2013926, OCBBF2014052, OCBBF2014089, OCBBF2014322, OCBBF2014386, OCBBF2014541, OCBBF2014576, OCBBF2014707, OCBBF2014745, OCBBF2014828, OCBBF2014873, OCBBF2014880, OCBBF2014928, OCBBF2015031, OCBBF2015081, OCBBF2015115, OCBBF2015232, OCBBF2015233, OCBBF2015285, OCBBF2015334, OCBBF2015335, OCBBF2015503, OCBBF2015506, OCBBF2015599, OCBBF2015645, OCBBF2015659, OCBBF2015751, OCBBF2015797, OCBBF2015931, OCBBF2015980, OCBBF2016038, OCBBF2016405, OCBBF2016467, OCBBF2016590, OCBBF2016591, OCBBF2016612, OCBBF2016689, OCBBF2016690, OCBBF2016841, OCBBF2016928, OCBBF2017035, OCBBF2017055, OCBBF2017069, OCBBF2017306, OCBBF2017325, OCBBF2017398, OCBBF2017458, OCBBF2017489, OCBBF2017516, OCBBF2017665, OCBBF2017754, OCBBF2017791, OCBBF2017815, OCBBF2017882, OCBBF2017888, OCBBF2017893, OCBBF2017920, OCBBF2018012, OCBBF2018014, OCBBF2018084, OCBBF2018167, OCBBF2018206, OCBBF2018229, OCBBF2018234, OCBBF2018362, OCBBF2018380, OCBBF2018563, OCBBF2018581, OCBBF2018618, OCBBF2018663, OCBBF2018687, OCBBF2018827, OCBBF2018828, OCBBF2018873, OCBBF2018934, OCBBF2019108, OCBBF2019195, OCBBF2019327, OCBBF2019684, OCBBF2019761, OCBBF2019823, OCBBF2019950, OCBBF2020048, OCBBF2020318, OCBBF2020343, OCBBF2020453, OCBBF2020741, OCBBF2020801, OCBBF2020825, OCBBF2020838, OCBBF2021020, OCBBF2021214, OCBBF2021286, OCBBF2021323, OCBBF2021518, OCBBF2021788, OCBBF2021833, OCBBF2022351, OCBBF2022573, OCBBF2022574, OCBBF2023162, OCBBF2023598, OCBBF2023643, OCBBF2024463, OCBBF2024589, OCBBF2024719, OCBBF2024779, OCBBF2024781, OCBBF2024850, OCBBF2025028, OCBBF2025115, OCBBF2025198, OCBBF2025451, OCBBF2025458, OCBBF2025527, OCBBF2025631, OCBBF2025730, OCBBF2026025, OCBBF2026035, OCBBF2026144, OCBBF2026368, OCBBF2026645, OCBBF2026649, OCBBF2026690, OCBBF2026981, OCBBF2027148, OCBBF2027197, OCBBF2027354, OCBBF2027423, OCBBF2027478, OCBBF2027481, OCBBF2027511, OCBBF2027661, OCBBF2027728, OCBBF2027782, OCBBF2027868, OCBBF2028055, OCBBF2028173, OCBBF2028421, OCBBF2029471, OCBBF2029901, OCBBF2030116, OCBBF2030329, OCBBF2030354, OCBBF2030517, OCBBF2030574, OCBBF2030708, OCBBF2030927, OCBBF2030963, OCBBF2031167, OCBBF2031198, OCBBF2031366, OCBBF2031561, OCBBF2032152, OCBBF2032274, OCBBF2032539, OCBBF2032590, OCBBF2032599, OCBBF2032611, OCBBF2032671, OCBBF2033295, OCBBF2033413, OCBBF2033869, OCBBF2033948, OCBBF2034333, OCBBF2034529, OCBBF2034637, OCBBF2034906, OCBBF2035110, OCBBF2035214, OCBBF2035390, OCBBF2035564, OCBBF2035658, OCBBF2035823, OCBBF2035885, OCBBF2035916, OCBBF2036019, OCBBF2036031, OCBBF2036225, OCBBF2036476, OCBBF2036743, OCBBF2036752, OCBBF2037068, OCBBF2037340, OCBBF2037398, OCBBF2037464, OCBBF2037547, OCBBF2037598, OCBBF2037638, OCBBF2038238, OCBBF2038285, OCBBF3000097, OCBBF3000213, OCBBF3000296, OCBBF3000323, OCBBF3000372, OCBBF3000380, OCBBF3000743, OCBBF3000830, OCBBF3001076, OCBBF3001202, OCBBF3001333, OCBBF3001616, OCBBF3002553, OCBBF3002600, OCBBF3002654, OCBBF3003103, OCBBF3003209, OCBBF3003592, OCBBF3003745, OCBBF3003761, OCBBF3004264, OCBBF3004314, OCBBF3004487, OCBBF3004972, OCBBF3005330, OCBBF3005597, OCBBF3005843, OCBBF3006802, OCBBF3006986, OCBBF3007078, OCBBF3007704, OCBBF3008230, OCBBF3008392, OCBBF3008835, OCBBF3009192, OCBBF3009244, OCBBF3009279, PANCR1000012, PANCR1000021, PANCR1000081, PANCR1000086, PANCR1000091, PANCR1000185, PEBLM1000024, PEBLM1000029, PEBLM1000034, PEBLM1000062, PEBLM1000066, PEBLM1000068, PEBLM1000071, PEBLM1000083, PEBLM1000144, PEBLM1000147, PEBLM1000174, PEBLM1000180, PEBLM2000030, PEBLM2000112, PEBLM2000126, PEBLM2000170, PEBLM2000180, PEBLM2000213, PEBLM2000222, PEBLM2000248, PEBLM2000267, PEBLM2000270, PEBLM2000321, PEBLM2000326, PEBLM2000333, PEBLM2000338, PEBLM2000479, PEBLM2000502, PEBLM2001072, PEBLM2001312, PEBLM2001465, PEBLM2001488, PEBLM2001803, PEBLM2002432, PEBLM2002455, PEBLM2002594, PEBLM2002749, PEBLM2002887, PEBLM2003426, PEBLM2003765, PEBLM2003914, PEBLM2003935, PEBLM2004015, PEBLM2004216, PEBLM2004290, PEBLM2004452, PEBLM2004497, PEBLM2004666, PEBLM2004733, PEBLM2005282, PEBLM2005615, PEBLM2005632, PEBLM2005697, PEBLM2006031, PEBLM2006036, PEBLM2006049, PEBLM2006113, PEBLM2006135, PEBLM2006215, PEBLM2006283, PEBLM2006298, PEBLM2006366, PEBLM2006709, PEBLM2006912, PEBLM2007112, PEBLM2007140, PEBLM2007188, PEBLM2007296, PEBLM2007437, PEBLM2007447, PEBLM2007598, PEBLM2007832, PEBLM2007834, PEBLM2008106, PEBLM2008576, PEBLM2008605, PEBLM2008826, PEBLM2008861, PERIC1000025, PERIC1000147, PERIC2000180, PERIC2000214, PERIC2000386, PERIC2000387, PERIC2000422, PERIC2000473, PERIC2000478, PERIC2000889, PERIC2000914, PERIC2001227, PERIC2001228, PERIC2001379, PERIC2001504, PERIC2001703, PERIC2001764, PERIC2002243, PERIC2002272, PERIC2002452, PERIC2002766, PERIC2003001, PERIC2003090, PERIC2003287, PERIC2003349, PERIC2003452, PERIC2003699, PERIC2003720, PERIC2003794, PERIC2003834, PERIC2003919, PERIC2003957, PERIC2004028, PERIC2004131, PERIC2004259, PERIC2004379, PERIC2004429, PERIC2004510, PERIC2004613, PERIC2004909, PERIC2005111, PERIC2005117, PERIC2005305, PERIC2005347, PERIC2005-370, PERIC2005936, PERIC2006035, PERIC2006121, PERIC2006443, PERIC2006945, PERIC2006960, PERIC2007439, PERIC2007914, PERIC2008008, PERIC2008385, PERIC2009001, PERIC2009086, PERIC2009329, PERIC2009566, PLACE5000001, PLACE5000013, PLACE5000037, PLACE5000058, PLACE5000066, PLACE5000067, PLACE5000068, PLACE5000070, PLACE5000080, PLACE5000105, PLACE5000113, PLACE5000115, PLACE5000116, PLACE5000129, PLACE5000139, PLACE5000153, PLACE5000159, PLACE5000170, PLACE5000171, PLACE5000172, PLACE5000178, PLACE5000245, PLACE5000260, PLACE5000282, PLACE5000297, PLACE5000372, PLACE5000492, PLACE5000522, PLACE5000527, PLACE6000012, PLACE6000044, PLACE6000055, PLACE6000070, PLACE6000137, PLACE6000191, PLACE6000205, PLACE6000231, PLACE6000296, PLACE6000314, PLACE6000325, PLACE6000371, PLACE6000414, PLACE6000424, PLACE6000426, PLACE6000429, PLACE6000450, PLACE6000463, PLACE6000523, PLACE6000550, PLACE6000552, PLACE6000555, PLACE6000619, PLACE6000630, PLACE6000953, PLACE6001118, PLACE6001153, PLACE6001185, PLACE6001262, PLACE6001281, PLACE6001294, PLACE6001443, PLACE6001536, PLACE6001557, PLACE6001712, PLACE6001740, PLACE6001823, PLACE6001886, PLACE6001925, PLACE6001933, PLACE6002011, PLACE6002016, PLACE6002056, PLACE6002102, PLACE6002157, PLACE6002312, PLACE6002323, PLACE6002345, PLACE6002419, PLACE6002462, PLACE6002647, PLACE6002692, PLACE6002699, PLACE6002710, PLACE6002871, PLACE6002949, PLACE6002960, PLACE6003004, PLACE6003038, PLACE6003077, PLACE6003094, PLACE6003109, PLACE6003204, PLACE6003218, PLACE6003372, PLACE6003383, PLACE6003393, PLACE6003399, PLACE6003539, PLACE6003621, PLACE6003705, PLACE6003740, PLACE6003745, PLACE6003771, PLACE6003796, PLACE6003839, PLACE6003850, PLACE6004101, PLACE6004219, PLACE6004312, PLACE6004336, PLACE6004368, PLACE6004380, PLACE6004396, PLACE6004397, PLACE6004454, PLACE6004464, PLACE6004491, PLACE6004663, PLACE6004687, PLACE6004738, PLACE6004931, PLACE6004966, PLACE6005007, PLACE6005029, PLACE6005108, PLACE6005231, PLACE6005234, PLACE6005283, PLACE6005294, PLACE6005328, PLACE6005351, PLACE6005423, PLACE6005482, PLACE6005487, PLACE6005535, PLACE6005546, PLACE6005559, PLACE6005579, PLACE6005691, PLACE6005786, PLACE6006077, PLACE6006137, PLACE6006158, PLACE6006186, PLACE6006217, PLACE6006222, PLACE6006266, PLACE6006287, PLACE6006394, PLACE6006418, PLACE6006474, PLACE6006566, PLACE6006697, PLACE6006822, PLACE6006871, PLACE6006905, PLACE6006988, PLACE6007050, PLACE6007180, PLACE6007239, PLACE6007242, PLACE6007309, PLACE6007373, PLACE6007380, PLACE6007433, PLACE6007436, PLACE6007482, PLACE6007687, PLACE6007787, PLACE6007798, PLACE6007807, PLACE6008036, PLACE6008094, PLACE6008126, PLACE6008285, PLACE6008444, PLACE6008453, PLACE6008640, PLACE6008750, PLACE6008768, PLACE6008775, PLACE6008824, PLACE6008989, PLACE6009006, PLACE6009008, PLACE6009228, PLACE6009237, PLACE6009338, PLACE6009419, PLACE6009430, PLACE6009482, PLACE6009524, PLACE6009527, PLACE6009560, PLACE6009590, PLACE6009821, PLACE6009835, PLACE6009853, PLACE6010463, PLACE6010484, PLACE6010485, PLACE6010568, PLACE6010701, PLACE6010704, PLACE6010732, PLACE6010765, PLACE6010848, PLACE6010925, PLACE6010936, PLACE6010991, PLACE6011041, PLACE6011057, PLACE6011102, PLACE6011156, PLACE6011211, PLACE6011260, PLACE6011334, PLACE6011627, PLACE6011774, PLACE6011881, PLACE6011907, PLACE6011970, PLACE6011975, PLACE6012028, PLACE6012108, PLACE6012168, PLACE6012297, PLACE6012308, PLACE6012574, PLACE6012908, PLACE6012936, PLACE6012942, PLACE6013222, PLACE6013232, PLACE6013288, PLACE6013386, PLACE6013400, PLACE6013650, PLACE6013672, PLACE6013883, PLACE6013884, PLACE6013885, PLACE6014043, PLACE6014064, PLACE6014516, PLACE6014882, PLACE6015051, PLACE6015211, PLACE6015322, PLACE6015445, PLACE6015460, PLACE6015513, PLACE6015591, PLACE6015729, PLACE6015731, PLACE6015939, PLACE6016030, PLACE6016093, PLACE6016105, PLACE6016160, PLACE6016210, PLACE6016254, PLACE6016383, PLACE6016942, PLACE6016984, PLACE6017002, PLACE6017431, PLACE6017564, PLACE6017578, PLACE6017626, PLACE6017701, PLACE6017714, PLACE6017788, PLACE6017791, PLACE6018031, PLACE6018107, PLACE6018187, PLACE6018235, PLACE6018287, PLACE6018441, PLACE6018497, PLACE6018769, PLACE6018834, PLACE6018843, PLACE6018863, PLACE6018938, PLACE6019195, PLACE6019385, PLACE6019542, PLACE6019600, PLACE6019674, PLACE6019676, PLACE6019701, PLACE6019932, PLACE6020031, PLACE7000167, PLACE7000170, PLACE7000266, PLACE7000333, PLACE7000410, PLACE7000502, PLACE7000707, PLACE7001022, PLACE7001544, PLACE7001759, PLACE7001936, PLACE7002303, PLACE7002641, PLACE7003639, PLACE7003657, PLACE7003684, PLACE7003985, PLACE7004961, PLACE7005169, PLACE7005671, PLACE7005840, PLACE7006051, PLACE7006090, PLACE7006240, PLACE7006268, PLACE7006275, PLACE7006498, PLACE7006540, PLACE7007379, PLACE7007644, PLACE7007973, PLACE7008136, PLACE7008261, PLACE7008431, PLACE7008623, PLACE7008766, PLACE7009563, PROST1000033, PROST1000039, PROST1000065, PROST1000083, PROST1000097, PROST1000110, PROST1000123, PROST1000136, PROST1000144, PROST1000145, PROST1000152, PROST1000167, PROST1000184, PROST1000199, PROST1000215, PROST1000217, PROST1000220, PROST1000226, PROST1000246, PROST1000262, PROST1000272, PROST1000298, PROST1000322, PROST1000334, PROST1000343, PROST1000362, PROST1000377, PROST1000383, PROST1000412, PROST1000419, PROST1000451, PROST1000480, PROST1000485, PROST1000493, PROST1000512, PROST1000527, PROST1000528, PROST1000536, PROST1000559, PROST1000575, PROST2000036, PROST2000053, PROST2000067, PROST2000079, PROST2000105, PROST2000143, PROST2000162, PROST2000165, PROST2000203, PROST2000206, PROST2000212, PROST2000241, PROST2000267, PROST2000273, PROST2000274, PROST2000277, PROST2000284, PROST2000325, PROST2000337, PROST2000432, PROST2000452, PROST2000463, PROST2000470, PROST2000505, PROST2000567, PROST2000572, PROST2000717, PROST2000761, PROST2000835, PROST2000893, PROST2000961, PROST2001002, PROST2001116, PROST2001138, PROST2001180, PROST2001213, PROST2001283, PROST2001414, PROST2001415, PROST2001465, PROST2001521, PROST2001540, PROST2001552, PROST2001599, PROST2001611, PROST2001636, PROST2001796, PROST2001805, PROST2001823, PROST2001883, PROST2001899, PROST2001997, PROST2001998, PROST2002078, PROST2002101, PROST2002162, PROST2002212, PROST2002227, PROST2002338, PROST2002425, PROST2002488, PROST2002489, PROST2002527, PROST2002591, PROST2002602, PROST2002633, PROST2002651, PROST2002682, PROST2002685, PROST2002722, PROST2002736, PROST2002842, PROST2002897, PROST2002906, PROST2002960, PROST2003102, PROST2003117, PROST2003210, PROST2003302, PROST2003303, PROST2003324, PROST2003338, PROST2003340, PROST2003396, PROST2003428, PROST2003472, PROST2003537, PROST2003563, PROST2003577, PROST2003583, PROST2003586, PROST2003628, PROST2003635, PROST2003674, PROST2003676, PROST2003725, PROST2003732, PROST2003775, PROST2003922, PROST2003930, PROST2004115, PROST2004142, PROST2004146, PROST2004161, PROST2004251, PROST2004258, PROST2004270, PROST2004332, PROST2004416, PROST2004481, PROST2004526, PROST2004570, PROST2004727, PROST2004739, PROST2004742, PROST2004744, PROST2004817, PROST2005039, PROST2005067, PROST2005076, PROST2005093, PROST2005121, PROST2005131, PROST2005143, PROST2005228, PROST2005272, PROST2005285, PROST2005426, PROST2005466, PROST2005604, PROST2005630, PROST2005683, PROST2005788, PROST2005793, PROST2005880, PROST2005886, PROST2005904, PROST2005919, PROST2005943, PROST2006008, PROST2006020, PROST2006030, PROST2006060, PROST2006196, PROST2006201, PROST2006260, PROST2006282, PROST2006343, PROST2006450, PROST2006491, PROST2006510, PROST2006579, PROST2006688, PROST2006766, PROST2006782, PROST2006933, PROST2006988, PROST2007122, PROST2007200, PROST2007237, PROST2007248, PROST2007289, PROST2007317, PROST2007328, PROST2007382, PROST2007389, PROST2007416, PROST2007528, PROST2007818, PROST2007871, PROST2007950, PROST2007956, PROST2007974, PROST2007988, PROST2008079, PROST2008088, PROST2008243, PROST2008245, PROST2008268, PROST2008271, PROST2008360, PROST2008447, PROST2008468, PROST2008472, PROST2008516, PROST2008724, PROST2008835, PROST2008993, PROST2009022, PROST2009208, PROST2009222, PROST2009254, PROST2009273, PROST2009320, PROST2009347, PROST2009365, PROST2009388, PROST2009400, PROST2009470, PROST2009483, PROST2009571, PROST2009731, PROST2009736, PROST2009795, PROST2009901, PROST2009909, PROST2010046, PROST2010219, PROST2010250, PROST2010318, PROST2010326, PROST2010382, PROST2010400, PROST2010545, PROST2010579, PROST2010606, PROST2010782, PROST2010885, PROST2011012, PROST2011038, PROST2011105, PROST2011297, PROST2011410, PROST2011439, PROST2011482, PROST2011577, PROST2011631, PROST2011660, PROST2012005, PROST2012016, PROST2012088, PROST2012140, PROST2012157, PROST2012190, PROST2012249, PROST2012353, PROST2012400, PROST2012448, PROST2012504, PROST2012542, PROST2012550, PROST2012740, PROST2012745, PROST2012780, PROST2012888, PROST2012890, PROST2013032, PROST2013053, PROST2013121, PROST2013260, PROST2013327, PROST2013531, PROST2013605, PROST2013627, PROST2013873, PROST2013880, PROST2014422, PROST2014585, PROST2014601, PROST2014659, PROST2014862, PROST2014916, PROST2014925, PROST2015124, PROST2015137, PROST2015198, PROST2015243, PROST2015246, PROST2015251, PROST2015287, PROST2015332, PROST2015457, PROST2015464, PROST2015537, PROST2015545, PROST2015551, PROST2015636, PROST2015756, PROST2015877, PROST2015900, PROST2015924, PROST2015932, PROST2016195, PROST2016246, PROST2016351, PROST2016379, PROST2016444, PROST2016462, PROST2016499, PROST2016512, PROST2016566, PROST2016582, PROST2016668, PROST2016684, PROST2016777, PROST2016829, PROST2016860, PROST2016918, PROST2016980, PROST2017098, PROST2017128, PROST2017367, PROST2017413, PROST2017441, PROST2017529, PROST2017578, PROST2017612, PROST2017617, PROST2017700, PROST2017701, PROST2017729, PROST2017836, PROST2017910, PROST2017972, PROST2018030, PROST2018090, PROST2018235, PROST2018437, PROST2018487, PROST2018511, PROST2018583, PROST2018588, PROST2018607, PROST2018788, PROST2018902, PROST2018922, PROST2018977, PROST2019164, PROST2019253, PROST2019296, PROST2019398, PROST2019487, PROST2019781, PUAEN1000039, PUAEN1000081, PUAEN1000085, PUAEN1000087, PUAEN1000121, PUAEN1000147, PUAEN1000164, PUAEN1000175, PUAEN1000239, PUAEN1000275, PUAEN1000276, PUAEN1000288, PUAEN2000080, PUAEN2000152, PUAEN2000175, PUAEN2000247, PUAEN2000312, PUAEN2000394, PUAEN2000594, PUAEN2000684, PUAEN2000942, PUAEN2001260, PUAEN2001345, PUAEN2001526, PUAEN2001586, PUAEN2002473, PUAEN2002489, PUAEN2002552, PUAEN2002568, PUAEN2002616, PUAEN2002758, PUAEN2003018, PUAEN2003079, PUAEN2003116, PUAEN2003408, PUAEN2003517, PUAEN2003954, PUAEN2004067, PUAEN2004083, PUAEN2004400, PUAEN2004511, PUAEN2004525, PUAEN2004875, PUAEN2005110, PUAEN2005247, PUAEN2005502, PUAEN2005588, PUAEN2005930, PUAEN2006029, PUAEN2006328, PUAEN2006335, PUAEN2006578, PUAEN2006639, PUAEN2006761, PUAEN2007350, PUAEN2007785, PUAEN2007898, PUAEN2008123, PUAEN2008228, PUAEN2008314, PUAEN2008515, PUAEN2008815, PUAEN2008939, PUAEN2008980, PUAEN2008985, PUAEN2009174, PUAEN2009348, PUAEN2009534, PUAEN2009655, PUAEN2009795, PUAEN2009852, PUAEN2010346, PUAEN2010824, RECTM1000051, RECTM1000141, RECTM2000220, RECTM2000349, RECTM2000433, RECTM2000510, RECTM2001307, RECTM2001347, RECTM2001519, RECTM2001666, RECTM2001691, RECTM2001749, RECTM2002172, RECTM2002602, RECTM2002632, SALGL1000005, SALGL1000024, SALGL1000028, SALGL1000047, SALGL1000065, SALGL1000107, SALGL1000171, SKMUS1000014, SKMUS1000022, SKMUS1000030, SKMUS1000064, SKMUS1000067, SKMUS1000084, SKMUS1000102, SKMUS1000104, SKMUS1000110, SKMUS1000118, SKMUS1000124, SKMUS1000129, SKMUS1000176, SKMUS1000177, SKMUS1000186, SKMUS2000061, SKMUS2000074, SKMUS2000078, SKMUS2000117, SKMUS2000137, SKMUS2000198, SKMUS2000243, SKMUS2000271, SKMUS2000287, SKMUS2000317, SKMUS2000330, SKMUS2000339, SKMUS2000343, SKMUS2000361, SKMUS2000365, SKMUS2000380, SKMUS2000390, SKMUS2000416, SKMUS2000458, SKMUS2000467, SKMUS2000468, SKMUS2000484, SKMUS2000515, SKMUS2000679, SKMUS2000690, SKMUS2000701, SKMUS2000705, SKMUS2000710, SKMUS2000724, SKMUS2000726, SKMUS2000757, SKMUS2000774, SKMUS2000821, SKMUS2000847, SKMUS2000863, SKMUS2000873, SKMUS2000894, SKMUS2000898, SKMUS2000902, SKMUS2000945, SKMUS2000954, SKMUS2000961, SKMUS2000973, SKMUS2000980, SKMUS2001008, SKMUS2001014, SKMUS2001129, SKMUS2001147, SKMUS2001157, SKMUS2001164, SKMUS2001199, SKMUS2001201, SKMUS2001215, SKMUS2001247, SKMUS2001254, SKMUS2001271, SKMUS2001287, SKMUS2001323, SKMUS2001364, SKMUS2001398, SKMUS2001402, SKMUS2001412, SKMUS2001492, SKMUS2001501, SKMUS2001528, SKMUS2001543, SKMUS2001580, SKMUS2001585, SKMUS2001608, SKMUS2001631, SKMUS2001634, SKMUS2001662, SKMUS2001663, SKMUS2001668, SKMUS2001671, SKMUS2001683, SKMUS2001693, SKMUS2001695, SKMUS2001703, SKMUS2001740, SKMUS2001742, SKMUS2001823, SKMUS2001850, SKMUS2002077, SKMUS2002084, SKMUS2002153, SKMUS2002475, SKMUS2002602, SKMUS2002634, SKMUS2002693, SKMUS2002821, SKMUS2002840, SKMUS2002920, SKMUS2003034, SKMUS2003074, SKMUS2003168, SKMUS2003194, SKMUS2003744, SKMUS2004044, SKMUS2004047, SKMUS2004483, SKMUS2004667, SKMUS2004897, SKMUS2004903, SKMUS2004908, SKMUS2005428, SKMUS2006394, SKMUS2006481, SKMUS2006755, SKMUS2007315, SKMUS2007359, SKMUS2007568, SKMUS2007740, SKMUS2007816, SKMUS2007915, SKMUS2008338, SKMUS2008407, SKMUS2008474, SKMUS2008585, SKMUS2008607, SKMUS2009190, SKMUS2009232, SKMUS2009479, SKMUS2009557, SKNMC1000110, SKNMC1000123, SKNMC1000124, SKNMC1000159, SKNMC1000168, SKNMC1000229, SKNMC1000251, SKNMC1000264, SKNMC2000065, SKNMC2000224, SKNMC2000256, SKNMC2000305, SKNMC2000322, SKNMC2000356, SKNMC2000374, SKNMC2000583, SKNMC2000593, SKNMC2000612, SKNMC2000622, SKNMC2000966, SKNMC2001113, SKNMC2001555, SKNMC2001596, SKNMC2001623, SKNMC2002402, SKNMC2003639, SKNMC2003924, SKNMC2003987, SKNMC2004457, SKNMC2004643, SKNMC2004651, SKNMC2005772, SKNMC2006173, SKNMC2006327, SKNMC2006998, SKNMC2007134, SKNMC2007502, SKNMC2007504, SKNMC2007961, SKNMC2009450, SKNSH1000002, SKNSH1000086, SKNSH1000174, SKNSH1000301, SKNSH1000308, SKNSH1000416, SKNSH2000051, SKNSH2000101, SKNSH2000151, SKNSH2000163, SKNSH2000250, SKNSH2000347, SKNSH2000482, SKNSH2000516, SKNSH2000550, SKNSH2000716, SKNSH2000819, SKNSH2000971, SKNSH2001222, SKNSH2001931, SKNSH2002054, SKNSH2002866, SKNSH2003064, SKNSH2003174, SKNSH2003422, SKNSH2003466, SKNSH2003483, SKNSH2003528, SKNSH2003633, SKNSH2004039, SKNSH2005061, SKNSH2005120, SKNSH2005194, SKNSH2005240, SKNSH2005792, SKNSH2005816, SKNSH2005981, SKNSH2006234, SKNSH2006304, SKNSH2006432, SKNSH2006822, SKNSH2007142, SKNSH2007149, SKNSH2007429, SKNSH2007739, SKNSH2008043, SKNSH2008969, SKNSH2009197, SKNSH2009357, SKNSH2009435, SKNSH2009991, SKNSH2010015, SMINT1000012, SMINT1000016, SMINT1000039, SMINT1000042, SMINT1000048, SMINT1000051, SMINT1000054, SMINT1000057, SMINT1000071, SMINT1000075, SMINT1000078, SMINT1000091, SMINT1000100, SMINT1000103, SMINT1000118, SMINT1000131, SMINT1000137, SMINT1000192, SMINT2000007, SMINT2000018, SMINT2000032, SMINT2000040, SMINT2000060, SMINT2000073, SMINT2000084, SMINT2000145, SMINT2000159, SMINT2000176, SMINT2000185, SMINT2000227, SMINT2000229, SMINT2000232, SMINT2000239, SMINT2000267, SMINT2000277, SMINT2000396, SMINT2000400, SMINT2000454, SMINT2000518, SMINT2000529, SMINT2000530, SMINT2000537, SMINT2000538, SMINT2000541, SMINT2000545, SMINT2000558, SMINT2000562, SMINT2000568, SMINT2000609, SMINT2000629, SMINT2000694, SMINT2000747, SMINT2000811, SMINT2000824, SMINT2000933, SMINT2000984, SMINT2001114, SMINT2001158, SMINT2001183, SMINT2001199, SMINT2001222, SMINT2001348, SMINT2001397, SMINT2001458, SMINT2001461, SMINT2001535, SMINT2001559, SMINT2001609, SMINT2001615, SMINT2001683, SMINT2001731, SMINT2001812, SMINT2001818, SMINT2001950, SMINT2002126, SMINT2002159, SMINT2002202, SMINT2002210, SMINT2002224, SMINT2002281, SMINT2002311, SMINT2002314, SMINT2002328, SMINT2002414, SMINT2002457, SMINT2002620, SMINT2002689, SMINT2002743, SMINT2002778, SMINT2002880, SMINT2002882, SMINT2002884, SMINT2002899, SMINT2002974, SMINT2003003, SMINT2003128, SMINT2003150, SMINT2003317, SMINT2003386, SMINT2003423, SMINT2003505, SMINT2003551, SMINT2003569, SMINT2003641, SMINT2003644, SMINT2003866, SMINT2003905, SMINT2004037, SMINT2004047, SMINT2004086, SMINT2004280, SMINT2004299, SMINT2004339, SMINT2004350, SMINT2004414, SMINT2004473, SMINT2004547, SMINT2004583, SMINT2004589, SMINT2004729, SMINT2004781, SMINT2004891, SMINT2004909, SMINT2004972, SMINT2004992, SMINT2005075, SMINT2005161, SMINT2005174, SMINT2005213, SMINT2005330, SMINT2005387, SMINT2005402, SMINT2005405, SMINT2005621, SMINT2005623, SMINT2005624, SMINT2005800, SMINT2005956, SMINT2006078, SMINT2006205, SMINT2006331, SMINT2006596, SMINT2006641, SMINT2006648, SMINT2006708, SMINT2006716, SMINT2006801, SMINT2007062, SMINT2007101, SMINT2007140, SMINT2007187, SMINT2007219, SMINT2007294, SMINT2007365, SMINT2007391, SMINT2007433, SMINT2007508, SMINT2007526, SMINT2007579, SMINT2007647, SMINT2007729, SMINT2007790, SMINT2007792, SMINT2007796, SMINT2007867, SMINT2007932, SMINT2008042, SMINT2008054, SMINT2008133, SMINT2008277, SMINT2008329, SMINT2008455, SMINT2008491, SMINT2008531, SMINT2008545, SMINT2008558, SMINT2008590, SMINT2008625, SMINT2008672, SMINT2008690, SMINT2008715, SMINT2008720, SMINT2008817, SMINT2008844, SMINT2008869, SMINT2008917, SMINT2008921, SMINT2009119, SMINT2009121, SMINT2009212, SMINT2009216, SMINT2009233, SMINT2009259, SMINT2009272, SMINT2009292, SMINT2009363, SMINT2009415, SMINT2009468, SMINT2009505, SMINT2009529, SMINT2009832, SMINT2009895, SMINT2009902, SMINT2009973, SMINT2010015, SMINT2010068, SMINT2010076, SMINT2010084, SMINT2010144, SMINT2010200, SMINT2010278, SMINT2010324, SMINT2010326, SMINT2010369, SMINT2010426, SMINT2010500, SMINT2010533, SMINT2010629, SMINT2010639, SMINT2010672, SMINT2010753, SMINT2010853, SMINT2010897, SMINT2010901, SMINT2010959, SMINT2010997, SMINT2011033, SMINT2011066, SMINT2011273, SMINT2011311, SMINT2011406, SMINT2011509, SMINT2011588, SMINT2011656, SMINT2011888, SMINT2011958, SMINT2012040, SMINT2012122, SMINT2012179, SMINT2012195, SMINT2012285, SMINT2012291, SMINT2012501, SMINT2012734, SMINT2012793, SMINT2013031, SMINT2013032, SMINT2013129, SMINT2013170, SMINT2013181, SMINT2013228, SMINT2013613, SMINT2013626, SMINT2013695, SMINT2013833, SMINT2013890, SMINT2014166, SMINT2014282, SMINT2014443, SMINT2014480, SMINT2014489, SMINT2014721, SMINT2015006, SMINT2015294, SMINT2015306, SMINT2015326, SMINT2015353, SMINT2015454, SMINT2015518, SMINT2015745, SMINT2015787, SMINT2015810, SMINT2016122, SMINT2016146, SMINT2016286, SMINT2016313, SMINT2016396, SMINT2016412, SMINT2016440, SMINT2016477, SMINT2016544, SMINT2016857, SMINT2017134, SMINT2017319, SMINT2017324, SMINT2017410, SMINT2017431, SMINT2017432, SMINT2017436, SMINT2017599, SMINT2017659, SMINT2017736, SMINT2017781, SMINT2017855, SMINT2017884, SMINT2017964, SMINT2017974, SMINT2018343, SMINT2018353, SMINT2018592, SMINT2018681, SMINT2019017, SMINT2019105, SMINT2019142, SMINT2019153, SMINT2019200, SPLEN1000013, SPLEN1000041, SPLEN1000049, SPLEN1000056, SPLEN1000087, SPLEN1000089, SPLEN1000091, SPLEN1000134, SPLEN1000139, SPLEN1000143, SPLEN1000144, SPLEN1000145, SPLEN1000156, SPLEN1000163, SPLEN1000165, SPLEN1000166, SPLEN1000178, SPLEN2000020, SPLEN2000047, SPLEN2000064, SPLEN2000072, SPLEN2000098, SPLEN2000126, SPLEN2000134, SPLEN2000143, SPLEN2000189, SPLEN2000197, SPLEN2000205, SPLEN2000222, SPLEN2000242, SPLEN2000243, SPLEN2000247, SPLEN2000258, SPLEN2000267, SPLEN2000270, SPLEN2000307, SPLEN2000341, SPLEN2000350, SPLEN2000357, SPLEN2000364, SPLEN2000402, SPLEN2000420, SPLEN2000443, SPLEN2000448, SPLEN2000450, SPLEN2000464, SPLEN2000496, SPLEN2000515, SPLEN2000516, SPLEN2000537, SPLEN2000541, SPLEN2000607, SPLEN2000630, SPLEN2000695, SPLEN2000698, SPLEN2000839, SPLEN2000882, SPLEN2001135, SPLEN2001141, SPLEN2001157, SPLEN2001176, SPLEN2001227, SPLEN2001245, SPLEN2001278, SPLEN2001354, SPLEN2001367, SPLEN2001383, SPLEN2001476, SPLEN2001503, SPLEN2001510, SPLEN2001599, SPLEN2001626, SPLEN2001650, SPLEN2001689, SPLEN2001710, SPLEN2001761, SPLEN2001781, SPLEN2001881, SPLEN2001912, SPLEN2001945, SPLEN2002007, SPLEN2002053, SPLEN2002133, SPLEN2002147, SPLEN2002166, SPLEN2002175, SPLEN2002223, SPLEN2002272, SPLEN2002314, SPLEN2002335, SPLEN2002343, SPLEN2002354, SPLEN2002385, SPLEN2002419, SPLEN2002451, SPLEN2002462, SPLEN2002463, SPLEN2002467, SPLEN2002493, SPLEN2002662, SPLEN2002695, SPLEN2002707, SPLEN2002744, SPLEN2002917, SPLEN2002931, SPLEN2002957, SPLEN2003160, SPLEN2003204, SPLEN2003219, SPLEN2003297, SPLEN2003396, SPLEN2003678, SPLEN2003878, SPLEN2003918, SPLEN2003924, SPLEN2004060, SPLEN2004078, SPLEN2004124, SPLEN2004148, SPLEN2004181, SPLEN2004220, SPLEN2004343, SPLEN2004346, SPLEN2004368, SPLEN2004611, SPLEN2004662, SPLEN2004773, SPLEN2004844, SPLEN2004880, SPLEN2004984, SPLEN2005009, SPLEN2005227, SPLEN2005272, SPLEN2005342, SPLEN2005416, SPLEN2005429, SPLEN2005450, SPLEN2005474, SPLEN2005560, SPLEN2005727, SPLEN2005783, SPLEN2005790, SPLEN2005806, SPLEN2005818, SPLEN2005838, SPLEN2005869, SPLEN2005927, SPLEN2005939, SPLEN2006143, SPLEN2006232, SPLEN2006268, SPLEN2006283, SPLEN2006305, SPLEN2006325, SPLEN2006389, SPLEN2006425, SPLEN2006671, SPLEN2006701, SPLEN2006785, SPLEN2006875, SPLEN2007182, SPLEN2007276, SPLEN2007314, SPLEN2007326, SPLEN2007350, SPLEN2007388, SPLEN2007498, SPLEN2007619, SPLEN2007653, SPLEN2007689, SPLEN2007695, SPLEN2007739, SPLEN2007750, SPLEN2007794, SPLEN2007879, SPLEN2007926, SPLEN2007951, SPLEN2008007, SPLEN2008135, SPLEN2008164, SPLEN2008317, SPLEN2008460, SPLEN2008591, SPLEN2008786, SPLEN2009081, SPLEN2009088, SPLEN2009163, SPLEN2009315, SPLEN2009340, SPLEN2009513, SPLEN2009541, SPLEN2009548, SPLEN2009555, SPLEN2009581, SPLEN2009733, SPLEN2009803, SPLEN2009884, SPLEN2009918, SPLEN2009970, SPLEN2010004, SPLEN2010015, SPLEN2010112, SPLEN2010119, SPLEN2010146, SPLEN2010187, SPLEN2010350, SPLEN2010395, SPLEN2010415, SPLEN2010447, SPLEN2010469, SPLEN2010510, SPLEN2010530, SPLEN2010534, SPLEN2010588, SPLEN2010625, SPLEN2010800, SPLEN2010846, SPLEN2010847, SPLEN2010862, SPLEN2010912, SPLEN2010978, SPLEN2010986, SPLEN2011018, SPLEN2011021, SPLEN2011025, SPLEN2011086, SPLEN2011139, SPLEN2011145, SPLEN2011248, SPLEN2011252, SPLEN2011419, SPLEN2011422, SPLEN2011672, SPLEN2011678, SPLEN2011737, SPLEN2011758, SPLEN2011766, SPLEN2011805, SPLEN2011820, SPLEN2011830, SPLEN2011931, SPLEN2011981, SPLEN2012115, SPLEN2012175, SPLEN2012179, SPLEN2012185, SPLEN2012234, SPLEN2012453, SPLEN2012523, SPLEN2012524, SPLEN2012525, SPLEN2012571, SPLEN2012606, SPLEN2012611, SPLEN2012619, SPLEN2012624, SPLEN2012725, SPLEN2012743, SPLEN2012756, SPLEN2012800, SPLEN2012846, SPLEN2012889, SPLEN2012961, SPLEN2013108, SPLEN2013195, SPLEN2013503, SPLEN2013644, SPLEN2013648, SPLEN2013670, SPLEN2013673, SPLEN2013690, SPLEN2013714, SPLEN2013753, SPLEN2013821, SPLEN2013857, SPLEN2013860, SPLEN2013910, SPLEN2013923, SPLEN2013936, SPLEN2014041, SPLEN2014063, SPLEN2014073, SPLEN2014080, SPLEN2014119, SPLEN2014136, SPLEN2014199, SPLEN2014210, SPLEN2014293, SPLEN2014318, SPLEN2014381, SPLEN2014452, SPLEN2014454, SPLEN2014486, SPLEN2014543, SPLEN2014572, SPLEN2014645, SPLEN2014669, SPLEN2014711, SPLEN2014739, SPLEN2014860, SPLEN2014865, SPLEN2014911, SPLEN2014919, SPLEN2014920, SPLEN2014924, SPLEN2014937, SPLEN2014946, SPLEN2015031, SPLEN2015094, SPLEN2015121, SPLEN2015129, SPLEN2015158, SPLEN2015166, SPLEN2015216, SPLEN2015258, SPLEN2015261, SPLEN2015267, SPLEN2015276, SPLEN2015415, SPLEN2015433, SPLEN2015593, SPLEN2015674, SPLEN2015679, SPLEN2015707, SPLEN2015730, SPLEN2015746, SPLEN2015788, SPLEN2015815, SPLEN2015890, SPLEN2015891, SPLEN2015899, SPLEN2016045, SPLEN2016053, SPLEN2016069, SPLEN2016098, SPLEN2016135, SPLEN2016139, SPLEN2016241, SPLEN2016250, SPLEN2016268, SPLEN2016304, SPLEN2016356, SPLEN2016421, SPLEN2016480, SPLEN2016531, SPLEN2016533, SPLEN2016541, SPLEN2016552, SPLEN2016554, SPLEN2016602, SPLEN2016627, SPLEN2016678, SPLEN2016743, SPLEN2016773, SPLEN2016781, SPLEN2016840, SPLEN2016863, SPLEN2016922, SPLEN2016932, SPLEN2016972, SPLEN2016973, SPLEN2017043, SPLEN2017104, SPLEN2017121, SPLEN2017147, SPLEN2017187, SPLEN2017189, SPLEN2017212, SPLEN2017318, SPLEN2017351, SPLEN2017426, SPLEN2017452, SPLEN2017538, SPLEN2017592, SPLEN2017613, SPLEN2017643, SPLEN2017687, SPLEN2017740, SPLEN2017781, SPLEN2017999, SPLEN2018098, SPLEN2018112, SPLEN2018157, SPLEN2018159, SPLEN2018180, SPLEN2018181, SPLEN2018280, SPLEN2018285, SPLEN2018299, SPLEN2018302, SPLEN2018364, SPLEN2018395, SPLEN2018643, SPLEN2018683, SPLEN2018732, SPLEN2018749, SPLEN2018933, SPLEN2019008, SPLEN2019043, SPLEN2019077, SPLEN2019092, SPLEN2019102, SPLEN2019131, SPLEN2019169, SPLEN2019257, SPLEN2019311, SPLEN2019323, SPLEN2019349, SPLEN2019375, SPLEN2019379, SPLEN2019471, SPLEN2019480, SPLEN2019505, SPLEN2019571, SPLEN2019575, SPLEN2019709, SPLEN2019793, SPLEN2019811, SPLEN2019839, SPLEN2019956, SPLEN2019985, SPLEN2020007, SPLEN2020034, SPLEN2020153, SPLEN2020154, SPLEN2020166, SPLEN2020183, SPLEN2020223, SPLEN2020359, SPLEN2020417, SPLEN2020427, SPLEN2020467, SPLEN2020512, SPLEN2020608, SPLEN2020777, SPLEN2020805, SPLEN2021057, SPLEN2021122, SPLEN2021157, SPLEN2021194, SPLEN2021231, SPLEN2021273, SPLEN2021295, SPLEN2021298, SPLEN2021383, SPLEN2021417, SPLEN2021440, SPLEN2021458, SPLEN2021463, SPLEN2021560, SPLEN2021701, SPLEN2021795, SPLEN2021983, SPLEN2021991, SPLEN2022040, SPLEN2022162, SPLEN2022227, SPLEN2022522, SPLEN2022591, SPLEN2022785, SPLEN2022920, SPLEN2023024, SPLEN2023118, SPLEN2023160, SPLEN2023423, SPLEN2023710, SPLEN2023733, SPLEN2023791, SPLEN2023977, SPLEN2024070, SPLEN2024127, SPLEN2024232, SPLEN2024273, SPLEN2024383, SPLEN2024489, SPLEN2024530, SPLEN2024571, SPLEN2024577, SPLEN2024617, SPLEN2024737, SPLEN2024922, SPLEN2024956, SPLEN2024990, SPLEN2025012, SPLEN2025017, SPLEN2025039, SPLEN2025219, SPLEN2025491, SPLEN2025626, SPLEN2025820, SPLEN2026144, SPLEN2026411, SPLEN2026765, SPLEN2027113, SPLEN2027157, SPLEN2027395, SPLEN2027488, SPLEN2027780, SPLEN2027852, SPLEN2027868, SPLEN2027995, SPLEN2028046, SPLEN2028066, SPLEN2028138, SPLEN2028365, SPLEN2028417, SPLEN2028424, SPLEN2028466, SPLEN2028593, SPLEN2028844, SPLEN2028914, SPLEN2028994, SPLEN2029051, SPLEN2029176, SPLEN2029295, SPLEN2029380, SPLEN2029522, SPLEN2029683, SPLEN2029727, SPLEN2029904, SPLEN2029912, SPLEN2030250, SPLEN2030335, SPLEN2030371, SPLEN2030397, SPLEN2030479, SPLEN2030495, SPLEN2030562, SPLEN2030763, SPLEN2030847, SPLEN2031004, SPLEN2031125, SPLEN2031674, SPLEN2031724, SPLEN2031780, SPLEN2032036, SPLEN2032112, SPLEN2032154, SPLEN2032321, SPLEN2032677, SPLEN2032813, SPLEN2032924, SPLEN2033098, SPLEN2033153, SPLEN2033333, SPLEN2033490, SPLEN2033539, SPLEN2033921, SPLEN2033996, SPLEN2034021, SPLEN2034081, SPLEN2034252, SPLEN2034448, SPLEN2034551, SPLEN2034601, SPLEN2034678, SPLEN2034781, SPLEN2034864, SPLEN2034934, SPLEN2035318, SPLEN2035615, SPLEN2036076, SPLEN2036103, SPLEN2036326, SPLEN2036475, SPLEN2036501, SPLEN2036579, SPLEN2036608, SPLEN2036702, SPLEN2036712, SPLEN2036821, SPLEN2036932, SPLEN2036953, SPLEN2037077, SPLEN2037194, SPLEN2037319, SPLEN2037444, SPLEN2037580, SPLEN2037630, SPLEN2037678, SPLEN2037722, SPLEN2037891, SPLEN2038055, SPLEN2038180, SPLEN2038345, SPLEN2038407, SPLEN2038473, SPLEN2038834, SPLEN2039311, SPLEN2039672, SPLEN2039697, SPLEN2039845, SPLEN2039936, SPLEN2040222, SPLEN2040237, SPLEN2040824, SPLEN2041304, SPLEN2041306, SPLEN2041310, SPLEN2041585, SPLEN2041645, SPLEN2041700, SPLEN2041720, SPLEN2041977, SPLEN2042051, SPLEN2042303, SPLEN2042521, SPLEN2042598, SPLEN2042714, SPLEN2042920, STOMA1000013, STOMA1000052, STOMA1000074, STOMA1000091, STOMA1000117, STOMA1000133, STOMA1000175, STOMA1000186, STOMA1000189, STOMA1000190, STOMA1000191, STOMA2000032, STOMA2000072, STOMA2000088, STOMA2000104, STOMA2000121, STOMA2000148, STOMA2000168, STOMA2000183, STOMA2000188, STOMA2000257, STOMA2000279, STOMA2000289, STOMA2000383, STOMA2000386, STOMA2000395, STOMA2000396, STOMA2000478, STOMA2000482, STOMA2000529, STOMA2000539, STOMA2000567, STOMA2000640, STOMA2000678, STOMA2000686, STOMA2000888, STOMA2001025, STOMA2001389, STOMA2002052, STOMA2002141, STOMA2002166, STOMA2002367, STOMA2002688, STOMA2002828, STOMA2003158, STOMA2003289, STOMA2003444, STOMA2003477, STOMA2003646, STOMA2003716, STOMA2003781, STOMA2003894, STOMA2004194, STOMA2004294, STOMA2004663, STOMA2004668, STOMA2004852, STOMA2004873, STOMA2004884, STOMA2004893, STOMA2004925, STOMA2005120, STOMA2005664, STOMA2005667, STOMA2005746, STOMA2005782, STOMA2006181, STOMA2006213, STOMA2006229, STOMA2006325, STOMA2006330, STOMA2006398, STOMA2006447, STOMA2006904, STOMA2007269, STOMA2007680, STOMA2007745, STOMA2008050, STOMA2008361, STOMA2008546, STOMA2008614, STOMA2008638, STOMA2008838, STOMA2009250, STOMA2009253, STOMA2009256, STOMA2009289, SYNOV1000045, SYNOV1000049, SYNOV1000118, SYNOV1000124, SYNOV1000128, SYNOV1000164, SYNOV1000190, SYNOV1000256, SYNOV1000374, SYNOV2000152, SYNOV2000171, SYNOV2000173, SYNOV2000177, SYNOV2000178, SYNOV2000193, SYNOV2000251, SYNOV2000279, SYNOV2000291, SYNOV2000297, SYNOV2000397, SYNOV2000426, SYNOV2000601, SYNOV2000700, SYNOV2000820, SYNOV2000824, SYNOV2000923, SYNOV2001014, SYNOV2001033, SYNOV2001035, SYNOV2001088, SYNOV2001111, SYNOV2001212, SYNOV2001251, SYNOV2001262, SYNOV2001300, SYNOV2001356, SYNOV2001390, SYNOV2001451, SYNOV2001457, SYNOV2001468, SYNOV2001581, SYNOV2001648, SYNOV2001660, SYNOV2003326, SYNOV2005216, SYNOV2005448, SYNOV2005541, SYNOV2005673, SYNOV2005817, SYNOV2005962, SYNOV2006430, SYNOV2006620, SYNOV2007758, SYNOV2007965, SYNOV2008765, SYNOV2011233, SYNOV2012326, SYNOV2013365, SYNOV2013637, SYNOV2014157, SYNOV2014364, SYNOV2016124, SYNOV2016837, SYNOV2017055, SYNOV2017179, SYNOV2018921, SYNOV2019280, SYNOV2020085, SYNOV2020463, SYNOV2021320, SYNOV2021953, SYNOV3000184, SYNOV3000231, SYNOV3000302, SYNOV3000345, SYNOV4000249, SYNOV4000472, SYNOV4000598, SYNOV4000706, SYNOV4001153, SYNOV4001224, SYNOV4001326, SYNOV4001342, SYNOV4001395, SYNOV4002001, SYNOV4002392, SYNOV4002875, SYNOV4002883, SYNOV4003174, SYNOV4003322, SYNOV4003681, SYNOV4003981, SYNOV4004184, SYNOV4004741, SYNOV4004823, SYNOV4004914, SYNOV4005256, SYNOV4005570, SYNOV4005739, SYNOV4005889, SYNOV4005981, SYNOV4005989, SYNOV4006256, SYNOV4006327, SYNOV4006542, SYNOV4007012, SYNOV4007215, SYNOV4007360, SYNOV4007430, SYNOV4007521, SYNOV4007553, SYNOV4007671, SYNOV4007711, SYNOV4008245, SYNOV4008336, SYNOV4009129, SYNOV4009139, SYNOV4009298, SYNOV4009575, T1ESE2000116, T1ESE2000609, T1ESE2000904, T1ESE2002665, TBAES2000004, TBAES2000059, TBAES2000116, TBAES2000255, TBAES2000315, TBAES2000352, TBAES2000932, TBAES2001171, TBAES2001220, TBAES2001229, TBAES2001258, TBAES2001296, TBAES2001492, TBAES2001553, TBAES2001751, TBAES2003435, TBAES2003492, TBAES2003550, TBAES2003702, TBAES2003917, TBAES2004055, TBAES2004105, TBAES2004939, TBAES2005157, TBAES2005361, TBAES2005543, TBAES2006568, TBAES2006881, TBAES2007379, TBAES2007428, TBAES2007481, TBAES2007504, TBAES2007548, TBAES2007697, TBAES2007862, TBAES2007964, TBAES2008133, TCERX2000171, TCERX2000431, TCERX2000613, TCERX2000998, TCERX2002644, TCOLN1000037, TCOLN1000180, TCOLN2000139, TCOLN2000236, TCOLN2000641, TCOLN2001268, TCOLN2002047, TCOLN2002278, TESOP1000035, TESOP1000127, TESOP1000160, TESOP2000083, TESOP2000090, TESOP2000205, TESOP2000312, TESOP2000390, TESOP2000400, TESOP2000510, TESOP2000527, TESOP2000569, TESOP2000739, TESOP2000801, TESOP2001122, TESOP2001166, TESOP2001345, TESOP2001474, TESOP2001796, TESOP2001818, TESOP2001849, TESOP2001865, TESOP2001901, TESOP2001953, TESOP2002005, TESOP2002110, TESOP2002150, TESOP2002273, TESOP2002451, TESOP2002489, TESOP2002539, TESOP2002545, TESOP2002804, TESOP2002950, TESOP2003273, TESOP2003308, TESOP2003553, TESOP2003753, TESOP2004110, TESOP2004114, TESOP2004173, TESOP2004214, TESOP2005199, TESOP2005285, TESOP2005485, TESOP2005498, TESOP2005579, TESOP2006041, TESOP2006053, TESOP2006060, TESOP2006068, TESOP2006110, TESOP2006398, TESOP2006670, TESOP2006704, TESOP2006746, TESOP2006865, TESOP2006893, TESOP2007041, TESOP2007052, TESOP2007262, TESOP2007384, TESOP2007636, TESOP2007674, TESOP2007688, TESOP2007725, TESOP2007912, TESOP2007978, TESOP2008127, TESOP2008552, TESOP2008556, TESOP2008563, TESOP2008820, TESOP2009121, TESOP2009201, TESOP2009247, TESOP2009555, TESTI1000018, TESTI1000019, TESTI1000023, TESTI1000025, TESTI1000029, TESTI1000030, TESTI1000042, TESTI1000045, TESTI1000051, TESTI1000055, TESTI1000064, TESTI1000070, TESTI1000085, TESTI1000088, TESTI1000093, TESTI1000094, TESTI1000096, TESTI1000109, TESTI1000125, TESTI1000127, TESTI1000128, TESTI1000131, TESTI1000138, TESTI1000142, TESTI1000157, TESTI1000163, TESTI1000168, TESTI1000169, TESTI1000179, TESTI1000183, TESTI1000191, TESTI1000257, TESTI1000266, TESTI1000319, TESTI1000330, TESTI1000348, TESTI1000390, TESTI1000391, TESTI1000459, TESTI1000491, TESTI1000545, TESTI2000006, TESTI2000018, TESTI2000044, TESTI2000100, TESTI2000117, TESTI2000120, TESTI2000147, TESTI2000154, TESTI2000172, TESTI2000177, TESTI2000179, TESTI2000184, TESTI2000207, TESTI2000208, TESTI2000221, TESTI2000238, TESTI2000253, TESTI2000272, TESTI2000278, TESTI2000349, TESTI2000356, TESTI2000358, TESTI2000372, TESTI2000427, TESTI2000431, TESTI2000435, TESTI2000443, TESTI2000452, TESTI2000462, TESTI2000489, TESTI2000520, TESTI2000571, TESTI2000591, TESTI2000598, TESTI2000600, TESTI2000616, TESTI2000627, TESTI2000644, TESTI2000671, TESTI2000683, TESTI2000689, TESTI2000695, TESTI2000699, TESTI2000707, TESTI2000745, TESTI2000756, TESTI2000762, TESTI2000784, TESTI2000808, TESTI2000819, TESTI2000830, TESTI2000840, TESTI2000849, TESTI2000850, TESTI2000874, TESTI2000883, TESTI2000909, TESTI2000951, TESTI2000970, TESTI2000981, TESTI2001008, TESTI2001049, TESTI2001082, TESTI2001120, TESTI2001134, TESTI2001141, TESTI2001180, TESTI2001208, TESTI2001229, TESTI2001236, TESTI2001237, TESTI2001306, TESTI2001313, TESTI2001330, TESTI2001339, TESTI2001345, TESTI2001352, TESTI2001364, TESTI2001412, TESTI2001420, TESTI2001498, TESTI2001511, TESTI2001512, TESTI2001518, TESTI2001556, TESTI2001593, TESTI2001613, TESTI2001621, TESTI2001661, TESTI2001665, TESTI2001671, TESTI2001697, TESTI2001725, TESTI2001758, TESTI2001766, TESTI2001792, TESTI2001793, TESTI2001795, TESTI2001812, TESTI2001815, TESTI2001823, TESTI2001826, TESTI2001827, TESTI2001852, TESTI2001862, TESTI2001869, TESTI2001879, TESTI2001894, TESTI2001898, TESTI2001915, TESTI2001950, TESTI2001959, TESTI2001968, TESTI2001985, TESTI2001991, TESTI2002002, TESTI2002012, TESTI2002036, TESTI2002048, TESTI2002057, TESTI2002081, TESTI2002090, TESTI2002105, TESTI2002216, TESTI2002223, TESTI2002245, TESTI2002251, TESTI2002256, TESTI2002264, TESTI2002282, TESTI2002293, TESTI2002294, TESTI2002326, TESTI2002351, TESTI2002361, TESTI2002365, TESTI2002369, TESTI2002406, TESTI2002415, TESTI2002423, TESTI2002453, TESTI2002461, TESTI2002465, TESTI2002467, TESTI2002498, TESTI2002516, TESTI2002544, TESTI2002578, TESTI2002580, TESTI2002618, TESTI2002632, TESTI2002676, TESTI2002690, TESTI2002696, TESTI2002698, TESTI2002700, TESTI2002707, TESTI2002724, TESTI2002729, TESTI2002752, TESTI2002753, TESTI2002789, TESTI2002802, TESTI2002806, TESTI2002840, TESTI2002866, TESTI2002877, TESTI2002910, TESTI2002912, TESTI2002928, TESTI2002937, TESTI2002965, TESTI2002993, TESTI2003005, TESTI2003020, TESTI2003031, TESTI2003037, TESTI2003044, TESTI2003059, TESTI2003061, TESTI2003074, TESTI2003089, TESTI2003104, TESTI2003109, TESTI2003117, TESTI2003127, TESTI2003130, TESTI2003131, TESTI2003139, TESTI2003141, TESTI2003152, TESTI2003181, TESTI2003193, TESTI2003196, TESTI2003228, TESTI2003236, TESTI2003255, TESTI2003258, TESTI2003277, TESTI2003280, TESTI2003299, TESTI2003311, TESTI2003321, TESTI2003325, TESTI2003327, TESTI2003330, TESTI2003347, TESTI2003354, TESTI2003356, TESTI2003372, TESTI2003376, TESTI2003413, TESTI2003418, TESTI2003419, TESTI2003432, TESTI2003454, TESTI2003475, TESTI2003476, TESTI2003498, TESTI2003512, TESTI2003533, TESTI2003539, TESTI2003541, TESTI2003545, TESTI2003551, TESTI2003574, TESTI2003579, TESTI2003580, TESTI2003589, TESTI2003596, TESTI2003598, TESTI2003615, TESTI2003625, TESTI2003638, TESTI2003649, TESTI2003692, TESTI2003718, TESTI2003727, TESTI2003756, TESTI2003768, TESTI2003781, TESTI2003787, TESTI2003824, TESTI2003827, TESTI2003894, TESTI2003911, TESTI2003914, TESTI2003940, TESTI2003962, TESTI2003998, TESTI2004000, TESTI2004073, TESTI2004080, TESTI2004085, TESTI2004089, TESTI2004111, TESTI2004119, TESTI2004122, TESTI2004153, TESTI2004163, TESTI2004169, TESTI2004207, TESTI2004215, TESTI2004227, TESTI2004229, TESTI2004243, TESTI2004255, TESTI2004287, TESTI2004295, TESTI2004313, TESTI2004318, TESTI2004322, TESTI2004391, TESTI2004399, TESTI2004423, TESTI2004431, TESTI2004432, TESTI2004452, TESTI2004459, TESTI2004490, TESTI2004539, TESTI2004552, TESTI2004560, TESTI2004574, TESTI2004601, TESTI2004611, TESTI2004649, TESTI2004654, TESTI2004675, TESTI2004687, TESTI2004689, TESTI2004700, TESTI2004706, TESTI2004712, TESTI2004734, TESTI2004783, TESTI2004791, TESTI2004793, TESTI2004860, TESTI2004906, TESTI2004920, TESTI2004929, TESTI2004936, TESTI2004941, TESTI2004971, TESTI2004982, TESTI2004993, TESTI2004994, TESTI2004999, TESTI2005017, TESTI2005025, TESTI2005040, TESTI2005060, TESTI2005072, TESTI2005085, TESTI2005112, TESTI2005120, TESTI2005153, TESTI2005155, TESTI2005173, TESTI2005267, TESTI2005268, TESTI2005280, TESTI2005307, TESTI2005326, TESTI2005363, TESTI2005376, TESTI2005378, TESTI2005380, TESTI2005391, TESTI2005395, TESTI2005396, TESTI2005408, TESTI2005415, TESTI2005470, TESTI2005492, TESTI2005564, TESTI2005568, TESTI2005584, TESTI2005588, TESTI2005590, TESTI2005603, TESTI2005609, TESTI2005610, TESTI2005630, TESTI2005672, TESTI2005683, TESTI2005690, TESTI2005692, TESTI2005703, TESTI2005720, TESTI2005731, TESTI2005739, TESTI2005742, TESTI2005743, TESTI2005759, TESTI2005767, TESTI2005775, TESTI2005784, TESTI2005788, TESTI2005827, TESTI2005835, TESTI2005860, TESTI2005892, TESTI2005908, TESTI2005911, TESTI2005933, TESTI2005937, TESTI2005948, TESTI2005979, TESTI2005981, TESTI2005982, TESTI2005984, TESTI2005986, TESTI2005987, TESTI2006007, TESTI2006008, TESTI2006015, TESTI2006016, TESTI2006035, TESTI2006040, TESTI2006041, TESTI2006045, TESTI2006067, TESTI2006083, TESTI2006097, TESTI2006109, TESTI2006111, TESTI2006120, TESTI2006125, TESTI2006179, TESTI2006209, TESTI2006210, TESTI2006212, TESTI2006218, TESTI2006238, TESTI2006255, TESTI2006258, TESTI2006278, TESTI2006333, TESTI2006341, TESTI2006360, TESTI2006383, TESTI2006409, TESTI2006425, TESTI2006437, TESTI2006453, TESTI2006457, TESTI2006460, TESTI2006465, TESTI2006483, TESTI2006499, TESTI2006523, TESTI2006543, TESTI2006565, TESTI2006572, TESTI2006615, TESTI2006617, TESTI2006624, TESTI2006628, TESTI2006633, TESTI2006643, TESTI2006648, TESTI2006659, TESTI2006660, TESTI2006665, TESTI2006667, TESTI2006677, TESTI2006720, TESTI2006735, TESTI2006744, TESTI2006748, TESTI2006774, TESTI2006853, TESTI2006866, TESTI2006877, TESTI2006879, TESTI2006894, TESTI2006940, TESTI2006955, TESTI2006978, TESTI2006979, TESTI2006990, TESTI2007040, TESTI2007074, TESTI2007078, TESTI2007113, TESTI2007152, TESTI2007163, TESTI2007183, TESTI2007211, TESTI2007220, TESTI2007234, TESTI2007320, TESTI2007346, TESTI2007358, TESTI2007402, TESTI2007405, TESTI2007407, TESTI2007422, TESTI2007452, TESTI2007464, TESTI2007466, TESTI2007480, TESTI2007490, TESTI2007502, TESTI2007524, TESTI2007533, TESTI2007576, TESTI2007613, TESTI2007657, TESTI2007685, TESTI2007692, TESTI2007749, TESTI2007750, TESTI2007808, TESTI2007814, TESTI2007829, TESTI2007864, TESTI2007867, TESTI2007872, TESTI2007906, TESTI2007922, TESTI2007951, TESTI2007972, TESTI2007973, TESTI2008014, TESTI2008020, TESTI2008032, TESTI2008033, TESTI2008046, TESTI2008081, TESTI2008099, TESTI2008139, TESTI2008144, TESTI2008161, TESTI2008189, TESTI2008204, TESTI2008219, TESTI2008233, TESTI2008234, TESTI2008237, TESTI2008278, TESTI2008320, TESTI2008331, TESTI2008343, TESTI2008387, TESTI2008389, TESTI2008394, TESTI2008405, TESTI2008420, TESTI2008425, TESTI2008440, TESTI2008567, TESTI2008595, TESTI2008621, TESTI2008636, TESTI2008657, TESTI2008684, TESTI2008699, TESTI2008715, TESTI2008762, TESTI2008774, TESTI2008786, TESTI2008822, TESTI2008835, TESTI2008840, TESTI2008847, TESTI2008884, TESTI2008901, TESTI2008929, TESTI2008946, TESTI2008960, TESTI2009018, TESTI2009091, TESTI2009097, TESTI2009136, TESTI2009185, TESTI2009190, TESTI2009217, TESTI2009239, TESTI2009325, TESTI2009388, TESTI2009390, TESTI2009400, TESTI2009402, TESTI2009412, TESTI2009423, TESTI2009447, TESTI2009462, TESTI2009474, TESTI2009477, TESTI2009497, TESTI2009502, TESTI2009511, TESTI2009520, TESTI2009544, TESTI2009545, TESTI2009551, TESTI2009585, TESTI2009588, TESTI2009683, TESTI2009727, TESTI2009739, TESTI2009785, TESTI2009812, TESTI2009835, TESTI2009853, TESTI2009935, TESTI2009977, TESTI2010009, TESTI2010154, TESTI2010180, TESTI2010239, TESTI2010280, TESTI2010354, TESTI2010396, TESTI2010400, TESTI2010409, TESTI2010513, TESTI2010572, TESTI2010587, TESTI2010591, TESTI2010617, TESTI2010682, TESTI2010724, TESTI2010732, TESTI2010734, TESTI2010755, TESTI2010793, TESTI2010806, TESTI2010833, TESTI2010872, TESTI2011009, TESTI2011020, TESTI2011028, TESTI2011033, TESTI2011254, TESTI2011286, TESTI2011294, TESTI2011314, TESTI2011315, TESTI2011394, TESTI2011407, TESTI2011448, TESTI2011480, TESTI2011549, TESTI2011575, TESTI2011605, TESTI2011612, TESTI2011665, TESTI2011680, TESTI2011683, TESTI2011712, TESTI2011750, TESTI2011840, TESTI2011846, TESTI2011915, TESTI2011928, TESTI2011971, TESTI2012019, TESTI2012050, TESTI2012090, TESTI2012095, TESTI2012104, TESTI2012152, TESTI2012155, TESTI2012171, TESTI2012207, TESTI2012231, TESTI2012244, TESTI2012289, TESTI2012308, TESTI2012356, TESTI2012387, TESTI2012394, TESTI2012444, TESTI2012511, TESTI2012528, TESTI2012544, TESTI2012550, TESTI2012571, TESTI2012592, TESTI2012617, TESTI2012628, TESTI2012812, TESTI2012834, TESTI2012835, TESTI2012861, TESTI2012900, TESTI2012915, TESTI2012922, TESTI2013001, TESTI2013012, TESTI2013053, TESTI2013144, TESTI2013163, TESTI2013169, TESTI2013212, TESTI2013231, TESTI2013257, TESTI2013264, TESTI2013268, TESTI2013322, TESTI2013381, TESTI2013382, TESTI2013401, TESTI2013427, TESTI2013468, TESTI2013497, TESTI2013545, TESTI2013546, TESTI2013566, TESTI2013601, TESTI2013604, TESTI2013607, TESTI2013610, TESTI2013691, TESTI2013699, TESTI2013737, TESTI2013767, TESTI2013832, TESTI2013873, TESTI2013889, TESTI2014007, TESTI2014036, TESTI2014097, TESTI2014160, TESTI2014248, TESTI2014254, TESTI2014269, TESTI2014274, TESTI2014318, TESTI2014324, TESTI2014339, TESTI2014362, TESTI2014385, TESTI2014415, TESTI2014439, TESTI2014474, TESTI2014505, TESTI2014577, TESTI2014578, TESTI2014716, TESTI2014780, TESTI2014800, TESTI2014838, TESTI2014843, TESTI2014979, TESTI2014988, TESTI2015042, TESTI2015092, TESTI2015105, TESTI2015180, TESTI2015246, TESTI2015249, TESTI2015327, TESTI2015331, TESTI2015335, TESTI2015350, TESTI2015375, TESTI2015437, TESTI2015590, TESTI2015610, TESTI2015626, TESTI2015647, TESTI2015675, TESTI2015710, TESTI2015752, TESTI2015830, TESTI2015914, TESTI2015938, TESTI2015947, TESTI2015962, TESTI2015987, TESTI2016033, TESTI2016046, TESTI2016101, TESTI2016162, TESTI2016197, TESTI2016278, TESTI2016298, TESTI2016331, TESTI2016337, TESTI2016410, TESTI2016421, TESTI2016509, TESTI2016568, TESTI2016583, TESTI2016599, TESTI2016629, TESTI2016663, TESTI2016667, TESTI2016688, TESTI2016701, TESTI2016758, TESTI2016848, TESTI2016863, TESTI2016888, TESTI2016896, TESTI2016922, TESTI2016942, TESTI2016950, TESTI2016996, TESTI2017017, TESTI2017028, TESTI2017035, TESTI2017069, TESTI2017089, TESTI2017102, TESTI2017107, TESTI2017113, TESTI2017125, TESTI2017256, TESTI2017305, TESTI2017311, TESTI2017396, TESTI2017507, TESTI2017537, TESTI2017582, TESTI2017584, TESTI2017645, TESTI2017727, TESTI2017740, TESTI2017775, TESTI2017816, TESTI2017832, TESTI2017923, TESTI2017932, TESTI2017951, TESTI2018014, TESTI2018031, TESTI2018035, TESTI2018060, TESTI2018083, TESTI2018178, TESTI2018221, TESTI2018276, TESTI2018290, TESTI2018335, TESTI2018337, TESTI2018368, TESTI2018421, TESTI2018428, TESTI2018462, TESTI2018475, TESTI2018482, TESTI2018521, TESTI2018565, TESTI2018581, TESTI2018611, TESTI2018687, TESTI2018697, TESTI2018838, TESTI2018867, TESTI2018941, TESTI2018957, TESTI2018974, TESTI2018975, TESTI2018997, TESTI2019042, TESTI2019077, TESTI2019228, TESTI2019257, TESTI2019280, TESTI2019282, TESTI2019308, TESTI2019336, TESTI2019352, TESTI2019406, TESTI2019430, TESTI2019455, TESTI2019481, TESTI2019488, TESTI2019501, TESTI2019648, TESTI2019669, TESTI2019697, TESTI2019729, TESTI2019760, TESTI2019787, TESTI2019794, TESTI2019854, TESTI2019859, TESTI2019860, TESTI2019872, TESTI2019911, TESTI2019917, TESTI2019975, TESTI2019998, TESTI2020012, TESTI2020026, TESTI2020029, TESTI2020071, TESTI2020084, TESTI2020265, TESTI2020283, TESTI2020316, TESTI2020344, TESTI2020379, TESTI2020426, TESTI2020445, TESTI2020510, TESTI2020515, TESTI2020525, TESTI2020579, TESTI2020717, TESTI2020840, TESTI2020871, TESTI2020905, TESTI2020906, TESTI2020946, TESTI2020956, TESTI2020981, TESTI2020999, TESTI2021003, TESTI2021038, TESTI2021057, TESTI2021077, TESTI2021112, TESTI2021114, TESTI2021116, TESTI2021118, TESTI2021122, TESTI2021124, TESTI2021138, TESTI2021297, TESTI2021315, TESTI2021358, TESTI2021425, TESTI2021447, TESTI2021463, TESTI2021531, TESTI2021599, TESTI2021637, TESTI2021654, TESTI2021667, TESTI2021736, TESTI2021785, TESTI2021819, TESTI2021851, TESTI2021895, TESTI2021911, TESTI2021939, TESTI2021999, TESTI2022010, TESTI2022023, TESTI2022065, TESTI2022086, TESTI2022179, TESTI2022203, TESTI2022246, TESTI2022323, TESTI2022338, TESTI2022400, TESTI2022462, TESTI2022495, TESTI2022623, TESTI2022649, TESTI2022652, TESTI2022738, TESTI2022798, TESTI2022812, TESTI2022814, TESTI2022874, TESTI2022940, TESTI2022952, TESTI2023025, TESTI2023033, TESTI2023053, TESTI2023085, TESTI2023192, TESTI2023194, TESTI2023214, TESTI2023254, TESTI2023386, TESTI2023414, TESTI2023427, TESTI2023436, TESTI2023599, TESTI2023752, TESTI2023800, TESTI2023861, TESTI2023903, TESTI2023942, TESTI2023947, TESTI2023951, TESTI2023968, TESTI2024009, TESTI2024090, TESTI2024125, TESTI2024153, TESTI2024192, TESTI2024267, TESTI2024283, TESTI2024299, TESTI2024419, TESTI2024422, TESTI2024443, TESTI2024446, TESTI2024473, TESTI2024476, TESTI2024498, TESTI2024560, TESTI2024567, TESTI2024586, TESTI2024598, TESTI2024641, TESTI2024648, TESTI2024718, TESTI2024744, TESTI2024844, TESTI2024864, TESTI2024885, TESTI2024936, TESTI2024978, TESTI2024999, TESTI2025006, TESTI2025013, TESTI2025022, TESTI2025063, TESTI2025117, TESTI2025144, TESTI2025161, TESTI2025174, TESTI2025229, TESTI2025269, TESTI2025365, TESTI2025403, TESTI2025409, TESTI2025448, TESTI2025454, TESTI2025486, TESTI2025546, TESTI2025582, TESTI2025609, TESTI2025656, TESTI2025757, TESTI2025791, TESTI2025846, TESTI2025872, TESTI2025879, TESTI2025911, TESTI2025920, TESTI2025924, TESTI2026014, TESTI2026024, TESTI2026064, TESTI2026077, TESTI2026104, TESTI2026116, TESTI2026134, TESTI2026168, TESTI2026196, TESTI2026215, TESTI2026218, TESTI2026233, TESTI2026291, TESTI2026294, TESTI2026401, TESTI2026403, TESTI2026453, TESTI2026461, TESTI2026491, TESTI2026505, TESTI2026515, TESTI2026534, TESTI2026537, TESTI2026589, TESTI2026597, TESTI2026605, TESTI2026674, TESTI2026794, TESTI2026824, TESTI2026854, TESTI2026925, TESTI2026936, TESTI2026957, TESTI2027013, TESTI2027019, TESTI2027108, TESTI2027165, TESTI2027171, TESTI2027173, TESTI2027179, TESTI2027185, TESTI2027206, TESTI2027238, TESTI2027239, TESTI2027243, TESTI2027296, TESTI2027378, TESTI2027411, TESTI2027450, TESTI2027496, TESTI2027503, TESTI2027562, TESTI2027615, TESTI2027645, TESTI2027730, TESTI2027736, TESTI2027791, TESTI2027820, TESTI2027828, TESTI2027840, TESTI2027909, TESTI2028098, TESTI2028151, TESTI2028242, TESTI2028253, TESTI2028254, TESTI2028269, TESTI2028290, TESTI2028296, TESTI2028384, TESTI2028426, TESTI2028488, TESTI2028523, TESTI2028583, TESTI2028613, TESTI2028659, TESTI2028662, TESTI2028670, TESTI2028705, TESTI2028776, TESTI2028811, TESTI2028891, TESTI2028985, TESTI2028997, TESTI2029131, TESTI2029162, TESTI2029196, TESTI2029201, TESTI2029227, TESTI2029244, TESTI2029249, TESTI2029252, TESTI2029259, TESTI2029264, TESTI2029470, TESTI2029672, TESTI2029785, TESTI2029880, TESTI2030136, TESTI2030322, TESTI2030336, TESTI2030342, TESTI2030519, TESTI2030554, TESTI2030556, TESTI2030728, TESTI2030754, TESTI2030770, TESTI2030860, TESTI2030901, TESTI2030917, TESTI2030930, TESTI2031006, TESTI2031007, TESTI2031060, TESTI2031129, TESTI2031356, TESTI2031418, TESTI2031504, TESTI2031529, TESTI2031687, TESTI2031760, TESTI2031809, TESTI2031919, TESTI2031935, TESTI2031986, TESTI2032044, TESTI2032067, TESTI2032079, TESTI2032643, TESTI2032681, TESTI2032761, TESTI2032768, TESTI2032774, TESTI2032828, TESTI2033031, TESTI2033242, TESTI2033254, TESTI2033300, TESTI2033395, TESTI2033453, TESTI2033505, TESTI2033520, TESTI2033641, TESTI2033710, TESTI2033905, TESTI2034187, TESTI2034243, TESTI2034249, TESTI2034307, TESTI2034357, TESTI2034401, TESTI2034407, TESTI2034506, TESTI2034520, TESTI2034718, TESTI2034730, TESTI2034749, TESTI2034767, TESTI2034774, TESTI2034777, TESTI2034785, TESTI2034799, TESTI2034847, TESTI2034913, TESTI2034916, TESTI2034931, TESTI2034940, TESTI2034953, TESTI2034997, TESTI2035003, TESTI2035078, TESTI2035084, TESTI2035107, TESTI2035121, TESTI2035124, TESTI2035183, TESTI2035236, TESTI2035262, TESTI2035309, TESTI2035688, TESTI2035775, TESTI2035793, TESTI2035898, TESTI2035962, TESTI2035981, TESTI2035997, TESTI2036114, TESTI2036129, TESTI2036285, TESTI2036288, TESTI2036513, TESTI2036589, TESTI2036650, TESTI2036684, TESTI2036691, TESTI2036736, TESTI2036822, TESTI2036833, TESTI2036913, TESTI2036922, TESTI2036951, TESTI2036965, TESTI2036969, TESTI2037002, TESTI2037055, TESTI2037081, TESTI2037085, TESTI2037103, TESTI2037106, TESTI2037111, TESTI2037209, TESTI2037255, TESTI2037359, TESTI2037375, TESTI2037382, TESTI2037534, TESTI2037569, TESTI2037572, TESTI2037643, TESTI2037657, TESTI2037673, TESTI2037723, TESTI2037819, TESTI2037830, TESTI2037845, TESTI2037877, TESTI2037976, TESTI2038048, TESTI2038065, TESTI2038104, TESTI2038275, TESTI2038388, TESTI2038573, TESTI2038596, TESTI2038623, TESTI2038644, TESTI2038733, TESTI2038858, TESTI2038958, TESTI2039025, TESTI2039026, TESTI2039038, TESTI2039041, TESTI2039060, TESTI2039113, TESTI2039121, TESTI2039177, TESTI2039209, TESTI2039225, TESTI2039227, TESTI2039276, TESTI2039342, TESTI2039353, TESTI2039544, TESTI2039613, TESTI2039707, TESTI2039732, TESTI2039738, TESTI2039776, TESTI2039867, TESTI2039908, TESTI2040018, TESTI2040094, TESTI2040102, TESTI2040128, TESTI2040143, TESTI2040297, TESTI2040372, TESTI2040377, TESTI2040424, TESTI2040642, TESTI2040815, TESTI2040897, TESTI2040944, TESTI2040964, TESTI2040983, TESTI2040989, TESTI2041330, TESTI2041362, TESTI2041517, TESTI2041564, TESTI2041664, TESTI2041730, TESTI2041734, TESTI2041778, TESTI2041800, TESTI2041947, TESTI2041956, TESTI2041976, TESTI2042062, TESTI2042149, TESTI2042264, TESTI2042295, TESTI2042302, TESTI2042326, TESTI2042400, TESTI2042450, TESTI2042473, TESTI2042507, TESTI2042508, TESTI2042750, TESTI2042783, TESTI2042806, TESTI2042928, TESTI2042946, TESTI2042958, TESTI2043275, TESTI2043277, TESTI2043282, TESTI2043313, TESTI2043477, TESTI2043585, TESTI2043758, TESTI2043817, TESTI2043857, TESTI2043866, TESTI2043869, TESTI2044064, TESTI2044118, TESTI2044194, TESTI2044276, TESTI2044306, TESTI2044309, TESTI2044413, TESTI2044418, TESTI2044754, TESTI2044788, TESTI2044796, TESTI2044833, TESTI2044892, TESTI2044920, TESTI2044968, TESTI2045139, TESTI2045155, TESTI2045171, TESTI2045199, TESTI2045353, TESTI2045509, TESTI2045562, TESTI2045611, TESTI2045819, TESTI2045850, TESTI2045920, TESTI2045964, TESTI2045983, TESTI2046100, TESTI2046188, TESTI2046347, TESTI2046352, TESTI2046358, TESTI2046439, TESTI2046535, TESTI2046536, TESTI2046552, TESTI2046569, TESTI2046686, TESTI2046721, TESTI2046732, TESTI2046786, TESTI2046797, TESTI2046863, TESTI2046872, TESTI2047071, TESTI2047141, TESTI2047147, TESTI2047153, TESTI2047212, TESTI2047342, TESTI2047383, TESTI2047605, TESTI2047792, TESTI2047801, TESTI2047818, TESTI2047824, TESTI2047885, TESTI2047930, TESTI2048105, TESTI2048109, TESTI2048465, TESTI2048603, TESTI2048898, TESTI2049041, TESTI2049062, TESTI2049206, TESTI2049246, TESTI2049277, TESTI2049422, TESTI2049452, TESTI2049469, TESTI2049553, TESTI2049576, TESTI2049857, TESTI2049956, TESTI2050137, TESTI2050681, TESTI2050780, TESTI2050987, TESTI2051148, TESTI2051177, TESTI2051279, TESTI2051488, TESTI2051543, TESTI2051627, TESTI2051742, TESTI2051767, TESTI2051791, TESTI2051806, TESTI2051867, TESTI2051873, TESTI2052110, TESTI2052202, TESTI2052211, TESTI2052256, TESTI2052288, TESTI2052525, TESTI2052670, TESTI2052693, TESTI2052698, TESTI2052799, TESTI2052822, TESTI2052985, TESTI2053151, TESTI2053242, TESTI2053399, TESTI2053526, TESTI2053561, TESTI2053621, TESTI2053667, TESTI2053723, TESTI3000002, TESTI3000005, TESTI4000014, TESTI4000068, TESTI4000079, TESTI4000093, TESTI4000134, TESTI4000137, TESTI4000153, TESTI4000155, TESTI4000157, TESTI4000183, TESTI4000214, TESTI4000215, TESTI4000228, TESTI4000250, TESTI4000288, TESTI4000319, TESTI4000349, TESTI4000370, TESTI4000394, TESTI4000434, TESTI4000462, TESTI4000530, TESTI4000534, TESTI4000598, TESTI4000600, TESTI4000621, TESTI4000703, TESTI4000724, TESTI4000957, TESTI4000970, TESTI4001036, TESTI4001037, TESTI4001060, TESTI4001106, TESTI4001148, TESTI4001176, TESTI4001195, TESTI4001201, TESTI4001206, TESTI4001348, TESTI4001441, TESTI4001467, TESTI4001473, TESTI4001517, TESTI4001527, TESTI4001561, TESTI4001569, TESTI4001604, TESTI4001665, TESTI4001679, TESTI4001795, TESTI4001923, TESTI4001925, TESTI4001984, TESTI4002003, TESTI4002072, TESTI4002141, TESTI4002195, TESTI4002202, TESTI4002290, TESTI4002319, TESTI4002491, TESTI4002520, TESTI4002552, TESTI4002647, TESTI4002703, TESTI4002754, TESTI4002868, TESTI4002878, TESTI4002889, TESTI4002988, TESTI4003150, TESTI4003179, TESTI4003279, TESTI4003319, TESTI4003404, TESTI4003565, TESTI4003574, TESTI4003579, TESTI4003602, TESTI4003703, TESTI4003733, TESTI4003796, TESTI4003944, TESTI4004003, TESTI4004031, TESTI4004200, TESTI4004210, TESTI4004539, TESTI4004626, TESTI4004653, TESTI4004695, TESTI4004722, TESTI4004887, TESTI4004917, TESTI4005015, TESTI4005039, TESTI4005133, TESTI4005158, TESTI4005317, TESTI4005322, TESTI4005399, TESTI4005470, TESTI4005500, TESTI4005534, TESTI4005543, TESTI4005628, TESTI4005801, TESTI4005805, TESTI4005857, TESTI4005961, TESTI4006053, TESTI4006079, TESTI4006112, TESTI4006137, TESTI4006148, TESTI4006219, TESTI4006234, TESTI4006308, TESTI4006326, TESTI4006393, TESTI4006407, TESTI4006412, TESTI4006420, TESTI4006441, TESTI4006473, TESTI4006539, TESTI4006546, TESTI4006567, TESTI4006704, TESTI4006728, TESTI4006802, TESTI4006819, TESTI4007064, TESTI4007163, TESTI4007176, TESTI4007203, TESTI4007239, TESTI4007369, TESTI4007373, TESTI4007382, TESTI4007404, TESTI4007489, TESTI4007565, TESTI4007671, TESTI4007775, TESTI4007778, TESTI4007799, TESTI4007810, TESTI4007816, TESTI4007965, TESTI4008007, TESTI4008018, TESTI4008050, TESTI4008058, TESTI4008086, TESTI4008097, TESTI4008176, TESTI4008209, TESTI4008219, TESTI4008250, TESTI4008302, TESTI4008305, TESTI4008401, TESTI4008417, TESTI4008429, TESTI4008573, TESTI4008797, TESTI4008816, TESTI4008840, TESTI4008935, TESTI4008993, TESTI4009022, TESTI4009028, TESTI4009034, TESTI4009123, TESTI4009160, TESTI4009215, TESTI4009283, TESTI4009286, TESTI4009306, TESTI4009374, TESTI4009406, TESTI4009454, TESTI4009457, TESTI4009501, TESTI4009563, TESTI4009608, TESTI4009638, TESTI4009752, TESTI4009881, TESTI4009886, TESTI4009928, TESTI4010076, TESTI4010082, TESTI4010095, TESTI4010211, TESTI4010377, TESTI4010475, TESTI4010544, TESTI4010713, TESTI4010721, TESTI4010789, TESTI4010817, TESTI4010831, TESTI4010851, TESTI4010902, TESTI4010928, TESTI4010979, TESTI4011070, TESTI4011072, TESTI4011084, TESTI4011118, TESTI4011246, TESTI4011484, TESTI4011505, TESTI4011532, TESTI4011616, TESTI4011744, TESTI4011745, TESTI4011829, TESTI4011926, TESTI4011956, TESTI4012010, TESTI4012086, TESTI4012258, TESTI4012293, TESTI4012329, TESTI4012382, TESTI4012406, TESTI4012448, TESTI4012451, TESTI4012505, TESTI4012556, TESTI4012623, TESTI4012646, TESTI4012679, TESTI4012911, TESTI4012956, TESTI4012960, TESTI4013365, TESTI4013369, TESTI4013410, TESTI4013474, TESTI4013602, TESTI4013667, TESTI4013675, TESTI4013685, TESTI4013735, TESTI4013742, TESTI4013774, TESTI4013817, TESTI4013830, TESTI4013852, TESTI4013894, TESTI4013924, TESTI4013960, TESTI4013962, TESTI4014159, TESTI4014175, TESTI4014265, TESTI4014276, TESTI4014306, TESTI4014392, TESTI4014415, TESTI4014445, TESTI4014553, TESTI4014661, TESTI4014694, TESTI4014801, TESTI4014818, TESTI4014891, TESTI4014908, TESTI4014924, TESTI4014932, TESTI4014977, TESTI4015012, TESTI4015129, TESTI4015145, TESTI4015204, TESTI4015263, TESTI4015293, TESTI4015299, TESTI4015339, TESTI4015398, TESTI4015442, TESTI4015471, TESTI4015477, TESTI4015600, TESTI4015646, TESTI4015681, TESTI4015688, TESTI4015790, TESTI4016110, TESTI4016238, TESTI4016551, TESTI4016812, TESTI4016822, TESTI4016865, TESTI4016882, TESTI4016925, TESTI4017001, TESTI4017116, TESTI4017137, TESTI4017229, TESTI4017254, TESTI4017269, TESTI4017380, TESTI4017382, TESTI4017543, TESTI4017575, TESTI4017647, TESTI4017714, TESTI4017763, TESTI4017848, TESTI4017854, TESTI4017901, TESTI4017961, TESTI4017984, TESTI4018101, TESTI4018152, TESTI4018208, TESTI4018382, TESTI4018436, TESTI4018506, TESTI4018555, TESTI4018751, TESTI4018806, TESTI4018835, TESTI4018859, TESTI4018881, TESTI4018886, TESTI4018938, TESTI4019140, TESTI4019149, TESTI4019299, TESTI4019417, TESTI4019440, TESTI4019566, TESTI4019657, TESTI4019756, TESTI4019843, TESTI4020092, TESTI4020102, TESTI4020342, TESTI4020460, TESTI4020596, TESTI4020806, TESTI4020819, TESTI4020920, TESTI4021129, TESTI4021197, TESTI4021294, TESTI4021377, TESTI4021456, TESTI4021491, TESTI4021569, TESTI4021713, TESTI4021821, TESTI4022158, TESTI4022577, TESTI4022716, TESTI4022873, TESTI4023096, TESTI4023172, TESTI4023546, TESTI4023555, TESTI4023654, TESTI4023722, TESTI4023762, TESTI4023942, TESTI4024096, TESTI4024240, TESTI4024245, TESTI4024294, TESTI4024344, TESTI4024387, TESTI4024420, TESTI4024494, TESTI4024740, TESTI4024874, TESTI4024890, TESTI4024907, TESTI4024930, TESTI4025062, TESTI4025268, TESTI4025401, TESTI4025494, TESTI4025547, TESTI4025731, TESTI4025797, TESTI4025865, TESTI4025908, TESTI4025920, TESTI4026079, TESTI4026080, TESTI4026192, TESTI4026207, TESTI4026295, TESTI4026390, TESTI4026456, TESTI4026510, TESTI4026524, TESTI4026680, TESTI4026700, TESTI4026762, TESTI4026785, TESTI4027139, TESTI4027170, TESTI4027262, TESTI4027516, TESTI4027557, TESTI4027660, TESTI4027821, TESTI4027969, TESTI4028042, TESTI4028059, TESTI4028062, TESTI4028182, TESTI4028429, TESTI4028612, TESTI4028692, TESTI4028809, TESTI4028823, TESTI4028880, TESTI4028904, TESTI4028938, TESTI4028958, TESTI4028983, TESTI4029023, TESTI4029348, TESTI4029370, TESTI4029528, TESTI4029651, TESTI4029671, TESTI4029.676, TESTI4029690, TESTI4029731, TESTI4029743, TESTI4030069, TESTI4030159, TESTI4030319, TESTI4030505, TESTI4030603, TESTI4030669, TESTI4030673, TESTI4030864, TESTI4031066, TESTI4031173, TESTI4031335, TESTI4031745, TESTI4031818, TESTI4032090, TESTI4032112, TESTI4032128, TESTI4032270, TESTI4032375, TESTI4032834, TESTI4032856, TESTI4032895, TESTI4032913, TESTI4033146, TESTI4033177, TESTI4033433, TESTI4033690, TESTI4034172, TESTI4034212, TESTI4034432, TESTI4034495, TESTI4034632, TESTI4034633, TESTI4034912, TESTI4034973, TESTI4035063, TESTI4035065, TESTI4035498, TESTI4035508, TESTI4035581, TESTI4035602, TESTI4035637, TESTI4035649, TESTI4035770, TESTI4035872, TESTI4035895, TESTI4035898, TESTI4035989, TESTI4036012, TESTI4036042, TESTI4036048, TESTI4036315, TESTI4036319, TESTI4036449, TESTI4036767, TESTI4036909, TESTI4037066, TESTI4037188, TESTI4037228, TESTI4037244, TESTI4037727, TESTI4037949, TESTI4038047, TESTI4038099, TESTI4038156, TESTI4038223, TESTI4038258, TESTI4038284, TESTI4038339, TESTI4038492, TESTI4038721, TESTI4038758, TESTI4038779, TESTI4038818, TESTI4039038, TESTI4039086, TESTI4039451, TESTI4039575, TESTI4039659, TESTI4039744, TESTI4039904, TESTI4040197, TESTI4040363, TESTI4040535, TESTI4040559, TESTI4040598, TESTI4040800, TESTI4040804, TESTI4040939, TESTI4040956, TESTI4041049, TESTI4041053, TESTI4041086, TESTI4041099, TESTI4041143, TESTI4041482, TESTI4041519, TESTI4041624, TESTI4041629, TESTI4041832, TESTI4041844, TESTI4041903, TESTI4041954, TESTI4041984, TESTI4041985, TESTI4041986, TESTI4042098, TESTI4042420, TESTI4042440, TESTI4042444, TESTI4042711, TESTI4042846, TESTI4043067, TESTI4043129, TESTI4043166, TESTI4043203, TESTI4043223, TESTI4043371, TESTI4043378, TESTI4043512, TESTI4043551, TESTI4043710, TESTI4043947, TESTI4044035, TESTI4044076, TESTI4044084, TESTI4044123, TESTI4044186, TESTI4044234, TESTI4044291, TESTI4044296, TESTI4044300, TESTI4044682, TESTI4044704, TESTI4044770, TESTI4045168, TESTI4045312, TESTI4045330, TESTI4045470, TESTI4045701, TESTI4045908, TESTI4045955, TESTI4045982, TESTI4046073, TESTI4046090, TESTI4046240, TESTI4046245, TESTI4046253, TESTI4046282, TESTI4046328, TESTI4046450, TESTI4046457, TESTI4046487, TESTI4046502, TESTI4046523, TESTI4046819, TESTI4046873, TESTI4046884, TESTI4046896, TESTI4046903, TESTI4046962, TESTI4047069, TESTI4047119, TESTI4047305, TESTI4047328, TESTI4047437, TESTI4047569, TESTI4047746, TESTI4047808, THYMU1000010, THYMU1000017, THYMU1000025, THYMU1000029, THYMU1000032, THYMU1000033, THYMU1000041, THYMU1000060, THYMU1000074, THYMU1000083, THYMU1000098, THYMU1000103, THYMU1000105, THYMU1000109, THYMU1000136, THYMU1000142, THYMU1000144, THYMU1000158, THYMU1000176, THYMU1000179, THYMU1000191, THYMU1000198, THYMU1000217, THYMU1000240, THYMU1000242, THYMU1000291, THYMU1000316, THYMU1000318, THYMU1000329, THYMU1000331, THYMU1000336, THYMU1000359, THYMU1000366, THYMU1000382, THYMU1000393, THYMU1000394, THYMU1000399, THYMU1000426, THYMU1000440, THYMU1000459, THYMU1000473, THYMU1000490, THYMU1000491, THYMU1000496, THYMU1000499, THYMU1000527, THYMU1000532, THYMU1000536, THYMU1000554, THYMU1000558, THYMU1000576, THYMU1000600, THYMU1000677, THYMU1000692, THYMU2000022, THYMU2000032, THYMU2000057, THYMU2000120, THYMU2000138, THYMU2000140, THYMU2000155, THYMU2000162, THYMU2000171, THYMU2000176, THYMU2000179, THYMU2000231, THYMU2000236, THYMU2000276, THYMU2000280, THYMU2000300, THYMU2000317, THYMU2000368, THYMU2000369, THYMU2000418, THYMU2000440, THYMU2000489, THYMU2000492, THYMU2000519, THYMU2000570, THYMU2000602, THYMU2000660, THYMU2000671, THYMU2000672, THYMU2000684, THYMU2000702, THYMU2000767, THYMU2000775, THYMU2000800, THYMU2000879, THYMU2000932, THYMU2000946, THYMU2000950, THYMU2000971, THYMU2000982, THYMU2000990, THYMU2001007, THYMU2001018, THYMU2001053, THYMU2001071, THYMU2001090, THYMU2001139, THYMU2001195, THYMU2001202, THYMU2001203, THYMU2001256, THYMU2001270, THYMU2001291, THYMU2001314, THYMU2001325, THYMU2001357, THYMU2001381, THYMU2001422, THYMU2001443, THYMU2001515, THYMU2001521, THYMU2001556, THYMU2001622, THYMU2001727, THYMU2001819, THYMU2001825, THYMU2001839, THYMU2001868, THYMU2001898, THYMU2001900, THYMU2001916, THYMU2001926, THYMU2001989, THYMU2002037, THYMU2002080, THYMU2002109, THYMU2002147, THYMU2002154, THYMU2002157, THYMU2002162, THYMU2002177, THYMU2002203, THYMU2002229, THYMU2002242, THYMU2002338, THYMU2002356, THYMU2002376, THYMU2002384, THYMU2002450, THYMU2002490, THYMU2002548, THYMU2002695, THYMU2002745, THYMU2002756, THYMU2002789, THYMU2002792, THYMU2002815, THYMU2002841, THYMU2002852, THYMU2002910, THYMU2002950, THYMU2002983, THYMU2003012, THYMU2003046, THYMU2003069, THYMU2003107, THYMU2003124, THYMU2003133, THYMU2003166, THYMU2003232, THYMU2003242, THYMU2003249, THYMU2003270, THYMU2003282, THYMU2003287, THYMU2003336, THYMU2003366, THYMU2003397, THYMU2003446, THYMU2003470, THYMU2003479, THYMU2003499, THYMU2003632, THYMU2003650, THYMU2003700, THYMU2003760, THYMU2003803, THYMU2003855, THYMU2003907, THYMU2003932, THYMU2003981, THYMU2004003, THYMU2004008, THYMU2004042, THYMU2004108, THYMU2004111, THYMU2004123, THYMU2004139, THYMU2004152, THYMU2004169, THYMU2004284, THYMU2004320, THYMU2004336, THYMU2004356, THYMU2004410, THYMU2004452, THYMU2004508, THYMU2004512, THYMU2004635, THYMU2004639, THYMU2004668, THYMU2004677, THYMU2004688, THYMU2004693, THYMU2004733, THYMU2004835, THYMU2004843, THYMU2004906, THYMU2004916, THYMU2004986, THYMU2005001, THYMU2005003, THYMU2005046, THYMU2005134, THYMU2005156, THYMU2005190, THYMU2005225, THYMU2005240, THYMU2005246, THYMU2005270, THYMU2005283, THYMU2005303, THYMU2005321, THYMU2005356, THYMU2005369, THYMU2005439, THYMU2005480, THYMU2005482, THYMU2005507, THYMU2005545, THYMU2005574, THYMU2005576, THYMU2005748, THYMU2005759, THYMU2005807, THYMU2005815, THYMU2005855, THYMU2005881, THYMU2005948, THYMU2005980, THYMU2005997, THYMU2006001, THYMU2006048, THYMU2006098, THYMU2006160, THYMU2006170, THYMU2006252, THYMU2006261, THYMU2006277, THYMU2006303, THYMU2006324, THYMU2006350, THYMU2006357, THYMU2006365, THYMU2006420, THYMU2006468, THYMU2006505, THYMU2006610, THYMU2006666, THYMU2006712, THYMU2006813, THYMU2006913, THYMU2006946, THYMU2006965, THYMU2007025, THYMU2007036, THYMU2007060, THYMU2007065, THYMU2007095, THYMU2007112, THYMU2007146, THYMU2007179, THYMU2007258, THYMU2007307, THYMU2007308, THYMU2007339, THYMU2007350, THYMU2007384, THYMU2007415, THYMU2007467, THYMU2007493, THYMU2007521, THYMU2007528, THYMU2007530, THYMU2007532, THYMU2007561, THYMU2007571, THYMU2007635, THYMU2007658, THYMU2007667, THYMU2007694, THYMU2007725, THYMU2007729, THYMU2007802, THYMU2007824, THYMU2007854, THYMU2007886, THYMU2007952, THYMU2007969, THYMU2008035, THYMU2008036, THYMU2008049, THYMU2008072, THYMU2008111, THYMU2008145, THYMU2008149, THYMU2008185, THYMU2008191, THYMU2008207, THYMU2008226, THYMU2008282, THYMU2008321, THYMU2008339, THYMU2008350, THYMU2008351, THYMU2008383, THYMU2008452, THYMU2008643, THYMU2008686, THYMU2008691, THYMU2008714, THYMU2008725, THYMU2008727, THYMU2008781, THYMU2008799, THYMU2008876, THYMU2008910, THYMU2008917, THYMU2008928, THYMU2008990, THYMU2008994, THYMU2009023, THYMU2009046, THYMU2009101, THYMU2009104, THYMU2009134, THYMU2009157, THYMU2009181, THYMU2009186, THYMU2009338, THYMU2009425, THYMU2009516, THYMU2009526, THYMU2009546, THYMU2009592, THYMU2009596, THYMU2009792, THYMU2009835, THYMU2009906, THYMU2009948, THYMU2010030, THYMU2010041, THYMU2010046, THYMU2010059, THYMU2010082, THYMU2010094, THYMU2010192, THYMU2010448, THYMU2010519, THYMU2010637, THYMU2010671, THYMU2010699, THYMU2010705, THYMU2010779, THYMU2010816, THYMU2010831, THYMU2010848, THYMU2011053, THYMU2011063, THYMU2011072, THYMU2011096, THYMU2011118, THYMU2011142, THYMU2011183, THYMU2011257, THYMU2011259, THYMU2011295, THYMU2011308, THYMU2011390, THYMU2011431, THYMU2011447, THYMU2011482, THYMU2011538, THYMU2011548, THYMU2011551, THYMU2011564, THYMU2011573, THYMU2011585, THYMU2011621, THYMU2011666, THYMU2011736, THYMU2011785, THYMU2011806, THYMU2011852, THYMU2011875, THYMU2011881, THYMU2011937, THYMU2011939, THYMU2012002, THYMU2012024, THYMU2012073, THYMU2012104, THYMU2012113, THYMU2012273, THYMU2012401, THYMU2012492, THYMU2012507, THYMU2012565, THYMU2012574, THYMU2012625, THYMU2012631, THYMU2012665, THYMU2012690, THYMU2012701, THYMU2012807, THYMU2012826, THYMU2012882, THYMU2012891, THYMU2012902, THYMU2012919, THYMU2013023, THYMU2013047, THYMU2013051, THYMU2013089, THYMU2013170, THYMU2013364, THYMU2013386, THYMU2013426, THYMU2013578, THYMU2013648, THYMU2013705, THYMU2013757, THYMU2013779, THYMU2013863, THYMU2013950, THYMU2013981, THYMU2014068, THYMU2014167, THYMU2014183, THYMU2014204, THYMU2014297, THYMU2014323, THYMU2014327, THYMU2014353, THYMU2014492, THYMU2014500, THYMU2014599, THYMU2014762, THYMU2014777, THYMU2014801, THYMU2014901, THYMU2014923, THYMU2015019, THYMU2015161, THYMU2015316, THYMU2015321, THYMU2015439, THYMU2015441, THYMU2015479, THYMU2015775, THYMU2015825, THYMU2015918, THYMU2015943, THYMU2015984, THYMU2016113, THYMU2016164, THYMU2016204, THYMU2016219, THYMU2016360, THYMU2016496, THYMU2016523, THYMU2016840, THYMU2016968, THYMU2017008, THYMU2017010, THYMU2017023, THYMU2017085, THYMU2017099, THYMU2017158, THYMU2017162, THYMU2017215, THYMU2017362, THYMU2017366, THYMU2017398, THYMU2017449, THYMU2017479, THYMU2017522, THYMU2017526, THYMU2017601, THYMU2017675, THYMU2017707, THYMU2017831, THYMU2017844, THYMU2017878, THYMU2017948, THYMU2018028, THYMU2018071, THYMU2018189, THYMU2018197, THYMU2018384, THYMU2018455, THYMU2018547, THYMU2018565, THYMU2018639, THYMU2018673, THYMU2018721, THYMU2018772, THYMU2018819, THYMU2018841, THYMU2018997, THYMU2019021, THYMU2019054, THYMU2019197, THYMU2019210, THYMU2019364, THYMU2019436, THYMU2019442, THYMU2019587, THYMU2019599, THYMU2019686, THYMU2019813, THYMU2020198, THYMU2020289, THYMU2020416, THYMU2020491, THYMU2020499, THYMU2020560, THYMU2020667, THYMU2020830, THYMU2020883, THYMU2020959, THYMU2021361, THYMU2021509, THYMU2021597, THYMU2021684, THYMU2021714, THYMU2022213, THYMU2022289, THYMU2022660, THYMU2022854, THYMU2022922, THYMU2023209, THYMU2023264, THYMU2023576, THYMU2023711, THYMU2023900, THYMU2023943, THYMU2023967, THYMU2024071, THYMU2024121, THYMU2024185, THYMU2024207, THYMU2024616, THYMU2024684, THYMU2024748, THYMU2025042, THYMU2025189, THYMU2025319, THYMU2025325, THYMU2025406, THYMU2025557, THYMU2025572, THYMU2025707, THYMU2025849, THYMU2025909, THYMU2025939, THYMU2026182, THYMU2026350, THYMU2026530, THYMU2026531, THYMU2026835, THYMU2026904, THYMU2027053, THYMU2027125, THYMU2027168, THYMU2027249, THYMU2027282, THYMU2027497, THYMU2027695, THYMU2027734, THYMU2027894, THYMU2027975, THYMU2027996, THYMU2028041, THYMU2028368, THYMU2028379, THYMU2028394, THYMU2028412, THYMU2028629, THYMU2028632, THYMU2028724, THYMU2028739, THYMU2028942, THYMU2028978, THYMU2029134, THYMU2029578, THYMU2029676, THYMU2029688, THYMU2029788, THYMU2030068, THYMU2030226, THYMU2030264, THYMU2030462, THYMU2030543, THYMU2030637, THYMU2030655, THYMU2030796, THYMU2030912, THYMU2030982, THYMU2031046, THYMU2031139, THYMU2031218, THYMU2031249, THYMU2031258, THYMU2031341, THYMU2031368, THYMU2031579, THYMU2031847, THYMU2031890, THYMU2031994, THYMU2032014, THYMU2032035, THYMU2032080, THYMU2032150, THYMU2032155, THYMU2032358, THYMU2032437, THYMU2032601, THYMU2032655, THYMU2032696, THYMU2032715, THYMU2032732, THYMU2032825, THYMU2032976, THYMU2033053, THYMU2033059, THYMU2033070, THYMU2033079, THYMU2033085, THYMU2033104, THYMU2033227, THYMU2033263, THYMU2033401, THYMU2033583, THYMU2033755, THYMU2033787, THYMU2033816, THYMU2034182, THYMU2034279, THYMU2034314, THYMU2034338, THYMU2034374, THYMU2034647, THYMU2034917, THYMU2035064, THYMU2035078, THYMU2035101, THYMU2035319, THYMU2035321, THYMU2035388, THYMU2035400, THYMU2035554, THYMU2035710, THYMU2036058, THYMU2036105, THYMU2036207, THYMU2036215, THYMU2036252, THYMU2036265, THYMU2036366, THYMU2036459, THYMU2036461, THYMU2036604, THYMU2036653, THYMU2037081, THYMU2037208, THYMU2037226, THYMU2037233, THYMU2037234, THYMU2037348, THYMU2037406, THYMU2037965, THYMU2038058, THYMU2038189, THYMU2038199, THYMU2038220, THYMU2038301, THYMU2038369, THYMU2038389, THYMU2038615, THYMU2038636, THYMU2038739, THYMU2038772, THYMU2038797, THYMU2038906, THYMU2039305, THYMU2039315, THYMU2039350, THYMU2039411, THYMU2039634, THYMU2039719, THYMU2039780, THYMU2039788, THYMU2039989, THYMU2040029, THYMU2040110, THYMU2040114, THYMU2040140, THYMU2040412, THYMU2040427, THYMU2040824, THYMU2040925, THYMU2041007, THYMU2041015, THYMU2041252, THYMU3000028, THYMU3000036, THYMU3000037, THYMU3000082, THYMU3000194, THYMU3000224, THYMU3000269, THYMU3000306, THYMU3000360, THYMU3000390, THYMU3000420, THYMU3000490, THYMU3000504, THYMU3000542, THYMU3000655, THYMU3000776, THYMU3000826, THYMU3000841, THYMU3001077, THYMU3001082, THYMU3001083, THYMU3001133, THYMU3001151, THYMU3001379, THYMU3001472, THYMU3001593, THYMU3001883, THYMU3001939, THYMU3001991, THYMU3002452, THYMU3002578, THYMU3002661, THYMU3003007, THYMU3003092, THYMU3003212, THYMU3003309, THYMU3003350, THYMU3003403, THYMU3003565, THYMU3003763, THYMU3003865, THYMU3003958, THYMU3003965, THYMU3004157, THYMU3004628, THYMU3004632, THYMU3004835, THYMU3004866, THYMU3005050, THYMU3005378, THYMU3005407, THYMU3005415, THYMU3005427, THYMU3005482, THYMU3005491, THYMU3005629, THYMU3005696, THYMU3006118, THYMU3006132, THYMU3006168, THYMU3006172, THYMU3006371, THYMU3006485, THYMU3006640, THYMU3006767, THYMU3006811, THYMU3006963, THYMU3007137, THYMU3007308, THYMU3007368, THYMU3007423, THYMU3007559, THYMU3007845, THYMU3008060, THYMU3008105, THYMU3008136, THYMU3008171, THYMU3008216, THYMU3008436, THYMU3008672, THYMU3008883, THYMU3008935, THYMU3009006, THYMU3009255, THYMU3009391, THYMU3009643, THYMU3009755, THYMU3010247, THYMU3011012, THYMU3011081, THYMU3011244, THYMU3011360, THYMU3011534, THYMU3011543, THYMU3011556, THYMU3011717, THYMU3011827, THYMU3012402, THYMU3012907, THYMU3012983, THYMU3013114, THYMU3013197, THYMU3013241, THYMU3013386, THYMU3013470, THYMU3013785, THYMU3013897, THYMU3014038, THYMU3014173, THYMU3014372, THYMU3014555, THYMU3014620, THYMU3014701, THYMU3015042, THYMU3015457, THYMU3015571, THYMU3015592, THYMU3015625, THYMU3015647, THYMU3015759, THYMU3015962, THYMU3016022, THYMU3016518, THYMU3016797, THYMU3016822, THYMU3016850, THYMU3017562, THYMU3017688, THYMU3017689, THYMU3017761, THYMU3018151, THYMU3018896, THYMU3019095, THYMU3019476, THYMU3019605, THYMU3019916, THYMU3020221, THYMU3020595, THYMU3020713, THYMU3020856, THYMU3020869, THYMU3020970, THYMU3021404, THYMU3021586, THYMU3021755, THYMU3021900, THYMU3022211, THYMU3022434, THYMU3022528, THYMU3022668, THYMU3022982, THYMU3023107, THYMU3023211, THYMU3023216, THYMU3023394, THYMU3023400, THYMU3023797, THYMU3024164, THYMU3024339, THYMU3024602, THYMU3024879, THYMU3025118, THYMU3025313, THYMU3025642, THYMU3025683, THYMU3025772, THYMU3025865, THYMU3026000, THYMU3026350, THYMU3026479, THYMU3026532, THYMU3026783, THYMU3026869, THYMU3027251, THYMU3027540, THYMU3027655, THYMU3027671, THYMU3028075, THYMU3028410, THYMU3028461, THYMU3028702, THYMU3029188, THYMU3029318, THYMU3029421, THYMU3029719, THYMU3029774, THYMU3029832, THYMU3030072, THYMU3030231, THYMU3030706, THYMU3030710, THYMU3030752, THYMU3031146, THYMU3031402, THYMU3031610, THYMU3031612, THYMU3031868, THYMU3031878, THYMU3032032, THYMU3032798, THYMU3032867, THYMU3033402, THYMU3033626, THYMU3033630, THYMU3033649, THYMU3033754, THYMU3033759, THYMU3034078, THYMU3034099, THYMU3034453, THYMU3034616, THYMU3034853, THYMU3034867, THYMU3034983, THYMU3036200, THYMU3036310, THYMU3036934, THYMU3036953, THYMU3037052, THYMU3037192, THYMU3037617, THYMU3037772, THYMU3037827, THYMU3037836, THYMU3037856, THYMU3037867, THYMU3037909, THYMU3037980, THYMU3038158, THYMU3038167, THYMU3038214, THYMU3038266, THYMU3038328, THYMU3038347, THYMU3038375, THYMU3038603, THYMU3038687, THYMU3038759, THYMU3038879, THYMU3038970, THYMU3039807, THYMU3039846, THYMU3040068, THYMU3040126, THYMU3040146, THYMU3040168, THYMU3040172, THYMU3040725, THYMU3040746, THYMU3040816, THYMU3040829, THYMU3040830, THYMU3040986, THYMU3041354, THYMU3041386, THYMU3041428, THYMU3041573, THYMU3041603, THYMU3041736, THYMU3041918, THYMU3042075, THYMU3042321, THYMU3042372, THYMU3042758, THYMU3042929, THYMU3043200, THYMU3043327, THYMU3043482, THYMU3043597, THYMU3043688, THYMU3043779, THYMU3043883, THYMU3043993, THYMU3044175, THYMU3044188, THYMU3044441, THYMU3044445, THYMU3045510, THYMU3045673, THYMU3045692, THYMU3045704, THYMU3046140, THYMU3046350, THYMU3046360, THYMU3046856, THYMU3047115, THYMU3047144, THYMU3047156, THYMU3047366, THYMU3047513, THYMU3047542, THYMU3047760, THYMU3047891, TKIDN1000044, TKIDN1000062, TKIDN1000066, TKIDN1000164, TKIDN1000171, TKIDN1000192, TKIDN2000127, TKIDN2000240, TKIDN2000246, TKIDN2000319, TKIDN2000464, TKIDN2000521, TKIDN2000701, TKIDN2001529, TKIDN2001662, TKIDN2002318, TKIDN2002329, TKIDN2002424, TKIDN2002632, TKIDN2003044, TKIDN2003059, TKIDN2003062, TKIDN2003078, TKIDN2003366, TKIDN2003396, TKIDN2003413, TKIDN2003597, TKIDN2003601, TKIDN2004185, TKIDN2004386, TKIDN2004458, TKIDN2004748, TKIDN2005487, TKIDN2005721, TKIDN2005934, TKIDN2005947, TKIDN2005956, TKIDN2006525, TKIDN2006761, TKIDN2006852, TKIDN2007605, TKIDN2007667, TKIDN2007828, TKIDN2008176, TKIDN2008778, TKIDN2009092, TKIDN2009330, TKIDN2009481, TKIDN2009641, TKIDN2009794, TKIDN2009889, TKIDN2010200, TKIDN2010232, TKIDN2010278, TKIDN2010602, TKIDN2010812, TKIDN2010934, TKIDN2011051, TKIDN2011160, TKIDN2011289, TKIDN2011324, TKIDN2012034, TKIDN2012771, TKIDN2012824, TKIDN2013134, TKIDN2013287, TKIDN2014570, TKIDN2014757, TKIDN2014771, TKIDN2014964, TKIDN2015025, TKIDN2015071, TKIDN2015161, TKIDN2015263, TKIDN2015285, TKIDN2015788, TKIDN2016309, TKIDN2016399, TKIDN2016846, TKIDN2018926, TKIDN2019116, TLIVE2000023, TLIVE2000142, TLIVE2000292, TLIVE2000762, TLIVE2000979, TLIVE2001327, TLIVE2001616, TLIVE2001684, TLIVE2001828, TLIVE2001927, TLIVE2002336, TLIVE2002338, TLIVE2002562, TLIVE2002690, TLIVE2002882, TLIVE2003197, TLIVE2003200, TLIVE2003225, TLIVE2003381, TLIVE2003737, TLIVE2003961, TLIVE2003970, TLIVE2004110, TLIVE2004320, TLIVE2004331, TLIVE2004601, TLIVE2005180, TLIVE2005390, TLIVE2005516, TLIVE2005731, TLIVE2005866, TLIVE2006236, TLIVE2006359, TLIVE2006529, TLIVE2006621, TLIVE2006733, TLIVE2007000, TLIVE2007016, TLIVE2007132, TLIVE2007192, TLIVE2007528, TLIVE2007607, TLIVE2007736, TLIVE2007816, TLIVE2007919, TLIVE2008083, TLIVE2008213, TLIVE2008221, TLIVE2008229, TLIVE2008712, TLIVE2008797, TLIVE2009087, TLIVE2009163, TLIVE2009489, TLIVE2009541, TLUNG2000179, TOVAR2000476, TOVAR2000575, TOVAR2000649, TOVAR2000904, TOVAR2001281, TOVAR2001556, TOVAR2001730, TOVAR2002247, TOVAR2002514, TOVAR2002549, TOVAR2002800, TRACH1000011, TRACH1000018, TRACH1000030, TRACH1000038, TRACH1000057, TRACH1000074, TRACH1000100, TRACH1000106, TRACH1000125, TRACH1000140, TRACH1000144, TRACH1000193, TRACH1000212, TRACH1000240, TRACH2000002, TRACH2000015, TRACH2000024, TRACH2000032, TRACH2000045, TRACH2000047, TRACH2000081, TRACH2000083, TRACH2000148, TRACH2000185, TRACH2000196, TRACH2000235, TRACH2000237, TRACH2000243, TRACH2000250, TRACH2000259, TRACH2000272, TRACH2000282, TRACH2000287, TRACH2000289, TRACH2000306, TRACH2000312, TRACH2000336, TRACH2000359, TRACH2000393, TRACH2000411, TRACH2000420, TRACH2000461, TRACH2000496, TRACH2000497, TRACH2000502, TRACH2000522, TRACH2000540, TRACH2000559, TRACH2000660, TRACH2000665, TRACH2000675, TRACH2000677, TRACH2000702, TRACH2000703, TRACH2000767, TRACH2000775, TRACH2000780, TRACH2000807, TRACH2000862, TRACH2000873, TRACH2000894, TRACH2000898, TRACH2000920, TRACH2000923, TRACH2000926, TRACH2000944, TRACH2000959, TRACH2000981, TRACH2000986, TRACH2001021, TRACH2001037, TRACH2001060, TRACH2001085, TRACH2001101, TRACH2001109, TRACH2001121, TRACH2001147, TRACH2001154, TRACH2001188, TRACH2001192, TRACH2001249, TRACH2001275, TRACH2001314, TRACH2001335, TRACH2001339, TRACH2001341, TRACH2001347, TRACH2001395, TRACH2001400, TRACH2001403, TRACH2001416, TRACH2001428, TRACH2001443, TRACH2001474, TRACH2001478, TRACH2001525, TRACH2001532, TRACH2001549, TRACH2001592, TRACH2001596, TRACH2001612, TRACH2001621, TRACH2001646, TRACH2001651, TRACH2001684, TRACH2001810, TRACH2001898, TRACH2001933, TRACH2001968, TRACH2001996, TRACH2002043, TRACH2002054, TRACH2002100, TRACH2002138, TRACH2002664, TRACH2002784, TRACH2002803, TRACH2002840, TRACH2002847, TRACH2002853, TRACH2002862, TRACH2002954, TRACH2002960, TRACH2002988, TRACH2003070, TRACH2003272, TRACH2003347, TRACH2003484, TRACH2003516, TRACH2003605, TRACH2003736, TRACH2003759, TRACH2003941, TRACH2004039, TRACH2004054, TRACH2004087, TRACH2004109, TRACH2004170, TRACH2004183, TRACH2004251, TRACH2004292, TRACH2004336, TRACH2004399, TRACH2004428, TRACH2004458, TRACH2004521, TRACH2004570, TRACH2004845, TRACH2004887, TRACH2004950, TRACH2005004, TRACH2005017, TRACH2005066, TRACH2005159, TRACH2005314, TRACH2005444, TRACH2005541, TRACH2005666, TRACH2005698, TRACH2005710, TRACH2005720, TRACH2005769, TRACH2005796, TRACH2005800, TRACH2005811, TRACH2006015, TRACH2006049, TRACH2006097, TRACH2006194, TRACH2006327, TRACH2006331, TRACH2006378, TRACH2006387, TRACH2006528, TRACH2006670, TRACH2006762, TRACH2006866, TRACH2006870, TRACH2006918, TRACH2007059, TRACH2007324, TRACH2007358, TRACH2007483, TRACH2007542, TRACH2007577, TRACH2007674, TRACH2007676, TRACH2007688, TRACH2007733, TRACH2007754, TRACH2007816, TRACH2007894, TRACH2007988, TRACH2008081, TRACH2008112, TRACH2008113, TRACH2008127, TRACH2008130, TRACH2008278, TRACH2008300, TRACH2008472, TRACH2008478, TRACH2008540, TRACH2008583, TRACH2008597, TRACH2008716, TRACH2008820, TRACH2008891, TRACH2008921, TRACH2009006, TRACH2009060, TRACH2009107, TRACH2009123, TRACH2009268, TRACH2009291, TRACH2009310, TRACH2009340, TRACH2009348, TRACH2009358, TRACH2009661, TRACH2009730, TRACH2009743, TRACH2009754, TRACH2009851, TRACH2009862, TRACH2009934, TRACH2010159, TRACH2010218, TRACH2010251, TRACH2010272, TRACH2010317, TRACH2010419, TRACH2010451, TRACH2010505, TRACH2010587, TRACH2010600, TRACH2010634, TRACH2010639, TRACH2010677, TRACH2010698, TRACH2010771, TRACH2010824, TRACH2010883, TRACH2010965, TRACH2010974, TRACH2011057, TRACH2011093, TRACH2011113, TRACH2011290, TRACH2011293, TRACH2011302, TRACH2011500, TRACH2011574, TRACH2011894, TRACH2011956, TRACH2012000, TRACH2012138, TRACH2012242, TRACH2012298, TRACH2012370, TRACH2012376, TRACH2012387, TRACH2012536, TRACH2012562, TRACH2012742, TRACH2012811, TRACH2012823, TRACH2012918, TRACH2013081, TRACH2013123, TRACH2013265, TRACH2013369, TRACH2013450, TRACH2013495, TRACH2013552, TRACH2013585, TRACH2013671, TRACH2013726, TRACH2013902, TRACH2013928, TRACH2013982, TRACH2013991, TRACH2014018, TRACH2014045, TRACH2014046, TRACH2014082, TRACH2014124, TRACH2014268, TRACH2014284, TRACH2014337, TRACH2014356, TRACH2014371, TRACH2014483, TRACH2014495, TRACH2014544, TRACH2014573, TRACH2014725, TRACH2014760, TRACH2014815, TRACH2014839, TRACH2014938, TRACH2014950, TRACH2014972, TRACH2014974, TRACH2014997, TRACH2015180, TRACH2015243, TRACH2015316, TRACH2015381, TRACH2015486, TRACH2015654, TRACH2015939, TRACH2015987, TRACH2016080, TRACH2016131, TRACH2016286, TRACH2016317, TRACH2016347, TRACH2016380, TRACH2016384, TRACH2016410, TRACH2016481, TRACH2016498, TRACH2016533, TRACH2016551, TRACH2016554, TRACH2016651, TRACH2016690, TRACH2016709, TRACH2016722, TRACH2016980, TRACH2017086, TRACH2017368, TRACH2017498, TRACH2017609, TRACH2017949, TRACH2017965, TRACH2017980, TRACH2018034, TRACH2018084, TRACH2018262, TRACH2018273, TRACH2018278, TRACH2018345, TRACH2018380, TRACH2018449, TRACH2018512, TRACH2018646, TRACH2018663, TRACH2018718, TRACH2018835, TRACH2018882, TRACH2018914, TRACH2018950, TRACH2019024, TRACH2019046, TRACH2019080, TRACH2019151, TRACH2019154, TRACH2019176, TRACH2019248, TRACH2019309, TRACH2019425, TRACH2019473, TRACH2019602, TRACH2019661, TRACH2019672, TRACH2019673, TRACH2019844, TRACH2019879, TRACH2020048, TRACH2020336, TRACH2020525, TRACH2021398, TRACH2021622, TRACH2021635, TRACH2021964, TRACH2022042, TRACH2022113, TRACH2022253, TRACH2022425, TRACH2022553, TRACH2022649, TRACH2022839, TRACH2023246, TRACH2023299, TRACH2023306, TRACH2023416, TRACH2023479, TRACH2023684, TRACH2023860, TRACH2023876, TRACH2024139, TRACH2024187, TRACH2024271, TRACH2024293, TRACH2024408, TRACH2024512, TRACH2024559, TRACH2024647, TRACH2024651, TRACH2024730, TRACH2024735, TRACH2024749, TRACH2024821, TRACH2025057, TRACH2025084, TRACH2025155, TRACH2025224, TRACH2025344, TRACH2025379, TRACH2025507, TRACH2025569, TRACH2025705, TRACH2025749, TRACH2025753, TRACH2025810, TRACH2025853, TRACH2025911, TRACH2025932, TRACH3000014, TRACH3000017, TRACH3000043, TRACH3000134, TRACH3000180, TRACH3000342, TRACH3000420, TRACH3000515, TRACH3000530, TRACH3000548, TRACH3000558, TRACH3000586, TRACH3000780, TRACH3000892, TRACH3000926, TRACH3001119, TRACH3001443, TRACH3001550, TRACH3001759, TRACH3002064, TRACH3002107, TRACH3002168, TRACH3002188, TRACH3002192, TRACH3002245, TRACH3002293, TRACH3002533, TRACH3002561, TRACH3002567, TRACH3002605, TRACH3002650, TRACH3002752, TRACH3002866, TRACH3002871, TRACH3002876, TRACH3002890, TRACH3003009, TRACH3003037, TRACH3003357, TRACH3003379, TRACH3003547, TRACH3003586, TRACH3003683, TRACH3003780, TRACH3003805, TRACH3003832, TRACH3003872, TRACH3004068, TRACH3004113, TRACH3004288, TRACH3004303, TRACH3004412, TRACH3004424, TRACH3004456, TRACH3004537, TRACH3004596, TRACH3004651, TRACH3004652, TRACH3004671, TRACH3004747, TRACH3004760, TRACH3004783, TRACH3004786, TRACH3004840, TRACH3004931, TRACH3004934, TRACH3005072, TRACH3005085, TRACH3005102, TRACH3005173, TRACH3005191, TRACH3005211, TRACH3005274, TRACH3005294, TRACH3005479, TRACH3005549, TRACH3005699, TRACH3005702, TRACH3005808, TRACH3005852, TRACH3005896, TRACH3006038, TRACH3006149, TRACH3006228, TRACH3006264, TRACH3006336, TRACH3006379, TRACH3006392, TRACH3006395, TRACH3006397, TRACH3006412, TRACH3006470, TRACH3006589, TRACH3006626, TRACH3006699, TRACH3006717, TRACH3006800, TRACH3006889, TRACH3006985, TRACH3007097, TRACH3007268, TRACH3007274, TRACH3007277, TRACH3007391, TRACH3007479, TRACH3007541, TRACH3007595, TRACH3007627, TRACH3007689, TRACH3007766, TRACH3007866, TRACH3007995, TRACH3008042, TRACH3008061, TRACH3008093, TRACH3008201, TRACH3008508, TRACH3008535, TRACH3008629, TRACH3008632, TRACH3008688, TRACH3008697, TRACH3008713, TRACH3008887, TRACH3008902, TRACH3008990, TRACH3009001, TRACH3009008, TRACH3009059, TRACH3009061, TRACH3009148, TRACH3009455, TRACH3009701, TRACH3009715, TRACH3009894, TRACH3009956, TRACH3010079, TRACH3010167, TRACH3010331, TRACH3010342, TRACH3010382, TRACH3010757, TRACH3010901, TRACH3011004, TRACH3011082, TRACH3011184, TRACH3011282, TRACH3011313, TRACH3011454, TRACH3011485, TRACH3011503, TRACH3011538, TRACH3011542, TRACH3012106, TRACH3012161, TRACH3012232, TRACH3012261, TRACH3012445, TRACH3012460, TRACH3012659, TRACH3012718, TRACH3012864, TRACH3012891, TRACH3012942, TRACH3013043, TRACH3013072, TRACH3013426, TRACH3013454, TRACH3013558, TRACH3013684, TRACH3013693, TRACH3013700, TRACH3013766, TRACH3013900, TRACH3013926, TRACH3014063, TRACH3014183, TRACH3014215, TRACH3014316, TRACH3014415, TRACH3014580, TRACH3014641, TRACH3014885, TRACH3015136, TRACH3015336, TRACH3015346, TRACH3015354, TRACH3015467, TRACH3015626, TRACH3015951, TRACH3016051, TRACH3016120, TRACH3016264, TRACH3016277, TRACH3016368, TRACH3016455, TRACH3016614, TRACH3016805, TRACH3016992, TRACH3017171, TRACH3017409, TRACH3017934, TRACH3018108, TRACH3018191, TRACH3018240, TRACH3018261, TRACH3018519, TRACH3018524, TRACH3018606, TRACH3018783, TRACH3018907, TRACH3018933, TRACH3018943, TRACH3019018, TRACH3019058, TRACH3019142, TRACH3019290, TRACH3019347, TRACH3019370, TRACH3019447, TRACH3019598, TRACH3019621, TRACH3019662, TRACH3019807, TRACH3019924, TRACH3019977, TRACH3020137, TRACH3020410, TRACH3020563, TRACH3020605, TRACH3020750, TRACH3020769, TRACH3020928, TRACH3020930, TRACH3021023, TRACH3021066, TRACH3021212, TRACH3021335, TRACH3021373, TRACH3021544, TRACH3021778, TRACH3021834, TRACH3021883, TRACH3022170, TRACH3022198, TRACH3022296, TRACH3022482, TRACH3022732, TRACH3022758, TRACH3022875, TRACH3022910, TRACH3022960, TRACH3023063, TRACH3023203, TRACH3023242, TRACH3023373, TRACH3023516, TRACH3023752, TRACH3023945, TRACH3023960, TRACH3024020, TRACH3024081, TRACH3024342, TRACH3024423, TRACH3024428, TRACH3024512, TRACH3024671, TRACH3024823, TRACH3025302, TRACH3025316, TRACH3025346, TRACH3025520, TRACH3026148, TRACH3026283, TRACH3026299, TRACH3026303, TRACH3026542, TRACH3026650, TRACH3026676, TRACH3026744, TRACH3026949, TRACH3027229, TRACH3027527, TRACH3027681, TRACH3027701, TRACH3027885, TRACH3028031, TRACH3028164, TRACH3028180, TRACH3028195, TRACH3028441, TRACH3028597, TRACH3028678, TRACH3028837, TRACH3028847, TRACH3028855, TRACH3029139, TRACH3029329, TRACH3029451, TRACH3029462, TRACH3029520, TRACH3029592, TRACH3029629, TRACH3029665, TRACH3029670, TRACH3029800, TRACH3030111, TRACH3030130, TRACH3030176, TRACH3030252, TRACH3030725, TRACH3030855, TRACH3030883, TRACH3031316, TRACH3031400, TRACH3031463, TRACH3031479, TRACH3031518, TRACH3031660, TRACH3031678, TRACH3031936, TRACH3032044, TRACH3032065, TRACH3032150, TRACH3032372, TRACH3032480, TRACH3032570, TRACH3032755, TRACH3032827, TRACH3032873, TRACH3033535, TRACH3033680, TRACH3033868, TRACH3034145, TRACH3034414, TRACH3034488, TRACH3034680, TRACH3034731, TRACH3034745, TRACH3034762, TRACH3034903, TRACH3035187, TRACH3035199, TRACH3035235, TRACH3035451, TRACH3035482, TRACH3035526, TRACH3036004, TRACH3036103, TRACH3036193, TRACH3036207, TRACH3036278, TRACH3036309, TRACH3036456, TRACH3036609, TRACH3036638, TRACH3036683, TRACH3036750, TRACH3036792, TRACH3036843, TRACH3036897, TRACH3036932, TRACH3036942, TRACH3036997, TRACH3037063, TRACH3037067, TRACH3037267, TRACH3037288, TRACH3037505, TRACH3037573, TRACH3037696, TRACH3037897, TRACH3038086, TRACH3038399, TSTOM1000135, TSTOM1000186, TSTOM2000139, TSTOM2000235, TSTOM2000315, TSTOM2000442, TSTOM2000553, TSTOM2000569, TSTOM2000588, TSTOM2001195, TSTOM2001274, TSTOM2001571, TSTOM2001996, TSTOM2002265, TSTOM2002505, TSTOM2002561, TSTOM2002611, TSTOM2002672, TSTOM2002682, TUTER1000014, TUTER1000122, TUTER1000137, TUTER2000057, TUTER2000283, TUTER2000425, TUTER2000904, TUTER2000916, TUTER2001286, TUTER2001341, TUTER2001387, TUTER2001433, TUTER2001461, TUTER2002028, TUTER2002074, TUTER2002158, TUTER2002228, TUTER2002323, TUTER2002356, TUTER2002729, UMVEN1000122, UMVEN1000143, UMVEN1000156, UMVEN1000186, UMVEN2000046, UMVEN2000069, UMVEN2000121, UMVEN2000152, UTERU1000008, UTERU1000015, UTERU1000024, UTERU1000031, UTERU1000032, UTERU1000057, UTERU1000065, UTERU1000077, UTERU1000093, UTERU1000096, UTERU1000106, UTERU1000109, UTERU1000131, UTERU1000138, UTERU1000148, UTERU1000160, UTERU1000182, UTERU1000183, UTERU1000187, UTERU1000192, UTERU1000249, UTERU1000337, UTERU1000339, UTERU1000384, UTERU2000023, UTERU2000047, UTERU2000074, UTERU2000099, UTERU2000154, UTERU2000197, UTERU2000218, UTERU2000238, UTERU2000243, UTERU2000260, UTERU2000300, UTERU2000329, UTERU2000332, UTERU2000338, UTERU2000349, UTERU2000377, UTERU2000393, UTERU2000418, UTERU2000465, UTERU2000485, UTERU2000517, UTERU2000524, UTERU2000537, UTERU2000539, UTERU2000542, UTERU2000546, UTERU2000550, UTERU2000569, UTERU2000607, UTERU2000629, UTERU2000649, UTERU2000663, UTERU2000696, UTERU2000794, UTERU2000830, UTERU2000844, UTERU2000922, UTERU2000925, UTERU2001024, UTERU2001110, UTERU2001176, UTERU2001281, UTERU2001389, UTERU2001409, UTERU2001412, UTERU2001504, UTERU2001658, UTERU2001747, UTERU2001876, UTERU2002001, UTERU2002011, UTERU2002176, UTERU2002198, UTERU2002294, UTERU2002332, UTERU2002410, UTERU2002473, UTERU2002547, UTERU2002693, UTERU2002733, UTERU2002736, UTERU2002737, UTERU2002826, UTERU2002841, UTERU2002964, UTERU2002993, UTERU2003035, UTERU2003057, UTERU2003126, UTERU2003135, UTERU2003321, UTERU2003399, UTERU2003411, UTERU2003456, UTERU2003577, UTERU2003704, UTERU2003926, UTERU2003973, UTERU2004015, UTERU2004039, UTERU2004061, UTERU2004073, UTERU2004163, UTERU2004299, UTERU2004461, UTERU2004520, UTERU2004564, UTERU2004664, UTERU2004688, UTERU2004698, UTERU2004807, UTERU2004861, UTERU2004929, UTERU2005004, UTERU2005050, UTERU2005069, UTERU2005074, UTERU2005179, UTERU2005292, UTERU2005346, UTERU2005354, UTERU2005446, UTERU2005449, UTERU2005450, UTERU2005533, UTERU2005601, UTERU2005664, UTERU2005822, UTERU2005903, UTERU2005905, UTERU2006103, UTERU2006115, UTERU2006137, UTERU2006182, UTERU2006400, UTERU2006412, UTERU2006429, UTERU2006486, UTERU2006524, UTERU2006547, UTERU2006568, UTERU2006593, UTERU2006643, UTERU2006651, UTERU2006705, UTERU2006899, UTERU2007004, UTERU2007075, UTERU2007081, UTERU2007128, UTERU2007253, UTERU2007267, UTERU2007444, UTERU2007499, UTERU2007639, UTERU2007924, UTERU2007942, UTERU2008018, UTERU2008019, UTERU2008027, UTERU2008040, UTERU2008077, UTERU2008130, UTERU2008302, UTERU2008347, UTERU2008426, UTERU2008516, UTERU2008561, UTERU2008653, UTERU2008705, UTERU2008707, UTERU2008747, UTERU2008785, UTERU2008845, UTERU2008901, UTERU2008930, UTERU2008938, UTERU2008939, UTERU2008962, UTERU2009094, UTERU2009120, UTERU2009131, UTERU2009147, UTERU2009206, UTERU2009283, UTERU2009335, UTERU2009414, UTERU2009435, UTERU2009483, UTERU2009510, UTERU2009538, UTERU2009540, UTERU2009776, UTERU2009904, UTERU2009951, UTERU2009972, UTERU2010115, UTERU2010124, UTERU2010164, UTERU2010226, UTERU2010231, UTERU2010304, UTERU2010320, UTERU2010431, UTERU2010525, UTERU2010651, UTERU2010724, UTERU2010747, UTERU2011195, UTERU2011199, UTERU2011220, UTERU2011261, UTERU2011287, UTERU2011410, UTERU2011574, UTERU2011621, UTERU2011657, UTERU2011741, UTERU2011806, UTERU2011811, UTERU2011897, UTERU2011906, UTERU2011962, UTERU2011968, UTERU2012031, UTERU2012101, UTERU2012114, UTERU2012230, UTERU2012286, UTERU2012333, UTERU2012407, UTERU2012526, UTERU2012581, UTERU2012610, UTERU2012615, UTERU2012688, UTERU2012703, UTERU2012715, UTERU2012741, UTERU2012767, UTERU2012786, UTERU2012856, UTERU2012890, UTERU2012938, UTERU2012976, UTERU2013048, UTERU2013078, UTERU2013231, UTERU2013262, UTERU2013280, UTERU2013322, UTERU2013483, UTERU2013491, UTERU2013502, UTERU2013926, UTERU2013976, UTERU2014001, UTERU2014024, UTERU2014167, UTERU2014223, UTERU2014398, UTERU2014464, UTERU2014548, UTERU2014601, UTERU2014631, UTERU2014668, UTERU2014678, UTERU2014728, UTERU2014898, UTERU2014998, UTERU2015087, UTERU2015190, UTERU2015198, UTERU2015202, UTERU2015405, UTERU2015640, UTERU2015830, UTERU2015880, UTERU2016147, UTERU2016157, UTERU2016426, UTERU2016464, UTERU2016669, UTERU2016757, UTERU2016761, UTERU2016799, UTERU2016822, UTERU2016896, UTERU2016902, UTERU2016979, UTERU2016981, UTERU2017123, UTERU2017303, UTERU2017421, UTERU2017492, UTERU2017613, UTERU2017623, UTERU2017632, UTERU2017761, UTERU2017762, UTERU2017810, UTERU2017988, UTERU2018127, UTERU2018180, UTERU2018200, UTERU2018333, UTERU2018364, UTERU2018514, UTERU2018522, UTERU2018523, UTERU2018544, UTERU2018566, UTERU2018609, UTERU2018674, UTERU2018712, UTERU2018784, UTERU2018789, UTERU2018811, UTERU2018867, UTERU2018881, UTERU2018884, UTERU2018955, UTERU2019005, UTERU2019038, UTERU2019096, UTERU2019163, UTERU2019257, UTERU2019453, UTERU2019491, UTERU2019534, UTERU2019681, UTERU2019706, UTERU2019710, UTERU2019940, UTERU2019959, UTERU2019964, UTERU2020226, UTERU2020242, UTERU2020292, UTERU2020351, UTERU2020491, UTERU2020718, UTERU2021163, UTERU2021380, UTERU2021649, UTERU2021820, UTERU2022020, UTERU2022773, UTERU2022955, UTERU2022981, UTERU2023039, UTERU2023045, UTERU2023175, UTERU2023262, UTERU2023550, UTERU2023651, UTERU2023687, UTERU2023712, UTERU2023941, UTERU2024002, UTERU2024042, UTERU2024141, UTERU2024481, UTERU2024656, UTERU2024758, UTERU2024820, UTERU2024881, UTERU2025025, UTERU2025041, UTERU2025301, UTERU2025366, UTERU2025415, UTERU2025579, UTERU2025645, UTERU2025891, UTERU2026025, UTERU2026090, UTERU2026142, UTERU2026203, UTERU2026775, UTERU2027023, UTERU2027369, UTERU2027591, UTERU2027616, UTERU2027941, UTERU2028377, UTERU2028734, UTERU2029503, UTERU2029660, UTERU2029742, UTERU2029953, UTERU2030213, UTERU2030270, UTERU2030280, UTERU2031060, UTERU2031084, UTERU2031268, UTERU2031295, UTERU2031521, UTERU2031611, UTERU2031703, UTERU2031834, UTERU2031851, UTERU2032075, UTERU2032220, UTERU2032279, UTERU2032726, UTERU2033172, UTERU2033375, UTERU2033382, UTERU2033420, UTERU2033530, UTERU2033577, UTERU2034053, UTERU2034147, UTERU2034695, UTERU2035114, UTERU2035187, UTERU2035231, UTERU2035306, UTERU2035323, UTERU2035328, UTERU2035331, UTERU2035452, UTERU2035469, UTERU2035503, UTERU2035745, UTERU2035908, UTERU2035926, UTERU2035978, UTERU2036089, UTERU2036347, UTERU2036507, UTERU2036512, UTERU2036530, UTERU2036623, UTERU2036690, UTERU2037224, UTERU2037361, UTERU2037423, UTERU2037577, UTERU2037674, UTERU2037791, UTERU2037843, UTERU2038171, UTERU2038251, UTERU3000226, UTERU3000298, UTERU3000402, UTERU3000645, UTERU3000665, UTERU3000670, UTERU3000727, UTERU3000738, UTERU3000828, UTERU3000844, UTERU3000899, UTERU3000959, UTERU3001029, UTERU3001053, UTERU3001059, UTERU3001158, UTERU3001240, UTERU3001394, UTERU3001542, UTERU3001558, UTERU3001571, UTERU3001585, UTERU3001632, UTERU3001652, UTERU3001766, UTERU3001988, UTERU3002209, UTERU3002218, UTERU3002383, UTERU3002600, UTERU3002620, UTERU3002667, UTERU3002701, UTERU3002731, UTERU3002768, UTERU3002786, UTERU3002993, UTERU3003116, UTERU3003135, UTERU3003178, UTERU3003465, UTERU3003495, UTERU3003523, UTERU3003660, UTERU3003774, UTERU3003776, UTERU3004384, UTERU3004418, UTERU3004477, UTERU3004523, UTERU3004616, UTERU3004635, UTERU3004709, UTERU3004938, UTERU3004992, UTERU3005049, UTERU3005159, UTERU3005205, UTERU3005230, UTERU3005264, UTERU3005422, UTERU3005460, UTERU3005536, UTERU3005585, UTERU3005767, UTERU3005907, UTERU3005970, UTERU3006008, UTERU3006228, UTERU3006308, UTERU3006538, UTERU3006640, UTERU3006687, UTERU3006720, UTERU3006798, UTERU3006884, UTERU3007021, UTERU3007104, UTERU3007108, UTERU3007134, UTERU3007419, UTERU3007640, UTERU3007731, UTERU3007913, UTERU3008280, UTERU3008463, UTERU3008660, UTERU3008671, UTERU3008722, UTERU3008917, UTERU3009259, UTERU3009490, UTERU3009517, UTERU3009690, UTERU3009775, UTERU3009871, UTERU3009979, UTERU3009987, UTERU3010029, UTERU3010409, UTERU3010526, UTERU3010604, UTERU3010892, UTERU3010919, UTERU3011063, UTERU3011092, UTERU3011273, UTERU3011398, UTERU3011558, UTERU3011579, UTERU3011795, UTERU3011837, UTERU3012293, UTERU3012414, UTERU3012476, UTERU3012599, UTERU3012999, UTERU3013167, UTERU3013302, UTERU3013781, UTERU3014274, UTERU3014446, UTERU3014611, UTERU3014647, UTERU3014791, UTERU3014906, UTERU3015011, UTERU3015086, UTERU3015299, UTERU3015412, UTERU3015500, UTERU3015647, UTERU3015844, UTERU3016070, UTERU3016273, UTERU3016274, UTERU3016308, UTERU3016789, UTERU3017176, UTERU3017441, UTERU3017626, UTERU3017995, UTERU3018154, UTERU3018172, UTERU3018255, UTERU3018616, UTERU3018711, UTERU3019078

[0747] Of the 17,176 genes that include the cDNAs of the present invention, genes whose expression levels were high enough to detect in each of the BGGI1, BLADE, BNGH4, BRACE, BRALZ, BRAMY, and BRASW libraries were analyzed for expression frequency. The analysis results are described below. Each is a relative value, where the expression level over all tissues is taken as 100. The larger this value, the greater the level of expression.

TABLE 27

| Clone Name | BGGI1 | BLADE | BNGH4 | BRACE | BRALZ | BRAMY | BRASW |
|---|---|---|---|---|---|---|---|
| 3NB691000085 | 0 | 0 | 0 | 6.145 | 0 | 0 | 0 |
| 3NB691000116 | 0 | 0 | 0 | 0 | 0 | 1.639 | 0 |
| 3NB691000173 | 0 | 5.542 | 0 | 0 | 5.706 | 0 | 0 |
| 3NB692000281 | 0 | 0 | 0 | 0 | 0 | 0.444 | 0 |
| 3NB692000330 | 0 | 0 | 0 | 0.626 | 0 | 0 | 0 |
| 3NB692000374 | 0 | 0 | 0 | 2.309 | 3.919 | 2.185 | 0 |
| 3NB692000545 | 0 | 0 | 0 | 2.002 | 0 | 0 | 0 |
| 3NB692000912 | 0 | 0 | 0 | 1.667 | 0 | 0.947 | 0 |
| 3NB692001022 | 0 | 8.733 | 0 | 2.649 | 4.496 | 0 | 0 |
| 3NB692001288 | 0 | 0 | 0 | 2.127 | 10.827 | 3.019 | 0 |
| 3NB692001334 | 0 | 0 | 0 | 1.334 | 9.699 | 0.270 | 0 |
| 3NB692001442 | 0 | 0 | 0 | 0.857 | 0 | 0 | 0 |
| 3NB692001496 | 0 | 0 | 0 | 10.926 | 0 | 0 | 0 |
| 3NB692001719 | 0 | 0 | 0 | 9.777 | 0 | 0 | 0 |
| 3NB692001853 | 0 | 0 | 0 | 1.859 | 0 | 0 | 0 |
| 3NB692002051 | 0 | 0 | 0 | 6.063 | 0 | 0 | 0 |
| ADRGL1000002 | 0 | 0 | 0 | 3.506 | 0 | 1.659 | 0 |
| ADRGL1000018 | 0 | 0 | 0 | 17.162 | 0 | 0 | 0 |
| ADRGL1000033 | 0 | 0 | 29.445 | 0 | 0 | 0 | 0 |
| ADRGL1000065 | 0 | 0 | 0 | 4.003 | 0 | 5.682 | 0 |
| ADRGL2000006 | 0 | 0 | 0 | 4.427 | 0 | 0 | 0 |
| ADRGL2000042 | 0 | 0 | 19.585 | 7.210 | 0 | 5.118 | 0 |
| ADRGL2000074 | 0 | 0 | 0 | 0 | 0 | 14.813 | 0 |
| ADRGL2000097 | 0 | 0 | 0 | 0 | 0 | 2.240 | 0 |
| ADRGL2000328 | 0 | 0 | 0 | 9.556 | 0 | 0 | 0 |
| ADRGL2000644 | 0 | 0 | 0 | 0 | 38.408 | 0 | 0 |
| ADRGL2001830 | 0 | 0 | 0 | 8.483 | 0 | 0 | 0 |
| ADRGL2002013 | 0 | 0 | 0 | 19.155 | 0 | 0 | 0 |
| ADRGL2002191 | 0 | 0 | 0 | 0 | 0 | 12.881 | 0 |
| ADRGL2002477 | 0 | 0 | 0 | 0 | 0 | 1.714 | 0 |
| ADRGL2007313 | 0 | 0 | 0 | 6.955 | 0 | 0 | 0 |
| ADRGL2007906 | 0 | 0 | 0 | 0 | 0 | 9.081 | 0 |
| ADRGL2007974 | 0 | 0 | 0 | 0 | 0 | 14.813 | 0 |
| ADRGL2008966 | 0 | 0 | 0 | 0 | 0 | 14.813 | 0 |
| ADRGL2009146 | 0 | 0 | 0 | 10.913 | 0 | 0 | 0 |
| ADRGL2009273 | 0 | 0 | 0 | 1.972 | 0 | 0 | 0 |
| ADRGL2010152 | 0 | 0 | 0 | 8.223 | 0 | 0 | 0 |
| ADRGL2012038 | 0 | 0 | 0 | 1.459 | 0 | 0 | 0 |
| ASTRO2000014 | 0 | 0 | 0 | 0.291 | 0 | 0.828 | 0 |
| ASTRO2000046 | 0 | 0 | 0 | 0.579 | 0 | 3.289 | 0 |
| ASTRO2000141 | 0 | 0 | 0 | 0 | 0 | 3.060 | 0 |
| ASTRO2000381 | 0 | 0 | 48.430 | 0 | 0 | 0 | 0 |
| ASTRO2000480 | 0 | 0 | 0 | 8.038 | 0 | 0 | 0 |
| ASTRO2001029 | 0 | 0 | 0 | 0.890 | 0 | 2.527 | 0 |
| ASTRO2001107 | 0 | 0 | 0 | 5.184 | 0 | 14.720 | 0 |
| ASTRO2001806 | 0 | 20.083 | 0 | 2.031 | 0 | 0 | 0 |
| ASTRO2001823 | 0 | 0 | 0 | 2.061 | 0 | 2.925 | 0 |
| ASTRO2002024 | 0 | 0 | 0 | 0 | 0 | 13.210 | 0 |
| ASTRO2002459 | 0 | 0 | 0 | 0.621 | 0 | 0.882 | 0 |
| ASTRO2002693 | 0 | 49.753 | 0 | 0 | 0 | 0 | 0 |
| ASTRO2002733 | 0 | 0 | 0 | 0 | 0 | 31.003 | 0 |
| ASTRO2003024 | 0 | 0 | 0 | 0.673 | 3.425 | 2.865 | 0 |
| ASTRO2003212 | 0 | 0 | 0 | 10.632 | 0 | 0 | 0 |
| ASTRO2003316 | 0 | 0 | 0 | 2.094 | 0 | 0 | 0 |
| ASTRO2003461 | 0 | 0 | 0 | 4.228 | 0 | 0 | 0 |
| ASTRO2003840 | 0 | 0 | 47.769 | 4.396 | 0 | 6.241 | 0 |
| ASTRO2003960 | 0 | 0 | 0 | 17.003 | 0 | 0 | 0 |
| ASTRO2004032 | 0 | 0 | 0 | 4.326 | 0 | 0 | 0 |
| ASTRO2004177 | 0 | 0 | 0 | 17.003 | 0 | 0 | 0 |
| ASTRO2004974 | 0 | 0 | 0 | 2.758 | 0 | 1.958 | 0 |
| ASTRO2005423 | 0 | 0 | 0 | 4.888 | 0 | 6.939 | 0 |
| ASTRO2005553 | 0 | 0 | 0 | 0 | 0 | 2.611 | 0 |
| ASTRO2006475 | 0 | 0 | 0 | 0 | 0 | 7.505 | 0 |
| ASTRO2007047 | 0 | 0 | 0 | 4.450 | 0 | 2.106 | 0 |
| ASTRO2007948 | 0 | 0 | 0 | 3.555 | 0 | 2.523 | 0 |
| ASTRO2008216 | 0 | 0 | 0 | 0 | 0 | 3.215 | 0 |
| ASTRO2010819 | 0 | 0 | 0 | 6.686 | 0 | 3.390 | 0 |
| ASTRO2011422 | 0 | 0 | 0 | 5.149 | 0 | 0 | 0 |
| ASTRO2012552 | 0 | 0 | 0 | 1.049 | 0 | 0 | 0 |
| ASTRO2013585 | 0 | 3.422 | 3.759 | 0.346 | 0 | 0.491 | 0 |
| ASTRO2014392 | 0 | 0 | 0 | 0 | 0 | 14.891 | 0 |
| ASTRO2014498 | 0 | 0 | 0 | 38.064 | 0 | 0 | 0 |
| ASTRO2014561 | 0 | 0 | 0 | 0 | 0 | 8.880 | 0 |
| ASTRO2014576 | 0 | 0 | 0 | 0 | 0 | 11.388 | 0 |
| ASTRO2014863 | 0 | 23.712 | 0 | 2.398 | 0 | 0 | 0 |
| ASTRO2015328 | 0 | 0 | 0 | 2.701 | 0 | 3.835 | 0 |
| ASTRO2016491 | 0 | 0 | 0 | 0.357 | 0 | 2.030 | 0 |
| ASTRO2016819 | 0 | 0 | 0 | 4.580 | 0 | 0 | 0 |
| ASTRO2018169 | 0 | 0 | 0 | 0 | 0 | 0.952 | 0 |
| ASTRO2018540 | 0 | 0 | 0 | 0 | 0 | 1.567 | 0 |
| ASTRO2019171 | 0 | 0 | 0 | 38.064 | 0 | 0 | 0 |
| BGGI11000123 | 21.967 | 0 | 0 | 1.492 | 0 | 0.706 | 0 |
| BGGI11000193 | 93.562 | 0 | 0 | 0 | 0 | 0 | 0 |
| BGGI11000285 | 100 | 0 | 0 | 0 | 0 | 0 | 0 |
| BGGI12000022 | 100 | 0 | 0 | 0 | 0 | 0 | 0 |
| BGGI12000054 | 7.382 | 0 | 0 | 0.167 | 2.553 | 1.187 | 0 |
| BGGI12000067 | 100 | 0 | 0 | 0 | 0 | 0 | 0 |
| BGGI12000161 | 100 | 0 | 0 | 0 | 0 | 0 | 0 |
| BGGI12000533 | 70.764 | 0 | 0 | 0 | 0 | 0 | 0 |
| BGGI12000544 | 100 | 0 | 0 | 0 | 0 | 0 | 0 |
| BGGI12000616 | 28.025 | 0 | 0 | 1.269 | 0 | 0.901 | 0 |
| BGGI12000684 | 77.334 | 0 | 0 | 0 | 0 | 0 | 0 |
| BGGI12000693 | 59.168 | 0 | 0 | 0 | 0 | 0 | 0 |
| BGGI12000839 | 23.115 | 0 | 0 | 0 | 7.994 | 0 | 0 |
| BGGI12001002 | 55.645 | 0 | 0 | 0 | 6.414 | 0 | 0 |
| BGGI12001075 | 62.049 | 0 | 0 | 0 | 0 | 0 | 0 |
| BGGI12001097 | 35.225 | 0 | 17.333 | 0 | 0 | 1.132 | 0 |
| BGGI12001241 | 100 | 0 | 0 | 0 | 0 | 0 | 0 |
| BGGI12001247 | 100 | 0 | 0 | 0 | 0 | 0 | 0 |
| BGGI12001682 | 32.371 | 0 | 0 | 3.665 | 3.732 | 3.122 | 0 |
| BGGI12001714 | 79.939 | 0 | 0 | 0 | 0 | 0 | 0 |
| BLADE1000176 | 0 | 83.178 | 0 | 16.822 | 0 | 0 | 0 |
| BLADE2000181 | 0 | 100 | 0 | 0 | 0 | 0 | 0 |
| BLADE2000256 | 0 | 80.138 | 0 | 0 | 0 | 0 | 0 |
| BLADE2000340 | 0 | 100 | 0 | 0 | 0 | 0 | 0 |
| BLADE2000389 | 0 | 100 | 0 | 0 | 0 | 0 | 0 |
| BLADE2000463 | 0 | 100 | 0 | 0 | 0 | 0 | 0 |
| BLADE2000492 | 0 | 24.632 | 0 | 0 | 0 | 0 | 0 |
| BLADE2000579 | 0 | 100 | 0 | 0 | 0 | 0 | 0 |
| BLADE2000640 | 0 | 100 | 0 | 0 | 0 | 0 | 0 |
| BLADE2000866 | 0 | 100 | 0 | 0 | 0 | 0 | 0 |
| BLADE2000938 | 0 | 100 | 0 | 0 | 0 | 0 | 0 |
| BLADE2001031 | 0 | 100 | 0 | 0 | 0 | 0 | 0 |
| BLADE2001133 | 0 | 100 | 0 | 0 | 0 | 0 | 0 |
| BLADE2001138 | 0 | 100 | 0 | 0 | 0 | 0 | 0 |
| BLADE2001141 | 0 | 100 | 0 | 0 | 0 | 0 | 0 |
| BLADE2001371 | 0 | 87.309 | 0 | 0 | 0 | 0 | 0 |
| BLADE2001458 | 0 | 100 | 0 | 0 | 0 | 0 | 0 |
| BLADE2001575 | 0 | 66.545 | 0 | 0 | 0 | 0 | 0 |
| BLADE2001753 | 0 | 100 | 0 | 0 | 0 | 0 | 0 |
| BLADE2001935 | 0 | 100 | 0 | 0 | 0 | 0 | 0 |
| BLADE2001940 | 0 | 100 | 0 | 0 | 0 | 0 | 0 |
| BLADE2001987 | 0 | 100 | 0 | 0 | 0 | 0 | 0 |
| BLADE2002073 | 0 | 100 | 0 | 0 | 0 | 0 | 0 |
| BLADE2002310 | 0 | 100 | 0 | 0 | 0 | 0 | 0 |
| BLADE2002730 | 0 | 91.480 | 0 | 0 | 0 | 0 | 0 |
| BLADE2002738 | 0 | 86.356 | 0 | 0 | 0 | 0 | 0 |
| BLADE2002744 | 0 | 17.131 | 0 | 0 | 0 | 0 | 0 |
| BLADE2002782 | 0 | 100 | 0 | 0 | 0 | 0 | 0 |
| BLADE2002947 | 0 | 100 | 0 | 0 | 0 | 0 | 0 |
| BLADE2002972 | 0 | 100 | 0 | 0 | 0 | 0 | 0 |
| BLADE2003474 | 0 | 100 | 0 | 0 | 0 | 0 | 0 |
| BLADE2003916 | 0 | 100 | 0 | 0 | 0 | 0 | 0 |
| BLADE2004089 | 0 | 69.556 | 0 | 7.034 | 0 | 0 | 0 |
| BLADE2004345 | 0 | 100 | 0 | 0 | 0 | 0 | 0 |
| BLADE2004389 | 0 | 100 | 0 | 0 | 0 | 0 | 0 |
| BLADE2004462 | 0 | 100 | 0 | 0 | 0 | 0 | 0 |
| BLADE2004628 | 0 | 100 | 0 | 0 | 0 | 0 | 0 |
| BLADE2004670 | 0 | 100 | 0 | 0 | 0 | 0 | 0 |
| BLADE2004722 | 0 | 70.250 | 0 | 0 | 0 | 0 | 0 |
| BLADE2004849 | 0 | 52.024 | 0 | 0 | 0 | 0 | 0 |
| BLADE2005036 | 0 | 100 | 0 | 0 | 0 | 0 | 0 |
| BLADE2005038 | 0 | 100 | 0 | 0 | 0 | 0 | 0 |
| BLADE2005229 | 0 | 100 | 0 | 0 | 0 | 0 | 0 |
| BLADE2005459 | 0 | 100 | 0 | 0 | 0 | 0 | 0 |
| BLADE2005792 | 0 | 100 | 0 | 0 | 0 | 0 | 0 |
| BLADE2006043 | 0 | 100 | 0 | 0 | 0 | 0 | 0 |
| BLADE2006412 | 0 | 42.615 | 0 | 4.309 | 0 | 0 | 0 |
| BLADE2006415 | 0 | 100 | 0 | 0 | 0 | 0 | 0 |
| BLADE2006607 | 0 | 100 | 0 | 0 | 0 | 0 | 0 |
| BLADE2006826 | 0 | 100 | 0 | 0 | 0 | 0 | 0 |
| BLADE2006830 | 0 | 11.799 | 0 | 2.386 | 0 | 0 | 0 |
| BLADE2006849 | 0 | 100 | 0 | 0 | 0 | 0 | 0 |
| BLADE2006947 | 0 | 100 | 0 | 0 | 0 | 0 | 0 |
| BLADE2007033 | 0 | 100 | 0 | 0 | 0 | 0 | 0 |
| BLADE2007043 | 0 | 87.530 | 0 | 0 | 0 | 0 | 0 |
| BLADE2007589 | 0 | 34.697 | 0 | 0 | 0 | 0 | 0 |
| BLADE2007666 | 0 | 23.913 | 0 | 0 | 0 | 0 | 0 |
| BLADE2007722 | 0 | 100 | 0 | 0 | 0 | 0 | 0 |
| BLADE2007735 | 0 | 100 | 0 | 0 | 0 | 0 | 0 |
| BLADE2007744 | 0 | 100 | 0 | 0 | 0 | 0 | 0 |
| BLADE2007799 | 0 | 100 | 0 | 0 | 0 | 0 | 0 |
| BLADE2007923 | 0 | 100 | 0 | 0 | 0 | 0 | 0 |
| BLADE2007935 | 0 | 87.309 | 0 | 0 | 0 | 0 | 0 |
| BLADE2007958 | 0 | 100 | 0 | 0 | 0 | 0 | 0 |
| BLADE2008281 | 0 | 100 | 0 | 0 | 0 | 0 | 0 |
| BLADE2008398 | 0 | 43.522 | 0 | 4.401 | 0 | 0 | 0 |
| BLADE2008454 | 0 | 100 | 0 | 0 | 0 | 0 | 0 |
| BLADE2008461 | 0 | 17.399 | 0 | 0 | 0 | 2.498 | 0 |
| BLADE2008479 | 0 | 100 | 0 | 0 | 0 | 0 | 0 |
| BLADE2008539 | 0 | 100 | 0 | 0 | 0 | 0 | 0 |
| BLADE2008809 | 0 | 100 | 0 | 0 | 0 | 0 | 0 |
| BLADE2008995 | 0 | 100 | 0 | 0 | 0 | 0 | 0 |
| BLADE2009452 | 0 | 100 | 0 | 0 | 0 | 0 | 0 |
| BLADE2009479 | 0 | 100 | 0 | 0 | 0 | 0 | 0 |
| BLADE2009593 | 0 | 100 | 0 | 0 | 0 | 0 | 0 |
| BNGH41000098 | 0 | 0 | 19.548 | 0 | 0 | 2.554 | 0 |
| BNGH41000104 | 0 | 0 | 57.747 | 0 | 0 | 0 | 0 |
| BNGH41000118 | 0 | 0 | 100 | 0 | 0 | 0 | 0 |
| BNGH41000137 | 0 | 0 | 33.459 | 3.079 | 0 | 8.743 | 0 |
| BNGH41000153 | 0 | 0 | 36.238 | 0 | 0 | 4.735 | 0 |
| BNGH41000169 | 0 | 0 | 100 | 0 | 0 | 0 | 0 |
| BNGH41000177 | 0 | 0 | 53.617 | 0 | 0 | 0 | 0 |
| BNGH41000190 | 0 | 0 | 19.514 | 3.592 | 0 | 0 | 0 |
| BNGH41000198 | 0 | 0 | 16.022 | 0 | 0 | 2.093 | 0 |
| BNGH41000216 | 0 | 0 | 100 | 0 | 0 | 0 | 0 |
| BNGH41000235 | 0 | 0 | 50.263 | 0 | 0 | 0 | 0 |
| BNGH42000130 | 0 | 0 | 8.077 | 0 | 0 | 0 | 0 |
| BNGH42000132 | 0 | 0 | 100 | 0 | 0 | 0 | 0 |
| BNGH42000360 | 0 | 0 | 2.426 | 0.223 | 2.273 | 0.158 | 0 |
| BNGH42000405 | 0 | 0 | 100 | 0 | 0 | 0 | 0 |
| BNGH42000532 | 0 | 0 | 72.929 | 0 | 0 | 0 | 0 |
| BNGH42000675 | 0 | 0 | 100 | 0 | 0 | 0 | 0 |
| BNGH42000739 | 0 | 0 | 4.798 | 10.598 | 2.248 | 6.896 | 0 |
| BNGH42000791 | 0 | 0 | 100 | 0 | 0 | 0 | 0 |
| BNGH42000815 | 0 | 0 | 67.530 | 0 | 0 | 0 | 0 |
| BNGH42000994 | 0 | 0 | 100 | 0 | 0 | 0 | 0 |
| BNGH42001247 | 0 | 0 | 40.570 | 3.734 | 0 | 0 | 0 |
| BNGH42001406 | 0 | 0 | 52.989 | 0 | 0 | 0 | 0 |
| BNGH42001576 | 0 | 0 | 37.628 | 0 | 0 | 0 | 0 |
| BNGH42001724 | 0 | 0 | 100 | 0 | 0 | 0 | 0 |
| BNGH42002168 | 0 | 9.339 | 10.261 | 0.944 | 0 | 1.341 | 0 |
| BNGH42002244 | 0 | 0 | 100 | 0 | 0 | 0 | 0 |
| BNGH42002387 | 0 | 0 | 81.396 | 0 | 0 | 0 | 0 |
| BNGH42002487 | 0 | 0 | 72.180 | 0 | 0 | 0 | 0 |
| BNGH42002489 | 0 | 0 | 100 | 0 | 0 | 0 | 0 |
| BNGH42003529 | 0 | 0 | 100 | 0 | 0 | 0 | 0 |
| BNGH42003570 | 0 | 0 | 100 | 0 | 0 | 0 | 0 |
| BNGH42003641 | 0 | 0 | 100 | 0 | 0 | 0 | 0 |
| BNGH42004076 | 0 | 0 | 100 | 0 | 0 | 0 | 0 |
| BNGH42004291 | 0 | 0 | 100 | 0 | 0 | 0 | 0 |
| BNGH42004538 | 0 | 0 | 100 | 0 | 0 | 0 | 0 |
| BNGH42004679 | 0 | 0 | 92.186 | 0 | 0 | 0 | 0 |
| BNGH42005017 | 0 | 0 | 67.530 | 0 | 0 | 0 | 0 |
| BNGH42005235 | 0 | 0 | 100 | 0 | 0 | 0 | 0 |
| BNGH42005504 | 0 | 0 | 100 | 0 | 0 | 0 | 0 |
| BNGH42005968 | 0 | 0 | 17.713 | 0 | 0 | 0 | 0 |
| BNGH42006135 | 0 | 0 | 5.091 | 3.749 | 0 | 2.661 | 0 |
| BNGH42006226 | 0 | 0 | 88.444 | 0 | 0 | 11.556 | 0 |
| BNGH42006234 | 0 | 0 | 100 | 0 | 0 | 0 | 0 |
| BNGH42007037 | 0 | 0 | 95.934 | 0 | 0 | 0 | 0 |
| BNGH42007366 | 0 | 0 | 49.317 | 0 | 0 | 0 | 0 |
| BNGH42007460 | 31.586 | 0 | 7.771 | 2.861 | 0 | 3.046 | 0 |
| BNGH42007594 | 0 | 0 | 100 | 0 | 0 | 0 | 0 |
| BNGH42007709 | 7.215 | 1.616 | 1.775 | 0 | 3.327 | 0.464 | 0 |
| BNGH42007788 | 0 | 0 | 23.740 | 0 | 0 | 0 | 0 |
| BNGH42007798 | 0 | 0 | 75.734 | 0 | 0 | 0 | 0 |
| BNGH42008199 | 0 | 0 | 100 | 0 | 0 | 0 | 0 |
| BNGH42008510 | 0 | 0 | 100 | 0 | 0 | 0 | 0 |
| BNGH42008603 | 0 | 0 | 11.154 | 3.080 | 0 | 5.829 | 0 |
| BNGH42008649 | 0 | 0 | 100 | 0 | 0 | 0 | 0 |
| BNGH42008743 | 0 | 0 | 11.872 | 2.185 | 0 | 0 | 0 |
| BNGH42008832 | 0 | 0 | 100 | 0 | 0 | 0 | 0 |
| BNGH42008850 | 0 | 0 | 81.250 | 0 | 0 | 0 | 0 |
| BNGH42008943 | 0 | 0 | 64.079 | 5.898 | 30.024 | 0 | 0 |
| BNGH42009021 | 0 | 0 | 100 | 0 | 0 | 0 | 0 |
| BNGH42009025 | 0 | 0 | 10.751 | 3.958 | 0 | 1.405 | 0 |
| BRACE1000020 | 0 | 0 | 0 | 7.989 | 0 | 0 | 0 |
| BRACE1000042 | 0 | 0 | 0 | 5.402 | 0 | 6.135 | 0 |
| BRACE1000047 | 0 | 0 | 0 | 100 | 0 | 0 | 0 |
| BRACE1000051 | 0 | 0 | 0 | 50.891 | 0 | 0 | 0 |
| BRACE1000065 | 0 | 0 | 0 | 56.141 | 0 | 0 | 0 |
| BRACE1000070 | 0 | 0 | 0 | 1.269 | 0 | 0 | 0 |
| BRACE1000073 | 0 | 0 | 0 | 5.985 | 15.235 | 0 | 0 |
| BRACE1000084 | 0 | 0 | 0 | 100 | 0 | 0 | 0 |
| BRACE1000087 | 0 | 0 | 0 | 10.415 | 0 | 0 | 0 |
| BRACE1000092 | 0 | 0 | 0 | 100 | 0 | 0 | 0 |
| BRACE1000093 | 0 | 0 | 0 | 27.755 | 0 | 0 | 0 |
| BRACE1000101 | 0 | 0 | 0 | 7.942 | 40.434 | 11.275 | 0 |
| BRACE1000114 | 0 | 0 | 0 | 100 | 0 | 0 | 0 |
| BRACE1000115 | 0 | 0 | 0 | 2.790 | 6.764 | 0.754 | 70.707 |
| BRACE1000124 | 0 | 0 | 0 | 100 | 0 | 0 | 0 |
| BRACE1000131 | 0 | 0 | 0 | 1.479 | 0 | 0 | 0 |
| BRACE1000132 | 0 | 0 | 0 | 10.195 | 0 | 14.473 | 0 |
| BRACE1000159 | 0 | 0 | 0 | 5.242 | 13.343 | 0 | 0 |
| BRACE1000166 | 0 | 0 | 0 | 45.981 | 0 | 0 | 0 |
| BRACE1000169 | 0 | 0 | 0 | 28.778 | 0 | 0 | 0 |
| BRACE1000186 | 0 | 0 | 0 | 1.535 | 0 | 0 | 0 |
| BRACE1000187 | 0 | 0 | 0 | 9.578 | 9.752 | 0 | 0 |
| BRACE1000239 | 0 | 0 | 0 | 28.128 | 0 | 0 | 0 |
| BRACE1000258 | 0 | 0 | 0 | 68.044 | 0 | 0 | 0 |
| BRACE1000451 | 0 | 0 | 0 | 100 | 0 | 0 | 0 |
| BRACE1000475 | 0 | 0 | 0 | 100 | 0 | 0 | 0 |
| BRACE1000572 | 0 | 0 | 0 | 100 | 0 | 0 | 0 |
| BRACE2000061 | 0 | 0 | 0 | 27.821 | 0 | 39.495 | 0 |
| BRACE2000077 | 0 | 0 | 0 | 68.470 | 0 | 0 | 0 |
| BRACE2000078 | 0 | 0 | 0 | 3.177 | 0 | 0 | 0 |
| BRACE2000100 | 0 | 0 | 0 | 100 | 0 | 0 | 0 |
| BRACE2000109 | 0 | 0 | 0 | 39.025 | 0 | 0 | 0 |
| BRACE2000141 | 0 | 0 | 0 | 12.327 | 0 | 17.500 | 0 |
| BRACE2000148 | 0 | 0 | 0 | 2.534 | 0 | 0 | 0 |
| BRACE2000183 | 0 | 0 | 0 | 3.254 | 0 | 0 | 0 |
| BRACE2000229 | 0 | 0 | 0 | 9.165 | 0 | 0 | 0 |
| BRACE2000232 | 0 | 0 | 0 | 100 | 0 | 0 | 0 |
| BRACE2000245 | 0 | 0 | 0 | 6.277 | 0 | 8.911 | 0 |
| BRACE2000256 | 0 | 0 | 0 | 100 | 0 | 0 | 0 |
| BRACE2000266 | 0 | 0 | 0 | 100 | 0 | 0 | 0 |
| BRACE2000267 | 0 | 0 | 0 | 28.458 | 48.292 | 0 | 0 |
| BRACE2000280 | 0 | 0 | 0 | 13.302 | 0 | 0 | 0 |
| BRACE2000300 | 0 | 0 | 0 | 3.773 | 0 | 5.356 | 0 |
| BRACE2000307 | 0 | 0 | 0 | 20.064 | 0 | 0 | 0 |
| BRACE2000331 | 0 | 0 | 0 | 41.512 | 0 | 0 | 0 |
| BRACE2000332 | 0 | 19.052 | 0 | 3.853 | 0 | 0 | 0 |
| BRACE2000347 | 0 | 0 | 0 | 3.670 | 0 | 2.605 | 0 |
| BRACE2000351 | 0 | 0 | 0 | 100 | 0 | 0 | 0 |
| BRACE2000368 | 0 | 0 | 0 | 100 | 0 | 0 | 0 |
| BRACE2000392 | 0 | 0 | 0 | 100 | 0 | 0 | 0 |
| BRACE2000441 | 0 | 0 | 0 | 100 | 0 | 0 | 0 |
| BRACE2000487 | 0 | 57.595 | 0 | 5.824 | 0 | 0 | 0 |
| BRACE2000489 | 0 | 0 | 0 | 100 | 0 | 0 | 0 |
| BRACE2000505 | 0 | 0 | 0 | 8.673 | 0 | 0 | 0 |
| BRACE2000525 | 0 | 0 | 0 | 8.072 | 5.871 | 1.637 | 0 |
| BRACE2000526 | 0 | 0 | 0 | 100 | 0 | 0 | 0 |
| BRACE2000531 | 0 | 0 | 0 | 100 | 0 | 0 | 0 |
| BRACE2000545 | 0 | 0 | 0 | 100 | 0 | 0 | 0 |
| BRACE2000553 | 0 | 0 | 0 | 100 | 0 | 0 | 0 |
| BRACE2000565 | 0 | 0 | 0 | 15.271 | 0 | 7.226 | 0 |
| BRACE2000577 | 0 | 0 | 0 | 52.057 | 0 | 0 | 0 |
| BRACE2000640 | 0 | 0 | 0 | 100 | 0 | 0 | 0 |
| BRACE2000650 | 0 | 0 | 0 | 100 | 0 | 0 | 0 |
| BRACE2000677 | 0 | 0 | 0 | 100 | 0 | 0 | 0 |
| BRACE2000698 | 0 | 0 | 0 | 6.107 | 0 | 0 | 0 |
| BRACE2000718 | 0 | 0 | 0 | 100 | 0 | 0 | 0 |
| BRACE2000733 | 0 | 0 | 0 | 12.509 | 0 | 0 | 0 |
| BRACE2000743 | 0 | 0 | 0 | 100 | 0 | 0 | 0 |
| BRACE2000750 | 0 | 0 | 0 | 14.608 | 0 | 0 | 0 |
| BRACE2000753 | 0 | 0 | 0 | 21.618 | 0 | 0 | 0 |
| BRACE2000815 | 0 | 0 | 0 | 100 | 0 | 0 | 0 |
| BRACE2000864 | 0 | 0 | 0 | 2.997 | 0 | 4.254 | 0 |
| BRACE2000885 | 0 | 0 | 0 | 52.057 | 0 | 0 | 0 |
| BRACE2000893 | 0 | 0 | 0 | 35.283 | 0 | 0 | 0 |
| BRACE2000905 | 0 | 0 | 0 | 100 | 0 | 0 | 0 |
| BRACE2000936 | 0 | 0 | 0 | 100 | 0 | 0 | 0 |
| BRACE2000947 | 0 | 0 | 0 | 100 | 0 | 0 | 0 |
| BRACE2000965 | 0 | 0 | 0 | 100 | 0 | 0 | 0 |
| BRACE2000969 | 0 | 0 | 0 | 16.214 | 0 | 0 | 0 |
| BRACE2000975 | 0 | 0 | 0 | 15.004 | 0 | 7.100 | 0 |
| BRACE2000988 | 0 | 0 | 0 | 100 | 0 | 0 | 0 |
| BRACE2001017 | 0 | 0 | 0 | 100 | 0 | 0 | 0 |
| BRACE2001065 | 0 | 0 | 0 | 4.713 | 47.986 | 0 | 0 |
| BRACE2001070 | 0 | 0 | 0 | 16.015 | 0 | 0 | 0 |
| BRACE2001094 | 0 | 0 | 0 | 100 | 0 | 0 | 0 |
| BRACE2001107 | 0 | 0 | 0 | 10.447 | 53.184 | 0 | 0 |
| BRACE2001117 | 0 | 0 | 0 | 3.904 | 9.938 | 0 | 0 |
| BRACE2001143 | 0 | 0 | 0 | 3.163 | 0 | 2.994 | 0 |
| BRACE2001151 | 0 | 0 | 0 | 4.581 | 0 | 0 | 0 |
| BRACE2001154 | 0 | 0 | 0 | 7.541 | 0 | 0 | 0 |
| BRACE2001188 | 0 | 19.813 | 0 | 2.004 | 10.200 | 0 | 0 |
| BRACE2001191 | 0 | 0 | 0 | 100 | 0 | 0 | 0 |
| BRACE2001197 | 0 | 0 | 0 | 41.027 | 0 | 0 | 0 |
| BRACE2001236 | 0 | 0 | 0 | 12.771 | 0 | 0 | 0 |
| BRACE2001239 | 0 | 0 | 0 | 100 | 0 | 0 | 0 |
| BRACE2001269 | 0 | 0 | 0 | 100 | 0 | 0 | 0 |
| BRACE2001312 | 0 | 0 | 0 | 100 | 0 | 0 | 0 |
| BRACE2001313 | 0 | 0 | 0 | 21.618 | 0 | 0 | 0 |
| BRACE2001330 | 0 | 0 | 0 | 100 | 0 | 0 | 0 |
| BRACE2001340 | 0 | 0 | 0 | 100 | 0 | 0 | 0 |
| BRACE2001352 | 0 | 0 | 0 | 100 | 0 | 0 | 0 |
| BRACE2001353 | 0 | 0 | 0 | 100 | 0 | 0 | 0 |
| BRACE2001374 | 0 | 0 | 0 | 41.329 | 0 | 58.671 | 0 |
| BRACE2001375 | 0 | 0 | 0 | 100 | 0 | 0 | 0 |
| BRACE2001423 | 0 | 0 | 0 | 100 | 0 | 0 | 0 |
| BRACE2001424 | 0 | 0 | 0 | 100 | 0 | 0 | 0 |
| BRACE2001445 | 0 | 0 | 0 | 100 | 0 | 0 | 0 |
| BRACE2001453 | 0 | 0 | 0 | 100 | 0 | 0 | 0 |
| BRACE2001455 | 0 | 0 | 0 | 100 | 0 | 0 | 0 |
| BRACE2001477 | 0 | 0 | 0 | 4.882 | 0 | 6.931 | 0 |
| BRACE2001492 | 0 | 0 | 0 | 100 | 0 | 0 | 0 |
| BRACE2001496 | 0 | 0 | 0 | 6.887 | 17.530 | 4.888 | 0 |
| BRACE2001497 | 0 | 0 | 0 | 2.645 | 0 | 3.755 | 0 |
| BRACE2001508 | 0 | 0 | 0 | 12.511 | 0 | 0 | 0 |
| BRACE2001534 | 0 | 0 | 0 | 4.379 | 0 | 0 | 0 |
| BRACE2001543 | 0 | 0 | 0 | 100 | 0 | 0 | 0 |
| BRACE2001564 | 0 | 0 | 0 | 68.470 | 0 | 0 | 0 |
| BRACE2001588 | 0 | 0 | 0 | 100 | 0 | 0 | 0 |
| BRACE2001607 | 0 | 0 | 0 | 100 | 0 | 0 | 0 |
| BRACE2001626 | 0 | 0 | 0 | 100 | 0 | 0 | 0 |
| BRACE2001673 | 0 | 0 | 0 | 1.498 | 2.541 | 0.236 | 88.558 |
| BRACE2001677 | 0 | 0 | 0 | 100 | 0 | 0 | 0 |
| BRACE2001692 | 0 | 0 | 0 | 0.860 | 0 | 0 | 0 |
| BRACE2001705 | 0 | 0 | 0 | 100 | 0 | 0 | 0 |
| BRACE2001709 | 0 | 0 | 0 | 4.607 | 11.727 | 0 | 0 |
| BRACE2001711 | 0 | 0 | 0 | 8.283 | 0 | 0 | 0 |
| BRACE2001726 | 0 | 0 | 0 | 25.113 | 0 | 35.650 | 0 |
| BRACE2001733 | 0 | 0 | 0 | 100 | 0 | 0 | 0 |
| BRACE2001737 | 0 | 0 | 0 | 100 | 0 | 0 | 0 |
| BRACE2001742 | 0 | 0 | 0 | 100 | 0 | 0 | 0 |
| BRACE2001777 | 0 | 0 | 0 | 100 | 0 | 0 | 0 |
| BRACE2001779 | 0 | 0 | 0 | 100 | 0 | 0 | 0 |
| BRACE2001834 | 0 | 0 | 0 | 10.775 | 0 | 7.648 | 0 |
| BRACE2001855 | 0 | 0 | 0 | 0.817 | 0 | 0 | 0 |
| BRACE2001859 | 0 | 0 | 0 | 9.658 | 0 | 0 | 0 |
| BRACE2001865 | 0 | 0 | 0 | 100 | 0 | 0 | 0 |
| BRACE2001872 | 0 | 0 | 0 | 100 | 0 | 0 | 0 |
| BRACE2001881 | 0 | 0 | 0 | 16.377 | 0 | 0 | 0 |
| BRACE2001892 | 0 | 0 | 0 | 7.525 | 1.095 | 8.546 | 0 |
| BRACE2001898 | 0 | 0 | 0 | 100 | 0 | 0 | 0 |
| BRACE2001923 | 0 | 0 | 0 | 100 | 0 | 0 | 0 |
| BRACE2001942 | 0 | 0 | 0 | 45.981 | 0 | 0 | 0 |
| BRACE2001944 | 0 | 0 | 0 | 8.905 | 22.667 | 0 | 0 |
| BRACE2001954 | 0 | 0 | 0 | 100 | 0 | 0 | 0 |
| BRACE2001971 | 0 | 0 | 17.297 | 4.776 | 8.105 | 0 | 0 |
| BRACE2001972 | 0 | 0 | 0 | 100 | 0 | 0 | 0 |
| BRACE2001973 | 0 | 0 | 0 | 100 | 0 | 0 | 0 |
| BRACE2002026 | 0 | 0 | 0 | 100 | 0 | 0 | 0 |
| BRACE2002034 | 0 | 0 | 0 | 100 | 0 | 0 | 0 |
| BRACE2002050 | 0 | 0 | 0 | 14.407 | 0 | 14.609 | 0 |
| BRACE2002081 | 0 | 0 | 0 | 13.619 | 0 | 0 | 0 |
| BRACE2002091 | 0 | 0 | 0 | 1.499 | 0 | 2.128 | 0 |
| BRACE2002139 | 0 | 0 | 0 | 100 | 0 | 0 | 0 |
| BRACE2002142 | 0 | 0 | 0 | 100 | 0 | 0 | 0 |
| BRACE2002151 | 0 | 0 | 0 | 100 | 0 | 0 | 0 |
| BRACE2002157 | 0 | 0 | 0 | 100 | 0 | 0 | 0 |
| BRACE2002176 | 0 | 0 | 0 | 37.308 | 0 | 0 | 0 |
| BRACE2002202 | 0 | 0 | 0 | 76.511 | 0 | 0 | 0 |
| BRACE2002206 | 0 | 0 | 0 | 100 | 0 | 0 | 0 |
| BRACE2002227 | 0 | 0 | 0 | 100 | 0 | 0 | 0 |
| BRACE2002260 | 0 | 0 | 0 | 100 | 0 | 0 | 0 |
| BRACE2002297 | 0 | 0 | 0 | 100 | 0 | 0 | 0 |
| BRACE2002304 | 0 | 0 | 0 | 100 | 0 | 0 | 0 |
| BRACE2002356 | 0 | 0 | 0 | 25.793 | 0 | 0 | 0 |
| BRACE2002392 | 0 | 0 | 0 | 3.670 | 18.684 | 5.210 | 0 |
| BRACE2002394 | 0 | 0 | 0 | 100 | 0 | 0 | 0 |
| BRACE2002409 | 0 | 0 | 0 | 37.308 | 0 | 0 | 0 |
| BRACE2002431 | 0 | 0 | 0 | 100 | 0 | 0 | 0 |
| BRACE2002441 | 0 | 0 | 0 | 0.799 | 0 | 4.539 | 0 |
| BRACE2002444 | 0 | 0 | 0 | 100 | 0 | 0 | 0 |
| BRACE2002458 | 0 | 0 | 0 | 100 | 0 | 0 | 0 |
| BRACE2002467 | 0 | 0 | 0 | 4.639 | 0 | 0 | 0 |
| BRACE2002468 | 0 | 0 | 0 | 100 | 0 | 0 | 0 |
| BRACE2002478 | 0 | 0 | 0 | 41.149 | 0 | 0 | 0 |
| BRACE2002495 | 0 | 0 | 0 | 16.447 | 0 | 0 | 0 |
| BRACE2002582 | 0 | 0 | 0 | 9.274 | 0 | 0 | 0 |
| BRACE2002585 | 0 | 0 | 0 | 17.693 | 0 | 25.117 | 0 |
| BRACE2002589 | 0 | 0 | 0 | 100 | 0 | 0 | 0 |
| BRACE2002590 | 0 | 0 | 0 | 100 | 0 | 0 | 0 |
| BRACE2002606 | 0 | 0 | 0 | 3.804 | 0 | 0 | 0 |
| BRACE2002613 | 0 | 0 | 0 | 100 | 0 | 0 | 0 |
| BRACE2002614 | 0 | 0 | 0 | 100 | 0 | 0 | 0 |
| BRACE2002617 | 0 | 0 | 0 | 100 | 0 | 0 | 0 |
| BRACE2002623 | 0 | 0 | 0 | 100 | 0 | 0 | 0 |
| BRACE2002635 | 0 | 0 | 0 | 41.329 | 0 | 58.671 | 0 |
| BRACE2002649 | 0 | 0 | 0 | 15.030 | 0 | 0 | 0 |
| BRACE2002661 | 0 | 0 | 0 | 2.044 | 0 | 0 | 0 |
| BRACE2002676 | 0 | 0 | 0 | 100 | 0 | 0 | 0 |
| BRACE2002677 | 0 | 0 | 0 | 1.370 | 0 | 0 | 0 |
| BRACE2002682 | 0 | 0 | 0 | 13.590 | 0 | 0 | 0 |
| BRACE2002685 | 0 | 0 | 0 | 2.433 | 0 | 0 | 0 |
| BRACE2002695 | 0 | 0 | 0 | 100 | 0 | 0 | 0 |
| BRACE2002707 | 0 | 0 | 0 | 100 | 0 | 0 | 0 |
| BRACE2002736 | 0 | 0 | 0 | 100 | 0 | 0 | 0 |
| BRACE2002752 | 0 | 0 | 0 | 10.913 | 0 | 0 | 0 |
| BRACE2002755 | 0 | 0 | 0 | 38.787 | 0 | 0 | 0 |
| BRACE2002762 | 0 | 0 | 0 | 100 | 0 | 0 | 0 |
| BRACE2002772 | 0 | 0 | 0 | 100 | 0 | 0 | 0 |
| BRACE2002792 | 0 | 0 | 0 | 100 | 0 | 0 | 0 |
| BRACE2002796 | 0 | 0 | 0 | 36.360 | 0 | 0 | 0 |
| BRACE2002803 | 0 | 0 | 0 | 38.798 | 0 | 18.360 | 0 |
| BRACE2002807 | 0 | 0 | 0 | 22.873 | 0 | 0 | 0 |
| BRACE2002812 | 0 | 0 | 0 | 25.026 | 0 | 5.921 | 0 |
| BRACE2002834 | 0 | 0 | 0 | 100 | 0 | 0 | 0 |
| BRACE2002849 | 0 | 0 | 0 | 100 | 0 | 0 | 0 |
| BRACE2002857 | 0 | 0 | 0 | 100 | 0 | 0 | 0 |
| BRACE2002860 | 0 | 0 | 0 | 7.148 | 0 | 0 | 0 |
| BRACE2002861 | 0 | 18.215 | 0 | 9.209 | 0 | 0 | 0 |
| BRACE2002884 | 0 | 0 | 0 | 100 | 0 | 0 | 0 |
| BRACE2002896 | 0 | 0 | 0 | 31.914 | 0 | 0 | 0 |
| BRACE2002948 | 0 | 0 | 0 | 100 | 0 | 0 | 0 |
| BRACE2003037 | 0 | 0 | 0 | 3.065 | 23.406 | 10.878 | 0 |
| BRACE2003078 | 0 | 0 | 0 | 11.488 | 0 | 0 | 0 |
| BRACE2003097 | 0 | 0 | 0 | 41.027 | 0 | 0 | 0 |
| BRACE2003110 | 0 | 0 | 0 | 9.561 | 0 | 0 | 0 |
| BRACE2003168 | 0 | 0 | 0 | 100 | 0 | 0 | 0 |
| BRACE2003172 | 0 | 0 | 0 | 5.536 | 2.349 | 1.637 | 0 |
| BRACE2003199 | 0 | 0 | 0 | 100 | 0 | 0 | 0 |
| BRACE2003210 | 0 | 0 | 0 | 100 | 0 | 0 | 0 |
| BRACE2003217 | 0 | 0 | 0 | 6.119 | 0 | 8.686 | 0 |
| BRACE2003254 | 0 | 6.355 | 0 | 1.928 | 0 | 2.737 | 0 |
| BRACE2003269 | 0 | 0 | 0 | 100 | 0 | 0 | 0 |
| BRACE2003285 | 0 | 0 | 0 | 100 | 0 | 0 | 0 |
| BRACE2003304 | 0 | 0 | 0 | 3.103 | 0 | 0 | 0 |
| BRACE2003319 | 0 | 0 | 0 | 1.626 | 0 | 0 | 0 |
| BRACE2003398 | 0 | 0 | 0 | 16.418 | 83.582 | 0 | 0 |
| BRACE2003420 | 0 | 0 | 0 | 100 | 0 | 0 | 0 |
| BRACE2003428 | 0 | 0 | 0 | 100 | 0 | 0 | 0 |
| BRACE2003431 | 0 | 0 | 0 | 100 | 0 | 0 | 0 |
| BRACE2003512 | 0 | 0 | 0 | 22.932 | 0 | 0 | 0 |
| BRACE2003516 | 0 | 0 | 0 | 37.308 | 0 | 0 | 0 |
| BRACE2003527 | 0 | 0 | 0 | 3.659 | 0 | 0 | 0 |
| BRACE2003539 | 0 | 0 | 0 | 39.025 | 0 | 0 | 0 |
| BRACE2003540 | 0 | 0 | 0 | 100 | 0 | 0 | 0 |
| BRACE2003594 | 0 | 0 | 0 | 8.288 | 0 | 0 | 0 |
| BRACE2003598 | 0 | 0 | 0 | 39.025 | 0 | 0 | 0 |
| BRACE2003609 | 0 | 0 | 0 | 6.452 | 0 | 18.317 | 0 |
| BRACE2003614 | 0 | 0 | 0 | 100 | 0 | 0 | 0 |
| BRACE2003628 | 0 | 0 | 0 | 9.684 | 0 | 0 | 0 |
| BRACE2003639 | 0 | 0 | 0 | 100 | 0 | 0 | 0 |
| BRACE2003700 | 0 | 0 | 0 | 29.243 | 0 | 41.515 | 0 |
| BRACE2003713 | 0 | 0 | 0 | 16.418 | 83.582 | 0 | 0 |
| BRACE2003766 | 0 | 0 | 0 | 100 | 0 | 0 | 0 |
| BRACE2003785 | 0 | 0 | 0 | 6.207 | 0 | 10.770 | 0 |
| BRACE2003788 | 0 | 0 | 0 | 27.684 | 0 | 0 | 0 |
| BRACE2003800 | 0 | 0 | 0 | 38.906 | 0 | 0 | 0 |
| BRACE2003802 | 0 | 0 | 0 | 100 | 0 | 0 | 0 |
| BRACE2003825 | 0 | 0 | 0 | 9.658 | 0 | 0 | 0 |
| BRACE2003827 | 0 | 0 | 0 | 5.597 | 3.166 | 0 | 0 |
| BRACE2003845 | 0 | 0 | 0 | 6.468 | 0 | 0 | 0 |
| BRACE2003846 | 0 | 0 | 0 | 1.850 | 0 | 0.657 | 0 |
| BRACE2003847 | 0 | 0 | 0 | 100 | 0 | 0 | 0 |
| BRACE2003848 | 0 | 0 | 0 | 38.787 | 0 | 0 | 0 |
| BRACE2003873 | 0 | 0 | 0 | 100 | 0 | 0 | 0 |
| BRACE2003885 | 0 | 0 | 0 | 100 | 0 | 0 | 0 |
| BRACE2003887 | 0 | 0 | 0 | 100 | 0 | 0 | 0 |
| BRACE2003892 | 0 | 0 | 0 | 6.196 | 0 | 6.597 | 0 |
| BRACE2003904 | 0 | 0 | 0 | 3.680 | 9.367 | 0 | 0 |
| BRACE2003905 | 0 | 0 | 0 | 44.896 | 0 | 0 | 0 |
| BRACE2003928 | 0 | 0 | 0 | 100 | 0 | 0 | 0 |
| BRACE2003944 | 0 | 0 | 0 | 0.367 | 0 | 2.086 | 0 |
| BRACE2003954 | 0 | 0 | 0 | 16.746 | 0 | 0 | 0 |
| BRACE2003982 | 0 | 0 | 0 | 2.921 | 14.870 | 8.293 | 0 |
| BRACE2003987 | 0 | 0 | 0 | 100 | 0 | 0 | 0 |
| BRACE2005034 | 0 | 0 | 0 | 100 | 0 | 0 | 0 |
| BRACE2005047 | 0 | 0 | 0 | 100 | 0 | 0 | 0 |
| BRACE2005063 | 0 | 0 | 0 | 100 | 0 | 0 | 0 |
| BRACE2005083 | 0 | 0 | 0 | 51.220 | 0 | 24.238 | 0 |
| BRACE2005087 | 0 | 0 | 0 | 6.626 | 0 | 3.136 | 0 |
| BRACE2005090 | 0 | 0 | 0 | 52.057 | 0 | 0 | 0 |
| BRACE2005099 | 0 | 0 | 0 | 14.152 | 0 | 1.339 | 0 |
| BRACE2005118 | 0 | 0 | 0 | 100 | 0 | 0 | 0 |
| BRACE2005124 | 0 | 0 | 0 | 100 | 0 | 0 | 0 |
| BRACE2005138 | 0 | 0 | 0 | 100 | 0 | 0 | 0 |
| BRACE2005151 | 0 | 0 | 0 | 7.457 | 0 | 0 | 0 |
| BRACE2005160 | 0 | 0 | 0 | 100 | 0 | 0 | 0 |
| BRACE2005169 | 0 | 0 | 0 | 100 | 0 | 0 | 0 |
| BRACE2005189 | 0 | 0 | 0 | 53.953 | 0 | 0 | 0 |
| BRACE2005193 | 0 | 0 | 0 | 41.027 | 0 | 0 | 0 |
| BRACE2005196 | 0 | 0 | 0 | 22.570 | 0 | 0 | 0 |
| BRACE2005198 | 0 | 0 | 0 | 100 | 0 | 0 | 0 |
| BRACE2005216 | 0 | 0 | 0 | 100 | 0 | 0 | 0 |
| BRACE2005231 | 0 | 22.408 | 0 | 9.064 | 11.536 | 9.650 | 0 |
| BRACE2005243 | 0 | 0 | 0 | 100 | 0 | 0 | 0 |
| BRACE2005251 | 0 | 0 | 0 | 52.513 | 0 | 0 | 0 |
| BRACE2005253 | 0 | 0 | 0 | 39.025 | 0 | 0 | 0 |
| BRACE2005290 | 0 | 0 | 0 | 18.059 | 0 | 25.637 | 0 |
| BRACE2005298 | 0 | 0 | 0 | 21.618 | 0 | 0 | 0 |
| BRACE2005328 | 0 | 0 | 0 | 100 | 0 | 0 | 0 |
| BRACE2005329 | 0 | 0 | 0 | 100 | 0 | 0 | 0 |
| BRACE2005337 | 0 | 0 | 0 | 100 | 0 | 0 | 0 |
| BRACE2005348 | 0 | 0 | 0 | 100 | 0 | 0 | 0 |
| BRACE2005363 | 0 | 0 | 0 | 10.086 | 0 | 0 | 0 |
| BRACE2005395 | 0 | 0 | 0 | 20.076 | 0 | 0 | 0 |
| BRACE2005408 | 0 | 0 | 0 | 6.751 | 0 | 0 | 0 |
| BRACE2005433 | 0 | 0 | 0 | 8.197 | 0 | 0 | 0 |
| BRACE2005434 | 0 | 0 | 0 | 1.468 | 2.491 | 0 | 0 |
| BRACE2005448 | 0 | 0 | 0 | 9.653 | 0 | 0 | 0 |
| BRACE2005450 | 0 | 0 | 0 | 100 | 0 | 0 | 0 |
| BRACE2005453 | 0 | 0 | 0 | 9.182 | 0 | 0 | 0 |
| BRACE2005457 | 0 | 0 | 0 | 41.512 | 0 | 0 | 0 |
| BRACE2005460 | 0 | 0 | 0 | 100 | 0 | 0 | 0 |
| BRACE2005489 | 0 | 0 | 0 | 100 | 0 | 0 | 0 |
| BRACE2005518 | 0 | 0 | 0 | 100 | 0 | 0 | 0 |
| BRACE2005556 | 0 | 0 | 0 | 100 | 0 | 0 | 0 |
| BRACE2005562 | 0 | 0 | 0 | 100 | 0 | 0 | 0 |
| BRACE2005624 | 0 | 0 | 0 | 100 | 0 | 0 | 0 |
| BRACE2005642 | 0 | 0 | 0 | 25.930 | 0 | 7.362 | 0 |
| BRACE2005661 | 0 | 0 | 0 | 100 | 0 | 0 | 0 |
| BRACE2005667 | 0 | 0 | 0 | 100 | 0 | 0 | 0 |
| BRACE2005681 | 0 | 0 | 0 | 14.879 | 0 | 13.076 | 0 |
| BRACE2005719 | 0 | 0 | 0 | 6.324 | 32.194 | 5.985 | 0 |
| BRACE2005731 | 0 | 0 | 0 | 41.329 | 0 | 58.671 | 0 |
| BRACE2005742 | 0 | 0 | 0 | 100 | 0 | 0 | 0 |
| BRACE2005762 | 0 | 0 | 0 | 100 | 0 | 0 | 0 |
| BRACE2005773 | 0 | 0 | 0 | 100 | 0 | 0 | 0 |
| BRACE2005787 | 0 | 0 | 0 | 100 | 0 | 0 | 0 |
| BRACE2005795 | 0 | 0 | 0 | 100 | 0 | 0 | 0 |
| BRACE2005800 | 0 | 0 | 0 | 100 | 0 | 0 | 0 |
| BRACE2005858 | 0 | 0 | 0 | 14.668 | 0 | 0 | 0 |
| BRACE2005869 | 0 | 0 | 0 | 100 | 0 | 0 | 0 |
| BRACE2005875 | 0 | 0 | 0 | 3.056 | 0 | 0 | 0 |
| BRACE2005881 | 0 | 0 | 0 | 100 | 0 | 0 | 0 |
| BRACE2005898 | 0 | 0 | 0 | 100 | 0 | 0 | 0 |
| BRACE2005904 | 0 | 0 | 0 | 100 | 0 | 0 | 0 |
| BRACE2005906 | 0 | 0 | 0 | 100 | 0 | 0 | 0 |
| BRACE2005907 | 0 | 0 | 0 | 100 | 0 | 0 | 0 |
| BRACE2005911 | 0 | 0 | 0 | 100 | 0 | 0 | 0 |
| BRACE2005937 | 0 | 0 | 0 | 8.574 | 0 | 0 | 0 |
| BRACE2005949 | 0 | 0 | 0 | 100 | 0 | 0 | 0 |
| BRACE2005981 | 0 | 0 | 0 | 100 | 0 | 0 | 0 |
| BRACE2005991 | 0 | 0 | 0 | 100 | 0 | 0 | 0 |
| BRACE2006055 | 0 | 0 | 0 | 4.259 | 0 | 2.016 | 0 |
| BRACE2006072 | 0 | 0 | 0 | 13.990 | 0 | 0 | 0 |
| BRACE2006075 | 0 | 0 | 0 | 11.517 | 0 | 0 | 0 |
| BRACE2006084 | 0 | 0 | 0 | 2.179 | 0 | 3.093 | 0 |
| BRACE2006089 | 0 | 0 | 0 | 54.983 | 0 | 0 | 0 |
| BRACE2006102 | 0 | 0 | 0 | 29.854 | 0 | 0 | 0 |
| BRACE2006105 | 0 | 0 | 0 | 15.058 | 0 | 0 | 0 |
| BRACE2006122 | 0 | 0 | 0 | 100 | 0 | 0 | 0 |
| BRACE2006137 | 0 | 0 | 0 | 41.329 | 0 | 58.671 | 0 |
| BRACE2006143 | 0 | 0 | 0 | 100 | 0 | 0 | 0 |
| BRACE2006162 | 0 | 0 | 0 | 1.098 | 0 | 0 | 0 |
| BRACE2006167 | 0 | 0 | 0 | 10.473 | 15.234 | 14.868 | 0 |
| BRACE2006174 | 0 | 0 | 0 | 100 | 0 | 0 | 0 |
| BRACE2006240 | 0 | 0 | 0 | 100 | 0 | 0 | 0 |
| BRACE2006245 | 0 | 0 | 0 | 100 | 0 | 0 | 0 |
| BRACE2006249 | 0 | 0 | 0 | 45.981 | 0 | 0 | 0 |
| BRACE2006258 | 0 | 0 | 0 | 1.744 | 2.960 | 0 | 0 |
| BRACE2006264 | 0 | 0 | 0 | 5.990 | 0 | 0 | 0 |
| BRACE2006274 | 0 | 0 | 0 | 41.329 | 0 | 58.671 | 0 |
| BRACE2006281 | 0 | 0 | 0 | 2.145 | 0 | 0 | 0 |
| BRACE2006298 | 0 | 0 | 0 | 100 | 0 | 0 | 0 |
| BRACE2006319 | 0 | 0 | 0 | 4.977 | 0 | 3.532 | 0 |
| BRACE2006344 | 0 | 0 | 0 | 2.537 | 0 | 0 | 0 |
| BRACE2006354 | 0 | 0 | 0 | 4.417 | 22.485 | 0 | 0 |
| BRACE2006363 | 0 | 0 | 0 | 26.312 | 0 | 9.338 | 0 |
| BRACE2006378 | 0 | 0 | 0 | 38.787 | 0 | 0 | 0 |
| BRACE2006380 | 0 | 0 | 0 | 58.183 | 0 | 0 | 0 |
| BRACE2006393 | 0 | 0 | 0 | 100 | 0 | 0 | 0 |
| BRACE2006397 | 0 | 4.144 | 0 | 0.838 | 5.333 | 0.297 | 0 |
| BRACE2006413 | 0 | 0 | 0 | 100 | 0 | 0 | 0 |
| BRACE2006417 | 0 | 0 | 0 | 100 | 0 | 0 | 0 |
| BRACE2006453 | 0 | 0 | 0 | 100 | 0 | 0 | 0 |
| BRACE2006459 | 0 | 0 | 0 | 28.977 | 0 | 0 | 0 |
| BRACE2006488 | 0 | 0 | 0 | 100 | 0 | 0 | 0 |
| BRACE2006514 | 0 | 0 | 0 | 3.700 | 0 | 3.501 | 0 |
| BRACE2006534 | 0 | 0 | 0 | 100 | 0 | 0 | 0 |
| BRACE2006537 | 0 | 0 | 0 | 1.528 | 0 | 2.169 | 0 |
| BRACE2006540 | 0 | 0 | 0 | 100 | 0 | 0 | 0 |
| BRACE2006547 | 0 | 0 | 0 | 10.619 | 0 | 0 | 0 |
| BRACE2006564 | 0 | 0 | 0 | 29.854 | 0 | 0 | 0 |
| BRACE2006587 | 0 | 0 | 0 | 100 | 0 | 0 | 0 |
| BRACE2006598 | 0 | 0 | 0 | 20.531 | 0 | 29.147 | 0 |
| BRACE2006636 | 0 | 0 | 0 | 9.731 | 0 | 0 | 0 |
| BRACE2006685 | 0 | 0 | 0 | 100 | 0 | 0 | 0 |
| BRACE2006703 | 0 | 0 | 0 | 100 | 0 | 0 | 0 |
| BRACE2006743 | 0 | 0 | 0 | 15.779 | 0 | 4.480 | 0 |
| BRACE2006753 | 0 | 0 | 0 | 4.364 | 0 | 0 | 0 |
| BRACE2006783 | 0 | 0 | 0 | 100 | 0 | 0 | 0 |
| BRACE2006821 | 0 | 0 | 0 | 1.311 | 20.016 | 0 | 0 |
| BRACE2006833 | 0 | 0 | 0 | 53.329 | 0 | 0 | 0 |
| BRACE2006859 | 0 | 0 | 0 | 7.211 | 0 | 0 | 0 |
| BRACE2006871 | 0 | 0 | 0 | 0.710 | 0 | 3.022 | 0 |
| BRACE2006900 | 0 | 0 | 0 | 2.191 | 0 | 0 | 0 |
| BRACE2006909 | 0 | 0 | 0 | 100 | 0 | 0 | 0 |
| BRACE2006911 | 0 | 0 | 0 | 13.180 | 0 | 18.711 | 0 |
| BRACE2006924 | 0 | 0 | 0 | 100 | 0 | 0 | 0 |
| BRACE2006935 | 0 | 0 | 0 | 16.418 | 83.582 | 0 | 0 |
| BRACE2006937 | 0 | 0 | 0 | 4.750 | 4.836 | 0 | 0 |
| BRACE2006944 | 0 | 0 | 0 | 8.278 | 0 | 0 | 0 |
| BRACE2006951 | 0 | 0 | 0 | 100 | 0 | 0 | 0 |
| BRACE2006982 | 0 | 0 | 0 | 3.683 | 51.560 | 0 | 0 |
| BRACE2006986 | 0 | 0 | 0 | 100 | 0 | 0 | 0 |
| BRACE2007013 | 0 | 0 | 0 | 21.832 | 0 | 20.662 | 0 |
| BRACE2007064 | 0 | 11.405 | 0 | 3.460 | 0 | 3.274 | 0 |
| BRACE2007068 | 0 | 0 | 0 | 35.550 | 0 | 0 | 0 |
| BRACE2007087 | 0 | 0 | 0 | 100 | 0 | 0 | 0 |
| BRACE2007089 | 0 | 0 | 0 | 0.601 | 0 | 0.853 | 0 |
| BRACE2007109 | 0 | 0 | 0 | 25.067 | 3.449 | 5.771 | 0 |
| BRACE2007138 | 0 | 0 | 0 | 100 | 0 | 0 | 0 |
| BRACE2007174 | 0 | 0 | 0 | 11.088 | 0 | 0 | 0 |
| BRACE2007191 | 0 | 0 | 0 | 2.438 | 0 | 0.692 | 0 |
| BRACE2007197 | 0 | 0 | 0 | 100 | 0 | 0 | 0 |
| BRACE2007201 | 0 | 0 | 0 | 41.027 | 0 | 0 | 0 |
| BRACE2007203 | 0 | 0 | 0 | 100 | 0 | 0 | 0 |
| BRACE2007232 | 0 | 0 | 0 | 100 | 0 | 0 | 0 |
| BRACE2007254 | 0 | 0 | 0 | 5.283 | 0 | 0 | 0 |
| BRACE2007262 | 0 | 0 | 0 | 100 | 0 | 0 | 0 |
| BRACE2007274 | 0 | 0 | 0 | 100 | 0 | 0 | 0 |
| BRACE2007281 | 0 | 0 | 0 | 100 | 0 | 0 | 0 |
| BRACE2007295 | 0 | 0 | 0 | 26.697 | 0 | 0 | 0 |
| BRACE2007358 | 0 | 0 | 0 | 100 | 0 | 0 | 0 |
| BRACE2007396 | 0 | 0 | 0 | 100 | 0 | 0 | 0 |
| BRACE2007398 | 0 | 0 | 0 | 100 | 0 | 0 | 0 |
| BRACE2007401 | 0 | 0 | 0 | 7.783 | 6.604 | 7.366 | 0 |
| BRACE2007411 | 0 | 0 | 0 | 100 | 0 | 0 | 0 |
| BRACE2007447 | 0 | 0 | 0 | 100 | 0 | 0 | 0 |
| BRACE2007477 | 0 | 0 | 0 | 100 | 0 | 0 | 0 |
| BRACE2007502 | 0 | 0 | 0 | 100 | 0 | 0 | 0 |
| BRACE2007503 | 0 | 0 | 0 | 100 | 0 | 0 | 0 |
| BRACE2007518 | 0 | 0 | 0 | 12.887 | 0 | 9.147 | 0 |
| BRACE2007522 | 0 | 0 | 0 | 41.027 | 0 | 0 | 0 |
| BRACE2007527 | 0 | 0 | 0 | 100 | 0 | 0 | 0 |
| BRACE2007538 | 0 | 0 | 0 | 100 | 0 | 0 | 0 |
| BRACE2007563 | 0 | 0 | 0 | 100 | 0 | 0 | 0 |
| BRACE2007567 | 0 | 0 | 0 | 1.970 | 0 | 2.796 | 0 |
| BRACE2007577 | 0 | 0 | 0 | 2.085 | 0 | 0 | 0 |
| BRACE2007621 | 0 | 0 | 0 | 100 | 0 | 0 | 0 |
| BRACE2007640 | 0 | 0 | 0 | 100 | 0 | 0 | 0 |
| BRACE2007641 | 0 | 0 | 0 | 10.014 | 5.664 | 3.159 | 0 |
| BRACE2007646 | 0 | 0 | 0 | 41.329 | 0 | 58.671 | 0 |
| BRACE2007663 | 0 | 0 | 0 | 67.607 | 0 | 0 | 0 |
| BRACE2007671 | 0 | 0 | 0 | 1.097 | 0 | 0 | 0 |
| BRACE2007682 | 0 | 0 | 0 | 100 | 0 | 0 | 0 |
| BRACE2007685 | 0 | 0 | 0 | 100 | 0 | 0 | 0 |
| BRACE2007708 | 0 | 0 | 0 | 3.017 | 0 | 2.141 | 0 |
| BRACE2007727 | 0 | 0 | 0 | 100 | 0 | 0 | 0 |
| BRACE2007749 | 0 | 0 | 0 | 100 | 0 | 0 | 0 |
| BRACE2007760 | 0 | 0 | 0 | 83.719 | 0 | 0 | 0 |
| BRACE2007761 | 0 | 0 | 0 | 100 | 0 | 0 | 0 |
| BRACE2007764 | 0 | 0 | 0 | 41.329 | 0 | 58.671 | 0 |
| BRACE2007767 | 0 | 0 | 0 | 2.210 | 0 | 0 | 0 |
| BRACE2007768 | 0 | 0 | 0 | 6.791 | 0 | 0 | 0 |
| BRACE2007769 | 0 | 0 | 0 | 100 | 0 | 0 | 0 |
| BRACE2007784 | 0 | 0 | 0 | 100 | 0 | 0 | 0 |
| BRACE2007786 | 0 | 0 | 0 | 100 | 0 | 0 | 0 |
| BRACE2007798 | 0 | 0 | 0 | 2.937 | 7.475 | 4.169 | 0 |
| BRACE2007799 | 0 | 0 | 0 | 100 | 0 | 0 | 0 |
| BRACE2007801 | 0 | 0 | 0 | 52.057 | 0 | 0 | 0 |
| BRACE2007832 | 0 | 0 | 0 | 17.815 | 0 | 25.291 | 0 |
| BRACE2007836 | 0 | 0 | 0 | 100 | 0 | 0 | 0 |
| BRACE2007868 | 0 | 0 | 0 | 100 | 0 | 0 | 0 |
| BRACE2007882 | 0 | 0 | 0 | 32.721 | 0 | 6.636 | 0 |
| BRACE2007888 | 0 | 0 | 0 | 100 | 0 | 0 | 0 |
| BRACE2007902 | 0 | 0 | 0 | 22.750 | 0 | 0 | 0 |
| BRACE2007920 | 0 | 0 | 0 | 100 | 0 | 0 | 0 |
| BRACE2007937 | 0 | 0 | 0 | 5.408 | 0 | 7.677 | 0 |
| BRACE2007944 | 0 | 0 | 0 | 100 | 0 | 0 | 0 |
| BRACE2007952 | 0 | 0 | 0 | 8.604 | 8.761 | 9.772 | 0 |
| BRACE2008008 | 0 | 0 | 0 | 100 | 0 | 0 | 0 |
| BRACE2008015 | 0 | 0 | 0 | 100 | 0 | 0 | 0 |
| BRACE2008021 | 0 | 0 | 0 | 100 | 0 | 0 | 0 |
| BRACE2008097 | 0 | 0 | 0 | 3.408 | 0 | 0 | 0 |
| BRACE2008102 | 0 | 0 | 0 | 16.858 | 0 | 23.932 | 0 |
| BRACE2008114 | 0 | 0 | 0 | 100 | 0 | 0 | 0 |
| BRACE2008144 | 0 | 0 | 0 | 100 | 0 | 0 | 0 |
| BRACE2008172 | 0 | 0 | 0 | 100 | 0 | 0 | 0 |
| BRACE2008216 | 0 | 0 | 0 | 9.397 | 0 | 0 | 0 |
| BRACE2008218 | 0 | 0 | 0 | 100 | 0 | 0 | 0 |
| BRACE2008251 | 0 | 0 | 0 | 19.231 | 0 | 0 | 0 |
| BRACE2008276 | 0 | 0 | 0 | 100 | 0 | 0 | 0 |
| BRACE2008295 | 0 | 0 | 0 | 100 | 0 | 0 | 0 |
| BRACE2008308 | 0 | 0 | 0 | 100 | 0 | 0 | 0 |
| BRACE2008336 | 0 | 0 | 0 | 100 | 0 | 0 | 0 |
| BRACE2008358 | 0 | 0 | 0 | 3.217 | 0 | 6.850 | 0 |
| BRACE2008361 | 0 | 0 | 0 | 100 | 0 | 0 | 0 |
| BRACE2008380 | 0 | 0 | 0 | 1.387 | 14.119 | 5.906 | 0 |
| BRACE2008385 | 0 | 0 | 0 | 2.965 | 0 | 0 | 0 |
| BRACE2008399 | 0 | 0 | 0 | 3.928 | 0 | 0 | 0 |
| BRACE2008401 | 0 | 0 | 0 | 100 | 0 | 0 | 0 |
| BRACE2008402 | 0 | 0 | 0 | 5.953 | 0 | 0 | 0 |
| BRACE2008410 | 0 | 0 | 0 | 100 | 0 | 0 | 0 |
| BRACE2008420 | 0 | 0 | 0 | 100 | 0 | 0 | 0 |
| BRACE2008443 | 0 | 0 | 0 | 100 | 0 | 0 | 0 |
| BRACE2008473 | 0 | 0 | 0 | 100 | 0 | 0 | 0 |
| BRACE2008480 | 0 | 0 | 0 | 100 | 0 | 0 | 0 |
| BRACE2008481 | 0 | 0 | 0 | 3.963 | 10.087 | 2.813 | 0 |
| BRACE2008488 | 0 | 0 | 0 | 100 | 0 | 0 | 0 |
| BRACE2008495 | 0 | 0 | 0 | 16.214 | 0 | 0 | 0 |
| BRACE2008500 | 0 | 0 | 0 | 100 | 0 | 0 | 0 |
| BRACE2008553 | 0 | 0 | 0 | 2.952 | 0 | 4.191 | 0 |
| BRACE2008594 | 0 | 0 | 0 | 100 | 0 | 0 | 0 |
| BRACE2008604 | 0 | 0 | 0 | 100 | 0 | 0 | 0 |
| BRACE2008615 | 0 | 0 | 0 | 100 | 0 | 0 | 0 |
| BRACE2008622 | 0 | 0 | 0 | 100 | 0 | 0 | 0 |
| BRACE2008629 | 0 | 0 | 0 | 100 | 0 | 0 | 0 |
| BRACE2008653 | 0 | 0 | 4.067 | 8.610 | 0 | 2.126 | 0 |
| BRACE2008655 | 0 | 0 | 0 | 100 | 0 | 0 | 0 |
| BRACE2008656 | 0 | 0 | 0 | 100 | 0 | 0 | 0 |
| BRACE2008706 | 0 | 0 | 0 | 11.660 | 0 | 0 | 0 |
| BRACE2008708 | 0 | 0 | 0 | 49.602 | 0 | 0 | 0 |
| BRACE2008710 | 0 | 0 | 0 | 100 | 0 | 0 | 0 |
| BRACE2008754 | 0 | 0 | 0 | 100 | 0 | 0 | 0 |
| BRACE2008797 | 0 | 0 | 0 | 44.047 | 0 | 25.012 | 0 |
| BRACE2008847 | 0 | 0 | 0 | 100 | 0 | 0 | 0 |
| BRACE2008857 | 0 | 0 | 0 | 41.512 | 0 | 0 | 0 |
| BRACE2008861 | 0 | 0 | 0 | 100 | 0 | 0 | 0 |
| BRACE2008867 | 0 | 0 | 0 | 100 | 0 | 0 | 0 |
| BRACE2008881 | 0 | 0 | 0 | 19.678 | 0 | 0 | 0 |
| BRACE2008883 | 0 | 0 | 0 | 100 | 0 | 0 | 0 |
| BRACE2008917 | 0 | 0 | 0 | 100 | 0 | 0 | 0 |
| BRACE2008919 | 0 | 0 | 0 | 100 | 0 | 0 | 0 |
| BRACE2008941 | 0 | 0 | 0 | 14.187 | 0 | 0 | 0 |
| BRACE2008948 | 0 | 0 | 0 | 100 | 0 | 0 | 0 |
| BRACE2008960 | 0 | 0 | 0 | 100 | 0 | 0 | 0 |
| BRACE2008968 | 18.226 | 0 | 0 | 2.476 | 0 | 0.586 | 0 |
| BRACE2008999 | 0 | 0 | 0 | 24.977 | 25.431 | 0 | 0 |
| BRACE2009014 | 0 | 0 | 0 | 100 | 0 | 0 | 0 |
| BRACE2009016 | 0 | 0 | 0 | 100 | 0 | 0 | 0 |
| BRACE2009031 | 0 | 0 | 0 | 100 | 0 | 0 | 0 |
| BRACE2009037 | 0 | 0 | 2.252 | 0.829 | 0 | 0.883 | 0 |
| BRACE2009044 | 0 | 0 | 0 | 7.121 | 0 | 0 | 0 |
| BRACE2009045 | 0 | 0 | 0 | 8.547 | 0 | 6.067 | 0 |
| BRACE2009053 | 0 | 0 | 0 | 100 | 0 | 0 | 0 |
| BRACE2009122 | 0 | 0 | 0 | 100 | 0 | 0 | 0 |
| BRACE2009131 | 0 | 0 | 0 | 100 | 0 | 0 | 0 |
| BRACE2009185 | 0 | 0 | 0 | 100 | 0 | 0 | 0 |
| BRACE2009188 | 0 | 0 | 0 | 100 | 0 | 0 | 0 |
| BRACE2009212 | 0 | 0 | 0 | 100 | 0 | 0 | 0 |
| BRACE2009221 | 0 | 0 | 0 | 100 | 0 | 0 | 0 |
| BRACE2009235 | 0 | 0 | 0 | 100 | 0 | 0 | 0 |
| BRACE2009238 | 0 | 0 | 0 | 100 | 0 | 0 | 0 |
| BRACE2009255 | 0 | 0 | 0 | 16.858 | 0 | 23.932 | 0 |
| BRACE2009270 | 0 | 0 | 0 | 100 | 0 | 0 | 0 |
| BRACE2009272 | 0 | 0 | 0 | 100 | 0 | 0 | 0 |
| BRACE2009274 | 0 | 0 | 0 | 100 | 0 | 0 | 0 |
| BRACE2009275 | 0 | 0 | 0 | 100 | 0 | 0 | 0 |
| BRACE2009291 | 0 | 0 | 0 | 1.878 | 0 | 0 | 0 |
| BRACE2009293 | 0 | 0 | 0 | 100 | 0 | 0 | 0 |
| BRACE2009307 | 0 | 0 | 0 | 21.024 | 0 | 0 | 0 |
| BRACE2009311 | 0 | 0 | 0 | 41.329 | 0 | 58.671 | 0 |
| BRACE2009318 | 0 | 0 | 0 | 100 | 0 | 0 | 0 |
| BRACE2009323 | 0 | 0 | 0 | 100 | 0 | 0 | 0 |
| BRACE2009366 | 0 | 0 | 0 | 2.564 | 0 | 0 | 0 |
| BRACE2009421 | 0 | 0 | 0 | 100 | 0 | 0 | 0 |
| BRACE2009428 | 0 | 0 | 0 | 100 | 0 | 0 | 0 |
| BRACE2009434 | 0 | 0 | 0 | 100 | 0 | 0 | 0 |
| BRACE2009437 | 0 | 0 | 0 | 100 | 0 | 0 | 0 |
| BRACE2009483 | 0 | 61.671 | 0 | 12.473 | 0 | 0 | 0 |
| BRACE2009517 | 0 | 0 | 0 | 3.850 | 0 | 2.733 | 0 |
| BRACE2009533 | 0 | 0 | 0 | 100 | 0 | 0 | 0 |
| BRACE2009558 | 0 | 0 | 0 | 4.082 | 0 | 2.897 | 0 |
| BRACE2009566 | 0 | 0 | 0 | 13.461 | 0 | 0 | 0 |
| BRACE2009591 | 0 | 0 | 0 | 100 | 0 | 0 | 0 |
| BRACE2009620 | 0 | 0 | 0 | 13.619 | 0 | 0 | 0 |
| BRACE2009654 | 0 | 0 | 0 | 100 | 0 | 0 | 0 |
| BRACE2009721 | 0 | 0 | 0 | 17.003 | 0 | 0 | 0 |
| BRACE2009732 | 0 | 0 | 0 | 100 | 0 | 0 | 0 |
| BRACE2009754 | 0 | 0 | 0 | 100 | 0 | 0 | 0 |
| BRACE2009828 | 0 | 0 | 0 | 26.047 | 0 | 73.953 | 0 |
| BRACE2009886 | 0 | 0 | 0 | 100 | 0 | 0 | 0 |
| BRACE2009907 | 0 | 0 | 0 | 100 | 0 | 0 | 0 |
| BRACE2009957 | 0 | 0 | 0 | 27.755 | 0 | 0 | 0 |
| BRACE2010170 | 0 | 0 | 0 | 100 | 0 | 0 | 0 |
| BRACE2010171 | 0 | 0 | 0 | 100 | 0 | 0 | 0 |
| BRACE2010203 | 0 | 0 | 0 | 100 | 0 | 0 | 0 |
| BRACE2010208 | 0 | 0 | 0 | 100 | 0 | 0 | 0 |
| BRACE2010336 | 0 | 0 | 0 | 9.658 | 0 | 0 | 0 |
| BRACE2010348 | 0 | 0 | 0 | 100 | 0 | 0 | 0 |
| BRACE2010440 | 0 | 0 | 0 | 100 | 0 | 0 | 0 |
| BRACE2010444 | 0 | 0 | 0 | 100 | 0 | 0 | 0 |
| BRACE2010477 | 0 | 0 | 0 | 100 | 0 | 0 | 0 |
| BRACE2010489 | 0 | 0 | 0 | 15.026 | 0 | 10.665 | 0 |
| BRACE2010535 | 0 | 0 | 0 | 100 | 0 | 0 | 0 |
| BRACE2010550 | 0 | 0 | 0 | 100 | 0 | 0 | 0 |
| BRACE2010598 | 0 | 0 | 0 | 100 | 0 | 0 | 0 |
| BRACE2010632 | 0 | 0 | 0 | 100 | 0 | 0 | 0 |
| BRACE2010642 | 0 | 0 | 0 | 10.913 | 0 | 0 | 0 |
| BRACE2010651 | 0 | 0 | 0 | 13.116 | 0 | 0 | 0 |
| BRACE2010669 | 0 | 0 | 0 | 9.049 | 0 | 0 | 0 |
| BRACE2010684 | 0 | 0 | 0 | 38.787 | 0 | 0 | 0 |
| BRACE2010753 | 0 | 0 | 0 | 13.239 | 0 | 0 | 0 |
| BRACE2010813 | 0 | 0 | 0 | 100 | 0 | 0 | 0 |
| BRACE2010828 | 0 | 0 | 0 | 27.755 | 0 | 0 | 0 |
| BRACE2010837 | 0 | 0 | 0 | 100 | 0 | 0 | 0 |
| BRACE2010888 | 0 | 0 | 0 | 100 | 0 | 0 | 0 |
| BRACE2010937 | 0 | 0 | 0 | 100 | 0 | 0 | 0 |
| BRACE2010983 | 0 | 0 | 0 | 100 | 0 | 0 | 0 |
| BRACE2011007 | 0 | 0 | 0 | 100 | 0 | 0 | 0 |
| BRACE2011025 | 0 | 0 | 0 | 100 | 0 | 0 | 0 |
| BRACE2011183 | 0 | 0 | 0 | 22.812 | 0 | 6.477 | 0 |
| BRACE2011199 | 0 | 0 | 0 | 100 | 0 | 0 | 0 |
| BRACE2011265 | 0 | 0 | 0 | 2.633 | 0 | 0 | 0 |
| BRACE2011389 | 0 | 0 | 0 | 100 | 0 | 0 | 0 |
| BRACE2011478 | 0 | 0 | 0 | 100 | 0 | 0 | 0 |
| BRACE2011545 | 0 | 0 | 0 | 100 | 0 | 0 | 0 |
| BRACE2011592 | 0 | 0 | 0 | 100 | 0 | 0 | 0 |
| BRACE2011611 | 0 | 0 | 0 | 100 | 0 | 0 | 0 |
| BRACE2011646 | 0 | 0 | 0 | 100 | 0 | 0 | 0 |
| BRACE2011677 | 0 | 0 | 0 | 100 | 0 | 0 | 0 |
| BRACE2011703 | 0 | 0 | 0 | 28.977 | 0 | 0 | 0 |
| BRACE2011747 | 0 | 0 | 0 | 100 | 0 | 0 | 0 |
| BRACE2011838 | 0 | 0 | 0 | 100 | 0 | 0 | 0 |
| BRACE2011892 | 0 | 0 | 0 | 100 | 0 | 0 | 0 |
| BRACE2011904 | 0 | 0 | 0 | 100 | 0 | 0 | 0 |
| BRACE2011947 | 0 | 0 | 0 | 100 | 0 | 0 | 0 |
| BRACE2012061 | 0 | 0 | 0 | 11.958 | 0 | 0 | 0 |
| BRACE2012062 | 0 | 0 | 0 | 100 | 0 | 0 | 0 |
| BRACE2012185 | 0 | 0 | 0 | 100 | 0 | 0 | 0 |
| BRACE2012222 | 0 | 0 | 0 | 60.579 | 0 | 0 | 0 |
| BRACE2012232 | 0 | 0 | 0 | 41.329 | 0 | 58.671 | 0 |
| BRACE2012291 | 0 | 0 | 0 | 27.755 | 0 | 0 | 0 |
| BRACE2012317 | 0 | 0 | 0 | 13.150 | 0 | 13.828 | 0 |
| BRACE2012510 | 0 | 0 | 0 | 100 | 0 | 0 | 0 |
| BRACE2012528 | 0 | 0 | 0 | 15.820 | 1.714 | 10.512 | 0 |
| BRACE2012625 | 0 | 0 | 0 | 100 | 0 | 0 | 0 |
| BRACE2012653 | 0 | 0 | 0 | 41.329 | 0 | 58.671 | 0 |
| BRACE2012814 | 0 | 0 | 0 | 8.707 | 0 | 1.545 | 0 |
| BRACE2012833 | 0 | 0 | 0 | 100 | 0 | 0 | 0 |
| BRACE2012838 | 0 | 0 | 0 | 100 | 0 | 0 | 0 |
| BRACE2012936 | 0 | 0 | 0 | 100 | 0 | 0 | 0 |
| BRACE2012947 | 0 | 0 | 0 | 100 | 0 | 0 | 0 |
| BRACE2013009 | 0 | 0 | 0 | 100 | 0 | 0 | 0 |
| BRACE2013010 | 0 | 0 | 0 | 100 | 0 | 0 | 0 |
| BRACE2013126 | 0 | 0 | 0 | 100 | 0 | 0 | 0 |
| BRACE2013132 | 0 | 0 | 0 | 100 | 0 | 0 | 0 |
| BRACE2013149 | 0 | 0 | 0 | 100 | 0 | 0 | 0 |
| BRACE2013369 | 0 | 0 | 0 | 22.162 | 0 | 0 | 0 |
| BRACE2013806 | 0 | 0 | 0 | 100 | 0 | 0 | 0 |
| BRACE2013855 | 0 | 0 | 0 | 11.386 | 0 | 0 | 0 |
| BRACE2013911 | 0 | 0 | 0 | 5.335 | 0 | 7.574 | 0 |
| BRACE2014108 | 0 | 0 | 0 | 100 | 0 | 0 | 0 |
| BRACE2014161 | 0 | 0 | 0 | 100 | 0 | 0 | 0 |
| BRACE2014232 | 0 | 0 | 0 | 100 | 0 | 0 | 0 |
| BRACE2014257 | 0 | 0 | 0 | 44.008 | 0 | 0 | 0 |
| BRACE2014268 | 0 | 0 | 0 | 100 | 0 | 0 | 0 |
| BRACE2014306 | 0 | 0 | 0 | 6.909 | 0 | 0 | 0 |
| BRACE2014475 | 0 | 0 | 0 | 100 | 0 | 0 | 0 |
| BRACE2014657 | 0 | 0 | 0 | 76.765 | 0 | 7.784 | 0 |
| BRACE2014746 | 0 | 0 | 0 | 9.906 | 25.214 | 7.031 | 0 |
| BRACE2014780 | 0 | 0 | 0 | 100 | 0 | 0 | 0 |
| BRACE2014818 | 0 | 0 | 0 | 28.977 | 0 | 0 | 0 |
| BRACE2014821 | 0 | 0 | 0 | 100 | 0 | 0 | 0 |
| BRACE2014824 | 0 | 0 | 0 | 100 | 0 | 0 | 0 |
| BRACE2014850 | 0 | 52.642 | 0 | 15.970 | 0 | 0 | 0 |
| BRACE2014854 | 0 | 0 | 0 | 100 | 0 | 0 | 0 |
| BRACE2015031 | 0 | 0 | 0 | 100 | 0 | 0 | 0 |
| BRACE2015058 | 0 | 0 | 0 | 6.224 | 0 | 8.836 | 0 |
| BRACE2015132 | 0 | 0 | 0 | 11.694 | 0 | 0 | 0 |
| BRACE2015262 | 0 | 0 | 0 | 100 | 0 | 0 | 0 |
| BRACE2015270 | 0 | 0 | 0 | 100 | 0 | 0 | 0 |
| BRACE2015287 | 0 | 0 | 0 | 1.630 | 0 | 0 | 0 |
| BRACE2015314 | 0 | 0 | 0 | 100 | 0 | 0 | 0 |
| BRACE2015352 | 0 | 0 | 0 | 100 | 0 | 0 | 0 |
| BRACE2015368 | 0 | 0 | 0 | 41.512 | 0 | 0 | 0 |
| BRACE2015412 | 0 | 0 | 0 | 17.282 | 0 | 0 | 0 |
| BRACE2015436 | 0 | 0 | 0 | 100 | 0 | 0 | 0 |
| BRACE2015741 | 0 | 0 | 0 | 100 | 0 | 0 | 0 |
| BRACE2015756 | 0 | 0 | 0 | 100 | 0 | 0 | 0 |
| BRACE2015969 | 0 | 0 | 0 | 28.977 | 0 | 0 | 0 |
| BRACE2015995 | 0 | 0 | 0 | 100 | 0 | 0 | 0 |
| BRACE2016058 | 0 | 0 | 0 | 100 | 0 | 0 | 0 |
| BRACE2016194 | 0 | 0 | 0 | 23.627 | 0 | 0 | 0 |
| BRACE2016315 | 0 | 0 | 0 | 100 | 0 | 0 | 0 |
| BRACE2016325 | 0 | 0 | 0 | 100 | 0 | 0 | 0 |
| BRACE2016335 | 0 | 0 | 0 | 9.897 | 0 | 0 | 0 |
| BRACE2016362 | 0 | 0 | 0 | 32.824 | 0 | 15.533 | 0 |
| BRACE2016366 | 0 | 0 | 0 | 12.062 | 30.702 | 0 | 0 |
| BRACE2016465 | 0 | 0 | 0 | 100 | 0 | 0 | 0 |
| BRACE2016516 | 0 | 0 | 0 | 100 | 0 | 0 | 0 |
| BRACE2016583 | 0 | 0 | 0 | 100 | 0 | 0 | 0 |
| BRACE2016708 | 0 | 0 | 0 | 100 | 0 | 0 | 0 |
| BRACE2016821 | 0 | 0 | 0 | 100 | 0 | 0 | 0 |
| BRACE2016896 | 0 | 0 | 0 | 100 | 0 | 0 | 0 |
| BRACE2016981 | 0 | 0 | 0 | 16.089 | 0 | 0 | 0 |
| BRACE2017108 | 0 | 0 | 0 | 100 | 0 | 0 | 0 |
| BRACE2017124 | 0 | 0 | 0 | 100 | 0 | 0 | 0 |
| BRACE2017298 | 0 | 0 | 0 | 100 | 0 | 0 | 0 |
| BRACE2017359 | 0 | 0 | 0 | 58.183 | 0 | 0 | 0 |
| BRACE2017397 | 0 | 0 | 0 | 3.348 | 0 | 2.376 | 0 |
| BRACE2017410 | 0 | 0 | 0 | 100 | 0 | 0 | 0 |
| BRACE2017438 | 0 | 0 | 0 | 58.486 | 0 | 41.514 | 0 |
| BRACE2017574 | 0 | 0 | 0 | 7.273 | 0 | 0 | 0 |
| BRACE2017580 | 0 | 0 | 0 | 100 | 0 | 0 | 0 |
| BRACE2017587 | 0 | 0 | 0 | 100 | 0 | 0 | 0 |
| BRACE2017720 | 0 | 0 | 0 | 100 | 0 | 0 | 0 |
| BRACE2017844 | 0 | 0 | 0 | 29.179 | 0 | 15.534 | 0 |
| BRACE2017872 | 0 | 0 | 0 | 100 | 0 | 0 | 0 |
| BRACE2017929 | 0 | 0 | 0 | 100 | 0 | 0 | 0 |
| BRACE2017934 | 0 | 0 | 0 | 13.120 | 0 | 0 | 0 |
| BRACE2017985 | 0 | 0 | 0 | 38.787 | 0 | 0 | 0 |
| BRACE2017992 | 0 | 0 | 0 | 100 | 0 | 0 | 0 |
| BRACE2018337 | 0 | 0 | 0 | 1.691 | 0 | 0 | 0 |
| BRACE2018443 | 0 | 0 | 0 | 45.981 | 0 | 0 | 0 |
| BRACE2018448 | 0 | 0 | 0 | 100 | 0 | 0 | 0 |
| BRACE2018568 | 0 | 0 | 0 | 100 | 0 | 0 | 0 |
| BRACE2018700 | 0 | 0 | 0 | 100 | 0 | 0 | 0 |
| BRACE2018727 | 0 | 0 | 0 | 100 | 0 | 0 | 0 |
| BRACE2018736 | 0 | 0 | 0 | 28.707 | 0 | 0 | 0 |
| BRACE2018759 | 0 | 0 | 0 | 100 | 0 | 0 | 0 |
| BRACE2018762 | 0 | 0 | 0 | 41.027 | 0 | 0 | 0 |
| BRACE2018782 | 0 | 0 | 0 | 100 | 0 | 0 | 0 |
| BRACE2018847 | 0 | 0 | 0 | 13.846 | 0 | 0 | 0 |
| BRACE2019004 | 0 | 0 | 0 | 39.025 | 0 | 0 | 0 |
| BRACE2019044 | 0 | 0 | 0 | 100 | 0 | 0 | 0 |
| BRACE2019147 | 0 | 0 | 0 | 1.520 | 0 | 0 | 0 |
| BRACE2019244 | 0 | 0 | 0 | 28.977 | 0 | 0 | 0 |
| BRACE2019258 | 0 | 0 | 0 | 100 | 0 | 0 | 0 |
| BRACE2019327 | 0 | 0 | 0 | 6.360 | 0 | 0 | 0 |
| BRACE2019348 | 0 | 0 | 0 | 74.228 | 0 | 0 | 0 |
| BRACE2019371 | 0 | 0 | 0 | 21.225 | 0 | 0 | 0 |
| BRACE2019467 | 0 | 0 | 0 | 100 | 0 | 0 | 0 |
| BRACE2019510 | 0 | 0 | 0 | 100 | 0 | 0 | 0 |
| BRACE2019519 | 0 | 0 | 0 | 13.211 | 0 | 0 | 0 |
| BRACE2019528 | 0 | 0 | 0 | 100 | 0 | 0 | 0 |
| BRACE2019618 | 0 | 0 | 0 | 100 | 0 | 0 | 0 |
| BRACE2019696 | 0 | 0 | 0 | 100 | 0 | 0 | 0 |
| BRACE2019703 | 0 | 0 | 0 | 100 | 0 | 0 | 0 |
| BRACE2019843 | 0 | 0 | 0 | 100 | 0 | 0 | 0 |
| BRACE2019865 | 0 | 0 | 0 | 100 | 0 | 0 | 0 |
| BRACE2019872 | 0 | 0 | 0 | 100 | 0 | 0 | 0 |
| BRACE2019877 | 0 | 0 | 0 | 8.622 | 0 | 6.120 | 0 |
| BRACE2020028 | 0 | 0 | 0 | 100 | 0 | 0 | 0 |
| BRACE2020077 | 0 | 0 | 0 | 100 | 0 | 0 | 0 |
| BRACE2020097 | 0 | 0 | 0 | 100 | 0 | 0 | 0 |
| BRACE2020157 | 0 | 0 | 0 | 100 | 0 | 0 | 0 |
| BRACE2020278 | 0 | 0 | 0 | 100 | 0 | 0 | 0 |
| BRACE2020358 | 0 | 0 | 0 | 100 | 0 | 0 | 0 |
| BRACE2020467 | 0 | 0 | 0 | 100 | 0 | 0 | 0 |
| BRACE2020584 | 0 | 0 | 0 | 37.308 | 0 | 0 | 0 |
| BRACE2020652 | 0 | 0 | 0 | 100 | 0 | 0 | 0 |
| BRACE2020709 | 0 | 0 | 0 | 100 | 0 | 0 | 0 |
| BRACE2020742 | 0 | 0 | 0 | 100 | 0 | 0 | 0 |
| BRACE2020756 | 0 | 0 | 0 | 100 | 0 | 0 | 0 |
| BRACE2020863 | 0 | 0 | 0 | 100 | 0 | 0 | 0 |
| BRACE2020982 | 0 | 0 | 0 | 100 | 0 | 0 | 0 |
| BRACE2021014 | 0 | 0 | 0 | 4.205 | 0 | 0 | 0 |
| BRACE2021143 | 0 | 0 | 0 | 11.233 | 0 | 0 | 0 |
| BRACE2021148 | 0 | 0 | 0 | 100 | 0 | 0 | 0 |
| BRACE2021245 | 0 | 0 | 0 | 100 | 0 | 0 | 0 |
| BRACE2021254 | 0 | 0 | 0 | 100 | 0 | 0 | 0 |
| BRACE2021264 | 0 | 0 | 0 | 100 | 0 | 0 | 0 |
| BRACE2021344 | 0 | 0 | 0 | 22.162 | 0 | 0 | 0 |
| BRACE2021433 | 0 | 0 | 0 | 100 | 0 | 0 | 0 |
| BRACE2021478 | 0 | 0 | 0 | 9.188 | 0 | 0 | 0 |
| BRACE2021541 | 0 | 0 | 0 | 11.299 | 0 | 32.080 | 0 |
| BRACE2021670 | 0 | 0 | 0 | 100 | 0 | 0 | 0 |
| BRACE2021695 | 0 | 0 | 0 | 100 | 0 | 0 | 0 |
| BRACE2021708 | 0 | 0 | 0 | 21.015 | 0 | 0 | 0 |
| BRACE2021721 | 0 | 0 | 0 | 100 | 0 | 0 | 0 |
| BRACE2021932 | 0 | 0 | 0 | 41.027 | 0 | 0 | 0 |
| BRACE2021936 | 0 | 0 | 0 | 100 | 0 | 0 | 0 |
| BRACE2022030 | 0 | 0 | 0 | 100 | 0 | 0 | 0 |
| BRACE2022158 | 0 | 0 | 0 | 100 | 0 | 0 | 0 |
| BRACE2022196 | 0 | 0 | 0 | 100 | 0 | 0 | 0 |
| BRACE2022270 | 0 | 0 | 0 | 100 | 0 | 0 | 0 |
| BRACE2022328 | 0 | 0 | 0 | 100 | 0 | 0 | 0 |
| BRACE2022333 | 0 | 0 | 0 | 12.602 | 0 | 0 | 0 |
| BRACE2022389 | 0 | 0 | 0 | 7.542 | 0 | 0 | 0 |
| BRACE2022394 | 0 | 0 | 0 | 100 | 0 | 0 | 0 |
| BRACE2022435 | 0 | 0 | 0 | 100 | 0 | 0 | 0 |
| BRACE2022448 | 0 | 0 | 0 | 100 | 0 | 0 | 0 |
| BRACE2022450 | 0 | 0 | 0 | 100 | 0 | 0 | 0 |
| BRACE2022549 | 0 | 0 | 0 | 36.360 | 0 | 0 | 0 |
| BRACE2022633 | 0 | 0 | 0 | 100 | 0 | 0 | 0 |
| BRACE2022638 | 23.363 | 0 | 0 | 4.761 | 0 | 0.751 | 0 |
| BRACE2022693 | 0 | 0 | 0 | 100 | 0 | 0 | 0 |
| BRACE2022848 | 0 | 0 | 0 | 100 | 0 | 0 | 0 |
| BRACE2022928 | 0 | 0 | 0 | 100 | 0 | 0 | 0 |
| BRACE2022990 | 0 | 0 | 0 | 41.329 | 0 | 58.671 | 0 |
| BRACE2023069 | 0 | 0 | 0 | 100 | 0 | 0 | 0 |
| BRACE2023070 | 0 | 0 | 0 | 100 | 0 | 0 | 0 |
| BRACE2023223 | 0 | 0 | 0 | 25.927 | 0 | 36.806 | 0 |
| BRACE2023268 | 0 | 0 | 0 | 100 | 0 | 0 | 0 |
| BRACE2023284 | 0 | 0 | 0 | 100 | 0 | 0 | 0 |
| BRACE2023404 | 0 | 0 | 0 | 100 | 0 | 0 | 0 |
| BRACE2023451 | 0 | 0 | 0 | 100 | 0 | 0 | 0 |
| BRACE2023540 | 0 | 0 | 0 | 100 | 0 | 0 | 0 |
| BRACE2023633 | 0 | 0 | 0 | 100 | 0 | 0 | 0 |
| BRACE2023718 | 0 | 0 | 0 | 11.391 | 0 | 0 | 0 |
| BRACE2023727 | 0 | 0 | 0 | 14.013 | 0 | 0 | 0 |
| BRACE2023744 | 0 | 0 | 0 | 100 | 0 | 0 | 0 |
| BRACE2023800 | 0 | 0 | 0 | 100 | 0 | 0 | 0 |
| BRACE2023801 | 0 | 0 | 0 | 26.645 | 0 | 0 | 0 |
| BRACE2024074 | 0 | 0 | 0 | 45.981 | 0 | 0 | 0 |
| BRACE2024222 | 0 | 0 | 0 | 100 | 0 | 0 | 0 |
| BRACE2024610 | 0 | 0 | 0 | 100 | 0 | 0 | 0 |
| BRACE2024627 | 0 | 0 | 0 | 8.689 | 0 | 0 | 0 |
| BRACE2024781 | 0 | 0 | 0 | 41.512 | 0 | 0 | 0 |
| BRACE2024826 | 0 | 0 | 0 | 100 | 0 | 0 | 0 |
| BRACE2025018 | 0 | 0 | 0 | 100 | 0 | 0 | 0 |
| BRACE2025316 | 0 | 0 | 0 | 100 | 0 | 0 | 0 |
| BRACE2025333 | 0 | 0 | 0 | 100 | 0 | 0 | 0 |
| BRACE2025437 | 0 | 0 | 0 | 2.167 | 0 | 0 | 0 |
| BRACE2025452 | 0 | 0 | 0 | 100 | 0 | 0 | 0 |
| BRACE2025492 | 0 | 0 | 0 | 18.680 | 0 | 0 | 0 |
| BRACE2025710 | 0 | 0 | 0 | 100 | 0 | 0 | 0 |
| BRACE2025796 | 0 | 0 | 0 | 22.162 | 0 | 0 | 0 |
| BRACE2025992 | 0 | 0 | 0 | 100 | 0 | 0 | 0 |
| BRACE2026054 | 0 | 0 | 0 | 16.225 | 0 | 0 | 0 |
| BRACE2026131 | 0 | 0 | 0 | 52.057 | 0 | 0 | 0 |
| BRACE2026141 | 0 | 0 | 0 | 27.755 | 0 | 0 | 0 |
| BRACE2026142 | 0 | 0 | 0 | 16.015 | 0 | 0 | 0 |
| BRACE2026293 | 0 | 0 | 0 | 100 | 0 | 0 | 0 |
| BRACE2026294 | 0 | 0 | 0 | 100 | 0 | 0 | 0 |
| BRACE2026404 | 0 | 0 | 0 | 100 | 0 | 0 | 0 |
| BRACE2026675 | 0 | 0 | 0 | 100 | 0 | 0 | 0 |
| BRACE2026725 | 0 | 0 | 0 | 13.014 | 0 | 0 | 0 |
| BRACE2026836 | 0 | 0 | 0 | 4.898 | 0 | 0 | 0 |
| BRACE2026920 | 0 | 0 | 0 | 100 | 0 | 0 | 0 |
| BRACE2026971 | 0 | 0 | 0 | 100 | 0 | 0 | 0 |
| BRACE2027018 | 0 | 0 | 0 | 16.691 | 0 | 0 | 0 |
| BRACE2027221 | 0 | 0 | 0 | 100 | 0 | 0 | 0 |
| BRACE2027258 | 0 | 0 | 0 | 23.981 | 0 | 34.044 | 0 |
| BRACE2027312 | 0 | 0 | 0 | 100 | 0 | 0 | 0 |
| BRACE2027382 | 0 | 0 | 0 | 100 | 0 | 0 | 0 |
| BRACE2027389 | 0 | 0 | 0 | 100 | 0 | 0 | 0 |
| BRACE2027408 | 0 | 0 | 0 | 100 | 0 | 0 | 0 |
| BRACE2027643 | 0 | 0 | 0 | 10.223 | 0 | 0 | 0 |
| BRACE2027767 | 0 | 0 | 0 | 41.512 | 0 | 0 | 0 |
| BRACE2027770 | 0 | 0 | 0 | 100 | 0 | 0 | 0 |
| BRACE2027879 | 0 | 0 | 0 | 100 | 0 | 0 | 0 |
| BRACE2027896 | 0 | 0 | 0 | 18.152 | 0 | 25.769 | 0 |
| BRACE2027970 | 0 | 0 | 0 | 45.981 | 0 | 0 | 0 |
| BRACE2028171 | 0 | 0 | 0 | 10.913 | 0 | 0 | 0 |
| BRACE2028392 | 0 | 0 | 0 | 7.236 | 0 | 0 | 0 |
| BRACE2028410 | 0 | 0 | 0 | 100 | 0 | 0 | 0 |
| BRACE2028636 | 0 | 0 | 0 | 37.993 | 48.354 | 0 | 0 |
| BRACE2028741 | 0 | 0 | 0 | 100 | 0 | 0 | 0 |
| BRACE2028956 | 0 | 0 | 0 | 100 | 0 | 0 | 0 |
| BRACE2028970 | 0 | 0 | 0 | 100 | 0 | 0 | 0 |
| BRACE2029112 | 0 | 0 | 0 | 100 | 0 | 0 | 0 |
| BRACE2029356 | 0 | 0 | 0 | 45.981 | 0 | 0 | 0 |
| BRACE2029396 | 0 | 0 | 0 | 100 | 0 | 0 | 0 |
| BRACE2029581 | 0 | 0 | 0 | 100 | 0 | 0 | 0 |
| BRACE2029644 | 0 | 0 | 0 | 45.981 | 0 | 0 | 0 |
| BRACE2029849 | 0 | 0 | 0 | 100 | 0 | 0 | 0 |
| BRACE2030039 | 0 | 0 | 0 | 100 | 0 | 0 | 0 |
| BRACE2030096 | 0 | 0 | 0 | 100 | 0 | 0 | 0 |
| BRACE2030323 | 0 | 0 | 0 | 33.350 | 0 | 31.563 | 0 |
| BRACE2030326 | 0 | 0 | 0 | 100 | 0 | 0 | 0 |
| BRACE2030341 | 0 | 0 | 0 | 4.909 | 0 | 6.969 | 0 |
| BRACE2030345 | 0 | 0 | 0 | 45.981 | 0 | 0 | 0 |
| BRACE2030736 | 0 | 0 | 0 | 100 | 0 | 0 | 0 |
| BRACE2030883 | 0 | 0 | 0 | 100 | 0 | 0 | 0 |
| BRACE2030884 | 0 | 0 | 0 | 100 | 0 | 0 | 0 |
| BRACE2031154 | 0 | 0 | 0 | 39.025 | 0 | 0 | 0 |
| BRACE2031232 | 0 | 0 | 0 | 100 | 0 | 0 | 0 |
| BRACE2031527 | 0 | 0 | 0 | 100 | 0 | 0 | 0 |
| BRACE2031531 | 0 | 0 | 0 | 100 | 0 | 0 | 0 |
| BRACE2031553 | 0 | 0 | 0 | 100 | 0 | 0 | 0 |
| BRACE2031899 | 0 | 0 | 0 | 100 | 0 | 0 | 0 |
| BRACE2032044 | 0 | 0 | 0 | 100 | 0 | 0 | 0 |
| BRACE2032090 | 0 | 0 | 0 | 100 | 0 | 0 | 0 |
| BRACE2032134 | 0 | 0 | 0 | 100 | 0 | 0 | 0 |
| BRACE2032148 | 0 | 0 | 0 | 100 | 0 | 0 | 0 |
| BRACE2032182 | 0 | 0 | 0 | 100 | 0 | 0 | 0 |
| BRACE2032329 | 0 | 0 | 0 | 100 | 0 | 0 | 0 |
| BRACE2032385 | 0 | 0 | 0 | 100 | 0 | 0 | 0 |
| BRACE2032436 | 0 | 0 | 0 | 100 | 0 | 0 | 0 |
| BRACE2032477 | 0 | 0 | 0 | 7.910 | 0 | 0 | 0 |
| BRACE2032502 | 0 | 0 | 0 | 39.025 | 0 | 0 | 0 |
| BRACE2032538 | 0 | 0 | 0 | 100 | 0 | 0 | 0 |
| BRACE2032584 | 0 | 0 | 0 | 100 | 0 | 0 | 0 |
| BRACE2032823 | 0 | 0 | 0 | 100 | 0 | 0 | 0 |
| BRACE2033128 | 0 | 0 | 0 | 100 | 0 | 0 | 0 |
| BRACE2033394 | 0 | 0 | 0 | 100 | 0 | 0 | 0 |
| BRACE2033478 | 0 | 0 | 0 | 100 | 0 | 0 | 0 |
| BRACE2033720 | 0 | 0 | 0 | 100 | 0 | 0 | 0 |
| BRACE2033786 | 0 | 0 | 0 | 100 | 0 | 0 | 0 |
| BRACE2034434 | 0 | 0 | 0 | 100 | 0 | 0 | 0 |
| BRACE2034523 | 0 | 0 | 0 | 100 | 0 | 0 | 0 |
| BRACE2034616 | 0 | 0 | 0 | 100 | 0 | 0 | 0 |
| BRACE2034622 | 0 | 0 | 0 | 100 | 0 | 0 | 0 |
| BRACE2034870 | 0 | 0 | 0 | 100 | 0 | 0 | 0 |
| BRACE2035003 | 0 | 0 | 0 | 100 | 0 | 0 | 0 |
| BRACE2035120 | 0 | 0 | 0 | 100 | 0 | 0 | 0 |
| BRACE2035124 | 0 | 0 | 0 | 100 | 0 | 0 | 0 |
| BRACE2035191 | 0 | 0 | 0 | 100 | 0 | 0 | 0 |
| BRACE2035278 | 0 | 0 | 0 | 53.329 | 0 | 0 | 0 |
| BRACE2035381 | 0 | 0 | 0 | 36.117 | 0 | 10.254 | 0 |
| BRACE2035441 | 0 | 0 | 0 | 100 | 0 | 0 | 0 |
| BRACE2035485 | 0 | 0 | 0 | 100 | 0 | 0 | 0 |
| BRACE2036005 | 0 | 0 | 0 | 100 | 0 | 0 | 0 |
| BRACE2036096 | 0 | 0 | 0 | 100 | 0 | 0 | 0 |
| BRACE2036743 | 0 | 0 | 0 | 100 | 0 | 0 | 0 |
| BRACE2036830 | 0 | 0 | 0 | 100 | 0 | 0 | 0 |
| BRACE2036834 | 0 | 0 | 0 | 100 | 0 | 0 | 0 |
| BRACE2036900 | 0 | 0 | 0 | 100 | 0 | 0 | 0 |
| BRACE2037132 | 0 | 0 | 0 | 41.512 | 0 | 0 | 0 |
| BRACE2037294 | 0 | 0 | 0 | 100 | 0 | 0 | 0 |
| BRACE2037295 | 0 | 0 | 0 | 2.328 | 0 | 0 | 0 |
| BRACE2037299 | 0 | 0 | 0 | 100 | 0 | 0 | 0 |
| BRACE2037310 | 0 | 0 | 0 | 27.851 | 0 | 0 | 0 |
| BRACE2037431 | 0 | 0 | 0 | 100 | 0 | 0 | 0 |
| BRACE2037692 | 0 | 0 | 0 | 100 | 0 | 0 | 0 |
| BRACE2037847 | 0 | 0 | 0 | 100 | 0 | 0 | 0 |
| BRACE2038114 | 0 | 0 | 0 | 100 | 0 | 0 | 0 |
| BRACE2038269 | 0 | 0 | 0 | 52.057 | 0 | 0 | 0 |
| BRACE2038271 | 0 | 0 | 0 | 100 | 0 | 0 | 0 |
| BRACE2038329 | 0 | 0 | 0 | 100 | 0 | 0 | 0 |
| BRACE2038492 | 0 | 0 | 0 | 100 | 0 | 0 | 0 |
| BRACE2038551 | 0 | 0 | 0 | 100 | 0 | 0 | 0 |
| BRACE2038618 | 0 | 0 | 0 | 100 | 0 | 0 | 0 |
| BRACE2039009 | 0 | 0 | 0 | 100 | 0 | 0 | 0 |
| BRACE2039128 | 0 | 0 | 0 | 100 | 0 | 0 | 0 |
| BRACE2039170 | 0 | 0 | 0 | 100 | 0 | 0 | 0 |
| BRACE2039249 | 0 | 0 | 0 | 100 | 0 | 0 | 0 |
| BRACE2039286 | 0 | 0 | 0 | 100 | 0 | 0 | 0 |
| BRACE2039297 | 0 | 0 | 0 | 100 | 0 | 0 | 0 |
| BRACE2039327 | 0 | 0 | 0 | 100 | 0 | 0 | 0 |
| BRACE2039362 | 0 | 0 | 0 | 100 | 0 | 0 | 0 |
| BRACE2039475 | 0 | 0 | 0 | 100 | 0 | 0 | 0 |
| BRACE2039600 | 0 | 0 | 0 | 100 | 0 | 0 | 0 |
| BRACE2039607 | 0 | 0 | 0 | 100 | 0 | 0 | 0 |
| BRACE2039624 | 0 | 0 | 0 | 0.687 | 0 | 1.950 | 0 |
| BRACE2039734 | 0 | 0 | 0 | 100 | 0 | 0 | 0 |
| BRACE2039823 | 0 | 0 | 0 | 41.329 | 0 | 58.671 | 0 |
| BRACE2039832 | 0 | 0 | 0 | 100 | 0 | 0 | 0 |
| BRACE2039893 | 0 | 0 | 0 | 100 | 0 | 0 | 0 |
| BRACE2039986 | 0 | 0 | 81.787 | 7.527 | 0 | 10.686 | 0 |
| BRACE2040138 | 0 | 0 | 0 | 100 | 0 | 0 | 0 |
| BRACE2040325 | 0 | 0 | 0 | 100 | 0 | 0 | 0 |
| BRACE2040514 | 0 | 0 | 0 | 100 | 0 | 0 | 0 |
| BRACE2040640 | 0 | 0 | 0 | 100 | 0 | 0 | 0 |
| BRACE2040987 | 0 | 0 | 0 | 100 | 0 | 0 | 0 |
| BRACE2041009 | 0 | 0 | 0 | 100 | 0 | 0 | 0 |
| BRACE2041095 | 0 | 0 | 0 | 100 | 0 | 0 | 0 |
| BRACE2041200 | 0 | 0 | 0 | 38.787 | 0 | 0 | 0 |
| BRACE2041264 | 0 | 0 | 0 | 100 | 0 | 0 | 0 |
| BRACE2041890 | 0 | 0 | 0 | 100 | 0 | 0 | 0 |
| BRACE2041898 | 0 | 0 | 0 | 100 | 0 | 0 | 0 |
| BRACE2042394 | 0 | 0 | 0 | 100 | 0 | 0 | 0 |
| BRACE2042398 | 0 | 0 | 0 | 100 | 0 | 0 | 0 |
| BRACE2042550 | 0 | 0 | 0 | 100 | 0 | 0 | 0 |
| BRACE2042620 | 0 | 0 | 0 | 100 | 0 | 0 | 0 |
| BRACE2042628 | 0 | 0 | 0 | 100 | 0 | 0 | 0 |
| BRACE2042873 | 0 | 0 | 0 | 100 | 0 | 0 | 0 |
| BRACE2043036 | 0 | 0 | 0 | 100 | 0 | 0 | 0 |
| BRACE2043105 | 0 | 0 | 0 | 100 | 0 | 0 | 0 |
| BRACE2043142 | 0 | 0 | 0 | 52.057 | 0 | 0 | 0 |
| BRACE2043248 | 0 | 0 | 0 | 100 | 0 | 0 | 0 |
| BRACE2043349 | 0 | 0 | 0 | 100 | 0 | 0 | 0 |
| BRACE2043381 | 0 | 0 | 0 | 7.639 | 0 | 0 | 0 |
| BRACE2043774 | 0 | 0 | 0 | 100 | 0 | 0 | 0 |
| BRACE2043942 | 0 | 0 | 0 | 100 | 0 | 0 | 0 |
| BRACE2044057 | 0 | 0 | 0 | 100 | 0 | 0 | 0 |
| BRACE2044105 | 0 | 0 | 0 | 14.283 | 0 | 0 | 0 |
| BRACE2044263 | 0 | 0 | 0 | 100 | 0 | 0 | 0 |
| BRACE2044286 | 0 | 0 | 0 | 26.499 | 0 | 0 | 0 |
| BRACE2044304 | 0 | 0 | 0 | 100 | 0 | 0 | 0 |
| BRACE2044473 | 0 | 0 | 0 | 100 | 0 | 0 | 0 |
| BRACE2044510 | 0 | 0 | 0 | 100 | 0 | 0 | 0 |
| BRACE2044640 | 0 | 0 | 0 | 100 | 0 | 0 | 0 |
| BRACE2044816 | 0 | 0 | 0 | 100 | 0 | 0 | 0 |
| BRACE2044946 | 0 | 0 | 0 | 100 | 0 | 0 | 0 |
| BRACE2044949 | 0 | 0 | 0 | 2.766 | 0 | 0 | 0 |
| BRACE2045300 | 0 | 0 | 0 | 100 | 0 | 0 | 0 |
| BRACE2045428 | 0 | 0 | 0 | 100 | 0 | 0 | 0 |
| BRACE2045445 | 0 | 0 | 0 | 37.308 | 0 | 0 | 0 |
| BRACE2045596 | 0 | 0 | 0 | 100 | 0 | 0 | 0 |
| BRACE2045772 | 0 | 0 | 0 | 2.055 | 0 | 0 | 0 |
| BRACE2045947 | 0 | 0 | 0 | 100 | 0 | 0 | 0 |
| BRACE2045954 | 0 | 0 | 0 | 38.766 | 0 | 0 | 0 |
| BRACE2046251 | 0 | 0 | 0 | 100 | 0 | 0 | 0 |
| BRACE2046295 | 0 | 0 | 0 | 100 | 0 | 0 | 0 |
| BRACE2046976 | 0 | 0 | 0 | 100 | 0 | 0 | 0 |
| BRACE2047011 | 0 | 0 | 0 | 100 | 0 | 0 | 0 |
| BRACE2047232 | 0 | 0 | 0 | 100 | 0 | 0 | 0 |
| BRACE2047350 | 0 | 0 | 0 | 45.981 | 0 | 0 | 0 |
| BRACE2047377 | 0 | 0 | 0 | 100 | 0 | 0 | 0 |
| BRACE2047385 | 0 | 0 | 0 | 100 | 0 | 0 | 0 |
| BRACE2047492 | 0 | 0 | 0 | 41.329 | 0 | 58.671 | 0 |
| BRACE2047558 | 0 | 0 | 0 | 100 | 0 | 0 | 0 |
| BRACE2047573 | 0 | 0 | 0 | 100 | 0 | 0 | 0 |
| BRACE2047835 | 0 | 0 | 0 | 100 | 0 | 0 | 0 |
| BRACE2047893 | 0 | 0 | 0 | 100 | 0 | 0 | 0 |
| BRACE2047975 | 0 | 0 | 0 | 100 | 0 | 0 | 0 |
| BRACE3000071 | 0 | 0 | 0 | 9.532 | 0 | 0 | 0 |
| BRACE3000404 | 0 | 0 | 0 | 100 | 0 | 0 | 0 |
| BRACE3000520 | 0 | 0 | 0 | 100 | 0 | 0 | 0 |
| BRACE3000697 | 0 | 0 | 0 | 100 | 0 | 0 | 0 |
| BRACE3000840 | 0 | 0 | 0 | 100 | 0 | 0 | 0 |
| BRACE3000973 | 0 | 0 | 0 | 28.699 | 0 | 13.581 | 0 |
| BRACE3001002 | 0 | 0 | 0 | 100 | 0 | 0 | 0 |
| BRACE3001058 | 0 | 0 | 0 | 100 | 0 | 0 | 0 |
| BRACE3001066 | 0 | 0 | 0 | 27.592 | 0 | 0 | 0 |
| BRACE3001113 | 0 | 0 | 0 | 18.680 | 0 | 0 | 0 |
| BRACE3001217 | 0 | 0 | 0 | 100 | 0 | 0 | 0 |
| BRACE3001299 | 0 | 0 | 0 | 100 | 0 | 0 | 0 |
| BRACE3001384 | 0 | 0 | 0 | 100 | 0 | 0 | 0 |
| BRACE3001391 | 0 | 0 | 0 | 100 | 0 | 0 | 0 |
| BRACE3001403 | 0 | 0 | 0 | 100 | 0 | 0 | 0 |
| BRACE3001595 | 0 | 0 | 0 | 100 | 0 | 0 | 0 |
| BRACE3001754 | 0 | 0 | 0 | 38.787 | 0 | 0 | 0 |
| BRACE3001948 | 0 | 0 | 0 | 100 | 0 | 0 | 0 |
| BRACE3001973 | 0 | 0 | 0 | 36.360 | 0 | 0 | 0 |
| BRACE3002184 | 0 | 0 | 0 | 19.020 | 0 | 0 | 0 |
| BRACE3002298 | 0 | 0 | 0 | 100 | 0 | 0 | 0 |
| BRACE3002344 | 0 | 0 | 0 | 100 | 0 | 0 | 0 |
| BRACE3002390 | 0 | 0 | 0 | 100 | 0 | 0 | 0 |
| BRACE3002420 | 0 | 0 | 0 | 100 | 0 | 0 | 0 |
| BRACE3002508 | 0 | 0 | 0 | 100 | 0 | 0 | 0 |
| BRACE3002541 | 0 | 0 | 0 | 100 | 0 | 0 | 0 |
| BRACE3002756 | 0 | 0 | 0 | 100 | 0 | 0 | 0 |
| BRACE3003004 | 0 | 0 | 0 | 100 | 0 | 0 | 0 |
| BRACE3003026 | 0 | 0 | 0 | 11.590 | 0 | 0 | 0 |
| BRACE3003053 | 0 | 0 | 0 | 36.360 | 0 | 0 | 0 |
| BRACE3003192 | 0 | 0 | 0 | 41.512 | 0 | 0 | 0 |
| BRACE3003413 | 0 | 0 | 0 | 45.981 | 0 | 0 | 0 |
| BRACE3003595 | 0 | 0 | 0 | 100 | 0 | 0 | 0 |
| BRACE3003698 | 0 | 0 | 0 | 45.981 | 0 | 0 | 0 |
| BRACE3003866 | 0 | 0 | 0 | 100 | 0 | 0 | 0 |
| BRACE3003920 | 0 | 0 | 0 | 100 | 0 | 0 | 0 |
| BRACE3004046 | 0 | 0 | 0 | 41.027 | 0 | 0 | 0 |
| BRACE3004058 | 0 | 0 | 0 | 100 | 0 | 0 | 0 |
| BRACE3004113 | 0 | 0 | 0 | 100 | 0 | 0 | 0 |
| BRACE3004150 | 0 | 0 | 0 | 2.757 | 0 | 0 | 0 |
| BRACE3004205 | 0 | 0 | 0 | 68.470 | 0 | 0 | 0 |
| BRACE3004358 | 0 | 0 | 0 | 100 | 0 | 0 | 0 |
| BRACE3004371 | 0 | 0 | 0 | 10.666 | 0 | 7.571 | 0 |
| BRACE3004435 | 0 | 0 | 0 | 100 | 0 | 0 | 0 |
| BRACE3004477 | 0 | 0 | 0 | 100 | 0 | 0 | 0 |
| BRACE3004767 | 0 | 0 | 0 | 41.512 | 0 | 0 | 0 |
| BRACE3004772 | 0 | 0 | 0 | 100 | 0 | 0 | 0 |
| BRACE3004783 | 0 | 0 | 0 | 100 | 0 | 0 | 0 |
| BRACE3004843 | 0 | 0 | 0 | 22.581 | 0 | 0 | 0 |
| BRACE3004862 | 0 | 0 | 0 | 38.787 | 0 | 0 | 0 |
| BRACE3004880 | 0 | 0 | 0 | 100 | 0 | 0 | 0 |
| BRACE3004887 | 0 | 0 | 0 | 100 | 0 | 0 | 0 |
| BRACE3004981 | 0 | 0 | 0 | 100 | 0 | 0 | 0 |
| BRACE3004996 | 0 | 0 | 0 | 100 | 0 | 0 | 0 |
| BRACE3004998 | 0 | 0 | 0 | 100 | 0 | 0 | 0 |
| BRACE3005103 | 0 | 0 | 0 | 100 | 0 | 0 | 0 |
| BRACE3005127 | 0 | 0 | 0 | 100 | 0 | 0 | 0 |
| BRACE3005145 | 0 | 0 | 0 | 100 | 0 | 0 | 0 |
| BRACE3005217 | 0 | 0 | 0 | 100 | 0 | 0 | 0 |
| BRACE3005225 | 0 | 0 | 0 | 100 | 0 | 0 | 0 |
| BRACE3005430 | 0 | 0 | 0 | 100 | 0 | 0 | 0 |
| BRACE3005499 | 0 | 0 | 0 | 22.199 | 0 | 0 | 0 |
| BRACE3005760 | 0 | 0 | 0 | 31.973 | 0 | 0 | 0 |
| BRACE3005870 | 0 | 0 | 0 | 100 | 0 | 0 | 0 |
| BRACE3005903 | 0 | 0 | 0 | 100 | 0 | 0 | 0 |
| BRACE3005938 | 0 | 0 | 0 | 3.908 | 0 | 1.110 | 0 |
| BRACE3005989 | 0 | 0 | 0 | 0.498 | 8.447 | 0 | 88.305 |
| BRACE3006113 | 0 | 0 | 0 | 100 | 0 | 0 | 0 |
| BRACE3006185 | 0 | 0 | 0 | 100 | 0 | 0 | 0 |
| BRACE3006226 | 0 | 0 | 0 | 100 | 0 | 0 | 0 |
| BRACE3006462 | 0 | 0 | 0 | 100 | 0 | 0 | 0 |
| BRACE3006463 | 0 | 0 | 0 | 100 | 0 | 0 | 0 |
| BRACE3006553 | 0 | 0 | 0 | 18.271 | 0 | 0 | 0 |
| BRACE3006872 | 0 | 0 | 0 | 100 | 0 | 0 | 0 |
| BRACE3006917 | 0 | 0 | 0 | 100 | 0 | 0 | 0 |
| BRACE3007058 | 0 | 0 | 0 | 52.057 | 0 | 0 | 0 |
| BRACE3007084 | 0 | 0 | 0 | 100 | 0 | 0 | 0 |
| BRACE3007085 | 0 | 0 | 0 | 100 | 0 | 0 | 0 |
| BRACE3007258 | 0 | 0 | 0 | 18.473 | 0 | 0 | 0 |
| BRACE3007322 | 0 | 0 | 0 | 100 | 0 | 0 | 0 |
| BRACE3007472 | 0 | 0 | 0 | 100 | 0 | 0 | 0 |
| BRACE3007480 | 0 | 0 | 0 | 13.820 | 0 | 6.540 | 0 |
| BRACE3007559 | 0 | 0 | 0 | 100 | 0 | 0 | 0 |
| BRACE3007625 | 0 | 0 | 0 | 100 | 0 | 0 | 0 |
| BRACE3007642 | 0 | 0 | 0 | 100 | 0 | 0 | 0 |
| BRACE3007649 | 0 | 0 | 0 | 100 | 0 | 0 | 0 |
| BRACE3007767 | 0 | 0 | 0 | 100 | 0 | 0 | 0 |
| BRACE3007869 | 0 | 0 | 0 | 100 | 0 | 0 | 0 |
| BRACE3008036 | 0 | 0 | 0 | 13.098 | 0 | 18.594 | 0 |
| BRACE3008066 | 0 | 0 | 0 | 100 | 0 | 0 | 0 |
| BRACE3008092 | 0 | 0 | 0 | 100 | 0 | 0 | 0 |
| BRACE3008095 | 0 | 0 | 0 | 45.981 | 0 | 0 | 0 |
| BRACE3008137 | 0 | 0 | 0 | 100 | 0 | 0 | 0 |
| BRACE3008255 | 0 | 0 | 0 | 100 | 0 | 0 | 0 |
| BRACE3008337 | 0 | 0 | 0 | 100 | 0 | 0 | 0 |
| BRACE3008384 | 0 | 0 | 0 | 56.141 | 0 | 0 | 0 |
| BRACE3008720 | 0 | 0 | 0 | 100 | 0 | 0 | 0 |
| BRACE3008772 | 0 | 0 | 0 | 37.308 | 0 | 0 | 0 |
| BRACE3009044 | 0 | 0 | 0 | 100 | 0 | 0 | 0 |
| BRACE3009075 | 0 | 0 | 0 | 100 | 0 | 0 | 0 |
| BRACE3009090 | 0 | 0 | 0 | 100 | 0 | 0 | 0 |
| BRACE3009127 | 0 | 0 | 0 | 100 | 0 | 0 | 0 |
| BRACE3009197 | 0 | 0 | 0 | 100 | 0 | 0 | 0 |
| BRACE3009237 | 0 | 0 | 0 | 12.875 | 0 | 0 | 0 |
| BRACE3009265 | 0 | 0 | 0 | 100 | 0 | 0 | 0 |
| BRACE3009297 | 0 | 0 | 0 | 100 | 0 | 0 | 0 |
| BRACE3009377 | 0 | 0 | 0 | 100 | 0 | 0 | 0 |
| BRACE3009392 | 0 | 0 | 0 | 100 | 0 | 0 | 0 |
| BRACE3009416 | 0 | 0 | 0 | 20.257 | 0 | 0 | 0 |
| BRACE3009539 | 0 | 0 | 0 | 100 | 0 | 0 | 0 |
| BRACE3009574 | 0 | 0 | 0 | 100 | 0 | 0 | 0 |
| BRACE3009701 | 0 | 0 | 0 | 100 | 0 | 0 | 0 |
| BRACE3009708 | 0 | 0 | 0 | 100 | 0 | 0 | 0 |
| BRACE3009724 | 0 | 0 | 0 | 41.512 | 0 | 0 | 0 |
| BRACE3009993 | 0 | 0 | 0 | 100 | 0 | 0 | 0 |
| BRACE3010076 | 0 | 0 | 0 | 100 | 0 | 0 | 0 |
| BRACE3010079 | 0 | 0 | 0 | 100 | 0 | 0 | 0 |
| BRACE3010086 | 0 | 0 | 0 | 100 | 0 | 0 | 0 |
| BRACE3010221 | 0 | 0 | 0 | 100 | 0 | 0 | 0 |
| BRACE3010283 | 0 | 0 | 0 | 38.787 | 0 | 0 | 0 |
| BRACE3010315 | 0 | 0 | 0 | 100 | 0 | 0 | 0 |
| BRACE3010397 | 0 | 0 | 0 | 24.243 | 0 | 0 | 0 |
| BRACE3010416 | 0 | 0 | 0 | 100 | 0 | 0 | 0 |
| BRACE3010428 | 0 | 0 | 0 | 3.250 | 0 | 3.460 | 0 |
| BRACE3010435 | 0 | 0 | 0 | 100 | 0 | 0 | 0 |
| BRACE3010438 | 0 | 0 | 0 | 5.084 | 0 | 1.804 | 0 |
| BRACE3010702 | 0 | 0 | 0 | 100 | 0 | 0 | 0 |
| BRACE3010862 | 0 | 0 | 0 | 100 | 0 | 0 | 0 |
| BRACE3011271 | 0 | 0 | 0 | 39.165 | 0 | 11.120 | 0 |
| BRACE3011421 | 0 | 0 | 0 | 40.103 | 0 | 0 | 0 |
| BRACE3011447 | 0 | 0 | 0 | 100 | 0 | 0 | 0 |
| BRACE3011505 | 0 | 0 | 0 | 100 | 0 | 0 | 0 |
| BRACE3011634 | 0 | 0 | 0 | 100 | 0 | 0 | 0 |
| BRACE3011774 | 0 | 0 | 0 | 100 | 0 | 0 | 0 |
| BRACE3012357 | 0 | 0 | 0 | 100 | 0 | 0 | 0 |
| BRACE3012574 | 0 | 0 | 0 | 100 | 0 | 0 | 0 |
| BRACE3012806 | 0 | 0 | 0 | 45.981 | 0 | 0 | 0 |
| BRACE3012930 | 0 | 0 | 0 | 38.787 | 0 | 0 | 0 |
| BRACE3013119 | 0 | 0 | 0 | 100 | 0 | 0 | 0 |
| BRACE3013418 | 0 | 0 | 0 | 100 | 0 | 0 | 0 |
| BRACE3013576 | 0 | 0 | 0 | 100 | 0 | 0 | 0 |
| BRACE3013740 | 0 | 0 | 0 | 100 | 0 | 0 | 0 |
| BRACE3013780 | 0 | 0 | 0 | 3.404 | 0 | 4.833 | 0 |
| BRACE3013874 | 0 | 0 | 0 | 100 | 0 | 0 | 0 |
| BRACE3013936 | 0 | 0 | 0 | 43.251 | 0 | 0 | 0 |
| BRACE3013986 | 0 | 0 | 0 | 100 | 0 | 0 | 0 |
| BRACE3014005 | 0 | 0 | 0 | 100 | 0 | 0 | 0 |
| BRACE3014068 | 0 | 0 | 0 | 100 | 0 | 0 | 0 |
| BRACE3014231 | 0 | 0 | 0 | 100 | 0 | 0 | 0 |
| BRACE3014290 | 0 | 0 | 0 | 100 | 0 | 0 | 0 |
| BRACE3014317 | 0 | 0 | 0 | 100 | 0 | 0 | 0 |
| BRACE3014523 | 0 | 0 | 0 | 100 | 0 | 0 | 0 |
| BRACE3014714 | 0 | 0 | 0 | 100 | 0 | 0 | 0 |
| BRACE3014807 | 0 | 0 | 0 | 100 | 0 | 0 | 0 |
| BRACE3014942 | 0 | 0 | 0 | 100 | 0 | 0 | 0 |
| BRACE3015090 | 0 | 0 | 0 | 100 | 0 | 0 | 0 |
| BRACE3015121 | 0 | 0 | 0 | 100 | 0 | 0 | 0 |
| BRACE3015262 | 0 | 0 | 0 | 100 | 0 | 0 | 0 |
| BRACE3015521 | 0 | 0 | 0 | 100 | 0 | 0 | 0 |
| BRACE3015808 | 0 | 0 | 0 | 100 | 0 | 0 | 0 |
| BRACE3015829 | 0 | 0 | 0 | 100 | 0 | 0 | 0 |
| BRACE3015894 | 0 | 0 | 0 | 100 | 0 | 0 | 0 |
| BRACE3015898 | 0 | 0 | 0 | 100 | 0 | 0 | 0 |
| BRACE3016020 | 0 | 0 | 0 | 100 | 0 | 0 | 0 |
| BRACE3016122 | 0 | 0 | 0 | 41.512 | 0 | 0 | 0 |
| BRACE3016167 | 0 | 0 | 0 | 100 | 0 | 0 | 0 |
| BRACE3016170 | 0 | 0 | 0 | 100 | 0 | 0 | 0 |
| BRACE3016580 | 0 | 0 | 0 | 100 | 0 | 0 | 0 |
| BRACE3016788 | 0 | 0 | 0 | 100 | 0 | 0 | 0 |
| BRACE3016810 | 0 | 0 | 0 | 100 | 0 | 0 | 0 |
| BRACE3016862 | 0 | 0 | 0 | 100 | 0 | 0 | 0 |
| BRACE3016884 | 0 | 0 | 0 | 9.165 | 0 | 0 | 0 |
| BRACE3017083 | 0 | 0 | 0 | 100 | 0 | 0 | 0 |
| BRACE3017253 | 0 | 0 | 0 | 55.894 | 0 | 0 | 0 |
| BRACE3018083 | 0 | 0 | 0 | 100 | 0 | 0 | 0 |
| BRACE3018308 | 0 | 0 | 0 | 100 | 0 | 0 | 0 |
| BRACE3018963 | 0 | 0 | 0 | 41.027 | 0 | 0 | 0 |
| BRACE3019055 | 0 | 0 | 0 | 100 | 0 | 0 | 0 |
| BRACE3019071 | 0 | 0 | 0 | 40.231 | 0 | 0 | 0 |
| BRACE3019084 | 0 | 0 | 0 | 100 | 0 | 0 | 0 |
| BRACE3019570 | 0 | 0 | 0 | 100 | 0 | 0 | 0 |
| BRACE3019611 | 0 | 0 | 0 | 100 | 0 | 0 | 0 |
| BRACE3019817 | 0 | 0 | 0 | 100 | 0 | 0 | 0 |
| BRACE3019828 | 0 | 0 | 0 | 100 | 0 | 0 | 0 |
| BRACE3019941 | 0 | 0 | 0 | 2.074 | 0 | 0 | 0 |
| BRACE3020151 | 0 | 0 | 0 | 100 | 0 | 0 | 0 |
| BRACE3020194 | 0 | 0 | 0 | 100 | 0 | 0 | 0 |
| BRACE3020286 | 0 | 0 | 0 | 100 | 0 | 0 | 0 |
| BRACE3020356 | 0 | 0 | 0 | 100 | 0 | 0 | 0 |
| BRACE3020594 | 0 | 0 | 0 | 100 | 0 | 0 | 0 |
| BRACE3020669 | 0 | 0 | 0 | 38.787 | 0 | 0 | 0 |
| BRACE3020671 | 0 | 0 | 0 | 100 | 0 | 0 | 0 |
| BRACE3020890 | 0 | 0 | 0 | 100 | 0 | 0 | 0 |
| BRACE3021148 | 0 | 0 | 0 | 100 | 0 | 0 | 0 |
| BRACE3021430 | 0 | 83.734 | 0 | 8.467 | 0 | 0 | 0 |
| BRACE3021517 | 0 | 0 | 0 | 100 | 0 | 0 | 0 |
| BRACE3021805 | 0 | 0 | 0 | 100 | 0 | 0 | 0 |
| BRACE3022051 | 0 | 0 | 0 | 100 | 0 | 0 | 0 |
| BRACE3022303 | 0 | 0 | 0 | 100 | 0 | 0 | 0 |
| BRACE3022312 | 0 | 0 | 0 | 24.151 | 0 | 0 | 0 |
| BRACE3022340 | 0 | 0 | 0 | 41.512 | 0 | 0 | 0 |
| BRACE3022847 | 0 | 0 | 0 | 100 | 0 | 0 | 0 |
| BRACE3023604 | 0 | 0 | 0 | 100 | 0 | 0 | 0 |
| BRACE3023912 | 0 | 0 | 0 | 100 | 0 | 0 | 0 |
| BRACE3024073 | 0 | 0 | 0 | 100 | 0 | 0 | 0 |
| BRACE3024359 | 0 | 0 | 0 | 100 | 0 | 0 | 0 |
| BRACE3024379 | 0 | 0 | 0 | 100 | 0 | 0 | 0 |
| BRACE3024444 | 0 | 0 | 0 | 100 | 0 | 0 | 0 |
| BRACE3024497 | 0 | 0 | 0 | 100 | 0 | 0 | 0 |
| BRACE3024537 | 0 | 0 | 0 | 100 | 0 | 0 | 0 |
| BRACE3024659 | 0 | 0 | 0 | 100 | 0 | 0 | 0 |
| BRACE3024662 | 0 | 0 | 0 | 100 | 0 | 0 | 0 |
| BRACE3024879 | 0 | 0 | 0 | 100 | 0 | 0 | 0 |
| BRACE3025153 | 0 | 0 | 0 | 100 | 0 | 0 | 0 |
| BRACE3025302 | 0 | 0 | 0 | 100 | 0 | 0 | 0 |
| BRACE3025457 | 0 | 0 | 0 | 100 | 0 | 0 | 0 |
| BRACE3025531 | 0 | 0 | 0 | 100 | 0 | 0 | 0 |
| BRACE3025627 | 0 | 0 | 0 | 100 | 0 | 0 | 0 |
| BRACE3025630 | 0 | 0 | 0 | 100 | 0 | 0 | 0 |
| BRACE3025719 | 0 | 0 | 0 | 12.784 | 0 | 0 | 0 |
| BRACE3026008 | 0 | 0 | 0 | 100 | 0 | 0 | 0 |
| BRACE3026075 | 0 | 0 | 0 | 100 | 0 | 0 | 0 |
| BRACE3026161 | 0 | 0 | 0 | 100 | 0 | 0 | 0 |
| BRACE3026290 | 0 | 0 | 0 | 100 | 0 | 0 | 0 |
| BRACE3026345 | 0 | 0 | 0 | 100 | 0 | 0 | 0 |
| BRACE3026456 | 0 | 0 | 0 | 100 | 0 | 0 | 0 |
| BRACE3026735 | 0 | 0 | 0 | 51.471 | 0 | 24.356 | 0 |
| BRACE3026802 | 0 | 0 | 0 | 36.390 | 0 | 0 | 0 |
| BRACE3026844 | 0 | 0 | 0 | 100 | 0 | 0 | 0 |
| BRACE3026947 | 0 | 0 | 0 | 100 | 0 | 0 | 0 |
| BRACE3026993 | 0 | 0 | 0 | 100 | 0 | 0 | 0 |
| BRACE3027242 | 0 | 0 | 0 | 100 | 0 | 0 | 0 |
| BRACE3027256 | 0 | 0 | 0 | 100 | 0 | 0 | 0 |
| BRACE3027326 | 0 | 0 | 0 | 100 | 0 | 0 | 0 |
| BRACE3027478 | 0 | 0 | 0 | 11.360 | 0 | 16.126 | 0 |
| BRACE3027480 | 0 | 0 | 0 | 100 | 0 | 0 | 0 |
| BRACE3027931 | 0 | 0 | 0 | 23.879 | 0 | 0 | 0 |
| BRACE3027976 | 0 | 0 | 0 | 45.981 | 0 | 0 | 0 |
| BRACE3028214 | 0 | 0 | 0 | 100 | 0 | 0 | 0 |
| BRACE3028241 | 0 | 0 | 0 | 100 | 0 | 0 | 0 |
| BRACE3028360 | 0 | 0 | 0 | 100 | 0 | 0 | 0 |
| BRACE3028895 | 0 | 0 | 0 | 32.302 | 0 | 0 | 0 |
| BRACE3028998 | 0 | 0 | 0 | 100 | 0 | 0 | 0 |
| BRACE3029005 | 0 | 0 | 0 | 100 | 0 | 0 | 0 |
| BRACE3029021 | 0 | 0 | 0 | 25.807 | 0 | 0 | 0 |
| BRACE3029205 | 0 | 0 | 0 | 100 | 0 | 0 | 0 |
| BRACE3029447 | 0 | 0 | 0 | 100 | 0 | 0 | 0 |
| BRACE3030057 | 0 | 0 | 0 | 100 | 0 | 0 | 0 |
| BRACE3030103 | 0 | 0 | 0 | 100 | 0 | 0 | 0 |
| BRACE3030538 | 0 | 0 | 0 | 36.360 | 0 | 0 | 0 |
| BRACE3030748 | 0 | 0 | 0 | 100 | 0 | 0 | 0 |
| BRACE3030866 | 0 | 0 | 0 | 41.512 | 0 | 0 | 0 |
| BRACE3031161 | 0 | 0 | 0 | 100 | 0 | 0 | 0 |
| BRACE3031184 | 0 | 0 | 0 | 100 | 0 | 0 | 0 |
| BRACE3031185 | 0 | 0 | 0 | 41.512 | 0 | 0 | 0 |
| BRACE3031315 | 0 | 0 | 0 | 41.329 | 0 | 58.671 | 0 |
| BRACE3031372 | 0 | 0 | 0 | 100 | 0 | 0 | 0 |
| BRACE3031579 | 0 | 0 | 0 | 100 | 0 | 0 | 0 |
| BRACE3031728 | 0 | 0 | 0 | 100 | 0 | 0 | 0 |
| BRACE3031838 | 0 | 0 | 0 | 41.512 | 0 | 0 | 0 |
| BRACE3031843 | 0 | 0 | 0 | 100 | 0 | 0 | 0 |
| BRACE3032427 | 0 | 0 | 0 | 41.512 | 0 | 0 | 0 |
| BRACE3032455 | 0 | 0 | 0 | 100 | 0 | 0 | 0 |
| BRACE3032537 | 0 | 0 | 0 | 100 | 0 | 0 | 0 |
| BRACE3032538 | 0 | 0 | 0 | 100 | 0 | 0 | 0 |
| BRACE3032631 | 0 | 0 | 0 | 8.951 | 0 | 0 | 0 |
| BRACE3032771 | 0 | 0 | 0 | 100 | 0 | 0 | 0 |
| BRACE3032980 | 0 | 0 | 0 | 100 | 0 | 0 | 0 |
| BRACE3032983 | 0 | 0 | 0 | 100 | 0 | 0 | 0 |
| BRACE3033525 | 0 | 0 | 0 | 100 | 0 | 0 | 0 |
| BRACE3034159 | 0 | 0 | 0 | 100 | 0 | 0 | 0 |
| BRACE3034183 | 0 | 0 | 0 | 100 | 0 | 0 | 0 |
| BRACE3034389 | 0 | 0 | 0 | 100 | 0 | 0 | 0 |
| BRACE3034964 | 0 | 0 | 0 | 100 | 0 | 0 | 0 |
| BRACE3034993 | 0 | 0 | 0 | 100 | 0 | 0 | 0 |
| BRACE3035168 | 0 | 0 | 0 | 29.854 | 0 | 0 | 0 |
| BRACE3035227 | 0 | 0 | 0 | 100 | 0 | 0 | 0 |
| BRACE3036156 | 0 | 0 | 0 | 31.069 | 0 | 0 | 0 |
| BRACE3036271 | 0 | 0 | 0 | 100 | 0 | 0 | 0 |
| BRACE3037612 | 0 | 0 | 0 | 100 | 0 | 0 | 0 |
| BRACE3037637 | 0 | 0 | 0 | 100 | 0 | 0 | 0 |
| BRACE3037803 | 0 | 0 | 0 | 100 | 0 | 0 | 0 |
| BRACE3038012 | 0 | 0 | 0 | 100 | 0 | 0 | 0 |
| BRACE3038030 | 0 | 0 | 0 | 100 | 0 | 0 | 0 |
| BRACE3038569 | 0 | 0 | 0 | 100 | 0 | 0 | 0 |
| BRACE3038570 | 0 | 0 | 0 | 100 | 0 | 0 | 0 |
| BRACE3038687 | 0 | 0 | 0 | 100 | 0 | 0 | 0 |
| BRACE3038760 | 0 | 0 | 0 | 100 | 0 | 0 | 0 |
| BRACE3039288 | 0 | 0 | 0 | 100 | 0 | 0 | 0 |
| BRACE3039358 | 0 | 0 | 0 | 14.668 | 0 | 0 | 0 |
| BRACE3039378 | 0 | 0 | 0 | 100 | 0 | 0 | 0 |
| BRACE3039454 | 0 | 0 | 0 | 100 | 0 | 0 | 0 |
| BRACE3040012 | 0 | 0 | 0 | 100 | 0 | 0 | 0 |
| BRACE3040239 | 0 | 0 | 0 | 100 | 0 | 0 | 0 |
| BRACE3040504 | 0 | 0 | 0 | 100 | 0 | 0 | 0 |
| BRACE3040644 | 0 | 0 | 0 | 100 | 0 | 0 | 0 |
| BRACE3040856 | 0 | 0 | 0 | 100 | 0 | 0 | 0 |
| BRACE3040863 | 0 | 0 | 0 | 12.696 | 0 | 0 | 0 |
| BRACE3041059 | 0 | 0 | 0 | 100 | 0 | 0 | 0 |
| BRACE3041162 | 0 | 0 | 0 | 100 | 0 | 0 | 0 |
| BRACE3041827 | 0 | 0 | 0 | 100 | 0 | 0 | 0 |
| BRACE3042046 | 0 | 0 | 0 | 100 | 0 | 0 | 0 |
| BRACE3042210 | 0 | 0 | 0 | 100 | 0 | 0 | 0 |
| BRACE3042326 | 0 | 0 | 0 | 24.903 | 0 | 0 | 0 |
| BRACE3042409 | 0 | 0 | 0 | 100 | 0 | 0 | 0 |
| BRACE3042432 | 0 | 0 | 0 | 41.512 | 0 | 0 | 0 |
| BRACE3042594 | 0 | 0 | 0 | 100 | 0 | 0 | 0 |
| BRACE3043597 | 0 | 0 | 0 | 100 | 0 | 0 | 0 |
| BRACE3044090 | 0 | 0 | 0 | 100 | 0 | 0 | 0 |
| BRACE3044172 | 0 | 0 | 0 | 100 | 0 | 0 | 0 |
| BRACE3044247 | 0 | 0 | 0 | 100 | 0 | 0 | 0 |
| BRACE3044377 | 0 | 0 | 0 | 100 | 0 | 0 | 0 |
| BRACE3044389 | 0 | 0 | 0 | 100 | 0 | 0 | 0 |
| BRACE3044495 | 0 | 0 | 0 | 100 | 0 | 0 | 0 |
| BRACE3045011 | 0 | 0 | 0 | 100 | 0 | 0 | 0 |
| BRACE3045033 | 0 | 0 | 0 | 100 | 0 | 0 | 0 |
| BRACE3045078 | 0 | 0 | 0 | 58.183 | 0 | 0 | 0 |
| BRACE3045145 | 0 | 0 | 0 | 100 | 0 | 0 | 0 |
| BRACE3045424 | 0 | 0 | 0 | 100 | 0 | 0 | 0 |
| BRACE3045708 | 0 | 0 | 0 | 100 | 0 | 0 | 0 |
| BRACE3045981 | 0 | 0 | 0 | 56.286 | 0 | 0 | 0 |
| BRACE3046049 | 0 | 0 | 0 | 100 | 0 | 0 | 0 |
| BRACE3046152 | 0 | 0 | 0 | 100 | 0 | 0 | 0 |
| BRACE3046294 | 0 | 0 | 0 | 100 | 0 | 0 | 0 |
| BRACE3046450 | 0 | 0 | 0 | 78.016 | 0 | 0 | 0 |
| BRACE3046466 | 0 | 0 | 0 | 100 | 0 | 0 | 0 |
| BRACE3046491 | 0 | 0 | 0 | 100 | 0 | 0 | 0 |
| BRACE3046609 | 0 | 0 | 0 | 100 | 0 | 0 | 0 |
| BRACE3046762 | 0 | 0 | 0 | 100 | 0 | 0 | 0 |
| BRACE3046837 | 0 | 0 | 0 | 100 | 0 | 0 | 0 |
| BRACE3046855 | 0 | 0 | 0 | 100 | 0 | 0 | 0 |
| BRACE3046966 | 0 | 0 | 0 | 100 | 0 | 0 | 0 |
| BRACE3047018 | 0 | 0 | 0 | 100 | 0 | 0 | 0 |
| BRACE3047482 | 0 | 0 | 0 | 100 | 0 | 0 | 0 |
| BRACE3047801 | 0 | 0 | 0 | 100 | 0 | 0 | 0 |
| BRALZ1000047 | 0 | 0 | 0 | 0 | 100 | 0 | 0 |
| BRALZ1000103 | 0 | 0 | 0 | 0 | 100 | 0 | 0 |
| BRALZ2000189 | 0 | 0 | 0 | 0 | 100 | 0 | 0 |
| BRALZ2000263 | 0 | 0 | 0 | 16.418 | 83.582 | 0 | 0 |
| BRALZ2000988 | 0 | 0 | 0 | 25.787 | 18.754 | 0 | 0 |
| BRALZ2001038 | 0 | 0 | 0 | 23.070 | 58.725 | 0 | 0 |
| BRALZ2001279 | 0 | 0 | 0 | 0 | 100 | 0 | 0 |
| BRALZ2001350 | 0 | 0 | 0 | 0 | 100 | 0 | 0 |
| BRALZ2001445 | 0 | 0 | 0 | 0 | 100 | 0 | 0 |
| BRALZ2001559 | 0 | 0 | 0 | 0 | 100 | 0 | 0 |
| BRALZ2001743 | 0 | 0 | 0 | 0 | 100 | 0 | 0 |
| BRALZ2001834 | 0 | 0 | 0 | 0 | 76.517 | 0 | 0 |
| BRALZ2002174 | 0 | 0 | 0 | 0 | 100 | 0 | 0 |
| BRALZ2002418 | 0 | 0 | 0 | 0 | 78.195 | 21.805 | 0 |
| BRALZ2002477 | 0 | 0 | 0 | 0 | 100 | 0 | 0 |
| BRALZ2003119 | 0 | 0 | 0 | 0 | 100 | 0 | 0 |
| BRALZ2003330 | 0 | 0 | 0 | 0 | 100 | 0 | 0 |
| BRALZ2003453 | 0 | 0 | 0 | 0 | 100 | 0 | 0 |
| BRALZ2003525 | 0 | 0 | 0 | 0 | 100 | 0 | 0 |
| BRALZ2004397 | 0 | 0 | 0 | 0 | 100 | 0 | 0 |
| BRALZ2005467 | 0 | 0 | 0 | 0 | 100 | 0 | 0 |
| BRALZ2005471 | 0 | 0 | 0 | 0 | 100 | 0 | 0 |
| BRALZ2005888 | 0 | 0 | 0 | 0 | 100 | 0 | 0 |
| BRALZ2005950 | 0 | 0 | 0 | 0 | 100 | 0 | 0 |
| BRALZ2005992 | 0 | 0 | 0 | 0 | 100 | 0 | 0 |
| BRALZ2006288 | 0 | 0 | 0 | 0 | 39.404 | 10.988 | 0 |
| BRALZ2006474 | 0 | 0 | 0 | 0 | 100 | 0 | 0 |
| BRALZ2006560 | 0 | 0 | 0 | 0 | 100 | 0 | 0 |
| BRALZ2006734 | 0 | 0 | 0 | 0 | 100 | 0 | 0 |
| BRALZ2006800 | 0 | 0 | 0 | 0 | 100 | 0 | 0 |
| BRALZ2006976 | 0 | 0 | 0 | 0 | 100 | 0 | 0 |
| BRALZ2007376 | 0 | 0 | 0 | 0 | 100 | 0 | 0 |
| BRALZ2007545 | 0 | 0 | 0 | 0 | 100 | 0 | 0 |
| BRALZ2007576 | 0 | 0 | 0 | 0 | 100 | 0 | 0 |
| BRALZ2007661 | 0 | 0 | 0 | 0 | 100 | 0 | 0 |
| BRALZ2007790 | 0 | 0 | 0 | 0 | 100 | 0 | 0 |
| BRALZ2007793 | 0 | 0 | 0 | 0 | 100 | 0 | 0 |
| BRALZ2007952 | 0 | 0 | 0 | 0 | 100 | 0 | 0 |
| BRALZ2008031 | 0 | 0 | 0 | 0 | 100 | 0 | 0 |
| BRALZ2008166 | 0 | 0 | 0 | 0 | 66.169 | 0 | 0 |
| BRALZ2008462 | 0 | 0 | 0 | 0 | 100 | 0 | 0 |
| BRALZ2008617 | 0 | 56.870 | 0 | 5.751 | 29.277 | 0 | 0 |
| BRALZ2008696 | 0 | 0 | 0 | 0 | 78.324 | 0 | 0 |
| BRALZ2008763 | 0 | 0 | 0 | 0 | 100 | 0 | 0 |
| BRALZ2008869 | 0 | 0 | 0 | 0 | 100 | 0 | 0 |
| BRALZ2008930 | 0 | 0 | 0 | 0 | 100 | 0 | 0 |
| BRALZ2009446 | 0 | 32.727 | 0 | 0 | 16.848 | 0 | 0 |
| BRALZ2009482 | 0 | 2.608 | 0 | 0.528 | 1.343 | 1.123 | 0 |
| BRALZ2009486 | 0 | 0 | 0 | 0 | 75.903 | 0 | 0 |
| BRALZ2010186 | 0 | 0 | 0 | 0 | 100 | 0 | 0 |
| BRALZ2010842 | 0 | 0 | 0 | 0 | 100 | 0 | 0 |
| BRALZ2011337 | 0 | 0 | 0 | 0 | 100 | 0 | 0 |
| BRALZ2011796 | 0 | 0 | 0 | 3.912 | 39.830 | 0 | 0 |
| BRALZ2011880 | 0 | 21.400 | 0 | 2.164 | 22.034 | 3.072 | 0 |
| BRALZ2012050 | 0 | 0 | 0 | 0 | 100 | 0 | 0 |
| BRALZ2012183 | 0 | 0 | 0 | 0 | 100 | 0 | 0 |
| BRALZ2012848 | 0 | 0 | 0 | 0 | 100 | 0 | 0 |
| BRALZ2013621 | 0 | 0 | 0 | 0 | 100 | 0 | 0 |
| BRALZ2013690 | 0 | 0 | 0 | 0 | 100 | 0 | 0 |
| BRALZ2014054 | 0 | 0 | 0 | 0 | 38.408 | 0 | 0 |
| BRALZ2014316 | 0 | 0 | 0 | 0 | 100 | 0 | 0 |
| BRALZ2014484 | 0 | 0 | 0 | 0 | 100 | 0 | 0 |
| BRALZ2014951 | 0 | 0 | 0 | 0 | 100 | 0 | 0 |
| BRALZ2015168 | 0 | 0 | 0 | 0 | 100 | 0 | 0 |
| BRALZ2015811 | 0 | 0 | 0 | 0 | 100 | 0 | 0 |
| BRALZ2016085 | 0 | 0 | 0 | 0 | 100 | 0 | 0 |
| BRALZ2016498 | 0 | 0 | 0 | 0 | 100 | 0 | 0 |
| BRALZ2017359 | 0 | 0 | 0 | 0 | 75.184 | 0 | 0 |
| BRALZ2017531 | 0 | 0 | 0 | 0 | 100 | 0 | 0 |
| BRALZ2017607 | 0 | 0 | 0 | 0 | 100 | 0 | 0 |
| BRALZ2017620 | 0 | 0 | 0 | 0 | 100 | 0 | 0 |
| BRALZ2017844 | 0 | 0 | 0 | 0 | 49.396 | 0 | 0 |
| BRALZ2018342 | 0 | 0 | 0 | 0 | 100 | 0 | 0 |
| BRALZ2018492 | 0 | 0 | 0 | 16.418 | 83.582 | 0 | 0 |
| BRALZ2018834 | 0 | 0 | 0 | 0 | 22.547 | 6.287 | 0 |
| BRALZ2019047 | 0 | 0 | 0 | 0 | 76.517 | 0 | 0 |
| BRAMY1000095 | 0 | 0 | 0 | 0 | 0 | 100 | 0 |
| BRAMY1000098 | 0 | 0 | 0 | 0 | 0 | 100 | 0 |
| BRAMY1000130 | 0 | 0 | 0 | 0 | 0 | 12.137 | 0 |
| BRAMY1000157 | 0 | 0 | 0 | 0 | 0 | 100 | 0 |
| BRAMY1000173 | 0 | 0 | 0 | 0 | 0 | 21.311 | 0 |
| BRAMY2000021 | 0 | 0 | 0 | 0 | 0 | 100 | 0 |
| BRAMY2000025 | 0 | 0 | 0 | 0 | 0 | 47.699 | 0 |
| BRAMY2000052 | 0 | 0 | 0 | 0 | 39.130 | 21.823 | 0 |
| BRAMY2000076 | 0 | 0 | 0 | 0 | 0 | 100 | 0 |
| BRAMY2000086 | 0 | 0 | 0 | 0 | 0 | 100 | 0 |
| BRAMY2000151 | 0 | 0 | 0 | 0 | 0 | 22.213 | 0 |
| BRAMY2000181 | 0 | 0 | 0 | 0 | 0 | 35.292 | 0 |
| BRAMY2000196 | 0 | 0 | 0 | 0 | 0 | 100 | 0 |
| BRAMY2000231 | 0 | 0 | 0 | 0 | 0 | 36.677 | 0 |
| BRAMY2000277 | 0 | 0 | 0 | 0 | 0 | 100 | 0 |
| BRAMY2000354 | 0 | 0 | 0 | 1.951 | 0 | 2.769 | 0 |
| BRAMY2000388 | 0 | 0 | 0 | 8.685 | 0 | 12.329 | 0 |
| BRAMY2000411 | 0 | 0 | 0 | 4.399 | 0 | 18.735 | 0 |
| BRAMY2000508 | 0 | 0 | 0 | 0 | 0 | 35.461 | 0 |
| BRAMY2000562 | 0 | 0 | 0 | 1.364 | 6.944 | 9.681 | 0 |
| BRAMY2000585 | 0 | 0 | 0 | 0 | 0 | 2.475 | 0 |
| BRAMY2000653 | 0 | 0 | 0 | 0 | 0 | 100 | 0 |
| BRAMY2000814 | 0 | 0 | 0 | 0 | 0 | 21.396 | 0 |
| BRAMY2000893 | 0 | 10.681 | 0 | 0 | 0 | 1.533 | 0 |
| BRAMY2000946 | 0 | 0 | 0 | 0 | 0 | 100 | 0 |
| BRAMY2000981 | 0 | 0 | 0 | 0 | 0 | 100 | 0 |
| BRAMY2000987 | 0 | 0 | 0 | 24.093 | 0 | 17.102 | 0 |
| BRAMY2001068 | 0 | 0 | 0 | 0 | 0 | 100 | 0 |
| BRAMY2001114 | 0 | 0 | 0 | 0 | 0 | 100 | 0 |
| BRAMY2001203 | 0 | 0 | 0 | 0 | 0 | 100 | 0 |
| BRAMY2001282 | 0 | 0 | 0 | 0 | 0 | 100 | 0 |
| BRAMY2001367 | 0 | 0 | 0 | 0 | 0 | 100 | 0 |
| BRAMY2001427 | 0 | 0 | 0 | 0 | 0 | 100 | 0 |
| BRAMY2001473 | 0 | 0 | 0 | 0 | 0 | 100 | 0 |
| BRAMY2001678 | 0 | 0 | 0 | 0 | 0 | 37.663 | 0 |
| BRAMY2002005 | 0 | 0 | 0 | 0 | 0 | 100 | 0 |
| BRAMY2002044 | 0 | 0 | 0 | 0 | 0 | 100 | 0 |
| BRAMY2002072 | 0 | 0 | 0 | 0 | 0 | 100 | 0 |
| BRAMY2002158 | 0 | 0 | 0 | 0 | 0 | 100 | 0 |
| BRAMY2002311 | 0 | 0 | 0 | 0 | 0 | 100 | 0 |
| BRAMY2002339 | 0 | 0 | 0 | 0 | 0 | 100 | 0 |
| BRAMY2002364 | 0 | 0 | 0 | 0 | 0 | 100 | 0 |
| BRAMY2002369 | 0 | 0 | 0 | 0 | 0 | 8.220 | 0 |
| BRAMY2002479 | 0 | 0 | 0 | 0 | 0 | 21.841 | 0 |
| BRAMY2002493 | 0 | 0 | 0 | 0 | 0 | 100 | 0 |
| BRAMY2002525 | 0 | 0 | 0 | 41.329 | 0 | 58.671 | 0 |
| BRAMY2002584 | 0 | 0 | 0 | 0 | 0 | 100 | 0 |
| BRAMY2002604 | 0 | 0 | 0 | 0 | 0 | 100 | 0 |
| BRAMY2002621 | 0 | 0 | 0 | 25.113 | 0 | 35.650 | 0 |
| BRAMY2002638 | 0 | 0 | 0 | 0 | 0 | 100 | 0 |
| BRAMY2002739 | 0 | 0 | 0 | 0 | 0 | 100 | 0 |
| BRAMY2002799 | 0 | 0 | 0 | 0 | 0 | 50.189 | 0 |
| BRAMY2002853 | 0 | 0 | 0 | 0 | 0 | 100 | 0 |
| BRAMY2002862 | 0 | 0 | 0 | 0 | 0 | 100 | 0 |
| BRAMY2002956 | 0 | 0 | 0 | 0 | 0 | 100 | 0 |
| BRAMY2003008 | 0 | 0 | 0 | 0 | 0 | 26.646 | 0 |
| BRAMY2003037 | 0 | 0 | 0 | 0 | 0 | 100 | 0 |
| BRAMY2003117 | 0 | 0 | 0 | 0 | 0 | 100 | 0 |
| BRAMY2003287 | 0 | 0 | 0 | 0 | 0 | 100 | 0 |
| BRAMY2003325 | 0 | 0 | 0 | 0 | 0 | 12.511 | 0 |
| BRAMY2003529 | 0 | 0 | 0 | 0 | 0 | 100 | 0 |
| BRAMY2003538 | 0 | 0 | 0 | 26.047 | 0 | 73.953 | 0 |
| BRAMY2003585 | 0 | 0 | 0 | 0 | 0 | 100 | 0 |
| BRAMY2003634 | 0 | 0 | 0 | 0 | 0 | 100 | 0 |
| BRAMY2003653 | 0 | 0 | 0 | 0 | 0 | 100 | 0 |
| BRAMY2003681 | 0 | 0 | 0 | 0 | 0 | 100 | 0 |
| BRAMY2003893 | 0 | 0 | 0 | 0 | 0 | 100 | 0 |
| BRAMY2003897 | 0 | 0 | 0 | 0 | 0 | 100 | 0 |
| BRAMY2003898 | 0 | 0 | 0 | 0 | 0 | 100 | 0 |
| BRAMY2003904 | 0 | 0 | 0 | 0 | 0 | 100 | 0 |
| BRAMY2003926 | 0 | 0 | 0 | 0 | 0 | 100 | 0 |
| BRAMY2003929 | 0 | 0 | 0 | 0 | 0 | 21.427 | 0 |
| BRAMY2004031 | 0 | 0 | 0 | 0 | 0 | 12.812 | 0 |
| BRAMY2004058 | 0 | 0 | 0 | 0 | 0 | 100 | 0 |
| BRAMY2004183 | 0 | 0 | 0 | 0 | 0 | 100 | 0 |
| BRAMY2004335 | 0 | 0 | 0 | 0 | 0 | 100 | 0 |
| BRAMY2004351 | 0 | 0 | 0 | 0 | 0 | 100 | 0 |
| BRAMY2004352 | 0 | 0 | 0 | 0 | 0 | 100 | 0 |
| BRAMY2004363 | 0 | 0 | 0 | 1.451 | 0 | 4.120 | 0 |
| BRAMY2004387 | 0 | 0 | 0 | 0 | 0 | 30.516 | 0 |
| BRAMY2004492 | 0 | 0 | 0 | 0 | 0 | 100 | 0 |
| BRAMY2004521 | 0 | 0 | 0 | 1.682 | 0 | 7.165 | 0 |
| BRAMY2004524 | 0 | 0 | 0 | 0 | 0 | 21.841 | 0 |
| BRAMY2004537 | 0 | 0 | 0 | 0 | 0 | 100 | 0 |
| BRAMY2004542 | 0 | 0 | 0 | 0 | 0 | 100 | 0 |
| BRAMY2004756 | 0 | 0 | 0 | 0 | 0 | 100 | 0 |
| BRAMY2004771 | 0 | 0 | 0 | 0 | 0 | 100 | 0 |
| BRAMY2005052 | 0 | 0 | 0 | 8.242 | 0 | 46.801 | 0 |
| BRAMY2005064 | 0 | 0 | 0 | 0 | 0 | 100 | 0 |
| BRAMY2005094 | 0 | 0 | 0 | 0 | 0 | 100 | 0 |
| BRAMY2005151 | 0 | 0 | 0 | 0 | 0 | 100 | 0 |
| BRAMY2005182 | 0 | 0 | 0 | 0 | 0 | 100 | 0 |
| BRAMY2005244 | 0 | 0 | 0 | 0 | 0 | 100 | 0 |
| BRAMY2005391 | 0 | 0 | 0 | 0 | 0 | 100 | 0 |
| BRAMY2005488 | 0 | 0 | 0 | 8.088 | 0 | 22.964 | 0 |
| BRAMY2005576 | 0 | 0 | 0 | 0 | 0 | 21.396 | 0 |
| BRAMY2005648 | 0 | 0 | 0 | 0 | 0 | 100 | 0 |
| BRAMY2005662 | 0 | 0 | 0 | 0 | 0 | 100 | 0 |
| BRAMY2005708 | 0 | 0 | 0 | 0 | 0 | 100 | 0 |
| BRAMY2005711 | 0 | 0 | 0 | 0 | 0 | 100 | 0 |
| BRAMY2006092 | 0 | 0 | 0 | 0 | 0 | 100 | 0 |
| BRAMY2006118 | 0 | 0 | 0 | 0 | 0 | 100 | 0 |
| BRAMY2006149 | 0 | 0 | 0 | 0 | 0 | 100 | 0 |
| BRAMY2006366 | 0 | 0 | 0 | 0 | 0 | 9.282 | 0 |
| BRAMY2006375 | 0 | 0 | 0 | 16.823 | 0 | 23.883 | 0 |
| BRAMY2006397 | 0 | 0 | 0 | 0 | 0 | 2.830 | 0 |
| BRAMY2006411 | 0 | 0 | 0 | 0 | 0 | 100 | 0 |
| BRAMY2006459 | 0 | 0 | 0 | 0 | 0 | 100 | 0 |
| BRAMY2006466 | 0 | 0 | 0 | 0 | 0 | 100 | 0 |
| BRAMY2006659 | 0 | 0 | 0 | 0 | 0 | 100 | 0 |
| BRAMY2006779 | 0 | 0 | 0 | 0 | 0 | 100 | 0 |
| BRAMY2006809 | 0 | 0 | 0 | 0 | 0 | 100 | 0 |
| BRAMY2006879 | 0 | 0 | 0 | 0 | 0 | 100 | 0 |
| BRAMY2007043 | 0 | 0 | 0 | 0 | 0 | 100 | 0 |
| BRAMY2007078 | 0 | 0 | 0 | 0 | 0 | 3.832 | 0 |
| BRAMY2007110 | 0 | 0 | 0 | 0 | 0 | 100 | 0 |
| BRAMY2007185 | 0 | 0 | 0 | 0 | 0 | 100 | 0 |
| BRAMY2007244 | 0 | 0 | 0 | 8.319 | 0 | 23.618 | 0 |
| BRAMY2007249 | 0 | 0 | 0 | 0 | 0 | 100 | 0 |
| BRAMY2007255 | 0 | 0 | 0 | 0 | 0 | 59.700 | 0 |
| BRAMY2007287 | 0 | 0 | 0 | 0 | 0 | 10.796 | 0 |
| BRAMY2007308 | 0 | 0 | 0 | 0 | 0 | 100 | 0 |
| BRAMY2007411 | 0 | 0 | 0 | 0 | 0 | 100 | 0 |
| BRAMY2007458 | 0 | 0 | 0 | 0 | 0 | 100 | 0 |
| BRAMY2007486 | 0 | 0 | 0 | 0 | 0 | 100 | 0 |
| BRAMY2007546 | 0 | 0 | 0 | 0 | 0 | 100 | 0 |
| BRAMY2007567 | 0 | 0 | 0 | 16.522 | 0 | 23.456 | 0 |
| BRAMY2007594 | 0 | 0 | 0 | 0 | 0 | 31.238 | 0 |
| BRAMY2007610 | 0 | 0 | 0 | 0 | 0 | 100 | 0 |
| BRAMY2007613 | 0 | 0 | 0 | 3.803 | 4.840 | 9.448 | 0 |
| BRAMY2007653 | 0 | 0 | 0 | 0 | 0 | 100 | 0 |
| BRAMY2007753 | 0 | 0 | 0 | 0 | 0 | 100 | 0 |
| BRAMY2007859 | 0 | 0 | 0 | 0 | 0 | 100 | 0 |
| BRAMY2008333 | 0 | 0 | 0 | 0 | 0 | 100 | 0 |
| BRAMY2008382 | 0 | 0 | 0 | 0 | 0 | 15.624 | 0 |
| BRAMY2008563 | 0 | 0 | 0 | 0 | 0 | 49.688 | 0 |
| BRAMY2008583 | 0 | 0 | 0 | 0 | 0 | 100 | 0 |
| BRAMY2008977 | 0 | 0 | 0 | 0 | 0 | 5.095 | 0 |
| BRAMY2008979 | 0 | 0 | 0 | 0 | 0 | 100 | 0 |
| BRAMY2009013 | 0 | 0 | 0 | 0 | 0 | 6.137 | 0 |
| BRAMY2009023 | 0 | 0 | 0 | 0 | 0 | 13.358 | 0 |
| BRAMY2009034 | 0 | 0 | 0 | 0 | 0 | 100 | 0 |
| BRAMY2009105 | 0 | 0 | 0 | 0 | 0 | 100 | 0 |
| BRAMY2009123 | 0 | 0 | 0 | 0 | 0 | 45.794 | 0 |
| BRAMY2009192 | 0 | 0 | 0 | 0 | 0 | 100 | 0 |
| BRAMY2009344 | 0 | 0 | 0 | 0 | 0 | 100 | 0 |
| BRAMY2009349 | 0 | 0 | 0 | 0 | 0 | 100 | 0 |
| BRAMY2009394 | 0 | 0 | 0 | 0 | 0 | 100 | 0 |
| BRAMY2009489 | 0 | 0 | 0 | 25.513 | 0 | 36.219 | 0 |
| BRAMY2009508 | 0 | 0 | 0 | 31.931 | 0 | 22.665 | 0 |
| BRAMY2009528 | 0 | 0 | 0 | 0 | 0 | 100 | 0 |
| BRAMY2009557 | 0 | 0 | 0 | 0 | 0 | 49.688 | 0 |
| BRAMY2009612 | 0 | 0 | 0 | 0 | 0 | 13.638 | 0 |
| BRAMY2009693 | 0 | 0 | 0 | 0 | 0 | 100 | 0 |
| BRAMY2009934 | 0 | 0 | 0 | 0 | 0 | 5.956 | 0 |
| BRAMY2010068 | 0 | 0 | 0 | 0 | 0 | 100 | 0 |
| BRAMY2010135 | 0 | 0 | 0 | 0 | 0 | 100 | 0 |
| BRAMY2010145 | 0 | 0 | 0 | 0 | 0 | 100 | 0 |
| BRAMY2010171 | 0 | 0 | 0 | 0 | 0 | 100 | 0 |
| BRAMY2010208 | 0 | 0 | 0 | 0 | 0 | 36.630 | 0 |
| BRAMY2010239 | 0 | 0 | 0 | 0 | 0 | 100 | 0 |
| BRAMY2010272 | 0 | 0 | 0 | 0 | 0 | 50.189 | 0 |
| BRAMY2010290 | 0 | 0 | 0 | 0 | 0 | 100 | 0 |
| BRAMY2010357 | 0 | 0 | 0 | 21.196 | 0 | 30.090 | 0 |
| BRAMY2010366 | 0 | 0 | 0 | 0 | 0 | 100 | 0 |
| BRAMY2010395 | 0 | 0 | 0 | 0 | 0 | 100 | 0 |
| BRAMY2010441 | 0 | 0 | 0 | 0 | 0 | 100 | 0 |
| BRAMY2010442 | 0 | 0 | 0 | 0 | 0 | 47.605 | 0 |
| BRAMY2010464 | 0 | 0 | 0 | 15.639 | 0 | 33.302 | 0 |
| BRAMY2010581 | 0 | 0 | 0 | 0 | 0 | 100 | 0 |
| BRAMY2010798 | 0 | 0 | 0 | 0 | 0 | 100 | 0 |
| BRAMY2010808 | 0 | 0 | 0 | 0 | 0 | 100 | 0 |
| BRAMY2010919 | 0 | 0 | 0 | 0 | 0 | 100 | 0 |
| BRAMY2011064 | 0 | 0 | 0 | 0 | 0 | 100 | 0 |
| BRAMY2011105 | 0 | 0 | 0 | 0 | 0 | 3.052 | 0 |
| BRAMY2011178 | 0 | 0 | 0 | 0 | 0 | 100 | 0 |
| BRAMY2011196 | 0 | 0 | 0 | 0 | 0 | 100 | 0 |
| BRAMY2011216 | 0 | 0 | 0 | 0 | 0 | 100 | 0 |
| BRAMY2011253 | 0 | 0 | 0 | 0 | 0 | 100 | 0 |
| BRAMY2011446 | 0 | 0 | 0 | 25.113 | 0 | 35.650 | 0 |
| BRAMY2011480 | 0 | 0 | 0 | 0 | 0 | 100 | 0 |
| BRAMY2011639 | 0 | 0 | 0 | 0 | 0 | 100 | 0 |
| BRAMY2011679 | 0 | 0 | 0 | 0 | 0 | 100 | 0 |
| BRAMY2011811 | 0 | 0 | 0 | 0 | 0 | 100 | 0 |
| BRAMY2011841 | 0 | 0 | 0 | 0 | 0 | 11.118 | 0 |
| BRAMY2011846 | 0 | 0 | 0 | 0 | 0 | 100 | 0 |
| BRAMY2011849 | 0 | 0 | 0 | 0 | 0 | 49.688 | 0 |
| BRAMY2011872 | 0 | 0 | 0 | 0 | 0 | 100 | 0 |
| BRAMY2011961 | 0 | 0 | 0 | 0 | 0 | 100 | 0 |
| BRAMY2012017 | 0 | 0 | 0 | 0 | 0 | 100 | 0 |
| BRAMY2012091 | 0 | 0 | 0 | 0 | 0 | 5.983 | 0 |
| BRAMY2012119 | 0 | 0 | 0 | 0 | 0 | 100 | 0 |
| BRAMY2012162 | 0 | 0 | 0 | 0 | 0 | 100 | 0 |
| BRAMY2012163 | 0 | 0 | 0 | 0 | 0 | 7.967 | 0 |
| BRAMY2012277 | 0 | 0 | 0 | 0 | 0 | 100 | 0 |
| BRAMY2012340 | 0 | 0 | 0 | 0 | 0 | 49.688 | 0 |
| BRAMY2012426 | 0 | 0 | 47.668 | 0 | 0 | 6.228 | 0 |
| BRAMY2012497 | 0 | 0 | 0 | 0 | 0 | 100 | 0 |
| BRAMY2012517 | 0 | 0 | 0 | 0 | 0 | 100 | 0 |
| BRAMY2012536 | 0 | 0 | 0 | 0.410 | 0 | 2.326 | 0 |
| BRAMY2012555 | 0 | 0 | 0 | 0 | 0 | 100 | 0 |
| BRAMY2012568 | 0 | 0 | 0 | 0 | 0 | 100 | 0 |
| BRAMY2012581 | 0 | 0 | 0 | 0 | 0 | 46.034 | 0 |
| BRAMY2012691 | 0 | 0 | 0 | 0 | 0 | 100 | 0 |
| BRAMY2012721 | 0 | 0 | 0 | 0 | 0 | 100 | 0 |
| BRAMY2012731 | 0 | 0 | 0 | 0 | 0 | 100 | 0 |
| BRAMY2012776 | 0 | 0 | 0 | 0 | 0 | 100 | 0 |
| BRAMY2012880 | 0 | 0 | 0 | 0 | 0 | 100 | 0 |
| BRAMY2012881 | 0 | 0 | 0 | 0 | 0 | 47.605 | 0 |
| BRAMY2013169 | 0 | 0 | 0 | 8.071 | 0 | 11.457 | 0 |
| BRAMY2013200 | 0 | 0 | 0 | 0 | 0 | 100 | 0 |
| BRAMY2013216 | 0 | 0 | 0 | 0 | 0 | 100 | 0 |
| BRAMY2013405 | 0 | 0 | 0 | 0 | 0 | 100 | 0 |
| BRAMY2013414 | 0 | 0 | 0 | 0 | 0 | 100 | 0 |
| BRAMY2013572 | 0 | 0 | 0 | 0 | 0 | 100 | 0 |
| BRAMY2013590 | 0 | 0 | 0 | 0 | 0 | 43.537 | 0 |
| BRAMY2013621 | 0 | 0 | 0 | 0 | 0 | 29.482 | 0 |
| BRAMY2013659 | 0 | 0 | 0 | 0 | 0 | 29.269 | 0 |
| BRAMY2013722 | 0 | 0 | 0 | 0 | 0 | 100 | 0 |
| BRAMY2013736 | 0 | 0 | 0 | 0 | 0 | 47.605 | 0 |
| BRAMY2013756 | 0 | 0 | 0 | 0 | 0 | 19.026 | 0 |
| BRAMY2013944 | 0 | 0 | 0 | 0 | 0 | 100 | 0 |
| BRAMY2013975 | 0 | 0 | 0 | 0 | 0 | 100 | 0 |
| BRAMY2014019 | 0 | 0 | 0 | 0 | 0 | 100 | 0 |
| BRAMY2014205 | 0 | 0 | 0 | 0 | 0 | 28.873 | 0 |
| BRAMY2014387 | 0 | 0 | 0 | 0 | 0 | 100 | 0 |
| BRAMY2014462 | 0 | 0 | 0 | 0 | 0 | 49.688 | 0 |
| BRAMY2014469 | 0 | 0 | 0 | 0 | 0 | 100 | 0 |
| BRAMY2014541 | 0 | 0 | 0 | 0 | 0 | 100 | 0 |
| BRAMY2014754 | 0 | 0 | 0 | 5.965 | 5.061 | 4.234 | 0 |
| BRAMY2014813 | 0 | 0 | 0 | 0 | 0 | 19.441 | 0 |
| BRAMY2015211 | 0 | 0 | 0 | 0 | 0 | 13.088 | 0 |
| BRAMY2015251 | 0 | 0 | 0 | 0 | 0 | 15.426 | 0 |
| BRAMY2015311 | 0 | 0 | 0 | 0 | 0 | 100 | 0 |
| BRAMY2015420 | 0 | 0 | 0 | 15.046 | 0 | 21.359 | 0 |
| BRAMY2015503 | 0 | 0 | 0 | 0 | 0 | 100 | 0 |
| BRAMY2015516 | 0 | 0 | 0 | 0 | 0 | 100 | 0 |
| BRAMY2015550 | 0 | 0 | 0 | 0 | 0 | 34.151 | 0 |
| BRAMY2015551 | 0 | 0 | 0 | 0 | 0 | 100 | 0 |
| BRAMY2015559 | 0 | 0 | 0 | 0 | 0 | 100 | 0 |
| BRAMY2015688 | 0 | 0 | 0 | 0 | 0 | 100 | 0 |
| BRAMY2015705 | 0 | 0 | 0 | 0 | 0 | 29.482 | 0 |
| BRAMY2015782 | 0 | 0 | 0 | 0 | 0 | 7.891 | 0 |
| BRAMY2015833 | 0 | 0 | 0 | 9.815 | 0 | 4.645 | 0 |
| BRAMY2015855 | 0 | 0 | 0 | 41.329 | 0 | 58.671 | 0 |
| BRAMY2015890 | 0 | 0 | 0 | 0 | 0 | 100 | 0 |
| BRAMY2015911 | 0 | 0 | 0 | 0 | 0 | 15.012 | 0 |
| BRAMY2015925 | 0 | 0 | 0 | 0 | 0 | 100 | 0 |
| BRAMY2016002 | 0 | 0 | 0 | 0 | 0 | 100 | 0 |
| BRAMY2016009 | 0 | 0 | 0 | 3.712 | 0 | 10.538 | 0 |
| BRAMY2016020 | 0 | 0 | 0 | 0 | 0 | 100 | 0 |
| BRAMY2016070 | 0 | 0 | 0 | 0 | 0 | 100 | 0 |
| BRAMY2016251 | 0 | 0 | 0 | 5.104 | 25.986 | 43.477 | 0 |
| BRAMY2016325 | 0 | 0 | 0 | 0 | 0 | 3.796 | 0 |
| BRAMY2016327 | 0 | 0 | 0 | 0 | 0 | 100 | 0 |
| BRAMY2016386 | 0 | 0 | 0 | 0 | 0 | 54.718 | 0 |
| BRAMY2016706 | 0 | 0 | 0 | 0 | 0 | 4.994 | 0 |
| BRAMY2016771 | 0 | 0 | 0 | 0 | 0 | 100 | 0 |
| BRAMY2016892 | 0 | 0 | 0 | 10.306 | 0 | 14.630 | 0 |
| BRAMY2016938 | 0 | 0 | 0 | 0 | 0 | 100 | 0 |
| BRAMY2016953 | 0 | 0 | 0 | 0 | 0 | 100 | 0 |
| BRAMY2017014 | 0 | 0 | 0 | 0 | 0 | 100 | 0 |
| BRAMY2017249 | 0 | 0 | 0 | 0 | 0 | 100 | 0 |
| BRAMY2017348 | 0 | 0 | 0 | 0 | 0 | 100 | 0 |
| BRAMY2017450 | 0 | 0 | 0 | 0 | 0 | 100 | 0 |
| BRAMY2017455 | 0 | 0 | 0 | 0 | 0 | 100 | 0 |
| BRAMY2017528 | 0 | 0 | 0 | 0 | 0 | 100 | 0 |
| BRAMY2017864 | 0 | 0 | 0 | 0 | 0 | 13.922 | 0 |
| BRAMY2018027 | 0 | 0 | 0 | 0 | 0 | 100 | 0 |
| BRAMY2018106 | 0 | 0 | 0 | 0 | 0 | 100 | 0 |
| BRAMY2018122 | 0 | 0 | 0 | 0 | 0 | 12.783 | 0 |
| BRAMY2018126 | 0 | 0 | 0 | 0 | 0 | 100 | 0 |
| BRAMY2018272 | 0 | 0 | 0 | 0 | 0 | 100 | 0 |
| BRAMY2018273 | 0 | 0 | 0 | 0 | 0 | 100 | 0 |
| BRAMY2018279 | 0 | 0 | 0 | 0 | 0 | 100 | 0 |
| BRAMY2018295 | 0 | 0 | 0 | 0 | 0 | 18.088 | 0 |
| BRAMY2018308 | 0 | 0 | 0 | 0 | 0 | 100 | 0 |
| BRAMY2018396 | 0 | 0 | 0 | 0 | 0 | 100 | 0 |
| BRAMY2018467 | 0 | 0 | 0 | 0 | 0 | 100 | 0 |
| BRAMY2018635 | 0 | 0 | 0 | 0 | 0 | 27.369 | 0 |
| BRAMY2018785 | 0 | 0 | 0 | 0 | 0 | 27.408 | 0 |
| BRAMY2019055 | 0 | 0 | 0 | 0 | 0 | 100 | 0 |
| BRAMY2019111 | 0 | 0 | 0 | 0 | 0 | 30.516 | 0 |
| BRAMY2019277 | 0 | 0 | 0 | 0 | 0 | 100 | 0 |
| BRAMY2019300 | 0 | 0 | 0 | 0 | 0 | 50.189 | 0 |
| BRAMY2019468 | 0 | 0 | 0 | 13.480 | 0 | 11.482 | 0 |
| BRAMY2019509 | 0 | 0 | 0 | 0 | 0 | 100 | 0 |
| BRAMY2019554 | 0 | 0 | 0 | 1.133 | 0 | 4.020 | 0 |
| BRAMY2019600 | 0 | 0 | 0 | 0 | 0 | 8.135 | 0 |
| BRAMY2019643 | 0 | 0 | 0 | 0 | 0 | 60.652 | 0 |
| BRAMY2019710 | 0 | 0 | 0 | 0 | 0 | 47.605 | 0 |
| BRAMY2019963 | 0 | 0 | 0 | 0 | 0 | 6.861 | 0 |
| BRAMY2019985 | 0 | 0 | 0 | 0 | 0 | 100 | 0 |
| BRAMY2019989 | 0 | 0 | 0 | 12.319 | 0 | 5.829 | 0 |
| BRAMY2020050 | 0 | 0 | 0 | 0 | 0 | 100 | 0 |
| BRAMY2020058 | 0 | 0 | 0 | 19.826 | 0 | 28.146 | 0 |
| BRAMY2020106 | 0 | 0 | 0 | 0 | 0 | 11.264 | 0 |
| BRAMY2020270 | 0 | 0 | 0 | 0 | 0 | 100 | 0 |
| BRAMY2020354 | 0 | 0 | 0 | 0 | 0 | 60.652 | 0 |
| BRAMY2020355 | 0 | 0 | 0 | 0 | 0 | 100 | 0 |
| BRAMY2020412 | 0 | 0 | 0 | 0 | 0 | 10.816 | 0 |
| BRAMY2020427 | 0 | 0 | 0 | 1.261 | 2.140 | 1.790 | 0 |
| BRAMY2020445 | 0 | 0 | 0 | 0 | 0 | 100 | 0 |
| BRAMY2020466 | 0 | 0 | 0 | 0 | 0 | 100 | 0 |
| BRAMY2020520 | 0 | 0 | 0 | 0 | 0 | 100 | 0 |
| BRAMY2020574 | 0 | 0 | 0 | 0 | 0 | 100 | 0 |
| BRAMY2020634 | 0 | 0 | 0 | 0 | 0 | 100 | 0 |
| BRAMY2020713 | 0 | 0 | 0 | 18.320 | 0 | 26.008 | 0 |
| BRAMY2021040 | 0 | 0 | 0 | 0 | 0 | 100 | 0 |
| BRAMY2021063 | 0 | 0 | 0 | 0 | 0 | 100 | 0 |
| BRAMY2021098 | 0 | 0 | 0 | 0 | 0 | 100 | 0 |
| BRAMY2021139 | 0 | 0 | 0 | 0 | 0 | 25.787 | 0 |
| BRAMY2021142 | 0 | 0 | 0 | 38.011 | 0 | 26.981 | 0 |
| BRAMY2021276 | 0 | 0 | 0 | 0 | 0 | 47.605 | 0 |
| BRAMY2021310 | 0 | 0 | 0 | 0 | 0 | 12.518 | 0 |
| BRAMY2021388 | 0 | 0 | 0 | 0 | 0 | 100 | 0 |
| BRAMY2021498 | 0 | 0 | 0 | 0 | 0 | 100 | 0 |
| BRAMY2021523 | 0 | 0 | 0 | 0 | 0 | 21.367 | 0 |
| BRAMY2021710 | 0 | 52.794 | 0 | 0 | 0 | 7.579 | 0 |
| BRAMY2021732 | 0 | 0 | 0 | 0 | 0 | 100 | 0 |
| BRAMY2021746 | 0 | 0 | 0 | 0 | 0 | 100 | 0 |
| BRAMY2021825 | 0 | 0 | 0 | 0 | 0 | 66.389 | 0 |
| BRAMY2021867 | 0 | 0 | 0 | 25.113 | 0 | 35.650 | 0 |
| BRAMY2021962 | 0 | 0 | 0 | 0 | 0 | 100 | 0 |
| BRAMY2021982 | 0 | 0 | 0 | 0 | 0 | 100 | 0 |
| BRAMY2022052 | 0 | 0 | 0 | 0 | 0 | 100 | 0 |
| BRAMY2022160 | 0 | 0 | 0 | 0 | 0 | 38.082 | 0 |
| BRAMY2022168 | 0 | 0 | 0 | 0 | 0 | 13.630 | 0 |
| BRAMY2022263 | 0 | 0 | 0 | 0 | 0 | 100 | 0 |
| BRAMY2022301 | 0 | 0 | 0 | 0 | 0 | 100 | 0 |
| BRAMY2022320 | 0 | 0 | 0 | 0 | 0 | 100 | 0 |
| BRAMY2022383 | 0 | 0 | 0 | 26.047 | 0 | 73.953 | 0 |
| BRAMY2022445 | 0 | 0 | 0 | 0 | 0 | 47.355 | 0 |
| BRAMY2022454 | 0 | 0 | 0 | 0 | 0 | 100 | 0 |
| BRAMY2022493 | 0 | 0 | 0 | 1.883 | 0 | 5.346 | 0 |
| BRAMY2022525 | 0 | 0 | 0 | 15.652 | 0 | 22.220 | 0 |
| BRAMY2022532 | 0 | 0 | 0 | 0 | 0 | 100 | 0 |
| BRAMY2022723 | 0 | 0 | 0 | 25.113 | 0 | 35.650 | 0 |
| BRAMY2022786 | 0 | 0 | 0 | 0.886 | 4.509 | 13.830 | 0 |
| BRAMY2022796 | 0 | 0 | 0 | 0 | 0 | 100 | 0 |
| BRAMY2022929 | 0 | 0 | 0 | 0 | 0 | 100 | 0 |
| BRAMY2022980 | 0 | 0 | 0 | 0 | 0 | 15.383 | 0 |
| BRAMY2022984 | 0 | 0 | 0 | 0 | 0 | 100 | 0 |
| BRAMY2023060 | 0 | 0 | 0 | 0 | 0 | 100 | 0 |
| BRAMY2023110 | 0 | 0 | 0 | 0 | 0 | 100 | 0 |
| BRAMY2023115 | 0 | 0 | 0 | 0 | 0 | 49.688 | 0 |
| BRAMY2023161 | 0 | 0 | 0 | 0 | 0 | 100 | 0 |
| BRAMY2023172 | 0 | 0 | 0 | 0 | 0 | 100 | 0 |
| BRAMY2023238 | 0 | 0 | 0 | 0 | 0 | 100 | 0 |
| BRAMY2023327 | 0 | 0 | 0 | 0 | 0 | 100 | 0 |
| BRAMY2023358 | 0 | 0 | 0 | 0 | 0 | 100 | 0 |
| BRAMY2023406 | 0 | 0 | 0 | 0 | 0 | 6.652 | 0 |
| BRAMY2023482 | 0 | 0 | 0 | 0 | 0 | 100 | 0 |
| BRAMY2023514 | 0 | 0 | 0 | 0 | 0 | 100 | 0 |
| BRAMY2023719 | 0 | 0 | 0 | 0 | 0 | 6.024 | 0 |
| BRAMY2023729 | 0 | 0 | 0 | 0 | 0 | 47.355 | 0 |
| BRAMY2023786 | 0 | 0 | 0 | 0 | 0 | 100 | 0 |
| BRAMY2023852 | 0 | 0 | 0 | 0 | 0 | 100 | 0 |
| BRAMY2023863 | 0 | 0 | 0 | 0 | 0 | 35.669 | 0 |
| BRAMY2023939 | 0 | 0 | 0 | 0 | 0 | 6.159 | 0 |
| BRAMY2024004 | 0 | 0 | 0 | 1.963 | 0 | 2.787 | 0 |
| BRAMY2024073 | 0 | 0 | 0 | 0 | 0 | 100 | 0 |
| BRAMY2024312 | 0 | 0 | 0 | 0 | 0 | 49.688 | 0 |
| BRAMY2024374 | 0 | 0 | 0 | 0 | 0 | 100 | 0 |
| BRAMY2024390 | 0 | 0 | 0 | 0 | 0 | 35.210 | 0 |
| BRAMY2024416 | 0 | 0 | 0 | 3.212 | 0 | 22.796 | 0 |
| BRAMY2024449 | 0 | 0 | 0 | 0 | 0 | 100 | 0 |
| BRAMY2024489 | 0 | 0 | 0 | 0 | 0 | 100 | 0 |
| BRAMY2024497 | 0 | 0 | 0 | 0 | 0 | 100 | 0 |
| BRAMY2024514 | 0 | 0 | 0 | 0 | 0 | 100 | 0 |
| BRAMY2024530 | 0 | 0 | 0 | 0 | 0 | 100 | 0 |
| BRAMY2024535 | 0 | 0 | 0 | 0 | 0 | 100 | 0 |
| BRAMY2024545 | 0 | 0 | 0 | 0 | 0 | 100 | 0 |
| BRAMY2024576 | 0 | 0 | 0 | 0 | 0 | 100 | 0 |
| BRAMY2024593 | 0 | 0 | 0 | 0 | 0 | 25.978 | 0 |
| BRAMY2024711 | 0 | 0 | 0 | 0 | 0 | 12.354 | 0 |
| BRAMY2024715 | 0 | 0 | 0 | 0 | 0 | 12.836 | 0 |
| BRAMY2024728 | 0 | 0 | 0 | 0 | 0 | 100 | 0 |
| BRAMY2024827 | 0 | 0 | 0 | 0 | 0 | 4.020 | 0 |
| BRAMY2024849 | 0 | 0 | 0 | 0 | 0 | 100 | 0 |
| BRAMY2025024 | 0 | 0 | 0 | 0 | 0 | 100 | 0 |
| BRAMY2025032 | 0 | 0 | 0 | 0 | 0 | 100 | 0 |
| BRAMY2025121 | 0 | 0 | 0 | 11.752 | 0 | 33.367 | 0 |
| BRAMY2025175 | 0 | 0 | 0 | 0 | 0 | 100 | 0 |
| BRAMY2025218 | 0 | 0 | 0 | 0 | 0 | 100 | 0 |
| BRAMY2025230 | 0 | 0 | 0 | 6.959 | 0 | 19.758 | 0 |
| BRAMY2025272 | 0 | 0 | 0 | 0 | 0 | 47.605 | 0 |
| BRAMY2025277 | 0 | 0 | 0 | 0 | 0 | 100 | 0 |
| BRAMY2025495 | 0 | 0 | 0 | 0 | 0 | 100 | 0 |
| BRAMY2025812 | 0 | 0 | 0 | 0 | 0 | 100 | 0 |
| BRAMY2025996 | 0 | 0 | 0 | 0 | 0 | 100 | 0 |
| BRAMY2026009 | 0 | 0 | 0 | 0 | 0 | 44.952 | 0 |
| BRAMY2026091 | 0 | 0 | 0 | 0 | 0 | 100 | 0 |
| BRAMY2026168 | 0 | 0 | 0 | 0 | 0 | 32.330 | 0 |
| BRAMY2026300 | 0 | 0 | 0 | 0 | 0 | 100 | 0 |
| BRAMY2026347 | 0 | 0 | 0 | 0 | 0 | 100 | 0 |
| BRAMY2026395 | 0 | 0 | 0 | 0 | 0 | 100 | 0 |
| BRAMY2026405 | 0 | 0 | 0 | 0 | 0 | 100 | 0 |
| BRAMY2026533 | 0 | 0 | 0 | 0 | 0 | 18.861 | 0 |
| BRAMY2026538 | 0 | 0 | 0 | 0 | 0 | 100 | 0 |
| BRAMY2026685 | 0 | 34.791 | 0 | 0 | 0 | 2.497 | 0 |
| BRAMY2026713 | 0 | 0 | 0 | 0 | 0 | 100 | 0 |
| BRAMY2026778 | 0 | 34.006 | 0 | 0 | 0 | 4.882 | 0 |
| BRAMY2026824 | 0 | 0 | 0 | 0 | 0 | 100 | 0 |
| BRAMY2026899 | 0 | 0 | 0 | 0 | 0 | 100 | 0 |
| BRAMY2026902 | 0 | 0 | 0 | 0 | 0 | 100 | 0 |
| BRAMY2026904 | 0 | 0 | 0 | 0 | 0 | 100 | 0 |
| BRAMY2026976 | 0 | 0 | 0 | 0 | 0 | 100 | 0 |
| BRAMY2027073 | 0 | 0 | 0 | 0 | 0 | 100 | 0 |
| BRAMY2027114 | 0 | 0 | 0 | 0 | 0 | 17.318 | 0 |
| BRAMY2027140 | 0 | 0 | 0 | 0 | 0 | 51.968 | 0 |
| BRAMY2027242 | 0 | 0 | 0 | 0 | 0 | 100 | 0 |
| BRAMY2027396 | 0 | 0 | 0 | 0 | 0 | 100 | 0 |
| BRAMY2027451 | 0 | 0 | 0 | 0 | 0 | 100 | 0 |
| BRAMY2027461 | 0 | 0 | 0 | 0 | 0 | 100 | 0 |
| BRAMY2027467 | 0 | 0 | 0 | 0 | 0 | 100 | 0 |
| BRAMY2027587 | 0 | 0 | 0 | 9.477 | 0 | 26.909 | 0 |
| BRAMY2027714 | 0 | 0 | 0 | 0 | 0 | 100 | 0 |
| BRAMY2027717 | 0 | 0 | 0 | 0 | 0 | 16.593 | 0 |
| BRAMY2027739 | 0 | 0 | 0 | 0 | 0 | 1.356 | 0 |
| BRAMY2027752 | 0 | 0 | 0 | 0 | 0 | 100 | 0 |
| BRAMY2027782 | 0 | 0 | 0 | 0 | 0 | 100 | 0 |
| BRAMY2028072 | 0 | 0 | 0 | 0 | 0 | 100 | 0 |
| BRAMY2028183 | 0 | 0 | 0 | 13.334 | 0 | 18.929 | 0 |
| BRAMY2028188 | 0 | 0 | 0 | 0 | 0 | 100 | 0 |
| BRAMY2028269 | 0 | 0 | 0 | 0 | 0 | 32.892 | 0 |
| BRAMY2028282 | 0 | 0 | 0 | 0 | 0 | 24.592 | 0 |
| BRAMY2028472 | 0 | 0 | 0 | 0 | 0 | 100 | 0 |
| BRAMY2028491 | 0 | 0 | 0 | 0 | 0 | 36.150 | 0 |
| BRAMY2028516 | 0 | 0 | 0 | 0 | 0 | 3.974 | 0 |
| BRAMY2028565 | 0 | 0 | 0 | 0 | 0 | 100 | 0 |
| BRAMY2028593 | 0 | 0 | 0 | 0 | 0 | 100 | 0 |
| BRAMY2028682 | 0 | 0 | 0 | 0 | 0 | 21.396 | 0 |
| BRAMY2028740 | 0 | 0 | 0 | 1.322 | 10.092 | 2.814 | 0 |
| BRAMY2028783 | 0 | 0 | 0 | 0 | 0 | 100 | 0 |
| BRAMY2028796 | 0 | 10.433 | 0 | 0 | 0 | 4.493 | 0 |
| BRAMY2028856 | 0 | 0 | 0 | 0 | 0 | 100 | 0 |
| BRAMY2028914 | 0 | 0 | 0 | 0 | 0 | 17.849 | 0 |
| BRAMY2029204 | 0 | 0 | 0 | 0 | 0 | 100 | 0 |
| BRAMY2029602 | 0 | 0 | 0 | 0 | 0 | 100 | 0 |
| BRAMY2029988 | 0 | 0 | 0 | 8.360 | 0 | 23.737 | 0 |
| BRAMY2030098 | 0 | 0 | 0 | 29.935 | 0 | 42.496 | 0 |
| BRAMY2030109 | 0 | 0 | 0 | 0 | 0 | 100 | 0 |
| BRAMY2030206 | 0 | 0 | 0 | 0 | 0 | 100 | 0 |
| BRAMY2030477 | 0 | 0 | 0 | 0 | 0 | 100 | 0 |
| BRAMY2030545 | 0 | 0 | 0 | 0 | 0 | 22.530 | 0 |
| BRAMY2030607 | 0 | 0 | 0 | 0 | 0 | 100 | 0 |
| BRAMY2030702 | 0 | 0 | 0 | 0 | 0 | 100 | 0 |
| BRAMY2030703 | 0 | 0 | 0 | 0 | 0 | 100 | 0 |
| BRAMY2030768 | 0 | 0 | 0 | 0 | 0 | 100 | 0 |
| BRAMY2030799 | 0 | 0 | 0 | 0 | 0 | 100 | 0 |
| BRAMY2030859 | 0 | 0 | 0 | 0 | 0 | 100 | 0 |
| BRAMY2030915 | 0 | 0 | 0 | 0 | 0 | 100 | 0 |
| BRAMY2031317 | 0 | 0 | 0 | 33.400 | 0 | 15.805 | 0 |
| BRAMY2031377 | 0 | 0 | 0 | 0 | 0 | 100 | 0 |
| BRAMY2031442 | 0 | 0 | 0 | 0 | 0 | 100 | 0 |
| BRAMY2031516 | 0 | 0 | 0 | 0 | 0 | 7.442 | 0 |
| BRAMY2032014 | 0 | 0 | 0 | 0 | 0 | 100 | 0 |
| BRAMY2032087 | 0 | 17.000 | 0 | 0 | 0 | 2.440 | 0 |
| BRAMY2032231 | 0 | 0 | 0 | 0 | 0 | 100 | 0 |
| BRAMY2032242 | 0 | 0 | 0 | 0 | 0 | 100 | 0 |
| BRAMY2032290 | 0 | 0 | 0 | 0 | 0 | 100 | 0 |
| BRAMY2032311 | 0 | 0 | 0 | 0 | 0 | 100 | 0 |
| BRAMY2032317 | 0 | 0 | 0 | 0 | 0 | 60.652 | 0 |
| BRAMY2032344 | 0 | 0 | 0 | 0 | 0 | 100 | 0 |
| BRAMY2032589 | 0 | 0 | 0 | 0 | 0 | 100 | 0 |
| BRAMY2032678 | 0 | 0 | 0 | 0 | 0 | 100 | 0 |
| BRAMY2032696 | 0 | 0 | 0 | 0 | 0 | 21.396 | 0 |
| BRAMY2032777 | 0 | 0 | 0 | 0 | 0 | 100 | 0 |
| BRAMY2032994 | 0 | 0 | 0 | 0 | 0 | 100 | 0 |
| BRAMY2033003 | 0 | 0 | 0 | 0 | 0 | 100 | 0 |
| BRAMY2033116 | 0 | 0 | 0 | 0 | 0 | 100 | 0 |
| BRAMY2033240 | 0 | 0 | 0 | 0 | 0 | 100 | 0 |
| BRAMY2033267 | 0 | 0 | 0 | 0 | 0 | 100 | 0 |
| BRAMY2033316 | 0 | 0 | 0 | 0 | 0 | 54.718 | 0 |
| BRAMY2033332 | 0 | 0 | 0 | 0 | 0 | 100 | 0 |
| BRAMY2033506 | 0 | 0 | 0 | 0 | 0 | 100 | 0 |
| BRAMY2033594 | 0 | 0 | 0 | 0 | 0 | 100 | 0 |
| BRAMY2033895 | 0 | 0 | 0 | 0 | 0 | 100 | 0 |
| BRAMY2033914 | 0 | 0 | 0 | 0 | 0 | 50.189 | 0 |
| BRAMY2034072 | 0 | 0 | 0 | 0 | 0 | 100 | 0 |
| BRAMY2034185 | 0 | 0 | 0 | 0 | 0 | 100 | 0 |
| BRAMY2034187 | 0 | 0 | 0 | 0 | 0 | 12.529 | 0 |
| BRAMY2034305 | 0 | 0 | 0 | 0 | 0 | 100 | 0 |
| BRAMY2034561 | 0 | 0 | 0 | 0 | 0 | 100 | 0 |
| BRAMY2034920 | 0 | 0 | 0 | 0 | 0 | 100 | 0 |
| BRAMY2034993 | 0 | 0 | 0 | 0 | 0 | 100 | 0 |
| BRAMY2035070 | 0 | 0 | 0 | 0 | 0 | 54.718 | 0 |
| BRAMY2035449 | 0 | 0 | 0 | 0 | 0 | 100 | 0 |
| BRAMY2035545 | 0 | 0 | 0 | 41.329 | 0 | 58.671 | 0 |
| BRAMY2035606 | 0 | 0 | 0 | 0 | 0 | 100 | 0 |
| BRAMY2035718 | 0 | 0 | 0 | 0 | 0 | 100 | 0 |
| BRAMY2035719 | 0 | 0 | 0 | 0 | 0 | 15.304 | 0 |
| BRAMY2035801 | 0 | 0 | 0 | 0 | 0 | 100 | 0 |
| BRAMY2035869 | 0 | 0 | 0 | 0 | 0 | 60.652 | 0 |
| BRAMY2035923 | 0 | 0 | 0 | 0 | 0 | 100 | 0 |
| BRAMY2036076 | 0 | 0 | 0 | 15.354 | 0 | 21.797 | 0 |
| BRAMY2036079 | 0 | 0 | 0 | 0 | 0 | 100 | 0 |
| BRAMY2036254 | 0 | 0 | 0 | 0 | 0 | 100 | 0 |
| BRAMY2036266 | 0 | 0 | 0 | 0 | 0 | 100 | 0 |
| BRAMY2036387 | 0 | 0 | 0 | 0 | 0 | 13.490 | 0 |
| BRAMY2036396 | 0 | 0 | 0 | 0 | 0 | 100 | 0 |
| BRAMY2036459 | 0 | 0 | 0 | 0 | 0 | 3.798 | 0 |
| BRAMY2036567 | 0 | 0 | 0 | 26.525 | 0 | 22.594 | 0 |
| BRAMY2036615 | 0 | 0 | 0 | 0 | 0 | 100 | 0 |
| BRAMY2036699 | 0 | 0 | 0 | 0 | 0 | 100 | 0 |
| BRAMY2036913 | 0 | 0 | 0 | 0 | 0 | 100 | 0 |
| BRAMY2036918 | 0 | 0 | 0 | 0 | 0 | 100 | 0 |
| BRAMY2036968 | 0 | 0 | 0 | 0 | 0 | 100 | 0 |
| BRAMY2037147 | 0 | 0 | 0 | 0 | 0 | 36.150 | 0 |
| BRAMY2037328 | 0 | 0 | 0 | 0 | 0 | 100 | 0 |
| BRAMY2037609 | 0 | 0 | 0 | 0 | 0 | 100 | 0 |
| BRAMY2037629 | 0 | 0 | 0 | 0 | 0 | 100 | 0 |
| BRAMY2037800 | 0 | 0 | 0 | 0 | 0 | 100 | 0 |
| BRAMY2037823 | 0 | 0 | 0 | 21.055 | 0 | 29.890 | 0 |
| BRAMY2037971 | 0 | 0 | 0 | 0 | 0 | 100 | 0 |
| BRAMY2038100 | 0 | 0 | 0 | 0 | 0 | 100 | 0 |
| BRAMY2038128 | 0 | 0 | 0 | 0 | 0 | 100 | 0 |
| BRAMY2038317 | 0 | 0 | 0 | 0 | 0 | 100 | 0 |
| BRAMY2038475 | 0 | 0 | 0 | 0 | 0 | 100 | 0 |
| BRAMY2038484 | 0 | 0 | 0 | 0 | 0 | 100 | 0 |
| BRAMY2038516 | 0 | 0 | 0 | 0 | 0 | 12.770 | 0 |
| BRAMY2038832 | 0 | 0 | 0 | 0 | 0 | 12.282 | 0 |
| BRAMY2038846 | 0 | 0 | 0 | 0 | 0 | 47.355 | 0 |
| BRAMY2038887 | 0 | 0 | 0 | 0 | 0 | 100 | 0 |
| BRAMY2038904 | 0 | 0 | 0 | 0 | 0 | 60.652 | 0 |
| BRAMY2039287 | 0 | 0 | 0 | 0 | 0 | 100 | 0 |
| BRAMY2039300 | 0 | 0 | 0 | 0 | 0 | 100 | 0 |
| BRAMY2039314 | 0 | 0 | 0 | 0 | 0 | 100 | 0 |
| BRAMY2039341 | 0 | 0 | 0 | 0 | 0 | 100 | 0 |
| BRAMY2039630 | 0 | 0 | 0 | 0 | 0 | 8.744 | 0 |
| BRAMY2039695 | 0 | 0 | 0 | 0 | 0 | 100 | 0 |
| BRAMY2039728 | 0 | 0 | 0 | 25.927 | 0 | 36.806 | 0 |
| BRAMY2039872 | 0 | 0 | 0 | 14.071 | 0 | 19.976 | 0 |
| BRAMY2040051 | 0 | 0 | 0 | 0 | 0 | 100 | 0 |
| BRAMY2040095 | 0 | 0 | 10.544 | 3.154 | 0 | 2.755 | 0 |
| BRAMY2040159 | 0 | 0 | 0 | 0 | 0 | 100 | 0 |
| BRAMY2040214 | 0 | 0 | 0 | 10.294 | 0 | 29.228 | 0 |
| BRAMY2040478 | 0 | 0 | 0 | 0 | 0 | 100 | 0 |
| BRAMY2040592 | 0 | 0 | 0 | 0 | 12.582 | 7.017 | 0 |
| BRAMY2040915 | 0 | 0 | 0 | 0 | 0 | 100 | 0 |
| BRAMY2041261 | 0 | 0 | 0 | 0 | 0 | 100 | 0 |
| BRAMY2041347 | 0 | 0 | 0 | 0 | 0 | 100 | 0 |
| BRAMY2041378 | 0 | 0 | 0 | 0 | 0 | 100 | 0 |
| BRAMY2041384 | 0 | 0 | 0 | 0 | 0 | 100 | 0 |
| BRAMY2041434 | 0 | 0 | 0 | 0 | 0 | 100 | 0 |
| BRAMY2041507 | 0 | 0 | 0 | 0 | 0 | 100 | 0 |
| BRAMY2041542 | 0 | 0 | 0 | 0 | 0 | 100 | 0 |
| BRAMY2041738 | 0 | 0 | 0 | 0 | 0 | 100 | 0 |
| BRAMY2042122 | 0 | 0 | 0 | 0 | 0 | 100 | 0 |
| BRAMY2042131 | 0 | 0 | 0 | 0 | 0 | 100 | 0 |
| BRAMY2042178 | 0 | 0 | 0 | 0 | 0 | 100 | 0 |
| BRAMY2042195 | 0 | 0 | 0 | 0 | 0 | 30.516 | 0 |
| BRAMY2042244 | 0 | 0 | 0 | 0 | 0 | 100 | 0 |
| BRAMY2042549 | 0 | 0 | 0 | 0 | 0 | 100 | 0 |
| BRAMY2042596 | 0 | 0 | 0 | 0 | 0 | 100 | 0 |
| BRAMY2042612 | 0 | 0 | 0 | 0 | 0 | 100 | 0 |
| BRAMY2042641 | 0 | 0 | 0 | 0 | 0 | 100 | 0 |
| BRAMY2042711 | 0 | 0 | 0 | 0 | 0 | 100 | 0 |
| BRAMY2042760 | 0 | 0 | 0 | 0 | 0 | 100 | 0 |
| BRAMY2042804 | 0 | 0 | 0 | 41.329 | 0 | 58.671 | 0 |
| BRAMY2042899 | 0 | 0 | 0 | 0 | 0 | 100 | 0 |
| BRAMY2042918 | 0 | 0 | 0 | 0 | 0 | 100 | 0 |
| BRAMY2043069 | 0 | 0 | 0 | 0 | 0 | 21.396 | 0 |
| BRAMY2043103 | 0 | 0 | 0 | 0 | 0 | 100 | 0 |
| BRAMY2043314 | 0 | 0 | 0 | 0 | 0 | 100 | 0 |
| BRAMY2043345 | 0 | 0 | 0 | 0 | 0 | 100 | 0 |
| BRAMY2044246 | 0 | 0 | 0 | 0 | 0 | 100 | 0 |
| BRAMY2044317 | 0 | 0 | 0 | 0 | 0 | 100 | 0 |
| BRAMY2044349 | 0 | 0 | 0 | 0 | 0 | 100 | 0 |
| BRAMY2044686 | 0 | 0 | 0 | 0 | 0 | 100 | 0 |
| BRAMY2044838 | 0 | 0 | 0 | 0 | 0 | 31.238 | 0 |
| BRAMY2045036 | 0 | 0 | 0 | 0 | 0 | 100 | 0 |
| BRAMY2045299 | 0 | 0 | 0 | 0 | 0 | 100 | 0 |
| BRAMY2045471 | 0 | 0 | 0 | 0 | 0 | 100 | 0 |
| BRAMY2045530 | 0 | 66.216 | 0 | 0 | 0 | 9.506 | 0 |
| BRAMY2046109 | 0 | 0 | 0 | 0 | 0 | 100 | 0 |
| BRAMY2046478 | 0 | 0 | 0 | 0 | 0 | 100 | 0 |
| BRAMY2046489 | 0 | 0 | 0 | 0 | 0 | 100 | 0 |
| BRAMY2046537 | 0 | 0 | 0 | 0 | 0 | 100 | 0 |
| BRAMY2046667 | 0 | 0 | 0 | 0 | 0 | 100 | 0 |
| BRAMY2046742 | 0 | 0 | 0 | 0 | 0 | 100 | 0 |
| BRAMY2046871 | 0 | 0 | 0 | 0 | 0 | 66.835 | 0 |
| BRAMY2046984 | 0 | 0 | 0 | 0 | 0 | 100 | 0 |
| BRAMY2046989 | 0 | 0 | 0 | 0 | 0 | 100 | 0 |
| BRAMY2047169 | 0 | 0 | 0 | 0 | 0 | 100 | 0 |
| BRAMY2047280 | 0 | 0 | 0 | 0 | 0 | 100 | 0 |
| BRAMY2047420 | 0 | 0 | 0 | 0.719 | 0 | 2.041 | 0 |
| BRAMY2047676 | 0 | 0 | 0 | 0 | 0 | 100 | 0 |
| BRAMY2047692 | 0 | 0 | 0 | 0 | 0 | 100 | 0 |
| BRAMY2047746 | 0 | 0 | 0 | 0 | 0 | 100 | 0 |
| BRAMY2047751 | 0 | 0 | 0 | 0 | 0 | 100 | 0 |
| BRAMY2047765 | 0 | 0 | 0 | 0 | 0 | 100 | 0 |
| BRAMY2047884 | 0 | 0 | 0 | 0 | 0 | 100 | 0 |
| BRAMY2047948 | 0 | 0 | 0 | 0 | 0 | 100 | 0 |
| BRAMY3000206 | 0 | 0 | 0 | 0 | 0 | 100 | 0 |
| BRAMY3000210 | 0 | 0 | 0 | 0 | 0 | 100 | 0 |
| BRAMY3000213 | 0 | 0 | 0 | 0 | 0 | 100 | 0 |
| BRAMY3000224 | 0 | 0 | 0 | 0 | 0 | 28.785 | 0 |
| BRAMY3000254 | 0 | 0 | 0 | 0 | 0 | 100 | 0 |
| BRAMY3000307 | 0 | 0 | 0 | 0 | 0 | 100 | 0 |
| BRAMY3000692 | 0 | 0 | 0 | 0 | 0 | 100 | 0 |
| BRAMY3001356 | 0 | 0 | 0 | 0 | 0 | 100 | 0 |
| BRAMY3001401 | 0 | 0 | 0 | 0 | 0 | 100 | 0 |
| BRAMY3001409 | 0 | 0 | 0 | 0 | 0 | 100 | 0 |
| BRAMY3001794 | 0 | 0 | 0 | 0 | 0 | 100 | 0 |
| BRAMY3002120 | 0 | 0 | 0 | 0 | 0 | 54.718 | 0 |
| BRAMY3002312 | 0 | 0 | 0 | 0 | 0 | 100 | 0 |
| BRAMY3002329 | 0 | 0 | 0 | 9.616 | 0 | 20.478 | 0 |
| BRAMY3002458 | 0 | 0 | 0 | 0 | 0 | 12.509 | 0 |
| BRAMY3002508 | 0 | 0 | 0 | 0 | 0 | 100 | 0 |
| BRAMY3002620 | 0 | 0 | 0 | 41.329 | 0 | 58.671 | 0 |
| BRAMY3002803 | 0 | 0 | 0 | 0 | 0 | 14.538 | 0 |
| BRAMY3002805 | 0 | 0 | 0 | 0 | 0 | 100 | 0 |
| BRAMY3002886 | 0 | 0 | 0 | 0 | 0 | 100 | 0 |
| BRAMY3002991 | 0 | 0 | 0 | 0 | 0 | 3.951 | 0 |
| BRAMY3003026 | 0 | 0 | 0 | 0 | 0 | 44.784 | 0 |
| BRAMY3003109 | 0 | 0 | 0 | 0 | 0 | 100 | 0 |
| BRAMY3003205 | 0 | 0 | 0 | 0 | 0 | 48.484 | 0 |
| BRAMY3003310 | 0 | 0 | 0 | 0 | 0 | 54.718 | 0 |
| BRAMY3003566 | 0 | 0 | 0 | 0 | 0 | 100 | 0 |
| BRAMY3003723 | 0 | 0 | 0 | 0 | 0 | 100 | 0 |
| BRAMY3004126 | 0 | 0 | 0 | 0 | 0 | 50.189 | 0 |
| BRAMY3004224 | 0 | 0 | 0 | 0 | 0 | 33.278 | 0 |
| BRAMY3004364 | 0 | 0 | 0 | 4.821 | 0 | 13.689 | 0 |
| BRAMY3004377 | 0 | 0 | 0 | 1.766 | 0 | 3.343 | 0 |
| BRAMY3004672 | 0 | 0 | 0 | 0 | 0 | 100 | 0 |
| BRAMY3004800 | 0 | 0 | 0 | 0 | 0 | 15.340 | 0 |
| BRAMY3004900 | 0 | 0 | 0 | 0 | 0 | 100 | 0 |
| BRAMY3004919 | 0 | 0 | 0 | 0 | 0 | 100 | 0 |
| BRAMY3005091 | 0 | 0 | 0 | 13.622 | 0 | 19.339 | 0 |
| BRAMY3005184 | 0 | 0 | 0 | 0 | 0 | 22.578 | 0 |
| BRAMY3005656 | 0 | 0 | 0 | 0 | 0 | 100 | 0 |
| BRAMY3005912 | 0 | 0 | 0 | 30.401 | 0 | 21.579 | 0 |
| BRAMY3005932 | 0 | 0 | 0 | 41.329 | 0 | 58.671 | 0 |
| BRAMY3006032 | 0 | 0 | 0 | 0 | 0 | 100 | 0 |
| BRAMY3006297 | 0 | 0 | 0 | 0 | 0 | 100 | 0 |
| BRAMY3006761 | 0 | 0 | 0 | 0 | 0 | 11.062 | 0 |
| BRAMY3007078 | 0 | 0 | 0 | 0 | 0 | 49.688 | 0 |
| BRAMY3007206 | 0 | 0 | 0 | 0 | 0 | 100 | 0 |
| BRAMY3007311 | 0 | 0 | 0 | 5.576 | 0 | 23.748 | 0 |
| BRAMY3007350 | 0 | 0 | 0 | 0 | 0 | 100 | 0 |
| BRAMY3007449 | 0 | 0 | 0 | 0 | 0 | 100 | 0 |
| BRAMY3007471 | 0 | 0 | 0 | 0 | 0 | 100 | 0 |
| BRAMY3007609 | 0 | 0 | 0 | 0 | 0 | 100 | 0 |
| BRAMY3007723 | 0 | 0 | 0 | 0 | 0 | 100 | 0 |
| BRAMY3007968 | 0 | 0 | 0 | 0 | 0 | 100 | 0 |
| BRAMY3008044 | 0 | 0 | 0 | 0 | 0 | 16.267 | 0 |
| BRAMY3008088 | 0 | 0 | 0 | 0 | 0 | 100 | 0 |
| BRAMY3008096 | 0 | 0 | 0 | 41.329 | 0 | 58.671 | 0 |
| BRAMY3008335 | 0 | 0 | 0 | 37.822 | 0 | 17.898 | 0 |
| BRAMY3008466 | 0 | 0 | 0 | 0 | 0 | 100 | 0 |
| BRAMY3008505 | 0 | 0 | 0 | 0 | 0 | 100 | 0 |
| BRAMY3008650 | 0 | 0 | 0 | 0 | 0 | 100 | 0 |
| BRAMY3008937 | 0 | 0 | 0 | 0 | 0 | 100 | 0 |
| BRAMY3009158 | 0 | 0 | 0 | 0 | 0 | 100 | 0 |
| BRAMY3009207 | 0 | 0 | 0 | 0 | 0 | 100 | 0 |
| BRAMY3009491 | 0 | 0 | 0 | 22.146 | 0 | 31.439 | 0 |
| BRAMY3009556 | 0 | 0 | 0 | 0 | 0 | 47.605 | 0 |
| BRAMY3009782 | 0 | 0 | 0 | 0 | 0 | 47.605 | 0 |
| BRAMY3009811 | 0 | 0 | 0 | 0 | 0 | 33.057 | 0 |
| BRAMY3009904 | 0 | 0 | 0 | 0 | 0 | 100 | 0 |
| BRAMY3010008 | 0 | 0 | 0 | 0 | 0 | 1.173 | 0 |
| BRAMY3010264 | 0 | 0 | 0 | 0 | 0 | 50.189 | 0 |
| BRAMY3010321 | 0 | 0 | 0 | 0 | 0 | 100 | 0 |
| BRAMY3010411 | 0 | 0 | 0 | 0 | 0 | 100 | 0 |
| BRAMY3010492 | 0 | 0 | 0 | 0 | 0 | 5.803 | 0 |
| BRAMY3010603 | 0 | 0 | 0 | 0 | 0 | 100 | 0 |
| BRAMY3010654 | 0 | 0 | 0 | 0 | 0 | 47.605 | 0 |
| BRAMY4000089 | 0 | 0 | 0 | 3.612 | 0 | 10.255 | 0 |
| BRAMY4000095 | 0 | 0 | 0 | 0 | 0 | 14.721 | 0 |
| BRAMY4000229 | 0 | 0 | 0 | 25.113 | 0 | 35.650 | 0 |
| BRAMY4000277 | 0 | 0 | 0 | 0 | 0 | 100 | 0 |
| BRAMY4000915 | 0 | 0 | 0 | 0 | 0 | 49.688 | 0 |
| BRAMY4000962 | 0 | 0 | 0 | 0 | 0 | 100 | 0 |
| BRAMY4001173 | 0 | 0 | 0 | 0 | 0 | 100 | 0 |
| BRAMY4001200 | 0 | 0 | 0 | 0 | 0 | 100 | 0 |
| BRAMY4001234 | 0 | 0 | 0 | 0 | 0 | 54.718 | 0 |
| BRAMY4001449 | 0 | 0 | 0 | 0 | 0 | 100 | 0 |
| BRAMY4001652 | 0 | 0 | 0 | 0 | 0 | 100 | 0 |
| BRAMY4001863 | 0 | 0 | 0 | 0 | 0 | 15.094 | 0 |
| BRAMY4001913 | 0 | 0 | 0 | 0 | 0 | 100 | 0 |
| BRAMY4002575 | 0 | 0 | 0 | 0 | 0 | 100 | 0 |
| BRAMY4002628 | 0 | 0 | 0 | 0 | 0 | 7.157 | 0 |
| BRASW1000053 | 0 | 0 | 0 | 0 | 0 | 0 | 100 |
| BRASW1000125 | 0 | 0 | 0 | 0 | 0 | 0 | 99.054 |
| BRAWH1000001 | 0 | 0 | 0 | 4.724 | 12.024 | 0 | 0 |
| BRAWH1000037 | 0 | 0 | 0 | 2.588 | 0 | 1.837 | 0 |
| BRAWH1000040 | 0 | 0 | 0 | 0 | 0 | 2.773 | 0 |
| BRAWH1000045 | 0 | 0 | 0 | 0.710 | 0 | 16.138 | 0 |
| BRAWH1000083 | 0 | 31.801 | 0 | 3.216 | 0 | 4.565 | 0 |
| BRAWH1000093 | 0 | 0 | 0 | 0.655 | 0 | 0 | 0 |
| BRAWH1000094 | 0 | 0 | 0 | 11.953 | 0 | 4.242 | 0 |
| BRAWH1000127 | 0 | 0 | 0 | 4.538 | 0 | 9.663 | 0 |
| BRAWH1000162 | 0 | 0 | 0 | 5.181 | 6.594 | 9.194 | 0 |
| BRAWH1000174 | 0 | 0 | 0 | 0 | 0 | 8.660 | 0 |
| BRAWH2000082 | 0 | 0 | 0 | 1.634 | 5.544 | 12.368 | 0 |
| BRAWH2000131 | 0 | 0 | 0 | 0 | 78.324 | 0 | 0 |
| BRAWH2000177 | 0 | 0 | 0 | 11.350 | 0 | 0 | 0 |
| BRAWH2000274 | 0 | 0 | 0 | 30.824 | 0 | 9.945 | 0 |
| BRAWH2000353 | 0 | 0 | 0 | 41.512 | 0 | 0 | 0 |
| BRAWH2000417 | 0 | 0 | 0 | 0 | 20.093 | 28.015 | 0 |
| BRAWH2000443 | 0 | 0 | 0 | 0 | 0 | 22.835 | 0 |
| BRAWH2000460 | 0 | 0 | 0 | 9.097 | 0 | 1.230 | 0 |
| BRAWH2000482 | 0 | 0 | 0 | 0 | 0 | 4.588 | 0 |
| BRAWH2000494 | 0 | 0 | 0 | 6.452 | 0 | 0 | 0 |
| BRAWH2000500 | 0 | 0 | 0 | 41.512 | 0 | 0 | 0 |
| BRAWH2000522 | 0 | 0 | 0 | 0 | 6.549 | 3.653 | 0 |
| BRAWH2000595 | 0 | 87.530 | 0 | 0 | 0 | 0 | 0 |
| BRAWH2000633 | 41.554 | 0 | 10.223 | 0 | 0 | 1.336 | 0 |
| BRAWH2000636 | 0 | 0 | 0 | 1.125 | 3.819 | 8.519 | 0 |
| BRAWH2000686 | 0 | 0 | 0 | 10.411 | 4.417 | 4.927 | 0 |
| BRAWH2000697 | 0 | 0 | 0 | 4.308 | 7.310 | 1.019 | 0 |
| BRAWH2000839 | 0 | 2.883 | 0 | 1.749 | 1.484 | 8.277 | 0 |
| BRAWH2000924 | 0 | 0 | 0 | 1.222 | 8.296 | 4.048 | 0 |
| BRAWH2001019 | 0 | 0 | 0 | 0 | 0 | 11.490 | 0 |
| BRAWH2001037 | 0 | 0 | 0 | 0 | 0 | 4.041 | 0 |
| BRAWH2001092 | 0 | 0 | 2.711 | 1.247 | 0 | 0.531 | 0 |
| BRAWH2001141 | 0 | 0 | 0 | 10.821 | 0 | 5.121 | 0 |
| BRAWH2001166 | 0 | 0 | 24.344 | 0 | 0 | 0 | 0 |
| BRAWH2001171 | 0 | 0 | 4.763 | 9.644 | 0 | 9.334 | 0 |
| BRAWH2001186 | 0 | 0 | 0 | 0 | 0 | 2.871 | 0 |
| BRAWH2001238 | 0 | 0 | 0 | 42.908 | 0 | 0 | 0 |
| BRAWH2001321 | 0 | 0 | 0 | 3.656 | 0 | 15.569 | 0 |
| BRAWH2001395 | 0 | 0 | 0 | 3.580 | 3.037 | 2.541 | 0 |
| BRAWH2001418 | 0 | 0 | 0 | 3.661 | 9.319 | 2.599 | 0 |
| BRAWH2001439 | 0 | 0 | 0 | 2.921 | 0 | 0 | 0 |
| BRAWH2001459 | 0 | 0 | 0 | 5.208 | 0 | 0 | 0 |
| BRAWH2001461 | 0 | 0 | 0 | 0 | 0 | 3.582 | 0 |
| BRAWH2001535 | 0 | 0 | 0 | 0 | 5.352 | 6.965 | 0 |
| BRAWH2001662 | 0 | 0 | 0 | 3.263 | 0 | 0 | 0 |
| BRAWH2001671 | 0 | 0 | 0 | 8.097 | 0 | 0 | 0 |
| BRAWH2002047 | 0 | 0 | 0 | 41.512 | 0 | 0 | 0 |
| BRAWH2002060 | 0 | 0 | 0 | 41.512 | 0 | 0 | 0 |
| BRAWH2002318 | 0 | 0 | 0 | 0 | 0 | 26.889 | 0 |
| BRAWH2002549 | 0 | 0 | 0 | 0 | 0 | 18.154 | 0 |
| BRAWH2002560 | 0 | 0 | 0 | 0 | 0 | 6.503 | 0 |
| BRAWH2002601 | 0 | 0 | 0 | 3.530 | 0 | 0 | 0 |
| BRAWH2002811 | 0 | 0 | 0 | 0 | 31.162 | 17.379 | 0 |
| BRAWH2002911 | 0 | 0 | 0 | 16.889 | 0 | 0 | 0 |
| BRAWH2002963 | 0 | 0 | 0 | 8.469 | 0 | 0 | 0 |
| BRAWH2003000 | 0 | 0 | 0 | 41.512 | 0 | 0 | 0 |
| BRAWH2003025 | 0 | 0 | 0 | 0 | 10.956 | 3.055 | 0 |
| BRAWH2003355 | 0 | 0 | 0 | 0 | 78.324 | 0 | 0 |
| BRAWH2003662 | 0 | 0 | 0 | 8.798 | 0 | 18.734 | 0 |
| BRAWH2004078 | 0 | 0 | 0 | 3.740 | 0 | 0 | 0 |
| BRAWH2004095 | 0 | 0 | 0 | 9.229 | 4.271 | 5.956 | 0 |
| BRAWH2004779 | 0 | 0 | 0 | 0 | 0 | 50.189 | 0 |
| BRAWH2004842 | 0 | 0 | 0 | 11.316 | 0 | 8.032 | 0 |
| BRAWH2005008 | 0 | 0 | 0 | 11.719 | 0 | 0 | 0 |
| BRAWH2005068 | 12.608 | 0 | 0 | 0.571 | 1.453 | 0.405 | 0 |
| BRAWH2005661 | 0 | 11.221 | 0 | 2.269 | 0 | 0 | 0 |
| BRAWH2006044 | 0 | 0 | 0 | 12.487 | 0 | 0 | 0 |
| BRAWH2006207 | 0 | 0 | 0 | 9.187 | 0 | 0 | 0 |
| BRAWH2006301 | 0 | 0 | 0 | 41.512 | 0 | 0 | 0 |
| BRAWH2006493 | 0 | 0 | 0 | 3.610 | 0 | 10.250 | 0 |
| BRAWH2006543 | 0 | 0 | 0 | 9.340 | 0 | 4.420 | 0 |
| BRAWH2006622 | 0 | 0 | 0 | 23.488 | 0 | 0 | 0 |
| BRAWH2006989 | 0 | 0 | 0 | 17.726 | 0 | 0 | 0 |
| BRAWH2006996 | 0 | 0 | 0 | 7.243 | 0 | 0 | 0 |
| BRAWH2007591 | 0 | 0 | 0 | 22.274 | 0 | 6.324 | 0 |
| BRAWH2007605 | 0 | 0 | 15.818 | 11.647 | 0 | 0 | 0 |
| BRAWH2007664 | 0 | 0 | 0 | 0 | 0 | 10.310 | 0 |
| BRAWH2007825 | 0 | 0 | 0 | 41.512 | 0 | 0 | 0 |
| BRAWH2008255 | 0 | 0 | 0 | 0 | 0 | 4.257 | 0 |
| BRAWH2008706 | 0 | 0 | 0 | 0 | 0 | 5.795 | 0 |
| BRAWH2008903 | 0 | 0 | 0 | 0 | 0 | 4.260 | 0 |
| BRAWH2008956 | 0 | 0 | 0 | 22.103 | 0 | 0 | 0 |
| BRAWH2008993 | 0 | 0 | 0 | 0 | 0 | 50.189 | 0 |
| BRAWH2009238 | 0 | 0 | 0 | 7.400 | 0 | 5.253 | 0 |
| BRAWH2009307 | 0 | 0 | 0 | 4.240 | 0 | 0 | 0 |
| BRAWH2009695 | 0 | 0 | 0 | 18.990 | 0 | 26.958 | 0 |
| BRAWH2010136 | 0 | 0 | 0 | 0 | 0 | 26.605 | 0 |
| BRAWH2010329 | 0 | 0 | 0 | 21.311 | 0 | 10.085 | 0 |
| BRAWH2010354 | 0 | 0 | 0 | 9.211 | 0 | 0 | 0 |
| BRAWH2010364 | 0 | 0 | 0 | 36.692 | 0 | 0 | 0 |
| BRAWH2010552 | 0 | 0 | 0 | 41.512 | 0 | 0 | 0 |
| BRAWH2010754 | 0 | 0 | 0 | 7.940 | 0 | 0 | 0 |
| BRAWH2011204 | 0 | 0 | 0 | 0 | 0 | 50.189 | 0 |
| BRAWH2011343 | 0 | 0 | 0 | 9.958 | 0 | 0 | 0 |
| BRAWH2011812 | 0 | 0 | 0 | 0 | 0 | 13.646 | 0 |
| BRAWH2011920 | 0 | 0 | 0 | 0 | 0 | 38.183 | 0 |
| BRAWH2012164 | 0 | 0 | 0 | 14.788 | 0 | 0 | 0 |
| BRAWH2012538 | 0 | 35.605 | 0 | 0 | 0 | 0 | 0 |
| BRAWH2012698 | 0 | 0 | 0 | 0 | 0 | 57.958 | 0 |
| BRAWH2012827 | 0 | 0 | 0 | 0 | 0 | 9.061 | 0 |
| BRAWH2012866 | 0 | 0 | 0 | 3.017 | 0 | 14.993 | 0 |
| BRAWH2013047 | 0 | 0 | 0 | 13.334 | 67.880 | 0 | 0 |
| BRAWH2013219 | 0 | 0 | 0 | 0 | 35.004 | 9.761 | 0 |
| BRAWH2013294 | 0 | 0 | 0 | 13.997 | 0 | 0 | 0 |
| BRAWH2013748 | 0 | 0 | 0 | 0 | 0 | 8.068 | 0 |
| BRAWH2014053 | 0 | 0 | 0 | 16.482 | 0 | 0 | 0 |
| BRAWH2014188 | 0 | 0 | 0 | 0 | 0 | 2.164 | 0 |
| BRAWH2014414 | 0 | 0 | 0 | 0 | 0 | 54.002 | 0 |
| BRAWH2014511 | 0 | 0 | 0 | 3.050 | 0 | 12.988 | 0 |
| BRAWH2014645 | 0 | 7.420 | 0 | 3.751 | 0 | 2.130 | 0 |
| BRAWH2014662 | 0 | 0 | 0 | 11.016 | 0 | 0 | 0 |
| BRAWH2014876 | 0 | 0 | 0 | 7.433 | 0 | 0 | 0 |
| BRAWH2014954 | 0 | 0 | 0 | 41.512 | 0 | 0 | 0 |
| BRAWH2015247 | 0 | 0 | 0 | 7.410 | 37.723 | 0 | 0 |
| BRAWH2015385 | 0 | 0 | 0 | 41.512 | 0 | 0 | 0 |
| BRAWH2015728 | 0 | 0 | 0 | 0 | 0 | 50.189 | 0 |
| BRAWH2016028 | 0 | 0 | 0 | 0 | 0 | 50.189 | 0 |
| BRAWH2016166 | 0 | 0 | 0 | 5.368 | 0 | 7.620 | 0 |
| BRAWH2016209 | 0 | 0 | 0 | 11.791 | 0 | 0 | 0 |
| BRAWH2016269 | 0 | 0 | 0 | 0.936 | 0 | 1.328 | 0 |
| BRAWH2016679 | 0 | 0 | 0 | 6.839 | 0 | 0 | 0 |
| BRAWH2016702 | 0 | 0 | 0 | 26.193 | 0 | 0 | 0 |
| BRAWH2017002 | 0 | 0 | 0 | 1.766 | 0 | 15.044 | 0 |
| BRAWH2017304 | 0 | 0 | 0 | 23.571 | 0 | 0 | 0 |
| BRAWH2017379 | 0 | 0 | 0 | 0 | 0 | 15.310 | 0 |
| BRAWH2017685 | 0 | 0 | 3.914 | 1.081 | 0 | 1.534 | 0 |
| BRAWH2018267 | 0 | 0 | 0 | 14.668 | 0 | 0 | 0 |
| BRAWH2018526 | 0 | 2.160 | 2.373 | 0.218 | 1.112 | 1.550 | 0 |
| BRAWH2018875 | 0 | 0 | 0 | 18.805 | 0 | 0 | 0 |
| BRAWH3000088 | 0 | 0 | 0 | 0 | 0 | 15.152 | 0 |
| BRAWH3001319 | 0 | 0 | 0 | 19.373 | 0 | 0 | 0 |
| BRAWH3001891 | 0 | 0 | 0 | 36.772 | 0 | 17.401 | 0 |
| BRAWH3001918 | 0 | 0 | 0 | 39.423 | 0 | 0 | 0 |
| BRAWH3002600 | 0 | 0 | 0 | 26.120 | 0 | 37.080 | 0 |
| BRAWH3002853 | 0 | 0 | 5.704 | 2.100 | 0 | 2.236 | 0 |
| BRAWH3003573 | 0 | 0 | 0 | 14.310 | 0 | 0 | 0 |
| BRAWH3003727 | 0 | 0 | 0 | 21.411 | 0 | 0 | 0 |
| BRAWH3004530 | 0 | 0 | 0 | 25.041 | 0 | 0 | 0 |
| BRAWH3005132 | 0 | 0 | 0 | 0 | 0 | 50.189 | 0 |
| BRAWH3005146 | 0 | 0 | 0 | 3.594 | 0 | 0 | 0 |
| BRAWH3006761 | 0 | 0 | 0 | 0 | 0 | 21.430 | 0 |
| BRAWH3007129 | 0 | 0 | 0 | 13.969 | 35.557 | 0 | 0 |
| BRAWH3008931 | 0 | 0 | 0 | 4.916 | 0 | 6.980 | 0 |
| BRAWH3009285 | 0 | 0 | 0 | 26.193 | 0 | 0 | 0 |
| BRAWH3009297 | 0 | 0 | 0 | 41.512 | 0 | 0 | 0 |
| BRAWH3010461 | 0 | 0 | 0 | 10.207 | 0 | 14.490 | 0 |
| BRAWH3016271 | 0 | 0 | 0 | 0 | 0 | 5.435 | 0 |
| BRAWH3017259 | 0 | 0 | 0 | 4.967 | 0 | 0 | 0 |
| BRAWH3017980 | 0 | 0 | 0 | 0 | 0 | 50.189 | 0 |
| BRAWH3018063 | 0 | 0 | 0 | 0 | 0 | 7.978 | 0 |
| BRAWH3021545 | 0 | 0 | 0 | 2.589 | 0 | 0 | 0 |
| BRAWH3021574 | 0 | 0 | 0 | 3.336 | 0 | 0 | 0 |
| BRAWH3027440 | 0 | 0 | 0 | 41.512 | 0 | 0 | 0 |
| BRAWH3029556 | 0 | 0 | 0 | 0 | 0 | 19.615 | 0 |
| BRAWH3029806 | 0 | 0 | 0 | 0 | 0 | 8.979 | 0 |
| BRAWH3030810 | 0 | 0 | 0 | 67.989 | 0 | 10.724 | 0 |
| BRAWH3034743 | 0 | 0 | 0 | 5.913 | 0 | 12.592 | 0 |
| BRAWH3035403 | 0 | 0 | 0 | 25.081 | 0 | 0 | 0 |
| BRCAN1000076 | 0 | 0 | 90.793 | 0 | 0 | 0 | 0 |
| BRCAN1000168 | 0 | 0 | 0 | 1.001 | 0 | 11.371 | 0 |
| BRCAN2001223 | 0 | 0 | 0 | 0 | 0 | 23.313 | 0 |
| BRCAN2002173 | 0 | 0 | 0 | 2.823 | 7.185 | 2.004 | 0 |
| BRCAN2003944 | 0 | 1.977 | 0 | 0 | 5.088 | 0.851 | 0 |
| BRCAN2006019 | 0 | 0 | 0 | 2.666 | 13.575 | 0 | 0 |
| BRCAN2006117 | 0 | 0 | 0 | 17.693 | 0 | 25.117 | 0 |
| BRCAN2006401 | 0 | 0 | 0 | 0 | 0 | 22.844 | 0 |
| BRCAN2007700 | 0 | 0 | 0 | 8.632 | 0 | 0 | 0 |
| BRCAN2008894 | 0 | 0 | 0 | 0 | 82.533 | 0 | 0 |
| BRCAN2009432 | 0 | 0 | 0 | 1.869 | 0 | 0 | 0 |
| BRCAN2010374 | 0 | 0 | 0 | 0 | 0 | 30.516 | 0 |
| BRCAN2010376 | 0 | 0 | 0 | 23.627 | 0 | 0 | 0 |
| BRCAN2010665 | 0 | 0 | 0 | 0 | 0 | 9.879 | 0 |
| BRCAN2014881 | 0 | 0 | 0 | 0 | 0 | 30.516 | 0 |
| BRCAN2015371 | 0 | 0 | 0 | 15.560 | 0 | 0 | 0 |
| BRCAN2015719 | 0 | 0 | 0 | 12.858 | 0 | 0 | 0 |
| BRCAN2016046 | 0 | 0 | 0 | 0 | 0 | 30.516 | 0 |
| BRCAN2019653 | 0 | 0 | 0 | 0 | 22.535 | 0 | 0 |
| BRCAN2020710 | 0 | 0 | 0 | 7.714 | 0 | 0 | 0 |
| BRCAN2022126 | 0 | 0 | 0 | 3.446 | 0 | 14.677 | 0 |
| BRCAN2024572 | 0 | 0 | 0 | 0 | 0 | 5.504 | 0 |
| BRCAN2025368 | 0 | 0 | 0 | 0 | 61.165 | 0 | 0 |
| BRCAN2026197 | 0 | 0 | 0 | 5.541 | 0 | 4.719 | 0 |
| BRCAN2026340 | 0 | 0 | 0 | 10.726 | 54.604 | 0 | 0 |
| BRCAN2027334 | 0 | 0 | 0 | 0 | 0 | 30.516 | 0 |
| BRCAN2027364 | 0 | 0 | 0 | 0 | 10.731 | 5.985 | 0 |
| BRCAN2028036 | 0 | 0 | 0 | 0 | 8.724 | 4.865 | 0 |
| BRCAN2028355 | 46.308 | 0 | 0 | 0 | 0 | 0 | 0 |
| BRCOC1000040 | 0 | 0 | 0 | 0 | 0 | 5.943 | 0 |
| BRCOC1000094 | 0 | 0 | 0 | 0.676 | 17.202 | 3.838 | 0 |
| BRCOC2000004 | 0 | 0 | 0 | 0 | 0 | 9.069 | 0 |
| BRCOC2000047 | 0 | 0 | 0 | 0 | 50.495 | 0 | 0 |
| BRCOC2000186 | 0 | 0 | 0 | 4.222 | 0 | 0 | 0 |
| BRCOC2000333 | 0 | 0 | 0 | 0 | 43.281 | 0 | 0 |
| BRCOC2000670 | 0 | 0 | 0 | 0 | 0 | 22.144 | 0 |
| BRCOC2003100 | 0 | 0 | 0 | 16.691 | 0 | 0 | 0 |
| BRCOC2003187 | 0 | 0 | 0 | 0.558 | 0 | 0 | 0 |
| BRCOC2003213 | 0 | 0 | 0 | 7.368 | 0 | 0 | 0 |
| BRCOC2004036 | 0 | 0 | 0 | 0 | 50.495 | 0 | 0 |
| BRCOC2005542 | 0 | 0 | 0 | 0 | 0 | 17.805 | 0 |
| BRCOC2005903 | 0 | 0 | 0 | 0 | 0 | 8.845 | 0 |
| BRCOC2006189 | 0 | 0 | 0 | 0 | 11.994 | 6.689 | 0 |
| BRCOC2006270 | 0 | 0 | 0 | 0 | 50.495 | 0 | 0 |
| BRCOC2007034 | 0 | 0 | 0 | 16.691 | 0 | 0 | 0 |
| BRCOC2009937 | 0 | 0 | 0 | 0 | 0 | 16.189 | 0 |
| BRCOC2011506 | 0 | 0 | 0 | 0 | 0 | 0.959 | 0 |
| BRCOC2012172 | 0 | 0 | 0 | 1.996 | 0 | 0 | 0 |
| BRCOC2012551 | 0 | 0 | 0 | 5.119 | 0 | 7.267 | 0 |
| BRCOC2013780 | 0 | 0 | 0 | 0 | 50.495 | 0 | 0 |
| BRCOC2019841 | 0 | 0 | 0 | 16.691 | 0 | 0 | 0 |
| BRCOC2019896 | 0 | 0 | 0 | 0 | 0 | 22.144 | 0 |
| BRCOC2019910 | 0 | 0 | 0 | 15.968 | 2.258 | 8.816 | 0 |
| BRHIP1000104 | 0 | 0 | 5.041 | 2.320 | 9.447 | 5.928 | 0 |
| BRHIP1000108 | 0 | 0 | 0 | 0 | 15.572 | 4.342 | 0 |
| BRHIP1000129 | 0 | 0 | 0 | 0 | 0 | 49.688 | 0 |
| BRHIP1000174 | 0 | 0 | 0 | 3.598 | 0 | 5.108 | 0 |
| BRHIP2000087 | 0 | 0 | 0 | 0 | 23.781 | 6.632 | 0 |
| BRHIP2000210 | 0 | 0 | 0 | 41.027 | 0 | 0 | 0 |
| BRHIP2000312 | 0 | 0 | 0 | 9.205 | 0 | 6.534 | 0 |
| BRHIP2000534 | 0 | 2.402 | 0 | 0 | 0 | 0 | 0 |
| BRHIP2000553 | 0 | 0 | 0 | 1.824 | 0 | 2.589 | 0 |
| BRHIP2000920 | 0 | 0 | 0 | 25.999 | 0 | 0 | 0 |
| BRHIP2001099 | 0 | 0 | 0 | 4.920 | 0 | 0 | 0 |
| BRHIP2001886 | 0 | 0 | 0 | 0 | 0 | 49.688 | 0 |
| BRHIP2002143 | 0 | 0 | 0 | 41.027 | 0 | 0 | 0 |
| BRHIP2002339 | 0 | 0 | 0 | 0 | 0 | 15.815 | 0 |
| BRHIP2003062 | 0 | 0 | 0 | 6.742 | 0 | 0 | 0 |
| BRHIP2004359 | 0 | 0 | 0 | 34.560 | 0 | 0 | 0 |
| BRHIP2005010 | 0 | 0 | 0 | 11.189 | 56.963 | 0 | 0 |
| BRHIP2005271 | 0 | 0 | 0 | 0 | 0 | 7.137 | 0 |
| BRHIP2005752 | 0 | 0 | 0 | 41.027 | 0 | 0 | 0 |
| BRHIP2007305 | 0 | 7.946 | 0 | 0 | 0 | 3.422 | 0 |
| BRHIP2007741 | 0 | 0 | 0 | 3.696 | 0 | 8.745 | 0 |
| BRHIP2008607 | 0 | 0 | 0 | 25.490 | 0 | 0 | 0 |
| BRHIP2009019 | 0 | 0 | 0 | 41.027 | 0 | 0 | 0 |
| BRHIP2010217 | 0 | 0 | 0 | 0 | 0 | 5.627 | 0 |
| BRHIP2010487 | 0 | 0 | 0 | 0 | 0 | 4.144 | 0 |
| BRHIP2010571 | 0 | 0 | 0 | 21.859 | 0 | 15.515 | 0 |
| BRHIP2010723 | 0 | 0 | 0 | 0 | 0 | 49.688 | 0 |
| BRHIP2011120 | 0 | 0 | 0 | 32.686 | 0 | 7.734 | 0 |
| BRHIP2011491 | 0 | 0 | 0 | 0 | 8.960 | 0 | 0 |
| BRHIP2011576 | 0 | 0 | 0 | 13.607 | 0 | 0 | 0 |
| BRHIP2013699 | 0 | 0 | 0 | 15.145 | 0 | 0 | 0 |
| BRHIP2014228 | 0 | 0 | 0 | 10.447 | 0 | 0 | 0 |
| BRHIP2015153 | 0 | 0 | 0 | 14.222 | 0 | 10.095 | 0 |
| BRHIP2015224 | 0 | 0 | 0 | 0 | 0 | 9.167 | 0 |
| BRHIP2015245 | 0 | 0 | 0 | 5.055 | 0 | 2.392 | 0 |
| BRHIP2015679 | 0 | 0 | 0 | 3.561 | 0 | 0 | 0 |
| BRHIP2017642 | 0 | 0 | 0 | 0 | 0 | 13.013 | 0 |
| BRHIP2017945 | 0 | 22.622 | 0 | 0 | 0 | 0 | 0 |
| BRHIP2018712 | 0 | 0 | 0 | 0 | 0 | 6.122 | 0 |
| BRHIP2018719 | 0 | 0 | 0 | 0 | 0 | 49.688 | 0 |
| BRHIP2019186 | 0 | 0 | 0 | 0 | 0 | 3.977 | 0 |
| BRHIP2019494 | 0 | 0 | 0 | 25.807 | 0 | 0 | 0 |
| BRHIP2019819 | 0 | 0 | 0 | 30.770 | 0 | 0 | 0 |
| BRHIP2020573 | 0 | 0 | 0 | 6.423 | 0 | 0 | 0 |
| BRHIP2020622 | 0 | 0 | 0 | 0 | 0 | 23.313 | 0 |
| BRHIP2020799 | 0 | 0 | 0 | 3.592 | 0 | 15.298 | 0 |
| BRHIP2021495 | 0 | 0 | 0 | 4.552 | 46.351 | 0 | 0 |
| BRHIP2021762 | 0 | 19.554 | 0 | 7.910 | 0 | 0 | 0 |
| BRHIP2021858 | 0 | 0 | 0 | 4.750 | 0 | 3.372 | 0 |
| BRHIP2021870 | 0 | 0 | 0 | 9.454 | 0 | 0 | 0 |
| BRHIP2022054 | 0 | 0 | 0 | 1.748 | 0 | 0 | 0 |
| BRHIP2022326 | 0 | 0 | 0 | 1.811 | 0 | 1.714 | 0 |
| BRHIP2022986 | 0 | 0 | 0 | 4.039 | 0 | 0 | 0 |
| BRHIP2023071 | 0 | 0 | 0 | 0 | 0 | 49.688 | 0 |
| BRHIP2023309 | 0 | 0 | 0 | 8.280 | 0 | 0 | 0 |
| BRHIP2023762 | 0 | 0 | 0 | 0 | 8.623 | 7.214 | 0 |
| BRHIP2023888 | 0 | 2.583 | 2.838 | 2.089 | 0 | 1.854 | 0 |
| BRHIP2024398 | 0 | 0 | 0 | 11.952 | 0 | 0 | 0 |
| BRHIP2024742 | 0 | 8.754 | 0 | 1.770 | 0 | 1.257 | 0 |
| BRHIP2025448 | 0 | 0 | 0 | 0 | 0 | 30.812 | 0 |
| BRHIP2025679 | 0 | 0 | 0 | 41.027 | 0 | 0 | 0 |
| BRHIP2026061 | 0 | 0 | 0 | 0 | 0 | 30.812 | 0 |
| BRHIP2026288 | 0 | 0 | 0 | 0 | 77.982 | 0 | 0 |
| BRHIP2027077 | 0 | 0 | 0 | 0 | 0 | 2.035 | 0 |
| BRHIP2027685 | 0 | 0 | 0 | 0 | 0 | 49.688 | 0 |
| BRHIP2028187 | 0 | 0 | 0 | 25.807 | 0 | 0 | 0 |
| BRHIP2028583 | 0 | 87.309 | 0 | 0 | 0 | 0 | 0 |
| BRHIP2029643 | 0 | 0 | 0 | 10.603 | 0 | 0 | 0 |
| BRHIP3000111 | 0 | 0 | 0 | 0.727 | 3.699 | 2.063 | 0 |
| BRHIP3000131 | 0 | 0 | 0 | 5.213 | 0 | 0 | 0 |
| BRHIP3000240 | 0 | 0 | 0 | 67.607 | 0 | 0 | 0 |
| BRHIP3000377 | 0 | 80.864 | 0 | 0 | 0 | 0 | 0 |
| BRHIP3000457 | 0 | 0 | 0 | 38.553 | 0 | 0 | 0 |
| BRHIP3001283 | 0 | 0 | 0 | 0 | 0 | 49.688 | 0 |
| BRHIP3001360 | 0 | 0 | 0 | 41.027 | 0 | 0 | 0 |
| BRHIP3002114 | 0 | 0 | 0 | 27.684 | 0 | 0 | 0 |
| BRHIP3002691 | 0 | 0 | 0 | 0 | 0 | 8.357 | 0 |
| BRHIP3003063 | 0 | 0 | 0 | 0 | 0 | 33.130 | 0 |
| BRHIP3003126 | 0 | 0 | 0 | 25.807 | 0 | 0 | 0 |
| BRHIP3003961 | 0 | 0 | 0 | 13.462 | 0 | 0 | 0 |
| BRHIP3003984 | 0 | 0 | 0 | 29.254 | 0 | 0 | 0 |
| BRHIP3004215 | 0 | 0 | 0 | 9.636 | 0 | 13.679 | 0 |
| BRHIP3004968 | 0 | 0 | 0 | 23.879 | 0 | 0 | 0 |
| BRHIP3005574 | 0 | 0 | 0 | 10 | 0 | 0 | 0 |
| BRHIP3005673 | 0 | 0 | 0 | 0 | 0 | 25.956 | 0 |
| BRHIP3005801 | 0 | 0 | 0 | 13.302 | 0 | 0 | 0 |
| BRHIP3006717 | 0 | 0 | 0 | 0 | 6.150 | 5.145 | 0 |
| BRHIP3007223 | 0 | 0 | 0 | 1.431 | 0 | 0 | 0 |
| BRHIP3007586 | 0 | 0 | 0 | 7.348 | 0 | 3.477 | 0 |
| BRHIP3007640 | 0 | 0 | 0 | 31.684 | 0 | 0 | 0 |
| BRHIP3008405 | 0 | 0 | 0 | 12.487 | 0 | 0 | 0 |
| BRHIP3012736 | 0 | 0 | 0 | 0 | 0 | 66.389 | 0 |
| BRHIP3014675 | 0 | 0 | 0 | 26.918 | 0 | 0 | 0 |
| BRHIP3017146 | 0 | 0 | 0 | 0 | 0 | 33.057 | 0 |
| BRHIP3017855 | 0 | 0 | 0 | 13.588 | 0 | 0 | 0 |
| BRHIP3018278 | 0 | 0 | 0 | 27.684 | 0 | 0 | 0 |
| BRHIP3020046 | 0 | 0 | 0 | 0 | 0 | 1.021 | 0 |
| BRHIP3021019 | 0 | 0 | 0 | 0 | 0 | 7.803 | 0 |
| BRHIP3026052 | 0 | 0 | 0 | 0 | 54.140 | 0 | 0 |
| BRHIP3027594 | 0 | 0 | 0 | 0 | 0 | 39.173 | 0 |
| BRSSN2000097 | 0 | 48.599 | 0 | 0 | 0 | 0 | 0 |
| BRSSN2000293 | 0 | 0 | 0 | 2.328 | 0 | 3.304 | 0 |
| BRSSN2000295 | 0 | 0 | 0 | 9.831 | 0 | 0 | 0 |
| BRSSN2000312 | 0 | 0 | 0 | 7.636 | 0 | 21.682 | 0 |
| BRSSN2000498 | 0 | 7.680 | 0 | 1.553 | 3.954 | 4.410 | 0 |
| BRSSN2000561 | 0 | 0 | 0 | 0 | 0 | 12.636 | 0 |
| BRSSN2000566 | 0 | 0 | 0 | 6.905 | 17.576 | 9.802 | 0 |
| BRSSN2000832 | 0 | 0 | 0 | 8.545 | 0 | 0 | 0 |
| BRSSN2001758 | 0 | 0 | 0 | 0 | 33.969 | 9.472 | 0 |
| BRSSN2001869 | 0 | 0 | 0 | 2.142 | 0 | 0 | 0 |
| BRSSN2003012 | 0 | 0 | 0 | 0 | 15.631 | 0 | 0 |
| BRSSN2004496 | 0 | 0 | 0 | 0 | 0 | 21.304 | 0 |
| BRSSN2006611 | 0 | 0 | 0 | 0 | 0 | 21.304 | 0 |
| BRSSN2006892 | 0 | 0 | 0 | 10.990 | 0 | 0 | 0 |
| BRSSN2007338 | 0 | 0 | 0 | 0 | 26.707 | 0 | 0 |
| BRSSN2009518 | 0 | 0 | 0 | 0 | 0 | 1.736 | 0 |
| BRSSN2010587 | 0 | 0 | 0 | 16.015 | 0 | 0 | 0 |
| BRSSN2010596 | 0 | 0 | 0 | 0 | 43.310 | 12.077 | 0 |
| BRSSN2011262 | 0 | 0 | 0 | 2.000 | 0 | 0 | 0 |
| BRSSN2011738 | 0 | 0 | 0 | 7.465 | 0 | 0 | 0 |
| BRSSN2011843 | 0 | 0 | 0 | 8.495 | 0 | 0 | 0 |
| BRSSN2013696 | 0 | 0 | 0 | 12.675 | 0 | 0 | 0 |
| BRSSN2013733 | 0 | 0 | 0 | 0 | 0 | 21.304 | 0 |
| BRSSN2014294 | 0 | 65.348 | 0 | 0 | 0 | 0 | 0 |
| BRSSN2014299 | 0 | 0 | 0 | 2.623 | 0 | 0 | 0 |
| BRSSN2014610 | 0 | 0 | 0 | 5.068 | 0 | 3.597 | 0 |
| BRSSN2014685 | 0 | 0 | 0 | 0 | 0 | 14.308 | 0 |
| BRSSN2015199 | 0 | 0 | 0 | 16.015 | 0 | 0 | 0 |
| BRSSN2015238 | 0 | 0 | 0 | 4.859 | 0 | 0 | 0 |
| BRSSN2015493 | 0 | 0 | 0 | 7.783 | 0 | 0 | 0 |
| BRSSN2018447 | 0 | 0 | 0 | 4.638 | 0 | 6.585 | 0 |
| BRSTN1000083 | 0 | 0 | 0 | 1.360 | 0 | 1.930 | 0 |
| BRSTN2000058 | 0 | 0 | 0 | 3.424 | 0 | 2.431 | 0 |
| BRSTN2000220 | 0 | 0 | 0 | 0 | 0 | 20.742 | 0 |
| BRSTN2006580 | 0 | 0 | 0 | 16.447 | 0 | 0 | 0 |
| BRSTN2008052 | 0 | 0 | 0 | 15.541 | 0 | 0 | 0 |
| BRSTN2010089 | 0 | 0 | 0 | 4.683 | 0 | 0 | 0 |
| BRSTN2010107 | 0 | 0 | 0 | 0.950 | 6.044 | 6.067 | 0 |
| BRSTN2010750 | 0 | 0 | 0 | 7.220 | 0 | 30.747 | 0 |
| BRSTN2011597 | 0 | 0 | 0 | 16.447 | 0 | 0 | 0 |
| BRSTN2011961 | 0 | 0 | 2.233 | 3.083 | 0 | 0 | 0 |
| BRSTN2012069 | 1.482 | 2.124 | 0.073 | 0.517 | 0.718 | 0.029 | 7.145 |
| BRSTN2012089 | 0 | 0 | 0 | 4.117 | 20.959 | 5.845 | 0 |
| BRSTN2012174 | 0 | 2.839 | 0 | 1.292 | 0.731 | 0.611 | 0 |
| BRSTN2012451 | 0 | 0 | 0 | 0 | 0 | 0.832 | 0 |
| BRSTN2013502 | 0 | 0 | 0 | 6.900 | 0 | 0 | 0 |
| BRSTN2013931 | 0 | 0 | 0 | 0.686 | 0 | 1.947 | 0 |
| BRSTN2015015 | 0 | 0 | 0 | 19.897 | 0 | 0 | 0 |
| BRSTN2015889 | 0 | 27.188 | 0 | 5.499 | 0 | 7.806 | 0 |
| BRSTN2015978 | 0 | 0 | 0 | 0.991 | 5.372 | 3.057 | 22.920 |
| BRSTN2016470 | 0 | 0 | 3.376 | 7.146 | 7.909 | 0.441 | 0 |
| BRSTN2016992 | 0 | 3.454 | 0 | 5.588 | 40.898 | 4.958 | 0 |
| BRTHA1000021 | 0 | 0 | 0 | 24.379 | 0 | 0 | 0 |
| BRTHA1000311 | 0 | 0 | 0 | 10.472 | 0 | 14.866 | 0 |
| BRTHA2001812 | 0 | 59.819 | 0 | 0 | 0 | 0 | 0 |
| BRTHA2005013 | 0 | 78.321 | 0 | 0 | 0 | 0 | 0 |
| BRTHA2005864 | 0 | 0 | 0 | 3.455 | 0 | 0 | 0 |
| BRTHA2007998 | 0 | 0 | 0 | 0 | 0 | 1.738 | 0 |
| BRTHA2008955 | 0 | 0 | 0 | 39.025 | 0 | 0 | 0 |
| BRTHA2009486 | 0 | 76.725 | 0 | 0 | 0 | 0 | 0 |
| BRTHA2011194 | 0 | 0 | 0 | 39.025 | 0 | 0 | 0 |
| BRTHA2011641 | 0 | 0 | 0 | 0 | 0 | 47.605 | 0 |
| BRTHA2013054 | 0 | 0 | 0 | 4.264 | 0 | 6.053 | 0 |
| BRTHA2013540 | 0 | 0 | 0 | 0 | 0 | 34.151 | 0 |
| BRTHA2016577 | 0 | 0 | 0 | 0 | 0 | 4.755 | 0 |
| BRTHA2026071 | 0 | 0 | 0 | 0 | 0 | 12.368 | 0 |
| BRTHA2033155 | 0 | 0 | 0 | 9.056 | 0 | 4.285 | 0 |
| BRTHA2035743 | 0 | 0 | 0 | 4.816 | 0 | 0 | 0 |
| BRTHA3000789 | 0 | 0 | 0 | 25.001 | 0 | 0 | 0 |
| BRTHA3002427 | 0 | 0 | 0 | 2.029 | 0 | 5.761 | 0 |
| BRTHA3003023 | 0 | 0 | 0 | 0 | 0 | 4.073 | 0 |
| BRTHA3003490 | 0 | 0 | 0 | 2.304 | 0 | 0 | 0 |
| BRTHA3003704 | 0 | 0 | 0 | 39.025 | 0 | 0 | 0 |
| BRTHA3003736 | 0 | 0 | 0 | 1.527 | 0 | 0 | 0 |
| BRTHA3004307 | 0 | 0 | 0 | 10.691 | 0 | 6.071 | 0 |
| BRTHA3004432 | 0 | 0 | 0 | 0 | 0 | 32.330 | 0 |
| BRTHA3004475 | 0 | 0 | 0 | 0 | 0 | 47.605 | 0 |
| BRTHA3007685 | 0 | 0 | 0 | 39.025 | 0 | 0 | 0 |
| BRTHA3009090 | 0 | 0 | 0 | 8.354 | 0 | 11.859 | 0 |
| BRTHA3009858 | 0 | 0 | 0 | 16.462 | 0 | 0 | 0 |
| BRTHA3010530 | 0 | 0 | 0 | 19.846 | 0 | 0 | 0 |
| BRTHA3021708 | 0 | 0 | 0 | 39.025 | 0 | 0 | 0 |
| BRTHA3021971 | 0 | 0 | 0 | 0 | 0 | 1.956 | 0 |
| BRTHA3023403 | 0 | 0 | 0 | 0 | 0 | 7.485 | 0 |
| BRTHA3026507 | 0 | 0 | 0 | 4.960 | 0 | 0 | 0 |
| BRTHA3026916 | 0 | 0 | 0 | 0 | 0 | 47.605 | 0 |
| CD34C3000252 | 0 | 5.761 | 0 | 0.583 | 0 | 1.654 | 0 |
| CHONS2000172 | 0 | 0 | 0 | 0 | 13.499 | 0 | 0 |
| CHONS2002829 | 0 | 0 | 0 | 1.160 | 0 | 1.646 | 0 |
| COLON2000470 | 0 | 49.994 | 0 | 0 | 0 | 0 | 0 |
| COLON2001721 | 0 | 0 | 0 | 19.633 | 0 | 11.149 | 0 |
| CTONG1000010 | 0 | 0 | 0 | 0 | 0 | 6.532 | 0 |
| CTONG1000052 | 0 | 0 | 0 | 0.858 | 0 | 1.218 | 0 |
| CTONG1000087 | 0 | 0 | 0 | 0 | 0 | 3.161 | 0 |
| CTONG1000088 | 91.578 | 0 | 0 | 0 | 0 | 0 | 0 |
| CTONG1000094 | 0 | 0 | 0 | 1.106 | 1.407 | 2.747 | 0 |
| CTONG1000175 | 0 | 11.817 | 0 | 0 | 0 | 0 | 0 |
| CTONG1000218 | 0 | 0 | 0 | 1.025 | 1.740 | 0.970 | 0 |
| CTONG1000241 | 0 | 0 | 0 | 0 | 0 | 4.275 | 0 |
| CTONG2000063 | 0 | 0 | 0 | 1.519 | 0 | 4.314 | 0 |
| CTONG2000201 | 0 | 27.210 | 0 | 0 | 0 | 0 | 0 |
| CTONG2000508 | 0 | 11.086 | 0 | 1.682 | 0 | 3.183 | 0 |
| CTONG2001598 | 0 | 0 | 0 | 27.592 | 0 | 0 | 0 |
| CTONG2001748 | 0 | 0 | 0 | 1.484 | 0 | 6.319 | 0 |
| CTONG2002270 | 0 | 0 | 0 | 5.647 | 0 | 1.603 | 0 |
| CTONG2002520 | 0 | 0 | 0 | 0 | 0 | 8.898 | 0 |
| CTONG2002709 | 0 | 0 | 16.709 | 1.538 | 0 | 0 | 0 |
| CTONG2002744 | 0 | 0 | 0 | 0.836 | 0 | 1.187 | 0 |
| CTONG2002766 | 0 | 0 | 0 | 16.772 | 0 | 11.905 | 0 |
| CTONG2002803 | 0 | 0 | 0 | 2.090 | 0 | 2.967 | 0 |
| CTONG2002841 | 0 | 0 | 0 | 15.036 | 0 | 0 | 0 |
| CTONG2003094 | 0 | 0 | 0 | 1.300 | 0 | 3.692 | 0 |
| CTONG2003298 | 0 | 0 | 0 | 0.515 | 0 | 2.194 | 0 |
| CTONG2003524 | 0 | 0 | 0 | 3.431 | 0 | 3.247 | 0 |
| CTONG2003699 | 0 | 0 | 0 | 0 | 0 | 35.106 | 0 |
| CTONG2004115 | 0 | 0 | 0 | 8.483 | 0 | 0 | 0 |
| CTONG2004423 | 0 | 0 | 0 | 8.156 | 0 | 0 | 0 |
| CTONG2004487 | 0 | 0 | 0 | 6.714 | 0 | 4.765 | 0 |
| CTONG2005028 | 0 | 0 | 0 | 14.575 | 0 | 0 | 0 |
| CTONG2005553 | 0 | 0 | 0 | 0.508 | 0 | 0.722 | 0 |
| CTONG2005615 | 0 | 0 | 0 | 3.375 | 0 | 0 | 0 |
| CTONG2006004 | 0 | 7.408 | 0 | 0.749 | 0 | 0 | 0 |
| CTONG2006235 | 0 | 0 | 0 | 1.163 | 5.919 | 4.952 | 0 |
| CTONG2006562 | 0 | 0 | 0 | 4.969 | 0 | 1.411 | 0 |
| CTONG2006611 | 0 | 0 | 0 | 0 | 0 | 7.276 | 0 |
| CTONG2006709 | 0 | 0 | 0 | 1.835 | 0 | 0 | 0 |
| CTONG2006932 | 0 | 0 | 0 | 0.781 | 0 | 1.109 | 0 |
| CTONG2007007 | 0 | 0 | 0 | 0 | 3.364 | 0 | 0 |
| CTONG2007072 | 0 | 0 | 0 | 0 | 7.773 | 0 | 0 |
| CTONG2007078 | 0 | 0 | 0 | 5.442 | 0 | 1.288 | 0 |
| CTONG2007168 | 0 | 0 | 0 | 12.872 | 0 | 0 | 0 |
| CTONG2007400 | 0 | 0 | 0 | 0 | 0 | 11.594 | 0 |
| CTONG2007474 | 0 | 0 | 0 | 7.539 | 0 | 0 | 0 |
| CTONG2007500 | 0 | 5.278 | 0 | 0 | 0 | 5.304 | 0 |
| CTONG2007681 | 0 | 0 | 0 | 26.233 | 0 | 0 | 0 |
| CTONG2007776 | 0 | 0 | 0 | 6.038 | 0 | 0 | 0 |
| CTONG2008398 | 0 | 5.366 | 0 | 0.543 | 0 | 2.311 | 0 |
| CTONG2008405 | 0 | 0 | 0 | 0 | 0 | 22.174 | 0 |
| CTONG2008506 | 0 | 0 | 0 | 3.339 | 0 | 2.844 | 0 |
| CTONG2008689 | 0 | 0 | 0 | 14.832 | 0 | 0 | 0 |
| CTONG2008720 | 0 | 0 | 0 | 0 | 0 | 27.203 | 0 |
| CTONG2009534 | 0 | 0 | 0 | 16.375 | 0 | 0 | 0 |
| CTONG2010348 | 0 | 0 | 0 | 7.541 | 0 | 1.784 | 0 |
| CTONG2010408 | 0 | 0 | 0 | 12.163 | 0 | 0 | 0 |
| CTONG2010803 | 0 | 79.029 | 0 | 0 | 0 | 0 | 0 |
| CTONG2010821 | 0 | 0 | 0 | 3.550 | 0 | 1.440 | 0 |
| CTONG2011825 | 0 | 0 | 0 | 6.093 | 0 | 0 | 0 |
| CTONG2012001 | 0 | 0 | 0 | 0 | 0 | 14.410 | 0 |
| CTONG2012101 | 0 | 0 | 0 | 0 | 0 | 15.907 | 0 |
| CTONG2012401 | 0 | 0 | 0 | 0 | 0 | 4.239 | 0 |
| CTONG2012452 | 0 | 2.499 | 2.746 | 1.516 | 3.860 | 1.435 | 0 |
| CTONG2012453 | 0 | 0 | 0 | 5.345 | 0 | 0 | 0 |
| CTONG2012745 | 0 | 38.932 | 0 | 0 | 0 | 0 | 0 |
| CTONG2012847 | 0 | 0 | 0 | 1.222 | 0 | 0 | 0 |
| CTONG2012879 | 0 | 11.934 | 0 | 0 | 0 | 0 | 0 |
| CTONG2013348 | 0 | 0 | 0 | 0 | 0 | 5.543 | 0 |
| CTONG2013907 | 0 | 0 | 0 | 4.591 | 0 | 2.172 | 0 |
| CTONG2013934 | 0 | 0 | 0 | 24.615 | 0 | 0 | 0 |
| CTONG2014280 | 0 | 0 | 0 | 0 | 0 | 25.331 | 0 |
| CTONG2014369 | 0 | 0 | 0 | 2.954 | 0 | 0 | 0 |
| CTONG2014898 | 0 | 0 | 0 | 4.094 | 0 | 0 | 0 |
| CTONG2015091 | 0 | 0 | 0 | 0.576 | 0 | 0 | 0 |
| CTONG2015815 | 0 | 0 | 0 | 6.244 | 0 | 0 | 0 |
| CTONG2016185 | 0 | 0 | 0 | 3.690 | 0 | 2.619 | 0 |
| CTONG2016575 | 0 | 0 | 0 | 1.059 | 0 | 3.507 | 0 |
| CTONG2016824 | 0 | 0 | 0 | 3.021 | 0 | 0 | 0 |
| CTONG2016869 | 0 | 0 | 0 | 5.624 | 0 | 2.661 | 0 |
| CTONG2016931 | 0 | 0 | 0 | 2.166 | 0 | 0 | 0 |
| CTONG2017094 | 0 | 0 | 0 | 9.521 | 0 | 0 | 0 |
| CTONG2017500 | 0 | 0 | 0 | 0 | 0 | 2.669 | 0 |
| CTONG2017998 | 0 | 35.166 | 0 | 3.556 | 0 | 0 | 0 |
| CTONG2018211 | 0 | 0 | 0 | 14.524 | 0 | 0 | 0 |
| CTONG2018343 | 0 | 0 | 0 | 0 | 0 | 15.348 | 0 |
| CTONG2018632 | 0 | 0 | 0 | 5.677 | 0 | 0 | 0 |
| CTONG2018637 | 0 | 0 | 0 | 13.969 | 0 | 0 | 0 |
| CTONG2018739 | 0 | 0 | 0 | 24.755 | 0 | 3.905 | 0 |
| CTONG2018843 | 0 | 0 | 0 | 0 | 0 | 11.186 | 0 |
| CTONG2018898 | 0 | 0 | 0 | 0.684 | 0 | 5.338 | 0 |
| CTONG2019029 | 0 | 0 | 0 | 0 | 0 | 8.154 | 0 |
| CTONG2020374 | 0 | 0 | 0 | 11.030 | 0 | 0 | 0 |
| CTONG2020484 | 0 | 0 | 0 | 0 | 2.124 | 5.923 | 0 |
| CTONG2020582 | 0 | 0 | 0 | 1.362 | 0 | 3.867 | 0 |
| CTONG2021289 | 0 | 0 | 0 | 0 | 0 | 10.367 | 0 |
| CTONG2022835 | 0 | 0 | 0 | 1.218 | 0 | 0 | 0 |
| CTONG2024031 | 0 | 0 | 0 | 3.669 | 0 | 0 | 0 |
| CTONG2027263 | 0 | 0 | 0 | 11.688 | 0 | 0 | 0 |
| CTONG2027959 | 0 | 0 | 0 | 27.592 | 0 | 0 | 0 |
| CTONG2028124 | 0 | 0 | 0 | 2.854 | 0 | 0.506 | 0 |
| CTONG2028208 | 0 | 0 | 0 | 0 | 12.795 | 0 | 0 |
| CTONG2028309 | 0 | 0 | 0 | 10.419 | 0 | 0 | 0 |
| CTONG3000657 | 0 | 0 | 0 | 5.508 | 0 | 0 | 0 |
| CTONG3001746 | 0 | 0 | 0 | 0 | 0 | 14.414 | 0 |
| CTONG3002835 | 0 | 7.711 | 0 | 1.560 | 0 | 1.107 | 0 |
| CTONG3005813 | 0 | 0 | 0 | 27.592 | 0 | 0 | 0 |
| CTONG3008894 | 0 | 0 | 0 | 1.032 | 0 | 4.395 | 0 |
| CTONG3009239 | 0 | 0 | 0 | 0 | 0 | 4.364 | 0 |
| CTONG3009328 | 0 | 0 | 0 | 0 | 43.334 | 0 | 0 |
| D30ST1000270 | 0 | 0 | 0 | 0 | 0 | 7.810 | 0 |
| D60ST2000358 | 0 | 0 | 0 | 0 | 0 | 1.432 | 0 |
| D60ST2000464 | 0 | 0 | 0 | 0 | 0 | 2.208 | 0 |
| D90ST2002608 | 0 | 0 | 0 | 4.744 | 0 | 0 | 0 |
| D90ST2003108 | 0 | 34.233 | 0 | 0 | 0 | 0 | 0 |
| D90ST2003580 | 0 | 0 | 0 | 0 | 0 | 6.953 | 0 |
| DFNES1000083 | 0 | 0 | 0 | 0 | 8.128 | 0 | 0 |
| DFNES2000212 | 0 | 0 | 0 | 0 | 0 | 14.601 | 0 |
| DFNES2000268 | 0 | 7.750 | 0 | 0 | 0 | 0 | 0 |
| DFNES2000335 | 0 | 0 | 0 | 3.363 | 0 | 0 | 0 |
| DFNES2000457 | 0 | 0 | 0 | 6.304 | 0 | 0 | 0 |
| DFNES2000526 | 0 | 0 | 0 | 1.961 | 0 | 2.785 | 0 |
| DFNES2001096 | 0 | 0 | 0 | 0 | 27.690 | 0 | 0 |
| DFNES2001829 | 0 | 0 | 0 | 6.550 | 0 | 0 | 0 |
| DFNES2003192 | 0 | 0 | 0 | 0 | 0 | 3.018 | 0 |
| DFNES2004371 | 0 | 0 | 0 | 1.120 | 0 | 1.590 | 0 |
| DFNES2005540 | 0 | 0 | 23.312 | 0 | 0 | 0 | 0 |
| DFNES2005690 | 0 | 0 | 0 | 3.603 | 0 | 10.231 | 0 |
| DFNES2007634 | 0 | 0 | 0 | 2.523 | 0 | 6.269 | 0 |
| DFNES2008088 | 0 | 0 | 20.274 | 0 | 0 | 0 | 0 |
| DFNES2008160 | 0 | 0 | 0 | 19.078 | 0 | 4.514 | 0 |
| DFNES2009482 | 0 | 0 | 0 | 1.007 | 0 | 1.429 | 0 |
| DFNES2011380 | 0 | 0 | 0 | 0 | 0 | 11.778 | 0 |
| DFNES2011499 | 0 | 0 | 0 | 4.403 | 0 | 0 | 0 |
| FCBBF1000024 | 0 | 0 | 0 | 0 | 0 | 6.637 | 0 |
| FCBBF1000027 | 0 | 0 | 0 | 0.520 | 1.324 | 1.845 | 0 |
| FCBBF1000053 | 0 | 0 | 0 | 0 | 0 | 2.727 | 0 |
| FCBBF1000063 | 0 | 0 | 0 | 0 | 0 | 6.026 | 0 |
| FCBBF1000077 | 0 | 0 | 0 | 0 | 0 | 0.816 | 0 |
| FCBBF1000115 | 0 | 0 | 0 | 14.427 | 0 | 0 | 0 |
| FCBBF1000121 | 0 | 0 | 0 | 0 | 0 | 10.010 | 0 |
| FCBBF1000125 | 0 | 0 | 0 | 11.056 | 0 | 31.390 | 0 |
| FCBBF1000139 | 0 | 0 | 0 | 3.722 | 0 | 1.761 | 0 |
| FCBBF1000197 | 0 | 0 | 0 | 3.033 | 0 | 4.305 | 0 |
| FCBBF1000280 | 0 | 0 | 43.560 | 0 | 0 | 0 | 0 |
| FCBBF1000294 | 0 | 0 | 8.303 | 5.349 | 0 | 1.085 | 0 |
| FCBBF1000367 | 0 | 0 | 0 | 0 | 0 | 1.531 | 0 |
| FCBBF1000403 | 0 | 0 | 0 | 0 | 0 | 8.451 | 0 |
| FCBBF1000466 | 0 | 0 | 0 | 3.164 | 0 | 0.642 | 0 |
| FCBBF1000476 | 0 | 0 | 0 | 6.164 | 0 | 0 | 0 |
| FCBBF1000509 | 0 | 0 | 0 | 0 | 0 | 13.160 | 0 |
| FCBBF1000556 | 0 | 0 | 0 | 8.323 | 3.852 | 4.296 | 0 |
| FCBBF1000563 | 0 | 0 | 0 | 2.132 | 0 | 4.540 | 0 |
| FCBBF1000574 | 0 | 0 | 0 | 2.947 | 0 | 10.458 | 0 |
| FCBBF1000671 | 0 | 0 | 0 | 9.717 | 0 | 0 | 0 |
| FCBBF1000675 | 0 | 0 | 0 | 9.013 | 0 | 12.795 | 0 |
| FCBBF1000687 | 0 | 0 | 0 | 18.394 | 0 | 8.704 | 0 |
| FCBBF1000732 | 0 | 19.654 | 0 | 1.987 | 0 | 0 | 0 |
| FCBBF1000760 | 0 | 4.596 | 0 | 0.465 | 0 | 0 | 0 |
| FCBBF2000038 | 0 | 0 | 0 | 0.953 | 9.707 | 2.707 | 0 |
| FCBBF2000199 | 0 | 0 | 0 | 3.971 | 0 | 2.819 | 0 |
| FCBBF2000362 | 0 | 0 | 0 | 11.882 | 0 | 16.868 | 0 |
| FCBBF2000566 | 0 | 0 | 0 | 0 | 0 | 3.745 | 0 |
| FCBBF2000733 | 0 | 0 | 0 | 0 | 0 | 7.986 | 0 |
| FCBBF2000885 | 0 | 0 | 0 | 0 | 0 | 3.093 | 0 |
| FCBBF2001183 | 0 | 0 | 0 | 5.869 | 5.975 | 9.998 | 0 |
| FCBBF2001211 | 0 | 0 | 0 | 0 | 0 | 6.457 | 0 |
| FCBBF2001291 | 0 | 0 | 0 | 2.701 | 0 | 0 | 0 |
| FCBBF2001299 | 0 | 0 | 0 | 16.114 | 0 | 0 | 0 |
| FCBBF2001538 | 0 | 0 | 0 | 4.326 | 0 | 4.606 | 0 |
| FCBBF2001594 | 0 | 0 | 0 | 21.593 | 0 | 7.664 | 0 |
| FCBBF2002349 | 0 | 0 | 0 | 2.802 | 0 | 0 | 0 |
| FCBBF2002626 | 0 | 0 | 0 | 27.755 | 0 | 0 | 0 |
| FCBBF2002801 | 0 | 0 | 0 | 1.842 | 0 | 2.615 | 0 |
| FCBBF2003567 | 0 | 0 | 0 | 0 | 23.554 | 13.136 | 0 |
| FCBBF2004066 | 0 | 0 | 0 | 5.723 | 21.853 | 6.094 | 0 |
| FCBBF2005428 | 0 | 0 | 0 | 27.755 | 0 | 0 | 0 |
| FCBBF2005909 | 0 | 0 | 0 | 4.430 | 0 | 0 | 0 |
| FCBBF2005966 | 0 | 0 | 0 | 13.444 | 0 | 0 | 0 |
| FCBBF2006781 | 0 | 44.415 | 0 | 0 | 0 | 6.376 | 0 |
| FCBBF2007556 | 0 | 64.144 | 0 | 0 | 0 | 0 | 0 |
| FCBBF2007840 | 0 | 0 | 0 | 8.840 | 0 | 0 | 0 |
| FCBBF3000115 | 0 | 0 | 0 | 14.163 | 0 | 4.021 | 0 |
| FCBBF3000168 | 0 | 0 | 0 | 5.779 | 0 | 0 | 0 |
| FCBBF3000175 | 0 | 0 | 0 | 0 | 15.172 | 12.693 | 0 |
| FCBBF3000228 | 0 | 0 | 0 | 6.361 | 0 | 0 | 0 |
| FCBBF3000269 | 0 | 0 | 0 | 43.451 | 0 | 0 | 0 |
| FCBBF3000388 | 0 | 0 | 0 | 0 | 0 | 2.489 | 0 |
| FCBBF3000434 | 0 | 0 | 0 | 14.454 | 6.690 | 3.731 | 0 |
| FCBBF3001081 | 0 | 0 | 0 | 1.864 | 9.488 | 2.646 | 0 |
| FCBBF3001470 | 0 | 9.528 | 0 | 0 | 0 | 0 | 0 |
| FCBBF3001632 | 0 | 0 | 0 | 1.096 | 0 | 0 | 0 |
| FCBBF3001657 | 0 | 0 | 0 | 11.720 | 0 | 4.754 | 0 |
| FCBBF3001818 | 0 | 0 | 0 | 6.465 | 0 | 0 | 0 |
| FCBBF3001855 | 0 | 0 | 0 | 1.988 | 0 | 0 | 0 |
| FCBBF3001977 | 0 | 0 | 0 | 10.573 | 0 | 15.010 | 0 |
| FCBBF3003800 | 0 | 0 | 0 | 5.871 | 0 | 1.985 | 0 |
| FCBBF3004323 | 0 | 0 | 0 | 0 | 0 | 5.551 | 0 |
| FCBBF3004473 | 0 | 0 | 0 | 0 | 0 | 1.158 | 0 |
| FCBBF3005330 | 0 | 0 | 0 | 2.458 | 0 | 0 | 0 |
| FCBBF3006821 | 0 | 0 | 0 | 8.115 | 0 | 5.760 | 0 |
| FCBBF3007631 | 0 | 0 | 0 | 15.506 | 0 | 0 | 0 |
| FCBBF3007859 | 0 | 0 | 0 | 13.832 | 0 | 13.091 | 0 |
| FCBBF3007860 | 0 | 0 | 0 | 0 | 0 | 20.391 | 0 |
| FCBBF3008100 | 0 | 0 | 0 | 0 | 53.906 | 0 | 0 |
| FCBBF3008153 | 0 | 0 | 0 | 7.766 | 0 | 5.513 | 0 |
| FCBBF3008689 | 0 | 65.513 | 0 | 0 | 0 | 0 | 0 |
| FCBBF3009069 | 0 | 0 | 0 | 6.357 | 0 | 22.561 | 0 |
| FCBBF3009526 | 0 | 0 | 0 | 0 | 0 | 23.808 | 0 |
| FCBBF3009541 | 0 | 2.893 | 0 | 0.293 | 0 | 0.415 | 0 |
| FCBBF3010012 | 0 | 0 | 0 | 4.893 | 8.303 | 0 | 0 |
| FCBBF3010142 | 0 | 0 | 0 | 10.244 | 0 | 0 | 0 |
| FCBBF3010508 | 0 | 79.163 | 0 | 0 | 0 | 0 | 0 |
| FCBBF3010695 | 0 | 0 | 0 | 1.760 | 0 | 0 | 0 |
| FCBBF3012182 | 0 | 0 | 0 | 0 | 0 | 0 | 99.513 |
| FCBBF3012667 | 0 | 0 | 0 | 0 | 0 | 24.592 | 0 |
| FCBBF3013506 | 0 | 0 | 0 | 16.855 | 0 | 0 | 0 |
| FCBBF3014260 | 0 | 0 | 0 | 0 | 0 | 6.825 | 0 |
| FCBBF3015100 | 0 | 0 | 0 | 14.166 | 0 | 5.028 | 0 |
| FCBBF3016928 | 0 | 0 | 0 | 1.866 | 3.166 | 1.766 | 0 |
| FCBBF3017396 | 0 | 0 | 0 | 4.347 | 0 | 2.057 | 0 |
| FCBBF3017531 | 0 | 22.507 | 0 | 0 | 5.793 | 0 | 0 |
| FCBBF3017918 | 0 | 0 | 0 | 4.647 | 0 | 0 | 0 |
| FCBBF3018453 | 0 | 0 | 0 | 3.279 | 0 | 0 | 0 |
| FCBBF3018796 | 0 | 0 | 0 | 2.203 | 0 | 0 | 0 |
| FCBBF3018826 | 0 | 0 | 0 | 0 | 0 | 9.829 | 0 |
| FCBBF3019320 | 0 | 0 | 0 | 14.030 | 0 | 0 | 0 |
| FCBBF3019569 | 0 | 0 | 0 | 27.755 | 0 | 0 | 0 |
| FCBBF3019714 | 0 | 0 | 0 | 0 | 7.401 | 0 | 0 |
| FCBBF3019839 | 0 | 0 | 0 | 5.316 | 0 | 3.773 | 0 |
| FCBBF3021807 | 0 | 0 | 0 | 0 | 31.333 | 0 | 0 |
| FCBBF3022291 | 0 | 0 | 0 | 27.755 | 0 | 0 | 0 |
| FCBBF3022311 | 0 | 0 | 0 | 16.114 | 0 | 0 | 0 |
| FCBBF3022593 | 0 | 0 | 0 | 0 | 0 | 6.981 | 0 |
| FCBBF3022765 | 0 | 0 | 0 | 0 | 0 | 35.292 | 0 |
| FCBBF3023667 | 0 | 0 | 7.169 | 0.189 | 0 | 1.338 | 0 |
| FCBBF3024002 | 0 | 0 | 0 | 16.112 | 0 | 5.718 | 0 |
| FCBBF3024266 | 0 | 0 | 0 | 0 | 0 | 19.712 | 0 |
| FCBBF3024793 | 0 | 0 | 0 | 11.340 | 0 | 0 | 0 |
| FCBBF3025417 | 0 | 0 | 0 | 0 | 0 | 17.298 | 0 |
| FCBBF3025905 | 0 | 0 | 0 | 11.354 | 0 | 0 | 0 |
| FCBBF3026651 | 0 | 0 | 0 | 5.179 | 0 | 0 | 0 |
| FCBBF3026692 | 0 | 0 | 0 | 11.517 | 0 | 0 | 0 |
| FCBBF3028244 | 0 | 0 | 0 | 3.295 | 3.355 | 3.742 | 0 |
| FCBBF4000017 | 0 | 0 | 0 | 0 | 0 | 8.949 | 0 |
| FCBBF4000142 | 0 | 0 | 0 | 18.164 | 0 | 11.051 | 0 |
| FCBBF4000446 | 0 | 0 | 5.793 | 0 | 0 | 3.027 | 0 |
| FCBBF4000548 | 0 | 0 | 0 | 10.374 | 0 | 14.727 | 0 |
| FCBBF5000165 | 0 | 0 | 0 | 11.682 | 0 | 16.583 | 0 |
| FCBBF5000325 | 0 | 0 | 0 | 0 | 0 | 10.186 | 0 |
| FCBBF5000353 | 0 | 0 | 0 | 0 | 0 | 35.292 | 0 |
| FEBRA1000022 | 0 | 0 | 0 | 11.207 | 0 | 0 | 0 |
| FEBRA1000057 | 0 | 0 | 0 | 4.929 | 6.273 | 0 | 0 |
| FEBRA1000088 | 0 | 0 | 0 | 0 | 0 | 4.300 | 0 |
| FEBRA1000188 | 0 | 0 | 0 | 0 | 0 | 2.109 | 0 |
| FEBRA1000189 | 0 | 0 | 0 | 28.778 | 0 | 0 | 0 |
| FEBRA2000007 | 0 | 0 | 0 | 16.808 | 0 | 0 | 0 |
| FEBRA2000105 | 0 | 0 | 0 | 0.509 | 0 | 0.723 | 0 |
| FEBRA2000129 | 0 | 0 | 0 | 0 | 9.393 | 0 | 0 |
| FEBRA2000210 | 0 | 4.962 | 0 | 0 | 0 | 0 | 0 |
| FEBRA2000377 | 0 | 0 | 0 | 7.100 | 0 | 10.080 | 0 |
| FEBRA2000402 | 0 | 0 | 0 | 0 | 0 | 5.585 | 0 |
| FEBRA2000404 | 0 | 0 | 0 | 7.141 | 0 | 0 | 0 |
| FEBRA2000438 | 0 | 0 | 0 | 6.271 | 0 | 0 | 0 |
| FEBRA2000452 | 0 | 0 | 0 | 4.271 | 0 | 2.021 | 0 |
| FEBRA2000462 | 0 | 0 | 0 | 28.049 | 0 | 0 | 0 |
| FEBRA2000536 | 0 | 0 | 0 | 13.414 | 0 | 15.869 | 0 |
| FEBRA2000581 | 0 | 0 | 0 | 1.694 | 0 | 13.626 | 0 |
| FEBRA2000680 | 0 | 0 | 0 | 33.354 | 0 | 0 | 0 |
| FEBRA2000733 | 5.282 | 2.366 | 0 | 1.316 | 1.218 | 0.340 | 0 |
| FEBRA2000740 | 0 | 7.938 | 0 | 2.408 | 0 | 1.140 | 0 |
| FEBRA2000757 | 0 | 0 | 0 | 0 | 0 | 9.257 | 0 |
| FEBRA2000771 | 0 | 0 | 0 | 0 | 0 | 21.859 | 0 |
| FEBRA2000782 | 0 | 0 | 0 | 36.283 | 0 | 0 | 0 |
| FEBRA2000787 | 0 | 0 | 0 | 2.804 | 0 | 5.971 | 0 |
| FEBRA2000793 | 0 | 0 | 0 | 2.722 | 0 | 0 | 0 |
| FEBRA2000815 | 0 | 0 | 0 | 5.132 | 0 | 3.643 | 0 |
| FEBRA2000877 | 0 | 0 | 0 | 20.195 | 0 | 14.335 | 0 |
| FEBRA2000880 | 0 | 0 | 0 | 7.521 | 0 | 10.677 | 0 |
| FEBRA2000881 | 0 | 0 | 0 | 2.247 | 0 | 0 | 0 |
| FEBRA2000972 | 0 | 0 | 0 | 10.751 | 0 | 0 | 0 |
| FEBRA2001004 | 0 | 0 | 0 | 0 | 0 | 22.288 | 0 |
| FEBRA2001146 | 0 | 0 | 0 | 15.874 | 0 | 0 | 0 |
| FEBRA2001197 | 0 | 0 | 0 | 0 | 0 | 14.203 | 0 |
| FEBRA2001245 | 0 | 0 | 0 | 3.581 | 0 | 10.166 | 0 |
| FEBRA2001294 | 0 | 0 | 0 | 0 | 0 | 2.435 | 0 |
| FEBRA2001334 | 0 | 0 | 0 | 24.490 | 20.779 | 0 | 0 |
| FEBRA2001383 | 0 | 0 | 0 | 7.404 | 0 | 10.511 | 0 |
| FEBRA2001492 | 0 | 0 | 0 | 6.892 | 0 | 3.261 | 0 |
| FEBRA2001571 | 0 | 0 | 0 | 4.465 | 0 | 4.226 | 0 |
| FEBRA2001669 | 0 | 0 | 0 | 2.281 | 0 | 6.476 | 0 |
| FEBRA2001715 | 0 | 0 | 0 | 9.908 | 0 | 4.019 | 0 |
| FEBRA2001745 | 0 | 0 | 0 | 4.447 | 0 | 0 | 0 |
| FEBRA2001752 | 0 | 0 | 0 | 11.179 | 0 | 0 | 0 |
| FEBRA2001814 | 0 | 0 | 0 | 7.512 | 14.341 | 14.663 | 0 |
| FEBRA2001828 | 0 | 0 | 0 | 3.861 | 0 | 0 | 0 |
| FEBRA2001974 | 0 | 0 | 0 | 0 | 0 | 11.740 | 0 |
| FEBRA2001990 | 0 | 0 | 0 | 15.453 | 0 | 7.313 | 0 |
| FEBRA2002027 | 0 | 0 | 0 | 1.798 | 0 | 17.869 | 0 |
| FEBRA2002191 | 0 | 0 | 0 | 0 | 0 | 5.919 | 0 |
| FEBRA2002352 | 0 | 0 | 0 | 4.928 | 0 | 3.498 | 0 |
| FEBRA2002456 | 0 | 0 | 0 | 3.871 | 3.941 | 7.693 | 0 |
| FEBRA2002527 | 0 | 0 | 0 | 0 | 0 | 2.886 | 0 |
| FEBRA2002781 | 0 | 0 | 0 | 43.707 | 0 | 6.894 | 0 |
| FEBRA2002792 | 0 | 0 | 0 | 7.600 | 4.836 | 6.743 | 0 |
| FEBRA2002931 | 0 | 0 | 0 | 1.553 | 0 | 9.924 | 0 |
| FEBRA2002933 | 0 | 0 | 2.854 | 0.263 | 1.337 | 0 | 0 |
| FEBRA2003100 | 0 | 0 | 0 | 0.935 | 0 | 0.664 | 0 |
| FEBRA2003128 | 0 | 0 | 0 | 6.194 | 0 | 2.931 | 0 |
| FEBRA2003258 | 0 | 0 | 0 | 2.008 | 10.223 | 0 | 0 |
| FEBRA2003436 | 0 | 0 | 0 | 0 | 0 | 5.601 | 0 |
| FEBRA2003470 | 0 | 0 | 0 | 0 | 0 | 14.706 | 0 |
| FEBRA2003541 | 0 | 0 | 0 | 0 | 0 | 3.075 | 0 |
| FEBRA2003726 | 0 | 0 | 0 | 0.707 | 3.598 | 1.003 | 0 |
| FEBRA2003750 | 0 | 0 | 0 | 2.591 | 0 | 1.839 | 0 |
| FEBRA2003833 | 0 | 0 | 0 | 7.364 | 0 | 1.742 | 0 |
| FEBRA2003907 | 0 | 0 | 0 | 22.162 | 0 | 0 | 0 |
| FEBRA2003926 | 0 | 0 | 0 | 0.495 | 0 | 1.407 | 0 |
| FEBRA2004042 | 0 | 0 | 0 | 1.506 | 0 | 2.137 | 0 |
| FEBRA2004091 | 0 | 0 | 0 | 15.001 | 0 | 10.648 | 0 |
| FEBRA2004224 | 0 | 0 | 0 | 1.643 | 4.183 | 1.167 | 0 |
| FEBRA2004237 | 0 | 0 | 0 | 53.246 | 0 | 0 | 0 |
| FEBRA2004268 | 0 | 0 | 0 | 12.462 | 0 | 0 | 0 |
| FEBRA2004293 | 0 | 0 | 0 | 1.887 | 0 | 2.679 | 0 |
| FEBRA2004412 | 0 | 0 | 0 | 2.084 | 0 | 0 | 0 |
| FEBRA2004485 | 0 | 0 | 0 | 0 | 25.077 | 6.993 | 0 |
| FEBRA2004620 | 0 | 0 | 75.571 | 0 | 0 | 0 | 0 |
| FEBRA2004628 | 0 | 0 | 0 | 6.074 | 0 | 2.874 | 0 |
| FEBRA2004767 | 0 | 0 | 0 | 36.283 | 0 | 0 | 0 |
| FEBRA2004818 | 0 | 0 | 0 | 6.765 | 4.920 | 10.976 | 0 |
| FEBRA2005079 | 0 | 0 | 0 | 0 | 0 | 16.812 | 0 |
| FEBRA2005114 | 0 | 0 | 0 | 9.525 | 0 | 0 | 0 |
| FEBRA2005361 | 0 | 0 | 0 | 0.497 | 7.592 | 13.408 | 0 |
| FEBRA2005416 | 33.661 | 0 | 0 | 0 | 0 | 0 | 0 |
| FEBRA2005476 | 0 | 0 | 0 | 0 | 0 | 2.624 | 0 |
| FEBRA2005572 | 0 | 0 | 0 | 2.529 | 0 | 0 | 0 |
| FEBRA2005734 | 0 | 0 | 0 | 1.798 | 0 | 0 | 0 |
| FEBRA2005752 | 0 | 0 | 0 | 2.954 | 15.040 | 4.194 | 0 |
| FEBRA2005788 | 0 | 0 | 0 | 0 | 0 | 4.973 | 0 |
| FEBRA2005824 | 0 | 0 | 0 | 1.588 | 16.173 | 4.886 | 0 |
| FEBRA2006092 | 0 | 0 | 0 | 2.648 | 2.247 | 1.880 | 0 |
| FEBRA2006112 | 0 | 0 | 0 | 4.685 | 0 | 13.301 | 0 |
| FEBRA2006255 | 0 | 0 | 0 | 0 | 0 | 5.252 | 0 |
| FEBRA2006270 | 0 | 0 | 0 | 0.830 | 0 | 1.178 | 0 |
| FEBRA2006346 | 0 | 0 | 0 | 10.544 | 0 | 0 | 0 |
| FEBRA2006357 | 0 | 0 | 0 | 13.633 | 0 | 12.680 | 0 |
| FEBRA2006368 | 0 | 0 | 0 | 4.411 | 11.228 | 6.262 | 0 |
| FEBRA2006372 | 0 | 0 | 0 | 0.953 | 0 | 1.353 | 0 |
| FEBRA2006396 | 0 | 0 | 0 | 5.705 | 0 | 0 | 0 |
| FEBRA2006401 | 0 | 0 | 0 | 0 | 0 | 0.759 | 0 |
| FEBRA2006485 | 0 | 0 | 0 | 0 | 0 | 3.065 | 0 |
| FEBRA2006519 | 0 | 0 | 0 | 25.320 | 0 | 11.982 | 0 |
| FEBRA2006521 | 0 | 0 | 0 | 10.857 | 0 | 7.706 | 0 |
| FEBRA2006553 | 0 | 0 | 0 | 2.808 | 0 | 0 | 0 |
| FEBRA2006736 | 0 | 0 | 0 | 10.544 | 0 | 0 | 0 |
| FEBRA2006808 | 0 | 0 | 0 | 0 | 0 | 8.272 | 0 |
| FEBRA2006873 | 0 | 0 | 34.629 | 0 | 0 | 0 | 0 |
| FEBRA2007017 | 0 | 0 | 0 | 0 | 59.175 | 0 | 0 |
| FEBRA2007212 | 0 | 0 | 0 | 11.144 | 0 | 0 | 0 |
| FEBRA2007534 | 0 | 0 | 0 | 0 | 0 | 18.185 | 0 |
| FEBRA2007544 | 0 | 0 | 0 | 41.703 | 0 | 0 | 0 |
| FEBRA2007589 | 0 | 0 | 0 | 19.411 | 0 | 13.778 | 0 |
| FEBRA2007613 | 0 | 0 | 0 | 4.711 | 0 | 3.344 | 0 |
| FEBRA2007622 | 0 | 0 | 0 | 0 | 0 | 1.040 | 0 |
| FEBRA2007708 | 0 | 0 | 0 | 6.066 | 0 | 0 | 0 |
| FEBRA2007714 | 0 | 0 | 0 | 5.922 | 0 | 16.815 | 0 |
| FEBRA2007801 | 0 | 0 | 0 | 1.752 | 0 | 0 | 0 |
| FEBRA2007880 | 0 | 0 | 0 | 0 | 0 | 3.792 | 0 |
| FEBRA2007900 | 0 | 0 | 0 | 11.003 | 0 | 0 | 0 |
| FEBRA2007901 | 0 | 0 | 0 | 0 | 0 | 3.734 | 0 |
| FEBRA2008036 | 0 | 0 | 0 | 9.124 | 0 | 4.318 | 0 |
| FEBRA2008081 | 0 | 0 | 0 | 1.508 | 0 | 2.141 | 0 |
| FEBRA2008087 | 0 | 1.258 | 1.382 | 0.382 | 0 | 0.181 | 0 |
| FEBRA2008134 | 0 | 0 | 0 | 0 | 0 | 28.785 | 0 |
| FEBRA2008159 | 0 | 0 | 0 | 22.162 | 0 | 0 | 0 |
| FEBRA2008201 | 0 | 16.832 | 0 | 0 | 0 | 0 | 0 |
| FEBRA2008210 | 0 | 0 | 0 | 4.761 | 0 | 6.758 | 0 |
| FEBRA2008255 | 0 | 0 | 0 | 7.183 | 18.284 | 5.099 | 0 |
| FEBRA2008265 | 0 | 0 | 0 | 0 | 59.175 | 0 | 0 |
| FEBRA2008287 | 0 | 0 | 0 | 4.184 | 0 | 2.970 | 0 |
| FEBRA2008302 | 0 | 7.470 | 0 | 0 | 3.845 | 3.217 | 0 |
| FEBRA2008459 | 0 | 0 | 0 | 0 | 0 | 28.785 | 0 |
| FEBRA2008583 | 0 | 0 | 0 | 1.313 | 3.821 | 1.332 | 0 |
| FEBRA2008662 | 0 | 0 | 0 | 5.633 | 0 | 6.397 | 0 |
| FEBRA2008859 | 0 | 0 | 0 | 22.162 | 0 | 0 | 0 |
| FEBRA2008861 | 0 | 0 | 0 | 4.147 | 0 | 3.925 | 0 |
| FEBRA2008928 | 0 | 0 | 0 | 22.162 | 0 | 0 | 0 |
| FEBRA2009022 | 0 | 0 | 0 | 7.111 | 0 | 3.365 | 0 |
| FEBRA2009185 | 0 | 0 | 0 | 12.897 | 0 | 26.548 | 0 |
| FEBRA2009289 | 0 | 0 | 0 | 0 | 50.703 | 0 | 0 |
| FEBRA2009328 | 0 | 0 | 0 | 3.517 | 0 | 0 | 0 |
| FEBRA2009419 | 0 | 0 | 0 | 3.751 | 0 | 3.994 | 0 |
| FEBRA2009514 | 0 | 0 | 0 | 0 | 0 | 3.338 | 0 |
| FEBRA2010719 | 0 | 0 | 0 | 0 | 0 | 17.484 | 0 |
| FEBRA2010746 | 0 | 0 | 0 | 6.089 | 0 | 0 | 0 |
| FEBRA2012181 | 0 | 0 | 0 | 11.719 | 0 | 0 | 0 |
| FEBRA2012507 | 0 | 0 | 0 | 0 | 26.964 | 0 | 0 |
| FEBRA2013699 | 0 | 0 | 0 | 0 | 0 | 7.211 | 0 |
| FEBRA2014297 | 0 | 0 | 0 | 0 | 7.723 | 4.307 | 0 |
| FEBRA2014417 | 0 | 0 | 0 | 0.766 | 0 | 3.264 | 0 |
| FEBRA2014939 | 0 | 0 | 0 | 11.858 | 0 | 0 | 0 |
| FEBRA2015085 | 0 | 0 | 0 | 2.164 | 0 | 7.681 | 0 |
| FEBRA2017024 | 0 | 0 | 0 | 6.848 | 0 | 0 | 0 |
| FEBRA2017533 | 0 | 0 | 0 | 15.488 | 0 | 5.497 | 0 |
| FEBRA2017680 | 0 | 0 | 0 | 0 | 0 | 9.581 | 0 |
| FEBRA2018203 | 0 | 0 | 0 | 0 | 0 | 15.289 | 0 |
| FEBRA2018433 | 0 | 0 | 0 | 22.162 | 0 | 0 | 0 |
| FEBRA2018476 | 0 | 7.669 | 0 | 0 | 0 | 1.101 | 0 |
| FEBRA2018746 | 0 | 0 | 0 | 5.308 | 0 | 0 | 0 |
| FEBRA2019242 | 0 | 0 | 0 | 5.758 | 0 | 0 | 0 |
| FEBRA2019389 | 0 | 0 | 0 | 0 | 59.175 | 0 | 0 |
| FEBRA2021032 | 0 | 0 | 0 | 0 | 0 | 5.402 | 0 |
| FEBRA2021171 | 0 | 0 | 0 | 0 | 0 | 10.719 | 0 |
| FEBRA2021550 | 0 | 0 | 0 | 22.162 | 0 | 0 | 0 |
| FEBRA2021636 | 0 | 0 | 0 | 14.361 | 0 | 0 | 0 |
| FEBRA2021864 | 0 | 0 | 0 | 22.162 | 0 | 0 | 0 |
| FEBRA2021966 | 0 | 0 | 0 | 3.062 | 0 | 0 | 0 |
| FEBRA2022055 | 0 | 0 | 0 | 0.378 | 0 | 0 | 0 |
| FEBRA2022601 | 0 | 0 | 0 | 22.162 | 0 | 0 | 0 |
| FEBRA2023377 | 0 | 0 | 0 | 0 | 28.030 | 0 | 0 |
| FEBRA2023399 | 0 | 0 | 0 | 6.230 | 0 | 0 | 0 |
| FEBRA2023550 | 0 | 0 | 0 | 0 | 59.175 | 0 | 0 |
| FEBRA2023927 | 0 | 0 | 0 | 8.672 | 0 | 0 | 0 |
| FEBRA2024019 | 0 | 0 | 0 | 0 | 0 | 8.107 | 0 |
| FEBRA2024987 | 0 | 69.047 | 0 | 0 | 0 | 0 | 0 |
| FEBRA2025427 | 0 | 0 | 0 | 0 | 0 | 4.995 | 0 |
| FEBRA2025838 | 0 | 0 | 0 | 0 | 0 | 1.655 | 0 |
| FEBRA2026984 | 0 | 0 | 0 | 12.446 | 0 | 0 | 0 |
| FEBRA2028503 | 0 | 0 | 0 | 0 | 0 | 14.089 | 0 |
| FEBRA2028516 | 0 | 0 | 0 | 1.624 | 0 | 2.305 | 0 |
| FELIV1000137 | 0 | 0 | 0 | 0.220 | 0 | 0 | 0 |
| FELIV1000153 | 5.170 | 0 | 0 | 0.234 | 0 | 0.166 | 0 |
| HCASM1000115 | 0 | 0 | 0 | 1.471 | 0 | 2.089 | 0 |
| HCASM2000016 | 0 | 15.716 | 0 | 0 | 0 | 1.504 | 0 |
| HCASM2000138 | 0 | 0 | 0 | 8.993 | 0 | 4.256 | 0 |
| HCASM2000156 | 0 | 0 | 0 | 0 | 0 | 13.176 | 0 |
| HCASM2000214 | 0 | 0 | 0 | 0 | 0 | 9.530 | 0 |
| HCASM2003415 | 52.578 | 0 | 0 | 0 | 0 | 0 | 0 |
| HCASM2005388 | 0 | 0 | 0 | 2.510 | 0 | 0 | 0 |
| HCHON1000015 | 0 | 0 | 0 | 1.106 | 0 | 1.571 | 0 |
| HCHON1000030 | 0 | 0 | 2.798 | 0.772 | 0 | 1.828 | 0 |
| HCHON1000166 | 0 | 0 | 0 | 0 | 0 | 3.031 | 0 |
| HCHON1000191 | 0 | 0 | 3.725 | 0 | 0 | 0 | 0 |
| HCHON2000056 | 0 | 1.991 | 2.187 | 1.007 | 0 | 1.143 | 0 |
| HCHON2000062 | 0 | 29.418 | 0 | 2.975 | 0 | 0 | 0 |
| HCHON2000160 | 0 | 0 | 0 | 1.429 | 3.637 | 1.014 | 0 |
| HCHON2000226 | 0 | 0 | 0 | 1.431 | 0 | 0 | 0 |
| HCHON2000244 | 0 | 0 | 0 | 0.934 | 0 | 0.663 | 0 |
| HCHON2000265 | 0 | 0 | 0 | 2.872 | 0 | 0 | 0 |
| HCHON2000295 | 0 | 0 | 0 | 0.311 | 0 | 0.883 | 0 |
| HCHON2000323 | 0 | 13.002 | 0 | 0 | 0 | 0 | 0 |
| HCHON2000473 | 0 | 0 | 0 | 8.309 | 0 | 0 | 0 |
| HCHON2000475 | 0 | 0 | 0 | 0 | 0 | 2.682 | 0 |
| HCHON2000508 | 0 | 0 | 0 | 0 | 0 | 0.376 | 0 |
| HCHON2000626 | 0 | 0 | 0 | 0.834 | 0 | 0 | 0 |
| HCHON2000676 | 0 | 0 | 0 | 2.116 | 0 | 0 | 0 |
| HCHON2000698 | 0 | 0 | 0 | 0 | 0 | 5.776 | 0 |
| HCHON2000743 | 0 | 0 | 0 | 8.667 | 0 | 0 | 0 |
| HCHON2000815 | 0 | 0 | 0 | 0 | 0 | 2.814 | 0 |
| HCHON2000819 | 0 | 0 | 0 | 0 | 26.473 | 0 | 0 |
| HCHON2000826 | 0 | 0 | 0 | 1.524 | 0 | 0 | 0 |
| HCHON2001039 | 0 | 0 | 0 | 2.376 | 0 | 0 | 0 |
| HCHON2001050 | 45.433 | 0 | 0 | 0 | 0 | 0 | 0 |
| HCHON2001108 | 0 | 0 | 0 | 1.516 | 0 | 0 | 0 |
| HCHON2001161 | 0 | 0 | 0 | 7.642 | 0 | 10.849 | 0 |
| HCHON2001200 | 0 | 0 | 0 | 0.307 | 0 | 0.872 | 0 |
| HCHON2001217 | 0 | 0 | 0 | 2.216 | 0 | 0 | 0 |
| HCHON2001359 | 0 | 5.976 | 6.566 | 1.813 | 0 | 0.858 | 0 |
| HCHON2001407 | 24.752 | 0 | 0 | 0 | 0 | 0.796 | 0 |
| HCHON2001434 | 0 | 0 | 0 | 4.337 | 5.520 | 4.618 | 0 |
| HCHON2001497 | 0 | 52.590 | 0 | 0 | 0 | 0 | 0 |
| HCHON2001505 | 0 | 0 | 0 | 3.189 | 0 | 0 | 0 |
| HCHON2001665 | 0 | 0 | 0 | 2.191 | 0 | 9.329 | 0 |
| HCHON2001853 | 0 | 0 | 0 | 7.950 | 0 | 0 | 0 |
| HCHON2002247 | 0 | 19.705 | 0 | 1.993 | 10.144 | 0 | 0 |
| HCHON2002354 | 0 | 0 | 0 | 9.017 | 0 | 0 | 0 |
| HCHON2004002 | 0 | 0 | 0 | 0 | 0 | 1.582 | 0 |
| HCHON2005921 | 0 | 0 | 0 | 2.944 | 0 | 0 | 0 |
| HCHON2008112 | 0 | 0 | 0 | 0 | 0 | 13.736 | 0 |
| HCHON2010543 | 0 | 0 | 0 | 6.367 | 0 | 0 | 0 |
| HEART1000010 | 0 | 23.980 | 0 | 0 | 0 | 0 | 0 |
| HEART1000074 | 0 | 5.328 | 5.854 | 1.078 | 0 | 0 | 0 |
| HEART1000149 | 0 | 0 | 0 | 1.333 | 0 | 0 | 0 |
| HEART1000173 | 0 | 0 | 0 | 0 | 0 | 2.645 | 0 |
| HEART2000306 | 0 | 0 | 0 | 9.616 | 0 | 0 | 0 |
| HEART2000506 | 0 | 0 | 0 | 0 | 0 | 1.767 | 0 |
| HEART2000520 | 0 | 0 | 0 | 0 | 0 | 1.453 | 0 |
| HEART2000959 | 0 | 0 | 0 | 8.360 | 0 | 0 | 0 |
| HEART2003852 | 0 | 0 | 0 | 0 | 14.078 | 3.926 | 0 |
| HEART2005310 | 0 | 48.933 | 0 | 0 | 0 | 0 | 0 |
| HEART2006487 | 0 | 0 | 0 | 0 | 35.133 | 0 | 0 |
| HEART2006521 | 0 | 0 | 0 | 3.395 | 0 | 2.410 | 0 |
| HEART2007231 | 0 | 0 | 0 | 0 | 0 | 4.881 | 0 |
| HEART2009000 | 0 | 0 | 0 | 7.336 | 0 | 0 | 0 |
| HHDPC1000083 | 0 | 0 | 0 | 1.389 | 0 | 1.972 | 0 |
| HHDPC1000114 | 0 | 0 | 0 | 1.547 | 0 | 0.732 | 0 |
| HHDPC1000163 | 0 | 0 | 0 | 0 | 0 | 1.267 | 0 |
| HHDPC2000055 | 0 | 0 | 0 | 0 | 0 | 1.842 | 0 |
| HHDPC2000104 | 0 | 0 | 0 | 1.313 | 0 | 0 | 0 |
| HHDPC2000115 | 0 | 0 | 0 | 0 | 0 | 2.636 | 0 |
| HHDPC2000149 | 0 | 0 | 0 | 3.171 | 0 | 0 | 0 |
| HHDPC2000455 | 0 | 0 | 0 | 0.390 | 0 | 0.554 | 0 |
| HHDPC2000456 | 0 | 0 | 0 | 0 | 0 | 1.564 | 0 |
| HHDPC2003439 | 0 | 1.785 | 1.961 | 1.625 | 0 | 0.513 | 0 |
| HHDPC2003983 | 0 | 0 | 2.147 | 0.791 | 1.006 | 0.842 | 0 |
| HHDPC2005794 | 0 | 0 | 0 | 0 | 0 | 8.015 | 0 |
| HHDPC2006862 | 0 | 0 | 0 | 0 | 0 | 7.541 | 0 |
| HHDPC2007267 | 0 | 0 | 0 | 0 | 0 | 0.492 | 0 |
| HHDPC2009528 | 0 | 0 | 0 | 4.613 | 0 | 0 | 0 |
| HLUNG1000055 | 0 | 3.799 | 0 | 0 | 0 | 0 | 0 |
| HLUNG1000064 | 0 | 0 | 0 | 4.833 | 0 | 0 | 0 |
| HLUNG2000232 | 0 | 0 | 0 | 17.890 | 0 | 0 | 0 |
| HLUNG2000314 | 0 | 0 | 0 | 0 | 0 | 2.472 | 0 |
| HLUNG2000412 | 0 | 0 | 0 | 7.602 | 0 | 2.698 | 0 |
| HLUNG2000501 | 0 | 0 | 0 | 0 | 6.199 | 0 | 0 |
| HLUNG2000846 | 0 | 0 | 0 | 0 | 0 | 4.552 | 0 |
| HLUNG2001146 | 0 | 0 | 0 | 3.721 | 0 | 0 | 0 |
| HLUNG2001507 | 0 | 0 | 0 | 0 | 0 | 5.046 | 0 |
| HLUNG2001518 | 0 | 0 | 0 | 5.433 | 0 | 1.102 | 0 |
| HLUNG2001712 | 0 | 0 | 0 | 0 | 35.740 | 0 | 0 |
| HLUNG2002465 | 0 | 0 | 0 | 0 | 0 | 4.875 | 0 |
| HLUNG2002648 | 0 | 0 | 0 | 0 | 0 | 3.642 | 0 |
| HLUNG2002811 | 0 | 0 | 0 | 6.918 | 0 | 4.910 | 0 |
| HLUNG2003378 | 0 | 0 | 0 | 6.571 | 0 | 0 | 0 |
| HLUNG2003716 | 0 | 0 | 0 | 16.214 | 0 | 0 | 0 |
| HLUNG2004067 | 0 | 0 | 0 | 7.815 | 0 | 0 | 0 |
| HLUNG2004159 | 0 | 0 | 0 | 0 | 0 | 1.827 | 0 |
| HLUNG2004170 | 0 | 0 | 0 | 0 | 0 | 6.209 | 0 |
| HLUNG2005656 | 0 | 0 | 0 | 16.214 | 0 | 0 | 0 |
| HLUNG2006812 | 0 | 0 | 0 | 2.099 | 0 | 0 | 0 |
| HLUNG2007163 | 0 | 0 | 0 | 0 | 0 | 27.149 | 0 |
| HLUNG2008139 | 0 | 0 | 0 | 8.134 | 0 | 0 | 0 |
| HLUNG2008153 | 0 | 0 | 0 | 0 | 0 | 20.576 | 0 |
| HLUNG2008348 | 0 | 0 | 0 | 9.019 | 0 | 12.803 | 0 |
| HLUNG2008637 | 0 | 11.856 | 0 | 0 | 0 | 0 | 0 |
| HLUNG2008885 | 0 | 0 | 0 | 7.662 | 0 | 0 | 0 |
| HLUNG2009225 | 0 | 0 | 0 | 4.282 | 0 | 3.039 | 0 |
| HLUNG2017262 | 0 | 0 | 0 | 4.502 | 0 | 0 | 0 |
| HSYRA1000062 | 0 | 0 | 16.516 | 0.608 | 0 | 0.432 | 0 |
| HSYRA1000119 | 0 | 0 | 3.546 | 1.305 | 1.661 | 0.463 | 0 |
| HSYRA1000137 | 0 | 0 | 0 | 0 | 0 | 3.755 | 0 |
| HSYRA1000152 | 0 | 0 | 0 | 0 | 0 | 4.807 | 0 |
| HSYRA1000178 | 0 | 0 | 0 | 1.780 | 0 | 5.053 | 0 |
| HSYRA2000137 | 0 | 0 | 0 | 0 | 8.190 | 0 | 0 |
| HSYRA2000159 | 0 | 0.846 | 1.860 | 2.653 | 1.743 | 6.803 | 0 |
| HSYRA2000190 | 0 | 16.670 | 0 | 1.686 | 0 | 0 | 0 |
| HSYRA2000224 | 0 | 0 | 0 | 0 | 0 | 3.624 | 0 |
| HSYRA2000232 | 0 | 0 | 0 | 3.149 | 2.672 | 3.725 | 0 |
| HSYRA2000248 | 0 | 0 | 5.241 | 0.965 | 0 | 2.054 | 0 |
| HSYRA2000255 | 0 | 0 | 0 | 0 | 0 | 0.452 | 0 |
| HSYRA2000629 | 0 | 0 | 0 | 2.369 | 0 | 0 | 0 |
| HSYRA2000640 | 0 | 0 | 0 | 0 | 0 | 6.009 | 0 |
| HSYRA2000706 | 0 | 0 | 0 | 8.673 | 0 | 0 | 0 |
| HSYRA2000743 | 0 | 0 | 5.968 | 1.648 | 0 | 1.560 | 0 |
| HSYRA2000787 | 0 | 0 | 0 | 2.208 | 0 | 0 | 0 |
| HSYRA2000828 | 0 | 9.999 | 0 | 0 | 0 | 4.306 | 0 |
| HSYRA2000925 | 0 | 0 | 0 | 0.472 | 0.801 | 0 | 83.696 |
| HSYRA2001003 | 0 | 0 | 0 | 6.093 | 0 | 0 | 0 |
| HSYRA2001105 | 0 | 0 | 0 | 5.867 | 0 | 2.776 | 0 |
| HSYRA2001138 | 0 | 0 | 0 | 1.267 | 0 | 3.082 | 0 |
| HSYRA2001225 | 0 | 0 | 0 | 0.525 | 0 | 0 | 0 |
| HSYRA2001396 | 0 | 0 | 0 | 1.078 | 0 | 1.531 | 0 |
| HSYRA2001476 | 0 | 0 | 0 | 0 | 0 | 1.946 | 0 |
| HSYRA2001567 | 0 | 0 | 0 | 1.591 | 0 | 0 | 0 |
| HSYRA2001574 | 0 | 5.281 | 0 | 0 | 0 | 0.758 | 0 |
| HSYRA2001595 | 0 | 0 | 0 | 0.809 | 2.058 | 1.722 | 0 |
| HSYRA2001615 | 0 | 0 | 0 | 7.360 | 0 | 8.359 | 0 |
| HSYRA2001621 | 0 | 0 | 0 | 0 | 3.315 | 1.294 | 0 |
| HSYRA2001983 | 0 | 0 | 0 | 6.851 | 0 | 0 | 0 |
| IMR321000158 | 0 | 0 | 0 | 0 | 0 | 0.767 | 0 |
| IMR321000193 | 0 | 0 | 0 | 0 | 0 | 4.422 | 0 |
| IMR321000210 | 0 | 0 | 0 | 2.158 | 0 | 0 | 0 |
| IMR321000219 | 0 | 0 | 0 | 1.594 | 0 | 3.959 | 0 |
| IMR321000242 | 0 | 0 | 0 | 3.991 | 0 | 0 | 0 |
| IMR321000266 | 0 | 0 | 0 | 2.009 | 0 | 2.851 | 0 |
| IMR322000072 | 25.151 | 0 | 0 | 0 | 0 | 0 | 0 |
| IMR322000121 | 0 | 0 | 0 | 0.791 | 0 | 4.493 | 0 |
| IMR322000127 | 0 | 10.873 | 0 | 4.398 | 5.597 | 10.926 | 0 |
| IMR322000223 | 0 | 0 | 0 | 0.966 | 2.460 | 0 | 0 |
| IMR322000243 | 0 | 0 | 0 | 1.218 | 0 | 1.729 | 0 |
| IMR322000316 | 0 | 0 | 0 | 3.534 | 4.498 | 6.272 | 0 |
| IMR322000518 | 0 | 0 | 0 | 6.540 | 11.097 | 0 | 0 |
| IMR322000555 | 0 | 0 | 0 | 4.234 | 0 | 0 | 0 |
| IMR322000730 | 4.296 | 0.962 | 0 | 0 | 1.486 | 0 | 0 |
| IMR322000742 | 0 | 0 | 0 | 2.351 | 5.983 | 1.668 | 0 |
| IMR322000775 | 0 | 0 | 0 | 2.943 | 0 | 0 | 0 |
| IMR322000819 | 0 | 0 | 0 | 0 | 0 | 4.295 | 0 |
| IMR322000859 | 0 | 0 | 0 | 28.688 | 0 | 0 | 0 |
| IMR322000863 | 0 | 0 | 0 | 4.788 | 0 | 0 | 0 |
| IMR322000918 | 0 | 0 | 0 | 4.161 | 0 | 2.953 | 0 |
| IMR322000973 | 25.275 | 0 | 6.218 | 0 | 0 | 0 | 0 |
| IMR322001049 | 0 | 0 | 0 | 0 | 20.931 | 0 | 0 |
| IMR322001218 | 0 | 0 | 0 | 0.795 | 0 | 0 | 0 |
| IMR322001317 | 0 | 0 | 0 | 2.802 | 5.707 | 0 | 0 |
| IMR322001318 | 0 | 0 | 0 | 0 | 0 | 22.213 | 0 |
| IMR322001322 | 0 | 0 | 0 | 0 | 0 | 22.213 | 0 |
| IMR322001332 | 0 | 0 | 0 | 3.779 | 0 | 0 | 0 |
| IMR322001380 | 0 | 0 | 0 | 2.814 | 7.163 | 11.984 | 0 |
| IMR322001435 | 0 | 0 | 0 | 1.334 | 0 | 0.947 | 0 |
| IMR322001438 | 0 | 0 | 0 | 5.898 | 0 | 0 | 0 |
| IMR322001534 | 0 | 0 | 0 | 5.865 | 0 | 0 | 0 |
| IMR322001541 | 0 | 0 | 0 | 2.401 | 0 | 0 | 0 |
| IMR322001584 | 0 | 0 | 0 | 1.772 | 0 | 2.516 | 0 |
| IMR322001600 | 0 | 0 | 0 | 0 | 0 | 0.487 | 0 |
| IMR322001670 | 0 | 0 | 0 | 9.714 | 0 | 18.387 | 0 |
| IMR322009710 | 0 | 0 | 0 | 16.746 | 0 | 0 | 0 |
| IMR322019070 | 0 | 0 | 0 | 0 | 19.335 | 0 | 0 |
| KIDNE1000104 | 0 | 0 | 0 | 11.771 | 0 | 0 | 0 |
| KIDNE1000145 | 0 | 19.410 | 0 | 0 | 0 | 0 | 0 |
| KIDNE2000085 | 0 | 0 | 7.930 | 0.730 | 0 | 0 | 0 |
| KIDNE2000252 | 0 | 0 | 6.591 | 1.213 | 0 | 3.444 | 0 |
| KIDNE2000266 | 0 | 0 | 0 | 5.977 | 0 | 4.242 | 0 |
| KIDNE2000349 | 0 | 0 | 14.632 | 0 | 0 | 0 | 0 |
| KIDNE2000383 | 0 | 0 | 0 | 0 | 0 | 4.962 | 0 |
| KIDNE2000574 | 0 | 5.254 | 0 | 1.063 | 2.705 | 1.508 | 0 |
| KIDNE2000665 | 0 | 0 | 0 | 1.374 | 0 | 1.951 | 0 |
| KIDNE2000909 | 0 | 0 | 0 | 1.457 | 0 | 4.137 | 0 |
| KIDNE2000947 | 0 | 0 | 19.491 | 0 | 9.132 | 0 | 0 |
| KIDNE2001162 | 0 | 0 | 10.798 | 0.994 | 0 | 0.941 | 0 |
| KIDNE2001467 | 0 | 0 | 0 | 0.740 | 0 | 2.364 | 0 |
| KIDNE2002191 | 0 | 0 | 0 | 15.177 | 0 | 0 | 0 |
| KIDNE2002265 | 0 | 0 | 0 | 0 | 0 | 1.833 | 0 |
| KIDNE2002725 | 0 | 0 | 0 | 7.303 | 0 | 0 | 0 |
| KIDNE2003233 | 0 | 0 | 0 | 16.915 | 0 | 0 | 0 |
| KIDNE2003305 | 0 | 17.723 | 0 | 0.597 | 0 | 0 | 0 |
| KIDNE2003764 | 0 | 0 | 0 | 22.937 | 0 | 0 | 0 |
| KIDNE2003941 | 15.810 | 0 | 0 | 0 | 0 | 1.016 | 0 |
| KIDNE2004054 | 0 | 0 | 0 | 9.265 | 0 | 0 | 0 |
| KIDNE2004115 | 0 | 0 | 0 | 16.915 | 0 | 0 | 0 |
| KIDNE2004475 | 0 | 0 | 0 | 1.827 | 0 | 0 | 0 |
| KIDNE2005676 | 0 | 0 | 0 | 5.991 | 0 | 0 | 0 |
| KIDNE2006248 | 0 | 2.182 | 0 | 0 | 0 | 0.940 | 0 |
| KIDNE2006465 | 0 | 0 | 0 | 10.981 | 0 | 3.118 | 0 |
| KIDNE2006580 | 0 | 0 | 0 | 14.933 | 0 | 7.066 | 0 |
| KIDNE2006760 | 0 | 0 | 0 | 0 | 24.375 | 0 | 0 |
| KIDNE2006775 | 0 | 0 | 70.644 | 1.300 | 0 | 0 | 0 |
| KIDNE2006880 | 0 | 0 | 0 | 0 | 0 | 3.235 | 0 |
| KIDNE2007352 | 0 | 2.918 | 0 | 2.950 | 0 | 0.838 | 0 |
| KIDNE2007954 | 0 | 0 | 0 | 7.481 | 0 | 0 | 0 |
| KIDNE2008048 | 0 | 0 | 0 | 1.904 | 0 | 1.081 | 0 |
| KIDNE2008069 | 0 | 0 | 0 | 3.314 | 12.653 | 9.409 | 0 |
| KIDNE2008362 | 0 | 0 | 0 | 0 | 16.499 | 0 | 0 |
| KIDNE2008403 | 0 | 0 | 0 | 9.653 | 0 | 19.184 | 0 |
| KIDNE2009367 | 0 | 0 | 0 | 7.489 | 2.723 | 6.075 | 0 |
| KIDNE2011752 | 0 | 0 | 0 | 16.915 | 0 | 0 | 0 |
| KIDNE2012009 | 0 | 66.814 | 0 | 0 | 0 | 0 | 0 |
| KIDNE2012291 | 0 | 0 | 0 | 16.915 | 0 | 0 | 0 |
| KIDNE2012440 | 0 | 0 | 0 | 2.513 | 0 | 0 | 0 |
| KIDNE2013845 | 0 | 0 | 0 | 0.793 | 0 | 0 | 0 |
| KIDNE2014290 | 0 | 0 | 0 | 0 | 0 | 0.706 | 0 |
| KIDNE2014978 | 0 | 0 | 0 | 0 | 0 | 22.421 | 0 |
| KIDNE2015710 | 0 | 13.138 | 0 | 0 | 0 | 0 | 0 |
| KIDNE2016101 | 0 | 0 | 0 | 16.915 | 0 | 0 | 0 |
| KIDNE2016371 | 0 | 0 | 0 | 0 | 0 | 9.078 | 0 |
| KIDNE2017040 | 0 | 0 | 0 | 2.387 | 0 | 0 | 0 |
| KIDNE2017153 | 0 | 0 | 0 | 16.915 | 0 | 0 | 0 |
| KIDNE2018071 | 0 | 0 | 0 | 0 | 50.895 | 0 | 0 |
| KIDNE2018217 | 0 | 0 | 0 | 4.307 | 0 | 0 | 0 |
| KIDNE2018493 | 0 | 0 | 0 | 0 | 0 | 3.590 | 0 |
| KIDNE2018891 | 0 | 0 | 0 | 0 | 22.035 | 0 | 0 |
| LIVER1000079 | 0 | 0 | 0 | 2.487 | 0 | 5.297 | 0 |
| LIVER1000104 | 0 | 0 | 0 | 0 | 0 | 0.208 | 0 |
| LIVER1000132 | 0 | 3.512 | 0 | 0 | 0 | 0 | 0 |
| LIVER1000230 | 0 | 0 | 0 | 8.232 | 0 | 0 | 0 |
| LIVER2000033 | 0 | 0 | 0 | 0 | 0 | 1.394 | 0 |
| LIVER2000037 | 0 | 0 | 0 | 0 | 0.229 | 0 | 0 |
| LIVER2001265 | 0 | 0 | 0 | 0 | 0 | 10.413 | 0 |
| LIVER2002842 | 0 | 0 | 0 | 0 | 0 | 1.924 | 0 |
| LIVER2003008 | 0 | 0 | 0 | 0 | 0 | 10.413 | 0 |
| LIVER2006006 | 0 | 0 | 5.484 | 0 | 0 | 0 | 0 |
| LIVER2007783 | 0 | 0 | 0 | 1.456 | 0 | 2.067 | 0 |
| LIVER2008465 | 0 | 0 | 0 | 4.697 | 0 | 0 | 0 |
| MAMGL1000032 | 0 | 2.262 | 0 | 0.114 | 0.582 | 0.487 | 0 |
| MAMGL1000035 | 0 | 0 | 0 | 0.143 | 0 | 0.203 | 0 |
| MAMGL1000083 | 0 | 0 | 0 | 0.206 | 0 | 0 | 0 |
| MAMGL1000100 | 0 | 0 | 0 | 0.210 | 0 | 0 | 0 |
| MAMGL1000173 | 0 | 1.860 | 0 | 0 | 0 | 0 | 0 |
| MESAN1000050 | 0 | 0 | 0 | 0 | 0 | 3.235 | 0 |
| MESAN1000080 | 0 | 0 | 0 | 0 | 0 | 1.439 | 0 |
| MESAN1000101 | 0 | 0 | 0 | 4.097 | 0 | 0 | 0 |
| MESAN1000126 | 0 | 0 | 0 | 7.605 | 0 | 0 | 0 |
| MESAN2000267 | 0 | 0 | 0 | 1.744 | 1.480 | 2.888 | 0 |
| MESAN2000501 | 0 | 0 | 0 | 0 | 0 | 3.023 | 0 |
| MESAN2000572 | 0 | 0 | 0 | 0 | 0 | 1.030 | 0 |
| MESAN2000608 | 0 | 0 | 6.064 | 1.116 | 0 | 0.792 | 0 |
| MESAN2001154 | 0 | 0 | 0 | 4.728 | 0 | 0 | 0 |
| MESAN2001450 | 0 | 0 | 0 | 6.141 | 0 | 0 | 0 |
| MESAN2002086 | 0 | 2.922 | 0 | 0 | 1.504 | 0 | 0 |
| MESAN2002122 | 0 | 0 | 0 | 6.296 | 0 | 0 | 0 |
| MESAN2002186 | 0 | 0 | 16.905 | 0 | 0 | 0 | 0 |
| MESAN2002519 | 0 | 0 | 0 | 0 | 0 | 4.673 | 0 |
| MESAN2002724 | 0 | 0 | 0 | 0 | 0 | 1.858 | 0 |
| MESAN2003622 | 18.837 | 4.218 | 0 | 1.280 | 0 | 0 | 0 |
| MESAN2003709 | 0 | 0 | 0 | 0 | 29.970 | 0 | 0 |
| MESAN2005689 | 0 | 0 | 0 | 0 | 11.210 | 3.126 | 0 |
| MESAN2005766 | 0 | 0 | 0 | 2.100 | 0 | 4.968 | 0 |
| MESAN2005957 | 0 | 0 | 0 | 7.009 | 0 | 0 | 0 |
| MESAN2005958 | 0 | 0 | 0 | 3.823 | 9.731 | 0 | 0 |
| MESAN2006401 | 0 | 0 | 0 | 0 | 0 | 10.937 | 0 |
| MESAN2006563 | 0 | 0 | 0 | 1.470 | 0 | 0 | 0 |
| MESAN2008334 | 0 | 0 | 0 | 11.670 | 0 | 0 | 0 |
| MESAN2008729 | 0 | 0 | 0 | 16.066 | 0 | 0 | 0 |
| MESAN2008936 | 0 | 0 | 0 | 5.647 | 0 | 12.025 | 0 |
| MESAN2010664 | 0 | 0 | 0 | 6.160 | 0 | 0 | 0 |
| MESAN2011984 | 0 | 0 | 0 | 0 | 0 | 1.719 | 0 |
| MESAN2012054 | 0 | 0 | 0 | 5.432 | 0 | 0 | 0 |
| MESAN2013284 | 0 | 0 | 0 | 2.615 | 0 | 6.187 | 0 |
| MESAN2015365 | 0 | 0 | 0 | 16.066 | 0 | 0 | 0 |
| MESAN2015515 | 0 | 0 | 20.486 | 0 | 0 | 2.677 | 0 |
| MESAN2017133 | 0 | 0 | 0 | 0 | 31.703 | 0 | 0 |
| MESAN2017373 | 0 | 0 | 0 | 0 | 0 | 3.529 | 0 |
| MESAN2018699 | 0 | 0 | 0 | 0 | 0 | 15.512 | 0 |
| MESTC1000042 | 0 | 0 | 0 | 0.797 | 0 | 0 | 0 |
| NB9N41000011 | 0 | 0 | 0 | 4.532 | 0 | 0 | 0 |
| NB9N41000121 | 0 | 0 | 5.791 | 0 | 0 | 0 | 0 |
| NB9N41000135 | 0 | 0 | 0 | 1.574 | 0 | 0 | 0 |
| NB9N41000340 | 0 | 0 | 11.184 | 2.059 | 0 | 0 | 0 |
| NB9N42000196 | 31.658 | 0 | 0 | 0 | 0 | 0 | 0 |
| NESOP2001752 | 0 | 0 | 0 | 3.228 | 0 | 0 | 0 |
| NHNPC1000034 | 0 | 0 | 0 | 0 | 0 | 3.882 | 0 |
| NHNPC2000062 | 0 | 0 | 0 | 0 | 0 | 2.112 | 0 |
| NHNPC2000187 | 0 | 0 | 0 | 0.321 | 0 | 1.824 | 0 |
| NHNPC2000206 | 0 | 0 | 0 | 3.412 | 0 | 0.692 | 0 |
| NHNPC2001931 | 0 | 3.350 | 0 | 0 | 0 | 0.481 | 0 |
| NOVAR2000038 | 0 | 0 | 0 | 3.968 | 15.711 | 0.626 | 0 |
| NOVAR2000783 | 0 | 0 | 0 | 2.684 | 0 | 0 | 0 |
| NT2NE1000014 | 0 | 0 | 0 | 6.170 | 0 | 0 | 0 |
| NT2NE1000018 | 0 | 0 | 19.177 | 1.765 | 0 | 10.022 | 0 |
| NT2NE1000163 | 0 | 0 | 0 | 4.025 | 1.464 | 1.224 | 0 |
| NT2NE2000056 | 0 | 2.757 | 3.029 | 1.115 | 0 | 5.541 | 0 |
| NT2NE2000174 | 0 | 0 | 5.885 | 0.271 | 0 | 0.384 | 0 |
| NT2NE2000195 | 0 | 0 | 0 | 2.182 | 5.554 | 1.549 | 0 |
| NT2NE2000259 | 0 | 0 | 0 | 1.996 | 0 | 2.834 | 0 |
| NT2NE2000260 | 0 | 4.239 | 0 | 0 | 2.182 | 0.852 | 0 |
| NT2NE2000327 | 0 | 0 | 0 | 5.357 | 0 | 0 | 0 |
| NT2NE2000383 | 0 | 0 | 0 | 3.236 | 5.491 | 1.531 | 0 |
| NT2NE2000384 | 0 | 0 | 0 | 1.634 | 0 | 2.319 | 0 |
| NT2NE2000392 | 0 | 0 | 0 | 3.168 | 0 | 3.598 | 0 |
| NT2NE2000517 | 0 | 0 | 0 | 0 | 0 | 14.309 | 0 |
| NT2NE2000575 | 0 | 1.687 | 0 | 1.706 | 0.869 | 1.453 | 0 |
| NT2NE2000707 | 0 | 4.698 | 0 | 1.188 | 0 | 2.697 | 0 |
| NT2NE2000763 | 0 | 0 | 0 | 0 | 0 | 2.418 | 0 |
| NT2NE2000864 | 0 | 0 | 0 | 16.377 | 0 | 0 | 0 |
| NT2NE2000909 | 0 | 0 | 0 | 0 | 11.828 | 13.193 | 0 |
| NT2NE2000913 | 0 | 0 | 0 | 5.235 | 0 | 0 | 0 |
| NT2NE2000963 | 0 | 3.220 | 0 | 0.814 | 3.316 | 0 | 0 |
| NT2NE2001000 | 26.976 | 0 | 0 | 1.222 | 0 | 0.867 | 0 |
| NT2NE2001040 | 0 | 0 | 0 | 11.003 | 0 | 15.621 | 0 |
| NT2NE2001048 | 0 | 10.506 | 0 | 2.125 | 10.817 | 1.508 | 0 |
| NT2NE2001156 | 0 | 0 | 0 | 0 | 20.308 | 0 | 0 |
| NT2NE2001176 | 0 | 0 | 0 | 1.621 | 4.127 | 6.905 | 0 |
| NT2NE2001324 | 0 | 0 | 0 | 16.377 | 0 | 0 | 0 |
| NT2NE2001337 | 0 | 0 | 0 | 6.451 | 0 | 0 | 0 |
| NT2NE2001364 | 0 | 0 | 0 | 0 | 0 | 10.772 | 0 |
| NT2NE2001397 | 0 | 0 | 0 | 0 | 0 | 13.252 | 0 |
| NT2NE2001403 | 0 | 0 | 0 | 3.682 | 0 | 0 | 0 |
| NT2NE2001435 | 0 | 0 | 0 | 6.037 | 3.841 | 4.285 | 0 |
| NT2NE2001442 | 0 | 35.075 | 0 | 0 | 0 | 0 | 0 |
| NT2NE2001545 | 0 | 0 | 0 | 0 | 0 | 3.611 | 0 |
| NT2NE2001655 | 0 | 0 | 0 | 0 | 5.059 | 1.411 | 0 |
| NT2NE2001697 | 0 | 0 | 0 | 0 | 0 | 5.501 | 0 |
| NT2NE2001793 | 0 | 0 | 0 | 2.945 | 0 | 4.180 | 0 |
| NT2NE2003185 | 0 | 0 | 0 | 2.690 | 13.697 | 0 | 0 |
| NT2NE2003485 | 0 | 0 | 0 | 1.652 | 0 | 0 | 0 |
| NT2NE2003569 | 0 | 0 | 0 | 1.232 | 0 | 1.749 | 0 |
| NT2NE2003921 | 0 | 0 | 0 | 4.330 | 0 | 0 | 0 |
| NT2NE2004519 | 0 | 0 | 0 | 0 | 0 | 1.806 | 0 |
| NT2NE2005317 | 0 | 0 | 0 | 9.025 | 0 | 0 | 0 |
| NT2NE2005419 | 0 | 0 | 0 | 0 | 0 | 11.667 | 0 |
| NT2NE2005688 | 0 | 0 | 0 | 0.530 | 0 | 0 | 0 |
| NT2NE2005876 | 0 | 0 | 0 | 5.235 | 0 | 2.973 | 0 |
| NT2NE2005890 | 0 | 0 | 0 | 0 | 0 | 35.735 | 0 |
| NT2NE2006458 | 0 | 0 | 0 | 2.006 | 0 | 1.424 | 0 |
| NT2NE2006659 | 0 | 0 | 0 | 12.843 | 0 | 0 | 0 |
| NT2NE2006909 | 0 | 0 | 0 | 0 | 0 | 0.287 | 0 |
| NT2NE2008803 | 0 | 0 | 0 | 16.377 | 0 | 0 | 0 |
| NT2NE2009523 | 0 | 0 | 0 | 0 | 0 | 15.659 | 0 |
| NT2NE2010056 | 0 | 0 | 0 | 17.062 | 0 | 16.148 | 0 |
| NT2NE2010842 | 0 | 0 | 0 | 0.669 | 0 | 3.800 | 0 |
| NT2NE2011119 | 0 | 0 | 0 | 0 | 0 | 4.665 | 0 |
| NT2NE2012199 | 0 | 0 | 0 | 0 | 0 | 12.205 | 0 |
| NT2NE2012505 | 0 | 0 | 0 | 13.014 | 0 | 0 | 0 |
| NT2NE2012928 | 0 | 0 | 0 | 6.179 | 0 | 0 | 0 |
| NT2NE2014104 | 0 | 23.562 | 0 | 0 | 0 | 1.691 | 0 |
| NT2NE2015362 | 0 | 0 | 0 | 13.014 | 0 | 0 | 0 |
| NT2NE2015974 | 0 | 0 | 0 | 21.687 | 0 | 7.697 | 0 |
| NT2NE2017792 | 0 | 0 | 0 | 13.288 | 0 | 18.864 | 0 |
| NT2NE2018180 | 0 | 0 | 0 | 2.669 | 0 | 0 | 0 |
| NT2NE2019091 | 0 | 0 | 0 | 0 | 0 | 1.907 | 0 |
| NT2RI1000027 | 0 | 0 | 0 | 1.435 | 0 | 1.019 | 0 |
| NT2RI1000127 | 0 | 0 | 0 | 1.288 | 0 | 0 | 0 |
| NT2RI2000064 | 0 | 3.778 | 8.302 | 0.382 | 0 | 0.542 | 0 |
| NT2RI2000107 | 0 | 0 | 0 | 0 | 0 | 2.334 | 0 |
| NT2RI2000116 | 0 | 0 | 0 | 1.238 | 0 | 2.344 | 0 |
| NT2RI2000133 | 0 | 0 | 0 | 1.819 | 0 | 0 | 0 |
| NT2RI2000167 | 0 | 0 | 0 | 0 | 0 | 11.641 | 0 |
| NT2RI2000255 | 0 | 0 | 9.231 | 0 | 0 | 2.412 | 0 |
| NT2RI2000263 | 0 | 0 | 0 | 1.214 | 0 | 0 | 0 |
| NT2RI2000282 | 9.921 | 0 | 9.764 | 0.449 | 0 | 0 | 0 |
| NT2RI2000284 | 0 | 0 | 0 | 0.324 | 1.647 | 0.919 | 0 |
| NT2RI2000294 | 0 | 0 | 0 | 1.343 | 0 | 3.814 | 0 |
| NT2RI2000344 | 0 | 0 | 0 | 1.149 | 0 | 0.816 | 0 |
| NT2RI2000412 | 0 | 0 | 0 | 0 | 0 | 23.298 | 0 |
| NT2RI2000578 | 0 | 0 | 0 | 0 | 0 | 0.674 | 0 |
| NT2RI2000671 | 0 | 0 | 0 | 0 | 0 | 1.060 | 0 |
| NT2RI2000685 | 0 | 0 | 0 | 2.813 | 0 | 2.995 | 0 |
| NT2RI2000727 | 0 | 1.816 | 3.990 | 0.184 | 0 | 2.607 | 0 |
| NT2RI2000829 | 0 | 0 | 0 | 8.133 | 13.801 | 0 | 0 |
| NT2RI2001054 | 0 | 0 | 4.588 | 0.845 | 0 | 1.199 | 0 |
| NT2RI2001091 | 0 | 24.677 | 0 | 2.495 | 0 | 0 | 0 |
| NT2RI2001230 | 0 | 5.414 | 0 | 0 | 0 | 0.777 | 0 |
| NT2RI2001342 | 0 | 11.079 | 0 | 0 | 0 | 0 | 0 |
| NT2RI2001385 | 0 | 0 | 0 | 0 | 14.236 | 0 | 0 |
| NT2RI2001422 | 0 | 0 | 0 | 5.277 | 0 | 0 | 0 |
| NT2RI2001450 | 0 | 0 | 0 | 2.515 | 0 | 16.068 | 0 |
| NT2RI2001540 | 0 | 1.998 | 0.439 | 1.333 | 0.617 | 0.229 | 0 |
| NT2RI2001621 | 0 | 0 | 0 | 2.173 | 0 | 0 | 0 |
| NT2RI2001731 | 0 | 0 | 0 | 1.344 | 0 | 0 | 0 |
| NT2RI2001769 | 0 | 0 | 17.143 | 0 | 0 | 0 | 0 |
| NT2RI2001859 | 0 | 0 | 0 | 0.689 | 0 | 1.956 | 0 |
| NT2RI2001866 | 0 | 0 | 0 | 10.300 | 0 | 0 | 0 |
| NT2RI2002091 | 1.261 | 0.659 | 2.586 | 0.048 | 0.097 | 0.176 | 0 |
| NT2RI2002152 | 0 | 0 | 0 | 0.893 | 0 | 2.534 | 0 |
| NT2RI2002243 | 0 | 0 | 0 | 0 | 0 | 3.314 | 0 |
| NT2RI2002266 | 0 | 0 | 0 | 0 | 0 | 2.525 | 0 |
| NT2RI2002316 | 0 | 0 | 0 | 0.569 | 0 | 0 | 0 |
| NT2RI2002391 | 0 | 0 | 0 | 0 | 0 | 4.086 | 0 |
| NT2RI2002540 | 0 | 0 | 0 | 1.227 | 0 | 6.967 | 0 |
| NT2RI2002554 | 0 | 12.727 | 0 | 0 | 0 | 1.827 | 0 |
| NT2RI2002585 | 0 | 0 | 0 | 9.228 | 0 | 0 | 0 |
| NT2RI2002654 | 0 | 0 | 0 | 1.668 | 0 | 1.184 | 0 |
| NT2RI2002699 | 0 | 0 | 0 | 0 | 0 | 11.520 | 0 |
| NT2RI2002802 | 0 | 0 | 0 | 0 | 0 | 28.966 | 0 |
| NT2RI2002819 | 0 | 0 | 0 | 0 | 0 | 3.751 | 0 |
| NT2RI2002847 | 0 | 0 | 0 | 0 | 0 | 1.265 | 0 |
| NT2RI2002958 | 0 | 0 | 0 | 0 | 0 | 2.910 | 0 |
| NT2RI2003011 | 0 | 0 | 0 | 2.451 | 0 | 3.479 | 0 |
| NT2RI2003051 | 0 | 0 | 0 | 3.633 | 0 | 2.063 | 0 |
| NT2RI2003205 | 0 | 0 | 0 | 0 | 0 | 3.244 | 0 |
| NT2RI2003222 | 0 | 0 | 0 | 0 | 0 | 25.614 | 0 |
| NT2RI2003301 | 0 | 0 | 0 | 0 | 0 | 5.719 | 0 |
| NT2RI2003304 | 0 | 0 | 2.024 | 0 | 0 | 0.529 | 0 |
| NT2RI2003317 | 0 | 11.064 | 0 | 0 | 0 | 4.765 | 0 |
| NT2RI2003338 | 0 | 0 | 0 | 0 | 0 | 3.061 | 0 |
| NT2RI2003344 | 0 | 0 | 0 | 9.675 | 0 | 1.962 | 0 |
| NT2RI2003361 | 0 | 0 | 0 | 3.505 | 0 | 0 | 0 |
| NT2RI2003407 | 0 | 0 | 0 | 0.859 | 0 | 1.220 | 0 |
| NT2RI2003420 | 0 | 0 | 0 | 2.186 | 0 | 1.552 | 0 |
| NT2RI2003481 | 0 | 0 | 0 | 8.223 | 13.955 | 5.837 | 0 |
| NT2RI2003556 | 0 | 0 | 0 | 0.270 | 1.375 | 0.767 | 0 |
| NT2RI2003655 | 0 | 0 | 0 | 0 | 0 | 19.683 | 0 |
| NT2RI2003678 | 0 | 0 | 0 | 0 | 0 | 3.837 | 0 |
| NT2RI2003695 | 0 | 0 | 12.145 | 0 | 0 | 5.554 | 0 |
| NT2RI2003738 | 0 | 0 | 0 | 0.124 | 0.632 | 0.529 | 0 |
| NT2RI2003921 | 0 | 0 | 0 | 0 | 0 | 1.911 | 0 |
| NT2RI2004059 | 0 | 0 | 0 | 0 | 24.622 | 0 | 0 |
| NT2RI2004284 | 0 | 0 | 0 | 1.141 | 0 | 3.239 | 0 |
| NT2RI2004290 | 0 | 0 | 0 | 0 | 0 | 21.496 | 0 |
| NT2RI2004304 | 0 | 0 | 0 | 5.911 | 0 | 4.196 | 0 |
| NT2RI2004398 | 0 | 34.966 | 0 | 3.536 | 0 | 5.020 | 0 |
| NT2RI2004410 | 0 | 0 | 0 | 5.311 | 18.024 | 5.026 | 0 |
| NT2RI2004535 | 0 | 0 | 0 | 2.717 | 0 | 3.857 | 0 |
| NT2RI2004608 | 0 | 25.968 | 0 | 0 | 0 | 0 | 0 |
| NT2RI2005115 | 0 | 0 | 0 | 4.337 | 0 | 6.157 | 0 |
| NT2RI2005116 | 0 | 8.972 | 0 | 1.815 | 0 | 1.288 | 0 |
| NT2RI2005150 | 0 | 0 | 0 | 0.489 | 0 | 4.860 | 0 |
| NT2RI2005166 | 0 | 0 | 0 | 18.511 | 0 | 0 | 0 |
| NT2RI2005239 | 0 | 0 | 0 | 0 | 0 | 7.947 | 0 |
| NT2RI2005246 | 0 | 0 | 71.596 | 0 | 0 | 0 | 0 |
| NT2RI2005335 | 12.134 | 0 | 0 | 5.495 | 0 | 2.730 | 0 |
| NT2RI2005353 | 0 | 0 | 0 | 0.818 | 0 | 2.321 | 0 |
| NT2RI2005405 | 0 | 0 | 0 | 0.199 | 0 | 0 | 0 |
| NT2RI2005473 | 0 | 22.924 | 0 | 0 | 0 | 0 | 0 |
| NT2RI2005564 | 0 | 0 | 0 | 6.323 | 0 | 0 | 0 |
| NT2RI2005713 | 0 | 0 | 0 | 0 | 5.344 | 2.980 | 0 |
| NT2RI2005723 | 0 | 0 | 0 | 1.781 | 0 | 1.011 | 0 |
| NT2RI2005811 | 0 | 10.753 | 0 | 0 | 0 | 3.087 | 0 |
| NT2RI2005816 | 0 | 0 | 0 | 0 | 0 | 6.440 | 0 |
| NT2RI2005851 | 0 | 0 | 0 | 5.290 | 0 | 11.265 | 0 |
| NT2RI2006070 | 0 | 0 | 0 | 0 | 0 | 2.071 | 0 |
| NT2RI2006071 | 0 | 0 | 0 | 64.115 | 0 | 0 | 0 |
| NT2RI2006072 | 0 | 0 | 0 | 0 | 0 | 0.771 | 0 |
| NT2RI2006271 | 0 | 0 | 0 | 1.982 | 0 | 0 | 0 |
| NT2RI2006412 | 0 | 0 | 0 | 4.654 | 0 | 18.171 | 0 |
| NT2RI2006640 | 0 | 0 | 0 | 0 | 0 | 12.665 | 0 |
| NT2RI2006647 | 0 | 0 | 0 | 3.255 | 0 | 0 | 0 |
| NT2RI2006682 | 0 | 0 | 0 | 0 | 0 | 2.479 | 0 |
| NT2RI2006825 | 0 | 0 | 0 | 0 | 0 | 2.762 | 0 |
| NT2RI2006856 | 0 | 0 | 3.612 | 0.665 | 1.692 | 0.472 | 0 |
| NT2RI2006943 | 0 | 0 | 0 | 1.726 | 0 | 4.902 | 0 |
| NT2RI2007054 | 0 | 0 | 0 | 2.764 | 0 | 0 | 0 |
| NT2RI2007084 | 0 | 0 | 0 | 0.772 | 0 | 1.096 | 0 |
| NT2RI2007096 | 0 | 0 | 0 | 0 | 18.731 | 0 | 0 |
| NT2RI2007148 | 0 | 0 | 0 | 0.670 | 0 | 0.952 | 0 |
| NT2RI2007377 | 0 | 0 | 0 | 2.494 | 0 | 11.801 | 0 |
| NT2RI2007384 | 0 | 0 | 0 | 0 | 0 | 1.745 | 0 |
| NT2RI2007445 | 0 | 0 | 0 | 1.273 | 0 | 0 | 0 |
| NT2RI2007468 | 0 | 0 | 0 | 2.966 | 0 | 0 | 0 |
| NT2RI2007498 | 0 | 0 | 3.145 | 0 | 0 | 0 | 0 |
| NT2RI2007572 | 0 | 0 | 0 | 1.061 | 0 | 0 | 0 |
| NT2RI2007589 | 0 | 0 | 0 | 1.516 | 0 | 1.076 | 0 |
| NT2RI2007593 | 0 | 0 | 0 | 2.338 | 11.905 | 0 | 0 |
| NT2RI2007629 | 0 | 0 | 0 | 1.431 | 0 | 4.062 | 0 |
| NT2RI2007723 | 0 | 0 | 27.282 | 0 | 0 | 3.565 | 0 |
| NT2RI2007879 | 49.750 | 0 | 12.240 | 0 | 0 | 0 | 0 |
| NT2RI2007884 | 0 | 0 | 0 | 1.802 | 0 | 0 | 0 |
| NT2RI2007987 | 0 | 0 | 0 | 1.278 | 0 | 3.628 | 0 |
| NT2RI2008045 | 0 | 0 | 0 | 1.102 | 0 | 0 | 0 |
| NT2RI2008141 | 0 | 0 | 0 | 0 | 0 | 2.155 | 0 |
| NT2RI2008171 | 0 | 0 | 0 | 3.152 | 0 | 4.474 | 0 |
| NT2RI2008188 | 0 | 0 | 0 | 0 | 0 | 28.966 | 0 |
| NT2RI2008336 | 0 | 2.812 | 0 | 0.853 | 0 | 0.404 | 0 |
| NT2RI2008396 | 0 | 0 | 0 | 0.313 | 0 | 1.777 | 0 |
| NT2RI2008481 | 0 | 0 | 0 | 0 | 0 | 0.745 | 0 |
| NT2RI2008526 | 0 | 0 | 5.913 | 0 | 0 | 0 | 0 |
| NT2RI2008566 | 0 | 0 | 0 | 0 | 0 | 9.477 | 0 |
| NT2RI2008714 | 0 | 0 | 0 | 0 | 0 | 29.569 | 0 |
| NT2RI2008724 | 0 | 0 | 0 | 0 | 0 | 1.850 | 0 |
| NT2RI2008749 | 0 | 0 | 0 | 0.401 | 0 | 0.570 | 0 |
| NT2RI2008791 | 0 | 0 | 0 | 0.828 | 0 | 0 | 0 |
| NT2RI2008808 | 0 | 0 | 0 | 3.218 | 0 | 4.568 | 0 |
| NT2RI2008812 | 0 | 0 | 0 | 0 | 0 | 7.295 | 0 |
| NT2RI2008942 | 0 | 0 | 0 | 1.489 | 0 | 1.057 | 0 |
| NT2RI2009037 | 0 | 5.917 | 6.501 | 1.795 | 0 | 1.699 | 0 |
| NT2RI2009065 | 0 | 0 | 0 | 0.994 | 3.375 | 0.941 | 0 |
| NT2RI2009066 | 0 | 0 | 0 | 1.945 | 0 | 0 | 0 |
| NT2RI2009083 | 0 | 0 | 0 | 0 | 0 | 10.331 | 0 |
| NT2RI2009173 | 0 | 0 | 0 | 0 | 0 | 1.124 | 0 |
| NT2RI2009194 | 0 | 0 | 0 | 0 | 0 | 0.990 | 0 |
| NT2RI2009233 | 0 | 0 | 0 | 1.601 | 0 | 4.545 | 0 |
| NT2RI2009239 | 0 | 0 | 0 | 2.976 | 0 | 0 | 0 |
| NT2RI2009269 | 0 | 0 | 0 | 2.104 | 7.141 | 4.978 | 0 |
| NT2RI2009281 | 0 | 0 | 0 | 0.999 | 0 | 4.254 | 0 |
| NT2RI2009402 | 0 | 0 | 0 | 2.226 | 11.333 | 6.320 | 0 |
| NT2RI2009406 | 0 | 0 | 0 | 1.997 | 0 | 0 | 0 |
| NT2RI2009583 | 0 | 0 | 3.451 | 5.399 | 0.808 | 0.902 | 0 |
| NT2RI2010795 | 0 | 0 | 0 | 0 | 0 | 16.619 | 0 |
| NT2RI2012350 | 0 | 2.809 | 0 | 0 | 0 | 0 | 0 |
| NT2RI2012659 | 0 | 0 | 0 | 48.128 | 0 | 13.665 | 0 |
| NT2RI2012726 | 0 | 0 | 0 | 3.293 | 0 | 0 | 0 |
| NT2RI2015342 | 0 | 0 | 0 | 2.135 | 0 | 0 | 0 |
| NT2RI2015533 | 0 | 0 | 0 | 3.309 | 5.616 | 12.527 | 0 |
| NT2RI2019751 | 0 | 0 | 0 | 28.087 | 0 | 0 | 0 |
| NT2RI2025075 | 0 | 0 | 0 | 12.033 | 0 | 0 | 0 |
| NT2RI2027975 | 0 | 0 | 0 | 28.087 | 0 | 0 | 0 |
| NT2RI3001348 | 0 | 0 | 0 | 7.418 | 0 | 0 | 0 |
| NT2RI3001445 | 0 | 0 | 0 | 4.495 | 0 | 0 | 0 |
| NT2RI3001515 | 0 | 0 | 0 | 0 | 0 | 21.825 | 0 |
| NT2RI3003382 | 0 | 0 | 0 | 28.087 | 0 | 0 | 0 |
| NT2RI3004510 | 0 | 0 | 0 | 20.009 | 0 | 0 | 0 |
| NT2RI3005724 | 0 | 0 | 0 | 42.065 | 0 | 5.972 | 0 |
| NT2RI3006284 | 0 | 0 | 0 | 1.469 | 0 | 0 | 0 |
| NT2RI3006673 | 0 | 0 | 0 | 0 | 0 | 10.055 | 0 |
| NT2RI3007213 | 0 | 0 | 0 | 28.087 | 0 | 0 | 0 |
| NT2RI3007291 | 0 | 0 | 0 | 35.535 | 0 | 0 | 0 |
| NT2RI3007543 | 0 | 0 | 0 | 1.204 | 0 | 0.855 | 0 |
| NT2RI3008055 | 0 | 0 | 0 | 15.678 | 0 | 0 | 0 |
| NT2RP6000005 | 0 | 0 | 0 | 1.561 | 0 | 0 | 0 |
| NT2RP6000008 | 0 | 0 | 0 | 22.750 | 0 | 0 | 0 |
| NT2RP6000017 | 0 | 0 | 0 | 3.186 | 0 | 1.508 | 0 |
| NT2RP6000032 | 0 | 0 | 0 | 0 | 0 | 7.902 | 0 |
| NT2RP6000039 | 0 | 0 | 0 | 6.364 | 0 | 1.807 | 0 |
| NT2RP6000059 | 0 | 0 | 0 | 0 | 0 | 21.855 | 0 |
| NT2RP6000072 | 0 | 0 | 12.461 | 0 | 0 | 0 | 0 |
| NT2RP6000078 | 0 | 0 | 0 | 0.255 | 0 | 1.449 | 0 |
| NT2RP6000085 | 0 | 0 | 0 | 3.283 | 0 | 4.660 | 0 |
| NT2RP6000086 | 0 | 0 | 0 | 22.750 | 0 | 0 | 0 |
| NT2RP6000109 | 0 | 0 | 0 | 1.356 | 0 | 3.849 | 0 |
| NT2RP6000110 | 0 | 0 | 0 | 1.944 | 0 | 13.796 | 0 |
| NT2RP6000123 | 0 | 0 | 0 | 0.278 | 2.829 | 0.394 | 0 |
| NT2RP6000130 | 0 | 56.184 | 0 | 0 | 0 | 0 | 0 |
| NT2RP7000069 | 0 | 0 | 0 | 9.563 | 0 | 0 | 0 |
| NT2RP7000076 | 0 | 0 | 0 | 0 | 0 | 1.228 | 0 |
| NT2RP7000086 | 0 | 0 | 0 | 18.153 | 0 | 12.885 | 0 |
| NT2RP7000173 | 0 | 0 | 0 | 1.973 | 0 | 0.560 | 0 |
| NT2RP7000238 | 0 | 0 | 0 | 5.513 | 0 | 1.304 | 0 |
| NT2RP7000271 | 0 | 0 | 0 | 0 | 0 | 3.056 | 0 |
| NT2RP7000477 | 0 | 0 | 0 | 1.404 | 0 | 0 | 0 |
| NT2RP7000579 | 0 | 0 | 0 | 12.835 | 0 | 0 | 0 |
| NT2RP7000586 | 0 | 0 | 0 | 0 | 0 | 11.071 | 0 |
| NT2RP7000600 | 0 | 0 | 0 | 6.291 | 0 | 8.931 | 0 |
| NT2RP7000624 | 0 | 0 | 0 | 21.677 | 0 | 0 | 0 |
| NT2RP7000812 | 0 | 0 | 61.537 | 0 | 0 | 0 | 0 |
| NT2RP7000906 | 0 | 9.156 | 0 | 2.778 | 0 | 5.258 | 0 |
| NT2RP7001166 | 0 | 0 | 11.535 | 1.062 | 0 | 0.754 | 0 |
| NT2RP7001231 | 0 | 0 | 0 | 0 | 0 | 4.161 | 0 |
| NT2RP7001283 | 0 | 0 | 4.341 | 0.400 | 0 | 0 | 0 |
| NT2RP7001364 | 0 | 0 | 0 | 0 | 0 | 29.482 | 0 |
| NT2RP7001475 | 0 | 0 | 0 | 24.938 | 0 | 0 | 0 |
| NT2RP7001962 | 0 | 18.645 | 0 | 1.885 | 0 | 5.353 | 0 |
| NT2RP7002379 | 0 | 0 | 0 | 2.144 | 0 | 3.043 | 0 |
| NT2RP7002449 | 0 | 0 | 0 | 5.735 | 0 | 6.107 | 0 |
| NT2RP7002594 | 0 | 0 | 0 | 0 | 0 | 13.764 | 0 |
| NT2RP7002619 | 0 | 0 | 0 | 0.773 | 0 | 1.098 | 0 |
| NT2RP7002738 | 0 | 0 | 0 | 4.086 | 0 | 0 | 0 |
| NT2RP7002802 | 0 | 0 | 0 | 2.594 | 0 | 0 | 0 |
| NT2RP7002829 | 0 | 0 | 0 | 6.206 | 0 | 0 | 0 |
| NT2RP7002875 | 0 | 0 | 0 | 3.930 | 3.334 | 6.508 | 0 |
| NT2RP7002906 | 0 | 0 | 0 | 3.980 | 0 | 8.475 | 0 |
| NT2RP7003055 | 0 | 0 | 0 | 0 | 0 | 10.632 | 0 |
| NT2RP7003203 | 0 | 0 | 0 | 2.622 | 0 | 0 | 0 |
| NT2RP7003319 | 0 | 0 | 0 | 1.943 | 3.297 | 0.919 | 0 |
| NT2RP7003511 | 0 | 0 | 25.483 | 0 | 0 | 0 | 0 |
| NT2RP7003632 | 0 | 0 | 0 | 3.467 | 0 | 4.922 | 0 |
| NT2RP7003647 | 0 | 0 | 0 | 8.353 | 0 | 4.743 | 0 |
| NT2RP7003688 | 0 | 0 | 0 | 4.193 | 0 | 6.696 | 0 |
| NT2RP7003724 | 0 | 0 | 0 | 26.217 | 0 | 0 | 0 |
| NT2RP7003960 | 0 | 0 | 0 | 2.352 | 0 | 0 | 0 |
| NT2RP7004114 | 0 | 0 | 0 | 7.915 | 0 | 0 | 0 |
| NT2RP7004123 | 0 | 13.469 | 0 | 1.362 | 0 | 0 | 0 |
| NT2RP7004173 | 0 | 0 | 0 | 2.710 | 2.760 | 3.078 | 0 |
| NT2RP7004196 | 0 | 0 | 0 | 3.720 | 4.734 | 5.281 | 0 |
| NT2RP7004352 | 0 | 0 | 0 | 4.822 | 0 | 1.711 | 0 |
| NT2RP7004373 | 0 | 0 | 0 | 1.671 | 0 | 3.558 | 0 |
| NT2RP7004428 | 0 | 0 | 0 | 7.181 | 0 | 6.796 | 0 |
| NT2RP7004481 | 0 | 0 | 0 | 3.817 | 0 | 0 | 0 |
| NT2RP7004728 | 0 | 0 | 0 | 2.231 | 0 | 4.751 | 0 |
| NT2RP7004751 | 0 | 0 | 0 | 0 | 1.691 | 0.943 | 0 |
| NT2RP7004790 | 0 | 0 | 0 | 11.078 | 0 | 0 | 0 |
| NT2RP7004884 | 0 | 0 | 0 | 11.691 | 0 | 2.766 | 0 |
| NT2RP7004911 | 0 | 0 | 0 | 1.251 | 0 | 0 | 0 |
| NT2RP7004915 | 0 | 0 | 0 | 10.538 | 0 | 7.480 | 0 |
| NT2RP7004925 | 0 | 0 | 0 | 4.481 | 0 | 1.272 | 0 |
| NT2RP7004946 | 0 | 0 | 0 | 3.666 | 0 | 0 | 0 |
| NT2RP7005219 | 0 | 0 | 0 | 37.067 | 0 | 0 | 0 |
| NT2RP7005493 | 0 | 0 | 0 | 0 | 43.725 | 0 | 0 |
| NT2RP7005513 | 0 | 0 | 0 | 0 | 0 | 1.703 | 0 |
| NT2RP7005529 | 0 | 0 | 0 | 5.240 | 0 | 7.439 | 0 |
| NT2RP7005675 | 0 | 0 | 0 | 8.256 | 0 | 5.861 | 0 |
| NT2RP7005750 | 0 | 0 | 0 | 5.079 | 0 | 0 | 0 |
| NT2RP7006162 | 0 | 0 | 0 | 22.750 | 0 | 0 | 0 |
| NT2RP7006188 | 0 | 0 | 0 | 0 | 0 | 2.623 | 0 |
| NT2RP7006223 | 0 | 0 | 0 | 17.994 | 0 | 0 | 0 |
| NT2RP7006263 | 0 | 0 | 31.053 | 8.574 | 0 | 0 | 0 |
| NT2RP7006490 | 0 | 0 | 0 | 1.523 | 0 | 0 | 0 |
| NT2RP7006619 | 0 | 0 | 0 | 1.567 | 7.976 | 0 | 0 |
| NT2RP7006701 | 0 | 0 | 38.773 | 7.137 | 0 | 5.066 | 0 |
| NT2RP7006717 | 0 | 0 | 10.147 | 1.401 | 0 | 0 | 0 |
| NT2RP7007154 | 0 | 0 | 0 | 0.809 | 0 | 0 | 0 |
| NT2RP7007177 | 0 | 0 | 0 | 0 | 0 | 2.744 | 0 |
| NT2RP7007252 | 0 | 0 | 0 | 9.748 | 0 | 6.919 | 0 |
| NT2RP7007530 | 0 | 0 | 0 | 1.556 | 0 | 2.209 | 0 |
| NT2RP7007537 | 0 | 8.631 | 0 | 5.236 | 0 | 1.239 | 0 |
| NT2RP7007610 | 0 | 0 | 0 | 6.162 | 0 | 0 | 0 |
| NT2RP7007842 | 0 | 0 | 0 | 4.084 | 6.930 | 0 | 0 |
| NT2RP7007975 | 0 | 0 | 0 | 21.309 | 0 | 1.375 | 0 |
| NT2RP7008161 | 0 | 0 | 0 | 4.456 | 0 | 0 | 0 |
| NT2RP7008167 | 0 | 0 | 0 | 1.288 | 0 | 0 | 0 |
| NT2RP7008190 | 0 | 9.311 | 0 | 0.941 | 0 | 0 | 0 |
| NT2RP7008396 | 0 | 0 | 0 | 0 | 0 | 12.403 | 0 |
| NT2RP7008441 | 0 | 0 | 0 | 14.289 | 0 | 0 | 0 |
| NT2RP7008543 | 0 | 19.310 | 0 | 0 | 0 | 2.772 | 0 |
| NT2RP7008714 | 0 | 0 | 0 | 8.258 | 0 | 23.445 | 0 |
| NT2RP7009012 | 0 | 0 | 0 | 8.047 | 0 | 0 | 0 |
| NT2RP7009087 | 0 | 0 | 0 | 1.724 | 0 | 2.448 | 0 |
| NT2RP7009097 | 0 | 0 | 0 | 0 | 6.496 | 0 | 0 |
| NT2RP7009108 | 0 | 0 | 0 | 0.631 | 12.846 | 8.060 | 0 |
| NT2RP7009149 | 0 | 0 | 0 | 0 | 4.323 | 1.205 | 0 |
| NT2RP7009259 | 0 | 0 | 4.333 | 2.393 | 0 | 4.529 | 0 |
| NT2RP7009373 | 0 | 0 | 0 | 8.554 | 0 | 0 | 0 |
| NT2RP7009394 | 0 | 0 | 0 | 0.858 | 4.369 | 1.218 | 0 |
| NT2RP7009481 | 0 | 0 | 0 | 2.907 | 0 | 4.127 | 0 |
| NT2RP7009482 | 0 | 0 | 0 | 2.631 | 0 | 0.467 | 0 |
| NT2RP7009498 | 0 | 0 | 0 | 0 | 0 | 1.015 | 0 |
| NT2RP7010109 | 0 | 0 | 0 | 11.153 | 0 | 0 | 0 |
| NT2RP7010599 | 0 | 0 | 0 | 22.750 | 0 | 0 | 0 |
| NT2RP7013573 | 0 | 0 | 0 | 5.114 | 0 | 0 | 0 |
| NT2RP7014910 | 0 | 0 | 0 | 0.849 | 0 | 1.205 | 0 |
| NT2RP7015503 | 0 | 0 | 0 | 2.247 | 0 | 0 | 0 |
| NT2RP7016574 | 0 | 0 | 0 | 0 | 0 | 22.259 | 0 |
| NT2RP7017474 | 0 | 0 | 0 | 13.360 | 0 | 0 | 0 |
| NT2RP7019543 | 0 | 0 | 0 | 0 | 38.221 | 0 | 0 |
| NT2RP8000521 | 0 | 0 | 0 | 37.067 | 0 | 0 | 0 |
| NT2RP8007715 | 0 | 0 | 0 | 44.589 | 0 | 0 | 0 |
| NT2RP8007920 | 0 | 0 | 0 | 1.404 | 0 | 0 | 0 |
| NTONG1000033 | 0 | 0 | 0 | 3.478 | 0 | 0 | 0 |
| NTONG1000098 | 0 | 0 | 0 | 4.070 | 0 | 1.284 | 0 |
| NTONG1000182 | 0 | 0 | 0 | 0 | 0 | 1.247 | 0 |
| NTONG1000246 | 0 | 0 | 12.058 | 0 | 0 | 0 | 0 |
| NTONG1000264 | 0 | 0 | 0 | 0 | 0 | 6.874 | 0 |
| NTONG2000107 | 0 | 0 | 0 | 0 | 0 | 10.745 | 0 |
| NTONG2000265 | 0 | 0 | 6.574 | 6.656 | 0 | 1.718 | 0 |
| NTONG2000334 | 0 | 0 | 0 | 1.451 | 7.388 | 0 | 0 |
| NTONG2000876 | 0 | 0 | 21.476 | 0 | 0 | 1.403 | 0 |
| NTONG2001428 | 0 | 0 | 0 | 0 | 0 | 10.621 | 0 |
| NTONG2001550 | 0 | 0 | 0 | 2.470 | 0 | 0 | 0 |
| NTONG2001612 | 0 | 7.879 | 0 | 0.797 | 0 | 0 | 0 |
| NTONG2001657 | 0 | 0 | 51.133 | 0 | 0 | 0 | 0 |
| NTONG2001676 | 0 | 0 | 0 | 5.063 | 0 | 0 | 0 |
| NTONG2001762 | 0 | 0 | 0 | 2.560 | 0 | 9.085 | 0 |
| NTONG2003454 | 0 | 0 | 0 | 0 | 0 | 3.004 | 0 |
| NTONG2004844 | 0 | 11.375 | 12.498 | 1.150 | 0 | 1.633 | 0 |
| NTONG2005391 | 0 | 0 | 0 | 1.655 | 0 | 4.698 | 0 |
| NTONG2005520 | 0 | 14.017 | 0 | 1.890 | 0 | 1.341 | 0 |
| NTONG2005801 | 0 | 0 | 0 | 3.793 | 0 | 1.795 | 0 |
| NTONG2005969 | 0 | 0 | 0 | 4.560 | 11.607 | 6.473 | 0 |
| NTONG2006484 | 0 | 0 | 0 | 3.068 | 0 | 0 | 0 |
| NTONG2006783 | 0 | 0 | 0 | 0 | 0 | 2.853 | 0 |
| NTONG2007658 | 0 | 0 | 0 | 4.261 | 0 | 0 | 0 |
| NTONG2007756 | 0 | 0 | 0 | 4.791 | 0 | 0 | 0 |
| NTONG2009468 | 0 | 0 | 0 | 13.482 | 0 | 0 | 0 |
| NTONG2009576 | 0 | 0 | 0 | 10.086 | 0 | 7.159 | 0 |
| OCBBF1000049 | 0 | 0 | 0 | 0 | 0 | 5.007 | 0 |
| OCBBF1000086 | 0 | 0 | 0 | 2.173 | 0 | 0 | 0 |
| OCBBF1000114 | 0 | 0 | 0 | 0 | 0 | 2.569 | 0 |
| OCBBF1000146 | 0 | 0 | 0 | 0 | 0 | 0.869 | 0 |
| OCBBF1000175 | 0 | 0 | 0 | 5.112 | 0 | 7.258 | 0 |
| OCBBF1000188 | 32.641 | 0 | 0 | 0.739 | 0 | 1.049 | 0 |
| OCBBF1000254 | 0 | 0 | 0 | 0 | 0 | 44.784 | 0 |
| OCBBF2000015 | 0 | 0 | 0 | 5.615 | 0 | 3.986 | 0 |
| OCBBF2000126 | 0 | 0 | 0 | 2.759 | 0 | 3.916 | 0 |
| OCBBF2000178 | 0 | 0 | 0 | 3.095 | 3.940 | 6.591 | 0 |
| OCBBF2000231 | 0 | 0 | 0 | 0 | 0 | 3.947 | 0 |
| OCBBF2000277 | 0 | 0 | 0 | 10.429 | 0 | 7.403 | 0 |
| OCBBF2000323 | 0 | 0 | 0 | 0 | 0 | 15.289 | 0 |
| OCBBF2000467 | 0 | 14.157 | 0 | 0 | 0 | 2.032 | 0 |
| OCBBF2000522 | 0 | 0 | 0 | 0 | 0 | 5.096 | 0 |
| OCBBF2000677 | 0 | 0 | 0 | 0 | 0 | 16.413 | 0 |
| OCBBF2000712 | 0 | 0 | 0 | 0.671 | 0 | 0 | 0 |
| OCBBF2000824 | 0 | 0 | 0 | 0 | 0 | 6.055 | 0 |
| OCBBF2000831 | 0 | 0 | 0 | 0 | 0 | 9.702 | 0 |
| OCBBF2000846 | 0 | 0 | 0 | 1.039 | 0 | 0.737 | 0 |
| OCBBF2000982 | 0 | 0 | 0 | 1.238 | 0 | 0.879 | 0 |
| OCBBF2000986 | 0 | 0 | 0 | 0.684 | 0 | 0.971 | 0 |
| OCBBF2001140 | 0 | 0 | 0 | 0 | 0 | 11.393 | 0 |
| OCBBF2001166 | 0 | 0 | 0 | 15.560 | 0 | 0 | 0 |
| OCBBF2001186 | 0 | 0 | 0 | 0 | 0 | 17.837 | 0 |
| OCBBF2001196 | 0 | 0 | 0 | 11.240 | 0 | 0 | 0 |
| OCBBF2001210 | 0 | 0 | 0 | 0 | 0 | 14.613 | 0 |
| OCBBF2001307 | 0 | 0 | 0 | 2.361 | 0 | 10.055 | 0 |
| OCBBF2001492 | 0 | 0 | 0 | 4.383 | 0 | 3.457 | 0 |
| OCBBF2001639 | 0 | 0 | 0 | 6.675 | 0 | 0 | 0 |
| OCBBF2001687 | 0 | 0 | 0 | 0 | 0 | 1.938 | 0 |
| OCBBF2001794 | 0 | 0 | 0 | 0 | 0 | 4.764 | 0 |
| OCBBF2001931 | 0 | 0 | 0 | 0 | 0 | 16.872 | 0 |
| OCBBF2002015 | 0 | 0 | 0 | 9.817 | 0 | 0 | 0 |
| OCBBF2002086 | 0 | 0 | 0 | 4.573 | 0 | 0 | 0 |
| OCBBF2002290 | 0 | 0 | 0 | 0 | 0 | 20.324 | 0 |
| OCBBF2002376 | 0 | 0 | 0 | 0 | 0 | 7.671 | 0 |
| OCBBF2002626 | 0 | 0 | 0 | 2.398 | 0 | 1.702 | 0 |
| OCBBF2002656 | 0 | 11.610 | 0 | 7.044 | 0 | 3.333 | 0 |
| OCBBF2003052 | 0 | 0 | 0 | 0 | 0 | 7.654 | 0 |
| OCBBF2003246 | 0 | 0 | 0 | 0 | 0 | 9.861 | 0 |
| OCBBF2003518 | 0 | 0 | 0 | 0 | 0 | 1.039 | 0 |
| OCBBF2003819 | 0 | 0 | 0 | 14.955 | 0 | 0 | 0 |
| OCBBF2003925 | 0 | 0 | 0 | 0 | 3.011 | 1.679 | 0 |
| OCBBF2004104 | 0 | 0 | 0 | 0 | 4.949 | 4.140 | 0 |
| OCBBF2004235 | 0 | 0 | 0 | 0 | 43.096 | 0 | 0 |
| OCBBF2004273 | 0 | 0 | 0 | 1.909 | 0 | 0 | 0 |
| OCBBF2004757 | 0 | 0 | 0 | 3.518 | 8.955 | 2.497 | 0 |
| OCBBF2005476 | 0 | 0 | 0 | 0 | 0 | 4.710 | 0 |
| OCBBF2005956 | 0 | 0 | 0 | 6.045 | 10.258 | 5.721 | 0 |
| OCBBF2006113 | 0 | 0 | 0 | 18.680 | 0 | 0 | 0 |
| OCBBF2006151 | 0 | 0 | 0 | 4.092 | 0 | 0 | 0 |
| OCBBF2006172 | 0 | 0 | 0 | 0 | 0 | 5.283 | 0 |
| OCBBF2006313 | 0 | 0 | 0 | 8.105 | 0 | 0 | 0 |
| OCBBF2006764 | 0 | 0 | 0 | 21.782 | 0 | 15.461 | 0 |
| OCBBF2007028 | 0 | 0 | 0 | 8.820 | 0 | 6.956 | 0 |
| OCBBF2007114 | 0 | 0 | 0 | 0 | 38.623 | 21.540 | 0 |
| OCBBF2007224 | 0 | 0 | 0 | 6.702 | 0 | 0 | 0 |
| OCBBF2007354 | 31.490 | 0 | 0 | 0.713 | 0 | 1.012 | 0 |
| OCBBF2007415 | 0 | 0 | 0 | 3.410 | 0 | 4.841 | 0 |
| OCBBF2007622 | 0 | 0 | 0 | 2.606 | 0 | 0 | 0 |
| OCBBF2007762 | 0 | 0 | 0 | 0 | 0 | 15.843 | 0 |
| OCBBF2007829 | 0 | 0 | 0 | 5.846 | 0 | 1.106 | 0 |
| OCBBF2008005 | 0 | 11.145 | 0 | 6.762 | 0 | 6.399 | 0 |
| OCBBF2008144 | 0 | 0 | 0 | 4.094 | 0 | 2.906 | 0 |
| OCBBF2008340 | 0 | 0 | 0 | 0 | 0 | 7.778 | 0 |
| OCBBF2008511 | 0 | 0 | 0 | 7.836 | 39.893 | 11.124 | 0 |
| OCBBF2008701 | 0 | 0 | 0 | 0 | 0 | 10.920 | 0 |
| OCBBF2008775 | 0 | 0 | 0 | 0 | 0 | 44.784 | 0 |
| OCBBF2009095 | 0 | 0 | 0 | 4.665 | 23.748 | 6.622 | 0 |
| OCBBF2009242 | 0 | 0 | 0 | 6.029 | 10.231 | 0 | 0 |
| OCBBF2009301 | 0 | 0 | 0 | 0 | 0 | 4.177 | 0 |
| OCBBF2009352 | 0 | 0 | 0 | 0 | 40.679 | 28.358 | 0 |
| OCBBF2009772 | 0 | 0 | 0 | 6.686 | 0 | 7.119 | 0 |
| OCBBF2009836 | 0 | 0 | 0 | 8.725 | 0 | 4.129 | 0 |
| OCBBF2010313 | 0 | 0 | 0 | 0 | 49.562 | 0 | 0 |
| OCBBF2010557 | 0 | 0 | 0 | 13.005 | 0 | 0 | 0 |
| OCBBF2010819 | 0 | 0 | 0 | 8.903 | 0 | 0 | 0 |
| OCBBF2010858 | 0 | 0 | 0 | 4.728 | 0 | 0 | 0 |
| OCBBF2010863 | 0 | 0 | 0 | 0 | 0 | 44.784 | 0 |
| OCBBF2010871 | 0 | 0 | 0 | 3.244 | 0 | 13.817 | 0 |
| OCBBF2011021 | 0 | 0 | 0 | 6.155 | 0 | 8.738 | 0 |
| OCBBF2011073 | 0 | 0 | 0 | 26.641 | 0 | 0 | 0 |
| OCBBF2011232 | 0 | 0 | 0 | 5.687 | 0 | 8.073 | 0 |
| OCBBF2011536 | 0 | 0 | 0 | 2.832 | 0 | 2.010 | 0 |
| OCBBF2011669 | 0 | 0 | 0 | 36.360 | 0 | 0 | 0 |
| OCBBF2011759 | 0 | 0 | 0 | 8.623 | 0 | 2.825 | 0 |
| OCBBF2011887 | 0 | 0 | 0 | 6.676 | 0 | 0 | 0 |
| OCBBF2011897 | 0 | 0 | 0 | 0 | 0 | 17.395 | 0 |
| OCBBF2011914 | 0 | 0 | 0 | 2.588 | 13.175 | 3.674 | 0 |
| OCBBF2012039 | 0 | 0 | 0 | 3.266 | 0 | 7.727 | 0 |
| OCBBF2012525 | 0 | 0 | 0 | 15.998 | 0 | 0 | 0 |
| OCBBF2012553 | 0 | 0 | 0 | 0 | 4.238 | 1.182 | 0 |
| OCBBF2012678 | 0 | 0 | 0 | 29.374 | 0 | 0 | 0 |
| OCBBF2012704 | 0 | 0 | 0 | 14.819 | 0 | 0 | 0 |
| OCBBF2012714 | 0 | 0 | 0 | 4.120 | 0 | 0 | 0 |
| OCBBF2012812 | 0 | 0 | 0 | 0 | 74.416 | 0 | 0 |
| OCBBF2012821 | 0 | 0 | 0 | 0 | 0 | 2.521 | 0 |
| OCBBF2012881 | 0 | 0 | 0 | 0 | 0 | 44.784 | 0 |
| OCBBF2012908 | 0 | 0 | 0 | 0 | 0 | 9.905 | 0 |
| OCBBF2013011 | 0 | 0 | 0 | 0 | 0 | 22.823 | 0 |
| OCBBF2013149 | 0 | 10.886 | 0 | 3.303 | 5.604 | 14.065 | 0 |
| OCBBF2013285 | 0 | 0 | 0 | 36.360 | 0 | 0 | 0 |
| OCBBF2013324 | 0 | 0 | 0 | 53.329 | 0 | 0 | 0 |
| OCBBF2013366 | 0 | 0 | 0 | 1.916 | 0 | 0 | 0 |
| OCBBF2013481 | 0 | 0 | 0 | 3.880 | 0 | 5.509 | 0 |
| OCBBF2013843 | 0 | 0 | 0 | 3.413 | 0 | 2.154 | 0 |
| OCBBF2014064 | 0 | 0 | 0 | 0 | 0 | 1.376 | 0 |
| OCBBF2014089 | 0 | 0 | 0 | 0 | 0 | 19.885 | 0 |
| OCBBF2014292 | 0 | 0 | 0 | 0 | 0 | 1.044 | 0 |
| OCBBF2014576 | 0 | 0 | 0 | 2.593 | 0 | 0 | 0 |
| OCBBF2014745 | 0 | 0 | 0 | 36.360 | 0 | 0 | 0 |
| OCBBF2015115 | 0 | 0 | 0 | 12.664 | 0 | 0 | 0 |
| OCBBF2015233 | 0 | 0 | 0 | 22.219 | 0 | 0 | 0 |
| OCBBF2015751 | 0 | 0 | 0 | 0 | 0 | 8.566 | 0 |
| OCBBF2016689 | 0 | 0 | 0 | 22.219 | 0 | 0 | 0 |
| OCBBF2016729 | 0 | 0 | 0 | 0 | 0 | 27.555 | 0 |
| OCBBF2017035 | 0 | 17.018 | 0 | 2.581 | 13.142 | 1.222 | 0 |
| OCBBF2017055 | 0 | 0 | 0 | 12.735 | 0 | 18.079 | 0 |
| OCBBF2017398 | 0 | 9.029 | 0 | 1.826 | 0 | 3.888 | 0 |
| OCBBF2017458 | 0 | 0 | 0 | 7.903 | 0 | 5.609 | 0 |
| OCBBF2017754 | 0 | 0 | 0 | 7.995 | 0 | 0 | 0 |
| OCBBF2017791 | 0 | 0 | 0 | 10 | 0 | 3.872 | 0 |
| OCBBF2017882 | 0 | 0 | 0 | 0 | 0 | 7.189 | 0 |
| OCBBF2017893 | 0 | 12.175 | 0 | 0 | 0 | 0 | 0 |
| OCBBF2018012 | 0 | 0 | 0 | 0 | 0 | 2.828 | 0 |
| OCBBF2018084 | 0 | 30.950 | 0 | 9.389 | 0 | 4.443 | 0 |
| OCBBF2018234 | 0 | 0 | 0 | 9.194 | 0 | 19.579 | 0 |
| OCBBF2018581 | 0 | 30.197 | 0 | 0 | 0 | 8.670 | 0 |
| OCBBF2018618 | 0 | 0 | 0 | 0 | 0 | 16.341 | 0 |
| OCBBF2018707 | 0 | 0 | 0 | 1.596 | 16.252 | 2.266 | 0 |
| OCBBF2018827 | 0 | 0 | 0 | 3.483 | 0 | 4.944 | 0 |
| OCBBF2018956 | 0 | 0 | 0 | 3.604 | 0 | 1.705 | 0 |
| OCBBF2020343 | 0 | 0 | 0 | 36.360 | 0 | 0 | 0 |
| OCBBF2020741 | 0 | 0 | 0 | 20.028 | 0 | 0 | 0 |
| OCBBF2021286 | 0 | 0 | 0 | 6.550 | 0 | 0 | 0 |
| OCBBF2022351 | 0 | 0 | 0 | 36.360 | 0 | 0 | 0 |
| OCBBF2023162 | 0 | 0 | 0 | 0 | 37.152 | 31.080 | 0 |
| OCBBF2024850 | 0 | 0 | 0 | 1.577 | 0 | 2.239 | 0 |
| OCBBF2025527 | 0 | 0 | 0 | 36.360 | 0 | 0 | 0 |
| OCBBF2026368 | 0 | 0 | 0 | 5.865 | 0 | 8.326 | 0 |
| OCBBF2026649 | 0 | 0 | 0 | 36.360 | 0 | 0 | 0 |
| OCBBF2027197 | 0 | 0 | 0 | 36.360 | 0 | 0 | 0 |
| OCBBF2027661 | 0 | 0 | 0 | 53.329 | 0 | 0 | 0 |
| OCBBF2030329 | 0 | 0 | 0 | 0 | 0 | 44.784 | 0 |
| OCBBF2030927 | 0 | 0 | 0 | 0 | 0 | 44.784 | 0 |
| OCBBF2033295 | 0 | 0 | 0 | 7.464 | 0 | 0 | 0 |
| OCBBF2035214 | 0 | 0 | 0 | 0 | 0 | 44.784 | 0 |
| OCBBF2035226 | 0 | 0 | 0 | 0.417 | 0 | 0 | 0 |
| OCBBF2036743 | 0 | 0 | 0 | 15.690 | 0 | 11.137 | 0 |
| OCBBF3000323 | 0 | 0 | 0 | 7.082 | 0 | 3.351 | 0 |
| OCBBF3001333 | 0 | 0 | 0 | 4.561 | 0 | 6.475 | 0 |
| OCBBF3004487 | 0 | 0 | 0 | 6.432 | 0 | 4.565 | 0 |
| OCBBF3009244 | 0 | 0 | 0 | 0 | 0 | 34.702 | 0 |
| PANCR1000091 | 0 | 0 | 0 | 0.214 | 0 | 0 | 0 |
| PEBLM1000174 | 0 | 0 | 0 | 3.394 | 0 | 0 | 0 |
| PEBLM2000147 | 0 | 0 | 0 | 1.811 | 0 | 10.283 | 0 |
| PEBLM2000222 | 0 | 0 | 0 | 0 | 0 | 0.585 | 0 |
| PEBLM2000267 | 0 | 0 | 0 | 1.996 | 25.404 | 2.834 | 0 |
| PEBLM2000326 | 0 | 0 | 0 | 7.705 | 0 | 0 | 0 |
| PEBLM2001072 | 0 | 0 | 0 | 5.148 | 0 | 1.827 | 0 |
| PEBLM2003914 | 0 | 14.913 | 0 | 3.016 | 7.677 | 4.282 | 0 |
| PEBLM2004452 | 0 | 0 | 0 | 1.916 | 0 | 2.720 | 0 |
| PEBLM2004666 | 0 | 0 | 0 | 0 | 0 | 3.744 | 0 |
| PEBLM2005282 | 0 | 0 | 0 | 0 | 0 | 11.820 | 0 |
| PEBLM2007437 | 0 | 0 | 0 | 0 | 21.543 | 0 | 0 |
| PEBLM2007774 | 0 | 0 | 0 | 0.214 | 0 | 0 | 0 |
| PERIC2000478 | 0 | 0 | 0 | 7.727 | 0 | 0 | 0 |
| PERIC2000889 | 0 | 0 | 0 | 6.314 | 0 | 8.963 | 0 |
| PERIC2003720 | 0 | 0 | 0 | 0 | 0 | 13.012 | 0 |
| PERIC2005117 | 0 | 0 | 0 | 1.525 | 0 | 2.164 | 0 |
| PERIC2006443 | 0 | 34.088 | 0 | 0 | 0 | 0 | 0 |
| PERIC2007068 | 0 | 0 | 0 | 8.761 | 0 | 0 | 0 |
| PLACE5000066 | 0 | 0 | 0 | 0 | 0 | 18.438 | 0 |
| PLACE5000113 | 0 | 0 | 0 | 6.106 | 0 | 1.734 | 0 |
| PLACE5000159 | 0 | 0 | 0 | 0 | 0 | 2.290 | 0 |
| PLACE5000170 | 0 | 0 | 0 | 0 | 0 | 3.503 | 0 |
| PLACE5000172 | 0 | 0 | 0 | 4.613 | 0 | 2.619 | 0 |
| PLACE6000145 | 0 | 7.274 | 0 | 0 | 0 | 0 | 0 |
| PLACE6000263 | 0 | 0 | 11.725 | 2.158 | 0 | 4.596 | 0 |
| PLACE6000379 | 0 | 2.479 | 1.362 | 1.003 | 0.638 | 0.712 | 0 |
| PLACE6000414 | 0 | 0 | 9.882 | 0 | 0 | 0 | 0 |
| PLACE6000619 | 0 | 0 | 0 | 0 | 0 | 36.150 | 0 |
| PLACE6001064 | 0 | 0 | 0 | 4.479 | 2.073 | 1.156 | 0 |
| PLACE6001185 | 0 | 0 | 0 | 15.159 | 0 | 0 | 0 |
| PLACE6001262 | 0 | 0 | 0 | 6.202 | 0 | 0 | 0 |
| PLACE6001281 | 0 | 0 | 0 | 2.443 | 0 | 0 | 0 |
| PLACE6001443 | 0 | 0 | 15.148 | 0 | 0 | 0 | 0 |
| PLACE6001823 | 0 | 0 | 0 | 20.223 | 0 | 0 | 0 |
| PLACE6002084 | 0 | 0 | 2.848 | 0.262 | 0 | 1.116 | 0 |
| PLACE6002102 | 0 | 0 | 0 | 2.005 | 0 | 1.423 | 0 |
| PLACE6002419 | 0 | 0 | 0 | 0 | 0 | 10.504 | 0 |
| PLACE6002692 | 0 | 0 | 0 | 0 | 0 | 36.150 | 0 |
| PLACE6003038 | 0 | 0 | 0 | 2.561 | 0 | 0 | 0 |
| PLACE6003621 | 0 | 0 | 0 | 28.511 | 0 | 0 | 0 |
| PLACE6004005 | 0 | 0 | 0 | 7.708 | 3.568 | 3.979 | 0 |
| PLACE6004312 | 0 | 0 | 0 | 0.856 | 0 | 1.823 | 0 |
| PLACE6004397 | 0 | 0 | 0 | 1.305 | 13.283 | 1.852 | 0 |
| PLACE6004578 | 0 | 0 | 0 | 1.760 | 0 | 1.249 | 0 |
| PLACE6005231 | 0 | 0 | 0 | 31.356 | 0 | 0 | 0 |
| PLACE6005482 | 0 | 0 | 0 | 0 | 0 | 2.664 | 0 |
| PLACE6005691 | 0 | 0 | 0 | 0 | 0 | 36.150 | 0 |
| PLACE6006137 | 0 | 0 | 0 | 2.424 | 12.342 | 6.883 | 0 |
| PLACE6006549 | 0 | 5.605 | 0 | 0.567 | 0 | 0 | 0 |
| PLACE6007180 | 0 | 0 | 0 | 15.213 | 0 | 32.395 | 0 |
| PLACE6007373 | 89.702 | 0 | 0 | 2.031 | 0 | 0 | 0 |
| PLACE6007436 | 0 | 0 | 0 | 5.100 | 0 | 7.240 | 0 |
| PLACE6008444 | 0 | 0 | 0 | 0 | 0 | 36.150 | 0 |
| PLACE6008775 | 0 | 0 | 0 | 5.233 | 0 | 14.857 | 0 |
| PLACE6009338 | 0 | 0 | 0 | 0 | 0 | 25.317 | 0 |
| PLACE6010484 | 0 | 10.849 | 0 | 1.097 | 0 | 3.115 | 0 |
| PLACE6010936 | 0 | 0 | 0 | 0 | 0 | 12.399 | 0 |
| PLACE6011041 | 0 | 0 | 0 | 1.931 | 0 | 0 | 0 |
| PLACE6011057 | 0 | 0 | 0 | 1.600 | 8.144 | 0 | 0 |
| PLACE6012028 | 0 | 0 | 0 | 0 | 0 | 12.650 | 0 |
| PLACE6013672 | 0 | 0 | 0 | 0 | 0 | 27.825 | 0 |
| PLACE6014064 | 0 | 21.482 | 0 | 0 | 0 | 3.084 | 0 |
| PLACE6015051 | 0 | 32.356 | 0 | 0 | 0 | 0 | 0 |
| PLACE6015445 | 0 | 0 | 0 | 0 | 40.154 | 0 | 0 |
| PLACE6015729 | 0 | 0 | 0 | 0 | 0 | 36.150 | 0 |
| PLACE6016942 | 0 | 0 | 0 | 0 | 0 | 3.942 | 0 |
| PLACE6018031 | 0 | 0 | 0 | 4.772 | 0 | 0 | 0 |
| PLACE6019195 | 0 | 0 | 0 | 6.023 | 0 | 0 | 0 |
| PLACE7004103 | 0 | 0 | 0 | 0.918 | 0 | 1.303 | 0 |
| PLACE7008261 | 0 | 0 | 0 | 20.223 | 0 | 0 | 0 |
| PROST1000097 | 0 | 4.127 | 0 | 3.339 | 2.125 | 1.185 | 0 |
| PROST1000199 | 0 | 5.128 | 0 | 0.519 | 0 | 0 | 0 |
| PROST1000215 | 0 | 0 | 0 | 3.630 | 0 | 5.154 | 0 |
| PROST1000220 | 0 | 0 | 0 | 0.482 | 0 | 0 | 0 |
| PROST1000226 | 0 | 0 | 27.595 | 0 | 0 | 0 | 0 |
| PROST1000272 | 0 | 0 | 0 | 0 | 0 | 3.179 | 0 |
| PROST1000526 | 0 | 0 | 0 | 1.793 | 0 | 2.546 | 0 |
| PROST1000564 | 0 | 0 | 0 | 0.954 | 0 | 0 | 0 |
| PROST2000138 | 0 | 1.825 | 0 | 0.185 | 0 | 0.611 | 0 |
| PROST2000176 | 0 | 17.815 | 0 | 0 | 0 | 0 | 0 |
| PROST2000284 | 0 | 0 | 0 | 4.971 | 12.653 | 0 | 0 |
| PROST2000567 | 0 | 0 | 0 | 0 | 0 | 14.432 | 0 |
| PROST2000761 | 0 | 66.434 | 0 | 0 | 0 | 0 | 0 |
| PROST2001002 | 0 | 0 | 0 | 13.944 | 0 | 0 | 0 |
| PROST2001180 | 0 | 0 | 0 | 7.049 | 0 | 2.502 | 0 |
| PROST2001283 | 0 | 0 | 0 | 0 | 7.688 | 2.144 | 0 |
| PROST2001521 | 0 | 8.528 | 0 | 0 | 0 | 0 | 0 |
| PROST2001883 | 0 | 0 | 0 | 0.634 | 0 | 0 | 0 |
| PROST2001997 | 0 | 0 | 0 | 12.414 | 0 | 0 | 0 |
| PROST2002162 | 0 | 0 | 0 | 0 | 0 | 3.901 | 0 |
| PROST2002227 | 0 | 17.841 | 0 | 0 | 0 | 0 | 0 |
| PROST2002425 | 0 | 0 | 0 | 0 | 0 | 16.010 | 0 |
| PROST2002651 | 0 | 0 | 0 | 0 | 10.806 | 0 | 0 |
| PROST2003232 | 0 | 0 | 0 | 4.843 | 0 | 2.750 | 0 |
| PROST2003338 | 0 | 7.856 | 0 | 3.972 | 4.044 | 1.128 | 0 |
| PROST2003396 | 0 | 0 | 0 | 4.240 | 0 | 6.020 | 0 |
| PROST2004095 | 0 | 0 | 0 | 8.969 | 0 | 2.830 | 0 |
| PROST2004270 | 0 | 0 | 0 | 0.835 | 0 | 2.370 | 0 |
| PROST2004416 | 21.314 | 0 | 0 | 0 | 0 | 0.685 | 0 |
| PROST2004570 | 0 | 0 | 0 | 5.320 | 27.085 | 0 | 0 |
| PROST2004739 | 0 | 0 | 0 | 10.556 | 0 | 0 | 0 |
| PROST2004744 | 0 | 37.106 | 0 | 0 | 0 | 0 | 0 |
| PROST2005067 | 0 | 0 | 0 | 11.450 | 0 | 0 | 0 |
| PROST2005093 | 0 | 0 | 0 | 16.676 | 0 | 0 | 0 |
| PROST2005143 | 0 | 0 | 0 | 4.815 | 0 | 0 | 0 |
| PROST2005285 | 0 | 0 | 0 | 5.298 | 0 | 0 | 0 |
| PROST2005466 | 0 | 0 | 0 | 16.676 | 0 | 0 | 0 |
| PROST2005604 | 0 | 0 | 0 | 2.208 | 0 | 0 | 0 |
| PROST2005683 | 0 | 0 | 0 | 6.457 | 0 | 0 | 0 |
| PROST2005793 | 0 | 27.525 | 0 | 0 | 0 | 0 | 0 |
| PROST2006030 | 0 | 0 | 0 | 13.428 | 0 | 0 | 0 |
| PROST2006060 | 0 | 0 | 0 | 9.478 | 0 | 0 | 0 |
| PROST2006260 | 0 | 0 | 0 | 5.780 | 0 | 0 | 0 |
| PROST2006737 | 0 | 0 | 0 | 0 | 8.758 | 4.884 | 0 |
| PROST2006988 | 0 | 0 | 0 | 0 | 0 | 14.713 | 0 |
| PROST2007248 | 0 | 0 | 0 | 13.229 | 0 | 0 | 0 |
| PROST2008271 | 0 | 0 | 0 | 11.126 | 0 | 3.949 | 0 |
| PROST2008360 | 0 | 0 | 0 | 2.555 | 0 | 0 | 0 |
| PROST2008489 | 0 | 0 | 4.994 | 0 | 0 | 0.653 | 0 |
| PROST2008770 | 0 | 0 | 0 | 7.197 | 0 | 3.930 | 0 |
| PROST2009347 | 0 | 0 | 0 | 13.452 | 0 | 0 | 0 |
| PROST2010382 | 0 | 0 | 0 | 0 | 0 | 3.153 | 0 |
| PROST2011105 | 0 | 0 | 0 | 25.260 | 0 | 0 | 0 |
| PROST2011410 | 0 | 0 | 0 | 0 | 0 | 3.995 | 0 |
| PROST2011577 | 0 | 0 | 0 | 5.843 | 0 | 0 | 0 |
| PROST2011660 | 0 | 0 | 0 | 16.676 | 0 | 0 | 0 |
| PROST2012007 | 0 | 0 | 0 | 0.806 | 4.101 | 0 | 0 |
| PROST2012016 | 0 | 0 | 0 | 0 | 0 | 22.126 | 0 |
| PROST2012745 | 0 | 0 | 0 | 0 | 0 | 7.793 | 0 |
| PROST2013121 | 0 | 0 | 0 | 7.634 | 0 | 0 | 0 |
| PROST2014862 | 0 | 0 | 0 | 0 | 0 | 16.010 | 0 |
| PROST2015332 | 0 | 0 | 0 | 27.441 | 0 | 2.597 | 0 |
| PROST2015900 | 0 | 0 | 0 | 16.676 | 0 | 0 | 0 |
| PROST2016351 | 0 | 0 | 0 | 0 | 0 | 8.925 | 0 |
| PROST2016918 | 0 | 0 | 0 | 4.511 | 22.963 | 0 | 0 |
| PROST2017128 | 0 | 0 | 0 | 0 | 0 | 8.119 | 0 |
| PROST2017203 | 0 | 0 | 0 | 9.217 | 0 | 0 | 0 |
| PROST2017529 | 0 | 0 | 0 | 1.802 | 0 | 0 | 0 |
| PROST2017692 | 23.099 | 0 | 0 | 0 | 0 | 0.742 | 0 |
| PROST2017910 | 0 | 0 | 0 | 0 | 37.758 | 0 | 0 |
| PROST2019164 | 0 | 25.881 | 0 | 0 | 0 | 0 | 0 |
| PROST2019253 | 0 | 0 | 0 | 0 | 0 | 1.693 | 0 |
| PROST2019296 | 0 | 79.832 | 0 | 0 | 0 | 0 | 0 |
| PUAEN1000057 | 0 | 0 | 0 | 1.457 | 0 | 0 | 0 |
| PUAEN1000065 | 0 | 0 | 0 | 2.377 | 2.420 | 0.675 | 0 |
| PUAEN1000147 | 0 | 0 | 0 | 0 | 0 | 9.395 | 0 |
| PUAEN1000164 | 0 | 0 | 3.070 | 0.848 | 0 | 0.401 | 0 |
| PUAEN1000322 | 0 | 0 | 0 | 0 | 9.239 | 0 | 0 |
| PUAEN2000152 | 0 | 0 | 0 | 0 | 0 | 5.980 | 0 |
| PUAEN2000374 | 0 | 0 | 0 | 0.909 | 1.156 | 0.322 | 0 |
| PUAEN2001586 | 0 | 0 | 0 | 2.027 | 0 | 0 | 0 |
| PUAEN2002489 | 0 | 0 | 0 | 9.262 | 0 | 0 | 0 |
| PUAEN2004400 | 0 | 0 | 0 | 0 | 0 | 7.259 | 0 |
| PUAEN2007044 | 0 | 0 | 0 | 5.087 | 0 | 1.444 | 0 |
| PUAEN2007898 | 0 | 0 | 0 | 0 | 39.038 | 0 | 0 |
| PUAEN2008515 | 0 | 0 | 0 | 13.781 | 0 | 0 | 0 |
| PUAEN2009174 | 0 | 0 | 0 | 0 | 0 | 2.856 | 0 |
| PUAEN2010824 | 0 | 0 | 0 | 11.155 | 0 | 26.393 | 0 |
| SALGL1000047 | 0 | 0 | 0 | 0.421 | 0 | 0.298 | 0 |
| SALGL1000157 | 0 | 0 | 0 | 0.185 | 0.940 | 0.655 | 0 |
| SKMUS1000022 | 0 | 0 | 0 | 0.886 | 0 | 0.839 | 0 |
| SKMUS1000084 | 0 | 0 | 0 | 2.186 | 0 | 1.552 | 0 |
| SKMUS1000110 | 0 | 0 | 0 | 5.229 | 0 | 7.423 | 0 |
| SKMUS1000177 | 0 | 0 | 0 | 0 | 0 | 2.379 | 0 |
| SKMUS1000186 | 0 | 0 | 0 | 0.855 | 0 | 2.022 | 0 |
| SKMUS2000020 | 0 | 25.852 | 0 | 0 | 0 | 0 | 0 |
| SKMUS2000074 | 0 | 0 | 0 | 0 | 18.480 | 0 | 0 |
| SKMUS2000117 | 0 | 0 | 0 | 0 | 30.703 | 0 | 0 |
| SKMUS2000243 | 0 | 0 | 0 | 7.160 | 0 | 0 | 0 |
| SKMUS2000271 | 0 | 0 | 0 | 9.055 | 0 | 0 | 0 |
| SKMUS2000343 | 0 | 0 | 0 | 10.937 | 0 | 7.763 | 0 |
| SKMUS2000361 | 0 | 7.506 | 0 | 0 | 0 | 1.077 | 0 |
| SKMUS2000380 | 0 | 0 | 0 | 1.539 | 0 | 0 | 0 |
| SKMUS2000484 | 0 | 0 | 0 | 13.710 | 6.345 | 3.539 | 0 |
| SKMUS2000873 | 0 | 0 | 0 | 0.390 | 0 | 0 | 0 |
| SKMUS2000902 | 0 | 0 | 0 | 0 | 0 | 5.450 | 0 |
| SKMUS2000931 | 0 | 0 | 0 | 1.931 | 0 | 0.548 | 0 |
| SKMUS2000954 | 0 | 0 | 0 | 1.206 | 0 | 3.425 | 0 |
| SKMUS2001008 | 0 | 0 | 0 | 0.336 | 0 | 0 | 0 |
| SKMUS2001129 | 0 | 0 | 0 | 3.609 | 0 | 5.124 | 0 |
| SKMUS2001201 | 0 | 0 | 0 | 0 | 0 | 1.795 | 0 |
| SKMUS2001254 | 0 | 0 | 0 | 0 | 0 | 12.511 | 0 |
| SKMUS2001402 | 0 | 0 | 0 | 2.992 | 0 | 0 | 0 |
| SKMUS2001412 | 0 | 0 | 0 | 0 | 0 | 12.511 | 0 |
| SKMUS2001454 | 0 | 0 | 0 | 0.958 | 1.220 | 2.380 | 0 |
| SKMUS2001501 | 0 | 0 | 0 | 3.094 | 0 | 0 | 0 |
| SKMUS2001528 | 0 | 0 | 0 | 0.891 | 13.606 | 0 | 0 |
| SKMUS2001543 | 0 | 0 | 0 | 23.206 | 0 | 0 | 0 |
| SKMUS2001634 | 0 | 0 | 0 | 0.929 | 4.731 | 1.319 | 0 |
| SKMUS2004908 | 0 | 0 | 0 | 9.325 | 0 | 6.619 | 0 |
| SKNMC1000168 | 0 | 0 | 6.458 | 0 | 0 | 0.844 | 0 |
| SKNMC1000251 | 0 | 0 | 0 | 4.978 | 0 | 0 | 0 |
| SKNMC1000264 | 0 | 36.814 | 0 | 0 | 0 | 5.285 | 0 |
| SKNMC2000065 | 0 | 0 | 0 | 3.831 | 0 | 1.088 | 0 |
| SKNMC2000097 | 0 | 0 | 6.874 | 1.898 | 0 | 0 | 0 |
| SKNMC2000224 | 0 | 0 | 0 | 0 | 0 | 6.311 | 0 |
| SKNMC2000305 | 0 | 0 | 0 | 2.500 | 0 | 10.647 | 0 |
| SKNMC2000322 | 0 | 0 | 0 | 2.005 | 0 | 0 | 0 |
| SKNMC2000635 | 5.623 | 1.259 | 2.767 | 0.127 | 0.648 | 0.181 | 0 |
| SKNMC2000649 | 0 | 0 | 0 | 1.295 | 3.297 | 0 | 0 |
| SKNMC2000698 | 0 | 0 | 0 | 0 | 0 | 2.081 | 0 |
| SKNMC2000877 | 0 | 0 | 0 | 0 | 0 | 3.582 | 0 |
| SKNMC2000966 | 0 | 0 | 0 | 0 | 0 | 8.159 | 0 |
| SKNMC2001113 | 0 | 0 | 0 | 6.928 | 0 | 0 | 0 |
| SKNMC2001503 | 0 | 0 | 0 | 0 | 0 | 6.249 | 0 |
| SKNMC2002402 | 0 | 0 | 0 | 0 | 0 | 7.428 | 0 |
| SKNSH1000002 | 0 | 10.089 | 0 | 1.020 | 0 | 1.448 | 0 |
| SKNSH1000101 | 0 | 0 | 0 | 0.912 | 2.321 | 0.647 | 0 |
| SKNSH2000101 | 0 | 0 | 0 | 4.677 | 0 | 6.640 | 0 |
| SKNSH2000151 | 0 | 0 | 0 | 15.445 | 0 | 5.482 | 0 |
| SKNSH2000163 | 0 | 0 | 0 | 7.532 | 0 | 0 | 0 |
| SKNSH2000250 | 0 | 0 | 0 | 8.000 | 0 | 8.517 | 0 |
| SKNSH2000319 | 0 | 0 | 0 | 0 | 25.913 | 0 | 0 |
| SKNSH2000347 | 0 | 0 | 0 | 0 | 0 | 2.261 | 0 |
| SKNSH2000482 | 0 | 0 | 0 | 0 | 0 | 9.821 | 0 |
| SKNSH2000819 | 0 | 0 | 0 | 1.767 | 8.994 | 12.539 | 0 |
| SKNSH2002325 | 0 | 0 | 0 | 5.419 | 0 | 0 | 0 |
| SKNSH2002768 | 0 | 0 | 0 | 1.680 | 0 | 0 | 0 |
| SKNSH2003064 | 0 | 0 | 0 | 0 | 28.287 | 0 | 0 |
| SKNSH2003528 | 0 | 0 | 0 | 0 | 0 | 3.059 | 0 |
| SKNSH2003633 | 0 | 0 | 0 | 0 | 0 | 6.759 | 0 |
| SKNSH2005061 | 0 | 0 | 0 | 3.610 | 0 | 1.708 | 0 |
| SKNSH2006234 | 0 | 0 | 0 | 0 | 0 | 3.527 | 0 |
| SMINT1000100 | 0 | 0 | 0 | 3.952 | 0 | 2.805 | 0 |
| SMINT1000117 | 0 | 0 | 10.143 | 1.867 | 0 | 1.325 | 0 |
| SMINT1000131 | 0 | 6.428 | 0 | 0 | 0 | 0 | 0 |
| SMINT1000192 | 0 | 0 | 22.965 | 0 | 0 | 0 | 0 |
| SMINT2000018 | 0 | 0 | 0 | 0 | 0 | 4.242 | 0 |
| SMINT2000073 | 0 | 0 | 0 | 6.157 | 0 | 0 | 0 |
| SMINT2000232 | 0 | 0 | 0 | 20.208 | 0 | 0 | 0 |
| SMINT2000277 | 0 | 12.725 | 0 | 0 | 0 | 0 | 0 |
| SMINT2000441 | 0 | 0 | 6.962 | 1.922 | 0 | 2.274 | 0 |
| SMINT2000454 | 0 | 0 | 0 | 6.343 | 0 | 0 | 0 |
| SMINT2000468 | 0 | 0 | 0 | 0 | 0 | 4.611 | 0 |
| SMINT2000602 | 0 | 0 | 0 | 0 | 0 | 1.108 | 0 |
| SMINT2000629 | 0 | 18.850 | 0 | 1.906 | 9.704 | 8.118 | 0 |
| SMINT2000659 | 0 | 0 | 0 | 0.197 | 0 | 0 | 0 |
| SMINT2000694 | 0 | 8.343 | 0 | 0.844 | 4.295 | 0 | 0 |
| SMINT2000933 | 0 | 7.153 | 0 | 0.723 | 0 | 0 | 0 |
| SMINT2001183 | 0 | 0 | 0 | 38.669 | 0 | 9.149 | 0 |
| SMINT2001818 | 0 | 0 | 0 | 0 | 3.387 | 0 | 0 |
| SMINT2002159 | 0 | 0 | 0 | 4.866 | 0 | 0 | 0 |
| SMINT2002689 | 0 | 0 | 0 | 10.012 | 0 | 1.184 | 0 |
| SMINT2003003 | 0 | 0 | 0 | 13.993 | 0 | 0 | 0 |
| SMINT2003150 | 0 | 0 | 0 | 0 | 0 | 22.212 | 0 |
| SMINT2003169 | 29.487 | 6.603 | 7.255 | 0 | 0 | 0.474 | 0 |
| SMINT2003340 | 0 | 0 | 0 | 0 | 0 | 2.960 | 0 |
| SMINT2004299 | 0 | 0 | 0 | 6.406 | 0 | 0 | 0 |
| SMINT2004350 | 0 | 0 | 0 | 0 | 0 | 26.332 | 0 |
| SMINT2004414 | 0 | 0 | 0 | 16.746 | 0 | 0 | 0 |
| SMINT2004583 | 0 | 0 | 0 | 0 | 0 | 3.903 | 0 |
| SMINT2004589 | 0 | 0 | 0 | 0 | 0 | 4.038 | 0 |
| SMINT2004872 | 0 | 0 | 0 | 6.004 | 0 | 0 | 0 |
| SMINT2004972 | 0 | 0 | 0 | 5.622 | 0 | 0 | 0 |
| SMINT2005368 | 0 | 0 | 0 | 1.667 | 4.243 | 0 | 0 |
| SMINT2005402 | 0 | 0 | 0 | 16.746 | 0 | 0 | 0 |
| SMINT2005956 | 0 | 18.474 | 0 | 0 | 0 | 0 | 0 |
| SMINT2007187 | 0 | 0 | 0 | 14.294 | 0 | 0 | 0 |
| SMINT2007647 | 0 | 0 | 0 | 0 | 0 | 22.212 | 0 |
| SMINT2007729 | 0 | 40.363 | 0 | 0 | 0 | 0 | 0 |
| SMINT2007792 | 0 | 0 | 0 | 5.932 | 0 | 0 | 0 |
| SMINT2008133 | 0 | 0 | 0 | 16.746 | 0 | 0 | 0 |
| SMINT2008672 | 0 | 0 | 0 | 19.291 | 0 | 0 | 0 |
| SMINT2008921 | 0 | 0 | 0 | 1.575 | 0 | 0 | 0 |
| SMINT2008960 | 0 | 4.802 | 0 | 0.971 | 0 | 3.447 | 0 |
| SMINT2009233 | 0 | 0 | 0 | 16.746 | 0 | 0 | 0 |
| SMINT2010084 | 0 | 0 | 0 | 4.878 | 0 | 0 | 0 |
| SMINT2010639 | 0 | 0 | 0 | 9.613 | 0 | 0 | 0 |
| SMINT2011656 | 0 | 0 | 0 | 16.746 | 0 | 0 | 0 |
| SMINT2012195 | 0 | 0 | 0 | 16.746 | 0 | 0 | 0 |
| SMINT2012291 | 0 | 0 | 0 | 6.546 | 0 | 0 | 0 |
| SMINT2012501 | 0 | 55.814 | 0 | 0 | 0 | 8.012 | 0 |
| SMINT2013032 | 0 | 0 | 0 | 0 | 0 | 12.051 | 0 |
| SMINT2013181 | 0 | 0 | 0 | 0 | 0 | 22.212 | 0 |
| SMINT2017884 | 0 | 0 | 0 | 16.746 | 0 | 0 | 0 |
| SPLEN1000106 | 0 | 0 | 0 | 4.956 | 0 | 0 | 0 |
| SPLEN1000116 | 0 | 3.474 | 0 | 1.054 | 0 | 0 | 0 |
| SPLEN1000165 | 0 | 0 | 0 | 0 | 0 | 10.057 | 0 |
| SPLEN1000166 | 0 | 0 | 0 | 0.802 | 0 | 2.278 | 0 |
| SPLEN2000098 | 0 | 0 | 0 | 17.098 | 0 | 36.410 | 0 |
| SPLEN2000255 | 0 | 0 | 0 | 2.180 | 5.549 | 0 | 0 |
| SPLEN2000267 | 0 | 0 | 0 | 0 | 0 | 5.882 | 0 |
| SPLEN2000341 | 0 | 0 | 0 | 0 | 0 | 13.644 | 0 |
| SPLEN2000348 | 0 | 0 | 0 | 0 | 0 | 2.819 | 0 |
| SPLEN2000443 | 0 | 0 | 0 | 0 | 0 | 22.258 | 0 |
| SPLEN2000505 | 0 | 0 | 0 | 0.598 | 0 | 4.671 | 0 |
| SPLEN2000698 | 0 | 0 | 0 | 0 | 0 | 2.137 | 0 |
| SPLEN2000874 | 15.278 | 0 | 0 | 0 | 1.761 | 0 | 0 |
| SPLEN2001141 | 0 | 0 | 0 | 0.670 | 0 | 0 | 0 |
| SPLEN2001157 | 0 | 0 | 0 | 1.952 | 0 | 2.771 | 0 |
| SPLEN2001599 | 0 | 0 | 0 | 0 | 0 | 7.190 | 0 |
| SPLEN2001761 | 0 | 0 | 0 | 0 | 0 | 21.443 | 0 |
| SPLEN2002007 | 0 | 0 | 0 | 0 | 0 | 19.229 | 0 |
| SPLEN2002335 | 0 | 7.107 | 7.809 | 1.437 | 0 | 3.061 | 0 |
| SPLEN2002463 | 0 | 0 | 0 | 16.124 | 0 | 0 | 0 |
| SPLEN2002467 | 0 | 0 | 0 | 0 | 0 | 6.565 | 0 |
| SPLEN2002493 | 0 | 0 | 0 | 22.112 | 0 | 5.232 | 0 |
| SPLEN2004343 | 0 | 0 | 0 | 12.769 | 0 | 0 | 0 |
| SPLEN2004555 | 0 | 0 | 0 | 0 | 3.846 | 1.072 | 0 |
| SPLEN2004662 | 0 | 0 | 0 | 13.369 | 0 | 0 | 0 |
| SPLEN2004773 | 0 | 0 | 0 | 0 | 7.715 | 3.585 | 0 |
| SPLEN2004844 | 0 | 80.138 | 0 | 0 | 0 | 0 | 0 |
| SPLEN2005429 | 0 | 0 | 0 | 5.201 | 0 | 0 | 0 |
| SPLEN2005783 | 0 | 0 | 0 | 9.254 | 0 | 0 | 0 |
| SPLEN2005806 | 0 | 0 | 0 | 0 | 0 | 0.616 | 0 |
| SPLEN2006133 | 0 | 6.658 | 0 | 1.347 | 3.428 | 0.956 | 0 |
| SPLEN2006143 | 0 | 0 | 0 | 1.588 | 0 | 0 | 0 |
| SPLEN2006305 | 0 | 0 | 4.871 | 1.345 | 0 | 0.636 | 0 |
| SPLEN2006374 | 0 | 0 | 0 | 7.552 | 0 | 1.532 | 0 |
| SPLEN2006671 | 0 | 0 | 0 | 0 | 67.502 | 0 | 0 |
| SPLEN2007498 | 0 | 0 | 0 | 1.857 | 9.456 | 2.637 | 0 |
| SPLEN2007739 | 0 | 0 | 0 | 4.310 | 0 | 0 | 0 |
| SPLEN2008496 | 0 | 0 | 59.707 | 0 | 0 | 0 | 0 |
| SPLEN2009513 | 0 | 0 | 0 | 4.400 | 0 | 0 | 0 |
| SPLEN2010015 | 0 | 0 | 0 | 11.034 | 0 | 0 | 0 |
| SPLEN2010195 | 0 | 0 | 0 | 0.826 | 1.402 | 1.564 | 0 |
| SPLEN2010847 | 0 | 0 | 0 | 11.707 | 59.599 | 0 | 0 |
| SPLEN2010912 | 0 | 0 | 0 | 26.371 | 0 | 0 | 0 |
| SPLEN2010986 | 0 | 0 | 0 | 14.293 | 0 | 0 | 0 |
| SPLEN2011419 | 0 | 0 | 18.428 | 0 | 0 | 2.408 | 0 |
| SPLEN2011737 | 0 | 0 | 0 | 5.548 | 0 | 0 | 0 |
| SPLEN2011758 | 0 | 0 | 40.503 | 0 | 0 | 0 | 0 |
| SPLEN2012453 | 0 | 0 | 0 | 28.977 | 0 | 0 | 0 |
| SPLEN2012571 | 0 | 0 | 0 | 0 | 0 | 3.203 | 0 |
| SPLEN2012624 | 0 | 0 | 0 | 7.178 | 0 | 0 | 0 |
| SPLEN2013195 | 0 | 0 | 0 | 28.977 | 0 | 0 | 0 |
| SPLEN2013670 | 0 | 0 | 0 | 16.644 | 0 | 0 | 0 |
| SPLEN2014080 | 0 | 0 | 0 | 3.363 | 0 | 0 | 0 |
| SPLEN2014119 | 0 | 0 | 0 | 11.845 | 0 | 0 | 0 |
| SPLEN2014911 | 0 | 0 | 0 | 0.749 | 0 | 0 | 0 |
| SPLEN2015310 | 0 | 0 | 0 | 0.814 | 0 | 1.733 | 0 |
| SPLEN2015788 | 0 | 0 | 0 | 3.436 | 0 | 0 | 0 |
| SPLEN2015890 | 0 | 0 | 0 | 28.977 | 0 | 0 | 0 |
| SPLEN2016139 | 0 | 8.993 | 0 | 0.909 | 0 | 0 | 0 |
| SPLEN2016268 | 0 | 3.032 | 0 | 0.307 | 0 | 0.435 | 0 |
| SPLEN2016773 | 0 | 0 | 0 | 28.977 | 0 | 0 | 0 |
| SPLEN2016972 | 0 | 0 | 0 | 2.878 | 0 | 0 | 0 |
| SPLEN2017121 | 0 | 0 | 0 | 0 | 0 | 15.624 | 0 |
| SPLEN2017318 | 0 | 0 | 0 | 3.601 | 0 | 0 | 0 |
| SPLEN2017351 | 0 | 0 | 0 | 2.135 | 0 | 0 | 0 |
| SPLEN2017592 | 0 | 0 | 0 | 28.977 | 0 | 0 | 0 |
| SPLEN2017781 | 0 | 0 | 0 | 28.977 | 0 | 0 | 0 |
| SPLEN2017918 | 0 | 6.399 | 7.031 | 0 | 0 | 0 | 0 |
| SPLEN2019169 | 0 | 0 | 0 | 24.109 | 0 | 0 | 0 |
| SPLEN2019257 | 0 | 0 | 0 | 28.977 | 0 | 0 | 0 |
| SPLEN2019379 | 0 | 80.138 | 0 | 0 | 0 | 0 | 0 |
| SPLEN2019405 | 0 | 10.051 | 0 | 1.016 | 0 | 7.215 | 0 |
| SPLEN2019956 | 0 | 0 | 0 | 21.618 | 0 | 0 | 0 |
| SPLEN2020007 | 0 | 0 | 0 | 0 | 67.502 | 0 | 0 |
| SPLEN2020417 | 0 | 0 | 0 | 9.907 | 0 | 0 | 0 |
| SPLEN2024489 | 0 | 0 | 0 | 7.755 | 0 | 0 | 0 |
| SPLEN2025039 | 0 | 0 | 0 | 28.977 | 0 | 0 | 0 |
| SPLEN2027113 | 0 | 0 | 0 | 4.646 | 0 | 0 | 0 |
| SPLEN2028466 | 0 | 0 | 3.190 | 1.174 | 0 | 5.002 | 0 |
| SPLEN2029912 | 0 | 0 | 0 | 0 | 0 | 1.646 | 0 |
| SPLEN2030763 | 0 | 0 | 0 | 7.475 | 0 | 0 | 0 |
| SPLEN2031424 | 0 | 0 | 0 | 5.405 | 0 | 0 | 0 |
| SPLEN2031547 | 0 | 0 | 0 | 5.587 | 5.689 | 4.759 | 0 |
| SPLEN2034448 | 0 | 0 | 0 | 0 | 0 | 5.224 | 0 |
| SPLEN2036932 | 0 | 0 | 0 | 2.081 | 0 | 0 | 0 |
| SPLEN2037194 | 0 | 0 | 0 | 28.977 | 0 | 0 | 0 |
| SPLEN2038345 | 0 | 0 | 0 | 0 | 0 | 29.627 | 0 |
| SPLEN2039379 | 0 | 0 | 0 | 10.278 | 0 | 11.672 | 0 |
| SPLEN2040237 | 0 | 0 | 0 | 28.977 | 0 | 0 | 0 |
| SPLEN2042535 | 0 | 0 | 0 | 0 | 0 | 7.174 | 0 |
| STOMA2000289 | 0 | 0 | 0 | 5.801 | 9.844 | 5.490 | 0 |
| STOMA2000395 | 0 | 14.983 | 0 | 3.030 | 0 | 4.302 | 0 |
| STOMA2000396 | 0 | 0 | 0 | 3.658 | 0 | 0 | 0 |
| STOMA2000482 | 0 | 0 | 0 | 2.736 | 0 | 3.884 | 0 |
| STOMA2002052 | 0 | 0 | 0 | 3.948 | 0 | 5.604 | 0 |
| STOMA2002166 | 0 | 0 | 0 | 0.415 | 0 | 0.589 | 0 |
| STOMA2009289 | 0 | 0 | 0 | 4.072 | 0 | 0 | 0 |
| SYNOV1000124 | 0 | 0 | 0 | 1.184 | 4.020 | 11.209 | 0 |
| SYNOV2000820 | 0 | 0 | 0 | 24.760 | 0 | 0 | 0 |
| SYNOV2001033 | 0 | 0 | 0 | 0.426 | 2.166 | 0.604 | 0 |
| SYNOV2001144 | 0 | 0 | 0 | 0 | 0 | 1.425 | 0 |
| SYNOV2001239 | 0 | 2.202 | 0 | 0.445 | 3.401 | 0.316 | 0 |
| SYNOV2001262 | 0 | 14.644 | 0 | 1.481 | 0 | 2.102 | 0 |
| SYNOV2009172 | 0 | 0 | 0 | 1.108 | 1.880 | 0 | 0 |
| SYNOV2021953 | 0 | 0 | 0 | 6.793 | 0 | 0 | 0 |
| SYNOV4001153 | 0 | 0 | 0 | 14.816 | 0 | 2.337 | 0 |
| SYNOV4007671 | 0 | 0 | 0 | 0.520 | 2.649 | 0.739 | 0 |
| SYNOV4008245 | 0 | 0 | 0 | 6.557 | 0 | 0 | 0 |
| SYNOV4009575 | 0 | 0 | 0 | 0 | 0 | 4.828 | 0 |
| TBAES2001296 | 0 | 0 | 0 | 0 | 0 | 11.352 | 0 |
| TBAES2009387 | 0 | 0 | 0 | 1.518 | 0 | 0 | 0 |
| TCERX2000431 | 0 | 0 | 0 | 0 | 0 | 2.117 | 0 |
| TCERX2002644 | 0 | 0 | 0 | 0 | 0 | 3.457 | 0 |
| TCOLN1000180 | 0 | 17.184 | 0 | 1.738 | 8.846 | 4.934 | 0 |
| TESOP2000312 | 0 | 33.903 | 0 | 0 | 0 | 0 | 0 |
| TESOP2002273 | 0 | 0 | 0 | 2.881 | 14.666 | 0 | 0 |
| TESOP2002451 | 0 | 0 | 0 | 3.372 | 0 | 0 | 0 |
| TESOP2002950 | 0 | 0 | 0 | 9.399 | 0 | 0 | 0 |
| TESTI1000023 | 0 | 0 | 0 | 0.595 | 0 | 6.760 | 0 |
| TESTI1000070 | 0 | 0 | 0 | 0 | 0 | 3.638 | 0 |
| TESTI1000096 | 0 | 0 | 0 | 12.416 | 0 | 0 | 0 |
| TESTI1000168 | 0 | 0 | 0 | 0 | 0 | 6.315 | 0 |
| TESTI1000330 | 0 | 0 | 0 | 52.057 | 0 | 0 | 0 |
| TESTI2000100 | 0 | 0 | 0 | 0 | 0 | 39.041 | 0 |
| TESTI2000184 | 0 | 0 | 0 | 4.012 | 0 | 1.139 | 0 |
| TESTI2000272 | 0 | 0 | 0 | 6.872 | 0 | 0 | 0 |
| TESTI2000356 | 0 | 0 | 0 | 12.446 | 0 | 0 | 0 |
| TESTI2000598 | 0 | 0 | 0 | 3.565 | 0 | 5.061 | 0 |
| TESTI2000627 | 0 | 0 | 0 | 14.955 | 0 | 0 | 0 |
| TESTI2000909 | 0 | 91.480 | 0 | 0 | 0 | 0 | 0 |
| TESTI2000970 | 0 | 0 | 0 | 0 | 17.565 | 4.898 | 0 |
| TESTI2001099 | 0 | 0 | 3.779 | 0.696 | 0 | 0.987 | 0 |
| TESTI2001153 | 0 | 0 | 0 | 0 | 0 | 0.802 | 0 |
| TESTI2001269 | 0 | 0 | 0 | 1.162 | 1.972 | 1.100 | 0 |
| TESTI2001511 | 0 | 0 | 0 | 0 | 0 | 1.763 | 0 |
| TESTI2001613 | 0 | 0 | 0 | 9.696 | 0 | 0 | 0 |
| TESTI2001829 | 0 | 0 | 0 | 0.603 | 0 | 0 | 0 |
| TESTI2001862 | 0 | 0 | 0 | 3.753 | 0 | 0 | 0 |
| TESTI2001985 | 0 | 0 | 0 | 4.166 | 0 | 0 | 0 |
| TESTI2002365 | 0 | 0 | 0 | 0 | 0 | 1.100 | 0 |
| TESTI2002707 | 0 | 0 | 0 | 3.528 | 5.987 | 1.669 | 0 |
| TESTI2003005 | 0 | 0 | 0 | 2.156 | 0 | 0 | 0 |
| TESTI2003071 | 0 | 0 | 0 | 2.476 | 0 | 0 | 0 |
| TESTI2003127 | 0 | 0 | 0 | 0 | 0 | 10.759 | 0 |
| TESTI2003141 | 0 | 0 | 0 | 0 | 0 | 11.370 | 0 |
| TESTI2003280 | 0 | 0 | 0 | 8.734 | 29.644 | 0 | 0 |
| TESTI2003325 | 0 | 0 | 0 | 6.008 | 0 | 0 | 0 |
| TESTI2003533 | 0 | 0 | 0 | 0.615 | 0 | 0.874 | 0 |
| TESTI2003541 | 0 | 0 | 0 | 0 | 0 | 29.428 | 0 |
| TESTI2003625 | 0 | 0 | 0 | 0 | 0 | 7.712 | 0 |
| TESTI2004031 | 0 | 2.814 | 0 | 0.285 | 0 | 0 | 0 |
| TESTI2004080 | 0 | 34.254 | 0 | 0 | 0 | 0 | 0 |
| TESTI2004122 | 0 | 0 | 0 | 2.167 | 0 | 0 | 0 |
| TESTI2004153 | 0 | 0 | 0 | 6.158 | 0 | 0 | 0 |
| TESTI2004295 | 0 | 0 | 0 | 0 | 0 | 8.251 | 0 |
| TESTI2004737 | 0 | 0 | 13.660 | 2.514 | 0 | 0 | 0 |
| TESTI2004929 | 0 | 0 | 0 | 0 | 0 | 2.861 | 0 |
| TESTI2005072 | 0 | 0 | 0 | 3.282 | 0 | 0 | 0 |
| TESTI2005408 | 0 | 0 | 0 | 0 | 0 | 1.785 | 0 |
| TESTI2005742 | 0 | 0 | 0 | 0 | 0 | 20.548 | 0 |
| TESTI2005743 | 0 | 0 | 0 | 4.677 | 0 | 0 | 0 |
| TESTI2005759 | 58.629 | 0 | 0 | 0 | 0 | 0 | 0 |
| TESTI2005767 | 0 | 0 | 0 | 1.941 | 0 | 0 | 0 |
| TESTI2005784 | 0 | 0 | 0 | 0 | 0 | 2.997 | 0 |
| TESTI2005788 | 0 | 0 | 0 | 0 | 0 | 4.660 | 0 |
| TESTI2005908 | 0 | 0 | 0 | 1.118 | 17.069 | 1.587 | 0 |
| TESTI2005981 | 0 | 0 | 0 | 22.105 | 0 | 0 | 0 |
| TESTI2006051 | 0 | 0 | 0 | 0.301 | 0 | 0.427 | 0 |
| TESTI2006097 | 0 | 0 | 0 | 7.478 | 0 | 0 | 0 |
| TESTI2006111 | 0 | 0 | 0 | 14.633 | 0 | 0 | 0 |
| TESTI2006120 | 0 | 0 | 0 | 0 | 0 | 4.890 | 0 |
| TESTI2006210 | 0 | 0 | 66.287 | 0 | 0 | 0 | 0 |
| TESTI2006341 | 0 | 0 | 0 | 14.508 | 0 | 0 | 0 |
| TESTI2006383 | 0 | 0 | 0 | 0 | 0 | 4.084 | 0 |
| TESTI2006453 | 0 | 0 | 0 | 0.597 | 0 | 4.240 | 0 |
| TESTI2006588 | 0 | 0 | 0 | 2.305 | 3.912 | 0.545 | 0 |
| TESTI2006615 | 0 | 0 | 0 | 3.276 | 0 | 0 | 0 |
| TESTI2006748 | 0 | 0 | 0 | 4.883 | 0 | 0 | 0 |
| TESTI2006774 | 0 | 0 | 0 | 52.057 | 0 | 0 | 0 |
| TESTI2007163 | 0 | 0 | 0 | 52.057 | 0 | 0 | 0 |
| TESTI2007211 | 0 | 23.183 | 0 | 2.344 | 11.934 | 0 | 0 |
| TESTI2007311 | 0 | 0 | 0 | 2.731 | 0 | 3.876 | 0 |
| TESTI2007407 | 0 | 0 | 0 | 6.536 | 11.091 | 0 | 0 |
| TESTI2007998 | 0 | 0 | 0 | 0 | 0 | 1.593 | 0 |
| TESTI2008240 | 0 | 1.755 | 0 | 5.502 | 0 | 3.779 | 0 |
| TESTI2008847 | 0 | 0 | 0 | 0 | 0 | 143.525 | 0 |
| TESTI2009239 | 0 | 0 | 0 | 52.057 | 0 | 0 | 0 |
| TESTI2009388 | 0 | 0 | 0 | 14.231 | 0 | 0 | 0 |
| TESTI2009402 | 0 | 0 | 0 | 0 | 0 | 9.237 | 0 |
| TESTI2009474 | 0 | 0 | 0 | 0 | 0 | 2.036 | 0 |
| TESTI2009520 | 0 | 0 | 0 | 0.532 | 2.710 | 0.756 | 0 |
| TESTI2009683 | 0 | 0 | 0 | 0 | 0 | 60.652 | 0 |
| TESTI2009785 | 0 | 0 | 0 | 1.018 | 0 | 1.446 | 0 |
| TESTI2009987 | 0 | 0 | 0 | 10.862 | 0 | 10.280 | 0 |
| TESTI2010513 | 0 | 0 | 0 | 12.510 | 12.839 | 1.979 | 0 |
| TESTI2010617 | 0 | 0 | 0 | 0 | 0 | 7.017 | 0 |
| TESTI2011549 | 0 | 0 | 0 | 0 | 0 | 60.652 | 0 |
| TESTI2011605 | 0 | 50.596 | 0 | 0 | 0 | 0 | 0 |
| TESTI2012104 | 0 | 0 | 0 | 6.910 | 0 | 0 | 0 |
| TESTI2012289 | 0 | 0 | 0 | 6.126 | 0 | 0 | 0 |
| TESTI2012511 | 0 | 0 | 0 | 0 | 0 | 4.326 | 0 |
| TESTI2012778 | 5.792 | 0 | 4.275 | 0 | 0 | 0.186 | 0 |
| TESTI2013231 | 0 | 0 | 0 | 1.412 | 0 | 0 | 0 |
| TESTI2013295 | 0 | 0 | 0 | 1.890 | 0 | 0 | 0 |
| TESTI2014318 | 0 | 0 | 0 | 0 | 0 | 28.966 | 0 |
| TESTI2014838 | 0 | 0 | 0 | 0 | 0 | 1.335 | 0 |
| TESTI2015092 | 0 | 0 | 0 | 0 | 11.971 | 0 | 0 |
| TESTI2015213 | 0 | 0 | 3.958 | 0.729 | 0 | 0.517 | 0 |
| TESTI2015246 | 0 | 0 | 0 | 8.403 | 0 | 0 | 0 |
| TESTI2015626 | 0 | 4.617 | 2.536 | 0.467 | 0 | 0.331 | 0 |
| TESTI2015962 | 0 | 0 | 0 | 14.078 | 0 | 15.988 | 0 |
| TESTI2016583 | 0 | 0 | 0 | 12.766 | 0 | 0 | 0 |
| TESTI2016701 | 0 | 0 | 0 | 52.057 | 0 | 0 | 0 |
| TESTI2017035 | 0 | 0 | 0 | 29.776 | 0 | 0 | 0 |
| TESTI2017107 | 0 | 0 | 0 | 0 | 0 | 60.652 | 0 |
| TESTI2017954 | 0 | 0 | 0 | 0.470 | 0 | 0 | 0 |
| TESTI2018014 | 0 | 0 | 0 | 10.943 | 0 | 0 | 0 |
| TESTI2018462 | 0 | 0 | 0 | 0 | 0 | 5.695 | 0 |
| TESTI2018867 | 0 | 0 | 0 | 4.042 | 0 | 0 | 0 |
| TESTI2018997 | 0 | 0 | 0 | 0 | 0 | 2.099 | 0 |
| TESTI2019760 | 0 | 0 | 0 | 32.302 | 0 | 0 | 0 |
| TESTI2020840 | 0 | 0 | 0 | 11.599 | 0 | 0 | 0 |
| TESTI2021038 | 0 | 0 | 0 | 30.031 | 0 | 0 | 0 |
| TESTI2021124 | 0 | 0 | 0 | 0 | 0 | 5.759 | 0 |
| TESTI2021425 | 0 | 0 | 0 | 1.222 | 0 | 0 | 0 |
| TESTI2021531 | 0 | 0 | 0 | 11.875 | 0 | 16.859 | 0 |
| TESTI2021654 | 0 | 0 | 0 | 0 | 0 | 9.847 | 0 |
| TESTI2021851 | 0 | 0 | 0 | 0 | 0 | 19.064 | 0 |
| TESTI2023414 | 0 | 0 | 0 | 2.889 | 0 | 0 | 0 |
| TESTI2025422 | 0 | 0 | 0 | 1.762 | 0 | 0 | 0 |
| TESTI2025846 | 0 | 0 | 0 | 43.347 | 0 | 0 | 0 |
| TESTI2026116 | 0 | 0 | 0 | 10.586 | 0 | 0 | 0 |
| TESTI2026525 | 0 | 0 | 0 | 3.088 | 0 | 0 | 0 |
| TESTI2026647 | 0 | 0 | 0 | 0 | 0 | 23.811 | 0 |
| TESTI2026936 | 0 | 0 | 0 | 0 | 0 | 60.652 | 0 |
| TESTI2028296 | 0 | 0 | 0 | 1.750 | 17.820 | 0 | 0 |
| TESTI2028659 | 0 | 0 | 0 | 21.395 | 0 | 0 | 0 |
| TESTI2029227 | 0 | 0 | 0 | 0 | 0 | 11.962 | 0 |
| TESTI2033441 | 0 | 0 | 8.462 | 0 | 0 | 0 | 0 |
| TESTI2034916 | 0 | 0 | 0 | 10.791 | 0 | 0 | 0 |
| TESTI2034940 | 0 | 0 | 0 | 2.589 | 1.883 | 0 | 0 |
| TESTI2035003 | 0 | 0 | 0 | 52.057 | 0 | 0 | 0 |
| TESTI2035236 | 0 | 0 | 0 | 0 | 0 | 25.974 | 0 |
| TESTI2036650 | 0 | 0 | 0 | 0 | 0 | 60.652 | 0 |
| TESTI2036969 | 0 | 0 | 0 | 2.550 | 0 | 0 | 0 |
| TESTI2039177 | 0 | 0 | 0 | 5.883 | 0 | 0 | 0 |
| TESTI2043275 | 0 | 0 | 0 | 0 | 31.972 | 0 | 0 |
| TESTI2045155 | 0 | 0 | 0 | 0 | 0 | 11.606 | 0 |
| TESTI2046456 | 0 | 0 | 0 | 0.657 | 1.673 | 0.466 | 0 |
| TESTI2053723 | 0 | 0 | 0 | 6.426 | 0 | 4.561 | 0 |
| TESTI4000014 | 0 | 0 | 0 | 2.028 | 0 | 1.799 | 0 |
| TESTI4000349 | 0 | 0 | 0 | 36.899 | 0 | 0 | 0 |
| TESTI4000434 | 0 | 0 | 0 | 9.280 | 0 | 0 | 0 |
| TESTI4001467 | 0 | 38.859 | 0 | 0 | 0 | 0 | 0 |
| TESTI4001561 | 0 | 0 | 0 | 28.578 | 0 | 0 | 0 |
| TESTI4002072 | 0 | 0 | 0 | 11.850 | 0 | 3.364 | 0 |
| TESTI4002195 | 0 | 0 | 51.594 | 0 | 0 | 0 | 0 |
| TESTI4002202 | 0 | 0 | 0 | 7.059 | 0 | 0 | 0 |
| TESTI4002799 | 0 | 0 | 0 | 0.627 | 0 | 0 | 0 |
| TESTI4002988 | 0 | 0 | 0 | 15.392 | 0 | 21.851 | 0 |
| TESTI4003150 | 0 | 0 | 0 | 10.540 | 0 | 0 | 0 |
| TESTI4003602 | 0 | 0 | 0 | 18.431 | 0 | 0 | 0 |
| TESTI4003703 | 0 | 0 | 0 | 6.281 | 0 | 4.458 | 0 |
| TESTI4004626 | 0 | 0 | 0 | 11.685 | 0 | 0 | 0 |
| TESTI4005133 | 0 | 0 | 0 | 16.927 | 0 | 12.015 | 0 |
| TESTI4005399 | 0 | 0 | 0 | 11.068 | 0 | 15.713 | 0 |
| TESTI4007369 | 0 | 91.480 | 0 | 0 | 0 | 0 | 0 |
| TESTI4009454 | 0 | 0 | 0 | 0 | 29.045 | 8.099 | 0 |
| TESTI4010851 | 0 | 0 | 0 | 2.716 | 0 | 2.203 | 0 |
| TESTI4013441 | 4.916 | 1.101 | 1.210 | 0.223 | 0 | 0.316 | 0 |
| TESTI4013474 | 0 | 0 | 0 | 0 | 3.733 | 0 | 0 |
| TESTI4013675 | 0 | 0 | 0 | 14.015 | 0 | 0 | 0 |
| TESTI4013817 | 0 | 0 | 0 | 0 | 0 | 27.369 | 0 |
| TESTI4013894 | 0 | 0 | 0 | 19.881 | 0 | 14.112 | 0 |
| TESTI4014159 | 0 | 0 | 0 | 16.638 | 0 | 11.810 | 0 |
| TESTI4014306 | 0 | 0 | 0 | 52.057 | 0 | 0 | 0 |
| TESTI4014553 | 0 | 0 | 0 | 68.470 | 0 | 0 | 0 |
| TESTI4014694 | 0 | 0 | 0 | 0.791 | 0 | 0 | 0 |
| TESTI4017984 | 0 | 0 | 0 | 35.187 | 0 | 0 | 0 |
| TESTI4022158 | 0 | 0 | 0 | 9.473 | 0 | 0 | 0 |
| TESTI4024740 | 0 | 0 | 0 | 0 | 0 | 18.126 | 0 |
| TESTI4026390 | 0 | 0 | 0 | 52.057 | 0 | 0 | 0 |
| TESTI4032913 | 0 | 0 | 0 | 5.753 | 0 | 8.167 | 0 |
| TESTI4037156 | 0 | 0 | 12.804 | 0.982 | 0 | 1.394 | 0 |
| TESTI4037188 | 0 | 0 | 0 | 0 | 0 | 60.652 | 0 |
| TESTI4038099 | 0 | 0 | 0 | 15.656 | 0 | 0 | 0 |
| TESTI4038284 | 0 | 0 | 0 | 7.843 | 0 | 0 | 0 |
| TESTI4043140 | 0 | 0 | 0 | 0 | 10.019 | 0 | 0 |
| TESTI4043223 | 0 | 0 | 0 | 19.643 | 0 | 27.886 | 0 |
| TESTI4044704 | 0 | 0 | 0 | 7.235 | 0 | 0 | 0 |
| TESTI4046073 | 0 | 0 | 0 | 0 | 0 | 19.130 | 0 |
| TESTI4046819 | 0 | 0 | 0 | 14.013 | 0 | 0 | 0 |
| THYMU1000002 | 0 | 0 | 0 | 0 | 0 | 0.596 | 0 |
| THYMU1000016 | 0 | 2.712 | 0 | 0 | 0 | 0 | 0 |
| THYMU1000032 | 0 | 5.479 | 0 | 0 | 0 | 0 | 0 |
| THYMU1000041 | 0 | 0 | 0 | 3.375 | 0 | 2.396 | 0 |
| THYMU1000083 | 0 | 0 | 0 | 0 | 0 | 3.021 | 0 |
| THYMU1000103 | 0 | 0 | 0 | 0 | 0 | 7.106 | 0 |
| THYMU1000109 | 0 | 0 | 0 | 1.676 | 8.532 | 0 | 0 |
| THYMU1000144 | 0 | 0 | 0 | 6.426 | 0 | 3.909 | 0 |
| THYMU1000198 | 0 | 0 | 0 | 0 | 0 | 54.718 | 0 |
| THYMU1000331 | 0 | 0 | 0 | 32.302 | 0 | 0 | 0 |
| THYMU1000359 | 0 | 0 | 0 | 0 | 0 | 0.540 | 0 |
| THYMU1000374 | 0 | 0 | 0 | 2.126 | 0 | 0 | 0 |
| THYMU2000162 | 0 | 0 | 0 | 45.981 | 0 | 0 | 0 |
| THYMU2000382 | 0 | 4.254 | 0 | 0.430 | 0 | 0 | 0 |
| THYMU2000436 | 0 | 6.467 | 0 | 1.962 | 0 | 0 | 0 |
| THYMU2000489 | 0 | 0 | 0 | 0 | 0 | 54.718 | 0 |
| THYMU2000684 | 0 | 0 | 0 | 0 | 0 | 4.195 | 0 |
| THYMU2000946 | 0 | 10.155 | 0 | 1.027 | 0 | 1.458 | 0 |
| THYMU2001007 | 0 | 0 | 0 | 0 | 0 | 2.733 | 0 |
| THYMU2001839 | 0 | 0 | 0 | 0 | 0 | 15.764 | 0 |
| THYMU2002162 | 0 | 0 | 0 | 0 | 0 | 10.985 | 0 |
| THYMU2002583 | 0 | 0 | 3.997 | 2.575 | 0 | 0.522 | 0 |
| THYMU2002841 | 0 | 20.370 | 0 | 0 | 0 | 2.924 | 0 |
| THYMU2002983 | 0 | 21.005 | 0 | 0 | 0 | 0 | 0 |
| THYMU2003012 | 0 | 0 | 0 | 0.622 | 3.167 | 0.883 | 0 |
| THYMU2003046 | 0 | 0 | 0 | 1.364 | 0 | 0 | 0 |
| THYMU2003133 | 0 | 24.353 | 0 | 0 | 0 | 0 | 0 |
| THYMU2003419 | 0 | 0 | 0 | 2.495 | 0 | 2.024 | 0 |
| THYMU2003446 | 0 | 0 | 0 | 3.386 | 0 | 4.806 | 0 |
| THYMU2003542 | 0 | 15.168 | 0 | 0 | 0 | 0 | 0 |
| THYMU2003891 | 0 | 1.024 | 0 | 0.104 | 0 | 0 | 0 |
| THYMU2004152 | 0 | 6.969 | 0 | 0 | 3.588 | 0 | 0 |
| THYMU2004284 | 0 | 0 | 0 | 4.768 | 0 | 0 | 0 |
| THYMU2004344 | 0 | 0 | 0 | 0 | 0 | 2.574 | 0 |
| THYMU2004410 | 0 | 0 | 0 | 5.440 | 0 | 0 | 0 |
| THYMU2004508 | 0 | 0 | 0 | 45.981 | 0 | 0 | 0 |
| THYMU2004733 | 0 | 0 | 0 | 3.975 | 0 | 0 | 0 |
| THYMU2005574 | 0 | 0 | 0 | 45.981 | 0 | 0 | 0 |
| THYMU2005807 | 0 | 0 | 0 | 45.981 | 0 | 0 | 0 |
| THYMU2006505 | 0 | 9.582 | 0 | 1.938 | 0 | 4.126 | 0 |
| THYMU2006813 | 0 | 22.213 | 0 | 4.492 | 5.718 | 0 | 0 |
| THYMU2007036 | 0 | 0 | 0 | 0 | 0 | 7.780 | 0 |
| THYMU2007065 | 0 | 0 | 0 | 2.878 | 0 | 4.086 | 0 |
| THYMU2007415 | 0 | 16.985 | 0 | 1.718 | 0 | 0 | 0 |
| THYMU2007467 | 0 | 0 | 0 | 5.734 | 0 | 0 | 0 |
| THYMU2007532 | 0 | 0 | 0 | 0 | 56.448 | 0 | 0 |
| THYMU2007694 | 0 | 0 | 0 | 0 | 0 | 20.890 | 0 |
| THYMU2007729 | 0 | 0 | 0 | 3.469 | 0 | 0 | 0 |
| THYMU2007886 | 0 | 0 | 0 | 0 | 5.003 | 0 | 0 |
| THYMU2008036 | 0 | 0 | 0 | 0 | 0 | 54.718 | 0 |
| THYMU2008321 | 0 | 0 | 0 | 2.052 | 0 | 5.826 | 0 |
| THYMU2009592 | 0 | 0 | 0 | 19.608 | 0 | 0 | 0 |
| THYMU2009658 | 0 | 2.459 | 0 | 0.746 | 0 | 0.353 | 0 |
| THYMU2010041 | 0 | 0 | 0 | 0 | 0 | 18.787 | 0 |
| THYMU2010448 | 0 | 0 | 0 | 0 | 0 | 5.335 | 0 |
| THYMU2010779 | 0 | 0 | 0 | 29.854 | 0 | 0 | 0 |
| THYMU2010816 | 0 | 0 | 0 | 0 | 0 | 26.271 | 0 |
| THYMU2011063 | 0 | 0 | 81.157 | 0 | 0 | 5.302 | 0 |
| THYMU2011482 | 0 | 0 | 0 | 0 | 22.183 | 0 | 0 |
| THYMU2011939 | 0 | 0 | 0 | 45.981 | 0 | 0 | 0 |
| THYMU2012024 | 0 | 0 | 0 | 2.115 | 0 | 0 | 0 |
| THYMU2012690 | 0 | 0 | 0 | 0 | 0 | 3.915 | 0 |
| THYMU2012826 | 0 | 0 | 0 | 0 | 0 | 22.315 | 0 |
| THYMU2013136 | 0 | 0 | 0 | 0.581 | 0 | 0.824 | 0 |
| THYMU2013916 | 0 | 0 | 0 | 1.574 | 0 | 2.235 | 0 |
| THYMU2014323 | 0 | 0 | 0 | 0 | 0 | 54.718 | 0 |
| THYMU2014353 | 0 | 0 | 0 | 0 | 0 | 37.663 | 0 |
| THYMU2015441 | 0 | 0 | 0 | 0 | 81.250 | 0 | 0 |
| THYMU2016523 | 0 | 0 | 0 | 23.416 | 0 | 0 | 0 |
| THYMU2016840 | 0 | 0 | 0 | 0 | 81.250 | 0 | 0 |
| THYMU2017601 | 0 | 0 | 0 | 5.012 | 0 | 0 | 0 |
| THYMU2017878 | 0 | 0 | 0 | 45.981 | 0 | 0 | 0 |
| THYMU2018126 | 0 | 0 | 0 | 0 | 0 | 0.733 | 0 |
| THYMU2019021 | 0 | 0 | 0 | 0 | 0 | 4.897 | 0 |
| THYMU2019364 | 0 | 0 | 0 | 29.854 | 0 | 0 | 0 |
| THYMU2020959 | 0 | 0 | 0 | 7.868 | 0 | 0 | 0 |
| THYMU2023264 | 0 | 0 | 0 | 0 | 0 | 54.718 | 0 |
| THYMU2023967 | 0 | 0 | 0 | 43.363 | 0 | 0 | 0 |
| THYMU2024071 | 0 | 0 | 0 | 0 | 0 | 33.209 | 0 |
| THYMU2025325 | 0 | 0 | 0 | 0 | 0 | 13.123 | 0 |
| THYMU2027125 | 5.611 | 0 | 0 | 2.287 | 2.587 | 0.902 | 0 |
| THYMU2029578 | 0 | 48.262 | 0 | 4.880 | 0 | 0 | 0 |
| THYMU2030264 | 0 | 0 | 0 | 45.981 | 0 | 0 | 0 |
| THYMU2034917 | 0 | 0 | 0 | 13.791 | 0 | 0 | 0 |
| THYMU2035735 | 0 | 0 | 0 | 0.936 | 0 | 0 | 0 |
| THYMU2037226 | 0 | 0 | 0 | 0 | 0 | 17.265 | 0 |
| THYMU2038220 | 0 | 0 | 0 | 0 | 0 | 20.354 | 0 |
| THYMU2039780 | 0 | 0 | 0 | 45.981 | 0 | 0 | 0 |
| THYMU2040427 | 0 | 0 | 0 | 45.981 | 0 | 0 | 0 |
| THYMU2040925 | 0 | 0 | 0 | 45.981 | 0 | 0 | 0 |
| THYMU3000360 | 0 | 0 | 0 | 27.904 | 0 | 0 | 0 |
| THYMU3000420 | 0 | 0 | 0 | 27.904 | 0 | 0 | 0 |
| THYMU3000776 | 0 | 0 | 0 | 22.150 | 0 | 0 | 0 |
| THYMU3001083 | 0 | 0 | 0 | 45.981 | 0 | 0 | 0 |
| THYMU3001379 | 0 | 0 | 0 | 0 | 0 | 25.376 | 0 |
| THYMU3003309 | 0 | 0 | 0 | 20.635 | 0 | 0 | 0 |
| THYMU3004835 | 0 | 0 | 0 | 0 | 0 | 19.793 | 0 |
| THYMU3005629 | 0 | 0 | 0 | 0 | 0 | 15.225 | 0 |
| THYMU3006485 | 0 | 0 | 0 | 45.981 | 0 | 0 | 0 |
| THYMU3007308 | 0 | 0 | 0 | 27.684 | 0 | 0 | 0 |
| THYMU3007423 | 0 | 0 | 0 | 13.957 | 0 | 0 | 0 |
| THYMU3008105 | 0 | 0 | 0 | 0 | 0 | 20.406 | 0 |
| THYMU3008171 | 0 | 0 | 0 | 14.316 | 0 | 0 | 0 |
| THYMU3013386 | 0 | 0 | 0 | 1.063 | 2.705 | 0 | 0 |
| THYMU3015571 | 0 | 73.725 | 0 | 0 | 0 | 0 | 0 |
| THYMU3015759 | 0 | 0 | 8.683 | 0.799 | 0 | 0 | 0 |
| THYMU3019476 | 0 | 0 | 0 | 0 | 0 | 54.718 | 0 |
| THYMU3021586 | 0 | 0 | 0 | 0 | 0 | 4.162 | 0 |
| THYMU3026350 | 0 | 0 | 0 | 0 | 0 | 14.400 | 0 |
| THYMU3032798 | 0 | 0 | 0 | 10.979 | 0 | 1.948 | 0 |
| THYMU3032867 | 0 | 0 | 0 | 9.135 | 0 | 0 | 0 |
| THYMU3033626 | 0 | 0 | 0 | 7.979 | 0 | 0 | 0 |
| THYMU3034671 | 0 | 0 | 0 | 5.078 | 0 | 0 | 0 |
| THYMU3038214 | 0 | 0 | 0 | 27.904 | 0 | 0 | 0 |
| THYMU3041428 | 0 | 0 | 0 | 0 | 0 | 0 | 96.263 |
| THYMU3046350 | 0 | 0 | 0 | 0 | 0 | 6.960 | 0 |
| TKIDN1000001 | 0 | 0 | 0 | 7.899 | 0 | 0 | 0 |
| TKIDN1000164 | 0 | 0 | 0 | 4.388 | 0 | 6.230 | 0 |
| TKIDN1000192 | 0 | 0 | 0 | 0 | 0 | 5.567 | 0 |
| TKIDN2000246 | 0 | 0 | 0 | 0.864 | 12.091 | 2.759 | 0 |
| TKIDN2002318 | 0 | 0 | 0 | 0 | 19.380 | 16.212 | 0 |
| TKIDN2002738 | 0 | 0 | 0 | 0.298 | 0 | 0.845 | 0 |
| TKIDN2003601 | 0 | 0 | 0 | 13.531 | 0 | 0 | 0 |
| TKIDN2005487 | 0 | 0 | 0 | 0.510 | 0 | 0 | 0 |
| TKIDN2006761 | 0 | 0 | 0 | 0 | 0 | 21.396 | 0 |
| TKIDN2007605 | 0 | 0 | 0 | 8.866 | 0 | 0 | 0 |
| TKIDN2007828 | 0 | 0 | 0 | 0 | 0 | 6.723 | 0 |
| TKIDN2008176 | 0 | 0 | 0 | 0 | 0 | 21.396 | 0 |
| TKIDN2009641 | 0 | 0 | 0 | 4.104 | 0 | 5.826 | 0 |
| TKIDN2011289 | 0 | 0 | 0 | 0 | 0 | 6.023 | 0 |
| TKIDN2015071 | 0 | 0 | 0 | 0 | 0 | 13.070 | 0 |
| TKIDN2015285 | 0 | 0 | 0 | 0 | 0 | 10.003 | 0 |
| TKIDN2015423 | 0 | 0 | 0 | 13.555 | 0 | 16.678 | 0 |
| TKIDN2015788 | 0 | 0 | 0 | 0 | 9.505 | 5.301 | 0 |
| TKIDN2016846 | 0 | 0 | 0 | 16.089 | 0 | 0 | 0 |
| TKIDN2018926 | 0 | 0 | 0 | 0 | 0 | 21.396 | 0 |
| TLIVE2002046 | 0 | 0 | 0 | 7.729 | 0 | 10.972 | 0 |
| TLIVE2004320 | 0 | 0 | 0 | 0 | 0 | 12.783 | 0 |
| TLIVE2007736 | 0 | 0 | 0 | 9.358 | 0 | 0 | 0 |
| TLUNG2000179 | 0 | 0 | 0 | 3.316 | 0 | 0 | 0 |
| TRACH1000011 | 0 | 0 | 0 | 5.224 | 0 | 0 | 0 |
| TRACH1000030 | 0 | 0 | 0 | 8.324 | 0 | 1.390 | 0 |
| TRACH1000181 | 0 | 0 | 0 | 0 | 0 | 4.774 | 0 |
| TRACH1000193 | 0 | 0 | 0 | 15.417 | 0 | 0 | 0 |
| TRACH1000205 | 0 | 0 | 0 | 8.380 | 0 | 3.965 | 0 |
| TRACH2000045 | 0 | 0 | 0 | 19.517 | 0 | 8.312 | 0 |
| TRACH2000047 | 0 | 0 | 0 | 26.609 | 0 | 0 | 0 |
| TRACH2000079 | 0 | 0 | 0 | 0.769 | 0 | 3.275 | 0 |
| TRACH2000248 | 0 | 0 | 0 | 2.971 | 0 | 0.703 | 0 |
| TRACH2000321 | 0 | 0 | 0 | 1.744 | 1.775 | 0.495 | 0 |
| TRACH2000393 | 0 | 0 | 0 | 24.151 | 0 | 0 | 0 |
| TRACH2000420 | 0 | 0 | 0 | 0 | 0 | 3.379 | 0 |
| TRACH2000461 | 0 | 0 | 0 | 2.434 | 0 | 6.910 | 0 |
| TRACH2000472 | 0 | 0 | 0 | 0 | 0 | 0.860 | 0 |
| TRACH2000660 | 0 | 0 | 0 | 27.005 | 0 | 0 | 0 |
| TRACH2000677 | 0 | 0 | 0 | 40.018 | 0 | 28.405 | 0 |
| TRACH2000702 | 0 | 0 | 0 | 5.573 | 0 | 0 | 0 |
| TRACH2000780 | 0 | 0 | 0 | 0.620 | 0 | 2.642 | 0 |
| TRACH2000873 | 0 | 0 | 0 | 0 | 0 | 47.355 | 0 |
| TRACH2000920 | 0 | 0 | 0 | 4.706 | 0 | 0 | 0 |
| TRACH2000926 | 0 | 0 | 0 | 1.980 | 0 | 0 | 0 |
| TRACH2000959 | 0 | 0 | 0 | 0.347 | 0 | 0.492 | 92.224 |
| TRACH2000972 | 0 | 4.160 | 0 | 0.421 | 8.566 | 0.597 | 0 |
| TRACH2001021 | 0 | 5.878 | 0 | 0 | 1.513 | 0 | 0 |
| TRACH2001109 | 0 | 0 | 0 | 2.080 | 6.050 | 13.074 | 0 |
| TRACH2001249 | 0 | 0 | 0 | 0 | 0 | 9.240 | 0 |
| TRACH2001289 | 0 | 0 | 0 | 0.241 | 1.228 | 0.685 | 0 |
| TRACH2001314 | 0 | 0 | 0 | 3.892 | 0 | 1.842 | 0 |
| TRACH2001341 | 0 | 44.736 | 0 | 0 | 0 | 0 | 0 |
| TRACH2001432 | 0 | 7.808 | 0 | 0 | 8.039 | 1.121 | 0 |
| TRACH2001478 | 0 | 0 | 0 | 1.648 | 2.098 | 2.340 | 0 |
| TRACH2001523 | 0 | 0 | 0 | 2.413 | 0 | 0 | 0 |
| TRACH2001549 | 0 | 0 | 0 | 0 | 0 | 4.260 | 0 |
| TRACH2001607 | 0 | 0 | 23.236 | 3.564 | 0 | 2.024 | 0 |
| TRACH2001612 | 0 | 28.037 | 0 | 2.835 | 0 | 0 | 0 |
| TRACH2001646 | 0 | 0 | 0 | 0 | 0 | 22.786 | 0 |
| TRACH2001684 | 0 | 0 | 0 | 0 | 0 | 17.948 | 0 |
| TRACH2001810 | 0 | 0 | 0 | 1.102 | 2.806 | 0.782 | 0 |
| TRACH2002537 | 0 | 0 | 0 | 1.975 | 3.351 | 0 | 0 |
| TRACH2002664 | 0 | 42.726 | 0 | 1.080 | 0 | 0 | 0 |
| TRACH2002803 | 0 | 0 | 0 | 2.958 | 0 | 4.199 | 0 |
| TRACH2003272 | 0 | 0 | 0 | 2.630 | 0 | 11.200 | 0 |
| TRACH2003323 | 0 | 0 | 0 | 0 | 0 | 7.173 | 0 |
| TRACH2003347 | 0 | 0 | 0 | 0 | 0 | 1.601 | 0 |
| TRACH2003484 | 0 | 0 | 0 | 38.787 | 0 | 0 | 0 |
| TRACH2004399 | 0 | 0 | 0 | 42.079 | 0 | 0 | 0 |
| TRACH2004458 | 0 | 0 | 0 | 0 | 76.336 | 0 | 0 |
| TRACH2005800 | 0 | 0 | 0 | 0 | 0 | 1.212 | 0 |
| TRACH2007399 | 0 | 0 | 0 | 0.334 | 0 | 0 | 0 |
| TRACH2008113 | 0 | 0 | 0 | 13.211 | 0 | 0 | 0 |
| TRACH2008300 | 0 | 0 | 0 | 3.615 | 6.135 | 11.974 | 0 |
| TRACH2008472 | 0 | 0 | 0 | 1.114 | 0 | 0 | 0 |
| TRACH2008716 | 0 | 0 | 0 | 0 | 0 | 5.111 | 0 |
| TRACH2008891 | 0 | 0 | 0 | 15.398 | 0 | 0 | 0 |
| TRACH2009006 | 0 | 0 | 0 | 0 | 0 | 3.536 | 0 |
| TRACH2010824 | 0 | 0 | 0 | 0 | 64.903 | 0 | 0 |
| TRACH2011113 | 0 | 0 | 0 | 3.351 | 0 | 0 | 0 |
| TRACH2011894 | 0 | 0 | 0 | 0 | 0 | 8.960 | 0 |
| TRACH2012376 | 0 | 18.838 | 0 | 0 | 0 | 0 | 0 |
| TRACH2012811 | 0 | 0 | 0 | 5.533 | 28.170 | 0 | 0 |
| TRACH2013552 | 0 | 0 | 0 | 7.374 | 0 | 0 | 0 |
| TRACH2014077 | 0 | 0 | 0 | 2.414 | 0 | 0 | 0 |
| TRACH2014124 | 0 | 0 | 0 | 1.465 | 0 | 4.160 | 0 |
| TRACH2014997 | 0 | 0 | 0 | 12.555 | 0 | 0 | 0 |
| TRACH2015823 | 0 | 0 | 0 | 3.105 | 0 | 0 | 0 |
| TRACH2016533 | 0 | 0 | 0 | 10.173 | 0 | 0 | 0 |
| TRACH2018950 | 0 | 0 | 0 | 5.331 | 0 | 0 | 0 |
| TRACH2025344 | 0 | 69.123 | 0 | 0 | 0 | 19.846 | 0 |
| TRACH2025535 | 0 | 0 | 4.477 | 2.472 | 0 | 0 | 0 |
| TRACH2025911 | 0 | 0 | 0 | 0 | 0 | 47.355 | 0 |
| TRACH3002192 | 0 | 0 | 0 | 3.541 | 2.253 | 1.885 | 0 |
| TRACH3002752 | 0 | 35.850 | 0 | 3.625 | 0 | 0 | 0 |
| TRACH3003547 | 0 | 0 | 0 | 3.002 | 15.280 | 0 | 0 |
| TRACH3003872 | 0 | 0 | 0 | 0 | 0 | 2.765 | 0 |
| TRACH3004068 | 0 | 0 | 0 | 0 | 5.150 | 1.436 | 0 |
| TRACH3004721 | 0 | 0 | 0 | 4.127 | 0 | 5.858 | 0 |
| TRACH3006038 | 0 | 0 | 0 | 38.787 | 0 | 0 | 0 |
| TRACH3006412 | 0 | 0 | 0 | 38.787 | 0 | 0 | 0 |
| TRACH3006717 | 0 | 0 | 0 | 10.418 | 0 | 3.697 | 0 |
| TRACH3007479 | 0 | 0 | 0 | 0 | 0 | 1.084 | 0 |
| TRACH3007625 | 0 | 0 | 0 | 2.503 | 0 | 3.553 | 0 |
| TRACH3007995 | 0 | 0 | 0 | 38.787 | 0 | 0 | 0 |
| TRACH3008093 | 0 | 0 | 0 | 3.477 | 0 | 0 | 0 |
| TRACH3008632 | 0 | 0 | 0 | 11.995 | 0 | 0 | 0 |
| TRACH3009001 | 0 | 0 | 0 | 0 | 0 | 23.608 | 0 |
| TRACH3009956 | 0 | 0 | 0 | 55.894 | 0 | 0 | 0 |
| TRACH3013558 | 0 | 0 | 0 | 38.787 | 0 | 0 | 0 |
| TRACH3016805 | 0 | 0 | 0 | 3.196 | 0 | 0 | 0 |
| TRACH3019290 | 0 | 0 | 0 | 0 | 0 | 27.871 | 0 |
| TRACH3036932 | 0 | 0 | 0 | 10.405 | 0 | 0 | 0 |
| TRACH3036942 | 0 | 0 | 0 | 0 | 0 | 0 | 92.165 |
| TRACH3037067 | 0 | 0 | 0 | 0 | 0 | 1.620 | 0 |
| TRACH3038399 | 0 | 0 | 0 | 8.826 | 0 | 0 | 0 |
| TSTOM2000553 | 0 | 11.832 | 0 | 0 | 0 | 0 | 0 |
| TUTER2000904 | 0 | 0 | 0 | 5.944 | 0 | 2.813 | 0 |
| TUTER2002323 | 0 | 0 | 0 | 2.312 | 0 | 0 | 0 |
| UMVEN1000122 | 0 | 6.860 | 0 | 0 | 0 | 0 | 0 |
| UMVEN2000133 | 0 | 0 | 0 | 0 | 0 | 0.591 | 0 |
| UMVEN2000152 | 0 | 0 | 0 | 0.559 | 0 | 0 | 0 |
| UMVEN2000453 | 0 | 0 | 0 | 0.371 | 0 | 1.052 | 0 |
| UTERU1000182 | 0 | 0 | 0 | 0.576 | 2.931 | 0.817 | 0 |
| UTERU1000384 | 0 | 0 | 0 | 5.059 | 0 | 0 | 0 |
| UTERU2000023 | 0 | 0 | 0 | 29.063 | 0 | 10.315 | 0 |
| UTERU2000074 | 0 | 0 | 0 | 37.308 | 0 | 0 | 0 |
| UTERU2000095 | 0 | 2.905 | 3.192 | 0.881 | 0 | 2.919 | 0 |
| UTERU2000263 | 0 | 0 | 0 | 0 | 1.851 | 0 | 0 |
| UTERU2000424 | 0 | 5.961 | 0 | 3.014 | 3.069 | 0.856 | 0 |
| UTERU2001607 | 0 | 0 | 0 | 2.094 | 0 | 0 | 0 |
| UTERU2002410 | 0 | 0 | 0 | 0.417 | 0 | 0.592 | 0 |
| UTERU2002662 | 0 | 0 | 0 | 0 | 0 | 1.793 | 0 |
| UTERU2002826 | 0 | 0 | 0 | 0 | 13.337 | 0 | 0 |
| UTERU2003057 | 0 | 0 | 0 | 1.836 | 0 | 0 | 0 |
| UTERU2003456 | 0 | 0 | 0 | 0 | 0 | 10.897 | 0 |
| UTERU2003704 | 0 | 0 | 0 | 12.217 | 0 | 17.343 | 0 |
| UTERU2004197 | 0 | 0 | 0 | 1.427 | 0 | 4.052 | 0 |
| UTERU2004664 | 0 | 0 | 26.172 | 0 | 0 | 1.710 | 0 |
| UTERU2004861 | 0 | 0 | 0 | 0 | 0 | 23.838 | 0 |
| UTERU2004929 | 0 | 0 | 0 | 0 | 0 | 11.697 | 0 |
| UTERU2005354 | 0 | 0 | 0 | 4.658 | 0 | 0 | 0 |
| UTERU2005446 | 0 | 0 | 0 | 0 | 75.184 | 0 | 0 |
| UTERU2005449 | 0 | 0 | 0 | 0 | 0 | 16.496 | 0 |
| UTERU2005593 | 0 | 0 | 0 | 1.593 | 0 | 3.393 | 0 |
| UTERU2005621 | 0 | 0 | 0 | 0 | 8.145 | 0 | 0 |
| UTERU2006115 | 0 | 0 | 0 | 5.563 | 0 | 0 | 0 |
| UTERU2006593 | 0 | 0 | 0 | 1.048 | 0 | 5.951 | 0 |
| UTERU2007924 | 0 | 0 | 0 | 0 | 9.664 | 0 | 0 |
| UTERU2008040 | 0 | 0 | 0 | 8.353 | 0 | 11.858 | 0 |
| UTERU2008085 | 2.831 | 0 | 0.696 | 0.961 | 0.979 | 0.819 | 0 |
| UTERU2008302 | 0 | 0 | 0 | 0 | 0 | 4.038 | 0 |
| UTERU2008938 | 0 | 0 | 0 | 0 | 0 | 4.959 | 0 |
| UTERU2009335 | 0 | 0 | 0 | 0 | 0 | 3.056 | 0 |
| UTERU2009435 | 0 | 0 | 0 | 0 | 0 | 5.388 | 0 |
| UTERU2009510 | 0 | 0 | 0 | 0 | 54.308 | 0 | 0 |
| UTERU2010226 | 0 | 0 | 0 | 5.599 | 0 | 0 | 0 |
| UTERU2010417 | 0 | 2.213 | 0 | 0.224 | 0 | 1.271 | 0 |
| UTERU2010747 | 0 | 0 | 0 | 37.308 | 0 | 0 | 0 |
| UTERU2011220 | 0 | 0 | 0 | 1.389 | 0 | 0 | 0 |
| UTERU2011621 | 0 | 0 | 0 | 28.191 | 0 | 0 | 0 |
| UTERU2011906 | 0 | 0 | 0 | 0 | 0 | 13.742 | 0 |
| UTERU2012230 | 0 | 0 | 0 | 9.992 | 0 | 1.773 | 0 |
| UTERU2012286 | 0 | 0 | 0 | 1.798 | 0 | 0 | 0 |
| UTERU2012407 | 0 | 0 | 0 | 0 | 0 | 24.800 | 0 |
| UTERU2012526 | 0 | 0 | 0 | 0 | 66.732 | 0 | 0 |
| UTERU2012856 | 0 | 0 | 0 | 2.504 | 0 | 7.110 | 0 |
| UTERU2014024 | 0 | 0 | 0 | 9.198 | 0 | 0 | 0 |
| UTERU2014167 | 0 | 0 | 0 | 0 | 0 | 0.918 | 0 |
| UTERU2014601 | 0 | 0 | 0 | 4.916 | 0 | 13.956 | 0 |
| UTERU2014898 | 0 | 0 | 0 | 2.160 | 0 | 0 | 0 |
| UTERU2016799 | 0 | 20.409 | 0 | 8.255 | 0 | 0 | 0 |
| UTERU2016822 | 0 | 0 | 0 | 0 | 0 | 4.050 | 0 |
| UTERU2017761 | 0 | 0 | 0 | 37.308 | 0 | 0 | 0 |
| UTERU2018200 | 0 | 0 | 0 | 17.226 | 0 | 0 | 0 |
| UTERU2018566 | 0 | 0 | 0 | 12.651 | 0 | 0 | 0 |
| UTERU2018712 | 0 | 0 | 0 | 0 | 0 | 45.794 | 0 |
| UTERU2018884 | 0 | 0 | 0 | 1.100 | 0 | 1.561 | 0 |
| UTERU2019005 | 0 | 0 | 0 | 4.584 | 0 | 6.508 | 0 |
| UTERU2019096 | 0 | 0 | 0 | 4.905 | 8.323 | 2.321 | 0 |
| UTERU2021820 | 0 | 0 | 0 | 17.694 | 0 | 0 | 0 |
| UTERU2024969 | 0 | 22.540 | 0 | 0 | 0 | 0 | 0 |
| UTERU2025301 | 0 | 0 | 0 | 3.085 | 0 | 0 | 0 |
| UTERU3000226 | 0 | 0 | 0 | 37.308 | 0 | 0 | 0 |
| UTERU3000298 | 0 | 0 | 0 | 13.135 | 0 | 13.985 | 0 |
| UTERU3000670 | 0 | 0 | 0 | 16.553 | 0 | 0 | 0 |
| UTERU3000727 | 0 | 0 | 0 | 32.047 | 0 | 0 | 0 |
| UTERU3001158 | 0 | 0 | 0 | 23.569 | 0 | 0 | 0 |
| UTERU3001766 | 0 | 0 | 0 | 0 | 0 | 45.794 | 0 |
| UTERU3003660 | 0 | 0 | 0 | 5.226 | 0 | 14.837 | 0 |
| UTERU3005230 | 0 | 0 | 0 | 17.332 | 0 | 0 | 0 |
| UTERU3005460 | 0 | 0 | 0 | 37.308 | 0 | 0 | 0 |
| UTERU3005536 | 0 | 0 | 0 | 37.308 | 0 | 0 | 0 |
| UTERU3005767 | 0 | 8.354 | 0 | 0 | 0 | 2.398 | 0 |
| UTERU3005970 | 0 | 0 | 0 | 37.308 | 0 | 0 | 0 |
| UTERU3006308 | 0 | 0 | 0 | 37.308 | 0 | 0 | 0 |
| UTERU3007419 | 0 | 0 | 0 | 37.308 | 0 | 0 | 0 |
| UTERU3007913 | 0 | 0 | 0 | 12.951 | 0 | 0 | 0 |
| UTERU3009517 | 0 | 0 | 0 | 0 | 0 | 45.794 | 0 |
| UTERU3010409 | 0 | 0 | 0 | 17.196 | 0 | 0 | 0 |
| UTERU3015011 | 0 | 0 | 0 | 5.009 | 0 | 0 | 0 |

[0748] Genes whose expression levels were negligibly low in each of the above-described libraries are shown with their clone names below.

[0749] 3NB691000018, 3NB691000113, 3NB691000129, 3NB691000191, 3NB692000012, 3NB692000029, 3NB692000102, 3NB692000154, 3NB692000276, 3NB692000305, 3NB692000429, 3NB692000484, 3NB692000529, 3NB692000973, 3NB692001002, 3NB692001034, 3NB692001040, 3NB692001123, 3NB692001267, 3NB692001339, 3NB692001349, 3NB692001366, 3NB692001408, 3NB692001433, 3NB692001459, 3NB692001471, 3NB692001501, 3NB692001507, 3NB692001511, 3NB692001519, 3NB692001520, 3NB692001528, 3NB692001538, 3NB692001548, 3NB692001557, 3NB692001637, 3NB692001861, 3NB692002365, 3NB692002685, 3NB692002806, 3NB692003538, 3NB692004045, 3NB692004724, 3NB692005439, 3NB692006952, 3NB692008178, 3NB692008729, ACTVT2000380, ADIPS1000064, ADIPS2000069, ADIPS2000088, ADIPS2000245, ADIPS2000425, ADRGL1000038, ADRGL1000067, ADRGL1000111, ADRGL1000144, ADRGL1000147, ADRGL1000160, ADRGL1000165, ADRGL1000182, ADRGL2000056, ADRGL2000064, ADRGL2000085, ADRGL2000117, ADRGL2000142, ADRGL2000172, ADRGL2000248, ADRGL2000261, ADRGL2000323, ADRGL2000353, ADRGL2000384, ADRGL2000428, ADRGL2000636, ADRGL2000968, ADRGL2001119, ADRGL2001229, ADRGL2001287, ADRGL2001301, ADRGL2001354, ADRGL2001554, ADRGL2001651, ADRGL2001756, ADRGL2001836, ADRGL2001854, ADRGL2002029, ADRGL2002260, ADRGL2002392, ADRGL2002679, ADRGL2002753, ADRGL2002857, ADRGL2003017, ADRGL2003329, ADRGL2003552, ADRGL2003585, ADRGL2003638, ADRGL2003684, ADRGL2003773, ADRGL2003785, ADRGL2004031, ADRGL2004077, ADRGL2004451, ADRGL2004459, ADRGL2004676, ADRGL2004708, ADRGL2004724, ADRGL2004749, ADRGL2004770, ADRGL2004777, ADRGL2004833, ADRGL2005336, ADRGL2005564, ADRGL2005756, ADRGL2005838, ADRGL2005926, ADRGL2005961, ADRGL2006034, ADRGL2006124, ADRGL2006177, ADRGL2006193, ADRGL2006377, ADRGL2006677, ADRGL2006732, ADRGL2006767, ADRGL2006817, ADRGL2006846, ADRGL2006886, ADRGL2007080, ADRGL2007125, ADRGL2007283, ADRGL2007357, ADRGL2007636, ADRGL2007651, ADRGL2007810, ADRGL2007877, ADRGL2008023, ADRGL2008331, ADRGL2008337, ADRGL2008535, ADRGL2009324, ADRGL2009489, ADRGL2009533, ADRGL2009691, ADRGL2009755, ADRGL2010315, ADRGL2010594, ADRGL2010860, ADRGL2010974, ADRGL2011190, ADRGL2011330, ADRGL2012179, AHMSC1000138, ASTRO1000009, ASTRO1000018, ASTRO1000029, ASTRO1000096, ASTRO1000165, ASTRO2000011, ASTRO2000095, ASTRO2000191, ASTRO2000278, ASTRO2000372, ASTRO2000403, ASTRO2000417, ASTRO2000482, ASTRO2000533, ASTRO2000653, ASTRO2000662, ASTRO2000725, ASTRO2000801, ASTRO2000914, ASTRO2001001, ASTRO2001008, ASTRO2001076, ASTRO2001088, ASTRO2001122, ASTRO2001227, ASTRO2001249, ASTRO2001480, ASTRO2002035, ASTRO2002064, ASTRO2002202, ASTRO2002571, ASTRO2002632, ASTRO2002659, ASTRO2002720, ASTRO2002743, ASTRO2002842, ASTRO2003574, ASTRO2003581, ASTRO2003632, ASTRO2003740, ASTRO2003925, ASTRO2004051, ASTRO2004217, ASTRO2004297, ASTRO2004584, ASTRO2004628, ASTRO2004751, ASTRO2004877, ASTRO2005008, ASTRO2005081, ASTRO2005096, ASTRO2005242, ASTRO2005273, ASTRO2005343, ASTRO2005360, ASTRO2005413, ASTRO2005557, ASTRO2005575, ASTRO2005593, ASTRO2005687, ASTRO2005726, ASTRO2005863, ASTRO2005896, ASTRO2005902, ASTRO2006356, ASTRO2006732, ASTRO2006747, ASTRO2006920, ASTRO2006952, ASTRO2007221, ASTRO2007377, ASTRO2007515, ASTRO2007578, ASTRO2007643, ASTRO2007666, ASTRO2007956, ASTRO2007962, ASTRO2008040, ASTRO2008239, ASTRO2008409, ASTRO2008425, ASTRO2008508, ASTRO2008777, ASTRO2008895, ASTRO2008960, ASTRO2008972, ASTRO2009068, ASTRO2009118, ASTRO2009177, ASTRO2009333, ASTRO2009458, ASTRO2009526, ASTRO2009879, ASTRO2010072, ASTRO2010582, ASTRO2010615, ASTRO2010799, ASTRO2010962, ASTRO2010996, ASTRO2011149, ASTRO2011426, ASTRO2011437, ASTRO2011461, ASTRO2011834, ASTRO2011893, ASTRO2013124, ASTRO2013671, ASTRO2013802, ASTRO2014135, ASTRO2014174, ASTRO2014211, ASTRO2014363, ASTRO2014923, ASTRO2014961, ASTRO2015162, ASTRO2015185, ASTRO2015529, ASTRO2015987, ASTRO2016044, ASTRO2016114, ASTRO2016148, ASTRO2016681, ASTRO2016847, ASTRO2016892, ASTRO2017348, ASTRO2017627, ASTRO2018373, ASTRO2019039, ASTRO3000154, ASTRO3000172, ASTRO3000177, ASTRO3000301, ASTRO3000474, ASTRO3000482, BEAST2000454, BRAWH1000002, BRAWH1000007, BRAWH1000116, BRAWH1000130, BRAWH1000157, BRAWH1000164, BRAWH1000168, BRAWH1000180, BRAWH1000369, BRAWH2000034, BRAWH2000048, BRAWH2000071, BRAWH2000093, BRAWH2000109, BRAWH2000142, BRAWH2000169, BRAWH2000218, BRAWH2000232, BRAWH2000248, BRAWH2000256, BRAWH2000323, BRAWH2000370, BRAWH2000409, BRAWH2000471, BRAWH2000476, BRAWH2000488, BRAWH2000503, BRAWH2000554, BRAWH2000588, BRAWH2000643, BRAWH2000651, BRAWH2000682, BRAWH2000752, BRAWH2000859, BRAWH2000866, BRAWH2000892, BRAWH2000901, BRAWH2000926, BRAWH2000944, BRAWH2000984, BRAWH2001052, BRAWH2001103, BRAWH2001129, BRAWH2001137, BRAWH2001159, BRAWH2001203, BRAWH2001239, BRAWH2001255, BRAWH2001355, BRAWH2001378, BRAWH2001406, BRAWH2001412, BRAWH2001424, BRAWH2001436, BRAWH2001438, BRAWH2001484, BRAWH2001492, BRAWH2001503, BRAWH2001519, BRAWH2001530, BRAWH2001589, BRAWH2001666, BRAWH2001679, BRAWH2001686, BRAWH2001701, BRAWH2001842, BRAWH2001862, BRAWH2001873, BRAWH2001940, BRAWH2001973, BRAWH2002062, BRAWH2002125, BRAWH2002191, BRAWH2002333, BRAWH2002352, BRAWH2002383, BRAWH2002623, BRAWH2002630, BRAWH2002635, BRAWH2002662, BRAWH2002679, BRAWH2002725, BRAWH2002761, BRAWH2002861, BRAWH2002967, BRAWH2002976, BRAWH2003135, BRAWH2003240, BRAWH2003307, BRAWH2003366, BRAWH2003689, BRAWH2003693, BRAWH2003818, BRAWH2003832, BRAWH2003948, BRAWH2003964, BRAWH2004044, BRAWH2004068, BRAWH2004136, BRAWH2004217, BRAWH2004580, BRAWH2004731, BRAWH2004884, BRAWH2004923, BRAWH2005074, BRAWH2005225, BRAWH2005315, BRAWH2005517, BRAWH2005524, BRAWH2005533, BRAWH2005578, BRAWH2005812, BRAWH2005974, BRAWH2005998, BRAWH2006083, BRAWH2006395, BRAWH2006405, BRAWH2006450, BRAWH2006526, BRAWH2006760, BRAWH2006960, BRAWH2007069, BRAWH2007308, BRAWH2007406, BRAWH2007550, BRAWH2007570, BRAWH2007658, BRAWH2007800, BRAWH2007808, BRAWH2007862, BRAWH2007890, BRAWH2008058, BRAWH2008128, BRAWH2008219, BRAWH2008292, BRAWH2008297, BRAWH2008366, BRAWH2008380, BRAWH2008540, BRAWH2008577, BRAWH2008790, BRAWH2009112, BRAWH2009227, BRAWH2009261, BRAWH2009263, BRAWH2009298, BRAWH2009304, BRAWH2009360, BRAWH2009393, BRAWH2009485, BRAWH2009490, BRAWH2009558, BRAWH2009590, BRAWH2009626, BRAWH2009678, BRAWH2009907, BRAWH2010000, BRAWH2010069, BRAWH2010084, BRAWH2010318, BRAWH2010536, BRAWH2010584, BRAWH2010618, BRAWH2010619, BRAWH2010980, BRAWH2011066, BRAWH2011079, BRAWH2011096, BRAWH2011155, BRAWH2011166, BRAWH2011286, BRAWH2011294, BRAWH2011400, BRAWH2011762, BRAWH2011795, BRAWH2011796, BRAWH2011823, BRAWH2011860, BRAWH2011958, BRAWH2012054, BRAWH2012077, BRAWH2012161, BRAWH2012162, BRAWH2012258, BRAWH2012277, BRAWH2012326, BRAWH2012540, BRAWH2012619, BRAWH2012749, BRAWH2012963, BRAWH2013866, BRAWH2013871, BRAWH2013914, BRAWH2013941, BRAWH2013955, BRAWH2014234, BRAWH2014379, BRAWH2014473, BRAWH2014717, BRAWH2014729, BRAWH2014934, BRAWH2015349, BRAWH2015375, BRAWH2015595, BRAWH2015853, BRAWH2015866, BRAWH2016106, BRAWH2016160, BRAWH2016221, BRAWH2016223, BRAWH2016305, BRAWH2016439, BRAWH2016446, BRAWH2016514, BRAWH2016562, BRAWH2016655, BRAWH2016724, BRAWH2016785, BRAWH2016792, BRAWH2016800, BRAWH2017103, BRAWH2017250, BRAWH2017294, BRAWH2017305, BRAWH2017407, BRAWH2017433, BRAWH2017523, BRAWH2017534, BRAWH2017542, BRAWH2017635, BRAWH2017913, BRAWH2018206, BRAWH2018282, BRAWH2018317, BRAWH2018506, BRAWH2018514, BRAWH2018527, BRAWH2018601, BRAWH2018729, BRAWH2018745, BRAWH2019053, BRAWH2019055, BRAWH2019198, BRAWH3000078, BRAWH3000100, BRAWH3000166, BRAWH3000314, BRAWH3000329, BRAWH3000410, BRAWH3000446, BRAWH3000491, BRAWH3000604, BRAWH3000884, BRAWH3001053, BRAWH3001326, BRAWH3001475, BRAWH3001636, BRAWH3001638, BRAWH3001712, BRAWH3001760, BRAWH3001783, BRAWH3001833, BRAWH3001879, BRAWH3002433, BRAWH3002467, BRAWH3002513, BRAWH3002574, BRAWH3002819, BRAWH3003019, BRAWH3003136, BRAWH3003244, BRAWH3003343, BRAWH3003411, BRAWH3003522, BRAWH3003598, BRAWH3003801, BRAWH3003975, BRAWH3004222, BRAWH3004335, BRAWH3004350, BRAWH3004453, BRAWH3004666, BRAWH3005037, BRAWH3005047, BRAWH3005292, BRAWH3005300, BRAWH3005422, BRAWH3005534, BRAWH3005886, BRAWH3005892, BRAWH3005896, BRAWH3005912, BRAWH3005981, BRAWH3006547, BRAWH3006548, BRAWH3006792, BRAWH3007221, BRAWH3007441, BRAWH3007455, BRAWH3007506, BRAWH3007726, BRAWH3007783, BRAWH3008167, BRAWH3008341, BRAWH3008559, BRAWH3008697, BRAWH3008867, BRAWH3009017, BRAWH3009546, BRAWH3009961, BRAWH3010560, BRAWH3010602, BRAWH3010657, BRAWH3010726, BRAWH3010833, BRAWH3011101, BRAWH3011331, BRAWH3011402, BRAWH3011577, BRAWH3011623, BRAWH3011637, BRAWH3011685, BRAWH3011907, BRAWH3011929, BRAWH3012005, BRAWH3012662, BRAWH3012779, BRAWH3013009, BRAWH3013049, BRAWH3013197, BRAWH3013264, BRAWH3013508, BRAWH3014609, BRAWH3014639, BRAWH3015017, BRAWH3015175, BRAWH3015260, BRAWH3015610, BRAWH3015825, BRAWH3016123, BRAWH3016715, BRAWH3017260, BRAWH3017477, BRAWH3017537, BRAWH3018369, BRAWH3018548, BRAWH3018969, BRAWH3019026, BRAWH3019529, BRAWH3019594, BRAWH3019629, BRAWH3019820, BRAWH3020200, BRAWH3020318, BRAWH3020486, BRAWH3020884, BRAWH3020928, BRAWH3021012, BRAWH3021580, BRAWH3021641, BRAWH3021643, BRAWH3021724, BRAWH3022347, BRAWH3022431, BRAWH3022459, BRAWH3022542, BRAWH3022719, BRAWH3022866, BRAWH3022900, BRAWH3023156, BRAWH3023168, BRAWH3023172, BRAWH3023274, BRAWH3023421, BRAWH3024231, BRAWH3024242, BRAWH3024469, BRAWH3024506, BRAWH3024613, BRAWH3024989, BRAWH3026349, BRAWH3026394, BRAWH3026529, BRAWH3027420, BRAWH3027533, BRAWH3027574, BRAWH3027607, BRAWH3027616, BRAWH3027675, BRAWH3027806, BRAWH3027880, BRAWH3027927, BRAWH3028202, BRAWH3028223, BRAWH3028306, BRAWH3028461, BRAWH3028645, BRAWH3028754, BRAWH3028796, BRAWH3029254, BRAWH3029313, BRAWH3029538, BRAWH3030613, BRAWH3030772, BRAWH3030892, BRAWH3030910, BRAWH3030950, BRAWH3031054, BRAWH3031710, BRAWH3031902, BRAWH3032298, BRAWH3032340, BRAWH3032571, BRAWH3032620, BRAWH3032930, BRAWH3033117, BRAWH3033293, BRAWH3033448, BRAWH3033513, BRAWH3034097, BRAWH3034114, BRAWH3034134, BRAWH3034668, BRAWH3034775, BRAWH3034890, BRAWH3035154, BRAWH3035904, BRAWH3035914, BRAWH3035936, BRAWH3036077, BRAWH3036247, BRAWH3036270, BRAWH3036561, BRAWH3036738, BRAWH3036951, BRAWH3037265, BRAWH3037394, BRAWH3037533, BRAWH3037979, BRAWH3038055, BRAWH3038230, BRAWH3038252, BRAWH3038324, BRCAN1000065, BRCAN1000105, BRCAN1000149, BRCAN2000148, BRCAN2000149, BRCAN2000209, BRCAN2000239, BRCAN2000346, BRCAN2000364, BRCAN2000383, BRCAN2000418, BRCAN2000523, BRCAN2000541, BRCAN2000563, BRCAN2000577, BRCAN2000620, BRCAN2000639, BRCAN2000763, BRCAN2000832, BRCAN2000923, BRCAN2001866, BRCAN2002416, BRCAN2002473, BRCAN2002562, BRCAN2002662, BRCAN2002826, BRCAN2002854, BRCAN2002856, BRCAN2002892, BRCAN2002944, BRCAN2002948, BRCAN2003070, BRCAN2003269, BRCAN2003389, BRCAN2003628, BRCAN2003703, BRCAN2003746, BRCAN2003814, BRCAN2003987, BRCAN2004173, BRCAN2004355, BRCAN2004371, BRCAN2004653, BRCAN2004699, BRCAN2005436, BRCAN2005449, BRCAN2006051, BRCAN2006063, BRCAN2006174, BRCAN2006290, BRCAN2006297, BRCAN2006323, BRCAN2006411, BRCAN2006450, BRCAN2006955, BRCAN2007119, BRCAN2007144, BRCAN2007409, BRCAN2007426, BRCAN2007525, BRCAN2008494, BRCAN2008528, BRCAN2008701, BRCAN2009156, BRCAN2009168, BRCAN2009203, BRCAN2010547, BRCAN2010581, BRCAN2011254, BRCAN2011316, BRCAN2011602, BRCAN2011946, BRCAN2012110, BRCAN2012355, BRCAN2012402, BRCAN2012408, BRCAN2012481, BRCAN2012613, BRCAN2012713, BRCAN2012929, BRCAN2013655, BRCAN2013660, BRCAN2014143, BRCAN2014229, BRCAN2014370, BRCAN2014602, BRCAN2014652, BRCAN2014788, BRCAN2014952, BRCAN2015402, BRCAN2015464, BRCAN2015757, BRCAN2015886, BRCAN2016025, BRCAN2016174, BRCAN2016433, BRCAN2016619, BRCAN2016762, BRCAN2016814, BRCAN2017442, BRCAN2017905, BRCAN2018240, BRCAN2018269, BRCAN2018490, BRCAN2018566, BRCAN2018667, BRCAN2018748, BRCAN2018935, BRCAN2019002, BRCAN2019387, BRCAN2019773, BRCAN2019907, BRCAN2020234, BRCAN2020331, BRCAN2020412, BRCAN2020467, BRCAN2020880, BRCAN2021024, BRCAN2021028, BRCAN2021325, BRCAN2021452, BRCAN2021669, BRCAN2021718, BRCAN2022191, BRCAN2022472, BRCAN2022474, BRCAN2023347, BRCAN2023724, BRCAN2024451, BRCAN2024563, BRCAN2025009, BRCAN2025093, BRCAN2025349, BRCAN2025712, BRCAN2025982, BRCAN2026117, BRCAN2026711, BRCAN2027150, BRCAN2027310, BRCAN2027355, BRCAN2027513, BRCAN2027593, BRCAN2027970, BRCAN2028021, BRCAN2028040, BRCAN2028319, BRCAN2028338, BRCAN2028378, BRCAN2028460, BRCAN2028545, BRCAN2028634, BRCAN2028702, BRCOC1000087, BRCOC2000152, BRCOC2000184, BRCOC2000360, BRCOC2000404, BRCOC2000487, BRCOC2000637, BRCOC2000816, BRCOC2000850, BRCOC2001355, BRCOC2002085, BRCOC2002155, BRCOC2002323, BRCOC2002659, BRCOC2002664, BRCOC2002686, BRCOC2002751, BRCOC2002756, BRCOC2002777, BRCOC2002835, BRCOC2003125, BRCOC2003513, BRCOC2003732, BRCOC2003740, BRCOC2004175, BRCOC2004354, BRCOC2004455, BRCOC2004950, BRCOC2005951, BRCOC2006164, BRCOC2006243, BRCOC2006639, BRCOC2006942, BRCOC2007593, BRCOC2007733, BRCOC2007769, BRCOC2008064, BRCOC2008225, BRCOC2008642, BRCOC2008993, BRCOC2009052, BRCOC2009196, BRCOC2009380, BRCOC2009638, BRCOC2010115, BRCOC2010123, BRCOC2010510, BRCOC2010730, BRCOC2010980, BRCOC2010994, BRCOC2011010, BRCOC2011398, BRCOC2011418, BRCOC2011769, BRCOC2011996, BRCOC2012229, BRCOC2012386, BRCOC2012813, BRCOC2013448, BRCOC2013573, BRCOC2013675, BRCOC2014013, BRCOC2014033, BRCOC2014400, BRCOC2014748, BRCOC2014833, BRCOC2015597, BRCOC2015824, BRCOC2015908, BRCOC2015944, BRCOC2016525, BRCOC2016661, BRCOC2017061, BRCOC2017652, BRCOC2017856, BRCOC2018775, BRCOC2018877, BRCOC2019255, BRCOC2019549, BRCOC2019903, BRCOC2019934, BRCOC2020122, BRCOC2020142, BRHIP1000058, BRHIP1000072, BRHIP1000258, BRHIP2000021, BRHIP2000079, BRHIP2000163, BRHIP2000239, BRHIP2000245, BRHIP2000359, BRHIP2000445, BRHIP2000506, BRHIP2000532, BRHIP2000621, BRHIP2000691, BRHIP2000819, BRHIP2000826, BRHIP2001074, BRHIP2001686, BRHIP2001782, BRHIP2001802, BRHIP2001805, BRHIP2001927, BRHIP2002122, BRHIP2002172, BRHIP2002346, BRHIP2002510, BRHIP2002664, BRHIP2002722, BRHIP2002929, BRHIP2003048, BRHIP2003242, BRHIP2003272, BRHIP2003748, BRHIP2003786, BRHIP2003828, BRHIP2003917, BRHIP2004312, BRHIP2004355, BRHIP2004814, BRHIP2004883, BRHIP2004902, BRHIP2005236, BRHIP2005354, BRHIP2005600, BRHIP2005719, BRHIP2005724, BRHIP2005932, BRHIP2006617, BRHIP2006782, BRHIP2006800, BRHIP2006819, BRHIP2006921, BRHIP2007307, BRHIP2007616, BRHIP2007690, BRHIP2007928, BRHIP2007969, BRHIP2008269, BRHIP2008389, BRHIP2008756, BRHIP2008909, BRHIP2009177, BRHIP2009340, BRHIP2009351, BRHIP2009414, BRHIP2009474, BRHIP2009617, BRHIP2009685, BRHIP2010309, BRHIP2010444, BRHIP2010593, BRHIP2010610, BRHIP2010744, BRHIP2011080, BRHIP2011199, BRHIP2011508, BRHIP2011616, BRHIP2011783, BRHIP2011838, BRHIP2011891, BRHIP2011933, BRHIP2012054, BRHIP2012059, BRHIP2012141, BRHIP2012314, BRHIP2012360, BRHIP2012545, BRHIP2012580, BRHIP2012627, BRHIP2012642, BRHIP2012750, BRHIP2012922, BRHIP2012923, BRHIP2012972, BRHIP2013286, BRHIP2013447, BRHIP2013510, BRHIP2013723, BRHIP2013958, BRHIP2013972, BRHIP2014063, BRHIP2014285, BRHIP2014291, BRHIP2014373, BRHIP2014386, BRHIP2014387, BRHIP2014954, BRHIP2015356, BRHIP2015360, BRHIP2016005, BRHIP2016125, BRHIP2016788, BRHIP2016968, BRHIP2016990, BRHIP2017010, BRHIP2017315, BRHIP2017385, BRHIP2017404, BRHIP2017542, BRHIP2017553, BRHIP2017714, BRHIP2017780, BRHIP2018014, BRHIP2018369, BRHIP2018612, BRHIP2018635, BRHIP2018650, BRHIP2018805, BRHIP2018998, BRHIP2019007, BRHIP2019047, BRHIP2019149, BRHIP2019177, BRHIP2019291, BRHIP2019589, BRHIP2019641, BRHIP2019884, BRHIP2019972, BRHIP2020182, BRHIP2020509, BRHIP2020695, BRHIP2020743, BRHIP2020842, BRHIP2020859, BRHIP2020930, BRHIP2021102, BRHIP2021289, BRHIP2021615, BRHIP2021744, BRHIP2021929, BRHIP2022006, BRHIP2022221, BRHIP2022228, BRHIP2022298, BRHIP2022467, BRHIP2022708, BRHIP2023229, BRHIP2023272, BRHIP2023292, BRHIP2023369, BRHIP2023438, BRHIP2023695, BRHIP2023735, BRHIP2023773, BRHIP2023860, BRHIP2023869, BRHIP2024046, BRHIP2024165, BRHIP2024201, BRHIP2024347, BRHIP2024549, BRHIP2024789, BRHIP2024911, BRHIP2024941, BRHIP2025245, BRHIP2025366, BRHIP2025739, BRHIP2025797, BRHIP2026021, BRHIP2026155, BRHIP2026214, BRHIP2026346, BRHIP2026557, BRHIP2026723, BRHIP2026877, BRHIP2027017, BRHIP2027054, BRHIP2027563, BRHIP2027762, BRHIP2028303, BRHIP2028330, BRHIP2028480, BRHIP2028593, BRHIP2029176, BRHIP2029283, BRHIP2029393, BRHIP2029529, BRHIP2029663, BRHIP3000017, BRHIP3000060, BRHIP3000070, BRHIP3000081, BRHIP3000475, BRHIP3000488, BRHIP3000526, BRHIP3000626, BRHIP3000859, BRHIP3000907, BRHIP3001076, BRHIP3001079, BRHIP3001141, BRHIP3001338, BRHIP3001481, BRHIP3001878, BRHIP3001964, BRHIP3002124, BRHIP3002141, BRHIP3002363, BRHIP3002920, BRHIP3002931, BRHIP3003306, BRHIP3003340, BRHIP3003395, BRHIP3003484, BRHIP3003644, BRHIP3003688, BRHIP3003795, BRHIP3004193, BRHIP3004416, BRHIP3004710, BRHIP3004725, BRHIP3004774, BRHIP3004786, BRHIP3004863, BRHIP3005037, BRHIP3005137, BRHIP3005142, BRHIP3005231, BRHIP3005307, BRHIP3005768, BRHIP3005944, BRHIP3006279, BRHIP3006294, BRHIP3006390, BRHIP3006449, BRHIP3006683, BRHIP3006786, BRHIP3006950, BRHIP3007172, BRHIP3007183, BRHIP3007195, BRHIP3007239, BRHIP3007291, BRHIP3007409, BRHIP3007424, BRHIP3007483, BRHIP3007609, BRHIP3007960, BRHIP3008082, BRHIP3008183, BRHIP3008314, BRHIP3008320, BRHIP3008344, BRHIP3008565, BRHIP3008598, BRHIP3008606, BRHIP3008691, BRHIP3008714, BRHIP3008997, BRHIP3009099, BRHIP3009140, BRHIP3009181, BRHIP3009318, BRHIP3009427, BRHIP3009448, BRHIP3009672, BRHIP3009753, BRHIP3010135, BRHIP3010289, BRHIP3010529, BRHIP3011082, BRHIP3011241, BRHIP3011269, BRHIP3011460, BRHIP3011567, BRHIP3011831, BRHIP3012185, BRHIP3012289, BRHIP3012357, BRHIP3012745, BRHIP3012868, BRHIP3012997, BRHIP3013078, BRHIP3013271, BRHIP3013588, BRHIP3013698, BRHIP3013765, BRHIP3013897, BRHIP3014237, BRHIP3015620, BRHIP3015751, BRHIP3015854, BRHIP3016032, BRHIP3016213, BRHIP3016302, BRHIP3016421, BRHIP3017109, BRHIP3017256, BRHIP3017325, BRHIP3017558, BRHIP3017637, BRHIP3018784, BRHIP3019643, BRHIP3019824, BRHIP3019880, BRHIP3019956, BRHIP3020155, BRHIP3020182, BRHIP3020733, BRHIP3021499, BRHIP3021534, BRHIP3021778, BRHIP3021987, BRHIP3022656, BRHIP3023922, BRHIP3024118, BRHIP3024533, BRHIP3024703, BRHIP3024725, BRHIP3024820, BRHIP3025161, BRHIP3025702, BRHIP3025795, BRHIP3025844, BRHIP3026097, BRHIP3026231, BRHIP3026335, BRHIP3026651, BRHIP3027105, BRHIP3027137, BRHIP3027160, BRHIP3027191, BRHIP3027501, BRHIP3027651, BRHIP3027854, BRHIP3027947, BRHIP3028570, BRHIP3028742, BRSSN1000056, BRSSN1000059, BRSSN1000092, BRSSN1000153, BRSSN2000175, BRSSN2000197, BRSSN2000244, BRSSN2000518, BRSSN2000684, BRSSN2000715, BRSSN2001213, BRSSN2001275, BRSSN2001342, BRSSN2001426, BRSSN2001503, BRSSN2001579, BRSSN2001810, BRSSN2002857, BRSSN2002859, BRSSN2003086, BRSSN2003093, BRSSN2003820, BRSSN2003841, BRSSN2003937, BRSSN2004142, BRSSN2004303, BRSSN2004304, BRSSN2004657, BRSSN2004679, BRSSN2004686, BRSSN2004710, BRSSN2004719, BRSSN2005847, BRSSN2006133, BRSSN2006390, BRSSN2006575, BRSSN2006644, BRSSN2007076, BRSSN2007168, BRSSN2007202, BRSSN2007464, BRSSN2007504, BRSSN2007819, BRSSN2008125, BRSSN2008419, BRSSN2008464, BRSSN2008549, BRSSN2008797, BRSSN2009119, BRSSN2009378, BRSSN2009389, BRSSN2009395, BRSSN2009627, BRSSN2009630, BRSSN2009702, BRSSN2010019, BRSSN2010110, BRSSN2010830, BRSSN2011653, BRSSN2012081, BRSSN2012103, BRSSN2012157, BRSSN2012198, BRSSN2012254, BRSSN2012439, BRSSN2012622, BRSSN2012691, BRSSN2012838, BRSSN2013095, BRSSN2013544, BRSSN2013702, BRSSN2013753, BRSSN2013874, BRSSN2014112, BRSSN2014424, BRSSN2014513, BRSSN2014556, BRSSN2014573, BRSSN2014636, BRSSN2015369, BRSSN2015497, BRSSN2015554, BRSSN2015707, BRSSN2015773, BRSSN2015907, BRSSN2015982, BRSSN2016589, BRSSN2016768, BRSSN2016905, BRSSN2017297, BRSSN2017422, BRSSN2017530, BRSSN2017682, BRSSN2017757, BRSSN2018218, BRSSN2018440, BRSSN2018581, BRSSN2018731, BRSSN2018771, BRSSN2018925, BRSTN1000097, BRSTN2000070, BRSTN2000312, BRSTN2000367, BRSTN2000536, BRSTN2000872, BRSTN2001067, BRSTN2001613, BRSTN2001801, BRSTN2002105, BRSTN2002400, BRSTN2002532, BRSTN2002691, BRSTN2003590, BRSTN2003835, BRSTN2004863, BRSTN2004869, BRSTN2004987, BRSTN2005721, BRSTN2006306, BRSTN2006466, BRSTN2006583, BRSTN2006638, BRSTN2006865, BRSTN2007000, BRSTN2007118, BRSTN2007284, BRSTN2007765, BRSTN2008283, BRSTN2008367, BRSTN2008418, BRSTN2008457, BRSTN2008475, BRSTN2008930, BRSTN2009247, BRSTN2010363, BRSTN2010416, BRSTN2010500, BRSTN2010569, BRSTN2010923, BRSTN2011211, BRSTN2011688, BRSTN2011799, BRSTN2012284, BRSTN2012320, BRSTN2012380, BRSTN2013171, BRSTN2013354, BRSTN2014490, BRSTN2014633, BRSTN2014751, BRSTN2014770, BRSTN2016066, BRSTN2016335, BRSTN2016678, BRSTN2016892, BRSTN2016918, BRSTN2017104, BRSTN2017151, BRSTN2017237, BRSTN2017379, BRSTN2017761, BRSTN2017771, BRSTN2017995, BRSTN2018077, BRSTN2018083, BRSTN2018596, BRSTN2018692, BRSTN2018712, BRSTN2019079, BRSTN2019129, BRTHA1000063, BRTHA2000057, BRTHA2000474, BRTHA2000514, BRTHA2000574, BRTHA2000855, BRTHA2000969, BRTHA2000972, BRTHA2001304, BRTHA2001370, BRTHA2001462, BRTHA2001717, BRTHA2002091, BRTHA2002115, BRTHA2002133, BRTHA2002281, BRTHA2002376, BRTHA2002442, BRTHA2002493, BRTHA2002565, BRTHA2002608, BRTHA2002702, BRTHA2002721, BRTHA2002726, BRTHA2002741, BRTHA2002808, BRTHA2002896, BRTHA2002903, BRTHA2003030, BRTHA2003110, BRTHA2003116, BRTHA2003436, BRTHA2003759, BRTHA2003794, BRTHA2004361, BRTHA2004371, BRTHA2004582, BRTHA2004629, BRTHA2004639, BRTHA2004642, BRTHA2004812, BRTHA2004821, BRTHA2004978, BRTHA2004992, BRTHA2005005, BRTHA2005448, BRTHA2005579, BRTHA2005831, BRTHA2005942, BRTHA2005956, BRTHA2006075, BRTHA2006146, BRTHA2006194, BRTHA2006232, BRTHA2006720, BRTHA2006735, BRTHA2006974, BRTHA2006975, BRTHA2007060, BRTHA2007122, BRTHA2007422, BRTHA2007603, BRTHA2007665, BRTHA2008316, BRTHA2008335, BRTHA2008502, BRTHA2008513, BRTHA2008527, BRTHA2008535, BRTHA2008598, BRTHA2008669, BRTHA2009311, BRTHA2009349, BRTHA2009803, BRTHA2009846, BRTHA2009886, BRTHA2009972, BRTHA2010008, BRTHA2010033, BRTHA2010073, BRTHA2010097, BRTHA2010191, BRTHA2010397, BRTHA2010608, BRTHA2010672, BRTHA2010884, BRTHA2010907, BRTHA2011062, BRTHA2011321, BRTHA2011351, BRTHA2011500, BRTHA2011691, BRTHA2012129, BRTHA2012183, BRTHA2012189, BRTHA2012351, BRTHA2012392, BRTHA2012466, BRTHA2012555, BRTHA2012562, BRTHA2012714, BRTHA2012980, BRTHA2013262, BRTHA2013275, BRTHA2013426, BRTHA2013460, BRTHA2013515, BRTHA2013595, BRTHA2013610, BRTHA2013707, BRTHA2013942, BRTHA2014287, BRTHA2014334, BRTHA2014381, BRTHA2014578, BRTHA2014647, BRTHA2014663, BRTHA2014792, BRTHA2014828, BRTHA2014909, BRTHA2014975, BRTHA2014997, BRTHA2015406, BRTHA2015478, BRTHA2015696, BRTHA2015700, BRTHA2015853, BRTHA2015878, BRTHA2016179, BRTHA2016215, BRTHA2016267, BRTHA2016318, BRTHA2016496, BRTHA2016543, BRTHA2016552, BRTHA2016765, BRTHA2016918, BRTHA2017178, BRTHA2017353, BRTHA2017364, BRTHA2017972, BRTHA2017985, BRTHA2018011, BRTHA2018129, BRTHA2018165, BRTHA2018304, BRTHA2018344, BRTHA2018420, BRTHA2018443, BRTHA2018504, BRTHA2018558, BRTHA2018591, BRTHA2018624, BRTHA2018706, BRTHA2018707, BRTHA2019014, BRTHA2019022, BRTHA2019048, BRTHA2019073, BRTHA2019726, BRTHA2019743, BRTHA2020400, BRTHA2020566, BRTHA2020642, BRTHA2020695, BRTHA2020721, BRTHA2020781, BRTHA2020811, BRTHA2020910, BRTHA2021212, BRTHA2021440, BRTHA2021450, BRTHA2022074, BRTHA2022914, BRTHA2022968, BRTHA2023402, BRTHA2023437, BRTHA2024177, BRTHA2024354, BRTHA2024712, BRTHA2025869, BRTHA2026290, BRTHA2026311, BRTHA2027227, BRTHA2027229, BRTHA2027250, BRTHA2027546, BRTHA2028297, BRTHA2029969, BRTHA2030036, BRTHA2030213, BRTHA2031517, BRTHA2031800, BRTHA2031917, BRTHA2032763, BRTHA2032845, BRTHA2033122, BRTHA2033264, BRTHA2033320, BRTHA2033469, BRTHA2033683, BRTHA2034281, BRTHA2034576, BRTHA2034874, BRTHA2035448, BRTHA2036055, BRTHA2036295, BRTHA2036660, BRTHA2037247, BRTHA2038279, BRTHA2038345, BRTHA2038353, BRTHA2038396, BRTHA3000252, BRTHA3000273, BRTHA3000296, BRTHA3000297, BRTHA3000325, BRTHA3000456, BRTHA3000633, BRTHA3001221, BRTHA3001623, BRTHA3002265, BRTHA3002401, BRTHA3002411, BRTHA3002864, BRTHA3002933, BRTHA3002955, BRTHA3003000, BRTHA3003074, BRTHA3003225, BRTHA3003339, BRTHA3003343, BRTHA3003417, BRTHA3003449, BRTHA3003474, BRTHA3004502, BRTHA3004610, BRTHA3005046, BRTHA3005735, BRTHA3005988, BRTHA3006318, BRTHA3006593, BRTHA3006856, BRTHA3007113, BRTHA3007130, BRTHA3007148, BRTHA3007319, BRTHA3007469, BRTHA3007472, BRTHA3007532, BRTHA3007662, BRTHA3007769, BRTHA3007922, BRTHA3008143, BRTHA3008293, BRTHA3008310, BRTHA3008386, BRTHA3008520, BRTHA3008608, BRTHA3008694, BRTHA3008778, BRTHA3008826, BRTHA3009037, BRTHA3009291, BRTHA3010135, BRTHA3010366, BRTHA3010469, BRTHA3010540, BRTHA3010717, BRTHA3011149, BRTHA3011187, BRTHA3011194, BRTHA3011229, BRTHA3011265, BRTHA3011361, BRTHA3011510, BRTHA3011892, BRTHA3012265, BRTHA3013860, BRTHA3013882, BRTHA3013884, BRTHA3013981, BRTHA3014000, BRTHA3014105, BRTHA3014507, BRTHA3014547, BRTHA3014691, BRTHA3014835, BRTHA3014854, BRTHA3014908, BRTHA3014920, BRTHA3015815, BRTHA3016616, BRTHA3016835, BRTHA3016845, BRTHA3016917, BRTHA3017047, BRTHA3017589, BRTHA3017848, BRTHA3018409, BRTHA3018514, BRTHA3018617, BRTHA3018623, BRTHA3018656, BRTHA3019048, BRTHA3019105, BRTHA3019183, BRTHA3020000, BRTHA3020314, BRTHA3020369, BRTHA3021569, BRTHA3021786, BRTHA3022641, BRTHA3023523, BRTHA3023590, BRTHA3023929, BRTHA3024233, BRTHA3024600, BRTHA3025073, BRTHA3025789, BRTHA3025826, BRTHA3026161, BRTHA3026180, BRTHA3026556, BRTHA3027171, BRTHA3027318, BRTHA3027638, BRTHA3027820, BRTHA3027879, BRTHA3027957, BRTHA3028339, BRTHA3028505, BRTHA3028782, CD34C2000051, CD34C2000152, CD34C2000175, CD34C2000443, CD34C3000125, CD34C3000314, CD34C3000424, CD34C3000494, CERVX1000042, CERVX2000812, CERVX2000968, CERVX2002006, CERVX2002013, CERVX2002430, CERVX2002770, CHONS1000058, CHONS2000797, CHONS2001287, CHONS2001382, CHONS2001797, CHONS2001834, CHONS2002419, COLON1000030, COLON1000084, COLON1000135, COLON2000557, COLON2000568, COLON2001829, COLON2001866, COLON2002443, COLON2002520, COLON2003043, COLON2003529, COLON2004318, COLON2004351, COLON2004478, COLON2004911, COLON2005126, COLON2005623, COLON2005735, COLON2005772, COLON2006263, COLON2006282, COLON2006417, COLON2007274, COLON20.07733, COLON2008105, COLON2009337, COLON2009499, CORDB1000140, CORDB2000061, CORDB2000127, CORDB2000541, CTONG1000009, CTONG1000020, CTONG1000022, CTONG1000040, CTONG1000056, CTONG1000062, CTONG1000086, CTONG1000093, CTONG1000097, CTONG1000113, CTONG1000137, CTONG1000165, CTONG1000180, CTONG1000181, CTONG1000220, CTONG1000277, CTONG1000283, CTONG1000288, CTONG1000302, CTONG1000341, CTONG1000467, CTONG1000476, CTONG1000488, CTONG1000508, CTONG1000540, CTONG2000031, CTONG2000034, CTONG2000042, CTONG2000218, CTONG2000279, CTONG2000303, CTONG2000330, CTONG2000395, CTONG2000411, CTONG2000452, CTONG2000465, CTONG2000469, CTONG2000480, CTONG2000561, CTONG2000589, CTONG2000766, CTONG2000771, CTONG2000819, CTONG2000827, CTONG2000846, CTONG2000855, CTONG2000977, CTONG2001139, CTONG2001226, CTONG2001320, CTONG2001366, CTONG2001413, CTONG2001428, CTONG2001513, CTONG2001524, CTONG2001533, CTONG2001681, CTONG2001724, CTONG2001749, CTONG2001800, CTONG2001820, CTONG2001858, CTONG2001877, CTONG2001911, CTONG2001932, CTONG2001955, CTONG2002066, CTONG2002073, CTONG2002095, CTONG2002143, CTONG2002395, CTONG2002417, CTONG2002418, CTONG2002453, CTONG2002558, CTONG2002590, CTONG2002721, CTONG2002816, CTONG2002820, CTONG2002832, CTONG2002903, CTONG2002965, CTONG2002999, CTONG2003028, CTONG2003100, CTONG2003115, CTONG2003189, CTONG2003245, CTONG2003293, CTONG2003348, CTONG2003350, CTONG2003361, CTONG2003372, CTONG2003375, CTONG2003427, CTONG2003517, CTONG2003599, CTONG2003680, CTONG2003764, CTONG2003782, CTONG2003889, CTONG2003937, CTONG2003945, CTONG2004000, CTONG2004062, CTONG2004126, CTONG2004264, CTONG2004305, CTONG2004397, CTONG2004454, CTONG2004550, CTONG2004669, CTONG2004716, CTONG2004912, CTONG2004941, CTONG2004948, CTONG2005049, CTONG2005110, CTONG2005145, CTONG2005265, CTONG2005278, CTONG2005290, CTONG2005374, CTONG2005399, CTONG2005468, CTONG2005567, CTONG2005585, CTONG2005635, CTONG2005775, CTONG2005795, CTONG2005890, CTONG2005904, CTONG2005913, CTONG2006129, CTONG2006223, CTONG2006273, CTONG2006310, CTONG2006377, CTONG2006393, CTONG2006412, CTONG2006449, CTONG2006515, CTONG2006524, CTONG2006568, CTONG2006620, CTONG2006666, CTONG2006691, CTONG2006798, CTONG2006836, CTONG2006942, CTONG2006964, CTONG2007009, CTONG2007091, CTONG2007104, CTONG2007175, CTONG2007259, CTONG2007272, CTONG2007293, CTONG2007297, CTONG2007399, CTONG2007417, CTONG2007441, CTONG2007586, CTONG2007613, CTONG2007623, CTONG2007779, CTONG2007898, CTONG2007959, CTONG2007970, CTONG2008014, CTONG2008184, CTONG2008262, CTONG2008269, CTONG2008321, CTONG2008343, CTONG2008402, CTONG2008466, CTONG2008518, CTONG2008521, CTONG2008562, CTONG2008577, CTONG2008595, CTONG2008621, CTONG2008721, CTONG2008773, CTONG2008792, CTONG2008989, CTONG2009033, CTONG2009108, CTONG2009132, CTONG2009156, CTONG2009181, CTONG2009257, CTONG2009258, CTONG2009268, CTONG2009270, CTONG2009395, CTONG2009423, CTONG2009440, CTONG2009527, CTONG2009529, CTONG2009531, CTONG2009570, CTONG2009572, CTONG2009604, CTONG2009643, CTONG2009675, CTONG2009689, CTONG2009725, CTONG2009766, CTONG2009768, CTONG2009844, CTONG2009871, CTONG2009887, CTONG2009891, CTONG2009923, CTONG2009938, CTONG2009955, CTONG2009958, CTONG2009963, CTONG2010018, CTONG2010024, CTONG2010116, CTONG2010133, CTONG2010148, CTONG2010276, CTONG2010330, CTONG2010508, CTONG2010566, CTONG2010623, CTONG2010649, CTONG2010652, CTONG2011188, CTONG2011429, CTONG2011474, CTONG2011676, CTONG2011716, CTONG2011765, CTONG2011779, CTONG2011801, CTONG2011815, CTONG2011822, CTONG2011920, CTONG2011985, CTONG2012029, CTONG2012050, CTONG2012077, CTONG2012123, CTONG2012158, CTONG2012230, CTONG2012422, CTONG2012425, CTONG2012447, CTONG2012473, CTONG2012476, CTONG2012533, CTONG2012554, CTONG2012564, CTONG2012607, CTONG2012661, CTONG2012724, CTONG2012738, CTONG2012758, CTONG2012843, CTONG2012901, CTONG2012996, CTONG2013128, CTONG2013149, CTONG2013156, CTONG2013178, CTONG2013222, CTONG2013284, CTONG2013339, CTONG2013352, CTONG2013381, CTONG2013393, CTONG2013511, CTONG2013630, CTONG2013803, CTONG2013985, CTONG2013986, CTONG2014032, CTONG2014058, CTONG2014119, CTONG2014165, CTONG2014191, CTONG2014206, CTONG2014234, CTONG2014264, CTONG2014389, CTONG2014491, CTONG2014630, CTONG2014635, CTONG2014646, CTONG2014705, CTONG2014946, CTONG2014954, CTONG2014959, CTONG2014966, CTONG2014995, CTONG2015204, CTONG2015316, CTONG2015330, CTONG2015345, CTONG2015358, CTONG2015434, CTONG2015518, CTONG2015540, CTONG2015596, CTONG2015633, CTONG2015678, CTONG2015717, CTONG2015804, CTONG2015866, CTONG2015914, CTONG2015953, CTONG2016056, CTONG2016217, CTONG2016355, CTONG2016408, CTONG2016499, CTONG2016505, CTONG2016559, CTONG2016658, CTONG2016775, CTONG2016797, CTONG2016846, CTONG2016904, CTONG2016942, CTONG2016953, CTONG2017021, CTONG2017292, CTONG2017409, CTONG2017429, CTONG2017444, CTONG2017458, CTONG2017604, CTONG2017650, CTONG2017798, CTONG2017804, CTONG2017814, CTONG2017910, CTONG2017939, CTONG2017989, CTONG2018062, CTONG2018069, CTONG2018147, CTONG2018217, CTONG2018279, CTONG2018334, CTONG2018379, CTONG2018383, CTONG2018413, CTONG2018483, CTONG2018629, CTONG2018652, CTONG2018653, CTONG2018655, CTONG2018735, CTONG2018808, CTONG2018900, CTONG2018976, CTONG2019063, CTONG2019144, CTONG2019232, CTONG2019248, CTONG2019400, CTONG2019590, CTONG2019652, CTONG2019704, CTONG2019788, CTONG2019822, CTONG2019833, CTONG2020031, CTONG2020108, CTONG2020127, CTONG2020171, CTONG2020378, CTONG2020411, CTONG2020445, CTONG2020522, CTONG2020560, CTONG2020638, CTONG2020806, CTONG2020831, CTONG2020974, CTONG2021024, CTONG2021132, CTONG2021168, CTONG2022153, CTONG2022601, CTONG2023021, CTONG2023449, CTONG2023512, CTONG2024206, CTONG2024614, CTONG2024749, CTONG2025496, CTONG2025513, CTONG2025516, CTONG2025610, CTONG2025900, CTONG2026513, CTONG2026770, CTONG2026920, CTONG2026987, CTONG2027150, CTONG2027327, CTONG2027361, CTONG2027591, CTONG2027736, CTONG2027783, CTONG2027828, CTONG2028097, CTONG2028486, CTONG2028518, CTONG2028687, CTONG2028758, CTONG3000686, CTONG3000707, CTONG3000896, CTONG3001123, CTONG3001420, CTONG3001501, CTONG3001560, CTONG3001605, CTONG3002020, CTONG3002127, CTONG3002370, CTONG3002412, CTONG3002433, CTONG3002518, CTONG3002552, CTONG3002588, CTONG3002674, CTONG3002728, CTONG3002909, CTONG3002947, CTONG3002983, CTONG3003165, CTONG3003179, CTONG3003483, CTONG3003553, CTONG3003598, CTONG3003652, CTONG3003654, CTONG3003669, CTONG3003737, CTONG3003905, CTONG3003972, CTONG3004072, CTONG3004317, CTONG3004397, CTONG3004550, CTONG3004576, CTONG3004607, CTONG3004712, CTONG3004726, CTONG3005325, CTONG3005648, CTONG3005713, CTONG3005803, CTONG3006067, CTONG3006073, CTONG3006186, CTONG3006629, CTONG3006650, CTONG3006659, CTONG3007244, CTONG3007444, CTONG3007528, CTONG3007586, CTONG3007870, CTONG3008223, CTONG3008252, CTONG3008258, CTONG3008457, CTONG3008496, CTONG3008566, CTONG3008639, CTONG3008831, CTONG3008951, CTONG3008959, CTONG3009028, CTONG3009227, CTONG3009287, CTONG3009385, D3OST1000066, D3OST1000109, D3OST1000238, D3OST1000267, D3OST2000184, D3OST2000618, D3OST2000654, D3OST2000734, D3OST2001328, D3OST2001669, D3OST2001670, D3OST2001788, D3OST2002068, D3OST2002182, D3OST2002223, D3OST2002262, D3OST2002272, D3OST2002417, D3OST2002436, D3OST2002648, D3OST2003024, D3OST2003331, D3OST2003607, D3OST2003797, D3OST2004637, D3OST3000169, D3OST3000195, D3OST3000258, D3OST3000291, D3OST3000388, D3OST3000493, D6OST2000127, D6OST2000169, D6OST2000245, D6OST2000507, D9OST2000031, D9OST2000278, D9OST2000440, D9OST2000869, D9OST2001319, D9OST2001433, D9OST2002397, D9OST2002673, D9OST2003106, D9OST2003137, D9OST2003397, D9OST2003594, D9OST2003762, D9OST2003791, D9OST2003989, D9OST2004018, D9OST2004073, D9OST2004417, DFNES1000003, DFNES1000107, DFNES1000150, DFNES1000185, DFNES2000011, DFNES2000143, DFNES2000146, DFNES2000153, DFNES2000292, DFNES2000426, DFNES2000432, DFNES2000443, DFNES2000471, DFNES2000913, DFNES2001091, DFNES2001108, DFNES2001177, DFNES2001404, DFNES2001564, DFNES2001565, DFNES2001647, DFNES2001800, DFNES2002220, DFNES2002509, DFNES2002550, DFNES2002588, DFNES2002817, DFNES2002966, DFNES2003081, DFNES2003255, DFNES2003742, DFNES2004346, DFNES2004354, DFNES2004383, DFNES2004608, DFNES2004684, DFNES2005266, DFNES2005527, DFNES2005766, DFNES2005779, DFNES2005875, DFNES2006346, DFNES2006944, DFNES2007113, DFNES2007299, DFNES2007332, DFNES2007641, DFNES2007757, DFNES2008280, DFNES2008881, DFNES2010502, DFNES2011192, DFNES2011221, DFNES2011239, DFNES2011245, ERLTF1000021, ERLTF2000324, ERLTF2000465, FCBBF1000023, FCBBF1000025, FCBBF1000038, FCBBF1000061, FCBBF1000069, FCBBF1000117, FCBBF1000118, FCBBF1000131, FCBBF1000155, FCBBF1000157, FCBBF1000171, FCBBF1000174, FCBBF1000182, FCBBF1000198, FCBBF1000206, FCBBF1000220, FCBBF1000232, FCBBF1000233, FCBBF1000243, FCBBF1000270, FCBBF1000272, FCBBF1000297, FCBBF1000305, FCBBF1000314, FCBBF1000322, FCBBF1000349, FCBBF1000374, FCBBF1000376, FCBBF1000377, FCBBF1000395, FCBBF1000397, FCBBF1000412, FCBBF1000425, FCBBF1000437, FCBBF1000449, FCBBF1000506, FCBBF1000546, FCBBF1000550, FCBBF1000581, FCBBF1000582, FCBBF1000598, FCBBF1000604, FCBBF1000618, FCBBF1000627, FCBBF1000684, FCBBF1000686, FCBBF1000691, FCBBF1000748, FCBBF2000087, FCBBF2000094, FCBBF2000105, FCBBF2000123, FCBBF2000195, FCBBF2000214, FCBBF2000232, FCBBF2000259, FCBBF2000276, FCBBF2000291, FCBBF2000379, FCBBF2000473, FCBBF2000502, FCBBF2000576, FCBBF2000591, FCBBF2000677, FCBBF2000678, FCBBF2000685, FCBBF2000782, FCBBF2000808, FCBBF2000815, FCBBF2000825, FCBBF2000940, FCBBF2000951, FCBBF2001001, FCBBF2001088, FCBBF2001105, FCBBF2001116, FCBBF2001188, FCBBF2001238, FCBBF2001243, FCBBF2001309, FCBBF2001400, FCBBF2001427, FCBBF2001480, FCBBF2001529, FCBBF2001672, FCBBF2001675, FCBBF2001718, FCBBF2001720, FCBBF2001817, FCBBF2001868, FCBBF2002044, FCBBF2002111, FCBBF2002281, FCBBF2002370, FCBBF2002541, FCBBF2002897, FCBBF2002898, FCBBF2002904, FCBBF2002928, FCBBF2002953, FCBBF2003083, FCBBF2003102, FCBBF2003269, FCBBF2003293, FCBBF2003297, FCBBF2003395, FCBBF2003528, FCBBF2003543, FCBBF2003549, FCBBF2003636, FCBBF2003823, FCBBF2003895, FCBBF2004090, FCBBF2004138, FCBBF2004217, FCBBF2004256, FCBBF2004373, FCBBF2004448, FCBBF2004671, FCBBF2004707, FCBBF2004788, FCBBF2005069, FCBBF2005122, FCBBF2005439, FCBBF2005538, FCBBF2005637, FCBBF2005645, FCBBF2005658, FCBBF2005733, FCBBF2006131, FCBBF2006380, FCBBF2006418, FCBBF2006452, FCBBF2006634, FCBBF2007012, FCBBF2007186, FCBBF2007265, FCBBF2007302, FCBBF2007610, FCBBF2007633, FCBBF3000102, FCBBF3000110, FCBBF3000120, FCBBF3000227, FCBBF3000229, FCBBF3000233, FCBBF3000361, FCBBF3000367, FCBBF3000462, FCBBF3000473, FCBBF3000501, FCBBF3000518, FCBBF3000536, FCBBF3000550, FCBBF3000847, FCBBF3001018, FCBBF3001020, FCBBF3001235, FCBBF3001281, FCBBF3001302, FCBBF3001377, FCBBF3001594, FCBBF3001890, FCBBF3001912, FCBBF3001914, FCBBF3001918, FCBBF3001924, FCBBF3002163, FCBBF3002188, FCBBF3002190, FCBBF3002268, FCBBF3002475, FCBBF3002556, FCBBF3002592, FCBBF3002658, FCBBF3002782, FCBBF3002818, FCBBF3002925, FCBBF3003216, FCBBF3003305, FCBBF3003373, FCBBF3003435, FCBBF3003475, FCBBF3003481, FCBBF3003557, FCBBF3003787, FCBBF3003902, FCBBF3004021, FCBBF3004041, FCBBF3004261, FCBBF3004390, FCBBF3004409, FCBBF3004502, FCBBF3004715, FCBBF3004842, FCBBF3004847, FCBBF3004955, FCBBF3005160, FCBBF3005218, FCBBF3005320, FCBBF3005444, FCBBF3005497, FCBBF3005698, FCBBF3005729, FCBBF3006171, FCBBF3006249, FCBBF3006288, FCBBF3006399, FCBBF3006628, FCBBF3007077, FCBBF3007150, FCBBF3007152, FCBBF3007242, FCBBF3007244, FCBBF3007248, FCBBF3007453, FCBBF3007462, FCBBF3007540, FCBBF3007597, FCBBF3007604, FCBBF3007829, FCBBF3007855, FCBBF3008073, FCBBF3008159, FCBBF3008251, FCBBF3008311, FCBBF3008362, FCBBF3008382, FCBBF3008475, FCBBF3008556, FCBBF3008644, FCBBF3008748, FCBBF3008870, FCBBF3008938, FCBBF3008944, FCBBF3009101, FCBBF3009152, FCBBF3009256, FCBBF3009317, FCBBF3009428, FCBBF3009464, FCBBF3009479, FCBBF3009703, FCBBF3009717, FCBBF3009888, FCBBF3009949, FCBBF3009978, FCBBF3010008, FCBBF3010124, FCBBF3010130, FCBBF3010149, FCBBF3010211, FCBBF3010361, FCBBF3010544, FCBBF3010586, FCBBF3010601, FCBBF3010665, FCBBF3010729, FCBBF3010733, FCBBF3011003, FCBBF3011418, FCBBF3011485, FCBBF3011523, FCBBF3011570, FCBBF3011592, FCBBF3011867, FCBBF3011889, FCBBF3012170, FCBBF3012288, FCBBF3012332, FCBBF3012347, FCBBF3012443, FCBBF3012588, FCBBF3012842, FCBBF3012901, FCBBF3013041, FCBBF3013058, FCBBF3013205, FCBBF3013266, FCBBF3013307, FCBBF3013341, FCBBF3013589, FCBBF3013623, FCBBF3013800, FCBBF3013846, FCBBF3014229, FCBBF3014355, FCBBF3014567, FCBBF3014770, FCBBF3015119, FCBBF3015131, FCBBF3015317, FCBBF3015727, FCBBF3015758, FCBBF3015809, FCBBF3015870, FCBBF3016018, FCBBF3016134, FCBBF3016178, FCBBF3016451, FCBBF3016618, FCBBF3016622, FCBBF3016644, FCBBF3016667, FCBBF3016987, FCBBF3017024, FCBBF3017059, FCBBF3017071, FCBBF3017123, FCBBF3017233, FCBBF3017255, FCBBF3017288, FCBBF3017535, FCBBF3017681, FCBBF3017729, FCBBF3017873, FCBBF3017974, FCBBF3018067, FCBBF3018173, FCBBF3018591, FCBBF3018753, FCBBF3018949, FCBBF3019085, FCBBF3019437, FCBBF3019455, FCBBF3019564, FCBBF3019570, FCBBF3019663, FCBBF3019716, FCBBF3019784, FCBBF3019867, FCBBF3019961, FCBBF3020030, FCBBF3020138, FCBBF3020140, FCBBF3020163, FCBBF3020232, FCBBF3020599, FCBBF3021026, FCBBF3021191, FCBBF3021221, FCBBF3021501, FCBBF3021506, FCBBF3021524, FCBBF3021940, FCBBF3021985, FCBBF3022005, FCBBF3022504, FCBBF3022566, FCBBF3022767, FCBBF3022894, FCBBF3023061, FCBBF3023078, FCBBF3023368, FCBBF3023372, FCBBF3023443, FCBBF3023599, FCBBF3023704, FCBBF3023887, FCBBF3023895, FCBBF3024096, FCBBF3024225, FCBBF3024364, FCBBF3024623, FCBBF3024911, FCBBF3025098, FCBBF3025252, FCBBF3025280, FCBBF3025285, FCBBF3025528, FCBBF3025568, FCBBF3025650, FCBBF3025674, FCBBF3025730, FCBBF3025737, FCBBF3026021, FCBBF3026048, FCBBF3026251, FCBBF3026308, FCBBF3026678, FCBBF3027104, FCBBF3027199, FCBBF3027328, FCBBF3027559, FCBBF3027717, FCBBF3027755, FCBBF3027768, FCBBF3027854, FCBBF3027863, FCBBF3027903, FCBBF3028102, FCBBF3028143, FCBBF3028188, FCBBF3028202, FCBBF3028472, FCBBF3028528, FCBBF3028582, FCBBF3028593, FCBBF3028671, FCBBF3028794, FCBBF4000061, FCBBF4000076, FCBBF4000173, FCBBF4000192, FCBBF4000193, FCBBF4000268, FCBBF4000282, FCBBF4000399, FCBBF4000415, FCBBF4000500, FCBBF4000529, FCBBF5000041, FCBBF5000061, FCBBF5000261, FCBBF5000384, FCBBF5000483, FCBBF5000495, FEBRA1000005, FEBRA1000008, FEBRA1000030, FEBRA1000138, FEBRA1000148, FEBRA1000149, FEBRA1000183, FEBRA1000190, FEBRA2000021, FEBRA2000035, FEBRA2000053, FEBRA2000126, FEBRA2000220, FEBRA2000228, FEBRA2000253, FEBRA2000282, FEBRA2000286, FEBRA2000297, FEBRA2000311, FEBRA2000321, FEBRA2000333, FEBRA2000378, FEBRA2000391, FEBRA2000394, FEBRA2000397, FEBRA2000399, FEBRA2000409, FEBRA2000415, FEBRA2000436, FEBRA2000454, FEBRA2000468, FEBRA2000491, FEBRA2000504, FEBRA2000510, FEBRA2000532, FEBRA2000538, FEBRA2000575, FEBRA2000656, FEBRA2000659, FEBRA2000690, FEBRA2000727, FEBRA2000734, FEBRA2000762, FEBRA2000772, FEBRA2000790, FEBRA2000803, FEBRA2000805, FEBRA2000809, FEBRA2000856, FEBRA2000862, FEBRA2000901, FEBRA2000909, FEBRA2000917, FEBRA2000928, FEBRA2000936, FEBRA2000937, FEBRA2000959, FEBRA2001012, FEBRA2001020, FEBRA2001093, FEBRA2001124, FEBRA2001133, FEBRA2001161, FEBRA2001175, FEBRA2001217, FEBRA2001227, FEBRA2001267, FEBRA2001351, FEBRA2001438, FEBRA2001440, FEBRA2001487, FEBRA2001523, FEBRA2001561, FEBRA2001581, FEBRA2001584, FEBRA2001590, FEBRA2001591, FEBRA2001610, FEBRA2001620, FEBRA2001659, FEBRA2001698, FEBRA2001705, FEBRA2001706, FEBRA2001772, FEBRA2001790, FEBRA2001867, FEBRA2001914, FEBRA2001989, FEBRA2002009, FEBRA2002086, FEBRA2002109, FEBRA2002260, FEBRA2002399, FEBRA2002410, FEBRA2002429, FEBRA2002442, FEBRA2002508, FEBRA2002525, FEBRA2002552, FEBRA2002574, FEBRA2002601, FEBRA2002611, FEBRA2002628, FEBRA2002662, FEBRA2002682, FEBRA2002707, FEBRA2002727, FEBRA2002783, FEBRA2002818, FEBRA2002858, FEBRA2002882, FEBRA2002897, FEBRA2002908, FEBRA2002962, FEBRA2002986, FEBRA2003054, FEBRA2003115, FEBRA2003155, FEBRA2003163, FEBRA2003181, FEBRA2003198, FEBRA2003253, FEBRA2003275, FEBRA2003308, FEBRA2003327, FEBRA2003429, FEBRA2003454, FEBRA2003468, FEBRA2003520, FEBRA2003524, FEBRA2003675, FEBRA2003707, FEBRA2003711, FEBRA2003822, FEBRA2003897, FEBRA2003930, FEBRA2004023, FEBRA2004026, FEBRA2004029, FEBRA2004053, FEBRA2004056, FEBRA2004110, FEBRA2004191, FEBRA2004202, FEBRA2004219, FEBRA2004325, FEBRA2004329, FEBRA2004331, FEBRA2004443, FEBRA2004490, FEBRA2004538, FEBRA2004592, FEBRA2004651, FEBRA2004813, FEBRA2004840, FEBRA2004852, FEBRA2004867, FEBRA2004914, FEBRA2004933, FEBRA2004987, FEBRA2005014, FEBRA2005036, FEBRA2005216, FEBRA2005291, FEBRA2005377, FEBRA2005380, FEBRA2005427, FEBRA2005458, FEBRA2005701, FEBRA2005726, FEBRA2005778, FEBRA2005787, FEBRA2005995, FEBRA2005998, FEBRA2006055, FEBRA2006061, FEBRA2006150, FEBRA2006165, FEBRA2006315, FEBRA2006354, FEBRA2006370, FEBRA2006379, FEBRA2006409, FEBRA2006418, FEBRA2006427, FEBRA2006476, FEBRA2006491, FEBRA2006627, FEBRA2006664, FEBRA2006667, FEBRA2006726, FEBRA2006793, FEBRA2006817, FEBRA2006890, FEBRA2006942, FEBRA2006977, FEBRA2007176, FEBRA2007200, FEBRA2007247, FEBRA2007280, FEBRA2007414, FEBRA2007436, FEBRA2007449, FEBRA2007458, FEBRA2007551, FEBRA2007566, FEBRA2007620, FEBRA2007793, FEBRA2007818, FEBRA2007823, FEBRA2007931, FEBRA2007957, FEBRA2008009, FEBRA2008086, FEBRA2008135, FEBRA2008165, FEBRA2008172, FEBRA2008266, FEBRA2008282, FEBRA2008311, FEBRA2008341, FEBRA2008360, FEBRA2008468, FEBRA2008475, FEBRA2008481, FEBRA2008542, FEBRA2008660, FEBRA2008681, FEBRA2008692, FEBRA2008741, FEBRA2008755, FEBRA2008836, FEBRA2008866, FEBRA2008881, FEBRA2008983, FEBRA2009016, FEBRA2009029, FEBRA2009074, FEBRA2009117, FEBRA2009120, FEBRA2009162, FEBRA2009240, FEBRA2009265, FEBRA2009276, FEBRA2009327, FEBRA2009352, FEBRA2009362, FEBRA2009385, FEBRA2009416, FEBRA2009437, FEBRA2009478, FEBRA2009507, FEBRA2009541, FEBRA2009567, FEBRA2009588, FEBRA2009731, FEBRA2009754, FEBRA2009780, FEBRA2009846, FEBRA2009986, FEBRA2010141, FEBRA2010299, FEBRA2010484, FEBRA2010768, FEBRA2010802, FEBRA2011063, FEBRA2011090, FEBRA2011356, FEBRA2011392, FEBRA2011414, FEBRA2011593, FEBRA2011665, FEBRA2012090, FEBRA2012120, FEBRA2012195, FEBRA2012397, FEBRA2012418, FEBRA2012625, FEBRA2013019, FEBRA2013069, FEBRA2013274, FEBRA2013465, FEBRA2013570, FEBRA2013905, FEBRA2013951, FEBRA2014010, FEBRA2014122, FEBRA2014198, FEBRA2014213, FEBRA2014443, FEBRA2014578, FEBRA2015076, FEBRA2015175, FEBRA2015292, FEBRA2015588, FEBRA2016112, FEBRA2016398, FEBRA2016572, FEBRA2016583, FEBRA2016621, FEBRA2016654, FEBRA2016739, FEBRA2017098, FEBRA2017138, FEBRA2017154, FEBRA2017200, FEBRA2017223, FEBRA2017333, FEBRA2017502, FEBRA2017736, FEBRA2017780, FEBRA2017811, FEBRA2017850, FEBRA2018051, FEBRA2018407, FEBRA2019172, FEBRA2019298, FEBRA2019457, FEBRA2019519, FEBRA2019582, FEBRA2019637, FEBRA2019663, FEBRA2019690, FEBRA2019711, FEBRA2019867, FEBRA2020406, FEBRA2020566, FEBRA2020582, FEBRA2020668, FEBRA2020801, FEBRA2020845, FEBRA2020886, FEBRA2020977, FEBRA2021134, FEBRA2021339, FEBRA2021431, FEBRA2021497, FEBRA2021571, FEBRA2021892, FEBRA2021908, FEBRA2022013, FEBRA2022148, FEBRA2022204, FEBRA2022255, FEBRA2022322, FEBRA2022504, FEBRA2022696, FEBRA2022729, FEBRA2022787, FEBRA2022911, FEBRA2022956, FEBRA2022963, FEBRA2022972, FEBRA2023227, FEBRA2023285, FEBRA2023351, FEBRA2023498, FEBRA2023721, FEBRA2023989, FEBRA2023990, FEBRA2024136, FEBRA2024150, FEBRA2024343, FEBRA2024570, FEBRA2024693, FEBRA2024727, FEBRA2024744, FEBRA2024797, FEBRA2025249, FEBRA2025463, FEBRA2025477, FEBRA2026474, FEBRA2026582, FEBRA2026629, FEBRA2026769, FEBRA2026879, FEBRA2026890, FEBRA2026977, FEBRA2027082, FEBRA2027297, FEBRA2027352, FEBRA2027364, FEBRA2027609, FEBRA2028158, FEBRA2028222, FEBRA2028366, FEBRA2028457, FEBRA2028477, FEHRT2000325, FEHRT2000364, FEKID1000018, FELIV1000101, FELIV1000164, FELNG2000241, HCASM1000021, HCASM1000050, HCASM1000061, HCASM1000130, HCASM2000202, HCASM2000266, HCASM2000307, HCASM2000363, HCASM2000534, HCASM2000536, HCASM2000560, HCASM2000871, HCASM2001285, HCASM2001810, HCASM2001866, HCASM2001890, HCASM2002148, HCASM2002502, HCASM2002754, HCASM2002918, HCASM2003018, HCASM2003076, HCASM2003099, HCASM2003212, HCASM2003237, HCASM2003357, HCASM2005484, HCASM2006131, HCASM2006338, HCASM2006359, HCASM2006632, HCASM2007047, HCASM2007317, HCASM2007737, HCASM2007773, HCASM2008154, HCASM2008536, HCASM2009405, HCASM2009424, HCASM2009463, HCASM2009588, HCHON1000131, HCHON1000142, HCHON1000176, HCHON2000028, HCHON2000038, HCHON2000087, HCHON2000100, HCHON2000156, HCHON2000199, HCHON2000212, HCHON2000271, HCHON2000315, HCHON2000322, HCHON2000344, HCHON2000364, HCHON2000373, HCHON2000395, HCHON2000417, HCHON2000418, HCHON2000503, HCHON2000660, HCHON2000663, HCHON2000673, HCHON2000699, HCHON2000705, HCHON2000738, HCHON2000751, HCHON2000817, HCHON2000818, HCHON2000832, HCHON2000851, HCHON2000898, HCHON2000935, HCHON2000942, HCHON2000956, HCHON2000994, HCHON2001084, HCHON2001099, HCHON2001110, HCHON2001116, HCHON2001214, HCHON2001233, HCHON2001269, HCHON2001450, HCHON2001453, HCHON2001519, HCHON2001523, HCHON2001535, HCHON2001546, HCHON2001548, HCHON2001577, HCHON2001598, HCHON2001604, HCHON2001607, HCHON2001646, HCHON2001712, HCHON2001768, HCHON2001801, HCHON2002123, HCHON2002194, HCHON2002241, HCHON2002496, HCHON2002676, HCHON2002770, HCHON2002964, HCHON2002971, HCHON2003131, HCHON2003134, HCHON2003327, HCHON2003513, HCHON2003532, HCHON2003642, HCHON2003659, HCHON2003676, HCHON2004007, HCHON2004279, HCHON2004359, HCHON2004531, HCHON2004776, HCHON2004858, HCHON2005048, HCHON2005118, HCHON2005166, HCHON2005802, HCHON2005987, HCHON2006250, HCHON2006459, HCHON2006714, HCHON2006722, HCHON2006770, HCHON2006786, HCHON2006841, HCHON2006871, HCHON2007046, HCHON2007482, HCHON2007650, HCHON2007674, HCHON2007774, HCHON2007881, HCHON2008239, HCHON2008444, HCHON2008582, HCHON2008672, HCHON2008856, HCHON2008871, HCHON2008989, HCHON2009191, HCHON2009384, HCHON2009749, HCHON2009766, HCHON2009795, HCHON2010074, HEART1000088, HEART1000099, HEART1000102, HEART1000118, HEART1000132, HEART1000139, HEART1000142, HEART1000151, HEART1000185, HEART2000024, HEART2000035, HEART2000099, HEART2000298, HEART2000309, HEART2000411, HEART2000418, HEART2000444, HEART2000448, HEART2000492, HEART2000541, HEART2000568, HEART2000611, HEART2001680, HEART2001756, HEART2002129, HEART2002184, HEART2002220, HEART2002432, HEART2002531, HEART2002598, HEART2002717, HEART2003027, HEART2003168, HEART2003432, HEART2003440, HEART2003781, HEART2003836, HEART2004570, HEART2004764, HEART2004931, HEART2004940, HEART2004941, HEART2004980, HEART2005244, HEART2005581, HEART2005610, HEART2006131, HEART2006195, HEART2006310, HEART2006334, HEART2006557, HEART2006787, HEART2006789, HEART2006909, HEART2007031, HEART2007443, HEART2007696, HEART2007767, HEART2008108, HEART2008111, HEART2008257, HEART2008509, HEART2008994, HEART2009599, HEART2009680, HEART2010391, HEART2010492, HEART2010495, HELAC2000158, HELAC2000301, HHDPC1000001, HHDPC1000065, HHDPC1000118, HHDPC2000070, HHDPC2000102, HHDPC2000258, HHDPC2000315, HHDPC2000462, HHDPC2000572, HHDPC2000656, HHDPC2000692, HHDPC2001337, HHDPC2001432, HHDPC2001896, HHDPC2002963, HHDPC2003049, HHDPC2003113, HHDPC2003381, HHDPC2003472, HHDPC2004757, HHDPC2005185, HHDPC2005513, HHDPC2005742, HHDPC2006460, HHDPC2006927, HHDPC2007302, HHDPC2007775, HHDPC2008123, HHDPC2008185, HHDPC2008279, HHDPC2008297, HHDPC2008414, HHDPC2008474, HHDPC2008816, HHDPC2008843, HHDPC2009114, HHDPC2009178, HHDPC2009208, HHDPC2009272, HLUNG1000017, HLUNG1000024, HLUNG1000030, HLUNG1000034, HLUNG1000037, HLUNG1000053, HLUNG1000076, HLUNG1000084, HLUNG1000091, HLUNG1000099, HLUNG1000104, HLUNG1000105, HLUNG1000110, HLUNG1000151, HLUNG1000169, HLUNG2000004, HLUNG2000014, HLUNG2000027, HLUNG2000063, HLUNG2000068, HLUNG2000116, HLUNG2000125, HLUNG2000130, HLUNG2000142, HLUNG2000174, HLUNG2000176, HLUNG2000217, HLUNG2000255, HLUNG2000281, HLUNG2000315, HLUNG2000340, HLUNG2000362, HLUNG2000363, HLUNG2000431, HLUNG2000480, HLUNG2000489, HLUNG2000549, HLUNG2000557, HLUNG2000570, HLUNG2000751, HLUNG2000761, HLUNG2000777, HLUNG2000870, HLUNG2000884, HLUNG2000926, HLUNG2000950, HLUNG2000955, HLUNG2000970, HLUNG2001013, HLUNG2001126, HLUNG2001144, HLUNG2001214, HLUNG2001439, HLUNG2001459, HLUNG2001633, HLUNG2001677, HLUNG2001814, HLUNG2001996, HLUNG2002006, HLUNG2002050, HLUNG2002059, HLUNG2002085, HLUNG2002145, HLUNG2002295, HLUNG2002303, HLUNG2002334, HLUNG2002405, HLUNG2002429, HLUNG2002562, HLUNG2002659, HLUNG2002707, HLUNG2002916, HLUNG2002942, HLUNG2002949, HLUNG2002958, HLUNG2002982, HLUNG2003003, HLUNG2003042, HLUNG2003049, HLUNG2003061, HLUNG2003162, HLUNG2003246, HLUNG2003306, HLUNG2003331, HLUNG2003335, HLUNG2003497, HLUNG2003691, HLUNG2003710, HLUNG2003714, HLUNG2003778, HLUNG2003833, HLUNG2003872, HLUNG2003918, HLUNG2003991, HLUNG2004014, HLUNG2004037, HLUNG2004154, HLUNG2004217, HLUNG2004273, HLUNG2004388, HLUNG2004416, HLUNG2004521, HLUNG2004534, HLUNG2004684, HLUNG2004707, HLUNG2004774, HLUNG2004775, HLUNG2005012, HLUNG2005030, HLUNG2005045, HLUNG2005076, HLUNG2005133, HLUNG2005203, HLUNG2005230, HLUNG2005479, HLUNG2005524, HLUNG2005738, HLUNG2005774, HLUNG2005813, HLUNG2005924, HLUNG2006026, HLUNG2006067, HLUNG2006094, HLUNG2006370, HLUNG2006397, HLUNG2006570, HLUNG2006599, HLUNG2006614, HLUNG2006671, HLUNG2006781, HLUNG2006843, HLUNG2006852, HLUNG2006935, HLUNG2007041, HLUNG2007210, HLUNG2007219, HLUNG2007245, HLUNG2007433, HLUNG2007931, HLUNG2008066, HLUNG2008225, HLUNG2008235, HLUNG2008247, HLUNG2008333, HLUNG2008384, HLUNG2008396, HLUNG2008439, HLUNG2008479, HLUNG2008480, HLUNG2008521, HLUNG2008833, HLUNG2008875, HLUNG2008958, HLUNG2008959, HLUNG2009067, HLUNG2009215, HLUNG2009253, HLUNG2009303, HLUNG2009413, HLUNG2009729, HLUNG2010181, HLUNG2010464, HLUNG2010562, HLUNG2010845, HLUNG2011041, HLUNG2011298, HLUNG2011461, HLUNG2011833, HLUNG2012049, HLUNG2012287, HLUNG2012315, HLUNG2012546, HLUNG2012600, HLUNG2012727, HLUNG2013097, HLUNG2013204, HLUNG2013304, HLUNG2013350, HLUNG2013622, HLUNG2013643, HLUNG2013784, HLUNG2013851, HLUNG2014262, HLUNG2014288, HLUNG2014449, HLUNG2014821, HLUNG2015184, HLUNG2015418, HLUNG2015548, HLUNG2015578, HLUNG2015617, HLUNG2016022, HLUNG2016862, HLUNG2017286, HLUNG2017307, HLUNG2017350, HLUNG2017546, HLUNG2017806, HLUNG2018029, HLUNG2018282, HLUNG2018626, HLUNG2019058, HSYRA1000131, HSYRA1000148, HSYRA2000044, HSYRA2000135, HSYRA2000221, HSYRA2000237, HSYRA2000253, HSYRA2000332, HSYRA2000371, HSYRA2000424, HSYRA2000507, HSYRA2000510, HSYRA2000605, HSYRA2000760, HSYRA2000792, HSYRA2000832, HSYRA2000927, HSYRA2001103, HSYRA2001142, HSYRA2001153, HSYRA2001232, HSYRA2001255, HSYRA2001332, HSYRA2001353, HSYRA2001420, HSYRA2001484, HSYRA2001552, HSYRA2001580, HSYRA2001631, HSYRA2001638, HSYRA2002103, HSYRA2002590, HSYRA2002741, HSYRA2003168, HSYRA2004550, HSYRA2004858, HSYRA2005456, HSYRA2005496, HSYRA2005628, HSYRA2005970, HSYRA2006049, HSYRA2006873, HSYRA2007241, HSYRA2007338, HSYRA2007650, HSYRA2007667, HSYRA2008154, HSYRA2008714, HSYRA2009102, IMR321000155, IMR321000161, IMR321000165, IMR321000207, IMR321000230, IMR321000253, IMR322000010, IMR322000107, IMR322000144, IMR322000152, IMR322000164, IMR322000178, IMR322000302, IMR322000374, IMR322000379, IMR322000383, IMR322000418, IMR322000604, IMR322000609, IMR322000656, IMR322000672, IMR322000791, IMR322000811, IMR322000838, IMR322000917, IMR322000919, IMR322000935, IMR322000953, IMR322000984, IMR322001018, IMR322001167, IMR322001185, IMR322001245, IMR322001452, IMR322001491, IMR322001665, IMR322001710, IMR322001724, IMR322001879, IMR322002035, IMR322002110, IMR322002470, IMR322002993, IMR322003675, IMR322004768, IMR322005293, IMR322005833, IMR322006012, IMR322006222, IMR322006495, IMR322006520, IMR322006886, IMR322006947, IMR322007078, IMR322007225, IMR322007704, IMR322008651, IMR322009807, IMR322010295, IMR322010953, IMR322011689, IMR322012314, IMR322012529, IMR322013053, IMR322013396, IMR322013731, IMR322013805, IMR322015523, IMR322016146, IMR322017049, IMR322018117, IMR322018192, JCMLC2000273, KIDNE1000008, KIDNE1000012, KIDNE1000015, KIDNE1000028, KIDNE1000036, KIDNE1000064, KIDNE1000121, KIDNE1000143, KIDNE1000152, KIDNE2000026, KIDNE2000041, KIDNE2000046, KIDNE2000051, KIDNE2000070, KIDNE2000167, KIDNE2000174, KIDNE2000192, KIDNE2000227, KIDNE2000244, KIDNE2000245, KIDNE2000287, KIDNE2000315, KIDNE2000317, KIDNE2000328, KIDNE2000330, KIDNE20.00335, KIDNE2000375, KIDNE2000394, KIDNE2000403, KIDNE2000422, KIDNE2000493, KIDNE2000497, KIDNE2000510, KIDNE2000513, KIDNE2000517, KIDNE2000519, KIDNE2000555, KIDNE2000624, KIDNE2000678, KIDNE2000717, KIDNE2000721, KIDNE2000722, KIDNE2000777, KIDNE2000801, KIDNE2000832, KIDNE2000833, KIDNE2000846, KIDNE2000867, KIDNE2001117, KIDNE2001140, KIDNE2001269, KIDNE2001361, KIDNE2001373, KIDNE2001636, KIDNE2001713, KIDNE2001802, KIDNE2001840, KIDNE2001847, KIDNE2001857, KIDNE2001873, KIDNE2001897, KIDNE2001931, KIDNE2001979, KIDNE2002015, KIDNE2002162, KIDNE2002168, KIDNE2002198, KIDNE2002252, KIDNE2002262, KIDNE2002438, KIDNE2002483, KIDNE2002768, KIDNE2002795, KIDNE2002798, KIDNE2002839, KIDNE2002845, KIDNE2002872, KIDNE2002882, KIDNE2002883, KIDNE2002980, KIDNE2002991, KIDNE2003185, KIDNE2003188, KIDNE2003316, KIDNE2003335, KIDNE2003357, KIDNE2003373, KIDNE2003377, KIDNE2003507, KIDNE2003752, KIDNE2003837, KIDNE2003994, KIDNE2004034, KIDNE2004084, KIDNE2004095, KIDNE2004233, KIDNE2004262, KIDNE2004279, KIDNE2004294, KIDNE2004295, KIDNE2004305, KIDNE2004344, KIDNE2004394, KIDNE2004411, KIDNE2004519, KIDNE2004520, KIDNE2004531, KIDNE2004534, KIDNE2004562, KIDNE2004579, KIDNE2004626, KIDNE2004681, KIDNE2004828, KIDNE2004846, KIDNE2004864, KIDNE2004879, KIDNE2004981, KIDNE2004985, KIDNE2004999, KIDNE2005038, KIDNE2005042, KIDNE2005062, KIDNE2005266, KIDNE2005296, KIDNE2005321, KIDNE2005327, KIDNE2005336, KIDNE2005400, KIDNE2005424, KIDNE2005477, KIDNE2005526, KIDNE2005543, KIDNE2005603, KIDNE2005629, KIDNE2005781, KIDNE2005798, KIDNE2005854, KIDNE2005908, KIDNE2005937, KIDNE2006009, KIDNE2006014, KIDNE2006030, KIDNE2006039, KIDNE2006053, KIDNE2006062, KIDNE2006092, KIDNE2006145, KIDNE2006149, KIDNE2006210, KIDNE2006299, KIDNE2006334, KIDNE2006353, KIDNE2006376, KIDNE2006378, KIDNE2006652, KIDNE2006687, KIDNE2006733, KIDNE2006811, KIDNE2006820, KIDNE2007005, KIDNE2007040, KIDNE2007077, KIDNE2007186, KIDNE2007222, KIDNE2007328, KIDNE2007356, KIDNE2007422, KIDNE2007569, KIDNE2007810, KIDNE2007811, KIDNE2007910, KIDNE2007944, KIDNE2008022, KIDNE2008072, KIDNE2008116, KIDNE2008117, KIDNE2008218, KIDNE2008315, KIDNE2008378, KIDNE2008404, KIDNE2008446, KIDNE2008473, KIDNE2008480, KIDNE2008649, KIDNE2008666, KIDNE2008697, KIDNE2008758, KIDNE2008788, KIDNE2008795, KIDNE2008824, KIDNE2008832, KIDNE2008869, KIDNE2008914, KIDNE2008975, KIDNE2008987, KIDNE2009019, KIDNE2009109, KIDNE2009180, KIDNE2009191, KIDNE2009332, KIDNE2009426, KIDNE2009467, KIDNE2009490, KIDNE2009553, KIDNE2009605, KIDNE2009628, KIDNE2009647, KIDNE2009676, KIDNE2009723, KIDNE2010007, KIDNE2010049, KIDNE2010052, KIDNE2010084, KIDNE2010137, KIDNE2010151, KIDNE2010264, KIDNE2010265, KIDNE2010271, KIDNE2010419, KIDNE2010430, KIDNE2010574, KIDNE2010674, KIDNE2010739, KIDNE2010750, KIDNE2010762, KIDNE2010863, KIDNE2010973, KIDNE2010989, KIDNE2011200, KIDNE2011314, KIDNE2011508, KIDNE2011532, KIDNE2011635, KIDNE2011782, KIDNE2011858, KIDNE2012025, KIDNE2012188, KIDNE2012316, KIDNE2012361, KIDNE2012453, KIDNE2012563, KIDNE2012601, KIDNE2012613, KIDNE2012710, KIDNE2012745, KIDNE2012775, KIDNE2012784, KIDNE2012945, KIDNE2013045, KIDNE2013095, KIDNE2013158, KIDNE2013218, KIDNE2013263, KIDNE2013346, KIDNE2013388, KIDNE2013413, KIDNE2013489, KIDNE2013639, KIDNE2013731, KIDNE2013734, KIDNE2013775, KIDNE2013801, KIDNE2013866, KIDNE2014087, KIDNE2014112, KIDNE2014119, KIDNE2014170, KIDNE2014184, KIDNE2014268, KIDNE2014298, KIDNE2014320, KIDNE2014325, KIDNE2014415, KIDNE2014489, KIDNE2014496, KIDNE2014661, KIDNE2014717, KIDNE2014789, KIDNE2014808, KIDNE2014890, KIDNE2015073, KIDNE2015221, KIDNE2015244, KIDNE2015313, KIDNE2015433, KIDNE2015445, KIDNE2015483, KIDNE2015515, KIDNE2015546, KIDNE2015556, KIDNE2015598, KIDNE2015660, KIDNE2015987, KIDNE2016000, KIDNE2016036, KIDNE2016096, KIDNE2016142, KIDNE2016188, KIDNE2016327, KIDNE2016388, KIDNE2016464, KIDNE2016539, KIDNE2016570, KIDNE2016918, KIDNE2017007, KIDNE2017052, KIDNE2017151, KIDNE2017315, KIDNE2017332, KIDNE2017343, KIDNE2017454, KIDNE2017603, KIDNE2017956, KIDNE2018166, KIDNE2018167, KIDNE2018254, KIDNE2018268, KIDNE2018269, KIDNE2018287, KIDNE2018294, KIDNE2018352, KIDNE2018462, KIDNE2018617, KIDNE2018678, KIDNE2018727, KIDNE2018863, KIDNE2018989, KIDNE2018996, KIDNE2019074, KIDNE2019187, LIVER1000017, LIVER1000050, LIVER1000055, LIVER1000058, LIVER1000063, LIVER1000067, LIVER1000073, LIVER1000082, LIVER1000099, LIVER1000111, LIVER1000126, LIVER1000139, LIVER1000155, LIVER1000165, LIVER1000175, LIVER1000224, LIVER1000278, LIVER1000303, LIVER1000397, LIVER1000421, LIVER1000433, LIVER1000479, LIVER1000482, LIVER1000542, LIVER2000003, LIVER2000158, LIVER2000216, LIVER2000237, LIVER2000247, LIVER2000360, LIVER2000416, LIVER2000446, LIVER2000515, LIVER2000592, LIVER2000626, LIVER2000682, LIVER2000769, LIVER2000775, LIVER2001051, LIVER2001076, LIVER2001099, LIVER2001113, LIVER2001164, LIVER2001191, LIVER2001329, LIVER2001389, LIVER2001461, LIVER2001539, LIVER2001608, LIVER2001835, LIVER2002638, LIVER2002644, LIVER2002660, LIVER2002702, LIVER2003065, LIVER2003234, LIVER2003511, LIVER2003524, LIVER2003568, LIVER2003581, LIVER2003800, LIVER2003854, LIVER2004074, LIVER2004392, LIVER2004514, LIVER2004565, LIVER2005028, LIVER2005198, LIVER2005218, LIVER2005376, LIVER2005385, LIVER2005512, LIVER2005520, LIVER2005527, LIVER2005544, LIVER2005625, LIVER2005728, LIVER2005789, LIVER2005973, LIVER2005981, LIVER2006251, LIVER2006410, LIVER2006469, LIVER2006644, LIVER2006764, LIVER2007415, LIVER2007548, LIVER2007568, LIVER2007721, LIVER2008053, LIVER2008473, LIVER2008580, LIVER2008706, LIVER2008751, LIVER2008945, LIVER2008998, LIVER2009110, LIVER2009118, LIVER2009554, LYMPB1000141, LYMPB1000158, LYMPB2000083, MAMGL1000017, MAMGL1000096, MAMGL1000132, MAMGL1000151, MAMGL1000178, MAMGL1000182, MAMGL1000184, MESAN1000032, MESAN1000035, MESAN1000079, MESAN1000121, MESAN1000147, MESAN1000180, MESAN2000023, MESAN2000026, MESAN2000067, MESAN2000092, MESAN2000149, MESAN2000167, MESAN2000264, MESAN2000291, MESAN2000337, MESAN2000434, MESAN2000457, MESAN2000462, MESAN2000620, MESAN2000711, MESAN2000815, MESAN2000894, MESAN2000909, MESAN2001627, MESAN2001770, MESAN2001979, MESAN2001980, MESAN2002113, MESAN2002147, MESAN2002424, MESAN2002687, MESAN2002709, MESAN2002790, MESAN2002844, MESAN2002940, MESAN2002978, MESAN2003035, MESAN2003037, MESAN2003039, MESAN2003058, MESAN2003101, MESAN2003190, MESAN2003322, MESAN2003444, MESAN2003490, MESAN2003529, MESAN2003646, MESAN2003662, MESAN2003851, MESAN2004138, MESAN2004288, MESAN2004575, MESAN2005284, MESAN2005303, MESAN2005371, MESAN2005633, MESAN2005724, MESAN2005808, MESAN2005811, MESAN2006022, MESAN2006043, MESAN2006328, MESAN2006580, MESAN2006599, MESAN2006743, MESAN2006953, MESAN2006971, MESAN2007032, MESAN2007440, MESAN2007597, MESAN2007755, MESAN2008222, MESAN2008415, MESAN2008460, MESAN2008536, MESAN2008679, MESAN2008821, MESAN2008926, MESAN2009019, MESAN2009081, MESAN2009105, MESAN2009311, MESAN2009418, MESAN2009503, MESAN2009522, MESAN2009580, MESAN2010031, MESAN2010114, MESAN2010312, MESAN2010321, MESAN2010681, MESAN2011545, MESAN2011597, MESAN2011627, MESAN2011632, MESAN2011977, MESAN2012113, MESAN2012586, MESAN2012708, MESAN2012735, MESAN2013019, MESAN2013022, MESAN2013183, MESAN2013211, MESAN2013283, MESAN2013611, MESAN2013674, MESAN2013845, MESAN2013908, MESAN2013936, MESAN2014192, MESAN2014295, MESAN2014298, MESAN2014412, MESAN2014624, MESAN2015277, MESAN2015391, MESAN2015401, MESAN2015501, MESAN2015708, MESAN2016159, MESAN2016304, MESAN2016409, MESAN2016552, MESAN2016965, MESAN2017152, MESAN2017417, MESAN2018209, MESAN2018576, MESAN2018670, MESTC1000147, MESTC2000150, MESTC2000153, MESTC2000170, N1ESE2000698, NB9N41000047, NB9N41000142, NB9N41000146, NB9N42000104, NB9N42000122, NB9N42000281, NB9N42000314, NB9N42000342, NB9N42000430, NB9N42000495, NB9N42001300, NCRRP1000129, NESOP1000010, NESOP1000087, NESOP1000108, NESOP2000231, NESOP2000452, NESOP2000499, NESOP2000504, NESOP2000744, NESOP2001144, NESOP2001433, NESOP2001656, NESOP2001694, NESOP2002352, NESOP2002418, NESOP2002487, NESOP2002738, NESOP2002780, NETRP1000034, NETRP1000082, NETRP2000086, NETRP2000182, NETRP2000439, NHNPC1000037, NHNPC1000084, NHNPC1000101, NHNPC1000124, NHNPC2000212, NHNPC2000606, NHNPC2000877, NHNPC2001108, NHNPC2001223, NHNPC2001312, NHNPC2001816, NHNPC2002565, NHNPC2002749, NOVAR1000015, NOVAR1000091, NOVAR1000102, NOVAR2000136, NOVAR2000352, NOVAR2000412, NOVAR2000710, NOVAR2000962, NOVAR2001108, NOVAR2001620, NOVAR2001783, NOVAR2001876, NOVAR2002039, NT2NE1000004, NT2NE1000023, NT2NE1000024, NT2NE1000059, NT2NE1000063, NT2NE1000073, NT2NE1000083, NT2NE1000120, NT2NE1000122, NT2NE1000175, NT2NE1000181, NT2NE1000185, NT2NE2000038, NT2NE2000054, NT2NE2000057, NT2NE2000064, NT2NE2000109, NT2NE2000137, NT2NE2000156, NT2NE2000222, NT2NE2000284, NT2NE2000299, NT2NE2000353, NT2NE2000356, NT2NE2000369, NT2NE2000374, NT2NE2000386, NT2NE2000390, NT2NE2000455, NT2NE2000470, NT2NE2000488, NT2NE2000536, NT2NE2000546, NT2NE2000548, NT2NE2000550, NT2NE2000586, NT2NE2000612, NT2NE2000636, NT2NE2000658, NT2NE2000706, NT2NE2000802, NT2NE2000808, NT2NE2000809, NT2NE2000950, NT2NE2000951, NT2NE2000980, NT2NE2001005, NT2NE2001021, NT2NE2001049, NT2NE2001142, NT2NE2001180, NT2NE2001181, NT2NE2001188, NT2NE2001191, NT2NE2001247, NT2NE2001252, NT2NE2001326, NT2NE2001372, NT2NE2001428, NT2NE2001432, NT2NE2001524, NT2NE2001530, NT2NE2001598, NT2NE2001617, NT2NE2001623, NT2NE2001626, NT2NE2001634, NT2NE2001648, NT2NE2001660, NT2NE2001666, NT2NE2001677, NT2NE2001698, NT2NE2001723, NT2NE2001725, NT2NE2001874, NT2NE2001889, NT2NE2001923, NT2NE2002100, NT2NE2002162, NT2NE2002186, NT2NE2002285, NT2NE2002311, NT2NE2002620, NT2NE2002651, NT2NE2002732, NT2NE2002768, NT2NE2002791, NT2NE2002856, NT2NE2002870, NT2NE2003150, NT2NE2003252, NT2NE2003280, NT2NE2003308, NT2NE2003309, NT2NE2003315, NT2NE2003393, NT2NE2003408, NT2NE2003457, NT2NE2003540, NT2NE2003571, NT2NE2003705, NT2NE2003752, NT2NE2003887, NT2NE2004255, NT2NE2004378, NT2NE2004490, NT2NE2004606, NT2NE2004716, NT2NE2004740, NT2NE2004787, NT2NE2004916, NT2NE2005035, NT2NE2005223, NT2NE2005276, NT2NE2005323, NT2NE2005358, NT2NE2005371, NT2NE2005395, NT2NE2005441, NT2NE2005517, NT2NE2005537, NT2NE2005555, NT2NE2005588, NT2NE2005676, NT2NE2005720, NT2NE2005784, NT2NE2005804, NT2NE2005821, NT2NE2005921, NT2NE2005968, NT2NE2006075, NT2NE2006087, NT2NE2006103, NT2NE2006217, NT2NE2006288, NT2NE2006382, NT2NE2006387, NT2NE2006427, NT2NE2006432, NT2NE2006478, NT2NE2006531, NT2NE2006784, NT2NE2006813, NT2NE2006894, NT2NE2006942, NT2NE2006958, NT2NE2007052, NT2NE2007220, NT2NE2007425, NT2NE2007725, NT2NE2007727, NT2NE2007786, NT2NE2007877, NT2NE2007967, NT2NE2008017, NT2NE2008060, NT2NE2008077, NT2NE2008213, NT2NE2008260, NT2NE2008378, NT2NE2008607, NT2NE2008639, NT2NE2008727, NT2NE2008783, NT2NE2008785, NT2NE2008867, NT2NE2008961, NT2NE2008997, NT2NE2009138, NT2NE2009295, NT2NE2009426, NT2NE2009608, NT2NE2009691, NT2NE2010105, NT2NE2010150, NT2NE2010400, NT2NE2010632, NT2NE2010633, NT2NE2010654, NT2NE2010688, NT2NE2010781, NT2NE2010854, NT2NE2011033, NT2NE2011036, NT2NE2011107, NT2NE2011154, NT2NE2011221, NT2NE2011411, NT2NE2011485, NT2NE2011650, NT2NE2011684, NT2NE2011687, NT2NE2011691, NT2NE2011758, NT2NE2011823, NT2NE2011896, NT2NE2011998, NT2NE2012113, NT2NE2012243, NT2NE2012361, NT2NE2012448, NT2NE2012457, NT2NE2012493, NT2NE2012533, NT2NE2012603, NT2NE2012747, NT2NE2012790, NT2NE2012847, NT2NE2013019, NT2NE2013081, NT2NE2013189, NT2NE2013217, NT2NE2013547, NT2NE2014013, NT2NE2014028, NT2NE2014113, NT2NE2014176, NT2NE2014221, NT2NE2014525, NT2NE2014650, NT2NE2014651, NT2NE2014681, NT2NE2014758, NT2NE2014869, NT2NE2014950, NT2NE2015061, NT2NE2015262, NT2NE2015275, NT2NE2015480, NT2NE2015511, NT2NE2015565, NT2NE2015626, NT2NE2015747, NT2NE2015860, NT2NE2015885, NT2NE2015904, NT2NE2016041, NT2NE2016387, NT2NE2016419, NT2NE2016519, NT2NE2016608, NT2NE2016766, NT2NE2016774, NT2NE2016971, NT2NE2017259, NT2NE2017332, NT2NE2017397, NT2NE2017480, NT2NE2017492, NT2NE2017508, NT2NE2017562, NT2NE2017590, NT2NE2017612, NT2NE2017721, NT2NE2017752, NT2NE2017982, NT2NE2018165, NT2NE2018176, NT2NE2018273, NT2NE2018376, NT2NE2018472, NT2NE2018490, NT2NE2018594, NT2NE2018739, NT2NE2018916, NT2NE2019056, NT2NE2019076, NT2NE2019099, NT2RI1000016, NT2RI1000035, NT2RI1000048, NT2RI1000164, NT2RI1000172, NT2RI2000004, NT2RI2000007, NT2RI2000117, NT2RI2000128, NT2RI2000173, NT2RI2000187, NT2RI2000270, NT2RI2000276, NT2RI2000313, NT2RI2000341, NT2RI2000348, NT2RI2000421, NT2RI2000480, NT2RI2000575, NT2RI2000588, NT2RI2000597, NT2RI2000669, NT2RI2000688, NT2RI2000689, NT2RI2000704, NT2RI2000738, NT2RI2000775, NT2RI2000822, NT2RI2000841, NT2RI2000865, NT2RI2000932, NT2RI2000974, NT2RI2000987, NT2RI2001010, NT2RI2001017, NT2RI2001030, NT2RI2001083, NT2RI2001167, NT2RI2001178, NT2RI2001235, NT2RI2001244, NT2RI2001307, NT2RI2001409, NT2RI2001410, NT2RI2001425, NT2RI2001449, NT2RI2001474, NT2RI2001519, NT2RI2001595, NT2RI2001624, NT2RI2001657, NT2RI2001726, NT2RI2001782, NT2RI2001836, NT2RI2001846, NT2RI2001910, NT2RI2001952, NT2RI2002022, NT2RI2002041, NT2RI2002117, NT2RI2002120, NT2RI2002153, NT2RI2002179, NT2RI2002252, NT2RI2002260, NT2RI2002270, NT2RI2002334, NT2RI2002359, NT2RI2002447, NT2RI2002481, NT2RI2002507, NT2RI2002517, NT2RI2002530, NT2RI2002549, NT2RI2002564, NT2RI2002592, NT2RI2002602, NT2RI2002729, NT2RI2002822, NT2RI2002852, NT2RI2002865, NT2RI2002923, NT2RI2002926, NT2RI2002970, NT2RI2003019, NT2RI2003067, NT2RI2003184, NT2RI2003360, NT2RI2003383, NT2RI2003392, NT2RI2003399, NT2RI2003419, NT2RI2003487, NT2RI2003667, NT2RI2003751, NT2RI2003884, NT2RI2003973, NT2RI2003993, NT2RI2004078, NT2RI2004079, NT2RI2004093, NT2RI2004136, NT2RI2004157, NT2RI2004188, NT2RI2004190, NT2RI2004209, NT2RI2004230, NT2RI2004312, NT2RI2004381, NT2RI2004442, NT2RI2004468, NT2RI2004606, NT2RI2004618, NT2RI2004783, NT2RI2004818, NT2RI2004840, NT2RI2004884, NT2RI2004916, NT2RI2004962, NT2RI2004984, NT2RI2004985, NT2RI2005048, NT2RI2005061, NT2RI2005069, NT2RI2005087, NT2RI2005096, NT2RI2005130, NT2RI2005315, NT2RI2005358, NT2RI2005368, NT2RI2005382, NT2RI2005520, NT2RI2005579, NT2RI2005621, NT2RI2005628, NT2RI2005647, NT2RI2005670, NT2RI2005710, NT2RI2005772, NT2RI2005814, NT2RI2005818, NT2RI2005966, NT2RI2006081, NT2RI2006126, NT2RI2006127, NT2RI2006183, NT2RI2006257, NT2RI2006294, NT2RI2006345, NT2RI2006403, NT2RI2006445, NT2RI2006487, NT2RI2006506, NT2RI2006553, NT2RI2006565, NT2RI2006659, NT2RI2006662, NT2RI2006667, NT2RI2006679, NT2RI2006686, NT2RI2006703, NT2RI2006716, NT2RI2006735, NT2RI2006762, NT2RI2006788, NT2RI2006838, NT2RI2006853, NT2RI2006855, NT2RI2006973, NT2RI2007046, NT2RI2007048, NT2RI2007116, NT2RI2007133, NT2RI2007214, NT2RI2007277, NT2RI2007303, NT2RI2007334, NT2RI2007386, NT2RI2007406, NT2RI2007439, NT2RI2007469, NT2RI2007507, NT2RI2007729, NT2RI2007751, NT2RI2007754, NT2RI2007827, NT2RI2007853, NT2RI2007877, NT2RI2007891, NT2RI2007956, NT2RI2007965, NT2RI2008007, NT2RI2008050, NT2RI2008204, NT2RI2008221, NT2RI2008233, NT2RI2008455, NT2RI2008502, NT2RI2008598, NT2RI2008622, NT2RI2008656, NT2RI2008801, NT2RI2008841, NT2RI2008952, NT2RI2009005, NT2RI2009101, NT2RI2009103, NT2RI2009144, NT2RI2009151, NT2RI2009215, NT2RI2009259, NT2RI2009289, NT2RI2009301, NT2RI2009517, NT2RI2009585, NT2RI2009595, NT2RI2009855, NT2RI2010283, NT2RI2010508, NT2RI2011422, NT2RI2011450, NT2RI2011683, NT2RI2011803, NT2RI2012990, NT2RI2013345, NT2RI2013357, NT2RI2013373, NT2RI2014247, NT2RI2014551, NT2RI2014683, NT2RI2014733, NT2RI2015239, NT2RI2016128, NT2RI2016134, NT2RI2017529, NT2RI2018311, NT2RI2018363, NT2RI2018448, NT2RI2018883, NT2RI2018950, NT2RI2019826, NT2RI2020390, NT2RI2020703, NT2RI2021463, NT2RI2021625, NT2RI2022468, NT2RI2022584, NT2RI2023303, NT2RI2023671, NT2RI2024008, NT2RI2024313, NT2RI2024460, NT2RI2024496, NT2RI2024935, NT2RI2025255, NT2RI2025564, NT2RI2025565, NT2RI2025909, NT2RI2025957, NT2RI2025976, NT2RI2026758, NT2RI2027081, NT2RI2027157, NT2RI2027224, NT2RI2027323, NT2RI2027396, NT2RI2027484, NT2RI2028213, NT2RI2028222, NT2RI2028537, NT2RI2028642, NT2RI3000174, NT2RI3000213, NT2RI3000423, NT2RI3000622, NT2RI3001132, NT2RI3001263, NT2RI3001279, NT2RI3001458, NT2RI3001573, NT2RI3001967, NT2RI3002303, NT2RI3002557, NT2RI3002842, NT2RI3003027, NT2RI3003031, NT2RI3003095, NT2RI3003104, NT2RI3003162, NT2RI3003362, NT2RI3003409, NT2RI3003738, NT2RI3003925, NT2RI3004133, NT2RI3004381, NT2RI3005202, NT2RI3005403, NT2RI3005416, NT2RI3005861, NT2RI3005923, NT2RI3005928, NT2RI3006132, NT2RI3006171, NT2RI3006340, NT2RI3006376, NT2RI3006666, NT2RI3006796, NT2RI3007065, NT2RI3007095, NT2RI3007158, NT2RI3007167, NT2RI3007443, NT2RI3007684, NT2RI3007757, NT2RI3007878, NT2RI3007978, NT2RI3008162, NT2RI3008179, NT2RI3008228, NT2RI3008442, NT2RI3008652, NT2RI3008697, NT2RI3008974, NT2RI3009158, NT2RI3009480, NT2RI3009524, NT2RP6000033, NT2RP6000043, NT2RP6000060, NT2RP6000077, NT2RP6000100, NT2RP6000119, NT2RP6000127, NT2RP6000140, NT2RP6000150, NT2RP7000041, NT2RP7000109, NT2RP7000112, NT2RP7000259, NT2RP7000311, NT2RP7000359, NT2RP7000364, NT2RP7000380, NT2RP7000391, NT2RP7000425, NT2RP7000926, NT2RP7001074, NT2RP7001080, NT2RP7001156, NT2RP7001306, NT2RP7001319, NT2RP7001335, NT2RP7001532, NT2RP7001591, NT2RP7001602, NT2RP7001678, NT2RP7001856, NT2RP7002028, NT2RP7002064, NT2RP7002151, NT2RP7002163, NT2RP7002243, NT2RP7002282, NT2RP7002376, NT2RP7002450, NT2RP7002478, NT2RP7002554, NT2RP7002603, NT2RP7002650, NT2RP7002779, NT2RP7002841, NT2RP7002978, NT2RP7002982, NT2RP7003025, NT2RP7003050, NT2RP7003084, NT2RP7003091, NT2RP7003107, NT2RP7003134, NT2RP7003148, NT2RP7003261, NT2RP7003439, NT2RP7003629, NT2RP7003680, NT2RP7004027, NT2RP7004080, NT2RP7004204, NT2RP7004233, NT2RP7004260, NT2RP7004348, NT2RP7004358, NT2RP7004396, NT2RP7004541, NT2RP7004559, NT2RP7004641, NT2RP7004656, NT2RP7004687, NT2RP7004722, NT2RP7004766, NT2RP7004961, NT2RP7004964, NT2RP7004975, NT2RP7005118, NT2RP7005205, NT2RP7005323, NT2RP7005468, NT2RP7005629, NT2RP7005631, NT2RP7005669, NT2RP7005846, NT2RP7006033, NT2RP7006075, NT2RP7006141, NT2RP7006160, NT2RP7006296, NT2RP7006304, NT2RP7006374, NT2RP7006395, NT2RP7006408, NT2RP7006457, NT2RP7006539, NT2RP7006547, NT2RP7006601, NT2RP7006621, NT2RP7006636, NT2RP7006853, NT2RP7006886, NT2RP7006887, NT2RP7006980, NT2RP7006986, NT2RP7006995, NT2RP7007114, NT2RP7007221, NT2RP7007226, NT2RP7007269, NT2RP7007310, NT2RP7007359, NT2RP7007381, NT2RP7007387, NT2RP7007406, NT2RP7007480, NT2RP7007504, NT2RP7007580, NT2RP7007594, NT2RP7007617, NT2RP7007643, NT2RP7007766, NT2RP7007925, NT2RP7007930, NT2RP7008013, NT2RP7008015, NT2RP7008133, NT2RP7008137, NT2RP7008142, NT2RP7008144, NT2RP7008315, NT2RP7008360, NT2RP7008406, NT2RP7008435, NT2RP7008454, NT2RP7008487, NT2RP7008544, NT2RP7008550, NT2RP7008557, NT2RP7008623, NT2RP7008657, NT2RP7008720, NT2RP7008855, NT2RP7008863, NT2RP7009019, NT2RP7009030, NT2RP7009147, NT2RP7009168, NT2RP7009215, NT2RP7009225, NT2RP7009236, NT2RP7009253, NT2RP7009267, NT2RP7009322, NT2RP7009363, NT2RP7009370, NT2RP7009397, NT2RP7009429, NT2RP7009439, NT2RP7009466, NT2RP7009502, NT2RP7009507, NT2RP7009577, NT2RP7009743, NT2RP7009867, NT2RP7010128, NT2RP7010235, NT2RP7010275, NT2RP7010521, NT2RP7010612, NT2RP7010817, NT2RP7011086, NT2RP7011132, NT2RP7011268, NT2RP7011318, NT2RP7011452, NT2RP7011570, NT2RP7011721, NT2RP7011909, NT2RP7012291, NT2RP7012516, NT2RP7012776, NT2RP7013002, NT2RP7013374, NT2RP7013499, NT2RP7013729, NT2RP7013764, NT2RP7013795, NT2RP7013999, NT2RP7014005, NT2RP7014178, NT2RP7014348, NT2RP7014420, NT2RP7014583, NT2RP7014721, NT2RP7014743, NT2RP7014778, NT2RP7014906, NT2RP7015080, NT2RP7015431, NT2RP7015512, NT2RP7015676, NT2RP7015789, NT2RP7015996, NT2RP7016508, NT2RP7016622, NT2RP7016911, NT2RP7017139, NT2RP7017284, NT2RP7017365, NT2RP7017546, NT2RP7017567, NT2RP7017795, NT2RP7017971, NT2RP7018032, NT2RP7018126, NT2RP7018197, NT2RP7018206, NT2RP7018340, NT2RP7018586, NT2RP7018802, NT2RP7018871, NT2RP7019064, NT2RP7019135, NT2RP7019273, NT2RP7019367, NT2RP7019401, NT2RP7019445, NT2RP7019682, NT2RP7019835, NT2RP7020112, NT2RP7020123, NT2RP7020343, NT2RP7020379, NT2RP8000137, NT2RP8000296, NT2RP8000435, NT2RP8000483, NT2RP8000633, NT2RP8001363, NT2RP8001407, NT2RP8001584, NT2RP8001604, NT2RP8001605, NT2RP8003490, NT2RP8003657, NT2RP8003787, NT2RP8004306, NT2RP8005546, NT2RP8006452, NT2RP8006521, NT2RP8007416, NT2RP8007503, NT2RP8008057, NT2RP8009248, NTONG1000006, NTONG1000047, NTONG1000052, NTONG1000075, NTONG1000087, NTONG1000123, NTONG1000130, NTONG1000161, NTONG1000172, NTONG1000213, NTONG1000214, NTONG1000247, NTONG1000257, NTONG2000040, NTONG2000231, NTONG2000363, NTONG2000413, NTONG2000492, NTONG2000499, NTONG2000531, NTONG2000583, NTONG2000800, NTONG2000858, NTONG2000878, NTONG2000966, NTONG2000977, NTONG2000985, NTONG2001014, NTONG2001079, NTONG2001137, NTONG2001157, NTONG2001173, NTONG2001220, NTONG2001222, NTONG2001362, NTONG2001532, NTONG2001567, NTONG2001587, NTONG2001619, NTONG2001642, NTONG2002278, NTONG2002582, NTONG2002807, NTONG2002948, NTONG2002970, NTONG2002985, NTONG2003158, NTONG2003210, NTONG2003316, NTONG2003409, NTONG2003515, NTONG2003805, NTONG2003839, NTONG2003852, NTONG2003897, NTONG2003928, NTONG2004095, NTONG2004308, NTONG2004521, NTONG2004614, NTONG2004690, NTONG2004806, NTONG2004829, NTONG2004918, NTONG2004991, NTONG2005062, NTONG2005086, NTONG2005137, NTONG2005153, NTONG2005265, NTONG2005277, NTONG2005363, NTONG2005373, NTONG2005480, NTONG2005497, NTONG2005577, NTONG2005657, NTONG2005822, NTONG2005897, NTONG2006099, NTONG2006187, NTONG2006301, NTONG2006324, NTONG2006354, NTONG2006440, NTONG2006501, NTONG2006646, NTONG2006709, NTONG2007020, NTONG2007028, NTONG2007034, NTONG2007249, NTONG2007517, NTONG2007522, NTONG2007693, NTONG2008088, NTONG2008093, NTONG2008143, NTONG2008365, NTONG2008483, NTONG2008522, NTONG2008672, NTONG2008862, NTONG2008939, NTONG2008944, NTONG2009060, NTONG2009068, NTONG2009229, NTONG2009233, OCBBF1000016, OCBBF1000030, OCBBF1000042, OCBBF1000054, OCBBF1000067, OCBBF1000080, OCBBF1000085, OCBBF1000091, OCBBF1000104, OCBBF1000118, OCBBF1000119, OCBBF1000122, OCBBF1000130, OCBBF1000138, OCBBF1000145, OCBBF1000153, OCBBF1000185, OCBBF1000192, OCBBF1000315, OCBBF2000013, OCBBF2000287, OCBBF2000452, OCBBF2000703, OCBBF2000719, OCBBF2000904, OCBBF2000998, OCBBF2001075, OCBBF2001101, OCBBF2001124, OCBBF2001176, OCBBF2001252, OCBBF2001323, OCBBF2001389, OCBBF2001402, OCBBF2001408, OCBBF2001416, OCBBF2001473, OCBBF2001494, OCBBF2001527, OCBBF2001528, OCBBF2001586, OCBBF2001681, OCBBF2001706, OCBBF2001749, OCBBF2001910, OCBBF2001961, OCBBF2001983, OCBBF2002083, OCBBF2002124, OCBBF2002161, OCBBF2002357, OCBBF2002615, OCBBF2002663, OCBBF2002805, OCBBF2002865, OCBBF2002920, OCBBF2002980, OCBBF2003028, OCBBF2003091, OCBBF2003327, OCBBF2003543, OCBBF2003593, OCBBF2003744, OCBBF2004038, OCBBF2004147, OCBBF2004168, OCBBF2004259, OCBBF2004385, OCBBF2004418, OCBBF2004478, OCBBF2004482, OCBBF2004533, OCBBF2004567, OCBBF2004612, OCBBF2004647, OCBBF2004669, OCBBF2004826, OCBBF2004866, OCBBF2004883, OCBBF2004889, OCBBF2004930, OCBBF2004984, OCBBF2005066, OCBBF2005077, OCBBF2005161, OCBBF2005343, OCBBF2005349, OCBBF2005373, OCBBF2005420, OCBBF2005428, OCBBF2005433, OCBBF2005546, OCBBF2005843, OCBBF2005901, OCBBF2006005, OCBBF2006030, OCBBF2006058, OCBBF2006148, OCBBF2006154, OCBBF2006214, OCBBF2006241, OCBBF2006388, OCBBF2006438, OCBBF2006567, OCBBF2006624, OCBBF2006639, OCBBF2006660, OCBBF2006849, OCBBF2006859, OCBBF2006972, OCBBF2006987, OCBBF2007039, OCBBF2007051, OCBBF2007068, OCBBF2007121, OCBBF2007184, OCBBF2007194, OCBBF2007196, OCBBF2007238, OCBBF2007414, OCBBF2007428, OCBBF2007478, OCBBF2007485, OCBBF2007520, OCBBF2007555, OCBBF2007610, OCBBF2007756, OCBBF2007892, OCBBF2007931, OCBBF2007946, OCBBF2008041, OCBBF2008116, OCBBF2008138, OCBBF2008283, OCBBF2008330, OCBBF2008366, OCBBF2008466, OCBBF2008483, OCBBF2008520, OCBBF2008569, OCBBF2008586, OCBBF2008640, OCBBF2008691, OCBBF2008724, OCBBF2008760, OCBBF2008768, OCBBF2008770, OCBBF2008790, OCBBF2008814, OCBBF2008822, OCBBF2009115, OCBBF2009391, OCBBF2009424, OCBBF2009536, OCBBF2009571, OCBBF2009583, OCBBF2009603, OCBBF2009788, OCBBF2009920, OCBBF2009926, OCBBF2010040, OCBBF2010140, OCBBF2010281, OCBBF2010404, OCBBF2010416, OCBBF2010420, OCBBF2010604, OCBBF2010709, OCBBF2010792, OCBBF2010830, OCBBF2010841, OCBBF2010843, OCBBF2010931, OCBBF2010945, OCBBF2010978, OCBBF2010989, OCBBF2011137, OCBBF2011160, OCBBF2011177, OCBBF2011228, OCBBF2011283, OCBBF2011311, OCBBF2011625, OCBBF2011685, OCBBF2011706, OCBBF2011722, OCBBF2011767, OCBBF2011855, OCBBF2011872, OCBBF2011960, OCBBF2011981, OCBBF2012001, OCBBF2012028, OCBBF2012095, OCBBF2012139, OCBBF2012191, OCBBF2012262, OCBBF2012320, OCBBF2012436, OCBBF2012755, OCBBF2012936, OCBBF2012990, OCBBF2013049, OCBBF2013091, OCBBF2013123, OCBBF2013127, OCBBF2013208, OCBBF2013319, OCBBF2013507, OCBBF2013721, OCBBF2013789, OCBBF2013883, OCBBF2013926, OCBBF2014052, OCBBF2014322, OCBBF2014386, OCBBF2014541, OCBBF2014707, OCBBF2014828, OCBBF2014873, OCBBF2014880, OCBBF2014928, OCBBF2015031, OCBBF2015081, OCBBF2015232, OCBBF2015285, OCBBF2015334, OCBBF2015335, OCBBF2015503, OCBBF2015506, OCBBF2015599, OCBBF2015645, OCBBF2015659, OCBBF2015797, OCBBF2015931, OCBBF2015980, OCBBF2016038, OCBBF2016405, OCBBF2016467, OCBBF2016590, OCBBF2016591, OCBBF2016612, OCBBF2016690, OCBBF2016841, OCBBF2016928, OCBBF2017069, OCBBF2017306, OCBBF2017325, OCBBF2017489, OCBBF2017516, OCBBF2017665, OCBBF2017815, OCBBF2017888, OCBBF2017920, OCBBF2018014, OCBBF2018167, OCBBF2018206, OCBBF2018229, OCBBF2018362, OCBBF2018380, OCBBF2018563, OCBBF2018663, OCBBF2018687, OCBBF2018828, OCBBF2018873, OCBBF2018934, OCBBF2019108, OCBBF2019195, OCBBF2019327, OCBBF2019684, OCBBF2019761, OCBBF2019823, OCBBF2019950, OCBBF2020048, OCBBF2020318, OCBBF2020453, OCBBF2020801, OCBBF2020825, OCBBF2020838, OCBBF2021020, OCBBF2021214, OCBBF2021323, OCBBF2021518, OCBBF2021788, OCBBF2021833, OCBBF2022573, OCBBF2022574, OCBBF2023598, OCBBF2023643, OCBBF2024463, OCBBF2024589, OCBBF2024719, OCBBF2024779, OCBBF2024781, OCBBF2025028, OCBBF2025115, OCBBF2025198, OCBBF2025451, OCBBF2025458, OCBBF2025631, OCBBF2025730, OCBBF2026025, OCBBF2026035, OCBBF2026144, OCBBF2026645, OCBBF2026690, OCBBF2026981, OCBBF2027148, OCBBF2027354, OCBBF2027423, OCBBF2027478, OCBBF2027481, OCBBF2027511, OCBBF2027728, OCBBF2027782, OCBBF2027868, OCBBF2028055, OCBBF2028173, OCBBF2028421, OCBBF2029471, OCBBF2029901, OCBBF2030116, OCBBF2030354, OCBBF2030517, OCBBF2030574, OCBBF2030708, OCBBF2030963, OCBBF2031167, OCBBF2031198, OCBBF2031366, OCBBF2031561, OCBBF2032152, OCBBF2032274, OCBBF2032539, OCBBF2032590, OCBBF2032599, OCBBF2032611, OCBBF2032671, OCBBF2033413, OCBBF2033869, OCBBF2033948, OCBBF2034333, OCBBF2034529, OCBBF2034637, OCBBF2034906, OCBBF2035110, OCBBF2035390, OCBBF2035564, OCBBF2035658, OCBBF2035823, OCBBF2035885, OCBBF2035916, OCBBF2036019, OCBBF2036031, OCBBF2036225, OCBBF2036476, OCBBF2036752, OCBBF2037068, OCBBF2037340, OCBBF2037398, OCBBF2037464, OCBBF2037547, OCBBF2037598, OCBBF2037638, OCBBF2038238, OCBBF2038285, OCBBF2038317, OCBBF3000097, OCBBF3000213, OCBBF3000296, OCBBF3000372, OCBBF3000380, OCBBF3000743, OCBBF3000830, OCBBF3001076, OCBBF3001202, OCBBF3001616, OCBBF3002553, OCBBF3002600, OCBBF3002654, OCBBF3003103, OCBBF3003209, OCBBF3003592, OCBBF3003745, OCBBF3003761, OCBBF3004264, OCBBF3004314, OCBBF3004972, OCBBF3005330, OCBBF3005597, OCBBF3005843, OCBBF3006802, OCBBF3006986, OCBBF3007078, OCBBF3007704, OCBBF3008230, OCBBF3008392, OCBBF3008835, OCBBF3009192, OCBBF3009279, PANCR1000012, PANCR1000021, PANCR1000081, PANCR1000086, PANCR1000185, PEBLM1000024, PEBLM1000029, PEBLM1000034, PEBLM1000062, PEBLM1000066, PEBLM1000068, PEBLM1000071, PEBLM1000083, PEBLM1000144, PEBLM1000147, PEBLM1000180, PEBLM2000030, PEBLM2000112, PEBLM2000126, PEBLM2000170, PEBLM2000180, PEBLM2000213, PEBLM2000248, PEBLM2000270, PEBLM2000308, PEBLM2000321, PEBLM2000333, PEBLM2000338, PEBLM2000395, PEBLM2000479, PEBLM2000502, PEBLM2001312, PEBLM2001465, PEBLM2001488, PEBLM2001803, PEBLM2002432, PEBLM2002455, PEBLM2002594, PEBLM2002749, PEBLM2002887, PEBLM2003426, PEBLM2003765, PEBLM2003935, PEBLM2004015, PEBLM2004216, PEBLM2004290, PEBLM2004497, PEBLM2004733, PEBLM2005615, PEBLM2005632, PEBLM2005697, PEBLM2006031, PEBLM2006036, PEBLM2006049, PEBLM2006113, PEBLM2006135, PEBLM2006215, PEBLM2006283, PEBLM2006298, PEBLM2006366, PEBLM2006709, PEBLM2006912, PEBLM2007112, PEBLM2007140, PEBLM2007188, PEBLM2007296, PEBLM2007447, PEBLM2007598, PEBLM2007832, PEBLM2007834, PEBLM2008106, PEBLM2008576, PEBLM2008605, PEBLM2008826, PEBLM2008861, PERIC1000025, PERIC1000147, PERIC2000180, PERIC2000214, PERIC2000386, PERIC2000387, PERIC2000422, PERIC2000473, PERIC2000914, PERIC2001227, PERIC2001228, PERIC2001379, PERIC2001504, PERIC2001703, PERIC2001764, PERIC2002243, PERIC2002272, PERIC2002452, PERIC2002766, PERIC2003001, PERIC2003090, PERIC2003287, PERIC2003349, PERIC2003452, PERIC2003699, PERIC2003794, PERIC2003834, PERIC2003919, PERIC2003957, PERIC2004028, PERIC2004131, PERIC2004259, PERIC2004379, PERIC2004429, PERIC2004510, PERIC2004613, PERIC2004909, PERIC2005111, PERIC2005305, PERIC2005347, PERIC2005370, PERIC2005936, PERIC2006035, PERIC2006121, PERIC2006945, PERIC2006960, PERIC2007439, PERIC2007914, PERIC2008008, PERIC2008385, PERIC2009001, PERIC2009086, PERIC2009329, PERIC2009566, PLACE5000001, PLACE5000013, PLACE5000037, PLACE5000058, PLACE5000067, PLACE5000068, PLACE5000070, PLACE5000080, PLACE5000105, PLACE5000115, PLACE5000116, PLACE5000129, PLACE5000139, PLACE5000153, PLACE5000171, PLACE5000178, PLACE5000245, PLACE5000260, PLACE5000282, PLACE5000297, PLACE5000372, PLACE5000492, PLACE5000522, PLACE5000527, PLACE6000012, PLACE6000044, PLACE6000055, PLACE6000070, PLACE6000137, PLACE6000191, PLACE6000205, PLACE6000231, PLACE6000296, PLACE6000314, PLACE6000325, PLACE6000348, PLACE6000371, PLACE6000424, PLACE6000426, PLACE6000429, PLACE6000450, PLACE6000463, PLACE6000523, PLACE6000550, PLACE6000552, PLACE6000555, PLACE6000630, PLACE6000953, PLACE6001118, PLACE6001153, PLACE6001294, PLACE6001536, PLACE6001557, PLACE6001712, PLACE6001740, PLACE6001886, PLACE6001923, PLACE6001925, PLACE6001933, PLACE6002011, PLACE6002016, PLACE6002056, PLACE6002157, PLACE6002312, PLACE6002323, PLACE6002345, PLACE6002462, PLACE6002647, PLACE6002668, PLACE6002699, PLACE6002710, PLACE6002871, PLACE6002949, PLACE6002960, PLACE6003004, PLACE6003077, PLACE6003094, PLACE6003109, PLACE6003204, PLACE6003218, PLACE6003372, PLACE6003383, PLACE6003393, PLACE6003399, PLACE6003539, PLACE6003705, PLACE6003740, PLACE6003745, PLACE6003771, PLACE6003796, PLACE6003839, PLACE6003850, PLACE6004101, PLACE6004219, PLACE6004336, PLACE6004368, PLACE6004380, PLACE6004396, PLACE6004454, PLACE6004464, PLACE6004491, PLACE6004663, PLACE6004687, PLACE6004738, PLACE6004931, PLACE6004966, PLACE6004993, PLACE6005007, PLACE6005029, PLACE6005108, PLACE6005234, PLACE6005283, PLACE6005294, PLACE6005328, PLACE6005351, PLACE6005423, PLACE6005487, PLACE6005535, PLACE6005546, PLACE6005559, PLACE6005579, PLACE6005786, PLACE6006042, PLACE6006077, PLACE6006158, PLACE6006186, PLACE6006217, PLACE6006222, PLACE6006266, PLACE6006287, PLACE6006394, PLACE6006418, PLACE6006474, PLACE6006566, PLACE6006697, PLACE6006822, PLACE6006871, PLACE6006905, PLACE6006988, PLACE6007050, PLACE6007239, PLACE6007242, PLACE6007309, PLACE6007380, PLACE6007433, PLACE6007482, PLACE6007687, PLACE6007787, PLACE6007798, PLACE6007807, PLACE6007925, PLACE6008036, PLACE6008094, PLACE6008126, PLACE6008285, PLACE6008453, PLACE6008640, PLACE6008750, PLACE6008768, PLACE6008793, PLACE6008824, PLACE6008989, PLACE6009006, PLACE6009008, PLACE6009228, PLACE6009237, PLACE6009419, PLACE6009430, PLACE6009482, PLACE6009524, PLACE6009527, PLACE6009560, PLACE6009590, PLACE6009821, PLACE6009835, PLACE6009853, PLACE6010077, PLACE6010463, PLACE6010485, PLACE6010568, PLACE6010701, PLACE6010704, PLACE6010732, PLACE6010765, PLACE6010848, PLACE6010925, PLACE6010991, PLACE6011102, PLACE6011156, PLACE6011211, PLACE6011260, PLACE6011334, PLACE6011627, PLACE6011774, PLACE6011881, PLACE6011907, PLACE6011970, PLACE6011975, PLACE6012108, PLACE6012168, PLACE6012297, PLACE6012308, PLACE6012574, PLACE6012908, PLACE6012936, PLACE6012942, PLACE6013222, PLACE6013232, PLACE6013288, PLACE6013386, PLACE6013400, PLACE6013650, PLACE6013883, PLACE6013884, PLACE6013885, PLACE6014043, PLACE6014516, PLACE6014882, PLACE6015211, PLACE6015322, PLACE6015460, PLACE6015513, PLACE6015591, PLACE6015731, PLACE6015939, PLACE6016030, PLACE6016093, PLACE6016105, PLACE6016160, PLACE6016210, PLACE6016254, PLACE6016383, PLACE6016984, PLACE6017002, PLACE6017431, PLACE6017564, PLACE6017578, PLACE6017626, PLACE6017701, PLACE6017714, PLACE6017788, PLACE6017791, PLACE6018107, PLACE6018187, PLACE6018235, PLACE6018287, PLACE6018441, PLACE6018487, PLACE6018497, PLACE6018769, PLACE6018834, PLACE6018843, PLACE6018863, PLACE6018938, PLACE6019385, PLACE6019542, PLACE6019600, PLACE6019674, PLACE6019676, PLACE6019701, PLACE6019932, PLACE6020031, PLACE6020145, PLACE7000167, PLACE7000170, PLACE7000266, PLACE7000333, PLACE7000410, PLACE7000502, PLACE7000707, PLACE7001022, PLACE7001544, PLACE7001759, PLACE7001936, PLACE7002303, PLACE7002641, PLACE7003639, PLACE7003657, PLACE7003684, PLACE7003985, PLACE7004961, PLACE7005169, PLACE7005671, PLACE7005840, PLACE7006051, PLACE7006090, PLACE7006240, PLACE7006268, PLACE7006275, PLACE7006498, PLACE7006540, PLACE7007379, PLACE7007644, PLACE7007973, PLACE7008136, PLACE7008431, PLACE7008623, PLACE7008766, PLACE7009563, PROST1000033, PROST1000039, PROST1000065, PROST1000083, PROST1000085, PROST1000110, PROST1000120, PROST1000123, PROST1000136, PROST1000144, PROST1000145, PROST1000152, PROST1000167, PROST1000184, PROST1000217, PROST1000246, PROST1000262, PROST1000298, PROST1000322, PROST1000334, PROST1000343, PROST1000362, PROST1000377, PROST1000383, PROST1000412, PROST1000419, PROST1000451, PROST1000480, PROST1000485, PROST1000493, PROST1000512, PROST1000527, PROST1000528, PROST1000536, PROST1000559, PROST1000575, PROST2000036, PROST2000053, PROST2000067, PROST2000079, PROST2000105, PROST2000143, PROST2000162, PROST2000165, PROST2000203, PROST2000206, PROST2000212, PROST2000241, PROST2000267, PROST2000273, PROST2000274, PROST2000277, PROST2000325, PROST2000337, PROST2000432, PROST2000452, PROST2000463, PROST2000470, PROST2000505, PROST2000572, PROST2000717, PROST2000760, PROST2000835, PROST2000893, PROST2000961, PROST2001116, PROST2001138, PROST2001213, PROST2001414, PROST2001415, PROST2001465, PROST2001540, PROST2001552, PROST2001599, PROST2001611, PROST2001636, PROST2001739, PROST2001796, PROST2001805, PROST2001823, PROST2001899, PROST2001998, PROST2002078, PROST2002101, PROST2002212, PROST2002338, PROST2002488, PROST2002489, PROST2002527, PROST2002591, PROST2002602, PROST2002633, PROST2002682, PROST2002685, PROST2002722, PROST2002736, PROST2002842, PROST2002897, PROST2002906, PROST2002927, PROST2002960, PROST2003102, PROST2003117, PROST2003210, PROST2003302, PROST2003303, PROST2003324, PROST2003340, PROST2003428, PROST2003472, PROST2003517, PROST2003537, PROST2003563, PROST2003577, PROST2003583, PROST2003586, PROST2003628, PROST2003635, PROST2003674, PROST2003676, PROST2003725, PROST2003732, PROST2003775, PROST2003922, PROST2003930, PROST2004115, PROST2004142, PROST2004146, PROST2004161, PROST2004251, PROST2004258, PROST2004332, PROST2004481, PROST2004526, PROST2004727, PROST2004742, PROST2004817, PROST2005039, PROST2005076, PROST2005121, PROST2005131, PROST2005228, PROST2005272, PROST2005426, PROST2005630, PROST2005788, PROST2005880, PROST2005886, PROST2005904, PROST2005919, PROST2005943, PROST2006008, PROST2006020, PROST2006196, PROST2006201, PROST2006282, PROST2006343, PROST2006450, PROST2006491, PROST2006510, PROST2006536, PROST2006579, PROST2006688, PROST2006766, PROST2006782, PROST2006933, PROST2007122, PROST2007200, PROST2007237, PROST2007289, PROST2007317, PROST2007328, PROST2007382, PROST2007389, PROST2007416, PROST2007528, PROST2007612, PROST2007818, PROST2007871, PROST2007950, PROST2007956, PROST2007974, PROST2007988, PROST2008079, PROST2008088, PROST2008243, PROST2008245, PROST2008268, PROST2008447, PROST2008468, PROST2008472, PROST2008516, PROST2008724, PROST2008835, PROST2008993, PROST2009022, PROST2009208, PROST2009222, PROST2009254, PROST2009273, PROST2009320, PROST2009365, PROST2009388, PROST2009400, PROST2009470, PROST2009483, PROST2009571, PROST2009731, PROST2009736, PROST2009795, PROST2009901, PROST2009909, PROST2010046, PROST2010219, PROST2010250, PROST2010318, PROST2010326, PROST2010400, PROST2010545, PROST2010579, PROST2010606, PROST2010782, PROST2010885, PROST2011012, PROST2011038, PROST2011297, PROST2011439, PROST2011482, PROST2011631, PROST2012005, PROST2012088, PROST2012140, PROST2012157, PROST2012190, PROST2012249, PROST2012353, PROST2012400, PROST2012448, PROST2012504, PROST2012542, PROST2012550, PROST2012740, PROST2012780, PROST2012888, PROST2012890, PROST2013032, PROST2013053, PROST2013260, PROST2013327, PROST2013531, PROST2013605, PROST2013627, PROST2013873, PROST2013880, PROST2014422, PROST2014585, PROST2014601, PROST2014659, PROST2014916, PROST2014925, PROST2015124, PROST2015137, PROST2015198, PROST2015243, PROST2015246, PROST2015251, PROST2015287, PROST2015457, PROST2015464, PROST2015537, PROST2015545, PROST2015551, PROST2015636, PROST2015710, PROST2015756, PROST2015877, PROST2015924, PROST2015932, PROST2016195, PROST2016246, PROST2016379, PROST2016444, PROST2016462, PROST2016499, PROST2016512, PROST2016566, PROST2016582, PROST2016668, PROST2016684, PROST2016777, PROST2016829, PROST2016860, PROST2016980, PROST2017098, PROST2017367, PROST2017413, PROST2017441, PROST2017578, PROST2017612, PROST2017617, PROST2017700, PROST2017701, PROST2017729, PROST2017836, PROST2017972, PROST2018030, PROST2018090, PROST2018235, PROST2018437, PROST2018487, PROST2018511, PROST2018583, PROST2018588, PROST2018607, PROST2018788, PROST2018902, PROST2018922, PROST2018977, PROST2019398, PROST2019487, PROST2019781, PUAEN1000039, PUAEN1000081, PUAEN1000085, PUAEN1000087, PUAEN1000121, PUAEN1000161, PUAEN1000175, PUAEN1000239, PUAEN1000275, PUAEN1000276, PUAEN1000288, PUAEN2000080, PUAEN2000175, PUAEN2000247, PUAEN2000312, PUAEN2000394, PUAEN2000497, PUAEN2000535, PUAEN2000594, PUAEN2000684, PUAEN2000942, PUAEN2001260, PUAEN2001345, PUAEN2001526, PUAEN2001882, PUAEN2002473, PUAEN2002552, PUAEN2002568, PUAEN2002616, PUAEN2002758, PUAEN2003018, PUAEN2003079, PUAEN2003116, PUAEN2003408, PUAEN2003517, PUAEN2003954, PUAEN2004067, PUAEN2004083, PUAEN2004511, PUAEN2004525, PUAEN2004875, PUAEN2005110, PUAEN2005247, PUAEN2005502, PUAEN2005588, PUAEN2005930, PUAEN2006029, PUAEN2006328, PUAEN2006335, PUAEN2006578, PUAEN2006639, PUAEN2006761, PUAEN2007350, PUAEN2007785, PUAEN2008123, PUAEN2008228, PUAEN2008314, PUAEN2008815, PUAEN2008939, PUAEN2008980, PUAEN2008985, PUAEN2009348, PUAEN2009534, PUAEN2009655, PUAEN2009795, PUAEN2009852, PUAEN2010346, RECTM1000051, RECTM1000141, RECTM2000220, RECTM2000349, RECTM2000433, RECTM2000510, RECTM2001307, RECTM2001347, RECTM2001519, RECTM2001666, RECTM2001691, RECTM2001749, RECTM2002172, RECTM2002602, RECTM2002632, SALGL1000005, SALGL1000024, SALGL1000028, SALGL1000065, SALGL1000107, SALGL1000171, SKMUS1000014, SKMUS1000030, SKMUS1000064, SKMUS1000067, SKMUS1000102, SKMUS1000104, SKMUS1000118, SKMUS1000124, SKMUS1000129, SKMUS1000138, SKMUS1000176, SKMUS2000061, SKMUS2000078, SKMUS2000137, SKMUS2000198, SKMUS2000287, SKMUS2000317, SKMUS2000330, SKMUS2000339, SKMUS2000365, SKMUS2000390, SKMUS2000416, SKMUS2000458, SKMUS2000467, SKMUS2000468, SKMUS2000515, SKMUS2000679, SKMUS2000690, SKMUS2000701, SKMUS2000705, SKMUS2000710, SKMUS2000724, SKMUS2000726, SKMUS2000757, SKMUS2000774, SKMUS2000780, SKMUS2000821, SKMUS2000847, SKMUS2000863, SKMUS2000894, SKMUS2000898, SKMUS2000933, SKMUS2000945, SKMUS2000961, SKMUS2000973, SKMUS2000980, SKMUS2001014, SKMUS2001147, SKMUS2001157, SKMUS2001164, SKMUS2001199, SKMUS2001215, SKMUS2001247, SKMUS2001271, SKMUS2001287, SKMUS2001323, SKMUS2001364, SKMUS2001398, SKMUS2001492, SKMUS2001580, SKMUS2001585, SKMUS2001608, SKMUS2001631, SKMUS2001662, SKMUS2001663, SKMUS2001668, SKMUS2001671, SKMUS2001683, SKMUS2001693, SKMUS2001695, SKMUS2001703, SKMUS2001740, SKMUS2001742, SKMUS2001823, SKMUS2001850, SKMUS2002077, SKMUS2002084, SKMUS2002153, SKMUS2002475, SKMUS2002602, SKMUS2002634, SKMUS2002693, SKMUS2002821, SKMUS2002840, SKMUS2002920, SKMUS2003034, SKMUS2003074, SKMUS2003168, SKMUS2003194, SKMUS2003744, SKMUS2004044, SKMUS2004047, SKMUS2004483, SKMUS2004667, SKMUS2004897, SKMUS2004903, SKMUS2005428, SKMUS2006394, SKMUS2006481, SKMUS2006755, SKMUS2007315, SKMUS2007359, SKMUS2007568, SKMUS2007740, SKMUS2007816, SKMUS2007915, SKMUS2008338, SKMUS2008407, SKMUS2008474, SKMUS2008585, SKMUS2008607, SKMUS2009190, SKMUS2009232, SKMUS2009479, SKMUS2009557, SKNMC1000110, SKNMC1000123, SKNMC1000124, SKNMC1000137, SKNMC1000159, SKNMC1000229, SKNMC2000256, SKNMC2000356, SKNMC2000374, SKNMC2000583, SKNMC2000593, SKNMC2000612, SKNMC2000622, SKNMC2001324, SKNMC2001555, SKNMC2001596, SKNMC2001623, SKNMC2003639, SKNMC2003924, SKNMC2003987, SKNMC2004457, SKNMC2004643, SKNMC2004651, SKNMC2005772, SKNMC2006173, SKNMC2006327, SKNMC2006998, SKNMC2007134, SKNMC2007502, SKNMC2007504, SKNMC2007961, SKNMC2009450, SKNSH1000086, SKNSH1000174, SKNSH1000301, SKNSH1000308, SKNSH1000416, SKNSH2000051, SKNSH2000516, SKNSH2000550, SKNSH2000716, SKNSH2000971, SKNSH2001222, SKNSH2001875, SKNSH2001931, SKNSH2002054, SKNSH2002866, SKNSH2003174, SKNSH2003422, SKNSH2003466, SKNSH2003483, SKNSH2004039, SKNSH2005120, SKNSH2005194, SKNSH2005240, SKNSH2005792, SKNSH2005816, SKNSH2005981, SKNSH2006304, SKNSH2006432, SKNSH2006822, SKNSH2007142, SKNSH2007149, SKNSH2007429, SKNSH2007739, SKNSH2008043, SKNSH2008940, SKNSH2008969, SKNSH2009197, SKNSH2009357, SKNSH2009435, SKNSH2009991, SKNSH2010015, SMINT1000012, SMINT1000016, SMINT1000039, SMINT1000042, SMINT1000048, SMINT1000051, SMINT1000054, SMINT1000057, SMINT1000071, SMINT1000075, SMINT1000078, SMINT1000091, SMINT1000103, SMINT1000118, SMINT1000137, SMINT2000007, SMINT2000032, SMINT2000040, SMINT2000060, SMINT2000084, SMINT2000145, SMINT2000159, SMINT2000176, SMINT2000185, SMINT2000227, SMINT2000229, SMINT2000239, SMINT2000267, SMINT2000396, SMINT2000400, SMINT2000518, SMINT2000529, SMINT2000530, SMINT2000537, SMINT2000538, SMINT2000541, SMINT2000545, SMINT2000558, SMINT2000562, SMINT2000568, SMINT2000609, SMINT2000747, SMINT2000811, SMINT2000824, SMINT2000984, SMINT2001114, SMINT2001158, SMINT2001199, SMINT2001222, SMINT2001348, SMINT2001397, SMINT2001458, SMINT2001461, SMINT2001535, SMINT2001559, SMINT2001609, SMINT2001615, SMINT2001683, SMINT2001731, SMINT2001812, SMINT2001950, SMINT2002126, SMINT2002202, SMINT2002210, SMINT2002224, SMINT2002281, SMINT2002311, SMINT2002314, SMINT2002328, SMINT2002414, SMINT2002457, SMINT2002620, SMINT2002743, SMINT2002778, SMINT2002880, SMINT2002882, SMINT2002884, SMINT2002899, SMINT2002974, SMINT2002976, SMINT2003074, SMINT2003128, SMINT2003317, SMINT2003386, SMINT2003423, SMINT2003505, SMINT2003551, SMINT2003569, SMINT2003641, SMINT2003644, SMINT2003866, SMINT2003905, SMINT2004023, SMINT2004037, SMINT2004047, SMINT2004086, SMINT2004144, SMINT2004280, SMINT2004339, SMINT2004473, SMINT2004547, SMINT2004729, SMINT2004781, SMINT2004891, SMINT2004909, SMINT2004992, SMINT2005075, SMINT2005161, SMINT2005174, SMINT2005213, SMINT2005330, SMINT2005387, SMINT2005405, SMINT2005621, SMINT2005623, SMINT2005624, SMINT2005688, SMINT2005800, SMINT2006078, SMINT2006205, SMINT2006331, SMINT2006596, SMINT2006641, SMINT2006648, SMINT2006708, SMINT2006716, SMINT2006801, SMINT2007062, SMINT2007101, SMINT2007140, SMINT2007219, SMINT2007294, SMINT2007365, SMINT2007391, SMINT2007433, SMINT2007508, SMINT2007526, SMINT2007579, SMINT2007790, SMINT2007796, SMINT2007867, SMINT2007932, SMINT2008042, SMINT2008054, SMINT2008277, SMINT2008329, SMINT2008455, SMINT2008491, SMINT2008531, SMINT2008545, SMINT2008558, SMINT2008590, SMINT2008625, SMINT2008690, SMINT2008715, SMINT2008720, SMINT2008817, SMINT2008844, SMINT2008869, SMINT2008917, SMINT2009119, SMINT2009121, SMINT2009212, SMINT2009216, SMINT2009259, SMINT2009272, SMINT2009292, SMINT2009363, SMINT2009415, SMINT2009468, SMINT2009505, SMINT2009529, SMINT2009832, SMINT2009895, SMINT2009902, SMINT2009973, SMINT2010015, SMINT2010068, SMINT2010076, SMINT2010144, SMINT2010200, SMINT2010278, SMINT2010324, SMINT2010326, SMINT2010369, SMINT2010426, SMINT2010500, SMINT2010533, SMINT2010629, SMINT2010672, SMINT2010753, SMINT2010853, SMINT2010897, SMINT2010901, SMINT2010959, SMINT2010997, SMINT2011033, SMINT2011066, SMINT2011273, SMINT2011311, SMINT2011406, SMINT2011509, SMINT2011567, SMINT2011588, SMINT2011888, SMINT2011958, SMINT2012040, SMINT2012122, SMINT2012179, SMINT2012285, SMINT2012734, SMINT2012793, SMINT2013031, SMINT2013129, SMINT2013170, SMINT2013228, SMINT2013613, SMINT2013626, SMINT2013695, SMINT2013833, SMINT2013890, SMINT2014166, SMINT2014282, SMINT2014443, SMINT2014480, SMINT2014489, SMINT2014721, SMINT2015006, SMINT2015294, SMINT2015306, SMINT2015326, SMINT2015353, SMINT2015454, SMINT2015518, SMINT2015745, SMINT2015787, SMINT2015810, SMINT2016122, SMINT2016146, SMINT2016286, SMINT2016313, SMINT2016396, SMINT2016412, SMINT2016440, SMINT2016477, SMINT2016544, SMINT2016857, SMINT2017134, SMINT2017319, SMINT2017324, SMINT2017410, SMINT2017431, SMINT2017432, SMINT2017436, SMINT2017599, SMINT2017659, SMINT2017736, SMINT2017781, SMINT2017855, SMINT2017964, SMINT2017974, SMINT2018343, SMINT2018353, SMINT2018592, SMINT2018681, SMINT2019017, SMINT2019105, SMINT2019142, SMINT2019153, SMINT2019200, SPLEN1000013, SPLEN1000041, SPLEN1000049, SPLEN1000056, SPLEN1000087, SPLEN1000089, SPLEN1000091, SPLEN1000134, SPLEN1000139, SPLEN1000143, SPLEN1000144, SPLEN1000145, SPLEN1000156, SPLEN1000163, SPLEN1000178, SPLEN2000020, SPLEN2000047, SPLEN2000064, SPLEN2000072, SPLEN2000126, SPLEN2000134, SPLEN2000143, SPLEN2000189, SPLEN2000197, SPLEN2000205, SPLEN2000210, SPLEN2000222, SPLEN2000242, SPLEN2000243, SPLEN2000247, SPLEN2000258, SPLEN2000270, SPLEN2000307, SPLEN2000310, SPLEN2000350, SPLEN2000357, SPLEN2000364, SPLEN2000402, SPLEN2000414, SPLEN2000420, SPLEN2000448, SPLEN2000450, SPLEN2000464, SPLEN2000496, SPLEN2000515, SPLEN2000516, SPLEN2000537, SPLEN2000541, SPLEN2000607, SPLEN2000630, SPLEN2000695, SPLEN2000839, SPLEN2000882, SPLEN2001135, SPLEN2001176, SPLEN2001227, SPLEN2001245, SPLEN2001278, SPLEN2001354, SPLEN2001367, SPLEN2001383, SPLEN2001476, SPLEN2001503, SPLEN2001510, SPLEN2001626, SPLEN2001650, SPLEN2001689, SPLEN2001710, SPLEN2001781, SPLEN2001881, SPLEN2001912, SPLEN2001945, SPLEN2002053, SPLEN2002133, SPLEN2002147, SPLEN2002166, SPLEN2002175, SPLEN2002223, SPLEN2002272, SPLEN2002314, SPLEN2002343, SPLEN2002354, SPLEN2002385, SPLEN2002419, SPLEN2002451, SPLEN2002462, SPLEN2002477, SPLEN2002662, SPLEN2002695, SPLEN2002707, SPLEN2002744, SPLEN2002917, SPLEN2002931, SPLEN2002957, SPLEN2003160, SPLEN2003204, SPLEN2003219, SPLEN2003297, SPLEN2003396, SPLEN2003678, SPLEN2003878, SPLEN2003918, SPLEN2003924, SPLEN2004060, SPLEN2004078, SPLEN2004124, SPLEN2004148, SPLEN2004181, SPLEN2004220, SPLEN2004346, SPLEN2004368, SPLEN2004611, SPLEN2004880, SPLEN2004984, SPLEN2005009, SPLEN2005227, SPLEN2005272, SPLEN2005342, SPLEN2005416, SPLEN2005450, SPLEN2005474, SPLEN2005560, SPLEN2005727, SPLEN2005790, SPLEN2005818, SPLEN2005838, SPLEN2005869, SPLEN2005927, SPLEN2005939, SPLEN2006122, SPLEN2006232, SPLEN2006268, SPLEN2006283, SPLEN2006325, SPLEN2006389, SPLEN2006425, SPLEN2006701, SPLEN2006785, SPLEN2006875, SPLEN2007182, SPLEN2007276, SPLEN2007314, SPLEN2007326, SPLEN2007350, SPLEN2007388, SPLEN2007619, SPLEN2007653, SPLEN2007689, SPLEN2007695, SPLEN2007750, SPLEN2007794, SPLEN2007879, SPLEN2007926, SPLEN2007951, SPLEN2008007, SPLEN2008135, SPLEN2008164, SPLEN2008317, SPLEN2008460, SPLEN2008591, SPLEN2008786, SPLEN2009081, SPLEN2009088, SPLEN2009163, SPLEN2009315, SPLEN2009340, SPLEN2009512, SPLEN2009541, SPLEN2009548, SPLEN2009555, SPLEN2009581, SPLEN2009733, SPLEN2009803, SPLEN2009884, SPLEN2009918, SPLEN2009970, SPLEN2010004, SPLEN2010112, SPLEN2010119, SPLEN2010146, SPLEN2010187, SPLEN2010350, SPLEN2010395, SPLEN2010415, SPLEN2010447, SPLEN2010469, SPLEN2010510, SPLEN2010530, SPLEN2010534, SPLEN2010588, SPLEN2010625, SPLEN2010800, SPLEN2010846, SPLEN2010862, SPLEN2010978, SPLEN2011018, SPLEN2011021, SPLEN2011025, SPLEN2011086, SPLEN2011139, SPLEN2011145, SPLEN2011248, SPLEN2011252, SPLEN2011422, SPLEN2011672, SPLEN2011678, SPLEN2011766, SPLEN2011805, SPLEN2011820, SPLEN2011830, SPLEN2011931, SPLEN2011981, SPLEN2012115, SPLEN2012175, SPLEN2012179, SPLEN2012185, SPLEN2012234, SPLEN2012523, SPLEN2012524, SPLEN2012525, SPLEN2012606, SPLEN2012611, SPLEN2012619, SPLEN2012725, SPLEN2012743, SPLEN2012756, SPLEN2012800, SPLEN2012846, SPLEN2012889, SPLEN2012961, SPLEN2013108, SPLEN2013503, SPLEN2013644, SPLEN2013648, SPLEN2013673, SPLEN2013690, SPLEN2013714, SPLEN2013753, SPLEN2013821, SPLEN2013857, SPLEN2013860, SPLEN2013910, SPLEN2013923, SPLEN2013936, SPLEN2014041, SPLEN2014063, SPLEN2014073, SPLEN2014136, SPLEN2014199, SPLEN2014210, SPLEN2014293, SPLEN2014318, SPLEN2014381, SPLEN2014452, SPLEN2014454, SPLEN2014486, SPLEN2014543, SPLEN2014572, SPLEN2014645, SPLEN2014669, SPLEN2014711, SPLEN2014739, SPLEN2014860, SPLEN2014865, SPLEN2014919, SPLEN2014920, SPLEN2014924, SPLEN2014937, SPLEN2014946, SPLEN2015031, SPLEN2015094, SPLEN2015121, SPLEN2015129, SPLEN2015158, SPLEN2015166, SPLEN2015216, SPLEN2015258, SPLEN2015261, SPLEN2015267, SPLEN2015276, SPLEN2015415, SPLEN2015433, SPLEN2015593, SPLEN2015674, SPLEN2015679, SPLEN2015707, SPLEN2015730, SPLEN2015746, SPLEN2015815, SPLEN2015891, SPLEN2015899, SPLEN2016045, SPLEN2016053, SPLEN2016069, SPLEN2016098, SPLEN2016135, SPLEN2016241, SPLEN2016250, SPLEN2016304, SPLEN2016356, SPLEN2016421, SPLEN2016480, SPLEN2016531, SPLEN2016533, SPLEN2016541, SPLEN2016552, SPLEN2016554, SPLEN2016602, SPLEN2016627, SPLEN2016678, SPLEN2016743, SPLEN2016781, SPLEN2016840, SPLEN2016863, SPLEN2016922, SPLEN2016932, SPLEN2016973, SPLEN2017043, SPLEN2017104, SPLEN2017147, SPLEN2017187, SPLEN2017189, SPLEN2017212, SPLEN2017426, SPLEN2017452, SPLEN2017538, SPLEN2017613, SPLEN2017620, SPLEN2017643, SPLEN2017687, SPLEN2017740, SPLEN2017999, SPLEN2018098, SPLEN2018112, SPLEN2018157, SPLEN2018159, SPLEN2018180, SPLEN2018181, SPLEN2018280, SPLEN2018285, SPLEN2018299, SPLEN2018302, SPLEN2018364, SPLEN2018395, SPLEN2018643, SPLEN2018683, SPLEN2018732, SPLEN2018749, SPLEN2018933, SPLEN2019008, SPLEN2019043, SPLEN2019077, SPLEN2019092, SPLEN2019102, SPLEN2019131, SPLEN2019311, SPLEN2019323, SPLEN2019349, SPLEN2019375, SPLEN2019446, SPLEN2019471, SPLEN2019480, SPLEN2019505, SPLEN2019571, SPLEN2019575, SPLEN2019709, SPLEN2019774, SPLEN2019793, SPLEN2019811, SPLEN2019839, SPLEN2019985, SPLEN2020034, SPLEN2020153, SPLEN2020154, SPLEN2020166, SPLEN2020183, SPLEN2020223, SPLEN2020359, SPLEN2020427, SPLEN2020467, SPLEN2020512, SPLEN2020608, SPLEN2020777, SPLEN2020805, SPLEN2021057, SPLEN2021122, SPLEN2021157, SPLEN2021194, SPLEN2021231, SPLEN2021273, SPLEN2021295, SPLEN2021298, SPLEN2021383, SPLEN2021417, SPLEN2021440, SPLEN2021458, SPLEN2021463, SPLEN2021560, SPLEN2021701, SPLEN2021795, SPLEN2021983, SPLEN2021991, SPLEN2022040, SPLEN2022162, SPLEN2022227, SPLEN2022522, SPLEN2022591, SPLEN2022785, SPLEN2022920, SPLEN2023024, SPLEN2023118, SPLEN2023160, SPLEN2023423, SPLEN2023710, SPLEN2023733, SPLEN2023791, SPLEN2023977, SPLEN2024070, SPLEN2024127, SPLEN2024232, SPLEN2024273, SPLEN2024383, SPLEN2024530, SPLEN2024571, SPLEN2024577, SPLEN2024617, SPLEN2024737, SPLEN2024922, SPLEN2024956, SPLEN2024990, SPLEN2025012, SPLEN2025017, SPLEN2025219, SPLEN2025491, SPLEN2025626, SPLEN2025820, SPLEN2026144, SPLEN2026411, SPLEN2026765, SPLEN2027157, SPLEN2027395, SPLEN2027488, SPLEN2027780, SPLEN2027852, SPLEN2027868, SPLEN2027995, SPLEN2028046, SPLEN2028066, SPLEN2028138, SPLEN2028365, SPLEN2028417, SPLEN2028424, SPLEN2028593, SPLEN2028844, SPLEN2028914, SPLEN2028994, SPLEN2029051, SPLEN2029176, SPLEN2029295, SPLEN2029380, SPLEN2029522, SPLEN2029683, SPLEN2029727, SPLEN2029904, SPLEN2030250, SPLEN2030335, SPLEN2030371, SPLEN2030397, SPLEN2030479, SPLEN2030495, SPLEN2030562, SPLEN2030847, SPLEN2031004, SPLEN2031125, SPLEN2031674, SPLEN2031724, SPLEN2031780, SPLEN2032036, SPLEN2032112, SPLEN2032154, SPLEN2032157, SPLEN2032321, SPLEN2032356, SPLEN2032677, SPLEN2032813, SPLEN2032924, SPLEN2033098, SPLEN2033153, SPLEN2033333, SPLEN2033490, SPLEN2033539, SPLEN2033921, SPLEN2033996, SPLEN2034021, SPLEN2034081, SPLEN2034252, SPLEN2034551, SPLEN2034601, SPLEN2034678, SPLEN2034781, SPLEN2034864, SPLEN2034934, SPLEN2035318, SPLEN2035615, SPLEN2036076, SPLEN2036103, SPLEN2036326, SPLEN2036475, SPLEN2036501, SPLEN2036579, SPLEN2036608, SPLEN2036702, SPLEN2036712, SPLEN2036821, SPLEN2036953, SPLEN2037077, SPLEN2037319, SPLEN2037444, SPLEN2037580, SPLEN2037630, SPLEN2037678, SPLEN2037722, SPLEN2037891, SPLEN2038055, SPLEN2038180, SPLEN2038407, SPLEN2038473, SPLEN2038834, SPLEN2039311, SPLEN2039672, SPLEN2039697, SPLEN2039845, SPLEN2039936, SPLEN2040222, SPLEN2040824, SPLEN2041304, SPLEN2041306, SPLEN2041310, SPLEN2041585, SPLEN2041645, SPLEN2041700, SPLEN2041720, SPLEN2041977, SPLEN2042051, SPLEN2042303, SPLEN2042521, SPLEN2042598, SPLEN2042714, SPLEN2042920, STOMA1000013, STOMA1000047, STOMA1000052, STOMA1000074, STOMA1000091, STOMA1000117, STOMA1000133, STOMA1000175, STOMA1000186, STOMA1000189, STOMA1000190, STOMA1000191, STOMA2000032, STOMA2000072, STOMA2000088, STOMA2000104, STOMA2000121, STOMA2000148, STOMA2000168, STOMA2000183, STOMA2000188, STOMA2000257, STOMA2000279, STOMA2000383, STOMA2000386, STOMA2000478, STOMA2000529, STOMA2000539, STOMA2000567, STOMA2000640, STOMA2000678, STOMA2000686, STOMA2000888, STOMA2001025, STOMA2001389, STOMA2002141, STOMA2002367, STOMA2002688, STOMA2002828, STOMA2003158, STOMA2003289, STOMA2003444, STOMA2003477, STOMA2003646, STOMA2003716, STOMA2003781, STOMA2003894, STOMA2004194, STOMA2004294, STOMA2004663, STOMA2004668, STOMA2004852, STOMA2004873, STOMA2004884, STOMA2004893, STOMA2004925, STOMA2005120, STOMA2005664, STOMA2005667, STOMA2005746, STOMA2005782, STOMA2006181, STOMA2006213, STOMA2006229, STOMA2006325, STOMA2006330, STOMA2006398, STOMA2006447, STOMA2006780, STOMA2006904, STOMA2007269, STOMA2007680, STOMA2007745, STOMA2008050, STOMA2008361, STOMA2008546, STOMA2008614, STOMA2008638, STOMA2008838, STOMA2009250, STOMA2009253, STOMA2009256, SYNOV1000045, SYNOV1000049, SYNOV1000118, SYNOV1000128, SYNOV1000164, SYNOV1000190, SYNOV1000256, SYNOV1000374, SYNOV2000152, SYNOV2000171, SYNOV2000173, SYNOV2000177, SYNOV2000178, SYNOV2000193, SYNOV2000251, SYNOV2000279, SYNOV2000291, SYNOV2000297, SYNOV2000397, SYNOV2000426, SYNOV2000601, SYNOV2000700, SYNOV2000824, SYNOV2000923, SYNOV2001014, SYNOV2001035, SYNOV2001088, SYNOV2001111, SYNOV2001212, SYNOV2001251, SYNOV2001300, SYNOV2001356, SYNOV2001374, SYNOV2001390, SYNOV2001451, SYNOV2001457, SYNOV2001468, SYNOV2001581, SYNOV2001648, SYNOV2001660, SYNOV2003326, SYNOV2005216, SYNOV2005448, SYNOV2005541, SYNOV2005673, SYNOV2005817, SYNOV2005962, SYNOV2006430, SYNOV2006620, SYNOV2007758, SYNOV2007965, SYNOV2008765, SYNOV2011233, SYNOV2012326, SYNOV2013365, SYNOV2013637, SYNOV2014157, SYNOV2014364, SYNOV2016124, SYNOV2016837, SYNOV2017055, SYNOV2017179, SYNOV2018921, SYNOV2019280, SYNOV2020085, SYNOV2020463, SYNOV2021320, SYNOV3000184, SYNOV3000231, SYNOV3000302, SYNOV3000345, SYNOV4000249, SYNOV4000472, SYNOV4000598, SYNOV4000706, SYNOV4001224, SYNOV4001326, SYNOV4001342, SYNOV4001395, SYNOV4002001, SYNOV4002392, SYNOV4002875, SYNOV4002883, SYNOV4003174, SYNOV4003322, SYNOV4003681, SYNOV4003981, SYNOV4004184, SYNOV4004741, SYNOV4004823, SYNOV4004914, SYNOV4005256, SYNOV4005570, SYNOV4005739, SYNOV4005889, SYNOV4005981, SYNOV4005989, SYNOV4006256, SYNOV4006327, SYNOV4006542, SYNOV4007012, SYNOV4007215, SYNOV4007360, SYNOV4007430, SYNOV4007521, SYNOV4007553, SYNOV4007711, SYNOV4008336, SYNOV4009129, SYNOV4009139, SYNOV4009298, T1ESE2000116, T1ESE2000609, T1ESE2000904, T1ESE2002665, TBAES2000004, TBAES2000059, TBAES2000116, TBAES2000255, TBAES2000315, TBAES2000352, TBAES2000932, TBAES2001171, TBAES2001220, TBAES2001229, TBAES2001258, TBAES2001492, TBAES2001553, TBAES2001751, TBAES2003435, TBAES2003492, TBAES2003550, TBAES2003702, TBAES2003917, TBAES2004055, TBAES2004105, TBAES2004939, TBAES2005157, TBAES2005361, TBAES2005543, TBAES2006568, TBAES2006881, TBAES2007379, TBAES2007428, TBAES2007481, TBAES2007504, TBAES2007548, TBAES2007697, TBAES2007862, TBAES2007964, TBAES2008133, TCERX2000171, TCERX2000613, TCERX2000998, TCOLN1000037, TCOLN2000139, TCOLN2000236, TCOLN2000641, TCOLN2001268, TCOLN2002047, TCOLN2002278, TESOP1000035, TESOP1000127, TESOP1000160, TESOP2000083, TESOP2000090, TESOP2000205, TESOP2000390, TESOP2000400, TESOP2000510, TESOP2000527, TESOP2000569, TESOP2000739, TESOP2000801, TESOP2001122, TESOP2001166, TESOP2001345, TESOP2001474, TESOP2001796, TESOP2001818, TESOP2001849, TESOP2001865, TESOP2001901, TESOP2001953, TESOP2002005, TESOP2002110, TESOP2002150, TESOP2002489, TESOP2002539, TESOP2002545, TESOP2002804, TESOP2003273, TESOP2003308, TESOP2003553, TESOP2003753, TESOP2004110, TESOP2004114, TESOP2004173, TESOP2004214, TESOP2005199, TESOP2005285, TESOP2005485, TESOP2005498, TESOP2005579, TESOP2006041, TESOP2006053, TESOP2006060, TESOP2006068, TESOP2006110, TESOP2006398, TESOP2006670, TESOP2006704, TESOP2006746, TESOP2006865, TESOP2006893, TESOP2007041, TESOP2007052, TESOP2007262, TESOP2007384, TESOP2007636, TESOP2007674, TESOP2007688, TESOP2007725, TESOP2007912, TESOP2007978, TESOP2008127, TESOP2008552, TESOP2008556, TESOP2008563, TESOP2008820, TESOP2009121, TESOP2009201, TESOP2009247, TESOP2009555, TESTI1000018, TESTI1000019, TESTI1000025, TESTI1000029, TESTI1000030, TESTI1000042, TESTI1000045, TESTI1000051, TESTI1000055, TESTI1000064, TESTI1000085, TESTI1000088, TESTI1000093, TESTI1000094, TESTI1000101, TESTI1000109, TESTI1000125, TESTI1000127, TESTI1000128, TESTI1000131, TESTI1000138, TESTI1000142, TESTI1000157, TESTI1000163, TESTI1000169, TESTI1000179, TESTI1000183, TESTI1000191, TESTI1000257, TESTI1000266, TESTI1000319, TESTI1000348, TESTI1000390, TESTI1000391, TESTI1000459, TESTI1000491, TESTI1000545, TESTI2000006, TESTI2000018, TESTI2000044, TESTI2000117, TESTI2000120, TESTI2000147, TESTI2000154, TESTI2000172, TESTI2000177, TESTI2000179, TESTI2000207, TESTI2000208, TESTI2000221, TESTI2000238, TESTI2000253, TESTI2000278, TESTI2000349, TESTI2000358, TESTI2000372, TESTI2000427, TESTI2000431, TESTI2000435, TESTI2000443, TESTI2000452, TESTI2000462, TESTI2000489, TESTI2000520, TESTI2000571, TESTI2000591, TESTI2000600, TESTI2000616, TESTI2000644, TESTI2000671, TESTI2000683, TESTI2000689, TESTI2000695, TESTI2000699, TESTI2000707, TESTI2000745, TESTI2000756, TESTI2000762, TESTI2000784, TESTI2000808, TESTI2000819, TESTI2000830, TESTI2000840, TESTI2000849, TESTI2000850, TESTI2000874, TESTI2000883, TESTI2000951, TESTI2000981, TESTI2001008, TESTI2001049, TESTI2001082, TESTI2001120, TESTI2001134, TESTI2001141, TESTI2001180, TESTI2001208, TESTI2001229, TESTI2001236, TESTI2001237, TESTI2001306, TESTI2001313, TESTI2001330, TESTI2001339, TESTI2001345, TESTI2001352, TESTI2001364, TESTI2001412, TESTI2001420, TESTI2001498, TESTI2001512, TESTI2001518, TESTI2001556, TESTI2001593, TESTI2001621, TESTI2001661, TESTI2001665, TESTI2001671, TESTI2001697, TESTI2001725, TESTI2001758, TESTI2001766, TESTI2001792, TESTI2001793, TESTI2001795, TESTI2001812, TESTI2001815, TESTI2001823, TESTI2001826, TESTI2001827, TESTI2001852, TESTI2001869, TESTI2001879, TESTI2001894, TESTI2001898, TESTI2001915, TESTI2001950, TESTI2001959, TESTI2001968, TESTI2001991, TESTI2002002, TESTI2002012, TESTI2002036, TESTI2002048, TESTI2002057, TESTI2002081, TESTI2002090, TESTI2002105, TESTI2002149, TESTI2002216, TESTI2002223, TESTI2002245, TESTI2002251, TESTI2002256, TESTI2002264, TESTI2002282, TESTI2002293, TESTI2002294, TESTI2002326, TESTI2002351, TESTI2002361, TESTI2002369, TESTI2002406, TESTI2002415, TESTI2002423, TESTI2002453, TESTI2002461, TESTI2002465, TESTI2002467, TESTI2002498, TESTI2002516, TESTI2002544, TESTI2002578, TESTI2002580, TESTI2002618, TESTI2002632, TESTI2002676, TESTI2002690, TESTI2002696, TESTI2002698, TESTI2002700, TESTI2002724, TESTI2002729, TESTI2002752, TESTI2002753, TESTI2002789, TESTI2002802, TESTI2002806, TESTI2002840, TESTI2002866, TESTI2002877, TESTI2002910, TESTI2002912, TESTI2002928, TESTI2002937, TESTI2002965, TESTI2002993, TESTI2003020, TESTI2003031, TESTI2003037, TESTI2003044, TESTI2003059, TESTI2003061, TESTI2003074, TESTI2003089, TESTI2003104, TESTI2003109, TESTI2003117, TESTI2003130, TESTI2003131, TESTI2003139, TESTI2003152, TESTI2003181, TESTI2003193, TESTI2003196, TESTI2003228, TESTI2003236, TESTI2003255, TESTI2003258, TESTI2003277, TESTI2003299, TESTI2003311, TESTI2003321, TESTI2003327, TESTI2003330, TESTI2003347, TESTI2003354, TESTI2003356, TESTI2003372, TESTI2003376, TESTI2003413, TESTI2003418, TESTI2003419, TESTI2003432, TESTI2003454, TESTI2003475, TESTI2003476, TESTI2003498, TESTI2003512, TESTI2003539, TESTI2003545, TESTI2003551, TESTI2003574, TESTI2003579, TESTI2003580, TESTI2003589, TESTI2003596, TESTI2003598, TESTI2003615, TESTI2003638, TESTI2003649, TESTI2003692, TESTI2003718, TESTI2003727, TESTI2003756, TESTI2003768, TESTI2003781, TESTI2003787, TESTI2003824, TESTI2003827, TESTI2003894, TESTI2003911, TESTI2003914, TESTI2003940, TESTI2003962, TESTI2003998, TESTI2004000, TESTI2004073, TESTI2004085, TESTI2004089, TESTI2004111, TESTI2004119, TESTI2004163, TESTI2004169, TESTI2004207, TESTI2004215, TESTI2004227, TESTI2004229, TESTI2004243, TESTI2004255, TESTI2004287, TESTI2004313, TESTI2004318, TESTI2004322, TESTI2004391, TESTI2004399, TESTI2004423, TESTI2004431, TESTI2004432, TESTI2004452, TESTI2004459, TESTI2004490, TESTI2004539, TESTI2004552, TESTI2004560, TESTI2004574, TESTI2004601, TESTI2004611, TESTI2004649, TESTI2004654, TESTI2004675, TESTI2004687, TESTI2004689, TESTI2004700, TESTI2004706, TESTI2004712, TESTI2004734, TESTI2004783, TESTI2004791, TESTI2004793, TESTI2004860, TESTI2004906, TESTI2004920, TESTI2004936, TESTI2004941, TESTI2004971, TESTI2004982, TESTI2004993, TESTI2004994, TESTI2004999, TESTI2005017, TESTI2005025, TESTI2005040, TESTI2005060, TESTI2005085, TESTI2005112, TESTI2005120, TESTI2005153, TESTI2005155, TESTI2005173, TESTI2005267, TESTI2005268, TESTI2005280, TESTI2005307, TESTI2005326, TESTI2005363, TESTI2005376, TESTI2005378, TESTI2005380, TESTI2005391, TESTI2005395, TESTI2005396, TESTI2005415, TESTI2005470, TESTI2005492, TESTI2005564, TESTI2005568, TESTI2005584, TESTI2005588, TESTI2005590, TESTI2005603, TESTI2005609, TESTI2005610, TESTI2005630, TESTI2005672, TESTI2005683, TESTI2005690, TESTI2005692, TESTI2005703, TESTI2005720, TESTI2005731, TESTI2005739, TESTI2005775, TESTI2005827, TESTI2005835, TESTI2005860, TESTI2005892, TESTI2005911, TESTI2005933, TESTI2005937, TESTI2005948, TESTI2005979, TESTI2005982, TESTI2005984, TESTI2005986, TESTI2005987, TESTI2006007, TESTI2006008, TESTI2006015, TESTI2006016, TESTI2006035, TESTI2006040, TESTI2006041, TESTI2006045, TESTI2006067, TESTI2006083, TESTI2006109, TESTI2006125, TESTI2006179, TESTI2006209, TESTI2006212, TESTI2006218, TESTI2006238, TESTI2006255, TESTI2006258, TESTI2006278, TESTI2006333, TESTI2006360, TESTI2006409, TESTI2006425, TESTI2006437, TESTI2006457, TESTI2006460, TESTI2006465, TESTI2006483, TESTI2006499, TESTI2006523, TESTI2006543, TESTI2006565, TESTI2006572, TESTI2006617, TESTI2006624, TESTI2006628, TESTI2006633, TESTI2006643, TESTI2006648, TESTI2006659, TESTI2006660, TESTI2006665, TESTI2006667, TESTI2006677, TESTI2006720, TESTI2006735, TESTI2006744, TESTI2006853, TESTI2006866, TESTI2006872, TESTI2006877, TESTI2006879, TESTI2006894, TESTI2006940, TESTI2006955, TESTI2006978, TESTI2006979, TESTI2006990, TESTI2007040, TESTI2007074, TESTI2007078, TESTI2007113, TESTI2007152, TESTI2007183, TESTI2007220, TESTI2007234, TESTI2007320, TESTI2007346, TESTI2007358, TESTI2007402, TESTI2007405, TESTI2007422, TESTI2007452, TESTI2007464, TESTI2007466, TESTI2007480, TESTI2007490, TESTI2007502, TESTI2007524, TESTI2007533, TESTI2007576, TESTI2007613, TESTI2007657, TESTI2007685, TESTI2007692, TESTI2007749, TESTI2007750, TESTI2007808, TESTI2007814, TESTI2007829, TESTI2007864, TESTI2007867, TESTI2007872, TESTI2007906, TESTI2007922, TESTI2007951, TESTI2007972, TESTI2007973, TESTI2008014, TESTI2008020, TESTI2008032, TESTI2008033, TESTI2008046, TESTI2008081, TESTI2008099, TESTI2008139, TESTI2008144, TESTI2008161, TESTI2008189, TESTI2008204, TESTI2008219, TESTI2008233, TESTI2008234, TESTI2008237, TESTI2008278, TESTI2008320, TESTI2008331, TESTI2008343, TESTI2008387, TESTI2008389, TESTI2008394, TESTI2008405, TESTI2008420, TESTI2008425, TESTI2008440, TESTI2008567, TESTI2008595, TESTI2008621, TESTI2008636, TESTI2008657, TESTI2008684, TESTI2008699, TESTI2008715, TESTI2008762, TESTI2008774, TESTI2008786, TESTI2008822, TESTI2008835, TESTI2008840, TESTI2008884, TESTI2008901, TESTI2008929, TESTI2008946, TESTI2008960, TESTI2009018, TESTI2009091, TESTI2009097, TESTI2009136, TESTI2009185, TESTI2009190, TESTI2009217, TESTI2009325, TESTI2009390, TESTI2009400, TESTI2009412, TESTI2009423, TESTI2009447, TESTI2009462, TESTI2009477, TESTI2009497, TESTI2009502, TESTI2009511, TESTI2009544, TESTI2009545, TESTI2009551, TESTI2009577, TESTI2009585, TESTI2009588, TESTI2009727, TESTI2009739, TESTI2009812, TESTI2009835, TESTI2009853, TESTI2009935, TESTI2009977, TESTI2010009, TESTI2010154, TESTI2010180, TESTI2010239, TESTI2010280, TESTI2010354, TESTI2010396, TESTI2010400, TESTI2010409, TESTI2010572, TESTI2010587, TESTI2010591, TESTI2010682, TESTI2010724, TESTI2010732, TESTI2010734, TESTI2010755, TESTI2010793, TESTI2010806, TESTI2010833, TESTI2010872, TESTI2011009, TESTI2011020, TESTI2011028, TESTI2011033, TESTI2011254, TESTI2011286, TESTI2011294, TESTI2011314, TESTI2011315, TESTI2011394, TESTI2011407, TESTI2011448, TESTI2011480, TESTI2011575, TESTI2011612, TESTI2011665, TESTI2011680, TESTI2011683, TESTI2011712, TESTI2011750, TESTI2011840, TESTI2011846, TESTI2011915, TESTI2011928, TESTI2011971, TESTI2012019, TESTI2012050, TESTI2012090, TESTI2012095, TESTI2012152, TESTI2012155, TESTI2012171, TESTI2012207, TESTI2012231, TESTI2012244, TESTI2012308, TESTI2012356, TESTI2012387, TESTI2012394, TESTI2012444, TESTI2012528, TESTI2012544, TESTI2012550, TESTI2012571, TESTI2012592, TESTI2012617, TESTI2012628, TESTI2012812, TESTI2012834, TESTI2012835, TESTI2012861, TESTI2012900, TESTI2012915, TESTI2012922, TESTI2013001, TESTI2013012, TESTI2013053, TESTI2013144, TESTI2013163, TESTI2013169, TESTI2013212, TESTI2013257, TESTI2013264, TESTI2013268, TESTI2013322, TESTI2013381, TESTI2013382, TESTI2013401, TESTI2013427, TESTI2013468, TESTI2013497, TESTI2013545, TESTI2013546, TESTI2013566, TESTI2013601, TESTI2013604, TESTI2013607, TESTI2013610, TESTI2013691, TESTI2013699, TESTI2013737, TESTI2013767, TESTI2013832, TESTI2013873, TESTI2013889, TESTI2014007, TESTI2014036, TESTI2014097, TESTI2014160, TESTI2014248, TESTI2014254, TESTI2014269, TESTI2014274, TESTI2014324, TESTI2014339, TESTI2014362, TESTI2014385, TESTI2014415, TESTI2014439, TESTI2014474, TESTI2014505, TESTI2014577, TESTI2014578, TESTI2014716, TESTI2014780, TESTI2014800, TESTI2014843, TESTI2014979, TESTI2014988, TESTI2015042, TESTI2015105, TESTI2015180, TESTI2015249, TESTI2015327, TESTI2015331, TESTI2015335, TESTI2015350, TESTI2015375, TESTI2015437, TESTI2015590, TESTI2015610, TESTI2015647, TESTI2015675, TESTI2015710, TESTI2015752, TESTI2015830, TESTI2015914, TESTI2015938, TESTI2015947, TESTI2015987, TESTI2016033, TESTI2016046, TESTI2016101, TESTI2016162, TESTI2016197, TESTI2016278, TESTI2016298, TESTI2016331, TESTI2016337, TESTI2016410, TESTI2016421, TESTI2016509, TESTI2016568, TESTI2016599, TESTI2016629, TESTI2016663, TESTI2016667, TESTI2016688, TESTI2016758, TESTI2016848, TESTI2016863, TESTI2016888, TESTI2016896, TESTI2016922, TESTI2016942, TESTI2016950, TESTI2016996, TESTI2017017, TESTI2017028, TESTI2017069, TESTI2017089, TESTI2017102, TESTI2017113, TESTI2017125, TESTI2017256, TESTI2017305, TESTI2017311, TESTI2017396, TESTI2017507, TESTI2017537, TESTI2017582, TESTI2017584, TESTI2017645, TESTI2017727, TESTI2017740, TESTI2017775, TESTI2017816, TESTI2017832, TESTI2017923, TESTI2017932, TESTI2017951, TESTI2018031, TESTI2018035, TESTI2018060, TESTI2018083, TESTI2018178, TESTI2018221, TESTI2018276, TESTI2018290, TESTI2018335, TESTI2018337, TESTI2018368, TESTI2018421, TESTI2018428, TESTI2018475, TESTI2018482, TESTI2018521, TESTI2018565, TESTI2018581, TESTI2018611, TESTI2018687, TESTI2018697, TESTI2018838, TESTI2018941, TESTI2018957, TESTI2018974, TESTI2018975, TESTI2019042, TESTI2019077, TESTI2019228, TESTI2019257, TESTI2019280, TESTI2019282, TESTI2019308, TESTI2019336, TESTI2019352, TESTI2019406, TESTI2019430, TESTI2019455, TESTI2019481, TESTI2019488, TESTI2019501, TESTI2019648, TESTI2019669, TESTI2019697, TESTI2019729, TESTI2019787, TESTI2019794, TESTI2019854, TESTI2019859, TESTI2019860, TESTI2019872, TESTI2019911, TESTI2019917, TESTI2019975, TESTI2019998, TESTI2020012, TESTI2020026, TESTI2020029, TESTI2020071, TESTI2020084, TESTI2020265, TESTI2020283, TESTI2020316, TESTI2020344, TESTI2020379, TESTI2020426, TESTI2020445, TESTI2020510, TESTI2020515, TESTI2020525, TESTI2020579, TESTI2020717, TESTI2020871, TESTI2020905, TESTI2020906, TESTI2020946, TESTI2020956, TESTI2020981, TESTI2020999, TESTI2021003, TESTI2021057, TESTI2021077, TESTI2021112, TESTI2021114, TESTI2021116, TESTI2021118, TESTI2021122, TESTI2021138, TESTI2021297, TESTI2021315, TESTI2021358, TESTI2021447, TESTI2021463, TESTI2021599, TESTI2021637, TESTI2021667, TESTI2021736, TESTI2021785, TESTI2021819, TESTI2021895, TESTI2021911, TESTI2021939, TESTI2021999, TESTI2022010, TESTI2022023, TESTI2022065, TESTI2022086, TESTI2022179, TESTI2022203, TESTI2022246, TESTI2022323, TESTI2022338, TESTI2022400, TESTI2022462, TESTI2022495, TESTI2022623, TESTI2022649, TESTI2022652, TESTI2022738, TESTI2022798, TESTI2022812, TESTI2022814, TESTI2022874, TESTI2022940, TESTI2022952, TESTI2023025, TESTI2023033, TESTI2023053, TESTI2023085, TESTI2023192, TESTI2023194, TESTI2023214, TESTI2023254, TESTI2023386, TESTI2023427, TESTI2023436, TESTI2023599, TESTI2023752, TESTI2023800, TESTI2023861, TESTI2023903, TESTI2023942, TESTI2023947, TESTI2023951, TESTI2023968, TESTI2024009, TESTI2024090, TESTI2024125, TESTI2024153, TESTI2024192, TESTI2024267, TESTI2024283, TESTI2024299, TESTI2024419, TESTI2024422, TESTI2024443, TESTI2024446, TESTI2024473, TESTI2024476, TESTI2024498, TESTI2024560, TESTI2024567, TESTI2024586, TESTI2024598, TESTI2024641, TESTI2024648, TESTI2024718, TESTI2024744, TESTI2024844, TESTI2024864, TESTI2024885, TESTI2024936, TESTI2024978, TESTI2024999, TESTI2025006, TESTI2025013, TESTI2025022, TESTI2025063, TESTI2025117, TESTI2025144, TESTI2025161, TESTI2025174, TESTI2025229, TESTI2025269, TESTI2025365, TESTI2025403, TESTI2025409, TESTI2025448, TESTI2025454, TESTI2025486, TESTI2025546, TESTI2025582, TESTI2025609, TESTI2025656, TESTI2025757, TESTI2025791, TESTI2025872, TESTI2025879, TESTI2025911, TESTI2025920, TESTI2025924, TESTI2026014, TESTI2026024, TESTI2026064, TESTI2026077, TESTI2026104, TESTI2026134, TESTI2026168, TESTI2026196, TESTI2026215, TESTI2026218, TESTI2026233, TESTI2026291, TESTI2026294, TESTI2026401, TESTI2026403, TESTI2026453, TESTI2026461, TESTI2026491, TESTI2026505, TESTI2026515, TESTI2026534, TESTI2026537, TESTI2026589, TESTI2026597, TESTI2026605, TESTI2026674, TESTI2026794, TESTI2026824, TESTI2026854, TESTI2026925, TESTI2026957, TESTI2027013, TESTI2027019, TESTI2027108, TESTI2027165, TESTI2027171, TESTI2027173, TESTI2027179, TESTI2027185, TESTI2027206, TESTI2027238, TESTI2027239, TESTI2027243, TESTI2027271, TESTI2027296, TESTI2027378, TESTI2027411, TESTI2027450, TESTI2027496, TESTI2027503, TESTI2027562, TESTI2027615, TESTI2027645, TESTI2027730, TESTI2027736, TESTI2027791, TESTI2027820, TESTI2027828, TESTI2027840, TESTI2027909, TESTI2028098, TESTI2028151, TESTI2028242, TESTI2028253, TESTI2028254, TESTI2028269, TESTI2028290, TESTI2028384, TESTI2028426, TESTI2028488, TESTI2028523, TESTI2028583, TESTI2028613, TESTI2028662, TESTI2028670, TESTI2028705, TESTI2028776, TESTI2028811, TESTI2028891, TESTI2028985, TESTI2028997, TESTI2029131, TESTI2029162, TESTI2029196, TESTI2029201, TESTI2029244, TESTI2029249, TESTI2029252, TESTI2029259, TESTI2029264, TESTI2029470, TESTI2029672, TESTI2029785, TESTI2029880, TESTI2030136, TESTI2030322, TESTI2030336, TESTI2030342, TESTI2030519, TESTI2030554, TESTI2030556, TESTI2030728, TESTI2030754, TESTI2030770, TESTI2030860, TESTI2030901, TESTI2030917, TESTI2030930, TESTI2031006, TESTI2031007, TESTI2031060, TESTI2031129, TESTI2031356, TESTI2031418, TESTI2031504, TESTI2031529, TESTI2031687, TESTI2031760, TESTI2031809, TESTI2031919, TESTI2031935, TESTI2031986, TESTI2032044, TESTI2032067, TESTI2032079, TESTI2032643, TESTI2032681, TESTI2032761, TESTI2032768, TESTI2032774, TESTI2032828, TESTI2033031, TESTI2033242, TESTI2033254, TESTI2033300, TESTI2033395, TESTI2033453, TESTI2033505, TESTI2033520, TESTI2033641, TESTI2033710, TESTI2033905, TESTI2034187, TESTI2034243, TESTI2034249, TESTI2034307, TESTI2034357, TESTI2034401, TESTI2034407, TESTI2034506, TESTI2034520, TESTI2034718, TESTI2034730, TESTI2034749, TESTI2034767, TESTI2034774, TESTI2034777, TESTI2034785, TESTI2034799, TESTI2034847, TESTI2034913, TESTI2034931, TESTI2034953, TESTI2034997, TESTI2035078, TESTI2035084, TESTI2035107, TESTI2035121, TESTI2035124, TESTI2035183, TESTI2035262, TESTI2035309, TESTI2035688, TESTI2035775, TESTI2035793, TESTI2035898, TESTI2035962, TESTI2035981, TESTI2035997, TESTI2036114, TESTI2036129, TESTI2036285, TESTI2036288, TESTI2036513, TESTI2036589, TESTI2036684, TESTI2036691, TESTI2036736, TESTI2036822, TESTI2036833, TESTI2036913, TESTI2036922, TESTI2036951, TESTI2036965, TESTI2037002, TESTI2037055, TESTI2037081, TESTI2037085, TESTI2037103, TESTI2037106, TESTI2037111, TESTI2037209, TESTI2037255, TESTI2037359, TESTI2037375, TESTI2037382, TESTI2037534, TESTI2037569, TESTI2037572, TESTI2037643, TESTI2037657, TESTI2037673, TESTI2037723, TESTI2037819, TESTI2037830, TESTI2037845, TESTI2037877, TESTI2037976, TESTI2038048, TESTI2038065, TESTI2038104, TESTI2038275, TESTI2038388, TESTI2038573, TESTI2038596, TESTI2038623, TESTI2038644, TESTI2038733, TESTI2038858, TESTI2038958, TESTI2039025, TESTI2039026, TESTI2039038, TESTI2039041, TESTI2039060, TESTI2039113, TESTI2039121, TESTI2039209, TESTI2039225, TESTI2039227, TESTI2039276, TESTI2039342, TESTI2039353, TESTI2039544, TESTI2039613, TESTI2039707, TESTI2039732, TESTI2039738, TESTI2039776, TESTI2039867, TESTI2039908, TESTI2040018, TESTI2040094, TESTI2040102, TESTI2040128, TESTI2040143, TESTI2040297, TESTI2040372, TESTI2040377, TESTI2040424, TESTI2040642, TESTI2040815, TESTI2040897, TESTI2040944, TESTI2040964, TESTI2040983, TESTI2040989, TESTI2041330, TESTI2041362, TESTI2041517, TESTI2041564, TESTI2041664, TESTI2041730, TESTI2041734, TESTI2041778, TESTI2041800, TESTI2041947, TESTI2041956, TESTI2041976, TESTI2042062, TESTI2042149, TESTI2042264, TESTI2042295, TESTI2042302, TESTI2042326, TESTI2042400, TESTI2042450, TESTI2042473, TESTI2042507, TESTI2042508, TESTI2042750, TESTI2042783, TESTI2042806, TESTI2042928, TESTI2042946, TESTI2042958, TESTI2043277, TESTI2043282, TESTI2043313, TESTI2043477, TESTI2043585, TESTI2043758, TESTI2043817, TESTI2043857, TESTI2043866, TESTI2043869, TESTI2044064, TESTI2044118, TESTI2044194, TESTI2044276, TESTI2044306, TESTI2044309, TESTI2044413, TESTI2044418, TESTI2044754, TESTI2044788, TESTI2044796, TESTI2044833, TESTI2044892, TESTI2044920, TESTI2044968, TESTI2045139, TESTI2045171, TESTI2045199, TESTI2045353, TESTI2045509, TESTI2045562, TESTI2045611, TESTI2045819, TESTI2045850, TESTI2045920, TESTI2045964, TESTI2045983, TESTI2046100, TESTI2046188, TESTI2046347, TESTI2046352, TESTI2046358, TESTI2046439, TESTI2046535, TESTI2046536, TESTI2046552, TESTI2046569, TESTI2046686, TESTI2046721, TESTI2046732, TESTI2046786, TESTI2046797, TESTI2046863, TESTI2046872, TESTI2047071, TESTI2047141, TESTI2047147, TESTI2047153, TESTI2047212, TESTI2047342, TESTI2047383, TESTI2047605, TESTI2047792, TESTI2047801, TESTI2047818, TESTI2047824, TESTI2047885, TESTI2047930, TESTI2048105, TESTI2048109, TESTI2048465, TESTI2048603, TESTI2048898, TESTI2049041, TESTI2049062, TESTI2049206, TESTI2049246, TESTI2049277, TESTI2049422, TESTI2049452, TESTI2049469, TESTI2049553, TESTI2049576, TESTI2049857, TESTI2049956, TESTI2050137, TESTI2050681, TESTI2050780, TESTI2050987, TESTI2051148, TESTI2051177, TESTI2051279, TESTI2051488, TESTI2051543, TESTI2051627, TESTI2051742, TESTI2051767, TESTI2051791, TESTI2051806, TESTI2051867, TESTI2051873, TESTI2052110, TESTI2052202, TESTI2052211, TESTI2052256, TESTI2052288, TESTI2052525, TESTI2052670, TESTI2052693, TESTI2052698, TESTI2052799, TESTI2052822, TESTI2052985, TESTI2053151, TESTI2053242, TESTI2053399, TESTI2053526, TESTI2053561, TESTI2053621, TESTI2053667, TESTI3000002, TESTI3000005, TESTI4000068, TESTI4000079, TESTI4000093, TESTI4000134, TESTI4000137, TESTI4000153, TESTI4000155, TESTI4000157, TESTI4000183, TESTI4000214, TESTI4000215, TESTI4000228, TESTI4000250, TESTI4000288, TESTI4000319, TESTI4000370, TESTI4000394, TESTI4000462, TESTI4000530, TESTI4000534, TESTI4000598, TESTI4000600, TESTI4000621, TESTI4000703, TESTI4000724, TESTI4000957, TESTI4000970, TESTI4001036, TESTI4001037, TESTI4001060, TESTI4001106, TESTI4001148, TESTI4001176, TESTI4001195, TESTI4001201, TESTI4001206, TESTI4001348, TESTI4001441, TESTI4001473, TESTI4001517, TESTI4001527, TESTI4001569, TESTI4001604, TESTI4001665, TESTI4001679, TESTI4001795, TESTI4001923, TESTI4001925, TESTI4001984, TESTI4002003, TESTI4002141, TESTI4002290, TESTI4002319, TESTI4002491, TESTI4002520, TESTI4002552, TESTI4002647, TESTI4002703, TESTI4002754, TESTI4002868, TESTI4002878, TESTI4002889, TESTI4003179, TESTI4003279, TESTI4003319, TESTI4003404, TESTI4003565, TESTI4003574, TESTI4003579, TESTI4003733, TESTI4003796, TESTI4003944, TESTI4004003, TESTI4004031, TESTI4004200, TESTI4004210, TESTI4004539, TESTI4004653, TESTI4004695, TESTI4004722, TESTI4004887, TESTI4004917, TESTI4005015, TESTI4005039, TESTI4005158, TESTI4005317, TESTI4005322, TESTI4005470, TESTI4005500, TESTI4005534, TESTI4005543, TESTI4005628, TESTI4005801, TESTI4005805, TESTI4005857, TESTI4005961, TESTI4006053, TESTI4006079, TESTI4006112, TESTI4006137, TESTI4006148, TESTI4006219, TESTI4006234, TESTI4006308, TESTI4006326, TESTI4006393, TESTI4006407, TESTI4006412, TESTI4006420, TESTI4006441, TESTI4006473, TESTI4006539, TESTI4006546, TESTI4006567, TESTI4006704, TESTI4006728, TESTI4006802, TESTI4006819, TESTI4007064, TESTI4007163, TESTI4007176, TESTI4007203, TESTI4007239, TESTI4007373, TESTI4007382, TESTI4007404, TESTI4007489, TESTI4007565, TESTI4007671, TESTI4007775, TESTI4007778, TESTI4007799, TESTI4007810, TESTI4007816, TESTI4007965, TESTI4008007, TESTI4008018, TESTI4008050, TESTI4008058, TESTI4008086, TESTI4008097, TESTI4008176, TESTI4008209, TESTI4008219, TESTI4008250, TESTI4008302, TESTI4008305, TESTI4008401, TESTI4008417, TESTI4008429, TESTI4008573, TESTI4008797, TESTI4008816, TESTI4008840, TESTI4008935, TESTI4008993, TESTI4009022, TESTI4009028, TESTI4009034, TESTI4009123, TESTI4009160, TESTI4009215, TESTI4009283, TESTI4009286, TESTI4009306, TESTI4009374, TESTI4009406, TESTI4009457, TESTI4009501, TESTI4009563, TESTI4009608, TESTI4009638, TESTI4009752, TESTI4009881, TESTI4009886, TESTI4009928, TESTI4010076, TESTI4010082, TESTI4010095, TESTI4010211, TESTI4010377, TESTI4010475, TESTI4010544, TESTI4010713, TESTI4010721, TESTI4010789, TESTI4010817, TESTI4010831, TESTI4010902, TESTI4010928, TESTI4010979, TESTI4011070, TESTI4011072, TESTI4011084, TESTI4011118, TESTI4011246, TESTI4011484, TESTI4011505, TESTI4011532, TESTI4011616, TESTI4011744, TESTI4011745, TESTI4011829, TESTI4011926, TESTI4011956, TESTI4012010, TESTI4012086, TESTI4012258, TESTI4012293, TESTI4012329, TESTI4012382, TESTI4012406, TESTI4012448, TESTI4012451, TESTI4012505, TESTI4012556, TESTI4012623, TESTI4012646, TESTI4012679, TESTI4012911, TESTI4012956, TESTI4012960, TESTI4013365, TESTI4013369, TESTI4013410, TESTI4013602, TESTI4013667, TESTI4013685, TESTI4013735, TESTI4013742, TESTI4013774, TESTI4013830, TESTI4013852, TESTI4013924, TESTI4013960, TESTI4013962, TESTI4014175, TESTI4014265, TESTI4014276, TESTI4014392, TESTI4014415, TESTI4014445, TESTI4014661, TESTI4014801, TESTI4014818, TESTI4014891, TESTI4014908, TESTI4014924, TESTI4014932, TESTI4014977, TESTI4015012, TESTI4015129, TESTI4015145, TESTI4015204, TESTI4015263, TESTI4015293, TESTI4015299, TESTI4015339, TESTI4015398, TESTI4015442, TESTI4015471, TESTI4015477, TESTI4015600, TESTI4015646, TESTI4015681, TESTI4015688, TESTI4015790, TESTI4016110, TESTI4016238, TESTI4016551, TESTI4016812, TESTI4016822, TESTI4016865, TESTI4016882, TESTI4016925, TESTI4017001, TESTI4017116, TESTI4017137, TESTI4017229, TESTI4017254, TESTI4017269, TESTI4017380, TESTI4017382, TESTI4017543, TESTI4017575, TESTI4017647, TESTI4017714, TESTI4017763, TESTI4017848, TESTI4017854, TESTI4017901, TESTI4017961, TESTI4018101, TESTI4018152, TESTI4018208, TESTI4018382, TESTI4018436, TESTI4018506, TESTI4018555, TESTI4018751, TESTI4018806, TESTI4018835, TESTI4018859, TESTI4018881, TESTI4018886, TESTI4018938, TESTI4019140, TESTI4019149, TESTI4019299, TESTI4019417, TESTI4019440, TESTI4019566, TESTI4019657, TESTI4019756, TESTI4019843, TESTI4020092, TESTI4020102, TESTI4020342, TESTI4020460, TESTI4020596, TESTI4020806, TESTI4020819, TESTI4020920, TESTI4021129, TESTI4021197, TESTI4021294, TESTI4021377, TESTI4021456, TESTI4021491, TESTI4021569, TESTI4021713, TESTI4021821, TESTI4022577, TESTI4022716, TESTI4022873, TESTI4023096, TESTI4023172, TESTI4023546, TESTI4023555, TESTI4023654, TESTI4023722, TESTI4023762, TESTI4023942, TESTI4024096, TESTI4024240, TESTI4024245, TESTI4024294, TESTI4024344, TESTI4024387, TESTI4024420, TESTI4024494, TESTI4024874, TESTI4024890, TESTI4024907, TESTI4024930, TESTI4025062, TESTI4025268, TESTI4025401, TESTI4025494, TESTI4025547, TESTI4025731, TESTI4025797, TESTI4025865, TESTI4025908, TESTI4025920, TESTI4026079, TESTI4026080, TESTI4026192, TESTI4026207, TESTI4026295, TESTI4026456, TESTI4026510, TESTI4026524, TESTI4026680, TESTI4026700, TESTI4026762, TESTI4026785, TESTI4027139, TESTI4027170, TESTI4027262, TESTI4027516, TESTI4027557, TESTI4027660, TESTI4027821, TESTI4027969, TESTI4028042, TESTI4028059, TESTI4028062, TESTI4028182, TESTI4028429, TESTI4028612, TESTI4028692, TESTI4028809, TESTI4028823, TESTI4028880, TESTI4028904, TESTI4028938, TESTI4028958, TESTI4028983, TESTI4029023, TESTI4029348, TESTI4029370, TESTI4029528, TESTI4029651, TESTI4029671, TESTI4029676, TESTI4029690, TESTI4029731, TESTI4029743, TESTI4030069, TESTI4030159, TESTI4030319, TESTI4030505, TESTI4030603, TESTI4030669, TESTI4030673, TESTI4030864, TESTI4031066, TESTI4031173, TESTI4031335, TESTI4031745, TESTI4031818, TESTI4032090, TESTI4032112, TESTI4032128, TESTI4032270, TESTI4032375, TESTI4032834, TESTI4032856, TESTI4032895, TESTI4033146, TESTI4033177, TESTI4033433, TESTI4033690, TESTI4034172, TESTI4034212, TESTI4034432, TESTI4034495, TESTI4034632, TESTI4034633, TESTI4034912, TESTI4034973, TESTI4035063, TESTI4035065, TESTI4035498, TESTI4035508, TESTI4035581, TESTI4035602, TESTI4035637, TESTI4035649, TESTI4035770, TESTI4035872, TESTI4035895, TESTI4035898, TESTI4035989, TESTI4036012, TESTI4036042, TESTI4036048, TESTI4036315, TESTI4036319, TESTI4036449, TESTI4036767, TESTI4036909, TESTI4037066, TESTI4037228, TESTI4037244, TESTI4037727, TESTI4037949, TESTI4038047, TESTI4038156, TESTI4038223, TESTI4038258, TESTI4038339, TESTI4038492, TESTI4038721, TESTI4038758, TESTI4038779, TESTI4038818, TESTI4039038, TESTI4039086, TESTI4039451, TESTI4039575, TESTI4039659, TESTI4039744, TESTI4039904, TESTI4040197, TESTI4040363, TESTI4040535, TESTI4040559, TESTI4040598, TESTI4040800, TESTI4040804, TESTI4040939, TESTI4040956, TESTI4041049, TESTI4041053, TESTI4041086, TESTI4041099, TESTI4041143, TESTI4041482, TESTI4041519, TESTI4041624, TESTI4041629, TESTI4041832, TESTI4041844, TESTI4041903, TESTI4041954, TESTI4041984, TESTI4041985, TESTI4041986, TESTI4042098, TESTI4042420, TESTI4042440, TESTI4042444, TESTI4042711, TESTI4042846, TESTI4043067, TESTI4043129, TESTI4043166, TESTI4043203, TESTI4043371, TESTI4043378, TESTI4043512, TESTI4043551, TESTI4043710, TESTI4043947, TESTI4044035, TESTI4044076, TESTI4044084, TESTI4044123, TESTI4044186, TESTI4044234, TESTI4044291, TESTI4044296, TESTI4044300, TESTI4044682, TESTI4044770, TESTI4045168, TESTI4045312, TESTI4045330, TESTI4045470, TESTI4045701, TESTI4045908, TESTI4045955, TESTI4045982, TESTI4046090, TESTI4046240, TESTI4046245, TESTI4046253, TESTI4046282, TESTI4046328, TESTI4046450, TESTI4046457, TESTI4046487, TESTI4046502, TESTI4046523, TESTI4046873, TESTI4046884, TESTI4046896, TESTI4046903, TESTI4046962, TESTI4047069, TESTI4047119, TESTI4047305, TESTI4047328, TESTI4047437, TESTI4047569, TESTI4047746, TESTI4047808, THYMU1000010, THYMU1000017, THYMU1000025, THYMU1000029, THYMU1000033, THYMU1000060, THYMU1000074, THYMU1000098, THYMU1000105, THYMU1000136, THYMU1000142, THYMU1000158, THYMU1000176, THYMU1000179, THYMU1000191, THYMU1000217, THYMU1000240, THYMU1000242, THYMU1000291, THYMU1000316, THYMU1000318, THYMU1000329, THYMU1000336, THYMU1000366, THYMU1000382, THYMU1000393, THYMU1000394, THYMU1000399, THYMU1000426, THYMU1000428, THYMU1000440, THYMU1000459, THYMU1000473, THYMU1000490, THYMU1000491, THYMU1000496, THYMU1000499, THYMU1000527, THYMU1000532, THYMU1000536, THYMU1000554, THYMU1000558, THYMU1000576, THYMU1000600, THYMU1000677, THYMU1000692, THYMU2000022, THYMU2000032, THYMU2000057, THYMU2000120, THYMU2000138, THYMU2000140, THYMU2000155, THYMU2000171, THYMU2000176, THYMU2000179, THYMU2000231, THYMU2000236, THYMU2000276, THYMU2000280, THYMU2000300, THYMU2000317, THYMU2000368, THYMU2000369, THYMU2000418, THYMU2000440, THYMU2000492, THYMU2000519, THYMU2000570, THYMU2000602, THYMU2000660, THYMU2000671, THYMU2000672, THYMU2000702, THYMU2000767, THYMU2000775, THYMU2000800, THYMU2000879, THYMU2000932, THYMU2000950, THYMU2000971, THYMU2000982, THYMU2000990, THYMU2001018, THYMU2001053, THYMU2001071, THYMU2001090, THYMU2001139, THYMU2001195, THYMU2001202, THYMU2001203, THYMU2001256, THYMU2001270, THYMU2001291, THYMU2001314, THYMU2001325, THYMU2001357, THYMU2001381, THYMU2001422, THYMU2001443, THYMU2001515, THYMU2001521, THYMU2001556, THYMU2001622, THYMU2001727, THYMU2001819, THYMU2001825, THYMU2001868, THYMU2001898, THYMU2001900, THYMU2001916, THYMU2001926, THYMU2001989, THYMU2002023, THYMU2002037, THYMU2002080, THYMU2002109, THYMU2002147, THYMU2002154, THYMU2002157, THYMU2002177, THYMU2002203, THYMU2002229, THYMU2002242, THYMU2002338, THYMU2002356, THYMU2002376, THYMU2002384, THYMU2002450, THYMU2002490, THYMU2002548, THYMU2002695, THYMU2002745, THYMU2002756, THYMU2002789, THYMU2002792, THYMU2002815, THYMU2002852, THYMU2002910, THYMU2002950, THYMU2003069, THYMU2003107, THYMU2003124, THYMU2003166, THYMU2003232, THYMU2003242, THYMU2003249, THYMU2003270, THYMU2003282, THYMU2003287, THYMU2003336, THYMU2003366, THYMU2003397, THYMU2003440, THYMU2003470, THYMU2003479, THYMU2003499, THYMU2003632, THYMU2003650, THYMU2003700, THYMU2003760, THYMU2003803, THYMU2003855, THYMU2003907, THYMU2003932, THYMU2003981, THYMU2004003, THYMU2004008, THYMU2004042, THYMU2004108, THYMU2004111, THYMU2004123, THYMU2004139, THYMU2004169, THYMU2004320, THYMU2004336, THYMU2004356, THYMU2004452, THYMU2004512, THYMU2004635, THYMU2004639, THYMU2004668, THYMU2004677, THYMU2004688, THYMU2004693, THYMU2004835, THYMU2004843, THYMU2004906, THYMU2004916, THYMU2004986, THYMU2005001, THYMU2005003, THYMU2005046, THYMU2005134, THYMU2005156, THYMU2005190, THYMU2005225, THYMU2005240, THYMU2005246, THYMU2005270, THYMU2005283, THYMU2005303, THYMU2005321, THYMU2005356, THYMU2005369, THYMU2005439, THYMU2005480, THYMU2005482, THYMU2005507, THYMU2005545, THYMU2005546, THYMU2005576, THYMU2005748, THYMU2005759, THYMU2005815, THYMU2005855, THYMU2005881, THYMU2005948, THYMU2005980, THYMU2005997, THYMU2006001, THYMU2006048, THYMU2006098, THYMU2006160, THYMU2006170, THYMU2006252, THYMU2006261, THYMU2006277, THYMU2006303, THYMU2006324, THYMU2006350, THYMU2006357, THYMU2006365, THYMU2006420, THYMU2006468, THYMU2006610, THYMU2006666, THYMU2006712, THYMU2006913, THYMU2006946, THYMU2006965, THYMU2007025, THYMU2007060, THYMU2007095, THYMU2007112, THYMU2007146, THYMU2007179, THYMU2007258, THYMU2007307, THYMU2007308, THYMU2007339, THYMU2007350, THYMU2007384, THYMU2007493, THYMU2007521, THYMU2007528, THYMU2007530, THYMU2007561, THYMU2007571, THYMU2007635, THYMU2007658, THYMU2007667, THYMU2007725, THYMU2007802, THYMU2007824, THYMU2007854, THYMU2007952, THYMU2007969, THYMU2008035, THYMU2008049, THYMU2008072, THYMU2008111, THYMU2008145, THYMU2008149, THYMU2008185, THYMU2008191, THYMU2008207, THYMU2008226, THYMU2008282, THYMU2008339, THYMU2008350, THYMU2008351, THYMU2008383, THYMU2008452, THYMU2008643, THYMU2008686, THYMU2008691, THYMU2008714, THYMU2008725, THYMU2008727, THYMU2008781, THYMU2008799, THYMU2008876, THYMU2008910, THYMU2008917, THYMU2008928, THYMU2008990, THYMU2008994, THYMU2009023, THYMU2009046, THYMU2009101, THYMU2009104, THYMU2009134, THYMU2009157, THYMU2009181, THYMU2009186, THYMU2009338, THYMU2009425, THYMU2009516, THYMU2009526, THYMU2009546, THYMU2009596, THYMU2009792, THYMU2009835, THYMU2009906, THYMU2009948, THYMU2010030, THYMU2010046, THYMU2010059, THYMU2010082, THYMU2010094, THYMU2010161, THYMU2010192, THYMU2010519, THYMU2010637, THYMU2010671, THYMU2010699, THYMU2010705, THYMU2010831, THYMU2010848, THYMU2011053, THYMU2011072, THYMU2011096, THYMU2011118, THYMU2011142, THYMU2011183, THYMU2011257, THYMU2011259, THYMU2011295, THYMU2011308, THYMU2011390, THYMU2011431, THYMU2011447, THYMU2011538, THYMU2011548, THYMU2011551, THYMU2011564, THYMU2011573, THYMU2011585, THYMU2011621, THYMU2011666, THYMU2011736, THYMU2011785, THYMU2011806, THYMU2011852, THYMU2011875, THYMU2011881, THYMU2011937, THYMU2012002, THYMU2012073, THYMU2012104, THYMU2012113, THYMU2012273, THYMU2012401, THYMU2012492, THYMU2012507, THYMU2012565, THYMU2012574, THYMU2012625, THYMU2012631, THYMU2012665, THYMU2012701, THYMU2012807, THYMU2012882, THYMU2012891, THYMU2012902, THYMU2012919, THYMU2013023, THYMU2013047, THYMU2013051, THYMU2013089, THYMU2013170, THYMU2013364, THYMU2013386, THYMU2013426, THYMU2013578, THYMU2013648, THYMU2013705, THYMU2013757, THYMU2013779, THYMU2013863, THYMU2013950, THYMU2013981, THYMU2014067, THYMU2014068, THYMU2014167, THYMU2014183, THYMU2014204, THYMU2014297, THYMU2014327, THYMU2014492, THYMU2014500, THYMU2014599, THYMU2014762, THYMU2014777, THYMU2014801, THYMU2014901, THYMU2014923, THYMU2015019, THYMU2015161, THYMU2015316, THYMU2015321, THYMU2015439, THYMU2015479, THYMU2015762, THYMU2015775, THYMU2015825, THYMU2015918, THYMU2015943, THYMU2015984, THYMU2016113, THYMU2016164, THYMU2016204, THYMU2016219, THYMU2016360, THYMU2016496, THYMU2016968, THYMU2017008, THYMU2017010, THYMU2017023, THYMU2017085, THYMU2017099, THYMU2017158, THYMU2017162, THYMU2017215, THYMU2017362, THYMU2017366, THYMU2017398, THYMU2017449, THYMU2017479, THYMU2017522, THYMU2017526, THYMU2017675, THYMU2017707, THYMU2017831, THYMU2017844, THYMU2017948, THYMU2018028, THYMU2018071, THYMU2018189, THYMU2018197, THYMU2018384, THYMU2018455, THYMU2018547, THYMU2018565, THYMU2018639, THYMU2018673, THYMU2018721, THYMU2018772, THYMU2018819, THYMU2018841, THYMU2018997, THYMU2019054, THYMU2019197, THYMU2019210, THYMU2019436, THYMU2019442, THYMU2019587, THYMU2019599, THYMU2019686, THYMU2019813, THYMU2020198, THYMU2020289, THYMU2020416, THYMU2020491, THYMU2020499, THYMU2020560, THYMU2020667, THYMU2020830, THYMU2020883, THYMU2021361, THYMU2021509, THYMU2021597, THYMU2021684, THYMU2021714, THYMU2022213, THYMU2022289, THYMU2022660, THYMU2022854, THYMU2022922, THYMU2023209, THYMU2023576, THYMU2023711, THYMU2023900, THYMU2023943, THYMU2024121, THYMU2024185, THYMU2024207, THYMU2024616, THYMU2024684, THYMU2024748, THYMU2025042, THYMU2025189, THYMU2025319, THYMU2025406, THYMU2025557, THYMU2025572, THYMU2025707, THYMU2025849, THYMU2025909, THYMU2025939, THYMU2026182, THYMU2026350, THYMU2026530, THYMU2026531, THYMU2026835, THYMU2026904, THYMU2027053, THYMU2027168, THYMU2027249, THYMU2027282, THYMU2027497, THYMU2027695, THYMU2027734, THYMU2027894, THYMU2027975, THYMU2027996, THYMU2028041, THYMU2028368, THYMU2028379, THYMU2028394, THYMU2028412, THYMU2028629, THYMU2028632, THYMU2028724, THYMU2028739, THYMU2028942, THYMU2028978, THYMU2029134, THYMU2029676, THYMU2029688, THYMU2029788, THYMU2030068, THYMU2030226, THYMU2030462, THYMU2030543, THYMU2030637, THYMU2030655, THYMU2030796, THYMU2030912, THYMU2030982, THYMU2031046, THYMU2031139, THYMU2031218, THYMU2031249, THYMU2031258, THYMU2031341, THYMU2031368, THYMU2031579, THYMU2031847, THYMU2031890, THYMU2031994, THYMU2032014, THYMU2032035, THYMU2032080, THYMU2032150, THYMU2032155, THYMU2032358, THYMU2032437, THYMU2032601, THYMU2032655, THYMU2032696, THYMU2032715, THYMU2032732, THYMU2032825, THYMU2032976, THYMU2033053, THYMU2033059, THYMU2033070, THYMU2033079, THYMU2033085, THYMU2033104, THYMU2033227, THYMU2033263, THYMU2033308, THYMU2033401, THYMU2033583, THYMU2033755, THYMU2033787, THYMU2033816, THYMU2034182, THYMU2034279, THYMU2034314, THYMU2034338, THYMU2034374, THYMU2034647, THYMU2035064, THYMU2035078, THYMU2035101, THYMU2035319, THYMU2035321, THYMU2035388, THYMU2035400, THYMU2035554, THYMU2035710, THYMU2036058, THYMU2036105, THYMU2036207, THYMU2036215, THYMU2036252, THYMU2036265, THYMU2036366, THYMU2036459, THYMU2036461, THYMU2036604, THYMU2036653, THYMU2037081, THYMU2037208, THYMU2037233, THYMU2037234, THYMU2037348, THYMU2037406, THYMU2037965, THYMU2038058, THYMU2038189, THYMU2038199, THYMU2038301, THYMU2038369, THYMU2038389, THYMU2038615, THYMU2038636, THYMU2038739, THYMU2038772, THYMU2038797, THYMU2038906, THYMU2039305, THYMU2039315, THYMU2039334, THYMU2039350, THYMU2039411, THYMU2039634, THYMU2039719, THYMU2039788, THYMU2039989, THYMU2040029, THYMU2040110, THYMU2040114, THYMU2040140, THYMU2040412, THYMU2040824, THYMU2041007, THYMU2041015, THYMU2041252, THYMU3000028, THYMU3000036, THYMU3000037, THYMU3000082, THYMU3000194, THYMU3000224, THYMU3000269, THYMU3000306, THYMU3000390, THYMU3000490, THYMU3000504, THYMU3000542, THYMU3000655, THYMU3000826, THYMU3000841, THYMU3001077, THYMU3001082, THYMU3001133, THYMU3001151, THYMU3001472, THYMU3001593, THYMU3001883, THYMU3001939, THYMU3001991, THYMU3002452, THYMU3002578, THYMU3002661, THYMU3003007, THYMU3003092, THYMU3003212, THYMU3003350, THYMU3003403, THYMU3003565, THYMU3003763, THYMU3003865, THYMU3003958, THYMU3003965, THYMU3004157, THYMU3004628, THYMU3004632, THYMU3004866, THYMU3005050, THYMU3005378, THYMU3005407, THYMU3005415, THYMU3005427, THYMU3005482, THYMU3005491, THYMU3005696, THYMU3006118, THYMU3006132, THYMU3006168, THYMU3006172, THYMU3006371, THYMU3006640, THYMU3006767, THYMU3006811, THYMU3006963, THYMU3007137, THYMU3007368, THYMU3007559, THYMU3007845, THYMU3008060, THYMU3008136, THYMU3008216, THYMU3008436, THYMU3008672, THYMU3008883, THYMU3008935, THYMU3009006, THYMU3009255, THYMU3009391, THYMU3009643, THYMU3009755, THYMU3010247, THYMU3011012, THYMU3011081, THYMU3011244, THYMU3011360, THYMU3011534, THYMU3011543, THYMU3011556, THYMU3011717, THYMU3011827, THYMU3012402, THYMU3012907, THYMU3012983, THYMU3013114, THYMU3013197, THYMU3013241, THYMU3013470, THYMU3013785, THYMU3013897, THYMU3014038, THYMU3014173, THYMU3014372, THYMU3014555, THYMU3014620, THYMU3014701, THYMU3015042, THYMU3015457, THYMU3015592, THYMU3015625, THYMU3015647, THYMU3015962, THYMU3016022, THYMU3016518, THYMU3016797, THYMU3016822, THYMU3016850, THYMU3017562, THYMU3017688, THYMU3017689, THYMU3017761, THYMU3018151, THYMU3018896, THYMU3019095, THYMU3019605, THYMU3019916, THYMU3020221, THYMU3020595, THYMU3020713, THYMU3020856, THYMU3020869, THYMU3020970, THYMU3021404, THYMU3021755, THYMU3021900, THYMU3022211, THYMU3022434, THYMU3022528, THYMU3022668, THYMU3022982, THYMU3023107, THYMU3023211, THYMU3023216, THYMU3023394, THYMU3023400, THYMU3023797, THYMU3024164, THYMU3024339, THYMU3024602, THYMU3024879, THYMU3025118, THYMU3025313, THYMU3025642, THYMU3025683, THYMU3025772, THYMU3025865, THYMU3026000, THYMU3026479, THYMU3026532, THYMU3026783, THYMU3026869, THYMU3027251, THYMU3027540, THYMU3027655, THYMU3027671, THYMU3028075, THYMU3028410, THYMU3028461, THYMU3028702, THYMU3029188, THYMU3029318, THYMU3029421, THYMU3029719, THYMU3029774, THYMU3029832, THYMU3030072, THYMU3030231, THYMU3030706, THYMU3030710, THYMU3030752, THYMU3031146, THYMU3031402, THYMU3031610, THYMU3031612, THYMU3031868, THYMU3031878, THYMU3032032, THYMU3033402, THYMU3033630, THYMU3033649, THYMU3033754, THYMU3033759, THYMU3034078, THYMU3034099, THYMU3034453, THYMU3034616, THYMU3034853, THYMU3034867, THYMU3034983, THYMU3036200, THYMU3036310, THYMU3036934, THYMU3036953, THYMU3037052, THYMU3037192, THYMU3037617, THYMU3037772, THYMU3037827, THYMU3037836, THYMU3037856, THYMU3037867, THYMU3037909, THYMU3037980, THYMU3038158, THYMU3038167, THYMU3038266, THYMU3038328, THYMU3038347, THYMU3038375, THYMU3038603, THYMU3038687, THYMU3038759, THYMU3038879, THYMU3038970, THYMU3039807, THYMU3039846, THYMU3040068, THYMU3040126, THYMU3040146, THYMU3040168, THYMU3040172, THYMU3040725, THYMU3040746, THYMU3040816, THYMU3040829, THYMU3040830, THYMU3040986, THYMU3041354, THYMU3041386, THYMU3041573, THYMU3041603, THYMU3041736, THYMU3041918, THYMU3042075, THYMU3042321, THYMU3042372, THYMU3042758, THYMU3042929, THYMU3043200, THYMU3043327, THYMU3043482, THYMU3043597, THYMU3043688, THYMU3043779, THYMU3043883, THYMU3043993, THYMU3044175, THYMU3044188, THYMU3044441, THYMU3044445, THYMU3045510, THYMU3045673, THYMU3045692, THYMU3045704, THYMU3046140, THYMU3046360, THYMU3046856, THYMU3047115, THYMU3047144, THYMU3047156, THYMU3047366, THYMU3047513, THYMU3047542, THYMU3047760, THYMU3047891, TKIDN1000044, TKIDN1000062, TKIDN1000066, TKIDN1000171, TKIDN2000127, TKIDN2000240, TKIDN2000319, TKIDN2000464, TKIDN2000521, TKIDN2000701, TKIDN2001529, TKIDN2001662, TKIDN2002329, TKIDN2002424, TKIDN2002632, TKIDN2003044, TKIDN2003059, TKIDN2003062, TKIDN2003078, TKIDN2003366, TKIDN2003396, TKIDN2003413, TKIDN2003597, TKIDN2004185, TKIDN2004386, TKIDN2004458, TKIDN2004748, TKIDN2005721, TKIDN2005934, TKIDN2005947, TKIDN2005956, TKIDN2006525, TKIDN2006852, TKIDN2007667, TKIDN2008778, TKIDN2009092, TKIDN2009330, TKIDN2009481, TKIDN2009794, TKIDN2009889, TKIDN2010200, TKIDN2010232, TKIDN2010278, TKIDN2010602, TKIDN2010812, TKIDN2010934, TKIDN2011051, TKIDN2011160, TKIDN2011324, TKIDN2012034, TKIDN2012771, TKIDN2012824, TKIDN2013134, TKIDN2013287, TKIDN2014570, TKIDN2014757, TKIDN2014771, TKIDN2014964, TKIDN2015025, TKIDN2015161, TKIDN2015263, TKIDN2016309, TKIDN2016399, TKIDN2019116, TLIVE2000023, TLIVE2000142, TLIVE2000292, TLIVE2000762, TLIVE2000979, TLIVE2001327, TLIVE2001616, TLIVE2001684, TLIVE2001828, TLIVE2001927, TLIVE2002336, TLIVE2002338, TLIVE2002562, TLIVE2002690, TLIVE2002882, TLIVE2003197, TLIVE2003200, TLIVE2003225, TLIVE2003381, TLIVE2003737, TLIVE2003961, TLIVE2003970, TLIVE2004110, TLIVE2004331, TLIVE2004601, TLIVE2005180, TLIVE2005390, TLIVE2005516, TLIVE2005731, TLIVE2005866, TLIVE2006236, TLIVE2006359, TLIVE2006529, TLIVE2006621, TLIVE2006733, TLIVE2007000, TLIVE2007016, TLIVE2007132, TLIVE2007192, TLIVE2007528, TLIVE2007607, TLIVE2007816, TLIVE2007919, TLIVE2008083, TLIVE2008213, TLIVE2008221, TLIVE2008229, TLIVE2008712, TLIVE2008797, TLIVE2009087, TLIVE2009163, TLIVE2009489, TLIVE2009541, TOVAR2000476, TOVAR2000575, TOVAR2000649, TOVAR2000904, TOVAR2001281, TOVAR2001556, TOVAR2001730, TOVAR2002247, TOVAR2002514, TOVAR2002549, TOVAR2002800, TRACH1000018, TRACH1000038, TRACH1000057, TRACH1000063, TRACH1000074, TRACH1000100, TRACH1000106, TRACH1000125, TRACH1000140, TRACH1000144, TRACH1000212, TRACH1000240, TRACH2000002, TRACH2000015, TRACH2000024, TRACH2000032, TRACH2000081, TRACH2000083, TRACH2000148, TRACH2000185, TRACH2000196, TRACH2000235, TRACH2000237, TRACH2000243, TRACH2000250, TRACH2000259, TRACH2000272, TRACH2000282, TRACH2000287, TRACH2000289, TRACH2000306, TRACH2000312, TRACH2000336, TRACH2000359, TRACH2000411, TRACH2000496, TRACH2000497, TRACH2000502, TRACH2000522, TRACH2000540, TRACH2000559, TRACH2000665, TRACH2000675, TRACH2000703, TRACH2000767, TRACH2000775, TRACH2000807, TRACH2000862, TRACH2000894, TRACH2000898, TRACH2000923, TRACH2000944, TRACH2000981, TRACH2000986, TRACH2001037, TRACH2001060, TRACH2001085, TRACH2001101, TRACH2001121, TRACH2001147, TRACH2001154, TRACH2001188, TRACH2001192, TRACH2001275, TRACH2001335, TRACH2001339, TRACH2001347, TRACH2001395, TRACH2001400, TRACH2001403, TRACH2001416, TRACH2001428, TRACH2001443, TRACH2001463, TRACH2001474, TRACH2001525, TRACH2001532, TRACH2001592, TRACH2001596, TRACH2001621, TRACH2001651, TRACH2001898, TRACH2001933, TRACH2001968, TRACH2001996, TRACH2002043, TRACH2002054, TRACH2002092, TRACH2002100, TRACH2002138, TRACH2002333, TRACH2002784, TRACH2002840, TRACH2002847, TRACH2002853, TRACH2002862, TRACH2002954, TRACH2002960, TRACH2002988, TRACH2003070, TRACH2003516, TRACH2003605, TRACH2003736, TRACH2003759, TRACH2003941, TRACH2004039, TRACH2004054, TRACH2004087, TRACH2004109, TRACH2004170, TRACH2004183, TRACH2004251, TRACH2004292, TRACH2004336, TRACH2004428, TRACH2004499, TRACH2004521, TRACH2004570, TRACH2004845, TRACH2004887, TRACH2004950, TRACH2005004, TRACH2005017, TRACH2005066, TRACH2005159, TRACH2005314, TRACH2005444, TRACH2005541, TRACH2005666, TRACH2005698, TRACH2005710, TRACH2005720, TRACH2005769, TRACH2005796, TRACH2005811, TRACH2006015, TRACH2006049, TRACH2006097, TRACH2006194, TRACH2006327, TRACH2006331, TRACH2006378, TRACH2006387, TRACH2006528, TRACH2006670, TRACH2006762, TRACH2006866, TRACH2006870, TRACH2006918, TRACH2007059, TRACH2007324, TRACH2007358, TRACH2007483, TRACH2007542, TRACH2007577, TRACH2007674, TRACH2007676, TRACH2007688, TRACH2007733, TRACH2007754, TRACH2007816, TRACH2007894, TRACH2007969, TRACH2007988, TRACH2008081, TRACH2008112, TRACH2008127, TRACH2008130, TRACH2008278, TRACH2008478, TRACH2008540, TRACH2008583, TRACH2008597, TRACH2008820, TRACH2008921, TRACH2009060, TRACH2009107, TRACH2009123, TRACH2009268, TRACH2009291, TRACH2009310, TRACH2009340, TRACH2009348, TRACH2009358, TRACH2009661, TRACH2009730, TRACH2009743, TRACH2009754, TRACH2009851, TRACH2009862, TRACH2009934, TRACH2010159, TRACH2010218, TRACH2010251, TRACH2010272, TRACH2010317, TRACH2010419, TRACH2010451, TRACH2010505, TRACH2010587, TRACH2010600, TRACH2010634, TRACH2010639, TRACH2010677, TRACH2010698, TRACH2010771, TRACH2010883, TRACH2010965, TRACH2010974, TRACH2011057, TRACH2011093, TRACH2011290, TRACH2011293, TRACH2011302, TRACH2011500, TRACH2011574, TRACH2011956, TRACH2012000, TRACH2012138, TRACH2012242, TRACH2012298, TRACH2012370, TRACH2012387, TRACH2012497, TRACH2012536, TRACH2012562, TRACH2012742, TRACH2012823, TRACH2012918, TRACH2013081, TRACH2013123, TRACH2013265, TRACH2013369, TRACH2013450, TRACH2013495, TRACH2013585, TRACH2013671, TRACH2013726, TRACH2013902, TRACH2013928, TRACH2013982, TRACH2013991, TRACH2014018, TRACH2014045, TRACH2014046, TRACH2014082, TRACH2014268, TRACH2014284, TRACH2014337, TRACH2014356, TRACH2014371, TRACH2014442, TRACH2014483, TRACH2014495, TRACH2014544, TRACH2014573, TRACH2014725, TRACH2014760, TRACH2014815, TRACH2014839, TRACH2014938, TRACH2014950, TRACH2014972, TRACH2014974, TRACH2015180, TRACH2015243, TRACH2015316, TRACH2015381, TRACH2015486, TRACH2015654, TRACH2015824, TRACH2015939, TRACH2015987, TRACH2016080, TRACH2016131, TRACH2016286, TRACH2016317, TRACH2016347, TRACH2016380, TRACH2016384, TRACH2016410, TRACH2016481, TRACH2016498, TRACH2016551, TRACH2016554, TRACH2016651, TRACH2016690, TRACH2016709, TRACH2016722, TRACH2016835, TRACH2016980, TRACH2017086, TRACH2017368, TRACH2017498, TRACH2017609, TRACH2017949, TRACH2017965, TRACH2017980, TRACH2018034, TRACH2018084, TRACH2018262, TRACH2018273, TRACH2018278, TRACH2018317, TRACH2018345, TRACH2018380, TRACH2018446, TRACH2018449, TRACH2018512, TRACH2018646, TRACH2018663, TRACH2018718, TRACH2018835, TRACH2018882, TRACH2018914, TRACH2019024, TRACH2019046, TRACH2019080, TRACH2019151, TRACH2019154, TRACH2019176, TRACH2019248, TRACH2019309, TRACH2019425, TRACH2019473, TRACH2019602, TRACH2019661, TRACH2019672, TRACH2019673, TRACH2019844, TRACH2019879, TRACH2020048, TRACH2020336, TRACH2020525, TRACH2021398, TRACH2021622, TRACH2021635, TRACH2021964, TRACH2022042, TRACH2022113, TRACH2022253, TRACH2022425, TRACH2022553, TRACH2022649, TRACH2022839, TRACH2023246, TRACH2023299, TRACH2023306, TRACH2023416, TRACH2023479, TRACH2023684, TRACH2023860, TRACH2023876, TRACH2024139, TRACH2024187, TRACH2024271, TRACH2024293, TRACH2024408, TRACH2024512, TRACH2024559, TRACH2024647, TRACH2024651, TRACH2024730, TRACH2024735, TRACH2024749, TRACH2024821, TRACH2025057, TRACH2025084, TRACH2025155, TRACH2025224, TRACH2025379, TRACH2025507, TRACH2025569, TRACH2025705, TRACH2025749, TRACH2025753, TRACH2025810, TRACH2025853, TRACH2025932, TRACH3000014, TRACH3000017, TRACH3000043, TRACH3000134, TRACH3000180, TRACH3000342, TRACH3000420, TRACH3000515, TRACH3000530, TRACH3000548, TRACH3000558, TRACH3000586, TRACH3000692, TRACH3000780, TRACH3000892, TRACH3000926, TRACH3001119, TRACH3001443, TRACH3001550, TRACH3001759, TRACH3002064, TRACH3002107, TRACH3002168, TRACH3002188, TRACH3002245, TRACH3002293, TRACH3002533, TRACH3002561, TRACH3002567, TRACH3002605, TRACH3002650, TRACH3002866, TRACH3002871, TRACH3002876, TRACH3002890, TRACH3003009, TRACH3003037, TRACH3003357, TRACH3003379, TRACH3003586, TRACH3003683, TRACH3003780, TRACH3003805, TRACH3003832, TRACH3004113, TRACH3004288, TRACH3004303, TRACH3004412, TRACH3004424, TRACH3004456, TRACH3004537, TRACH3004596, TRACH3004651, TRACH3004652, TRACH3004671, TRACH3004747, TRACH3004760, TRACH3004783, TRACH3004786, TRACH3004840, TRACH3004931, TRACH3004934, TRACH3005072, TRACH3005085, TRACH3005102, TRACH3005173, TRACH3005191, TRACH3005211, TRACH3005274, TRACH3005294, TRACH3005479, TRACH3005549, TRACH3005699, TRACH3005702, TRACH3005808, TRACH3005852, TRACH3005896, TRACH3006149, TRACH3006228, TRACH3006264, TRACH3006336, TRACH3006379, TRACH3006392, TRACH3006395, TRACH3006397, TRACH3006470, TRACH3006589, TRACH3006626, TRACH3006699, TRACH3006800, TRACH3006889, TRACH3006985, TRACH3007097, TRACH3007268, TRACH3007274, TRACH3007277, TRACH3007391, TRACH3007541, TRACH3007595, TRACH3007627, TRACH3007689, TRACH3007766, TRACH3007866, TRACH3008042, TRACH3008061, TRACH3008201, TRACH3008508, TRACH3008535, TRACH3008629, TRACH3008688, TRACH3008697, TRACH3008713, TRACH3008887, TRACH3008902, TRACH3008990, TRACH3009008, TRACH3009059, TRACH3009061, TRACH3009148, TRACH3009455, TRACH3009701, TRACH3009715, TRACH3009894, TRACH3010079, TRACH3010167, TRACH3010331, TRACH3010342, TRACH3010382, TRACH3010757, TRACH3010901, TRACH3011004, TRACH3011082, TRACH3011184, TRACH3011282, TRACH3011313, TRACH3011454, TRACH3011485, TRACH3011503, TRACH3011538, TRACH3011542, TRACH3012106, TRACH3012161, TRACH3012232, TRACH3012261, TRACH3012445, TRACH3012460, TRACH3012659, TRACH3012718, TRACH3012864, TRACH3012891, TRACH3012942, TRACH3013043, TRACH3013072, TRACH3013426, TRACH3013454, TRACH3013684, TRACH3013693, TRACH3013700, TRACH3013766, TRACH3013900, TRACH3013926, TRACH3014063, TRACH3014183, TRACH3014215, TRACH3014316, TRACH3014415, TRACH3014580, TRACH3014641, TRACH3014885, TRACH3015136, TRACH3015336, TRACH3015346, TRACH3015354, TRACH3015467, TRACH3015626, TRACH3015951, TRACH3016051, TRACH3016120, TRACH3016264, TRACH3016277, TRACH3016368, TRACH3016455, TRACH3016614, TRACH3016992, TRACH3017171, TRACH3017409, TRACH3017934, TRACH3018108, TRACH3018191, TRACH3018240, TRACH3018261, TRACH3018519, TRACH3018524, TRACH3018606, TRACH3018783, TRACH3018907, TRACH3018933, TRACH3018943, TRACH3019018, TRACH3019058, TRACH3019142, TRACH3019347, TRACH3019370, TRACH3019447, TRACH3019598, TRACH3019621, TRACH3019662, TRACH3019807, TRACH3019924, TRACH3019977, TRACH3020137, TRACH3020410, TRACH3020563, TRACH3020605, TRACH3020750, TRACH3020769, TRACH3020928, TRACH3020930, TRACH3021023, TRACH3021066, TRACH3021212, TRACH3021335, TRACH3021373, TRACH3021544, TRACH3021778, TRACH3021834, TRACH3021883, TRACH3022170, TRACH3022198, TRACH3022296, TRACH3022482, TRACH3022732, TRACH3022758, TRACH3022875, TRACH3022910, TRACH3022960, TRACH3023063, TRACH3023203, TRACH3023242, TRACH3023373, TRACH3023516, TRACH3023752, TRACH3023945, TRACH3023960, TRACH3024020, TRACH3024081, TRACH3024342, TRACH3024423, TRACH3024428, TRACH3024512, TRACH3024671, TRACH3024823, TRACH3025302, TRACH3025316, TRACH3025346, TRACH3025520, TRACH3026148, TRACH3026283, TRACH3026299, TRACH3026303, TRACH3026542, TRACH3026650, TRACH3026676, TRACH3026744, TRACH3026949, TRACH3027229, TRACH3027527, TRACH3027681, TRACH3027701, TRACH3027885, TRACH3028031, TRACH3028164, TRACH3028180, TRACH3028195, TRACH3028441, TRACH3028597, TRACH3028678, TRACH3028837, TRACH3028847, TRACH3028855, TRACH3029139, TRACH3029329, TRACH3029451, TRACH3029462, TRACH3029520, TRACH3029592, TRACH3029629, TRACH3029665, TRACH3029670, TRACH3029800, TRACH3030111, TRACH3030130, TRACH3030176, TRACH3030252, TRACH3030725, TRACH3030855, TRACH3030883, TRACH3031316, TRACH3031400, TRACH3031463, TRACH3031479, TRACH3031518, TRACH3031660, TRACH3031678, TRACH3031936, TRACH3032044, TRACH3032065, TRACH3032150, TRACH3032372, TRACH3032480, TRACH3032570, TRACH3032755, TRACH3032827, TRACH3032873, TRACH3033535, TRACH3033680, TRACH3033868, TRACH3034145, TRACH3034414, TRACH3034488, TRACH3034680, TRACH3034731, TRACH3034745, TRACH3034762, TRACH3034903, TRACH3035187, TRACH3035199, TRACH3035235, TRACH3035451, TRACH3035482, TRACH3035526, TRACH3036004, TRACH3036103, TRACH3036193, TRACH3036207, TRACH3036278, TRACH3036309, TRACH3036456, TRACH3036609, TRACH3036638, TRACH3036683, TRACH3036750, TRACH3036792, TRACH3036843, TRACH3036897, TRACH3036997, TRACH3037063, TRACH3037267, TRACH3037288, TRACH3037505, TRACH3037573, TRACH3037696, TRACH3037897, TRACH3038086, TSTOM1000135, TSTOM1000186, TSTOM2000139, TSTOM2000235, TSTOM2000315, TSTOM2000442, TSTOM2000569, TSTOM2000588, TSTOM2001195, TSTOM2001274, TSTOM2001571, TSTOM2001996, TSTOM2002265, TSTOM2002505, TSTOM2002561, TSTOM2002611, TSTOM2002672, TSTOM2002682, TUTER1000014, TUTER1000122, TUTER1000137, TUTER2000057, TUTER2000283, TUTER2000425, TUTER2000916, TUTER2001286, TUTER2001341, TUTER2001387, TUTER2001433, TUTER2001461, TUTER2002028, TUTER2002074, TUTER2002158, TUTER2002228, TUTER2002356, TUTER2002729, UMVEN1000143, UMVEN1000156, UMVEN1000186, UMVEN2000046, UMVEN2000069, UMVEN2000121, UMVEN2000354, UTERU1000008, UTERU1000015, UTERU1000024, UTERU1000031, UTERU1000032, UTERU1000057, UTERU1000065, UTERU1000077, UTERU1000093, UTERU1000096, UTERU1000106, UTERU1000109, UTERU1000131, UTERU1000138, UTERU1000148, UTERU1000160, UTERU1000183, UTERU1000187, UTERU1000192, UTERU1000249, UTERU1000337, UTERU1000339, UTERU2000047, UTERU2000099, UTERU2000154, UTERU2000197, UTERU2000218, UTERU2000238, UTERU2000243, UTERU2000260, UTERU2000300, UTERU2000329, UTERU2000332, UTERU2000338, UTERU2000349, UTERU2000377, UTERU2000393, UTERU2000418, UTERU2000465, UTERU2000485, UTERU2000517, UTERU2000524, UTERU2000537, UTERU2000539, UTERU2000541, UTERU2000542, UTERU2000546, UTERU2000550, UTERU2000569, UTERU2000607, UTERU2000629, UTERU2000649, UTERU2000663, UTERU2000696, UTERU2000794, UTERU2000830, UTERU2000844, UTERU2000922, UTERU2000925, UTERU2001024, UTERU2001110, UTERU2001176, UTERU2001281, UTERU2001389, UTERU2001409, UTERU2001412, UTERU2001504, UTERU2001658, UTERU2001747, UTERU2001876, UTERU2002001, UTERU2002011, UTERU2002176, UTERU2002198, UTERU2002294, UTERU2002332, UTERU2002473, UTERU2002547, UTERU2002693, UTERU2002733, UTERU2002736, UTERU2002737, UTERU2002841, UTERU2002964, UTERU2002993, UTERU2003035, UTERU2003126, UTERU2003135, UTERU2003321, UTERU2003399, UTERU2003411, UTERU2003577, UTERU2003926, UTERU2003973, UTERU2004015, UTERU2004037, UTERU2004039, UTERU2004061, UTERU2004073, UTERU2004163, UTERU2004299, UTERU2004461, UTERU2004520, UTERU2004564, UTERU2004688, UTERU2004698, UTERU2004807, UTERU2005004, UTERU2005050, UTERU2005069, UTERU2005074, UTERU2005179, UTERU2005292, UTERU2005346, UTERU2005450, UTERU2005533, UTERU2005601, UTERU2005664, UTERU2005822, UTERU2005903, UTERU2005905, UTERU2006103, UTERU2006137, UTERU2006182, UTERU2006400, UTERU2006412, UTERU2006429, UTERU2006486, UTERU2006524, UTERU2006547, UTERU2006568, UTERU2006643, UTERU2006651, UTERU2006705, UTERU2006899, UTERU2007004, UTERU2007075, UTERU2007081, UTERU2007128, UTERU2007253, UTERU2007267, UTERU2007444, UTERU2007499, UTERU2007639, UTERU2007724, UTERU2007942, UTERU2008018, UTERU2008019, UTERU2008027, UTERU2008077, UTERU2008130, UTERU2008347, UTERU2008426, UTERU2008516, UTERU2008561, UTERU2008653, UTERU2008705, UTERU2008707, UTERU2008747, UTERU2008785, UTERU2008845, UTERU2008901, UTERU2008930, UTERU2008939, UTERU2008962, UTERU2009094, UTERU2009120, UTERU2009131, UTERU2009147, UTERU2009206, UTERU2009283, UTERU2009414, UTERU2009483, UTERU2009538, UTERU2009540, UTERU2009776, UTERU2009904, UTERU2009951, UTERU2009972, UTERU2010115, UTERU2010124, UTERU2010164, UTERU2010231, UTERU2010304, UTERU2010320, UTERU2010431, UTERU2010525, UTERU2010651, UTERU2010724, UTERU2011195, UTERU2011199, UTERU2011261, UTERU2011287, UTERU2011410, UTERU2011574, UTERU2011657, UTERU2011741, UTERU2011806, UTERU2011811, UTERU2011897, UTERU2011962, UTERU2011968, UTERU2012031, UTERU2012101, UTERU2012114, UTERU2012252, UTERU2012333, UTERU2012581, UTERU2012610, UTERU2012615, UTERU2012688, UTERU2012703, UTERU2012715, UTERU2012741, UTERU2012767, UTERU2012786, UTERU2012890, UTERU2012938, UTERU2012976, UTERU2013048, UTERU2013078, UTERU2013231, UTERU2013262, UTERU2013280, UTERU2013322, UTERU2013483, UTERU2013491, UTERU2013502, UTERU2013586, UTERU2013926, UTERU2013976, UTERU2014001, UTERU2014223, UTERU2014398, UTERU2014464, UTERU2014548, UTERU2014631, UTERU2014668, UTERU2014678, UTERU2014728, UTERU2014998, UTERU2015062, UTERU2015087, UTERU2015108, UTERU2015190, UTERU2015198, UTERU2015202, UTERU2015405, UTERU2015640, UTERU2015653, UTERU2015830, UTERU2015880, UTERU2016147, UTERU2016157, UTERU2016426, UTERU2016464, UTERU2016669, UTERU2016757, UTERU2016761, UTERU2016896, UTERU2016902, UTERU2016979, UTERU2016981, UTERU2017123, UTERU2017303, UTERU2017421, UTERU2017492, UTERU2017613, UTERU2017623, UTERU2017632, UTERU2017762, UTERU2017810, UTERU2017988, UTERU2018127, UTERU2018180, UTERU2018333, UTERU2018364, UTERU2018514, UTERU2018522, UTERU2018523, UTERU2018544, UTERU2018609, UTERU2018674, UTERU2018784, UTERU2018789, UTERU2018811, UTERU2018867, UTERU2018881, UTERU2018955, UTERU2019038, UTERU2019163, UTERU2019257, UTERU2019453, UTERU2019491, UTERU2019534, UTERU2019681, UTERU2019706, UTERU2019710, UTERU2019940, UTERU2019959, UTERU2019964, UTERU2020226, UTERU2020242, UTERU2020292, UTERU2020351, UTERU2020491, UTERU2020718, UTERU2021163, UTERU2021380, UTERU2021649, UTERU2022020, UTERU2022773, UTERU2022955, UTERU2022981, UTERU2023039, UTERU2023045, UTERU2023175, UTERU2023262, UTERU2023550, UTERU2023651, UTERU2023687, UTERU2023712, UTERU2023941, UTERU2024002, UTERU2024042, UTERU2024141, UTERU2024481, UTERU2024656, UTERU2024758, UTERU2024820, UTERU2024881, UTERU2025025, UTERU2025041, UTERU2025366, UTERU2025415, UTERU2025579, UTERU2025645, UTERU2025891, UTERU2026025, UTERU2026090, UTERU2026142, UTERU2026203, UTERU2026775, UTERU2027023, UTERU2027369, UTERU2027591, UTERU2027616, UTERU2027941, UTERU2028377, UTERU2028734, UTERU2029503, UTERU2029660, UTERU2029742, UTERU2029953, UTERU2030213, UTERU2030270, UTERU2030280, UTERU2031060, UTERU2031084, UTERU2031268, UTERU2031295, UTERU2031521, UTERU2031611, UTERU2031703, UTERU2031834, UTERU2031851, UTERU2032075, UTERU2032220, UTERU2032279, UTERU2032726, UTERU2033172, UTERU2033375, UTERU2033382, UTERU2033420, UTERU2033530, UTERU2033577, UTERU2034053, UTERU2034147, UTERU2034695, UTERU2035114, UTERU2035187, UTERU2035231, UTERU2035306, UTERU2035323, UTERU2035328, UTERU2035331, UTERU2035452, UTERU2035469, UTERU2035503, UTERU2035745, UTERU2035908, UTERU2035926, UTERU2035978, UTERU2036089, UTERU2036347, UTERU2036507, UTERU2036512, UTERU2036530, UTERU2036623, UTERU2036690, UTERU2037224, UTERU2037361, UTERU2037423, UTERU2037577, UTERU2037674, UTERU2037791, UTERU2037843, UTERU2038171, UTERU2038251, UTERU3000402, UTERU3000645, UTERU3000665, UTERU3000738, UTERU3000828, UTERU3000844, UTERU3000899, UTERU3000959, UTERU3001029, UTERU3001053, UTERU3001059, UTERU3001240, UTERU3001394; UTERU3001542, UTERU3001558, UTERU3001571, UTERU3001585, UTERU3001632, UTERU3001652, UTERU3001988, UTERU3002209, UTERU3002218, UTERU3002383, UTERU3002600, UTERU3002620, UTERU3002667, UTERU3002701, UTERU3002731, UTERU3002768, UTERU3002786, UTERU3002993, UTERU3003116, UTERU3003135, UTERU3003178, UTERU3003465, UTERU3003495, UTERU3003523, UTERU3003774, UTERU3003776, UTERU3004384, UTERU3004418, UTERU3004477, UTERU3004523, UTERU3004616, UTERU3004635, UTERU3004709, UTERU3004938, UTERU3004992, UTERU3005049, UTERU3005159, UTERU3005205, UTERU3005264, UTERU3005422, UTERU3005585, UTERU3005907, UTERU3006008, UTERU3006228, UTERU3006538, UTERU3006640, UTERU3006687, UTERU3006720, UTERU3006798, UTERU3006884, UTERU3007021, UTERU3007104, UTERU3007108, UTERU3007134, UTERU3007640, UTERU3007731, UTERU3008280, UTERU3008463, UTERU3008660, UTERU3008671, UTERU3008722, UTERU3008917, UTERU3009259, UTERU3009490, UTERU3009690, UTERU3009775, UTERU3009871, UTERU3009979, UTERU3009987, UTERU3010029, UTERU3010526, UTERU3010604, UTERU3010892, UTERU3010919, UTERU3011063, UTERU3011092, UTERU3011273, UTERU3011398, UTERU3011558, UTERU3011579, UTERU3011795, UTERU3011837, UTERU3012293, UTERU3012414, UTERU3012476, UTERU3012599, UTERU3012999, UTERU3013167, UTERU3013302, UTERU3013781, UTERU3014274, UTERU3014446, UTERU3014611, UTERU3014647, UTERU3014791, UTERU3014906, UTERU3015086, UTERU3015299, UTERU3015412, UTERU3015500, UTERU3015647, UTERU3015844, UTERU3016070, UTERU3016273, UTERU3016274, UTERU3016308, UTERU3016789, UTERU3017176, UTERU3017441, UTERU3017626, UTERU3017995, UTERU3018154, UTERU3018172, UTERU3018255, UTERU3018616, UTERU3018711, UTERU3019078

[0750] Of the 17,176 genes that include the cDNAs of the present invention, genes whose expression levels were high enough to detect in each of the BRAWH, BRCAN, BRCOC, BRHIP, BRSSN, BRSTN, and BRTHA libraries were analyzed for expression frequency. The analysis results are described below. Each is a relative value, where the expression level over all tissues is taken as 100. The larger this value, the greater the level of expression.

TABLE 28

| Clone Name | BRAWH | BRCAN | BRCOC | BRHIP | BRSSN | BRSTN | BRTHA |
|---|---|---|---|---|---|---|---|
| 3NB691000116 | 1.626 | 3.731 | 0 | 0 | 0 | 0 | 1.803 |
| 3NB691000173 | 0 | 0 | 0 | 0.806 | 0 | 2.847 | 0 |
| 3NB691000191 | 6.122 | 0 | 0 | 6.246 | 0 | 0 | 0 |
| 3NB692000281 | 0 | 1.010 | 0 | 0.225 | 0 | 0 | 0.244 |
| 3NB692000330 | 0 | 0 | 0 | 0 | 1.642 | 1.590 | 0.978 |
| 3NB692000374 | 2.169 | 0 | 0 | 3.319 | 8.073 | 0 | 2.405 |
| 3NB692000529 | 0 | 0 | 0 | 11.376 | 0 | 0 | 0 |
| 3NB692000912 | 0 | 1.078 | 0 | 0 | 1.749 | 0 | 0 |
| 3NB692001022 | 0 | 0 | 0 | 1.269 | 4.631 | 0 | 0 |
| 3NB692001288 | 0 | 13.749 | 10.615 | 0 | 5.576 | 0 | 1.661 |
| 3NB692001334 | 0.268 | 0.616 | 2.853 | 0 | 1.998 | 8.711 | 0.595 |
| 3NB692001433 | 0 | 0 | 0 | 0 | 0 | 0 | 3.815 |
| 3NB692001442 | 0 | 5.543 | 0 | 0 | 0 | 0 | 1.340 |
| 3NB692001528 | 2.352 | 0 | 0 | 0 | 0 | 0 | 0 |
| 3NB692001557 | 0 | 0 | 0 | 6.189 | 0 | 0 | 0 |
| 3NB692001719 | 0 | 0 | 24.400 | 7.027 | 0 | 0 | 0 |
| ADIPS2000425 | 1.553 | 0 | 0 | 1.584 | 0 | 0 | 0 |
| ADRGL1000002 | 1.647 | 0 | 0 | 6.720 | 0 | 0 | 5.478 |
| ADRGL1000018 | 9.672 | 11.095 | 0 | 14.801 | 0 | 0 | 0 |
| ADRGL1000033 | 0 | 0 | 13.526 | 0 | 0 | 0 | 0 |
| ADRGL1000065 | 0 | 0 | 0 | 5.753 | 0 | 0 | 6.254 |
| ADRGL1000144 | 0 | 0 | 0 | 3.410 | 0 | 12.051 | 0 |
| ADRGL2000006 | 4.158 | 0 | 0 | 3.182 | 0 | 0 | 2.306 |
| ADRGL2000042 | 2.540 | 0 | 0 | 0 | 18.905 | 0 | 0 |
| ADRGL2000097 | 0 | 0 | 0 | 0 | 0 | 8.016 | 0 |
| ADRGL2002013 | 17.992 | 0 | 0 | 0 | 0 | 0 | 0 |
| ADRGL2002191 | 0 | 0 | 0 | 13.043 | 0 | 0 | 0 |
| ADRGL2002477 | 3.402 | 3.903 | 0 | 3.471 | 0 | 12.268 | 3.773 |
| ADRGL2002679 | 12.443 | 0 | 0 | 0 | 0 | 0 | 0 |
| ADRGL2003785 | 0 | 0 | 0 | 14.971 | 0 | 0 | 0 |
| ADRGL2007906 | 18.024 | 20.676 | 0 | 0 | 0 | 0 | 0 |
| ADRGL2009273 | 2.778 | 0 | 0 | 7.086 | 5.170 | 0 | 4.621 |
| ADRGL2010152 | 0 | 0 | 0 | 0 | 21.560 | 0 | 0 |
| ASTRO1000009 | 2.611 | 0 | 0 | 0 | 0 | 0 | 0 |
| ASTRO2000014 | 1.232 | 0 | 0 | 0.419 | 0 | 1.481 | 0.911 |
| ASTRO2000046 | 5.305 | 0 | 0 | 11.240 | 0 | 0 | 4.525 |
| ASTRO2000372 | 0 | 0 | 0 | 22.748 | 0 | 0 | 0 |
| ASTRO2000381 | 0 | 0 | 0 | 6.407 | 0 | 0 | 0 |
| ASTRO2000480 | 0 | 0 | 0 | 2.888 | 0 | 0 | 0 |
| ASTRO2000482 | 22.398 | 0 | 0 | 0 | 0 | 0 | 0 |
| ASTRO2000662 | 0 | 18.504 | 0 | 0 | 0 | 0 | 0 |
| ASTRO2000914 | 1.947 | 0 | 0 | 0 | 0 | 0 | 0 |
| ASTRO2001029 | 0 | 2.877 | 0 | 0 | 0 | 0 | 4.172 |
| ASTRO2001076 | 0 | 0 | 5.035 | 2.900 | 0 | 0 | 1.576 |
| ASTRO2001107 | 14.609 | 0 | 0 | 14.905 | 0 | 0 | 16.201 |
| ASTRO2001823 | 0 | 0 | 0 | 1.481 | 0 | 0 | 0 |
| ASTRO2002035 | 0 | 0 | 0 | 22.147 | 0 | 0 | 0 |
| ASTRO2002202 | 2.304 | 0 | 0 | 0 | 0 | 0 | 0 |
| ASTRO2002733 | 0 | 0 | 0 | 15.696 | 0 | 0 | 0 |
| ASTRO2003024 | 0.948 | 4.349 | 3.358 | 0 | 0 | 0 | 2.102 |
| ASTRO2003316 | 2.950 | 0 | 0 | 0 | 0 | 0 | 0 |
| ASTRO2003461 | 5.957 | 0 | 0 | 0 | 0 | 0 | 0 |
| ASTRO2003574 | 0 | 0 | 0 | 15.221 | 0 | 0 | 33.089 |
| ASTRO2003740 | 0 | 39.838 | 0 | 0 | 0 | 0 | 0 |
| ASTRO2003840 | 0 | 0 | 0 | 0 | 0 | 0 | 6.869 |
| ASTRO2004628 | 26.702 | 0 | 0 | 0 | 0 | 0 | 0 |
| ASTRO2004974 | 1.943 | 0 | 0 | 1.982 | 7.232 | 0 | 0 |
| ASTRO2005360 | 5.966 | 0 | 0 | 0 | 0 | 0 | 6.616 |
| ASTRO2005423 | 6.886 | 0 | 0 | 17.565 | 0 | 0 | 11.455 |
| ASTRO2005863 | 7.603 | 0 | 0 | 0 | 0 | 0 | 0 |
| ASTRO2006475 | 0 | 0 | 0 | 0 | 0 | 0 | 16.519 |
| ASTRO2007948 | 5.009 | 0 | 0 | 2.555 | 0 | 0 | 0 |
| ASTRO2008040 | 23.959 | 0 | 0 | 12.222 | 0 | 0 | 0 |
| ASTRO2008216 | 0 | 0 | 0 | 3.256 | 0 | 0 | 0 |
| ASTRO2008972 | 0 | 0 | 0 | 0 | 0 | 0 | 17.271 |
| ASTRO2009068 | 5.658 | 0 | 0 | 0 | 21.061 | 0 | 0 |
| ASTRO2010072 | 0 | 39.838 | 0 | 0 | 0 | 0 | 0 |
| ASTRO2010799 | 0 | 0 | 50.556 | 0 | 0 | 0 | 0 |
| ASTRO2010819 | 4.037 | 0 | 2.384 | 4.119 | 0 | 0 | 0 |
| ASTRO2011422 | 0 | 0 | 0 | 7.401 | 0 | 0 | 0 |
| ASTRO2012552 | 0 | 0 | 0 | 0 | 0 | 0 | 1.639 |
| ASTRO2013585 | 1.462 | 0 | 0 | 0.995 | 0 | 0 | 0 |
| ASTRO2014135 | 0 | 0 | 12.305 | 0 | 0 | 0 | 0 |
| ASTRO2014174 | 0 | 0 | 0 | 22.748 | 0 | 0 | 0 |
| ASTRO2014392 | 0 | 33.906 | 0 | 0 | 0 | 0 | 0 |
| ASTRO2014576 | 0 | 0 | 0 | 0 | 42.066 | 0 | 0 |
| ASTRO2014863 | 0 | 0 | 11.968 | 0 | 12.574 | 0 | 0 |
| ASTRO2015328 | 7.611 | 0 | 0 | 3.883 | 0 | 0 | 4.220 |
| ASTRO2016114 | 14.497 | 0 | 0 | 0 | 0 | 0 | 0 |
| ASTRO2016491 | 2.014 | 1.155 | 10.704 | 4.110 | 5.623 | 3.632 | 1.117 |
| ASTRO2018169 | 0 | 2.167 | 0 | 1.927 | 0 | 0 | 0 |
| ASTRO2018540 | 0 | 0 | 0 | 1.587 | 0 | 0 | 0 |
| ASTRO3000482 | 0 | 0 | 0 | 0 | 0 | 0 | 24.247 |
| BGGI11000123 | 0.701 | 0 | 0 | 0.715 | 0 | 0 | 0.777 |
| BGGI12000054 | 0.236 | 3.782 | 3.337 | 0.240 | 0.877 | 0 | 1.045 |
| BGGI12000616 | 0 | 2.051 | 0 | 0 | 0 | 3.224 | 0.991 |
| BGGI12000839 | 0.737 | 0 | 0 | 0.752 | 0 | 0 | 0 |
| BGGI12001002 | 0 | 0 | 0 | 1.811 | 6.607 | 0 | 0 |
| BGGI12001075 | 0 | 0 | 0 | 2.020 | 0 | 0 | 0 |
| BGGI12001682 | 2.065 | 16.585 | 7.317 | 0 | 3.844 | 7.447 | 2.290 |
| BGGI12001714 | 2.550 | 0 | 0 | 0 | 0 | 0 | 0 |
| BLADE2001371 | 0 | 0 | 0 | 12.691 | 0 | 0 | 0 |
| BLADE2002738 | 0 | 0 | 0 | 0 | 0 | 0 | 13.644 |
| BLADE2004849 | 0 | 0 | 0 | 0 | 0 | 0 | 8.220 |
| BLADE2006412 | 12.143 | 0 | 0 | 6.194 | 0 | 0 | 0 |
| BLADE2006830 | 1.681 | 0 | 0 | 0 | 0 | 0 | 0 |
| BLADE2007043 | 12.470 | 0 | 0 | 0 | 0 | 0 | 0 |
| BLADE2007589 | 0 | 0 | 0 | 0 | 0 | 0 | 5.482 |
| BLADE2007935 | 0 | 0 | 0 | 12.691 | 0 | 0 | 0 |
| BLADE2008398 | 12.401 | 0 | 0 | 18.978 | 0 | 0 | 13.752 |
| BNGH41000098 | 7.604 | 0 | 8.980 | 5.172 | 0 | 0 | 16.866 |
| BNGH41000137 | 13.016 | 0 | 0 | 0 | 0 | 0 | 9.623 |
| BNGH41000190 | 0 | 0 | 0 | 0 | 0 | 0 | 2.806 |
| BNGH41000198 | 0 | 0 | 0 | 2.120 | 0 | 14.982 | 2.304 |
| BNGH42000360 | 0 | 0 | 0 | 0 | 0 | 1.134 | 0 |
| BNGH42000532 | 9.457 | 0 | 0 | 0 | 0 | 0 | 0 |
| BNGH42000739 | 12.444 | 2.855 | 6.612 | 26.026 | 0 | 0 | 5.520 |
| BNGH42001247 | 0 | 0 | 0 | 0 | 0 | 18.969 | 0 |
| BNGH42002168 | 0 | 0 | 0 | 1.357 | 0 | 0 | 1.475 |
| BNGH42002387 | 0 | 0 | 0 | 0 | 0 | 0 | 11.705 |
| BNGH42005968 | 0 | 0 | 0 | 0 | 0 | 0 | 2.547 |
| BNGH42006135 | 6.602 | 0 | 0 | 8.083 | 0 | 0 | 4.393 |
| BNGH42007460 | 4.031 | 0 | 3.570 | 1.028 | 0 | 0 | 0 |
| BNGH42007709 | 0.230 | 2.112 | 3.262 | 0.470 | 0.857 | 4.150 | 0 |
| BNGH42007788 | 0 | 0 | 0 | 3.141 | 0 | 0 | 0 |
| BNGH42008603 | 13.017 | 6.637 | 0 | 5.903 | 5.383 | 0 | 1.604 |
| BNGH42008743 | 0 | 0 | 0 | 3.141 | 0 | 0 | 0 |
| BNGH42009025 | 0 | 0 | 0 | 0 | 10.378 | 0 | 0 |
| BRACE1000020 | 0 | 0 | 0 | 11.484 | 0 | 0 | 0 |
| BRACE1000042 | 0 | 0 | 5.393 | 6.212 | 5.666 | 0 | 1.688 |
| BRACE1000051 | 17.925 | 0 | 0 | 0 | 0 | 0 | 0 |
| BRACE1000065 | 0 | 0 | 0 | 0 | 0 | 0 | 43.859 |
| BRACE1000070 | 7.151 | 4.101 | 0 | 0 | 0 | 0 | 1.982 |
| BRACE1000073 | 0 | 0 | 44.809 | 0 | 0 | 0 | 0 |
| BRACE1000101 | 0 | 0 | 0 | 0 | 0 | 40.349 | 0 |
| BRACE1000115 | 0.562 | 1.718 | 0.663 | 0 | 2.787 | 1.350 | 0 |
| BRACE1000131 | 0 | 0 | 3.690 | 1.063 | 3.877 | 0 | 2.310 |
| BRACE1000159 | 0 | 8.472 | 0 | 0 | 0 | 0 | 2.048 |
| BRACE1000169 | 0 | 0 | 0 | 20.683 | 0 | 0 | 0 |
| BRACE1000186 | 4.324 | 0 | 0 | 2.206 | 0 | 7.796 | 0 |
| BRACE1000187 | 10.796 | 0 | 0 | 8.261 | 0 | 0 | 17.958 |
| BRACE1000258 | 31.956 | 0 | 0 | 0 | 0 | 0 | 0 |
| BRACE2000109 | 0 | 0 | 0 | 0 | 0 | 0 | 60.975 |
| BRACE2000141 | 34.735 | 0 | 0 | 35.438 | 0 | 0 | 0 |
| BRACE2000245 | 0 | 0 | 0 | 0 | 0 | 0 | 39.230 |
| BRACE2000280 | 0 | 0 | 0 | 19.121 | 0 | 67.577 | 0 |
| BRACE2000300 | 15.947 | 0 | 18.831 | 10.846 | 0 | 0 | 5.895 |
| BRACE2000307 | 1.178 | 2.702 | 0 | 2.403 | 0 | 0 | 1.306 |
| BRACE2000331 | 58.488 | 0 | 0 | 0 | 0 | 0 | 0 |
| BRACE2000332 | 0 | 0 | 0 | 0 | 0 | 0 | 6.020 |
| BRACE2000347 | 0 | 5.931 | 0 | 0 | 9.622 | 0 | 0 |
| BRACE2000525 | 0 | 7.455 | 5.756 | 3.315 | 0 | 0 | 3.604 |
| BRACE2000565 | 0 | 16.454 | 0 | 0 | 0 | 0 | 7.953 |
| BRACE2000698 | 0 | 0 | 30.481 | 0 | 0 | 0 | 0 |
| BRACE2000733 | 0 | 0 | 0 | 0 | 65.597 | 0 | 0 |
| BRAGE2000750 | 0 | 0 | 0 | 0 | 0 | 0 | 22.823 |
| BRACE2000864 | 1.055 | 2.422 | 3.739 | 0.538 | 1.964 | 9.515 | 0 |
| BRACE2000893 | 4.519 | 0 | 0 | 0 | 0 | 0 | 5.012 |
| BRACE2000975 | 13.452 | 1.470 | 2.269 | 11.110 | 2.384 | 4.619 | |
| 12.787 | | | | | | | |
| BRACE2001065 | 0 | 0 | 0 | 0 | 0 | 0 | 7.364 |
| BRACE2001070 | 0 | 0 | 0 | 0 | 83.985 | 0 | 0 |
| BRACE2001143 | 0 | 0 | 0 | 0 | 0 | 5.356 | 0 |
| BRACE2001154 | 0 | 0 | 0 | 10.840 | 0 | 0 | 0 |
| BRACE2001188 | 0 | 0 | 0 | 0 | 0 | 0 | 3.130 |
| BRACE2001197 | 0 | 0 | 0 | 58.973 | 0 | 0 | 0 |
| BRACE2001236 | 0 | 0 | 0 | 0 | 0 | 64.877 | 0 |
| BRACE2001477 | 6.878 | 0 | 0 | 10.526 | 0 | 0 | 11.442 |
| BRACE2001496 | 0 | 0 | 17.187 | 0 | 18.057 | 17.493 | 0 |
| BRACE2001497 | 3.727 | 0 | 0 | 7.604 | 0 | 0 | 6.199 |
| BRACE2001534 | 0 | 7.077 | 0 | 3.147 | 0 | 0 | 0 |
| BRACE2001673 | 0 | 1.076 | 0 | 0 | 0 | 2.536 | 0.260 |
| BRACE2001692 | 1.817 | 0 | 0 | 0 | 0 | 0 | 0 |
| BRACE2001709 | 0 | 7.445 | 0 | 0 | 12.079 | 23.403 | 3.599 |
| BRACE2001711 | 3.890 | 0 | 0 | 0 | 0 | 0 | 0 |
| BRACE2001726 | 0 | 0 | 0 | 0 | 0 | 0 | 39.237 |
| BRACE2001834 | 7.591 | 0 | 26.891 | 19.361 | 0 | 13.685 | 0 |
| BRACE2001892 | 7.573 | 4.865 | 2.146 | 12.053 | 4.510 | 2.184 | 9.742 |
| BRACE2001944 | 6.273 | 0 | 0 | 0 | 23.348 | 0 | 0 |
| BRACE2001971 | 2.243 | 10.292 | 15.892 | 0 | 0 | 0 | 2.487 |
| BRACE2002050 | 5.800 | 6.653 | 10.273 | 5.917 | 0 | 0 | 6.432 |
| BRACE2002091 | 2.112 | 0 | 0 | 2.154 | 0 | 0 | 0 |
| BRACE2002356 | 0 | 0 | 0 | 18.538 | 0 | 0 | 0 |
| BRACE2002392 | 0 | 15.817 | 12.212 | 5.275 | 0 | 6.215 | 1.911 |
| BRACE2002478 | 0 | 0 | 0 | 14.787 | 0 | 0 | 0 |
| BRACE2002495 | 0 | 0 | 0 | 0 | 0 | 83.553 | 0 |
| BRACE2002582 | 6.533 | 0 | 0 | 13.331 | 0 | 47.115 | 0 |
| BRACE2002585 | 0 | 57.190 | 0 | 0 | 0 | 0 | 0 |
| BRACE2002606 | 0 | 0 | 0 | 5.468 | 0 | 0 | 0 |
| BRACE2002677 | 0 | 0 | 0 | 0 | 0 | 6.961 | 0 |
| BRACE2002682 | 19.147 | 0 | 0 | 19.534 | 0 | 0 | 0 |
| BRACE2002803 | 0 | 0 | 0 | 0 | 0 | 0 | 20.206 |
| BRACE2002812 | 5.877 | 0 | 0 | 0 | 21.873 | 0 | 19.551 |
| BRACE2002860 | 0 | 0 | 0 | 0 | 0 | 0 | 2.792 |
| BRACE2002896 | 14.988 | 0 | 53.097 | 0 | 0 | 0 | 0 |
| BRACE2003037 | 4.318 | 9.907 | 15.298 | 6.609 | 0 | 0 | 2.394 |
| BRACE2003078 | 0 | 0 | 0 | 0 | 0 | 58.364 | 0 |
| BRACE2003097 | 0 | 0 | 0 | 58.973 | 0 | 0 | 0 |
| BRACE2003172 | 0 | 0.746 | 2.303 | 0.663 | 0 | 1.172 | 1.442 |
| BRACE2003217 | 0 | 0 | 15.270 | 0 | 0 | 0 | 0 |
| BRACE2003254 | 0 | 0 | 0 | 0 | 0 | 3.264 | 4.016 |
| BRACE2003527 | 0 | 5.914 | 0 | 0 | 9.594 | 0 | 0 |
| BRACE2003539 | 0 | 0 | 0 | 0 | 0 | 0 | 60.975 |
| BRACE2003598 | 0 | 0 | 0 | 0 | 0 | 0 | 60.975 |
| BRACE2003609 | 9.090 | 0 | 0 | 0 | 0 | 0 | 0 |
| BRACE2003700 | 0 | 0 | 0 | 14.012 | 0 | 0 | 15.230 |
| BRACE2003785 | 0.972 | 6.688 | 0 | 6.940 | 0 | 0 | 0 |
| BRACE2003788 | 0 | 0 | 0 | 39.793 | 0 | 0 | 0 |
| BRACE2003800 | 0 | 0 | 0 | 0 | 0 | 0 | 30.394 |
| BRACE2003827 | 0 | 0 | 0 | 0.894 | 3.261 | 0 | 0 |
| BRACE2003845 | 0 | 0 | 0 | 4.648 | 0 | 0 | 0 |
| BRACE2003846 | 3.259 | 0 | 0 | 0.665 | 2.426 | 0 | 0 |
| BRACE2003892 | 2.182 | 0 | 0 | 2.227 | 0 | 0 | 2.420 |
| BRACE2003904 | 0 | 0 | 0 | 0 | 0 | 9.348 | 0 |
| BRACE2003905 | 15.814 | 0 | 0 | 0 | 0 | 0 | 0 |
| BRACE2003944 | 0.518 | 1.188 | 1.834 | 0 | 1.927 | 1.867 | 0 |
| BRACE2003982 | 0 | 9.441 | 14.578 | 4.198 | 0 | 0 | 0 |
| BRACE2005083 | 0 | 0 | 0 | 24.542 | 0 | 0 | 0 |
| BRACE2005087 | 2.075 | 0 | 0 | 6.350 | 0 | 0 | 0 |
| BRACE2005099 | 2.659 | 12.199 | 9.418 | 2.712 | 9.895 | 19.172 | 4.422 |
| BRACE2005151 | 2.101 | 0 | 0 | 0 | 0 | 0 | 4.660 |
| BRACE2005193 | 0 | 0 | 0 | 58.973 | 0 | 0 | 0 |
| BRACE2005231 | 6.385 | 0 | 0 | 9.771 | 0 | 0 | 3.540 |
| BRACE2005251 | 21.139 | 0 | 0 | 0 | 0 | 0 | 0 |
| BRACE2005253 | 0 | 0 | 0 | 0 | 0 | 0 | 60.975 |
| BRACE2005290 | 0 | 0 | 0 | 25.958 | 0 | 0 | 0 |
| BRACE2005395 | 0 | 0 | 0 | 0 | 0 | 0 | 10.456 |
| BRACE2005408 | 0 | 21.821 | 0 | 9.704 | 0 | 0 | 0 |
| BRACE2005434 | 0 | 0 | 0 | 0 | 0 | 4.972 | 0 |
| BRACE2005448 | 6.800 | 0 | 0 | 0 | 0 | 0 | 0 |
| BRACE2005457 | 58.488 | 0 | 0 | 0 | 0 | 0 | 0 |
| BRACE2005642 | 7.307 | 0 | 0 | 0 | 0 | 0 | 8.103 |
| BRACE2005681 | 16.971 | 4.581 | 0 | 20.370 | 7.431 | 7.199 | 3.321 |
| BRACE2005719 | 0 | 6.814 | 0 | 3.030 | 11.054 | 0 | 0 |
| BRACE2005858 | 41.331 | 0 | 0 | 21.084 | 0 | 0 | 22.917 |
| BRACE2006055 | 4.001 | 0 | 0 | 0 | 0 | 0 | 2.218 |
| BRACE2006075 | 0 | 0 | 0 | 0 | 0 | 58.507 | 0 |
| BRACE2006084 | 0 | 14.084 | 0 | 0 | 0 | 11.067 | 0 |
| BRACE2006089 | 16.309 | 0 | 0 | 0 | 0 | 0 | 0 |
| BRACE2006167 | 8.432 | 9.673 | 22.404 | 4.301 | 0 | 7.601 | 7.013 |
| BRACE2006258 | 0.819 | 3.758 | 5.804 | 0 | 6.097 | 0 | 0 |
| BRACE2006264 | 0 | 0 | 29.900 | 0 | 0 | 0 | 9.360 |
| BRACE2006281 | 0 | 0 | 0 | 0 | 0 | 10.896 | 0 |
| BRACE2006344 | 0 | 8.201 | 0 | 0 | 0 | 0 | 0 |
| BRACE2006354 | 0 | 14.276 | 0 | 12.697 | 0 | 0 | 0 |
| BRACE2006363 | 0 | 21.263 | 0 | 0 | 0 | 0 | 0 |
| BRACE2006380 | 0 | 0 | 0 | 41.817 | 0 | 0 | 0 |
| BRACE2006397 | 0.295 | 0.677 | 0 | 0 | 0 | 1.064 | 0.327 |
| BRACE2006514 | 13.031 | 0 | 0 | 5.318 | 3.233 | 3.132 | 5.780 |
| BRACE2006537 | 0 | 7.407 | 3.813 | 1.098 | 4.006 | 3.881 | 2.387 |
| BRACE2006636 | 13.710 | 0 | 0 | 27.974 | 0 | 0 | 15.203 |
| BRACE2006743 | 8.892 | 0 | 0 | 4.536 | 33.098 | 0 | 0 |
| BRACE2006753 | 0 | 14.107 | 0 | 12.547 | 0 | 0 | 0 |
| BRACE2006821 | 0 | 72.016 | 0 | 0 | 0 | 6.658 | 0 |
| BRACE2006859 | 0 | 0 | 0 | 0 | 0 | 0 | 11.267 |
| BRACE2006871 | 0 | 0 | 3.542 | 0 | 0 | 0 | 0 |
| BRACE2006937 | 4.015 | 3.070 | 0 | 1.365 | 4.981 | 4.826 | 1.484 |
| BRACE2006982 | 0 | 11.904 | 9.191 | 0 | 4.828 | 14.032 | 0 |
| BRACE2007013 | 0 | 47.046 | 0 | 10.461 | 0 | 0 | 0 |
| BRACE2007064 | 6.500 | 3.728 | 0 | 4.973 | 0 | 5.859 | 5.406 |
| BRACE2007089 | 0 | 1.943 | 0 | 0 | 0 | 0 | 0 |
| BRACE2007109 | 1.909 | 19.709 | 0 | 0.974 | 3.553 | 3.442 | 0 |
| BRACE2007191 | 0.687 | 1.576 | 0 | 0.701 | 0 | 0 | 3.809 |
| BRACE2007201 | 0 | 0 | 0 | 58.973 | 0 | 0 | 0 |
| BRACE2007254 | 0 | 17.078 | 0 | 0 | 0 | 0 | 0 |
| BRACE2007401 | 9.138 | 4.193 | 6.474 | 1.865 | 0 | 0 | 0 |
| BRACE2007518 | 9.078 | 0 | 0 | 2.315 | 0 | 0 | 10.067 |
| BRACE2007522 | 0 | 0 | 0 | 58.973 | 0 | 0 | 0 |
| BRACE2007567 | 0 | 0 | 0 | 2.831 | 0 | 5.003 | 0 |
| BRACE2007577 | 0.979 | 0 | 0 | 0.999 | 0 | 0 | 1.086 |
| BRACE2007641 | 3.135 | 3.596 | 0 | 4.798 | 5.835 | 0 | 3.477 |
| BRACE2007663 | 0 | 0 | 0 | 32.393 | 0 | 0 | 0 |
| BRACE2007671 | 0 | 0 | 16.431 | 0 | 11.509 | 5.575 | 0 |
| BRACE2007708 | 6.375 | 9.751 | 15.056 | 0 | 0 | 0 | 2.357 |
| BRACE2007767 | 0 | 0 | 0 | 0 | 0 | 0 | 3.452 |
| BRACE2007768 | 0 | 0 | 0 | 9.762 | 0 | 0 | 0 |
| BRACE2007798 | 2.069 | 9.492 | 7.329 | 2.111 | 19.249 | 18.648 | 0 |
| BRACE2007832 | 0 | 0 | 0 | 25.608 | 0 | 0 | 0 |
| BRACE2007882 | 13.172 | 0 | 0 | 6.719 | 0 | 0 | 0 |
| BRACE2007937 | 12.699 | 0 | 0 | 2.591 | 0 | 9.158 | 2.817 |
| BRACE2007952 | 14.547 | 0 | 0 | 19.789 | 18.048 | 0 | 5.378 |
| BRACE2008097 | 0 | 0 | 17.008 | 0 | 0 | 0 | 0 |
| BRACE2008216 | 0 | 30.375 | 0 | 13.508 | 0 | 0 | 0 |
| BRACE2008251 | 0 | 31.081 | 0 | 0 | 0 | 0 | 0 |
| BRACE2008358 | 0 | 0 | 0 | 2.312 | 0 | 0 | 0 |
| BRACE2008380 | 0 | 8.965 | 13.843 | 0 | 14.544 | 21.134 | 0 |
| BRACE2008385 | 0 | 0 | 7.399 | 0 | 0 | 7.531 | 0 |
| BRACE2008399 | 0 | 0 | 0 | 5.647 | 0 | 0 | 0 |
| BRACE2008402 | 0 | 0 | 0 | 4.278 | 0 | 0 | 0 |
| BRACE2008553 | 0 | 0 | 0 | 0 | 0 | 14.996 | 0 |
| BRACE2008653 | 9.493 | 2.420 | 0 | 5.381 | 0 | 0 | 5.849 |
| BRACE2008706 | 0 | 0 | 0 | 0 | 0 | 0 | 3.644 |
| BRACE2008708 | 0 | 0 | 0 | 0 | 0 | 50.398 | 0 |
| BRACE2008857 | 58.488 | 0 | 0 | 0 | 0 | 0 | 0 |
| BRACE2008941 | 19.988 | 0 | 0 | 0 | 0 | 0 | 0 |
| BRACE2008968 | 0 | 0 | 0 | 1.186 | 0 | 2.097 | 0.645 |
| BRACE2009037 | 0.584 | 2.680 | 0 | 0.894 | 0 | 0 | 1.295 |
| BRACE2009045 | 0 | 0 | 0 | 12.286 | 0 | 0 | 13.354 |
| BRACE2009291 | 1.323 | 3.035 | 0 | 0 | 0 | 0 | 0 |
| BRACE2009307 | 0 | 0 | 0 | 15.110 | 0 | 0 | 16.424 |
| BRACE2009366 | 0 | 0 | 12.799 | 3.686 | 0 | 0 | 0 |
| BRACE2009483 | 8.786 | 0 | 0 | 0 | 0 | 0 | 9.744 |
| BRACE2009517 | 0 | 0 | 0 | 2.767 | 0 | 0 | 0 |
| BRACE2009566 | 0 | 0 | 67.189 | 19.350 | 0 | 0 | 0 |
| BRACE2010489 | 63.510 | 0 | 0 | 10.799 | 0 | 0 | 0 |
| BRACE2010651 | 18.479 | 0 | 0 | 0 | 0 | 0 | 0 |
| BRACE2010669 | 19.124 | 0 | 0 | 6.504 | 0 | 0 | 7.069 |
| BRACE2010753 | 0 | 0 | 66.077 | 0 | 0 | 0 | 20.684 |
| BRACE2011183 | 0 | 0 | 0 | 13.116 | 0 | 0 | 14.257 |
| BRACE2012317 | 23.331 | 0 | 0 | 34.304 | 0 | 0 | 3.805 |
| BRACE2012528 | 3.794 | 7.616 | 0 | 4.354 | 0 | 6.840 | 13.673 |
| BRACE2012814 | 3.067 | 0 | 0 | 0 | 0 | 0 | 1.701 |
| BRACE2013855 | 0 | 0 | 28.415 | 0 | 0 | 0 | 0 |
| BRACE2013911 | 7.517 | 0 | 0 | 0 | 0 | 0 | 16.672 |
| BRACE2014257 | 12.401 | 0 | 0 | 0 | 0 | 0 | 0 |
| BRACE2014306 | 0 | 0 | 34.486 | 0 | 0 | 17.550 | 5.398 |
| BRACE2014657 | 15.451 | 0 | 0 | 0 | 0 | 0 | 0 |
| BRACE2014746 | 0 | 32.019 | 0 | 0 | 0 | 0 | 0 |
| BRACE2014850 | 7.500 | 0 | 0 | 0 | 0 | 0 | 8.317 |
| BRACE2015058 | 0 | 0 | 0 | 8.947 | 0 | 0 | 19.449 |
| BRACE2015132 | 0 | 0 | 58.366 | 0 | 0 | 0 | 0 |
| BRACE2015287 | 0 | 0 | 8.135 | 0 | 0 | 0 | 2.547 |
| BRACE2015368 | 58.488 | 0 | 0 | 0 | 0 | 0 | 0 |
| BRACE2015412 | 12.174 | 0 | 0 | 0 | 0 | 0 | 0 |
| BRACE2016194 | 0 | 76.373 | 0 | 0 | 0 | 0 | 0 |
| BRACE2017359 | 0 | 0 | 0 | 41.817 | 0 | 0 | 0 |
| BRACE2017397 | 0 | 0 | 0 | 4.813 | 0 | 0 | 0 |
| BRACE2017574 | 0 | 0 | 0 | 0 | 0 | 0 | 5.682 |
| BRACE2017844 | 0 | 11.790 | 0 | 5.243 | 38.254 | 0 | 0 |
| BRACE2017934 | 0 | 0 | 0 | 0 | 0 | 33.326 | 0 |
| BRACE2018337 | 9.527 | 0 | 0 | 2.430 | 8.865 | 25.764 | 0 |
| BRACE2018736 | 0 | 0 | 0 | 0 | 0 | 0 | 44.853 |
| BRACE2018762 | 0 | 0 | 0 | 58.973 | 0 | 0 | 0 |
| BRACE2018847 | 39.016 | 0 | 0 | 0 | 0 | 0 | 21.634 |
| BRACE2019004 | 0 | 0 | 0 | 0 | 0 | 0 | 60.975 |
| BRACE2019147 | 0 | 0 | 0 | 2.185 | 7.971 | 0 | 0 |
| BRACE2019327 | 0 | 20.559 | 0 | 0 | 0 | 0 | 9.938 |
| BRACE2019348 | 0 | 0 | 0 | 0 | 0 | 0 | 25.772 |
| BRACE2019519 | 0 | 0 | 65.939 | 0 | 0 | 0 | 0 |
| BRACE2019877 | 0 | 13.934 | 0 | 0 | 0 | 21.900 | 6.735 |
| BRACE2021014 | 17.772 | 0 | 0 | 18.132 | 0 | 0 | 0 |
| BRACE2021708 | 29.608 | 0 | 0 | 0 | 0 | 0 | 0 |
| BRACE2021932 | 0 | 0 | 0 | 58.973 | 0 | 0 | 0 |
| BRACE2022333 | 17.756 | 0 | 0 | 18.115 | 0 | 0 | 19.690 |
| BRACE2022638 | 1.491 | 1.710 | 0 | 0.760 | 0 | 2.687 | 0.827 |
| BRACE2023223 | 0 | 0 | 0 | 37.268 | 0 | 0 | 0 |
| BRACE2023718 | 32.097 | 0 | 0 | 16.373 | 0 | 0 | 0 |
| BRACE2024781 | 58.488 | 0 | 0 | 0 | 0 | 0 | 0 |
| BRACE2025437 | 0 | 0 | 0 | 0 | 0 | 11.008 | 0 |
| BRACE2026142 | 0 | 0 | 0 | 0 | 83.985 | 0 | 0 |
| BRACE2027018 | 0 | 0 | 83.309 | 0 | 0 | 0 | 0 |
| BRACE2027643 | 0 | 33.045 | 0 | 0 | 0 | 0 | 0 |
| BRACE2027767 | 58.488 | 0 | 0 | 0 | 0 | 0 | 0 |
| BRACE2027896 | 25.575 | 0 | 0 | 0 | 0 | 0 | 0 |
| BRACE2028392 | 0 | 0 | 18.058 | 0 | 37.945 | 36.760 | 0 |
| BRACE2028636 | 0 | 0 | 0 | 13.653 | 0 | 0 | 0 |
| BRACE2030341 | 0 | 0 | 0 | 7.057 | 0 | 0 | 0 |
| BRACE2031154 | 0 | 0 | 0 | 0 | 0 | 0 | 60.975 |
| BRACE2032477 | 0 | 0 | 0 | 5.685 | 0 | 0 | 0 |
| BRACE2032502 | 0 | 0 | 0 | 0 | 0 | 0 | 60.975 |
| BRACE2035381 | 10.177 | 0 | 0 | 20.766 | 0 | 0 | 11.286 |
| BRACE2037132 | 58.488 | 0 | 0 | 0 | 0 | 0 | 0 |
| BRACE2037295 | 3.280 | 0 | 0 | 0 | 12.209 | 0 | 0 |
| BRACE2039624 | 0.967 | 0 | 0 | 0.987 | 3.601 | 3.488 | 1.073 |
| BRACE2044105 | 0 | 0 | 0 | 0 | 0 | 72.562 | 0 |
| BRACE2044286 | 18.667 | 0 | 0 | 0 | 0 | 0 | 0 |
| BRACE2045954 | 27.309 | 0 | 0 | 0 | 0 | 0 | 0 |
| BRACE3003192 | 58.488 | 0 | 0 | 0 | 0 | 0 | 0 |
| BRACE3004046 | 0 | 0 | 0 | 58.973 | 0 | 0 | 0 |
| BRACE3004371 | 11.270 | 0 | 0 | 7.666 | 0 | 0 | 4.166 |
| BRACE3004767 | 58.488 | 0 | 0 | 0 | 0 | 0 | 0 |
| BRACE3005499 | 31.276 | 0 | 0 | 0 | 0 | 0 | 0 |
| BRACE3005760 | 45.047 | 0 | 0 | 22.980 | 0 | 0 | 0 |
| BRACE3005938 | 1.101 | 0 | 3.901 | 4.494 | 4.099 | 0 | 4.885 |
| BRACE3005989 | 0 | 0.536 | 0 | 0.239 | 0.870 | 0.843 | 0 |
| BRACE3007258 | 13.014 | 0 | 0 | 13.277 | 0 | 0 | 28.863 |
| BRACE3007480 | 19.471 | 0 | 0 | 52.973 | 0 | 0 | 7.197 |
| BRACE3008384 | 0 | 0 | 0 | 0 | 0 | 0 | 43.859 |
| BRACE3009237 | 18.139 | 0 | 0 | 37.013 | 0 | 0 | 20.116 |
| BRACE3009416 | 0 | 0 | 0 | 29.118 | 0 | 0 | 0 |
| BRACE3009724 | 58.488 | 0 | 0 | 0 | 0 | 0 | 0 |
| BRACE3010397 | 0 | 0 | 0 | 0 | 0 | 0 | 75.757 |
| BRACE3010428 | 6.868 | 0 | 0 | 2.336 | 4.261 | 0 | 2.539 |
| BRACE3010438 | 5.372 | 0 | 0 | 0 | 0 | 0 | 3.971 |
| BRACE3011271 | 11.036 | 0 | 0 | 11.259 | 0 | 0 | 0 |
| BRACE3011421 | 28.251 | 0 | 0 | 0 | 0 | 0 | 0 |
| BRACE3013780 | 0 | 0 | 0 | 0 | 17.852 | 0 | 0 |
| BRACE3016122 | 58.488 | 0 | 0 | 0 | 0 | 0 | 0 |
| BRACE3018963 | 0 | 0 | 0 | 58.973 | 0 | 0 | 0 |
| BRACE3019071 | 28.341 | 0 | 0 | 0 | 0 | 0 | 31.429 |
| BRACE3019941 | 0 | 0 | 0 | 0 | 0 | 0 | 6.480 |
| BRACE3022312 | 0 | 0 | 0 | 0 | 0 | 0 | 37.734 |
| BRACE3022340 | 58.488 | 0 | 0 | 0 | 0 | 0 | 0 |
| BRACE3025719 | 0 | 0 | 0 | 0 | 67.040 | 0 | 0 |
| BRACE3026735 | 24.173 | 0 | 0 | 0 | 0 | 0 | 0 |
| BRACE3026802 | 0 | 0 | 0 | 0 | 63.610 | 0 | 0 |
| BRACE3027478 | 0 | 0 | 0 | 0 | 0 | 0 | 35.497 |
| BRACE3027931 | 0 | 0 | 0 | 34.325 | 0 | 0 | 0 |
| BRACE3029021 | 0 | 0 | 0 | 74.193 | 0 | 0 | 0 |
| BRACE3030866 | 58.488 | 0 | 0 | 0 | 0 | 0 | 0 |
| BRACE3031185 | 58.488 | 0 | 0 | 0 | 0 | 0 | 0 |
| BRACE3031838 | 58.488 | 0 | 0 | 0 | 0 | 0 | 0 |
| BRACE3032427 | 58.488 | 0 | 0 | 0 | 0 | 0 | 0 |
| BRACE3032631 | 12.612 | 0 | 0 | 0 | 0 | 45.475 | 0 |
| BRACE3036156 | 0 | 0 | 0 | 44.660 | 0 | 0 | 24.272 |
| BRACE3039358 | 41.331 | 0 | 0 | 21.084 | 0 | 0 | 22.917 |
| BRACE3040863 | 17.888 | 0 | 0 | 18.250 | 0 | 0 | 0 |
| BRACE3042326 | 0 | 0 | 0 | 35.796 | 0 | 0 | 0 |
| BRACE3042432 | 58.488 | 0 | 0 | 0 | 0 | 0 | 0 |
| BRACE3045078 | 0 | 0 | 0 | 41.817 | 0 | 0 | 0 |
| BRACE3045981 | 26.434 | 0 | 0 | 0 | 0 | 0 | 0 |
| BRACE3046450 | 21.984 | 0 | 0 | 0 | 0 | 0 | 0 |
| BRALZ2000988 | 15.571 | 0 | 0 | 10.591 | 0 | 0 | 5.756 |
| BRALZ2001834 | 0 | 0 | 0 | 0 | 0 | 0 | 23.483 |
| BRALZ2006288 | 0 | 0 | 0 | 11.126 | 0 | 0 | 0 |
| BRALZ2008617 | 8.102 | 0 | /0 | 0 | 0 | 0 | 0 |
| BRALZ2008696 | 21.676 | 0 | 0 | 0 | 0 | 0 | 0 |
| BRALZ2009446 | 0 | 10.697 | 0 | 0 | 17.354 | 16.812 | 0 |
| BRALZ2009482 | 0 | 0 | 1.316 | 0 | 0 | 0 | 3.297 |
| BRALZ2009486 | 0 | 24.097 | 0 | /0 | 0 | 0 | 0 |
| BRALZ2011796 | 5.511 | 0 | 19.525 | 0 | 20.514 | 0 | 6.112 |
| BRALZ2011880 | 3.049 | 0 | 0 | 0 | 0 | 0 | 0 |
| BRALZ2018834 | 0 | 0 | 22.106 | 6.366 | 0 | 0 | 0 |
| BRALZ2019047 | 0 | 0 | 0 | 0 | 0 | 0 | 23.483 |
| BRAMY1000173 | 21.150 | 0 | 0 | 0 | 0 | 0 | 11.727 |
| BRAMY2000025 | 0 | 36.202 | 0 | 16.099 | 0 | 0 | 0 |
| BRAMY2000052 | 0 | 0 | 0 | 0 | 0 | 39.047 | 0 |
| BRAMY2000354 | 0 | 0 | 0 | 1.402 | 0 | 0 | 0 |
| BRAMY2000388 | 6.118 | 0 | 0 | 6.242 | 0 | 0 | 0 |
| BRAMY2000411 | 0 | 0 | 0 | 12.647 | 23.069 | 0 | 0 |
| BRAMY2000508 | 35.193 | 0 | 0 | 0 | 0 | 0 | 0 |
| BRAMY2000562 | 3.843 | 0 | 0 | 9.803 | 0 | 0 | 6.393 |
| BRAMY2000585 | 0 | 0 | 0 | 0 | 0 | 0 | 2.724 |
| BRAMY2000893 | 0 | 0 | 0 | 0 | 5.664 | 0 | 0 |
| BRAMY2002369 | 24.474 | 0 | 0 | 24.970 | 0 | 0 | 27.141 |
| BRAMY2002479 | 0 | 0 | 0 | 0 | 0 | 78.159 | 0 |
| BRAMY2002621 | 0 | 0 | 0 | 0 | 0 | 0 | 39.237 |
| BRAMY2002799 | 49.811 | 0 | 0 | 0 | 0 | 0 | 0 |
| BRAMY2003008 | 26.445 | 0 | 0 | 0 | 0 | 0 | 0 |
| BRAMY2004031 | 0 | 29.171 | 45.044 | 12.972 | 0 | 0 | 0 |
| BRAMY2004363 | 12.266 | 0 | 0 | 6.257 | 0 | 0 | 2.267 |
| BRAMY2004387 | 0 | 69.484 | 0 | 0 | 0 | 0 | 0 |
| BRAMY2004521 | 2.370 | 0 | 0 | 2.418 | 0 | 0 | 5.257 |
| BRAMY2004524 | 0 | 0 | 0 | 0 | 0 | 78.159 | 0 |
| BRAMY2005052 | 11.612 | 0 | 0 | 0 | 0 | 0 | 25.755 |
| BRAMY2005488 | 0 | 0 | 40.370 | 11.626 | 0 | 0 | 0 |
| BRAMY2006397 | 0 | 6.443 | 0 | 2.865 | 10.452 | 0 | 0 |
| BRAMY2007078 | 0 | 0 | 0 | 0 | 0 | 0 | 8.434 |
| BRAMY2007244 | 0 | 26.889 | 0 | 11.957 | 0 | 0 | 0 |
| BRAMY2007255 | 0 | 0 | 0 | 40.300 | 0 | 0 | 0 |
| BRAMY2007287 | 10.715 | 0 | 0 | 0 | 0 | 0 | 0 |
| BRAMY2007567 | 31.038 | 0 | 0 | 0 | 0 | 0 | 0 |
| BRAMY2007594 | 0 | 0 | 0 | 0 | 0 | 0 | 68.762 |
| BRAMY2007613 | 30.810 | 0 | 0 | 9.567 | 0 | 4.830 | 10.399 |
| BRAMY2008563 | 0 | 0 | 0 | 50.312 | 0 | 0 | 0 |
| BRAMY2008977 | 5.056 | 0 | 0 | 5.158 | 0 | 0 | 5.607 |
| BRAMY2009013 | 6.091 | 0 | 0 | 0 | 0 | 0 | 0 |
| BRAMY2009023 | 26.514 | 0 | 0 | 0 | 0 | 0 | 0 |
| BRAMY2009489 | 0 | 0 | 0 | 18.337 | 0 | 0 | 19.931 |
| BRAMY2009508 | 7.498 | 0 | 0 | 7.650 | 0 | 0 | 16.630 |
| BRAMY2009557 | 0 | 0 | 0 | 50.312 | 0 | 0 | 0 |
| BRAMY2009612 | 0 | 0 | 0 | 27.617 | 0 | 0 | 0 |
| BRAMY2009934 | 0 | 0 | 0 | 6.031 | 0 | 0 | 0 |
| BRAMY2010272 | 49.811 | 0 | 0 | 0 | 0 | 0 | 0 |
| BRAMY2010357 | 14.931 | 0 | 0 | 15.234 | 0 | 0 | 0 |
| BRAMY2010442 | 0 | 0 | 0 | 0 | 0 | 0 | 52.395 |
| BRAMY2010464 | 11.017 | 0 | 0 | 0 | 0 | 0 | 0 |
| BRAMY2011105 | 0 | 6.950 | 0 | 0 | 11.275 | 0 | 0 |
| BRAMY2011446 | 0 | 0 | 0 | 0 | 0 | 0 | 39.237 |
| BRAMY2011841 | 0 | 0 | 0 | 11.258 | 0 | 0 | 0 |
| BRAMY2011849 | 0 | 0 | 0 | 50.312 | 0 | 0 | 0 |
| BRAMY2012163 | 0 | 0 | 28.009 | 0 | 58.856 | 0 | 0 |
| BRAMY2012340 | 0 | 0 | 0 | 50.312 | 0 | 0 | 0 |
| BRAMY2012536 | 0 | 1.324 | 6.134 | 0.589 | 0 | 0 | 0 |
| BRAMY2012881 | 0 | 0 | 0 | 0 | 0 | 0 | 52.395 |
| BRAMY2013169 | 0 | 0 | 0 | 0 | 0 | 41.000 | 12.610 |
| BRAMY2013736 | 0 | 0 | 0 | 0 | 0 | 0 | 52.395 |
| BRAMY2014205 | 0 | 0 | 0 | 0 | 53.328 | 0 | 0 |
| BRAMY2014462 | 0 | 0 | 0 | 50.312 | 0 | 0 | 0 |
| BRAMY2014754 | 5.603 | 12.854 | 9.924 | 27.152 | 10.427 | 0 | 12.427 |
| BRAMY2015251 | 3.062 | 21.075 | 21.695 | 3.124 | 0 | 11.041 | 0 |
| BRAMY2015420 | 63.595 | 0 | 0 | 0 | 0 | 0 | 0 |
| BRAMY2015550 | 0 | 0 | 0 | 0 | 0 | 0 | 37.587 |
| BRAMY2015833 | 4.610 | 0 | 0 | 4.703 | 0 | 16.621 | 5.112 |
| BRAMY2015911 | 0 | 0 | 0 | 0 | 0 | 0 | 33.045 |
| BRAMY2016009 | 10.459 | 11.998 | 0 | 16.006 | 0 | 0 | 5.799 |
| BRAMY2016251 | 0 | 16.499 | 0 | 0 | 0 | 0 | 0 |
| BRAMY2016325 | 11.304 | 0 | 0 | 3.844 | 0 | 0 | 4.178 |
| BRAMY2016892 | 14.520 | 0 | 0 | 44.442 | 0 | 0 | 16.102 |
| BRAMY2017864 | 0 | 0 | 0 | 14.097 | 51.427 | 0 | 0 |
| BRAMY2018295 | 0 | 0 | 63.596 | 18.315 | 0 | 0 | 0 |
| BRAMY2018635 | 27.163 | 0 | 0 | 27.712 | 0 | 0 | 0 |
| BRAMY2018785 | 0 | 0 | 24.091 | 6.938 | 0 | 0 | 0 |
| BRAMY2019111 | 0 | 69.484 | 0 | 0 | 0 | 0 | 0 |
| BRAMY2019300 | 49.811 | 0 | 0 | 0 | 0 | 0 | 0 |
| BRAMY2019468 | 34.185 | 0 | 0 | 23.251 | 0 | 0 | 12.637 |
| BRAMY2019554 | 1.596 | 0 | 0 | 4.885 | 2.970 | 0 | 0.885 |
| BRAMY2019600 | 16.148 | 0 | 0 | 0 | 0 | 0 | 8.954 |
| BRAMY2019710 | 0 | 0 | 0 | 0 | 0 | 0 | 52.395 |
| BRAMY2019963 | 20.428 | 0 | 0 | 6.947 | 0 | 0 | 7.551 |
| BRAMY2019989 | 11.571 | 0 | 0 | 10.821 | 0 | 0 | 4.277 |
| BRAMY2020106 | 0 | 0 | 0 | 0 | 0 | 40.308 | 0 |
| BRAMY2020427 | 0.592 | 1.358 | 0 | 1.812 | 0 | 4.270 | 1.313 |
| BRAMY2021276 | 0 | 0 | 0 | 0 | 0 | 0 | 52.395 |
| BRAMY2021825 | 0 | 0 | 0 | 33.611 | 0 | 0 | 0 |
| BRAMY2021867 | 0 | 0 | 0 | 0 | 0 | 0 | 39.237 |
| BRAMY2022160 | 0 | 0 | 0 | 51.413 | 0 | 0 | 0 |
| BRAMY2022168 | 0 | 0 | 0 | 13.801 | 0 | 0 | 30.003 |
| BRAMY2022493 | 2.653 | 0 | 0 | 2.707 | 0 | 0 | 0 |
| BRAMY2022525 | 22.053 | 0 | 0 | 0 | 0 | 0 | 0 |
| BRAMY2022723 | 0 | 0 | 0 | 0 | 0 | 0 | 39.237 |
| BRAMY2022786 | 3.743 | 2.863 | 4.421 | 1.273 | 4.644 | 8.999 | 0 |
| BRAMY2022980 | 30.533 | 0 | 54.084 | 0 | 0 | 0 | 0 |
| BRAMY2023115 | 0 | 0 | 0 | 50.312 | 0 | 0 | 0 |
| BRAMY2023406 | 0 | 0 | 23.388 | 0 | 24.572 | 0 | 0 |
| BRAMY2024004 | 0 | 6.346 | 9.799 | 0 | 0 | 0 | 3.067 |
| BRAMY2024312 | 0 | 0 | 0 | 50.312 | 0 | 0 | 0 |
| BRAMY2024390 | 0 | 0 | 0 | 35.652 | 0 | 0 | 0 |
| BRAMY2024416 | 4.525 | 0 | 0 | 9.233 | 0 | 0 | 35.125 |
| BRAMY2024593 | 12.891 | 0 | 0 | 13.152 | 47.980 | 0 | 0 |
| BRAMY2024711 | 0 | 0 | 43.436 | 0 | 0 | 44.210 | 0 |
| BRAMY2024827 | 0 | 0 | 0 | 4.071 | 0 | 0 | 0 |
| BRAMY2025121 | 0 | 37.987 | 0 | 16.893 | 0 | 0 | 0 |
| BRAMY2025272 | 0 | 0 | 0 | 0 | 0 | 0 | 52.395 |
| BRAMY2026168 | 32.087 | 0 | 0 | 0 | 0 | 0 | 35.583 |
| BRAMY2026533 | 0 | 42.945 | 0 | 38.195 | 0 | 0 | 0 |
| BRAMY2027114 | 0 | 0 | 0 | 0 | 0 | 0 | 19.060 |
| BRAMY2027587 | 0 | 0 | 0 | 13.623 | 0 | 0 | 0 |
| BRAMY2027717 | 20.585 | 0 | 0 | 12.601 | 0 | 0 | 50.221 |
| BRAMY2027739 | 0 | 0 | 0 | 0 | 0 | 4.852 | 0 |
| BRAMY2028183 | 0 | 0 | 0 | 0 | 0 | 67.737 | 0 |
| BRAMY2028269 | 0 | 37.447 | 0 | 0 | 0 | 0 | 0 |
| BRAMY2028516 | 0 | 0 | 0 | 0 | 14.680 | 0 | 0 |
| BRAMY2028740 | 4.655 | 2.136 | 9.895 | 4.749 | 0 | 0 | 5.162 |
| BRAMY2028796 | 0 | 0 | 0 | 1.517 | 0 | 0 | 0 |
| BRAMY2028914 | 0 | 0 | 0 | 0 | 0 | 0 | 19.645 |
| BRAMY2029988 | 0 | 0 | 0 | 12.017 | 0 | 0 | 13.062 |
| BRAMY2031317 | 0 | 0 | 0 | 16.004 | 0 | 0 | 34.791 |
| BRAMY2031516 | 14.772 | 0 | 0 | 7.536 | 0 | 0 | 0 |
| BRAMY2032087 | 2.422 | 0 | 0 | 1.236 | 0 | 0 | 2.686 |
| BRAMY2033914 | 49.811 | 0 | 0 | 0 | 0 | 0 | 0 |
| BRAMY2035719 | 0 | 0 | 0 | 15.497 | 56.534 | 0 | 0 |
| BRAMY2036076 | 10.816 | 0 | 0 | 0 | 0 | 0 | 11.995 |
| BRAMY2036459 | 1.885 | 0 | 0 | 1.923 | 0 | 0 | 0 |
| BRAMY2036567 | 7.474 | 17.148 | 0 | 7.626 | 0 | 0 | 0 |
| BRAMY2037823 | 29.664 | 0 | 0 | 0 | 0 | 0 | 0 |
| BRAMY2038516 | 0 | 87.230 | 0 | 0 | 0 | 0 | 0 |
| BRAMY2039630 | 0 | 0 | 30.744 | 0 | 0 | 0 | 0 |
| BRAMY2039728 | 0 | 0 | 0 | 37.268 | 0 | 0 | 0 |
| BRAMY2040095 | 1.709 | 0.784 | 1.211 | 2.092 | 0 | 0 | 1.516 |
| BRAMY2040214 | 0 | 0 | 0 | 44.393 | 0 | 0 | 16.084 |
| BRAMY2040592 | 3.482 | 0 | 0 | 7.105 | 0 | 0 | 0 |
| BRAMY2042195 | 0 | 69.484 | 0 | 0 | 0 | 0 | 0 |
| BRAMY2044838 | 0 | 0 | 0 | 0 | 0 | 0 | 68.762 |
| BRAMY2046871 | 33.165 | 0 | 0 | 0 | 0 | 0 | 0 |
| BRAMY2047420 | 0 | 0 | 0 | 0 | 3.770 | 0 | 0 |
| BRAMY3002329 | 20.323 | 0 | 0 | 34.558 | 0 | 0 | 15.025 |
| BRAMY3002458 | 0 | 0 | 0 | 50.663 | 0 | 0 | 0 |
| BRAMY3002803 | 14.428 | 0 | 0 | 44.161 | 0 | 0 | 0 |
| BRAMY3002991 | 0 | 8.995 | 0 | 0 | 0 | 0 | 4.348 |
| BRAMY3004126 | 49.811 | 0 | 0 | 0 | 0 | 0 | 0 |
| BRAMY3004224 | 33.027 | 0 | 0 | 33.695 | 0 | 0 | 0 |
| BRAMY3004377 | 3.317 | 0 | 0 | 0.846 | 0 | 2.990 | 0.920 |
| BRAMY3004800 | 38.061 | 0 | 0 | 46.598 | 0 | 0 | 0 |
| BRAMY3005091 | 19.193 | 0 | 0 | 0 | 0 | 0 | 0 |
| BRAMY3005184 | 0 | 0 | 0 | 22.861 | 0 | 0 | 0 |
| BRAMY3005912 | 21.416 | 0 | 0 | 0 | 0 | 0 | 0 |
| BRAMY3006761 | 32.935 | 0 | 0 | 56.003 | 0 | 0 | 0 |
| BRAMY3007078 | 0 | 0 | 0 | 50.312 | 0 | 0 | 0 |
| BRAMY3007311 | 23.569 | 18.024 | 0 | 0 | 0 | 0 | 0 |
| BRAMY3008044 | 7.175 | 8.231 | 6.355 | 3.660 | 0 | 0 | 3.979 |
| BRAMY3009556 | 0 | 0 | 0 | 0 | 0 | 0 | 52.395 |
| BRAMY3009782 | 0 | 0 | 0 | 0 | 0 | 0 | 52.395 |
| BRAMY3009811 | 0 | 0 | 0 | 66.943 | 0 | 0 | 0 |
| BRAMY3010008 | 0 | 0 | 2.062 | 0 | 0 | 0 | 0 |
| BRAMY3010264 | 49.811 | 0 | 0 | 0 | 0 | 0 | 0 |
| BRAMY3010492 | 5.759 | 0 | 0 | 0 | 21.436 | 0 | 6.387 |
| BRAMY3010654 | 0 | 0 | 0 | 0 | 0 | 0 | 52.395 |
| BRAMY4000089 | 5.089 | 0 | 0 | 15.576 | 0 | 0 | 0 |
| BRAMY4000095 | 0 | 33.520 | 51.759 | 0 | 0 | 0 | 0 |
| BRAMY4000229 | 0 | 0 | 0 | 0 | 0 | 0 | 39.237 |
| BRAMY4000915 | 0 | 0 | 0 | 50.312 | 0 | 0 | 0 |
| BRAMY4001863 | 0 | 0 | 0 | 0 | 0 | 0 | 16.612 |
| BRASW1000125 | 0 | 0 | 0 | 0 | 0 | 0.946 | 0 |
| BRAWH1000001 | 16.638 | 7.634 | 11.788 | 13.580 | 12.385 | 0 | 18.451 |
| BRAWH1000002 | 100 | 0 | 0 | 0 | 0 | 0 | 0 |
| BRAWH1000007 | 8.986 | 0 | 0 | 0 | 0 | 0 | 0 |
| BRAWH1000037 | 5.470 | 12.550 | 6.460 | 1.860 | 13.574 | 0 | 6.066 |
| BRAWH1000040 | 1.376 | 3.157 | 0 | 2.106 | 0 | 0 | 0.763 |
| BRAWH1000045 | 13.013 | 2.297 | 14.184 | 10.213 | 0 | 7.219 | 2.220 |
| BRAWH1000083 | 4.531 | 0 | 0 | 0 | 0 | 0 | 0 |
| BRAWH1000093 | 0.461 | 0 | 0 | 0 | 1.717 | 0 | 0.511 |
| BRAWH1000094 | 8.420 | 0 | 0 | 0 | 31.340 | 15.181 | 14.007 |
| BRAWH1000116 | 100 | 0 | 0 | 0 | 0 | 0 | 0 |
| BRAWH1000127 | 15.983 | 0 | 0 | 3.261 | 35.693 | 0 | 7.090 |
| BRAWH1000130 | 100 | 0 | 0 | 0 | 0 | 0 | 0 |
| BRAWH1000157 | 100 | 0 | 0 | 0 | 0 | 0 | 0 |
| BRAWH1000162 | 5.475 | 0 | 6.465 | 1.862 | 20.378 | 0 | 12.143 |
| BRAWH1000164 | 100 | 0 | 0 | 0 | 0 | 0 | 0 |
| BRAWH1000168 | 100 | 0 | 0 | 0 | 0 | 0 | 0 |
| BRAWH1000174 | 17.190 | 19.718 | 10.149 | 14.615 | 0 | 0 | 19.063 |
| BRAWH1000180 | 100 | 0 | 0 | 0 | 0 | 0 | 0 |
| BRAWH1000369 | 100 | 0 | 0 | 0 | 0 | 0 | 0 |
| BRAWH2000034 | 100 | 0 | 0 | 0 | 0 | 0 | 0 |
| BRAWH2000048 | 100 | 0 | 0 | 0 | 0 | 0 | 0 |
| BRAWH2000071 | 100 | 0 | 0 | 0 | 0 | 0 | 0 |
| BRAWH2000082 | 9.973 | 3.520 | 13.589 | 9.001 | 8.566 | 4.149 | 9.784 |
| BRAWH2000093 | 100 | 0 | 0 | 0 | 0 | 0 | 0 |
| BRAWH2000109 | 100 | 0 | 0 | 0 | 0 | 0 | 0 |
| BRAWH2000131 | 21.676 | 0 | 0 | 0 | 0 | 0 | 0 |
| BRAWH2000142 | 30.475 | 0 | 53.980 | 15.546 | 0 | 0 | 0 |
| BRAWH2000169 | 10.541 | 0 | 0 | 0 | 0 | 0 | 0 |
| BRAWH2000177 | 15.991 | 0 | 0 | 8.157 | 0 | 0 | 0 |
| BRAWH2000218 | 47.417 | 0 | 0 | 0 | 0 | 0 | 52.583 |
| BRAWH2000232 | 100 | 0 | 0 | 0 | 0 | 0 | 0 |
| BRAWH2000248 | 100 | 0 | 0 | 0 | 0 | 0 | 0 |
| BRAWH2000256 | 100 | 0 | 0 | 0 | 0 | 0 | 0 |
| BRAWH2000274 | 7.896 | 4.529 | 6.993 | 2.014 | 0 | 0 | 2.189 |
| BRAWH2000323 | 100 | 0 | 0 | 0 | 0 | 0 | 0 |
| BRAWH2000353 | 58.488 | 0 | 0 | 0 | 0 | 0 | 0 |
| BRAWH2000370 | 100 | 0 | 0 | 0 | 0 | 0 | 0 |
| BRAWH2000409 | 100 | 0 | 0 | 0 | 0 | 0 | 0 |
| BRAWH2000417 | 7.414 | 11.340 | 4.378 | 2.521 | 4.599 | 0 | 0 |
| BRAWH2000443 | 5.666 | 12.999 | 20.071 | 17.341 | 21.088 | 0 | 0 |
| BRAWH2000460 | 1.831 | 1.400 | 2.162 | 1.245 | 4.543 | 0 | 4.061 |
| BRAWH2000471 | 100 | 0 | 0 | 0 | 0 | 0 | 0 |
| BRAWH2000476 | 24.100 | 0 | 0 | 49.175 | 0 | 0 | 26.726 |
| BRAWH2000482 | 1.518 | 38.304 | 48.392 | 1.549 | 5.649 | 0 | 0 |
| BRAWH2000488 | 10.082 | 0 | 0 | 0 | 0 | 0 | 0 |
| BRAWH2000494 | 18.182 | 41.714 | 0 | 0 | 0 | 0 | 0 |
| BRAWH2000500 | 58.488 | 0 | 0 | 0 | 0 | 0 | 0 |
| BRAWH2000503 | 20.746 | 0 | 0 | 42.332 | 0 | 0 | 0 |
| BRAWH2000522 | 1.813 | 4.158 | 0 | 3.698 | 6.746 | 0 | 0 |
| BRAWH2000554 | 100 | 0 | 0 | 0 | 0 | 0 | 0 |
| BRAWH2000588 | 6.273 | 0 | 0 | 2.560 | 0 | 0 | 2.783 |
| BRAWH2000595 | 12.470 | 0 | 0 | 0 | 0 | 0 | 0 |
| BRAWH2000633 | 1.326 | 0 | 0 | 2.705 | 0 | 0 | 0 |
| BRAWH2000636 | 13.739 | 0 | 1.872 | 4.852 | 1.967 | 0 | 14.650 |
| BRAWH2000643 | 100 | 0 | 0 | 0 | 0 | 0 | 0 |
| BRAWH2000651 | 100 | 0 | 0 | 0 | 0 | 0 | 0 |
| BRAWH2000682 | 100 | 0 | 0 | 0 | 0 | 0 | 0 |
| BRAWH2000686 | 1.222 | 5.609 | 8.661 | 1.247 | 4.550 | 4.407 | 6.778 |
| BRAWH2000697 | 3.035 | 2.321 | 10.750 | 4.128 | 7.530 | 7.295 | 5.609 |
| BRAWH2000752 | 100 | 0 | 0 | 0 | 0 | 0 | 0 |
| BRAWH2000839 | 6.982 | 3.769 | 2.910 | 4.609 | 3.057 | 1.481 | 5.465 |
| BRAWH2000859 | 47.167 | 0 | 0 | 0 | 0 | 0 | 0 |
| BRAWH2000866 | 100 | 0 | 0 | 0 | 0 | 0 | 0 |
| BRAWH2000892 | 100 | 0 | 0 | 0 | 0 | 0 | 0 |
| BRAWH2000901 | 100 | 0 | 0 | 0 | 0 | 0 | 0 |
| BRAWH2000924 | 8.897 | 4.609 | 9.150 | 7.320 | 10.682 | 10.348 | 6.047 |
| BRAWH2000926 | 4.218 | 0 | 0 | 0 | 0 | 0 | 0 |
| BRAWH2000944 | 5.217 | 0 | 0 | 0 | 0 | 0 | 0 |
| BRAWH2000984 | 100 | 0 | 0 | 0 | 0 | 0 | 0 |
| BRAWH2001019 | 2.281 | 15.697 | 16.159 | 9.307 | 16.977 | 0 | 2.529 |
| BRAWH2001037 | 4.010 | 0 | 0 | 0 | 0 | 0 | 0 |
| BRAWH2001052 | 100 | 0 | 0 | 0 | 0 | 0 | 0 |
| BRAWH2001092 | 2.109 | 0.403 | 0.623 | 1.434 | 0 | 0 | 0.975 |
| BRAWH2001103 | 13.143 | 0 | 0 | 6.704 | 0 | 0 | 0 |
| BRAWH2001129 | 47.167 | 0 | 0 | 0 | 0 | 0 | 0 |
| BRAWH2001137 | 100 | 0 | 0 | 0 | 0 | 0 | 0 |
| BRAWH2001141 | 5.082 | 0 | 0 | 0 | 0 | 0 | 0 |
| BRAWH2001159 | 100 | 0 | 0 | 0 | 0 | 0 | 0 |
| BRAWH2001166 | 3.157 | 0 | 0 | 0 | 0 | 0 | 3.501 |
| BRAWH2001171 | 6.176 | 1.417 | 0 | 1.890 | 2.299 | 0 | 4.794 |
| BRAWH2001186 | 2.849 | 0 | 0 | 0 | 0 | 0 | 0 |
| BRAWH2001203 | 100 | 0 | 0 | 0 | 0 | 0 | 0 |
| BRAWH2001238 | 12.091 | 0 | 0 | 0 | 45.001 | 0 | 0 |
| BRAWH2001239 | 7.296 | 0 | 0 | 0 | 27.156 | 0 | 8.091 |
| BRAWH2001255 | 100 | 0 | 0 | 0 | 0 | 0 | 0 |
| BRAWH2001321 | 6.868 | 1.969 | 3.041 | 10.510 | 3.195 | 3.095 | 6.664 |
| BRAWH2001355 | 100 | 0 | 0 | 0 | 0 | 0 | 0 |
| BRAWH2001378 | 100 | 0 | 0 | 0 | 0 | 0 | 0 |
| BRAWH2001395 | 14.290 | 5.785 | 10.422 | 22.297 | 12.514 | 4.546 | 11.652 |
| BRAWH2001406 | 3.385 | 0 | 0 | 3.454 | 12.600 | 0 | 0 |
| BRAWH2001412 | 15.036 | 0 | 0 | 0 | 0 | 0 | 0 |
| BRAWH2001418 | 5.158 | 17.751 | 18.274 | 2.631 | 9.600 | 18.599 | 2.860 |
| BRAWH2001424 | 5.091 | 0 | 0 | 0 | 0 | 0 | 5.646 |
| BRAWH2001436 | 100 | 0 | 0 | 0 | 0 | 0 | 0 |
| BRAWH2001438 | 100 | 0 | 0 | 0 | 0 | 0 | 0 |
| BRAWH2001439 | 4.116 | 0 | 7.290 | 9.448 | 0 | 0 | 3.423 |
| BRAWH2001459 | 4.891 | 0 | 8.664 | 2.495 | 9.103 | 0 | 51.532 |
| BRAWH2001461 | 3.555 | 0 | 0 | 0 | 0 | 0 | 3.942 |
| BRAWH2001484 | 10.625 | 0 | 37.639 | 0 | 0 | 0 | 0 |
| BRAWH2001492 | 100 | 0 | 0 | 0 | 0 | 0 | 0 |
| BRAWH2001503 | 100 | 0 | 0 | 0 | 0 | 0 | 0 |
| BRAWH2001519 | 100 | 0 | 0 | 0 | 0 | 0 | 0 |
| BRAWH2001530 | 7.633 | 17.512 | 0 | 0 | 56.821 | 0 | 0 |
| BRAWH2001535 | 1.975 | 15.859 | 5.247 | 10.075 | 16.539 | 14.243 | 10.951 |
| BRAWH2001589 | 100 | 0 | 0 | 0 | 0 | 0 | 0 |
| BRAWH2001662 | 4.598 | 0 | 16.288 | 0 | 0 | 0 | 5.099 |
| BRAWH2001666 | 100 | 0 | 0 | 0 | 0 | 0 | 0 |
| BRAWH2001671 | 7.605 | 0 | 0 | 11.638 | 0 | 0 | 12.650 |
| BRAWH2001679 | 100 | 0 | 0 | 0 | 0 | 0 | 0 |
| BRAWH2001686 | 100 | 0 | 0 | 0 | 0 | 0 | 0 |
| BRAWH2001701 | 100 | 0 | 0 | 0 | 0 | 0 | 0 |
| BRAWH2001842 | 100 | 0 | 0 | 0 | 0 | 0 | 0 |
| BRAWH2001862 | 3.358 | 0 | 0 | 0 | 0 | 0 | 0 |
| BRAWH2001873 | 100 | 0 | 0 | 0 | 0 | 0 | 0 |
| BRAWH2001940 | 37.398 | 0 | 0 | 38.155 | 0 | 0 | 0 |
| BRAWH2001973 | 37.398 | 0 | 0 | 38.155 | 0 | 0 | 0 |
| BRAWH2002047 | 58.488 | 0 | 0 | 0 | 0 | 0 | 0 |
| BRAWH2002060 | 58.488 | 0 | 0 | 0 | 0 | 0 | 0 |
| BRAWH2002062 | 54.530 | 0 | 0 | 0 | 0 | 0 | 0 |
| BRAWH2002125 | 100 | 0 | 0 | 0 | 0 | 0 | 0 |
| BRAWH2002191 | 100 | 0 | 0 | 0 | 0 | 0 | 0 |
| BRAWH2002318 | 26.686 | 0 | 0 | 0 | 0 | 0 | 0 |
| BRAWH2002333 | 100 | 0 | 0 | 0 | 0 | 0 | 0 |
| BRAWH2002352 | 100 | 0 | 0 | 0 | 0 | 0 | 0 |
| BRAWH2002383 | 100 | 0 | 0 | 0 | 0 | 0 | 0 |
| BRAWH2002549 | 18.017 | 0 | 63.828 | 0 | 0 | 0 | 0 |
| BRAWH2002560 | 6.454 | 0 | 0 | 3.292 | 12.010 | 11.635 | 0 |
| BRAWH2002601 | 4.974 | 11.411 | 17.620 | 5.074 | 0 | 17.934 | 0 |
| BRAWH2002623 | 100 | 0 | 0 | 0 | 0 | 0 | 0 |
| BRAWH2002630 | 100 | 0 | 0 | 0 | 0 | 0 | 0 |
| BRAWH2002635 | 100 | 0 | 0 | 0 | 0 | 0 | 0 |
| BRAWH2002662 | 100 | 0 | 0 | 0 | 0 | 0 | 0 |
| BRAWH2002679 | 9.467 | 21.720 | 0 | 0 | 35.237 | 0 | 0 |
| BRAWH2002725 | 100 | 0 | 0 | 0 | 0 | 0 | 0 |
| BRAWH2002761 | 100 | 0 | 0 | 0 | 0 | 0 | 0 |
| BRAWH2002811 | 8.624 | 0 | 0 | 17.598 | 0 | 0 | 9.564 |
| BRAWH2002861 | 100 | 0 | 0 | 0 | 0 | 0 | 0 |
| BRAWH2002911 | 23.795 | 0 | 0 | 0 | 0 | 0 | 0 |
| BRAWH2002963 | 11.932 | 0 | 0 | 0 | 0 | 0 | 0 |
| BRAWH2002967 | 44.597 | 0 | 0 | 0 | 0 | 0 | 0 |
| BRAWH2002976 | 100 | 0 | 0 | 0 | 0 | 0 | 0 |
| BRAWH2003000 | 58.488 | 0 | 0 | 0 | 0 | 0 | 0 |
| BRAWH2003025 | 6.064 | 0 | 0 | 0 | 11.285 | 0 | 0 |
| BRAWH2003135 | 34.934 | 0 | 0 | 0 | 0 | 0 | 0 |
| BRAWH2003240 | 7.848 | 0 | 0 | 8.007 | 0 | 0 | 0 |
| BRAWH2003307 | 100 | 0 | 0 | 0 | 0 | 0 | 0 |
| BRAWH2003355 | 21.676 | 0 | 0 | 0 | 0 | 0 | 0 |
| BRAWH2003366 | 100 | 0 | 0 | 0 | 0 | 0 | 0 |
| BRAWH2003662 | 12.395 | 0 | 21.955 | 18.969 | 0 | 0 | 0 |
| BRAWH2003689 | 47.167 | 0 | 0 | 0 | 0 | 0 | 0 |
| BRAWH2003693 | 13.685 | 0 | 0 | 6.981 | 12.734 | 0 | 3.794 |
| BRAWH2003818 | 3.027 | 0 | 0 | 0 | 0 | 0 | 0 |
| BRAWH2003832 | 100 | 0 | 0 | 0 | 0 | 0 | 0 |
| BRAWH2003948 | 100 | 0 | 0 | 0 | 0 | 0 | 0 |
| BRAWH2003964 | 49.499 | 0 | 0 | 50.501 | 0 | 0 | 0 |
| BRAWH2004044 | 100 | 0 | 0 | 0 | 0 | 0 | 0 |
| BRAWH2004068 | 100 | 0 | 0 | 0 | 0 | 0 | 0 |
| BRAWH2004078 | 10.539 | 0 | 0 | 0 | 0 | 0 | 0 |
| BRAWH2004095 | 11.821 | 0 | 0 | 4.824 | 0 | 0 | 5.244 |
| BRAWH2004136 | 15.911 | 36.504 | 0 | 0 | 0 | 0 | 0 |
| BRAWH2004217 | 54.530 | 0 | 0 | 0 | 0 | 0 | 0 |
| BRAWH2004580 | 18.183 | 0 | 0 | 18.551 | 0 | 0 | 0 |
| BRAWH2004731 | 100 | 0 | 0 | 0 | 0 | 0 | 0 |
| BRAWH2004779 | 49.811 | 0 | 0 | 0 | 0 | 0 | 0 |
| BRAWH2004842 | 43.845 | 9.145 | 0 | 4.067 | 0 | 0 | 8.840 |
| BRAWH2004884 | 100 | 0 | 0 | 0 | 0 | 0 | 0 |
| BRAWH2004923 | 100 | 0 | 0 | 0 | 0 | 0 | 0 |
| BRAWH2005008 | 16.511 | 0 | 0 | 16.845 | 0 | 0 | 0 |
| BRAWH2005068 | 0.402 | 0 | 0 | 0 | 0 | 4.351 | 0 |
| BRAWH2005074 | 35.119 | 0 | 0 | 0 | 0 | 0 | 0 |
| BRAWH2005225 | 5.797 | 0 | 0 | 0 | 0 | 0 | 0 |
| BRAWH2005315 | 100 | 0 | 0 | 0 | 0 | 0 | 0 |
| BRAWH2005517 | 44.597 | 0 | 0 | 0 | 0 | 0 | 0 |
| BRAWH2005524 | 100 | 0 | 0 | 0 | 0 | 0 | 0 |
| BRAWH2005533 | 100 | 0 | 0 | 0 | 0 | 0 | 0 |
| BRAWH2005578 | 26.802 | 0 | 0 | 27.344 | 0 | 0 | 14.861 |
| BRAWH2005661 | 3.197 | 3.668 | 0 | 6.524 | 0 | 0 | 3.546 |
| BRAWH2005812 | 100 | 0 | 0 | 0 | 0 | 0 | 0 |
| BRAWH2005974 | 100 | 0 | 0 | 0 | 0 | 0 | 0 |
| BRAWH2005998 | 30.356 | 69.644 | 0 | 0 | 0 | 0 | 0 |
| BRAWH2006044 | 17.594 | 0 | 0 | 0 | 0 | 0 | 0 |
| BRAWH2006083 | 100 | 0 | 0 | 0 | 0 | 0 | 0 |
| BRAWH2006207 | 12.943 | 29.695 | 0 | 0 | 48.175 | 0 | 0 |
| BRAWH2006301 | 58.488 | 0 | 0 | 0 | 0 | 0 | 0 |
| BRAWH2006395 | 12.446 | 0 | 0 | 0 | 0 | 0 | 0 |
| BRAWH2006405 | 12.977 | 0 | 0 | 13.240 | 0 | 0 | 0 |
| BRAWH2006450 | 20.085 | 11.520 | 0 | 0 | 0 | 0 | 22.274 |
| BRAWH2006493 | 5.086 | 11.669 | 0 | 0 | 18.931 | 0 | 22.562 |
| BRAWH2006526 | 54.530 | 0 | 0 | 0 | 0 | 0 | 0 |
| BRAWH2006543 | 30.705 | 10.063 | 0 | 0 | 0 | 0 | 24.322 |
| BRAWH2006622 | 16.546 | 0 | 0 | 0 | 0 | 0 | 0 |
| BRAWH2006760 | 100 | 0 | 0 | 0 | 0 | 0 | 0 |
| BRAWH2006960 | 100 | 0 | 0 | 0 | 0 | 0 | 0 |
| BRAWH2006989 | 24.975 | 57.298 | 0 | 0 | 0 | 0 | 0 |
| BRAWH2006996 | 10.204 | 0 | 0 | 0 | 0 | 0 | 3.772 |
| BRAWH2007069 | 100 | 0 | 0 | 0 | 0 | 0 | 0 |
| BRAWH2007308 | 100 | 0 | 0 | 0 | 0 | 0 | 0 |
| BRAWH2007406 | 100 | 0 | 0 | 0 | 0 | 0 | 0 |
| BRAWH2007550 | 100 | 0 | 0 | 0 | 0 | 0 | 0 |
| BRAWH2007570 | 100 | 0 | 0 | 0 | 0 | 0 | 0 |
| BRAWH2007591 | 40.796 | 0 | 11.117 | 16.008 | 0 | 0 | 3.480 |
| BRAWH2007605 | 6.154 | 0 | 0 | 6.278 | 0 | 0 | 9.099 |
| BRAWH2007658 | 58.101 | 0 | 0 | 0 | 0 | 41.899 | 0 |
| BRAWH2007664 | 10.232 | 23.474 | 0 | 0 | 0 | 0 | 0 |
| BRAWH2007800 | 2.349 | 0 | 0 | 0 | 0 | 0 | 2.605 |
| BRAWH2007808 | 37.485 | 0 | 0 | 0 | 0 | 0 | 0 |
| BRAWH2007825 | 58.488 | 0 | 0 | 0 | 0 | 0 | 0 |
| BRAWH2007862 | 100 | 0 | 0 | 0 | 0 | 0 | 0 |
| BRAWH2007890 | 100 | 0 | 0 | 0 | 0 | 0 | 0 |
| BRAWH2008058 | 23.426 | 0 | 0 | 0 | 0 | 0 | 0 |
| BRAWH2008128 | 22.081 | 0 | 0 | 0 | 0 | 0 | 0 |
| BRAWH2008219 | 14.410 | 0 | 0 | 0 | 0 | 0 | 0 |
| BRAWH2008255 | 4.225 | 0 | 0 | 0 | 0 | 0 | 0 |
| BRAWH2008292 | 36.501 | 0 | 0 | 0 | 0 | 0 | 0 |
| BRAWH2008297 | 100 | 0 | 0 | 0 | 0 | 0 | 0 |
| BRAWH2008366 | 12.752 | 0 | 0 | 0 | 0 | 0 | 0 |
| BRAWH2008380 | 100 | 0 | 0 | 0 | 0 | 0 | 0 |
| BRAWH2008540 | 54.530 | 0 | 0 | 0 | 0 | 0 | 0 |
| BRAWH2008577 | 3.555 | 0 | 0 | 0 | 0 | 0 | 0 |
| BRAWH2008706 | 28.755 | 0 | 0 | 14.668 | 0 | 0 | 3.189 |
| BRAWH2008790 | 100 | 0 | 0 | 0 | 0 | 0 | 0 |
| BRAWH2008903 | 16.913 | 9.401 | 0 | 2.941 | 0 | 0 | 28.133 |
| BRAWH2008956 | 15.570 | 0 | 0 | 15.885 | 0 | 0 | 0 |
| BRAWH2008993 | 49.811 | 0 | 0 | 0 | 0 | 0 | 0 |
| BRAWH2009112 | 100 | 0 | 0 | 0 | 0 | 0 | 0 |
| BRAWH2009227 | 15.805 | 0 | 0 | 0 | 0 | 0 | 0 |
| BRAWH2009238 | 26.065 | 0 | 0 | 21.274 | 0 | 0 | 17.343 |
| BRAWH2009261 | 100 | 0 | 0 | 0 | 0 | 0 | 0 |
| BRAWH2009263 | 100 | 0 | 0 | 0 | 0 | 0 | 0 |
| BRAWH2009298 | 100 | 0 | 0 | 0 | 0 | 0 | 0 |
| BRAWH2009304 | 3.922 | 0 | 13.895 | 0 | 0 | 0 | 8.699 |
| BRAWH2009307 | 3.982 | 0 | 0 | 2.031 | 0 | 0 | 4.416 |
| BRAWH2009360 | 8.653 | 0 | 30.656 | 0 | 0 | 0 | 0 |
| BRAWH2009393 | 100 | 0 | 0 | 0 | 0 | 0 | 0 |
| BRAWH2009485 | 100 | 0 | 0 | 0 | 0 | 0 | 0 |
| BRAWH2009490 | 3.383 | 0 | 0 | 0 | 0 | 12.199 | 0 |
| BRAWH2009558 | 100 | 0 | 0 | 0 | 0 | 0 | 0 |
| BRAWH2009590 | 100 | 0 | 0 | 0 | 0 | 0 | 0 |
| BRAWH2009626 | 44.597 | 0 | 0 | 0 | 0 | 0 | 0 |
| BRAWH2009678 | 21.269 | 0 | 0 | 0 | 0 | 0 | 0 |
| BRAWH2009695 | 26.755 | 0 | 0 | 27.297 | 0 | 0 | 0 |
| BRAWH2009907 | 100 | 0 | 0 | 0 | 0 | 0 | 0 |
| BRAWH2010000 | 18.745 | 43.006 | 0 | 38.249 | 0 | 0 | 0 |
| BRAWH2010069 | 100 | 0 | 0 | 0 | 0 | 0 | 0 |
| BRAWH2010084 | 100 | 0 | 0 | 0 | 0 | 0 | 0 |
| BRAWH2010136 | 26.404 | 0 | 0 | 0 | 0 | 0 | 0 |
| BRAWH2010318 | 100 | 0 | 0 | 0 | 0 | 0 | 0 |
| BRAWH2010329 | 20.017 | 0 | 0 | 15.317 | 0 | 0 | 11.099 |
| BRAWH2010354 | 12.977 | 29.773 | 0 | 0 | 0 | 0 | 0 |
| BRAWH2010364 | 34.464 | 0 | 0 | 17.581 | 0 | 0 | 0 |
| BRAWH2010536 | 14.718 | 0 | 0 | 0 | 0 | 0 | 0 |
| BRAWH2010552 | 58.488 | 0 | 0 | 0 | 0 | 0 | 0 |
| BRAWH2010584 | 30.356 | 69.644 | 0 | 0 | 0 | 0 | 0 |
| BRAWH2010618 | 100 | 0 | 0 | 0 | 0 | 0 | 0 |
| BRAWH2010619 | 100 | 0 | 0 | 0 | 0 | 0 | 0 |
| BRAWH2010754 | 11.186 | 0 | 0 | 0 | 0 | 40.334 | 0 |
| BRAWH2010980 | 7.066 | 0 | 0 | 0 | 0 | 0 | 0 |
| BRAWH2011066 | 21.178 | 0 | 0 | 0 | 78.822 | 0 | 0 |
| BRAWH2011079 | 100 | 0 | 0 | 0 | 0 | 0 | 0 |
| BRAWH2011096 | 54.530 | 0 | 0 | 0 | 0 | 0 | 0 |
| BRAWH2011155 | 100 | 0 | 0 | 0 | 0 | 0 | 0 |
| BRAWH2011166 | 100 | 0 | 0 | 0 | 0 | 0 | 0 |
| BRAWH2011204 | 49.811 | 0 | 0 | 0 | 0 | 0 | 0 |
| BRAWH2011286 | 8.924 | 0 | 0 | 0 | 0 | 0 | 0 |
| BRAWH2011294 | 100 | 0 | 0 | 0 | 0 | 0 | 0 |
| BRAWH2011343 | 7.015 | 0 | 0 | 7.157 | 0 | 0 | 7.779 |
| BRAWH2011400 | 100 | 0 | 0 | 0 | 0 | 0 | 0 |
| BRAWH2011762 | 100 | 0 | 0 | 0 | 0 | 0 | 0 |
| BRAWH2011795 | 100 | 0 | 0 | 0 | 0 | 0 | 0 |
| BRAWH2011796 | 100 | 0 | 0 | 0 | 0 | 0 | 0 |
| BRAWH2011812 | 13.544 | 0 | 0 | 0 | 0 | 0 | 0 |
| BRAWH2011823 | 21.626 | 0 | 0 | 0 | 0 | 0 | 0 |
| BRAWH2011860 | 100 | 0 | 0 | 0 | 0 | 0 | 0 |
| BRAWH2011920 | 18.948 | 0 | 0 | 19.331 | 0 | 0 | 0 |
| BRAWH2011958 | 100 | 0 | 0 | 0 | 0 | 0 | 0 |
| BRAWH2012054 | 100 | 0 | 0 | 0 | 0 | 0 | 0 |
| BRAWH2012077 | 12.529 | 0 | 0 | 0 | 0 | 0 | 0 |
| BRAWH2012161 | 3.850 | 0 | 0 | 0 | 0 | 0 | 0 |
| BRAWH2012162 | 36.060 | 0 | 0 | 0 | 0 | 0 | 0 |
| BRAWH2012164 | 20.835 | 0 | 0 | 0 | 0 | 0 | 0 |
| BRAWH2012258 | 100 | 0 | 0 | 0 | 0 | 0 | 0 |
| BRAWH2012277 | 28.630 | 0 | 0 | 0 | 0 | 0 | 0 |
| BRAWH2012326 | 100 | 0 | 0 | 0 | 0 | 0 | 0 |
| BRAWH2012538 | 10.145 | 0 | 0 | 0 | 18.880 | 0 | 0 |
| BRAWH2012540 | 100 | 0 | 0 | 0 | 0 | 0 | 0 |
| BRAWH2012619 | 100 | 0 | 0 | 0 | 0 | 0 | 0 |
| BRAWH2012698 | 19.174 | 0 | 0 | 0 | 0 | 0 | 0 |
| BRAWH2012749 | 100 | 0 | 0 | 0 | 0 | 0 | 0 |
| BRAWH2012827 | 8.993 | 0 | 31.859 | 0 | 33.472 | 0 | 0 |
| BRAWH2012866 | 8.503 | 0 | 0 | 4.337 | 0 | 7.665 | 11.786 |
| BRAWH2012963 | 100 | 0 | 0 | 0 | 0 | 0 | 0 |
| BRAWH2013047 | 18.786 | 0 | 0 | 0 | 0 | 0 | 0 |
| BRAWH2013219 | 19.375 | 0 | 0 | 0 | 0 | 0 | 0 |
| BRAWH2013294 | 39.442 | 0 | 0 | 10.060 | 0 | 0 | 0 |
| BRAWH2013748 | 2.669 | 6.123 | 9.455 | 2.723 | 9.934 | 0 | 2.960 |
| BRAWH2013866 | 100 | 0 | 0 | 0 | 0 | 0 | 0 |
| BRAWH2013871 | 37.485 | 0 | 0 | 0 | 0 | 0 | 0 |
| BRAWH2013914 | 47.417 | 0 | 0 | 0 | 0 | 0 | 52.583 |
| BRAWH2013941 | 100 | 0 | 0 | 0 | 0 | 0 | 0 |
| BRAWH2013955 | 100 | 0 | 0 | 0 | 0 | 0 | 0 |
| BRAWH2014053 | 23.222 | 0 | 0 | 0 | 0 | 0 | 25.752 |
| BRAWH2014188 | 2.148 | 0 | 0 | 3.652 | 0 | 0 | 0.794 |
| BRAWH2014234 | 100 | 0 | 0 | 0 | 0 | 0 | 0 |
| BRAWH2014379 | 62.276 | 0 | 0 | 0 | 0 | 0 | 0 |
| BRAWH2014414 | 17.865 | 0 | 0 | 18.227 | 0 | 0 | 9.906 |
| BRAWH2014473 | 45.606 | 0 | 0 | 0 | 0 | 0 | 0 |
| BRAWH2014511 | 4.297 | 9.858 | 30.443 | 0 | 0 | 15.493 | 0 |
| BRAWH2014645 | 4.228 | 0 | 3.745 | 1.078 | 0 | 0 | 1.172 |
| BRAWH2014662 | 15.521 | 0 | 0 | 0 | 0 | 0 | 17.212 |
| BRAWH2014717 | 100 | 0 | 0 | 0 | 0 | 0 | 0 |
| BRAWH2014729 | 100 | 0 | 0 | 0 | 0 | 0 | 0 |
| BRAWH2014876 | 10.473 | 24.026 | 0 | 0 | 0 | 0 | 58.068 |
| BRAWH2014934 | 35.975 | 0 | 0 | 0 | 0 | 0 | 0 |
| BRAWH2014954 | 58.488 | 0 | 0 | 0 | 0 | 0 | 0 |
| BRAWH2015247 | 10.440 | 0 | 0 | 0 | 0 | 0 | 11.577 |
| BRAWH2015349 | 21.997 | 0 | 0 | 0 | 0 | 39.658 | 0 |
| BRAWH2015375 | 100 | 0 | 0 | 0 | 0 | 0 | 0 |
| BRAWH2015385 | 58.488 | 0 | 0 | 0 | 0 | 0 | 0 |
| BRAWH2015595 | 100 | 0 | 0 | 0 | 0 | 0 | 0 |
| BRAWH2015728 | 49.811 | 0 | 0 | 0 | 0 | 0 | 0 |
| BRAWH2015853 | 100 | 0 | 0 | 0 | 0 | 0 | 0 |
| BRAWH2015866 | 100 | 0 | 0 | 0 | 0 | 0 | 0 |
| BRAWH2016028 | 49.811 | 0 | 0 | 0 | 0 | 0 | 0 |
| BRAWH2016106 | 36.501 | 0 | 0 | 0 | 0 | 0 | 0 |
| BRAWH2016160 | 100 | 0 | 0 | 0 | 0 | 0 | 0 |
| BRAWH2016166 | 22.688 | 0 | 0 | 7.716 | 0 | 0 | 0 |
| BRAWH2016209 | 8.306 | 0 | 0 | 0 | 0 | 0 | 0 |
| BRAWH2016221 | 47.417 | 0 | 0 | 0 | 0 | 0 | 52.583 |
| BRAWH2016223 | 100 | 0 | 0 | 0 | 0 | 0 | 0 |
| BRAWH2016269 | 1.318 | 3.025 | 4.670 | 0 | 4.907 | 0 | 0 |
| BRAWH2016305 | 4.308 | 0 | 0 | 0 | 0 | 0 | 0 |
| BRAWH2016439 | 100 | 0 | 0 | 0 | 0 | 0 | 0 |
| BRAWH2016446 | 8.700 | 0 | 0 | 0 | 0 | 0 | 0 |
| BRAWH2016514 | 35.037 | 0 | 0 | 35.747 | 0 | 0 | 0 |
| BRAWH2016562 | 49.499 | 0 | 0 | 50.501 | 0 | 0 | 0 |
| BRAWH2016655 | 100 | 0 | 0 | 0 | 0 | 0 | 0 |
| BRAWH2016679 | 9.636 | 0 | 0 | 0 | 0 | 0 | 0 |
| BRAWH2016702 | 73.807 | 0 | 0 | 0 | 0 | 0 | 0 |
| BRAWH2016724 | 35.119 | 0 | 0 | 0 | 0 | 0 | 0 |
| BRAWH2016785 | 100 | 0 | 0 | 0 | 0 | 0 | 0 |
| BRAWH2016792 | 100 | 0 | 0 | 0 | 0 | 0 | 0 |
| BRAWH2016800 | 100 | 0 | 0 | 0 | 0 | 0 | 0 |
| BRAWH2017002 | 2.488 | 0 | 0 | 2.539 | 0 | 8.973 | 0 |
| BRAWH2017103 | 100 | 0 | 0 | 0 | 0 | 0 | 0 |
| BRAWH2017250 | 100 | 0 | 0 | 0 | 0 | 0 | 0 |
| BRAWH2017294 | 47.417 | 0 | 0 | 0 | 0 | 0 | 52.583 |
| BRAWH2017304 | 16.605 | 0 | 0 | 0 | 0 | 0 | 0 |
| BRAWH2017305 | 100 | 0 | 0 | 0 | 0 | 0 | 0 |
| BRAWH2017379 | 15.195 | 0 | 0 | 0 | 0 | 0 | 16.850 |
| BRAWH2017407 | 100 | 0 | 0 | 0 | 0 | 0 | 0 |
| BRAWH2017433 | 100 | 0 | 0 | 0 | 0 | 0 | 0 |
| BRAWH2017523 | 100 | 0 | 0 | 0 | 0 | 0 | 0 |
| BRAWH2017534 | 100 | 0 | 0 | 0 | 0 | 0 | 0 |
| BRAWH2017542 | 35.119 | 0 | 0 | 0 | 0 | 0 | 0 |
| BRAWH2017635 | 100 | 0 | 0 | 0 | 0 | 0 | 0 |
| BRAWH2017685 | 1.522 | 1.164 | 0 | 0.518 | 0 | 0 | 1.126 |
| BRAWH2017913 | 100 | 0 | 0 | 0 | 0 | 0 | 0 |
| BRAWH2018206 | 11.051 | 0 | 0 | 11.275 | 0 | 0 | 36.766 |
| BRAWH2018267 | 41.331 | 0 | 0 | 21.084 | 0 | 0 | 22.917 |
| BRAWH2018282 | 100 | 0 | 0 | 0 | 0 | 0 | 0 |
| BRAWH2018317 | 100 | 0 | 0 | 0 | 0 | 0 | 0 |
| BRAWH2018506 | 100 | 0 | 0 | 0 | 0 | 0 | 0 |
| BRAWH2018514 | 100 | 0 | 0 | 0 | 0 | 0 | 0 |
| BRAWH2018526 | 0.615 | 1.412 | 2.180 | 0.628 | 0 | 0 | 0.341 |
| BRAWH2018527 | 8.512 | 0 | 0 | 0 | 0 | 0 | 0 |
| BRAWH2018601 | 100 | 0 | 0 | 0 | 0 | 0 | 0 |
| BRAWH2018729 | 2.980 | 0 | 0 | 0 | 0 | 0 | 0 |
| BRAWH2018745 | 45.606 | 0 | 0 | 0 | 0 | 0 | 0 |
| BRAWH2018875 | 52.989 | 0 | 0 | 13.515 | 0 | 0 | 14.691 |
| BRAWH2019053 | 100 | 0 | 0 | 0 | 0 | 0 | 0 |
| BRAWH2019055 | 100 | 0 | 0 | 0 | 0 | 0 | 0 |
| BRAWH2019198 | 100 | 0 | 0 | 0 | 0 | 0 | 0 |
| BRAWH3000078 | 100 | 0 | 0 | 0 | 0 | 0 | 0 |
| BRAWH3000088 | 5.784 | 0 | 4.098 | 4.721 | 4.306 | 4.171 | 10.263 |
| BRAWH3000100 | 100 | 0 | 0 | 0 | 0 | 0 | 0 |
| BRAWH3000166 | 100 | 0 | 0 | 0 | 0 | 0 | 0 |
| BRAWH3000314 | 71.553 | 0 | 0 | 0 | 0 | 0 | 0 |
| BRAWH3000329 | 100 | 0 | 0 | 0 | 0 | 0 | 0 |
| BRAWH3000410 | 100 | 0 | 0 | 0 | 0 | 0 | 0 |
| BRAWH3000446 | 100 | 0 | 0 | 0 | 0 | 0 | 0 |
| BRAWH3000491 | 100 | 0 | 0 | 0 | 0 | 0 | 0 |
| BRAWH3000604 | 54.530 | 0 | 0 | 0 | 0 | 0 | 0 |
| BRAWH3000884 | 100 | 0 | 0 | 0 | 0 | 0 | 0 |
| BRAWH3001053 | 100 | 0 | 0 | 0 | 0 | 0 | 0 |
| BRAWH3001319 | 27.294 | 0 | 0 | 0 | 0 | 0 | 0 |
| BRAWH3001326 | 45.606 | 0 | 0 | 0 | 0 | 0 | 0 |
| BRAWH3001475 | 100 | 0 | 0 | 0 | 0 | 0 | 0 |
| BRAWH3001636 | 100 | 0 | 0 | 0 | 0 | 0 | 0 |
| BRAWH3001638 | 100 | 0 | 0 | 0 | 0 | 0 | 0 |
| BRAWH3001712 | 49.499 | 0 | 0 | 50.501 | 0 | 0 | 0 |
| BRAWH3001760 | 100 | 0 | 0 | 0 | 0 | 0 | 0 |
| BRAWH3001783 | 100 | 0 | 0 | 0 | 0 | 0 | 0 |
| BRAWH3001833 | 100 | 0 | 0 | 0 | 0 | 0 | 0 |
| BRAWH3001879 | 100 | 0 | 0 | 0 | 0 | 0 | 0 |
| BRAWH3001891 | 34.539 | 0 | 0 | 0 | 0 | 0 | 0 |
| BRAWH3001918 | 27.772 | 0 | 0 | 0 | 0 | 0 | 0 |
| BRAWH3002433 | 47.417 | 0 | 0 | 0 | 0 | 0 | 52.583 |
| BRAWH3002467 | 36.501 | 0 | 0 | 0 | 0 | 0 | 0 |
| BRAWH3002513 | 100 | 0 | 0 | 0 | 0 | 0 | 0 |
| BRAWH3002574 | 13.222 | 0 | 0 | 0 | 0 | 0 | 0 |
| BRAWH3002600 | 36.800 | 0 | 0 | 0 | 0 | 0 | 0 |
| BRAWH3002819 | 100 | 0 | 0 | 0 | 0 | 0 | 0 |
| BRAWH3002853 | 2.959 | 0 | 2.620 | 1.509 | 2.753 | 0 | 4.922 |
| BRAWH3003019 | 100 | 0 | 0 | 0 | 0 | 0 | 0 |
| BRAWH3003136 | 100 | 0 | 0 | 0 | 0 | 0 | 0 |
| BRAWH3003244 | 100 | 0 | 0 | 0 | 0 | 0 | 0 |
| BRAWH3003343 | 100 | 0 | 0 | 0 | 0 | 0 | 0 |
| BRAWH3003411 | 46.281 | 0 | 0 | 0 | 0 | 0 | 0 |
| BRAWH3003522 | 100 | 0 | 0 | 0 | 0 | 0 | 0 |
| BRAWH3003573 | 20.162 | 0 | 0 | 0 | 0 | 0 | 22.358 |
| BRAWH3003598 | 100 | 0 | 0 | 0 | 0 | 0 | 0 |
| BRAWH3003727 | 10.055 | 0 | 0 | 10.259 | 0 | 0 | 0 |
| BRAWH3003801 | 100 | 0 | 0 | 0 | 0 | 0 | 0 |
| BRAWH3003975 | 100 | 0 | 0 | 0 | 0 | 0 | 0 |
| BRAWH3004222 | 44.597 | 0 | 0 | 0 | 0 | 0 | 0 |
| BRAWH3004335 | 100 | 0 | 0 | 0 | 0 | 0 | 0 |
| BRAWH3004350 | 16.580 | 0 | 0 | 0 | 0 | 0 | 18.386 |
| BRAWH3004453 | 100 | 0 | 0 | 0 | 0 | 0 | 0 |
| BRAWH3004530 | 17.640 | 0 | 0 | 17.997 | 0 | 0 | 19.562 |
| BRAWH3004666 | 49.499 | 0 | 0 | 50.501 | 0 | 0 | 0 |
| BRAWH3005037 | 100 | 0 | 0 | 0 | 0 | 0 | 0 |
| BRAWH3005047 | 100 | 0 | 0 | 0 | 0 | 0 | 0 |
| BRAWH3005132 | 49.811 | 0 | 0 | 0 | 0 | 0 | 0 |
| BRAWH3005146 | 10.127 | 0 | 0 | 10.331 | 0 | 0 | 5.615 |
| BRAWH3005292 | 100 | 0 | 0 | 0 | 0 | 0 | 0 |
| BRAWH3005300 | 47.167 | 0 | 0 | 0 | 0 | 0 | 0 |
| BRAWH3005422 | 100 | 0 | 0 | 0 | 0 | 0 | 0 |
| BRAWH3005534 | 100 | 0 | 0 | 0 | 0 | 0 | 0 |
| BRAWH3005886 | 100 | 0 | 0 | 0 | 0 | 0 | 0 |
| BRAWH3005892 | 100 | 0 | 0 | 0 | 0 | 0 | 0 |
| BRAWH3005896 | 100 | 0 | 0 | 0 | 0 | 0 | 0 |
| BRAWH3005912 | 100 | 0 | 0 | 0 | 0 | 0 | 0 |
| BRAWH3005981 | 29.324 | 0 | 0 | 0 | 0 | 0 | 0 |
| BRAWH3006547 | 100 | 0 | 0 | 0 | 0 | 0 | 0 |
| BRAWH3006548 | 71.018 | 0 | 0 | 28.982 | 0 | 0 | 0 |
| BRAWH3006761 | 21.269 | 0 | 0 | 43.398 | 0 | 0 | 0 |
| BRAWH3006792 | 49.499 | 0 | 0 | 50.501 | 0 | 0 | 0 |
| BRAWH3007129 | 29.521 | 0 | 0 | 10.040 | 0 | 0 | 10.913 |
| BRAWH3007221 | 100 | 0 | 0 | 0 | 0 | 0 | 0 |
| BRAWH3007441 | 100 | 0 | 0 | 0 | 0 | 0 | 0 |
| BRAWH3007455 | 100 | 0 | 0 | 0 | 0 | 0 | 0 |
| BRAWH3007506 | 100 | 0 | 0 | 0 | 0 | 0 | 0 |
| BRAWH3007726 | 54.530 | 0 | 0 | 0 | 0 | 0 | 0 |
| BRAWH3007783 | 100 | 0 | 0 | 0 | 0 | 0 | 0 |
| BRAWH3008167 | 100 | 0 | 0 | 0 | 0 | 0 | 0 |
| BRAWH3008341 | 100 | 0 | 0 | 0 | 0 | 0 | 0 |
| BRAWH3008559 | 100 | 0 | 0 | 0 | 0 | 0 | 0 |
| BRAWH3008697 | 100 | 0 | 0 | 0 | 0 | 0 | 0 |
| BRAWH3008867 | 100 | 0 | 0 | 0 | 0 | 0 | 0 |
| BRAWH3008931 | 3.463 | 15.892 | 0 | 10.601 | 12.891 | 0 | 0 |
| BRAWH3009017 | 100 | 0 | 0 | 0 | 0 | 0 | 0 |
| BRAWH3009285 | 73.807 | 0 | 0 | 0 | 0 | 0 | 0 |
| BRAWH3009297 | 58.488 | 0 | 0 | 0 | 0 | 0 | 0 |
| BRAWH3009546 | 70.717 | 0 | 0 | 0 | 0 | 0 | 0 |
| BRAWH3009961 | 47.417 | 0 | 0 | 0 | 0 | 0 | 52.583 |
| BRAWH3010461 | 16.435 | 0 | 7.278 | 8.384 | 7.646 | 0 | 11.391 |
| BRAWH3010560 | 100 | 0 | 0 | 0 | 0 | 0 | 0 |
| BRAWH3010602 | 100 | 0 | 0 | 0 | 0 | 0 | 0 |
| BRAWH3010657 | 100 | 0 | 0 | 0 | 0 | 0 | 0 |
| BRAWH3010726 | 100 | 0 | 0 | 0 | 0 | 0 | 0 |
| BRAWH3010833 | 100 | 0 | 0 | 0 | 0 | 0 | 0 |
| BRAWH3011101 | 100 | 0 | 0 | 0 | 0 | 0 | 0 |
| BRAWH3011331 | 100 | 0 | 0 | 0 | 0 | 0 | 0 |
| BRAWH3011402 | 100 | 0 | 0 | 0 | 0 | 0 | 0 |
| BRAWH3011577 | 100 | 0 | 0 | 0 | 0 | 0 | 0 |
| BRAWH3011623 | 100 | 0 | 0 | 0 | 0 | 0 | 0 |
| BRAWH3011637 | 30.862 | 0 | 0 | 0 | 0 | 0 | 0 |
| BRAWH3011685 | 100 | 0 | 0 | 0 | 0 | 0 | 0 |
| BRAWH3011907 | 47.417 | 0 | 0 | 0 | 0 | 0 | 52.583 |
| BRAWH3011929 | 100 | 0 | 0 | 0 | 0 | 0 | 0 |
| BRAWH3012005 | 100 | 0 | 0 | 0 | 0 | 0 | 0 |
| BRAWH3012662 | 33.972 | 0 | 0 | 11.553 | 0 | 0 | 12.558 |
| BRAWH3012779 | 100 | 0 | 0 | 0 | 0 | 0 | 0 |
| BRAWH3013009 | 100 | 0 | 0 | 0 | 0 | 0 | 0 |
| BRAWH3013049 | 100 | 0 | 0 | 0 | 0 | 0 | 0 |
| BRAWH3013197 | 100 | 0 | 0 | 0 | 0 | 0 | 0 |
| BRAWH3013264 | 100 | 0 | 0 | 0 | 0 | 0 | 0 |
| BRAWH3013508 | 100 | 0 | 0 | 0 | 0 | 0 | 0 |
| BRAWH3014609 | 44.597 | 0 | 0 | 0 | 0 | 0 | 0 |
| BRAWH3014639 | 100 | 0 | 0 | 0 | 0 | 0 | 0 |
| BRAWH3015017 | 100 | 0 | 0 | 0 | 0 | 0 | 0 |
| BRAWH3015175 | 100 | 0 | 0 | 0 | 0 | 0 | 0 |
| BRAWH3015260 | 100 | 0 | 0 | 0 | 0 | 0 | 0 |
| BRAWH3015610 | 100 | 0 | 0 | 0 | 0 | 0 | 0 |
| BRAWH3015825 | 100 | 0 | 0 | 0 | 0 | 0 | 0 |
| BRAWH3016123 | 100 | 0 | 0 | 0 | 0 | 0 | 0 |
| BRAWH3016271 | 5.394 | 12.374 | 0 | 0 | 0 | 0 | 0 |
| BRAWH3016715 | 100 | 0 | 0 | 0 | 0 | 0 | 0 |
| BRAWH3017259 | 13.996 | 0 | 0 | 0 | 0 | 0 | 0 |
| BRAWH3017260 | 100 | 0 | 0 | 0 | 0 | 0 | 0 |
| BRAWH3017477 | 100 | 0 | 0 | 0 | 0 | 0 | 0 |
| BRAWH3017537 | 100 | 0 | 0 | 0 | 0 | 0 | 0 |
| BRAWH3017980 | 49.811 | 0 | 0 | 0 | 0 | 0 | 0 |
| BRAWH3018063 | 15.836 | 0 | 0 | 0 | 0 | 0 | 0 |
| BRAWH3018369 | 100 | 0 | 0 | 0 | 0 | 0 | 0 |
| BRAWH3018548 | 100 | 0 | 0 | 0 | 0 | 0 | 0 |
| BRAWH3018969 | 100 | 0 | 0 | 0 | 0 | 0 | 0 |
| BRAWH3019026 | 100 | 0 | 0 | 0 | 0 | 0 | 0 |
| BRAWH3019529 | 100 | 0 | 0 | 0 | 0 | 0 | 0 |
| BRAWH3019594 | 100 | 0 | 0 | 0 | 0 | 0 | 0 |
| BRAWH3019629 | 100 | 0 | 0 | 0 | 0 | 0 | 0 |
| BRAWH3019820 | 100 | 0 | 0 | 0 | 0 | 0 | 0 |
| BRAWH3020200 | 100 | 0 | 0 | 0 | 0 | 0 | 0 |
| BRAWH3020318 | 100 | 0 | 0 | 0 | 0 | 0 | 0 |
| BRAWH3020486 | 100 | 0 | 0 | 0 | 0 | 0 | 0 |
| BRAWH3020884 | 100 | 0 | 0 | 0 | 0 | 0 | 0 |
| BRAWH3020928 | 49.499 | 0 | 0 | 50.501 | 0 | 0 | 0 |
| BRAWH3021012 | 100 | 0 | 0 | 0 | 0 | 0 | 0 |
| BRAWH3021545 | 7.296 | 0 | 0 | 3.722 | 0 | 0 | 0 |
| BRAWH3021574 | 9.400 | 0 | 0 | 0 | 17.492 | 0 | 0 |
| BRAWH3021580 | 100 | 0 | 0 | 0 | 0 | 0 | 0 |
| BRAWH3021641 | 100 | 0 | 0 | 0 | 0 | 0 | 0 |
| BRAWH3021643 | 100 | 0 | 0 | 0 | 0 | 0 | 0 |
| BRAWH3021724 | 100 | 0 | 0 | 0 | 0 | 0 | 0 |
| BRAWH3022347 | 100 | 0 | 0 | 0 | 0 | 0 | 0 |
| BRAWH3022431 | 100 | 0 | 0 | 0 | 0 | 0 | 0 |
| BRAWH3022459 | 100 | 0 | 0 | 0 | 0 | 0 | 0 |
| BRAWH3022542 | 100 | 0 | 0 | 0 | 0 | 0 | 0 |
| BRAWH3022719 | 100 | 0 | 0 | 0 | 0 | 0 | 0 |
| BRAWH3022866 | 100 | 0 | 0 | 0 | 0 | 0 | 0 |
| BRAWH3022900 | 100 | 0 | 0 | 0 | 0 | 0 | 0 |
| BRAWH3023156 | 100 | 0 | 0 | 0 | 0 | 0 | 0 |
| BRAWH3023168 | 100 | 0 | 0 | 0 | 0 | 0 | 0 |
| BRAWH3023172 | 0.916 | 2.101 | 0 | 1.869 | 0 | 3.302 | 2.031 |
| BRAWH3023274 | 100 | 0 | 0 | 0 | 0 | 0 | 0 |
| BRAWH3023421 | 100 | 0 | 0 | 0 | 0 | 0 | 0 |
| BRAWH3024231 | 100 | 0 | 0 | 0 | 0 | 0 | 0 |
| BRAWH3024242 | 31.843 | 0 | 0 | 32.488 | 0 | 0 | 0 |
| BRAWH3024469 | 100 | 0 | 0 | 0 | 0 | 0 | 0 |
| BRAWH3024506 | 100 | 0 | 0 | 0 | 0 | 0 | 0 |
| BRAWH3024613 | 100 | 0 | 0 | 0 | 0 | 0 | 0 |
| BRAWH3024989 | 2.369 | 0 | 0 | 4.834 | 0 | 0 | 0 |
| BRAWH3026349 | 100 | 0 | 0 | 0 | 0 | 0 | 0 |
| BRAWH3026394 | 100 | 0 | 0 | 0 | 0 | 0 | 0 |
| BRAWH3026529 | 45.606 | 0 | 0 | 0 | 0 | 0 | 0 |
| BRAWH3027420 | 100 | 0 | 0 | 0 | 0 | 0 | 0 |
| BRAWH3027440 | 58.488 | 0 | 0 | 0 | 0 | 0 | 0 |
| BRAWH3027533 | 11.008 | 0 | 0 | 0 | 0 | 0 | 0 |
| BRAWH3027574 | 47.417 | 0 | 0 | 0 | 0 | 0 | 52.583 |
| BRAWH3027607 | 100 | 0 | 0 | 0 | 0 | 0 | 0 |
| BRAWH3027616 | 100 | 0 | 0 | 0 | 0 | 0 | 0 |
| BRAWH3027675 | 100 | 0 | 0 | 0 | 0 | 0 | 0 |
| BRAWH3027806 | 100 | 0 | 0 | 0 | 0 | 0 | 0 |
| BRAWH3027880 | 100 | 0 | 0 | 0 | 0 | 0 | 0 |
| BRAWH3027927 | 100 | 0 | 0 | 0 | 0 | 0 | 0 |
| BRAWH3028202 | 100 | 0 | 0 | 0 | 0 | 0 | 0 |
| BRAWH3028223 | 100 | 0 | 0 | 0 | 0 | 0 | 0 |
| BRAWH3028306 | 100 | 0 | 0 | 0 | 0 | 0 | 0 |
| BRAWH3028461 | 100 | 0 | 0 | 0 | 0 | 0 | 0 |
| BRAWH3028645 | 100 | 0 | 0 | 0 | 0 | 0 | 0 |
| BRAWH3028754 | 100 | 0 | 0 | 0 | 0 | 0 | 0 |
| BRAWH3028796 | 100 | 0 | 0 | 0 | 0 | 0 | 0 |
| BRAWH3029254 | 100 | 0 | 0 | 0 | 0 | 0 | 0 |
| BRAWH3029313 | 100 | 0 | 0 | 0 | 0 | 0 | 0 |
| BRAWH3029538 | 100 | 0 | 0 | 0 | 0 | 0 | 0 |
| BRAWH3029556 | 38.935 | 0 | 0 | 19.861 | 0 | 0 | 21.589 |
| BRAWH3029806 | 26.735 | 0 | 0 | 0 | 0 | 0 | 9.883 |
| BRAWH3030613 | 100 | 0 | 0 | 0 | 0 | 0 | 0 |
| BRAWH3030772 | 100 | 0 | 0 | 0 | 0 | 0 | 0 |
| BRAWH3030810 | 21.287 | 0 | 0 | 0 | 0 | 0 | 0 |
| BRAWH3030892 | 100 | 0 | 0 | 0 | 0 | 0 | 0 |
| BRAWH3030910 | 100 | 0 | 0 | 0 | 0 | 0 | 0 |
| BRAWH3030950 | 100 | 0 | 0 | 0 | 0 | 0 | 0 |
| BRAWH3031054 | 100 | 0 | 0 | 0 | 0 | 0 | 0 |
| BRAWH3031710 | 100 | 0 | 0 | 0 | 0 | 0 | 0 |
| BRAWH3031902 | 100 | 0 | 0 | 0 | 0 | 0 | 0 |
| BRAWH3032298 | 100 | 0 | 0 | 0 | 0 | 0 | 0 |
| BRAWH3032340 | 100 | 0 | 0 | 0 | 0 | 0 | 0 |
| BRAWH3032571 | 100 | 0 | 0 | 0 | 0 | 0 | 0 |
| BRAWH3032620 | 100 | 0 | 0 | 0 | 0 | 0 | 0 |
| BRAWH3032930 | 100 | 0 | 0 | 0 | 0 | 0 | 0 |
| BRAWH3033117 | 100 | 0 | 0 | 0 | 0 | 0 | 0 |
| BRAWH3033293 | 100 | 0 | 0 | 0 | 0 | 0 | 0 |
| BRAWH3033448 | 100 | 0 | 0 | 0 | 0 | 0 | 0 |
| BRAWH3033513 | 100 | 0 | 0 | 0 | 0 | 0 | 0 |
| BRAWH3034097 | 100 | 0 | 0 | 0 | 0 | 0 | 0 |
| BRAWH3034114 | 100 | 0 | 0 | 0 | 0 | 0 | 0 |
| BRAWH3034134 | 100 | 0 | 0 | 0 | 0 | 0 | 0 |
| BRAWH3034668 | 100 | 0 | 0 | 0 | 0 | 0 | 0 |
| BRAWH3034743 | 16.662 | 0 | 14.757 | 21.249 | 0 | 0 | 18.478 |
| BRAWH3034775 | 100 | 0 | 0 | 0 | 0 | 0 | 0 |
| BRAWH3034890 | 100 | 0 | 0 | 0 | 0 | 0 | 0 |
| BRAWH3035154 | 100 | 0 | 0 | 0 | 0 | 0 | 0 |
| BRAWH3035403 | 35.337 | 0 | 0 | 0 | 0 | 0 | 0 |
| BRAWH3035904 | 100 | 0 | 0 | 0 | 0 | 0 | 0 |
| BRAWH3035914 | 100 | 0 | 0 | 0 | 0 | 0 | 0 |
| BRAWH3035936 | 70.575 | 0 | 0 | 0 | 0 | 0 | 0 |
| BRAWH3036077 | 100 | 0 | 0 | 0 | 0 | 0 | 0 |
| BRAWH3036247 | 54.530 | 0 | 0 | 0 | 0 | 0 | 0 |
| BRAWH3036270 | 100 | 0 | 0 | 0 | 0 | 0 | 0 |
| BRAWH3036561 | 100 | 0 | 0 | 0 | 0 | 0 | 0 |
| BRAWH3036738 | 100 | 0 | 0 | 0 | 0 | 0 | 0 |
| BRAWH3036951 | 100 | 0 | 0 | 0 | 0 | 0 | 0 |
| BRAWH3037265 | 44.597 | 0 | 0 | 0 | 0 | 0 | 0 |
| BRAWH3037394 | 100 | 0 | 0 | 0 | 0 | 0 | 0 |
| BRAWH3037533 | 100 | 0 | 0 | 0 | 0 | 0 | 0 |
| BRAWH3037979 | 100 | 0 | 0 | 0 | 0 | 0 | 0 |
| BRAWH3038055 | 100 | 0 | 0 | 0 | 0 | 0 | 0 |
| BRAWH3038230 | 100 | 0 | 0 | 0 | 0 | 0 | 0 |
| BRAWH3038252 | 100 | 0 | 0 | 0 | 0 | 0 | 0 |
| BRAWH3038324 | 100 | 0 | 0 | 0 | 0 | 0 | 0 |
| BRCAN1000065 | 0 | 100 | 0 | 0 | 0 | 0 | 0 |
| BRCAN1000076 | 0 | 6.753 | 0 | 0 | 0 | 0 | 0 |
| BRCAN1000105 | 0 | 100 | 0 | 0 | 0 | 0 | 0 |
| BRCAN1000149 | 0 | 56.874 | 0 | 0 | 0 | 0 | 0 |
| BRCAN1000168 | 5.643 | 9.709 | 0 | 17.271 | 5.250 | 10.173 | 7.822 |
| BRCAN2000148 | 0 | 100 | 0 | 0 | 0 | 0 | 0 |
| BRCAN2000149 | 0 | 100 | 0 | 0 | 0 | 0 | 0 |
| BRCAN2000209 | 0 | 38.263 | 0 | 0 | 0 | 0 | 0 |
| BRCAN2000239 | 0 | 100 | 0 | 0 | 0 | 0 | 0 |
| BRCAN2000346 | 0 | 100 | 0 | 0 | 0 | 0 | 0 |
| BRCAN2000364 | 0 | 100 | 0 | 0 | 0 | 0 | 0 |
| BRCAN2000383 | 0 | 100 | 0 | 0 | 0 | 0 | 0 |
| BRCAN2000418 | 0 | 100 | 0 | 0 | 0 | 0 | 0 |
| BRCAN2000523 | 0 | 100 | 0 | 0 | 0 | 0 | 0 |
| BRCAN2000541 | 0 | 100 | 0 | 0 | 0 | 0 | 0 |
| BRCAN2000563 | 13.150 | 30.170 | 0 | 0 | 0 | 0 | 0 |
| BRCAN2000577 | 0 | 100 | 0 | 0 | 0 | 0 | 0 |
| BRCAN2000620 | 0 | 100 | 0 | 0 | 0 | 0 | 0 |
| BRCAN2000639 | 0 | 38.481 | 0 | 0 | 0 | 0 | 0 |
| BRCAN2000763 | 0 | 100 | 0 | 0 | 0 | 0 | 0 |
| BRCAN2000832 | 0 | 100 | 0 | 0 | 0 | 0 | 0 |
| BRCAN2000923 | 0 | 2.660 | 0 | 0 | 0 | 0 | 0 |
| BRCAN2001223 | 0 | 53.082 | 0 | 23.605 | 0 | 0 | 0 |
| BRCAN2001866 | 0 | 100 | 0 | 0 | 0 | 0 | 0 |
| BRCAN2002173 | 0 | 9.124 | 7.044 | 0 | 7.401 | 0 | 0 |
| BRCAN2002416 | 0 | 100 | 0 | 0 | 0 | 0 | 0 |
| BRCAN2002473 | 0 | 100 | 0 | 0 | 0 | 0 | 0 |
| BRCAN2002562 | 0 | 100 | 0 | 0 | 0 | 0 | 0 |
| BRCAN2002662 | 0 | 100 | 0 | 0 | 0 | 0 | 0 |
| BRCAN2002826 | 0 | 100 | 0 | 0 | 0 | 0 | 0 |
| BRCAN2002854 | 0 | 100 | 0 | 0 | 0 | 0 | 0 |
| BRCAN2002856 | 0 | 39.306 | 60.694 | 0 | 0 | 0 | 0 |
| BRCAN2002892 | 0 | 67.414 | 0 | 0 | 0 | 0 | 32.586 |
| BRCAN2002944 | 0 | 73.343 | 0 | 0 | 0 | 0 | 0 |
| BRCAN2002948 | 0 | 100 | 0 | 0 | 0 | 0 | 0 |
| BRCAN2003070 | 0 | 100 | 0 | 0 | 0 | 0 | 0 |
| BRCAN2003269 | 0 | 100 | 0 | 0 | 0 | 0 | 0 |
| BRCAN2003389 | 0 | 6.976 | 0 | 0 | 0 | 0 | 0 |
| BRCAN2003628 | 0 | 100 | 0 | 0 | 0 | 0 | 0 |
| BRCAN2003703 | 0 | 100 | 0 | 0 | 0 | 0 | 0 |
| BRCAN2003746 | 0 | 100 | 0 | 0 | 0 | 0 | 0 |
| BRCAN2003814 | 0 | 9.924 | 0 | 0 | 0 | 0 | 0 |
| BRCAN2003944 | 0.282 | 3.230 | 0.998 | 0 | 1.048 | 2.031 | 0.625 |
| BRCAN2003987 | 0 | 100 | 0 | 0 | 0 | 0 | 0 |
| BRCAN2004173 | 0 | 100 | 0 | 0 | 0 | 0 | 0 |
| BRCAN2004355 | 0 | 100 | 0 | 0 | 0 | 0 | 0 |
| BRCAN2004371 | 0 | 100 | 0 | 0 | 0 | 0 | 0 |
| BRCAN2004653 | 0 | 77.826 | 0 | 0 | 0 | 0 | 0 |
| BRCAN2004699 | 0 | 100 | 0 | 0 | 0 | 0 | 0 |
| BRCAN2005436 | 0 | 100 | 0 | 0 | 0 | 0 | 0 |
| BRCAN2005449 | 0 | 100 | 0 | 0 | 0 | 0 | 0 |
| BRCAN2006019 | 0 | 25.857 | 26.617 | 3.833 | 0 | 13.546 | 0 |
| BRCAN2006051 | 0 | 100 | 0 | 0 | 0 | 0 | 0 |
| BRCAN2006063 | 0 | 100 | 0 | 0 | 0 | 0 | 0 |
| BRCAN2006117 | 0 | 57.190 | 0 | 0 | 0 | 0 | 0 |
| BRCAN2006174 | 0 | 100 | 0 | 0 | 0 | 0 | 0 |
| BRCAN2006290 | 0 | 100 | 0 | 0 | 0 | 0 | 0 |
| BRCAN2006297 | 0 | 33.031 | 51.004 | 0 | 0 | 0 | 15.966 |
| BRCAN2006323 | 0 | 100 | 0 | 0 | 0 | 0 | 0 |
| BRCAN2006401 | 0 | 52.014 | 0 | 0 | 0 | 0 | 25.142 |
| BRCAN2006411 | 0 | 100 | 0 | 0 | 0 | 0 | 0 |
| BRCAN2006450 | 0 | 100 | 0 | 0 | 0 | 0 | 0 |
| BRCAN2006955 | 0 | 100 | 0 | 0 | 0 | 0 | 0 |
| BRCAN2007119 | 0 | 38.885 | 0 | 0 | 0 | 61.115 | 0 |
| BRCAN2007144 | 0 | 100 | 0 | 0 | 0 | 0 | 0 |
| BRCAN2007409 | 0 | 6.883 | 10.629 | 0 | 0 | 0 | 0 |
| BRCAN2007426 | 0 | 100 | 0 | 0 | 0 | 0 | 0 |
| BRCAN2007525 | 0 | 100 | 0 | 0 | 0 | 0 | 0 |
| BRCAN2007700 | 0 | 27.900 | 0 | 0 | 0 | 0 | 0 |
| BRCAN2008494 | 0 | 100 | 0 | 0 | 0 | 0 | 0 |
| BRCAN2008528 | 0 | 100 | 0 | 0 | 0 | 0 | 0 |
| BRCAN2008701 | 0 | 100 | 0 | 0 | 0 | 0 | 0 |
| BRCAN2008894 | 0 | 17.467 | 0 | 0 | 0 | 0 | 0 |
| BRCAN2009156 | 0 | 100 | 0 | 0 | 0 | 0 | 0 |
| BRCAN2009168 | 0 | 100 | 0 | 0 | 0 | 0 | 0 |
| BRCAN2009203 | 0 | 100 | 0 | 0 | 0 | 0 | 0 |
| BRCAN2009432 | 0 | 3.021 | 0 | 0 | 0 | 0 | 0 |
| BRCAN2010374 | 0 | 69.484 | 0 | 0 | 0 | 0 | 0 |
| BRCAN2010376 | 0 | 76.373 | 0 | 0 | 0 | 0 | 0 |
| BRCAN2010547 | 0 | 100 | 0 | 0 | 0 | 0 | 0 |
| BRCAN2010581 | 0 | 100 | 0 | 0 | 0 | 0 | 0 |
| BRCAN2010665 | 19.610 | 29.993 | 0 | 13.338 | 0 | 11.785 | 7.249 |
| BRCAN2011254 | 0 | 100 | 0 | 0 | 0 | 0 | 0 |
| BRCAN2011316 | 0 | 100 | 0 | 0 | 0 | 0 | 0 |
| BRCAN2011602 | 0 | 100 | 0 | 0 | 0 | 0 | 0 |
| BRCAN2011946 | 0 | 14.508 | 0 | 0 | 23.536 | 0 | 0 |
| BRCAN2012110 | 0 | 100 | 0 | 0 | 0 | 0 | 0 |
| BRCAN2012355 | 0 | 100 | 0 | 0 | 0 | 0 | 0 |
| BRCAN2012402 | 0 | 100 | 0 | 0 | 0 | 0 | 0 |
| BRCAN2012408 | 0 | 100 | 0 | 0 | 0 | 0 | 0 |
| BRCAN2012481 | 0 | 100 | 0 | 0 | 0 | 0 | 0 |
| BRCAN2012613 | 0 | 100 | 0 | 0 | 0 | 0 | 0 |
| BRCAN2012713 | 0 | 100 | 0 | 0 | 0 | 0 | 0 |
| BRCAN2012929 | 0 | 55.996 | 0 | 0 | 0 | 44.004 | 0 |
| BRCAN2013655 | 0 | 100 | 0 | 0 | 0 | 0 | 0 |
| BRCAN2013660 | 0 | 100 | 0 | 0 | 0 | 0 | 0 |
| BRCAN2014143 | 0 | 100 | 0 | 0 | 0 | 0 | 0 |
| BRCAN2014229 | 0 | 100 | 0 | 0 | 0 | 0 | 0 |
| BRCAN2014370 | 0 | 100 | 0 | 0 | 0 | 0 | 0 |
| BRCAN2014602 | 0 | 100 | 0 | 0 | 0 | 0 | 0 |
| BRCAN2014652 | 0 | 100 | 0 | 0 | 0 | 0 | 0 |
| BRCAN2014788 | 0 | 100 | 0 | 0 | 0 | 0 | 0 |
| BRCAN2014881 | 0 | 69.484 | 0 | 0 | 0 | 0 | 0 |
| BRCAN2014952 | 0 | 100 | 0 | 0 | 0 | 0 | 0 |
| BRCAN2015371 | 0 | 25.149 | 0 | 0 | 0 | 0 | 0 |
| BRCAN2015402 | 0 | 100 | 0 | 0 | 0 | 0 | 0 |
| BRCAN2015464 | 0 | 100 | 0 | 0 | 0 | 0 | 0 |
| BRCAN2015719 | 3.019 | 6.927 | 0 | 0 | 0 | 0 | 3.348 |
| BRCAN2015757 | 0 | 100 | 0 | 0 | 0 | 0 | 0 |
| BRCAN2015886 | 0 | 100 | 0 | 0 | 0 | 0 | 0 |
| BRCAN2016025 | 0 | 100 | 0 | 0 | 0 | 0 | 0 |
| BRCAN2016046 | 0 | 69.484 | 0 | 0 | 0 | 0 | 0 |
| BRCAN2016174 | 0 | 24.944 | 0 | 0 | 0 | 0 | 12.057 |
| BRCAN2016433 | 0 | 100 | 0 | 0 | 0 | 0 | 0 |
| BRCAN2016619 | 0 | 30.224 | 0 | 0 | 0 | 0 | 0 |
| BRCAN2016762 | 0 | 100 | 0 | 0 | 0 | 0 | 0 |
| BRCAN2016814 | 0 | 67.414 | 0 | 0 | 0 | 0 | 32.586 |
| BRCAN2017442 | 0 | 100 | 0 | 0 | 0 | 0 | 0 |
| BRCAN2017905 | 0 | 100 | 0 | 0 | 0 | 0 | 0 |
| BRCAN2018240 | 0 | 100 | 0 | 0 | 0 | 0 | 0 |
| BRCAN2018269 | 0 | 100 | 0 | 0 | 0 | 0 | 0 |
| BRCAN2018490 | 0 | 100 | 0 | 0 | 0 | 0 | 0 |
| BRCAN2018566 | 0 | 56.874 | 0 | 0 | 0 | 0 | 0 |
| BRCAN2018667 | 0 | 100 | 0 | 0 | 0 | 0 | 0 |
| BRCAN2018748 | 0 | 100 | 0 | 0 | 0 | 0 | 0 |
| BRCAN2018935 | 0 | 20.928 | 0 | 0 | 0 | 0 | 0 |
| BRCAN2019002 | 0 | 100 | 0 | 0 | 0 | 0 | 0 |
| BRCAN2019387 | 0 | 100 | 0 | 0 | 0 | 0 | 0 |
| BRCAN2019653 | 0 | 57.233 | 0 | 0 | 0 | 0 | 0 |
| BRCAN2019773 | 0 | 100 | 0 | 0 | 0 | 0 | 0 |
| BRCAN2019907 | 0 | 100 | 0 | 0 | 0 | 0 | 0 |
| BRCAN2020234 | 0 | 56.552 | 0 | 0 | 0 | 0 | 27.335 |
| BRCAN2020331 | 0 | 100 | 0 | 0 | 0 | 0 | 0 |
| BRCAN2020412 | 0 | 25.021 | 0 | 0 | 0 | 0 | 0 |
| BRCAN2020467 | 0 | 100 | 0 | 0 | 0 | 0 | 0 |
| BRCAN2020710 | 0 | 49.868 | 0 | 22.176 | 0 | 0 | 0 |
| BRCAN2020880 | 0 | 100 | 0 | 0 | 0 | 0 | 0 |
| BRCAN2021024 | 10.255 | 23.527 | 0 | 10.462 | 0 | 0 | 22.744 |
| BRCAN2021028 | 0 | 24.138 | 37.272 | 0 | 0 | 0 | 0 |
| BRCAN2021325 | 0 | 100 | 0 | 0 | 0 | 0 | 0 |
| BRCAN2021452 | 0 | 100 | 0 | 0 | 0 | 0 | 0 |
| BRCAN2021669 | 0 | 100 | 0 | 0 | 0 | 0 | 0 |
| BRCAN2021718 | 0 | 100 | 0 | 0 | 0 | 0 | 0 |
| BRCAN2022126 | 4.855 | 22.279 | 17.201 | 4.954 | 0 | 0 | 0 |
| BRCAN2022191 | 0 | 100 | 0 | 0 | 0 | 0 | 0 |
| BRCAN2022472 | 0 | 100 | 0 | 0 | 0 | 0 | 0 |
| BRCAN2022474 | 0 | 100 | 0 | 0 | 0 | 0 | 0 |
| BRCAN2023347 | 0 | 100 | 0 | 0 | 0 | 0 | 0 |
| BRCAN2023724 | 0 | 100 | 0 | 0 | 0 | 0 | 0 |
| BRCAN2024451 | 0 | 100 | 0 | 0 | 0 | 0 | 0 |
| BRCAN2024563 | 0 | 100 | 0 | 0 | 0 | 0 | 0 |
| BRCAN2024572 | 0 | 6.266 | 0 | 2.786 | 10.165 | 0 | 6.057 |
| BRCAN2025009 | 0 | 100 | 0 | 0 | 0 | 0 | 0 |
| BRCAN2025093 | 21.732 | 49.857 | 0 | 0 | 0 | 0 | 0 |
| BRCAN2025349 | 0 | 100 | 0 | 0 | 0 | 0 | 0 |
| BRCAN2025368 | 0 | 38.835 | 0 | 0 | 0 | 0 | 0 |
| BRCAN2025712 | 0 | 100 | 0 | 0 | 0 | 0 | 0 |
| BRCAN2025982 | 0 | 69.219 | 0 | 30.781 | 0 | 0 | 0 |
| BRCAN2026117 | 0 | 100 | 0 | 0 | 0 | 0 | 0 |
| BRCAN2026197 | 6.245 | 3.582 | 0 | 6.371 | 0 | 5.629 | 8.657 |
| BRCAN2026340 | 0 | 34.670 | 0 | 0 | 0 | 0 | 0 |
| BRCAN2026711 | 0 | 100 | 0 | 0 | 0 | 0 | 0 |
| BRCAN2027150 | 0 | 23.385 | 0 | 0 | 0 | 0 | 0 |
| BRCAN2027310 | 0 | 100 | 0 | 0 | 0 | 0 | 0 |
| BRCAN2027334 | 0 | 69.484 | 0 | 0 | 0 | 0 | 0 |
| BRCAN2027355 | 0 | 100 | 0 | 0 | 0 | 0 | 0 |
| BRCAN2027364 | 2.970 | 20.440 | 21.042 | 0 | 11.054 | 0 | 13.174 |
| BRCAN2027513 | 0 | 100 | 0 | 0 | 0 | 0 | 0 |
| BRCAN2027593 | 0 | 100 | 0 | 0 | 0 | 0 | 0 |
| BRCAN2027970 | 0 | 100 | 0 | 0 | 0 | 0 | 0 |
| BRCAN2028021 | 0 | 100 | 0 | 0 | 0 | 0 | 0 |
| BRCAN2028036 | 0 | 5.539 | 0 | 2.463 | 0 | 0 | 0 |
| BRCAN2028040 | 0 | 60.666 | 0 | 0 | 0 | 0 | 0 |
| BRCAN2028319 | 0 | 29.858 | 0 | 0 | 48.439 | 0 | 0 |
| BRCAN2028338 | 0 | 100 | 0 | 0 | 0 | 0 | 0 |
| BRCAN2028355 | 0 | 3.389 | 0 | 1.507 | 0 | 0 | 0 |
| BRCAN2028378 | 0 | 100 | 0 | 0 | 0 | 0 | 0 |
| BRCAN2028460 | 0 | 100 | 0 | 0 | 0 | 0 | 0 |
| BRCAN2028545 | 0 | 38.885 | 0 | 0 | 0 | 61.115 | 0 |
| BRCAN2028634 | 0 | 67.414 | 0 | 0 | 0 | 0 | 32.586 |
| BRCAN2028702 | 0 | 100 | 0 | 0 | 0 | 0 | 0 |
| BRCOC1000040 | 0 | 0 | 10.447 | 9.026 | 0 | 0 | 6.541 |
| BRCOC1000087 | 0 | 0 | 100 | 0 | 0 | 0 | 0 |
| BRCOC1000094 | 0.952 | 8.738 | 16.865 | 4.857 | 21.263 | 3.433 | 5.280 |
| BRCOC2000004 | 1.800 | 20.649 | 12.754 | 5.509 | 20.099 | 12.981 | 5.989 |
| BRCOC2000047 | 0 | 0 | 49.505 | 0 | 0 | 0 | 0 |
| BRCOC2000152 | 0 | 0 | 74.037 | 0 | 0 | 0 | 0 |
| BRCOC2000184 | 0 | 0 | 29.688 | 8.550 | 0 | 0 | 0 |
| BRCOC2000186 | 0 | 0 | 10.537 | 0 | 0 | 0 | 0 |
| BRCOC2000333 | 0 | 0 | 42.433 | 0 | 0 | 0 | 0 |
| BRCOC2000360 | 17.976 | 0 | 63.683 | 18.340 | 0 | 0 | 0 |
| BRCOC2000404 | 0 | 0 | 100 | 0 | 0 | 0 | 0 |
| BRCOC2000487 | 0 | 0.665 | 1.026 | 0 | 0 | 0 | 0.643 |
| BRCOC2000637 | 0 | 0 | 100 | 0 | 0 | 0 | 0 |
| BRCOC2000670 | 0 | 0 | 77.856 | 0 | 0 | 0 | 0 |
| BRCOC2000816 | 22.014 | 0 | 77.986 | 0 | 0 | 0 | 0 |
| BRCOC2000850 | 0 | 0 | 100 | 0 | 0 | 0 | 0 |
| BRCOC2001355 | 0 | 0 | 100 | 0 | 0 | 0 | 0 |
| BRCOC2002085 | 0 | 0 | 100 | 0 | 0 | 0 | 0 |
| BRCOC2002155 | 0 | 0 | 75.977 | 0 | 0 | 0 | 0 |
| BRCOC2002323 | 0 | 0 | 100 | 0 | 0 | 0 | 0 |
| BRCOC2002659 | 0 | 0 | 100 | 0 | 0 | 0 | 0 |
| BRCOC2002664 | 0 | 0 | 100 | 0 | 0 | 0 | 0 |
| BRCOC2002686 | 0 | 0 | 100 | 0 | 0 | 0 | 0 |
| BRCOC2002751 | 0 | 0 | 100 | 0 | 0 | 0 | 0 |
| BRCOC2002756 | 0 | 0 | 100 | 0 | 0 | 0 | 0 |
| BRCOC2002777 | 0 | 0 | 100 | 0 | 0 | 0 | 0 |
| BRCOC2002835 | 0 | 0 | 100 | 0 | 0 | 0 | 0 |
| BRCOC2003100 | 0 | 0 | 83.309 | 0 | 0 | 0 | 0 |
| BRCOC2003125 | 0 | 0 | 20.131 | 0 | 0 | 0 | 0 |
| BRCOC2003187 | 0.786 | 1.804 | 2.786 | 0 | 5.854 | 2.836 | 0 |
| BRCOC2003213 | 10.381 | 0 | 36.777 | 0 | 0 | 0 | 0 |
| BRCOC2003513 | 0 | 0 | 100 | 0 | 0 | 0 | 0 |
| BRCOC2003732 | 0 | 0 | 75.977 | 0 | 0 | 0 | 0 |
| BRCOC2003740 | 0 | 0 | 100 | 0 | 0 | 0 | 0 |
| BRCOC2004036 | 0 | 0 | 49.505 | 0 | 0 | 0 | 0 |
| BRCOC2004175 | 0 | 0 | 34.465 | 0 | 0 | 0 | 0 |
| BRCOC2004354 | 0 | 0 | 100 | 0 | 0 | 0 | 0 |
| BRCOC2004455 | 0 | 0 | 100 | 0 | 0 | 0 | 0 |
| BRCOC2004950 | 0 | 0 | 100 | 0 | 0 | 0 | 0 |
| BRCOC2005542 | 0 | 0 | 62.599 | 0 | 0 | 0 | 19.596 |
| BRCOC2005903 | 0 | 0 | 31.097 | 0 | 0 | 0 | 0 |
| BRCOC2005951 | 0 | 0 | 100 | 0 | 0 | 0 | 0 |
| BRCOC2006164 | 0 | 0 | 51.486 | 0 | 0 | 0 | 32.234 |
| BRCOC2006189 | 6.639 | 15.231 | 23.518 | 3.387 | 0 | 11.969 | 18.405 |
| BRCOC2006243 | 0 | 0 | 100 | 0 | 0 | 0 | 0 |
| BRCOC2006270 | 0 | 0 | 49.505 | 0 | 0 | 0 | 0 |
| BRCOC2006639 | 0 | 0 | 100 | 0 | 0 | 0 | 0 |
| BRCOC2006942 | 0 | 0 | 100 | 0 | 0 | 0 | 0 |
| BRCOC2007034 | 0 | 0 | 83.309 | 0 | 0 | 0 | 0 |
| BRCOC2007593 | 0 | 0 | 100 | 0 | 0 | 0 | 0 |
| BRCOC2007733 | 0 | 0 | 100 | 0 | 0 | 0 | 0 |
| BRCOC2007769 | 0 | 0 | 100 | 0 | 0 | 0 | 0 |
| BRCOC2008064 | 0 | 0 | 100 | 0 | 0 | 0 | 0 |
| BRCOC2008225 | 0 | 0 | 100 | 0 | 0 | 0 | 0 |
| BRCOC2008642 | 0 | 0 | 100 | 0 | 0 | 0 | 0 |
| BRCOC2008993 | 0 | 0 | 100 | 0 | 0 | 0 | 0 |
| BRCOC2009052 | 0 | 0 | 100 | 0 | 0 | 0 | 0 |
| BRCOC2009196 | 0 | 0 | 100 | 0 | 0 | 0 | 0 |
| BRCOC2009380 | 0 | 0 | 100 | 0 | 0 | 0 | 0 |
| BRCOC2009638 | 0 | 0 | 100 | 0 | 0 | 0 | 0 |
| BRCOC2009937 | 0 | 0 | 56.917 | 16.392 | 0 | 0 | 0 |
| BRCOC2010115 | 0 | 0 | 100 | 0 | 0 | 0 | 0 |
| BRCOC2010123 | 0 | 2.513 | 3.881 | 0 | 0 | 0 | 0 |
| BRCOC2010510 | 0 | 0 | 85.082 | 0 | 0 | 0 | 0 |
| BRCOC2010730 | 0 | 0 | 38.292 | 0 | 0 | 0 | 11.987 |
| BRCOC2010980 | 0 | 0 | 100 | 0 | 0 | 0 | 0 |
| BRCOC2010994 | 0 | 0 | 100 | 0 | 0 | 0 | 0 |
| BRCOC2011010 | 0 | 0 | 100 | 0 | 0 | 0 | 0 |
| BRCOC2011398 | 0 | 0 | 100 | 0 | 0 | 0 | 0 |
| BRCOC2011418 | 0 | 0 | 100 | 0 | 0 | 0 | 0 |
| BRCOC2011506 | 3.806 | 2.183 | 3.371 | 1.942 | 0 | 0 | 4.221 |
| BRCOC2011769 | 0 | 0 | 100 | 0 | 0 | 0 | 0 |
| BRCOC2011996 | 0 | 0 | 100 | 0 | 0 | 0 | 0 |
| BRCOC2012172 | 0 | 0 | 9.965 | 2.870 | 0 | 0 | 3.119 |
| BRCOC2012229 | 0 | 0 | 100 | 0 | 0 | 0 | 0 |
| BRCOC2012386 | 11.403 | 0 | 40.395 | 0 | 0 | 0 | 0 |
| BRCOC2012551 | 7.213 | 0 | 25.551 | 0 | 0 | 0 | 15.997 |
| BRCOC2012813 | 0 | 39.306 | 60.694 | 0 | 0 | 0 | 0 |
| BRCOC2013448 | 0 | 0 | 100 | 0 | 0 | 0 | 0 |
| BRCOC2013573 | 0 | 0 | 100 | 0 | 0 | 0 | 0 |
| BRCOC2013675 | 0 | 0 | 100 | 0 | 0 | 0 | 0 |
| BRCOC2013780 | 0 | 0 | 49.505 | 0 | 0 | 0 | 0 |
| BRCOC2014013 | 0 | 0 | 19.212 | 0 | 0 | 0 | 0 |
| BRCOC2014033 | 15.633 | 0 | 55.382 | 15.950 | 0 | 0 | 0 |
| BRCOC2014400 | 0 | 0 | 59.512 | 0 | 0 | 0 | 0 |
| BRCOC2014748 | 0 | 0 | 100 | 0 | 0 | 0 | 0 |
| BRCOC2014833 | 0 | 0 | 100 | 0 | 0 | 0 | 0 |
| BRCOC2015597 | 0 | 0 | 74.813 | 0 | 0 | 0 | 0 |
| BRCOC2015824 | 0 | 0 | 100 | 0 | 0 | 0 | 0 |
| BRCOC2015908 | 0 | 0 | 67.066 | 0 | 0 | 0 | 0 |
| BRCOC2015944 | 0 | 0 | 100 | 0 | 0 | 0 | 0 |
| BRCOC2016525 | 0 | 0 | 100 | 0 | 0 | 0 | 0 |
| BRCOC2016661 | 0 | 0 | 100 | 0 | 0 | 0 | 0 |
| BRCOC2017061 | 0 | 0 | 100 | 0 | 0 | 0 | 0 |
| BRCOC2017652 | 0 | 0 | 48.902 | 0 | 0 | 0 | 0 |
| BRCOC2017856 | 0 | 0 | 100 | 0 | 0 | 0 | 0 |
| BRCOC2018775 | 0 | 0 | 35.892 | 0 | 0 | 0 | 0 |
| BRCOC2018877 | 0 | 0 | 67.066 | 0 | 0 | 0 | 0 |
| BRCOC2019255 | 0 | 39.250 | 30.303 | 0 | 0 | 0 | 0 |
| BRCOC2019549 | 0 | 0 | 100 | 0 | 0 | 0 | 0 |
| BRCOC2019841 | 0 | 0 | 83.309 | 0 | 0 | 0 | 0 |
| BRCOC2019896 | 0 | 0 | 77.856 | 0 | 0 | 0 | 0 |
| BRCOC2019903 | 0 | 0 | 56.781 | 0 | 0 | 0 | 0 |
| BRCOC2019910 | 36.872 | 0 | 4.428 | 3.188 | 4.652 | 4.507 | 6.930 |
| BRCOC2019934 | 0 | 0 | 100 | 0 | 0 | 0 | 0 |
| BRCOC2020122 | 0 | 0 | 100 | 0 | 0 | 0 | 0 |
| BRCOC2020142 | 22.014 | 0 | 77.986 | 0 | 0 | 0 | 0 |
| BRHIP1000058 | 0 | 0 | 0 | 100 | 0 | 0 | 0 |
| BRHIP1000072 | 0 | 0 | 0 | 100 | 0 | 0 | 0 |
| BRHIP1000104 | 3.922 | 14.996 | 13.894 | 4.001 | 7.299 | 4.714 | 5.074 |
| BRHIP1000108 | 12.929 | 0 | 0 | 17.587 | 0 | 0 | 9.558 |
| BRHIP1000129 | 0 | 0 | 0 | 50.312 | 0 | 0 | 0 |
| BRHIP1000174 | 0 | 0 | 17.961 | 5.173 | 0 | 18.281 | 5.622 |
| BRHIP1000258 | 25.855 | 0 | 0 | 26.379 | 0 | 0 | 0 |
| BRHIP2000021 | 0 | 0 | 0 | 11.573 | 0 | 0 | 0 |
| BRHIP2000079 | 0 | 0 | 0 | 100 | 0 | 0 | 0 |
| BRHIP2000087 | 0 | 0 | 0 | 13.429 | 24.496 | 0 | 7.299 |
| BRHIP2000163 | 37.398 | 0 | 0 | 38.155 | 0 | 0 | 0 |
| BRHIP2000210 | 0 | 0 | 0 | 58.973 | 0 | 0 | 0 |
| BRHIP2000239 | 0 | 0 | 0 | 47.666 | 0 | 0 | 0 |
| BRHIP2000245 | 0 | 0 | 0 | 55.026 | 0 | 0 | 0 |
| BRHIP2000312 | 32.424 | 0 | 0 | 13.232 | 0 | 0 | 14.383 |
| BRHIP2000359 | 0 | 0 | 0 | 100 | 0 | 0 | 0 |
| BRHIP2000445 | 0 | 0 | 0 | 100 | 0 | 0 | 0 |
| BRHIP2000506 | 0 | 0 | 0 | 100 | 0 | 0 | 0 |
| BRHIP2000532 | 0 | 0 | 0 | 100 | 0 | 0 | 0 |
| BRHIP2000534 | 0.342 | 0 | 0 | 0.349 | 0 | 0 | 0 |
| BRHIP2000553 | 2.570 | 0 | 0 | 5.243 | 0 | 0 | 2.850 |
| BRHIP2000621 | 0 | 0 | 0 | 100 | 0 | 0 | 0 |
| BRHIP2000691 | 0 | 0 | 0 | 100 | 0 | 0 | 0 |
| BRHIP2000819 | 0 | 0 | 0 | 2.204 | 0 | 0 | 4.791 |
| BRHIP2000826 | 0 | 0 | 0 | 100 | 0 | 0 | 0 |
| BRHIP2000920 | 36.630 | 0 | 0 | 37.371 | 0 | 0 | 0 |
| BRHIP2001074 | 0 | 0 | 0 | 39.976 | 0 | 0 | 0 |
| BRHIP2001099 | 0 | 0 | 0 | 7.072 | 0 | 0 | 0 |
| BRHIP2001686 | 0 | 0 | 0 | 100 | 0 | 0 | 0 |
| BRHIP2001782 | 0 | 0 | 0 | 100 | 0 | 0 | 0 |
| BRHIP2001802 | 0 | 0 | 0 | 100 | 0 | 0 | 0 |
| BRHIP2001805 | 0 | 0 | 0 | 14.757 | 0 | 0 | 0 |
| BRHIP2001886 | 0 | 0 | 0 | 50.312 | 0 | 0 | 0 |
| BRHIP2001927 | 0 | 0 | 0 | 100 | 0 | 0 | 0 |
| BRHIP2002122 | 0 | 0 | 0 | 100 | 0 | 0 | 0 |
| BRHIP2002143 | 0 | 0 | 0 | 58.973 | 0 | 0 | 0 |
| BRHIP2002172 | 0 | 0 | 0 | 100 | 0 | 0 | 0 |
| BRHIP2002339 | 7.848 | 0 | 0 | 24.020 | 0 | 0 | 8.703 |
| BRHIP2002346 | 0 | 0 | 0 | 100 | 0 | 0 | 0 |
| BRHIP2002510 | 0 | 0 | 0 | 100 | 0 | 0 | 0 |
| BRHIP2002664 | 0 | 0 | 0 | 100 | 0 | 0 | 0 |
| BRHIP2002722 | 0 | 0 | 0 | 100 | 0 | 0 | 0 |
| BRHIP2002929 | 0 | 0 | 0 | 100 | 0 | 0 | 0 |
| BRHIP2003048 | 0 | 0 | 0 | 100 | 0 | 0 | 0 |
| BRHIP2003062 | 18.998 | 0 | 0 | 9.691 | 0 | 0 | 0 |
| BRHIP2003242 | 0 | 0 | 0 | 100 | 0 | 0 | 0 |
| BRHIP2003272 | 0 | 0 | 0 | 100 | 0 | 0 | 0 |
| BRHIP2003748 | 0 | 0 | 0 | 100 | 0 | 0 | 0 |
| BRHIP2003786 | 0 | 0 | 0 | 100 | 0 | 0 | 0 |
| BRHIP2003828 | 0 | 0 | 0 | 100 | 0 | 0 | 0 |
| BRHIP2003917 | 0 | 0 | 0 | 11.981 | 0 | 0 | 0 |
| BRHIP2004312 | 0 | 0 | 0 | 100 | 0 | 0 | 0 |
| BRHIP2004355 | 0 | 0 | 0 | 100 | 0 | 0 | 0 |
| BRHIP2004359 | 0 | 0 | 0 | 24.839 | 0 | 0 | 0 |
| BRHIP2004814 | 0 | 0 | 0 | 35.391 | 0 | 0 | 0 |
| BRHIP2004883 | 0 | 0 | 0 | 100 | 0 | 0 | 0 |
| BRHIP2004902 | 0 | 0 | 0 | 100 | 0 | 0 | 0 |
| BRHIP2005010 | 15.764 | 0 | 0 | 16.084 | 0 | 0 | 0 |
| BRHIP2005236 | 0 | 0 | 0 | 100 | 0 | 0 | 0 |
| BRHIP2005271 | 7.083 | 0 | 0 | 14.453 | 0 | 0 | 7.855 |
| BRHIP2005354 | 0 | 0 | 0 | 100 | 0 | 0 | 0 |
| BRHIP2005600 | 0 | 0 | 0 | 100 | 0 | 0 | 0 |
| BRHIP2005719 | 49.499 | 0 | 0 | 50.501 | 0 | 0 | 0 |
| BRHIP2005724 | 0 | 0 | 0 | 100 | 0 | 0 | 0 |
| BRHIP2005752 | 0 | 0 | 0 | 58.973 | 0 | 0 | 0 |
| BRHIP2005932 | 0 | 0 | 0 | 100 | 0 | 0 | 0 |
| BRHIP2006617 | 0 | 0 | 0 | 100 | 0 | 0 | 0 |
| BRHIP2006782 | 0 | 0 | 0 | 100 | 0 | 0 | 0 |
| BRHIP2006800 | 0 | 0 | 0 | 100 | 0 | 0 | 0 |
| BRHIP2006819 | 0 | 0 | 0 | 100 | 0 | 0 | 0 |
| BRHIP2006921 | 0 | 0 | 0 | 100 | 0 | 0 | 0 |
| BRHIP2007305 | 1.132 | 0 | 0 | 1.155 | 0 | 0 | 0 |
| BRHIP2007307 | 0 | 0 | 0 | 29.041 | 0 | 0 | 0 |
| BRHIP2007616 | 0 | 0 | 0 | 100 | 0 | 0 | 0 |
| BRHIP2007690 | 0 | 0 | 0 | 100 | 0 | 0 | 0 |
| BRHIP2007741 | 6.943 | 0 | 0 | 3.542 | 0 | 0 | 5.775 |
| BRHIP2007928 | 0 | 0 | 0 | 100 | 0 | 0 | 0 |
| BRHIP2007969 | 0 | 0 | 0 | 100 | 0 | 0 | 0 |
| BRHIP2008269 | 0 | 0 | 0 | 28.389 | 0 | 0 | 0 |
| BRHIP2008389 | 0 | 0 | 0 | 100 | 0 | 0 | 0 |
| BRHIP2008607 | 17.957 | 0 | 0 | 36.640 | 0 | 0 | 19.913 |
| BRHIP2008756 | 0 | 0 | 0 | 100 | 0 | 0 | 0 |
| BRHIP2008909 | 0 | 0 | 0 | 100 | 0 | 0 | 0 |
| BRHIP2009019 | 0 | 0 | 0 | 58.973 | 0 | 0 | 0 |
| BRHIP2009177 | 0 | 0 | 0 | 100 | 0 | 0 | 0 |
| BRHIP2009340 | 0 | 0 | 0 | 100 | 0 | 0 | 0 |
| BRHIP2009351 | 0 | 0 | 0 | 100 | 0 | 0 | 0 |
| BRHIP2009414 | 0 | 0 | 0 | 100 | 0 | 0 | 0 |
| BRHIP2009474 | 0 | 0 | 0 | 47.917 | 0 | 0 | 52.083 |
| BRHIP2009617 | 0 | 0 | 0 | 100 | 0 | 0 | 0 |
| BRHIP2009685 | 7.124 | 0 | 0 | 7.269 | 0 | 0 | 7.901 |
| BRHIP2010217 | 0 | 0 | 0 | 11.396 | 0 | 0 | 18.580 |
| BRHIP2010309 | 0 | 0 | 0 | 100 | 0 | 0 | 0 |
| BRHIP2010444 | 0 | 0 | 0 | 47.917 | 0 | 0 | 52.083 |
| BRHIP2010487 | 0 | 0 | 0 | 4.196 | 0 | 0 | 0 |
| BRHIP2010571 | 0 | 0 | 0 | 31.420 | 0 | 0 | 0 |
| BRHIP2010593 | 0 | 0 | 0 | 3.573 | 0 | 0 | 0 |
| BRHIP2010610 | 0 | 0 | 0 | 100 | 0 | 0 | 0 |
| BRHIP2010723 | 0 | 0 | 0 | 50.312 | 0 | 0 | 0 |
| BRHIP2010744 | 0 | 0 | 0 | 100 | 0 | 0 | 0 |
| BRHIP2011080 | 0 | 0 | 0 | 35.577 | 0 | 0 | 0 |
| BRHIP2011120 | 15.351 | 0 | 0 | 15.661 | 28.568 | 0 | 0 |
| BRHIP2011199 | 0 | 0 | 0 | 55.026 | 0 | 0 | 0 |
| BRHIP2011491 | 0 | 0 | 0 | 0.843 | 0 | 8.941 | 0 |
| BRHIP2011508 | 0 | 0 | 0 | 22.032 | 0 | 0 | 23.948 |
| BRHIP2011576 | 0 | 0 | 0 | 19.559 | 0 | 0 | 0 |
| BRHIP2011616 | 0 | 0 | 0 | 46.104 | 0 | 0 | 0 |
| BRHIP2011783 | 0 | 0 | 0 | 100 | 0 | 0 | 0 |
| BRHIP2011838 | 0 | 0 | 0 | 100 | 0 | 0 | 0 |
| BRHIP2011891 | 0 | 0 | 0 | 60.949 | 0 | 0 | 0 |
| BRHIP2011933 | 0 | 0 | 0 | 100 | 0 | 0 | 0 |
| BRHIP2012054 | 0 | 0 | 0 | 29.041 | 0 | 0 | 0 |
| BRHIP2012059 | 0 | 0 | 0 | 100 | 0 | 0 | 0 |
| BRHIP2012141 | 0 | 0 | 0 | 47.917 | 0 | 0 | 52.083 |
| BRHIP2012314 | 0 | 0 | 0 | 100 | 0 | 0 | 0 |
| BRHIP2012360 | 0 | 0 | 0 | 100 | 0 | 0 | 0 |
| BRHIP2012545 | 0 | 0 | 0 | 100 | 0 | 0 | 0 |
| BRHIP2012580 | 0 | 0 | 0 | 100 | 0 | 0 | 0 |
| BRHIP2012627 | 0 | 0 | 0 | 16.026 | 0 | 0 | 0 |
| BRHIP2012642 | 0 | 0 | 0 | 100 | 0 | 0 | 0 |
| BRHIP2012750 | 0 | 0 | 0 | 100 | 0 | 0 | 0 |
| BRHIP2012922 | 0 | 0 | 0 | 100 | 0 | 0 | 0 |
| BRHIP2012923 | 0 | 69.219 | 0 | 30.781 | 0 | 0 | 0 |
| BRHIP2012972 | 0 | 0 | 0 | 47.917 | 0 | 0 | 52.083 |
| BRHIP2013286 | 0 | 0 | 0 | 17.468 | 0 | 0 | 0 |
| BRHIP2013447 | 0 | 0 | 0 | 100 | 0 | 0 | 0 |
| BRHIP2013510 | 0 | 0 | 0 | 100 | 0 | 0 | 0 |
| BRHIP2013699 | 0 | 0 | 0 | 21.770 | 0 | 0 | 23.663 |
| BRHIP2013723 | 0 | 0 | 0 | 100 | 0 | 0 | 0 |
| BRHIP2013958 | 0 | 0 | 0 | 36.661 | 0 | 0 | 39.849 |
| BRHIP2013972 | 0 | 0 | 0 | 100 | 0 | 0 | 0 |
| BRHIP2014063 | 0 | 0 | 0 | 36.967 | 0 | 0 | 0 |
| BRHIP2014228 | 29.439 | 0 | 0 | 15.017 | 0 | 0 | 0 |
| BRHIP2014285 | 0 | 0 | 0 | 100 | 0 | 0 | 0 |
| BRHIP2014291 | 0 | 0 | 0 | 100 | 0 | 0 | 0 |
| BRHIP2014373 | 0 | 0 | 0 | 34.432 | 0 | 0 | 37.426 |
| BRHIP2014386 | 0 | 0 | 0 | 55.026 | 0 | 0 | 0 |
| BRHIP2014387 | 0 | 0 | 0 | 100 | 0 | 0 | 0 |
| BRHIP2014954 | 0 | 0 | 0 | 100 | 0 | 0 | 0 |
| BRHIP2015153 | 20.038 | 0 | 0 | 20.443 | 0 | 0 | 0 |
| BRHIP2015224 | 22.746 | 0 | 0 | 13.924 | 0 | 0 | 20.179 |
| BRHIP2015245 | 14.244 | 0 | 0 | 19.377 | 0 | 0 | 13.164 |
| BRHIP2015356 | 0 | 0 | 0 | 100 | 0 | 0 | 0 |
| BRHIP2015360 | 0 | 0 | 0 | 100 | 0 | 0 | 0 |
| BRHIP2015679 | 2.509 | 0 | 0 | 5.119 | 0 | 0 | 0 |
| BRHIP2016005 | 0 | 0 | 0 | 100 | 0 | 0 | 0 |
| BRHIP2016125 | 0 | 0 | 0 | 100 | 0 | 0 | 0 |
| BRHIP2016788 | 0 | 0 | 0 | 100 | 0 | 0 | 0 |
| BRHIP2016968 | 0 | 0 | 0 | 100 | 0 | 0 | 0 |
| BRHIP2016990 | 0 | 0 | 0 | 100 | 0 | 0 | 0 |
| BRHIP2017010 | 0 | 0 | 0 | 14.025 | 0 | 0 | 0 |
| BRHIP2017315 | 0 | 0 | 0 | 100 | 0 | 0 | 0 |
| BRHIP2017385 | 0 | 0 | 0 | 100 | 0 | 0 | 0 |
| BRHIP2017404 | 0 | 0 | 0 | 100 | 0 | 0 | 0 |
| BRHIP2017542 | 0 | 0 | 0 | 100 | 0 | 0 | 0 |
| BRHIP2017553 | 0 | 0 | 0 | 100 | 0 | 0 | 0 |
| BRHIP2017642 | 12.915 | 0 | 0 | 26.353 | 0 | 0 | 0 |
| BRHIP2017714 | 0 | 0 | 0 | 100 | 0 | 0 | 0 |
| BRHIP2017780 | 0 | 0 | 0 | 100 | 0 | 0 | 0 |
| BRHIP2017945 | 0 | 0 | 0 | 3.288 | 0 | 0 | 0 |
| BRHIP2018014 | 0 | 0 | 0 | 100 | 0 | 0 | 0 |
| BRHIP2018369 | 0 | 0 | 0 | 100 | 0 | 0 | 0 |
| BRHIP2018612 | 0 | 0 | 0 | 100 | 0 | 0 | 0 |
| BRHIP2018635 | 0 | 0 | 0 | 60.949 | 0 | 0 | 0 |
| BRHIP2018650 | 0 | 0 | 0 | 100 | 0 | 0 | 0 |
| BRHIP2018712 | 4.050 | 0 | 0 | 4.132 | 0 | 0 | 0 |
| BRHIP2018719 | 0 | 0 | 0 | 50.312 | 0 | 0 | 0 |
| BRHIP2018805 | 0 | 0 | 0 | 100 | 0 | 0 | 0 |
| BRHIP2018998 | 0 | 0 | 0 | 100 | 0 | 0 | 0 |
| BRHIP2019007 | 0 | 0 | 0 | 100 | 0 | 0 | 0 |
| BRHIP2019047 | 0 | 0 | 0 | 100 | 0 | 0 | 0 |
| BRHIP2019149 | 0 | 0 | 0 | 11.267 | 0 | 0 | 0 |
| BRHIP2019177 | 0 | 0 | 0 | 100 | 0 | 0 | 0 |
| BRHIP2019186 | 0 | 0 | 0 | 4.027 | 0 | 0 | 0 |
| BRHIP2019291 | 0 | 0 | 0 | 100 | 0 | 0 | 0 |
| BRHIP2019494 | 0 | 0 | 0 | 74.193 | 0 | 0 | 0 |
| BRHIP2019589 | 0 | 0 | 0 | 100 | 0 | 0 | 0 |
| BRHIP2019641 | 0 | 0 | 0 | 100 | 0 | 0 | 0 |
| BRHIP2019819 | 8.671 | 0 | 0 | 17.692 | 0 | 0 | 0 |
| BRHIP2019884 | 0 | 0 | 0 | 100 | 0 | 0 | 0 |
| BRHIP2019972 | 0 | 0 | 0 | 100 | 0 | 0 | 0 |
| BRHIP2020182 | 0 | 0 | 0 | 100 | 0 | 0 | 0 |
| BRHIP2020509 | 0 | 0 | 0 | 19.104 | 0 | 0 | 0 |
| BRHIP2020573 | 9.050 | 0 | 0 | 18.466 | 0 | 0 | 0 |
| BRHIP2020622 | 0 | 53.082 | 0 | 23.605 | 0 | 0 | 0 |
| BRHIP2020695 | 49.499 | 0 | 0 | 50.501 | 0 | 0 | 0 |
| BRHIP2020743 | 0 | 0 | 0 | 100 | 0 | 0 | 0 |
| BRHIP2020799 | 5.061 | 0 | 0 | 36.143 | 0 | 0 | 5.612 |
| BRHIP2020842 | 0 | 0 | 0 | 100 | 0 | 0 | 0 |
| BRHIP2020859 | 0 | 0 | 0 | 100 | 0 | 0 | 0 |
| BRHIP2020930 | 0 | 0 | 0 | 100 | 0 | 0 | 0 |
| BRHIP2021102 | 0 | 0 | 0 | 100 | 0 | 0 | 0 |
| BRHIP2021289 | 0 | 0 | 0 | 100 | 0 | 0 | 0 |
| BRHIP2021495 | 0 | 14.715 | 0 | 6.544 | 0 | 0 | 0 |
| BRHIP2021615 | 0 | 0 | 0 | 100 | 0 | 0 | 0 |
| BRHIP2021744 | 0 | 0 | 0 | 100 | 0 | 0 | 0 |
| BRHIP2021762 | 8.358 | 0 | 0 | 11.369 | 0 | 0 | 3.090 |
| BRHIP2021858 | 3.346 | 0 | 0 | 3.414 | 0 | 0 | 0 |
| BRHIP2021870 | 0 | 10.186 | 0 | 4.530 | 0 | 0 | 4.924 |
| BRHIP2021929 | 0 | 0 | 0 | 100 | 0 | 0 | 0 |
| BRHIP2022006 | 0 | 0 | 0 | 100 | 0 | 0 | 0 |
| BRHIP2022054 | 0 | 16.949 | 17.448 | 2.512 | 0 | 0 | 5.462 |
| BRHIP2022221 | 0 | 0 | 0 | 47.917 | 0 | 0 | 52.083 |
| BRHIP2022228 | 9.138 | 20.964 | 0 | 9.323 | 0 | 0 | 0 |
| BRHIP2022298 | 0 | 0 | 0 | 100 | 0 | 0 | 0 |
| BRHIP2022326 | 1.701 | 1.952 | 0 | 3.472 | 0 | 0 | 0 |
| BRHIP2022467 | 0 | 32.605 | 0 | 14.499 | 52.896 | 0 | 0 |
| BRHIP2022708 | 0 | 0 | 0 | 100 | 0 | 0 | 0 |
| BRHIP2022986 | 2.845 | 0 | 0 | 5.806 | 0 | 0 | 0 |
| BRHIP2023071 | 0 | 0 | 0 | 50.312 | 0 | 0 | 0 |
| BRHIP2023229 | 0 | 0 | 0 | 15.312 | 0 | 0 | 0 |
| BRHIP2023272 | 0 | 0 | 0 | 3.443 | 0 | 0 | 0 |
| BRHIP2023292 | 0 | 0 | 0 | 35.577 | 0 | 0 | 0 |
| BRHIP2023309 | 11.666 | 0 | 0 | 23.804 | 0 | 0 | 0 |
| BRHIP2023369 | 17.477 | 0 | 0 | 17.830 | 0 | 0 | 0 |
| BRHIP2023438 | 0 | 0 | 0 | 26.026 | 0 | 0 | 0 |
| BRHIP2023695 | 0 | 0 | 0 | 36.438 | 0 | 0 | 0 |
| BRHIP2023735 | 0 | 0 | 0 | 100 | 0 | 0 | 0 |
| BRHIP2023762 | 2.386 | 0 | 0 | 2.435 | 0 | 0 | 2.646 |
| BRHIP2023773 | 0 | 0 | 0 | 29.041 | 0 | 0 | 0 |
| BRHIP2023860 | 0 | 0 | 0 | 100 | 0 | 0 | 0 |
| BRHIP2023869 | 0 | 0 | 0 | 36.661 | 0 | 0 | 39.849 |
| BRHIP2023888 | 2.208 | 1.688 | 1.303 | 0.751 | 1.369 | 2.653 | 4.488 |
| BRHIP2024046 | 0 | 0 | 0 | 31.291 | 0 | 0 | 0 |
| BRHIP2024165 | 0 | 0 | 0 | 100 | 0 | 0 | 0 |
| BRHIP2024201 | 0 | 0 | 0 | 100 | 0 | 0 | 0 |
| BRHIP2024347 | 0 | 0 | 0 | 100 | 0 | 0 | 0 |
| BRHIP2024398 | 0 | 0 | 0 | 8.590 | 0 | 0 | 0 |
| BRHIP2024549 | 0 | 0 | 0 | 100 | 0 | 0 | 0 |
| BRHIP2024742 | 8.730 | 0 | 4.418 | 7.635 | 0 | 0 | 8.298 |
| BRHIP2024789 | 0 | 0 | 0 | 100 | 0 | 0 | 0 |
| BRHIP2024911 | 0 | 0 | 0 | 9.456 | 0 | 0 | 0 |
| BRHIP2024941 | 0 | 0 | 0 | 100 | 0 | 0 | 0 |
| BRHIP2025245 | 0 | 0 | 0 | 47.666 | 0 | 0 | 0 |
| BRHIP2025366 | 0 | 0 | 0 | 100 | 0 | 0 | 0 |
| BRHIP2025448 | 0 | 0 | 0 | 31.199 | 0 | 0 | 0 |
| BRHIP2025679 | 0 | 0 | 0 | 58.973 | 0 | 0 | 0 |
| BRHIP2025739 | 0 | 0 | 0 | 100 | 0 | 0 | 0 |
| BRHIP2025797 | 0 | 0 | 0 | 100 | 0 | 0 | 0 |
| BRHIP2026021 | 0 | 0 | 0 | 100 | 0 | 0 | 0 |
| BRHIP2026061 | 0 | 0 | 0 | 31.199 | 0 | 0 | 0 |
| BRHIP2026155 | 0 | 0 | 0 | 100 | 0 | 0 | 0 |
| BRHIP2026214 | 0 | 0 | 0 | 35.577 | 0 | 0 | 0 |
| BRHIP2026288 | 0 | 0 | 0 | 22.018 | 0 | 0 | 0 |
| BRHIP2026346 | 0 | 0 | 0 | 100 | 0 | 0 | 0 |
| BRHIP2026557 | 0 | 0 | 0 | 100 | 0 | 0 | 0 |
| BRHIP2026723 | 0 | 0 | 0 | 100 | 0 | 0 | 0 |
| BRHIP2026877 | 0 | 69.219 | 0 | 30.781 | 0 | 0 | 0 |
| BRHIP2027017 | 0 | 26.410 | 0 | 11.745 | 0 | 0 | 0 |
| BRHIP2027054 | 0 | 0 | 0 | 100 | 0 | 0 | 0 |
| BRHIP2027077 | 2.020 | 0 | 0 | 2.061 | 0 | 0 | 0 |
| BRHIP2027563 | 0 | 0 | 0 | 100 | 0 | 0 | 0 |
| BRHIP2027685 | 0 | 0 | 0 | 50.312 | 0 | 0 | 0 |
| BRHIP2027762 | 0 | 0 | 0 | 100 | 0 | 0 | 0 |
| BRHIP2028187 | 0 | 0 | 0 | 74.193 | 0 | 0 | 0 |
| BRHIP2028303 | 0 | 0 | 0 | 100 | 0 | 0 | 0 |
| BRHIP2028330 | 0 | 0 | 0 | 100 | 0 | 0 | 0 |
| BRHIP2028480 | 0 | 0 | 0 | 100 | 0 | 0 | 0 |
| BRHIP2028583 | 0 | 0 | 0 | 12.691 | 0 | 0 | 0 |
| BRHIP2028593 | 0 | 0 | 0 | 100 | 0 | 0 | 0 |
| BRHIP2029176 | 0 | 0 | 0 | 100 | 0 | 0 | 0 |
| BRHIP2029283 | 0 | 0 | 0 | 100 | 0 | 0 | 0 |
| BRHIP2029393 | 0 | 0 | 0 | 100 | 0 | 0 | 0 |
| BRHIP2029529 | 0 | 0 | 0 | 100 | 0 | 0 | 0 |
| BRHIP2029643 | 0 | 0 | 0 | 15.240 | 55.599 | 0 | 0 |
| BRHIP2029663 | 0 | 0 | 0 | 45.093 | 0 | 0 | 0 |
| BRHIP3000017 | 8.819 | 0 | 15.620 | 4.499 | 0 | 0 | 0 |
| BRHIP3000060 | 0 | 0 | 0 | 47.917 | 0 | 0 | 52.083 |
| BRHIP3000070 | 0 | 0 | 0 | 100 | 0 | 0 | 0 |
| BRHIP3000081 | 0 | 0 | 0 | 100 | 0 | 0 | 0 |
| BRHIP3000111 | 0 | 2.349 | 3.627 | 3.133 | 3.810 | 3.691 | 3.406 |
| BRHIP3000131 | 7.345 | 0 | 13.009 | 14.986 | 0 | 0 | 12.217 |
| BRHIP3000240 | 0 | 0 | 0 | 32.393 | 0 | 0 | 0 |
| BRHIP3000377 | 0 | 0 | 0 | 5.877 | 0 | 0 | 6.388 |
| BRHIP3000457 | 0 | 0 | 0 | 27.708 | 0 | 0 | 0 |
| BRHIP3000475 | 0 | 0 | 0 | 22.059 | 0 | 0 | 0 |
| BRHIP3000488 | 0 | 0 | 0 | 100 | 0 | 0 | 0 |
| BRHIP3000526 | 0 | 0 | 0 | 100 | 0 | 0 | 0 |
| BRHIP3000626 | 0 | 0 | 0 | 100 | 0 | 0 | 0 |
| BRHIP3000859 | 0 | 0 | 0 | 100 | 0 | 0 | 0 |
| BRHIP3000907 | 0 | 0 | 0 | 100 | 0 | 0 | 0 |
| BRHIP3001076 | 0 | 0 | 0 | 46.104 | 0 | 0 | 0 |
| BRHIP3001079 | 0 | 0 | 0 | 100 | 0 | 0 | 0 |
| BRHIP3001141 | 0 | 0 | 0 | 100 | 0 | 0 | 0 |
| BRHIP3001283 | 0 | 0 | 0 | 50.312 | 0 | 0 | 0 |
| BRHIP3001338 | 0 | 0 | 0 | 100 | 0 | 0 | 0 |
| BRHIP3001360 | 0 | 0 | 0 | 58.973 | 0 | 0 | 0 |
| BRHIP3001481 | 0 | 0 | 0 | 38.435 | 0 | 0 | 0 |
| BRHIP3001878 | 0 | 0 | 0 | 100 | 0 | 0 | 0 |
| BRHIP3001964 | 0 | 0 | 0 | 100 | 0 | 0 | 0 |
| BRHIP3002114 | 0 | 0 | 0 | 39.793 | 0 | 0 | 0 |
| BRHIP3002124 | 0 | 0 | 0 | 100 | 0 | 0 | 0 |
| BRHIP3002141 | 0 | 0 | 0 | 16.008 | 0 | 0 | 0 |
| BRHIP3002363 | 0 | 0 | 0 | 100 | 0 | 0 | 0 |
| BRHIP3002691 | 0 | 0 | 0 | 16.923 | 0 | 0 | 18.395 |
| BRHIP3002920 | 0 | 0 | 0 | 64.789 | 0 | 0 | 35.211 |
| BRHIP3002931 | 0 | 0 | 0 | 100 | 0 | 0 | 0 |
| BRHIP3003063 | 10.960 | 0 | 0 | 55.910 | 0 | 0 | 0 |
| BRHIP3003126 | 0 | 0 | 0 | 74.193 | 0 | 0 | 0 |
| BRHIP3003306 | 0 | 0 | 0 | 60.949 | 0 | 0 | 0 |
| BRHIP3003340 | 0 | 0 | 0 | 100 | 0 | 0 | 0 |
| BRHIP3003395 | 0 | 0 | 0 | 100 | 0 | 0 | 0 |
| BRHIP3003484 | 0 | 0 | 0 | 100 | 0 | 0 | 0 |
| BRHIP3003644 | 0 | 0 | 0 | 100 | 0 | 0 | 0 |
| BRHIP3003688 | 0 | 0 | 0 | 100 | 0 | 0 | 0 |
| BRHIP3003795 | 0 | 0 | 0 | 45.093 | 0 | 0 | 0 |
| BRHIP3003961 | 0 | 0 | 0 | 19.351 | 0 | 0 | 21.034 |
| BRHIP3003984 | 27.477 | 0 | 0 | 28.033 | 0 | 0 | 15.236 |
| BRHIP3004193 | 0 | 0 | 0 | 100 | 0 | 0 | 0 |
| BRHIP3004215 | 0 | 0 | 0 | 13.851 | 0 | 0 | 15.055 |
| BRHIP3004416 | 0 | 0 | 0 | 100 | 0 | 0 | 0 |
| BRHIP3004710 | 0 | 0 | 0 | 100 | 0 | 0 | 0 |
| BRHIP3004725 | 0 | 0 | 0 | 100 | 0 | 0 | 0 |
| BRHIP3004774 | 39.520 | 0 | 0 | 60.480 | 0 | 0 | 0 |
| BRHIP3004786 | 0 | 0 | 0 | 100 | 0 | 0 | 0 |
| BRHIP3004863 | 0 | 0 | 0 | 100 | 0 | 0 | 0 |
| BRHIP3004968 | 0 | 0 | 0 | 34.325 | 0 | 0 | 0 |
| BRHIP3005037 | 0 | 0 | 0 | 82.401 | 0 | 0 | 0 |
| BRHIP3005137 | 0 | 0 | 0 | 100 | 0 | 0 | 0 |
| BRHIP3005142 | 0 | 0 | 0 | 60.949 | 0 | 0 | 0 |
| BRHIP3005231 | 0 | 0 | 0 | 100 | 0 | 0 | 0 |
| BRHIP3005307 | 0 | 0 | 0 | 46.104 | 0 | 0 | 0 |
| BRHIP3005574 | 0 | 0 | 0 | 43.125 | 0 | 0 | 46.875 |
| BRHIP3005673 | 0 | 0 | 0 | 52.564 | 0 | 0 | 0 |
| BRHIP3005768 | 0 | 0 | 0 | 47.917 | 0 | 0 | 52.083 |
| BRHIP3005801 | 0 | 0 | 0 | 19.121 | 0 | 67.577 | 0 |
| BRHIP3005944 | 0 | 0 | 0 | 100 | 0 | 0 | 0 |
| BRHIP3006279 | 0 | 0 | 0 | 100 | 0 | 0 | 0 |
| BRHIP3006294 | 0 | 0 | 0 | 40.683 | 0 | 0 | 0 |
| BRHIP3006390 | 49.499 | 0 | 0 | 50.501 | 0 | 0 | 0 |
| BRHIP3006449 | 0 | 0 | 0 | 100 | 0 | 0 | 0 |
| BRHIP3006683 | 24.100 | 0 | 0 | 49.175 | 0 | 0 | 26.726 |
| BRHIP3006717 | 15.318 | 0 | 0 | 10.419 | 6.335 | 0 | 5.662 |
| BRHIP3006786 | 0 | 0 | 0 | 100 | 0 | 0 | 0 |
| BRHIP3006950 | 0 | 0 | 0 | 100 | 0 | 0 | 0 |
| BRHIP3007172 | 0 | 0 | 0 | 100 | 0 | 0 | 0 |
| BRHIP3007183 | 0 | 31.449 | 0 | 13.985 | 0 | 0 | 45.605 |
| BRHIP3007195 | 0 | 0 | 0 | 75.737 | 0 | 0 | 0 |
| BRHIP3007223 | 2.016 | 0 | 0 | 2.057 | 0 | 0 | 4.472 |
| BRHIP3007239 | 0 | 0 | 0 | 100 | 0 | 0 | 0 |
| BRHIP3007291 | 0 | 0 | 0 | 100 | 0 | 0 | 0 |
| BRHIP3007409 | 31.957 | 0 | 0 | 32.604 | 0 | 0 | 35.439 |
| BRHIP3007424 | 0 | 0 | 0 | 100 | 0 | 0 | 0 |
| BRHIP3007483 | 0 | 0 | 0 | 100 | 0 | 0 | 0 |
| BRHIP3007586 | 17.255 | 0 | 0 | 24.645 | 0 | 0 | 11.481 |
| BRHIP3007609 | 0 | 0 | 0 | 100 | 0 | 0 | 0 |
| BRHIP3007640 | 0 | 0 | 0 | 68.316 | 0 | 0 | 0 |
| BRHIP3007960 | 0 | 0 | 0 | 100 | 0 | 0 | 0 |
| BRHIP3008082 | 0 | 0 | 0 | 45.093 | 0 | 0 | 0 |
| BRHIP3008183 | 0 | 0 | 0 | 100 | 0 | 0 | 0 |
| BRHIP3008314 | 0 | 0 | 0 | 100 | 0 | 0 | 0 |
| BRHIP3008320 | 23.349 | 0 | 0 | 47.644 | 0 | 0 | 0 |
| BRHIP3008344 | 0 | 0 | 0 | 46.104 | 0 | 0 | 0 |
| BRHIP3008405 | 35.187 | 0 | 0 | 17.949 | 0 | 0 | 0 |
| BRHIP3008565 | 0 | 0 | 0 | 46.104 | 0 | 0 | 0 |
| BRHIP3008598 | 0 | 0 | 0 | 100 | 0 | 0 | 0 |
| BRHIP3008606 | 0 | 0 | 0 | 100 | 0 | 0 | 0 |
| BRHIP3008691 | 49.499 | 0 | 0 | 50.501 | 0 | 0 | 0 |
| BRHIP3008714 | 0 | 0 | 0 | 100 | 0 | 0 | 0 |
| BRHIP3008997 | 0 | 0 | 0 | 100 | 0 | 0 | 0 |
| BRHIP3009099 | 0 | 0 | 0 | 35.577 | 0 | 0 | 0 |
| BRHIP3009140 | 0 | 0 | 0 | 100 | 0 | 0 | 0 |
| BRHIP3009181 | 0 | 0 | 0 | 100 | 0 | 0 | 0 |
| BRHIP3009318 | 0 | 0 | 0 | 100 | 0 | 0 | 0 |
| BRHIP3009427 | 0 | 0 | 0 | 100 | 0 | 0 | 0 |
| BRHIP3009448 | 0 | 0 | 0 | 100 | 0 | 0 | 0 |
| BRHIP3009672 | 0 | 0 | 0 | 100 | 0 | 0 | 0 |
| BRHIP3009753 | 0 | 0 | 0 | 1.187 | 0 | 0 | 0 |
| BRHIP3010135 | 0 | 0 | 0 | 100 | 0 | 0 | 0 |
| BRHIP3010289 | 0 | 0 | 0 | 100 | 0 | 0 | 0 |
| BRHIP3010529 | 0 | 0 | 0 | 100 | 0 | 0 | 0 |
| BRHIP3011082 | 0 | 0 | 0 | 100 | 0 | 0 | 0 |
| BRHIP3011241 | 0 | 0 | 0 | 100 | 0 | 0 | 0 |
| BRHIP3011269 | 0 | 0 | 0 | 100 | 0 | 0 | 0 |
| BRHIP3011460 | 0 | 0 | 0 | 100 | 0 | 0 | 0 |
| BRHIP3011567 | 0 | 0 | 0 | 100 | 0 | 0 | 0 |
| BRHIP3011831 | 0 | 0 | 0 | 100 | 0 | 0 | 0 |
| BRHIP3012185 | 0 | 0 | 0 | 100 | 0 | 0 | 0 |
| BRHIP3012289 | 0 | 0 | 0 | 100 | 0 | 0 | 0 |
| BRHIP3012357 | 0 | 0 | 0 | 100 | 0 | 0 | 0 |
| BRHIP3012736 | 0 | 0 | 0 | 33.611 | 0 | 0 | 0 |
| BRHIP3012745 | 0 | 0 | 0 | 100 | 0 | 0 | 0 |
| BRHIP3012868 | 0 | 0 | 0 | 100 | 0 | 0 | 0 |
| BRHIP3012997 | 0 | 0 | 0 | 2.837 | 0 | 0 | 0 |
| BRHIP3013078 | 0 | 0 | 0 | 100 | 0 | 0 | 0 |
| BRHIP3013271 | 0 | 0 | 0 | 100 | 0 | 0 | 0 |
| BRHIP3013588 | 0 | 0 | 0 | 60.949 | 0 | 0 | 0 |
| BRHIP3013698 | 0 | 0 | 0 | 100 | 0 | 0 | 0 |
| BRHIP3013765 | 0 | 0 | 0 | 100 | 0 | 0 | 0 |
| BRHIP3013897 | 0 | 0 | 0 | 100 | 0 | 0 | 0 |
| BRHIP3014237 | 0 | 0 | 0 | 100 | 0 | 0 | 0 |
| BRHIP3014675 | 37.925 | 0 | 0 | 19.346 | 0 | 0 | 0 |
| BRHIP3015620 | 0 | 0 | 0 | 100 | 0 | 0 | 0 |
| BRHIP3015751 | 0 | 0 | 0 | 100 | 0 | 0 | 0 |
| BRHIP3015854 | 0 | 0 | 0 | 100 | 0 | 0 | 0 |
| BRHIP3016032 | 0 | 0 | 0 | 100 | 0 | 0 | 0 |
| BRHIP3016213 | 0 | 0 | 0 | 100 | 0 | 0 | 0 |
| BRHIP3016302 | 0 | 0 | 0 | 100 | 0 | 0 | 0 |
| BRHIP3016421 | 0 | 0 | 0 | 100 | 0 | 0 | 0 |
| BRHIP3017109 | 0 | 0 | 0 | 100 | 0 | 0 | 0 |
| BRHIP3017146 | 0 | 0 | 0 | 66.943 | 0 | 0 | 0 |
| BRHIP3017256 | 0 | 0 | 0 | 100 | 0 | 0 | 0 |
| BRHIP3017325 | 0 | 0 | 0 | 100 | 0 | 0 | 0 |
| BRHIP3017558 | 0 | 0 | 0 | 100 | 0 | 0 | 0 |
| BRHIP3017637 | 0 | 0 | 0 | 100 | 0 | 0 | 0 |
| BRHIP3017855 | 15.316 | 0 | 0 | 11.720 | 0 | 0 | 4.246 |
| BRHIP3018278 | 0 | 0 | 0 | 39.793 | 0 | 0 | 0 |
| BRHIP3018784 | 6.930 | 0 | 12.276 | 3.535 | 0 | 0 | 0 |
| BRHIP3019643 | 0 | 0 | 0 | 100 | 0 | 0 | 0 |
| BRHIP3019824 | 0 | 0 | 0 | 100 | 0 | 0 | 0 |
| BRHIP3019880 | 0 | 0 | 0 | 100 | 0 | 0 | 0 |
| BRHIP3019956 | 0 | 0 | 0 | 100 | 0 | 0 | 0 |
| BRHIP3020046 | 0 | 0 | 0 | 2.067 | 3.770 | 0 | 1.123 |
| BRHIP3020155 | 0 | 0 | 0 | 100 | 0 | 0 | 0 |
| BRHIP3020182 | 0 | 0 | 0 | 100 | 0 | 0 | 0 |
| BRHIP3020733 | 0 | 0 | 0 | 55.026 | 0 | 0 | 0 |
| BRHIP3021019 | 7.745 | 0 | 0 | 7.901 | 0 | 0 | 0 |
| BRHIP3021499 | 0 | 0 | 0 | 100 | 0 | 0 | 0 |
| BRHIP3021534 | 0 | 0 | 0 | 100 | 0 | 0 | 0 |
| BRHIP3021778 | 0 | 0 | 0 | 100 | 0 | 0 | 0 |
| BRHIP3021987 | 0 | 0 | 0 | 36.438 | 0 | 0 | 0 |
| BRHIP3022656 | 0 | 0 | 0 | 100 | 0 | 0 | 0 |
| BRHIP3023922 | 0 | 0 | 0 | 100 | 0 | 0 | 0 |
| BRHIP3024118 | 0 | 0 | 0 | 100 | 0 | 0 | 0 |
| BRHIP3024533 | 0 | 0 | 0 | 100 | 0 | 0 | 0 |
| BRHIP3024703 | 0 | 0 | 0 | 100 | 0 | 0 | 0 |
| BRHIP3024725 | 0 | 0 | 0 | 100 | 0 | 0 | 0 |
| BRHIP3024820 | 0 | 0 | 0 | 100 | 0 | 0 | 0 |
| BRHIP3025161 | 0 | 0 | 0 | 100 | 0 | 0 | 0 |
| BRHIP3025702 | 0 | 0 | 0 | 100 | 0 | 0 | 0 |
| BRHIP3025795 | 0 | 0 | 0 | 100 | 0 | 0 | 0 |
| BRHIP3025844 | 0 | 0 | 0 | 100 | 0 | 0 | 0 |
| BRHIP3026052 | 0 | 0 | 0 | 45.860 | 0 | 0 | 0 |
| BRHIP3026097 | 0 | 0 | 0 | 100 | 0 | 0 | 0 |
| BRHIP3026231 | 0 | 0 | 0 | 100 | 0 | 0 | 0 |
| BRHIP3026335 | 0 | 0 | 0 | 100 | 0 | 0 | 0 |
| BRHIP3026651 | 0 | 0 | 0 | 100 | 0 | 0 | 0 |
| BRHIP3027105 | 49.499 | 0 | 0 | 50.501 | 0 | 0 | 0 |
| BRHIP3027137 | 0 | 0 | 0 | 100 | 0 | 0 | 0 |
| BRHIP3027160 | 0 | 0 | 0 | 100 | 0 | 0 | 0 |
| BRHIP3027191 | 0 | 0 | 0 | 100 | 0 | 0 | 0 |
| BRHIP3027501 | 0 | 0 | 0 | 100 | 0 | 0 | 0 |
| BRHIP3027594 | 19.439 | 0 | 0 | 19.832 | 0 | 0 | 21.557 |
| BRHIP3027651 | 0 | 0 | 0 | 100 | 0 | 0 | 0 |
| BRHIP3027854 | 0 | 0 | 0 | 100 | 0 | 0 | 0 |
| BRHIP3027947 | 0 | 0 | 0 | 100 | 0 | 0 | 0 |
| BRHIP3028570 | 31.957 | 0 | 0 | 32.604 | 0 | 0 | 35.439 |
| BRHIP3028742 | 0 | 0 | 0 | 100 | 0 | 0 | 0 |
| BRSSN1000056 | 0 | 0 | 0 | 0 | 22.550 | 0 | 6.719 |
| BRSSN1000059 | 0 | 0 | 0 | 0 | 50.093 | 0 | 0 |
| BRSSN1000092 | 0 | 0 | 0 | 0 | 100 | 0 | 0 |
| BRSSN1000153 | 0 | 0 | 0 | 0 | 100 | 0 | 0 |
| BRSSN2000097 | 0 | 0 | 0 | 0 | 25.771 | 0 | 0 |
| BRSSN2000175 | 0 | 0 | 0 | 0 | 100 | 0 | 0 |
| BRSSN2000197 | 0 | 0 | 0 | 0 | 81.697 | 0 | 0 |
| BRSSN2000244 | 0 | 0 | 0 | 0 | 50.137 | 0 | 0 |
| BRSSN2000293 | 0 | 7.523 | 23.234 | 3.346 | 36.616 | 23.648 | 0 |
| BRSSN2000295 | 6.926 | 15.889 | 0 | 0 | 25.777 | 0 | 7.680 |
| BRSSN2000312 | 10.759 | 0 | 0 | 0 | 40.045 | 0 | 0 |
| BRSSN2000498 | 4.377 | 0 | 3.876 | 1.116 | 12.218 | 0 | 1.213 |
| BRSSN2000518 | 0 | 0 | 0 | 0 | 100 | 0 | 0 |
| BRSSN2000561 | 0 | 0 | 0 | 0 | 23.338 | 0 | 13.907 |
| BRSSN2000566 | 4.864 | 0 | 0 | 9.925 | 18.104 | 0 | 5.394 |
| BRSSN2000684 | 23.433 | 0 | 0 | 19.126 | 17.444 | 0 | 10.395 |
| BRSSN2000715 | 0 | 0 | 0 | 0 | 100 | 0 | 0 |
| BRSSN2000832 | 12.039 | 0 | 0 | 24.566 | 44.810 | 0 | 0 |
| BRSSN2001213 | 0 | 0 | 0 | 0 | 75.732 | 0 | 0 |
| BRSSN2001275 | 0 | 38.134 | 0 | 0 | 61.866 | 0 | 0 |
| BRSSN2001342 | 0 | 0 | 0 | 0 | 100 | 0 | 0 |
| BRSSN2001426 | 0 | 0 | 0 | 0 | 100 | 0 | 0 |
| BRSSN2001503 | 0 | 0 | 0 | 0 | 100 | 0 | 0 |
| BRSSN2001579 | 0 | 0 | 0 | 0 | 50.137 | 0 | 0 |
| BRSSN2001758 | 0 | 21.568 | 0 | 0 | 34.990 | 0 | 0 |
| BRSSN2001810 | 0 | 0 | 0 | 0 | 100 | 0 | 0 |
| BRSSN2001869 | 0 | 6.925 | 0 | 0 | 11.235 | 0 | 6.695 |
| BRSSN2002857 | 0 | 0 | 0 | 0 | 100 | 0 | 0 |
| BRSSN2002859 | 0 | 0 | 0 | 0 | 100 | 0 | 0 |
| BRSSN2003012 | 0 | 0 | 0 | 0 | 16.101 | 0 | 0 |
| BRSSN2003086 | 0 | 0 | 0 | 0 | 100 | 0 | 0 |
| BRSSN2003093 | 0 | 0 | 0 | 0 | 100 | 0 | 0 |
| BRSSN2003820 | 0 | 0 | 0 | 0 | 100 | 0 | 0 |
| BRSSN2003841 | 0 | 0 | 0 | 0 | 100 | 0 | 0 |
| BRSSN2003937 | 0 | 0 | 0 | 0 | 100 | 0 | 0 |
| BRSSN2004142 | 0 | 0 | 0 | 0 | 100 | 0 | 0 |
| BRSSN2004303 | 0 | 0 | 0 | 0 | 100 | 0 | 0 |
| BRSSN2004304 | 0 | 0 | 0 | 0 | 100 | 0 | 0 |
| BRSSN2004496 | 0 | 0 | 0 | 0 | 78.696 | 0 | 0 |
| BRSSN2004657 | 0 | 0 | 0 | 0 | 85.061 | 0 | 0 |
| BRSSN2004679 | 0 | 0 | 0 | 0 | 56.646 | 0 | 16.878 |
| BRSSN2004686 | 0 | 0 | 0 | 0 | 100 | 0 | 0 |
| BRSSN2004710 | 0 | 0 | 0 | 0 | 100 | 0 | 0 |
| BRSSN2004719 | 0 | 12.020 | 0 | 10.691 | 39.002 | 18.892 | 0 |
| BRSSN2005847 | 0 | 0 | 0 | 0 | 81.697 | 0 | 0 |
| BRSSN2006133 | 0 | 0 | 0 | 0 | 100 | 0 | 0 |
| BRSSN2006390 | 0 | 0 | 0 | 0 | 100 | 0 | 0 |
| BRSSN2006575 | 0 | 0 | 0 | 0 | 100 | 0 | 0 |
| BRSSN2006611 | 0 | 0 | 0 | 0 | 78.696 | 0 | 0 |
| BRSSN2006644 | 0 | 0 | 0 | 0 | 100 | 0 | 0 |
| BRSSN2006892 | 0 | 0 | 0 | 0 | 57.631 | 0 | 0 |
| BRSSN2007076 | 0 | 0 | 0 | 0 | 100 | 0 | 0 |
| BRSSN2007168 | 0 | 0 | 0 | 0 | 100 | 0 | 0 |
| BRSSN2007202 | 0 | 38.134 | 0 | 0 | 61.866 | 0 | 0 |
| BRSSN2007338 | 0 | 0 | 0 | 0 | 27.509 | 0 | 0 |
| BRSSN2007464 | 0 | 0 | 0 | 0 | 15.231 | 0 | 0 |
| BRSSN2007504 | 0 | 0 | 0 | 0 | 100 | 0 | 0 |
| BRSSN2007819 | 0 | 0 | 0 | 0 | 100 | 0 | 0 |
| BRSSN2008125 | 0 | 0 | 0 | 0 | 100 | 0 | 0 |
| BRSSN2008419 | 0 | 0 | 0 | 0 | 100 | 0 | 0 |
| BRSSN2008464 | 0 | 0 | 0 | 0 | 100 | 0 | 0 |
| BRSSN2008549 | 0 | 0 | 0 | 17.436 | 63.611 | 0 | 18.953 |
| BRSSN2008797 | 0 | 0 | 0 | 0 | 77.045 | 0 | 22.955 |
| BRSSN2009119 | 0 | 0 | 0 | 0 | 68.148 | 0 | 0 |
| BRSSN2009378 | 0 | 0 | 0 | 0 | 100 | 0 | 0 |
| BRSSN2009389 | 0 | 0 | 0 | 0 | 100 | 0 | 0 |
| BRSSN2009395 | 0 | 0 | 0 | 0 | 100 | 0 | 0 |
| BRSSN2009518 | 1.722 | 0 | 6.102 | 1.757 | 6.411 | 0 | 0 |
| BRSSN2009627 | 0 | 0 | 0 | 0 | 100 | 0 | 0 |
| BRSSN2009630 | 0 | 0 | 0 | 0 | 100 | 0 | 0 |
| BRSSN2009702 | 0 | 0 | 0 | 0 | 100 | 0 | 0 |
| BRSSN2010019 | 0 | 0 | 0 | 0 | 43.197 | 0 | 0 |
| BRSSN2010110 | 0 | 0 | 0 | 0 | 100 | 0 | 0 |
| BRSSN2010587 | 0 | 0 | 0 | 0 | 83.985 | 0 | 0 |
| BRSSN2010596 | 0 | 0 | 0 | 0 | 44.612 | 0 | 0 |
| BRSSN2010830 | 0 | 0 | 0 | 0 | 100 | 0 | 0 |
| BRSSN2011262 | 0 | 0 | 0 | 0 | 10.489 | 0 | 0 |
| BRSSN2011653 | 0 | 0 | 0 | 0 | 18.443 | 0 | 0 |
| BRSSN2011738 | 31.553 | 0 | 0 | 0 | 39.146 | 0 | 0 |
| BRSSN2011843 | 0 | 0 | 0 | 0 | 44.546 | 0 | 0 |
| BRSSN2012081 | 0 | 0 | 0 | 0 | 100 | 0 | 0 |
| BRSSN2012103 | 0 | 0 | 0 | 0 | 100 | 0 | 0 |
| BRSSN2012157 | 0 | 0 | 0 | 0 | 100 | 0 | 0 |
| BRSSN2012198 | 0 | 0 | 0 | 0 | 100 | 0 | 0 |
| BRSSN2012254 | 0 | 0 | 0 | 0 | 100 | 0 | 0 |
| BRSSN2012439 | 0 | 0 | 0 | 0 | 81.697 | 0 | 0 |
| BRSSN2012622 | 0 | 0 | 0 | 0 | 100 | 0 | 0 |
| BRSSN2012691 | 0 | 0 | 0 | 0 | 100 | 0 | 0 |
| BRSSN2012838 | 0 | 0 | 0 | 0 | 100 | 0 | 0 |
| BRSSN2013095 | 0 | 0 | 0 | 21.514 | 78.486 | 0 | 0 |
| BRSSN2013544 | 0 | 0 | 0 | 0 | 100 | 0 | 0 |
| BRSSN2013696 | 0 | 0 | 0 | 0 | 13.293 | 0 | 0 |
| BRSSN2013702 | 0 | 0 | 33.606 | 0 | 35.308 | 0 | 0 |
| BRSSN2013733 | 0 | 0 | 0 | 0 | 78.696 | 0 | 0 |
| BRSSN2013753 | 0 | 0 | 0 | 0 | 54.884 | 0 | 0 |
| BRSSN2013874 | 0 | 0 | 0 | 0 | 100 | 0 | 0 |
| BRSSN2014112 | 0 | 0 | 0 | 0 | 100 | 0 | 0 |
| BRSSN2014294 | 0 | 0 | 0 | 0 | 34.652 | 0 | 0 |
| BRSSN2014299 | 3.695 | 0 | 0 | 3.770 | 13.753 | 0 | 0 |
| BRSSN2014424 | 0 | 38.134 | 0 | 0 | 61.866 | 0 | 0 |
| BRSSN2014513 | 0 | 0 | 0 | 0 | 100 | 0 | 0 |
| BRSSN2014556 | 0 | 0 | 0 | 0 | 100 | 0 | 0 |
| BRSSN2014573 | 0 | 0 | 0 | 0 | 100 | 0 | 0 |
| BRSSN2014610 | 0 | 0 | 0 | 10.927 | 13.288 | 0 | 11.878 |
| BRSSN2014636 | 0 | 0 | 0 | 0 | 100 | 0 | 0 |
| BRSSN2014685 | 0 | 0 | 0 | 0 | 52.851 | 0 | 0 |
| BRSSN2015199 | 0 | 0 | 0 | 0 | 83.985 | 0 | 0 |
| BRSSN2015238 | 10.270 | 0 | 0 | 6.985 | 12.742 | 0 | 0 |
| BRSSN2015369 | 0 | 0 | 0 | 0 | 100 | 0 | 0 |
| BRSSN2015493 | 0 | 0 | 0 | 0 | 13.605 | 0 | 0 |
| BRSSN2015497 | 0 | 0 | 0 | 0 | 26.619 | 0 | 7.931 |
| BRSSN2015554 | 0 | 0 | 48.765 | 0 | 51.235 | 0 | 0 |
| BRSSN2015707 | 0 | 0 | 0 | 0 | 100 | 0 | 0 |
| BRSSN2015773 | 0 | 0 | 0 | 0 | 100 | 0 | 0 |
| BRSSN2015907 | 0 | 0 | 0 | 0 | 100 | 0 | 0 |
| BRSSN2015982 | 0 | 0 | 0 | 0 | 60.467 | 0 | 0 |
| BRSSN2016589 | 0 | 0 | 0 | 0 | 100 | 0 | 0 |
| BRSSN2016768 | 0 | 0 | 0 | 0 | 100 | 0 | 0 |
| BRSSN2016905 | 0 | 0 | 0 | 0 | 100 | 0 | 0 |
| BRSSN2017297 | 0 | 0 | 0 | 0 | 100 | 0 | 0 |
| BRSSN2017422 | 0 | 0 | 0 | 29.338 | 53.514 | 0 | 0 |
| BRSSN2017530 | 0 | 0 | 0 | 0 | 100 | 0 | 0 |
| BRSSN2017682 | 0 | 0 | 0 | 0 | 100 | 0 | 0 |
| BRSSN2017757 | 0 | 0 | 0 | 0 | 100 | 0 | 0 |
| BRSSN2018218 | 0 | 0 | 0 | 0 | 100 | 0 | 0 |
| BRSSN2018440 | 0 | 0 | 0 | 0 | 74.975 | 0 | 0 |
| BRSSN2018447 | 19.606 | 0 | 0 | 13.335 | 24.324 | 0 | 0 |
| BRSSN2018581 | 0 | 0 | 0 | 0 | 50.137 | 0 | 0 |
| BRSSN2018731 | 0 | 0 | 0 | 0 | 100 | 0 | 0 |
| BRSSN2018771 | 0 | 0 | 0 | 0 | 100 | 0 | 0 |
| BRSSN2018925 | 0 | 0 | 0 | 0 | 100 | 0 | 0 |
| BRSTN1000083 | 0.638 | 0 | 2.262 | 1.303 | 0 | 2.302 | 0 |
| BRSTN1000097 | 0 | 0 | 0 | 0 | 0 | 100 | 0 |
| BRSTN2000058 | 0 | 33.205 | 25.637 | 0 | 8.978 | 17.396 | 0 |
| BRSTN2000070 | 0 | 0 | 0 | 22.055 | 0 | 77.945 | 0 |
| BRSTN2000220 | 0 | 7.871 | 0 | 10.501 | 0 | 37.113 | 15.219 |
| BRSTN2000312 | 0 | 0 | 0 | 0 | 0 | 100 | 0 |
| BRSTN2000367 | 0 | 0 | 0 | 0 | 0 | 84.653 | 0 |
| BRSTN2000536 | 0 | 0 | 0 | 22.055 | 0 | 77.945 | 0 |
| BRSTN2000872 | 0 | 0 | 0 | 0 | 0 | 100 | 0 |
| BRSTN2001067 | 0 | 0 | 0 | 0 | 0 | 44.646 | 0 |
| BRSTN2001613 | 0 | 0 | 0 | 0 | 0 | 100 | 0 |
| BRSTN2001801 | 0 | 0 | 0 | 0 | 0 | 100 | 0 |
| BRSTN2002105 | 0 | 0 | 0 | 0 | 0 | 100 | 0 |
| BRSTN2002400 | 0 | 0 | 0 | 0 | 0 | 100 | 0 |
| BRSTN2002532 | 0 | 0 | 0 | 0 | 0 | 100 | 0 |
| BRSTN2002691 | 0 | 0 | 0 | 0 | 0 | 100 | 0 |
| BRSTN2003590 | 0 | 0 | 0 | 0 | 0 | 100 | 0 |
| BRSTN2003835 | 0 | 0 | 0 | 0 | 0 | 100 | 0 |
| BRSTN2004863 | 0 | 0 | 35.295 | 0 | 0 | 35.924 | 11.049 |
| BRSTN2004869 | 0 | 0 | 0 | 0 | 0 | 76.298 | 0 |
| BRSTN2004987 | 0 | 0 | 0 | 0 | 0 | 100 | 0 |
| BRSTN2005721 | 0 | 0 | 0 | 0 | 0 | 100 | 0 |
| BRSTN2006306 | 0 | 0 | 0 | 0 | 0 | 100 | 0 |
| BRSTN2006466 | 0 | 0 | 0 | 0 | 0 | 100 | 0 |
| BRSTN2006580 | 0 | 0 | 0 | 0 | 0 | 83.553 | 0 |
| BRSTN2006583 | 0 | 0 | 0 | 0 | 0 | 76.479 | 23.521 |
| BRSTN2006638 | 0 | 0 | 0 | 0 | 0 | 100 | 0 |
| BRSTN2006865 | 0 | 0 | 0 | 0 | 0 | 100 | 0 |
| BRSTN2007000 | 0 | 0 | 0 | 0 | 0 | 100 | 0 |
| BRSTN2007118 | 0 | 0 | 0 | 0 | 0 | 100 | 0 |
| BRSTN2007284 | 0 | 38.885 | 0 | 0 | 0 | 61.115 | 0 |
| BRSTN2007765 | 0 | 0 | 0 | 0 | 0 | 100 | 0 |
| BRSTN2008052 | 32.844 | 0 | 0 | 0 | 0 | 39.475 | 12.141 |
| BRSTN2008283 | 0 | 0 | 0 | 0 | 0 | 100 | 0 |
| BRSTN2008367 | 0 | 0 | 0 | 0 | 0 | 100 | 0 |
| BRSTN2008418 | 0 | 0 | 0 | 0 | 0 | 100 | 0 |
| BRSTN2008457 | 0 | 0 | 0 | 0 | 0 | 100 | 0 |
| BRSTN2008475 | 0 | 0 | 0 | 0 | 0 | 100 | 0 |
| BRSTN2008930 | 0 | 0 | 0 | 0 | 0 | 100 | 0 |
| BRSTN2009247 | 0 | 0 | 0 | 0 | 0 | 100 | 0 |
| BRSTN2010089 | 6.598 | 0 | 23.372 | 0 | 0 | 23.789 | 0 |
| BRSTN2010107 | 1.338 | 13.047 | 16.591 | 5.802 | 11.205 | 6.031 | 8.16 |
| BRSTN2010363 | 0 | 0 | 0 | 0 | 0 | 100 | 0 |
| BRSTN2010416 | 0 | 0 | 0 | 0 | 0 | 100 | 0 |
| BRSTN2010500 | 0 | 0 | 0 | 0 | 0 | 100 | 0 |
| BRSTN2010569 | 0 | 0 | 0 | 0 | 0 | 100 | 0 |
| BRSTN2010750 | 0 | 0 | 0 | 0 | 0 | 36.677 | 0 |
| BRSTN2010923 | 0 | 0 | 0 | 0 | 0 | 100 | 0 |
| BRSTN2011211 | 0 | 0 | 0 | 0 | 0 | 100 | 0 |
| BRSTN2011597 | 0 | 0 | 0 | 0 | 0 | 83.553 | 0 |
| BRSTN2011688 | 0 | 0 | 0 | 0 | 0 | 100 | 0 |
| BRSTN2011799 | 0 | 0 | 0 | 0 | 0 | 100 | 0 |
| BRSTN2011961 | 0 | 0 | 1.026 | 0 | 1.078 | 1.044 | 1.285 |
| BRSTN2012069 | 0.047 | 0.391 | 0.101 | 0 | 0 | 0.853 | 0 |
| BRSTN2012089 | 5.800 | 0 | 0 | 0 | 0 | 20.915 | 6.432 |
| BRSTN2012174 | 0.202 | 0.928 | 0.717 | 0 | 1.506 | 3.646 | 0.224 |
| BRSTN2012284 | 0 | 0 | 0 | 0 | 0 | 100 | 0 |
| BRSTN2012320 | 0 | 0 | 0 | 0 | 0 | 100 | 0 |
| BRSTN2012380 | 0 | 0 | 0 | 0 | 0 | 100 | 0 |
| BRSTN2012451 | 0 | 0 | 0 | 0.843 | 0 | 5.956 | 0.916 |
| BRSTN2013171 | 0 | 15.900 | 0 | 0 | 0 | 12.495 | 0 |
| BRSTN2013354 | 0 | 0 | 0 | 0 | 0 | 100 | 0 |
| BRSTN2013502 | 0 | 0 | 0 | 0 | 0 | 17.527 | 2.695 |
| BRSTN2013931 | 2.899 | 0 | 0 | 0 | 0 | 3.484 | 2.143 |
| BRSTN2014490 | 0 | 0 | 0 | 0 | 0 | 33.221 | 0 |
| BRSTN2014633 | 0 | 0 | 0 | 0 | 0 | 100 | 0 |
| BRSTN2014751 | 0 | 0 | 0 | 0 | 0 | 100 | 0 |
| BRSTN2014770 | 0 | 0 | 0 | 0 | 0 | 100 | 0 |
| BRSTN2015015 | 14.017 | 0 | 0 | 0 | 0 | 50.541 | 15.544 |
| BRSTN2015889 | 0 | 0 | 0 | 3.952 | 0 | 13.967 | 8.591 |
| BRSTN2015978 | 1.881 | 14.547 | 14.724 | 3.002 | 19.309 | 3.719 | 0.370 |
| BRSTN2016066 | 0 | 0 | 0 | 0 | 0 | 100 | 0 |
| BRSTN2016335 | 0 | 0 | 0 | 0 | 0 | 100 | 0 |
| BRSTN2016470 | 0.438 | 1.004 | 0 | 0.447 | 0 | 5.524 | 0 |
| BRSTN2016678 | 0 | 0 | 0 | 0 | 0 | 33.084 | 0 |
| BRSTN2016892 | 0 | 0 | 0 | 0 | 0 | 10.759 | 0 |
| BRSTN2016918 | 0 | 0 | 0 | 0 | 0 | 100 | 0 |
| BRSTN2016992 | 1.476 | 3.387 | 1.743 | 2.510 | 5.495 | 15.970 | 1.091 |
| BRSTN2017104 | 0 | 8.946 | 0 | 0 | 7.257 | 7.030 | 0 |
| BRSTN2017151 | 0 | 0 | 0 | 0 | 0 | 100 | 0 |
| BRSTN2017237 | 0 | 0 | 0 | 0 | 0 | 100 | 0 |
| BRSTN2017379 | 0 | 0 | 0 | 0 | 0 | 100 | 0 |
| BRSTN2017761 | 0 | 0 | 0 | 0 | 0 | 76.298 | 0 |
| BRSTN2017771 | 0 | 0 | 0 | 0 | 0 | 100 | 0 |
| BRSTN2017995 | 0 | 0 | 0 | 0 | 0 | 100 | 0 |
| BRSTN2018077 | 0 | 38.885 | 0 | 0 | 0 | 61.115 | 0 |
| BRSTN2018083 | 0 | 0 | 0 | 22.055 | 0 | 77.945 | 0 |
| BRSTN2018596 | 0 | 0 | 0 | 0 | 0 | 100 | 0 |
| BRSTN2018692 | 0 | 0 | 0 | 0 | 0 | 100 | 0 |
| BRSTN2018712 | 0 | 0 | 0 | 0 | 0 | 100 | 0 |
| BRSTN2019079 | 0 | 0 | 0 | 0 | 0 | 100 | 0 |
| BRSTN2019129 | 0 | 0 | 0 | 0 | 0 | 100 | 0 |
| BRTHA1000021 | 17.174 | 39.401 | 0 | 0 | 0 | 0 | 19.045 |
| BRTHA1000063 | 0 | 0 | 0 | 0 | 0 | 0 | 100 |
| BRTHA1000311 | 11.803 | 6.770 | 0 | 6.021 | 10.982 | 0 | 9.817 |
| BRTHA2000057 | 0 | 0 | 0 | 0 | 0 | 0 | 48.181 |
| BRTHA2000474 | 0 | 0 | 0 | 0 | 0 | 0 | 100 |
| BRTHA2000514 | 0 | 0 | 0 | 0 | 0 | 0 | 100 |
| BRTHA2000574 | 0 | 0 | 0 | 0 | 0 | 0 | 100 |
| BRTHA2000855 | 0 | 0 | 0 | 0 | 0 | 0 | 100 |
| BRTHA2000969 | 0 | 0 | 0 | 0 | 0 | 0 | 100 |
| BRTHA2000972 | 0 | 0 | 0 | 0 | 0 | 0 | 100 |
| BRTHA2001304 | 0 | 0 | 0 | 0 | 0 | 0 | 100 |
| BRTHA2001370 | 0 | 0 | 0 | 0 | 0 | 0 | 100 |
| BRTHA2001462 | 0 | 0 | 0 | 0 | 0 | 0 | 100 |
| BRTHA2001717 | 0 | 0 | 0 | 0 | 0 | 0 | 100 |
| BRTHA2001812 | 0 | 0 | 0 | 0 | 0 | 30.730 | 9.451 |
| BRTHA2002091 | 0 | 0 | 0 | 0 | 0 | 0 | 100 |
| BRTHA2002115 | 0 | 0 | 0 | 0 | 0 | 0 | 100 |
| BRTHA2002133 | 0 | 0 | 0 | 0 | 0 | 0 | 100 |
| BRTHA2002281 | 0 | 0 | 0 | 0 | 0 | 0 | 100 |
| BRTHA2002376 | 0 | 0 | 0 | 0 | 0 | 0 | 100 |
| BRTHA2002442 | 0 | 0 | 0 | 31.507 | 0 | 0 | 68.493 |
| BRTHA2002493 | 0 | 0 | 0 | 0 | 0 | 0 | 100 |
| BRTHA2002565 | 0 | 0 | 0 | 0 | 0 | 0 | 100 |
| BRTHA2002608 | 0 | 0 | 0 | 0 | 0 | 0 | 100 |
| BRTHA2002702 | 0 | 0 | 0 | 0 | 0 | 0 | 100 |
| BRTHA2002721 | 0 | 0 | 0 | 0 | 0 | 0 | 100 |
| BRTHA2002726 | 0 | 0 | 0 | 0 | 0 | 0 | 23.821 |
| BRTHA2002741 | 0 | 0 | 0 | 0 | 0 | 0 | 100 |
| BRTHA2002808 | 0 | 0 | 0 | 0 | 0 | 0 | 12.857 |
| BRTHA2002896 | 0 | 0 | 0 | 0 | 0 | 0 | 100 |
| BRTHA2002903 | 0 | 0 | 0 | 0 | 0 | 0 | 100 |
| BRTHA2003030 | 0 | 0 | 0 | 0 | 0 | 0 | 100 |
| BRTHA2003110 | 0 | 0 | 0 | 0 | 0 | 0 | 100 |
| BRTHA2003116 | 0 | 0 | 0 | 0 | 0 | 0 | 100 |
| BRTHA2003436 | 0 | 0 | 0 | 0 | 0 | 0 | 100 |
| BRTHA2003759 | 0 | 0 | 0 | 0 | 0 | 0 | 100 |
| BRTHA2003794 | 0 | 0 | 0 | 0 | 0 | 0 | 100 |
| BRTHA2004361 | 0 | 0 | 0 | 0 | 0 | 0 | 48.181 |
| BRTHA2004371 | 0 | 0 | 0 | 0 | 0 | 0 | 100 |
| BRTHA2004582 | 0 | 0 | 0 | 0 | 0 | 0 | 100 |
| BRTHA2004629 | 0 | 0 | 0 | 0 | 0 | 0 | 100 |
| BRTHA2004639 | 0 | 0 | 0 | 0 | 0 | 0 | 100 |
| BRTHA2004642 | 0 | 0 | 0 | 0 | 0 | 0 | 100 |
| BRTHA2004812 | 0 | 0 | 0 | 0 | 0 | 0 | 100 |
| BRTHA2004821 | 0 | 0 | 0 | 0 | 0 | 0 | 100 |
| BRTHA2004978 | 0 | 0 | 0 | 0 | 0 | 0 | 100 |
| BRTHA2004992 | 0 | 0 | 0 | 0 | 0 | 0 | 100 |
| BRTHA2005005 | 0 | 0 | 0 | 0 | 0 | 0 | 100 |
| BRTHA2005013 | 0 | 0 | 0 | 0 | 0 | 0 | 12.374 |
| BRTHA2005448 | 0 | 0 | 0 | 0 | 0 | 0 | 100 |
| BRTHA2005579 | 0 | 0 | 0 | 0 | 0 | 0 | 100 |
| BRTHA2005831 | 0 | 0 | 0 | 0 | 0 | 0 | 48.181 |
| BRTHA2005864 | 1.623 | 0 | 0 | 0 | 0 | 0 | 3.599 |
| BRTHA2005942 | 0 | 0 | 0 | 0 | 0 | 0 | 100 |
| BRTHA2005956 | 0 | 0 | 0 | 0 | 0 | 0 | 100 |
| BRTHA2006075 | 0 | 0 | 0 | 0 | 0 | 0 | 100 |
| BRTHA2006146 | 0 | 0 | 0 | 0 | 0 | 0 | 100 |
| BRTHA2006194 | 0 | 0 | 0 | 0 | 0 | 0 | 100 |
| BRTHA2006232 | 0 | 0 | 0 | 0 | 0 | 0 | 100 |
| BRTHA2006720 | 0 | 0 | 0 | 0 | 0 | 0 | 100 |
| BRTHA2006735 | 0 | 0 | 0 | 0 | 0 | 0 | 100 |
| BRTHA2006974 | 0 | 0 | 0 | 0 | 0 | 0 | 100 |
| BRTHA2006975 | 0 | 0 | 0 | 0 | 0 | 0 | 2.521 |
| BRTHA2007060 | 0 | 0 | 0 | 0 | 0 | 0 | 100 |
| BRTHA2007122 | 0 | 0 | 0 | 0 | 0 | 0 | 100 |
| BRTHA2007422 | 0 | 0 | 0 | 0 | 0 | 0 | 100 |
| BRTHA2007603 | 0 | 0 | 0 | 0 | 0 | 0 | 100 |
| BRTHA2007665 | 0 | 0 | 0 | 0 | 0 | 0 | 100 |
| BRTHA2007998 | 0 | 1.978 | 0 | 0.880 | 3.210 | 6.219 | 1.913 |
| BRTHA2008316 | 0 | 0 | 0 | 0 | 0 | 0 | 100 |
| BRTHA2008335 | 16.281 | 0 | 0 | 8.305 | 0 | 0 | 9.028 |
| BRTHA2008502 | 0 | 0 | 0 | 22.073 | 0 | 0 | 23.993 |
| BRTHA2008513 | 0 | 0 | 0 | 47.917 | 0 | 0 | 52.083 |
| BRTHA2008527 | 0 | 0 | 0 | 0 | 0 | 0 | 100 |
| BRTHA2008535 | 0 | 0 | 0 | 0 | 0 | 0 | 100 |
| BRTHA2008598 | 0 | 0 | 0 | 0 | 0 | 0 | 100 |
| BRTHA2008669 | 0 | 0 | 0 | 0 | 0 | 0 | 100 |
| BRTHA2008955 | 0 | 0 | 0 | 0 | 0 | 0 | 60.975 |
| BRTHA2009311 | 0 | 0 | 0 | 0 | 0 | 0 | 100 |
| BRTHA2009349 | 0 | 0 | 0 | 0 | 0 | 0 | 100 |
| BRTHA2009486 | 0 | 0 | 0 | 11.152 | 0 | 0 | 12.122 |
| BRTHA2009803 | 0 | 0 | 0 | 0 | 0 | 0 | 100 |
| BRTHA2009846 | 0 | 0 | 0 | 0 | 0 | 0 | 100 |
| BRTHA2009886 | 0 | 0 | 0 | 0 | 0 | 0 | 23.052 |
| BRTHA2009972 | 0 | 0 | 0 | 0 | 0 | 0 | 100 |
| BRTHA2010008 | 0 | 0 | 0 | 0 | 0 | 0 | 100 |
| BRTHA2010033 | 0 | 0 | 0 | 0 | 0 | 0 | 100 |
| BRTHA2010073 | 0 | 0 | 0 | 0 | 0 | 0 | 100 |
| BRTHA2010097 | 0 | 0 | 0 | 0 | 0 | 0 | 4.656 |
| BRTHA2010191 | 0 | 0 | 0 | 0 | 0 | 0 | 100 |
| BRTHA2010397 | 0 | 0 | 0 | 0 | 0 | 0 | 100 |
| BRTHA2010608 | 0 | 0 | 0 | 0 | 0 | 0 | 48.181 |
| BRTHA2010672 | 0 | 0 | 0 | 0 | 0 | 0 | 100 |
| BRTHA2010884 | 0 | 0 | 0 | 0 | 0 | 0 | 100 |
| BRTHA2010907 | 0 | 0 | 0 | 0 | 0 | 0 | 100 |
| BRTHA2011062 | 0 | 0 | 0 | 0 | 0 | 0 | 100 |
| BRTHA2011194 | 0 | 0 | 0 | 0 | 0 | 0 | 60.975 |
| BRTHA2011321 | 0 | 0 | 0 | 0 | 0 | 0 | 100 |
| BRTHA2011351 | 0 | 0 | 0 | 0 | 0 | 0 | 100 |
| BRTHA2011500 | 0 | 0 | 0 | 0 | 0 | 0 | 100 |
| BRTHA2011641 | 0 | 0 | 0 | 0 | 0 | 0 | 52.395 |
| BRTHA2011691 | 0 | 0 | 0 | 0 | 0 | 0 | 57.080 |
| BRTHA2012129 | 0 | 0 | 0 | 0 | 0 | 0 | 100 |
| BRTHA2012183 | 0 | 0 | 0 | 0 | 0 | 0 | 48.181 |
| BRTHA2012189 | 0 | 0 | 0 | 0 | 0 | 0 | 100 |
| BRTHA2012351 | 0 | 0 | 0 | 0 | 0 | 0 | 100 |
| BRTHA2012392 | 0 | 0 | 0 | 0 | 0 | 0 | 38.390 |
| BRTHA2012466 | 0 | 0 | 0 | 0 | 0 | 0 | 100 |
| BRTHA2012555 | 0 | 0 | 0 | 0 | 0 | 0 | 100 |
| BRTHA2012562 | 0 | 0 | 0 | 0 | 0 | 0 | 100 |
| BRTHA2012714 | 1.253 | 0 | 0 | 0 | 0 | 0 | 11.120 |
| BRTHA2012980 | 0 | 0 | 0 | 0 | 0 | 0 | 13.890 |
| BRTHA2013054 | 24.028 | 0 | 0 | 0 | 0 | 0 | 13.323 |
| BRTHA2013262 | 0 | 0 | 0 | 0 | 0 | 0 | 100 |
| BRTHA2013275 | 0 | 0 | 0 | 0 | 0 | 0 | 49.749 |
| BRTHA2013426 | 0 | 0 | 0 | 0 | 0 | 0 | 100 |
| BRTHA2013460 | 0 | 0 | 0 | 0 | 0 | 0 | 100 |
| BRTHA2013515 | 47.417 | 0 | 0 | 0 | 0 | 0 | 52.583 |
| BRTHA2013540 | 0 | 0 | 0 | 0 | 0 | 0 | 37.587 |
| BRTHA2013595 | 0 | 0 | 0 | 0 | 0 | 0 | 100 |
| BRTHA2013610 | 0 | 0 | 0 | 0 | 0 | 0 | 100 |
| BRTHA2013707 | 0 | 0 | 0 | 0 | 0 | 0 | 100 |
| BRTHA2013942 | 0 | 0 | 0 | 0 | 0 | 0 | 100 |
| BRTHA2014287 | 0 | 0 | 0 | 0 | 0 | 0 | 100 |
| BRTHA2014334 | 0 | 0 | 0 | 0 | 0 | 0 | 100 |
| BRTHA2014381 | 0 | 0 | 0 | 0 | 0 | 0 | 100 |
| BRTHA2014578 | 0 | 0 | 0 | 0 | 0 | 0 | 100 |
| BRTHA2014647 | 0 | 0 | 0 | 0 | 0 | 0 | 100 |
| BRTHA2014663 | 0 | 0 | 0 | 0 | 0 | 0 | 19.647 |
| BRTHA2014792 | 0 | 0 | 0 | 0 | 0 | 0 | 100 |
| BRTHA2014828 | 0 | 0 | 0 | 0 | 0 | 0 | 100 |
| BRTHA2014909 | 0 | 0 | 0 | 0 | 0 | 0 | 100 |
| BRTHA2014975 | 0 | 0 | 0 | 0 | 0 | 0 | 100 |
| BRTHA2014997 | 0 | 0 | 0 | 0 | 0 | 0 | 57.080 |
| BRTHA2015406 | 0 | 0 | 0 | 0 | 0 | 0 | 100 |
| BRTHA2015478 | 0 | 0 | 0 | 0 | 0 | 0 | 100 |
| BRTHA2015696 | 0 | 0 | 0 | 0 | 0 | 0 | 100 |
| BRTHA2015700 | 0 | 0 | 0 | 0 | 0 | 0 | 100 |
| BRTHA2015853 | 0 | 0 | 0 | 0 | 0 | 0 | 100 |
| BRTHA2015878 | 0 | 0 | 0 | 0 | 0 | 0 | 100 |
| BRTHA2016179 | 0 | 0 | 0 | 0 | 0 | 0 | 100 |
| BRTHA2016215 | 0 | 0 | 0 | 0 | 0 | 0 | 38.930 |
| BRTHA2016267 | 0 | 0 | 0 | 0 | 0 | 0 | 100 |
| BRTHA2016318 | 0 | 0 | 0 | 0 | 0 | 0 | 100 |
| BRTHA2016496 | 0 | 0 | 0 | 0 | 0 | 0 | 100 |
| BRTHA2016543 | 0 | 0 | 0 | 0 | 0 | 0 | 100 |
| BRTHA2016552 | 0 | 0 | 0 | 0 | 0 | 0 | 100 |
| BRTHA2016577 | 0 | 0 | 0 | 0 | 0 | 0 | 2.617 |
| BRTHA2016765 | 0 | 0 | 0 | 0 | 0 | 0 | 13.048 |
| BRTHA2016918 | 0 | 0 | 0 | 0 | 0 | 0 | 32.610 |
| BRTHA2017178 | 0 | 0 | 0 | 0 | 0 | 0 | 48.181 |
| BRTHA2017353 | 0 | 0 | 0 | 0 | 0 | 0 | 100 |
| BRTHA2017364 | 0 | 0 | 0 | 0 | 0 | 0 | 100 |
| BRTHA2017972 | 0 | 0 | 0 | 0 | 0 | 0 | 37.427 |
| BRTHA2017985 | 0 | 0 | 0 | 0 | 0 | 0 | 49.749 |
| BRTHA2018011 | 0 | 0 | 0 | 0 | 0 | 0 | 100 |
| BRTHA2018129 | 0 | 0 | 0 | 0 | 0 | 0 | 100 |
| BRTHA2018165 | 0 | 0 | 0 | 0 | 0 | 0 | 100 |
| BRTHA2018304 | 0 | 0 | 0 | 0 | 0 | 0 | 100 |
| BRTHA2018344 | 0 | 0 | 0 | 0 | 0 | 0 | 100 |
| BRTHA2018420 | 0 | 0 | 0 | 0 | 0 | 0 | 100 |
| BRTHA2018443 | 22.098 | 0 | 0 | 0 | 0 | 0 | 49.012 |
| BRTHA2018504 | 33.981 | 0 | 0 | 0 | 0 | 0 | 37.684 |
| BRTHA2018558 | 0 | 0 | 0 | 0 | 0 | 0 | 100 |
| BRTHA2018591 | 0 | 0 | 0 | 0 | 0 | 0 | 100 |
| BRTHA2018624 | 0 | 0 | 0 | 0 | 0 | 0 | 100 |
| BRTHA2018706 | 0 | 0 | 0 | 0 | 0 | 0 | 100 |
| BRTHA2018707 | 0 | 0 | 0 | 0 | 0 | 0 | 57.080 |
| BRTHA2019014 | 0 | 0 | 0 | 0 | 0 | 0 | 100 |
| BRTHA2019022 | 0 | 0 | 0 | 0 | 0 | 0 | 100 |
| BRTHA2019048 | 0 | 0 | 0 | 0 | 0 | 0 | 100 |
| BRTHA2019073 | 0 | 0 | 0 | 0 | 0 | 0 | 57.080 |
| BRTHA2019726 | 0 | 0 | 0 | 0 | 0 | 0 | 100 |
| BRTHA2019743 | 0 | 0 | 0 | 0 | 0 | 0 | 100 |
| BRTHA2020400 | 0 | 0 | 0 | 0 | 0 | 0 | 100 |
| BRTHA2020566 | 0 | 0 | 0 | 0 | 0 | 0 | 100 |
| BRTHA2020642 | 0 | 0 | 0 | 0 | 0 | 0 | 100 |
| BRTHA2020695 | 0 | 0 | 0 | 0 | 0 | 0 | 100 |
| BRTHA2020721 | 0 | 0 | 0 | 0 | 0 | 0 | 100 |
| BRTHA2020781 | 0 | 0 | 0 | 0 | 0 | 0 | 100 |
| BRTHA2020811 | 0 | 0 | 0 | 0 | 0 | 0 | 100 |
| BRTHA2020910 | 0 | 0 | 0 | 0 | 0 | 0 | 100 |
| BRTHA2021212 | 0 | 0 | 0 | 0 | 0 | 0 | 100 |
| BRTHA2021440 | 0 | 0 | 0 | 0 | 0 | 0 | 57.080 |
| BRTHA2021450 | 0 | 0 | 0 | 0 | 0 | 0 | 100 |
| BRTHA2022074 | 0 | 0 | 0 | 0 | 0 | 0 | 100 |
| BRTHA2022914 | 0 | 0 | 0 | 0 | 0 | 0 | 100 |
| BRTHA2022968 | 0 | 0 | 0 | 0 | 0 | 0 | 100 |
| BRTHA2023402 | 0 | 0 | 0 | 0 | 0 | 0 | 100 |
| BRTHA2023437 | 0 | 0 | 0 | 0 | 0 | 0 | 100 |
| BRTHA2024177 | 0 | 0 | 0 | 0 | 0 | 0 | 100 |
| BRTHA2024354 | 0 | 0 | 0 | 0 | 0 | 0 | 100 |
| BRTHA2024712 | 0 | 0 | 0 | 0 | 0 | 0 | 100 |
| BRTHA2025869 | 0 | 0 | 0 | 0 | 0 | 0 | 100 |
| BRTHA2026071 | 0 | 0 | 0 | 0 | 0 | 0 | 13.612 |
| BRTHA2026290 | 0 | 0 | 0 | 0 | 0 | 0 | 100 |
| BRTHA2026311 | 0 | 0 | 0 | 0 | 0 | 0 | 100 |
| BRTHA2027227 | 0 | 0 | 0 | 0 | 0 | 0 | 100 |
| BRTHA2027229 | 0 | 0 | 0 | 0 | 0 | 0 | 2.030 |
| BRTHA2027250 | 0 | 0 | 0 | 0 | 0 | 0 | 100 |
| BRTHA2027546 | 0 | 0 | 0 | 0 | 0 | 0 | 100 |
| BRTHA2028297 | 0 | 0 | 0 | 0 | 0 | 0 | 100 |
| BRTHA2029969 | 0 | 0 | 0 | 0 | 0 | 0 | 100 |
| BRTHA2030036 | 0 | 0 | 0 | 0 | 0 | 0 | 100 |
| BRTHA2030213 | 0 | 0 | 0 | 0 | 0 | 0 | 100 |
| BRTHA2031517 | 0 | 0 | 0 | 47.917 | 0 | 0 | 52.083 |
| BRTHA2031800 | 0 | 0 | 0 | 0 | 0 | 0 | 100 |
| BRTHA2031917 | 0 | 0 | 0 | 0 | 0 | 0 | 100 |
| BRTHA2032763 | 0 | 0 | 0 | 0 | 0 | 0 | 100 |
| BRTHA2032845 | 0 | 0 | 0 | 0 | 0 | 0 | 100 |
| BRTHA2033122 | 0 | 0 | 0 | 0 | 0 | 0 | 100 |
| BRTHA2033155 | 4.253 | 9.757 | 0 | 0 | 15.830 | 0 | 9.433 |
| BRTHA2033264 | 0 | 67.414 | 0 | 0 | 0 | 0 | 32.586 |
| BRTHA2033320 | 0 | 0 | 0 | 0 | 0 | 0 | 100 |
| BRTHA2033469 | 0 | 0 | 0 | 0 | 0 | 0 | 38.930 |
| BRTHA2033683 | 0 | 0 | 0 | 0 | 0 | 0 | 100 |
| BRTHA2034281 | 0 | 0 | 0 | 0 | 0 | 0 | 100 |
| BRTHA2034576 | 0 | 0 | 0 | 0 | 0 | 0 | 100 |
| BRTHA2034874 | 0 | 0 | 0 | 0 | 0 | 0 | 100 |
| BRTHA2035448 | 0 | 0 | 0 | 0 | 0 | 0 | 100 |
| BRTHA2035743 | 0 | 0 | 0 | 34.617 | 0 | 0 | 22.576 |
| BRTHA2036055 | 0 | 0 | 0 | 0 | 0 | 0 | 100 |
| BRTHA2036295 | 0 | 0 | 0 | 0 | 0 | 0 | 100 |
| BRTHA2036660 | 0 | 0 | 0 | 0 | 0 | 0 | 100 |
| BRTHA2037247 | 0 | 0 | 0 | 0 | 0 | 0 | 100 |
| BRTHA2038279 | 0 | 0 | 0 | 0 | 0 | 0 | 100 |
| BRTHA2038345 | 0 | 0 | 0 | 0 | 0 | 0 | 100 |
| BRTHA2038353 | 0 | 0 | 0 | 0 | 0 | 0 | 100 |
| BRTHA2038396 | 0 | 0 | 0 | 0 | 0 | 0 | 100 |
| BRTHA3000252 | 0 | 0 | 0 | 0 | 0 | 0 | 100 |
| BRTHA3000273 | 0 | 0 | 0 | 0 | 0 | 0 | 57.080 |
| BRTHA3000296 | 0 | 0 | 0 | 0 | 0 | 0 | 100 |
| BRTHA3000297 | 0 | 0 | 0 | 47.917 | 0 | 0 | 52.083 |
| BRTHA3000325 | 0 | 0 | 0 | 0 | 0 | 0 | 100 |
| BRTHA3000456 | 0 | 0 | 0 | 0 | 0 | 0 | 62.915 |
| BRTHA3000633 | 0 | 0 | 0 | 0 | 0 | 0 | 37.898 |
| BRTHA3000789 | 0 | 0 | 0 | 35.937 | 0 | 0 | 39.062 |
| BRTHA3001221 | 0 | 0 | 0 | 0 | 0 | 0 | 100 |
| BRTHA3001623 | 0 | 0 | 0 | 0 | 0 | 0 | 100 |
| BRTHA3002265 | 0 | 0 | 0 | 0 | 0 | 0 | 100 |
| BRTHA3002401 | 0 | 0 | 0 | 0 | 0 | 0 | 100 |
| BRTHA3002411 | 0 | 0 | 0 | 0 | 0 | 0 | 100 |
| BRTHA3002427 | 8.577 | 0 | 10.128 | 2.917 | 10.641 | 10.308 | 15.852 |
| BRTHA3002864 | 0 | 0 | 0 | 0 | 0 | 0 | 57.080 |
| BRTHA3002933 | 0 | 0 | 0 | 0 | 0 | 0 | 100 |
| BRTHA3002955 | 0 | 0 | 0 | 0 | 0 | 0 | 100 |
| BRTHA3003000 | 17.150 | 0 | 0 | 0 | 63.832 | 0 | 19.019 |
| BRTHA3003023 | 0 | 4.637 | 7.160 | 2.062 | 0 | 7.287 | 4.483 |
| BRTHA3003074 | 0 | 0 | 0 | 0 | 0 | 0 | 37.459 |
| BRTHA3003225 | 0 | 0 | 0 | 0 | 0 | 0 | 47.165 |
| BRTHA3003339 | 0 | 0 | 0 | 0 | 0 | 0 | 100 |
| BRTHA3003343 | 0 | 0 | 0 | 0 | 0 | 0 | 100 |
| BRTHA3003417 | 0 | 0 | 0 | 31.398 | 0 | 0 | 34.129 |
| BRTHA3003449 | 0 | 0 | 0 | 0 | 0 | 0 | 100 |
| BRTHA3003474 | 0 | 0 | 0 | 0 | 0 | 0 | 100 |
| BRTHA3003490 | 1.623 | 3.724 | 0 | 0 | 0 | 0 | 1.800 |
| BRTHA3003704 | 0 | 0 | 0 | 0 | 0 | 0 | 60.975 |
| BRTHA3003736 | 4.302 | 0 | 0 | 6.584 | 0 | 0 | 2.385 |
| BRTHA3004307 | 9.037 | 0 | 0 | 24.587 | 0 | 0 | 6.681 |
| BRTHA3004432 | 32.087 | 0 | 0 | 0 | 0 | 0 | 35.583 |
| BRTHA3004475 | 0 | 0 | 0 | 0 | 0 | 0 | 52.395 |
| BRTHA3004502 | 0 | 0 | 0 | 0 | 0 | 0 | 100 |
| BRTHA3004610 | 0 | 0 | 0 | 0 | 0 | 0 | 100 |
| BRTHA3005046 | 0 | 0 | 0 | 47.917 | 0 | 0 | 52.083 |
| BRTHA3005735 | 0 | 0 | 0 | 0 | 0 | 0 | 100 |
| BRTHA3005988 | 31.076 | 0 | 0 | 0 | 0 | 0 | 68.924 |
| BRTHA3006318 | 0 | 0 | 0 | 0 | 0 | 0 | 100 |
| BRTHA3006593 | 0 | 0 | 0 | 0 | 0 | 0 | 100 |
| BRTHA3006856 | 0 | 0 | 0 | 0 | 0 | 0 | 100 |
| BRTHA3007113 | 0 | 0 | 0 | 0 | 0 | 0 | 100 |
| BRTHA3007130 | 0 | 0 | 0 | 0 | 0 | 0 | 100 |
| BRTHA3007148 | 0 | 0 | 0 | 0 | 0 | 0 | 100 |
| BRTHA3007319 | 0 | 0 | 0 | 0 | 0 | 0 | 100 |
| BRTHA3007469 | 0 | 0 | 0 | 0 | 0 | 0 | 100 |
| BRTHA3007472 | 0 | 0 | 0 | 7.962 | 0 | 0 | 4.327 |
| BRTHA3007532 | 0 | 0 | 0 | 0 | 0 | 0 | 100 |
| BRTHA3007662 | 0 | 0 | 0 | 64.789 | 0 | 0 | 35.211 |
| BRTHA3007685 | 0 | 0 | 0 | 0 | 0 | 0 | 60.975 |
| BRTHA3007769 | 0 | 0 | 0 | 0 | 0 | 0 | 100 |
| BRTHA3007922 | 0 | 0 | 0 | 0 | 0 | 0 | 34.613 |
| BRTHA3008143 | 0 | 0 | 0 | 0 | 0 | 0 | 100 |
| BRTHA3008293 | 0 | 0 | 0 | 0 | 0 | 0 | 100 |
| BRTHA3008310 | 0 | 0 | 0 | 0 | 0 | 0 | 100 |
| BRTHA3008386 | 0 | 0 | 0 | 0 | 0 | 0 | 100 |
| BRTHA3008520 | 47.417 | 0 | 0 | 0 | 0 | 0 | 52.583 |
| BRTHA3008608 | 0 | 0 | 0 | 0 | 0 | 0 | 100 |
| BRTHA3008694 | 0 | 0 | 0 | 0 | 0 | 0 | 100 |
| BRTHA3008778 | 0 | 0 | 0 | 25.346 | 0 | 0 | 27.551 |
| BRTHA3008826 | 0 | 0 | 0 | 0 | 0 | 0 | 100 |
| BRTHA3009037 | 0 | 0 | 0 | 0 | 0 | 0 | 100 |
| BRTHA3009090 | 0 | 0 | 0 | 12.008 | 0 | 0 | 13.052 |
| BRTHA3009291 | 0 | 0 | 0 | 0 | 0 | 0 | 100 |
| BRTHA3009858 | 0 | 0 | 0 | 0 | 0 | 0 | 25.720 |
| BRTHA3010135 | 20.010 | 0 | 0 | 0 | 0 | 0 | 44.380 |
| BRTHA3010366 | 0 | 0 | 0 | 0 | 0 | 0 | 100 |
| BRTHA3010469 | 0 | 0 | 0 | 0 | 0 | 0 | 100 |
| BRTHA3010530 | 0 | 0 | 0 | 0 | 0 | 0 | 31.009 |
| BRTHA3010540 | 0 | 0 | 0 | 0 | 0 | 0 | 7.466 |
| BRTHA3010717 | 0 | 0 | 0 | 0 | 0 | 0 | 100 |
| BRTHA3011149 | 0 | 0 | 0 | 0 | 0 | 0 | 100 |
| BRTHA3011187 | 0 | 0 | 0 | 0 | 0 | 0 | 100 |
| BRTHA3011194 | 3.534 | 0 | 0 | 10.818 | 0 | 0 | 3.920 |
| BRTHA3011229 | 0 | 0 | 0 | 0 | 0 | 0 | 100 |
| BRTHA3011265 | 25.596 | 0 | 0 | 0 | 0 | 0 | 18.923 |
| BRTHA3011361 | 0 | 0 | 0 | 0 | 0 | 0 | 62.915 |
| BRTHA3011510 | 0 | 0 | 0 | 0 | 0 | 0 | 100 |
| BRTHA3011892 | 0 | 0 | 0 | 0 | 0 | 0 | 100 |
| BRTHA3012265 | 0 | 0 | 0 | 64.789 | 0 | 0 | 35.211 |
| BRTHA3013860 | 0 | 0 | 0 | 0 | 0 | 0 | 100 |
| BRTHA3013882 | 0 | 0 | 0 | 0 | 0 | 0 | 100 |
| BRTHA3013884 | 0 | 0 | 0 | 0 | 0 | 0 | 100 |
| BRTHA3013981 | 0 | 0 | 0 | 0 | 0 | 0 | 100 |
| BRTHA3014000 | 0 | 0 | 0 | 0 | 0 | 0 | 100 |
| BRTHA3014105 | 0 | 0 | 0 | 0 | 0 | 0 | 100 |
| BRTHA3014507 | 0 | 0 | 0 | 0 | 0 | 0 | 100 |
| BRTHA3014547 | 0 | 0 | 0 | 0 | 0 | 0 | 100 |
| BRTHA3014691 | 0 | 0 | 0 | 0 | 0 | 0 | 100 |
| BRTHA3014835 | 0 | 0 | 0 | 0 | 0 | 0 | 100 |
| BRTHA3014854 | 0 | 0 | 0 | 0 | 0 | 0 | 100 |
| BRTHA3014908 | 0 | 0 | 0 | 0 | 0 | 0 | 100 |
| BRTHA3014920 | 0 | 0 | 0 | 0 | 0 | 0 | 100 |
| BRTHA3015815 | 0 | 0 | 0 | 0 | 0 | 0 | 100 |
| BRTHA3016616 | 0 | 0 | 0 | 0 | 0 | 0 | 100 |
| BRTHA3016835 | 0 | 0 | 0 | 0 | 0 | 0 | 100 |
| BRTHA3016845 | 0 | 0 | 0 | 0 | 0 | 0 | 100 |
| BRTHA3016917 | 0 | 0 | 0 | 0 | 0 | 0 | 100 |
| BRTHA3017047 | 0 | 0 | 0 | 0 | 0 | 0 | 100 |
| BRTHA3017589 | 0 | 0 | 0 | 0 | 0 | 0 | 100 |
| BRTHA3017848 | 47.417 | 0 | 0 | 0 | 0 | 0 | 52.583 |
| BRTHA3018409 | 0 | 0 | 0 | 0 | 0 | 0 | 100 |
| BRTHA3018514 | 0 | 0 | 0 | 0 | 0 | 0 | 100 |
| BRTHA3018617 | 0 | 0 | 0 | 0 | 0 | 0 | 100 |
| BRTHA3018623 | 0 | 0 | 0 | 0 | 0 | 0 | 100 |
| BRTHA3018656 | 0 | 0 | 0 | 0 | 0 | 0 | 100 |
| BRTHA3019048 | 0 | 0 | 0 | 0 | 0 | 0 | 100 |
| BRTHA3019105 | 0 | 0 | 0 | 0 | 0 | 0 | 100 |
| BRTHA3019183 | 0 | 0 | 0 | 0 | 0 | 0 | 100 |
| BRTHA3020000 | 0 | 0 | 0 | 0 | 0 | 0 | 100 |
| BRTHA3020314 | 10.182 | 0 | 0 | 0 | 0 | 0 | 22.584 |
| BRTHA3020369 | 0 | 0 | 0 | 0 | 0 | 0 | 100 |
| BRTHA3021569 | 0 | 0 | 0 | 0 | 0 | 0 | 100 |
| BRTHA3021708 | 0 | 0 | 0 | 0 | 0 | 0 | 60.975 |
| BRTHA3021786 | 0 | 0 | 0 | 0 | 0 | 0 | 100 |
| BRTHA3021971 | 1.941 | 0 | 6.876 | 1.980 | 0 | 0 | 4.305 |
| BRTHA3022641 | 0 | 0 | 0 | 0 | 0 | 0 | 19.618 |
| BRTHA3023403 | 14.857 | 0 | 0 | 15.157 | 0 | 0 | 8.238 |
| BRTHA3023523 | 0 | 0 | 0 | 0 | 0 | 0 | 100 |
| BRTHA3023590 | 0 | 0 | 0 | 0 | 0 | 0 | 100 |
| BRTHA3023929 | 0 | 0 | 0 | 0 | 0 | 0 | 100 |
| BRTHA3024233 | 0 | 0 | 0 | 0 | 0 | 0 | 100 |
| BRTHA3024600 | 0 | 0 | 0 | 0 | 0 | 0 | 100 |
| BRTHA3025073 | 0 | 0 | 0 | 0 | 0 | 0 | 100 |
| BRTHA3025789 | 0 | 0 | 0 | 0 | 0 | 0 | 100 |
| BRTHA3025826 | 0 | 0 | 0 | 0 | 0 | 0 | 100 |
| BRTHA3026161 | 0 | 0 | 0 | 0 | 0 | 0 | 100 |
| BRTHA3026180 | 0 | 0 | 0 | 0 | 0 | 0 | 100 |
| BRTHA3026507 | 10.482 | 0 | 12.377 | 7.129 | 13.004 | 0 | 38.746 |
| BRTHA3026556 | 0 | 0 | 0 | 0 | 0 | 0 | 100 |
| BRTHA3026916 | 0 | 0 | 0 | 0 | 0 | 0 | 52.395 |
| BRTHA3027171 | 0 | 0 | 0 | 0 | 0 | 0 | 100 |
| BRTHA3027318 | 0 | 0 | 0 | 0 | 0 | 0 | 100 |
| BRTHA3027638 | 0 | 0 | 0 | 0 | 0 | 0 | 100 |
| BRTHA3027820 | 0 | 0 | 0 | 0 | 0 | 0 | 100 |
| BRTHA3027879 | 0 | 0 | 0 | 0 | 0 | 0 | 48.181 |
| BRTHA3027957 | 0 | 0 | 0 | 0 | 0 | 0 | 100 |
| BRTHA3028339 | 0 | 0 | 0 | 0 | 0 | 0 | 100 |
| BRTHA3028505 | 0 | 0 | 0 | 0 | 0 | 0 | 100 |
| BRTHA3028782 | 0 | 0 | 0 | 0 | 0 | 0 | 100 |
| CD34C3000125 | 0 | 0 | 0 | 2.372 | 0 | 0 | 0 |
| CD34C3000252 | 0 | 0 | 0 | 0.837 | 0 | 0 | 0.910 |
| CD34C3000424 | 0 | 0 | 0 | 2.336 | 0 | 0 | 0 |
| CHONS2000172 | 3.736 | 0 | 0 | 0 | 0 | 0 | 0 |
| CHONS2002829 | 0 | 0 | 0 | 11.668 | 0 | 0 | 1.812 |
| COLON2001721 | 11.065 | 0 | 0 | 5.644 | 0 | 0 | 0 |
| COLON2007733 | 12.468 | 0 | 0 | 0 | 0 | 0 | 0 |
| CTONG1000010 | 0 | 0 | 0 | 0 | 0 | 0 | 7.190 |
| CTONG1000052 | 4.834 | 0 | 0 | 1.849 | 2.249 | 4.357 | 1.340 |
| CTONG1000087 | 0 | 2.399 | 0 | 1.067 | 0 | 0 | 3.479 |
| CTONG1000088 | 0 | 0 | 0 | 2.981 | 0 | 0 | 0 |
| CTONG1000094 | 0 | 1.787 | 4.139 | 2.781 | 1.450 | 0 | 0.864 |
| CTONG1000180 | 0 | 0 | 0 | 0 | 0 | 0 | 26.631 |
| CTONG1000218 | 0 | 1.105 | 0 | 0.491 | 1.792 | 0 | 0.534 |
| CTONG1000241 | 4.243 | 0 | 0 | 8.657 | 0 | 0 | 4.705 |
| CTONG1000467 | 0 | 0 | 30.440 | 8.766 | 0 | 0 | 0 |
| CTONG2000031 | 34.934 | 0 | 0 | 0 | 0 | 0 | 0 |
| CTONG2000042 | 0 | 0 | 0 | 3.574 | 0 | 0 | 0 |
| CTONG2000063 | 2.141 | 0 | 0 | 0 | 0 | 0 | 4.748 |
| CTONG2000411 | 5.755 | 0 | 0 | 0 | 0 | 0 | 6.382 |
| CTONG2000452 | 0 | 0 | 0 | 2.971 | 0 | 0 | 0 |
| CTONG2000469 | 0 | 0 | 10.345 | 0 | 0 | 0 | 0 |
| CTONG2000508 | 7.107 | 1.812 | 2.798 | 1.611 | 0 | 0 | 1.751 |
| CTONG2000827 | 0 | 0 | 0 | 0 | 0 | 0 | 37.320 |
| CTONG2001226 | 0 | 0 | 0 | 7.744 | 0 | 0 | 0 |
| CTONG2001320 | 0 | 0 | 0 | 0 | 19.622 | 0 | 0 |
| CTONG2001533 | 0 | 0 | 0 | 35.391 | 0 | 0 | 0 |
| CTONG2001748 | 2.090 | 0 | 0 | 0 | 0 | 0 | 0 |
| CTONG2001800 | 0 | 0 | 0 | 28.849 | 0 | 0 | 0 |
| CTONG2001911 | 0 | 0 | 0 | 15.416 | 0 | 0 | 0 |
| CTONG2002073 | 0 | 6.721 | 5.189 | 0 | 0 | 0 | 0 |
| CTONG2002095 | 7.003 | 0 | 0 | 7.145 | 0 | 0 | 0 |
| CTONG2002270 | 14.322 | 0 | 0 | 14.611 | 0 | 0 | 8.235 |
| CTONG2002744 | 4.711 | 2.702 | 0 | 2.403 | 4.384 | 6.370 | 5.225 |
| CTONG2002766 | 0 | 0 | 0 | 12.054 | 0 | 0 | 0 |
| CTONG2002803 | 10.307 | 3.378 | 0 | 15.022 | 0 | 0 | 3.266 |
| CTONG2002832 | 0 | 0 | 0 | 0 | 0 | 0 | 12.432 |
| CTONG2002841 | 21.185 | 0 | 0 | 10.807 | 0 | 0 | 0 |
| CTONG2003094 | 5.497 | 0 | 6.491 | 5.608 | 0 | 6.606 | 10.159 |
| CTONG2003298 | 1.451 | 1.665 | 2.571 | 2.221 | 0 | 0 | 0.805 |
| CTONG2003524 | 6.445 | 0 | 0 | 1.644 | 0 | 0 | 0 |
| CTONG2004305 | 34.934 | 0 | 0 | 0 | 0 | 0 | 0 |
| CTONG2004423 | 22.982 | 0 | 0 | 0 | 0 | 0 | 0 |
| CTONG2004487 | 10.405 | 0 | 3.351 | 14.475 | 0 | 0 | 3.147 |
| CTONG2005028 | 6.845 | 0 | 0 | 0 | 0 | 0 | 7.591 |
| CTONG2005145 | 0 | 0 | 0 | 25.034 | 0 | 0 | 0 |
| CTONG2005278 | 0 | 0 | 0 | 2.940 | 0 | 0 | 0 |
| CTONG2005553 | 1.432 | 0 | 0 | 3.653 | 0 | 0 | 1.588 |
| CTONG2005795 | 0 | 0 | 0 | 35.391 | 0 | 0 | 0 |
| CTONG2006004 | 1.055 | 0 | 0 | 0 | 0 | 0 | 1.170 |
| CTONG2006235 | 9.828 | 0 | 11.606 | 5.014 | 6.097 | 0 | 5.450 |
| CTONG2006377 | 11.740 | 0 | 0 | 0 | 0 | 0 | 0 |
| CTONG2006393 | 34.934 | 0 | 0 | 0 | 0 | 0 | 0 |
| CTONG2006412 | 6.207 | 0 | 0 | 6.333 | 23.104 | 0 | 6.884 |
| CTONG2006449 | 0 | 0 | 31.141 | 8.969 | 0 | 0 | 0 |
| CTONG2006562 | 4.200 | 0 | 0 | 1.428 | 0 | 0 | 1.553 |
| CTONG2006709 | 15.516 | 0 | 0 | 7.915 | 9.625 | 0 | 0 |
| CTONG2007072 | 0 | 4.936 | 0 | 0 | 8.007 | 0 | 0 |
| CTONG2007078 | 2.556 | 0 | 0 | 2.608 | 0 | 0 | 1.417 |
| CTONG2007104 | 0 | 14.269 | 0 | 0 | 46.299 | 0 | 0 |
| CTONG2007168 | 24.181 | 0 | 0 | 24.670 | 0 | 0 | 6.704 |
| CTONG2007293 | 0 | 0 | 0 | 0 | 0 | 0 | 37.320 |
| CTONG2007399 | 16.311 | 0 | 0 | 0 | 0 | 0 | 0 |
| CTONG2007400 | 0 | 0 | 0 | 11.740 | 0 | 0 | 0 |
| CTONG2007417 | 0 | 0 | 0 | 0 | 0 | 0 | 23.904 |
| CTONG2007500 | 1.504 | 1.725 | 0 | 0.767 | 0 | 2.712 | 2.502 |
| CTONG2007586 | 0 | 0 | 21.292 | 0 | 0 | 0 | 0 |
| CTONG2007613 | 0 | 0 | 0 | 0 | 0 | 0 | 9.707 |
| CTONG2007681 | 0 | 0 | 0 | 18.854 | 0 | 0 | 20.493 |
| CTONG2007776 | 8.506 | 0 | 15.067 | 4.339 | 0 | 0 | 9.433 |
| CTONG2007779 | 0 | 0 | 0 | 0 | 0 | 0 | 37.320 |
| CTONG2008014 | 0 | 0 | 0 | 15.447 | 56.353 | 0 | 0 |
| CTONG2008321 | 0 | 0 | 53.293 | 0 | 0 | 0 | 0 |
| CTONG2008398 | 2.294 | 0 | 2.708 | 1.560 | 0 | 0 | 1.696 |
| CTONG2008405 | 0 | 0 | 0 | 22.452 | 0 | 0 | 0 |
| CTONG2008506 | 3.764 | 0 | 0 | 3.840 | 0 | 0 | 2.087 |
| CTONG2008518 | 7.703 | 0 | 0 | 3.929 | 0 | 0 | 4.271 |
| CTONG2008521 | 0 | 0 | 0 | 15.511 | 0 | 0 | 0 |
| CTONG2008689 | 0 | 0 | 0 | 21.321 | 0 | 0 | 0 |
| CTONG2008721 | 0 | 0 | 0 | 0 | 0 | 0 | 37.320 |
| CTONG2009033 | 25.755 | 0 | 0 | 26.276 | 0 | 0 | 0 |
| CTONG2009108 | 0 | 0 | 0 | 0 | 0 | 0 | 26.317 |
| CTONG2009423 | 0 | 0 | 0 | 35.391 | 0 | 0 | 0 |
| CTONG2009529 | 0 | 14.506 | 0 | 0 | 0 | 0 | 0 |
| CTONG2009534 | 0 | 0 | 0 | 23.537 | 28.623 | 0 | 8.528 |
| CTONG2009938 | 0 | 0 | 0 | 0 | 0 | 0 | 22.188 |
| CTONG2010348 | 3.542 | 4.063 | 0 | 1.807 | 6.591 | 0 | 3.927 |
| CTONG2010408 | 17.136 | 0 | 0 | 0 | 0 | 0 | 0 |
| CTONG2010652 | 0 | 0 | 0 | 0 | 0 | 0 | 35.648 |
| CTONG2010821 | 1.429 | 0 | 0 | 2.187 | 0 | 0 | 3.170 |
| CTONG2011188 | 0 | 0 | 0 | 21.500 | 0 | 0 | 0 |
| CTONG2011801 | 0 | 0 | 0 | 0 | 11.021 | 0 | 3.284 |
| CTONG2012001 | 0 | 0 | 0 | 7.295 | 0 | 0 | 0 |
| CTONG2012050 | 7.104 | 0 | 0 | 0 | 0 | 0 | 0 |
| CTONG2012452 | 0.712 | 4.085 | 1.261 | 0 | 0 | 0 | 0.790 |
| CTONG2012607 | 0 | 0 | 0 | 0 | 0 | 0 | 5.754 |
| CTONG2012745 | 0 | 0 | 0 | 5.659 | 0 | 0 | 0 |
| CTONG2012847 | 3.444 | 0 | 0 | 0 | 0 | 0 | 1.910 |
| CTONG2012879 | 0 | 0 | 0 | 0 | 0 | 0 | 1.886 |
| CTONG2012996 | 2.920 | 0 | 0 | 0 | 0 | 0 | 6.476 |
| CTONG2013348 | 5.501 | 0 | 0 | 0 | 0 | 0 | 12.201 |
| CTONG2013381 | 6.274 | 7.197 | 0 | 0 | 11.676 | 0 | 0 |
| CTONG2013907 | 2.156 | 0 | 0 | 0 | 0 | 0 | 2.391 |
| CTONG2013934 | 6.936 | 0 | 0 | 7.077 | 0 | 0 | 7.692 |
| CTONG2014119 | 0 | 0 | 0 | 0 | 0 | 0 | 8.988 |
| CTONG2014165 | 0 | 0 | 0 | 0 | 0 | 0 | 5.339 |
| CTONG2014369 | 0 | 0 | 0 | 4.246 | 0 | 0 | 0 |
| CTONG2014389 | 0 | 0 | 0 | 2.695 | 0 | 0 | 2.929 |
| CTONG2014898 | 5.768 | 13.233 | 0 | 0 | 0 | 0 | 6.396 |
| CTONG2015091 | 0 | 0 | 0 | 0 | 0 | 0 | 1.801 |
| CTONG2015204 | 0 | 0 | 0 | 15.475 | 0 | 0 | 0 |
| CTONG2015330 | 28.439 | 0 | 0 | 0 | 0 | 0 | 0 |
| CTONG2015345 | 0 | 0 | 0 | 0 | 31.774 | 0 | 0 |
| CTONG2015518 | 26.559 | 0 | 0 | 0 | 0 | 0 | 0 |
| CTONG2015815 | 8.797 | 0 | 0 | 0 | 0 | 0 | 0 |
| CTONG2016056 | 3.977 | 0 | 0 | 0 | 0 | 0 | 0 |
| CTONG2016408 | 0 | 0 | 0 | 3.777 | 0 | 0 | 4.106 |
| CTONG2016499 | 34.934 | 0 | 0 | 0 | 0 | 0 | 0 |
| CTONG2016575 | 1.989 | 1.141 | 0 | 3.551 | 0 | 0 | 0.551 |
| CTONG2016869 | 2.641 | 0 | 0 | 0 | 0 | 0 | 0 |
| CTONG2016931 | 3.052 | 7.001 | 0 | 12.454 | 0 | 0 | 3.384 |
| CTONG2017094 | 11.178 | 0 | 0 | 0 | 0 | 0 | 0 |
| CTONG2017409 | 0 | 0 | 0 | 0 | 0 | 0 | 37.320 |
| CTONG2017500 | 2.649 | 0 | 0 | 0 | 0 | 0 | 2.938 |
| CTONG2017998 | 2.505 | 0 | 0 | 5.112 | 9.324 | 0 | 0 |
| CTONG2018211 | 13.642 | 0 | 0 | 13.918 | 0 | 0 | 3.782 |
| CTONG2018383 | 0 | 0 | 0 | 0 | 0 | 0 | 5.013 |
| CTONG2018413 | 25.179 | 0 | 0 | 0 | 0 | 0 | 27.923 |
| CTONG2018637 | 0 | 0 | 0 | 6.693 | 0 | 0 | 0 |
| CTONG2018739 | 3.875 | 0 | 0 | 0 | 0 | 0 | 0 |
| CTONG2018898 | 7.706 | 0 | 1.706 | 6.388 | 0 | 5.210 | 5.341 |
| CTONG2019029 | 8.092 | 0 | 0 | 0 | 0 | 0 | 0 |
| CTONG2019063 | 21.231 | 0 | 0 | 0 | 0 | 0 | 0 |
| CTONG2019590 | 0 | 0 | 0 | 0 | 0 | 0 | 11.933 |
| CTONG2019788 | 0 | 0 | 0 | 3.120 | 0 | 0 | 3.391 |
| CTONG2020374 | 31.081 | 0 | 0 | 0 | 0 | 0 | 0 |
| CTONG2020378 | 16.140 | 0 | 0 | 16.467 | 0 | 0 | 0 |
| CTONG2020445 | 0 | 0 | 0 | 0 | 0 | 0 | 23.341 |
| CTONG2020484 | 0 | 0 | 0 | 0.600 | 0 | 2.120 | 0.652 |
| CTONG2020560 | 18.002 | 0 | 0 | 4.591 | 0 | 0 | 3.327 |
| CTONG2020582 | 9.594 | 0 | 0 | 1.958 | 0 | 0 | 4.256 |
| CTONG2020831 | 0 | 0 | 0 | 0 | 0 | 0 | 37.320 |
| CTONG2023021 | 0 | 0 | 0 | 0 | 0 | 0 | 37.320 |
| CTONG2024031 | 2.584 | 0 | 0 | 0 | 0 | 0 | 0 |
| CTONG2027263 | 16.468 | 0 | 0 | 0 | 0 | 0 | 0 |
| CTONG2028124 | 0.503 | 2.306 | 1.780 | 1.026 | 0 | 0 | 1.672 |
| CTONG2028208 | 0 | 0 | 0 | 0 | 0 | 0 | 3.927 |
| CTONG2028309 | 0 | 0 | 0 | 0 | 0 | 0 | 8.140 |
| CTONG2028486 | 0 | 0 | 0 | 35.391 | 0 | 0 | 0 |
| CTONG3000657 | 3.880 | 8.901 | 0 | 11.875 | 0 | 0 | 8.605 |
| CTONG3001123 | 7.847 | 0 | 0 | 0 | 0 | 0 | 0 |
| CTONG3001746 | 42.917 | 0 | 0 | 0 | 0 | 0 | 0 |
| CTONG3002412 | 0 | 0 | 0 | 10.918 | 0 | 0 | 0 |
| CTONG3002835 | 0 | 2.521 | 0 | 4.483 | 0 | 0 | 0 |
| CTONG3004072 | 0 | 0 | 0 | 19.915 | 0 | 0 | 0 |
| CTONG3004726 | 0 | 0 | 0 | 17.278 | 0 | 0 | 0 |
| CTONG3008894 | 0 | 0 | 0 | 2.966 | 0 | 0 | 2.418 |
| CTONG3009028 | 0 | 0 | 0 | 0 | 0 | 0 | 1.785 |
| CTONG3009239 | 0 | 0 | 5.115 | 2.946 | 0 | 0 | 1.601 |
| CTONG3009328 | 11.993 | 0 | 0 | 0 | 0 | 0 | 0 |
| D3OST1000267 | 0 | 9.907 | 0 | 0 | 0 | 15.570 | 0 |
| D3OST1000270 | 0 | 0 | 9.153 | 0 | 0 | 0 | 0 |
| D6OST2000358 | 0 | 0 | 0 | 0 | 0 | 0 | 1.576 |
| D6OST2000464 | 0 | 0 | 0 | 1.118 | 4.078 | 0 | 0 |
| D9OST2000031 | 0 | 0 | 16.736 | 0 | 0 | 0 | 0 |
| D9OST2002608 | 6.684 | 0 | 0 | 4.546 | 0 | 0 | 2.471 |
| D9OST2003106 | 6.904 | 0 | 0 | 0 | 0 | 0 | 0 |
| D9OST2003762 | 0 | 0 | 0 | 0 | 8.112 | 0 | 0 |
| DFNES1000083 | 2.249 | 0 | 15.938 | 2.295 | 0 | 0 | 0 |
| DFNES1000150 | 0 | 0 | 0 | 1.139 | 0 | 0 | 1.238 |
| DFNES2000011 | 0 | 1.255 | 0 | 0 | 2.035 | 3.943 | 0 |
| DFNES2000153 | 0 | 0 | 0 | 0 | 0 | 0 | 3.551 |
| DFNES2000268 | 0 | 2.533 | 0 | 1.127 | 0 | 0 | 0 |
| DFNES2000292 | 0 | 8.610 | 0 | 0 | 0 | 0 | 0 |
| DFNES2000335 | 0 | 0 | 16.783 | 4.833 | 0 | 0 | 0 |
| DFNES2000443 | 0 | 0 | 2.405 | 0 | 0 | 0 | 0.753 |
| DFNES2000457 | 0 | 0 | 0 | 0 | 0 | 0 | 9.850 |
| DFNES2000526 | 0 | 0 | 0 | 0 | 0 | 0 | 3.065 |
| DFNES2001091 | 0 | 19.689 | 0 | 0 | 0 | 0 | 0 |
| DFNES2001096 | 0 | 0 | 27.148 | 0 | 0 | 0 | 0 |
| DFNES2001829 | 9.228 | 0 | 0 | 18.830 | 0 | 0 | 0 |
| DFNES2004371 | 4.733 | 0 | 0 | 0 | 0 | 0 | 1.750 |
| DFNES2005690 | 5.077 | 0 | 0 | 15.539 | 0 | 0 | 11.260 |
| DFNES2007113 | 0 | 0 | 0 | 0 | 0 | 0 | 7.411 |
| DFNES2007634 | 0 | 6.118 | 6.298 | 0.907 | 3.308 | 0 | 4.928 |
| DFNES2008088 | 0 | 6.031 | 0 | 2.682 | 0 | 0 | 2.915 |
| DFNES2008160 | 4.480 | 0 | 0 | 4.571 | 0 | 16.153 | 9.936 |
| DFNES2009482 | 1.418 | 0 | 0 | 0 | 0 | 0 | 1.573 |
| DFNES2011245 | 0 | 0 | 0 | 14.757 | 0 | 0 | 0 |
| DFNES2011380 | 11.690 | 0 | 0 | 0 | 0 | 0 | 0 |
| DFNES2011499 | 0 | 0 | 0 | 6.330 | 0 | 0 | 0 |
| FCBBF1000024 | 6.587 | 0 | 0 | 6.720 | 0 | 7.916 | 0 |
| FCBBF1000025 | 0 | 7.342 | 0 | 6.530 | 11.911 | 0 | 0 |
| FCBBF1000027 | 0.733 | 2.521 | 2.595 | 1.495 | 2.727 | 3.962 | 1.625 |
| FCBBF1000061 | 7.056 | 5.396 | 0 | 2.399 | 0 | 0 | 7.824 |
| FCBBF1000063 | 11.962 | 0 | 0 | 6.102 | 0 | 0 | 0 |
| FCBBF1000077 | 0 | 0 | 0 | 0 | 0 | 0 | 0.898 |
| FCBBF1000118 | 0 | 0 | 0 | 15.471 | 0 | 0 | 0 |
| FCBBF1000121 | 0 | 0 | 35.196 | 0 | 0 | 0 | 0 |
| FCBBF1000139 | 3.496 | 0 | 0 | 1.784 | 0 | 0 | 0 |
| FCBBF1000197 | 4.273 | 0 | 3.784 | 7.629 | 0 | 0 | 3.554 |
| FCBBF1000272 | 0 | 0 | 0 | 35.577 | 0 | 0 | 0 |
| FCBBF1000294 | 0 | 0 | 0 | 2.197 | 4.007 | 0 | 1.194 |
| FCBBF1000367 | 0 | 0 | 0 | 1.550 | 0 | 0 | 0 |
| FCBBF1000376 | 21.300 | 0 | 0 | 0 | 0 | 0 | 0 |
| FCBBF1000403 | 0 | 0 | 0 | 0 | 31.217 | 0 | 0 |
| FCBBF1000412 | 5.806 | 0 | 0 | 0 | 0 | 0 | 2.146 |
| FCBBF1000449 | 13.371 | 0 | 0 | 0 | 0 | 0 | 7.414 |
| FCBBF1000466 | 1.911 | 0 | 0 | 0.650 | 0 | 0 | 5.650 |
| FCBBF1000476 | 26.054 | 0 | 0 | 8.860 | 0 | 0 | 0 |
| FCBBF1000509 | 3.732 | 17.123 | 19.830 | 5.711 | 6.945 | 6.728 | 6.208 |
| FCBBF1000556 | 9.594 | 9.783 | 15.106 | 9.788 | 3.968 | 7.687 | 16.550 |
| FCBBF1000563 | 0 | 0 | 0 | 1.532 | 11.180 | 0 | 6.662 |
| FCBBF1000574 | 8.303 | 0 | 7.354 | 6.353 | 0 | 0 | 4.604 |
| FCBBF1000671 | 0 | 0 | 0 | 13.968 | 0 | 0 | 0 |
| FCBBF1000684 | 0 | 0 | 0 | 0 | 66.829 | 0 | 0 |
| FCBBF1000748 | 0 | 0 | 0 | 0 | 0 | 0 | 37.510 |
| FCBBF1000760 | 0.655 | 0 | 0 | 0 | 0 | 0 | 1.452 |
| FCBBF2000038 | 0 | 3.082 | 0 | 0 | 0 | 4.843 | 0 |
| FCBBF2000087 | 0 | 0 | 0 | 0 | 0 | 10.402 | 0 |
| FCBBF2000199 | 11.190 | 0 | 0 | 2.854 | 0 | 0 | 6.205 |
| FCBBF2000362 | 8.370 | 0 | 0 | 17.080 | 0 | 0 | 0 |
| FCBBF2000566 | 0 | 8.527 | 0 | 0 | 0 | 0 | 0 |
| FCBBF2000591 | 0.287 | 0 | 0 | 0.292 | 0 | 0 | 0.318 |
| FCBBF2000685 | 0 | 15.608 | 0 | 0 | 25.321 | 0 | 0 |
| FCBBF2000733 | 31.702 | 0 | 0 | 16.172 | 29.499 | 0 | 0 |
| FCBBF2000885 | 9.210 | 0 | 0 | 6.264 | 0 | 0 | 1.702 |
| FCBBF2000940 | 0 | 0 | 0 | 0 | 0 | 0 | 37.510 |
| FCBBF2001001 | 19.115 | 0 | 0 | 0 | 0 | 34.461 | 0 |
| FCBBF2001105 | 3.035 | 0 | 10.753 | 0 | 0 | 0 | 0 |
| FCBBF2001183 | 16.537 | 3.794 | 0 | 11.810 | 6.155 | 0 | 9.169 |
| FCBBF2001211 | 25.634 | 14.703 | 0 | 0 | 0 | 0 | 7.107 |
| FCBBF2001291 | 1.902 | 0 | 0 | 1.941 | 0 | 0 | 0 |
| FCBBF2001400 | 0 | 0 | 0 | 0 | 0 | 0 | 22.584 |
| FCBBF2001480 | 0 | 55.394 | 0 | 0 | 0 | 0 | 0 |
| FCBBF2001538 | 0.762 | 1.748 | 0 | 2.332 | 5.672 | 0 | 3.380 |
| FCBBF2001594 | 7.606 | 0 | 0 | 11.640 | 0 | 0 | 21.086 |
| FCBBF2001817 | 0 | 55.394 | 0 | 0 | 0 | 0 | 0 |
| FCBBF2002349 | 0 | 0 | 13.985 | 4.028 | 0 | 0 | 0 |
| FCBBF2002801 | 5.191 | 0 | 9.194 | 2.648 | 0 | 0 | 0 |
| FCBBF2002928 | 0 | 0 | 0 | 3.174 | 0 | 0 | 0 |
| FCBBF2003293 | 0 | 0 | 0 | 0 | 0 | 66.122 | 0 |
| FCBBF2003543 | 35.119 | 0 | 0 | 0 | 0 | 0 | 0 |
| FCBBF2003567 | 0 | 0 | 0 | 19.952 | 0 | 0 | 7.229 |
| FCBBF2004066 | 4.032 | 0 | 7.142 | 6.170 | 0 | 29.076 | 11.178 |
| FCBBF2005909 | 6.241 | 0 | 0 | 19.102 | 0 | 0 | 6.921 |
| FCBBF2006634 | 0 | 10.829 | 0 | 0 | 0 | 0 | 0 |
| FCBBF2006781 | 0 | 0 | 0 | 0 | 0 | 0 | 7.017 |
| FCBBF3000115 | 11.973 | 0 | 0 | 8.143 | 0 | 0 | 0 |
| FCBBF3000168 | 8.142 | 18.679 | 0 | 8.306 | 0 | 0 | 9.029 |
| FCBBF3000228 | 0 | 0 | 0 | 9.143 | 0 | 0 | 0 |
| FCBBF3000229 | 0 | 22.152 | 0 | 0 | 35.938 | 0 | 0 |
| FCBBF3000388 | 9.880 | 11.334 | 0 | 0 | 0 | 17.812 | 0 |
| FCBBF3000434 | 1.851 | 8.495 | 0 | 11.333 | 6.891 | 0 | 0 |
| FCBBF3000536 | 0 | 0 | 9.443 | 0 | 0 | 0 | 0 |
| FCBBF3001081 | 0 | 0 | 0 | 0 | 0 | 0 | 5.824 |
| FCBBF3001377 | 10.297 | 0 | 0 | 0 | 0 | 0 | 0 |
| FCBBF3001470 | 0 | 0 | 0 | 0 | 0 | 0 | 3.011 |
| FCBBF3001632 | 0 | 3.542 | 0 | 0 | 0 | 0 | 0 |
| FCBBF3001657 | 11.795 | 0 | 0 | 9.627 | 8.780 | 0 | 5.232 |
| FCBBF3001890 | 0 | 0 | 19.489 | 0 | 0 | 0 | 3.050 |
| FCBBF3001977 | 7.448 | 0 | 0 | 7.599 | 0 | 0 | 0 |
| FCBBF3002818 | 35.119 | 0 | 0 | 0 | 0 | 0 | 0 |
| FCBBF3003557 | 35.119 | 0 | 0 | 0 | 0 | 0 | 0 |
| FCBBF3003787 | 9.787 | 0 | 0 | 0 | 0 | 0 | 0 |
| FCBBF3003800 | 2.363 | 1.807 | 1.395 | 2.813 | 2.932 | 1.420 | 1.310 |
| FCBBF3004323 | 5.510 | 0 | 0 | 0 | 0 | 0 | 0 |
| FCBBF3004473 | 2.298 | 0 | 0 | 1.172 | 0 | 0 | 2.548 |
| FCBBF3004715 | 3.745 | 0 | 0 | 0 | 0 | 0 | 0 |
| FCBBF3004955 | 0 | 0 | 0 | 23.589 | 0 | 0 | 0 |
| FCBBF3005320 | 0 | 0 | 0 | 5.566 | 0 | 0 | 0 |
| FCBBF3005330 | 2.771 | 0 | 2.454 | 2.827 | 0 | 0 | 1.536 |
| FCBBF3006821 | 5.716 | 0 | 0 | 5.832 | 0 | 0 | 0 |
| FCBBF3007462 | 0 | 0 | 0 | 35.577 | 0 | 0 | 0 |
| FCBBF3007631 | 21.846 | 0 | 0 | 22.288 | 0 | 0 | 0 |
| FCBBF3007859 | 12.992 | 0 | 0 | 13.255 | 0 | 0 | 7.204 |
| FCBBF3007860 | 50.592 | 0 | 0 | 10.323 | 0 | 0 | 0 |
| FCBBF3008153 | 10.942 | 0 | 0 | 0 | 0 | 0 | 6.067 |
| FCBBF3008159 | 0 | 0 | 0 | 21.128 | 0 | 0 | 0 |
| FCBBF3008644 | 8.616 | 0 | 0 | 0 | 0 | 0 | 0 |
| FCBBF3009069 | 17.913 | 0 | 0 | 4.569 | 0 | 0 | 34.763 |
| FCBBF3009101 | 35.119 | 0 | 0 | 0 | 0 | 0 | 0 |
| FCBBF3009152 | 19.020 | 0 | 0 | 0 | 0 | 0 | 0 |
| FCBBF3009479 | 0 | 0 | 0 | 0 | 0 | 0 | 10.970 |
| FCBBF3009526 | 11.814 | 0 | 0 | 0 | 0 | 0 | 13.101 |
| FCBBF3009541 | 0 | 0 | 0 | 1.262 | 0 | 0 | 0.914 |
| FCBBF3009978 | 0 | 0 | 65.725 | 0 | 0 | 0 | 0 |
| FCBBF3010012 | 6.894 | 5.272 | 0 | 2.344 | 0 | 8.285 | 0 |
| FCBBF3010142 | 14.433 | 0 | 0 | 14.725 | 0 | 0 | 16.005 |
| FCBBF3010695 | 4.960 | 0 | 0 | 0 | 0 | 0 | 2.750 |
| FCBBF3012332 | 21.300 | 0 | 0 | 0 | 0 | 0 | 0 |
| FCBBF3012347 | 0 | 0 | 7.775 | 0 | 8.169 | 0 | 2.434 |
| FCBBF3013266 | 0 | 0 | 0 | 0 | 0 | 0 | 23.444 |
| FCBBF3013506 | 23.748 | 0 | 0 | 0 | 0 | 0 | 0 |
| FCBBF3013800 | 0 | 0 | 0 | 35.577 | 0 | 0 | 0 |
| FCBBF3014260 | 2.258 | 0 | 7.999 | 11.518 | 0 | 0 | 0 |
| FCBBF3015100 | 4.990 | 0 | 17.676 | 0 | 0 | 0 | 5.533 |
| FCBBF3016622 | 35.119 | 0 | 0 | 0 | 0 | 0 | 0 |
| FCBBF3016667 | 0 | 0 | 0 | 13.060 | 0 | 0 | 0 |
| FCBBF3016928 | 2.629 | 0 | 0 | 1.788 | 0 | 0 | 3.887 |
| FCBBF3017255 | 0 | 0 | 0 | 35.577 | 0 | 0 | 0 |
| FCBBF3017396 | 0 | 0 | 0 | 6.248 | 0 | 0 | 0 |
| FCBBF3017531 | 3.207 | 3.678 | 0 | 0 | 0 | 0 | 3.556 |
| FCBBF3017918 | 6.547 | 0 | 0 | 0 | 0 | 0 | 0 |
| FCBBF3018067 | 0 | 0 | 0 | 0 | 0 | 66.122 | 0 |
| FCBBF3018173 | 0 | 0 | 0 | 35.577 | 0 | 0 | 0 |
| FCBBF3018796 | 0 | 7.122 | 0 | 0 | 0 | 0 | 6.886 |
| FCBBF3018949 | 0 | 0 | 0 | 14.438 | 0 | 0 | 15.693 |
| FCBBF3019839 | 14.980 | 0 | 0 | 11.462 | 0 | 0 | 4.153 |
| FCBBF3021026 | 0 | 55.394 | 0 | 0 | 0 | 0 | 0 |
| FCBBF3021807 | 0 | 0 | 0 | 0 | 0 | 15.634 | 0 |
| FCBBF3022566 | 35.119 | 0 | 0 | 0 | 0 | 0 | 0 |
| FCBBF3022593 | 0 | 0 | 0 | 0 | 0 | 0 | 7.683 |
| FCBBF3022767 | 0 | 0 | 0 | 0 | 0 | 0 | 22.584 |
| FCBBF3023368 | 7.361 | 0 | 0 | 2.503 | 0 | 0 | 2.721 |
| FCBBF3023667 | 0 | 0.305 | 0 | 0 | 0 | 0 | 0.736 |
| FCBBF3024002 | 5.675 | 0 | 0 | 0 | 0 | 0 | 0 |
| FCBBF3024266 | 9.782 | 0 | 0 | 9.980 | 0 | 0 | 0 |
| FCBBF3024623 | 0 | 0 | 0 | 0 | 0 | 0 | 12.426 |
| FCBBF3025285 | 0 | 55.394 | 0 | 0 | 0 | 0 | 0 |
| FCBBF3025417 | 0 | 0 | 0 | 0 | 31.948 | 0 | 19.038 |
| FCBBF3025528 | 0 | 0 | 0 | 4.926 | 0 | 0 | 0 |
| FCBBF3025568 | 16.446 | 0 | 0 | 33.557 | 0 | 0 | 0 |
| FCBBF3025650 | 0 | 0 | 0 | 25.656 | 0 | 0 | 27.887 |
| FCBBF3025737 | 0 | 0 | 0 | 0 | 0 | 11.719 | 3.604 |
| FCBBF3026308 | 0 | 29.322 | 0 | 0 | 0 | 0 | 14.174 |
| FCBBF3026651 | 14.594 | 0 | 0 | 22.334 | 0 | 0 | 8.092 |
| FCBBF3026692 | 0 | 0 | 0 | 0 | 0 | 58.507 | 0 |
| FCBBF3027559 | 35.119 | 0 | 0 | 0 | 0 | 0 | 0 |
| FCBBF3028244 | 5.571 | 2.130 | 3.289 | 2.842 | 0 | 3.348 | 1.030 |
| FCBBF3028593 | 0 | 0 | 0 | 0 | 0 | 0 | 8.955 |
| FCBBF4000142 | 3.656 | 0 | 0 | 0 | 0 | 0 | 4.054 |
| FCBBF4000268 | 0 | 0 | 0 | 35.577 | 0 | 0 | 0 |
| FCBBF4000446 | 2.253 | 1.723 | 0 | 0.766 | 0 | 2.708 | 0 |
| FCBBF5000061 | 0 | 0 | 0 | 0 | 0 | 0 | 23.231 |
| FCBBF5000165 | 9.875 | 0 | 0 | 23.508 | 0 | 0 | 0 |
| FCBBF5000261 | 0 | 0 | 0 | 0 | 0 | 0 | 11.516 |
| FCBBF5000325 | 0 | 23.194 | 0 | 10.314 | 37.628 | 0 | 0 |
| FEBRA1000022 | 0 | 0 | 0 | 10.739 | 0 | 0 | 0 |
| FEBRA1000057 | 1.736 | 7.966 | 6.150 | 3.542 | 6.461 | 0 | 1.925 |
| FEBRA1000088 | 0 | 9.791 | 0 | 0 | 0 | 0 | 0 |
| FEBRA1000188 | 0 | 0 | 0 | 2.135 | 0 | 0 | 0 |
| FEBRA1000189 | 0 | 0 | 0 | 20.683 | 0 | 0 | 0 |
| FEBRA1000190 | 0 | 18.233 | 0 | 0 | 0 | 0 | 0 |
| FEBRA2000007 | 0 | 0 | 0 | 24.160 | 0 | 0 | 0 |
| FEBRA2000053 | 21.156 | 0 | 0 | 7.195 | 0 | 0 | 23.461 |
| FEBRA2000105 | 0.717 | 1.645 | 0 | 0 | 0 | 0 | 4.772 |
| FEBRA2000129 | 5.199 | 5.964 | 0 | 0 | 0 | 0 | 2.883 |
| FEBRA2000210 | 0.707 | 0 | 0 | 0.721 | 0 | 0 | 0 |
| FEBRA2000253 | 0 | 0 | 0 | 14.934 | 0 | 0 | 0 |
| FEBRA2000297 | 0 | 18.194 | 0 | 0 | 0 | 0 | 8.794 |
| FEBRA2000333 | 0 | 0 | 0 | 0 | 0 | 0 | 30.789 |
| FEBRA2000402 | 0 | 0 | 0 | 5.655 | 0 | 0 | 0 |
| FEBRA2000452 | 4.012 | 0 | 0 | 2.046 | 0 | 0 | 3.337 |
| FEBRA2000462 | 31.051 | 0 | 0 | 8.640 | 0 | 0 | 6.261 |
| FEBRA2000536 | 0 | 0 | 0 | 3.214 | 0 | 0 | 3.493 |
| FEBRA2000538 | 0 | 0 | 0 | 0 | 59.888 | 0 | 0 |
| FEBRA2000581 | 21.479 | 0 | 0 | 15.421 | 0 | 0 | 7.940 |
| FEBRA2000680 | 0 | 0 | 0 | 9.589 | 0 | 0 | 0 |
| FEBRA2000733 | 0.506 | 0.387 | 1.194 | 0.860 | 1.254 | 0 | 0.934 |
| FEBRA2000740 | 2.262 | 0 | 0 | 1.154 | 0 | 0 | 1.254 |
| FEBRA2000757 | 12.249 | 0 | 0 | 21.870 | 0 | 0 | 6.792 |
| FEBRA2000762 | 0 | 0 | 0 | 0 | 0 | 22.430 | 0 |
| FEBRA2000771 | 0 | 0 | 0 | 0 | 0 | 0 | 24.058 |
| FEBRA2000772 | 0 | 19.625 | 0 | 0 | 0 | 0 | 9.486 |
| FEBRA2000787 | 0 | 0 | 6.997 | 0 | 0 | 0 | 2.190 |
| FEBRA2000793 | 0 | 0 | 0 | 0 | 0 | 0 | 4.253 |
| FEBRA2000815 | 0 | 0 | 12.807 | 0 | 0 | 0 | 0 |
| FEBRA2000877 | 14.227 | 0 | 0 | 0 | 0 | 0 | 15.777 |
| FEBRA2000880 | 0 | 24.311 | 0 | 0 | 0 | 0 | 0 |
| FEBRA2000901 | 0 | 0 | 0 | 0 | 0 | 37.454 | 0 |
| FEBRA2001004 | 0 | 0 | 0 | 22.568 | 0 | 0 | 0 |
| FEBRA2001146 | 11.183 | 0 | 0 | 0 | 0 | 0 | 0 |
| FEBRA2001197 | 0 | 0 | 0 | 0 | 0 | 0 | 15.632 |
| FEBRA2001227 | 3.697 | 0 | 13.098 | 11.316 | 0 | 0 | 12.300 |
| FEBRA2001245 | 12.612 | 0 | 8.936 | 10.293 | 0 | 0 | 8.391 |
| FEBRA2001294 | 0 | 0 | 8.561 | 0 | 0 | 0 | 2.680 |
| FEBRA2001334 | 11.501 | 0 | 0 | 5.867 | 0 | 0 | 0 |
| FEBRA2001440 | 0 | 0 | 0 | 0 | 0 | 41.969 | 0 |
| FEBRA2001492 | 22.656 | 0 | 0 | 6.604 | 0 | 0 | 14.357 |
| FEBRA2001571 | 0 | 0 | 0 | 2.140 | 0 | 0 | 4.651 |
| FEBRA2001581 | 0 | 9.407 | 0 | 0 | 15.261 | 0 | 0 |
| FEBRA2001591 | 0 | 0 | 0 | 0 | 0 | 0 | 11.328 |
| FEBRA2001669 | 17.140 | 0 | 0 | 20.766 | 0 | 0 | 4.752 |
| FEBRA2001698 | 12.173 | 0 | 0 | 12.420 | 0 | 0 | 0 |
| FEBRA2001706 | 28.630 | 0 | 0 | 0 | 0 | 0 | 0 |
| FEBRA2001715 | 3.989 | 0 | 0 | 25.433 | 0 | 0 | 6.635 |
| FEBRA2001745 | 0 | 0 | 4.440 | 0 | 0 | 0 | 0 |
| FEBRA2001814 | 3.969 | 3.035 | 0 | 2.700 | 0 | 0 | 1.467 |
| FEBRA2001867 | 0 | 0 | 13.129 | 0 | 0 | 0 | 12.330 |
| FEBRA2001974 | 0 | 26.731 | 0 | 0 | 0 | 0 | 0 |
| FEBRA2001990 | 18.144 | 16.650 | 0 | 7.404 | 0 | 0 | 8.048 |
| FEBRA2002027 | 2.533 | 0 | 0 | 2.585 | 9.430 | 9.135 | 0 |
| FEBRA2002352 | 0 | 0 | 12.297 | 3.542 | 0 | 0 | 0 |
| FEBRA2002442 | 0 | 47.925 | 0 | 0 | 0 | 0 | 0 |
| FEBRA2002456 | 13.088 | 0 | 0 | 8.902 | 0 | 0 | 14.515 |
| FEBRA2002611 | 21.730 | 0 | 0 | 0 | 0 | 0 | 24.098 |
| FEBRA2002707 | 3.603 | 0 | 0 | 0 | 0 | 0 | 0 |
| FEBRA2002781 | 6.842 | 0 | 0 | 0 | 0 | 0 | 0 |
| FEBRA2002792 | 8.031 | 9.212 | 0 | 10.925 | 9.964 | 4.826 | 16.328 |
| FEBRA2002931 | 18.604 | 0 | 3.877 | 16.748 | 0 | 0 | 15.777 |
| FEBRA2002933 | 0 | 0 | 0 | 0.755 | 2.755 | 0 | 0.821 |
| FEBRA2003100 | 0.659 | 0 | 0 | 2.016 | 0 | 0 | 4.382 |
| FEBRA2003115 | 21.678 | 0 | 0 | 0 | 0 | 0 | 0 |
| FEBRA2003128 | 31.997 | 0 | 0 | 14.839 | 0 | 0 | 6.452 |
| FEBRA2003258 | 0 | 0 | 0 | 2.886 | 0 | 10.201 | 6.275 |
| FEBRA2003436 | 0 | 0 | 39.387 | 0 | 0 | 0 | 0 |
| FEBRA2003470 | 14.595 | 0 | 0 | 0 | 0 | 0 | 16.185 |
| FEBRA2003707 | 0 | 47.925 | 0 | 0 | 0 | 0 | 0 |
| FEBRA2003726 | 0 | 2.285 | 0 | 0 | 0 | 0 | 1.104 |
| FEBRA2003750 | 0 | 0 | 12.934 | 1.862 | 0 | 0 | 6.073 |
| FEBRA2003833 | 5.187 | 0 | 6.126 | 7.057 | 0 | 0 | 1.918 |
| FEBRA2003926 | 0 | 0 | 2.473 | 0.712 | 0 | 2.517 | 0.774 |
| FEBRA2003930 | 0 | 0 | 0 | 0 | 6.689 | 0 | 1.993 |
| FEBRA2004042 | 0 | 0 | 0 | 2.164 | 0 | 0 | 0 |
| FEBRA2004091 | 10.568 | 0 | 37.438 | 0 | 0 | 0 | 0 |
| FEBRA2004219 | 0 | 0 | 0 | 29.041 | 0 | 0 | 0 |
| FEBRA2004224 | 5.789 | 0 | 0 | 7.087 | 8.618 | 8.349 | 2.568 |
| FEBRA2004293 | 0 | 6.099 | 0 | 0 | 0 | 19.171 | 2.948 |
| FEBRA2004325 | 0 | 0 | 0 | 0 | 0 | 0 | 7.812 |
| FEBRA2004485 | 0 | 0 | 0 | 0 | 0 | 0 | 7.696 |
| FEBRA2004490 | 14.095 | 0 | 0 | 0 | 0 | 0 | 15.631 |
| FEBRA2004592 | 0 | 0 | 0 | 0 | 59.888 | 0 | 0 |
| FEBRA2004628 | 0 | 0 | 0 | 0 | 31.851 | 0 | 0 |
| FEBRA2004818 | 0 | 6.248 | 0 | 0 | 5.068 | 0 | 0 |
| FEBRA2005291 | 0 | 0 | 0 | 0 | 0 | 13.076 | 0 |
| FEBRA2005361 | 8.405 | 19.282 | 12.406 | 2.858 | 5.214 | 0 | 0.777 |
| FEBRA2005416 | 2.148 | 0 | 3.804 | 1.096 | 3.997 | 0 | 2.382 |
| FEBRA2005427 | 28.630 | 0 | 0 | 0 | 0 | 0 | 0 |
| FEBRA2005476 | 0 | 0 | 0 | 0 | 0 | 0 | 2.888 |
| FEBRA2005572 | 1.782 | 0 | 0 | 0 | 0 | 0 | 5.928 |
| FEBRA2005752 | 0 | 0 | 0 | 0 | 0 | 15.008 | 0 |
| FEBRA2005788 | 24.677 | 0 | 0 | 5.035 | 0 | 0 | 0 |
| FEBRA2005824 | 3.730 | 1.711 | 9.249 | 12.558 | 13.883 | 4.035 | 8.686 |
| FEBRA2005995 | 2.804 | 0 | 4.966 | 0 | 0 | 0 | 6.218 |
| FEBRA2006055 | 0 | 6.060 | 0 | 0 | 0 | 0 | 0 |
| FEBRA2006092 | 3.109 | 1.427 | 0 | 0.634 | 0 | 0 | 1.379 |
| FEBRA2006255 | 14.333 | 0 | 4.616 | 9.306 | 4.850 | 4.698 | 10.115 |
| FEBRA2006270 | 0 | 0 | 0 | 0 | 0 | 0 | 1.296 |
| FEBRA2006357 | 11.922 | 0 | 0 | 34.464 | 2.465 | 0 | 4.407 |
| FEBRA2006368 | 3.107 | 14.258 | 0 | 3.170 | 0 | 0 | 3.446 |
| FEBRA2006370 | 0 | 0 | 0 | 14.576 | 0 | 0 | 0 |
| FEBRA2006372 | 0 | 0 | 0 | 1.370 | 0 | 0 | 1.489 |
| FEBRA2006401 | 0.502 | 0 | 0 | 0 | 0 | 0 | 0.557 |
| FEBRA2006485 | 3.042 | 0 | 0 | 0 | 0 | 10.968 | 0 |
| FEBRA2006519 | 11.891 | 0 | 0 | 0 | 0 | 0 | 0 |
| FEBRA2006521 | 7.648 | 0 | 0 | 0 | 0 | 0 | 16.963 |
| FEBRA2006553 | 3.956 | 0 | 0 | 0 | 0 | 0 | 0 |
| FEBRA2006627 | 0 | 0 | 0 | 10.526 | 0 | 0 | 0 |
| FEBRA2006808 | 0 | 0 | 14.542 | 8.376 | 0 | 0 | 0 |
| FEBRA2006817 | 0 | 0 | 0 | 0 | 0 | 59.124 | 0 |
| FEBRA2006890 | 44.515 | 0 | 0 | 0 | 0 | 0 | 0 |
| FEBRA2007176 | 28.630 | 0 | 0 | 0 | 0 | 0 | 0 |
| FEBRA2007212 | 0 | 0 | 0 | 16.019 | 0 | 0 | 4.353 |
| FEBRA2007534 | 0 | 0 | 0 | 36.825 | 0 | 0 | 0 |
| FEBRA2007544 | 14.689 | 0 | 0 | 4.995 | 0 | 0 | 2.715 |
| FEBRA2007551 | 0 | 0 | 0 | 0 | 0 | 0 | 30.789 |
| FEBRA2007589 | 13.674 | 0 | 0 | 20.927 | 0 | 0 | 15.164 |
| FEBRA2007613 | 3.318 | 0 | 11.756 | 6.771 | 12.351 | 11.965 | 0 |
| FEBRA2007622 | 0 | 0 | 0 | 1.053 | 3.840 | 0 | 0 |
| FEBRA2007801 | 4.937 | 0 | 8.745 | 7.556 | 0 | 0 | 5.475 |
| FEBRA2007818 | 0 | 0 | 0 | 0 | 0 | 0 | 6.201 |
| FEBRA2007823 | 28.630 | 0 | 0 | 0 | 0 | 0 | 0 |
| FEBRA2007880 | 0 | 0 | 0 | 3.840 | 0 | 0 | 4.174 |
| FEBRA2007900 | 7.751 | 0 | 0 | 0 | 0 | 0 | 8.595 |
| FEBRA2007901 | 0 | 8.503 | 0 | 7.562 | 0 | 0 | 0 |
| FEBRA2007957 | 54.616 | 0 | 0 | 0 | 0 | 0 | 0 |
| FEBRA2008036 | 4.285 | 3.277 | 0 | 4.372 | 5.316 | 0 | 4.752 |
| FEBRA2008081 | 2.124 | 3.249 | 0 | 0.722 | 2.636 | 0 | 0 |
| FEBRA2008086 | 0 | 0 | 0 | 0 | 0 | 0 | 30.789 |
| FEBRA2008087 | 0.358 | 0.822 | 0.635 | 0 | 0.667 | 0 | 0.596 |
| FEBRA2008201 | 2.398 | 0 | 0 | 0 | 0 | 0 | 2.659 |
| FEBRA2008210 | 0 | 0 | 23.761 | 0 | 0 | 0 | 0 |
| FEBRA2008255 | 0 | 23.219 | 0 | 0 | 0 | 0 | 0 |
| FEBRA2008266 | 0 | 0 | 0 | 0 | 0 | 0 | 10.077 |
| FEBRA2008287 | 0 | 0 | 0 | 3.007 | 0 | 0 | 6.537 |
| FEBRA2008302 | 0 | 7.325 | 0 | 1.086 | 0 | 11.512 | 3.540 |
| FEBRA2008360 | 0 | 0 | 0 | 0 | 0 | 0 | 11.338 |
| FEBRA2008583 | 0.925 | 0.606 | 0.936 | 1.483 | 0.984 | 1.430 | 3.371 |
| FEBRA2008662 | 11.110 | 0 | 0 | 3.239 | 0 | 11.446 | 1.760 |
| FEBRA2008755 | 0 | 0 | 5.819 | 0 | 0 | 0 | 0 |
| FEBRA2008861 | 21.424 | 0 | 0 | 3.974 | 0 | 7.023 | 4.320 |
| FEBRA2009022 | 0 | 0 | 0 | 0 | 12.430 | 0 | 0 |
| FEBRA2009185 | 4.543 | 6.253 | 3.219 | 8.342 | 10.145 | 3.276 | 0 |
| FEBRA2009289 | 0 | 0 | 0 | 14.316 | 0 | 0 | 0 |
| FEBRA2009328 | 4.955 | 11.368 | 0 | 0 | 0 | 0 | 0 |
| FEBRA2009352 | 0 | 0 | 0 | 29.041 | 0 | 0 | 0 |
| FEBRA2009362 | 7.614 | 0 | 26.973 | 0 | 0 | 27.453 | 0 |
| FEBRA2009419 | 5.285 | 3.031 | 0 | 2.696 | 0 | 0 | 4.396 |
| FEBRA2009514 | 0 | 0 | 0 | 3.379 | 0 | 0 | 0 |
| FEBRA2009588 | 19.382 | 0 | 0 | 0 | 0 | 0 | 5.373 |
| FEBRA2009846 | 0 | 0 | 0 | 0 | 0 | 0 | 22.893 |
| FEBRA2009986 | 6.427 | 0 | 0 | 19.673 | 0 | 0 | 7.128 |
| FEBRA2010719 | 0 | 0 | 0 | 17.703 | 0 | 0 | 0 |
| FEBRA2010746 | 8.579 | 0 | 0 | 0 | 0 | 0 | 0 |
| FEBRA2010768 | 0 | 0 | 0 | 0 | 0 | 59.124 | 0 |
| FEBRA2012181 | 16.511 | 0 | 0 | 16.845 | 0 | 0 | 0 |
| FEBRA2013699 | 7.157 | 0 | 0 | 7.301 | 0 | 0 | 0 |
| FEBRA2013951 | 0 | 0 | 0 | 0 | 0 | 59.124 | 0 |
| FEBRA2014297 | 0 | 14.710 | 7.571 | 2.180 | 0 | 7.706 | 0 |
| FEBRA2014417 | 7.559 | 6.194 | 3.826 | 3.856 | 4.019 | 5.841 | 1.198 |
| FEBRA2015085 | 1.525 | 0 | 0 | 1.556 | 0 | 5.498 | 5.072 |
| FEBRA2016398 | 17.280 | 39.644 | 0 | 0 | 0 | 0 | 0 |
| FEBRA2016572 | 0 | 0 | 0 | 0 | 0 | 0 | 21.790 |
| FEBRA2016583 | 0 | 0 | 0 | 29.041 | 0 | 0 | 0 |
| FEBRA2017024 | 0 | 0 | 0 | 0 | 0 | 0 | 21.399 |
| FEBRA2017533 | 5.455 | 0 | 0 | 5.566 | 0 | 0 | 0 |
| FEBRA2017680 | 0 | 21.815 | 0 | 9.701 | 0 | 0 | 0 |
| FEBRA2019242 | 0 | 0 | 0 | 8.277 | 0 | 0 | 0 |
| FEBRA2019711 | 0 | 4.851 | 0 | 0 | 0 | 0 | 2.345 |
| FEBRA2019867 | 0 | 0 | 0 | 0 | 0 | 0 | 30.789 |
| FEBRA2020845 | 28.630 | 0 | 0 | 0 | 0 | 0 | 0 |
| FEBRA2020886 | 12.124 | 0 | 0 | 12.369 | 0 | 0 | 0 |
| FEBRA2020977 | 0 | 0 | 0 | 5.376 | 19.613 | 0 | 0 |
| FEBRA2021171 | 0 | 24.406 | 0 | 0 | 0 | 38.357 | 0 |
| FEBRA2022013 | 0 | 0 | 0 | 0 | 0 | 0 | 10.426 |
| FEBRA2022055 | 0 | 1.221 | 0 | 0 | 0 | 0 | 0 |
| FEBRA2022504 | 0 | 3.768 | 11.636 | 0 | 0 | 0 | 0 |
| FEBRA2022696 | 0 | 47.925 | 0 | 0 | 0 | 0 | 0 |
| FEBRA2023227 | 0 | 0 | 0 | 0 | 0 | 0 | 5.680 |
| FEBRA2023377 | 15.515 | 0 | 27.481 | 0 | 0 | 0 | 0 |
| FEBRA2023927 | 4.073 | 0 | 0 | 8.311 | 0 | 0 | 9.033 |
| FEBRA2024019 | 5.364 | 6.153 | 4.751 | 4.105 | 14.974 | 9.671 | 2.974 |
| FEBRA2024136 | 0 | 0 | 0 | 0 | 42.701 | 0 | 0 |
| FEBRA2024570 | 0 | 0 | 0 | 0 | 74.913 | 0 | 0 |
| FEBRA2025427 | 0 | 0 | 0 | 0 | 9.226 | 0 | 0 |
| FEBRA2025838 | 0.821 | 1.885 | 0 | 2.514 | 0 | 2.962 | 0.911 |
| FEBRA2028503 | 0 | 0 | 0 | 0 | 52.044 | 0 | 7.753 |
| FEBRA2028516 | 8.007 | 0 | 0 | 4.668 | 0 | 0 | 1.268 |
| FELIV1000153 | 0 | 0.378 | 0 | 0.168 | 0 | 0 | 0.183 |
| HCASM1000115 | 2.073 | 0 | 0 | 5.287 | 0 | 0 | 0 |
| HCASM2000016 | 1.493 | 3.425 | 0 | 2.284 | 0 | 0 | 1.655 |
| HCASM2000138 | 12.671 | 0 | 0 | 4.309 | 0 | 0 | 4.684 |
| HCASM2000214 | 0 | 0 | 0 | 0 | 0 | 0 | 10.488 |
| HCASM2000363 | 0 | 1.560 | 0 | 0 | 0 | 2.452 | 3.017 |
| HCASM2003076 | 0 | 0 | 0 | 0 | 0 | 0 | 6.314 |
| HCASM2005388 | 3.537 | 0 | 0 | 3.609 | 0 | 0 | 0 |
| HCASM2005484 | 0 | 0 | 0 | 0 | 0 | 0 | 14.312 |
| HCASM2007047 | 3.431 | 0 | 0 | 0 | 0 | 0 | 0 |
| HCHON1000015 | 0 | 0 | 0 | 1.590 | 0 | 0 | 0 |
| HCHON1000030 | 0.726 | 0.832 | 0.643 | 0.555 | 2.025 | 0.654 | 0.603 |
| HCHON1000131 | 4.103 | 0 | 0 | 4.186 | 0 | 0 | 0 |
| HCHON1000166 | 0 | 0 | 10.657 | 0 | 0 | 0 | 3.336 |
| HCHON1000191 | 0 | 0 | 0 | 0 | 0 | 0 | 1.071 |
| HCHON2000028 | 0 | 0 | 5.620 | 1.619 | 0 | 0 | 5.278 |
| HCHON2000056 | 0.567 | 1.301 | 0 | 0 | 0 | 3.068 | 2.202 |
| HCHON2000062 | 0 | 0 | 0 | 0 | 0 | 0 | 4.648 |
| HCHON2000087 | 0.619 | 0 | 0 | 0 | 0 | 0 | 0.686 |
| HCHON2000160 | 0 | 6.928 | 0 | 2.054 | 0 | 0 | 2.233 |
| HCHON2000212 | 0 | 0 | 0 | 0 | 0 | 0 | 19.062 |
| HCHON2000226 | 0.403 | 0.925 | 2.857 | 0.411 | 0 | 1.454 | 0 |
| HCHON2000244 | 0.658 | 0 | 0 | 0.671 | 0 | 0 | 0 |
| HCHON2000295 | 0 | 1.005 | 0 | 0.447 | 0 | 0 | 0 |
| HCHON2000322 | 10.980 | 0 | 0 | 0 | 0 | 0 | 0 |
| HCHON2000364 | 0 | 0 | 0 | 0 | 0 | 0 | 0.493 |
| HCHON2000473 | 0 | 0 | 0 | 5.972 | 0 | 0 | 6.491 |
| HCHON2000475 | 0 | 3.054 | 0 | 0 | 0 | 0 | 1.476 |
| HCHON2000626 | 2.351 | 8.091 | 4.164 | 0 | 4.375 | 0 | 1.304 |
| HCHON2000663 | 0 | 0 | 0 | 8.703 | 0 | 0 | 18.920 |
| HCHON2000698 | 0 | 13.152 | 0 | 2.924 | 0 | 0 | 3.179 |
| HCHON2000738 | 0 | 0 | 0 | 0 | 11.082 | 0 | 0 |
| HCHON2000743 | 6.105 | 0 | 0 | 0 | 0 | 0 | 6.771 |
| HCHON2000751 | 3.570 | 0 | 0 | 0 | 0 | 0 | 3.959 |
| HCHON2000815 | 2.793 | 0 | 0 | 0 | 10.394 | 0 | 0 |
| HCHON2000826 | 3.578 | 0 | 0 | 3.651 | 2.664 | 0 | 3.968 |
| HCHON2001039 | 1.116 | 0 | 0 | 2.277 | 4.153 | 0 | 1.237 |
| HCHON2001084 | 0 | 5.268 | 0 | 0 | 0 | 0 | 2.546 |
| HCHON2001099 | 0 | 0 | 0 | 2.783 | 0 | 0 | 3.025 |
| HCHON2001108 | 0 | 4.899 | 0 | 0 | 0 | 0 | 0 |
| HCHON2001200 | 0.433 | 0 | 0 | 1.324 | 0 | 0 | 1.919 |
| HCHON2001217 | 3.123 | 0 | 0 | 2.124 | 0 | 0 | 5.771 |
| HCHON2001359 | 1.703 | 0 | 3.016 | 2.606 | 0 | 0 | 0.944 |
| HCHON2001407 | 0 | 1.812 | 0 | 0 | 2.939 | 0 | 1.751 |
| HCHON2001434 | 13.748 | 3.505 | 5.412 | 1.558 | 0 | 5.508 | 5.082 |
| HCHON2001535 | 18.444 | 0 | 0 | 0 | 0 | 0 | 0 |
| HCHON2001665 | 0 | 0 | 0 | 6.297 | 0 | 0 | 0 |
| HCHON2001801 | 0 | 0 | 35.892 | 0 | 0 | 0 | 0 |
| HCHON2001853 | 0 | 0 | 0 | 11.428 | 0 | 0 | 0 |
| HCHON2002247 | 5.615 | 0 | 9.945 | 2.864 | 0 | 0 | 9.340 |
| HCHON2002676 | 13.647 | 0 | 0 | 0 | 0 | 0 | 0 |
| HCHON2004002 | 0 | 0 | 0 | 0 | 0 | 0 | 1.741 |
| HCHON2005921 | 0 | 0 | 0 | 12.694 | 0 | 0 | 9.198 |
| HCHON2006250 | 1.565 | 0 | 0 | 0 | 0 | 0 | 1.735 |
| HCHON2006722 | 0 | 0 | 35.892 | 0 | 0 | 0 | 0 |
| HCHON2006770 | 2.822 | 0 | 0 | 0 | 0 | 0 | 0 |
| HCHON2006786 | 0 | 0 | 0 | 13.885 | 0 | 0 | 0 |
| HCHON2010543 | 0 | 0 | 0 | 9.152 | 0 | 0 | 0 |
| HEART1000074 | 0.759 | 1.742 | 0 | 0 | 0 | 0 | 0 |
| HEART1000118 | 0 | 0 | 0 | 0 | 0 | 0 | 12.291 |
| HEART1000142 | 0 | 0 | 0 | 1.819 | 0 | 0 | 0 |
| HEART1000149 | 0 | 0 | 0 | 0.958 | 0 | 0 | 1.041 |
| HEART1000185 | 0.791 | 0 | 0 | 0 | 0 | 0 | 0 |
| HEART2000444 | 0 | 0 | 0 | 8.592 | 0 | 0 | 0 |
| HEART2000541 | 0 | 3.070 | 4.740 | 0 | 0 | 0 | 0 |
| HEART2000959 | 0 | 0 | 0 | 0 | 0 | 0 | 13.062 |
| HEART2003168 | 0 | 0 | 0 | 0 | 0 | 0 | 14.253 |
| HEART2003852 | 0 | 0 | 0 | 0 | 14.501 | 14.048 | 0 |
| HEART2006195 | 0 | 0 | 0 | 9.669 | 0 | 0 | 0 |
| HEART2006521 | 0 | 5.487 | 0 | 0 | 0 | 0 | 2.652 |
| HEART2007031 | 0 | 0 | 0 | 11.593 | 0 | 0 | 12.601 |
| HEART2007231 | 0 | 0 | 0 | 4.942 | 0 | 0 | 0 |
| HEART2007696 | 0 | 0 | 0 | 0 | 0 | 17.959 | 0 |
| HEART2008509 | 0 | 0 | 0 | 0 | 0 | 21.275 | 0 |
| HEART2009000 | 0 | 23.712 | 0 | 0 | 0 | 0 | 0 |
| HHDPC1000065 | 0 | 0 | 0 | 27.988 | 0 | 0 | 0 |
| HHDPC1000083 | 0 | 2.246 | 0 | 0 | 3.643 | 0 | 2.171 |
| HHDPC1000114 | 2.906 | 0 | 0 | 1.483 | 2.704 | 0 | 3.223 |
| HHDPC1000118 | 2.096 | 0 | 0 | 6.415 | 0 | 0 | 0 |
| HHDPC1000163 | 0 | 0 | 4.455 | 0 | 0 | 4.534 | 0 |
| HHDPC2000055 | 0 | 0 | 6.478 | 1.866 | 0 | 0 | 0 |
| HHDPC2000104 | 0 | 0 | 0 | 0 | 0 | 0 | 2.052 |
| HHDPC2000115 | 0 | 6.002 | 0 | 0 | 0 | 0 | 2.901 |
| HHDPC2000149 | 0 | 0 | 0 | 0 | 0 | 0 | 4.955 |
| HHDPC2000258 | 0 | 0 | 33.472 | 0 | 0 | 0 | 0 |
| HHDPC2000455 | 0 | 0 | 0 | 1.121 | 0 | 0 | 0 |
| HHDPC2000456 | 0 | 0 | 0 | 1.584 | 0 | 5.598 | 0 |
| HHDPC2003439 | 1.780 | 0 | 0 | 1.816 | 0.947 | 0 | 0.846 |
| HHDPC2003983 | 1.671 | 0 | 0.986 | 0.852 | 0 | 0 | 1.544 |
| HHDPC2005794 | 0 | 0 | 0 | 8.116 | 0 | 0 | 8.821 |
| HHDPC2007267 | 0 | 0 | 0 | 0 | 0 | 0 | 1.083 |
| HHDPC2007775 | 0 | 0 | 0 | 11.025 | 0 | 0 | 0 |
| HHDPC2008816 | 0 | 0 | 0 | 0 | 0 | 0 | 13.606 |
| HHDPC2009528 | 0 | 0 | 0 | 6.631 | 0 | 0 | 14.415 |
| HLUNG1000055 | 0 | 0 | 1.918 | 1.105 | 4.029 | 1.952 | 1.201 |
| HLUNG2000063 | 2.466 | 0 | 0 | 2.516 | 0 | 0 | 2.735 |
| HLUNG2000232 | 12.603 | 0 | 0 | 0 | 0 | 0 | 0 |
| HLUNG2000314 | 0 | 0 | 0 | 5.006 | 0 | 8.846 | 0 |
| HLUNG2000315 | 0 | 0 | 0 | 0 | 0 | 0 | 16.914 |
| HLUNG2000412 | 0 | 0 | 0 | 0 | 0 | 0 | 2.969 |
| HLUNG2000501 | 0.858 | 5.904 | 0 | 1.750 | 3.193 | 3.093 | 0 |
| HLUNG2000751 | 17.277 | 0 | 0 | 0 | 0 | 0 | 0 |
| HLUNG2000846 | 22.589 | 0 | 0 | 32.264 | 0 | 0 | 5.010 |
| HLUNG2000884 | 0 | 0 | 15.166 | 2.184 | 0 | 7.718 | 0 |
| HLUNG2001146 | 5.242 | 12.026 | 0 | 0 | 0 | 0 | 5.813 |
| HLUNG2001439 | 0 | 0 | 0 | 0 | 0 | 0 | 2.934 |
| HLUNG2001459 | 0 | 15.036 | 0 | 0 | 0 | 0 | 0 |
| HLUNG2001518 | 4.374 | 0 | 0 | 5.578 | 8.140 | 0 | 3.638 |
| HLUNG2001996 | 0 | 0 | 0 | 0 | 0 | 0 | 23.216 |
| HLUNG2002465 | 1.209 | 2.775 | 4.285 | 3.702 | 0 | 0 | 1.341 |
| HLUNG2002648 | 0 | 8.292 | 0 | 0 | 0 | 0 | 8.016 |
| HLUNG2002811 | 7.310 | 0 | 0 | 2.486 | 0 | 0 | 2.702 |
| HLUNG2002916 | 0 | 0 | 0 | 8.802 | 0 | 0 | 9.567 |
| HLUNG2003003 | 0 | 0 | 0 | 16.306 | 0 | 0 | 0 |
| HLUNG2003042 | 0 | 0 | 0 | 2.429 | 0 | 0 | 0 |
| HLUNG2004037 | 0 | 0 | 0 | 15.575 | 0 | 0 | 0 |
| HLUNG2004067 | 0 | 25.262 | 0 | 0 | 0 | 0 | 0 |
| HLUNG2004159 | 0 | 4.159 | 0 | 0 | 0 | 0 | 2.011 |
| HLUNG2004170 | 12.324 | 0 | 0 | 0 | 0 | 0 | 0 |
| HLUNG2004534 | 0 | 0 | 0 | 2.959 | 0 | 0 | 0 |
| HLUNG2005230 | 0 | 0 | 0 | 0 | 0 | 0 | 7.605 |
| HLUNG2006570 | 0 | 0 | 0 | 0 | 0 | 0 | 7.167 |
| HLUNG2006812 | 0 | 0 | 0 | 0 | 0 | 0 | 6.558 |
| HLUNG2008139 | 11.461 | 0 | 0 | 23.386 | 0 | 0 | 0 |
| HLUNG2008153 | 0 | 0 | 24.114 | 0 | 0 | 0 | 0 |
| HLUNG2009067 | 0 | 0 | 0 | 0 | 0 | 0 | 23.216 |
| HLUNG2009225 | 6.033 | 0 | 0 | 1.539 | 11.226 | 0 | 5.017 |
| HLUNG2011461 | 21.423 | 0 | 0 | 0 | 0 | 0 | 0 |
| HLUNG2015184 | 0 | 0 | 0 | 0 | 0 | 0 | 14.521 |
| HLUNG2017262 | 1.586 | 0 | 0 | 6.472 | 0 | 0 | 5.276 |
| HSYRA1000062 | 0.857 | 0 | 0 | 0 | 3.188 | 0 | 0.950 |
| HSYRA1000119 | 1.839 | 2.110 | 1.629 | 2.815 | 3.423 | 0 | 0 |
| HSYRA1000152 | 1.193 | 0 | 0 | 1.217 | 0 | 0 | 1.323 |
| HSYRA1000178 | 0 | 0 | 0 | 2.558 | 0 | 0 | 2.781 |
| HSYRA2000137 | 0 | 0 | 0 | 0 | 16.873 | 16.346 | 0 |
| HSYRA2000159 | 9.163 | 2.489 | 1.281 | 7.011 | 1.346 | 1.304 | 3.343 |
| HSYRA2000190 | 0 | 0 | 0 | 0 | 0 | 8.564 | 0 |
| HSYRA2000224 | 5.394 | 0 | 0 | 3.669 | 0 | 0 | 0 |
| HSYRA2000232 | 2.958 | 1.696 | 5.239 | 0 | 0 | 0 | 0 |
| HSYRA2000248 | 0.680 | 0 | 0 | 1.387 | 0 | 0 | 3.768 |
| HSYRA2000255 | 0 | 0 | 0 | 0.458 | 0 | 0 | 0 |
| HSYRA2000332 | 0 | 0 | 0 | 0.796 | 0 | 0 | 0 |
| HSYRA2000629 | 0 | 7.657 | 0 | 0 | 0 | 0 | 0 |
| HSYRA2000640 | 0 | 0 | 0 | 2.607 | 0 | 0 | 3.779 |
| HSYRA2000743 | 4.643 | 0 | 0 | 5.527 | 2.880 | 0 | 4.291 |
| HSYRA2000787 | 0 | 7.136 | 0 | 0 | 11.577 | 11.215 | 3.449 |
| HSYRA2000828 | 1.425 | 3.268 | 0 | 1.453 | 0 | 5.137 | 0 |
| HSYRA2000925 | 0.443 | 0.508 | 0 | 0.226 | 0 | 0 | 0.737 |
| HSYRA2001105 | 16.531 | 0 | 0 | 0 | 10.255 | 0 | 3.055 |
| HSYRA2001138 | 1.020 | 1.755 | 1.806 | 1.040 | 5.693 | 0.919 | 2.262 |
| HSYRA2001232 | 0 | 0 | 0 | 0 | 0 | 0 | 4.290 |
| HSYRA2001353 | 0 | 0 | 0 | 0 | 18.885 | 0 | 5.627 |
| HSYRA2001396 | 1.519 | 0 | 5.382 | 1.550 | 0 | 5.478 | 3.370 |
| HSYRA2001476 | 0 | 0 | 1.710 | 0 | 0 | 0 | 0.535 |
| HSYRA2001484 | 0 | 0 | 0 | 0 | 0 | 32.543 | 0 |
| HSYRA2001574 | 0.752 | 0 | 2.666 | 0.768 | 2.800 | 0 | 0 |
| HSYRA2001595 | 0.570 | 1.307 | 0 | 0 | 0 | 2.054 | 0 |
| HSYRA2001615 | 4.148 | 0 | 0 | 4.232 | 0 | 0 | 2.300 |
| HSYRA2001621 | 0 | 4.210 | 0.650 | 0 | 2.049 | 1.323 | 0.203 |
| HSYRA2001638 | 0 | 0 | 0 | 2.307 | 0 | 8.155 | 0 |
| HSYRA2001983 | 0 | 0 | 0 | 0 | 0 | 0 | 5.352 |
| HSYRA2005628 | 0 | 0 | 0 | 0 | 0 | 0 | 7.437 |
| IMR321000158 | 0 | 3.493 | 0 | 0.777 | 2.833 | 2.745 | 1.688 |
| IMR321000210 | 1.014 | 4.651 | 0 | 1.034 | 0 | 0 | 1.124 |
| IMR321000219 | 5.894 | 0 | 0 | 8.877 | 2.089 | 0 | 3.113 |
| IMR321000242 | 0 | 0 | 0 | 0 | 20.930 | 0 | 0 |
| IMR321000253 | 0 | 0 | 3.608 | 0 | 0 | 0 | 1.129 |
| IMR321000266 | 5.660 | 6.492 | 0 | 0 | 0 | 0 | 0 |
| IMR322000072 | 0.802 | 0 | 0 | 0 | 0 | 2.893 | 0 |
| IMR322000121 | 0 | 0 | 0 | 1.137 | 4.149 | 0 | 0 |
| IMR322000127 | 3.098 | 0 | 5.488 | 3.161 | 0 | 0 | 0 |
| IMR322000144 | 0 | 0 | 0 | 0 | 6.071 | 5.881 | 0 |
| IMR322000152 | 0 | 0 | 0 | 8.265 | 0 | 0 | 0 |
| IMR322000223 | 0.681 | 0 | 0 | 0 | 0 | 2.455 | 0 |
| IMR322000243 | 0 | 0 | 0 | 2.626 | 0 | 0 | 0.951 |
| IMR322000302 | 0 | 0 | 0 | 6.053 | 0 | 0 | 0 |
| IMR322000316 | 5.394 | 0.952 | 0 | 5.080 | 1.544 | 8.977 | 4.602 |
| IMR322000518 | 6.142 | 0 | 0 | 0 | 0 | 22.148 | 0 |
| IMR322000555 | 5.966 | 0 | 0 | 0 | 0 | 0 | 6.616 |
| IMR322000604 | 22.082 | 0 | 0 | 0 | 0 | 0 | 0 |
| IMR322000609 | 22.082 | 0 | 0 | 0 | 0 | 0 | 0 |
| IMR322000730 | 0 | 0.943 | 0 | 0.140 | 0 | 0.494 | 0.456 |
| IMR322000775 | 4.146 | 0 | 0 | 0 | 0 | 0 | 18.391 |
| IMR322000819 | 0 | 0 | 0 | 0 | 15.864 | 0 | 0 |
| IMR322000838 | 0 | 0 | 0 | 0 | 0 | 0 | 23.913 |
| IMR322000918 | 0 | 0 | 10.384 | 2.991 | 10.910 | 0 | 0 |
| IMR322000935 | 0 | 0 | 0 | 4.582 | 16.717 | 0 | 0 |
| IMR322001185 | 0 | 0 | 0 | 0 | 0 | 50.541 | 0 |
| IMR322001218 | 0 | 0 | 0 | 0 | 0 | 4.037 | 0 |
| IMR322001317 | 0.790 | 1.812 | 0 | 0 | 0 | 11.389 | 0 |
| IMR322001332 | 0 | 0 | 0 | 0 | 0 | 9.600 | 0 |
| IMR322001380 | 0 | 9.096 | 0 | 2.022 | 0 | 21.443 | 2.198 |
| IMR322001435 | 0.939 | 2.155 | 0 | 0.958 | 0 | 0 | 3.126 |
| IMR322001541 | 1.692 | 0 | 0 | 0 | 0 | 6.100 | 0 |
| IMR322001584 | 2.497 | 0 | 0 | 1.274 | 0 | 0 | 0 |
| IMR322001600 | 0 | 0 | 0 | 0.329 | 0 | 0.581 | 0 |
| IMR322001710 | 1.939 | 4.450 | 0 | 0 | 0 | 0 | 0 |
| IMR322001879 | 9.638 | 0 | 0 | 9.833 | 0 | 0 | 0 |
| IMR322002035 | 36.176 | 0 | 0 | 0 | 0 | 0 | 0 |
| IMR322002993 | 15.565 | 0 | 0 | 0 | 0 | 0 | 0 |
| IMR322013805 | 13.508 | 0 | 0 | 27.563 | 0 | 0 | 0 |
| IMR322019070 | 0 | 0 | 0 | 8.189 | 0 | 0 | 2.967 |
| JCMLC2000273 | 0 | 7.090 | 0 | 0 | 0 | 0 | 0 |
| KIDNE1000104 | 16.584 | 0 | 0 | 0 | 0 | 0 | 0 |
| KIDNE1000145 | 2.765 | 0 | 0 | 0 | 0 | 0 | 0 |
| KIDNE2000085 | 1.028 | 0 | 0 | 0 | 3.827 | 0 | 0 |
| KIDNE2000252 | 6.837 | 0 | 6.055 | 3.488 | 0 | 3.082 | 2.843 |
| KIDNE2000266 | 4.210 | 0 | 0 | 4.296 | 0 | 0 | 0 |
| KIDNE2000315 | 6.829 | 0 | 0 | 0 | 0 | 0 | 0 |
| KIDNE2000317 | 0 | 0 | 50.400 | 0 | 0 | 0 | 0 |
| KIDNE2000330 | 0 | 0 | 0 | 0 | 0 | 0 | 3.786 |
| KIDNE2000383 | 0 | 0 | 17.446 | 5.024 | 0 | 0 | 5.461 |
| KIDNE2000403 | 0.826 | 0 | 0 | 0 | 0 | 0 | 0 |
| KIDNE2000422 | 22.290 | 0 | 0 | 0 | 0 | 0 | 0 |
| KIDNE2000497 | 0 | 0 | 0 | 0 | 0 | 0 | 3.477 |
| KIDNE2000517 | 0 | 7.186 | 16.644 | 4.793 | 0 | 11.294 | 0 |
| KIDNE2000574 | 0.749 | 0 | 2.652 | 2.291 | 0 | 8.097 | 0 |
| KIDNE2000909 | 0 | 4.710 | 0 | 0 | 0 | 0 | 2.277 |
| KIDNE2000947 | 2.527 | 0 | 0 | 0 | 0 | 0 | 2.803 |
| KIDNE2001117 | 22.290 | 0 | 0 | 0 | 0 | 0 | 0 |
| KIDNE2001162 | 1.400 | 2.142 | 0 | 0 | 1.737 | 1.683 | 0 |
| KIDNE2001467 | 1.825 | 1.196 | 0 | 2.659 | 0.970 | 0.940 | 3.179 |
| KIDNE2001636 | 0 | 0 | 0 | 0 | 0 | 0 | 5.240 |
| KIDNE2002191 | 0 | 0 | 0 | 0 | 0 | 0 | 7.905 |
| KIDNE2002252 | 0 | 0 | 0 | 0 | 0 | 0 | 2.417 |
| KIDNE2002725 | 10.289 | 23.605 | 0 | 0 | 0 | 0 | 11.410 |
| KIDNE2002798 | 0 | 0 | 0 | 0 | 0 | 0 | 13.421 |
| KIDNE2002883 | 0 | 5.203 | 0 | 0 | 8.442 | 8.178 | 0 |
| KIDNE2003305 | 0 | 0 | 0 | 0 | 0 | 0 | 0.933 |
| KIDNE2003941 | 0.504 | 0 | 0 | 0.515 | 1.877 | 0 | 0.559 |
| KIDNE2004475 | 0 | 0 | 0 | 2.626 | 0 | 9.281 | 0 |
| KIDNE2005042 | 8.051 | 0 | 28.522 | 16.428 | 0 | 0 | 8.928 |
| KIDNE2005543 | 0 | 0 | 0 | 18.168 | 0 | 0 | 19.748 |
| KIDNE2005676 | 9.848 | 0 | 0 | 1.435 | 0 | 0 | 1.560 |
| KIDNE2005937 | 0 | 0 | 0 | 5.529 | 0 | 0 | 0 |
| KIDNE2006009 | 0 | 0 | 0 | 0 | 0 | 13.293 | 0 |
| KIDNE2006014 | 0 | 0 | 0 | 3.029 | 0 | 0 | 0 |
| KIDNE2006030 | 8.536 | 4.896 | 15.120 | 6.532 | 0 | 0 | 9.466 |
| KIDNE2006039 | 0 | 0 | 0 | 0 | 0 | 0 | 17.506 |
| KIDNE2006248 | 0.311 | 0.713 | 1.101 | 0 | 0 | 2.242 | 1.034 |
| KIDNE2006465 | 3.094 | 0 | 0 | 0 | 0 | 0 | 3.431 |
| KIDNE2006580 | 7.013 | 0 | 0 | 14.310 | 0 | 0 | 7.777 |
| KIDNE2006760 | 0 | 15.476 | 0 | 0 | 0 | 0 | 7.481 |
| KIDNE2007328 | 0.885 | 0 | 0 | 4.513 | 0 | 0 | 0.981 |
| KIDNE2007352 | 5.404 | 0.954 | 1.473 | 2.121 | 0 | 0 | 0.922 |
| KIDNE2007954 | 6.324 | 0 | 0 | 0 | 0 | 7.601 | 4.675 |
| KIDNE2008048 | 2.682 | 0 | 1.900 | 4.378 | 0 | 0 | 2.380 |
| KIDNE2008069 | 2.334 | 5.356 | 24.810 | 3.573 | 26.066 | 8.417 | 0 |
| KIDNE2008362 | 4.566 | 0 | 0 | 13.976 | 0 | 32.928 | 0 |
| KIDNE2008403 | 23.120 | 3.120 | 0 | 22.200 | 0 | 0 | 1.508 |
| KIDNE2008404 | 0 | 0 | 0 | 0 | 0 | 0 | 5.142 |
| KIDNE2008666 | 22.290 | 0 | 0 | 0 | 0 | 0 | 0 |
| KIDNE2008758 | 0 | 0 | 0 | 0 | 0 | 0 | 24.133 |
| KIDNE2008914 | 0 | 0 | 0 | 17.747 | 0 | 0 | 0 |
| KIDNE2008987 | 0 | 6.609 | 0 | 0 | 0 | 0 | 0 |
| KIDNE2009367 | 12.812 | 1.729 | 0 | 19.992 | 2.805 | 0 | 10.030 |
| KIDNE2009605 | 0 | 0 | 0 | 0 | 0 | 0 | 16.747 |
| KIDNE2010049 | 3.438 | 0 | 0 | 0 | 0 | 0 | 0 |
| KIDNE2010265 | 2.363 | 0 | 0 | 0 | 0 | 0 | 0 |
| KIDNE2010430 | 0 | 21.878 | 0 | 0 | 0 | 0 | 10.575 |
| KIDNE2010750 | 0 | 0 | 0 | 0 | 0 | 0 | 11.811 |
| KIDNE2011314 | 0 | 0 | 0 | 0 | 0 | 0 | 24.133 |
| KIDNE2012440 | 0 | 0 | 0 | 3.612 | 6.588 | 0 | 3.926 |
| KIDNE2012710 | 0 | 0 | 0 | 0 | 0 | 0 | 10.501 |
| KIDNE2013845 | 2.235 | 0 | 0 | 1.140 | 4.160 | 0 | 2.479 |
| KIDNE2014290 | 0 | 0 | 0 | 0 | 0 | 0 | 0.777 |
| KIDNE2014320 | 0 | 0 | 0 | 0 | 0 | 0 | 24.133 |
| KIDNE2015433 | 26.508 | 0 | 0 | 0 | 32.888 | 0 | 9.799 |
| KIDNE2015445 | 0 | 0 | 12.171 | 3.505 | 0 | 0 | 0 |
| KIDNE2016327 | 0 | 0 | 0 | 0 | 0 | 0 | 19.403 |
| KIDNE2016371 | 0 | 0 | 0 | 9.192 | 0 | 0 | 9.991 |
| KIDNE2017040 | 0 | 0 | 0 | 6.861 | 0 | 0 | 0 |
| KIDNE2017343 | 0 | 0 | 0 | 0 | 0 | 0 | 7.325 |
| KIDNE2018352 | 0 | 0 | 0 | 3.638 | 0 | 0 | 11.864 |
| KIDNE2018493 | 0 | 0 | 0 | 0 | 13.262 | 0 | 0 |
| LIVER1000017 | 0 | 0 | 0.527 | 0 | 0 | 0 | 0 |
| LIVER1000079 | 0 | 0 | 0 | 0 | 6.522 | 0 | 0 |
| LIVER1000104 | 0 | 0 | 0.730 | 0 | 0 | 0 | 0.457 |
| LIVER1000126 | 0 | 0 | 0 | 0 | 28.534 | 0 | 0 |
| LIVER1000132 | 0 | 0 | 0 | 0 | 1.862 | 0 | 3.330 |
| LIVER1000230 | 0 | 0 | 20.544 | 0 | 0 | 0 | 0 |
| LIVER2000033 | 0 | 0 | 4.901 | 0 | 5.149 | 0 | 0 |
| LIVER2000416 | 2.263 | 0 | 0 | 2.308 | 0 | 8.158 | 0 |
| LIVER2001608 | 0 | 0 | 0 | 0 | 0 | 0 | 2.913 |
| LIVER2001835 | 0 | 0 | 29.011 | 0 | 0 | 0 | 0 |
| LIVER2002638 | 0 | 0 | 0 | 0 | 0 | 29.377 | 0 |
| LIVER2002842 | 0 | 4.380 | 0 | 0 | 0 | 0 | 6.351 |
| LIVER2005028 | 0 | 0 | 0 | 7.709 | 0 | 0 | 0 |
| LIVER2005789 | 0 | 0 | 0 | 0 | 0 | 0 | 4.992 |
| LIVER2005973 | 0 | 0 | 0 | 10.530 | 0 | 0 | 0 |
| LIVER2006410 | 0 | 0 | 0 | 0 | 0 | 0 | 11.342 |
| LIVER2008465 | 0 | 0 | 0 | 6.752 | 0 | 0 | 7.339 |
| LIVER2008751 | 0 | 0 | 0 | 0 | 0 | 0 | 9.629 |
| MAMGL1000017 | 0 | 0 | 0 | 0 | 1.132 | 0 | 0 |
| MAMGL1000032 | 0 | 0.370 | 0.571 | 0.164 | 0 | 0.581 | 0.179 |
| MAMGL1000035 | 0.201 | 0 | 0 | 0 | 0 | 0 | 0 |
| MAMGL1000083 | 0 | 0 | 0 | 0.296 | 0 | 0 | 0.321 |
| MAMGL1000100 | 0 | 0 | 0 | 0 | 0 | 2.129 | 0 |
| MESAN1000032 | 0 | 0 | 0 | 0 | 0 | 0 | 23.021 |
| MESAN1000050 | 4.816 | 0 | 0 | 0 | 0 | 0 | 3.560 |
| MESAN1000079 | 0 | 0 | 0 | 14.664 | 0 | 0 | 15.939 |
| MESAN1000080 | 0 | 0 | 0 | 0 | 0 | 0 | 1.583 |
| MESAN1000101 | 0 | 0 | 0 | 0 | 0 | 0 | 6.401 |
| MESAN1000126 | 1.786 | 0 | 0 | 3.644 | 0 | 0 | 1.980 |
| MESAN2000092 | 8.849 | 0 | 0 | 0 | 0 | 0 | 9.813 |
| MESAN2000149 | 0 | 0 | 17.405 | 0 | 9.143 | 0 | 5.448 |
| MESAN2000264 | 0 | 4.521 | 0 | 0 | 0 | 0 | 0 |
| MESAN2000267 | 1.638 | 0.939 | 0 | 2.089 | 0 | 0 | 2.725 |
| MESAN2000501 | 0 | 0 | 0 | 0 | 0 | 0 | 3.327 |
| MESAN2000572 | 0 | 2.346 | 0 | 1.043 | 0 | 3.686 | 3.401 |
| MESAN2000608 | 0.786 | 0 | 0 | 0.802 | 2.927 | 0 | 0.872 |
| MESAN2001154 | 1.332 | 0 | 0 | 0 | 9.918 | 0 | 0 |
| MESAN2001627 | 13.080 | 0 | 0 | 0 | 0 | 0 | 0 |
| MESAN2002086 | 0 | 0 | 0 | 0.849 | 0 | 0 | 1.847 |
| MESAN2002122 | 8.870 | 0 | 0 | 9.050 | 0 | 0 | 9.836 |
| MESAN2002186 | 0 | 0 | 0 | 0 | 0 | 7.904 | 0 |
| MESAN2002519 | 0 | 0 | 0 | 4.732 | 0 | 0 | 5.143 |
| MESAN2002724 | 0.922 | 0 | 0 | 1.882 | 0 | 0 | 0 |
| MESAN2002844 | 0 | 0 | 0 | 7.393 | 0 | 0 | 8.036 |
| MESAN2002940 | 3.180 | 0 | 0 | 0 | 0 | 0 | 0 |
| MESAN2003190 | 0 | 0 | 0 | 0 | 0 | 0 | 19.624 |
| MESAN2003444 | 3.725 | 0 | 0 | 3.801 | 0 | 13.432 | 0 |
| MESAN2003622 | 0 | 0 | 0 | 0 | 0 | 0 | 1.999 |
| MESAN2003646 | 0 | 0 | 0 | 0 | 0 | 0 | 23.021 |
| MESAN2003709 | 0 | 0 | 29.383 | 0 | 0 | 0 | 0 |
| MESAN2005284 | 0 | 0 | 0 | 0 | 0 | 0 | 10.755 |
| MESAN2005689 | 0 | 0 | 0 | 3.165 | 0 | 0 | 10.321 |
| MESAN2005766 | 0 | 2.262 | 0 | 0 | 0 | 0 | 5.468 |
| MESAN2005957 | 0 | 0 | 0 | 10.074 | 0 | 0 | 0 |
| MESAN2005958 | 5.386 | 0 | 0 | 2.748 | 10.023 | 0 | 2.986 |
| MESAN2006043 | 0 | 0 | 0 | 8.126 | 0 | 0 | 8.833 |
| MESAN2006401 | 3.618 | 12.451 | 6.409 | 5.537 | 13.467 | 6.523 | 4.012 |
| MESAN2006563 | 0.691 | 0 | 0 | 0 | 2.570 | 0 | 1.532 |
| MESAN2006743 | 0 | 0 | 0 | 0 | 0 | 0 | 8.549 |
| MESAN2006953 | 0 | 0 | 0 | 6.996 | 0 | 0 | 7.604 |
| MESAN2007755 | 0 | 0 | 0 | 9.333 | 0 | 0 | 0 |
| MESAN2008926 | 3.192 | 0 | 0 | 0 | 0 | 0 | 0 |
| MESAN2008936 | 3.978 | 0 | 0 | 4.059 | 0 | 0 | 0 |
| MESAN2009081 | 0 | 10.799 | 0 | 9.604 | 17.519 | 0 | 0 |
| MESAN2009503 | 0 | 38.222 | 0 | 0 | 0 | 0 | 0 |
| MESAN2009580 | 0 | 2.548 | 0 | 1.133 | 4.133 | 0 | 1.232 |
| MESAN2010664 | 0 | 19.910 | 0 | 0 | 0 | 0 | 9.624 |
| MESAN2011632 | 0 | 0 | 0 | 21.577 | 0 | 0 | 0 |
| MESAN2011984 | 0 | 0 | 6.044 | 1.741 | 6.350 | 0 | 1.892 |
| MESAN2012054 | 12.754 | 0 | 0 | 15.615 | 0 | 0 | 0 |
| MESAN2012113 | 0 | 0 | 0 | 6.019 | 0 | 0 | 6.543 |
| MESAN2013283 | 0 | 38.222 | 0 | 0 | 0 | 0 | 0 |
| MESAN2013284 | 2.456 | 0 | 0 | 5.012 | 0 | 0 | 1.362 |
| MESAN2016409 | 0 | 38.222 | 0 | 0 | 0 | 0 | 0 |
| MESAN2017133 | 17.548 | 0 | 0 | 0 | 0 | 0 | 0 |
| MESTC1000042 | 2.245 | 0 | 0 | 0 | 0 | 0 | 0 |
| NB9N41000011 | 2.128 | 0 | 0 | 0 | 0 | 0 | 2.360 |
| NB9N41000047 | 0 | 0 | 0 | 0 | 0 | 0 | 2.915 |
| NB9N41000142 | 0 | 0 | 0 | 0 | 0 | 0 | 2.969 |
| NB9N41000340 | 0 | 0 | 0 | 0 | 0 | 5.229 | 0 |
| NB9N42000281 | 1.912 | 4.387 | 0 | 0 | 0 | 6.894 | 0 |
| NB9N42000342 | 0 | 1.654 | 0 | 0.736 | 0 | 0 | 3.198 |
| NB9N42000430 | 0 | 6.350 | 0 | 0 | 0 | 0 | 0 |
| NB9N42001300 | 5.414 | 0 | 0 | 0 | 0 | 0 | 3.002 |
| NHNPC2000062 | 0 | 0 | 0 | 0 | 0 | 0 | 2.324 |
| NHNPC2000206 | 0 | 1.575 | 2.433 | 0.701 | 0 | 0 | 3.046 |
| NHNPC2001931 | 0.477 | 0 | 0 | 0 | 0 | 0 | 0.529 |
| NOVAR1000015 | 0 | 0 | 10.757 | 0 | 0 | 0 | 0 |
| NOVAR2000038 | 1.242 | 4.275 | 6.602 | 0 | 9.248 | 17.918 | 0 |
| NOVAR2001783 | 4.027 | 0 | 0 | 0 | 0 | 0 | 0 |
| NT2NE1000004 | 0 | 0 | 0 | 0 | 0 | 0 | 9.158 |
| NT2NE1000018 | 0 | 5.705 | 0 | 5.074 | 0 | 0 | 2.758 |
| NT2NE1000073 | 7.963 | 0 | 0 | 0 | 0 | 0 | 0 |
| NT2NE1000163 | 8.911 | 0.929 | 0 | 10.745 | 0 | 0 | 2.246 |
| NT2NE1000181 | 0 | 0 | 0 | 18.624 | 0 | 0 | 0 |
| NT2NE2000056 | 6.285 | 0.901 | 0 | 7.615 | 4.386 | 1.416 | 3.921 |
| NT2NE2000174 | 0 | 0.875 | 1.352 | 0 | 0 | 0 | 0.423 |
| NT2NE2000195 | 0 | 0 | 0 | 1.568 | 5.721 | 0 | 0 |
| NT2NE2000260 | 0 | 0 | 1.284 | 0.246 | 0.450 | 0.871 | 0.804 |
| NT2NE2000327 | 2.516 | 0 | 0 | 0 | 0 | 0 | 2.790 |
| NT2NE2000383 | 0 | 0 | 5.383 | 3.101 | 0 | 5.479 | 6.740 |
| NT2NE2000384 | 6.905 | 0 | 0 | 4.696 | 0 | 0 | 10.210 |
| NT2NE2000386 | 15.452 | 0 | 0 | 0 | 0 | 0 | 0 |
| NT2NE2000392 | 0.893 | 2.048 | 0 | 6.376 | 3.323 | 3.219 | 3.960 |
| NT2NE2000548 | 0 | 0 | 0 | 0 | 0 | 0 | 23.430 |
| NT2NE2000575 | 0.721 | 2.206 | 0.852 | 0.736 | 0 | 1.734 | 2.133 |
| NT2NE2000636 | 7.222 | 0 | 0 | 11.052 | 0 | 0 | 0 |
| NT2NE2000707 | 2.342 | 1.535 | 4.742 | 3.073 | 4.982 | 4.826 | 0.371 |
| NT2NE2000763 | 1.200 | 0 | 4.251 | 2.449 | 0 | 4.327 | 3.993 |
| NT2NE2000809 | 0 | 0 | 0 | 0 | 12.616 | 0 | 0 |
| NT2NE2000909 | 0 | 0 | 0 | 6.679 | 0 | 0 | 0 |
| NT2NE2000963 | 0 | 2.631 | 1.625 | 0 | 0.854 | 1.654 | 1.018 |
| NT2NE2000980 | 0 | 0 | 0 | 0 | 0 | 0 | 16.930 |
| NT2NE2001000 | 0.861 | 1.974 | 6.098 | 1.756 | 6.406 | 0 | 0 |
| NT2NE2001040 | 0 | 0 | 0 | 0 | 0 | 0 | 17.192 |
| NT2NE2001048 | 1.497 | 0 | 0 | 4.581 | 5.571 | 0 | 3.320 |
| NT2NE2001049 | 0 | 0 | 0 | 0 | 0 | 31.686 | 0 |
| NT2NE2001156 | 0 | 0 | 0 | 5.734 | 0 | 0 | 0 |
| NT2NE2001176 | 7.995 | 0 | 4.046 | 2.331 | 0 | 12.355 | 12.533 |
| NT2NE2001180 | 0 | 0 | 49.431 | 0 | 0 | 0 | 0 |
| NT2NE2001337 | 4.544 | 0 | 0 | 0 | 0 | 0 | 0 |
| NT2NE2001364 | 10.691 | 0 | 0 | 0 | 39.792 | 0 | 0 |
| NT2NE2001397 | 0 | 0 | 0 | 0 | 0 | 0 | 14.585 |
| NT2NE2001403 | 10.376 | 0 | 0 | 0 | 19.310 | 0 | 5.753 |
| NT2NE2001435 | 5.316 | 0 | 0 | 11.931 | 0 | 0 | 2.358 |
| NT2NE2001442 | 4.997 | 0 | 0 | 15.295 | 0 | 0 | 11.083 |
| NT2NE2001545 | 12.542 | 0 | 0 | 5.484 | 0 | 0 | 1.987 |
| NT2NE2001598 | 0 | 0 | 0 | 0 | 0 | 45.737 | 0 |
| NT2NE2001648 | 0 | 0 | 30.746 | 0 | 0 | 0 | 0 |
| NT2NE2001655 | 0 | 9.636 | 4.960 | 2.857 | 10.422 | 5.048 | 0 |
| NT2NE2001660 | 7.832 | 0 | 0 | 7.991 | 0 | 0 | 8.686 |
| NT2NE2001793 | 11.409 | 0 | 0 | 7.408 | 0 | 0 | 2.300 |
| NT2NE2002162 | 0 | 0 | 0 | 0 | 45.501 | 0 | 0 |
| NT2NE2003185 | 0 | 17.393 | 0 | 0 | 0 | 0 | 4.204 |
| NT2NE2003280 | 7.277 | 0 | 25.781 | 0 | 0 | 0 | 0 |
| NT2NE2003485 | 2.328 | 0 | 0 | 0 | 0 | 0 | 5.163 |
| NT2NE2003569 | 3.471 | 0 | 0 | 0 | 0 | 0 | 7.698 |
| NT2NE2003887 | 6.241 | 0 | 0 | 0 | 0 | 0 | 0 |
| NT2NE2003921 | 0 | 0 | 0 | 0 | 0 | 0 | 6.765 |
| NT2NE2004255 | 0 | 0 | 0 | 0 | 0 | 0 | 6.605 |
| NT2NE2004519 | 0 | 0 | 0 | 0 | 6.669 | 0 | 3.974 |
| NT2NE2005419 | 11.579 | 0 | 0 | 0 | 0 | 0 | 2.840 |
| NT2NE2005588 | 0 | 38.765 | 0 | 0 | 0 | 0 | 0 |
| NT2NE2005688 | 1.493 | 0 | 0 | 0 | 0 | 0 | 0.828 |
| NT2NE2005876 | 1.475 | 3.384 | 0 | 1.505 | 0 | 0 | 1.636 |
| NT2NE2006075 | 0 | 0 | 0 | 0 | 0 | 28.404 | 0 |
| NT2NE2006478 | 0 | 0 | 0 | 10.962 | 0 | 0 | 11.916 |
| NT2NE2006909 | 0.285 | 1.964 | 0 | 0 | 0 | 0 | 0 |
| NT2NE2008213 | 0 | 19.092 | 0 | 0 | 0 | 30.005 | 0 |
| NT2NE2009295 | 0 | 0 | 0 | 2.035 | 0 | 7.194 | 2.212 |
| NT2NE2009523 | 0 | 0 | 0 | 0 | 0 | 28.018 | 0 |
| NT2NE2010056 | 0 | 0 | 0 | 0 | 0 | 0 | 17.773 |
| NT2NE2010688 | 21.626 | 0 | 0 | 0 | 0 | 0 | 0 |
| NT2NE2010842 | 3.771 | 2.163 | 3.340 | 1.924 | 0 | 0 | 1.046 |
| NT2NE2011119 | 0 | 10.623 | 0 | 0 | 0 | 0 | 0 |
| NT2NE2011221 | 0 | 0 | 0 | 0 | 0 | 0 | 47.862 |
| NT2NE2011485 | 18.947 | 0 | 0 | 0 | 0 | 0 | 0 |
| NT2NE2012243 | 0 | 0 | 0 | 0 | 0 | 0 | 23.430 |
| NT2NE2012928 | 0 | 0 | 0 | 0 | 0 | 31.392 | 0 |
| NT2NE2014104 | 3.357 | 3.851 | 0 | 0 | 0 | 0 | 0 |
| NT2NE2015904 | 0 | 0 | 0 | 21.967 | 0 | 0 | 0 |
| NT2NE2015974 | 0 | 0 | 0 | 0 | 0 | 0 | 8.471 |
| NT2NE2016387 | 21.626 | 0 | 0 | 0 | 0 | 0 | 0 |
| NT2NE2017492 | 0 | 0 | 0 | 0 | 0 | 0 | 18.714 |
| NT2NE2018594 | 0 | 38.765 | 0 | 0 | 0 | 0 | 0 |
| NT2NE2019091 | 5.679 | 0 | 13.413 | 0 | 7.046 | 0 | 0 |
| NT2RI1000016 | 0 | 0 | 0 | 25.779 | 0 | 0 | 0 |
| NT2RI1000048 | 0 | 0 | 0 | 0 | 0 | 0 | 1.883 |
| NT2RI1000127 | 5.445 | 0 | 0 | 0 | 6.755 | 0 | 0 |
| NT2RI2000064 | 0.538 | 0 | 0 | 0.549 | 0 | 0 | 0.597 |
| NT2RI2000107 | 0 | 5.314 | 0 | 0 | 0 | 0 | 0 |
| NT2RI2000116 | 4.071 | 0 | 0 | 3.560 | 0 | 0 | 1.935 |
| NT2RI2000167 | 0 | 0 | 0 | 11.787 | 0 | 0 | 12.812 |
| NT2RI2000255 | 0 | 2.746 | 0 | 0 | 0 | 0 | 1.327 |
| NT2RI2000263 | 3.421 | 0 | 0 | 3.490 | 0 | 0 | 0 |
| NT2RI2000284 | 2.279 | 1.046 | 0 | 0 | 0 | 1.644 | 0 |
| NT2RI2000294 | 1.893 | 0 | 0 | 1.931 | 0 | 0 | 2.099 |
| NT2RI2000344 | 0 | 0 | 0 | 0 | 3.013 | 0 | 1.796 |
| NT2RI2000578 | 0 | 0 | 0 | 0.341 | 0 | 0 | 0 |
| NT2RI2000671 | 0 | 0 | 0 | 0 | 3.915 | 0 | 0 |
| NT2RI2000685 | 0 | 2.273 | 0 | 0 | 3.688 | 0 | 0 |
| NT2RI2000727 | 1.552 | 1.187 | 0 | 1.848 | 1.926 | 1.866 | 0.861 |
| NT2RI2000775 | 0 | 0 | 0 | 0 | 0 | 0 | 18.913 |
| NT2RI2000829 | 3.819 | 0 | 0 | 3.897 | 0 | 0 | 0 |
| NT2RI2000974 | 2.157 | 4.949 | 0 | 2.201 | 0 | 0 | 4.784 |
| NT2RI2001054 | 0.595 | 1.365 | 2.108 | 0 | 2.215 | 0 | 0.660 |
| NT2RI2001230 | 0 | 0 | 0 | 0.787 | 0 | 0 | 0.855 |
| NT2RI2001422 | 0 | 8.529 | 0 | 0 | 0 | 0 | 0 |
| NT2RI2001450 | 3.544 | 12.195 | 6.277 | 10.846 | 0 | 0 | 5.895 |
| NT2RI2001540 | 0 | 0.522 | 0.403 | 0 | 1.271 | 0.616 | 0.063 |
| NT2RI2001621 | 3.061 | 0 | 0 | 0 | 11.393 | 0 | 0 |
| NT2RI2001657 | 0 | 0 | 1.895 | 0 | 0 | 0 | 1.780 |
| NT2RI2001726 | 10.559 | 0 | 0 | 10.773 | 0 | 0 | 0 |
| NT2RI2001731 | 0 | 0 | 0 | 1.932 | 7.049 | 0 | 0 |
| NT2RI2001846 | 9.856 | 0 | 0 | 0 | 0 | 0 | 0 |
| NT2RI2001859 | 2.911 | 0 | 0 | 1.980 | 0 | 0 | 1.076 |
| NT2RI2001910 | 0 | 0 | 0 | 0 | 0 | 26.931 | 0 |
| NT2RI2001952 | 0 | 0 | 0 | 0 | 0 | 0 | 23.231 |
| NT2RI2002091 | 0.040 | 0.369 | 0.475 | 0.055 | 0.150 | 0.097 | 0.476 |
| NT2RI2002152 | 0 | 0 | 0 | 1.283 | 4.681 | 0 | 0 |
| NT2RI2002243 | 0 | 0 | 0 | 0 | 0 | 0 | 3.648 |
| NT2RI2002266 | 0 | 0 | 0 | 2.557 | 0 | 0 | 0 |
| NT2RI2002316 | 0 | 0 | 2.840 | 0.818 | 0 | 0 | 0.889 |
| NT2RI2002359 | 8.230 | 0 | 0 | 0 | 0 | 0 | 0 |
| NT2RI2002391 | 0 | 1.860 | 0 | 0 | 0 | 0 | 1.799 |
| NT2RI2002530 | 0 | 13.848 | 0 | 0 | 0 | 0 | 0 |
| NT2RI2002540 | 6.915 | 7.932 | 0 | 5.291 | 6.434 | 24.933 | 1.917 |
| NT2RI2002549 | 0 | 0 | 0 | 0 | 0 | 0 | 7.641 |
| NT2RI2002592 | 0 | 0 | 0 | 0 | 0 | 66.490 | 0 |
| NT2RI2002602 | 0 | 0 | 0 | 0 | 29.147 | 0 | 0 |
| NT2RI2002654 | 0.587 | 0 | 0 | 1.199 | 2.186 | 2.118 | 1.303 |
| NT2RI2002699 | 0 | 26.231 | 0 | 0 | 0 | 0 | 0 |
| NT2RI2002819 | 7.446 | 0 | 13.189 | 0 | 13.857 | 0 | 4.129 |
| NT2RI2002822 | 5.017 | 0 | 0 | 10.238 | 0 | 0 | 22.256 |
| NT2RI2002847 | 0 | 0 | 0 | 1.281 | 0 | 0 | 2.784 |
| NT2RI2002926 | 0 | 0 | 0 | 0 | 0 | 28.456 | 0 |
| NT2RI2002958 | 3.851 | 0 | 3.411 | 2.947 | 3.583 | 3.471 | 10.677 |
| NT2RI2003011 | 0 | 0 | 0 | 0 | 0 | 0 | 3.829 |
| NT2RI2003051 | 9.214 | 0 | 3.627 | 4.178 | 0 | 0 | 3.406 |
| NT2RI2003205 | 0 | 0 | 0 | 3.284 | 0 | 0 | 0 |
| NT2RI2003222 | 0 | 0 | 0 | 0 | 0 | 0 | 28.191 |
| NT2RI2003301 | 17.027 | 0 | 0 | 0 | 0 | 0 | 0 |
| NT2RI2003304 | 0.525 | 0 | 0 | 1.606 | 0.977 | 0 | 0.873 |
| NT2RI2003317 | 9.458 | 3.616 | 0 | 3.216 | 0 | 0 | 1.748 |
| NT2RI2003338 | 6.075 | 0 | 0 | 3.099 | 0 | 0 | 3.369 |
| NT2RI2003344 | 11.684 | 0 | 0 | 19.868 | 0 | 0 | 8.638 |
| NT2RI2003361 | 4.939 | 22.661 | 0 | 0 | 0 | 17.808 | 0 |
| NT2RI2003420 | 9.240 | 0 | 0 | 4.713 | 0 | 0 | 1.708 |
| NT2RI2003481 | 3.862 | 0 | 0 | 5.910 | 0 | 0 | 0 |
| NT2RI2003556 | 0 | 0 | 0 | 0 | 0 | 0 | 0.422 |
| NT2RI2003655 | 0 | 44.817 | 0 | 0 | 0 | 0 | 0 |
| NT2RI2003695 | 1.575 | 5.420 | 0 | 0 | 0 | 0 | 2.620 |
| NT2RI2003738 | 0.175 | 0 | 0 | 0 | 0.651 | 0.631 | 0 |
| NT2RI2003751 | 1.385 | 3.178 | 0 | 0 | 5.156 | 0 | 0 |
| NT2RI2003921 | 0.474 | 0 | 0 | 0.484 | 0 | 0 | 0 |
| NT2RI2004078 | 35.496 | 0 | 0 | 0 | 0 | 0 | 0 |
| NT2RI2004188 | 0 | 0 | 0 | 0 | 0 | 10.353 | 0 |
| NT2RI2004230 | 0 | 7.897 | 0 | 0 | 0 | 0 | 0 |
| NT2RI2004304 | 8.329 | 0 | 0 | 4.249 | 0 | 0 | 9.236 |
| NT2RI2004398 | 4.982 | 0 | 0 | 0 | 0 | 0 | 5.525 |
| NT2RI2004410 | 4.988 | 0 | 0 | 7.634 | 0 | 8.993 | 2.766 |
| NT2RI2004535 | 7.657 | 0 | 0 | 0 | 0 | 0 | 10.614 |
| NT2RI2004606 | 35.496 | 0 | 0 | 0 | 0 | 0 | 0 |
| NT2RI2004608 | 0 | 8.488 | 0 | 0 | 0 | 0 | 0 |
| NT2RI2004783 | 21.577 | 0 | 0 | 0 | 0 | 0 | 0 |
| NT2RI2004884 | 0 | 0 | 0 | 0.788 | 2.876 | 0 | 0 |
| NT2RI2005116 | 0 | 0 | 4.528 | 0 | 0 | 0 | 1.418 |
| NT2RI2005150 | 2.756 | 0 | 0 | 4.218 | 2.565 | 0 | 0 |
| NT2RI2005239 | 0 | 9.048 | 0 | 12.070 | 0 | 0 | 4.373 |
| NT2RI2005335 | 3.871 | 0 | 0 | 1.975 | 0 | 0 | 3.005 |
| NT2RI2005353 | 0 | 0 | 0 | 5.876 | 0 | 4.153 | 1.277 |
| NT2RI2005368 | 0 | 0 | 7.158 | 4.123 | 0 | 0 | 0 |
| NT2RI2005382 | 0 | 0 | 0 | 20.181 | 0 | 0 | 43.872 |
| NT2RI2005405 | 0.561 | 0 | 0 | 0.573 | 3.134 | 0 | 1.245 |
| NT2RI2005564 | 8.908 | 0 | 0 | 13.633 | 0 | 0 | 0 |
| NT2RI2005579 | 0 | 0 | 0 | 19.149 | 0 | 0 | 0 |
| NT2RI2005713 | 2.958 | 6.786 | 0 | 1.509 | 0 | 0 | 3.280 |
| NT2RI2005723 | 1.505 | 3.454 | 0 | 1.024 | 1.868 | 3.619 | 1.113 |
| NT2RI2005811 | 0 | 0 | 5.427 | 0 | 0 | 0 | 0 |
| NT2RI2005814 | 0 | 0 | 0 | 0 | 0 | 4.696 | 0 |
| NT2RI2005816 | 0 | 0 | 0 | 0 | 0 | 0 | 7.088 |
| NT2RI2005818 | 0 | 0 | 0 | 2.598 | 0 | 0 | 0 |
| NT2RI2005851 | 3.727 | 0 | 0 | 3.802 | 0 | 0 | 0 |
| NT2RI2006071 | 16.937 | 0 | 0 | 0 | 0 | 0 | 0 |
| NT2RI2006072 | 0.765 | 3.511 | 0 | 0.781 | 0 | 2.759 | 0.848 |
| NT2RI2006271 | 2.793 | 0 | 0 | 0 | 0 | 0 | 0 |
| NT2RI2006412 | 6.558 | 9.403 | 5.808 | 4.181 | 0 | 2.956 | 0 |
| NT2RI2006553 | 0 | 8.485 | 0 | 0 | 0 | 0 | 0 |
| NT2RI2006640 | 6.285 | 0 | 0 | 12.824 | 0 | 0 | 6.970 |
| NT2RI2006647 | 0 | 10.520 | 0 | 0 | 0 | 0 | 0 |
| NT2RI2006703 | 0 | 0 | 0 | 0 | 0 | 0 | 17.973 |
| NT2RI2006735 | 15.739 | 0 | 0 | 16.057 | 0 | 0 | 0 |
| NT2RI2006825 | 2.742 | 0 | 0 | 0 | 0 | 0 | 3.040 |
| NT2RI2006856 | 0 | 1.075 | 0 | 0.478 | 3.487 | 0 | 0.519 |
| NT2RI2006943 | 0 | 2.790 | 0 | 1.241 | 0 | 13.156 | 0 |
| NT2RI2007054 | 1.298 | 0 | 0 | 0 | 0 | 0 | 1.440 |
| NT2RI2007084 | 0 | 0 | 3.854 | 0 | 0 | 0 | 3.619 |
| NT2RI2007096 | 10.368 | 0 | 0 | 10.578 | 0 | 0 | 5.749 |
| NT2RI2007133 | 0.392 | 0 | 0 | 0 | 0 | 0 | 0 |
| NT2RI2007148 | 0 | 0 | 0 | 0 | 0 | 0 | 1.047 |
| NT2RI2007277 | 0 | 0 | 0 | 3.001 | 0 | 0 | 5.436 |
| NT2RI2007377 | 3.514 | 5.374 | 0 | 1.195 | 0 | 4.223 | 0 |
| NT2RI2007384 | 0 | 2.981 | 0 | 0 | 1.612 | 0 | 0 |
| NT2RI2007445 | 0 | 0 | 0 | 0 | 6.674 | 6.465 | 3.977 |
| NT2RI2007468 | 0 | 0 | 0 | 0 | 0 | 0 | 4.634 |
| NT2RI2007498 | 0 | 0 | 0 | 0 | 0 | 0 | 0.452 |
| NT2RI2007572 | 1.494 | 3.428 | 0 | 1.525 | 0 | 2.694 | 0.829 |
| NT2RI2007589 | 3.204 | 4.900 | 3.783 | 0 | 7.950 | 0 | 0 |
| NT2RI2007593 | 0 | 0 | 0 | 0 | 0 | 0 | 3.654 |
| NT2RI2007884 | 0 | 5.824 | 8.994 | 0 | 0 | 9.154 | 5.631 |
| NT2RI2007987 | 1.801 | 0 | 0 | 1.837 | 0 | 0 | 1.997 |
| NT2RI2008045 | 2.329 | 0 | 2.751 | 0 | 0 | 0 | 0 |
| NT2RI2008141 | 0 | 0 | 0 | 0 | 0 | 0 | 2.371 |
| NT2RI2008171 | 0 | 10.187 | 0 | 0 | 0 | 0 | 0 |
| NT2RI2008336 | 0 | 0.919 | 0 | 1.226 | 0 | 0 | 0.889 |
| NT2RI2008396 | 0.441 | 1.011 | 0 | 0.450 | 0 | 0 | 2.444 |
| NT2RI2008481 | 0 | 0 | 0 | 0.755 | 0 | 0 | 1.640 |
| NT2RI2008526 | 0 | 0 | 0 | 0.782 | 0 | 0 | 0 |
| NT2RI2008566 | 0 | 0 | 0 | 9.596 | 0 | 0 | 20.861 |
| NT2RI2008622 | 0 | 0 | 0 | 0 | 0 | 0 | 6.999 |
| NT2RI2008656 | 2.716 | 0 | 0 | 0 | 0 | 0 | 3.012 |
| NT2RI2008724 | 1.836 | 0 | 0 | 1.874 | 0 | 0 | 4.073 |
| NT2RI2008749 | 0.565 | 1.297 | 0 | 0 | 2.104 | 0 | 1.254 |
| NT2RI2008791 | 0 | 5.353 | 0 | 1.190 | 0 | 0 | 1.294 |
| NT2RI2008812 | 0 | 0 | 0 | 0 | 0 | 26.104 | 0 |
| NT2RI2008942 | 0 | 0 | 0 | 3.210 | 0 | 0 | 0 |
| NT2RI2009037 | 0.843 | 0 | 0 | 1.720 | 0 | 0 | 0 |
| NT2RI2009065 | 1.401 | 0 | 1.655 | 0 | 1.738 | 0 | 0.518 |
| NT2RI2009066 | 0 | 6.288 | 0 | 8.389 | 0 | 0 | 0 |
| NT2RI2009173 | 0 | 0 | 0 | 1.138 | 0 | 0 | 1.237 |
| NT2RI2009194 | 1.965 | 0 | 0 | 1.003 | 0 | 0 | 0 |
| NT2RI2009233 | 6.767 | 5.175 | 7.991 | 0 | 0 | 8.133 | 2.501 |
| NT2RI2009239 | 1.398 | 0 | 0 | 0 | 0 | 0 | 0 |
| NT2RI2009269 | 1.976 | 0 | 0 | 1.008 | 0 | 7.126 | 1.096 |
| NT2RI2009281 | 1.407 | 6.458 | 0 | 1.436 | 0 | 0 | 0 |
| NT2RI2009402 | 6.273 | 7.196 | 0 | 3.200 | 11.674 | 0 | 3.478 |
| NT2RI2009406 | 0 | 0 | 0 | 2.870 | 0 | 10.144 | 0 |
| NT2RI2009583 | 0.224 | 1.540 | 0.793 | 0.228 | 1.665 | 1.613 | 1.489 |
| NT2RI2010795 | 0 | 0 | 0 | 16.827 | 0 | 0 | 36.581 |
| NT2RI2011450 | 25.398 | 0 | 0 | 0 | 0 | 0 | 0 |
| NT2RI2012659 | 13.562 | 0 | 0 | 0 | 0 | 0 | 0 |
| NT2RI2012726 | 23.195 | 0 | 0 | 0 | 0 | 0 | 10.289 |
| NT2RI2013345 | 9.458 | 0 | 0 | 9.649 | 0 | 0 | 0 |
| NT2RI2014733 | 24.938 | 0 | 0 | 0 | 0 | 0 | 0 |
| NT2RI2015342 | 1.504 | 0 | 0 | 1.535 | 11.198 | 0 | 5.005 |
| NT2RI2015533 | 6.216 | 7.131 | 0 | 1.586 | 0 | 5.604 | 12.064 |
| NT2RI2018311 | 0 | 0 | 0 | 21.918 | 0 | 0 | 0 |
| NT2RI2021625 | 0 | 0 | 0 | 19.442 | 0 | 0 | 0 |
| NT2RI2024313 | 0 | 0 | 0 | 14.948 | 0 | 0 | 0 |
| NT2RI2025075 | 0 | 0 | 0 | 17.297 | 0 | 0 | 18.801 |
| NT2RI2025255 | 0 | 0 | 0 | 0 | 0 | 0 | 37.898 |
| NT2RI3001445 | 0 | 0 | 0 | 19.385 | 0 | 22.837 | 21.071 |
| NT2RI3001515 | 0 | 0 | 0 | 11.050 | 0 | 0 | 0 |
| NT2RI3002842 | 0 | 0 | 0 | 0 | 0 | 0 | 20.781 |
| NT2RI3003738 | 18.137 | 0 | 0 | 0 | 0 | 0 | 0 |
| NT2RI3003925 | 0 | 0 | 0 | 35.956 | 0 | 0 | 0 |
| NT2RI3004510 | 0 | 0 | 0 | 28.761 | 0 | 0 | 0 |
| NT2RI3005403 | 0 | 0 | 0 | 0 | 0 | 0 | 37.898 |
| NT2RI3005724 | 0 | 0 | 0 | 12.093 | 0 | 0 | 0 |
| NT2RI3005923 | 19.493 | 0 | 0 | 0 | 0 | 0 | 0 |
| NT2RI3006284 | 4.138 | 0 | 0 | 0 | 0 | 0 | 0 |
| NT2RI3006673 | 19.959 | 0 | 0 | 10.182 | 0 | 0 | 0 |
| NT2RI3007291 | 0 | 0 | 0 | 12.770 | 0 | 0 | 0 |
| NT2RI3007543 | 1.697 | 0 | 0 | 0.866 | 0 | 3.059 | 0 |
| NT2RI3008055 | 44.179 | 0 | 0 | 0 | 0 | 0 | 0 |
| NT2RI3009524 | 35.496 | 0 | 0 | 0 | 0 | 0 | 0 |
| NT2RP6000017 | 2.992 | 0 | 0 | 1.526 | 0 | 0 | 0 |
| NT2RP6000039 | 8.966 | 0 | 0 | 3.659 | 0 | 0 | 0 |
| NT2RP6000043 | 3.798 | 0 | 13.455 | 3.875 | 0 | 13.695 | 4.212 |
| NT2RP6000072 | 0 | 0 | 5.724 | 0 | 0 | 0 | 0 |
| NT2RP6000077 | 0 | 0 | 0 | 0 | 0 | 0 | 7.128 |
| NT2RP6000078 | 1.079 | 0 | 0 | 0.734 | 0 | 0 | 0.399 |
| NT2RP6000085 | 4.625 | 0 | 0 | 0 | 0 | 0 | 5.129 |
| NT2RP6000109 | 0 | 0 | 0 | 0 | 0 | 0 | 2.118 |
| NT2RP6000110 | 2.738 | 0 | 0 | 0 | 0 | 0 | 18.220 |
| NT2RP6000123 | 0 | 2.694 | 1.387 | 0.399 | 0 | 0 | 0 |
| NT2RP7000069 | 10.105 | 0 | 0 | 3.437 | 0 | 0 | 0 |
| NT2RP7000076 | 0.609 | 1.398 | 4.318 | 0 | 0 | 0 | 1.352 |
| NT2RP7000173 | 2.224 | 0 | 1.969 | 2.836 | 0 | 0 | 0.617 |
| NT2RP7000238 | 0 | 0 | 0 | 1.321 | 0 | 0 | 1.436 |
| NT2RP7000259 | 13.372 | 30.679 | 0 | 0 | 0 | 0 | 0 |
| NT2RP7000271 | 6.066 | 0 | 10.744 | 6.188 | 0 | 10.936 | 0 |
| NT2RP7000477 | 7.914 | 4.539 | 0 | 6.055 | 0 | 0 | 4.388 |
| NT2RP7000586 | 10.987 | 0 | 0 | 11.209 | 0 | 0 | 0 |
| NT2RP7000600 | 6.648 | 0 | 0 | 13.565 | 0 | 0 | 7.372 |
| NT2RP7000624 | 8.726 | 0 | 0 | 0 | 0 | 15.732 | 0 |
| NT2RP7000906 | 10.436 | 0 | 0 | 2.662 | 0 | 4.704 | 7.233 |
| NT2RP7001080 | 3.347 | 0 | 0 | 0 | 0 | 0 | 0 |
| NT2RP7001166 | 2.992 | 1.716 | 0 | 1.526 | 0 | 0 | 3.318 |
| NT2RP7001231 | 4.130 | 0 | 0 | 4.213 | 0 | 0 | 13.739 |
| NT2RP7001283 | 0 | 0 | 1.994 | 1.149 | 0 | 4.059 | 0.624 |
| NT2RP7001306 | 0 | 0 | 25.768 | 0 | 0 | 0 | 0 |
| NT2RP7001335 | 0 | 19.172 | 14.802 | 10.657 | 7.776 | 0 | 6.950 |
| NT2RP7001962 | 5.313 | 0 | 0 | 0 | 0 | 0 | 2.946 |
| NT2RP7002064 | 22.128 | 0 | 0 | 0 | 0 | 0 | 24.539 |
| NT2RP7002376 | 0 | 0 | 0 | 0 | 0 | 0 | 13.455 |
| NT2RP7002379 | 2.014 | 0 | 0 | 2.054 | 1.874 | 0 | 3.908 |
| NT2RP7002449 | 6.061 | 0 | 0 | 6.183 | 0 | 0 | 4.481 |
| NT2RP7002450 | 0 | 0 | 0 | 5.446 | 0 | 0 | 0 |
| NT2RP7002478 | 0 | 0 | 0 | 29.741 | 0 | 0 | 0 |
| NT2RP7002594 | 0 | 0 | 0 | 27.872 | 0 | 0 | 0 |
| NT2RP7002738 | 5.756 | 0 | 0 | 5.873 | 0 | 0 | 6.384 |
| NT2RP7002802 | 0 | 0 | 0 | 3.728 | 0 | 0 | 0 |
| NT2RP7002875 | 9.228 | 0 | 0 | 0.941 | 3.434 | 0 | 6.140 |
| NT2RP7002906 | 5.607 | 6.432 | 0 | 5.721 | 10.435 | 0 | 6.218 |
| NT2RP7003203 | 5.541 | 0 | 0 | 3.769 | 0 | 6.660 | 4.097 |
| NT2RP7003319 | 0 | 2.093 | 3.232 | 4.654 | 0 | 0 | 1.012 |
| NT2RP7003629 | 0 | 0 | 0 | 23.088 | 0 | 0 | 0 |
| NT2RP7003632 | 0 | 0 | 0 | 3.323 | 0 | 0 | 0 |
| NT2RP7003647 | 4.708 | 0 | 4.169 | 15.609 | 0 | 0 | 2.610 |
| NT2RP7003680 | 22.379 | 0 | 0 | 0 | 0 | 0 | 0 |
| NT2RP7003688 | 3.692 | 0 | 0 | 0 | 0 | 0 | 4.913 |
| NT2RP7003960 | 0 | 0 | 0 | 1.690 | 0 | 0 | 1.837 |
| NT2RP7004123 | 0 | 4.403 | 0 | 0 | 0 | 0 | 2.128 |
| NT2RP7004173 | 2.291 | 3.504 | 0 | 1.558 | 0 | 5.507 | 0.847 |
| NT2RP7004196 | 2.620 | 9.018 | 4.641 | 2.673 | 0 | 0 | 0 |
| NT2RP7004204 | 0 | 3.912 | 0 | 5.219 | 6.347 | 0 | 5.673 |
| NT2RP7004233 | 0 | 27.433 | 0 | 0 | 0 | 0 | 13.260 |
| NT2RP7004348 | 0 | 0 | 8.006 | 0 | 0 | 0 | 0 |
| NT2RP7004352 | 3.397 | 0 | 0 | 0 | 0 | 0 | 7.534 |
| NT2RP7004373 | 0 | 0 | 0 | 3.602 | 4.381 | 0 | 5.221 |
| NT2RP7004428 | 16.862 | 0 | 0 | 6.881 | 0 | 0 | 0 |
| NT2RP7004481 | 5.378 | 0 | 0 | 5.487 | 0 | 0 | 0 |
| NT2RP7004559 | 0 | 0 | 0 | 0 | 0 | 0 | 9.452 |
| NT2RP7004728 | 4.715 | 0 | 0 | 4.811 | 0 | 5.667 | 1.743 |
| NT2RP7004751 | 0 | 0 | 0 | 0 | 0 | 1.688 | 0 |
| NT2RP7004790 | 15.609 | 0 | 0 | 0 | 0 | 0 | 8.655 |
| NT2RP7004884 | 13.727 | 0 | 0 | 5.602 | 0 | 0 | 0 |
| NT2RP7004911 | 5.288 | 0 | 0 | 7.193 | 0 | 0 | 5.864 |
| NT2RP7004915 | 7.424 | 0 | 0 | 7.574 | 0 | 0 | 0 |
| NT2RP7004925 | 5.051 | 0 | 0 | 2.576 | 0 | 0 | 0 |
| NT2RP7004946 | 6.026 | 1.975 | 0 | 2.635 | 0 | 0 | 0.955 |
| NT2RP7005513 | 0 | 0 | 0 | 1.724 | 0 | 0 | 0 |
| NT2RP7005529 | 14.766 | 0 | 0 | 15.065 | 0 | 0 | 0 |
| NT2RP7005675 | 11.633 | 0 | 0 | 8.901 | 0 | 0 | 3.225 |
| NT2RP7006033 | 0 | 17.637 | 0 | 0 | 0 | 0 | 17.050 |
| NT2RP7006075 | 0 | 0 | 0 | 0 | 0 | 0 | 5.811 |
| NT2RP7006141 | 0 | 0 | 0 | 0.753 | 0 | 0 | 4.095 |
| NT2RP7006188 | 5.207 | 0 | 0 | 0 | 0 | 0 | 5.774 |
| NT2RP7006223 | 4.225 | 0 | 0 | 8.622 | 15.726 | 0 | 0 |
| NT2RP7006263 | 0 | 0 | 0 | 0 | 0 | 0 | 4.465 |
| NT2RP7006395 | 0 | 0 | 0 | 17.468 | 0 | 0 | 0 |
| NT2RP7006490 | 2.146 | 0 | 0 | 0 | 0 | 7.740 | 2.380 |
| NT2RP7006539 | 0 | 13.349 | 0 | 0 | 10.828 | 0 | 0 |
| NT2RP7006619 | 0 | 0 | 7.819 | 2.252 | 0 | 7.959 | 4.895 |
| NT2RP7006701 | 0 | 0 | 0 | 5.129 | 0 | 0 | 0 |
| NT2RP7006717 | 1.974 | 0 | 0 | 0.671 | 2.449 | 0 | 0.730 |
| NT2RP7006886 | 0 | 0 | 0 | 9.704 | 0 | 0 | 0 |
| NT2RP7006986 | 0 | 0 | 0 | 11.498 | 0 | 0 | 0 |
| NT2RP7007154 | 0 | 1.308 | 0 | 1.164 | 2.122 | 2.056 | 0.632 |
| NT2RP7007177 | 0 | 0 | 0 | 1.389 | 0 | 0 | 0 |
| NT2RP7007252 | 6.867 | 0 | 0 | 7.006 | 0 | 0 | 0 |
| NT2RP7007381 | 15.682 | 0 | 0 | 0 | 0 | 0 | 0 |
| NT2RP7007387 | 6.158 | 4.709 | 0 | 2.094 | 0 | 0 | 2.276 |
| NT2RP7007530 | 0 | 0 | 0 | 2.237 | 0 | 0 | 0 |
| NT2RP7007537 | 1.230 | 0 | 0 | 2.509 | 0 | 0 | 2.727 |
| NT2RP7007610 | 5.788 | 6.640 | 0 | 8.858 | 0 | 0 | 3.209 |
| NT2RP7007617 | 0 | 0 | 0 | 16.050 | 0 | 0 | 17.446 |
| NT2RP7007842 | 0 | 0 | 0 | 1.957 | 7.139 | 0 | 2.127 |
| NT2RP7007975 | 2.729 | 0 | 0 | 1.392 | 0 | 0 | 0 |
| NT2RP7008161 | 0 | 0 | 0 | 6.405 | 0 | 0 | 0 |
| NT2RP7008167 | 2.723 | 0 | 0 | 0.926 | 0 | 0 | 2.013 |
| NT2RP7008190 | 0 | 0 | 0 | 0 | 0 | 0 | 1.471 |
| NT2RP7008315 | 0 | 0 | 0 | 7.656 | 0 | 0 | 0 |
| NT2RP7008396 | 0 | 0 | 0 | 0 | 0 | 0 | 13.651 |
| NT2RP7008487 | 0 | 0 | 0 | 15.611 | 0 | 0 | 0 |
| NT2RP7008543 | 0 | 0 | 0 | 0 | 0 | 0 | 3.051 |
| NT2RP7008714 | 0 | 0 | 0 | 0 | 0 | 0 | 4.301 |
| NT2RP7009012 | 11.338 | 0 | 0 | 11.567 | 0 | 0 | 0 |
| NT2RP7009087 | 2.429 | 0 | 0 | 0 | 0 | 0 | 0 |
| NT2RP7009108 | 4.444 | 8.156 | 0 | 2.720 | 6.616 | 9.614 | 2.957 |
| NT2RP7009147 | 14.337 | 0 | 5.643 | 1.625 | 0 | 0 | 3.533 |
| NT2RP7009149 | 2.393 | 0 | 0 | 6.102 | 0 | 4.313 | 1.327 |
| NT2RP7009225 | 2.813 | 12.906 | 19.929 | 8.609 | 0 | 0 | 0 |
| NT2RP7009259 | 6.180 | 0 | 0 | 5.159 | 0 | 0 | 2.492 |
| NT2RP7009373 | 8.034 | 0 | 0 | 4.098 | 0 | 0 | 17.820 |
| NT2RP7009394 | 13.301 | 0 | 8.567 | 2.467 | 4.501 | 0 | 8.046 |
| NT2RP7009481 | 0 | 0 | 0 | 4.178 | 0 | 0 | 0 |
| NT2RP7009482 | 5.098 | 0 | 0 | 6.619 | 0 | 0 | 3.598 |
| NT2RP7009498 | 0 | 0 | 0 | 0 | 0 | 0 | 2.235 |
| NT2RP7009507 | 29.324 | 0 | 0 | 0 | 0 | 0 | 0 |
| NT2RP7010612 | 0 | 0 | 0 | 22.069 | 0 | 0 | 0 |
| NT2RP7012776 | 0 | 0 | 0 | 0 | 0 | 0 | 9.320 |
| NT2RP7013573 | 0 | 0 | 25.527 | 7.352 | 0 | 0 | 7.991 |
| NT2RP7013764 | 0 | 0 | 0 | 11.583 | 0 | 0 | 0 |
| NT2RP7014005 | 5.818 | 0 | 0 | 0 | 0 | 0 | 0 |
| NT2RP7014910 | 5.978 | 0 | 0 | 6.099 | 0 | 0 | 3.978 |
| NT2RP7015503 | 0 | 0 | 0 | 3.231 | 0 | 11.418 | 0 |
| NT2RP7016574 | 0 | 0 | 0 | 0 | 0 | 0 | 24.498 |
| NT2RP7017474 | 18.823 | 0 | 0 | 0 | 0 | 0 | 0 |
| NT2RP7019135 | 29.324 | 0 | 0 | 0 | 0 | 0 | 0 |
| NT2RP7019401 | 0 | 0 | 0 | 10.593 | 0 | 0 | 0 |
| NT2RP7019543 | 0 | 0 | 0 | 10.792 | 0 | 0 | 0 |
| NT2RP7019835 | 1.042 | 0 | 0 | 0 | 0 | 3.758 | 0 |
| NT2RP8001605 | 29.324 | 0 | 0 | 0 | 0 | 0 | 0 |
| NT2RP8007715 | 25.129 | 0 | 0 | 0 | 0 | 0 | 0 |
| NT2RP8007920 | 1.978 | 0 | 0 | 0 | 7.363 | 0 | 0 |
| NTONG1000033 | 4.901 | 0 | 0 | 7.500 | 0 | 0 | 2.717 |
| NTONG1000098 | 3.823 | 0 | 0 | 3.900 | 0 | 0 | 4.239 |
| NTONG1000182 | 1.238 | 0 | 8.771 | 3.789 | 4.608 | 4.464 | 1.373 |
| NTONG1000264 | 3.899 | 0 | 0 | 4.972 | 0 | 0 | 2.162 |
| NTONG2000107 | 10.664 | 0 | 0 | 0 | 0 | 0 | 0 |
| NTONG2000265 | 7.672 | 1.956 | 3.020 | 13.916 | 0 | 0 | 2.836 |
| NTONG2000876 | 0 | 0 | 4.933 | 0 | 0 | 5.021 | 0 |
| NTONG2000878 | 0 | 0 | 4.183 | 1.205 | 0 | 0 | 2.619 |
| NTONG2000977 | 0 | 2.255 | 3.482 | 0 | 0 | 0 | 0 |
| NTONG2001137 | 1.144 | 2.626 | 0 | 0 | 0 | 0 | 0 |
| NTONG2001428 | 0 | 0 | 0 | 0 | 0 | 0 | 11.690 |
| NTONG2001550 | 3.481 | 0 | 0 | 3.551 | 0 | 0 | 0 |
| NTONG2001567 | 0 | 0 | 0 | 0 | 0 | 0 | 0.340 |
| NTONG2001612 | 1.123 | 2.575 | 3.977 | 0 | 0 | 8.095 | 0 |
| NTONG2001762 | 1.803 | 0 | 6.388 | 9.199 | 6.712 | 0 | 2.000 |
| NTONG2002807 | 0 | 0 | 0 | 0 | 0 | 0 | 13.079 |
| NTONG2002985 | 11.947 | 0 | 0 | 0 | 0 | 0 | 0 |
| NTONG2003454 | 2.981 | 0 | 0 | 18.249 | 0 | 0 | 0 |
| NTONG2003515 | 0 | 0 | 0 | 0 | 0 | 0 | 10.852 |
| NTONG2004095 | 0 | 0 | 0 | 9.367 | 0 | 0 | 0 |
| NTONG2004614 | 0 | 0 | 0 | 0 | 0 | 0 | 6.567 |
| NTONG2005373 | 0 | 0 | 0 | 0 | 0 | 0 | 6.535 |
| NTONG2005391 | 4.662 | 0 | 0 | 14.270 | 0 | 0 | 2.585 |
| NTONG2005520 | 2.663 | 0 | 4.716 | 1.358 | 0 | 0 | 2.953 |
| NTONG2005801 | 14.252 | 0 | 0 | 1.818 | 0 | 0 | 3.951 |
| NTONG2005897 | 0 | 0 | 0 | 7.003 | 0 | 0 | 0 |
| NTONG2005969 | 0 | 14.740 | 0 | 0 | 0 | 0 | 3.562 |
| NTONG2007028 | 11.947 | 0 | 0 | 0 | 0 | 0 | 0 |
| NTONG2007658 | 0 | 0 | 0 | 0 | 0 | 7.216 | 0 |
| NTONG2008088 | 0 | 0 | 0 | 0 | 0 | 0 | 11.332 |
| NTONG2008143 | 10.865 | 0 | 0 | 0 | 0 | 0 | 0 |
| NTONG2008483 | 2.397 | 1.833 | 5.661 | 0.815 | 0 | 5.761 | 1.772 |
| NTONG2008944 | 5.840 | 0 | 0 | 2.979 | 0 | 0 | 3.238 |
| NTONG2009576 | 7.105 | 0 | 0 | 0 | 0 | 0 | 0 |
| OCBBF1000030 | 0 | 0 | 0 | 45.093 | 0 | 0 | 0 |
| OCBBF1000049 | 9.939 | 0 | 0 | 5.070 | 0 | 0 | 0 |
| OCBBF1000080 | 0 | 0 | 0 | 19.507 | 0 | 0 | 0 |
| OCBBF1000086 | 2.296 | 3.512 | 5.423 | 1.562 | 0 | 0 | 0.849 |
| OCBBF1000114 | 0 | 0 | 9.031 | 2.601 | 0 | 0 | 0 |
| OCBBF1000145 | 0 | 0 | 0 | 0 | 0 | 0 | 47.165 |
| OCBBF1000146 | 0.863 | 1.979 | 0 | 0 | 0 | 0 | 1.913 |
| OCBBF1000185 | 4.210 | 0 | 0 | 0 | 0 | 0 | 0 |
| OCBBF1000188 | 1.041 | 0 | 7.378 | 3.187 | 3.876 | 0 | 0 |
| OCBBF1000315 | 0 | 0 | 0 | 8.926 | 0 | 0 | 0 |
| OCBBF2000015 | 9.494 | 0 | 0 | 7.264 | 0 | 0 | 4.387 |
| OCBBF2000126 | 3.887 | 8.917 | 13.769 | 0 | 14.466 | 14.014 | 0 |
| OCBBF2000178 | 4.361 | 0 | 0 | 3.337 | 4.058 | 7.862 | 3.627 |
| OCBBF2000231 | 3.917 | 17.974 | 0 | 7.993 | 0 | 0 | 13.032 |
| OCBBF2000277 | 7.347 | 0 | 0 | 0 | 0 | 0 | 16.294 |
| OCBBF2000522 | 0 | 0 | 0 | 0 | 0 | 0 | 2.804 |
| OCBBF2000712 | 0 | 0 | 0 | 0.964 | 0 | 0 | 1.048 |
| OCBBF2000824 | 0 | 0 | 0 | 6.131 | 0 | 0 | 6.664 |
| OCBBF2000831 | 0 | 0 | 0 | 9.824 | 0 | 0 | 0 |
| OCBBF2000846 | 0 | 3.358 | 5.185 | 0.747 | 2.724 | 0 | 0.812 |
| OCBBF2000904 | 0 | 0 | 14.319 | 4.124 | 0 | 0 | 0 |
| OCBBF2000982 | 0.872 | 0 | 3.089 | 1.779 | 0 | 0 | 1.934 |
| OCBBF2000986 | 1.927 | 2.211 | 0 | 0 | 0 | 0 | 0 |
| OCBBF2001140 | 16.961 | 0 | 0 | 23.073 | 0 | 0 | 12.540 |
| OCBBF2001166 | 16.442 | 0 | 0 | 5.592 | 0 | 0 | 0 |
| OCBBF2001210 | 7.252 | 0 | 0 | 22.195 | 0 | 0 | 0 |
| OCBBF2001307 | 11.643 | 0 | 11.784 | 27.151 | 0 | 0 | 25.823 |
| OCBBF2001408 | 0 | 0 | 0 | 39.401 | 0 | 0 | 0 |
| OCBBF2001416 | 20.868 | 0 | 0 | 0 | 0 | 0 | 0 |
| OCBBF2001492 | 4.117 | 1.574 | 2.431 | 0 | 0 | 2.474 | 6.087 |
| OCBBF2001586 | 3.586 | 0 | 0 | 3.658 | 0 | 0 | 3.976 |
| OCBBF2001639 | 0 | 10.788 | 0 | 4.798 | 0 | 16.956 | 5.215 |
| OCBBF2001687 | 3.847 | 0 | 6.814 | 1.962 | 0 | 0 | 0 |
| OCBBF2001794 | 4.728 | 0 | 0 | 0 | 0 | 0 | 0 |
| OCBBF2001931 | 0 | 0 | 0 | 0 | 62.325 | 0 | 0 |
| OCBBF2002015 | 0 | 0 | 0 | 0 | 0 | 0 | 15.338 |
| OCBBF2002083 | 0 | 25.211 | 0 | 0 | 0 | 0 | 0 |
| OCBBF2002086 | 3.222 | 0 | 0 | 0 | 0 | 0 | 0 |
| OCBBF2002290 | 0 | 0 | 0 | 0 | 0 | 0 | 11.184 |
| OCBBF2002626 | 1.689 | 0 | 0 | 2.585 | 0 | 0 | 0 |
| OCBBF2002656 | 1.654 | 0 | 0 | 1.688 | 6.157 | 0 | 0 |
| OCBBF2002980 | 0 | 0 | 0 | 45.093 | 0 | 0 | 0 |
| OCBBF2003052 | 11.395 | 0 | 0 | 7.750 | 0 | 0 | 0 |
| OCBBF2003246 | 9.786 | 0 | 0 | 19.969 | 0 | 0 | 0 |
| OCBBF2003518 | 2.062 | 0 | 0 | 0 | 0 | 0 | 0 |
| OCBBF2003593 | 44.597 | 0 | 0 | 0 | 0 | 0 | 0 |
| OCBBF2003819 | 0 | 0 | 0 | 21.496 | 0 | 0 | 0 |
| OCBBF2003925 | 0 | 0 | 0 | 0 | 0 | 3.004 | 0 |
| OCBBF2004104 | 5.478 | 3.142 | 0 | 0 | 5.098 | 0 | 3.038 |
| OCBBF2004259 | 0 | 0 | 0 | 0 | 0 | 0 | 47.165 |
| OCBBF2004273 | 0 | 0 | 0 | 3.658 | 0 | 0 | 0.994 |
| OCBBF2004533 | 0 | 0 | 0 | 0 | 74.975 | 0 | 0 |
| OCBBF2004669 | 0 | 0 | 0 | 45.093 | 0 | 0 | 0 |
| OCBBF2004757 | 0 | 5.686 | 0 | 0 | 0 | 0 | 0 |
| OCBBF2004889 | 44.597 | 0 | 0 | 0 | 0 | 0 | 0 |
| OCBBF2004930 | 0 | 23.811 | 0 | 0 | 0 | 37.423 | 0 |
| OCBBF2004984 | 0 | 0 | 0 | 0 | 0 | 0 | 26.412 |
| OCBBF2005161 | 0 | 0 | 0 | 45.093 | 0 | 0 | 0 |
| OCBBF2005420 | 21.156 | 0 | 0 | 0 | 0 | 0 | 0 |
| OCBBF2005428 | 0 | 7.563 | 0 | 0 | 0 | 0 | 0 |
| OCBBF2005546 | 0 | 0 | 0 | 45.093 | 0 | 0 | 0 |
| OCBBF2005956 | 0 | 6.513 | 0 | 0 | 10.566 | 0 | 3.148 |
| OCBBF2006005 | 9.535 | 0 | 0 | 9.728 | 0 | 0 | 21.147 |
| OCBBF2006148 | 0 | 0 | 0 | 0 | 0 | 0 | 7.510 |
| OCBBF2006151 | 0 | 0 | 20.423 | 11.764 | 0 | 0 | 0 |
| OCBBF2006172 | 0 | 12.029 | 18.574 | 0 | 19.515 | 0 | 0 |
| OCBBF2006313 | 0 | 13.100 | 0 | 0 | 0 | 0 | 0 |
| OCBBF2006660 | 0 | 0 | 0 | 15.400 | 0 | 0 | 0 |
| OCBBF2006764 | 15.345 | 0 | 0 | 0 | 0 | 0 | 0 |
| OCBBF2006972 | 44.597 | 0 | 0 | 0 | 0 | 0 | 0 |
| OCBBF2006987 | 0 | 0 | 0 | 13.187 | 0 | 0 | 0 |
| OCBBF2007028 | 9.665 | 0 | 0 | 11.269 | 0 | 0 | 18.374 |
| OCBBF2007051 | 0 | 0 | 0 | 45.093 | 0 | 0 | 0 |
| OCBBF2007068 | 0 | 0 | 0 | 45.093 | 0 | 0 | 0 |
| OCBBF2007224 | 9.442 | 0 | 0 | 0 | 0 | 0 | 0 |
| OCBBF2007354 | 3.014 | 2.305 | 0 | 0 | 0 | 0 | 1.114 |
| OCBBF2007415 | 4.004 | 9.185 | 0 | 7.353 | 2.980 | 0 | 10.656 |
| OCBBF2007762 | 0 | 0 | 0 | 16.042 | 0 | 0 | 0 |
| OCBBF2007829 | 10.981 | 0 | 1.945 | 8.963 | 2.044 | 0 | 3.653 |
| OCBBF2007892 | 0 | 0 | 0 | 0 | 0 | 15.360 | 0 |
| OCBBF2008005 | 0 | 0 | 0 | 1.620 | 0 | 0 | 0 |
| OCBBF2008041 | 4.180 | 0 | 0 | 0 | 0 | 0 | 0 |
| OCBBF2008144 | 5.768 | 0 | 0 | 2.942 | 0 | 0 | 3.198 |
| OCBBF2008340 | 0 | 0 | 0 | 15.751 | 0 | 0 | 0 |
| OCBBF2008466 | 0 | 0 | 0 | 0 | 31.840 | 0 | 0 |
| OCBBF2008483 | 0 | 0 | 0 | 0 | 0 | 31.388 | 0 |
| OCBBF2008701 | 21.675 | 0 | 0 | 0 | 0 | 0 | 0 |
| OCBBF2009095 | 19.717 | 0 | 0 | 0 | 0 | 0 | 0 |
| OCBBF2009242 | 2.831 | 0 | 0 | 8.666 | 10.539 | 0 | 12.560 |
| OCBBF2009301 | 0 | 0 | 0 | 2.115 | 0 | 0 | 0 |
| OCBBF2009352 | 0 | 0 | 0 | 11.486 | 0 | 0 | 12.484 |
| OCBBF2009536 | 0 | 0 | 0 | 0 | 0 | 0 | 47.165 |
| OCBBF2009772 | 9.420 | 2.702 | 4.172 | 12.014 | 0 | 4.246 | 1.306 |
| OCBBF2009836 | 4.098 | 0 | 0 | 4.180 | 0 | 0 | 4.544 |
| OCBBF2009920 | 0 | 0 | 0 | 45.093 | 0 | 0 | 0 |
| OCBBF2010140 | 32.508 | 0 | 0 | 0 | 0 | 0 | 0 |
| OCBBF2010819 | 0 | 0 | 0 | 0 | 0 | 0 | 13.910 |
| OCBBF2010830 | 0 | 0 | 0 | 0.898 | 0 | 0 | 0.976 |
| OCBBF2010841 | 6.216 | 0 | 0 | 6.342 | 0 | 0 | 6.893 |
| OCBBF2010858 | 13.322 | 0 | 0 | 20.388 | 0 | 0 | 0 |
| OCBBF2010871 | 9.142 | 0 | 0 | 9.327 | 0 | 0 | 5.069 |
| OCBBF2011021 | 27.462 | 0 | 0 | 19.170 | 0 | 0 | 1.603 |
| OCBBF2011073 | 6.824 | 0 | 0 | 3.481 | 0 | 0 | 3.784 |
| OCBBF2011160 | 17.456 | 0 | 0 | 0 | 0 | 0 | 0 |
| OCBBF2011228 | 21.380 | 0 | 0 | 0 | 0 | 0 | 0 |
| OCBBF2011232 | 8.012 | 0 | 0 | 0 | 0 | 0 | 8.885 |
| OCBBF2011283 | 5.923 | 0 | 0 | 0 | 0 | 0 | 13.137 |
| OCBBF2011536 | 1.995 | 4.577 | 0 | 0 | 0 | 0 | 0 |
| OCBBF2011759 | 11.214 | 0 | 0 | 24.789 | 0 | 0 | 19.690 |
| OCBBF2011767 | 29.740 | 0 | 0 | 0 | 0 | 0 | 0 |
| OCBBF2011887 | 0 | 0 | 0 | 4.798 | 17.504 | 0 | 5.215 |
| OCBBF2011897 | 0 | 0 | 61.158 | 0 | 0 | 0 | 0 |
| OCBBF2011914 | 3.646 | 0 | 0 | 0 | 0 | 0 | 0 |
| OCBBF2012001 | 24.900 | 0 | 0 | 0 | 0 | 0 | 0 |
| OCBBF2012039 | 26.074 | 0 | 0 | 31.296 | 0 | 0 | 22.111 |
| OCBBF2012095 | 0 | 0 | 0 | 15.612 | 0 | 0 | 0 |
| OCBBF2012262 | 29.008 | 0 | 0 | 0 | 0 | 0 | 0 |
| OCBBF2012553 | 0 | 2.691 | 0 | 2.393 | 4.365 | 4.229 | 0 |
| OCBBF2012678 | 6.898 | 0 | 0 | 0 | 0 | 0 | 0 |
| OCBBF2012704 | 0 | 0 | 0 | 21.301 | 0 | 0 | 0 |
| OCBBF2012908 | 3.277 | 0 | 0 | 6.686 | 12.196 | 11.816 | 0 |
| OCBBF2012936 | 44.597 | 0 | 0 | 0 | 0 | 0 | 0 |
| OCBBF2013011 | 0 | 0 | 0 | 7.703 | 0 | 0 | 0 |
| OCBBF2013123 | 22.817 | 0 | 0 | 23.279 | 0 | 0 | 0 |
| OCBBF2013149 | 3.102 | 0 | 0 | 6.330 | 0 | 5.593 | 5.160 |
| OCBBF2013366 | 0 | 0 | 0 | 2.754 | 0 | 0 | 2.993 |
| OCBBF2013481 | 21.868 | 0 | 0 | 11.155 | 40.696 | 0 | 0 |
| OCBBF2013789 | 0 | 34.623 | 0 | 0 | 0 | 0 | 0 |
| OCBBF2013843 | 5.343 | 1.226 | 0 | 5.451 | 1.989 | 0 | 6.518 |
| OCBBF2014064 | 0 | 0 | 0 | 4.180 | 10.167 | 4.925 | 0 |
| OCBBF2014089 | 19.735 | 0 | 0 | 0 | 0 | 0 | 0 |
| OCBBF2014292 | 0 | 0 | 0 | 0 | 0 | 0 | 2.297 |
| OCBBF2014322 | 0 | 0 | 0 | 0 | 0 | 0 | 22.893 |
| OCBBF2014541 | 3.921 | 0 | 0 | 0 | 0 | 0 | 0 |
| OCBBF2014576 | 0 | 0 | 0 | 3.728 | 0 | 0 | 4.052 |
| OCBBF2014873 | 28.366 | 0 | 0 | 0 | 0 | 0 | 0 |
| OCBBF2015503 | 0 | 0 | 0 | 0 | 0 | 0 | 8.322 |
| OCBBF2015931 | 0 | 0 | 0 | 0 | 74.975 | 0 | 0 |
| OCBBF2016729 | 9.116 | 0 | 0 | 0 | 0 | 0 | 0 |
| OCBBF2017035 | 0 | 2.781 | 0 | 3.711 | 4.512 | 4.371 | 5.378 |
| OCBBF2017306 | 44.597 | 0 | 0 | 0 | 0 | 0 | 0 |
| OCBBF2017398 | 9.005 | 0 | 4.557 | 6.562 | 4.788 | 0 | 4.280 |
| OCBBF2017754 | 0 | 0 | 0 | 7.661 | 0 | 0 | 0 |
| OCBBF2017791 | 1.281 | 2.939 | 0 | 5.227 | 0 | 0 | 5.682 |
| OCBBF2017882 | 7.135 | 0 | 0 | 7.279 | 53.111 | 0 | 7.912 |
| OCBBF2017888 | 17.037 | 0 | 0 | 0 | 0 | 0 | 0 |
| OCBBF2017893 | 0 | 0 | 0 | 0 | 12.912 | 0 | 0 |
| OCBBF2017920 | 0 | 0 | 0 | 0 | 0 | 0 | 28.558 |
| OCBBF2018084 | 4.410 | 0 | 0 | 0 | 0 | 0 | 0 |
| OCBBF2018206 | 0 | 0 | 0 | 45.093 | 0 | 0 | 0 |
| OCBBF2018234 | 19.431 | 0 | 0 | 0 | 0 | 0 | 0 |
| OCBBF2018581 | 0 | 0 | 0 | 0 | 16.013 | 0 | 0 |
| OCBBF2018618 | 16.218 | 0 | 0 | 16.546 | 0 | 0 | 0 |
| OCBBF2018707 | 0 | 0 | 0 | 0 | 0 | 16.218 | 0 |
| OCBBF2018827 | 9.813 | 0 | 0 | 15.018 | 0 | 0 | 5.441 |
| OCBBF2018873 | 1.386 | 0 | 0 | 2.828 | 0 | 0 | 4.610 |
| OCBBF2018956 | 0 | 0 | 0 | 0 | 0 | 0 | 1.877 |
| OCBBF2019950 | 0 | 0 | 0 | 45.093 | 0 | 0 | 0 |
| OCBBF2020741 | 0 | 0 | 0 | 28.789 | 0 | 0 | 0 |
| OCBBF2021286 | 18.456 | 0 | 0 | 18.829 | 0 | 0 | 10.233 |
| OCBBF2021833 | 14.503 | 0 | 0 | 0 | 0 | 0 | 32.166 |
| OCBBF2024719 | 0 | 0 | 0 | 30.261 | 0 | 0 | 32.892 |
| OCBBF2024850 | 4.445 | 0 | 0 | 4.535 | 0 | 8.013 | 7.393 |
| OCBBF2028055 | 44.597 | 0 | 0 | 0 | 0 | 0 | 0 |
| OCBBF2030116 | 0 | 0 | 0 | 45.093 | 0 | 0 | 0 |
| OCBBF2031561 | 0 | 0 | 0 | 0 | 0 | 0 | 34.817 |
| OCBBF2033295 | 10.516 | 0 | 0 | 10.729 | 0 | 0 | 0 |
| OCBBF2035226 | 0 | 0 | 0 | 0.599 | 0 | 4.236 | 0 |
| OCBBF2036743 | 11.053 | 0 | 0 | 0 | 0 | 0 | 12.257 |
| OCBBF2038317 | 19.713 | 0 | 0 | 0 | 0 | 0 | 10.930 |
| OCBBF3000296 | 0 | 0 | 0 | 19.328 | 0 | 0 | 0 |
| OCBBF3000323 | 0 | 0 | 0 | 3.393 | 0 | 0 | 0 |
| OCBBF3001333 | 9.639 | 0 | 0 | 0 | 0 | 0 | 0 |
| OCBBF3003103 | 44.597 | 0 | 0 | 0 | 0 | 0 | 0 |
| OCBBF3004487 | 4.531 | 0 | 0 | 4.622 | 0 | 0 | 0 |
| OCBBF3008230 | 29.840 | 0 | 0 | 0 | 0 | 0 | 33.091 |
| OCBBF3008835 | 0 | 0 | 0 | 0 | 0 | 0 | 47.165 |
| PEBLM1000144 | 5.997 | 0 | 0 | 0 | 0 | 0 | 0 |
| PEBLM2000030 | 0 | 0 | 0 | 0 | 0 | 0 | 4.081 |
| PEBLM2000147 | 0 | 2.927 | 0 | 1.302 | 0 | 0 | 1.415 |
| PEBLM2000222 | 0 | 1.333 | 2.058 | 0 | 0 | 0 | 0.644 |
| PEBLM2000267 | 2.812 | 0 | 0 | 1.435 | 0 | 20.280 | 1.559 |
| PEBLM2000308 | 1.982 | 9.096 | 0 | 0 | 0 | 0 | 0 |
| PEBLM2000326 | 10.856 | 0 | 0 | 0 | 0 | 0 | 0 |
| PEBLM2000395 | 0.910 | 0 | 0 | 0 | 0 | 0 | 1.009 |
| PEBLM2001072 | 10.881 | 4.160 | 0 | 1.850 | 0 | 0 | 2.011 |
| PEBLM2002455 | 0 | 0 | 0 | 0 | 33.118 | 0 | 0 |
| PEBLM2003914 | 2.125 | 0 | 7.527 | 2.168 | 0 | 7.661 | 2.356 |
| PEBLM2004452 | 10.797 | 0 | 0 | 12.393 | 0 | 0 | 5.987 |
| PEBLM2004666 | 3.715 | 0 | 0 | 0 | 0 | 0 | 0 |
| PEBLM2004733 | 0 | 21.924 | 0 | 0 | 0 | 0 | 0 |
| PEBLM2006283 | 0 | 0 | 0 | 11.951 | 0 | 0 | 0 |
| PEBLM2006366 | 0 | 6.350 | 0 | 0 | 10.301 | 0 | 0 |
| PEBLM2007774 | 0.301 | 0.691 | 0 | 0.307 | 1.121 | 0 | 0 |
| PEBLM2008826 | 0 | 0 | 0 | 0 | 0 | 0 | 10.285 |
| PERIC2000473 | 6.277 | 0 | 44.476 | 0 | 0 | 0 | 6.961 |
| PERIC2007068 | 3.086 | 7.080 | 0 | 4.723 | 0 | 0 | 1.711 |
| PLACE5000013 | 0 | 0 | 0 | 0 | 0 | 0 | 1.760 |
| PLACE5000058 | 0 | 0 | 0 | 0 | 0 | 0 | 38.390 |
| PLACE5000066 | 0 | 0 | 0 | 0 | 0 | 32.991 | 0 |
| PLACE5000113 | 6.882 | 0 | 0 | 3.511 | 0 | 0 | 1.908 |
| PLACE5000159 | 6.818 | 0 | 0 | 13.912 | 0 | 0 | 2.520 |
| PLACE5000170 | 0 | 0 | 0 | 3.547 | 0 | 0 | 7.711 |
| PLACE5000172 | 6.499 | 0 | 0 | 11.935 | 0 | 0 | 7.207 |
| PLACE5000178 | 35.975 | 0 | 0 | 0 | 0 | 0 | 0 |
| PLACE5000297 | 0 | 0 | 0 | 36.438 | 0 | 0 | 0 |
| PLACE5000492 | 0 | 56.315 | 0 | 0 | 0 | 0 | 0 |
| PLACE6000263 | 1.520 | 0 | 5.386 | 9.307 | 0 | 0 | 3.372 |
| PLACE6000314 | 0 | 0 | 0 | 0 | 0 | 0 | 16.914 |
| PLACE6000325 | 0 | 18.585 | 0 | 0 | 0 | 0 | 8.984 |
| PLACE6000379 | 0.177 | 0.405 | 1.251 | 0.901 | 0 | 1.274 | 0.783 |
| PLACE6000414 | 0 | 0 | 0 | 0 | 0 | 0 | 1.421 |
| PLACE6000463 | 0 | 17.901 | 0 | 0 | 0 | 0 | 0 |
| PLACE6001064 | 4.590 | 0 | 0 | 7.609 | 0 | 2.069 | 3.181 |
| PLACE6001185 | 21.358 | 0 | 0 | 0 | 0 | 0 | 0 |
| PLACE6001281 | 3.443 | 0 | 0 | 7.024 | 0 | 0 | 3.818 |
| PLACE6001443 | 0 | 0 | 0 | 2.004 | 0 | 0 | 2.178 |
| PLACE6001823 | 0 | 0 | 0 | 29.069 | 0 | 0 | 0 |
| PLACE6002084 | 0 | 0.847 | 0 | 1.130 | 0 | 0 | 0 |
| PLACE6002102 | 4.237 | 3.240 | 0 | 12.968 | 0 | 0 | 7.831 |
| PLACE6002668 | 0 | 0 | 0 | 0 | 0 | 0 | 5.985 |
| PLACE6003004 | 0 | 0 | 0 | 0 | 0 | 0 | 38.390 |
| PLACE6003204 | 21.933 | 0 | 0 | 0 | 0 | 0 | 0 |
| PLACE6003218 | 14.551 | 0 | 0 | 0 | 0 | 0 | 0 |
| PLACE6003383 | 1.194 | 0 | 0 | 0 | 0 | 0 | 0 |
| PLACE6003745 | 0 | 0 | 0 | 5.361 | 0 | 0 | 5.827 |
| PLACE6003850 | 0 | 0 | 0 | 0 | 0 | 40.449 | 0 |
| PLACE6004005 | 2.962 | 0 | 0 | 2.015 | 0 | 0 | 1.095 |
| PLACE6004312 | 1.206 | 0 | 0 | 1.231 | 0 | 2.175 | 0 |
| PLACE6004397 | 1.838 | 8.434 | 13.023 | 0 | 6.841 | 0 | 2.038 |
| PLACE6004578 | 0 | 0 | 0 | 0 | 4.614 | 0 | 0 |
| PLACE6005231 | 0 | 25.339 | 0 | 0 | 0 | 0 | 0 |
| PLACE6005294 | 0 | 0 | 42.656 | 0 | 0 | 0 | 0 |
| PLACE6005482 | 2.644 | 6.066 | 0 | 5.395 | 9.842 | 0 | 2.932 |
| PLACE6006137 | 10.247 | 7.836 | 0 | 17.423 | 0 | 0 | 7.575 |
| PLACE6006186 | 0 | 0 | 0 | 7.379 | 0 | 0 | 0 |
| PLACE6006222 | 8.355 | 0 | 29.599 | 17.049 | 0 | 30.127 | 0 |
| PLACE6006418 | 0 | 0 | 0 | 0 | 0 | 0 | 6.149 |
| PLACE6007180 | 21.434 | 0 | 0 | 0 | 0 | 0 | 11.885 |
| PLACE6007309 | 0 | 0 | 0 | 0 | 67.652 | 0 | 0 |
| PLACE6007373 | 0 | 0 | 0 | 0 | 0 | 0 | 3.174 |
| PLACE6007436 | 0 | 0 | 12.727 | 3.665 | 0 | 0 | 0 |
| PLACE6007925 | 0 | 23.248 | 0 | 0 | 0 | 0 | 0 |
| PLACE6008775 | 3.686 | 0 | 6.529 | 16.924 | 0 | 0 | 8.176 |
| PLACE6009821 | 0 | 0 | 0 | 0 | 0 | 55.521 | 17.076 |
| PLACE6010077 | 0 | 0 | 0 | 0 | 0 | 0 | 0.966 |
| PLACE6010484 | 0 | 0 | 0 | 0 | 0 | 5.573 | 0 |
| PLACE6010704 | 35.975 | 0 | 0 | 0 | 0 | 0 | 0 |
| PLACE6010732 | 0 | 56.315 | 0 | 0 | 0 | 0 | 0 |
| PLACE6011057 | 4.508 | 0 | 0 | 2.299 | 8.389 | 0 | 0 |
| PLACE6011156 | 0 | 29.874 | 0 | 0 | 0 | 46.952 | 0 |
| PLACE6012028 | 0 | 0 | 0 | 0 | 0 | 0 | 6.961 |
| PLACE6013883 | 0 | 0 | 0 | 0 | 0 | 0 | 38.390 |
| PLACE6014064 | 0 | 0 | 0 | 0 | 0 | 0 | 3.394 |
| PLACE6015051 | 0 | 0 | 0 | 0 | 17.157 | 0 | 0 |
| PLACE6015445 | 0 | 0 | 0 | 0 | 0 | 40.069 | 0 |
| PLACE6015731 | 0 | 0 | 54.376 | 0 | 0 | 0 | 0 |
| PLACE6016942 | 3.912 | 8.975 | 13.858 | 0 | 14.560 | 0 | 4.338 |
| PLACE6016984 | 0 | 0 | 0 | 18.846 | 0 | 0 | 0 |
| PLACE6017701 | 0 | 56.315 | 0 | 0 | 0 | 0 | 0 |
| PLACE6018031 | 0 | 0 | 0 | 0 | 0 | 0 | 7.456 |
| PLACE6019195 | 8.485 | 0 | 0 | 8.657 | 31.582 | 0 | 0 |
| PLACE7000410 | 0 | 0 | 0 | 0 | 0 | 0 | 38.390 |
| PLACE7004103 | 3.880 | 0 | 0 | 5.278 | 0 | 0 | 4.302 |
| PLACE7006240 | 25.174 | 0 | 0 | 0 | 0 | 0 | 0 |
| PLACE7008261 | 0 | 0 | 0 | 29.069 | 0 | 0 | 0 |
| PROST1000085 | 0 | 0 | 0 | 0 | 51.498 | 0 | 0 |
| PROST1000097 | 5.292 | 0 | 0 | 6.599 | 4.377 | 0 | 1.956 |
| PROST1000144 | 1.568 | 0 | 0 | 0 | 0 | 0 | 0 |
| PROST1000199 | 0 | 0 | 0 | 0.745 | 0 | 0 | 1.621 |
| PROST1000383 | 0 | 0 | 0 | 0 | 0 | 0 | 23.821 |
| PROST1000526 | 5.053 | 5.796 | 0 | 0 | 0 | 0 | 2.802 |
| PROST1000564 | 2.688 | 0 | 0 | 0 | 0 | 0 | 0 |
| PROST2000138 | 0.087 | 0 | 0.614 | 0.177 | 0.323 | 0 | 0.096 |
| PROST2000206 | 0 | 0 | 0 | 22.341 | 0 | 0 | 0 |
| PROST2000463 | 0 | 39.281 | 0 | 0 | 0 | 0 | 0 |
| PROST2000760 | 0 | 0 | 0 | 0 | 0 | 0 | 6.222 |
| PROST2001180 | 9.932 | 5.696 | 0 | 2.533 | 9.241 | 0 | 2.753 |
| PROST2001283 | 0 | 0 | 0 | 0 | 0 | 7.672 | 0 |
| PROST2001997 | 5.830 | 13.376 | 0 | 0 | 0 | 0 | 0 |
| PROST2002651 | 0 | 0 | 0 | 0 | 11.130 | 0 | 0 |
| PROST2003232 | 2.047 | 0 | 2.417 | 2.088 | 0 | 0 | 1.513 |
| PROST2003324 | 17.682 | 0 | 0 | 0 | 0 | 0 | 19.609 |
| PROST2003338 | 2.239 | 7.704 | 0 | 1.142 | 0 | 0 | 2.483 |
| PROST2003396 | 5.974 | 0 | 0 | 0 | 0 | 0 | 0 |
| PROST2003517 | 2.633 | 0 | 0 | 0 | 0 | 0 | 0 |
| PROST2004095 | 9.361 | 2.148 | 0 | 5.253 | 1.742 | 1.688 | 3.114 |
| PROST2004258 | 0 | 0 | 13.516 | 0 | 0 | 0 | 0 |
| PROST2004270 | 0.588 | 2.698 | 0 | 1.200 | 0 | 0 | 1.304 |
| PROST2004416 | 0 | 0 | 0 | 0 | 0 | 0 | 2.262 |
| PROST2004739 | 0 | 0 | 0 | 7.587 | 0 | 0 | 0 |
| PROST2005067 | 0 | 0 | 0 | 0 | 0 | 0 | 17.889 |
| PROST2005076 | 0 | 0 | 0 | 0 | 0 | 25.962 | 0 |
| PROST2005272 | 8.212 | 0 | 0 | 0 | 0 | 0 | 0 |
| PROST2005604 | 6.221 | 0 | 0 | 3.173 | 0 | 0 | 0 |
| PROST2005793 | 0 | 0 | 0 | 0 | 0 | 0 | 4.349 |
| PROST2006030 | 15.135 | 0 | 0 | 0 | 0 | 0 | 4.196 |
| PROST2006260 | 4.072 | 0 | 0 | 0 | 0 | 0 | 4.516 |
| PROST2006988 | 0 | 33.501 | 0 | 0 | 0 | 0 | 0 |
| PROST2007248 | 0 | 0 | 0 | 0 | 0 | 0 | 20.670 |
| PROST2007612 | 3.193 | 0 | 0 | 0 | 0 | 0 | 3.541 |
| PROST2008271 | 0 | 0 | 0 | 7.997 | 0 | 0 | 0 |
| PROST2008360 | 1.800 | 0 | 0 | 1.836 | 0 | 0 | 3.992 |
| PROST2008489 | 0 | 0 | 2.294 | 0 | 0 | 0 | 0.718 |
| PROST2008770 | 4.680 | 0 | 0 | 6.367 | 2.903 | 2.813 | 3.460 |
| PROST2009347 | 0 | 0 | 0 | 19.336 | 0 | 0 | 0 |
| PROST2009731 | 0 | 2.488 | 0 | 0 | 0 | 0 | 0 |
| PROST2010782 | 0.243 | 0 | 0 | 0 | 0 | 0 | 0 |
| PROST2011038 | 0 | 27.530 | 0 | 0 | 0 | 0 | 0 |
| PROST2011577 | 4.116 | 2.361 | 0 | 1.050 | 3.830 | 0 | 0 |
| PROST2012007 | 1.135 | 5.208 | 0 | 0 | 0 | 0 | 0 |
| PROST2012353 | 0 | 0 | 0 | 0 | 0 | 33.893 | 0 |
| PROST2012448 | 16.318 | 0 | 0 | 0 | 0 | 0 | 0 |
| PROST2012745 | 0 | 0 | 13.700 | 0 | 0 | 0 | 0 |
| PROST2015251 | 0 | 0 | 0 | 0 | 0 | 0 | 23.821 |
| PROST2015332 | 10.310 | 0 | 18.262 | 5.259 | 0 | 0 | 0 |
| PROST2015464 | 0 | 0 | 0 | 0 | 0 | 0 | 5.706 |
| PROST2015710 | 0 | 0 | 0 | 0 | 0 | 0 | 13.657 |
| PROST2016195 | 0 | 0 | 0 | 0 | 0 | 21.086 | 0 |
| PROST2016918 | 6.355 | 0 | 0 | 6.484 | 0 | 0 | 14.095 |
| PROST2017529 | 0 | 0 | 0 | 0 | 0 | 0 | 2.815 |
| PROST2017692 | 0 | 0 | 0 | 0.752 | 0 | 2.657 | 0 |
| PROST2017972 | 12.094 | 0 | 0 | 0 | 45.015 | 0 | 0 |
| PROST2018583 | 0 | 0 | 0 | 0 | 0 | 33.325 | 0 |
| PROST2018588 | 0 | 30.107 | 0 | 0 | 0 | 0 | 0 |
| PROST2018977 | 0 | 0 | 0 | 0 | 0 | 0 | 14.411 |
| PROST2019164 | 3.687 | 0 | 0 | 0 | 0 | 0 | 0 |
| PROST2019253 | 0 | 0 | 0 | 0 | 0 | 0 | 1.863 |
| PUAEN1000057 | 2.053 | 4.710 | 0 | 0 | 0 | 7.403 | 11.384 |
| PUAEN1000065 | 0.670 | 6.146 | 2.373 | 0 | 2.493 | 0 | 0 |
| PUAEN1000147 | 9.325 | 0 | 0 | 0 | 0 | 0 | 0 |
| PUAEN1000161 | 5.768 | 0 | 0 | 0 | 0 | 0 | 0 |
| PUAEN1000164 | 0.398 | 0 | 0 | 0 | 0 | 0 | 1.324 |
| PUAEN1000239 | 0 | 0 | 0 | 3.163 | 0 | 0 | 0 |
| PUAEN1000322 | 0 | 0 | 4.529 | 0 | 0 | 0 | 0 |
| PUAEN2000152 | 0 | 0 | 0 | 6.055 | 0 | 0 | 6.582 |
| PUAEN2000312 | 0 | 0 | 0 | 0 | 0 | 0 | 9.818 |
| PUAEN2000374 | 2.240 | 0 | 0 | 0.653 | 0 | 0 | 1.775 |
| PUAEN2000535 | 0.804 | 0 | 0 | 0 | 0 | 0 | 0 |
| PUAEN2001345 | 0 | 0 | 0 | 0 | 0 | 0 | 3.247 |
| PUAEN2001586 | 0 | 0 | 0 | 2.913 | 0 | 0 | 0 |
| PUAEN2002489 | 0 | 0 | 0 | 0 | 0 | 0 | 21.707 |
| PUAEN2003018 | 0 | 0 | 0 | 0 | 0 | 12.086 | 3.717 |
| PUAEN2003408 | 0 | 6.909 | 0 | 0 | 0 | 0 | 0 |
| PUAEN2005930 | 18.362 | 0 | 0 | 9.367 | 0 | 0 | 10.181 |
| PUAEN2006335 | 12.682 | 0 | 0 | 0 | 0 | 0 | 0 |
| PUAEN2007044 | 8.600 | 0 | 0 | 0 | 0 | 0 | 1.590 |
| PUAEN2008515 | 0 | 0 | 0 | 9.905 | 0 | 0 | 21.533 |
| PUAEN2008985 | 4.437 | 0 | 0 | 4.527 | 0 | 0 | 0 |
| PUAEN2009655 | 18.275 | 0 | 0 | 7.458 | 0 | 0 | 0 |
| PUAEN2010346 | 0 | 0 | 35.358 | 0 | 0 | 0 | 0 |
| PUAEN2010824 | 5.239 | 0 | 0 | 16.034 | 0 | 0 | 11.619 |
| RECTM2001347 | 0 | 0 | 0 | 0 | 0 | 0 | 4.600 |
| SALGL1000005 | 0 | 0 | 0 | 0 | 0 | 1.093 | 0 |
| SALGL1000047 | 0.296 | 0 | 0 | 0.302 | 0 | 0 | 0 |
| SALGL1000157 | 0 | 0 | 0.461 | 0.265 | 0.968 | 0 | 0.577 |
| SKMUS1000014 | 7.356 | 0 | 0 | 0 | 0 | 0 | 0 |
| SKMUS1000022 | 0.832 | 1.910 | 2.949 | 0 | 0 | 0 | 0 |
| SKMUS1000084 | 1.540 | 3.533 | 0 | 3.142 | 5.732 | 0 | 0 |
| SKMUS1000102 | 9.671 | 22.187 | 0 | 0 | 0 | 0 | 0 |
| SKMUS1000110 | 0 | 0 | 0 | 0 | 0 | 0 | 8.170 |
| SKMUS1000176 | 0 | 0 | 0 | 0 | 3.211 | 0 | 0 |
| SKMUS1000177 | 2.361 | 0 | 0 | 2.409 | 0 | 0 | 0 |
| SKMUS1000186 | 0.803 | 1.842 | 1.422 | 0.819 | 1.494 | 1.447 | 0 |
| SKMUS2000020 | 0 | 0 | 0 | 0 | 0 | 13.280 | 0 |
| SKMUS2000117 | 0 | 0 | 0 | 0 | 0 | 0 | 9.423 |
| SKMUS2000271 | 0 | 0 | 0 | 0 | 0 | 45.999 | 0 |
| SKMUS2000361 | 0 | 2.453 | 0 | 0 | 0 | 0 | 0 |
| SKMUS2000380 | 0 | 4.975 | 0 | 0 | 0 | 0 | 0 |
| SKMUS2000484 | 0 | 0 | 0 | 1.792 | 0 | 0 | 1.947 |
| SKMUS2000757 | 0 | 0 | 0 | 0 | 0 | 0 | 5.480 |
| SKMUS2000873 | 1.100 | 0 | 0 | 0.561 | 0 | 0 | 0 |
| SKMUS2000931 | 1.632 | 1.248 | 0 | 0.555 | 0 | 0 | 4.827 |
| SKMUS2000954 | 0 | 3.899 | 0 | 0 | 0 | 0 | 0 |
| SKMUS2000961 | 0 | 0 | 0 | 0 | 0 | 0 | 7.301 |
| SKMUS2001147 | 2.772 | 0 | 0 | 2.828 | 0 | 0 | 3.074 |
| SKMUS2001454 | 2.025 | 0.774 | 0 | 0.689 | 2.512 | 1.217 | 2.620 |
| SKMUS2001528 | 0 | 0 | 0 | 0 | 9.344 | 0 | 0 |
| SKMUS2001634 | 1.309 | 0 | 0 | 0 | 0 | 0 | 1.452 |
| SKMUS2004908 | 6.569 | 0 | 0 | 3.351 | 0 | 0 | 7.285 |
| SKNMC1000110 | 0 | 0 | 0 | 0 | 0 | 0 | 4.015 |
| SKNMC1000159 | 0 | 0 | 0 | 10.774 | 0 | 0 | 0 |
| SKNMC1000168 | 1.675 | 0 | 0 | 0 | 0 | 0 | 0 |
| SKNMC2000065 | 3.239 | 0 | 0 | 1.101 | 4.018 | 0 | 10.774 |
| SKNMC2000097 | 0 | 0 | 0 | 0.455 | 0 | 0 | 0.494 |
| SKNMC2000305 | 0 | 0 | 0 | 14.374 | 0 | 0 | 7.812 |
| SKNMC2000322 | 1.412 | 0 | 0 | 0 | 0 | 0 | 0 |
| SKNMC2000635 | 0 | 0.412 | 0 | 0 | 0 | 0 | 0.796 |
| SKNMC2000649 | 0 | 0 | 0 | 0.931 | 0 | 0 | 0 |
| SKNMC2000877 | 1.185 | 0 | 0 | 2.418 | 0 | 8.545 | 0 |
| SKNMC2001503 | 0 | 0 | 0 | 0 | 11.542 | 11.182 | 3.439 |
| SKNMC2006173 | 0 | 0 | 0 | 7.851 | 0 | 0 | 0 |
| SKNSH1000002 | 1.437 | 0 | 0 | 0 | 0 | 0 | 0 |
| SKNSH1000101 | 1.285 | 1.474 | 0 | 1.966 | 2.391 | 0 | 0 |
| SKNSH2000101 | 13.179 | 0 | 0 | 0 | 0 | 0 | 7.308 |
| SKNSH2000250 | 14.088 | 9.697 | 0 | 15.811 | 15.731 | 5.080 | 4.687 |
| SKNSH2000347 | 4.487 | 0 | 0 | 4.578 | 0 | 0 | 4.976 |
| SKNSH2000716 | 0 | 3.976 | 0 | 1.768 | 6.451 | 0 | 0 |
| SKNSH2000819 | 2.489 | 0 | 0 | 0 | 0 | 0 | 8.280 |
| SKNSH2001222 | 0 | 0 | 0 | 0 | 24.304 | 23.545 | 0 |
| SKNSH2001875 | 6.493 | 0 | 0 | 0 | 0 | 0 | 0 |
| SKNSH2002325 | 3.817 | 8.758 | 0 | 0 | 0 | 0 | 0 |
| SKNSH2003064 | 0 | 17.960 | 0 | 0 | 0 | 0 | 0 |
| SKNSH2005061 | 1.695 | 0 | 0 | 5.189 | 0 | 0 | 1.880 |
| SKNSH2009357 | 0 | 0 | 0 | 0 | 0 | 0 | 10.594 |
| SMINT1000048 | 7.876 | 0 | 0 | 8.036 | 0 | 0 | 0 |
| SMINT1000100 | 0 | 6.387 | 0 | 0 | 0 | 0 | 0 |
| SMINT1000117 | 7.892 | 0 | 0 | 4.026 | 0 | 0 | 2.917 |
| SMINT1000131 | 0 | 0 | 0 | 0 | 0 | 0 | 1.016 |
| SMINT2000073 | 0 | 0 | 0 | 0 | 0 | 0 | 9.621 |
| SMINT2000239 | 0 | 0 | 0 | 0 | 0 | 30.243 | 0 |
| SMINT2000267 | 0 | 0 | 0 | 0 | 0 | 0 | 23.912 |
| SMINT2000396 | 0 | 0 | 0 | 0 | 0 | 0 | 1.357 |
| SMINT2000400 | 6.689 | 0 | 0 | 0 | 0 | 0 | 0 |
| SMINT2000441 | 0.451 | 1.036 | 1.599 | 1.381 | 1.680 | 0 | 3.504 |
| SMINT2000454 | 0 | 20.504 | 0 | 0 | 0 | 0 | 9.911 |
| SMINT2000468 | 9.152 | 0 | 0 | 9.337 | 0 | 0 | 5.074 |
| SMINT2000545 | 2.371 | 0 | 0 | 2.419 | 0 | 0 | 0 |
| SMINT2000629 | 2.686 | 0 | 0 | 5.480 | 9.996 | 9.683 | 0 |
| SMINT2000659 | 0 | 0.637 | 0 | 0 | 0 | 0 | 0.616 |
| SMINT2000694 | 0 | 2.727 | 0 | 0 | 0 | 0 | 0 |
| SMINT2000933 | 0 | 0 | 0 | 0 | 0 | 3.675 | 1.130 |
| SMINT2001183 | 0 | 0 | 0 | 0 | 0 | 0 | 20.139 |
| SMINT2001348 | 0 | 0 | 32.864 | 0 | 0 | 0 | 0 |
| SMINT2001950 | 0 | 0 | 0 | 0 | 0 | 0 | 11.849 |
| SMINT2002159 | 0 | 0 | 0 | 6.995 | 0 | 0 | 0 |
| SMINT2002224 | 0 | 29.044 | 0 | 0 | 0 | 0 | 0 |
| SMINT2002620 | 0 | 0 | 8.026 | 9.246 | 0 | 0 | 2.512 |
| SMINT2002689 | 4.702 | 0 | 0 | 0 | 0 | 0 | 1.304 |
| SMINT2002976 | 10.432 | 0 | 0 | 5.322 | 0 | 0 | 0 |
| SMINT2003169 | 0.470 | 0 | 0 | 0.480 | 0 | 0 | 0 |
| SMINT2003423 | 0 | 0 | 0 | 0 | 40.436 | 0 | 0 |
| SMINT2003905 | 0.774 | 1.776 | 0 | 0 | 0 | 0 | 0.859 |
| SMINT2004023 | 0 | 0 | 5.403 | 0 | 0 | 0 | 0 |
| SMINT2004350 | 13.067 | 0 | 0 | 0 | 0 | 0 | 14.491 |
| SMINT2004589 | 0 | 0 | 0 | 4.089 | 0 | 0 | 0 |
| SMINT2004872 | 0 | 4.852 | 7.492 | 0 | 0 | 0 | 0 |
| SMINT2005330 | 0 | 0 | 0 | 0 | 51.332 | 0 | 0 |
| SMINT2005368 | 0 | 0 | 0 | 2.396 | 4.371 | 4.234 | 1.302 |
| SMINT2005956 | 0 | 0 | 0 | 2.685 | 0 | 0 | 17.513 |
| SMINT2007101 | 0 | 0 | 0 | 0 | 0 | 0 | 23.912 |
| SMINT2007792 | 0 | 0 | 29.610 | 0 | 0 | 0 | 9.269 |
| SMINT2008590 | 0 | 0 | 0 | 9.766 | 0 | 0 | 10.615 |
| SMINT2008869 | 0 | 0 | 50.098 | 0 | 0 | 0 | 0 |
| SMINT2008921 | 1.110 | 0 | 0 | 1.132 | 8.259 | 0 | 1.230 |
| SMINT2008960 | 1.368 | 4.709 | 2.424 | 0.698 | 5.093 | 12.334 | 0.759 |
| SMINT2009292 | 0 | 8.138 | 12.565 | 0 | 13.202 | 0 | 3.933 |
| SMINT2009415 | 0 | 0 | 0 | 0 | 0 | 0 | 23.912 |
| SMINT2010084 | 6.872 | 7.883 | 0 | 7.011 | 12.789 | 12.389 | 0 |
| SMINT2010144 | 0 | 0 | 0 | 0 | 0 | 0 | 23.912 |
| SMINT2010324 | 0 | 0 | 0 | 0 | 0 | 0 | 23.912 |
| SMINT2010639 | 2.709 | 18.644 | 0 | 0 | 0 | 29.302 | 0 |
| SMINT2010901 | 0 | 0 | 0 | 0 | 13.071 | 0 | 3.895 |
| SMINT2012122 | 0 | 0 | 12.384 | 0 | 0 | 0 | 3.877 |
| SMINT2012179 | 0 | 0 | 0 | 18.954 | 0 | 0 | 0 |
| SMINT2012501 | 0 | 0 | 0 | 8.113 | 0 | 0 | 0 |
| SMINT2013031 | 0 | 0 | 0 | 3.166 | 0 | 0 | 0 |
| SMINT2014480 | 0 | 0 | 5.628 | 0 | 5.913 | 0 | 0 |
| SMINT2016146 | 0 | 39.399 | 0 | 0 | 0 | 0 | 0 |
| SMINT2016396 | 0 | 0 | 50.098 | 0 | 0 | 0 | 0 |
| SMINT2017134 | 0 | 0 | 0 | 0 | 0 | 0 | 23.912 |
| SPLEN1000013 | 0 | 0 | 0 | 9.928 | 0 | 0 | 0 |
| SPLEN1000049 | 21.800 | 0 | 0 | 0 | 0 | 0 | 0 |
| SPLEN1000106 | 2.328 | 0 | 0 | 0 | 0 | 0 | 0 |
| SPLEN1000116 | 0.990 | 0 | 0 | 0 | 0 | 0 | 0 |
| SPLEN1000144 | 0 | 0 | 0 | 5.333 | 0 | 0 | 0 |
| SPLEN1000165 | 4.990 | 0 | 0 | 0 | 0 | 0 | 0 |
| SPLEN1000166 | 3.391 | 0 | 0 | 3.460 | 0 | 0 | 2.507 |
| SPLEN2000098 | 12.045 | 0 | 0 | 0 | 0 | 0 | 0 |
| SPLEN2000134 | 0 | 12.019 | 0 | 0 | 0 | 0 | 5.810 |
| SPLEN2000197 | 0 | 0 | 0 | 0 | 0 | 0 | 38.930 |
| SPLEN2000222 | 12.214 | 0 | 0 | 0 | 0 | 0 | 0 |
| SPLEN2000255 | 3.071 | 0 | 5.441 | 0 | 5.716 | 0 | 0 |
| SPLEN2000258 | 0 | 0 | 0 | 0 | 0 | 0 | 9.710 |
| SPLEN2000267 | 17.514 | 0 | 0 | 5.956 | 0 | 0 | 6.474 |
| SPLEN2000341 | 0 | 0 | 0 | 0 | 0 | 0 | 15.016 |
| SPLEN2000348 | 2.797 | 12.836 | 0 | 0 | 0 | 0 | 0 |
| SPLEN2000505 | 0.421 | 0 | 1.493 | 1.290 | 1.569 | 1.520 | 2.337 |
| SPLEN2000537 | 36.501 | 0 | 0 | 0 | 0 | 0 | 0 |
| SPLEN2000698 | 0 | 0 | 0 | 2.163 | 7.892 | 0 | 2.351 |
| SPLEN2000874 | 0.487 | 0 | 0 | 0 | 0 | 0 | 0 |
| SPLEN2000882 | 0 | 0 | 0 | 0 | 0 | 0 | 1.948 |
| SPLEN2001141 | 0 | 0 | 0 | 0.963 | 0 | 0 | 2.094 |
| SPLEN2001157 | 2.751 | 0 | 0 | 0 | 0 | 0 | 3.050 |
| SPLEN2001626 | 0 | 0 | 0 | 0 | 0 | 67.455 | 0 |
| SPLEN2002053 | 36.501 | 0 | 0 | 0 | 0 | 0 | 0 |
| SPLEN2002272 | 0 | 0 | 0 | 0 | 0 | 67.455 | 0 |
| SPLEN2002335 | 2.025 | 0 | 0 | 3.099 | 0 | 0 | 3.369 |
| SPLEN2002463 | 7.573 | 0 | 0 | 30.903 | 0 | 0 | 8.398 |
| SPLEN2002493 | 13.846 | 0 | 0 | 3.532 | 0 | 0 | 19.194 |
| SPLEN2002744 | 2.230 | 0 | 7.901 | 0 | 0 | 0 | 0 |
| SPLEN2002931 | 4.078 | 0 | 0 | 0 | 0 | 0 | 0 |
| SPLEN2003396 | 0 | 0 | 0 | 0 | 0 | 67.455 | 0 |
| SPLEN2003678 | 0 | 0 | 0 | 0 | 0 | 0 | 38.930 |
| SPLEN2004343 | 35.982 | 0 | 0 | 0 | 0 | 0 | 19.951 |
| SPLEN2004555 | 4.258 | 0 | 0 | 1.086 | 0 | 0 | 3.541 |
| SPLEN2004773 | 2.847 | 0 | 0 | 2.178 | 10.596 | 0 | 2.368 |
| SPLEN2004880 | 0 | 0.676 | 0 | 0 | 0 | 0 | 0 |
| SPLEN2004984 | 0 | 0 | 9.305 | 0 | 0 | 0 | 2.913 |
| SPLEN2005009 | 8.597 | 0 | 0 | 0 | 0 | 0 | 19.067 |
| SPLEN2005342 | 0 | 0 | 0 | 5.443 | 0 | 0 | 0 |
| SPLEN2005429 | 0 | 0 | 0 | 3.738 | 0 | 0 | 4.063 |
| SPLEN2005560 | 0 | 0 | 3.729 | 0 | 0 | 0 | 0 |
| SPLEN2005783 | 19.557 | 14.956 | 0 | 0 | 0 | 0 | 7.229 |
| SPLEN2005806 | 0 | 0 | 0 | 0 | 0 | 4.410 | 0 |
| SPLEN2005838 | 0 | 0 | 0 | 36.967 | 0 | 0 | 0 |
| SPLEN2005927 | 0 | 9.879 | 0 | 0 | 0 | 0 | 0 |
| SPLEN2006122 | 0 | 0 | 0 | 0 | 0 | 0 | 0.934 |
| SPLEN2006133 | 1.897 | 0 | 0 | 2.904 | 0 | 0 | 0 |
| SPLEN2006143 | 2.237 | 0 | 0 | 2.283 | 8.327 | 0 | 2.481 |
| SPLEN2006305 | 0.632 | 1.449 | 2.238 | 0 | 0 | 0 | 0.700 |
| SPLEN2006374 | 6.080 | 0 | 0 | 0 | 5.657 | 10.961 | 3.371 |
| SPLEN2007182 | 0 | 0 | 0 | 0 | 47.571 | 0 | 0 |
| SPLEN2007276 | 0 | 6.084 | 9.395 | 0 | 9.871 | 0 | 0 |
| SPLEN2007498 | 5.234 | 0 | 0 | 10.680 | 0 | 0 | 2.902 |
| SPLEN2007739 | 12.144 | 0 | 0 | 0 | 0 | 0 | 26.935 |
| SPLEN2008460 | 0 | 0 | 0 | 2.673 | 0 | 0 | 0 |
| SPLEN2009081 | 0 | 0 | 22.928 | 0 | 0 | 0 | 0 |
| SPLEN2009555 | 0 | 0 | 0 | 0 | 0 | 0 | 9.419 |
| SPLEN2009970 | 0 | 0 | 0 | 5.203 | 0 | 0 | 0 |
| SPLEN2010015 | 0 | 0 | 0 | 31.720 | 0 | 0 | 17.239 |
| SPLEN2010195 | 6.207 | 0 | 0 | 3.562 | 0 | 0 | 3.012 |
| SPLEN2010469 | 0 | 56.874 | 0 | 0 | 0 | 0 | 0 |
| SPLEN2010912 | 0 | 0 | 0 | 12.636 | 0 | 0 | 13.734 |
| SPLEN2011419 | 0 | 0 | 0 | 2.438 | 0 | 8.616 | 0 |
| SPLEN2011678 | 0 | 0 | 0 | 0 | 0 | 0 | 1.264 |
| SPLEN2011737 | 5.211 | 5.977 | 0 | 10.632 | 0 | 9.394 | 0 |
| SPLEN2012523 | 0 | 0 | 0 | 0 | 0 | 0 | 1.184 |
| SPLEN2012571 | 0 | 0 | 11.262 | 0 | 0 | 0 | 0 |
| SPLEN2012619 | 36.501 | 0 | 0 | 0 | 0 | 0 | 0 |
| SPLEN2012624 | 0 | 0 | 0 | 10.317 | 0 | 0 | 0 |
| SPLEN2012800 | 0 | 0.784 | 0 | 0 | 0 | 0 | 0.379 |
| SPLEN2013503 | 0 | 5.758 | 0 | 0 | 0 | 0 | 0 |
| SPLEN2013857 | 36.501 | 0 | 0 | 0 | 0 | 0 | 0 |
| SPLEN2013936 | 0 | 0 | 0 | 0 | 0 | 0 | 7.399 |
| SPLEN2014119 | 0 | 0 | 59.122 | 0 | 0 | 0 | 0 |
| SPLEN2014572 | 0 | 0 | 22.047 | 0 | 0 | 0 | 6.902 |
| SPLEN2014645 | 0 | 0 | 0 | 0 | 68.148 | 0 | 0 |
| SPLEN2014711 | 2.652 | 0 | 0 | 0 | 0 | 0 | 0 |
| SPLEN2014911 | 0 | 0 | 0 | 0 | 0 | 0 | 2.340 |
| SPLEN2015129 | 36.501 | 0 | 0 | 0 | 0 | 0 | 0 |
| SPLEN2015310 | 1.146 | 2.630 | 2.030 | 0 | 0 | 0 | 1.271 |
| SPLEN2015788 | 0 | 0 | 0 | 0 | 0 | 0 | 5.368 |
| SPLEN2016139 | 1.281 | 0 | 0 | 0 | 0 | 0 | 1.421 |
| SPLEN2016268 | 0 | 0 | 0 | 0 | 0 | 1.558 | 0.479 |
| SPLEN2016421 | 0 | 0 | 0 | 0 | 0 | 0 | 9.189 |
| SPLEN2016533 | 0 | 0 | 0 | 0 | 0 | 0 | 38.930 |
| SPLEN2016743 | 5.733 | 0 | 0 | 0 | 0 | 0 | 0 |
| SPLEN2016932 | 0 | 0 | 0 | 0 | 0 | 0 | 38.930 |
| SPLEN2016972 | 0 | 0 | 0 | 2.069 | 0 | 0 | 0 |
| SPLEN2017121 | 7.753 | 0 | 0 | 0 | 0 | 0 | 8.598 |
| SPLEN2017318 | 5.074 | 0 | 0 | 0 | 0 | 0 | 11.254 |
| SPLEN2017351 | 9.023 | 0 | 0 | 0 | 11.195 | 0 | 6.671 |
| SPLEN2017918 | 0 | 0 | 3.230 | 0 | 0 | 0 | 0 |
| SPLEN2018157 | 0 | 0 | 0 | 2.461 | 0 | 0 | 2.675 |
| SPLEN2018159 | 0 | 0 | 0 | 0 | 0 | 0 | 10.502 |
| SPLEN2018299 | 41.154 | 0 | 0 | 0 | 0 | 0 | 0 |
| SPLEN2018302 | 0 | 0 | 0 | 6.204 | 0 | 0 | 0 |
| SPLEN2018643 | 36.501 | 0 | 0 | 0 | 0 | 0 | 0 |
| SPLEN2019169 | 5.661 | 0 | 0 | 0 | 0 | 0 | 0 |
| SPLEN2019349 | 0 | 0 | 0 | 36.967 | 0 | 0 | 0 |
| SPLEN2019405 | 1.432 | 6.571 | 5.073 | 1.461 | 0 | 0 | 1.588 |
| SPLEN2019774 | 0 | 0 | 0 | 0 | 33.067 | 0 | 0 |
| SPLEN2020034 | 0 | 56.874 | 0 | 0 | 0 | 0 | 0 |
| SPLEN2020417 | 0 | 0 | 0 | 0 | 0 | 50.331 | 15.479 |
| SPLEN2021122 | 0 | 0 | 0 | 33.279 | 0 | 0 | 18.087 |
| SPLEN2021194 | 3.373 | 0 | 0 | 0 | 0 | 0 | 0 |
| SPLEN2021273 | 14.747 | 0 | 0 | 0 | 0 | 0 | 16.354 |
| SPLEN2021458 | 0 | 0 | 0 | 0 | 0 | 0 | 38.930 |
| SPLEN2023118 | 0 | 0 | 39.433 | 0 | 0 | 0 | 0 |
| SPLEN2023160 | 0 | 0 | 0 | 40.108 | 0 | 0 | 0 |
| SPLEN2024489 | 0 | 0 | 38.706 | 22.294 | 0 | 0 | 0 |
| SPLEN2024922 | 0 | 0 | 0 | 26.295 | 0 | 0 | 0 |
| SPLEN2025491 | 0 | 0 | 0 | 0 | 0 | 0 | 38.930 |
| SPLEN2027113 | 1.636 | 0 | 0 | 0 | 0 | 0 | 1.815 |
| SPLEN2028466 | 0.414 | 0 | 4.396 | 4.642 | 6.159 | 5.966 | 3.211 |
| SPLEN2028914 | 2.792 | 0 | 0 | 0 | 0 | 0 | 0 |
| SPLEN2031424 | 15.229 | 0 | 0 | 0 | 0 | 0 | 8.444 |
| SPLEN2031547 | 1.574 | 0 | 0 | 11.244 | 0 | 0 | 1.746 |
| SPLEN2031674 | 0 | 0 | 0 | 0 | 0 | 0 | 24.555 |
| SPLEN2032154 | 0 | 0 | 0 | 0 | 0 | 0 | 38.930 |
| SPLEN2034448 | 5.185 | 0 | 0 | 5.290 | 0 | 0 | 0 |
| SPLEN2034781 | 27.984 | 0 | 0 | 0 | 0 | 0 | 0 |
| SPLEN2036076 | 0 | 0 | 0 | 1.676 | 0 | 0 | 0 |
| SPLEN2036821 | 0 | 0 | 0 | 0 | 0 | 0 | 38.930 |
| SPLEN2036932 | 2.932 | 6.726 | 31.158 | 5.982 | 0 | 0 | 0 |
| SPLEN2039379 | 5.792 | 0 | 0 | 8.864 | 0 | 0 | 3.212 |
| SPLEN2040824 | 41.249 | 0 | 0 | 0 | 0 | 0 | 22.872 |
| SPLEN2042535 | 0 | 0 | 0 | 7.264 | 0 | 0 | 0 |
| STOMA1000091 | 0 | 0 | 0 | 0 | 0 | 0 | 7.714 |
| STOMA2000257 | 0 | 0 | 0 | 0 | 7.347 | 0 | 0 |
| STOMA2000289 | 0 | 6.250 | 9.651 | 0 | 10.140 | 0 | 0 |
| STOMA2000396 | 0 | 0 | 0 | 5.258 | 0 | 0 | 5.715 |
| STOMA2000482 | 0 | 0 | 0 | 0 | 0 | 0 | 4.275 |
| STOMA2002052 | 5.562 | 0 | 0 | 5.674 | 0 | 0 | 0 |
| STOMA2002166 | 0 | 0 | 0 | 0 | 0 | 2.109 | 0 |
| STOMA2005120 | 0 | 0 | 0 | 0 | 0 | 0 | 14.012 |
| STOMA2006229 | 6.012 | 0 | 0 | 0 | 0 | 0 | 0 |
| STOMA2009289 | 5.737 | 0 | 0 | 0 | 0 | 0 | 0 |
| SYNOV1000124 | 5.006 | 1.276 | 0 | 6.810 | 6.211 | 0 | 0.617 |
| SYNOV1000128 | 0 | 0 | 0 | 0 | 0 | 0 | 16.279 |
| SYNOV1000374 | 0 | 0 | 0 | 0 | 0 | 0 | 22.005 |
| SYNOV2000291 | 0 | 0 | 0 | 32.112 | 0 | 0 | 0 |
| SYNOV2000397 | 0 | 0 | 0 | 48.614 | 0 | 0 | 0 |
| SYNOV2001033 | 0 | 0 | 0 | 0.612 | 0 | 2.162 | 0 |
| SYNOV2001144 | 0 | 3.245 | 0 | 0 | 5.264 | 0 | 3.137 |
| SYNOV2001239 | 0 | 0 | 1.112 | 0 | 0 | 0 | 1.044 |
| SYNOV2001262 | 2.086 | 4.787 | 0 | 0 | 0 | 7.523 | 4.627 |
| SYNOV2001581 | 0 | 6.042 | 0 | 0 | 0 | 0 | 0 |
| SYNOV2001648 | 0 | 0 | 0 | 0 | 0 | 0 | 1.202 |
| SYNOV2006620 | 0 | 0 | 0 | 0 | 0 | 0 | 33.957 |
| SYNOV2007758 | 19.566 | 0 | 0 | 0 | 0 | 0 | 0 |
| SYNOV4000249 | 0 | 0 | 0 | 48.614 | 0 | 0 | 0 |
| SYNOV4001153 | 2.319 | 0 | 0 | 26.029 | 0 | 0 | 7.716 |
| SYNOV4002883 | 23.940 | 0 | 0 | 24.425 | 0 | 0 | 0 |
| SYNOV4005989 | 0 | 0 | 0 | 21.059 | 0 | 0 | 0 |
| SYNOV4006542 | 0 | 0 | 0 | 3.782 | 0 | 0 | 4.111 |
| SYNOV4007430 | 31.677 | 0 | 0 | 0 | 0 | 0 | 0 |
| SYNOV4007671 | 0 | 0 | 0 | 0 | 0 | 0 | 0.813 |
| SYNOV4008245 | 9.239 | 0 | 0 | 28.277 | 0 | 0 | 10.245 |
| SYNOV4009129 | 7.763 | 17.811 | 0 | 0 | 0 | 0 | 0 |
| SYNOV4009575 | 0 | 0 | 0 | 0 | 0 | 17.276 | 0 |
| T1ESE2000904 | 0 | 0 | 0 | 0 | 8.593 | 0 | 0 |
| TBAES2007428 | 5.371 | 0 | 19.027 | 0 | 0 | 0 | 0 |
| TBAES2009387 | 0 | 0 | 1.894 | 0 | 0 | 0 | 0.593 |
| TCOLN1000180 | 0 | 0 | 0 | 0 | 0 | 8.828 | 0 |
| TESOP1000035 | 0 | 10.147 | 0 | 0 | 0 | 15.948 | 4.905 |
| TESOP2000527 | 0 | 0 | 0 | 0 | 0 | 0 | 11.444 |
| TESOP2002451 | 2.375 | 0 | 0 | 0 | 0 | 0 | 0 |
| TESOP2006893 | 0 | 0 | 0 | 0 | 0 | 30.976 | 0 |
| TESTI1000023 | 15.934 | 1.924 | 0 | 7.700 | 0 | 3.024 | 3.720 |
| TESTI1000051 | 0 | 0 | 0 | 10.627 | 0 | 0 | 0 |
| TESTI1000070 | 0 | 0 | 0 | 3.684 | 0 | 0 | 0 |
| TESTI1000094 | 0 | 22.629 | 0 | 0 | 0 | 0 | 0 |
| TESTI1000096 | 0 | 0 | 0 | 0 | 0 | 0 | 19.400 |
| TESTI1000101 | 0 | 9.827 | 0 | 8.740 | 0 | 0 | 0 |
| TESTI1000163 | 4.120 | 0 | 0 | 0 | 0 | 0 | 0 |
| TESTI1000168 | 0 | 0 | 11.102 | 0 | 0 | 0 | 0 |
| TESTI2000006 | 0 | 0 | 0 | 0 | 0 | 0 | 10.966 |
| TESTI2000172 | 0 | 0 | 0 | 0 | 0 | 0 | 9.487 |
| TESTI2000177 | 0 | 0 | 0 | 24.875 | 0 | 0 | 0 |
| TESTI2000184 | 4.522 | 0 | 0 | 3.460 | 0 | 4.076 | 3.761 |
| TESTI2000435 | 19.231 | 0 | 0 | 0 | 0 | 0 | 0 |
| TESTI2000489 | 0 | 0 | 0 | 0 | 0 | 57.966 | 0 |
| TESTI2000520 | 0 | 0 | 0 | 0 | 0 | 13.565 | 0 |
| TESTI2000600 | 0 | 0 | 0 | 75.737 | 0 | 0 | 0 |
| TESTI2000627 | 0 | 0 | 0 | 21.496 | 0 | 0 | 0 |
| TESTI2000784 | 2.273 | 0 | 0 | 2.319 | 0 | 0 | 0 |
| TESTI2000849 | 0 | 0 | 0 | 0 | 0 | 0 | 29.781 |
| TESTI2000874 | 0 | 0 | 0 | 0 | 46.526 | 0 | 0 |
| TESTI2000883 | 7.291 | 0 | 25.830 | 0 | 0 | 52.580 | 0 |
| TESTI2000970 | 0 | 0 | 17.221 | 0 | 18.093 | 0 | 0 |
| TESTI2001099 | 1.470 | 1.124 | 0 | 1.500 | 0 | 0 | 1.087 |
| TESTI2001120 | 0 | 0 | 0 | 0.986 | 0 | 0 | 0 |
| TESTI2001141 | 0 | 0 | 0 | 9.634 | 0 | 0 | 0 |
| TESTI2001153 | 0.398 | 0 | 1.411 | 0 | 0 | 0 | 0 |
| TESTI2001269 | 2.183 | 0 | 0 | 2.785 | 0 | 0 | 2.421 |
| TESTI2001613 | 13.661 | 0 | 0 | 41.812 | 0 | 0 | 0 |
| TESTI2001829 | 0 | 1.948 | 0 | 0 | 0 | 0 | 0.942 |
| TESTI2001862 | 0 | 6.066 | 0 | 0 | 0 | 9.534 | 2.932 |
| TESTI2001869 | 0 | 54.752 | 0 | 0 | 0 | 0 | 0 |
| TESTI2001898 | 0 | 0 | 0 | 60.949 | 0 | 0 | 0 |
| TESTI2001985 | 5.870 | 0 | 0 | 0 | 0 | 0 | 0 |
| TESTI2002256 | 0 | 0 | 0 | 0 | 0 | 0 | 38.468 |
| TESTI2002365 | 0 | 2.505 | 0 | 0 | 0 | 0 | 2.422 |
| TESTI2002467 | 0 | 0 | 0 | 0 | 0 | 84.653 | 0 |
| TESTI2002632 | 0 | 0 | 0 | 0 | 40.298 | 0 | 0 |
| TESTI2002707 | 13.255 | 7.603 | 17.609 | 11.833 | 6.167 | 0 | 7.350 |
| TESTI2003141 | 0 | 0 | 0 | 0 | 0 | 40.686 | 0 |
| TESTI2003280 | 0 | 18.822 | 0 | 0 | 0 | 0 | 0 |
| TESTI2003413 | 2.604 | 0 | 9.224 | 0 | 0 | 0 | 2.887 |
| TESTI2003454 | 0 | 0 | 0 | 5.418 | 0 | 0 | 0 |
| TESTI2003533 | 0.867 | 1.989 | 0 | 0 | 0 | 0 | 0.961 |
| TESTI2003541 | 0 | 0 | 0 | 0 | 0 | 0 | 32.389 |
| TESTI2003596 | 0 | 0 | 14.759 | 0 | 0 | 0 | 0 |
| TESTI2003625 | 0 | 0 | 0 | 0 | 28.488 | 0 | 0 |
| TESTI2003692 | 0 | 0 | 0 | 60.949 | 0 | 0 | 0 |
| TESTI2003756 | 0 | 0 | 0 | 0 | 0 | 0 | 11.634 |
| TESTI2004031 | 0 | 0 | 0 | 0 | 1.492 | 0 | 0 |
| TESTI2004080 | 0 | 0 | 0 | 0 | 0 | 0 | 10.824 |
| TESTI2004153 | 0 | 0 | 0 | 4.426 | 0 | 15.643 | 0 |
| TESTI2004295 | 8.188 | 0 | 0 | 8.354 | 0 | 0 | 0 |
| TESTI2004431 | 8.365 | 0 | 0 | 0 | 0 | 0 | 0 |
| TESTI2004734 | 0 | 0 | 0 | 34.985 | 0 | 0 | 0 |
| TESTI2004737 | 1.771 | 0 | 6.275 | 3.614 | 0 | 0 | 1.964 |
| TESTI2004929 | 0 | 6.514 | 0 | 0 | 0 | 0 | 0 |
| TESTI2005112 | 19.455 | 0 | 0 | 0 | 0 | 0 | 0 |
| TESTI2005408 | 0 | 4.065 | 6.276 | 3.615 | 6.594 | 0 | 0 |
| TESTI2005564 | 0 | 8.402 | 0 | 3.736 | 0 | 0 | 0 |
| TESTI2005731 | 0 | 0 | 0 | 3.371 | 0 | 0 | 0 |
| TESTI2005742 | 40.787 | 0 | 0 | 0 | 0 | 0 | 0 |
| TESTI2005743 | 0 | 5.040 | 0 | 0 | 0 | 0 | 0 |
| TESTI2005759 | 0 | 0 | 3.313 | 0 | 0 | 0 | 0 |
| TESTI2005784 | 5.949 | 6.824 | 0 | 21.241 | 0 | 0 | 9.895 |
| TESTI2005788 | 0 | 0 | 0 | 4.718 | 0 | 0 | 0 |
| TESTI2005835 | 0 | 0 | 0 | 0 | 0 | 0 | 13.362 |
| TESTI2005908 | 0 | 3.613 | 5.578 | 0 | 0 | 0 | 0 |
| TESTI2006051 | 0 | 0 | 0 | 0 | 1.576 | 1.527 | 0 |
| TESTI2006111 | 0 | 47.300 | 0 | 0 | 0 | 0 | 0 |
| TESTI2006258 | 10.254 | 0 | 36.326 | 0 | 38.166 | 0 | 0 |
| TESTI2006383 | 0 | 0 | 0 | 4.135 | 0 | 0 | 0 |
| TESTI2006409 | 0 | 0 | 0 | 60.949 | 0 | 0 | 0 |
| TESTI2006453 | 1.683 | 3.861 | 0 | 0.859 | 0 | 0 | 2.800 |
| TESTI2006588 | 1.083 | 1.242 | 1.918 | 1.105 | 0 | 1.952 | 1.201 |
| TESTI2006748 | 0 | 7.892 | 0 | 0 | 0 | 0 | 0 |
| TESTI2007211 | 0 | 0 | 0 | 0 | 0 | 0 | 3.663 |
| TESTI2007311 | 0 | 0 | 0 | 3.925 | 0 | 41.615 | 4.266 |
| TESTI2007407 | 0 | 0 | 0 | 0 | 0 | 0 | 3.404 |
| TESTI2007998 | 1.581 | 10.883 | 0 | 1.613 | 0 | 0 | 1.753 |
| TESTI2008020 | 3.835 | 0 | 0 | 0 | 0 | 0 | 0 |
| TESTI2008240 | 1.500 | 0.574 | 0 | 1.531 | 0.931 | 6.312 | 0 |
| TESTI2008621 | 0 | 0 | 35.791 | 0 | 0 | 0 | 0 |
| TESTI2009520 | 4.500 | 0 | 2.657 | 3.826 | 5.583 | 5.408 | 0.832 |
| TESTI2009577 | 0 | 0 | 0 | 1.803 | 0 | 0 | 1.960 |
| TESTI2009785 | 1.435 | 0 | 5.083 | 1.464 | 0 | 0 | 0 |
| TESTI2009987 | 10.202 | 0 | 0 | 5.204 | 0 | 0 | 0 |
| TESTI2010180 | 0 | 0 | 0 | 0 | 0 | 0 | 38.468 |
| TESTI2010513 | 7.465 | 0.901 | 0 | 8.017 | 0 | 0 | 2.178 |
| TESTI2010617 | 6.964 | 0 | 0 | 21.314 | 0 | 0 | 0 |
| TESTI2011605 | 0 | 0 | 0 | 0 | 0 | 0 | 3.997 |
| TESTI2011680 | 7.481 | 0 | 0 | 0 | 0 | 0 | 0 |
| TESTI2012155 | 6.408 | 0 | 0 | 6.538 | 0 | 0 | 7.106 |
| TESTI2012571 | 0 | 0 | 36.286 | 0 | 0 | 36.932 | 0 |
| TESTI2013231 | 1.990 | 0 | 0 | 0 | 0 | 0 | 0 |
| TESTI2013295 | 2.664 | 0 | 0 | 0 | 0 | 0 | 0 |
| TESTI2014780 | 0 | 0 | 0 | 28.973 | 0 | 0 | 0 |
| TESTI2014838 | 3.975 | 0 | 0 | 0 | 0 | 0 | 1.469 |
| TESTI2015042 | 0 | 0 | 0 | 43.832 | 0 | 0 | 0 |
| TESTI2015092 | 0 | 0 | 11.736 | 0 | 12.331 | 0 | 7.348 |
| TESTI2015213 | 0 | 0 | 1.818 | 0.524 | 0 | 0 | 0 |
| TESTI2015626 | 0 | 0.754 | 1.165 | 0.336 | 1.224 | 2.372 | 0 |
| TESTI2015962 | 11.900 | 9.101 | 0 | 8.094 | 14.764 | 0 | 8.798 |
| TESTI2016278 | 0 | 0 | 0 | 0 | 0 | 0 | 62.915 |
| TESTI2016583 | 0 | 0 | 63.719 | 0 | 0 | 0 | 0 |
| TESTI2016896 | 0 | 0 | 0 | 43.832 | 0 | 0 | 0 |
| TESTI2017035 | 0 | 0 | 0 | 42.801 | 0 | 0 | 0 |
| TESTI2017645 | 0 | 0 | 0 | 0 | 0 | 0 | 36.905 |
| TESTI2017954 | 0.662 | 0 | 0 | 0 | 0 | 0 | 0.735 |
| TESTI2018014 | 7.709 | 0 | 0 | 0 | 0 | 0 | 0 |
| TESTI2018421 | 0 | 0 | 0 | 0 | 0 | 84.653 | 0 |
| TESTI2018462 | 2.826 | 0 | 0 | 0 | 0 | 0 | 9.401 |
| TESTI2018611 | 0 | 2.410 | 0 | 0 | 0 | 0 | 0 |
| TESTI2018997 | 0 | 0 | 7.378 | 0 | 0 | 0 | 0 |
| TESTI2020012 | 0 | 0 | 0 | 0 | 85.061 | 0 | 0 |
| TESTI2020956 | 0 | 0 | 0 | 0 | 0 | 0 | 4.772 |
| TESTI2021038 | 42.311 | 0 | 0 | 0 | 0 | 0 | 0 |
| TESTI2021124 | 17.146 | 0 | 0 | 11.662 | 0 | 0 | 0 |
| TESTI2021297 | 0 | 0 | 0 | 0 | 0 | 0 | 7.613 |
| TESTI2021358 | 0 | 0 | 0 | 0 | 0 | 0 | 37.524 |
| TESTI2021425 | 1.722 | 0 | 0 | 0 | 0 | 0 | 1.909 |
| TESTI2021531 | 0 | 0 | 0 | 0 | 0 | 60.329 | 0 |
| TESTI2021654 | 9.773 | 0 | 0 | 0 | 0 | 0 | 10.838 |
| TESTI2022179 | 0 | 24.096 | 0 | 0 | 0 | 0 | 0 |
| TESTI2023033 | 0 | 0 | 0 | 0 | 0 | 0 | 15.227 |
| TESTI2024598 | 0 | 0 | 0 | 60.949 | 0 | 0 | 0 |
| TESTI2025013 | 0 | 0 | 0 | 0 | 0 | 12.834 | 0 |
| TESTI2025454 | 0 | 0 | 0 | 0 | 0 | 0 | 12.490 |
| TESTI2025757 | 33.912 | 0 | 0 | 0 | 0 | 0 | 0 |
| TESTI2025846 | 0 | 0 | 0 | 20.770 | 0 | 0 | 22.576 |
| TESTI2026116 | 0 | 34.218 | 0 | 0 | 0 | 0 | 0 |
| TESTI2026215 | 6.927 | 0 | 0 | 7.067 | 0 | 0 | 0 |
| TESTI2026525 | 0 | 0 | 0 | 0 | 16.193 | 0 | 0 |
| TESTI2026534 | 0 | 0 | 0 | 60.949 | 0 | 0 | 0 |
| TESTI2027496 | 0 | 0 | 33.283 | 9.585 | 0 | 0 | 10.419 |
| TESTI2028296 | 0 | 0 | 0 | 2.516 | 0 | 8.891 | 0 |
| TESTI2029227 | 0 | 0 | 0 | 6.056 | 0 | 21.404 | 6.583 |
| TESTI2029259 | 6.619 | 0 | 0 | 3.377 | 0 | 0 | 3.670 |
| TESTI2033031 | 0 | 0 | 0 | 0 | 0 | 0 | 34.120 |
| TESTI2033441 | 0 | 0 | 0 | 0 | 0 | 0 | 2.434 |
| TESTI2034916 | 7.602 | 0 | 0 | 0 | 0 | 0 | 0 |
| TESTI2034940 | 0 | 2.391 | 0 | 0 | 0 | 0.939 | 0 |
| TESTI2035236 | 0 | 0 | 0 | 0 | 0 | 0 | 57.175 |
| TESTI2035309 | 0 | 0 | 0 | 0 | 0 | 73.390 | 0 |
| TESTI2036691 | 0 | 0 | 0 | 0 | 0 | 84.653 | 0 |
| TESTI2036969 | 7.186 | 0 | 0 | 3.666 | 0 | 0 | 3.984 |
| TESTI2039177 | 16.578 | 0 | 0 | 21.141 | 0 | 0 | 18.384 |
| TESTI2039342 | 0 | 0 | 0 | 0 | 0 | 0 | 77.236 |
| TESTI2044276 | 0 | 10.879 | 0 | 0 | 0 | 0 | 10.517 |
| TESTI2045562 | 0 | 0 | 0 | 0 | 0 | 84.653 | 0 |
| TESTI2046456 | 0 | 1.062 | 0 | 0.944 | 0 | 1.669 | 1.540 |
| TESTI2049246 | 0 | 0 | 0 | 53.653 | 0 | 0 | 29.159 |
| TESTI2053723 | 0 | 0 | 0 | 4.619 | 0 | 0 | 10.040 |
| TESTI4000014 | 1.964 | 0 | 0 | 2.551 | 0.665 | 0.644 | 1.188 |
| TESTI4000214 | 0 | 0 | 0 | 7.979 | 0 | 0 | 0 |
| TESTI4001467 | 0 | 0 | 0 | 0 | 0 | 0 | 6.140 |
| TESTI4001569 | 0 | 0 | 0 | 43.832 | 0 | 0 | 0 |
| TESTI4001604 | 0 | 0 | 0 | 29.688 | 0 | 0 | 32.269 |
| TESTI4001984 | 60.471 | 0 | 0 | 0 | 0 | 0 | 0 |
| TESTI4002072 | 16.696 | 0 | 0 | 20.440 | 0 | 0 | 11.109 |
| TESTI4002195 | 0 | 0 | 23.701 | 0 | 0 | 0 | 0 |
| TESTI4002202 | 9.946 | 0 | 11.744 | 0 | 0 | 0 | 0 |
| TESTI4002290 | 0 | 0 | 0 | 0 | 0 | 0 | 62.915 |
| TESTI4002799 | 1.767 | 0 | 0 | 2.703 | 0 | 1.592 | 1.469 |
| TESTI4003150 | 14.850 | 0 | 0 | 15.151 | 0 | 0 | 0 |
| TESTI4003602 | 25.967 | 0 | 0 | 0 | 0 | 0 | 0 |
| TESTI4003703 | 0 | 0 | 0 | 4.514 | 0 | 0 | 4.907 |
| TESTI4003944 | 0 | 0 | 0 | 35.590 | 0 | 0 | 0 |
| TESTI4004210 | 36.051 | 0 | 0 | 0 | 0 | 0 | 0 |
| TESTI4004626 | 0 | 0 | 0 | 0 | 0 | 0 | 36.513 |
| TESTI4004695 | 0 | 0 | 0 | 0 | 0 | 0 | 36.122 |
| TESTI4005133 | 11.925 | 0 | 0 | 0 | 0 | 0 | 13.224 |
| TESTI4005399 | 7.797 | 0 | 0 | 15.910 | 0 | 0 | 0 |
| TESTI4006137 | 25.755 | 0 | 0 | 0 | 0 | 0 | 28.561 |
| TESTI4006407 | 0 | 0 | 0 | 0 | 0 | 0 | 62.915 |
| TESTI4006441 | 60.471 | 0 | 0 | 0 | 0 | 0 | 0 |
| TESTI4007965 | 0 | 0 | 0 | 0 | 0 | 0 | 20.014 |
| TESTI4008058 | 8.814 | 20.221 | 0 | 0 | 0 | 31.781 | 0 |
| TESTI4008097 | 60.471 | 0 | 0 | 0 | 0 | 0 | 0 |
| TESTI4008797 | 12.429 | 0 | 0 | 12.681 | 0 | 0 | 27.567 |
| TESTI4009286 | 1.450 | 0 | 0 | 1.479 | 0 | 0 | 0.804 |
| TESTI4009454 | 8.038 | 0 | 0 | 0 | 0 | 0 | 8.914 |
| TESTI4010377 | 0 | 0 | 0 | 60.949 | 0 | 0 | 0 |
| TESTI4010851 | 3.280 | 0 | 0 | 3.904 | 2.035 | 0 | 3.031 |
| TESTI4010928 | 0 | 0 | 0 | 34.221 | 0 | 0 | 0 |
| TESTI4010979 | 0 | 0 | 0 | 0 | 0 | 0 | 21.790 |
| TESTI4011084 | 0 | 0 | 0 | 60.949 | 0 | 0 | 0 |
| TESTI4012451 | 0 | 0 | 0 | 0 | 0 | 0 | 62.915 |
| TESTI4012646 | 60.471 | 0 | 0 | 0 | 0 | 0 | 0 |
| TESTI4013441 | 0 | 0 | 0 | 0.160 | 1.168 | 0.566 | 0.174 |
| TESTI4013474 | 0 | 0 | 0 | 0 | 0 | 0 | 2.292 |
| TESTI4013817 | 27.163 | 0 | 0 | 27.712 | 0 | 0 | 0 |
| TESTI4013894 | 0 | 0 | 0 | 14.289 | 0 | 0 | 0 |
| TESTI4014159 | 0 | 0 | 0 | 23.916 | 0 | 0 | 25.996 |
| TESTI4014694 | 2.229 | 0 | 0 | 0 | 0 | 0 | 0 |
| TESTI4014818 | 0 | 0 | 0 | 60.949 | 0 | 0 | 0 |
| TESTI4014908 | 36.051 | 0 | 0 | 0 | 0 | 0 | 0 |
| TESTI4018938 | 0 | 0 | 0 | 35.331 | 0 | 0 | 0 |
| TESTI4022158 | 53.386 | 0 | 0 | 13.617 | 0 | 0 | 14.801 |
| TESTI4024420 | 37.398 | 0 | 0 | 38.155 | 0 | 0 | 0 |
| TESTI4025268 | 60.471 | 0 | 0 | 0 | 0 | 0 | 0 |
| TESTI4025547 | 0 | 0 | 0 | 60.949 | 0 | 0 | 0 |
| TESTI4026207 | 0 | 0 | 0 | 60.949 | 0 | 0 | 0 |
| TESTI4027821 | 60.471 | 0 | 0 | 0 | 0 | 0 | 0 |
| TESTI4032090 | 60.471 | 0 | 0 | 0 | 0 | 0 | 0 |
| TESTI4032913 | 0 | 0 | 0 | 0 | 0 | 0 | 8.989 |
| TESTI4037156 | 0 | 0 | 0.980 | 0.282 | 2.060 | 0.998 | 0.307 |
| TESTI4038284 | 7.367 | 0 | 0 | 5.637 | 0 | 0 | 0 |
| TESTI4043140 | 0 | 0 | 0 | 2.829 | 10.320 | 0 | 0 |
| TESTI4044704 | 10.194 | 0 | 0 | 0 | 0 | 0 | 0 |
| TESTI4046073 | 0 | 0 | 0 | 0 | 0 | 68.459 | 0 |
| TESTI4046502 | 43.339 | 0 | 0 | 0 | 0 | 0 | 0 |
| THYMU1000002 | 0.592 | 0 | 0 | 1.812 | 0 | 0 | 0 |
| THYMU1000016 | 1.159 | 0 | 4.107 | 0.394 | 0 | 0 | 0 |
| THYMU1000029 | 0 | 0 | 0 | 55.026 | 0 | 0 | 0 |
| THYMU1000041 | 9.511 | 0 | 0 | 2.426 | 0 | 0 | 7.911 |
| THYMU1000083 | 0 | 0 | 0 | 6.119 | 0 | 0 | 0 |
| THYMU1000103 | 10.578 | 20.224 | 6.246 | 12.591 | 0 | 6.357 | 0 |
| THYMU1000105 | 0 | 0 | 0 | 15.308 | 0 | 0 | 16.639 |
| THYMU1000109 | 0 | 0 | 0 | 0 | 0 | 5.676 | 0 |
| THYMU1000144 | 9.053 | 2.967 | 0 | 1.319 | 0 | 0 | 1.434 |
| THYMU1000329 | 0 | 0 | 0 | 0 | 19.836 | 0 | 0 |
| THYMU1000359 | 0 | 0 | 0 | 0 | 0 | 1.933 | 0 |
| THYMU1000374 | 1.498 | 6.872 | 0 | 0 | 0 | 5.401 | 1.661 |
| THYMU1000490 | 5.734 | 0 | 0 | 5.850 | 0 | 0 | 0 |
| THYMU2000057 | 0 | 0 | 0 | 0 | 0 | 0 | 1.504 |
| THYMU2000138 | 0 | 0 | 0 | 0 | 0 | 0 | 46.995 |
| THYMU2000155 | 0 | 0 | 0 | 0 | 0 | 0 | 57.080 |
| THYMU2000236 | 0 | 0 | 0 | 0 | 81.697 | 0 | 0 |
| THYMU2000382 | 0 | 1.391 | 0 | 0.618 | 0 | 0 | 2.016 |
| THYMU2000436 | 0 | 4.228 | 0 | 0 | 3.429 | 6.645 | 0 |
| THYMU2000684 | 0 | 0 | 0 | 4.248 | 0 | 0 | 9.234 |
| THYMU2000775 | 0 | 0 | 0 | 0 | 0 | 33.759 | 0 |
| THYMU2000946 | 4.340 | 0 | 5.125 | 4.428 | 5.385 | 0 | 3.209 |
| THYMU2000971 | 0 | 0 | 0 | 0 | 0 | 0 | 57.080 |
| THYMU2001007 | 0 | 6.224 | 0 | 0 | 0 | 9.782 | 9.025 |
| THYMU2001018 | 9.032 | 0 | 0 | 0 | 0 | 0 | 0 |
| THYMU2001090 | 21.252 | 0 | 0 | 0 | 0 | 0 | 47.135 |
| THYMU2001422 | 0 | 28.575 | 0 | 0 | 0 | 0 | 0 |
| THYMU2001515 | 0 | 0 | 0 | 14.878 | 0 | 0 | 0 |
| THYMU2001868 | 0 | 73.343 | 0 | 0 | 0 | 0 | 0 |
| THYMU2002080 | 0 | 0 | 0 | 0 | 0 | 0 | 33.007 |
| THYMU2002583 | 3.628 | 0 | 0 | 0 | 1.929 | 0 | 2.299 |
| THYMU2002815 | 33.041 | 0 | 0 | 0 | 0 | 0 | 0 |
| THYMU2003012 | 2.629 | 4.021 | 3.105 | 6.259 | 9.785 | 0 | 3.887 |
| THYMU2003046 | 0 | 0 | 0 | 1.961 | 0 | 0 | 2.132 |
| THYMU2003133 | 0 | 0 | 0 | 0 | 0 | 0 | 3.848 |
| THYMU2003419 | 1.507 | 1.152 | 0 | 0 | 0 | 0 | 0 |
| THYMU2003446 | 14.310 | 5.472 | 0 | 9.733 | 0 | 0 | 18.514 |
| THYMU2003542 | 0 | 0 | 7.656 | 0 | 8.043 | 0 | 2.397 |
| THYMU2003891 | 0 | 0.335 | 0.517 | 0 | 0 | 0.526 | 0.324 |
| THYMU2003907 | 0 | 0 | 0 | 0 | 0 | 0 | 12.576 |
| THYMU2003932 | 0 | 0 | 0 | 0 | 0 | 0 | 21.450 |
| THYMU2003981 | 0.522 | 0 | 1.850 | 2.664 | 0 | 0 | 0.579 |
| THYMU2004152 | 0.993 | 0 | 3.517 | 0 | 0 | 0 | 1.101 |
| THYMU2004344 | 3.832 | 0 | 4.526 | 5.213 | 4.755 | 0 | 7.083 |
| THYMU2004410 | 3.832 | 4.396 | 0 | 0 | 0 | 0 | 4.250 |
| THYMU2004452 | 23.112 | 0 | 0 | 0 | 0 | 0 | 0 |
| THYMU2004635 | 0 | 0 | 0 | 55.026 | 0 | 0 | 0 |
| THYMU2004733 | 0 | 0 | 0 | 0 | 0 | 0 | 6.211 |
| THYMU2004906 | 0 | 0 | 44.401 | 0 | 0 | 0 | 0 |
| THYMU2005546 | 0 | 0 | 0 | 0.558 | 0 | 3.944 | 0.607 |
| THYMU2005997 | 16.102 | 0 | 57.044 | 0 | 0 | 0 | 0 |
| THYMU2006505 | 5.460 | 3.132 | 0 | 0 | 5.081 | 4.922 | 0 |
| THYMU2006610 | 0 | 0 | 0 | 0 | 0 | 0 | 30.115 |
| THYMU2006813 | 3.165 | 0 | 0 | 1.614 | 5.890 | 0 | 7.019 |
| THYMU2007036 | 0 | 0 | 0 | 0 | 0 | 0 | 8.562 |
| THYMU2007112 | 4.573 | 0 | 0 | 0 | 0 | 0 | 0 |
| THYMU2007467 | 4.039 | 0 | 0 | 0 | 0 | 0 | 0 |
| THYMU2007729 | 0 | 0 | 0 | 0 | 18.191 | 17.622 | 5.420 |
| THYMU2007886 | 0 | 3.177 | 4.905 | 0 | 0 | 0 | 3.071 |
| THYMU2008035 | 54.530 | 0 | 0 | 0 | 0 | 0 | 0 |
| THYMU2008049 | 0 | 0 | 0 | 0 | 0 | 0 | 25.048 |
| THYMU2008149 | 0 | 0 | 0 | 0 | 0 | 0 | 6.532 |
| THYMU2008321 | 2.891 | 13.264 | 10.241 | 2.949 | 0 | 0 | 9.617 |
| THYMU2008686 | 0 | 0 | 0 | 0 | 0 | 43.941 | 0 |
| THYMU2009338 | 0 | 0 | 0 | 0 | 0 | 0 | 57.080 |
| THYMU2009658 | 0.701 | 1.607 | 0 | 0 | 1.304 | 1.263 | 0 |
| THYMU2010041 | 0 | 0 | 0 | 19.023 | 0 | 0 | 0 |
| THYMU2010192 | 0 | 0 | 0 | 0 | 0 | 0 | 57.080 |
| THYMU2010831 | 54.530 | 0 | 0 | 0 | 0 | 0 | 0 |
| THYMU2011482 | 3.070 | 0 | 0 | 0 | 0 | 11.068 | 6.808 |
| THYMU2012024 | 2.980 | 0 | 0 | 0 | 0 | 0 | 0 |
| THYMU2012104 | 27.053 | 0 | 0 | 0 | 0 | 0 | 0 |
| THYMU2012625 | 0 | 2.383 | 0 | 0 | 3.866 | 0 | 0 |
| THYMU2012826 | 22.147 | 0 | 0 | 22.595 | 0 | 0 | 0 |
| THYMU2013051 | 0 | 0 | 0 | 0 | 0 | 81.218 | 0 |
| THYMU2013136 | 0.818 | 0 | 0 | 0 | 0 | 0 | 0 |
| THYMU2013916 | 1.109 | 2.545 | 3.929 | 3.395 | 0 | 3.999 | 3.690 |
| THYMU2014167 | 0 | 0 | 0 | 0 | 0 | 19.814 | 6.094 |
| THYMU2014183 | 0 | 0 | 0 | 0 | 0 | 0 | 10.774 |
| THYMU2015762 | 0 | 2.274 | 0 | 1.011 | 0 | 3.575 | 0 |
| THYMU2015918 | 0 | 0 | 0 | 55.026 | 0 | 0 | 0 |
| THYMU2016968 | 0 | 0 | 0 | 7.541 | 0 | 0 | 0 |
| THYMU2019021 | 14.579 | 0 | 17.216 | 4.958 | 0 | 0 | 0 |
| THYMU2020883 | 0 | 0 | 0 | 0 | 0 | 0 | 57.080 |
| THYMU2020959 | 11.085 | 25.432 | 0 | 0 | 0 | 0 | 12.293 |
| THYMU2023576 | 15.940 | 0 | 0 | 0 | 0 | 57.476 | 0 |
| THYMU2023943 | 54.530 | 0 | 0 | 0 | 0 | 0 | 0 |
| THYMU2023967 | 0 | 0 | 0 | 31.165 | 0 | 0 | 0 |
| THYMU2025319 | 33.041 | 0 | 0 | 0 | 0 | 0 | 0 |
| THYMU2025325 | 0 | 29.879 | 46.138 | 0 | 0 | 0 | 0 |
| THYMU2025707 | 0 | 0 | 0 | 9.440 | 0 | 0 | 20.521 |
| THYMU2026835 | 0 | 0 | 0 | 55.026 | 0 | 0 | 0 |
| THYMU2027125 | 0.179 | 0.411 | 0 | 0 | 0 | 4.518 | 0.198 |
| THYMU2028629 | 0 | 0 | 0 | 0 | 0 | 0 | 20.303 |
| THYMU2031341 | 0 | 0 | 0 | 7.040 | 0 | 0 | 0 |
| THYMU2031890 | 0 | 0 | 0 | 0 | 0 | 64.019 | 0 |
| THYMU2032696 | 0 | 2.411 | 0 | 0 | 0 | 3.789 | 0 |
| THYMU2032825 | 0 | 0 | 0 | 0 | 0 | 0 | 20.620 |
| THYMU2033263 | 0 | 0 | 0 | 0 | 0 | 0 | 12.337 |
| THYMU2033308 | 13.964 | 0 | 0 | 0 | 0 | 0 | 0 |
| THYMU2033787 | 0 | 0 | 0 | 0 | 0 | 0 | 57.080 |
| THYMU2035735 | 1.319 | 3.027 | 0 | 2.692 | 0 | 0 | 0 |
| THYMU2036215 | 0 | 0 | 0 | 23.470 | 0 | 0 | 0 |
| THYMU2036461 | 0 | 0 | 0 | 15.474 | 0 | 0 | 0 |
| THYMU2037226 | 0 | 0 | 0 | 34.964 | 0 | 0 | 0 |
| THYMU2038220 | 40.401 | 0 | 0 | 0 | 0 | 0 | 22.401 |
| THYMU2039315 | 54.530 | 0 | 0 | 0 | 0 | 0 | 0 |
| THYMU2039634 | 54.530 | 0 | 0 | 0 | 0 | 0 | 0 |
| THYMU2040114 | 0 | 73.343 | 0 | 0 | 0 | 0 | 0 |
| THYMU3000360 | 39.314 | 0 | 0 | 0 | 0 | 0 | 0 |
| THYMU3000420 | 39.314 | 0 | 0 | 0 | 0 | 0 | 0 |
| THYMU3000776 | 15.604 | 0 | 0 | 0 | 0 | 0 | 0 |
| THYMU3001379 | 0 | 0 | 0 | 25.695 | 0 | 0 | 27.929 |
| THYMU3003007 | 0 | 0 | 0 | 19.391 | 0 | 0 | 0 |
| THYMU3003350 | 54.530 | 0 | 0 | 0 | 0 | 0 | 0 |
| THYMU3003965 | 0 | 0 | 0 | 55.026 | 0 | 0 | 0 |
| THYMU3004835 | 0 | 0 | 0 | 20.041 | 0 | 0 | 21.784 |
| THYMU3005427 | 0 | 54.147 | 0 | 0 | 0 | 0 | 26.173 |
| THYMU3005491 | 0 | 0 | 0 | 0 | 0 | 0 | 57.080 |
| THYMU3005629 | 0 | 0 | 0 | 0 | 0 | 0 | 16.756 |
| THYMU3007137 | 0 | 0 | 0 | 37.956 | 0 | 0 | 0 |
| THYMU3007308 | 0 | 0 | 0 | 39.793 | 0 | 0 | 0 |
| THYMU3007423 | 29.497 | 0 | 0 | 10.031 | 0 | 0 | 10.904 |
| THYMU3008105 | 0 | 0 | 0 | 20.662 | 0 | 0 | 0 |
| THYMU3008171 | 20.170 | 0 | 0 | 20.579 | 0 | 0 | 0 |
| THYMU3009006 | 0 | 0 | 0 | 0 | 0 | 0 | 20.574 |
| THYMU3011827 | 0 | 0 | 0 | 0 | 0 | 0 | 25.758 |
| THYMU3013386 | 0.749 | 3.435 | 0 | 0.764 | 2.786 | 2.699 | 1.660 |
| THYMU3015759 | 1.126 | 0 | 0 | 1.149 | 0 | 0 | 0 |
| THYMU3021586 | 20.651 | 0 | 14.632 | 16.855 | 0 | 0 | 4.580 |
| THYMU3026000 | 49.066 | 0 | 0 | 0 | 0 | 0 | 0 |
| THYMU3026350 | 14.291 | 0 | 0 | 14.581 | 0 | 0 | 15.849 |
| THYMU3032798 | 9.668 | 0 | 0 | 0 | 0 | 0 | 4.289 |
| THYMU3032867 | 12.871 | 0 | 0 | 0 | 0 | 0 | 0 |
| THYMU3034671 | 0 | 0 | 0 | 4.866 | 0 | 0 | 0 |
| THYMU3037827 | 54.530 | 0 | 0 | 0 | 0 | 0 | 0 |
| THYMU3038214 | 39.314 | 0 | 0 | 0 | 0 | 0 | 0 |
| THYMU3041428 | 0 | 0 | 0.903 | 0 | 0 | 0 | 0 |
| THYMU3046350 | 0 | 0 | 24.471 | 0 | 0 | 0 | 15.320 |
| TKIDN1000001 | 0 | 0 | 0 | 0 | 0 | 0 | 12.342 |
| TKIDN1000044 | 0 | 0 | 0 | 9.554 | 0 | 33.765 | 10.385 |
| TKIDN1000164 | 0 | 0 | 0 | 6.308 | 0 | 0 | 13.713 |
| TKIDN1000192 | 5.525 | 0 | 19.571 | 0 | 0 | 0 | 6.127 |
| TKIDN2000246 | 3.042 | 11.166 | 16.165 | 5.897 | 10.190 | 6.581 | 7.759 |
| TKIDN2000319 | 0 | 0 | 0 | 21.607 | 0 | 0 | 0 |
| TKIDN2000521 | 29.753 | 0 | 0 | 15.178 | 0 | 0 | 0 |
| TKIDN2001662 | 10.906 | 0 | 0 | 11.127 | 0 | 0 | 0 |
| TKIDN2002318 | 5.363 | 0 | 0 | 0 | 0 | 19.339 | 0 |
| TKIDN2002738 | 0.419 | 0 | 0 | 0 | 0 | 1.512 | 0 |
| TKIDN2003059 | 0 | 0 | 0 | 21.607 | 0 | 0 | 0 |
| TKIDN2003078 | 0 | 0 | 0 | 0 | 0 | 0 | 15.358 |
| TKIDN2003597 | 0 | 0 | 0 | 39.852 | 0 | 0 | 17.327 |
| TKIDN2007605 | 0 | 0 | 0 | 12.745 | 0 | 0 | 0 |
| TKIDN2007828 | 0 | 0 | 23.636 | 0 | 0 | 0 | 0 |
| TKIDN2009330 | 0 | 0 | 0 | 0 | 0 | 0 | 23.052 |
| TKIDN2009641 | 5.782 | 0 | 0 | 0 | 21.519 | 0 | 12.823 |
| TKIDN2009794 | 14.428 | 0 | 0 | 0 | 0 | 0 | 16.001 |
| TKIDN2009889 | 35.077 | 0 | 0 | 0 | 0 | 0 | 0 |
| TKIDN2010812 | 0 | 0 | 0 | 0 | 0 | 0 | 47.291 |
| TKIDN2014570 | 21.269 | 0 | 0 | 0 | 0 | 0 | 0 |
| TKIDN2014964 | 0 | 0 | 0 | 0 | 0 | 39.516 | 0 |
| TKIDN2015071 | 38.914 | 0 | 0 | 0 | 0 | 0 | 0 |
| TKIDN2015423 | 18.462 | 1.461 | 0 | 9.742 | 2.369 | 0 | 9.884 |
| TKIDN2015788 | 5.261 | 0 | 0 | 2.684 | 0 | 0 | 2.917 |
| TLIVE2001327 | 0 | 0 | 0 | 0 | 0 | 0 | 5.201 |
| TLIVE2002046 | 5.445 | 4.164 | 0 | 1.852 | 0 | 0 | 12.076 |
| TLIVE2003200 | 0 | 0 | 0 | 12.922 | 0 | 0 | 0 |
| TOVAR2000904 | 0 | 0 | 0 | 4.474 | 0 | 0 | 0 |
| TRACH1000011 | 0 | 0 | 26.076 | 7.510 | 0 | 26.541 | 0 |
| TRACH1000018 | 0 | 0 | 0 | 0 | 76.867 | 0 | 0 |
| TRACH1000030 | 2.759 | 0 | 0 | 2.815 | 5.135 | 0 | 11.476 |
| TRACH1000181 | 4.738 | 0 | 0 | 0 | 0 | 0 | 10.507 |
| TRACH1000193 | 21.722 | 0 | 0 | 0 | 0 | 0 | 0 |
| TRACH1000205 | 19.677 | 0 | 0 | 4.015 | 0 | 0 | 0 |
| TRACH2000045 | 8.249 | 0 | 19.483 | 5.611 | 0 | 0 | 18.297 |
| TRACH2000047 | 0 | 0 | 0 | 0 | 0 | 0 | 11.879 |
| TRACH2000079 | 1.625 | 1.243 | 1.919 | 0.553 | 2.016 | 0 | 1.802 |
| TRACH2000237 | 0 | 0 | 0 | 5.485 | 0 | 0 | 5.962 |
| TRACH2000248 | 2.791 | 1.601 | 0 | 2.135 | 0 | 0 | 0.774 |
| TRACH2000321 | 0.983 | 0 | 0 | 1.003 | 0 | 0 | 0 |
| TRACH2000359 | 0 | 0 | 0 | 3.042 | 0 | 0 | 0 |
| TRACH2000393 | 0 | 0 | 0 | 0 | 0 | 0 | 37.734 |
| TRACH2000420 | 0 | 0 | 0 | 3.421 | 0 | 0 | 0 |
| TRACH2000461 | 12.002 | 0 | 6.074 | 8.746 | 0 | 0 | 3.803 |
| TRACH2000472 | 1.708 | 0 | 0 | 0.871 | 0 | 0 | 0.947 |
| TRACH2000502 | 47.167 | 0 | 0 | 0 | 0 | 0 | 0 |
| TRACH2000540 | 0 | 0 | 0 | 0 | 0 | 0 | 3.160 |
| TRACH2000780 | 6.118 | 0 | 3.096 | 0.892 | 0 | 0 | 0.969 |
| TRACH2000920 | 0 | 0 | 0 | 0 | 12.339 | 11.954 | 3.676 |
| TRACH2000926 | 0 | 0 | 0 | 2.847 | 10.384 | 0 | 0 |
| TRACH2000959 | 0 | 0.560 | 0 | 0 | 0 | 0 | 0.271 |
| TRACH2000972 | 0 | 2.719 | 2.099 | 0 | 0 | 0 | 1.314 |
| TRACH2001021 | 0 | 0 | 1.483 | 0 | 0 | 0 | 1.393 |
| TRACH2001085 | 0 | 0 | 0 | 0 | 76.867 | 0 | 0 |
| TRACH2001109 | 29.509 | 3.361 | 2.224 | 22.633 | 2.337 | 0 | 5.802 |
| TRACH2001289 | 1.360 | 0.780 | 0 | 0.694 | 2.530 | 1.226 | 0.377 |
| TRACH2001314 | 16.450 | 0 | 0 | 14.918 | 0 | 0 | 4.054 |
| TRACH2001339 | 0 | 67.193 | 0 | 0 | 0 | 0 | 0 |
| TRACH2001341 | 6.374 | 0 | 0 | 6.503 | 0 | 0 | 0 |
| TRACH2001428 | 2.524 | 0 | 0 | 0 | 0 | 0 | 0 |
| TRACH2001432 | 1.112 | 2.552 | 0 | 0 | 0 | 4.011 | 3.701 |
| TRACH2001463 | 3.062 | 0 | 0 | 3.124 | 0 | 0 | 0 |
| TRACH2001478 | 2.902 | 0 | 2.056 | 1.184 | 0 | 0 | 0.644 |
| TRACH2001549 | 8.457 | 0 | 0 | 21.569 | 0 | 0 | 4.689 |
| TRACH2001607 | 2.009 | 6.913 | 0 | 2.049 | 3.738 | 3.621 | 1.114 |
| TRACH2001612 | 0 | 0 | 0 | 4.075 | 0 | 0 | 4.430 |
| TRACH2001646 | 0 | 51.883 | 0 | 0 | 0 | 0 | 0 |
| TRACH2001810 | 1.553 | 0 | 2.751 | 2.377 | 2.890 | 5.600 | 2.584 |
| TRACH2001898 | 0 | 2.339 | 0 | 0 | 0 | 0 | 1.131 |
| TRACH2001996 | 0 | 67.193 | 0 | 0 | 0 | 0 | 0 |
| TRACH2002100 | 0 | 0 | 0 | 0 | 0 | 0 | 38.037 |
| TRACH2002333 | 0 | 0 | 0 | 0 | 0 | 0 | 32.604 |
| TRACH2002537 | 0.927 | 2.128 | 0 | 0.946 | 3.452 | 0 | 6.171 |
| TRACH2002664 | 0 | 0 | 0 | 0 | 0 | 0 | 1.688 |
| TRACH2002803 | 0 | 0 | 0 | 0 | 23.268 | 7.514 | 0 |
| TRACH2003272 | 3.705 | 8.500 | 13.125 | 3.780 | 0 | 0 | 4.109 |
| TRACH2003323 | 7.119 | 0 | 0 | 9.079 | 0 | 0 | 3.947 |
| TRACH2003347 | 0 | 0 | 0 | 0 | 0 | 5.728 | 1.762 |
| TRACH2005541 | 0 | 0 | 0 | 9.921 | 0 | 0 | 10.783 |
| TRACH2005796 | 0 | 0 | 0 | 0 | 0 | 0 | 49.749 |
| TRACH2005811 | 2.109 | 2.419 | 0 | 2.152 | 0 | 0 | 3.508 |
| TRACH2006049 | 47.167 | 0 | 0 | 0 | 0 | 0 | 0 |
| TRACH2006378 | 8.938 | 0 | 0 | 0 | 0 | 0 | 0 |
| TRACH2007399 | 0 | 0 | 0 | 0.481 | 0 | 1.698 | 1.045 |
| TRACH2007969 | 2.538 | 0 | 0 | 0 | 0 | 0 | 0 |
| TRACH2008113 | 0 | 0 | 65.939 | 0 | 0 | 0 | 0 |
| TRACH2008300 | 10.186 | 3.895 | 6.014 | 13.857 | 0 | 12.243 | 11.296 |
| TRACH2008472 | 0 | 0 | 5.558 | 0 | 0 | 0 | 8.700 |
| TRACH2008478 | 17.859 | 0 | 0 | 0 | 0 | 0 | 0 |
| TRACH2008716 | 0 | 11.638 | 0 | 0 | 0 | 0 | 0 |
| TRACH2008891 | 21.694 | 0 | 0 | 0 | 0 | 0 | 0 |
| TRACH2009006 | 0 | 0 | 0 | 0 | 0 | 0 | 3.892 |
| TRACH2011113 | 0 | 0 | 0 | 4.817 | 0 | 0 | 5.236 |
| TRACH2011500 | 13.502 | 0 | 0 | 0 | 0 | 0 | 0 |
| TRACH2011894 | 0 | 0 | 0 | 0 | 0 | 32.063 | 0 |
| TRACH2012298 | 0 | 3.256 | 0 | 0 | 0 | 0 | 0 |
| TRACH2012376 | 0 | 6.157 | 0 | 0 | 0 | 9.677 | 2.976 |
| TRACH2012497 | 6.473 | 0 | 0 | 0 | 0 | 0 | 0 |
| TRACH2012811 | 0 | 17.886 | 0 | 0 | 0 | 0 | 34.582 |
| TRACH2013552 | 10.389 | 0 | 0 | 31.797 | 0 | 0 | 0 |
| TRACH2013585 | 23.471 | 0 | 0 | 23.946 | 0 | 0 | 0 |
| TRACH2014077 | 3.402 | 0 | 0 | 6.941 | 0 | 0 | 7.545 |
| TRACH2014124 | 2.064 | 0 | 3.657 | 0 | 0 | 0 | 3.434 |
| TRACH2014997 | 14.151 | 0 | 0 | 7.219 | 0 | 0 | 0 |
| TRACH2015823 | 2.188 | 0 | 0 | 4.464 | 0 | 0 | 2.426 |
| TRACH2015939 | 0 | 12.887 | 0 | 5.731 | 0 | 0 | 6.229 |
| TRACH2016131 | 0 | 67.193 | 0 | 0 | 0 | 0 | 0 |
| TRACH2018034 | 0 | 0 | 0 | 0 | 0 | 0 | 49.749 |
| TRACH2018317 | 2.930 | 0 | 0 | 0 | 0 | 0 | 0 |
| TRACH2018446 | 0 | 0 | 0 | 0 | 0 | 0 | 9.275 |
| TRACH2018950 | 0 | 17.231 | 0 | 0 | 0 | 0 | 0 |
| TRACH2023299 | 0 | 0 | 0 | 0 | 0 | 0 | 14.157 |
| TRACH2025535 | 5.806 | 1.332 | 0 | 2.369 | 0 | 0 | 1.288 |
| TRACH3000014 | 0 | 0 | 0 | 18.547 | 0 | 0 | 0 |
| TRACH3000134 | 36.165 | 0 | 0 | 0 | 0 | 0 | 0 |
| TRACH3000780 | 0 | 0 | 0 | 47.666 | 0 | 0 | 0 |
| TRACH3001550 | 0 | 0 | 0 | 47.666 | 0 | 0 | 0 |
| TRACH3002192 | 4.989 | 2.861 | 0 | 6.999 | 2.321 | 0 | 2.766 |
| TRACH3002605 | 0 | 0 | 0 | 47.666 | 0 | 0 | 0 |
| TRACH3002752 | 10.215 | 0 | 0 | 10.422 | 19.010 | 0 | 0 |
| TRACH3003037 | 64.100 | 0 | 0 | 0 | 0 | 0 | 0 |
| TRACH3003547 | 4.229 | 0 | 0 | 0 | 0 | 0 | 0 |
| TRACH3003872 | 2.745 | 0 | 0 | 5.600 | 10.216 | 0 | 0 |
| TRACH3004068 | 0 | 0 | 0 | 0 | 0 | 5.139 | 1.581 |
| TRACH3004424 | 17.006 | 0 | 0 | 0 | 0 | 0 | 18.859 |
| TRACH3004721 | 8.721 | 6.669 | 0 | 2.966 | 0 | 0 | 3.224 |
| TRACH3005294 | 7.428 | 0 | 0 | 0 | 0 | 0 | 0 |
| TRACH3006717 | 18.347 | 0 | 0 | 11.231 | 0 | 0 | 0 |
| TRACH3007479 | 1.075 | 0 | 0 | 0 | 0 | 0 | 0 |
| TRACH3007625 | 1.175 | 5.394 | 8.329 | 10.794 | 0 | 0 | 3.911 |
| TRACH3007689 | 47.167 | 0 | 0 | 0 | 0 | 0 | 0 |
| TRACH3008093 | 2.449 | 5.619 | 0 | 0 | 0 | 0 | 2.716 |
| TRACH3008201 | 47.167 | 0 | 0 | 0 | 0 | 0 | 0 |
| TRACH3008508 | 0 | 0 | 0 | 0 | 0 | 0 | 21.245 |
| TRACH3008632 | 25.351 | 0 | 0 | 8.621 | 0 | 0 | 9.371 |
| TRACH3009001 | 0 | 0 | 0 | 23.904 | 0 | 0 | 0 |
| TRACH3009008 | 24.495 | 0 | 0 | 0 | 0 | 0 | 0 |
| TRACH3009148 | 17.939 | 0 | 0 | 0 | 0 | 0 | 0 |
| TRACH3009455 | 47.167 | 0 | 0 | 0 | 0 | 0 | 0 |
| TRACH3010079 | 48.305 | 0 | 0 | 24.641 | 0 | 0 | 0 |
| TRACH3016805 | 4.502 | 0 | 0 | 0 | 0 | 0 | 0 |
| TRACH3022198 | 0 | 0 | 0 | 8.480 | 30.935 | 0 | 0 |
| TRACH3024342 | 47.167 | 0 | 0 | 0 | 0 | 0 | 0 |
| TRACH3024671 | 47.167 | 0 | 0 | 0 | 0 | 0 | 0 |
| TRACH3025316 | 0 | 0 | 0 | 31.291 | 0 | 0 | 0 |
| TRACH3026303 | 5.605 | 0 | 0 | 11.436 | 0 | 0 | 0 |
| TRACH3026676 | 11.631 | 26.685 | 0 | 0 | 0 | 0 | 12.899 |
| TRACH3028855 | 22.309 | 0 | 0 | 0 | 0 | 0 | 0 |
| TRACH3032570 | 47.167 | 0 | 0 | 0 | 0 | 0 | 0 |
| TRACH3036932 | 14.659 | 0 | 0 | 14.956 | 0 | 0 | 16.256 |
| TRACH3036942 | 0.244 | 0 | 0.864 | 0 | 0 | 0 | 0 |
| TRACH3037067 | 0 | 3.688 | 0 | 0 | 0 | 0 | 0 |
| TRACH3038399 | 12.435 | 0 | 0 | 0 | 0 | 0 | 13.790 |
| TSTOM1000135 | 0 | 0 | 0 | 0 | 0 | 0 | 9.361 |
| TSTOM2000235 | 0 | 0 | 0 | 4.535 | 0 | 0 | 0 |
| TUTER1000122 | 0 | 0 | 0 | 3.330 | 0 | 0 | 0 |
| TUTER1000137 | 4.294 | 0 | 0 | 0 | 0 | 0 | 0 |
| TUTER2000904 | 0 | 0 | 0 | 5.697 | 0 | 0 | 3.096 |
| UMVEN1000122 | 0 | 0 | 0 | 0.997 | 0 | 0 | 0 |
| UMVEN1000143 | 0 | 0 | 2.909 | 0 | 0 | 0 | 0 |
| UMVEN1000186 | 0 | 0.606 | 0 | 0 | 0 | 0 | 0 |
| UMVEN2000121 | 0 | 0 | 0 | 0 | 0 | 0 | 1.149 |
| UMVEN2000133 | 1.758 | 0 | 0 | 0.598 | 0 | 0 | 0.650 |
| UMVEN2000152 | 0 | 1.807 | 0 | 0 | 0 | 0 | 0.873 |
| UMVEN2000354 | 0 | 1.890 | 2.918 | 0 | 0 | 2.970 | 0.913 |
| UMVEN2000453 | 0.522 | 2.396 | 0 | 0.533 | 0 | 1.883 | 0 |
| UTERU1000096 | 0 | 0 | 0 | 0 | 75.732 | 0 | 0 |
| UTERU1000106 | 0 | 13.221 | 0 | 0 | 0 | 0 | 0 |
| UTERU1000384 | 7.127 | 0 | 0 | 0 | 0 | 0 | 7.904 |
| UTERU2000023 | 0 | 0 | 0 | 10.444 | 0 | 0 | 0 |
| UTERU2000095 | 2.069 | 0 | 1.466 | 0 | 1.540 | 0 | 1.836 |
| UTERU2000260 | 0 | 0 | 0 | 0 | 0 | 0 | 23.088 |
| UTERU2000329 | 0 | 0 | 0 | 0 | 0 | 0 | 31.736 |
| UTERU2000332 | 0 | 0 | 0 | 0 | 0 | 0 | 5.244 |
| UTERU2000418 | 0 | 65.795 | 0 | 0 | 0 | 0 | 0 |
| UTERU2000424 | 1.699 | 3.897 | 3.009 | 0 | 0 | 3.062 | 0 |
| UTERU2000541 | 31.534 | 0 | 0 | 6.434 | 0 | 0 | 6.994 |
| UTERU2000925 | 0 | 0 | 0 | 10.625 | 38.760 | 0 | 0 |
| UTERU2001110 | 0 | 0 | 0 | 0 | 75.732 | 0 | 0 |
| UTERU2001607 | 1.475 | 3.384 | 0 | 3.010 | 0 | 0 | 3.272 |
| UTERU2001658 | 0 | 0 | 0 | 9.037 | 0 | 0 | 0 |
| UTERU2002294 | 1.815 | 0 | 0 | 0 | 0 | 0 | 4.026 |
| UTERU2002410 | 0 | 2.694 | 2.080 | 0 | 0 | 2.117 | 1.302 |
| UTERU2002662 | 1.779 | 0 | 0 | 0 | 0 | 0 | 3.946 |
| UTERU2002964 | 0 | 0 | 74.813 | 0 | 0 | 0 | 0 |
| UTERU2003057 | 0 | 0 | 0 | 0 | 0 | 9.326 | 0 |
| UTERU2004037 | 0 | 0 | 0 | 0 | 0 | 0 | 2.431 |
| UTERU2004664 | 1.697 | 0 | 0 | 0 | 0 | 0 | 1.882 |
| UTERU2004807 | 0 | 2.305 | 0 | 1.025 | 0 | 0 | 0 |
| UTERU2004929 | 0 | 0 | 0 | 11.843 | 0 | 0 | 0 |
| UTERU2005074 | 0 | 0 | 0 | 0 | 0 | 0 | 12.593 |
| UTERU2005354 | 4.375 | 0 | 7.749 | 0 | 0 | 0 | 4.852 |
| UTERU2005593 | 4.490 | 0 | 0 | 0 | 4.178 | 4.047 | 4.979 |
| UTERU2005601 | 0 | 5.848 | 0 | 2.601 | 0 | 0 | 0 |
| UTERU2005621 | 0 | 0 | 15.971 | 0 | 0 | 8.128 | 0 |
| UTERU2005664 | 0 | 0 | 0 | 11.401 | 0 | 0 | 0 |
| UTERU2006115 | 7.837 | 0 | 0 | 0 | 0 | 0 | 17.383 |
| UTERU2006486 | 0 | 0 | 0 | 0 | 0 | 0 | 48.181 |
| UTERU2006524 | 0 | 0 | 0 | 46.104 | 0 | 0 | 0 |
| UTERU2006547 | 0 | 0 | 0 | 0 | 75.732 | 0 | 0 |
| UTERU2006593 | 2.953 | 0 | 0 | 1.506 | 0 | 0 | 3.275 |
| UTERU2006643 | 0 | 0 | 30.082 | 0 | 0 | 0 | 0 |
| UTERU2007004 | 0 | 0 | 0 | 0 | 0 | 75.144 | 0 |
| UTERU2007253 | 0 | 0 | 0 | 0 | 0 | 0 | 11.427 |
| UTERU2007924 | 0 | 0 | 0 | 0 | 9.955 | 9.644 | 0 |
| UTERU2008018 | 0 | 0 | 0 | 0 | 0 | 75.144 | 0 |
| UTERU2008040 | 0 | 0 | 0 | 24.014 | 0 | 0 | 0 |
| UTERU2008085 | 0.271 | 1.243 | 0.960 | 0.276 | 1.345 | 2.605 | 0.300 |
| UTERU2008130 | 0 | 0 | 0 | 46.104 | 0 | 0 | 0 |
| UTERU2008302 | 2.672 | 3.065 | 4.733 | 1.363 | 4.972 | 4.817 | 1.482 |
| UTERU2008426 | 0 | 0 | 0 | 0 | 0 | 0 | 24.416 |
| UTERU2008747 | 0 | 0 | 0 | 0 | 32.895 | 0 | 19.602 |
| UTERU2008938 | 4.922 | 0 | 22.598 | 9.160 | 0 | 5.458 | |
| UTERU2008939 | 14.854 | 0 | 0 | 15.154 | 0 | 0 | 0 |
| UTERU2009335 | 0 | 0 | 0 | 3.094 | 0 | 21.872 | 0 |
| UTERU2009435 | 26.737 | 0 | 0 | 16.367 | 0 | 0 | 5.930 |
| UTERU2009972 | 3.543 | 0 | 0 | 3.614 | 0 | 0 | 0 |
| UTERU2010320 | 0 | 0 | 74.813 | 0 | 0 | 0 | 0 |
| UTERU2010417 | 0.315 | 0.723 | 0 | 0 | 0 | 1.137 | 0.699 |
| UTERU2011287 | 0 | 0 | 0 | 33.486 | 0 | 0 | 0 |
| UTERU2011621 | 9.930 | 0 | 0 | 10.131 | 0 | 11.011 | |
| UTERU2011806 | 0 | 0 | 0 | 0 | 0 | 50.193 | 0 |
| UTERU2011906 | 13.639 | 0 | 0 | 0 | 0 | 0 | 0 |
| UTERU2012031 | 0 | 0 | 0 | 46.104 | 0 | 0 | 0 |
| UTERU2012230 | 8.799 | 4.037 | 0 | 16.159 | 0 | 0 | 13.661 |
| UTERU2012286 | 0 | 0 | 0 | 0 | 0 | 0 | 2.810 |
| UTERU2012715 | 0 | 65.795 | 0 | 0 | 0 | 0 | 0 |
| UTERU2013078 | 0 | 0 | 0 | 0 | 0 | 49.453 | 0 |
| UTERU2013586 | 0 | 0 | 23.341 | 13.444 | 0 | 0 | 0 |
| UTERU2014024 | 0 | 0 | 0 | 13.222 | 0 | 0 | 0 |
| UTERU2014167 | 0 | 0 | 0 | 0 | 0 | 0 | 1.011 |
| UTERU2014464 | 0 | 0 | 0 | 0 | 50.246 | 0 | 0 |
| UTERU2014601 | 0 | 15.889 | 0 | 0 | 0 | 0 | 0 |
| UTERU2014898 | 0 | 0 | 0 | 1.552 | 0 | 0 | 0 |
| UTERU2015108 | 0 | 0 | 0 | 6.438 | 0 | 0 | 0 |
| UTERU2015653 | 0 | 0 | 0 | 0 | 0 | 0 | 0.647 |
| UTERU2016426 | 12.709 | 0 | 0 | 0 | 0 | 0 | 14.093 |
| UTERU2016757 | 45.606 | 0 | 0 | 0 | 0 | 0 | 0 |
| UTERU2016799 | 0 | 0 | 0 | 2.967 | 0 | 0 | 6.449 |
| UTERU2016822 | 10.050 | 0 | 0 | 6.152 | 0 | 0 | 0 |
| UTERU2018200 | 0 | 0 | 0 | 0 | 0 | 0 | 53.828 |
| UTERU2018364 | 0 | 0 | 0 | 46.104 | 0 | 0 | 0 |
| UTERU2019005 | 0 | 0 | 0 | 0 | 0 | 0 | 7.162 |
| UTERU2019096 | 13.821 | 0 | 8.160 | 2.350 | 0 | 0 | 5.109 |
| UTERU2019706 | 45.606 | 0 | 0 | 0 | 0 | 0 | 0 |
| UTERU2019940 | 0 | 0 | 0 | 0 | 0 | 0 | 48.181 |
| UTERU2021163 | 0 | 0 | 0 | 46.104 | 0 | 0 | 0 |
| UTERU2021820 | 24.929 | 0 | 0 | 0 | 0 | 0 | 27.645 |
| UTERU2023039 | 45.606 | 0 | 0 | 0 | 0 | 0 | 0 |
| UTERU2023175 | 0 | 0 | 0 | 0 | 0 | 5.368 | 1.651 |
| UTERU2026203 | 45.606 | 0 | 0 | 0 | 0 | 0 | 0 |
| UTERU2028734 | 21.953 | 0 | 0 | 0 | 0 | 0 | 0 |
| UTERU2030213 | 0 | 0 | 0 | 25.133 | 0 | 0 | 0 |
| UTERU2030280 | 0 | 0 | 0 | 0 | 0 | 0 | 48.181 |
| UTERU3000298 | 4.627 | 0 | 0 | 18.881 | 0 | 0 | 5.131 |
| UTERU3000899 | 0 | 0 | 0 | 0 | 0 | 0 | 31.292 |
| UTERU3001158 | 0 | 0 | 0 | 0 | 0 | 0 | 36.825 |
| UTERU3001571 | 0 | 0 | 0 | 0 | 0 | 0 | 48.181 |
| UTERU3003135 | 0 | 0 | 0 | 33.486 | 0 | 0 | 0 |
| UTERU3003660 | 7.363 | 0 | 0 | 7.512 | 0 | 0 | 16.330 |
| UTERU3004384 | 0 | 0 | 0 | 46.104 | 0 | 0 | 0 |
| UTERU3004418 | 29.112 | 0 | 0 | 0 | 0 | 0 | 0 |
| UTERU3004709 | 0 | 0 | 0 | 0 | 0 | 0 | 48.181 |
| UTERU3005159 | 0 | 0 | 0 | 35.590 | 0 | 0 | 0 |
| UTERU3005230 | 24.419 | 0 | 0 | 0 | 0 | 0 | 0 |
| UTERU3005422 | 0 | 0 | 0 | 21.641 | 0 | 0 | 0 |
| UTERU3005767 | 1.190 | 0 | 0 | 0 | 4.430 | 0 | 2.640 |
| UTERU3005907 | 0 | 0 | 0 | 0 | 0 | 0 | 14.514 |
| UTERU3007640 | 45.606 | 0 | 0 | 0 | 0 | 0 | 0 |
| UTERU3008280 | 31.124 | 0 | 0 | 31.754 | 0 | 0 | 0 |
| UTERU3009259 | 0 | 0 | 0 | 46.104 | 0 | 0 | 0 |
| UTERU3009871 | 36.230 | 0 | 0 | 18.482 | 0 | 0 | 0 |
| UTERU3010409 | 3.461 | 0 | 0 | 7.062 | 0 | 0 | 0 |
| UTERU3012414 | 0 | 0 | 0 | 0 | 0 | 0 | 48.181 |
| UTERU3013167 | 45.606 | 0 | 0 | 0 | 0 | 0 | 0 |
| UTERU3016273 | 0 | 0 | 0 | 46.104 | 0 | 0 | 0 |
| UTERU3017995 | 0 | 0 | 0 | 0 | 0 | 0 | 12.128 |
| UTERU3018172 | 0 | 0 | 0 | 0 | 0 | 0 | 35.368 |

[0751] Genes whose expression levels were negligibly low in each of the above-described libraries are shown with their clone names below.

[0752] 3NB691000018, 3NB691000085, 3NB691000113, 3NB691000129, 3NB692000012, 3NB692000029, 3NB692000102, 3NB692000154, 3NB692000276, 3NB692000305, 3NB692000429, 3NB692000484, 3NB692000545, 3NB692000973, 3NB692001002, 3NB692001034, 3NB692001040, 3NB692001123, 3NB692001267, 3NB692001339, 3NB692001349, 3NB692001366, 3NB692001408, 3NB692001459, 3NB692001471, 3NB692001496, 3NB692001501, 3NB692001507, 3NB692001511, 3NB692001519, 3NB692001520, 3NB692001538, 3NB692001548, 3NB692001637, 3NB692001853, 3NB692001861, 3NB692002051, 3NB692002365, 3NB692002685, 3NB692002806, 3NB692003538, 3NB692004045, 3NB692004724, 3NB692005439, 3NB692006952, 3NB692008178, 3NB692008729, ACTVT2000380, ADIPS1000064, ADIPS2000069, ADIPS2000088, ADIPS2000245, ADRGL1000038, ADRGL1000067, ADRGL1000111, ADRGL1000147, ADRGL1000160, ADRGL1000165, ADRGL1000182, ADRGL2000056, ADRGL2000064, ADRGL2000074, ADRGL2000085, ADRGL2000117, ADRGL2000142, ADRGL2000172, ADRGL2000248, ADRGL2000261, ADRGL2000323, ADRGL2000328, ADRGL2000353, ADRGL2000384, ADRGL2000428, ADRGL2000636, ADRGL2000644, ADRGL2000968, ADRGL2001119, ADRGL2001229, ADRGL2001287, ADRGL2001301, ADRGL2001354, ADRGL2001554, ADRGL2001651, ADRGL2001756, ADRGL2001830, ADRGL2001836, ADRGL2001854, ADRGL2002029, ADRGL2002260, ADRGL2002392, ADRGL2002753, ADRGL2002857, ADRGL2003017, ADRGL2003329, ADRGL2003552, ADRGL2003585, ADRGL2003638, ADRGL2003684, ADRGL2003773, ADRGL2004031, ADRGL2004077, ADRGL2004451, ADRGL2004459, ADRGL2004676, ADRGL2004708, ADRGL2004724, ADRGL2004749, ADRGL2004770, ADRGL2004777, ADRGL2004833, ADRGL2005336, ADRGL2005564, ADRGL2005756, ADRGL2005838, ADRGL2005926, ADRGL2005961, ADRGL2006034, ADRGL2006124, ADRGL2006177, ADRGL2006193, ADRGL2006377, ADRGL2006677, ADRGL2006732, ADRGL2006767, ADRGL2006817, ADRGL2006846, ADRGL2006886, ADRGL2007080, ADRGL2007125, ADRGL2007283, ADRGL2007313, ADRGL2007357, ADRGL2007636, ADRGL2007651, ADRGL2007810, ADRGL2007877, ADRGL2007974, ADRGL2008023, ADRGL2008331, ADRGL2008337, ADRGL2008535, ADRGL2008966, ADRGL2009146, ADRGL2009324, ADRGL2009489, ADRGL2009533, ADRGL2009691, ADRGL2009755, ADRGL2010315, ADRGL2010594, ADRGL2010860, ADRGL2010974, ADRGL2011190, ADRGL2011330, ADRGL2012038, ADRGL2012179, AHMSC1000138, ASTRO1000018, ASTRO1000029, ASTRO1000096, ASTRO1000165, ASTRO2000011, ASTRO2000095, ASTRO2000141, ASTRO2000191, ASTRO2000278, ASTRO2000403, ASTRO2000417, ASTRO2000533, ASTRO2000653, ASTRO2000725, ASTRO2000801, ASTRO2001001, ASTRO2001008, ASTRO2001088, ASTRO2001122, ASTRO2001227, ASTRO2001249, ASTRO2001480, ASTRO2001806, ASTRO2002024, ASTRO2002064, ASTRO2002459, ASTRO2002571, ASTRO2002632, ASTRO2002659, ASTRO2002693, ASTRO2002720, ASTRO2002743, ASTRO2002842, ASTRO2003212, ASTRO2003581, ASTRO2003632, ASTRO2003925, ASTRO2003960, ASTRO2004032, ASTRO2004051, ASTRO2004177, ASTRO2004217, ASTRO2004297, ASTRO2004584, ASTRO2004751, ASTRO2004877, ASTRO2005008, ASTRO2005081, ASTRO2005096, ASTRO2005242, ASTRO2005273, ASTRO2005343, ASTRO2005413, ASTRO2005553, ASTRO2005557, ASTRO2005575, ASTRO2005593, ASTRO2005687, ASTRO2005726, ASTRO2005896, ASTRO2005902, ASTRO2006356, ASTRO2006732, ASTRO2006747, ASTRO2006920, ASTRO2006952, ASTRO2007047, ASTRO2007221, ASTRO2007377, ASTRO2007515, ASTRO2007578, ASTRO2007643, ASTRO2007666, ASTRO2007956, ASTRO2007962, ASTRO2008239, ASTRO2008409, ASTRO2008425, ASTRO2008508, ASTRO2008777, ASTRO2008895, ASTRO2008960, ASTRO2009118, ASTRO2009177, ASTRO2009333, ASTRO2009458, ASTRO2009526, ASTRO2009879, ASTRO2010582, ASTRO2010615, ASTRO2010962, ASTRO2010996, ASTRO2011149, ASTRO2011426, ASTRO2011437, ASTRO2011461, ASTRO2011834, ASTRO2011893, ASTRO2013124, ASTRO2013671, ASTRO2013802, ASTRO2014211, ASTRO2014363, ASTRO2014498, ASTRO2014561, ASTRO2014923, ASTRO2014961, ASTRO2015162, ASTRO2015185, ASTRO2015529, ASTRO2015987, ASTRO2016044, ASTRO2016148, ASTRO2016681, ASTRO2016819, ASTRO2016847, ASTRO2016892, ASTRO2017348, ASTRO2017627, ASTRO2018373, ASTRO2019039, ASTRO2019171, ASTRO3000154, ASTRO3000172, ASTRO3000177, ASTRO3000301, ASTRO3000474, BEAST2000454, BGGI11000193, BGGI11000285, BGGI12000022, BGGI12000067, BGGI12000161, BGGI12000533, BGGI12000544, BGGI12000684, BGGI12000693, BGGI12001097, BGGI12001241, BGGI12001247, BLADE1000176, BLADE2000181, BLADE2000256, BLADE2000340, BLADE2000389, BLADE2000463, BLADE2000492, BLADE2000579, BLADE2000640, BLADE2000866, BLADE2000938, BLADE2001031, BLADE2001133, BLADE2001138, BLADE2001141, BLADE2001458, BLADE2001575, BLADE2001753, BLADE2001935, BLADE2001940, BLADE2001987, BLADE2002073, BLADE2002310, BLADE2002730, BLADE2002744, BLADE2002782, BLADE2002947, BLADE2002972, BLADE2003474, BLADE2003916, BLADE2004089, BLADE2004345, BLADE2004389, BLADE2004462, BLADE2004628, BLADE2004670, BLADE2004722, BLADE2005036, BLADE2005038, BLADE2005229, BLADE2005459, BLADE2005792, BLADE2006043, BLADE2006415, BLADE2006607, BLADE2006826, BLADE2006849, BLADE2006947, BLADE2007033, BLADE2007666, BLADE2007722, BLADE2007735, BLADE2007744, BLADE2007799, BLADE2007923, BLADE2007958, BLADE2008281, BLADE2008454, BLADE2008461, BLADE2008479, BLADE2008539, BLADE2008809, BLADE2008995, BLADE2009452, BLADE2009479, BLADE2009593, BNGH41000104, BNGH41000118, BNGH41000153, BNGH41000169, BNGH41000177, BNGH41000216, BNGH41000235, BNGH42000130, BNGH42000132, BNGH42000405, BNGH42000675, BNGH42000791, BNGH42000815, BNGH42000994, BNGH42001406, BNGH42001576, BNGH42001724, BNGH42002244, BNGH42002487, BNGH42002489, BNGH42003529, BNGH42003570, BNGH42003641, BNGH42004076, BNGH42004291, BNGH42004538, BNGH42004679, BNGH42005017, BNGH42005235, BNGH42005504, BNGH42006226, BNGH42006234, BNGH42007037, BNGH42007366, BNGH42007594, BNGH42007798, BNGH42008199, BNGH42008510, BNGH42008649, BNGH42008832, BNGH42008850, BNGH42008943, BNGH42009021, BRACE1000047, BRACE1000084, BRACE1000087, BRACE1000092, BRACE1000093, BRACE1000114, BRACE1000124, BRACE1000132, BRACE1000166, BRACE1000239, BRACE1000451, BRACE1000475, BRACE1000572, BRACE2000061, BRACE2000077, BRACE2000078, BRACE2000100, BRACE2000148, BRACE2000183, BRACE2000229, BRACE2000232, BRACE2000256, BRACE2000266, BRACE2000267, BRACE2000351, BRACE2000368, BRACE2000392, BRACE2000441, BRACE2000487, BRACE2000489, BRACE2000505, BRACE2000526, BRACE2000531, BRACE2000545, BRACE2000553, BRACE2000577, BRACE2000640, BRACE2000650, BRACE2000677, BRACE2000718, BRACE2000743, BRACE2000753, BRACE2000815, BRACE2000885, BRACE2000905, BRACE2000936, BRACE2000947, BRACE2000965, BRACE2000969, BRACE2000988, BRACE2001017, BRACE2001094, BRACE2001107, BRACE2001117, BRACE2001151, BRACE2001191, BRACE2001239, BRACE2001269, BRACE2001312, BRACE2001313, BRACE2001330, BRACE2001340, BRACE2001352, BRACE2001353, BRACE2001374, BRACE2001375, BRACE2001423, BRACE2001424, BRACE2001445, BRACE2001453, BRACE2001455, BRACE2001492, BRACE2001508, BRACE2001543, BRACE2001564, BRACE2001588, BRACE2001607, BRACE2001626, BRACE2001677, BRACE2001705, BRACE2001733, BRACE2001737, BRACE2001742, BRACE2001777, BRACE2001779, BRACE2001855, BRACE2001859, BRACE2001865, BRACE2001872, BRACE2001881, BRACE2001898, BRACE2001923, BRACE2001942, BRACE2001954, BRACE2001972, BRACE2001973, BRACE2002026, BRACE2002034, BRACE2002081, BRACE2002139, BRACE2002142, BRACE2002151, BRACE2002157, BRACE2002176, BRACE2002202, BRACE2002206, BRACE2002227, BRACE2002260, BRACE2002297, BRACE2002304, BRACE2002394, BRACE2002409, BRACE2002431, BRACE2002441, BRACE2002444, BRACE2002458, BRACE2002467, BRACE2002468, BRACE2002589, BRACE2002590, BRACE2002613, BRACE2002614, BRACE2002617, BRACE2002623, BRACE2002635, BRACE2002649, BRACE2002661, BRACE2002676, BRACE2002685, BRACE2002695, BRACE2002707, BRACE2002736, BRACE2002752, BRACE2002755, BRACE2002762, BRACE2002772, BRACE2002792, BRACE2002796, BRACE2002807, BRACE2002834, BRACE2002849, BRACE2002857, BRACE2002861, BRACE2002884, BRACE2002948, BRACE2003110, BRACE2003168, BRACE2003199, BRACE2003210, BRACE2003269, BRACE2003285, BRACE2003304, BRACE2003319, BRACE2003398, BRACE2003420, BRACE2003428, BRACE2003431, BRACE2003512, BRACE2003516, BRACE2003540, BRACE2003594, BRACE2003614, BRACE2003628, BRACE2003639, BRACE2003713, BRACE2003766, BRACE2003802, BRACE2003825, BRACE2003847, BRACE2003848, BRACE2003873, BRACE2003885, BRACE2003887, BRACE2003928, BRACE2003954, BRACE2003987, BRACE2005034, BRACE2005047, BRACE2005063, BRACE2005090, BRACE2005118, BRACE2005124, BRACE2005138, BRACE2005160, BRACE2005169, BRACE2005189, BRACE2005196, BRACE2005198, BRACE2005216, BRACE2005243, BRACE2005298, BRACE2005328, BRACE2005329, BRACE2005337, BRACE2005348, BRACE2005363, BRACE2005433, BRACE2005450, BRACE2005453, BRACE2005460, BRACE2005489, BRACE2005518, BRACE2005556, BRACE2005562, BRACE2005624, BRACE2005661, BRACE2005667, BRACE2005731, BRACE2005742, BRACE2005762, BRACE2005773, BRACE2005787, BRACE2005795, BRACE2005800, BRACE2005869, BRACE2005875, BRACE2005881, BRACE2005898, BRACE2005904, BRACE2005906, BRACE2005907, BRACE2005911, BRACE2005937, BRACE2005949, BRACE2005981, BRACE2005991, BRACE2006072, BRACE2006102, BRACE2006105, BRACE2006122, BRACE2006137, BRACE2006143, BRACE2006162, BRACE2006174, BRACE2006240, BRACE2006245, BRACE2006249, BRACE2006274, BRACE2006298, BRACE2006319, BRACE2006378, BRACE2006393, BRACE2006413, BRACE2006417, BRACE2006453, BRACE2006459, BRACE2006488, BRACE2006534, BRACE2006540, BRACE2006547, BRACE2006564, BRACE2006587, BRACE2006598, BRACE2006685, BRACE2006703, BRACE2006783, BRACE2006833, BRACE2006900, BRACE2006909, BRACE2006911, BRACE2006924, BRACE2006935, BRACE2006944, BRACE2006951, BRACE2006986, BRACE2007068, BRACE2007087, BRACE2007138, BRACE2007174, BRACE2007197, BRACE2007203, BRACE2007232, BRACE2007262, BRACE2007274, BRACE2007281, BRACE2007295, BRACE2007358, BRACE2007396, BRACE2007398, BRACE2007411, BRACE2007447, BRACE2007477, BRACE2007502, BRACE2007503, BRACE2007527, BRACE2007538, BRACE2007563, BRACE2007621, BRACE2007640, BRACE2007646, BRACE2007682, BRACE2007685, BRACE2007727, BRACE2007749, BRACE2007760, BRACE2007761, BRACE2007764, BRACE2007769, BRACE2007784, BRACE2007786, BRACE2007799, BRACE2007801, BRACE2007836, BRACE2007868, BRACE2007888, BRACE2007902, BRACE2007920, BRACE2007944, BRACE2008008, BRACE2008015, BRACE2008021, BRACE2008102, BRACE2008114, BRACE2008144, BRACE2008172, BRACE2008218, BRACE2008276, BRACE2008295, BRACE2008308, BRACE2008336, BRACE2008361, BRACE2008401, BRACE2008410, BRACE2008420, BRACE2008443, BRACE2008473, BRACE2008480, BRACE2008481, BRACE2008488, BRACE2008495, BRACE2008500, BRACE2008594, BRACE2008604, BRACE2008615, BRACE2008622, BRACE2008629, BRACE2008655, BRACE2008656, BRACE2008710, BRACE2008754, BRACE2008797, BRACE2008847, BRACE2008861, BRACE2008867, BRACE2008881, BRACE2008883, BRACE2008917, BRACE2008919, BRACE2008948, BRACE2008960, BRACE2008999, BRACE2009014, BRACE2009016, BRACE2009031, BRACE2009044, BRACE2009053, BRACE2009122, BRACE2009131, BRACE2009185, BRACE2009188, BRACE2009212, BRACE2009221, BRACE2009235, BRACE2009238, BRACE2009255, BRACE2009270, BRACE2009272, BRACE2009274, BRACE2009275, BRACE2009293, BRACE2009311, BRACE2009318, BRACE2009323, BRACE2.009421, BRACE2009428, BRACE2009434, BRACE2009437, BRACE2009533, BRACE2009558, BRACE2009591, BRACE2009620, BRACE2009654, BRACE2009721, BRACE2009732, BRACE2009754, BRACE2009828, BRACE2009886, BRACE2009907, BRACE2009957, BRACE2010170, BRACE2010171, BRACE2010203, BRACE2010208, BRACE2010336, BRACE2010348, BRACE2010440, BRACE2010444, BRACE2010477, BRACE2010535, BRACE2010550, BRACE2010598, BRACE2010632, BRACE2010642, BRACE2010684, BRACE2010813, BRACE2010828, BRACE2010837, BRACE2010888, BRACE2010937, BRACE2010983, BRACE2011007, BRACE2011025, BRACE2011199, BRACE2011265, BRACE2011389, BRACE2011478, BRACE2011545, BRACE2011592, BRACE2011611, BRACE2011646, BRACE2011677, BRACE2011703, BRACE2011747, BRACE2011838, BRACE2011892, BRACE2011904, BRACE2011947, BRACE2012061, BRACE2012062, BRACE2012185, BRACE2012222, BRACE2012232, BRACE2012291, BRACE2012510, BRACE2012625, BRACE2012653, BRACE2012833, BRACE2012838, BRACE2012936, BRACE2012947, BRACE2013009, BRACE2013010, BRACE2013126, BRACE2013132, BRACE2013149, BRACE2013369, BRACE2013806, BRACE2014108, BRACE2014161, BRACE2014232, BRACE2014268, BRACE2014475, BRACE2014780, BRACE2014818, BRACE2014821, BRACE2014824, BRACE2014854, BRACE2015031, BRACE2015262, BRACE2015270, BRACE2015314, BRACE2015352, BRACE2015436, BRACE2015741, BRACE2015756, BRACE2015969, BRACE2015995, BRACE2016058, BRACE2016315, BRACE2016325, BRACE2016335, BRACE2016362, BRACE2016366, BRACE2016465, BRACE2016516, BRACE2016583, BRACE2016708, BRACE2016821, BRACE2016896, BRACE2016981, BRACE2017108, BRACE2017124, BRACE2017298, BRACE2017410, BRACE2017438, BRACE2017580, BRACE2017587, BRACE2017720, BRACE2017872, BRACE2017929, BRACE2017985, BRACE2017992, BRACE2018443, BRACE2018448, BRACE2018568, BRACE2018700, BRACE2018727, BRACE2018759, BRACE2018782, BRACE2019044, BRACE2019244, BRACE2019258, BRACE2019371, BRACE2019467, BRACE2019510, BRACE2019528, BRACE2019618, BRACE2019696, BRACE2019703, BRACE2019843, BRACE2019865, BRACE2019872, BRACE2020028, BRACE2020077, BRACE2020097, BRACE2020157, BRACE2020278, BRACE2020358, BRACE2020467, BRACE2020584, BRACE2020652, BRACE2020709, BRACE2020742, BRACE2020756, BRACE2020863, BRACE2020982, BRACE2021143, BRACE2021148, BRACE2021245, BRACE2021254, BRACE2021264, BRACE2021344, BRACE2021433, BRACE2021478, BRACE2021541, BRACE2021670, BRACE2021695, BRACE2021721, BRACE2021936, BRACE2022030, BRACE2022158, BRACE2022196, BRACE2022270, BRACE2022328, BRACE2022389, BRACE2022394, BRACE2022435, BRACE2022448, BRACE2022450, BRACE2022549, BRACE2022633, BRACE2022693, BRACE2022848, BRACE2022928, BRACE2022990, BRACE2023069, BRACE2023070, BRACE2023268, BRACE2023284, BRACE2023404, BRACE2023451, BRACE2023540, BRACE2023633, BRACE2023727, BRACE2023744, BRACE2023800, BRACE2023801, BRACE2024074, BRACE2024222, BRACE2024610, BRACE2024627, BRACE2024826, BRACE2025018, BRACE2025316, BRACE2025333, BRACE2025452, BRACE2025492, BRACE2025710, BRACE2025796, BRACE2025992, BRACE2026054, BRACE2026131, BRACE2026141, BRACE2026293, BRACE2026294, BRACE2026404, BRACE2026675, BRACE2026725, BRACE2026836, BRACE2026920, BRACE2026971, BRACE2027221, BRACE2027258, BRACE2027312, BRACE2027382, BRACE2027389, BRACE2027408, BRACE2027770, BRACE2027879, BRACE2027970, BRACE2028171, BRACE2028410, BRACE2028741, BRACE2028956, BRACE2028970, BRACE2029112, BRACE2029356, BRACE2029396, BRACE2029581, BRACE2029644, BRACE2029849, BRACE2030039, BRACE2030096, BRACE2030323, BRACE2030326, BRACE2030345, BRACE2030736, BRACE2030883, BRACE2030884, BRACE2031232, BRACE2031527, BRACE2031531, BRACE2031553, BRACE2031899, BRACE2032044, BRACE2032090, BRACE2032134, BRACE2032148, BRACE2032182, BRACE2032329, BRACE2032385, BRACE2032436, BRACE2032538, BRACE2032584, BRACE2032823, BRACE2033128, BRACE2033394, BRACE2033478, BRACE2033720, BRACE2033786, BRACE2034434, BRACE2034523, BRACE2034616, BRACE2034622, BRACE2034870, BRACE2035003, BRACE2035120, BRACE2035124, BRACE2035191, BRACE2035278, BRACE2035441, BRACE2035485, BRACE2036005, BRACE2036096, BRACE2036743, BRACE2036830, BRACE2036834, BRACE2036900, BRACE2037294, BRACE2037299, BRACE2037310, BRACE2037431, BRACE2037692, BRACE2037847, BRACE2038114, BRACE2038269, BRACE2038271, BRACE2038329, BRACE2038492, BRACE2038551, BRACE2038618, BRACE2039009, BRACE2039128, BRACE2039170, BRACE2039249, BRACE2039286, BRACE2039297, BRACE2039327, BRACE2039362, BRACE2039475, BRACE2039600, BRACE2039607, BRACE2039734, BRACE2039823, BRACE2039832, BRACE2039893, BRACE2039986, BRACE2040138, BRACE2040325, BRACE2040514, BRACE2040640, BRACE2040987, BRACE2041009, BRACE2041095, BRACE2041200, BRACE2041264, BRACE2041890, BRACE2041898, BRACE2042394, BRACE2042398, BRACE2042550, BRACE2042620, BRACE2042628, BRACE2042873, BRACE2043036, BRACE2043105, BRACE2043142, BRACE2043248, BRACE2043349, BRACE2043381, BRACE2043774, BRACE2043942, BRACE2044057, BRACE2044263, BRACE2044304, BRACE2044473, BRACE2044510, BRACE2044640, BRACE2044816, BRACE2044946, BRACE2044949, BRACE2045300, BRACE2045428, BRACE2045445, BRACE2045596, BRACE2045772, BRACE2045947, BRACE2046251, BRACE2046295, BRACE2046976, BRACE2047011, BRACE2047232, BRACE2047350, BRACE2047377, BRACE2047385, BRACE2047492, BRACE2047558, BRACE2047573, BRACE2047835, BRACE2047893, BRACE2047975, BRACE3000071, BRACE3000404, BRACE3000520, BRACE3000697, BRACE3000840, BRACE3000973, BRACE3001002, BRACE3001058, BRACE3001066, BRACE3001113, BRACE3001217, BRACE3001299, BRACE3001384, BRACE3001391, BRACE3001403, BRACE3001595, BRACE3001754, BRACE3001948, BRACE3001973, BRACE3002184, BRACE3002298, BRACE3002344, BRACE3002390, BRACE3002420, BRACE3002508, BRACE3002541, BRACE3002756, BRACE3003004, BRACE3003026, BRACE3003053, BRACE3003413, BRACE3003595, BRACE3003698, BRACE3003866, BRACE3003920, BRACE3004058, BRACE3004113, BRACE3004150, BRACE3004205, BRACE3004358, BRACE3004435, BRACE3004477, BRACE3004772, BRACE3004783, BRACE3004843, BRACE3004862, BRACE3004880, BRACE3004887, BRACE3004981, BRACE3004996, BRACE3004998, BRACE3005103, BRACE3005127, BRACE3005145, BRACE3005217, BRACE3005225, BRACE3005430, BRACE3005870, BRACE3005903, BRACE3006113, BRACE3006185, BRACE3006226, BRACE3006462, BRACE3006463, BRACE3006553, BRACE3006872, BRACE3006917, BRACE3007058, BRACE3007084, BRACE3007085, BRACE3007322, BRACE3007472, BRACE3007559, BRACE3007625, BRACE3007642, BRACE3007649, BRACE3007767, BRACE3007869, BRACE3008036, BRACE3008066, BRACE3008092, BRACE3008095, BRACE3008137, BRACE3008255, BRACE3008337, BRACE3008720, BRACE3008772, BRACE3009044, BRACE3009075, BRACE3009090, BRACE3009127, BRACE3009197, BRACE3009265, BRACE3009297, BRACE3009377, BRACE3009392, BRACE3009539, BRACE3009574, BRACE3009701, BRACE3009708, BRACE3009993, BRACE3010076, BRACE3010079, BRACE3010086, BRACE3010221, BRACE3010283, BRACE3010315, BRACE3010416, BRACE3010435, BRACE3010702, BRACE3010862, BRACE3011447, BRACE3011505, BRACE3011634, BRACE3011774, BRACE3012357, BRACE3012574, BRACE3012806, BRACE3012930, BRACE3013119, BRACE3013418, BRACE3013576, BRACE3013740, BRACE3013874, BRACE3013936, BRACE3013986, BRACE3014005, BRACE3014068, BRACE3014231, BRACE3014290, BRACE3014317, BRACE3014523, BRACE3014714, BRACE3014807, BRACE3014942, BRACE3015090, BRACE3015121, BRACE3015262, BRACE3015521, BRACE3015808, BRACE3015829, BRACE3015894, BRACE3015898, BRACE3016020, BRACE3016167, BRACE3016170, BRACE3016580, BRACE3016788, BRACE3016810, BRACE3016862, BRACE3016884, BRACE3017083, BRACE3017253, BRACE3018083, BRACE3018308, BRACE3019055, BRACE3019084, BRACE3019570, BRACE3019611, BRACE3019817; BRACE3019828, BRACE3020151, BRACE3020194, BRACE3020286, BRACE3020356, BRACE3020594, BRACE3020669, BRACE3020671, BRACE3020890, BRACE3021148, BRACE3021430, BRACE3021517, BRACE3021805, BRACE3022051, BRACE3022303, BRACE3022847, BRACE3023604, BRACE3023912, BRACE3024073, BRACE3024359, BRACE3024379, BRACE3024444, BRACE3024497, BRACE3024537, BRACE3024659, BRACE3024662, BRACE3024879, BRACE3025153, BRACE3025302, BRACE3025457, BRACE3025531, BRACE3025627, BRACE3025630, BRACE3026008, BRACE3026075, BRACE3026161, BRACE3026290, BRACE3026345, BRACE3026456, BRACE3026844, BRACE3026947, BRACE3026993, BRACE3027242, BRACE3027256, BRACE3027326, BRACE3027480, BRACE3027976, BRACE3028214, BRACE3028241, BRACE3028360, BRACE3028895, BRACE3028998, BRACE3029005, BRACE3029205, BRACE3029447, BRACE3030057, BRACE3030103, BRACE3030538, BRACE3030748, BRACE3031161, BRACE3031184, BRACE3031315, BRACE3031372, BRACE3031579, BRACE3031728, BRACE3031843, BRACE3032455, BRACE3032537, BRACE3032538, BRACE3032771, BRACE3032980, BRACE3032983, BRACE3033525, BRACE3034159, BRACE3034183, BRACE3034389, BRACE3034964, BRACE3034993, BRACE3035168, BRACE3035227, BRACE3036271, BRACE3037612, BRACE3037637, BRACE3037803, BRACE3038012, BRACE3038030, BRACE3038569, BRACE3038570, BRACE3038687, BRACE3038760, BRACE3039288, BRACE3039378, BRACE3039454, BRACE3040012, BRACE3040239, BRACE3040504, BRACE3040644, BRACE3040856, BRACE3041059, BRACE3041162, BRACE3041827, BRACE3042046, BRACE3042210, BRACE3042409, BRACE3042594, BRACE3043597, BRACE3044090, BRACE3044172, BRACE3044247, BRACE3044377, BRACE3044389, BRACE3044495, BRACE3045011, BRACE3045033, BRACE3045145, BRACE3045424, BRACE3045708, BRACE3046049, BRACE3046152, BRACE3046294, BRACE3046466, BRACE3046491, BRACE3046609, BRACE3046762, BRACE3046837, BRACE3046855, BRACE3046966, BRACE3047018, BRACE3047482, BRACE3047801, BRALZ1000047, BRALZ1000103, BRALZ2000189, BRALZ2000263, BRALZ2001038, BRALZ2001279, BRALZ2001350, BRALZ2001445, BRALZ2001559, BRALZ2001743, BRALZ2002174, BRALZ2002418, BRALZ2002477, BRALZ2003119, BRALZ2003330, BRALZ2003453, BRALZ2003525, BRALZ2004397, BRALZ2005467, BRALZ2005471, BRALZ2005888, BRALZ2005950, BRALZ2005992, BRALZ2006474, BRALZ2006560, BRALZ2006734, BRALZ2006800, BRALZ2006976, BRALZ2007376, BRALZ2007545, BRALZ2007576, BRALZ2007661, BRALZ2007790, BRALZ2007793, BRALZ2007952, BRALZ2008031, BRALZ2008166, BRALZ2008462, BRALZ2008763, BRALZ2008869, BRALZ2008930, BRALZ2010186, BRALZ2010842, BRALZ2011337, BRALZ2012050, BRALZ2012183, BRALZ2012848, BRALZ2013621, BRALZ2013690, BRALZ2014054, BRALZ2014316, BRALZ2014484, BRALZ2014951, BRALZ2015168, BRALZ2015811, BRALZ2016085, BRALZ2016498, BRALZ2017359, BRALZ2017531, BRALZ2017607, BRALZ2017620, BRALZ2017844, BRALZ2018342, BRALZ2018492, BRAMY1000095, BRAMY1000098, BRAMY1000130, BRAMY1000157, BRAMY2000021, BRAMY2000076, BRAMY2000086, BRAMY2000151, BRAMY2000181, BRAMY2000196, BRAMY2000231, BRAMY2000277, BRAMY2000653, BRAMY2000814, BRAMY2000946, BRAMY2000981, BRAMY2000987, BRAMY2001068, BRAMY2001114, BRAMY2001203, BRAMY2001282, BRAMY2001367, BRAMY2001427, BRAMY2001473, BRAMY2001678, BRAMY2002005, BRAMY2002044, BRAMY2002072, BRAMY2002158, BRAMY2002311, BRAMY2002339, BRAMY2002364, BRAMY2002493, BRAMY2002525, BRAMY2002584, BRAMY2002604, BRAMY2002638, BRAMY2002739, BRAMY2002853, BRAMY2002862, BRAMY2002956, BRAMY2003037, BRAMY2003117, BRAMY2003287, BRAMY2003325, BRAMY2003529, BRAMY2003538, BRAMY2003585, BRAMY2003634, BRAMY2003653, BRAMY2003681, BRAMY2003893, BRAMY2003897, BRAMY2003898, BRAMY2003904, BRAMY2003926, BRAMY2003929, BRAMY2004058, BRAMY2004183, BRAMY2004335, BRAMY2004351, BRAMY2004352, BRAMY2004492, BRAMY2004537, BRAMY2004542, BRAMY2004756, BRAMY2004771, BRAMY2005064, BRAMY2005094, BRAMY2005151, BRAMY2005182, BRAMY2005244, BRAMY2005391, BRAMY2005576, BRAMY2005648, BRAMY2005662, BRAMY2005708, BRAMY2005711, BRAMY2006092, BRAMY2006118, BRAMY2006149, BRAMY2006366, BRAMY2006375, BRAMY2006411, BRAMY2006459, BRAMY2006466, BRAMY2006659, BRAMY2006779, BRAMY2006809, BRAMY2006879, BRAMY2007043, BRAMY2007110, BRAMY2007185, BRAMY2007249, BRAMY2007308, BRAMY2007411, BRAMY2007458, BRAMY2007486, BRAMY2007546, BRAMY2007610, BRAMY2007653, BRAMY2007753, BRAMY2007859, BRAMY2008333, BRAMY2008382, BRAMY2008583, BRAMY2008979, BRAMY2009034, BRAMY2009105, BRAMY2009123, BRAMY2009192, BRAMY2009344, BRAMY2009349, BRAMY2009394, BRAMY2009528, BRAMY2009693, BRAMY2010068, BRAMY2010135, BRAMY2010145, BRAMY2010171, BRAMY2010208, BRAMY2010239, BRAMY2010290, BRAMY2010366, BRAMY2010395, BRAMY2010441, BRAMY2010581, BRAMY2010798, BRAMY2010808, BRAMY2010919, BRAMY2011064, BRAMY2011178, BRAMY2011196, BRAMY2011216, BRAMY2011253, BRAMY2011480, BRAMY2011639, BRAMY2011679, BRAMY2011811, BRAMY2011846, BRAMY2011872, BRAMY2011961, BRAMY2012017, BRAMY2012091, BRAMY2012119, BRAMY2012162, BRAMY2012277, BRAMY2012426, BRAMY2012497, BRAMY2012517, BRAMY2012555, BRAMY2012568, BRAMY2012581, BRAMY2012691, BRAMY2012721, BRAMY2012731, BRAMY2012776, BRAMY2012880, BRAMY2013200, BRAMY2013216, BRAMY2013405, BRAMY2013414, BRAMY2013572, BRAMY2013590, BRAMY2013621, BRAMY2013659, BRAMY2013722, BRAMY2013756, BRAMY2013944, BRAMY2013975, BRAMY2014019, BRAMY2014387, BRAMY2014469, BRAMY2014541, BRAMY2014813, BRAMY2015211, BRAMY2015311, BRAMY2015503, BRAMY2015516, BRAMY2015551, BRAMY2015559, BRAMY2015688, BRAMY2015705, BRAMY2015782, BRAMY2015855, BRAMY2015890, BRAMY2015925, BRAMY2016002, BRAMY2016020, BRAMY2016070, BRAMY2016327, BRAMY2016386, BRAMY2016706, BRAMY2016771, BRAMY2016938, BRAMY2016953, BRAMY2017014, BRAMY2017249, BRAMY2017348, BRAMY2017450, BRAMY2017455, BRAMY2017528, BRAMY2018027, BRAMY2018106, BRAMY2018122, BRAMY2018126, BRAMY2018272, BRAMY2018273, BRAMY2018279, BRAMY2018308, BRAMY2018396, BRAMY2018467, BRAMY2019055, BRAMY2019277, BRAMY2019509, BRAMY2019643, BRAMY2019985, BRAMY2020050, BRAMY2020058, BRAMY2020270, BRAMY2020354, BRAMY2020355, BRAMY2020412, BRAMY2020445, BRAMY2020466, BRAMY2020520, BRAMY2020574, BRAMY2020634, BRAMY2020713, BRAMY2021040, BRAMY2021063, BRAMY2021098, BRAMY2021139, BRAMY2021142, BRAMY2021310, BRAMY2021388, BRAMY2021498, BRAMY2021523, BRAMY2021710, BRAMY2021732, BRAMY2021746, BRAMY2021962, BRAMY2021982, BRAMY2022052, BRAMY2022263, BRAMY2022301, BRAMY2022320, BRAMY2022383, BRAMY2022445, BRAMY2022454, BRAMY2022532, BRAMY2022796, BRAMY2022929, BRAMY2022984, BRAMY2023060, BRAMY2023110, BRAMY2023161, BRAMY2023172, BRAMY2023238, BRAMY2023327, BRAMY2023358, BRAMY2023482, BRAMY2023514, BRAMY2023719, BRAMY2023729, BRAMY2023786, BRAMY2023852, BRAMY2023863, BRAMY2023939, BRAMY2024073, BRAMY2024374, BRAMY2024449, BRAMY2024489, BRAMY2024497, BRAMY2024514, BRAMY2024530, BRAMY2024535, BRAMY2024545, BRAMY2024576, BRAMY2024715, BRAMY2024728, BRAMY2024849, BRAMY2025024, BRAMY2025032, BRAMY2025175, BRAMY2025218, BRAMY2025230, BRAMY2025277, BRAMY2025495, BRAMY2025812, BRAMY2025996, BRAMY2026009, BRAMY2026091, BRAMY2026300, BRAMY2026347, BRAMY2026395, BRAMY2026405, BRAMY2026538, BRAMY2026685, BRAMY2026713, BRAMY2026778, BRAMY2026824, BRAMY2026899, BRAMY2026902, BRAMY2026904, BRAMY2026976, BRAMY2027073, BRAMY2027140, BRAMY2027242, BRAMY2027396, BRAMY2027451, BRAMY2027461, BRAMY2027467, BRAMY2027714, BRAMY2027752, BRAMY2027782, BRAMY2028072, BRAMY2028188, BRAMY2028282, BRAMY2028472, BRAMY2028491, BRAMY2028565, BRAMY2028593, BRAMY2028682, BRAMY2028783, BRAMY2028856, BRAMY2029204, BRAMY2029602, BRAMY2030098, BRAMY2030109, BRAMY2030206, BRAMY2030477, BRAMY2030545, BRAMY2030607, BRAMY2030702, BRAMY2030703, BRAMY2030768, BRAMY2030799, BRAMY2030859, BRAMY2030915, BRAMY2031377, BRAMY2031442, BRAMY2032014, BRAMY2032231, BRAMY2032242, BRAMY2032290, BRAMY2032311, BRAMY2032317, BRAMY2032344, BRAMY2032589, BRAMY2032678, BRAMY2032696, BRAMY2032777, BRAMY2032994, BRAMY2033003, BRAMY2033116, BRAMY2033240, BRAMY2033267, BRAMY2033316, BRAMY2033332, BRAMY2033506, BRAMY2033594, BRAMY2033895, BRAMY2034072, BRAMY2034185, BRAMY2034187, BRAMY2034305, BRAMY2034561, BRAMY2034920, BRAMY2034993, BRAMY2035070, BRAMY2035449, BRAMY2035545, BRAMY2035606, BRAMY2035718, BRAMY2035801, BRAMY2035869, BRAMY2035923, BRAMY2036079, BRAMY2036254, BRAMY2036266, BRAMY2036387, BRAMY2036396, BRAMY2036615, BRAMY2036699, BRAMY2036913, BRAMY2036918, BRAMY2036968, BRAMY2037147, BRAMY2037328, BRAMY2037609, BRAMY2037629, BRAMY2037800, BRAMY2037971, BRAMY2038100, BRAMY2038128, BRAMY2038317, BRAMY2038475, BRAMY2038484, BRAMY2038832, BRAMY2038846, BRAMY2038887, BRAMY2038904, BRAMY2039287, BRAMY2039300, BRAMY2039314, BRAMY2039341, BRAMY2039695, BRAMY2039872, BRAMY2040051, BRAMY2040159, BRAMY2040478, BRAMY2040915, BRAMY2041261, BRAMY2041347, BRAMY2041378, BRAMY2041384, BRAMY2041434, BRAMY2041507, BRAMY2041542, BRAMY2041738, BRAMY2042122, BRAMY2042131, BRAMY2042178, BRAMY2042244, BRAMY2042549, BRAMY2042596, BRAMY2042612, BRAMY2042641, BRAMY2042711, BRAMY2042760, BRAMY2042804, BRAMY2042899, BRAMY2042918, BRAMY2043069, BRAMY2043103, BRAMY2043314, BRAMY2043345, BRAMY2044246, BRAMY2044317, BRAMY2044349, BRAMY2044686, BRAMY2045036, BRAMY2045299, BRAMY2045471, BRAMY2045530, BRAMY2046109, BRAMY2046478, BRAMY2046489, BRAMY2046537, BRAMY2046667, BRAMY2046742, BRAMY2046984, BRAMY2046989, BRAMY2047169, BRAMY2047280, BRAMY2047676, BRAMY2047692, BRAMY2047746, BRAMY2047751, BRAMY2047765, BRAMY2047884, BRAMY2047948, BRAMY3000206, BRAMY3000210, BRAMY3000213, BRAMY3000224, BRAMY3000254, BRAMY3000307, BRAMY3000692, BRAMY3001356, BRAMY3001401, BRAMY3001409, BRAMY3001794, BRAMY3002120, BRAMY3002312, BRAMY3002508, BRAMY3002620, BRAMY3002805, BRAMY3002886, BRAMY3003026, BRAMY3003109, BRAMY3003205, BRAMY3003310, BRAMY3003566, BRAMY3003723, BRAMY3004364, BRAMY3004672, BRAMY3004900, BRAMY3004919, BRAMY3005656, BRAMY3005932, BRAMY3006032, BRAMY3006297, BRAMY3007206, BRAMY3007350, BRAMY3007449, BRAMY3007471, BRAMY3007609, BRAMY3007723, BRAMY3007968, BRAMY3008088, BRAMY3008096, BRAMY3008335, BRAMY3008466, BRAMY3008505, BRAMY3008650, BRAMY3008937, BRAMY3009158, BRAMY3009207, BRAMY3009491, BRAMY3009904, BRAMY3010321, BRAMY3010411, BRAMY3010603, BRAMY4000277, BRAMY4000962, BRAMY4001173, BRAMY4001200, BRAMY4001234, BRAMY4001449, BRAMY4001652, BRAMY4001913, BRAMY4002575, BRAMY4002628, BRASW1000053, CD34C2000051, CD34C2000152, CD34C2000175, CD34C2000443, CD34C3000314, CD34C3000494, CERVX1000042, CERVX2000812, CERVX2000968, CERVX2002006, CERVX2002013, CERVX2002430, CERVX2002770, CHONS1000058, CHONS2000797, CHONS2001287, CHONS2001382, CHONS2001797, CHONS2001834, CHONS2002419, COLON1000030, COLON1000084, COLON1000135, COLON2000470, COLON2000557, COLON2000568, COLON2001829, COLON2001866, COLON2002443, COLON2002520, COLON2003043, COLON2003529, COLON2004318, COLON2004351, COLON2004478, COLON2004911, COLON2005126, COLON2005623, COLON2005735, COLON2005772, COLON2006263, COLON2006282, COLON2006417, COLON2007274, COLON2008105, COLON2009337, COLON2009499, CORDB1000140, CORDB2000061, CORDB2000127, CORDB2000541, CTONG1000009, CTONG1000020, CTONG1000022, CTONG1000040, CTONG1000056, CTONG1000062, CTONG1000086, CTONG1000093, CTONG1000097, CTONG1000113, CTONG1000137, CTONG1000165, CTONG1000175, CTONG1000181, CTONG1000220, CTONG1000277, CTONG1000283, CTONG1000288, CTONG1000302, CTONG1000341, CTONG1000476, CTONG1000488, CTONG1000508, CTONG1000540, CTONG2000034, CTONG2000201, CTONG2000218, CTONG2000279, CTONG2000303, CTONG2000330, CTONG2000395, CTONG2000465, CTONG2000480, CTONG2000561, CTONG2000589, CTONG2000766, CTONG2000771, CTONG2000819, CTONG2000846, CTONG2000855, CTONG2000977, CTONG2001139, CTONG2001366, CTONG2001413, CTONG2001428, CTONG2001513, CTONG2001524, CTONG2001598, CTONG2001681, CTONG2001724, CTONG2001749, CTONG2001820, CTONG2001858, CTONG2001877, CTONG2001932, CTONG2001955, CTONG2002066, CTONG2002143, CTONG2002395, CTONG2002417, CTONG2002418, CTONG2002453, CTONG2002520, CTONG2002558, CTONG2002590, CTONG2002709, CTONG2002721, CTONG2002816, CTONG2002820, CTONG2002903, CTONG2002965, CTONG2002999, CTONG2003028, CTONG2003100, CTONG2003115, CTONG2003189, CTONG2003245, CTONG2003293, CTONG2003348, CTONG2003350, CTONG2003361, CTONG2003372, CTONG2003375, CTONG2003427, CTONG2003517, CTONG2003599, CTONG2003680, CTONG2003699, CTONG2003764, CTONG2003782, CTONG2003889, CTONG2003937, CTONG2003945, CTONG2004000, CTONG2004062, CTONG2004115, CTONG2004126, CTONG2004264, CTONG2004397, CTONG2004454, CTONG2004550, CTONG2004669, CTONG2004716, CTONG2004912, CTONG2004941, CTONG2004948, CTONG2005049, CTONG2005110, CTONG2005265, CTONG2005290, CTONG2005374, CTONG2005399, CTONG2005468, CTONG2005567, CTONG2005585, CTONG2005615, CTONG2005635, CTONG2005775, CTONG2005890, CTONG2005904, CTONG2005913, CTONG2006129, CTONG2006223, CTONG2006273, CTONG2006310, CTONG2006515, CTONG2006524, CTONG2006568, CTONG2006611, CTONG2006620, CTONG2006666, CTONG2006691, CTONG2006798, CTONG2006836, CTONG2006932, CTONG2006942, CTONG2006964, CTONG2007007, CTONG2007009, CTONG2007091, CTONG2007175, CTONG2007259, CTONG2007272, CTONG2007297, CTONG2007441, CTONG2007474, CTONG2007623, CTONG2007898, CTONG2007959, CTONG2007970, CTONG2008184, CTONG2008262, CTONG2008269, CTONG2008343, CTONG2008402, CTONG2008466, CTONG2008562, CTONG2008577, CTONG2008595, CTONG2008621, CTONG2008720, CTONG2008773, CTONG2008792, CTONG2008989, CTONG2009132, CTONG2009156, CTONG2009181, CTONG2009257, CTONG2009258, CTONG2009268, CTONG2009270, CTONG2009395, CTONG2009440, CTONG2009527, CTONG2009531, CTONG2009570, CTONG2009572, CTONG2009604, CTONG2009643, CTONG2009675, CTONG2009689, CTONG2009725, CTONG2009766, CTONG2009768, CTONG2009844, CTONG2009871, CTONG2009887, CTONG2009891, CTONG2009923, CTONG2009955, CTONG2009958, CTONG2009963, CTONG2010018, CTONG2010024, CTONG2010116, CTONG2010133, CTONG2010148, CTONG2010276, CTONG2010330, CTONG2010508, CTONG2010566, CTONG2010623, CTONG2010649, CTONG2010803, CTONG2011429, CTONG2011474, CTONG2011676, CTONG2011716, CTONG2011765, CTONG2011779, CTONG2011815, CTONG2011822, CTONG2011825, CTONG2011920, CTONG2011985, CTONG2012029, CTONG2012077, CTONG2012101, CTONG2012123, CTONG2012158, CTONG2012230, CTONG2012401, CTONG2012422, CTONG2012425, CTONG2012447, CTONG2012453, CTONG2012473, CTONG2012476, CTONG2012533, CTONG2012554, CTONG2012564, CTONG2012661, CTONG2012724, CTONG2012738, CTONG2012758, CTONG2012843, CTONG2012901, CTONG2013128, CTONG2013149, CTONG2013156, CTONG2013178, CTONG2013222, CTONG2013284, CTONG2013339, CTONG2013352, CTONG2013393, CTONG2013511, CTONG2013630, CTONG2013803, CTONG2013985, CTONG2013986, CTONG2014032, CTONG2014058, CTONG2014191, CTONG2014206, CTONG2014234, CTONG2014264, CTONG2014280, CTONG2014491, CTONG2014630, CTONG2014635, CTONG2014646, CTONG2014705, CTONG2014946, CTONG2014954, CTONG2014959, CTONG2014966, CTONG2014995, CTONG2015316, CTONG2015358, CTONG2015434, CTONG2015540, CTONG2015596, CTONG2015633, CTONG2015678, CTONG2015717, CTONG2015804, CTONG2015866, CTONG2015914, CTONG2015953, CTONG2016185, CTONG2016217, CTONG2016355, CTONG2016505, CTONG2016559, CTONG2016658, CTONG2016775, CTONG2016797, CTONG2016824, CTONG2016846, CTONG2016904, CTONG2016942, CTONG2016953, CTONG2017021, CTONG2017292, CTONG2017429, CTONG2017444, CTONG2017458, CTONG2017604, CTONG2017650, CTONG2017798, CTONG2017804, CTONG2017814, CTONG2017910, CTONG2017939, CTONG2017989, CTONG2018062, CTONG2018069, CTONG2018147, CTONG2018217, CTONG2018279, CTONG2018334, CTONG2018343, CTONG2018379, CTONG2018483, CTONG2018629, CTONG2018632, CTONG2018652, CTONG2018653, CTONG2018655, CTONG2018735, CTONG2018808, CTONG2018843, CTONG2018900, CTONG2018976, CTONG2019144, CTONG2019232, CTONG2019248, CTONG2019400, CTONG2019652, CTONG2019704, CTONG2019822, CTONG2019833, CTONG2020031, CTONG2020108, CTONG2020127, CTONG2020171, CTONG2020411, CTONG2020522, CTONG2020638, CTONG2020806, CTONG2020974, CTONG2021024, CTONG2021132, CTONG2021168, CTONG2021289, CTONG2022153, CTONG2022601, CTONG2022835, CTONG2023449, CTONG2023512, CTONG2024206, CTONG2024614, CTONG2024749, CTONG2025496, CTONG2025513, CTONG2025516, CTONG2025610, CTONG2025900, CTONG2026513, CTONG2026770, CTONG2026920, CTONG2026987, CTONG2027150, CTONG2027327, CTONG2027361, CTONG2027591, CTONG2027736, CTONG2027783, CTONG2027828, CTONG2027959, CTONG2028097, CTONG2028518, CTONG2028687, CTONG2028758, CTONG3000686, CTONG3000707, CTONG3000896, CTONG3001420, CTONG3001501, CTONG3001560, CTONG3001605, CTONG3002020, CTONG3002127, CTONG3002370, CTONG3002433, CTONG3002518, CTONG3002552, CTONG3002588, CTONG3002674, CTONG3002728, CTONG3002909, CTONG3002947, CTONG3002983, CTONG3003165, CTONG3003179, CTONG3003483, CTONG3003553, CTONG3003598, CTONG3003652, CTONG3003654, CTONG3003669, CTONG3003737, CTONG3003905, CTONG3003972, CTONG3004317, CTONG3004397, CTONG3004550, CTONG3004576, CTONG3004607, CTONG3004712, CTONG3005325, CTONG3005648, CTONG3005713, CTONG3005803, CTONG3005813, CTONG3006067, CTONG3006073, CTONG3006186, CTONG3006629, CTONG3006650, CTONG3006659, CTONG3007244, CTONG3007444, CTONG3007528, CTONG3007586, CTONG3007870, CTONG3008223, CTONG3008252, CTONG3008258, CTONG3008457, CTONG3008496, CTONG3008566, CTONG3008639, CTONG3008831, CTONG3008951, CTONG3008959, CTONG3009227, CTONG3009287, CTONG3009385, D3OST1000066, D3OST1000109, D3OST1000238, D3OST2000184, D3OST2000618, D3OST2000654, D3OST2000734, D3OST2001328, D3OST2001669, D3OST2001670, D3OST2001788, D3OST2002068, D3OST2002182, D3OST2002223, D3OST2002262, D3OST2002272, D3OST2002417, D3OST2002436, D3OST2002648, D3OST2003024, D3OST2003331, D3OST2003607, D3OST2003797, D3OST2004637, D3OST3000169, D3OST3000195, D3OST3000258, D3OST3000291, D3OST3000388, D3OST3000493, D6OST2000127, D6OST2000169, D6OST2000245, D6OST2000507, D9OST2000278, D9OST2000440, D9OST2000869, D9OST2001319, D9OST2001433, D9OST2002397, D9OST2002673, D9OST2003108, D9OST2003137, D9OST2003397, D9OST2003580, D9OST2003594, D9OST2003791, D9OST2003989, D9OST2004018, D9OST2004073, D9OST2004417, DFNES1000003, DFNES1000107, DFNES1000185, DFNES2000143, DFNES2000146, DFNES2000212, DFNES2000426, DFNES2000432, DFNES2000471, DFNES2000913, DFNES2001108, DFNES2001177, DFNES2001404, DFNES2001564, DFNES2001565, DFNES2001647, DFNES2001800, DFNES2002220, DFNES2002509, DFNES2002550, DFNES2002588, DFNES2002817, DFNES2002966, DFNES2003081, DFNES2003192, DFNES2003255, DFNES2003742, DFNES2004346, DFNES2004354, DFNES2004383, DFNES2004608, DFNES2004684, DFNES2005266, DFNES2005527, DFNES2005540, DFNES2005766, DFNES2005779, DFNES2005875, DFNES2006346, DFNES2006944, DFNES2007299, DFNES2007332, DFNES2007641, DFNES2007757, DFNES2008280, DFNES2008881, DFNES2010502, DFNES2011192, DFNES2011221, DFNES2011239, ERLTF1000021, ERLTF2000324, ERLTF2000465, FCBBF1000023, FCBBF1000038, FCBBF1000053, FCBBF1000069, FCBBF1000115, FCBBF1000117, FCBBF1000125, FCBBF1000131, FCBBF1000155, FCBBF1000157, FCBBF1000171, FCBBF1000174, FCBBF1000182, FCBBF1000198, FCBBF1000206, FCBBF1000220, FCBBF1000232, FCBBF1000233, FCBBF1000243, FCBBF1000270, FCBBF1000280, FCBBF1000297, FCBBF1000305, FCBBF1000314, FCBBF1000322, FCBBF1000349, FCBBF1000374, FCBBF1000377, FCBBF1000395, FCBBF1000397, FCBBF1000425, FCBBF1000437, FCBBF1000506, FCBBF1000546, FCBBF1000550, FCBBF1000581, FCBBF1000582, FCBBF1000598, FCBBF1000604, FCBBF1000618, FCBBF1000627, FCBBF1000675, FCBBF1000686, FCBBF1000687, FCBBF1000691, FCBBF1000732, FCBBF2000094, FCBBF2000105, FCBBF2000123, FCBBF2000195, FCBBF2000214, FCBBF2000232, FCBBF2000259, FCBBF2000276, FCBBF2000291, FCBBF2000379, FCBBF2000473, FCBBF2000502, FCBBF2000576, FCBBF2000677, FCBBF2000678, FCBBF2000782, FCBBF2000808, FCBBF2000815, FCBBF2000825, FCBBF2000951, FCBBF2001088, FCBBF2001116, FCBBF2001188, FCBBF2001238, FCBBF2001243, FCBBF2001299, FCBBF2001309, FCBBF2001427, FCBBF2001529, FCBBF2001672, FCBBF2001675, FCBBF2001718, FCBBF2001720, FCBBF2001868, FCBBF2002044, FCBBF2002111, FCBBF2002281, FCBBF2002370, FCBBF2002541, FCBBF2002626, FCBBF2002897, FCBBF2002898, FCBBF2002904, FCBBF2002953, FCBBF2003083, FCBBF2003102, FCBBF2003269, FCBBF2003297, FCBBF2003395, FCBBF2003528, FCBBF2003549, FCBBF2003636, FCBBF2003823, FCBBF2003895, FCBBF2004090, FCBBF2004138, FCBBF2004217, FCBBF2004256, FCBBF2004373, FCBBF2004448, FCBBF2004671, FCBBF2004707, FCBBF2004788, FCBBF2005069, FCBBF2005122, FCBBF2005428, FCBBF2005439, FCBBF2005538, FCBBF2005637, FCBBF2005645, FCBBF2005658, FCBBF2005733, FCBBF2005966, FCBBF2006131, FCBBF2006380, FCBBF2006418, FCBBF2006452, FCBBF2007012, FCBBF2007186, FCBBF2007265, FCBBF2007302, FCBBF2007556, FCBBF2007610, FCBBF2007633, FCBBF2007840, FCBBF3000102, FCBBF3000110, FCBBF3000120, FCBBF3000175, FCBBF3000227, FCBBF3000233, FCBBF3000269, FCBBF3000361, FCBBF3000367, FCBBF3000462, FCBBF3000473, FCBBF3000501, FCBBF3000518, FCBBF3000550, FCBBF3000847, FCBBF3001018, FCBBF3001020, FCBBF3001235, FCBBF3001281, FCBBF3001302, FCBBF3001594, FCBBF3001818, FCBBF3001855, FCBBF3001912, FCBBF3001914, FCBBF3001918, FCBBF3001924, FCBBF3002163, FCBBF3002188, FCBBF3002190, FCBBF3002268, FCBBF3002475, FCBBF3002556, FCBBF3002592, FCBBF3002658, FCBBF3002782, FCBBF3002925, FCBBF3003216, FCBBF3003305, FCBBF3003373, FCBBF3003435, FCBBF3003475, FCBBF3003481, FCBBF3003902, FCBBF3004021, FCBBF3004041, FCBBF3004261, FCBBF3004390, FCBBF3004409, FCBBF3004502, FCBBF3004842, FCBBF3004847, FCBBF3005160, FCBBF3005218, FCBBF3005444, FCBBF3005497, FCBBF3005698, FCBBF3005729, FCBBF3006171, FCBBF3006249, FCBBF3006288, FCBBF3006399, FCBBF3006628, FCBBF3007077, FCBBF3007150, FCBBF3007152, FCBBF3007242, FCBBF3007244, FCBBF3007248, FCBBF3007453, FCBBF3007540, FCBBF3007597, FCBBF3007604, FCBBF3007829, FCBBF3007855, FCBBF3008073, FCBBF3008100, FCBBF3008251, FCBBF3008311, FCBBF3008362, FCBBF3008382, FCBBF3008475, FCBBF3008556, FCBBF3008689, FCBBF3008748, FCBBF3008870, FCBBF3008938, FCBBF3008944, FCBBF3009256, FCBBF3009317, FCBBF3009428, FCBBF3009464, FCBBF3009703, FCBBF3009717, FCBBF3009888, FCBBF3009949, FCBBF3010008, FCBBF3010124, FCBBF3010130, FCBBF3010149, FCBBF3010211, FCBBF3010361, FCBBF3010508, FCBBF3010544, FCBBF3010586, FCBBF3010601, FCBBF3010665, FCBBF3010729, FCBBF3010733, FCBBF3011003, FCBBF3011418, FCBBF3011485, FCBBF3011523, FCBBF3011570, FCBBF3011592, FCBBF3011867, FCBBF3011889, FCBBF3012170, FCBBF3012182, FCBBF3012288, FCBBF3012443, FCBBF3012588, FCBBF3012667, FCBBF3012842, FCBBF3012901, FCBBF3013041, FCBBF3013058, FCBBF3013205, FCBBF3013307, FCBBF3013341, FCBBF3013589, FCBBF3013623, FCBBF3013846, FCBBF3014229, FCBBF3014355, FCBBF3014567, FCBBF3014770, FCBBF3015119, FCBBF3015131, FCBBF3015317, FCBBF3015727, FCBBF3015758, FCBBF3015809, FCBBF3015870, FCBBF3016018, FCBBF3016134, FCBBF3016178, FCBBF3016451, FCBBF3016618, FCBBF3016644, FCBBF3016987, FCBBF3017024, FCBBF3017059, FCBBF3017071, FCBBF3017123, FCBBF3017233, FCBBF3017288, FCBBF3017535, FCBBF3017681, FCBBF3017729, FCBBF3017873, FCBBF3017974, FCBBF3018453, FCBBF3018591, FCBBF3018753, FCBBF3018826, FCBBF3019085, FCBBF3019320, FCBBF3019437, FCBBF3019455, FCBBF3019564, FCBBF3019569, FCBBF3019570, FCBBF3019663, FCBBF3019714, FCBBF3019716, FCBBF3019784, FCBBF3019867, FCBBF3019961, FCBBF3020030, FCBBF3020138, FCBBF3020140, FCBBF3020163, FCBBF3020232, FCBBF3020599, FCBBF3021191, FCBBF3021221, FCBBF3021501, FCBBF3021506, FCBBF3021524, FCBBF3021940, FCBBF3021985, FCBBF3022005, FCBBF3022291, FCBBF3022311, FCBBF3022504, FCBBF3022765, FCBBF3022894, FCBBF3023061, FCBBF3023078, FCBBF3023372, FCBBF3023443, FCBBF3023599, FCBBF3023704, FCBBF3023887, FCBBF3023895, FCBBF3024096, FCBBF3024225, FCBBF3024364, FCBBF3024793, FCBBF3024911, FCBBF3025098, FCBBF3025252, FCBBF3025280, FCBBF3025674, FCBBF3025730, FCBBF3025905, FCBBF3026021, FCBBF3026048, FCBBF3026251, FCBBF3026678, FCBBF3027104, FCBBF3027199, FCBBF3027328, FCBBF3027717, FCBBF3027755, FCBBF3027768, FCBBF3027854, FCBBF3027863, FCBBF3027903, FCBBF3028102, FCBBF3028143, FCBBF3028188, FCBBF3028202, FCBBF3028472, FCBBF3028528, FCBBF3028582, FCBBF3028671, FCBBF3028794, FCBBF4000017, FCBBF4000061, FCBBF4000076, FCBBF4000173, FCBBF4000192, FCBBF4000193, FCBBF4000282, FCBBF4000399, FCBBF4000415, FCBBF4000500, FCBBF4000529, FCBBF4000548, FCBBF5000041, FCBBF5000353, FCBBF5000384, FCBBF5000483, FCBBF5000495, FEBRA1000005, FEBRA1000008, FEBRA1000030, FEBRA1000138, FEBRA1000148, FEBRA1000149, FEBRA1000183, FEBRA2000021, FEBRA2000035, FEBRA2000126, FEBRA2000220, FEBRA2000228, FEBRA2000282, FEBRA2000286, FEBRA2000311, FEBRA2000321, FEBRA2000377, FEBRA2000378, FEBRA2000391, FEBRA2000394, FEBRA2000397, FEBRA2000399, FEBRA2000404, FEBRA2000409, FEBRA2000415, FEBRA2000436, FEBRA2000438, FEBRA2000454, FEBRA2000468, FEBRA2000491, FEBRA2000504, FEBRA2000510, FEBRA2000532, FEBRA2000575, FEBRA2000656, FEBRA2000659, FEBRA2000690, FEBRA2000727, FEBRA2000734, FEBRA2000782, FEBRA2000790, FEBRA2000803, FEBRA2000805, FEBRA2000809, FEBRA2000856, FEBRA2000862, FEBRA2000881, FEBRA2000909, FEBRA2000917, FEBRA2000928, FEBRA2000936, FEBRA2000937, FEBRA2000959, FEBRA2000972, FEBRA2001012, FEBRA2001020, FEBRA2001093, FEBRA2001124, FEBRA2001133, FEBRA2001161, FEBRA2001175, FEBRA2001217, FEBRA2001267, FEBRA2001351, FEBRA2001383, FEBRA2001438, FEBRA2001487, FEBRA2001523, FEBRA2001561, FEBRA2001584, FEBRA2001590, FEBRA2001610, FEBRA2001620, FEBRA2001659, FEBRA2001705, FEBRA2001752, FEBRA2001772, FEBRA2001790, FEBRA2001828, FEBRA2001914, FEBRA2001989, FEBRA2002009, FEBRA2002086, FEBRA2002109, FEBRA2002191, FEBRA2002260, FEBRA2002399, FEBRA2002410, FEBRA2002429, FEBRA2002508, FEBRA2002525, FEBRA2002527, FEBRA2002552, FEBRA2002574, FEBRA2002601, FEBRA2002628, FEBRA2002662, FEBRA2002682, FEBRA2002727, FEBRA2002783, FEBRA2002818, FEBRA2002858, FEBRA2002882, FEBRA2002897, FEBRA2002908, FEBRA2002962, FEBRA2002986, FEBRA2003054, FEBRA2003155, FEBRA2003163, FEBRA2003181, FEBRA2003198, FEBRA2003253, FEBRA2003275, FEBRA2003308, FEBRA2003327, FEBRA2003429, FEBRA2003454, FEBRA2003468, FEBRA2003520, FEBRA2003524, FEBRA2003541, FEBRA2003675, FEBRA2003711, FEBRA2003822, FEBRA2003897, FEBRA2003907, FEBRA2004023, FEBRA2004026, FEBRA2004029, FEBRA2004053, FEBRA2004056, FEBRA2004110, FEBRA2004191, FEBRA2004202, FEBRA2004237, FEBRA2004268, FEBRA2004329, FEBRA2004331, FEBRA2004412, FEBRA2004443, FEBRA2004538, FEBRA2004620, FEBRA2004651, FEBRA2004767, FEBRA2004813, FEBRA2004840, FEBRA2004852, FEBRA2004867, FEBRA2004914, FEBRA2004933, FEBRA2004987, FEBRA2005014, FEBRA2005036, FEBRA2005079, FEBRA2005114, FEBRA2005216, FEBRA2005377, FEBRA2005380, FEBRA2005458, FEBRA2005701, FEBRA2005726, FEBRA2005734, FEBRA2005778, FEBRA2005787, FEBRA2005998, FEBRA2006061, FEBRA2006112, FEBRA2006150, FEBRA2006165, FEBRA2006315, FEBRA2006346, FEBRA2006354, FEBRA2006379, FEBRA2006396, FEBRA2006409, FEBRA2006418, FEBRA2006427, FEBRA2006476, FEBRA2006491, FEBRA2006664, FEBRA2006667, FEBRA2006726, FEBRA2006736, FEBRA2006793, FEBRA2006873, FEBRA2006942, FEBRA2006977, FEBRA2007017, FEBRA2007200, FEBRA2007247, FEBRA2007280, FEBRA2007414, FEBRA2007436, FEBRA2007449, FEBRA2007458, FEBRA2007566, FEBRA2007620, FEBRA2007708, FEBRA2007714, FEBRA2007793, FEBRA2007931, FEBRA2008009, FEBRA2008134, FEBRA2008135, FEBRA2008159, FEBRA2008165, FEBRA2008172, FEBRA2008265, FEBRA2008282, FEBRA2008311, FEBRA2008341, FEBRA2008459, FEBRA2008468, FEBRA2008475, FEBRA2008481, FEBRA2008542, FEBRA2008660, FEBRA2008681, FEBRA2008692, FEBRA2008741, FEBRA2008836, FEBRA2008859, FEBRA2008866, FEBRA2008881, FEBRA2008928, FEBRA2008983, FEBRA2009016, FEBRA2009029, FEBRA2009074, FEBRA2009117, FEBRA2009120, FEBRA2009162, FEBRA2009240, FEBRA2009265, FEBRA2009276, FEBRA2009327, FEBRA2009385, FEBRA2009416, FEBRA2009437, FEBRA2009478, FEBRA2009507, FEBRA2009541, FEBRA2009567, FEBRA2009731, FEBRA2009754, FEBRA2009780, FEBRA2010141, FEBRA2010299, FEBRA2010484, FEBRA2010802, FEBRA2011063, FEBRA2011090, FEBRA2011356, FEBRA2011392, FEBRA2011414, FEBRA2011593, FEBRA2011665, FEBRA2012090, FEBRA2012120, FEBRA2012195, FEBRA2012397, FEBRA2012418, FEBRA2012507, FEBRA2012625, FEBRA2013019, FEBRA2013069, FEBRA2013274, FEBRA2013465, FEBRA2013570, FEBRA2013905, FEBRA2014010, FEBRA2014122, FEBRA2014198, FEBRA2014213, FEBRA2014443, FEBRA2014578, FEBRA2014939, FEBRA2015076, FEBRA2015175, FEBRA2015292, FEBRA2015588, FEBRA2016112, FEBRA2016621, FEBRA2016654, FEBRA2016739, FEBRA2017098, FEBRA2017138, FEBRA2017154, FEBRA2017200, FEBRA2017223, FEBRA2017333, FEBRA2017502, FEBRA2017736, FEBRA2017780, FEBRA2017811, FEBRA2017850, FEBRA2018051, FEBRA2018203, FEBRA2018407, FEBRA2018433, FEBRA2018476, FEBRA2018746, FEBRA2019172, FEBRA2019298, FEBRA2019389, FEBRA2019457, FEBRA2019519, FEBRA2019582, FEBRA2019637, FEBRA2019663, FEBRA2019690, FEBRA2020406, FEBRA2020566, FEBRA2020582, FEBRA2020668, FEBRA2020801, FEBRA2021032, FEBRA2021134, FEBRA2021339, FEBRA2021431, FEBRA2021497, FEBRA2021550, FEBRA2021571, FEBRA2021636, FEBRA2021864, FEBRA2021892, FEBRA2021908, FEBRA2021966, FEBRA2022148, FEBRA2022204, FEBRA2022255, FEBRA2022322, FEBRA2022601, FEBRA2022729, FEBRA2022787, FEBRA2022911, FEBRA2022956, FEBRA2022963, FEBRA2022972, FEBRA2023285, FEBRA2023351, FEBRA2023399, FEBRA2023498, FEBRA2023550, FEBRA2023721, FEBRA2023989, FEBRA2023990, FEBRA2024150, FEBRA2024343, FEBRA2024693, FEBRA2024727, FEBRA2024744, FEBRA2024797, FEBRA2024987, FEBRA2025249, FEBRA2025463, FEBRA2025477, FEBRA2026474, FEBRA2026582, FEBRA2026629, FEBRA2026769, FEBRA2026879, FEBRA2026890, FEBRA2026977, FEBRA2026984, FEBRA2027082, FEBRA2027297, FEBRA2027352, FEBRA2027364, FEBRA2027609, FEBRA2028158, FEBRA2028222, FEBRA2028366, FEBRA2028457, FEBRA2028477, FEHRT2000325, FEHRT2000364, FEKID1000018, FELIV1000101, FELIV1000137, FELIV1000164, FELNG2000241, HCASM1000021, HCASM1000050, HCASM1000061, HCASM1000130, HCASM2000156, HCASM2000202, HCASM2000266, HCASM2000307, HCASM2000534, HCASM2000536, HCASM2000560, HCASM2000871, HCASM2001285, HCASM2001810, HCASM2001866, HCASM2001890, HCASM2002148, HCASM2002502, HCASM2002754, HCASM2002918, HCASM2003018, HCASM2003099, HCASM2003212, HCASM2003237, HCASM2003357, HCASM2003415, HCASM2006131, HCASM2006338, HCASM2006359, HCASM2006632, HCASM2007317, HCASM2007737, HCASM2007773, HCASM2008154, HCASM2008536, HCASM2009405, HCASM2009424, HCASM2009463, HCASM2009588, HCHON1000142, HCHON1000176, HCHON2000038, HCHON2000100, HCHON2000156, HCHON2000199, HCHON2000265, HCHON2000271, HCHON2000315, HCHON2000323, HCHON2000344, HCHON2000373, HCHON2000395, HCHON2000417, HCHON2000418, HCHON2000503, HCHON2000508, HCHON2000660, HCHON2000673, HCHON2000676, HCHON2000699, HCHON2000705, HCHON2000817, HCHON2000818, HCHON2000819, HCHON2000832, HCHON2000851, HCHON2000898, HCHON2000935, HCHON2000942, HCHON2000956, HCHON2000994, HCHON2001050, HCHON2001110, HCHON2001116, HCHON2001161, HCHON2001214, HCHON2001233, HCHON2001269, HCHON2001450, HCHON2001453, HCHON2001497, HCHON2001505, HCHON2001519, HCHON2001523, HCHON2001546, HCHON2001548, HCHON2001577, HCHON2001598, HCHON2001604, HCHON2001607, HCHON2001646, HCHON2001712, HCHON2001768, HCHON2002123, HCHON2002194, HCHON2002241, HCHON2002354, HCHON2002496, HCHON2002770, HCHON2002964, HCHON2002971, HCHON2003131, HCHON2003134, HCHON2003327, HCHON2003513, HCHON2003532, HCHON2003642, HCHON2003659, HCHON2003676, HCHON2004007, HCHON2004279, HCHON2004359, HCHON2004531, HCHON2004776, HCHON2004858, HCHON2005048, HCHON2005118, HCHON2005166, HCHON2005802, HCHON2005987, HCHON2006459, HCHON2006714, HCHON2006841, HCHON2006871, HCHON2007046, HCHON2007482, HCHON2007650, HCHON2007674, HCHON2007774, HCHON2007881, HCHON2008112, HCHON2008239, HCHON2008444, HCHON2008582, HCHON2008672, HCHON2008856, HCHON2008871, HCHON2008989, HCHON2009191, HCHON2009384, HCHON2009749, HCHON2009766, HCHON2009795, HCHON2010074, HEART1000010, HEART1000088, HEART1000099, HEART1000102, HEART1000132, HEART1000139, HEART1000151, HEART1000173, HEART2000024, HEART2000035, HEART2000099, HEART2000298, HEART2000306, HEART2000309, HEART2000411, HEART2000418, HEART2000448, HEART2000492, HEART2000506, HEART2000520, HEART2000568, HEART2000611, HEART2001680, HEART2001756, HEART2002129, HEART2002184, HEART2002220, HEART2002432, HEART2002531, HEART2002598, HEART2002717, HEART2003027, HEART2003432, HEART2003440, HEART2003781, HEART2003836, HEART2004570, HEART2004764, HEART2004931, HEART2004940, HEART2004941, HEART2004980, HEART2005244, HEART2005310, HEART2005581, HEART2005610, HEART2006131, HEART2006310, HEART2006334, HEART2006487, HEART2006557, HEART2006787, HEART2006789, HEART2006909, HEART2007443, HEART2007767, HEART2008108, HEART2008111, HEART2008257, HEART2008994, HEART2009599, HEART2009680, HEART2010391, HEART2010492, HEART2010495, HELAC2000158, HELAC2000301, HHDPC1000001, HHDPC2000070, HHDPC2000102, HHDPC2000315, HHDPC2000462, HHDPC2000572, HHDPC2000656, HHDPC2000692, HHDPC2001337, HHDPC2001432, HHDPC2001896, HHDPC2002963, HHDPC2003049, HHDPC2003113, HHDPC2003381, HHDPC2003472, HHDPC2004757, HHDPC2005185, HHDPC2005513, HHDPC2005742, HHDPC2006460, HHDPC2006862, HHDPC2006927, HHDPC2007302, HHDPC2008123, HHDPC2008185, HHDPC2008279, HHDPC2008297, HHDPC2008414, HHDPC2008474, HHDPC2008843, HHDPC2009114, HHDPC2009178, HHDPC2009208, HHDPC2009272, HLUNG1000017, HLUNG1000024, HLUNG1000030, HLUNG1000034, HLUNG1000037, HLUNG1000053, HLUNG1000064, HLUNG1000076, HLUNG1000084, HLUNG1000091, HLUNG1000099, HLUNG1000104, HLUNG1000105, HLUNG1000110, HLUNG1000151, HLUNG1000169, HLUNG2000004, HLUNG2000014, HLUNG2000027, HLUNG2000068, HLUNG2000116, HLUNG2000125, HLUNG2000130, HLUNG2000142, HLUNG2000174, HLUNG2000176, HLUNG2000217, HLUNG2000255, HLUNG2000281, HLUNG2000340, HLUNG2000362, HLUNG2000363, HLUNG2000431, HLUNG2000480, HLUNG2000489, HLUNG2000549, HLUNG2000557, HLUNG2000570, HLUNG2000761, HLUNG2000777, HLUNG2000870, HLUNG2000926, HLUNG2000950, HLUNG2000955, HLUNG2000970, HLUNG2001013, HLUNG2001126, HLUNG2001144, HLUNG2001214, HLUNG2001507, HLUNG2001633, HLUNG2001677, HLUNG2001712, HLUNG2001814, HLUNG2002006, HLUNG2002050, HLUNG2002059, HLUNG2002085, HLUNG2002145, HLUNG2002295, HLUNG2002303, HLUNG2002334, HLUNG2002405, HLUNG2002429, HLUNG2002562, HLUNG2002659, HLUNG2002707, HLUNG2002942, HLUNG2002949, HLUNG2002958, HLUNG2002982, HLUNG2003049, HLUNG2003061, HLUNG2003162, HLUNG2003246, HLUNG2003306, HLUNG2003331, HLUNG2003335, HLUNG2003378, HLUNG2003497, HLUNG2003691, HLUNG2003710, HLUNG2003714, HLUNG2003716, HLUNG2003778, HLUNG2003833, HLUNG2003872, HLUNG2003918, HLUNG2003991, HLUNG2004014, HLUNG2004154, HLUNG2004217, HLUNG2004273, HLUNG2004388, HLUNG2004416, HLUNG2004521, HLUNG2004684, HLUNG2004707, HLUNG2004774, HLUNG2004775, HLUNG2005012, HLUNG2005030, HLUNG2005045, HLUNG2005076, HLUNG2005133, HLUNG2005203, HLUNG2005479, HLUNG2005524, HLUNG2005656, HLUNG2005738, HLUNG2005774, HLUNG2005813, HLUNG2005924, HLUNG2006026, HLUNG2006067, HLUNG2006094, HLUNG2006370, HLUNG2006397, HLUNG2006599, HLUNG2006614, HLUNG2006671, HLUNG2006781, HLUNG2006843, HLUNG2006852, HLUNG2006935, HLUNG2007041, HLUNG2007163, HLUNG2007210, HLUNG2007219, HLUNG2007245, HLUNG2007433, HLUNG2007931, HLUNG2008066, HLUNG2008225, HLUNG2008235, HLUNG2008247, HLUNG2008333, HLUNG2008348, HLUNG2008384, HLUNG2008396, HLUNG2008439, HLUNG2008479, HLUNG2008480, HLUNG2008521, HLUNG2008637, HLUNG2008833, HLUNG2008875, HLUNG2008885, HLUNG2008958, HLUNG2008959, HLUNG2009215, HLUNG2009253, HLUNG2009303, HLUNG2009413, HLUNG2009729, HLUNG2010181, HLUNG2010464, HLUNG2010562, HLUNG2010845, HLUNG2011041, HLUNG2011298, HLUNG2011833, HLUNG2012049, HLUNG2012287, HLUNG2012315, HLUNG2012546, HLUNG2012600, HLUNG2012727, HLUNG2013097, HLUNG2013204, HLUNG2013304, HLUNG2013350, HLUNG2013622, HLUNG2013643, HLUNG2013784, HLUNG2013851, HLUNG2014262, HLUNG2014288, HLUNG2014449, HLUNG2014821, HLUNG2015418, HLUNG2015548, HLUNG2015578, HLUNG2015617, HLUNG2016022, HLUNG2016862, HLUNG2017286, HLUNG2017307, HLUNG2017350, HLUNG2017546, HLUNG2017806, HLUNG2018029, HLUNG2018282, HLUNG2018626, HLUNG2019058, HSYRA1000131, HSYRA1000137, HSYRA1000148, HSYRA2000044, HSYRA2000135, HSYRA2000221, HSYRA2000237, HSYRA2000253, HSYRA2000371, HSYRA2000424, HSYRA2000507, HSYRA2000510, HSYRA2000605, HSYRA2000706, HSYRA2000760, HSYRA2000792, HSYRA2000832, HSYRA2000927, HSYRA2001003, HSYRA2001103, HSYRA2001142, HSYRA2001153, HSYRA2001225, HSYRA2001255, HSYRA2001332, HSYRA2001420, HSYRA2001552, HSYRA2001567, HSYRA2001580, HSYRA2001631, HSYRA2002103, HSYRA2002590, HSYRA2002741, HSYRA2003168, HSYRA2004550, HSYRA2004858, HSYRA2005456, HSYRA2005496, HSYRA2005970, HSYRA2006049, HSYRA2006873, HSYRA2007241, HSYRA2007338, HSYRA2007650, HSYRA2007667, HSYRA2008154, HSYRA2008714, HSYRA2009102, IMR321000155, IMR321000161, IMR321000165, IMR321000193, IMR321000207, IMR321000230, IMR322000010, IMR322000107, IMR322000164, IMR322000178, IMR322000374, IMR322000379, IMR322000383, IMR322000418, IMR322000656, IMR322000672, IMR322000742, IMR322000791, IMR322000811, IMR322000859, IMR322000863, IMR322000917, IMR322000919, IMR322000953, IMR322000973, IMR322000984, IMR322001018, IMR322001049, IMR322001167, IMR322001245, IMR322001318, IMR322001322, IMR322001438, IMR322001452, IMR322001491, IMR322001534, IMR322001665, IMR322001670, IMR322001724, IMR322002110, IMR322002470, IMR322003675, IMR322004768, IMR322005293, IMR322005833, IMR322006012, IMR322006222, IMR322006495, IMR322006520, IMR322006886, IMR322006947, IMR322007078, IMR322007225, IMR322007704, IMR322008651, IMR322009710, IMR322009807, IMR322010295, IMR322010953, IMR322011689, IMR322012314, IMR322012529, IMR322013053, IMR322013396, IMR322013731, IMR322015523, IMR322016146, IMR322017049, IMR322018117, IMR322018192, KIDNE1000008, KIDNE1000012, KIDNE1000015, KIDNE1000028, KIDNE1000036, KIDNE1000064, KIDNE1000121, KIDNE1000143, KIDNE1000152, KIDNE2000026, KIDNE2000041, KIDNE2000046, KIDNE2000051, KIDNE2000070, KIDNE2000167, KIDNE2000174, KIDNE2000192, KIDNE2000227, KIDNE2000244, KIDNE2000245, KIDNE2000287, KIDNE2000328, KIDNE2000335, KIDNE2000349, KIDNE2000375, KIDNE2000394, KIDNE2000493, KIDNE2000510, KIDNE2000513, KIDNE2000519, KIDNE200.0555, KIDNE2000624, KIDNE2000665, KIDNE2000678, KIDNE2000717, KIDNE2000721, KIDNE2000722, KIDNE2000777, KIDNE2000801, KIDNE2000832, KIDNE2000833, KIDNE2000846, KIDNE2000867, KIDNE2001140, KIDNE2001269, KIDNE2001361, KIDNE2001373, KIDNE2001713, KIDNE2001802, KIDNE2001840, KIDNE2001847, KIDNE2001857, KIDNE2001873, KIDNE2001897, KIDNE2001931, KIDNE2001979, KIDNE2002015, KIDNE2002162, KIDNE2002168, KIDNE2002198, KIDNE2002262, KIDNE2002265, KIDNE2002438, KIDNE2002483, KIDNE2002768, KIDNE2002795, KIDNE2002839, KIDNE2002845, KIDNE2002872, KIDNE2002882, KIDNE2002980, KIDNE2002991, KIDNE2003185, KIDNE2003188, KIDNE2003233, KIDNE2003316, KIDNE2003335, KIDNE2003357, KIDNE2003373, KIDNE2003377, KIDNE2003507, KIDNE2003752, KIDNE2003764, KIDNE2003837, KIDNE2003994, KIDNE2004034, KIDNE2004054, KIDNE2004084, KIDNE2004095, KIDNE2004115, KIDNE2004233, KIDNE2004262, KIDNE2004279, KIDNE2004294, KIDNE2004295, KIDNE2004305, KIDNE2004344, KIDNE2004394, KIDNE2004411, KIDNE2004519, KIDNE2004520, KIDNE2004531, KIDNE2004534, KIDNE2004562, KIDNE2004579, KIDNE2004626, KIDNE2004681, KIDNE2004828, KIDNE2004846, KIDNE2004864, KIDNE2004879, KIDNE2004981, KIDNE2004985, KIDNE2004999, KIDNE2005038, KIDNE2005062, KIDNE2005266, KIDNE2005296, KIDNE2005321, KIDNE2005327, KIDNE2005336, KIDNE2005400, KIDNE2005424, KIDNE2005477, KIDNE2005526, KIDNE2005603, KIDNE2005629, KIDNE2005781, KIDNE2005798, KIDNE2005854, KIDNE2005908, KIDNE2006053, KIDNE2006062, KIDNE2006092, KIDNE2006145, KIDNE2006149, KIDNE2006210, KIDNE2006299, KIDNE2006334, KIDNE2006353, KIDNE2006376, KIDNE2006378, KIDNE2006652, KIDNE2006687, KIDNE2006733, KIDNE2006775, KIDNE2006811, KIDNE2006820, KIDNE2006880, KIDNE2007005, KIDNE2007040, KIDNE2007077, KIDNE2007186, KIDNE2007222, KIDNE2007356, KIDNE2007422, KIDNE2007569, KIDNE2007810, KIDNE2007811, KIDNE2007910, KIDNE2007944, KIDNE2008022, KIDNE2008072, KIDNE2008116, KIDNE2008117, KIDNE2008218, KIDNE2008315, KIDNE2008378, KIDNE2008446, KIDNE2008473, KIDNE2008480, KIDNE2008649, KIDNE2008697, KIDNE2008788, KIDNE2008795, KIDNE2008824, KIDNE2008832, KIDNE2008869, KIDNE2008975, KIDNE2009019, KIDNE2009109, KIDNE2009180, KIDNE2009191, KIDNE2009332, KIDNE2009426, KIDNE2009467, KIDNE2009490, KIDNE2009553, KIDNE2009628, KIDNE2009647, KIDNE2009676, KIDNE2009723, KIDNE2010007, KIDNE2010052, KIDNE2010084, KIDNE2010137, KIDNE2010151, KIDNE2010264, KIDNE2010271, KIDNE2010419, KIDNE2010574, KIDNE2010674, KIDNE2010739, KIDNE2010762, KIDNE2010863, KIDNE2010973, KIDNE2010989, KIDNE2011200, KIDNE2011508, KIDNE2011532, KIDNE2011635, KIDNE2011752, KIDNE2011782, KIDNE2011858, KIDNE2012009, KIDNE2012025, KIDNE2012188, KIDNE2012291, KIDNE2012316, KIDNE2012361, KIDNE2012453, KIDNE2012563, KIDNE2012601, KIDNE2012613, KIDNE2012745, KIDNE2012775, KIDNE2012784, KIDNE2012945, KIDNE2013045, KIDNE2013095, KIDNE2013158, KIDNE2013218, KIDNE2013263, KIDNE2013346, KIDNE2013388, KIDNE2013413, KIDNE2013489, KIDNE2013639, KIDNE2013731, KIDNE2013734, KIDNE2013775, KIDNE2013801, KIDNE2013866, KIDNE2014087, KIDNE2014112, KIDNE2014119, KIDNE2014170, KIDNE2014184, KIDNE2014268, KIDNE2014298, KIDNE2014325, KIDNE2014415, KIDNE2014489, KIDNE2014496, KIDNE2014661, KIDNE2014717, KIDNE2014789, KIDNE2014808, KIDNE2014890, KIDNE2014978, KIDNE2015073, KIDNE2015221, KIDNE2015244, KIDNE2015313, KIDNE2015483, KIDNE2015515, KIDNE2015546, KIDNE2015556, KIDNE2015598, KIDNE2015660, KIDNE2015710, KIDNE2015987, KIDNE2016000, KIDNE2016036, KIDNE2016096, KIDNE2016101, KIDNE2016142, KIDNE2016188, KIDNE2016388, KIDNE2016464, KIDNE2016539, KIDNE2016570, KIDNE2016918, KIDNE2017007, KIDNE2017052, KIDNE2017151, KIDNE2017153, KIDNE2017315, KIDNE2017332, KIDNE2017454, KIDNE2017603, KIDNE2017956, KIDNE2018071, KIDNE2018166, KIDNE2018167, KIDNE2018217, KIDNE2018254, KIDNE2018268, KIDNE2018269, KIDNE2018287, KIDNE2018294, KIDNE2018462, KIDNE2018617, KIDNE2018678, KIDNE2018727, KIDNE2018863, KIDNE2018891, KIDNE2018989, KIDNE2018996, KIDNE2019074, KIDNE2019187, LIVER1000050, LIVER1000055, LIVER1000058, LIVER1000063, LIVER1000067, LIVER1000073, LIVER1000082, LIVER1000099, LIVER1000111, LIVER1000139, LIVER1000155, LIVER1000165, LIVER1000175, LIVER1000224, LIVER1000278, LIVER1000303, LIVER1000397, LIVER1000421, LIVER1000433, LIVER1000479, LIVER1000482, LIVER1000542, LIVER2000003, LIVER2000037, LIVER2000158, LIVER2000216, LIVER2000237, LIVER2000247, LIVER2000360, LIVER2000446, LIVER2000515, LIVER2000592, LIVER2000626, LIVER2000682, LIVER2000769, LIVER2000775, LIVER2001051, LIVER2001076, LIVER2001099, LIVER2001113, LIVER2001164, LIVER2001191, LIVER2001265, LIVER2001329, LIVER2001389, LIVER2001461, LIVER2001539, LIVER2002644, LIVER2002660, LIVER2002702, LIVER2003008, LIVER2003065, LIVER2003234, LIVER2003511, LIVER2003524, LIVER2003568, LIVER2003581, LIVER2003800, LIVER2003854, LIVER2004074, LIVER2004392, LIVER2004514, LIVER2004565, LIVER2005198, LIVER2005218, LIVER2005376, LIVER2005385, LIVER2005512, LIVER2005520, LIVER2005527, LIVER2005544, LIVER2005625, LIVER2005728, LIVER2005981, LIVER2006006, LIVER2006251, LIVER2006469, LIVER2006644, LIVER2006764, LIVER2007415, LIVER2007548, LIVER2007568, LIVER2007721, LIVER2007783, LIVER2008053, LIVER2008473, LIVER2008580, LIVER2008706, LIVER2008945, LIVER2008998, LIVER2009110, LIVER2009118, LIVER2009554, LYMPB1000141, LYMPB1000158, LYMPB2000083, MAMGL1000096, MAMGL1000132, MAMGL1000151, MAMGL1000173, MAMGL1000178, MAMGL1000182, MAMGL1000184, MESAN1000035, MESAN1000121, MESAN1000147, MESAN1000180, MESAN2000023, MESAN2000026, MESAN2000067, MESAN2000167, MESAN2000291, MESAN2000337, MESAN2000434, MESAN2000457, MESAN2000462, MESAN2000620, MESAN2000711, MESAN2000815, MESAN2000894, MESAN2000909, MESAN2001450, MESAN2001770, MESAN2001979, MESAN2001980, MESAN2002113, MESAN2002147, MESAN2002424, MESAN2002687, MESAN2002709, MESAN2002790, MESAN2002978, MESAN2003035, MESAN2003037, MESAN2003039, MESAN2003058, MESAN2003101, MESAN2003322, MESAN2003490, MESAN2003529, MESAN2003662, MESAN2003851, MESAN2004138, MESAN2004288, MESAN2004575, MESAN2005303, MESAN2005371, MESAN2005633, MESAN2005724, MESAN2005808, MESAN2005811, MESAN2006022, MESAN2006328, MESAN2006580, MESAN2006599, MESAN2006971, MESAN2007032, MESAN2007440, MESAN2007597, MESAN2008222, MESAN2008334, MESAN2008415, MESAN2008460, MESAN2008536, MESAN2008679, MESAN2008729, MESAN2008821, MESAN2009019, MESAN2009105, MESAN2009311, MESAN2009418, MESAN2009522, MESAN2010031, MESAN2010114, MESAN2010312, MESAN2010321, MESAN2010681, MESAN2011545, MESAN2011597, MESAN2011627, MESAN2011977, MESAN2012586, MESAN2012708, MESAN2012735, MESAN2013019, MESAN2013022, MESAN2013183, MESAN2013211, MESAN2013611, MESAN2013674, MESAN2013845, MESAN2013908, MESAN2013936, MESAN2014192, MESAN2014295, MESAN2014298, MESAN2014412, MESAN2014624, MESAN2015277, MESAN2015365, MESAN2015391, MESAN2015401, MESAN2015501, MESAN2015515, MESAN2015708, MESAN2016159, MESAN2016304, MESAN2016552, MESAN2016965, MESAN2017152, MESAN2017373, MESAN2017417, MESAN2018209, MESAN2018576, MESAN2018670, MESAN2018699, MESTC1000147, MESTC2000150, MESTC2000153, MESTC2000170, N1ESE2000698, NB9N41000121, NB9N41000135, NB9N41000146, NB9N42000104, NB9N42000122, NB9N42000196, NB9N42000314, NB9N42000495, NCRRP1000129, NESOP1000010, NESOP1000087, NESOP1000108, NESOP2000231, NESOP2000452, NESOP2000499, NESOP2000504, NESOP2000744, NESOP2001144, NESOP2001433, NESOP2001656, NESOP2001694, NESOP2001752, NESOP2002352, NESOP2002418, NESOP2002487, NESOP2002738, NESOP2002780, NETRP1000034, NETRP1000082, NETRP2000086, NETRP2000182, NETRP2000439, NHNPC1000034, NHNPC1000037, NHNPC1000084, NHNPC1000101, NHNPC1000124, NHNPC2000187, NHNPC2000212, NHNPC2000606, NHNPC2000877, NHNPC2001108, NHNPC2001223, NHNPC2001312, NHNPC2001816, NHNPC2002565, NHNPC2002749, NOVAR1000091, NOVAR1000102, NOVAR2000136, NOVAR2000352, NOVAR2000412, NOVAR2000710, NOVAR2000783, NOVAR2000962, NOVAR2001108, NOVAR2001620, NOVAR2001876, NOVAR2002039, NT2NE1000014, NT2NE1000023, NT2NE1000024, NT2NE1000059, NT2NE1000063, NT2NE1000083, NT2NE1000120, NT2NE1000122, NT2NE1000175, NT2NE1000185, NT2NE2000038, NT2NE2000054, NT2NE2000057, NT2NE2000064, NT2NE2000109, NT2NE2000137, NT2NE2000156, NT2NE2000222, NT2NE2000259, NT2NE2000284, NT2NE2000299, NT2NE2000353, NT2NE2000356, NT2NE2000369, NT2NE2000374, NT2NE2000390, NT2NE2000455, NT2NE2000470, NT2NE2000488, NT2NE2000517, NT2NE2000536, NT2NE2000546, NT2NE2000550, NT2NE2000586, NT2NE2000612, NT2NE2000658, NT2NE2000706, NT2NE2000802, NT2NE2000808, NT2NE2000864, NT2NE2000913, NT2NE2000950, NT2NE2000951, NT2NE2001005, NT2NE2001021, NT2NE2001142, NT2NE2001181, NT2NE2001188, NT2NE2001191, NT2NE2001247, NT2NE2001252, NT2NE2001324, NT2NE2001326, NT2NE2001372, NT2NE2001428, NT2NE2001432, NT2NE2001524, NT2NE2001530, NT2NE2001617, NT2NE2001623, NT2NE2001626, NT2NE2001634, NT2NE2001666, NT2NE2001677, NT2NE2001697, NT2NE2001698, NT2NE2001723, NT2NE2001725, NT2NE2001874, NT2NE2001889, NT2NE2001923, NT2NE2002100, NT2NE2002186, NT2NE2002285, NT2NE2002311, NT2NE2002620, NT2NE2002651, NT2NE2002732, NT2NE2002768, NT2NE2002791, NT2NE2002856, NT2NE2002870, NT2NE2003150, NT2NE2003252, NT2NE2003308, NT2NE2003309, NT2NE2003315, NT2NE2003393, NT2NE2003408, NT2NE2003457, NT2NE2003540, NT2NE2003571, NT2NE2003705, NT2NE2003752, NT2NE2004378, NT2NE2004490, NT2NE2004606, NT2NE2004716, NT2NE2004740, NT2NE2004787, NT2NE2004916, NT2NE2005035, NT2NE2005223, NT2NE2005276, NT2NE2005317, NT2NE2005323, NT2NE2005358, NT2NE2005371, NT2NE2005395, NT2NE2005441, NT2NE2005517, NT2NE2005537, NT2NE2005555, NT2NE2005676, NT2NE2005720, NT2NE2005784, NT2NE2005804, NT2NE2005821, NT2NE2005890, NT2NE2005921, NT2NE2005968, NT2NE2006087, NT2NE2006103, NT2NE2006217, NT2NE2006288, NT2NE2006382, NT2NE2006387, NT2NE2006427, NT2NE2006432, NT2NE2006458, NT2NE2006531, NT2NE2006659, NT2NE2006784, NT2NE2006813, NT2NE2006894, NT2NE2006942, NT2NE2006958, NT2NE2007052, NT2NE2007220, NT2NE2007425, NT2NE2007725, NT2NE2007727, NT2NE2007786, NT2NE2007877, NT2NE2007967, NT2NE2008017, NT2NE2008060, NT2NE2008077, NT2NE2008260, NT2NE2008378, NT2NE2008607, NT2NE2008639, NT2NE2008727, NT2NE2008783, NT2NE2008785, NT2NE2008803, NT2NE2008867, NT2NE2008961, NT2NE2008997, NT2NE2009138, NT2NE2009426, NT2NE2009608, NT2NE2009691, NT2NE2010105, NT2NE2010150, NT2NE2010400, NT2NE2010632, NT2NE2010633, NT2NE2010654, NT2NE2010781, NT2NE2010854, NT2NE2011033, NT2NE2011036, NT2NE2011107, NT2NE2011154, NT2NE2011411, NT2NE2011650, NT2NE2011684, NT2NE2011687, NT2NE2011691, NT2NE2011758, NT2NE2011823, NT2NE2011896, NT2NE2011998, NT2NE2012113, NT2NE2012199, NT2NE2012361, NT2NE2012448, NT2NE2012457, NT2NE2012493, NT2NE2012505, NT2NE2012533, NT2NE2012603, NT2NE2012747, NT2NE2012790, NT2NE2012847, NT2NE2013019, NT2NE2013081, NT2NE2013189, NT2NE2013217, NT2NE2013547, NT2NE2014013, NT2NE2014028, NT2NE2014113, NT2NE2014176, NT2NE2014221, NT2NE2014525, NT2NE2014650, NT2NE2014651, NT2NE2014681, NT2NE2014758, NT2NE2014869, NT2NE2014950, NT2NE2015061, NT2NE2015262, NT2NE2015275, NT2NE2015362, NT2NE2015480, NT2NE2015511, NT2NE2015565, NT2NE2015626, NT2NE2015747, NT2NE2015860, NT2NE2015885, NT2NE2016041, NT2NE2016419, NT2NE2016519, NT2NE2016608, NT2NE2016766, NT2NE2016774, NT2NE2016971, NT2NE2017259, NT2NE2017332, NT2NE2017397, NT2NE2017480, NT2NE2017508, NT2NE2017562, NT2NE2017590, NT2NE2017612, NT2NE2017721, NT2NE2017752, NT2NE2017792, NT2NE2017982, NT2NE2018165, NT2NE2018176, NT2NE2018180, NT2NE2018273, NT2NE2018376, NT2NE2018472, NT2NE2018490, NT2NE2018739, NT2NE2018916, NT2NE2019056, NT2NE2019076, NT2NE2019099, NT2RI1000027, NT2RI1000035, NT2RI1000164, NT2RI1000172, NT2RI2000004, NT2RI2000007, NT2RI2000117, NT2RI2000128, NT2RI2000133, NT2RI2000173, NT2RI2000187, NT2RI2000270, NT2RI2000276, NT2RI2000282, NT2RI2000313, NT2RI2000341, NT2RI2000348, NT2RI2000412, NT2RI2000421, NT2RI2000480, NT2RI2000575, NT2RI2000588, NT2RI2000597, NT2RI2000669, NT2RI2000688, NT2RI2000689, NT2RI2000704, NT2RI2000738, NT2RI2000822, NT2RI2000841, NT2RI2000865, NT2RI2000932, NT2RI2000987, NT2RI2001010, NT2RI2001017, NT2RI2001030, NT2RI2001083, NT2RI2001091, NT2RI2001167, NT2RI2001178, NT2RI2001235, NT2RI2001244, NT2RI2001307, NT2RI2001342, NT2RI2001385, NT2RI2001409, NT2RI2001410, NT2RI2001425, NT2RI2001449, NT2RI2001474, NT2RI2001519, NT2RI2001595, NT2RI2001624, NT2RI2001769, NT2RI2001782, NT2RI2001836, NT2RI2001866, NT2RI2002022, NT2RI2002041, NT2RI2002117, NT2RI2002120, NT2RI2002153, NT2RI2002179, NT2RI2002252, NT2RI2002260, NT2RI2002270, NT2RI2002334, NT2RI2002447, NT2RI2002481, NT2RI2002507, NT2RI2002517, NT2RI2002554, NT2RI2002564, NT2RI2002585, NT2RI2002729, NT2RI2002802, NT2RI2002852, NT2RI2002865, NT2RI2002923, NT2RI2002970, NT2RI2003019, NT2RI2003067, NT2RI2003184, NT2RI2003360, NT2RI2003383, NT2RI2003392, NT2RI2003399, NT2RI2003407, NT2RI2003419, NT2RI2003487, NT2RI2003667, NT2RI2003678, NT2RI2003884, NT2RI2003973, NT2RI2003993, NT2RI2004059, NT2RI2004079, NT2RI2004093, NT2RI2004136, NT2RI2004157, NT2RI2004190, NT2RI2004209, NT2RI2004284, NT2RI2004290, NT2RI2004312, NT2RI2004381, NT2RI2004442, NT2RI2004468, NT2RI2004618, NT2RI2004818, NT2RI2004840, NT2RI2004916, NT2RI2004962, NT2RI2004984, NT2RI2004985, NT2RI2005048, NT2RI2005061, NT2RI2005069, NT2RI2005087, NT2RI2005096, NT2RI2005115, NT2RI2005130, NT2RI2005166, NT2RI2005246, NT2RI2005315, NT2RI2005358, NT2RI2005473, NT2RI2005520, NT2RI2005621, NT2RI2005628, NT2RI2005647, NT2RI2005670, NT2RI2005710, NT2RI2005772, NT2RI2005966, NT2RI2006070, NT2RI2006081, NT2RI2006126, NT2RI2006127, NT2RI2006183, NT2RI2006257, NT2RI2006294, NT2RI2006345, NT2RI2006403, NT2RI2006445, NT2RI2006487, NT2RI2006506, NT2RI2006565, NT2RI2006659, NT2RI2006662, NT2RI2006667, NT2RI2006679, NT2RI2006682, NT2RI2006686, NT2RI2006716, NT2RI2006762, NT2RI2006788, NT2RI2006838, NT2RI2006853, NT2RI2006855, NT2RI2006973, NT2RI2007046, NT2RI2007048, NT2RI2007116, NT2RI2007214, NT2RI2007303, NT2RI2007334, NT2RI2007386, NT2RI2007406, NT2RI2007439, NT2RI2007469, NT2RI2007507, NT2RI2007629, NT2RI2007723, NT2RI2007729, NT2RI2007751, NT2RI2007754, NT2RI2007827, NT2RI2007853, NT2RI2007877, NT2RI2007879, NT2RI2007891, NT2RI2007956, NT2RI2007965, NT2RI2008007, NT2RI2008050, NT2RI2008188, NT2RI2008204, NT2RI2008221, NT2RI2008233, NT2RI2008455, NT2RI2008502, NT2RI2008598, NT2RI2008714, NT2RI2008801, NT2RI2008808, NT2RI2008841, NT2RI2008952, NT2RI2009005, NT2RI2009083, NT2RI2009101, NT2RI2009103, NT2RI2009144, NT2RI2009151, NT2RI2009215, NT2RI2009259, NT2RI2009289, NT2RI2009301, NT2RI2009517, NT2RI2009585, NT2RI2009595, NT2RI2009855, NT2RI2010283, NT2RI2010508, NT2RI2011422, NT2RI2011683, NT2RI2011803, NT2RI2012350, NT2RI2012990, NT2RI2013357, NT2RI2013373, NT2RI2014247, NT2RI2014551, NT2RI2014683, NT2RI2015239, NT2RI2016128, NT2RI2016134, NT2RI2017529, NT2RI2018363, NT2RI2018448, NT2RI2018883, NT2RI2018950, NT2RI2019751, NT2RI2019826, NT2RI2020390, NT2RI2020703, NT2RI2021463, NT2RI2022468, NT2RI2022584, NT2RI2023303, NT2RI2023671, NT2RI2024008, NT2RI2024460, NT2RI2024496, NT2RI2024935, NT2RI2025564, NT2RI2025565, NT2RI2025909, NT2RI2025957, NT2RI2025976, NT2RI2026758, NT2RI2027081, NT2RI2027157, NT2RI2027224, NT2RI2027323, NT2RI2027396, NT2RI2027484, NT2RI2027975, NT2RI2028213, NT2RI2028222, NT2RI2028537, NT2RI2028642, NT2RI3000174, NT2RI3000213, NT2RI3000423, NT2RI3000622, NT2RI3001132, NT2RI3001263, NT2RI3001279, NT2RI3001348, NT2RI3001458, NT2RI3001573, NT2RI3001967, NT2RI3002303, NT2RI3002557, NT2RI3003027, NT2RI3003031, NT2RI3003095, NT2RI3003104, NT2RI3003162, NT2RI3003362, NT2RI3003382, NT2RI3003409, NT2RI3004133, NT2RI3004381, NT2RI3005202, NT2RI3005416, NT2RI3005861, NT2RI3005928, NT2RI3006132, NT2RI3006171, NT2RI3006340, NT2RI3006376, NT2RI3006666, NT2RI3006796, NT2RI3007065, NT2RI3007095, NT2RI3007158, NT2RI3007167, NT2RI3007213, NT2RI3007443, NT2RI3007684, NT2RI3007757, NT2RI3007878, NT2RI3007978, NT2RI3008162, NT2RI3008179, NT2RI3008228, NT2RI3008442, NT2RI3008652, NT2RI3008697, NT2RI3008974, NT2RI3009158, NT2RI3009480, NT2RP6000005, NT2RP6000008, NT2RP6000032, NT2RP6000033, NT2RP6000059, NT2RP6000060, NT2RP6000086, NT2RP6000100, NT2RP6000119, NT2RP6000127, NT2RP6000130, NT2RP6000140, NT2RP6000150, NT2RP7000041, NT2RP7000086, NT2RP7000109, NT2RP7000112, NT2RP7000311, NT2RP7000359, NT2RP7000364, NT2RP7000380, NT2RP7000391, NT2RP7000425, NT2RP7000579, NT2RP7000812, NT2RP7000926, NT2RP7001074, NT2RP7001156, NT2RP7001319, NT2RP7001364, NT2RP7001475, NT2RP7001532, NT2RP7001591, NT2RP7001602, NT2RP7001678, NT2RP7001856, NT2RP7002028, NT2RP7002151, NT2RP7002163, NT2RP7002243, NT2RP7002282, NT2RP7002554, NT2RP7002603, NT2RP7002619, NT2RP7002650, NT2RP7002779, NT2RP7002829, NT2RP7002841, NT2RP7002978, NT2RP7002982, NT2RP7003025, NT2RP7003050, NT2RP7003055, NT2RP7003084, NT2RP7003091, NT2RP7003107, NT2RP7003134, NT2RP7003148, NT2RP7003261, NT2RP7003439, NT2RP7003511, NT2RP7003724, NT2RP7004027, NT2RP7004080, NT2RP7004114, NT2RP7004260, NT2RP7004358, NT2RP7004396, NT2RP7004541, NT2RP7004641, NT2RP7004656, NT2RP7004687, NT2RP7004722, NT2RP7004766, NT2RP7004961, NT2RP7004964, NT2RP7004975, NT2RP7005118, NT2RP7005205, NT2RP7005219, NT2RP7005323, NT2RP7005468, NT2RP7005493, NT2RP7005629, NT2RP7005631, NT2RP7005669, NT2RP7005750, NT2RP7005846, NT2RP7006160, NT2RP7006162, NT2RP7006296, NT2RP7006304, NT2RP7006374, NT2RP7006408, NT2RP7006457, NT2RP7006547, NT2RP7006601, NT2RP7006621, NT2RP7006636, NT2RP7006853, NT2RP7006887, NT2RP7006980, NT2RP7006995, NT2RP7007114, NT2RP7007221, NT2RP7007226, NT2RP7007269, NT2RP7007310, NT2RP7007359, NT2RP7007406, NT2RP7007480, NT2RP7007504, NT2RP7007580, NT2RP7007594, NT2RP7007643, NT2RP7007766, NT2RP7007925, NT2RP7007930, NT2RP7008013, NT2RP7008015, NT2RP7008133, NT2RP7008137, NT2RP7008142, NT2RP7008144, NT2RP7008360, NT2RP7008406, NT2RP7008435, NT2RP7008441, NT2RP7008454, NT2RP7008544, NT2RP7008550, NT2RP7008557, NT2RP7008623, NT2RP7008657, NT2RP7008720, NT2RP7008855, NT2RP7008863, NT2RP7009019, NT2RP7009030, NT2RP7009097, NT2RP7009168, NT2RP7009215, NT2RP7009236, NT2RP7009253, NT2RP7009267, NT2RP7009322, NT2RP7009363, NT2RP7009370, NT2RP7009397, NT2RP7009429, NT2RP7009439, NT2RP7009466, NT2RP7009502, NT2RP7009577, NT2RP7009743, NT2RP7009867, NT2RP7010109, NT2RP7010128, NT2RP7010235, NT2RP7010275, NT2RP7010521, NT2RP7010599, NT2RP7010817, NT2RP7011086, NT2RP7011132, NT2RP7011268, NT2RP7011318, NT2RP7011452, NT2RP7011570, NT2RP7011721, NT2RP7011909, NT2RP7012291, NT2RP7012516, NT2RP7013002, NT2RP7013374, NT2RP7013499, NT2RP7013729, NT2RP7013795, NT2RP7013999, NT2RP7014178, NT2RP7014348, NT2RP7014420, NT2RP7014583, NT2RP7014721, NT2RP7014743, NT2RP7014778, NT2RP7014906, NT2RP7015080, NT2RP7015431, NT2RP7015512, NT2RP7015676, NT2RP7015789, NT2RP7015996, NT2RP7016508, NT2RP7016622, NT2RP7016911, NT2RP7017139, NT2RP7017284, NT2RP7017365, NT2RP7017546, NT2RP7017567, NT2RP7017795, NT2RP7017971, NT2RP7018032, NT2RP7018126, NT2RP7018197, NT2RP7018206, NT2RP7018340, NT2RP7018586, NT2RP7018802, NT2RP7018871, NT2RP7019064, NT2RP7019273, NT2RP7019367, NT2RP7019445, NT2RP7019682, NT2RP7020112, NT2RP7020123, NT2RP7020343, NT2RP7020379, NT2RP8000137, NT2RP8000296, NT2RP8000435, NT2RP8000483, NT2RP8000521, NT2RP8000633, NT2RP8001363, NT2RP8001407, NT2RP8001584, NT2RP8001604, NT2RP8003490, NT2RP8003657, NT2RP8003787, NT2RP8004306, NT2RP8005546, NT2RP8006452, NT2RP8006521, NT2RP8007416, NT2RP8007503, NT2RP8008057, NT2RP8009248, NTONG1000006, NTONG1000047, NTONG1000052, NTONG1000075, NTONG1000087, NTONG1000123, NTONG1000130, NTONG1000161, NTONG1000172, NTONG1000213, NTONG1000214, NTONG1000246, NTONG1000247, NTONG1000257, NTONG2000040, NTONG2000231, NTONG2000334, NTONG2000363, NTONG2000413, NTONG2000492, NTONG2000499, NTONG2000531, NTONG2000583, NTONG2000800, NTONG2000858, NTONG2000966, NTONG2000985, NTONG2001014, NTONG2001079, NTONG2001157, NTONG2001173, NTONG2001220, NTONG2001222, NTONG2001362, NTONG2001532, NTONG2001587, NTONG2001619, NTONG2001642, NTONG2001657, NTONG2001676, NTONG2002278, NTONG2002582, NTONG2002948, NTONG2002970, NTONG2003158, NTONG2003210, NTONG2003316, NTONG2003409, NTONG2003805, NTONG2003839, NTONG2003852, NTONG2003897, NTONG2003928, NTONG2004308, NTONG2004521, NTONG2004690, NTONG2004806, NTONG2004829, NTONG2004844, NTONG2004918, NTONG2004991, NTONG2005062, NTONG2005086, NTONG2005137, NTONG2005153, NTONG2005265, NTONG2005277, NTONG2005363, NTONG2005480, NTONG2005497, NTONG2005577, NTONG2005657, NTONG2005822, NTONG2006099, NTONG2006187, NTONG2006301, NTONG2006324, NTONG2006354, NTONG2006440, NTONG2006484, NTONG2006501, NTONG2006646, NTONG2006709, NTONG2006783, NTONG2007020, NTONG2007034, NTONG2007249, NTONG2007517, NTONG2007522, NTONG2007693, NTONG2007756, NTONG2008093, NTONG2008365, NTONG2008522, NTONG2008672, NTONG2008862, NTONG2008939, NTONG2009060, NTONG2009068, NTONG2009229, NTONG2009233, NTONG2009468, OCBBF1000016, OCBBF1000042, OCBBF1000054, OCBBF1000067, OCBBF1000085, OCBBF1000091, OCBBF1000104, OCBBF1000118, OCBBF1000119, OCBBF1000122, OCBBF1000130, OCBBF1000138, OCBBF1000153, OCBBF1000175, OCBBF1000192, OCBBF1000254, OCBBF2000013, OCBBF2000287, OCBBF2000323, OCBBF2000452, OCBBF2000467, OCBBF2000677, OCBBF2000703, OCBBF2000719, OCBBF2000998, OCBBF2001075, OCBBF2001101, OCBBF2001124, OCBBF2001176, OCBBF2001186, OCBBF2001196, OCBBF2001252, OCBBF2001323, OCBBF2001389, OCBBF2001402, OCBBF2001473, OCBBF2001494, OCBBF2001527, OCBBF2001528, OCBBF2001681, OCBBF2001706, OCBBF2001749, OCBBF2001910, OCBBF2001961, OCBBF2001983, OCBBF2002124, OCBBF2002161, OCBBF2002357, OCBBF2002376, OCBBF2002615, OCBBF2002663, OCBBF2002805, OCBBF2002865, OCBBF2002920, OCBBF2003028, OCBBF2003091, OCBBF2003327, OCBBF2003543, OCBBF2003744, OCBBF2004038, OCBBF2004147, OCBBF2004168, OCBBF2004235, OCBBF2004385, OCBBF2004418, OCBBF2004478, OCBBF2004482, OCBBF2004567, OCBBF2004612, OCBBF2004647, OCBBF2004826, OCBBF2004866, OCBBF2004883, OCBBF2005066, OCBBF2005077, OCBBF2005343, OCBBF2005349, OCBBF2005373, OCBBF2005433, OCBBF2005476, OCBBF2005843, OCBBF2005901, OCBBF2006030, OCBBF2006058, OCBBF2006113, OCBBF2006154, OCBBF2006214, OCBBF2006241, OCBBF2006388, OCBBF2006438, OCBBF2006567, OCBBF2006624, OCBBF2006639, OCBBF2006849, OCBBF2006859, OCBBF2007039, OCBBF2007114, OCBBF2007121, OCBBF2007184, OCBBF2007194, OCBBF2007196, OCBBF2007238, OCBBF2007414, OCBBF2007428, OCBBF2007478, OCBBF2007485, OCBBF2007520, OCBBF2007555, OCBBF2007610, OCBBF2007622, OCBBF2007756, OCBBF2007931, OCBBF2007946, OCBBF2008116, OCBBF2008138, OCBBF2008283, OCBBF2008330, OCBBF2008366, OCBBF2008511, OCBBF2008520, OCBBF2008569, OCBBF2008586, OCBBF2008640, OCBBF2008691, OCBBF2008724, OCBBF2008760, OCBBF2008768, OCBBF2008770, OCBBF2008775, OCBBF2008790, OCBBF2008814, OCBBF2008822, OCBBF2009115, OCBBF2009391, OCBBF2009424, OCBBF2009571, OCBBF2009583, OCBBF2009603, OCBBF2009788, OCBBF2009926, OCBBF2010040, OCBBF2010281, OCBBF2010313, OCBBF2010404, OCBBF2010416, OCBBF2010420, OCBBF2010557, OCBBF2010604, OCBBF2010709, OCBBF2010792, OCBBF2010843, OCBBF2010863, OCBBF2010931, OCBBF2010945, OCBBF2010978, OCBBF2010989, OCBBF2011137, OCBBF2011177, OCBBF2011311, OCBBF2011625, OCBBF2011669, OCBBF2011685, OCBBF2011706, OCBBF2011722, OCBBF2011855, OCBBF2011872, OCBBF2011960, OCBBF2011981, OCBBF2012028, OCBBF2012139, OCBBF2012191, OCBBF2012320, OCBBF2012436, OCBBF2012525, OCBBF2012714, OCBBF2012755, OCBBF2012812, OCBBF2012821, OCBBF2012881, OCBBF2012990, OCBBF2013049, OCBBF2013091, OCBBF2013127, OCBBF2013208, OCBBF2013285, OCBBF2013319, OCBBF2013324, OCBBF2013507, OCBBF2013721, OCBBF2013883, OCBBF2013926, OCBBF2014052, OCBBF2014386, OCBBF2014707, OCBBF2014745, OCBBF2014828, OCBBF2014880, OCBBF2014928, OCBBF2015031, OCBBF2015081, OCBBF2015115, OCBBF2015232, OCBBF2015233, OCBBF2015285, OCBBF2015334, OCBBF2015335, OCBBF2015506, OCBBF2015599, OCBBF2015645, OCBBF2015659, OCBBF2015751, OCBBF2015797, OCBBF2015980, OCBBF2016038, OCBBF2016405, OCBBF2016467, OCBBF2016590, OCBBF2016591, OCBBF2016612, OCBBF2016689, OCBBF2016690, OCBBF2016841, OCBBF2016928, OCBBF2017055, OCBBF2017069, OCBBF2017325, OCBBF2017458, OCBBF2017489, OCBBF2017516, OCBBF2017665, OCBBF2017815, OCBBF2018012, OCBBF2018014, OCBBF2018167, OCBBF2018229, OCBBF2018362, OCBBF2018380, OCBBF2018563, OCBBF2018663, OCBBF2018687, OCBBF2018828, OCBBF2018934, OCBBF2019108, OCBBF2019195, OCBBF2019327, OCBBF2019684, OCBBF2019761, OCBBF2019823, OCBBF2020048, OCBBF2020318, OCBBF2020343, OCBBF2020453, OCBBF2020801, OCBBF2020825, OCBBF2020838, OCBBF2021020, OCBBF2021214, OCBBF2021323, OCBBF2021518, OCBBF2021788, OCBBF2022351, OCBBF2022573, OCBBF2022574, OCBBF2023162, OCBBF2023598, OCBBF2023643, OCBBF2024463, OCBBF2024589, OCBBF2024779, OCBBF2024781, OCBBF2025028, OCBBF2025115, OCBBF2025198, OCBBF2025451, OCBBF2025458, OCBBF2025527, OCBBF2025631, OCBBF2025730, OCBBF2026025, OCBBF2026035, OCBBF2026144, OCBBF2026368, OCBBF2026645, OCBBF2026649, OCBBF2026690, OCBBF2026981, OCBBF2027148, OCBBF2027197, OCBBF2027354, OCBBF2027423, OCBBF2027478, OCBBF2027481, OCBBF2027511, OCBBF2027661, OCBBF2027728, OCBBF2027782, OCBBF2027868, OCBBF2028173, OCBBF2028421, OCBBF2029471, OCBBF2029901, OCBBF2030329, OCBBF2030354, OCBBF2030517, OCBBF2030574, OCBBF2030708, OCBBF2030927, OCBBF2030963, OCBBF2031167, OCBBF2031198, OCBBF2031366, OCBBF2032152, OCBBF2032274, OCBBF2032539, OCBBF2032590, OCBBF2032599, OCBBF2032611, OCBBF2032671, OCBBF2033413, OCBBF2033869, OCBBF2033948, OCBBF2034333, OCBBF2034529, OCBBF2034637, OCBBF2034906, OCBBF2035110, OCBBF2035214, OCBBF2035390, OCBBF2035564, OCBBF2035658, OCBBF2035823, OCBBF2035885, OCBBF2035916, OCBBF2036019, OCBBF2036031, OCBBF2036225, OCBBF2036476, OCBBF2036752, OCBBF2037068, OCBBF2037340, OCBBF2037398, OCBBF2037464, OCBBF2037547, OCBBF2037598, OCBBF2037638, OCBBF2038238, OCBBF2038285, OCBBF3000097, OCBBF3000213, OCBBF3000372, OCBBF3000380, OCBBF3000743, OCBBF3000830, OCBBF3001076, OCBBF3001202, OCBBF3001616, OCBBF3002553, OCBBF3002600, OCBBF3002654, OCBBF3003209, OCBBF3003592, OCBBF3003745, OCBBF3003761, OCBBF3004264, OCBBF3004314, OCBBF3004972, OCBBF3005330, OCBBF3005597, OCBBF3005843, OCBBF3006802, OCBBF3006986, OCBBF3007078, OCBBF3007704, OCBBF3008392, OCBBF3009192, OCBBF3009244, OCBBF3009279, PANCR1000012, PANCR1000021, PANCR1000081, PANCR1000086, PANCR1000091, PANCR1000185, PEBLM1000024, PEBLM1000029, PEBLM1000034, PEBLM1000062, PEBLM1000066, PEBLM1000068, PEBLM1000071, PEBLM1000083, PEBLM1000147, PEBLM1000174, PEBLM1000180, PEBLM2000112, PEBLM2000126, PEBLM2000170, PEBLM2000180, PEBLM2000213, PEBLM2000248, PEBLM2000270, PEBLM2000321, PEBLM2000333, PEBLM2000338, PEBLM2000479, PEBLM2000502, PEBLM2001312, PEBLM2001465, PEBLM2001488, PEBLM2001803, PEBLM2002432, PEBLM2002594, PEBLM2002749, PEBLM2002887, PEBLM2003426, PEBLM2003765, PEBLM2003935, PEBLM2004015, PEBLM2004216, PEBLM2004290, PEBLM2004497, PEBLM2005282, PEBLM2005615, PEBLM2005632, PEBLM2005697, PEBLM2006031, PEBLM2006036, PEBLM2006049, PEBLM2006113, PEBLM2006135, PEBLM2006215, PEBLM2006298, PEBLM2006709, PEBLM2006912, PEBLM2007112, PEBLM2007140, PEBLM2007188, PEBLM2007296, PEBLM2007437, PEBLM2007447, PEBLM2007598, PEBLM2007832, PEBLM2007834, PEBLM2008106, PEBLM2008576, PEBLM2008605, PEBLM2008861, PERIC1000025, PERIC1000147, PERIC2000180, PERIC2000214, PERIC2000386, PERIC2000387, PERIC2000422, PERIC2000478, PERIC2000889, PERIC2000914, PERIC2001227, PERIC2001228, PERIC2001379, PERIC2001504, PERIC2001703, PERIC2001764, PERIC2002243, PERIC2002272, PERIC2002452, PERIC2002766, PERIC2003001, PERIC2003090, PERIC2003287, PERIC2003349, PERIC2003452, PERIC2003699, PERIC2003720, PERIC2003794, PERIC2003834, PERIC2003919, PERIC2003957, PERIC2004028, PERIC2004131, PERIC2004259, PERIC2004379, PERIC2004429, PERIC2004510, PERIC2004613, PERIC2004909, PERIC2005111, PERIC2005117, PERIC2005305, PERIC2005347, PERIC2005370, PERIC2005936, PERIC2006035, PERIC2006121, PERIC2006443, PERIC2006945, PERIC2006960, PERIC2007439, PERIC2007914, PERIC2008008, PERIC2008385, PERIC2009001, PERIC2009086, PERIC2009329, PERIC2009566, PLACE5000001, PLACE5000037, PLACE5000067, PLACE5000068, PLACE5000070, PLACE5000080, PLACE5000105, PLACE5000115, PLACE5000116, PLACE5000129, PLACE5000139, PLACE5000153, PLACE5000171, PLACE5000245, PLACE5000260, PLACE5000282, PLACE5000372, PLACE5000522, PLACE5000527, PLACE6000012, PLACE6000044, PLACE6000055, PLACE6000070, PLACE6000137, PLACE6000145, PLACE6000191, PLACE6000205, PLACE6000231, PLACE6000296, PLACE6000348, PLACE6000371, PLACE6000424, PLACE6000426, PLACE6000429, PLACE6000450, PLACE6000523, PLACE6000550, PLACE6000552, PLACE6000555, PLACE6000619, PLACE6000630, PLACE6000953, PLACE6001118, PLACE6001153, PLACE6001262, PLACE6001294, PLACE6001536, PLACE6001557, PLACE6001712, PLACE6001740, PLACE6001886, PLACE6001923, PLACE6001925, PLACE6001933, PLACE6002011, PLACE6002016, PLACE6002056, PLACE6002157, PLACE6002312, PLACE6002323, PLACE6002345, PLACE6002419, PLACE6002462, PLACE6002647, PLACE6002692, PLACE6002699, PLACE6002710, PLACE6002871, PLACE6002949, PLACE6002960, PLACE6003038, PLACE6003077, PLACE6003094, PLACE6003109, PLACE6003372, PLACE6003393, PLACE6003399, PLACE6003539, PLACE6003621, PLACE6003705, PLACE6003740, PLACE6003771, PLACE6003796, PLACE6003839, PLACE6004101, PLACE6004219, PLACE6004336, PLACE6004368, PLACE6004380, PLACE6004396, PLACE6004454, PLACE6004464, PLACE6004491, PLACE6004663, PLACE6004687, PLACE6004738, PLACE6004931, PLACE6004966, PLACE6004993, PLACE6005007, PLACE6005029, PLACE6005108, PLACE6005234, PLACE6005283, PLACE6005328, PLACE6005351, PLACE6005423, PLACE6005487, PLACE6005535, PLACE6005546, PLACE6005559, PLACE6005579, PLACE6005691, PLACE6005786, PLACE6006042, PLACE6006077, PLACE6006158, PLACE6006217, PLACE6006266, PLACE6006287, PLACE6006394, PLACE6006474, PLACE6006549, PLACE6006566, PLACE6006697, PLACE6006822, PLACE6006871, PLACE6006905, PLACE6006988, PLACE6007050, PLACE6007239, PLACE6007242, PLACE6007380, PLACE6007433, PLACE6007482, PLACE6007687, PLACE6007787, PLACE6007798, PLACE6007807, PLACE6008036, PLACE6008094, PLACE6008126, PLACE6008285, PLACE6008444, PLACE6008453, PLACE6008640, PLACE6008750, PLACE6008768, PLACE6008793, PLACE6008824, PLACE6008989, PLACE6009006, PLACE6009008, PLACE6009228, PLACE6009237, PLACE6009338, PLACE6009419, PLACE6009430, PLACE6009482, PLACE6009524, PLACE6009527, PLACE6009560, PLACE6009590, PLACE6009835, PLACE6009853, PLACE6010463, PLACE6010485, PLACE6010568, PLACE6010701, PLACE6010765, PLACE6010848, PLACE6010925, PLACE6010936, PLACE6010991, PLACE6011041, PLACE6011102, PLACE6011211, PLACE6011260, PLACE6011334, PLACE6011627, PLACE6011774, PLACE6011881, PLACE6011907, PLACE6011970, PLACE6011975, PLACE6012108, PLACE6012168, PLACE6012297, PLACE6012308, PLACE6012574, PLACE6012908, PLACE6012936, PLACE6012942, PLACE6013222, PLACE6013232, PLACE6013288, PLACE6013386, PLACE6013400, PLACE6013650, PLACE6013672, PLACE6013884, PLACE6013885, PLACE6014043, PLACE6014516, PLACE6014882, PLACE6015211, PLACE6015322, PLACE6015460, PLACE6015513, PLACE6015591, PLACE6015729, PLACE6015939, PLACE6016030, PLACE6016093, PLACE6016105, PLACE6016160, PLACE6016210, PLACE6016254, PLACE6016383, PLACE6017002, PLACE6017431, PLACE6017564, PLACE6017578, PLACE6017626, PLACE6017714, PLACE6017788, PLACE6017791, PLACE6018107, PLACE6018187, PLACE6018235, PLACE6018287, PLACE6018441, PLACE6018487, PLACE6018497, PLACE6018769, PLACE6018834, PLACE6018843, PLACE6018863, PLACE6018938, PLACE6019385, PLACE6019542, PLACE6019600, PLACE6019674, PLACE6019676, PLACE6019701, PLACE6019932, PLACE6020031, PLACE6020145, PLACE7000167, PLACE7000170, PLACE7000266, PLACE7000333, PLACE7000502, PLACE7000707, PLACE7001022, PLACE7001544, PLACE7001759, PLACE7001936, PLACE7002303, PLACE7002641, PLACE7003639, PLACE7003657, PLACE7003684, PLACE7003985, PLACE7004961, PLACE7005169, PLACE7005671, PLACE7005840, PLACE7006051, PLACE7006090, PLACE7006268, PLACE7006275, PLACE7006498, PLACE7006540, PLACE7007379, PLACE7007644, PLACE7007973, PLACE7008136, PLACE7008431, PLACE7008623, PLACE7008766, PLACE7009563, PROST1000033, PROST1000039, PROST1000065, PROST1000083, PROST1000110, PROST1000120, PROST1000123, PROST1000136, PROST1000145, PROST1000152, PROST1000167, PROST1000184, PROST1000215, PROST1000217, PROST1000220, PROST1000226, PROST1000246, PROST1000262, PROST1000272, PROST1000298, PROST1000322, PROST1000334, PROST1000343, PROST1000362, PROST1000377, PROST1000412, PROST1000419, PROST1000451, PROST1000480, PROST1000485, PROST1000493, PROST1000512, PROST1000527, PROST1000528, PROST1000536, PROST1000559, PROST1000575, PROST2000036, PROST2000053, PROST2000067, PROST2000079, PROST2000105, PROST2000143, PROST2000162, PROST2000165, PROST2000176, PROST2000203, PROST2000212, PROST2000241, PROST2000267, PROST2000273, PROST2000274, PROST2000277, PROST2000284, PROST2000325, PROST2000337, PROST2000432, PROST2000452, PROST2000470, PROST2000505, PROST2000567, PROST2000572, PROST2000717, PROST2000761, PROST2000835, PROST2000893, PROST2000961, PROST2001002, PROST2001116, PROST2001138, PROST2001213, PROST2001414, PROST2001415, PROST2001465, PROST2001521, PROST2001540, PROST2001552, PROST2001599, PROST2001611, PROST2001636, PROST2001739, PROST2001796, PROST2001805, PROST2001823, PROST2001883, PROST2001899, PROST2001998, PROST2002078, PROST2002101, PROST2002162, PROST2002212, PROST2002227, PROST2002338, PROST2002425, PROST2002488, PROST2002489, PROST2002527, PROST2002591, PROST2002602, PROST2002633, PROST2002682, PROST2002685, PROST2002722, PROST2002736, PROST2002842, PROST2002897, PROST2002906, PROST2002927, PROST2002960, PROST2003102, PROST2003117, PROST2003210, PROST2003302, PROST2003303, PROST2003340, PROST2003428, PROST2003472, PROST2003537, PROST2003563, PROST2003577, PROST2003583, PROST2003586, PROST2003628, PROST2003635, PROST2003674, PROST2003676, PROST2003725, PROST2003732, PROST2003775, PROST2003922, PROST2003930, PROST2004115, PROST2004142, PROST2004146, PROST2004161, PROST2004251, PROST2004332, PROST2004481, PROST2004526, PROST2004570, PROST2004727, PROST2004742, PROST2004744, PROST2004817, PROST2005039, PROST2005093, PROST2005121, PROST2005131, PROST2005143, PROST2005228, PROST2005285, PROST2005426, PROST2005466, PROST2005630, PROST2005683, PROST2005788, PROST2005880, PROST2005886, PROST2005904, PROST2005919, PROST2005943, PROST2006008, PROST2006020, PROST2006060, PROST2006196, PROST2006201, PROST2006282, PROST2006343, PROST2006450, PROST2006491, PROST2006510, PROST2006536, PROST2006579, PROST2006688, PROST2006737, PROST2006766, PROST2006782, PROST2006933, PROST2007122, PROST2007200, PROST2007237, PROST2007289, PROST2007317, PROST2007328, PROST2007382, PROST2007389, PROST2007416, PROST2007528, PROST2007818, PROST2007871, PROST2007950, PROST2007956, PROST2007974, PROST2007988, PROST2008079, PROST2008088, PROST2008243, PROST2008245, PROST2008268, PROST2008447, PROST2008468, PROST2008472, PROST2008516, PROST2008724, PROST2008835, PROST2008993, PROST2009022, PROST2009208, PROST2009222, PROST2009254, PROST2009273, PROST2009320, PROST2009365, PROST2009388, PROST2009400, PROST2009470, PROST2009483, PROST2009571, PROST2009736, PROST2009795, PROST2009901, PROST2009909, PROST2010046, PROST2010219, PROST2010250, PROST2010318, PROST2010326, PROST2010382, PROST2010400, PROST2010545, PROST2010579, PROST2010606, PROST2010885, PROST2011012, PROST2011105, PROST2011297, PROST2011410, PROST2011439, PROST2011482, PROST2011631, PROST2011660, PROST2012005, PROST2012016, PROST2012088, PROST2012140, PROST2012157, PROST2012190, PROST2012249, PROST2012400, PROST2012504, PROST2012542, PROST2012550, PROST2012740, PROST2012780, PROST2012888, PROST2012890, PROST2013032, PROST2013053, PROST2013121, PROST2013260, PROST2013327, PROST2013531, PROST2013605, PROST2013627, PROST2013873, PROST2013880, PROST2014422, PROST2014585, PROST2014601, PROST2014659, PROST2014862, PROST2014916, PROST2014925, PROST2015124, PROST2015137, PROST2015198, PROST2015243, PROST2015246, PROST2015287, PROST2015457, PROST2015537, PROST2015545, PROST2015551, PROST2015636, PROST2015756, PROST2015877, PROST2015900, PROST2015924, PROST2015932, PROST2016246, PROST2016351, PROST2016379, PROST2016444, PROST2016462, PROST2016499, PROST2016512, PROST2016566, PROST2016582, PROST2016668, PROST2016684, PROST2016777, PROST2016829, PROST2016860, PROST2016980, PROST2017098, PROST2017128, PROST2017203, PROST2017367, PROST2017413, PROST2017441, PROST2017578, PROST2017612, PROST2017617, PROST2017700, PROST2017701, PROST2017729, PROST2017836, PROST2017910, PROST2018030, PROST2018090, PROST2018235, PROST2018437, PROST2018487, PROST2018511, PROST2018607, PROST2018788, PROST2018902, PROST2018922, PROST2019296, PROST2019398, PROST2019487, PROST2019781, PUAEN1000039, PUAEN1000081, PUAEN1000085, PUAEN1000087, PUAEN1000121, PUAEN1000175, PUAEN1000275, PUAEN1000276, PUAEN1000288, PUAEN2000080, PUAEN2000175, PUAEN2000247, PUAEN2000394, PUAEN2000497, PUAEN2000594, PUAEN2000684, PUAEN2000942, PUAEN2001260, PUAEN2001526, PUAEN2001882, PUAEN2002473, PUAEN2002552, PUAEN2002568, PUAEN2002616, PUAEN2002758, PUAEN2003079, PUAEN2003116, PUAEN2003517, PUAEN2003954, PUAEN2004067, PUAEN2004083, PUAEN2004400, PUAEN2004511, PUAEN2004525, PUAEN2004875, PUAEN2005110, PUAEN2005247, PUAEN2005502, PUAEN2005588, PUAEN2006029, PUAEN2006328, PUAEN2006578, PUAEN2006639, PUAEN2006761, PUAEN2007350, PUAEN2007785, PUAEN2007898, PUAEN2008123, PUAEN2008228, PUAEN2008314, PUAEN2008815, PUAEN2008939, PUAEN2008980, PUAEN2009174, PUAEN2009348, PUAEN2009534, PUAEN2009795, PUAEN2009852, RECTM1000051, RECTM1000141, RECTM2000220, RECTM2000349, RECTM2000433, RECTM2000510, RECTM2001307, RECTM2001519, RECTM2001666, RECTM2001691, RECTM2001749, RECTM2002172, RECTM2002602, RECTM2002632, SALGL1000024, SALGL1000028, SALGL1000065, SALGL1000107, SALGL1000171, SKMUS1000030, SKMUS1000064, SKMUS1000067, SKMUS1000104, SKMUS1000118, SKMUS1000124, SKMUS1000129, SKMUS1000138, SKMUS2000061, SKMUS2000074, SKMUS2000078, SKMUS2000137, SKMUS2000198, SKMUS2000243, SKMUS2000287, SKMUS2000317, SKMUS2000330, SKMUS2000339, SKMUS2000343, SKMUS2000365, SKMUS2000390, SKMUS2000416, SKMUS2000458, SKMUS2000467, SKMUS2000468, SKMUS2000515, SKMUS2000679, SKMUS2000690, SKMUS2000701, SKMUS2000705, SKMUS2000710, SKMUS2000724, SKMUS2000726, SKMUS2000774, SKMUS2000780, SKMUS2000821, SKMUS2000847, SKMUS2000863, SKMUS2000894, SKMUS2000898, SKMUS2000902, SKMUS2000933, SKMUS2000945, SKMUS2000973, SKMUS2000980, SKMUS2001008, SKMUS2001014, SKMUS2001129, SKMUS2001157, SKMUS2001164, SKMUS2001199, SKMUS2001201, SKMUS2001215, SKMUS2001247, SKMUS2001254, SKMUS2001271, SKMUS2001287, SKMUS2001323, SKMUS2001364, SKMUS2001398, SKMUS2001402, SKMUS2001412, SKMUS2001492, SKMUS2001501, SKMUS2001543, SKMUS2001580, SKMUS2001585, SKMUS2001608, SKMUS2001631, SKMUS2001662, SKMUS2001663, SKMUS2001668, SKMUS2001671, SKMUS2001683, SKMUS2001693, SKMUS2001695, SKMUS2001703, SKMUS2001740, SKMUS2001742, SKMUS2001823, SKMUS2001850, SKMUS2002077, SKMUS2002084, SKMUS2002153, SKMUS2002475, SKMUS2002602, SKMUS2002634, SKMUS2002693, SKMUS2002821, SKMUS2002840, SKMUS2002920, SKMUS2003034, SKMUS2003074, SKMUS2003168, SKMUS2003194, SKMUS2003744, SKMUS2004044, SKMUS2004047, SKMUS2004483, SKMUS2004667, SKMUS2004897, SKMUS2004903, SKMUS2005428, SKMUS2006394, SKMUS2006481, SKMUS2006755, SKMUS2007315, SKMUS2007359, SKMUS2007568, SKMUS2007740, SKMUS2007816, SKMUS2007915, SKMUS2008338, SKMUS2008407, SKMUS2008474, SKMUS2008585, SKMUS2008607, SKMUS2009190, SKMUS2009232, SKMUS2009479, SKMUS2009557, SKNMC1000123, SKNMC1000124, SKNMC1000137, SKNMC1000229, SKNMC1000251, SKNMC1000264, SKNMC2000224, SKNMC2000256, SKNMC2000356, SKNMC2000374, SKNMC2000583, SKNMC2000593, SKNMC2000612, SKNMC2000622, SKNMC2000698, SKNMC2000966, SKNMC2001113, SKNMC2001324, SKNMC2001555, SKNMC2001596, SKNMC2001623, SKNMC2002402, SKNMC2003639, SKNMC2003924, SKNMC2003987, SKNMC2004457, SKNMC2004643, SKNMC2004651, SKNMC2005772, SKNMC2006327, SKNMC2006998, SKNMC2007134, SKNMC2007502, SKNMC2007504, SKNMC2007961, SKNMC2009450, SKNSH1000086, SKNSH1000174, SKNSH1000301, SKNSH1000308, SKNSH1000416, SKNSH2000051, SKNSH2000151, SKNSH2000163, SKNSH2000319, SKNSH2000482, SKNSH2000516, SKNSH2000550, SKNSH2000971, SKNSH2001931, SKNSH2002054, SKNSH2002768, SKNSH2002866, SKNSH2003174, SKNSH2003422, SKNSH2003466, SKNSH2003483, SKNSH2003528, SKNSH2003633, SKNSH2004039, SKNSH2005120, SKNSH2005194, SKNSH2005240, SKNSH2005792, SKNSH2005816, SKNSH2005981, SKNSH2006234, SKNSH2006304, SKNSH2006432, SKNSH2006822, SKNSH2007142, SKNSH2007149, SKNSH2007429, SKNSH2007739, SKNSH2008043, SKNSH2008940, SKNSH2008969, SKNSH2009197, SKNSH2009435, SKNSH2009991, SKNSH2010015, SMINT1000012, SMINT1000016, SMINT1000039, SMINT1000042, SMINT1000051, SMINT1000054, SMINT1000057, SMINT1000071, SMINT1000075, SMINT1000078, SMINT1000091, SMINT1000103, SMINT1000118, SMINT1000137, SMINT1000192, SMINT2000007, SMINT2000018, SMINT2000032, SMINT2000040, SMINT2000060, SMINT2000084, SMINT2000145, SMINT2000159, SMINT2000176, SMINT2000185, SMINT2000227, SMINT2000229, SMINT2000232, SMINT2000277, SMINT2000518, SMINT2000529, SMINT2000530, SMINT2000537, SMINT2000538, SMINT2000541, SMINT2000558, SMINT2000562, SMINT2000568, SMINT2000602, SMINT2000609, SMINT2000747, SMINT2000811, SMINT2000824, SMINT2000984, SMINT2001114, SMINT2001158, SMINT2001199, SMINT2001222, SMINT2001397, SMINT2001458, SMINT2001461, SMINT2001535, SMINT2001559, SMINT2001609, SMINT2001615, SMINT2001683, SMINT2001731, SMINT2001812, SMINT2001818, SMINT2002126, SMINT2002202, SMINT2002210, SMINT2002281, SMINT2002311, SMINT2002314, SMINT2002328, SMINT2002414, SMINT2002457, SMINT2002743, SMINT2002778, SMINT2002880, SMINT2002882, SMINT2002884, SMINT2002899, SMINT2002974, SMINT2003003, SMINT2003074, SMINT2003128, SMINT2003150, SMINT2003317, SMINT2003340, SMINT2003386, SMINT2003505, SMINT2003551, SMINT2003569, SMINT2003641, SMINT2003644, SMINT2003866, SMINT2004037, SMINT2004047, SMINT2004086, SMINT2004144, SMINT2004280, SMINT2004299, SMINT2004339, SMINT2004414, SMINT2004473, SMINT2004547, SMINT2004583, SMINT2004729, SMINT2004781, SMINT2004891, SMINT2004909, SMINT2004972, SMINT2004992, SMINT2005075, SMINT2005161, SMINT2005174, SMINT2005213, SMINT2005387, SMINT2005402, SMINT2005405, SMINT2005621, SMINT2005623, SMINT2005624, SMINT2005688, SMINT2005800, SMINT2006078, SMINT2006205, SMINT2006331, SMINT2006596, SMINT2006641, SMINT2006648, SMINT2006708, SMINT2006716, SMINT2006801, SMINT2007062, SMINT2007140, SMINT2007187, SMINT2007219, SMINT2007294, SMINT2007365, SMINT2007391, SMINT2007433, SMINT2007508, SMINT2007526, SMINT2007579, SMINT2007647, SMINT2007729, SMINT2007790, SMINT2007796, SMINT2007867, SMINT2007932, SMINT2008042, SMINT2008054, SMINT2008133, SMINT2008277, SMINT2008329, SMINT2008455, SMINT2008491, SMINT2008531, SMINT2008545, SMINT2008558, SMINT2008625, SMINT2008672, SMINT2008690, SMINT2008715, SMINT2008720, SMINT2008817, SMINT2008844, SMINT2008917, SMINT2009119, SMINT2009121, SMINT2009212, SMINT2009216, SMINT2009233, SMINT2009259, SMINT2009272, SMINT2009363, SMINT2009468, SMINT2009505, SMINT2009529, SMINT2009832, SMINT2009895, SMINT2009902, SMINT2009973, SMINT2010015, SMINT2010068, SMINT2010076, SMINT2010200, SMINT2010278, SMINT2010326, SMINT2010369, SMINT2010426, SMINT2010500, SMINT2010533, SMINT2010629, SMINT2010672, SMINT2010753, SMINT2010853, SMINT2010897, SMINT2010959, SMINT2010997, SMINT2011033, SMINT2011066, SMINT2011273, SMINT2011311, SMINT2011406, SMINT2011509, SMINT2011567, SMINT2011588, SMINT2011656, SMINT2011888, SMINT2011958, SMINT2012040, SMINT2012195, SMINT2012285, SMINT2012291, SMINT2012734, SMINT2012793, SMINT2013032, SMINT2013129, SMINT2013170, SMINT2013181, SMINT2013228, SMINT2013613, SMINT2013626, SMINT2013695, SMINT2013833, SMINT2013890, SMINT2014166, SMINT2014282, SMINT2014443, SMINT2014489, SMINT2014721, SMINT2015006, SMINT2015294, SMINT2015306, SMINT2015326, SMINT2015353, SMINT2015454, SMINT2015518, SMINT2015745, SMINT2015787, SMINT2015810, SMINT2016122, SMINT2016286, SMINT2016313, SMINT2016412, SMINT2016440, SMINT2016477, SMINT2016544, SMINT2016857, SMINT2017319, SMINT2017324, SMINT2017410, SMINT2017431, SMINT2017432, SMINT2017436, SMINT2017599, SMINT2017659, SMINT2017736, SMINT2017781, SMINT2017855, SMINT2017884, SMINT2017964, SMINT2017974, SMINT2018343, SMINT2018353, SMINT2018592, SMINT2018681, SMINT2019017, SMINT2019105, SMINT2019142, SMINT2019153, SMINT2019200, SPLEN1000041, SPLEN1000056, SPLEN1000087, SPLEN1000089, SPLEN1000091, SPLEN1000134, SPLEN1000139, SPLEN1000143, SPLEN1000145, SPLEN1000156, SPLEN1000163, SPLEN1000178, SPLEN2000020, SPLEN2000047, SPLEN2000064, SPLEN2000072, SPLEN2000126, SPLEN2000143, SPLEN2000189, SPLEN2000205, SPLEN2000210, SPLEN2000242, SPLEN2000243, SPLEN2000247, SPLEN2000270, SPLEN2000307, SPLEN2000310, SPLEN2000350, SPLEN2000357, SPLEN2000364, SPLEN2000402, SPLEN2000414, SPLEN2000420, SPLEN2000443, SPLEN2000448, SPLEN2000450, SPLEN2000464, SPLEN2000496, SPLEN2000515, SPLEN2000516, SPLEN2000541, SPLEN2000607, SPLEN2000630, SPLEN2000695, SPLEN2000839, SPLEN2001135, SPLEN2001176, SPLEN2001227, SPLEN2001245, SPLEN2001278, SPLEN2001354, SPLEN2001367, SPLEN2001383, SPLEN2001476, SPLEN2001503, SPLEN2001510, SPLEN2001599, SPLEN2001650, SPLEN2001689, SPLEN2001710, SPLEN2001761, SPLEN2001781, SPLEN2001881, SPLEN2001912, SPLEN2001945, SPLEN2002007, SPLEN2002133, SPLEN2002147, SPLEN2002166, SPLEN2002175, SPLEN2002223, SPLEN2002314, SPLEN2002343, SPLEN2002354, SPLEN2002385, SPLEN2002419, SPLEN2002451, SPLEN2002462, SPLEN2002467, SPLEN2002477, SPLEN2002662, SPLEN2002695, SPLEN2002707, SPLEN2002917, SPLEN2002957, SPLEN2003160, SPLEN2003204, SPLEN2003219, SPLEN2003297, SPLEN2003878, SPLEN2003918, SPLEN2003924, SPLEN2004060, SPLEN2004078, SPLEN2004124, SPLEN2004148, SPLEN2004181, SPLEN2004220, SPLEN2004346, SPLEN2004368, SPLEN2004611, SPLEN2004662, SPLEN2004844, SPLEN2005227, SPLEN2005272, SPLEN2005416, SPLEN2005450, SPLEN2005474, SPLEN2005727, SPLEN2005790, SPLEN2005818, SPLEN2005869, SPLEN2005939, SPLEN2006232, SPLEN2006268, SPLEN2006283, SPLEN2006325, SPLEN2006389, SPLEN2006425, SPLEN2006671, SPLEN2006701, SPLEN2006785, SPLEN2006875, SPLEN2007314, SPLEN2007326, SPLEN2007350, SPLEN2007388, SPLEN2007619, SPLEN2007653, SPLEN2007689, SPLEN2007695, SPLEN2007750, SPLEN2007794, SPLEN2007879, SPLEN2007926, SPLEN2007951, SPLEN2008007, SPLEN2008135, SPLEN2008164, SPLEN2008317, SPLEN2008496, SPLEN2008591, SPLEN2008786, SPLEN2009088, SPLEN2009163, SPLEN2009315, SPLEN2009340, SPLEN2009512, SPLEN2009513, SPLEN2009541, SPLEN2009548, SPLEN2009581, SPLEN2009733, SPLEN2009803, SPLEN2009884, SPLEN2009918, SPLEN2010004, SPLEN2010112, SPLEN2010119, SPLEN2010146, SPLEN2010187, SPLEN2010350, SPLEN2010395, SPLEN2010415, SPLEN2010447, SPLEN2010510, SPLEN2010530, SPLEN2010534, SPLEN2010588, SPLEN2010625, SPLEN2010800, SPLEN2010846, SPLEN2010847, SPLEN2010862, SPLEN2010978, SPLEN2010986, SPLEN2011018, SPLEN2011021, SPLEN2011025, SPLEN2011086, SPLEN2011139, SPLEN2011145, SPLEN2011248, SPLEN2011252, SPLEN2011422, SPLEN2011672, SPLEN2011758, SPLEN2011766, SPLEN2011805, SPLEN2011820, SPLEN2011830, SPLEN2011931, SPLEN2011981, SPLEN2012115, SPLEN2012175, SPLEN2012179, SPLEN2012185, SPLEN2012234, SPLEN2012453, SPLEN2012524, SPLEN2012525, SPLEN2012606, SPLEN2012611, SPLEN2012725, SPLEN2012743, SPLEN2012756, SPLEN2012846, SPLEN2012889, SPLEN2012961, SPLEN2013108, SPLEN2013195, SPLEN2013644, SPLEN2013648, SPLEN2013670, SPLEN2013673, SPLEN2013690, SPLEN2013714, SPLEN2013753, SPLEN2013821, SPLEN2013860, SPLEN2013910, SPLEN2013923, SPLEN2014041, SPLEN2014063, SPLEN2014073, SPLEN2014080, SPLEN2014136, SPLEN2014199, SPLEN2014210, SPLEN2014293, SPLEN2014318, SPLEN2014381, SPLEN2014452, SPLEN2014454, SPLEN2014486, SPLEN2014543, SPLEN2014669, SPLEN2014739, SPLEN2014860, SPLEN2014865, SPLEN2014919, SPLEN2014920, SPLEN2014924, SPLEN2014937, SPLEN2014946, SPLEN2015031, SPLEN2015094, SPLEN2015121, SPLEN2015158, SPLEN2015166, SPLEN2015216, SPLEN2015258, SPLEN2015261, SPLEN2015267, SPLEN2015276, SPLEN2015415, SPLEN2015433, SPLEN2015593, SPLEN2015674, SPLEN2015679, SPLEN2015707, SPLEN2015730, SPLEN2015746, SPLEN2015815, SPLEN2015890, SPLEN2015891, SPLEN2015899, SPLEN2016045, SPLEN2016053, SPLEN2016069, SPLEN2016098, SPLEN2016135, SPLEN2016241, SPLEN2016250, SPLEN2016304, SPLEN2016356, SPLEN2016480, SPLEN2016531, SPLEN2016541, SPLEN2016552, SPLEN2016554, SPLEN2016602, SPLEN2016627, SPLEN2016678, SPLEN2016773, SPLEN2016781, SPLEN2016840, SPLEN2016863, SPLEN2016922, SPLEN2016973, SPLEN2017043, SPLEN2017104, SPLEN2017147, SPLEN2017187, SPLEN2017189, SPLEN2017212, SPLEN2017426, SPLEN2017452, SPLEN2017538, SPLEN2017592, SPLEN2017613, SPLEN2017620, SPLEN2017643, SPLEN2017687, SPLEN2017740, SPLEN2017781, SPLEN2017999, SPLEN2018098, SPLEN2018112, SPLEN2018180, SPLEN2018181, SPLEN2018280, SPLEN2018285, SPLEN2018364, SPLEN2018395, SPLEN2018683, SPLEN2018732, SPLEN2018749, SPLEN2018933, SPLEN2019008, SPLEN2019043, SPLEN2019077, SPLEN2019092, SPLEN2019102, SPLEN2019131, SPLEN2019257, SPLEN2019311, SPLEN2019323, SPLEN2019375, SPLEN2019379, SPLEN2019446, SPLEN2019471, SPLEN2019480, SPLEN2019505, SPLEN2019571, SPLEN2019575, SPLEN2019709, SPLEN2019793, SPLEN2019811, SPLEN2019839, SPLEN2019956, SPLEN2019985, SPLEN2020007, SPLEN2020153, SPLEN2020154, SPLEN2020166, SPLEN2020183, SPLEN2020223, SPLEN2020359, SPLEN2020427, SPLEN2020467, SPLEN2020512, SPLEN2020608, SPLEN2020777, SPLEN2020805, SPLEN2021057, SPLEN2021157, SPLEN2021231, SPLEN2021295, SPLEN2021298, SPLEN2021383, SPLEN2021417, SPLEN2021440, SPLEN2021463, SPLEN2021560, SPLEN2021701, SPLEN2021795, SPLEN2021983, SPLEN2021991, SPLEN2022040, SPLEN2022162, SPLEN2022227, SPLEN2022522, SPLEN2022591, SPLEN2022785, SPLEN2022920, SPLEN2023024, SPLEN2023423, SPLEN2023710, SPLEN2023733, SPLEN2023791, SPLEN2023977, SPLEN2024070, SPLEN2024127, SPLEN2024232, SPLEN2024273, SPLEN2024383, SPLEN2024530, SPLEN2024571, SPLEN2024577, SPLEN2024617, SPLEN2024737, SPLEN2024956, SPLEN2024990, SPLEN2025012, SPLEN2025017, SPLEN2025039, SPLEN2025219, SPLEN2025626, SPLEN2025820, SPLEN2026144, SPLEN2026411, SPLEN2026765, SPLEN2027157, SPLEN2027395, SPLEN2027488, SPLEN2027780, SPLEN2027852, SPLEN2027868, SPLEN2027995, SPLEN2028046, SPLEN2028066, SPLEN2028138, SPLEN2028365, SPLEN2028417, SPLEN2028424, SPLEN2028593, SPLEN2028844, SPLEN2028994, SPLEN2029051, SPLEN2029176, SPLEN2029295, SPLEN2029380, SPLEN2029522, SPLEN2029683, SPLEN2029727, SPLEN2029904, SPLEN2029912, SPLEN2030250, SPLEN2030335, SPLEN2030371, SPLEN2030397, SPLEN2030479, SPLEN2030495, SPLEN2030562, SPLEN2030763, SPLEN2030847, SPLEN2031004, SPLEN2031125, SPLEN2031724, SPLEN2031780, SPLEN2032036, SPLEN2032112, SPLEN2032157, SPLEN2032321, SPLEN2032356, SPLEN2032677, SPLEN2032813, SPLEN2032924, SPLEN2033098, SPLEN2033153, SPLEN2033333, SPLEN2033490, SPLEN2033539, SPLEN2033921, SPLEN2033996, SPLEN2034021, SPLEN2034081, SPLEN2034252, SPLEN2034551, SPLEN2034601, SPLEN2034678, SPLEN2034864, SPLEN2034934, SPLEN2035318, SPLEN2035615, SPLEN2036103, SPLEN2036326, SPLEN2036475, SPLEN2036501, SPLEN2036579, SPLEN2036608, SPLEN2036702, SPLEN2036712, SPLEN2036953, SPLEN2037077, SPLEN2037194, SPLEN2037319, SPLEN2037444, SPLEN2037580, SPLEN2037630, SPLEN2037678, SPLEN2037722, SPLEN2037891, SPLEN2038055, SPLEN2038180, SPLEN2038345, SPLEN2038407, SPLEN2038473, SPLEN2038834, SPLEN2039311, SPLEN2039672, SPLEN2039697, SPLEN2039845, SPLEN2039936, SPLEN2040222, SPLEN2040237, SPLEN2041304, SPLEN2041306, SPLEN2041310, SPLEN2041585, SPLEN2041645, SPLEN2041700, SPLEN2041720, SPLEN2041977, SPLEN2042051, SPLEN2042303, SPLEN2042521, SPLEN2042598, SPLEN2042714, SPLEN2042920, STOMA1000013, STOMA1000047, STOMA1000052, STOMA1000074, STOMA1000117, STOMA1000133, STOMA1000175, STOMA1000186, STOMA1000189, STOMA1000190, STOMA1000191, STOMA2000032, STOMA2000072, STOMA2000088, STOMA2000104, STOMA2000121, STOMA2000148, STOMA2000168, STOMA2000183, STOMA2000188, STOMA2000279, STOMA2000383, STOMA2000386, STOMA2000395, STOMA2000478, STOMA2000529, STOMA2000539, STOMA2000567, STOMA2000640, STOMA2000678, STOMA2000686, STOMA2000888, STOMA2001025, STOMA2001389, STOMA2002141, STOMA2002367, STOMA2002688, STOMA2002828, STOMA2003158, STOMA2003289, STOMA2003444, STOMA2003477, STOMA2003646, STOMA2003716, STOMA2003781, STOMA2003894, STOMA2004194, STOMA2004294, STOMA2004663, STOMA2004668, STOMA2004852, STOMA2004873, STOMA2004884, STOMA2004893, STOMA2004925, STOMA2005664, STOMA2005667, STOMA2005746, STOMA2005782, STOMA2006181, STOMA2006213, STOMA2006325, STOMA2006330, STOMA2006398, STOMA2006447, STOMA2006780, STOMA2006904, STOMA2007269, STOMA2007680, STOMA2007745, STOMA2008050, STOMA2008361, STOMA2008546, STOMA2008614, STOMA2008638, STOMA2008838, STOMA2009250, STOMA2009253, STOMA2009256, SYNOV1000045, SYNOV1000049, SYNOV1000118, SYNOV1000164, SYNOV1000190, SYNOV1000256, SYNOV2000152, SYNOV2000171, SYNOV2000173, SYNOV2000177, SYNOV2000178, SYNOV2000193, SYNOV2000251, SYNOV2000279, SYNOV2000297, SYNOV2000426, SYNOV2000601, SYNOV2000700, SYNOV2000820, SYNOV2000824, SYNOV2000923, SYNOV2001014, SYNOV2001035, SYNOV2001088, SYNOV2001111, SYNOV2001212, SYNOV2001251, SYNOV2001300, SYNOV2001356, SYNOV2001374, SYNOV2001390, SYNOV2001451, SYNOV2001457, SYNOV2001468, SYNOV2001660, SYNOV2003326, SYNOV2005216, SYNOV2005448, SYNOV2005541, SYNOV2005673, SYNOV2005817, SYNOV2005962, SYNOV2006430, SYNOV2007965, SYNOV2008765, SYNOV2009172, SYNOV2011233, SYNOV2012326, SYNOV2013365, SYNOV2013637, SYNOV2014157, SYNOV2014364, SYNOV2016124, SYNOV2016837, SYNOV2017055, SYNOV2017179, SYNOV2018921, SYNOV2019280, SYNOV2020085, SYNOV2020463, SYNOV2021320, SYNOV2021953, SYNOV3000184, SYNOV3000231, SYNOV3000302, SYNOV3000345, SYNOV4000472, SYNOV4000598, SYNOV4000706, SYNOV4001224, SYNOV4001326, SYNOV4001342, SYNOV4001395, SYNOV4002001, SYNOV4002392, SYNOV4002875, SYNOV4003174, SYNOV4003322, SYNOV4003681, SYNOV4003981, SYNOV4004184, SYNOV4004741, SYNOV4004823, SYNOV4004914, SYNOV4005256, SYNOV4005570, SYNOV4005739, SYNOV4005889, SYNOV4005981, SYNOV4006256, SYNOV4006327, SYNOV4007012, SYNOV4007215, SYNOV4007360, SYNOV4007521, SYNOV4007553, SYNOV4007711, SYNOV4008336, SYNOV4009139, SYNOV4009298, T1ESE2000116, T1ESE2000609, T1ESE2002665, TBAES2000004, TBAES2000059, TBAES2000116, TBAES2000255, TBAES2000315, TBAES2000352, TBAES2000932, TBAES2001171, TBAES2001220, TBAES2001229, TBAES2001258, TBAES2001296, TBAES2001492, TBAES2001553, TBAES2001751, TBAES2003435, TBAES2003492, TBAES2003550, TBAES2003702, TBAES2003917, TBAES2004055, TBAES2004105, TBAES2004939, TBAES2005157, TBAES2005361, TBAES2005543, TBAES2006568, TBAES2006881, TBAES2007379, TBAES2007481, TBAES2007504, TBAES2007548, TBAES2007697, TBAES2007862, TBAES2007964, TBAES2008133, TCERX2000171, TCERX2000431, TCERX2000613, TCERX2000998, TCERX2002644, TCOLN1000037, TCOLN2000139, TCOLN2000236, TCOLN2000641, TCOLN2001268, TCOLN2002047, TCOLN2002278, TESOP1000127, TESOP1000160, TESOP2000083, TESOP2000090, TESOP2000205, TESOP2000312, TESOP2000390, TESOP2000400, TESOP2000510, TESOP2000569, TESOP2000739, TESOP2000801, TESOP2001122, TESOP2001166, TESOP2001345, TESOP2001474, TESOP2001796, TESOP2001818, TESOP2001849, TESOP2001865, TESOP2001901, TESOP2001953, TESOP2002005, TESOP2002110, TESOP2002150, TESOP2002273, TESOP2002489, TESOP2002539, TESOP2002545, TESOP2002804, TESOP2002950, TESOP2003273, TESOP2003308, TESOP2003553, TESOP2003753, TESOP2004110, TESOP2004114, TESOP2004173, TESOP2004214, TESOP2005199, TESOP2005285, TESOP2005485, TESOP2005498, TESOP2005579, TESOP2006041, TESOP2006053, TESOP2006060, TESOP2006068, TESOP2006110, TESOP2006398, TESOP2006670, TESOP2006704, TESOP2006746, TESOP2006865, TESOP2007041, TESOP2007052, TESOP2007262, TESOP2007384, TESOP2007636, TESOP2007674, TESOP2007688, TESOP2007725, TESOP2007912, TESOP2007978, TESOP2008127, TESOP2008552, TESOP2008556, TESOP2008563, TESOP2008820, TESOP2009121, TESOP2009201, TESOP2009247, TESOP2009555, TESTI1000018, TESTI1000019, TESTI1000025, TESTI1000029, TESTI1000030, TESTI1000042, TESTI1000045, TESTI1000055, TESTI1000064, TESTI1000085, TESTI1000088, TESTI1000093, TESTI1000109, TESTI1000125, TESTI1000127, TESTI1000128, TESTI1000131, TESTI1000138, TESTI1000142, TESTI1000157, TESTI1000169, TESTI1000179, TESTI1000183, TESTI1000191, TESTI1000257, TESTI1000266, TESTI1000319, TESTI1000330, TESTI1000348, TESTI1000390, TESTI1000391, TESTI1000459, TESTI1000491, TESTI1000545, TESTI2000018, TESTI2000044, TESTI2000100, TESTI2000117, TESTI2000120, TESTI2000147, TESTI2000154, TESTI2000179, TESTI2000207, TESTI2000208, TESTI2000221, TESTI2000238, TESTI2000253, TESTI2000272, TESTI2000278, TESTI2000349, TESTI2000356, TESTI2000358, TESTI2000372, TESTI2000427, TESTI2000431, TESTI2000443, TESTI2000452, TESTI2000462, TESTI2000571, TESTI2000591, TESTI2000598, TESTI2000616, TESTI2000644, TESTI2000671, TESTI2000683, TESTI2000689, TESTI2000695, TESTI2000699, TESTI2000707, TESTI2000745, TESTI2000756, TESTI2000762, TESTI2000808, TESTI2000819, TESTI2000830, TESTI2000840, TESTI2000850, TESTI2000909, TESTI2000951, TESTI2000981, TESTI2001008, TESTI2001049, TESTI2001082, TESTI2001134, TESTI2001180, TESTI2001208, TESTI2001229, TESTI2001236, TESTI2001237, TESTI2001306, TESTI2001313, TESTI2001330, TESTI2001339, TESTI2001345, TESTI2001352, TESTI2001364, TESTI2001412, TESTI2001420, TESTI2001498, TESTI2001511, TESTI2001512, TESTI2001518, TESTI2001556, TESTI2001593, TESTI2001621, TESTI2001661, TESTI2001665, TESTI2001671, TESTI2001697, TESTI2001725, TESTI2001758, TESTI2001766, TESTI2001792, TESTI2001793, TESTI2001795, TESTI2001812, TESTI2001815, TESTI2001823, TESTI2001826, TESTI2001827, TESTI2001852, TESTI2001879, TESTI2001894, TESTI2001915, TESTI2001950, TESTI2001959, TESTI2001968, TESTI2001991, TESTI2002002, TESTI2002012, TESTI2002036, TESTI2002048, TESTI2002057, TESTI2002081, TESTI2002090, TESTI2002105, TESTI2002149, TESTI2002216, TESTI2002223, TESTI2002245, TESTI2002251, TESTI2002264, TESTI2002282, TESTI2002293, TESTI2002294, TESTI2002326, TESTI2002351, TESTI2002361, TESTI2002369, TESTI2002406, TESTI2002415, TESTI2002423, TESTI2002453, TESTI2002461, TESTI2002465, TESTI2002498, TESTI2002516, TESTI2002544, TESTI2002578, TESTI2002580, TESTI2002618, TESTI2002676, TESTI2002690, TESTI2002696, TESTI2002698, TESTI2002700, TESTI2002724, TESTI2002729, TESTI2002752, TESTI2002753, TESTI2002789, TESTI2002802, TESTI2002806, TESTI2002840, TESTI2002866, TESTI2002877, TESTI2002910, TESTI2002912, TESTI2002928, TESTI2002937, TESTI2002965, TESTI2002993, TESTI2003005, TESTI2003020, TESTI2003031, TESTI2003037, TESTI2003044, TESTI2003059, TESTI2003061, TESTI2003071, TESTI2003074, TESTI2003089, TESTI2003104, TESTI2003109, TESTI2003117, TESTI2003127, TESTI2003130, TESTI2003131, TESTI2003139, TESTI2003152, TESTI2003181, TESTI2003193, TESTI2003196, TESTI2003228, TESTI2003236, TESTI2003255, TESTI2003258, TESTI2003277, TESTI2003299, TESTI2003311, TESTI2003321, TESTI2003325, TESTI2003327, TESTI2003330, TESTI2003347, TESTI2003354, TESTI2003356, TESTI2003372, TESTI2003376, TESTI2003418, TESTI2003419, TESTI2003432, TESTI2003475, TESTI2003476, TESTI2003498, TESTI2003512, TESTI2003539, TESTI2003545, TESTI2003551, TESTI2003574, TESTI2003579, TESTI2003580, TESTI2003589, TESTI2003598, TESTI2003615, TESTI2003638, TESTI2003649, TESTI2003718, TESTI2003727, TESTI2003768, TESTI2003781, TESTI2003787, TESTI2003824, TESTI2003827, TESTI2003894, TESTI2003911, TESTI2003914, TESTI2003940, TESTI2003962, TESTI2003998, TESTI2004000, TESTI2004073, TESTI2004085, TESTI2004089, TESTI2004111, TESTI2004119, TESTI2004122, TESTI2004163, TESTI2004169, TESTI2004207, TESTI2004215, TESTI2004227, TESTI2004229, TESTI2004243, TESTI2004255, TESTI2004287, TESTI2004313, TESTI2004318, TESTI2004322, TESTI2004391, TESTI2004399, TESTI2004423, TESTI2004432, TESTI2004452, TESTI2004459, TESTI2004490, TESTI2004539, TESTI2004552, TESTI2004560, TESTI2004574, TESTI2004601, TESTI2004611, TESTI2004649, TESTI2004654, TESTI2004675, TESTI2004687, TESTI2004689, TESTI2004700, TESTI2004706, TESTI2004712, TESTI2004783, TESTI2004791, TESTI2004793, TESTI2004860, TESTI2004906, TESTI2004920, TESTI2004936, TESTI2004941, TESTI2004971, TESTI2004982, TESTI2004993, TESTI2004994, TESTI2004999, TESTI2005017, TESTI2005025, TESTI2005040, TESTI2005060, TESTI2005072, TESTI2005085, TESTI2005120, TESTI2005153, TESTI2005155, TESTI2005173, TESTI2005267, TESTI2005268, TESTI2005280, TESTI2005307, TESTI2005326, TESTI2005363, TESTI2005376, TESTI2005378, TESTI2005380, TESTI2005391, TESTI2005395, TESTI2005396, TESTI2005415, TESTI2005470, TESTI2005492, TESTI2005568, TESTI2005584, TESTI2005588, TESTI2005590, TESTI2005603, TESTI2005609, TESTI2005610, TESTI2005630, TESTI2005672, TESTI2005683, TESTI2005690, TESTI2005692, TESTI2005703, TESTI2005720, TESTI2005739, TESTI2005767, TESTI2005775, TESTI2005827, TESTI2005860, TESTI2005892, TESTI2005911, TESTI2005933, TESTI2005937, TESTI2005948, TESTI2005979, TESTI2005981, TESTI2005982, TESTI2005984, TESTI2005986, TESTI2005987, TESTI2006007, TESTI2006008, TESTI2006015, TESTI2006016, TESTI2006035, TESTI2006040, TESTI2006041, TESTI2006045, TESTI2006067, TESTI2006083, TESTI2006097, TESTI2006109, TESTI2006120, TESTI2006125, TESTI2006179, TESTI2006209, TESTI2006210, TESTI2006212, TESTI2006218, TESTI2006238, TESTI2006255, TESTI2006278, TESTI2006333, TESTI2006341, TESTI2006360, TESTI2006425, TESTI2006437, TESTI2006457, TESTI2006460, TESTI2006465, TESTI2006483, TESTI2006499, TESTI2006523, TESTI2006543, TESTI2006565, TESTI2006572, TESTI2006615, TESTI2006617, TESTI2006624, TESTI2006628, TESTI2006633, TESTI2006643, TESTI2006648, TESTI2006659, TESTI2006660, TESTI2006665, TESTI2006667, TESTI2006677, TESTI2006720, TESTI2006735, TESTI2006744, TESTI2006774, TESTI2006853, TESTI2006866, TESTI2006872, TESTI2006877, TESTI2006879, TESTI2006894, TESTI2006940, TESTI2006955, TESTI2006978, TESTI2006979, TESTI2006990, TESTI2007040, TESTI2007074, TESTI2007078, TESTI2007113, TESTI2007152, TESTI2007163, TESTI2007183, TESTI2007220, TESTI2007234, TESTI2007320, TESTI2007346, TESTI2007358, TESTI2007402, TESTI2007405, TESTI2007422, TESTI2007452, TESTI2007464, TESTI2007466, TESTI2007480, TESTI2007490, TESTI2007502, TESTI2007524, TESTI2007533, TESTI2007576, TESTI2007613, TESTI2007657, TESTI2007685, TESTI2007692, TESTI2007749, TESTI2007750, TESTI2007808, TESTI2007814, TESTI2007829, TESTI2007864, TESTI2007867, TESTI2007872, TESTI2007906, TESTI2007922, TESTI2007951, TESTI2007972, TESTI2007973, TESTI2008014, TESTI2008032, TESTI2008033, TESTI2008046, TESTI2008081, TESTI2008099, TESTI2008139, TESTI2008144, TESTI2008161, TESTI2008189, TESTI2008204, TESTI2008219, TESTI2008233, TESTI2008234, TESTI2008237, TESTI2008278, TESTI2008320, TESTI2008331, TESTI2008343, TESTI2008387, TESTI2008389, TESTI2008394, TESTI2008405, TESTI2008420, TESTI2008425, TESTI2008440, TESTI2008567, TESTI2008595, TESTI2008636, TESTI2008657, TESTI2008684, TESTI2008699, TESTI2008715, TESTI2008762, TESTI2008774, TESTI2008786, TESTI2008822, TESTI2008835, TESTI2008840, TESTI2008847, TESTI2008884, TESTI2008901, TESTI2008929, TESTI2008946, TESTI2008960, TESTI2009018, TESTI2009091, TESTI2009097, TESTI2009136, TESTI2009185, TESTI2009190, TESTI2009217, TESTI2009239, TESTI2009325, TESTI2009388, TESTI2009390, TESTI2009400, TESTI2009402, TESTI2009412, TESTI2009423, TESTI2009447, TESTI20094620 TESTI2009474, TESTI2009477, TESTI2009497, TESTI2009502, TESTI2009511, TESTI2009544, TESTI2009545, TESTI2009551, TESTI2009585, TESTI2009588, TESTI2009683, TESTI2009727, TESTI2009739, TESTI2009812, TESTI2009835, TESTI2009853, TESTI2009935, TESTI2009977, TESTI2010009, TESTI2010154, TESTI2010239, TESTI2010280, TESTI2010354, TESTI2010396, TESTI2010400, TESTI2010409, TESTI2010572, TESTI2010587, TESTI2010591, TESTI2010682, TESTI2010724, TESTI2010732, TESTI2010734, TESTI2010755, TESTI2010793, TESTI2010806, TESTI2010833, TESTI2010872, TESTI2011009, TESTI2011020, TESTI2011028, TESTI2011033, TESTI2011254, TESTI2011286, TESTI2011294, TESTI2011314, TESTI2011315, TESTI2011394, TESTI2011407, TESTI2011448, TESTI2011480, TESTI2011549, TESTI2011575, TESTI2011612, TESTI2011665, TESTI2011683, TESTI2011712, TESTI2011750, TESTI2011840, TESTI2011846, TESTI2011915, TESTI2011928, TESTI2011971, TESTI2012019, TESTI2012050, TESTI2012090, TESTI2012095, TESTI2012104, TESTI2012152, TESTI2012171, TESTI2012207, TESTI2012231, TESTI2012244, TESTI2012289, TESTI2012308, TESTI2012356, TESTI2012387, TESTI2012394, TESTI2012444, TESTI2012511, TESTI2012528, TESTI2012544, TESTI2012550, TESTI2012592, TESTI2012617, TESTI2012628, TESTI2012778, TESTI2012812, TESTI2012834, TESTI2012835, TESTI2012861, TESTI2012900, TESTI2012915, TESTI2012922, TESTI2013001, TESTI2013012, TESTI2013053, TESTI2013144, TESTI2013163, TESTI2013169, TESTI2013212, TESTI2013257, TESTI2013264, TESTI2013268, TESTI2013322, TESTI2013381, TESTI2013382, TESTI2013401, TESTI2013427, TESTI2013468, TESTI2013497, TESTI2013545, TESTI2013546, TESTI2013566, TESTI2013601, TESTI2013604, TESTI2013607, TESTI2013610, TESTI2013691, TESTI2013699, TESTI2013737, TESTI2013767, TESTI2013832, TESTI2013873, TESTI2013889, TESTI2014007, TESTI2014036, TESTI2014097, TESTI2014160, TESTI2014248, TESTI2014254, TESTI2014269, TESTI2014274, TESTI2014318, TESTI2014324, TESTI2014339, TESTI2014362, TESTI2014385, TESTI2014415, TESTI2014439, TESTI2014474, TESTI2014505, TESTI2014577, TESTI2014578, TESTI2014716, TESTI2014800, TESTI2014843, TESTI2014979, TESTI2014988, TESTI2015105, TESTI2015180, TESTI2015246, TESTI2015249, TESTI2015327, TESTI2015331, TESTI2015335, TESTI2015350, TESTI2015375, TESTI2015437, TESTI2015590, TESTI2015610, TESTI2015647, TESTI2015675, TESTI2015710, TESTI2015752, TESTI2015830, TESTI2015914, TESTI2015938, TESTI2015947, TESTI2015987, TESTI2016033, TESTI2016046, TESTI2016101, TESTI2016162, TESTI2016197, TESTI2016298, TESTI2016331, TESTI2016337, TESTI2016410, TESTI2016421, TESTI2016509, TESTI2016568, TESTI2016599, TESTI2016629, TESTI2016663, TESTI2016667, TESTI2016688, TESTI2016701, TESTI2016758, TESTI2016848, TESTI2016863, TESTI2016888, TESTI2016922, TESTI2016942, TESTI2016950, TESTI2016996, TESTI2017017, TESTI2017028, TESTI2017069, TESTI2017089, TESTI2017102, TESTI2017107, TESTI2017113, TESTI2017125, TESTI2017256, TESTI2017305, TESTI2017311, TESTI2017396, TESTI2017507, TESTI2017537, TESTI2017582, TESTI2017584, TESTI2017727, TESTI2017740, TESTI2017775, TESTI2017816, TESTI2017832, TESTI2017923, TESTI2017932, TESTI2017951, TESTI2018031, TESTI2018035, TESTI2018060, TESTI2018083, TESTI2018178, TESTI2018221, TESTI2018276, TESTI2018290, TESTI2018335, TESTI2018337, TESTI2018368, TESTI2018428, TESTI2018475, TESTI2018482, TESTI2018521, TESTI2018565, TESTI2018581, TESTI2018687, TESTI2018697, TESTI2018838, TESTI2018867, TESTI2018941, TESTI2018957, TESTI2018974, TESTI2018975, TESTI2019042, TESTI2019077, TESTI2019228, TESTI2019257, TESTI2019280, TESTI2019282, TESTI2019308, TESTI2019336, TESTI2019352, TESTI2019406, TESTI2019430, TESTI2019455, TESTI2019481, TESTI2019488, TESTI2019501, TESTI2019648, TESTI2019669, TESTI2019697, TESTI2019729, TESTI2019760, TESTI2019787, TESTI2019794, TESTI2019854, TESTI2019859, TESTI2019860, TESTI2019872, TESTI2019911, TESTI2019917, TESTI2019975, TESTI2019998, TESTI2020026, TESTI2020029, TESTI2020071, TESTI2020084, TESTI2020265, TESTI2020283, TESTI2020316, TESTI2020344, TESTI2020379, TESTI2020426, TESTI2020445, TESTI2020510, TESTI2020515, TESTI2020525, TESTI2020579, TESTI2020717, TESTI2020840, TESTI2020871, TESTI2020905, TESTI2020906, TESTI2020946, TESTI2020981, TESTI2020999, TESTI2021003, TESTI2021057, TESTI2021077, TESTI2021112, TESTI2021114, TESTI2021116, TESTI2021118, TESTI2021122, TESTI2021138, TESTI2021315, TESTI2021447, TESTI2021463, TESTI2021599, TESTI2021637, TESTI2021667, TESTI2021736, TESTI2021785, TESTI2021819, TESTI2021851, TESTI2021895, TESTI2021911, TESTI2021939, TESTI2021999, TESTI2022010, TESTI2022023, TESTI2022065, TESTI2022086, TESTI2022203, TESTI2022246, TESTI2022323, TESTI2022338, TESTI2022400, TESTI2022462, TESTI2022495, TESTI2022623, TESTI2022649, TESTI2022652, TESTI2022738, TESTI2022798, TESTI2022812, TESTI2022814, TESTI2022874, TESTI2022940, TESTI2022952, TESTI2023025, TESTI2023053, TESTI2023085, TESTI2023192, TESTI2023194, TESTI2023214, TESTI2023254, TESTI2023386, TESTI2023414, TESTI2023427, TESTI2023436, TESTI2023599, TESTI2023752, TESTI2023800, TESTI2023861, TESTI2023903, TESTI2023942, TESTI2023947, TESTI2023951, TESTI2023968, TESTI2024009, TESTI2024090, TESTI2024125, TESTI2024153, TESTI2024192, TESTI2024267, TESTI2024283, TESTI2024299, TESTI2024419, TESTI2024422, TESTI2024443, TESTI2024446, TESTI2024473, TESTI2024476, TESTI2024498, TESTI2024560, TESTI2024567, TESTI2024586, TESTI2024641, TESTI2024648, TESTI2024718, TESTI2024744, TESTI2024844, TESTI2024864, TESTI2024885, TESTI2024936, TESTI2024978, TESTI2024999, TESTI2025006, TESTI2025022, TESTI2025063, TESTI2025117, TESTI2025144, TESTI2025161, TESTI2025174, TESTI2025229, TESTI2025269, TESTI2025365, TESTI2025403, TESTI2025409, TESTI2025422, TESTI2025448, TESTI2025486, TESTI2025546, TESTI2025582, TESTI2025609, TESTI2025656, TESTI2025791, TESTI2025872, TESTI2025879, TESTI2025911, TESTI2025920, TESTI2025924, TESTI2026014, TESTI2026024, TESTI2026064, TESTI2026077, TESTI2026104, TESTI2026134, TESTI2026168, TESTI2026196, TESTI2026218, TESTI2026233, TESTI2026291, TESTI2026294, TESTI2026401, TESTI2026403, TESTI2026453, TESTI2026461, TESTI2026491, TESTI2026505, TESTI2026515, TESTI2026537, TESTI2026589, TESTI2026597, TESTI2026605, TESTI2026647, TESTI2026674, TESTI2026794, TESTI2026824, TESTI2026854, TESTI2026925, TESTI2026936, TESTI2026957, TESTI2027013, TESTI2027019, TESTI2027108, TESTI2027165, TESTI2027171, TESTI2027173, TESTI2027179, TESTI2027185, TESTI2027206, TESTI2027238, TESTI2027239, TESTI2027243, TESTI2027271, TESTI2027296, TESTI2027378, TESTI2027411, TESTI2027450, TESTI2027503, TESTI2027562, TESTI2027615, TESTI2027645, TESTI2027730, TESTI2027736, TESTI2027791, TESTI2027820, TESTI2027828, TESTI2027840, TESTI2027909, TESTI2028098, TESTI2028151, TESTI2028242, TESTI2028253, TESTI2028254, TESTI2028269, TESTI2028290, TESTI2028384, TESTI2028426, TESTI2028488, TESTI2028523, TESTI2028583, TESTI2028613, TESTI2028659, TESTI2028662, TESTI2028670, TESTI2028705, TESTI2028776, TESTI2028811, TESTI2028891, TESTI2028985, TESTI2028997, TESTI2029131, TESTI2029162, TESTI2029196, TESTI2029201, TESTI2029244, TESTI2029249, TESTI2029252, TESTI2029264, TESTI2029470, TESTI2029672, TESTI2029785, TESTI2029880, TESTI2030136, TESTI2030322, TESTI2030336, TESTI2030342, TESTI2030519, TESTI2030554, TESTI2030556, TESTI2030728, TESTI2030754, TESTI2030770, TESTI2030860, TESTI2030901, TESTI2030917, TESTI2030930, TESTI2031006, TESTI2031007, TESTI2031060, TESTI2031129, TESTI2031356, TESTI2031418, TESTI2031504, TESTI2031529, TESTI2031687, TESTI2031760, TESTI2031809, TESTI2031919, TESTI2031935, TESTI2031986, TESTI2032044, TESTI2032067, TESTI2032079, TESTI2032643, TESTI2032681, TESTI2032761, TESTI2032768, TESTI2032774, TESTI2032828, TESTI2033242, TESTI2033254, TESTI2033300, TESTI2033395, TESTI2033453, TESTI2033505, TESTI2033520, TESTI2033641, TESTI2033710, TESTI2033905, TESTI2034187, TESTI2034243, TESTI2034249, TESTI2034307, TESTI2034357, TESTI2034401, TESTI2034407, TESTI2034506, TESTI2034520, TESTI2034718, TESTI2034730, TESTI2034749, TESTI2034767, TESTI2034774, TESTI2034777, TESTI2034785, TESTI2034799, TESTI2034847, TESTI2034913, TESTI2034931, TESTI2034953, TESTI2034997, TESTI2035003, TESTI2035078, TESTI2035084, TESTI2035107, TESTI2035121, TESTI2035124, TESTI2035183, TESTI2035262, TESTI2035688, TESTI2035775, TESTI2035793, TESTI2035898, TESTI2035962, TESTI2035981, TESTI2035997, TESTI2036114, TESTI2036129, TESTI2036285, TESTI2036288, TESTI2036513, TESTI2036589, TESTI2036650, TESTI2036684, TESTI2036736, TESTI2036822, TESTI2036833, TESTI2036913, TESTI2036922, TESTI2036951, TESTI2036965, TESTI2037002, TESTI2037055, TESTI2037081, TESTI2037085, TESTI2037103, TESTI2037106, TESTI2037111, TESTI2037209, TESTI2037255, TESTI2037359, TESTI2037375, TESTI2037382, TESTI2037534, TESTI2037569, TESTI2037572, TESTI2037643, TESTI2037657, TESTI2037673, TESTI2037723, TESTI2037819, TESTI2037830, TESTI2037845, TESTI2037877, TESTI2037976, TESTI2038048, TESTI2038065, TESTI2038104, TESTI2038275, TESTI2038388, TESTI2038573, TESTI2038596, TESTI2038623, TESTI2038644, TESTI2038733, TESTI2038858, TESTI2038958, TESTI2039025, TESTI2039026, TESTI2039038, TESTI2039041, TESTI2039060, TESTI2039113, TESTI2039121, TESTI2039209, TESTI2039225, TESTI2039227, TESTI2039276, TESTI2039353, TESTI2039544, TESTI2039613, TESTI2039707, TESTI2039732, TESTI2039738, TESTI2039776, TESTI2039867, TESTI2039908, TESTI2040018, TESTI2040094, TESTI2040102, TESTI2040128, TESTI2040143, TESTI2040297, TESTI2040372, TESTI2040377, TESTI2040424, TESTI2040642, TESTI2040815, TESTI2040897, TESTI2040944, TESTI2040964, TESTI2040983, TESTI2040989, TESTI2041330, TESTI2041362, TESTI2041517, TESTI2041564, TESTI2041664, TESTI2041730, TESTI2041734, TESTI2041778, TESTI2041800, TESTI2041947, TESTI2041956, TESTI2041976, TESTI2042062, TESTI2042149, TESTI2042264, TESTI2042295, TESTI2042302, TESTI2042326, TESTI2042400, TESTI2042450, TESTI2042473, TESTI2042507, TESTI2042508, TESTI2042750, TESTI2042783, TESTI2042806, TESTI2042928, TESTI2042946, TESTI2042958, TESTI2043275, TESTI2043277, TESTI2043282, TESTI2043313, TESTI2043477, TESTI2043585, TESTI2043758, TESTI2043817, TESTI2043857, TESTI2043866, TESTI2043869, TESTI2044064, TESTI2044118, TESTI2044194, TESTI2044306, TESTI2044309, TESTI2044413, TESTI2044418, TESTI2044754, TESTI2044788, TESTI2044796, TESTI2044833, TESTI2044892, TESTI2044920, TESTI2044968, TESTI2045139, TESTI2045155, TESTI2045171, TESTI2045199, TESTI2045353, TESTI2045509, TESTI2045611, TESTI2045819, TESTI2045850, TESTI2045920, TESTI2045964, TESTI2045983, TESTI2046100, TESTI2046188, TESTI2046347, TESTI2046352, TESTI2046358, TESTI2046439, TESTI2046535, TESTI2046536, TESTI2046552, TESTI2046569, TESTI2046686, TESTI2046721, TESTI2046732, TESTI2046786, TESTI2046797, TESTI2046863, TESTI2046872, TESTI2047071, TESTI2047141, TESTI2047147, TESTI2047153, TESTI2047212, TESTI2047342, TESTI2047383, TESTI2047605, TESTI2047792, TESTI2047801, TESTI2047818, TESTI2047824, TESTI2047885, TESTI2047930, TESTI2048105, TESTI2048109, TESTI2048465, TESTI2048603, TESTI2048898, TESTI2049041, TESTI2049062, TESTI2049206, TESTI2049277, TESTI2049422, TESTI2049452, TESTI2049469, TESTI2049553, TESTI2049576, TESTI2049857, TESTI2049956, TESTI2050137, TESTI2050681, TESTI2050780, TESTI2050987, TESTI2051148, TESTI2051177, TESTI2051279, TESTI2051488, TESTI2051543, TESTI2051627, TESTI2051742, TESTI2051767, TESTI2051791, TESTI2051806, TESTI2051867, TESTI2051873, TESTI2052110, TESTI2052202, TESTI2052211, TESTI2052256, TESTI2052288, TESTI2052525, TESTI2052670, TESTI2052693, TESTI2052698, TESTI2052799, TESTI2052822, TESTI2052985, TESTI2053151, TESTI2053242, TESTI2053399, TESTI2053526, TESTI2053561, TESTI2053621, TESTI2053667, TESTI3000002, TESTI3000005, TESTI4000068, TESTI4000079, TESTI4000093, TESTI4000134, TESTI4000137, TESTI4000153, TESTI4000155, TESTI4000157, TESTI4000183, TESTI4000215, TESTI4000228, TESTI4000250, TESTI4000288, TESTI4000319, TESTI4000349, TESTI4000370, TESTI4000394, TESTI4000434, TESTI4000462, TESTI4000530, TESTI4000534, TESTI4000598, TESTI4000600, TESTI4000621, TESTI4000703, TESTI4000724, TESTI4000957, TESTI4000970, TESTI4001036, TESTI4001037, TESTI4001060, TESTI4001106, TESTI4001148, TESTI4001176, TESTI4001195, TESTI4001201, TESTI4001206, TESTI4001348, TESTI4001441, TESTI4001473, TESTI4001517, TESTI4001527, TESTI4001561, TESTI4001665, TESTI4001679, TESTI4001795, TESTI4001923, TESTI4001925, TESTI4002003, TESTI4002141, TESTI4002319, TESTI4002491, TESTI4002520, TESTI4002552, TESTI4002647, TESTI4002703, TESTI4002754, TESTI4002868, TESTI4002878, TESTI4002889, TESTI4002988, TESTI4003179, TESTI4003279, TESTI4003319, TESTI4003404, TESTI4003565, TESTI4003574, TESTI4003579, TESTI4003733, TESTI4003796, TESTI4004003, TESTI4004031, TESTI4004200, TESTI4004539, TESTI4004653, TESTI4004722, TESTI4004887, TESTI4004917, TESTI4005015, TESTI4005039, TESTI4005158, TESTI4005317, TESTI4005322, TESTI4005470, TESTI4005500, TESTI4005534, TESTI4005543, TESTI4005628, TESTI4005801, TESTI4005805, TESTI4005857, TESTI4005961, TESTI4006053, TESTI4006079, TESTI4006112, TESTI4006148, TESTI4006219, TESTI4006234, TESTI4006308, TESTI4006326, TESTI4006393, TESTI4006412, TESTI4006420, TESTI4006473, TESTI4006539, TESTI4006546, TESTI4006567, TESTI4006704, TESTI4006728, TESTI4006802, TESTI4006819, TESTI4007064, TESTI4007163, TESTI4007176, TESTI4007203, TESTI4007239, TESTI4007369, TESTI4007373, TESTI4007382, TESTI4007404, TESTI4007489, TESTI4007565, TESTI4007671, TESTI4007775, TESTI4007778, TESTI4007799, TESTI4007810, TESTI4007816, TESTI4008007, TESTI4008018, TESTI4008050, TESTI4008086, TESTI4008176, TESTI4008209, TESTI4008219, TESTI4008250, TESTI4008302, TESTI4008305, TESTI4008401, TESTI4008417, TESTI4008429, TESTI4008573, TESTI4008816, TESTI4008840, TESTI4008935, TESTI4008993, TESTI4009022, TESTI4009028, TESTI4009034, TESTI4009123, TESTI4009160, TESTI4009215, TESTI4009283, TESTI4009306, TESTI4009374, TESTI4009406, TESTI4009457, TESTI4009501, TESTI4009563, TESTI4009608, TESTI4009638, TESTI4009752, TESTI4009881, TESTI4009886, TESTI4009928, TESTI4010076, TESTI4010082, TESTI4010095, TESTI4010211, TESTI4010475, TESTI4010544, TESTI4010713, TESTI4010721, TESTI4010789, TESTI4010817, TESTI4010831, TESTI4010902, TESTI4011070, TESTI4011072, TESTI4011118, TESTI4011246, TESTI4011484, TESTI4011505, TESTI4011532, TESTI4011616, TESTI4011744, TESTI4011745, TESTI4011829, TESTI4011926, TESTI4011956, TESTI4012010, TESTI4012086, TESTI4012258, TESTI4012293, TESTI4012329, TESTI4012382, TESTI4012406, TESTI4012448, TESTI4012505, TESTI4012556, TESTI4012623, TESTI4012679, TESTI4012911, TESTI4012956, TESTI4012960, TESTI4013365, TESTI4013369, TESTI4013410, TESTI4013602, TESTI4013667, TESTI4013675, TESTI4013685, TESTI4013735, TESTI4013742, TESTI4013774, TESTI4013830, TESTI4013852, TESTI4013924, TESTI4013960, TESTI4013962, TESTI4014175, TESTI4014265, TESTI4014276, TESTI4014306, TESTI4014392, TESTI4014415, TESTI4014445, TESTI4014553, TESTI4014661, TESTI4014801, TESTI4014891, TESTI4014924, TESTI4014932, TESTI4014977, TESTI4015012, TESTI4015129, TESTI4015145, TESTI4015204, TESTI4015263, TESTI4015293, TESTI4015299, TESTI4015339, TESTI4015398, TESTI4015442, TESTI4015471, TESTI4015477, TESTI4015600, TESTI4015646, TESTI4015681, TESTI4015688, TESTI4015790, TESTI4016110, TESTI4016238, TESTI4016551, TESTI4016812, TESTI4016822, TESTI4016865, TESTI4016882, TESTI4016925, TESTI4017001, TESTI4017116, TESTI4017137, TESTI4017229, TESTI4017254, TESTI4017269, TESTI4017380, TESTI4017382, TESTI4017543, TESTI4017575, TESTI4017647, TESTI4017714, TESTI4017763, TESTI4017848, TESTI4017854, TESTI4017901, TESTI4017961, TESTI4017984, TESTI4018101, TESTI4018152, TESTI4018208, TESTI4018382, TESTI4018436, TESTI4018506, TESTI4018555, TESTI4018751, TESTI4018806, TESTI4018835, TESTI4018859, TESTI4018881, TESTI4018886, TESTI4019140, TESTI4019149, TESTI4019299, TESTI4019417, TESTI4019440, TESTI4019566, TESTI4019657, TESTI4019756, TESTI4019843, TESTI4020092, TESTI4020102, TESTI4020342, TESTI4020460, TESTI4020596, TESTI4020806, TESTI4020819, TESTI4020920, TESTI4021129, TESTI4021197, TESTI4021294, TESTI4021377, TESTI4021456, TESTI4021491, TESTI4021569, TESTI4021713, TESTI4021821, TESTI4022577, TESTI4022716, TESTI4022873, TESTI4023096, TESTI4023172, TESTI4023546, TESTI4023555, TESTI4023654, TESTI4023722, TESTI4023762, TESTI4023942, TESTI4024096, TESTI4024240, TESTI4024245, TESTI4024294, TESTI4024344, TESTI4024387, TESTI4024494, TESTI4024740, TESTI4024874, TESTI4024890, TESTI4024907, TESTI4024930, TESTI4025062, TESTI4025401, TESTI4025494, TESTI4025731, TESTI4025797, TESTI4025865, TESTI4025908, TESTI4025920, TESTI4026079, TESTI4026080, TESTI4026192, TESTI4026295, TESTI4026390, TESTI4026456, TESTI4026510, TESTI4026524, TESTI4026680, TESTI4026700, TESTI4026762, TESTI4026785, TESTI4027139, TESTI4027170, TESTI4027262, TESTI4027516, TESTI4027557, TESTI4027660, TESTI4027969, TESTI4028042, TESTI4028059, TESTI4028062, TESTI4028182, TESTI4028429, TESTI4028612, TESTI4028692, TESTI4028809, TESTI4028823, TESTI4028880, TESTI4028904, TESTI4028938, TESTI4028958, TESTI4028983, TESTI4029023, TESTI4029348, TESTI4029370, TESTI4029528, TESTI4029651, TESTI4029671, TESTI4029676, TESTI4029690, TESTI4029731, TESTI4029743, TESTI4030069, TESTI4030159, TESTI4030319, TESTI4030505, TESTI4030603, TESTI4030669, TESTI4030673, TESTI4030864, TESTI4031066, TESTI4031173, TESTI4031335, TESTI4031745, TESTI4031818, TESTI4032112, TESTI4032128, TESTI4032270, TESTI4032375, TESTI4032834, TESTI4032856, TESTI4032895, TESTI4033146, TESTI4033177, TESTI4033433, TESTI4033690, TESTI4034172, TESTI4034212, TESTI4034432, TESTI4034495, TESTI4034632, TESTI4034633, TESTI4034912, TESTI4034973, TESTI4035063, TESTI4035065, TESTI4035498, TESTI4035508, TESTI4035581, TESTI4035602, TESTI4035637, TESTI4035649, TESTI4035770, TESTI4035872, TESTI4035895, TESTI4035898, TESTI4035989, TESTI4036012, TESTI4036042, TESTI4036048, TESTI4036315, TESTI4036319, TESTI4036449, TESTI4036767, TESTI4036909, TESTI4037066, TESTI4037188, TESTI4037228, TESTI4037244, TESTI4037727, TESTI4037949, TESTI4038047, TESTI4038099, TESTI4038156, TESTI4038223, TESTI4038258, TESTI4038339, TESTI4038492, TESTI4038721, TESTI4038758, TESTI4038779, TESTI4038818, TESTI4039038, TESTI4039086, TESTI4039451, TESTI4039575, TESTI4039659, TESTI4039744, TESTI4039904, TESTI4040197, TESTI4040363, TESTI4040535, TESTI4040559, TESTI4040598, TESTI4040800, TESTI4040804, TESTI4040939, TESTI4040956, TESTI4041049, TESTI4041053, TESTI4041086, TESTI4041099, TESTI4041143, TESTI4041482, TESTI4041519, TESTI4041624, TESTI4041629, TESTI4041832, TESTI4041844, TESTI4041903, TESTI4041954, TESTI4041984, TESTI4041985, TESTI4041986, TESTI4042098, TESTI4042420, TESTI4042440, TESTI4042444, TESTI4042711, TESTI4042846, TESTI4043067, TESTI4043129, TESTI4043166, TESTI4043203, TESTI4043223, TESTI4043371, TESTI4043378, TESTI4043512, TESTI4043551, TESTI4043710, TESTI4043947, TESTI4044035, TESTI4044076, TESTI4044084, TESTI4044123, TESTI4044186, TESTI4044234, TESTI4044291, TESTI4044296, TESTI4044300, TESTI4044682, TESTI4044770, TESTI4045168, TESTI4045312, TESTI4045330, TESTI4045470, TESTI4045701, TESTI4045908, TESTI4045955, TESTI4045982, TESTI4046090, TESTI4046240, TESTI4046245, TESTI4046253, TESTI4046282, TESTI4046328, TESTI4046450, TESTI4046457, TESTI4046487, TESTI4046523, TESTI4046819, TESTI4046873, TESTI4046884, TESTI4046896, TESTI4046903, TESTI4046962, TESTI4047069, TESTI4047119, TESTI4047305, TESTI4047328, TESTI4047437, TESTI4047569, TESTI4047746, TESTI4047808, THYMU1000010, THYMU1000017, THYMU1000025, THYMU1000032, THYMU1000033, THYMU1000060, THYMU1000074, THYMU1000098, THYMU1000136, THYMU1000142, THYMU1000158, THYMU1000176, THYMU1000179, THYMU1000191, THYMU1000198, THYMU1000217, THYMU1000240, THYMU1000242, THYMU1000291, THYMU1000316, THYMU1000318, THYMU1000331, THYMU1000336, THYMU1000366, THYMU1000382, THYMU1000393, THYMU1000394, THYMU1000399, THYMU1000426, THYMU1000428, THYMU1000440, THYMU1000459, THYMU1000473, THYMU1000491, THYMU1000496, THYMU1000499, THYMU1000527, THYMU1000532, THYMU1000536, THYMU1000554, THYMU1000558, THYMU1000576, THYMU1000600, THYMU1000677, THYMU1000692, THYMU2000022, THYMU2000032, THYMU2000120, THYMU2000140, THYMU2000162, THYMU2000171, THYMU2000176, THYMU2000179, THYMU2000231, THYMU2000276, THYMU2000280, THYMU2000300, THYMU2000317, THYMU2000368, THYMU2000369, THYMU2000418, THYMU2000440, THYMU2000489, THYMU2000492, THYMU2000519, THYMU2000570, THYMU2000602, THYMU2000660, THYMU2000671, THYMU2000672, THYMU2000702, THYMU2000767, THYMU2000800, THYMU2000879, THYMU2000932, THYMU2000950, THYMU2000982, THYMU2000990, THYMU2001053, THYMU2001071, THYMU2001139, THYMU2001195, THYMU2001202, THYMU2001203, THYMU2001256, THYMU2001270, THYMU2001291, THYMU2001314, THYMU2001325, THYMU2001357, THYMU2001381, THYMU2001443, THYMU2001521, THYMU2001556, THYMU2001622, THYMU2001727, THYMU2001819, THYMU2001825, THYMU2001839, THYMU2001898, THYMU2001900, THYMU2001916, THYMU2001926, THYMU2001989, THYMU2002023, THYMU2002037, THYMU2002109, THYMU2002147, THYMU2002154, THYMU2002157, THYMU2002162, THYMU2002177, THYMU2002203, THYMU2002229, THYMU2002242, THYMU2002338, THYMU2002356, THYMU2002376, THYMU2002384, THYMU2002450, THYMU2002490, THYMU2002548, THYMU2002695, THYMU2002745, THYMU2002756, THYMU2002789, THYMU2002792, THYMU2002841, THYMU2002852, THYMU2002910, THYMU2002950, THYMU2002983, THYMU2003069, THYMU2003107, THYMU2003124, THYMU2003166, THYMU2003232, THYMU2003242, THYMU2003249, THYMU2003270, THYMU2003282, THYMU2003287, THYMU2003336, THYMU2003366, THYMU2003397, THYMU2003440, THYMU2003470, THYMU2003479, THYMU2003499, THYMU2003632, THYMU2003650, THYMU2003700, THYMU2003760, THYMU2003803, THYMU2003855, THYMU2004003, THYMU2004008, THYMU2004042, THYMU2004108, THYMU2004111, THYMU2004123, THYMU2004139, THYMU2004169, THYMU2004284, THYMU2004320, THYMU2004336, THYMU2004356, THYMU2004508, THYMU2004512, THYMU2004639, THYMU2004668, THYMU2004677, THYMU2004688, THYMU2004693, THYMU2004835, THYMU2004843, THYMU2004916, THYMU2004986, THYMU2005001, THYMU2005003, THYMU2005046, THYMU2005134, THYMU2005156, THYMU2005190, THYMU2005225, THYMU2005240, THYMU2005246, THYMU2005270, THYMU2005283, THYMU2005303, THYMU2005321, THYMU2005356, THYMU2005369, THYMU2005439, THYMU2005480, THYMU2005482, THYMU2005507, THYMU2005545, THYMU2005574, THYMU2005576, THYMU2005748, THYMU2005759, THYMU2005807, THYMU2005815, THYMU2005855, THYMU2005881, THYMU2005948, THYMU2005980, THYMU2006001, THYMU20060.48, THYMU2006098, THYMU2006160, THYMU2006170, THYMU2006252, THYMU2006261, THYMU2006277, THYMU2006303, THYMU2006324, THYMU2006350, THYMU2006357, THYMU2006365, THYMU2006420, THYMU2006468, THYMU2006666, THYMU2006712, THYMU2006913, THYMU2006946, THYMU2006965, THYMU2007025, THYMU2007060, THYMU2007065, THYMU2007095, THYMU2007146, THYMU2007179, THYMU2007258, THYMU2007307, THYMU2007308, THYMU2007339, THYMU2007350, THYMU2007384, THYMU2007415, THYMU2007493, THYMU2007521, THYMU2007528, THYMU2007530, THYMU2007532, THYMU2007561, THYMU2007571, THYMU2007635, THYMU2007658, THYMU2007667, THYMU2007694, THYMU2007725, THYMU2007802, THYMU2007824, THYMU2007854, THYMU2007952, THYMU2007969, THYMU2008036, THYMU2008072, THYMU2008111, THYMU2008145, THYMU2008185, THYMU2008191, THYMU2008207, THYMU2008226, THYMU2008282, THYMU2008339, THYMU2008350, THYMU2008351, THYMU2008383, THYMU2008452, THYMU2008643, THYMU2008691, THYMU2008714, THYMU2008725, THYMU2008727, THYMU2008781, THYMU2008799, THYMU2008876, THYMU2008910, THYMU2008917, THYMU2008928, THYMU2008990, THYMU2008994, THYMU2009023, THYMU2009046, THYMU2009101, THYMU2009104, THYMU2009134, THYMU2009157, THYMU2009181, THYMU2009186, THYMU2009425, THYMU2009516, THYMU2009526, THYMU2009546, THYMU2009592, THYMU2009596, THYMU2009792, THYMU2009835, THYMU2009906, THYMU2009948, THYMU2010030, THYMU2010046, THYMU2010059, THYMU2010082, THYMU2010094, THYMU2010161, THYMU2010448, THYMU2010519, THYMU2010637, THYMU2010671, THYMU2010699, THYMU2010705, THYMU2010779, THYMU2010816, THYMU2010848, THYMU2011053, THYMU2011063, THYMU2011072, THYMU2011096, THYMU2011118, THYMU2011142, THYMU2011183, THYMU2011257, THYMU2011259, THYMU2011295, THYMU2011308, THYMU2011390, THYMU2011431, THYMU2011447, THYMU2011538, THYMU2011548, THYMU2011551, THYMU2011564, THYMU2011573, THYMU2011585, THYMU2011621, THYMU2011666, THYMU2011736, THYMU2011785, THYMU2011806, THYMU2011852, THYMU2011875, THYMU2011881, THYMU2011937, THYMU2011939, THYMU2012002, THYMU2012073, THYMU2012113, THYMU2012273, THYMU2012401, THYMU2012492, THYMU2012507, THYMU2012565, THYMU2012574, THYMU2012631, THYMU2012665, THYMU2012690, THYMU2012701, THYMU2012807, THYMU2012882, THYMU2012891, THYMU2012902, THYMU2012919, THYMU2013023, THYMU2013047, THYMU2013089, THYMU2013170, THYMU2013364, THYMU2013386, THYMU2013426, THYMU2013578, THYMU2013648, THYMU2013705, THYMU2013757, THYMU2013779, THYMU2013863, THYMU2013950, THYMU2013981, THYMU2014067, THYMU2014068, THYMU2014204, THYMU2014297, THYMU2014323, THYMU2014327, THYMU2014353, THYMU2014492, THYMU2014500, THYMU2014599, THYMU2014762, THYMU2014777, THYMU2014801, THYMU2014901, THYMU2014923, THYMU2015019, THYMU2015161, THYMU2015316, THYMU2015321, THYMU2015439, THYMU2015441, THYMU2015479, THYMU2015775, THYMU2015825, THYMU2015943, THYMU2015984, THYMU2016113, THYMU2016164, THYMU2016204, THYMU2016219, THYMU2016360, THYMU2016496, THYMU2016523, THYMU2016840, THYMU2017008, THYMU2017010, THYMU2017023, THYMU2017085, THYMU2017099, THYMU2017158, THYMU2017162, THYMU2017215, THYMU2017362, THYMU2017366, THYMU2017398, THYMU2017449, THYMU2017479, THYMU2017522, THYMU2017526, THYMU2017601, THYMU2017675, THYMU2017707, THYMU2017831, THYMU2017844, THYMU2017878, THYMU2017948, THYMU2018028, THYMU2018071, THYMU2018126, THYMU2018189, THYMU2018197, THYMU2018384, THYMU2018455, THYMU2018547, THYMU2018565, THYMU2018639, THYMU2018673, THYMU2018721, THYMU2018772, THYMU2018819, THYMU2018841, THYMU2018997, THYMU2019054, THYMU2019197, THYMU2019210, THYMU2019364, THYMU2019436, THYMU2019442, THYMU2019587, THYMU2019599, THYMU2019686, THYMU2019813, THYMU2020198, THYMU2020289, THYMU2020416, THYMU2020491, THYMU2020499, THYMU2020560, THYMU2020667, THYMU2020830, THYMU2021361, THYMU2021509, THYMU2021597, THYMU2021684, THYMU2021714, THYMU2022213, THYMU2022289, THYMU2022660, THYMU2022854, THYMU2022922, THYMU2023209, THYMU2023264, THYMU2023711, THYMU2023900, THYMU2024071, THYMU2024121, THYMU2024185, THYMU2024207, THYMU2024616, THYMU2024684, THYMU2024748, THYMU2025042, THYMU2025189, THYMU2025406, THYMU2025557, THYMU2025572, THYMU2025849, THYMU2025909, THYMU2025939, THYMU2026182, THYMU2026350, THYMU2026530, THYMU2026531, THYMU2026904, THYMU2027053, THYMU2027168, THYMU2027249, THYMU2027282, THYMU2027497, THYMU2027695, THYMU2027734, THYMU2027894, THYMU2027975, THYMU2027996, THYMU2028041, THYMU2028368, THYMU2028379, THYMU2028394, THYMU2028412, THYMU2028632, THYMU2028724, THYMU2028739, THYMU2028942, THYMU2028978, THYMU2029134, THYMU2029578, THYMU2029676, THYMU2029688, THYMU2029788, THYMU2030068, THYMU2030226, THYMU2030264, THYMU2030462, THYMU2030543, THYMU2030637, THYMU2030655, THYMU2030796, THYMU2030912, THYMU2030982, THYMU2031046, THYMU2031139, THYMU2031218, THYMU2031249, THYMU2031258, THYMU2031368, THYMU2031579, THYMU2031847, THYMU2031994, THYMU2032014, THYMU2032035, THYMU2032080, THYMU2032150, THYMU2032155, THYMU2032358, THYMU2032437, THYMU2032601, THYMU2032655, THYMU2032715, THYMU2032732, THYMU2032976, THYMU2033053, THYMU2033059, THYMU2033070, THYMU2033079, THYMU2033085, THYMU2033104, THYMU2033227, THYMU2033401, THYMU2033583, THYMU2033755, THYMU2033816, THYMU2034182, THYMU2034279, THYMU2034314, THYMU2034338, THYMU2034374, THYMU2034647, THYMU2034917, THYMU2035064, THYMU2035078, THYMU2035101, THYMU2035319, THYMU2035321, THYMU2035388, THYMU2035400, THYMU2035554, THYMU2035710, THYMU2036058, THYMU2036105, THYMU2036207, THYMU2036252, THYMU2036265, THYMU2036366, THYMU2036459, THYMU2036604, THYMU2036653, THYMU2037081, THYMU2037208, THYMU2037233, THYMU2037234, THYMU2037348, THYMU2037406, THYMU2037965, THYMU2038058, THYMU2038189, THYMU2038199, THYMU2038301, THYMU2038369, THYMU2038389, THYMU2038615, THYMU2038636, THYMU2038739, THYMU2038772, THYMU2038797, THYMU2038906, THYMU2039305, THYMU2039334, THYMU2039350, THYMU2039411, THYMU2039719, THYMU2039780, THYMU2039788, THYMU2039989, THYMU2040029, THYMU2040110, THYMU2040140, THYMU2040412, THYMU2040427, THYMU2040824, THYMU2040925, THYMU2041007, THYMU2041015, THYMU2041252, THYMU3000028, THYMU3000036, THYMU3000037, THYMU3000082, THYMU3000194, THYMU3000224, THYMU3000269, THYMU3000306, THYMU3000390, THYMU3000490, THYMU3000504, THYMU3000542, THYMU3000655, THYMU3000826, THYMU3000841, THYMU3001077, THYMU3001082, THYMU3001083, THYMU3001133, THYMU3001151, THYMU3001472, THYMU3001593, THYMU3001883, THYMU3001939, THYMU3001991, THYMU3002452, THYMU3002578, THYMU3002661, THYMU3003092, THYMU3003212, THYMU3003309, THYMU3003403, THYMU3003565, THYMU3003763, THYMU3003865, THYMU3003958, THYMU3004157, THYMU3004628, THYMU3004632, THYMU3004866, THYMU3005050, THYMU3005378, THYMU3005407, THYMU3005415, THYMU3005482, THYMU3005696, THYMU3006118, THYMU3006132, THYMU3006168, THYMU3006172, THYMU3006371, THYMU3006485, THYMU3006640, THYMU3006767, THYMU3006811, THYMU3006963, THYMU3007368, THYMU3007559, THYMU3007845, THYMU3008060, THYMU3008136, THYMU3008216, THYMU3008436, THYMU3008672, THYMU3008883, THYMU3008935, THYMU3009255, THYMU3009391, THYMU3009643, THYMU3009755, THYMU3010247, THYMU3011012, THYMU3011081, THYMU3011244, THYMU3011360, THYMU3011534, THYMU3011543, THYMU3011556, THYMU3011717, THYMU3012402, THYMU3012907, THYMU3012983, THYMU3013114, THYMU3013197, THYMU3013241, THYMU3013470, THYMU3013785, THYMU3013897, THYMU3014038, THYMU3014173, THYMU3014372, THYMU3014555, THYMU3014620, THYMU3014701, THYMU3015042, THYMU3015457, THYMU3015571, THYMU3015592, THYMU3015625, THYMU3015647, THYMU3015962, THYMU3016022, THYMU3016518, THYMU3016797, THYMU3016822, THYMU3016850, THYMU3017562, THYMU3017688, THYMU3017689, THYMU3017761, THYMU3018151, THYMU3018896, THYMU3019095, THYMU3019476, THYMU3019605, THYMU3019916, THYMU3020221, THYMU3020595, THYMU3020713, THYMU3020856, THYMU3020869, THYMU3020970, THYMU3021404, THYMU3021755, THYMU3021900, THYMU3022211, THYMU3022434, THYMU3022528, THYMU3022668, THYMU3022982, THYMU3023107, THYMU3023211, THYMU3023216, THYMU3023394, THYMU3023400, THYMU3023797, THYMU3024164, THYMU3024339, THYMU3024602, THYMU3024879, THYMU3025118, THYMU3025313, THYMU3025642, THYMU3025683, THYMU3025772, THYMU3025865, THYMU3026479, THYMU3026532, THYMU3026783, THYMU3026869, THYMU3027251, THYMU3027540, THYMU3027655, THYMU3027671, THYMU3028075, THYMU3028410, THYMU3028461, THYMU3028702, THYMU3029188, THYMU3029318, THYMU3029421, THYMU3029719, THYMU3029774, THYMU3029832, THYMU3030072, THYMU3030231, THYMU3030706, THYMU3030710, THYMU3030752, THYMU3031146, THYMU3031402, THYMU3031610, THYMU3031612, THYMU3031868, THYMU3031878, THYMU3032032, THYMU3033402, THYMU3033626, THYMU3033630, THYMU3033649, THYMU3033754, THYMU3033759, THYMU3034078, THYMU3034099, THYMU3034453, THYMU3034616, THYMU3034853, THYMU3034867, THYMU3034983, THYMU3036200, THYMU3036310, THYMU3036934, THYMU3036953, THYMU3037052, THYMU3037192, THYMU3037617, THYMU3037772, THYMU3037836, THYMU3037856, THYMU3037867, THYMU3037909, THYMU3037980, THYMU3038158, THYMU3038167, THYMU3038266, THYMU3038328, THYMU3038347, THYMU3038375, THYMU3038603, THYMU3038687, THYMU3038759, THYMU3038879, THYMU3038970, THYMU3039807, THYMU3039846, THYMU3040068, THYMU3040126, THYMU3040146, THYMU3040168, THYMU3040172, THYMU3040725, THYMU3040746, THYMU3040816, THYMU3040829, THYMU3040830, THYMU3040986, THYMU3041354, THYMU3041386, THYMU3041573, THYMU3041603, THYMU3041736, THYMU3041918, THYMU3042075, THYMU3042321, THYMU3042372, THYMU3042758, THYMU3042929, THYMU3043200, THYMU3043327, THYMU3043482, THYMU3043597, THYMU3043688, THYMU3043779, THYMU3043883, THYMU3043993, THYMU3044175, THYMU3044188, THYMU3044441, THYMU3044445, THYMU3045510, THYMU3045673, THYMU3045692, THYMU3045704, THYMU3046140, THYMU3046360, THYMU3046856, THYMU3047115, THYMU3047144, THYMU3047156, THYMU3047366, THYMU3047513, THYMU3047542, THYMU3047760, THYMU3047891, TKIDN1000062, TKIDN1000066, TKIDN1000171, TKIDN2000127, TKIDN2000240, TKIDN2000464, TKIDN2000701, TKIDN2001529, TKIDN2002329, TKIDN2002424, TKIDN2002632, TKIDN2003044, TKIDN2003062, TKIDN2003366, TKIDN2003396, TKIDN2003413, TKIDN2003601, TKIDN2004185, TKIDN2004386, TKIDN2004458, TKIDN2004748, TKIDN2005487, TKIDN2005721, TKIDN2005934, TKIDN2005947, TKIDN2005956, TKIDN2006525, TKIDN2006761, TKIDN2006852, TKIDN2007667, TKIDN2008176, TKIDN2008778, TKIDN2009092, TKIDN2009481, TKIDN2010200, TKIDN2010232, TKIDN2010278, TKIDN2010602, TKIDN2010934, TKIDN2011051, TKIDN2011160, TKIDN2011289, TKIDN2011324, TKIDN2012034, TKIDN2012771, TKIDN2012824, TKIDN2013134, TKIDN2013287, TKIDN2014757, TKIDN2014771, TKIDN2015025, TKIDN2015161, TKIDN2015263, TKIDN2015285, TKIDN2016309, TKIDN2016399, TKIDN2016846, TKIDN2018926, TKIDN2019116, TLIVE2000023, TLIVE2000142, TLIVE2000292, TLIVE2000762, TLIVE2000979, TLIVE2001616, TLIVE2001684, TLIVE2001828, TLIVE2001927, TLIVE2002336, TLIVE2002338, TLIVE2002562, TLIVE2002690, TLIVE2002882, TLIVE2003197, TLIVE2003225, TLIVE2003381, TLIVE2003737, TLIVE2003961, TLIVE2003970, TLIVE2004110, TLIVE2004320, TLIVE2004331, TLIVE2004601, TLIVE2005180, TLIVE2005390, TLIVE2005516, TLIVE2005731, TLIVE2005866, TLIVE2006236, TLIVE2006359, TLIVE2006529, TLIVE2006621, TLIVE2006733, TLIVE2007000, TLIVE2007016, TLIVE2007132, TLIVE2007192, TLIVE2007528, TLIVE2007607, TLIVE2007736, TLIVE2007816, TLIVE2007919, TLIVE2008083, TLIVE2008213, TLIVE2008221, TLIVE2008229, TLIVE2008712, TLIVE2008797, TLIVE2009087, TLIVE2009163, TLIVE2009489, TLIVE2009541, TLUNG2000179, TOVAR2000476, TOVAR2000575, TOVAR2000649, TOVAR2001281, TOVAR2001556, TOVAR2001730, TOVAR2002247, TOVAR2002514, TOVAR2002549, TOVAR2002800, TRACH1000038, TRACH1000057, TRACH1000063, TRACH1000074, TRACH1000100, TRACH1000106, TRACH1000125, TRACH1000140, TRACH1000144, TRACH1000212, TRACH1000240, TRACH2000002, TRACH2000015, TRACH2000024, TRACH2000032, TRACH2000081, TRACH2000083, TRACH2000148, TRACH2000185, TRACH2000196, TRACH2000235, TRACH2000243, TRACH2000250, TRACH2000259, TRACH2000272, TRACH2000282, TRACH2000287, TRACH2000289, TRACH2000306, TRACH2000312, TRACH2000336, TRACH2000411, TRACH2000496, TRACH2000497, TRACH2000522, TRACH2000559, TRACH2000660, TRACH2000665, TRACH2000675, TRACH2000677, TRACH2000702, TRACH2000703, TRACH2000767, TRACH2000775, TRACH2000807, TRACH2000862, TRACH2000873, TRACH2000894, TRACH2000898, TRACH2000923, TRACH2000944, TRACH2000981, TRACH2000986, TRACH2001037, TRACH2001060, TRACH2001101, TRACH2001121, TRACH2001147, TRACH2001154, TRACH2001188, TRACH2001192, TRACH2001249, TRACH2001275, TRACH2001335, TRACH2001347, TRACH2001395, TRACH2001400, TRACH2001403, TRACH2001416, TRACH2001443, TRACH2001474, TRACH2001523, TRACH2001525, TRACH2001532, TRACH2001592, TRACH2001596, TRACH2001621, TRACH2001651, TRACH2001684, TRACH2001933, TRACH2001968, TRACH2002043, TRACH2002054, TRACH2002092, TRACH2002138, TRACH2002784, TRACH2002840, TRACH2002847, TRACH2002853, TRACH2002862, TRACH2002954, TRACH2002960, TRACH2002988, TRACH2003070, TRACH2003484, TRACH2003516, TRACH2003605, TRACH2003736, TRACH2003759, TRACH2003941, TRACH2004039, TRACH2004054, TRACH2004087, TRACH2004109, TRACH2004170, TRACH2004183, TRACH2004251, TRACH2004292, TRACH2004336, TRACH2004399, TRACH2004428, TRACH2004458, TRACH2004499, TRACH2004521, TRACH2004570, TRACH2004845, TRACH2004887, TRACH2004950, TRACH2005004, TRACH2005017, TRACH2005066, TRACH2005159, TRACH2005314, TRACH2005444, TRACH2005666, TRACH2005698, TRACH2005710, TRACH2005720, TRACH2005769, TRACH2005800, TRACH2006015, TRACH2006097, TRACH2006194, TRACH2006327, TRACH2006331, TRACH2006387, TRACH2006528, TRACH2006670, TRACH2006762, TRACH2006866, TRACH2006870, TRACH2006918, TRACH2007059, TRACH2007324, TRACH2007358, TRACH2007483, TRACH2007542, TRACH2007577, TRACH2007674, TRACH2007676, TRACH2007688, TRACH2007733, TRACH2007754, TRACH2007816, TRACH2007894, TRACH2007988, TRACH2008081, TRACH2008112, TRACH2008127, TRACH2008130, TRACH2008278, TRACH2008540, TRACH2008583, TRACH2008597, TRACH2008820, TRACH2008921, TRACH2009060, TRACH2009107, TRACH2009123, TRACH2009268, TRACH2009291, TRACH2009310, TRACH2009340, TRACH2009348, TRACH2009358, TRACH2009661, TRACH2009730, TRACH2009743, TRACH2009754, TRACH2009851, TRACH2009862, TRACH2009934, TRACH2010159, TRACH2010218, TRACH2010251, TRACH2010272, TRACH2010317, TRACH2010419, TRACH2010451, TRACH2010505, TRACH2010587, TRACH2010600, TRACH2010634, TRACH2010639, TRACH2010677, TRACH2010698, TRACH2010771, TRACH2010824, TRACH2010883, TRACH2010965, TRACH2010974, TRACH2011057, TRACH2011093, TRACH2011290, TRACH2011293, TRACH2011302, TRACH2011574, TRACH2011956, TRACH2012000, TRACH2012138, TRACH2012242, TRACH2012370, TRACH2012387, TRACH2012536, TRACH2012562, TRACH2012742, TRACH2012823, TRACH2012918, TRACH2013081, TRACH2013123, TRACH2013265, TRACH2013369, TRACH2013450, TRACH2013495, TRACH2013671, TRACH2013726, TRACH2013902, TRACH2013928, TRACH2013982, TRACH2013991, TRACH2014018, TRACH2014045, TRACH2014046, TRACH2014082, TRACH2014268, TRACH2014284, TRACH2014337, TRACH2014356, TRACH2014371, TRACH2014442, TRACH2014483, TRACH2014495, TRACH2014544, TRACH2014573, TRACH2014725, TRACH2014760, TRACH2014815, TRACH2014839, TRACH2014938, TRACH2014950, TRACH2014972, TRACH2014974, TRACH2015180, TRACH2015243, TRACH2015316, TRACH2015381, TRACH2015486, TRACH2015654, TRACH2015824, TRACH2015987, TRACH2016080, TRACH2016286, TRACH2016317, TRACH2016347, TRACH2016380, TRACH2016384, TRACH2016410, TRACH2016481, TRACH2016498, TRACH2016533, TRACH2016551, TRACH2016554, TRACH2016651, TRACH2016690, TRACH2016709, TRACH2016722, TRACH2016835, TRACH2016980, TRACH2017086, TRACH2017368, TRACH2017498, TRACH2017609, TRACH2017949, TRACH2017965, TRACH2017980, TRACH2018084, TRACH2018262, TRACH2018273, TRACH2018278, TRACH2018345, TRACH2018380, TRACH2018449, TRACH2018512, TRACH2018646, TRACH2018663, TRACH2018718, TRACH2018835, TRACH2018882, TRACH2018914, TRACH2019024, TRACH2019046, TRACH2019080, TRACH2019151, TRACH2019154, TRACH2019176, TRACH2019248, TRACH2019309, TRACH2019425, TRACH2019473, TRACH2019602, TRACH2019661, TRACH2019672, TRACH2019673, TRACH2019844, TRACH2019879, TRACH2020048, TRACH2020336, TRACH2020525, TRACH2021398, TRACH2021622, TRACH2021635, TRACH2021964, TRACH2022042, TRACH2022113, TRACH2022253, TRACH2022425, TRACH2022553, TRACH2022649, TRACH2022839, TRACH2023246, TRACH2023306, TRACH2023416, TRACH2023479, TRACH2023684, TRACH2023860, TRACH2023876, TRACH2024139, TRACH2024187, TRACH2024271, TRACH2024293, TRACH2024408, TRACH2024512, TRACH2024559, TRACH2024647, TRACH2024651, TRACH2024730, TRACH2024735, TRACH2024749, TRACH2024821, TRACH2025057, TRACH2025084, TRACH2025155, TRACH2025224, TRACH2025344, TRACH2025379, TRACH2025507, TRACH2025569, TRACH2025705, TRACH2025749, TRACH2025753, TRACH2025810, TRACH2025853, TRACH2025911, TRACH2025932, TRACH3000017, TRACH3000043, TRACH3000180, TRACH3000342, TRACH3000420, TRACH3000515, TRACH3000530, TRACH3000548, TRACH3000558, TRACH3000586, TRACH3000692, TRACH3000892, TRACH3000926, TRACH3001119, TRACH3001443, TRACH3001759, TRACH3002064, TRACH3002107, TRACH3002168, TRACH3002188, TRACH3002245, TRACH3002293, TRACH3002533, TRACH3002561, TRACH3002567, TRACH3002650, TRACH3002866, TRACH3002871, TRACH3002876, TRACH3002890, TRACH3003009, TRACH3003357, TRACH3003379, TRACH3003586, TRACH3003683, TRACH3003780, TRACH3003805, TRACH3003832, TRACH3004113, TRACH3004288, TRACH3004303, TRACH3004412, TRACH3004456, TRACH3004537, TRACH3004596, TRACH3004651, TRACH3004652, TRACH3004671, TRACH3004747, TRACH3004760, TRACH3004783, TRACH3004786, TRACH3004840, TRACH3004931, TRACH3004934, TRACH3005072, TRACH3005085, TRACH3005102, TRACH3005173, TRACH3005191, TRACH3005211, TRACH3005274, TRACH3005479, TRACH3005549, TRACH3005699, TRACH3005702, TRACH3005808, TRACH3005852, TRACH3005896, TRACH3006038, TRACH3006149, TRACH3006228, TRACH3006264, TRACH3006336, TRACH3006379, TRACH3006392, TRACH3006395, TRACH3006397, TRACH3006412, TRACH3006470, TRACH3006589, TRACH3006626, TRACH3006699, TRACH3006800, TRACH3006889, TRACH3006985, TRACH3007097, TRACH3007268, TRACH3007274, TRACH3007277, TRACH3007391, TRACH3007541, TRACH3007595, TRACH3007627, TRACH3007766, TRACH3007866, TRACH3007995, TRACH3008042, TRACH3008061, TRACH3008535, TRACH3008629, TRACH3008688, TRACH3008697, TRACH3008713, TRACH3008887, TRACH3008902, TRACH3008990, TRACH3009059, TRACH3009061, TRACH3009701, TRACH3009715, TRACH3009894, TRACH3009956, TRACH3010167, TRACH3010331, TRACH3010342, TRACH3010382, TRACH3010757, TRACH3010901, TRACH3011004, TRACH3011082, TRACH3011184, TRACH3011282, TRACH3011313, TRACH3011454, TRACH3011485, TRACH3011503, TRACH3011538, TRACH3011542, TRACH3012106, TRACH3012161, TRACH3012232, TRACH3012261, TRACH3012445, TRACH3012460, TRACH3012659, TRACH3012718, TRACH3012864, TRACH3012891, TRACH3012942, TRACH3013043, TRACH3013072, TRACH3013426, TRACH3013454, TRACH3013558, TRACH3013684, TRACH3013693, TRACH3013700, TRACH3013766, TRACH3013900, TRACH3013926, TRACH3014063, TRACH3014183, TRACH3014215, TRACH3014316, TRACH3014415, TRACH3014580, TRACH3014641, TRACH3014885, TRACH3015136, TRACH3015336, TRACH3015346, TRACH3015354, TRACH3015467, TRACH3015626, TRACH3015951, TRACH3016051, TRACH3016120, TRACH3016264, TRACH3016277, TRACH3016368, TRACH3016455, TRACH3016614, TRACH3016992, TRACH3017171, TRACH3017409, TRACH3017934, TRACH3018108, TRACH3018191, TRACH3018240, TRACH3018261, TRACH3018519, TRACH3018524, TRACH3018606, TRACH3018783, TRACH3018907, TRACH3018933, TRACH3018943, TRACH3019018, TRACH3019058, TRACH3019142, TRACH3019290, TRACH3019347, TRACH3019370, TRACH3019447, TRACH3019598, TRACH3019621, TRACH3019662, TRACH3019807, TRACH3019924, TRACH3019977, TRACH3020137, TRACH3020410, TRACH3020563, TRACH3020605, TRACH3020750, TRACH3020769, TRACH3020928, TRACH3020930, TRACH3021023, TRACH3021066, TRACH3021212, TRACH3021335, TRACH3021373, TRACH3021544, TRACH3021778, TRACH3021834, TRACH3021883, TRACH3022170, TRACH3022296, TRACH3022482, TRACH3022732, TRACH3022758, TRACH3022875, TRACH3022910, TRACH3022960, TRACH3023063, TRACH3023203, TRACH3023242, TRACH3023373, TRACH3023516, TRACH3023752, TRACH3023945, TRACH3023960, TRACH3024020, TRACH3024081, TRACH3024423, TRACH3024428, TRACH3024512, TRACH3024823, TRACH3025302, TRACH3025346, TRACH3025520, TRACH3026148, TRACH3026283, TRACH3026299, TRACH3026542, TRACH3026650, TRACH3026744, TRACH3026949, TRACH3027229, TRACH3027527, TRACH3027681, TRACH3027701, TRACH3027885, TRACH3028031, TRACH3028164, TRACH3028180, TRACH3028195, TRACH3028441, TRACH3028597, TRACH3028678, TRACH3028837, TRACH3028847, TRACH3029139, TRACH3029329, TRACH3029451, TRACH3029462, TRACH3029520, TRACH3029592, TRACH3029629, TRACH3029665, TRACH3029670, TRACH3029800, TRACH3030111, TRACH3030130, TRACH3030176, TRACH3030252, TRACH3030725, TRACH3030855, TRACH3030883, TRACH3031316, TRACH3031400, TRACH3031463, TRACH3031479, TRACH3031518, TRACH3031660, TRACH3031678, TRACH3031936, TRACH3032044, TRACH3032065, TRACH3032150, TRACH3032372, TRACH3032480, TRACH3032755, TRACH3032827, TRACH3032873, TRACH3033535, TRACH3033680, TRACH3033868, TRACH3034145, TRACH3034414, TRACH3034488, TRACH3034680, TRACH3034731, TRACH3034745, TRACH3034762, TRACH3034903, TRACH3035187, TRACH3035199, TRACH3035235, TRACH3035451, TRACH3035482, TRACH3035526, TRACH3036004, TRACH3036103, TRACH3036193, TRACH3036207, TRACH3036278, TRACH3036309, TRACH3036456, TRACH3036609, TRACH3036638, TRACH3036683, TRACH3036750, TRACH3036792, TRACH3036843, TRACH3036897, TRACH3036997, TRACH3037063, TRACH3037267, TRACH3037288, TRACH3037505, TRACH3037573, TRACH3037696, TRACH3037897, TRACH3038086, TSTOM1000186, TSTOM2000139, TSTOM2000315, TSTOM2000442, TSTOM2000553, TSTOM2000569, TSTOM2000588, TSTOM2001195, TSTOM2001274, TSTOM2001571, TSTOM2001996, TSTOM2002265, TSTOM2002505, TSTOM2002561, TSTOM2002611, TSTOM2002672, TSTOM2002682, TUTER1000014, TUTER2000057, TUTER2000283, TUTER2000425, TUTER2000916, TUTER2001286, TUTER2001341, TUTER2001387, TUTER2001433, TUTER2001461, TUTER2002028, TUTER2002074, TUTER2002158, TUTER2002228, TUTER2002323, TUTER2002356, TUTER2002729, UMVEN1000156, UMVEN2000046, UMVEN2000069, UTERU1000008, UTERU1000015, UTERU1000024, UTERU1000031, UTERU1000032, UTERU1000057, UTERU1000065, UTERU1000077, UTERU1000093, UTERU1000109, UTERU1000131, UTERU1000138, UTERU1000148, UTERU1000160, UTERU1000182, UTERU1000183, UTERU1000187, UTERU1000192, UTERU1000249, UTERU1000337, UTERU1000339, UTERU2000047, UTERU2000074, UTERU2000099, UTERU2000154, UTERU2000197, UTERU2000218, UTERU2000238, UTERU2000243, UTERU2000263, UTERU2000300, UTERU2000338, UTERU2000349, UTERU2000377, UTERU2000393, UTERU2000465, UTERU2000485, UTERU2000517, UTERU2000524, UTERU2000537, UTERU2000539, UTERU2000542, UTERU2000546, UTERU2000550, UTERU2000569, UTERU2000607, UTERU2000629, UTERU2000649, UTERU2000663, UTERU2000696, UTERU2000794, UTERU2000830, UTERU2000844, UTERU2000922, UTERU2001024, UTERU2001176, UTERU2001281, UTERU2001389, UTERU2001409, UTERU2001412, UTERU2001504, UTERU2001747, UTERU2001876, UTERU2002001, UTERU2002011, UTERU2002176, UTERU2002198, UTERU2002332, UTERU2002473, UTERU2002547, UTERU2002693, UTERU2002733, UTERU2002736, UTERU2002737, UTERU2002826, UTERU2002841, UTERU2002993, UTERU2003035, UTERU2003126, UTERU2003135, UTERU2003321, UTERU2003399, UTERU2003411, UTERU2003456, UTERU2003577, UTERU2003704, UTERU2003926, UTERU2003973, UTERU2004015, UTERU2004039, UTERU2004061, UTERU2004073, UTERU2004163, UTERU2004197, UTERU2004299, UTERU2004461, UTERU2004520, UTERU2004564, UTERU2004688, UTERU2004698, UTERU2004861, UTERU2005004, UTERU2005050, UTERU2005069, UTERU2005179, UTERU2005292, UTERU2005346, UTERU2005446, UTERU2005449, UTERU2005450, UTERU2005533, UTERU2005822, UTERU2005903, UTERU2005905, UTERU2006103, UTERU2006137, UTERU2006182, UTERU2006400, UTERU2006412, UTERU2006429, UTERU2006568, UTERU2006651, UTERU2006705, UTERU2006899, UTERU2007075, UTERU2007081, UTERU2007128, UTERU2007267, UTERU2007444, UTERU2007499, UTERU2007639, UTERU2007724, UTERU2007942, UTERU2008019, UTERU2008027, UTERU2008077, UTERU2008347, UTERU2008516, UTERU2008561, UTERU2008653, UTERU2008705, UTERU2008707, UTERU2008785, UTERU2008845, UTERU2008901, UTERU2008930, UTERU2008962, UTERU2009094, UTERU2009120, UTERU2009131, UTERU2009147, UTERU2009206, UTERU2009283, UTERU2009414, UTERU2009483, UTERU2009510, UTERU2009538, UTERU2009540, UTERU2009776, UTERU2009904, UTERU2009951, UTERU2010115, UTERU2010124, UTERU2010164, UTERU2010226, UTERU2010231, UTERU2010304, UTERU2010431, UTERU2010525, UTERU2010651, UTERU2010724, UTERU2010747, UTERU2011195, UTERU2011199, UTERU2011220, UTERU2011261, UTERU2011410, UTERU2011574, UTERU2011657, UTERU2011741, UTERU2011811, UTERU2011897, UTERU2011962, UTERU2011968, UTERU2012101, UTERU2012114, UTERU2012252, UTERU2012333, UTERU2012407, UTERU2012526, UTERU2012581, UTERU2012610, UTERU2012615, UTERU2012688, UTERU2012703, UTERU2012741, UTERU2012767, UTERU2012786, UTERU2012856, UTERU2012890, UTERU2012938, UTERU2012976, UTERU2013048, UTERU2013231, UTERU2013262, UTERU2013280, UTERU2013322, UTERU2013483, UTERU2013491, UTERU2013502, UTERU2013926, UTERU2013976, UTERU2014001, UTERU2014223, UTERU2014398, UTERU2014548, UTERU2014631, UTERU2014668, UTERU2014678, UTERU2014728, UTERU2014998, UTERU2015062, UTERU2015087, UTERU2015190, UTERU2015198, UTERU2015202, UTERU2015405, UTERU2015640, UTERU2015830, UTERU2015880, UTERU2016147, UTERU2016157, UTERU2016464, UTERU2016669, UTERU2016761, UTERU2016896, UTERU2016902, UTERU2016979, UTERU2016981, UTERU2017123, UTERU2017303, UTERU2017421, UTERU2017492, UTERU2017613, UTERU2017623, UTERU2017632, UTERU2017761, UTERU2017762, UTERU2017810, UTERU2017988, UTERU2018127, UTERU2018180, UTERU2018333, UTERU2018514, UTERU2018522, UTERU2018523, UTERU2018544, UTERU2018566, UTERU2018609, UTERU2018674, UTERU2018712, UTERU2018784, UTERU2018789, UTERU2018811, UTERU2018867, UTERU2018881, UTERU2018884, UTERU2018955, UTERU2019038, UTERU2019163, UTERU2019257, UTERU2019453, UTERU2019491, UTERU2019534, UTERU2019681, UTERU2019710, UTERU2019959, UTERU2019964, UTERU2020226, UTERU2020242, UTERU2020292, UTERU2020351, UTERU2020491, UTERU2020718, UTERU2021380, UTERU2021649, UTERU2022020, UTERU2022773, UTERU2022955, UTERU2022981, UTERU2023045, UTERU2023262, UTERU2023550, UTERU2023651, UTERU2023687, UTERU2023712, UTERU2023941, UTERU2024002, UTERU2024042, UTERU2024141, UTERU2024481, UTERU2024656, UTERU2024758, UTERU2024820, UTERU2024881, UTERU2024969, UTERU2025025, UTERU2025041, UTERU2025301, UTERU2025366, UTERU2025415, UTERU2025579, UTERU2025645, UTERU2025891, UTERU2026025, UTERU2026090, UTERU2026142, UTERU2026775, UTERU2027023, UTERU2027369, UTERU2027591, UTERU2027616, UTERU2027941, UTERU2028377, UTERU2029503, UTERU2029660, UTERU2029742, UTERU2029953, UTERU2030270, UTERU2031060, UTERU2031084, UTERU2031268, UTERU2031295, UTERU2031521, UTERU2031611, UTERU2031703, UTERU2031834, UTERU2031851, UTERU2032075, UTERU2032220, UTERU2032279, UTERU2032726, UTERU2033172, UTERU2033375, UTERU2033382, UTERU2033420, UTERU2033530, UTERU2033577, UTERU2034053, UTERU2034147, UTERU2034695, UTERU2035114, UTERU2035187, UTERU2035231, UTERU2035306, UTERU2035323, UTERU2035328, UTERU2035331, UTERU2035452, UTERU2035469, UTERU2035503, UTERU2035745, UTERU2035908, UTERU2035926, UTERU2035978, UTERU2036089, UTERU2036347, UTERU2036507, UTERU2036512, UTERU2036530, UTERU2036623, UTERU2036690, UTERU2037224, UTERU2037361, UTERU2037423, UTERU2037577, UTERU2037674, UTERU2037791, UTERU2037843, UTERU2038171, UTERU2038251, UTERU3000226, UTERU3000402, UTERU3000645, UTERU3000665, UTERU3000670, UTERU3000727, UTERU3000738, UTERU3000828, UTERU3000844, UTERU3000959, UTERU3001029, UTERU3001053, UTERU3001059, UTERU3001240, UTERU3001394, UTERU3001542, UTERU3001558, UTERU3001585, UTERU3001632, UTERU3001652, UTERU3001766, UTERU3001988, UTERU3002209, UTERU3002218, UTERU3002383, UTERU3002600, UTERU3002620, UTERU3002667, UTERU3002701, UTERU3002731, UTERU3002768, UTERU3002786, UTERU3002993, UTERU3003116, UTERU3003178, UTERU3003465, UTERU3003495, UTERU3003523, UTERU3003774, UTERU3003776, UTERU3004477, UTERU3004523, UTERU3004616, UTERU3004635, UTERU3004938, UTERU3004992, UTERU3005049, UTERU3005205, UTERU3005264, UTERU3005460, UTERU3005536, UTERU3005585, UTERU3005970, UTERU3006008, UTERU3006228, UTERU3006308, UTERU3006538, UTERU3006640, UTERU3006687, UTERU3006720, UTERU3006798, UTERU3006884, UTERU3007021, UTERU3007104, UTERU3007108, UTERU3007134, UTERU3007419, UTERU3007731, UTERU3007913, UTERU3008463, UTERU3008660, UTERU3008671, UTERU3008722, UTERU3008917, UTERU3009490, UTERU3009517, UTERU3009690, UTERU3009775, UTERU3009979, UTERU3009987, UTERU3010029, UTERU3010526, UTERU3010604, UTERU3010892, UTERU3010919, UTERU3011063, UTERU3011092, UTERU3011273, UTERU3011398, UTERU3011558, UTERU3011579, UTERU3011795, UTERU3011837, UTERU3012293, UTERU3012476, UTERU3012599, UTERU3012999, UTERU3013302, UTERU3013781, UTERU3014274, UTERU3014446, UTERU3014611, UTERU3014647, UTERU3014791, UTERU3014906, UTERU3015011, UTERU3015086, UTERU3015299, UTERU3015412, UTERU3015500, UTERU3015647, UTERU3015844, UTERU3016070, UTERU3016274, UTERU3016308, UTERU3016789, UTERU3017176, UTERU3017441, UTERU3017626, UTERU3018154, UTERU3018255, UTERU3018616, UTERU3018711, UTERU3019078

[0753] Of the 17,176 genes that include the cDNAs of the present invention, genes whose expression levels were high enough to detect in each of the CD34C, CERVX, CHONS, COLON, CORDB, and CTONG libraries were analyzed for expression frequency. The analysis results are described below. Each is a relative value, where the expression level over all tissues is taken as 100. The larger this value, the greater the level of expression.

TABLE 29

| Clone Name | CD34C | CERVX | CHONS | COLON | CORDB | CTONG |
|---|---|---|---|---|---|---|
| 3NB691000116 | 0 | 0 | 0 | 0 | 0 | 6.058 |
| 3NB691000173 | 0 | 0 | 17.493 | 0 | 0 | 1.471 |
| 3NB691000191 | 0 | 0 | 0 | 42.978 | 0 | 0 |
| 3NB692000281 | 0 | 0 | 0 | 1.545 | 0 | 0 |
| 3NB692000912 | 0 | 0 | 0 | 3.299 | 0 | 0 |
| 3NB692001334 | 0 | 0 | 0 | 0 | 0 | 0.500 |
| 3NB692001339 | 0 | 0 | 0 | 16.465 | 0 | 0 |
| 3NB692001433 | 0 | 71.092 | 0 | 0 | 0 | 0 |
| ADRGL2000006 | 0 | 0 | 0 | 7.298 | 0 | 1.936 |
| ADRGL2001830 | 0 | 0 | 0 | 0 | 0 | 22.262 |
| ADRGL2002477 | 0 | 0 | 0 | 0 | 0 | 3.169 |
| ASTRO2000014 | 0 | 0 | 0 | 0 | 0 | 1.530 |
| ASTRO2000046 | 0 | 0 | 0 | 0 | 0 | 5.320 |
| ASTRO2001029 | 0 | 0 | 0 | 0 | 0 | 2.336 |
| ASTRO2001076 | 0 | 0 | 0 | 9.979 | 0 | 2.647 |
| ASTRO2001823 | 0 | 0 | 32.157 | 0 | 0 | 0 |
| ASTRO2003024 | 0 | 19.587 | 0 | 6.654 | 0 | 1.765 |
| ASTRO2003461 | 0 | 0 | 0 | 0 | 0 | 11.095 |
| ASTRO2003632 | 0 | 0 | 0 | 2.917 | 0 | 0.774 |
| ASTRO2004032 | 0 | 0 | 0 | 0 | 0 | 11.351 |
| ASTRO2005242 | 0 | 0 | 0 | 0 | 0 | 51.585 |
| ASTRO2005863 | 0 | 0 | 0 | 0 | 0 | 14.161 |
| ASTRO2006732 | 0 | 0 | 0 | 0 | 0 | 28.567 |
| ASTRO2007221 | 0 | 0 | 0 | 0 | 0 | 34.963 |
| ASTRO2007948 | 0 | 0 | 0 | 0 | 0 | 4.665 |
| ASTRO2008040 | 0 | 0 | 0 | 0 | 0 | 22.313 |
| ASTRO2008216 | 0 | 0 | 0 | 0 | 0 | 5.943 |
| ASTRO2010819 | 0 | 0 | 0 | 0 | 0 | 5.013 |
| ASTRO2015529 | 0 | 0 | 0 | 0 | 0 | 3.451 |
| ASTRO2015987 | 0 | 0 | 58.183 | 0 | 0 | 0 |
| ASTRO2016491 | 0 | 0 | 0 | 0 | 0 | 6.566 |
| BLADE2007666 | 0 | 70.405 | 0 | 0 | 0 | 0 |
| BNGH41000190 | 0 | 0 | 0 | 0 | 0 | 18.852 |
| BNGH41000198 | 0 | 0 | 0 | 0 | 0 | 3.870 |
| BNGH42000360 | 0 | 0 | 0 | 8.834 | 0 | 0 |
| BNGH42000532 | 0 | 0 | 0 | 0 | 0 | 17.614 |
| BNGH42002168 | 0 | 0 | 0 | 0 | 0 | 4.956 |
| BNGH42006135 | 0 | 0 | 0 | 0 | 0 | 1.230 |
| BNGH42007460 | 0 | 0 | 0 | 0 | 0 | 5.630 |
| BNGH42007709 | 0 | 4.757 | 0 | 0 | 0 | 0.429 |
| BNGH42007788 | 0 | 0 | 0 | 0 | 0 | 5.734 |
| BNGH42008743 | 0 | 0 | 0 | 0 | 0 | 2.867 |
| BRACE1000131 | 0 | 0 | 0 | 0 | 0 | 5.820 |
| BRACE2000307 | 0 | 0 | 0 | 0 | 0 | 2.194 |
| BRACE2000864 | 0 | 0 | 0 | 0 | 44.299 | 0.983 |
| BRACE2001117 | 0 | 0 | 0 | 19.309 | 0 | 0 |
| BRACE2001477 | 0 | 0 | 0 | 0 | 0 | 6.406 |
| BRACE2001534 | 0 | 63.743 | 0 | 21.655 | 0 | 0 |
| BRACE2001709 | 0 | 0 | 0 | 0 | 0 | 6.045 |
| BRACE2002091 | 0 | 0 | 0 | 0 | 0 | 3.933 |
| BRACE2002441 | 0 | 0 | 0 | 0 | 0 | 2.098 |
| BRACE2002649 | 0 | 0 | 0 | 0 | 0 | 19.720 |
| BRACE2002677 | 0 | 0 | 0 | 0 | 0 | 3.596 |
| BRACE2003078 | 0 | 0 | 0 | 0 | 0 | 30.148 |
| BRACE2003254 | 0 | 0 | 20.057 | 0 | 0 | 8.431 |
| BRACE2003304 | 0 | 0 | 0 | 0 | 0 | 12.216 |
| BRACE2003594 | 0 | 0 | 0 | 81.976 | 0 | 0 |
| BRACE2003785 | 0 | 40.163 | 0 | 0 | 0 | 0 |
| BRACE2003845 | 0 | 0 | 0 | 0 | 0 | 8.486 |
| BRACE2003846 | 0 | 0 | 0 | 0 | 0 | 1.214 |
| BRACE2003892 | 0 | 0 | 0 | 0 | 0 | 20.325 |
| BRACE2003904 | 0 | 0 | 0 | 0 | 0 | 4.829 |
| BRACE2005087 | 0 | 0 | 0 | 0 | 0 | 11.592 |
| BRACE2005448 | 0 | 0 | 0 | 47.739 | 0 | 0 |
| BRACE2005453 | 0 | 0 | 0 | 90.818 | 0 | 0 |
| BRACE2005642 | 0 | 0 | 0 | 51.298 | 0 | 0 |
| BRACE2006072 | 0 | 0 | 0 | 0 | 0 | 36.712 |
| BRACE2006105 | 0 | 0 | 0 | 0 | 0 | 39.515 |
| BRACE2006162 | 0 | 0 | 0 | 0 | 0 | 2.882 |
| BRACE2006319 | 0 | 0 | 0 | 0 | 0 | 6.530 |
| BRACE2006397 | 12.397 | 0 | 0 | 10.361 | 0 | 0.550 |
| BRACE2006514 | 0 | 0 | 0 | 0 | 0 | 1.618 |
| BRACE2006900 | 0 | 0 | 0 | 7.225 | 0 | 0 |
| BRACE2006937 | 0 | 27.657 | 0 | 0 | 0 | 0 |
| BRACE2007401 | 0 | 0 | 0 | 0 | 0 | 3.404 |
| BRACE2007518 | 0 | 0 | 0 | 15.934 | 0 | 0 |
| BRACE2007577 | 0 | 0 | 0 | 0 | 0 | 1.824 |
| BRACE2007671 | 0 | 0 | 0 | 0 | 0 | 2.880 |
| BRACE2008481 | 0 | 0 | 61.843 | 0 | 0 | 0 |
| BRACE2008653 | 0 | 0 | 0 | 0 | 0 | 6.876 |
| BRACE2009037 | 0 | 0 | 0 | 0 | 24.511 | 1.088 |
| BRACE2009366 | 0 | 74.665 | 0 | 0 | 0 | 0 |
| BRACE2009517 | 0 | 0 | 0 | 0 | 0 | 10.103 |
| BRACE2012528 | 0 | 0 | 0 | 0 | 0 | 0.883 |
| BRACE2016362 | 0 | 0 | 0 | 0 | 0 | 28.712 |
| BRACE2017397 | 0 | 48.741 | 0 | 0 | 0 | 0 |
| BRACE2021014 | 0 | 0 | 0 | 0 | 0 | 11.034 |
| BRACE2022638 | 0 | 0 | 0 | 0 | 0 | 1.388 |
| BRACE2027643 | 0 | 0 | 0 | 0 | 0 | 26.828 |
| BRACE2032477 | 0 | 0 | 0 | 0 | 0 | 10.379 |
| BRACE3001066 | 0 | 0 | 0 | 0 | 0 | 72.408 |
| BRACE3010428 | 0 | 0 | 0 | 0 | 0 | 6.396 |
| BRACE3013936 | 0 | 0 | 0 | 0 | 0 | 56.749 |
| BRALZ2009482 | 0 | 0 | 0 | 0 | 0 | 1.384 |
| BRAMY2000585 | 0 | 0 | 0 | 17.243 | 0 | 0 |
| BRAMY2002369 | 0 | 0 | 0 | 0 | 0 | 15.195 |
| BRAMY2004363 | 0 | 0 | 0 | 0 | 0 | 3.808 |
| BRAMY2004521 | 0 | 0 | 0 | 0 | 0 | 4.415 |
| BRAMY2007078 | 0 | 0 | 0 | 0 | 0 | 7.083 |
| BRAMY2007613 | 0 | 0 | 0 | 0 | 0 | 2.495 |
| BRAMY2009934 | 0 | 0 | 0 | 41.502 | 0 | 0 |
| BRAMY2012091 | 0 | 0 | 0 | 41.689 | 0 | 0 |
| BRAMY2015211 | 0 | 0 | 0 | 0 | 0 | 24.194 |
| BRAMY2019554 | 0 | 0 | 0 | 0 | 0 | 2.973 |
| BRAMY2020058 | 0 | 0 | 0 | 0 | 0 | 52.028 |
| BRAMY2020427 | 0 | 0 | 0 | 0 | 0 | 2.206 |
| BRAMY2022493 | 0 | 0 | 58.772 | 0 | 0 | 4.941 |
| BRAMY2026685 | 0 | 0 | 0 | 0 | 0 | 4.616 |
| BRAMY2026778 | 0 | 0 | 0 | 0 | 0 | 18.048 |
| BRAMY2027140 | 0 | 0 | 0 | 0 | 0 | 48.032 |
| BRAMY2027739 | 0 | 27.810 | 0 | 0 | 0 | 0 |
| BRAMY2028740 | 0 | 0 | 0 | 0 | 0 | 3.468 |
| BRAMY2032087 | 0 | 0 | 0 | 0 | 0 | 2.256 |
| BRAMY2040095 | 0 | 0 | 0 | 4.800 | 0 | 0 |
| BRAMY2040592 | 0 | 0 | 0 | 24.447 | 0 | 0 |
| BRAMY2047420 | 42.545 | 0 | 0 | 0 | 0 | 0 |
| BRAMY3002803 | 0 | 0 | 0 | 0 | 0 | 26.873 |
| BRAMY3004377 | 0 | 0 | 0 | 0 | 0 | 1.545 |
| BRAMY3010008 | 0 | 0 | 0 | 0 | 0 | 1.084 |
| BRAMY3010492 | 0 | 0 | 0 | 0 | 0 | 10.727 |
| BRAMY4001863 | 0 | 0 | 0 | 0 | 0 | 55.803 |
| BRAWH1000093 | 0 | 0 | 0 | 0 | 0 | 3.436 |
| BRAWH2000460 | 0 | 0 | 0 | 4.285 | 0 | 1.137 |
| BRAWH2000633 | 0 | 0 | 0 | 9.307 | 0 | 0 |
| BRAWH2000839 | 0 | 0 | 0 | 0 | 0 | 1.530 |
| BRAWH2001092 | 0 | 0 | 0 | 1.234 | 0 | 0.982 |
| BRAWH2001171 | 0 | 0 | 13.682 | 0 | 0 | 0 |
| BRAWH2001321 | 0 | 0 | 0 | 0 | 0 | 1.599 |
| BRAWH2001671 | 0 | 0 | 0 | 0 | 0 | 7.082 |
| BRAWH2003135 | 0 | 0 | 0 | 0 | 0 | 65.066 |
| BRAWH2003240 | 0 | 0 | 0 | 55.096 | 0 | 0 |
| BRAWH2005068 | 0 | 0 | 0 | 2.824 | 0 | 0 |
| BRAWH2005661 | 0 | 0 | 0 | 0 | 0 | 8.933 |
| BRAWH2008577 | 0 | 73.471 | 0 | 0 | 0 | 0 |
| BRAWH2008956 | 0 | 0 | 0 | 0 | 0 | 29.001 |
| BRAWH2009227 | 0 | 0 | 0 | 0 | 0 | 29.437 |
| BRAWH2009304 | 0 | 0 | 0 | 0 | 0 | 7.305 |
| BRAWH2014188 | 0 | 0 | 0 | 0 | 0 | 5.334 |
| BRAWH2014645 | 0 | 0 | 0 | 0 | 0 | 1.969 |
| BRAWH2017685 | 0 | 0 | 0 | 0 | 0 | 0.945 |
| BRAWH3002574 | 0 | 0 | 0 | 0 | 0 | 12.314 |
| BRAWH3002853 | 0 | 0 | 0 | 0 | 0 | 6.888 |
| BRAWH3021545 | 0 | 0 | 0 | 0 | 0 | 6.795 |
| BRAWH3021574 | 0 | 0 | 0 | 0 | 0 | 17.507 |
| BRCAN2000923 | 0 | 0 | 0 | 0 | 97.340 | 0 |
| BRCAN2003944 | 0 | 0 | 6.239 | 0 | 0 | 0 |
| BRCAN2009432 | 0 | 0 | 0 | 0 | 0 | 4.905 |
| BRCAN2015371 | 0 | 0 | 0 | 0 | 0 | 20.417 |
| BRCAN2015719 | 0 | 0 | 0 | 0 | 0 | 5.624 |
| BRCAN2020710 | 0 | 0 | 0 | 0 | 0 | 20.242 |
| BRCAN2024572 | 0 | 0 | 0 | 0 | 0 | 10.174 |
| BRCAN2026197 | 0 | 0 | 0 | 0 | 0 | 2.908 |
| BRCAN2028036 | 0 | 0 | 0 | 0 | 0 | 4.497 |
| BRCOC1000040 | 0 | 0 | 0 | 0 | 0 | 5.493 |
| BRCOC2000487 | 0 | 0 | 0 | 0 | 0 | 0.540 |
| BRCOC2003125 | 0 | 0 | 0 | 39.895 | 0 | 0 |
| BRCOC2003187 | 0 | 0 | 0 | 11.042 | 0 | 0 |
| BRCOC2010123 | 46.010 | 0 | 0 | 0 | 0 | 0 |
| BRCOC2019903 | 0 | 0 | 0 | 0 | 0 | 29.854 |
| BRHIP2000534 | 0 | 0 | 0 | 0 | 0 | 5.100 |
| BRHIP2000553 | 0 | 0 | 0 | 0 | 0 | 4.786 |
| BRHIP2002339 | 0 | 0 | 0 | 0 | 0 | 14.617 |
| BRHIP2004814 | 0 | 0 | 0 | 0 | 0 | 64.609 |
| BRHIP2007305 | 0 | 0 | 0 | 0 | 0 | 10.542 |
| BRHIP2017945 | 0 | 0 | 71.402 | 0 | 0 | 0 |
| BRHIP2022326 | 0 | 0 | 0 | 0 | 0 | 12.676 |
| BRHIP2023888 | 0 | 0 | 0 | 0 | 0 | 2.741 |
| BRHIP2024742 | 0 | 0 | 0 | 0 | 0 | 4.646 |
| BRHIP2027077 | 0 | 41.741 | 0 | 0 | 0 | 3.762 |
| BRHIP3000017 | 0 | 0 | 0 | 0 | 0 | 8.213 |
| BRHIP3007223 | 0 | 0 | 0 | 0 | 0 | 3.755 |
| BRHIP3012997 | 0 | 0 | 0 | 0 | 0 | 1.726 |
| BRHIP3020046 | 0 | 0 | 0 | 0 | 0 | 3.773 |
| BRSSN2000498 | 0 | 0 | 0 | 0 | 0 | 2.038 |
| BRSSN2009518 | 0 | 0 | 0 | 0 | 0 | 6.416 |
| BRSSN2013696 | 0 | 0 | 0 | 0 | 0 | 6.652 |
| BRSSN2014610 | 0 | 0 | 0 | 0 | 0 | 6.650 |
| BRSTN1000083 | 0 | 0 | 0 | 0 | 0 | 4.757 |
| BRSTN2011961 | 0 | 5.985 | 0 | 0 | 0 | 0.539 |
| BRSTN2012069 | 2.383 | 5.668 | 0.629 | 1.726 | 0.794 | 0.018 |
| BRSTN2012174 | 0 | 4.180 | 0 | 2.840 | 0 | 0 |
| BRSTN2013502 | 0 | 0 | 0 | 0 | 0 | 4.527 |
| BRSTN2016470 | 0 | 0 | 0 | 6.147 | 0 | 0 |
| BRTHA2006975 | 0 | 46.982 | 0 | 0 | 0 | 0 |
| BRTHA2007998 | 0 | 0 | 0 | 0 | 0 | 1.606 |
| BRTHA2016577 | 0 | 48.760 | 0 | 0 | 0 | 0 |
| BRTHA2027229 | 0 | 0 | 0 | 0 | 0 | 3.410 |
| BRTHA2033155 | 0 | 0 | 0 | 0 | 0 | 7.921 |
| BRTHA3011194 | 0 | 0 | 0 | 0 | 0 | 6.583 |
| BRTHA3020314 | 0 | 0 | 0 | 0 | 0 | 18.965 |
| BRTHA3022641 | 0 | 0 | 0 | 0 | 0 | 32.949 |
| CD34C2000051 | 100 | 0 | 0 | 0 | 0 | 0 |
| CD34C2000152 | 100 | 0 | 0 | 0 | 0 | 0 |
| CD34C2000175 | 100 | 0 | 0 | 0 | 0 | 0 |
| CD34C2000443 | 100 | 0 | 0 | 0 | 0 | 0 |
| CD34C3000125 | 97.628 | 0 | 0 | 0 | 0 | 0 |
| CD34C3000252 | 34.472 | 0 | 0 | 0 | 0 | 4.586 |
| CD34C3000314 | 100 | 0 | 0 | 0 | 0 | 0 |
| CD34C3000424 | 96.167 | 0 | 0 | 0 | 0 | 0 |
| CD34C3000494 | 100 | 0 | 0 | 0 | 0 | 0 |
| CERVX1000042 | 0 | 100 | 0 | 0 | 0 | 0 |
| CERVX2000812 | 0 | 100 | 0 | 0 | 0 | 0 |
| CERVX2000968 | 0 | 100 | 0 | 0 | 0 | 0 |
| CERVX2002006 | 0 | 100 | 0 | 0 | 0 | 0 |
| CERVX2002013 | 0 | 100 | 0 | 0 | 0 | 0 |
| CERVX2002430 | 0 | 100 | 0 | 0 | 0 | 0 |
| CERVX2002770 | 0 | 48.712 | 0 | 0 | 0 | 0 |
| CHONS1000058 | 0 | 0 | 100 | 0 | 0 | 0 |
| CHONS2000172 | 0 | 0 | 82.765 | 0 | 0 | 0 |
| CHONS2000797 | 0 | 0 | 96.373 | 0 | 0 | 0 |
| CHONS2001287 | 0 | 0 | 100 | 0 | 0 | 0 |
| CHONS2001382 | 0 | 0 | 100 | 0 | 0 | 0 |
| CHONS2001797 | 0 | 0 | 100 | 0 | 0 | 0 |
| CHONS2001834 | 0 | 0 | 100 | 0 | 0 | 0 |
| CHONS2002419 | 0 | 0 | 100 | 0 | 0 | 0 |
| CHONS2002829 | 0 | 0 | 36.193 | 0 | 0 | 0 |
| COLON1000030 | 0 | 0 | 0 | 100 | 0 | 0 |
| COLON1000084 | 0 | 0 | 0 | 100 | 0 | 0 |
| COLON1000135 | 0 | 0 | 0 | 100 | 0 | 0 |
| COLON2000470 | 0 | 0 | 0 | 50.006 | 0 | 0 |
| COLON2000557 | 0 | 0 | 0 | 100 | 0 | 0 |
| COLON2000568 | 0 | 0 | 0 | 100 | 0 | 0 |
| COLON2001721 | 0 | 0 | 0 | 38.840 | 0 | 0 |
| COLON2001829 | 0 | 0 | 0 | 100 | 0 | 0 |
| COLON2001866 | 0 | 0 | 0 | 100 | 0 | 0 |
| COLON2002443 | 0 | 0 | 0 | 31.658 | 0 | 0 |
| COLON2002520 | 0 | 0 | 0 | 100 | 0 | 0 |
| COLON2003043 | 0 | 0 | 0 | 100 | 0 | 0 |
| COLON2003529 | 0 | 0 | 0 | 100 | 0 | 0 |
| COLON2004318 | 0 | 0 | 0 | 100 | 0 | 0 |
| COLON2004351 | 0 | 0 | 0 | 100 | 0 | 0 |
| COLON2004478 | 0 | 0 | 0 | 100 | 0 | 0 |
| COLON2004911 | 0 | 0 | 0 | 100 | 0 | 0 |
| COLON2005126 | 0 | 0 | 0 | 100 | 0 | 0 |
| COLON2005623 | 0 | 0 | 0 | 100 | 0 | 0 |
| COLON2005735 | 0 | 0 | 0 | 100 | 0 | 0 |
| COLON2005772 | 0 | 0 | 0 | 100 | 0 | 0 |
| COLON2006263 | 0 | 0 | 0 | 100 | 0 | 0 |
| COLON2006282 | 0 | 0 | 0 | 100 | 0 | 0 |
| COLON2006417 | 0 | 0 | 0 | 100 | 0 | 0 |
| COLON2007274 | 0 | 0 | 0 | 100 | 0 | 0 |
| COLON2007733 | 0 | 0 | 0 | 87.532 | 0 | 0 |
| COLON2008105 | 0 | 0 | 0 | 100 | 0 | 0 |
| COLON2009337 | 0 | 0 | 0 | 100 | 0 | 0 |
| COLON2009499 | 0 | 0 | 0 | 100 | 0 | 0 |
| CORDB1000140 | 0 | 0 | 0 | 0 | 100 | 0 |
| CORDB2000061 | 0 | 0 | 0 | 0 | 100 | 0 |
| CORDB2000127 | 0 | 0 | 0 | 0 | 100 | 0 |
| CORDB2000541 | 0 | 0 | 0 | 0 | 100 | 0 |
| CTONG1000009 | 0 | 0 | 0 | 0 | 0 | 72.374 |
| CTONG1000010 | 0 | 0 | 0 | 0 | 0 | 12.075 |
| CTONG1000020 | 0 | 0 | 0 | 0 | 0 | 100 |
| CTONG1000022 | 0 | 0 | 0 | 0 | 0 | 100 |
| CTONG1000040 | 0 | 0 | 0 | 0 | 0 | 100 |
| CTONG1000052 | 0 | 0 | 0 | 0 | 0 | 5.627 |
| CTONG1000056 | 0 | 0 | 0 | 0 | 0 | 100 |
| CTONG1000062 | 0 | 0 | 0 | 0 | 0 | 100 |
| CTONG1000086 | 0 | 0 | 0 | 0 | 0 | 100 |
| CTONG1000087 | 0 | 0 | 0 | 0 | 0 | 3.895 |
| CTONG1000088 | 0 | 0 | 0 | 0 | 0 | 5.442 |
| CTONG1000093 | 0 | 0 | 0 | 0 | 0 | 74.021 |
| CTONG1000094 | 0 | 0 | 0 | 0 | 0 | 0.725 |
| CTONG1000097 | 0 | 0 | 0 | 0 | 0 | 100 |
| CTONG1000113 | 0 | 0 | 0 | 79.033 | 0 | 20.967 |
| CTONG1000137 | 0 | 0 | 0 | 0 | 0 | 60.963 |
| CTONG1000165 | 0 | 0 | 0 | 0 | 0 | 100 |
| CTONG1000175 | 0 | 0 | 0 | 0 | 0 | 15.679 |
| CTONG1000180 | 0 | 0 | 0 | 0 | 0 | 44.728 |
| CTONG1000181 | 0 | 0 | 0 | 0 | 0 | 100 |
| CTONG1000218 | 0 | 0 | 0 | 0 | 0 | 1.794 |
| CTONG1000220 | 0 | 0 | 0 | 0 | 0 | 24.817 |
| CTONG1000241 | 0 | 0 | 0 | 0 | 0 | 11.853 |
| CTONG1000277 | 0 | 0 | 0 | 0 | 0 | 38.523 |
| CTONG1000283 | 0 | 0 | 0 | 0 | 0 | 100 |
| CTONG1000288 | 0 | 0 | 0 | 0 | 0 | 84.986 |
| CTONG1000302 | 0 | 0 | 0 | 0 | 0 | 100 |
| CTONG1000341 | 0 | 0 | 0 | 0 | 0 | 51.706 |
| CTONG1000467 | 0 | 0 | 0 | 0 | 0 | 16.004 |
| CTONG1000476 | 0 | 0 | 0 | 0 | 0 | 100 |
| CTONG1000488 | 0 | 0 | 0 | 0 | 0 | 100 |
| CTONG1000508 | 0 | 0 | 0 | 0 | 0 | 100 |
| CTONG1000540 | 0 | 0 | 0 | 0 | 0 | 100 |
| CTONG2000031 | 0 | 0 | 0 | 0 | 0 | 65.066 |
| CTONG2000034 | 0 | 0 | 0 | 0 | 0 | 33.574 |
| CTONG2000042 | 0 | 0 | 0 | 0 | 0 | 65.252 |
| CTONG2000063 | 0 | 0 | 0 | 0 | 0 | 35.886 |
| CTONG2000201 | 0 | 0 | 0 | 13.608 | 0 | 21.662 |
| CTONG2000218 | 0 | 0 | 0 | 0 | 0 | 100 |
| CTONG2000279 | 0 | 0 | 0 | 0 | 0 | 100 |
| CTONG2000303 | 0 | 0 | 0 | 0 | 0 | 100 |
| CTONG2000330 | 0 | 0 | 0 | 0 | 0 | 100 |
| CTONG2000395 | 0 | 0 | 0 | 0 | 0 | 100 |
| CTONG2000411 | 0 | 0 | 0 | 0 | 0 | 64.312 |
| CTONG2000452 | 0 | 0 | 0 | 0 | 0 | 5.425 |
| CTONG2000465 | 0 | 0 | 0 | 0 | 0 | 69.076 |
| CTONG2000469 | 0 | 0 | 0 | 0 | 0 | 5.439 |
| CTONG2000480 | 0 | 0 | 0 | 0 | 0 | 100 |
| CTONG2000508 | 0 | 0 | 0 | 0 | 0 | 25.005 |
| CTONG2000561 | 0 | 0 | 0 | 0 | 0 | 40.551 |
| CTONG2000589 | 0 | 0 | 0 | 0 | 0 | 20.768 |
| CTONG2000766 | 0 | 0 | 0 | 0 | 0 | 100 |
| CTONG2000771 | 0 | 0 | 0 | 0 | 0 | 100 |
| CTONG2000819 | 0 | 0 | 0 | 0 | 0 | 100 |
| CTONG2000827 | 0 | 0 | 0 | 0 | 0 | 62.680 |
| CTONG2000846 | 0 | 0 | 0 | 0 | 0 | 100 |
| CTONG2000855 | 0 | 0 | 0 | 0 | 0 | 100 |
| CTONG2000977 | 0 | 0 | 0 | 0 | 0 | 100 |
| CTONG2001139 | 0 | 0 | 0 | 0 | 0 | 50.204 |
| CTONG2001226 | 0 | 0 | 0 | 0 | 0 | 14.138 |
| CTONG2001320 | 0 | 0 | 0 | 0 | 0 | 9.819 |
| CTONG2001366 | 0 | 0 | 0 | 0 | 0 | 28.875 |
| CTONG2001413 | 0 | 0 | 0 | 0 | 0 | 100 |
| CTONG2001428 | 0 | 0 | 0 | 0 | 0 | 62.446 |
| CTONG2001513 | 0 | 0 | 0 | 0 | 0 | 51.138 |
| CTONG2001524 | 0 | 0 | 0 | 0 | 0 | 100 |
| CTONG2001533 | 0 | 0 | 0 | 0 | 0 | 64.609 |
| CTONG2001598 | 0 | 0 | 0 | 0 | 0 | 72.408 |
| CTONG2001681 | 0 | 0 | 0 | 0 | 0 | 100 |
| CTONG2001724 | 0 | 0 | 0 | 0 | 0 | 100 |
| CTONG2001748 | 0 | 0 | 0 | 0 | 0 | 15.573 |
| CTONG2001749 | 0 | 0 | 0 | 0 | 0 | 100 |
| CTONG2001800 | 0 | 0 | 0 | 0 | 0 | 52.667 |
| CTONG2001820 | 0 | 0 | 0 | 0 | 0 | 50.616 |
| CTONG2001858 | 0 | 0 | 0 | 0 | 0 | 41.238 |
| CTONG2001877 | 0 | 0 | 0 | 0 | 0 | 100 |
| CTONG2001911 | 0 | 0 | 0 | 0 | 0 | 28.144 |
| CTONG2001932 | 0 | 0 | 0 | 0 | 0 | 38.485 |
| CTONG2001955 | 0 | 0 | 0 | 0 | 0 | 100 |
| CTONG2002066 | 0 | 0 | 0 | 79.033 | 0 | 20.967 |
| CTONG2002073 | 0 | 0 | 0 | 0 | 0 | 2.728 |
| CTONG2002095 | 0 | 0 | 0 | 0 | 0 | 26.088 |
| CTONG2002143 | 0 | 0 | 0 | 0 | 0 | 74.021 |
| CTONG2002270 | 0 | 0 | 0 | 0 | 0 | 12.843 |
| CTONG2002395 | 0 | 0 | 0 | 0 | 0 | 69.076 |
| CTONG2002417 | 0 | 0 | 0 | 0 | 0 | 100 |
| CTONG2002418 | 0 | 0 | 0 | 0 | 0 | 100 |
| CTONG2002453 | 0 | 0 | 0 | 0 | 0 | 14.460 |
| CTONG2002520 | 0 | 60.835 | 0 | 0 | 0 | 5.483 |
| CTONG2002558 | 0 | 0 | 0 | 0 | 0 | 51.706 |
| CTONG2002590 | 0 | 0 | 0 | 0 | 0 | 100 |
| CTONG2002709 | 0 | 0 | 0 | 0 | 0 | 4.036 |
| CTONG2002721 | 0 | 0 | 0 | 0 | 0 | 69.076 |
| CTONG2002744 | 0 | 0 | 13.047 | 0 | 0 | 9.872 |
| CTONG2002766 | 0 | 0 | 0 | 0 | 0 | 22.007 |
| CTONG2002803 | 0 | 0 | 0 | 0 | 0 | 2.742 |
| CTONG2002816 | 0 | 0 | 0 | 0 | 0 | 100 |
| CTONG2002820 | 0 | 0 | 0 | 0 | 0 | 41.898 |
| CTONG2002832 | 0 | 0 | 0 | 0 | 0 | 20.880 |
| CTONG2002841 | 0 | 0 | 0 | 0 | 0 | 19.729 |
| CTONG2002903 | 0 | 0 | 0 | 0 | 0 | 34.423 |
| CTONG2002965 | 0 | 0 | 0 | 0 | 0 | 100 |
| CTONG2002999 | 0 | 0 | 0 | 0 | 0 | 100 |
| CTONG2003028 | 0 | 0 | 0 | 0 | 0 | 100 |
| CTONG2003094 | 0 | 0 | 0 | 0 | 0 | 3.413 |
| CTONG2003100 | 0 | 0 | 0 | 0 | 0 | 7.981 |
| CTONG2003115 | 0 | 0 | 0 | 0 | 0 | 100 |
| CTONG2003189 | 0 | 0 | 0 | 0 | 0 | 74.021 |
| CTONG2003245 | 0 | 0 | 0 | 0 | 0 | 100 |
| CTONG2003293 | 0 | 0 | 0 | 0 | 0 | 17.217 |
| CTONG2003298 | 0 | 0 | 0 | 0 | 0 | 8.110 |
| CTONG2003348 | 0 | 0 | 0 | 0 | 0 | 60.963 |
| CTONG2003350 | 0 | 0 | 0 | 0 | 0 | 100 |
| CTONG2003361 | 0 | 0 | 0 | 0 | 0 | 43.764 |
| CTONG2003372 | 0 | 0 | 0 | 0 | 0 | 100 |
| CTONG2003375 | 0 | 0 | 0 | 0 | 0 | 100 |
| CTONG2003427 | 0 | 0 | 0 | 0 | 0 | 100 |
| CTONG2003517 | 0 | 0 | 0 | 0 | 0 | 20.880 |
| CTONG2003524 | 0 | 0 | 0 | 0 | 0 | 3.001 |
| CTONG2003599 | 0 | 0 | 0 | 0 | 0 | 100 |
| CTONG2003680 | 0 | 0 | 0 | 0 | 0 | 19.285 |
| CTONG2003699 | 0 | 0 | 0 | 0 | 0 | 64.894 |
| CTONG2003764 | 0 | 0 | 0 | 0 | 0 | 24.325 |
| CTONG2003782 | 0 | 0 | 0 | 0 | 0 | 100 |
| CTONG2003889 | 0 | 0 | 0 | 0 | 0 | 100 |
| CTONG2003937 | 0 | 0 | 0 | 0 | 0 | 34.822 |
| CTONG2003945 | 0 | 0 | 0 | 0 | 0 | 19.903 |
| CTONG2004000 | 0 | 0 | 0 | 0 | 0 | 100 |
| CTONG2004062 | 0 | 0 | 0 | 0 | 0 | 100 |
| CTONG2004115 | 0 | 0 | 0 | 0 | 0 | 22.262 |
| CTONG2004126 | 0 | 0 | 0 | 0 | 0 | 100 |
| CTONG2004264 | 0 | 0 | 0 | 0 | 0 | 100 |
| CTONG2004305 | 0 | 0 | 0 | 0 | 0 | 65.066 |
| CTONG2004397 | 0 | 0 | 0 | 0 | 0 | 51.706 |
| CTONG2004423 | 0 | 0 | 0 | 0 | 0 | 21.403 |
| CTONG2004454 | 0 | 0 | 0 | 0 | 0 | 100 |
| CTONG2004487 | 0 | 0 | 0 | 0 | 0 | 10.571 |
| CTONG2004550 | 0 | 0 | 0 | 0 | 0 | 34.822 |
| CTONG2004669 | 0 | 0 | 0 | 0 | 0 | 100 |
| CTONG2004716 | 0 | 0 | 0 | 0 | 0 | 100 |
| CTONG2004912 | 0 | 0 | 0 | 0 | 0 | 100 |
| CTONG2004941 | 0 | 0 | 0 | 0 | 0 | 100 |
| CTONG2004948 | 0 | 0 | 0 | 0 | 0 | 100 |
| CTONG2005028 | 0 | 0 | 0 | 0 | 0 | 25.499 |
| CTONG2005049 | 0 | 0 | 0 | 0 | 0 | 100 |
| CTONG2005110 | 0 | 0 | 0 | 0 | 0 | 100 |
| CTONG2005145 | 0 | 0 | 0 | 0 | 0 | 45.702 |
| CTONG2005265 | 0 | 0 | 0 | 0 | 0 | 34.822 |
| CTONG2005278 | 0 | 0 | 0 | 0 | 0 | 10.736 |
| CTONG2005290 | 0 | 0 | 0 | 0 | 0 | 42.764 |
| CTONG2005374 | 0 | 0 | 0 | 0 | 0 | 100 |
| CTONG2005399 | 0 | 0 | 0 | 0 | 0 | 100 |
| CTONG2005468 | 0 | 0 | 0 | 0 | 0 | 83.301 |
| CTONG2005553 | 0 | 0 | 0 | 0 | 0 | 9.337 |
| CTONG2005567 | 0 | 0 | 0 | 0 | 0 | 100 |
| CTONG2005585 | 0 | 0 | 0 | 0 | 0 | 5.218 |
| CTONG2005615 | 0 | 0 | 0 | 0 | 0 | 17.713 |
| CTONG2005635 | 0 | 0 | 0 | 0 | 0 | 100 |
| CTONG2005775 | 0 | 0 | 0 | 0 | 0 | 100 |
| CTONG2005795 | 0 | 0 | 0 | 0 | 0 | 64.609 |
| CTONG2005890 | 0 | 0 | 0 | 0 | 0 | 100 |
| CTONG2005904 | 0 | 0 | 0 | 0 | 0 | 100 |
| CTONG2005913 | 0 | 0 | 0 | 0 | 0 | 49.868 |
| CTONG2006004 | 0 | 0 | 0 | 0 | 0 | 3.932 |
| CTONG2006129 | 0 | 0 | 0 | 0 | 0 | 100 |
| CTONG2006223 | 0 | 0 | 0 | 0 | 0 | 100 |
| CTONG2006235 | 0 | 0 | 0 | 0 | 0 | 3.051 |
| CTONG2006273 | 0 | 0 | 0 | 0 | 0 | 100 |
| CTONG2006310 | 0 | 0 | 0 | 0 | 0 | 100 |
| CTONG2006377 | 0 | 0 | 0 | 0 | 0 | 21.867 |
| CTONG2006393 | 0 | 0 | 0 | 0 | 0 | 65.066 |
| CTONG2006412 | 0 | 0 | 0 | 0 | 0 | 11.562 |
| CTONG2006449 | 0 | 0 | 0 | 0 | 0 | 16.373 |
| CTONG2006515 | 0 | 0 | 0 | 0 | 0 | 100 |
| CTONG2006524 | 0 | 0 | 0 | 0 | 0 | 100 |
| CTONG2006562 | 0 | 0 | 0 | 0 | 0 | 7.823 |
| CTONG2006568 | 0 | 0 | 0 | 0 | 0 | 100 |
| CTONG2006611 | 0 | 0 | 0 | 0 | 0 | 26.900 |
| CTONG2006620 | 0 | 0 | 0 | 0 | 0 | 100 |
| CTONG2006666 | 0 | 0 | 0 | 0 | 0 | 48.802 |
| CTONG2006691 | 0 | 0 | 0 | 0 | 0 | 100 |
| CTONG2006709 | 0 | 0 | 0 | 0 | 0 | 9.633 |
| CTONG2006798 | 0 | 0 | 0 | 0 | 0 | 17.972 |
| CTONG2006836 | 0 | 0 | 0 | 0 | 0 | 100 |
| CTONG2006932 | 0 | 0 | 24.378 | 0 | 0 | 4.099 |
| CTONG2006942 | 0 | 0 | 0 | 0 | 0 | 100 |
| CTONG2006964 | 0 | 0 | 0 | 0 | 0 | 100 |
| CTONG2007007 | 0 | 0 | 0 | 0 | 0 | 69.356 |
| CTONG2007009 | 0 | 0 | 0 | 0 | 0 | 100 |
| CTONG2007072 | 0 | 0 | 0 | 0 | 0 | 12.021 |
| CTONG2007078 | 0 | 0 | 0 | 0 | 0 | 2.380 |
| CTONG2007091 | 0 | 0 | 0 | 0 | 0 | 100 |
| CTONG2007104 | 0 | 0 | 0 | 0 | 0 | 23.169 |
| CTONG2007168 | 0 | 0 | 0 | 0 | 0 | 11.259 |
| CTONG2007175 | 0 | 0 | 0 | 0 | 0 | 100 |
| CTONG2007259 | 0 | 0 | 0 | 0 | 0 | 100 |
| CTONG2007272 | 0 | 0 | 0 | 0 | 0 | 100 |
| CTONG2007293 | 0 | 0 | 0 | 0 | 0 | 62.680 |
| CTONG2007297 | 0 | 0 | 0 | 0 | 0 | 100 |
| CTONG2007399 | 0 | 0 | 0 | 0 | 0 | 30.379 |
| CTONG2007400 | 0 | 0 | 0 | 0 | 0 | 42.865 |
| CTONG2007417 | 0 | 0 | 0 | 0 | 0 | 40.148 |
| CTONG2007441 | 0 | 0 | 0 | 0 | 0 | 76.882 |
| CTONG2007474 | 0 | 0 | 0 | 0 | 0 | 19.785 |
| CTONG2007500 | 0 | 0 | 0 | 5.280 | 0 | 2.801 |
| CTONG2007586 | 0 | 0 | 0 | 0 | 0 | 11.194 |
| CTONG2007613 | 0 | 0 | 0 | 0 | 0 | 16.303 |
| CTONG2007623 | 0 | 0 | 0 | 0 | 0 | 100 |
| CTONG2007681 | 0 | 0 | 0 | 0 | 0 | 34.420 |
| CTONG2007776 | 0 | 0 | 0 | 0 | 0 | 7.922 |
| CTONG2007779 | 0 | 0 | 0 | 0 | 0 | 62.680 |
| CTONG2007898 | 0 | 0 | 0 | 0 | 0 | 100 |
| CTONG2007959 | 0 | 0 | 0 | 0 | 0 | 33.883 |
| CTONG2007970 | 0 | 0 | 0 | 0 | 0 | 100 |
| CTONG2008014 | 0 | 0 | 0 | 0 | 0 | 28.200 |
| CTONG2008184 | 0 | 0 | 0 | 0 | 0 | 100 |
| CTONG2008262 | 0 | 0 | 0 | 0 | 0 | 100 |
| CTONG2008269 | 0 | 0 | 0 | 0 | 0 | 12.672 |
| CTONG2008321 | 0 | 0 | 0 | 0 | 0 | 28.019 |
| CTONG2008343 | 0 | 0 | 0 | 0 | 0 | 60.963 |
| CTONG2008398 | 32.111 | 0 | 0 | 0 | 0 | 1.424 |
| CTONG2008402 | 0 | 0 | 0 | 0 | 0 | 100 |
| CTONG2008405 | 0 | 0 | 0 | 0 | 0 | 40.989 |
| CTONG2008466 | 0 | 0 | 0 | 0 | 0 | 14.562 |
| CTONG2008506 | 0 | 0 | 0 | 0 | 0 | 3.505 |
| CTONG2008518 | 0 | 0 | 0 | 0 | 0 | 21.520 |
| CTONG2008521 | 0 | 0 | 0 | 0 | 0 | 28.316 |
| CTONG2008562 | 0 | 0 | 0 | 0 | 0 | 100 |
| CTONG2008577 | 0 | 0 | 0 | 0 | 0 | 100 |
| CTONG2008595 | 0 | 0 | 0 | 0 | 0 | 100 |
| CTONG2008621 | 0 | 0 | 0 | 0 | 0 | 62.446 |
| CTONG2008689 | 0 | 0 | 0 | 0 | 0 | 38.923 |
| CTONG2008720 | 0 | 0 | 0 | 0 | 0 | 50.285 |
| CTONG2008721 | 0 | 0 | 0 | 0 | 0 | 62.680 |
| CTONG2008773 | 0 | 0 | 0 | 0 | 0 | 100 |
| CTONG2008792 | 0 | 0 | 0 | 0 | 0 | 13.686 |
| CTONG2008989 | 0 | 0 | 0 | 0 | 0 | 100 |
| CTONG2009033 | 0 | 0 | 0 | 0 | 0 | 47.970 |
| CTONG2009108 | 0 | 0 | 0 | 0 | 0 | 44.201 |
| CTONG2009132 | 0 | 0 | 0 | 0 | 0 | 100 |
| CTONG2009156 | 0 | 0 | 0 | 0 | 0 | 100 |
| CTONG2009181 | 0 | 0 | 0 | 0 | 0 | 100 |
| CTONG2009257 | 0 | 0 | 0 | 0 | 0 | 100 |
| CTONG2009258 | 0 | 0 | 0 | 0 | 0 | 100 |
| CTONG2009268 | 0 | 0 | 0 | 0 | 0 | 100 |
| CTONG2009270 | 0 | 0 | 0 | 0 | 0 | 100 |
| CTONG2009395 | 0 | 0 | 0 | 0 | 0 | 100 |
| CTONG2009423 | 0 | 0 | 0 | 0 | 0 | 64.609 |
| CTONG2009440 | 0 | 0 | 0 | 0 | 0 | 100 |
| CTONG2009527 | 0 | 0 | 0 | 0 | 0 | 100 |
| CTONG2009529 | 0 | 0 | 0 | 0 | 0 | 11.777 |
| CTONG2009531 | 0 | 0 | 0 | 0 | 0 | 100 |
| CTONG2009534 | 0 | 0 | 0 | 0 | 0 | 14.323 |
| CTONG2009570 | 0 | 0 | 0 | 0 | 0 | 100 |
| CTONG2009572 | 0 | 0 | 0 | 0 | 0 | 100 |
| CTONG2009604 | 0 | 0 | 0 | 0 | 0 | 100 |
| CTONG2009643 | 0 | 0 | 0 | 0 | 0 | 100 |
| CTONG2009675 | 0 | 0 | 0 | 0 | 0 | 100 |
| CTONG2009689 | 0 | 0 | 0 | 0 | 0 | 100 |
| CTONG2009725 | 0 | 0 | 0 | 0 | 0 | 100 |
| CTONG2009766 | 0 | 0 | 0 | 0 | 0 | 100 |
| CTONG2009768 | 0 | 0 | 0 | 0 | 0 | 100 |
| CTONG2009844 | 0 | 0 | 0 | 0 | 0 | 33.474 |
| CTONG2009871 | 0 | 0 | 0 | 0 | 0 | 100 |
| CTONG2009887 | 0 | 0 | 0 | 0 | 0 | 100 |
| CTONG2009891 | 0 | 0 | 0 | 0 | 0 | 100 |
| CTONG2009923 | 0 | 0 | 0 | 0 | 0 | 60.963 |
| CTONG2009938 | 0 | 0 | 0 | 0 | 0 | 37.266 |
| CTONG2009955 | 0 | 0 | 0 | 0 | 0 | 100 |
| CTONG2009958 | 0 | 0 | 0 | 0 | 0 | 100 |
| CTONG2009963 | 0 | 0 | 0 | 0 | 0 | 38.502 |
| CTONG2010018 | 0 | 0 | 0 | 0 | 0 | 100 |
| CTONG2010024 | 0 | 0 | 0 | 0 | 0 | 100 |
| CTONG2010116 | 0 | 0 | 0 | 0 | 0 | 100 |
| CTONG2010133 | 0 | 0 | 0 | 0 | 0 | 100 |
| CTONG2010148 | 0 | 0 | 0 | 0 | 0 | 100 |
| CTONG2010276 | 0 | 0 | 0 | 0 | 0 | 100 |
| CTONG2010330 | 0 | 0 | 0 | 0 | 0 | 100 |
| CTONG2010348 | 0 | 0 | 0 | 0 | 0 | 13.193 |
| CTONG2010408 | 0 | 0 | 0 | 0 | 0 | 15.959 |
| CTONG2010508 | 0 | 84.727 | 0 | 0 | 0 | 15.273 |
| CTONG2010566 | 0 | 0 | 0 | 0 | 0 | 25.256 |
| CTONG2010623 | 0 | 0 | 0 | 0 | 0 | 100 |
| CTONG2010649 | 0 | 32.315 | 0 | 0 | 0 | 8.737 |
| CTONG2010652 | 0 | 0 | 0 | 0 | 0 | 29.937 |
| CTONG2010803 | 0 | 0 | 0 | 0 | 0 | 20.971 |
| CTONG2010821 | 0 | 0 | 0 | 0 | 0 | 2.662 |
| CTONG2011188 | 0 | 0 | 0 | 0 | 0 | 78.500 |
| CTONG2011429 | 0 | 0 | 0 | 0 | 0 | 100 |
| CTONG2011474 | 0 | 0 | 0 | 0 | 0 | 100 |
| CTONG2011676 | 0 | 0 | 0 | 0 | 0 | 100 |
| CTONG2011716 | 0 | 0 | 0 | 0 | 0 | 51.706 |
| CTONG2011765 | 0 | 0 | 0 | 0 | 0 | 100 |
| CTONG2011779 | 0 | 0 | 0 | 0 | 0 | 100 |
| CTONG2011801 | 0 | 0 | 0 | 0 | 0 | 5.515 |
| CTONG2011815 | 0 | 0 | 0 | 0 | 0 | 100 |
| CTONG2011822 | 0 | 0 | 0 | 0 | 0 | 100 |
| CTONG2011825 | 0 | 0 | 0 | 0 | 0 | 15.991 |
| CTONG2011920 | 0 | 0 | 0 | 0 | 0 | 100 |
| CTONG2011985 | 0 | 0 | 0 | 0 | 0 | 100 |
| CTONG2012001 | 0 | 0 | 0 | 0 | 0 | 13.318 |
| CTONG2012029 | 0 | 0 | 0 | 0 | 0 | 34.822 |
| CTONG2012050 | 0 | 0 | 0 | 0 | 0 | 13.231 |
| CTONG2012077 | 0 | 0 | 0 | 0 | 0 | 100 |
| CTONG2012101 | 0 | 0 | 0 | 0 | 0 | 29.404 |
| CTONG2012123 | 0 | 0 | 0 | 0 | 0 | 100 |
| CTONG2012158 | 0 | 0 | 0 | 0 | 0 | 33.983 |
| CTONG2012230 | 0 | 0 | 0 | 0 | 0 | 100 |
| CTONG2012401 | 0 | 0 | 0 | 0 | 0 | 7.835 |
| CTONG2012422 | 0 | 0 | 0 | 0 | 0 | 69.076 |
| CTONG2012425 | 0 | 0 | 0 | 0 | 0 | 51.706 |
| CTONG2012447 | 0 | 0 | 0 | 0 | 0 | 100 |
| CTONG2012452 | 0 | 0 | 0 | 0 | 0 | 1.326 |
| CTONG2012453 | 0 | 0 | 0 | 0 | 0 | 14.027 |
| CTONG2012473 | 0 | 0 | 0 | 0 | 0 | 100 |
| CTONG2012476 | 0 | 0 | 0 | 0 | 0 | 100 |
| CTONG2012533 | 0 | 0 | 0 | 0 | 0 | 100 |
| CTONG2012554 | 0 | 0 | 0 | 0 | 0 | 100 |
| CTONG2012564 | 0 | 0 | 0 | 0 | 0 | 7.359 |
| CTONG2012607 | 0 | 0 | 0 | 0 | 0 | 3.221 |
| CTONG2012661 | 0 | 0 | 0 | 0 | 0 | 39.027 |
| CTONG2012724 | 0 | 0 | 0 | 0 | 0 | 100 |
| CTONG2012738 | 0 | 0 | 0 | 0 | 0 | 100 |
| CTONG2012745 | 0 | 0 | 0 | 0 | 0 | 10.331 |
| CTONG2012758 | 0 | 0 | 0 | 0 | 0 | 100 |
| CTONG2012843 | 0 | 0 | 0 | 0 | 0 | 33.574 |
| CTONG2012847 | 0 | 0 | 0 | 0 | 0 | 9.622 |
| CTONG2012879 | 0 | 0 | 0 | 0 | 0 | 19.002 |
| CTONG2012901 | 0 | 0 | 0 | 0 | 0 | 100 |
| CTONG2012996 | 0 | 0 | 0 | 0 | 0 | 32.630 |
| CTONG2013128 | 0 | 0 | 0 | 0 | 0 | 60.963 |
| CTONG2013149 | 0 | 0 | 0 | 0 | 0 | 24.817 |
| CTONG2013156 | 0 | 0 | 0 | 0 | 0 | 38.523 |
| CTONG2013178 | 0 | 0 | 0 | 0 | 0 | 35.252 |
| CTONG2013222 | 0 | 0 | 0 | 0 | 0 | 6.999 |
| CTONG2013284 | 0 | 0 | 0 | 0 | 0 | 100 |
| CTONG2013339 | 0 | 0 | 0 | 0 | 0 | 100 |
| CTONG2013348 | 0 | 0 | 0 | 0 | 0 | 10.246 |
| CTONG2013352 | 0 | 0 | 0 | 0 | 0 | 50.616 |
| CTONG2013381 | 0 | 0 | 0 | 0 | 0 | 29.215 |
| CTONG2013393 | 0 | 0 | 0 | 0 | 0 | 100 |
| CTONG2013511 | 0 | 0 | 0 | 0 | 0 | 100 |
| CTONG2013630 | 0 | 0 | 0 | 0 | 0 | 100 |
| CTONG2013803 | 0 | 0 | 0 | 0 | 0 | 100 |
| CTONG2013907 | 0 | 0 | 0 | 0 | 0 | 8.031 |
| CTONG2013934 | 0 | 0 | 0 | 0 | 0 | 12.919 |
| CTONG2013985 | 0 | 0 | 0 | 0 | 0 | 21.815 |
| CTONG2013986 | 0 | 0 | 0 | 0 | 0 | 100 |
| CTONG2014032 | 0 | 0 | 0 | 0 | 0 | 100 |
| CTONG2014058 | 0 | 0 | 0 | 0 | 0 | 100 |
| CTONG2014119 | 0 | 0 | 0 | 0 | 0 | 30.190 |
| CTONG2014165 | 0 | 0 | 0 | 0 | 0 | 8.968 |
| CTONG2014191 | 0 | 0 | 0 | 0 | 0 | 100 |
| CTONG2014206 | 0 | 0 | 0 | 0 | 0 | 100 |
| CTONG2014234 | 0 | 0 | 0 | 0 | 0 | 100 |
| CTONG2014264 | 0 | 0 | 0 | 0 | 0 | 100 |
| CTONG2014280 | 0 | 0 | 0 | 0 | 0 | 23.412 |
| CTONG2014369 | 0 | 0 | 0 | 0 | 0 | 23.253 |
| CTONG2014389 | 0 | 0 | 0 | 0 | 0 | 4.920 |
| CTONG2014491 | 0 | 0 | 0 | 0 | 0 | 62.446 |
| CTONG2014630 | 0 | 0 | 0 | 0 | 0 | 100 |
| CTONG2014635 | 0 | 0 | 0 | 0 | 0 | 100 |
| CTONG2014646 | 0 | 0 | 0 | 0 | 0 | 100 |
| CTONG2014705 | 0 | 0 | 0 | 0 | 0 | 34.963 |
| CTONG2014898 | 0 | 0 | 0 | 0 | 0 | 10.743 |
| CTONG2014946 | 0 | 0 | 0 | 0 | 0 | 100 |
| CTONG2014954 | 0 | 0 | 0 | 0 | 0 | 22.772 |
| CTONG2014959 | 0 | 0 | 0 | 0 | 0 | 100 |
| CTONG2014966 | 0 | 0 | 0 | 0 | 0 | 100 |
| CTONG2014995 | 0 | 0 | 0 | 0 | 0 | 100 |
| CTONG2015091 | 0 | 0 | 0 | 0 | 0 | 3.025 |
| CTONG2015204 | 0 | 0 | 0 | 0 | 0 | 56.503 |
| CTONG2015316 | 0 | 0 | 0 | 0 | 0 | 100 |
| CTONG2015330 | 0 | 0 | 0 | 0 | 0 | 52.970 |
| CTONG2015345 | 0 | 0 | 0 | 0 | 0 | 31.801 |
| CTONG2015358 | 0 | 0 | 0 | 0 | 0 | 74.021 |
| CTONG2015434 | 0 | 0 | 0 | 0 | 0 | 100 |
| CTONG2015518 | 0 | 0 | 0 | 0 | 0 | 24.734 |
| CTONG2015540 | 0 | 0 | 0 | 0 | 0 | 100 |
| CTONG2015596 | 0 | 0 | 0 | 0 | 0 | 100 |
| CTONG2015633 | 0 | 0 | 0 | 0 | 0 | 100 |
| CTONG2015678 | 0 | 0 | 0 | 0 | 0 | 62.446 |
| CTONG2015717 | 0 | 0 | 0 | 0 | 0 | 100 |
| CTONG2015804 | 0 | 0 | 0 | 0 | 0 | 100 |
| CTONG2015815 | 0 | 0 | 0 | 0 | 0 | 16.385 |
| CTONG2015866 | 0 | 0 | 0 | 0 | 0 | 100 |
| CTONG2015914 | 0 | 0 | 0 | 0 | 0 | 100 |
| CTONG2015953 | 0 | 0 | 0 | 0 | 0 | 100 |
| CTONG2016056 | 0 | 0 | 0 | 0 | 0 | 3.704 |
| CTONG2016185 | 0 | 0 | 0 | 0 | 0 | 19.368 |
| CTONG2016217 | 0 | 0 | 0 | 0 | 0 | 100 |
| CTONG2016355 | 0 | 0 | 0 | 0 | 0 | 100 |
| CTONG2016408 | 0 | 0 | 0 | 0 | 0 | 6.896 |
| CTONG2016499 | 0 | 0 | 0 | 0 | 0 | 65.066 |
| CTONG2016505 | 0 | 0 | 0 | 0 | 0 | 33.474 |
| CTONG2016559 | 0 | 0 | 0 | 0 | 0 | 100 |
| CTONG2016575 | 0 | 0 | 0 | 0 | 0 | 7.408 |
| CTONG2016658 | 0 | 0 | 0 | 0 | 0 | 100 |
| CTONG2016775 | 0 | 0 | 0 | 0 | 0 | 100 |
| CTONG2016797 | 0 | 0 | 0 | 0 | 0 | 100 |
| CTONG2016824 | 0 | 0 | 0 | 0 | 0 | 7.928 |
| CTONG2016846 | 0 | 0 | 0 | 0 | 0 | 100 |
| CTONG2016869 | 0 | 0 | 0 | 0 | 0 | 29.516 |
| CTONG2016904 | 0 | 0 | 0 | 0 | 0 | 100 |
| CTONG2016931 | 0 | 0 | 0 | 0 | 0 | 11.368 |
| CTONG2016942 | 0 | 0 | 0 | 0 | 0 | 21.398 |
| CTONG2016953 | 0 | 0 | 0 | 0 | 0 | 100 |
| CTONG2017021 | 0 | 0 | 0 | 0 | 0 | 100 |
| CTONG2017094 | 0 | 0 | 0 | 0 | 0 | 70.789 |
| CTONG2017292 | 0 | 0 | 0 | 0 | 0 | 100 |
| CTONG2017409 | 0 | 0 | 0 | 0 | 0 | 62.680 |
| CTONG2017429 | 0 | 0 | 0 | 0 | 0 | 40.325 |
| CTONG2017444 | 0 | 0 | 0 | 0 | 0 | 34.294 |
| CTONG2017458 | 0 | 0 | 0 | 0 | 0 | 100 |
| CTONG2017500 | 0 | 0 | 0 | 0 | 0 | 4.934 |
| CTONG2017604 | 0 | 0 | 0 | 0 | 0 | 22.375 |
| CTONG2017650 | 0 | 0 | 0 | 0 | 0 | 100 |
| CTONG2017798 | 0 | 0 | 0 | 0 | 0 | 37.119 |
| CTONG2017804 | 0 | 0 | 0 | 0 | 0 | 100 |
| CTONG2017814 | 0 | 0 | 0 | 0 | 0 | 100 |
| CTONG2017910 | 0 | 0 | 0 | 0 | 0 | 100 |
| CTONG2017939 | 0 | 0 | 0 | 0 | 0 | 100 |
| CTONG2017989 | 0 | 0 | 0 | 0 | 0 | 100 |
| CTONG2017998 | 0 | 0 | 0 | 0 | 0 | 4.666 |
| CTONG2018062 | 0 | 0 | 0 | 0 | 0 | 100 |
| CTONG2018069 | 0 | 0 | 0 | 0 | 0 | 100 |
| CTONG2018147 | 0 | 0 | 0 | 0 | 0 | 100 |
| CTONG2018211 | 0 | 0 | 0 | 0 | 0 | 6.352 |
| CTONG2018217 | 0 | 0 | 0 | 0 | 0 | 100 |
| CTONG2018279 | 0 | 0 | 0 | 0 | 0 | 100 |
| CTONG2018334 | 0 | 0 | 0 | 51.354 | 0 | 13.624 |
| CTONG2018343 | 0 | 0 | 0 | 0 | 0 | 28.371 |
| CTONG2018379 | 0 | 0 | 0 | 0 | 0 | 100 |
| CTONG2018383 | 0 | 0 | 0 | 0 | 0 | 16.839 |
| CTONG2018413 | 0 | 0 | 0 | 0 | 0 | 46.898 |
| CTONG2018483 | 0 | 0 | 0 | 0 | 0 | 100 |
| CTONG2018629 | 0 | 0 | 0 | 0 | 0 | 76.882 |
| CTONG2018632 | 0 | 0 | 0 | 0 | 0 | 14.897 |
| CTONG2018637 | 0 | 0 | 0 | 0 | 0 | 12.219 |
| CTONG2018652 | 0 | 0 | 0 | 0 | 0 | 74.021 |
| CTONG2018653 | 0 | 0 | 0 | 0 | 0 | 100 |
| CTONG2018655 | 0 | 0 | 0 | 0 | 0 | 100 |
| CTONG2018735 | 0 | 0 | 0 | 0 | 0 | 69.076 |
| CTONG2018739 | 0 | 0 | 0 | 0 | 0 | 7.218 |
| CTONG2018808 | 0 | 0 | 0 | 0 | 0 | 14.670 |
| CTONG2018843 | 0 | 0 | 0 | 0 | 0 | 20.678 |
| CTONG2018898 | 0 | 0 | 0 | 0 | 0 | 0.897 |
| CTONG2018900 | 0 | 0 | 0 | 0 | 0 | 7.970 |
| CTONG2018976 | 0 | 0 | 0 | 0 | 0 | 69.076 |
| CTONG2019029 | 0 | 0 | 0 | 0 | 0 | 60.288 |
| CTONG2019063 | 0 | 0 | 0 | 0 | 0 | 39.545 |
| CTONG2019144 | 0 | 0 | 0 | 0 | 0 | 100 |
| CTONG2019232 | 0 | 0 | 0 | 0 | 0 | 100 |
| CTONG2019248 | 0 | 0 | 0 | 0 | 0 | 28.179 |
| CTONG2019400 | 0 | 0 | 0 | 0 | 0 | 36.767 |
| CTONG2019590 | 0 | 0 | 0 | 0 | 0 | 20.042 |
| CTONG2019652 | 0 | 0 | 0 | 0 | 0 | 100 |
| CTONG2019704 | 0 | 0 | 0 | 0 | 0 | 62.446 |
| CTONG2019788 | 0 | 0 | 0 | 0 | 0 | 11.390 |
| CTONG2019822 | 0 | 0 | 0 | 0 | 0 | 12.111 |
| CTONG2019833 | 0 | 0 | 0 | 0 | 0 | 100 |
| CTONG2020031 | 0 | 0 | 0 | 0 | 0 | 100 |
| CTONG2020108 | 0 | 0 | 0 | 0 | 0 | 69.076 |
| CTONG2020127 | 0 | 0 | 0 | 0 | 0 | 100 |
| CTONG2020171 | 0 | 0 | 0 | 0 | 0 | 100 |
| CTONG2020374 | 0 | 0 | 0 | 0 | 0 | 57.889 |
| CTONG2020378 | 0 | 0 | 0 | 0 | 0 | 30.063 |
| CTONG2020411 | 0 | 0 | 0 | 0 | 0 | 12.823 |
| CTONG2020445 | 0 | 0 | 0 | 0 | 0 | 39.202 |
| CTONG2020484 | 0 | 0 | 0 | 0 | 0 | 1.095 |
| CTONG2020522 | 0 | 0 | 0 | 0 | 0 | 42.683 |
| CTONG2020560 | 0 | 0 | 0 | 0 | 0 | 2.794 |
| CTONG2020582 | 0 | 0 | 0 | 0 | 0 | 21.442 |
| CTONG2020638 | 0 | 0 | 0 | 0 | 0 | 23.060 |
| CTONG2020806 | 0 | 0 | 0 | 0 | 0 | 100 |
| CTONG2020831 | 0 | 0 | 0 | 0 | 0 | 62.680 |
| CTONG2020974 | 0 | 0 | 0 | 0 | 0 | 74.021 |
| CTONG2021024 | 0 | 0 | 0 | 0 | 0 | 62.446 |
| CTONG2021132 | 0 | 0 | 0 | 0 | 0 | 100 |
| CTONG2021168 | 0 | 0 | 0 | 0 | 0 | 100 |
| CTONG2021289 | 0 | 0 | 0 | 0 | 0 | 19.164 |
| CTONG2022153 | 0 | 0 | 0 | 0 | 0 | 100 |
| CTONG2022601 | 0 | 0 | 0 | 0 | 0 | 100 |
| CTONG2022835 | 72.054 | 0 | 0 | 0 | 0 | 3.195 |
| CTONG2023021 | 0 | 0 | 0 | 0 | 0 | 62.680 |
| CTONG2023449 | 0 | 0 | 0 | 0 | 0 | 21.398 |
| CTONG2023512 | 0 | 0 | 0 | 0 | 0 | 100 |
| CTONG2024031 | 0 | 0 | 0 | 0 | 0 | 19.255 |
| CTONG2024206 | 0 | 0 | 0 | 0 | 0 | 100 |
| CTONG2024614 | 0 | 0 | 0 | 0 | 0 | 100 |
| CTONG2024749 | 0 | 0 | 0 | 0 | 0 | 100 |
| CTONG2025496 | 0 | 0 | 0 | 0 | 0 | 100 |
| CTONG2025513 | 0 | 0 | 0 | 0 | 0 | 100 |
| CTONG2025516 | 0 | 0 | 0 | 0 | 0 | 100 |
| CTONG2025610 | 0 | 0 | 0 | 0 | 0 | 100 |
| CTONG2025900 | 0 | 0 | 0 | 0 | 0 | 100 |
| CTONG2026513 | 0 | 0 | 0 | 0 | 0 | 100 |
| CTONG2026770 | 0 | 0 | 0 | 0 | 0 | 100 |
| CTONG2026920 | 0 | 0 | 0 | 0 | 0 | 100 |
| CTONG2026987 | 0 | 0 | 0 | 0 | 0 | 100 |
| CTONG2027150 | 0 | 0 | 0 | 0 | 0 | 100 |
| CTONG2027263 | 0 | 0 | 0 | 0 | 0 | 30.673 |
| CTONG2027327 | 0 | 0 | 0 | 0 | 0 | 52.760 |
| CTONG2027361 | 0 | 0 | 0 | 0 | 0 | 100 |
| CTONG2027591 | 0 | 0 | 0 | 0 | 0 | 100 |
| CTONG2027736 | 0 | 0 | 0 | 0 | 0 | 100 |
| CTONG2027783 | 0 | 0 | 0 | 0 | 0 | 100 |
| CTONG2027828 | 0 | 0 | 0 | 0 | 0 | 100 |
| CTONG2027959 | 0 | 0 | 0 | 0 | 0 | 72.408 |
| CTONG2028097 | 0 | 0 | 0 | 0 | 0 | 100 |
| CTONG2028124 | 0 | 0 | 0 | 0 | 0 | 0.936 |
| CTONG2028208 | 0 | 0 | 0 | 0 | 0 | 6.596 |
| CTONG2028309 | 0 | 0 | 0 | 0 | 0 | 13.671 |
| CTONG2028486 | 0 | 0 | 0 | 0 | 0 | 64.609 |
| CTONG2028518 | 0 | 0 | 0 | 0 | 0 | 100 |
| CTONG2028687 | 0 | 0 | 0 | 0 | 0 | 100 |
| CTONG2028758 | 0 | 0 | 0 | 0 | 0 | 29.955 |
| CTONG3000657 | 0 | 0 | 0 | 0 | 0 | 7.226 |
| CTONG3000686 | 0 | 0 | 0 | 0 | 0 | 100 |
| CTONG3000707 | 0 | 0 | 0 | 0 | 0 | 100 |
| CTONG3000896 | 0 | 0 | 0 | 0 | 0 | 100 |
| CTONG3001123 | 0 | 0 | 0 | 0 | 0 | 14.616 |
| CTONG3001420 | 0 | 0 | 0 | 0 | 0 | 51.138 |
| CTONG3001501 | 0 | 0 | 0 | 0 | 0 | 100 |
| CTONG3001560 | 0 | 0 | 0 | 0 | 0 | 100 |
| CTONG3001605 | 0 | 0 | 0 | 0 | 0 | 100 |
| CTONG3001746 | 0 | 0 | 0 | 0 | 0 | 26.645 |
| CTONG3002020 | 0 | 0 | 0 | 0 | 0 | 100 |
| CTONG3002127 | 0 | 0 | 0 | 0 | 0 | 62.446 |
| CTONG3002370 | 0 | 0 | 0 | 0 | 0 | 100 |
| CTONG3002412 | 0 | 0 | 0 | 0 | 0 | 19.932 |
| CTONG3002433 | 0 | 0 | 0 | 0 | 0 | 100 |
| CTONG3002518 | 0 | 0 | 0 | 0 | 0 | 15.716 |
| CTONG3002552 | 0 | 0 | 0 | 0 | 0 | 100 |
| CTONG3002588 | 0 | 0 | 0 | 0 | 0 | 100 |
| CTONG3002674 | 0 | 0 | 0 | 0 | 0 | 41.611 |
| CTONG3002728 | 0 | 0 | 0 | 0 | 0 | 100 |
| CTONG3002835 | 0 | 0 | 0 | 7.713 | 0 | 4.093 |
| CTONG3002909 | 0 | 0 | 0 | 0 | 0 | 100 |
| CTONG3002947 | 0 | 0 | 0 | 0 | 0 | 100 |
| CTONG3002983 | 0 | 0 | 0 | 0 | 0 | 100 |
| CTONG3003165 | 0 | 0 | 0 | 0 | 0 | 100 |
| CTONG3003179 | 0 | 0 | 0 | 0 | 0 | 100 |
| CTONG3003483 | 0 | 0 | 0 | 0 | 0 | 100 |
| CTONG3003553 | 0 | 0 | 0 | 0 | 0 | 100 |
| CTONG3003598 | 0 | 0 | 0 | 0 | 0 | 100 |
| CTONG3003652 | 0 | 0 | 0 | 0 | 0 | 100 |
| CTONG3003654 | 0 | 0 | 0 | 0 | 0 | 100 |
| CTONG3003669 | 0 | 0 | 0 | 0 | 0 | 100 |
| CTONG3003737 | 0 | 0 | 0 | 0 | 0 | 100 |
| CTONG3003905 | 0 | 0 | 0 | 0 | 0 | 36.474 |
| CTONG3003972 | 0 | 0 | 0 | 0 | 0 | 51.706 |
| CTONG3004072 | 0 | 0 | 0 | 0 | 0 | 36.356 |
| CTONG3004317 | 0 | 0 | 0 | 0 | 0 | 60.963 |
| CTONG3004397 | 0 | 0 | 0 | 0 | 0 | 100 |
| CTONG3004550 | 0 | 0 | 0 | 0 | 0 | 100 |
| CTONG3004576 | 0 | 0 | 0 | 0 | 0 | 62.446 |
| CTONG3004607 | 0 | 0 | 0 | 0 | 0 | 100 |
| CTONG3004712 | 0 | 0 | 0 | 0 | 0 | 100 |
| CTONG3004726 | 0 | 0 | 0 | 0 | 0 | 31.543 |
| CTONG3005325 | 0 | 0 | 0 | 0 | 0 | 100 |
| CTONG3005648 | 0 | 0 | 0 | 0 | 0 | 100 |
| CTONG3005713 | 0 | 0 | 0 | 0 | 0 | 100 |
| CTONG3005803 | 0 | 0 | 0 | 0 | 0 | 100 |
| CTONG3005813 | 0 | 0 | 0 | 0 | 0 | 72.408 |
| CTONG3006067 | 0 | 0 | 0 | 0 | 0 | 74.021 |
| CTONG3006073 | 0 | 0 | 0 | 0 | 0 | 100 |
| CTONG3006186 | 0 | 0 | 0 | 0 | 0 | 100 |
| CTONG3006629 | 0 | 0 | 0 | 0 | 0 | 59.989 |
| CTONG3006650 | 0 | 0 | 0 | 0 | 0 | 100 |
| CTONG3006659 | 0 | 0 | 0 | 0 | 0 | 100 |
| CTONG3007244 | 0 | 0 | 0 | 0 | 0 | 100 |
| CTONG3007444 | 0 | 0 | 0 | 0 | 0 | 100 |
| CTONG3007528 | 0 | 0 | 0 | 0 | 0 | 100 |
| CTONG3007586 | 0 | 0 | 0 | 0 | 0 | 100 |
| CTONG3007870 | 0 | 0 | 0 | 0 | 0 | 100 |
| CTONG3008223 | 0 | 0 | 0 | 0 | 0 | 100 |
| CTONG3008252 | 0 | 0 | 0 | 0 | 0 | 100 |
| CTONG3008258 | 0 | 0 | 0 | 0 | 0 | 100 |
| CTONG3008457 | 0 | 0 | 0 | 0 | 0 | 100 |
| CTONG3008496 | 0 | 0 | 0 | 0 | 0 | 100 |
| CTONG3008566 | 0 | 0 | 0 | 0 | 0 | 100 |
| CTONG3008639 | 0 | 0 | 0 | 0 | 0 | 100 |
| CTONG3008831 | 0 | 0 | 0 | 0 | 0 | 100 |
| CTONG3008894 | 0 | 0 | 0 | 0 | 0 | 2.708 |
| CTONG3008951 | 0 | 0 | 0 | 0 | 0 | 100 |
| CTONG3008959 | 0 | 0 | 0 | 0 | 0 | 100 |
| CTONG3009028 | 0 | 0 | 0 | 0 | 0 | 5.995 |
| CTONG3009227 | 0 | 0 | 0 | 0 | 0 | 100 |
| CTONG3009239 | 0 | 0 | 0 | 0 | 0 | 5.378 |
| CTONG3009287 | 0 | 0 | 0 | 0 | 0 | 100 |
| CTONG3009328 | 0 | 0 | 0 | 0 | 0 | 44.674 |
| CTONG3009385 | 0 | 0 | 0 | 0 | 0 | 100 |
| D30ST2002068 | 0 | 0 | 0 | 1.508 | 0 | 0 |
| D30ST3000169 | 20.553 | 0 | 0 | 0 | 0 | 0 |
| D90ST2002397 | 0 | 0 | 62.163 | 0 | 0 | 0 |
| DFNES1000150 | 0 | 0 | 0 | 0 | 0 | 2.080 |
| DFNES1000185 | 55.393 | 0 | 0 | 0 | 0 | 0 |
| DFNES2000011 | 0 | 11.300 | 0 | 0 | 0 | 0 |
| DFNES2000335 | 0 | 0 | 0 | 0 | 0 | 8.824 |
| DFNES2004371 | 0 | 0 | 0 | 0 | 0 | 5.877 |
| DFNES2005690 | 0 | 0 | 0 | 0 | 0 | 9.456 |
| DFNES2005766 | 0 | 0 | 0 | 12.871 | 0 | 0 |
| DFNES2007299 | 0 | 0 | 0 | 0 | 0 | 6.117 |
| DFNES2007634 | 0 | 18.368 | 0 | 0 | 0 | 0 |
| DFNES2007757 | 0 | 77.810 | 0 | 0 | 0 | 0 |
| FCBBF1000023 | 0 | 0 | 0 | 0 | 0 | 13.102 |
| FCBBF1000024 | 0 | 0 | 0 | 0 | 0 | 12.268 |
| FCBBF1000027 | 0 | 0 | 0 | 0 | 0 | 2.047 |
| FCBBF1000053 | 0 | 0 | 0 | 0 | 0 | 5.041 |
| FCBBF1000061 | 0 | 0 | 0 | 0 | 0 | 8.761 |
| FCBBF1000197 | 0 | 0 | 0 | 0 | 0 | 9.948 |
| FCBBF1000294 | 0 | 0 | 0 | 0 | 0 | 4.011 |
| FCBBF1000466 | 0 | 0 | 0 | 0 | 0 | 5.931 |
| FCBBF1000574 | 0 | 0 | 0 | 0 | 0 | 3.866 |
| FCBBF2000259 | 0 | 0 | 0 | 0 | 0 | 11.138 |
| FCBBF2000885 | 0 | 0 | 0 | 0 | 0 | 17.154 |
| FCBBF3000110 | 0 | 0 | 0 | 0 | 0 | 12.029 |
| FCBBF3001470 | 0 | 28.053 | 0 | 0 | 0 | 2.528 |
| FCBBF3001818 | 0 | 0 | 0 | 0 | 0 | 16.966 |
| FCBBF3003800 | 0 | 0 | 0 | 0 | 0 | 1.467 |
| FCBBF3004261 | 0 | 0 | 0 | 0 | 0 | 16.849 |
| FCBBF3004473 | 0 | 0 | 0 | 0 | 0 | 4.280 |
| FCBBF3005320 | 0 | 0 | 0 | 0 | 0 | 5.081 |
| FCBBF3005497 | 0 | 0 | 0 | 0 | 0 | 1.464 |
| FCBBF3012347 | 0 | 0 | 0 | 0 | 0 | 4.088 |
| FCBBF3016134 | 0 | 0 | 0 | 0 | 0 | 19.389 |
| FCBBF3017024 | 0 | 0 | 0 | 0 | 0 | 9.546 |
| FCBBF3023368 | 0 | 0 | 0 | 0 | 0 | 9.140 |
| FCBBF3023667 | 0 | 0 | 8.826 | 0.932 | 0 | 0 |
| FCBBF3028244 | 0 | 0 | 0 | 0 | 0 | 1.729 |
| FCBBF4000446 | 0 | 0 | 0 | 0 | 0 | 2.798 |
| FCBBF4000500 | 0 | 0 | 0 | 0 | 0 | 16.324 |
| FEBRA2000105 | 0 | 0 | 0 | 15.106 | 0 | 1.336 |
| FEBRA2000210 | 0 | 0 | 0 | 4.963 | 59.337 | 0 |
| FEBRA2000228 | 0 | 0 | 0 | 0 | 0 | 7.357 |
| FEBRA2000377 | 0 | 0 | 0 | 0 | 0 | 18.632 |
| FEBRA2000510 | 0 | 0 | 0 | 0 | 0 | 6.872 |
| FEBRA2000733 | 0 | 0 | 3.733 | 0 | 0 | 0 |
| FEBRA2000740 | 0 | 23.371 | 0 | 0 | 0 | 6.319 |
| FEBRA2001294 | 0 | 0 | 0 | 0 | 0 | 4.501 |
| FEBRA2001581 | 0 | 0 | 0 | 0 | 0 | 7.637 |
| FEBRA2002527 | 0 | 0 | 0 | 0 | 0 | 5.334 |
| FEBRA2002933 | 0 | 0 | 0 | 0 | 0 | 0.689 |
| FEBRA2003100 | 0 | 0 | 0 | 0 | 0 | 1.227 |
| FEBRA2003750 | 0 | 0 | 0 | 0 | 0 | 6.800 |
| FEBRA2003822 | 0 | 0 | 0 | 38.613 | 0 | 0 |
| FEBRA2003833 | 0 | 0 | 0 | 0 | 0 | 6.441 |
| FEBRA2004042 | 0 | 0 | 0 | 0 | 0 | 3.951 |
| FEBRA2004224 | 0 | 0 | 0 | 8.128 | 0 | 0 |
| FEBRA2004412 | 0 | 0 | 0 | 0 | 0 | 10.937 |
| FEBRA2004818 | 0 | 28.140 | 0 | 0 | 0 | 0 |
| FEBRA2005416 | 0 | 0 | 0 | 0 | 0 | 2.000 |
| FEBRA2005476 | 0 | 0 | 0 | 0 | 0 | 14.554 |
| FEBRA2005824 | 0 | 0 | 0 | 0 | 0 | 1.389 |
| FEBRA2005995 | 0 | 0 | 0 | 0 | 0 | 2.611 |
| FEBRA2006112 | 0 | 0 | 0 | 0 | 0 | 12.294 |
| FEBRA2006270 | 0 | 0 | 0 | 0 | 0 | 6.532 |
| FEBRA2006372 | 0 | 0 | 0 | 0 | 0 | 2.501 |
| FEBRA2006401 | 0 | 0 | 5.560 | 0 | 0 | 0 |
| FEBRA2006485 | 0 | 0 | 0 | 21.356 | 0 | 5.666 |
| FEBRA2007544 | 0 | 0 | 0 | 0 | 0 | 4.560 |
| FEBRA2007622 | 0 | 0 | 0 | 0 | 0 | 3.843 |
| FEBRA2007801 | 0 | 0 | 0 | 0 | 0 | 4.598 |
| FEBRA2007880 | 0 | 0 | 0 | 0 | 0 | 7.010 |
| FEBRA2007900 | 0 | 0 | 0 | 0 | 0 | 14.437 |
| FEBRA2008081 | 0 | 0 | 0 | 0 | 0 | 1.319 |
| FEBRA2008087 | 0 | 0 | 0 | 1.258 | 0 | 0 |
| FEBRA2008201 | 0 | 0 | 0 | 16.836 | 0 | 0 |
| FEBRA2008692 | 0 | 0 | 0 | 0 | 0 | 13.709 |
| FEBRA2009022 | 0 | 0 | 0 | 0 | 0 | 12.440 |
| FEBRA2009419 | 0 | 0 | 0 | 0 | 0 | 7.383 |
| FEBRA2013699 | 0 | 0 | 0 | 0 | 0 | 26.659 |
| FEBRA2015085 | 0 | 0 | 0 | 0 | 0 | 5.680 |
| FEBRA2018407 | 0 | 0 | 0 | 0 | 0 | 30.174 |
| FEBRA2019711 | 0 | 0 | 0 | 29.691 | 0 | 0 |
| FEBRA2022055 | 0 | 0 | 0 | 3.736 | 0 | 0 |
| FEBRA2023399 | 0 | 0 | 0 | 0 | 0 | 16.349 |
| FEBRA2025427 | 0 | 0 | 0 | 0 | 0 | 9.234 |
| FEBRA2028516 | 0 | 0 | 0 | 0 | 0 | 4.261 |
| FELIV1000153 | 0 | 0 | 0 | 0 | 0 | 0.614 |
| HCASM1000115 | 0 | 0 | 0 | 0 | 0 | 1.931 |
| HCASM2000016 | 31.346 | 0 | 0 | 0 | 0 | 1.390 |
| HCASM2000363 | 0 | 0 | 15.065 | 0 | 0 | 1.267 |
| HCHON1000030 | 0 | 0 | 0 | 2.547 | 0 | 2.365 |
| HCHON2000028 | 0 | 0 | 0 | 0 | 0 | 2.955 |
| HCHON2000056 | 0 | 0 | 0 | 0 | 0 | 0.528 |
| HCHON2000087 | 0 | 12.785 | 0 | 0 | 0 | 0 |
| HCHON2000160 | 0 | 0 | 0 | 0 | 0 | 3.750 |
| HCHON2000226 | 0 | 0 | 0 | 0 | 0 | 1.502 |
| HCHON2000295 | 0 | 0 | 0 | 0 | 0 | 0.816 |
| HCHON2000364 | 0 | 0 | 9.849 | 0 | 0 | 0 |
| HCHON2000473 | 0 | 0 | 0 | 0 | 0 | 21.805 |
| HCHON2000475 | 0 | 27.507 | 0 | 0 | 0 | 4.958 |
| HCHON2000508 | 0 | 0 | 0 | 0 | 0 | 9.042 |
| HCHON2000626 | 0 | 0 | 26.041 | 0 | 0 | 0 |
| HCHON2000738 | 0 | 0 | 0 | 0 | 0 | 5.546 |
| HCHON2000751 | 0 | 0 | 0 | 0 | 0 | 6.650 |
| HCHON2000826 | 0 | 0 | 0 | 0 | 0 | 1.333 |
| HCHON2001039 | 0 | 0 | 0 | 0 | 0 | 2.078 |
| HCHON2001050 | 0 | 0 | 0 | 0 | 0 | 5.399 |
| HCHON2001200 | 0 | 0 | 0 | 0 | 0 | 4.028 |
| HCHON2001217 | 0 | 0 | 0 | 0 | 0 | 3.877 |
| HCHON2001359 | 0 | 17.594 | 18.861 | 0 | 0 | 4.757 |
| HCHON2001407 | 0 | 0 | 0 | 0 | 0 | 4.412 |
| HCHON2001535 | 0 | 0 | 0 | 0 | 0 | 17.176 |
| HCHON2001598 | 0 | 50.212 | 0 | 0 | 0 | 0 |
| HCHON2004002 | 0 | 0 | 17.393 | 0 | 0 | 1.462 |
| HHDPC1000118 | 0 | 0 | 0 | 0 | 0 | 3.904 |
| HHDPC2000070 | 0 | 0 | 0 | 0 | 0 | 17.924 |
| HHDPC2000149 | 0 | 0 | 0 | 0 | 0 | 8.322 |
| HHDPC2000456 | 0 | 0 | 34.395 | 0 | 0 | 5.784 |
| HHDPC2000572 | 0 | 0 | 0 | 0 | 0 | 12.194 |
| HHDPC2003439 | 21.364 | 0 | 0 | 0 | 0 | 0.474 |
| HHDPC2003983 | 0 | 5.755 | 0 | 0 | 0 | 1.037 |
| HHDPC2007267 | 0 | 0 | 0 | 0 | 0 | 4.547 |
| HLUNG1000055 | 0 | 0 | 0 | 0 | 0 | 2.016 |
| HLUNG1000076 | 0 | 0 | 0 | 5.906 | 0 | 0 |
| HLUNG1000099 | 0 | 0 | 0 | 0 | 0 | 20.103 |
| HLUNG2000004 | 0 | 0 | 0 | 17.758 | 0 | 0 |
| HLUNG2000412 | 0 | 0 | 0 | 0 | 0 | 4.987 |
| HLUNG2001146 | 0 | 0 | 0 | 0 | 0 | 19.527 |
| HLUNG2002811 | 0 | 50.355 | 0 | 0 | 0 | 4.538 |
| HLUNG2004037 | 0 | 0 | 0 | 0 | 0 | 28.434 |
| HLUNG2004159 | 0 | 0 | 0 | 0 | 0 | 10.131 |
| HLUNG2008479 | 0 | 0 | 0 | 0 | 0 | 33.679 |
| HLUNG2008637 | 0 | 34.908 | 0 | 0 | 0 | 0 |
| HLUNG2009225 | 0 | 0 | 0 | 0 | 0 | 14.045 |
| HLUNG2017262 | 0 | 0 | 0 | 0 | 0 | 5.907 |
| HSYRA1000062 | 0 | 0 | 0 | 0 | 0 | 5.585 |
| HSYRA1000119 | 0 | 0 | 0 | 0 | 0 | 1.713 |
| HSYRA1000152 | 0 | 0 | 0 | 0 | 0 | 4.443 |
| HSYRA2000135 | 0 | 0 | 0 | 0 | 0 | 7.367 |
| HSYRA2000159 | 0 | 0 | 0 | 0 | 10.120 | 0.898 |
| HSYRA2000248 | 0 | 0 | 0 | 0 | 0 | 1.266 |
| HSYRA2000255 | 0 | 0 | 0 | 0 | 0 | 2.507 |
| HSYRA2000743 | 0 | 0 | 0 | 0 | 0 | 1.441 |
| HSYRA2001138 | 0 | 0 | 0 | 1.790 | 0 | 0 |
| HSYRA2001225 | 0 | 0 | 0 | 0 | 0 | 2.754 |
| HSYRA2001476 | 0 | 0 | 0 | 3.389 | 0 | 1.798 |
| HSYRA2001567 | 0 | 0 | 0 | 0 | 0 | 4.174 |
| HSYRA2001574 | 0 | 0 | 0 | 5.282 | 0 | 0 |
| HSYRA2001595 | 0 | 0 | 0 | 0 | 0 | 4.244 |
| HSYRA2001621 | 0 | 3.792 | 0 | 0 | 30.806 | 0 |
| HSYRA2001631 | 0 | 0 | 0 | 0 | 0 | 10.860 |
| HSYRA2007650 | 0 | 0 | 0 | 33.393 | 0 | 0 |
| IMR321000193 | 0 | 0 | 0 | 30.814 | 0 | 0 |
| IMR321000219 | 0 | 5.800 | 0 | 0 | 0 | 1.568 |
| IMR321000253 | 0 | 0 | 0 | 0 | 0 | 3.794 |
| IMR322000518 | 0 | 0 | 0 | 21.562 | 0 | 0 |
| IMR322000730 | 0 | 2.832 | 0 | 7.698 | 0 | 0 |
| IMR322000935 | 0 | 0 | 0 | 0 | 0 | 2.789 |
| IMR322001049 | 0 | 0 | 0 | 0 | 0 | 10.789 |
| IMR322001218 | 0 | 0 | 0 | 0 | 0 | 2.085 |
| IMR322001332 | 0 | 0 | 0 | 18.692 | 0 | 0 |
| IMR322001435 | 0 | 0 | 0 | 0 | 0 | 3.500 |
| IMR322001584 | 0 | 0 | 0 | 8.764 | 0 | 0 |
| IMR322001600 | 0 | 0 | 0 | 0 | 0 | 0.300 |
| KIDNE2000085 | 0 | 0 | 0 | 0 | 0 | 1.915 |
| KIDNE2000252 | 0 | 0 | 0 | 0 | 0 | 3.184 |
| KIDNE2000266 | 0 | 0 | 0 | 0 | 0 | 15.685 |
| KIDNE2000403 | 34.697 | 0 | 0 | 0 | 0 | 4.616 |
| KIDNE2000574 | 0 | 0 | 0 | 0 | 0 | 1.394 |
| KIDNE2000777 | 0 | 0 | 0 | 53.588 | 0 | 0 |
| KIDNE2000947 | 0 | 0 | 0 | 0 | 0 | 9.415 |
| KIDNE2001373 | 0 | 0 | 0 | 50.020 | 0 | 0 |
| KIDNE2001467 | 0 | 0 | 0 | 0 | 0 | 2.913 |
| KIDNE2001847 | 0 | 0 | 0 | 0 | 0 | 6.778 |
| KIDNE2002252 | 0 | 0 | 0 | 0 | 0 | 4.060 |
| KIDNE2003316 | 0 | 0 | 0 | 0 | 0 | 14.092 |
| KIDNE2004411 | 0 | 0 | 0 | 0 | 0 | 15.872 |
| KIDNE2005676 | 0 | 0 | 0 | 0 | 0 | 10.481 |
| KIDNE2006014 | 0 | 0 | 0 | 0 | 0 | 5.530 |
| KIDNE2006248 | 0 | 0 | 0 | 0 | 0 | 1.737 |
| KIDNE2007328 | 37.159 | 0 | 0 | 0 | 0 | 3.296 |
| KIDNE2007910 | 0 | 0 | 0 | 0 | 0 | 16.879 |
| KIDNE2008048 | 0 | 0 | 0 | 0 | 0 | 1.998 |
| KIDNE2009367 | 0 | 0 | 0 | 0 | 0 | 2.808 |
| KIDNE2011508 | 0 | 0 | 0 | 0 | 0 | 34.822 |
| KIDNE2012710 | 0 | 0 | 0 | 0 | 0 | 35.274 |
| KIDNE2013845 | 0 | 0 | 0 | 0 | 0 | 2.082 |
| KIDNE2014290 | 0 | 0 | 0 | 0 | 0 | 9.140 |
| KIDNE2014325 | 0 | 0 | 0 | 0 | 0 | 7.046 |
| KIDNE2016371 | 0 | 0 | 0 | 0 | 0 | 16.781 |
| KIDNE2017040 | 0 | 0 | 0 | 23.608 | 0 | 0 |
| LIVER2000446 | 0 | 0 | 0 | 28.879 | 0 | 0 |
| LIVER2002842 | 0 | 0 | 0 | 0 | 0 | 3.556 |
| LIVER2006006 | 0 | 0 | 0 | 0 | 0 | 2.649 |
| MAMGL1000032 | 0 | 0 | 3.569 | 0 | 0 | 0 |
| MAMGL1000035 | 0 | 0 | 0 | 1.414 | 0 | 1.500 |
| MESAN1000080 | 0 | 0 | 31.630 | 0 | 0 | 0 |
| MESAN1000126 | 0 | 0 | 39.561 | 0 | 0 | 0 |
| MESAN2000092 | 0 | 0 | 0 | 0 | 0 | 16.482 |
| MESAN2000149 | 0 | 0 | 0 | 0 | 0 | 4.575 |
| MESAN2000267 | 0 | 8.462 | 9.072 | 0 | 0 | 0 |
| MESAN2000337 | 0 | 0 | 0 | 0 | 0 | 14.768 |
| MESAN2000572 | 0 | 0 | 0 | 0 | 0 | 7.617 |
| MESAN2000815 | 0 | 0 | 0 | 0 | 0 | 29.082 |
| MESAN2001154 | 55.958 | 0 | 0 | 0 | 0 | 0 |
| MESAN2002086 | 0 | 0 | 0 | 0 | 0 | 0.775 |
| MESAN2002790 | 0 | 0 | 0 | 0 | 0 | 9.111 |
| MESAN2002940 | 0 | 0 | 0 | 0 | 0 | 5.924 |
| MESAN2005633 | 0 | 0 | 0 | 0 | 0 | 31.974 |
| MESAN2005766 | 0 | 0 | 0 | 0 | 0 | 1.837 |
| MESAN2005958 | 0 | 0 | 0 | 0 | 0 | 5.016 |
| MESAN2006401 | 0 | 0 | 0 | 0 | 0 | 3.369 |
| MESAN2006563 | 0 | 14.270 | 0 | 0 | 0 | 2.572 |
| MESAN2009019 | 0 | 0 | 0 | 0 | 0 | 14.550 |
| MESAN2011627 | 0 | 0 | 0 | 0 | 0 | 7.010 |
| MESAN2013284 | 0 | 0 | 0 | 0 | 0 | 4.575 |
| MESAN2015515 | 0 | 0 | 58.849 | 0 | 0 | 0 |
| NB9N41000047 | 0 | 0 | 0 | 0 | 0 | 4.895 |
| NB9N41000135 | 0 | 0 | 0 | 0 | 0 | 4.131 |
| NHNPC2000187 | 0 | 0 | 10.025 | 0 | 0 | 0 |
| NHNPC2000206 | 0 | 0 | 0 | 0 | 0 | 8.953 |
| NHNPC2001931 | 0 | 19.725 | 0 | 0 | 0 | 0 |
| NT2NE1000024 | 0 | 0 | 0 | 26.952 | 0 | 7.150 |
| NT2NE1000163 | 0 | 0 | 0 | 0 | 0 | 1.509 |
| NT2NE2000056 | 0 | 0 | 0 | 0 | 0 | 5.122 |
| NT2NE2000174 | 0 | 0 | 0 | 2.679 | 0 | 0 |
| NT2NE2000260 | 0 | 7.489 | 2.676 | 6.785 | 10.140 | 0 |
| NT2NE2000327 | 0 | 0 | 0 | 0 | 0 | 14.057 |
| NT2NE2000384 | 0 | 0 | 0 | 0 | 0 | 4.287 |
| NT2NE2000575 | 10.097 | 0 | 5.326 | 0 | 0 | 1.343 |
| NT2NE2000707 | 0 | 0 | 0 | 0 | 0 | 1.247 |
| NT2NE2000763 | 0 | 0 | 0 | 0 | 0 | 4.470 |
| NT2NE2000913 | 0 | 0 | 0 | 0 | 0 | 13.739 |
| NT2NE2000963 | 0 | 4.741 | 0 | 3.221 | 0 | 0 |
| NT2NE2001176 | 0 | 23.604 | 0 | 0 | 0 | 0 |
| NT2NE2001397 | 0 | 0 | 0 | 0 | 0 | 24.497 |
| NT2NE2001617 | 0 | 0 | 0 | 31.851 | 0 | 0 |
| NT2NE2001793 | 0 | 0 | 0 | 0 | 0 | 5.796 |
| NT2NE2004716 | 0 | 39.665 | 0 | 0 | 0 | 0 |
| NT2NE2005688 | 0 | 0 | 0 | 0 | 0 | 2.782 |
| NT2NE2005720 | 0 | 0 | 0 | 65.954 | 0 | 0 |
| NT2NE2006075 | 0 | 0 | 0 | 0 | 0 | 29.344 |
| NT2NE2016971 | 0 | 0 | 0 | 0 | 0 | 25.501 |
| NT2RI1000048 | 0 | 17.547 | 0 | 0 | 0 | 0 |
| NT2RI1000127 | 0 | 0 | 0 | 0 | 0 | 3.381 |
| NT2RI2000255 | 0 | 0 | 26.517 | 0 | 0 | 2.229 |
| NT2RI2000263 | 0 | 0 | 0 | 0 | 0 | 3.186 |
| NT2RI2000344 | 0 | 0 | 0 | 0 | 0 | 1.508 |
| NT2RI2000578 | 0 | 0 | 0 | 2.348 | 0 | 0.623 |
| NT2RI2000671 | 0 | 0 | 0 | 7.384 | 0 | 1.959 |
| NT2RI2000727 | 10.866 | 0 | 0 | 0 | 0 | 2.891 |
| NT2RI2001342 | 0 | 0 | 0 | 0 | 0 | 2.940 |
| NT2RI2001540 | 4.782 | 4.705 | 1.261 | 1.599 | 0 | 0.106 |
| NT2RI2001657 | 0 | 0 | 0 | 0 | 0 | 0.997 |
| NT2RI2001859 | 0 | 0 | 0 | 0 | 0 | 3.615 |
| NT2RI2002091 | 0.563 | 0.554 | 1.783 | 0.847 | 0 | 1.224 |
| NT2RI2002117 | 0 | 0 | 0 | 0 | 0 | 8.775 |
| NT2RI2002243 | 0 | 0 | 72.871 | 0 | 0 | 0 |
| NT2RI2002316 | 0 | 0 | 0 | 0 | 0 | 1.493 |
| NT2RI2002391 | 0 | 0 | 0 | 0 | 0 | 1.510 |
| NT2RI2002530 | 0 | 0 | 0 | 0 | 0 | 11.243 |
| NT2RI2002654 | 0 | 0 | 0 | 4.124 | 0 | 0 |
| NT2RI2002729 | 0 | 0 | 0 | 0 | 0 | 3.917 |
| NT2RI2002865 | 0 | 0 | 0 | 47.605 | 0 | 0 |
| NT2RI2003019 | 0 | 0 | 0 | 0 | 0 | 19.482 |
| NT2RI2003051 | 0 | 0 | 0 | 0 | 0 | 3.814 |
| NT2RI2003304 | 0 | 0 | 5.814 | 0 | 0 | 4.399 |
| NT2RI2003407 | 0 | 0 | 0 | 0 | 0 | 2.254 |
| NT2RI2003420 | 0 | 0 | 0 | 0 | 0 | 2.868 |
| NT2RI2003695 | 0 | 0 | 0 | 0 | 0 | 2.933 |
| NT2RI2003738 | 0 | 0 | 0 | 0 | 0 | 4.887 |
| NT2RI2004290 | 0 | 0 | 0 | 0 | 0 | 39.735 |
| NT2RI2004304 | 0 | 0 | 0 | 0 | 0 | 7.756 |
| NT2RI2004884 | 0 | 0 | 0 | 0 | 64.855 | 0 |
| NT2RI2005116 | 0 | 0 | 0 | 0 | 0 | 4.762 |
| NT2RI2005315 | 0 | 0 | 0 | 0 | 0 | 50.616 |
| NT2RI2005335 | 0 | 0 | 0 | 0 | 0 | 4.326 |
| NT2RI2005353 | 48.380 | 0 | 0 | 0 | 0 | 0 |
| NT2RI2005358 | 0 | 0 | 0 | 0 | 0 | 38.226 |
| NT2RI2005647 | 0 | 0 | 0 | 0 | 0 | 6.158 |
| NT2RI2005713 | 0 | 30.561 | 0 | 0 | 0 | 5.509 |
| NT2RI2005851 | 0 | 0 | 0 | 0 | 0 | 6.941 |
| NT2RI2006506 | 0 | 0 | 0 | 0 | 0 | 25.091 |
| NT2RI2006647 | 0 | 0 | 0 | 0 | 0 | 8.541 |
| NT2RI2006735 | 0 | 0 | 0 | 0 | 0 | 29.314 |
| NT2RI2006825 | 0 | 0 | 0 | 0 | 0 | 10.213 |
| NT2RI2006853 | 0 | 0 | 0 | 15.747 | 0 | 12.533 |
| NT2RI2006856 | 0 | 0 | 0 | 0 | 39.317 | 0 |
| NT2RI2007133 | 0 | 0 | 8.691 | 0 | 0 | 0 |
| NT2RI2007384 | 0 | 0 | 0 | 0 | 0 | 0.807 |
| NT2RI2007498 | 0 | 0 | 9.034 | 0 | 0 | 0 |
| NT2RI2007572 | 0 | 0 | 0 | 5.246 | 0 | 4.175 |
| NT2RI2007589 | 0 | 0 | 0 | 7.497 | 0 | 0 |
| NT2RI2007593 | 0 | 0 | 0 | 0 | 0 | 6.137 |
| NT2RI2008141 | 0 | 0 | 0 | 0 | 0 | 3.983 |
| NT2RI2008336 | 16.825 | 0 | 0 | 0 | 0 | 0.746 |
| NT2RI2008396 | 0 | 0 | 0 | 0 | 0 | 4.105 |
| NT2RI2008481 | 0 | 0 | 0 | 5.192 | 0 | 0 |
| NT2RI2008714 | 0 | 0 | 0 | 0 | 0 | 27.330 |
| NT2RI2008724 | 0 | 0 | 0 | 0 | 0 | 3.421 |
| NT2RI2008749 | 0 | 0 | 0 | 0 | 0 | 1.053 |
| NT2RI2008942 | 0 | 0 | 0 | 0 | 0 | 1.953 |
| NT2RI2009037 | 0 | 0 | 0 | 0 | 0 | 3.140 |
| NT2RI2009173 | 46.845 | 0 | 0 | 0 | 0 | 4.155 |
| NT2RI2009233 | 0 | 0 | 0 | 0 | 0 | 8.402 |
| NT2RI2009239 | 58.704 | 0 | 0 | 0 | 0 | 0 |
| NT2RI2009406 | 0 | 0 | 0 | 0 | 0 | 5.240 |
| NT2RI2009583 | 0 | 0 | 0 | 0 | 0 | 0.833 |
| NT2RI2012350 | 0 | 0 | 0 | 0 | 33.597 | 0 |
| NT2RI2015342 | 0 | 0 | 0 | 0 | 0 | 14.010 |
| NT2RI2018448 | 0 | 0 | 0 | 44.206 | 0 | 0 |
| NT2RI2018883 | 0 | 0 | 0 | 0 | 0 | 50.616 |
| NT2RI3003738 | 0 | 0 | 0 | 0 | 0 | 33.781 |
| NT2RI3006284 | 0 | 0 | 0 | 0 | 0 | 3.854 |
| NT2RI3006673 | 0 | 0 | 0 | 0 | 0 | 18.588 |
| NT2RI3007543 | 0 | 0 | 0 | 0 | 0 | 7.901 |
| NT2RI3007757 | 0 | 0 | 0 | 0 | 0 | 23.555 |
| NT2RP6000005 | 0 | 0 | 0 | 0 | 0 | 8.193 |
| NT2RP6000017 | 0 | 0 | 0 | 0 | 0 | 2.787 |
| NT2RP6000109 | 0 | 39.469 | 0 | 0 | 0 | 0 |
| NT2RP6000123 | 0 | 0 | 8.672 | 2.748 | 0 | 2.187 |
| NT2RP7000076 | 0 | 0 | 0 | 0 | 0 | 9.081 |
| NT2RP7000086 | 0 | 0 | 0 | 0 | 0 | 23.818 |
| NT2RP7000173 | 0 | 0 | 0 | 0 | 0 | 5.177 |
| NT2RP7000271 | 0 | 0 | 0 | 0 | 0 | 5.649 |
| NT2RP7000477 | 0 | 0 | 0 | 0 | 0 | 18.424 |
| NT2RP7000600 | 0 | 0 | 0 | 0 | 0 | 4.127 |
| NT2RP7000906 | 0 | 0 | 0 | 0 | 0 | 2.430 |
| NT2RP7001166 | 0 | 0 | 0 | 5.251 | 0 | 4.179 |
| NT2RP7001283 | 0 | 0 | 0 | 0 | 0 | 3.145 |
| NT2RP7001475 | 0 | 0 | 0 | 0 | 0 | 32.721 |
| NT2RP7001591 | 0 | 0 | 0 | 0 | 0 | 9.685 |
| NT2RP7001678 | 0 | 0 | 0 | 0 | 0 | 28.969 |
| NT2RP7002376 | 0 | 0 | 0 | 0 | 0 | 22.598 |
| NT2RP7002379 | 0 | 0 | 11.152 | 0 | 0 | 4.688 |
| NT2RP7002449 | 0 | 0 | 0 | 0 | 0 | 3.763 |
| NT2RP7002450 | 0 | 0 | 0 | 0 | 0 | 4.971 |
| NT2RP7002594 | 0 | 0 | 0 | 0 | 0 | 25.442 |
| NT2RP7002619 | 0 | 0 | 0 | 0 | 0 | 4.059 |
| NT2RP7002802 | 0 | 0 | 0 | 0 | 0 | 6.807 |
| NT2RP7002982 | 0 | 0 | 0 | 0 | 0 | 7.240 |
| NT2RP7003261 | 0 | 0 | 0 | 0 | 0 | 27.835 |
| NT2RP7003319 | 0 | 18.855 | 0 | 0 | 0 | 0 |
| NT2RP7003632 | 0 | 0 | 0 | 0 | 0 | 24.263 |
| NT2RP7003647 | 0 | 0 | 0 | 0 | 0 | 6.576 |
| NT2RP7003688 | 0 | 0 | 0 | 0 | 0 | 16.504 |
| NT2RP7003960 | 0 | 0 | 0 | 0 | 0 | 3.086 |
| NT2RP7004123 | 0 | 0 | 0 | 0 | 0 | 3.574 |
| NT2RP7004173 | 0 | 0 | 0 | 5.362 | 0 | 0 |
| NT2RP7004196 | 0 | 0 | 0 | 0 | 0 | 2.440 |
| NT2RP7004348 | 0 | 0 | 0 | 0 | 0 | 4.209 |
| NT2RP7004352 | 0 | 0 | 0 | 0 | 0 | 12.653 |
| NT2RP7004373 | 0 | 0 | 0 | 0 | 0 | 2.192 |
| NT2RP7004559 | 0 | 0 | 0 | 59.840 | 0 | 0 |
| NT2RP7004751 | 0 | 0 | 0 | 0 | 0 | 0.872 |
| NT2RP7004911 | 0 | 0 | 0 | 0 | 0 | 3.283 |
| NT2RP7004925 | 0 | 0 | 0 | 0 | 0 | 2.352 |
| NT2RP7004946 | 0 | 0 | 0 | 0 | 0 | 3.207 |
| NT2RP7005750 | 0 | 0 | 0 | 0 | 0 | 6.664 |
| NT2RP7006075 | 0 | 0 | 0 | 0 | 0 | 4.880 |
| NT2RP7006141 | 0 | 0 | 0 | 5.185 | 0 | 0 |
| NT2RP7006188 | 0 | 0 | 0 | 0 | 0 | 19.396 |
| NT2RP7006490 | 0 | 0 | 0 | 0 | 0 | 3.998 |
| NT2RP7006701 | 0 | 0 | 0 | 0 | 0 | 9.364 |
| NT2RP7006717 | 0 | 0 | 0 | 0 | 0 | 8.578 |
| NT2RP7007154 | 0 | 11.784 | 0 | 0 | 0 | 0 |
| NT2RP7007177 | 0 | 0 | 0 | 0 | 0 | 7.609 |
| NT2RP7007610 | 0 | 0 | 0 | 0 | 0 | 5.390 |
| NT2RP7007842 | 0 | 0 | 0 | 0 | 0 | 3.572 |
| NT2RP7007975 | 0 | 0 | 0 | 0 | 0 | 7.625 |
| NT2RP7008161 | 0 | 0 | 0 | 0 | 0 | 11.694 |
| NT2RP7008167 | 38.118 | 0 | 0 | 0 | 0 | 0 |
| NT2RP7008190 | 0 | 0 | 0 | 0 | 0 | 2.471 |
| NT2RP7008487 | 0 | 0 | 0 | 0 | 0 | 28.500 |
| NT2RP7008543 | 0 | 0 | 0 | 0 | 0 | 10.248 |
| NT2RP7009012 | 0 | 0 | 0 | 0 | 0 | 21.118 |
| NT2RP7009087 | 0 | 0 | 0 | 0 | 0 | 9.049 |
| NT2RP7009108 | 0 | 0 | 19.689 | 0 | 0 | 8.277 |
| NT2RP7009147 | 0 | 0 | 0 | 0 | 0 | 2.967 |
| NT2RP7009149 | 0 | 0 | 26.502 | 0 | 0 | 0 |
| NT2RP7009259 | 0 | 0 | 0 | 0 | 0 | 20.929 |
| NT2RP7009373 | 0 | 0 | 0 | 0 | 0 | 14.964 |
| NT2RP7009482 | 0 | 0 | 0 | 0 | 0 | 2.590 |
| NT2RP7011909 | 0 | 5.857 | 0 | 0 | 0 | 0 |
| NT2RP7014005 | 0 | 0 | 0 | 0 | 0 | 10.836 |
| NTONG1000033 | 0 | 0 | 0 | 0 | 0 | 22.820 |
| NTONG1000098 | 0 | 0 | 0 | 0 | 0 | 3.560 |
| NTONG1000257 | 0 | 0 | 0 | 0 | 0 | 10.249 |
| NTONG1000264 | 0 | 0 | 0 | 0 | 0 | 1.815 |
| NTONG2000265 | 0 | 0 | 0 | 0 | 0 | 3.176 |
| NTONG2000977 | 0 | 0 | 21.778 | 0 | 0 | 0 |
| NTONG2001137 | 0 | 23.650 | 0 | 8.035 | 0 | 0 |
| NTONG2001222 | 0 | 17.136 | 0 | 0 | 0 | 0 |
| NTONG2001550 | 0 | 0 | 0 | 0 | 0 | 6.483 |
| NTONG2001567 | 0 | 0 | 6.793 | 6.458 | 0 | 2.856 |
| NTONG2001587 | 0 | 0 | 0 | 0 | 0 | 0.554 |
| NTONG2004918 | 0 | 0 | 0 | 0 | 0 | 12.061 |
| NTONG2005497 | 0 | 0 | 6.071 | 0 | 0 | 0 |
| NTONG2005520 | 0 | 0 | 0 | 0 | 0 | 6.199 |
| NTONG2008483 | 0 | 0 | 0 | 0 | 0 | 2.976 |
| NTONG2008522 | 0 | 0 | 0 | 0 | 0 | 7.299 |
| OCBBF1000086 | 0 | 0 | 0 | 0 | 64.252 | 0 |
| OCBBF1000146 | 0 | 0 | 0 | 0 | 0 | 25.706 |
| OCBBF1000188 | 0 | 0 | 23.069 | 0 | 0 | 3.879 |
| OCBBF1000315 | 0 | 0 | 0 | 0 | 0 | 16.296 |
| OCBBF2000015 | 0 | 0 | 0 | 0 | 0 | 1.474 |
| OCBBF2000522 | 0 | 0 | 0 | 0 | 0 | 4.710 |
| OCBBF2000677 | 0 | 0 | 0 | 0 | 0 | 30.340 |
| OCBBF2000846 | 30.735 | 0 | 0 | 0 | 0 | 0 |
| OCBBF2000986 | 0 | 0 | 21.349 | 0 | 0 | 1.795 |
| OCBBF2001140 | 0 | 0 | 0 | 0 | 0 | 10.530 |
| OCBBF2001492 | 0 | 0 | 15.200 | 0 | 0 | 1.278 |
| OCBBF2001687 | 0 | 39.751 | 0 | 0 | 0 | 0 |
| OCBBF2002086 | 0 | 0 | 0 | 0 | 0 | 6.001 |
| OCBBF2005956 | 0 | 0 | 0 | 0 | 0 | 5.287 |
| OCBBF2006148 | 0 | 0 | 0 | 0 | 0 | 12.613 |
| OCBBF2006151 | 0 | 0 | 0 | 0 | 0 | 10.738 |
| OCBBF2007354 | 0 | 0 | 0 | 0 | 0 | 1.871 |
| OCBBF2007829 | 0 | 0 | 0 | 0 | 0 | 1.023 |
| OCBBF2007892 | 0 | 0 | 0 | 29.908 | 0 | 0 |
| OCBBF2008366 | 0 | 0 | 0 | 84.965 | 0 | 0 |
| OCBBF2009242 | 0 | 0 | 0 | 0 | 0 | 5.274 |
| OCBBF2009424 | 0 | 0 | 0 | 0 | 0 | 13.516 |
| OCBBF2010830 | 0 | 0 | 0 | 0 | 0 | 8.194 |
| OCBBF2010858 | 0 | 0 | 0 | 0 | 0 | 12.407 |
| OCBBF2011073 | 0 | 0 | 0 | 0 | 0 | 6.355 |
| OCBBF2011759 | 0 | 0 | 0 | 0 | 0 | 1.741 |
| OCBBF2013843 | 0 | 0 | 0 | 0 | 0 | 0.995 |
| OCBBF2017791 | 0 | 0 | 0 | 0 | 0 | 2.386 |
| OCBBF2018012 | 0 | 0 | 62.179 | 0 | 0 | 0 |
| OCBBF2018362 | 0 | 0 | 0 | 0 | 0 | 42.846 |
| OCBBF2018827 | 0 | 0 | 0 | 0 | 0 | 9.139 |
| OCBBF2018873 | 0 | 0 | 0 | 0 | 0 | 2.581 |
| OCBBF2027148 | 0 | 0 | 0 | 0 | 0 | 43.340 |
| OCBBF3001333 | 0 | 0 | 0 | 22.556 | 0 | 0 |
| OCBBF3004487 | 0 | 0 | 0 | 0 | 0 | 8.439 |
| PEBLM1000174 | 0 | 0 | 0 | 0 | 0 | 8.907 |
| PEBLM2000222 | 0 | 12.004 | 0 | 0 | 0 | 0 |
| PEBLM2000395 | 0 | 0 | 0 | 0 | 0 | 3.390 |
| PEBLM2004452 | 0 | 0 | 0 | 0 | 0 | 15.083 |
| PEBLM2004666 | 0 | 0 | 0 | 0 | 0 | 6.920 |
| PEBLM2007188 | 0 | 0 | 0 | 0 | 0 | 16.259 |
| PEBLM2007774 | 0 | 0 | 0 | 4.229 | 0 | 0 |
| PEBLM2008106 | 0 | 0 | 0 | 0 | 0 | 19.858 |
| PERIC2007068 | 0 | 0 | 0 | 0 | 0 | 2.874 |
| PLACE5000013 | 0 | 0 | 35.166 | 0 | 0 | 0 |
| PLACE5000159 | 0 | 0 | 0 | 0 | 0 | 4.233 |
| PLACE6000145 | 0 | 0 | 22.959 | 0 | 0 | 0 |
| PLACE6000379 | 0 | 0 | 0 | 2.480 | 0 | 1.645 |
| PLACE6000414 | 0 | 0 | 0 | 0 | 0 | 14.320 |
| PLACE6001064 | 0 | 0 | 0 | 0 | 0 | 1.069 |
| PLACE6001281 | 0 | 0 | 0 | 0 | 0 | 6.412 |
| PLACE6002084 | 15.511 | 0 | 0 | 0 | 0 | 1.376 |
| PLACE6002102 | 0 | 0 | 0 | 0 | 0 | 7.892 |
| PLACE6003383 | 0 | 0 | 26.442 | 0 | 0 | 0 |
| PLACE6003393 | 0 | 0 | 0 | 0 | 0 | 14.143 |
| PLACE6003745 | 0 | 0 | 0 | 0 | 0 | 9.787 |
| PLACE6004101 | 0 | 92.071 | 0 | 0 | 0 | 0 |
| PLACE6004312 | 0 | 12.463 | 0 | 0 | 0 | 1.123 |
| PLACE6005294 | 0 | 0 | 0 | 0 | 0 | 22.427 |
| PLACE6006418 | 0 | 0 | 0 | 38.926 | 0 | 10.327 |
| PLACE6006549 | 0 | 16.501 | 0 | 0 | 0 | 0 |
| PLACE6010077 | 0 | 0 | 19.288 | 0 | 0 | 0 |
| PLACE6013222 | 0 | 0 | 0 | 0 | 0 | 9.178 |
| PLACE6018487 | 0 | 0 | 0 | 4.685 | 0 | 0 |
| PLACE7004103 | 0 | 0 | 0 | 0 | 0 | 12.044 |
| PROST1000033 | 0 | 0 | 0 | 0 | 0 | 20.520 |
| PROST1000097 | 0 | 0 | 0 | 0 | 0 | 1.095 |
| PROST1000199 | 0 | 15.099 | 0 | 0 | 0 | 0 |
| PROST1000220 | 0 | 14.031 | 0 | 0 | 0 | 1.265 |
| PROST1000226 | 0 | 0 | 0 | 0 | 0 | 3.332 |
| PROST1000272 | 0 | 0 | 69.900 | 0 | 0 | 0 |
| PROST1000343 | 0 | 0 | 0 | 0 | 0 | 10.582 |
| PROST1000526 | 0 | 0 | 0 | 0 | 0 | 4.706 |
| PROST2000138 | 0 | 1.791 | 3.840 | 1.217 | 0 | 2.906 |
| PROST2000165 | 0 | 0 | 0 | 0 | 0 | 17.008 |
| PROST2000176 | 0 | 0 | 0 | 17.819 | 0 | 0 |
| PROST2000284 | 0 | 0 | 0 | 0 | 0 | 13.045 |
| PROST2001521 | 0 | 0 | 0 | 8.530 | 0 | 0 |
| PROST2002651 | 0 | 0 | 0 | 0 | 0 | 5.570 |
| PROST2003232 | 0 | 0 | 0 | 0 | 0 | 1.271 |
| PROST2004095 | 0 | 0 | 0 | 0 | 0 | 3.487 |
| PROST2004270 | 0 | 12.152 | 0 | 0 | 0 | 4.381 |
| PROST2004416 | 0 | 0 | 0 | 4.774 | 0 | 1.266 |
| PROST2005039 | 0 | 0 | 0 | 0 | 0 | 25.668 |
| PROST2005604 | 0 | 0 | 0 | 0 | 0 | 17.381 |
| PROST2006060 | 0 | 0 | 0 | 46.875 | 0 | 0 |
| PROST2006260 | 0 | 0 | 0 | 0 | 0 | 30.337 |
| PROST2007612 | 0 | 0 | 0 | 0 | 0 | 5.948 |
| PROST2008271 | 0 | 0 | 0 | 0 | 0 | 7.299 |
| PROST2008360 | 0 | 0 | 0 | 12.636 | 0 | 0 |
| PROST2008489 | 0 | 0 | 14.347 | 0 | 0 | 0 |
| PROST2010782 | 0 | 0 | 0 | 0 | 0 | 0.453 |
| PROST2011410 | 0 | 81.943 | 0 | 0 | 0 | 0 |
| PROST2011577 | 0 | 0 | 22.797 | 0 | 0 | 0 |
| PROST2012140 | 0 | 0 | 0 | 0 | 0 | 34.435 |
| PROST2017529 | 0 | 52.453 | 0 | 0 | 0 | 0 |
| PROST2017692 | 0 | 0 | 0 | 0 | 0 | 1.373 |
| PROST2018090 | 0 | 44.955 | 0 | 0 | 0 | 0 |
| PUAEN1000065 | 0 | 0 | 0 | 4.702 | 0 | 0 |
| PUAEN1000081 | 0 | 0 | 0 | 0 | 0 | 24.817 |
| PUAEN1000164 | 0 | 0 | 0 | 0 | 0 | 2.224 |
| PUAEN2000312 | 0 | 0 | 0 | 0 | 0 | 16.489 |
| PUAEN2000374 | 0 | 0 | 0 | 0 | 0 | 1.788 |
| PUAEN2000535 | 0 | 0 | 0 | 0 | 0 | 2.996 |
| PUAEN2003018 | 0 | 0 | 0 | 0 | 0 | 6.243 |
| PUAEN2009174 | 0 | 0 | 62.793 | 0 | 0 | 0 |
| PUAEN2009348 | 0 | 0 | 0 | 55.441 | 0 | 0 |
| RECTM2000433 | 0 | 0 | 0 | 24.395 | 0 | 0 |
| SKMUS1000022 | 17.481 | 0 | 0 | 0 | 0 | 1.550 |
| SKMUS1000138 | 0 | 0 | 0 | 0.674 | 0 | 0 |
| SKMUS1000176 | 0 | 0 | 0 | 0 | 72.419 | 0 |
| SKMUS1000177 | 0 | 0 | 0 | 16.579 | 0 | 8.797 |
| SKMUS1000186 | 0 | 0 | 0 | 0 | 0 | 1.495 |
| SKMUS2000361 | 44.913 | 0 | 0 | 0 | 0 | 0 |
| SKMUS2000821 | 0 | 16.403 | 0 | 0 | 0 | 0 |
| SKMUS2000954 | 0 | 0 | 0 | 0 | 0 | 3.166 |
| SKMUS2001454 | 0 | 0 | 0 | 0 | 0 | 0.629 |
| SKMUS2001528 | 0 | 0 | 0 | 8.812 | 0 | 0 |
| SKMUS2001634 | 0 | 0 | 0 | 0 | 0 | 7.315 |
| SKNMC1000168 | 0 | 0 | 0 | 0 | 0 | 1.560 |
| SKNMC1000229 | 0 | 0 | 0 | 0 | 0 | 19.583 |
| SKNMC1000251 | 0 | 0 | 0 | 0 | 0 | 26.129 |
| SKNMC2000065 | 0 | 0 | 0 | 0 | 0 | 4.021 |
| SKNMC2000097 | 0 | 0 | 0 | 0 | 0 | 1.660 |
| SKNMC2000305 | 0 | 0 | 0 | 0 | 0 | 6.561 |
| SKNMC2000322 | 0 | 29.184 | 0 | 0 | 0 | 0 |
| SKNMC2000635 | 0 | 0 | 11.921 | 0 | 0 | 1.670 |
| SKNMC2000649 | 0 | 0 | 0 | 0 | 0 | 1.699 |
| SKNMC2000698 | 0 | 0 | 0 | 0 | 0 | 11.541 |
| SKNMC2000877 | 0 | 0 | 0 | 0 | 0 | 8.828 |
| SKNMC2003639 | 0 | 0 | 0 | 0 | 0 | 19.285 |
| SKNSH2000347 | 0 | 0 | 0 | 0 | 0 | 8.358 |
| SKNSH2000716 | 0 | 0 | 0 | 0 | 0 | 3.228 |
| SKNSH2000819 | 0 | 0 | 0 | 0 | 0 | 4.636 |
| SKNSH2002325 | 0 | 0 | 0 | 26.801 | 0 | 0 |
| SKNSH2005061 | 71.198 | 0 | 0 | 0 | 0 | 0 |
| SMINT1000131 | 0 | 0 | 20.288 | 0 | 0 | 0 |
| SMINT2000018 | 0 | 0 | 0 | 0 | 0 | 15.683 |
| SMINT2000441 | 0 | 0 | 0 | 0 | 0 | 4.203 |
| SMINT2000468 | 0 | 0 | 0 | 0 | 0 | 12.784 |
| SMINT2001222 | 0 | 85.415 | 0 | 0 | 0 | 0 |
| SMINT2002328 | 0 | 0 | 0 | 0 | 0 | 34.547 |
| SMINT2003074 | 0 | 0 | 0 | 0 | 0 | 5.106 |
| SMINT2003551 | 0 | 0 | 0 | 0 | 0 | 25.838 |
| SMINT2008917 | 0 | 0 | 0 | 0 | 0 | 20.839 |
| SMINT2008921 | 0 | 0 | 0 | 0 | 0 | 2.067 |
| SMINT2009216 | 0 | 0 | 0 | 38.861 | 0 | 0 |
| SMINT2010200 | 0 | 0 | 0 | 66.550 | 0 | 0 |
| SMINT2012291 | 0 | 0 | 0 | 0 | 0 | 8.589 |
| SMINT2017964 | 0 | 0 | 0 | 34.030 | 0 | 0 |
| SPLEN1000166 | 0 | 0 | 0 | 0 | 0 | 2.105 |
| SPLEN2000072 | 0 | 0 | 0 | 42.162 | 0 | 0 |
| SPLEN2000505 | 0 | 0 | 0 | 0 | 0 | 1.570 |
| SPLEN2001141 | 0 | 0 | 0 | 6.630 | 0 | 0 |
| SPLEN2002467 | 0 | 0 | 0 | 0 | 0 | 6.068 |
| SPLEN2002493 | 0 | 0 | 0 | 0 | 0 | 3.224 |
| SPLEN2004078 | 0 | 0 | 0 | 0 | 0 | 27.833 |
| SPLEN2004555 | 0 | 0 | 0 | 0 | 0 | 7.930 |
| SPLEN2004773 | 0 | 0 | 0 | 0 | 0 | 2.651 |
| SPLEN2006133 | 0 | 0 | 0 | 0 | 0 | 3.534 |
| SPLEN2006374 | 0 | 0 | 0 | 0 | 0 | 2.831 |
| SPLEN2007498 | 0 | 0 | 0 | 0 | 0 | 4.874 |
| SPLEN2009970 | 0 | 0 | 0 | 0 | 0 | 9.499 |
| SPLEN2010195 | 0 | 0 | 0 | 0 | 0 | 4.336 |
| SPLEN2010986 | 0 | 0 | 0 | 0 | 0 | 37.509 |
| SPLEN2011758 | 0 | 0 | 0 | 0 | 0 | 9.782 |
| SPLEN2012523 | 44.843 | 0 | 0 | 0 | 0 | 0 |
| SPLEN2012571 | 0 | 0 | 0 | 0 | 0 | 5.921 |
| SPLEN2014911 | 0 | 0 | 0 | 0 | 0 | 3.930 |
| SPLEN2016139 | 53.814 | 0 | 0 | 0 | 0 | 0 |
| SPLEN2017918 | 0 | 0 | 0 | 0 | 0 | 5.094 |
| SPLEN2019077 | 0 | 0 | 0 | 37.244 | 0 | 0 |
| SPLEN2019092 | 0 | 0 | 0 | 0 | 0 | 51.706 |
| SPLEN2019169 | 0 | 0 | 0 | 0 | 0 | 10.544 |
| SPLEN2022522 | 59.537 | 0 | 0 | 0 | 0 | 0 |
| SPLEN2027780 | 0 | 0 | 0 | 0 | 0 | 51.706 |
| SPLEN2028466 | 0 | 17.097 | 0 | 0 | 0 | 2.311 |
| SPLEN2029912 | 0 | 0 | 0 | 0 | 0 | 6.085 |
| SPLEN2031547 | 0 | 0 | 0 | 0 | 0 | 2.932 |
| SPLEN2034448 | 0 | 0 | 0 | 0 | 0 | 9.657 |
| SPLEN2038473 | 0 | 0 | 0 | 0 | 0 | 25.620 |
| SPLEN2038834 | 0 | 0 | 0 | 0 | 0 | 8.628 |
| STOMA2000121 | 0 | 25.183 | 0 | 0 | 0 | 0 |
| STOMA2000482 | 0 | 0 | 0 | 0 | 0 | 7.180 |
| STOMA2002052 | 0 | 0 | 0 | 0 | 0 | 10.359 |
| STOMA2002166 | 0 | 0 | 0 | 4.107 | 0 | 0 |
| SYNOV1000124 | 0 | 0 | 0 | 0 | 0 | 1.036 |
| SYNOV2001212 | 0 | 0 | 0 | 76.498 | 0 | 0 |
| SYNOV2001239 | 0 | 0 | 6.951 | 2.203 | 0 | 0 |
| SYNOV2001468 | 0 | 0 | 0 | 64.073 | 0 | 0 |
| SYNOV2020463 | 0 | 90.549 | 0 | 0 | 0 | 0 |
| SYNOV4001153 | 0 | 0 | 0 | 0 | 0 | 4.320 |
| SYNOV4007671 | 0 | 0 | 0 | 5.146 | 0 | 1.365 |
| SYNOV4009575 | 0 | 0 | 0 | 0 | 0 | 8.924 |
| T1ESE2000904 | 0 | 0 | 0 | 0 | 0 | 4.300 |
| TBAES2000352 | 0 | 0 | 0 | 49.950 | 0 | 0 |
| TBAES2009387 | 0 | 0 | 0 | 3.753 | 0 | 0 |
| TESOP2002273 | 0 | 0 | 0 | 0 | 0 | 7.560 |
| TESOP2007384 | 0 | 0 | 0 | 0 | 0 | 37.388 |
| TESTI1000023 | 0 | 0 | 0 | 0 | 0 | 4.686 |
| TESTI1000138 | 0 | 0 | 0 | 0 | 0 | 55.597 |
| TESTI1000168 | 0 | 0 | 0 | 0 | 0 | 5.837 |
| TESTI2000184 | 0 | 0 | 0 | 0 | 0 | 8.422 |
| TESTI2000784 | 0 | 0 | 0 | 0 | 0 | 8.466 |
| TESTI2001099 | 0 | 0 | 0 | 0 | 0 | 12.778 |
| TESTI2001269 | 0 | 0 | 0 | 0 | 0 | 2.033 |
| TESTI2001511 | 0 | 0 | 38.759 | 0 | 0 | 0 |
| TESTI2002223 | 0 | 0 | 0 | 0 | 0 | 51.220 |
| TESTI2002365 | 0 | 0 | 0 | 0 | 0 | 4.068 |
| TESTI2003005 | 0 | 0 | 0 | 0 | 0 | 5.659 |
| TESTI2003413 | 0 | 0 | 0 | 0 | 0 | 9.699 |
| TESTI2004080 | 0 | 0 | 0 | 0 | 0 | 18.180 |
| TESTI2004295 | 0 | 0 | 0 | 0 | 0 | 30.503 |
| TESTI2004737 | 0 | 0 | 0 | 0 | 0 | 3.299 |
| TESTI2005564 | 0 | 0 | 0 | 0 | 0 | 6.821 |
| TESTI2005743 | 0 | 0 | 0 | 0 | 0 | 4.091 |
| TESTI2005767 | 0 | 0 | 0 | 0 | 0 | 5.094 |
| TESTI2005784 | 0 | 0 | 0 | 0 | 0 | 5.540 |
| TESTI2005788 | 0 | 0 | 0 | 0 | 0 | 8.614 |
| TESTI2006051 | 0 | 0 | 0 | 5.946 | 0 | 0 |
| TESTI2006453 | 0 | 0 | 0 | 0 | 0 | 6.270 |
| TESTI2006872 | 0 | 0 | 0 | 0 | 0 | 10.235 |
| TESTI2007211 | 0 | 0 | 0 | 0 | 0 | 6.152 |
| TESTI2007311 | 0 | 0 | 0 | 0 | 0 | 14.331 |
| TESTI2007998 | 0 | 0 | 0 | 0 | 0 | 5.890 |
| TESTI2008240 | 0 | 0 | 11.080 | 0 | 0 | 0.466 |
| TESTI2009402 | 0 | 0 | 0 | 0 | 0 | 17.075 |
| TESTI2009423 | 0 | 0 | 0 | 0 | 0 | 30.119 |
| TESTI2009474 | 0 | 0 | 0 | 0 | 0 | 3.763 |
| TESTI2009520 | 0 | 0 | 0 | 0 | 0 | 12.571 |
| TESTI2009577 | 0 | 0 | 0 | 0 | 0 | 9.876 |
| TESTI2010513 | 0 | 0 | 0 | 0 | 0 | 4.391 |
| TESTI2012104 | 0 | 0 | 0 | 0 | 0 | 18.132 |
| TESTI2012778 | 0 | 0 | 0 | 0 | 0 | 2.409 |
| TESTI2015246 | 0 | 0 | 0 | 0 | 0 | 22.051 |
| TESTI2015626 | 0 | 0 | 0 | 2.309 | 0 | 0 |
| TESTI2017954 | 0 | 0 | 0 | 0 | 0 | 2.468 |
| TESTI2018014 | 0 | 0 | 0 | 0 | 0 | 7.179 |
| TESTI2018462 | 0 | 0 | 0 | 0 | 0 | 5.263 |
| TESTI2018611 | 0 | 0 | 0 | 0 | 0 | 1.957 |
| TESTI2019729 | 0 | 0 | 0 | 0 | 0 | 74.021 |
| TESTI2021124 | 0 | 0 | 0 | 0 | 0 | 10.645 |
| TESTI2024844 | 48.116 | 23.675 | 0 | 0 | 0 | 0 |
| TESTI2025422 | 0 | 51.293 | 0 | 0 | 0 | 0 |
| TESTI2028296 | 0 | 50.959 | 0 | 0 | 0 | 0 |
| TESTI2034940 | 0 | 0 | 0 | 0 | 21.867 | 0 |
| TESTI2044276 | 0 | 0 | 0 | 0 | 0 | 8.832 |
| TESTI2045155 | 0 | 0 | 0 | 80.865 | 0 | 0 |
| TESTI2046456 | 19.441 | 0 | 10.254 | 0 | 0 | 4.311 |
| TESTI2052693 | 0 | 0 | 0 | 23.507 | 0 | 0 |
| TESTI4000014 | 7.500 | 0 | 0 | 0 | 0 | 0.665 |
| TESTI4002202 | 0 | 0 | 0 | 0 | 0 | 6.175 |
| TESTI4002799 | 0 | 0 | 0 | 0 | 0 | 1.645 |
| TESTI4003150 | 0 | 0 | 0 | 0 | 0 | 27.660 |
| TESTI4008018 | 0 | 0 | 0 | 0 | 0 | 74.021 |
| TESTI4009286 | 0 | 0 | 0 | 0 | 0 | 1.350 |
| TESTI4010851 | 0 | 0 | 0 | 0 | 0 | 1.018 |
| TESTI4013441 | 0 | 0 | 10.424 | 0 | 0 | 0.876 |
| TESTI4013474 | 43.396 | 0 | 0 | 0 | 0 | 0 |
| TESTI4013675 | 0 | 0 | 0 | 0 | 0 | 18.389 |
| TESTI4037156 | 0 | 0 | 0 | 1.943 | 0 | 0 |
| TESTI4038099 | 0 | 0 | 0 | 0 | 0 | 41.085 |
| TESTI4038284 | 0 | 0 | 0 | 0 | 0 | 3.430 |
| THYMU1000002 | 0 | 0 | 0 | 4.155 | 0 | 1.102 |
| THYMU1000016 | 0 | 7.986 | 0 | 0 | 0 | 0.720 |
| THYMU1000041 | 0 | 0 | 0 | 0 | 0 | 13.287 |
| THYMU1000109 | 0 | 0 | 0 | 5.525 | 0 | 0 |
| THYMU1000329 | 0 | 0 | 0 | 0 | 0 | 9.927 |
| THYMU1000374 | 0 | 0 | 0 | 0 | 0 | 2.790 |
| THYMU1000428 | 0 | 0 | 0 | 0 | 0 | 1.059 |
| THYMU1000490 | 0 | 0 | 0 | 0 | 0 | 32.041 |
| THYMU2000382 | 0 | 12.526 | 0 | 0 | 0 | 0 |
| THYMU2000684 | 0 | 0 | 0 | 0 | 0 | 7.755 |
| THYMU2000946 | 0 | 0 | 0 | 0 | 0 | 5.390 |
| THYMU2001018 | 0 | 0 | 0 | 0 | 0 | 16.822 |
| THYMU2002583 | 0 | 0 | 0 | 0 | 0 | 1.931 |
| THYMU2003012 | 0 | 0 | 0 | 0 | 0 | 6.529 |
| THYMU2003046 | 0 | 0 | 0 | 0 | 0 | 3.580 |
| THYMU2003419 | 0 | 0 | 0 | 0 | 42.154 | 3.741 |
| THYMU2003542 | 0 | 44.660 | 0 | 0 | 0 | 0 |
| THYMU2003891 | 6.128 | 0 | 0 | 0 | 0 | 0 |
| THYMU2003981 | 0 | 0 | 0 | 0 | 0 | 0.973 |
| THYMU2004344 | 0 | 0 | 0 | 0 | 0 | 2.379 |
| THYMU2004410 | 0 | 0 | 0 | 0 | 0 | 3.569 |
| THYMU2004906 | 0 | 0 | 0 | 0 | 0 | 23.344 |
| THYMU2005546 | 0 | 0 | 0 | 0 | 0 | 2.037 |
| THYMU2006505 | 0 | 0 | 0 | 0 | 0 | 2.543 |
| THYMU2006813 | 0 | 0 | 0 | 0 | 0 | 2.947 |
| THYMU2009658 | 0 | 0 | 0 | 2.459 | 0 | 0 |
| THYMU2010094 | 0 | 0 | 0 | 0 | 0 | 10.849 |
| THYMU2011308 | 0 | 0 | 92.999 | 0 | 0 | 0 |
| THYMU2012002 | 0 | 0 | 0 | 0 | 0 | 47.289 |
| THYMU2012104 | 0 | 0 | 0 | 0 | 0 | 50.388 |
| THYMU2012690 | 0 | 0 | 86.085 | 0 | 0 | 0 |
| THYMU2013916 | 0 | 0 | 0 | 0 | 0 | 8.263 |
| THYMU2014599 | 0 | 0 | 0 | 0 | 0 | 52.760 |
| THYMU2018126 | 0 | 0 | 0 | 5.108 | 0 | 0 |
| THYMU2027125 | 0 | 3.699 | 0 | 1.257 | 15.025 | 0 |
| THYMU2027975 | 0 | 82.600 | 0 | 0 | 0 | 0 |
| THYMU2031341 | 0 | 71.304 | 0 | 0 | 0 | 0 |
| THYMU2031847 | 0 | 0 | 0 | 0 | 0 | 69.076 |
| THYMU2033308 | 0 | 0 | 0 | 0 | 0 | 26.010 |
| THYMU3013386 | 0 | 0 | 0 | 0 | 62.834 | 0 |
| THYMU3021586 | 0 | 0 | 0 | 0 | 0 | 7.693 |
| TKIDN2015423 | 0 | 0 | 0 | 0 | 0 | 1.186 |
| TLIVE2002046 | 0 | 0 | 0 | 0 | 0 | 3.380 |
| TRACH2000079 | 0 | 0 | 0 | 0 | 0 | 1.009 |
| TRACH2000248 | 0 | 28.835 | 0 | 0 | 0 | 1.299 |
| TRACH2000321 | 0 | 0 | 0 | 0 | 0 | 1.830 |
| TRACH2000461 | 0 | 0 | 0 | 0 | 0 | 6.387 |
| TRACH2000472 | 0 | 0 | 0 | 11.989 | 0 | 1.590 |
| TRACH2000862 | 0 | 0 | 0 | 0 | 0 | 53.910 |
| TRACH2000926 | 0 | 0 | 0 | 0 | 0 | 5.197 |
| TRACH2000972 | 0 | 0 | 0 | 0 | 0 | 1.104 |
| TRACH2001021 | 0 | 8.653 | 0 | 0 | 0 | 0 |
| TRACH2001060 | 0 | 0 | 0 | 0 | 0 | 62.446 |
| TRACH2001101 | 0 | 0 | 0 | 0 | 0 | 19.803 |
| TRACH2001289 | 0 | 0 | 0 | 0 | 0 | 1.899 |
| TRACH2001341 | 0 | 0 | 0 | 0 | 0 | 11.871 |
| TRACH2001428 | 0 | 0 | 0 | 0 | 0 | 4.701 |
| TRACH2001432 | 0 | 22.988 | 0 | 0 | 0 | 0 |
| TRACH2001607 | 0 | 0 | 0 | 0 | 0 | 3.741 |
| TRACH2001612 | 0 | 0 | 0 | 0 | 0 | 7.440 |
| TRACH2001810 | 0 | 0 | 0 | 0 | 0 | 2.893 |
| TRACH2002537 | 0 | 0 | 0 | 0 | 0 | 5.182 |
| TRACH2002803 | 0 | 0 | 0 | 0 | 0 | 11.644 |
| TRACH2003323 | 0 | 0 | 0 | 0 | 0 | 13.259 |
| TRACH2005811 | 0 | 0 | 0 | 0 | 0 | 3.928 |
| TRACH2006866 | 0 | 0 | 0 | 34.834 | 0 | 0 |
| TRACH2007059 | 0 | 0 | 0 | 0 | 0 | 62.446 |
| TRACH2007399 | 0 | 0 | 10.435 | 0 | 0 | 0 |
| TRACH2007816 | 0 | 0 | 0 | 0 | 0 | 18.594 |
| TRACH2008472 | 0 | 0 | 0 | 11.015 | 0 | 0 |
| TRACH2009851 | 0 | 0 | 0 | 0 | 0 | 28.006 |
| TRACH2014077 | 0 | 0 | 0 | 0 | 0 | 6.336 |
| TRACH2014124 | 0 | 0 | 0 | 0 | 0 | 1.923 |
| TRACH2015823 | 0 | 0 | 0 | 0 | 0 | 12.223 |
| TRACH2025535 | 0 | 0 | 0 | 16.304 | 0 | 2.163 |
| TRACH3006717 | 0 | 0 | 0 | 0 | 0 | 13.669 |
| TRACH3007479 | 0 | 0 | 47.650 | 0 | 0 | 0 |
| TRACH3007625 | 0 | 0 | 0 | 0 | 0 | 4.379 |
| TRACH3016805 | 0 | 0 | 0 | 0 | 0 | 8.386 |
| TRACH3036932 | 0 | 0 | 0 | 0 | 0 | 27.304 |
| TRACH3038399 | 0 | 0 | 0 | 0 | 0 | 23.161 |
| TSTOM2000315 | 0 | 0 | 0 | 0 | 0 | 4.245 |
| TSTOM2000553 | 0 | 0 | 0 | 0 | 0 | 12.559 |
| UMVEN2000152 | 0 | 16.277 | 0 | 0 | 0 | 0 |
| UMVEN2000453 | 0 | 0 | 0 | 0 | 0 | 2.917 |
| UTERU2000023 | 0 | 0 | 0 | 0 | 0 | 19.067 |
| UTERU2000095 | 0 | 0 | 0 | 0 | 0 | 2.313 |
| UTERU2000263 | 0 | 10.589 | 11.351 | 0 | 0 | 0 |
| UTERU2000300 | 0 | 0 | 0 | 0 | 0 | 9.187 |
| UTERU2000424 | 0 | 0 | 0 | 0 | 0 | 1.582 |
| UTERU2001607 | 0 | 0 | 0 | 0 | 0 | 2.748 |
| UTERU2001658 | 0 | 0 | 0 | 0 | 0 | 16.498 |
| UTERU2003057 | 0 | 0 | 57.297 | 0 | 0 | 0 |
| UTERU2004037 | 0 | 0 | 0 | 15.393 | 0 | 0 |
| UTERU2004197 | 0 | 0 | 0 | 0 | 0 | 7.490 |
| UTERU2004520 | 0 | 0 | 0 | 0 | 0 | 60.963 |
| UTERU2004688 | 0 | 22.977 | 0 | 0 | 0 | 0 |
| UTERU2005593 | 0 | 0 | 0 | 0 | 0 | 2.091 |
| UTERU2005621 | 0 | 0 | 0 | 0 | 0 | 8.397 |
| UTERU2006593 | 0 | 0 | 0 | 0 | 0 | 2.750 |
| UTERU2008085 | 0 | 1.866 | 0 | 6.340 | 0 | 0.168 |
| UTERU2008938 | 0 | 0 | 0 | 0 | 0 | 4.584 |
| UTERU2010417 | 0 | 0 | 0 | 0 | 0 | 2.936 |
| UTERU2011906 | 0 | 0 | 0 | 0 | 0 | 12.702 |
| UTERU2012407 | 0 | 0 | 0 | 0 | 0 | 45.844 |
| UTERU2014898 | 0 | 31.445 | 0 | 0 | 0 | 0 |
| UTERU2015653 | 0 | 0 | 12.924 | 0 | 0 | 0 |
| UTERU2017762 | 0 | 0 | 0 | 0 | 0 | 60.963 |
| UTERU2019096 | 0 | 0 | 0 | 0 | 0 | 4.290 |
| UTERU2023175 | 0 | 0 | 0 | 0 | 0 | 2.773 |
| UTERU2024969 | 0 | 0 | 0 | 0 | 0 | 5.981 |
| UTERU3000298 | 0 | 0 | 0 | 0 | 0 | 8.617 |
| UTERU3005767 | 0 | 24.596 | 0 | 8.356 | 0 | 0 |

[0754] Genes whose expression levels were negligibly low in each of the above-described libraries are shown with their clone names below.

[0755] 3NB691000018, 3NB691000085, 3NB691000113, 3NB691000129, 3NB692000012, 3NB692000029, 3NB692000102, 3NB692000154, 3NB692000276, 3NB692000305, 3NB692000330, 3NB692000374, 3NB692000429, 3NB692000484, 3NB692000529, 3NB692000545, 3NB692000973, 3NB692001002, 3NB692001022, 3NB692001034, 3NB692001040, 3NB692001123, 3NB692001267, 3NB692001288, 3NB692001349, 3NB692001366, 3NB692001408, 3NB692001442, 3NB692001459, 3NB692001471, 3NB692001496, 3NB692001501, 3NB692001507, 3NB692001511, 3NB692001519, 3NB692001520, 3NB692001528, 3NB692001538, 3NB692001548, 3NB692001557, 3NB692001637, 3NB692001719, 3NB692001853, 3NB692001861, 3NB692002051, 3NB692002365, 3NB692002685, 3NB692002806, 3NB692003538, 3NB692004045, 3NB692004724, 3NB692005439, 3NB692006952, 3NB692008178, 3NB692008729, ACTVT2000380, ADIPS1000064, ADIPS2000069, ADIPS2000088, ADIPS2000245, ADIPS2000425, ADRGL1000002, ADRGL1000018, ADRGL1000033, ADRGL1000038, ADRGL1000065, ADRGL1000067, ADRGL1000111, ADRGL1000144, ADRGL1000147, ADRGL1000160, ADRGL1000165, ADRGL1000182, ADRGL2000042, ADRGL2000056, ADRGL2000064, ADRGL2000074, ADRGL2000085, ADRGL2000097, ADRGL2000117, ADRGL2000142, ADRGL2000172, ADRGL2000248, ADRGL2000261, ADRGL2000323, ADRGL2000328, ADRGL2000353, ADRGL2000384, ADRGL2000428, ADRGL2000636, ADRGL2000644, ADRGL2000968, ADRGL2001119, ADRGL2001229, ADRGL2001287, ADRGL2001301, ADRGL2001354, ADRGL2001554, ADRGL2001651, ADRGL2001756, ADRGL2001836, ADRGL2001854, ADRGL2002013, ADRGL2002029, ADRGL2002191, ADRGL2002260, ADRGL2002392, ADRGL2002679, ADRGL2002753, ADRGL2002857, ADRGL2003017, ADRGL2003329, ADRGL2003552, ADRGL2003585, ADRGL2003638, ADRGL2003684, ADRGL2003773, ADRGL2003785, ADRGL2004031, ADRGL2004077, ADRGL2004451, ADRGL2004459, ADRGL2004676, ADRGL2004708, ADRGL2004724, ADRGL2004749, ADRGL2004770, ADRGL2004777, ADRGL2004833, ADRGL2005336, ADRGL2005564, ADRGL2005756, ADRGL2005838, ADRGL2005926, ADRGL2005961, ADRGL2006034, ADRGL2006124, ADRGL2006177, ADRGL2006193, ADRGL2006377, ADRGL2006677, ADRGL2006732, ADRGL2006767, ADRGL2006817, ADRGL2006846, ADRGL2006886, ADRGL2007080, ADRGL2007125, ADRGL2007283, ADRGL2007313, ADRGL2007357, ADRGL2007636, ADRGL2007651, ADRGL2007810, ADRGL2007877, ADRGL2007906, ADRGL2007974, ADRGL2008023, ADRGL2008331, ADRGL2008337, ADRGL2008535, ADRGL2008966, ADRGL2009146, ADRGL2009273, ADRGL2009324, ADRGL2009489, ADRGL2009533, ADRGL2009691, ADRGL2009755, ADRGL2010152, ADRGL2010315, ADRGL2010594, ADRGL2010860, ADRGL2010974, ADRGL2011190, ADRGL2011330, ADRGL2012038, ADRGL2012179, AHMSC1000138, ASTRO1000009, ASTRO1000018, ASTRO1000029, ASTRO1000096, ASTRO1000165, ASTRO2000011, ASTRO2000095, ASTRO2000141, ASTRO2000191, ASTRO2000278, ASTRO2000372, ASTRO2000381, ASTRO2000403, ASTRO2000417, ASTRO2000480, ASTRO2000482, ASTRO2000533, ASTRO2000653, ASTRO2000662, ASTRO2000725, ASTRO2000801, ASTRO2000914, ASTRO2001001, ASTRO2001008, ASTRO2001088, ASTRO2001107, ASTRO2001122, ASTRO2001227, ASTRO2001249, ASTRO2001480, ASTRO2001806, ASTRO2002024, ASTRO2002035, ASTRO2002064, ASTRO2002202, ASTRO2002459, ASTRO2002571, ASTRO2002632, ASTRO2002659, ASTRO2002693, ASTRO2002720, ASTRO2002733, ASTRO2002743, ASTRO2002842, ASTRO2003212, ASTRO2003316, ASTRO2003574, ASTRO2003581, ASTRO2003740, ASTRO2003840, ASTRO2003925, ASTRO2003960, ASTRO2004051, ASTRO2004177, ASTRO2004217, ASTRO2004297, ASTRO2004584, ASTRO2004628, ASTRO2004751, ASTRO2004877, ASTRO2004974, ASTRO2005008, ASTRO2005081, ASTRO2005096, ASTRO2005273, ASTRO2005343, ASTRO2005360, ASTRO2005413, ASTRO2005423, ASTRO2005553, ASTRO2005557, ASTRO2005575, ASTRO2005593, ASTRO2005687, ASTRO2005726, ASTRO2005896, ASTRO2005902, ASTRO2006356, ASTRO2006475, ASTRO2006747, ASTRO2006920, ASTRO2006952, ASTRO2007047, ASTRO2007377, ASTRO2007515, ASTRO2007578, ASTRO2007643, ASTRO2007666, ASTRO2007956, ASTRO2007962, ASTRO2008239, ASTRO2008409, ASTRO2008425, ASTRO2008508, ASTRO2008777, ASTRO2008895, ASTRO2008960, ASTRO2008972, ASTRO2009068, ASTRO2009118, ASTRO2009177, ASTRO2009333, ASTRO2009458, ASTRO2009526, ASTRO2009879, ASTRO2010072, ASTRO2010582, ASTRO2010615, ASTRO2010799, ASTRO2010962, ASTRO2010996, ASTRO2011149, ASTRO2011422, ASTRO2011426, ASTRO2011437, ASTRO2011461, ASTRO2011834, ASTRO2011893, ASTRO2012552, ASTRO2013124, ASTRO2013585, ASTRO2013671, ASTRO2013802, ASTRO2014135, ASTRO2014174, ASTRO2014211, ASTRO2014363, ASTRO2014392, ASTRO2014498, ASTRO2014561, ASTRO2014576, ASTRO2014863, ASTRO2014923, ASTRO2014961, ASTRO2015162, ASTRO2015185, ASTRO2015328, ASTRO2016044, ASTRO2016114, ASTRO2016148, ASTRO2016681, ASTRO2016819, ASTRO2016847, ASTRO2016892, ASTRO2017348, ASTRO2017627, ASTRO2018169, ASTRO2018373, ASTRO2018540, ASTRO2019039, ASTRO2019171, ASTRO3000154, ASTRO3000172, ASTRO3000177, ASTRO3000301, ASTRO3000474, ASTRO3000482, BEAST2000454, BGGI11000123, BGGI11000193, BGGI11000285, BGGI12000022, BGGI12000054, BGGI12000067, BGGI12000161, BGGI12000533, BGGI12000544, BGGI12000616, BGGI12000684, BGGI12000693, BGGI12000839, BGGI12001002, BGGI12001075, BGGI12001097, BGGI12001241, BGGI12001247, BGGI12001682, BGGI12001714, BLADE1000176, BLADE2000181, BLADE2000256, BLADE2000340, BLADE2000389, BLADE2000463, BLADE2000492, BLADE2000579, BLADE2000640, BLADE2000866, BLADE2000938, BLADE2001031, BLADE2001133, BLADE2001138, BLADE2001141, BLADE2001371, BLADE2001458, BLADE2001575, BLADE2001753, BLADE2001935, BLADE2001940, BLADE2001987, BLADE2002073, BLADE2002310, BLADE2002730, BLADE2002738, BLADE2002744, BLADE2002782, BLADE2002947, BLADE2002972, BLADE2003474, BLADE2003916, BLADE2004089, BLADE2004345, BLADE2004389, BLADE2004462, BLADE2004628, BLADE2004670, BLADE2004722, BLADE2004849, BLADE2005036, BLADE2005038, BLADE2005229, BLADE2005459, BLADE2005792, BLADE2006043, BLADE2006412, BLADE2006415, BLADE2006607, BLADE2006826, BLADE2006830, BLADE2006849, BLADE2006947, BLADE2007033, BLADE2007043, BLADE2007589, BLADE2007722, BLADE2007735, BLADE2007744, BLADE2007799, BLADE2007923, BLADE2007935, BLADE2007958, BLADE2008281, BLADE2008398, BLADE2008454, BLADE2008461, BLADE2008479, BLADE2008539, BLADE2008809, BLADE2008995, BLADE2009452, BLADE2009479, BLADE2009593, BNGH41000098, BNGH41000104, BNGH41000118, BNGH41000137, BNGH41000153, BNGH41000169, BNGH41000177, BNGH41000216, BNGH41000235, BNGH42000130, BNGH42000132, BNGH42000405, BNGH42000675, BNGH42000739, BNGH42000791, BNGH42000815, BNGH42000994, BNGH42001247, BNGH42001406, BNGH42001576, BNGH42001724, BNGH42002244, BNGH42002387, BNGH42002487, BNGH42002489, BNGH42003529, BNGH42003570, BNGH42003641, BNGH42004076, BNGH42004291, BNGH42004538, BNGH42004679, BNGH42005017, BNGH42005235, BNGH42005504, BNGH42005968, BNGH42006226, BNGH42006234, BNGH42007037, BNGH42007366, BNGH42007594, BNGH42007798, BNGH42008199, BNGH42008510, BNGH42008603, BNGH42008649, BNGH42008832, BNGH42008850, BNGH42008943, BNGH42009021, BNGH42009025, BRACE1000020, BRACE1000042, BRACE1000047, BRACE1000051, BRACE1000065, BRACE1000070, BRACE1000073, BRACE1000084, BRACE1000087, BRACE1000092, BRACE1000093, BRACE1000101, BRACE1000114, BRACE1000115, BRACE1000124, BRACE1000132, BRACE1000159, BRACE1000166, BRACE1000169, BRACE1000186, BRACE1000187, BRACE1000239, BRACE1000258, BRACE1000451, BRACE1000475, BRACE1000572, BRACE2000061, BRACE2000077, BRACE2000078, BRACE2000100, BRACE2000109, BRACE2000141, BRACE2000148, BRACE2000183, BRACE2000229, BRACE2000232, BRACE2000245, BRACE2000256, BRACE2000266, BRACE2000267, BRACE2000280, BRACE2000300, BRACE2000331, BRACE2000332, BRACE2000347, BRACE2000351, BRACE2000368, BRACE2000392, BRACE2000441, BRACE2000487, BRACE2000489, BRACE2000505, BRACE2000525, BRACE2000526, BRACE2000531, BRACE2000545, BRACE2000553, BRACE2000565, BRACE2000577, BRACE2000640, BRACE2000650, BRACE2000677, BRACE2000698, BRACE2000718, BRACE2000733, BRACE2000743, BRACE2000750, BRACE2000753, BRACE2000815, BRACE2000885, BRACE2000893, BRACE2000905, BRACE2000936, BRACE2000947, BRACE2000965, BRACE2000969, BRACE2000975, BRACE2000988, BRACE2001017, BRACE2001065, BRACE2001070, BRACE2001094, BRACE2001107, BRACE2001143, BRACE2001151, BRACE2001154, BRACE2001188, BRACE2001191, BRACE2001197, BRACE2001236, BRACE2001239, BRACE2001269, BRACE2001312, BRACE2001313, BRACE2001330, BRACE2001340, BRACE2001352, BRACE2001353, BRACE2001374, BRACE2001375, BRACE2001423, BRACE2001424, BRACE2001445, BRACE2001453, BRACE2001455, BRACE2001492, BRACE2001496, BRACE2001497, BRACE2001508, BRACE2001543, BRACE2001564, BRACE2001588, BRACE2001607, BRACE2001626, BRACE2001673, BRACE2001677, BRACE2001692, BRACE2001705, BRACE2001711, BRACE2001726, BRACE2001733, BRACE2001737, BRACE2001742, BRACE2001777, BRACE2001779, BRACE2001834, BRACE2001855, BRACE2001859, BRACE2001865, BRACE2001872, BRACE2001881, BRACE2001892, BRACE2001898, BRACE2001923, BRACE2001942, BRACE2001944, BRACE2001954, BRACE2001971, BRACE2001972, BRACE2001973, BRACE2002026, BRACE2002034, BRACE2002050, BRACE2002081, BRACE2002139, BRACE2002142, BRACE2002151, BRACE2002157, BRACE2002176, BRACE2002202, BRACE2002206, BRACE2002227, BRACE2002260, BRACE2002297, BRACE2002304, BRACE2002356, BRACE2002392, BRACE2002394, BRACE2002409, BRACE2002431, BRACE2002444, BRACE2002458, BRACE2002467, BRACE2002468, BRACE2002478, BRACE2002495, BRACE2002582, BRACE2002585, BRACE2002589, BRACE2002590, BRACE2002606, BRACE2002613, BRACE2002614, BRACE2002617, BRACE2002623, BRACE2002635, BRACE2002661, BRACE2002676, BRACE2002682, BRACE2002685, BRACE2002695, BRACE2002707, BRACE2002736, BRACE2002752, BRACE2002755, BRACE2002762, BRACE2002772, BRACE2002792, BRACE2002796, BRACE2002803, BRACE2002807, BRACE2002812, BRACE2002834, BRACE2002849, BRACE2002857, BRACE2002860, BRACE2002861, BRACE2002884, BRACE2002896, BRACE2002948, BRACE2003037, BRACE2003097, BRACE2003110, BRACE2003168, BRACE2003172, BRACE2003199, BRACE2003210, BRACE2003217, BRACE2003269, BRACE2003285, BRACE2003319, BRACE2003398, BRACE2003420, BRACE2003428, BRACE2003431, BRACE2003512, BRACE2003516, BRACE2003527, BRACE2003539, BRACE2003540, BRACE2003598, BRACE2003609, BRACE2003614, BRACE2003628, BRACE2003639, BRACE2003700, BRACE2003713, BRACE2003766, BRACE2003788, BRACE2003800, BRACE2003802, BRACE2003825, BRACE2003827, BRACE2003847, BRACE2003848, BRACE2003873, BRACE2003885, BRACE2003887, BRACE2003905, BRACE2003928, BRACE2003944, BRACE2003954, BRACE2003982, BRACE2003987, BRACE2005034, BRACE2005047, BRACE2005063, BRACE2005083, BRACE2005090, BRACE2005099, BRACE2005118, BRACE2005124, BRACE2005138, BRACE2005151, BRACE2005160, BRACE2005169, BRACE2005189, BRACE2005193, BRACE2005196, BRACE2005198, BRACE2005216, BRACE2005231, BRACE2005243, BRACE2005251, BRACE2005253, BRACE2005290, BRACE2005298, BRACE2005328, BRACE2005329, BRACE2005337, BRACE2005348, BRACE2005363, BRACE2005395, BRACE2005408, BRACE2005433, BRACE2005434, BRACE2005450, BRACE2005457, BRACE2005460, BRACE2005489, BRACE2005518, BRACE2005556, BRACE2005562, BRACE2005624, BRACE2005661, BRACE2005667, BRACE2005681, BRACE2005719, BRACE2005731, BRACE2005742, BRACE2005762, BRACE2005773, BRACE2005787, BRACE2005795, BRACE2005800, BRACE2005858, BRACE2005869, BRACE2005875, BRACE2005881, BRACE2005898, BRACE2005904, BRACE2005906, BRACE2005907, BRACE2005911, BRACE2005937, BRACE2005949, BRACE2005981, BRACE2005991, BRACE2006055, BRACE2006075, BRACE2006084, BRACE2006089, BRACE2006102, BRACE2006122, BRACE2006137, BRACE2006143, BRACE2006167, BRACE2006174, BRACE2006240, BRACE2006245, BRACE2006249, BRACE2006258, BRACE2006264, BRACE2006274, BRACE2006281, BRACE2006298, BRACE2006344, BRACE2006354, BRACE2006363, BRACE2006378, BRACE2006380, BRACE2006393, BRACE2006413, BRACE2006417, BRACE2006453, BRACE2006459, BRACE2006488, BRACE2006534, BRACE2006537, BRACE2006540, BRACE2006547, BRACE2006564, BRACE2006587, BRACE2006598, BRACE2006636, BRACE2006685, BRACE2006703, BRACE2006743, BRACE2006753, BRACE2006783, BRACE2006821, BRACE2006833, BRACE2006859, BRACE2006871, BRACE2006909, BRACE2006911, BRACE2006924, BRACE2006935, BRACE2006944, BRACE2006951, BRACE2006982, BRACE2006986, BRACE2007013, BRACE2007064, BRACE2007068, BRACE2007087, BRACE2007089, BRACE2007109, BRACE2007138, BRACE2007174, BRACE2007191, BRACE2007197, BRACE2007201, BRACE2007203, BRACE2007232, BRACE2007254, BRACE2007262, BRACE2007274, BRACE2007281, BRACE2007295, BRACE2007358, BRACE2007396, BRACE2007398, BRACE2007411, BRACE2007447, BRACE2007477, BRACE2007502, BRACE2007503, BRACE2007522, BRACE2007527, BRACE2007538, BRACE2007563, BRACE2007567, BRACE2007621, BRACE2007640, BRACE2007641, BRACE2007646, BRACE2007663, BRACE2007682, BRACE2007685, BRACE2007708, BRACE2007727, BRACE2007749, BRACE2007760, BRACE2007761, BRACE2007764, BRACE2007767, BRACE2007768, BRACE2007769, BRACE2007784, BRACE2007786, BRACE2007798, BRACE2007799, BRACE2007801, BRACE2007832, BRACE2007836, BRACE2007868, BRACE2007882, BRACE2007888, BRACE2007902, BRACE2007920, BRACE2007937, BRACE2007944, BRACE2007952, BRACE2008008, BRACE2008015, BRACE2008021, BRACE2008097, BRACE2008102, BRACE2008114, BRACE2008144, BRACE2008172, BRACE2008216, BRACE2008218, BRACE2008251, BRACE2008276, BRACE2008295, BRACE2008308, BRACE2008336, BRACE2008358, BRACE2008361, BRACE2008380, BRACE2008385, BRACE2008399, BRACE2008401, BRACE2008402, BRACE2008410, BRACE2008420, BRACE2008443, BRACE2008473, BRACE2008480, BRACE2008488, BRACE2008495, BRACE2008500, BRACE2008553, BRACE2008594, BRACE2008604, BRACE2008615, BRACE2008622, BRACE2008629, BRACE2008655, BRACE2008656, BRACE2008706, BRACE2008708, BRACE2008710, BRACE2008754, BRACE2008797, BRACE2008847, BRACE2008857, BRACE2008861, BRACE2008867, BRACE2008881, BRACE2008883, BRACE2008917, BRACE2008919, BRACE2008941, BRACE2008948, BRACE2008960, BRACE2008968, BRACE2008999, BRACE2009014, BRACE2009016, BRACE2009031, BRACE2009044, BRACE2009045, BRACE2009053, BRACE2009122, BRACE2009131, BRACE2009185, BRACE2009188, BRACE2009212, BRACE2009221, BRACE2009235, BRACE2009238, BRACE2009255, BRACE2009270, BRACE2009272, BRACE2009274, BRACE2009275, BRACE2009291, BRACE2009293, BRACE2009307, BRACE2009311, BRACE2009318, BRACE2009323, BRACE2009421, BRACE2009428, BRACE2009434, BRACE2009437, BRACE2009483, BRACE2009533, BRACE2009558, BRACE2009566, BRACE2009591, BRACE2009620, BRACE2009654, BRACE2009721, BRACE2009732, BRACE2009754, BRACE2009828, BRACE2009886, BRACE2009907, BRACE2009957, BRACE2010170, BRACE2010171, BRACE2010203, BRACE2010208, BRACE2010336, BRACE2010348, BRACE2010440, BRACE2010444, BRACE2010477, BRACE2010489, BRACE2010535, BRACE2010550, BRACE2010598, BRACE2010632, BRACE2010642, BRACE2010651, BRACE2010669, BRACE2010684, BRACE2010753, BRACE2010813, BRACE2010828, BRACE2010837, BRACE2010888, BRACE2010937, BRACE2010983, BRACE2011007, BRACE2011025, BRACE2011183, BRACE2011199, BRACE2011265, BRACE2011389, BRACE2011478, BRACE2011545, BRACE2011592, BRACE2011611, BRACE2011646, BRACE2011677, BRACE2011703, BRACE2011747, BRACE2011838, BRACE2011892, BRACE2011904, BRACE2011947, BRACE2012061, BRACE2012062, BRACE2012185, BRACE2012222, BRACE2012232, BRACE2012291, BRACE2012317, BRACE2012510, BRACE2012625, BRACE2012653, BRACE2012814, BRACE2012833, BRACE2012838, BRACE2012936, BRACE2012947, BRACE2013009, BRACE2013010, BRACE2013126, BRACE2013132, BRACE2013149, BRACE2013369, BRACE2013806, BRACE2013855, BRACE2013911, BRACE2014108, BRACE2014161, BRACE2014232, BRACE2014257, BRACE2014268, BRACE2014306, BRACE2014475, BRACE2014657, BRACE2014746, BRACE2014780, BRACE2014818, BRACE2014821, BRACE2014824, BRACE2014850, BRACE2014854, BRACE2015031, BRACE2015058, BRACE2015132, BRACE2015262, BRACE2015270, BRACE2015287, BRACE2015314, BRACE2015352, BRACE2015368, BRACE2015412, BRACE2015436, BRACE2015741, BRACE2015756, BRACE2015969, BRACE2015995, BRACE2016058, BRACE2016194, BRACE2016315, BRACE2016325, BRACE2016335, BRACE2016366, BRACE2016465, BRACE2016516, BRACE2016583, BRACE2016708, BRACE2016821, BRACE2016896, BRACE2016981, BRACE2017108, BRACE2017124, BRACE2017298, BRACE2017359, BRACE2017410, BRACE2017438, BRACE2017574, BRACE2017580, BRACE2017587, BRACE2017720, BRACE2017844, BRACE2017872, BRACE2017929, BRACE2017934, BRACE2017985, BRACE2017992, BRACE2018337, BRACE2018443, BRACE2018448, BRACE2018568, BRACE2018700, BRACE2018727, BRACE2018736, BRACE2018759, BRACE2018762, BRACE2018782, BRACE2018847, BRACE2019004, BRACE2019044, BRACE2019147, BRACE2019244, BRACE2019258, BRACE2019327, BRACE2019348, BRACE2019371, BRACE2019467, BRACE2019510, BRACE2019519, BRACE2019528, BRACE2019618, BRACE2019696, BRACE2019703, BRACE2019843, BRACE2019865, BRACE2019872, BRACE2019877, BRACE2020028, BRACE2020077, BRACE2020097, BRACE2020157, BRACE2020278, BRACE2020358, BRACE2020467, BRACE2020584, BRACE2020652, BRACE2020709, BRACE2020742, BRACE2020756, BRACE2020863, BRACE2020982, BRACE2021143, BRACE2021148, BRACE2021245, BRACE2021254, BRACE2021264, BRACE2021344, BRACE2021433, BRACE2021478, BRACE2021541, BRACE2021670, BRACE2021695, BRACE2021708, BRACE2021721, BRACE2021932, BRACE2021936, BRACE2022030, BRACE2022158, BRACE2022196, BRACE2022270, BRACE2022328, BRACE2022333, BRACE2022389, BRACE2022394, BRACE2022435, BRACE2022448, BRACE2022450, BRACE2022549, BRACE2022633, BRACE2022693, BRACE2022848, BRACE2022928, BRACE2022990, BRACE2023069, BRACE2023070, BRACE2023223, BRACE2023268, BRACE2023284, BRACE2023404, BRACE2023451, BRACE2023540, BRACE2023633, BRACE2023718, BRACE2023727, BRACE2023744, BRACE2023800, BRACE2023801, BRACE2024074, BRACE2024222, BRACE2024610, BRACE2024627, BRACE2024781, BRACE2024826, BRACE2025018, BRACE2025316, BRACE2025333, BRACE2025437, BRACE2025452, BRACE2025492, BRACE2025710, BRACE2025796, BRACE2025992, BRACE2026054, BRACE2026131, BRACE2026141, BRACE2026142, BRACE2026293, BRACE2026294, BRACE2026404, BRACE2026675, BRACE2026725, BRACE2026836, BRACE2026920, BRACE2026971, BRACE2027018, BRACE2027221, BRACE2027258, BRACE2027312, BRACE2027382, BRACE2027389, BRACE2027408, BRACE2027767, BRACE2027770, BRACE2027879, BRACE2027896, BRACE2027970, BRACE2028171, BRACE2028392, BRACE2028410, BRACE2028636, BRACE2028741, BRACE2028956, BRACE2028970, BRACE2029112, BRACE2029356, BRACE2029396, BRACE2029581, BRACE2029644, BRACE2029849, BRACE2030039, BRACE2030096, BRACE2030323, BRACE2030326, BRACE2030341, BRACE2030345, BRACE2030736, BRACE2030883, BRACE2030884, BRACE2031154, BRACE2031232, BRACE2031527, BRACE2031531, BRACE2031553, BRACE2031899, BRACE2032044, BRACE2032090, BRACE2032134, BRACE2032148, BRACE2032182, BRACE2032329, BRACE2032385, BRACE2032436, BRACE2032502, BRACE2032538, BRACE2032584, BRACE2032823, BRACE2033128, BRACE2033394, BRACE2033478, BRACE2033720, BRACE2033786, BRACE2034434, BRACE2034523, BRACE2034616, BRACE2034622, BRACE2034870, BRACE2035003, BRACE2035120, BRACE2035124, BRACE2035191, BRACE2035278, BRACE2035381, BRACE2035441, BRACE2035485, BRACE2036005, BRACE2036096, BRACE2036743, BRACE2036830, BRACE2036834, BRACE2036900, BRACE2037132, BRACE2037294, BRACE2037295, BRACE2037299, BRACE2037310, BRACE2037431, BRACE2037692, BRACE2037847, BRACE2038114, BRACE2038269, BRACE2038271, BRACE2038329, BRACE2038492, BRACE2038551, BRACE2038618, BRACE2039009, BRACE2039128, BRACE2039170, BRACE2039249, BRACE2039286, BRACE2039297, BRACE2039327, BRACE2039362, BRACE2039475, BRACE2039600, BRACE2039607, BRACE2039624, BRACE2039734, BRACE2039823, BRACE2039832, BRACE2039893, BRACE2039986, BRACE2040138, BRACE2040325, BRACE2040514, BRACE2040640, BRACE2040987, BRACE2041009, BRACE2041095, BRACE2041200, BRACE2041264, BRACE2041890, BRACE2041898, BRACE2042394, BRACE2042398, BRACE2042550, BRACE2042620, BRACE2042628, BRACE2042873, BRACE2043036, BRACE2043105, BRACE2043142, BRACE2043248, BRACE2043349, BRACE2043381, BRACE2043774, BRACE2043942, BRACE2044057, BRACE2044105, BRACE2044263, BRACE2044286, BRACE2044304, BRACE2044473, BRACE2044510, BRACE2044640, BRACE2044816, BRACE2044946, BRACE2044949, BRACE2045300, BRACE2045428, BRACE2045445, BRACE2045596, BRACE2045772, BRACE2045947, BRACE2045954, BRACE2046251, BRACE2046295, BRACE2046976, BRACE2047011, BRACE2047232, BRACE2047350, BRACE2047377, BRACE2047385, BRACE2047492, BRACE2047558, BRACE2047573, BRACE2047835, BRACE2047893, BRACE2047975, BRACE3000071, BRACE3000404, BRACE3000520, BRACE3000697, BRACE3000840, BRACE3000973, BRACE3001002, BRACE3001058, BRACE3001113, BRACE3001217, BRACE3001299, BRACE3001384, BRACE3001391, BRACE3001403, BRACE3001595, BRACE3001754, BRACE3001948, BRACE3001973, BRACE3002184, BRACE3002298, BRACE3002344, BRACE3002390, BRACE3002420, BRACE3002508, BRACE3002541, BRACE3002756, BRACE3003004, BRACE3003026, BRACE3003053, BRACE3003192, BRACE3003413, BRACE3003595, BRACE3003698, BRACE3003866, BRACE3003920, BRACE3004046, BRACE3004058, BRACE3004113, BRACE3004150, BRACE3004205, BRACE3004358, BRACE3004371, BRACE3004435, BRACE3004477, BRACE3004767, BRACE3004772, BRACE3004783, BRACE3004843, BRACE3004862, BRACE3004880, BRACE3004887, BRACE3004981, BRACE3004996, BRACE3004998, BRACE3005103, BRACE3005127, BRACE3005145, BRACE3005217, BRACE3005225, BRACE3005430, BRACE3005499, BRACE3005760, BRACE3005870, BRACE3005903, BRACE3005938, BRACE3005989, BRACE3006113, BRACE3006185, BRACE3006226, BRACE3006462, BRACE3006463, BRACE3006553, BRACE3006872, BRACE3006917, BRACE3007058, BRACE3007084, BRACE3007085, BRACE3007258, BRACE3007322, BRACE3007472, BRACE3007480, BRACE3007559, BRACE3007625, BRACE3007642, BRACE3007649, BRACE3007767, BRACE3007869, BRACE3008036, BRACE3008066, BRACE3008092, BRACE3008095, BRACE3008137, BRACE3008255, BRACE3008337, BRACE3008384, BRACE3008720, BRACE3008772, BRACE3009044, BRACE3009075, BRACE3009090, BRACE3009127, BRACE3009197, BRACE3009237, BRACE3009265, BRACE3009297, BRACE3009377, BRACE3009392, BRACE3009416, BRACE3009539, BRACE3009574, BRACE3009701, BRACE3009708, BRACE3009724, BRACE3009993, BRACE3010076, BRACE3010079, BRACE3010086, BRACE3010221, BRACE3010283, BRACE3010315, BRACE3010397, BRACE3010416, BRACE3010435, BRACE3010438, BRACE3010702, BRACE3010862, BRACE3011271, BRACE3011421, BRACE3011447, BRACE3011505, BRACE3011634, BRACE3011774, BRACE3012357, BRACE3012574, BRACE3012806, BRACE3012930, BRACE3013119, BRACE3013418, BRACE3013576, BRACE3013740, BRACE3013780, BRACE3013874, BRACE3013986, BRACE3014005, BRACE3014068, BRACE3014231, BRACE3014290, BRACE3014317, BRACE3014523, BRACE3014714, BRACE3014807, BRACE3014942, BRACE3015090, BRACE3015121, BRACE3015262, BRACE3015521, BRACE3015808, BRACE3015829, BRACE3015894, BRACE3015898, BRACE3016020, BRACE3016122, BRACE3016167, BRACE3016170, BRACE3016580, BRACE3016788, BRACE3016810, BRACE3016862, BRACE3016884, BRACE3017083, BRACE3017253, BRACE3018083, BRACE3018308, BRACE3018963, BRACE3019055, BRACE3019071, BRACE3019084, BRACE3019570, BRACE3019611, BRACE3019817, BRACE3019828, BRACE3019941, BRACE3020151, BRACE3020194, BRACE3020286, BRACE3020356, BRACE3020594, BRACE3020669, BRACE3020671, BRACE3020890, BRACE3021148, BRACE3021430, BRACE3021517, BRACE3021805, BRACE3022051, BRACE3022303, BRACE3022312, BRACE3022340, BRACE3022847, BRACE3023604, BRACE3023912, BRACE3024073, BRACE3024359, BRACE3024379, BRACE3024444, BRACE3024497, BRACE3024537, BRACE3024659, BRACE3024662, BRACE3024879, BRACE3025153, BRACE3025302, BRACE3025457, BRACE3025531, BRACE3025627, BRACE3025630, BRACE3025719, BRACE3026008, BRACE3026075, BRACE3026161, BRACE3026290, BRACE3026345, BRACE3026456, BRACE3026735, BRACE3026802, BRACE3026844, BRACE3026947, BRACE3026993, BRACE3027242, BRACE3027256, BRACE3027326, BRACE3027478, BRACE3027480, BRACE3027931, BRACE3027976, BRACE3028214, BRACE3028241, BRACE3028360, BRACE3028895, BRACE3028998, BRACE3029005, BRACE3029021, BRACE3029205, BRACE3029447, BRACE3030057, BRACE3030103, BRACE3030538, BRACE3030748, BRACE3030866, BRACE3031161, BRACE3031184, BRACE3031185, BRACE3031315, BRACE3031372, BRACE3031579, BRACE3031728, BRACE3031838, BRACE3031843, BRACE3032427, BRACE3032455, BRACE3032537, BRACE3032538, BRACE3032631, BRACE3032771, BRACE3032980, BRACE3032983, BRACE3033525, BRACE3034159, BRACE3034183, BRACE3034389, BRACE3034964, BRACE3034993, BRACE3035168, BRACE3035227, BRACE3036156, BRACE3036271, BRACE3037612, BRACE3037637, BRACE3037803, BRACE3038012, BRACE3038030, BRACE3038569, BRACE3038570, BRACE3038687, BRACE3038760, BRACE3039288, BRACE3039358, BRACE3039378, BRACE3039454, BRACE3040012, BRACE3040239, BRACE3040504, BRACE3040644, BRACE3040856, BRACE3040863, BRACE3041059, BRACE3041162, BRACE3041827, BRACE3042046, BRACE3042210, BRACE3042326, BRACE3042409, BRACE3042432, BRACE3042594, BRACE3043597, BRACE3044090, BRACE3044172, BRACE3044247, BRACE3044377, BRACE3044389, BRACE3044495, BRACE3045011, BRACE3045033, BRACE3045078, BRACE3045145, BRACE3045424, BRACE3045708, BRACE3045981, BRACE3046049, BRACE3046152, BRACE3046294, BRACE3046450, BRACE3046466, BRACE3046491, BRACE3046609, BRACE3046762, BRACE3046837, BRACE3046855, BRACE3046966, BRACE3047018, BRACE3047482, BRACE3047801, BRALZ1000047, BRALZ1000103, BRALZ2000189, BRALZ2000263, BRALZ2000988, BRALZ2001038, BRALZ2001279, BRALZ2001350, BRALZ2001445, BRALZ2001559, BRALZ2001743, BRALZ2001834, BRALZ2002174, BRALZ2002418, BRALZ2002477, BRALZ2003119, BRALZ2003330, BRALZ2003453, BRALZ2003525, BRALZ2004397, BRALZ2005467, BRALZ2005471, BRALZ2005888, BRALZ2005950, BRALZ2005992, BRALZ2006288, BRALZ2006474, BRALZ2006560, BRALZ2006734, BRALZ2006800, BRALZ2006976, BRALZ2007376, BRALZ2007545, BRALZ2007576, BRALZ2007661, BRALZ2007790, BRALZ2007793, BRALZ2007952, BRALZ2008031, BRALZ2008166, BRALZ2008462, BRALZ2008617, BRALZ2008696, BRALZ2008763, BRALZ2008869, BRALZ2008930, BRALZ2009446, BRALZ2009486, BRALZ2010186, BRALZ2010842, BRALZ2011337, BRALZ2011796, BRALZ2011880, BRALZ2012050, BRALZ2012183, BRALZ2012848, BRALZ2013621, BRALZ2013690, BRALZ2014054, BRALZ2014316, BRALZ2014484, BRALZ2014951, BRALZ2015168, BRALZ2015811, BRALZ2016085, BRALZ2016498, BRALZ2017359, BRALZ2017531, BRALZ2017607, BRALZ2017620, BRALZ2017844, BRALZ2018342, BRALZ2018492, BRALZ2018834, BRALZ2019047, BRAMY1000095, BRAMY1000098, BRAMY1000130, BRAMY1000157, BRAMY1000173, BRAMY2000021, BRAMY2000025, BRAMY2000052, BRAMY2000076, BRAMY2000086, BRAMY2000151, BRAMY2000181, BRAMY2000196, BRAMY2000231, BRAMY2000277, BRAMY2000354, BRAMY2000388, BRAMY2000411, BRAMY2000508, BRAMY2000562, BRAMY2000653, BRAMY2000814, BRAMY2000893, BRAMY2000946, BRAMY2000981, BRAMY2000987, BRAMY2001068, BRAMY2001114, BRAMY2001203, BRAMY2001282, BRAMY2001367, BRAMY2001427, BRAMY2001473, BRAMY2001678, BRAMY2002005, BRAMY2002044, BRAMY2002072, BRAMY2002158, BRAMY2002311, BRAMY2002339, BRAMY2002364, BRAMY2002479, BRAMY2002493, BRAMY2002525, BRAMY2002584, BRAMY2002604, BRAMY2002621, BRAMY2002638, BRAMY2002739, BRAMY2002799, BRAMY2002853, BRAMY2002862, BRAMY2002956, BRAMY2003008, BRAMY2003037, BRAMY2003117, BRAMY2003287, BRAMY2003325, BRAMY2003529, BRAMY2003538, BRAMY2003585, BRAMY2003634, BRAMY2003653, BRAMY2003681, BRAMY2003893, BRAMY2003897, BRAMY2003898, BRAMY2003904, BRAMY2003926, BRAMY2003929, BRAMY2004031, BRAMY2004058, BRAMY2004183, BRAMY2004335, BRAMY2004351, BRAMY2004352, BRAMY2004387, BRAMY2004492, BRAMY2004524, BRAMY2004537, BRAMY2004542, BRAMY2004756, BRAMY2004771, BRAMY2005052, BRAMY2005064, BRAMY2005094, BRAMY2005151, BRAMY2005182, BRAMY2005244, BRAMY2005391, BRAMY2005488, BRAMY2005576, BRAMY2005648, BRAMY2005662, BRAMY2005708, BRAMY2005711, BRAMY2006092, BRAMY2006118, BRAMY2006149, BRAMY2006366, BRAMY2006375, BRAMY2006397, BRAMY2006411, BRAMY2006459, BRAMY2006466, BRAMY2006659, BRAMY2006779, BRAMY2006809, BRAMY2006879, BRAMY2007043, BRAMY2007110, BRAMY2007185, BRAMY2007244, BRAMY2007249, BRAMY2007255, BRAMY2007287, BRAMY2007308, BRAMY2007411, BRAMY2007458, BRAMY2007486, BRAMY2007546, BRAMY2007567, BRAMY2007594, BRAMY2007610, BRAMY2007653, BRAMY2007753, BRAMY2007859, BRAMY2008333, BRAMY2008382, BRAMY2008563, BRAMY2008583, BRAMY2008977, BRAMY2008979, BRAMY2009013, BRAMY2009023, BRAMY2009034, BRAMY2009105, BRAMY2009123, BRAMY2009192, BRAMY2009344, BRAMY2009349, BRAMY2009394, BRAMY2009489, BRAMY2009508, BRAMY2009528, BRAMY2009557, BRAMY2009612, BRAMY2009693, BRAMY2010068, BRAMY2010135, BRAMY2010145, BRAMY2010171, BRAMY2010208, BRAMY2010239, BRAMY2010272, BRAMY2010290, BRAMY2010357, BRAMY2010366, BRAMY2010395, BRAMY2010441, BRAMY2010442, BRAMY2010464, BRAMY2010581, BRAMY2010798, BRAMY2010808, BRAMY2010919, BRAMY2011064, BRAMY2011105, BRAMY2011178, BRAMY2011196, BRAMY2011216, BRAMY2011253, BRAMY2011446, BRAMY2011480, BRAMY2011639, BRAMY2011679, BRAMY2011811, BRAMY2011841, BRAMY2011846, BRAMY2011849, BRAMY2011872, BRAMY2011961, BRAMY2012017, BRAMY2012119, BRAMY2012162, BRAMY2012163, BRAMY2012277, BRAMY2012340, BRAMY2012426, BRAMY2012497, BRAMY2012517, BRAMY2012536, BRAMY2012555, BRAMY2012568, BRAMY2012581, BRAMY2012691, BRAMY2012721, BRAMY2012731, BRAMY2012776, BRAMY2012880, BRAMY2012881, BRAMY2013169, BRAMY2013200, BRAMY2013216, BRAMY2013405, BRAMY2013414, BRAMY2013572, BRAMY2013590, BRAMY2013621, BRAMY2013659, BRAMY2013722, BRAMY2013736, BRAMY2013756, BRAMY2013944, BRAMY2013975, BRAMY2014019, BRAMY2014205, BRAMY2014387, BRAMY2014462, BRAMY2014469, BRAMY2014541, BRAMY2014754, BRAMY2014813, BRAMY2015251, BRAMY2015311, BRAMY2015420, BRAMY2015503, BRAMY2015516, BRAMY2015550, BRAMY2015551, BRAMY2015559, BRAMY2015688, BRAMY2015705, BRAMY2015782, BRAMY2015833, BRAMY2015855, BRAMY2015890, BRAMY2015911, BRAMY2015925, BRAMY2016002, BRAMY2016009, BRAMY2016020, BRAMY2016070, BRAMY2016251, BRAMY2016325, BRAMY2016327, BRAMY2016386, BRAMY2016706, BRAMY2016771, BRAMY2016892, BRAMY2016938, BRAMY2016953, BRAMY2017014, BRAMY2017249, BRAMY2017348, BRAMY2017450, BRAMY2017455, BRAMY2017528, BRAMY2017864, BRAMY2018027, BRAMY2018106, BRAMY2018122, BRAMY2018126, BRAMY2018272, BRAMY2018273, BRAMY2018279, BRAMY2018295, BRAMY2018308, BRAMY2018396, BRAMY2018467, BRAMY2018635, BRAMY2018785, BRAMY2019055, BRAMY2019111, BRAMY2019277, BRAMY2019300, BRAMY2019468, BRAMY2019509, BRAMY2019600, BRAMY2019643, BRAMY2019710, BRAMY2019963, BRAMY2019985, BRAMY2019989, BRAMY2020050, BRAMY2020106, BRAMY2020270, BRAMY2020354, BRAMY2020355, BRAMY2020412, BRAMY2020445, BRAMY2020466, BRAMY2020520, BRAMY2020574, BRAMY2020634, BRAMY2020713, BRAMY2021040, BRAMY2021063, BRAMY2021098, BRAMY2021139, BRAMY2021142, BRAMY2021276, BRAMY2021310, BRAMY2021388, BRAMY2021498, BRAMY2021523, BRAMY2021710, BRAMY2021732, BRAMY2021746, BRAMY2021825, BRAMY2021867, BRAMY2021962, BRAMY2021982, BRAMY2022052, BRAMY2022160, BRAMY2022168, BRAMY2022263, BRAMY2022301, BRAMY2022320, BRAMY2022383, BRAMY2022445, BRAMY2022454, BRAMY2022525, BRAMY2022532, BRAMY2022723, BRAMY2022786, BRAMY2022796, BRAMY2022929, BRAMY2022980, BRAMY2022984, BRAMY2023060, BRAMY2023110, BRAMY2023115, BRAMY2023161, BRAMY2023172, BRAMY2023238, BRAMY2023327, BRAMY2023358, BRAMY2023406, BRAMY2023482, BRAMY2023514, BRAMY2023719, BRAMY2023729, BRAMY2023786, BRAMY2023852, BRAMY2023863, BRAMY2023939, BRAMY2024004, BRAMY2024073, BRAMY2024312, BRAMY2024374, BRAMY2024390, BRAMY2024416, BRAMY2024449, BRAMY2024489, BRAMY2024497, BRAMY2024514, BRAMY2024530, BRAMY2024535, BRAMY2024545, BRAMY2024576, BRAMY2024593, BRAMY2024711, BRAMY2024715, BRAMY2024728, BRAMY2024827, BRAMY2024849, BRAMY2025024, BRAMY2025032, BRAMY2025121, BRAMY2025175, BRAMY2025218, BRAMY2025230, BRAMY2025272, BRAMY2025277, BRAMY2025495, BRAMY2025812, BRAMY2025996, BRAMY2026009, BRAMY2026091, BRAMY2026168, BRAMY2026300, BRAMY2026347, BRAMY2026395, BRAMY2026405, BRAMY2026533, BRAMY2026538, BRAMY2026713, BRAMY2026824, BRAMY2026899, BRAMY2026902, BRAMY2026904, BRAMY2026976, BRAMY2027073, BRAMY2027114, BRAMY2027242, BRAMY2027396, BRAMY2027451, BRAMY2027461, BRAMY2027467, BRAMY2027587, BRAMY2027714, BRAMY2027717, BRAMY2027752, BRAMY2027782, BRAMY2028072, BRAMY2028183, BRAMY2028188, BRAMY2028269, BRAMY2028282, BRAMY2028472, BRAMY2028491, BRAMY2028516, BRAMY2028565, BRAMY2028593, BRAMY2028682, BRAMY2028783, BRAMY2028796, BRAMY2028856, BRAMY2028914, BRAMY2029204, BRAMY2029602, BRAMY2029988, BRAMY2030098, BRAMY2030109, BRAMY2030206, BRAMY2030477, BRAMY2030545, BRAMY2030607, BRAMY2030702, BRAMY2030703, BRAMY2030768, BRAMY2030799, BRAMY2030859, BRAMY2030915, BRAMY2031317, BRAMY2031377, BRAMY2031442, BRAMY2031516, BRAMY2032014, BRAMY2032231, BRAMY2032242, BRAMY2032290, BRAMY2032311, BRAMY2032317, BRAMY2032344, BRAMY2032589, BRAMY2032678, BRAMY2032696, BRAMY2032777, BRAMY2032994, BRAMY2033003, BRAMY2033116, BRAMY2033240, BRAMY2033267, BRAMY2033316, BRAMY2033332, BRAMY2033506, BRAMY2033594, BRAMY2033895, BRAMY2033914, BRAMY2034072, BRAMY2034185, BRAMY2034187, BRAMY2034305, BRAMY2034561, BRAMY2034920, BRAMY2034993, BRAMY2035070, BRAMY2035449, BRAMY2035545, BRAMY2035606, BRAMY2035718, BRAMY2035719, BRAMY2035801, BRAMY2035869, BRAMY2035923, BRAMY2036076, BRAMY2036079, BRAMY2036254, BRAMY2036266, BRAMY2036387, BRAMY2036396, BRAMY2036459, BRAMY2036567, BRAMY2036615, BRAMY2036699, BRAMY2036913, BRAMY2036918, BRAMY2036968, BRAMY2037147, BRAMY2037328, BRAMY2037609, BRAMY2037629, BRAMY2037800, BRAMY2037823, BRAMY2037971, BRAMY2038100, BRAMY2038128, BRAMY2038317, BRAMY2038475, BRAMY2038484, BRAMY2038516, BRAMY2038832, BRAMY2038846, BRAMY2038887, BRAMY2038904, BRAMY2039287, BRAMY2039300, BRAMY2039314, BRAMY2039341, BRAMY2039630, BRAMY2039695, BRAMY2039728, BRAMY2039872, BRAMY2040051, BRAMY2040159, BRAMY2040214, BRAMY2040478, BRAMY2040915, BRAMY2041261, BRAMY2041347, BRAMY2041378, BRAMY2041384, BRAMY2041434, BRAMY2041507, BRAMY2041542, BRAMY2041738, BRAMY2042122, BRAMY2042131, BRAMY2042178, BRAMY2042195, BRAMY2042244, BRAMY2042549, BRAMY2042596, BRAMY2042612, BRAMY2042641, BRAMY2042711, BRAMY2042760, BRAMY2042804, BRAMY2042899, BRAMY2042918, BRAMY2043069, BRAMY2043103, BRAMY2043314, BRAMY2043345, BRAMY2044246, BRAMY2044317, BRAMY2044349, BRAMY2044686, BRAMY2044838, BRAMY2045036, BRAMY2045299, BRAMY2045471, BRAMY2045530, BRAMY2046109, BRAMY2046478, BRAMY2046489, BRAMY2046537, BRAMY2046667, BRAMY2046742, BRAMY2046871, BRAMY2046984, BRAMY2046989, BRAMY2047169, BRAMY2047280, BRAMY2047676, BRAMY2047692, BRAMY2047746, BRAMY2047751, BRAMY2047765, BRAMY2047884, BRAMY2047948, BRAMY3000206, BRAMY3000210, BRAMY3000213, BRAMY3000224, BRAMY3000254, BRAMY3000307, BRAMY3000692, BRAMY3001356, BRAMY3001401, BRAMY3001409, BRAMY3001794, BRAMY3002120, BRAMY3002312, BRAMY3002329, BRAMY3002458, BRAMY3002508, BRAMY3002620, BRAMY3002805, BRAMY3002886, BRAMY3002991, BRAMY3003026, BRAMY3003109, BRAMY3003205, BRAMY3003310, BRAMY3003566, BRAMY3003723, BRAMY3004126, BRAMY3004224, BRAMY3004364, BRAMY3004672, BRAMY3004800, BRAMY3004900, BRAMY3004919, BRAMY3005091, BRAMY3005184, BRAMY3005656, BRAMY3005912, BRAMY3005932, BRAMY3006032, BRAMY3006297, BRAMY3006761, BRAMY3007078, BRAMY3007206, BRAMY3007311, BRAMY3007350, BRAMY3007449, BRAMY3007471, BRAMY3007609, BRAMY3007723, BRAMY3007968, BRAMY3008044, BRAMY3008088, BRAMY3008096, BRAMY3008335, BRAMY3008466, BRAMY3008505, BRAMY3008650, BRAMY3008937, BRAMY3009158, BRAMY3009207, BRAMY3009491, BRAMY3009556, BRAMY3009782, BRAMY3009811, BRAMY3009904, BRAMY3010264, BRAMY3010321, BRAMY3010411, BRAMY3010603, BRAMY3010654, BRAMY4000089, BRAMY4000095, BRAMY4000229, BRAMY4000277, BRAMY4000915, BRAMY4000962, BRAMY4001173, BRAMY4001200, BRAMY4001234, BRAMY4001449, BRAMY4001652, BRAMY4001913, BRAMY4002575, BRAMY4002628, BRASW1000053, BRASW1000125, BRAWH1000001, BRAWH1000002, BRAWH1000007, BRAWH1000037, BRAWH1000040, BRAWH1000045, BRAWH1000083, BRAWH1000094, BRAWH1000116, BRAWH1000127, BRAWH1000130, BRAWH1000157, BRAWH1000162, BRAWH1000164, BRAWH1000168, BRAWH1000174, BRAWH1000180, BRAWH1000369, BRAWH2000034, BRAWH2000048, BRAWH2000071, BRAWH2000082, BRAWH2000093, BRAWH2000109, BRAWH2000131, BRAWH2000142, BRAWH2000169, BRAWH2000177, BRAWH2000218, BRAWH2000232, BRAWH2000248, BRAWH2000256, BRAWH2000274, BRAWH2000323, BRAWH2000353, BRAWH2000370, BRAWH2000409, BRAWH2000417, BRAWH2000443, BRAWH2000471, BRAWH2000476, BRAWH2000482, BRAWH2000488, BRAWH2000494, BRAWH2000500, BRAWH2000503, BRAWH2000522, BRAWH2000554, BRAWH2000588, BRAWH2000595, BRAWH2000636, BRAWH2000643, BRAWH2000651, BRAWH2000682, BRAWH2000686, BRAWH2000697, BRAWH2000752, BRAWH2000859, BRAWH2000866, BRAWH2000892, BRAWH2000901, BRAWH2000924, BRAWH2000926, BRAWH2000944, BRAWH2000984, BRAWH2001019, BRAWH2001037, BRAWH2001052, BRAWH2001103, BRAWH2001129, BRAWH2001137, BRAWH2001141, BRAWH2001159, BRAWH2001166, BRAWH2001186, BRAWH2001203, BRAWH2001238, BRAWH2001239, BRAWH2001255, BRAWH2001355, BRAWH2001378, BRAWH2001395, BRAWH2001406, BRAWH2001412, BRAWH2001418, BRAWH2001424, BRAWH2001436, BRAWH2001438, BRAWH2001439, BRAWH2001459, BRAWH2001461, BRAWH2001484, BRAWH2001492, BRAWH2001503, BRAWH2001519, BRAWH2001530, BRAWH2001535, BRAWH2001589, BRAWH2001662, BRAWH2001666, BRAWH2001679, BRAWH2001686, BRAWH2001701, BRAWH2001842, BRAWH2001862, BRAWH2001873, BRAWH2001940, BRAWH2001973, BRAWH2002047, BRAWH2002060, BRAWH2002062, BRAWH2002125, BRAWH2002191, BRAWH2002318, BRAWH2002333, BRAWH2002352, BRAWH2002383, BRAWH2002549, BRAWH2002560, BRAWH2002601, BRAWH2002623, BRAWH2002630, BRAWH2002635, BRAWH2002662, BRAWH2002679, BRAWH2002725, BRAWH2002761, BRAWH2002811, BRAWH2002861, BRAWH2002911, BRAWH2002963, BRAWH2002967, BRAWH2002976, BRAWH2003000, BRAWH2003025, BRAWH2003307, BRAWH2003355, BRAWH2003366, BRAWH2003662, BRAWH2003689, BRAWH2003693, BRAWH2003818, BRAWH2003832, BRAWH2003948, BRAWH2003964, BRAWH2004044, BRAWH2004068, BRAWH2004078, BRAWH2004095, BRAWH2004136, BRAWH2004217, BRAWH2004580, BRAWH2004731, BRAWH2004779, BRAWH2004842, BRAWH2004884, BRAWH2004923, BRAWH2005008, BRAWH2005074, BRAWH2005225, BRAWH2005315, BRAWH2005517, BRAWH2005524, BRAWH2005533, BRAWH2005578, BRAWH2005812, BRAWH2005974, BRAWH2005998, BRAWH2006044, BRAWH2006083, BRAWH2006207, BRAWH2006301, BRAWH2006395, BRAWH2006405, BRAWH2006450, BRAWH2006493, BRAWH2006526, BRAWH2006543, BRAWH2006622, BRAWH2006760, BRAWH2006960, BRAWH2006989, BRAWH2006996, BRAWH2007069, BRAWH2007308, BRAWH2007406, BRAWH2007550, BRAWH2007570, BRAWH2007591, BRAWH2007605, BRAWH2007658, BRAWH2007664, BRAWH2007800, BRAWH2007808, BRAWH2007825, BRAWH2007862, BRAWH2007890, BRAWH2008058, BRAWH2008128, BRAWH2008219, BRAWH2008255, BRAWH2008292, BRAWH2008297, BRAWH2008366, BRAWH2008380, BRAWH2008540, BRAWH2008706, BRAWH2008790, BRAWH2008903, BRAWH2008993, BRAWH2009112, BRAWH2009238, BRAWH2009261, BRAWH2009263, BRAWH2009298, BRAWH2009307, BRAWH2009360, BRAWH2009393, BRAWH2009485, BRAWH2009490, BRAWH2009558, BRAWH2009590, BRAWH2009626, BRAWH2009678, BRAWH2009695, BRAWH2009907, BRAWH2010000, BRAWH2010069, BRAWH2010084, BRAWH2010136, BRAWH2010318, BRAWH2010329, BRAWH2010354, BRAWH2010364, BRAWH2010536, BRAWH2010552, BRAWH2010584, BRAWH2010618, BRAWH2010619, BRAWH2010754, BRAWH2010980, BRAWH2011066, BRAWH2011079, BRAWH2011096, BRAWH2011155, BRAWH2011166, BRAWH2011204, BRAWH2011286, BRAWH2011294, BRAWH2011343, BRAWH2011400, BRAWH2011762, BRAWH2011795, BRAWH2011796, BRAWH2011812, BRAWH2011823, BRAWH2011860, BRAWH2011920, BRAWH2011958, BRAWH2012054, BRAWH2012077, BRAWH2012161, BRAWH2012162, BRAWH2012164, BRAWH2012258, BRAWH2012277, BRAWH2012326, BRAWH2012538, BRAWH2012540, BRAWH2012619, BRAWH2012698, BRAWH2012749, BRAWH2012827, BRAWH2012866, BRAWH2012963, BRAWH2013047, BRAWH2013219, BRAWH2013294, BRAWH2013748, BRAWH2013866, BRAWH2013871, BRAWH2013914, BRAWH2013941, BRAWH2013955, BRAWH2014053, BRAWH2014234, BRAWH2014379, BRAWH2014414, BRAWH2014473, BRAWH2014511, BRAWH2014662, BRAWH2014717, BRAWH2014729, BRAWH2014876, BRAWH2014934, BRAWH2014954, BRAWH2015247, BRAWH2015349, BRAWH2015375, BRAWH2015385, BRAWH2015595, BRAWH2015728, BRAWH2015853, BRAWH2015866, BRAWH2016028, BRAWH2016106, BRAWH2016160, BRAWH2016166, BRAWH2016209, BRAWH2016221, BRAWH2016223, BRAWH2016269, BRAWH2016305, BRAWH2016439, BRAWH2016446, BRAWH2016514, BRAWH2016562, BRAWH2016655, BRAWH2016679, BRAWH2016702, BRAWH2016724, BRAWH2016785, BRAWH2016792, BRAWH2016800, BRAWH2017002, BRAWH2017103, BRAWH2017250, BRAWH2017294, BRAWH2017304, BRAWH2017305, BRAWH2017379, BRAWH2017407, BRAWH2017433, BRAWH2017523, BRAWH2017534, BRAWH2017542, BRAWH2017635, BRAWH2017913, BRAWH2018206, BRAWH2018267, BRAWH2018282, BRAWH2018317, BRAWH2018506, BRAWH2018514, BRAWH2018526, BRAWH2018527, BRAWH2018601, BRAWH2018729, BRAWH2018745, BRAWH2018875, BRAWH2019053, BRAWH2019055, BRAWH2019198, BRAWH3000078, BRAWH3000088, BRAWH3000100, BRAWH3000166, BRAWH3000314, BRAWH3000329, BRAWH3000410, BRAWH3000446, BRAWH3000491, BRAWH3000604, BRAWH3000884, BRAWH3001053, BRAWH3001319, BRAWH3001326, BRAWH3001475, BRAWH3001636, BRAWH3001638, BRAWH3001712, BRAWH3001760, BRAWH3001783, BRAWH3001833, BRAWH3001879, BRAWH3001891, BRAWH3001918, BRAWH3002433, BRAWH3002467, BRAWH3002513, BRAWH3002600, BRAWH3002819, BRAWH3003019, BRAWH3003136, BRAWH3003244, BRAWH3003343, BRAWH3003411, BRAWH3003522, BRAWH3003573, BRAWH3003598, BRAWH3003727, BRAWH3003801, BRAWH3003975, BRAWH3004222, BRAWH3004335, BRAWH3004350, BRAWH3004453, BRAWH3004530, BRAWH3004666, BRAWH3005037, BRAWH3005047, BRAWH3005132, BRAWH3005146, BRAWH3005292, BRAWH3005300, BRAWH3005422, BRAWH3005534, BRAWH3005886, BRAWH3005892, BRAWH3005896, BRAWH3005912, BRAWH3005981, BRAWH3006547, BRAWH3006548, BRAWH3006761, BRAWH3006792, BRAWH3007129, BRAWH3007221, BRAWH3007441, BRAWH3007455, BRAWH3007506, BRAWH3007726, BRAWH3007783, BRAWH3008167, BRAWH3008341, BRAWH3008559, BRAWH3008697, BRAWH3008867, BRAWH3008931, BRAWH3009017, BRAWH3009285, BRAWH3009297, BRAWH3009546, BRAWH3009961, BRAWH3010461, BRAWH3010560, BRAWH3010602, BRAWH3010657, BRAWH3010726, BRAWH3010833, BRAWH3011101, BRAWH3011331, BRAWH3011402, BRAWH3011577, BRAWH3011623, BRAWH3011637, BRAWH3011685, BRAWH3011907, BRAWH3011929, BRAWH3012005, BRAWH3012662, BRAWH3012779, BRAWH3013009, BRAWH3013049, BRAWH3013197, BRAWH3013264, BRAWH3013508, BRAWH3014609, BRAWH3014639, BRAWH3015017, BRAWH3015175, BRAWH3015260, BRAWH3015610, BRAWH3015825, BRAWH3016123, BRAWH3016271, BRAWH3016715, BRAWH3017259, BRAWH3017260, BRAWH3017477, BRAWH3017537, BRAWH3017980, BRAWH3018063, BRAWH3018369, BRAWH3018548, BRAWH3018969, BRAWH3019026, BRAWH3019529, BRAWH3019594, BRAWH3019629, BRAWH3019820, BRAWH3020200, BRAWH3020318, BRAWH3020486, BRAWH3020884, BRAWH3020928, BRAWH3021012, BRAWH3021580, BRAWH3021641, BRAWH3021643, BRAWH3021724, BRAWH3022347, BRAWH3022431, BRAWH3022459, BRAWH3022542, BRAWH3022719, BRAWH3022866, BRAWH3022900, BRAWH3023156, BRAWH3023168, BRAWH3023172, BRAWH3023274, BRAWH3023421, BRAWH3024231, BRAWH3024242, BRAWH3024469, BRAWH3024506, BRAWH3024613, BRAWH3024989, BRAWH3026349, BRAWH3026394, BRAWH3026529, BRAWH3027420, BRAWH3027440, BRAWH3027533, BRAWH3027574, BRAWH3027607, BRAWH3027616, BRAWH3027675, BRAWH3027806, BRAWH3027880, BRAWH3027927, BRAWH3028202, BRAWH3028223, BRAWH3028306, BRAWH3028461, BRAWH3028645, BRAWH3028754, BRAWH3028796, BRAWH3029254, BRAWH3029313, BRAWH3029538, BRAWH3029556, BRAWH3029806, BRAWH3030613, BRAWH3030772, BRAWH3030810, BRAWH3030892, BRAWH3030910, BRAWH3030950, BRAWH3031054, BRAWH3031710, BRAWH3031902, BRAWH3032298, BRAWH3032340, BRAWH3032571, BRAWH3032620, BRAWH3032930, BRAWH3033117, BRAWH3033293, BRAWH3033448, BRAWH3033513, BRAWH3034097, BRAWH3034114, BRAWH3034134, BRAWH3034668, BRAWH3034743, BRAWH3034775, BRAWH3034890, BRAWH3035154, BRAWH3035403, BRAWH3035904, BRAWH3035914, BRAWH3035936, BRAWH3036077, BRAWH3036247, BRAWH3036270, BRAWH3036561, BRAWH3036738, BRAWH3036951, BRAWH3037265, BRAWH3037394, BRAWH3037533, BRAWH3037979, BRAWH3038055, BRAWH3038230, BRAWH3038252, BRAWH3038324, BRCAN1000065, BRCAN1000076, BRCAN1000105, BRCAN1000149, BRCAN1000168, BRCAN2000148, BRCAN2000149, BRCAN2000209, BRCAN2000239, BRCAN2000346, BRCAN2000364, BRCAN2000383, BRCAN2000418, BRCAN2000523, BRCAN2000541, BRCAN2000563, BRCAN2000577, BRCAN2000620, BRCAN2000639, BRCAN2000763, BRCAN2000832, BRCAN2001223, BRCAN2001866, BRCAN2002173, BRCAN2002416, BRCAN2002473, BRCAN2002562, BRCAN2002662, BRCAN2002826, BRCAN2002854, BRCAN2002856, BRCAN2002892, BRCAN2002944, BRCAN2002948, BRCAN2003070, BRCAN2003269, BRCAN2003389, BRCAN2003628, BRCAN2003703, BRCAN2003746, BRCAN2003814, BRCAN2003987, BRCAN2004173, BRCAN2004355, BRCAN2004371, BRCAN2004653, BRCAN2004699, BRCAN2005436, BRCAN2005449, BRCAN2006019, BRCAN2006051, BRCAN2006063, BRCAN2006117, BRCAN2006174, BRCAN2006290, BRCAN2006297, BRCAN2006323, BRCAN2006401, BRCAN2006411, BRCAN2006450, BRCAN2006955, BRCAN2007119, BRCAN2007144, BRCAN2007409, BRCAN2007426, BRCAN2007525, BRCAN2007700, BRCAN2008494, BRCAN2008528, BRCAN2008701, BRCAN2008894, BRCAN2009156, BRCAN2009168, BRCAN2009203, BRCAN2010374, BRCAN2010376, BRCAN2010547, BRCAN2010581, BRCAN2010665, BRCAN2011254, BRCAN2011316, BRCAN2011602, BRCAN2011946, BRCAN2012110, BRCAN2012355, BRCAN2012402, BRCAN2012408, BRCAN2012481, BRCAN2012613, BRCAN2012713, BRCAN2012929, BRCAN2013655, BRCAN2013660, BRCAN2014143, BRCAN2014229, BRCAN2014370, BRCAN2014602, BRCAN2014652, BRCAN2014788, BRCAN2014881, BRCAN2014952, BRCAN2015402, BRCAN2015464, BRCAN2015757, BRCAN2015886, BRCAN2016025, BRCAN2016046, BRCAN2016174, BRCAN2016433, BRCAN2016619, BRCAN2016762, BRCAN2016814, BRCAN2017442, BRCAN2017905, BRCAN2018240, BRCAN2018269, BRCAN2018490, BRCAN2018566, BRCAN2018667, BRCAN2018748, BRCAN2018935, BRCAN2019002, BRCAN2019387, BRCAN2019653, BRCAN2019773, BRCAN2019907, BRCAN2020234, BRCAN2020331, BRCAN2020412, BRCAN2020467, BRCAN2020880, BRCAN2021024, BRCAN2021028, BRCAN2021325, BRCAN2021452, BRCAN2021669, BRCAN2021718, BRCAN2022126, BRCAN2022191, BRCAN2022472, BRCAN2022474, BRCAN2023347, BRCAN2023724, BRCAN2024451, BRCAN2024563, BRCAN2025009, BRCAN2025093, BRCAN2025349, BRCAN2025368, BRCAN2025712, BRCAN2025982, BRCAN2026117, BRCAN2026340, BRCAN2026711, BRCAN2027150, BRCAN2027310, BRCAN2027334, BRCAN2027355, BRCAN2027364, BRCAN2027513, BRCAN2027593, BRCAN2027970, BRCAN2028021, BRCAN2028040, BRCAN2028319, BRCAN2028338, BRCAN2028355, BRCAN2028378, BRCAN2028460, BRCAN2028545, BRCAN2028634, BRCAN2028702, BRCOC1000087, BRCOC1000094, BRCOC2000004, BRCOC2000047, BRCOC2000152, BRCOC2000184, BRCOC2000186, BRCOC2000333, BRCOC2000360, BRCOC2000404, BRCOC2000637, BRCOC2000670, BRCOC2000816, BRCOC2000850, BRCOC2001355, BRCOC2002085, BRCOC2002155, BRCOC2002323, BRCOC2002659, BRCOC2002664, BRCOC2002686, BRCOC2002751, BRCOC2002756, BRCOC2002777, BRCOC2002835, BRCOC2003100, BRCOC2003213, BRCOC2003513, BRCOC2003732, BRCOC2003740, BRCOC2004036, BRCOC2004175, BRCOC2004354, BRCOC2004455, BRCOC2004950, BRCOC2005542, BRCOC2005903, BRCOC2005951, BRCOC2006164, BRCOC2006189, BRCOC2006243, BRCOC2006270, BRCOC2006639, BRCOC2006942, BRCOC2007034, BRCOC2007593, BRCOC2007733, BRCOC2007769, BRCOC2008064, BRCOC2008225, BRCOC2008642, BRCOC2008993, BRCOC2009052, BRCOC2009196, BRCOC2009380, BRCOC2009638, BRCOC2009937, BRCOC2010115, BRCOC2010510, BRCOC2010730, BRCOC2010980, BRCOC2010994, BRCOC2011010, BRCOC2011398, BRCOC2011418, BRCOC2011506, BRCOC2011769, BRCOC2011996, BRCOC2012172, BRCOC2012229, BRCOC2012386, BRCOC2012551, BRCOC2012813, BRCOC2013448, BRCOC2013573, BRCOC2013675, BRCOC2013780, BRCOC2014013, BRCOC2014033, BRCOC2014400, BRCOC2014748, BRCOC2014833, BRCOC2015597, BRCOC2015824, BRCOC2015908, BRCOC2015944, BRCOC2016525, BRCOC2016661, BRCOC2017061, BRCOC2017652, BRCOC2017856, BRCOC2018775, BRCOC2018877, BRCOC2019255, BRCOC2019549, BRCOC2019841, BRCOC2019896, BRCOC2019910, BRCOC2019934, BRCOC2020122, BRCOC2020142, BRHIP1000058, BRHIP1000072, BRHIP1000104, BRHIP1000108, BRHIP1000129, BRHIP1000174, BRHIP1000258, BRHIP2000021, BRHIP2000079, BRHIP2000087, BRHIP2000163, BRHIP2000210, BRHIP2000239, BRHIP2000245, BRHIP2000312, BRHIP2000359, BRHIP2000445, BRHIP2000506, BRHIP2000532, BRHIP2000621, BRHIP2000691, BRHIP2000819, BRHIP2000826, BRHIP2000920, BRHIP2001074, BRHIP2001099, BRHIP2001686, BRHIP2001782, BRHIP2001802, BRHIP2001805, BRHIP2001886, BRHIP2001927, BRHIP2002122, BRHIP2002143, BRHIP2002172, BRHIP2002346, BRHIP2002510, BRHIP2002664, BRHIP2002722, BRHIP2002929, BRHIP2003048, BRHIP2003062, BRHIP2003242, BRHIP2003272, BRHIP2003748, BRHIP2003786, BRHIP2003828, BRHIP2003917, BRHIP2004312, BRHIP2004355, BRHIP2004359, BRHIP2004883, BRHIP2004902, BRHIP2005010, BRHIP2005236, BRHIP2005271, BRHIP2005354, BRHIP2005600, BRHIP2005719, BRHIP2005724, BRHIP2005752, BRHIP2005932, BRHIP2006617, BRHIP2006782, BRHIP2006800, BRHIP2006819, BRHIP2006921, BRHIP2007307, BRHIP2007616, BRHIP2007690, BRHIP2007741, BRHIP2007928, BRHIP2007969, BRHIP2008269, BRHIP2008389, BRHIP2008607, BRHIP2008756, BRHIP2008909, BRHIP2009019, BRHIP2009177, BRHIP2009340, BRHIP2009351, BRHIP2009414, BRHIP2009474, BRHIP2009617, BRHIP2009685, BRHIP2010217, BRHIP2010309, BRHIP2010444, BRHIP2010487, BRHIP2010571, BRHIP2010593, BRHIP2010610, BRHIP2010723, BRHIP2010744, BRHIP2011080, BRHIP2011120, BRHIP2011199, BRHIP2011491, BRHIP2011508, BRHIP2011576, BRHIP2011616, BRHIP2011783, BRHIP2011838, BRHIP2011891, BRHIP2011933, BRHIP2012054, BRHIP2012059, BRHIP2012141, BRHIP2012314, BRHIP2012360, BRHIP2012545, BRHIP2012580, BRHIP2012627, BRHIP2012642, BRHIP2012750, BRHIP2012922, BRHIP2012923, BRHIP2012972, BRHIP2013286, BRHIP2013447, BRHIP2013510, BRHIP2013699, BRHIP2013723, BRHIP2013958, BRHIP2013972, BRHIP2014063, BRHIP2014228, BRHIP2014285, BRHIP2014291, BRHIP2014373, BRHIP2014386, BRHIP2014387, BRHIP2014954, BRHIP2015153, BRHIP2015224, BRHIP2015245, BRHIP2015356, BRHIP2015360, BRHIP2015679, BRHIP2016005, BRHIP2016125, BRHIP2016788, BRHIP2016968, BRHIP2016990, BRHIP2017010, BRHIP2017315, BRHIP2017385, BRHIP2017404, BRHIP2017542, BRHIP2017553, BRHIP2017642, BRHIP2017714, BRHIP2017780, BRHIP2018014, BRHIP2018369, BRHIP2018612, BRHIP2018635, BRHIP2018650, BRHIP2018712, BRHIP2018719, BRHIP2018805, BRHIP2018998, BRHIP2019007, BRHIP2019047, BRHIP2019149, BRHIP2019177, BRHIP2019186, BRHIP2019291, BRHIP2019494, BRHIP2019589, BRHIP2019641, BRHIP2019819, BRHIP2019884, BRHIP2019972, BRHIP2020182, BRHIP2020509, BRHIP2020573, BRHIP2020622, BRHIP2020695, BRHIP2020743, BRHIP2020799, BRHIP2020842, BRHIP2020859, BRHIP2020930, BRHIP2021102, BRHIP2021289, BRHIP2021495, BRHIP2021615, BRHIP2021744, BRHIP2021762, BRHIP2021858, BRHIP2021870, BRHIP2021929, BRHIP2022006, BRHIP2022054, BRHIP2022221, BRHIP2022228, BRHIP2022298, BRHIP2022467, BRHIP2022708, BRHIP2022986, BRHIP2023071, BRHIP2023229, BRHIP2023272, BRHIP2023292, BRHIP2023309, BRHIP2023369, BRHIP2023438, BRHIP2023695, BRHIP2023735, BRHIP2023762, BRHIP2023773, BRHIP2023860, BRHIP2023869, BRHIP2024046, BRHIP2024165, BRHIP2024201, BRHIP2024347, BRHIP2024398, BRHIP2024549, BRHIP2024789, BRHIP2024911, BRHIP2024941, BRHIP2025245, BRHIP2025366, BRHIP2025448, BRHIP2025679, BRHIP2025739, BRHIP2025797, BRHIP2026021, BRHIP2026061, BRHIP2026155, BRHIP2026214, BRHIP2026288, BRHIP2026346, BRHIP2026557, BRHIP2026723, BRHIP2026877, BRHIP2027017, BRHIP2027054, BRHIP2027563, BRHIP2027685, BRHIP2027762, BRHIP2028187, BRHIP2028303, BRHIP2028330, BRHIP2028480, BRHIP2028583, BRHIP2028593, BRHIP2029176, BRHIP2029283, BRHIP2029393, BRHIP2029529, BRHIP2029643, BRHIP2029663, BRHIP3000060, BRHIP3000070, BRHIP3000081, BRHIP3000111, BRHIP3000131, BRHIP3000240, BRHIP3000377, BRHIP3000457, BRHIP3000475, BRHIP3000488, BRHIP3000526, BRHIP3000626, BRHIP3000859, BRHIP3000907, BRHIP3001076, BRHIP3001079, BRHIP3001141, BRHIP3001283, BRHIP3001338, BRHIP3001360, BRHIP3001481, BRHIP3001878, BRHIP3001964, BRHIP3002114, BRHIP3002124, BRHIP3002141, BRHIP3002363, BRHIP3002691, BRHIP3002920, BRHIP3002931, BRHIP3003063, BRHIP3003126, BRHIP3003306, BRHIP3003340, BRHIP3003395, BRHIP3003484, BRHIP3003644, BRHIP3003688, BRHIP3003795, BRHIP3003961, BRHIP3003984, BRHIP3004193, BRHIP3004215, BRHIP3004416, BRHIP3004710, BRHIP3004725, BRHIP3004774, BRHIP3004786, BRHIP3004863, BRHIP3004968, BRHIP3005037, BRHIP3005137, BRHIP3005142, BRHIP3005231, BRHIP3005307, BRHIP3005574, BRHIP3005673, BRHIP3005768, BRHIP3005801, BRHIP3005944, BRHIP3006279, BRHIP3006294, BRHIP3006390, BRHIP3006449, BRHIP3006683, BRHIP3006717, BRHIP3006786, BRHIP3006950, BRHIP3007172, BRHIP3007183, BRHIP3007195, BRHIP3007239, BRHIP3007291, BRHIP3007409, BRHIP3007424, BRHIP3007483, BRHIP3007586, BRHIP3007609, BRHIP3007640, BRHIP3007960, BRHIP3008082, BRHIP3008183, BRHIP3008314, BRHIP3008320, BRHIP3008344, BRHIP3008405, BRHIP3008565, BRHIP3008598, BRHIP3008606, BRHIP3008691, BRHIP3008714, BRHIP3008997, BRHIP3009099, BRHIP3009140, BRHIP3009181, BRHIP3009318, BRHIP3009427, BRHIP3009448, BRHIP3009672, BRHIP3009753, BRHIP3010135, BRHIP3010289, BRHIP3010529, BRHIP3011082, BRHIP3011241, BRHIP3011269, BRHIP3011460, BRHIP3011567, BRHIP3011831, BRHIP3012185, BRHIP3012289, BRHIP3012357, BRHIP3012736, BRHIP3012745, BRHIP3012868, BRHIP3013078, BRHIP3013271, BRHIP3013588, BRHIP3013698, BRHIP3013765, BRHIP3013897, BRHIP3014237, BRHIP3014675, BRHIP3015620, BRHIP3015751, BRHIP3015854, BRHIP3016032, BRHIP3016213, BRHIP3016302, BRHIP3016421, BRHIP3017109, BRHIP3017146, BRHIP3017256, BRHIP3017325, BRHIP3017558, BRHIP3017637, BRHIP3017855, BRHIP3018278, BRHIP3018784, BRHIP3019643, BRHIP3019824, BRHIP3019880, BRHIP3019956, BRHIP3020155, BRHIP3020182, BRHIP3020733, BRHIP3021019, BRHIP3021499, BRHIP3021534, BRHIP3021778, BRHIP3021987, BRHIP3022656, BRHIP3023922, BRHIP3024118, BRHIP3024533, BRHIP3024703, BRHIP3024725, BRHIP3024820, BRHIP3025161, BRHIP3025702, BRHIP3025795, BRHIP3025844, BRHIP3026052, BRHIP3026097, BRHIP3026231, BRHIP3026335, BRHIP3026651, BRHIP3027105, BRHIP3027137, BRHIP3027160, BRHIP3027191, BRHIP3027501, BRHIP3027594, BRHIP3027651, BRHIP3027854, BRHIP3027947, BRHIP3028570, BRHIP3028742, BRSSN1000056, BRSSN1000059, BRSSN1000092, BRSSN1000153, BRSSN2000097, BRSSN2000175, BRSSN2000197, BRSSN2000244, BRSSN2000293, BRSSN2000295, BRSSN2000312, BRSSN2000518, BRSSN2000561, BRSSN2000566, BRSSN2000684, BRSSN2000715, BRSSN2000832, BRSSN2001213, BRSSN2001275, BRSSN2001342, BRSSN2001426, BRSSN2001503, BRSSN2001579, BRSSN2001758, BRSSN2001810, BRSSN2001869, BRSSN2002857, BRSSN2002859, BRSSN2003012, BRSSN2003086, BRSSN2003093, BRSSN2003820, BRSSN2003841, BRSSN2003937, BRSSN2004142, BRSSN2004303, BRSSN2004304, BRSSN2004496, BRSSN2004657, BRSSN2004679, BRSSN2004686, BRSSN2004710, BRSSN2004719, BRSSN2005847, BRSSN2006133, BRSSN2006390, BRSSN2006575, BRSSN2006611, BRSSN2006644, BRSSN2006892, BRSSN2007076, BRSSN2007168, BRSSN2007202, BRSSN2007338, BRSSN2007464, BRSSN2007504, BRSSN2007819, BRSSN2008125, BRSSN2008419, BRSSN2008464, BRSSN2008549, BRSSN2008797, BRSSN2009119, BRSSN2009378, BRSSN2009389, BRSSN2009395, BRSSN2009627, BRSSN2009630, BRSSN2009702, BRSSN2010019, BRSSN2010110, BRSSN2010587, BRSSN2010596, BRSSN2010830, BRSSN2011262, BRSSN2011653, BRSSN2011738, BRSSN2011843, BRSSN2012081, BRSSN2012103, BRSSN2012157, BRSSN2012198, BRSSN2012254, BRSSN2012439, BRSSN2012622, BRSSN2012691, BRSSN2012838, BRSSN2013095, BRSSN2013544, BRSSN2013702, BRSSN2013733, BRSSN2013753, BRSSN2013874, BRSSN2014112, BRSSN2014294, BRSSN2014299, BRSSN2014424, BRSSN2014513, BRSSN2014556, BRSSN2014573, BRSSN2014636, BRSSN2014685, BRSSN2015199, BRSSN2015238, BRSSN2015369, BRSSN2015493, BRSSN2015497, BRSSN2015554, BRSSN2015707, BRSSN2015773, BRSSN2015907, BRSSN2015982, BRSSN2016589, BRSSN2016768, BRSSN2016905, BRSSN2017297, BRSSN2017422, BRSSN2017530, BRSSN2017682, BRSSN2017757, BRSSN2018218, BRSSN2018440, BRSSN2018447, BRSSN2018581, BRSSN2018731, BRSSN2018771, BRSSN2018925, BRSTN1000097, BRSTN2000058, BRSTN2000070, BRSTN2000220, BRSTN2000312, BRSTN2000367, BRSTN2000536, BRSTN2000872, BRSTN2001067, BRSTN2001613, BRSTN2001801, BRSTN2002105, BRSTN2002400, BRSTN2002532, BRSTN2002691, BRSTN2003590, BRSTN2003835, BRSTN2004863, BRSTN2004869, BRSTN2004987, BRSTN2005721, BRSTN2006306, BRSTN2006466, BRSTN2006580, BRSTN2006583, BRSTN2006638, BRSTN2006865, BRSTN2007000, BRSTN2007118, BRSTN2007284, BRSTN2007765, BRSTN2008052, BRSTN2008283, BRSTN2008367, BRSTN2008418, BRSTN2008457, BRSTN2008475, BRSTN2008930, BRSTN2009247, BRSTN2010089, BRSTN2010107, BRSTN2010363, BRSTN2010416, BRSTN2010500, BRSTN2010569, BRSTN2010750, BRSTN2010923, BRSTN2011211, BRSTN2011597, BRSTN2011688, BRSTN2011799, BRSTN2012089, BRSTN2012284, BRSTN2012320, BRSTN2012380, BRSTN2012451, BRSTN2013171, BRSTN2013354, BRSTN2013931, BRSTN2014490, BRSTN2014633, BRSTN2014751, BRSTN2014770, BRSTN2015015, BRSTN2015889, BRSTN2015978, BRSTN2016066, BRSTN2016335, BRSTN2016678, BRSTN2016892, BRSTN2016918, BRSTN2016992, BRSTN2017104, BRSTN2017151, BRSTN2017237, BRSTN2017379, BRSTN2017761, BRSTN2017771, BRSTN2017995, BRSTN2018077, BRSTN2018083, BRSTN2018596, BRSTN2018692, BRSTN2018712, BRSTN2019079, BRSTN2019129, BRTHA1000021, BRTHA1000063, BRTHA1000311, BRTHA2000057, BRTHA2000474, BRTHA2000514, BRTHA2000574, BRTHA2000855, BRTHA2000969, BRTHA2000972, BRTHA2001304, BRTHA2001370, BRTHA2001462, BRTHA2001717, BRTHA2001812, BRTHA2002091, BRTHA2002115, BRTHA2002133, BRTHA2002281, BRTHA2002376, BRTHA2002442, BRTHA2002493, BRTHA2002565, BRTHA2002608, BRTHA2002702, BRTHA2002721, BRTHA2002726, BRTHA2002741, BRTHA2002808, BRTHA2002896, BRTHA2002903, BRTHA2003030, BRTHA2003110, BRTHA2003116, BRTHA2003436, BRTHA2003759, BRTHA2003794, BRTHA2004361, BRTHA2004371, BRTHA2004582, BRTHA2004629, BRTHA2004639, BRTHA2004642, BRTHA2004812, BRTHA2004821, BRTHA2004978, BRTHA2004992, BRTHA2005005, BRTHA2005013, BRTHA2005448, BRTHA2005579, BRTHA2005831, BRTHA2005864, BRTHA2005942, BRTHA2005956, BRTHA2006075, BRTHA2006146, BRTHA2006194, BRTHA2006232, BRTHA2006720, BRTHA2006735, BRTHA2006974, BRTHA2007060, BRTHA2007122, BRTHA2007422, BRTHA2007603, BRTHA2007665, BRTHA2008316, BRTHA2008335, BRTHA2008502, BRTHA2008513, BRTHA2008527, BRTHA2008535, BRTHA2008598, BRTHA2008669, BRTHA2008955, BRTHA2009311, BRTHA2009349, BRTHA2009486, BRTHA2009803, BRTHA2009846, BRTHA2009886, BRTHA2009972, BRTHA2010008, BRTHA2010033, BRTHA2010073, BRTHA2010097, BRTHA2010191, BRTHA2010397, BRTHA2010608, BRTHA2010672, BRTHA2010884, BRTHA2010907, BRTHA2011062, BRTHA2011194, BRTHA2011321, BRTHA2011351, BRTHA2011500, BRTHA2011641, BRTHA2011691, BRTHA2012129, BRTHA2012183, BRTHA2012189, BRTHA2012351, BRTHA2012392, BRTHA2012466, BRTHA2012555, BRTHA2012562, BRTHA2012714, BRTHA2012980, BRTHA2013054, BRTHA2013262, BRTHA2013275, BRTHA2013426, BRTHA2013460, BRTHA2013515, BRTHA2013540, BRTHA2013595, BRTHA2013610, BRTHA2013707, BRTHA2013942, BRTHA2014287, BRTHA2014334, BRTHA2014381, BRTHA2014578, BRTHA2014647, BRTHA2014663, BRTHA2014792, BRTHA2014828, BRTHA2014909, BRTHA2014975, BRTHA2014997, BRTHA2015406, BRTHA2015478, BRTHA2015696, BRTHA2015700, BRTHA2015853, BRTHA2015878, BRTHA2016179, BRTHA2016215, BRTHA2016267, BRTHA2016318, BRTHA2016496, BRTHA2016543, BRTHA2016552, BRTHA2016765, BRTHA2016918, BRTHA2017178, BRTHA2017353, BRTHA2017364, BRTHA2017972, BRTHA2017985, BRTHA2018011, BRTHA2018129, BRTHA2018165, BRTHA2018304, BRTHA2018344, BRTHA2018420, BRTHA2018443, BRTHA2018504, BRTHA2018558, BRTHA2018591, BRTHA2018624, BRTHA2018706, BRTHA2018707, BRTHA2019014, BRTHA2019022, BRTHA2019048, BRTHA2019073, BRTHA2019726, BRTHA2019743, BRTHA2020400, BRTHA2020566, BRTHA2020642, BRTHA2020695, BRTHA2020721, BRTHA2020781, BRTHA2020811, BRTHA2020910, BRTHA2021212, BRTHA2021440, BRTHA2021450, BRTHA2022074, BRTHA2022914, BRTHA2022968, BRTHA2023402, BRTHA2023437, BRTHA2024177, BRTHA2024354, BRTHA2024712, BRTHA2025869, BRTHA2026071, BRTHA2026290, BRTHA2026311, BRTHA2027227, BRTHA2027250, BRTHA2027546, BRTHA2028297, BRTHA2029969, BRTHA2030036, BRTHA2030213, BRTHA2031517, BRTHA2031800, BRTHA2031917, BRTHA2032763, BRTHA2032845, BRTHA2033122, BRTHA2033264, BRTHA2033320, BRTHA2033469, BRTHA2033683, BRTHA2034281, BRTHA2034576, BRTHA2034874, BRTHA2035448, BRTHA2035743, BRTHA2036055, BRTHA2036295, BRTHA2036660, BRTHA2037247, BRTHA2038279, BRTHA2038345, BRTHA2038353, BRTHA2038396, BRTHA3000252, BRTHA3000273, BRTHA3000296, BRTHA3000297, BRTHA3000325, BRTHA3000456, BRTHA3000633, BRTHA3000789, BRTHA3001221, BRTHA3001623, BRTHA3002265, BRTHA3002401, BRTHA3002411, BRTHA3002427, BRTHA3002864, BRTHA3002933, BRTHA3002955, BRTHA3003000, BRTHA3003023, BRTHA3003074, BRTHA3003225, BRTHA3003339, BRTHA3003343, BRTHA3003417, BRTHA3003449, BRTHA3003474, BRTHA3003490, BRTHA3003704, BRTHA3003736, BRTHA3004307, BRTHA3004432, BRTHA3004475, BRTHA3004502, BRTHA3004610, BRTHA3005046, BRTHA3005735, BRTHA3005988, BRTHA3006318, BRTHA3006593, BRTHA3006856, BRTHA3007113, BRTHA3007130, BRTHA3007148, BRTHA3007319, BRTHA3007469, BRTHA3007472, BRTHA3007532, BRTHA3007662, BRTHA3007685, BRTHA3007769, BRTHA3007922, BRTHA3008143, BRTHA3008293, BRTHA3008310, BRTHA3008386, BRTHA3008520, BRTHA3008608, BRTHA3008694, BRTHA3008778, BRTHA3008826, BRTHA3009037, BRTHA3009090, BRTHA3009291, BRTHA3009858, BRTHA3010135, BRTHA3010366, BRTHA3010469, BRTHA3010530, BRTHA3010540, BRTHA3010717, BRTHA3011149, BRTHA3011187, BRTHA3011229, BRTHA3011265, BRTHA3011361, BRTHA3011510, BRTHA3011892, BRTHA3012265, BRTHA3013860, BRTHA3013882, BRTHA3013884, BRTHA3013981, BRTHA3014000, BRTHA3014105, BRTHA3014507, BRTHA3014547, BRTHA3014691, BRTHA3014835, BRTHA3014854, BRTHA3014908, BRTHA3014920, BRTHA3015815, BRTHA3016616, BRTHA3016835, BRTHA3016845, BRTHA3016917, BRTHA3017047, BRTHA3017589, BRTHA3017848, BRTHA3018409, BRTHA3018514, BRTHA3018617, BRTHA3018623, BRTHA3018656, BRTHA3019048, BRTHA3019105, BRTHA3019183, BRTHA3020000, BRTHA3020369, BRTHA3021569, BRTHA3021708, BRTHA3021786, BRTHA3021971, BRTHA3023403, BRTHA3023523, BRTHA3023590, BRTHA3023929, BRTHA3024233, BRTHA3024600, BRTHA3025073, BRTHA3025789, BRTHA3025826, BRTHA3026161, BRTHA3026180, BRTHA3026507, BRTHA3026556, BRTHA3026916, BRTHA3027171, BRTHA3027318, BRTHA3027638, BRTHA3027820, BRTHA3027879, BRTHA3027957, BRTHA3028339, BRTHA3028505, BRTHA3028782, D3OST1000066, D3OST1000109, D3OST1000238, D3OST1000267, D3OST1000270, D3OST2000184, D3OST2000618, D3OST2000654, D3OST2000734, D3OST2001328, D3OST2001669, D3OST2001670, D3OST2001788, D3OST2002182, D3OST2002223, D3OST2002262, D3OST2002272, D3OST2002417, D3OST2002436, D3OST2002648, D3OST2003024, D3OST2003331, D3OST2003607, D3OST2003797, D3OST2004637, D3OST3000195, D3OST3000258, D3OST3000291, D3OST3000388, D3OST3000493, D6OST2000127, D6OST2000169, D6OST2000245, D6OST2000358, D6OST2000464, D6OST2000507, D9OST2000031, D9OST2000278, D9OST2000440, D9OST2000869, D9OST2001319, D9OST2001433, D9OST2002608, D9OST2002673, D9OST2003106, D9OST2003108, D9OST2003137, D9OST2003397, D9OST2003580, D9OST2003594, D9OST2003762, D9OST2003791, D9OST2003989, D9OST2004018, D9OST2004073, D9OST2004417, DFNES1000003, DFNES1000083, DFNES1000107, DFNES2000143, DFNES2000146, DFNES2000153, DFNES2000212, DFNES2000268, DFNES2000292, DFNES2000426, DFNES2000432, DFNES2000443, DFNES2000457, DFNES2000471, DFNES2000526, DFNES2000913, DFNES2001091, DFNES2001096, DFNES2001108, DFNES2001177, DFNES2001404, DFNES2001564, DFNES2001565, DFNES2001647, DFNES2001800, DFNES2001829, DFNES2002220, DFNES2002509, DFNES2002550, DFNES2002588, DFNES2002817, DFNES2002966, DFNES2003081, DFNES2003192, DFNES2003255, DFNES2003742, DFNES2004346, DFNES2004354, DFNES2004383, DFNES2004608, DFNES2004684, DFNES2005266, DFNES2005527, DFNES2005540, DFNES2005779, DFNES2005875, DFNES2006346, DFNES2006944, DFNES2007113, DFNES2007332, DFNES2007641, DFNES2008088, DFNES2008160, DFNES2008280, DFNES2008881, DFNES2009482, DFNES2010502, DFNES2011192, DFNES2011221, DFNES2011239, DFNES2011245, DFNES2011380, DFNES2011499, ERLTF1000021, ERLTF2000324, ERLTF2000465, FCBBF1000025, FCBBF1000038, FCBBF1000063, FCBBF1000069, FCBBF1000077, FCBBF1000115, FCBBF1000117, FCBBF1000118, FCBBF1000121, FCBBF1000125, FCBBF1000131, FCBBF1000139, FCBBF1000155, FCBBF1000157, FCBBF1000171, FCBBF1000174, FCBBF1000182, FCBBF1000198, FCBBF1000206, FCBBF1000220, FCBBF1000232, FCBBF1000233, FCBBF1000243, FCBBF1000270, FCBBF1000272, FCBBF1000280, FCBBF1000297, FCBBF1000305, FCBBF1000314, FCBBF1000322, FCBBF1000349, FCBBF1000367, FCBBF1000374, FCBBF1000376, FCBBF1000377, FCBBF1000395, FCBBF1000397, FCBBF1000403, FCBBF1000412, FCBBF1000425, FCBBF1000437, FCBBF1000449, FCBBF1000476, FCBBF1000506, FCBBF1000509, FCBBF1000546, FCBBF1000550, FCBBF1000556, FCBBF1000563, FCBBF1000581, FCBBF1000582, FCBBF1000598, FCBBF1000604, FCBBF1000618, FCBBF1000627, FCBBF1000671, FCBBF1000675, FCBBF1000684, FCBBF1000686, FCBBF1000687, FCBBF1000691, FCBBF1000732, FCBBF1000748, FCBBF1000760, FCBBF2000038, FCBBF2000087, FCBBF2000094, FCBBF2000105, FCBBF2000123, FCBBF2000195, FCBBF2000199, FCBBF2000214, FCBBF2000232, FCBBF2000276, FCBBF2000291, FCBBF2000362, FCBBF2000379, FCBBF2000473, FCBBF2000502, FCBBF2000566, FCBBF2000576, FCBBF2000591, FCBBF2000677, FCBBF2000678, FCBBF2000685, FCBBF2000733, FCBBF2000782, FCBBF2000808, FCBBF2000815, FCBBF2000825, FCBBF2000940, FCBBF2000951, FCBBF2001001, FCBBF2001088, FCBBF2001105, FCBBF2001116, FCBBF2001183, FCBBF2001188, FCBBF2001211, FCBBF2001238, FCBBF2001243, FCBBF2001291, FCBBF2001299, FCBBF2001309, FCBBF2001400, FCBBF2001427, FCBBF2001480, FCBBF2001529, FCBBF2001538, FCBBF2001594, FCBBF2001672, FCBBF2001675, FCBBF2001718, FCBBF2001720, FCBBF2001817, FCBBF2001868, FCBBF2002044, FCBBF2002111, FCBBF2002281, FCBBF2002349, FCBBF2002370, FCBBF2002541, FCBBF2002626, FCBBF2002801, FCBBF2002897, FCBBF2002898, FCBBF2002904, FCBBF2002928, FCBBF2002953, FCBBF2003083, FCBBF2003102, FCBBF2003269, FCBBF2003293, FCBBF2003297, FCBBF2003395, FCBBF2003528, FCBBF2003543, FCBBF2003549, FCBBF2003567, FCBBF2003636, FCBBF2003823, FCBBF2003895, FCBBF2004066, FCBBF2004090, FCBBF2004138, FCBBF2004217, FCBBF2004256, FCBBF2004373, FCBBF2004448, FCBBF2004671, FCBBF2004707, FCBBF2004788, FCBBF2005069, FCBBF2005122, FCBBF2005428, FCBBF2005439, FCBBF2005538, FCBBF2005637, FCBBF2005645, FCBBF2005658, FCBBF2005733, FCBBF2005909, FCBBF2005966, FCBBF2006131, FCBBF2006380, FCBBF2006418, FCBBF2006452, FCBBF2006634, FCBBF2006781, FCBBF2007012, FCBBF2007186, FCBBF2007265, FCBBF2007302, FCBBF2007556, FCBBF2007610, FCBBF2007633, FCBBF2007840, FCBBF3000102, FCBBF3000115, FCBBF3000120, FCBBF3000168, FCBBF3000175, FCBBF3000227, FCBBF3000228, FCBBF3000229, FCBBF3000233, FCBBF3000269, FCBBF3000361, FCBBF3000367, FCBBF3000388, FCBBF3000434, FCBBF3000462, FCBBF3000473, FCBBF3000501, FCBBF3000518, FCBBF3000536, FCBBF3000550, FCBBF3000847, FCBBF3001018, FCBBF3001020, FCBBF3001081, FCBBF3001235, FCBBF3001281, FCBBF3001302, FCBBF3001377, FCBBF3001594, FCBBF3001632, FCBBF3001657, FCBBF3001855, FCBBF3001890, FCBBF3001912, FCBBF3001914, FCBBF3001918, FCBBF3001924, FCBBF3001977, FCBBF3002163, FCBBF3002188, FCBBF3002190, FCBBF3002268, FCBBF3002475, FCBBF3002556, FCBBF3002592, FCBBF3002658, FCBBF3002782, FCBBF3002818, FCBBF3002925, FCBBF3003216, FCBBF3003305, FCBBF3003373, FCBBF3003435, FCBBF3003475, FCBBF3003481, FCBBF3003557, FCBBF3003787, FCBBF3003902, FCBBF3004021, FCBBF3004041, FCBBF3004323, FCBBF3004390, FCBBF3004409, FCBBF3004502, FCBBF3004715, FCBBF3004842, FCBBF3004847, FCBBF3004955, FCBBF3005160, FCBBF3005218, FCBBF3005330, FCBBF3005444, FCBBF3005698, FCBBF3005729, FCBBF3006171, FCBBF3006249, FCBBF3006288, FCBBF3006399, FCBBF3006628, FCBBF3006821, FCBBF3007077, FCBBF3007150, FCBBF3007152, FCBBF3007242, FCBBF3007244, FCBBF3007248, FCBBF3007453, FCBBF3007462, FCBBF3007540, FCBBF3007597, FCBBF3007604, FCBBF3007631, FCBBF3007829, FCBBF3007855, FCBBF3007859, FCBBF3007860, FCBBF3008073, FCBBF3008100, FCBBF3008153, FCBBF3008159, FCBBF3008251, FCBBF3008311, FCBBF3008362, FCBBF3008382, FCBBF3008475, FCBBF3008556, FCBBF3008644, FCBBF3008689, FCBBF3008748, FCBBF3008870, FCBBF3008938, FCBBF3008944, FCBBF3009069, FCBBF3009101, FCBBF3009152, FCBBF3009256, FCBBF3009317, FCBBF3009428, FCBBF3009464, FCBBF3009479, FCBBF3009526, FCBBF3009541, FCBBF3009703, FCBBF3009717, FCBBF3009888, FCBBF3009949, FCBBF3009978, FCBBF3010008, FCBBF3010012, FCBBF3010124, FCBBF3010130, FCBBF3010142, FCBBF3010149, FCBBF3010211, FCBBF3010361, FCBBF3010508, FCBBF3010544, FCBBF3010586, FCBBF3010601, FCBBF3010665, FCBBF3010695, FCBBF3010729, FCBBF3010733, FCBBF3011003, FCBBF3011418, FCBBF3011485, FCBBF3011523, FCBBF3011570, FCBBF3011592, FCBBF3011867, FCBBF3011889, FCBBF3012170, FCBBF3012182, FCBBF3012288, FCBBF3012332, FCBBF3012443, FCBBF3012588, FCBBF3012667, FCBBF3012842, FCBBF3012901, FCBBF3013041, FCBBF3013058, FCBBF3013205, FCBBF3013266, FCBBF3013307, FCBBF3013341, FCBBF3013506, FCBBF3013589, FCBBF3013623, FCBBF3013800, FCBBF3013846, FCBBF3014229, FCBBF3014260, FCBBF3014355, FCBBF3014567, FCBBF3014770, FCBBF3015100, FCBBF3015119, FCBBF3015131, FCBBF3015317, FCBBF3015727, FCBBF3015758, FCBBF3015809, FCBBF3015870, FCBBF3016018, FCBBF3016178, FCBBF3016451, FCBBF3016618, FCBBF3016622, FCBBF3016644, FCBBF3016667, FCBBF3016928, FCBBF3016987, FCBBF3017059, FCBBF3017071, FCBBF3017123, FCBBF3017233, FCBBF3017255, FCBBF3017288, FCBBF3017396, FCBBF3017531, FCBBF3017535, FCBBF3017681, FCBBF3017729, FCBBF3017873, FCBBF3017918, FCBBF3017974, FCBBF3018067, FCBBF3018173, FCBBF3018453, FCBBF3018591, FCBBF3018753, FCBBF3018796, FCBBF3018826, FCBBF3018949, FCBBF3019085, FCBBF3019320, FCBBF3019437, FCBBF3019455, FCBBF3019564, FCBBF3019569, FCBBF3019570, FCBBF3019663, FCBBF3019714, FCBBF3019716, FCBBF3019784, FCBBF3019839, FCBBF3019867, FCBBF3019961, FCBBF3020030, FCBBF3020138, FCBBF3020140, FCBBF3020163, FCBBF3020232, FCBBF3020599, FCBBF3021026, FCBBF3021191, FCBBF3021221, FCBBF3021501, FCBBF3021506, FCBBF3021524, FCBBF3021807, FCBBF3021940, FCBBF3021985, FCBBF3022005, FCBBF3022291, FCBBF3022311, FCBBF3022504, FCBBF3022566, FCBBF3022593, FCBBF3022765, FCBBF3022767, FCBBF3022894, FCBBF3023061, FCBBF3023078, FCBBF3023372, FCBBF3023443, FCBBF3023599, FCBBF3023704, FCBBF3023887, FCBBF3023895, FCBBF3024002, FCBBF3024096, FCBBF3024225, FCBBF3024266, FCBBF3024364, FCBBF3024623, FCBBF3024793, FCBBF3024911, FCBBF3025098, FCBBF3025252, FCBBF3025280, FCBBF3025285, FCBBF3025417, FCBBF3025528, FCBBF3025568, FCBBF3025650, FCBBF3025674, FCBBF3025730, FCBBF3025737, FCBBF3025905, FCBBF3026021, FCBBF3026048, FCBBF3026251, FCBBF3026308, FCBBF3026651, FCBBF3026678, FCBBF3026692, FCBBF3027104, FCBBF3027199, FCBBF3027328, FCBBF3027559, FCBBF3027717, FCBBF3027755, FCBBF3027768, FCBBF3027854, FCBBF3027863, FCBBF3027903, FCBBF3028102, FCBBF3028143, FCBBF3028188, FCBBF3028202, FCBBF3028472, FCBBF3028528, FCBBF3028582, FCBBF3028593, FCBBF3028671, FCBBF3028794, FCBBF4000017, FCBBF4000061, FCBBF4000076, FCBBF4000142, FCBBF4000173, FCBBF4000192, FCBBF4000193, FCBBF4000268, FCBBF4000282, FCBBF4000399, FCBBF4000415, FCBBF4000529, FCBBF4000548, FCBBF5000041, FCBBF5000061, FCBBF5000165, FCBBF5000261, FCBBF5000325, FCBBF5000353, FCBBF5000384, FCBBF5000483, FCBBF5000495, FEBRA1000005, FEBRA1000008, FEBRA1000022, FEBRA1000030, FEBRA1000057, FEBRA1000088, FEBRA1000138, FEBRA1000148, FEBRA1000149, FEBRA1000183, FEBRA1000188, FEBRA1000189, FEBRA1000190, FEBRA2000007, FEBRA2000021, FEBRA2000035, FEBRA2000053, FEBRA2000126, FEBRA2000129, FEBRA2000220, FEBRA2000253, FEBRA2000282, FEBRA2000286, FEBRA2000297, FEBRA2000311, FEBRA2000321, FEBRA2000333, FEBRA2000378, FEBRA2000391, FEBRA2000394, FEBRA2000397, FEBRA2000399, FEBRA2000402, FEBRA2000404, FEBRA2000409, FEBRA2000415, FEBRA2000436, FEBRA2000438, FEBRA2000452, FEBRA2000454, FEBRA2000462, FEBRA2000468, FEBRA2000491, FEBRA2000504, FEBRA2000532, FEBRA2000536, FEBRA2000538, FEBRA2000575, FEBRA2000581, FEBRA2000656, FEBRA2000659, FEBRA2000680, FEBRA2000690, FEBRA2000727, FEBRA2000734, FEBRA2000757, FEBRA2000762, FEBRA2000771, FEBRA2000772, FEBRA2000782, FEBRA2000787, FEBRA2000790, FEBRA2000793, FEBRA2000803, FEBRA2000805, FEBRA2000809, FEBRA2000815, FEBRA2000856, FEBRA2000862, FEBRA2000877, FEBRA2000880, FEBRA2000881, FEBRA2000901, FEBRA2000909, FEBRA2000917, FEBRA2000928, FEBRA2000936, FEBRA2000937, FEBRA2000959, FEBRA2000972, FEBRA2001004, FEBRA2001012, FEBRA2001020, FEBRA2001093, FEBRA2001124, FEBRA2001133, FEBRA2001146, FEBRA2001161, FEBRA2001175, FEBRA2001197, FEBRA2001217, FEBRA2001227, FEBRA2001245, FEBRA2001267, FEBRA2001334, FEBRA2001351, FEBRA2001383, FEBRA2001438, FEBRA2001440, FEBRA2001487, FEBRA2001492, FEBRA2001523, FEBRA2001561, FEBRA2001571, FEBRA2001584, FEBRA2001590, FEBRA2001591, FEBRA2001610, FEBRA2001620, FEBRA2001659, FEBRA2001669, FEBRA2001698, FEBRA2001705, FEBRA2001706, FEBRA2001715, FEBRA2001745, FEBRA2001752, FEBRA2001772, FEBRA2001790, FEBRA2001814, FEBRA2001828, FEBRA2001867, FEBRA2001914, FEBRA2001974, FEBRA2001989, FEBRA2001990, FEBRA2002009, FEBRA2002027, FEBRA2002086, FEBRA2002109, FEBRA2002191, FEBRA2002260, FEBRA2002352, FEBRA2002399, FEBRA2002410, FEBRA2002429, FEBRA2002442, FEBRA2002456, FEBRA2002508, FEBRA2002525, FEBRA2002552, FEBRA2002574, FEBRA2002601, FEBRA2002611, FEBRA2002628, FEBRA2002662, FEBRA2002682, FEBRA2002707, FEBRA2002727, FEBRA2002781, FEBRA2002783, FEBRA2002792, FEBRA2002818, FEBRA2002858, FEBRA2002882, FEBRA2002897, FEBRA2002908, FEBRA2002931, FEBRA2002962, FEBRA2002986, FEBRA2003054, FEBRA2003115, FEBRA2003128, FEBRA2003155, FEBRA2003163, FEBRA2003181, FEBRA2003198, FEBRA2003253, FEBRA2003258, FEBRA2003275, FEBRA2003308, FEBRA2003327, FEBRA2003429, FEBRA2003436, FEBRA2003454, FEBRA2003468, FEBRA2003470, FEBRA2003520, FEBRA2003524, FEBRA2003541, FEBRA2003675, FEBRA2003707, FEBRA2003711, FEBRA2003726, FEBRA2003897, FEBRA2003907, FEBRA2003926, FEBRA2003930, FEBRA2004023, FEBRA2004026, FEBRA2004029, FEBRA2004053, FEBRA2004056, FEBRA2004091, FEBRA2004110, FEBRA2004191, FEBRA2004202, FEBRA2004219, FEBRA2004237, FEBRA2004268, FEBRA2004293, FEBRA2004325, FEBRA2004329, FEBRA2004331, FEBRA2004443, FEBRA2004485, FEBRA2004490, FEBRA2004538, FEBRA2004592, FEBRA2004620, FEBRA2004628, FEBRA2004651, FEBRA2004767, FEBRA2004813, FEBRA2004840, FEBRA2004852, FEBRA2004867, FEBRA2004914, FEBRA2004933, FEBRA2004987, FEBRA2005014, FEBRA2005036, FEBRA2005079, FEBRA2005114, FEBRA2005216, FEBRA2005291, FEBRA2005361, FEBRA2005377, FEBRA2005380, FEBRA2005427, FEBRA2005458, FEBRA2005572, FEBRA2005701, FEBRA2005726, FEBRA2005734, FEBRA2005752, FEBRA2005778, FEBRA2005787, FEBRA2005788, FEBRA2005998, FEBRA2006055, FEBRA2006061, FEBRA2006092, FEBRA2006150, FEBRA2006165, FEBRA2006255, FEBRA2006315, FEBRA2006346, FEBRA2006354, FEBRA2006357, FEBRA2006368, FEBRA2006370, FEBRA2006379, FEBRA2006396, FEBRA2006409, FEBRA2006418, FEBRA2006427, FEBRA2006476, FEBRA2006491, FEBRA2006519, FEBRA2006521, FEBRA2006553, FEBRA2006627, FEBRA2006664, FEBRA2006667, FEBRA2006726, FEBRA2006736, FEBRA2006793, FEBRA2006808, FEBRA2006817, FEBRA2006873, FEBRA2006890, FEBRA2006942, FEBRA2006977, FEBRA2007017, FEBRA2007176, FEBRA2007200, FEBRA2007212, FEBRA2007247, FEBRA2007280, FEBRA2007414, FEBRA2007436, FEBRA2007449, FEBRA2007458, FEBRA2007534, FEBRA2007551, FEBRA2007566, FEBRA2007589, FEBRA2007613, FEBRA2007620, FEBRA2007708, FEBRA2007714, FEBRA2007793, FEBRA2007818, FEBRA2007823, FEBRA2007901, FEBRA2007931, FEBRA2007957, FEBRA2008009, FEBRA2008036, FEBRA2008086, FEBRA2008134, FEBRA2008135, FEBRA2008159, FEBRA2008165, FEBRA2008172, FEBRA2008210, FEBRA2008255, FEBRA2008265, FEBRA2008266, FEBRA2008282, FEBRA2008287, FEBRA2008302, FEBRA2008311, FEBRA2008341, FEBRA2008360, FEBRA2008459, FEBRA2008468, FEBRA2008475, FEBRA2008481, FEBRA2008542, FEBRA2008583, FEBRA2008660, FEBRA2008662, FEBRA2008681, FEBRA2008741, FEBRA2008755, FEBRA2008836, FEBRA2008859, FEBRA2008861, FEBRA2008866, FEBRA2008881, FEBRA2008928, FEBRA2008983, FEBRA2009016, FEBRA2009029, FEBRA2009074, FEBRA2009117, FEBRA2009120, FEBRA2009162, FEBRA2009185, FEBRA2009240, FEBRA2009265, FEBRA2009276, FEBRA2009289, FEBRA2009327, FEBRA2009328, FEBRA2009352, FEBRA2009362, FEBRA2009385, FEBRA2009416, FEBRA2009437, FEBRA2009478, FEBRA2009507, FEBRA2009514, FEBRA2009541, FEBRA2009567, FEBRA2009588, FEBRA2009731, FEBRA2009754, FEBRA2009780, FEBRA2009846, FEBRA2009986, FEBRA2010141, FEBRA2010299, FEBRA2010484, FEBRA2010719, FEBRA2010746, FEBRA2010768, FEBRA2010802, FEBRA2011063, FEBRA2011090, FEBRA2011356, FEBRA2011392, FEBRA2011414, FEBRA2011593, FEBRA2011665, FEBRA2012090, FEBRA2012120, FEBRA2012181, FEBRA2012195, FEBRA2012397, FEBRA2012418, FEBRA2012507, FEBRA2012625, FEBRA2013019, FEBRA2013069, FEBRA2013274, FEBRA2013465, FEBRA2013570, FEBRA2013905, FEBRA2013951, FEBRA2014010, FEBRA2014122, FEBRA2014198, FEBRA2014213, FEBRA2014297, FEBRA2014417, FEBRA2014443, FEBRA2014578, FEBRA2014939, FEBRA2015076, FEBRA2015175, FEBRA2015292, FEBRA2015588, FEBRA2016112, FEBRA2016398, FEBRA2016572, FEBRA2016583, FEBRA2016621, FEBRA2016654, FEBRA2016739, FEBRA2017024, FEBRA2017098, FEBRA2017138, FEBRA2017154, FEBRA2017200, FEBRA2017223, FEBRA2017333, FEBRA2017502, FEBRA2017533, FEBRA2017680, FEBRA2017736, FEBRA2017780, FEBRA2017811, FEBRA2017850, FEBRA2018051, FEBRA2018203, FEBRA2018433, FEBRA2018476, FEBRA2018746, FEBRA2019172, FEBRA2019242, FEBRA2019298, FEBRA2019389, FEBRA2019457, FEBRA2019519, FEBRA2019582, FEBRA2019637, FEBRA2019663, FEBRA2019690, FEBRA2019867, FEBRA2020406, FEBRA2020566, FEBRA2020582, FEBRA2020668, FEBRA2020801, FEBRA2020845, FEBRA2020886, FEBRA2020977, FEBRA2021032, FEBRA2021134, FEBRA2021171, FEBRA2021339, FEBRA2021431, FEBRA2021497, FEBRA2021550, FEBRA2021571, FEBRA2021636, FEBRA2021864, FEBRA2021892, FEBRA2021908, FEBRA2021966, FEBRA2022013, FEBRA2022148, FEBRA2022204, FEBRA2022255, FEBRA2022322, FEBRA2022504, FEBRA2022601, FEBRA2022696, FEBRA2022729, FEBRA2022787, FEBRA2022911, FEBRA2022956, FEBRA2022963, FEBRA2022972, FEBRA2023227, FEBRA2023285, FEBRA2023351, FEBRA2023377, FEBRA2023498, FEBRA2023550, FEBRA2023721, FEBRA2023927, FEBRA2023989, FEBRA2023990, FEBRA2024019, FEBRA2024136, FEBRA2024150, FEBRA2024343, FEBRA2024570, FEBRA2024693, FEBRA2024727, FEBRA2024744, FEBRA2024797, FEBRA2024987, FEBRA2025249, FEBRA2025463, FEBRA2025477, FEBRA2025838, FEBRA2026474, FEBRA2026582, FEBRA2026629, FEBRA2026769, FEBRA2026879, FEBRA2026890, FEBRA2026977, FEBRA2026984, FEBRA2027082, FEBRA2027297, FEBRA2027352, FEBRA2027364, FEBRA2027609, FEBRA2028158, FEBRA2028222, FEBRA2028366, FEBRA2028457, FEBRA2028477, FEBRA2028503, FEHRT2000325, FEHRT2000364, FEKID1000018, FELIV1000101, FELIV1000137, FELIV1000164, FELNG2000241, HCASM1000021, HCASM1000050, HCASM1000061, HCASM1000130, HCASM2000138, HCASM2000156, HCASM2000202, HCASM2000214, HCASM2000266, HCASM2000307, HCASM2000534, HCASM2000536, HCASM2000560, HCASM2000871, HCASM2001285, HCASM2001810, HCASM2001866, HCASM2001890, HCASM2002148, HCASM2002502, HCASM2002754, HCASM2002918, HCASM2003018, HCASM2003076, HCASM2003099, HCASM2003212, HCASM2003237, HCASM2003357, HCASM2003415, HCASM2005388, HCASM2005484, HCASM2006131, HCASM2006338, HCASM2006359, HCASM2006632, HCASM2007047, HCASM2007317, HCASM2007737, HCASM2007773, HCASM2008154, HCASM2008536, HCASM2009405, HCASM2009424, HCASM2009463, HCASM2009588, HCHON1000015, HCHON1000131, HCHON1000142, HCHON1000166, HCHON1000176, HCHON1000191, HCHON2000038, HCHON2000062, HCHON2000100, HCHON2000156, HCHON2000199, HCHON2000212, HCHON2000244, HCHON2000265, HCHON2000271, HCHON2000315, HCHON2000322, HCHON2000323, HCHON2000344, HCHON2000373, HCHON2000395, HCHON2000417, HCHON2000418, HCHON2000503, HCHON2000660, HCHON2000663, HCHON2000673, HCHON2000676, HCHON2000698, HCHON2000699, HCHON2000705, HCHON2000743, HCHON2000815, HCHON2000817, HCHON2000818, HCHON2000819, HCHON2000832, HCHON2000851, HCHON2000898, HCHON2000935, HCHON2000942, HCHON2000956, HCHON2000994, HCHON2001084, HCHON2001099, HCHON2001108, HCHON2001110, HCHON2001116, HCHON2001161, HCHON2001214, HCHON2001233, HCHON2001269, HCHON2001434, HCHON2001450, HCHON2001453, HCHON2001497, HCHON2001505, HCHON2001519, HCHON2001523, HCHON2001546, HCHON2001548, HCHON2001577, HCHON2001604, HCHON2001607, HCHON2001646, HCHON2001665, HCHON2001712, HCHON2001768, HCHON2001801, HCHON2001853, HCHON2002123, HCHON2002194, HCHON2002241, HCHON2002247, HCHON2002354, HCHON2002496, HCHON2002676, HCHON2002770, HCHON2002964, HCHON2002971, HCHON2003131, HCHON2003134, HCHON2003327, HCHON2003513, HCHON2003532, HCHON2003642, HCHON2003659, HCHON2003676, HCHON2004007, HCHON2004279, HCHON2004359, HCHON2004531, HCHON2004776, HCHON2004858, HCHON2005048, HCHON2005118, HCHON2005166, HCHON2005802, HCHON2005921, HCHON2005987, HCHON2006250, HCHON2006459, HCHON2006714, HCHON2006722, HCHON2006770, HCHON2006786, HCHON2006841, HCHON2006871, HCHON2007046, HCHON2007482, HCHON2007650, HCHON2007674, HCHON2007774, HCHON2007881, HCHON2008112, HCHON2008239, HCHON2008444, HCHON2008582, HCHON2008672, HCHON2008856, HCHON2008871, HCHON2008989, HCHON2009191, HCHON2009384, HCHON2009749, HCHON2009766, HCHON2009795, HCHON2010074, HCHON2010543, HEART1000010, HEART1000074, HEART1000088, HEART1000099, HEART1000102, HEART1000118, HEART1000132, HEART1000139, HEART1000142, HEART1000149, HEART1000151, HEART1000173, HEART1000185, HEART2000024, HEART2000035, HEART2000099, HEART2000298, HEART2000306, HEART2000309, HEART2000411, HEART2000418, HEART2000444, HEART2000448, HEART2000492, HEART2000506, HEART2000520, HEART2000541, HEART2000568, HEART2000611, HEART2000959, HEART2001680, HEART2001756, HEART2002129, HEART2002184, HEART2002220, HEART2002432, HEART2002531, HEART2002598, HEART2002717, HEART2003027, HEART2003168, HEART2003432, HEART2003440, HEART2003781, HEART2003836, HEART2003852, HEART2004570, HEART2004764, HEART2004931, HEART2004940, HEART2004941, HEART2004980, HEART2005244, HEART2005310, HEART2005581, HEART2005610, HEART2006131, HEART2006195, HEART2006310, HEART2006334, HEART2006487, HEART2006521, HEART2006557, HEART2006787, HEART2006789, HEART2006909, HEART2007031, HEART2007231, HEART2007443, HEART2007696, HEART2007767, HEART2008108, HEART2008111, HEART2008257, HEART2008509, HEART2008994, HEART2009000, HEART2009599, HEART2009680, HEART2010391, HEART2010492, HEART2010495, HELAC2000158, HELAC2000301, HHDPC1000001, HHDPC1000065, HHDPC1000083, HHDPC1000114, HHDPC1000163, HHDPC2000055, HHDPC2000102, HHDPC2000104, HHDPC2000115, HHDPC2000258, HHDPC2000315, HHDPC2000455, HHDPC2000462, HHDPC2000656, HHDPC2000692, HHDPC2001337, HHDPC2001432, HHDPC2001896, HHDPC2002963, HHDPC2003049, HHDPC2003113, HHDPC2003381, HHDPC2003472, HHDPC2004757, HHDPC2005185, HHDPC2005513, HHDPC2005742, HHDPC2005794, HHDPC2006460, HHDPC2006862, HHDPC2006927, HHDPC2007302, HHDPC2007775, HHDPC2008123, HHDPC2008185, HHDPC2008279, HHDPC2008297, HHDPC2008414, HHDPC2008474, HHDPC2008816, HHDPC2008843, HHDPC2009114, HHDPC2009178, HHDPC2009208, HHDPC2009272, HHDPC2009528, HLUNG1000017, HLUNG1000024, HLUNG1000030, HLUNG1000034, HLUNG1000037, HLUNG1000053, HLUNG1000064, HLUNG1000084, HLUNG1000091, HLUNG1000104, HLUNG1000105, HLUNG1000110, HLUNG1000151, HLUNG1000169, HLUNG2000014, HLUNG2000027, HLUNG2000063, HLUNG2000068, HLUNG2000116, HLUNG2000125, HLUNG2000130, HLUNG2000142, HLUNG2000174, HLUNG2000176, HLUNG2000217, HLUNG2000232, HLUNG2000255, HLUNG2000281, HLUNG2000314, HLUNG2000315, HLUNG2000340, HLUNG2000362, HLUNG2000363, HLUNG2000431, HLUNG2000480, HLUNG2000489, HLUNG2000501, HLUNG2000549, HLUNG2000557, HLUNG2000570, HLUNG2000751, HLUNG2000761, HLUNG2000777, HLUNG2000846, HLUNG2000870, HLUNG2000884, HLUNG2000926, HLUNG2000950, HLUNG2000955, HLUNG2000970, HLUNG2001013, HLUNG2001126, HLUNG2001144, HLUNG2001214, HLUNG2001439, HLUNG2001459, HLUNG2001507, HLUNG2001518, HLUNG2001633, HLUNG2001677, HLUNG2001712, HLUNG2001814, HLUNG2001996, HLUNG2002006, HLUNG2002050, HLUNG2002059, HLUNG2002085, HLUNG2002145, HLUNG2002295, HLUNG2002303, HLUNG2002334, HLUNG2002405, HLUNG2002429, HLUNG2002465, HLUNG2002562, HLUNG2002648, HLUNG2002659, HLUNG2002707, HLUNG2002916, HLUNG2002942, HLUNG2002949, HLUNG2002958, HLUNG2002982, HLUNG2003003, HLUNG2003042, HLUNG2003049, HLUNG2003061, HLUNG2003162, HLUNG2003246, HLUNG2003306, HLUNG2003331, HLUNG2003335, HLUNG2003378, HLUNG2003497, HLUNG2003691, HLUNG2003710, HLUNG2003714, HLUNG2003716, HLUNG2003778, HLUNG2003833, HLUNG2003872, HLUNG2003918, HLUNG2003991, HLUNG2004014, HLUNG2004067, HLUNG2004154, HLUNG2004170, HLUNG2004217, HLUNG2004273, HLUNG2004388, HLUNG2004416, HLUNG2004521, HLUNG2004534, HLUNG2004684, HLUNG2004707, HLUNG2004774, HLUNG2004775, HLUNG2005012, HLUNG2005030, HLUNG2005045, HLUNG2005076, HLUNG2005133, HLUNG2005203, HLUNG2005230, HLUNG2005479, HLUNG2005524, HLUNG2005656, HLUNG2005738, HLUNG2005774, HLUNG2005813, HLUNG2005924, HLUNG2006026, HLUNG2006067, HLUNG2006094, HLUNG2006370, HLUNG2006397, HLUNG2006570, HLUNG2006599, HLUNG2006614, HLUNG2006671, HLUNG2006781, HLUNG2006812, HLUNG2006843, HLUNG2006852, HLUNG2006935, HLUNG2007041, HLUNG2007163, HLUNG2007210, HLUNG2007219, HLUNG2007245, HLUNG2007433, HLUNG2007931, HLUNG2008066, HLUNG2008139, HLUNG2008153, HLUNG2008225, HLUNG2008235, HLUNG2008247, HLUNG2008333, HLUNG2008348, HLUNG2008384, HLUNG2008396, HLUNG2008439, HLUNG2008480, HLUNG2008521, HLUNG2008833, HLUNG2008875, HLUNG2008885, HLUNG2008958, HLUNG2008959, HLUNG2009067, HLUNG2009215, HLUNG2009253, HLUNG2009303, HLUNG2009413, HLUNG2009729, HLUNG2010181, HLUNG2010464, HLUNG2010562, HLUNG2010845, HLUNG2011041, HLUNG2011298, HLUNG2011461, HLUNG2011833, HLUNG2012049, HLUNG2012287, HLUNG2012315, HLUNG2012546, HLUNG2012600, HLUNG2012727, HLUNG2013097, HLUNG2013204, HLUNG2013304, HLUNG2013350, HLUNG2013622, HLUNG2013643, HLUNG2013784, HLUNG2013851, HLUNG2014262, HLUNG2014288, HLUNG2014449, HLUNG2014821, HLUNG2015184, HLUNG2015418, HLUNG2015548, HLUNG2015578, HLUNG2015617, HLUNG2016022, HLUNG2016862, HLUNG2017286, HLUNG2017307, HLUNG2017350, HLUNG2017546, HLUNG2017806, HLUNG2018029, HLUNG2018282, HLUNG2018626, HLUNG2019058, HSYRA1000131, HSYRA1000137, HSYRA1000148, HSYRA1000178, HSYRA2000044, HSYRA2000137, HSYRA2000190, HSYRA2000221, HSYRA2000224, HSYRA2000232, HSYRA2000237, HSYRA2000253, HSYRA2000332, HSYRA2000371, HSYRA2000424, HSYRA2000507, HSYRA2000510, HSYRA2000605, HSYRA2000629, HSYRA2000640, HSYRA2000706, HSYRA2000760, HSYRA2000787, HSYRA2000792, HSYRA2000828, HSYRA2000832, HSYRA2000925, HSYRA2000927, HSYRA2001003, HSYRA2001103, HSYRA2001105, HSYRA2001142, HSYRA2001153, HSYRA2001232, HSYRA2001255, HSYRA2001332, HSYRA2001353, HSYRA2001396, HSYRA2001420, HSYRA2001484, HSYRA2001552, HSYRA2001580, HSYRA2001615, HSYRA2001638, HSYRA2001983, HSYRA2002103, HSYRA2002590, HSYRA2002741, HSYRA2003168, HSYRA2004550, HSYRA2004858, HSYRA2005456, HSYRA2005496, HSYRA2005628, HSYRA2005970, HSYRA2006049, HSYRA2006873, HSYRA2007241, HSYRA2007338, HSYRA2007667, HSYRA2008154, HSYRA2008714, HSYRA2009102, IMR321000155, IMR321000158, IMR321000161, IMR321000165, IMR321000207, IMR321000210, IMR321000230, IMR321000242, IMR321000266, IMR322000010, IMR322000072, IMR322000107, IMR322000121, IMR322000127, IMR322000144, IMR322000152, IMR322000164, IMR322000178, IMR322000223, IMR322000243, IMR322000302, IMR322000316, IMR322000374, IMR322000379, IMR322000383, IMR322000418, IMR322000555, IMR322000604, IMR322000609, IMR322000656, IMR322000672, IMR322000742, IMR322000775, IMR322000791, IMR322000811, IMR322000819, IMR322000838, IMR322000859, IMR322000863, IMR322000917, IMR322000918, IMR322000919, IMR322000953, IMR322000973, IMR322000984, IMR322001018, IMR322001167, IMR322001185, IMR322001245, IMR322001317, IMR322001318, IMR322001322, IMR322001380, IMR322001438, IMR322001452, IMR322001491, IMR322001534, IMR322001541, IMR322001665, IMR322001670, IMR322001710, IMR322001724, IMR322001879, IMR322002035, IMR322002110, IMR322002470, IMR322002993, IMR322003675, IMR322004768, IMR322005293, IMR322005833, IMR322006012, IMR322006222, IMR322006495, IMR322006520, IMR322006886, IMR322006947, IMR322007078, IMR322007225, IMR322007704, IMR322008651, IMR322009710, IMR322009807, IMR322010295, IMR322010953, IMR322011689, IMR322012314, IMR322012529, IMR322013053, IMR322013396, IMR322013731, IMR322013805, IMR322015523, IMR322016146, IMR322017049, IMR322018117, IMR322018192, IMR322019070, JCMLC2000273, KIDNE1000008, KIDNE1000012, KIDNE1000015, KIDNE1000028, KIDNE1000036, KIDNE1000064, KIDNE1000104, KIDNE1000121, KIDNE1000143, KIDNE1000145, KIDNE1000152, KIDNE2000026, KIDNE2000041, KIDNE2000046, KIDNE2000051, KIDNE2000070, KIDNE2000167, KIDNE2000174, KIDNE2000192, KIDNE2000227, KIDNE2000244, KIDNE2000245, KIDNE2000287, KIDNE2000315, KIDNE2000317, KIDNE2000328, KIDNE2000330, KIDNE2000335, KIDNE2000349, KIDNE2000375, KIDNE2000383, KIDNE2000394, KIDNE2000422, KIDNE2000493, KIDNE2000497, KIDNE2000510, KIDNE2000513, KIDNE2000517, KIDNE2000519, KIDNE2000555, KIDNE2000624, KIDNE2000665, KIDNE2000678, KIDNE2000717, KIDNE2000721, KIDNE2000722, KIDNE2000801, KIDNE2000832, KIDNE2000833, KIDNE2000846, KIDNE2000867, KIDNE2000909, KIDNE2001117, KIDNE2001140, KIDNE2001162, KIDNE2001269, KIDNE2001361, KIDNE2001636, KIDNE2001713, KIDNE2001802, KIDNE2001840, KIDNE2001857, KIDNE2001873, KIDNE2001897, KIDNE2001931, KIDNE2001979, KIDNE2002015, KIDNE2002162, KIDNE2002168, KIDNE2002191, KIDNE2002198, KIDNE2002262, KIDNE2002265, KIDNE2002438, KIDNE2002483, KIDNE2002725, KIDNE2002768, KIDNE2002795, KIDNE2002798, KIDNE2002839, KIDNE2002845, KIDNE2002872, KIDNE2002882, KIDNE2002883, KIDNE2002980, KIDNE2002991, KIDNE2003185, KIDNE2003188, KIDNE2003233, KIDNE2003305, KIDNE2003335, KIDNE2003357, KIDNE2003373, KIDNE2003377, KIDNE2003507, KIDNE2003752, KIDNE2003764, KIDNE2003837, KIDNE2003941, KIDNE2003994, KIDNE2004034, KIDNE2004054, KIDNE2004084, KIDNE2004095, KIDNE2004115, KIDNE2004233, KIDNE2004262, KIDNE2004279, KIDNE2004294, KIDNE2004295, KIDNE2004305, KIDNE2004344, KIDNE2004394, KIDNE2004475, KIDNE2004519, KIDNE2004520, KIDNE2004531, KIDNE2004534, KIDNE2004562, KIDNE2004579, KIDNE2004626, KIDNE2004681, KIDNE2004828, KIDNE2004846, KIDNE2004864, KIDNE2004879, KIDNE2004981, KIDNE2004985, KIDNE2004999, KIDNE2005038, KIDNE2005042, KIDNE2005062, KIDNE2005266, KIDNE2005296, KIDNE2005321, KIDNE2005327, KIDNE2005336, KIDNE2005400, KIDNE2005424, KIDNE2005477, KIDNE2005526, KIDNE2005543, KIDNE2005603, KIDNE2005629, KIDNE2005781, KIDNE2005798, KIDNE2005854, KIDNE2005908, KIDNE2005937, KIDNE2006009, KIDNE2006030, KIDNE2006039, KIDNE2006053, KIDNE2006062, KIDNE2006092, KIDNE2006145, KIDNE2006149, KIDNE2006210, KIDNE2006299, KIDNE2006334, KIDNE2006353, KIDNE2006376, KIDNE2006378, KIDNE2006465, KIDNE2006580, KIDNE2006652, KIDNE2006687, KIDNE2006733, KIDNE2006760, KIDNE2006775, KIDNE2006811, KIDNE2006820, KIDNE2006880, KIDNE2007005, KIDNE2007040, KIDNE2007077, KIDNE2007186, KIDNE2007222, KIDNE2007352, KIDNE2007356, KIDNE2007422, KIDNE2007569, KIDNE2007810, KIDNE2007811, KIDNE2007944, KIDNE2007954, KIDNE2008022, KIDNE2008069, KIDNE2008072, KIDNE2008116, KIDNE2008117, KIDNE2008218, KIDNE2008315, KIDNE2008362, KIDNE2008378, KIDNE2008403, KIDNE2008404, KIDNE2008446, KIDNE2008473, KIDNE2008480, KIDNE2008649, KIDNE2008666, KIDNE2008697, KIDNE2008758, KIDNE2008788, KIDNE2008795, KIDNE2008824, KIDNE2008832, KIDNE2008869, KIDNE2008914, KIDNE2008975, KIDNE2008987, KIDNE2009019, KIDNE2009109, KIDNE2009180, KIDNE2009191, KIDNE2009332, KIDNE2009426, KIDNE2009467, KIDNE2009490, KIDNE2009553, KIDNE2009605, KIDNE2009628, KIDNE2009647, KIDNE2009676, KIDNE2009723, KIDNE2010007, KIDNE2010049, KIDNE2010052, KIDNE2010084, KIDNE2010137, KIDNE2010151, KIDNE2010264, KIDNE2010265, KIDNE2010271, KIDNE2010419, KIDNE2010430, KIDNE2010574, KIDNE2010674, KIDNE2010739, KIDNE2010750, KIDNE2010762, KIDNE2010863, KIDNE2010973, KIDNE2010989, KIDNE2011200, KIDNE2011314, KIDNE2011532, KIDNE2011635, KIDNE2011752, KIDNE2011782, KIDNE2011858, KIDNE2012009, KIDNE2012025, KIDNE2012188, KIDNE2012291, KIDNE2012316, KIDNE2012361, KIDNE2012440, KIDNE2012453, KIDNE2012563, KIDNE2012601, KIDNE2012613, KIDNE2012745, KIDNE2012775, KIDNE2012784, KIDNE2012945, KIDNE2013045, KIDNE2013095, KIDNE2013158, KIDNE2013218, KIDNE2013263, KIDNE2013346, KIDNE2013388, KIDNE2013413, KIDNE2013489, KIDNE2013639, KIDNE2013731, KIDNE2013734, KIDNE2013775, KIDNE2013801, KIDNE2013866, KIDNE2014087, KIDNE2014112, KIDNE2014119, KIDNE2014170, KIDNE2014184, KIDNE2014268, KIDNE2014298, KIDNE2014320, KIDNE2014415, KIDNE2014489, KIDNE2014496, KIDNE2014661, KIDNE2014717, KIDNE2014789, KIDNE2014808, KIDNE2014890, KIDNE2014978, KIDNE2015073, KIDNE2015221, KIDNE2015244, KIDNE2015313, KIDNE2015433, KIDNE2015445, KIDNE2015483, KIDNE2015515, KIDNE2015546, KIDNE2015556, KIDNE2015598, KIDNE2015660, KIDNE2015710, KIDNE2015987, KIDNE2016000, KIDNE2016036, KIDNE2016096, KIDNE2016101, KIDNE2016142, KIDNE2016188, KIDNE2016327, KIDNE2016388, KIDNE2016464, KIDNE2016539, KIDNE2016570, KIDNE2016918, KIDNE2017007, KIDNE2017052, KIDNE2017151, KIDNE2017153, KIDNE2017315, KIDNE2017332, KIDNE2017343, KIDNE2017454, KIDNE2017603, KIDNE2017956, KIDNE2018071, KIDNE2018166, KIDNE2018167, KIDNE2018217, KIDNE2018254, KIDNE2018268, KIDNE2018269, KIDNE2018287, KIDNE2018294, KIDNE2018352, KIDNE2018462, KIDNE2018493, KIDNE2018617, KIDNE2018678, KIDNE2018727, KIDNE2018863, KIDNE2018891, KIDNE2018989, KIDNE2018996, KIDNE2019074, KIDNE2019187, LIVER1000017, LIVER1000050, LIVER1000055, LIVER1000058, LIVER1000063, LIVER1000067, LIVER1000073, LIVER1000079, LIVER1000082, LIVER1000099, LIVER1000104, LIVER1000111, LIVER1000126, LIVER1000132, LIVER1000139, LIVER1000155, LIVER1000165, LIVER1000175, LIVER1000224, LIVER1000230, LIVER1000278, LIVER1000303, LIVER1000397, LIVER1000421, LIVER1000433, LIVER1000479, LIVER1000482, LIVER1000542, LIVER2000003, LIVER2000033, LIVER2000037, LIVER2000158, LIVER2000216, LIVER2000237, LIVER2000247, LIVER2000360, LIVER2000416, LIVER2000515, LIVER2000592, LIVER2000626, LIVER2000682, LIVER2000769, LIVER2000775, LIVER2001051, LIVER2001076, LIVER2001099, LIVER2001113, LIVER2001164, LIVER2001191, LIVER2001265, LIVER2001329, LIVER2001389, LIVER2001461, LIVER2001539, LIVER2001608, LIVER2001835, LIVER2002638, LIVER2002644, LIVER2002660, LIVER2002702, LIVER2003008, LIVER2003065, LIVER2003234, LIVER2003511, LIVER2003524, LIVER2003568, LIVER2003581, LIVER2003800, LIVER2003854, LIVER2004074, LIVER2004392, LIVER2004514, LIVER2004565, LIVER2005028, LIVER2005198, LIVER2005218, LIVER2005376, LIVER2005385, LIVER2005512, LIVER2005520, LIVER2005527, LIVER2005544, LIVER2005625, LIVER2005728, LIVER2005789, LIVER2005973, LIVER2005981, LIVER2006251, LIVER2006410, LIVER2006469, LIVER2006644, LIVER2006764, LIVER2007415, LIVER2007548, LIVER2007568, LIVER2007721, LIVER2007783, LIVER2008053, LIVER2008465, LIVER2008473, LIVER2008580, LIVER2008706, LIVER2008751, LIVER2008945, LIVER2008998, LIVER2009110, LIVER2009118, LIVER2009554, LYMPB1000141, LYMPB1000158, LYMPB2000083, MAMGL1000017, MAMGL1000083, MAMGL1000096, MAMGL1000100, MAMGL1000132, MAMGL1000151, MAMGL1000173, MAMGL1000178, MAMGL1000182, MAMGL1000184, MESAN1000032, MESAN1000035, MESAN1000050, MESAN1000079, MESAN1000101, MESAN1000121, MESAN1000147, MESAN1000180, MESAN2000023, MESAN2000026, MESAN2000067, MESAN2000167, MESAN2000264, MESAN2000291, MESAN2000434, MESAN2000457, MESAN2000462, MESAN2000501, MESAN2000608, MESAN2000620, MESAN2000711, MESAN2000894, MESAN2000909, MESAN2001450, MESAN2001627, MESAN2001770, MESAN2001979, MESAN2001980, MESAN2002113, MESAN2002122, MESAN2002147, MESAN2002186, MESAN2002424, MESAN2002519, MESAN2002687, MESAN2002709, MESAN2002724, MESAN2002844, MESAN2002978, MESAN2003035, MESAN2003037, MESAN2003039, MESAN2003058, MESAN2003101, MESAN2003190, MESAN2003322, MESAN2003444, MESAN2003490, MESAN2003529, MESAN2003622, MESAN2003646, MESAN2003662, MESAN2003709, MESAN2003851, MESAN2004138, MESAN2004288, MESAN2004575, MESAN2005284, MESAN2005303, MESAN2005371, MESAN2005689, MESAN2005724, MESAN2005808, MESAN2005811, MESAN2005957, MESAN2006022, MESAN2006043, MESAN2006328, MESAN2006580, MESAN2006599, MESAN2006743, MESAN2006953, MESAN2006971, MESAN2007032, MESAN2007440, MESAN2007597, MESAN2007755, MESAN2008222, MESAN2008334, MESAN2008415, MESAN2008460, MESAN2008536, MESAN2008679, MESAN2008729, MESAN2008821, MESAN2008926, MESAN2008936, MESAN2009081, MESAN2009105, MESAN2009311, MESAN2009418, MESAN2009503, MESAN2009522, MESAN2009580, MESAN2010031, MESAN2010114, MESAN2010312, MESAN2010321, MESAN2010664, MESAN2010681, MESAN2011545, MESAN2011597, MESAN2011632, MESAN2011977, MESAN2011984, MESAN2012054, MESAN2012113, MESAN2012586, MESAN2012708, MESAN2012735, MESAN2013019, MESAN2013022, MESAN2013183, MESAN2013211, MESAN2013283, MESAN2013611, MESAN2013674, MESAN2013845, MESAN2013908, MESAN2013936, MESAN2014192, MESAN2014295, MESAN2014298, MESAN2014412, MESAN2014624, MESAN2015277, MESAN2015365, MESAN2015391, MESAN2015401, MESAN2015501, MESAN2015708, MESAN2016159, MESAN2016304, MESAN2016409, MESAN2016552, MESAN2016965, MESAN2017133, MESAN2017152, MESAN2017373, MESAN2017417, MESAN2018209, MESAN2018576, MESAN2018670, MESAN2018699, MESTC1000042, MESTC1000147, MESTC2000150, MESTC2000153, MESTC2000170, N1ESE2000698, NB9N41000011, NB9N41000121, NB9N41000142, NB9N41000146, NB9N41000340, NB9N42000104, NB9N42000122, NB9N42000196, NB9N42000281, NB9N42000314, NB9N42000342, NB9N42000430, NB9N42000495, NB9N42001300, NCRRP1000129, NESOP1000010, NESOP1000087, NESOP1000108, NESOP2000231, NESOP2000452, NESOP2000499, NESOP2000504, NESOP2000744, NESOP2001144, NESOP2001433, NESOP2001656, NESOP2001694, NESOP2001752, NESOP2002352, NESOP2002418, NESOP2002487, NESOP2002738, NESOP2002780, NETRP1000034, NETRP1000082, NETRP2000086, NETRP2000182, NETRP2000439, NHNPC1000034, NHNPC1000037, NHNPC1000084, NHNPC1000101, NHNPC1000124, NHNPC2000062, NHNPC2000212, NHNPC2000606, NHNPC2000877, NHNPC2001108, NHNPC2001223, NHNPC2001312, NHNPC2001816, NHNPC2002565, NHNPC2002749, NOVAR1000015, NOVAR1000091, NOVAR1000102, NOVAR2000038, NOVAR2000136, NOVAR2000352, NOVAR2000412, NOVAR2000710, NOVAR2000783, NOVAR2000962, NOVAR2001108, NOVAR2001620, NOVAR2001783, NOVAR2001876, NOVAR2002039, NT2NE1000004, NT2NE1000014, NT2NE1000018, NT2NE1000023, NT2NE1000059, NT2NE1000063, NT2NE1000073, NT2NE1000083, NT2NE1000120, NT2NE1000122, NT2NE1000175, NT2NE1000181, NT2NE1000185, NT2NE2000038, NT2NE2000054, NT2NE2000057, NT2NE2000064, NT2NE2000109, NT2NE2000137, NT2NE2000156, NT2NE2000195, NT2NE2000222, NT2NE2000259, NT2NE2000284, NT2NE2000299, NT2NE2000353, NT2NE2000356, NT2NE2000369, NT2NE2000374, NT2NE2000383, NT2NE2000386, NT2NE2000390, NT2NE2000392, NT2NE2000455, NT2NE2000470, NT2NE2000488, NT2NE2000517, NT2NE2000536, NT2NE2000546, NT2NE2000548, NT2NE2000550, NT2NE2000586, NT2NE2000612, NT2NE2000636, NT2NE2000658, NT2NE2000706, NT2NE2000802, NT2NE2000808, NT2NE2000809, NT2NE2000864, NT2NE2000909, NT2NE2000950, NT2NE2000951, NT2NE2000980, NT2NE2001000, NT2NE2001005, NT2NE2001021, NT2NE2001040, NT2NE2001048, NT2NE2001049, NT2NE2001142, NT2NE2001156, NT2NE2001180, NT2NE2001181, NT2NE2001188, NT2NE2001191, NT2NE2001247, NT2NE2001252, NT2NE2001324, NT2NE2001326, NT2NE2001337, NT2NE2001364, NT2NE2001372, NT2NE2001403, NT2NE2001428, NT2NE2001432, NT2NE2001435, NT2NE2001442, NT2NE2001524, NT2NE2001530, NT2NE2001545, NT2NE2001598, NT2NE2001623, NT2NE2001626, NT2NE2001634, NT2NE2001648, NT2NE2001655, NT2NE2001660, NT2NE2001666, NT2NE2001677, NT2NE2001697, NT2NE2001698, NT2NE2001723, NT2NE2001725, NT2NE2001874, NT2NE2001889, NT2NE2001923, NT2NE2002100, NT2NE2002162, NT2NE2002186, NT2NE2002285, NT2NE2002311, NT2NE2002620, NT2NE2002651, NT2NE2002732, NT2NE2002768, NT2NE2002791, NT2NE2002856, NT2NE2002870, NT2NE2003150, NT2NE2003185, NT2NE2003252, NT2NE2003280, NT2NE2003308, NT2NE2003309, NT2NE2003315, NT2NE2003393, NT2NE2003408, NT2NE2003457, NT2NE2003485, NT2NE2003540, NT2NE2003569, NT2NE2003571, NT2NE2003705, NT2NE2003752, NT2NE2003887, NT2NE2003921, NT2NE2004255, NT2NE2004378, NT2NE2004490, NT2NE2004519, NT2NE2004606, NT2NE2004740, NT2NE2004787, NT2NE2004916, NT2NE2005035, NT2NE2005223, NT2NE2005276, NT2NE2005317, NT2NE2005323, NT2NE2005358, NT2NE2005371, NT2NE2005395, NT2NE2005419, NT2NE2005441, NT2NE2005517, NT2NE2005537, NT2NE2005555, NT2NE2005588, NT2NE2005676, NT2NE2005784, NT2NE2005804, NT2NE2005821, NT2NE2005876, NT2NE2005890, NT2NE2005921, NT2NE2005968, NT2NE2006087, NT2NE2006103, NT2NE2006217, NT2NE2006288, NT2NE2006382, NT2NE2006387, NT2NE2006427, NT2NE2006432, NT2NE2006458, NT2NE2006478, NT2NE2006531, NT2NE2006659, NT2NE2006784, NT2NE2006813, NT2NE2006894, NT2NE2006909, NT2NE2006942, NT2NE2006958, NT2NE2007052, NT2NE2007220, NT2NE2007425, NT2NE2007725, NT2NE2007727, NT2NE2007786, NT2NE2007877, NT2NE2007967, NT2NE2008017, NT2NE2008060, NT2NE2008077, NT2NE2008213, NT2NE2008260, NT2NE2008378, NT2NE2008607, NT2NE2008639, NT2NE2008727, NT2NE2008783, NT2NE2008785, NT2NE2008803, NT2NE2008867, NT2NE2008961, NT2NE2008997, NT2NE2009138, NT2NE2009295, NT2NE2009426, NT2NE2009523, NT2NE2009608, NT2NE2009691, NT2NE2010056, NT2NE2010105, NT2NE2010150, NT2NE2010400, NT2NE2010632, NT2NE2010633, NT2NE2010654, NT2NE2010688, NT2NE2010781, NT2NE2010842, NT2NE2010854, NT2NE2011033, NT2NE2011036, NT2NE2011107, NT2NE2011119, NT2NE2011154, NT2NE2011221, NT2NE2011411, NT2NE2011485, NT2NE2011650, NT2NE2011684, NT2NE2011687, NT2NE2011691, NT2NE2011758, NT2NE2011823, NT2NE2011896, NT2NE2011998, NT2NE2012113, NT2NE2012199, NT2NE2012243, NT2NE2012361, NT2NE2012448, NT2NE2012457, NT2NE2012493, NT2NE2012505, NT2NE2012533, NT2NE2012603, NT2NE2012747, NT2NE2012790, NT2NE2012847, NT2NE2012928, NT2NE2013019, NT2NE2013081, NT2NE2013189, NT2NE2013217, NT2NE2013547, NT2NE2014013, NT2NE2014028, NT2NE2014104, NT2NE2014113, NT2NE2014176, NT2NE2014221, NT2NE2014525, NT2NE2014650, NT2NE2014651, NT2NE2014681, NT2NE2014758, NT2NE2014869, NT2NE2014950, NT2NE2015061, NT2NE2015262, NT2NE2015275, NT2NE2015362, NT2NE2015480, NT2NE2015511, NT2NE2015565, NT2NE2015626, NT2NE2015747, NT2NE2015860, NT2NE2015885, NT2NE2015904, NT2NE2015974, NT2NE2016041, NT2NE2016387, NT2NE2016419, NT2NE2016519, NT2NE2016608, NT2NE2016766, NT2NE2016774, NT2NE2017259, NT2NE2017332, NT2NE2017397, NT2NE2017480, NT2NE2017492, NT2NE2017508, NT2NE2017562, NT2NE2017590, NT2NE2017612, NT2NE2017721, NT2NE2017752, NT2NE2017792, NT2NE2017982, NT2NE2018165, NT2NE2018176, NT2NE2018180, NT2NE2018273, NT2NE2018376, NT2NE2018472, NT2NE2018490, NT2NE2018594, NT2NE2018739, NT2NE2018916, NT2NE2019056, NT2NE2019076, NT2NE2019091, NT2NE2019099, NT2RI1000016, NT2RI1000027, NT2RI1000035, NT2RI1000164, NT2RI1000172, NT2RI2000004, NT2RI2000007, NT2RI2000064, NT2RI2000107, NT2RI2000116, NT2RI2000117, NT2RI2000128, NT2RI2000133, NT2RI2000167, NT2RI2000173, NT2RI2000187, NT2RI2000270, NT2RI2000276, NT2RI2000282, NT2RI2000284, NT2RI2000294, NT2RI2000313, NT2RI2000341, NT2RI2000348, NT2RI2000412, NT2RI2000421, NT2RI2000480, NT2RI2000575, NT2RI2000588, NT2RI2000597, NT2RI2000669, NT2RI2000685, NT2RI2000688, NT2RI2000689, NT2RI2000704, NT2RI2000738, NT2RI2000775, NT2RI2000822, NT2RI2000829, NT2RI2000841, NT2RI2000865, NT2RI2000932, NT2RI2000974, NT2RI2000987, NT2RI2001010, NT2RI2001017, NT2RI2001030, NT2RI2001054, NT2RI2001083, NT2RI2001091, NT2RI2001167, NT2RI2001178, NT2RI2001230, NT2RI2001235, NT2RI2001244, NT2RI2001307, NT2RI2001385, NT2RI2001409, NT2RI2001410, NT2RI2001422, NT2RI2001425, NT2RI2001449, NT2RI2001450, NT2RI2001474, NT2RI2001519, NT2RI2001595, NT2RI2001621, NT2RI2001624, NT2RI2001726, NT2RI2001731, NT2RI2001769, NT2RI2001782, NT2RI2001836, NT2RI2001846, NT2RI2001866, NT2RI2001910, NT2RI2001952, NT2RI2002022, NT2RI2002041, NT2RI2002120, NT2RI2002152, NT2RI2002153, NT2RI2002179, NT2RI2002252, NT2RI2002260, NT2RI2002266, NT2RI2002270, NT2RI2002334, NT2RI2002359, NT2RI2002447, NT2RI2002481, NT2RI2002507, NT2RI2002517, NT2RI2002540, NT2RI2002549, NT2RI2002554, NT2RI2002564, NT2RI2002585, NT2RI2002592, NT2RI2002602, NT2RI2002699, NT2RI2002802, NT2RI2002819, NT2RI2002822, NT2RI2002847, NT2RI2002852, NT2RI2002923, NT2RI2002926, NT2RI2002958, NT2RI2002970, NT2RI2003011, NT2RI2003067, NT2RI2003184, NT2RI2003205, NT2RI2003222, NT2RI2003301, NT2RI2003317, NT2RI2003338, NT2RI2003344, NT2RI2003360, NT2RI2003361, NT2RI2003383, NT2RI2003392, NT2RI2003399, NT2RI2003419, NT2RI2003481, NT2RI2003487, NT2RI2003556, NT2RI2003655, NT2RI2003667, NT2RI2003678, NT2RI2003751, NT2RI2003884, NT2RI2003921, NT2RI2003973, NT2RI2003993, NT2RI2004059, NT2RI2004078, NT2RI2004079, NT2RI2004093, NT2RI2004136, NT2RI2004157, NT2RI2004188, NT2RI2004190, NT2RI2004209, NT2RI2004230, NT2RI2004284, NT2RI2004312, NT2RI2004381, NT2RI2004398, NT2RI2004410, NT2RI2004442, NT2RI2004468, NT2RI2004535, NT2RI2004606, NT2RI2004608, NT2RI2004618, NT2RI2004783, NT2RI2004818, NT2RI2004840, NT2RI2004916, NT2RI2004962, NT2RI2004984, NT2RI2004985, NT2RI2005048, NT2RI2005061, NT2RI2005069, NT2RI2005087, NT2RI2005096, NT2RI2005115, NT2RI2005130, NT2RI2005150, NT2RI2005166, NT2RI2005239, NT2RI2005246, NT2RI2005368, NT2RI2005382, NT2RI2005405, NT2RI2005473, NT2RI2005520, NT2RI2005564, NT2RI2005579, NT2RI2005621, NT2RI2005628, NT2RI2005670, NT2RI2005710, NT2RI2005723, NT2RI2005772, NT2RI2005811, NT2RI2005814, NT2RI2005816, NT2RI2005818, NT2RI2005966, NT2RI2006070, NT2RI2006071, NT2RI2006072, NT2RI2006081, NT2RI2006126, NT2RI2006127, NT2RI2006183, NT2RI2006257, NT2RI2006271, NT2RI2006294, NT2RI2006345, NT2RI2006403, NT2RI2006412, NT2RI2006445, NT2RI2006487, NT2RI2006553, NT2RI2006565, NT2RI2006640, NT2RI2006659, NT2RI2006662, NT2RI2006667, NT2RI2006679, NT2RI2006682, NT2RI2006686, NT2RI2006703, NT2RI2006716, NT2RI2006762, NT2RI2006788, NT2RI2006838, NT2RI2006855, NT2RI2006943, NT2RI2006973, NT2RI2007046, NT2RI2007048, NT2RI2007054, NT2RI2007084, NT2RI2007096, NT2RI2007116, NT2RI2007148, NT2RI2007214, NT2RI2007277, NT2RI2007303, NT2RI2007334, NT2RI2007377, NT2RI2007386, NT2RI2007406, NT2RI2007439, NT2RI2007445, NT2RI2007468, NT2RI2007469, NT2RI2007507, NT2RI2007629, NT2RI2007723, NT2RI2007729, NT2RI2007751, NT2RI2007754, NT2RI2007827, NT2RI2007853, NT2RI2007877, NT2RI2007879, NT2RI2007884, NT2RI2007891, NT2RI2007956, NT2RI2007965, NT2RI2007987, NT2RI2008007, NT2RI2008045, NT2RI2008050, NT2RI2008171, NT2RI2008188, NT2RI2008204, NT2RI2008221, NT2RI2008233, NT2RI2008455, NT2RI2008502, NT2RI2008526, NT2RI2008566, NT2RI2008598, NT2RI2008622, NT2RI2008656, NT2RI2008791, NT2RI2008801, NT2RI2008808, NT2RI2008812, NT2RI2008841, NT2RI2008952, NT2RI2009005, NT2RI2009065, NT2RI2009066, NT2RI2009083, NT2RI2009101, NT2RI2009103, NT2RI2009144, NT2RI2009151, NT2RI2009194, NT2RI2009215, NT2RI2009259, NT2RI2009269, NT2RI2009281, NT2RI2009289, NT2RI2009301, NT2RI2009402, NT2RI2009517, NT2RI2009585, NT2RI2009595, NT2RI2009855, NT2RI2010283, NT2RI2010508, NT2RI2010795, NT2RI2011422, NT2RI2011450, NT2RI2011683, NT2RI2011803, NT2RI2012659, NT2RI2012726, NT2RI2012990, NT2RI2013345, NT2RI2013357, NT2RI2013373, NT2RI2014247, NT2RI2014551, NT2RI2014683, NT2RI2014733, NT2RI2015239, NT2RI2015533, NT2RI2016128, NT2RI2016134, NT2RI2017529, NT2RI2018311, NT2RI2018363, NT2RI2018950, NT2RI2019751, NT2RI2019826, NT2RI2020390, NT2RI2020703, NT2RI2021463, NT2RI2021625, NT2RI2022468, NT2RI2022584, NT2RI2023303, NT2RI2023671, NT2RI2024008, NT2RI2024313, NT2RI2024460, NT2RI2024496, NT2RI2024935, NT2RI2025075, NT2RI2025255, NT2RI2025564, NT2RI2025565, NT2RI2025909, NT2RI2025957, NT2RI2025976, NT2RI2026758, NT2RI2027081, NT2RI2027157, NT2RI2027224, NT2RI2027323, NT2RI2027396, NT2RI2027484, NT2RI2027975, NT2RI2028213, NT2RI2028222, NT2RI2028537, NT2RI2028642, NT2RI3000174, NT2RI3000213, NT2RI3000423, NT2RI3000622, NT2RI3001132, NT2RI3001263, NT2RI3001279, NT2RI3001348, NT2RI3001445, NT2RI3001458, NT2RI3001515, NT2RI3001573, NT2RI3001967, NT2RI3002303, NT2RI3002557, NT2RI3002842, NT2RI3003027, NT2RI3003031, NT2RI3003095, NT2RI3003104, NT2RI3003162, NT2RI3003362, NT2RI3003382, NT2RI3003409, NT2RI3003925, NT2RI3004133, NT2RI3004381, NT2RI3004510, NT2RI3005202, NT2RI3005403, NT2RI3005416, NT2RI3005724, NT2RI3005861, NT2RI3005923, NT2RI3005928, NT2RI3006132, NT2RI3006171, NT2RI3006340, NT2RI3006376, NT2RI3006666, NT2RI3006796, NT2RI3007065, NT2RI3007095, NT2RI3007158, NT2RI3007167, NT2RI3007213, NT2RI3007291, NT2RI3007443, NT2RI3007684, NT2RI3007878, NT2RI3007978, NT2RI3008055, NT2RI3008162, NT2RI3008179, NT2RI3008228, NT2RI3008442, NT2RI3008652, NT2RI3008697, NT2RI3008974, NT2RI3009158, NT2RI3009480, NT2RI3009524, NT2RP6000008, NT2RP6000032, NT2RP6000033, NT2RP6000039, NT2RP6000043, NT2RP6000059, NT2RP6000060, NT2RP6000072, NT2RP6000077, NT2RP6000078, NT2RP6000085, NT2RP6000086, NT2RP6000100, NT2RP6000110, NT2RP6000119, NT2RP6000127, NT2RP6000130, NT2RP6000140, NT2RP6000150, NT2RP700004.1, NT2RP7000069, NT2RP7000109, NT2RP7000112, NT2RP7000238, NT2RP7000259, NT2RP7000311, NT2RP7000359, NT2RP7000364, NT2RP7000380, NT2RP7000391, NT2RP7000425, NT2RP7000579, NT2RP7000586, NT2RP7000624, NT2RP7000812, NT2RP7000926, NT2RP7001074, NT2RP7001080, NT2RP7001156, NT2RP7001231, NT2RP7001306, NT2RP7001319, NT2RP7001335, NT2RP7001364, NT2RP7001532, NT2RP7001602, NT2RP7001856, NT2RP7001962, NT2RP7002028, NT2RP7002064, NT2RP7002151, NT2RP7002163, NT2RP7002243, NT2RP7002282, NT2RP7002478, NT2RP7002554, NT2RP7002603, NT2RP7002650, NT2RP7002738, NT2RP7002779, NT2RP7002829, NT2RP7002841, NT2RP7002875, NT2RP7002906, NT2RP7002978, NT2RP7003025, NT2RP7003050, NT2RP7003055, NT2RP7003084, NT2RP7003091, NT2RP7003107, NT2RP7003134, NT2RP7003148, NT2RP7003203, NT2RP7003439, NT2RP7003511, NT2RP7003629, NT2RP7003680, NT2RP7003724, NT2RP7004027, NT2RP7004080, NT2RP7004114, NT2RP7004204, NT2RP7004233, NT2RP7004260, NT2RP7004358, NT2RP7004396, NT2RP7004428, NT2RP7004481, NT2RP7004541, NT2RP7004641, NT2RP7004656, NT2RP7004687, NT2RP7004722, NT2RP7004728, NT2RP7004766, NT2RP7004790, NT2RP7004884, NT2RP7004915, NT2RP7004961, NT2RP7004964, NT2RP7004975, NT2RP7005118, NT2RP7005205, NT2RP7005219, NT2RP7005323, NT2RP7005468, NT2RP7005493, NT2RP7005513, NT2RP7005529, NT2RP7005629, NT2RP7005631, NT2RP7005669, NT2RP7005675, NT2RP7005846, NT2RP7006033, NT2RP7006160, NT2RP7006162, NT2RP7006223, NT2RP7006263, NT2RP7006296, NT2RP7006304, NT2RP7006374, NT2RP7006395, NT2RP7006408, NT2RP7006457, NT2RP7006539, NT2RP7006547, NT2RP7006601, NT2RP7006619, NT2RP7006621, NT2RP7006636, NT2RP7006853, NT2RP7006886, NT2RP7006887, NT2RP7006980, NT2RP7006986, NT2RP7006995, NT2RP7007114, NT2RP7007221, NT2RP7007226, NT2RP7007252, NT2RP7007269, NT2RP7007310, NT2RP7007359, NT2RP7007381, NT2RP7007387, NT2RP7007406, NT2RP7007480, NT2RP7007504, NT2RP7007530, NT2RP7007537, NT2RP7007580, NT2RP7007594, NT2RP7007617, NT2RP7007643, NT2RP7007766, NT2RP7007925, NT2RP7007930, NT2RP7008013, NT2RP7008015, NT2RP7008133, NT2RP7008137, NT2RP7008142, NT2RP7008144, NT2RP7008315, NT2RP7008360, NT2RP7008396, NT2RP7008406, NT2RP7008435, NT2RP7008441, NT2RP7008454, NT2RP7008544, NT2RP7008550, NT2RP7008557, NT2RP7008623, NT2RP7008657, NT2RP7008714, NT2RP7008720, NT2RP7008855, NT2RP7008863, NT2RP7009019, NT2RP7009030, NT2RP7009097, NT2RP7009168, NT2RP7009215, NT2RP7009225, NT2RP7009236, NT2RP7009253, NT2RP7009267, NT2RP7009322, NT2RP7009363, NT2RP7009370, NT2RP7009394, NT2RP7009397, NT2RP7009429, NT2RP7009439, NT2RP7009466, NT2RP7009481, NT2RP7009498, NT2RP7009502, NT2RP7009507, NT2RP7009577, NT2RP7009743, NT2RP7009867, NT2RP7010109, NT2RP7010128, NT2RP7010235, NT2RP7010275, NT2RP7010521, NT2RP7010599, NT2RP7010612, NT2RP7010817, NT2RP7011086, NT2RP7011132, NT2RP7011268, NT2RP7011318, NT2RP7011452, NT2RP7011570, NT2RP7011721, NT2RP7012291, NT2RP7012516, NT2RP7012776, NT2RP7013002, NT2RP7013374, NT2RP7013499, NT2RP7013573, NT2RP7013729, NT2RP7013764, NT2RP7013795, NT2RP7013999, NT2RP7014178, NT2RP7014348, NT2RP7014420, NT2RP7014583, NT2RP7014721, NT2RP7014743, NT2RP7014778, NT2RP7014906, NT2RP7014910, NT2RP7015080, NT2RP7015431, NT2RP7015503, NT2RP7015512, NT2RP7015676, NT2RP7015789, NT2RP7015996, NT2RP7016508, NT2RP7016574, NT2RP7016622, NT2RP7016911, NT2RP7017139, NT2RP7017284, NT2RP7017365, NT2RP7017474, NT2RP7017546, NT2RP7017567, NT2RP7017795, NT2RP7017971, NT2RP7018032, NT2RP7018126, NT2RP7018197, NT2RP7018206, NT2RP7018340, NT2RP7018586, NT2RP7018802, NT2RP7018871, NT2RP7019064, NT2RP7019135, NT2RP7019273, NT2RP7019367, NT2RP7019401, NT2RP7019445, NT2RP7019543, NT2RP7019682, -NT2RP7019835, NT2RP7020112, NT2RP7020123, NT2RP7020343, NT2RP7020379, NT2RP8000137, NT2RP8000296, NT2RP8000435, NT2RP8000483, NT2RP8000521, NT2RP8000633, NT2RP8001363, NT2RP8001407, NT2RP8001584, NT2RP8001604, NT2RP8001605, NT2RP8003490, NT2RP8003657, NT2RP8003787, NT2RP8004306, NT2RP8005546, NT2RP8006452, NT2RP8006521, NT2RP8007416, NT2RP8007503, NT2RP8007715, NT2RP8007920, NT2RP8008057, NT2RP8009248, NTONG1000006, NTONG1000047, NTONG1000052, NTONG1000075, NTONG1000087, NTONG1000123, NTONG1000130, NTONG1000161, NTONG1000172, NTONG1000182, NTONG1000213, NTONG1000214, NTONG1000246, NTONG1000247, NTONG2000040, NTONG2000107, NTONG2000231, NTONG2000334, NTONG2000363, NTONG2000413, NTONG2000492, NTONG2000499, NTONG2000531, NTONG2000583, NTONG2000800, NTONG2000858, NTONG2000876, NTONG2000878, NTONG2000966, NTONG2000985, NTONG2001014, NTONG2001079, NTONG2001157, NTONG2001173, NTONG2001220, NTONG2001362, NTONG2001428, NTONG2001532, NTONG2001612, NTONG2001619, NTONG2001642, NTONG2001657, NTONG2001676, NTONG2001762, NTONG2002278, NTONG2002582, NTONG2002807, NTONG2002948, NTONG2002970, NTONG2002985, NTONG2003158, NTONG2003210, NTONG2003316, NTONG2003409, NTONG2003454, NTONG2003515, NTONG2003805, NTONG2003839, NTONG2003852, NTONG2003897, NTONG2003928, NTONG2004095, NTONG2004308, NTONG2004521, NTONG2004614, NTONG2004690, NTONG2004806, NTONG2004829, NTONG2004844, NTONG2004991, NTONG2005062, NTONG2005086, NTONG2005137, NTONG2005153, NTONG2005265, NTONG2005277, NTONG2005363, NTONG2005373, NTONG2005391, NTONG2005480, NTONG2005577, NTONG2005657, NTONG2005801, NTONG2005822, NTONG2005897, NTONG2005969, NTONG2006099, NTONG2006187, NTONG2006301, NTONG2006324, NTONG2006354, NTONG2006440, NTONG2006484, NTONG2006501, NTONG2006646, NTONG2006709, NTONG2006783, NTONG2007020, NTONG2007028, NTONG2007034, NTONG2007249, NTONG2007517, NTONG2007522, NTONG2007658, NTONG2007693, NTONG2007756, NTONG2008088, NTONG2008093, NTONG2008143, NTONG2008365, NTONG2008672, NTONG2008862, NTONG2008939, NTONG2008944, NTONG2009060, NTONG2009068, NTONG2009229, NTONG2009233, NTONG2009468, NTONG2009576, OCBBF1000016, OCBBF1000030, OCBBF1000042, OCBBF1000049, OCBBF1000054, OCBBF1000067, OCBBF1000080, OCBBF1000085, OCBBF1000091, OCBBF1000104, OCBBF1000114, OCBBF1000118, OCBBF1000119, OCBBF1000122, OCBBF1000130, OCBBF1000138, OCBBF1000145, OCBBF1000153, OCBBF1000175, OCBBF1000185, OCBBF1000192, OCBBF1000254, OCBBF2000013, OCBBF2000126, OCBBF2000178, OCBBF2000231, OCBBF2000277, OCBBF2000287, OCBBF2000323, OCBBF2000452, OCBBF2000467, OCBBF2000703, OCBBF2000712, OCBBF2000719, OCBBF2000824, OCBBF2000831, OCBBF2000904, OCBBF2000982, OCBBF2000998, OCBBF2001075, OCBBF2001101, OCBBF2001124, OCBBF2001166, OCBBF2001176, OCBBF2001186, OCBBF2001196, OCBBF2001210, OCBBF2001252, OCBBF2001307, OCBBF2001323, OCBBF2001389, OCBBF2001402, OCBBF2001408, OCBBF2001416, OCBBF2001473, OCBBF2001494, OCBBF2001527, OCBBF2001528, OCBBF2001586, OCBBF2001639, OCBBF2001681, OCBBF2001706, OCBBF2001749, OCBBF2001794, OCBBF2001910, OCBBF2001931, OCBBF2001961, OCBBF2001983, OCBBF2002015, OCBBF2002083, OCBBF2002124, OCBBF2002161, OCBBF2002290, OCBBF2002357, OCBBF2002376, OCBBF2002615, OCBBF2002626, OCBBF2002656, OCBBF2002663, OCBBF2002805, OCBBF2002865, OCBBF2002920, OCBBF2002980, OCBBF2003028, OCBBF2003052, OCBBF2003091, OCBBF2003246, OCBBF2003327, OCBBF2003518, OCBBF2003543, OCBBF2003593, OCBBF2003744, OCBBF2003819, OCBBF2003925, OCBBF2004038, OCBBF2004104, OCBBF2004147, OCBBF2004168, OCBBF2004235, OCBBF2004259, OCBBF2004273, OCBBF2004385, OCBBF2004418, OCBBF2004478, OCBBF2004482, OCBBF2004533, OCBBF2004567, OCBBF2004612, OCBBF2004647, OCBBF2004669, OCBBF2004757, OCBBF2004826, OCBBF2004866, OCBBF2004883, OCBBF2004889, OCBBF2004930, OCBBF2004984, OCBBF2005066, OCBBF2005077, OCBBF2005161, OCBBF2005343, OCBBF2005349, OCBBF2005373, OCBBF2005420, OCBBF2005428, OCBBF2005433, OCBBF2005476, OCBBF2005546, OCBBF2005843, OCBBF2005901, OCBBF2006005, OCBBF2006030, OCBBF2006058, OCBBF2006113, OCBBF2006154, OCBBF2006172, OCBBF2006214, OCBBF2006241, OCBBF2006313, OCBBF2006388, OCBBF2006438, OCBBF2006567, OCBBF2006624, OCBBF2006639, OCBBF2006660, OCBBF2006764, OCBBF2006849, OCBBF2006859, OCBBF2006972, OCBBF2006987, OCBBF2007028, OCBBF2007039, OCBBF2007051, OCBBF2007068, OCBBF2007114, OCBBF2007121, OCBBF2007184, OCBBF2007194, OCBBF2007196, OCBBF2007224, OCBBF2007238, OCBBF2007414, OCBBF2007415, OCBBF2007428, OCBBF2007478, OCBBF2007485, OCBBF2007520, OCBBF2007555, OCBBF2007610, OCBBF2007622, OCBBF2007756, OCBBF2007762, OCBBF2007931, OCBBF2007946, OCBBF2008005, OCBBF2008041, OCBBF2008116, OCBBF2008138, OCBBF2008144, OCBBF2008283, OCBBF2008330, OCBBF2008340, OCBBF2008466, OCBBF2008483, OCBBF2008511, OCBBF2008520, OCBBF2008569, OCBBF2008586, OCBBF2008640, OCBBF2008691, OCBBF2008701, OCBBF2008724, OCBBF2008760, OCBBF2008768, OCBBF2008770, OCBBF2008775, OCBBF2008790, OCBBF2008814, OCBBF2008822, OCBBF2009095, OCBBF2009115, OCBBF2009301, OCBBF2009352, OCBBF2009391, OCBBF2009536, OCBBF2009571, OCBBF2009583, OCBBF2009603, OCBBF2009772, OCBBF2009788, OCBBF2009836, OCBBF2009920, OCBBF2009926, OCBBF2010040, OCBBF2010140, OCBBF2010281, OCBBF2010313, OCBBF2010404, OCBBF2010416, OCBBF2010420, OCBBF2010557, OCBBF2010604, OCBBF2010709, OCBBF2010792, OCBBF2010819, OCBBF2010841, OCBBF2010843, OCBBF2010863, OCBBF2010871, OCBBF2010931, OCBBF2010945, OCBBF2010978, OCBBF2010989, OCBBF2011021, OCBBF2011137, OCBBF2011160, OCBBF2011177, OCBBF2011228, OCBBF2011232, OCBBF2011283, OCBBF2011311, OCBBF2011536, OCBBF2011625, OCBBF2011669, OCBBF2011685, OCBBF2011706, OCBBF2011722, OCBBF2011767, OCBBF2011855, OCBBF2011872, OCBBF2011887, OCBBF2011897, OCBBF2011914, OCBBF2011960, OCBBF2011981, OCBBF2012001, OCBBF2012028, OCBBF2012039, OCBBF2012095, OCBBF2012139, OCBBF2012191, OCBBF2012262, OCBBF2012320, OCBBF2012436, OCBBF2012525, OCBBF2012553, OCBBF2012678, OCBBF2012704, OCBBF2012714, OCBBF2012755, OCBBF2012812, OCBBF2012821, OCBBF2012881, OCBBF2012908, OCBBF2012936, OCBBF2012990, OCBBF2013011, OCBBF2013049, OCBBF2013091, OCBBF2013123, OCBBF2013127, OCBBF2013149, OCBBF2013208, OCBBF2013285, OCBBF2013319, OCBBF2013324, OCBBF2013366, OCBBF2013481, OCBBF2013507, OCBBF2013721, OCBBF2013789, OCBBF2013883, OCBBF2013926, OCBBF2014052, OCBBF2014064, OCBBF2014089, OCBBF2014292, OCBBF2014322, OCBBF2014386, OCBBF2014541, OCBBF2014576, OCBBF2014707, OCBBF2014745, OCBBF2014828, OCBBF2014873, OCBBF2014880, OCBBF2014928, OCBBF2015031, OCBBF2015081, OCBBF2015115, OCBBF2015232, OCBBF2015233, OCBBF2015285, OCBBF2015334, OCBBF2015335, OCBBF2015503, OCBBF2015506, OCBBF2015599, OCBBF2015645, OCBBF2015659, OCBBF2015751, OCBBF2015797, OCBBF2015931, OCBBF2015980, OCBBF2016038, OCBBF2016405, OCBBF2016467, OCBBF2016590, OCBBF2016591, OCBBF2016612, OCBBF2016689, OCBBF2016690, OCBBF2016729, OCBBF2016841, OCBBF2016928, OCBBF2017035, OCBBF2017055, OCBBF2017069, OCBBF2017306, OCBBF2017325, OCBBF2017398, OCBBF2017458, OCBBF2017489, OCBBF2017516, OCBBF2017665, OCBBF2017754, OCBBF2017815, OCBBF2017882, OCBBF2017888, OCBBF2017893, OCBBF2017920, OCBBF2018014, OCBBF2018084, OCBBF2018167, OCBBF2018206, OCBBF2018229, OCBBF2018234, OCBBF2018380, OCBBF2018563, OCBBF2018581, OCBBF2018618, OCBBF2018663, OCBBF2018687, OCBBF2018707, OCBBF2018828, OCBBF2018934, OCBBF2018956, OCBBF2019108, OCBBF2019195, OCBBF2019327, OCBBF2019684, OCBBF2019761, OCBBF2019823, OCBBF2019950, OCBBF2020048, OCBBF2020318, OCBBF2020343, OCBBF2020453, OCBBF2020741, OCBBF2020801, OCBBF2020825, OCBBF2020838, OCBBF2021020, OCBBF2021214, OCBBF2021286, OCBBF2021323, OCBBF2021518, OCBBF2021788, OCBBF2021833, OCBBF2022351, OCBBF2022573, OCBBF2022574, OCBBF2023162, OCBBF2023598, OCBBF2023643, OCBBF2024463, OCBBF2024589, OCBBF2024719, OCBBF2024779, OCBBF2024781, OCBBF2024850, OCBBF2025028, OCBBF2025115, OCBBF2025198, OCBBF2025451, OCBBF2025458, OCBBF2025527, OCBBF2025631, OCBBF2025730, OCBBF2026025, OCBBF2026035, OCBBF2026144, OCBBF2026368, OCBBF2026645, OCBBF2026649, OCBBF2026690, OCBBF2026981, OCBBF2027197, OCBBF2027354, OCBBF2027423, OCBBF2027478, OCBBF2027481, OCBBF2027511, OCBBF2027661, OCBBF2027728, OCBBF2027782, OCBBF2027868, OCBBF2028055, OCBBF2028173, OCBBF2028421, OCBBF2029471, OCBBF2029901, OCBBF2030116, OCBBF2030329, OCBBF2030354, OCBBF2030517, OCBBF2030574, OCBBF2030708, OCBBF2030927, OCBBF2030963, OCBBF2031167, OCBBF2031198, OCBBF2031366, OCBBF2031561, OCBBF2032152, OCBBF2032274, OCBBF2032539, OCBBF2032590, OCBBF2032599, OCBBF2032611, OCBBF2032671, OCBBF2033295, OCBBF2033413, OCBBF2033869, OCBBF2033948, OCBBF2034333, OCBBF2034529, OCBBF2034637, OCBBF2034906, OCBBF2035110, OCBBF2035214, OCBBF2035226, OCBBF2035390, OCBBF2035564, OCBBF2035658, OCBBF2035823, OCBBF2035885, OCBBF2035916, OCBBF2036019, OCBBF2036031, OCBBF2036225, OCBBF2036476, OCBBF2036743, OCBBF2036752, OCBBF2037068, OCBBF2037340, OCBBF2037398, OCBBF2037464, OCBBF2037547, OCBBF2037598, OCBBF2037638, OCBBF2038238, OCBBF2038285, OCBBF2038317, OCBBF3000097, OCBBF3000213, OCBBF3000296, OCBBF3000323, OCBBF3000372, OCBBF3000380, OCBBF3000743, OCBBF3000830, OCBBF3001076, OCBBF3001202, OCBBF3001616, OCBBF3002553, OCBBF3002600, OCBBF3002654, OCBBF3003103, OCBBF3003209, OCBBF3003592, OCBBF3003745, OCBBF3003761, OCBBF3004264, OCBBF3004314, OCBBF3004972, OCBBF3005330, OCBBF3005597, OCBBF3005843, OCBBF3006802, OCBBF3006986, OCBBF3007078, OCBBF3007704, OCBBF3008230, OCBBF3008392, OCBBF3008835, OCBBF3009192, OCBBF3009244, OCBBF3009279, PANCR1000012, PANCR1000021, PANCR1000081, PANCR1000086, PANCR1000091, PANCR1000185, PEBLM1000024, PEBLM1000029, PEBLM1000034, PEBLM1000062, PEBLM1000066, PEBLM1000068, PEBLM1000071, PEBLM1000083, PEBLM1000144, PEBLM1000147, PEBLM1000180, PEBLM2000030, PEBLM2000112, PEBLM2000126, PEBLM2000147, PEBLM2000170, PEBLM2000180, PEBLM2000213, PEBLM2000248, PEBLM2000267, PEBLM2000270, PEBLM2000308, PEBLM2000321, PEBLM2000326, PEBLM2000333, PEBLM2000338, PEBLM2000479, PEBLM2000502, PEBLM2001072, PEBLM2001312, PEBLM2001465, PEBLM2001488, PEBLM2001803, PEBLM2002432, PEBLM2002455, PEBLM2002594, PEBLM2002749, PEBLM2002887, PEBLM2003426, PEBLM2003765, PEBLM2003914, PEBLM2003935, PEBLM2004015, PEBLM2004216, PEBLM2004290, PEBLM2004497, PEBLM2004733, PEBLM2005282, PEBLM2005615, PEBLM2005632, PEBLM2005697, PEBLM2006031, PEBLM2006036, PEBLM2006049, PEBLM2006113, PEBLM2006135, PEBLM2006215, PEBLM2006283, PEBLM2006298, PEBLM2006366, PEBLM2006709, PEBLM2006912, PEBLM2007112, PEBLM2007140, PEBLM2007296, PEBLM2007437, PEBLM2007447, PEBLM2007598, PEBLM2007832, PEBLM2007834, PEBLM2008576, PEBLM2008605, PEBLM2008826, PEBLM2008861, PERIC1000025, PERIC1000147, PERIC2000180, PERIC2000214, PERIC2000386, PERIC2000387, PERIC2000422, PERIC2000473, PERIC2000478, PERIC2000889, PERIC2000914, PERIC2001227, PERIC2001228, PERIC2001379, PERIC2001504, PERIC2001703, PERIC2001764, PERIC2002243, PERIC2002272, PERIC2002452, PERIC2002766, PERIC2003001, PERIC2003090, PERIC2003287, PERIC2003349, PERIC2003452, PERIC2003699, PERIC2003720, PERIC2003794, PERIC2003834, PERIC2003919, PERIC2003957, PERIC2004028, PERIC2004131, PERIC2004259, PERIC2004379, PERIC2004429, PERIC2004510, PERIC2004613, PERIC2004909, PERIC2005111, PERIC2005117, PERIC2005305, PERIC2005347, PERIC2005370, PERIC2005936, PERIC2006035, PERIC2006121, PERIC2006443, PERIC2006945, PERIC2006960, PERIC2007439, PERIC2007914, PERIC2008008, PERIC2008385, PERIC2009001, PERIC2009086, PERIC2009329, PERIC2009566, PLACE5000001, PLACE5000037, PLACE5000058, PLACE5000066, PLACE5000067, PLACE5000068, PLACE5000070, PLACE5000080, PLACE5000105, PLACE5000113, PLACE5000115, PLACE5000116, PLACE5000129, PLACE5000139, PLACE5000153, PLACE5000170, PLACE5000171, PLACE5000172, PLACE5000178, PLACE5000245, PLACE5000260, PLACE5000282, PLACE5000297, PLACE5000372, PLACE5000492, PLACE5000522, PLACE5000527, PLACE6000012, PLACE6000044, PLACE6000055, PLACE6000070, PLACE6000137, PLACE6000191, PLACE6000205, PLACE6000231, PLACE6000263, PLACE6000296, PLACE6000314, PLACE6000325, PLACE6000348, PLACE6000371, PLACE6000424, PLACE6000426, PLACE6000429, PLACE6000450, PLACE6000463, PLACE6000523, PLACE6000550, PLACE6000552, PLACE6000555, PLACE6000619, PLACE6000630, PLACE6000953, PLACE6001118, PLACE6001153, PLACE6001185, PLACE6001262, PLACE6001294, PLACE6001443, PLACE6001536, PLACE6001557, PLACE6001712, PLACE6001740, PLACE6001823, PLACE6001886, PLACE6001923, PLACE6001925, PLACE6001933, PLACE6002011, PLACE6002016, PLACE6002056, PLACE6002157, PLACE6002312, PLACE6002323, PLACE6002345, PLACE6002419, PLACE6002462, PLACE6002647, PLACE6002668, PLACE6002692, PLACE6002699, PLACE6002710, PLACE6002871, PLACE6002949, PLACE6002960, PLACE6003004, PLACE6003038, PLACE6003077, PLACE6003094, PLACE6003109, PLACE6003204, PLACE6003218, PLACE6003372, PLACE6003399, PLACE6003539, PLACE6003621, PLACE6003705, PLACE6003740, PLACE6003771, PLACE6003796, PLACE6003839, PLACE6003850, PLACE6004005, PLACE6004219, PLACE6004336, PLACE6004368, PLACE6004380, PLACE6004396, PLACE6004397, PLACE6004454, PLACE6004464, PLACE6004491, PLACE6004578, PLACE6004663, PLACE6004687, PLACE6004738, PLACE6004931, PLACE6004966, PLACE6004993, PLACE6005007, PLACE6005029, PLACE6005108, PLACE6005231, PLACE6005234, PLACE6005283, PLACE6005328, PLACE6005351, PLACE6005423, PLACE6005482, PLACE6005487, PLACE6005535, PLACE6005546, PLACE6005559, PLACE6005579, PLACE6005691, PLACE6005786, PLACE6006042, PLACE6006077, PLACE6006137, PLACE6006158, PLACE6006186, PLACE6006217, PLACE6006222, PLACE6006266, PLACE6006287, PLACE6006394, PLACE6006474, PLACE6006566, PLACE6006697, PLACE6006822, PLACE6006871, PLACE6006905, PLACE6006988, PLACE6007050, PLACE6007180, PLACE6007239, PLACE6007242, PLACE6007309, PLACE6007373, PLACE6007380, PLACE6007433, PLACE6007436, PLACE6007482, PLACE6007687, PLACE6007787, PLACE6007798, PLACE6007807, PLACE6007925, PLACE6008036, PLACE6008094, PLACE6008126, PLACE6008285, PLACE6008444, PLACE6008453, PLACE6008640, PLACE6008750, PLACE6008768, PLACE6008775, PLACE6008793, PLACE6008824, PLACE6008989, PLACE6009006, PLACE6009008, PLACE6009228, PLACE6009237, PLACE6009338, PLACE6009419, PLACE6009430, PLACE6009482, PLACE6009524, PLACE6009527, PLACE6009560, PLACE6009590, PLACE6009821, PLACE6009835, PLACE6009853, PLACE6010463, PLACE6010484, PLACE6010485, PLACE6010568, PLACE6010701, PLACE6010704, PLACE6010732, PLACE6010765, PLACE6010848, PLACE6010925, PLACE6010936, PLACE6010991, PLACE6011041, PLACE6011057, PLACE6011102, PLACE6011156, PLACE6011211, PLACE6011260, PLACE6011334, PLACE6011627, PLACE6011774, PLACE6011881, PLACE6011907, PLACE6011970, PLACE6011975, PLACE6012028, PLACE6012108, PLACE6012168, PLACE6012297, PLACE6012308, PLACE6012574, PLACE6012908, PLACE6012936, PLACE6012942, PLACE6013232, PLACE6013288, PLACE6013386, PLACE6013400, PLACE6013650, PLACE6013672, PLACE6013883, PLACE6013884, PLACE6013885, PLACE6014043, PLACE6014064, PLACE6014516, PLACE6014882, PLACE6015051, PLACE6015211, PLACE6015322, PLACE6015445, PLACE6015460, PLACE6015513, PLACE6015591, PLACE6015729, PLACE6015731, PLACE6015939, PLACE6016030, PLACE6016093, PLACE6016105, PLACE6016160, PLACE6016210, PLACE6016254, PLACE6016383, PLACE6016942, PLACE6016984, PLACE6017002, PLACE6017431, PLACE6017564, PLACE6017578, PLACE6017626, PLACE6017701, PLACE6017714, PLACE6017788, PLACE6017791, PLACE6018031, PLACE6018107, PLACE6018187, PLACE6018235, PLACE6018287, PLACE6018441, PLACE6018497, PLACE6018769, PLACE6018834, PLACE6018843, PLACE6018863, PLACE6018938, PLACE6019195, PLACE6019385, PLACE6019542, PLACE6019600, PLACE6019674, PLACE6019676, PLACE6019701, PLACE6019932, PLACE6020031, PLACE6020145, PLACE7000167, PLACE7000170, PLACE7000266, PLACE7000333, PLACE7000410, PLACE7000502, PLACE7000707, PLACE7001022, PLACE7001544, PLACE7001759, PLACE7001936, PLACE7002303, PLACE7002641, PLACE7003639, PLACE7003657, PLACE7003684, PLACE7003985, PLACE7004961, PLACE7005169, PLACE7005671, PLACE7005840, PLACE7006051, PLACE7006090, PLACE7006240, PLACE7006268, PLACE7006275, PLACE7006498, PLACE7006540, PLACE7007379, PLACE7007644, PLACE7007973, PLACE7008136, PLACE7008261, PLACE7008431, PLACE7008623, PLACE7008766, PLACE7009563, PROST1000039, PROST1000065, PROST1000083, PROST1000085, PROST1000110, PROST1000120, PROST1000123, PROST1000136, PROST1000144, PROST1000145, PROST1000152, PROST1000167, PROST1000184, PROST1000215, PROST1000217, PROST1000246, PROST1000262, PROST1000298, PROST1000322, PROST1000334, PROST1000362, PROST1000377, PROST1000383, PROST1000412, PROST1000419, PROST1000451, PROST1000480, PROST1000485, PROST1000493, PROST1000512, PROST1000527, PROST1000528, PROST1000536, PROST1000559, PROST1000564, PROST1000575, PROST2000036, PROST2000053, PROST2000067, PROST2000079, PROST2000105, PROST2000143, PROST2000162, PROST2000203, PROST2000206, PROST2000212, PROST2000241, PROST2000267, PROST2000273, PROST2000274, PROST2000277, PROST2000325, PROST2000337, PROST2000432, PROST2000452, PROST2000463, PROST2000470, PROST2000505, PROST2000567, PROST2000572, PROST2000717, PROST2000760, PROST2000761, PROST2000835, PROST2000893, PROST2000961, PROST2001002, PROST2001116, PROST2001138, PROST2001180, PROST2001213, PROST2001283, PROST2001414, PROST2001415, PROST2001465, PROST2001540, PROST2001552, PROST2001599, PROST2001611, PROST2001636, PROST2001739, PROST2001796, PROST2001805, PROST2001823, PROST2001883, PROST2001899, PROST2001997, PROST2001998, PROST2002078, PROST2002101, PROST2002162, PROST2002212, PROST2002227, PROST2002338, PROST2002425, PROST2002488, PROST2002489, PROST2002527, PROST2002591, PROST2002602, PROST2002633, PROST2002682, PROST2002685, PROST2002722, PROST2002736, PROST2002842, PROST2002897, PROST2002906, PROST2002927, PROST2002960, PROST2003102, PROST2003117, PROST2003210, PROST2003302, PROST2003303, PROST2003324, PROST2003338, PROST2003340, PROST2003396, PROST2003428, PROST2003472, PROST2003517, PROST2003537, PROST2003563, PROST2003577, PROST2003583, PROST2003586, PROST2003628, PROST2003635, PROST2003674, PROST2003676, PROST2003725, PROST2003732, PROST2003775, PROST2003922, PROST2003930, PROST2004115, PROST2004142, PROST2004146, PROST2004161, PROST2004251, PROST2004258, PROST2004332, PROST2004481, PROST2004526, PROST2004570, PROST2004727, PROST2004739, PROST2004742, PROST2004744, PROST2004817, PROST2005067, PROST2005076, PROST2005093, PROST2005121, PROST2005131, PROST2005143, PROST2005228, PROST2005272, PROST2005285, PROST2005426, PROST2005466, PROST2005630, PROST2005683, PROST2005788, PROST2005793, PROST2005880, PROST2005886, PROST2005904, PROST2005919, PROST2005943, PROST2006008, PROST2006020, PROST2006030, PROST2006196, PROST2006201, PROST2006282, PROST2006343, PROST2006450, PROST2006491, PROST2006510, PROST2006536, PROST2006579, PROST2006688, PROST2006737, PROST2006766, PROST2006782, PROST2006933, PROST2006988, PROST2007122, PROST2007200, PROST2007237, PROST2007248, PROST2007289, PROST2007317, PROST2007328, PROST2007382, PROST2007389, PROST2007416, PROST2007528, PROST2007818, PROST2007871, PROST2007950, PROST2007956, PROST2007974, PROST2007988, PROST2008079, PROST2008088, PROST2008243, PROST2008245, PROST2008268, PROST2008447, PROST2008468, PROST2008472, PROST2008516, PROST2008724, PROST2008770, PROST2008835, PROST2008993, PROST2009022, PROST2009208, PROST2009222, PROST2009254, PROST2009273, PROST2009320, PROST2009347, PROST2009365, PROST2009388, PROST2009400, PROST2009470, PROST2009483, PROST2009571, PROST2009731, PROST2009736, PROST2009795, PROST2009901, PROST2009909, PROST2010046, PROST2010219, PROST2010250, PROST2010318, PROST2010326, PROST2010382, PROST2010400, PROST2010545, PROST2010579, PROST2010606, PROST2010885, PROST2011012, PROST2011038, PROST2011105, PROST2011297, PROST2011439, PROST2011482, PROST2011631, PROST2011660, PROST2012005, PROST2012007, PROST2012016, PROST2012088, PROST2012157, PROST2012190, PROST2012249, PROST2012353, PROST2012400, PROST2012448, PROST2012504, PROST2012542, PROST2012550, PROST2012740, PROST2012745, PROST2012780, PROST2012888, PROST2012890, PROST2013032, PROST2013053, PROST2013121, PROST2013260, PROST2013327, PROST2013531, PROST2013605, PROST2013627, PROST2013873, PROST2013880, PROST2014422, PROST2014585, PROST2014601, PROST2014659, PROST2014862, PROST2014916, PROST2014925, PROST2015124, PROST2015137, PROST2015198, PROST2015243, PROST2015246, PROST2015251, PROST2015287, PROST2015332, PROST2015457, PROST2015464, PROST2015537, PROST2015545, PROST2015551, PROST2015636, PROST2015710, PROST2015756, PROST2015877, PROST2015900, PROST2015924, PROST2015932, PROST2016195, PROST2016246, PROST2016351, PROST2016379, PROST2016444, PROST2016462, PROST2016499, PROST2016512, PROST2016566, PROST2016582, PROST2016668, PROST2016684, PROST2016777, PROST2016829, PROST2016860, PROST2016918, PROST2016980, PROST2017098, PROST2017128, PROST2017203, PROST2017367, PROST2017413, PROST2017441, PROST2017578, PROST2017612, PROST2017617, PROST2017700, PROST2017701, PROST2017729, PROST2017836, PROST2017910, PROST2017972, PROST2018030, PROST2018235, PROST2018437, PROST2018487, PROST2018511, PROST2018583, PROST2018588, PROST2018607, PROST2018788, PROST2018902, PROST2018922, PROST2018977, PROST2019164, PROST2019253, PROST2019296, PROST2019398, PROST2019487, PROST2019781, PUAEN1000039, PUAEN1000057, PUAEN1000085, PUAEN1000087, PUAEN1000121, PUAEN1000147, PUAEN1000161, PUAEN1000175, PUAEN1000239, PUAEN1000275, PUAEN1000276, PUAEN1000288, PUAEN1000322, PUAEN2000080, PUAEN2000152, PUAEN2000175, PUAEN2000247, PUAEN2000394, PUAEN2000497, PUAEN2000594, PUAEN2000684, PUAEN2000942, PUAEN2001260, PUAEN2001345, PUAEN2001526, PUAEN2001586, PUAEN2001882, PUAEN2002473, PUAEN2002489, PUAEN2002552, PUAEN2002568, PUAEN2002616, PUAEN2002758, PUAEN2003079, PUAEN2003116, PUAEN2003408, PUAEN2003517, PUAEN2003954, PUAEN2004067, PUAEN2004083, PUAEN2004400, PUAEN2004511, PUAEN2004525, PUAEN2004875, PUAEN2005110, PUAEN2005247, PUAEN2005502, PUAEN2005588, PUAEN2005930, PUAEN2006029, PUAEN2006328, PUAEN2006335, PUAEN2006578, PUAEN2006639, PUAEN2006761, PUAEN2007044, PUAEN2007350, PUAEN2007785, PUAEN2007898, PUAEN2008123, PUAEN2008228, PUAEN2008314, PUAEN2008515, PUAEN2008815, PUAEN2008939, PUAEN2008980, PUAEN2008985, PUAEN2009534, PUAEN2009655, PUAEN2009795, PUAEN2009852, PUAEN2010346, PUAEN2010824, RECTM1000051, RECTM1000141, RECTM2000220, RECTM2000349, RECTM2000510, RECTM2001307, RECTM2001347, RECTM2001519, RECTM2001666, RECTM2001691, RECTM2001749, RECTM2002172, RECTM2002602, RECTM2002632, SALGL1000005, SALGL1000024, SALGL1000028, SALGL1000047, SALGL1000065, SALGL1000107, SALGL1000157, SALGL1000171, SKMUS1000014, SKMUS1000030, SKMUS1000064, SKMUS1000067, SKMUS1000084, SKMUS1000102, SKMUS1000104, SKMUS1000110, SKMUS1000118, SKMUS1000124, SKMUS1000129, SKMUS2000020, SKMUS2000061, SKMUS2000074, SKMUS2000078, SKMUS2000117, SKMUS2000137, SKMUS2000198, SKMUS2000243, SKMUS2000271, SKMUS2000287, SKMUS2000317, SKMUS2000330, SKMUS2000339, SKMUS2000343, SKMUS2000365, SKMUS2000380, SKMUS2000390, SKMUS2000416, SKMUS2000458, SKMUS2000467, SKMUS2000468, SKMUS2000484, SKMUS2000515, SKMUS2000679, SKMUS2000690, SKMUS2000701, SKMUS2000705, SKMUS2000710, SKMUS2000724, SKMUS2000726, SKMUS2000757, SKMUS2000774, SKMUS2000780, SKMUS2000847, SKMUS2000863, SKMUS2000873, SKMUS2000894, SKMUS2000898, SKMUS2000902, SKMUS2000931, SKMUS2000933, SKMUS2000945, SKMUS2000961, SKMUS2000973, SKMUS2000980, SKMUS2001008, SKMUS2001014, SKMUS2001129, SKMUS2001147, SKMUS2001157, SKMUS2001164, SKMUS2001199, SKMUS2001201, SKMUS2001215, SKMUS2001247, SKMUS2001254, SKMUS2001271, SKMUS2001287, SKMUS2001323, SKMUS2001364, SKMUS2001398, SKMUS2001402, SKMUS2001412, SKMUS2001492, SKMUS2001501, SKMUS2001543, SKMUS2001580, SKMUS2001585, SKMUS2001608, SKMUS2001631, SKMUS2001662, SKMUS2001663, SKMUS2001668, SKMUS2001671, SKMUS2001683, SKMUS2001693, SKMUS2001695, SKMUS2001703, SKMUS2001740, SKMUS2001742, SKMUS2001823, SKMUS2001850, SKMUS2002077, SKMUS2002084, SKMUS2002153, SKMUS2002475, SKMUS2002602, SKMUS2002634, SKMUS2002693, SKMUS2002821, SKMUS2002840, SKMUS2002920, SKMUS2003034, SKMUS2003074, SKMUS2003168, SKMUS2003194, SKMUS2003744, SKMUS2004044, SKMUS2004047, SKMUS2004483, SKMUS2004667, SKMUS2004897, SKMUS2004903, SKMUS2004908, SKMUS2005428, SKMUS2006394, SKMUS2006481, SKMUS2006755, SKMUS2007315, SKMUS2007359, SKMUS2007568, SKMUS2007740, SKMUS2007816, SKMUS2007915, SKMUS2008338, SKMUS2008407, SKMUS2008474, SKMUS2008585, SKMUS2008607, SKMUS2009190, SKMUS2009232, SKMUS2009479, SKMUS2009557, SKNMC1000110, SKNMC1000123, SKNMC1000124, SKNMC1000137, SKNMC1000159, SKNMC1000264, SKNMC2000224, SKNMC2000256, SKNMC2000356, SKNMC2000374, SKNMC2000583, SKNMC2000593, SKNMC2000612, SKNMC2000622, SKNMC2000966, SKNMC2001113, SKNMC2001324, SKNMC2001503, SKNMC2001555, SKNMC2001596, SKNMC2001623, SKNMC2002402, SKNMC2003924, SKNMC2003987, SKNMC2004457, SKNMC2004643, SKNMC2004651, SKNMC2005772, SKNMC2006173, SKNMC2006327, SKNMC2006998, SKNMC2007134, SKNMC2007502, SKNMC2007504, SKNMC2007961, SKNMC2009450, SKNSH1000002, SKNSH1000086, SKNSH1000101, SKNSH1000174, SKNSH1000301, SKNSH1000308, SKNSH1000416, SKNSH2000051, SKNSH2000101, SKNSH2000151, SKNSH2000163, SKNSH2000250, SKNSH2000319, SKNSH2000482, SKNSH2000516, SKNSH2000550, SKNSH2000971, SKNSH2001222, SKNSH2001875, SKNSH2001931, SKNSH2002054, SKNSH2002768, SKNSH2002866, SKNSH2003064, SKNSH2003174, SKNSH2003422, SKNSH2003466, SKNSH2003483, SKNSH2003528, SKNSH2003633, SKNSH2004039, SKNSH2005120, SKNSH2005194, SKNSH2005240, SKNSH2005792, SKNSH2005816, SKNSH2005981, SKNSH2006234, SKNSH2006304, SKNSH2006432, SKNSH2006822, SKNSH2007142, SKNSH2007149, SKNSH2007429, SKNSH2007739, SKNSH2008043, SKNSH2008940, SKNSH2008969, SKNSH2009197, SKNSH2009357, SKNSH2009435, SKNSH2009991, SKNSH2010015, SMINT1000012, SMINT1000016, SMINT1000039, SMINT1000042, SMINT1000048, SMINT1000051, SMINT1000054, SMINT1000057, SMINT1000071, SMINT1000075, SMINT1000078, SMINT1000091, SMINT1000100, SMINT1000103, SMINT1000117, SMINT1000118, SMINT1000137, SMINT1000192, SMINT2000007, SMINT2000032, SMINT2000040, SMINT2000060, SMINT2000073, SMINT2000084, SMINT2000145, SMINT2000159, SMINT2000176, SMINT2000185, SMINT2000227, SMINT2000229, SMINT2000232, SMINT2000239, SMINT2000267, SMINT2000277, SMINT2000396, SMINT2000400, SMINT2000454, SMINT2000518, SMINT2000529, SMINT2000530, SMINT2000537, SMINT2000538, SMINT2000541, SMINT2000545, SMINT2000558, SMINT2000562, SMINT2000568, SMINT2000602, SMINT2000609, SMINT2000629, SMINT2000659, SMINT2000694, SMINT2000747, SMINT2000811, SMINT2000824, SMINT2000933, SMINT2000984, SMINT2001114, SMINT2001158, SMINT2001183, SMINT2001199, SMINT2001348, SMINT2001397, SMINT2001458, SMINT2001461, SMINT2001535, SMINT2001559, SMINT2001609, SMINT2001615, SMINT2001683, SMINT2001731, SMINT2001812, SMINT2001818, SMINT2001950, SMINT2002126, SMINT2002159, SMINT2002202, SMINT2002210, SMINT2002224, SMINT2002281, SMINT2002311, SMINT2002314, SMINT2002414, SMINT2002457, SMINT2002620, SMINT2002689, SMINT2002743, SMINT2002778, SMINT2002880, SMINT2002882, SMINT2002884, SMINT2002899, SMINT2002974, SMINT2002976, SMINT2003003, SMINT2003128, SMINT2003150, SMINT2003169, SMINT2003317, SMINT2003340, SMINT2003386, SMINT2003423, SMINT2003505, SMINT2003569, SMINT2003641, SMINT2003644, SMINT2003866, SMINT2003905, SMINT2004023, SMINT2004037, SMINT2004047, SMINT2004086, SMINT2004144, SMINT2004280, SMINT2004299, SMINT2004339, SMINT2004350, SMINT2004414, SMINT2004473, SMINT2004547, SMINT2004583, SMINT2004589, SMINT2004729, SMINT2004781, SMINT2004872, SMINT2004891, SMINT2004909, SMINT2004972, SMINT2004992, SMINT2005075, SMINT2005161, SMINT2005174, SMINT2005213, SMINT2005330, SMINT2005368, SMINT2005387, SMINT2005402, SMINT2005405, SMINT2005621, SMINT2005623, SMINT2005624, SMINT2005688, SMINT2005800, SMINT2005956, SMINT2006078, SMINT2006205, SMINT2006331, SMINT2006596, SMINT2006641, SMINT2006648, SMINT2006708, SMINT2006716, SMINT2006801, SMINT2007062, SMINT2007101, SMINT2007140, SMINT2007187, SMINT2007219, SMINT2007294, SMINT2007365, SMINT2007391, SMINT2007433, SMINT2007508, SMINT2007526, SMINT2007579, SMINT2007647, SMINT2007729, SMINT2007790, SMINT2007792, SMINT2007796, SMINT2007867, SMINT2007932, SMINT2008042, SMINT2008054, SMINT2008133, SMINT2008277, SMINT2008329, SMINT2008455, SMINT2008491, SMINT2008531, SMINT2008545, SMINT2008558, SMINT2008590, SMINT2008625, SMINT2008672, SMINT2008690, SMINT2008715, SMINT2008720, SMINT2008817, SMINT2008844, SMINT2008869, SMINT2008960, SMINT2009119, SMINT2009121, SMINT2009212, SMINT2009233, SMINT2009259, SMINT2009272, SMINT2009292, SMINT2009363, SMINT2009415, SMINT2009468, SMINT2009505, SMINT2009529, SMINT2009832, SMINT2009895, SMINT2009902, SMINT2009973, SMINT2010015, SMINT2010068, SMINT2010076, SMINT2010084, SMINT2010144, SMINT2010278, SMINT2010324, SMINT2010326, SMINT2010369, SMINT2010426, SMINT2010500, SMINT2010533, SMINT2010629, SMINT2010639, SMINT2010672, SMINT2010753, SMINT2010853, SMINT2010897, SMINT2010901, SMINT2010959, SMINT2010997, SMINT2011033, SMINT2011066, SMINT2011273, SMINT2011311, SMINT2011406, SMINT2011509, SMINT2011567, SMINT2011588, SMINT2011656, SMINT2011888, SMINT2011958, -SMINT2012040, SMINT2012122, SMINT2012179, SMINT2012195, SMINT2012285, SMINT2012501, SMINT2012734, SMINT2012793, SMINT2013031, SMINT2013032, SMINT2013129, SMINT2013170, SMINT2013181, SMINT2013228, SMINT2013613, SMINT2013626, SMINT2013695, SMINT2013833, SMINT2013890, SMINT2014166, SMINT2014282, SMINT2014443, SMINT2014480, SMINT2014489, SMINT2014721, SMINT2015006, SMINT2015294, SMINT2015306, SMINT2015326, SMINT2015353, SMINT2015454, SMINT2015518, SMINT2015745, SMINT2015787, SMINT2015810, SMINT2016122, SMINT2016146, SMINT2016286, SMINT2016313, SMINT2016396, SMINT2016412, SMINT2016440, SMINT2016477, SMINT2016544, SMINT2016857, SMINT2017134, SMINT2017319, SMINT2017324, SMINT2017410, SMINT2017431, SMINT2017432, SMINT2017436, SMINT2017599, SMINT2017659, SMINT2017736, SMINT2017781, SMINT2017855, SMINT2017884, SMINT2017974, SMINT2018343, SMINT2018353, SMINT2018592, SMINT2018681, SMINT2019017, SMINT2019105, SMINT2019142, SMINT2019153, SMINT2019200, SPLEN1000013, SPLEN1000041, SPLEN1000049, SPLEN1000056, SPLEN1000087, SPLEN1000089, SPLEN1000091, SPLEN1000106, SPLEN1000116, SPLEN1000134, SPLEN1000139, SPLEN1000143, SPLEN1000144, SPLEN1000145, SPLEN1000156, SPLEN1000163, SPLEN1000165, SPLEN1000178, SPLEN2000020, SPLEN2000047, SPLEN2000064, SPLEN2000098, SPLEN2000126, SPLEN2000134, SPLEN2000143, SPLEN2000189, SPLEN2000197, SPLEN2000205, SPLEN2000210, SPLEN2000222, SPLEN2000242, SPLEN2000243, SPLEN2000247, SPLEN2000255, SPLEN2000258, SPLEN2000267, SPLEN2000270, SPLEN2000307, SPLEN2000310, SPLEN2000341, SPLEN2000348, SPLEN2000350, SPLEN2000357, SPLEN2000364, SPLEN2000402, SPLEN2000414, SPLEN2000420, SPLEN2000443, SPLEN2000448, SPLEN2000450, SPLEN2000464, SPLEN2000496, SPLEN2000515, SPLEN2000516, SPLEN2000537, SPLEN2000541, SPLEN2000607, SPLEN2000630, SPLEN2000695, SPLEN2000698, SPLEN2000839, SPLEN2000874, SPLEN2000882, SPLEN2001135, SPLEN2001157, SPLEN2001176, SPLEN2001227, SPLEN2001245, SPLEN2001278, SPLEN2001354, SPLEN2001367, SPLEN2001383, SPLEN2001476, SPLEN2001503, SPLEN2001510, SPLEN2001599, SPLEN2001626, SPLEN2001650, SPLEN2001689, SPLEN2001710, SPLEN2001761, SPLEN2001781, SPLEN2001881, SPLEN2001912, SPLEN2001945, SPLEN2002007, SPLEN2002053, SPLEN2002133, SPLEN2002147, SPLEN2002166, SPLEN2002175, SPLEN2002223, SPLEN2002272, SPLEN2002314, SPLEN2002335, SPLEN2002343, SPLEN2002354, SPLEN2002385, SPLEN2002419, SPLEN2002451, SPLEN2002462, SPLEN2002463, SPLEN2002477, SPLEN2002662, SPLEN2002695, SPLEN2002707, SPLEN2002744, SPLEN2002917, SPLEN2002931, SPLEN2002957, SPLEN2003160, SPLEN2003204, SPLEN2003219, SPLEN2003297, SPLEN2003396, SPLEN2003678, SPLEN2003878, SPLEN2003918, SPLEN2003924, SPLEN2004060, SPLEN2004124, SPLEN2004148, SPLEN2004181, SPLEN2004220, SPLEN2004343, SPLEN2004346, SPLEN2004368, SPLEN2004611, SPLEN2004662, SPLEN2004844, SPLEN2004880, SPLEN2004984, SPLEN2005009, SPLEN2005227, SPLEN2005272, SPLEN2005342, SPLEN2005416, SPLEN2005429, SPLEN2005450, SPLEN2005474, SPLEN2005560, SPLEN2005727, SPLEN2005783, SPLEN2005790, SPLEN2005806, SPLEN2005818, SPLEN2005838, SPLEN2005869, SPLEN2005927, SPLEN2005939, SPLEN2006122, SPLEN2006143, SPLEN2006232, SPLEN2006268, SPLEN2006283, SPLEN2006305, SPLEN2006325, SPLEN2006389, SPLEN2006425, SPLEN2006671, SPLEN2006701, SPLEN2006785, SPLEN2006875, SPLEN2007182, SPLEN2007276, SPLEN2007314, SPLEN2007326, SPLEN2007350, SPLEN2007388, SPLEN2007619, SPLEN2007653, SPLEN2007689, SPLEN2007695, SPLEN2007739, SPLEN2007750, SPLEN2007794, SPLEN2007879, SPLEN2007926, SPLEN2007951, SPLEN2008007, SPLEN2008135, SPLEN2008164, SPLEN2008317, SPLEN2008460, SPLEN2008496, SPLEN2008591, SPLEN2008786, SPLEN2009081, SPLEN2009088, SPLEN2009163, SPLEN2009315, SPLEN2009340, SPLEN2009512, SPLEN2009513, SPLEN2009541, SPLEN2009548, SPLEN2009555, SPLEN2009581, SPLEN2009733, SPLEN2009803, SPLEN2009884, SPLEN2009918, SPLEN2010004, SPLEN2010015, SPLEN2010112, SPLEN2010119, SPLEN2010146, SPLEN2010187, SPLEN2010350, SPLEN2010395, SPLEN2010415, SPLEN2010447, SPLEN2010469, SPLEN2010510, SPLEN2010530, SPLEN2010534, SPLEN2010588, SPLEN2010625, SPLEN2010800, SPLEN2010846, SPLEN2010847, SPLEN2010862, SPLEN2010912, SPLEN2010978, SPLEN2011018, SPLEN2011021, SPLEN2011025, SPLEN2011086, SPLEN2011139, SPLEN2011145, SPLEN2011248, SPLEN2011252, SPLEN2011419, SPLEN2011422, SPLEN2011672, SPLEN2011678, SPLEN2011737, SPLEN2011766, SPLEN2011805, SPLEN2011820, SPLEN2011830, SPLEN2011931, SPLEN2011981, SPLEN2012115, SPLEN2012175, SPLEN2012179, SPLEN2012185, SPLEN2012234, SPLEN2012453, SPLEN2012524, SPLEN2012525, SPLEN2012606, SPLEN2012611, SPLEN2012619, SPLEN2012624, SPLEN2012725, SPLEN2012743, SPLEN2012756, SPLEN2012800, SPLEN2012846, SPLEN2012889, SPLEN2012961, SPLEN2013108, SPLEN2013195, SPLEN2013503, SPLEN2013644, SPLEN2013648, SPLEN2013670, SPLEN2013673, SPLEN2013690, SPLEN2013714, SPLEN2013753, SPLEN2013821, SPLEN2013857, SPLEN2013860, SPLEN2013910, SPLEN2013923, SPLEN2013936, SPLEN2014041, SPLEN2014063, SPLEN2014073, SPLEN2014080, SPLEN2014119, SPLEN2014136, SPLEN2014199, SPLEN2014210, SPLEN2014293, SPLEN2014318, SPLEN2014381, SPLEN2014452, SPLEN2014454, SPLEN2014486, SPLEN2014543, SPLEN2014572, SPLEN2014645, SPLEN2014669, SPLEN2014711, SPLEN2014739, SPLEN2014860, SPLEN2014865, SPLEN2014919, SPLEN2014920, SPLEN2014924, SPLEN2014937, SPLEN2014946, SPLEN2015031, SPLEN2015094, SPLEN2015121, SPLEN2015129, SPLEN2015158, SPLEN2015166, SPLEN2015216, SPLEN2015258, SPLEN2015261, SPLEN2015267, SPLEN2015276, SPLEN2015310, SPLEN2015415, SPLEN2015433, SPLEN2015593, SPLEN2015674, SPLEN2015679, SPLEN2015707, SPLEN2015730, SPLEN2015746, SPLEN2015788, SPLEN2015815, SPLEN2015890, SPLEN2015891, SPLEN2015899, SPLEN2016045, SPLEN2016053, SPLEN2016069, SPLEN2016098, SPLEN2016135, SPLEN2016241, SPLEN2016250, SPLEN2016268, SPLEN2016304, SPLEN2016356, SPLEN2016421, SPLEN2016480, SPLEN2016531, SPLEN2016533, SPLEN2016541, SPLEN2016552, SPLEN2016554, SPLEN2016602, SPLEN2016627, SPLEN2016678, SPLEN2016743, SPLEN2016773, SPLEN2016781, SPLEN2016840, SPLEN2016863, SPLEN2016922, SPLEN2016932, SPLEN2016972, SPLEN2016973, SPLEN2017043, SPLEN2017104, SPLEN2017121, SPLEN2017147, SPLEN2017187, SPLEN2017189, SPLEN2017212, SPLEN2017318, SPLEN2017351, SPLEN2017426, SPLEN2017452, SPLEN2017538, SPLEN2017592, SPLEN2017613, SPLEN2017620, SPLEN2017643, SPLEN2017687, SPLEN2017740, SPLEN2017781, SPLEN2017999, SPLEN2018098, SPLEN2018112, SPLEN2018157, SPLEN2018159, SPLEN2018180, SPLEN2018181, SPLEN2018280, SPLEN2018285, SPLEN2018299, SPLEN2018302, SPLEN2018364, SPLEN2018395, SPLEN2018643, SPLEN2018683, SPLEN2018732, SPLEN2018749, SPLEN2018933, SPLEN2019008, SPLEN2019043, SPLEN2019102, SPLEN2019131, SPLEN2019257, SPLEN2019311, SPLEN2019323, SPLEN2019349, SPLEN2019375, SPLEN2019379, SPLEN2019405, SPLEN2019446, SPLEN2019471, SPLEN2019480, SPLEN2019505, SPLEN2019571, SPLEN2019575, SPLEN2019709, SPLEN2019774, SPLEN2019793, SPLEN2019811, SPLEN2019839, SPLEN2019956, SPLEN2019985, SPLEN2020007, SPLEN2020034, SPLEN2020153, SPLEN2020154, SPLEN2020166, SPLEN2020183, SPLEN2020223, SPLEN2020359, SPLEN2020417, SPLEN2020427, SPLEN2020467, SPLEN2020512, SPLEN2020608, SPLEN2020777, SPLEN2020805, SPLEN2021057, SPLEN2021122, SPLEN2021157, SPLEN2021194, SPLEN2021231, SPLEN2021273, SPLEN2021295, SPLEN2021298, SPLEN2021383, SPLEN2021417, SPLEN2021440, SPLEN2021458, SPLEN2021463, SPLEN2021560, SPLEN2021701, SPLEN2021795, SPLEN2021983, SPLEN2021991, SPLEN2022040, SPLEN2022162, SPLEN2022227, SPLEN2022591, SPLEN2022785, SPLEN2022920, SPLEN2023024, SPLEN2023118, SPLEN2023160, SPLEN2023423, SPLEN2023710, SPLEN2023733, SPLEN2023791, SPLEN2023977, SPLEN2024070, SPLEN2024127, SPLEN2024232, SPLEN2024273, SPLEN2024383, SPLEN2024489, SPLEN2024530, SPLEN2024571, SPLEN2024577, SPLEN2024617, SPLEN2024737, SPLEN2024922, SPLEN2024956, SPLEN2024990, SPLEN2025012, SPLEN2025017, SPLEN2025039, SPLEN2025219, SPLEN2025491, SPLEN2025626, SPLEN2025820, SPLEN2026144, SPLEN2026411, SPLEN2026765, SPLEN2027113, SPLEN2027157, SPLEN2027395, SPLEN2027488, SPLEN2027852, SPLEN2027868, SPLEN2027995, SPLEN2028046, SPLEN2028066, SPLEN2028138, SPLEN2028365, SPLEN2028417, SPLEN2028424, SPLEN2028593, SPLEN2028844, SPLEN2028914, SPLEN2028994, SPLEN2029051, SPLEN2029176, SPLEN2029295, SPLEN2029380, SPLEN2029522, SPLEN2029683, SPLEN2029727, SPLEN2029904, SPLEN2030250, SPLEN2030335, SPLEN2030371, SPLEN2030397, SPLEN2030479, SPLEN2030495, SPLEN2030562, SPLEN2030763, SPLEN2030847, SPLEN2031004, SPLEN2031125, SPLEN2031424, SPLEN2031674, SPLEN2031724, SPLEN2031780, SPLEN2032036, SPLEN2032112, SPLEN2032154, SPLEN2032157, SPLEN2032321, SPLEN2032356, SPLEN2032677, SPLEN2032813, SPLEN2032924, SPLEN2033098, SPLEN2033153, SPLEN2033333, SPLEN2033490, SPLEN2033539, SPLEN2033921, SPLEN2033996, SPLEN2034021, SPLEN2034081, SPLEN2034252, SPLEN2034551, SPLEN2034601, SPLEN2034678, SPLEN2034781, SPLEN2034864, SPLEN2034934, SPLEN2035318, SPLEN2035615, SPLEN2036076, SPLEN2036103, SPLEN2036326, SPLEN2036475, SPLEN2036501, SPLEN2036579, SPLEN2036608, SPLEN2036702, SPLEN2036712, SPLEN2036821, SPLEN2036932, SPLEN2036953, SPLEN2037077, SPLEN2037194, SPLEN2037319, SPLEN2037444, SPLEN2037580, SPLEN2037630, SPLEN2037678, SPLEN2037722, SPLEN2037891, SPLEN2038055, SPLEN2038180, SPLEN2038345, SPLEN2038407, SPLEN2039311, SPLEN2039379, SPLEN2039672, SPLEN2039697, SPLEN2039845, SPLEN2039936, SPLEN2040222, SPLEN2040237, SPLEN2040824, SPLEN2041304, SPLEN2041306, SPLEN2041310, SPLEN2041585, SPLEN2041645, SPLEN2041700, SPLEN2041720, SPLEN2041977, SPLEN2042051, SPLEN2042303, SPLEN2042521, SPLEN2042535, SPLEN2042598, SPLEN2042714, SPLEN2042920, STOMA1000013, STOMA1000047, STOMA1000052, STOMA1000074, STOMA1000091, STOMA1000117, STOMA1000133, STOMA1000175, STOMA1000186, STOMA1000189, STOMA1000190, STOMA1000191, STOMA2000032, STOMA2000072, STOMA2000088, STOMA2000104, STOMA2000148, STOMA2000168, STOMA2000183, STOMA2000188, STOMA2000257, STOMA2000279, STOMA2000289, STOMA2000383, STOMA2000386, STOMA2000395, STOMA2000396, STOMA2000478, STOMA2000529, STOMA2000539, STOMA2000567, STOMA2000640, STOMA2000678, STOMA2000686, STOMA2000888, STOMA2001025, STOMA2001389, STOMA2002141, STOMA2002367, STOMA2002688, STOMA2002828, STOMA2003158, STOMA2003289, STOMA2003444, STOMA2003477, STOMA2003646, STOMA2003716, STOMA2003781, STOMA2003894, STOMA2004194, STOMA2004294, STOMA2004663, STOMA2004668, STOMA2004852, STOMA2004873, STOMA2004884, STOMA2004893, STOMA2004925, STOMA2005120, STOMA2005664, STOMA2005667, STOMA2005746, STOMA2005782, STOMA2006181, STOMA2006213, STOMA2006229, STOMA2006325, STOMA2006330, STOMA2006398, STOMA2006447, STOMA2006780, STOMA2006904, STOMA2007269, STOMA2007680, STOMA2007745, STOMA2008050, STOMA2008361, STOMA2008546, STOMA2008614, STOMA2008638, STOMA2008838, STOMA2009250, STOMA2009253, STOMA2009256, STOMA2009289, SYNOV1000045, SYNOV1000049, SYNOV1000118, SYNOV1000128, SYNOV1000164, SYNOV1000190, SYNOV1000256, SYNOV1000374, SYNOV2000152, SYNOV2000171, SYNOV2000173, SYNOV2000177, SYNOV2000178, SYNOV2000193, SYNOV2000251, SYNOV2000279, SYNOV2000291, SYNOV2000297, SYNOV2000397, SYNOV2000426, SYNOV2000601, SYNOV2000700, SYNOV2000820, SYNOV2000824, SYNOV2000923, SYNOV2001014, SYNOV2001033, SYNOV2001035, SYNOV2001088, SYNOV2001111, SYNOV2001144, SYNOV2001251, SYNOV2001262, SYNOV2001300, SYNOV2001356, SYNOV2001374, SYNOV2001390, SYNOV2001451, SYNOV2001457, SYNOV2001581, SYNOV2001648, SYNOV2001660, SYNOV2003326, SYNOV2005216, SYNOV2005448, SYNOV2005541, SYNOV2005673, SYNOV2005817, SYNOV2005962, SYNOV2006430, SYNOV2006620, SYNOV2007758, SYNOV2007965, SYNOV2008765, SYNOV2009172, SYNOV2011233, SYNOV2012326, SYNOV2013365, SYNOV2013637, SYNOV2014157, SYNOV2014364, SYNOV2016124, SYNOV2016837, SYNOV2017055, SYNOV2017179, SYNOV2018921, SYNOV2019280, SYNOV2020085, SYNOV2021320, SYNOV2021953, SYNOV3000184, SYNOV3000231, SYNOV3000302, SYNOV3000345, SYNOV4000249, SYNOV4000472, SYNOV4000598, SYNOV4000706, SYNOV4001224, SYNOV4001326, SYNOV4001342, SYNOV4001395, SYNOV4002001, SYNOV4002392, SYNOV4002875, SYNOV4002883, SYNOV4003174, SYNOV4003322, SYNOV4003681, SYNOV4003981, SYNOV4004184, SYNOV4004741, SYNOV4004823, SYNOV4004914, SYNOV4005256, SYNOV4005570, SYNOV4005739, SYNOV4005889, SYNOV4005981, SYNOV4005989, SYNOV4006256, SYNOV4006327, SYNOV4006542, SYNOV4007012, SYNOV4007215, SYNOV4007360, SYNOV4007430, SYNOV4007521, SYNOV4007553, SYNOV4007711, SYNOV4008245, SYNOV4008336, SYNOV4009129, SYNOV4009139, SYNOV4009298, T1ESE2000116, T1ESE2000609, T1ESE2002665, TBAES2000004, TBAES2000059, TBAES2000116, TBAES2000255, TBAES2000315, TBAES2000932, TBAES2001171, TBAES2001220, TBAES2001229, TBAES2001258, TBAES2001296, TBAES2001492, TBAES2001553, TBAES2001751, TBAES2003435, TBAES2003492, TBAES2003550, TBAES2003702, TBAES2003917, TBAES2004055, TBAES2004105, TBAES2004939, TBAES2005157, TBAES2005361, TBAES2005543, TBAES2006568, TBAES2006881, TBAES2007379, TBAES2007428, TBAES2007481, TBAES2007504, TBAES2007548, TBAES2007697, TBAES2007862, TBAES2007964, TBAES2008133, TCERX2000171, TCERX2000431, TCERX2000613, TCERX2000998, TCERX2002644, TCOLN1000037, TCOLN1000180, TCOLN2000139, TCOLN2000236, TCOLN2000641, TCOLN2001268, TCOLN2002047, TCOLN2002278, TESOP1000035, TESOP1000127, TESOP1000160, TESOP2000083, TESOP2000090, TESOP2000205, TESOP2000312, TESOP2000390, TESOP2000400, TESOP2000510, TESOP2000527, TESOP2000569, TESOP2000739, TESOP2000801, TESOP2001122, TESOP2001166, TESOP2001345, TESOP2001474, TESOP2001796, TESOP2001818, TESOP2001849, TESOP2001865, TESOP2001901, TESOP2001953, TESOP2002005, TESOP2002110, TESOP2002150, TESOP2002451, TESOP2002489, TESOP2002539, TESOP2002545, TESOP2002804, TESOP2002950, TESOP2003273, TESOP2003308, TESOP2003553, TESOP2003753, TESOP2004110, TESOP2004114, TESOP2004173, TESOP2004214, TESOP2005199, TESOP2005285, TESOP2005485, TESOP2005498, TESOP2005579, TESOP2006041, TESOP2006053, TESOP2006060, TESOP2006068, TESOP2006110, TESOP2006398, TESOP2006670, TESOP2006704, TESOP2006746, TESOP2006865, TESOP2006893, TESOP2007041, TESOP2007052, TESOP2007262, TESOP2007636, TESOP2007674, TESOP2007688, TESOP2007725, TESOP2007912, TESOP2007978, TESOP2008127, TESOP2008552, TESOP2008556, TESOP2008563, TESOP2008820, TESOP2009121, TESOP2009201, TESOP2009247, TESOP2009555, TESTI1000018, TESTI1000019, TESTI1000025, TESTI1000029, TESTI1000030, TESTI1000042, TESTI1000045, TESTI1000051, TESTI1000055, TESTI1000064, TESTI1000070, TESTI1000085, TESTI1000088, TESTI1000093, TESTI1000094, TESTI1000096, TESTI1000101, TESTI1000109, TESTI1000125, TESTI1000127, TESTI1000128, TESTI1000131, TESTI1000142, TESTI1000157, TESTI1000163, TESTI1000169, TESTI1000179, TESTI1000183, TESTI1000191, TESTI1000257, TESTI1000266, TESTI1000319, TESTI1000330, TESTI1000348, TESTI1000390, TESTI1000391, TESTI1000459, TESTI1000491, TESTI1000545, TESTI2000006, TESTI2000018, TESTI2000044, TESTI2000100, TESTI2000117, TESTI2000120, TESTI2000147, TESTI2000154, TESTI2000172, TESTI2000177, TESTI2000179, TESTI2000207, TESTI2000208, TESTI2000221, TESTI2000238, TESTI2000253, TESTI2000272, TESTI2000278, TESTI2000349, TESTI2000356, TESTI2000358, TESTI2000372, TESTI2000427, TESTI2000431, TESTI2000435, TESTI2000443, TESTI2000452, TESTI2000462, TESTI2000489, TESTI2000520, TESTI2000571, TESTI2000591, TESTI2000598, TESTI2000600, TESTI2000616, TESTI2000627, TESTI2000644, TESTI2000671, TESTI2000683, TESTI2000689, TESTI2000695, TESTI2000699, TESTI2000707, TESTI2000745, TESTI2000756, TESTI2000762, TESTI2000808, TESTI2000819, TESTI2000830, TESTI2000840, TESTI2000849, TESTI2000850, TESTI2000874, TESTI2000883, TESTI2000909, TESTI2000951, TESTI2000970, TESTI2000981, TESTI2001008, TESTI2001049, TESTI2001082, TESTI2001120, TESTI2001134, TESTI2001141, TESTI2001153, TESTI2001180, TESTI2001208, TESTI2001229, TESTI2001236, TESTI2001237, TESTI2001306, TESTI2001313, TESTI2001330, TESTI2001339, TESTI2001345, TESTI2001352, TESTI2001364, TESTI2001412, TESTI2001420, TESTI2001498, TESTI2001512, TESTI2001518, TESTI2001556, TESTI2001593, TESTI2001613, TESTI2001621, TESTI2001661, TESTI2001665, TESTI2001671, TESTI2001697, TESTI2001725, TESTI2001758, TESTI2001766, TESTI2001792, TESTI2001793, TESTI2001795, TESTI2001812, TESTI2001815, TESTI2001823, TESTI2001826, TESTI2001827, TESTI2001829, TESTI2001852, TESTI2001862, TESTI2001869, TESTI2001879, TESTI2001894, TESTI2001898, TESTI2001915, TESTI2001950, TESTI2001959, TESTI2001968, TESTI2001985, TESTI2001991, TESTI2002002, TESTI2002012, TESTI2002036, TESTI2002048, TESTI2002057, TESTI2002081, TESTI2002090, TESTI2002105, TESTI2002149, TESTI2002216, TESTI2002245, TESTI2002251, TESTI2002256, TESTI2002264, TESTI2002282, TESTI2002293, TESTI2002294, TESTI2002326, TESTI2002351, TESTI2002361, TESTI2002369, TESTI2002406, TESTI2002415, TESTI2002423, TESTI2002453, TESTI2002461, TESTI2002465, TESTI2002467, TESTI2002498, TESTI2002516, TESTI2002544, TESTI2002578, TESTI2002580, TESTI2002618, TESTI2002632, TESTI2002676, TESTI2002690, TESTI2002696, TESTI2002698, TESTI2002700, TESTI2002707, TESTI2002724, TESTI2002729, TESTI2002752, TESTI2002753, TESTI2002789, TESTI2002802, TESTI2002806, TESTI2002840, TESTI2002866, TESTI2002877, TESTI2002910, TESTI2002912, TESTI2002928, TESTI2002937, TESTI2002965, TESTI2002993, TESTI2003020, TESTI2003031, TESTI2003037, TESTI2003044, TESTI2003059, TESTI2003061, TESTI2003071, TESTI2003074, TESTI2003089, TESTI2003104, TESTI2003109, TESTI2003117, TESTI2003127, TESTI2003130, TESTI2003131, TESTI2003139, TESTI2003141, TESTI2003152, TESTI2003181, TESTI2003193, TESTI2003196, TESTI2003228, TESTI2003236, TESTI2003255, TESTI2003258, TESTI2003277, TESTI2003280, TESTI2003299, TESTI2003311, TESTI2003321, TESTI2003325, TESTI2003327, TESTI2003330, TESTI2003347, TESTI2003354, TESTI2003356, TESTI2003372, TESTI2003376, TESTI2003418, TESTI2003419, TESTI2003432, TESTI2003454, TESTI2003475, TESTI2003476, TESTI2003498, TESTI2003512, TESTI2003533, TESTI2003539, TESTI2003541, TESTI2003545, TESTI2003551, TESTI2003574, TESTI2003579, TESTI2003580, TESTI2003589, TESTI2003596, TESTI2003598, TESTI2003615, TESTI2003625, TESTI2003638, TESTI2003649, TESTI2003692, TESTI2003718, TESTI2003727, TESTI2003756, TESTI2003768, TESTI2003781, TESTI2003787, TESTI2003824, TESTI2003827, TESTI2003894, TESTI2003911, TESTI2003914, TESTI2003940, TESTI2003962, TESTI2003998, TESTI2004000, TESTI2004031, TESTI2004073, TESTI2004085, TESTI2004089, TESTI2004111, TESTI2004119, TESTI2004122, TESTI2004153, TESTI2004163, TESTI2004169, TESTI2004207, TESTI2004215, TESTI2004227, TESTI2004229, TESTI2004243, TESTI2004255, TESTI2004287, TESTI2004313, TESTI2004318, TESTI2004322, TESTI2004391, TESTI2004399, TESTI2004423, TESTI2004431, TESTI2004432, TESTI2004452, TESTI2004459, TESTI2004490, TESTI2004539, TESTI2004552, TESTI2004560, TESTI2004574, TESTI2004601, TESTI2004611, TESTI2004649, TESTI2004654, TESTI2004675, TESTI2004687, TESTI2004689, TESTI2004700, TESTI2004706, TESTI2004712, TESTI2004734, TESTI2004783, TESTI2004791, TESTI2004793, TESTI2004860, TESTI2004906, TESTI2004920, TESTI2004929, TESTI2004936, TESTI2004941, TESTI2004971, TESTI2004982, TESTI2004993, TESTI2004994, TESTI2004999, TESTI2005017, TESTI2005025, TESTI2005040, TESTI2005060, TESTI2005072, TESTI2005085, TESTI2005112, TESTI2005120, TESTI2005153, TESTI2005155, TESTI2005173, TESTI2005267, TESTI2005268, TESTI2005280, TESTI2005307, TESTI2005326, TESTI2005363, TESTI2005376, TESTI2005378, TESTI2005380, TESTI2005391, TESTI2005395, TESTI2005396, TESTI2005408, TESTI2005415, TESTI2005470, TESTI2005492, TESTI2005568, TESTI2005584, TESTI2005588, TESTI2005590, TESTI2005603, TESTI2005609, TESTI2005610, TESTI2005630, TESTI2005672, TESTI2005683, TESTI2005690, TESTI2005692, TESTI2005703, TESTI2005720, TESTI2005731, TESTI2005739, TESTI2005742, TESTI2005759, TESTI2005775, TESTI2005827, TESTI2005835, TESTI2005860, TESTI2005892, TESTI2005908, TESTI2005911, TESTI2005933, TESTI2005937, TESTI2005948, TESTI2005979, TESTI2005981, TESTI2005982, TESTI2005984, TESTI2005986, TESTI2005987, TESTI2006007, TESTI2006008, TESTI2006015, TESTI2006016, TESTI2006035, TESTI2006040, TESTI2006041, TESTI2006045, TESTI2006067, TESTI2006083, TESTI2006097, TESTI2006109, TESTI2006111, TESTI2006120, TESTI2006125, TESTI2006179, TESTI2006209, TESTI2006210, TESTI2006212, TESTI2006218, TESTI2006238, TESTI2006255, TESTI2006258, TESTI2006278, TESTI2006333, TESTI2006341, TESTI2006360, TESTI2006383, TESTI2006409, TESTI2006425, TESTI2006437, TESTI2006457, TESTI2006460, TESTI2006465, TESTI2006483, TESTI2006499, TESTI2006523, TESTI2006543, TESTI2006565, TESTI2006572, TESTI2006588, TESTI2006615, TESTI2006617, TESTI2006624, TESTI2006628, TESTI2006633, TESTI2006643, TESTI2006648, TESTI2006659, TESTI2006660, TESTI2006665, TESTI2006667, TESTI2006677, TESTI2006720, TESTI2006735, TESTI2006744, TESTI2006748, TESTI2006774, TESTI2006853, TESTI2006866, TESTI2006877, TESTI2006879, TESTI2006894, TESTI2006940, TESTI2006955, TESTI2006978, TESTI2006979, TESTI2006990, TESTI2007040, TESTI2007074, TESTI2007078, TESTI2007113, TESTI2007152, TESTI2007163, TESTI2007183, TESTI2007220, TESTI2007234, TESTI2007320, TESTI2007346, TESTI2007358, TESTI2007402, TESTI2007405, TESTI2007407, TESTI2007422, TESTI2007452, TESTI2007464, TESTI2007466, TESTI2007480, TESTI2007490, TESTI2007502, TESTI2007524, TESTI2007533, TESTI2007576, TESTI2007613, TESTI2007657, TESTI2007685, TESTI2007692, TESTI2007749, TESTI2007750, TESTI2007808, TESTI2007814, TESTI2007829, TESTI2007864, TESTI2007867, TESTI2007872, TESTI2007906, TESTI2007922, TESTI2007951, TESTI2007972, TESTI2007973, TESTI2008014, TESTI2008020, TESTI2008032, TESTI2008033, TESTI2008046, TESTI2008081, TESTI2008099, TESTI2008139, TESTI2008144, TESTI2008161, TESTI2008189, TESTI2008204, TESTI2008219, TESTI2008233, TESTI2008234, TESTI2008237, TESTI2008278, TESTI2008320, TESTI2008331, TESTI2008343, TESTI2008387, TESTI2008389, TESTI2008394, TESTI2008405, TESTI2008420, TESTI2008425, TESTI2008440, TESTI2008567, TESTI2008595, TESTI2008621, TESTI2008636, TESTI2008657, TESTI2008684, TESTI2008699, TESTI2008715, TESTI2008762, TESTI2008774, TESTI2008786, TESTI2008822, TESTI2008835, TESTI2008840, TESTI2008847, TESTI2008884, TESTI2008901, TESTI2008929, TESTI2008946, TESTI2008960, TESTI2009018, TESTI2009091, TESTI2009097, TESTI2009136, TESTI2009185, TESTI2009190, TESTI2009217, TESTI2009239, TESTI2009325, TESTI2009388, TESTI2009390, TESTI2009400, TESTI2009412, TESTI2009447, TESTI2009462, TESTI2009477, TESTI2009497, TESTI2009502, TESTI2009511, TESTI2009544, TESTI2009545, TESTI2009551, TESTI2009585, TESTI2009588, TESTI2009683, TESTI2009727, TESTI2009739, TESTI2009785, TESTI2009812, TESTI2009835, TESTI2009853, TESTI2009935, TESTI2009977, TESTI2009987, TESTI2010009, TESTI2010154, TESTI2010180, TESTI2010239, TESTI2010280, TESTI2010354, TESTI2010396, TESTI2010400, TESTI2010409, TESTI2010572, TESTI2010587, TESTI2010591, TESTI2010617, TESTI2010682, TESTI2010724, TESTI2010732, TESTI2010734, TESTI2010755, TESTI2010793, TESTI2010806, TESTI2010833, TESTI2010872, TESTI2011009, TESTI2011020, TESTI2011028, TESTI2011033, TESTI2011254, TESTI2011286, TESTI2011294, TESTI2011314, TESTI2011315, TESTI2011394, TESTI2011407, TESTI2011448, TESTI2011480, TESTI2011549, TESTI2011575, TESTI2011605, TESTI2011612, TESTI2011665, TESTI2011680, TESTI2011683, TESTI2011712, TESTI2011750, TESTI2011840, TESTI2011846, TESTI2011915, TESTI2011928, TESTI2011971, TESTI2012019, TESTI2012050, TESTI2012090, TESTI2012095, TESTI2012152, TESTI2012155, TESTI2012171, TESTI2012207, TESTI2012231, TESTI2012244, TESTI2012289, TESTI2012308, TESTI2012356, TESTI2012387, TESTI2012394, TESTI2012444, TESTI2012511, TESTI2012528, TESTI2012544, TESTI2012550, TESTI2012571, TESTI2012592, TESTI2012617, TESTI2012628, TESTI2012812, TESTI2012834, TESTI2012835, TESTI2012861, TESTI2012900, TESTI2012915, TESTI2012922, TESTI2013001, TESTI2013012, TESTI2013053, TESTI2013144, TESTI2013163, TESTI2013169, TESTI2013212, TESTI2013231, TESTI2013257, TESTI2013264, TESTI2013268, TESTI2013295, TESTI2013322, TESTI2013381, TESTI2013382, TESTI2013401, TESTI2013427, TESTI2013468, TESTI2013497, TESTI2013545, TESTI2013546, TESTI2013566, TESTI2013601, TESTI2013604, TESTI2013607, TESTI2013610, TESTI2013691, TESTI2013699, TESTI2013737, TESTI2013767, TESTI2013832, TESTI2013873, TESTI2013889, TESTI2014007, TESTI2014036, TESTI2014097, TESTI2014160, TESTI2014248, TESTI2014254, TESTI2014269, TESTI2014274, TESTI2014318, TESTI2014324, TESTI2014339, TESTI2014362, TESTI2014385, TESTI2014415, TESTI2014439, TESTI2014474, TESTI2014505, TESTI2014577, TESTI2014578, TESTI2014716, TESTI2014780, TESTI2014800, TESTI2014838, TESTI2014843, TESTI2014979, TESTI2014988, TESTI2015042, TESTI2015092, TESTI2015105, TESTI2015180, TESTI2015213, TESTI2015249, TESTI2015327, TESTI2015331, TESTI2015335, TESTI2015350, TESTI2015375, TESTI2015437, TESTI2015590, TESTI2015610, TESTI2015647, TESTI2015675, TESTI2015710, TESTI2015752, TESTI2015830, TESTI2015914, TESTI2015938, TESTI2015947, TESTI2015962, TESTI2015987, TESTI2016033, TESTI2016046, TESTI2016101, TESTI2016162, TESTI2016197, TESTI2016278, TESTI2016298, TESTI2016331, TESTI2016337, TESTI2016410, TESTI2016421, TESTI2016509, TESTI2016568, TESTI2016583, TESTI2016599, TESTI2016629, TESTI2016663, TESTI2016667, TESTI2016688, TESTI2016701, TESTI2016758, TESTI2016848, TESTI2016863, TESTI2016888, TESTI2016896, TESTI2016922, TESTI2016942, TESTI2016950, TESTI2016996, TESTI2017017, TESTI2017028, TESTI2017035, TESTI2017069, TESTI2017089, TESTI2017102, TESTI2017107, TESTI2017113, TESTI2017125, TESTI2017256, TESTI2017305, TESTI2017311, TESTI2017396, TESTI2017507, TESTI2017537, TESTI2017582, TESTI2017584, TESTI2017645, TESTI2017727, TESTI2017740, TESTI2017775, TESTI2017816, TESTI2017832, TESTI2017923, TESTI2017932, TESTI2017951, TESTI2018031, TESTI2018035, TESTI2018060, TESTI2018083, TESTI2018178, TESTI2018221, TESTI2018276, TESTI2018290, TESTI2018335, TESTI2018337, TESTI2018368, TESTI2018421, TESTI2018428, TESTI2018475, TESTI2018482, TESTI2018521, TESTI2018565, TESTI2018581, TESTI2018687, TESTI2018697, TESTI2018838, TESTI2018867, TESTI2018941, TESTI2018957, TESTI2018974, TESTI2018975, TESTI2018997, TESTI2019042, TESTI2019077, TESTI2019228, TESTI2019257, TESTI2019280, TESTI2019282, TESTI2019308, TESTI2019336, TESTI2019352, TESTI2019406, TESTI2019430, TESTI2019455, TESTI2019481, TESTI2019488, TESTI2019501, TESTI2019648, TESTI2019669, TESTI2019697, TESTI2019760, TESTI2019787, TESTI2019794, TESTI2019854, TESTI2019859, TESTI2019860, TESTI2019872, TESTI2019911, TESTI2019917, TESTI2019975, TESTI2019998, TESTI2020012, TESTI2020026, TESTI2020029, TESTI2020071, TESTI2020084, TESTI2020265, TESTI2020283, TESTI2020316, TESTI2020344, TESTI2020379, TESTI2020426, TESTI2020445, TESTI2020510, TESTI2020515, TESTI2020525, TESTI2020579, TESTI2020717, TESTI2020840, TESTI2020871, TESTI2020905, TESTI2020906, TESTI2020946, TESTI2020956, TESTI2020981, TESTI2020999, TESTI2021003, TESTI2021038, TESTI2021057, TESTI2021077, TESTI2021112, TESTI2021114, TESTI2021116, TESTI2021118, TESTI2021122, TESTI2021138, TESTI2021297, TESTI2021315, TESTI2021358, TESTI2021425, TESTI2021447, TESTI2021463, TESTI2021531, TESTI2021599, TESTI2021637, TESTI2021654, TESTI2021667, TESTI2021736, TESTI2021785, TESTI2021819, TESTI2021851, TESTI2021895, TESTI2021911, TESTI2021939, TESTI2021999, TESTI2022010, TESTI2022023, TESTI2022065, TESTI2022086, TESTI2022179, TESTI2022203, TESTI2022246, TESTI2022323, TESTI2022338, TESTI2022400, TESTI2022462, TESTI2022495, TESTI2022623, TESTI2022649, TESTI2022652, TESTI2022738, TESTI2022798, TESTI2022812, TESTI2022814, TESTI2022874, TESTI2022940, TESTI2022952, TESTI2023025, TESTI2023033, TESTI2023053, TESTI2023085, TESTI2023192, TESTI2023194, TESTI2023214, TESTI2023254, TESTI2023386, TESTI2023414, TESTI2023427, TESTI2023436, TESTI2023599, TESTI2023752, TESTI2023800, TESTI2023861, TESTI2023903, TESTI2023942, TESTI2023947, TESTI2023951, TESTI2023968, TESTI2024009, TESTI2024090, TESTI2024125, TESTI2024153, TESTI2024192, TESTI2024267, TESTI2024283, TESTI2024299, TESTI2024419, TESTI2024422, TESTI2024443, TESTI2024446, TESTI2024473, TESTI2024476, TESTI2024498, TESTI2024560, TESTI2024567, TESTI2024586, TESTI2024598, TESTI2024641, TESTI2024648, TESTI2024718, TESTI2024744, TESTI2024864, TESTI2024885, TESTI2024936, TESTI2024978, TESTI2024999, TESTI2025006, TESTI2025013, TESTI2025022, TESTI2025063, TESTI2025117, TESTI2025144, TESTI2025161, TESTI2025174, TESTI2025229, TESTI2025269, TESTI2025365, TESTI2025403, TESTI2025409, TESTI2025448, TESTI2025454, TESTI2025486, TESTI2025546, TESTI2025582, TESTI2025609, TESTI2025656, TESTI2025757, TESTI2025791, TESTI2025846, TESTI2025872, TESTI2025879, TESTI2025911, TESTI2025920, TESTI2025924, TESTI2026014, TESTI2026024, TESTI2026064, TESTI2026077, TESTI2026104, TESTI2026116, TESTI2026134, TESTI2026168, TESTI2026196, TESTI2026215, TESTI2026218, TESTI2026233, TESTI2026291, TESTI2026294, TESTI2026401, TESTI2026403, TESTI2026453, TESTI2026461, TESTI2026491, TESTI2026505, TESTI2026515, TESTI2026525, TESTI2026534, TESTI2026537, TESTI2026589, TESTI2026597, TESTI2026605, TESTI2026647, TESTI2026674, TESTI2026794, TESTI2026824, TESTI2026854, TESTI2026925, TESTI2026936, TESTI2026957, TESTI2027013, TESTI2027019, TESTI2027108, TESTI2027165, TESTI2027171, TESTI2027173, TESTI2027179, TESTI2027185, TESTI2027206, TESTI2027238, TESTI2027239, TESTI2027243, TESTI2027271, TESTI2027296, TESTI2027378, TESTI2027411, TESTI2027450, TESTI2027496, TESTI2027503, TESTI2027562, TESTI2027615, TESTI2027645, TESTI2027730, TESTI2027736, TESTI2027791, TESTI2027820, TESTI2027828, TESTI2027840, TESTI2027909, TESTI2028098, TESTI2028151, TESTI2028242, TESTI2028253, TESTI2028254, TESTI2028269, TESTI2028290, TESTI2028384, TESTI2028426, TESTI2028488, TESTI2028523, TESTI2028583, TESTI2028613, TESTI2028659, TESTI2028662, TESTI2028670, TESTI2028705, TESTI2028776, TESTI2028811, TESTI2028891, TESTI2028985, TESTI2028997, TESTI2029131, TESTI2029162, TESTI2029196, TESTI2029201, TESTI2029227, TESTI2029244, TESTI2029249, TESTI2029252, TESTI2029259, TESTI2029264, TESTI2029470, TESTI2029672, TESTI2029785, TESTI2029880, TESTI2030136, TESTI2030322, TESTI2030336, TESTI2030342, TESTI2030519, TESTI2030554, TESTI2030556, TESTI2030728, TESTI2030754, TESTI2030770, TESTI2030860, TESTI2030901, TESTI2030917, TESTI2030930, TESTI2031006, TESTI2031007, TESTI2031060, TESTI2031129, TESTI2031356, TESTI2031418, TESTI2031504, TESTI2031529, TESTI2031687, TESTI2031760, TESTI2031809, TESTI2031919, TESTI2031935, TESTI2031986, TESTI2032044, TESTI2032067, TESTI2032079, TESTI2032643, TESTI2032681, TESTI2032761, TESTI2032768, TESTI2032774, TESTI2032828, TESTI2033031, TESTI2033242, TESTI2033254, TESTI2033300, TESTI2033395, TESTI2033441, TESTI2033453, TESTI2033505, TESTI2033520, TESTI2033641, TESTI2033710, TESTI2033905, TESTI2034187, TESTI2034243, TESTI2034249, TESTI2034307, TESTI2034357, TESTI2034401, TESTI2034407, TESTI2034506, TESTI2034520, TESTI2034718, TESTI2034730, TESTI2034749, TESTI2034767, TESTI2034774, TESTI2034777, TESTI2034785, TESTI2034799, TESTI2034847, TESTI2034913, TESTI2034916, TESTI2034931, TESTI2034953, TESTI2034997, TESTI2035003, TESTI2035078, TESTI2035084, TESTI2035107, TESTI2035121, TESTI2035124, TESTI2035183, TESTI2035236, TESTI2035262, TESTI2035309, TESTI2035688, TESTI2035775, TESTI2035793, TESTI2035898, TESTI2035962, TESTI2035981, TESTI2035997, TESTI2036114, TESTI2036129, TESTI2036285, TESTI2036288, TESTI2036513, TESTI2036589, TESTI2036650, TESTI2036684, TESTI2036691, TESTI2036736, TESTI2036822, TESTI2036833, TESTI2036913, TESTI2036922, TESTI2036951, TESTI2036965, TESTI2036969, TESTI2037002, TESTI2037055, TESTI2037081, TESTI2037085, TESTI2037103, TESTI2037106, TESTI2037111, TESTI2037209, TESTI2037255, TESTI2037359, TESTI2037375, TESTI2037382, TESTI2037534, TESTI2037569, TESTI2037572, TESTI2037643, TESTI2037657, TESTI2037673, TESTI2037723, TESTI2037819, TESTI2037830, TESTI2037845, TESTI2037877, TESTI2037976, TESTI2038048, TESTI2038065, TESTI2038104, TESTI2038275, TESTI2038388, TESTI2038573, TESTI2038596, TESTI2038623, TESTI2038644, TESTI2038733, TESTI2038858, TESTI2038958, TESTI2039025, TESTI2039026, TESTI2039038, TESTI2039041, TESTI2039060, TESTI2039113, TESTI2039121, TESTI2039177, TESTI2039209, TESTI2039225, TESTI2039227, TESTI2039276, TESTI2039342, TESTI2039353, TESTI2039544, TESTI2039613, TESTI2039707, TESTI2039732, TESTI2039738, TESTI2039776, TESTI2039867, TESTI2039908, TESTI2040018, TESTI2040094, TESTI2040102, TESTI2040128, TESTI2040143, TESTI2040297, TESTI2040372, TESTI2040377, TESTI2040424, TESTI2040642, TESTI2040815, TESTI2040897, TESTI2040944, TESTI2040964, TESTI2040983, TESTI2040989, TESTI2041330, TESTI2041362, TESTI2041517, TESTI2041564, TESTI2041664, TESTI2041730, TESTI2041734, TESTI2041778, TESTI2041800, TESTI2041947, TESTI2041956, TESTI2041976, TESTI2042062, TESTI2042149, TESTI2042264, TESTI2042295, TESTI2042302, TESTI2042326, TESTI2042400, TESTI2042450, TESTI2042473, TESTI2042507, TESTI2042508, TESTI2042750, TESTI2042783, TESTI2042806, TESTI2042928, TESTI2042946, TESTI2042958, TESTI2043275, TESTI2043277, TESTI2043282, TESTI2043313, TESTI2043477, TESTI2043585, TESTI2043758, TESTI2043817, TESTI2043857, TESTI2043866, TESTI2043869, TESTI2044064, TESTI2044118, TESTI2044194, TESTI2044306, TESTI2044309, TESTI2044413, TESTI2044418, TESTI2044754, TESTI2044788, TESTI2044796, TESTI2044833, TESTI2044892, TESTI2044920, TESTI2044968, TESTI2045139, TESTI2045171, TESTI2045199, TESTI2045353, TESTI2045509, TESTI2045562, TESTI2045611, TESTI2045819, TESTI2045850, TESTI2045920, TESTI2045964, TESTI2045983, TESTI2046100, TESTI2046188, TESTI2046347, TESTI2046352, TESTI2046358, TESTI2046439, TESTI2046535, TESTI2046536, TESTI2046552, TESTI2046569, TESTI2046686, TESTI2046721, TESTI2046732, TESTI2046786, TESTI2046797, TESTI2046863, TESTI2046872, TESTI2047071, TESTI2047141, TESTI2047147, TESTI2047153, TESTI2047212, TESTI2047342, TESTI2047383, TESTI2047605, TESTI2047792, TESTI2047801, TESTI2047818, TESTI2047824, TESTI2047885, TESTI2047930, TESTI2048105, TESTI2048109, TESTI2048465, TESTI2048603, TESTI2048898, TESTI2049041, TESTI2049062, TESTI2049206, TESTI2049246, TESTI2049277, TESTI2049422, TESTI2049452, TESTI2049469, TESTI2049553, TESTI2049576, TESTI2049857, TESTI2049956, TESTI2050137, TESTI2050681, TESTI2050780, TESTI2050987, TESTI2051148, TESTI2051177, TESTI2051279, TESTI2051488, TESTI2051543, TESTI2051627, TESTI2051742, TESTI2051767, TESTI2051791, TESTI2051806, TESTI2051867, TESTI2051873, TESTI2052110, TESTI2052202, TESTI2052211, TESTI2052256, TESTI2052288, TESTI2052525, TESTI2052670, TESTI2052698, TESTI2052799, TESTI2052822, TESTI2052985, TESTI2053151, TESTI2053242, TESTI2053399, TESTI2053526, TESTI2053561, TESTI2053621, TESTI2053667, TESTI2053723, TESTI3000002, TESTI3000005, TESTI4000068, TESTI4000079, TESTI4000093, TESTI4000134, TESTI4000137, TESTI4000153, TESTI4000155, TESTI4000157, TESTI4000183, TESTI4000214, TESTI4000215, TESTI4000228, TESTI4000250, TESTI4000288, TESTI4000319, TESTI4000349, TESTI4000370, TESTI4000394, TESTI4000434, TESTI4000462, TESTI4000530, TESTI4000534, TESTI4000598, TESTI4000600, TESTI4000621, TESTI4000703, TESTI4000724, TESTI4000957, TESTI4000970, TESTI4001036, TESTI4001037, TESTI4001060, TESTI4001106, TESTI4001148, TESTI4001176, TESTI4001195, TESTI4001201, TESTI4001206, TESTI4001348, TESTI4001441, TESTI4001467, TESTI4001473, TESTI4001517, TESTI4001527, TESTI4001561, TESTI4001569, TESTI4001604, TESTI4001665, TESTI4001679, TESTI4001795, TESTI4001923, TESTI4001925, TESTI4001984, TESTI4002003, TESTI4002072, TESTI4002141, TESTI4002195, TESTI4002290, TESTI4002319, TESTI4002491, TESTI4002520, TESTI4002552, TESTI4002647, TESTI4002703, TESTI4002754, TESTI4002868, TESTI4002878, TESTI4002889, TESTI4002988, TESTI4003179, TESTI4003279, TESTI4003319, TESTI4003404, TESTI4003565, TESTI4003574, TESTI4003579, TESTI4003602, TESTI4003703, TESTI4003733, TESTI4003796, TESTI4003944, TESTI4004003, TESTI4004031, TESTI4004200, TESTI4004210, TESTI4004539, TESTI4004626, TESTI4004653, TESTI4004695, TESTI4004722, TESTI4004887, TESTI4004917, TESTI4005015, TESTI4005039, TESTI4005133, TESTI4005158, TESTI4005317, TESTI4005322, TESTI4005399, TESTI4005470, TESTI4005500, TESTI4005534, TESTI4005543, TESTI4005628, TESTI4005801, TESTI4005805, TESTI4005857, TESTI4005961, TESTI4006053, TESTI4006079, TESTI4006112, TESTI4006137, TESTI4006148, TESTI4006219, TESTI4006234, TESTI4006308, TESTI4006326, TESTI4006393, TESTI4006407, TESTI4006412, TESTI4006420, TESTI4006441, TESTI4006473, TESTI4006539, TESTI4006546, TESTI4006567, TESTI4006704, TESTI4006728, TESTI4006802, TESTI4006819, TESTI4007064, TESTI4007163, TESTI4007176, TESTI4007203, TESTI4007239, TESTI4007369, TESTI4007373, TESTI4007382, TESTI4007404, TESTI4007489, TESTI4007565, TESTI4007671, TESTI4007775, TESTI4007778, TESTI4007799, TESTI4007810, TESTI4007816, TESTI4007965, TESTI4008007, TESTI4008050, TESTI4008058, TESTI4008086, TESTI4008097, TESTI4008176, TESTI4008209, TESTI4008219, TESTI4008250, TESTI4008302, TESTI4008305, TESTI4008401, TESTI4008417, TESTI4008429, TESTI4008573, TESTI4008797, TESTI4008816, TESTI4008840, TESTI4008935, TESTI4008993, TESTI4009022, TESTI4009028, TESTI4009034, TESTI4009123, TESTI4009160, TESTI4009215, TESTI4009283, TESTI4009306, TESTI4009374, TESTI4009406, TESTI4009454, TESTI4009457, TESTI4009501, TESTI4009563, TESTI4009608, TESTI4009638, TESTI4009752, TESTI4009881, TESTI4009886, TESTI4009928, TESTI4010076, TESTI4010082, TESTI4010095, TESTI4010211, TESTI4010377, TESTI4010475, TESTI4010544, TESTI4010713, TESTI4010721, TESTI4010789, TESTI4010817, TESTI4010831, TESTI4010902, TESTI4010928, TESTI4010979, TESTI4011070, TESTI4011072, TESTI4011084, TESTI4011118, TESTI4011246, TESTI4011484, TESTI4011505, TESTI4011532, TESTI4011616, TESTI4011744, TESTI4011745, TESTI4011829, TESTI4011926, TESTI4011956, TESTI4012010, TESTI4012086, TESTI4012258, TESTI4012293, TESTI4012329, TESTI4012382, TESTI4012406, TESTI4012448, TESTI4012451, TESTI4012505, TESTI4012556, TESTI4012623, TESTI4012646, TESTI4012679, TESTI4012911, TESTI4012956, TESTI4012960, TESTI4013365, TESTI4013369, TESTI4013410, TESTI4013602, TESTI4013667, TESTI4013685, TESTI4013735, TESTI4013742, TESTI4013774, TESTI4013817, TESTI4013830, TESTI4013852, TESTI4013894, TESTI4013924, TESTI4013960, TESTI4013962, TESTI4014159, TESTI4014175, TESTI4014265, TESTI4014276, TESTI4014306, TESTI4014392, TESTI4014415, TESTI4014445, TESTI4014553, TESTI4014661, TESTI4014694, TESTI4014801, TESTI4014818, TESTI4014891, TESTI4014908, TESTI4014924, TESTI4014932, TESTI4014977, TESTI4015012, TESTI4015129, TESTI4015145, TESTI4015204, TESTI4015263, TESTI4015293, TESTI4015299, TESTI4015339, TESTI4015398, TESTI4015442, TESTI4015471, TESTI4015477, TESTI4015600, TESTI4015646, TESTI4015681, TESTI4015688, TESTI4015790, TESTI4016110, TESTI4016238, TESTI4016551, TESTI4016812, TESTI4016822, TESTI4016865, TESTI4016882, TESTI4016925, TESTI4017001, TESTI4017116, TESTI4017137, TESTI4017229, TESTI4017254, TESTI4017269, TESTI4017380, TESTI4017382, TESTI4017543, TESTI4017575, TESTI4017647, TESTI4017714, TESTI4017763, TESTI4017848, TESTI4017854, TESTI4017901, TESTI4017961, TESTI4017984, TESTI4018101, TESTI4018152, TESTI4018208, TESTI4018382, TESTI4018436, TESTI4018506, TESTI4018555, TESTI4018751, TESTI4018806, TESTI4018835, TESTI4018859, TESTI4018881, TESTI4018886, TESTI4018938, TESTI4019140, TESTI4019149, TESTI4019299, TESTI4019417, TESTI4019440, TESTI4019566, TESTI4019657, TESTI4019756, TESTI4019843, TESTI4020092, TESTI4020102, TESTI4020342, TESTI4020460, TESTI4020596, TESTI4020806, TESTI4020819, TESTI4020920, TESTI4021129, TESTI4021197, TESTI4021294, TESTI4021377, TESTI4021456, TESTI4021491, TESTI4021569, TESTI4021713, TESTI4021821, TESTI4022158, TESTI4022577, TESTI4022716, TESTI4022873, TESTI4023096, TESTI4023172, TESTI4023546, TESTI4023555, TESTI4023654, TESTI4023722, TESTI4023762, TESTI4023942, TESTI4024096, TESTI4024240, TESTI4024245, TESTI4024294, TESTI4024344, TESTI4024387, TESTI4024420, TESTI4024494, TESTI4024740, TESTI4024874, TESTI4024890, TESTI4024907, TESTI4024930, TESTI4025062, TESTI4025268, TESTI4025401, TESTI4025494, TESTI4025547, TESTI4025731, TESTI4025797, TESTI4025865, TESTI4025908, TESTI4025920, TESTI4026079, TESTI4026080, TESTI4026192, TESTI4026207, TESTI4026295, TESTI4026390, TESTI4026456, TESTI4026510, TESTI4026524, TESTI4026680, TESTI4026700, TESTI4026762, TESTI4026785, TESTI4027139, TESTI4027170, TESTI4027262, TESTI4027516, TESTI4027557, TESTI4027660, TESTI4027821, TESTI4027969, TESTI4028042, TESTI4028059, TESTI4028062, TESTI4028182, TESTI4028429, TESTI4028612, TESTI4028692, TESTI4028809, TESTI4028823, TESTI4028880, TESTI4028904, TESTI4028938, TESTI4028958, TESTI4028983, TESTI4029023, TESTI4029348, TESTI4029370, TESTI4029528, TESTI4029651, TESTI4029671, TESTI4029676, TESTI4029690, TESTI4029731, TESTI4029743, TESTI4030069, TESTI4030159, TESTI4030319, TESTI4030505, TESTI4030603, TESTI4030669, TESTI4030673, TESTI4030864, TESTI4031066, TESTI4031173, TESTI4031335, TESTI4031745, TESTI4031818, TESTI4032090, TESTI4032112, TESTI4032128, TESTI4032270, TESTI4032375, TESTI4032834, TESTI4032856, TESTI4032895, TESTI4032913, TESTI4033146, TESTI4033177, TESTI4033433, TESTI4033690, TESTI4034172, TESTI4034212, TESTI4034432, TESTI4034495, TESTI4034632, TESTI4034633, TESTI4034912, TESTI4034973, TESTI4035063, TESTI4035065, TESTI4035498, TESTI4035508, TESTI4035581, TESTI4035602, TESTI4035637, TESTI4035649, TESTI4035770, TESTI4035872, TESTI4035895, TESTI4035898, TESTI4035989, TESTI4036012, TESTI4036042, TESTI4036048, TESTI4036315, TESTI4036319, TESTI4036449, TESTI4036767, TESTI4036909, TESTI4037066, TESTI4037188, TESTI4037228, TESTI4037244, TESTI4037727, TESTI4037949, TESTI4038047, TESTI4038156, TESTI4038223, TESTI4038258, TESTI4038339, TESTI4038492, TESTI4038721, TESTI4038758, TESTI4038779, TESTI4038818, TESTI4039038, TESTI4039086, TESTI4039451, TESTI4039575, TESTI4039659, TESTI4039744, TESTI4039904, TESTI4040197, TESTI4040363, TESTI4040535, TESTI4040559, TESTI4040598, TESTI4040800, TESTI4040804, TESTI4040939, TESTI4040956, TESTI4041049, TESTI4041053, TESTI4041086, TESTI4041099, TESTI4041143, TESTI4041482, TESTI4041519, TESTI4041624, TESTI4041629, TESTI4041832, TESTI4041844, TESTI4041903, TESTI4041954, TESTI4041984, TESTI4041985, TESTI4041986, TESTI4042098, TESTI4042420, TESTI4042440, TESTI4042444, TESTI4042711, TESTI4042846, TESTI4043067, TESTI4043129, TESTI4043140, TESTI4043166, TESTI4043203, TESTI4043223, TESTI4043371, TESTI4043378, TESTI4043512, TESTI4043551, TESTI4043710, TESTI4043947, TESTI4044035, TESTI4044076, TESTI4044084, TESTI4044123, TESTI4044186, TESTI4044234, TESTI4044291, TESTI4044296, TESTI4044300, TESTI4044682, TESTI4044704, TESTI4044770, TESTI4045168, TESTI4045312, TESTI4045330, TESTI4045470, TESTI4045701, TESTI4045908, TESTI4045955, TESTI4045982, TESTI4046073, TESTI4046090, TESTI4046240, TESTI4046245, TESTI4046253, TESTI4046282, TESTI4046328, TESTI4046450, TESTI4046457, TESTI4046487, TESTI4046502, TESTI4046523, TESTI4046819, TESTI4046873, TESTI4046884, TESTI4046896, TESTI4046903, TESTI4046962, TESTI4047069, TESTI4047119, TESTI4047305, TESTI4047328, TESTI4047437, TESTI4047569, TESTI4047746, TESTI4047808, THYMU1000010, THYMU1000017, THYMU1000025, THYMU1000029, THYMU1000032, THYMU1000033, THYMU1000060, THYMU1000074, THYMU1000083, THYMU1000098, THYMU1000103, THYMU1000105, THYMU1000136, THYMU1000142, THYMU1000144, THYMU1000158, THYMU1000176, THYMU1000179, THYMU1000191, THYMU1000198, THYMU1000217, THYMU1000240, THYMU1000242, THYMU1000291, THYMU1000316, THYMU1000318, THYMU1000331, THYMU1000336, THYMU1000359, THYMU1000366, THYMU1000382, THYMU1000393, THYMU1000394, THYMU1000399, THYMU1000426, THYMU1000440, THYMU1000459, THYMU1000473, THYMU1000491, THYMU1000496, THYMU1000499, THYMU1000527, THYMU1000532, THYMU1000536, THYMU1000554, THYMU1000558, THYMU1000576, THYMU1000600, THYMU1000677, THYMU1000692, THYMU2000022, THYMU2000032, THYMU2000057, THYMU2000120, THYMU2000138, THYMU2000140, THYMU2000155, THYMU2000162, THYMU2000171, THYMU2000176, THYMU2000179, THYMU2000231, THYMU2000236, THYMU2000276, THYMU2000280, THYMU2000300, THYMU2000317, THYMU2000368, THYMU2000369, THYMU2000418, THYMU2000436, THYMU2000440, THYMU2000489, THYMU2000492, THYMU2000519, THYMU2000570, THYMU2000602, THYMU2000660, THYMU2000671, THYMU2000672, THYMU2000702, THYMU2000767, THYMU2000775, THYMU2000800, THYMU2000879, THYMU2000932, THYMU2000950, THYMU2000971, THYMU2000982, THYMU2000990, THYMU2001007, THYMU2001053, THYMU2001071, THYMU2001090, THYMU2001139, THYMU2001195, THYMU2001202, THYMU2001203, THYMU2001256, THYMU2001270, THYMU2001291, THYMU2001314, THYMU2001325, THYMU2001357, THYMU2001381, THYMU2001422, THYMU2001443, THYMU2001515, THYMU2001521, THYMU2001556, THYMU2001622, THYMU2001727, THYMU2001819, THYMU2001825, THYMU2001839, THYMU2001868, THYMU2001898, THYMU2001900, THYMU2001916, THYMU2001926, THYMU2001989, THYMU2002023, THYMU2002037, THYMU2002080, THYMU2002109, THYMU2002147, THYMU2002154, THYMU2002157, THYMU2002162, THYMU2002177, THYMU2002203, THYMU2002229, THYMU2002242, THYMU2002338, THYMU2002356, THYMU2002376, THYMU2002384, THYMU2002450, THYMU2002490, THYMU2002548, THYMU2002695, THYMU2002745, THYMU2002756, THYMU2002789, THYMU2002792, THYMU2002815, THYMU2002841, THYMU2002852, THYMU2002910, THYMU2002950, THYMU2002983, THYMU2003069, THYMU2003107, THYMU2003124, THYMU2003133, THYMU2003166, THYMU2003232, THYMU2003242, THYMU2003249, THYMU2003270, THYMU2003282, THYMU2003287, THYMU2003336, THYMU2003366, THYMU2003397, THYMU2003440, THYMU2003446, THYMU2003470, THYMU2003479, THYMU2003499, THYMU2003632, THYMU2003650, THYMU2003700, THYMU2003760, THYMU2003803, THYMU2003855, THYMU2003907, THYMU2003932, THYMU2004003, THYMU2004008, THYMU2004042, THYMU2004108, THYMU2004111, THYMU2004123, THYMU2004139, THYMU2004152, THYMU2004169, THYMU2004284, THYMU2004320, THYMU2004336, THYMU2004356, THYMU2004452, THYMU2004508, THYMU2004512, THYMU2004635, THYMU2004639, THYMU2004668, THYMU2004677, THYMU2004688, THYMU2004693, THYMU2004733, THYMU2004835, THYMU2004843, THYMU2004916, THYMU2004986, THYMU2005001, THYMU2005003, THYMU2005046, THYMU2005134, THYMU2005156, THYMU2005190, THYMU2005225, THYMU2005240, THYMU2005246, THYMU2005270, THYMU2005283, THYMU2005303, THYMU2005321, THYMU2005356, THYMU2005369, THYMU2005439, THYMU2005480, THYMU2005482, THYMU2005507, THYMU2005545, THYMU2005574, THYMU2005576, THYMU2005748, THYMU2005759, THYMU2005807, THYMU2005815, THYMU2005855, THYMU2005881, THYMU2005948, THYMU2005980, THYMU2005997, THYMU2006001, THYMU2006048, THYMU2006098, THYMU2006160, THYMU2006170, THYMU2006252, THYMU2006261, THYMU2006277, THYMU2006303, THYMU2006324, THYMU2006350, THYMU2006357, THYMU2006365, THYMU2006420, THYMU2006468, THYMU2006610, THYMU2006666, THYMU2006712, THYMU2006913, THYMU2006946, THYMU2006965, THYMU2007025, THYMU2007036, THYMU2007060, THYMU2007065, THYMU2007095, THYMU2007112, THYMU2007146, THYMU2007179, THYMU2007258, THYMU2007307, THYMU2007308, THYMU2007339, THYMU2007350, THYMU2007384, THYMU2007415, THYMU2007467, THYMU2007493, THYMU2007521, THYMU2007528, THYMU2007530, THYMU2007532, THYMU2007561, THYMU2007571, THYMU2007635, THYMU2007658, THYMU2007667, THYMU2007694, THYMU2007725, THYMU2007729, THYMU2007802, THYMU2007824, THYMU2007854, THYMU2007886, THYMU2007952, THYMU2007969, THYMU2008035, THYMU2008036, THYMU2008049, THYMU2008072, THYMU2008111, THYMU2008145, THYMU2008149, THYMU2008185, THYMU2008191, THYMU2008207, THYMU2008226, THYMU2008282, THYMU2008321, THYMU2008339, THYMU2008350, THYMU2008351, THYMU2008383, THYMU2008452, THYMU2008643, THYMU2008686, THYMU2008691, THYMU2008714, THYMU2008725, THYMU2008727, THYMU2008781, THYMU2008799, THYMU2008876, THYMU2008910, THYMU2008917, THYMU2008928, THYMU2008990, THYMU2008994, THYMU2009023, THYMU2009046, THYMU2009101, THYMU2009104, THYMU2009134, THYMU2009157, THYMU2009181, THYMU2009186, THYMU2009338, THYMU2009425, THYMU2009516, THYMU2009526, THYMU2009546, THYMU2009592, THYMU2009596, THYMU2009792, THYMU2009835, THYMU2009906, THYMU2009948, THYMU2010030, THYMU2010041, THYMU2010046, THYMU2010059, THYMU2010082, THYMU2010161, THYMU2010192, THYMU2010448, THYMU2010519, THYMU2010637, THYMU2010671, THYMU2010699, THYMU2010705, THYMU2010779, THYMU2010816, THYMU2010831, THYMU2010848, THYMU2011053, THYMU2011063, THYMU2011072, THYMU2011096, THYMU2011118, THYMU2011142, THYMU2011183, THYMU2011257, THYMU2011259, THYMU2011295, THYMU2011390, THYMU2011431, THYMU2011447, THYMU2011482, THYMU2011538, THYMU2011548, THYMU2011551, THYMU2011564, THYMU2011573, THYMU2011585, THYMU2011621, THYMU2011666, THYMU2011736, THYMU2011785, THYMU2011806, THYMU2011852, THYMU2011875, THYMU2011881, THYMU2011937, THYMU2011939, THYMU2012024, THYMU2012073, THYMU2012113, THYMU2012273, THYMU2012401, THYMU2012492, THYMU2012507, THYMU2012565, THYMU2012574, THYMU2012625, THYMU2012631, THYMU2012665, THYMU2012701, THYMU2012807, THYMU2012826, THYMU2012882, THYMU2012891, THYMU2012902, THYMU2012919, THYMU2013023, THYMU2013047, THYMU2013051, THYMU2013089, THYMU2013136, THYMU2013170, THYMU2013364, THYMU2013386, THYMU2013426, THYMU2013578, THYMU2013648, THYMU2013705, THYMU2013757, THYMU2013779, THYMU2013863, THYMU2013950, THYMU2013981, THYMU2014067, THYMU2014068, THYMU2014167, THYMU2014183, THYMU2014204, THYMU2014297, THYMU2014323, THYMU2014327, THYMU2014353, THYMU2014492, THYMU2014500, THYMU2014762, THYMU2014777, THYMU2014801, THYMU2014901, THYMU2014923, THYMU2015019, THYMU2015161, THYMU2015316, THYMU2015321, THYMU2015439, THYMU2015441, THYMU2015479, THYMU2015762, THYMU2015775, THYMU2015825, THYMU2015918, THYMU2015943, THYMU2015984, THYMU2016113, THYMU2016164, THYMU2016204, THYMU2016219, THYMU2016360, THYMU2016496, THYMU2016523, THYMU2016840, THYMU2016968, THYMU2017008, THYMU2017010, THYMU2017023, THYMU2017085, THYMU2017099, THYMU2017158, THYMU2017162, THYMU2017215, THYMU2017362, THYMU2017366, THYMU2017398, THYMU2017449, THYMU2017479, THYMU2017522, THYMU2017526, THYMU2017601, THYMU2017675, THYMU2017707, THYMU2017831, THYMU2017844, THYMU2017878, THYMU2017948, THYMU2018028, THYMU2018071, THYMU2018189, THYMU2018197, THYMU2018384, THYMU2018455, THYMU2018547, THYMU2018565, THYMU2018639, THYMU2018673, THYMU2018721, THYMU2018772, THYMU2018819, THYMU2018841, THYMU2018997, THYMU2019021, THYMU2019054, THYMU2019197, THYMU2019210, THYMU2019364, THYMU2019436, THYMU2019442, THYMU2019587, THYMU2019599, THYMU2019686, THYMU2019813, THYMU2020198, THYMU2020289, THYMU2020416, THYMU2020491, THYMU2020499, THYMU2020560, THYMU2020667, THYMU2020830, THYMU2020883, THYMU2020959, THYMU2021361, THYMU2021509, THYMU2021597, THYMU2021684, THYMU2021714, THYMU2022213, THYMU2022289, THYMU2022660, THYMU2022854, THYMU2022922, THYMU2023209, THYMU2023264, THYMU2023576, THYMU2023711, THYMU2023900, THYMU2023943, THYMU2023967, THYMU2024071, THYMU2024121, THYMU2024185, THYMU2024207, THYMU2024616, THYMU2024684, THYMU2024748, THYMU2025042, THYMU2025189, THYMU2025319, THYMU2025325, THYMU2025406, THYMU2025557, THYMU2025572, THYMU2025707, THYMU2025849, THYMU2025909, THYMU2025939, THYMU2026182, THYMU2026350, THYMU2026530, THYMU2026531, THYMU2026835, THYMU2026904, THYMU2027053, THYMU2027168, THYMU2027249, THYMU2027282, THYMU2027497, THYMU2027695, THYMU2027734, THYMU2027894, THYMU2027996, THYMU2028041, THYMU2028368, THYMU2028379, THYMU2028394, THYMU2028412, THYMU2028629, THYMU2028632, THYMU2028724, THYMU2028739, THYMU2028942, THYMU2028978, THYMU2029134, THYMU2029578, THYMU2029676, THYMU2029688, THYMU2029788, THYMU2030068, THYMU2030226, THYMU2030264, THYMU2030462, THYMU2030543, THYMU2030637, THYMU2030655, THYMU2030796, THYMU2030912, THYMU2030982, THYMU2031046, THYMU2031139, THYMU2031218, THYMU2031249, THYMU2031258, THYMU2031368, THYMU2031579, THYMU2031890, THYMU2031994, THYMU2032014, THYMU2032035, THYMU2032080, THYMU2032150, THYMU2032155, THYMU2032358, THYMU2032437, THYMU2032601, THYMU2032655, THYMU2032696, THYMU2032715, THYMU2032732, THYMU2032825, THYMU2032976, THYMU2033053, THYMU2033059, THYMU2033070, THYMU2033079, THYMU2033085, THYMU2033104, THYMU2033227, THYMU2033263, THYMU2033401, THYMU2033583, THYMU2033755, THYMU2033787, THYMU2033816, THYMU2034182, THYMU2034279, THYMU2034314, THYMU2034338, THYMU2034374, THYMU2034647, THYMU2034917, THYMU2035064, THYMU2035078, THYMU2035101, THYMU2035319, THYMU2035321, THYMU2035388, THYMU2035400, THYMU2035554, THYMU2035710, THYMU2035735, THYMU2036058, THYMU2036105, THYMU2036207, THYMU2036215, THYMU2036252, THYMU2036265, THYMU2036366, THYMU2036459, THYMU2036461, THYMU2036604, THYMU2036653, THYMU2037081, THYMU2037208, THYMU2037226, THYMU2037233, THYMU2037234, THYMU2037348, THYMU2037406, THYMU2037965, THYMU2038058, THYMU2038189, THYMU2038199, THYMU2038220, THYMU2038301, THYMU2038369, THYMU2038389, THYMU2038615, THYMU2038636, THYMU2038739, THYMU2038772, THYMU2038797, THYMU2038906, THYMU2039305, THYMU2039315, THYMU2039334, THYMU2039350, THYMU2039411, THYMU2039634, THYMU2039719, THYMU2039780, THYMU2039788, THYMU2039989, THYMU2040029, THYMU2040110, THYMU2040114, THYMU2040140, THYMU2040412, THYMU2040427, THYMU2040824, THYMU2040925, THYMU2041007, THYMU2041015, THYMU2041252, THYMU3000028, THYMU3000036, THYMU3000037, THYMU3000082, THYMU3000194, THYMU3000224, THYMU3000269, THYMU3000306, THYMU3000360, THYMU3000390, THYMU3000420, THYMU3000490, THYMU3000504, THYMU3000542, THYMU3000655, THYMU3000776, THYMU3000826, THYMU3000841, THYMU3001077, THYMU3001082, THYMU3001083, THYMU3001133, THYMU3001151, THYMU3001379, THYMU3001472, THYMU3001593, THYMU3001883, THYMU3001939, THYMU3001991, THYMU3002452, THYMU3002578, THYMU3002661, THYMU3003007, THYMU3003092, THYMU3003212, THYMU3003309, THYMU3003350, THYMU3003403, THYMU3003565, THYMU3003763, THYMU3003865, THYMU3003958, THYMU3003965, THYMU3004157, THYMU3004628, THYMU3004632, THYMU3004835, THYMU3004866, THYMU3005050, THYMU3005378, THYMU3005407, THYMU3005415, THYMU3005427, THYMU3005482, THYMU3005491, THYMU3005629, THYMU3005696, THYMU3006118, THYMU3006132, THYMU3006168, THYMU3006172, THYMU3006371, THYMU3006485, THYMU3006640, THYMU3006767, THYMU3006811, THYMU3006963, THYMU3007137, THYMU3007308, THYMU3007368, THYMU3007423, THYMU3007559, THYMU3007845, THYMU3008060, THYMU3008105, THYMU3008136, THYMU3008171, THYMU3008216, THYMU3008436, THYMU3008672, THYMU3008883, THYMU3008935, THYMU3009006, THYMU3009255, THYMU3009391, THYMU3009643, THYMU3009755, THYMU3010247, THYMU3011012, THYMU3011081, THYMU3011244, THYMU3011360, THYMU3011534, THYMU3011543, THYMU3011556, THYMU3011717, THYMU3011827, THYMU3012402, THYMU3012907, THYMU3012983, THYMU3013114, THYMU3013197, THYMU3013241, THYMU3013470, THYMU3013785, THYMU3013897, THYMU3014038, THYMU3014173, THYMU3014372, THYMU3014555, THYMU3014620, THYMU3014701, THYMU3015042, THYMU3015457, THYMU3015571, THYMU3015592, THYMU3015625, THYMU3015647, THYMU3015759, THYMU3015962, THYMU3016022, THYMU3016518, THYMU3016797, THYMU3016822, THYMU3016850, THYMU3017562, THYMU3017688, THYMU3017689, THYMU3017761, THYMU3018151, THYMU3018896, THYMU3019095, THYMU3019476, THYMU3019605, THYMU3019916, THYMU3020221, THYMU3020595, THYMU3020713, THYMU3020856, THYMU3020869, THYMU3020970, THYMU3021404, THYMU3021755, THYMU3021900, THYMU3022211, THYMU3022434, THYMU3022528, THYMU3022668, THYMU3022982, THYMU3023107, THYMU3023211, THYMU3023216, THYMU3023394, THYMU3023400, THYMU3023797, THYMU3024164, THYMU3024339, THYMU3024602, THYMU3024879, THYMU3025118, THYMU3025313, THYMU3025642, THYMU3025683, THYMU3025772, THYMU3025865, THYMU3026000, THYMU3026350, THYMU3026479, THYMU3026532, THYMU3026783, THYMU3026869, THYMU3027251, THYMU3027540, THYMU3027655, THYMU3027671, THYMU3028075, THYMU3028410, THYMU3028461, THYMU3028702, THYMU3029188, THYMU3029318, THYMU3029421, THYMU3029719, THYMU3029774, THYMU3029832, THYMU3030072, THYMU3030231, THYMU3030706, THYMU3030710, THYMU3030752, THYMU3031146, THYMU3031402, THYMU3031610, THYMU3031612, THYMU3031868, THYMU3031878, THYMU3032032, THYMU3032798, THYMU3032867, THYMU3033402, THYMU3033626, THYMU3033630, THYMU3033649, THYMU3033754, THYMU3033759, THYMU3034078, THYMU3034099, THYMU3034453, THYMU3034616, THYMU3034671, THYMU3034853, THYMU3034867, THYMU3034983, THYMU3036200, THYMU3036310, THYMU3036934, THYMU3036953, THYMU3037052, THYMU3037192, THYMU3037617, THYMU3037772, THYMU3037827, THYMU3037836, THYMU3037856, THYMU3037867, THYMU3037909, THYMU3037980, THYMU3038158, THYMU3038167, THYMU3038214, THYMU3038266, THYMU3038328, THYMU3038347, THYMU3038375, THYMU3038603, THYMU3038687, THYMU3038759, THYMU3038879, THYMU3038970, THYMU3039807, THYMU3039846, THYMU3040068, THYMU3040126, THYMU3040146, THYMU3040168, THYMU3040172, THYMU3040725, THYMU3040746, THYMU3040816, THYMU3040829, THYMU3040830, THYMU3040986, THYMU3041354, THYMU3041386, THYMU3041428, THYMU3041573, THYMU3041603, THYMU3041736, THYMU3041918, THYMU3042075, THYMU3042321, THYMU3042372, THYMU3042758, THYMU3042929, THYMU3043200, THYMU3043327, THYMU3043482, THYMU3043597, THYMU3043688, THYMU3043779, THYMU3043883, THYMU3043993, THYMU3044175, THYMU3044188, THYMU3044441, THYMU3044445, THYMU3045510, THYMU3045673, THYMU3045692, THYMU3045704, THYMU3046140, THYMU3046350, THYMU3046360, THYMU3046856, THYMU3047115, THYMU3047144, THYMU3047156, THYMU3047366, THYMU3047513, THYMU3047542, THYMU3047760, THYMU3047891, TKIDN1000001, TKIDN1000044, TKIDN1000062, TKIDN1000066, TKIDN1000164, TKIDN1000171, TKIDN1000192, TKIDN2000127, TKIDN2000240, TKIDN2000246, TKIDN2000319, TKIDN2000464, TKIDN2000521, TKIDN2000701, TKIDN2001529, TKIDN2001662, TKIDN2002318, TKIDN2002329, TKIDN2002424, TKIDN2002632, TKIDN2002738, TKIDN2003044, TKIDN2003059, TKIDN2003062, TKIDN2003078, TKIDN2003366, TKIDN2003396, TKIDN2003413, TKIDN2003597, TKIDN2003601, TKIDN2004185, TKIDN2004386, TKIDN2004458, TKIDN2004748, TKIDN2005487, TKIDN2005721, TKIDN2005934, TKIDN2005947, TKIDN2005956, TKIDN2006525, TKIDN2006761, TKIDN2006852, TKIDN2007605, TKIDN2007667, TKIDN2007828, TKIDN2008176, TKIDN2008778, TKIDN2009092, TKIDN2009330, TKIDN2009481, TKIDN2009641, TKIDN2009794, TKIDN2009889, TKIDN2010200, TKIDN2010232, TKIDN2010278, TKIDN2010602, TKIDN2010812, TKIDN2010934, TKIDN2011051, TKIDN2011160, TKIDN2011289, TKIDN2011324, TKIDN2012034, TKIDN2012771, TKIDN2012824, TKIDN2013134, TKIDN2013287, TKIDN2014570, TKIDN2014757, TKIDN2014771, TKIDN2014964, TKIDN2015025, TKIDN2015071, TKIDN2015161, TKIDN2015263, TKIDN2015285, TKIDN2015788, TKIDN2016309, TKIDN2016399, TKIDN2016846, TKIDN2018926, TKIDN2019116, TLIVE2000023, TLIVE2000142, TLIVE2000292, TLIVE2000762, TLIVE2000979, TLIVE2001327, TLIVE2001616, TLIVE2001684, TLIVE2001828, TLIVE2001927, TLIVE2002336, TLIVE2002338, TLIVE2002562, TLIVE2002690, TLIVE2002882, TLIVE2003197, TLIVE2003200, TLIVE2003225, TLIVE2003381, TLIVE2003737, TLIVE2003961, TLIVE2003970, TLIVE2004110, TLIVE2004320, TLIVE2004331, TLIVE2004601, TLIVE2005180, TLIVE2005390, TLIVE2005516, TLIVE2005731, TLIVE2005866, TLIVE2006236, TLIVE2006359, TLIVE2006529, TLIVE2006621, TLIVE2006733, TLIVE2007000, TLIVE2007016, TLIVE2007132, TLIVE2007192, TLIVE2007528, TLIVE2007607, TLIVE2007736, TLIVE2007816, TLIVE2007919, TLIVE2008083, TLIVE2008213, TLIVE2008221, TLIVE2008229, TLIVE2008712, TLIVE2008797, TLIVE2009087, TLIVE2009163, TLIVE2009489, TLIVE2009541, TLUNG2000179, TOVAR2000476, TOVAR2000575, TOVAR2000649, TOVAR2000904, TOVAR2001281, TOVAR2001556, TOVAR2001730, TOVAR2002247, TOVAR2002514, TOVAR2002549, TOVAR2002800, TRACH1000011, TRACH1000018, TRACH1000030, TRACH1000038, TRACH1000057, TRACH1000063, TRACH1000074, TRACH1000100, TRACH1000106, TRACH1000125, TRACH1000140, TRACH1000144, TRACH1000181, TRACH1000193, TRACH1000205, TRACH1000212, TRACH1000240, TRACH2000002, TRACH2000015, TRACH2000024, TRACH2000032, TRACH2000045, TRACH2000047, TRACH2000081, TRACH2000083, TRACH2000148, TRACH2000185, TRACH2000196, TRACH2000235, TRACH2000237, TRACH2000243, TRACH2000250, TRACH2000259, TRACH2000272, TRACH2000282, TRACH2000287, TRACH2000289, TRACH2000306, TRACH2000312, TRACH2000336, TRACH2000359, TRACH2000393, TRACH2000411, TRACH2000420, TRACH2000496, TRACH2000497, TRACH2000502, TRACH2000522, TRACH2000540, TRACH2000559, TRACH2000660, TRACH2000665, TRACH2000675, TRACH2000677, TRACH2000702, TRACH2000703, TRACH2000767, TRACH2000775, TRACH2000780, TRACH2000807, TRACH2000873, TRACH2000894, TRACH2000898, TRACH2000920, TRACH2000923, TRACH2000944, TRACH2000959, TRACH2000981, TRACH2000986, TRACH2001037, TRACH2001085, TRACH2001109, TRACH2001121, TRACH2001147, TRACH2001154, TRACH2001188, TRACH2001192, TRACH2001249, TRACH2001275, TRACH2001314, TRACH2001335, TRACH2001339, TRACH2001347, TRACH2001395, TRACH2001400, TRACH2001403, TRACH2001416, TRACH2001443, TRACH2001463, TRACH2001474, TRACH2001478, TRACH2001523, TRACH2001525, TRACH2001532, TRACH2001549, TRACH2001592, TRACH2001596, TRACH2001621, TRACH2001646, TRACH2001651, TRACH2001684, TRACH2001898, TRACH2001933, TRACH2001968, TRACH2001996, TRACH2002043, TRACH2002054, TRACH2002092, TRACH2002100, TRACH2002138, TRACH2002333, TRACH2002664, TRACH2002784, TRACH2002840, TRACH2002847, TRACH2002853, TRACH2002862, TRACH2002954, TRACH2002960, TRACH2002988, TRACH2003070, TRACH2003272, TRACH2003347, TRACH2003484, TRACH2003516, TRACH2003605, TRACH2003736, TRACH2003759, TRACH2003941, TRACH2004039, TRACH2004054, TRACH2004087, TRACH2004109, TRACH2004170, TRACH2004183, TRACH2004251, TRACH2004292, TRACH2004336, TRACH2004399, TRACH2004428, TRACH2004458, TRACH2004499, TRACH2004521, TRACH2004570, TRACH2004845, TRACH2004887, TRACH2004950, TRACH2005004, TRACH2005017, TRACH2005066, TRACH2005159, TRACH2005314, TRACH2005444, TRACH2005541, TRACH2005666, TRACH2005698, TRACH2005710, TRACH2005720, TRACH2005769, TRACH2005796, TRACH2005800, TRACH2006015, TRACH2006049, TRACH2006097, TRACH2006194, TRACH2006327, TRACH2006331, TRACH2006378, TRACH2006387, TRACH2006528, TRACH2006670, TRACH2006762, TRACH2006870, TRACH2006918, TRACH2007324, TRACH2007358, TRACH2007483, TRACH2007542, TRACH2007577, TRACH2007674, TRACH2007676, TRACH2007688, TRACH2007733, TRACH2007754, TRACH2007894, TRACH2007969, TRACH2007988, TRACH2008081, TRACH2008112, TRACH2008113, TRACH2008127, TRACH2008130, TRACH2008278, TRACH2008300, TRACH2008478, TRACH2008540, TRACH2008583, TRACH2008597, TRACH2008716, TRACH2008820, TRACH2008891, TRACH2008921, TRACH2009006, TRACH2009060, TRACH2009107, TRACH2009123, TRACH2009268, TRACH2009291, TRACH2009310, TRACH2009340, TRACH2009348, TRACH2009358, TRACH2009661, TRACH2009730, TRACH2009743, TRACH2009754, TRACH2009862, TRACH2009934, TRACH2010159, TRACH2010218, TRACH2010251, TRACH2010272, TRACH2010317, TRACH2010419, TRACH2010451, TRACH2010505, TRACH2010587, TRACH2010600, TRACH2010634, TRACH2010639, TRACH2010677, TRACH2010698, TRACH2010771, TRACH2010824, TRACH2010883, TRACH2010965, TRACH2010974, TRACH2011057, TRACH2011093, TRACH2011113, TRACH2011290, TRACH2011293, TRACH2011302, TRACH2011500, TRACH2011574, TRACH2011894, TRACH2011956, TRACH2012000, TRACH2012138, TRACH2012242, TRACH2012298, TRACH2012370, TRACH2012376, TRACH2012387, TRACH2012497, TRACH2012536, TRACH2012562, TRACH2012742, TRACH2012811, TRACH2012823, TRACH2012918, TRACH2013081, TRACH2013123, TRACH2013265, TRACH2013369, TRACH2013450, TRACH2013495, TRACH2013552, TRACH2013585, TRACH2013671, TRACH2013726, TRACH2013902, TRACH2013928, TRACH2013982, TRACH2013991, TRACH2014018, TRACH2014045, TRACH2014046, TRACH2014082, TRACH2014268, TRACH2014284, TRACH2014337, TRACH2014356, TRACH2014371, TRACH2014442, TRACH2014483, TRACH2014495, TRACH2014544, TRACH2014573, TRACH2014725, TRACH2014760, TRACH2014815, TRACH2014839, TRACH2014938, TRACH2014950, TRACH2014972, TRACH2014974, TRACH2014997, TRACH2015180, TRACH2015243, TRACH2015316, TRACH2015381, TRACH2015486, TRACH2015654, TRACH2015824, TRACH2015939, TRACH2015987, TRACH2016080, TRACH2016131, TRACH2016286, TRACH2016317, TRACH2016347, TRACH2016380, TRACH2016384, TRACH2016410, TRACH2016481, TRACH2016498, TRACH2016533, TRACH2016551, TRACH2016554, TRACH2016651, TRACH2016690, TRACH2016709, TRACH2016722, TRACH2016835, TRACH2016980, TRACH2017086, TRACH2017368, TRACH2017498, TRACH2017609, TRACH2017949, TRACH2017965, TRACH2017980, TRACH2018034, TRACH2018084, TRACH2018262, TRACH2018273, TRACH2018278, TRACH2018317, TRACH2018345, TRACH2018380, TRACH2018446, TRACH2018449, TRACH2018512, TRACH2018646, TRACH2018663, TRACH2018718, TRACH2018835, TRACH2018882, TRACH2018914, TRACH2018950, TRACH2019024, TRACH2019046, TRACH2019080, TRACH2019151, TRACH2019154, TRACH2019176, TRACH2019248, TRACH2019309, TRACH2019425, TRACH2019473, TRACH2019602, TRACH2019661, TRACH2019672, TRACH2019673, TRACH2019844, TRACH2019879, TRACH2020048, TRACH2020336, TRACH2020525, TRACH2021398, TRACH2021622, TRACH2021635, TRACH2021964, TRACH2022042, TRACH2022113, TRACH2022253, TRACH2022425, TRACH2022553, TRACH2022649, TRACH2022839, TRACH2023246, TRACH2023299, TRACH2023306, TRACH2023416, TRACH2023479, TRACH2023684, TRACH2023860, TRACH2023876, TRACH2024139, TRACH2024187, TRACH2024271, TRACH2024293, TRACH2024408, TRACH2024512, TRACH2024559, TRACH2024647, TRACH2024651, TRACH2024730, TRACH2024735, TRACH2024749, TRACH2024821, TRACH2025057, TRACH2025084, TRACH2025155, TRACH2025224, TRACH2025344, TRACH2025379, TRACH2025507, TRACH2025569, TRACH2025705, TRACH2025749, TRACH2025753, TRACH2025810, TRACH2025853, TRACH2025911, TRACH2025932, TRACH3000014, TRACH3000017, TRACH3000043, TRACH3000134, TRACH3000180, TRACH3000342, TRACH3000420, TRACH3000515, TRACH3000530, TRACH3000548, TRACH3000558, TRACH3000586, TRACH3000692, TRACH3000780, TRACH3000892, TRACH3000926, TRACH3001119, TRACH3001443, TRACH3001550, TRACH3001759, TRACH3002064, TRACH3002107, TRACH3002168, TRACH3002188, TRACH3002192, TRACH3002245, TRACH3002293, TRACH3002533, TRACH3002561, TRACH3002567, TRACH3002605, TRACH3002650, TRACH3002752, TRACH3002866, TRACH3002871, TRACH3002876, TRACH3002890, TRACH3003009, TRACH3003037, TRACH3003357, TRACH3003379, TRACH3003547, TRACH3003586, TRACH3003683, TRACH3003780, TRACH3003805, TRACH3003832, TRACH3003872, TRACH3004068, TRACH3004113, TRACH3004288, TRACH3004303, TRACH3004412, TRACH3004424, TRACH3004456, TRACH3004537, TRACH3004596, TRACH3004651, TRACH3004652, TRACH3004671, TRACH3004721, TRACH3004747, TRACH3004760, TRACH3004783, TRACH3004786, TRACH3004840, TRACH3004931, TRACH3004934, TRACH3005072, TRACH3005085, TRACH3005102, TRACH3005173, TRACH3005191, TRACH3005211, TRACH3005274, TRACH3005294, TRACH3005479, TRACH3005549, TRACH3005699, TRACH3005702, TRACH3005808, TRACH3005852, TRACH3005896, TRACH3006038, TRACH3006149, TRACH3006228, TRACH3006264, TRACH3006336, TRACH3006379, TRACH3006392, TRACH3006395, TRACH3006397, TRACH3006412, TRACH3006470, TRACH3006589, TRACH3006626, TRACH3006699, TRACH3006800, TRACH3006889, TRACH3006985, TRACH3007097, TRACH3007268, TRACH3007274, TRACH3007277, TRACH3007391, TRACH3007541, TRACH3007595, TRACH3007627, TRACH3007689, TRACH3007766, TRACH3007866, TRACH3007995, TRACH3008042, TRACH3008061, TRACH3008093, TRACH3008201, TRACH3008508, TRACH3008535, TRACH3008629, TRACH3008632, TRACH3008688, TRACH3008697, TRACH3008713, TRACH3008887, TRACH3008902, TRACH3008990, TRACH3009001, TRACH3009008, TRACH3009059, TRACH3009061, TRACH3009148, TRACH3009455, TRACH3009701, TRACH3009715, TRACH3009894, TRACH3009956, TRACH3010079, TRACH3010167, TRACH3010331, TRACH3010342, TRACH3010382, TRACH3010757, TRACH3010901, TRACH3011004, TRACH3011082, TRACH3011184, TRACH3011282, TRACH3011313, TRACH3011454, TRACH3011485, TRACH3011503, TRACH3011538, TRACH3011542, TRACH3012106, TRACH3012161, TRACH3012232, TRACH3012261, TRACH3012445, TRACH3012460, TRACH3012659, TRACH3012718, TRACH3012864, TRACH3012891, TRACH3012942, TRACH3013043, TRACH3013072, TRACH3013426, TRACH3013454, TRACH3013558, TRACH3013684, TRACH3013693, TRACH3013700, TRACH3013766, TRACH3013900, TRACH3013926, TRACH3014063, TRACH3014183, TRACH3014215, TRACH3014316, TRACH3014415, TRACH3014580, TRACH3014641, TRACH3014885, TRACH3015136, TRACH3015336, TRACH3015346, TRACH3015354, TRACH3015467, TRACH3015626, TRACH3015951, TRACH3016051, TRACH3016120, TRACH3016264, TRACH3016277, TRACH3016368, TRACH3016455, TRACH3016614, TRACH3016992, TRACH3017171, TRACH3017409, TRACH3017934, TRACH3018108, TRACH3018191, TRACH3018240, TRACH3018261, TRACH3018519, TRACH3018524, TRACH3018606, TRACH3018783, TRACH3018907, TRACH3018933, TRACH3018943, TRACH3019018, TRACH3019058, TRACH3019142, TRACH3019290, TRACH3019347, TRACH3019370, TRACH3019447, TRACH3019598, TRACH3019621, TRACH3019662, TRACH3019807, TRACH3019924, TRACH3019977, TRACH3020137, TRACH3020410, TRACH3020563, TRACH3020605, TRACH3020750, TRACH3020769, TRACH3020928, TRACH3020930, TRACH3021023, TRACH3021066, TRACH3021212, TRACH3021335, TRACH3021373, TRACH3021544, TRACH3021778, TRACH3021834, TRACH3021883, TRACH3022170, TRACH3022198, TRACH3022296, TRACH3022482, TRACH3022732, TRACH3022758, TRACH3022875, TRACH3022910, TRACH3022960, TRACH3023063, TRACH3023203, TRACH3023242, TRACH3023373, TRACH3023516, TRACH3023752, TRACH3023945, TRACH3023960, TRACH3024020, TRACH3024081, TRACH3024342, TRACH3024423, TRACH3024428, TRACH3024512, TRACH3024671, TRACH3024823, TRACH3025302, TRACH3025316, TRACH3025346, TRACH3025520, TRACH3026148, TRACH3026283, TRACH3026299, TRACH3026303, TRACH3026542, TRACH3026650, TRACH3026676, TRACH3026744, TRACH3026949, TRACH3027229, TRACH3027527, TRACH3027681, TRACH3027701, TRACH3027885, TRACH3028031, TRACH3028164, TRACH3028180, TRACH3028195, TRACH3028441, TRACH3028597, TRACH3028678, TRACH3028837, TRACH3028847, TRACH3028855, TRACH3029139, TRACH3029329, TRACH3029451, TRACH3029462, TRACH3029520, TRACH3029592, TRACH3029629, TRACH3029665, TRACH3029670, TRACH3029800, TRACH3030111, TRACH3030130, TRACH3030176, TRACH3030252, TRACH3030725, TRACH3030855, TRACH3030883, TRACH3031316, TRACH3031400, TRACH3031463, TRACH3031479, TRACH3031518, TRACH3031660, TRACH3031678, TRACH3031936, TRACH3032044, TRACH3032065, TRACH3032150, TRACH3032372, TRACH3032480, TRACH3032570, TRACH3032755, TRACH3032827, TRACH3032873, TRACH3033535, TRACH3033680, TRACH3033868, TRACH3034145, TRACH3034414, TRACH3034488, TRACH3034680, TRACH3034731, TRACH3034745, TRACH3034762, TRACH3034903, TRACH3035187, TRACH3035199, TRACH3035235, TRACH3035451, TRACH3035482, TRACH3035526, TRACH3036004, TRACH3036103, TRACH3036193, TRACH3036207, TRACH3036278, TRACH3036309, TRACH3036456, TRACH3036609, TRACH3036638, TRACH3036683, TRACH3036750, TRACH3036792, TRACH3036843, TRACH3036897, TRACH3036942, TRACH3036997, TRACH3037063, TRACH3037067, TRACH3037267, TRACH3037288, TRACH3037505, TRACH3037573, TRACH3037696, TRACH3037897, TRACH3038086, TSTOM1000135, TSTOM1000186, TSTOM2000139, TSTOM2000235, TSTOM2000442, TSTOM2000569, TSTOM2000588, TSTOM2001195, TSTOM2001274, TSTOM2001571, TSTOM2001996, TSTOM2002265, TSTOM2002505, TSTOM2002561, TSTOM2002611, TSTOM2002672, TSTOM2002682, TUTER1000014, TUTER1000122, TUTER1000137, TUTER2000057, TUTER2000283, TUTER2000425, TUTER2000904, TUTER2000916, TUTER2001286, TUTER2001341, TUTER2001387, TUTER2001433, TUTER2001461, TUTER2002028, TUTER2002074, TUTER2002158, TUTER2002228, TUTER2002323, TUTER2002356, TUTER2002729, UMVEN1000122, UMVEN1000143, UMVEN1000156, UMVEN1000186, UMVEN2000046, UMVEN2000069, UMVEN2000121, UMVEN2000133, UMVEN2000354, UTERU1000008, UTERU1000015, UTERU1000024, UTERU1000031, UTERU1000032, UTERU1000057, UTERU1000065, UTERU1000077, UTERU1000093, UTERU1000096, UTERU1000106, UTERU1000109, UTERU1000131, UTERU1000138, UTERU1000148, UTERU1000160, UTERU1000182, UTERU1000183, UTERU1000187, UTERU1000192, UTERU1000249, UTERU1000337, UTERU1000339, UTERU1000384, UTERU2000047, UTERU2000074, UTERU2000099, UTERU2000154, UTERU2000197, UTERU2000218, UTERU2000238, UTERU2000243, UTERU2000260, UTERU2000329, UTERU2000332, UTERU2000338, UTERU2000349, UTERU2000377, UTERU2000393, UTERU2000418, UTERU2000465, UTERU2000485, UTERU2000517, UTERU2000524, UTERU2000537, UTERU2000539, UTERU2000541, UTERU2000542, UTERU2000546, UTERU2000550, UTERU2000569, UTERU2000607, UTERU2000629, UTERU2000649, UTERU2000663, UTERU2000696, UTERU2000794, UTERU2000830, UTERU2000844, UTERU2000922, UTERU2000925, UTERU2001024, UTERU2001110, UTERU2001176, UTERU2001281, UTERU2001389, UTERU2001409, UTERU2001412, UTERU2001504, UTERU2001747, UTERU2001876, UTERU2002001, UTERU2002011, UTERU2002176, UTERU2002198, UTERU2002294, UTERU2002332, UTERU2002410, UTERU2002473, UTERU2002547, UTERU2002662, UTERU2002693, UTERU2002733, UTERU2002736, UTERU2002737, UTERU2002826, UTERU2002841, UTERU2002964, UTERU2002993, UTERU2003035, UTERU2003126, UTERU2003135, UTERU2003321, UTERU2003399, UTERU2003411, UTERU2003456, UTERU2003577, UTERU2003704, UTERU2003926, UTERU2003973, UTERU2004015, UTERU2004039, UTERU2004061, UTERU2004073, UTERU2004163, UTERU2004299, UTERU2004461, UTERU2004564, UTERU2004664, UTERU2004698, UTERU2004807, UTERU2004861, UTERU2004929, UTERU2005004, UTERU2005050, UTERU2005069, UTERU2005074, UTERU2005179, UTERU2005292, UTERU2005346, UTERU2005354, UTERU2005446, UTERU2005449, UTERU2005450, UTERU2005533, UTERU2005601, UTERU2005664, UTERU2005822, UTERU2005903, UTERU2005905, UTERU2006103, UTERU2006115, UTERU2006137, UTERU2006182, UTERU2006400, UTERU2006412, UTERU2006429, UTERU2006486, UTERU2006524, UTERU2006547, UTERU2006568, UTERU2006643, UTERU2006651, UTERU2006705, UTERU2006899, UTERU2007004, UTERU2007075, UTERU2007081, UTERU2007128, UTERU2007253, UTERU2007267, UTERU2007444, UTERU2007499, UTERU2007639, UTERU2007724, UTERU2007924, UTERU2007942, UTERU2008018, UTERU2008019, UTERU2008027, UTERU2008040, UTERU2008077, UTERU2008130, UTERU2008302, UTERU2008347, UTERU2008426, UTERU2008516, UTERU2008561, UTERU2008653, UTERU2008705, UTERU2008707, UTERU2008747, UTERU2008785, UTERU2008845, UTERU2008901, UTERU2008930, UTERU2008939, UTERU2008962, UTERU2009094, UTERU2009120, UTERU2009131, UTERU2009147, UTERU2009206, UTERU2009283, UTERU2009335, UTERU2009414, UTERU2009435, UTERU2009483, UTERU2009510, UTERU2009538, UTERU2009540, UTERU2009776, UTERU2009904, UTERU2009951, UTERU2009972, UTERU2010115, UTERU2010124, UTERU2010164, UTERU2010226, UTERU2010231, UTERU2010304, UTERU2010320, UTERU2010431, UTERU2010525, UTERU2010651, UTERU2010724, UTERU2010747, UTERU2011195, UTERU2011199, UTERU2011220, UTERU2011261, UTERU2011287, UTERU2011410, UTERU2011574, UTERU2011621, UTERU2011657, UTERU2011741, UTERU2011806, UTERU2011811, UTERU2011897, UTERU2011962, UTERU2011968, UTERU2012031, UTERU2012101, UTERU2012114, UTERU2012230, UTERU2012252, UTERU2012286, UTERU2012333, UTERU2012526, UTERU2012581, UTERU2012610, UTERU2012615, UTERU2012688, UTERU2012703, UTERU2012715, UTERU2012741, UTERU2012767, UTERU2012786, UTERU2012856, UTERU2012890, UTERU2012938, UTERU2012976, UTERU2013048, UTERU2013078, UTERU2013231, UTERU2013262, UTERU2013280, UTERU2013322, UTERU2013483, UTERU2013491, UTERU2013502, UTERU2013586, UTERU2013926, UTERU2013976, UTERU2014001, UTERU2014024, UTERU2014167, UTERU2014223, UTERU2014398, UTERU2014464, UTERU2014548, UTERU2014601, UTERU2014631, UTERU2014668, UTERU2014678, UTERU2014728, UTERU2014998, UTERU2015062, UTERU2015087, UTERU2015108, UTERU2015190, UTERU2015198, UTERU2015202, UTERU2015405, UTERU2015640, UTERU2015830, UTERU2015880, UTERU2016147, UTERU2016157, UTERU2016426, UTERU2016464, UTERU2016669, UTERU2016757, UTERU2016761, UTERU2016799, UTERU2016822, UTERU2016896, UTERU2016902, UTERU2016979, UTERU2016981, UTERU2017123, UTERU2017303, UTERU2017421, UTERU2017492, UTERU2017613, UTERU2017623, UTERU2017632, UTERU2017761, UTERU2017810, UTERU2017988, UTERU2018127, UTERU2018180, UTERU2018200, UTERU2018333, UTERU2018364, UTERU2018514, UTERU2018522, UTERU2018523, UTERU2018544, UTERU2018566, UTERU2018609, UTERU2018674, UTERU2018712, UTERU2018784, UTERU2018789, UTERU2018811, UTERU2018867, UTERU2018881, UTERU2018884, UTERU2018955, UTERU2019005, UTERU2019038, UTERU2019163, UTERU2019257, UTERU2019453, UTERU2019491, UTERU2019534, UTERU2019681, UTERU2019706, UTERU2019710, UTERU2019940, UTERU2019959, UTERU2019964, UTERU2020226, UTERU2020242, UTERU2020292, UTERU2020351, UTERU2020491, UTERU2020718, UTERU2021163, UTERU2021380, UTERU2021649, UTERU2021820, UTERU2022020, UTERU2022773, UTERU2022955, UTERU2022981, UTERU2023039, UTERU2023045, UTERU2023262, UTERU2023550, UTERU2023651, UTERU2023687, UTERU2023712, UTERU2023941, UTERU2024002, UTERU2024042, UTERU2024141, UTERU2024481, UTERU2024656, UTERU2024758, UTERU2024820, UTERU2024881, UTERU2025025, UTERU2025041, UTERU2025301, UTERU2025366, UTERU2025415, UTERU2025579, UTERU2025645, UTERU2025891, UTERU2026025, UTERU2026090, UTERU2026142, UTERU2026203, UTERU2026775, UTERU2027023, UTERU2027369, UTERU2027591, UTERU2027616, UTERU2027941, UTERU2028377, UTERU2028734, UTERU2029503, UTERU2029660, UTERU2029742, UTERU2029953, UTERU2030213, UTERU2030270, UTERU2030280, UTERU2031060, UTERU2031084, UTERU2031268, UTERU2031295, UTERU2031521, UTERU2031611, UTERU2031703, UTERU2031834, UTERU2031851, UTERU2032075, UTERU2032220, UTERU2032279, UTERU2032726, UTERU2033172, UTERU2033375, UTERU2033382, UTERU2033420, UTERU2033530, UTERU2033577, UTERU2034053, UTERU2034147, UTERU2034695, UTERU2035114, UTERU2035187, UTERU2035231, UTERU2035306, UTERU2035323, UTERU2035328, UTERU2035331, UTERU2035452, UTERU2035469, UTERU2035503, UTERU2035745, UTERU2035908, UTERU2035926, UTERU2035978, UTERU2036089, UTERU2036347, UTERU2036507, UTERU2036512, UTERU2036530, UTERU2036623, UTERU2036690, UTERU2037224, UTERU2037361, UTERU2037423, UTERU2037577, UTERU2037674, UTERU2037791, UTERU2037843, UTERU2038171, UTERU2038251, UTERU3000226, UTERU3000402, UTERU3000645, UTERU3000665, UTERU3000670, UTERU3000727, UTERU3000738, UTERU3000828, UTERU3000844, UTERU3000899, UTERU3000959, UTERU3001029, UTERU3001053, UTERU3001059, UTERU3001158, UTERU3001240, UTERU3001394, UTERU3001542, UTERU3001558, UTERU3001571, UTERU3001585, UTERU3001632, UTERU3001652, UTERU3001766, UTERU3001988, UTERU3002209, UTERU3002218, UTERU3002383, UTERU3002600, UTERU3002620, UTERU3002667, UTERU3002701, UTERU3002731, UTERU3002768, UTERU3002786, UTERU3002993, UTERU3003116, UTERU3003135, UTERU3003178, UTERU3003465, UTERU3003495, UTERU3003523, UTERU3003660, UTERU3003774, UTERU3003776, UTERU3004384, UTERU3004418, UTERU3004477, UTERU3004523, UTERU3004616, UTERU3004635, UTERU3004709, UTERU3004938, UTERU3004992, UTERU3005049, UTERU3005159, UTERU3005205, UTERU3005230, UTERU3005264, UTERU3005422, UTERU3005460, UTERU3005536, UTERU3005585, UTERU3005907, UTERU3005970, UTERU3006008, UTERU3006228, UTERU3006308, UTERU3006538, UTERU3006640, UTERU3006687, UTERU3006720, UTERU3006798, UTERU3006884, UTERU3007021, UTERU3007104, UTERU3007108, UTERU3007134, UTERU3007419, UTERU3007640, UTERU3007731, UTERU3007913, UTERU3008280, UTERU3008463, UTERU3008660, UTERU3008671, UTERU3008722, UTERU3008917, UTERU3009259, UTERU3009490, UTERU3009517, UTERU3009690, UTERU3009775, UTERU3009871, UTERU3009979, UTERU3009987, UTERU3010029, UTERU3010409, UTERU3010526, UTERU3010604, UTERU3010892, UTERU3010919, UTERU3011063, UTERU3011092, UTERU3011273, UTERU3011398, UTERU3011558, UTERU3011579, UTERU3011795, UTERU3011837, UTERU3012293, UTERU3012414, UTERU3012476, UTERU3012599, UTERU3012999, UTERU3013167, UTERU3013302, UTERU3013781, UTERU3014274, UTERU3014446, UTERU3014611, UTERU3014647, UTERU3014791, UTERU3014906, UTERU3015011, UTERU3015086, UTERU3015299, UTERU3015412, UTERU3015500, UTERU3015647, UTERU3015844, UTERU3016070, UTERU3016273, UTERU3016274, UTERU3016308, UTERU3016789, UTERU3017176, UTERU3017441, UTERU3017626, UTERU3017995, UTERU3018154, UTERU3018172, UTERU3018255, UTERU3018616, UTERU3018711, UTERU3019078

[0756] Of the 17,176 genes that include the cDNAs of the present invention, genes whose expression levels were high enough to detect in each of the D30ST, D60ST, D90ST, DFNES, ERLTF, FCBBF, and FEBRA libraries were analyzed for expression frequency. The analysis results are described below. Each is a relative value, where the expression level over all tissues is taken as 100. The larger this value, the greater the level of expression.

TABLE 30

| Clone Name | D30ST | D60ST | D90ST | DFNES | ERLTF | FCBBF | FEBRA |
|---|---|---|---|---|---|---|---|
| 3NB691000173 | 0 | 0 | 0 | 4.654 | 0 | 0 | 0 |
| 3NB692000281 | 0 | 0 | 2.968 | 1.297 | 0 | 0 | 0 |
| 3NB692000330 | 0 | 0 | 0 | 0 | 0 | 0 | 2.199 |
| 3NB692000374 | 0 | 0 | 0 | 0 | 0 | 4.007 | 0 |
| 3NB692000484 | 0 | 0 | 0 | 0 | 0 | 0 | 25.471 |
| 3NB692000545 | 0 | 0 | 0 | 0 | 0 | 5.212 | 7.033 |
| 3NB692000912 | 0 | 0 | 0 | 2.769 | 0 | 0.868 | 1.171 |
| 3NB692001022 | 0 | 0 | 0 | 0 | 0 | 0 | 3.102 |
| 3NB692001334 | 0 | 0 | 0 | 0 | 0 | 0.992 | 0.669 |
| 3NB692006952 | 0 | 0 | 0 | 0 | 0 | 0 | 14.594 |
| ADIPS2000425 | 0 | 0 | 0 | 0 | 0 | 1.434 | 0 |
| ADRGL1000002 | 0 | 0 | 0 | 0 | 0 | 12.168 | 0 |
| ADRGL1000018 | 0 | 0 | 0 | 0 | 0 | 0 | 12.055 |
| ADRGL1000033 | 0 | 0 | 0 | 0 | 0 | 7.054 | 0 |
| ADRGL1000065 | 0 | 0 | 0 | 0 | 0 | 31.255 | 0 |
| ADRGL2000006 | 0 | 0 | 0 | 0 | 0 | 3.841 | 0 |
| ADRGL2000097 | 0 | 0 | 0 | 39.306 | 0 | 0 | 0 |
| ADRGL2002477 | 0 | 0 | 0 | 0 | 0 | 15.715 | 0 |
| ADRGL2004676 | 0 | 0 | 0 | 0 | 0 | 8.053 | 32.599 |
| ADRGL2009273 | 0 | 0 | 0 | 8.187 | 0 | 7.699 | 0 |
| ASTRO1000165 | 0 | 0 | 0 | 0 | 0 | 4.095 | 0 |
| ASTRO2000014 | 0 | 0 | 5.538 | 0 | 0 | 3.035 | 0 |
| ASTRO2000046 | 0 | 0 | 5.502 | 2.405 | 0 | 0 | 0 |
| ASTRO2000141 | 17.731 | 0 | 20.479 | 0 | 0 | 0 | 0 |
| ASTRO2001029 | 14.640 | 0 | 0 | 0 | 0 | 4.633 | 0 |
| ASTRO2001823 | 0 | 0 | 0 | 0 | 0 | 8.045 | 0 |
| ASTRO2002202 | 0 | 0 | 0 | 0 | 0 | 4.257 | 0 |
| ASTRO2003212 | 0 | 0 | 0 | 0 | 0 | 27.675 | 0 |
| ASTRO2003461 | 0 | 0 | 0 | 0 | 0 | 11.005 | 0 |
| ASTRO2004032 | 0 | 0 | 0 | 0 | 0 | 11.259 | 15.193 |
| ASTRO2004974 | 0 | 0 | 0 | 0 | 0 | 3.590 | 0 |
| ASTRO2005553 | 0 | 0 | 0 | 0 | 71.006 | 0 | 6.460 |
| ASTRO2005687 | 0 | 0 | 0 | 13.138 | 0 | 0 | 0 |
| ASTRO2006920 | 0 | 0 | 0 | 35.357 | 0 | 0 | 0 |
| ASTRO2007047 | 0 | 0 | 0 | 0 | 0 | 3.861 | 0 |
| ASTRO2007948 | 0 | 0 | 0 | 0 | 0 | 4.627 | 6.243 |
| ASTRO2008972 | 0 | 0 | 0 | 0 | 0 | 28.772 | 0 |
| ASTRO2010819 | 0 | 0 | 0 | 0 | 0 | 6.215 | 3.355 |
| ASTRO2011422 | 0 | 0 | 0 | 0 | 0 | 26.805 | 0 |
| ASTRO2012552 | 0 | 0 | 0 | 8.711 | 0 | 2.731 | 0 |
| ASTRO2013585 | 0 | 0 | 6.573 | 0 | 13.358 | 0.901 | 3.646 |
| ASTRO2014863 | 0 | 0 | 0 | 0 | 0 | 12.483 | 0 |
| ASTRO2015529 | 21.631 | 0 | 0 | 0 | 0 | 0 | 9.237 |
| ASTRO2016491 | 0 | 0 | 6.790 | 2.968 | 0 | 1.861 | 2.511 |
| BGGI12000054 | 0 | 0 | 0 | 0 | 0 | 0.435 | 1.761 |
| BGGI12001075 | 0 | 0 | 0 | 0 | 0 | 3.657 | 0 |
| BGGI12001097 | 0 | 0 | 0 | 0 | 0 | 2.076 | 0 |
| BGGI12001682 | 0 | 0 | 0 | 0 | 0 | 0 | 5.149 |
| BLADE2006412 | 0 | 0 | 0 | 0 | 0 | 22.434 | 0 |
| BLADE2008461 | 0 | 0 | 0 | 0 | 67.927 | 0 | 0 |
| BNGH41000098 | 0 | 0 | 0 | 0 | 0 | 4.683 | 0 |
| BNGH42000739 | 0 | 0 | 0 | 0 | 0 | 2.299 | 3.102 |
| BNGH42005968 | 0 | 0 | 0 | 0 | 0 | 4.243 | 0 |
| BNGH42006135 | 0 | 0 | 0 | 0 | 0 | 1.220 | 0 |
| BNGH42007460 | 0 | 0 | 0 | 0 | 0 | 1.862 | 0 |
| BNGH42007709 | 5.375 | 15.453 | 3.104 | 0 | 0 | 0.425 | 0 |
| BNGH42007788 | 0 | 0 | 0 | 0 | 0 | 5.687 | 0 |
| BNGH42008603 | 0 | 0 | 0 | 8.524 | 0 | 0 | 0 |
| BNGH42009025 | 0 | 0 | 0 | 8.216 | 0 | 0 | 3.475 |
| BRACE1000042 | 0 | 0 | 0 | 0 | 0 | 2.812 | 0 |
| BRACE1000087 | 0 | 0 | 0 | 0 | 0 | 54.219 | 0 |
| BRACE1000093 | 0 | 0 | 0 | 0 | 0 | 72.245 | 0 |
| BRACE1000115 | 0 | 0 | 0 | 0 | 0 | 0 | 2.333 |
| BRACE1000159 | 0 | 0 | 0 | 0 | 0 | 0 | 4.603 |
| BRACE1000169 | 0 | 0 | 0 | 0 | 0 | 0 | 50.538 |
| BRACE1000187 | 0 | 0 | 0 | 0 | 0 | 0 | 20.185 |
| BRACE1000239 | 0 | 0 | 0 | 0 | 0 | 36.607 | 0 |
| BRACE2000307 | 0 | 0 | 0 | 0 | 0 | 6.528 | 2.936 |
| BRACE2000750 | 0 | 0 | 0 | 0 | 0 | 38.022 | 0 |
| BRACE2000975 | 0 | 0 | 0 | 0 | 0 | 3.550 | 1.597 |
| BRACE2001117 | 0 | 0 | 0 | 16.209 | 0 | 0 | 0 |
| BRACE2001154 | 0 | 0 | 0 | 0 | 0 | 0 | 26.486 |
| BRACE2001497 | 0 | 0 | 0 | 0 | 0 | 3.443 | 0 |
| BRACE2001892 | 0 | 0 | 0 | 0 | 0 | 7.835 | 9.817 |
| BRACE2002050 | 0 | 0 | 0 | 0 | 0 | 5.357 | 0 |
| BRACE2002091 | 0 | 0 | 0 | 0 | 0 | 3.901 | 0 |
| BRACE2002441 | 0 | 0 | 0 | 6.637 | 0 | 2.081 | 0 |
| BRACE2002478 | 0 | 0 | 0 | 0 | 0 | 26.777 | 0 |
| BRACE2002682 | 0 | 0 | 0 | 0 | 0 | 0 | 47.730 |
| BRACE2002860 | 0 | 0 | 33.949 | 0 | 0 | 4.651 | 6.276 |
| BRACE2002861 | 0 | 0 | 0 | 0 | 0 | 4.794 | 0 |
| BRACE2003037 | 0 | 0 | 0 | 0 | 0 | 0 | 10.765 |
| BRACE2003110 | 0 | 0 | 0 | 0 | 0 | 24.886 | 0 |
| BRACE2003172 | 3.794 | 0 | 0 | 0 | 0 | 9.006 | 4.051 |
| BRACE2003217 | 0 | 0 | 0 | 0 | 0 | 0 | 10.745 |
| BRACE2003254 | 0 | 0 | 0 | 0 | 0 | 1.673 | 0 |
| BRACE2003527 | 0 | 0 | 34.759 | 0 | 0 | 9.524 | 0 |
| BRACE2003785 | 0 | 0 | 0 | 0 | 0 | 3.590 | 2.422 |
| BRACE2003827 | 0 | 0 | 0 | 0 | 0 | 0 | 4.368 |
| BRACE2003892 | 0 | 0 | 0 | 0 | 0 | 0 | 16.322 |
| BRACE2003904 | 0 | 0 | 0 | 0 | 0 | 4.789 | 0 |
| BRACE2003944 | 0 | 0 | 0 | 6.101 | 0 | 0 | 0 |
| BRACE2005087 | 0 | 0 | 0 | 0 | 0 | 3.833 | 2.586 |
| BRACE2005151 | 0 | 0 | 0 | 0 | 57.578 | 3.882 | 0 |
| BRACE2005231 | 0 | 0 | 0 | 0 | 0 | 0 | 7.959 |
| BRACE2005251 | 0 | 0 | 0 | 0 | 0 | 0 | 26.348 |
| BRACE2005681 | 0 | 0 | 0 | 0 | 0 | 3.689 | 0 |
| BRACE2005719 | 0 | 0 | 0 | 0 | 0 | 5.487 | 14.807 |
| BRACE2005937 | 0 | 0 | 0 | 0 | 0 | 22.318 | 0 |
| BRACE2006055 | 0 | 0 | 0 | 0 | 0 | 7.391 | 4.987 |
| BRACE2006072 | 0 | 0 | 0 | 0 | 0 | 36.414 | 0 |
| BRACE2006075 | 0 | 0 | 0 | 0 | 0 | 29.977 | 0 |
| BRACE2006258 | 0 | 0 | 0 | 0 | 0 | 1.513 | 14.294 |
| BRACE2006264 | 0 | 0 | 0 | 0 | 0 | 15.593 | 0 |
| BRACE2006319 | 0 | 0 | 0 | 0 | 0 | 6.477 | 17.479 |
| BRACE2006344 | 0 | 0 | 0 | 0 | 0 | 13.207 | 0 |
| BRACE2006354 | 0 | 0 | 0 | 0 | 0 | 0 | 15.512 |
| BRACE2006514 | 0 | 0 | 11.715 | 0 | 0 | 1.605 | 2.166 |
| BRACE2006743 | 0 | 0 | 0 | 0 | 0 | 0 | 22.168 |
| BRACE2006900 | 6.007 | 0 | 0 | 0 | 0 | 0 | 0 |
| BRACE2006937 | 0 | 0 | 0 | 0 | 0 | 9.890 | 13.345 |
| BRACE2007064 | 0 | 0 | 0 | 0 | 0 | 6.004 | 12.152 |
| BRACE2007089 | 0 | 0 | 0 | 0 | 0 | 1.564 | 0 |
| BRACE2007109 | 0 | 0 | 0 | 0 | 0 | 0 | 4.759 |
| BRACE2007174 | 0 | 0 | 0 | 0 | 0 | 28.862 | 0 |
| BRACE2007518 | 0 | 0 | 0 | 0 | 0 | 0 | 5.658 |
| BRACE2007641 | 0 | 0 | 0 | 0 | 0 | 11.584 | 15.631 |
| BRACE2007671 | 0 | 0 | 0 | 0 | 0 | 2.856 | 0 |
| BRACE2007768 | 0 | 0 | 0 | 0 | 0 | 0 | 71.560 |
| BRACE2007832 | 0 | 0 | 0 | 0 | 0 | 0 | 31.286 |
| BRACE2007882 | 0 | 0 | 0 | 0 | 0 | 24.334 | 16.418 |
| BRACE2007937 | 0 | 0 | 0 | 0 | 0 | 23.461 | 6.331 |
| BRACE2007952 | 0 | 0 | 0 | 0 | 0 | 0 | 12.088 |
| BRACE2008102 | 0 | 0 | 0 | 0 | 0 | 0 | 59.210 |
| BRACE2008358 | 0 | 0 | 0 | 0 | 0 | 4.186 | 11.298 |
| BRACE2008481 | 0 | 0 | 0 | 0 | 0 | 5.157 | 0 |
| BRACE2008553 | 48.556 | 0 | 0 | 0 | 0 | 0 | 0 |
| BRACE2008653 | 0 | 0 | 0 | 0 | 14.452 | 0 | 0 |
| BRACE2008797 | 0 | 0 | 0 | 0 | 0 | 0 | 30.941 |
| BRACE2008941 | 0 | 0 | 0 | 0 | 0 | 18.463 | 0 |
| BRACE2009037 | 3.409 | 19.603 | 3.937 | 0 | 0 | 0.539 | 0.728 |
| BRACE2009044 | 0 | 0 | 0 | 0 | 0 | 18.536 | 0 |
| BRACE2009045 | 0 | 0 | 0 | 0 | 0 | 33.371 | 0 |
| BRACE2009255 | 0 | 0 | 0 | 0 | 0 | 0 | 59.210 |
| BRACE2009517 | 0 | 0 | 0 | 0 | 0 | 0 | 6.761 |
| BRACE2009957 | 0 | 0 | 0 | 0 | 0 | 72.245 | 0 |
| BRACE2010669 | 0 | 0 | 0 | 0 | 0 | 11.777 | 0 |
| BRACE2010828 | 0 | 0 | 0 | 0 | 0 | 72.245 | 0 |
| BRACE2011183 | 0 | 0 | 0 | 0 | 0 | 11.876 | 0 |
| BRACE2012222 | 0 | 0 | 0 | 0 | 0 | 39.421 | 0 |
| BRACE2012291 | 0 | 0 | 0 | 0 | 0 | 72.245 | 0 |
| BRACE2012317 | 0 | 0 | 0 | 0 | 0 | 1.268 | 0 |
| BRACE2012528 | 0 | 0 | 0 | 0 | 0 | 0.876 | 5.911 |
| BRACE2012814 | 0 | 0 | 0 | 0 | 0 | 0 | 7.645 |
| BRACE2013369 | 0 | 0 | 0 | 0 | 0 | 0 | 77.838 |
| BRACE2014257 | 0 | 0 | 0 | 0 | 0 | 22.910 | 0 |
| BRACE2015058 | 0 | 0 | 0 | 0 | 0 | 24.301 | 0 |
| BRACE2017574 | 0 | 0 | 0 | 0 | 0 | 9.465 | 0 |
| BRACE2019147 | 0 | 0 | 0 | 0 | 0 | 7.913 | 5.339 |
| BRACE2019877 | 0 | 0 | 0 | 0 | 0 | 0 | 15.141 |
| BRACE2021014 | 0 | 0 | 0 | 0 | 0 | 10.945 | 0 |
| BRACE2021344 | 0 | 0 | 0 | 0 | 0 | 0 | 77.838 |
| BRACE2022638 | 0 | 0 | 0 | 0 | 0 | 5.508 | 0 |
| BRACE2023718 | 0 | 0 | 0 | 0 | 0 | 29.649 | 0 |
| BRACE2025492 | 0 | 0 | 0 | 0 | 0 | 48.624 | 0 |
| BRACE2025796 | 0 | 0 | 0 | 0 | 0 | 0 | 77.838 |
| BRACE2026054 | 0 | 0 | 0 | 0 | 0 | 42.233 | 0 |
| BRACE2026141 | 0 | 0 | 0 | 0 | 0 | 72.245 | 0 |
| BRACE2030341 | 0 | 0 | 0 | 0 | 0 | 0 | 17.242 |
| BRACE2037295 | 0 | 0 | 0 | 0 | 0 | 0 | 8.177 |
| BRACE2039624 | 11.295 | 0 | 0 | 0 | 0 | 3.575 | 0 |
| BRACE3001113 | 0 | 0 | 0 | 0 | 0 | 48.624 | 0 |
| BRACE3004150 | 0 | 0 | 0 | 45.779 | 0 | 7.175 | 0 |
| BRACE3005938 | 0 | 0 | 0 | 6.490 | 0 | 2.034 | 0 |
| BRACE3010428 | 0 | 0 | 0 | 13.492 | 0 | 6.344 | 2.854 |
| BRACE3010438 | 0 | 0 | 0 | 0 | 0 | 6.616 | 8.928 |
| BRACE3013780 | 55.996 | 0 | 0 | 0 | 0 | 0 | 11.957 |
| BRALZ2008166 | 0 | 0 | 0 | 0 | 0 | 33.831 | 0 |
| BRALZ2009482 | 0 | 0 | 0 | 2.190 | 0 | 0 | 0 |
| BRALZ2011880 | 35.596 | 0 | 0 | 0 | 0 | 0 | 7.601 |
| BRAMY1000173 | 0 | 0 | 0 | 0 | 0 | 19.537 | 0 |
| BRAMY2000181 | 0 | 0 | 0 | 0 | 0 | 64.708 | 0 |
| BRAMY2000354 | 0 | 0 | 0 | 0 | 0 | 5.077 | 3.426 |
| BRAMY2000562 | 0 | 0 | 25.913 | 0 | 0 | 3.550 | 4.791 |
| BRAMY2000893 | 0 | 0 | 41.040 | 0 | 0 | 0 | 0 |
| BRAMY2003929 | 0 | 0 | 0 | 0 | 0 | 78.573 | 0 |
| BRAMY2004363 | 0 | 0 | 0 | 0 | 0 | 3.777 | 0 |
| BRAMY2004521 | 0 | 0 | 0 | 13.969 | 0 | 0 | 0 |
| BRAMY2007078 | 0 | 0 | 0 | 22.410 | 0 | 0 | 0 |
| BRAMY2007244 | 0 | 0 | 0 | 0 | 0 | 0 | 29.217 |
| BRAMY2007567 | 0 | 0 | 0 | 0 | 0 | 0 | 19.344 |
| BRAMY2007613 | 0 | 0 | 0 | 0 | 0 | 4.950 | 3.339 |
| BRAMY2008977 | 0 | 0 | 68.179 | 0 | 0 | 0 | 0 |
| BRAMY2009612 | 0 | 0 | 0 | 0 | 0 | 25.005 | 33.740 |
| BRAMY2009934 | 0 | 0 | 0 | 0 | 0 | 0 | 14.737 |
| BRAMY2015251 | 0 | 0 | 0 | 0 | 0 | 16.971 | 0 |
| BRAMY2019554 | 0 | 0 | 0 | 0 | 0 | 7.371 | 1.989 |
| BRAMY2019989 | 0 | 0 | 0 | 0 | 0 | 0 | 2.404 |
| BRAMY2020106 | 0 | 0 | 0 | 0 | 0 | 20.653 | 0 |
| BRAMY2020427 | 0 | 0 | 0 | 0 | 16.225 | 0 | 0 |
| BRAMY2022493 | 0 | 0 | 0 | 0 | 0 | 0 | 6.613 |
| BRAMY2022786 | 0 | 0 | 0 | 0 | 0 | 2.305 | 6.221 |
| BRAMY2023939 | 0 | 0 | 0 | 0 | 0 | 11.292 | 15.237 |
| BRAMY2024416 | 0 | 0 | 0 | 0 | 0 | 8.359 | 0 |
| BRAMY2024827 | 0 | 0 | 0 | 0 | 0 | 3.686 | 0 |
| BRAMY2026778 | 0 | 0 | 0 | 0 | 0 | 8.951 | 0 |
| BRAMY2028282 | 0 | 0 | 0 | 0 | 0 | 45.089 | 0 |
| BRAMY2028740 | 0 | 0 | 0 | 5.487 | 0 | 1.720 | 6.963 |
| BRAMY2032087 | 0 | 0 | 0 | 0 | 0 | 4.475 | 0 |
| BRAMY2036459 | 0 | 0 | 0 | 0 | 0 | 3.482 | 0 |
| BRAMY2036567 | 0 | 0 | 0 | 0 | 0 | 0 | 18.633 |
| BRAMY2039872 | 0 | 0 | 0 | 0 | 0 | 0 | 49.422 |
| BRAMY2040095 | 0 | 0 | 0 | 0 | 0 | 0 | 2.556 |
| BRAMY3000224 | 0 | 0 | 0 | 0 | 0 | 0 | 71.215 |
| BRAMY3002991 | 45.776 | 0 | 0 | 0 | 0 | 0 | 0 |
| BRAMY3004377 | 0 | 0 | 0 | 0 | 0 | 1.532 | 2.068 |
| BRAMY3005091 | 0 | 0 | 0 | 0 | 0 | 0 | 47.846 |
| BRAMY3008044 | 0 | 0 | 0 | 0 | 0 | 9.942 | 8.944 |
| BRAMY3008335 | 0 | 0 | 0 | 0 | 0 | 0 | 44.280 |
| BRAMY3010492 | 0 | 0 | 0 | 0 | 0 | 0 | 14.357 |
| BRAWH1000037 | 0 | 0 | 0 | 0 | 0 | 0 | 4.546 |
| BRAWH1000040 | 0 | 0 | 0 | 8.110 | 0 | 3.813 | 10.292 |
| BRAWH1000045 | 0 | 0 | 0 | 0 | 0 | 3.699 | 12.477 |
| BRAWH1000093 | 0 | 0 | 6.219 | 2.718 | 0 | 0 | 1.150 |
| BRAWH1000127 | 0 | 0 | 0 | 0 | 0 | 0 | 7.969 |
| BRAWH1000162 | 0 | 0 | 0 | 0 | 0 | 3.372 | 0 |
| BRAWH2000082 | 0 | 0 | 0 | 0 | 0 | 0.709 | 3.825 |
| BRAWH2000169 | 0 | 0 | 0 | 0 | 0 | 19.474 | 0 |
| BRAWH2000274 | 0 | 0 | 0 | 0 | 0 | 3.647 | 24.605 |
| BRAWH2000460 | 0 | 0 | 0 | 0 | 16.724 | 2.255 | 1.521 |
| BRAWH2000522 | 0 | 0 | 0 | 0 | 0 | 3.349 | 4.518 |
| BRAWH2000588 | 0 | 0 | 0 | 0 | 0 | 0 | 12.510 |
| BRAWH2000636 | 0 | 0 | 0 | 0 | 0 | 4.881 | 1.317 |
| BRAWH2000686 | 0 | 0 | 0 | 0 | 0 | 9.033 | 12.189 |
| BRAWH2000839 | 0 | 0 | 0 | 0 | 0 | 3.035 | 2.048 |
| BRAWH2000924 | 0 | 0 | 0 | 0 | 0 | 0.530 | 1.431 |
| BRAWH2001037 | 0 | 0 | 0 | 0 | 0 | 37.045 | 29.993 |
| BRAWH2001092 | 0 | 0 | 0 | 0 | 0 | 1.299 | 3.067 |
| BRAWH2001141 | 0 | 0 | 0 | 0 | 0 | 9.389 | 12.669 |
| BRAWH2001171 | 0 | 0 | 0 | 3.640 | 0 | 3.423 | 4.619 |
| BRAWH2001321 | 0 | 0 | 0 | 0 | 0 | 1.586 | 10.700 |
| BRAWH2001424 | 0 | 0 | 0 | 0 | 0 | 9.406 | 0 |
| BRAWH2001439 | 0 | 0 | 0 | 0 | 0 | 17.108 | 12.825 |
| BRAWH2001484 | 0 | 0 | 0 | 0 | 0 | 19.629 | 0 |
| BRAWH2001662 | 0 | 0 | 0 | 0 | 0 | 8.494 | 34.385 |
| BRAWH2002560 | 0 | 0 | 0 | 0 | 0 | 11.923 | 24.132 |
| BRAWH2002911 | 0 | 0 | 0 | 0 | 0 | 0 | 59.317 |
| BRAWH2003025 | 0 | 0 | 0 | 0 | 0 | 0 | 7.559 |
| BRAWH2003662 | 0 | 0 | 0 | 0 | 0 | 11.450 | 0 |
| BRAWH2003818 | 0 | 0 | 0 | 0 | 0 | 11.183 | 0 |
| BRAWH2004095 | 0 | 0 | 0 | 0 | 0 | 0 | 8.841 |
| BRAWH2005008 | 0 | 0 | 0 | 0 | 0 | 0 | 41.159 |
| BRAWH2005068 | 4.696 | 27.003 | 0 | 0 | 0 | 0 | 0 |
| BRAWH2005074 | 0 | 0 | 0 | 0 | 0 | 64.881 | 0 |
| BRAWH2005661 | 0 | 0 | 0 | 0 | 0 | 0 | 3.985 |
| BRAWH2006450 | 0 | 0 | 0 | 0 | 0 | 0 | 12.517 |
| BRAWH2006493 | 0 | 0 | 0 | 0 | 0 | 0 | 12.680 |
| BRAWH2006996 | 0 | 0 | 0 | 0 | 0 | 6.284 | 0 |
| BRAWH2007605 | 0 | 0 | 0 | 0 | 0 | 0 | 10.227 |
| BRAWH2007664 | 0 | 0 | 0 | 0 | 0 | 18.903 | 0 |
| BRAWH2007800 | 0 | 0 | 0 | 0 | 0 | 4.340 | 0 |
| BRAWH2008255 | 0 | 0 | 0 | 0 | 0 | 7.805 | 0 |
| BRAWH2008706 | 0 | 0 | 0 | 0 | 0 | 0 | 7.168 |
| BRAWH2008903 | 0 | 0 | 0 | 0 | 0 | 7.811 | 10.540 |
| BRAWH2009360 | 0 | 0 | 0 | 50.998 | 0 | 0 | 0 |
| BRAWH2010329 | 0 | 0 | 0 | 0 | 0 | 13.868 | 0 |
| BRAWH2010980 | 0 | 0 | 0 | 0 | 0 | 0 | 17.615 |
| BRAWH2011343 | 0 | 0 | 0 | 0 | 0 | 0 | 17.488 |
| BRAWH2011812 | 0 | 0 | 0 | 0 | 0 | 25.021 | 0 |
| BRAWH2012161 | 0 | 0 | 0 | 0 | 0 | 14.227 | 0 |
| BRAWH2012164 | 0 | 0 | 0 | 0 | 0 | 38.493 | 0 |
| BRAWH2012277 | 0 | 0 | 0 | 0 | 0 | 0 | 71.370 |
| BRAWH2012827 | 0 | 0 | 0 | 0 | 0 | 16.614 | 0 |
| BRAWH2012866 | 0 | 0 | 0 | 0 | 0 | 15.708 | 0 |
| BRAWH2014188 | 0 | 0 | 0 | 0 | 0 | 2.645 | 0 |
| BRAWH2014511 | 0 | 0 | 0 | 0 | 0 | 7.938 | 0 |
| BRAWH2014645 | 0 | 0 | 0 | 0 | 0 | 0 | 2.635 |
| BRAWH2015247 | 0 | 0 | 0 | 0 | 0 | 0 | 26.025 |
| BRAWH2016724 | 0 | 0 | 0 | 0 | 0 | 64.881 | 0 |
| BRAWH2017002 | 0 | 0 | 0 | 0 | 0 | 22.987 | 6.203 |
| BRAWH2017542 | 0 | 0 | 0 | 0 | 0 | 64.881 | 0 |
| BRAWH2017685 | 0 | 0 | 0 | 0 | 0 | 1.875 | 2.530 |
| BRAWH2018526 | 0 | 0 | 0 | 0 | 0 | 0 | 0.767 |
| BRAWH3000088 | 0 | 0 | 0 | 0 | 0 | 19.234 | 0 |
| BRAWH3002853 | 0 | 0 | 0 | 0 | 0 | 1.367 | 1.844 |
| BRAWH3005146 | 0 | 0 | 0 | 0 | 0 | 9.354 | 12.622 |
| BRAWH3010461 | 0 | 0 | 0 | 0 | 0 | 0 | 5.121 |
| BRAWH3016271 | 0 | 0 | 0 | 0 | 0 | 19.929 | 0 |
| BRAWH3017259 | 0 | 0 | 0 | 0 | 0 | 12.928 | 0 |
| BRAWH3018063 | 30.813 | 0 | 0 | 0 | 0 | 0 | 0 |
| BRAWH3021574 | 0 | 0 | 0 | 0 | 0 | 8.683 | 0 |
| BRCAN1000168 | 0 | 0 | 0 | 0 | 0 | 0 | 3.517 |
| BRCAN2000563 | 0 | 0 | 0 | 0 | 0 | 0 | 32.782 |
| BRCAN2003944 | 0 | 0 | 0 | 1.660 | 0 | 0 | 1.404 |
| BRCAN2009432 | 0 | 0 | 0 | 7.760 | 36.081 | 0 | 0 |
| BRCAN2010665 | 0 | 0 | 0 | 0 | 0 | 0 | 8.147 |
| BRCAN2024572 | 0 | 0 | 0 | 0 | 0 | 10.091 | 20.425 |
| BRCAN2026197 | 0 | 0 | 0 | 0 | 0 | 2.884 | 0 |
| BRCAN2028036 | 0 | 0 | 0 | 0 | 0 | 4.460 | 0 |
| BRCOC2000004 | 0 | 0 | 0 | 0 | 0 | 0 | 4.487 |
| BRCOC2010123 | 0 | 0 | 14.772 | 6.456 | 0 | 0 | 0 |
| BRCOC2019910 | 0 | 0 | 0 | 0 | 0 | 2.309 | 3.116 |
| BRHIP1000104 | 0 | 0 | 0 | 0 | 0 | 1.208 | 1.629 |
| BRHIP1000108 | 0 | 0 | 0 | 0 | 0 | 7.962 | 10.743 |
| BRHIP1000174 | 0 | 0 | 0 | 0 | 0 | 9.366 | 25.278 |
| BRHIP1000258 | 0 | 0 | 0 | 0 | 0 | 47.766 | 0 |
| BRHIP2000312 | 0 | 0 | 0 | 0 | 0 | 0 | 16.166 |
| BRHIP2000534 | 0 | 0 | 4.615 | 14.119 | 0 | 0 | 0.853 |
| BRHIP2000553 | 0 | 0 | 0 | 0 | 0 | 4.747 | 0 |
| BRHIP2001099 | 0 | 0 | 0 | 0 | 0 | 12.807 | 0 |
| BRHIP2001805 | 0 | 0 | 0 | 85.243 | 0 | 0 | 0 |
| BRHIP2002339 | 0 | 0 | 0 | 0 | 0 | 28.997 | 0 |
| BRHIP2007305 | 0 | 0 | 0 | 6.671 | 0 | 2.091 | 0 |
| BRHIP2007307 | 0 | 0 | 0 | 0 | 0 | 0 | 70.959 |
| BRHIP2007741 | 0 | 0 | 0 | 0 | 0 | 3.207 | 4.327 |
| BRHIP2010217 | 0 | 0 | 0 | 0 | 0 | 0 | 13.922 |
| BRHIP2011080 | 0 | 0 | 0 | 0 | 0 | 64.423 | 0 |
| BRHIP2012054 | 0 | 0 | 0 | 0 | 0 | 0 | 70.959 |
| BRHIP2013699 | 0 | 0 | 0 | 0 | 0 | 39.421 | 0 |
| BRHIP2015224 | 0 | 0 | 0 | 0 | 0 | 0 | 22.681 |
| BRHIP2015245 | 0 | 0 | 0 | 0 | 0 | 0 | 5.918 |
| BRHIP2015679 | 29.287 | 0 | 0 | 0 | 0 | 0 | 0 |
| BRHIP2017642 | 0 | 0 | 0 | 0 | 0 | 47.719 | 0 |
| BRHIP2018712 | 0 | 0 | 0 | 0 | 0 | 11.224 | 0 |
| BRHIP2019186 | 0 | 0 | 0 | 0 | 0 | 7.292 | 9.840 |
| BRHIP2020573 | 0 | 0 | 0 | 0 | 0 | 33.438 | 0 |
| BRHIP2021495 | 0 | 0 | 0 | 0 | 0 | 11.849 | 15.989 |
| BRHIP2021762 | 0 | 0 | 0 | 0 | 0 | 5.147 | 0 |
| BRHIP2021858 | 0 | 0 | 0 | 0 | 0 | 6.182 | 0 |
| BRHIP2022986 | 0 | 0 | 0 | 0 | 0 | 15.770 | 0 |
| BRHIP2023292 | 0 | 0 | 0 | 0 | 0 | 64.423 | 0 |
| BRHIP2023773 | 0 | 0 | 0 | 0 | 0 | 0 | 70.959 |
| BRHIP2023888 | 0 | 0 | 0 | 4.337 | 0 | 0.680 | 0 |
| BRHIP2024742 | 0 | 0 | 0 | 0 | 0 | 2.304 | 0 |
| BRHIP2026214 | 0 | 0 | 0 | 0 | 0 | 64.423 | 0 |
| BRHIP2027077 | 0 | 0 | 0 | 11.904 | 0 | 3.732 | 0 |
| BRHIP3000017 | 0 | 0 | 0 | 0 | 0 | 8.146 | 0 |
| BRHIP3000111 | 0 | 0 | 0 | 0 | 28.053 | 0 | 2.552 |
| BRHIP3002141 | 0 | 0 | 0 | 0 | 0 | 0 | 39.113 |
| BRHIP3002691 | 0 | 0 | 0 | 0 | 0 | 15.322 | 0 |
| BRHIP3006717 | 0 | 0 | 0 | 0 | 0 | 3.144 | 21.215 |
| BRHIP3007586 | 0 | 0 | 0 | 0 | 0 | 6.375 | 0 |
| BRHIP3009099 | 0 | 0 | 0 | 0 | 0 | 64.423 | 0 |
| BRHIP3012997 | 0 | 0 | 0 | 0 | 0 | 1.712 | 2.310 |
| BRHIP3017855 | 0 | 0 | 0 | 0 | 0 | 0 | 9.545 |
| BRHIP3020046 | 0 | 68.001 | 0 | 0 | 0 | 0 | 0 |
| BRHIP3021019 | 0 | 0 | 0 | 0 | 0 | 14.308 | 19.306 |
| BRSSN1000056 | 70.732 | 0 | 0 | 0 | 0 | 0 | 0 |
| BRSSN2000312 | 0 | 0 | 0 | 0 | 0 | 19.877 | 0 |
| BRSSN2000498 | 0 | 0 | 0 | 0 | 0 | 2.022 | 2.728 |
| BRSSN2000561 | 0 | 0 | 0 | 0 | 0 | 11.584 | 15.631 |
| BRSSN2000566 | 0 | 0 | 0 | 0 | 0 | 0 | 24.251 |
| BRSSN2007338 | 0 | 0 | 0 | 0 | 0 | 0 | 18.425 |
| BRSSN2007464 | 0 | 0 | 55.181 | 0 | 0 | 0 | 0 |
| BRSSN2011653 | 0 | 0 | 0 | 0 | 0 | 18.308 | 0 |
| BRSSN2011843 | 0 | 0 | 0 | 0 | 0 | 22.111 | 0 |
| BRSSN2013696 | 41.698 | 0 | 0 | 0 | 0 | 0 | 0 |
| BRSSN2015238 | 0 | 0 | 0 | 0 | 0 | 0 | 8.534 |
| BRSTN1000083 | 0 | 0 | 0 | 0 | 0 | 4.718 | 1.592 |
| BRSTN2000220 | 0 | 0 | 0 | 0 | 0 | 0 | 8.553 |
| BRSTN2010089 | 0 | 0 | 0 | 0 | 0 | 0 | 16.447 |
| BRSTN2010750 | 0 | 0 | 0 | 0 | 0 | 0 | 25.357 |
| BRSTN2011961 | 0 | 0 | 0 | 0 | 0 | 0 | 0.722 |
| BRSTN2012069 | 0.442 | 0 | 0.128 | 0.223 | 0 | 0.157 | 0.401 |
| BRSTN2012089 | 0 | 0 | 0 | 0 | 0 | 0 | 14.460 |
| BRSTN2012174 | 0 | 0 | 0 | 0 | 0 | 0.374 | 0 |
| BRSTN2013502 | 0 | 0 | 0 | 0 | 0 | 0 | 6.059 |
| BRSTN2016470 | 2.555 | 0 | 0 | 0 | 0 | 0 | 0.546 |
| BRSTN2016892 | 0 | 0 | 0 | 0 | 0 | 0 | 7.439 |
| BRSTN2017104 | 0 | 0 | 0 | 0 | 53.428 | 0 | 0 |
| BRTHA2005864 | 0 | 0 | 0 | 0 | 0 | 5.995 | 0 |
| BRTHA2008502 | 0 | 0 | 0 | 0 | 0 | 0 | 53.934 |
| BRTHA2012714 | 0 | 0 | 0 | 7.387 | 0 | 0 | 0 |
| BRTHA2016577 | 0 | 0 | 0 | 0 | 0 | 0 | 5.882 |
| BRTHA2027229 | 0 | 61.446 | 0 | 0 | 0 | 1.691 | 0 |
| BRTHA2033155 | 0 | 0 | 0 | 0 | 0 | 0 | 10.602 |
| BRTHA3009090 | 0 | 0 | 0 | 0 | 0 | 0 | 29.341 |
| BRTHA3009858 | 0 | 0 | 0 | 0 | 0 | 0 | 57.818 |
| BRTHA3010530 | 0 | 0 | 0 | 0 | 0 | 25.829 | 0 |
| BRTHA3011194 | 0 | 0 | 0 | 0 | 0 | 6.530 | 8.811 |
| BRTHA3022641 | 0 | 0 | 0 | 0 | 0 | 32.682 | 0 |
| CD34C3000252 | 0 | 0 | 0 | 0 | 0 | 0 | 4.092 |
| CTONG1000052 | 0 | 0 | 0 | 0 | 0 | 4.465 | 3.012 |
| CTONG1000087 | 0 | 0 | 0 | 6.163 | 0 | 1.932 | 2.607 |
| CTONG1000094 | 0 | 0 | 0 | 0 | 0 | 10.792 | 16.505 |
| CTONG1000218 | 0 | 0 | 0 | 2.838 | 0 | 0.890 | 4.801 |
| CTONG1000241 | 0 | 0 | 0 | 0 | 0 | 3.919 | 5.288 |
| CTONG2000452 | 0 | 0 | 0 | 0 | 0 | 5.381 | 0 |
| CTONG2000508 | 0 | 0 | 0 | 0 | 0 | 0 | 1.969 |
| CTONG2001139 | 0 | 0 | 0 | 0 | 0 | 49.796 | 0 |
| CTONG2001320 | 0 | 0 | 0 | 31.070 | 0 | 9.740 | 0 |
| CTONG2001748 | 0 | 0 | 0 | 0 | 0 | 11.585 | 5.211 |
| CTONG2001911 | 0 | 0 | 0 | 0 | 0 | 0 | 37.668 |
| CTONG2002073 | 0 | 0 | 0 | 0 | 0 | 0 | 7.303 |
| CTONG2002270 | 0 | 0 | 0 | 3.126 | 0 | 0 | 1.322 |
| CTONG2002453 | 0 | 0 | 0 | 0 | 0 | 14.342 | 0 |
| CTONG2002744 | 0 | 0 | 7.941 | 3.471 | 0 | 2.176 | 1.468 |
| CTONG2002803 | 0 | 0 | 0 | 0 | 0 | 2.720 | 0 |
| CTONG2002820 | 0 | 0 | 0 | 0 | 0 | 20.779 | 0 |
| CTONG2002903 | 0 | 0 | 0 | 18.153 | 0 | 0 | 0 |
| CTONG2003094 | 0 | 0 | 0 | 0 | 0 | 3.385 | 0 |
| CTONG2003293 | 0 | 0 | 0 | 0 | 0 | 0 | 23.043 |
| CTONG2003298 | 0 | 0 | 9.785 | 8.553 | 0 | 4.022 | 0 |
| CTONG2003524 | 0 | 0 | 0 | 0 | 0 | 5.954 | 0 |
| CTONG2005290 | 0 | 0 | 0 | 0 | 0 | 0 | 57.236 |
| CTONG2005553 | 0 | 0 | 0 | 0 | 0 | 2.646 | 0 |
| CTONG2006235 | 0 | 0 | 0 | 0 | 0 | 3.026 | 4.084 |
| CTONG2006412 | 0 | 0 | 0 | 0 | 0 | 11.468 | 0 |
| CTONG2006562 | 0 | 0 | 0 | 0 | 0 | 2.587 | 0 |
| CTONG2006709 | 0 | 0 | 0 | 0 | 0 | 4.778 | 0 |
| CTONG2006798 | 0 | 0 | 0 | 56.866 | 0 | 0 | 0 |
| CTONG2006932 | 0 | 0 | 0 | 6.485 | 0 | 0 | 0 |
| CTONG2007500 | 0 | 0 | 0 | 0 | 0 | 1.389 | 0 |
| CTONG2007586 | 0 | 0 | 0 | 0 | 0 | 11.104 | 0 |
| CTONG2007776 | 0 | 0 | 0 | 0 | 0 | 0 | 10.603 |
| CTONG2008398 | 0 | 0 | 0 | 4.506 | 0 | 0 | 0 |
| CTONG2008506 | 0 | 0 | 0 | 0 | 0 | 1.738 | 9.383 |
| CTONG2008518 | 0 | 0 | 0 | 22.697 | 0 | 7.115 | 0 |
| CTONG2008521 | 0 | 0 | 0 | 0 | 0 | 56.173 | 0 |
| CTONG2008792 | 0 | 0 | 0 | 0 | 0 | 0 | 36.634 |
| CTONG2010566 | 0 | 0 | 0 | 0 | 0 | 50.102 | 0 |
| CTONG2010649 | 0 | 0 | 0 | 0 | 0 | 8.667 | 7.796 |
| CTONG2010821 | 0 | 47.973 | 0 | 0 | 0 | 0 | 3.563 |
| CTONG2011801 | 0 | 0 | 0 | 0 | 0 | 16.411 | 7.381 |
| CTONG2012001 | 0 | 0 | 0 | 0 | 0 | 0 | 35.651 |
| CTONG2012050 | 0 | 0 | 0 | 41.864 | 0 | 0 | 0 |
| CTONG2012401 | 0 | 0 | 0 | 0 | 0 | 15.543 | 0 |
| CTONG2012452 | 0 | 0 | 0 | 0 | 0 | 0.658 | 0 |
| CTONG2012996 | 0 | 0 | 0 | 0 | 0 | 5.394 | 0 |
| CTONG2013348 | 0 | 0 | 0 | 0 | 0 | 10.163 | 0 |
| CTONG2013381 | 0 | 0 | 0 | 0 | 0 | 5.796 | 0 |
| CTONG2013907 | 0 | 0 | 0 | 0 | 0 | 7.966 | 0 |
| CTONG2013985 | 0 | 0 | 0 | 0 | 0 | 10.819 | 0 |
| CTONG2014165 | 0 | 0 | 64.925 | 0 | 0 | 0 | 0 |
| CTONG2014389 | 0 | 0 | 0 | 15.567 | 0 | 4.880 | 0 |
| CTONG2014898 | 0 | 0 | 0 | 0 | 0 | 10.656 | 0 |
| CTONG2015091 | 0 | 0 | 0 | 4.786 | 0 | 3.001 | 2.024 |
| CTONG2015204 | 0 | 0 | 0 | 0 | 0 | 28.022 | 0 |
| CTONG2016056 | 0 | 0 | 0 | 0 | 0 | 3.674 | 0 |
| CTONG2016408 | 0 | 0 | 49.924 | 0 | 0 | 0 | 0 |
| CTONG2016575 | 0 | 0 | 6.704 | 2.930 | 0 | 7.348 | 0 |
| CTONG2016824 | 0 | 0 | 0 | 0 | 0 | 15.727 | 0 |
| CTONG2018343 | 0 | 0 | 0 | 0 | 0 | 56.281 | 0 |
| CTONG2018637 | 0 | 0 | 0 | 0 | 0 | 12.120 | 0 |
| CTONG2018739 | 0 | 0 | 0 | 0 | 0 | 14.319 | 0 |
| CTONG2018843 | 0 | 0 | 0 | 0 | 0 | 0 | 27.676 |
| CTONG2018898 | 0 | 0 | 0 | 0 | 0 | 16.905 | 7.203 |
| CTONG2019063 | 0 | 0 | 0 | 0 | 0 | 39.224 | 0 |
| CTONG2019248 | 0 | 0 | 0 | 0 | 0 | 27.950 | 0 |
| CTONG2020411 | 0 | 0 | 0 | 0 | 0 | 12.719 | 0 |
| CTONG2020484 | 0 | 0 | 0 | 0 | 0 | 1.086 | 0 |
| CTONG2020522 | 0 | 0 | 0 | 0 | 0 | 42.337 | 0 |
| CTONG2020560 | 0 | 0 | 20.228 | 0 | 0 | 2.771 | 0 |
| CTONG2020582 | 0 | 0 | 0 | 0 | 0 | 3.545 | 0 |
| CTONG2022835 | 0 | 0 | 0 | 0 | 0 | 3.169 | 0 |
| CTONG2028124 | 0 | 0 | 0 | 0 | 0 | 1.857 | 2.506 |
| CTONG3001123 | 0 | 0 | 0 | 46.246 | 0 | 0 | 0 |
| CTONG3002835 | 12.826 | 0 | 14.814 | 0 | 0 | 0 | 0 |
| CTONG3008894 | 8.487 | 0 | 0 | 0 | 0 | 2.686 | 0 |
| CTONG3009239 | 0 | 0 | 0 | 0 | 0 | 8.002 | 0 |
| D30ST1000066 | 100 | 0 | 0 | 0 | 0 | 0 | 0 |
| D30ST1000109 | 62.515 | 0 | 24.068 | 0 | 0 | 0 | 0 |
| D30ST1000238 | 100 | 0 | 0 | 0 | 0 | 0 | 0 |
| D30ST1000267 | 50.415 | 0 | 0 | 0 | 0 | 7.978 | 10.765 |
| D30ST1000270 | 30.165 | 0 | 0 | 0 | 0 | 0 | 0 |
| D30ST2000184 | 100 | 0 | 0 | 0 | 0 | 0 | 0 |
| D30ST2000618 | 100 | 0 | 0 | 0 | 0 | 0 | 0 |
| D30ST2000654 | 100 | 0 | 0 | 0 | 0 | 0 | 0 |
| D30ST2000734 | 93.334 | 0 | 0 | 0 | 0 | 0 | 0 |
| D30ST2001328 | 100 | 0 | 0 | 0 | 0 | 0 | 0 |
| D30ST2001669 | 100 | 0 | 0 | 0 | 0 | 0 | 0 |
| D30ST2001670 | 43.561 | 0 | 0 | 0 | 0 | 0 | 0 |
| D30ST2001788 | 34.047 | 0 | 0 | 0 | 0 | 0 | 0 |
| D30ST2002068 | 35.114 | 28.845 | 17.381 | 0 | 0 | 0 | 0 |
| D30ST2002182 | 86.773 | 0 | 0 | 0 | 0 | 0 | 0 |
| D30ST2002223 | 100 | 0 | 0 | 0 | 0 | 0 | 0 |
| D30ST2002262 | 100 | 0 | 0 | 0 | 0 | 0 | 0 |
| D30ST2002272 | 100 | 0 | 0 | 0 | 0 | 0 | 0 |
| D30ST2002417 | 100 | 0 | 0 | 0 | 0 | 0 | 0 |
| D30ST2002436 | 100 | 0 | 0 | 0 | 0 | 0 | 0 |
| D30ST2002648 | 17.515 | 0 | 0 | 0 | 0 | 0 | 0 |
| D30ST2003024 | 94.698 | 0 | 0 | 0 | 0 | 0 | 0 |
| D30ST2003331 | 100 | 0 | 0 | 0 | 0 | 0 | 0 |
| D30ST2003607 | 46.404 | 0 | 53.596 | 0 | 0 | 0 | 0 |
| D30ST2003797 | 100 | 0 | 0 | 0 | 0 | 0 | 0 |
| D30ST2004637 | 100 | 0 | 0 | 0 | 0 | 0 | 0 |
| D30ST3000169 | 28.566 | 0 | 19.796 | 0 | 0 | 0 | 0 |
| D30ST3000195 | 100 | 0 | 0 | 0 | 0 | 0 | 0 |
| D30ST3000258 | 72.574 | 0 | 0 | 0 | 0 | 0 | 0 |
| D30ST3000291 | 93.334 | 0 | 0 | 0 | 0 | 0 | 0 |
| D30ST3000388 | 100 | 0 | 0 | 0 | 0 | 0 | 0 |
| D30ST3000493 | 100 | 0 | 0 | 0 | 0 | 0 | 0 |
| D60ST2000127 | 0 | 100 | 0 | 0 | 0 | 0 | 0 |
| D60ST2000169 | 0 | 100 | 0 | 0 | 0 | 0 | 0 |
| D60ST2000245 | 0 | 100 | 0 | 0 | 0 | 0 | 0 |
| D60ST2000358 | 0 | 95.400 | 0 | 0 | 0 | 0 | 0 |
| D60ST2000464 | 0 | 73.552 | 0 | 0 | 0 | 0 | 0 |
| D60ST2000507 | 0 | 100 | 0 | 0 | 0 | 0 | 0 |
| D90ST2000031 | 0 | 0 | 63.705 | 0 | 0 | 0 | 0 |
| D90ST2000278 | 0 | 0 | 100 | 0 | 0 | 0 | 0 |
| D90ST2000440 | 0 | 0 | 100 | 0 | 0 | 0 | 0 |
| D90ST2000869 | 0 | 0 | 100 | 0 | 0 | 0 | 0 |
| D90ST2001319 | 0 | 0 | 100 | 0 | 0 | 0 | 0 |
| D90ST2001433 | 0 | 0 | 100 | 0 | 0 | 0 | 0 |
| D90ST2002397 | 0 | 0 | 37.837 | 0 | 0 | 0 | 0 |
| D90ST2002608 | 0 | 0 | 30.042 | 0 | 0 | 0 | 0 |
| D90ST2002673 | 0 | 0 | 19.695 | 0 | 0 | 0 | 0 |
| D90ST2003106 | 0 | 0 | 93.096 | 0 | 0 | 0 | 0 |
| D90ST2003108 | 0 | 0 | 65.767 | 0 | 0 | 0 | 0 |
| D90ST2003137 | 0 | 0 | 100 | 0 | 0 | 0 | 0 |
| D90ST2003397 | 0 | 0 | 38.536 | 0 | 0 | 0 | 0 |
| D90ST2003580 | 0 | 0 | 93.047 | 0 | 0 | 0 | 0 |
| D90ST2003594 | 0 | 0 | 100 | 0 | 0 | 0 | 0 |
| D90ST2003762 | 0 | 0 | 29.391 | 0 | 0 | 0 | 0 |
| D90ST2003791 | 0 | 0 | 82.500 | 0 | 0 | 0 | 0 |
| D90ST2003989 | 0 | 0 | 100 | 0 | 0 | 0 | 0 |
| D90ST2004018 | 0 | 0 | 100 | 0 | 0 | 0 | 0 |
| D90ST2004073 | 0 | 0 | 100 | 0 | 0 | 0 | 0 |
| D90ST2004417 | 0 | 0 | 100 | 0 | 0 | 0 | 0 |
| DFNES1000003 | 0 | 0 | 0 | 100 | 0 | 0 | 0 |
| DFNES1000083 | 0 | 0 | 0 | 13.257 | 0 | 0 | 0 |
| DFNES1000107 | 0 | 0 | 0 | 100 | 0 | 0 | 0 |
| DFNES1000150 | 0 | 0 | 0 | 6.581 | 0 | 0 | 0 |
| DFNES1000185 | 0 | 0 | 0 | 7.773 | 0 | 0 | 0 |
| DFNES2000011 | 0 | 0 | 0 | 3.223 | 0 | 0 | 0 |
| DFNES2000143 | 0 | 0 | 0 | 100 | 0 | 0 | 0 |
| DFNES2000146 | 0 | 0 | 0 | 65.605 | 0 | 20.566 | 0 |
| DFNES2000153 | 0 | 0 | 0 | 18.869 | 0 | 0 | 0 |
| DFNES2000212 | 0 | 0 | 0 | 85.399 | 0 | 0 | 0 |
| DFNES2000268 | 0 | 0 | 0 | 6.508 | 0 | 0 | 0 |
| DFNES2000292 | 0 | 0 | 0 | 22.118 | 0 | 0 | 0 |
| DFNES2000335 | 0 | 0 | 0 | 27.920 | 0 | 0 | 0 |
| DFNES2000426 | 0 | 0 | 0 | 74.412 | 0 | 0 | 0 |
| DFNES2000432 | 0 | 0 | 0 | 43.948 | 0 | 0 | 0 |
| DFNES2000443 | 0 | 0 | 0 | 4.000 | 0 | 1.254 | 0 |
| DFNES2000457 | 0 | 0 | 0 | 52.346 | 0 | 0 | 0 |
| DFNES2000471 | 0 | 0 | 0 | 100 | 0 | 0 | 0 |
| DFNES2000526 | 0 | 0 | 0 | 16.286 | 0 | 5.105 | 13.778 |
| DFNES2000913 | 0 | 0 | 0 | 100 | 0 | 0 | 0 |
| DFNES2001091 | 0 | 0 | 0 | 50.577 | 0 | 0 | 0 |
| DFNES2001096 | 0 | 0 | 0 | 45.162 | 0 | 0 | 0 |
| DFNES2001108 | 0 | 0 | 0 | 100 | 0 | 0 | 0 |
| DFNES2001177 | 0 | 0 | 0 | 100 | 0 | 0 | 0 |
| DFNES2001404 | 0 | 0 | 0 | 61.421 | 0 | 0 | 0 |
| DFNES2001564 | 0 | 0 | 0 | 100 | 0 | 0 | 0 |
| DFNES2001565 | 0 | 0 | 0 | 100 | 0 | 0 | 0 |
| DFNES2001647 | 0 | 0 | 0 | 100 | 0 | 0 | 0 |
| DFNES2001800 | 0 | 0 | 0 | 100 | 0 | 0 | 0 |
| DFNES2001829 | 0 | 0 | 0 | 54.385 | 0 | 0 | 0 |
| DFNES2002220 | 0 | 0 | 0 | 100 | 0 | 0 | 0 |
| DFNES2002509 | 0 | 0 | 0 | 29.923 | 0 | 0 | 0 |
| DFNES2002550 | 0 | 0 | 0 | 100 | 0 | 0 | 0 |
| DFNES2002588 | 0 | 0 | 0 | 100 | 0 | 0 | 0 |
| DFNES2002817 | 0 | 0 | 0 | 100 | 0 | 0 | 0 |
| DFNES2002966 | 0 | 0 | 0 | 90.016 | 0 | 0 | 0 |
| DFNES2003081 | 0 | 0 | 0 | 46.409 | 0 | 0 | 0 |
| DFNES2003192 | 0 | 0 | 0 | 17.653 | 0 | 0 | 7.467 |
| DFNES2003255 | 0 | 0 | 0 | 100 | 0 | 0 | 0 |
| DFNES2003742 | 0 | 0 | 0 | 61.421 | 0 | 0 | 0 |
| DFNES2004346 | 0 | 0 | 0 | 18.444 | 0 | 0 | 0 |
| DFNES2004354 | 0 | 0 | 0 | 100 | 0 | 0 | 0 |
| DFNES2004371 | 0 | 0 | 0 | 9.298 | 0 | 0 | 0 |
| DFNES2004383 | 0 | 0 | 0 | 100 | 0 | 0 | 0 |
| DFNES2004608 | 0 | 0 | 0 | 44.433 | 0 | 0 | 0 |
| DFNES2004684 | 0 | 0 | 0 | 100 | 0 | 0 | 0 |
| DFNES2005266 | 0 | 0 | 0 | 100 | 0 | 0 | 0 |
| DFNES2005527 | 0 | 0 | 0 | 100 | 0 | 0 | 0 |
| DFNES2005540 | 0 | 0 | 0 | 17.815 | 0 | 0 | 0 |
| DFNES2005690 | 0 | 0 | 0 | 29.920 | 0 | 0 | 0 |
| DFNES2005766 | 0 | 0 | 0 | 10.804 | 0 | 0 | 0 |
| DFNES2005779 | 0 | 0 | 0 | 100 | 0 | 0 | 0 |
| DFNES2005875 | 0 | 0 | 0 | 100 | 0 | 0 | 0 |
| DFNES2006346 | 0 | 0 | 0 | 41.632 | 0 | 13.051 | 0 |
| DFNES2006944 | 0 | 0 | 0 | 100 | 0 | 0 | 0 |
| DFNES2007113 | 0 | 0 | 0 | 39.383 | 0 | 0 | 0 |
| DFNES2007299 | 0 | 0 | 0 | 19.355 | 0 | 0 | 0 |
| DFNES2007332 | 0 | 0 | 0 | 21.872 | 0 | 0 | 0 |
| DFNES2007634 | 0 | 0 | 0 | 10.476 | 0 | 4.926 | 4.432 |
| DFNES2007641 | 0 | 0 | 0 | 62.977 | 0 | 0 | 0 |
| DFNES2007757 | 0 | 0 | 0 | 22.190 | 0 | 0 | 0 |
| DFNES2008088 | 0 | 0 | 0 | 15.493 | 0 | 0 | 0 |
| DFNES2008160 | 0 | 0 | 0 | 26.402 | 0 | 0 | 0 |
| DFNES2008280 | 0 | 0 | 0 | 100 | 0 | 0 | 0 |
| DFNES2008881 | 0 | 0 | 0 | 100 | 0 | 0 | 0 |
| DFNES2009482 | 0 | 0 | 0 | 8.358 | 38.864 | 0 | 3.536 |
| DFNES2010502 | 0 | 0 | 0 | 100 | 0 | 0 | 0 |
| DFNES2011192 | 0 | 0 | 0 | 100 | 0 | 0 | 0 |
| DFNES2011221 | 0 | 0 | 0 | 84.029 | 0 | 0 | 0 |
| DFNES2011239 | 0 | 0 | 0 | 44.035 | 0 | 13.804 | 0 |
| DFNES2011245 | 0 | 0 | 0 | 85.243 | 0 | 0 | 0 |
| DFNES2011380 | 0 | 0 | 0 | 68.891 | 0 | 0 | 0 |
| DFNES2011499 | 0 | 0 | 0 | 36.562 | 0 | 0 | 0 |
| ERLTF1000021 | 0 | 0 | 0 | 0 | 100 | 0 | 0 |
| ERLTF2000324 | 0 | 0 | 0 | 0 | 100 | 0 | 0 |
| ERLTF2000465 | 0 | 0 | 0 | 0 | 100 | 0 | 0 |
| FCBBF1000023 | 0 | 0 | 0 | 0 | 0 | 12.996 | 0 |
| FCBBF1000024 | 0 | 0 | 0 | 12.939 | 0 | 8.112 | 0 |
| FCBBF1000025 | 0 | 0 | 0 | 0 | 0 | 5.912 | 0 |
| FCBBF1000027 | 0 | 0 | 0 | 6.476 | 10.037 | 4.060 | 0.913 |
| FCBBF1000038 | 0 | 0 | 0 | 0 | 0 | 20.755 | 28.007 |
| FCBBF1000053 | 0 | 0 | 0 | 0 | 0 | 14.999 | 0 |
| FCBBF1000061 | 0 | 0 | 0 | 0 | 0 | 13.035 | 0 |
| FCBBF1000063 | 0 | 0 | 0 | 0 | 0 | 11.049 | 0 |
| FCBBF1000069 | 0 | 0 | 0 | 0 | 0 | 100 | 0 |
| FCBBF1000077 | 0 | 0 | 0 | 0 | 0 | 19.451 | 22.208 |
| FCBBF1000115 | 0 | 0 | 0 | 0 | 0 | 37.553 | 0 |
| FCBBF1000117 | 0 | 0 | 0 | 0 | 0 | 100 | 0 |
| FCBBF1000118 | 0 | 0 | 0 | 0 | 0 | 28.015 | 0 |
| FCBBF1000121 | 0 | 0 | 0 | 0 | 0 | 18.354 | 0 |
| FCBBF1000125 | 0 | 0 | 0 | 0 | 0 | 57.554 | 0 |
| FCBBF1000131 | 0 | 0 | 0 | 0 | 0 | 100 | 0 |
| FCBBF1000139 | 0 | 0 | 0 | 0 | 0 | 16.148 | 0 |
| FCBBF1000155 | 0 | 0 | 0 | 0 | 0 | 100 | 0 |
| FCBBF1000157 | 0 | 0 | 0 | 0 | 0 | 100 | 0 |
| FCBBF1000171 | 0 | 0 | 0 | 0 | 0 | 100 | 0 |
| FCBBF1000174 | 0 | 0 | 0 | 0 | 0 | 100 | 0 |
| FCBBF1000182 | 0 | 0 | 0 | 0 | 0 | 15.666 | 0 |
| FCBBF1000197 | 12.472 | 0 | 0 | 6.296 | 0 | 3.947 | 2.663 |
| FCBBF1000198 | 0 | 0 | 0 | 0 | 0 | 100 | 0 |
| FCBBF1000206 | 0 | 0 | 0 | 0 | 0 | 100 | 0 |
| FCBBF1000220 | 0 | 0 | 0 | 0 | 0 | 100 | 0 |
| FCBBF1000232 | 0 | 0 | 0 | 0 | 0 | 100 | 0 |
| FCBBF1000233 | 0 | 0 | 0 | 0 | 0 | 100 | 0 |
| FCBBF1000243 | 0 | 0 | 0 | 0 | 0 | 100 | 0 |
| FCBBF1000270 | 0 | 0 | 0 | 0 | 0 | 100 | 0 |
| FCBBF1000272 | 0 | 0 | 0 | 0 | 0 | 64.423 | 0 |
| FCBBF1000280 | 0 | 0 | 0 | 0 | 0 | 10.435 | 0 |
| FCBBF1000294 | 0 | 0 | 0 | 0 | 0 | 1.989 | 2.684 |
| FCBBF1000297 | 0 | 0 | 0 | 0 | 0 | 100 | 0 |
| FCBBF1000305 | 0 | 0 | 0 | 0 | 0 | 33.142 | 0 |
| FCBBF1000314 | 0 | 0 | 0 | 0 | 0 | 100 | 0 |
| FCBBF1000322 | 0 | 0 | 0 | 0 | 0 | 100 | 0 |
| FCBBF1000349 | 0 | 0 | 0 | 0 | 0 | 100 | 0 |
| FCBBF1000367 | 0 | 0 | 0 | 0 | 0 | 5.613 | 3.787 |
| FCBBF1000374 | 0 | 0 | 0 | 0 | 0 | 73.865 | 0 |
| FCBBF1000376 | 0 | 0 | 0 | 0 | 0 | 78.700 | 0 |
| FCBBF1000377 | 0 | 0 | 0 | 0 | 0 | 39.957 | 26.958 |
| FCBBF1000395 | 0 | 0 | 0 | 0 | 0 | 100 | 0 |
| FCBBF1000397 | 0 | 0 | 0 | 0 | 0 | 100 | 0 |
| FCBBF1000403 | 0 | 0 | 0 | 0 | 0 | 15.495 | 0 |
| FCBBF1000412 | 22.594 | 0 | 0 | 0 | 0 | 3.575 | 0 |
| FCBBF1000425 | 0 | 0 | 0 | 0 | 0 | 9.645 | 0 |
| FCBBF1000437 | 0 | 0 | 0 | 0 | 0 | 23.626 | 31.880 |
| FCBBF1000449 | 0 | 0 | 0 | 0 | 0 | 12.351 | 0 |
| FCBBF1000466 | 0 | 0 | 0 | 0 | 0 | 8.236 | 0 |
| FCBBF1000476 | 0 | 0 | 0 | 0 | 0 | 48.133 | 0 |
| FCBBF1000506 | 0 | 0 | 0 | 0 | 0 | 34.365 | 0 |
| FCBBF1000509 | 0 | 0 | 0 | 0 | 0 | 6.894 | 0 |
| FCBBF1000546 | 0 | 0 | 0 | 0 | 0 | 100 | 0 |
| FCBBF1000550 | 0 | 0 | 0 | 0 | 0 | 100 | 0 |
| FCBBF1000556 | 0 | 0 | 0 | 0 | 0 | 1.969 | 0 |
| FCBBF1000563 | 0 | 0 | 0 | 0 | 0 | 5.550 | 11.232 |
| FCBBF1000574 | 0 | 0 | 0 | 0 | 0 | 7.670 | 0 |
| FCBBF1000581 | 0 | 0 | 0 | 0 | 0 | 100 | 0 |
| FCBBF1000582 | 0 | 0 | 0 | 0 | 0 | 100 | 0 |
| FCBBF1000598 | 0 | 0 | 0 | 0 | 0 | 100 | 0 |
| FCBBF1000604 | 0 | 0 | 0 | 0 | 0 | 100 | 0 |
| FCBBF1000618 | 0 | 0 | 0 | 0 | 0 | 100 | 0 |
| FCBBF1000627 | 0 | 0 | 0 | 0 | 0 | 100 | 0 |
| FCBBF1000671 | 0 | 0 | 0 | 0 | 0 | 25.293 | 0 |
| FCBBF1000675 | 0 | 0 | 0 | 0 | 0 | 23.460 | 31.656 |
| FCBBF1000684 | 0 | 0 | 0 | 0 | 0 | 33.171 | 0 |
| FCBBF1000686 | 0 | 0 | 0 | 0 | 0 | 42.565 | 57.435 |
| FCBBF1000687 | 0 | 0 | 0 | 0 | 0 | 31.919 | 0 |
| FCBBF1000691 | 0 | 0 | 0 | 0 | 0 | 100 | 0 |
| FCBBF1000732 | 0 | 0 | 0 | 0 | 0 | 10.346 | 0 |
| FCBBF1000748 | 0 | 0 | 0 | 0 | 0 | 62.490 | 0 |
| FCBBF1000760 | 0 | 0 | 0 | 0 | 0 | 1.210 | 0 |
| FCBBF2000038 | 0 | 0 | 0 | 0 | 0 | 67.004 | 6.697 |
| FCBBF2000087 | 0 | 0 | 0 | 0 | 0 | 5.330 | 0 |
| FCBBF2000094 | 0 | 0 | 0 | 0 | 0 | 100 | 0 |
| FCBBF2000105 | 0 | 0 | 0 | 0 | 0 | 100 | 0 |
| FCBBF2000123 | 0 | 0 | 0 | 0 | 0 | 100 | 0 |
| FCBBF2000195 | 0 | 0 | 0 | 0 | 0 | 7.679 | 0 |
| FCBBF2000199 | 0 | 0 | 0 | 0 | 0 | 20.674 | 6.974 |
| FCBBF2000214 | 0 | 0 | 0 | 0 | 0 | 100 | 0 |
| FCBBF2000232 | 0 | 0 | 0 | 0 | 0 | 100 | 0 |
| FCBBF2000259 | 0 | 0 | 0 | 0 | 0 | 44.190 | 29.814 |
| FCBBF2000276 | 0 | 0 | 0 | 0 | 0 | 100 | 0 |
| FCBBF2000291 | 0 | 0 | 0 | 0 | 0 | 100 | 0 |
| FCBBF2000362 | 0 | 0 | 0 | 0 | 0 | 15.464 | 0 |
| FCBBF2000379 | 0 | 0 | 0 | 0 | 0 | 100 | 0 |
| FCBBF2000473 | 0 | 0 | 0 | 0 | 0 | 100 | 0 |
| FCBBF2000502 | 0 | 0 | 0 | 0 | 0 | 12.188 | 0 |
| FCBBF2000566 | 0 | 0 | 0 | 0 | 0 | 27.467 | 0 |
| FCBBF2000576 | 0 | 0 | 0 | 0 | 0 | 20.800 | 0 |
| FCBBF2000591 | 0 | 0 | 0 | 0 | 0 | 1.059 | 0 |
| FCBBF2000677 | 0 | 0 | 0 | 0 | 0 | 100 | 0 |
| FCBBF2000678 | 0 | 0 | 0 | 0 | 0 | 100 | 0 |
| FCBBF2000685 | 0 | 0 | 0 | 0 | 0 | 12.569 | 0 |
| FCBBF2000733 | 0 | 0 | 0 | 0 | 0 | 14.642 | 0 |
| FCBBF2000782 | 0 | 0 | 0 | 0 | 0 | 68.901 | 0 |
| FCBBF2000808 | 0 | 0 | 0 | 0 | 0 | 100 | 0 |
| FCBBF2000815 | 0 | 0 | 0 | 0 | 0 | 100 | 0 |
| FCBBF2000825 | 86.338 | 0 | 0 | 0 | 0 | 13.662 | 0 |
| FCBBF2000885 | 0 | 0 | 0 | 0 | 0 | 2.836 | 0 |
| FCBBF2000940 | 0 | 0 | 0 | 0 | 0 | 62.490 | 0 |
| FCBBF2000951 | 0 | 0 | 0 | 0 | 0 | 100 | 0 |
| FCBBF2001001 | 0 | 0 | 0 | 0 | 0 | 17.657 | 0 |
| FCBBF2001088 | 0 | 0 | 0 | 0 | 0 | 29.954 | 0 |
| FCBBF2001105 | 0 | 0 | 0 | 0 | 0 | 5.608 | 0 |
| FCBBF2001116 | 0 | 0 | 0 | 0 | 0 | 100 | 0 |
| FCBBF2001183 | 0 | 0 | 0 | 0 | 0 | 6.110 | 4.122 |
| FCBBF2001188 | 0 | 0 | 0 | 0 | 0 | 100 | 0 |
| FCBBF2001211 | 0 | 0 | 0 | 0 | 0 | 11.839 | 0 |
| FCBBF2001238 | 0 | 0 | 0 | 0 | 0 | 100 | 0 |
| FCBBF2001243 | 0 | 0 | 0 | 0 | 0 | 100 | 0 |
| FCBBF2001291 | 0 | 0 | 0 | 0 | 0 | 10.544 | 0 |
| FCBBF2001299 | 0 | 0 | 0 | 0 | 0 | 83.886 | 0 |
| FCBBF2001309 | 0 | 0 | 0 | 0 | 0 | 32.152 | 10.846 |
| FCBBF2001400 | 0 | 0 | 0 | 0 | 0 | 37.623 | 0 |
| FCBBF2001427 | 0 | 0 | 0 | 0 | 0 | 100 | 0 |
| FCBBF2001480 | 0 | 0 | 0 | 0 | 0 | 44.606 | 0 |
| FCBBF2001529 | 0 | 0 | 0 | 0 | 0 | 100 | 0 |
| FCBBF2001538 | 0 | 0 | 0 | 4.490 | 0 | 4.223 | 1.899 |
| FCBBF2001594 | 0 | 0 | 0 | 0 | 0 | 14.051 | 0 |
| FCBBF2001672 | 0 | 0 | 0 | 0 | 0 | 100 | 0 |
| FCBBF2001675 | 0 | 0 | 0 | 0 | 0 | 100 | 0 |
| FCBBF2001718 | 0 | 0 | 0 | 0 | 0 | 100 | 0 |
| FCBBF2001720 | 0 | 0 | 0 | 0 | 0 | 100 | 0 |
| FCBBF2001817 | 0 | 0 | 0 | 0 | 0 | 44.606 | 0 |
| FCBBF2001868 | 0 | 0 | 0 | 0 | 0 | 100 | 0 |
| FCBBF2002044 | 0 | 0 | 0 | 0 | 0 | 100 | 0 |
| FCBBF2002111 | 0 | 0 | 0 | 0 | 0 | 21.261 | 0 |
| FCBBF2002281 | 0 | 0 | 0 | 0 | 0 | 59.713 | 40.287 |
| FCBBF2002349 | 0 | 0 | 0 | 0 | 0 | 14.587 | 0 |
| FCBBF2002370 | 0 | 0 | 0 | 0 | 0 | 100 | 0 |
| FCBBF2002541 | 0 | 0 | 0 | 0 | 0 | 100 | 0 |
| FCBBF2002626 | 0 | 0 | 0 | 0 | 0 | 72.245 | 0 |
| FCBBF2002801 | 0 | 0 | 0 | 0 | 0 | 14.385 | 0 |
| FCBBF2002897 | 0 | 0 | 0 | 0 | 0 | 100 | 0 |
| FCBBF2002898 | 0 | 0 | 0 | 0 | 0 | 100 | 0 |
| FCBBF2002904 | 0 | 0 | 0 | 0 | 0 | 100 | 0 |
| FCBBF2002928 | 0 | 0 | 0 | 0 | 0 | 5.748 | 0 |
| FCBBF2002953 | 0 | 0 | 0 | 0 | 0 | 100 | 0 |
| FCBBF2003083 | 0 | 0 | 0 | 0 | 0 | 100 | 0 |
| FCBBF2003102 | 0 | 0 | 0 | 0 | 0 | 36.993 | 49.917 |
| FCBBF2003269 | 0 | 0 | 0 | 0 | 0 | 100 | 0 |
| FCBBF2003293 | 0 | 0 | 0 | 0 | 0 | 33.878 | 0 |
| FCBBF2003297 | 0 | 0 | 0 | 0 | 0 | 100 | 0 |
| FCBBF2003395 | 0 | 0 | 0 | 0 | 0 | 100 | 0 |
| FCBBF2003528 | 0 | 0 | 0 | 0 | 0 | 100 | 0 |
| FCBBF2003543 | 0 | 0 | 0 | 0 | 0 | 64.881 | 0 |
| FCBBF2003549 | 0 | 0 | 0 | 0 | 0 | 21.202 | 0 |
| FCBBF2003567 | 0 | 0 | 0 | 0 | 0 | 36.129 | 0 |
| FCBBF2003636 | 0 | 0 | 0 | 0 | 0 | 100 | 0 |
| FCBBF2003823 | 0 | 0 | 0 | 0 | 0 | 100 | 0 |
| FCBBF2003895 | 0 | 0 | 0 | 0 | 0 | 100 | 0 |
| FCBBF2004066 | 0 | 0 | 0 | 0 | 0 | 3.724 | 0 |
| FCBBF2004090 | 0 | 0 | 0 | 0 | 0 | 100 | 0 |
| FCBBF2004138 | 0 | 0 | 0 | 0 | 0 | 100 | 0 |
| FCBBF2004217 | 0 | 0 | 0 | 0 | 0 | 100 | 0 |
| FCBBF2004256 | 0 | 0 | 0 | 0 | 0 | 100 | 0 |
| FCBBF2004373 | 0 | 0 | 0 | 0 | 0 | 43.392 | 0 |
| FCBBF2004448 | 0 | 0 | 0 | 0 | 0 | 100 | 0 |
| FCBBF2004671 | 0 | 0 | 0 | 0 | 0 | 100 | 0 |
| FCBBF2004707 | 0 | 0 | 0 | 0 | 0 | 100 | 0 |
| FCBBF2004788 | 0 | 0 | 0 | 0 | 0 | 100 | 0 |
| FCBBF2005069 | 0 | 0 | 0 | 0 | 0 | 100 | 0 |
| FCBBF2005122 | 0 | 0 | 0 | 0 | 0 | 100 | 0 |
| FCBBF2005428 | 0 | 0 | 0 | 0 | 0 | 72.245 | 0 |
| FCBBF2005439 | 0 | 0 | 0 | 0 | 0 | 100 | 0 |
| FCBBF2005538 | 0 | 0 | 0 | 0 | 0 | 100 | 0 |
| FCBBF2005637 | 0 | 0 | 0 | 0 | 76.147 | 5.134 | 0 |
| FCBBF2005645 | 0 | 0 | 0 | 0 | 0 | 100 | 0 |
| FCBBF2005658 | 0 | 0 | 0 | 0 | 0 | 14.379 | 0 |
| FCBBF2005733 | 0 | 0 | 0 | 0 | 0 | 59.793 | 0 |
| FCBBF2005909 | 0 | 0 | 0 | 0 | 0 | 11.530 | 15.558 |
| FCBBF2005966 | 0 | 0 | 0 | 0 | 0 | 17.497 | 0 |
| FCBBF2006131 | 0 | 0 | 0 | 0 | 0 | 100 | 0 |
| FCBBF2006380 | 0 | 0 | 0 | 0 | 0 | 60.769 | 0 |
| FCBBF2006418 | 0 | 0 | 0 | 0 | 0 | 100 | 0 |
| FCBBF2006452 | 0 | 0 | 0 | 0 | 0 | 100 | 0 |
| FCBBF2006634 | 0 | 0 | 63.649 | 0 | 0 | 8.720 | 0 |
| FCBBF2006781 | 0 | 0 | 0 | 0 | 0 | 11.690 | 0 |
| FCBBF2007012 | 0 | 0 | 0 | 0 | 0 | 100 | 0 |
| FCBBF2007186 | 0 | 0 | 0 | 0 | 0 | 100 | 0 |
| FCBBF2007265 | 0 | 0 | 0 | 0 | 0 | 100 | 0 |
| FCBBF2007302 | 0 | 0 | 0 | 0 | 0 | 43.392 | 0 |
| FCBBF2007556 | 0 | 0 | 0 | 0 | 0 | 16.883 | 0 |
| FCBBF2007610 | 0 | 0 | 0 | 0 | 0 | 100 | 0 |
| FCBBF2007633 | 0 | 0 | 0 | 0 | 0 | 100 | 0 |
| FCBBF2007840 | 0 | 0 | 0 | 0 | 0 | 46.021 | 0 |
| FCBBF3000102 | 0 | 0 | 0 | 0 | 0 | 22.924 | 0 |
| FCBBF3000110 | 0 | 0 | 0 | 0 | 0 | 23.863 | 0 |
| FCBBF3000115 | 0 | 0 | 0 | 0 | 0 | 7.373 | 0 |
| FCBBF3000120 | 0 | 0 | 0 | 0 | 0 | 100 | 0 |
| FCBBF3000168 | 0 | 0 | 0 | 0 | 0 | 15.041 | 0 |
| FCBBF3000175 | 0 | 0 | 56.620 | 0 | 0 | 15.515 | 0 |
| FCBBF3000227 | 0 | 0 | 0 | 0 | 0 | 20.773 | 0 |
| FCBBF3000228 | 0 | 0 | 0 | 0 | 0 | 16.557 | 0 |
| FCBBF3000229 | 0 | 0 | 0 | 0 | 0 | 17.839 | 24.071 |
| FCBBF3000233 | 0 | 0 | 0 | 0 | 0 | 100 | 0 |
| FCBBF3000269 | 0 | 0 | 0 | 0 | 0 | 56.549 | 0 |
| FCBBF3000361 | 0 | 0 | 0 | 0 | 0 | 100 | 0 |
| FCBBF3000367 | 0 | 0 | 0 | 0 | 0 | 100 | 0 |
| FCBBF3000388 | 0 | 0 | 0 | 0 | 0 | 22.816 | 0 |
| FCBBF3000434 | 0 | 0 | 0 | 0 | 0 | 6.841 | 0 |
| FCBBF3000462 | 0 | 0 | 0 | 0 | 0 | 100 | 0 |
| FCBBF3000473 | 0 | 0 | 0 | 0 | 0 | 100 | 0 |
| FCBBF3000501 | 0 | 0 | 0 | 0 | 0 | 100 | 0 |
| FCBBF3000518 | 0 | 0 | 0 | 0 | 0 | 100 | 0 |
| FCBBF3000536 | 0 | 0 | 0 | 0 | 0 | 4.925 | 0 |
| FCBBF3000550 | 0 | 0 | 0 | 0 | 0 | 100 | 0 |
| FCBBF3000847 | 0 | 0 | 0 | 0 | 0 | 100 | 0 |
| FCBBF3001018 | 0 | 0 | 0 | 0 | 0 | 100 | 0 |
| FCBBF3001020 | 0 | 0 | 0 | 0 | 0 | 100 | 0 |
| FCBBF3001081 | 0 | 0 | 0 | 0 | 0 | 9.702 | 0 |
| FCBBF3001235 | 0 | 0 | 0 | 0 | 0 | 100 | 0 |
| FCBBF3001281 | 0 | 0 | 0 | 0 | 0 | 37.617 | 0 |
| FCBBF3001302 | 0 | 0 | 0 | 0 | 91.087 | 6.141 | 0 |
| FCBBF3001377 | 0 | 0 | 0 | 0 | 0 | 19.023 | 25.669 |
| FCBBF3001470 | 0 | 0 | 0 | 0 | 0 | 2.508 | 0 |
| FCBBF3001594 | 0 | 0 | 0 | 0 | 0 | 100 | 0 |
| FCBBF3001632 | 0 | 0 | 0 | 0 | 0 | 2.852 | 3.848 |
| FCBBF3001657 | 0 | 0 | 0 | 0 | 0 | 8.716 | 11.762 |
| FCBBF3001818 | 0 | 0 | 0 | 0 | 0 | 33.656 | 0 |
| FCBBF3001855 | 0 | 0 | 37.763 | 0 | 0 | 31.042 | 0 |
| FCBBF3001890 | 0 | 0 | 0 | 0 | 0 | 15.245 | 13.714 |
| FCBBF3001912 | 0 | 0 | 0 | 0 | 0 | 100 | 0 |
| FCBBF3001914 | 0 | 0 | 0 | 0 | 0 | 100 | 0 |
| FCBBF3001918 | 0 | 0 | 0 | 0 | 0 | 100 | 0 |
| FCBBF3001924 | 0 | 0 | 0 | 0 | 0 | 100 | 0 |
| FCBBF3001977 | 0 | 0 | 0 | 0 | 0 | 13.761 | 0 |
| FCBBF3002163 | 0 | 0 | 0 | 0 | 0 | 100 | 0 |
| FCBBF3002188 | 0 | 0 | 0 | 0 | 0 | 100 | 0 |
| FCBBF3002190 | 0 | 0 | 0 | 0 | 0 | 100 | 0 |
| FCBBF3002268 | 0 | 0 | 0 | 0 | 0 | 100 | 0 |
| FCBBF3002475 | 0 | 0 | 0 | 0 | 0 | 100 | 0 |
| FCBBF3002556 | 0 | 0 | 0 | 0 | 0 | 59.793 | 0 |
| FCBBF3002592 | 0 | 0 | 0 | 0 | 0 | 100 | 0 |
| FCBBF3002658 | 0 | 0 | 0 | 0 | 0 | 100 | 0 |
| FCBBF3002782 | 0 | 0 | 0 | 0 | 0 | 100 | 0 |
| FCBBF3002818 | 0 | 0 | 0 | 0 | 0 | 64.881 | 0 |
| FCBBF3002925 | 0 | 0 | 0 | 0 | 0 | 100 | 0 |
| FCBBF3003216 | 0 | 0 | 0 | 0 | 0 | 100 | 0 |
| FCBBF3003305 | 0 | 0 | 0 | 0 | 0 | 100 | 0 |
| FCBBF3003373 | 0 | 0 | 0 | 0 | 0 | 100 | 0 |
| FCBBF3003435 | 0 | 0 | 0 | 0 | 0 | 33.081 | 0 |
| FCBBF3003475 | 0 | 0 | 0 | 0 | 0 | 100 | 0 |
| FCBBF3003481 | 0 | 0 | 0 | 0 | 0 | 100 | 0 |
| FCBBF3003557 | 0 | 0 | 0 | 0 | 0 | 64.881 | 0 |
| FCBBF3003787 | 0 | 0 | 0 | 0 | 0 | 18.081 | 0 |
| FCBBF3003800 | 0 | 0 | 0 | 2.321 | 0 | 10.916 | 4.910 |
| FCBBF3003902 | 0 | 0 | 0 | 0 | 0 | 43.392 | 0 |
| FCBBF3004021 | 0 | 0 | 0 | 0 | 0 | 19.729 | 0 |
| FCBBF3004041 | 0 | 0 | 0 | 0 | 0 | 6.894 | 0 |
| FCBBF3004261 | 0 | 0 | 0 | 0 | 0 | 33.424 | 0 |
| FCBBF3004323 | 0 | 0 | 0 | 0 | 0 | 20.357 | 41.204 |
| FCBBF3004390 | 0 | 0 | 0 | 0 | 0 | 100 | 0 |
| FCBBF3004409 | 0 | 0 | 0 | 0 | 0 | 59.793 | 0 |
| FCBBF3004473 | 0 | 0 | 0 | 6.771 | 0 | 2.123 | 2.864 |
| FCBBF3004502 | 0 | 0 | 0 | 0 | 0 | 100 | 0 |
| FCBBF3004715 | 0 | 0 | 0 | 0 | 0 | 6.918 | 0 |
| FCBBF3004842 | 0 | 0 | 0 | 0 | 0 | 100 | 0 |
| FCBBF3004847 | 0 | 0 | 0 | 0 | 0 | 60.769 | 0 |
| FCBBF3004955 | 0 | 0 | 0 | 0 | 0 | 28.476 | 19.212 |
| FCBBF3005160 | 0 | 0 | 0 | 0 | 0 | 100 | 0 |
| FCBBF3005218 | 0 | 0 | 0 | 0 | 0 | 100 | 0 |
| FCBBF3005320 | 0 | 0 | 0 | 0 | 0 | 15.119 | 13.601 |
| FCBBF3005330 | 0 | 0 | 0 | 0 | 0 | 6.399 | 1.727 |
| FCBBF3005444 | 0 | 0 | 0 | 0 | 0 | 100 | 0 |
| FCBBF3005497 | 0 | 0 | 0 | 4.633 | 0 | 5.809 | 0 |
| FCBBF3005698 | 0 | 0 | 0 | 0 | 0 | 100 | 0 |
| FCBBF3005729 | 0 | 0 | 0 | 0 | 0 | 100 | 0 |
| FCBBF3006171 | 0 | 0 | 0 | 0 | 0 | 100 | 0 |
| FCBBF3006249 | 0 | 0 | 0 | 0 | 0 | 100 | 0 |
| FCBBF3006288 | 0 | 0 | 0 | 0 | 0 | 100 | 0 |
| FCBBF3006399 | 0 | 0 | 0 | 0 | 0 | 100 | 0 |
| FCBBF3006628 | 0 | 0 | 0 | 0 | 0 | 100 | 0 |
| FCBBF3006821 | 0 | 0 | 0 | 0 | 0 | 10.561 | 0 |
| FCBBF3007077 | 0 | 0 | 0 | 0 | 0 | 100 | 0 |
| FCBBF3007150 | 0 | 0 | 0 | 0 | 0 | 100 | 0 |
| FCBBF3007152 | 0 | 0 | 0 | 0 | 0 | 100 | 0 |
| FCBBF3007242 | 0 | 0 | 0 | 0 | 0 | 100 | 0 |
| FCBBF3007244 | 0 | 0 | 0 | 0 | 0 | 28.681 | 0 |
| FCBBF3007248 | 0 | 0 | 0 | 0 | 0 | 100 | 0 |
| FCBBF3007453 | 0 | 0 | 0 | 0 | 0 | 100 | 0 |
| FCBBF3007462 | 0 | 0 | 0 | 0 | 0 | 64.423 | 0 |
| FCBBF3007540 | 0 | 0 | 0 | 0 | 0 | 100 | 0 |
| FCBBF3007597 | 0 | 0 | 0 | 0 | 0 | 46.137 | 0 |
| FCBBF3007604 | 0 | 0 | 0 | 0 | 0 | 100 | 0 |
| FCBBF3007631 | 0 | 0 | 0 | 0 | 0 | 40.360 | 0 |
| FCBBF3007829 | 0 | 0 | 0 | 0 | 0 | 20.784 | 0 |
| FCBBF3007855 | 0 | 0 | 0 | 0 | 0 | 100 | 0 |
| FCBBF3007859 | 0 | 0 | 0 | 0 | 0 | 12.001 | 0 |
| FCBBF3007860 | 0 | 0 | 0 | 0 | 0 | 18.693 | 0 |
| FCBBF3008073 | 0 | 0 | 0 | 0 | 0 | 100 | 0 |
| FCBBF3008100 | 0 | 0 | 0 | 0 | 0 | 27.561 | 0 |
| FCBBF3008153 | 0 | 0 | 0 | 0 | 0 | 20.215 | 13.639 |
| FCBBF3008159 | 0 | 0 | 0 | 0 | 0 | 38.259 | 0 |
| FCBBF3008251 | 0 | 0 | 0 | 0 | 0 | 100 | 0 |
| FCBBF3008311 | 0 | 0 | 0 | 0 | 0 | 100 | 0 |
| FCBBF3008362 | 0 | 0 | 0 | 0 | 0 | 100 | 0 |
| FCBBF3008382 | 0 | 0 | 0 | 0 | 0 | 19.899 | 26.851 |
| FCBBF3008475 | 0 | 0 | 0 | 0 | 0 | 100 | 0 |
| FCBBF3008556 | 0 | 0 | 0 | 0 | 0 | 73.865 | 0 |
| FCBBF3008644 | 0 | 0 | 0 | 0 | 0 | 15.918 | 0 |
| FCBBF3008689 | 0 | 0 | 0 | 0 | 0 | 34.487 | 0 |
| FCBBF3008748 | 0 | 0 | 0 | 0 | 0 | 100 | 0 |
| FCBBF3008870 | 0 | 0 | 0 | 0 | 0 | 100 | 0 |
| FCBBF3008938 | 0 | 0 | 0 | 0 | 0 | 51.503 | 0 |
| FCBBF3008944 | 0 | 0 | 0 | 0 | 0 | 100 | 0 |
| FCBBF3009069 | 0 | 0 | 0 | 0 | 0 | 8.273 | 0 |
| FCBBF3009101 | 0 | 0 | 0 | 0 | 0 | 64.881 | 0 |
| FCBBF3009152 | 0 | 0 | 0 | 0 | 0 | 35.139 | 0 |
| FCBBF3009256 | 0 | 0 | 0 | 0 | 0 | 68.901 | 0 |
| FCBBF3009317 | 0 | 0 | 0 | 0 | 0 | 100 | 0 |
| FCBBF3009428 | 0 | 0 | 0 | 0 | 0 | 100 | 0 |
| FCBBF3009464 | 0 | 0 | 0 | 0 | 0 | 100 | 0 |
| FCBBF3009479 | 0 | 0 | 0 | 0 | 0 | 18.275 | 0 |
| FCBBF3009526 | 0 | 0 | 0 | 0 | 0 | 21.826 | 29.451 |
| FCBBF3009541 | 0 | 0 | 0 | 0 | 11.296 | 2.285 | 0 |
| FCBBF3009703 | 0 | 0 | 0 | 0 | 0 | 59.793 | 0 |
| FCBBF3009717 | 0 | 0 | 0 | 0 | 0 | 100 | 0 |
| FCBBF3009888 | 0 | 0 | 0 | 0 | 0 | 100 | 0 |
| FCBBF3009949 | 0 | 0 | 0 | 0 | 0 | 100 | 0 |
| FCBBF3009978 | 0 | 0 | 0 | 0 | 0 | 34.275 | 0 |
| FCBBF3010008 | 0 | 0 | 0 | 0 | 0 | 100 | 0 |
| FCBBF3010012 | 0 | 0 | 0 | 0 | 0 | 29.716 | 11.456 |
| FCBBF3010124 | 0 | 0 | 0 | 0 | 0 | 100 | 0 |
| FCBBF3010130 | 0 | 0 | 0 | 0 | 0 | 100 | 0 |
| FCBBF3010142 | 0 | 0 | 0 | 0 | 0 | 26.664 | 0 |
| FCBBF3010149 | 0 | 0 | 0 | 0 | 0 | 100 | 0 |
| FCBBF3010211 | 0 | 0 | 0 | 0 | 0 | 100 | 0 |
| FCBBF3010361 | 0 | 0 | 0 | 0 | 0 | 100 | 0 |
| FCBBF3010508 | 0 | 0 | 0 | 0 | 0 | 20.837 | 0 |
| FCBBF3010544 | 0 | 0 | 0 | 0 | 0 | 100 | 0 |
| FCBBF3010586 | 0 | 0 | 0 | 0 | 0 | 100 | 0 |
| FCBBF3010601 | 0 | 0 | 0 | 0 | 0 | 100 | 0 |
| FCBBF3010665 | 0 | 0 | 0 | 0 | 0 | 48.599 | 0 |
| FCBBF3010695 | 0 | 0 | 0 | 0 | 67.953 | 4.581 | 0 |
| FCBBF3010729 | 0 | 0 | 0 | 0 | 0 | 100 | 0 |
| FCBBF3010733 | 0 | 0 | 0 | 0 | 0 | 100 | 0 |
| FCBBF3011003 | 0 | 0 | 0 | 0 | 0 | 100 | 0 |
| FCBBF3011418 | 0 | 0 | 0 | 0 | 0 | 100 | 0 |
| FCBBF3011485 | 0 | 0 | 0 | 0 | 0 | 37.055 | 0 |
| FCBBF3011523 | 0 | 0 | 0 | 0 | 0 | 33.293 | 0 |
| FCBBF3011570 | 0 | 0 | 0 | 0 | 0 | 100 | 0 |
| FCBBF3011592 | 0 | 0 | 0 | 0 | 0 | 100 | 0 |
| FCBBF3011867 | 0 | 0 | 0 | 0 | 0 | 100 | 0 |
| FCBBF3011889 | 0 | 0 | 0 | 0 | 0 | 100 | 0 |
| FCBBF3012170 | 0 | 0 | 0 | 0 | 0 | 100 | 0 |
| FCBBF3012182 | 0 | 0 | 0 | 0 | 0 | 0.487 | 0 |
| FCBBF3012288 | 0 | 0 | 0 | 0 | 0 | 73.865 | 0 |
| FCBBF3012332 | 0 | 0 | 0 | 0 | 0 | 78.700 | 0 |
| FCBBF3012347 | 0 | 0 | 0 | 0 | 0 | 4.055 | 0 |
| FCBBF3012443 | 0 | 0 | 0 | 0 | 0 | 50.412 | 0 |
| FCBBF3012588 | 0 | 0 | 0 | 0 | 0 | 100 | 0 |
| FCBBF3012667 | 0 | 0 | 0 | 0 | 0 | 45.089 | 0 |
| FCBBF3012842 | 0 | 0 | 0 | 0 | 0 | 100 | 0 |
| FCBBF3012901 | 0 | 0 | 0 | 0 | 0 | 100 | 0 |
| FCBBF3013041 | 0 | 0 | 0 | 0 | 0 | 100 | 0 |
| FCBBF3013058 | 0 | 0 | 0 | 0 | 0 | 100 | 0 |
| FCBBF3013205 | 0 | 0 | 0 | 0 | 0 | 100 | 0 |
| FCBBF3013266 | 0 | 0 | 0 | 0 | 0 | 39.056 | 0 |
| FCBBF3013307 | 0 | 0 | 0 | 0 | 0 | 100 | 0 |
| FCBBF3013341 | 0 | 0 | 0 | 0 | 0 | 100 | 0 |
| FCBBF3013506 | 0 | 0 | 0 | 0 | 0 | 43.873 | 0 |
| FCBBF3013589 | 0 | 0 | 0 | 0 | 0 | 15.328 | 0 |
| FCBBF3013623 | 0 | 0 | 0 | 0 | 0 | 100 | 0 |
| FCBBF3013800 | 0 | 0 | 0 | 0 | 0 | 64.423 | 0 |
| FCBBF3013846 | 0 | 0 | 0 | 0 | 0 | 100 | 0 |
| FCBBF3014229 | 0 | 0 | 0 | 0 | 0 | 100 | 0 |
| FCBBF3014260 | 0 | 0 | 0 | 0 | 0 | 8.343 | 11.257 |
| FCBBF3014355 | 0 | 0 | 0 | 0 | 0 | 100 | 0 |
| FCBBF3014567 | 0 | 0 | 0 | 0 | 0 | 100 | 0 |
| FCBBF3014770 | 0 | 0 | 0 | 0 | 0 | 17.629 | 0 |
| FCBBF3015100 | 0 | 0 | 0 | 0 | 0 | 9.218 | 0 |
| FCBBF3015119 | 0 | 0 | 0 | 0 | 0 | 100 | 0 |
| FCBBF3015131 | 0 | 0 | 0 | 0 | 0 | 100 | 0 |
| FCBBF3015317 | 0 | 0 | 0 | 0 | 0 | 100 | 0 |
| FCBBF3015727 | 0 | 0 | 0 | 0 | 0 | 73.865 | 0 |
| FCBBF3015758 | 0 | 0 | 0 | 0 | 0 | 100 | 0 |
| FCBBF3015809 | 0 | 0 | 0 | 0 | 0 | 100 | 0 |
| FCBBF3015870 | 0 | 0 | 0 | 0 | 0 | 100 | 0 |
| FCBBF3016018 | 0 | 0 | 0 | 0 | 0 | 100 | 0 |
| FCBBF3016134 | 0 | 0 | 0 | 0 | 0 | 19.231 | 0 |
| FCBBF3016178 | 0 | 0 | 0 | 0 | 0 | 100 | 0 |
| FCBBF3016451 | 0 | 0 | 0 | 0 | 0 | 43.392 | 0 |
| FCBBF3016618 | 0 | 0 | 0 | 0 | 0 | 100 | 0 |
| FCBBF3016622 | 0 | 0 | 0 | 0 | 0 | 64.881 | 0 |
| FCBBF3016644 | 0 | 0 | 0 | 0 | 0 | 100 | 0 |
| FCBBF3016667 | 0 | 0 | 0 | 0 | 0 | 23.650 | 0 |
| FCBBF3016928 | 0 | 0 | 0 | 0 | 0 | 3.238 | 0 |
| FCBBF3016987 | 0 | 0 | 0 | 0 | 0 | 100 | 0 |
| FCBBF3017024 | 0 | 0 | 0 | 0 | 0 | 9.469 | 0 |
| FCBBF3017059 | 0 | 0 | 0 | 0 | 0 | 100 | 0 |
| FCBBF3017071 | 0 | 0 | 0 | 0 | 0 | 100 | 0 |
| FCBBF3017123 | 0 | 0 | 0 | 0 | 0 | 100 | 0 |
| FCBBF3017233 | 0 | 0 | 0 | 0 | 0 | 100 | 0 |
| FCBBF3017255 | 0 | 0 | 0 | 0 | 0 | 64.423 | 0 |
| FCBBF3017288 | 0 | 0 | 0 | 0 | 0 | 59.793 | 0 |
| FCBBF3017396 | 0 | 0 | 0 | 0 | 0 | 3.772 | 0 |
| FCBBF3017531 | 0 | 0 | 0 | 0 | 0 | 2.962 | 0 |
| FCBBF3017535 | 0 | 0 | 0 | 0 | 0 | 100 | 0 |
| FCBBF3017681 | 0 | 0 | 0 | 0 | 0 | 100 | 0 |
| FCBBF3017729 | 0 | 0 | 0 | 0 | 0 | 100 | 0 |
| FCBBF3017873 | 0 | 0 | 0 | 0 | 0 | 100 | 0 |
| FCBBF3017918 | 0 | 0 | 0 | 0 | 0 | 12.096 | 0 |
| FCBBF3017974 | 0 | 0 | 0 | 0 | 0 | 100 | 0 |
| FCBBF3018067 | 0 | 0 | 0 | 0 | 0 | 33.878 | 0 |
| FCBBF3018173 | 0 | 0 | 0 | 0 | 0 | 64.423 | 0 |
| FCBBF3018453 | 0 | 0 | 0 | 0 | 0 | 25.602 | 23.031 |
| FCBBF3018591 | 0 | 0 | 0 | 0 | 0 | 100 | 0 |
| FCBBF3018753 | 0 | 0 | 0 | 0 | 0 | 42.565 | 57.435 |
| FCBBF3018796 | 0 | 0 | 0 | 0 | 0 | 5.735 | 0 |
| FCBBF3018826 | 0 | 0 | 0 | 0 | 0 | 18.022 | 48.637 |
| FCBBF3018949 | 0 | 0 | 0 | 0 | 0 | 52.288 | 0 |
| FCBBF3019085 | 0 | 0 | 0 | 0 | 0 | 100 | 0 |
| FCBBF3019320 | 0 | 0 | 0 | 0 | 0 | 36.520 | 0 |
| FCBBF3019437 | 0 | 0 | 0 | 0 | 0 | 59.793 | 0 |
| FCBBF3019455 | 0 | 0 | 0 | 0 | 0 | 15.046 | 0 |
| FCBBF3019564 | 0 | 0 | 0 | 0 | 0 | 100 | 0 |
| FCBBF3019569 | 0 | 0 | 0 | 0 | 0 | 72.245 | 0 |
| FCBBF3019570 | 0 | 0 | 0 | 0 | 0 | 100 | 0 |
| FCBBF3019663 | 0 | 0 | 0 | 0 | 0 | 100 | 0 |
| FCBBF3019714 | 0 | 0 | 0 | 0 | 56.127 | 3.784 | 0 |
| FCBBF3019716 | 0 | 0 | 0 | 0 | 0 | 100 | 0 |
| FCBBF3019784 | 0 | 0 | 0 | 0 | 0 | 50.412 | 0 |
| FCBBF3019839 | 0 | 0 | 0 | 0 | 0 | 6.919 | 0 |
| FCBBF3019867 | 0 | 0 | 0 | 0 | 0 | 100 | 0 |
| FCBBF3019961 | 0 | 0 | 0 | 0 | 0 | 100 | 0 |
| FCBBF3020030 | 0 | 0 | 0 | 0 | 0 | 100 | 0 |
| FCBBF3020138 | 0 | 0 | 0 | 0 | 0 | 100 | 0 |
| FCBBF3020140 | 0 | 0 | 0 | 0 | 0 | 52.557 | 0 |
| FCBBF3020163 | 0 | 0 | 0 | 0 | 0 | 100 | 0 |
| FCBBF3020232 | 0 | 0 | 0 | 0 | 0 | 100 | 0 |
| FCBBF3020599 | 0 | 0 | 0 | 0 | 0 | 51.503 | 0 |
| FCBBF3021026 | 0 | 0 | 0 | 0 | 0 | 44.606 | 0 |
| FCBBF3021191 | 0 | 0 | 0 | 0 | 0 | 34.251 | 0 |
| FCBBF3021221 | 0 | 0 | 0 | 0 | 0 | 100 | 0 |
| FCBBF3021501 | 0 | 0 | 0 | 0 | 0 | 100 | 0 |
| FCBBF3021506 | 0 | 0 | 0 | 0 | 0 | 100 | 0 |
| FCBBF3021524 | 0 | 0 | 0 | 0 | 0 | 100 | 0 |
| FCBBF3021807 | 0 | 0 | 0 | 0 | 0 | 8.010 | 0 |
| FCBBF3021940 | 0 | 0 | 0 | 0 | 0 | 46.137 | 0 |
| FCBBF3021985 | 0 | 0 | 0 | 0 | 0 | 100 | 0 |
| FCBBF3022005 | 0 | 0 | 0 | 0 | 0 | 100 | 0 |
| FCBBF3022291 | 0 | 0 | 0 | 0 | 0 | 72.245 | 0 |
| FCBBF3022311 | 0 | 0 | 0 | 0 | 0 | 83.886 | 0 |
| FCBBF3022504 | 0 | 0 | 0 | 0 | 0 | 28.792 | 38.851 |
| FCBBF3022566 | 0 | 0 | 0 | 0 | 0 | 64.881 | 0 |
| FCBBF3022593 | 0 | 0 | 0 | 0 | 0 | 12.800 | 0 |
| FCBBF3022765 | 0 | 0 | 0 | 0 | 0 | 64.708 | 0 |
| FCBBF3022767 | 0 | 0 | 0 | 0 | 0 | 37.623 | 0 |
| FCBBF3022894 | 0 | 0 | 0 | 0 | 0 | 8.149 | 0 |
| FCBBF3023061 | 0 | 0 | 0 | 0 | 0 | 100 | 0 |
| FCBBF3023078 | 0 | 0 | 0 | 0 | 0 | 7.910 | 0 |
| FCBBF3023368 | 0 | 0 | 33.084 | 0 | 0 | 4.533 | 0 |
| FCBBF3023372 | 0 | 0 | 0 | 0 | 0 | 100 | 0 |
| FCBBF3023443 | 0 | 0 | 0 | 0 | 0 | 100 | 0 |
| FCBBF3023599 | 0 | 0 | 0 | 0 | 0 | 100 | 0 |
| FCBBF3023667 | 0 | 0 | 0 | 1.565 | 0 | 0.491 | 1.324 |
| FCBBF3023704 | 0 | 0 | 0 | 0 | 0 | 100 | 0 |
| FCBBF3023887 | 0 | 0 | 0 | 0 | 0 | 17.508 | 23.625 |
| FCBBF3023895 | 0 | 0 | 0 | 0 | 0 | 100 | 0 |
| FCBBF3024002 | 0 | 0 | 0 | 0 | 0 | 10.485 | 0 |
| FCBBF3024096 | 0 | 0 | 0 | 0 | 0 | 100 | 0 |
| FCBBF3024225 | 0 | 0 | 0 | 0 | 0 | 100 | 0 |
| FCBBF3024266 | 0 | 0 | 0 | 0 | 0 | 36.142 | 24.384 |
| FCBBF3024364 | 0 | 0 | 0 | 0 | 0 | 100 | 0 |
| FCBBF3024623 | 0 | 0 | 0 | 0 | 0 | 41.402 | 13.966 |
| FCBBF3024793 | 0 | 0 | 0 | 0 | 0 | 29.517 | 0 |
| FCBBF3024911 | 0 | 0 | 0 | 0 | 0 | 100 | 0 |
| FCBBF3025098 | 0 | 0 | 0 | 0 | 0 | 100 | 0 |
| FCBBF3025252 | 0 | 0 | 0 | 0 | 0 | 100 | 0 |
| FCBBF3025280 | 0 | 0 | 0 | 0 | 0 | 100 | 0 |
| FCBBF3025285 | 0 | 0 | 0 | 0 | 0 | 44.606 | 0 |
| FCBBF3025417 | 0 | 0 | 0 | 0 | 0 | 31.716 | 0 |
| FCBBF3025528 | 56.366 | 0 | 0 | 0 | 0 | 8.919 | 12.035 |
| FCBBF3025568 | 0 | 0 | 0 | 0 | 0 | 30.383 | 0 |
| FCBBF3025650 | 0 | 0 | 0 | 0 | 0 | 46.458 | 0 |
| FCBBF3025674 | 0 | 0 | 0 | 0 | 0 | 100 | 0 |
| FCBBF3025730 | 0 | 0 | 0 | 0 | 0 | 36.577 | 0 |
| FCBBF3025737 | 0 | 0 | 0 | 19.153 | 0 | 18.013 | 16.204 |
| FCBBF3025905 | 0 | 0 | 0 | 0 | 0 | 29.552 | 0 |
| FCBBF3026021 | 0 | 0 | 0 | 0 | 0 | 100 | 0 |
| FCBBF3026048 | 0 | 0 | 0 | 0 | 0 | 59.793 | 0 |
| FCBBF3026251 | 0 | 0 | 0 | 0 | 0 | 100 | 0 |
| FCBBF3026308 | 0 | 0 | 0 | 0 | 0 | 23.612 | 0 |
| FCBBF3026651 | 0 | 0 | 0 | 0 | 0 | 13.481 | 0 |
| FCBBF3026678 | 0 | 0 | 0 | 0 | 0 | 100 | 0 |
| FCBBF3026692 | 0 | 0 | 0 | 0 | 0 | 29.977 | 0 |
| FCBBF3027104 | 0 | 0 | 0 | 0 | 0 | 100 | 0 |
| FCBBF3027199 | 0 | 0 | 0 | 0 | 0 | 100 | 0 |
| FCBBF3027328 | 0 | 0 | 0 | 0 | 0 | 100 | 0 |
| FCBBF3027559 | 0 | 0 | 0 | 0 | 0 | 64.881 | 0 |
| FCBBF3027717 | 0 | 0 | 0 | 0 | 0 | 100 | 0 |
| FCBBF3027755 | 0 | 0 | 0 | 0 | 0 | 100 | 0 |
| FCBBF3027768 | 0 | 0 | 0 | 0 | 0 | 100 | 0 |
| FCBBF3027854 | 0 | 0 | 0 | 0 | 0 | 14.460 | 0 |
| FCBBF3027863 | 0 | 0 | 0 | 0 | 0 | 100 | 0 |
| FCBBF3027903 | 0 | 0 | 0 | 0 | 0 | 100 | 0 |
| FCBBF3028102 | 0 | 0 | 0 | 0 | 0 | 100 | 0 |
| FCBBF3028143 | 0 | 0 | 0 | 0 | 0 | 100 | 0 |
| FCBBF3028188 | 0 | 0 | 0 | 0 | 0 | 100 | 0 |
| FCBBF3028202 | 0 | 0 | 0 | 0 | 0 | 42.451 | 0 |
| FCBBF3028244 | 0 | 0 | 12.519 | 0 | 0 | 8.576 | 4.629 |
| FCBBF3028472 | 0 | 0 | 0 | 0 | 0 | 100 | 0 |
| FCBBF3028528 | 0 | 0 | 0 | 0 | 0 | 100 | 0 |
| FCBBF3028582 | 0 | 0 | 0 | 0 | 0 | 100 | 0 |
| FCBBF3028593 | 0 | 0 | 0 | 0 | 0 | 37.296 | 10.065 |
| FCBBF3028671 | 0 | 0 | 0 | 0 | 0 | 100 | 0 |
| FCBBF3028794 | 0 | 0 | 0 | 0 | 0 | 100 | 0 |
| FCBBF4000017 | 0 | 0 | 0 | 0 | 0 | 16.409 | 0 |
| FCBBF4000061 | 0 | 0 | 0 | 0 | 0 | 100 | 0 |
| FCBBF4000076 | 0 | 0 | 0 | 0 | 0 | 100 | 0 |
| FCBBF4000142 | 0 | 0 | 0 | 0 | 0 | 13.508 | 18.228 |
| FCBBF4000173 | 0 | 0 | 0 | 0 | 0 | 100 | 0 |
| FCBBF4000192 | 0 | 0 | 0 | 0 | 0 | 100 | 0 |
| FCBBF4000193 | 0 | 0 | 0 | 0 | 0 | 59.793 | 0 |
| FCBBF4000268 | 0 | 0 | 0 | 0 | 0 | 64.423 | 0 |
| FCBBF4000282 | 0 | 0 | 0 | 0 | 0 | 100 | 0 |
| FCBBF4000399 | 0 | 0 | 0 | 0 | 0 | 100 | 0 |
| FCBBF4000415 | 0 | 0 | 0 | 0 | 0 | 100 | 0 |
| FCBBF4000446 | 0 | 0 | 0 | 0 | 0 | 5.551 | 1.872 |
| FCBBF4000500 | 0 | 0 | 0 | 0 | 0 | 16.192 | 0 |
| FCBBF4000529 | 0 | 0 | 0 | 0 | 0 | 100 | 0 |
| FCBBF4000548 | 0 | 0 | 0 | 0 | 0 | 27.002 | 0 |
| FCBBF5000041 | 0 | 0 | 0 | 0 | 0 | 100 | 0 |
| FCBBF5000061 | 0 | 0 | 0 | 0 | 0 | 38.701 | 0 |
| FCBBF5000165 | 0 | 0 | 0 | 0 | 0 | 18.244 | 0 |
| FCBBF5000261 | 0 | 0 | 0 | 0 | 0 | 9.592 | 25.887 |
| FCBBF5000325 | 0 | 0 | 0 | 0 | 0 | 18.677 | 0 |
| FCBBF5000353 | 0 | 0 | 0 | 0 | 0 | 64.708 | 0 |
| FCBBF5000384 | 0 | 0 | 0 | 0 | 0 | 100 | 0 |
| FCBBF5000483 | 0 | 0 | 0 | 0 | 0 | 100 | 0 |
| FCBBF5000495 | 0 | 0 | 0 | 0 | 0 | 100 | 0 |
| FEBRA1000005 | 0 | 0 | 0 | 0 | 0 | 0 | 100 |
| FEBRA1000008 | 0 | 0 | 0 | 0 | 0 | 0 | 57.838 |
| FEBRA1000022 | 0 | 0 | 0 | 0 | 0 | 0 | 13.120 |
| FEBRA1000030 | 0 | 0 | 0 | 0 | 0 | 0 | 40.753 |
| FEBRA1000057 | 0 | 0 | 0 | 0 | 0 | 6.414 | 4.328 |
| FEBRA1000088 | 0 | 0 | 0 | 0 | 0 | 0 | 21.277 |
| FEBRA1000138 | 0 | 0 | 0 | 0 | 0 | 0 | 100 |
| FEBRA1000148 | 0 | 0 | 0 | 0 | 0 | 0 | 100 |
| FEBRA1000149 | 0 | 0 | 0 | 0 | 0 | 0 | 100 |
| FEBRA1000183 | 0 | 0 | 0 | 0 | 0 | 0 | 100 |
| FEBRA1000188 | 0 | 0 | 0 | 0 | 0 | 38.663 | 15.651 |
| FEBRA1000189 | 0 | 0 | 0 | 0 | 0 | 0 | 50.538 |
| FEBRA1000190 | 0 | 0 | 0 | 0 | 0 | 0 | 19.812 |
| FEBRA2000007 | 0 | 0 | 0 | 0 | 0 | 0 | 59.033 |
| FEBRA2000021 | 0 | 0 | 0 | 0 | 0 | 0 | 100 |
| FEBRA2000035 | 0 | 0 | 0 | 0 | 0 | 0 | 100 |
| FEBRA2000053 | 0 | 0 | 0 | 0 | 0 | 13.028 | 35.160 |
| FEBRA2000105 | 0 | 0 | 0 | 0 | 0 | 0 | 1.788 |
| FEBRA2000126 | 0 | 0 | 0 | 0 | 0 | 0 | 100 |
| FEBRA2000129 | 0 | 0 | 0 | 0 | 0 | 0 | 6.480 |
| FEBRA2000210 | 0 | 0 | 0 | 0 | 0 | 1.306 | 3.524 |
| FEBRA2000220 | 0 | 0 | 0 | 0 | 0 | 0 | 100 |
| FEBRA2000228 | 0 | 0 | 0 | 0 | 0 | 7.297 | 39.387 |
| FEBRA2000253 | 0 | 0 | 0 | 0 | 0 | 0 | 36.491 |
| FEBRA2000282 | 0 | 0 | 0 | 0 | 0 | 0 | 79.225 |
| FEBRA2000286 | 0 | 0 | 0 | 0 | 0 | 0 | 100 |
| FEBRA2000297 | 0 | 0 | 0 | 0 | 0 | 14.651 | 19.769 |
| FEBRA2000311 | 0 | 0 | 0 | 0 | 0 | 0 | 24.958 |
| FEBRA2000321 | 0 | 0 | 0 | 0 | 0 | 0 | 100 |
| FEBRA2000333 | 0 | 0 | 0 | 0 | 0 | 0 | 69.211 |
| FEBRA2000377 | 0 | 0 | 0 | 0 | 0 | 18.481 | 24.938 |
| FEBRA2000378 | 0 | 0 | 0 | 0 | 0 | 0 | 100 |
| FEBRA2000391 | 0 | 0 | 0 | 0 | 0 | 0 | 100 |
| FEBRA2000394 | 0 | 0 | 0 | 0 | 0 | 0 | 100 |
| FEBRA2000397 | 0 | 0 | 0 | 0 | 0 | 0 | 28.982 |
| FEBRA2000399 | 0 | 0 | 0 | 0 | 0 | 0 | 100 |
| FEBRA2000402 | 0 | 0 | 0 | 0 | 0 | 10.239 | 13.817 |
| FEBRA2000404 | 0 | 0 | 0 | 0 | 0 | 0 | 25.082 |
| FEBRA2000409 | 0 | 0 | 0 | 0 | 0 | 0 | 100 |
| FEBRA2000415 | 0 | 0 | 0 | 0 | 0 | 0 | 100 |
| FEBRA2000436 | 0 | 0 | 0 | 0 | 0 | 0 | 100 |
| FEBRA2000438 | 0 | 0 | 0 | 0 | 0 | 0 | 22.025 |
| FEBRA2000452 | 0 | 0 | 0 | 0 | 0 | 12.970 | 7.501 |
| FEBRA2000454 | 0 | 0 | 0 | 0 | 0 | 0 | 74.935 |
| FEBRA2000462 | 0 | 0 | 0 | 0 | 0 | 5.215 | 7.037 |
| FEBRA2000468 | 0 | 0 | 0 | 0 | 0 | 0 | 100 |
| FEBRA2000491 | 0 | 0 | 0 | 0 | 0 | 0 | 100 |
| FEBRA2000504 | 0 | 0 | 0 | 0 | 0 | 0 | 100 |
| FEBRA2000510 | 0 | 0 | 0 | 0 | 0 | 6.817 | 9.198 |
| FEBRA2000532 | 0 | 0 | 0 | 0 | 0 | 0 | 7.972 |
| FEBRA2000536 | 0 | 0 | 0 | 0 | 0 | 5.819 | 15.704 |
| FEBRA2000538 | 0 | 0 | 0 | 0 | 0 | 0 | 40.112 |
| FEBRA2000575 | 0 | 0 | 0 | 0 | 0 | 0 | 100 |
| FEBRA2000581 | 0 | 0 | 0 | 0 | 0 | 11.757 | 3.966 |
| FEBRA2000656 | 0 | 0 | 0 | 0 | 0 | 0 | 100 |
| FEBRA2000659 | 0 | 0 | 0 | 0 | 0 | 0 | 100 |
| FEBRA2000680 | 0 | 0 | 0 | 0 | 0 | 0 | 23.429 |
| FEBRA2000690 | 0 | 0 | 0 | 0 | 0 | 0 | 100 |
| FEBRA2000727 | 0 | 0 | 0 | 0 | 0 | 0 | 100 |
| FEBRA2000733 | 0 | 0 | 0 | 0 | 4.618 | 0 | 0.840 |
| FEBRA2000734 | 0 | 0 | 0 | 0 | 0 | 0 | 100 |
| FEBRA2000740 | 0 | 0 | 0 | 0 | 0 | 2.089 | 2.819 |
| FEBRA2000757 | 0 | 0 | 0 | 0 | 0 | 16.972 | 7.634 |
| FEBRA2000762 | 0 | 0 | 0 | 0 | 0 | 0 | 15.507 |
| FEBRA2000771 | 0 | 0 | 0 | 0 | 0 | 0 | 54.082 |
| FEBRA2000772 | 0 | 0 | 0 | 0 | 0 | 0 | 21.324 |
| FEBRA2000782 | 0 | 0 | 0 | 0 | 0 | 0 | 63.717 |
| FEBRA2000787 | 0 | 0 | 0 | 0 | 0 | 3.649 | 4.924 |
| FEBRA2000790 | 0 | 0 | 0 | 0 | 0 | 0 | 100 |
| FEBRA2000793 | 0 | 0 | 0 | 0 | 0 | 7.085 | 57.358 |
| FEBRA2000803 | 0 | 0 | 0 | 0 | 0 | 0 | 100 |
| FEBRA2000805 | 0 | 0 | 0 | 0 | 0 | 0 | 100 |
| FEBRA2000809 | 0 | 0 | 0 | 0 | 0 | 0 | 100 |
| FEBRA2000815 | 0 | 0 | 0 | 0 | 0 | 20.036 | 27.036 |
| FEBRA2000856 | 0 | 0 | 0 | 0 | 0 | 0 | 39.568 |
| FEBRA2000862 | 0 | 0 | 0 | 0 | 0 | 0 | 100 |
| FEBRA2000877 | 0 | 0 | 0 | 0 | 0 | 0 | 35.466 |
| FEBRA2000880 | 0 | 0 | 0 | 0 | 0 | 0 | 26.417 |
| FEBRA2000881 | 0 | 0 | 0 | 0 | 0 | 0 | 7.891 |
| FEBRA2000901 | 0 | 0 | 0 | 0 | 0 | 0 | 25.894 |
| FEBRA2000909 | 0 | 0 | 0 | 0 | 0 | 0 | 100 |
| FEBRA2000917 | 0 | 0 | 0 | 0 | 0 | 0 | 100 |
| FEBRA2000928 | 0 | 0 | 0 | 0 | 0 | 0 | 100 |
| FEBRA2000936 | 0 | 0 | 0 | 0 | 0 | 0 | 100 |
| FEBRA2000937 | 0 | 0 | 0 | 0 | 0 | 0 | 100 |
| FEBRA2000959 | 0 | 0 | 0 | 0 | 0 | 0 | 100 |
| FEBRA2000972 | 0 | 0 | 0 | 0 | 0 | 0 | 37.761 |
| FEBRA2001004 | 0 | 0 | 0 | 0 | 0 | 0 | 55.143 |
| FEBRA2001012 | 0 | 0 | 0 | 0 | 0 | 0 | 100 |
| FEBRA2001020 | 0 | 0 | 0 | 0 | 0 | 0 | 100 |
| FEBRA2001093 | 0 | 0 | 0 | 0 | 0 | 0 | 100 |
| FEBRA2001124 | 0 | 0 | 0 | 0 | 0 | 0 | 100 |
| FEBRA2001133 | 0 | 0 | 0 | 0 | 0 | 0 | 79.225 |
| FEBRA2001146 | 0 | 0 | 0 | 0 | 0 | 0 | 27.877 |
| FEBRA2001161 | 0 | 0 | 0 | 0 | 0 | 0 | 100 |
| FEBRA2001175 | 0 | 0 | 0 | 0 | 0 | 0 | 100 |
| FEBRA2001197 | 0 | 0 | 0 | 0 | 0 | 0 | 35.141 |
| FEBRA2001217 | 0 | 0 | 0 | 0 | 0 | 0 | 100 |
| FEBRA2001227 | 0 | 0 | 0 | 0 | 0 | 13.661 | 27.650 |
| FEBRA2001245 | 0 | 0 | 0 | 0 | 0 | 9.320 | 6.288 |
| FEBRA2001267 | 0 | 0 | 0 | 0 | 0 | 0 | 100 |
| FEBRA2001294 | 28.213 | 0 | 0 | 14.242 | 0 | 0 | 6.024 |
| FEBRA2001334 | 0 | 0 | 0 | 0 | 0 | 10.624 | 14.336 |
| FEBRA2001351 | 0 | 0 | 0 | 0 | 0 | 0 | 100 |
| FEBRA2001383 | 0 | 0 | 0 | 0 | 0 | 19.272 | 26.005 |
| FEBRA2001438 | 0 | 0 | 0 | 0 | 0 | 0 | 100 |
| FEBRA2001440 | 0 | 0 | 0 | 0 | 0 | 0 | 58.031 |
| FEBRA2001487 | 0 | 0 | 0 | 0 | 0 | 0 | 100 |
| FEBRA2001492 | 0 | 0 | 0 | 0 | 0 | 5.979 | 8.068 |
| FEBRA2001523 | 0 | 0 | 0 | 0 | 0 | 0 | 21.196 |
| FEBRA2001561 | 0 | 0 | 0 | 0 | 0 | 0 | 100 |
| FEBRA2001571 | 0 | 0 | 0 | 0 | 0 | 3.874 | 20.911 |
| FEBRA2001581 | 0 | 0 | 0 | 0 | 0 | 7.575 | 20.443 |
| FEBRA2001584 | 0 | 0 | 0 | 0 | 0 | 0 | 100 |
| FEBRA2001590 | 0 | 0 | 0 | 0 | 0 | 0 | 100 |
| FEBRA2001591 | 0 | 0 | 0 | 0 | 0 | 37.743 | 50.929 |
| FEBRA2001610 | 0 | 0 | 0 | 0 | 0 | 0 | 100 |
| FEBRA2001620 | 0 | 0 | 0 | 0 | 0 | 0 | 100 |
| FEBRA2001659 | 0 | 0 | 0 | 0 | 0 | 0 | 100 |
| FEBRA2001669 | 0 | 0 | 0 | 0 | 0 | 5.937 | 13.353 |
| FEBRA2001698 | 0 | 0 | 0 | 0 | 0 | 0 | 30.346 |
| FEBRA2001705 | 0 | 0 | 0 | 0 | 0 | 0 | 100 |
| FEBRA2001706 | 0 | 0 | 0 | 0 | 0 | 0 | 71.370 |
| FEBRA2001715 | 0 | 0 | 0 | 0 | 0 | 1.842 | 2.486 |
| FEBRA2001745 | 0 | 0 | 0 | 0 | 0 | 6.946 | 6.248 |
| FEBRA2001752 | 0 | 0 | 0 | 0 | 0 | 0 | 78.526 |
| FEBRA2001772 | 0 | 0 | 0 | 0 | 0 | 0 | 100 |
| FEBRA2001790 | 0 | 0 | 0 | 0 | 0 | 0 | 100 |
| FEBRA2001814 | 0 | 0 | 0 | 0 | 0 | 2.444 | 16.490 |
| FEBRA2001828 | 0 | 0 | 0 | 0 | 0 | 0 | 27.125 |
| FEBRA2001867 | 0 | 0 | 0 | 0 | 0 | 13.694 | 18.478 |
| FEBRA2001914 | 0 | 0 | 0 | 0 | 0 | 0 | 100 |
| FEBRA2001974 | 0 | 0 | 0 | 0 | 0 | 0 | 29.046 |
| FEBRA2001989 | 0 | 0 | 0 | 0 | 0 | 0 | 74.935 |
| FEBRA2001990 | 0 | 0 | 0 | 0 | 0 | 0 | 9.046 |
| FEBRA2002009 | 0 | 0 | 0 | 0 | 0 | 0 | 100 |
| FEBRA2002027 | 0 | 0 | 0 | 0 | 0 | 0 | 44.210 |
| FEBRA2002086 | 0 | 0 | 0 | 0 | 0 | 0 | 100 |
| FEBRA2002109 | 0 | 0 | 0 | 0 | 0 | 0 | 100 |
| FEBRA2002191 | 68.584 | 0 | 0 | 0 | 0 | 10.853 | 14.644 |
| FEBRA2002260 | 0 | 0 | 0 | 0 | 0 | 0 | 100 |
| FEBRA2002352 | 0 | 0 | 0 | 0 | 0 | 0 | 17.307 |
| FEBRA2002399 | 0 | 0 | 0 | 0 | 0 | 0 | 100 |
| FEBRA2002410 | 0 | 0 | 0 | 0 | 0 | 0 | 66.741 |
| FEBRA2002429 | 0 | 0 | 0 | 0 | 0 | 0 | 9.761 |
| FEBRA2002442 | 0 | 0 | 0 | 0 | 0 | 0 | 52.075 |
| FEBRA2002456 | 0 | 0 | 0 | 0 | 0 | 18.135 | 8.157 |
| FEBRA2002508 | 0 | 0 | 0 | 0 | 0 | 0 | 100 |
| FEBRA2002525 | 0 | 0 | 0 | 0 | 0 | 0 | 66.741 |
| FEBRA2002527 | 0 | 0 | 0 | 0 | 0 | 0 | 7.139 |
| FEBRA2002552 | 0 | 0 | 0 | 0 | 0 | 0 | 100 |
| FEBRA2002574 | 0 | 0 | 0 | 0 | 0 | 0 | 74.935 |
| FEBRA2002601 | 0 | 0 | 0 | 0 | 0 | 0 | 26.611 |
| FEBRA2002611 | 0 | 0 | 0 | 0 | 0 | 0 | 54.171 |
| FEBRA2002628 | 0 | 0 | 0 | 0 | 0 | 0 | 100 |
| FEBRA2002662 | 0 | 0 | 0 | 0 | 0 | 0 | 100 |
| FEBRA2002682 | 0 | 0 | 0 | 0 | 0 | 0 | 66.741 |
| FEBRA2002707 | 0 | 0 | 0 | 0 | 0 | 6.657 | 8.982 |
| FEBRA2002727 | 0 | 0 | 0 | 0 | 0 | 0 | 100 |
| FEBRA2002781 | 0 | 0 | 0 | 0 | 0 | 0 | 17.057 |
| FEBRA2002783 | 0 | 0 | 0 | 0 | 0 | 0 | 100 |
| FEBRA2002792 | 0 | 0 | 0 | 0 | 0 | 0 | 6.673 |
| FEBRA2002818 | 0 | 0 | 0 | 0 | 0 | 0 | 100 |
| FEBRA2002858 | 0 | 0 | 0 | 0 | 0 | 0 | 100 |
| FEBRA2002882 | 0 | 0 | 0 | 0 | 0 | 0 | 100 |
| FEBRA2002897 | 0 | 0 | 0 | 0 | 0 | 0 | 100 |
| FEBRA2002908 | 0 | 0 | 0 | 0 | 0 | 0 | 100 |
| FEBRA2002931 | 0 | 0 | 0 | 0 | 0 | 0 | 5.456 |
| FEBRA2002933 | 0 | 0 | 0 | 0 | 0 | 0.684 | 0.923 |
| FEBRA2002962 | 0 | 0 | 0 | 0 | 0 | 0 | 100 |
| FEBRA2002986 | 0 | 0 | 0 | 0 | 0 | 0 | 100 |
| FEBRA2003054 | 0 | 0 | 0 | 0 | 0 | 0 | 100 |
| FEBRA2003100 | 0 | 0 | 0 | 0 | 0 | 4.867 | 6.567 |
| FEBRA2003115 | 0 | 0 | 0 | 0 | 0 | 0 | 54.040 |
| FEBRA2003128 | 0 | 0 | 0 | 0 | 0 | 0 | 14.503 |
| FEBRA2003155 | 0 | 0 | 0 | 0 | 0 | 0 | 100 |
| FEBRA2003163 | 0 | 0 | 0 | 0 | 0 | 0 | 100 |
| FEBRA2003181 | 0 | 0 | 0 | 0 | 0 | 0 | 74.935 |
| FEBRA2003198 | 0 | 0 | 0 | 0 | 0 | 0 | 66.741 |
| FEBRA2003253 | 0 | 0 | 0 | 0 | 0 | 0 | 100 |
| FEBRA2003258 | 0 | 0 | 0 | 0 | 0 | 5.227 | 21.158 |
| FEBRA2003275 | 0 | 0 | 0 | 0 | 0 | 0 | 100 |
| FEBRA2003308 | 0 | 0 | 0 | 0 | 0 | 0 | 100 |
| FEBRA2003327 | 0 | 0 | 0 | 0 | 0 | 0 | 100 |
| FEBRA2003429 | 0 | 0 | 0 | 0 | 0 | 0 | 100 |
| FEBRA2003436 | 0 | 0 | 0 | 0 | 0 | 10.270 | 13.858 |
| FEBRA2003454 | 0 | 0 | 0 | 0 | 0 | 0 | 100 |
| FEBRA2003468 | 0 | 0 | 0 | 0 | 0 | 0 | 100 |
| FEBRA2003470 | 0 | 0 | 0 | 0 | 0 | 0 | 36.383 |
| FEBRA2003520 | 0 | 0 | 0 | 0 | 0 | 0 | 100 |
| FEBRA2003524 | 0 | 0 | 0 | 0 | 0 | 0 | 25.471 |
| FEBRA2003541 | 0 | 0 | 0 | 0 | 0 | 0 | 26.627 |
| FEBRA2003675 | 0 | 0 | 0 | 0 | 0 | 0 | 100 |
| FEBRA2003707 | 0 | 0 | 0 | 0 | 0 | 0 | 52.075 |
| FEBRA2003711 | 0 | 0 | 0 | 0 | 0 | 0 | 100 |
| FEBRA2003726 | 0 | 0 | 0 | 0 | 0 | 0 | 2.482 |
| FEBRA2003750 | 0 | 0 | 0 | 0 | 0 | 0 | 9.102 |
| FEBRA2003822 | 0 | 0 | 0 | 0 | 0 | 0 | 13.711 |
| FEBRA2003833 | 0 | 0 | 0 | 0 | 0 | 0 | 8.621 |
| FEBRA2003897 | 0 | 0 | 0 | 0 | 0 | 0 | 100 |
| FEBRA2003907 | 0 | 0 | 0 | 0 | 0 | 0 | 77.838 |
| FEBRA2003926 | 0 | 0 | 0 | 0 | 0 | 0 | 1.740 |
| FEBRA2003930 | 0 | 0 | 0 | 0 | 0 | 3.320 | 13.441 |
| FEBRA2004023 | 0 | 0 | 0 | 0 | 0 | 0 | 79.225 |
| FEBRA2004026 | 0 | 0 | 0 | 0 | 0 | 0 | 100 |
| FEBRA2004029 | 0 | 0 | 0 | 0 | 0 | 0 | 100 |
| FEBRA2004042 | 0 | 0 | 0 | 0 | 0 | 7.838 | 5.288 |
| FEBRA2004053 | 0 | 0 | 0 | 0 | 0 | 0 | 100 |
| FEBRA2004056 | 0 | 0 | 0 | 0 | 0 | 0 | 100 |
| FEBRA2004091 | 0 | 0 | 0 | 0 | 0 | 0 | 26.345 |
| FEBRA2004110 | 0 | 0 | 0 | 0 | 0 | 0 | 66.741 |
| FEBRA2004191 | 0 | 0 | 0 | 0 | 0 | 0 | 49.437 |
| FEBRA2004202 | 0 | 0 | 0 | 0 | 0 | 0 | 100 |
| FEBRA2004219 | 0 | 0 | 0 | 0 | 0 | 0 | 70.959 |
| FEBRA2004224 | 0 | 0 | 0 | 0 | 0 | 0 | 2.886 |
| FEBRA2004237 | 0 | 0 | 0 | 0 | 0 | 0 | 46.754 |
| FEBRA2004268 | 0 | 0 | 0 | 0 | 0 | 0 | 87.538 |
| FEBRA2004293 | 0 | 0 | 0 | 0 | 0 | 4.911 | 13.254 |
| FEBRA2004325 | 0 | 0 | 0 | 0 | 0 | 6.507 | 8.780 |
| FEBRA2004329 | 0 | 0 | 0 | 0 | 0 | 0 | 100 |
| FEBRA2004331 | 0 | 0 | 0 | 0 | 0 | 0 | 74.935 |
| FEBRA2004412 | 0 | 0 | 0 | 0 | 0 | 27.120 | 14.638 |
| FEBRA2004443 | 0 | 0 | 0 | 0 | 0 | 0 | 100 |
| FEBRA2004485 | 0 | 0 | 0 | 0 | 0 | 0 | 17.301 |
| FEBRA2004490 | 0 | 0 | 0 | 0 | 0 | 0 | 70.274 |
| FEBRA2004538 | 0 | 0 | 0 | 0 | 0 | 0 | 100 |
| FEBRA2004592 | 0 | 0 | 0 | 0 | 0 | 0 | 40.112 |
| FEBRA2004620 | 0 | 0 | 0 | 0 | 0 | 0 | 24.429 |
| FEBRA2004628 | 0 | 0 | 0 | 0 | 0 | 0 | 7.111 |
| FEBRA2004651 | 0 | 0 | 0 | 0 | 0 | 0 | 100 |
| FEBRA2004767 | 0 | 0 | 0 | 0 | 0 | 0 | 63.717 |
| FEBRA2004813 | 0 | 0 | 0 | 0 | 0 | 0 | 100 |
| FEBRA2004818 | 0 | 0 | 0 | 0 | 0 | 2.516 | 3.395 |
| FEBRA2004840 | 0 | 0 | 0 | 0 | 0 | 0 | 100 |
| FEBRA2004852 | 0 | 0 | 0 | 0 | 0 | 0 | 67.639 |
| FEBRA2004867 | 0 | 0 | 0 | 0 | 0 | 0 | 100 |
| FEBRA2004914 | 0 | 0 | 0 | 0 | 0 | 0 | 100 |
| FEBRA2004933 | 0 | 0 | 0 | 0 | 0 | 0 | 100 |
| FEBRA2004987 | 0 | 0 | 0 | 0 | 0 | 0 | 100 |
| FEBRA2005014 | 0 | 0 | 0 | 0 | 0 | 0 | 100 |
| FEBRA2005036 | 0 | 0 | 0 | 0 | 0 | 0 | 100 |
| FEBRA2005079 | 0 | 0 | 0 | 0 | 0 | 0 | 83.188 |
| FEBRA2005114 | 0 | 0 | 0 | 0 | 0 | 12.397 | 16.727 |
| FEBRA2005216 | 0 | 0 | 0 | 0 | 0 | 0 | 100 |
| FEBRA2005291 | 0 | 0 | 0 | 0 | 0 | 0 | 9.040 |
| FEBRA2005361 | 0 | 0 | 0 | 0 | 0 | 5.176 | 17.460 |
| FEBRA2005377 | 0 | 0 | 0 | 0 | 0 | 0 | 100 |
| FEBRA2005380 | 0 | 0 | 0 | 0 | 0 | 0 | 100 |
| FEBRA2005416 | 0 | 0 | 0 | 0 | 29.427 | 0 | 2.677 |
| FEBRA2005427 | 0 | 0 | 0 | 0 | 0 | 0 | 71.370 |
| FEBRA2005458 | 0 | 0 | 0 | 0 | 0 | 0 | 100 |
| FEBRA2005476 | 0 | 0 | 0 | 0 | 0 | 0 | 12.986 |
| FEBRA2005572 | 0 | 0 | 0 | 0 | 0 | 3.292 | 4.442 |
| FEBRA2005701 | 0 | 0 | 0 | 0 | 0 | 0 | 100 |
| FEBRA2005726 | 0 | 0 | 0 | 0 | 0 | 0 | 100 |
| FEBRA2005734 | 0 | 0 | 0 | 0 | 23.137 | 0 | 2.105 |
| FEBRA2005752 | 0 | 0 | 0 | 0 | 0 | 0 | 10.376 |
| FEBRA2005778 | 0 | 0 | 0 | 0 | 0 | 11.083 | 14.955 |
| FEBRA2005787 | 0 | 0 | 0 | 0 | 0 | 0 | 74.935 |
| FEBRA2005788 | 0 | 0 | 0 | 0 | 0 | 18.236 | 12.303 |
| FEBRA2005824 | 0 | 0 | 0 | 0 | 0 | 1.378 | 0.930 |
| FEBRA2005995 | 0 | 0 | 0 | 0 | 0 | 12.949 | 10.484 |
| FEBRA2005998 | 0 | 0 | 0 | 0 | 0 | 0 | 100 |
| FEBRA2006055 | 0 | 0 | 0 | 0 | 0 | 0 | 13.169 |
| FEBRA2006061 | 0 | 0 | 0 | 0 | 0 | 0 | 100 |
| FEBRA2006092 | 0 | 0 | 0 | 3.664 | 0 | 4.595 | 3.100 |
| FEBRA2006112 | 0 | 0 | 0 | 0 | 0 | 0 | 16.454 |
| FEBRA2006150 | 0 | 0 | 0 | 0 | 0 | 0 | 100 |
| FEBRA2006165 | 0 | 0 | 0 | 0 | 0 | 0 | 100 |
| FEBRA2006255 | 0 | 0 | 0 | 0 | 0 | 14.444 | 12.993 |
| FEBRA2006270 | 0 | 0 | 15.763 | 13.779 | 0 | 0 | 2.914 |
| FEBRA2006315 | 0 | 0 | 0 | 0 | 0 | 0 | 100 |
| FEBRA2006346 | 0 | 0 | 0 | 0 | 0 | 0 | 37.034 |
| FEBRA2006354 | 0 | 0 | 0 | 0 | 0 | 0 | 100 |
| FEBRA2006357 | 0 | 0 | 0 | 0 | 0 | 2.447 | 1.651 |
| FEBRA2006368 | 0 | 0 | 0 | 0 | 0 | 11.481 | 15.492 |
| FEBRA2006370 | 0 | 0 | 0 | 0 | 0 | 0 | 35.615 |
| FEBRA2006372 | 0 | 0 | 0 | 0 | 0 | 0 | 13.392 |
| FEBRA2006379 | 0 | 0 | 0 | 0 | 0 | 0 | 100 |
| FEBRA2006396 | 0 | 0 | 0 | 0 | 0 | 29.698 | 20.037 |
| FEBRA2006401 | 0 | 0 | 0 | 0 | 0 | 1.391 | 1.251 |
| FEBRA2006409 | 0 | 0 | 0 | 0 | 0 | 0 | 100 |
| FEBRA2006418 | 0 | 0 | 0 | 0 | 0 | 0 | 100 |
| FEBRA2006427 | 0 | 0 | 0 | 0 | 0 | 0 | 100 |
| FEBRA2006476 | 0 | 0 | 0 | 0 | 0 | 0 | 100 |
| FEBRA2006485 | 0 | 0 | 0 | 0 | 0 | 5.620 | 7.583 |
| FEBRA2006491 | 0 | 0 | 0 | 0 | 0 | 0 | 37.019 |
| FEBRA2006519 | 0 | 0 | 0 | 0 | 0 | 0 | 29.644 |
| FEBRA2006521 | 0 | 0 | 0 | 0 | 0 | 28.259 | 19.066 |
| FEBRA2006553 | 0 | 0 | 0 | 0 | 0 | 21.927 | 9.862 |
| FEBRA2006627 | 0 | 0 | 0 | 0 | 0 | 38.121 | 25.719 |
| FEBRA2006664 | 0 | 0 | 0 | 0 | 0 | 0 | 79.225 |
| FEBRA2006667 | 0 | 0 | 0 | 0 | 0 | 0 | 100 |
| FEBRA2006726 | 0 | 0 | 0 | 0 | 0 | 0 | 100 |
| FEBRA2006736 | 0 | 0 | 0 | 0 | 0 | 0 | 37.034 |
| FEBRA2006793 | 0 | 0 | 0 | 0 | 0 | 0 | 100 |
| FEBRA2006808 | 0 | 0 | 0 | 0 | 0 | 7.584 | 40.932 |
| FEBRA2006817 | 0 | 0 | 0 | 0 | 0 | 0 | 40.876 |
| FEBRA2006873 | 0 | 0 | 0 | 0 | 0 | 0 | 11.194 |
| FEBRA2006890 | 0 | 0 | 0 | 0 | 0 | 0 | 55.485 |
| FEBRA2006942 | 0 | 0 | 0 | 0 | 0 | 0 | 100 |
| FEBRA2006977 | 0 | 0 | 0 | 0 | 0 | 0 | 100 |
| FEBRA2007017 | 0 | 0 | 0 | 0 | 0 | 0 | 40.825 |
| FEBRA2007176 | 0 | 0 | 0 | 0 | 0 | 0 | 71.370 |
| FEBRA2007200 | 0 | 0 | 0 | 0 | 0 | 0 | 79.225 |
| FEBRA2007212 | 0 | 0 | 0 | 0 | 0 | 0 | 9.786 |
| FEBRA2007247 | 0 | 0 | 0 | 70.274 | 0 | 0 | 29.726 |
| FEBRA2007280 | 0 | 0 | 0 | 0 | 0 | 0 | 100 |
| FEBRA2007414 | 0 | 0 | 0 | 0 | 0 | 0 | 100 |
| FEBRA2007436 | 0 | 0 | 0 | 0 | 0 | 0 | 100 |
| FEBRA2007449 | 0 | 0 | 0 | 0 | 0 | 0 | 100 |
| FEBRA2007458 | 0 | 0 | 0 | 0 | 0 | 15.061 | 20.323 |
| FEBRA2007534 | 0 | 0 | 0 | 0 | 0 | 0 | 44.990 |
| FEBRA2007544 | 0 | 0 | 0 | 0 | 0 | 4.523 | 12.206 |
| FEBRA2007551 | 0 | 0 | 0 | 0 | 0 | 0 | 69.211 |
| FEBRA2007566 | 0 | 0 | 0 | 0 | 0 | 0 | 100 |
| FEBRA2007589 | 0 | 0 | 0 | 0 | 0 | 0 | 17.044 |
| FEBRA2007613 | 0 | 0 | 0 | 0 | 0 | 12.261 | 8.272 |
| FEBRA2007620 | 0 | 0 | 0 | 0 | 0 | 0 | 79.225 |
| FEBRA2007622 | 0 | 0 | 0 | 0 | 28.270 | 3.812 | 2.572 |
| FEBRA2007708 | 0 | 0 | 0 | 0 | 0 | 0 | 21.306 |
| FEBRA2007714 | 0 | 0 | 0 | 0 | 0 | 15.415 | 20.800 |
| FEBRA2007793 | 0 | 0 | 0 | 0 | 0 | 0 | 50.083 |
| FEBRA2007801 | 0 | 0 | 0 | 0 | 0 | 4.561 | 6.154 |
| FEBRA2007818 | 0 | 0 | 0 | 0 | 0 | 0 | 13.940 |
| FEBRA2007823 | 0 | 0 | 0 | 0 | 0 | 0 | 71.370 |
| FEBRA2007880 | 0 | 0 | 0 | 0 | 0 | 0 | 18.765 |
| FEBRA2007900 | 0 | 0 | 0 | 0 | 0 | 0 | 19.322 |
| FEBRA2007901 | 0 | 0 | 49.976 | 0 | 0 | 0 | 9.239 |
| FEBRA2007931 | 0 | 0 | 0 | 0 | 0 | 0 | 100 |
| FEBRA2007957 | 0 | 0 | 0 | 0 | 0 | 0 | 45.384 |
| FEBRA2008009 | 0 | 0 | 0 | 0 | 0 | 0 | 100 |
| FEBRA2008036 | 0 | 0 | 0 | 0 | 0 | 2.639 | 24.924 |
| FEBRA2008081 | 0 | 0 | 0 | 0 | 0 | 1.308 | 3.531 |
| FEBRA2008086 | 0 | 0 | 0 | 0 | 0 | 0 | 69.211 |
| FEBRA2008087 | 2.093 | 0 | 0 | 0 | 0 | 0 | 1.341 |
| FEBRA2008134 | 0 | 0 | 0 | 0 | 0 | 0 | 71.215 |
| FEBRA2008135 | 0 | 0 | 0 | 0 | 0 | 0 | 100 |
| FEBRA2008159 | 0 | 0 | 0 | 0 | 0 | 0 | 77.838 |
| FEBRA2008165 | 0 | 0 | 0 | 0 | 0 | 0 | 100 |
| FEBRA2008172 | 0 | 0 | 0 | 0 | 0 | 0 | 100 |
| FEBRA2008201 | 0 | 0 | 0 | 0 | 0 | 0 | 5.978 |
| FEBRA2008210 | 0 | 0 | 0 | 0 | 0 | 0 | 16.720 |
| FEBRA2008255 | 0 | 0 | 0 | 0 | 0 | 0 | 12.615 |
| FEBRA2008265 | 0 | 0 | 0 | 0 | 0 | 0 | 40.825 |
| FEBRA2008266 | 0 | 0 | 0 | 0 | 0 | 0 | 22.652 |
| FEBRA2008282 | 0 | 0 | 0 | 0 | 0 | 0 | 100 |
| FEBRA2008287 | 0 | 0 | 0 | 0 | 0 | 0 | 7.348 |
| FEBRA2008302 | 12.424 | 0 | 0 | 0 | 0 | 0 | 5.306 |
| FEBRA2008311 | 0 | 0 | 0 | 0 | 0 | 0 | 100 |
| FEBRA2008341 | 0 | 0 | 0 | 0 | 0 | 0 | 16.375 |
| FEBRA2008360 | 0 | 0 | 0 | 0 | 0 | 37.775 | 25.486 |
| FEBRA2008459 | 0 | 0 | 0 | 0 | 0 | 0 | 71.215 |
| FEBRA2008468 | 0 | 0 | 0 | 0 | 0 | 0 | 100 |
| FEBRA2008475 | 0 | 0 | 0 | 0 | 0 | 0 | 42.067 |
| FEBRA2008481 | 0 | 0 | 0 | 0 | 0 | 0 | 100 |
| FEBRA2008542 | 0 | 0 | 0 | 0 | 0 | 0 | 100 |
| FEBRA2008583 | 0 | 0 | 0 | 0.779 | 0 | 5.128 | 5.931 |
| FEBRA2008660 | 0 | 0 | 0 | 0 | 0 | 0 | 100 |
| FEBRA2008662 | 0 | 0 | 0 | 0 | 0 | 5.865 | 11.870 |
| FEBRA2008681 | 0 | 0 | 0 | 0 | 0 | 0 | 100 |
| FEBRA2008692 | 0 | 0 | 0 | 0 | 0 | 0 | 6.116 |
| FEBRA2008741 | 0 | 0 | 0 | 0 | 0 | 0 | 100 |
| FEBRA2008755 | 0 | 0 | 0 | 0 | 0 | 0 | 4.095 |
| FEBRA2008836 | 0 | 0 | 0 | 0 | 0 | 0 | 79.225 |
| FEBRA2008859 | 0 | 0 | 0 | 0 | 0 | 0 | 77.838 |
| FEBRA2008861 | 0 | 0 | 0 | 0 | 0 | 10.794 | 14.565 |
| FEBRA2008866 | 0 | 0 | 0 | 0 | 0 | 0 | 100 |
| FEBRA2008881 | 0 | 0 | 0 | 0 | 0 | 0 | 100 |
| FEBRA2008928 | 0 | 0 | 0 | 0 | 0 | 0 | 77.838 |
| FEBRA2008983 | 0 | 0 | 0 | 0 | 0 | 0 | 100 |
| FEBRA2009016 | 0 | 0 | 0 | 0 | 0 | 0 | 100 |
| FEBRA2009022 | 0 | 0 | 0 | 0 | 0 | 0 | 8.325 |
| FEBRA2009029 | 0 | 0 | 0 | 0 | 0 | 0 | 100 |
| FEBRA2009074 | 0 | 0 | 0 | 0 | 0 | 0 | 100 |
| FEBRA2009117 | 0 | 0 | 0 | 0 | 0 | 0 | 100 |
| FEBRA2009120 | 0 | 0 | 0 | 0 | 0 | 0 | 100 |
| FEBRA2009162 | 0 | 0 | 0 | 0 | 0 | 0 | 100 |
| FEBRA2009185 | 0 | 0 | 0 | 0 | 0 | 0 | 11.324 |
| FEBRA2009240 | 0 | 0 | 0 | 0 | 0 | 0 | 100 |
| FEBRA2009265 | 0 | 0 | 0 | 0 | 0 | 0 | 100 |
| FEBRA2009276 | 0 | 0 | 0 | 0 | 0 | 0 | 58.346 |
| FEBRA2009289 | 0 | 0 | 0 | 0 | 0 | 0 | 34.980 |
| FEBRA2009327 | 0 | 0 | 0 | 0 | 0 | 0 | 100 |
| FEBRA2009328 | 0 | 0 | 0 | 0 | 0 | 0 | 12.353 |
| FEBRA2009352 | 0 | 0 | 0 | 0 | 0 | 0 | 70.959 |
| FEBRA2009362 | 0 | 0 | 0 | 0 | 0 | 0 | 37.960 |
| FEBRA2009385 | 0 | 0 | 0 | 0 | 0 | 0 | 100 |
| FEBRA2009416 | 0 | 0 | 0 | 0 | 0 | 0 | 100 |
| FEBRA2009419 | 0 | 0 | 0 | 0 | 0 | 4.882 | 3.294 |
| FEBRA2009437 | 0 | 0 | 0 | 0 | 0 | 0 | 9.084 |
| FEBRA2009478 | 0 | 0 | 0 | 0 | 0 | 0 | 100 |
| FEBRA2009507 | 0 | 0 | 0 | 0 | 0 | 0 | 100 |
| FEBRA2009514 | 0 | 0 | 0 | 0 | 0 | 12.239 | 24.772 |
| FEBRA2009541 | 0 | 0 | 0 | 0 | 0 | 0 | 41.464 |
| FEBRA2009567 | 0 | 0 | 0 | 0 | 0 | 0 | 100 |
| FEBRA2009588 | 0 | 0 | 0 | 0 | 0 | 8.952 | 24.158 |
| FEBRA2009731 | 0 | 0 | 0 | 0 | 0 | 0 | 100 |
| FEBRA2009754 | 0 | 0 | 0 | 0 | 0 | 0 | 100 |
| FEBRA2009780 | 0 | 0 | 0 | 0 | 0 | 0 | 68.997 |
| FEBRA2009846 | 0 | 0 | 0 | 0 | 0 | 0 | 51.462 |
| FEBRA2009986 | 0 | 0 | 0 | 0 | 0 | 11.874 | 16.023 |
| FEBRA2010141 | 0 | 0 | 0 | 0 | 0 | 0 | 100 |
| FEBRA2010299 | 0 | 0 | 0 | 0 | 0 | 0 | 100 |
| FEBRA2010484 | 0 | 0 | 0 | 0 | 0 | 0 | 100 |
| FEBRA2010719 | 0 | 0 | 0 | 0 | 0 | 0 | 43.257 |
| FEBRA2010746 | 0 | 0 | 0 | 0 | 0 | 0 | 21.386 |
| FEBRA2010768 | 0 | 0 | 0 | 0 | 0 | 0 | 40.876 |
| FEBRA2010802 | 0 | 0 | 0 | 0 | 0 | 0 | 100 |
| FEBRA2011063 | 0 | 0 | 0 | 0 | 0 | 0 | 100 |
| FEBRA2011090 | 0 | 0 | 0 | 0 | 0 | 0 | 43.266 |
| FEBRA2011356 | 0 | 0 | 0 | 0 | 0 | 0 | 100 |
| FEBRA2011392 | 0 | 0 | 0 | 0 | 0 | 0 | 67.639 |
| FEBRA2011414 | 0 | 0 | 0 | 0 | 0 | 0 | 100 |
| FEBRA2011593 | 0 | 0 | 0 | 0 | 0 | 0 | 100 |
| FEBRA2011665 | 0 | 0 | 0 | 0 | 0 | 0 | 100 |
| FEBRA2012090 | 0 | 0 | 0 | 0 | 0 | 0 | 100 |
| FEBRA2012120 | 0 | 0 | 0 | 0 | 0 | 0 | 40.243 |
| FEBRA2012181 | 0 | 0 | 0 | 0 | 0 | 0 | 41.159 |
| FEBRA2012195 | 0 | 0 | 0 | 0 | 0 | 0 | 100 |
| FEBRA2012397 | 0 | 0 | 0 | 0 | 0 | 0 | 58.346 |
| FEBRA2012418 | 0 | 0 | 0 | 0 | 0 | 0 | 100 |
| FEBRA2012507 | 0 | 0 | 0 | 0 | 0 | 0 | 18.603 |
| FEBRA2012625 | 0 | 0 | 0 | 0 | 0 | 0 | 100 |
| FEBRA2013019 | 0 | 0 | 0 | 0 | 0 | 42.565 | 57.435 |
| FEBRA2013069 | 0 | 0 | 0 | 0 | 0 | 0 | 100 |
| FEBRA2013274 | 0 | 0 | 0 | 0 | 0 | 0 | 100 |
| FEBRA2013465 | 0 | 0 | 0 | 0 | 0 | 0 | 100 |
| FEBRA2013570 | 0 | 0 | 0 | 0 | 0 | 0 | 27.839 |
| FEBRA2013699 | 0 | 0 | 0 | 0 | 0 | 0 | 17.841 |
| FEBRA2013905 | 0 | 0 | 0 | 0 | 0 | 0 | 100 |
| FEBRA2013951 | 0 | 0 | 0 | 0 | 0 | 0 | 40.876 |
| FEBRA2014010 | 0 | 0 | 0 | 0 | 0 | 0 | 40.243 |
| FEBRA2014122 | 0 | 0 | 0 | 0 | 0 | 0 | 66.741 |
| FEBRA2014198 | 0 | 0 | 0 | 0 | 0 | 0 | 100 |
| FEBRA2014213 | 0 | 0 | 0 | 0 | 0 | 0 | 9.817 |
| FEBRA2014297 | 0 | 0 | 0 | 0 | 0 | 0 | 5.328 |
| FEBRA2014417 | 0 | 0 | 0 | 0 | 0 | 0 | 4.038 |
| FEBRA2014443 | 0 | 0 | 0 | 0 | 0 | 0 | 100 |
| FEBRA2014578 | 0 | 0 | 0 | 0 | 0 | 0 | 54.561 |
| FEBRA2014939 | 0 | 0 | 0 | 0 | 0 | 15.432 | 20.824 |
| FEBRA2015076 | 0 | 0 | 0 | 0 | 0 | 0 | 100 |
| FEBRA2015085 | 0 | 0 | 0 | 0 | 0 | 25.351 | 7.602 |
| FEBRA2015175 | 0 | 0 | 0 | 0 | 0 | 0 | 100 |
| FEBRA2015292 | 0 | 0 | 0 | 0 | 0 | 0 | 100 |
| FEBRA2015588 | 0 | 0 | 0 | 0 | 0 | 0 | 100 |
| FEBRA2016112 | 0 | 0 | 0 | 0 | 0 | 0 | 100 |
| FEBRA2016398 | 0 | 0 | 0 | 0 | 0 | 0 | 43.076 |
| FEBRA2016572 | 0 | 0 | 0 | 0 | 0 | 0 | 48.982 |
| FEBRA2016583 | 0 | 0 | 0 | 0 | 0 | 0 | 70.959 |
| FEBRA2016621 | 0 | 0 | 0 | 0 | 0 | 0 | 100 |
| FEBRA2016654 | 0 | 0 | 0 | 0 | 0 | 0 | 100 |
| FEBRA2016739 | 0 | 0 | 0 | 0 | 0 | 0 | 100 |
| FEBRA2017024 | 0 | 0 | 0 | 0 | 0 | 0 | 24.052 |
| FEBRA2017098 | 0 | 0 | 0 | 0 | 0 | 42.565 | 57.435 |
| FEBRA2017138 | 0 | 0 | 0 | 0 | 0 | 0 | 100 |
| FEBRA2017154 | 0 | 0 | 0 | 0 | 0 | 0 | 100 |
| FEBRA2017200 | 0 | 0 | 0 | 0 | 0 | 0 | 100 |
| FEBRA2017223 | 0 | 0 | 0 | 0 | 0 | 0 | 100 |
| FEBRA2017333 | 0 | 0 | 0 | 0 | 0 | 0 | 100 |
| FEBRA2017502 | 0 | 0 | 0 | 0 | 0 | 0 | 100 |
| FEBRA2017533 | 0 | 0 | 0 | 0 | 0 | 0 | 67.995 |
| FEBRA2017680 | 0 | 0 | 0 | 0 | 0 | 0 | 23.704 |
| FEBRA2017736 | 0 | 0 | 0 | 0 | 0 | 0 | 100 |
| FEBRA2017780 | 0 | 0 | 0 | 0 | 0 | 59.713 | 40.287 |
| FEBRA2017811 | 0 | 0 | 0 | 0 | 0 | 0 | 100 |
| FEBRA2017850 | 0 | 0 | 0 | 0 | 0 | 33.093 | 44.654 |
| FEBRA2018051 | 0 | 0 | 0 | 0 | 0 | 0 | 100 |
| FEBRA2018203 | 0 | 0 | 0 | 0 | 0 | 28.033 | 37.827 |
| FEBRA2018407 | 0 | 0 | 0 | 0 | 0 | 0 | 40.386 |
| FEBRA2018433 | 0 | 0 | 0 | 0 | 0 | 0 | 77.838 |
| FEBRA2018476 | 0 | 0 | 0 | 0 | 0 | 2.019 | 8.171 |
| FEBRA2018746 | 0 | 0 | 0 | 0 | 0 | 0 | 37.287 |
| FEBRA2019172 | 0 | 0 | 0 | 0 | 0 | 0 | 100 |
| FEBRA2019242 | 0 | 0 | 0 | 0 | 0 | 0 | 20.225 |
| FEBRA2019298 | 0 | 0 | 0 | 0 | 0 | 0 | 18.103 |
| FEBRA2019389 | 0 | 0 | 0 | 0 | 0 | 0 | 40.825 |
| FEBRA2019457 | 0 | 0 | 0 | 0 | 0 | 0 | 100 |
| FEBRA2019519 | 0 | 0 | 0 | 0 | 0 | 0 | 100 |
| FEBRA2019582 | 0 | 0 | 0 | 0 | 0 | 0 | 100 |
| FEBRA2019637 | 0 | 0 | 0 | 0 | 0 | 0 | 40.753 |
| FEBRA2019663 | 0 | 0 | 0 | 0 | 0 | 0 | 21.712 |
| FEBRA2019690 | 0 | 0 | 0 | 0 | 0 | 0 | 40.243 |
| FEBRA2019711 | 0 | 0 | 0 | 0 | 0 | 0 | 5.271 |
| FEBRA2019867 | 0 | 0 | 0 | 0 | 0 | 0 | 69.211 |
| FEBRA2020406 | 0 | 0 | 0 | 0 | 0 | 42.565 | 57.435 |
| FEBRA2020566 | 0 | 0 | 0 | 0 | 0 | 0 | 10.387 |
| FEBRA2020582 | 0 | 0 | 0 | 0 | 0 | 42.565 | 57.435 |
| FEBRA2020668 | 0 | 0 | 0 | 0 | 0 | 0 | 100 |
| FEBRA2020801 | 0 | 0 | 0 | 0 | 0 | 0 | 100 |
| FEBRA2020845 | 0 | 0 | 0 | 0 | 0 | 0 | 71.370 |
| FEBRA2020886 | 0 | 0 | 0 | 0 | 0 | 0 | 60.446 |
| FEBRA2020977 | 0 | 0 | 0 | 0 | 0 | 19.470 | 13.136 |
| FEBRA2021032 | 0 | 0 | 72.292 | 0 | 0 | 0 | 13.365 |
| FEBRA2021134 | 0 | 0 | 0 | 0 | 0 | 0 | 100 |
| FEBRA2021171 | 0 | 0 | 0 | 0 | 0 | 0 | 26.519 |
| FEBRA2021339 | 0 | 0 | 0 | 0 | 0 | 0 | 79.225 |
| FEBRA2021431 | 0 | 0 | 0 | 0 | 0 | 0 | 100 |
| FEBRA2021497 | 0 | 0 | 0 | 0 | 0 | 0 | 100 |
| FEBRA2021550 | 0 | 0 | 0 | 0 | 0 | 0 | 77.838 |
| FEBRA2021571 | 0 | 0 | 0 | 0 | 0 | 0 | 100 |
| FEBRA2021636 | 0 | 0 | 0 | 0 | 0 | 0 | 50.440 |
| FEBRA2021864 | 0 | 0 | 0 | 0 | 0 | 0 | 77.838 |
| FEBRA2021892 | 0 | 0 | 0 | 0 | 0 | 0 | 100 |
| FEBRA2021908 | 0 | 0 | 0 | 0 | 0 | 0 | 100 |
| FEBRA2021966 | 0 | 0 | 0 | 0 | 0 | 7.969 | 10.753 |
| FEBRA2022013 | 0 | 0 | 0 | 0 | 0 | 0 | 23.437 |
| FEBRA2022055 | 0 | 0 | 0 | 0 | 0 | 0 | 1.326 |
| FEBRA2022148 | 0 | 0 | 0 | 0 | 0 | 0 | 100 |
| FEBRA2022204 | 0 | 0 | 0 | 0 | 0 | 0 | 100 |
| FEBRA2022255 | 0 | 0 | 0 | 0 | 0 | 0 | 100 |
| FEBRA2022322 | 0 | 0 | 0 | 0 | 0 | 0 | 100 |
| FEBRA2022504 | 0 | 0 | 0 | 0 | 0 | 0 | 4.094 |
| FEBRA2022601 | 0 | 0 | 0 | 0 | 0 | 0 | 77.838 |
| FEBRA2022696 | 0 | 0 | 0 | 0 | 0 | 0 | 52.075 |
| FEBRA2022729 | 0 | 0 | 0 | 0 | 0 | 0 | 100 |
| FEBRA2022787 | 0 | 0 | 0 | 0 | 0 | 0 | 100 |
| FEBRA2022911 | 0 | 0 | 0 | 0 | 0 | 0 | 100 |
| FEBRA2022956 | 0 | 0 | 0 | 0 | 0 | 0 | 100 |
| FEBRA2022963 | 0 | 0 | 0 | 0 | 0 | 0 | 100 |
| FEBRA2022972 | 0 | 0 | 0 | 0 | 0 | 0 | 100 |
| FEBRA2023227 | 0 | 0 | 0 | 0 | 0 | 0 | 12.767 |
| FEBRA2023285 | 0 | 0 | 0 | 0 | 0 | 0 | 100 |
| FEBRA2023351 | 0 | 0 | 0 | 0 | 0 | 0 | 100 |
| FEBRA2023377 | 0 | 0 | 0 | 0 | 0 | 0 | 19.338 |
| FEBRA2023399 | 0 | 0 | 0 | 0 | 0 | 0 | 21.881 |
| FEBRA2023498 | 0 | 0 | 0 | 0 | 0 | 0 | 100 |
| FEBRA2023550 | 0 | 0 | 0 | 0 | 0 | 0 | 40.825 |
| FEBRA2023721 | 0 | 0 | 0 | 0 | 0 | 0 | 100 |
| FEBRA2023927 | 0 | 0 | 0 | 0 | 0 | 0 | 10.153 |
| FEBRA2023989 | 0 | 0 | 0 | 0 | 0 | 0 | 100 |
| FEBRA2023990 | 0 | 0 | 0 | 0 | 0 | 0 | 100 |
| FEBRA2024019 | 0 | 0 | 0 | 0 | 0 | 2.478 | 23.402 |
| FEBRA2024136 | 0 | 0 | 0 | 0 | 0 | 0 | 28.600 |
| FEBRA2024150 | 0 | 0 | 0 | 0 | 0 | 0 | 55.970 |
| FEBRA2024343 | 0 | 0 | 0 | 0 | 0 | 0 | 100 |
| FEBRA2024570 | 0 | 0 | 0 | 0 | 0 | 0 | 25.087 |
| FEBRA2024693 | 0 | 0 | 0 | 0 | 0 | 0 | 100 |
| FEBRA2024727 | 0 | 0 | 0 | 0 | 0 | 0 | 66.741 |
| FEBRA2024744 | 0 | 0 | 0 | 0 | 0 | 0 | 100 |
| FEBRA2024797 | 0 | 0 | 0 | 0 | 0 | 0 | 100 |
| FEBRA2024987 | 0 | 0 | 0 | 0 | 0 | 0 | 24.523 |
| FEBRA2025249 | 0 | 0 | 0 | 0 | 0 | 0 | 100 |
| FEBRA2025427 | 0 | 0 | 0 | 0 | 0 | 4.579 | 24.717 |
| FEBRA2025463 | 0 | 0 | 0 | 0 | 0 | 0 | 100 |
| FEBRA2025477 | 0 | 0 | 0 | 0 | 0 | 0 | 100 |
| FEBRA2025838 | 0 | 0 | 0 | 0 | 0 | 0 | 2.048 |
| FEBRA2026474 | 0 | 0 | 0 | 0 | 0 | 0 | 100 |
| FEBRA2026582 | 0 | 0 | 0 | 0 | 0 | 0 | 57.838 |
| FEBRA2026629 | 0 | 0 | 0 | 0 | 0 | 0 | 100 |
| FEBRA2026769 | 0 | 0 | 0 | 0 | 0 | 0 | 100 |
| FEBRA2026879 | 0 | 0 | 0 | 0 | 0 | 0 | 100 |
| FEBRA2026890 | 0 | 0 | 0 | 0 | 0 | 0 | 100 |
| FEBRA2026977 | 0 | 0 | 0 | 0 | 0 | 0 | 100 |
| FEBRA2026984 | 0 | 0 | 0 | 0 | 0 | 0 | 43.714 |
| FEBRA2027082 | 0 | 0 | 0 | 0 | 0 | 0 | 100 |
| FEBRA2027297 | 0 | 0 | 0 | 0 | 0 | 0 | 100 |
| FEBRA2027352 | 0 | 0 | 0 | 0 | 0 | 0 | 100 |
| FEBRA2027364 | 0 | 0 | 0 | 0 | 0 | 0 | 100 |
| FEBRA2027609 | 0 | 0 | 0 | 0 | 0 | 0 | 100 |
| FEBRA2028158 | 0 | 0 | 0 | 0 | 0 | 0 | 68.997 |
| FEBRA2028222 | 0 | 0 | 0 | 0 | 0 | 0 | 100 |
| FEBRA2028366 | 0 | 0 | 0 | 0 | 0 | 0 | 100 |
| FEBRA2028457 | 0 | 0 | 0 | 0 | 0 | 0 | 100 |
| FEBRA2028477 | 0 | 0 | 0 | 0 | 0 | 0 | 100 |
| FEBRA2028503 | 0 | 0 | 0 | 0 | 0 | 0 | 17.429 |
| FEBRA2028516 | 0 | 0 | 0 | 0 | 0 | 0 | 2.851 |
| FELIV1000153 | 0 | 0 | 0 | 0 | 0 | 0.305 | 0 |
| HCASM1000115 | 0 | 69.583 | 0 | 0 | 0 | 1.915 | 0 |
| HCASM2000016 | 0 | 0 | 0 | 4.398 | 0 | 1.379 | 0 |
| HCASM2000363 | 0 | 0 | 0 | 4.008 | 0 | 0 | 0 |
| HCASM2005388 | 0 | 0 | 47.694 | 0 | 0 | 0 | 0 |
| HCHON1000015 | 0 | 0 | 0 | 9.186 | 0 | 2.880 | 0 |
| HCHON1000030 | 2.118 | 0 | 0 | 0 | 4.970 | 0.670 | 1.356 |
| HCHON1000166 | 0 | 0 | 0 | 0 | 0 | 0 | 7.499 |
| HCHON2000028 | 0 | 0 | 0 | 9.350 | 0 | 0 | 0 |
| HCHON2000056 | 3.311 | 0 | 0 | 1.671 | 0 | 0 | 0.707 |
| HCHON2000160 | 0 | 0 | 0 | 5.932 | 0 | 0 | 12.547 |
| HCHON2000212 | 0 | 0 | 0 | 0 | 0 | 15.878 | 0 |
| HCHON2000244 | 0 | 0 | 0 | 7.753 | 0 | 1.215 | 4.920 |
| HCHON2000295 | 0 | 0 | 0 | 0 | 12.003 | 0 | 0 |
| HCHON2000323 | 0 | 0 | 0 | 0 | 0 | 3.422 | 0 |
| HCHON2000508 | 4.360 | 50.138 | 0 | 2.201 | 0 | 0 | 0 |
| HCHON2000676 | 0 | 0 | 0 | 17.571 | 0 | 5.508 | 0 |
| HCHON2000698 | 0 | 0 | 0 | 0 | 0 | 5.295 | 0 |
| HCHON2000738 | 0 | 0 | 0 | 0 | 0 | 5.501 | 0 |
| HCHON2000743 | 0 | 0 | 0 | 0 | 0 | 11.280 | 0 |
| HCHON2000751 | 0 | 0 | 0 | 0 | 0 | 6.596 | 0 |
| HCHON2000826 | 0 | 0 | 0 | 0 | 0 | 5.289 | 1.784 |
| HCHON2000832 | 0 | 0 | 0 | 0 | 0 | 6.536 | 8.819 |
| HCHON2000942 | 0 | 0 | 0 | 0 | 0 | 0 | 28.262 |
| HCHON2001039 | 0 | 0 | 0 | 0 | 0 | 4.123 | 2.782 |
| HCHON2001050 | 16.922 | 0 | 0 | 0 | 0 | 0 | 0 |
| HCHON2001099 | 0 | 0 | 0 | 48.221 | 0 | 0 | 0 |
| HCHON2001200 | 0 | 0 | 0 | 0 | 0 | 4.794 | 0 |
| HCHON2001217 | 0 | 0 | 0 | 6.134 | 0 | 3.846 | 2.595 |
| HCHON2001407 | 0 | 0 | 0 | 0 | 0 | 4.377 | 1.969 |
| HCHON2001434 | 0 | 0 | 0 | 0 | 0 | 5.644 | 0 |
| HCHON2001665 | 0 | 0 | 0 | 0 | 0 | 2.851 | 0 |
| HCHON2002496 | 0 | 0 | 0 | 45.775 | 0 | 0 | 0 |
| HCHON2004002 | 0 | 0 | 0 | 0 | 0 | 0 | 1.957 |
| HCHON2005166 | 0 | 0 | 0 | 0 | 0 | 22.599 | 0 |
| HCHON2006770 | 0 | 0 | 0 | 16.633 | 0 | 0 | 0 |
| HCHON2010543 | 0 | 0 | 0 | 0 | 0 | 16.573 | 0 |
| HEART1000149 | 0 | 0 | 0 | 5.534 | 0 | 1.735 | 0 |
| HEART1000173 | 0 | 0 | 0 | 0 | 0 | 4.849 | 0 |
| HEART2006521 | 0 | 0 | 0 | 0 | 0 | 8.837 | 0 |
| HEART2007231 | 0 | 0 | 0 | 0 | 0 | 8.949 | 0 |
| HHDPC1000083 | 0 | 0 | 0 | 0 | 0 | 0 | 2.440 |
| HHDPC1000114 | 0 | 0 | 0 | 0 | 0 | 0 | 1.811 |
| HHDPC1000118 | 0 | 0 | 0 | 0 | 0 | 15.487 | 5.225 |
| HHDPC1000163 | 0 | 0 | 0 | 14.822 | 0 | 4.646 | 0 |
| HHDPC2000055 | 0 | 0 | 0 | 0 | 0 | 6.756 | 4.558 |
| HHDPC2000104 | 0 | 0 | 0 | 10.903 | 0 | 0 | 0 |
| HHDPC2000149 | 0 | 0 | 0 | 0 | 0 | 8.255 | 0 |
| HHDPC2000455 | 0 | 0 | 0 | 6.477 | 0 | 0 | 0 |
| HHDPC2003439 | 0 | 0 | 0 | 7.494 | 0 | 2.819 | 1.268 |
| HHDPC2003983 | 0 | 0 | 0 | 0 | 0 | 2.572 | 0.694 |
| HHDPC2006862 | 0 | 0 | 0 | 0 | 0 | 13.827 | 0 |
| HHDPC2007267 | 0 | 0 | 0 | 0 | 0 | 0.902 | 0 |
| HHDPC2009528 | 0 | 0 | 0 | 0 | 0 | 12.007 | 0 |
| HLUNG1000055 | 0 | 0 | 0 | 3.190 | 0 | 1.000 | 1.349 |
| HLUNG1000091 | 0 | 0 | 0 | 0 | 0 | 27.339 | 0 |
| HLUNG2000063 | 0 | 0 | 0 | 0 | 0 | 0 | 6.148 |
| HLUNG2000232 | 0 | 0 | 0 | 0 | 0 | 23.283 | 0 |
| HLUNG2000314 | 0 | 0 | 0 | 0 | 67.223 | 0 | 0 |
| HLUNG2000412 | 0 | 0 | 0 | 0 | 0 | 0 | 6.675 |
| HLUNG2000501 | 0 | 0 | 0 | 0 | 0 | 1.585 | 0 |
| HLUNG2000884 | 0 | 0 | 0 | 0 | 0 | 11.863 | 5.336 |
| HLUNG2000950 | 0 | 0 | 0 | 0 | 0 | 22.840 | 0 |
| HLUNG2001439 | 0 | 0 | 0 | 5.197 | 0 | 1.629 | 0 |
| HLUNG2001518 | 0 | 0 | 0 | 0 | 0 | 0 | 5.452 |
| HLUNG2002059 | 0 | 0 | 0 | 48.430 | 0 | 0 | 0 |
| HLUNG2002334 | 0 | 0 | 0 | 0 | 0 | 16.982 | 0 |
| HLUNG2004159 | 0 | 0 | 0 | 0 | 0 | 6.699 | 4.520 |
| HLUNG2004774 | 0 | 0 | 0 | 0 | 0 | 0 | 40.465 |
| HLUNG2005230 | 26.687 | 0 | 0 | 0 | 0 | 0 | 0 |
| HLUNG2006812 | 0 | 0 | 0 | 0 | 0 | 5.463 | 0 |
| HLUNG2008885 | 0 | 0 | 0 | 0 | 0 | 0 | 26.910 |
| HLUNG2009225 | 0 | 0 | 0 | 0 | 0 | 5.572 | 3.760 |
| HLUNG2017262 | 0 | 0 | 0 | 9.346 | 0 | 5.859 | 3.953 |
| HSYRA1000062 | 0 | 0 | 0 | 10.097 | 0 | 1.583 | 2.136 |
| HSYRA1000119 | 0 | 0 | 0 | 2.710 | 0 | 0 | 0 |
| HSYRA1000152 | 0 | 0 | 0 | 7.029 | 0 | 6.611 | 0 |
| HSYRA2000159 | 0 | 0 | 1.626 | 0 | 0 | 1.782 | 1.202 |
| HSYRA2000190 | 0 | 0 | 0 | 13.997 | 0 | 0 | 0 |
| HSYRA2000221 | 0 | 0 | 0 | 0 | 0 | 17.488 | 0 |
| HSYRA2000232 | 0 | 0 | 0 | 0 | 0 | 19.125 | 0 |
| HSYRA2000248 | 0 | 0 | 0 | 0 | 0 | 3.767 | 8.471 |
| HSYRA2000332 | 0 | 0 | 0 | 0 | 0 | 0 | 1.944 |
| HSYRA2000640 | 0 | 0 | 0 | 5.021 | 0 | 0 | 6.371 |
| HSYRA2000743 | 0 | 0 | 0 | 9.121 | 0 | 0 | 0 |
| HSYRA2000787 | 0 | 0 | 0 | 0 | 0 | 0 | 15.507 |
| HSYRA2001103 | 0 | 0 | 0 | 14.995 | 0 | 0 | 0 |
| HSYRA2001138 | 0 | 0 | 0 | 3.005 | 0 | 0 | 0 |
| HSYRA2001225 | 0 | 0 | 0 | 0 | 0 | 0 | 3.686 |
| HSYRA2001396 | 0 | 0 | 0 | 0 | 0 | 0 | 3.787 |
| HSYRA2001476 | 0 | 0 | 0 | 0 | 0 | 0.892 | 0 |
| HSYRA2001567 | 0 | 0 | 0 | 0 | 0 | 4.140 | 0 |
| HSYRA2001574 | 0 | 0 | 0 | 0 | 0 | 0 | 3.751 |
| HSYRA2001580 | 0 | 0 | 0 | 32.300 | 0 | 0 | 13.663 |
| HSYRA2001595 | 0 | 0 | 0 | 0 | 0 | 2.105 | 1.420 |
| HSYRA2001615 | 0 | 0 | 0 | 12.222 | 0 | 0 | 0 |
| HSYRA2001621 | 0 | 0 | 0 | 0 | 0 | 0.339 | 0.457 |
| HSYRA2001631 | 0 | 0 | 0 | 0 | 0 | 21.545 | 0 |
| IMR321000193 | 0 | 0 | 0 | 25.866 | 0 | 8.109 | 0 |
| IMR321000210 | 0 | 0 | 0 | 0 | 0 | 3.745 | 7.580 |
| IMR321000219 | 0 | 0 | 0 | 1.654 | 0 | 1.037 | 0 |
| IMR321000242 | 0 | 0 | 0 | 0 | 0 | 10.389 | 14.019 |
| IMR321000253 | 0 | 0 | 0 | 0 | 0 | 3.763 | 0 |
| IMR322000121 | 0 | 0 | 0 | 6.570 | 0 | 0 | 0 |
| IMR322000127 | 0 | 0 | 0 | 0 | 0 | 8.585 | 11.585 |
| IMR322000144 | 0 | 0 | 0 | 0 | 44.695 | 0 | 0 |
| IMR322000223 | 7.949 | 0 | 0 | 0 | 0 | 0 | 3.395 |
| IMR322000243 | 0 | 0 | 0 | 5.056 | 0 | 0 | 0 |
| IMR322000316 | 0 | 0 | 0 | 0 | 0 | 9.199 | 16.551 |
| IMR322000555 | 0 | 0 | 0 | 0 | 0 | 11.022 | 0 |
| IMR322000730 | 1.600 | 9.201 | 0 | 0 | 0 | 0 | 0 |
| IMR322000819 | 49.762 | 0 | 0 | 0 | 0 | 0 | 0 |
| IMR322000917 | 0 | 0 | 0 | 0 | 0 | 43.645 | 0 |
| IMR322000918 | 0 | 0 | 0 | 34.549 | 0 | 0 | 0 |
| IMR322000935 | 0 | 0 | 0 | 8.823 | 0 | 2.766 | 0 |
| IMR322000973 | 0 | 0 | 0 | 4.752 | 0 | 1.490 | 0 |
| IMR322001218 | 13.070 | 0 | 0 | 0 | 0 | 2.068 | 0 |
| IMR322001332 | 0 | 0 | 0 | 0 | 0 | 4.919 | 0 |
| IMR322001380 | 0 | 0 | 0 | 0 | 0 | 7.324 | 9.883 |
| IMR322001435 | 0 | 0 | 0 | 0 | 0 | 3.471 | 0 |
| IMR322001541 | 0 | 0 | 0 | 0 | 0 | 6.251 | 0 |
| IMR322001584 | 0 | 0 | 16.832 | 0 | 0 | 0 | 3.112 |
| IMR322001600 | 0 | 10.810 | 0 | 6.643 | 0 | 0.297 | 0.401 |
| IMR322001670 | 0 | 0 | 0 | 0 | 0 | 16.857 | 0 |
| IMR322012529 | 0 | 0 | 0 | 0 | 0 | 8.700 | 0 |
| IMR322019070 | 0 | 0 | 0 | 0 | 0 | 0 | 13.339 |
| KIDNE2000085 | 0 | 0 | 0 | 0 | 28.178 | 0 | 0 |
| KIDNE2000252 | 0 | 0 | 0 | 0 | 0 | 1.579 | 0 |
| KIDNE2000403 | 0 | 0 | 0 | 4.869 | 0 | 1.526 | 0 |
| KIDNE2000574 | 0 | 0 | 0 | 0 | 0 | 0 | 3.732 |
| KIDNE2000665 | 0 | 0 | 0 | 0 | 0 | 3.576 | 0 |
| KIDNE2000947 | 0 | 0 | 0 | 14.895 | 0 | 9.338 | 0 |
| KIDNE2001162 | 0 | 0 | 0 | 0 | 0 | 0 | 1.164 |
| KIDNE2001467 | 0 | 0 | 0 | 3.072 | 0 | 3.371 | 1.949 |
| KIDNE2001713 | 0 | 0 | 0 | 0 | 0 | 28.625 | 0 |
| KIDNE2002265 | 0 | 0 | 0 | 0 | 0 | 10.080 | 4.534 |
| KIDNE2002438 | 0 | 0 | 0 | 0 | 0 | 34.637 | 0 |
| KIDNE2002872 | 0 | 38.385 | 46.259 | 0 | 0 | 0 | 0 |
| KIDNE2002883 | 0 | 0 | 0 | 0 | 0 | 8.380 | 0 |
| KIDNE2003373 | 0 | 0 | 0 | 0 | 0 | 28.625 | 0 |
| KIDNE2003941 | 0 | 0 | 0 | 2.972 | 0 | 0 | 1.257 |
| KIDNE2004305 | 0 | 0 | 0 | 0 | 0 | 34.637 | 0 |
| KIDNE2004475 | 0 | 0 | 0 | 0 | 0 | 4.755 | 19.250 |
| KIDNE2004626 | 0 | 0 | 0 | 0 | 0 | 0 | 32.129 |
| KIDNE2004846 | 77.005 | 0 | 0 | 0 | 0 | 0 | 0 |
| KIDNE2005336 | 0 | 0 | 0 | 0 | 0 | 0 | 41.693 |
| KIDNE2005676 | 0 | 0 | 0 | 8.291 | 0 | 10.396 | 0 |
| KIDNE2006014 | 0 | 0 | 0 | 0 | 0 | 10.971 | 7.402 |
| KIDNE2006248 | 3.630 | 0 | 4.192 | 1.832 | 0 | 0 | 0 |
| KIDNE2006465 | 0 | 0 | 0 | 0 | 0 | 5.716 | 15.427 |
| KIDNE2006811 | 37.991 | 0 | 0 | 0 | 0 | 0 | 8.112 |
| KIDNE2006880 | 0 | 0 | 43.291 | 0 | 0 | 0 | 0 |
| KIDNE2007352 | 0 | 0 | 0 | 0 | 0 | 2.304 | 2.073 |
| KIDNE2008403 | 0 | 0 | 0 | 0 | 0 | 0 | 3.390 |
| KIDNE2008404 | 0 | 0 | 62.526 | 0 | 0 | 0 | 0 |
| KIDNE2009367 | 0 | 0 | 0 | 4.442 | 0 | 0 | 0 |
| KIDNE2010265 | 0 | 0 | 63.715 | 0 | 0 | 0 | 5.890 |
| KIDNE2013413 | 0 | 0 | 0 | 0 | 0 | 34.637 | 0 |
| KIDNE2013845 | 0 | 0 | 0 | 0 | 0 | 2.065 | 0 |
| KIDNE2014290 | 0 | 0 | 0 | 0 | 0 | 0 | 1.748 |
| KIDNE2015445 | 0 | 0 | 0 | 20.247 | 0 | 0 | 0 |
| KIDNE2018352 | 0 | 0 | 0 | 0 | 0 | 6.588 | 0 |
| KIDNE2018493 | 0 | 0 | 0 | 0 | 0 | 0 | 17.765 |
| LIVER1000132 | 5.842 | 0 | 0 | 0 | 0 | 0.924 | 2.495 |
| LIVER1000230 | 0 | 0 | 0 | 0 | 0 | 0 | 14.457 |
| LIVER2000416 | 0 | 0 | 0 | 0 | 0 | 4.180 | 0 |
| LIVER2001539 | 0 | 0 | 0 | 0 | 0 | 9.200 | 0 |
| LIVER2002842 | 0 | 0 | 0 | 0 | 0 | 3.527 | 9.518 |
| LIVER2006006 | 0 | 47.741 | 0 | 8.382 | 0 | 1.314 | 0 |
| MAMGL1000032 | 0 | 0 | 0 | 0 | 0 | 0.298 | 0.402 |
| MAMGL1000035 | 0 | 0 | 0 | 2.373 | 0 | 0.372 | 0 |
| MESAN1000050 | 0 | 0 | 0 | 28.382 | 0 | 0 | 4.002 |
| MESAN1000101 | 0 | 0 | 0 | 0 | 0 | 0 | 14.389 |
| MESAN2000067 | 0 | 0 | 0 | 0 | 0 | 33.254 | 0 |
| MESAN2000092 | 0 | 0 | 0 | 0 | 0 | 16.348 | 0 |
| MESAN2000149 | 0 | 0 | 0 | 14.477 | 0 | 4.538 | 0 |
| MESAN2000267 | 0 | 0 | 0 | 0 | 0 | 1.513 | 1.021 |
| MESAN2000572 | 0 | 0 | 0 | 0 | 0 | 1.889 | 0 |
| MESAN2001450 | 0 | 0 | 0 | 0 | 0 | 5.328 | 0 |
| MESAN2002086 | 0 | 0 | 0 | 7.360 | 0 | 0 | 0 |
| MESAN2002186 | 0 | 0 | 59.118 | 0 | 0 | 0 | 0 |
| MESAN2002519 | 0 | 0 | 0 | 0 | 0 | 0 | 11.561 |
| MESAN2002724 | 0 | 0 | 12.435 | 0 | 0 | 0 | 0 |
| MESAN2002790 | 0 | 0 | 0 | 28.827 | 0 | 0 | 0 |
| MESAN2002844 | 0 | 0 | 0 | 0 | 0 | 0 | 18.063 |
| MESAN2003035 | 0 | 0 | 0 | 0 | 0 | 13.240 | 0 |
| MESAN2003622 | 0 | 0 | 0 | 3.542 | 0 | 0 | 1.498 |
| MESAN2004288 | 0 | 0 | 0 | 30.624 | 0 | 9.600 | 0 |
| MESAN2004575 | 0 | 0 | 0 | 76.069 | 0 | 0 | 0 |
| MESAN2005689 | 0 | 0 | 0 | 0 | 0 | 5.732 | 0 |
| MESAN2005766 | 0 | 0 | 0 | 0 | 0 | 3.644 | 0 |
| MESAN2006401 | 0 | 0 | 0 | 0 | 0 | 3.342 | 0 |
| MESAN2006563 | 0 | 0 | 0 | 0 | 0 | 3.827 | 0 |
| MESAN2006971 | 0 | 0 | 0 | 35.411 | 0 | 0 | 0 |
| MESAN2007755 | 0 | 0 | 0 | 0 | 0 | 16.901 | 0 |
| MESAN2008926 | 0 | 0 | 0 | 0 | 0 | 5.898 | 0 |
| MESAN2008936 | 0 | 0 | 0 | 0 | 0 | 0 | 9.917 |
| MESAN2009081 | 0 | 0 | 0 | 27.740 | 0 | 8.696 | 0 |
| MESAN2011627 | 0 | 0 | 50.747 | 0 | 0 | 0 | 0 |
| MESAN2011984 | 0 | 0 | 0 | 0 | 0 | 6.304 | 0 |
| MESAN2012054 | 0 | 0 | 0 | 0 | 0 | 4.713 | 0 |
| MESAN2013284 | 0 | 0 | 0 | 0 | 0 | 11.345 | 0 |
| NB9N41000011 | 0 | 0 | 0 | 12.543 | 0 | 0 | 0 |
| NB9N42000104 | 0 | 0 | 0 | 9.770 | 0 | 0 | 0 |
| NB9N42000281 | 0 | 0 | 0 | 0 | 0 | 3.532 | 0 |
| NHNPC2000187 | 5.283 | 0 | 0 | 0 | 12.400 | 0 | 0 |
| NHNPC2000206 | 0 | 0 | 0 | 4.047 | 0 | 1.269 | 1.712 |
| NHNPC2000212 | 0 | 0 | 0 | 0 | 0 | 6.438 | 0 |
| NHNPC2001223 | 0 | 0 | 0 | 0 | 0 | 6.894 | 0 |
| NHNPC2001931 | 0 | 0 | 0 | 2.813 | 0 | 0 | 0 |
| NT2NE1000018 | 0 | 0 | 0 | 0 | 0 | 4.594 | 6.199 |
| NT2NE1000024 | 0 | 0 | 0 | 0 | 0 | 0 | 28.710 |
| NT2NE1000073 | 0 | 0 | 0 | 0 | 0 | 0 | 19.850 |
| NT2NE1000163 | 0 | 0 | 5.462 | 0 | 0 | 0 | 0 |
| NT2NE2000056 | 0 | 0 | 0 | 0 | 0 | 2.177 | 3.917 |
| NT2NE2000260 | 1.410 | 0 | 0 | 0 | 0 | 0.223 | 0 |
| NT2NE2000327 | 0 | 0 | 0 | 0 | 0 | 0 | 12.542 |
| NT2NE2000353 | 0 | 0 | 0 | 0 | 0 | 33.765 | 0 |
| NT2NE2000383 | 0 | 0 | 0 | 0 | 0 | 0 | 3.788 |
| NT2NE2000386 | 0 | 0 | 0 | 0 | 0 | 28.547 | 0 |
| NT2NE2000392 | 0 | 0 | 0 | 0 | 0 | 24.740 | 24.481 |
| NT2NE2000470 | 0 | 0 | 0 | 0 | 0 | 10.082 | 0 |
| NT2NE2000575 | 0 | 0 | 0 | 0 | 0 | 0.888 | 0.599 |
| NT2NE2000707 | 0 | 0 | 0 | 0 | 0 | 3.091 | 1.668 |
| NT2NE2000763 | 0 | 0 | 0 | 0 | 32.885 | 0 | 2.992 |
| NT2NE2000809 | 0 | 0 | 0 | 19.976 | 0 | 0 | 8.450 |
| NT2NE2000909 | 0 | 0 | 0 | 0 | 0 | 12.095 | 8.160 |
| NT2NE2001000 | 0 | 0 | 0 | 5.072 | 0 | 0 | 0 |
| NT2NE2001048 | 0 | 0 | 0 | 0 | 0 | 2.765 | 0 |
| NT2NE2001176 | 0 | 0 | 0 | 0 | 0 | 6.330 | 2.847 |
| NT2NE2001337 | 0 | 0 | 0 | 0 | 0 | 16.790 | 0 |
| NT2NE2001435 | 0 | 0 | 0 | 0 | 0 | 7.856 | 5.300 |
| NT2NE2001442 | 0 | 0 | 0 | 0 | 0 | 9.232 | 0 |
| NT2NE2001530 | 0 | 0 | 0 | 0 | 0 | 12.926 | 0 |
| NT2NE2001545 | 0 | 0 | 0 | 10.559 | 0 | 0 | 0 |
| NT2NE2001617 | 0 | 0 | 0 | 0 | 0 | 8.382 | 0 |
| NT2NE2001793 | 0 | 0 | 0 | 0 | 0 | 1.916 | 0 |
| NT2NE2003185 | 0 | 0 | 0 | 0 | 0 | 14.006 | 0 |
| NT2NE2003280 | 0 | 0 | 0 | 0 | 0 | 13.445 | 0 |
| NT2NE2003393 | 0 | 86.291 | 0 | 0 | 0 | 0 | 0 |
| NT2NE2003485 | 0 | 0 | 62.774 | 0 | 0 | 0 | 0 |
| NT2NE2003569 | 0 | 0 | 0 | 10.228 | 0 | 6.412 | 0 |
| NT2NE2004255 | 0 | 0 | 0 | 35.102 | 0 | 0 | 14.848 |
| NT2NE2004519 | 0 | 0 | 0 | 0 | 0 | 6.621 | 0 |
| NT2NE2005371 | 0 | 0 | 0 | 0 | 0 | 0 | 13.745 |
| NT2NE2005395 | 0 | 0 | 0 | 0 | 0 | 50.484 | 0 |
| NT2NE2005688 | 0 | 0 | 0 | 0 | 0 | 4.139 | 0 |
| NT2NE2005876 | 0 | 0 | 0 | 0 | 0 | 5.450 | 14.709 |
| NT2NE2006087 | 0 | 0 | 0 | 0 | 0 | 0 | 50.606 |
| NT2NE2006103 | 0 | 0 | 0 | 0 | 0 | 15.996 | 0 |
| NT2NE2006458 | 0 | 0 | 0 | 0 | 0 | 2.611 | 0 |
| NT2NE2006909 | 0 | 0 | 0 | 0 | 0 | 0.527 | 0.711 |
| NT2NE2006958 | 0 | 0 | 0 | 0 | 0 | 0 | 40.753 |
| NT2NE2008213 | 0 | 0 | 0 | 0 | 0 | 0 | 20.745 |
| NT2NE2009295 | 0 | 0 | 0 | 11.757 | 0 | 0 | 4.973 |
| NT2NE2010056 | 0 | 0 | 0 | 0 | 0 | 0 | 19.976 |
| NT2NE2010842 | 0 | 0 | 0 | 0 | 0 | 3.484 | 2.350 |
| NT2NE2011033 | 0 | 0 | 0 | 0 | 0 | 33.765 | 0 |
| NT2NE2014104 | 0 | 0 | 0 | 9.892 | 0 | 0 | 4.184 |
| NT2NE2014113 | 0 | 0 | 0 | 0 | 0 | 33.527 | 0 |
| NT2NE2019091 | 0 | 0 | 0 | 0 | 0 | 0 | 4.719 |
| NT2RI1000048 | 0 | 57.002 | 0 | 0 | 0 | 1.569 | 6.350 |
| NT2RI1000127 | 0 | 0 | 0 | 0 | 0 | 10.059 | 9.049 |
| NT2RI2000064 | 12.568 | 0 | 0 | 0 | 0 | 1.989 | 0 |
| NT2RI2000116 | 0 | 0 | 0 | 0 | 0 | 21.488 | 0 |
| NT2RI2000133 | 29.915 | 0 | 0 | 0 | 0 | 0 | 0 |
| NT2RI2000255 | 0 | 0 | 0 | 7.054 | 0 | 0 | 0 |
| NT2RI2000282 | 0 | 0 | 0 | 3.731 | 0 | 0 | 0 |
| NT2RI2000294 | 0 | 0 | 0 | 0 | 0 | 3.497 | 9.436 |
| NT2RI2000344 | 0 | 0 | 0 | 0 | 0 | 0 | 4.037 |
| NT2RI2000348 | 0 | 0 | 0 | 0 | 0 | 16.371 | 0 |
| NT2RI2000412 | 0 | 0 | 0 | 0 | 0 | 14.239 | 0 |
| NT2RI2000578 | 0 | 0 | 4.509 | 3.941 | 0 | 0 | 1.667 |
| NT2RI2000685 | 0 | 0 | 0 | 0 | 0 | 3.661 | 2.470 |
| NT2RI2000727 | 0 | 0 | 0 | 0 | 0 | 1.434 | 3.225 |
| NT2RI2000829 | 0 | 0 | 0 | 0 | 0 | 7.056 | 0 |
| NT2RI2001054 | 6.946 | 0 | 0 | 0 | 0 | 0 | 1.483 |
| NT2RI2001091 | 41.046 | 0 | 0 | 0 | 0 | 6.495 | 0 |
| NT2RI2001342 | 0 | 0 | 0 | 0 | 0 | 2.916 | 0 |
| NT2RI2001385 | 0 | 0 | 0 | 0 | 0 | 7.279 | 0 |
| NT2RI2001422 | 0 | 0 | 50.129 | 0 | 0 | 0 | 0 |
| NT2RI2001450 | 0 | 0 | 0 | 0 | 0 | 6.547 | 17.668 |
| NT2RI2001540 | 0.665 | 0 | 1.535 | 0.335 | 0 | 0.631 | 1.277 |
| NT2RI2001621 | 0 | 0 | 0 | 18.040 | 0 | 5.655 | 0 |
| NT2RI2001657 | 6.247 | 0 | 7.215 | 0 | 0 | 0.988 | 0 |
| NT2RI2001731 | 0 | 0 | 0 | 0 | 0 | 3.499 | 0 |
| NT2RI2001859 | 0 | 0 | 0 | 5.719 | 0 | 1.793 | 0 |
| NT2RI2001952 | 0 | 0 | 0 | 0 | 0 | 38.701 | 0 |
| NT2RI2002091 | 0.470 | 0 | 0.543 | 4.110 | 2.205 | 0.025 | 0.033 |
| NT2RI2002117 | 0 | 0 | 0 | 0 | 0 | 0 | 11.744 |
| NT2RI2002152 | 0 | 0 | 0 | 7.411 | 0 | 0 | 0 |
| NT2RI2002316 | 0 | 0 | 10.811 | 9.450 | 0 | 1.481 | 1.999 |
| NT2RI2002391 | 0 | 0 | 0 | 0 | 0 | 4.495 | 4.043 |
| NT2RI2002540 | 0 | 0 | 0 | 0 | 0 | 3.194 | 17.238 |
| NT2RI2002554 | 0 | 0 | 0 | 10.686 | 0 | 6.700 | 9.040 |
| NT2RI2002654 | 0 | 0 | 0 | 0 | 0 | 1.085 | 0 |
| NT2RI2002699 | 0 | 0 | 0 | 0 | 0 | 21.123 | 0 |
| NT2RI2002819 | 0 | 0 | 0 | 0 | 0 | 0 | 9.281 |
| NT2RI2002847 | 0 | 0 | 0 | 0 | 0 | 6.957 | 9.388 |
| NT2RI2002958 | 0 | 0 | 0 | 0 | 0 | 0 | 14.400 |
| NT2RI2003019 | 0 | 0 | 0 | 30.822 | 0 | 0 | 0 |
| NT2RI2003051 | 0 | 0 | 0 | 0 | 0 | 1.891 | 0 |
| NT2RI2003301 | 0 | 0 | 0 | 0 | 0 | 10.486 | 14.149 |
| NT2RI2003304 | 0 | 0 | 0 | 0 | 0 | 0.485 | 0.654 |
| NT2RI2003317 | 0 | 0 | 0 | 9.290 | 0 | 2.912 | 3.929 |
| NT2RI2003361 | 0 | 0 | 0 | 0 | 0 | 0 | 12.312 |
| NT2RI2003383 | 0 | 0 | 0 | 0 | 0 | 67.032 | 0 |
| NT2RI2003407 | 0 | 0 | 0 | 0 | 0 | 2.236 | 0 |
| NT2RI2003420 | 0 | 0 | 0 | 9.075 | 0 | 5.690 | 3.839 |
| NT2RI2003556 | 4.442 | 0 | 0 | 0 | 0 | 0 | 0.948 |
| NT2RI2003695 | 0 | 0 | 0 | 0 | 0 | 7.274 | 0 |
| NT2RI2003738 | 0 | 0 | 0 | 3.093 | 19.175 | 0.646 | 1.744 |
| NT2RI2003751 | 0 | 0 | 0 | 0 | 0 | 2.559 | 3.453 |
| NT2RI2003921 | 0 | 0 | 0 | 2.795 | 12.995 | 0.876 | 1.182 |
| NT2RI2003973 | 0 | 0 | 0 | 0 | 0 | 23.190 | 0 |
| NT2RI2003993 | 0 | 0 | 0 | 0 | 0 | 0 | 9.464 |
| NT2RI2004209 | 0 | 0 | 0 | 0 | 0 | 0 | 18.302 |
| NT2RI2004230 | 0 | 0 | 0 | 0 | 0 | 8.479 | 2.860 |
| NT2RI2004398 | 0 | 0 | 0 | 0 | 0 | 0 | 12.419 |
| NT2RI2004410 | 0 | 0 | 0 | 0 | 0 | 9.215 | 0 |
| NT2RI2004884 | 0 | 0 | 0 | 0 | 0 | 0 | 11.556 |
| NT2RI2005116 | 0 | 0 | 0 | 0 | 0 | 2.362 | 0 |
| NT2RI2005150 | 0 | 0 | 0 | 0 | 0 | 0 | 1.718 |
| NT2RI2005335 | 0 | 0 | 0 | 6.844 | 0 | 2.145 | 0 |
| NT2RI2005353 | 0 | 0 | 0 | 6.789 | 0 | 0 | 2.872 |
| NT2RI2005368 | 0 | 0 | 0 | 0 | 0 | 3.733 | 0 |
| NT2RI2005405 | 0 | 0 | 0 | 6.617 | 0 | 0.519 | 1.400 |
| NT2RI2005564 | 0 | 0 | 0 | 0 | 0 | 0 | 22.207 |
| NT2RI2005579 | 0 | 0 | 0 | 0 | 0 | 17.338 | 0 |
| NT2RI2005713 | 0 | 0 | 0 | 8.715 | 0 | 5.464 | 3.687 |
| NT2RI2005723 | 0 | 0 | 0 | 2.957 | 0 | 1.854 | 2.502 |
| NT2RI2005811 | 17.886 | 0 | 0 | 0 | 0 | 5.661 | 0 |
| NT2RI2005816 | 0 | 0 | 0 | 0 | 0 | 11.809 | 0 |
| NT2RI2005818 | 0 | 0 | 0 | 0 | 0 | 14.116 | 19.048 |
| NT2RI2006072 | 0 | 0 | 0 | 4.509 | 0 | 0 | 0 |
| NT2RI2006183 | 0 | 0 | 0 | 0 | 0 | 0 | 47.686 |
| NT2RI2006412 | 0 | 0 | 0 | 0 | 0 | 0 | 2.043 |
| NT2RI2006506 | 0 | 0 | 0 | 0 | 0 | 24.887 | 0 |
| NT2RI2006647 | 0 | 0 | 0 | 27.023 | 0 | 8.471 | 0 |
| NT2RI2006825 | 0 | 0 | 0 | 0 | 0 | 15.195 | 6.834 |
| NT2RI2006856 | 0 | 0 | 0 | 0 | 0 | 0 | 2.335 |
| NT2RI2006943 | 0 | 0 | 0 | 0 | 0 | 4.494 | 9.096 |
| NT2RI2007054 | 0 | 0 | 0 | 0 | 0 | 2.398 | 0 |
| NT2RI2007133 | 0 | 0 | 0 | 0 | 0 | 0 | 0.978 |
| NT2RI2007277 | 0 | 0 | 0 | 0 | 0 | 10.867 | 9.775 |
| NT2RI2007377 | 0 | 0 | 0 | 0 | 0 | 12.982 | 11.678 |
| NT2RI2007384 | 0 | 0 | 0 | 5.104 | 0 | 0 | 0 |
| NT2RI2007468 | 0 | 0 | 0 | 0 | 0 | 7.719 | 0 |
| NT2RI2007572 | 0 | 0 | 0 | 8.807 | 0 | 5.521 | 1.863 |
| NT2RI2007589 | 0 | 0 | 0 | 0 | 0 | 0 | 15.973 |
| NT2RI2007629 | 0 | 0 | 0 | 11.880 | 0 | 3.724 | 5.025 |
| NT2RI2007723 | 0 | 0 | 0 | 0 | 0 | 0 | 8.819 |
| NT2RI2007884 | 0 | 0 | 0 | 0 | 0 | 4.690 | 0 |
| NT2RI2007987 | 0 | 0 | 0 | 0 | 0 | 0 | 8.977 |
| NT2RI2008045 | 0 | 0 | 10.470 | 0 | 0 | 2.869 | 3.871 |
| NT2RI2008171 | 0 | 0 | 0 | 0 | 0 | 8.203 | 0 |
| NT2RI2008221 | 0 | 74.427 | 0 | 0 | 0 | 0 | 0 |
| NT2RI2008336 | 0 | 0 | 0 | 0 | 0 | 2.960 | 1.997 |
| NT2RI2008396 | 0 | 0 | 0 | 2.598 | 0 | 0.814 | 3.296 |
| NT2RI2008526 | 0 | 0 | 0 | 4.518 | 0 | 0 | 0 |
| NT2RI2008566 | 0 | 0 | 0 | 0 | 0 | 0 | 23.447 |
| NT2RI2008724 | 0 | 0 | 0 | 0 | 0 | 3.393 | 0 |
| NT2RI2008749 | 0 | 0 | 0 | 0 | 0 | 1.045 | 0 |
| NT2RI2008791 | 0 | 0 | 0 | 0 | 0 | 2.155 | 0 |
| NT2RI2008808 | 0 | 0 | 0 | 0 | 0 | 33.500 | 11.301 |
| NT2RI2008942 | 0 | 0 | 0 | 0 | 0 | 1.937 | 5.228 |
| NT2RI2009037 | 0 | 0 | 0 | 0 | 0 | 1.557 | 8.406 |
| NT2RI2009065 | 0 | 0 | 0 | 0 | 0 | 2.588 | 0 |
| NT2RI2009173 | 0 | 0 | 0 | 0 | 0 | 2.061 | 5.561 |
| NT2RI2009194 | 0 | 0 | 0 | 17.375 | 0 | 1.816 | 9.799 |
| NT2RI2009233 | 0 | 0 | 0 | 0 | 0 | 4.167 | 0 |
| NT2RI2009239 | 0 | 0 | 0 | 0 | 0 | 2.582 | 0 |
| NT2RI2009259 | 0 | 0 | 0 | 68.973 | 0 | 0 | 0 |
| NT2RI2009269 | 0 | 0 | 0 | 0 | 0 | 0 | 2.463 |
| NT2RI2009281 | 16.431 | 0 | 0 | 0 | 0 | 0 | 3.508 |
| NT2RI2009402 | 0 | 0 | 0 | 0 | 0 | 0 | 15.637 |
| NT2RI2009406 | 0 | 0 | 0 | 0 | 0 | 5.198 | 14.027 |
| NT2RI2012350 | 4.673 | 26.870 | 0 | 0 | 10.968 | 0 | 0 |
| NT2RI2015342 | 0 | 0 | 0 | 8.866 | 0 | 2.779 | 3.750 |
| NT2RI2015533 | 0 | 0 | 0 | 0 | 0 | 5.742 | 0 |
| NT2RI2017529 | 0 | 0 | 0 | 0 | 0 | 0 | 2.419 |
| NT2RI3000622 | 0 | 0 | 0 | 0 | 0 | 0 | 21.343 |
| NT2RP6000017 | 0 | 0 | 20.175 | 8.818 | 0 | 2.764 | 0 |
| NT2RP6000072 | 0 | 0 | 0 | 0 | 0 | 2.985 | 0 |
| NT2RP6000078 | 0 | 0 | 0 | 0 | 0 | 1.329 | 0 |
| NT2RP6000109 | 0 | 0 | 0 | 0 | 0 | 7.057 | 0 |
| NT2RP6000110 | 0 | 0 | 0 | 0 | 0 | 10.118 | 6.826 |
| NT2RP6000123 | 0 | 0 | 0 | 4.614 | 10.727 | 6.509 | 2.928 |
| NT2RP7000076 | 0 | 0 | 0 | 0 | 0 | 0 | 6.077 |
| NT2RP7000173 | 0 | 0 | 0 | 0 | 0 | 7.190 | 2.772 |
| NT2RP7000238 | 0 | 0 | 0 | 0 | 0 | 0 | 6.454 |
| NT2RP7000271 | 0 | 0 | 0 | 0 | 0 | 5.603 | 0 |
| NT2RP7000425 | 0 | 0 | 0 | 0 | 0 | 0 | 50.844 |
| NT2RP7000477 | 0 | 0 | 0 | 0 | 0 | 3.655 | 0 |
| NT2RP7000624 | 0 | 0 | 0 | 0 | 0 | 8.060 | 0 |
| NT2RP7000906 | 0 | 0 | 0 | 0 | 0 | 0 | 3.252 |
| NT2RP7001166 | 8.732 | 0 | 0 | 0 | 0 | 0 | 0 |
| NT2RP7001231 | 0 | 0 | 0 | 0 | 0 | 38.148 | 0 |
| NT2RP7001283 | 0 | 0 | 0 | 0 | 15.424 | 0 | 0 |
| NT2RP7001591 | 0 | 0 | 0 | 0 | 0 | 0 | 6.481 |
| NT2RP7002028 | 0 | 0 | 0 | 0 | 0 | 0 | 5.010 |
| NT2RP7002379 | 0 | 0 | 0 | 2.967 | 0 | 6.510 | 0 |
| NT2RP7002738 | 0 | 0 | 0 | 0 | 0 | 10.635 | 0 |
| NT2RP7002802 | 0 | 0 | 0 | 0 | 0 | 6.751 | 0 |
| NT2RP7002875 | 0 | 0 | 0 | 0 | 0 | 11.933 | 20.703 |
| NT2RP7003203 | 0 | 0 | 0 | 0 | 0 | 13.650 | 9.209 |
| NT2RP7003261 | 0 | 0 | 0 | 0 | 0 | 2.510 | 0 |
| NT2RP7003319 | 0 | 0 | 0 | 0 | 0 | 0 | 2.274 |
| NT2RP7003511 | 0 | 0 | 0 | 19.474 | 0 | 6.105 | 0 |
| NT2RP7003688 | 0 | 0 | 0 | 0 | 0 | 2.728 | 1.841 |
| NT2RP7003724 | 0 | 0 | 0 | 0 | 0 | 0 | 23.020 |
| NT2RP7003960 | 0 | 0 | 0 | 0 | 0 | 0 | 4.130 |
| NT2RP7004123 | 0 | 0 | 0 | 0 | 0 | 7.090 | 0 |
| NT2RP7004173 | 8.916 | 0 | 0 | 0 | 0 | 2.822 | 3.808 |
| NT2RP7004196 | 0 | 0 | 0 | 0 | 0 | 2.421 | 6.532 |
| NT2RP7004204 | 0 | 0 | 0 | 0 | 0 | 3.150 | 4.251 |
| NT2RP7004348 | 0 | 0 | 0 | 13.318 | 0 | 0 | 5.634 |
| NT2RP7004352 | 0 | 0 | 0 | 0 | 0 | 3.138 | 8.468 |
| NT2RP7004373 | 0 | 0 | 0 | 0 | 0 | 2.174 | 2.934 |
| NT2RP7004481 | 0 | 0 | 0 | 0 | 0 | 9.936 | 0 |
| NT2RP7004728 | 0 | 0 | 0 | 0 | 0 | 5.807 | 7.836 |
| NT2RP7004751 | 0 | 0 | 0 | 2.758 | 0 | 3.459 | 0 |
| NT2RP7004884 | 0 | 0 | 0 | 0 | 0 | 0 | 6.844 |
| NT2RP7004925 | 0 | 0 | 0 | 0 | 0 | 0 | 3.148 |
| NT2RP7004946 | 0 | 0 | 0 | 0 | 0 | 7.952 | 6.438 |
| NT2RP7005513 | 0 | 0 | 0 | 0 | 0 | 3.123 | 4.213 |
| NT2RP7006188 | 0 | 0 | 0 | 0 | 0 | 4.810 | 0 |
| NT2RP7006223 | 0 | 0 | 0 | 0 | 0 | 7.806 | 0 |
| NT2RP7006619 | 0 | 0 | 0 | 0 | 0 | 8.156 | 11.005 |
| NT2RP7006717 | 0 | 0 | 0 | 0 | 0 | 2.431 | 0 |
| NT2RP7006986 | 0 | 0 | 0 | 0 | 0 | 0 | 9.365 |
| NT2RP7007114 | 0 | 0 | 0 | 0 | 0 | 30.267 | 0 |
| NT2RP7007269 | 0 | 0 | 0 | 0 | 0 | 43.392 | 0 |
| NT2RP7007387 | 0 | 0 | 0 | 0 | 0 | 7.584 | 5.117 |
| NT2RP7007530 | 0 | 0 | 0 | 0 | 0 | 12.151 | 0 |
| NT2RP7007842 | 0 | 0 | 0 | 0 | 0 | 3.543 | 4.781 |
| NT2RP7008015 | 0 | 0 | 0 | 0 | 0 | 0 | 2.515 |
| NT2RP7008167 | 0 | 0 | 0 | 5.349 | 0 | 0 | 0 |
| NT2RP7008190 | 0 | 0 | 0 | 7.817 | 0 | 0 | 3.307 |
| NT2RP7008441 | 0 | 0 | 0 | 0 | 0 | 37.192 | 0 |
| NT2RP7008714 | 0 | 0 | 0 | 0 | 0 | 7.165 | 19.335 |
| NT2RP7009030 | 0 | 0 | 0 | 0 | 0 | 17.773 | 0 |
| NT2RP7009087 | 0 | 0 | 0 | 0 | 0 | 8.976 | 0 |
| NT2RP7009097 | 0 | 0 | 0 | 0 | 0 | 3.321 | 0 |
| NT2RP7009108 | 0 | 0 | 0 | 0 | 0 | 0 | 2.216 |
| NT2RP7009225 | 0 | 0 | 0 | 16.577 | 0 | 0 | 0 |
| NT2RP7009259 | 0 | 0 | 0 | 0 | 0 | 2.076 | 0 |
| NT2RP7009394 | 0 | 0 | 0 | 0 | 0 | 6.702 | 0 |
| NT2RP7009481 | 0 | 0 | 0 | 0 | 0 | 0 | 10.209 |
| NT2RP7009482 | 0 | 0 | 0 | 0 | 0 | 0.856 | 1.155 |
| NT2RP7009498 | 0 | 0 | 0 | 0 | 0 | 0 | 2.512 |
| NT2RP7009577 | 0 | 0 | 0 | 0 | 0 | 43.392 | 0 |
| NT2RP7011318 | 0 | 0 | 0 | 0 | 0 | 43.392 | 0 |
| NT2RP7013764 | 0 | 0 | 0 | 0 | 0 | 20.975 | 0 |
| NT2RP7015512 | 0 | 0 | 0 | 0 | 0 | 11.941 | 0 |
| NT2RP7019401 | 0 | 0 | 0 | 0 | 0 | 0 | 25.883 |
| NT2RP8001604 | 0 | 0 | 0 | 0 | 0 | 0 | 17.297 |
| NT2RP8007920 | 0 | 0 | 0 | 0 | 0 | 10.963 | 0 |
| NTONG1000033 | 0 | 0 | 0 | 14.441 | 0 | 2.263 | 0 |
| NTONG1000098 | 0 | 0 | 0 | 3.755 | 17.458 | 1.177 | 0 |
| NTONG1000264 | 0 | 0 | 0 | 0 | 0 | 19.807 | 2.430 |
| NTONG2000265 | 0 | 0 | 0 | 0 | 0 | 0 | 4.250 |
| NTONG2000334 | 0 | 0 | 0 | 0 | 0 | 3.777 | 5.097 |
| NTONG2000878 | 0 | 0 | 0 | 0 | 0 | 4.363 | 0 |
| NTONG2000977 | 11.477 | 0 | 0 | 0 | 0 | 0 | 0 |
| NTONG2000985 | 0 | 0 | 0 | 10.987 | 0 | 3.444 | 0 |
| NTONG2001550 | 0 | 0 | 0 | 0 | 0 | 0 | 8.676 |
| NTONG2001612 | 0 | 0 | 15.137 | 0 | 0 | 2.074 | 0 |
| NTONG2001762 | 0 | 0 | 0 | 0 | 0 | 13.326 | 0 |
| NTONG2004918 | 0 | 0 | 0 | 0 | 0 | 11.964 | 0 |
| NTONG2005520 | 0 | 0 | 0 | 3.923 | 0 | 1.230 | 1.659 |
| NTONG2005897 | 0 | 0 | 0 | 0 | 0 | 0 | 34.223 |
| NTONG2005969 | 0 | 0 | 0 | 0 | 0 | 0 | 8.008 |
| NTONG2006709 | 0 | 0 | 0 | 0 | 0 | 16.742 | 0 |
| NTONG2008483 | 0 | 0 | 0 | 0 | 0 | 1.476 | 1.992 |
| OCBBF1000049 | 0 | 0 | 0 | 0 | 0 | 9.180 | 12.388 |
| OCBBF1000067 | 0 | 0 | 0 | 0 | 0 | 13.507 | 63.788 |
| OCBBF1000080 | 0 | 0 | 0 | 0 | 0 | 35.323 | 0 |
| OCBBF1000104 | 0 | 0 | 0 | 0 | 0 | 38.054 | 0 |
| OCBBF1000114 | 0 | 0 | 0 | 0 | 0 | 0 | 6.355 |
| OCBBF1000146 | 0 | 0 | 0 | 0 | 0 | 12.749 | 17.203 |
| OCBBF1000153 | 0 | 0 | 0 | 0 | 0 | 15.675 | 0 |
| OCBBF1000185 | 0 | 0 | 0 | 0 | 0 | 15.555 | 0 |
| OCBBF1000188 | 0 | 0 | 0 | 0 | 0 | 1.924 | 0 |
| OCBBF2000013 | 0 | 0 | 0 | 0 | 0 | 3.595 | 14.552 |
| OCBBF2000015 | 0 | 0 | 0 | 0 | 0 | 2.923 | 0 |
| OCBBF2000126 | 0 | 0 | 0 | 0 | 0 | 0 | 9.689 |
| OCBBF2000178 | 0 | 0 | 0 | 0 | 0 | 6.043 | 5.436 |
| OCBBF2000277 | 0 | 0 | 0 | 0 | 0 | 13.573 | 0 |
| OCBBF2000323 | 0 | 0 | 0 | 0 | 0 | 28.033 | 37.827 |
| OCBBF2000467 | 0 | 0 | 0 | 0 | 0 | 14.905 | 10.056 |
| OCBBF2000831 | 0 | 0 | 0 | 0 | 0 | 17.790 | 0 |
| OCBBF2000846 | 0 | 0 | 0 | 0 | 0 | 2.704 | 1.824 |
| OCBBF2000904 | 0 | 0 | 0 | 0 | 0 | 22.402 | 10.076 |
| OCBBF2000986 | 0 | 0 | 0 | 0 | 0 | 3.561 | 0 |
| OCBBF2001166 | 0 | 0 | 0 | 0 | 0 | 20.251 | 0 |
| OCBBF2001210 | 0 | 0 | 0 | 0 | 0 | 13.397 | 0 |
| OCBBF2001252 | 0 | 0 | 0 | 0 | 0 | 34.015 | 22.949 |
| OCBBF2001323 | 0 | 0 | 0 | 0 | 0 | 47.657 | 0 |
| OCBBF2001402 | 0 | 0 | 0 | 0 | 0 | 59.793 | 0 |
| OCBBF2001492 | 0 | 0 | 0 | 0 | 0 | 2.535 | 0 |
| OCBBF2001639 | 0 | 0 | 0 | 0 | 0 | 0 | 11.723 |
| OCBBF2001687 | 0 | 0 | 0 | 0 | 0 | 10.661 | 0 |
| OCBBF2001749 | 0 | 0 | 0 | 0 | 0 | 59.793 | 0 |
| OCBBF2001794 | 0 | 0 | 0 | 0 | 0 | 0 | 11.785 |
| OCBBF2002290 | 0 | 0 | 0 | 0 | 0 | 18.632 | 0 |
| OCBBF2002376 | 0 | 0 | 0 | 0 | 0 | 14.065 | 0 |
| OCBBF2002626 | 0 | 0 | 0 | 0 | 0 | 1.560 | 0 |
| OCBBF2002656 | 0 | 0 | 0 | 0 | 0 | 9.168 | 0 |
| OCBBF2002663 | 0 | 0 | 0 | 0 | 0 | 59.793 | 0 |
| OCBBF2003052 | 0 | 0 | 0 | 0 | 0 | 28.068 | 9.469 |
| OCBBF2003246 | 0 | 0 | 0 | 0 | 0 | 0 | 24.396 |
| OCBBF2003518 | 0 | 0 | 0 | 0 | 0 | 0 | 2.570 |
| OCBBF2003925 | 0 | 0 | 0 | 9.821 | 0 | 0 | 2.077 |
| OCBBF2004038 | 0 | 0 | 0 | 0 | 0 | 0 | 66.741 |
| OCBBF2004104 | 0 | 0 | 0 | 0 | 0 | 15.181 | 13.657 |
| OCBBF2004273 | 0 | 0 | 0 | 0 | 0 | 3.312 | 0 |
| OCBBF2004757 | 0 | 0 | 0 | 0 | 0 | 18.314 | 30.890 |
| OCBBF2004930 | 0 | 0 | 0 | 0 | 0 | 0 | 25.873 |
| OCBBF2004984 | 0 | 0 | 0 | 0 | 0 | 44.001 | 0 |
| OCBBF2005428 | 0 | 0 | 0 | 0 | 0 | 6.090 | 0 |
| OCBBF2005956 | 0 | 0 | 0 | 0 | 0 | 5.245 | 0 |
| OCBBF2006113 | 0 | 0 | 0 | 0 | 0 | 48.624 | 0 |
| OCBBF2006172 | 0 | 0 | 0 | 0 | 0 | 0 | 13.071 |
| OCBBF2006313 | 0 | 0 | 0 | 0 | 0 | 0 | 14.234 |
| OCBBF2006764 | 0 | 0 | 0 | 0 | 0 | 28.349 | 0 |
| OCBBF2006849 | 0 | 0 | 0 | 0 | 0 | 3.734 | 0 |
| OCBBF2006859 | 0 | 0 | 0 | 0 | 0 | 0 | 18.676 |
| OCBBF2007028 | 0 | 0 | 0 | 8.137 | 0 | 5.102 | 3.442 |
| OCBBF2007196 | 0 | 0 | 0 | 0 | 0 | 33.142 | 0 |
| OCBBF2007415 | 0 | 0 | 0 | 0 | 0 | 2.959 | 0 |
| OCBBF2007762 | 0 | 0 | 0 | 0 | 0 | 29.049 | 0 |
| OCBBF2007829 | 0 | 0 | 0 | 6.472 | 0 | 3.043 | 2.737 |
| OCBBF2007892 | 0 | 0 | 0 | 0 | 0 | 0 | 21.239 |
| OCBBF2008005 | 0 | 0 | 0 | 0 | 0 | 11.733 | 7.916 |
| OCBBF2008041 | 0 | 0 | 0 | 0 | 0 | 7.723 | 0 |
| OCBBF2008340 | 0 | 0 | 0 | 0 | 0 | 28.522 | 0 |
| OCBBF2008466 | 0 | 0 | 0 | 0 | 0 | 0 | 42.651 |
| OCBBF2008701 | 0 | 0 | 0 | 0 | 0 | 0 | 27.016 |
| OCBBF2008770 | 0 | 0 | 0 | 0 | 0 | 24.703 | 33.334 |
| OCBBF2009301 | 0 | 0 | 0 | 0 | 0 | 0 | 5.167 |
| OCBBF2009391 | 0 | 0 | 0 | 0 | 0 | 59.793 | 0 |
| OCBBF2009424 | 0 | 0 | 0 | 0 | 0 | 13.407 | 0 |
| OCBBF2009772 | 0 | 0 | 0 | 0 | 0 | 4.351 | 0 |
| OCBBF2009836 | 0 | 0 | 0 | 0 | 0 | 7.570 | 10.215 |
| OCBBF2010819 | 0 | 0 | 0 | 0 | 0 | 23.173 | 0 |
| OCBBF2010830 | 0 | 0 | 0 | 0 | 0 | 1.626 | 0 |
| OCBBF2010841 | 0 | 0 | 0 | 0 | 0 | 11.483 | 0 |
| OCBBF2010843 | 0 | 0 | 0 | 0 | 0 | 27.517 | 0 |
| OCBBF2010871 | 0 | 0 | 0 | 0 | 0 | 25.333 | 0 |
| OCBBF2011021 | 0 | 0 | 0 | 0 | 0 | 2.670 | 0 |
| OCBBF2011073 | 0 | 0 | 0 | 0 | 0 | 0 | 25.519 |
| OCBBF2011232 | 0 | 0 | 0 | 0 | 0 | 0 | 19.973 |
| OCBBF2011536 | 0 | 0 | 0 | 0 | 0 | 3.686 | 9.946 |
| OCBBF2011625 | 0 | 0 | 0 | 0 | 0 | 0 | 66.741 |
| OCBBF2011759 | 0 | 0 | 0 | 0 | 0 | 3.453 | 0 |
| OCBBF2011887 | 0 | 0 | 0 | 0 | 0 | 8.688 | 0 |
| OCBBF2012095 | 0 | 0 | 0 | 0 | 0 | 0 | 38.146 |
| OCBBF2012191 | 0 | 0 | 0 | 0 | 0 | 59.793 | 0 |
| OCBBF2012553 | 0 | 0 | 0 | 6.912 | 0 | 4.333 | 11.695 |
| OCBBF2012678 | 0 | 0 | 0 | 0 | 0 | 25.486 | 0 |
| OCBBF2012821 | 0 | 0 | 0 | 0 | 0 | 9.245 | 0 |
| OCBBF2012908 | 0 | 0 | 0 | 0 | 0 | 18.162 | 8.169 |
| OCBBF2013011 | 0 | 0 | 0 | 0 | 0 | 13.949 | 0 |
| OCBBF2013149 | 0 | 0 | 0 | 0 | 0 | 0 | 7.733 |
| OCBBF2013481 | 0 | 0 | 0 | 0 | 0 | 10.100 | 0 |
| OCBBF2013789 | 0 | 0 | 0 | 0 | 0 | 27.881 | 0 |
| OCBBF2013843 | 0 | 0 | 0 | 0 | 0 | 2.961 | 3.996 |
| OCBBF2013926 | 0 | 0 | 0 | 0 | 0 | 22.924 | 0 |
| OCBBF2014064 | 0 | 0 | 0 | 0 | 0 | 2.523 | 10.215 |
| OCBBF2014292 | 0 | 0 | 0 | 0 | 0 | 19.134 | 0 |
| OCBBF2014322 | 0 | 0 | 0 | 0 | 0 | 0 | 51.462 |
| OCBBF2014386 | 0 | 0 | 0 | 0 | 0 | 33.591 | 0 |
| OCBBF2014541 | 0 | 0 | 0 | 0 | 0 | 7.244 | 9.774 |
| OCBBF2014873 | 0 | 0 | 0 | 0 | 0 | 26.202 | 0 |
| OCBBF2014880 | 0 | 0 | 0 | 0 | 0 | 59.793 | 0 |
| OCBBF2014928 | 0 | 0 | 0 | 0 | 0 | 59.793 | 0 |
| OCBBF2015503 | 0 | 0 | 0 | 0 | 0 | 41.591 | 0 |
| OCBBF2015599 | 0 | 0 | 0 | 0 | 0 | 59.793 | 0 |
| OCBBF2015751 | 0 | 0 | 0 | 0 | 0 | 5.235 | 0 |
| OCBBF2016405 | 0 | 0 | 0 | 0 | 0 | 71.253 | 0 |
| OCBBF2016928 | 31.972 | 0 | 0 | 0 | 0 | 5.059 | 0 |
| OCBBF2017035 | 0 | 0 | 0 | 0 | 0 | 4.479 | 6.044 |
| OCBBF2017398 | 0 | 0 | 0 | 0 | 0 | 2.376 | 0 |
| OCBBF2017458 | 0 | 0 | 0 | 0 | 0 | 20.570 | 0 |
| OCBBF2017754 | 0 | 0 | 0 | 0 | 0 | 6.936 | 9.360 |
| OCBBF2017791 | 0 | 0 | 0 | 0 | 0 | 4.733 | 6.386 |
| OCBBF2017888 | 0 | 0 | 0 | 0 | 0 | 31.476 | 0 |
| OCBBF2017893 | 0 | 0 | 0 | 0 | 0 | 0 | 4.324 |
| OCBBF2018012 | 0 | 0 | 0 | 0 | 0 | 5.185 | 0 |
| OCBBF2018234 | 0 | 0 | 0 | 0 | 0 | 23.932 | 0 |
| OCBBF2018707 | 0 | 0 | 0 | 0 | 0 | 0 | 11.213 |
| OCBBF2018873 | 0 | 0 | 0 | 0 | 0 | 5.120 | 0 |
| OCBBF2018956 | 0 | 0 | 0 | 9.974 | 0 | 0 | 0 |
| OCBBF2021286 | 0 | 0 | 0 | 0 | 0 | 0 | 23.004 |
| OCBBF2023162 | 0 | 0 | 0 | 0 | 0 | 18.995 | 0 |
| OCBBF2026368 | 0 | 0 | 0 | 0 | 0 | 0 | 20.599 |
| OCBBF2033295 | 0 | 0 | 0 | 0 | 0 | 19.428 | 0 |
| OCBBF2035226 | 0 | 0 | 0 | 0 | 0 | 1.085 | 0 |
| OCBBF3000323 | 0 | 0 | 0 | 0 | 0 | 0 | 16.582 |
| PEBLM1000174 | 0 | 0 | 0 | 0 | 0 | 8.835 | 0 |
| PEBLM2000308 | 0 | 0 | 0 | 0 | 0 | 18.312 | 0 |
| PEBLM2000395 | 10.626 | 0 | 0 | 0 | 0 | 5.044 | 0 |
| PEBLM2003914 | 0 | 0 | 0 | 12.522 | 0 | 0 | 0 |
| PEBLM2006366 | 32.312 | 0 | 0 | 0 | 0 | 0 | 0 |
| PEBLM2007296 | 0 | 0 | 0 | 0 | 47.388 | 0 | 4.311 |
| PEBLM2007774 | 7.033 | 20.220 | 0 | 1.775 | 0 | 0 | 0 |
| PLACE5000113 | 0 | 0 | 0 | 0 | 0 | 6.357 | 0 |
| PLACE5000159 | 0 | 0 | 0 | 0 | 0 | 16.795 | 0 |
| PLACE5000170 | 0 | 0 | 0 | 0 | 0 | 6.423 | 0 |
| PLACE5000172 | 0 | 0 | 0 | 0 | 0 | 0 | 3.240 |
| PLACE6000145 | 12.099 | 0 | 0 | 0 | 0 | 0 | 0 |
| PLACE6000263 | 0 | 0 | 0 | 8.960 | 0 | 0 | 0 |
| PLACE6000379 | 0 | 0 | 0 | 1.041 | 0 | 3.263 | 6.164 |
| PLACE6000463 | 0 | 0 | 0 | 0 | 0 | 14.415 | 0 |
| PLACE6001064 | 0 | 0 | 0 | 3.381 | 0 | 4.240 | 0 |
| PLACE6001262 | 0 | 0 | 0 | 0 | 0 | 0 | 21.783 |
| PLACE6001281 | 0 | 0 | 0 | 0 | 0 | 0 | 8.582 |
| PLACE6001443 | 0 | 0 | 0 | 11.576 | 0 | 0 | 0 |
| PLACE6002084 | 4.312 | 0 | 4.980 | 4.353 | 0 | 0.682 | 0 |
| PLACE6002102 | 0 | 0 | 0 | 0 | 0 | 5.218 | 0 |
| PLACE6004005 | 0 | 0 | 0 | 0 | 0 | 5.472 | 29.535 |
| PLACE6004312 | 0 | 0 | 8.132 | 3.554 | 0 | 1.114 | 1.503 |
| PLACE6004931 | 76.447 | 0 | 0 | 0 | 0 | 0 | 0 |
| PLACE6007436 | 0 | 0 | 0 | 0 | 0 | 6.637 | 8.956 |
| PLACE6008775 | 0 | 0 | 0 | 0 | 0 | 0 | 4.595 |
| PLACE6010077 | 0 | 0 | 11.740 | 5.131 | 0 | 0 | 2.170 |
| PLACE6010848 | 0 | 0 | 0 | 0 | 0 | 15.118 | 0 |
| PLACE6011041 | 0 | 0 | 0 | 0 | 0 | 0 | 6.782 |
| PLACE6011057 | 0 | 0 | 30.391 | 0 | 0 | 0 | 0 |
| PLACE6013222 | 0 | 0 | 0 | 0 | 0 | 27.309 | 0 |
| PLACE6015051 | 0 | 0 | 0 | 0 | 0 | 8.516 | 0 |
| PLACE6016210 | 0 | 0 | 0 | 0 | 0 | 0 | 31.569 |
| PLACE6016942 | 0 | 0 | 0 | 0 | 0 | 0 | 9.752 |
| PLACE6018031 | 0 | 0 | 0 | 0 | 0 | 0 | 16.761 |
| PROST1000097 | 0 | 0 | 0 | 0 | 0 | 0 | 1.466 |
| PROST1000120 | 0 | 0 | 0 | 0 | 0 | 6.092 | 0 |
| PROST1000199 | 8.530 | 0 | 0 | 0 | 0 | 1.350 | 0 |
| PROST1000215 | 0 | 0 | 0 | 0 | 0 | 9.449 | 0 |
| PROST1000272 | 0 | 0 | 0 | 0 | 0 | 0 | 15.731 |
| PROST1000526 | 0 | 0 | 0 | 0 | 0 | 4.668 | 0 |
| PROST2000079 | 0 | 0 | 0 | 0 | 0 | 5.530 | 0 |
| PROST2000138 | 0 | 0 | 0 | 0 | 0 | 0.160 | 0 |
| PROST2000165 | 0 | 0 | 0 | 0 | 0 | 50.609 | 0 |
| PROST2000241 | 71.444 | 0 | 0 | 0 | 0 | 0 | 0 |
| PROST2000337 | 0 | 0 | 0 | 0 | 0 | 34.251 | 0 |
| PROST2000893 | 0 | 0 | 0 | 0 | 0 | 0 | 41.278 |
| PROST2001180 | 0 | 0 | 0 | 0 | 0 | 4.587 | 6.190 |
| PROST2001213 | 0 | 0 | 0 | 0 | 0 | 0 | 20.781 |
| PROST2001823 | 0 | 0 | 0 | 0 | 0 | 34.251 | 0 |
| PROST2001883 | 0 | 59.960 | 0 | 0 | 0 | 0 | 0 |
| PROST2002078 | 0 | 0 | 0 | 0 | 66.593 | 0 | 0 |
| PROST2003338 | 0 | 0 | 0 | 0 | 0 | 4.136 | 5.581 |
| PROST2004095 | 0 | 0 | 0 | 2.758 | 0 | 5.188 | 1.167 |
| PROST2004258 | 0 | 0 | 0 | 22.485 | 0 | 0 | 9.511 |
| PROST2004270 | 0 | 0 | 0 | 0 | 0 | 2.173 | 0 |
| PROST2004416 | 0 | 0 | 0 | 0 | 0 | 0 | 1.695 |
| PROST2004570 | 0 | 0 | 0 | 0 | 0 | 13.848 | 0 |
| PROST2005039 | 0 | 0 | 0 | 0 | 0 | 25.460 | 0 |
| PROST2005143 | 0 | 0 | 0 | 0 | 0 | 12.533 | 0 |
| PROST2005793 | 0 | 0 | 0 | 0 | 0 | 7.245 | 0 |
| PROST2006030 | 0 | 0 | 0 | 0 | 0 | 6.990 | 0 |
| PROST2006536 | 0 | 0 | 0 | 0 | 0 | 16.398 | 22.127 |
| PROST2007612 | 0 | 0 | 0 | 0 | 0 | 11.799 | 0 |
| PROST2008268 | 0 | 0 | 0 | 0 | 0 | 34.251 | 0 |
| PROST2008271 | 0 | 0 | 0 | 0 | 0 | 7.240 | 0 |
| PROST2008360 | 0 | 0 | 0 | 0 | 0 | 3.325 | 0 |
| PROST2008770 | 0 | 0 | 0 | 0 | 0 | 0 | 1.945 |
| PROST2010382 | 0 | 0 | 0 | 0 | 85.749 | 0 | 0 |
| PROST2010782 | 0 | 0 | 3.279 | 0 | 0 | 0 | 0 |
| PROST2011038 | 0 | 0 | 0 | 0 | 0 | 0 | 29.914 |
| PROST2011482 | 0 | 0 | 0 | 0 | 0 | 34.251 | 0 |
| PROST2011577 | 0 | 0 | 0 | 0 | 0 | 5.703 | 0 |
| PROST2012007 | 0 | 0 | 0 | 0 | 0 | 2.097 | 0 |
| PROST2012448 | 0 | 0 | 0 | 0 | 0 | 15.073 | 0 |
| PROST2015332 | 0 | 0 | 0 | 0 | 0 | 0 | 6.425 |
| PROST2017529 | 0 | 0 | 0 | 14.958 | 0 | 0 | 0 |
| PROST2018977 | 0 | 0 | 0 | 0 | 0 | 24.007 | 0 |
| PROST2019253 | 0 | 0 | 0 | 0 | 0 | 52.767 | 20.942 |
| PUAEN1000057 | 0 | 0 | 0 | 0 | 0 | 3.793 | 0 |
| PUAEN1000164 | 4.647 | 0 | 0 | 0 | 0 | 0 | 0.992 |
| PUAEN1000239 | 0 | 0 | 0 | 0 | 0 | 5.727 | 0 |
| PUAEN2000312 | 0 | 0 | 0 | 0 | 0 | 16.356 | 0 |
| PUAEN2000374 | 0 | 0 | 0 | 1.886 | 8.770 | 0 | 0 |
| PUAEN2000535 | 0 | 0 | 0 | 0 | 0 | 1.486 | 0 |
| PUAEN2000942 | 0 | 0 | 0 | 0 | 0 | 24.665 | 0 |
| PUAEN2001345 | 0 | 0 | 0 | 0 | 80.232 | 0 | 0 |
| PUAEN2002489 | 0 | 0 | 0 | 0 | 0 | 24.108 | 0 |
| PUAEN2003408 | 0 | 0 | 40.610 | 0 | 0 | 5.564 | 15.015 |
| PUAEN2007044 | 0 | 0 | 0 | 16.894 | 0 | 0 | 0 |
| PUAEN2009655 | 0 | 0 | 49.285 | 0 | 0 | 0 | 0 |
| RECTM1000051 | 0 | 0 | 31.123 | 0 | 0 | 0 | 0 |
| RECTM2000349 | 0 | 0 | 0 | 0 | 0 | 7.826 | 0 |
| SALGL1000157 | 0 | 8.730 | 0 | 1.533 | 0 | 0 | 0.324 |
| SKMUS1000022 | 0 | 0 | 0 | 0 | 11.405 | 0 | 0 |
| SKMUS1000084 | 0 | 0 | 0 | 0 | 0 | 2.845 | 0 |
| SKMUS1000186 | 0 | 0 | 0 | 0 | 0 | 0.742 | 0 |
| SKMUS2000020 | 0 | 0 | 0 | 0 | 0 | 0 | 9.182 |
| SKMUS2000074 | 0 | 0 | 0 | 0 | 0 | 9.448 | 0 |
| SKMUS2000361 | 0 | 0 | 0 | 6.302 | 0 | 0 | 2.666 |
| SKMUS2000380 | 0 | 0 | 0 | 0 | 0 | 0 | 5.406 |
| SKMUS2000484 | 0 | 0 | 0 | 0 | 0 | 0 | 8.755 |
| SKMUS2000690 | 0 | 0 | 65.679 | 0 | 0 | 0 | 0 |
| SKMUS2000902 | 0 | 0 | 0 | 31.874 | 0 | 0 | 0 |
| SKMUS2000931 | 0 | 0 | 0 | 6.414 | 0 | 0 | 1.356 |
| SKMUS2001147 | 0 | 0 | 0 | 0 | 0 | 5.121 | 0 |
| SKMUS2001402 | 0 | 0 | 0 | 0 | 0 | 0 | 10.509 |
| SKMUS2001454 | 0 | 0 | 0 | 0 | 0 | 2.494 | 0.841 |
| SKNMC1000110 | 0 | 0 | 0 | 0 | 0 | 6.689 | 0 |
| SKNMC1000168 | 0 | 0 | 0 | 0 | 22.946 | 0 | 2.088 |
| SKNMC1000229 | 0 | 0 | 0 | 0 | 0 | 9.712 | 0 |
| SKNMC2000065 | 0 | 0 | 0 | 6.362 | 0 | 7.977 | 5.382 |
| SKNMC2000097 | 0 | 0 | 0 | 0 | 0 | 0.823 | 1.111 |
| SKNMC2000305 | 0 | 0 | 0 | 0 | 0 | 0 | 8.781 |
| SKNMC2000356 | 0 | 0 | 0 | 0 | 0 | 16.334 | 0 |
| SKNMC2000635 | 0 | 0 | 0 | 4.228 | 0 | 0 | 0 |
| SKNMC2000649 | 0 | 0 | 0 | 5.377 | 0 | 1.685 | 0 |
| SKNMC2000698 | 0 | 0 | 0 | 0 | 0 | 3.816 | 0 |
| SKNMC2000877 | 0 | 0 | 0 | 0 | 0 | 2.189 | 2.954 |
| SKNSH1000002 | 0 | 0 | 0 | 8.471 | 0 | 0 | 0 |
| SKNSH2000163 | 0 | 0 | 0 | 0 | 0 | 19.605 | 0 |
| SKNSH2000347 | 0 | 0 | 0 | 26.446 | 0 | 0 | 0 |
| SKNSH2000716 | 0 | 0 | 0 | 0 | 0 | 6.404 | 4.320 |
| SKNSH2000819 | 0 | 0 | 0 | 0 | 0 | 4.598 | 0 |
| SKNSH2003528 | 0 | 0 | 40.935 | 0 | 0 | 5.608 | 0 |
| SKNSH2006234 | 0 | 0 | 0 | 20.629 | 0 | 0 | 0 |
| SKNSH2008940 | 0 | 0 | 25.857 | 0 | 0 | 0 | 0 |
| SKNSH2009357 | 0 | 0 | 0 | 0 | 0 | 0 | 23.814 |
| SMINT1000117 | 0 | 0 | 0 | 0 | 0 | 7.290 | 0 |
| SMINT2000007 | 0 | 0 | 0 | 0 | 0 | 0 | 14.994 |
| SMINT2000073 | 0 | 0 | 0 | 0 | 0 | 32.054 | 0 |
| SMINT2000396 | 0 | 0 | 0 | 21.642 | 0 | 6.784 | 0 |
| SMINT2000441 | 0 | 0 | 0 | 2.660 | 0 | 0.834 | 2.250 |
| SMINT2000468 | 0 | 0 | 0 | 0 | 0 | 0 | 5.704 |
| SMINT2000602 | 6.417 | 0 | 7.412 | 0 | 0 | 0 | 0 |
| SMINT2000629 | 0 | 0 | 0 | 0 | 0 | 4.961 | 6.695 |
| SMINT2000694 | 0 | 0 | 0 | 0 | 0 | 0 | 2.963 |
| SMINT2002159 | 0 | 0 | 0 | 40.407 | 0 | 0 | 0 |
| SMINT2002620 | 0 | 0 | 0 | 0 | 0 | 4.186 | 0 |
| SMINT2002689 | 0 | 0 | 0 | 0 | 0 | 0 | 2.930 |
| SMINT2002884 | 43.124 | 0 | 0 | 0 | 0 | 0 | 0 |
| SMINT2003074 | 0 | 0 | 0 | 0 | 0 | 7.597 | 0 |
| SMINT2003169 | 5.491 | 0 | 0 | 0 | 0 | 0 | 0 |
| SMINT2003340 | 0 | 0 | 39.619 | 0 | 0 | 0 | 7.324 |
| SMINT2003505 | 36.765 | 0 | 0 | 0 | 0 | 0 | 0 |
| SMINT2004729 | 0 | 0 | 0 | 0 | 0 | 23.727 | 0 |
| SMINT2004872 | 0 | 0 | 0 | 12.464 | 0 | 0 | 0 |
| SMINT2004972 | 0 | 0 | 0 | 46.681 | 0 | 0 | 19.746 |
| SMINT2005368 | 0 | 0 | 0 | 0 | 0 | 2.170 | 0 |
| SMINT2006716 | 0 | 0 | 0 | 0 | 0 | 0 | 58.556 |
| SMINT2007508 | 0 | 0 | 0 | 0 | 0 | 0 | 41.399 |
| SMINT2008921 | 0 | 0 | 0 | 0 | 0 | 2.050 | 0 |
| SMINT2008960 | 0 | 0 | 9.225 | 0 | 0 | 1.264 | 1.705 |
| SMINT2010084 | 0 | 0 | 0 | 0 | 0 | 0 | 8.566 |
| SMINT2010426 | 0 | 0 | 0 | 31.925 | 0 | 0 | 0 |
| SMINT2010901 | 0 | 0 | 0 | 0 | 0 | 6.488 | 0 |
| SMINT2011588 | 0 | 0 | 0 | 0 | 0 | 34.363 | 0 |
| SMINT2018681 | 48.822 | 0 | 0 | 0 | 0 | 0 | 0 |
| SPLEN1000049 | 0 | 0 | 0 | 0 | 0 | 40.275 | 0 |
| SPLEN1000089 | 0 | 0 | 40.187 | 0 | 27.222 | 0 | 0 |
| SPLEN1000106 | 0 | 0 | 0 | 0 | 0 | 4.300 | 0 |
| SPLEN1000116 | 0 | 0 | 0 | 0 | 13.562 | 0 | 1.234 |
| SPLEN1000166 | 0 | 0 | 0 | 0 | 0 | 12.530 | 2.818 |
| SPLEN2000255 | 0 | 0 | 0 | 0 | 0 | 2.837 | 3.828 |
| SPLEN2000267 | 0 | 0 | 0 | 0 | 0 | 0 | 14.553 |
| SPLEN2000348 | 0 | 0 | 0 | 0 | 0 | 0 | 6.974 |
| SPLEN2000505 | 0 | 0 | 5.683 | 2.484 | 0 | 1.557 | 0 |
| SPLEN2000698 | 0 | 0 | 28.593 | 0 | 0 | 0 | 0 |
| SPLEN2000882 | 0 | 0 | 0 | 10.353 | 0 | 0 | 0 |
| SPLEN2001599 | 0 | 0 | 0 | 0 | 0 | 0 | 17.788 |
| SPLEN2001689 | 0 | 0 | 0 | 0 | 0 | 0 | 34.793 |
| SPLEN2002007 | 0 | 0 | 0 | 0 | 0 | 0 | 47.573 |
| SPLEN2002335 | 0 | 0 | 0 | 0 | 27.746 | 3.741 | 2.524 |
| SPLEN2002467 | 0 | 0 | 0 | 0 | 0 | 6.019 | 0 |
| SPLEN2004078 | 0 | 0 | 0 | 0 | 0 | 27.607 | 0 |
| SPLEN2004555 | 0 | 0 | 0 | 0 | 0 | 3.933 | 2.653 |
| SPLEN2004773 | 16.618 | 0 | 9.597 | 0 | 0 | 2.630 | 3.548 |
| SPLEN2005009 | 0 | 0 | 0 | 0 | 0 | 15.882 | 0 |
| SPLEN2005342 | 0 | 0 | 0 | 0 | 0 | 19.711 | 13.299 |
| SPLEN2005869 | 74.977 | 0 | 0 | 0 | 0 | 0 | 0 |
| SPLEN2006122 | 0 | 0 | 0 | 0 | 23.078 | 0 | 2.099 |
| SPLEN2006133 | 0 | 0 | 0 | 0 | 0 | 1.753 | 0 |
| SPLEN2006143 | 0 | 0 | 0 | 0 | 0 | 4.133 | 0 |
| SPLEN2006232 | 33.489 | 0 | 0 | 0 | 0 | 0 | 0 |
| SPLEN2006305 | 0 | 0 | 0 | 0 | 17.309 | 1.167 | 0 |
| SPLEN2006374 | 0 | 0 | 0 | 0 | 0 | 2.808 | 0 |
| SPLEN2007276 | 0 | 0 | 35.761 | 0 | 0 | 0 | 0 |
| SPLEN2007498 | 0 | 0 | 0 | 0 | 0 | 4.835 | 19.572 |
| SPLEN2007951 | 0 | 0 | 0 | 0 | 0 | 0 | 58.898 |
| SPLEN2008460 | 30.589 | 0 | 0 | 0 | 0 | 0 | 0 |
| SPLEN2009081 | 0 | 0 | 0 | 0 | 0 | 0 | 16.134 |
| SPLEN2010195 | 4.529 | 0 | 5.231 | 2.286 | 0 | 0 | 0 |
| SPLEN2011419 | 0 | 0 | 0 | 14.082 | 0 | 0 | 0 |
| SPLEN2012571 | 0 | 0 | 0 | 0 | 0 | 0 | 7.925 |
| SPLEN2013821 | 87.032 | 0 | 0 | 0 | 0 | 0 | 0 |
| SPLEN2013936 | 0 | 0 | 0 | 0 | 0 | 12.327 | 0 |
| SPLEN2014080 | 55.315 | 0 | 0 | 0 | 0 | 0 | 0 |
| SPLEN2014381 | 0 | 0 | 0 | 0 | 0 | 0 | 74.133 |
| SPLEN2015310 | 0 | 0 | 0 | 0 | 0 | 0 | 1.429 |
| SPLEN2016139 | 29.917 | 0 | 0 | 0 | 0 | 0 | 0 |
| SPLEN2016268 | 0 | 0 | 0 | 2.546 | 0 | 3.991 | 0 |
| SPLEN2016972 | 0 | 0 | 0 | 0 | 0 | 3.746 | 0 |
| SPLEN2017318 | 0 | 0 | 0 | 0 | 0 | 9.374 | 0 |
| SPLEN2018157 | 0 | 0 | 0 | 0 | 0 | 13.368 | 0 |
| SPLEN2018159 | 0 | 0 | 0 | 55.812 | 0 | 0 | 0 |
| SPLEN2019169 | 0 | 0 | 0 | 0 | 0 | 10.459 | 0 |
| SPLEN2019405 | 0 | 0 | 0 | 0 | 0 | 2.646 | 0 |
| SPLEN2019505 | 0 | 0 | 66.106 | 0 | 0 | 9.057 | 12.221 |
| SPLEN2021194 | 0 | 0 | 0 | 0 | 0 | 12.464 | 0 |
| SPLEN2027113 | 0 | 0 | 0 | 9.643 | 0 | 0 | 0 |
| SPLEN2028365 | 0 | 0 | 0 | 0 | 94.03 | 0 | 0 |
| SPLEN2028424 | 0 | 0 | 0 | 0 | 0 | 51.503 | 0 |
| SPLEN2028466 | 0 | 0 | 0 | 0 | 0 | 0 | 1.031 |
| SPLEN2032157 | 0 | 0 | 0 | 0 | 0 | 0 | 14.245 |
| SPLEN2036932 | 0 | 0 | 0 | 0 | 0 | 0 | 21.926 |
| SPLEN2039379 | 0 | 0 | 0 | 0 | 0 | 0 | 7.220 |
| STOMA1000189 | 0 | 0 | 0 | 9.216 | 0 | 0 | 0 |
| STOMA2000395 | 0 | 0 | 0 | 0 | 0 | 0 | 5.322 |
| SYNOV1000124 | 0 | 0 | 0 | 0 | 0 | 6.166 | 1.387 |
| SYNOV2001033 | 0 | 0 | 0 | 3.533 | 16.429 | 0 | 0 |
| SYNOV2001144 | 0 | 0 | 19.072 | 0 | 0 | 0 | 0 |
| SYNOV2001262 | 0 | 0 | 0 | 0 | 0 | 3.854 | 0 |
| SYNOV2001374 | 0 | 0 | 0 | 0 | 0 | 3.384 | 0 |
| SYNOV2008765 | 0 | 96.887 | 0 | 0 | 0 | 0 | 0 |
| SYNOV2009172 | 0 | 0 | 0 | 0 | 14.260 | 0 | 0 |
| SYNOV4007671 | 0 | 0 | 0 | 4.320 | 0 | 1.354 | 1.827 |
| SYNOV4009129 | 0 | 0 | 0 | 0 | 0 | 28.685 | 19.353 |
| T1ESE2000609 | 0 | 0 | 0 | 26.790 | 0 | 0 | 5.666 |
| T1ESE2000904 | 0 | 0 | 0 | 13.606 | 0 | 0 | 5.755 |
| TBAES2009387 | 0 | 0 | 0 | 0 | 0 | 0.988 | 0 |
| TCOLN1000180 | 0 | 0 | 0 | 0 | 0 | 4.523 | 0 |
| TESOP2002273 | 0 | 0 | 0 | 0 | 0 | 7.498 | 0 |
| TESOP2002451 | 0 | 0 | 0 | 0 | 0 | 4.388 | 0 |
| TESOP2007912 | 0 | 0 | 0 | 0 | 0 | 21.261 | 0 |
| TESTI1000023 | 0 | 0 | 0 | 0 | 0 | 0 | 8.362 |
| TESTI2000100 | 0 | 0 | 0 | 0 | 0 | 0 | 48.295 |
| TESTI2000184 | 0 | 0 | 0 | 0 | 0 | 4.177 | 0 |
| TESTI2000238 | 0 | 0 | 0 | 0 | 0 | 58.560 | 0 |
| TESTI2000356 | 0 | 0 | 0 | 0 | 0 | 0 | 43.714 |
| TESTI2001099 | 0 | 0 | 0 | 2.888 | 0 | 3.621 | 2.443 |
| TESTI2001141 | 0 | 0 | 0 | 0 | 0 | 17.445 | 23.540 |
| TESTI2001269 | 0 | 0 | 0 | 3.217 | 0 | 0 | 0 |
| TESTI2001511 | 0 | 0 | 0 | 0 | 47.942 | 0 | 0 |
| TESTI2002149 | 0 | 0 | 0 | 0 | 0 | 6.180 | 0 |
| TESTI2002840 | 0 | 0 | 0 | 0 | 0 | 73.865 | 0 |
| TESTI2003061 | 0 | 0 | 0 | 0 | 0 | 0 | 32.281 |
| TESTI2003413 | 0 | 0 | 0 | 15.344 | 0 | 4.810 | 0 |
| TESTI2003454 | 61.996 | 0 | 0 | 0 | 0 | 0 | 0 |
| TESTI2003533 | 0 | 0 | 0 | 0 | 0 | 1.602 | 2.161 |
| TESTI2004031 | 4.680 | 0 | 0 | 2.363 | 0 | 0.741 | 0 |
| TESTI2004153 | 0 | 0 | 0 | 0 | 0 | 0 | 10.815 |
| TESTI2004295 | 0 | 0 | 0 | 0 | 0 | 0 | 20.413 |
| TESTI2005040 | 0 | 0 | 0 | 0 | 0 | 58.560 | 0 |
| TESTI2005408 | 0 | 0 | 0 | 10.441 | 0 | 0 | 0 |
| TESTI2005564 | 0 | 0 | 0 | 0 | 0 | 0 | 9.129 |
| TESTI2005784 | 0 | 0 | 0 | 17.528 | 0 | 0 | 0 |
| TESTI2005908 | 0 | 0 | 0 | 0 | 0 | 0 | 3.925 |
| TESTI2005981 | 0 | 0 | 0 | 0 | 0 | 57.537 | 0 |
| TESTI2006051 | 0 | 0 | 5.710 | 0 | 0 | 0 | 0 |
| TESTI2006120 | 0 | 0 | 0 | 0 | 0 | 0 | 12.098 |
| TESTI2006453 | 0 | 56.495 | 0 | 0 | 0 | 0 | 0 |
| TESTI2006588 | 0 | 0 | 0 | 0 | 0 | 4.001 | 6.748 |
| TESTI2006748 | 0 | 0 | 0 | 0 | 0 | 12.710 | 8.575 |
| TESTI2006877 | 0 | 0 | 0 | 0 | 0 | 0 | 33.083 |
| TESTI2007407 | 0 | 0 | 0 | 0 | 0 | 5.671 | 0 |
| TESTI2007464 | 0 | 0 | 0 | 0 | 0 | 7.410 | 0 |
| TESTI2007998 | 0 | 0 | 0 | 0 | 0 | 5.842 | 7.883 |
| TESTI2008020 | 0 | 0 | 0 | 0 | 0 | 7.085 | 0 |
| TESTI2008240 | 0 | 0 | 0 | 0 | 0 | 0 | 4.364 |
| TESTI2008394 | 0 | 0 | 0 | 0 | 0 | 73.865 | 0 |
| TESTI2008405 | 60.795 | 0 | 0 | 0 | 0 | 0 | 0 |
| TESTI2009402 | 0 | 0 | 0 | 0 | 0 | 0 | 22.853 |
| TESTI2009520 | 0 | 0 | 0 | 0 | 0 | 0 | 1.870 |
| TESTI2009785 | 0 | 0 | 0 | 0 | 0 | 7.952 | 0 |
| TESTI2009987 | 0 | 0 | 0 | 30.062 | 0 | 0 | 0 |
| TESTI2010513 | 0 | 0 | 0 | 0 | 0 | 0.726 | 1.959 |
| TESTI2010617 | 0 | 0 | 0 | 0 | 0 | 0 | 34.719 |
| TESTI2011680 | 0 | 0 | 0 | 0 | 0 | 27.640 | 0 |
| TESTI2013231 | 0 | 0 | 0 | 0 | 0 | 3.676 | 4.960 |
| TESTI2013264 | 0 | 0 | 0 | 0 | 0 | 0 | 62.629 |
| TESTI2013295 | 0 | 0 | 0 | 0 | 0 | 4.921 | 0 |
| TESTI2014505 | 0 | 0 | 0 | 0 | 0 | 36.406 | 0 |
| TESTI2014780 | 0 | 0 | 0 | 0 | 0 | 52.464 | 0 |
| TESTI2015213 | 0 | 0 | 0 | 0 | 14.063 | 1.896 | 2.559 |
| TESTI2015335 | 0 | 0 | 0 | 0 | 0 | 0 | 55.970 |
| TESTI2015626 | 0 | 0 | 4.435 | 0 | 0 | 0.608 | 0 |
| TESTI2018014 | 0 | 0 | 0 | 0 | 0 | 0 | 9.609 |
| TESTI2018462 | 0 | 0 | 0 | 0 | 0 | 5.221 | 0 |
| TESTI2020510 | 0 | 0 | 0 | 0 | 0 | 13.364 | 0 |
| TESTI2021124 | 0 | 0 | 0 | 0 | 0 | 10.559 | 0 |
| TESTI2021315 | 0 | 0 | 0 | 0 | 0 | 37.439 | 0 |
| TESTI2024864 | 0 | 0 | 0 | 0 | 0 | 51.017 | 0 |
| TESTI2025454 | 0 | 0 | 0 | 0 | 0 | 20.808 | 0 |
| TESTI2026525 | 0 | 0 | 0 | 0 | 0 | 16.076 | 0 |
| TESTI2027496 | 0 | 0 | 0 | 0 | 0 | 17.357 | 0 |
| TESTI2034940 | 0 | 0 | 0 | 0 | 0 | 0.481 | 1.299 |
| TESTI2036969 | 0 | 0 | 0 | 21.174 | 0 | 19.913 | 0 |
| TESTI2046456 | 0 | 0 | 6.242 | 2.728 | 0 | 0.855 | 2.308 |
| TESTI2053723 | 0 | 0 | 0 | 0 | 0 | 0 | 22.570 |
| TESTI4000014 | 0 | 0 | 0 | 0 | 9.787 | 1.980 | 0.890 |
| TESTI4002072 | 0 | 0 | 0 | 0 | 0 | 6.169 | 0 |
| TESTI4002799 | 0 | 0 | 0 | 0 | 12.102 | 0 | 0 |
| TESTI4003703 | 0 | 0 | 0 | 0 | 0 | 8.175 | 22.061 |
| TESTI4004626 | 0 | 0 | 0 | 0 | 0 | 0 | 41.040 |
| TESTI4005857 | 0 | 0 | 0 | 0 | 0 | 0 | 79.225 |
| TESTI4009286 | 0 | 0 | 0 | 0 | 39.728 | 1.339 | 0 |
| TESTI4009454 | 0 | 0 | 0 | 0 | 0 | 0 | 10.019 |
| TESTI4010851 | 0 | 0 | 7.372 | 0 | 0 | 5.050 | 6.814 |
| TESTI4010979 | 0 | 0 | 0 | 0 | 0 | 0 | 48.982 |
| TESTI4013441 | 1.831 | 0 | 0 | 1.849 | 0 | 0.290 | 0.391 |
| TESTI4014175 | 0 | 0 | 0 | 0 | 0 | 49.352 | 0 |
| TESTI4015204 | 0 | 0 | 0 | 0 | 0 | 48.509 | 0 |
| TESTI4019843 | 0 | 0 | 0 | 0 | 0 | 73.865 | 0 |
| TESTI4037156 | 0 | 0 | 0 | 0 | 0 | 2.556 | 1.380 |
| TESTI4043140 | 0 | 0 | 0 | 0 | 0 | 5.123 | 0 |
| THYMU1000002 | 0 | 0 | 0 | 3.488 | 0 | 3.280 | 1.476 |
| THYMU1000016 | 0 | 0 | 10.422 | 0 | 0 | 0.714 | 0 |
| THYMU1000017 | 0 | 0 | 0 | 0 | 0 | 0 | 74.935 |
| THYMU1000041 | 0 | 0 | 0 | 0 | 0 | 4.393 | 0 |
| THYMU1000103 | 0 | 0 | 0 | 0 | 0 | 0 | 4.395 |
| THYMU1000144 | 0 | 0 | 0 | 0 | 0 | 11.947 | 19.344 |
| THYMU1000359 | 6.258 | 0 | 7.228 | 0 | 0 | 0 | 0 |
| THYMU1000374 | 0 | 0 | 0 | 0 | 0 | 0 | 3.734 |
| THYMU1000490 | 0 | 0 | 0 | 0 | 0 | 21.187 | 0 |
| THYMU1000499 | 0 | 0 | 0 | 0 | 0 | 0 | 14.228 |
| THYMU2000382 | 0 | 0 | 0 | 0 | 0 | 0 | 3.022 |
| THYMU2000436 | 0 | 0 | 0 | 0 | 0 | 0 | 2.297 |
| THYMU2000672 | 0 | 0 | 0 | 0 | 0 | 41.789 | 0 |
| THYMU2000684 | 0 | 0 | 0 | 0 | 0 | 0 | 10.379 |
| THYMU2000946 | 0 | 0 | 0 | 0 | 0 | 0 | 3.607 |
| THYMU2001926 | 0 | 0 | 0 | 0 | 0 | 35.857 | 0 |
| THYMU2002162 | 0 | 0 | 0 | 0 | 0 | 20.141 | 27.178 |
| THYMU2002450 | 0 | 0 | 0 | 0 | 0 | 39.856 | 0 |
| THYMU2002583 | 12.101 | 0 | 0 | 3.054 | 0 | 1.915 | 0 |
| THYMU2002756 | 0 | 0 | 0 | 0 | 0 | 0 | 18.250 |
| THYMU2002841 | 0 | 0 | 0 | 17.103 | 0 | 5.362 | 0 |
| THYMU2002983 | 34.939 | 0 | 0 | 0 | 0 | 0 | 0 |
| THYMU2003012 | 10.231 | 0 | 0 | 10.329 | 0 | 0 | 0 |
| THYMU2003419 | 0 | 0 | 0 | 0 | 0 | 0 | 2.504 |
| THYMU2003446 | 0 | 0 | 0 | 0 | 0 | 4.406 | 5.946 |
| THYMU2003542 | 0 | 0 | 0 | 0 | 0 | 3.992 | 0 |
| THYMU2003891 | 1.703 | 0 | 0 | 0 | 3.998 | 0 | 0 |
| THYMU2003981 | 18.291 | 0 | 21.126 | 0 | 0 | 0 | 0 |
| THYMU2004152 | 0 | 0 | 0 | 0 | 0 | 7.337 | 0 |
| THYMU2004344 | 0 | 0 | 0 | 0 | 0 | 0 | 3.185 |
| THYMU2004410 | 0 | 0 | 0 | 0 | 0 | 0 | 4.776 |
| THYMU2004452 | 0 | 0 | 0 | 0 | 0 | 0 | 57.616 |
| THYMU2004733 | 0 | 0 | 0 | 33.006 | 0 | 0 | 0 |
| THYMU2004916 | 0 | 0 | 0 | 0 | 42.760 | 0 | 0 |
| THYMU2005546 | 0 | 0 | 0 | 3.223 | 0 | 2.021 | 0 |
| THYMU2006505 | 0 | 0 | 0 | 0 | 0 | 5.044 | 10.209 |
| THYMU2006813 | 0 | 0 | 0 | 0 | 0 | 8.770 | 3.945 |
| THYMU2007112 | 0 | 0 | 0 | 0 | 0 | 16.898 | 0 |
| THYMU2007415 | 0 | 0 | 0 | 0 | 0 | 8.941 | 0 |
| THYMU2007729 | 0 | 0 | 0 | 0 | 0 | 0 | 12.184 |
| THYMU2007802 | 0 | 0 | 0 | 0 | 0 | 0 | 74.935 |
| THYMU2008727 | 0 | 0 | 0 | 87.605 | 0 | 0 | 0 |
| THYMU2009658 | 0 | 0 | 4.723 | 0 | 0 | 0 | 0 |
| THYMU2011482 | 0 | 0 | 0 | 0 | 0 | 11.342 | 15.304 |
| THYMU2011736 | 0 | 0 | 0 | 0 | 0 | 0 | 74.935 |
| THYMU2012024 | 0 | 0 | 0 | 0 | 0 | 5.505 | 0 |
| THYMU2013136 | 0 | 0 | 0 | 0 | 0 | 0 | 4.078 |
| THYMU2013916 | 0 | 0 | 0 | 0 | 0 | 4.098 | 2.765 |
| THYMU2014167 | 0 | 0 | 0 | 0 | 0 | 10.152 | 0 |
| THYMU2015762 | 0 | 0 | 0 | 0 | 27.166 | 0 | 0 |
| THYMU2016968 | 86.295 | 0 | 0 | 0 | 0 | 0 | 0 |
| THYMU2017601 | 0 | 0 | 0 | 0 | 0 | 13.046 | 0 |
| THYMU2018028 | 0 | 0 | 0 | 0 | 0 | 0 | 74.935 |
| THYMU2027125 | 0 | 0 | 0 | 0 | 0 | 0 | 0.446 |
| THYMU2034374 | 0 | 0 | 0 | 0 | 0 | 23.239 | 0 |
| THYMU2036215 | 0 | 0 | 0 | 0 | 0 | 0 | 57.348 |
| THYMU3001077 | 0 | 0 | 0 | 0 | 0 | 0 | 74.935 |
| THYMU3013386 | 0 | 0 | 0 | 0 | 0 | 1.383 | 0 |
| THYMU3015759 | 0 | 0 | 0 | 0 | 0 | 2.080 | 0 |
| THYMU3032798 | 0 | 0 | 26.074 | 0 | 0 | 0 | 0 |
| THYMU3033626 | 0 | 0 | 0 | 0 | 0 | 10.384 | 0 |
| TKIDN1000192 | 0 | 0 | 0 | 0 | 0 | 10.206 | 0 |
| TKIDN2002738 | 0 | 0 | 0 | 0 | 0 | 0.775 | 0 |
| TKIDN2005487 | 0 | 0 | 9.687 | 0 | 0 | 0 | 0 |
| TKIDN2009641 | 0 | 0 | 0 | 0 | 0 | 21.363 | 0 |
| TKIDN2011289 | 0 | 0 | 0 | 0 | 0 | 11.044 | 14.902 |
| TKIDN2015423 | 7.432 | 0 | 0 | 0 | 0 | 0 | 4.761 |
| TLIVE2000979 | 0 | 0 | 0 | 0 | 0 | 0 | 26.611 |
| TLIVE2002046 | 0 | 0 | 0 | 0 | 0 | 3.353 | 4.524 |
| TRACH1000011 | 0 | 0 | 0 | 0 | 0 | 13.599 | 0 |
| TRACH1000030 | 0 | 0 | 0 | 0 | 0 | 2.549 | 3.440 |
| TRACH1000063 | 25.109 | 0 | 0 | 0 | 0 | 0 | 0 |
| TRACH1000181 | 0 | 0 | 0 | 0 | 0 | 0 | 11.810 |
| TRACH2000079 | 0 | 0 | 0 | 0 | 0 | 0 | 2.701 |
| TRACH2000248 | 0 | 0 | 0 | 0 | 0 | 9.022 | 3.478 |
| TRACH2000321 | 0 | 0 | 0 | 5.791 | 0 | 3.631 | 1.225 |
| TRACH2000359 | 0 | 0 | 0 | 0 | 0 | 0 | 7.434 |
| TRACH2000461 | 0 | 0 | 0 | 0 | 0 | 3.168 | 0 |
| TRACH2000559 | 0 | 0 | 0 | 0 | 0 | 7.195 | 0 |
| TRACH2000660 | 0 | 0 | 0 | 0 | 0 | 23.431 | 0 |
| TRACH2000780 | 10.204 | 0 | 0 | 0 | 0 | 0 | 0 |
| TRACH2000920 | 0 | 0 | 0 | 0 | 0 | 12.249 | 8.264 |
| TRACH2000926 | 0 | 0 | 0 | 0 | 0 | 0 | 6.955 |
| TRACH2000959 | 0 | 0 | 0 | 0 | 0 | 0.451 | 1.217 |
| TRACH2000972 | 0 | 0 | 7.991 | 0 | 0 | 1.095 | 0 |
| TRACH2001021 | 4.888 | 0 | 11.292 | 0 | 0 | 0 | 0 |
| TRACH2001109 | 0 | 0 | 0 | 0 | 0 | 2.707 | 1.043 |
| TRACH2001289 | 0 | 0 | 0 | 2.003 | 0 | 8.163 | 2.542 |
| TRACH2001314 | 0 | 0 | 0 | 0 | 0 | 3.377 | 0 |
| TRACH2001428 | 0 | 84.729 | 0 | 0 | 0 | 2.332 | 0 |
| TRACH2001432 | 0 | 0 | 0 | 0 | 0 | 4.110 | 2.773 |
| TRACH2001443 | 0 | 0 | 0 | 0 | 0 | 17.167 | 0 |
| TRACH2001463 | 0 | 0 | 0 | 0 | 0 | 11.313 | 7.633 |
| TRACH2001478 | 0 | 0 | 0 | 3.421 | 0 | 0 | 0 |
| TRACH2001523 | 0 | 0 | 22.925 | 0 | 0 | 3.141 | 0 |
| TRACH2001612 | 0 | 0 | 0 | 0 | 0 | 7.380 | 9.958 |
| TRACH2001810 | 0 | 0 | 0 | 0 | 0 | 7.173 | 5.808 |
| TRACH2002100 | 0 | 0 | 0 | 0 | 0 | 0 | 42.753 |
| TRACH2002537 | 0 | 0 | 0 | 5.465 | 0 | 5.140 | 0 |
| TRACH2002803 | 0 | 0 | 0 | 0 | 0 | 7.700 | 0 |
| TRACH2003272 | 0 | 0 | 0 | 0 | 0 | 6.845 | 9.236 |
| TRACH2003347 | 0 | 0 | 0 | 0 | 0 | 2.935 | 3.960 |
| TRACH2005811 | 0 | 0 | 0 | 0 | 0 | 1.948 | 7.887 |
| TRACH2007816 | 0 | 0 | 0 | 0 | 0 | 18.443 | 0 |
| TRACH2008081 | 0 | 85.762 | 0 | 0 | 0 | 0 | 0 |
| TRACH2008300 | 0 | 0 | 0 | 0 | 0 | 3.136 | 0 |
| TRACH2008472 | 0 | 0 | 0 | 9.247 | 0 | 0 | 0 |
| TRACH2011113 | 0 | 0 | 0 | 0 | 0 | 8.722 | 23.539 |
| TRACH2011894 | 0 | 0 | 0 | 0 | 0 | 32.856 | 0 |
| TRACH2013123 | 0 | 0 | 0 | 0 | 0 | 22.218 | 0 |
| TRACH2013552 | 0 | 0 | 0 | 0 | 0 | 0 | 25.898 |
| TRACH2014077 | 0 | 0 | 0 | 0 | 0 | 6.284 | 0 |
| TRACH2014124 | 12.051 | 0 | 0 | 0 | 0 | 3.814 | 5.146 |
| TRACH2015823 | 0 | 0 | 0 | 0 | 0 | 0 | 5.453 |
| TRACH2018446 | 0 | 0 | 0 | 0 | 0 | 15.452 | 0 |
| TRACH2023299 | 74.521 | 0 | 0 | 0 | 0 | 0 | 0 |
| TRACH2025535 | 6.778 | 0 | 0 | 0 | 0 | 3.218 | 0 |
| TRACH3002192 | 0 | 0 | 0 | 3.675 | 0 | 2.304 | 3.109 |
| TRACH3002752 | 0 | 0 | 0 | 0 | 0 | 9.436 | 0 |
| TRACH3004068 | 0 | 0 | 0 | 0 | 0 | 0 | 3.553 |
| TRACH3007625 | 0 | 0 | 0 | 6.928 | 0 | 0 | 0 |
| TUTER2000904 | 0 | 0 | 0 | 0 | 0 | 5.158 | 0 |
| UMVEN1000156 | 0 | 0 | 0 | 0 | 0 | 0 | 2.576 |
| UMVEN2000152 | 0 | 0 | 0 | 0 | 0 | 1.455 | 0 |
| UMVEN2000453 | 0 | 0 | 0 | 0 | 0 | 0 | 1.302 |
| UTERU1000106 | 0 | 0 | 0 | 0 | 0 | 10.646 | 14.365 |
| UTERU1000182 | 0 | 0 | 0 | 0 | 0 | 0 | 2.022 |
| UTERU2000095 | 0 | 0 | 0 | 0 | 0 | 1.529 | 0 |
| UTERU2000197 | 0 | 0 | 0 | 0 | 0 | 60.769 | 0 |
| UTERU2000300 | 0 | 0 | 0 | 0 | 0 | 9.112 | 0 |
| UTERU2000424 | 0 | 0 | 0 | 0 | 0 | 3.138 | 4.234 |
| UTERU2000542 | 0 | 0 | 0 | 0 | 0 | 0 | 22.508 |
| UTERU2001607 | 0 | 0 | 0 | 0 | 0 | 0 | 7.355 |
| UTERU2002294 | 0 | 0 | 0 | 0 | 0 | 0 | 13.576 |
| UTERU2002662 | 0 | 0 | 0 | 0 | 0 | 3.287 | 4.435 |
| UTERU2004461 | 0 | 0 | 0 | 0 | 0 | 0 | 67.639 |
| UTERU2004664 | 0 | 0 | 0 | 0 | 0 | 0 | 4.230 |
| UTERU2004807 | 0 | 0 | 0 | 0 | 0 | 0 | 2.504 |
| UTERU2004929 | 0 | 0 | 0 | 0 | 0 | 21.446 | 0 |
| UTERU2005621 | 0 | 0 | 0 | 0 | 0 | 0 | 5.619 |
| UTERU2006137 | 90.731 | 0 | 0 | 0 | 0 | 0 | 0 |
| UTERU2007253 | 0 | 0 | 0 | 0 | 0 | 38.074 | 0 |
| UTERU2008085 | 0 | 0 | 0 | 0 | 0 | 0.167 | 0.225 |
| UTERU2009510 | 0 | 0 | 0 | 0 | 0 | 27.767 | 0 |
| UTERU2009972 | 0 | 0 | 0 | 0 | 0 | 13.090 | 0 |
| UTERU2010417 | 0 | 0 | 0 | 1.858 | 0 | 1.165 | 0.786 |
| UTERU2011906 | 0 | 0 | 0 | 0 | 0 | 0 | 17.000 |
| UTERU2012230 | 0 | 0 | 0 | 0 | 0 | 0 | 4.387 |
| UTERU2012286 | 0 | 0 | 0 | 0 | 0 | 0 | 6.316 |
| UTERU2013078 | 0 | 0 | 0 | 0 | 0 | 0 | 34.190 |
| UTERU2013586 | 0 | 0 | 0 | 0 | 0 | 24.344 | 0 |
| UTERU2014167 | 0 | 61.187 | 0 | 0 | 0 | 1.684 | 0 |
| UTERU2014464 | 0 | 0 | 0 | 0 | 0 | 0 | 33.653 |
| UTERU2014548 | 0 | 0 | 0 | 0 | 0 | 60.769 | 0 |
| UTERU2014668 | 0 | 0 | 0 | 0 | 0 | 60.769 | 0 |
| UTERU2015653 | 0 | 0 | 0 | 3.438 | 0 | 0 | 0 |
| UTERU2016799 | 0 | 0 | 0 | 0 | 0 | 10.744 | 0 |
| UTERU2017613 | 0 | 0 | 0 | 0 | 0 | 0 | 51.268 |
| UTERU2019005 | 0 | 0 | 0 | 0 | 0 | 11.932 | 0 |
| UTERU2023175 | 0 | 0 | 0 | 0 | 0 | 8.252 | 0 |
| UTERU2027369 | 0 | 0 | 0 | 0 | 0 | 60.769 | 0 |
| UTERU3015011 | 0 | 0 | 0 | 0 | 0 | 0 | 17.593 |

[0757] Genes whose expression levels were negligibly low in each of the above-described libraries are shown with their clone names below.

[0758] 3NB691000018, 3NB691000085, 3NB691000113, 3NB691000116, 3NB691000129, 3NB691000191, 3NB692000012, 3NB692000029, 3NB692000102, 3NB692000154, 3NB692000276, 3NB692000305, 3NB692000429, 3NB692000529, 3NB692000973, 3NB692001002, 3NB692001034, 3NB692001040, 3NB692001123, 3NB692001267, 3NB692001288, 3NB692001339, 3NB692001349, 3NB692001366, 3NB692001408, 3NB692001433, 3NB692001442, 3NB692001459, 3NB692001471, 3NB692001496, 3NB692001501, 3NB692001507, 3NB692001511, 3NB692001519, 3NB692001520, 3NB692001528, 3NB692001538, 3NB692001548, 3NB692001557, 3NB692001637, 3NB692001719, 3NB692001853, 3NB692001861, 3NB692002051, 3NB692002365, 3NB692002685, 3NB692002806, 3NB692003538, 3NB692004045, 3NB692004724, 3NB692005439, 3NB692008178, 3NB692008729, ACTVT2000380, ADIPS1000064, ADIPS2000069, ADIPS2000088, ADIPS2000245, ADRGL1000038, ADRGL1000067, ADRGL1000111, ADRGL1000144, ADRGL1000147, ADRGL1000160, ADRGL1000165, ADRGL1000182, ADRGL2000042, ADRGL2000056, ADRGL2000064, ADRGL2000074, ADRGL2000085, ADRGL2000117, ADRGL2000142, ADRGL2000172, ADRGL2000248, ADRGL2000261, ADRGL2000323, ADRGL2000328, ADRGL2000353, ADRGL2000384, ADRGL2000428, ADRGL2000636, ADRGL2000644, ADRGL2000968, ADRGL2001119, ADRGL2001229, ADRGL2001287, ADRGL2001301, ADRGL2001354, ADRGL2001554, ADRGL2001651, ADRGL2001756, ADRGL2001830, ADRGL2001836, ADRGL2001854, ADRGL2002013, ADRGL2002029, ADRGL2002191, ADRGL2002260, ADRGL2002392, ADRGL2002679, ADRGL2002753, ADRGL2002857, ADRGL2003017, ADRGL2003329, ADRGL2003552, ADRGL2003585, ADRGL2003638, ADRGL2003684, ADRGL2003773, ADRGL2003785, ADRGL2004031, ADRGL2004077, ADRGL2004451, ADRGL2004459, ADRGL2004708, ADRGL2004724, ADRGL2004749, ADRGL2004770, ADRGL2004777, ADRGL2004833, ADRGL2005336, ADRGL2005564, ADRGL2005756, ADRGL2005838, ADRGL2005926, ADRGL2005961, ADRGL2006034, ADRGL2006124, ADRGL2006177, ADRGL2006193, ADRGL2006377, ADRGL2006677, ADRGL2006732, ADRGL2006767, ADRGL2006817, ADRGL2006846, ADRGL2006886, ADRGL2007080, ADRGL2007125, ADRGL2007283, ADRGL2007313, ADRGL2007357, ADRGL2007636, ADRGL2007651, ADRGL2007810, ADRGL2007877, ADRGL2007906, ADRGL2007974, ADRGL2008023, ADRGL2008331, ADRGL2008337, ADRGL2008535, ADRGL2008966, ADRGL2009146, ADRGL2009324, ADRGL2009489, ADRGL2009533, ADRGL2009691, ADRGL2009755, ADRGL2010152, ADRGL2010315, ADRGL2010594, ADRGL2010860, ADRGL2010974, ADRGL2011190, ADRGL2011330, ADRGL2012038, ADRGL2012179, AHMSC1000138, ASTRO1000009, ASTRO1000018, ASTRO1000029, ASTRO1000096, ASTRO2000011, ASTRO2000095, ASTRO2000191, ASTRO2000278, ASTRO2000372, ASTRO2000381, ASTRO2000403, ASTRO2000417, ASTRO2000480, ASTRO2000482, ASTRO2000533, ASTRO2000653, ASTRO2000662, ASTRO2000725, ASTRO2000801, ASTRO2000914, ASTRO2001001, ASTRO2001008, ASTRO2001076, ASTRO2001088, ASTRO2001107, ASTRO2001122, ASTRO2001227, ASTRO2001249, ASTRO2001480, ASTRO2001806, ASTRO2002024, ASTRO2002035, ASTRO2002064, ASTRO2002459, ASTRO2002571, ASTRO2002632, ASTRO2002659, ASTRO2002693, ASTRO2002720, ASTRO2002733, ASTRO2002743, ASTRO2002842, ASTRO2003024, ASTRO2003316, ASTRO2003574, ASTRO2003581, ASTRO2003632, ASTRO2003740, ASTRO2003840, ASTRO2003925, ASTRO2003960, ASTRO2004051, ASTRO2004177, ASTRO2004217, ASTRO2004297, ASTRO2004584, ASTRO2004628, ASTRO2004751, ASTRO2004877, ASTRO2005008, ASTRO2005081, ASTRO2005096, ASTRO2005242, ASTRO2005273, ASTRO2005343, ASTRO2005360, ASTRO2005413, ASTRO2005423, ASTRO2005557, ASTRO2005575, ASTRO2005593, ASTRO2005726, ASTRO2005863, ASTRO2005896, ASTRO2005902, ASTRO2006356, ASTRO2006475, ASTRO2006732, ASTRO2006747, ASTRO2006952, ASTRO2007221, ASTRO2007377, ASTRO2007515, ASTRO2007578, ASTRO2007643, ASTRO2007666, ASTRO2007956, ASTRO2007962, ASTRO2008040, ASTRO2008216, ASTRO2008239, ASTRO2008409, ASTRO2008425, ASTRO2008508, ASTRO2008777, ASTRO2008895, ASTRO2008960, ASTRO2009068, ASTRO2009118, ASTRO2009177, ASTRO2009333, ASTRO2009458, ASTRO2009526, ASTRO2009879, ASTRO2010072, ASTRO2010582, ASTRO2010615, ASTRO2010799, ASTRO2010962, ASTRO2010996, ASTRO2011149, ASTRO2011426, ASTRO2011437, ASTRO2011461, ASTRO2011834, ASTRO2011893, ASTRO2013124, ASTRO2013671, ASTRO2013802, ASTRO2014135, ASTRO2014174, ASTRO2014211, ASTRO2014363, ASTRO2014392, ASTRO2014498, ASTRO2014561, ASTRO2014576, ASTRO2014923, ASTRO2014961, ASTRO2015162, ASTRO2015185, ASTRO2015328, ASTRO2015987, ASTRO2016044, ASTRO2016114, ASTRO2016148, ASTRO2016681, ASTRO2016819, ASTRO2016847, ASTRO2016892, ASTRO2017348, ASTRO2017627, ASTRO2018169, ASTRO2018373, ASTRO2018540, ASTRO2019039, ASTRO2019171, ASTRO3000154, ASTRO3000172, ASTRO3000177, ASTRO3000301, ASTRO3000474, ASTRO3000482, BEAST2000454, BGGI11000123, BGGI11000193, BGGI11000285, BGGI12000022, BGGI12000067, BGGI12000161, BGGI12000533, BGGI12000544, BGGI12000616, BGGI12000684, BGGI12000693, BGGI12000839, BGGI12001002, BGGI12001241, BGGI12001247, BGGI12001714, BLADE1000176, BLADE2000181, BLADE2000256, BLADE2000340, BLADE2000389, BLADE2000463, BLADE2000492, BLADE2000579, BLADE2000640, BLADE2000866, BLADE2000938, BLADE2001031, BLADE2001133, BLADE2001138, BLADE2001141, BLADE2001371, BLADE2001458, BLADE2001575, BLADE2001753, BLADE2001935, BLADE2001940, BLADE2001987, BLADE2002073, BLADE2002310, BLADE2002730, BLADE2002738, BLADE2002744, BLADE2002782, BLADE2002947, BLADE2002972, BLADE2003474, BLADE2003916, BLADE2004089, BLADE2004345, BLADE2004389, BLADE2004462, BLADE2004628, BLADE2004670, BLADE2004722, BLADE2004849, BLADE2005036, BLADE2005038, BLADE2005229, BLADE2005459, BLADE2005792, BLADE2006043, BLADE2006415, BLADE2006607, BLADE2006826, BLADE2006830, BLADE2006849, BLADE2006947, BLADE2007033, BLADE2007043, BLADE2007589, BLADE2007666, BLADE2007722, BLADE2007735, BLADE2007744, BLADE2007799, BLADE2007923, BLADE2007935, BLADE2007958, BLADE2008281, BLADE2008398, BLADE2008454, BLADE2008479, BLADE2008539, BLADE2008809, BLADE2008995, BLADE2009452, BLADE2009479, BLADE2009593, BNGH41000104, BNGH41000118, BNGH41000137, BNGH41000153, BNGH41000169, BNGH41000177, BNGH41000190, BNGH41000198, BNGH41000216, BNGH41000235, BNGH42000130, BNGH42000132, BNGH42000360, BNGH42000405, BNGH42000532, BNGH42000675, BNGH42000791, BNGH42000815, BNGH42000994, BNGH42001247, BNGH42001406, BNGH42001576, BNGH42001724, BNGH42002168, BNGH42002244, BNGH42002387, BNGH42002487, BNGH42002489, BNGH42003529, BNGH42003570, BNGH42003641, BNGH42004076, BNGH42004291, BNGH42004538, BNGH42004679, BNGH42005017, BNGH42005235, BNGH42005504, BNGH42006226, BNGH42006234, BNGH42007037, BNGH42007366, BNGH42007594, BNGH42007798, BNGH42008199, BNGH42008510, BNGH42008649, BNGH42008743, BNGH42008832, BNGH42008850, BNGH42008943, BNGH42009021, BRACE1000020, BRACE1000047, BRACE1000051, BRACE1000065, BRACE1000070, BRACE1000073, BRACE1000084, BRACE1000092, BRACE1000101, BRACE1000114, BRACE1000124, BRACE1000131, BRACE1000132, BRACE1000166, BRACE1000186, BRACE1000258, BRACE1000451, BRACE1000475, BRACE1000572, BRACE2000061, BRACE2000077, BRACE2000078, BRACE2000100, BRACE2000109, BRACE2000141, BRACE2000148, BRACE2000183, BRACE2000229, BRACE2000232, BRACE2000245, BRACE2000256, BRACE2000266, BRACE2000267, BRACE2000280, BRACE2000300, BRACE2000331, BRACE2000332, BRACE2000347, BRACE2000351, BRACE2000368, BRACE2000392, BRACE2000441, BRACE2000487, BRACE2000489, BRACE2000505, BRACE2000525, BRACE2000526, BRACE2000531, BRACE2000545, BRACE2000553, BRACE2000565, BRACE2000577, BRACE2000640, BRACE2000650, BRACE2000677, BRACE2000698, BRACE2000718, BRACE2000733, BRACE2000743, BRACE2000753, BRACE2000815, BRACE2000864, BRACE2000885, BRACE2000893, BRACE2000905, BRACE2000936, BRACE2000947, BRACE2000965, BRACE2000969, BRACE2000988, BRACE2001017, BRACE2001065, BRACE2001070, BRACE2001094, BRACE2001107, BRACE2001143, BRACE2001151, BRACE2001188, BRACE2001191, BRACE2001197, BRACE2001236, BRACE2001239, BRACE2001269, BRACE2001312, BRACE2001313, BRACE2001330, BRACE2001340, BRACE2001352, BRACE2001353, BRACE2001374, BRACE2001375, BRACE2001423, BRACE2001424, BRACE2001445, BRACE2001453, BRACE2001455, BRACE2001477, BRACE2001492, BRACE2001496, BRACE2001508, BRACE2001534, BRACE2001543, BRACE2001564, BRACE2001588, BRACE2001607, BRACE2001626, BRACE2001673, BRACE2001677, BRACE2001692, BRACE2001705, BRACE2001709, BRACE2001711, BRACE2001726, BRACE2001733, BRACE2001737, BRACE2001742, BRACE2001777, BRACE2001779, BRACE2001834, BRACE2001855, BRACE2001859, BRACE2001865, BRACE2001872, BRACE2001881, BRACE2001898, BRACE2001923, BRACE2001942, BRACE2001944, BRACE2001954, BRACE2001971, BRACE2001972, BRACE2001973, BRACE2002026, BRACE2002034, BRACE2002081, BRACE2002139, BRACE2002142, BRACE2002151, BRACE2002157, BRACE2002176, BRACE2002202, BRACE2002206, BRACE2002227, BRACE2002260, BRACE2002297, BRACE2002304, BRACE2002356, BRACE2002392, BRACE2002394, BRACE2002409, BRACE2002431, BRACE2002444, BRACE2002458, BRACE2002467, BRACE2002468, BRACE2002495, BRACE2002582, BRACE2002585, BRACE2002589, BRACE2002590, BRACE2002606, BRACE2002613, BRACE2002614, BRACE2002617, BRACE2002623, BRACE2002635, BRACE2002649, BRACE2002661, BRACE2002676, BRACE2002677, BRACE2002685, BRACE2002695, BRACE2002707, BRACE2002736, BRACE2002752, BRACE2002755, BRACE2002762, BRACE2002772, BRACE2002792, BRACE2002796, BRACE2002803, BRACE2002807, BRACE2002812, BRACE2002834, BRACE2002849, BRACE2002857, BRACE2002884, BRACE2002896, BRACE2002948, BRACE2003078, BRACE2003097, BRACE2003168, BRACE2003199, BRACE2003210, BRACE2003269, BRACE2003285, BRACE2003304, BRACE2003319, BRACE2003398, BRACE2003420, BRACE2003428, BRACE2003431, BRACE2003512, BRACE2003516, BRACE2003539, BRACE2003540, BRACE2003594, BRACE2003598, BRACE2003609, BRACE2003614, BRACE2003628, BRACE2003639, BRACE2003700, BRACE2003713, BRACE2003766, BRACE2003788, BRACE2003800, BRACE2003802, BRACE2003825, BRACE2003845, BRACE2003846, BRACE2003847, BRACE2003848, BRACE2003873, BRACE2003885, BRACE2003887, BRACE2003905, BRACE2003928, BRACE2003954, BRACE2003982, BRACE2003987, BRACE2005034, BRACE2005047, BRACE2005063, BRACE2005083, BRACE2005090, BRACE2005099, BRACE2005118, BRACE2005124, BRACE2005138, BRACE2005160, BRACE2005169, BRACE2005189, BRACE2005193, BRACE2005196, BRACE2005198, BRACE2005216, BRACE2005243, BRACE2005253, BRACE2005290, BRACE2005298, BRACE2005328, BRACE2005329, BRACE2005337, BRACE2005348, BRACE2005363, BRACE2005395, BRACE2005408, BRACE2005433, BRACE2005434, BRACE2005448, BRACE2005450, BRACE2005453, BRACE2005457, BRACE2005460, BRACE2005489, BRACE2005518, BRACE2005556, BRACE2005562, BRACE2005624, BRACE2005642, BRACE2005661, BRACE2005667, BRACE2005731, BRACE2005742, BRACE2005762, BRACE2005773, BRACE2005787, BRACE2005795, BRACE2005800, BRACE2005858, BRACE2005869, BRACE2005875, BRACE2005881, BRACE2005898, BRACE2005904, BRACE2005906, BRACE2005907, BRACE2005911, BRACE2005949, BRACE2005981, BRACE2005991, BRACE2006084, BRACE2006089, BRACE2006102, BRACE2006105, BRACE2006122, BRACE2006137, BRACE2006143, BRACE2006162, BRACE2006167, BRACE2006174, BRACE2006240, BRACE2006245, BRACE2006249, BRACE2006274, BRACE2006281, BRACE2006298, BRACE2006363, BRACE2006378, BRACE2006380, BRACE2006393, BRACE2006397, BRACE2006413, BRACE2006417, BRACE2006453, BRACE2006459, BRACE2006488, BRACE2006534, BRACE2006537, BRACE2006540, BRACE2006547, BRACE2006564, BRACE2006587, BRACE2006598, BRACE2006636, BRACE2006685, BRACE2006703, BRACE2006753, BRACE2006783, BRACE2006821, BRACE2006833, BRACE2006859, BRACE2006871, BRACE2006909, BRACE2006911, BRACE2006924, BRACE2006935, BRACE2006944, BRACE2006951, BRACE2006982, BRACE2006986, BRACE2007013, BRACE2007068, BRACE2007087, BRACE2007138, BRACE2007191, BRACE2007197, BRACE2007201, BRACE2007203, BRACE2007232, BRACE2007254, BRACE2007262, BRACE2007274, BRACE2007281, BRACE2007295, BRACE2007358, BRACE2007396, BRACE2007398, BRACE2007401, BRACE2007411, BRACE2007447, BRACE2007477, BRACE2007502, BRACE2007503, BRACE2007522, BRACE2007527, BRACE2007538, BRACE2007563, BRACE2007567, BRACE2007577, BRACE2007621, BRACE2007640, BRACE2007646, BRACE2007663, BRACE2007682, BRACE2007685, BRACE2007708, BRACE2007727, BRACE2007749, BRACE2007760, BRACE2007761, BRACE2007764, BRACE2007767, BRACE2007769, BRACE2007784, BRACE2007786, BRACE2007798, BRACE2007799, BRACE2007801, BRACE2007836, BRACE2007868, BRACE2007888, BRACE2007902, BRACE2007920, BRACE2007944, BRACE2008008, BRACE2008015, BRACE2008021, BRACE2008097, BRACE2008114, BRACE2008144, BRACE2008172, BRACE2008216, BRACE2008218, BRACE2008251, BRACE2008276, BRACE2008295, BRACE2008308, BRACE2008336, BRACE2008361, BRACE2008380, BRACE2008385, BRACE2008399, BRACE2008401, BRACE2008402, BRACE2008410, BRACE2008420, BRACE2008443, BRACE2008473, BRACE2008480, BRACE2008488, BRACE2008495, BRACE2008500, BRACE2008594, BRACE2008604, BRACE2008615, BRACE2008622, BRACE2008629, BRACE2008655, BRACE2008656, BRACE2008706, BRACE2008708, BRACE2008710, BRACE2008754, BRACE2008847, BRACE2008857, BRACE2008861, BRACE2008867, BRACE2008881, BRACE2008883, BRACE2008917, BRACE2008919, BRACE2008948, BRACE2008960, BRACE2008968, BRACE2008999, BRACE2009014, BRACE2009016, BRACE2009031, BRACE2009053, BRACE2009122, BRACE2009131, BRACE2009185, BRACE2009188, BRACE2009212, BRACE2009221, BRACE2009235, BRACE2009238, BRACE2009270, BRACE2009272, BRACE2009274, BRACE2009275, BRACE2009291, BRACE2009293, BRACE2009307, BRACE2009311, BRACE2009318, BRACE2009323, BRACE2009366, BRACE2009421, BRACE2009428, BRACE2009434, BRACE2009437, BRACE2009483, BRACE2009533, BRACE2009558, BRACE2009566, BRACE2009591, BRACE2009620, BRACE2009654, BRACE2009721, BRACE2009732, BRACE2009754, BRACE2009828, BRACE2009886, BRACE2009907, BRACE2010170, BRACE2010171, BRACE2010203, BRACE2010208, BRACE2010336, BRACE2010348, BRACE2010440, BRACE2010444, BRACE2010477, BRACE2010489, BRACE2010535, BRACE2010550, BRACE2010598, BRACE2010632, BRACE2010642, BRACE2010651, BRACE2010684, BRACE2010753, BRACE2010813, BRACE2010837, BRACE2010888, BRACE2010937, BRACE2010983, BRACE2011007, BRACE2011025, BRACE2011199, BRACE2011265, BRACE2011389, BRACE2011478, BRACE2011545, BRACE2011592, BRACE2011611, BRACE2011646, BRACE2011677, BRACE2011703, BRACE2011747, BRACE2011838, BRACE2011892, BRACE2011904, BRACE2011947, BRACE2012061, BRACE2012062, BRACE2012185, BRACE2012232, BRACE2012510, BRACE2012625, BRACE2012653, BRACE2012833, BRACE2012838, BRACE2012936, BRACE2012947, BRACE2013009, BRACE2013010, BRACE2013126, BRACE2013132, BRACE2013149, BRACE2013806, BRACE2013855, BRACE2013911, BRACE2014108, BRACE2014161, BRACE2014232, BRACE2014268, BRACE2014306, BRACE2014475, BRACE2014657, BRACE2014746, BRACE2014780, BRACE2014818, BRACE2014821, BRACE2014824, BRACE2014850, BRACE2014854, BRACE2015031, BRACE2015132, BRACE2015262, BRACE2015270, BRACE2015287, BRACE2015314, BRACE2015352, BRACE2015368, BRACE2015412, BRACE2015436, BRACE2015741, BRACE2015756, BRACE2015969, BRACE2015995, BRACE2016058, BRACE2016194, BRACE2016315, BRACE2016325, BRACE2016335, BRACE2016362, BRACE2016366, BRACE2016465, BRACE2016516, BRACE2016583, BRACE2016708, BRACE2016821, BRACE2016896, BRACE2016981, BRACE2017108, BRACE2017124, BRACE2017298, BRACE2017359, BRACE2017397, BRACE2017410, BRACE2017438, BRACE2017580, BRACE2017587, BRACE2017720, BRACE2017844, BRACE2017872, BRACE2017929, BRACE2017934, BRACE2017985, BRACE2017992, BRACE2018337, BRACE2018443, BRACE2018448, BRACE2018568, BRACE2018700, BRACE2018727, BRACE2018736, BRACE2018759, BRACE2018762, BRACE2018782, BRACE2018847, BRACE2019004, BRACE2019044, BRACE2019244, BRACE2019258, BRACE2019327, BRACE2019348, BRACE2019371, BRACE2019467, BRACE2019510, BRACE2019519, BRACE2019528, BRACE2019618, BRACE2019696, BRACE2019703, BRACE2019843, BRACE2019865, BRACE2019872, BRACE2020028, BRACE2020077, BRACE2020097, BRACE2020157, BRACE2020278, BRACE2020358, BRACE2020467, BRACE2020584, BRACE2020652, BRACE2020709, BRACE2020742, BRACE2020756, BRACE2020863, BRACE2020982, BRACE2021143, BRACE2021148, BRACE2021245, BRACE2021254, BRACE2021264, BRACE2021433, BRACE2021478, BRACE2021541, BRACE2021670, BRACE2021695, BRACE2021708, BRACE2021721, BRACE2021932, BRACE2021936, BRACE2022030, BRACE2022158, BRACE2022196, BRACE2022270, BRACE2022328, BRACE2022333, BRACE2022389, BRACE2022394, BRACE2022435, BRACE2022448, BRACE2022450, BRACE2022549, BRACE2022633, BRACE2022693, BRACE2022848, BRACE2022928, BRACE2022990, BRACE2023069, BRACE2023070, BRACE2023223, BRACE2023268, BRACE2023284, BRACE2023404, BRACE2023451, BRACE2023540, BRACE2023633, BRACE2023727, BRACE2023744, BRACE2023800, BRACE2023801, BRACE2024074, BRACE2024222, BRACE2024610, BRACE2024627, BRACE2024781, BRACE2024826, BRACE2025018, BRACE2025316, BRACE2025333, BRACE2025437, BRACE2025452, BRACE2025710, BRACE2025992, BRACE2026131, BRACE2026142, BRACE2026293, BRACE2026294, BRACE2026404, BRACE2026675, BRACE2026725, BRACE2026836, BRACE2026920, BRACE2026971, BRACE2027018, BRACE2027221, BRACE2027258, BRACE2027312, BRACE2027382, BRACE2027389, BRACE2027408, BRACE2027643, BRACE2027767, BRACE2027770, BRACE2027879, BRACE2027896, BRACE2027970, BRACE2028171, BRACE2028392, BRACE2028410, BRACE2028636, BRACE2028741, BRACE2028956, BRACE2028970, BRACE2029112, BRACE2029356, BRACE2029396, BRACE2029581, BRACE2029644, BRACE2029849, BRACE2030039, BRACE2030096, BRACE2030323, BRACE2030326, BRACE2030345, BRACE2030736, BRACE2030883, BRACE2030884, BRACE2031154, BRACE2031232, BRACE2031527, BRACE2031531, BRACE2031553, BRACE2031899, BRACE2032044, BRACE2032090, BRACE2032134, BRACE2032148, BRACE2032182, BRACE2032329, BRACE2032385, BRACE2032436, BRACE2032477, BRACE2032502, BRACE2032538, BRACE2032584, BRACE2032823, BRACE2033128, BRACE2033394, BRACE2033478, BRACE2033720, BRACE2033786, BRACE2034434, BRACE2034523, BRACE2034616, BRACE2034622, BRACE2034870, BRACE2035003, BRACE2035120, BRACE2035124, BRACE2035191, BRACE2035278, BRACE2035381, BRACE2035441, BRACE2035485, BRACE2036005, BRACE2036096, BRACE2036743, BRACE2036830, BRACE2036834, BRACE2036900, BRACE2037132, BRACE2037294, BRACE2037299, BRACE2037310, BRACE2037431, BRACE2037692, BRACE2037847, BRACE2038114, BRACE2038269, BRACE2038271, BRACE2038329, BRACE2038492, BRACE2038551, BRACE2038618, BRACE2039009, BRACE2039128, BRACE2039170, BRACE2039249, BRACE2039286, BRACE2039297, BRACE2039327, BRACE2039362, BRACE2039475, BRACE2039600, BRACE2039607, BRACE2039734, BRACE2039823, BRACE2039832, BRACE2039893, BRACE2039986, BRACE2040138, BRACE2040325, BRACE2040514, BRACE2040640, BRACE2040987, BRACE2041009, BRACE2041095, BRACE2041200, BRACE2041264, BRACE2041890, BRACE2041898, BRACE2042394, BRACE2042398, BRACE2042550, BRACE2042620, BRACE2042628, BRACE2042873, BRACE2043036, BRACE2043105, BRACE2043142, BRACE2043248, BRACE2043349, BRACE2043381, BRACE2043774, BRACE2043942, BRACE2044057, BRACE2044105, BRACE2044263, BRACE2044286, BRACE2044304, BRACE2044473, BRACE2044510, BRACE2044640, BRACE2044816, BRACE2044946, BRACE2044949, BRACE2045300, BRACE2045428, BRACE2045445, BRACE2045596, BRACE2045772, BRACE2045947, BRACE2045954, BRACE2046251, BRACE2046295, BRACE2046976, BRACE2047011, BRACE2047232, BRACE2047350, BRACE2047377, BRACE2047385, BRACE2047492, BRACE2047558, BRACE2047573, BRACE2047835, BRACE2047893, BRACE2047975, BRACE3000071, BRACE3000404, BRACE3000520, BRACE3000697, BRACE3000840, BRACE30009.73, BRACE3001002, BRACE3001058, BRACE3001066, BRACE3001217, BRACE3001299, BRACE3001384, BRACE3001391, BRACE3001403, BRACE3001595, BRACE3001754, BRACE3001948, BRACE3001973, BRACE3002184, BRACE3002298, BRACE3002344, BRACE3002390, BRACE3002420, BRACE3002508, BRACE3002541, BRACE3002756, BRACE3003004, BRACE3003026, BRACE3003053, BRACE3003192, BRACE3003413, BRACE3003595, BRACE3003698, BRACE3003866, BRACE3003920, BRACE3004046, BRACE3004058, BRACE3004113, BRACE3004205, BRACE3004358, BRACE3004371, BRACE3004435, BRACE3004477, BRACE3004767, BRACE3004772, BRACE3004783, BRACE3004843, BRACE3004862, BRACE3004880, BRACE3004887, BRACE3004981, BRACE3004996, BRACE3004998, BRACE3005103, BRACE3005127, BRACE3005145, BRACE3005217, BRACE3005225, BRACE3005430, BRACE3005499, BRACE3005760, BRACE3005870, BRACE3005903, BRACE3005989, BRACE3006113, BRACE3006185, BRACE3006226, BRACE3006462, BRACE3006463, BRACE3006553, BRACE3006872, BRACE3006917, BRACE3007058, BRACE3007084, BRACE3007085, BRACE3007258, BRACE3007322, BRACE3007472, BRACE3007480, BRACE3007559, BRACE3007625, BRACE3007642, BRACE3007649, BRACE3007767, BRACE3007869, BRACE3008036, BRACE3008066, BRACE3008092, BRACE3008095, BRACE3008137, BRACE3008255, BRACE3008337, BRACE3008384, BRACE3008720, BRACE3008772, BRACE3009044, BRACE3009075, BRACE3009090, BRACE3009127, BRACE3009197, BRACE3009237, BRACE3009265, BRACE3009297, BRACE3009377, BRACE3009392, BRACE3009416, BRACE3009539, BRACE3009574, BRACE3009701, BRACE3009708, BRACE3009724, BRACE3009993, BRACE3010076, BRACE3010079, BRACE3010086, BRACE3010221, BRACE3010283, BRACE3010315, BRACE3010397, BRACE3010416, BRACE3010435, BRACE3010702, BRACE3010862, BRACE3011271, BRACE3011421, BRACE3011447, BRACE3011505, BRACE3011634, BRACE3011774, BRACE3012357, BRACE3012574, BRACE3012806, BRACE3012930, BRACE3013119, BRACE3013418, BRACE3013576, BRACE3013740, BRACE3013874, BRACE3013936, BRACE3013986, BRACE3014005, BRACE3014068, BRACE3014231, BRACE3014290, BRACE3014317, BRACE3014523, BRACE3014714, BRACE3014807, BRACE3014942, BRACE3015090, BRACE3015121, BRACE3015262, BRACE3015521, BRACE3015808, BRACE3015829, BRACE3015894, BRACE3015898, BRACE3016020, BRACE3016122, BRACE3016167, BRACE3016170, BRACE3016580, BRACE3016788, BRACE3016810, BRACE3016862, BRACE3016884, BRACE3017083, BRACE3017253, BRACE3018083, BRACE3018308, BRACE3018963, BRACE3019055, BRACE3019071, BRACE3019084, BRACE3019570, BRACE3019611, BRACE3019817, BRACE3019828, BRACE3019941, BRACE3020151, BRACE3020194, BRACE3020286, BRACE3020356, BRACE3020594, BRACE3020669, BRACE3020671, BRACE3020890, BRACE3021148, BRACE3021430, BRACE3021517, BRACE3021805, BRACE3022051, BRACE3022303, BRACE3022312, BRACE3022340, BRACE3022847, BRACE3023604, BRACE3023912, BRACE3024073, BRACE3024359, BRACE3024379, BRACE3024444, BRACE3024497, BRACE3024537, BRACE3024659, BRACE3024662, BRACE3024879, BRACE3025153, BRACE3025302, BRACE3025457, BRACE3025531, BRACE3025627, BRACE3025630, BRACE3025719, BRACE3026008, BRACE3026075, BRACE3026161, BRACE3026290, BRACE3026345, BRACE3026456, BRACE3026735, BRACE3026802, BRACE3026844, BRACE3026947, BRACE3026993, BRACE3027242, BRACE3027256, BRACE3027326, BRACE3027478, BRACE3027480, BRACE3027931, BRACE3027976, BRACE3028214, BRACE3028241, BRACE3028360, BRACE3028895, BRACE3028998, BRACE3029005, BRACE3029021, BRACE3029205, BRACE3029447, BRACE3030057, BRACE3030103, BRACE3030538, BRACE3030748, BRACE3030866, BRACE3031161, BRACE3031184, BRACE3031185, BRACE3031315, BRACE3031372, BRACE3031579, BRACE3031728, BRACE3031838, BRACE3031843, BRACE3032427, BRACE3032455, BRACE3032537, BRACE3032538, BRACE3032631, BRACE3032771, BRACE3032980, BRACE3032983, BRACE3033525, BRACE3034159, BRACE3034183, BRACE3034389, BRACE3034964, BRACE3034993, BRACE3035168, BRACE3035227, BRACE3036156, BRACE3036271, BRACE3037612, BRACE3037637, BRACE3037803, BRACE3038012, BRACE3038030, BRACE3038569, BRACE3038570, BRACE3038687, BRACE3038760, BRACE3039288, BRACE3039358, BRACE3039378, BRACE3039454, BRACE3040012, BRACE3040239, BRACE3040504, BRACE3040644, BRACE3040856, BRACE3040863, BRACE3041059, BRACE3041162, BRACE3041827, BRACE3042046, BRACE3042210, BRACE3042326, BRACE3042409, BRACE3042432, BRACE3042594, BRACE3043597, BRACE3044090, BRACE3044172, BRACE3044247, BRACE3044377, BRACE3044389, BRACE3044495, BRACE3045011, BRACE3045033, BRACE3045078, BRACE3045145, BRACE3045424, BRACE3045708, BRACE3045981, BRACE3046049, BRACE3046152, BRACE3046294, BRACE3046450, BRACE3046466, BRACE3046491, BRACE3046609, BRACE3046762, BRACE3046837, BRACE3046855, BRACE3046966, BRACE3047018, BRACE3047482, BRACE3047801, BRALZ1000047, BRALZ1000103, BRALZ2000189, BRALZ2000263, BRALZ2000988, BRALZ2001038, BRALZ2001279, BRALZ2001350, BRALZ2001445, BRALZ2001559, BRALZ2001743, BRALZ2001834, BRALZ2002174, BRALZ2002418, BRALZ2002477, BRALZ2003119, BRALZ2003330, BRALZ2003453, BRALZ2003525, BRALZ2004397, BRALZ2005467, BRALZ2005471, BRALZ2005888, BRALZ2005950, BRALZ2005992, BRALZ2006288, BRALZ2006474, BRALZ2006560, BRALZ2006734, BRALZ2006800, BRALZ2006976, BRALZ2007376, BRALZ2007545, BRALZ2007576, BRALZ2007661, BRALZ2007790, BRALZ2007793, BRALZ2007952, BRALZ2008031, BRALZ2008462, BRALZ2008617, BRALZ2008696, BRALZ2008763, BRALZ2008869, BRALZ2008930, BRALZ2009446, BRALZ2009486, BRALZ2010186, BRALZ2010842, BRALZ2011337, BRALZ2011796, BRALZ2012050, BRALZ2012183, BRALZ2012848, BRALZ2013621, BRALZ2013690, BRALZ2014054, BRALZ2014316, BRALZ2014484, BRALZ2014951, BRALZ2015168, BRALZ2015811, BRALZ2016085, BRALZ2016498, BRALZ2017359, BRALZ2017531, BRALZ2017607, BRALZ2017620, BRALZ2017844, BRALZ2018342, BRALZ2018492, BRALZ2018834, BRALZ2019047, BRAMY1000095, BRAMY1000098, BRAMY1000130, BRAMY1000157, BRAMY2000021, BRAMY2000025, BRAMY2000052, BRAMY2000076, BRAMY2000086, BRAMY2000151, BRAMY2000196, BRAMY2000231, BRAMY2000277, BRAMY2000388, BRAMY2000411, BRAMY2000508, BRAMY2000585, BRAMY2000653, BRAMY2000814, BRAMY2000946, BRAMY2000981, BRAMY2000987, BRAMY2001068, BRAMY2001114, BRAMY2001203, BRAMY2001282, BRAMY2001367, BRAMY2001427, BRAMY2001473, BRAMY2001678, BRAMY2002005, BRAMY2002044, BRAMY2002072, BRAMY2002158, BRAMY2002311, BRAMY2002339, BRAMY2002364, BRAMY2002369, BRAMY2002479, BRAMY2002493, BRAMY2002525, BRAMY2002584, BRAMY2002604, BRAMY2002621, BRAMY2002638, BRAMY2002739, BRAMY2002799, BRAMY2002853, BRAMY2002862, BRAMY2002956, BRAMY2003008, BRAMY2003037, BRAMY2003117, BRAMY2003287, BRAMY2003325, BRAMY2003529, BRAMY2003538, BRAMY2003585, BRAMY2003634, BRAMY2003653, BRAMY2003681, BRAMY2003893, BRAMY2003897, BRAMY2003898, BRAMY2003904, BRAMY2003926, BRAMY2004031, BRAMY2004058, BRAMY2004183, BRAMY2004335, BRAMY2004351, BRAMY2004352, BRAMY2004387, BRAMY2004492, BRAMY2004524, BRAMY2004537, BRAMY2004542, BRAMY2004756, BRAMY2004771, BRAMY2005052, BRAMY2005064, BRAMY2005094, BRAMY2005151, BRAMY2005182, BRAMY2005244, BRAMY2005391, BRAMY2005488, BRAMY2005576, BRAMY2005648, BRAMY2005662, BRAMY2005708, BRAMY2005711, BRAMY2006092, BRAMY2006118, BRAMY2006149, BRAMY2006366, BRAMY2006375, BRAMY2006397, BRAMY2006411, BRAMY2006459, BRAMY2006466, BRAMY2006659, BRAMY2006779, BRAMY2006809, BRAMY2006879, BRAMY2007043, BRAMY2007110, BRAMY2007185, BRAMY2007249, BRAMY2007255, BRAMY2007287, BRAMY2007308, BRAMY2007411, BRAMY2007458, BRAMY2007486, BRAMY2007546, BRAMY2007594, BRAMY2007610, BRAMY2007653, BRAMY2007753, BRAMY2007859, BRAMY2008333, BRAMY2008382, BRAMY2008563, BRAMY2008583, BRAMY2008979, BRAMY2009013, BRAMY2009023, BRAMY2009034, BRAMY2009105, BRAMY2009123, BRAMY2009192, BRAMY2009344, BRAMY2009349, BRAMY2009394, BRAMY2009489, BRAMY2009508, BRAMY2009528, BRAMY2009557, BRAMY2009693, BRAMY2010068, BRAMY2010135, BRAMY2010145, BRAMY2010171, BRAMY2010208, BRAMY2010239, BRAMY2010272, BRAMY2010290, BRAMY2010357, BRAMY2010366, BRAMY2010395, BRAMY2010441, BRAMY2010442, BRAMY2010464, BRAMY2010581, BRAMY2010798, BRAMY2010808, BRAMY2010919, BRAMY2011064, BRAMY2011105, BRAMY2011178, BRAMY2011196, BRAMY2011216, BRAMY2011253, BRAMY2011446, BRAMY2011480, BRAMY2011639, BRAMY2011679, BRAMY2011811, BRAMY2011841, BRAMY2011846, BRAMY2011849, BRAMY2011872, BRAMY2011961, BRAMY2012017, BRAMY2012091, BRAMY2012119, BRAMY2012162, BRAMY2012163, BRAMY2012277, BRAMY2012340, BRAMY2012426, BRAMY2012497, BRAMY2012517, BRAMY2012536, BRAMY2012555, BRAMY2012568, BRAMY2012581, BRAMY2012691, BRAMY2012721, BRAMY2012731, BRAMY2012776, BRAMY2012880, BRAMY2012881, BRAMY2013169, BRAMY2013200, BRAMY2013216, BRAMY2013405, BRAMY2013414, BRAMY2013572, BRAMY2013590, BRAMY2013621, BRAMY2013659, BRAMY2013722, BRAMY2013736, BRAMY2013756, BRAMY2013944, BRAMY2013975, BRAMY2014019, BRAMY2014205, BRAMY2014387, BRAMY2014462, BRAMY2014469, BRAMY2014541, BRAMY2014754, BRAMY2014813, BRAMY2015211, BRAMY2015311, BRAMY2015420, BRAMY2015503, BRAMY2015516, BRAMY2015550, BRAMY2015551, BRAMY2015559, BRAMY2015688, BRAMY2015705, BRAMY2015782, BRAMY2015833, BRAMY2015855, BRAMY2015890, BRAMY2015911, BRAMY2015925, BRAMY2016002, BRAMY2016009, BRAMY2016020, BRAMY2016070, BRAMY2016251, BRAMY2016325, BRAMY2016327, BRAMY2016386, BRAMY2016706, BRAMY2016771, BRAMY2016892, BRAMY2016938, BRAMY2016953, BRAMY2017014, BRAMY2017249, BRAMY2017348, BRAMY2017450, BRAMY2017455, BRAMY2017528, BRAMY2017864, BRAMY2018027, BRAMY2018106, BRAMY2018122, BRAMY2018126, BRAMY2018272, BRAMY2018273, BRAMY2018279, BRAMY2018295, BRAMY2018308, BRAMY2018396, BRAMY2018467, BRAMY2018635, BRAMY2018785, BRAMY2019055, BRAMY2019111, BRAMY2019277, BRAMY2019300, BRAMY2019468, BRAMY2019509, BRAMY2019600, BRAMY2019643, BRAMY2019710, BRAMY2019963, BRAMY2019985, BRAMY2020050, BRAMY2020058, BRAMY2020270, BRAMY2020354, BRAMY2020355, BRAMY2020412, BRAMY2020445, BRAMY2020466, BRAMY2020520, BRAMY2020574, BRAMY2020634, BRAMY2020713, BRAMY2021040, BRAMY2021063, BRAMY2021098, BRAMY2021139, BRAMY2021142, BRAMY2021276, BRAMY2021310, BRAMY2021388, BRAMY2021498, BRAMY2021523, BRAMY2021710, BRAMY2021732, BRAMY2021746, BRAMY2021825, BRAMY2021867, BRAMY2021962, BRAMY2021982, BRAMY2022052, BRAMY2022160, BRAMY2022168, BRAMY2022263, BRAMY2022301, BRAMY2022320, BRAMY2022383, BRAMY2022445, BRAMY2022454, BRAMY2022525, BRAMY2022532, BRAMY2022723, BRAMY2022796, BRAMY2022929, BRAMY2022980, BRAMY2022984, BRAMY2023060, BRAMY2023110, BRAMY2023115, BRAMY2023161, BRAMY2023172, BRAMY2023238, BRAMY2023327, BRAMY2023358, BRAMY2023406, BRAMY2023482, BRAMY2023514, BRAMY2023719, BRAMY2023729, BRAMY2023786, BRAMY2023852, BRAMY2023863, BRAMY2024004, BRAMY2024073, BRAMY2024312, BRAMY2024374, BRAMY2024390, BRAMY2024449, BRAMY2024489, BRAMY2024497, BRAMY2024514, BRAMY2024530, BRAMY2024535, BRAMY2024545, BRAMY2024576, BRAMY2024593, BRAMY2024711, BRAMY2024715, BRAMY2024728, BRAMY2024849, BRAMY2025024, BRAMY2025032, BRAMY2025121, BRAMY2025175, BRAMY2025218, BRAMY2025230, BRAMY2025272, BRAMY2025277, BRAMY2025495, BRAMY2025812, BRAMY2025996, BRAMY2026009, BRAMY2026091, BRAMY2026168, BRAMY2026300, BRAMY2026347, BRAMY2026395, BRAMY2026405, BRAMY2026533, BRAMY2026538, BRAMY2026685, BRAMY2026713, BRAMY2026824, BRAMY2026899, BRAMY2026902, BRAMY2026904, BRAMY2026976, BRAMY2027073, BRAMY2027114, BRAMY2027140, BRAMY2027242, BRAMY2027396, BRAMY2027451, BRAMY2027461, BRAMY2027467, BRAMY2027587, BRAMY2027714, BRAMY2027717, BRAMY2027739, BRAMY2027752, BRAMY2027782, BRAMY2028072, BRAMY2028183, BRAMY2028188, BRAMY2028269, BRAMY2028472, BRAMY2028491, BRAMY2028516, BRAMY2028565, BRAMY2028593, BRAMY2028682, BRAMY2028783, BRAMY2028796, BRAMY2028856, BRAMY2028914, BRAMY2029204, BRAMY2029602, BRAMY2029988, BRAMY2030098, BRAMY2030109, BRAMY2030206, BRAMY2030477, BRAMY2030545, BRAMY2030607, BRAMY2030702, BRAMY2030703, BRAMY2030768, BRAMY2030799, BRAMY2030859, BRAMY2030915, BRAMY2031317, BRAMY2031377, BRAMY2031442, BRAMY2031516, BRAMY2032014, BRAMY2032231, BRAMY2032242, BRAMY2032290, BRAMY2032311, BRAMY2032317, BRAMY2032344, BRAMY2032589, BRAMY2032678, BRAMY2032696, BRAMY2032777, BRAMY2032994, BRAMY2033003, BRAMY2033116, BRAMY2033240, BRAMY2033267, BRAMY2033316, BRAMY2033332, BRAMY2033506, BRAMY2033594, BRAMY2033895, BRAMY2033914, BRAMY2034072, BRAMY2034185, BRAMY2034187, BRAMY2034305, BRAMY2034561, BRAMY2034920, BRAMY2034993, BRAMY2035070, BRAMY2035449, BRAMY2035545, BRAMY2035606, BRAMY2035718, BRAMY2035719, BRAMY2035801, BRAMY2035869, BRAMY2035923, BRAMY2036076, BRAMY2036079, BRAMY2036254, BRAMY2036266, BRAMY2036387, BRAMY2036396, BRAMY2036615, BRAMY2036699, BRAMY2036913, BRAMY2036918, BRAMY2036968, BRAMY2037147, BRAMY2037328, BRAMY2037609, BRAMY2037629, BRAMY2037800, BRAMY2037823, BRAMY2037971, BRAMY2038100, BRAMY2038128, BRAMY2038317, BRAMY2038475, BRAMY2038484, BRAMY2038516, BRAMY2038832, BRAMY2038846, BRAMY2038887, BRAMY2038904, BRAMY2039287, BRAMY2039300, BRAMY2039314, BRAMY2039341, BRAMY2039630, BRAMY2039695, BRAMY2039728, BRAMY2040051, BRAMY2040159, BRAMY2040214, BRAMY2040478, BRAMY2040592, BRAMY2040915, BRAMY2041261, BRAMY2041347, BRAMY2041378, BRAMY2041384, BRAMY2041434, BRAMY2041507, BRAMY2041542, BRAMY2041738, BRAMY2042122, BRAMY2042131, BRAMY2042178, BRAMY2042195, BRAMY2042244, BRAMY2042549, BRAMY2042596, BRAMY2042612, BRAMY2042641, BRAMY2042711, BRAMY2042760, BRAMY2042804, BRAMY2042899, BRAMY2042918, BRAMY2043069, BRAMY2043103, BRAMY2043314, BRAMY2043345, BRAMY2044246, BRAMY2044317, BRAMY2044349, BRAMY2044686, BRAMY2044838, BRAMY2045036, BRAMY2045299, BRAMY2045471, BRAMY2045530, BRAMY2046109, BRAMY2046478, BRAMY2046489, BRAMY2046537, BRAMY2046667, BRAMY2046742, BRAMY2046871, BRAMY2046984, BRAMY2046989, BRAMY2047169, BRAMY2047280, BRAMY2047420, BRAMY2047676, BRAMY2047692, BRAMY2047746, BRAMY2047751, BRAMY2047765, BRAMY2047884, BRAMY2047948, BRAMY3000206, BRAMY3000210, BRAMY3000213, BRAMY3000254, BRAMY3000307, BRAMY3000692, BRAMY3001356, BRAMY3001401, BRAMY3001409, BRAMY3001794, BRAMY3002120, BRAMY3002312, BRAMY3002329, BRAMY3002458, BRAMY3002508, BRAMY3002620, BRAMY3002803, BRAMY3002805, BRAMY3002886, BRAMY3003026, BRAMY3003109, BRAMY3003205, BRAMY3003310, BRAMY3003566, BRAMY3003723, BRAMY3004126, BRAMY3004224, BRAMY3004364, BRAMY3004672, BRAMY3004800, BRAMY3004900, BRAMY3004919, BRAMY3005184, BRAMY3005656, BRAMY3005912, BRAMY3005932, BRAMY3006032, BRAMY3006297, BRAMY3006761, BRAMY3007078, BRAMY3007206, BRAMY3007311, BRAMY3007350, BRAMY3007449, BRAMY3007471, BRAMY3007609, BRAMY3007723, BRAMY3007968, BRAMY3008088, BRAMY3008096, BRAMY3008466, BRAMY3008505, BRAMY3008650, BRAMY3008937, BRAMY3009158, BRAMY3009207, BRAMY3009491, BRAMY3009556, BRAMY3009782, BRAMY3009811, BRAMY3009904, BRAMY3010008, BRAMY3010264, BRAMY3010321, BRAMY3010411, BRAMY3010603, BRAMY3010654, BRAMY4000089, BRAMY4000095, BRAMY4000229, BRAMY4000277, BRAMY4000915, BRAMY4000962, BRAMY4001173, BRAMY4001200, BRAMY4001234, BRAMY4001449, BRAMY4001652, BRAMY4001863, BRAMY4001913, BRAMY4002575, BRAMY4002628, BRASW1000053, BRASW1000125, BRAWH1000001, BRAWH1000002, BRAWH1000007, BRAWH1000083, BRAWH1000094, BRAWH1000116, BRAWH1000130, BRAWH1000157, BRAWH1000164, BRAWH1000168, BRAWH1000174, BRAWH1000180, BRAWH1000369, BRAWH2000034, BRAWH2000048, BRAWH2000071, BRAWH2000093, BRAWH2000109, BRAWH2000131, BRAWH2000142, BRAWH2000177, BRAWH2000218, BRAWH2000232, BRAWH2000248, BRAWH2000256, BRAWH2000323, BRAWH2000353, BRAWH2000370, BRAWH2000409, BRAWH2000417, BRAWH2000443, BRAWH2000471, BRAWH2000476, BRAWH2000482, BRAWH2000488, BRAWH2000494, BRAWH2000500, BRAWH2000503, BRAWH2000554, BRAWH2000595, BRAWH2000633, BRAWH2000643, BRAWH2000651, BRAWH2000682, BRAWH2000697, BRAWH2000752, BRAWH2000859, BRAWH2000866, BRAWH2000892, BRAWH2000901, BRAWH2000926, BRAWH2000944, BRAWH2000984, BRAWH2001019, BRAWH2001052, BRAWH2001103, BRAWH2001129, BRAWH2001137, BRAWH2001159, BRAWH2001166, BRAWH2001186, BRAWH2001203, BRAWH2001238, BRAWH2001239, BRAWH2001255, BRAWH2001355, BRAWH2001378, BRAWH2001395, BRAWH2001406, BRAWH2001412, BRAWH2001418, BRAWH2001436, BRAWH2001438, BRAWH2001459, BRAWH2001461, BRAWH2001492, BRAWH2001503, BRAWH2001519, BRAWH2001530, BRAWH2001535, BRAWH2001589, BRAWH2001666, BRAWH2001671, BRAWH2001679, BRAWH2001686, BRAWH2001701, BRAWH2001842, BRAWH2001862, BRAWH2001873, BRAWH2001940, BRAWH2001973, BRAWH2002047, BRAWH2002060, BRAWH2002062, BRAWH2002125, BRAWH2002191, BRAWH2002318, BRAWH2002333, BRAWH2002352, BRAWH2002383, BRAWH2002549, BRAWH2002601, BRAWH2002623, BRAWH2002630, BRAWH2002635, BRAWH2002662, BRAWH2002679, BRAWH2002725, BRAWH2002761, BRAWH2002811, BRAWH2002861, BRAWH2002963, BRAWH2002967, BRAWH2002976, BRAWH2003000, BRAWH2003135, BRAWH2003240, BRAWH2003307, BRAWH2003355, BRAWH2003366, BRAWH2003689, BRAWH2003693, BRAWH2003832, BRAWH2003948, BRAWH2003964, BRAWH2004044, BRAWH2004068, BRAWH2004078, BRAWH2004136, BRAWH2004217, BRAWH2004580, BRAWH2004731, BRAWH2004779, BRAWH2004842, BRAWH2004884, BRAWH2004923, BRAWH2005225, BRAWH2005315, BRAWH2005517, BRAWH2005524, BRAWH2005533, BRAWH2005578, BRAWH2005812, BRAWH2005974, BRAWH2005998, BRAWH2006044, BRAWH2006083, BRAWH2006207, BRAWH2006301, BRAWH2006395, BRAWH2006405, BRAWH2006526, BRAWH2006543, BRAWH2006622, BRAWH2006760, BRAWH2006960, BRAWH2006989, BRAWH2007069, BRAWH2007308, BRAWH2007406, BRAWH2007550, BRAWH2007570, BRAWH2007591, BRAWH2007658, BRAWH2007808, BRAWH2007825, BRAWH2007862, BRAWH2007890, BRAWH2008058, BRAWH2008128, BRAWH2008219, BRAWH2008292, BRAWH2008297, BRAWH2008366, BRAWH2008380, BRAWH2008540, BRAWH2008577, BRAWH2008790, BRAWH2008956, BRAWH2008993, BRAWH2009112, BRAWH2009227, BRAWH2009238, BRAWH2009261, BRAWH2009263, BRAWH2009298, BRAWH2009304, BRAWH2009307, BRAWH2009393, BRAWH2009485, BRAWH2009490, BRAWH2009558, BRAWH2009590, BRAWH2009626, BRAWH2009678, BRAWH2009695, BRAWH2009907, BRAWH2010000, BRAWH2010069, BRAWH2010084, BRAWH2010136, BRAWH2010318, BRAWH2010354, BRAWH2010364, BRAWH2010536, BRAWH2010552, BRAWH2010584, BRAWH2010618, BRAWH2010619, BRAWH2010754, BRAWH2011066, BRAWH2011079, BRAWH2011096, BRAWH2011155, BRAWH2011166, BRAWH2011204, BRAWH2011286, BRAWH2011294, BRAWH2011400, BRAWH2011762, BRAWH2011795, BRAWH2011796, BRAWH2011823, BRAWH2011860, BRAWH2011920, BRAWH2011958, BRAWH2012054, BRAWH2012077, BRAWH2012162, BRAWH2012258, BRAWH2012326, BRAWH2012538, BRAWH2012540, BRAWH2012619, BRAWH2012698, BRAWH2012749, BRAWH2012963, BRAWH2013047, BRAWH2013219, BRAWH2013294, BRAWH2013748, BRAWH2013866, BRAWH2013871, BRAWH2013914, BRAWH2013941, BRAWH2013955, BRAWH2014053, BRAWH2014234, BRAWH2014379, BRAWH2014414, BRAWH2014473, BRAWH2014662, BRAWH2014717, BRAWH2014729, BRAWH2014876, BRAWH2014934, BRAWH2014954, BRAWH2015349, BRAWH2015375, BRAWH2015385, BRAWH2015595, BRAWH2015728, BRAWH2015853, BRAWH2015866, BRAWH2016028, BRAWH2016106, BRAWH2016160, BRAWH2016166, BRAWH2016209, BRAWH2016221, BRAWH2016223, BRAWH2016269, BRAWH2016305, BRAWH2016439, BRAWH2016446, BRAWH2016514, BRAWH2016562, BRAWH2016655, BRAWH2016679, BRAWH2016702, BRAWH2016785, BRAWH2016792, BRAWH2016800, BRAWH2017103, BRAWH2017250, BRAWH2017294, BRAWH2017304, BRAWH2017305, BRAWH2017379, BRAWH2017407, BRAWH2017433, BRAWH2017523, BRAWH2017534, BRAWH2017635, BRAWH2017913, BRAWH2018206, BRAWH2018267, BRAWH2018282, BRAWH2018317, BRAWH2018506, BRAWH2018514, BRAWH2018527, BRAWH2018601, BRAWH2018729, BRAWH2018745, BRAWH2018875, BRAWH2019053, BRAWH2019055, BRAWH2019198, BRAWH3000078, BRAWH3000100, BRAWH3000166, BRAWH3000314, BRAWH3000329, BRAWH3000410, BRAWH3000446, BRAWH3000491, BRAWH3000604, BRAWH3000884, BRAWH3001053, BRAWH3001319, BRAWH3001326, BRAWH3001475, BRAWH3001636, BRAWH3001638, BRAWH3001712, BRAWH3001760, BRAWH3001783, BRAWH3001833, BRAWH3001879, BRAWH3001891, BRAWH3001918, BRAWH3002433, BRAWH3002467, BRAWH3002513, BRAWH3002574, BRAWH3002600, BRAWH3002819, BRAWH3003019, BRAWH3003136, BRAWH3003244, BRAWH3003343, BRAWH3003411, BRAWH3003522, BRAWH3003573, BRAWH3003598, BRAWH3003727, BRAWH3003801, BRAWH3003975, BRAWH3004222, BRAWH3004335, BRAWH3004350, BRAWH3004453, BRAWH3004530, BRAWH3004666, BRAWH3005037, BRAWH3005047, BRAWH3005132, BRAWH3005292, BRAWH3005300, BRAWH3005422, BRAWH3005534, BRAWH3005886, BRAWH3005892, BRAWH3005896, BRAWH3005912, BRAWH3005981, BRAWH3006547, BRAWH3006548, BRAWH3006761, BRAWH3006792, BRAWH3007129, BRAWH3007221, BRAWH3007441, BRAWH3007455, BRAWH3007506, BRAWH3007726, BRAWH3007783, BRAWH3008167, BRAWH3008341, BRAWH3008559, BRAWH3008697, BRAWH3008867, BRAWH3008931, BRAWH3009017, BRAWH3009285, BRAWH3009297, BRAWH3009546, BRAWH3009961, BRAWH3010560, BRAWH3010602, BRAWH3010657, BRAWH3010726, BRAWH3010833, BRAWH3011101, BRAWH3011331, BRAWH3011402, BRAWH3011577, BRAWH3011623, BRAWH3011637, BRAWH3011685, BRAWH3011907, BRAWH3011929, BRAWH3012005, BRAWH3012662, BRAWH3012779, BRAWH3013009, BRAWH3013049, BRAWH3013197, BRAWH3013264, BRAWH3013508, BRAWH3014609, BRAWH3014639, BRAWH3015017, BRAWH3015175, BRAWH3015260, BRAWH3015610, BRAWH3015825, BRAWH3016123, BRAWH3016715, BRAWH3017260, BRAWH3017477, BRAWH3017537, BRAWH3017980, BRAWH3018369, BRAWH3018548, BRAWH3018969, BRAWH3019026, BRAWH3019529, BRAWH3019594, BRAWH3019629, BRAWH3019820, BRAWH3020200, BRAWH3020318, BRAWH3020486, BRAWH3020884, BRAWH3020928, BRAWH3021012, BRAWH3021545, BRAWH3021580, BRAWH3021641, BRAWH3021643, BRAWH3021724, BRAWH3022347, BRAWH3022431, BRAWH3022459, BRAWH3022542, BRAWH3022719, BRAWH3022866, BRAWH3022900, BRAWH3023156, BRAWH3023168, BRAWH3023172, BRAWH3023274, BRAWH3023421, BRAWH3024231, BRAWH3024242, BRAWH3024469, BRAWH3024506, BRAWH3024613, BRAWH3024989, BRAWH3026349, BRAWH3026394, BRAWH3026529, BRAWH3027420, BRAWH3027440, BRAWH3027533, BRAWH3027574, BRAWH3027607, BRAWH3027616, BRAWH3027675, BRAWH3027806, BRAWH3027880, BRAWH3027927, BRAWH3028202, BRAWH3028223, BRAWH3028306, BRAWH3028461, BRAWH3028645, BRAWH3028754, BRAWH3028796, BRAWH3029254, BRAWH3029313, BRAWH3029538, BRAWH3029556, BRAWH3029806, BRAWH3030613, BRAWH3030772, BRAWH3030810, BRAWH3030892, BRAWH3030910, BRAWH3030950, BRAWH3031054, BRAWH3031710, BRAWH3031902, BRAWH3032298, BRAWH3032340, BRAWH3032571, BRAWH3032620, BRAWH3032930, BRAWH3033117, BRAWH3033293, BRAWH3033448, BRAWH3033513, BRAWH3034097, BRAWH3034114, BRAWH3034134, BRAWH3034668, BRAWH3034743, BRAWH3034775, BRAWH3034890, BRAWH3035154, BRAWH3035403, BRAWH3035904, BRAWH3035914, BRAWH3035936, BRAWH3036077, BRAWH3036247, BRAWH3036270, BRAWH3036561, BRAWH3036738, BRAWH3036951, BRAWH3037265, BRAWH3037394, BRAWH3037533, BRAWH3037979, BRAWH3038055, BRAWH3038230, BRAWH3038252, BRAWH3038324, BRCAN1000065, BRCAN1000076, BRCAN1000105, BRCAN1000149, BRCAN2000148, BRCAN2000149, BRCAN2000209, BRCAN2000239, BRCAN2000346, BRCAN2000364, BRCAN2000383, BRCAN2000418, BRCAN2000523, BRCAN2000541, BRCAN2000577, BRCAN2000620, BRCAN2000639, BRCAN2000763, BRCAN2000832, BRCAN2000923, BRCAN2001223, BRCAN2001866, BRCAN2002173, BRCAN2002416, BRCAN2002473, BRCAN2002562, BRCAN2002662, BRCAN2002826, BRCAN2002854, BRCAN2002856, BRCAN2002892, BRCAN2002944, BRCAN2002948, BRCAN2003070, BRCAN2003269, BRCAN2003389, BRCAN2003628, BRCAN2003703, BRCAN2003746, BRCAN2003814, BRCAN2003987, BRCAN2004173, BRCAN2004355, BRCAN2004371, BRCAN2004653, BRCAN2004699, BRCAN2005436, BRCAN2005449, BRCAN2006019, BRCAN2006051, BRCAN2006063, BRCAN2006117, BRCAN2006174, BRCAN2006290, BRCAN2006297, BRCAN2006323, BRCAN2006401, BRCAN2006411, BRCAN2006450, BRCAN2006955, BRCAN2007119, BRCAN2007144, BRCAN2007409, BRCAN2007426, BRCAN2007525, BRCAN2007700, BRCAN2008494, BRCAN2008528, BRCAN2008701, BRCAN2008894, BRCAN2009156, BRCAN2009168, BRCAN2009203, BRCAN2010374, BRCAN2010376, BRCAN2010547, BRCAN2010581, BRCAN2011254, BRCAN2011316, BRCAN2011602, BRCAN2011946, BRCAN2012110, BRCAN2012355, BRCAN2012402, BRCAN2012408, BRCAN2012481, BRCAN2012613, BRCAN2012713, BRCAN2012929, BRCAN2013655, BRCAN2013660, BRCAN2014143, BRCAN2014229, BRCAN2014370, BRCAN2014602, BRCAN2014652, BRCAN2014788, BRCAN2014881, BRCAN2014952, BRCAN2015371, BRCAN2015402, BRCAN2015464, BRCAN2015719, BRCAN2015757, BRCAN2015886, BRCAN2016025, BRCAN2016046, BRCAN2016174, BRCAN2016433, BRCAN2016619, BRCAN2016762, BRCAN2016814, BRCAN2017442, BRCAN2017905, BRCAN2018240, BRCAN2018269, BRCAN2018490, BRCAN2018566, BRCAN2018667, BRCAN2018748, BRCAN2018935, BRCAN2019002, BRCAN2019387, BRCAN2019653, BRCAN2019773, BRCAN2019907, BRCAN2020234, BRCAN2020331, BRCAN2020412, BRCAN2020467, BRCAN2020710, BRCAN2020880, BRCAN2021024, BRCAN2021028, BRCAN2021325, BRCAN2021452, BRCAN2021669, BRCAN2021718, BRCAN2022126, BRCAN2022191, BRCAN2022472, BRCAN2022474, BRCAN2023347, BRCAN2023724, BRCAN2024451, BRCAN2024563, BRCAN2025009, BRCAN2025093, BRCAN2025349, BRCAN2025368, BRCAN2025712, BRCAN2025982, BRCAN2026117, BRCAN2026340, BRCAN2026711, BRCAN2027150, BRCAN2027310, BRCAN2027334, BRCAN2027355, BRCAN2027364, BRCAN2027513, BRCAN2027593, BRCAN2027970, BRCAN2028021, BRCAN2028040, BRCAN2028319, BRCAN2028338, BRCAN2028355, BRCAN2028378, BRCAN2028460, BRCAN2028545, BRCAN2028634, BRCAN2028702, BRCOC1000040, BRCOC1000087, BRCOC1000094, BRCOC2000047, BRCOC2000152, BRCOC2000184, BRCOC2000186, BRCOC2000333, BRCOC2000360, BRCOC2000404, BRCOC2000487, BRCOC2000637, BRCOC2000670, BRCOC2000816, BRCOC2000850, BRCOC2001355, BRCOC2002085, BRCOC2002155, BRCOC2002323, BRCOC2002659, BRCOC2002664, BRCOC2002686, BRCOC2002751, BRCOC2002756, BRCOC2002777, BRCOC2002835, BRCOC2003100, BRCOC2003125, BRCOC2003187, BRCOC2003213, BRCOC2003513, BRCOC2003732, BRCOC2003740, BRCOC2004036, BRCOC2004175, BRCOC2004354, BRCOC2004455, BRCOC2004950, BRCOC2005542, BRCOC2005903, BRCOC2005951, BRCOC2006164, BRCOC2006189, BRCOC2006243, BRCOC2006270, BRCOC2006639, BRCOC2006942, BRCOC2007034, BRCOC2007593, BRCOC2007733, BRCOC2007769, BRCOC2008064, BRCOC2008225, BRCOC2008642, BRCOC2008993, BRCOC2009052, BRCOC2009196, BRCOC2009380, BRCOC2009638, BRCOC2009937, BRCOC2010115, BRCOC2010510, BRCOC2010730, BRCOC2010980, BRCOC2010994, BRCOC2011010, BRCOC2011398, BRCOC2011418, BRCOC2011506, BRCOC2011769, BRCOC2011996, BRCOC2012172, BRCOC2012229, BRCOC2012386, BRCOC2012551, BRCOC2012813, BRCOC2013448, BRCOC2013573, BRCOC2013675, BRCOC2013780, BRCOC2014013, BRCOC2014033, BRCOC2014400, BRCOC2014748, BRCOC2014833, BRCOC2015597, BRCOC2015824, BRCOC2015908, BRCOC2015944, BRCOC2016525, BRCOC2016661, BRCOC2017061, BRCOC2017652, BRCOC2017856, BRCOC2018775, BRCOC2018877, BRCOC2019255, BRCOC2019549, BRCOC2019841, BRCOC2019896, BRCOC2019903, BRCOC2019934, BRCOC2020122, BRCOC2020142, BRHIP1000058, BRHIP1000072, BRHIP1000129, BRHIP2000021, BRHIP2000079, BRHIP2000087, BRHIP2000163, BRHIP2000210, BRHIP2000239, BRHIP2000245, BRHIP2000359, BRHIP2000445, BRHIP2000506, BRHIP2000532, BRHIP2000621, BRHIP2000691, BRHIP2000819, BRHIP2000826, BRHIP2000920, BRHIP2001074, BRHIP2001686, BRHIP2001782, BRHIP2001802, BRHIP2001886, BRHIP2001927, BRHIP2002122, BRHIP2002143, BRHIP2002172, BRHIP2002346, BRHIP2002510, BRHIP2002664, BRHIP2002722, BRHIP2002929, BRHIP2003048, BRHIP2003062, BRHIP2003242, BRHIP2003272, BRHIP2003748, BRHIP2003786, BRHIP2003828, BRHIP2003917, BRHIP2004312, BRHIP2004355, BRHIP2004359, BRHIP2004814, BRHIP2004883, BRHIP2004902, BRHIP2005010, BRHIP2005236, BRHIP2005271, BRHIP2005354, BRHIP2005600, BRHIP2005719, BRHIP2005724, BRHIP2005752, BRHIP2005932, BRHIP2006617, BRHIP2006782, BRHIP2006800, BRHIP2006819, BRHIP2006921, BRHIP2007616, BRHIP2007690, BRHIP2007928, BRHIP2007969, BRHIP2008269, BRHIP2008389, BRHIP2008607, BRHIP2008756, BRHIP2008909, BRHIP2009019, BRHIP2009177, BRHIP2009340, BRHIP2009351, BRHIP2009414, BRHIP2009474, BRHIP2009617, BRHIP2009685, BRHIP2010309, BRHIP2010444, BRHIP2010487, BRHIP2010571, BRHIP2010593, BRHIP2010610, BRHIP2010723, BRHIP2010744, BRHIP2011120, BRHIP2011199, BRHIP2011491, BRHIP2011508, BRHIP2011576, BRHIP2011616, BRHIP2011783, BRHIP2011838, BRHIP2011891, BRHIP2011933, BRHIP2012059, BRHIP2012141, BRHIP2012314, BRHIP2012360, BRHIP2012545, BRHIP2012580, BRHIP2012627, BRHIP2012642, BRHIP2012750, BRHIP2012922, BRHIP2012923, BRHIP2012972, BRHIP2013286, BRHIP2013447, BRHIP2013510, BRHIP2013723, BRHIP2013958, BRHIP2013972, BRHIP2014063, BRHIP2014228, BRHIP2014285, BRHIP2014291, BRHIP2014373, BRHIP2014386, BRHIP2014387, BRHIP2014954, BRHIP2015153, BRHIP2015356, BRHIP2015360, BRHIP2016005, BRHIP2016125, BRHIP2016788, BRHIP2016968, BRHIP2016990, BRHIP2017010, BRHIP2017315, BRHIP2017385, BRHIP2017404, BRHIP2017542, BRHIP2017553, BRHIP2017714, BRHIP2017780, BRHIP2017945, BRHIP2018014, BRHIP2018369, BRHIP2018612, BRHIP2018635, BRHIP2018650, BRHIP2018719, BRHIP2018805, BRHIP2018998, BRHIP2019007, BRHIP2019047, BRHIP2019149, BRHIP2019177, BRHIP2019291, BRHIP2019494, BRHIP2019589, BRHIP2019641, BRHIP2019819, BRHIP2019884, BRHIP2019972, BRHIP2020182, BRHIP2020509, BRHIP2020622, BRHIP2020695, BRHIP2020743, BRHIP2020799, BRHIP2020842, BRHIP2020859, BRHIP2020930, BRHIP2021102, BRHIP2021289, BRHIP2021615, BRHIP2021744, BRHIP2021870, BRHIP2021929, BRHIP2022006, BRHIP2022054, BRHIP2022221, BRHIP2022228, BRHIP2022298, BRHIP2022326, BRHIP2022467, BRHIP2022708, BRHIP2023071, BRHIP2023229, BRHIP2023272, BRHIP2023309, BRHIP2023369, BRHIP2023438, BRHIP2023695, BRHIP2023735, BRHIP2023762, BRHIP2023860, BRHIP2023869, BRHIP2024046, BRHIP2024165, BRHIP2024201, BRHIP2024347, BRHIP2024398, BRHIP2024549, BRHIP2024789, BRHIP2024911, BRHIP2024941, BRHIP2025245, BRHIP2025366, BRHIP2025448, BRHIP2025679, BRHIP2025739, BRHIP2025797, BRHIP2026021, BRHIP2026061, BRHIP2026155, BRHIP2026288, BRHIP2026346, BRHIP2026557, BRHIP2026723, BRHIP2026877, BRHIP2027017, BRHIP2027054, BRHIP2027563, BRHIP2027685, BRHIP2027762, BRHIP2028187, BRHIP2028303, BRHIP2028330, BRHIP2028480, BRHIP2028583, BRHIP2028593, BRHIP2029176, BRHIP2029283, BRHIP2029393, BRHIP2029529, BRHIP2029643, BRHIP2029663, BRHIP3000060, BRHIP3000070, BRHIP3000081, BRHIP3000131, BRHIP3000240, BRHIP3000377, BRHIP3000457, BRHIP3000475, BRHIP3000488, BRHIP3000526, BRHIP3000626, BRHIP3000859, BRHIP3000907, BRHIP3001076, BRHIP3001079, BRHIP3001141, BRHIP3001283, BRHIP3001338, BRHIP3001360, BRHIP3001481, BRHIP3001878, BRHIP3001964, BRHIP3002114, BRHIP3002124, BRHIP3002363, BRHIP3002920, BRHIP3002931, BRHIP3003063, BRHIP3003126, BRHIP3003306, BRHIP3003340, BRHIP3003395, BRHIP3003484, BRHIP3003644, BRHIP3003688, BRHIP3003795, BRHIP3003961, BRHIP3003984, BRHIP3004193, BRHIP3004215, BRHIP3004416, BRHIP3004710, BRHIP3004725, BRHIP3004774, BRHIP3004786, BRHIP3004863, BRHIP3004968, BRHIP3005037, BRHIP3005137, BRHIP3005142, BRHIP3005231, BRHIP3005307, BRHIP3005574, BRHIP3005673, BRHIP3005768, BRHIP3005801, BRHIP3005944, BRHIP3006279, BRHIP3006294, BRHIP3006390, BRHIP3006449, BRHIP3006683, BRHIP3006786, BRHIP3006950, BRHIP3007172, BRHIP3007183, BRHIP3007195, BRHIP3007223, BRHIP3007239, BRHIP3007291, BRHIP3007409, BRHIP3007424, BRHIP3007483, BRHIP3007609, BRHIP3007640, BRHIP3007960, BRHIP3008082, BRHIP3008183, BRHIP3008314, BRHIP3008320, BRHIP3008344, BRHIP3008405, BRHIP3008565, BRHIP3008598, BRHIP3008606, BRHIP3008691, BRHIP3008714, BRHIP3008997, BRHIP3009140, BRHIP3009181, BRHIP3009318, BRHIP3009427, BRHIP3009448, BRHIP3009672, BRHIP3009753, BRHIP3010135, BRHIP3010289, BRHIP3010529, BRHIP3011082, BRHIP3011241, BRHIP3011269, BRHIP3011460, BRHIP3011567, BRHIP3011831, BRHIP3012185, BRHIP3012289, BRHIP3012357, BRHIP3012736, BRHIP3012745, BRHIP3012868, BRHIP3013078, BRHIP3013271, BRHIP3013588, BRHIP3013698, BRHIP3013765, BRHIP3013897, BRHIP3014237, BRHIP3014675, BRHIP3015620, BRHIP3015751, BRHIP3015854, BRHIP3016032, BRHIP3016213, BRHIP3016302, BRHIP3016421, BRHIP3017109, BRHIP3017146, BRHIP3017256, BRHIP3017325, BRHIP3017558, BRHIP3017637, BRHIP3018278, BRHIP3018784, BRHIP3019643, BRHIP3019824, BRHIP3019880, BRHIP3019956, BRHIP3020155, BRHIP3020182, BRHIP3020733, BRHIP3021499, BRHIP3021534, BRHIP3021778, BRHIP3021987, BRHIP3022656, BRHIP3023922, BRHIP3024118, BRHIP3024533, BRHIP3024703, BRHIP3024725, BRHIP3024820, BRHIP3025161, BRHIP3025702, BRHIP3025795, BRHIP3025844, BRHIP3026052, BRHIP3026097, BRHIP3026231, BRHIP3026335, BRHIP3026651, BRHIP3027105, BRHIP3027137, BRHIP3027160, BRHIP3027191, BRHIP3027501, BRHIP3027594, BRHIP3027651, BRHIP3027854, BRHIP3027947, BRHIP3028570, BRHIP3028742, BRSSN1000059, BRSSN1000092, BRSSN1000153, BRSSN2000097, BRSSN2000175, BRSSN2000197, BRSSN2000244, BRSSN2000293, BRSSN2000295, BRSSN2000518, BRSSN2000684, BRSSN2000715, BRSSN2000832, BRSSN2001213, BRSSN2001275, BRSSN2001342, BRSSN2001426, BRSSN2001503, BRSSN2001579, BRSSN2001758, BRSSN2001810, BRSSN2001869, BRSSN2002857, BRSSN2002859, BRSSN2003012, BRSSN2003086, BRSSN2003093, BRSSN2003820, BRSSN2003841, BRSSN2003937, BRSSN2004142, BRSSN2004303, BRSSN2004304, BRSSN2004496, BRSSN2004657, BRSSN2004679, BRSSN2004686, BRSSN2004710, BRSSN2004719, BRSSN2005847, BRSSN2006133, BRSSN2006390, BRSSN2006575, BRSSN2006611, BRSSN2006644, BRSSN2006892, BRSSN2007076, BRSSN2007168, BRSSN2007202, BRSSN2007504, BRSSN2007819, BRSSN2008125, BRSSN2008419, BRSSN2008464, BRSSN2008549, BRSSN2008797, BRSSN2009119, BRSSN2009378, BRSSN2009389, BRSSN2009395, BRSSN2009518, BRSSN2009627, BRSSN2009630, BRSSN2009702, BRSSN2010019, BRSSN2010110, BRSSN2010587, BRSSN2010596, BRSSN2010830, BRSSN2011262, BRSSN2011738, BRSSN2012081, BRSSN2012103, BRSSN2012157, BRSSN2012198, BRSSN2012254, BRSSN2012439, BRSSN2012622, BRSSN2012691, BRSSN2012838, BRSSN2013095, BRSSN2013544, BRSSN2013702, BRSSN2013733, BRSSN2013753, BRSSN2013874, BRSSN2014112, BRSSN2014294, BRSSN2014299, BRSSN2014424, BRSSN2014513, BRSSN2014556, BRSSN2014573, BRSSN2014610, BRSSN2014636, BRSSN2014685, BRSSN2015199, BRSSN2015369, BRSSN2015493, BRSSN2015497, BRSSN2015554, BRSSN2015707, BRSSN2015773, BRSSN2015907, BRSSN2015982, BRSSN2016589, BRSSN2016768, BRSSN2016905, BRSSN2017297, BRSSN2017422, BRSSN2017530, BRSSN2017682, BRSSN2017757, BRSSN2018218, BRSSN2018440, BRSSN201.8447, BRSSN2018581, BRSSN2018731, BRSSN2018771, BRSSN2018925, BRSTN1000097, BRSTN2000058, BRSTN2000070, BRSTN2000312, BRSTN2000367, BRSTN2000536, BRSTN2000872, BRSTN2001067, BRSTN2001613, BRSTN2001801, BRSTN2002105, BRSTN2002400, BRSTN2002532, BRSTN2002691, BRSTN2003590, BRSTN2003835, BRSTN2004863, BRSTN2004869, BRSTN2004987, BRSTN2005721, BRSTN2006306, BRSTN2006466, BRSTN2006580, BRSTN2006583, BRSTN2006638, BRSTN2006865, BRSTN2007000, BRSTN2007118, BRSTN2007284, BRSTN2007765, BRSTN2008052, BRSTN2008283, BRSTN2008367, BRSTN2008418, BRSTN2008457, BRSTN2008475, BRSTN2008930, BRSTN2009247, BRSTN2010107, BRSTN2010363, BRSTN2010416, BRSTN2010500, BRSTN2010569, BRSTN2010923, BRSTN2011211, BRSTN2011597, BRSTN2011688, BRSTN2011799, BRSTN2012284, BRSTN2012320, BRSTN2012380, BRSTN2012451, BRSTN2013171, BRSTN2013354, BRSTN2013931, BRSTN2014490, BRSTN2014633, BRSTN2014751, BRSTN2014770, BRSTN2015015, BRSTN2015889, BRSTN2015978, BRSTN2016066, BRSTN2016335, BRSTN2016678, BRSTN2016918, BRSTN2016992, BRSTN2017151, BRSTN2017237, BRSTN2017379, BRSTN2017761, BRSTN2017771, BRSTN2017995, BRSTN2018077, BRSTN2018083, BRSTN2018596, BRSTN2018692, BRSTN2018712, BRSTN2019079, BRSTN2019129, BRTHA1000021, BRTHA1000063, BRTHA1000311, BRTHA2000057, BRTHA2000474, BRTHA2000514, BRTHA2000574, BRTHA2000855, BRTHA2000969, BRTHA2000972, BRTHA2001304, BRTHA2001370, BRTHA2001462, BRTHA2001717, BRTHA2001812, BRTHA2002091, BRTHA2002115, BRTHA2002133, BRTHA2002281, BRTHA2002376, BRTHA2002442, BRTHA2002493, BRTHA2002565, BRTHA2002608, BRTHA2002702, BRTHA2002721, BRTHA2002726, BRTHA2002741, BRTHA2002808, BRTHA2002896, BRTHA2002903, BRTHA2003030, BRTHA2003110, BRTHA2003116, BRTHA2003436, BRTHA2003759, BRTHA2003794, BRTHA2004361, BRTHA2004371, BRTHA2004582, BRTHA2004629, BRTHA2004639, BRTHA2004642, BRTHA2004812, BRTHA2004821, BRTHA2004978, BRTHA2004992, BRTHA2005005, BRTHA2005013, BRTHA2005448, BRTHA2005579, BRTHA2005831, BRTHA2005942, BRTHA2005956, BRTHA2006075, BRTHA2006146, BRTHA2006194, BRTHA2006232, BRTHA2006720, BRTHA2006735, BRTHA2006974, BRTHA2006975, BRTHA2007060, BRTHA2007122, BRTHA2007422, BRTHA2007603, BRTHA2007665, BRTHA2007998, BRTHA2008316, BRTHA2008335, BRTHA2008513, BRTHA2008527, BRTHA2008535, BRTHA2008598, BRTHA2008669, BRTHA2008955, BRTHA2009311, BRTHA2009349, BRTHA2009486, BRTHA2009803, BRTHA2009846, BRTHA2009886, BRTHA2009972, BRTHA2010008, BRTHA2010033, BRTHA2010073, BRTHA2010097, BRTHA2010191, BRTHA2010397, BRTHA2010608, BRTHA2010672, BRTHA2010884, BRTHA2010907, BRTHA2011062, BRTHA2011194, BRTHA2011321, BRTHA2011351, BRTHA2011500, BRTHA2011641, BRTHA2011691, BRTHA2012129, BRTHA2012183, BRTHA2012189, BRTHA2012351, BRTHA2012392, BRTHA2012466, BRTHA2012555, BRTHA2012562, BRTHA2012980, BRTHA2013054, BRTHA2013262, BRTHA2013275, BRTHA2013426, BRTHA2013460, BRTHA2013515, BRTHA2013540, BRTHA2013595, BRTHA2013610, BRTHA2013707, BRTHA2013942, BRTHA2014287, BRTHA2014334, BRTHA2014381, BRTHA2014578, BRTHA2014647, BRTHA2014663, BRTHA2014792, BRTHA2014828, BRTHA2014909, BRTHA2014975, BRTHA2014997, BRTHA2015406, BRTHA2015478, BRTHA2015696, BRTHA2015700, BRTHA2015853, BRTHA2015878, BRTHA2016179, BRTHA2016215, BRTHA2016267, BRTHA2016318, BRTHA2016496, BRTHA2016543, BRTHA2016552, BRTHA2016765, BRTHA2016918, BRTHA2017178, BRTHA2017353, BRTHA2017364, BRTHA2017972, BRTHA2017985, BRTHA2018011, BRTHA2018129, BRTHA2018165, BRTHA2018304, BRTHA2018344, BRTHA2018420, BRTHA2018443, BRTHA2018504, BRTHA2018558, BRTHA2018591, BRTHA2018624, BRTHA2018706, BRTHA2018707, BRTHA2019014, BRTHA2019022, BRTHA2019048, BRTHA2019073, BRTHA2019726, BRTHA2019743, BRTHA2020400, BRTHA2020566, BRTHA2020642, BRTHA2020695, BRTHA2020721, BRTHA2020781, BRTHA2020811, BRTHA2020910, BRTHA2021212, BRTHA2021440, BRTHA2021450, BRTHA2022074, BRTHA2022914, BRTHA2022968, BRTHA2023402, BRTHA2023437, BRTHA2024177, BRTHA2024354, BRTHA2024712, BRTHA2025869, BRTHA2026071, BRTHA2026290, BRTHA2026311, BRTHA2027227, BRTHA2027250, BRTHA2027546, BRTHA2028297, BRTHA2029969, BRTHA2030036, BRTHA2030213, BRTHA2031517, BRTHA2031800, BRTHA2031917, BRTHA2032763, BRTHA2032845, BRTHA2033122, BRTHA2033264, BRTHA2033320, BRTHA2033469, BRTHA2033683, BRTHA2034281, BRTHA2034576, BRTHA2034874, BRTHA2035448, BRTHA2035743, BRTHA2036055, BRTHA2036295, BRTHA2036660, BRTHA2037247, BRTHA2038279, BRTHA2038345, BRTHA2038353, BRTHA2038396, BRTHA3000252, BRTHA3000273, BRTHA3000296, BRTHA3000297, BRTHA3000325, BRTHA3000456, BRTHA3000633, BRTHA3000789, BRTHA3001221, BRTHA3001623, BRTHA3002265, BRTHA3002401, BRTHA3002411, BRTHA3002427, BRTHA3002864, BRTHA3002933, BRTHA3002955, BRTHA3003000, BRTHA3003023, BRTHA3003074, BRTHA3003225, BRTHA3003339, BRTHA3003343, BRTHA3003417, BRTHA3003449, BRTHA3003474, BRTHA3003490, BRTHA3003704, BRTHA3003736, BRTHA3004307, BRTHA3004432, BRTHA3004475, BRTHA3004502, BRTHA3004610, BRTHA3005046, BRTHA3005735, BRTHA3005988, BRTHA3006318, BRTHA3006593, BRTHA3006856, BRTHA3007113, BRTHA3007130, BRTHA3007148, BRTHA3007319, BRTHA3007469, BRTHA3007472, BRTHA3007532, BRTHA3007662, BRTHA3007685, BRTHA3007769, BRTHA3007922, BRTHA3008143, BRTHA3008293, BRTHA3008310, BRTHA3008386, BRTHA3008520, BRTHA3008608, BRTHA3008694, BRTHA3008778, BRTHA3008826, BRTHA3009037, BRTHA3009291, BRTHA3010135, BRTHA3010366, BRTHA3010469, BRTHA3010540, BRTHA3010717, BRTHA3011149, BRTHA3011187, BRTHA3011229, BRTHA3011265, BRTHA3011361, BRTHA3011510, BRTHA3011892, BRTHA3012265, BRTHA3013860, BRTHA3013882, BRTHA3013884, BRTHA3013981, BRTHA3014000, BRTHA3014105, BRTHA3014507, BRTHA3014547, BRTHA3014691, BRTHA3014835, BRTHA3014854, BRTHA3014908, BRTHA3014920, BRTHA3015815, BRTHA3016616, BRTHA3016835, BRTHA3016845, BRTHA3016917, BRTHA3017047, BRTHA3017589, BRTHA3017848, BRTHA3018409, BRTHA3018514, BRTHA3018617, BRTHA3018623, BRTHA3018656, BRTHA3019048, BRTHA3019105, BRTHA3019183, BRTHA3020000, BRTHA3020314, BRTHA3020369, BRTHA3021569, BRTHA3021708, BRTHA3021786, BRTHA3021971, BRTHA3023403, BRTHA3023523, BRTHA3023590, BRTHA3023929, BRTHA3024233, BRTHA3024600, BRTHA3025073, BRTHA3025789, BRTHA3025826, BRTHA3026161, BRTHA3026180, BRTHA3026507, BRTHA3026556, BRTHA3026916, BRTHA3027171, BRTHA3027318, BRTHA3027638, BRTHA3027820, BRTHA3027879, BRTHA3027957, BRTHA3028339, BRTHA3028505, BRTHA3028782, CD34C2000051, CD34C2000152, CD34C2000175, CD34C2000443, CD34C3000125, CD34C3000314, CD34C3000424, CD34C3000494, CERVX1000042, CERVX2000812, CERVX2000968, CERVX2002006, CERVX2002013, CERVX2002430, CERVX2002770, CHONS1000058, CHONS2000172, CHONS2000797, CHONS2001287, CHONS2001382, CHONS2001797, CHONS2001834, CHONS2002419, CHONS2002829, COLON1000030, COLON1000084, COLON1000135, COLON2000470, COLON2000557, COLON2000568, COLON2001721, COLON2001829, COLON2001866, COLON2002443, COLON2002520, COLON2003043, COLON2003529, COLON2004318, COLON2004351, COLON2004478, COLON2004911, COLON2005126, COLON2005623, COLON2005735, COLON2005772, COLON2006263, COLON2006282, COLON2006417, COLON2007274, COLON2007733, COLON2008105, COLON2009337, COLON2009499, CORDB1000140, CORDB2000061, CORDB2000127, CORDB2000541, CTONG1000009, CTONG1000010, CTONG1000020, CTONG1000022, CTONG1000040, CTONG1000056, CTONG1000062, CTONG1000086, CTONG1000088, CTONG1000093, CTONG1000097, CTONG1000113, CTONG1000137, CTONG1000165, CTONG1000175, CTONG1000180, CTONG1000181, CTONG1000220, CTONG1000277, CTONG1000283, CTONG1000288, CTONG1000302, CTONG1000341, CTONG1000467, CTONG1000476, CTONG1000488, CTONG1000508, CTONG1000540, CTONG2000031, CTONG2000034, CTONG2000042, CTONG2000063, CTONG2000201, CTONG2000218, CTONG2000279, CTONG2000303, CTONG2000330, CTONG2000395, CTONG2000411, CTONG2000465, CTONG2000469, CTONG2000480, CTONG2000561, CTONG2000589, CTONG2000766, CTONG2000771, CTONG2000819, CTONG2000827, CTONG2000846, CTONG2000855, CTONG2000977, CTONG2001226, CTONG2001366, CTONG2001413, CTONG2001428, CTONG2001513, CTONG2001524, CTONG2001533, CTONG2001598, CTONG2001681, CTONG2001724, CTONG2001749, CTONG2001800, CTONG2001820, CTONG2001858, CTONG2001877, CTONG2001932, CTONG2001955, CTONG2002066, CTONG2002095, CTONG2002143, CTONG2002395, CTONG2002417, CTONG2002418, CTONG2002520, CTONG2002558, CTONG2002590, CTONG2002709, CTONG2002721, CTONG2002766, CTONG2002816, CTONG2002832, CTONG2002841, CTONG2002965, CTONG2002999, CTONG2003028, CTONG2003100, CTONG2003115, CTONG2003189, CTONG2003245, CTONG2003348, CTONG2003350, CTONG2003361, CTONG2003372, CTONG2003375, CTONG2003427, CTONG2003517, CTONG2003599, CTONG2003680, CTONG2003699, CTONG2003764, CTONG2003782, CTONG2003889, CTONG2003937, CTONG2003945, CTONG2004000, CTONG2004062, CTONG2004115, CTONG2004126, CTONG2004264, CTONG2004305, CTONG2004397, CTONG2004423, CTONG2004454, CTONG2004487, CTONG2004550, CTONG2004669, CTONG2004716, CTONG2004912, CTONG2004941, CTONG2004948, CTONG2005028, CTONG2005049, CTONG2005110, CTONG2005145, CTONG2005265, CTONG2005278, CTONG2005374, CTONG2005399, CTONG2005468, CTONG2005567, CTONG2005585, CTONG2005615, CTONG2005635, CTONG2005775, CTONG2005795, CTONG2005890, CTONG2005904, CTONG2005913, CTONG2006004, CTONG2006129, CTONG2006223, CTONG2006273, CTONG2006310, CTONG2006377, CTONG2006393, CTONG2006449, CTONG2006515, CTONG2006524, CTONG2006568, CTONG2006611, CTONG2006620, CTONG2006666, CTONG2006691, CTONG2006836, CTONG2006942, CTONG2006964, CTONG2007007, CTONG2007009, CTONG2007072, CTONG2007078, CTONG2007091, CTONG2007104, CTONG2007168, CTONG2007175, CTONG2007259, CTONG2007272, CTONG2007293, CTONG2007297, CTONG2007399, CTONG2007400, CTONG2007417, CTONG2007441, CTONG2007474, CTONG2007613, CTONG2007623, CTONG2007681, CTONG2007779, CTONG2007898, CTONG2007959, CTONG2007970, CTONG2008014, CTONG2008184, CTONG2008262, CTONG2008269, CTONG2008321, CTONG2008343, CTONG2008402, CTONG2008405, CTONG2008466, CTONG2008562, CTONG2008577, CTONG2008595, CTONG2008621, CTONG2008689, CTONG2008720, CTONG2008721, CTONG2008773, CTONG2008989, CTONG2009033, CTONG2009108, CTONG2009132, CTONG2009156, CTONG2009181, CTONG2009257, CTONG2009258, CTONG2009268, CTONG2009270, CTONG2009395, CTONG2009423, CTONG2009440, CTONG2009527, CTONG2009529, CTONG2009531, CTONG2009534, CTONG2009570, CTONG2009572, CTONG2009604, CTONG2009643, CTONG2009675, CTONG2009689, CTONG2009725, CTONG2009766, CTONG2009768, CTONG2009844, CTONG2009871, CTONG2009887, CTONG2009891, CTONG2009923, CTONG2009938, CTONG2009955, CTONG2009958, CTONG2009963, CTONG2010018, CTONG2010024, CTONG2010116, CTONG2010133, CTONG2010148, CTONG2010276, CTONG2010330, CTONG2010348, CTONG2010408, CTONG2010508, CTONG2010623, CTONG2010652, CTONG2010803, CTONG2011188, CTONG2011429, CTONG2011474, CTONG2011676, CTONG2011716, CTONG2011765, CTONG2011779, CTONG2011815, CTONG2011822, CTONG2011825, CTONG2011920, CTONG2011985, CTONG2012029, CTONG2012077, CTONG2012101, CTONG2012123, CTONG2012158, CTONG2012230, CTONG2012422, CTONG2012425, CTONG2012447, CTONG2012453, CTONG2012473, CTONG2012476, CTONG2012533, CTONG2012554, CTONG2012564, CTONG2012607, CTONG2012661, CTONG2012724, CTONG2012738, CTONG2012745, CTONG2012758, CTONG2012843, CTONG2012847, CTONG2012879, CTONG2012901, CTONG2013128, CTONG2013149, CTONG2013156, CTONG2013178, CTONG2013222, CTONG2013284, CTONG2013339, CTONG2013352, CTONG2013393, CTONG2013511, CTONG2013630, CTONG2013803, CTONG2013934, CTONG2013986, CTONG2014032, CTONG2014058, CTONG2014119, CTONG2014191, CTONG2014206, CTONG2014234, CTONG2014264, CTONG2014280, CTONG2014369, CTONG2014491, CTONG2014630, CTONG2014635, CTONG2014646, CTONG2014705, CTONG2014946, CTONG2014954, CTONG2014959, CTONG2014966, CTONG2014995, CTONG2015316, CTONG2015330, CTONG2015345, CTONG2015358, CTONG2015434, CTONG2015518, CTONG2015540, CTONG2015596, CTONG2015633, CTONG2015678, CTONG2015717, CTONG2015804, CTONG2015815, CTONG2015866, CTONG2015914, CTONG2015953, CTONG2016185, CTONG2016217, CTONG2016355, CTONG2016499, CTONG2016505, CTONG2016559, CTONG2016658, CTONG2016775, CTONG2016797, CTONG2016846, CTONG2016869, CTONG2016904, CTONG2016931, CTONG2016942, CTONG2016953, CTONG2017021, CTONG2017094, CTONG2017292, CTONG2017409, CTONG2017429, CTONG2017444, CTONG2017458, CTONG2017500, CTONG2017604, CTONG2017650, CTONG2017798, CTONG2017804, CTONG2017814, CTONG2017910, CTONG2017939, CTONG2017989, CTONG2017998, CTONG2018062, CTONG2018069, CTONG2018147, CTONG2018211, CTONG2018217, CTONG2018279, CTONG2018334, CTONG2018379, CTONG2018383, CTONG2018413, CTONG2018483, CTONG2018629, CTONG2018632, CTONG2018652, CTONG2018653, CTONG2018655, CTONG2018735, CTONG2018808, CTONG2018900, CTONG2018976, CTONG2019029, CTONG2019144, CTONG2019232, CTONG2019400, CTONG2019590, CTONG2019652, CTONG2019704, CTONG2019788, CTONG2019822, CTONG2019833, CTONG2020031, CTONG2020108, CTONG2020127, CTONG2020171, CTONG2020374, CTONG2020378, CTONG2020445, CTONG2020638, CTONG2020806, CTONG2020831, CTONG2020974, CTONG2021024, CTONG2021132, CTONG2021168, CTONG2021289, CTONG2022153, CTONG2022601, CTONG2023021, CTONG2023449, CTONG2023512, CTONG2024031, CTONG2024206, CTONG2024614, CTONG2024749, CTONG2025496, CTONG2025513, CTONG2025516, CTONG2025610, CTONG2025900, CTONG2026513, CTONG2026770, CTONG2026920, CTONG2026987, CTONG2027150, CTONG2027263, CTONG2027327, CTONG2027361, CTONG2027591, CTONG2027736, CTONG2027783, CTONG2027828, CTONG2027959, CTONG2028097, CTONG2028208, CTONG2028309, CTONG2028486, CTONG2028518, CTONG2028687, CTONG2028758, CTONG3000657, CTONG3000686, CTONG3000707, CTONG3000896, CTONG3001420, CTONG3001501, CTONG3001560, CTONG3001605, CTONG3001746, CTONG3002020, CTONG3002127, CTONG3002370, CTONG3002412, CTONG3002433, CTONG3002518, CTONG3002552, CTONG3002588, CTONG3002674, CTONG3002728, CTONG3002909, CTONG3002947, CTONG3002983, CTONG3003165, CTONG3003179, CTONG3003483, CTONG3003553, CTONG3003598, CTONG3003652, CTONG3003654, CTONG3003669, CTONG3003737, CTONG3003905, CTONG3003972, CTONG3004072, CTONG3004317, CTONG3004397, CTONG3004550, CTONG3004576, CTONG3004607, CTONG3004712, CTONG3004726, CTONG3005325, CTONG3005648, CTONG3005713, CTONG3005803, CTONG3005813, CTONG3006067, CTONG3006073, CTONG3006186, CTONG3006629, CTONG3006650, CTONG3006659, CTONG3007244, CTONG3007444, CTONG3007528, CTONG3007586, CTONG3007870, CTONG3008223, CTONG3008252, CTONG3008258, CTONG3008457, CTONG3008496, CTONG3008566, CTONG3008639, CTONG3008831, CTONG3008951, CTONG3008959, CTONG3009028, CTONG3009227, CTONG3009287, CTONG3009328, CTONG3009385, FEHRT2000325, FEHRT2000364, FEKID1000018, FELIV1000101, FELIV1000137, FELIV1000164, FELNG2000241, HCASM1000021, HCASM1000050, HCASM1000061, HCASM1000130, HCASM2000138, HCASM2000156, HCASM2000202, HCASM2000214, HCASM2000266, HCASM2000307, HCASM2000534, HCASM2000536, HCASM2000560, HCASM2000871, HCASM2001285, HCASM2001810, HCASM2001866, HCASM2001890, HCASM2002148, HCASM2002502, HCASM2002754, HCASM2002918, HCASM2003018, HCASM2003076, HCASM2003099, HCASM2003212, HCASM2003237, HCASM2003357, HCASM2003415, HCASM2005484, HCASM2006131, HCASM2006338, HCASM2006359, HCASM2006632, HCASM2007047, HCASM2007317, HCASM2007737, HCASM2007773, HCASM2008154, HCASM2008536, HCASM2009405, HCASM2009424, HCASM2009463, HCASM2009588, HCHON1000131, HCHON1000142, HCHON1000176, HCHON1000191, HCHON2000038, HCHON2000062, HCHON2000087, HCHON2000100, HCHON2000156, HCHON2000199, HCHON2000226, HCHON2000265, HCHON2000271, HCHON2000315, HCHON2000322, HCHON2000344, HCHON2000364, HCHON2000373, HCHON2000395, HCHON2000417, HCHON2000418, HCHON2000473, HCHON2000475, HCHON2000503, HCHON2000626, HCHON2000660, HCHON2000663, HCHON2000673, HCHON2000699, HCHON2000705, HCHON2000815, HCHON2000817, HCHON2000818, HCHON2000819, HCHON2000851, HCHON2000898, HCHON2000935, HCHON2000956, HCHON2000994, HCHON2001084, HCHON2001108, HCHON2001110, HCHON2001116, HCHON2001161, HCHON2001214, HCHON2001233, HCHON2001269, HCHON2001359, HCHON2001450, HCHON2001453, HCHON2001497, HCHON2001505, HCHON2001519, HCHON2001523, HCHON2001535, HCHON2001546, HCHON2001548, HCHON2001577, HCHON2001598, HCHON2001604, HCHON2001607, HCHON2001646, HCHON2001712, HCHON2001768, HCHON2001801, HCHON2001853, HCHON2002123, HCHON2002194, HCHON2002241, HCHON2002247, HCHON2002354, HCHON2002676, HCHON2002770, HCHON2002964, HCHON2002971, HCHON2003131, HCHON2003134, HCHON2003327, HCHON2003513, HCHON2003532, HCHON2003642, HCHON2003659, HCHON2003676, HCHON2004007, HCHON2004279, HCHON2004359, HCHON2004531, HCHON2004776, HCHON2004858, HCHON2005048, HCHON2005118, HCHON2005802, HCHON2005921, HCHON2005987, HCHON2006250, HCHON2006459, HCHON2006714, HCHON2006722, HCHON2006786, HCHON2006841, HCHON2006871, HCHON2007046, HCHON2007482, HCHON2007650, HCHON2007674, HCHON2007774, HCHON2007881, HCHON2008112, HCHON2008239, HCHON2008444, HCHON2008582, HCHON2008672, HCHON2008856, HCHON2008871, HCHON2008989, HCHON2009191, HCHON2009384, HCHON2009749, HCHON2009766, HCHON2009795, HCHON2010074, HEART1000010, HEART1000074, HEART1000088, HEART1000099, HEART1000102, HEART1000118, HEART1000132, HEART1000139, HEART1000142, HEART1000151, HEART1000185, HEART2000024, HEART2000035, HEART2000099, HEART2000298, HEART2000306, HEART2000309, HEART2000411, HEART2000418, HEART2000444, HEART2000448, HEART2000492, HEART2000506, HEART2000520, HEART2000541, HEART2000568, HEART2000611, HEART2000959, HEART2001680, HEART2001756, HEART2002129, HEART2002184, HEART2002220, HEART2002432, HEART2002531, HEART2002598, HEART2002717, HEART2003027, HEART2003168, HEART2003432, HEART2003440, HEART2003781, HEART2003836, HEART2003852, HEART2004570, HEART2004764, HEART2004931, HEART2004940, HEART2004941, HEART2004980, HEART2005244, HEART2005310, HEART2005581, HEART2005610, HEART2006131, HEART2006195, HEART2006310, HEART2006334, HEART2006487, HEART2006557, HEART2006787, HEART2006789, HEART2006909, HEART2007031, HEART2007443, HEART2007696, HEART2007767, HEART2008108, HEART2008111, HEART2008257, HEART2008509, HEART2008994, HEART2009000, HEART2009599, HEART2009680, HEART2010391, HEART2010492, HEART2010495, HELAC2000158, HELAC2000301, HHDPC1000001, HHDPC1000065, HHDPC2000070, HHDPC2000102, HHDPC2000115, HHDPC2000258, HHDPC2000315, HHDPC2000456, HHDPC2000462, HHDPC2000572, HHDPC2000656, HHDPC2000692, HHDPC2001337, HHDPC2001432, HHDPC2001896, HHDPC2002963, HHDPC2003049, HHDPC2003113, HHDPC2003381, HHDPC2003472, HHDPC2004757, HHDPC2005185, HHDPC2005513, HHDPC2005742, HHDPC2005794, HHDPC2006460, HHDPC2006927, HHDPC2007302, HHDPC2007775, HHDPC2008123, HHDPC2008185, HHDPC2008279, HHDPC2008297, HHDPC2008414, HHDPC2008474, HHDPC2008816, HHDPC2008843, HHDPC2009114, HHDPC2009178, HHDPC2009208, HHDPC2009272, HLUNG1000017, HLUNG1000024, HLUNG1000030, HLUNG1000034, HLUNG1000037, HLUNG1000053, HLUNG1000064, HLUNG1000076, HLUNG1000084, HLUNG1000099, HLUNG1000104, HLUNG1000105, HLUNG1000110, HLUNG1000151, HLUNG1000169, HLUNG2000004, HLUNG2000014, HLUNG2000027, HLUNG2000068, HLUNG2000116, HLUNG2000125, HLUNG2000130, HLUNG2000142, HLUNG2000174, HLUNG2000176, HLUNG2000217, HLUNG2000255, HLUNG2000281, HLUNG2000315, HLUNG2000340, HLUNG2000362, HLUNG2000363, HLUNG2000431, HLUNG2000480, HLUNG2000489, HLUNG2000549, HLUNG2000557, HLUNG2000570, HLUNG2000751, HLUNG2000761, HLUNG2000777, HLUNG2000846, HLUNG2000870, HLUNG2000926, HLUNG2000955, HLUNG2000970, HLUNG2001013, HLUNG2001126, HLUNG2001144, HLUNG2001146, HLUNG2001214, HLUNG2001459, HLUNG2001507, HLUNG2001633, HLUNG2001677, HLUNG2001712, HLUNG2001814, HLUNG2001996, HLUNG2002006, HLUNG2002050, HLUNG2002085, HLUNG2002145, HLUNG2002295, HLUNG2002303, HLUNG2002405, HLUNG2002429, HLUNG2002465, HLUNG2002562, HLUNG2002648, HLUNG2002659, HLUNG2002707, HLUNG2002811, HLUNG2002916, HLUNG2002942, HLUNG2002949, HLUNG2002958, HLUNG2002982, HLUNG2003003, HLUNG2003042, HLUNG2003049, HLUNG2003061, HLUNG2003162, HLUNG2003246, HLUNG2003306, HLUNG2003331, HLUNG2003335, HLUNG2003378, HLUNG2003497, HLUNG2003691, HLUNG2003710, HLUNG2003714, HLUNG2003716, HLUNG2003778, HLUNG20038.33, HLUNG2003872, HLUNG2003918, HLUNG2003991, HLUNG2004014, HLUNG2004037, HLUNG2004067, HLUNG2004154, HLUNG2004170, HLUNG2004217, HLUNG2004273, HLUNG2004388, HLUNG2004416, HLUNG2004521, HLUNG2004534, HLUNG2004684, HLUNG2004707, HLUNG2004775, HLUNG2005012, HLUNG2005030, HLUNG2005045, HLUNG2005076, HLUNG2005133, HLUNG2005203, HLUNG2005479, HLUNG2005524, HLUNG2005656, HLUNG2005738, HLUNG2005774, HLUNG2005813, HLUNG2005924, HLUNG2006026, HLUNG2006067, HLUNG2006094, HLUNG2006370, HLUNG2006397, HLUNG2006570, HLUNG2006599, HLUNG2006614, HLUNG2006671, HLUNG2006781, HLUNG2006843, HLUNG2006852, HLUNG2006935, HLUNG2007041, HLUNG2007163, HLUNG2007210, HLUNG2007219, HLUNG2007245, HLUNG2007433, HLUNG2007931, HLUNG2008066, HLUNG2008139, HLUNG2008153, HLUNG2008225, HLUNG2008235, HLUNG2008247, HLUNG2008333, HLUNG2008348, HLUNG2008384, HLUNG2008396, HLUNG2008439, HLUNG2008479, HLUNG2008480, HLUNG2008521, HLUNG2008637, HLUNG2008833, HLUNG2008875, HLUNG2008958, HLUNG2008959, HLUNG2009067, HLUNG2009215, HLUNG2009253, HLUNG2009303, HLUNG2009413, HLUNG2009729, HLUNG2010181, HLUNG2010464, HLUNG2010562, HLUNG2010845, HLUNG2011041, HLUNG2011298, HLUNG2011461, HLUNG2011833, HLUNG2012049, HLUNG2012287, HLUNG2012315, HLUNG2012546, HLUNG2012600, HLUNG2012727, HLUNG2013097, HLUNG2013204, HLUNG2013304, HLUNG2013350, HLUNG2013622, HLUNG2013643, HLUNG2013784, HLUNG2013851, HLUNG2014262, HLUNG2014288, HLUNG2014449, HLUNG2014821, HLUNG2015184, HLUNG2015418, HLUNG2015548, HLUNG2015578, HLUNG2015617, HLUNG2016022, HLUNG2016862, HLUNG2017286, HLUNG2017307, HLUNG2017350, HLUNG2017546, HLUNG2017806, HLUNG2018029, HLUNG2018282, HLUNG2018626, HLUNG2019058, HSYRA1000131, HSYRA1000137, HSYRA1000148, HSYRA1000178, HSYRA2000044, HSYRA2000135, HSYRA2000137, HSYRA2000224, HSYRA2000237, HSYRA2000253, HSYRA2000255, HSYRA2000371, HSYRA2000424, HSYRA2000507, HSYRA2000510, HSYRA2000605, HSYRA2000629, HSYRA2000706, HSYRA2000760, HSYRA2000792, HSYRA2000828, HSYRA2000832, HSYRA2000925, HSYRA2000927, HSYRA2001003, HSYRA2001105, HSYRA2001142, HSYRA2001153, HSYRA2001232, HSYRA2001255, HSYRA2001332, HSYRA2001353, HSYRA2001420, HSYRA2001484, HSYRA2001552, HSYRA2001638, HSYRA2001983, HSYRA2002103, HSYRA2002590, HSYRA2002741, HSYRA2003168, HSYRA2004550, HSYRA2004858, HSYRA2005456, HSYRA2005496, HSYRA2005628, HSYRA2005970, HSYRA2006049, HSYRA2006873, HSYRA2007241, HSYRA2007338, HSYRA2007650, HSYRA2007667, HSYRA2008154, HSYRA2008714, HSYRA2009102, IMR321000155, IMR321000158, IMR321000161, IMR321000165, IMR321000207, IMR321000230, IMR321000266, IMR322000010, IMR322000072, IMR322000107, IMR322000152, IMR322000164, IMR322000178, IMR322000302, IMR322000374, IMR322000379, IMR322000383, IMR322000418, IMR322000518, IMR322000604, IMR322000609, IMR322000656, IMR322000672, IMR322000742, IMR322000775, IMR322000791, IMR322000811, IMR322000838, IMR322000859, IMR322000863, IMR322000919, IMR322000953, IMR322000984, IMR322001018, IMR322001049, IMR322001167, IMR322001185, IMR322001245, IMR322001317, IMR322001318, IMR322001322, IMR322001438, IMR322001452, IMR322001491, IMR322001534, IMR322001665, IMR322001710, IMR322001724, IMR322001879, IMR322002035, IMR322002110, IMR322002470, IMR322002993, IMR322003675, IMR322004768, IMR322005293, IMR322005833, IMR322006012, IMR322006222, IMR322006495, IMR322006520, IMR322006886, IMR322006947, IMR322007078, IMR322007225, IMR322007704, IMR322008651, IMR322009710, IMR322009807, IMR322010295, IMR322010953, IMR322011689, IMR322012314, IMR322013053, IMR322013396, IMR322013731, IMR322013805, IMR322015523, IMR322016146, IMR322017049, IMR322018117, IMR322018192, JCMLC2000273, KIDNE1000008, KIDNE1000012, KIDNE1000015, KIDNE1000028, KIDNE1000036, KIDNE1000064, KIDNE1000104, KIDNE1000121, KIDNE1000143, KIDNE1000145, KIDNE1000152, KIDNE2000026, KIDNE2000041, KIDNE2000046, KIDNE2000051, KIDNE2000070, KIDNE2000167, KIDNE2000174, KIDNE2000192, KIDNE2000227, KIDNE2000244, KIDNE2000245, KIDNE2000266, KIDNE2000287, KIDNE2000315, KIDNE2000317, KIDNE2000328, KIDNE2000330, KIDNE2000335, KIDNE2000349, KIDNE2000375, KIDNE2000383, KIDNE2000394, KIDNE2000422, KIDNE2000493, KIDNE2000497, KIDNE2000510, KIDNE2000513, KIDNE2000517, KIDNE2000519, KIDNE2000555, KIDNE2000624, KIDNE2000678, KIDNE2000717, KIDNE2000721, KIDNE2000722, KIDNE2000777, KIDNE2000801, KIDNE2000832, KIDNE2000833, KIDNE2000846, KIDNE2000867, KIDNE2000909, KIDNE2001117, KIDNE2001140, KIDNE2001269, KIDNE2001361, KIDNE2001373, KIDNE2001636, KIDNE2001802, KIDNE2001840, KIDNE2001847, KIDNE2001857, KIDNE2001873, KIDNE2001897, KIDNE2001931, KIDNE2001979, KIDNE2002015, KIDNE2002162, KIDNE2002168, KIDNE2002191, KIDNE2002198, KIDNE2002252, KIDNE2002262, KIDNE2002483, KIDNE2002725, KIDNE2002768, KIDNE2002795, KIDNE2002798, KIDNE2002839, KIDNE2002845, KIDNE2002882, KIDNE2002980, KIDNE2002991, KIDNE2003185, KIDNE2003188, KIDNE2003233, KIDNE2003305, KIDNE2003316, KIDNE2003335, KIDNE2003357, KIDNE2003377, KIDNE2003507, KIDNE2003752, KIDNE2003764, KIDNE2003837, KIDNE2003994, KIDNE2004034, KIDNE2004054, KIDNE2004084, KIDNE2004095, KIDNE2004115, KIDNE2004233, KIDNE2004262, KIDNE2004279, KIDNE2004294, KIDNE2004295, KIDNE2004344, KIDNE2004394, KIDNE2004411, KIDNE2004519, KIDNE2004520, KIDNE2004531, KIDNE2004534, KIDNE2004562, KIDNE2004579, KIDNE2004681, KIDNE2004828, KIDNE2004864, KIDNE2004879, KIDNE2004981, KIDNE2004985, KIDNE2004999, KIDNE2005038, KIDNE2005042, KIDNE2005062, KIDNE2005266, KIDNE2005296, KIDNE2005321, KIDNE2005327, KIDNE2005400, KIDNE2005424, KIDNE2005477, KIDNE2005526, KIDNE2005543, KIDNE2005603, KIDNE2005629, KIDNE2005781, KIDNE2005798, KIDNE2005854, KIDNE2005908, KIDNE2005937, KIDNE2006009, KIDNE2006030, KIDNE2006039, KIDNE2006053, KIDNE2006062, KIDNE2006092, KIDNE2006145, KIDNE2006149, KIDNE2006210, KIDNE2006299, KIDNE2006334, KIDNE2006353, KIDNE2006376, KIDNE2006378, KIDNE2006580, KIDNE2006652, KIDNE2006687, KIDNE2006733, KIDNE2006760, KIDNE2006775, KIDNE2006820, KIDNE2007005, KIDNE2007040, KIDNE2007077, KIDNE2007186, KIDNE2007222, KIDNE2007328, KIDNE2007356, KIDNE2007422, KIDNE2007569, KIDNE2007810, KIDNE2007811, KIDNE2007910, KIDNE2007944, KIDNE2007954, KIDNE2008022, KIDNE2008048, KIDNE2008069, KIDNE2008072, KIDNE2008116, KIDNE2008117, KIDNE2008218, KIDNE2008315, KIDNE2008362, KIDNE2008378, KIDNE2008446, KIDNE2008473, KIDNE2008480, KIDNE2008649, KIDNE2008666, KIDNE2008697, KIDNE2008758, KIDNE2008788, KIDNE2008795, KIDNE2008824, KIDNE2008832, KIDNE2008869, KIDNE2008914, KIDNE2008975, KIDNE2008987, KIDNE2009019, KIDNE2009109, KIDNE2009180, KIDNE2009191, KIDNE2009332, KIDNE2009426, KIDNE2009467, KIDNE2009490, KIDNE2009553, KIDNE2009605, KIDNE2009628, KIDNE2009647, KIDNE2009676, KIDNE2009723, KIDNE2010007, KIDNE2010049, KIDNE2010052, KIDNE2010084, KIDNE2010137, KIDNE2010151, KIDNE2010264, KIDNE2010271, KIDNE2010419, KIDNE2010430, KIDNE2010574, KIDNE2010674, KIDNE2010739, KIDNE2010750, KIDNE2010762, KIDNE2010863, KIDNE2010973, KIDNE2010989, KIDNE2011200, KIDNE2011314, KIDNE2011508, KIDNE2011532, KIDNE2011635, KIDNE2011752, KIDNE2011782, KIDNE2011858, KIDNE2012009, KIDNE2012025, KIDNE2012188, KIDNE2012291, KIDNE2012316, KIDNE2012361, KIDNE2012440, KIDNE2012453, KIDNE2012563, KIDNE2012601, KIDNE2012613, KIDNE2012710, KIDNE2012745, KIDNE2012775, KIDNE2012784, KIDNE2012945, KIDNE2013045, KIDNE2013095, KIDNE2013158, KIDNE2013218, KIDNE2013263, KIDNE2013346, KIDNE2013388, KIDNE2013489, KIDNE2013639, KIDNE2013731, KIDNE2013734, KIDNE2013775, KIDNE2013801, KIDNE2013866, KIDNE2014087, KIDNE2014112, KIDNE2014119, KIDNE2014170, KIDNE2014184, KIDNE2014268, KIDNE2014298, KIDNE2014320, KIDNE2014325, KIDNE2014415, KIDNE2014489, KIDNE2014496, KIDNE2014661, KIDNE2014717, KIDNE2014789, KIDNE2014808, KIDNE2014890, KIDNE2014978, KIDNE2015073, KIDNE2015221, KIDNE2015244, KIDNE2015313, KIDNE2015433, KIDNE2015483, KIDNE2015515, KIDNE2015546, KIDNE2015556, KIDNE2015598, KIDNE2015660, KIDNE2015710, KIDNE2015987, KIDNE2016000, KIDNE2016036, KIDNE2016096, KIDNE2016101, KIDNE2016142, KIDNE2016188, KIDNE2016327, KIDNE2016371, KIDNE2016388, KIDNE2016464, KIDNE2016539, KIDNE2016570, KIDNE2016918, KIDNE2017007, KIDNE2017040, KIDNE2017052, KIDNE2017151, KIDNE2017153, KIDNE2017315, KIDNE2017332, KIDNE2017343, KIDNE2017454, KIDNE2017603, KIDNE2017956, KIDNE2018071, KIDNE2018166, KIDNE2018167, KIDNE2018217, KIDNE2018254, KIDNE2018268, KIDNE2018269, KIDNE2018287, KIDNE2018294, KIDNE2018462, KIDNE2018617, KIDNE2018678, KIDNE2018727, KIDNE2018863, KIDNE2018891, KIDNE2018989, KIDNE2018996, KIDNE2019074, KIDNE2019187, LIVER1000017, LIVER1000050, LIVER1000055, LIVER1000058, LIVER1000063, LIVER1000067, LIVER1000073, LIVER1000079, LIVER1000082, LIVER1000099, LIVER1000104, LIVER1000111, LIVER1000126, LIVER1000139, LIVER1000155, LIVER1000165, LIVER1000175, LIVER1000224, LIVER1000278, LIVER1000303, LIVER1000397, LIVER1000421, LIVER1000433, LIVER1000479, LIVER1000482, LIVER1000542, LIVER2000003, LIVER2000033, LIVER2000037, LIVER2000158, LIVER2000216, LIVER2000237, LIVER2000247, LIVER2000360, LIVER2000446, LIVER2000515, LIVER2000592, LIVER2000626, LIVER2000682, LIVER2000769, LIVER2000775, LIVER2001051, LIVER2001076, LIVER2001099, LIVER2001113, LIVER2001164, LIVER2001191, LIVER2001265, LIVER2001329, LIVER2001389, LIVER2001461, LIVER2001608, LIVER2001835, LIVER2002638, LIVER2002644, LIVER2002660, LIVER2002702, LIVER2003008, LIVER2003065, LIVER2003234, LIVER2003511, LIVER2003524, LIVER2003568, LIVER2003581, LIVER2003800, LIVER2003854, LIVER2004074, LIVER2004392, LIVER2004514, LIVER2004565, LIVER2005028, LIVER2005198, LIVER2005218, LIVER2005376, LIVER2005385, LIVER2005512, LIVER2005520, LIVER2005527, LIVER2005544, LIVER2005625, LIVER2005728, LIVER2005789, LIVER2005973, LIVER2005981, LIVER2006251, LIVER2006410, LIVER2006469, LIVER2006644, LIVER2006764, LIVER2007415, LIVER2007548, LIVER2007568, LIVER2007721, LIVER2007783, LIVER2008053, LIVER2008465, LIVER2008473, LIVER2008580, LIVER2008706, LIVER2008751, LIVER2008945, LIVER2008998, LIVER2009110, LIVER2009118, LIVER2009554, LYMPB1000141, LYMPB1000158, LYMPB2000083, MAMGL1000017, MAMGL1000083, MAMGL1000096, MAMGL1000100, MAMGL1000132, MAMGL1000151, MAMGL1000173, MAMGL1000178, MAMGL1000182, MAMGL1000184, MESAN1000032, MESAN1000035, MESAN1000079, MESAN1000080, MESAN1000121, MESAN1000126, MESAN1000147, MESAN1000180, MESAN2000023, MESAN2000026, MESAN2000167, MESAN2000264, MESAN2000291, MESAN2000337, MESAN2000434, MESAN2000457, MESAN2000462, MESAN2000501, MESAN2000608, MESAN2000620, MESAN2000711, MESAN2000815, MESAN2000894, MESAN2000909, MESAN2001154, MESAN2001627, MESAN2001770, MESAN2001979, MESAN2001980, MESAN2002113, MESAN2002122, MESAN2002147, MESAN2002424, MESAN2002687, MESAN2002709, MESAN2002940, MESAN2002978, MESAN2003037, MESAN2003039, MESAN2003058, MESAN2003101, MESAN2003190, MESAN2003322, MESAN2003444, MESAN2003490, MESAN2003529, MESAN2003646, MESAN2003662, MESAN2003709, MESAN2003851, MESAN2004138, MESAN2005284, MESAN2005303, MESAN2005371, MESAN2005633, MESAN2005724, MESAN2005808, MESAN2005811, MESAN2005957, MESAN2005958, MESAN2006022, MESAN2006043, MESAN2006328, MESAN2006580, MESAN2006599, MESAN2006743, MESAN2006953, MESAN2007032, MESAN2007440, MESAN2007597, MESAN2008222, MESAN2008334, MESAN2008415, MESAN2008460, MESAN2008536, MESAN2008679, MESAN2008729, MESAN2008821, MESAN2009019, MESAN2009105, MESAN2009311, MESAN2009418, MESAN2009503, MESAN2009522, MESAN2009580, MESAN2010031, MESAN2010114, MESAN2010312, MESAN2010321, MESAN2010664, MESAN2010681, MESAN2011545, MESAN2011597, MESAN2011632, MESAN2011977, MESAN2012113, MESAN2012586, MESAN2012708, MESAN2012735, MESAN2013019, MESAN2013022, MESAN2013183, MESAN2013211, MESAN2013283, MESAN2013611, MESAN2013674, MESAN2013845, MESAN2013908, MESAN2013936, MESAN2014192, MESAN2014295, MESAN2014298, MESAN2014412, MESAN2014624, MESAN2015277, MESAN2015365, MESAN2015391, MESAN2015401, MESAN2015501, MESAN2015515, MESAN2015708, MESAN2016159, MESAN2016304, MESAN2016409, MESAN2016552, MESAN2016965, MESAN2017133, MESAN2017152, MESAN2017373, MESAN2017417, MESAN2018209, MESAN2018576, MESAN2018670, MESAN2018699, MESTC1000042, MESTC1000147, MESTC2000150, MESTC2000153, MESTC2000170, N1ESE2000698, NB9N41000047, NB9N41000121, NB9N41000135, NB9N41000142, NB9N41000146, NB9N41000340, NB9N42000122, NB9N42000196, NB9N42000314, NB9N42000342, NB9N42000430, NB9N42000495, NB9N42001300, NCRRP1000129, NESOP1000010, NESOP1000087, NESOP1000108, NESOP2000231, NESOP2000452, NESOP2000499, NESOP2000504, NESOP2000744, NESOP2001144, NESOP2001433, NESOP2001656, NESOP2001694, NESOP2001752, NESOP2002352, NESOP2002418, NESOP2002487, NESOP2002738, NESOP2002780, NETRP1000034, NETRP1000082, NETRP2000086, NETRP2000182, NETRP2000439, NHNPC1000034, NHNPC1000037, NHNPC1000084, NHNPC1000101, NHNPC1000124, NHNPC2000062, NHNPC2000606, NHNPC2000877, NHNPC2001108, NHNPC2001312, NHNPC2001816, NHNPC2002565, NHNPC2002749, NOVAR1000015, NOVAR1000091, NOVAR1000102, NOVAR2000038, NOVAR2000136, NOVAR2000352, NOVAR2000412, NOVAR2000710, NOVAR2000783, NOVAR2000962, NOVAR2001108, NOVAR2001620, NOVAR2001783, NOVAR2001876, NOVAR2002039, NT2NE1000004, NT2NE1000014, NT2NE1000023, NT2NE1000059, NT2NE1000063, NT2NE1000083, NT2NE1000120, NT2NE1000122, NT2NE1000175, NT2NE1000181, NT2NE1000185, NT2NE2000038, NT2NE2000054, NT2NE2000057, NT2NE2000064, NT2NE2000109, NT2NE2000137, NT2NE2000156, NT2NE2000174, NT2NE2000195, NT2NE2000222, NT2NE2000259, NT2NE2000284, NT2NE2000299, NT2NE2000356, NT2NE2000369, NT2NE2000374, NT2NE2000384, NT2NE2000390, NT2NE2000455, NT2NE2000488, NT2NE2000517, NT2NE2000536, NT2NE2000546, NT2NE2000548, NT2NE2000550, NT2NE2000586, NT2NE2000612, NT2NE2000636, NT2NE2000658, NT2NE2000706, NT2NE2000802, NT2NE2000808, NT2NE2000864, NT2NE2000913, NT2NE2000950, NT2NE2000951, NT2NE2000963, NT2NE2000980, NT2NE2001005, NT2NE2001021, NT2NE2001040, NT2NE2001049, NT2NE2001142, NT2NE2001156, NT2NE2001180, NT2NE2001181, NT2NE2001188, NT2NE2001191, NT2NE2001247, NT2NE2001252, NT2NE2001324, NT2NE2001326, NT2NE2001364, NT2NE2001372, NT2NE2001397, NT2NE2001403, NT2NE2001428, NT2NE2001432, NT2NE2001524, NT2NE2001598, NT2NE2001623, NT2NE2001626, NT2NE2001634, NT2NE2001648, NT2NE2001655, NT2NE2001660, NT2NE2001666, NT2NE2001677, NT2NE2001697, NT2NE2001698, NT2NE2001723, NT2NE2001725, NT2NE2001874, NT2NE2001889, NT2NE2001923, NT2NE2002100, NT2NE2002162, NT2NE2002186, NT2NE2002285, NT2NE2002311, NT2NE2002620, NT2NE2002651, NT2NE2002732, NT2NE2002768, NT2NE2002791, NT2NE2002856, NT2NE2002870, NT2NE2003150, NT2NE2003252, NT2NE2003308, NT2NE2003309, NT2NE2003315, NT2NE2003408, NT2NE2003457, NT2NE2003540, NT2NE2003571, NT2NE2003705, NT2NE2003752, NT2NE2003887, NT2NE2003921, NT2NE2004378, NT2NE2004490, NT2NE2004606, NT2NE2004716, NT2NE2004740, NT2NE2004787, NT2NE2004916, NT2NE2005035, NT2NE2005223, NT2NE2005276, NT2NE2005317, NT2NE2005323, NT2NE2005358, NT2NE2005419, NT2NE2005441, NT2NE2005517, NT2NE2005537, NT2NE2005555, NT2NE2005588, NT2NE2005676, NT2NE2005720, NT2NE2005784, NT2NE2005804, NT2NE2005821, NT2NE2005890, NT2NE2005921, NT2NE2005968, NT2NE2006075, NT2NE2006217, NT2NE2006288, NT2NE2006382, NT2NE2006387, NT2NE2006427, NT2NE2006432, NT2NE2006478, NT2NE2006531, NT2NE2006659, NT2NE2006784, NT2NE2006813, NT2NE2006894, NT2NE2006942, NT2NE2007052, NT2NE2007220, NT2NE2007425, NT2NE2007725, NT2NE2007727, NT2NE2007786, NT2NE2007877, NT2NE2007967, NT2NE2008017, NT2NE2008060, NT2NE2008077, NT2NE2008260, NT2NE2008378, NT2NE2008607, NT2NE2008639, NT2NE2008727, NT2NE2008783, NT2NE2008785, NT2NE2008803, NT2NE2008867, NT2NE2008961, NT2NE2008997, NT2NE2009138, NT2NE2009426, NT2NE2009523, NT2NE2009608, NT2NE2009691, NT2NE2010105, NT2NE2010150, NT2NE2010400, NT2NE2010632, NT2NE2010633, NT2NE2010654, NT2NE2010688, NT2NE2010781, NT2NE2010854, NT2NE2011036, NT2NE2011107, NT2NE2011119, NT2NE2011154, NT2NE2011221, NT2NE2011411, NT2NE2011485, NT2NE2011650, NT2NE2011684, NT2NE2011687, NT2NE2011691, NT2NE2011758, NT2NE2011823, NT2NE2011896, NT2NE2011998, NT2NE2012113, NT2NE2012199, NT2NE2012243, NT2NE2012361, NT2NE2012448, NT2NE2012457, NT2NE2012493, NT2NE2012505, NT2NE2012533, NT2NE2012603, NT2NE2012747, NT2NE2012790, NT2NE2012847, NT2NE2012928, NT2NE2013019, NT2NE2013081, NT2NE2013189, NT2NE2013217, NT2NE2013547, NT2NE2014013, NT2NE2014028, NT2NE2014176, NT2NE2014221, NT2NE2014525, NT2NE2014650, NT2NE2014651, NT2NE2014681, NT2NE2014758, NT2NE2014869, NT2NE2014950, NT2NE2015061, NT2NE2015262, NT2NE2015275, NT2NE2015362, NT2NE2015480, NT2NE2015511, NT2NE2015565, NT2NE2015626, NT2NE2015747, NT2NE2015860, NT2NE2015885, NT2NE2015904, NT2NE2015974, NT2NE2016041, NT2NE2016387, NT2NE2016419, NT2NE2016519, NT2NE2016608, NT2NE2016766, NT2NE2016774, NT2NE2016971, NT2NE2017259, NT2NE2017332, NT2NE2017397, NT2NE2017480, NT2NE2017492, NT2NE2017508, NT2NE2017562, NT2NE2017590, NT2NE2017612, NT2NE2017721, NT2NE2017752, NT2NE2017792, NT2NE2017982, NT2NE2018165, NT2NE2018176, NT2NE2018180, NT2NE2018273, NT2NE2018376, NT2NE2018472, NT2NE2018490, NT2NE2018594, NT2NE2018739, NT2NE2018916, NT2NE2019056, NT2NE2019076, NT2NE2019099, NT2RI1000016, NT2RI1000027, NT2RI1000035, NT2RI1000164, NT2RI1000172, NT2RI2000004, NT2RI2000007, NT2RI2000107, NT2RI2000117, NT2RI2000128, NT2RI2000167, NT2RI2000173, NT2RI2000187, NT2RI2000263, NT2RI2000270, NT2RI2000276, NT2RI2000284, NT2RI2000313, NT2RI2000341, NT2RI2000421, NT2RI2000480, NT2RI2000575, NT2RI2000588, NT2RI2000597, NT2RI2000669, NT2RI2000671, NT2RI2000688, NT2RI2000689, NT2RI2000704, NT2RI2000738, NT2RI2000775, NT2RI2000822, NT2RI2000841, NT2RI2000865, NT2RI2000932, NT2RI2000974, NT2RI2000987, NT2RI2001010, NT2RI2001017, NT2RI2001030, NT2RI2001083, NT2RI2001167, NT2RI2001178, NT2RI2001230, NT2RI2001235, NT2RI2001244, NT2RI2001307, NT2RI2001409, NT2RI2001410, NT2RI2001425, NT2RI2001449, NT2RI2001474, NT2RI2001519, NT2RI2001595, NT2RI2001624, NT2RI2001726, NT2RI2001769, NT2RI2001782, NT2RI2001836, NT2RI2001846, NT2RI2001866, NT2RI2001910, NT2RI2002022, NT2RI2002041, NT2RI2002120, NT2RI2002153, NT2RI2002179, NT2RI2002243, NT2RI2002252, NT2RI2002260, NT2RI2002266, NT2RI2002270, NT2RI2002334, NT2RI2002359, NT2RI2002447, NT2RI2002481, NT2RI2002507, NT2RI2002517, NT2RI2002530, NT2RI2002549, NT2RI2002564, NT2RI2002585, NT2RI2002592, NT2RI2002602, NT2RI2002729, NT2RI2002802, NT2RI2002822, NT2RI2002852, NT2RI2002865, NT2RI2002923, NT2RI2002926, NT2RI2002970, NT2RI2003011, NT2RI2003067, NT2RI2003184, NT2RI2003205, NT2RI2003222, NT2RI2003338, NT2RI2003344, NT2RI2003360, NT2RI2003392, NT2RI2003399, NT2RI2003419, NT2RI2003481, NT2RI2003487, NT2RI2003655, NT2RI2003667, NT2RI2003678, NT2RI2003884, NT2RI2004059, NT2RI2004078, NT2RI2004079, NT2RI2004093, NT2RI2004136, NT2RI2004157, NT2RI2004188, NT2RI2004190, NT2RI2004284, NT2RI2004290, NT2RI2004304, NT2RI2004312, NT2RI2004381, NT2RI2004442, NT2RI2004468, NT2RI2004535, NT2RI2004606, NT2RI2004608, NT2RI2004618, NT2RI2004783, NT2RI2004818, NT2RI2004840, NT2RI2004916, NT2RI2004962, NT2RI2004984, NT2RI2004985, NT2RI2005048, NT2RI2005061, NT2RI2005069, NT2RI2005087, NT2RI2005096, NT2RI2005115, NT2RI2005130, NT2RI2005166, NT2RI2005239, NT2RI2005246, NT2RI2005315, NT2RI2005358, NT2RI2005382, NT2RI2005473, NT2RI2005520, NT2RI2005621, NT2RI2005628, NT2RI2005647, NT2RI2005670, NT2RI2005710, NT2RI2005772, NT2RI2005814, NT2RI2005851, NT2RI2005966, NT2RI2006070, NT2RI2006071, NT2RI2006081, NT2RI2006126, NT2RI2006127, NT2RI2006257, NT2RI2006271, NT2RI2006294, NT2RI2006345, NT2RI2006403, NT2RI2006445, NT2RI2006487, NT2RI2006553, NT2RI2006565, NT2RI2006640, NT2RI2006659, NT2RI2006662, NT2RI2006667, NT2RI2006679, NT2RI2006682, NT2RI2006686, NT2RI2006703, NT2RI2006716, NT2RI2006735, NT2RI2006762, NT2RI2006788, NT2RI2006838, NT2RI2006853, NT2RI2006855, NT2RI2006973, NT2RI2007046, NT2RI2007048, NT2RI2007084, NT2RI2007096, NT2RI2007116, NT2RI2007148, NT2RI2007214, NT2RI2007303, NT2RI2007334, NT2RI2007386, NT2RI2007406, NT2RI2007439, NT2RI2007445, NT2RI2007469, NT2RI2007498, NT2RI2007507, NT2RI2007593, NT2RI2007729, NT2RI2007751, NT2RI2007754, NT2RI2007827, NT2RI2007853, NT2RI2007877, NT2RI2007879, NT2RI2007891, NT2RI2007956, NT2RI2007965, NT2RI2008007, NT2RI2008050, NT2RI2008141, NT2RI2008188, NT2RI2008204, NT2RI2008233, NT2RI2008455, NT2RI2008481, NT2RI2008502, NT2RI2008598, NT2RI2008622, NT2RI2008656, NT2RI2008714, NT2RI2008801, NT2RI2008812, NT2RI2008841, NT2RI2008952, NT2RI2009005, NT2RI2009066, NT2RI2009083, NT2RI2009101, NT2RI2009103, NT2RI2009144, NT2RI2009151, NT2RI2009215, NT2RI2009289, NT2RI2009301, NT2RI2009517, NT2RI2009583, NT2RI2009585, NT2RI2009595, NT2RI2009855, NT2RI2010283, NT2RI2010508, NT2RI2010795, NT2RI2011422, NT2RI2011450, NT2RI2011683, NT2RI2011803, NT2RI2012659, NT2RI2012726, NT2RI2012990, NT2RI2013345, NT2RI2013357, NT2RI2013373, NT2RI2014247, NT2RI2014551, NT2RI2014683, NT2RI2014733, NT2RI2015239, NT2RI2016128, NT2RI2016134, NT2RI2018311, NT2RI2018363, NT2RI2018448, NT2RI2018883, NT2RI2018950, NT2RI2019751, NT2RI2019826, NT2RI2020390, NT2RI2020703, NT2RI2021463, NT2RI2021625, NT2RI2022468, NT2RI2022584, NT2RI2023303, NT2RI2023671, NT2RI2024008, NT2RI2024313, NT2RI2024460, NT2RI2024496, NT2RI2024935, NT2RI2025075, NT2RI2025255, NT2RI2025564, NT2RI2025565, NT2RI2025909, NT2RI2025957, NT2RI2025976, NT2RI2026758, NT2RI2027081, NT2RI2027157, NT2RI2027224, NT2RI2027323, NT2RI2027396, NT2RI2027484, NT2RI2027975, NT2RI2028213, NT2RI2028222, NT2RI2028537, NT2RI2028642, NT2RI3000174, NT2RI3000213, NT2RI3000423, NT2RI3001132, NT2RI3001263, NT2RI3001279, NT2RI3001348, NT2RI3001445, NT2RI3001458, NT2RI3001515, NT2RI3001573, NT2RI3001967, NT2RI3002303, NT2RI3002557, NT2RI3002842, NT2RI3003027, NT2RI3003031, NT2RI3003095, NT2RI3003104, NT2RI3003162, NT2RI3003362, NT2RI3003382, NT2RI3003409, NT2RI3003738, NT2RI3003925, NT2RI3004133, NT2RI3004381, NT2RI3004510, NT2RI3005202, NT2RI3005403, NT2RI3005416, NT2RI3005724, NT2RI3005861, NT2RI3005923, NT2RI3005928, NT2RI3006132, NT2RI3006171, NT2RI3006284, NT2RI3006340, NT2RI3006376, NT2RI3006666, NT2RI3006673, NT2RI3006796, NT2RI3007065, NT2RI3007095, NT2RI3007158, NT2RI3007167, NT2RI3007213, NT2RI3007291, NT2RI3007443, NT2RI3007543, NT2RI3007684, NT2RI3007757, NT2RI3007878, NT2RI3007978, NT2RI3008055, NT2RI3008162, NT2RI3008179, NT2RI3008228, NT2RI3008442, NT2RI3008652, NT2RI3008697, NT2RI3008974, NT2RI3009158, NT2RI3009480, NT2RI3009524, NT2RP6000005, NT2RP6000008, NT2RP6000032, NT2RP6000033, NT2RP6000039, NT2RP6000043, NT2RP6000059, NT2RP6000060, NT2RP6000077, NT2RP6000085, NT2RP6000086, NT2RP6000100, NT2RP6000119, NT2RP6000127, NT2RP6000130, NT2RP6000140, NT2RP6000150, NT2RP7000041, NT2RP7000069, NT2RP7000086, NT2RP7000109, NT2RP7000112, NT2RP7000259, NT2RP7000311, NT2RP7000359, NT2RP7000364, NT2RP7000380, NT2RP7000391, NT2RP7000579, NT2RP7000586, NT2RP7000600, NT2RP7000812, NT2RP7000926, NT2RP7001074, NT2RP7001080, NT2RP7001156, NT2RP7001306, NT2RP7001319, NT2RP7001335, NT2RP7001364, NT2RP7001475, NT2RP7001532, NT2RP7001602, NT2RP7001678, NT2RP7001856, NT2RP7001962, NT2RP7002064, NT2RP7002151, NT2RP7002163, NT2RP7002243, NT2RP7002282, NT2RP7002376, NT2RP7002449, NT2RP7002450, NT2RP7002478, NT2RP7002554, NT2RP7002594, NT2RP7002603, NT2RP7002619, NT2RP7002650, NT2RP7002779, NT2RP7002829, NT2RP7002841, NT2RP7002906, NT2RP7002978, NT2RP7002982, NT2RP7003025, NT2RP7003050, NT2RP7003055, NT2RP7003084, NT2RP7003091, NT2RP7003107, NT2RP7003134, NT2RP7003148, NT2RP7003439, NT2RP7003629, NT2RP7003632, NT2RP7003647, NT2RP7003680, NT2RP7004027, NT2RP7004080, NT2RP7004114, NT2RP7004233, NT2RP7004260, NT2RP7004358, NT2RP7004396, NT2RP7004428, NT2RP7004541, NT2RP7004559, NT2RP7004641, NT2RP7004656, NT2RP7004687, NT2RP7004722, NT2RP7004766, NT2RP7004790, NT2RP7004911, NT2RP7004915, NT2RP7004961, NT2RP7004964, NT2RP7004975, NT2RP7005118, NT2RP7005205, NT2RP7005219, NT2RP7005323, NT2RP7005468, NT2RP7005493, NT2RP7005529, NT2RP7005629, NT2RP7005631, NT2RP7005669, NT2RP7005675, NT2RP7005750, NT2RP7005846, NT2RP7006033, NT2RP7006075, NT2RP7006141, NT2RP7006160, NT2RP7006162, NT2RP7006263, NT2RP7006296, NT2RP7006304, NT2RP7006374, NT2RP7006395, NT2RP7006408, NT2RP7006457, NT2RP7006490, NT2RP7006539, NT2RP7006547, NT2RP7006601, NT2RP7006621, NT2RP7006636, NT2RP7006701, NT2RP7006853, NT2RP7006886, NT2RP7006887, NT2RP7006980, NT2RP7006995, NT2RP7007154, NT2RP7007177, NT2RP7007221, NT2RP7007226, NT2RP7007252, NT2RP7007310, NT2RP7007359, NT2RP7007381, NT2RP7007406, NT2RP7007480, NT2RP7007504, NT2RP7007537, NT2RP7007580, NT2RP7007594, NT2RP7007610, NT2RP7007617, NT2RP7007643, NT2RP7007766, NT2RP7007925, NT2RP7007930, NT2RP7007975, NT2RP7008013, NT2RP7008133, NT2RP7008137, NT2RP7008142, NT2RP7008144, NT2RP7008161, NT2RP7008315, NT2RP7008360, NT2RP7008396, NT2RP7008406, NT2RP7008435, NT2RP7008454, NT2RP7008487, NT2RP7008543, NT2RP7008544, NT2RP7008550, NT2RP7008557, NT2RP7008623, NT2RP7008657, NT2RP7008720, NT2RP7008855, NT2RP7008863, NT2RP7009012, NT2RP7009019, NT2RP7009147, NT2RP7009149, NT2RP7009168, NT2RP7009215, NT2RP7009236, NT2RP7009253, NT2RP7009267, NT2RP7009322, NT2RP7009363, NT2RP7009370, NT2RP7009373, NT2RP7009397, NT2RP7009429, NT2RP7009439, NT2RP7009466, NT2RP7009502, NT2RP7009507, NT2RP7009743, NT2RP7009867, NT2RP7010109, NT2RP7010128, NT2RP7010235, NT2RP7010275, NT2RP7010521, NT2RP7010599, NT2RP7010612, NT2RP7010817, NT2RP7011086, NT2RP7011132, NT2RP7011268, NT2RP7011452, NT2RP7011570, NT2RP7011721, NT2RP7011909, NT2RP7012291, NT2RP7012516, NT2RP7012776, NT2RP7013002, NT2RP7013374, NT2RP7013499, NT2RP7013573, NT2RP7013729, NT2RP7013795, NT2RP7013999, NT2RP7014005, NT2RP7014178, NT2RP7014348, NT2RP7014420, NT2RP7014583, NT2RP7014721, NT2RP7014743, NT2RP7014778, NT2RP7014906, NT2RP7014910, NT2RP7015080, NT2RP7015431, NT2RP7015503, NT2RP7015676, NT2RP7015789, NT2RP7015996, NT2RP7016508, NT2RP7016574, NT2RP7016622, NT2RP7016911, NT2RP7017139, NT2RP7017284, NT2RP7017365, NT2RP7017474, NT2RP7017546, NT2RP7017567, NT2RP7017795, NT2RP7017971, NT2RP7018032, NT2RP7018126, NT2RP7018197, NT2RP7018206, NT2RP7018340, NT2RP7018586, NT2RP7018802, NT2RP7018871, NT2RP7019064, NT2RP7019135, NT2RP7019273, NT2RP7019367, NT2RP7019445, NT2RP7019543, NT2RP7019682, NT2RP7019835, NT2RP7020112, NT2RP7020123, NT2RP7020343, NT2RP7020379, NT2RP8000137, NT2RP8000296, NT2RP8000435, NT2RP8000483, NT2RP8000521, NT2RP8000633, NT2RP8001363, NT2RP8001407, NT2RP8001584, NT2RP8001605, NT2RP8003490, NT2RP8003657, NT2RP8003787, NT2RP8004306, NT2RP8005546, NT2RP8006452, NT2RP8006521, NT2RP8007416, NT2RP8007503, NT2RP8007715, NT2RP8008057, NT2RP8009248, NTONG1000006, NTONG1000047, NTONG1000052, NTONG1000075, NTONG1000087, NTONG1000123, NTONG1000130, NTONG1000161, NTONG1000172, NTONG1000182, NTONG1000213, NTONG1000214, NTONG1000246, NTONG1000247, NTONG1000257, NTONG2000040, NTONG2000107, NTONG2000231, NTONG2000363, NTONG2000413, NTONG2000492, NTONG2000499, NTONG2000531, NTONG2000583, NTONG2000800, NTONG2000858, NTONG2000876, NTONG2000966, NTONG2001014, NTONG2001079, NTONG2001137, NTONG2001157, NTONG2001173, NTONG2001220, NTONG2001222, NTONG2001362, NTONG2001428, NTONG2001532, NTONG2001567, NTONG2001587, NTONG2001619, NTONG2001642, NTONG2001657, NTONG2001676, NTONG2002278, NTONG2002582, NTONG2002807, NTONG2002948, NTONG2002970, NTONG2002985, NTONG2003158, NTONG2003210, NTONG2003316, NTONG2003409, NTONG2003454, NTONG2003515, NTONG2003805, NTONG2003839, NTONG2003852, NTONG2003897, NTONG2003928, NTONG2004095, NTONG2004308, NTONG2004521, NTONG2004614, NTONG2004690, NTONG2004806, NTONG2004829, NTONG2004844, NTONG2004991, NTONG2005062, NTONG2005086, NTONG2005137, NTONG2005153, NTONG2005265, NTONG2005277, NTONG2005363, NTONG2005373, NTONG2005391, NTONG2005480, NTONG2005497, NTONG2005577, NTONG2005657, NTONG2005801, NTONG2005822, NTONG2006099, NTONG2006187, NTONG2006301, NTONG2006324, NTONG2006354, NTONG2006440, NTONG2006484, NTONG2006501, NTONG2006646, NTONG2006783, NTONG2007020, NTONG2007028, NTONG2007034, NTONG2007249, NTONG2007517, NTONG2007522, NTONG2007658, NTONG2007693, NTONG2007756, NTONG2008088, NTONG2008093, NTONG2008143, NTONG2008365, NTONG2008522, NTONG2008672, NTONG2008862, NTONG2008939, NTONG2008944, NTONG2009060, NTONG2009068, NTONG2009229, NTONG2009233, NTONG2009468, NTONG2009576, OCBBF1000016, OCBBF1000030, OCBBF1000042, OCBBF1000054, OCBBF1000085, OCBBF1000086, OCBBF1000091, OCBBF1000118, OCBBF1000119, OCBBF1000122, OCBBF1000130, OCBBF1000138, OCBBF1000145, OCBBF1000175, OCBBF1000192, OCBBF1000254, OCBBF1000315, OCBBF2000231, OCBBF2000287, OCBBF2000452, OCBBF2000522, OCBBF2000677, OCBBF2000703, OCBBF2000712, OCBBF2000719, OCBBF2000824, OCBBF2000982, OCBBF2000998, OCBBF2001075, OCBBF2001101, OCBBF2001124, OCBBF2001140, OCBBF2001176, OCBBF2001186, OCBBF2001196, OCBBF2001307, OCBBF2001389, OCBBF2001408, OCBBF2001416, OCBBF2001473, OCBBF2001494, OCBBF2001527, OCBBF2001528, OCBBF2001586, OCBBF2001681, OCBBF2001706, OCBBF2001910, OCBBF2001931, OCBBF2001961, OCBBF2001983, OCBBF2002015, OCBBF2002083, OCBBF2002086, OCBBF2002124, OCBBF2002161, OCBBF2002357, OCBBF2002615, OCBBF2002805, OCBBF2002865, OCBBF2002920, OCBBF2002980, OCBBF2003028, OCBBF2003091, OCBBF2003327, OCBBF2003543, OCBBF2003593, OCBBF2003744, OCBBF2003819, OCBBF2004147, OCBBF2004168, OCBBF2004235, OCBBF2004259, OCBBF2004385, OCBBF2004418, OCBBF2004478, OCBBF2004482, OCBBF2004533, OCBBF2004567, OCBBF2004612, OCBBF2004647, OCBBF2004669, OCBBF2004826, OCBBF2004866, OCBBF2004883, OCBBF2004889, OCBBF2005066, OCBBF2005077, OCBBF2005161, OCBBF2005343, OCBBF2005349, OCBBF2005373, OCBBF2005420, OCBBF2005433, OCBBF2005476, OCBBF2005546, OCBBF2005843, OCBBF2005901, OCBBF2006005, OCBBF2006030, OCBBF2006058, OCBBF2006148, OCBBF2006151, OCBBF2006154, OCBBF2006214, OCBBF2006241, OCBBF2006388, OCBBF2006438, OCBBF2006567, OCBBF2006624, OCBBF2006639, OCBBF2006660, OCBBF2006972, OCBBF2006987, OCBBF2007039, OCBBF2007051, OCBBF2007068, OCBBF2007114, OCBBF2007121, OCBBF2007184, OCBBF2007194, OCBBF2007224, OCBBF2007238, OCBBF2007354, OCBBF2007414, OCBBF2007428, OCBBF2007478, OCBBF2007485, OCBBF2007520, OCBBF2007555, OCBBF2007610, OCBBF2007622, OCBBF2007756, OCBBF2007931, OCBBF2007946, OCBBF2008116, OCBBF2008138, OCBBF2008144, OCBBF2008283, OCBBF2008330, OCBBF2008366, OCBBF2008483, OCBBF2008511, OCBBF2008520, OCBBF2008569, OCBBF2008586, OCBBF2008640, OCBBF2008691, OCBBF2008724, OCBBF2008760, OCBBF2008768, OCBBF2008775, OCBBF2008790, OCBBF2008814, OCBBF2008822, OCBBF2009095, OCBBF2009115, OCBBF2009242, OCBBF2009352, OCBBF2009536, OCBBF2009571, OCBBF2009583, OCBBF2009603, OCBBF2009788, OCBBF2009920, OCBBF2009926, OCBBF2010040, OCBBF2010140, OCBBF2010281, OCBBF2010313, OCBBF2010404, OCBBF2010416, OCBBF2010420, OCBBF2010557, OCBBF2010604, OCBBF2010709, OCBBF2010792, OCBBF2010858, OCBBF2010863, OCBBF2010931, OCBBF2010945, OCBBF2010978, OCBBF2010989, OCBBF2011137, OCBBF2011160, OCBBF2011177, OCBBF2011228, OCBBF2011283, OCBBF2011311, OCBBF2011669, OCBBF2011685, OCBBF2011706, OCBBF2011722, OCBBF2011767, OCBBF2011855, OCBBF2011872, OCBBF2011897, OCBBF2011914, OCBBF2011960, OCBBF2011981, OCBBF2012001, OCBBF2012028, OCBBF2012039, OCBBF2012139, OCBBF2012262, OCBBF2012320, OCBBF2012436, OCBBF2012525, OCBBF2012704, OCBBF2012714, OCBBF2012755, OCBBF2012812, OCBBF2012881, OCBBF2012936, OCBBF2012990, OCBBF2013049, OCBBF2013091, OCBBF2013123, OCBBF2013127, OCBBF2013208, OCBBF2013285, OCBBF2013319, OCBBF2013324, OCBBF2013366, OCBBF2013507, OCBBF2013721, OCBBF2013883, OCBBF2014052, OCBBF2014089, OCBBF2014576, OCBBF2014707, OCBBF2014745, OCBBF2014828, OCBBF2015031, OCBBF2015081, OCBBF2015115, OCBBF2015232, OCBBF2015233, OCBBF2015285, OCBBF2015334, OCBBF2015335, OCBBF2015506, OCBBF2015645, OCBBF2015659, OCBBF2015797, OCBBF2015931, OCBBF2015980, OCBBF2016038, OCBBF2016467, OCBBF2016590, OCBBF2016591, OCBBF2016612, OCBBF2016689, OCBBF2016690, OCBBF2016729, OCBBF2016841, OCBBF2017055, OCBBF2017069, OCBBF2017306, OCBBF2017325, OCBBF2017489, OCBBF2017516, OCBBF2017665, OCBBF2017815, OCBBF2017882, OCBBF2017920, OCBBF2018014, OCBBF2018084, OCBBF2018167, OCBBF2018206, OCBBF2018229, OCBBF2018362, OCBBF2018380, OCBBF2018563, OCBBF2018581, OCBBF2018618, OCBBF2018663, OCBBF2018687, OCBBF2018827, OCBBF2018828, OCBBF2018934, OCBBF2019108, OCBBF2019195, OCBBF2019327, OCBBF2019684, OCBBF2019761, OCBBF2019823, OCBBF2019950, OCBBF2020048, OCBBF2020318, OCBBF2020343, OCBBF2020453, OCBBF2020741, OCBBF2020801, OCBBF2020825, OCBBF2020838, OCBBF2021020, OCBBF2021214, OCBBF2021323, OCBBF2021518, OCBBF2021788, OCBBF2021833, OCBBF2022351, OCBBF2022573, OCBBF2022574, OCBBF2023598, OCBBF2023643, OCBBF2024463, OCBBF2024589, OCBBF2024719, OCBBF2024779, OCBBF2024781, OCBBF2024850, OCBBF2025028, OCBBF2025115, OCBBF2025198, OCBBF2025451, OCBBF2025458, OCBBF2025527, OCBBF2025631, OCBBF2025730, OCBBF2026025, OCBBF2026035, OCBBF2026144, OCBBF2026645, OCBBF2026649, OCBBF2026690, OCBBF2026981, OCBBF2027148, OCBBF2027197, OCBBF2027354, OCBBF2027423, OCBBF2027478, OCBBF2027481, OCBBF2027511, OCBBF2027661, OCBBF2027728, OCBBF2027782, OCBBF2027868, OCBBF2028055, OCBBF2028173, OCBBF2028421, OCBBF2029471, OCBBF2029901, OCBBF2030116, OCBBF2030329, OCBBF2030354, OCBBF2030517, OCBBF2030574, OCBBF2030708, OCBBF2030927, OCBBF2030963, OCBBF2031167, OCBBF2031198, OCBBF2031366, OCBBF2031561, OCBBF2032152, OCBBF2032274, OCBBF2032539, OCBBF2032590, OCBBF2032599, OCBBF2032611, OCBBF2032671, OCBBF2033413, OCBBF2033869, OCBBF2033948, OCBBF2034333, OCBBF2034529, OCBBF2034637, OCBBF2034906, OCBBF2035110, OCBBF2035214, OCBBF2035390, OCBBF2035564, OCBBF2035658, OCBBF2035823, OCBBF2035885, OCBBF2035916, OCBBF2036019, OCBBF2036031, OCBBF2036225, OCBBF2036476, OCBBF2036743, OCBBF2036752, OCBBF2037068, OCBBF2037340, OCBBF2037398, OCBBF2037464, OCBBF2037547, OCBBF2037598, OCBBF2037638, OCBBF2038238, OCBBF2038285, OCBBF2038317, OCBBF3000097, OCBBF3000213, OCBBF3000296, OCBBF3000372, OCBBF3000380, OCBBF3000743, OCBBF3000830, OCBBF3001076, OCBBF3001202, OCBBF3001333, OCBBF3001616, OCBBF3002553, OCBBF3002600, OCBBF3002654, OCBBF3003103, OCBBF3003209, OCBBF3003592, OCBBF3003745, OCBBF3003761, OCBBF3004264, OCBBF3004314, OCBBF3004487, OCBBF3004972, OCBBF3005330, OCBBF3005597, OCBBF3005843, OCBBF3006802, OCBBF3006986, OCBBF3007078, OCBBF3007704, OCBBF3008230, OCBBF3008392, OCBBF3008835, OCBBF3009192, OCBBF3009244, OCBBF3009279, PANCR1000012, PANCR1000021, PANCR1000081, PANCR1000086, PANCR1000091, PANCR1000185, PEBLM1000024, PEBLM1000029, PEBLM1000034, PEBLM1000062, PEBLM1000066, PEBLM1000068, PEBLM1000071, PEBLM1000083, PEBLM1000144, PEBLM1000147, PEBLM1000180, PEBLM2000030, PEBLM2000112, PEBLM2000126, PEBLM2000147, PEBLM2000170, PEBLM2000180, PEBLM2000213, PEBLM2000222, PEBLM2000248, PEBLM2000267, PEBLM2000270, PEBLM2000321, PEBLM2000326, PEBLM2000333, PEBLM2000338, PEBLM2000479, PEBLM2000502, PEBLM2001072, PEBLM2001312, PEBLM2001465, PEBLM2001488, PEBLM2001803, PEBLM2002432, PEBLM2002455, PEBLM2002594, PEBLM2002749, PEBLM2002887, PEBLM2003426, PEBLM2003765, PEBLM2003935, PEBLM2004015, PEBLM2004216, PEBLM2004290, PEBLM2004452, PEBLM2004497, PEBLM2004666, PEBLM2004733, PEBLM2005282, PEBLM2005615, PEBLM2005632, PEBLM2005697, PEBLM2006031, PEBLM2006036, PEBLM2006049, PEBLM2006113, PEBLM2006135, PEBLM2006215, PEBLM2006283, PEBLM2006298, PEBLM2006709, PEBLM2006912, PEBLM2007112, PEBLM2007140, PEBLM2007188, PEBLM2007437, PEBLM2007447, PEBLM2007598, PEBLM2007832, PEBLM2007834, PEBLM2008106, PEBLM2008576, PEBLM2008605, PEBLM2008826, PEBLM2008861, PERIC1000025, PERIC1000147, PERIC2000180, PERIC2000214, PERIC2000386, PERIC2000387, PERIC2000422, PERIC2000473, PERIC2000478, PERIC2000889, PERIC2000914, PERIC2001227, PERIC2001228, PERIC2001379, PERIC2001504, PERIC2001703, PERIC2001764, PERIC2002243, PERIC2002272, PERIC2002452, PERIC2002766, PERIC2003001, PERIC2003090, PERIC2003287, PERIC2003349, PERIC2003452, PERIC2003699, PERIC2003720, PERIC2003794, PERIC2003834, PERIC2003919, PERIC2003957, PERIC2004028, PERIC2004131, PERIC2004259, PERIC2004379, PERIC2004429, PERIC2004510, PERIC2004613, PERIC2004909, PERIC2005111, PERIC2005117, PERIC2005305, PERIC2005347, PERIC2005370, PERIC2005936, PERIC2006035, PERIC2006121, PERIC2006443, PERIC2006945, PERIC2006960, PERIC2007068, PERIC2007439, PERIC2007914, PERIC2008008, PERIC2008385, PERIC2009001, PERIC2009086, PERIC2009329, PERIC2009566, PLACE5000001, PLACE5000013, PLACE5000037, PLACE5000058, PLACE5000066, PLACE5000067, PLACE5000068, PLACE5000070, PLACE5000080, PLACE5000105, PLACE5000115, PLACE5000116, PLACE5000129, PLACE5000139, PLACE5000153, PLACE5000171, PLACE5000178, PLACE5000245, PLACE5000260, PLACE5000282, PLACE5000297, PLACE5000372, PLACE5000492, PLACE5000522, PLACE5000527, PLACE6000012, PLACE6000044, PLACE6000055, PLACE6000070, PLACE6000137, PLACE6000191, PLACE6000205, PLACE6000231, PLACE6000296, PLACE6000314, PLACE6000325, PLACE6000348, PLACE6000371, PLACE6000414, PLACE6000424, PLACE6000426, PLACE6000429, PLACE6000450, PLACE6000523, PLACE6000550, PLACE6000552, PLACE6000555, PLACE6000619, PLACE6000630, PLACE6000953, PLACE6001118, PLACE6001153, PLACE6001185, PLACE6001294, PLACE6001536, PLACE6001557, PLACE6001712, PLACE6001740, PLACE6001823, PLACE6001886, PLACE6001923, PLACE6001925, PLACE6001933, PLACE6002011, PLACE6002016, PLACE6002056, PLACE6002157, PLACE6002312, PLACE6002323, PLACE6002345, PLACE6002419, PLACE6002462, PLACE6002647, PLACE6002668, PLACE6002692, PLACE6002699, PLACE6002710, PLACE6002871, PLACE6002949, PLACE6002960, PLACE6003004, PLACE6003038, PLACE6003077, PLACE6003094, PLACE6003109, PLACE6003204, PLACE6003218, PLACE6003372, PLACE6003383, PLACE6003393, PLACE6003399, PLACE6003539, PLACE6003621, PLACE6003705, PLACE6003740, PLACE6003745, PLACE6003771, PLACE6003796, PLACE6003839, PLACE6003850, PLACE6004101, PLACE6004219, PLACE6004336, PLACE6004368, PLACE6004380, PLACE6004396, PLACE6004397, PLACE6004454, PLACE6004464, PLACE6004491, PLACE6004578, PLACE6004663, PLACE6004687, PLACE6004738, PLACE6004966, PLACE6004993, PLACE6005007, PLACE6005029, PLACE6005108, PLACE6005231, PLACE6005234, PLACE6005283, PLACE6005294, PLACE6005328, PLACE6005351, PLACE6005423, PLACE6005482, PLACE6005487, PLACE6005535, PLACE6005546, PLACE6005559, PLACE6005579, PLACE6005691, PLACE6005786, PLACE6006042, PLACE6006077, PLACE6006137, PLACE6006158, PLACE6006186, PLACE6006217, PLACE6006222, PLACE6006266, PLACE6006287, PLACE6006394, PLACE6006418, PLACE6006474, PLACE6006549, PLACE6006566, PLACE6006697, PLACE6006822, PLACE6006871, PLACE6006905, PLACE6006988, PLACE6007050, PLACE6007180, PLACE6007239, PLACE6007242, PLACE6007309, PLACE6007373, PLACE6007380, PLACE6007433, PLACE6007482, PLACE6007687, PLACE6007787, PLACE6007798, PLACE6007807, PLACE6007925, PLACE6008036, PLACE6008094, PLACE6008126, PLACE6008285, PLACE6008444, PLACE6008453, PLACE6008640, PLACE6008750, PLACE6008768, PLACE6008793, PLACE6008824, PLACE6008989, PLACE6009006, PLACE6009008, PLACE6009228, PLACE6009237, PLACE6009338, PLACE6009419, PLACE6009430, PLACE6009482, PLACE6009524, PLACE6009527, PLACE6009560, PLACE6009590, PLACE6009821, PLACE6009835, PLACE6009853, PLACE6010463, PLACE6010484, PLACE6010485, PLACE6010568, PLACE6010701, PLACE6010704, PLACE6010732, PLACE6010765, PLACE6010925, PLACE6010936, PLACE6010991, PLACE6011102, PLACE6011156, PLACE6011211, PLACE6011260, PLACE6011334, PLACE6011627, PLACE6011774, PLACE6011881, PLACE6011907, PLACE6011970, PLACE6011975, PLACE6012028, PLACE6012108, PLACE6012168, PLACE6012297, PLACE6012308, PLACE6012574, PLACE6012908, PLACE6012936, PLACE6012942, PLACE6013232, PLACE6013288, PLACE6013386, PLACE6013400, PLACE6013650, PLACE6013672, PLACE6013883, PLACE6013884, PLACE6013885, PLACE6014043, PLACE6014064, PLACE6014516, PLACE6014882, PLACE6015211, PLACE6015322, PLACE6015445, PLACE6015460, PLACE6015513, PLACE6015591, PLACE6015729, PLACE6015731, PLACE6015939, PLACE6016030, PLACE6016093, PLACE6016105, PLACE6016160, PLACE6016254, PLACE6016383, PLACE6016984, PLACE6017002, PLACE6017431, PLACE6017564, PLACE6017578, PLACE6017626, PLACE6017701, PLACE6017714, PLACE6017788, PLACE6017791, PLACE6018107, PLACE6018187, PLACE6018235, PLACE6018287, PLACE6018441, PLACE6018487, PLACE6018497, PLACE6018769, PLACE6018834, PLACE6018843, PLACE6018863, PLACE6018938, PLACE6019195, PLACE6019385, PLACE6019542, PLACE6019600, PLACE6019674, PLACE6019676, PLACE6019701, PLACE6019932, PLACE6020031, PLACE6020145, PLACE7000167, PLACE7000170, PLACE7000266, PLACE7000333, PLACE7000410, PLACE7000502, PLACE7000707, PLACE7001022, PLACE7001544, PLACE7001759, PLACE7001936, PLACE7002303, PLACE7002641, PLACE7003639, PLACE7003657, PLACE7003684, PLACE7003985, PLACE7004103, PLACE7004961, PLACE7005169, PLACE7005671, PLACE7005840, PLACE7006051, PLACE7006090, PLACE7006240, PLACE7006268, PLACE7006275, PLACE7006498, PLACE7006540, PLACE7007379, PLACE7007644, PLACE7007973, PLACE7008136, PLACE7008261, PLACE7008431, PLACE7008623, PLACE7008766, PLACE7009563, PROST1000033, PROST1000039, PROST1000065, PROST1000083, PROST1000085, PROST1000110, PROST1000123, PROST1000136, PROST1000144, PROST1000145, PROST1000152, PROST1000167, PROST1000184, PROST1000217, PROST1000220, PROST1000226, PROST1000246, PROST1000262, PROST1000298, PROST1000322, PROST1000334, PROST1000343, PROST1000362, PROST1000377, PROST1000383, PROST1000412, PROST1000419, PROST1000451, PROST1000480, PROST1000485, PROST1000493, PROST1000512, PROST1000527, PROST1000528, PROST1000536, PROST1000559, PROST1000564, PROST1000575, PROST2000036, PROST2000053, PROST2000067, PROST2000105, PROST2000143, PROST2000162, PROST2000176, PROST2000203, PROST2000206, PROST2000212, PROST2000267, PROST2000273, PROST2000274, PROST2000277, PROST2000284, PROST2000325, PROST2000432, PROST2000452, PROST2000463, PROST2000470, PROST2000505, PROST2000567, PROST2000572, PROST2000717, PROST2000760, PROST2000761, PROST2000835, PROST2000961, PROST2001002, PROST2001116, PROST2001138, PROST2001283, PROST2001414, PROST2001415, PROST2001465, PROST2001521, PROST2001540, PROST2001552, PROST2001599, PROST2001611, PROST2001636, PROST2001739, PROST2001796, PROST2001805, PROST2001899, PROST2001997, PROST2001998, PROST2002101, PROST2002162, PROST2002212, PROST2002227, PROST2002338, PROST2002425, PROST2002488, PROST2002489, PROST2002527, PROST2002591, PROST2002602, PROST2002633, PROST2002651, PROST2002682, PROST2002685, PROST2002722, PROST2002736, PROST2002842, PROST2002897, PROST2002906, PROST2002927, PROST2002960, PROST2003102, PROST2003117, PROST2003210, PROST2003232, PROST2003302, PROST2003303, PROST2003324, PROST2003340, PROST2003396, PROST2003428, PROST2003472, PROST2003517, PROST2003537, PROST2003563, PROST2003577, PROST2003583, PROST2003586, PROST2003628, PROST2003635, PROST2003674, PROST2003676, PROST2003725, PROST2003732, PROST2003775, PROST2003922, PROST2003930, PROST2004115, PROST2004142, PROST2004146, PROST2004161, PROST2004251, PROST2004332, PROST2004481, PROST2004526, PROST2004727, PROST2004739, PROST2004742, PROST2004744, PROST2004817, PROST2005067, PROST2005076, PROST2005093, PROST2005121, PROST2005131, PROST2005228, PROST2005272, PROST2005285, PROST2005426, PROST2005466, PROST2005604, PROST2005630, PROST2005683, PROST2005788, PROST2005880, PROST2005886, PROST2005904, PROST2005919, PROST2005943, PROST2006008, PROST2006020, PROST2006060, PROST2006196, PROST2006201, PROST2006260, PROST2006282, PROST2006343, PROST2006450, PROST2006491, PROST2006510, PROST2006579, PROST2006688, PROST2006737, PROST2006766, PROST2006782, PROST2006933, PROST2006988, PROST2007122, PROST2007200, PROST2007237, PROST2007248, PROST2007289, PROST2007317, PROST2007328, PROST2007382, PROST2007389, PROST2007416, PROST2007528, PROST2007818, PROST2007871, PROST2007950, PROST2007956, PROST2007974, PROST2007988, PROST2008079, PROST2008088, PROST2008243, PROST2008245, PROST2008447, PROST2008468, PROST2008472, PROST2008489, PROST2008516, PROST2008724, PROST2008835, PROST2008993, PROST2009022, PROST2009208, PROST2009222, PROST2009254, PROST2009273, PROST2009320, PROST2009347, PROST2009365, PROST2009388, PROST2009400, PROST2009470, PROST2009483, PROST2009571, PROST2009731, PROST2009736, PROST2009795, PROST2009901, PROST2009909, PROST2010046, PROST2010219, PROST2010250, PROST2010318, PROST2010326, PROST2010400, PROST2010545, PROST2010579, PROST2010606, PROST2010885, PROST2011012, PROST2011105, PROST2011297, PROST2011410, PROST2011439, PROST2011631, PROST2011660, PROST2012005, PROST2012016, PROST2012088, PROST2012140, PROST2012157, PROST2012190, PROST2012249, PROST2012353, PROST2012400, PROST2012504, PROST2012542, PROST2012550, PROST2012740, PROST2012745, PROST2012780, PROST2012888, PROST2012890, PROST2013032, PROST2013053, PROST2013121, PROST2013260, PROST2013327, PROST2013531, PROST2013605, PROST2013627, PROST2013873, PROST2013880, PROST2014422, PROST2014585, PROST2014601, PROST2014659, PROST2014862, PROST2014916, PROST2014925, PROST2015124, PROST2015137, PROST2015198, PROST2015243, PROST2015246, PROST2015251, PROST2015287, PROST2015457, PROST2015464, PROST2015537, PROST2015545, PROST2015551, PROST2015636, PROST2015710, PROST2015756, PROST2015877, PROST2015900, PROST2015924, PROST2015932, PROST2016195, PROST2016246, PROST2016351, PROST2016379, PROST2016444, PROST2016462, PROST2016499, PROST2016512, PROST2016566, PROST2016582, PROST2016668, PROST2016684, PROST2016777, PROST2016829, PROST2016860, PROST2016918, PROST2016980, PROST2017098, PROST2017128, PROST2017203, PROST2017367, PROST2017413, PROST2017441, PROST2017578, PROST2017612, PROST2017617, PROST2017692, PROST2017700, PROST2017701, PROST2017729, PROST2017836, PROST2017910, PROST2017972, PROST2018030, PROST2018090, PROST2018235, PROST2018437, PROST2018487, PROST2018511, PROST2018583, PROST2018588, PROST2018607, PROST2018788, PROST2018902, PROST2018922, PROST2019164, PROST2019296, PROST2019398, PROST2019487, PROST2019781, PUAEN1000039, PUAEN1000065, PUAEN1000081, PUAEN1000085, PUAEN1000087, PUAEN1000121, PUAEN1000147, PUAEN1000161, PUAEN1000175, PUAEN1000275, PUAEN1000276, PUAEN1000288, PUAEN1000322, PUAEN2000080, PUAEN2000152, PUAEN2000175, PUAEN2000247, PUAEN2000394, PUAEN2000497, PUAEN2000594, PUAEN2000684, PUAEN2001260, PUAEN2001526, PUAEN2001586, PUAEN2001882, PUAEN2002473, PUAEN2002552, PUAEN2002568, PUAEN2002616, PUAEN2002758, PUAEN2003018, PUAEN2003079, PUAEN2003116, PUAEN2003517, PUAEN2003954, PUAEN2004067, PUAEN2004083, PUAEN2004400, PUAEN2004511, PUAEN2004525, PUAEN2004875, PUAEN2005110, PUAEN2005247, PUAEN2005502, PUAEN2005588, PUAEN2005930, PUAEN2006029, PUAEN2006328, PUAEN2006335, PUAEN2006578, PUAEN2006639, PUAEN2006761, PUAEN2007350, PUAEN2007785, PUAEN2007898, PUAEN2008123, PUAEN2008228, PUAEN2008314, PUAEN2008515, PUAEN2008815, PUAEN2008939, PUAEN2008980, PUAEN2008985, PUAEN2009174, PUAEN2009348, PUAEN2009534, PUAEN2009795, PUAEN2009852, PUAEN2010346, PUAEN2010824, RECTM1000141, RECTM2000220, RECTM2000433, RECTM2000510, RECTM2001307, RECTM2001347, RECTM2001519, RECTM2001666, RECTM2001691, RECTM2001749, RECTM2002172, RECTM2002602, RECTM2002632, SALGL1000005, SALGL1000024, SALGL1000028, SALGL1000047, SALGL1000065, SALGL1000107, SALGL1000171, SKMUS1000014, SKMUS1000030, SKMUS1000064, SKMUS1000067, SKMUS1000102, SKMUS1000104, SKMUS1000110, SKMUS1000118, SKMUS1000124, SKMUS1000129, SKMUS1000138, SKMUS1000176, SKMUS1000177, SKMUS2000061, SKMUS2000078, SKMUS2000117, SKMUS2000137, SKMUS2000198, SKMUS2000243, SKMUS2000271, SKMUS2000287, SKMUS2000317, SKMUS2000330, SKMUS2000339, SKMUS2000343, SKMUS2000365, SKMUS2000390, SKMUS2000416, SKMUS2000458, SKMUS2000467, SKMUS2000468, SKMUS2000515, SKMUS2000679, SKMUS2000701, SKMUS2000705, SKMUS2000710, SKMUS2000724, SKMUS2000726, SKMUS2000757, SKMUS2000774, SKMUS2000780, SKMUS2000821, SKMUS2000847, SKMUS2000863, SKMUS2000873, SKMUS2000894, SKMUS2000898, SKMUS2000933, SKMUS2000945, SKMUS2000954, SKMUS2000961, SKMUS2000973, SKMUS2000980, SKMUS2001008, SKMUS2001014, SKMUS2001129, SKMUS2001157, SKMUS2001164, SKMUS2001199, SKMUS2001201, SKMUS2001215, SKMUS2001247, SKMUS2001254, SKMUS2001271, SKMUS2001287, SKMUS2001323, SKMUS2001364, SKMUS2001398, SKMUS2001412, SKMUS2001492, SKMUS2001501, SKMUS2001528, SKMUS2001543, SKMUS2001580, SKMUS2001585, SKMUS2001608, SKMUS2001631, SKMUS2001634, SKMUS2001662, SKMUS2001663, SKMUS2001668, SKMUS2001671, SKMUS2001683, SKMUS2001693, SKMUS2001695, SKMUS2001703, SKMUS2001740, SKMUS2001742, SKMUS2001823, SKMUS2001850, SKMUS2002077, SKMUS2002084, SKMUS2002153, SKMUS2002475, SKMUS2002602, SKMUS2002634, SKMUS2002693, SKMUS2002821, SKMUS2002840, SKMUS2002920, SKMUS2003034, SKMUS2003074, SKMUS2003168, SKMUS2003194, SKMUS2003744, SKMUS2004044, SKMUS2004047, SKMUS2004483, SKMUS2004667, SKMUS2004897, SKMUS2004903, SKMUS2004908, SKMUS2005428, SKMUS2006394, SKMUS2006481, SKMUS2006755, SKMUS2007315, SKMUS2007359, SKMUS2007568, SKMUS2007740, SKMUS2007816, SKMUS2007915, SKMUS2008338, SKMUS2008407, SKMUS2008474, SKMUS2008585, SKMUS2008607, SKMUS2009190, SKMUS2009232, SKMUS2009479, SKMUS2009557, SKNMC1000123, SKNMC1000124, SKNMC1000137, SKNMC1000159, SKNMC1000251, SKNMC1000264, SKNMC2000224, SKNMC2000256, SKNMC2000322, SKNMC2000374, SKNMC2000583, SKNMC2000593, SKNMC2000612, SKNMC2000622, SKNMC2000966, SKNMC2001113, SKNMC2001324, SKNMC2001503, SKNMC2001555, SKNMC2001596, SKNMC2001623, SKNMC2002402, SKNMC2003639, SKNMC2003924, SKNMC2003987, SKNMC2004457, SKNMC2004643, SKNMC2004651, SKNMC2005772, SKNMC2006173, SKNMC2006327, SKNMC2006998, SKNMC2007134, SKNMC2007502, SKNMC2007504, SKNMC2007961, SKNMC2009450, SKNSH1000086, SKNSH1000101, SKNSH1000174, SKNSH1000301, SKNSH1000308, SKNSH1000416, SKNSH2000051, SKNSH2000101, SKNSH2000151, SKNSH2000250, SKNSH2000319, SKNSH2000482, SKNSH2000516, SKNSH2000550, SKNSH2000971, SKNSH2001222, SKNSH2001875, SKNSH2001931, SKNSH2002054, SKNSH2002325, SKNSH2002768, SKNSH2002866, SKNSH2003064, SKNSH2003174, SKNSH2003422, SKNSH2003466, SKNSH2003483, SKNSH2003633, SKNSH2004039, SKNSH2005061, SKNSH2005120, SKNSH2005194, SKNSH2005240, SKNSH2005792, SKNSH2005816, SKNSH2005981, SKNSH2006304, SKNSH2006432, SKNSH2006822, SKNSH2007142, SKNSH2007149, SKNSH2007429, SKNSH2007739, SKNSH2008043, SKNSH2008969, SKNSH2009197, SKNSH2009435, SKNSH2009991, SKNSH2010015, SMINT1000012, SMINT1000016, SMINT1000039, SMINT1000042, SMINT1000048, SMINT1000051, SMINT1000054, SMINT1000057, SMINT1000071, SMINT1000075, SMINT1000078, SMINT1000091, SMINT1000100, SMINT1000103, SMINT1000118, SMINT1000131, SMINT1000137, SMINT1000192, SMINT2000018, SMINT2000032, SMINT2000040, SMINT2000060, SMINT2000084, SMINT2000145, SMINT2000159, SMINT2000176, SMINT2000185, SMINT2000227, SMINT2000229, SMINT2000232, SMINT2000239, SMINT2000267, SMINT2000277, SMINT2000400, SMINT2000454, SMINT2000518, SMINT2000529, SMINT2000530, SMINT2000537, SMINT2000538, SMINT2000541, SMINT2000545, SMINT2000558, SMINT2000562, SMINT2000568, SMINT2000609, SMINT2000659, SMINT2000747, SMINT2000811, SMINT2000824, SMINT2000933, SMINT2000984, SMINT2001114, SMINT2001158, SMINT2001183, SMINT2001199, SMINT2001222, SMINT2001348, SMINT2001397, SMINT2001458, SMINT2001461, SMINT2001535, SMINT2001559, SMINT2001609, SMINT2001615, SMINT2001683, SMINT2001731, SMINT2001812, SMINT2001818, SMINT2001950, SMINT2002126, SMINT2002202, SMINT2002210, SMINT2002224, SMINT2002281, SMINT2002311, SMINT2002314, SMINT2002328, SMINT2002414, SMINT2002457, SMINT2002743, SMINT2002778, SMINT2002880, SMINT2002882, SMINT2002899, SMINT2002974, SMINT2002976, SMINT2003003, SMINT2003128, SMINT2003150, SMINT2003317, SMINT2003386, SMINT2003423, SMINT2003551, SMINT2003569, SMINT2003641, SMINT2003644, SMINT2003866, SMINT2003905, SMINT2004023, SMINT2004037, SMINT2004047, SMINT2004086, SMINT2004144, SMINT2004280, SMINT2004299, SMINT2004339, SMINT2004350, SMINT2004414, SMINT2004473, SMINT2004547, SMINT2004583, SMINT2004589, SMINT2004781, SMINT2004891, SMINT2004909, SMINT2004992, SMINT2005075, SMINT2005161, SMINT2005174, SMINT2005213, SMINT2005330, SMINT2005387, SMINT2005402, SMINT2005405, SMINT2005621, SMINT2005623, SMINT2005624, SMINT2005688, SMINT2005800, SMINT2005956, SMINT2006078, SMINT2006205, SMINT2006331, SMINT2006596, SMINT2006641, SMINT2006648, SMINT2006708, SMINT2006801, SMINT2007062, SMINT2007101, SMINT2007140, SMINT2007187, SMINT2007219, SMINT2007294, SMINT2007365, SMINT2007391, SMINT2007433, SMINT2007526, SMINT2007579, SMINT2007647, SMINT2007729, SMINT2007790, SMINT2007792, SMINT2007796, SMINT2007867, SMINT2007932, SMINT2008042, SMINT2008054, SMINT2008133, SMINT2008277, SMINT2008329, SMINT2008455, SMINT2008491, SMINT2008531, SMINT2008545, SMINT2008558, SMINT2008590, SMINT2008625, SMINT2008672, SMINT2008690, SMINT2008715, SMINT2008720, SMINT2008817, SMINT2008844, SMINT2008869, SMINT2008917, SMINT2009119, SMINT2009121, SMINT2009212, SMINT2009216, SMINT2009233, SMINT2009259, SMINT2009272, SMINT2009292, SMINT2009363, SMINT2009415, SMINT2009468, SMINT2009505, SMINT2009529, SMINT2009832, SMINT2009895, SMINT2009902, SMINT2009973, SMINT2010015, SMINT2010068, SMINT2010076, SMINT2010144, SMINT2010200, SMINT2010278, SMINT2010324, SMINT2010326, SMINT2010369, SMINT2010500, SMINT2010533, SMINT2010629, SMINT2010639, SMINT2010672, SMINT2010753, SMINT2010853, SMINT2010897, SMINT2010959, SMINT2010997, SMINT2011033, SMINT2011066, SMINT2011273, SMINT2011311, SMINT2011406, SMINT2011509, SMINT2011567, SMINT2011656, SMINT2011888, SMINT2011958, SMINT2012040, SMINT2012122, SMINT2012179, SMINT2012195, SMINT2012285, SMINT2012291, SMINT2012501, SMINT2012734, SMINT2012793, SMINT2013031, SMINT2013032, SMINT2013129, SMINT2013170, SMINT2013181, SMINT2013228, SMINT2013613, SMINT2013626, SMINT2013695, SMINT2013833, SMINT2013890, SMINT2014166, SMINT2014282, SMINT2014443, SMINT2014480, SMINT2014489, SMINT2014721, SMINT2015006, SMINT2015294, SMINT2015306, SMINT2015326, SMINT2015353, SMINT2015454, SMINT2015518, SMINT2015745, SMINT2015787, SMINT2015810, SMINT2016122, SMINT2016146, SMINT2016286, SMINT2016313, SMINT2016396, SMINT2016412, SMINT2016440, SMINT2016477, SMINT2016544, SMINT2016857, SMINT2017134, SMINT2017319, SMINT2017324, SMINT2017410, SMINT2017431, SMINT2017432, SMINT2017436, SMINT2017599, SMINT2017659, SMINT2017736, SMINT2017781, SMINT2017855, SMINT2017884, SMINT2017964, SMINT2017974, SMINT2018343, SMINT2018353, SMINT2018592, SMINT2019017, SMINT2019105, SMINT2019142, SMINT2019153, SMINT2019200, SPLEN1000013, SPLEN1000041, SPLEN1000056, SPLEN1000087, SPLEN1000091, SPLEN1000134, SPLEN1000139, SPLEN1000143, SPLEN1000144, SPLEN1000145, SPLEN1000156, SPLEN1000163, SPLEN1000165, SPLEN1000178, SPLEN2000020, SPLEN2000047, SPLEN2000064, SPLEN2000072, SPLEN2000098, SPLEN2000126, SPLEN2000134, SPLEN2000143, SPLEN2000189, SPLEN2000197, SPLEN2000205, SPLEN2000210, SPLEN2000222, SPLEN2000242, SPLEN2000243, SPLEN2000247, SPLEN2000258, SPLEN2000270, SPLEN2000307, SPLEN2000310, SPLEN2000341, SPLEN2000350, SPLEN2000357, SPLEN2000364, SPLEN2000402, SPLEN2000414, SPLEN2000420, SPLEN2000443, SPLEN2000448, SPLEN2000450, SPLEN2000464, SPLEN2000496, SPLEN2000515, SPLEN2000516, SPLEN2000537, SPLEN2000541, SPLEN2000607, SPLEN2000630, SPLEN2000695, SPLEN2000839, SPLEN2000874, SPLEN2001135, SPLEN2001141, SPLEN2001157, SPLEN2001176, SPLEN2001227, SPLEN2001245, SPLEN2001278, SPLEN2001354, SPLEN2001367, SPLEN2001383, SPLEN2001476, SPLEN2001503, SPLEN2001510, SPLEN2001626, SPLEN2001650, SPLEN2001710, SPLEN2001761, SPLEN2001781, SPLEN2001881, SPLEN2001912, SPLEN2001945, SPLEN2002053, SPLEN2002133, SPLEN2002147, SPLEN2002166, SPLEN2002175, SPLEN2002223, SPLEN2002272, SPLEN2002314, SPLEN2002343, SPLEN2002354, SPLEN2002385, SPLEN2002419, SPLEN2002451, SPLEN2002462, SPLEN2002463, SPLEN2002477, SPLEN2002493, SPLEN2002662, SPLEN2002695, SPLEN2002707, SPLEN2002744, SPLEN2002917, SPLEN2002931, SPLEN2002957, SPLEN2003160, SPLEN2003204, SPLEN2003219, SPLEN2003297, SPLEN2003396, SPLEN2003678, SPLEN2003878, SPLEN2003918, SPLEN2003924, SPLEN2004060, SPLEN2004124, SPLEN2004148, SPLEN2004181, SPLEN2004220, SPLEN2004343, SPLEN2004346, SPLEN2004368, SPLEN2004611, SPLEN2004662, SPLEN2004844, SPLEN2004880, SPLEN2004984, SPLEN2005227, SPLEN2005272, SPLEN2005416, SPLEN2005429, SPLEN2005450, SPLEN2005474, SPLEN2005560, SPLEN2005727, SPLEN2005783, SPLEN2005790, SPLEN2005806, SPLEN2005818, SPLEN2005838, SPLEN2005927, SPLEN2005939, SPLEN2006268, SPLEN2006283, SPLEN2006325, SPLEN2006389, SPLEN2006425, SPLEN2006671, SPLEN2006701, SPLEN2006785, SPLEN2006875, SPLEN2007182, SPLEN2007314, SPLEN2007326, SPLEN2007350, SPLEN2007388, SPLEN2007619, SPLEN2007653, SPLEN2007689, SPLEN2007695, SPLEN2007739, SPLEN2007750, SPLEN2007794, SPLEN2007879, SPLEN2007926, SPLEN2008007, SPLEN2008135, SPLEN2008164, SPLEN2008317, SPLEN2008496, SPLEN2008591, SPLEN2008786, SPLEN2009088, SPLEN2009163, SPLEN2009315, SPLEN2009340, SPLEN2009512, SPLEN2009513, SPLEN2009541, SPLEN2009548, SPLEN2009555, SPLEN2009581, SPLEN2009733, SPLEN2009803, SPLEN2009884, SPLEN2009918, SPLEN2009970, SPLEN2010004, SPLEN2010015, SPLEN2010112, SPLEN2010119, SPLEN2010146, SPLEN2010187, SPLEN2010350, SPLEN2010395, SPLEN2010415, SPLEN2010447, SPLEN2010469, SPLEN2010510, SPLEN2010530, SPLEN2010534, SPLEN2010588, SPLEN2010625, SPLEN2010800, SPLEN2010846, SPLEN2010847, SPLEN2010862, SPLEN2010912, SPLEN2010978, SPLEN2010986, SPLEN2011018, SPLEN2011021, SPLEN2011025, SPLEN2011086, SPLEN2011139, SPLEN2011145, SPLEN2011248, SPLEN2011252, SPLEN2011422, SPLEN2011672, SPLEN2011678, SPLEN2011737, SPLEN2011758, SPLEN2011766, SPLEN2011805, SPLEN2011820, SPLEN2011830, SPLEN2011931, SPLEN2011981, SPLEN2012115, SPLEN2012175, SPLEN2012179, SPLEN2012185, SPLEN2012234, SPLEN2012453, SPLEN2012523, SPLEN2012524, SPLEN2012525, SPLEN2012606, SPLEN2012611, SPLEN2012619, SPLEN2012624, SPLEN2012725, SPLEN2012743, SPLEN2012756, SPLEN2012800, SPLEN2012846, SPLEN2012889, SPLEN2012961, SPLEN2013108, SPLEN2013195, SPLEN2013503, SPLEN2013644, SPLEN2013648, SPLEN2013670, SPLEN2013673, SPLEN2013690, SPLEN2013714, SPLEN2013753, SPLEN2013857, SPLEN2013860, SPLEN2013910, SPLEN2013923, SPLEN2014041, SPLEN2014063, SPLEN2014073, SPLEN2014119, SPLEN2014136, SPLEN2014199, SPLEN2014210, SPLEN2014293, SPLEN2014318, SPLEN2014452, SPLEN2014454, SPLEN2014486, SPLEN2014543, SPLEN2014572, SPLEN2014645, SPLEN2014669, SPLEN2014711, SPLEN2014739, SPLEN2014860, SPLEN2014865, SPLEN2014911, SPLEN2014919, SPLEN2014920, SPLEN2014924, SPLEN2014937, SPLEN2014946, SPLEN2015031, SPLEN2015094, SPLEN2015121, SPLEN2015129, SPLEN2015158, SPLEN2015166, SPLEN2015216, SPLEN2015258, SPLEN2015261, SPLEN2015267, SPLEN2015276, SPLEN2015415, SPLEN2015433, SPLEN2015593, SPLEN2015674, SPLEN2015679, SPLEN2015707, SPLEN2015730, SPLEN2015746, SPLEN2015788, SPLEN2015815, SPLEN2015890, SPLEN2015891, SPLEN2015899, SPLEN2016045, SPLEN2016053, SPLEN2016069, SPLEN2016098, SPLEN2016135, SPLEN2016241, SPLEN2016250, SPLEN2016304, SPLEN2016356, SPLEN2016421, SPLEN2016480, SPLEN2016531, SPLEN2016533, SPLEN2016541, SPLEN2016552, SPLEN2016554, SPLEN2016602, SPLEN2016627, SPLEN2016678, SPLEN2016743, SPLEN2016773, SPLEN2016781, SPLEN2016840, SPLEN2016863, SPLEN2016922, SPLEN2016932, SPLEN2016973, SPLEN2017043, SPLEN2017104, SPLEN2017121, SPLEN2017147, SPLEN2017187, SPLEN2017189, SPLEN2017212, SPLEN2017351, SPLEN2017426, SPLEN2017452, SPLEN2017538, SPLEN2017592, SPLEN2017613, SPLEN2017620, SPLEN2017643, SPLEN2017687, SPLEN2017740, SPLEN2017781, SPLEN2017918, SPLEN2017999, SPLEN2018098, SPLEN2018112, SPLEN2018180, SPLEN2018181, SPLEN2018280, SPLEN2018285, SPLEN2018299, SPLEN2018302, SPLEN2018364, SPLEN2018395, SPLEN2018643, SPLEN2018683, SPLEN2018732, SPLEN2018749, SPLEN2018933, SPLEN2019008, SPLEN2019043, SPLEN2019077, SPLEN2019092, SPLEN2019102, SPLEN2019131, SPLEN2019257, SPLEN2019311, SPLEN2019323, SPLEN2019349, SPLEN2019375, SPLEN2019379, SPLEN2019446, SPLEN2019471, SPLEN2019480, SPLEN2019571, SPLEN2019575, SPLEN2019709, SPLEN2019774, SPLEN2019793, SPLEN2019811, SPLEN2019839, SPLEN2019956, SPLEN2019985, SPLEN2020007, SPLEN2020034, SPLEN2020153, SPLEN2020154, SPLEN2020166, SPLEN2020183, SPLEN2020223, SPLEN2020359, SPLEN2020417, SPLEN2020427, SPLEN2020467, SPLEN2020512, SPLEN2020608, SPLEN2020777, SPLEN2020805, SPLEN2021057, SPLEN2021122, SPLEN2021157, SPLEN2021231, SPLEN2021273, SPLEN2021295, SPLEN2021298, SPLEN2021383, SPLEN2021417, SPLEN2021440, SPLEN2021458, SPLEN2021463, SPLEN2021560, SPLEN2021701, SPLEN2021795, SPLEN2021983, SPLEN2021991, SPLEN2022040, SPLEN2022162, SPLEN2022227, SPLEN2022522, SPLEN2022591, SPLEN2022785, SPLEN2022920, SPLEN2023024, SPLEN2023118, SPLEN2023160, SPLEN2023423, SPLEN2023710, SPLEN2023733, SPLEN2023791, SPLEN2023977, SPLEN2024070, SPLEN2024127, SPLEN2024232, SPLEN2024273, SPLEN2024383, SPLEN2024489, SPLEN2024530, SPLEN2024571, SPLEN2024577, SPLEN2024617, SPLEN2024737, SPLEN2024922, SPLEN2024956, SPLEN2024990, SPLEN2025012, SPLEN2025017, SPLEN2025039, SPLEN2025219, SPLEN2025491, SPLEN2025626, SPLEN2025820, SPLEN2026144, SPLEN2026411, SPLEN2026765, SPLEN2027157, SPLEN2027395, SPLEN2027488, SPLEN2027780, SPLEN2027852, SPLEN2027868, SPLEN2027995, SPLEN2028046, SPLEN2028066, SPLEN2028138, SPLEN2028417, SPLEN2028593, SPLEN2028844, SPLEN2028914, SPLEN2028994, SPLEN2029051, SPLEN2029176, SPLEN2029295, SPLEN2029380, SPLEN2029522, SPLEN2029683, SPLEN2029727, SPLEN2029904, SPLEN2029912, SPLEN2030250, SPLEN2030335, SPLEN2030371, SPLEN2030397, SPLEN2030479, SPLEN2030495, SPLEN2030562, SPLEN2030763, SPLEN2030847, SPLEN2031004, SPLEN2031125, SPLEN2031424, SPLEN2031547, SPLEN2031674, SPLEN2031724, SPLEN2031780, SPLEN2032036, SPLEN2032112, SPLEN2032154, SPLEN2032321, SPLEN2032356, SPLEN2032677, SPLEN2032813, SPLEN2032924, SPLEN2033098, SPLEN2033153, SPLEN2033333, SPLEN2033490, SPLEN2033539, SPLEN2033921, SPLEN2033996, SPLEN2034021, SPLEN2034081, SPLEN2034252, SPLEN2034448, SPLEN2034551, SPLEN2034601, SPLEN2034678, SPLEN2034781, SPLEN2034864, SPLEN2034934, SPLEN2035318, SPLEN2035615, SPLEN2036076, SPLEN2036103, SPLEN2036326, SPLEN2036475, SPLEN2036501, SPLEN2036579, SPLEN2036608, SPLEN2036702, SPLEN2036712, SPLEN2036821, SPLEN2036953, SPLEN2037077, SPLEN2037194, SPLEN2037319, SPLEN2037444, SPLEN2037580, SPLEN2037630, SPLEN2037678, SPLEN2037722, SPLEN2037891, SPLEN2038055, SPLEN2038180, SPLEN2038345, SPLEN2038407, SPLEN2038473, SPLEN2038834, SPLEN2039311, SPLEN2039672, SPLEN2039697, SPLEN2039845, SPLEN2039936, SPLEN2040222, SPLEN2040237, SPLEN2040824, SPLEN2041304, SPLEN2041306, SPLEN2041310, SPLEN2041585, SPLEN2041645, SPLEN2041700, SPLEN2041720, SPLEN2041977, SPLEN2042051, SPLEN2042303, SPLEN2042521, SPLEN2042535, SPLEN2042598, SPLEN2042714, SPLEN2042920, STOMA1000013, STOMA1000047, STOMA1000052, STOMA1000074, STOMA1000091, STOMA1000117, STOMA1000133, STOMA1000175, STOMA1000186, STOMA1000190, STOMA1000191, STOMA2000032, STOMA2000072, STOMA2000088, STOMA2000104, STOMA2000121, STOMA2000148, STOMA2000168, STOMA2000183, STOMA2000188, STOMA2000257, STOMA2000279, STOMA2000289, STOMA2000383, STOMA2000386, STOMA2000396, STOMA2000478, STOMA2000482, STOMA2000529, STOMA2000539, STOMA2000567, STOMA2000640, STOMA2000678, STOMA2000686, STOMA2000888, STOMA2001025, STOMA2001389, STOMA2002052, STOMA2002141, STOMA2002166, STOMA2002367, STOMA2002688, STOMA2002828, STOMA2003158, STOMA2003289, STOMA2003444, STOMA2003477, STOMA2003646, STOMA2003716, STOMA2003781, STOMA2003894, STOMA2004194, STOMA2004294, STOMA2004663, STOMA2004668, STOMA2004852, STOMA2004873, STOMA2004884, STOMA2004893, STOMA2004925, STOMA2005120, STOMA2005664, STOMA2005667, STOMA2005746, STOMA2005782, STOMA2006181, STOMA2006213, STOMA2006229, STOMA2006325, STOMA2006330, STOMA2006398, STOMA2006447, STOMA2006780, STOMA2006904, STOMA2007269, STOMA2007680, STOMA2007745, STOMA2008050, STOMA2008361, STOMA2008546, STOMA2008614, STOMA2008638, STOMA2008838, STOMA2009250, STOMA2009253, STOMA2009256, STOMA2009289, SYNOV1000045, SYNOV1000049, SYNOV1000118, SYNOV1000128, SYNOV1000164, SYNOV1000190, SYNOV1000256, SYNOV1000374, SYNOV2000152, SYNOV2000171, SYNOV2000173, SYNOV2000177, SYNOV2000178, SYNOV2000193, SYNOV2000251, SYNOV2000279, SYNOV2000291, SYNOV2000297, SYNOV2000397, SYNOV2000426, SYNOV2000601, SYNOV2000700, SYNOV2000820, SYNOV2000824, SYNOV2000923, SYNOV2001014, SYNOV2001035, SYNOV2001088, SYNOV2001111, SYNOV2001212, SYNOV2001239, SYNOV2001251, SYNOV2001300, SYNOV2001356, SYNOV2001390, SYNOV2001451, SYNOV2001457, SYNOV2001468, SYNOV2001581, SYNOV2001648, SYNOV2001660, SYNOV2003326, SYNOV2005216, SYNOV2005448, SYNOV2005541, SYNOV2005673, SYNOV2005817, SYNOV2005962, SYNOV2006430, SYNOV2006620, SYNOV2007758, SYNOV2007965, SYNOV2011233, SYNOV2012326, SYNOV2013365, SYNOV2013637, SYNOV2014157, SYNOV2014364, SYNOV2016124, SYNOV2016837, SYNOV2017055, SYNOV2017179, SYNOV2018921, SYNOV2019280, SYNOV2020085, SYNOV2020463, SYNOV2021320, SYNOV2021953, SYNOV3000184, SYNOV3000231, SYNOV3000302, SYNOV3000345, SYNOV4000249, SYNOV4000472, SYNOV4000598, SYNOV4000706, SYNOV4001153, SYNOV4001224, SYNOV4001326, SYNOV4001342, SYNOV4001395, SYNOV4002001, SYNOV4002392, SYNOV4002875, SYNOV4002883, SYNOV4003174, SYNOV4003322, SYNOV4003681, SYNOV4003981, SYNOV4004184, SYNOV4004741, SYNOV4004823, SYNOV4004914, SYNOV4005256, SYNOV4005570, SYNOV4005739, SYNOV4005889, SYNOV4005981, SYNOV4005989, SYNOV4006256, SYNOV4006327, SYNOV4006542, SYNOV4007012, SYNOV4007215, SYNOV4007360, SYNOV4007430, SYNOV4007521, SYNOV4007553, SYNOV4007711, SYNOV4008245, SYNOV4008336, SYNOV4009139, SYNOV4009298, SYNOV4009575, T1ESE2000116, T1ESE2002665, TBAES2000004, TBAES2000059, TBAES2000116, TBAES2000255, TBAES2000315, TBAES2000352, TBAES2000932, TBAES2001171, TBAES2001220, TBAES2001229, TBAES2001258, TBAES2001296, TBAES2001492, TBAES2001553, TBAES2001751, TBAES2003435, TBAES2003492, TBAES2003550, TBAES2003702, TBAES2003917, TBAES2004055, TBAES2004105, TBAES2004939, TBAES2005157, TBAES2005361, TBAES2005543, TBAES2006568, TBAES2006881, TBAES2007379, TBAES2007428, TBAES2007481, TBAES2007504, TBAES2007548, TBAES2007697, TBAES2007862, TBAES2007964, TBAES2008133, TCERX2000171, TCERX2000431, TCERX2000613, TCERX2000998, TCERX2002644, TCOLN1000037, TCOLN2000139, TCOLN2000236, TCOLN2000641, TCOLN2001268, TCOLN2002047, TCOLN2002278, TESOP1000035, TESOP1000127, TESOP1000160, TESOP2000083, TESOP2000090, TESOP2000205, TESOP2000312, TESOP2000390, TESOP2000400, TESOP2000510, TESOP2000527, TESOP2000569, TESOP2000739, TESOP2000801, TESOP2001122, TESOP2001166, TESOP2001345, TESOP2001474, TESOP2001796, TESOP2001818, TESOP2001849, TESOP2001865, TESOP2001901, TESOP2001953, TESOP2002005, TESOP2002110, TESOP2002150, TESOP2002489, TESOP2002539, TESOP2002545, TESOP2002804, TESOP2002950, TESOP2003273, TESOP2003308, TESOP2003553, TESOP2003753, TESOP2004110, TESOP2004114, TESOP2004173, TESOP2004214, TESOP2005199, TESOP2005285, TESOP2005485, TESOP2005498, TESOP2005579, TESOP2006041, TESOP2006053, TESOP2006060, TESOP2006068, TESOP2006110, TESOP2006398, TESOP2006670, TESOP2006704, TESOP2006746, TESOP2006865, TESOP2006893, TESOP2007041, TESOP2007052, TESOP2007262, TESOP2007384, TESOP2007636, TESOP2007674, TESOP2007688, TESOP2007725, TESOP2007978, TESOP2008127, TESOP2008552, TESOP2008556, TESOP2008563, TESOP2008820, TESOP2009121, TESOP2009201, TESOP2009247, TESOP2009555, TESTI1000018, TESTI1000019, TESTI1000025, TESTI1000029, TESTI1000030, TESTI1000042, TESTI1000045, TESTI1000051, TESTI1000055, TESTI1000064, TESTI1000070, TESTI1000085, TESTI1000088, TESTI1000093, TESTI1000094, TESTI1000096, TESTI1000101, TESTI1000109, TESTI1000125, TESTI1000127, TESTI1000128, TESTI1000131, TESTI1000138, TESTI1000142, TESTI1000157, TESTI1000163, TESTI1000168, TESTI1000169, TESTI1000179, TESTI1000183, TESTI1000191, TESTI1000257, TESTI1000266, TESTI1000319, TESTI1000330, TESTI1000348, TESTI1000390, TESTI1000391, TESTI1000459, TESTI1000491, TESTI1000545, TESTI2000006, TESTI2000018, TESTI2000044, TESTI2000117, TESTI2000120, TESTI2000147, TESTI2000154, TESTI2000172, TESTI2000177, TESTI2000179, TESTI2000207, TESTI2000208, TESTI2000221, TESTI2000253, TESTI2000272, TESTI2000278, TESTI2000349, TESTI2000358, TESTI2000372, TESTI2000427, TESTI2000431, TESTI2000435, TESTI2000443, TESTI2000452, TESTI2000462, TESTI2000489, TESTI2000520, TESTI2000571, TESTI2000591, TESTI2000598, TESTI2000600, TESTI2000616, TESTI2000627, TESTI2000644, TESTI2000671, TESTI2000683, TESTI2000689, TESTI2000695, TESTI2000699, TESTI2000707, TESTI2000745, TESTI2000756, TESTI2000762, TESTI2000784, TESTI2000808, TESTI2000819, TESTI2000830, TESTI2000840, TESTI2000849, TESTI2000850, TESTI2000874, TESTI2000883, TESTI2000909, TESTI2000951, TESTI2000970, TESTI2000981, TESTI2001008, TESTI2001049, TESTI2001082, TESTI2001120, TESTI2001134, TESTI2001153, TESTI2001180, TESTI2001208, TESTI2001229, TESTI2001236, TESTI2001237, TESTI2001306, TESTI2001313, TESTI2001330, TESTI2001339, TESTI2001345, TESTI2001352, TESTI2001364, TESTI2001412, TESTI2001420, TESTI2001498, TESTI2001512, TESTI2001518, TESTI2001556, TESTI2001593, TESTI2001613, TESTI2001621, TESTI2001661, TESTI2001665, TESTI2001671, TESTI2001697, TESTI2001725, TESTI2001758, TESTI2001766, TESTI2001792, TESTI2001793, TESTI2001795, TESTI2001812, TESTI2001815, TESTI2001823, TESTI2001826, TESTI2001827, TESTI2001829, TESTI2001852, TESTI2001862, TESTI2001869, TESTI2001879, TESTI2001894, TESTI2001898, TESTI2001915, TESTI2001950, TESTI2001959, TESTI2001968, TESTI2001985, TESTI2001991, TESTI2002002, TESTI2002012, TESTI2002036, TESTI2002048, TESTI2002057, TESTI2002081, TESTI2002090, TESTI2002105, TESTI2002216, TESTI2002223, TESTI2002245, TESTI2002251, TESTI2002256, TESTI2002264, TESTI2002282, TESTI2002293, TESTI2002294, TESTI2002326, TESTI2002351, TESTI2002361, TESTI2002365, TESTI2002369, TESTI2002406, TESTI2002415, TESTI2002423, TESTI2002453, TESTI2002461, TESTI2002465, TESTI2002467, TESTI2002498, TESTI2002516, TESTI2002544, TESTI2002578, TESTI2002580, TESTI2002618, TESTI2002632, TESTI2002676, TESTI2002690, TESTI2002696, TESTI2002698, TESTI2002700, TESTI2002707, TESTI2002724, TESTI2002729, TESTI2002752, TESTI2002753, TESTI2002789, TESTI2002802, TESTI2002806, TESTI2002866, TESTI2002877, TESTI2002910, TESTI2002912, TESTI2002928, TESTI2002937, TESTI2002965, TESTI2002993, TESTI2003005, TESTI2003020, TESTI2003031, TESTI2003037, TESTI2003044, TESTI2003059, TESTI2003071, TESTI2003074, TESTI2003089, TESTI2003104, TESTI2003109, TESTI2003117, TESTI2003127, TESTI2003130, TESTI2003131, TESTI2003139, TESTI2003141, TESTI2003152, TESTI2003181, TESTI2003193, TESTI2003196, TESTI2003228, TESTI2003236, TESTI2003255, TESTI2003258, TESTI2003277, TESTI2003280, TESTI2003299, TESTI2003311, TESTI2003321, TESTI2003325, TESTI2003327, TESTI2003330, TESTI2003347, TESTI2003354, TESTI2003356, TESTI2003372, TESTI2003376, TESTI2003418, TESTI2003419, TESTI2003432, TESTI2003475, TESTI2003476, TESTI2003498, TESTI2003512, TESTI2003539, TESTI2003541, TESTI2003545, TESTI2003551, TESTI2003574, TESTI2003579, TESTI2003580, TESTI2003589, TESTI2003596, TESTI2003598, TESTI2003615, TESTI2003625, TESTI2003638, TESTI2003649, TESTI2003692, TESTI2003718, TESTI2003727, TESTI2003756, TESTI2003768, TESTI2003781, TESTI2003787, TESTI2003824, TESTI2003827, TESTI2003894, TESTI2003911, TESTI2003914, TESTI2003940, TESTI2003962, TESTI2003998, TESTI2004000, TESTI2004073, TESTI2004080, TESTI2004085, TESTI2004089, TESTI2004111, TESTI2004119, TESTI2004122, TESTI2004163, TESTI2004169, TESTI2004207, TESTI2004215, TESTI2004227, TESTI2004229, TESTI2004243, TESTI2004255, TESTI2004287, TESTI2004313, TESTI2004318, TESTI2004322, TESTI2004391, TESTI2004399, TESTI2004423, TESTI2004431, TESTI2004432, TESTI2004452, TESTI2004459, TESTI2004490, TESTI2004539, TESTI2004552, TESTI2004560, TESTI2004574, TESTI2004601, TESTI2004611, TESTI2004649, TESTI2004654, TESTI2004675, TESTI2004687, TESTI2004689, TESTI2004700, TESTI2004706, TESTI2004712, TESTI2004734, TESTI2004737, TESTI2004783, TESTI2004791, TESTI2004793, TESTI2004860, TESTI2004906, TESTI2004920, TESTI2004929, TESTI2004936, TESTI2004941, TESTI2004971, TESTI2004982, TESTI2004993, TESTI2004994, TESTI2004999, TESTI2005017, TESTI2005025, TESTI2005060, TESTI2005072, TESTI2005085, TESTI2005112, TESTI2005120, TESTI2005153, TESTI2005155, TESTI2005173, TESTI2005267, TESTI2005268, TESTI2005280, TESTI2005307, TESTI2005326, TESTI2005363, TESTI2005376, TESTI2005378, TESTI2005380, TESTI2005391, TESTI2005395, TESTI2005396, TESTI2005415, TESTI2005470, TESTI2005492, TESTI2005568, TESTI2005584, TESTI2005588, TESTI2005590, TESTI2005603, TESTI2005609, TESTI2005610, TESTI2005630, TESTI2005672, TESTI2005683, TESTI2005690, TESTI2005692, TESTI2005703, TESTI2005720, TESTI2005731, TESTI2005739, TESTI2005742, TESTI2005743, TESTI2005759, TESTI2005767, TESTI2005775, TESTI2005788, TESTI2005827, TESTI2005835, TESTI2005860, TESTI2005892, TESTI2005911, TESTI2005933, TESTI2005937, TESTI2005948, TESTI2005979, TESTI2005982, TESTI2005984, TESTI2005986, TESTI2005987, TESTI2006007, TESTI2006008, TESTI2006015, TESTI2006016, TESTI2006035, TESTI2006040, TESTI2006041, TESTI2006045, TESTI2006067, TESTI2006083, TESTI2006097, TESTI2006109, TESTI2006111, TESTI2006125, TESTI2006179, TESTI2006209, TESTI2006210, TESTI2006212, TESTI2006218, TESTI2006238, TESTI2006255, TESTI2006258, TESTI2006278, TESTI2006333, TESTI2006341, TESTI2006360, TESTI2006383, TESTI2006409, TESTI2006425, TESTI2006437, TESTI2006457, TESTI2006460, TESTI2006465, TESTI2006483, TESTI2006499, TESTI2006523, TESTI2006543, TESTI2006565, TESTI2006572, TESTI2006615, TESTI2006617, TESTI2006624, TESTI2006628, TESTI2006633, TESTI2006643, TESTI2006648, TESTI2006659, TESTI2006660, TESTI2006665, TESTI2006667, TESTI2006677, TESTI2006720, TESTI2006735, TESTI2006744, TESTI2006774, TESTI2006853, TESTI2006866, TESTI2006872, TESTI2006879, TESTI2006894, TESTI2006940, TESTI2006955, TESTI2006978, TESTI2006979, TESTI2006990, TESTI2007040, TESTI2007074, TESTI2007078, TESTI2007113, TESTI2007152, TESTI2007163, TESTI2007183, TESTI2007211, TESTI2007220, TESTI2007234, TESTI2007311, TESTI2007320, TESTI2007346, TESTI2007358, TESTI2007402, TESTI2007405, TESTI2007422, TESTI2007452, TESTI2007466, TESTI2007480, TESTI2007490, TESTI2007502, TESTI2007524, TESTI2007533, TESTI2007576, TESTI2007613, TESTI2007657, TESTI2007685, TESTI2007692, TESTI2007749, TESTI2007750, TESTI2007808, TESTI2007814, TESTI2007829, TESTI2007864, TESTI2007867, TESTI2007872, TESTI2007906, TESTI2007922, TESTI2007951, TESTI2007972, TESTI2007973, TESTI2008014, TESTI2008032, TESTI2008033, TESTI2008046, TESTI2008081, TESTI2008099, TESTI2008139, TESTI2008144, TESTI2008161, TESTI2008189, TESTI2008204, TESTI2008219, TESTI2008233, TESTI2008234, TESTI2008237, TESTI2008278, TESTI2008320, TESTI2008331, TESTI2008343, TESTI2008387, TESTI2008389, TESTI2008420, TESTI2008425, TESTI2008440, TESTI2008567, TESTI2008595, TESTI2008621, TESTI2008636, TESTI2008657, TESTI2008684, TESTI2008699, TESTI2008715, TESTI2008762, TESTI2008774, TESTI2008786, TESTI2008822, TESTI2008835, TESTI2008840, TESTI2008847, TESTI2008884, TESTI2008901, TESTI2008929, TESTI2008946, TESTI2008960, TESTI2009018, TESTI2009091, TESTI2009097, TESTI2009136, TESTI2009185, TESTI2009190, TESTI2009217, TESTI2009239, TESTI2009325, TESTI2009388, TESTI2009390, TESTI2009400, TESTI2009412, TESTI2009423, TESTI2009447, TESTI2009462, TESTI2009474, TESTI2009477, TESTI2009497, TESTI2009502, TESTI2009511, TESTI2009544, TESTI2009545, TESTI2009551, TESTI2009577, TESTI2009585, TESTI2009588, TESTI2009683, TESTI2009727, TESTI2009739, TESTI2009812, TESTI2009835, TESTI2009853, TESTI2009935, TESTI2009977, TESTI2010009, TESTI2010154, TESTI2010180, TESTI2010239, TESTI2010280, TESTI2010354, TESTI2010396, TESTI2010400, TESTI2010409, TESTI2010572, TESTI2010587, TESTI2010591, TESTI2010682, TESTI2010724, TESTI2010732, TESTI2010734, TESTI2010755, TESTI2010793, TESTI2010806, TESTI2010833, TESTI2010872, TESTI2011009, TESTI2011020, TESTI2011028, TESTI2011033, TESTI2011254, TESTI2011286, TESTI2011294, TESTI2011314, TESTI2011315, TESTI2011394, TESTI2011407, TESTI2011448, TESTI2011480, TESTI2011549, TESTI2011575, TESTI2011605, TESTI2011612, TESTI2011665, TESTI2011683, TESTI2011712, TESTI2011750, TESTI2011840, TESTI2011846, TESTI2011915, TESTI2011928, TESTI2011971, TESTI2012019, TESTI2012050, TESTI2012090, TESTI2012095, TESTI2012104, TESTI2012152, TESTI2012155, TESTI2012171, TESTI2012207, TESTI2012231, TESTI2012244, TESTI2012289, TESTI2012308, TESTI2012356, TESTI2012387, TESTI2012394, TESTI2012444, TESTI2012511, TESTI2012528, TESTI2012544, TESTI2012550, TESTI2012571, TESTI2012592, TESTI2012617, TESTI2012628, TESTI2012778, TESTI2012812, TESTI2012834, TESTI2012835, TESTI2012861, TESTI2012900, TESTI2012915, TESTI2012922, TESTI2013001, TESTI2013012, TESTI2013053, TESTI2013144, TESTI2013163, TESTI2013169, TESTI2013212, TESTI2013257, TESTI2013268, TESTI2013322, TESTI2013381, TESTI2013382, TESTI2013401, TESTI2013427, TESTI2013468, TESTI2013497, TESTI2013545, TESTI2013546, TESTI2013566, TESTI2013601, TESTI2013604, TESTI2013607, TESTI2013610, TESTI2013691, TESTI2013699, TESTI2013737, TESTI2013767, TESTI2013832, TESTI2013873, TESTI2013889, TESTI2014007, TESTI2014036, TESTI2014097, TESTI2014160, TESTI2014248, TESTI2014254, TESTI2014269, TESTI2014274, TESTI2014318, TESTI2014324, TESTI2014339, TESTI2014362, TESTI2014385, TESTI2014415, TESTI2014439, TESTI2014474, TESTI2014577, TESTI2014578, TESTI2014716, TESTI2014800, TESTI2014838, TESTI2014843, TESTI2014979, TESTI2014988, TESTI2015042, TESTI2015092, TESTI2015105, TESTI2015180, TESTI2015246, TESTI2015249, TESTI2015327, TESTI2015331, TESTI2015350, TESTI2015375, TESTI2015437, TESTI2015590, TESTI2015610, TESTI2015647, TESTI2015675, TESTI2015710, TESTI2015752, TESTI2015830, TESTI2015914, TESTI2015938, TESTI2015947, TESTI2015962, TESTI2015987, TESTI2016033, TESTI2016046, TESTI2016101, TESTI2016162, TESTI2016197, TESTI2016278, TESTI2016298, TESTI2016331, TESTI2016337, TESTI2016410, TESTI2016421, TESTI2016509, TESTI2016568, TESTI2016583, TESTI2016599, TESTI2016629, TESTI2016663, TESTI2016667, TESTI2016688, TESTI2016701, TESTI2016758, TESTI2016848, TESTI2016863, TESTI2016888, TESTI2016896, TESTI2016922, TESTI2016942, TESTI2016950, TESTI2016996, TESTI2017017, TESTI2017028, TESTI2017035, TESTI2017069, TESTI2017089, TESTI2017102, TESTI2017107, TESTI2017113, TESTI2017125, TESTI2017256, TESTI2017305, TESTI2017311, TESTI2017396, TESTI2017507, TESTI2017537, TESTI2017582, TESTI2017584, TESTI2017645, TESTI2017727, TESTI2017740, TESTI2017775, TESTI2017816, TESTI2017832, TESTI2017923, TESTI2017932, TESTI2017951, TESTI2017954, TESTI2018031, TESTI2018035, TESTI2018060, TESTI2018083, TESTI2018178, TESTI2018221, TESTI2018276, TESTI2018290, TESTI2018335, TESTI2018337, TESTI2018368, TESTI2018421, TESTI2018428, TESTI2018475, TESTI2018482, TESTI2018521, TESTI2018565, TESTI2018581, TESTI2018611, TESTI2018687, TESTI2018697, TESTI2018838, TESTI2018867, TESTI2018941, TESTI2018957, TESTI2018974, TESTI2018975, TESTI2018997, TESTI2019042, TESTI2019077, TESTI2019228, TESTI2019257, TESTI2019280, TESTI2019282, TESTI2019308, TESTI2019336, TESTI2019352, TESTI2019406, TESTI2019430, TESTI2019455, TESTI2019481, TESTI2019488, TESTI2019501, TESTI2019648, TESTI2019669, TESTI2019697, TESTI2019729, TESTI2019760, TESTI2019787, TESTI2019794, TESTI2019854, TESTI2019859, TESTI2019860, TESTI2019872, TESTI2019911, TESTI2019917, TESTI2019975, TESTI2019998, TESTI2020012, TESTI2020026, TESTI2020029, TESTI2020071, TESTI2020084, TESTI2020265, TESTI2020283, TESTI2020316, TESTI2020344, TESTI2020379, TESTI2020426, TESTI2020445, TESTI2020515, TESTI2020525, TESTI2020579, TESTI2020717, TESTI2020840, TESTI2020871, TESTI2020905, TESTI2020906, TESTI2020946, TESTI2020956, TESTI2020981, TESTI2020999, TESTI2021003, TESTI2021038, TESTI2021057, TESTI2021077, TESTI2021112, TESTI2021114, TESTI2021116, TESTI2021118, TESTI2021122, TESTI2021138, TESTI2021297, TESTI2021358, TESTI2021425, TESTI2021447, TESTI2021463, TESTI2021531, TESTI2021599, TESTI2021637, TESTI2021654, TESTI2021667, TESTI2021736, TESTI2021785, TESTI2021819, TESTI2021851, TESTI2021895, TESTI2021911, TESTI2021939, TESTI2021999, TESTI2022010, TESTI2022023, TESTI2022065, TESTI2022086, TESTI2022179, TESTI2022203, TESTI2022246, TESTI2022323, TESTI2022338, TESTI2022400, TESTI2022462, TESTI2022495, TESTI2022623, TESTI2022649, TESTI2022652, TESTI2022738, TESTI2022798, TESTI2022812, TESTI2022814, TESTI2022874, TESTI2022940, TESTI2022952, TESTI2023025, TESTI2023033, TESTI2023053, TESTI2023085, TESTI2023192, TESTI2023194, TESTI2023214, TESTI2023254, TESTI2023386, TESTI2023414, TESTI2023427, TESTI2023436, TESTI2023599, TESTI2023752, TESTI2023800, TESTI2023861, TESTI2023903, TESTI2023942, TESTI2023947, TESTI2023951, TESTI2023968, TESTI2024009, TESTI2024090, TESTI2024125, TESTI2024153, TESTI2024192, TESTI2024267, TESTI2024283, TESTI2024299, TESTI2024419, TESTI2024422, TESTI2024443, TESTI2024446, TESTI2024473, TESTI2024476, TESTI2024498, TESTI2024560, TESTI2024567, TESTI2024586, TESTI2024598, TESTI2024641, TESTI2024648, TESTI2024718, TESTI2024744, TESTI2024844, TESTI2024885, TESTI2024936, TESTI2024978, TESTI2024999, TESTI2025006, TESTI2025013, TESTI2025022, TESTI2025063, TESTI2025117, TESTI2025144, TESTI2025161, TESTI2025174, TESTI2025229, TESTI2025269, TESTI2025365, TESTI2025403, TESTI2025409, TESTI2025422, TESTI2025448, TESTI2025486, TESTI2025546, TESTI2025582, TESTI2025609, TESTI2025656, TESTI2025757, TESTI2025791, TESTI2025846, TESTI2025872, TESTI2025879, TESTI2025911, TESTI2025920, TESTI2025924, TESTI2026014, TESTI2026024, TESTI2026064, TESTI2026077, TESTI2026104, TESTI2026116, TESTI2026134, TESTI2026168, TESTI2026196, TESTI2026215, TESTI2026218, TESTI2026233, TESTI2026291, TESTI2026294, TESTI2026401, TESTI2026403, TESTI2026453, TESTI2026461, TESTI2026491, TESTI2026505, TESTI2026515, TESTI2026534, TESTI2026537, TESTI2026589, TESTI2026597, TESTI2026605, TESTI2026647, TESTI2026674, TESTI2026794, TESTI2026824, TESTI2026854, TESTI2026925, TESTI2026936, TESTI2026957, TESTI2027013, TESTI2027019, TESTI2027108, TESTI2027165, TESTI2027171, TESTI2027173, TESTI2027179, TESTI2027185, TESTI2027206, TESTI2027238, TESTI2027239, TESTI2027243, TESTI2027271, TESTI2027296, TESTI2027378, TESTI2027411, TESTI2027450, TESTI2027503, TESTI2027562, TESTI2027615, TESTI2027645, TESTI2027730, TESTI2027736, TESTI2027791, TESTI2027820, TESTI2027828, TESTI2027840, TESTI2027909, TESTI2028098, TESTI2028151, TESTI2028242, TESTI2028253, TESTI2028254, TESTI2028269, TESTI2028290, TESTI2028296, TESTI2028384, TESTI2028426, TESTI2028488, TESTI2028523, TESTI2028583, TESTI2028613, TESTI2028659, TESTI2028662, TESTI2028670, TESTI2028705, TESTI2028776, TESTI2028811, TESTI2028891, TESTI2028985, TESTI2028997, TESTI2029131, TESTI2029162, TESTI2029196, TESTI2029201, TESTI2029227, TESTI2029244, TESTI2029249, TESTI2029252, TESTI2029259, TESTI2029264, TESTI2029470, TESTI2029672, TESTI2029785, TESTI2029880, TESTI2030136, TESTI2030322, TESTI2030336, TESTI2030342, TESTI2030519, TESTI2030554, TESTI2030556, TESTI2030728, TESTI2030754, TESTI2030770, TESTI2030860, TESTI2030901, TESTI2030917, TESTI2030930, TESTI2031006, TESTI2031007, TESTI2031060, TESTI2031129, TESTI2031356, TESTI2031418, TESTI2031504, TESTI2031529, TESTI2031687, TESTI2031760, TESTI2031809, TESTI2031919, TESTI2031935, TESTI2031986, TESTI2032044, TESTI2032067, TESTI2032079, TESTI2032643, TESTI2032681, TESTI2032761, TESTI2032768, TESTI2032774, TESTI2032828, TESTI2033031, TESTI2033242, TESTI2033254, TESTI2033300, TESTI2033395, TESTI2033441, TESTI2033453, TESTI2033505, TESTI2033520, TESTI2033641, TESTI2033710, TESTI2033905, TESTI2034187, TESTI2034243, TESTI2034249, TESTI2034307, TESTI2034357, TESTI2034401, TESTI2034407, TESTI2034506, TESTI2034520, TESTI2034718, TESTI2034730, TESTI2034749, TESTI2034767, TESTI2034774, TESTI2034777, TESTI2034785, TESTI2034799, TESTI2034847, TESTI2034913, TESTI2034916, TESTI2034931, TESTI2034953, TESTI2034997, TESTI2035003, TESTI2035078, TESTI2035084, TESTI2035107, TESTI2035121, TESTI2035124, TESTI2035183, TESTI2035236, TESTI2035262, TESTI2035309, TESTI2035688, TESTI2035775, TESTI2035793, TESTI2035898, TESTI2035962, TESTI2035981, TESTI2035997, TESTI2036114, TESTI2036129, TESTI2036285, TESTI2036288, TESTI2036513, TESTI2036589, TESTI2036650, TESTI2036684, TESTI2036691, TESTI2036736, TESTI2036822, TESTI2036833, TESTI2036913, TESTI2036922, TESTI2036951, TESTI2036965, TESTI2037002, TESTI2037055, TESTI2037081, TESTI2037085, TESTI2037103, TESTI2037106, TESTI2037111, TESTI2037209, TESTI2037255, TESTI2037359, TESTI2037375, TESTI2037382, TESTI2037534, TESTI2037569, TESTI2037572, TESTI2037643, TESTI2037657, TESTI2037673, TESTI2037723, TESTI2037819, TESTI2037830, TESTI2037845, TESTI2037877, TESTI2037976, TESTI2038048, TESTI2038065, TESTI2038104, TESTI2038275, TESTI2038388, TESTI2038573, TESTI2038596, TESTI2038623, TESTI2038644, TESTI2038733, TESTI2038858, TESTI2038958, TESTI2039025, TESTI2039026, TESTI2039038, TESTI2039041, TESTI2039060, TESTI2039113, TESTI2039121, TESTI2039177, TESTI2039209, TESTI2039225, TESTI2039227, TESTI2039276, TESTI2039342, TESTI2039353, TESTI2039544, TESTI2039613, TESTI2039707, TESTI2039732, TESTI2039738, TESTI2039776, TESTI2039867, TESTI2039908, TESTI2040018, TESTI2040094, TESTI2040102, TESTI2040128, TESTI2040143, TESTI2040297, TESTI2040372, TESTI2040377, TESTI2040424, TESTI2040642, TESTI2040815, TESTI2040897, TESTI2040944, TESTI2040964, TESTI2040983, TESTI2040989, TESTI2041330, TESTI2041362, TESTI2041517, TESTI2041564, TESTI2041664, TESTI2041730, TESTI2041734, TESTI2041778, TESTI2041800, TESTI2041947, TESTI2041956, TESTI2041976, TESTI2042062, TESTI2042149, TESTI2042264, TESTI2042295, TESTI2042302, TESTI2042326, TESTI2042400, TESTI2042450, TESTI2042473, TESTI2042507, TESTI2042508, TESTI2042750, TESTI2042783, TESTI2042806, TESTI2042928, TESTI2042946, TESTI2042958, TESTI2043275, TESTI2043277, TESTI2043282, TESTI2043313, TESTI2043477, TESTI2043585, TESTI2043758, TESTI2043817, TESTI2043857, TESTI2043866, TESTI2043869, TESTI2044064, TESTI2044118, TESTI2044194, TESTI2044276, TESTI2044306, TESTI2044309, TESTI2044413, TESTI2044418, TESTI2044754, TESTI2044788, TESTI2044796, TESTI2044833, TESTI2044892, TESTI2044920, TESTI2044968, TESTI2045139, TESTI2045155, TESTI2045171, TESTI2045199, TESTI2045353, TESTI2045509, TESTI2045562, TESTI2045611, TESTI2045819, TESTI2045850, TESTI2045920, TESTI2045964, TESTI2045983, TESTI2046100, TESTI2046188, TESTI2046347, TESTI2046352, TESTI2046358, TESTI2046439, TESTI2046535, TESTI2046536, TESTI2046552, TESTI2046569, TESTI2046686, TESTI2046721, TESTI2046732, TESTI2046786, TESTI2046797, TESTI2046863, TESTI2046872, TESTI2047071, TESTI2047141, TESTI2047147, TESTI2047153, TESTI2047212, TESTI2047342, TESTI2047383, TESTI2047605, TESTI2047792, TESTI2047801, TESTI2047818, TESTI2047824, TESTI2047885, TESTI2047930, TESTI2048105, TESTI2048109, TESTI2048465, TESTI2048603, TESTI2048898, TESTI2049041, TESTI2049062, TESTI2049206, TESTI2049246, TESTI2049277, TESTI2049422, TESTI2049452, TESTI2049469, TESTI2049553, TESTI2049576, TESTI2049857, TESTI2049956, TESTI2050137, TESTI2050681, TESTI2050780, TESTI2050987, TESTI2051148, TESTI2051177, TESTI2051279, TESTI2051488, TESTI2051543, TESTI2051627, TESTI2051742, TESTI2051767, TESTI2051791, TESTI2051806, TESTI2051867, TESTI2051873, TESTI2052110, TESTI2052202, TESTI2052211, TESTI2052256, TESTI2052288, TESTI2052525, TESTI2052670, TESTI2052693, TESTI2052698, TESTI2052799, TESTI2052822, TESTI2052985, TESTI2053151, TESTI2053242, TESTI2053399, TESTI2053526, TESTI2053561, TESTI2053621, TESTI2053667, TESTI3000002, TESTI3000005, TESTI4000068, TESTI4000079, TESTI4000093, TESTI4000134, TESTI4000137, TESTI4000153, TESTI4000155, TESTI4000157, TESTI4000183, TESTI4000214, TESTI4000215, TESTI4000228, TESTI4000250, TESTI4000288, TESTI4000319, TESTI4000349, TESTI4000370, TESTI4000394, TESTI4000434, TESTI4000462, TESTI4000530, TESTI4000534, TESTI4000598, TESTI4000600, TESTI4000621, TESTI4000703, TESTI4000724, TESTI4000957, TESTI4000970, TESTI4001036, TESTI4001037, TESTI4001060, TESTI4001106, TESTI4001148, TESTI4001176, TESTI4001195, TESTI4001201, TESTI4001206, TESTI4001348, TESTI4001441, TESTI4001467, TESTI4001473, TESTI4001517, TESTI4001527, TESTI4001561, TESTI4001569, TESTI4001604, TESTI4001665, TESTI4001679, TESTI4001795, TESTI4001923, TESTI4001925, TESTI4001984, TESTI4002003, TESTI4002141, TESTI4002195, TESTI4002202, TESTI4002290, TESTI4002319, TESTI4002491, TESTI4002520, TESTI4002552, TESTI4002647, TESTI4002703, TESTI4002754, TESTI4002868, TESTI4002878, TESTI4002889, TESTI4002988, TESTI4003150, TESTI4003179, TESTI4003279, TESTI4003319, TESTI4003404, TESTI4003565, TESTI4003574, TESTI4003579, TESTI4003602, TESTI4003733, TESTI4003796, TESTI4003944, TESTI4004003, TESTI4004031, TESTI4004200, TESTI4004210, TESTI4004539, TESTI4004653, TESTI4004695, TESTI4004722, TESTI4004887, TESTI4004917, TESTI4005015, TESTI4005039, TESTI4005133, TESTI4005158, TESTI4005317, TESTI4005322, TESTI4005399, TESTI4005470, TESTI4005500, TESTI4005534, TESTI4005543, TESTI4005628, TESTI4005801, TESTI4005805, TESTI4005961, TESTI4006053, TESTI4006079, TESTI4006112, TESTI4006137, TESTI4006148, TESTI4006219, TESTI4006234, TESTI4006308, TESTI4006326, TESTI4006393, TESTI4006407, TESTI4006412, TESTI4006420, TESTI4006441, TESTI4006473, TESTI4006539, TESTI4006546, TESTI4006567, TESTI4006704, TESTI4006728, TESTI4006802, TESTI4006819, TESTI4007064, TESTI4007163, TESTI4007176, TESTI4007203, TESTI4007239, TESTI4007369, TESTI4007373, TESTI4007382, TESTI4007404, TESTI4007489, TESTI4007565, TESTI4007671, TESTI4007775, TESTI4007778, TESTI4007799, TESTI4007810, TESTI4007816, TESTI4007965, TESTI4008007, TESTI4008018, TESTI4008050, TESTI4008058, TESTI4008086, TESTI4008097, TESTI4008176, TESTI4008209, TESTI4008219, TESTI4008250, TESTI4008302, TESTI4008305, TESTI4008401, TESTI4008417, TESTI4008429, TESTI4008573, TESTI4008797, TESTI4008816, TESTI4008840, TESTI4008935, TESTI4008993, TESTI4009022, TESTI4009028, TESTI4009034, TESTI4009123, TESTI4009160, TESTI4009215, TESTI4009283, TESTI4009306, TESTI4009374, TESTI4009406, TESTI4009457, TESTI4009501, TESTI4009563, TESTI4009608, TESTI4009638, TESTI4009752, TESTI4009881, TESTI4009886, TESTI4009928, TESTI4010076, TESTI4010082, TESTI4010095, TESTI4010211, TESTI4010377, TESTI4010475, TESTI4010544, TESTI4010713, TESTI4010721, TESTI4010789, TESTI4010817, TESTI4010831, TESTI4010902, TESTI4010928, TESTI4011070, TESTI4011072, TESTI4011084, TESTI4011118, TESTI4011246, TESTI4011484, TESTI4011505, TESTI4011532, TESTI4011616, TESTI4011744, TESTI4011745, TESTI4011829, TESTI4011926, TESTI4011956, TESTI4012010, TESTI4012086, TESTI4012258, TESTI4012293, TESTI4012329, TESTI4012382, TESTI4012406, TESTI4012448, TESTI4012451, TESTI4012505, TESTI4012556, TESTI4012623, TESTI4012646, TESTI4012679, TESTI4012911, TESTI4012956, TESTI4012960, TESTI4013365, TESTI4013369, TESTI4013410, TESTI4013474, TESTI4013602, TESTI4013667, TESTI4013675, TESTI4013685, TESTI4013735, TESTI4013742, TESTI4013774, TESTI4013817, TESTI4013830, TESTI4013852, TESTI4013894, TESTI4013924, TESTI4013960, TESTI4013962, TESTI4014159, TESTI4014265, TESTI4014276, TESTI4014306, TESTI4014392, TESTI4014415, TESTI4014445, TESTI4014553, TESTI4014661, TESTI4014694, TESTI4014801, TESTI4014818, TESTI4014891, TESTI4014908, TESTI4014924, TESTI4014932, TESTI4014977, TESTI4015012, TESTI4015129, TESTI4015145, TESTI4015263, TESTI4015293, TESTI4015299, TESTI4015339, TESTI4015398, TESTI4015442, TESTI4015471, TESTI4015477, TESTI4015600, TESTI4015646, TESTI4015681, TESTI4015688, TESTI4015790, TESTI4016110, TESTI4016238, TESTI4016551, TESTI4016812, TESTI4016822, TESTI4016865, TESTI4016882, TESTI4016925, TESTI4017001, TESTI4017116, TESTI4017137, TESTI4017229, TESTI4017254, TESTI4017269, TESTI4017380, TESTI4017382, TESTI4017543, TESTI4017575, TESTI4017647, TESTI4017714, TESTI4017763, TESTI4017848, TESTI4017854, TESTI4017901, TESTI4017961, TESTI4017984, TESTI4018101, TESTI4018152, TESTI4018208, TESTI4018382, TESTI4018436, TESTI4018506, TESTI4018555, TESTI4018751, TESTI4018806, TESTI4018835, TESTI4018859, TESTI4018881, TESTI4018886, TESTI4018938, TESTI4019140, TESTI4019149, TESTI4019299, TESTI4019417, TESTI4019440, TESTI4019566, TESTI4019657, TESTI4019756, TESTI4020092, TESTI4020102, TESTI4020342, TESTI4020460, TESTI4020596, TESTI4020806, TESTI4020819, TESTI4020920, TESTI4021129, TESTI4021197, TESTI4021294, TESTI4021377, TESTI4021456, TESTI4021491, TESTI4021569, TESTI4021713, TESTI4021821, TESTI4022158, TESTI4022577, TESTI4022716, TESTI4022873, TESTI4023096, TESTI4023172, TESTI4023546, TESTI4023555, TESTI4023654, TESTI4023722, TESTI4023762, TESTI4023942, TESTI4024096, TESTI4024240, TESTI4024245, TESTI4024294, TESTI4024344, TESTI4024387, TESTI4024420, TESTI4024494, TESTI4024740, TESTI4024874, TESTI4024890, TESTI4024907, TESTI4024930, TESTI4025062, TESTI4025268, TESTI4025401, TESTI4025494, TESTI4025547, TESTI4025731, TESTI4025797, TESTI4025865, TESTI4025908, TESTI4025920, TESTI4026079, TESTI4026080, TESTI4026192, TESTI4026207, TESTI4026295, TESTI4026390, TESTI4026456, TESTI4026510, TESTI4026524, TESTI4026680, TESTI4026700, TESTI4026762, TESTI4026785, TESTI4027139, TESTI4027170, TESTI4027262, TESTI4027516, TESTI4027557, TESTI4027660, TESTI4027821, TESTI4027969, TESTI4028042, TESTI4028059, TESTI4028062, TESTI4028182, TESTI4028429, TESTI4028612, TESTI4028692, TESTI4028809, TESTI4028823, TESTI4028880, TESTI4028904, TESTI4028938, TESTI4028958, TESTI4028983, TESTI4029023, TESTI4029348, TESTI4029370, TESTI4029528, TESTI4029651, TESTI4029671, TESTI4029676, TESTI4029690, TESTI4029731, TESTI4029743, TESTI4030069, TESTI4030159, TESTI4030319, TESTI4030505, TESTI4030603, TESTI4030669, TESTI4030673, TESTI4030864, TESTI4031066, TESTI4031173, TESTI4031335, TESTI4031745, TESTI4031818, TESTI4032090, TESTI4032112, TESTI4032128, TESTI4032270, TESTI4032375, TESTI4032834, TESTI4032856, TESTI4032895, TESTI4032913, TESTI4033146, TESTI4033177, TESTI4033433, TESTI4033690, TESTI4034172, TESTI4034212, TESTI4034432, TESTI4034495, TESTI4034632, TESTI4034633, TESTI4034912, TESTI4034973, TESTI4035063, TESTI4035065, TESTI4035498, TESTI4035508, TESTI4035581, TESTI4035602, TESTI4035637, TESTI4035649, TESTI4035770, TESTI4035872, TESTI4035895, TESTI4035898, TESTI4035989, TESTI4036012, TESTI4036042, TESTI4036048, TESTI4036315, TESTI4036319, TESTI4036449, TESTI4036767, TESTI4036909, TESTI4037066, TESTI4037188, TESTI4037228, TESTI4037244, TESTI4037727, TESTI4037949, TESTI4038047, TESTI4038099, TESTI4038156, TESTI4038223, TESTI4038258, TESTI4038284, TESTI4038339, TESTI4038492, TESTI4038721, TESTI4038758, TESTI4038779, TESTI4038818, TESTI4039038, TESTI4039086, TESTI4039451, TESTI4039575, TESTI4039659, TESTI4039744, TESTI4039904, TESTI4040197, TESTI4040363, TESTI4040535, TESTI4040559, TESTI4040598, TESTI4040800, TESTI4040804, TESTI4040939, TESTI4040956, TESTI4041049, TESTI4041053, TESTI4041086, TESTI4041099, TESTI4041143, TESTI4041482, TESTI4041519, TESTI4041624, TESTI4041629, TESTI4041832, TESTI4041844, TESTI4041903, TESTI4041954, TESTI4041984, TESTI4041985, TESTI4041986, TESTI4042098, TESTI4042420, TESTI4042440, TESTI4042444, TESTI4042711, TESTI4042846, TESTI4043067, TESTI4043129, TESTI4043166, TESTI4043203, TESTI4043223, TESTI4043371, TESTI4043378, TESTI4043512, TESTI4043551, TESTI4043710, TESTI4043947, TESTI4044035, TESTI4044076, TESTI4044084, TESTI4044123, TESTI4044186, TESTI4044234, TESTI4044291, TESTI4044296, TESTI4044300, TESTI4044682, TESTI4044704, TESTI4044770, TESTI4045168, TESTI4045312, TESTI4045330, TESTI4045470, TESTI4045701, TESTI4045908, TESTI4045955, TESTI4045982, TESTI4046073, TESTI4046090, TESTI4046240, TESTI4046245, TESTI4046253, TESTI4046282, TESTI4046328, TESTI4046450, TESTI4046457, TESTI4046487, TESTI4046502, TESTI4046523, TESTI4046819, TESTI4046873, TESTI4046884, TESTI4046896, TESTI4046903, TESTI4046962, TESTI4047069, TESTI4047119, TESTI4047305, TESTI4047328, TESTI4047437, TESTI4047569, TESTI4047746, TESTI4047808, THYMU1000010, THYMU1000025, THYMU1000029, THYMU1000032, THYMU1000033, THYMU1000060, THYMU1000074, THYMU1000083, THYMU1000098, THYMU1000105, THYMU1000109, THYMU1000136, THYMU1000142, THYMU1000158, THYMU1000176, THYMU1000179, THYMU1000191, THYMU1000198, THYMU1000217, THYMU1000240, THYMU1000242, THYMU1000291, THYMU1000316, THYMU1000318, THYMU1000329, THYMU1000331, THYMU1000336, THYMU1000366, THYMU1000382, THYMU1000393, THYMU1000394, THYMU1000399, THYMU1000426, THYMU1000428, THYMU1000440, THYMU1000459, THYMU1000473, THYMU1000491, THYMU1000496, THYMU1000527, THYMU1000532, THYMU1000536, THYMU1000554, THYMU1000558, THYMU1000576, THYMU1000600, THYMU1000677, THYMU1000692, THYMU2000022, THYMU2000032, THYMU2000057, THYMU2000120, THYMU2000138, THYMU2000140, THYMU2000155, THYMU2000162, THYMU2000171, THYMU2000176, THYMU2000179, THYMU2000231, THYMU2000236, THYMU2000276, THYMU2000280, THYMU2000300, THYMU2000317, THYMU2000368, THYMU2000369, THYMU2000418, THYMU2000440, THYMU2000489, THYMU2000492, THYMU2000519, THYMU2000570, THYMU2000602, THYMU2000660, THYMU2000671, THYMU2000702, THYMU2000767, THYMU2000775, THYMU2000800, THYMU2000879, THYMU2000932, THYMU2000950, THYMU2000971, THYMU2000982, THYMU2000990, THYMU2001007, THYMU2001018, THYMU2001053, THYMU2001071, THYMU2001090, THYMU2001139, THYMU2001195, THYMU2001202, THYMU2001203, THYMU2001256, THYMU2001270, THYMU2001291, THYMU2001314, THYMU2001325, THYMU2001357, THYMU2001381, THYMU2001422, THYMU2001443, THYMU2001515, THYMU2001521, THYMU2001556, THYMU2001622, THYMU2001727, THYMU2001819, THYMU2001825, THYMU2001839, THYMU2001868, THYMU2001898, THYMU2001900, THYMU2001916, THYMU2001989, THYMU2002023, THYMU2002037, THYMU2002080, THYMU2002109, THYMU2002147, THYMU2002154, THYMU2002157, THYMU2002177, THYMU2002203, THYMU2002229, THYMU2002242, THYMU2002338, THYMU2002356, THYMU2002376, THYMU2002384, THYMU2002490, THYMU2002548, THYMU2002695, THYMU2002745, THYMU2002789, THYMU2002792, THYMU2002815, THYMU2002852, THYMU2002910, THYMU2002950, THYMU2003046, THYMU2003069, THYMU2003107, THYMU2003124, THYMU2003133, THYMU2003166, THYMU2003232, THYMU2003242, THYMU2003249, THYMU2003270, THYMU2003282, THYMU2003287, THYMU2003336, THYMU2003366, THYMU2003397, THYMU2003440, THYMU2003470, THYMU2003479, THYMU2003499, THYMU2003632, THYMU2003650, THYMU2003700, THYMU2003760, THYMU2003803, THYMU2003855, THYMU2003907, THYMU2003932, THYMU2004003, THYMU2004008, THYMU2004042, THYMU2004108, THYMU2004111, THYMU2004123, THYMU2004139, THYMU2004169, THYMU2004284, THYMU2004320, THYMU2004336, THYMU2004356, THYMU2004508, THYMU2004512, THYMU2004635, THYMU2004639, THYMU2004668, THYMU2004677, THYMU2004688, THYMU2004693, THYMU2004835, THYMU2004843, THYMU2004906, THYMU2004986, THYMU2005001, THYMU2005003, THYMU2005046, THYMU2005134, THYMU2005156, THYMU2005190, THYMU2005225, THYMU2005240, THYMU2005246, THYMU2005270, THYMU2005283, THYMU2005303, THYMU2005321, THYMU2005356, THYMU2005369, THYMU2005439, THYMU2005480, THYMU2005482, THYMU2005507, THYMU2005545, THYMU2005574, THYMU2005576, THYMU2005748, THYMU2005759, THYMU2005807, THYMU2005815, THYMU2005855, THYMU2005881, THYMU2005948, THYMU2005980, THYMU2005997, THYMU2006001, THYMU2006048, THYMU2006098, THYMU2006160, THYMU2006170, THYMU2006252, THYMU2006261, THYMU2006277, THYMU2006303, THYMU2006324, THYMU2006350, THYMU2006357, THYMU2006365, THYMU2006420, THYMU2006468, THYMU2006610, THYMU2006666, THYMU2006712, THYMU2006913, THYMU2006946, THYMU2006965, THYMU2007025, THYMU2007036, THYMU2007060, THYMU2007065, THYMU2007095, THYMU2007146, THYMU2007179, THYMU2007258, THYMU2007307, THYMU2007308, THYMU2007339, THYMU2007350, THYMU2007384, THYMU2007467, THYMU2007493, THYMU2007521, THYMU2007528, THYMU2007530, THYMU2007532, THYMU2007561, THYMU2007571, THYMU2007635, THYMU2007658, THYMU2007667, THYMU2007694, THYMU2007725, THYMU2007824, THYMU2007854, THYMU2007886, THYMU2007952, THYMU2007969, THYMU2008035, THYMU2008036, THYMU2008049, THYMU2008072, THYMU2008111, THYMU2008145, THYMU2008149, THYMU2008185, THYMU2008191, THYMU2008207, THYMU2008226, THYMU2008282, THYMU2008321, THYMU2008339, THYMU2008350, THYMU2008351, THYMU2008383, THYMU2008452, THYMU2008643, THYMU2008686, THYMU2008691, THYMU2008714, THYMU2008725, THYMU2008781, THYMU2008799, THYMU2008876, THYMU2008910, THYMU2008917, THYMU2008928, THYMU2008990, THYMU2008994, THYMU2009023, THYMU2009046, THYMU2009101, THYMU2009104, THYMU2009134, THYMU2009157, THYMU2009181, THYMU2009186, THYMU2009338, THYMU2009425, THYMU2009516, THYMU2009526, THYMU2009546, THYMU2009592, THYMU2009596, THYMU2009792, THYMU2009835, THYMU2009906, THYMU2009948, THYMU2010030, THYMU2010041, THYMU2010046, THYMU2010059, THYMU2010082, THYMU2010094, THYMU2010161, THYMU2010192, THYMU2010448, THYMU2010519, THYMU2010637, THYMU2010671, THYMU2010699, THYMU2010705, THYMU2010779, THYMU2010816, THYMU2010831, THYMU2010848, THYMU2011053, THYMU2011063, THYMU2011072, THYMU2011096, THYMU2011118, THYMU2011142, THYMU2011183, THYMU2011257, THYMU2011259, THYMU2011295, THYMU2011308, THYMU2011390, THYMU2011431, THYMU2011447, THYMU2011538, THYMU2011548, THYMU2011551, THYMU2011564, THYMU2011573, THYMU2011585, THYMU2011621, THYMU2011666, THYMU2011785, THYMU2011806, THYMU2011852, THYMU2011875, THYMU2011881, THYMU2011937, THYMU2011939, THYMU2012002, THYMU2012073, THYMU2012104, THYMU2012113, THYMU2012273, THYMU2012401, THYMU2012492, THYMU2012507, THYMU2012565, THYMU2012574, THYMU2012625, THYMU2012631, THYMU2012665, THYMU2012690, THYMU2012701, THYMU2012807, THYMU2012826, THYMU2012882, THYMU2012891, THYMU2012902, THYMU2012919, THYMU2013023, THYMU2013047, THYMU2013051, THYMU2013089, THYMU2013170, THYMU2013364, THYMU2013386, THYMU2013426, THYMU2013578, THYMU2013648, THYMU2013705, THYMU2013757, THYMU2013779, THYMU2013863, THYMU2013950, THYMU2013981, THYMU2014067, THYMU2014068, THYMU2014183, THYMU2014204, THYMU2014297, THYMU2014323, THYMU2014327, THYMU2014353, THYMU2014492, THYMU2014500, THYMU2014599, THYMU2014762, THYMU2014777, THYMU2014801, THYMU2014901, THYMU2014923, THYMU2015019, THYMU2015161, THYMU2015316, THYMU2015321, THYMU2015439, THYMU2015441, THYMU2015479, THYMU2015775, THYMU2015825, THYMU2015918, THYMU2015943, THYMU2015984, THYMU2016113, THYMU2016164, THYMU2016204, THYMU2016219, THYMU2016360, THYMU2016496, THYMU2016523, THYMU2016840, THYMU2017008, THYMU2017010, THYMU2017023, THYMU2017085, THYMU2017099, THYMU2017158, THYMU2017162, THYMU2017215, THYMU2017362, THYMU2017366, THYMU2017398, THYMU2017449, THYMU2017479, THYMU2017522, THYMU2017526, THYMU2017675, THYMU2017707, THYMU2017831, THYMU2017844, THYMU2017878, THYMU2017948, THYMU2018071, THYMU2018126, THYMU2018189, THYMU2018197, THYMU2018384, THYMU2018455, THYMU2018547, THYMU2018565, THYMU2018639, THYMU2018673, THYMU2018721, THYMU2018772, THYMU2018819, THYMU2018841, THYMU2018997, THYMU2019021, THYMU2019054, THYMU2019197, THYMU2019210, THYMU2019364, THYMU2019436, THYMU2019442, THYMU2019587, THYMU2019599, THYMU2019686, THYMU2019813, THYMU2020198, THYMU2020289, THYMU2020416, THYMU2020491, THYMU2020499, THYMU2020560, THYMU2020667, THYMU2020830, THYMU2020883, THYMU2020959, THYMU2021361, THYMU2021509, THYMU2021597, THYMU2021684, THYMU2021714, THYMU2022213, THYMU2022289, THYMU2022660, THYMU2022854, THYMU2022922, THYMU2023209, THYMU2023264, THYMU2023576, THYMU2023711, THYMU2023900, THYMU2023943, THYMU2023967, THYMU2024071, THYMU2024121, THYMU2024185, THYMU2024207, THYMU2024616, THYMU2024684, THYMU2024748, THYMU2025042, THYMU2025189, THYMU2025319, THYMU2025325, THYMU2025406, THYMU2025557, THYMU2025572, THYMU2025707, THYMU2025849, THYMU2025909, THYMU2025939, THYMU2026182, THYMU2026350, THYMU2026530, THYMU2026531, THYMU2026835, THYMU2026904, THYMU2027053, THYMU2027168, THYMU2027249, THYMU2027282, THYMU2027497, THYMU2027695, THYMU2027734, THYMU2027894, THYMU2027975, THYMU2027996, THYMU2028041, THYMU2028368, THYMU2028379, THYMU2028394, THYMU2028412, THYMU2028629, THYMU2028632, THYMU2028724, THYMU2028739, THYMU2028942, THYMU2028978, THYMU2029134, THYMU2029578, THYMU2029676, THYMU2029688, THYMU2029788, THYMU2030068, THYMU2030226, THYMU2030264, THYMU2030462, THYMU2030543, THYMU2030637, THYMU2030655, THYMU2030796, THYMU2030912, THYMU2030982, THYMU2031046, THYMU2031139, THYMU2031218, THYMU2031249, THYMU2031258, THYMU2031341, THYMU2031368, THYMU2031579, THYMU2031847, THYMU2031890, THYMU2031994, THYMU2032014, THYMU2032035, THYMU2032080, THYMU2032150, THYMU2032155, THYMU2032358, THYMU2032437, THYMU2032601, THYMU2032655, THYMU2032696, THYMU2032715, THYMU2032732, THYMU2032825, THYMU2032976, THYMU2033053, THYMU2033059, THYMU2033070, THYMU2033079, THYMU2033085, THYMU2033104, THYMU2033227, THYMU2033263, THYMU2033308, THYMU2033401, THYMU2033583, THYMU2033755, THYMU2033787, THYMU2033816, THYMU2034182, THYMU2034279, THYMU2034314, THYMU2034338, THYMU2034647, THYMU2034917, THYMU2035064, THYMU2035078, THYMU2035101, THYMU2035319, THYMU2035321, THYMU2035388, THYMU2035400, THYMU2035554, THYMU2035710, THYMU2035735, THYMU2036058, THYMU2036105, THYMU2036207, THYMU2036252, THYMU2036265, THYMU2036366, THYMU2036459, THYMU2036461, THYMU2036604, THYMU2036653, THYMU2037081, THYMU2037208, THYMU2037226, THYMU2037233, THYMU2037234, THYMU2037348, THYMU2037406, THYMU2037965, THYMU2038058, THYMU2038189, THYMU2038199, THYMU2038220, THYMU2038301, THYMU2038369, THYMU2038389, THYMU2038615, THYMU2038636, THYMU2038739, THYMU2038772, THYMU2038797, THYMU2038906, THYMU2039305, THYMU2039315, THYMU2039334, THYMU2039350, THYMU2039411, THYMU2039634, THYMU2039719, THYMU2039780, THYMU2039788, THYMU2039989, THYMU2040029, THYMU2040110, THYMU2040114, THYMU2040140, THYMU2040412, THYMU2040427, THYMU2040824, THYMU2040925, THYMU2041007, THYMU2041015, THYMU2041252, THYMU3000028, THYMU3000036, THYMU3000037, THYMU3000082, THYMU3000194, THYMU3000224, THYMU3000269, THYMU3000306, THYMU3000360, THYMU3000390, THYMU3000420, THYMU3000490, THYMU3000504, THYMU3000542, THYMU3000655, THYMU3000776, THYMU3000826, THYMU3000841, THYMU3001082, THYMU3001083, THYMU3001133, THYMU3001151, THYMU3001379, THYMU3001472, THYMU3001593, THYMU3001883, THYMU3001939, THYMU3001991, THYMU3002452, THYMU3002578, THYMU3002661, THYMU3003007, THYMU3003092, THYMU3003212, THYMU3003309, THYMU3003350, THYMU3003403, THYMU3003565, THYMU3003763, THYMU3003865, THYMU3003958, THYMU3003965, THYMU3004157, THYMU3004628, THYMU3004632, THYMU3004835, THYMU3004866, THYMU3005050, THYMU3005378, THYMU3005407, THYMU3005415, THYMU3005427, THYMU3005482, THYMU3005491, THYMU3005629, THYMU3005696, THYMU3006118, THYMU3006132, THYMU3006168, THYMU3006172, THYMU3006371, THYMU3006485, THYMU3006640, THYMU3006767, THYMU3006811, THYMU3006963, THYMU3007137, THYMU3007308, THYMU3007368, THYMU3007423, THYMU3007559, THYMU3007845, THYMU3008060, THYMU3008105, THYMU3008136, THYMU3008171, THYMU3008216, THYMU3008436, THYMU3008672, THYMU3008883, THYMU3008935, THYMU3009006, THYMU3009255, THYMU3009391, THYMU3009643, THYMU3009755, THYMU3010247, THYMU3011012, THYMU3011081, THYMU3011244, THYMU3011360, THYMU3011534, THYMU3011543, THYMU3011556, THYMU3011717, THYMU3011827, THYMU3012402, THYMU3012907, THYMU3012983, THYMU3013114, THYMU3013197, THYMU3013241, THYMU3013470, THYMU3013785, THYMU3013897, THYMU3014038, THYMU3014173, THYMU3014372, THYMU3014555, THYMU3014620, THYMU3014701, THYMU3015042, THYMU3015457, THYMU3015571, THYMU3015592, THYMU3015625, THYMU3015647, THYMU3015962, THYMU3016022, THYMU3016518, THYMU3016797, THYMU3016822, THYMU3016850, THYMU3017562, THYMU3017688, THYMU3017689, THYMU3017761, THYMU3018151, THYMU3018896, THYMU3019095, THYMU3019476, THYMU3019605, THYMU3019916, THYMU3020221, THYMU3020595, THYMU3020713, THYMU3020856, THYMU3020869, THYMU3020970, THYMU3021404, THYMU3021586, THYMU3021755, THYMU3021900, THYMU3022211, THYMU3022434, THYMU3022528, THYMU3022668, THYMU3022982, THYMU3023107, THYMU3023211, THYMU3023216, THYMU3023394, THYMU3023400, THYMU3023797, THYMU3024164, THYMU3024339, THYMU3024602, THYMU3024879, THYMU3025118, THYMU3025313, THYMU3025642, THYMU3025683, THYMU3025772, THYMU3025865, THYMU3026000, THYMU3026350, THYMU3026479, THYMU3026532, THYMU3026783, THYMU3026869, THYMU3027251, THYMU3027540, THYMU3027655, THYMU3027671, THYMU3028075, THYMU3028410, THYMU3028461, THYMU3028702, THYMU3029188, THYMU3029318, THYMU3029421, THYMU3029719, THYMU3029774, THYMU3029832, THYMU3030072, THYMU3030231, THYMU3030706, THYMU3030710, THYMU3030752, THYMU3031146, THYMU3031402, THYMU3031610, THYMU3031612, THYMU3031868, THYMU3031878, THYMU3032032, THYMU3032867, THYMU3033402, THYMU3033630, THYMU3033649, THYMU3033754, THYMU3033759, THYMU3034078, THYMU3034099, THYMU3034453, THYMU3034616, THYMU3034671, THYMU3034853, THYMU3034867, THYMU3034983, THYMU3036200, THYMU3036310, THYMU3036934, THYMU3036953, THYMU3037052, THYMU3037192, THYMU3037617, THYMU3037772, THYMU3037827, THYMU3037836, THYMU3037856, THYMU3037867, THYMU3037909, THYMU3037980, THYMU3038158, THYMU3038167, THYMU3038214, THYMU3038266, THYMU3038328, THYMU3038347, THYMU3038375, THYMU3038603, THYMU3038687, THYMU3038759, THYMU3038879, THYMU3038970, THYMU3039807, THYMU3039846, THYMU3040068, THYMU3040126, THYMU3040146, THYMU3040168, THYMU3040172, THYMU3040725, THYMU3040746, THYMU3040816, THYMU3040829, THYMU3040830, THYMU3040986, THYMU3041354, THYMU3041386, THYMU3041428, THYMU3041573, THYMU3041603, THYMU3041736, THYMU3041918, THYMU3042075, THYMU3042321, THYMU3042372, THYMU3042758, THYMU3042929, THYMU3043200, THYMU3043327, THYMU3043482, THYMU3043597, THYMU3043688, THYMU3043779, THYMU3043883, THYMU3043993, THYMU3044175, THYMU3044188, THYMU3044441, THYMU3044445, THYMU3045510, THYMU3045673, THYMU3045692, THYMU3045704, THYMU3046140, THYMU3046350, THYMU3046360, THYMU3046856, THYMU3047115, THYMU3047144, THYMU3047156, THYMU3047366, THYMU3047513, THYMU3047542, THYMU3047760, THYMU3047891, TKIDN1000001, TKIDN1000044, TKIDN1000062, TKIDN1000066, TKIDN1000164, TKIDN1000171, TKIDN2000127, TKIDN2000240, TKIDN2000246, TKIDN2000319, TKIDN2000464, TKIDN2000521, TKIDN2000701, TKIDN2001529, TKIDN2001662, TKIDN2002318, TKIDN2002329, TKIDN2002424, TKIDN2002632, TKIDN2003044, TKIDN2003059, TKIDN2003062, TKIDN2003078, TKIDN2003366, TKIDN2003396, TKIDN2003413, TKIDN2003597, TKIDN2003601, TKIDN2004185, TKIDN2004386, TKIDN2004458, TKIDN2004748, TKIDN2005721, TKIDN2005934, TKIDN2005947, TKIDN2005956, TKIDN2006525, TKIDN2006761, TKIDN2006852, TKIDN2007605, TKIDN2007667, TKIDN2007828, TKIDN2008176, TKIDN2008778, TKIDN2009092, TKIDN2009330, TKIDN2009481, TKIDN2009794, TKIDN2009889, TKIDN2010200, TKIDN2010232, TKIDN2010278, TKIDN2010602, TKIDN2010812, TKIDN2010934, TKIDN2011051, TKIDN2011160, TKIDN2011324, TKIDN2012034, TKIDN2012771, TKIDN2012824, TKIDN2013134, TKIDN2013287, TKIDN2014570, TKIDN2014757, TKIDN2014771, TKIDN2014964, TKIDN2015025, TKIDN2015071, TKIDN2015161, TKIDN2015263, TKIDN2015285, TKIDN2015788, TKIDN2016309, TKIDN2016399, TKIDN2016846, TKIDN2018926, TKIDN2019116, TLIVE2000023, TLIVE2000142, TLIVE2000292, TLIVE2000762, TLIVE2001327, TLIVE2001616, TLIVE2001684, TLIVE2001828, TLIVE2001927, TLIVE2002336, TLIVE2002338, TLIVE2002562, TLIVE2002690, TLIVE2002882, TLIVE2003197, TLIVE2003200, TLIVE2003225, TLIVE2003381, TLIVE2003737, TLIVE2003961, TLIVE2003970, TLIVE2004110, TLIVE2004320, TLIVE2004331, TLIVE2004601, TLIVE2005180, TLIVE2005390, TLIVE2005516, TLIVE2005731, TLIVE2005866, TLIVE2006236, TLIVE2006359, TLIVE2006529, TLIVE2006621, TLIVE2006733, TLIVE2007000, TLIVE2007016, TLIVE2007132, TLIVE2007192, TLIVE2007528, TLIVE2007607, TLIVE2007736, TLIVE2007816, TLIVE2007919, TLIVE2008083, TLIVE2008213, TLIVE2008221, TLIVE2008229, TLIVE2008712, TLIVE2008797, TLIVE2009087, TLIVE2009163, TLIVE2009489, TLIVE2009541, TLUNG2000179, TOVAR2000476, TOVAR2000575, TOVAR2000649, TOVAR2000904, TOVAR2001281, TOVAR2001556, TOVAR2001730, TOVAR2002247, TOVAR2002514, TOVAR2002549, TOVAR2002800, TRACH1000018, TRACH1000038, TRACH1000057, TRACH1000074, TRACH1000100, TRACH1000106, TRACH1000125, TRACH1000140, TRACH1000144, TRACH1000193, TRACH1000205, TRACH1000212, TRACH1000240, TRACH2000002, TRACH2000015, TRACH2000024, TRACH2000032, TRACH2000045, TRACH2000047, TRACH2000081, TRACH2000083, TRACH2000148, TRACH2000185, TRACH2000196, TRACH2000235, TRACH2000237, TRACH2000243, TRACH2000250, TRACH2000259, TRACH2000272, TRACH2000282, TRACH2000287, TRACH2000289, TRACH2000306, TRACH2000312, TRACH2000336, TRACH2000393, TRACH2000411, TRACH2000420, TRACH2000472, TRACH2000496, TRACH2000497, TRACH2000502, TRACH2000522, TRACH2000540, TRACH2000665, TRACH2000675, TRACH2000677, TRACH2000702, TRACH2000703, TRACH2000767, TRACH2000775, TRACH2000807, TRACH2000862, TRACH2000873, TRACH2000894, TRACH2000898, TRACH2000923, TRACH2000944, TRACH2000981, TRACH2000986, TRACH2001037, TRACH2001060, TRACH2001085, TRACH2001101, TRACH2001121, TRACH2001147, TRACH2001154, TRACH2001188, TRACH2001192, TRACH2001249, TRACH2001275, TRACH2001335, TRACH2001339, TRACH2001341, TRACH2001347, TRACH2001395, TRACH2001400, TRACH2001403, TRACH2001416, TRACH2001474, TRACH2001525, TRACH2001532, TRACH2001549, TRACH2001592, TRACH2001596, TRACH2001607, TRACH2001621, TRACH2001646, TRACH2001651, TRACH2001684, TRACH2001898, TRACH2001933, TRACH2001968, TRACH2001996, TRACH2002043, TRACH2002054, TRACH2002092, TRACH2002138, TRACH2002333, TRACH2002664, TRACH2002784, TRACH2002840, TRACH2002847, TRACH2002853, TRACH2002862, TRACH2002954, TRACH2002960, TRACH2002988, TRACH2003070, TRACH2003323, TRACH2003484, TRACH2003516, TRACH2003605, TRACH2003736, TRACH2003759, TRACH2003941, TRACH2004039, TRACH2004054, TRACH2004087, TRACH2004109, TRACH2004170, TRACH2004183, TRACH2004251, TRACH2004292, TRACH2004336, TRACH2004399, TRACH2004428, TRACH2004458, TRACH2004499, TRACH2004521, TRACH2004570, TRACH2004845, TRACH2004887, TRACH2004950, TRACH2005004, TRACH2005017, TRACH2005066, TRACH2005159, TRACH2005314, TRACH2005444, TRACH2005541, TRACH2005666, TRACH2005698, TRACH2005710, TRACH2005720, TRACH2005769, TRACH2005796, TRACH2005800, TRACH2006015, TRACH2006049, TRACH2006097, TRACH2006194, TRACH2006327, TRACH2006331, TRACH2006378, TRACH2006387, TRACH2006528, TRACH2006670, TRACH2006762, TRACH2006866, TRACH2006870, TRACH2006918, TRACH2007059, TRACH2007324, TRACH2007358, TRACH2007399, TRACH2007483, TRACH2007542, TRACH2007577, TRACH2007674, TRACH2007676, TRACH2007688, TRACH2007733, TRACH2007754, TRACH2007894, TRACH2007969, TRACH2007988, TRACH2008112, TRACH2008113, TRACH2008127, TRACH2008130, TRACH2008278, TRACH2008478, TRACH2008540, TRACH2008583, TRACH2008597, TRACH2008716, TRACH2008820, TRACH2008891, TRACH2008921, TRACH2009006, TRACH2009060, TRACH2009107, TRACH2009123, TRACH2009268, TRACH2009291, TRACH2009310, TRACH2009340, TRACH2009348, TRACH2009358, TRACH2009661, TRACH2009730, TRACH2009743, TRACH2009754, TRACH2009851, TRACH2009862, TRACH2009934, TRACH2010159, TRACH2010218, TRACH2010251, TRACH2010272, TRACH2010317, TRACH2010419, TRACH2010451, TRACH2010505, TRACH2010587, TRACH2010600, TRACH2010634, TRACH2010639, TRACH2010677, TRACH2010698, TRACH2010771, TRACH2010824, TRACH2010883, TRACH2010965, TRACH2010974, TRACH2011057, TRACH2011093, TRACH2011290, TRACH2011293, TRACH2011302, TRACH2011500, TRACH2011574, TRACH2011956, TRACH2012000, TRACH2012138, TRACH2012242, TRACH2012298, TRACH2012370, TRACH2012376, TRACH2012387, TRACH2012497, TRACH2012536, TRACH2012562, TRACH2012742, TRACH2012811, TRACH2012823, TRACH2012918, TRACH2013081, TRACH2013265, TRACH2013369, TRACH2013450, TRACH2013495, TRACH2013585, TRACH2013671, TRACH2013726, TRACH2013902, TRACH2013928, TRACH2013982, TRACH2013991, TRACH2014018, TRACH2014045, TRACH2014046, TRACH2014082, TRACH2014268, TRACH2014284, TRACH2014337, TRACH2014356, TRACH2014371, TRACH2014442, TRACH2014483, TRACH2014495, TRACH2014544, TRACH2014573, TRACH2014725, TRACH2014760, TRACH2014815, TRACH2014839, TRACH2014938, TRACH2014950, TRACH2014972, TRACH2014974, TRACH2014997, TRACH2015180, TRACH2015243, TRACH2015316, TRACH2015381, TRACH2015486, TRACH2015654, TRACH2015824, TRACH2015939, TRACH2015987, TRACH2016080, TRACH2016131, TRACH2016286, TRACH2016317, TRACH2016347, TRACH2016380, TRACH2016384, TRACH2016410, TRACH2016481, TRACH2016498, TRACH2016533, TRACH2016551, TRACH2016554, TRACH2016651, TRACH2016690, TRACH2016709, TRACH2016722, TRACH2016835, TRACH2016980, TRACH2017086, TRACH2017368, TRACH2017498, TRACH2017609, TRACH2017949, TRACH2017965, TRACH2017980, TRACH2018034, TRACH2018084, TRACH2018262, TRACH2018273, TRACH2018278, TRACH2018317, TRACH2018345, TRACH2018380, TRACH2018449, TRACH2018512, TRACH2018646, TRACH2018663, TRACH2018718, TRACH2018835, TRACH2018882, TRACH2018914, TRACH2018950, TRACH2019024, TRACH2019046, TRACH2019080, TRACH2019151, TRACH2019154, TRACH2019176, TRACH2019248, TRACH2019309, TRACH2019425, TRACH2019473, TRACH2019602, TRACH2019661, TRACH2019672, TRACH2019673, TRACH2019844, TRACH2019879, TRACH2020048, TRACH2020336, TRACH2020525, TRACH2021398, TRACH2021622, TRACH2021635, TRACH2021964, TRACH2022042, TRACH2022113, TRACH2022253, TRACH2022425, TRACH2022553, TRACH2022649, TRACH2022839, TRACH2023246, TRACH2023306, TRACH2023416, TRACH2023479, TRACH2023684, TRACH2023860, TRACH2023876, TRACH2024139, TRACH2024187, TRACH2024271, TRACH2024293, TRACH2024408, TRACH2024512, TRACH2024559, TRACH2024647, TRACH2024651, TRACH2024730, TRACH2024735, TRACH2024749, TRACH2024821, TRACH2025057, TRACH2025084, TRACH2025155, TRACH2025224, TRACH2025344, TRACH2025379, TRACH2025507, TRACH2025569, TRACH2025705, TRACH2025749, TRACH2025753, TRACH2025810, TRACH2025853, TRACH2025911, TRACH2025932, TRACH3000014, TRACH3000017, TRACH3000043, TRACH3000134, TRACH3000180, TRACH3000342, TRACH3000420, TRACH3000515, TRACH3000530, TRACH3000548, TRACH3000558, TRACH3000586, TRACH3000692, TRACH3000780, TRACH3000892, TRACH3000926, TRACH3001119, TRACH3001443, TRACH3001550, TRACH3001759, TRACH3002064, TRACH3002107, TRACH3002168, TRACH3002188, TRACH3002245, TRACH3002293, TRACH3002533, TRACH3002561, TRACH3002567, TRACH3002605, TRACH3002650, TRACH3002866, TRACH3002871, TRACH3002876, TRACH3002890, TRACH3003009, TRACH3003037, TRACH3003357, TRACH3003379, TRACH3003547, TRACH3003586, TRACH3003683, TRACH3003780, TRACH3003805, TRACH3003832, TRACH3003872, TRACH3004113, TRACH3004288, TRACH3004303, TRACH3004412, TRACH3004424, TRACH3004456, TRACH3004537, TRACH3004596, TRACH3004651, TRACH3004652, TRACH3004671, TRACH3004721, TRACH3004747, TRACH3004760, TRACH3004783, TRACH3004786, TRACH3004840, TRACH3004931, TRACH3004934, TRACH3005072, TRACH3005085, TRACH3005102, TRACH3005173, TRACH3005191, TRACH3005211, TRACH3005274, TRACH3005294, TRACH3005479, TRACH3005549, TRACH3005699, TRACH3005702, TRACH3005808, TRACH3005852, TRACH3005896, TRACH3006038, TRACH3006149, TRACH3006228, TRACH3006264, TRACH3006336, TRACH3006379, TRACH3006392, TRACH3006395, TRACH3006397, TRACH3006412, TRACH3006470, TRACH3006589, TRACH3006626, TRACH3006699, TRACH3006717, TRACH3006800, TRACH3006889, TRACH3006985, TRACH3007097, TRACH3007268, TRACH3007274, TRACH3007277, TRACH3007391, TRACH3007479, TRACH3007541, TRACH3007595, TRACH3007627, TRACH3007689, TRACH3007766, TRACH3007866, TRACH3007995, TRACH3008042, TRACH3008061, TRACH3008093, TRACH3008201, TRACH3008508, TRACH3008535, TRACH3008629, TRACH3008632, TRACH3008688, TRACH3008697, TRACH3008713, TRACH3008887, TRACH3008902, TRACH3008990, TRACH3009001, TRACH3009008, TRACH3009059, TRACH3009061, TRACH3009148, TRACH3009455, TRACH3009701, TRACH3009715, TRACH3009894, TRACH3009956, TRACH3010079, TRACH3010167, TRACH3010331, TRACH3010342, TRACH3010382, TRACH3010757, TRACH3010901, TRACH3011004, TRACH3011082, TRACH3011184, TRACH3011282, TRACH3011313, TRACH3011454, TRACH3011485, TRACH3011503, TRACH3011538, TRACH3011542, TRACH3012106, TRACH3012161, TRACH3012232, TRACH3012261, TRACH3012445, TRACH3012460, TRACH3012659, TRACH3012718, TRACH3012864, TRACH3012891, TRACH3012942, TRACH3013043, TRACH3013072, TRACH3013426, TRACH3013454, TRACH3013558, TRACH3013684, TRACH3013693, TRACH3013700, TRACH3013766, TRACH3013900, TRACH3013926, TRACH3014063, TRACH3014183, TRACH3014215, TRACH3014316, TRACH3014415, TRACH3014580, TRACH3014641, TRACH3014885, TRACH3015136, TRACH3015336, TRACH3015346, TRACH3015354, TRACH3015467, TRACH3015626, TRACH3015951, TRACH3016051, TRACH3016120, TRACH3016264, TRACH3016277, TRACH3016368, TRACH3016455, TRACH3016614, TRACH3016805, TRACH3016992, TRACH3017171, TRACH3017409, TRACH3017934, TRACH3018108, TRACH3018191, TRACH3018240, TRACH3018261, TRACH3018519, TRACH3018524, TRACH3018606, TRACH3018783, TRACH3018907, TRACH3018933, TRACH3018943, TRACH3019018, TRACH3019058, TRACH3019142, TRACH3019290, TRACH3019347, TRACH3019370, TRACH3019447, TRACH3019598, TRACH3019621, TRACH3019662, TRACH3019807, TRACH3019924, TRACH3019977, TRACH3020137, TRACH3020410, TRACH3020563, TRACH3020605, TRACH3020750, TRACH3020769, TRACH3020928, TRACH3020930, TRACH3021023, TRACH3021066, TRACH3021212, TRACH3021335, TRACH3021373, TRACH3021544, TRACH3021778, TRACH3021834, TRACH3021883, TRACH3022170, TRACH3022198, TRACH3022296, TRACH3022482, TRACH3022732, TRACH3022758, TRACH3022875, TRACH3022910, TRACH3022960, TRACH3023063, TRACH3023203, TRACH3023242, TRACH3023373, TRACH3023516, TRACH3023752, TRACH3023945, TRACH3023960, TRACH3024020, TRACH3024081, TRACH3024342, TRACH3024423, TRACH3024428, TRACH3024512, TRACH3024671, TRACH3024823, TRACH3025302, TRACH3025316, TRACH3025346, TRACH3025520, TRACH3026148, TRACH3026283, TRACH3026299, TRACH3026303, TRACH3026542, TRACH3026650, TRACH3026676, TRACH3026744, TRACH3026949, TRACH3027229, TRACH3027527, TRACH3027681, TRACH3027701, TRACH3027885, TRACH3028031, TRACH3028164, TRACH3028180, TRACH3028195, TRACH3028441, TRACH3028597, TRACH3028678, TRACH3028837, TRACH3028847, TRACH3028855, TRACH3029139, TRACH3029329, TRACH3029451, TRACH3029462, TRACH3029520, TRACH3029592, TRACH3029629, TRACH3029665, TRACH3029670, TRACH3029800, TRACH3030111, TRACH3030130, TRACH3030176, TRACH3030252, TRACH3030725, TRACH3030855, TRACH3030883, TRACH3031316, TRACH3031400, TRACH3031463, TRACH3031479, TRACH3031518, TRACH3031660, TRACH3031678, TRACH3031936, TRACH3032044, TRACH3032065, TRACH3032150, TRACH3032372, TRACH3032480, TRACH3032570, TRACH3032755, TRACH3032827, TRACH3032873, TRACH3033535, TRACH3033680, TRACH3033868, TRACH3034145, TRACH3034414, TRACH3034488, TRACH3034680, TRACH3034731, TRACH3034745, TRACH3034762, TRACH3034903, TRACH3035187, TRACH3035199, TRACH3035235, TRACH3035451, TRACH3035482, TRACH3035526, TRACH3036004, TRACH3036103, TRACH3036193, TRACH3036207, TRACH3036278, TRACH3036309, TRACH3036456, TRACH3036609, TRACH3036638, TRACH3036683, TRACH3036750, TRACH3036792, TRACH3036843, TRACH3036897, TRACH3036932, TRACH3036942, TRACH3036997, TRACH3037063, TRACH3037067, TRACH3037267, TRACH3037288, TRACH3037505, TRACH3037573, TRACH3037696, TRACH3037897, TRACH3038086, TRACH3038399, TSTOM1000135, TSTOM1000186, TSTOM2000139, TSTOM2000235, TSTOM2000315, TSTOM2000442, TSTOM2000553, TSTOM2000569, TSTOM2000588, TSTOM2001195, TSTOM2001274, TSTOM2001571, TSTOM2001996, TSTOM2002265, TSTOM2002505, TSTOM2002561, TSTOM2002611, TSTOM2002672, TSTOM2002682, TUTER1000014, TUTER1000122, TUTER1000137, TUTER2000057, TUTER2000283, TUTER2000425, TUTER2000916, TUTER2001286, TUTER2001341, TUTER2001387, TUTER2001433, TUTER2001461, TUTER2002028, TUTER2002074, TUTER2002158, TUTER2002228, TUTER2002323, TUTER2002356, TUTER2002729, UMVEN1000122, UMVEN1000143, UMVEN1000186, UMVEN2000046, UMVEN2000069, UMVEN2000121, UMVEN2000133, UMVEN2000354, UTERU1000008, UTERU1000015, UTERU1000024, UTERU1000031, UTERU1000032, UTERU1000057, UTERU1000065, UTERU1000077, UTERU1000093, UTERU1000096, UTERU1000109, UTERU1000131, UTERU1000138, UTERU1000148, UTERU1000160, UTERU1000183, UTERU1000187, UTERU1000192, UTERU1000249, UTERU1000337, UTERU1000339, UTERU1000384, UTERU2000023, UTERU2000047, UTERU2000074, UTERU2000099, UTERU2000154, UTERU2000218, UTERU2000238, UTERU2000243, UTERU2000260, UTERU2000263, UTERU2000329, UTERU2000332, UTERU2000338, UTERU2000349, UTERU2000377, UTERU2000393, UTERU2000418, UTERU2000465, UTERU2000485, UTERU2000517, UTERU2000524, UTERU2000537, UTERU2000539, UTERU2000541, UTERU2000546, UTERU2000550, UTERU2000569, UTERU2000607, UTERU2000629, UTERU2000649, UTERU2000663, UTERU2000696, UTERU2000794, UTERU2000830, UTERU2000844, UTERU2000922, UTERU2000925, UTERU2001024, UTERU2001110, UTERU2001176, UTERU2001281, UTERU2001389, UTERU2001409, UTERU2001412, UTERU2001504, UTERU2001658, UTERU2001747, UTERU2001876, UTERU2002001, UTERU2002011, UTERU2002176, UTERU2002198, UTERU2002332, UTERU2002410, UTERU2002473, UTERU2002547, UTERU2002693, UTERU2002733, UTERU2002736, UTERU2002737, UTERU2002826, UTERU2002841, UTERU2002964, UTERU2002993, UTERU2003035, UTERU2003057, UTERU2003126, UTERU2003135, UTERU2003321, UTERU2003399, UTERU2003411, UTERU2003456, UTERU2003577, UTERU2003704, UTERU2003926, UTERU2003973, UTERU2004015, UTERU2004037, UTERU2004039, UTERU2004061, UTERU2004073, UTERU2004163, UTERU2004197, UTERU2004299, UTERU2004520, UTERU2004564, UTERU2004.688, UTERU2004698, UTERU2004861, UTERU2005004, UTERU2005050, UTERU2005069, UTERU2005074, UTERU2005179, UTERU2005292, UTERU2005346, UTERU2005354, UTERU2005446, UTERU2005449, UTERU2005450, UTERU2005533, UTERU2005593, UTERU2005601, UTERU2005664, UTERU2005822, UTERU2005903, UTERU2005905, UTERU2006103, UTERU2006115, UTERU2006182, UTERU2006400, UTERU2006412, UTERU2006429, UTERU2006486, UTERU2006524, UTERU2006547, UTERU2006568, UTERU2006593, UTERU2006643, UTERU2006651, UTERU2006705, UTERU2006899, UTERU2007004, UTERU2007075, UTERU2007081, UTERU2007128, UTERU2007267, UTERU2007444, UTERU2007499, UTERU2007639, UTERU2007724, UTERU2007924, UTERU2007942, UTERU2008018, UTERU2008019, UTERU2008027, UTERU2008040, UTERU2008077, UTERU2008130, UTERU2008302, UTERU2008347, UTERU2008426, UTERU2008516, UTERU2008561, UTERU2008653, UTERU2008705, UTERU2008707, UTERU2008747, UTERU2008785, UTERU2008845, UTERU2008901, UTERU2008930, UTERU2008938, UTERU2008939, UTERU2008962, UTERU2009094, UTERU2009120, UTERU2009131, UTERU2009147, UTERU2009206, UTERU2009283, UTERU2009335, UTERU2009414, UTERU2009435, UTERU2009483, UTERU2009538, UTERU2009540, UTERU2009776, UTERU2009904, UTERU2009951, UTERU2010115, UTERU2010124, UTERU2010164, UTERU2010226, UTERU2010231, UTERU2010304, UTERU2010320, UTERU2010431, UTERU2010525, UTERU2010651, UTERU2010724, UTERU2010747, UTERU2011195, UTERU2011199, UTERU2011220, UTERU2011261, UTERU2011287, UTERU2011410, UTERU2011574, UTERU2011621, UTERU2011657, UTERU2011741, UTERU2011806, UTERU2011811, UTERU2011897, UTERU2011962, UTERU2011968, UTERU2012031, UTERU2012101, UTERU2012114, UTERU2012252, UTERU2012333, UTERU2012407, UTERU2012526, UTERU2012581, UTERU2012610, UTERU2012615, UTERU2012688, UTERU2012703, UTERU2012715, UTERU2012741, UTERU2012767, UTERU2012786, UTERU2012856, UTERU2012890, UTERU2012938, UTERU2012976, UTERU2013048, UTERU2013231, UTERU2013262, UTERU2013280, UTERU2013322, UTERU2013483, UTERU2013491, UTERU2013502, UTERU2013926, UTERU2013976, UTERU2014001, UTERU2014024, UTERU2014223, UTERU2014398, UTERU2014601, UTERU2014631, UTERU2014678, UTERU2014728, UTERU2014898, UTERU2014998, UTERU2015062, UTERU2015087, UTERU2015108, UTERU2015190, UTERU2015198, UTERU2015202, UTERU2015405, UTERU2015640, UTERU2015830, UTERU2015880, UTERU2016147, UTERU2016157, UTERU2016426, UTERU2016464, UTERU2016669, UTERU2016757, UTERU2016761, UTERU2016822, UTERU2016896, UTERU2016902, UTERU2016979, UTERU2016981, UTERU2017123, UTERU2017303, UTERU2017421, UTERU2017492, UTERU2017623, UTERU2017632, UTERU2017761, UTERU2017762, UTERU2017810, UTERU2017988, UTERU2018127, UTERU2018180, UTERU2018200, UTERU2018333, UTERU2018364, UTERU2018514, UTERU2018522, UTERU2018523, UTERU2018544, UTERU2018566, UTERU2018609, UTERU2018674, UTERU2018712, UTERU2018784, UTERU2018789, UTERU2018811, UTERU2018867, UTERU2018881, UTERU2018884, UTERU2018955, UTERU2019038, UTERU2019096, UTERU2019163, UTERU2019257, UTERU2019453, UTERU2019491, UTERU2019534, UTERU2019681, UTERU2019706, UTERU2019710, UTERU2019940, UTERU2019959, UTERU2019964, UTERU2020226, UTERU2020242, UTERU2020292, UTERU2020351, UTERU2020491, UTERU2020718, UTERU2021163, UTERU2021380, UTERU2021649, UTERU2021820, UTERU2022020, UTERU2022773, UTERU2022955, UTERU2022981, UTERU2023039, UTERU2023045, UTERU2023262, UTERU2023550, UTERU2023651, UTERU2023687, UTERU2023712, UTERU2023941, UTERU2024002, UTERU2024042, UTERU2024141, UTERU2024481, UTERU2024656, UTERU2024758, UTERU2024820, UTERU2024881, UTERU2024969, UTERU2025025, UTERU2025041, UTERU2025301, UTERU2025366, UTERU2025415, UTERU2025579, UTERU2025645, UTERU2025891, UTERU2026025, UTERU2026090, UTERU2026142, UTERU2026203, UTERU2026775, UTERU2027023, UTERU2027591, UTERU2027616, UTERU2027941, UTERU2028377, UTERU2028734, UTERU2029503, UTERU2029660, UTERU2029742, UTERU2029953, UTERU2030213, UTERU2030270, UTERU2030280, UTERU2031060, UTERU2031084, UTERU2031268, UTERU2031295, UTERU2031521, UTERU2031611, UTERU2031703, UTERU2031834, UTERU2031851, UTERU2032075, UTERU2032220, UTERU2032279, UTERU2032726, UTERU2033172, UTERU2033375, UTERU2033382, UTERU2033420, UTERU2033530, UTERU2033577, UTERU2034053, UTERU2034147, UTERU2034695, UTERU2035114, UTERU2035187, UTERU2035231, UTERU2035306, UTERU2035323, UTERU2035328, UTERU2035331, UTERU2035452, UTERU2035469, UTERU2035503, UTERU2035745, UTERU2035908, UTERU2035926, UTERU2035978, UTERU2036089, UTERU2036347, UTERU2036507, UTERU2036512, UTERU2036530, UTERU2036623, UTERU2036690, UTERU2037224, UTERU2037361, UTERU2037423, UTERU2037577, UTERU2037674, UTERU2037791, UTERU2037843, UTERU2038171, UTERU2038251, UTERU3000226, UTERU3000298, UTERU3000402, UTERU3000645, UTERU3000665, UTERU3000670, UTERU3000727, UTERU3000738, UTERU3000828, UTERU3000844, UTERU3000899, UTERU3000959, UTERU3001029, UTERU3001053, UTERU3001059, UTERU3001158, UTERU3001240, UTERU3001394, UTERU3001542, UTERU3001558, UTERU3001571, UTERU3001585, UTERU3001632, UTERU3001652, UTERU3001766, UTERU3001988, UTERU3002209, UTERU3002218, UTERU3002383, UTERU3002600, UTERU3002620, UTERU3002667, UTERU3002701, UTERU3002731, UTERU3002768, UTERU3002786, UTERU3002993, UTERU3003116, UTERU3003135, UTERU3003178, UTERU3003465, UTERU3003495, UTERU3003523, UTERU3003660, UTERU3003774, UTERU3003776, UTERU3004384, UTERU3004418, UTERU3004477, UTERU3004523, UTERU3004616, UTERU3004635, UTERU3004709, UTERU3004938, UTERU3004992, UTERU3005049, UTERU3005159, UTERU3005205, UTERU3005230, UTERU3005264, UTERU3005422, UTERU3005460, UTERU3005536, UTERU3005585, UTERU3005767, UTERU3005907, UTERU3005970, UTERU3006008, UTERU3006228, UTERU3006308, UTERU3006538, UTERU3006640, UTERU3006687, UTERU3006720, UTERU3006798, UTERU3006884, UTERU3007021, UTERU3007104, UTERU3007108, UTERU3007134, UTERU3007419, UTERU3007640, UTERU3007731, UTERU3007913, UTERU3008280, UTERU3008463, UTERU3008660, UTERU3008671, UTERU3008722, UTERU3008917, UTERU3009259, UTERU3009490, UTERU3009517, UTERU3009690, UTERU3009775, UTERU3009871, UTERU3009979, UTERU3009987, UTERU3010029, UTERU3010409, UTERU3010526, UTERU3010604, UTERU3010892, UTERU3010919, UTERU3011063, UTERU3011092, UTERU3011273, UTERU3011398, UTERU3011558, UTERU3011579, UTERU3011795, UTERU3011837, UTERU3012293, UTERU3012414, UTERU3012476, UTERU3012599, UTERU3012999, UTERU3013167, UTERU3013302, UTERU3013781, UTERU3014274, UTERU3014446, UTERU3014611, UTERU3014647, UTERU3014791, UTERU3014906, UTERU3015086, UTERU3015299, UTERU3015412, UTERU3015500, UTERU3015647, UTERU3015844, UTERU3016070, UTERU3016273, UTERU3016274, UTERU3016308, UTERU3016789, UTERU3017176, UTERU3017441, UTERU3017626, UTERU3017995, UTERU3018154, UTERU3018172, UTERU3018255, UTERU3018616, UTERU3018711, UTERU3019078

[0759] Of the 17,176 genes that include the cDNAs of the present invention, genes whose expression levels were high enough to detect in each of the FEHRT, FEKID, FELIV, FELNG, HCASM, HCHON, and HEART libraries were analyzed for expression frequency. The analysis results are described below. Each is a relative value, where the expression level over all tissues is taken as 100. The larger this value, the greater the level of expression.

TABLE 31

| Clone Name | FEHRT | FEKID | FELIV | FELNG | HCASM | HCHON | HEART |
|---|---|---|---|---|---|---|---|
| 3NB691000129 | 0 | 0 | 0 | 0 | 0 | 15.976 | 0 |
| 3NB691000173 | 0 | 0 | 0 | 0 | 10.485 | 0 | 0 |
| 3NB692000281 | 0 | 4.762 | 0 | 0 | 1.462 | 0 | 0 |
| 3NB692000912 | 0 | 10.163 | 0 | 0 | 0 | 0 | 0 |
| 3NB692001002 | 0 | 42.320 | 0 | 0 | 0 | 0 | 0 |
| 3NB692001022 | 0 | 0 | 0 | 0 | 0 | 7.873 | 0 |
| 3NB692001334 | 0 | 5.806 | 0 | 0 | 0 | 0 | 0 |
| 3NB692001528 | 0 | 50.886 | 0 | 0 | 0 | 0 | 0 |
| ADRGL2000006 | 0 | 0 | 0 | 0 | 0 | 0 | 6.935 |
| ADRGL2000097 | 0 | 0 | 0 | 0 | 0 | 14.068 | 0 |
| ADRGL2010152 | 0 | 0 | 0 | 0 | 0 | 36.653 | 0 |
| ASTRO1000165 | 0 | 0 | 0 | 0 | 14.716 | 0 | 0 |
| ASTRO2000046 | 0 | 0 | 0 | 0 | 0 | 2.582 | 0 |
| ASTRO2000662 | 0 | 0 | 0 | 0 | 53.551 | 0 | 0 |
| ASTRO2001076 | 0 | 0 | 0 | 0 | 9.437 | 0 | 0 |
| ASTRO2001806 | 0 | 0 | 0 | 0 | 9.499 | 0 | 0 |
| ASTRO2001823 | 0 | 0 | 0 | 0 | 0 | 0 | 9.684 |
| ASTRO2003024 | 0 | 0 | 0 | 0 | 0 | 0 | 6.323 |
| ASTRO2003632 | 0 | 0 | 0 | 0 | 0 | 2.629 | 0 |
| ASTRO2013585 | 0 | 0 | 0 | 0 | 3.237 | 3.085 | 0 |
| ASTRO2014863 | 0 | 0 | 0 | 0 | 0 | 21.377 | 0 |
| ASTRO2015328 | 0 | 0 | 0 | 0 | 0 | 24.081 | 0 |
| ASTRO2016491 | 0 | 0 | 0 | 10.830 | 0 | 0 | 0 |
| BGGI12000054 | 0 | 0 | 0 | 0 | 0 | 2.981 | 0 |
| BGGI12000693 | 0 | 40.832 | 0 | 0 | 0 | 0 | 0 |
| BGGI12000839 | 0 | 15.951 | 0 | 0 | 0 | 0 | 0 |
| BGGI12001097 | 0 | 0 | 0 | 0 | 7.461 | 0 | 7.497 |
| BNGH41000177 | 0 | 0 | 0 | 0 | 0 | 0 | 46.383 |
| BNGH42000360 | 0 | 0 | 50.470 | 0 | 0 | 0 | 5.247 |
| BNGH42001247 | 0 | 0 | 0 | 0 | 0 | 33.288 | 0 |
| BNGH42001576 | 0 | 0 | 0 | 0 | 32.396 | 0 | 0 |
| BNGH42005968 | 0 | 0 | 0 | 0 | 15.250 | 0 | 0 |
| BNGH42007460 | 0 | 0 | 0 | 0 | 0 | 6.376 | 0 |
| BNGH42007709 | 0 | 0 | 0 | 0 | 0 | 1.456 | 0 |
| BRACE1000042 | 0 | 0 | 0 | 0 | 0 | 0 | 30.466 |
| BRACE1000070 | 37.227 | 0 | 0 | 0 | 0 | 0 | 0 |
| BRACE1000115 | 0 | 0 | 0 | 0 | 0 | 0 | 1.249 |
| BRACE1000131 | 0 | 0 | 0 | 0 | 0 | 6.591 | 0 |
| BRACE1000186 | 0 | 0 | 0 | 0 | 0 | 13.681 | 0 |
| BRACE2000078 | 0 | 96.823 | 0 | 0 | 0 | 0 | 0 |
| BRACE2000148 | 0 | 0 | 0 | 76.780 | 0 | 0 | 0 |
| BRACE2000307 | 0 | 25.479 | 0 | 0 | 0 | 0 | 0 |
| BRACE2000332 | 0 | 0 | 0 | 0 | 0 | 0 | 18.109 |
| BRACE2001497 | 0 | 0 | 0 | 0 | 0 | 11.791 | 0 |
| BRACE2001855 | 0 | 0 | 0 | 49.493 | 0 | 0 | 0 |
| BRACE2001859 | 0 | 0 | 0 | 0 | 90.342 | 0 | 0 |
| BRACE2001971 | 0 | 0 | 0 | 0 | 14.892 | 0 | 0 |
| BRACE2002392 | 0 | 0 | 0 | 0 | 11.444 | 0 | 0 |
| BRACE2003172 | 0 | 0 | 0 | 0 | 4.316 | 0 | 0 |
| BRACE2003304 | 0 | 47.291 | 0 | 0 | 0 | 0 | 0 |
| BRACE2003825 | 0 | 0 | 0 | 0 | 90.342 | 0 | 0 |
| BRACE2003827 | 0 | 0 | 0 | 0 | 5.817 | 5.544 | 0 |
| BRACE2005087 | 0 | 0 | 0 | 0 | 0 | 6.564 | 0 |
| BRACE2005363 | 0 | 0 | 0 | 0 | 0 | 89.914 | 0 |
| BRACE2005937 | 0 | 0 | 0 | 0 | 40.104 | 0 | 0 |
| BRACE2006537 | 0 | 0 | 0 | 0 | 7.146 | 0 | 0 |
| BRACE2006900 | 0 | 11.130 | 0 | 0 | 0 | 0 | 0 |
| BRACE2006944 | 0 | 0 | 0 | 0 | 0 | 0 | 77.811 |
| BRACE2007798 | 0 | 0 | 0 | 0 | 0 | 0 | 13.801 |
| BRACE2008653 | 0 | 0 | 0 | 0 | 0 | 0 | 3.518 |
| BRACE2008968 | 0 | 0 | 0 | 12.505 | 3.861 | 0 | 0 |
| BRACE2009037 | 0 | 0 | 0 | 0 | 1.939 | 5.543 | 0 |
| BRACE2010336 | 0 | 0 | 0 | 0 | 90.342 | 0 | 0 |
| BRACE2012528 | 0 | 0 | 0 | 0 | 0 | 0 | 6.328 |
| BRACE2012814 | 0 | 33.171 | 0 | 0 | 10.181 | 0 | 10.230 |
| BRACE2013855 | 0 | 0 | 0 | 0 | 0 | 0 | 53.511 |
| BRACE2017397 | 0 | 0 | 0 | 0 | 0 | 14.924 | 0 |
| BRACE2018337 | 0 | 0 | 0 | 0 | 0 | 0 | 15.890 |
| BRACE2039624 | 0 | 0 | 0 | 0 | 0 | 6.122 | 0 |
| BRACE3004371 | 0 | 0 | 0 | 0 | 0 | 0 | 25.063 |
| BRALZ2009482 | 0 | 0 | 0 | 0 | 0 | 0 | 2.479 |
| BRAMY2000354 | 0 | 29.725 | 0 | 0 | 0 | 0 | 0 |
| BRAMY2000411 | 0 | 0 | 0 | 0 | 41.151 | 0 | 0 |
| BRAMY2007287 | 0 | 0 | 0 | 0 | 0 | 0 | 71.484 |
| BRAMY2012536 | 0 | 0 | 0 | 0 | 0 | 0 | 3.851 |
| BRAMY2016325 | 0 | 0 | 0 | 0 | 0 | 23.841 | 0 |
| BRAMY2020427 | 12.330 | 0 | 0 | 12.734 | 0 | 0 | 0 |
| BRAMY2024827 | 0 | 43.154 | 0 | 0 | 0 | 0 | 0 |
| BRAMY2027739 | 0 | 0 | 0 | 28.942 | 0 | 0 | 0 |
| BRAMY2028740 | 0 | 20.139 | 0 | 0 | 0 | 0 | 0 |
| BRAMY2028796 | 30.954 | 0 | 0 | 0 | 9.869 | 0 | 0 |
| BRAMY2040095 | 0 | 0 | 0 | 0 | 2.270 | 0 | 0 |
| BRAMY2040592 | 0 | 0 | 0 | 0 | 0 | 0 | 23.231 |
| BRAMY3004377 | 0 | 0 | 0 | 0 | 15.507 | 0 | 0 |
| BRAMY3010008 | 0 | 12.590 | 0 | 0 | 0 | 0 | 0 |
| BRAWH1000037 | 0 | 0 | 0 | 0 | 0 | 0 | 12.165 |
| BRAWH1000040 | 0 | 0 | 0 | 0 | 0 | 4.354 | 0 |
| BRAWH2000169 | 0 | 0 | 0 | 0 | 69.985 | 0 | 0 |
| BRAWH2000177 | 0 | 0 | 0 | 0 | 0 | 50.592 | 0 |
| BRAWH2000588 | 0 | 0 | 0 | 0 | 8.330 | 0 | 0 |
| BRAWH2000636 | 0 | 0 | 0 | 11.365 | 0 | 0 | 0 |
| BRAWH2000839 | 0 | 0 | 0 | 8.833 | 0 | 0 | 0 |
| BRAWH2000924 | 5.976 | 0 | 0 | 0 | 1.905 | 0 | 0 |
| BRAWH2001019 | 0 | 0 | 0 | 0 | 0 | 0 | 15.215 |
| BRAWH2001092 | 3.660 | 0 | 0 | 0 | 0 | 1.112 | 1.173 |
| BRAWH2001671 | 0 | 0 | 0 | 0 | 0 | 0 | 25.367 |
| BRAWH2002963 | 0 | 0 | 0 | 0 | 0 | 0 | 79.600 |
| BRAWH2005068 | 0 | 8.701 | 0 | 0 | 0 | 2.545 | 0 |
| BRAWH2008706 | 0 | 0 | 0 | 0 | 19.092 | 0 | 0 |
| BRAWH2009304 | 0 | 0 | 0 | 0 | 0 | 0 | 26.166 |
| BRAWH2009307 | 0 | 0 | 0 | 0 | 0 | 0 | 13.283 |
| BRAWH2012077 | 0 | 0 | 0 | 0 | 0 | 79.280 | 0 |
| BRAWH2014645 | 0 | 0 | 0 | 0 | 7.019 | 0 | 0 |
| BRAWH2017685 | 0 | 10.978 | 0 | 0 | 3.370 | 0 | 0 |
| BRAWH2018526 | 0 | 0 | 0 | 0 | 2.043 | 0 | 2.053 |
| BRAWH3002853 | 0 | 0 | 0 | 0 | 0 | 4.680 | 0 |
| BRAWH3024989 | 0 | 0 | 0 | 0 | 15.730 | 0 | 0 |
| BRCAN1000168 | 0 | 0 | 0 | 0 | 0 | 0 | 9.411 |
| BRCAN2002173 | 0 | 0 | 0 | 42.766 | 0 | 0 | 0 |
| BRCAN2003814 | 90.076 | 0 | 0 | 0 | 0 | 0 | 0 |
| BRCAN2003944 | 0 | 0 | 0 | 0 | 1.870 | 3.564 | 0 |
| BRCAN2026197 | 0 | 0 | 0 | 0 | 10.366 | 0 | 0 |
| BRCAN2028036 | 0 | 0 | 0 | 0 | 16.030 | 0 | 0 |
| BRCOC1000094 | 0 | 0 | 0 | 0 | 6.322 | 0 | 0 |
| BRCOC2003187 | 0 | 34.023 | 0 | 0 | 0 | 0 | 0 |
| BRCOC2018775 | 0 | 0 | 0 | 0 | 0 | 64.108 | 0 |
| BRHIP2000534 | 0 | 0 | 0 | 0 | 2.272 | 2.166 | 0 |
| BRHIP2007305 | 0 | 0 | 0 | 0 | 7.516 | 0 | 0 |
| BRHIP2011491 | 0 | 0 | 0 | 0 | 0 | 0 | 5.514 |
| BRHIP2022326 | 0 | 36.805 | 0 | 0 | 5.648 | 0 | 11.351 |
| BRHIP2023888 | 0 | 0 | 0 | 0 | 2.443 | 2.328 | 0 |
| BRSSN2015493 | 0 | 0 | 0 | 78.612 | 0 | 0 | 0 |
| BRSTN2011961 | 0 | 6.265 | 0 | 0 | 1.923 | 0 | 1.932 |
| BRSTN2012069 | 0.394 | 1.841 | 0 | 2.238 | 0.377 | 0.180 | 1.641 |
| BRSTN2012174 | 0 | 8.750 | 0 | 4.350 | 0 | 0 | 2.699 |
| BRSTN2016470 | 0 | 0 | 0 | 4.707 | 0 | 0 | 1.460 |
| BRSTN2016678 | 0 | 0 | 0 | 0 | 60.919 | 0 | 0 |
| BRSTN2016992 | 0 | 0 | 0 | 0 | 0 | 0 | 6.566 |
| BRTHA2012714 | 0 | 0 | 0 | 0 | 0 | 15.862 | 16.724 |
| BRTHA2027229 | 0 | 19.799 | 0 | 0 | 0 | 0 | 0 |
| CD34C3000252 | 0 | 0 | 0 | 0 | 5.449 | 0 | 0 |
| CTONG1000087 | 0 | 0 | 0 | 0 | 0 | 6.617 | 0 |
| CTONG1000175 | 0 | 0 | 0 | 36.210 | 0 | 0 | 0 |
| CTONG2000452 | 0 | 0 | 0 | 0 | 19.337 | 0 | 0 |
| CTONG2001748 | 0 | 0 | 0 | 0 | 0 | 13.227 | 0 |
| CTONG2002073 | 0 | 0 | 0 | 0 | 0 | 9.268 | 0 |
| CTONG2002520 | 0 | 0 | 0 | 0 | 19.545 | 0 | 0 |
| CTONG2003298 | 0 | 0 | 0 | 0 | 4.818 | 4.592 | 0 |
| CTONG2006004 | 0 | 0 | 0 | 0 | 0 | 0 | 7.042 |
| CTONG2006562 | 0 | 30.286 | 0 | 0 | 0 | 0 | 0 |
| CTONG2006932 | 0 | 0 | 0 | 23.667 | 0 | 0 | 0 |
| CTONG2008506 | 0 | 20.356 | 0 | 0 | 0 | 5.954 | 0 |
| CTONG2010821 | 0 | 0 | 0 | 0 | 0 | 4.522 | 0 |
| CTONG2012452 | 0 | 0 | 0 | 0 | 0 | 0 | 2.376 |
| CTONG2012564 | 0 | 85.462 | 0 | 0 | 0 | 0 | 0 |
| CTONG2012745 | 0 | 0 | 0 | 0 | 36.827 | 0 | 0 |
| CTONG2013907 | 0 | 0 | 0 | 0 | 0 | 13.642 | 0 |
| CTONG2015091 | 0 | 0 | 0 | 0 | 0 | 0 | 5.418 |
| CTONG2016575 | 0 | 0 | 0 | 0 | 3.301 | 0 | 0 |
| CTONG2016824 | 0 | 0 | 0 | 0 | 0 | 26.934 | 0 |
| CTONG2016931 | 0 | 0 | 0 | 0 | 0 | 0 | 20.359 |
| CTONG2017500 | 55.163 | 0 | 0 | 0 | 0 | 0 | 0 |
| CTONG2018900 | 0 | 0 | 0 | 92.030 | 0 | 0 | 0 |
| CTONG2020484 | 0 | 0 | 0 | 0 | 0 | 3.720 | 0 |
| CTONG2028124 | 0 | 0 | 0 | 10.809 | 0 | 0 | 3.353 |
| CTONG2028208 | 0 | 0 | 0 | 0 | 23.511 | 0 | 0 |
| CTONG3000657 | 0 | 0 | 0 | 0 | 0 | 0 | 25.884 |
| CTONG3009028 | 0 | 0 | 0 | 0 | 10.685 | 0 | 0 |
| D3OST3000169 | 10.191 | 0 | 0 | 0 | 0 | 0 | 0 |
| D6OST2000464 | 0 | 0 | 0 | 0 | 7.274 | 0 | 0 |
| D9OST2003397 | 0 | 0 | 0 | 61.464 | 0 | 0 | 0 |
| DFNES2000011 | 0 | 0 | 0 | 0 | 7.261 | 0 | 0 |
| DFNES2002509 | 0 | 0 | 0 | 0 | 0 | 32.128 | 0 |
| DFNES2005540 | 0 | 0 | 0 | 0 | 0 | 19.128 | 20.167 |
| DFNES2005766 | 0 | 0 | 0 | 0 | 0 | 11.601 | 0 |
| DFNES2007332 | 0 | 0 | 0 | 0 | 0 | 0 | 49.518 |
| FCBBF1000027 | 0 | 0 | 0 | 0 | 2.432 | 0 | 4.887 |
| FCBBF1000139 | 0 | 0 | 0 | 0 | 0 | 11.061 | 0 |
| FCBBF1000280 | 0 | 0 | 0 | 0 | 0 | 35.741 | 0 |
| FCBBF1000367 | 0 | 0 | 0 | 0 | 0 | 9.613 | 0 |
| FCBBF1000732 | 0 | 0 | 0 | 0 | 18.591 | 0 | 0 |
| FCBBF2001291 | 0 | 41.153 | 0 | 0 | 12.631 | 0 | 0 |
| FCBBF2001538 | 0 | 0 | 0 | 0 | 5.059 | 0 | 0 |
| FCBBF2005658 | 0 | 0 | 0 | 0 | 51.674 | 0 | 0 |
| FCBBF3001470 | 0 | 0 | 0 | 0 | 0 | 8.589 | 0 |
| FCBBF3001632 | 0 | 33.393 | 0 | 0 | 0 | 0 | 0 |
| FCBBF3003800 | 0 | 0 | 0 | 0 | 2.615 | 2.493 | 2.628 |
| FCBBF3005320 | 0 | 0 | 0 | 0 | 0 | 0 | 18.199 |
| FCBBF3005330 | 14.426 | 14.985 | 0 | 0 | 0 | 0 | 0 |
| FCBBF3007244 | 0 | 0 | 0 | 0 | 0 | 49.116 | 0 |
| FCBBF3009541 | 0 | 0 | 0 | 0 | 0 | 2.608 | 0 |
| FCBBF3016928 | 0 | 0 | 0 | 18.845 | 0 | 0 | 0 |
| FCBBF3019455 | 0 | 0 | 0 | 0 | 54.072 | 0 | 0 |
| FCBBF3019714 | 0 | 0 | 0 | 0 | 0 | 12.961 | 0 |
| FCBBF3022894 | 91.851 | 0 | 0 | 0 | 0 | 0 | 0 |
| FCBBF3023078 | 0 | 0 | 0 | 92.090 | 0 | 0 | 0 |
| FCBBF3023368 | 0 | 0 | 0 | 0 | 16.290 | 15.525 | 0 |
| FCBBF3023667 | 0 | 2.873 | 0 | 0 | 0 | 0.840 | 1.772 |
| FCBBF4000017 | 0 | 0 | 0 | 0 | 0 | 56.201 | 0 |
| FCBBF4000446 | 0 | 0 | 0 | 0 | 4.987 | 0 | 0 |
| FEBRA2000129 | 0 | 0 | 0 | 0 | 17.260 | 0 | 0 |
| FEBRA2000733 | 0 | 0 | 0 | 0 | 2.238 | 1.066 | 2.249 |
| FEBRA2000740 | 0 | 0 | 0 | 0 | 7.509 | 0 | 0 |
| FEBRA2000787 | 0 | 0 | 0 | 42.481 | 0 | 0 | 0 |
| FEBRA2001294 | 0 | 0 | 0 | 0 | 16.045 | 0 | 0 |
| FEBRA2002456 | 0 | 0 | 0 | 0 | 0 | 6.902 | 0 |
| FEBRA2002933 | 0 | 0 | 0 | 0 | 2.457 | 0 | 2.469 |
| FEBRA2003926 | 0 | 0 | 0 | 0 | 4.635 | 0 | 0 |
| FEBRA2004224 | 0 | 0 | 0 | 0 | 0 | 7.326 | 0 |
| FEBRA2005572 | 0 | 0 | 0 | 0 | 0 | 0 | 11.887 |
| FEBRA2005734 | 17.583 | 0 | 0 | 0 | 0 | 0 | 0 |
| FEBRA2007622 | 0 | 0 | 0 | 0 | 0 | 13.056 | 0 |
| FEBRA2007880 | 0 | 0 | 0 | 0 | 0 | 0 | 25.109 |
| FEBRA2008087 | 0 | 0 | 0 | 0 | 2.380 | 0 | 2.392 |
| FEBRA2008287 | 61.381 | 0 | 0 | 0 | 0 | 0 | 0 |
| FEBRA2008583 | 0 | 0 | 0 | 0 | 0 | 0.836 | 0 |
| FEBRA2008755 | 0 | 0 | 0 | 0 | 0 | 10.394 | 0 |
| FEBRA2009419 | 0 | 0 | 0 | 0 | 8.773 | 0 | 0 |
| FEBRA2014417 | 0 | 0 | 0 | 0 | 0 | 3.416 | 0 |
| FEBRA2020566 | 0 | 0 | 0 | 89.613 | 0 | 0 | 0 |
| FEBRA2022055 | 0 | 0 | 0 | 0 | 0 | 0 | 7.100 |
| FEBRA2022504 | 0 | 0 | 0 | 0 | 0 | 31.177 | 0 |
| FEBRA2023399 | 0 | 0 | 0 | 0 | 0 | 55.540 | 0 |
| FEBRA2023927 | 0 | 0 | 0 | 0 | 0 | 0 | 27.172 |
| FEBRA2025427 | 0 | 0 | 0 | 0 | 0 | 15.685 | 0 |
| FEBRA2025838 | 0 | 17.770 | 0 | 0 | 0 | 0 | 0 |
| FEHRT2000325 | 100 | 0 | 0 | 0 | 0 | 0 | 0 |
| FEHRT2000364 | 92.290 | 0 | 0 | 0 | 0 | 0 | 0 |
| FEKID1000018 | 0 | 85.388 | 0 | 0 | 0 | 0 | 0 |
| FELIV1000101 | 0 | 0 | 99.741 | 0 | 0 | 0 | 0 |
| FELIV1000137 | 0 | 0 | 99.433 | 0 | 0 | 0 | 0 |
| FELIV1000153 | 0 | 0 | 52.921 | 0 | 1.095 | 1.044 | 0 |
| FELIV1000164 | 6.055 | 0 | 93.294 | 0 | 0 | 0 | 0 |
| FELNG2000241 | 0 | 0 | 0 | 100 | 0 | 0 | 0 |
| HCASM1000021 | 0 | 0 | 0 | 0 | 100 | 0 | 0 |
| HCASM1000050 | 0 | 0 | 0 | 0 | 100 | 0 | 0 |
| HCASM1000061 | 0 | 0 | 0 | 0 | 100 | 0 | 0 |
| HCASM1000115 | 0 | 0 | 0 | 0 | 6.882 | 0 | 0 |
| HCASM1000130 | 0 | 0 | 0 | 0 | 100 | 0 | 0 |
| HCASM2000016 | 0 | 0 | 0 | 0 | 4.955 | 9.445 | 0 |
| HCASM2000138 | 0 | 0 | 0 | 0 | 28.042 | 0 | 0 |
| HCASM2000156 | 0 | 0 | 0 | 0 | 86.824 | 0 | 0 |
| HCASM2000202 | 0 | 0 | 0 | 0 | 100 | 0 | 0 |
| HCASM2000214 | 0 | 0 | 0 | 0 | 62.795 | 0 | 0 |
| HCASM2000266 | 0 | 0 | 0 | 0 | 100 | 0 | 0 |
| HCASM2000307 | 0 | 0 | 0 | 0 | 100 | 0 | 0 |
| HCASM2000363 | 0 | 0 | 0 | 0 | 9.030 | 0 | 0 |
| HCASM2000534 | 0 | 0 | 0 | 0 | 100 | 0 | 0 |
| HCASM2000536 | 0 | 0 | 0 | 0 | 100 | 0 | 0 |
| HCASM2000560 | 0 | 0 | 0 | 0 | 100 | 0 | 0 |
| HCASM2000871 | 0 | 0 | 0 | 0 | 100 | 0 | 0 |
| HCASM2001285 | 0 | 0 | 0 | 0 | 100 | 0 | 0 |
| HCASM2001810 | 0 | 0 | 0 | 0 | 100 | 0 | 0 |
| HCASM2001866 | 0 | 0 | 0 | 0 | 100 | 0 | 0 |
| HCASM2001890 | 0 | 0 | 0 | 0 | 84.772 | 0 | 0 |
| HCASM2002148 | 0 | 0 | 0 | 0 | 100 | 0 | 0 |
| HCASM2002502 | 0 | 0 | 0 | 0 | 100 | 0 | 0 |
| HCASM2002754 | 0 | 0 | 0 | 0 | 100 | 0 | 0 |
| HCASM2002918 | 0 | 0 | 0 | 0 | 100 | 0 | 0 |
| HCASM2003018 | 0 | 0 | 0 | 0 | 58.599 | 0 | 0 |
| HCASM2003076 | 0 | 0 | 0 | 0 | 37.805 | 36.029 | 0 |
| HCASM2003099 | 0 | 0 | 0 | 0 | 100 | 0 | 0 |
| HCASM2003212 | 0 | 0 | 0 | 0 | 100 | 0 | 0 |
| HCASM2003237 | 0 | 0 | 0 | 0 | 100 | 0 | 0 |
| HCASM2003357 | 0 | 0 | 0 | 0 | 100 | 0 | 0 |
| HCASM2003415 | 0 | 36.285 | 0 | 0 | 11.137 | 0 | 0 |
| HCASM2005388 | 0 | 0 | 0 | 0 | 23.484 | 0 | 0 |
| HCASM2005484 | 0 | 0 | 0 | 0 | 85.688 | 0 | 0 |
| HCASM2006131 | 0 | 0 | 0 | 0 | 100 | 0 | 0 |
| HCASM2006338 | 0 | 0 | 0 | 0 | 100 | 0 | 0 |
| HCASM2006359 | 0 | 0 | 0 | 0 | 100 | 0 | 0 |
| HCASM2006632 | 0 | 0 | 0 | 0 | 100 | 0 | 0 |
| HCASM2007047 | 0 | 0 | 0 | 73.789 | 22.780 | 0 | 0 |
| HCASM2007317 | 0 | 0 | 0 | 0 | 100 | 0 | 0 |
| HCASM2007737 | 0 | 0 | 0 | 0 | 100 | 0 | 0 |
| HCASM2007773 | 0 | 0 | 0 | 0 | 100 | 0 | 0 |
| HCASM2008154 | 0 | 0 | 0 | 0 | 100 | 0 | 0 |
| HCASM2008536 | 0 | 0 | 0 | 0 | 84.772 | 0 | 0 |
| HCASM2009405 | 0 | 0 | 0 | 0 | 100 | 0 | 0 |
| HCASM2009424 | 0 | 0 | 0 | 0 | 100 | 0 | 0 |
| HCASM2009463 | 0 | 0 | 0 | 0 | 100 | 0 | 0 |
| HCASM2009588 | 0 | 0 | 0 | 0 | 6.946 | 0 | 0 |
| HCHON1000015 | 0 | 0 | 0 | 0 | 0 | 9.863 | 10.399 |
| HCHON1000030 | 3.777 | 0 | 0 | 0 | 0 | 1.148 | 2.420 |
| HCHON1000131 | 0 | 0 | 0 | 0 | 0 | 25.961 | 0 |
| HCHON1000142 | 0 | 0 | 0 | 0 | 0 | 84.140 | 0 |
| HCHON1000166 | 0 | 0 | 0 | 0 | 0 | 19.035 | 20.069 |
| HCHON1000176 | 0 | 0 | 0 | 0 | 0 | 100 | 0 |
| HCHON1000191 | 10.058 | 0 | 0 | 0 | 0 | 9.169 | 0 |
| HCHON2000028 | 0 | 0 | 0 | 0 | 0 | 10.039 | 0 |
| HCHON2000038 | 0 | 0 | 0 | 0 | 0 | 100 | 0 |
| HCHON2000056 | 0 | 0 | 0 | 0 | 1.883 | 5.384 | 1.892 |
| HCHON2000062 | 0 | 0 | 0 | 0 | 0 | 26.520 | 0 |
| HCHON2000087 | 0 | 0 | 0 | 0 | 0 | 3.915 | 4.127 |
| HCHON2000100 | 0 | 0 | 0 | 0 | 0 | 100 | 0 |
| HCHON2000156 | 0 | 0 | 0 | 0 | 0 | 100 | 0 |
| HCHON2000160 | 0 | 0 | 0 | 0 | 0 | 6.369 | 0 |
| HCHON2000199 | 0 | 0 | 0 | 0 | 0 | 100 | 0 |
| HCHON2000212 | 0 | 0 | 0 | 0 | 0 | 54.383 | 0 |
| HCHON2000226 | 0 | 8.723 | 0 | 8.672 | 2.677 | 5.103 | 0 |
| HCHON2000244 | 13.698 | 0 | 0 | 0 | 0 | 4.162 | 0 |
| HCHON2000265 | 0 | 0 | 0 | 0 | 0 | 12.802 | 0 |
| HCHON2000271 | 0 | 0 | 0 | 0 | 0 | 100 | 0 |
| HCHON2000295 | 0 | 0 | 0 | 0 | 0 | 2.772 | 0 |
| HCHON2000315 | 0 | 0 | 0 | 0 | 0 | 100 | 0 |
| HCHON2000322 | 0 | 0 | 0 | 0 | 0 | 69.478 | 0 |
| HCHON2000323 | 0 | 0 | 0 | 0 | 12.299 | 11.721 | 0 |
| HCHON2000344 | 0 | 0 | 0 | 0 | 0 | 100 | 0 |
| HCHON2000364 | 0 | 0 | 0 | 0 | 2.952 | 28.131 | 0 |
| HCHON2000373 | 0 | 0 | 0 | 0 | 6.729 | 19.239 | 0 |
| HCHON2000395 | 0 | 0 | 0 | 0 | 0 | 100 | 0 |
| HCHON2000417 | 0 | 0 | 0 | 0 | 0 | 100 | 0 |
| HCHON2000418 | 0 | 0 | 0 | 0 | 0 | 84.140 | 0 |
| HCHON2000473 | 0 | 0 | 0 | 0 | 0 | 37.038 | 0 |
| HCHON2000475 | 0 | 0 | 0 | 0 | 0 | 8.423 | 0 |
| HCHON2000503 | 0 | 0 | 0 | 0 | 0 | 100 | 0 |
| HCHON2000508 | 0 | 0 | 0 | 0 | 2.479 | 4.726 | 0 |
| HCHON2000626 | 0 | 0 | 0 | 0 | 7.805 | 14.876 | 7.842 |
| HCHON2000660 | 0 | 0 | 0 | 0 | 0 | 100 | 0 |
| HCHON2000663 | 0 | 0 | 0 | 0 | 0 | 53.978 | 0 |
| HCHON2000673 | 0 | 0 | 0 | 0 | 0 | 100 | 0 |
| HCHON2000676 | 0 | 0 | 0 | 0 | 19.795 | 18.865 | 0 |
| HCHON2000698 | 0 | 0 | 0 | 0 | 0 | 18.136 | 0 |
| HCHON2000699 | 0 | 0 | 0 | 0 | 0 | 88.356 | 0 |
| HCHON2000705 | 0 | 0 | 0 | 0 | 0 | 63.051 | 0 |
| HCHON2000738 | 0 | 0 | 0 | 0 | 0 | 18.841 | 0 |
| HCHON2000743 | 0 | 0 | 0 | 0 | 0 | 38.633 | 0 |
| HCHON2000751 | 0 | 0 | 0 | 0 | 0 | 22.591 | 23.818 |
| HCHON2000815 | 0 | 0 | 0 | 0 | 0 | 35.342 | 0 |
| HCHON2000817 | 0 | 0 | 0 | 0 | 0 | 100 | 0 |
| HCHON2000818 | 0 | 0 | 0 | 0 | 0 | 100 | 0 |
| HCHON2000819 | 0 | 0 | 0 | 0 | 0 | 46.359 | 0 |
| HCHON2000826 | 0 | 0 | 0 | 0 | 0 | 4.529 | 0 |
| HCHON2000832 | 0 | 0 | 0 | 0 | 0 | 22.386 | 0 |
| HCHON2000851 | 0 | 0 | 0 | 0 | 0 | 100 | 0 |
| HCHON2000898 | 0 | 0 | 0 | 0 | 0 | 64.476 | 0 |
| HCHON2000935 | 0 | 0 | 0 | 0 | 0 | 100 | 0 |
| HCHON2000942 | 0 | 0 | 0 | 0 | 0 | 71.738 | 0 |
| HCHON2000956 | 0 | 0 | 0 | 0 | 0 | 100 | 0 |
| HCHON2000994 | 0 | 0 | 0 | 0 | 0 | 100 | 0 |
| HCHON2001039 | 0 | 0 | 0 | 0 | 7.408 | 7.061 | 0 |
| HCHON2001050 | 0 | 0 | 0 | 0 | 9.623 | 9.171 | 0 |
| HCHON2001084 | 0 | 0 | 0 | 0 | 0 | 72.645 | 0 |
| HCHON2001099 | 0 | 0 | 0 | 0 | 0 | 34.516 | 0 |
| HCHON2001108 | 0 | 0 | 0 | 0 | 0 | 13.511 | 0 |
| HCHON2001110 | 0 | 0 | 0 | 0 | 0 | 52.199 | 0 |
| HCHON2001116 | 0 | 0 | 0 | 0 | 0 | 100 | 0 |
| HCHON2001161 | 0 | 0 | 0 | 0 | 0 | 68.132 | 0 |
| HCHON2001200 | 0 | 0 | 0 | 0 | 0 | 2.737 | 0 |
| HCHON2001214 | 0 | 0 | 0 | 0 | 0 | 100 | 0 |
| HCHON2001217 | 0 | 0 | 0 | 0 | 6.911 | 6.586 | 0 |
| HCHON2001233 | 0 | 0 | 0 | 0 | 0 | 100 | 0 |
| HCHON2001269 | 0 | 0 | 0 | 0 | 0 | 100 | 0 |
| HCHON2001359 | 0 | 0 | 0 | 0 | 0 | 5.387 | 0 |
| HCHON2001407 | 0 | 0 | 0 | 16.983 | 0 | 4.997 | 0 |
| HCHON2001434 | 0 | 0 | 0 | 0 | 0 | 9.666 | 10.191 |
| HCHON2001450 | 0 | 0 | 0 | 0 | 0 | 100 | 0 |
| HCHON2001453 | 0 | 0 | 0 | 0 | 0 | 100 | 0 |
| HCHON2001497 | 0 | 0 | 0 | 0 | 0 | 47.410 | 0 |
| HCHON2001505 | 0 | 0 | 0 | 0 | 0 | 28.434 | 0 |
| HCHON2001519 | 0 | 0 | 0 | 0 | 0 | 90.637 | 0 |
| HCHON2001523 | 0 | 0 | 0 | 0 | 0 | 100 | 0 |
| HCHON2001535 | 0 | 0 | 0 | 0 | 0 | 58.352 | 0 |
| HCHON2001546 | 0 | 0 | 0 | 0 | 0 | 45.846 | 0 |
| HCHON2001548 | 0 | 0 | 0 | 0 | 0 | 72.417 | 0 |
| HCHON2001577 | 0 | 0 | 0 | 0 | 0 | 100 | 0 |
| HCHON2001598 | 0 | 0 | 0 | 0 | 0 | 15.375 | 0 |
| HCHON2001604 | 0 | 0 | 0 | 0 | 0 | 100 | 0 |
| HCHON2001607 | 0 | 0 | 0 | 0 | 0 | 100 | 0 |
| HCHON2001646 | 0 | 0 | 0 | 0 | 0 | 100 | 0 |
| HCHON2001665 | 0 | 0 | 0 | 33.188 | 0 | 9.764 | 0 |
| HCHON2001712 | 0 | 0 | 0 | 0 | 0 | 88.356 | 0 |
| HCHON2001768 | 0 | 0 | 0 | 0 | 0 | 100 | 0 |
| HCHON2001801 | 0 | 0 | 0 | 0 | 0 | 64.108 | 0 |
| HCHON2001853 | 0 | 0 | 0 | 0 | 0 | 35.438 | 0 |
| HCHON2002123 | 0 | 0 | 0 | 0 | 0 | 100 | 0 |
| HCHON2002194 | 0 | 0 | 0 | 0 | 0 | 100 | 0 |
| HCHON2002241 | 0 | 0 | 0 | 0 | 0 | 100 | 0 |
| HCHON2002247 | 0 | 0 | 0 | 0 | 0 | 17.764 | 0 |
| HCHON2002354 | 0 | 0 | 0 | 0 | 0 | 80.389 | 0 |
| HCHON2002496 | 0 | 0 | 0 | 0 | 0 | 49.148 | 0 |
| HCHON2002676 | 0 | 0 | 0 | 0 | 0 | 86.353 | 0 |
| HCHON2002770 | 0 | 0 | 0 | 0 | 0 | 100 | 0 |
| HCHON2002964 | 0 | 0 | 0 | 0 | 0 | 100 | 0 |
| HCHON2002971 | 0 | 0 | 0 | 0 | 0 | 88.356 | 0 |
| HCHON2003131 | 0 | 0 | 0 | 0 | 0 | 100 | 0 |
| HCHON2003134 | 0 | 0 | 0 | 0 | 0 | 100 | 0 |
| HCHON2003327 | 0 | 0 | 0 | 0 | 0 | 100 | 0 |
| HCHON2003513 | 0 | 0 | 0 | 0 | 0 | 100 | 0 |
| HCHON2003532 | 0 | 0 | 0 | 0 | 0 | 100 | 0 |
| HCHON2003642 | 0 | 0 | 0 | 0 | 0 | 78.436 | 0 |
| HCHON2003659 | 0 | 0 | 0 | 0 | 0 | 100 | 0 |
| HCHON2003676 | 0 | 0 | 0 | 0 | 0 | 100 | 0 |
| HCHON2004002 | 0 | 0 | 0 | 0 | 0 | 4.968 | 0 |
| HCHON2004007 | 0 | 0 | 0 | 0 | 0 | 100 | 0 |
| HCHON2004279 | 0 | 0 | 0 | 0 | 0 | 100 | 0 |
| HCHON2004359 | 0 | 0 | 0 | 0 | 0 | 100 | 0 |
| HCHON2004531 | 0 | 0 | 0 | 0 | 0 | 100 | 0 |
| HCHON2004776 | 0 | 0 | 0 | 0 | 0 | 100 | 0 |
| HCHON2004858 | 0 | 0 | 0 | 0 | 0 | 83.589 | 0 |
| HCHON2005048 | 0 | 0 | 0 | 0 | 0 | 100 | 0 |
| HCHON2005118 | 0 | 0 | 0 | 0 | 0 | 100 | 0 |
| HCHON2005166 | 0 | 0 | 0 | 0 | 0 | 77.401 | 0 |
| HCHON2005802 | 0 | 0 | 0 | 0 | 0 | 100 | 0 |
| HCHON2005921 | 0 | 0 | 0 | 0 | 0 | 26.243 | 0 |
| HCHON2005987 | 0 | 0 | 0 | 0 | 0 | 63.091 | 0 |
| HCHON2006250 | 0 | 0 | 0 | 0 | 0 | 9.901 | 0 |
| HCHON2006459 | 0 | 0 | 0 | 0 | 0 | 68.296 | 0 |
| HCHON2006714 | 0 | 0 | 0 | 0 | 0 | 100 | 0 |
| HCHON2006722 | 0 | 0 | 0 | 0 | 0 | 64.108 | 0 |
| HCHON2006770 | 0 | 0 | 0 | 0 | 0 | 17.858 | 0 |
| HCHON2006786 | 0 | 0 | 0 | 0 | 0 | 86.115 | 0 |
| HCHON2006841 | 0 | 0 | 0 | 0 | 0 | 100 | 0 |
| HCHON2006871 | 0 | 0 | 0 | 0 | 0 | 100 | 0 |
| HCHON2007046 | 0 | 0 | 0 | 77.267 | 0 | 22.733 | 0 |
| HCHON2007482 | 0 | 0 | 0 | 0 | 0 | 100 | 0 |
| HCHON2007650 | 0 | 0 | 0 | 0 | 0 | 77.065 | 0 |
| HCHON2007674 | 0 | 0 | 0 | 0 | 0 | 100 | 0 |
| HCHON2007774 | 0 | 0 | 0 | 0 | 0 | 100 | 0 |
| HCHON2007881 | 0 | 0 | 0 | 0 | 0 | 83.589 | 0 |
| HCHON2008112 | 0 | 0 | 0 | 0 | 0 | 86.264 | 0 |
| HCHON2008239 | 0 | 0 | 0 | 0 | 0 | 100 | 0 |
| HCHON2008444 | 0 | 0 | 0 | 0 | 0 | 84.140 | 0 |
| HCHON2008582 | 0 | 0 | 0 | 0 | 0 | 100 | 0 |
| HCHON2008672 | 0 | 0 | 0 | 0 | 0 | 100 | 0 |
| HCHON2008856 | 0 | 0 | 0 | 0 | 0 | 63.091 | 0 |
| HCHON2008871 | 0 | 0 | 0 | 0 | 0 | 100 | 0 |
| HCHON2008989 | 0 | 0 | 0 | 0 | 0 | 100 | 0 |
| HCHON2009191 | 0 | 0 | 0 | 0 | 0 | 100 | 0 |
| HCHON2009384 | 0 | 0 | 0 | 0 | 0 | 100 | 0 |
| HCHON2009749 | 0 | 0 | 0 | 0 | 0 | 100 | 0 |
| HCHON2009766 | 0 | 0 | 0 | 0 | 0 | 100 | 0 |
| HCHON2009795 | 0 | 0 | 0 | 0 | 0 | 100 | 0 |
| HCHON2010074 | 0 | 0 | 0 | 0 | 0 | 100 | 0 |
| HCHON2010543 | 0 | 0 | 0 | 0 | 0 | 56.763 | 0 |
| HEART1000010 | 0 | 0 | 0 | 0 | 0 | 0 | 22.793 |
| HEART1000074 | 0 | 0 | 0 | 32.652 | 0 | 0 | 5.064 |
| HEART1000088 | 0 | 0 | 0 | 0 | 0 | 0 | 49.759 |
| HEART1000099 | 0 | 0 | 0 | 0 | 0 | 0 | 100 |
| HEART1000102 | 0 | 0 | 0 | 0 | 0 | 0 | 100 |
| HEART1000118 | 0 | 0 | 0 | 0 | 0 | 0 | 73.940 |
| HEART1000132 | 0 | 0 | 0 | 0 | 0 | 0 | 58.129 |
| HEART1000139 | 0 | 0 | 0 | 0 | 0 | 0 | 66.452 |
| HEART1000142 | 37.124 | 0 | 0 | 0 | 0 | 0 | 11.893 |
| HEART1000149 | 0 | 0 | 0 | 0 | 0 | 0 | 6.265 |
| HEART1000151 | 0 | 0 | 0 | 0 | 0 | 0 | 100 |
| HEART1000173 | 0 | 0 | 0 | 0 | 0 | 0 | 17.510 |
| HEART1000185 | 32.926 | 0 | 0 | 0 | 0 | 5.002 | 26.371 |
| HEART2000024 | 0 | 0 | 0 | 0 | 0 | 0 | 100 |
| HEART2000035 | 0 | 0 | 0 | 0 | 0 | 0 | 100 |
| HEART2000099 | 0 | 0 | 0 | 0 | 0 | 0 | 100 |
| HEART2000298 | 0 | 0 | 0 | 0 | 0 | 0 | 100 |
| HEART2000306 | 0 | 0 | 0 | 0 | 0 | 0 | 90.384 |
| HEART2000309 | 0 | 0 | 0 | 0 | 0 | 0 | 100 |
| HEART2000411 | 0 | 0 | 0 | 0 | 0 | 0 | 84.451 |
| HEART2000418 | 0 | 0 | 0 | 0 | 0 | 0 | 100 |
| HEART2000444 | 0 | 0 | 0 | 0 | 0 | 0 | 56.184 |
| HEART2000448 | 0 | 0 | 0 | 0 | 0 | 0 | 100 |
| HEART2000492 | 0 | 0 | 0 | 0 | 0 | 0 | 100 |
| HEART2000506 | 0 | 0 | 0 | 0 | 0 | 0 | 70.197 |
| HEART2000520 | 0 | 0 | 0 | 0 | 0 | 0 | 38.479 |
| HEART2000541 | 0 | 0 | 0 | 0 | 0 | 0 | 53.555 |
| HEART2000568 | 0 | 0 | 0 | 0 | 0 | 0 | 100 |
| HEART2000611 | 0 | 0 | 0 | 0 | 0 | 0 | 100 |
| HEART2000959 | 0 | 0 | 0 | 0 | 0 | 0 | 78.578 |
| HEART2001680 | 0 | 0 | 0 | 0 | 0 | 0 | 100 |
| HEART2001756 | 0 | 0 | 0 | 0 | 0 | 0 | 100 |
| HEART2002129 | 0 | 0 | 0 | 0 | 0 | 0 | 100 |
| HEART2002184 | 0 | 0 | 0 | 0 | 0 | 0 | 100 |
| HEART2002220 | 0 | 0 | 0 | 0 | 0 | 0 | 100 |
| HEART2002432 | 0 | 0 | 0 | 0 | 0 | 0 | 100 |
| HEART2002531 | 0 | 0 | 0 | 0 | 0 | 0 | 100 |
| HEART2002598 | 0 | 0 | 0 | 0 | 0 | 0 | 100 |
| HEART2002717 | 0 | 0 | 0 | 0 | 0 | 0 | 100 |
| HEART2003027 | 0 | 0 | 0 | 0 | 0 | 0 | 100 |
| HEART2003168 | 0 | 0 | 0 | 0 | 0 | 0 | 85.747 |
| HEART2003432 | 0 | 0 | 0 | 0 | 0 | 0 | 100 |
| HEART2003440 | 0 | 0 | 0 | 0 | 0 | 0 | 19.529 |
| HEART2003781 | 0 | 0 | 0 | 0 | 0 | 0 | 100 |
| HEART2003836 | 0 | 0 | 0 | 0 | 0 | 0 | 27.450 |
| HEART2003852 | 0 | 0 | 0 | 0 | 0 | 0 | 25.993 |
| HEART2004570 | 0 | 0 | 0 | 0 | 0 | 0 | 100 |
| HEART2004764 | 0 | 0 | 0 | 0 | 0 | 0 | 83.614 |
| HEART2004931 | 0 | 0 | 0 | 0 | 0 | 0 | 45.365 |
| HEART2004940 | 0 | 0 | 0 | 0 | 0 | 0 | 100 |
| HEART2004941 | 0 | 0 | 0 | 0 | 0 | 0 | 63.375 |
| HEART2004980 | 0 | 0 | 0 | 0 | 0 | 0 | 100 |
| HEART2005244 | 0 | 0 | 0 | 0 | 0 | 0 | 100 |
| HEART2005310 | 0 | 0 | 0 | 0 | 0 | 0 | 46.510 |
| HEART2005581 | 0 | 0 | 0 | 0 | 0 | 0 | 100 |
| HEART2005610 | 0 | 0 | 0 | 0 | 0 | 0 | 100 |
| HEART2006131 | 0 | 0 | 0 | 0 | 0 | 0 | 100 |
| HEART2006195 | 0 | 0 | 0 | 0 | 0 | 0 | 63.227 |
| HEART2006310 | 0 | 0 | 0 | 0 | 0 | 0 | 100 |
| HEART2006334 | 0 | 0 | 0 | 0 | 0 | 0 | 100 |
| HEART2006487 | 0 | 0 | 0 | 0 | 0 | 0 | 64.867 |
| HEART2006521 | 0 | 0 | 0 | 0 | 0 | 0 | 15.956 |
| HEART2006557 | 0 | 0 | 0 | 0 | 0 | 0 | 100 |
| HEART2006787 | 0 | 0 | 0 | 0 | 0 | 0 | 100 |
| HEART2006789 | 0 | 0 | 0 | 0 | 0 | 0 | 100 |
| HEART2006909 | 0 | 0 | 0 | 0 | 0 | 0 | 100 |
| HEART2007031 | 0 | 0 | 0 | 0 | 0 | 0 | 75.806 |
| HEART2007231 | 0 | 0 | 0 | 0 | 0 | 0 | 32.316 |
| HEART2007443 | 0 | 0 | 0 | 0 | 0 | 0 | 100 |
| HEART2007696 | 0 | 0 | 0 | 0 | 0 | 0 | 33.229 |
| HEART2007767 | 0 | 0 | 0 | 0 | 0 | 0 | 100 |
| HEART2008108 | 0 | 0 | 0 | 0 | 0 | 0 | 100 |
| HEART2008111 | 0 | 0 | 0 | 0 | 0 | 0 | 100 |
| HEART2008257 | 0 | 0 | 0 | 0 | 0 | 0 | 100 |
| HEART2008509 | 0 | 0 | 0 | 0 | 0 | 0 | 78.725 |
| HEART2008994 | 0 | 0 | 0 | 0 | 0 | 0 | 100 |
| HEART2009000 | 0 | 0 | 0 | 0 | 0 | 0 | 68.952 |
| HEART2009599 | 0 | 0 | 0 | 0 | 0 | 0 | 100 |
| HEART2009680 | 0 | 0 | 0 | 0 | 0 | 0 | 100 |
| HEART2010391 | 0 | 0 | 0 | 0 | 0 | 0 | 100 |
| HEART2010492 | 0 | 0 | 0 | 0 | 0 | 0 | 100 |
| HEART2010495 | 0 | 0 | 0 | 0 | 0 | 0 | 49.759 |
| HHDPC1000083 | 0 | 0 | 0 | 0 | 6.499 | 0 | 0 |
| HHDPC1000114 | 15.131 | 0 | 0 | 0 | 4.824 | 0 | 0 |
| HHDPC1000163 | 0 | 0 | 0 | 0 | 8.349 | 0 | 8.389 |
| HHDPC2000115 | 0 | 0 | 0 | 0 | 0 | 0 | 17.452 |
| HHDPC2003381 | 0 | 75.443 | 0 | 0 | 0 | 0 | 0 |
| HHDPC2003439 | 0 | 0 | 0 | 0 | 0 | 1.609 | 0 |
| HHDPC2003983 | 0 | 12.047 | 0 | 0 | 3.698 | 0 | 0 |
| HHDPC2008297 | 0 | 0 | 0 | 0 | 0 | 47.331 | 0 |
| HLUNG1000055 | 0 | 11.709 | 0 | 11.642 | 0 | 0 | 3.611 |
| HLUNG2000063 | 0 | 0 | 0 | 0 | 0 | 15.606 | 16.454 |
| HLUNG2000501 | 0 | 0 | 0 | 18.449 | 0 | 0 | 5.723 |
| HLUNG2001712 | 0 | 0 | 0 | 0 | 0 | 0 | 21.996 |
| HLUNG2002465 | 0 | 0 | 0 | 26.011 | 0 | 0 | 0 |
| HLUNG2003331 | 0 | 0 | 0 | 0 | 0 | 0 | 55.232 |
| HLUNG2004534 | 0 | 62.747 | 0 | 0 | 0 | 0 | 0 |
| HLUNG2007210 | 0 | 0 | 0 | 0 | 0 | 13.007 | 0 |
| HLUNG2007245 | 0 | 75.147 | 0 | 0 | 0 | 0 | 0 |
| HSYRA1000062 | 0 | 0 | 0 | 9.212 | 2.844 | 5.421 | 0 |
| HSYRA1000119 | 0 | 0 | 0 | 0 | 3.053 | 2.909 | 0 |
| HSYRA2000137 | 0 | 0 | 0 | 0 | 0 | 14.342 | 15.121 |
| HSYRA2000159 | 0 | 0 | 0 | 0 | 0 | 0 | 1.609 |
| HSYRA2000224 | 0 | 38.896 | 0 | 0 | 0 | 0 | 0 |
| HSYRA2000232 | 0 | 0 | 0 | 15.903 | 0 | 0 | 0 |
| HSYRA2000248 | 14.153 | 0 | 0 | 0 | 0 | 8.601 | 0 |
| HSYRA2000255 | 0 | 0 | 0 | 0 | 0 | 25.553 | 0 |
| HSYRA2000332 | 16.242 | 0 | 0 | 16.775 | 0 | 9.871 | 0 |
| HSYRA2000743 | 0 | 0 | 0 | 0 | 0 | 0 | 5.163 |
| HSYRA2000792 | 0 | 0 | 0 | 0 | 0 | 15.324 | 0 |
| HSYRA2001103 | 0 | 0 | 0 | 0 | 5.631 | 0 | 0 |
| HSYRA2001138 | 0 | 5.515 | 0 | 0 | 0 | 0 | 0 |
| HSYRA2001232 | 0 | 0 | 0 | 0 | 0 | 24.478 | 0 |
| HSYRA2001476 | 0 | 0 | 0 | 0 | 6.411 | 12.219 | 0 |
| HSYRA2001567 | 0 | 0 | 0 | 0 | 0 | 28.361 | 0 |
| HSYRA2001574 | 0 | 0 | 0 | 0 | 4.996 | 0 | 0 |
| HSYRA2001615 | 0 | 0 | 0 | 0 | 0 | 13.123 | 0 |
| HSYRA2001621 | 0 | 0 | 0 | 0 | 2.437 | 0 | 0 |
| HSYRA2005628 | 0 | 0 | 0 | 0 | 0 | 42.436 | 0 |
| IMR321000158 | 0 | 0 | 0 | 0 | 5.054 | 0 | 0 |
| IMR322000072 | 0 | 0 | 0 | 0 | 0 | 5.077 | 0 |
| IMR322000178 | 38.729 | 0 | 0 | 39.999 | 0 | 0 | 0 |
| IMR322000223 | 0 | 0 | 0 | 0 | 0 | 4.308 | 4.542 |
| IMR322000374 | 0 | 0 | 0 | 0 | 36.572 | 0 | 0 |
| IMR322000555 | 0 | 0 | 0 | 0 | 0 | 0 | 39.800 |
| IMR322000730 | 2.854 | 0 | 0 | 8.843 | 0 | 0 | 2.743 |
| IMR322000742 | 0 | 0 | 0 | 35.613 | 0 | 0 | 0 |
| IMR322000791 | 0 | 0 | 0 | 0 | 0 | 32.829 | 0 |
| IMR322001317 | 0 | 0 | 0 | 0 | 0 | 0 | 10.536 |
| IMR322001435 | 0 | 0 | 0 | 0 | 0 | 11.889 | 0 |
| IMR322001534 | 0 | 0 | 0 | 0 | 0 | 0 | 55.124 |
| IMR322001600 | 3.353 | 0 | 0 | 0 | 2.138 | 3.057 | 0 |
| IMR322001710 | 0 | 0 | 0 | 0 | 12.877 | 0 | 0 |
| KIDNE1000008 | 0 | 43.681 | 0 | 0 | 0 | 0 | 0 |
| KIDNE1000143 | 0 | 43.153 | 0 | 0 | 0 | 0 | 0 |
| KIDNE2000085 | 0 | 0 | 0 | 0 | 0 | 6.507 | 0 |
| KIDNE2000315 | 0 | 0 | 0 | 0 | 0 | 0 | 45.557 |
| KIDNE2000403 | 0 | 17.871 | 0 | 0 | 0 | 0 | 0 |
| KIDNE2000497 | 0 | 0 | 0 | 0 | 0 | 0 | 20.919 |
| KIDNE2000665 | 0 | 41.875 | 0 | 0 | 0 | 0 | 12.914 |
| KIDNE2000832 | 0 | 67.408 | 0 | 0 | 0 | 0 | 0 |
| KIDNE2000909 | 0 | 0 | 0 | 44.154 | 0 | 0 | 0 |
| KIDNE2001467 | 0 | 0 | 0 | 0 | 3.461 | 3.299 | 0 |
| KIDNE2002839 | 0 | 0 | 0 | 0 | 0 | 0 | 48.974 |
| KIDNE2002872 | 0 | 12.368 | 0 | 0 | 0 | 0 | 0 |
| KIDNE2002883 | 0 | 0 | 0 | 0 | 0 | 0 | 15.131 |
| KIDNE2002980 | 0 | 0 | 0 | 67.783 | 0 | 0 | 0 |
| KIDNE2003507 | 70.503 | 0 | 0 | 0 | 0 | 0 | 0 |
| KIDNE2005676 | 0 | 0 | 0 | 0 | 0 | 8.902 | 0 |
| KIDNE2006062 | 0 | 60.803 | 0 | 0 | 0 | 0 | 0 |
| KIDNE2006248 | 6.474 | 0 | 0 | 0 | 0 | 0 | 0 |
| KIDNE2008048 | 0 | 0 | 0 | 0 | 3.562 | 6.789 | 0 |
| KIDNE2010265 | 0 | 0 | 0 | 0 | 15.686 | 0 | 0 |
| KIDNE2014290 | 0 | 0 | 0 | 0 | 4.655 | 0 | 0 |
| KIDNE2017040 | 0 | 0 | 0 | 0 | 0 | 21.278 | 0 |
| LIVER2005218 | 51.359 | 0 | 0 | 0 | 0 | 0 | 0 |
| LIVER2007783 | 0 | 44.385 | 0 | 0 | 0 | 0 | 0 |
| MAMGL1000032 | 0 | 0 | 0 | 6.931 | 1.070 | 0 | 0 |
| MAMGL1000035 | 0 | 0 | 0 | 0 | 0 | 0 | 1.343 |
| MAMGL1000173 | 0 | 0 | 0 | 0 | 0 | 0 | 1.768 |
| MESAN1000080 | 0 | 30.885 | 0 | 0 | 0 | 9.034 | 0 |
| MESAN1000126 | 0 | 0 | 0 | 0 | 0 | 11.299 | 0 |
| MESAN2000267 | 0 | 0 | 0 | 0 | 2.719 | 0 | 0 |
| MESAN2000572 | 0 | 22.116 | 0 | 0 | 0 | 0 | 0 |
| MESAN2000608 | 0 | 17.010 | 0 | 0 | 0 | 4.976 | 5.246 |
| MESAN2000909 | 0 | 0 | 0 | 0 | 0 | 34.948 | 0 |
| MESAN2002086 | 0 | 0 | 0 | 0 | 8.292 | 10.536 | 0 |
| MESAN2002790 | 0 | 0 | 0 | 0 | 16.238 | 0 | 0 |
| MESAN2003622 | 0 | 0 | 0 | 12.925 | 3.990 | 0 | 0 |
| MESAN2005766 | 0 | 0 | 0 | 0 | 0 | 6.240 | 6.579 |
| MESAN2005958 | 0 | 0 | 0 | 0 | 0 | 17.040 | 0 |
| MESAN2009580 | 0 | 24.023 | 0 | 0 | 0 | 0 | 0 |
| MESAN2012735 | 0 | 0 | 0 | 0 | 0 | 63.051 | 0 |
| MESAN2013908 | 0 | 0 | 0 | 0 | 0 | 43.658 | 0 |
| NB9N41000121 | 0 | 0 | 0 | 0 | 0 | 4.752 | 0 |
| NB9N41000340 | 0 | 0 | 0 | 0 | 9.629 | 0 | 9.675 |
| NB9N42000104 | 0 | 0 | 0 | 0 | 0 | 5.245 | 0 |
| NB9N42000342 | 0 | 0 | 0 | 0 | 14.361 | 0 | 0 |
| NHNPC2000187 | 0 | 0 | 0 | 0 | 0 | 0 | 3.019 |
| NHNPC2000206 | 0 | 0 | 0 | 0 | 0 | 4.345 | 0 |
| NHNPC2001931 | 0 | 0 | 0 | 0 | 0 | 6.040 | 3.184 |
| NT2NE1000059 | 0 | 0 | 0 | 0 | 0 | 34.225 | 0 |
| NT2NE2000056 | 0 | 0 | 0 | 8.449 | 0 | 0 | 0 |
| NT2NE2000174 | 15.892 | 0 | 0 | 0 | 0 | 0 | 0 |
| NT2NE2000260 | 0 | 2.613 | 0 | 2.598 | 0 | 0 | 0 |
| NT2NE2000383 | 0 | 0 | 0 | 0 | 10.089 | 0 | 0 |
| NT2NE2000575 | 5.006 | 0 | 0 | 0 | 3.192 | 1.521 | 1.604 |
| NT2NE2000636 | 0 | 0 | 0 | 0 | 23.974 | 0 | 0 |
| NT2NE2000707 | 0 | 0 | 0 | 0 | 0 | 0 | 4.465 |
| NT2NE2000963 | 9.554 | 4.962 | 0 | 0 | 0 | 1.452 | 0 |
| NT2NE2001000 | 0 | 0 | 0 | 0 | 0 | 0 | 5.741 |
| NT2NE2001655 | 0 | 0 | 0 | 0 | 0 | 0 | 18.680 |
| NT2NE2002620 | 0 | 0 | 0 | 0 | 6.351 | 0 | 0 |
| NT2NE2003569 | 0 | 37.541 | 0 | 0 | 0 | 0 | 0 |
| NT2NE2003921 | 0 | 0 | 0 | 0 | 0 | 0 | 40.699 |
| NT2NE2005688 | 0 | 0 | 0 | 0 | 4.958 | 0 | 0 |
| NT2NE2006458 | 0 | 0 | 0 | 30.400 | 0 | 8.944 | 0 |
| NT2NE2008077 | 0 | 0 | 0 | 0 | 64.689 | 0 | 0 |
| NT2NE2018180 | 0 | 0 | 0 | 0 | 24.965 | 0 | 0 |
| NT2NE2019091 | 0 | 0 | 0 | 0 | 12.569 | 0 | 0 |
| NT2RI1000027 | 0 | 0 | 0 | 21.745 | 0 | 0 | 0 |
| NT2RI1000127 | 0 | 0 | 0 | 39.035 | 0 | 0 | 0 |
| NT2RI2000064 | 0 | 0 | 0 | 0 | 0 | 0 | 3.591 |
| NT2RI2000282 | 0 | 6.847 | 0 | 0 | 0 | 4.006 | 2.112 |
| NT2RI2000284 | 0 | 0 | 0 | 9.804 | 0 | 0 | 3.041 |
| NT2RI2000669 | 0 | 0 | 0 | 0 | 0 | 77.688 | 0 |
| NT2RI2000671 | 0 | 0 | 0 | 0 | 0 | 0 | 7.017 |
| NT2RI2000727 | 0 | 0 | 0 | 0 | 5.153 | 0 | 0 |
| NT2RI2000974 | 0 | 0 | 0 | 0 | 0 | 13.649 | 0 |
| NT2RI2001540 | 0 | 0 | 0 | 2.449 | 1.134 | 0 | 1.139 |
| NT2RI2001657 | 0 | 0 | 0 | 0 | 3.552 | 3.386 | 0 |
| NT2RI2001731 | 39.438 | 0 | 0 | 0 | 0 | 0 | 0 |
| NT2RI2001859 | 0 | 0 | 0 | 0 | 0 | 6.140 | 0 |
| NT2RI2002091 | 0 | 0 | 0 | 0.577 | 2.939 | 5.601 | 1.253 |
| NT2RI2002391 | 0 | 0 | 0 | 34.882 | 0 | 0 | 0 |
| NT2RI2002654 | 0 | 12.708 | 0 | 12.634 | 7.801 | 0 | 3.919 |
| NT2RI2003304 | 5.465 | 5.677 | 0 | 0 | 0 | 1.660 | 0 |
| NT2RI2003338 | 0 | 21.903 | 0 | 0 | 6.723 | 6.407 | 0 |
| NT2RI2003407 | 0 | 0 | 0 | 0 | 8.036 | 7.658 | 0 |
| NT2RI2003420 | 0 | 0 | 0 | 0 | 0 | 0 | 10.273 |
| NT2RI2003481 | 0 | 0 | 0 | 0 | 12.821 | 0 | 0 |
| NT2RI2003695 | 0 | 0 | 0 | 0 | 5.228 | 4.983 | 0 |
| NT2RI2003738 | 0 | 0 | 0 | 0 | 0 | 1.107 | 2.334 |
| NT2RI2003751 | 0 | 29.966 | 0 | 0 | 18.395 | 0 | 9.242 |
| NT2RI2003921 | 0 | 0 | 0 | 10.200 | 0 | 3.001 | 0 |
| NT2RI2003993 | 0 | 0 | 0 | 0 | 0 | 0 | 25.326 |
| NT2RI2004059 | 0 | 0 | 0 | 0 | 0 | 0 | 45.459 |
| NT2RI2004535 | 0 | 0 | 0 | 0 | 12.709 | 0 | 0 |
| NT2RI2005087 | 0 | 0 | 0 | 92.209 | 0 | 0 | 0 |
| NT2RI2005150 | 0 | 0 | 0 | 0 | 4.575 | 0 | 0 |
| NT2RI2005335 | 0 | 0 | 0 | 8.325 | 0 | 0 | 0 |
| NT2RI2005405 | 0 | 0 | 0 | 0 | 3.728 | 3.553 | 0 |
| NT2RI2005723 | 0 | 0 | 0 | 0 | 0 | 0 | 16.739 |
| NT2RI2005851 | 0 | 0 | 0 | 0 | 0 | 23.580 | 0 |
| NT2RI2006412 | 0 | 0 | 0 | 0 | 0 | 0 | 21.874 |
| NT2RI2006825 | 0 | 0 | 0 | 0 | 0 | 17.348 | 0 |
| NT2RI2006856 | 0 | 0 | 0 | 0 | 0 | 0 | 3.125 |
| NT2RI2007054 | 0 | 0 | 0 | 0 | 0 | 0 | 8.661 |
| NT2RI2007133 | 0 | 0 | 0 | 0 | 2.605 | 0 | 2.617 |
| NT2RI2007148 | 0 | 0 | 0 | 0 | 6.270 | 0 | 6.300 |
| NT2RI2007384 | 0 | 0 | 0 | 0 | 0 | 0 | 2.889 |
| NT2RI2007754 | 0 | 0 | 0 | 0 | 0 | 0 | 64.734 |
| NT2RI2007987 | 0 | 0 | 0 | 0 | 0 | 11.393 | 0 |
| NT2RI2008045 | 0 | 0 | 0 | 0 | 5.155 | 4.913 | 0 |
| NT2RI2008141 | 0 | 0 | 0 | 0 | 14.197 | 0 | 0 |
| NT2RI2008171 | 0 | 0 | 0 | 0 | 0 | 0 | 29.622 |
| NT2RI2008396 | 9.179 | 0 | 0 | 0 | 0 | 2.789 | 0 |
| NT2RI2008481 | 0 | 0 | 0 | 0 | 0 | 0 | 4.934 |
| NT2RI2008526 | 0 | 0 | 0 | 0 | 5.090 | 0 | 0 |
| NT2RI2008598 | 0 | 0 | 0 | 0 | 55.694 | 0 | 0 |
| NT2RI2008622 | 0 | 0 | 0 | 0 | 20.953 | 0 | 0 |
| NT2RI2008791 | 0 | 0 | 0 | 0 | 0 | 0 | 7.784 |
| NT2RI2009037 | 0 | 0 | 0 | 0 | 5.597 | 0 | 0 |
| NT2RI2009065 | 0 | 0 | 0 | 10.045 | 3.101 | 0 | 0 |
| NT2RI2009194 | 0 | 0 | 0 | 0 | 6.525 | 0 | 0 |
| NT2RI2009233 | 0 | 0 | 0 | 0 | 14.976 | 0 | 0 |
| NT2RI2009269 | 0 | 0 | 0 | 0 | 0 | 0 | 6.593 |
| NT2RI2009583 | 0 | 4.840 | 0 | 0 | 0 | 0 | 0 |
| NT2RI2022468 | 0 | 0 | 0 | 0 | 44.507 | 0 | 0 |
| NT2RI3007543 | 0 | 0 | 0 | 18.247 | 5.633 | 10.737 | 0 |
| NT2RP6000033 | 0 | 89.975 | 0 | 0 | 0 | 0 | 0 |
| NT2RP6000039 | 0 | 0 | 0 | 38.566 | 0 | 0 | 0 |
| NT2RP6000123 | 0 | 0 | 0 | 8.419 | 0 | 0 | 0 |
| NT2RP7000076 | 0 | 0 | 0 | 0 | 0 | 0 | 4.066 |
| NT2RP7001166 | 0 | 0 | 0 | 0 | 0 | 4.732 | 0 |
| NT2RP7001283 | 0 | 12.176 | 0 | 0 | 3.737 | 3.562 | 0 |
| NT2RP7001591 | 0 | 56.239 | 0 | 0 | 0 | 0 | 0 |
| NT2RP7001962 | 0 | 0 | 0 | 0 | 17.637 | 0 | 0 |
| NT2RP7002028 | 0 | 43.470 | 0 | 0 | 0 | 0 | 0 |
| NT2RP7002379 | 0 | 0 | 0 | 0 | 3.342 | 3.185 | 0 |
| NT2RP7002449 | 0 | 0 | 0 | 0 | 0 | 12.783 | 0 |
| NT2RP7002450 | 0 | 0 | 0 | 0 | 0 | 0 | 17.805 |
| NT2RP7002619 | 0 | 0 | 0 | 0 | 0 | 6.894 | 0 |
| NT2RP7003960 | 0 | 0 | 0 | 0 | 0 | 10.484 | 0 |
| NT2RP7004348 | 0 | 0 | 0 | 0 | 0 | 14.300 | 0 |
| NT2RP7004751 | 0 | 0 | 0 | 0 | 0 | 2.962 | 0 |
| NT2RP7004925 | 0 | 0 | 0 | 0 | 8.383 | 0 | 0 |
| NT2RP7006075 | 0 | 0 | 0 | 0 | 0 | 16.578 | 0 |
| NT2RP7006717 | 0 | 0 | 0 | 0 | 0 | 0 | 4.389 |
| NT2RP7007154 | 0 | 0 | 0 | 0 | 0 | 3.608 | 0 |
| NT2RP7007177 | 0 | 0 | 0 | 0 | 9.042 | 0 | 0 |
| NT2RP7008623 | 89.627 | 0 | 0 | 0 | 0 | 0 | 0 |
| NT2RP7009087 | 0 | 0 | 0 | 0 | 16.129 | 0 | 0 |
| NT2RP7009149 | 0 | 0 | 0 | 0 | 0 | 30.278 | 0 |
| NT2RP7012776 | 0 | 0 | 0 | 0 | 55.802 | 0 | 0 |
| NT2RP7014005 | 0 | 0 | 0 | 0 | 0 | 36.812 | 0 |
| NT2RP8007920 | 0 | 0 | 0 | 0 | 0 | 12.517 | 0 |
| NTONG1000182 | 0 | 0 | 0 | 0 | 0 | 0 | 8.259 |
| NTONG1000257 | 0 | 0 | 0 | 0 | 0 | 6.963 | 0 |
| NTONG2000265 | 0 | 0 | 0 | 0 | 5.660 | 0 | 0 |
| NTONG2000878 | 24.591 | 0 | 0 | 0 | 0 | 7.472 | 0 |
| NTONG2001567 | 0 | 0 | 0 | 6.595 | 2.036 | 0 | 0 |
| NTONG2001762 | 0 | 0 | 0 | 0 | 11.973 | 0 | 0 |
| NTONG2002948 | 0 | 0 | 0 | 0 | 0 | 0 | 44.440 |
| NTONG2003839 | 0 | 0 | 0 | 0 | 17.408 | 0 | 0 |
| NTONG2007658 | 0 | 0 | 0 | 43.039 | 0 | 0 | 0 |
| NTONG2008483 | 0 | 0 | 0 | 0 | 0 | 0 | 5.330 |
| OCBBF1000086 | 0 | 0 | 0 | 0 | 0 | 4.843 | 0 |
| OCBBF1000175 | 0 | 0 | 0 | 0 | 0 | 0 | 48.053 |
| OCBBF2000712 | 0 | 0 | 0 | 0 | 0 | 5.980 | 0 |
| OCBBF2000982 | 0 | 18.864 | 0 | 0 | 0 | 0 | 0 |
| OCBBF2001492 | 0 | 0 | 0 | 0 | 0 | 0 | 4.577 |
| OCBBF2002626 | 0 | 0 | 0 | 0 | 0 | 5.343 | 0 |
| OCBBF2004273 | 0 | 19.389 | 0 | 0 | 5.951 | 0 | 0 |
| OCBBF2007829 | 0 | 0 | 0 | 0 | 0 | 3.474 | 3.663 |
| OCBBF2008144 | 0 | 62.383 | 0 | 0 | 0 | 0 | 0 |
| OCBBF2008483 | 0 | 0 | 0 | 0 | 57.797 | 0 | 0 |
| OCBBF2009424 | 0 | 0 | 0 | 0 | 0 | 45.919 | 0 |
| OCBBF2010830 | 0 | 0 | 0 | 0 | 0 | 11.135 | 0 |
| OCBBF2011021 | 0 | 0 | 0 | 0 | 9.597 | 0 | 0 |
| OCBBF2011536 | 0 | 0 | 0 | 42.905 | 0 | 12.623 | 0 |
| OCBBF2012714 | 0 | 0 | 0 | 0 | 38.538 | 0 | 0 |
| OCBBF2014292 | 0 | 0 | 0 | 0 | 6.876 | 0 | 0 |
| OCBBF2014576 | 0 | 0 | 0 | 78.585 | 0 | 0 | 0 |
| OCBBF2018707 | 0 | 0 | 0 | 0 | 14.932 | 0 | 0 |
| OCBBF2018956 | 35.243 | 0 | 0 | 0 | 0 | 0 | 0 |
| OCBBF2024850 | 0 | 0 | 0 | 0 | 0 | 0 | 14.826 |
| OCBBF2035226 | 0 | 12.708 | 0 | 0 | 0 | 0 | 0 |
| PEBLM2006366 | 0 | 0 | 0 | 0 | 0 | 0 | 18.464 |
| PEBLM2006709 | 0 | 0 | 0 | 0 | 0 | 35.204 | 0 |
| PEBLM2007774 | 0 | 6.515 | 0 | 0 | 0 | 0 | 2.009 |
| PLACE5000080 | 0 | 0 | 0 | 0 | 0 | 78.048 | 0 |
| PLACE5000170 | 0 | 0 | 0 | 0 | 0 | 0 | 23.195 |
| PLACE5000282 | 0 | 0 | 0 | 0 | 0 | 78.048 | 0 |
| PLACE6000325 | 0 | 0 | 0 | 0 | 0 | 51.259 | 0 |
| PLACE6000379 | 3.678 | 0 | 0 | 0 | 1.173 | 4.470 | 0 |
| PLACE6000414 | 0 | 0 | 0 | 0 | 0 | 24.324 | 0 |
| PLACE6001064 | 0 | 0 | 0 | 0 | 0 | 7.260 | 0 |
| PLACE6001281 | 0 | 0 | 0 | 0 | 0 | 0 | 22.967 |
| PLACE6002084 | 0 | 0 | 0 | 0 | 2.452 | 0 | 0 |
| PLACE6003383 | 0 | 0 | 0 | 0 | 0 | 0 | 15.925 |
| PLACE6004312 | 12.559 | 0 | 0 | 0 | 0 | 0 | 4.023 |
| PLACE6004578 | 0 | 26.814 | 0 | 0 | 0 | 0 | 0 |
| PLACE6006042 | 0 | 0 | 0 | 0 | 0 | 34.446 | 0 |
| PLACE6006186 | 0 | 0 | 0 | 0 | 0 | 45.767 | 0 |
| PLACE6007436 | 0 | 0 | 0 | 0 | 0 | 0 | 23.968 |
| PLACE6010484 | 0 | 0 | 0 | 0 | 0 | 9.780 | 0 |
| PLACE6010848 | 0 | 0 | 0 | 0 | 54.330 | 0 | 0 |
| PLACE6011041 | 0 | 58.854 | 0 | 0 | 0 | 0 | 0 |
| PLACE6012028 | 0 | 0 | 0 | 0 | 0 | 0 | 41.878 |
| PLACE6014882 | 0 | 0 | 0 | 0 | 78.861 | 0 | 0 |
| PLACE6015051 | 0 | 0 | 0 | 0 | 0 | 0 | 30.753 |
| PLACE6016383 | 0 | 0 | 0 | 0 | 0 | 0 | 43.129 |
| PLACE6017578 | 0 | 0 | 0 | 0 | 0 | 63.999 | 0 |
| PLACE6017791 | 0 | 0 | 0 | 0 | 0 | 0 | 73.274 |
| PLACE6018487 | 0 | 0 | 0 | 28.705 | 0 | 0 | 0 |
| PLACE6019385 | 0 | 87.742 | 0 | 0 | 0 | 0 | 0 |
| PLACE6020145 | 0 | 0 | 0 | 0 | 0 | 0 | 55.988 |
| PROST1000097 | 0 | 0 | 0 | 12.646 | 0 | 0 | 0 |
| PROST1000199 | 0 | 0 | 0 | 0 | 0 | 4.623 | 4.874 |
| PROST1000343 | 59.153 | 0 | 0 | 0 | 0 | 0 | 0 |
| PROST1000512 | 0 | 46.564 | 0 | 0 | 0 | 0 | 0 |
| PROST1000536 | 0 | 0 | 0 | 0 | 39.920 | 0 | 0 |
| PROST1000564 | 0 | 29.078 | 0 | 0 | 0 | 8.506 | 0 |
| PROST2000138 | 0 | 1.875 | 0 | 0 | 1.151 | 2.742 | 1.156 |
| PROST2001283 | 0 | 0 | 0 | 45.762 | 0 | 0 | 14.195 |
| PROST2002078 | 0 | 0 | 0 | 0 | 0 | 0 | 16.213 |
| PROST2003338 | 0 | 0 | 0 | 0 | 0 | 7.082 | 7.467 |
| PROST2003517 | 0 | 0 | 0 | 0 | 0 | 0 | 17.563 |
| PROST2004095 | 0 | 10.125 | 0 | 0 | 3.108 | 0 | 3.122 |
| PROST2004416 | 0 | 0 | 0 | 0 | 4.515 | 0 | 0 |
| PROST2008489 | 0 | 0 | 0 | 0 | 0 | 0 | 4.321 |
| PROST2010782 | 0 | 0 | 78.029 | 0 | 0 | 0 | 0 |
| PROST2012745 | 0 | 0 | 0 | 0 | 0 | 0 | 25.800 |
| PROST2012780 | 0 | 0 | 0 | 0 | 0 | 0 | 48.531 |
| PROST2013053 | 0 | 64.069 | 0 | 0 | 0 | 0 | 0 |
| PROST2017203 | 27.042 | 0 | 0 | 27.929 | 0 | 0 | 0 |
| PROST2017692 | 0 | 0 | 0 | 0 | 0 | 13.988 | 0 |
| PUAEN2000374 | 0 | 0 | 0 | 0 | 2.125 | 0 | 0 |
| PUAEN2000497 | 53.684 | 0 | 0 | 0 | 0 | 0 | 0 |
| SALGL1000157 | 0 | 0 | 0 | 0 | 0.863 | 0 | 0.868 |
| SKMUS1000064 | 0 | 0 | 0 | 0 | 0 | 0 | 46.964 |
| SKMUS1000084 | 0 | 0 | 0 | 0 | 10.225 | 0 | 0 |
| SKMUS1000138 | 0 | 0 | 0 | 0 | 0 | 0 | 5.766 |
| SKMUS1000186 | 0 | 0 | 0 | 0 | 0 | 2.540 | 0 |
| SKMUS2000198 | 0 | 0 | 0 | 0 | 0 | 0 | 21.074 |
| SKMUS2000361 | 0 | 0 | 0 | 0 | 0 | 0 | 7.134 |
| SKMUS2000380 | 0 | 0 | 0 | 0 | 0 | 13.722 | 14.467 |
| SKMUS2000458 | 0 | 0 | 0 | 0 | 0 | 0 | 12.752 |
| SKMUS2000679 | 13.951 | 0 | 0 | 0 | 0 | 0 | 4.469 |
| SKMUS2000757 | 0 | 0 | 0 | 0 | 32.810 | 0 | 0 |
| SKMUS2000821 | 0 | 0 | 0 | 0 | 0 | 0 | 5.295 |
| SKMUS2000873 | 0 | 0 | 0 | 0 | 0 | 0 | 58.714 |
| SKMUS2000931 | 0 | 0 | 0 | 0 | 0 | 0 | 3.630 |
| SKMUS2001008 | 0 | 0 | 0 | 0 | 0 | 0 | 6.322 |
| SKMUS2001501 | 0 | 0 | 0 | 0 | 0 | 0 | 29.082 |
| SKMUS2001634 | 0 | 28.321 | 0 | 0 | 0 | 8.284 | 0 |
| SKMUS2006394 | 0 | 0 | 0 | 0 | 0 | 0 | 32.130 |
| SKNMC1000137 | 0 | 0 | 0 | 22.798 | 7.038 | 0 | 0 |
| SKNMC1000168 | 0 | 0 | 0 | 18.010 | 0 | 0 | 0 |
| SKNMC2000224 | 0 | 0 | 0 | 0 | 0 | 39.635 | 0 |
| SKNMC2000635 | 0 | 3.880 | 0 | 0 | 7.146 | 6.810 | 0 |
| SKNMC2000649 | 0 | 0 | 0 | 0 | 0 | 11.546 | 0 |
| SKNMC2000698 | 0 | 0 | 0 | 0 | 0 | 13.070 | 0 |
| SKNSH2000716 | 0 | 37.491 | 0 | 0 | 0 | 0 | 0 |
| SKNSH2001931 | 0 | 0 | 0 | 0 | 33.930 | 0 | 0 |
| SKNSH2002768 | 0 | 0 | 0 | 0 | 0 | 0 | 15.796 |
| SKNSH2006234 | 0 | 0 | 0 | 0 | 23.241 | 0 | 0 |
| SMINT1000039 | 0 | 0 | 0 | 0 | 65.296 | 0 | 0 |
| SMINT1000131 | 0 | 0 | 0 | 0 | 6.080 | 5.795 | 0 |
| SMINT1000192 | 0 | 0 | 0 | 64.044 | 0 | 0 | 0 |
| SMINT2000277 | 0 | 0 | 0 | 0 | 0 | 0 | 12.095 |
| SMINT2000396 | 0 | 0 | 0 | 0 | 8.127 | 0 | 0 |
| SMINT2000441 | 0 | 0 | 0 | 0 | 2.997 | 2.856 | 0 |
| SMINT2000468 | 0 | 0 | 0 | 0 | 0 | 14.477 | 0 |
| SMINT2000694 | 0 | 0 | 0 | 0 | 0 | 0 | 7.930 |
| SMINT2001818 | 0 | 0 | 0 | 0 | 0 | 0 | 6.254 |
| SMINT2002689 | 0 | 0 | 0 | 0 | 0 | 0 | 7.842 |
| SMINT2003074 | 0 | 0 | 0 | 0 | 9.101 | 0 | 0 |
| SMINT2003169 | 0 | 0 | 0 | 0 | 3.123 | 0 | 3.138 |
| SMINT2003905 | 0 | 0 | 0 | 0 | 0 | 4.899 | 0 |
| SMINT2004144 | 0 | 9.818 | 0 | 0 | 0 | 0 | 0 |
| SMINT2007433 | 0 | 0 | 0 | 0 | 0 | 0 | 55.688 |
| SMINT2012122 | 0 | 0 | 0 | 0 | 0 | 0 | 23.322 |
| SMINT2012291 | 0 | 0 | 0 | 0 | 0 | 0 | 30.763 |
| SMINT2013031 | 64.629 | 0 | 0 | 0 | 0 | 0 | 0 |
| SMINT2017599 | 85.510 | 0 | 0 | 0 | 0 | 0 | 0 |
| SMINT2018353 | 0 | 0 | 0 | 0 | 0 | 0 | 65.405 |
| SPLEN1000116 | 0 | 0 | 0 | 0 | 0 | 0 | 3.302 |
| SPLEN1000166 | 0 | 0 | 0 | 0 | 0 | 7.153 | 0 |
| SPLEN2000258 | 0 | 0 | 0 | 0 | 29.066 | 0 | 0 |
| SPLEN2000348 | 0 | 0 | 0 | 0 | 0 | 17.701 | 0 |
| SPLEN2000874 | 0 | 0 | 0 | 10.483 | 0 | 0 | 3.252 |
| SPLEN2000882 | 0 | 0 | 0 | 0 | 11.663 | 0 | 0 |
| SPLEN2002477 | 33.838 | 0 | 0 | 0 | 0 | 0 | 0 |
| SPLEN2002744 | 0 | 0 | 0 | 0 | 0 | 0 | 14.879 |
| SPLEN2005806 | 0 | 13.228 | 0 | 0 | 0 | 3.869 | 0 |
| SPLEN2005927 | 0 | 0 | 0 | 0 | 0 | 0 | 28.728 |
| SPLEN2006325 | 0 | 0 | 0 | 0 | 55.314 | 0 | 0 |
| SPLEN2013503 | 0 | 0 | 0 | 53.981 | 0 | 0 | 0 |
| SPLEN2013690 | 0 | 0 | 0 | 0 | 0 | 68.333 | 0 |
| SPLEN2014572 | 0 | 0 | 0 | 0 | 0 | 39.379 | 0 |
| SPLEN2016268 | 0 | 0 | 0 | 9.292 | 0 | 2.734 | 2.882 |
| SPLEN2016421 | 0 | 0 | 0 | 0 | 0 | 13.109 | 13.821 |
| SPLEN2016743 | 0 | 0 | 0 | 0 | 0 | 0 | 38.250 |
| SPLEN2016972 | 0 | 43.864 | 0 | 0 | 0 | 0 | 0 |
| SPLEN2018302 | 0 | 0 | 0 | 0 | 40.372 | 0 | 0 |
| SPLEN2019405 | 0 | 30.978 | 0 | 0 | 0 | 0 | 0 |
| SPLEN2029912 | 0 | 0 | 0 | 0 | 10.846 | 0 | 0 |
| SPLEN2032157 | 0 | 0 | 0 | 0 | 37.939 | 0 | 0 |
| STOMA1000189 | 0 | 0 | 0 | 33.633 | 0 | 0 | 0 |
| STOMA2000121 | 0 | 26.360 | 0 | 0 | 0 | 0 | 0 |
| STOMA2000395 | 0 | 0 | 0 | 0 | 14.173 | 0 | 0 |
| STOMA2000396 | 0 | 0 | 0 | 0 | 0 | 0 | 34.381 |
| STOMA2002166 | 12.183 | 0 | 0 | 0 | 3.884 | 0 | 0 |
| STOMA2006229 | 0 | 0 | 0 | 0 | 0 | 0 | 40.108 |
| SYNOV1000045 | 0 | 0 | 0 | 0 | 0 | 0 | 46.864 |
| SYNOV1000124 | 0 | 0 | 0 | 0 | 7.386 | 0 | 0 |
| SYNOV2001033 | 0 | 0 | 0 | 0 | 3.981 | 0 | 0 |
| SYNOV2009172 | 0 | 0 | 0 | 0 | 0 | 3.293 | 3.472 |
| T1ESE2000609 | 0 | 0 | 0 | 0 | 0 | 0 | 15.163 |
| TESOP2002451 | 0 | 51.382 | 0 | 0 | 0 | 0 | 0 |
| TESTI1000023 | 0 | 0 | 0 | 0 | 0 | 5.307 | 0 |
| TESTI2001099 | 0 | 0 | 0 | 0 | 3.253 | 3.101 | 0 |
| TESTI2001153 | 0 | 0 | 0 | 0 | 0 | 2.520 | 42.503 |
| TESTI2001269 | 0 | 0 | 0 | 0 | 0 | 3.454 | 0 |
| TESTI2001829 | 0 | 0 | 0 | 0 | 0 | 5.373 | 0 |
| TESTI2003325 | 0 | 0 | 0 | 0 | 0 | 0 | 28.233 |
| TESTI2003413 | 0 | 0 | 0 | 0 | 0 | 16.475 | 0 |
| TESTI2003533 | 0 | 18.755 | 0 | 0 | 0 | 0 | 0 |
| TESTI2003579 | 0 | 0 | 0 | 0 | 0 | 0 | 77.283 |
| TESTI2005759 | 0 | 20.230 | 0 | 0 | 0 | 0 | 0 |
| TESTI2005908 | 32.790 | 0 | 0 | 0 | 0 | 0 | 0 |
| TESTI2006051 | 0 | 0 | 0 | 9.107 | 0 | 0 | 0 |
| TESTI2006588 | 0 | 0 | 0 | 0 | 0 | 3.426 | 3.612 |
| TESTI2006748 | 0 | 0 | 0 | 0 | 0 | 21.767 | 0 |
| TESTI2007211 | 0 | 0 | 0 | 0 | 0 | 0 | 22.035 |
| TESTI2007464 | 0 | 0 | 0 | 0 | 0 | 25.379 | 26.758 |
| TESTI2008240 | 5.207 | 0 | 0 | 0 | 0 | 6.329 | 0 |
| TESTI2010513 | 0 | 0 | 0 | 0 | 0 | 2.486 | 0 |
| TESTI2011286 | 0 | 0 | 0 | 0 | 0 | 82.877 | 0 |
| TESTI2012511 | 0 | 92.868 | 0 | 0 | 0 | 0 | 0 |
| TESTI2012778 | 0 | 3.997 | 0 | 0 | 1.227 | 0 | 0 |
| TESTI2015213 | 0 | 0 | 0 | 0 | 0 | 3.247 | 0 |
| TESTI2017954 | 0 | 0 | 0 | 0 | 0 | 4.192 | 0 |
| TESTI2018997 | 0 | 0 | 0 | 0 | 0 | 13.178 | 0 |
| TESTI2021297 | 0 | 0 | 0 | 0 | 0 | 43.439 | 0 |
| TESTI2021425 | 0 | 0 | 0 | 37.027 | 0 | 0 | 0 |
| TESTI2024844 | 0 | 0 | 0 | 0 | 0 | 7.249 | 7.643 |
| TESTI2025422 | 0 | 0 | 0 | 0 | 0 | 0 | 16.559 |
| TESTI2028296 | 0 | 0 | 0 | 0 | 0 | 0 | 16.451 |
| TESTI2034940 | 0 | 5.635 | 0 | 5.603 | 0 | 0 | 5.214 |
| TESTI4000014 | 0 | 0 | 0 | 0 | 1.186 | 0 | 0 |
| TESTI4002799 | 0 | 9.553 | 0 | 0 | 0 | 0 | 0 |
| TESTI4010851 | 0 | 0 | 0 | 0 | 3.630 | 0 | 0 |
| TESTI4013441 | 0 | 3.393 | 0 | 0 | 2.083 | 2.977 | 1.046 |
| THYMU1000002 | 0 | 12.804 | 0 | 0 | 0 | 0 | 0 |
| THYMU1000109 | 0 | 0 | 0 | 16.927 | 0 | 0 | 0 |
| THYMU1000329 | 0 | 0 | 0 | 0 | 0 | 33.723 | 0 |
| THYMU2000382 | 0 | 0 | 0 | 13.036 | 0 | 0 | 0 |
| THYMU2000436 | 0 | 19.931 | 0 | 0 | 0 | 0 | 0 |
| THYMU2002756 | 0 | 0 | 0 | 0 | 48.606 | 0 | 0 |
| THYMU2003046 | 0 | 0 | 0 | 0 | 0 | 12.164 | 0 |
| THYMU2003133 | 0 | 0 | 0 | 0 | 23.036 | 0 | 0 |
| THYMU2004284 | 0 | 0 | 0 | 0 | 0 | 0 | 89.631 |
| THYMU2005003 | 0 | 0 | 0 | 0 | 0 | 88.356 | 0 |
| THYMU2005482 | 0 | 0 | 0 | 0 | 81.696 | 0 | 0 |
| THYMU2005980 | 0 | 0 | 0 | 0 | 0 | 0 | 54.098 |
| THYMU2008321 | 0 | 0 | 0 | 0 | 0 | 0 | 19.286 |
| THYMU2012625 | 0 | 22.471 | 0 | 0 | 0 | 0 | 0 |
| THYMU2027125 | 0 | 0 | 0 | 0 | 0 | 0 | 3.582 |
| THYMU2032155 | 0 | 0 | 0 | 0 | 0 | 45.186 | 0 |
| THYMU3033626 | 0 | 0 | 0 | 0 | 37.318 | 0 | 0 |
| THYMU3044188 | 0 | 0 | 0 | 96.268 | 0 | 0 | 0 |
| TKIDN2004185 | 0 | 0 | 0 | 85.316 | 0 | 0 | 0 |
| TKIDN2004748 | 0 | 0 | 0 | 0 | 64.204 | 0 | 0 |
| TKIDN2005487 | 0 | 0 | 0 | 0 | 4.770 | 0 | 0 |
| TKIDN2015788 | 54.776 | 0 | 0 | 0 | 0 | 0 | 0 |
| TRACH2000047 | 0 | 0 | 0 | 0 | 0 | 0 | 35.730 |
| TRACH2000079 | 0 | 0 | 0 | 0 | 3.597 | 0 | 0 |
| TRACH2000248 | 0 | 0 | 0 | 0 | 0 | 0 | 4.654 |
| TRACH2000321 | 0 | 0 | 0 | 0 | 3.262 | 0 | 0 |
| TRACH2000540 | 0 | 0 | 0 | 30.640 | 0 | 0 | 0 |
| TRACH2001021 | 0 | 0 | 0 | 0 | 0 | 0 | 2.793 |
| TRACH2001289 | 0 | 7.352 | 0 | 0 | 2.257 | 0 | 0 |
| TRACH2001607 | 0 | 0 | 0 | 0 | 0 | 0 | 6.700 |
| TRACH2005710 | 0 | 0 | 0 | 0 | 0 | 84.960 | 0 |
| TRACH2005811 | 0 | 0 | 0 | 0 | 0 | 6.673 | 0 |
| TRACH2007399 | 0 | 0 | 0 | 0 | 3.127 | 2.981 | 0 |
| TRACH2011113 | 0 | 0 | 0 | 0 | 0 | 29.874 | 0 |
| TRACH2014124 | 0 | 0 | 0 | 0 | 0 | 0 | 6.886 |
| TRACH2015824 | 0 | 0 | 0 | 49.981 | 0 | 0 | 0 |
| TRACH3002192 | 12.987 | 0 | 0 | 0 | 0 | 3.946 | 0 |
| TRACH3005294 | 77.338 | 0 | 0 | 0 | 0 | 0 | 0 |
| TRACH3007479 | 0 | 0 | 0 | 0 | 0 | 0 | 7.175 |
| UMVEN1000186 | 0 | 0 | 0 | 0 | 1.754 | 1.672 | 0 |
| UMVEN2000133 | 0 | 0 | 0 | 0 | 0 | 0 | 3.910 |
| UTERU1000182 | 0 | 0 | 0 | 0 | 0 | 0 | 5.412 |
| UTERU2000095 | 0 | 0 | 0 | 0 | 0 | 0 | 2.761 |
| UTERU2000263 | 0 | 0 | 0 | 0 | 0 | 3.242 | 0 |
| UTERU2000424 | 0 | 0 | 0 | 0 | 0 | 0 | 5.666 |
| UTERU2000485 | 0 | 0 | 0 | 0 | 84.772 | 0 | 0 |
| UTERU2001607 | 0 | 0 | 0 | 0 | 9.794 | 0 | 0 |
| UTERU2002294 | 0 | 0 | 0 | 0 | 0 | 11.486 | 0 |
| UTERU2004037 | 0 | 0 | 0 | 0 | 0 | 13.874 | 0 |
| UTERU2005292 | 0 | 0 | 0 | 66.969 | 0 | 0 | 0 |
| UTERU2006400 | 0 | 0 | 0 | 0 | 84.772 | 0 | 0 |
| UTERU2007924 | 0 | 57.855 | 0 | 0 | 0 | 0 | 0 |
| UTERU2008085 | 0 | 0 | 0 | 0 | 1.199 | 0 | 8.435 |
| UTERU2008938 | 0 | 0 | 0 | 0 | 0 | 0 | 16.418 |
| UTERU2009335 | 0 | 0 | 0 | 0 | 0 | 0 | 20.234 |
| UTERU2010417 | 0 | 0 | 0 | 0 | 0 | 1.995 | 0 |
| UTERU2012230 | 0 | 0 | 0 | 0 | 0 | 0 | 11.740 |
| UTERU2014898 | 0 | 32.915 | 0 | 0 | 0 | 0 | 0 |
| UTERU2015653 | 0 | 12.620 | 0 | 0 | 0 | 0 | 0 |
| UTERU2023045 | 0 | 0 | 0 | 0 | 0 | 57.268 | 0 |
| UTERU2023175 | 0 | 0 | 0 | 32.020 | 0 | 0 | 0 |

[0760] Genes whose expression levels were negligibly low in each of the above-described libraries are shown with their clone names below.

[0761] 3NB691000018, 3NB691000085, 3NB691000113, 3NB691000116, 3NB691000191, 3NB692000012, 3NB692000029, 3NB692000102, 3NB692000154, 3NB692000276, 3NB692000305, 3NB692000330, 3NB692000374, 3NB692000429, 3NB692000484, 3NB692000529, 3NB692000545, 3NB692000973, 3NB692001034, 3NB692001040, 3NB692001123, 3NB692001267, 3NB692001288, 3NB692001339, 3NB692001349, 3NB692001366, 3NB692001408, 3NB692001433, 3NB692001442, 3NB692001459, 3NB692001471, 3NB692001496, 3NB692001501, 3NB692001507, 3NB692001511, 3NB692001519, 3NB692001526, 3NB692001538, 3NB692001548, 3NB692001557, 3NB692001637, 3NB692001719, 3NB692001853, 3NB692001861, 3NB692002051, 3NB692002365, 3NB692002685, 3NB692002806, 3NB692003538, 3NB692004045,

[0762] 3NB692004724, 3NB692005439, 3NB692006952, 3NB692008178, 3NB692008729, ACTVT2000380, ADIPS1000064, ADIPS2000069, ADIPS2000088, ADIPS2000245, ADIPS2000425, ADRGL1000002, ADRGL1000018, ADRGL1000033, ADRGL1000038, ADRGL1000065, ADRGL1000067, ADRGL1000111, ADRGL1000144, ADRGL1000147, ADRGL1000160, ADRGL1000165, ADRGL1000182, ADRGL2000042, ADRGL2000056, ADRGL2000064, ADRGL2000074, ADRGL2000085, ADRGL2000117, ADRGL2000142, ADRGL2000172, ADRGL2000248, ADRGL2000261, ADRGL2000323, ADRGL2000328, ADRGL2000353, ADRGL2000384, ADRGL2000428, ADRGL2000636, ADRGL2000644, ADRGL2000968, ADRGL2001119, ADRGL2001229, ADRGL2001287, ADRGL2001301, ADRGL2001354, ADRGL2001554, ADRGL2001651, ADRGL2001756, ADRGL2001830,

[0763] ADRGL2001836, ADRGL2001854, ADRGL2002013, ADRGL2002029, ADRGL2002191, ADRGL2002260, ADRGL2002392, ADRGL2002477, ADRGL2002679, ADRGL2002753, ADRGL2002857, ADRGL2003017, ADRGL2003329, ADRGL2003552, ADRGL2003585, ADRGL2003638, ADRGL2003684, ADRGL2003773, ADRGL2003785, ADRGL2004031, ADRGL2004077, ADRGL2004451, ADRGL2004459, ADRGL2004676, ADRGL2004708, ADRGL2004724, ADRGL2004749, ADRGL2004770, ADRGL2004777, ADRGL2004833, ADRGL2005336, ADRGL2005564, ADRGL2005756, ADRGL2005838, ADRGL2005926, ADRGL2005961, ADRGL2006034, ADRGL2006124, ADRGL2006177, ADRGL2006193, ADRGL2006377, ADRGL2006677, ADRGL2006732, ADRGL2006767, ADRGL2006817, ADRGL2006846, ADRGL2006886, ADRGL2007080, ADRGL2007125, ADRGL2007283,

[0764] ADRGL2007313, ADRGL2007357, ADRGL2007636, ADRGL2007651, ADRGL2007810, ADRGL2007877, ADRGL2007906, ADRGL2007974, ADRGL2008023, ADRGL2008331, ADRGL2008337, ADRGL2008535, ADRGL2008966, ADRGL2009146, ADRGL2009273, ADRGL2009324, ADRGL2009489, ADRGL2009533, ADRGL2009691, ADRGL2009755, ADRGL2010315, ADRGL2010594, ADRGL2010860, ADRGL2010974, ADRGL2011190, ADRGL2011330, ADRGL2012038, ADRGL2012179, AHMSC1000138, ASTRO1000009, ASTRO1000018, ASTRO1000029, ASTRO1000096, ASTRO2000011, ASTRO2000014, ASTRO2000095, ASTRO2000141, ASTRO2000191, ASTRO2000278, ASTRO2000372, ASTRO2000381, ASTRO2000403, ASTRO2000417, ASTRO2000480, ASTRO2000482, ASTRO2000533, ASTRO2000653, ASTRO2000725, ASTRO2000801, ASTRO2000914,

[0765] ASTRO2001001, ASTRO2001008, ASTRO2001029, ASTRO2001088, ASTRO2001107, ASTRO2001122, ASTRO2001227, ASTRO2001249, ASTRO2001480, ASTRO2002024, ASTRO2002035, ASTRO2002064, ASTRO2002202, ASTRO2002459, ASTRO2002571, ASTRO2002632, ASTRO2002659, ASTRO2002693, ASTRO2002720, ASTRO2002733, ASTRO2002743, ASTRO2002842, ASTRO2003212, ASTRO2003316, ASTRO2003461, ASTRO2003574, ASTRO2003581, ASTRO2003740, ASTRO2003840, ASTRO2003925, ASTRO2003960, ASTRO2004032, ASTRO2004051, ASTRO2004177, ASTRO2004217, ASTRO2004297, ASTRO2004584, ASTRO2004628, ASTRO2004751, ASTRO2004877, ASTRO2004974, ASTRO2005008, ASTRO2005081, ASTRO2005096, ASTRO2005242, ASTRO2005273, ASTRO2005343, ASTRO2005360, ASTRO2005413, ASTRO2005423,

[0766] ASTRO2005553, ASTRO2005557, ASTRO2005575, ASTRO2005593, ASTRO2005687, ASTRO2005726, ASTRO2005863, ASTRO2005896, ASTRO2005902, ASTRO2006356, ASTRO2006475, ASTRO2006732, ASTRO2006747, ASTRO2006920, ASTRO2006952, ASTRO2007047, ASTRO2007221, ASTRO2007377, ASTRO2007515, ASTRO2007578, ASTRO2007643, ASTRO2007666, ASTRO2007948, ASTRO2007956, ASTRO2007962, ASTRO2008040, ASTRO2008216, ASTRO2008239, ASTRO2008409, ASTRO2008425, ASTRO2008508, ASTRO2008777, ASTRO2008895, ASTRO2008960, ASTRO2008972, ASTRO2009068, ASTRO2009118, ASTRO2009177, ASTRO2009333, ASTRO2009458, ASTRO2009526, ASTRO2009879, ASTRO2010072, ASTRO2010582, ASTRO2010615, ASTRO2010799, ASTRO2010819, ASTRO2010962, ASTRO2010996, ASTRO2011149,

[0767] ASTRO2011422, ASTRO2011426, ASTRO2011437, ASTRO2011461, ASTRO2011834, ASTRO2011893, ASTRO2012552, ASTRO2013124, ASTRO2013671, ASTRO2013802, ASTRO2014135, ASTRO2014174, ASTRO2014211, ASTRO2014363, ASTRO2014392, ASTRO2014498, ASTRO2014561, ASTRO2014576, ASTRO2014923, ASTRO2014961, ASTRO2015162, ASTRO2015185, ASTRO2015529, ASTRO2015987, ASTRO2016044, ASTRO2016114, ASTRO2016148, ASTRO2016681, ASTRO2016819, ASTRO2016847, ASTRO2016892, ASTRO2017348, ASTRO2017627, ASTRO2018169, ASTRO2018373, ASTRO2018540, ASTRO2019039, ASTRO2019171, ASTRO3000154, ASTRO3000172, ASTRO3000177, ASTRO3000301, ASTRO3000474, ASTRO3000482, BEAST2000454, BGGI11000123, BGGI11000193, BGGI11000285, BGGI12000022, BGGI12000067,

[0768] BGGI12000161, BGGI12000533, BGGI12000544, BGGI12000616, BGGI12000684, BGGI12001002, BGGI12001075, BGGI12001241, BGGI12001247, BGGI12001682, BGGI12001714, BLADE1000176, BLADE2000181, BLADE2000256, BLADE2000340, BLADE2000389, BLADE2000463, BLADE2000492, BLADE2000579, BLADE2000640, BLADE2000866, BLADE2000938, BLADE2001031, BLADE2001133, BLADE2001138, BLADE2001141, BLADE2001371, BLADE2001458, BLADE2001575, BLADE2001753, BLADE2001935, BLADE2001940, BLADE2001987, BLADE2002073, BLADE2002310, BLADE2002730, BLADE2002738, BLADE2002744, BLADE2002782, BLADE2002947, BLADE2002972, BLADE2003474, BLADE2003916, BLADE2004089, BLADE2004345, BLADE2004389, BLADE2004462, BLADE2004628, BLADE2004670, BLADE2004722,

[0769] BLADE2004849, BLADE2005036, BLADE2005038, BLADE2005229, BLADE2005459, BLADE2005792, BLADE2006043, BLADE2006412, BLADE2006415, BLADE2006607, BLADE2006826, BLADE2006830, BLADE2006849, BLADE2006947, BLADE2007033, BLADE2007043, BLADE2007589, BLADE2007666, BLADE2007722, BLADE2007735, BLADE2007744, BLADE2007799, BLADE2007923, BLADE2007935, BLADE2007958, BLADE2008281, BLADE2008398, BLADE2008454, BLADE2008461, BLADE2008479, BLADE2008539, BLADE2008809, BLADE2008995, BLADE2009452, BLADE2009479, BLADE2009593, BNGH41000098, BNGH41000104, BNGH41000118, BNGH41000137, BNGH41000153, BNGH41000169, BNGH41000190, BNGH41000198, BNGH41000216, BNGH41000235, BNGH42000130, BNGH42000132, BNGH42000405, BNGH42000532,

[0770] BNGH42000675, BNGH42000739, BNGH42000791, BNGH42000815, BNGH42000994, BNGH42001406, BNGH42001724, BNGH42002168, BNGH42002244, BNGH42002387, BNGH42002487, BNGH42002489, BNGH42003529, BNGH42003570, BNGH42003641, BNGH42004076, BNGH42004291, BNGH42004538, BNGH42004679, BNGH42005017, BNGH42005235, BNGH42005504, BNGH42006135, BNGH42006226, BNGH42006234, BNGH42007037, BNGH42007366, BNGH42007594, BNGH42007788, BNGH42007798, BNGH42008199, BNGH42008510, BNGH42008603, BNGH42008649, BNGH42008743, BNGH42008832, BNGH42008850, BNGH42008943, BNGH42009021, BNGH42009025, BRACE1000020, BRACE1000047, BRACE1000051, BRACE1000065, BRACE1000073, BRACE1000084, BRACE1000087, BRACE1000092, BRACE1000093, BRACE1000101,

[0771] BRACE1000114, BRACE1000124, BRACE1000132, BRACE1000159, BRACE1000166, BRACE1000169, BRACE1000187, BRACE1000239, BRACE1000258, BRACE1000451, BRACE1000475, BRACE1000572, BRACE2000061, BRACE2000077, BRACE2000100, BRACE2000109, BRACE2000141, BRACE2000183, BRACE2000229, BRACE2000232, BRACE2000245, BRACE2000256, BRACE2000266, BRACE2000267, BRACE2000280, BRACE2000300, BRACE2000331, BRACE2000347, BRACE2000351, BRACE2000368, BRACE2000392, BRACE2000441, BRACE2000487, BRACE2000489, BRACE2000505, BRACE2000525, BRACE2000526, BRACE2000531, BRACE2000545, BRACE2000553, BRACE2000565, BRACE2000577, BRACE2000640, BRACE2000650, BRACE2000677, BRACE2000698, BRACE2000718, BRACE2000733, BRACE2000743, BRACE2000750,

[0772] BRACE2000753, BRACE2000815, BRACE2000864, BRACE2000885, BRACE2000893, BRACE2000905, BRACE2000936, BRACE2000947, BRACE2000965, BRACE2000969, BRACE2000975, BRACE2000988, BRACE2001017, BRACE2001065, BRACE2001070, BRACE2001094, BRACE2001107, BRACE2001117, BRACE2001143, BRACE2001151, BRACE2001154, BRACE2001188, BRACE2001191, BRACE2001197, BRACE2001236, BRACE2001239, BRACE2001269, BRACE2001312, BRACE2001313, BRACE2001330, BRACE2001340, BRACE2001352, BRACE2001353, BRACE2001374, BRACE2001375, BRACE2001423, BRACE2001424, BRACE2001445, BRACE2001453, BRACE2001455, BRACE2001477, BRACE2001492, BRACE2001496, BRACE2001508, BRACE2001534, BRACE2001543, BRACE2001564, BRACE2001588, BRACE2001607, BRACE2001626,

[0773] BRACE2001673, BRACE2001677, BRACE2001692, BRACE2001705, BRACE2001709, BRACE2001711, BRACE2001726, BRACE2001733, BRACE2001737, BRACE2001742, BRACE2001777, BRACE2001779, BRACE2001834, BRACE2001865, BRACE2001872, BRACE2001881, BRACE2001892, BRACE2001898, BRACE2001923, BRACE2001942, BRACE2001944, BRACE2001954, BRACE2001972, BRACE2001973, BRACE2002026, BRACE2002034, BRACE2002050, BRACE2002081, BRACE2002091, BRACE2002139, BRACE2002142, BRACE2002151, BRACE2002157, BRACE2002176, BRACE2002202, BRACE2002206, BRACE2002227, BRACE2002260, BRACE2002297, BRACE2002304, BRACE2002356, BRACE2002394, BRACE2002409, BRACE2002431, BRACE2002441, BRACE2002444, BRACE2002458, BRACE2002467, BRACE2002468, BRACE2002478,

[0774] BRACE2002495, BRACE2002582, BRACE2002585, BRACE2002589, BRACE2002590, BRACE2002606, BRACE2002613, BRACE2002614, BRACE2002617, BRACE2002623, BRACE2002635, BRACE2002649, BRACE2002661, BRACE2002676, BRACE2002677, BRACE2002682, BRACE2002685, BRACE2002695, BRACE2002707, BRACE2002736, BRACE2002752, BRACE2002755, BRACE2002762, BRACE2002772, BRACE2002792, BRACE2002796, BRACE2002803, BRACE2002807, BRACE2002812, BRACE2002834, BRACE2002849, BRACE2002857, BRACE2002860, BRACE2002861, BRACE2002884, BRACE2002896, BRACE2002948, BRACE2003037, BRACE2003078, BRACE2003097, BRACE2003110, BRACE2003168, BRACE2003199, BRACE2003210, BRACE2003217, BRACE2003254, BRACE2003269, BRACE2003285, BRACE2003319, BRACE2003398,

[0775] BRACE2003420, BRACE2003428, BRACE2003431, BRACE2003512, BRACE2003516, BRACE2003527, BRACE2003539, BRACE2003540, BRACE2003594, BRACE2003598, BRACE2003609, BRACE2003614, BRACE2003628, BRACE2003639, BRACE2003700, BRACE2003713, BRACE2003766, BRACE2003785, BRACE2003788, BRACE2003800, BRACE2003802, BRACE2003845, BRACE2003846, BRACE2003847, BRACE2003848, BRACE2003873, BRACE2003885, BRACE2003887, BRACE2003892, BRACE2003904, BRACE2003905, BRACE2003928, BRACE2003944, BRACE2003954, BRACE2003982, BRACE2003987, BRACE2005034, BRACE2005047, BRACE2005063, BRACE2005083, BRACE2005090, BRACE2005099, BRACE2005118, BRACE2005124, BRACE2005138, BRACE2005151, BRACE2005160, BRACE2005169, BRACE2005189, BRACE2005193,

[0776] BRACE2005196, BRACE2005198, BRACE2005216, BRACE2005231, BRACE2005243, BRACE2005251, BRACE2005253, BRACE2005290, BRACE2005298, BRACE2005328, BRACE2005329, BRACE2005337, BRACE2005348, BRACE2005395, BRACE2005408, BRACE2005433, BRACE2005434, BRACE2005448, BRACE2005450, BRACE2005453, BRACE2005457, BRACE2005460, BRACE2005489, BRACE2005518, BRACE2005556, BRACE2005562, BRACE2005624, BRACE2005642, BRACE2005661, BRACE2005667, BRACE2005681, BRACE2005719, BRACE2005731, BRACE2005742, BRACE2005762, BRACE2005773, BRACE2005787, BRACE2005795, BRACE2005800, BRACE2005858, BRACE2005869, BRACE2005875, BRACE2005881, BRACE2005898, BRACE2005904, BRACE2005906, BRACE2005907, BRACE2005911, BRACE2005949, BRACE2005981,

[0777] BRACE2005991, BRACE2006055, BRACE2006072, BRACE2006075, BRACE2006084, BRACE2006089, BRACE2006102, BRACE2006105, BRACE2006122, BRACE2006137, BRACE2006143, BRACE2006162, BRACE2006167, BRACE2006174, BRACE2006240, BRACE2006245, BRACE2006249, BRACE2006258, BRACE2006264, BRACE2006274, BRACE2006281, BRACE2006298, BRACE2006319, BRACE2006344, BRACE2006354, BRACE2006363, BRACE2006378, BRACE2006380, BRACE2006393, BRACE2006397, BRACE2006413, BRACE2006417, BRACE2006453, BRACE2006459, BRACE2006488, BRACE2006514, BRACE2006534, BRACE2006540, BRACE2006547, BRACE2006564, BRACE2006587, BRACE2006598, BRACE2006636, BRACE2006685, BRACE2006703, BRACE2006743, BRACE2006753, BRACE2006783, BRACE2006821, BRACE2006833,

[0778] BRACE2006859, BRACE2006871, BRACE2006909, BRACE2006911, BRACE2006924, BRACE2006935, BRACE2006937, BRACE2006951, BRACE2006982, BRACE2006986, BRACE2007013, BRACE2007064, BRACE2007068, BRACE2007087, BRACE2007089, BRACE2007109, BRACE2007138, BRACE2007174, BRACE2007191, BRACE2007197, BRACE2007201, BRACE2007203, BRACE2007232, BRACE2007254, BRACE2007262, BRACE2007274, BRACE2007281, BRACE2007295, BRACE2007358, BRACE2007396, BRACE2007398, BRACE2007401, BRACE2007411, BRACE2007447, BRACE2007477, BRACE2007502, BRACE2007503, BRACE2007518, BRACE2007522, BRACE2007527, BRACE2007538, BRACE2007563, BRACE2007567, BRACE2007577, BRACE2007621, BRACE2007640, BRACE2007641, BRACE2007646, BRACE2007663, BRACE2007671,

[0779] BRACE2007682, BRACE2007685, BRACE2007708, BRACE2007727, BRACE2007749, BRACE2007760, BRACE2007761, BRACE2007764, BRACE2007767, BRACE2007768, BRACE2007769, BRACE2007784, BRACE2007786, BRACE2007799, BRACE2007801, BRACE2007832, BRACE2007836, BRACE2007868, BRACE2007882, BRACE2007888, BRACE2007902, BRACE2007920, BRACE2007937, BRACE2007944, BRACE2007952, BRACE2008008, BRACE2008015, BRACE2008021, BRACE2008097, BRACE2008102, BRACE2008114, BRACE2008144, BRACE2008172, BRACE2008216, BRACE2008218, BRACE2008251, BRACE2008276, BRACE2008295, BRACE2008308, BRACE2008336, BRACE2008358, BRACE2008361, BRACE2008380, BRACE2008385, BRACE2008399, BRACE2008401, BRACE2008402, BRACE2008410, BRACE2008420, BRACE2008443,

[0780] BRACE2008473, BRACE2008480, BRACE2008481, BRACE2008488, BRACE2008495, BRACE2008500, BRACE2008553, BRACE2008594, BRACE2008604, BRACE2008615, BRACE2008622, BRACE2008629, BRACE2008655, BRACE2008656, BRACE2008706, BRACE2008708, BRACE2008710, BRACE2008754, BRACE2008797, BRACE2008847, BRACE2008857, BRACE2008861, BRACE2008867, BRACE2008881, BRACE2008883, BRACE2008917, BRACE2008919, BRACE2008941, BRACE2008948, BRACE2008960, BRACE2008999, BRACE2009014, BRACE2009016, BRACE2009031, BRACE2009044, BRACE2009045, BRACE2009053, BRACE2009122, BRACE2009131, BRACE2009185, BRACE2009188, BRACE2009212, BRACE2009221, BRACE2009235, BRACE2009238, BRACE2009255, BRACE2009270, BRACE2009272, BRACE2009274, BRACE2009275,

[0781] BRACE2009291, BRACE2009293, BRACE2009307, BRACE2009311, BRACE2009318, BRACE2009323, BRACE2009366, BRACE2009421, BRACE2009428, BRACE2009434, BRACE2009437, BRACE2009483, BRACE2009517, BRACE2009533, BRACE2009558, BRACE2009566, BRACE2009591, BRACE2009620, BRACE2009654, BRACE2009721, BRACE2009732, BRACE2009754, BRACE2009828, BRACE2009886, BRACE2009907, BRACE2009957, BRACE2010170, BRACE2010171, BRACE2010203, BRACE2010208, BRACE2010348, BRACE2010440, BRACE2010444, BRACE2010477, BRACE2010489, BRACE2010535, BRACE2010550, BRACE2010598, BRACE2010632, BRACE2010642, BRACE2010651, BRACE2010669, BRACE2010684, BRACE2010753, BRACE2010813, BRACE2010828, BRACE2010837, BRACE2010888, BRACE2010937, BRACE2010983,

[0782] BRACE2011007, BRACE2011025, BRACE2011183, BRACE2011199, BRACE2011265, BRACE2011389, BRACE2011478, BRACE2011545, BRACE2011592, BRACE2011611, BRACE2011646, BRACE2011677, BRACE2011703, BRACE2011747, BRACE2011838, BRACE2011892, BRACE2011904, BRACE2011947, BRACE2012061, BRACE2012062, BRACE2012185, BRACE2012222, BRACE2012232, BRACE2012291, BRACE2012317, BRACE2012510, BRACE2012625, BRACE2012653, BRACE2012833, BRACE2012838, BRACE2012936, BRACE2012947, BRACE2013009, BRACE2013010, BRACE2013126, BRACE2013132, BRACE2013149, BRACE2013369, BRACE2013806, BRACE2013911, BRACE2014108, BRACE2014161, BRACE2014232, BRACE2014257, BRACE2014268, BRACE2014306, BRACE2014475, BRACE2014657, BRACE2014746, BRACE2014780,

[0783] BRACE2014818, BRACE2014821, BRACE2014824, BRACE2014850, BRACE2014854, BRACE2015031, BRACE2015058, BRACE2015132, BRACE2015262, BRACE2015270, BRACE2015287, BRACE2015314, BRACE2015352, BRACE2015368, BRACE2015412, BRACE2015436, BRACE2015741, BRACE2015756, BRACE2015969, BRACE2015995, BRACE2016058, BRACE2016194, BRACE2016315, BRACE2016325, BRACE2016335, BRACE2016362, BRACE2016366, BRACE2016465, BRACE2016516, BRACE2016583, BRACE2016708, BRACE2016821, BRACE2016896, BRACE2016981, BRACE2017108, BRACE2017124, BRACE2017298, BRACE2017359, BRACE2017410, BRACE2017438, BRACE2017574, BRACE2017580, BRACE2017587, BRACE2017720, BRACE2017844, BRACE2017872, BRACE2017929, BRACE2017934, BRACE2017985, BRACE2017992,

[0784] BRACE2018443, BRACE2018448, BRACE2018568, BRACE2018700, BRACE2018727, BRACE2018736, BRACE2018759, BRACE2018762, BRACE2018782, BRACE2018847, BRACE2019004, BRACE2019044, BRACE2019147, BRACE2019244, BRACE2019258, BRACE2019327, BRACE2019348, BRACE2019371, BRACE2019467, BRACE2019510, BRACE2019519, BRACE2019528, BRACE2019618, BRACE2019696, BRACE2019703, BRACE2019843, BRACE2019865, BRACE2019872, BRACE2019877, BRACE2020028, BRACE2020077, BRACE2020097, BRACE2020157, BRACE2020278, BRACE2020358, BRACE2020467, BRACE2020584, BRACE2020652, BRACE2020709, BRACE2020742, BRACE2020756, BRACE2020863, BRACE2020982, BRACE2021014, BRACE2021143, BRACE2021148, BRACE2021245, BRACE2021254, BRACE2021264, BRACE2021344,

[0785] BRACE2021433, BRACE2021478, BRACE2021541, BRACE2021670, BRACE2021695, BRACE2021708, BRACE2021721, BRACE2021932, BRACE2021936, BRACE2022030, BRACE2022158, BRACE2022196, BRACE2022270, BRACE2022328, BRACE2022333, BRACE2022389, BRACE2022394, BRACE2022435, BRACE2022448, BRACE2022450, BRACE2022549, BRACE2022633, BRACE2022638, BRACE2022693, BRACE2022848, BRACE2022928, BRACE2022990, BRACE2023069, BRACE2023070, BRACE2023223, BRACE2023268, BRACE2023284, BRACE2023404, BRACE2023451, BRACE2023540, BRACE2023633, BRACE2023718, BRACE2023727, BRACE2023744, BRACE2023800, BRACE2023801, BRACE2024074, BRACE2024222, BRACE2024610, BRACE2024627, BRACE2024781, BRACE2024826, BRACE2025018, BRACE2025316, BRACE2025333,

[0786] BRACE2025437, BRACE2025452, BRACE2025492, BRACE2025710, BRACE2025796, BRACE2025992, BRACE2026054, BRACE2026131, BRACE2026141, BRACE2026142, BRACE2026293, BRACE2026294, BRACE2026404, BRACE2026675, BRACE2026725, BRACE2026836, BRACE2026920, BRACE2026971, BRACE2027018, BRACE2027221, BRACE2027258, BRACE2027312, BRACE2027382, BRACE2027389, BRACE2027408, BRACE2027643, BRACE2027767, BRACE2027770, BRACE2027879, BRACE2027896, BRACE2027970, BRACE2028171, BRACE2028392, BRACE2028410, BRACE2028636, BRACE2028741, BRACE2028956, BRACE2028970, BRACE2029112, BRACE2029356, BRACE2029396, BRACE2029581, BRACE2029644, BRACE2029849, BRACE2030039, BRACE2030096, BRACE2030323, BRACE2030326, BRACE2030341, BRACE2030345,

[0787] BRACE2030736, BRACE2030883, BRACE2030884, BRACE2031154, BRACE2031232, BRACE2031527, BRACE2031531, BRACE2031553, BRACE2031899, BRACE2032044, BRACE2032090, BRACE2032134, BRACE2032148, BRACE2032182, BRACE2032329, BRACE2032385, BRACE2032436, BRACE2032477, BRACE2032502, BRACE2032538, BRACE2032584, BRACE2032823, BRACE2033128, BRACE2033394, BRACE2033478, BRACE2033720, BRACE2033786, BRACE2034434, BRACE2034523, BRACE2034616, BRACE2034622, BRACE2034870, BRACE2035003, BRACE2035120, BRACE2035124, BRACE2035191, BRACE2035278, BRACE2035381, BRACE2035441, BRACE2035485, BRACE2036005, BRACE2036096, BRACE2036743, BRACE2036830, BRACE2036834, BRACE2036900, BRACE2037132, BRACE2037294, BRACE2037295, BRACE2037299,

[0788] BRACE2037310, BRACE2037431, BRACE2037692, BRACE2037847, BRACE2038114, BRACE2038269, BRACE2038271, BRACE2038329, BRACE2038492, BRACE2038551, BRACE2038618, BRACE2039009, BRACE2039128, BRACE2039170, BRACE2039249, BRACE2039286, BRACE2039297, BRACE2039327, BRACE2039362, BRACE2039475, BRACE2039600, BRACE2039607, BRACE2039734, BRACE2039823, BRACE2039832, BRACE2039893, BRACE2039986, BRACE2040138, BRACE2040325, BRACE2040514, BRACE2040640, BRACE2040987, BRACE2041009, BRACE2041095, BRACE2041200, BRACE2041264, BRACE2041890, BRACE2041898, BRACE2042394, BRACE2042398, BRACE2042550, BRACE2042620, BRACE2042628, BRACE2042873, BRACE2043036, BRACE2043105, BRACE2043142, BRACE2043248, BRACE2043349, BRACE2043381,

[0789] BRACE2043774, BRACE2043942, BRACE2044057, BRACE2044105, BRACE2044263, BRACE2044286, BRACE2044304, BRACE2044473, BRACE2044510, BRACE2044640, BRACE2044816, BRACE2044946, BRACE2044949, BRACE2045300, BRACE2045428, BRACE2045445, BRACE2045596, BRACE2045772, BRACE2045947, BRACE2045954, BRACE2046251, BRACE2046295, BRACE2046976, BRACE2047011, BRACE2047232, BRACE2047350, BRACE2047377, BRACE2047385, BRACE2047492, BRACE2047558, BRACE2047573, BRACE2047835, BRACE2047893, BRACE2047975, BRACE3000071, BRACE3000404, BRACE3000520, BRACE3000697, BRACE3000840, BRACE3000973, BRACE3001002, BRACE3001058, BRACE3001066, BRACE3001113, BRACE3001217, BRACE3001299, BRACE3001384, BRACE3001391, BRACE3001403, BRACE3001595,

[0790] BRACE3001754, BRACE3001948, BRACE3001973, BRACE3002184, BRACE3002298, BRACE3002344, BRACE3002390, BRACE3002420, BRACE3002508, BRACE3002541, BRACE3002756, BRACE3003004, BRACE3003026, BRACE3003053, BRACE3003192, BRACE3003413, BRACE3003595, BRACE3003698, BRACE3003866, BRACE3003920, BRACE3004046, BRACE3004058, BRACE3004113, BRACE3004150, BRACE3004205, BRACE3004358, BRACE3004435, BRACE3004477, BRACE3004767, BRACE3004772, BRACE3004783, BRACE3004843, BRACE3004862, BRACE3004880, BRACE3004887, BRACE3004981, BRACE3004996, BRACE3004998, BRACE3005103, BRACE3005127, BRACE3005145, BRACE3005217, BRACE3005225, BRACE3005430, BRACE3005499, BRACE3005760, BRACE3005870, BRACE3005903, BRACE3005938, BRACE3005989,

[0791] BRACE3006113, BRACE3006185, BRACE3006226, BRACE3006462, BRACE3006463, BRACE3006553, BRACE3006872, BRACE3006917, BRACE3007058, BRACE3007084, BRACE3007085, BRACE3007258, BRACE3007322, BRACE3007472, BRACE3007480, BRACE3007559, BRACE3007625, BRACE3007642, BRACE3007649, BRACE3007767, BRACE3007869, BRACE3008036, BRACE3008066, BRACE3008092, BRACE3008095, BRACE3008137, BRACE3008255, BRACE3008337, BRACE3008384, BRACE3008720, BRACE3008772, BRACE3009044, BRACE3009075, BRACE3009090, BRACE3009127, BRACE3009197, BRACE3009237, BRACE3009265, BRACE3009297, BRACE3009377, BRACE3009392, BRACE3009416, BRACE3009539, BRACE3009574, BRACE3009701, BRACE3009708, BRACE3009724, BRACE3009993, BRACE3010076, BRACE3010079,

[0792] BRACE3010086, BRACE3010221, BRACE3010283, BRACE3010315, BRACE3010397, BRACE3010416, BRACE3010428, BRACE3010435, BRACE3010438, BRACE3010702, BRACE3010862, BRACE3011271, BRACE3011421, BRACE3011447, BRACE3011505, BRACE3011634, BRACE3011774, BRACE3012357, BRACE3012574, BRACE3012806, BRACE3012930, BRACE3013119, BRACE3013418, BRACE3013576, BRACE3013740, BRACE3013780, BRACE3013874, BRACE3013936, BRACE3013986, BRACE3014005, BRACE3014068, BRACE3014231, BRACE3014290, BRACE3014317, BRACE3014523, BRACE3014714, BRACE3014807, BRACE3014942, BRACE3015090, BRACE3015121, BRACE3015262, BRACE3015521, BRACE3015808, BRACE3015829, BRACE3015894, BRACE3015898, BRACE3016020, BRACE3016122, BRACE3016167, BRACE3016170,

[0793] BRACE3016580, BRACE3016788, BRACE3016810, BRACE3016862, BRACE3016884, BRACE3017083, BRACE3017253, BRACE3018083, BRACE3018308, BRACE3018963, BRACE3019055, BRACE3019071, BRACE3019084, BRACE3019570, BRACE3019611, BRACE3019817, BRACE3019828, BRACE3019941, BRACE3020151, BRACE3020194, BRACE3020286, BRACE3020356, BRACE3020594, BRACE3020669, BRACE3020671, BRACE3020890, BRACE3021148, BRACE3021430, BRACE3021517, BRACE3021805, BRACE3022051, BRACE3022303, BRACE3022312, BRACE3022340, BRACE3022847, BRACE3023604, BRACE3023912, BRACE3024073, BRACE3024359, BRACE3024379, BRACE3024444, BRACE3024497, BRACE3024537, BRACE3024659, BRACE3024662, BRACE3024879, BRACE3025153, BRACE3025302, BRACE3025457, BRACE3025531,

[0794] BRACE3025627, BRACE3025630, BRACE3025719, BRACE3026008, BRACE3026075, BRACE3026161, BRACE3026290, BRACE3026345, BRACE3026456, BRACE3026735, BRACE3026802, BRACE3026844, BRACE3026947, BRACE3026993, BRACE3027242, BRACE3027256, BRACE3027326, BRACE3027478, BRACE3027480, BRACE3027931, BRACE3027976, BRACE3028214, BRACE3028241, BRACE3028360, BRACE3028895, BRACE3028998, BRACE3029005, BRACE3029021, BRACE3029205, BRACE3029447, BRACE3030057, BRACE3030103, BRACE3030538, BRACE3030748, BRACE3030866, BRACE3031161, BRACE3031184, BRACE3031185, BRACE3031315, BRACE3031372, BRACE3031579, BRACE3031728, BRACE3031838, BRACE3031843, BRACE3032427, BRACE3032455, BRACE3032537, BRACE3032538, BRACE3032631, BRACE3032771,

[0795] BRACE3032980, BRACE3032983, BRACE3033525, BRACE3034159, BRACE3034183, BRACE3034389, BRACE3034964, BRACE3034993, BRACE3035168, BRACE3035227, BRACE3036156, BRACE3036271, BRACE3037612, BRACE3037637, BRACE3037803, BRACE3038012, BRACE3038030, BRACE3038569, BRACE3038570, BRACE3038687, BRACE3038760, BRACE3039288, BRACE3039358, BRACE3039378, BRACE3039454, BRACE3040012, BRACE3040239, BRACE3040504, BRACE3040644, BRACE3040856, BRACE3040863, BRACE3041059, BRACE3041162, BRACE3041827, BRACE3042046, BRACE3042210, BRACE3042326, BRACE3042409, BRACE3042432, BRACE3042594, BRACE3043597, BRACE3044090, BRACE3044172, BRACE3044247, BRACE3044377, BRACE3044389, BRACE3044495, BRACE3045011, BRACE3045033, BRACE3045078,

[0796] BRACE3045145, BRACE3045424, BRACE3045708, BRACE3045981, BRACE3046049, BRACE3046152, BRACE3046294, BRACE3046450, BRACE3046466, BRACE3046491, BRACE3046609, BRACE3046762, BRACE3046837, BRACE3046855, BRACE3046966, BRACE3047018, BRACE3047482, BRACE3047801, BRALZ1000047, BRALZ1000103, BRALZ2000189, BRALZ2000263, BRALZ2000988, BRALZ2001038, BRALZ2001279, BRALZ2001350, BRALZ2001445, BRALZ2001559, BRALZ2001743, BRALZ2001834, BRALZ2002174, BRALZ2002418, BRALZ2002477, BRALZ2003119, BRALZ2003330, BRALZ2003453, BRALZ2003525, BRALZ2004397, BRALZ2005467, BRALZ2005471, BRALZ2005888, BRALZ2005950, BRALZ2005992, BRALZ2006288, BRALZ2006474, BRALZ2006560, BRALZ2006734, BRALZ2006800, BRALZ2006976, BRALZ2007376,

[0797] BRALZ2007545, BRALZ2007576, BRALZ2007661, BRALZ2007790, BRALZ2007793, BRALZ2007952, BRALZ2008031, BRALZ2008166, BRALZ2008462, BRALZ2008617, BRALZ2008696, BRALZ2008763, BRALZ2008869, BRALZ2008930, BRALZ2009446, BRALZ2009486, BRALZ2010186, BRALZ2010842, BRALZ2011337, BRALZ2011796, BRALZ2011880, BRALZ2012050, BRALZ2012183, BRALZ2012848, BRALZ2013621, BRALZ2013690, BRALZ2014054, BRALZ2014316, BRALZ2014484, BRALZ2014951, BRALZ2015168, BRALZ2015811, BRALZ2016085, BRALZ2016498, BRALZ2017359, BRALZ2017531, BRALZ2017607, BRALZ2017620, BRALZ2017844, BRALZ2018342, BRALZ2018492, BRALZ2018834, BRALZ2019047, BRAMY1000095, BRAMY1000098, BRAMY1000130, BRAMY1000157, BRAMY1000173, BRAMY2000021, BRAMY2000025,

[0798] BRAMY2000052, BRAMY2000076, BRAMY2000086, BRAMY2000151, BRAMY2000181, BRAMY2000196, BRAMY2000231, BRAMY2000277, BRAMY2000388, BRAMY2000508, BRAMY2000562, BRAMY2000585, BRAMY2000653, BRAMY2000814, BRAMY2000893, BRAMY2000946, BRAMY2000981, BRAMY2000987, BRAMY2001068, BRAMY2001114, BRAMY2001203, BRAMY2001282, BRAMY2001367, BRAMY2001427, BRAMY2001473, BRAMY2001678, BRAMY2002005, BRAMY2002044, BRAMY2002072, BRAMY2002158, BRAMY2002311, BRAMY2002339, BRAMY2002364, BRAMY2002369, BRAMY2002479, BRAMY2002493, BRAMY2002525, BRAMY2002584, BRAMY2002604, BRAMY2002621, BRAMY2002638, BRAMY2002739, BRAMY2002799, BRAMY2002853, BRAMY2002862, BRAMY2002956, BRAMY2003008, BRAMY2003037, BRAMY2003117, BRAMY2003287,

[0799] BRAMY2003325, BRAMY2003529, BRAMY2003538, BRAMY2003585, BRAMY2003634, BRAMY2003653, BRAMY2003681, BRAMY2003893, BRAMY2003897, BRAMY2003898, BRAMY2003904, BRAMY2003926, BRAMY2003929, BRAMY2004031, BRAMY2004058, BRAMY2004183, BRAMY2004335, BRAMY2004351, BRAMY2004352, BRAMY2004363, BRAMY2004387, BRAMY2004492, BRAMY2004521, BRAMY2004524, BRAMY2004537, BRAMY2004542, BRAMY2004756, BRAMY2004771, BRAMY2005052, BRAMY2005064, BRAMY2005094, BRAMY2005151, BRAMY2005182, BRAMY2005244, BRAMY2005391, BRAMY2005488, BRAMY2005576, BRAMY2005648, BRAMY2005662, BRAMY2005708, BRAMY2005711, BRAMY2006092, BRAMY2006118, BRAMY2006149, BRAMY2006366, BRAMY2006375, BRAMY2006397, BRAMY2006411, BRAMY2006459, BRAMY2006466,

[0800] BRAMY2006659, BRAMY2006779, BRAMY2006809, BRAMY2006879, BRAMY2007043, BRAMY2007078, BRAMY2007110, BRAMY2007185, BRAMY2007244, BRAMY2007249, BRAMY2007255, BRAMY2007308, BRAMY2007411, BRAMY2007458, BRAMY2007486, BRAMY2007546, BRAMY2007567, BRAMY2007594, BRAMY2007610, BRAMY2007613, BRAMY2007653, BRAMY2007753, BRAMY2007859, BRAMY2008333, BRAMY2008382, BRAMY2008563, BRAMY2008583, BRAMY2008977, BRAMY2008979, BRAMY2009013, BRAMY2009023, BRAMY2009034, BRAMY2009105, BRAMY2009123, BRAMY2009192, BRAMY2009344, BRAMY2009349, BRAMY2009394, BRAMY2009489, BRAMY2009508, BRAMY2009528, BRAMY2009557, BRAMY2009612, BRAMY2009693, BRAMY2009934, BRAMY2010068, BRAMY2010135, BRAMY2010145, BRAMY2010171, BRAMY2010208,

[0801] BRAMY2010239, BRAMY2010272, BRAMY2010290, BRAMY2010357, BRAMY2010366, BRAMY2010395, BRAMY2010441, BRAMY2010442, BRAMY2010464, BRAMY2010581, BRAMY2010798, BRAMY2010808, BRAMY2010919, BRAMY2011064, BRAMY2011105, BRAMY2011178, BRAMY2011196, BRAMY2011216, BRAMY2011253, BRAMY2011446, BRAMY2011480, BRAMY2011639, BRAMY2011679, BRAMY2011811, BRAMY2011841, BRAMY2011846, BRAMY2011849, BRAMY2011872, BRAMY2011961, BRAMY2012017, BRAMY2012091, BRAMY2012119, BRAMY2012162, BRAMY2012163, BRAMY2012277, BRAMY2012340, BRAMY2012426, BRAMY2012497, BRAMY2012517, BRAMY2012555, BRAMY2012568, BRAMY2012581, BRAMY2012691, BRAMY2012721, BRAMY2012731, BRAMY2012776, BRAMY2012880, BRAMY2012881, BRAMY2013169, BRAMY2013200,

[0802] BRAMY2013216, BRAMY2013405, BRAMY2013414, BRAMY2013572, BRAMY2013590, BRAMY2013621, BRAMY2013659, BRAMY2013722, BRAMY2013736, BRAMY2013756, BRAMY2013944, BRAMY2013975, BRAMY2014019, BRAMY2014205, BRAMY2014387, BRAMY2014462, BRAMY2014469, BRAMY2014541, BRAMY2014754, BRAMY2014813, BRAMY2015211, BRAMY2015251, BRAMY2015311, BRAMY2015420, BRAMY2015503, BRAMY2015516, BRAMY2015550, BRAMY2015551, BRAMY2015559, BRAMY2015688, BRAMY2015705, BRAMY2015782, BRAMY2015833, BRAMY2015855, BRAMY2015890, BRAMY2015911, BRAMY2015925, BRAMY2016002, BRAMY2016009, BRAMY2016020, BRAMY2016070, BRAMY2016251, BRAMY2016327, BRAMY2016386, BRAMY2016706, BRAMY2016771, BRAMY2016892, BRAMY2016938, BRAMY2016953, BRAMY2017014,

[0803] BRAMY2017249, BRAMY2017348, BRAMY2017450, BRAMY2017455, BRAMY2017528, BRAMY2017864, BRAMY2018027, BRAMY2018106, BRAMY2018122, BRAMY2018126, BRAMY2018272, BRAMY2018273, BRAMY2018279, BRAMY2018295, BRAMY2018308, BRAMY2018396, BRAMY2018467, BRAMY2018635, BRAMY2018785, BRAMY2019055, BRAMY2019111, BRAMY2019277, BRAMY2019300, BRAMY2019468, BRAMY2019509, BRAMY2019554, BRAMY2019600, BRAMY2019643, BRAMY2019710, BRAMY2019963, BRAMY2019985, BRAMY2019989, BRAMY2020050, BRAMY2020058, BRAMY2020106, BRAMY2020270, BRAMY2020354, BRAMY2020355, BRAMY2020412, BRAMY2020445, BRAMY2020466, BRAMY2020520, BRAMY2020574, BRAMY2020634, BRAMY2020713, BRAMY2021040, BRAMY2021063, BRAMY2021098, BRAMY2021139, BRAMY2021142,

[0804] BRAMY2021276, BRAMY2021310, BRAMY2021388, BRAMY2021498, BRAMY2021523, BRAMY2021710, BRAMY2021732, BRAMY2021746, BRAMY2021825, BRAMY2021867, BRAMY2021962, BRAMY2021982, BRAMY2022052, BRAMY2022160, BRAMY2022168, BRAMY2022263, BRAMY2022301, BRAMY2022320, BRAMY2022383, BRAMY2022445, BRAMY2022454, BRAMY2022493, BRAMY2022525, BRAMY2022532, BRAMY2022723, BRAMY2022786, BRAMY2022796, BRAMY2022929, BRAMY2022980, BRAMY2022984, BRAMY2023060, BRAMY2023110, BRAMY2023115, BRAMY2023161, BRAMY2023172, BRAMY2023238, BRAMY2023327, BRAMY2023358, BRAMY2023406, BRAMY2023482, BRAMY2023514, BRAMY2023719, BRAMY2023729, BRAMY2023786, BRAMY2023852, BRAMY2023863, BRAMY2023939, BRAMY2024004, BRAMY2024073, BRAMY2024312,

[0805] BRAMY2024374, BRAMY2024390, BRAMY2024416, BRAMY2024449, BRAMY2024489, BRAMY2024497, BRAMY2024514, BRAMY2024530, BRAMY2024535, BRAMY2024545, BRAMY2024576, BRAMY2024593, BRAMY2024711, BRAMY2024715, BRAMY2024728, BRAMY2024849, BRAMY2025024, BRAMY2025032, BRAMY2025121, BRAMY2025175, BRAMY2025218, BRAMY2025230, BRAMY2025272, BRAMY2025277, BRAMY2025495, BRAMY2025812, BRAMY2025996, BRAMY2026009, BRAMY2026091, BRAMY2026168, BRAMY2026300, BRAMY2026347, BRAMY2026395, BRAMY2026405, BRAMY2026533, BRAMY2026538, BRAMY2026685, BRAMY2026713, BRAMY2026778, BRAMY2026824, BRAMY2026899, BRAMY2026902, BRAMY2026904, BRAMY2026976, BRAMY2027073, BRAMY2027114, BRAMY2027140, BRAMY2027242, BRAMY2027396, BRAMY2027451,

[0806] BRAMY2027461, BRAMY2027467, BRAMY2027587, BRAMY2027714, BRAMY2027717, BRAMY2027752, BRAMY2027782, BRAMY2028072, BRAMY2028183, BRAMY2028188, BRAMY2028269, BRAMY2028282, BRAMY2028472, BRAMY2028491, BRAMY2028516, BRAMY2028565, BRAMY2028593, BRAMY2028682, BRAMY2028783, BRAMY2028856, BRAMY2028914, BRAMY2029204, BRAMY2029602, BRAMY2029988, BRAMY2030098, BRAMY2030109, BRAMY2030206, BRAMY2030477, BRAMY2030545, BRAMY2030607, BRAMY2030702, BRAMY2030703, BRAMY2030768, BRAMY2030799, BRAMY2030859, BRAMY2030915, BRAMY2031317, BRAMY2031377, BRAMY2031442, BRAMY2031516, BRAMY2032014, BRAMY2032087, BRAMY2032231, BRAMY2032242, BRAMY2032290, BRAMY2032311, BRAMY2032317, BRAMY2032344, BRAMY2032589, BRAMY2032678,

[0807] BRAMY2032696, BRAMY2032777, BRAMY2032994, BRAMY2033003, BRAMY2033116, BRAMY2033240, BRAMY2033267, BRAMY2033316, BRAMY2033332, BRAMY2033506, BRAMY2033594, BRAMY2033895, BRAMY2033914, BRAMY2034072, BRAMY2034185, BRAMY2034187, BRAMY2034305, BRAMY2034561, BRAMY2034920, BRAMY2034993, BRAMY2035070, BRAMY2035449, BRAMY2035545, BRAMY2035606, BRAMY2035718, BRAMY2035719, BRAMY2035801, BRAMY2035869, BRAMY2035923, BRAMY2036076, BRAMY2036079, BRAMY2036254, BRAMY2036266, BRAMY2036387, BRAMY2036396, BRAMY2036459, BRAMY2036567, BRAMY2036615, BRAMY2036699, BRAMY2036913, BRAMY2036918, BRAMY2036968, BRAMY2037147, BRAMY2037328, BRAMY2037609, BRAMY2037629, BRAMY2037800, BRAMY2037823, BRAMY2037971, BRAMY2038100,

[0808] BRAMY2038128, BRAMY2038317, BRAMY2038475, BRAMY2038484, BRAMY2038516, BRAMY2038832, BRAMY2038846, BRAMY2038887, BRAMY2038904, BRAMY2039287, BRAMY2039300, BRAMY2039314, BRAMY2039341, BRAMY2039630, BRAMY2039695, BRAMY2039728, BRAMY2039872, BRAMY2040051, BRAMY2040159, BRAMY2040214, BRAMY2040478, BRAMY2040915, BRAMY2041261, BRAMY2041347, BRAMY2041378, BRAMY2041384, BRAMY2041434, BRAMY2041507, BRAMY2041542, BRAMY2041738, BRAMY2042122, BRAMY2042131, BRAMY2042178, BRAMY2042195, BRAMY2042244, BRAMY2042549, BRAMY2042596, BRAMY2042612, BRAMY2042641, BRAMY2042711, BRAMY2042760, BRAMY2042804, BRAMY2042899, BRAMY2042918, BRAMY2043069, BRAMY2043103, BRAMY2043314, BRAMY2043345, BRAMY2044246, BRAMY2044317,

[0809] BRAMY2044349, BRAMY2044686, BRAMY2044838, BRAMY2045036, BRAMY2045299, BRAMY2045471, BRAMY2045530, BRAMY2046109, BRAMY2046478, BRAMY2046489, BRAMY2046537, BRAMY2046667, BRAMY2046742, BRAMY2046871, BRAMY2046984, BRAMY2046989, BRAMY2047169, BRAMY2047280, BRAMY2047420, BRAMY2047676, BRAMY2047692, BRAMY2047746, BRAMY2047751, BRAMY2047765, BRAMY2047884, BRAMY2047948, BRAMY3000206, BRAMY3000210, BRAMY3000213, BRAMY3000224, BRAMY3000254, BRAMY3000307, BRAMY3000692, BRAMY3001356, BRAMY3001401, BRAMY3001409, BRAMY3001794, BRAMY3002120, BRAMY3002312, BRAMY3002329, BRAMY3002458, BRAMY3002508, BRAMY3002620, BRAMY3002803, BRAMY3002805, BRAMY3002886, BRAMY3002991, BRAMY3003026, BRAMY3003109, BRAMY3003205,

[0810] BRAMY3003310, BRAMY3003566, BRAMY3003723, BRAMY3004126, BRAMY3004224, BRAMY3004364, BRAMY3004672, BRAMY3004800, BRAMY3004900, BRAMY3004919, BRAMY3005091, BRAMY3005184, BRAMY3005656, BRAMY3005912, BRAMY3005932, BRAMY3006032, BRAMY3006297, BRAMY3006761, BRAMY3007078, BRAMY3007206, BRAMY3007311, BRAMY3007350, BRAMY3007449, BRAMY3007471, BRAMY3007609, BRAMY3007723, BRAMY3007968, BRAMY3008044, BRAMY3008088, BRAMY3008096, BRAMY3008335, BRAMY3008466, BRAMY3008505, BRAMY3008650, BRAMY3008937, BRAMY3009158, BRAMY3009207, BRAMY3009491, BRAMY3009556, BRAMY3009782, BRAMY3009811, BRAMY3009904, BRAMY3010264, BRAMY3010321, BRAMY3010411, BRAMY3010492, BRAMY3010603, BRAMY3010654, BRAMY4000089, BRAMY4000095,

[0811] BRAMY4000229, BRAMY4000277, BRAMY4000915, BRAMY4000962, BRAMY4001173, BRAMY4001200, BRAMY4001234, BRAMY4001449, BRAMY4001652, BRAMY4001863, BRAMY4001913, BRAMY4002575, BRAMY4002628, BRASW1000053, BRASW1000125, BRAWH1000001, BRAWH1000002, BRAWH1000007, BRAWH1000045, BRAWH1000083, BRAWH1000093, BRAWH1000094, BRAWH1000116, BRAWH1000127, BRAWH1000130, BRAWH1000157, BRAWH1000162, BRAWH1000164, BRAWH1000168, BRAWH1000174, BRAWH1000180, BRAWH1000369, BRAWH2000034, BRAWH2000048, BRAWH2000071, BRAWH2000082, BRAWH2000093, BRAWH2000109, BRAWH2000131, BRAWH2000142, BRAWH2000218, BRAWH2000232, BRAWH2000248, BRAWH2000256, BRAWH2000274, BRAWH2000323, BRAWH2000353, BRAWH2000370, BRAWH2000409, BRAWH2000417,

[0812] BRAWH2000443, BRAWH2000460, BRAWH2000471, BRAWH2000476, BRAWH2000482, BRAWH2000488, BRAWH2000494, BRAWH2000500, BRAWH2000503, BRAWH2000522, BRAWH2000554, BRAWH2000595, BRAWH2000633, BRAWH2000643, BRAWH2000651, BRAWH2000682, BRAWH2000686, BRAWH2000697, BRAWH2000752, BRAWH2000859, BRAWH2000866, BRAWH2000892, BRAWH2000901, BRAWH2000926, BRAWH2000944, BRAWH2000984, BRAWH2001037, BRAWH2001052, BRAWH2001103, BRAWH2001129, BRAWH2001137, BRAWH2001141, BRAWH2001159, BRAWH2001166, BRAWH2001171, BRAWH2001186, BRAWH2001203, BRAWH2001238, BRAWH2001239, BRAWH2001255, BRAWH2001321, BRAWH2001355, BRAWH2001378, BRAWH2001395, BRAWH2001406, BRAWH2001412, BRAWH2001418, BRAWH2001424, BRAWH2001436, BRAWH2001438,

[0813] BRAWH2001439, BRAWH2001459, BRAWH2001461, BRAWH2001484, BRAWH2001492, BRAWH2001503, BRAWH2001519, BRAWH2001530, BRAWH2001535, BRAWH2001589, BRAWH2001662, BRAWH2001666, BRAWH2001679, BRAWH2001686, BRAWH2001701, BRAWH2001842, BRAWH2001862, BRAWH2001873, BRAWH2001940, BRAWH2001973, BRAWH2002047, BRAWH2002060, BRAWH2002062, BRAWH2002125, BRAWH2002191, BRAWH2002318, BRAWH2002333, BRAWH2002352, BRAWH2002383, BRAWH2002549, BRAWH2002560, BRAWH2002601, BRAWH2002623, BRAWH2002630, BRAWH2002635, BRAWH2002662, BRAWH2002679, BRAWH2002725, BRAWH2002761, BRAWH2002811, BRAWH2002861, BRAWH2002911, BRAWH2002967, BRAWH2002976, BRAWH2003000, BRAWH2003025, BRAWH2003135, BRAWH2003240, BRAWH2003307, BRAWH2003355,

[0814] BRAWH2003366, BRAWH2003662, BRAWH2003689, BRAWH2003693, BRAWH2003818, BRAWH2003832, BRAWH2003948, BRAWH2003964, BRAWH2004044, BRAWH2004068, BRAWH2004078, BRAWH2004095, BRAWH2004136, BRAWH2004217, BRAWH2004580, BRAWH2004731, BRAWH2004779, BRAWH2004842, BRAWH2004884, BRAWH2004923, BRAWH2005008, BRAWH2005074, BRAWH2005225, BRAWH2005315, BRAWH2005517, BRAWH2005524, BRAWH2005533, BRAWH2005578, BRAWH2005661, BRAWH2005812, BRAWH2005974, BRAWH2005998, BRAWH2006044, BRAWH2006083, BRAWH2006207, BRAWH2006301, BRAWH2006395, BRAWH2006405, BRAWH2006450, BRAWH2006493, BRAWH2006526, BRAWH2006543, BRAWH2006622, BRAWH2006760, BRAWH2006960, BRAWH2006989, BRAWH2006996, BRAWH2007069, BRAWH2007308, BRAWH2007406,

[0815] BRAWH2007550, BRAWH2007570, BRAWH2007591, BRAWH2007605, BRAWH2007658, BRAWH2007664, BRAWH2007800, BRAWH2007808, BRAWH2007825, BRAWH2007862, BRAWH2007890, BRAWH2008058, BRAWH2008128, BRAWH2008219, BRAWH2008255, BRAWH2008292, BRAWH2008297, BRAWH2008366, BRAWH2008380, BRAWH2008540, BRAWH2008577, BRAWH2008790, BRAWH2008903, BRAWH2008956, BRAWH2008993, BRAWH2009112, BRAWH2009227, BRAWH2009238, BRAWH2009261, BRAWH2009263, BRAWH2009298, BRAWH2009360, BRAWH2009393, BRAWH2009485, BRAWH2009490, BRAWH2009558, BRAWH2009590, BRAWH2009626, BRAWH2009678, BRAWH2009695, BRAWH2009907, BRAWH2010000, BRAWH2010069, BRAWH2010084, BRAWH2010136, BRAWH2010318, BRAWH2010329, BRAWH2010354, BRAWH2010364, BRAWH2010536,

[0816] BRAWH2010552, BRAWH2010584, BRAWH2010618, BRAWH2010619, BRAWH2010754, BRAWH2010980, BRAWH2011066, BRAWH2011079, BRAWH2011096, BRAWH2011155, BRAWH2011166, BRAWH2011204, BRAWH2011286, BRAWH2011294, BRAWH2011343, BRAWH2011400, BRAWH2011762, BRAWH2011795, BRAWH2011796, BRAWH2011812, BRAWH2011823, BRAWH2011860, BRAWH2011920, BRAWH2011958, BRAWH2012054, BRAWH2012161, BRAWH2012162, BRAWH2012164, BRAWH2012258, BRAWH2012277, BRAWH2012326, BRAWH2012538, BRAWH2012540, BRAWH2012619, BRAWH2012698, BRAWH2012749, BRAWH2012827, BRAWH2012866, BRAWH2012963, BRAWH2013047, BRAWH2013219, BRAWH2013294, BRAWH2013748, BRAWH2013866, BRAWH2013871, BRAWH2013914, BRAWH2013941, BRAWH2013955, BRAWH2014053, BRAWH2014188,

[0817] BRAWH2014234, BRAWH2014379, BRAWH2014414, BRAWH2014473, BRAWH2014511, BRAWH2014662, BRAWH2014717, BRAWH2014729, BRAWH2014876, BRAWH2014934, BRAWH2014954, BRAWH2015247, BRAWH2015349, BRAWH2015375, BRAWH2015385, BRAWH2015595, BRAWH2015728, BRAWH2015853, BRAWH2015866, BRAWH2016028, BRAWH2016106, BRAWH2016160, BRAWH2016166, BRAWH2016209, BRAWH2016221, BRAWH2016223, BRAWH2016269, BRAWH2016305, BRAWH2016439, BRAWH2016446, BRAWH2016514, BRAWH2016562, BRAWH2016655, BRAWH2016679, BRAWH2016702, BRAWH2016724, BRAWH2016785, BRAWH2016792, BRAWH2016800, BRAWH2017002, BRAWH2017103, BRAWH2017250, BRAWH2017294, BRAWH2017304, BRAWH2017305, BRAWH2017379, BRAWH2017407, BRAWH2017433, BRAWH2017523, BRAWH2017534,

[0818] BRAWH2017542, BRAWH2017635, BRAWH2017913, BRAWH2018206, BRAWH2018267, BRAWH2018282, BRAWH2018317, BRAWH2018506, BRAWH2018514, BRAWH2018527, BRAWH2018601, BRAWH2018729, BRAWH2018745, BRAWH2018875, BRAWH2019053, BRAWH2019055, BRAWH2019198, BRAWH3000078, BRAWH3000088, BRAWH3000100, BRAWH3000166, BRAWH3000314, BRAWH3000329, BRAWH3000410, BRAWH3000446, BRAWH3000491, BRAWH3000604, BRAWH3000884, BRAWH3001053, BRAWH3001319, BRAWH3001326, BRAWH3001475, BRAWH3001636, BRAWH3001638, BRAWH3001712, BRAWH3001760, BRAWH3001783, BRAWH3001833, BRAWH3001879, BRAWH3001891, BRAWH3001918, BRAWH3002433, BRAWH3002467, BRAWH3002513, BRAWH3002574, BRAWH3002600, BRAWH3002819, BRAWH3003019, BRAWH3003136, BRAWH3003244,

[0819] BRAWH3003343, BRAWH3003411, BRAWH3003522, BRAWH3003573, BRAWH3003598, BRAWH3003727, BRAWH3003801, BRAWH3003975, BRAWH3004222, BRAWH3004335, BRAWH3004350, BRAWH3004453, BRAWH3004530, BRAWH3004666, BRAWH3005037, BRAWH3005047, BRAWH3005132, BRAWH3005146, BRAWH3005292, BRAWH3005300, BRAWH3005422, BRAWH3005534, BRAWH3005886, BRAWH3005892, BRAWH3005896, BRAWH3005912, BRAWH3005981, BRAWH3006547, BRAWH3006548, BRAWH3006761, BRAWH3006792, BRAWH3007129, BRAWH3007221, BRAWH3007441, BRAWH3007455, BRAWH3007506, BRAWH3007726, BRAWH3007783, BRAWH3008167, BRAWH3008341, BRAWH3008559, BRAWH3008697, BRAWH3008867, BRAWH3008931, BRAWH3009017, BRAWH3009285, BRAWH3009297, BRAWH3009546, BRAWH3009961, BRAWH3010461,

[0820] BRAWH3010560, BRAWH3010602, BRAWH3010657, BRAWH3010726, BRAWH3010833, BRAWH3011101, BRAWH3011331, BRAWH3011402, BRAWH3011577, BRAWH3011623, BRAWH3011637, BRAWH3011685, BRAWH3011907, BRAWH3011929, BRAWH3012005, BRAWH3012662, BRAWH3012779, BRAWH3013009, BRAWH3013049, BRAWH3013197, BRAWH3013264, BRAWH3013508, BRAWH3014609, BRAWH3014639, BRAWH3015017, BRAWH3015175, BRAWH3015260, BRAWH3015610, BRAWH3015825, BRAWH3016123, BRAWH3016271, BRAWH3016715, BRAWH3017259, BRAWH3017260, BRAWH3017477, BRAWH3017537, BRAWH3017980, BRAWH3018063, BRAWH3018369, BRAWH3018548, BRAWH3018969, BRAWH3019026, BRAWH3019529, BRAWH3019594, BRAWH3019629, BRAWH3019820, BRAWH3020200, BRAWH3020318, BRAWH3020486, BRAWH3020884,

[0821] BRAWH3020928, BRAWH3021012, BRAWH3021545, BRAWH3021574, BRAWH3021580, BRAWH3021641, BRAWH3021643, BRAWH3021724, BRAWH3022347, BRAWH3022431, BRAWH3022459, BRAWH3022542, BRAWH3022719, BRAWH3022866, BRAWH3022900, BRAWH3023156, BRAWH3023168, BRAWH3023172, BRAWH3023274, BRAWH3023421, BRAWH3024231, BRAWH3024242, BRAWH3024469, BRAWH3024506, BRAWH3024613, BRAWH3026349, BRAWH3026394, BRAWH3026529, BRAWH3027420, BRAWH3027440, BRAWH3027533, BRAWH3027574, BRAWH3027607, BRAWH3027616, BRAWH3027675, BRAWH3027806, BRAWH3027880, BRAWH3027927, BRAWH3028202, BRAWH3028223, BRAWH3028306, BRAWH3028461, BRAWH3028645, BRAWH3028754, BRAWH3028796, BRAWH3029254, BRAWH3029313, BRAWH3029538, BRAWH3029556, BRAWH3029806,

[0822] BRAWH3030613, BRAWH3030772, BRAWH3030810, BRAWH3030892, BRAWH3030910, BRAWH3030950, BRAWH3031054, BRAWH3031710, BRAWH3031902, BRAWH3032298, BRAWH3032340, BRAWH3032571, BRAWH3032620, BRAWH3032930, BRAWH3033117, BRAWH3033293, BRAWH3033448, BRAWH3033513, BRAWH3034097, BRAWH3034114, BRAWH3034134, BRAWH3034668, BRAWH3034743, BRAWH3034775, BRAWH3034890, BRAWH3035154, BRAWH3035403, BRAWH3035904, BRAWH3035914, BRAWH3035936, BRAWH3036077, BRAWH3036247, BRAWH3036270, BRAWH3036561, BRAWH3036738, BRAWH3036951, BRAWH3037265, BRAWH3037394, BRAWH3037533, BRAWH3037979, BRAWH3038055, BRAWH3038230, BRAWH3038252, BRAWH3038324, BRCAN1000065, BRCAN1000076, BRCAN1000105, BRCAN1000149, BRCAN2000148, BRCAN2000149,

[0823] BRCAN2000209, BRCAN2000239, BRCAN2000346, BRCAN2000364, BRCAN2000383, BRCAN2000418, BRCAN2000523, BRCAN2000541, BRCAN2000563, BRCAN2000577, BRCAN2000620, BRCAN2000639, BRCAN2000763, BRCAN2000832, BRCAN2000923, BRCAN2001223, BRCAN2001866, BRCAN2002416, BRCAN2002473, BRCAN2002562, BRCAN2002662, BRCAN2002826, BRCAN2002854, BRCAN2002856, BRCAN2002892, BRCAN2002944, BRCAN2002948, BRCAN2003070, BRCAN2003269, BRCAN2003389, BRCAN2003628, BRCAN2003703, BRCAN2003746, BRCAN2003987, BRCAN2004173, BRCAN2004355, BRCAN2004371, BRCAN2004653, BRCAN2004699, BRCAN2005436, BRCAN2005449, BRCAN2006019, BRCAN2006051, BRCAN2006063, BRCAN2006117, BRCAN2006174, BRCAN2006290, BRCAN2006297, BRCAN2006323, BRCAN2006401,

[0824] BRCAN2006411, BRCAN2006450, BRCAN2006955, BRCAN2007119, BRCAN2007144, BRCAN2007409, BRCAN2007426, BRCAN2007525, BRCAN2007700, BRCAN2008494, BRCAN2008528, BRCAN2008701, BRCAN2008894, BRCAN2009156, BRCAN2009168, BRCAN2009203, BRCAN2009432, BRCAN2010374, BRCAN2010376, BRCAN2010547, BRCAN2010581, BRCAN2010665, BRCAN2011254, BRCAN2011316, BRCAN2011602, BRCAN2011946, BRCAN2012110, BRCAN2012355, BRCAN2012402, BRCAN2012408, BRCAN2012481, BRCAN2012613, BRCAN2012713, BRCAN2012929, BRCAN2013655, BRCAN2013660, BRCAN2014143, BRCAN2014229, BRCAN2014370, BRCAN2014602, BRCAN2014652, BRCAN2014788, BRCAN2014881, BRCAN2014952, BRCAN2015371, BRCAN2015402, BRCAN2015464, BRCAN2015719, BRCAN2015757, BRCAN2015886,

[0825] BRCAN2016025, BRCAN2016046, BRCAN2016174, BRCAN2016433, BRCAN2016619, BRCAN2016762, BRCAN2016814, BRCAN2017442, BRCAN2017905, BRCAN2018240, BRCAN2018269, BRCAN2018490, BRCAN2018566, BRCAN2018667, BRCAN2018748, BRCAN2018935, BRCAN2019002, BRCAN2019387, BRCAN2019653, BRCAN2019773, BRCAN2019907, BRCAN2020234, BRCAN2020331, BRCAN2020412, BRCAN2020467, BRCAN2020710, BRCAN2020880, BRCAN2021024, BRCAN2021028, BRCAN2021325, BRCAN2021452, BRCAN2021669, BRCAN2021718, BRCAN2022126, BRCAN2022191, BRCAN2022472, BRCAN2022474, BRCAN2023347, BRCAN2023724, BRCAN2024451, BRCAN2024563, BRCAN2024572, BRCAN2025009, BRCAN2025093, BRCAN2025349, BRCAN2025368, BRCAN2025712, BRCAN2025982, BRCAN2026117, BRCAN2026340,

[0826] BRCAN2026711, BRCAN2027150, BRCAN2027310, BRCAN2027334, BRCAN2027355, BRCAN2027364, BRCAN2027513, BRCAN2027593, BRCAN2027970, BRCAN2028021, BRCAN2028040, BRCAN2028319, BRCAN2028338, BRCAN2028355, BRCAN2028378, BRCAN2028460, BRCAN2028545, BRCAN2028634, BRCAN2028702, BRCOC1000040, BRCOC1000087, BRCOC2000004, BRCOC2000047, BRCOC2000152, BRCOC2000184, BRCOC2000186, BRCOC2000333, BRCOC2000360, BRCOC2000404, BRCOC2000487, BRCOC2000637, BRCOC2000670, BRCOC2000816, BRCOC2000850, BRCOC2001355, BRCOC2002085, BRCOC2002155, BRCOC2002323, BRCOC2002659, BRCOC2002664, BRCOC2002686, BRCOC2002751, BRCOC2002756, BRCOC2002777, BRCOC2002835, BRCOC2003100, BRCOC2003125, BRCOC2003213, BRCOC2003513, BRCOC2003732,

[0827] BRCOC2003740, BRCOC2004036, BRCOC2004175, BRCOC2004354, BRCOC2004455, BRCOC2004950, BRCOC2005542, BRCOC2005903, BRCOC2005951, BRCOC2006164, BRCOC2006189, BRCOC2006243, BRCOC2006270, BRCOC2006639, BRCOC2006942, BRCOC2007034, BRCOC2007593, BRCOC2007733, BRCOC2007769, BRCOC2008064, BRCOC2008225, BRCOC2008642, BRCOC2008993, BRCOC2009052, BRCOC2009196, BRCOC2009380, BRCOC2009638, BRCOC2009937, BRCOC2010115, BRCOC2010123, BRCOC2010510, BRCOC2010730, BRCOC2010980, BRCOC2010994, BRCOC2011010, BRCOC2011398, BRCOC2011418, BRCOC2011506, BRCOC2011769, BRCOC2011996, BRCOC2012172, BRCOC2012229, BRCOC2012386, BRCOC2012551, BRCOC2012813, BRCOC2013448, BRCOC2013573, BRCOC2013675, BRCOC2013780, BRCOC2014013,

[0828] BRCOC2014033, BRCOC2014400, BRCOC2014748, BRCOC2014833, BRCOC2015597, BRCOC2015824, BRCOC2015908, BRCOC2015944, BRCOC2016525, BRCOC2016661, BRCOC2017061, BRCOC2017652, BRCOC2017856, BRCOC2018877, BRCOC2019255, BRCOC2019549, BRCOC2019841, BRCOC2019896, BRCOC2019903, BRCOC2019910, BRCOC2019934, BRCOC2020122, BRCOC2020142, BRHIP1000058, BRHIP1000072, BRHIP1000104, BRHIP1000108, BRHIP1000129, BRHIP1000174, BRHIP1000258, BRHIP2000021, BRHIP2000079, BRHIP2000087, BRHIP2000163, BRHIP2000210, BRHIP2000239, BRHIP2000245, BRHIP2000312, BRHIP2000359, BRHIP2000445, BRHIP2000506, BRHIP2000532, BRHIP2000553, BRHIP2000621, BRHIP2000691, BRHIP2000819, BRHIP2000826, BRHIP2000920, BRHIP2001074, BRHIP2001099,

[0829] BRHIP2001686, BRHIP2001782, BRHIP2001802, BRHIP2001805, BRHIP2001886, BRHIP2001927, BRHIP2002122, BRHIP2002143, BRHIP2002172, BRHIP2002339, BRHIP2002346, BRHIP2002510, BRHIP2002664, BRHIP2002722, BRHIP2002929, BRHIP2003048, BRHIP2003062, BRHIP2003242, BRHIP2003272, BRHIP2003748, BRHIP2003786, BRHIP2003828, BRHIP2003917, BRHIP2004312, BRHIP2004355, BRHIP2004359, BRHIP2004814, BRHIP2004883, BRHIP2004902, BRHIP2005010, BRHIP2005236, BRHIP2005271, BRHIP2005354, BRHIP2005600, BRHIP2005719, BRHIP2005724, BRHIP2005752, BRHIP2005932, BRHIP2006617, BRHIP2006782, BRHIP2006800, BRHIP2006819, BRHIP2006921, BRHIP2007307, BRHIP2007616, BRHIP2007690, BRHIP2007741, BRHIP2007928, BRHIP2007969, BRHIP2008269,

[0830] BRHIP2008389, BRHIP2008607, BRHIP2008756, BRHIP2008909, BRHIP2009019, BRHIP2009177, BRHIP2009340, BRHIP2009351, BRHIP2009414, BRHIP2009474, BRHIP2009617, BRHIP2009685, BRHIP2010217, BRHIP2010309, BRHIP2010444, BRHIP2010487, BRHIP2010571, BRHIP2010593, BRHIP2010610, BRHIP2010723, BRHIP2010744, BRHIP2011080, BRHIP2011120, BRHIP2011199, BRHIP2011508, BRHIP2011576, BRHIP2011616, BRHIP2011783, BRHIP2011838, BRHIP2011891, BRHIP2011933, BRHIP2012054, BRHIP2012059, BRHIP2012141, BRHIP2012314, BRHIP2012360, BRHIP2012545, BRHIP2012580, BRHIP2012627, BRHIP2012642, BRHIP2012750, BRHIP2012922, BRHIP2012923, BRHIP2012972, BRHIP2013286, BRHIP2013447, BRHIP2013510, BRHIP2013699, BRHIP2013723, BRHIP2013958,

[0831] BRHIP2013972, BRHIP2014063, BRHIP2014228, BRHIP2014285, BRHIP2014291, BRHIP2014373, BRHIP2014386, BRHIP2014387, BRHIP2014954, BRHIP2015153, BRHIP2015224, BRHIP2015245, BRHIP2015356, BRHIP2015360, BRHIP2015679, BRHIP2016005, BRHIP2016125, BRHIP2016788, BRHIP2016968, BRHIP2016990, BRHIP2017010, BRHIP2017315, BRHIP2017385, BRHIP2017404, BRHIP2017542, BRHIP2017553, BRHIP2017642, BRHIP2017714, BRHIP2017780, BRHIP2017945, BRHIP2018014, BRHIP2018369, BRHIP2018612, BRHIP2018635, BRHIP2018650, BRHIP2018712, BRHIP2018719, BRHIP2018805, BRHIP2018998, BRHIP2019007, BRHIP2019047, BRHIP2019149, BRHIP2019177, BRHIP2019186, BRHIP2019291, BRHIP2019494, BRHIP2019589, BRHIP2019641, BRHIP2019819, BRHIP2019884,

[0832] BRHIP2019972, BRHIP2020182, BRHIP2020509, BRHIP2020573, BRHIP2020622, BRHIP2020695, BRHIP2020743, BRHIP2020799, BRHIP2020842, BRHIP2020859, BRHIP2020930, BRHIP2021102, BRHIP2021289, BRHIP2021495, BRHIP2021615, BRHIP2021744, BRHIP2021762, BRHIP2021858, BRHIP2021870, BRHIP2021929, BRHIP2022006, BRHIP2022054, BRHIP2022221, BRHIP2022228, BRHIP2022298, BRHIP2022467, BRHIP2022708, BRHIP2022986, BRHIP2023071, BRHIP2023229, BRHIP2023272, BRHIP2023292, BRHIP2023309, BRHIP2023369, BRHIP2023438, BRHIP2023695, BRHIP2023735, BRHIP2023762, BRHIP2023773, BRHIP2023860, BRHIP2023869, BRHIP2024046, BRHIP2024165, BRHIP2024201, BRHIP2024347, BRHIP2024398, BRHIP2024549, BRHIP2024742, BRHIP2024789, BRHIP2024911,

[0833] BRHIP2024941, BRHIP2025245, BRHIP2025366, BRHIP2025448, BRHIP2025679, BRHIP2025739, BRHIP2025797, BRHIP2026021, BRHIP2026061, BRHIP2026155, BRHIP2026214, BRHIP2026288, BRHIP2026346, BRHIP2026557, BRHIP2026723, BRHIP2026877, BRHIP2027017, BRHIP2027054, BRHIP2027077, BRHIP2027563, BRHIP2027685, BRHIP2027762, BRHIP2028187, BRHIP2028303, BRHIP2028330, BRHIP2028480, BRHIP2028583, BRHIP2028593, BRHIP2029176, BRHIP2029283, BRHIP2029393, BRHIP2029529, BRHIP2029643, BRHIP2029663, BRHIP3000017, BRHIP3000060, BRHIP3000070, BRHIP3000081, BRHIP3000111, BRHIP3000131, BRHIP3000240, BRHIP3000377, BRHIP3000457, BRHIP3000475, BRHIP3000488, BRHIP3000526, BRHIP3000626, BRHIP3000859, BRHIP3000907, BRHIP3001076,

[0834] BRHIP3001079, BRHIP3001141, BRHIP3001283, BRHIP3001338, BRHIP3001360, BRHIP3001481, BRHIP3001878, BRHIP3001964, BRHIP3002114, BRHIP3002124, BRHIP3002141, BRHIP3002363, BRHIP3002691, BRHIP3002920, BRHIP3002931, BRHIP3003063, BRHIP3003126, BRHIP3003306, BRHIP3003340, BRHIP3003395, BRHIP3003484, BRHIP3003644, BRHIP3003688, BRHIP3003795, BRHIP3003961, BRHIP3003984, BRHIP3004193, BRHIP3004215, BRHIP3004416, BRHIP3004710, BRHIP3004725, BRHIP3004774, BRHIP3004786, BRHIP3004863, BRHIP3004968, BRHIP3005037, BRHIP3005137, BRHIP3005142, BRHIP3005231, BRHIP3005307, BRHIP3005574, BRHIP3005673, BRHIP3005768, BRHIP3005801, BRHIP3005944, BRHIP3006279, BRHIP3006294, BRHIP3006390, BRHIP3006449, BRHIP3006683,

[0835] BRHIP3006717, BRHIP3006786, BRHIP3006950, BRHIP3007172, BRHIP3007183, BRHIP3007195, BRHIP3007223, BRHIP3007239, BRHIP3007291, BRHIP3007409, BRHIP3007424, BRHIP3007483, BRHIP3007586, BRHIP3007609, BRHIP3007640, BRHIP3007960, BRHIP3008082, BRHIP3008183, BRHIP3008314, BRHIP3008320, BRHIP3008344, BRHIP3008405, BRHIP3008565, BRHIP3008598, BRHIP3008606, BRHIP3008691, BRHIP3008714, BRHIP3008997, BRHIP3009099, BRHIP3009140, BRHIP3009181, BRHIP3009318, BRHIP3009427, BRHIP3009448, BRHIP3009672, BRHIP3009753, BRHIP3010135, BRHIP3010289, BRHIP3010529, BRHIP3011082, BRHIP3011241, BRHIP3011269, BRHIP3011460, BRHIP3011567, BRHIP3011831, BRHIP3012185, BRHIP3012289, BRHIP3012357, BRHIP3012736, BRHIP3012745,

[0836] BRHIP3012868, BRHIP3012997, BRHIP3013078, BRHIP3013271, BRHIP3013588, BRHIP3013698, BRHIP3013765, BRHIP3013897, BRHIP3014237, BRHIP3014675, BRHIP3015620, BRHIP3015751, BRHIP3015854, BRHIP3016032, BRHIP3016213, BRHIP3016302, BRHIP3016421, BRHIP3017109, BRHIP3017146, BRHIP3017256, BRHIP3017325, BRHIP3017558, BRHIP3017637, BRHIP3017855, BRHIP3018278, BRHIP3018784, BRHIP3019643, BRHIP3019824, BRHIP3019880, BRHIP3019956, BRHIP3020046, BRHIP3020155, BRHIP3020182, BRHIP3020733, BRHIP3021019, BRHIP3021499, BRHIP3021534, BRHIP3021778, BRHIP3021987, BRHIP3022656, BRHIP3023922, BRHIP3024118, BRHIP3024533, BRHIP3024703, BRHIP3024725, BRHIP3024820, BRHIP3025161, BRHIP3025702, BRHIP3025795, BRHIP3025844,

[0837] BRHIP3026052, BRHIP3026097, BRHIP3026231, BRHIP3026335, BRHIP3026651, BRHIP3027105, BRHIP3027137, BRHIP3027160, BRHIP3027191, BRHIP3027501, BRHIP3027594, BRHIP3027651, BRHIP3027854, BRHIP3027947, BRHIP3028570, BRHIP3028742, BRSSN1000056, BRSSN1000059, BRSSN1000092, BRSSN1000153, BRSSN2000097, BRSSN2000175, BRSSN2000197, BRSSN2000244, BRSSN2000293, BRSSN2000295, BRSSN2000312, BRSSN2000498, BRSSN2000518, BRSSN2000561, BRSSN2000566, BRSSN2000684, BRSSN2000715, BRSSN2000832, BRSSN2001213, BRSSN2001275, BRSSN2001342, BRSSN2001426, BRSSN2001503, BRSSN2001579, BRSSN2001758, BRSSN2001810, BRSSN2001869, BRSSN2002857, BRSSN2002859, BRSSN2003012, BRSSN2003086, BRSSN2003093, BRSSN2003820, BRSSN2003841,

[0838] BRSSN2003937, BRSSN2004142, BRSSN2004303, BRSSN2004304, BRSSN2004496, BRSSN2004657, BRSSN2004679, BRSSN2004686, BRSSN2004710, BRSSN2004719, BRSSN2005847, BRSSN2006133, BRSSN2006390, BRSSN2006575, BRSSN2006611, BRSSN2006644, BRSSN2006892, BRSSN2007076, BRSSN2007168, BRSSN2007202, BRSSN2007338, BRSSN2007464, BRSSN2007504, BRSSN2007819, BRSSN2008125, BRSSN2008419, BRSSN2008464, BRSSN2008549, BRSSN2008797, BRSSN2009119, BRSSN2009378, BRSSN2009389, BRSSN2009395, BRSSN2009518, BRSSN2009627, BRSSN2009630, BRSSN2009702, BRSSN2010019, BRSSN2010110, BRSSN2010587, BRSSN2010596, BRSSN2010830, BRSSN2011262, BRSSN2011653, BRSSN2011738, BRSSN2011843, BRSSN2012081, BRSSN2012103, BRSSN2012157, BRSSN2012198,

[0839] BRSSN2012254, BRSSN2012439, BRSSN2012622, BRSSN2012691, BRSSN2012838, BRSSN2013095, BRSSN2013544, BRSSN2013696, BRSSN2013702, BRSSN2013733, BRSSN2013753, BRSSN2013874, BRSSN2014112, BRSSN2014294, BRSSN2014299, BRSSN2014424, BRSSN2014513, BRSSN2014556, BRSSN2014573, BRSSN2014610, BRSSN2014636, BRSSN2014685, BRSSN2015199, BRSSN2015238, BRSSN2015369, BRSSN2015497, BRSSN2015554, BRSSN2015707, BRSSN2015773, BRSSN2015907, BRSSN2015982, BRSSN2016589, BRSSN2016768, BRSSN2016905, BRSSN2017297, BRSSN2017422, BRSSN2017530, BRSSN2017682, BRSSN2017757, BRSSN2018218, BRSSN2018440, BRSSN2018447, BRSSN2018581, BRSSN2018731, BRSSN2018771, BRSSN2018925, BRSTN1000083, BRSTN1000097, BRSTN2000058, BRSTN2000070,

[0840] BRSTN2000220, BRSTN2000312, BRSTN2000367, BRSTN2000536, BRSTN2000872, BRSTN2001067, BRSTN2001613, BRSTN2001801, BRSTN2002105, BRSTN2002400, BRSTN2002532, BRSTN2002691, BRSTN2003590, BRSTN2003835, BRSTN2004863, BRSTN2004869, BRSTN2004987, BRSTN2005721, BRSTN2006306, BRSTN2006466, BRSTN2006580, BRSTN2006583, BRSTN2006638, BRSTN2006865, BRSTN2007000, BRSTN2007118, BRSTN2007284, BRSTN2007765, BRSTN2008052, BRSTN2008283, BRSTN2008367, BRSTN2008418, BRSTN2008457, BRSTN2008475, BRSTN2008930, BRSTN2009247, BRSTN2010089, BRSTN2010107, BRSTN2010363, BRSTN2010416, BRSTN2010500, BRSTN2010569, BRSTN2010750, BRSTN2010923, BRSTN2011211, BRSTN2011597, BRSTN2011688, BRSTN2011799, BRSTN2012089, BRSTN2012284,

[0841] BRSTN2012320, BRSTN2012380, BRSTN2012451, BRSTN2013171, BRSTN2013354, BRSTN2013502, BRSTN2013931, BRSTN2014490, BRSTN2014633, BRSTN2014751, BRSTN2014770, BRSTN2015015, BRSTN2015889, BRSTN2015978, BRSTN2016066, BRSTN2016335, BRSTN2016892, BRSTN2016918, BRSTN2017104, BRSTN2017151, BRSTN2017237, BRSTN2017379, BRSTN2017761, BRSTN2017771, BRSTN2017995, BRSTN2018077, BRSTN2018083, BRSTN2018596, BRSTN2018692, BRSTN2018712, BRSTN2019079, BRSTN2019129, BRTHA1000021, BRTHA1000063, BRTHA1000311, BRTHA2000057, BRTHA2000474, BRTHA2000514, BRTHA2000574, BRTHA2000855, BRTHA2000969, BRTHA2000972, BRTHA2001304, BRTHA2001370, BRTHA2001462, BRTHA2001717, BRTHA2001812, BRTHA2002091, BRTHA2002115, BRTHA2002133,

[0842] BRTHA2002281, BRTHA2002376, BRTHA2002442, BRTHA2002493, BRTHA2002565, BRTHA2002608, BRTHA2002702, BRTHA2002721, BRTHA2002726, BRTHA2002741, BRTHA2002808, BRTHA2002896, BRTHA2002903, BRTHA2003030, BRTHA2003110, BRTHA2003116, BRTHA2003436, BRTHA2003759, BRTHA2003794, BRTHA2004361, BRTHA2004371, BRTHA2004582, BRTHA2004629, BRTHA2004639, BRTHA2004642, BRTHA2004812, BRTHA2004821, BRTHA2004978, BRTHA2004992, BRTHA2005005, BRTHA2005013, BRTHA2005448, BRTHA2005579, BRTHA2005831, BRTHA2005864, BRTHA2005942, BRTHA2005956, BRTHA2006075, BRTHA2006146, BRTHA2006194, BRTHA2006232, BRTHA2006720, BRTHA2006735, BRTHA2006974, BRTHA2006975, BRTHA2007060, BRTHA2007122, BRTHA2007422, BRTHA2007603, BRTHA2007665,

[0843] BRTHA2007998, BRTHA2008316, BRTHA2008335, BRTHA2008502, BRTHA2008513, BRTHA2008527, BRTHA2008535, BRTHA2008598, BRTHA2008669, BRTHA2008955, BRTHA2009311, BRTHA2009349, BRTHA2009486, BRTHA2009803, BRTHA2009846, BRTHA2009886, BRTHA2009972, BRTHA2010008, BRTHA2010033, BRTHA2010073, BRTHA2010097, BRTHA2010191, BRTHA2010397, BRTHA2010608, BRTHA2010672, BRTHA2010884, BRTHA2010907, BRTHA2011062, BRTHA2011194, BRTHA2011321, BRTHA2011351, BRTHA2011500, BRTHA2011641, BRTHA2011691, BRTHA2012129, BRTHA2012183, BRTHA2012189, BRTHA2012351, BRTHA2012392, BRTHA2012466, BRTHA2012555, BRTHA2012562, BRTHA2012980, BRTHA2013054, BRTHA2013262, BRTHA2013275, BRTHA2013426, BRTHA2013460, BRTHA2013515, BRTHA2013540,

[0844] BRTHA2013595, BRTHA2013610, BRTHA2013707, BRTHA2013942, BRTHA2014287, BRTHA2014334, BRTHA2014381, BRTHA2014578, BRTHA2014647, BRTHA2014663, BRTHA2014792, BRTHA2014828, BRTHA2014909, BRTHA2014975, BRTHA2014997, BRTHA2015406, BRTHA2015478, BRTHA2015696, BRTHA2015700, BRTHA2015853, BRTHA2015878, BRTHA2016179, BRTHA2016215, BRTHA2016267, BRTHA2016318, BRTHA2016496, BRTHA2016543, BRTHA2016552, BRTHA2016577, BRTHA2016765, BRTHA2016918, BRTHA2017178, BRTHA2017353, BRTHA2017364, BRTHA2017972, BRTHA2017985, BRTHA2018011, BRTHA2018129, BRTHA2018165, BRTHA2018304, BRTHA2018344, BRTHA2018420, BRTHA2018443, BRTHA2018504, BRTHA2018558, BRTHA2018591, BRTHA2018624, BRTHA2018706, BRTHA2018707, BRTHA2019014,

[0845] BRTHA2019022, BRTHA2019048, BRTHA2019073, BRTHA2019726, BRTHA2019743, BRTHA2020400, BRTHA2020566, BRTHA2020642, BRTHA2020695, BRTHA2020721, BRTHA2020781, BRTHA2020811, BRTHA2020910, BRTHA2021212, BRTHA2021440, BRTHA2021450, BRTHA2022074, BRTHA2022914, BRTHA2022968, BRTHA2023402, BRTHA2023437, BRTHA2024177, BRTHA2024354, BRTHA2024712, BRTHA2025869, BRTHA2026071, BRTHA2026290, BRTHA2026311, BRTHA2027227, BRTHA2027250, BRTHA2027546, BRTHA2028297, BRTHA2029969, BRTHA2030036, BRTHA2030213, BRTHA2031517, BRTHA2031800, BRTHA2031917, BRTHA2032763, BRTHA2032845, BRTHA2033122, BRTHA2033155, BRTHA2033264, BRTHA2033320, BRTHA2033469, BRTHA2033683, BRTHA2034281, BRTHA2034576, BRTHA2034874, BRTHA2035448,

[0846] BRTHA2035743, BRTHA2036055, BRTHA2036295, BRTHA2036660, BRTHA2037247, BRTHA2038279, BRTHA2038345, BRTHA2038353, BRTHA2038396, BRTHA3000252, BRTHA3000273, BRTHA3000296, BRTHA3000297, BRTHA3000325, BRTHA3000456, BRTHA3000633, BRTHA3000789, BRTHA3001221, BRTHA3001623, BRTHA3002265, BRTHA3002401, BRTHA3002411, BRTHA3002427, BRTHA3002864, BRTHA3002933, BRTHA3002955, BRTHA3003000, BRTHA3003023, BRTHA3003074, BRTHA3003225, BRTHA3003339, BRTHA3003343, BRTHA3003417, BRTHA3003449, BRTHA3003474, BRTHA3003490, BRTHA3003704, BRTHA3003736, BRTHA3004307, BRTHA3004432, BRTHA3004475, BRTHA3004502, BRTHA3004610, BRTHA3005046, BRTHA3005735, BRTHA3005988, BRTHA3006318, BRTHA3006593, BRTHA3006856, BRTHA3007113,

[0847] BRTHA3007130, BRTHA3007148, BRTHA3007319, BRTHA3007469, BRTHA3007472, BRTHA3007532, BRTHA3007662, BRTHA3007685, BRTHA3007769, BRTHA3007922, BRTHA3008143, BRTHA3008293, BRTHA3008310, BRTHA3008386, BRTHA3008520, BRTHA3008608, BRTHA3008694, BRTHA3008778, BRTHA3008826, BRTHA3009037, BRTHA3009090, BRTHA3009291, BRTHA3009858, BRTHA3010135, BRTHA3010366, BRTHA3010469, BRTHA3010530, BRTHA3010540, BRTHA3010717, BRTHA3011149, BRTHA3011187, BRTHA3011194, BRTHA3011229, BRTHA3011265, BRTHA3011361, BRTHA3011510, BRTHA3011892, BRTHA3012265, BRTHA3013860, BRTHA3013882, BRTHA3013884, BRTHA3013981, BRTHA3014000, BRTHA3014105, BRTHA3014507, BRTHA3014547, BRTHA3014691, BRTHA3014835, BRTHA3014854, BRTHA3014908,

[0848] BRTHA3014920, BRTHA3015815, BRTHA3016616, BRTHA3016835, BRTHA3016845, BRTHA3016917, BRTHA3017047, BRTHA3017589, BRTHA3017848, BRTHA3018409, BRTHA3018514, BRTHA3018617, BRTHA3018623, BRTHA3018656, BRTHA3019048, BRTHA3019105, BRTHA3019183, BRTHA3020000, BRTHA3020314, BRTHA3020369, BRTHA3021569, BRTHA3021708, BRTHA3021786, BRTHA3021971, BRTHA3022641, BRTHA3023403, BRTHA3023523, BRTHA3023590, BRTHA3023929, BRTHA3024233, BRTHA3024600, BRTHA3025073, BRTHA3025789, BRTHA3025826, BRTHA3026161, BRTHA3026180, BRTHA3026507, BRTHA3026556, BRTHA3026916, BRTHA3027171, BRTHA3027318, BRTHA3027638, BRTHA3027820, BRTHA3027879, BRTHA3027957, BRTHA3028339, BRTHA3028505, BRTHA3028782, CD34C2000051, CD34C2000152,

[0849] CD34C2000175, CD34C2000443, CD34C3000125, CD34C3000314, CD34C3000424, CD34C3000494, CERVX1000042, CERVX2000812, CERVX2000968, CERVX2002006, CERVX2002013, CERVX2002430, CERVX2002770, CHONS1000058, CHONS2000172, CHONS2000797, CHONS2001287, CHONS2001382, CHONS2001797, CHONS2001834, CHONS2002419, CHONS2002829, COLON1000030, COLON1000084, COLON1000135, COLON2000470, COLON2000557, COLON2000568, COLON2001721, COLON2001829, COLON2001866, COLON2002443, COLON2002520, COLON2003043, COLON2003529, COLON2004318, COLON2004351, COLON2004478, COLON2004911, COLON2005126, COLON2005623, COLON2005735, COLON2005772, COLON2006263, COLON2006282, COLON2006417, COLON2007274, COLON2007733, COLON2008105, COLON2009337,

[0850] COLON2009499, CORDB1000140, CORDB2000061, CORDB2000127, CORDB2000541, CTONG1000009, CTONG1000010, CTONG1000020, CTONG1000022, CTONG1000040, CTONG1000052, CTONG1000056, CTONG1000062, CTONG1000086, CTONG1000088, CTONG1000093, CTONG1000094, CTONG1000097, CTONG1000113, CTONG1000137, CTONG1000165, CTONG1000180, CTONG1000181, CTONG1000218, CTONG1000220, CTONG1000241, CTONG1000277, CTONG1000283, CTONG1000288, CTONG1000302, CTONG1000341, CTONG1000467, CTONG1000476, CTONG1000488, CTONG1000508, CTONG1000540, CTONG2000031, CTONG2000034, CTONG2000042, CTONG2000063, CTONG2000201, CTONG2000218, CTONG2000279, CTONG2000303, CTONG2000330, CTONG2000395, CTONG2000411, CTONG2000465, CTONG2000469, CTONG2000480,

[0851] CTONG2000508, CTONG2000561, CTONG2000589, CTONG2000766, CTONG2000771, CTONG2000819, CTONG2000827, CTONG2000846, CTONG2000855, CTONG2000977, CTONG2001139, CTONG2001226, CTONG2001320, CTONG2001366, CTONG2001413, CTONG2001428, CTONG2001513, CTONG2001524, CTONG2001533, CTONG2001598, CTONG2001681, CTONG2001724, CTONG2001749, CTONG2001800, CTONG2001820, CTONG2001858, CTONG2001877, CTONG2001911, CTONG2001932, CTONG2001955, CTONG2002066, CTONG2002095, CTONG2002143, CTONG2002270, CTONG2002395, CTONG2002417, CTONG2002418, CTONG2002453, CTONG2002558, CTONG2002590, CTONG2002709, CTONG2002721, CTONG2002744, CTONG2002766, CTONG2002803, CTONG2002816, CTONG2002820, CTONG2002832, CTONG2002841, CTONG2002903,

[0852] CTONG2002965, CTONG2002999, CTONG2003028, CTONG2003094, CTONG2003100, CTONG2003115, CTONG2003189, CTONG2003245, CTONG2003293, CTONG2003348, CTONG2003350, CTONG2003361, CTONG2003372, CTONG2003375, CTONG2003427, CTONG2003517, CTONG2003524, CTONG2003599, CTONG2003680, CTONG2003699, CTONG2003764, CTONG2003782, CTONG2003889, CTONG2003937, CTONG2003945, CTONG2004000, CTONG2004062, CTONG2004115, CTONG2004126, CTONG2004264, CTONG2004305, CTONG2004397, CTONG2004423, CTONG2004454, CTONG2004487, CTONG2004550, CTONG2004669, CTONG2004716, CTONG2004912, CTONG2004941, CTONG2004948, CTONG2005028, CTONG2005049, CTONG2005110, CTONG2005145, CTONG2005265, CTONG2005278, CTONG2005290, CTONG2005374, CTONG2005399,

[0853] CTONG2005468, CTONG2005553, CTONG2005567, CTONG2005585, CTONG2005615, CTONG2005635, CTONG2005775, CTONG2005795, CTONG2005890, CTONG2005904, CTONG2005913, CTONG2006129, CTONG2006223, CTONG2006235, CTONG2006273, CTONG2006310, CTONG2006377, CTONG2006393, CTONG2006412, CTONG2006449, CTONG2006515, CTONG2006524, CTONG2006568, CTONG2006611, CTONG2006620, CTONG2006666, CTONG2006691, CTONG2006709, CTONG2006798, CTONG2006836, CTONG2006942, CTONG2006964, CTONG2007007, CTONG2007009, CTONG2007072, CTONG2007078, CTONG2007091, CTONG2007104, CTONG2007168, CTONG2007175, CTONG2007259, CTONG2007272, CTONG2007293, CTONG2007297, CTONG2007399, CTONG2007400, CTONG2007417, CTONG2007441, CTONG2007474, CTONG2007500,

[0854] CTONG2007586, CTONG2007613, CTONG2007623, CTONG2007681, CTONG2007776, CTONG2007779, CTONG2007898, CTONG2007959, CTONG2007970, CTONG2008014, CTONG2008184, CTONG2008262, CTONG2008269, CTONG2008321, CTONG2008343, CTONG2008398, CTONG2008402, CTONG2008405, CTONG2008466, CTONG2008518, CTONG2008521, CTONG2008562, CTONG2008577, CTONG2008595, CTONG2008621, CTONG2008689, CTONG2008720, CTONG2008721, CTONG2008773, CTONG2008792, CTONG2008989, CTONG2009033, CTONG2009108, CTONG2009132, CTONG2009156, CTONG2009181, CTONG2009257, CTONG2009258, CTONG2009268, CTONG2009270, CTONG2009395, CTONG2009423, CTONG2009440, CTONG2009527, CTONG2009529, CTONG2009531, CTONG2009534, CTONG2009570, CTONG2009572, CTONG2009604,

[0855] CTONG2009643, CTONG2009675, CTONG2009689, CTONG2009725, CTONG2009766, CTONG2009768, CTONG2009844, CTONG2009871, CTONG2009887, CTONG2009891, CTONG2009923, CTONG2009938, CTONG2009955, CTONG2009958, CTONG2009963, CTONG2010018, CTONG2010024, CTONG2010116, CTONG2010133, CTONG2010148, CTONG2010276, CTONG2010330, CTONG2010348, CTONG2010408, CTONG2010508, CTONG2010566, CTONG2010623, CTONG2010649, CTONG2010652, CTONG2010803, CTONG2011188, CTONG2011429, CTONG2011474, CTONG2011676, CTONG2011716, CTONG2011765, CTONG2011779, CTONG2011801, CTONG2011815, CTONG2011822, CTONG2011825, CTONG2011920, CTONG2011985, CTONG2012001, CTONG2012029, CTONG2012050, CTONG2012077, CTONG2012101, CTONG2012123, CTONG2012158,

[0856] CTONG2012230, CTONG2012401, CTONG2012422, CTONG2012425, CTONG2012447, CTONG2012453, CTONG2012473, CTONG2012476, CTONG2012533, CTONG2012554, CTONG2012607, CTONG2012661, CTONG2012724, CTONG2012738, CTONG2012758, CTONG2012843, CTONG2012847, CTONG2012879, CTONG2012901, CTONG2012996, CTONG2013128, CTONG2013149, CTONG2013156, CTONG2013178, CTONG2013222, CTONG2013284, CTONG2013339, CTONG2013348, CTONG2013352, CTONG2013381, CTONG2013393, CTONG2013511, CTONG2013630, CTONG2013803, CTONG2013934, CTONG2013985, CTONG2013986, CTONG2014032, CTONG2014058, CTONG2014119, CTONG2014165, CTONG2014191, CTONG2014206, CTONG2014234, CTONG2014264, CTONG2014280, CTONG2014369, CTONG2014389, CTONG2014491, CTONG2014630,

[0857] CTONG2014635, CTONG2014646, CTONG2014705, CTONG2014898, CTONG2014946, CTONG2014954, CTONG2014959, CTONG2014966, CTONG2014995, CTONG2015204, CTONG2015316, CTONG2015330, CTONG2015345, CTONG2015358, CTONG2015434, CTONG2015518, CTONG2015540, CTONG2015596, CTONG2015633, CTONG2015678, CTONG2015717, CTONG2015804, CTONG2015815, CTONG2015866, CTONG2015914, CTONG2015953, CTONG2016056, CTONG2016185, CTONG2016217, CTONG2016355, CTONG2016408, CTONG2016499, CTONG2016505, CTONG2016559, CTONG2016658, CTONG2016775, CTONG2016797, CTONG2016846, CTONG2016869, CTONG2016904, CTONG2016942, CTONG2016953, CTONG2017021, CTONG2017094, CTONG2017292, CTONG2017409, CTONG2017429, CTONG2017444, CTONG2017458, CTONG2017604,

[0858] CTONG2017650, CTONG2017798, CTONG2017804, CTONG2017814, CTONG2017910, CTONG2017939, CTONG2017989, CTONG2017998, CTONG2018062, CTONG2018069, CTONG2018147, CTONG2018211, CTONG2018217, CTONG2018279, CTONG2018334, CTONG2018343, CTONG2018379, CTONG2018383, CTONG2018413, CTONG2018483, CTONG2018629, CTONG2018632, CTONG2018637, CTONG2018652, CTONG2018653, CTONG2018655, CTONG2018735, CTONG2018739, CTONG2018808, CTONG2018843, CTONG2018898, CTONG2018976, CTONG2019029, CTONG2019063, CTONG2019144, CTONG2019232, CTONG2019248, CTONG2019400, CTONG2019590, CTONG2019652, CTONG2019704, CTONG2019788, CTONG2019822, CTONG2019833, CTONG2020031, CTONG2020108, CTONG2020127, CTONG2020171, CTONG2020374, CTONG2020378,

[0859] CTONG2020411, CTONG2020445, CTONG2020522, CTONG2020560, CTONG2020582, CTONG2020638, CTONG2020806, CTONG2020831, CTONG2020974, CTONG2021024, CTONG2021132, CTONG2021168, CTONG2021289, CTONG2022153, CTONG2022601, CTONG2022835, CTONG2023021, CTONG2023449, CTONG2023512, CTONG2024031, CTONG2024206, CTONG2024614, CTONG2024749, CTONG2025496, CTONG2025513, CTONG2025516, CTONG2025610, CTONG2025900, CTONG2026513, CTONG2026770, CTONG2026920, CTONG2026987, CTONG2027150, CTONG2027263, CTONG2027327, CTONG2027361, CTONG2027591, CTONG2027736, CTONG2027783, CTONG2027828, CTONG2027959, CTONG2028097, CTONG2028309, CTONG2028486, CTONG2028518, CTONG2028687, CTONG2028758, CTONG3000686, CTONG3000707, CTONG3000896,

[0860] CTONG3001123, CTONG3001420, CTONG3001501, CTONG3001560, CTONG3001605, CTONG3001746, CTONG3002020, CTONG3002127, CTONG3002370, CTONG3002412, CTONG3002433, CTONG3002518, CTONG3002552, CTONG3002588, CTONG3002674, CTONG3002728, CTONG3002835, CTONG3002909, CTONG3002947, CTONG3002983, CTONG3003165, CTONG3003179, CTONG3003483, CTONG3003553, CTONG3003598, CTONG3003652, CTONG3003654, CTONG3003669, CTONG3003737, CTONG3003905, CTONG3003972, CTONG3004072, CTONG3004317, CTONG3004397, CTONG3004550, CTONG3004576, CTONG3004607, CTONG3004712, CTONG3004726, CTONG3005325, CTONG3005648, CTONG3005713, CTONG3005803, CTONG3005813, CTONG3006067, CTONG3006073, CTONG3006186, CTONG3006629, CTONG3006650, CTONG3006659,

[0861] CTONG3007244, CTONG3007444, CTONG3007528, CTONG3007586, CTONG3007870, CTONG3008223, CTONG3008252, CTONG3008258, CTONG3008457, CTONG3008496, CTONG3008566, CTONG3008639, CTONG3008831, CTONG3008894, CTONG3008951, CTONG3008959, CTONG3009227, CTONG3009239, CTONG3009287, CTONG3009328, CTONG3009385, D3OST1000066, D3OST1000109, D3OST1000238, D3OST1000267, D3OST1000270, D3OST2000184, D3OST2000618, D3OST2000654, D3OST2000734, D3OST2001328, D3OST2001669, D3OST2001670, D3OST2001788, D3OST2002068, D3OST2002182, D3OST2002223, D3OST2002262, D3OST2002272, D3OST2002417, D3OST2002436, D3OST2002648, D3OST2003024, D3OST2003331, D3OST2003607, D3OST2003797, D3OST2004637, D3OST3000195, D3OST3000258, D3OST3000291,

[0862] D3OST3000388, D3OST3000493, D6OST2000127, D6OST2000169, D6OST2000245, D6OST2000358, D6OST2000507, D9OST2000031, D9OST2000278, D9OST2000440, D9OST2000869, D9OST2001319, D9OST2001433, D9OST2002397, D9OST2002608, D9OST2002673, D9OST2003106, D9OST2003108, D9OST2003137, D9OST2003580, D9OST2003594, D9OST2003762, D9OST2003791, D9OST2003989, D9OST2004018, D9OST2004073, D9OST2004417, DFNES1000003, DFNES1000083, DFNES1000107, DFNES1000150, DFNES1000185, DFNES2000143, DFNES2000146, DFNES2000153, DFNES2000212, DFNES2000268, DFNES2000292, DFNES2000335, DFNES2000426, DFNES2000432, DFNES2000443, DFNES2000457, DFNES2000471, DFNES2000526, DFNES2000913, DFNES2001091, DFNES2001096, DFNES2001108, DFNES2001177,

[0863] DFNES2001404, DFNES2001564, DFNES2001565, DFNES2001647, DFNES2001800, DFNES2001829, DFNES2002220, DFNES2002550, DFNES2002588, DFNES2002817, DFNES2002966, DFNES2003081, DFNES2003192, DFNES2003255, DFNES2003742, DFNES2004346, DFNES2004354, DFNES2004371, DFNES2004383, DFNES2004608, DFNES2004684, DFNES2005266, DFNES2005527, DFNES2005690, DFNES2005779, DFNES2005875, DFNES2006346, DFNES2006944, DFNES2007113, DFNES2007299, DFNES2007634, DFNES2007641, DFNES2007757, DFNES2008088, DFNES2008160, DFNES2008280, DFNES2008881, DFNES2009482, DFNES2010502, DFNES2011192, DFNES2011221, DFNES2011239, DFNES2011245, DFNES2011380, DFNES2011499, ERLTF1000021, ERLTF2000324, ERLTF2000465, FCBBF1000023, FCBBF1000024,

[0864] FCBBF1000025, FCBBF1000038, FCBBF1000053, FCBBF1000061, FCBBF1000063, FCBBF1000069, FCBBF1000077, FCBBF1000115, FCBBF1000117, FCBBF1000118, FCBBF1000121, FCBBF1000125, FCBBF1000131, FCBBF1000155, FCBBF1000157, FCBBF1000171, FCBBF1000174, FCBBF1000182, FCBBF1000197, FCBBF1000198, FCBBF1000206, FCBBF1000220, FCBBF1000232, FCBBF1000233, FCBBF1000243, FCBBF1000270, FCBBF1000272, FCBBF1000294, FCBBF1000297, FCBBF1000305, FCBBF1000314, FCBBF1000322, FCBBF1000349, FCBBF1000374, FCBBF1000376, FCBBF1000377, FCBBF1000395, FCBBF1000397, FCBBF1000403, FCBBF1000412, FCBBF1000425, FCBBF1000437, FCBBF1000449, FCBBF1000466, FCBBF1000476, FCBBF1000506, FCBBF1000509, FCBBF1000546, FCBBF1000550, FCBBF1000556,

[0865] FCBBF1000563, FCBBF1000574, FCBBF1000581, FCBBF1000582, FCBBF1000598, FCBBF1000604, FCBBF1000618, FCBBF1000627, FCBBF1000671, FCBBF1000675, FCBBF1000684, FCBBF1000686, FCBBF1000687, FCBBF1000691, FCBBF1000748, FCBBF1000760, FCBBF2000038, FCBBF2000087, FCBBF2000094, FCBBF2000105, FCBBF2000123, FCBBF2000195, FCBBF2000199, FCBBF2000214, FCBBF2000232, FCBBF2000259, FCBBF2000276, FCBBF2000291, FCBBF2000362, FCBBF2000379, FCBBF2000473, FCBBF2000502, FCBBF2000566, FCBBF2000576, FCBBF2000591, FCBBF2000677, FCBBF2000678, FCBBF2000685, FCBBF2000733, FCBBF2000782, FCBBF2000808, FCBBF2000815, FCBBF2000825, FCBBF2000885, FCBBF2000940, FCBBF2000951, FCBBF2001001, FCBBF2001088, FCBBF2001105, FCBBF2001116,

[0866] FCBBF2001183, FCBBF2001188, FCBBF2001211, FCBBF2001238, FCBBF2001243, FCBBF2001299, FCBBF2001309, FCBBF2001400, FCBBF2001427, FCBBF2001480, FCBBF2001529, FCBBF2001594, FCBBF2001672, FCBBF2001675, FCBBF2001718, FCBBF2001720, FCBBF2001817, FCBBF2001868, FCBBF2002044, FCBBF2002111, FCBBF2002281, FCBBF2002349, FCBBF2002370, FCBBF2002541, FCBBF2002626, FCBBF2002801, FCBBF2002897, FCBBF2002898, FCBBF2002904, FCBBF2002928, FCBBF2002953, FCBBF2003083, FCBBF2003102, FCBBF2003269, FCBBF2003293, FCBBF2003297, FCBBF2003395, FCBBF2003528, FCBBF2003543, FCBBF2003549, FCBBF2003567, FCBBF2003636, FCBBF2003823, FCBBF2003895, FCBBF2004066, FCBBF2004090, FCBBF2004138, FCBBF2004217, FCBBF2004256, FCBBF2004373,

[0867] FCBBF2004448, FCBBF2004671, FCBBF2004707, FCBBF2004788, FCBBF2005069, FCBBF2005122, FCBBF2005428, FCBBF2005439, FCBBF2005538, FCBBF2005637, FCBBF2005645, FCBBF2005733, FCBBF2005909, FCBBF2005966, FCBBF2006131, FCBBF2006380, FCBBF2006418, FCBBF2006452, FCBBF2006634, FCBBF2006781, FCBBF2007012, FCBBF2007186, FCBBF2007265, FCBBF2007302, FCBBF2007556, FCBBF2007610, FCBBF2007633, FCBBF2007840, FCBBF3000102, FCBBF3000110, FCBBF3000115, FCBBF3000120, FCBBF3000168, FCBBF3000175, FCBBF3000227, FCBBF3000228, FCBBF3000229, FCBBF3000233, FCBBF3000269, FCBBF3000361, FCBBF3000367, FCBBF3000388, FCBBF3000434, FCBBF3000462, FCBBF3000473, FCBBF3000501, FCBBF3000518, FCBBF3000536, FCBBF3000550, FCBBF3000847,

[0868] FCBBF3001018, FCBBF3001020, FCBBF3001081, FCBBF3001235, FCBBF3001281, FCBBF3001302, FCBBF3001377, FCBBF3001594, FCBBF3001657, FCBBF3001818, FCBBF3001855, FCBBF3001890, FCBBF3001912, FCBBF3001914, FCBBF3001918, FCBBF3001924, FCBBF3001977, FCBBF3002163, FCBBF3002188, FCBBF3002190, FCBBF3002268, FCBBF3002475, FCBBF3002556, FCBBF3002592, FCBBF3002658, FCBBF3002782, FCBBF3002818, FCBBF3002925, FCBBF3003216, FCBBF3003305, FCBBF3003373, FCBBF3003435, FCBBF3003475, FCBBF3003481, FCBBF3003557, FCBBF3003787, FCBBF3003902, FCBBF3004021, FCBBF3004041, FCBBF3004261, FCBBF3004323, FCBBF3004390, FCBBF3004409, FCBBF3004473, FCBBF3004502, FCBBF3004715, FCBBF3004842, FCBBF3004847, FCBBF3004955, FCBBF3005160,

[0869] FCBBF3005218, FCBBF3005444, FCBBF3005497, FCBBF3005698, FCBBF3005729, FCBBF3006171, FCBBF3006249, FCBBF3006288, FCBBF3006399, FCBBF3006628, FCBBF3006821, FCBBF3007077, FCBBF3007150, FCBBF3007152, FCBBF3007242, FCBBF3007248, FCBBF3007453, FCBBF3007462, FCBBF3007540, FCBBF3007597, FCBBF3007604, FCBBF3007631, FCBBF3007829, FCBBF3007855, FCBBF3007859, FCBBF3007860, FCBBF3008073, FCBBF3008100, FCBBF3008153, FCBBF3008159, FCBBF3008251, FCBBF3008311, FCBBF3008362, FCBBF3008382, FCBBF3008475, FCBBF3008556, FCBBF3008644, FCBBF3008689, FCBBF3008748, FCBBF3008870, FCBBF3008938, FCBBF3008944, FCBBF3009069, FCBBF3009101, FCBBF3009152, FCBBF3009256, FCBBF3009317, FCBBF3009428, FCBBF3009464, FCBBF3009479,

[0870] FCBBF3009526, FCBBF3009703, FCBBF3009717, FCBBF3009888, FCBBF3009949, FCBBF3009978, FCBBF3010008, FCBBF3010012, FCBBF3010124, FCBBF3010130, FCBBF3010142, FCBBF3010149, FCBBF3010211, FCBBF3010361, FCBBF3010508, FCBBF3010544, FCBBF3010586, FCBBF3010601, FCBBF3010665, FCBBF3010695, FCBBF3010729, FCBBF3010733, FCBBF3011003, FCBBF3011418, FCBBF3011485, FCBBF3011523, FCBBF3011570, FCBBF3011592, FCBBF3011867, FCBBF3011889, FCBBF3012170, FCBBF3012182, FCBBF3012288, FCBBF3012332, FCBBF3012347, FCBBF3012443, FCBBF3012588, FCBBF3012667, FCBBF3012842, FCBBF3012901, FCBBF3013041, FCBBF3013058, FCBBF3013205, FCBBF3013266, FCBBF3013307, FCBBF3013341, FCBBF3013506, FCBBF3013589, FCBBF3013623, FCBBF3013800,

[0871] FCBBF3013846, FCBBF3014229, FCBBF3014260, FCBBF3014355, FCBBF3014567, FCBBF3014770, FCBBF3015100, FCBBF3015119, FCBBF3015131, FCBBF3015317, FCBBF3015727, FCBBF3015758, FCBBF3015809, FCBBF3015870, FCBBF3016018, FCBBF3016134, FCBBF3016178, FCBBF3016451, FCBBF3016618, FCBBF3016622, FCBBF3016644, FCBBF3016667, FCBBF3016987, FCBBF3017024, FCBBF3017059, FCBBF3017071, FCBBF3017123, FCBBF3017233, FCBBF3017255, FCBBF3017288, FCBBF3017396, FCBBF3017531, FCBBF3017535, FCBBF3017681, FCBBF3017729, FCBBF3017873, FCBBF3017918, FCBBF3017974, FCBBF3018067, FCBBF3018173, FCBBF3018453, FCBBF3018591, FCBBF3018753, FCBBF3018796, FCBBF3018826, FCBBF3018949, FCBBF3019085, FCBBF3019320, FCBBF3019437, FCBBF3019564,

[0872] FCBBF3019569, FCBBF3019570, FCBBF3019663, FCBBF3019716, FCBBF3019784, FCBBF3019839, FCBBF3019867, FCBBF3019961, FCBBF3020030, FCBBF3020138, FCBBF3020140, FCBBF3020163, FCBBF3020232, FCBBF3020599, FCBBF3021026, FCBBF3021191, FCBBF3021221, FCBBF3021501, FCBBF3021506, FCBBF3021524, FCBBF3021807, FCBBF3021940, FCBBF3021985, FCBBF3022005, FCBBF3022291, FCBBF3022311, FCBBF3022504, FCBBF3022566, FCBBF3022593, FCBBF3022765, FCBBF3022767, FCBBF3023061, FCBBF3023372, FCBBF3023443, FCBBF3023599, FCBBF3023704, FCBBF3023887, FCBBF3023895, FCBBF3024002, FCBBF3024096, FCBBF3024225, FCBBF3024266, FCBBF3024364, FCBBF3024623, FCBBF3024793, FCBBF3024911, FCBBF3025098, FCBBF3025252, FCBBF3025280, FCBBF3025285,

[0873] FCBBF3025417, FCBBF3025528, FCBBF3025568, FCBBF3025650, FCBBF3025674, FCBBF3025730, FCBBF3025737, FCBBF3025905, FCBBF3026021, FCBBF3026048, FCBBF3026251, FCBBF3026308, FCBBF3026651, FCBBF3026678, FCBBF3026692, FCBBF3027104, FCBBF3027199, FCBBF3027328, FCBBF3027559, FCBBF3027717, FCBBF3027755, FCBBF3027768, FCBBF3027854, FCBBF3027863, FCBBF3027903, FCBBF3028102, FCBBF3028143, FCBBF3028188, FCBBF3028202, FCBBF3028244, FCBBF3028472, FCBBF3028528, FCBBF3028582, FCBBF3028593, FCBBF3028671, FCBBF3028794, FCBBF4000061, FCBBF4000076, FCBBF4000142, FCBBF4000173, FCBBF4000192, FCBBF4000193, FCBBF4000268, FCBBF4000282, FCBBF4000399, FCBBF4000415, FCBBF4000500, FCBBF4000529, FCBBF4000548, FCBBF5000041,

[0874] FCBBF5000061, FCBBF5000165, FCBBF5000261, FCBBF5000325, FCBBF5000353, FCBBF5000384, FCBBF5000483, FCBBF5000495, FEBRA1000005, FEBRA1000008, FEBRA1000022, FEBRA1000030, FEBRA1000057, FEBRA1000088, FEBRA1000138, FEBRA1000148, FEBRA1000149, FEBRA1000183, FEBRA1000188, FEBRA1000189, FEBRA1000190, FEBRA2000007, FEBRA2000021, FEBRA2000035, FEBRA2000053, FEBRA2000105, FEBRA2000126, FEBRA2000210, FEBRA2000220, FEBRA2000228, FEBRA2000253, FEBRA2000282, FEBRA2000286, FEBRA2000297, FEBRA2000311, FEBRA2000321, FEBRA2000333, FEBRA2000377, FEBRA2000378, FEBRA2000391, FEBRA2000394, FEBRA2000397, FEBRA2000399, FEBRA2000402, FEBRA2000404, FEBRA2000409, FEBRA2000415, FEBRA2000436, FEBRA2000438, FEBRA2000452,

[0875] FEBRA2000454, FEBRA2000462, FEBRA2000468, FEBRA2000491, FEBRA2000504, FEBRA2000510, FEBRA2000532, FEBRA2000536, FEBRA2000538, FEBRA2000575, FEBRA2000581, FEBRA2000656, FEBRA2000659, FEBRA2000680, FEBRA2000690, FEBRA2000727, FEBRA2000734, FEBRA2000757, FEBRA2000762, FEBRA2000771, FEBRA2000772, FEBRA2000782, FEBRA2000790, FEBRA2000793, FEBRA2000803, FEBRA2000805, FEBRA2000809, FEBRA2000815, FEBRA2000856, FEBRA2000862, FEBRA2000877, FEBRA2000880, FEBRA2000881, FEBRA2000901, FEBRA2000909, FEBRA2000917, FEBRA2000928, FEBRA2000936, FEBRA2000937, FEBRA2000959, FEBRA2000972, FEBRA2001004, FEBRA2001012, FEBRA2001020, FEBRA2001093, FEBRA2001124, FEBRA2001133, FEBRA2001146, FEBRA2001161, FEBRA2001175,

[0876] FEBRA2001197, FEBRA2001217, FEBRA2001227, FEBRA2001245, FEBRA2001267, FEBRA2001334, FEBRA2001351, FEBRA2001383, FEBRA2001438, FEBRA2001440, FEBRA2001487, FEBRA2001492, FEBRA2001523, FEBRA2001561, FEBRA2001571, FEBRA2001581, FEBRA2001584, FEBRA2001590, FEBRA2001591, FEBRA2001610, FEBRA2001620, FEBRA2001659, FEBRA2001669, FEBRA2001698, FEBRA2001705, FEBRA2001706, FEBRA2001715, FEBRA2001745, FEBRA2001752, FEBRA2001772, FEBRA2001790, FEBRA2001814, FEBRA2001828, FEBRA2001867, FEBRA2001914, FEBRA2001974, FEBRA2001989, FEBRA2001990, FEBRA2002009, FEBRA2002027, FEBRA2002086, FEBRA2002109, FEBRA2002191, FEBRA2002260, FEBRA2002352, FEBRA2002399, FEBRA2002410, FEBRA2002429, FEBRA2002442, FEBRA2002508,

[0877] FEBRA2002525, FEBRA2002527, FEBRA2002552, FEBRA2002574, FEBRA2002601, FEBRA2002611, FEBRA2002628, FEBRA2002662, FEBRA2002682, FEBRA2002707, FEBRA2002727, FEBRA2002781, FEBRA2002783, FEBRA2002792, FEBRA2002818, FEBRA2002858, FEBRA2002882, FEBRA2002897, FEBRA2002908, FEBRA2002931, FEBRA2002962, FEBRA2002986, FEBRA2003054, FEBRA2003100, FEBRA2003115, FEBRA2003128, FEBRA2003155, FEBRA2003163, FEBRA2003181, FEBRA2003198, FEBRA2003253, FEBRA2003258, FEBRA2003275, FEBRA2003308, FEBRA2003327, FEBRA2003429, FEBRA2003436, FEBRA2003454, FEBRA2003468, FEBRA2003470, FEBRA2003520, FEBRA2003524, FEBRA2003541, FEBRA2003675, FEBRA2003707, FEBRA2003711, FEBRA2003726, FEBRA2003750, FEBRA2003822, FEBRA2003833,

[0878] FEBRA2003897, FEBRA2003907, FEBRA2003930, FEBRA2004023, FEBRA2004026, FEBRA2004029, FEBRA2004042, FEBRA2004053, FEBRA2004056, FEBRA2004091, FEBRA2004110, FEBRA2004191, FEBRA2004202, FEBRA2004219, FEBRA2004237, FEBRA2004268, FEBRA2004293, FEBRA2004325, FEBRA2004329, FEBRA2004331, FEBRA2004412, FEBRA2004443, FEBRA2004485, FEBRA2004490, FEBRA2004538, FEBRA2004592, FEBRA2004620, FEBRA2004628, FEBRA2004651, FEBRA2004767, FEBRA2004813, FEBRA2004818, FEBRA2004840, FEBRA2004852, FEBRA2004867, FEBRA2004914, FEBRA2004933, FEBRA2004987, FEBRA2005014, FEBRA2005036, FEBRA2005079, FEBRA2005114, FEBRA2005216, FEBRA2005291, FEBRA2005361, FEBRA2005377, FEBRA2005380, FEBRA2005416, FEBRA2005427, FEBRA2005458,

[0879] FEBRA2005476, FEBRA2005701, FEBRA2005726, FEBRA2005752, FEBRA2005778, FEBRA2005787, FEBRA2005788, FEBRA2005824, FEBRA2005995, FEBRA2005998, FEBRA2006055, FEBRA2006061, FEBRA2006092, FEBRA2006112, FEBRA2006150, FEBRA2006165, FEBRA2006255, FEBRA2006270, FEBRA2006315, FEBRA2006346, FEBRA2006354, FEBRA2006357, FEBRA2006368, FEBRA2006370, FEBRA2006372, FEBRA2006379, FEBRA2006396, FEBRA2006401, FEBRA2006409, FEBRA2006418, FEBRA2006427, FEBRA2006476, FEBRA2006485, FEBRA2006491, FEBRA2006519, FEBRA2006521, FEBRA2006553, FEBRA2006627, FEBRA2006664, FEBRA2006667, FEBRA2006726, FEBRA2006736, FEBRA2006793, FEBRA2006808, FEBRA2006817, FEBRA2006873, FEBRA2006890, FEBRA2006942, FEBRA2006977, FEBRA2007017,

[0880] FEBRA2007176, FEBRA2007200, FEBRA2007212, FEBRA2007247, FEBRA2007280, FEBRA2007414, FEBRA2007436, FEBRA2007449, FEBRA2007458, FEBRA2007534, FEBRA2007544, FEBRA2007551, FEBRA2007566, FEBRA2007589, FEBRA2007613, FEBRA2007620, FEBRA2007708, FEBRA2007714, FEBRA2007793, FEBRA2007801, FEBRA2007818, FEBRA2007823, FEBRA2007900, FEBRA2007901, FEBRA2007931, FEBRA2007957, FEBRA2008009, FEBRA2008036, FEBRA2008081, FEBRA2008086, FEBRA2008134, FEBRA2008135, FEBRA2008159, FEBRA2008165, FEBRA2008172, FEBRA2008201, FEBRA2008210, FEBRA2008255, FEBRA2008265, FEBRA2008266, FEBRA2008282, FEBRA2008302, FEBRA2008311, FEBRA2008341, FEBRA2008360, FEBRA2008459, FEBRA2008468, FEBRA2008475, FEBRA2008481, FEBRA2008542,

[0881] FEBRA2008660, FEBRA2008662, FEBRA2008681, FEBRA2008692, FEBRA2008741, FEBRA2008836, FEBRA2008859, FEBRA2008861, FEBRA2008866, FEBRA2008881, FEBRA2008928, FEBRA2008983, FEBRA2009016, FEBRA2009022, FEBRA2009029, FEBRA2009074, FEBRA2009117, FEBRA2009120, FEBRA2009162, FEBRA2009185, FEBRA2009240, FEBRA2009265, FEBRA2009276, FEBRA2009289, FEBRA2009327, FEBRA2009328, FEBRA2009352, FEBRA2009362, FEBRA2009385, FEBRA2009416, FEBRA2009437, FEBRA2009478, FEBRA2009507, FEBRA2009514, FEBRA2009541, FEBRA2009567, FEBRA2009588, FEBRA2009731, FEBRA2009754, FEBRA2009780, FEBRA2009846, FEBRA2009986, FEBRA2010141, FEBRA2010299, FEBRA2010484, FEBRA2010719, FEBRA2010746, FEBRA2010768, FEBRA2010802, FEBRA2011063,

[0882] FEBRA2011090, FEBRA2011356, FEBRA2011392, FEBRA2011414, FEBRA2011593, FEBRA2011665, FEBRA2012090, FEBRA2012120, FEBRA2012181, FEBRA2012195, FEBRA2012397, FEBRA2012418, FEBRA2012507, FEBRA2012625, FEBRA2013019, FEBRA2013069, FEBRA2013274, FEBRA2013465, FEBRA2013570, FEBRA2013699, FEBRA2013905, FEBRA2013951, FEBRA2014010, FEBRA2014122, FEBRA2014198, FEBRA2014213, FEBRA2014297, FEBRA2014443, FEBRA2014578, FEBRA2014939, FEBRA2015076, FEBRA2015085, FEBRA2015175, FEBRA2015292, FEBRA2015588, FEBRA2016112, FEBRA2016398, FEBRA2016572, FEBRA2016583, FEBRA2016621, FEBRA2016654, FEBRA2016739, FEBRA2017024, FEBRA2017098, FEBRA2017138, FEBRA2017154, FEBRA2017200, FEBRA2017223, FEBRA2017333, FEBRA2017502,

[0883] FEBRA2017533, FEBRA2017680, FEBRA2017736, FEBRA2017780, FEBRA2017811, FEBRA2017850, FEBRA2018051, FEBRA2018203, FEBRA2018407, FEBRA2018433, FEBRA2018476, FEBRA2018746, FEBRA2019172, FEBRA2019242, FEBRA2019298, FEBRA2019389, FEBRA2019457, FEBRA2019519, FEBRA2019582, FEBRA2019637, FEBRA2019663, FEBRA2019690, FEBRA2019711, FEBRA2019867, FEBRA2020406, FEBRA2020582, FEBRA2020668, FEBRA2020801, FEBRA2020845, FEBRA2020886, FEBRA2020977, FEBRA2021032, FEBRA2021134, FEBRA2021171, FEBRA2021339, FEBRA2021431, FEBRA2021497, FEBRA2021550, FEBRA2021571, FEBRA2021636, FEBRA2021864, FEBRA2021892, FEBRA2021908, FEBRA2021966, FEBRA2022013, FEBRA2022148, FEBRA2022204, FEBRA2022255, FEBRA2022322, FEBRA2022601,

[0884] FEBRA2022696, FEBRA2022729, FEBRA2022787, FEBRA2022911, FEBRA2022956, FEBRA2022963, FEBRA2022972, FEBRA2023227, FEBRA2023285, FEBRA2023351, FEBRA2023377, FEBRA2023498, FEBRA2023550, FEBRA2023721, FEBRA2023989, FEBRA2023990, FEBRA2024019, FEBRA2024136, FEBRA2024150, FEBRA2024343, FEBRA2024570, FEBRA2024693, FEBRA2024727, FEBRA2024744, FEBRA2024797, FEBRA2024987, FEBRA2025249, FEBRA2025463, FEBRA2025477, FEBRA2026474, FEBRA2026582, FEBRA2026629, FEBRA2026769, FEBRA2026879, FEBRA2026890, FEBRA2026977, FEBRA2026984, FEBRA2027082, FEBRA2027297, FEBRA2027352, FEBRA2027364, FEBRA2027609, FEBRA2028158, FEBRA2028222, FEBRA2028366, FEBRA2028457, FEBRA2028477, FEBRA2028503, FEBRA2028516, HELAC2000158,

[0885] HELAC2000301, HHDPC1000001, HHDPC1000065, HHDPC1000118, HHDPC2000055, HHDPC2000070, HHDPC2000102, HHDPC2000104, HHDPC2000149, HHDPC2000258, HHDPC2000315, HHDPC2000455, HHDPC2000456, HHDPC2000462, HHDPC2000572, HHDPC2000656, HHDPC2000692, HHDPC2001337, HHDPC2001432, HHDPC2001896, HHDPC2002963, HHDPC2003049, HHDPC2003113, HHDPC2003472, HHDPC2004757, HHDPC2005185, HHDPC2005513, HHDPC2005742, HHDPC2005794, HHDPC2006460, HHDPC2006862, HHDPC2006927, HHDPC2007267, HHDPC2007302, HHDPC2007775, HHDPC2008123, HHDPC2008185, HHDPC2008279, HHDPC2008414, HHDPC2008474, HHDPC2008816, HHDPC2008843, HHDPC2009114, HHDPC2009178, HHDPC2009208, HHDPC2009272, HHDPC2009528, HLUNG1000017, HLUNG1000024, HLUNG1000030,

[0886] HLUNG1000034, HLUNG1000037, HLUNG1000053, HLUNG1000064, HLUNG1000076, HLUNG1000084, HLUNG1000091, HLUNG1000099, HLUNG1000104, HLUNG1000105, HLUNG1000110, HLUNG1000151, HLUNG1000169, HLUNG2000004, HLUNG2000014, HLUNG2000027, HLUNG2000068, HLUNG2000116, HLUNG2000125, HLUNG2000130, HLUNG2000142, HLUNG2000174, HLUNG2000176, HLUNG2000217, HLUNG2000232, HLUNG2000255, HLUNG2000281, HLUNG2000314, HLUNG2000315, HLUNG2000340, HLUNG2000362, HLUNG2000363, HLUNG2000412, HLUNG2000431, HLUNG2000480, HLUNG2000489, HLUNG2000549, HLUNG2000557, HLUNG2000570, HLUNG2000751, HLUNG2000761, HLUNG2000777, HLUNG2000846, HLUNG2000870, HLUNG2000884, HLUNG2000926, HLUNG2000950, HLUNG2000955, HLUNG2000970, HLUNG2001013,

[0887] HLUNG2001126, HLUNG2001144, HLUNG2001146, HLUNG2001214, HLUNG2001439, HLUNG2001459, HLUNG2001507, HLUNG2001518, HLUNG2001633, HLUNG2001677, HLUNG2001814, HLUNG2001996, HLUNG2002006, HLUNG2002050, HLUNG2002059, HLUNG2002085, HLUNG2002145, HLUNG2002295, HLUNG2002303, HLUNG2002334, HLUNG2002405, HLUNG2002429, HLUNG2002562, HLUNG2002648, HLUNG2002659, HLUNG2002707, HLUNG2002811, HLUNG2002916, HLUNG2002942, HLUNG2002949, HLUNG2002958, HLUNG2002982, HLUNG2003003, HLUNG2003042, HLUNG2003049, HLUNG2003061, HLUNG2003162, HLUNG2003246, HLUNG2003306, HLUNG2003335, HLUNG2003378, HLUNG2003497, HLUNG2003691, HLUNG2003710, HLUNG2003714, HLUNG2003716, HLUNG2003778, HLUNG2003833, HLUNG2003872, HLUNG2003918,

[0888] HLUNG2003991, HLUNG2004014, HLUNG2004037, HLUNG2004067, HLUNG2004154, HLUNG2004159, HLUNG2004170, HLUNG2004217, HLUNG2004273, HLUNG2004388, HLUNG2004416, HLUNG2004521, HLUNG2004684, HLUNG2004707, HLUNG2004774, HLUNG2004775, HLUNG2005012, HLUNG2005030, HLUNG2005045, HLUNG2005076, HLUNG2005133, HLUNG2005203, HLUNG2005230, HLUNG2005479, HLUNG2005524, HLUNG2005656, HLUNG2005738, HLUNG2005774, HLUNG2005813, HLUNG2005924, HLUNG2006026, HLUNG2006067, HLUNG2006094, HLUNG2006370, HLUNG2006397, HLUNG2006570, HLUNG2006599, HLUNG2006614, HLUNG2006671, HLUNG2006781, HLUNG2006812, HLUNG2006843, HLUNG2006852, HLUNG2006935, HLUNG2007041, HLUNG2007163, HLUNG2007219, HLUNG2007433, HLUNG2007931, HLUNG2008066,

[0889] HLUNG2008139, HLUNG2008153, HLUNG2008225, HLUNG2008235, HLUNG2008247, HLUNG2008333, HLUNG2008348, HLUNG2008384, HLUNG2008396, HLUNG2008439, HLUNG2008479, HLUNG2008480, HLUNG2008521, HLUNG2008637, HLUNG2008833, HLUNG2008875, HLUNG2008885, HLUNG2008958, HLUNG2008959, HLUNG2009067, HLUNG2009215, HLUNG2009225, HLUNG2009253, HLUNG2009303, HLUNG2009413, HLUNG2009729, HLUNG2010181, HLUNG2010464, HLUNG2010562, HLUNG2010845, HLUNG2011041, HLUNG2011298, HLUNG2011461, HLUNG2011833, HLUNG2012049, HLUNG2012287, HLUNG2012315, HLUNG2012546, HLUNG2012600, HLUNG2012727, HLUNG2013097, HLUNG2013204, HLUNG2013304, HLUNG2013350, HLUNG2013622, HLUNG2013643, HLUNG2013784, HLUNG2013851, HLUNG2014262, HLUNG2014288,

[0890] HLUNG2014449, HLUNG2014821, HLUNG2015184, HLUNG2015418, HLUNG2015548, HLUNG2015578, HLUNG2015617, HLUNG2016022, HLUNG2016862, HLUNG2017262, HLUNG2017286, HLUNG2017307, HLUNG2017350, HLUNG2017546, HLUNG2017806, HLUNG2018029, HLUNG2018282, HLUNG2018626, HLUNG2019058, HSYRA1000131, HSYRA1000137, HSYRA1000148, HSYRA1000152, HSYRA1000178, HSYRA2000044, HSYRA2000135, HSYRA2000190, HSYRA2000221, HSYRA2000237, HSYRA2000253, HSYRA2000371, HSYRA2000424, HSYRA2000507, HSYRA2000510, HSYRA2000605, HSYRA2000629, HSYRA2000640, HSYRA2000706, HSYRA2000760, HSYRA2000787, HSYRA2000828, HSYRA2000832, HSYRA2000925, HSYRA2000927, HSYRA2001003, HSYRA2001105, HSYRA2001142, HSYRA2001153, HSYRA2001225, HSYRA2001255,

[0891] HSYRA2001332, HSYRA2001353, HSYRA2001396, HSYRA2001420, HSYRA2001484, HSYRA2001552, HSYRA2001580, HSYRA2001595, HSYRA2001631, HSYRA2001638, HSYRA2001983, HSYRA2002103, HSYRA2002590, HSYRA2002741, HSYRA2003168, HSYRA2004550, HSYRA2004858, HSYRA2005456, HSYRA2005496, HSYRA2005970, HSYRA2006049, HSYRA2006873, HSYRA2007241, HSYRA2007338, HSYRA2007650, HSYRA2007667, HSYRA2008154, HSYRA2008714, HSYRA2009102, IMR321000155, IMR321000161, IMR321000165, IMR321000193, IMR321000207, IMR321000210, IMR321000219, IMR321000230, IMR321000242, IMR321000253, IMR321000266, IMR322000010, IMR322000107, IMR322000121, IMR322000127, IMR322000144, IMR322000152, IMR322000164, IMR322000243, IMR322000302, IMR322000316,

[0892] IMR322000379, IMR322000383, IMR322000418, IMR322000518, IMR322000604, IMR322000609, IMR322000656, IMR322000672, IMR322000775, IMR322000811, IMR322000819, IMR322000838, IMR322000859, IMR322000863, IMR322000917, IMR322000918, IMR322000919, IMR322000935, IMR322000953, IMR322000973, IMR322000984, IMR322001018, IMR322001049, IMR322001167, IMR322001185, IMR322001218, IMR322001245, IMR322001318, IMR322001322, IMR322001332, IMR322001380, IMR322001438, IMR322001452, IMR322001491, IMR322001541, IMR322001584, IMR322001665, IMR322001670, IMR322001724, IMR322001879, IMR322002035, IMR322002110, IMR322002470, IMR322002993, IMR322003675, IMR322004768, IMR322005293, IMR322005833, IMR322006012, IMR322006222,

[0893] IMR322006495, IMR322006520, IMR322006886, IMR322006947, IMR322007078, IMR322007225, IMR322007704, IMR322008651, IMR322009710, IMR322009807, IMR322010295, IMR322010953, IMR322011689, IMR322012314, IMR322012529, IMR322013053, IMR322013396, IMR322013731, IMR322013805, IMR322015523, IMR322016146, IMR322017049, IMR322018117, IMR322018192, IMR322019070, JCMLC2000273, KIDNE1000012, KIDNE1000015, KIDNE1000028, KIDNE1000036, KIDNE1000064, KIDNE1000104, KIDNE1000121, KIDNE1000145, KIDNE1000152, KIDNE2000026, KIDNE2000041, KIDNE2000046, KIDNE2000051, KIDNE2000070, KIDNE2000167, KIDNE2000174, KIDNE2000192, KIDNE2000227, KIDNE2000244, KIDNE2000245, KIDNE2000252, KIDNE2000266, KIDNE2000287, KIDNE2000317,

[0894] KIDNE2000328, KIDNE2000330, KIDNE2000335, KIDNE2000349, KIDNE2000375, KIDNE2000383, KIDNE2000394, KIDNE2000422, KIDNE2000493, KIDNE2000510, KIDNE2000513, KIDNE2000517, KIDNE2000519, KIDNE2000555, KIDNE2000574, KIDNE2000624, KIDNE2000678, KIDNE2000717, KIDNE2000721, KIDNE2000722, KIDNE2000777, KIDNE2000801, KIDNE2000833, KIDNE2000846, KIDNE2000867, KIDNE2000947, KIDNE2001117, KIDNE2001140, KIDNE2001162, KIDNE2001269, KIDNE2001361, KIDNE2001373, KIDNE2001636, KIDNE2001713, KIDNE2001802, KIDNE2001840, KIDNE2001847, KIDNE2001857, KIDNE2001873, KIDNE2001897, KIDNE2001931, KIDNE2001979, KIDNE2002015, KIDNE2002162, KIDNE2002168, KIDNE2002191, KIDNE2002198, KIDNE2002252, KIDNE2002262, KIDNE2002265,

[0895] KIDNE2002438, KIDNE2002483, KIDNE2002725, KIDNE2002768, KIDNE2002795, KIDNE2002798, KIDNE2002845, KIDNE2002882, KIDNE2002991, KIDNE2003185, KIDNE2003188, KIDNE2003233, KIDNE2003305, KIDNE2003316, KIDNE2003335, KIDNE2003357, KIDNE2003373, KIDNE2003377, KIDNE2003752, KIDNE2003764, KIDNE2003837, KIDNE2003941, KIDNE2003994, KIDNE2004034, KIDNE2004054, KIDNE2004084, KIDNE2004095, KIDNE2004115, KIDNE2004233, KIDNE2004262, KIDNE2004279, KIDNE2004294, KIDNE2004295, KIDNE2004305, KIDNE2004344, KIDNE2004394, KIDNE2004411, KIDNE2004475, KIDNE2004519, KIDNE2004520, KIDNE2004531, KIDNE2004534, KIDNE2004562, KIDNE2004579, KIDNE2004626, KIDNE2004681, KIDNE2004828, KIDNE2004846, KIDNE2004864, KIDNE2004879,

[0896] KIDNE2004981, KIDNE2004985, KIDNE2004999, KIDNE2005038, KIDNE2005042, KIDNE2005062, KIDNE2005266, KIDNE2005296, KIDNE2005321, KIDNE2005327, KIDNE2005336, KIDNE2005400, KIDNE2005424, KIDNE2005477, KIDNE2005526, KIDNE2005543, KIDNE2005603, KIDNE2005629, KIDNE2005781, KIDNE2005798, KIDNE2005854, KIDNE2005908, KIDNE2005937, KIDNE2006009, KIDNE2006014, KIDNE2006030, KIDNE2006039, KIDNE2006053, KIDNE2006092, KIDNE2006145, KIDNE2006149, KIDNE2006210, KIDNE2006299, KIDNE2006334, KIDNE2006353, KIDNE2006376, KIDNE2006378, KIDNE2006465, KIDNE2006580, KIDNE2006652, KIDNE2006687, KIDNE2006733, KIDNE2006760, KIDNE2006775, KIDNE2006811, KIDNE2006820, KIDNE2006880, KIDNE2007005, KIDNE2007040, KIDNE2007077,

[0897] KIDNE2007186, KIDNE2007222, KIDNE2007328, KIDNE2007352, KIDNE2007356, KIDNE2007422, KIDNE2007569, KIDNE2007810, KIDNE2007811, KIDNE2007910, KIDNE2007944, KIDNE2007954, KIDNE2008022, KIDNE2008069, KIDNE2008072, KIDNE2008116, KIDNE2008117, KIDNE2008218, KIDNE2008315, KIDNE2008362, KIDNE2008378, KIDNE2008403, KIDNE2008404, KIDNE2008446, KIDNE2008473, KIDNE2008480, KIDNE2008649, KIDNE2008666, KIDNE2008697, KIDNE2008758, KIDNE2008788, KIDNE2008795, KIDNE2008824, KIDNE2008832, KIDNE2008869, KIDNE2008914, KIDNE2008975, KIDNE2008987, KIDNE2009019, KIDNE2009109, KIDNE2009180, KIDNE2009191, KIDNE2009332, KIDNE2009367, KIDNE2009426, KIDNE2009467, KIDNE2009490, KIDNE2009553, KIDNE2009605, KIDNE2009628,

[0898] KIDNE2009647, KIDNE2009676, KIDNE2009723, KIDNE2010007, KIDNE2010049, KIDNE2010052, KIDNE2010084, KIDNE2010137, KIDNE2010151, KIDNE2010264, KIDNE2010271, KIDNE2010419, KIDNE2010430, KIDNE2010574, KIDNE2010674, KIDNE2010739, KIDNE2010750, KIDNE2010762, KIDNE2010863, KIDNE2010973, KIDNE2010989, KIDNE2011200, KIDNE2011314, KIDNE2011508, KIDNE2011532, KIDNE2011635, KIDNE2011752, KIDNE2011782, KIDNE2011858, KIDNE2012009, KIDNE2012025, KIDNE2012188, KIDNE2012291, KIDNE2012316, KIDNE2012361, KIDNE2012440, KIDNE2012453, KIDNE2012563, KIDNE2012601, KIDNE2012613, KIDNE2012710, KIDNE2012745, KIDNE2012775, KIDNE2012784, KIDNE2012945, KIDNE2013045, KIDNE2013095, KIDNE2013158, KIDNE2013218, KIDNE2013263,

[0899] KIDNE2013346, KIDNE2013388, KIDNE2013413, KIDNE2013489, KIDNE2013639, KIDNE2013731, KIDNE2013734, KIDNE2013775, KIDNE2013801, KIDNE2013845, KIDNE2013866, KIDNE2014087, KIDNE2014112, KIDNE2014119, KIDNE2014170, KIDNE2014184, KIDNE2014268, KIDNE2014298, KIDNE2014320, KIDNE2014325, KIDNE2014415, KIDNE2014489, KIDNE2014496, KIDNE2014661, KIDNE2014717, KIDNE2014789, KIDNE2014808, KIDNE2014890, KIDNE2014978, KIDNE2015073, KIDNE2015221, KIDNE2015244, KIDNE2015313, KIDNE2015433, KIDNE2015445, KIDNE2015483, KIDNE2015515, KIDNE2015546, KIDNE2015556, KIDNE2015598, KIDNE2015660, KIDNE2015710, KIDNE2015987, KIDNE2016000, KIDNE2016036, KIDNE2016096, KIDNE2016101, KIDNE2016142, KIDNE2016188, KIDNE2016327,

[0900] KIDNE2016371, KIDNE2016388, KIDNE2016464, KIDNE2016539, KIDNE2016570, KIDNE2016918, KIDNE2017007, KIDNE2017052, KIDNE2017151, KIDNE2017153, KIDNE2017315, KIDNE2017332, KIDNE2017343, KIDNE2017454, KIDNE2017603, KIDNE2017956, KIDNE2018071, KIDNE2018166, KIDNE2018167, KIDNE2018217, KIDNE2018254, KIDNE2018268, KIDNE2018269, KIDNE2018287, KIDNE2018294, KIDNE2018352, KIDNE2018462, KIDNE2018493, KIDNE2018617, KIDNE2018678, KIDNE2018727, KIDNE2018863, KIDNE2018891, KIDNE2018989, KIDNE2018996, KIDNE2019074, KIDNE2019187, LIVER1000017, LIVER1000050, LIVER1000055, LIVER1000058, LIVER1000063, LIVER1000067, LIVER1000073, LIVER1000079, LIVER1000082, LIVER1000099, LIVER1000104, LIVER1000111, LIVER1000126,

[0901] LIVER1000132, LIVER1000139, LIVER1000155, LIVER1000165, LIVER1000175, LIVER1000224, LIVER1000230, LIVER1000278, LIVER1000303, LIVER1000397, LIVER1000421, LIVER1000433, LIVER1000479, LIVER1000482, LIVER1000542, LIVER2000003, LIVER2000033, LIVER2000037, LIVER2000158, LIVER2000216, LIVER2000237, LIVER2000247, LIVER2000360, LIVER2000416, LIVER2000446, LIVER2000515, LIVER2000592, LIVER2000626, LIVER2000682, LIVER2000769, LIVER2000775, LIVER2001051, LIVER2001076, LIVER2001099, LIVER2001113, LIVER2001164, LIVER2001191, LIVER2001265, LIVER2001329, LIVER2001389, LIVER2001461, LIVER2001539, LIVER2001608, LIVER2001835, LIVER2002638, LIVER2002644, LIVER2002660, LIVER2002702, LIVER2002842, LIVER2003008,

[0902] LIVER2003065, LIVER2003234, LIVER2003511, LIVER2003524, LIVER2003568, LIVER2003581, LIVER2003800, LIVER2003854, LIVER2004074, LIVER2004392, LIVER2004514, LIVER2004565, LIVER2005028, LIVER2005198, LIVER2005376, LIVER2005385, LIVER2005512, LIVER2005520, LIVER2005527, LIVER2005544, LIVER2005625, LIVER2005728, LIVER2005789, LIVER2005973, LIVER2005981, LIVER2006006, LIVER2006251, LIVER2006410, LIVER2006469, LIVER2006644, LIVER2006764, LIVER2007415, LIVER2007548, LIVER2007568, LIVER2007721, LIVER2008053, LIVER2008465, LIVER2008473, LIVER2008580, LIVER2008706, LIVER2008751, LIVER2008945, LIVER2008998, LIVER2009110, LIVER2009118, LIVER2009554, LYMPB1000141, LYMPB1000158, LYMPB2000083, MAMGL1000017,

[0903] MAMGL1000083, MAMGL1000096, MAMGL1000100, MAMGL1000132, MAMGL1000151, MAMGL1000178, MAMGL1000182, MAMGL1000184, MESAN1000032, MESAN1000035, MESAN1000050, MESAN1000079, MESAN1000101, MESAN1000121, MESAN1000147, MESAN1000180, MESAN2000023, MESAN2000026, MESAN2000067, MESAN2000092, MESAN2000149, MESAN2000167, MESAN2000264, MESAN2000291, MESAN2000337, MESAN2000434, MESAN2000457, MESAN2000462, MESAN2000501, MESAN2000620, MESAN2000711, MESAN2000815, MESAN2000894, MESAN2001154, MESAN2001450, MESAN2001627, MESAN2001770, MESAN2001979, MESAN2001980, MESAN2002113, MESAN2002122, MESAN2002147, MESAN2002186, MESAN2002424, MESAN2002519, MESAN2002687, MESAN2002709, MESAN2002724, MESAN2002844, MESAN2002940,

[0904] MESAN2002978, MESAN2003035, MESAN2003037, MESAN2003039, MESAN2003058, MESAN2003101, MESAN2003190, MESAN2003322, MESAN2003444, MESAN2003490, MESAN2003529, MESAN2003646, MESAN2003662, MESAN2003709, MESAN2003851, MESAN2004138, MESAN2004288, MESAN2004575, MESAN2005284, MESAN2005303, MESAN2005371, MESAN2005633, MESAN2005689, MESAN2005724, MESAN2005808, MESAN2005811, MESAN2005957, MESAN2006022, MESAN2006043, MESAN2006328, MESAN2006401, MESAN2006563, MESAN2006580, MESAN2006599, MESAN2006743, MESAN2006953, MESAN2006971, MESAN2007032, MESAN2007440, MESAN2007597, MESAN2007755, MESAN2008222, MESAN2008334, MESAN2008415, MESAN2008460, MESAN2008536, MESAN2008679, MESAN2008729, MESAN2008821, MESAN2008926,

[0905] MESAN2008936, MESAN2009019, MESAN2009081, MESAN2009105, MESAN2009311, MESAN2009418, MESAN2009503, MESAN2009522, MESAN2010031, MESAN2010114, MESAN2010312, MESAN2010321, MESAN2010664, MESAN2010681, MESAN2011545, MESAN2011597, MESAN2011627, MESAN2011632, MESAN2011977, MESAN2011984, MESAN2012054, MESAN2012113, MESAN2012586, MESAN2012708, MESAN2013019, MESAN2013022, MESAN2013183, MESAN2013211, MESAN2013283, MESAN2013284, MESAN2013611, MESAN2013674, MESAN2013845, MESAN2013936, MESAN2014192, MESAN2014295, MESAN2014298, MESAN2014412, MESAN2014624, MESAN2015277, MESAN2015365, MESAN2015391, MESAN2015401, MESAN2015501, MESAN2015515, MESAN2015708, MESAN2016159, MESAN2016304, MESAN2016409, MESAN2016552,

[0906] MESAN2016965, MESAN2017133, MESAN2017152, MESAN2017373, MESAN2017417, MESAN2018209, MESAN2018576, MESAN2018670, MESAN2018699, MESTC1000042, MESTC1000147, MESTC2000150, MESTC2000153, MESTC2000170, N1ESE2000698, NB9N41000011, NB9N41000047, NB9N41000135, NB9N41000142, NB9N41000146, NB9N42000122, NB9N42000196, NB9N42000281, NB9N42000314, NB9N42000430, NB9N42000495, NB9N42001300, NCRRP1000129, NESOP1000010, NESOP1000087, NESOP1000108, NESOP2000231, NESOP2000452, NESOP2000499, NESOP2000504, NESOP2000744, NESOP2001144, NESOP2001433, NESOP2001656, NESOP2001694, NESOP2001752, NESOP2002352, NESOP2002418, NESOP2002487, NESOP2002738, NESOP2002780, NETRP1000034, NETRP1000082, NETRP2000086, NETRP2000182,

[0907] NETRP2000439, NHNPC1000034, NHNPC1000037, NHNPC1000084, NHNPC1000101, NHNPC1000124, NHNPC2000062, NHNPC2000212, NHNPC2000606, NHNPC2000877, NHNPC2001108, NHNPC2001223, NHNPC2001312, NHNPC2001816, NHNPC2002565, NHNPC2002749, NOVAR1000015, NOVAR1000091, NOVAR1000102, NOVAR2000038, NOVAR2000136, NOVAR2000352, NOVAR2000412, NOVAR2000710, NOVAR2000783, NOVAR2000962, NOVAR2001108, NOVAR2001620, NOVAR2001783, NOVAR2001876, NOVAR2002039, NT2NE1000004, NT2NE1000014, NT2NE1000018, NT2NE1000023, NT2NE1000024, NT2NE1000063, NT2NE1000073, NT2NE1000083, NT2NE1000120, NT2NE1000122, NT2NE1000163, NT2NE1000175, NT2NE1000181, NT2NE1000185, NT2NE2000038, NT2NE2000054, NT2NE2000057, NT2NE2000064, NT2NE2000109,

[0908] NT2NE2000137, NT2NE2000156, NT2NE2000195, NT2NE2000222, NT2NE2000259, NT2NE2000284, NT2NE2000299, NT2NE2000327, NT2NE2000353, NT2NE2000356, NT2NE2000369, NT2NE2000374, NT2NE2000384, NT2NE2000386, NT2NE2000390, NT2NE2000392, NT2NE2000455, NT2NE2000470, NT2NE2000488, NT2NE2000517, NT2NE2000536, NT2NE2000546, NT2NE2000548, NT2NE2000550, NT2NE2000586, NT2NE2000612, NT2NE2000658, NT2NE2000706, NT2NE2000763, NT2NE2000802, NT2NE2000808, NT2NE2000809, NT2NE2000864, NT2NE2000909, NT2NE2000913, NT2NE2000950, NT2NE2000951, NT2NE2000980, NT2NE2001005, NT2NE2001021, NT2NE2001040, NT2NE2001048, NT2NE2001049, NT2NE2001142, NT2NE2001156, NT2NE2001176, NT2NE2001180, NT2NE2001181, NT2NE2001188, NT2NE2001191,

[0909] NT2NE2001247, NT2NE2001252′, NT2NE2001324, NT2NE2001326, NT2NE2001337, NT2NE2001364, NT2NE2001372, NT2NE2001397, NT2NE2001403, NT2NE2001428, NT2NE2001432, NT2NE2001435, NT2NE2001442, NT2NE2001524, NT2NE2001530, NT2NE2001545, NT2NE2001598, NT2NE2001617, NT2NE2001623, NT2NE2001626, NT2NE2001634, NT2NE2001648, NT2NE2001660, NT2NE2001666, NT2NE2001677, NT2NE2001697, NT2NE2001698, NT2NE2001723, NT2NE2001725, NT2NE2001793, NT2NE2001874, NT2NE2001889, NT2NE2001923, NT2NE2002100, NT2NE2002162, NT2NE2002186, NT2NE2002285, NT2NE2002311, NT2NE2002651, NT2NE2002732, NT2NE2002768, NT2NE2002791, NT2NE2002856, NT2NE2002870, NT2NE2003150, NT2NE2003185, NT2NE2003252, NT2NE2003280, NT2NE2003308, NT2NE2003309,

[0910] NT2NE2003315, NT2NE2003393, NT2NE2003408, NT2NE2003457, NT2NE2003485, NT2NE2003540, NT2NE2003571, NT2NE2003705, NT2NE2003752, NT2NE2003887, NT2NE2004255, NT2NE2004378, NT2NE2004490, NT2NE2004519, NT2NE2004606, NT2NE2004716, NT2NE2004740, NT2NE2004787, NT2NE2004916, NT2NE2005035, NT2NE2005223, NT2NE2005276, NT2NE2005317, NT2NE2005323, NT2NE2005358, NT2NE2005371, NT2NE2005395, NT2NE2005419, NT2NE2005441, NT2NE2005517, NT2NE2005537, NT2NE2005555, NT2NE2005588, NT2NE2005676, NT2NE2005720, NT2NE2005784, NT2NE2005804, NT2NE2005821, NT2NE2005876, NT2NE2005890, NT2NE2005921, NT2NE2005968, NT2NE2006075, NT2NE2006087, NT2NE2006103, NT2NE2006217, NT2NE2006288, NT2NE2006382, NT2NE2006387, NT2NE2006427,

[0911] NT2NE2006432, NT2NE2006478, NT2NE2006531, NT2NE2006659, NT2NE2006784, NT2NE2006813, NT2NE2006894, NT2NE2006909, NT2NE2006942, NT2NE2006958, NT2NE2007052, NT2NE2007220, NT2NE2007425, NT2NE2007725, NT2NE2007727, NT2NE2007786, NT2NE2007877, NT2NE2007967, NT2NE2008017, NT2NE2008060, NT2NE2008213, NT2NE2008260, NT2NE2008378, NT2NE2008607, NT2NE2008639, NT2NE2008727, NT2NE2008783, NT2NE2008785, NT2NE2008803, NT2NE2008867, NT2NE2008961, NT2NE2008997, NT2NE2009138, NT2NE2009295, NT2NE2009426, NT2NE2009523, NT2NE2009608, NT2NE2009691, NT2NE2010056, NT2NE2010105, NT2NE2010150, NT2NE2010400, NT2NE2010632, NT2NE2010633, NT2NE2010654, NT2NE2010688, NT2NE2010781, NT2NE2010842, NT2NE2010854, NT2NE2011033,

[0912] NT2NE2011036, NT2NE2011107, NT2NE2011119, NT2NE2011154, NT2NE2011221, NT2NE2011411, NT2NE2011485, NT2NE2011650, NT2NE2011684, NT2NE2011687, NT2NE2011691, NT2NE2011758, NT2NE2011823, NT2NE2011896, NT2NE2011998, NT2NE2012113, NT2NE2012199, NT2NE2012243, NT2NE2012361, NT2NE2012448, NT2NE2012457, NT2NE2012493, NT2NE2012505, NT2NE2012533, NT2NE2012603, NT2NE2012747, NT2NE2012790, NT2NE2012847, NT2NE2012928, NT2NE2013019, NT2NE2013081, NT2NE2013189, NT2NE2013217, NT2NE2013547, NT2NE2014013, NT2NE2014028, NT2NE2014104, NT2NE2014113, NT2NE2014176, NT2NE2014221, NT2NE2014525, NT2NE2014650, NT2NE2014651, NT2NE2014681, NT2NE2014758, NT2NE2014869, NT2NE2014950, NT2NE2015061, NT2NE2015262, NT2NE2015275,

[0913] NT2NE2015362, NT2NE2015480, NT2NE2015511, NT2NE2015565, NT2NE2015626, NT2NE2015747, NT2NE2015860, NT2NE2015885, NT2NE2015904, NT2NE2015974, NT2NE2016041, NT2NE2016387, NT2NE2016419, NT2NE2016519, NT2NE2016608, NT2NE2016766, NT2NE2016774, NT2NE2016971, NT2NE2017259, NT2NE2017332, NT2NE2017397, NT2NE2017480, NT2NE2017492, NT2NE2017508, NT2NE2017562, NT2NE2017590, NT2NE2017612, NT2NE2017721, NT2NE2017752, NT2NE2017792, NT2NE2017982, NT2NE2018165, NT2NE2018176, NT2NE2018273, NT2NE2018376, NT2NE2018472, NT2NE2018490, NT2NE2018594, NT2NE2018739, NT2NE2018916, NT2NE2019056, NT2NE2019076, NT2NE2019099, NT2RI1000016, NT2RI1000035, NT2RI1000048, NT2RI1000164, NT2RI1000172, NT2RI2000004, NT2RI2000007,

[0914] NT2RI2000107, NT2RI2000116, NT2RI2000117, NT2RI2000128, NT2RI2000133, NT2RI2000167, NT2RI2000173, NT2RI2000187, NT2RI2000255, NT2RI2000263, NT2RI2000270, NT2RI2000276, NT2RI2000294, NT2RI2000313, NT2RI2000341, NT2RI2000344, NT2RI2000348, NT2RI2000412, NT2RI2000421, NT2RI2000480, NT2RI2000575, NT2RI2000578, NT2RI2000588, NT2RI2000597, NT2RI2000685, NT2RI2000688, NT2RI2000689, NT2RI2000704, NT2RI2000738, NT2RI2000775, NT2RI2000822, NT2RI2000829, NT2RI2000841, NT2RI2000865, NT2RI2000932, NT2RI2000987, NT2RI2001010, NT2RI2001017, NT2RI2001030, NT2RI2001054, NT2RI2001083, NT2RI2001091, NT2RI2001167, NT2RI2001178, NT2RI2001230, NT2RI2001235, NT2RI2001244, NT2RI2001307, NT2RI2001342, NT2RI2001385,

[0915] NT2RI2001409, NT2RI2001410, NT2RI2001422, NT2RI2001425, NT2RI2001449, NT2RI2001450, NT2RI2001474, NT2RI2001519, NT2RI2001595, NT2RI2001621, NT2RI2001624, NT2RI2001726, NT2RI2001769, NT2RI2001782, NT2RI2001836, NT2RI2001846, NT2RI2001866, NT2RI2001910, NT2RI2001952, NT2RI2002022, NT2RI2002041, NT2RI2002117, NT2RI2002120, NT2RI2002152, NT2RI2002153, NT2RI2002179, NT2RI2002243, NT2RI2002252, NT2RI2002260, NT2RI2002266, NT2RI2002270, NT2RI2002316, NT2RI2002334, NT2RI2002359, NT2RI2002447, NT2RI2002481, NT2RI2002507, NT2RI2002517, NT2RI2002530, NT2RI2002540, NT2RI2002549, NT2RI2002554, NT2RI2002564, NT2RI2002585, NT2RI2002592, NT2RI2002602, NT2RI2002699, NT2RI2002729, NT2RI2002802, NT2RI2002819,

[0916] NT2RI2002822, NT2RI2002847, NT2RI2002852, NT2RI2002865, NT2RI2002923, NT2RI2002926, NT2RI2002958, NT2RI2002970, NT2RI2003011, NT2RI2003019, NT2RI2003051, NT2RI2003067, NT2RI2003184, NT2RI2003205, NT2RI2003222, NT2RI2003301, NT2RI2003317, NT2RI2003344, NT2RI2003360, NT2RI2003361, NT2RI2003383, NT2RI2003392, NT2RI2003399, NT2RI2003419, NT2RI2003487, NT2RI2003556, NT2RI2003655, NT2RI2003667, NT2RI2003678, NT2RI2003884, NT2RI2003973, NT2RI2004078, NT2RI2004079, NT2RI2004093, NT2RI2004136, NT2RI2004157, NT2RI2004188, NT2RI2004190, NT2RI2004209, NT2RI2004230, NT2RI2004284, NT2RI2004290, NT2RI2004304, NT2RI2004312, NT2RI2004381, NT2RI2004398, NT2RI2004410, NT2RI2004442, NT2RI2004468, NT2RI2004606,

[0917] NT2RI2004608, NT2RI2004618, NT2RI2004783, NT2RI2004818, NT2RI2004840, NT2RI2004884, NT2RI2004916, NT2RI2004962, NT2RI2004984, NT2RI2004985, NT2RI2005048, NT2RI2005061, NT2RI2005069, NT2RI2005096, NT2RI2005115, NT2RI2005116, NT2RI2005130, NT2RI2005166, NT2RI2005239, NT2RI2005246, NT2RI2005315, NT2RI2005353, NT2RI2005358, NT2RI2005368, NT2RI2005382, NT2RI2005473, NT2RI2005520, NT2RI2005564, NT2RI2005579, NT2RI2005621, NT2RI2005628, NT2RI2005647, NT2RI2005670, NT2RI2005710, NT2RI2005713, NT2RI2005772, NT2RI2005811, NT2RI2005814, NT2RI2005816, NT2RI2005818, NT2RI2005966, NT2RI2006070, NT2RI2006071, NT2RI2006072, NT2RI2006081, NT2RI2006126, NT2RI2006127, NT2RI2006183, NT2RI2006257, NT2RI2006271,

[0918] NT2RI2006294, NT2RI2006345, NT2RI2006403, NT2RI2006445, NT2RI2006487, NT2RI2006506, NT2RI2006553, NT2RI2006565, NT2RI2006640, NT2RI2006647, NT2RI2006659, NT2RI2006662, NT2RI2006667, NT2RI2006679, NT2RI2006682, NT2RI2006686, NT2RI2006703, NT2RI2006716, NT2RI2006735, NT2RI2006762, NT2RI2006788, NT2RI2006838, NT2RI2006853, NT2RI2006855, NT2RI2006943, NT2RI2006973, NT2RI2007046, NT2RI2007048, NT2RI2007084, NT2RI2007096, NT2RI2007116, NT2RI2007214, NT2RI2007277, NT2RI2007303, NT2RI2007334, NT2RI2007377, NT2RI2007386, NT2RI2007406, NT2RI2007439, NT2RI2007445, NT2RI2007468, NT2RI2007469, NT2RI2007498, NT2RI2007507, NT2RI2007572, NT2RI2007589, NT2RI2007593, NT2RI2007629, NT2RI2007723, NT2RI2007729,

[0919] NT2RI2007751, NT2RI2007827, NT2RI2007853, NT2RI2007877, NT2RI2007879, NT2RI2007884, NT2RI2007891, NT2RI2007956, NT2RI2007965, NT2RI2008007, NT2RI2008050, NT2RI2008188, NT2RI2008204, NT2RI2008221, NT2RI2008233, NT2RI2008336, NT2RI2008455, NT2RI2008502, NT2RI2008566, NT2RI2008656, NT2RI2008714, NT2RI2008724, NT2RI2008749, NT2RI2008801, NT2RI2008808, NT2RI2008812, NT2RI2008841, NT2RI2008942, NT2RI2008952, NT2RI2009005, NT2RI2009066, NT2RI2009083, NT2RI2009101, NT2RI2009103, NT2RI2009144, NT2RI2009151, NT2RI2009173, NT2RI2009215, NT2RI2009239, NT2RI2009259, NT2RI2009281, NT2RI2009289, NT2RI2009301, NT2RI2009402, NT2RI2009406, NT2RI2009517, NT2RI2009585, NT2RI2009595, NT2RI2009855, NT2RI2010283,

[0920] NT2RI2010508, NT2RI2010795, NT2RI2011422, NT2RI2011450, NT2RI2011683, NT2RI2011803, NT2RI2012350, NT2RI2012659, NT2RI2012726, NT2RI2012990, NT2RI2013345, NT2RI2013357, NT2RI2013373, NT2RI2014247, NT2RI2014551, NT2RI2014683, NT2RI2014733, NT2RI2015239, NT2RI2015342, NT2RI2015533, NT2RI2016128, NT2RI2016134, NT2RI2017529, NT2RI2018311, NT2RI2018363, NT2RI2018448, NT2RI2018883, NT2RI2018950, NT2RI2019751, NT2RI2019826, NT2RI2020390, NT2RI2020703, NT2RI2021463, NT2RI2021625, NT2RI2022584, NT2RI2023303, NT2RI2023671, NT2RI2024008, NT2RI2024313, NT2RI2024460, NT2RI2024496, NT2RI2024935, NT2RI2025075, NT2RI2025255, NT2RI2025564, NT2RI2025565, NT2RI2025909, NT2RI2025957, NT2RI2025976, NT2RI2026758,

[0921] NT2RI2027081, NT2RI2027157, NT2RI2027224, NT2RI2027323, NT2RI2027396, NT2RI2027484, NT2RI2027975, NT2RI2028213, NT2RI2028222, NT2RI2028537, NT2RI2028642, NT2RI3000174, NT2RI3000213, NT2RI3000423, NT2RI3000622, NT2RI3001132, NT2RI3001263, NT2RI3001279, NT2RI3001348, NT2RI3001445, NT2RI3001458, NT2RI3001515, NT2RI3001573, NT2RI3001967, NT2RI3002303, NT2RI3002557, NT2RI3002842, NT2RI3003027, NT2RI3003031, NT2RI3003095, NT2RI3003104, NT2RI3003162, NT2RI3003362, NT2RI3003382, NT2RI3003409, NT2RI3003738, NT2RI3003925, NT2RI3004133, NT2RI3004381, NT2RI3004510, NT2RI3005202, NT2RI3005403, NT2RI3005416, NT2RI3005724, NT2RI3005861, NT2RI3005923, NT2RI3005928, NT2RI3006132, NT2RI3006171, NT2RI3006284,

[0922] NT2RI3006340, NT2RI3006376, NT2RI3006666, NT2RI3006673, NT2RI3006796, NT2RI3007065, NT2RI3007095, NT2RI3007158, NT2RI3007167, NT2RI3007213, NT2RI3007291, NT2RI3007443, NT2RI3007684, NT2RI3007757, NT2RI3007878, NT2RI3007978, NT2RI3008055, NT2RI3008162, NT2RI3008179, NT2RI3008228, NT2RI3008442, NT2RI3008652, NT2RI3008697, NT2RI3008974, NT2RI3009158, NT2RI3009480, NT2RI3009524, NT2RP6000005, NT2RP6000008, NT2RP6000017, NT2RP6000032, NT2RP6000043, NT2RP6000059, NT2RP6000060, NT2RP6000072, NT2RP6000077, NT2RP6000078, NT2RP6000085, NT2RP6000086, NT2RP6000100, NT2RP6000109, NT2RP6000110, NT2RP6000119, NT2RP6000127, NT2RP6000130, NT2RP6000140, NT2RP6000150, NT2RP7000041, NT2RP7000069, NT2RP7000086,

[0923] NT2RP7000109, NT2RP7000112, NT2RP7000173, NT2RP7000238, NT2RP7000259, NT2RP7000271, NT2RP7000311, NT2RP7000359, NT2RP7000364, NT2RP7000380, NT2RP7000391, NT2RP7000425, NT2RP7000477, NT2RP7000579, NT2RP7000586, NT2RP7000600, NT2RP7000624, NT2RP7000812, NT2RP7000906, NT2RP7000926, NT2RP7001074, NT2RP7001080, NT2RP7001156, NT2RP7001231, NT2RP7001306, NT2RP7001319, NT2RP7001335, NT2RP7001364, NT2RP7001475, NT2RP7001532, NT2RP7001602, NT2RP7001678, NT2RP7001856, NT2RP7002064, NT2RP7002151, NT2RP7002163, NT2RP7002243, NT2RP7002282, NT2RP7002376, NT2RP7002478, NT2RP7002554, NT2RP7002594, NT2RP7002603, NT2RP7002650, NT2RP7002738, NT2RP7002779, NT2RP7002802, NT2RP7002829, NT2RP7002841, NT2RP7002875,

[0924] NT2RP7002906, NT2RP7002978, NT2RP7002982, NT2RP7003025, NT2RP7003050, NT2RP7003055, NT2RP7003084, NT2RP7003091, NT2RP7003107, NT2RP7003134, NT2RP7003148, NT2RP7003203, NT2RP7003261, NT2RP7003319, NT2RP7003439, NT2RP7003511, NT2RP7003629, NT2RP7003632, NT2RP7003647, NT2RP7003680, NT2RP7003688, NT2RP7003724, NT2RP7004027, NT2RP7004080, NT2RP7004114, NT2RP7004123, NT2RP7004173, NT2RP7004196, NT2RP7004204, NT2RP7004233, NT2RP7004260, NT2RP7004352, NT2RP7004358, NT2RP7004373, NT2RP7004396, NT2RP7004428, NT2RP7004481, NT2RP7004541, NT2RP7004559, NT2RP7004641, NT2RP7004656, NT2RP7004687, NT2RP7004722, NT2RP7004728, NT2RP7004766, NT2RP7004790, NT2RP7004884, NT2RP7004911, NT2RP7004915, NT2RP7004946,

[0925] NT2RP7004961, NT2RP7004964, NT2RP7004975, NT2RP7005118, NT2RP7005205, NT2RP7005219, NT2RP7005323, NT2RP7005468, NT2RP7005493, NT2RP7005513, NT2RP7005529, NT2RP7005629, NT2RP7005631, NT2RP7005669, NT2RP7005675, NT2RP7005750, NT2RP7005846, NT2RP7006033, NT2RP7006141, NT2RP7006160, NT2RP7006162, NT2RP7006188, NT2RP7006223, NT2RP7006263, NT2RP7006296, NT2RP7006304, NT2RP7006374, NT2RP7006395, NT2RP7006408, NT2RP7006457, NT2RP7006490, NT2RP7006539, NT2RP7006547, NT2RP7006601, NT2RP7006619, NT2RP7006621, NT2RP7006636, NT2RP7006701, NT2RP7006853, NT2RP7006886, NT2RP7006887, NT2RP7006980, NT2RP7006986, NT2RP7006995, NT2RP7007114, NT2RP7007221, NT2RP7007226, NT2RP7007252, NT2RP7007269, NT2RP7007310,

[0926] NT2RP7007359, NT2RP7007381, NT2RP7007387, NT2RP7007406, NT2RP7007480, NT2RP7007504, NT2RP7007530, NT2RP7007537, NT2RP7007580, NT2RP7007594, NT2RP7007610, NT2RP7007617, NT2RP7007643, NT2RP7007766, NT2RP7007842, NT2RP7007925, NT2RP7007930, NT2RP7007975, NT2RP7008013, NT2RP7008015, NT2RP7008133, NT2RP7008137, NT2RP7008142, NT2RP7008144, NT2RP7008161, NT2RP7008167, NT2RP7008190, NT2RP7008315, NT2RP7008360, NT2RP7008396, NT2RP7008406, NT2RP7008435, NT2RP7008441, NT2RP7008454, NT2RP7008487, NT2RP7008543, NT2RP7008544, NT2RP7008550, NT2RP7008557, NT2RP7008657, NT2RP7008714, NT2RP7008720, NT2RP7008855, NT2RP7008863, NT2RP7009012, NT2RP7009019, NT2RP7009030, NT2RP7009097, NT2RP7009108, NT2RP7009147,

[0927] NT2RP7009168, NT2RP7009215, NT2RP7009225, NT2RP7009236, NT2RP7009253, NT2RP7009259, NT2RP7009267, NT2RP7009322, NT2RP7009363, NT2RP7009370, NT2RP7009373, NT2RP7009394, NT2RP7009397, NT2RP7009429, NT2RP7009439, NT2RP7009466, NT2RP7009481, NT2RP7009482, NT2RP7009498, NT2RP7009502, NT2RP7009507, NT2RP7009577, NT2RP7009743, NT2RP7009867, NT2RP7010109, NT2RP7010128, NT2RP7010235, NT2RP7010275, NT2RP7010521, NT2RP7010599, NT2RP7010612, NT2RP7010817, NT2RP7011086, NT2RP7011132, NT2RP7011268, NT2RP7011318, NT2RP7011452, NT2RP7011570, NT2RP7011721, NT2RP7011909, NT2RP7012291, NT2RP7012516, NT2RP7013002, NT2RP7013374, NT2RP7013499, NT2RP7013573, NT2RP7013729, NT2RP7013764, NT2RP7013795, NT2RP7013999,

[0928] NT2RP7014178, NT2RP7014348, NT2RP7014420, NT2RP7014583, NT2RP7014721, NT2RP7014743, NT2RP7014778, NT2RP7014906, NT2RP7014910, NT2RP7015080, NT2RP7015431, NT2RP7015503, NT2RP7015512, NT2RP7015676, NT2RP7015789, NT2RP7015996, NT2RP7016508, NT2RP7016574, NT2RP7016622, NT2RP7016911, NT2RP7017139, NT2RP7017284, NT2RP7017365, NT2RP7017474, NT2RP7017546, NT2RP7017567, NT2RP7017795, NT2RP7017971, NT2RP7018032, NT2RP7018126, NT2RP7018197, NT2RP7018206, NT2RP7018340, NT2RP7018586, NT2RP7018802, NT2RP7018871, NT2RP7019064, NT2RP7019135, NT2RP7019273, NT2RP7019367, NT2RP7019401, NT2RP7019445, NT2RP7019543, NT2RP7019682, NT2RP7019835, NT2RP7020112, NT2RP7020123, NT2RP7020343, NT2RP7020379, NT2RP8000137,

[0929] NT2RP8000296, NT2RP8000435, NT2RP8000483, NT2RP8000521, NT2RP8000633, NT2RP8001363, NT2RP8001407, NT2RP8001584, NT2RP8001604, NT2RP8001605, NT2RP8003490, NT2RP8003657, NT2RP8003787, NT2RP8004306, NT2RP8005546, NT2RP8006452, NT2RP8006521, NT2RP8007416, NT2RP8007503, NT2RP8007715, NT2RP8008057, NT2RP8009248, NTONG1000006, NTONG1000033, NTONG1000047, NTONG1000052, NTONG1000075, NTONG1000087, NTONG1000098, NTONG1000123, NTONG1000130, NTONG1000161, NTONG1000172, NTONG1000213, NTONG1000214, NTONG1000246, NTONG1000247, NTONG1000264, NTONG2000040, NTONG2000107, NTONG2000231, NTONG2000334, NTONG2000363, NTONG2000413, NTONG2000492, NTONG2000499, NTONG2000531, NTONG2000583, NTONG2000800, NTONG2000858,

[0930] NTONG2000876, NTONG2000966, NTONG2000977, NTONG2000985, NTONG2001014, NTONG2001079, NTONG2001137, NTONG2001157, NTONG2001173, NTONG2001220, NTONG2001222, NTONG2001362, NTONG2001428, NTONG2001532, NTONG2001550, NTONG2001587, NTONG2001612, NTONG2001619, NTONG2001642, NTONG2001657, NTONG2001676, NTONG2002278, NTONG2002582, NTONG2002807, NTONG2002970, NTONG2002985, NTONG2003158, NTONG2003210, NTONG2003316, NTONG2003409, NTONG2003454, NTONG2003515, NTONG2003805, NTONG2003852, NTONG2003897, NTONG2003928, NTONG2004095, NTONG2004308, NTONG2004521, NTONG2004614, NTONG2004690, NTONG2004806, NTONG2004829, NTONG2004844, NTONG2004918, NTONG2004991, NTONG2005062, NTONG2005086, NTONG2005137, NTONG2005153,

[0931] NTONG2005265, NTONG2005277, NTONG2005363, NTONG2005373, NTONG2005391, NTONG2005480, NTONG2005497, NTONG2005520, NTONG2005577, NTONG2005657, NTONG2005801, NTONG2005822, NTONG2005897, NTONG2005969, NTONG2006099, NTONG2006187, NTONG2006301, NTONG2006324, NTONG2006354, NTONG2006440, NTONG2006484, NTONG2006501, NTONG2006646, NTONG2006709, NTONG2006783, NTONG2007020, NTONG2007028, NTONG2007034, NTONG2007249, NTONG2007517, NTONG2007522, NTONG2007693, NTONG2007756, NTONG2008088, NTONG2008093, NTONG2008143, NTONG2008365, NTONG2008522, NTONG2008672, NTONG2008862, NTONG2008939, NTONG2008944, NTONG2009060, NTONG2009068, NTONG2009229, NTONG2009233, NTONG2009468, NTONG2009576, OCBBF1000016, OCBBF1000030,

[0932] OCBBF1000042, OCBBF1000049, OCBBF1000054, OCBBF1000067, OCBBF1000080, OCBBF1000085, OCBBF1000091, OCBBF1000104, OCBBF1000114, OCBBF1000118, OCBBF1000119, OCBBF1000122, OCBBF1000130, OCBBF1000138, OCBBF1000145, OCBBF1000146, OCBBF1000153, OCBBF1000185, OCBBF1000188, OCBBF1000192, OCBBF1000254, OCBBF1000315, OCBBF2000013, OCBBF2000015, OCBBF2000126, OCBBF2000178, OCBBF2000231, OCBBF2000277, OCBBF2000287, OCBBF2000323, OCBBF2000452, OCBBF2000467, OCBBF2000522, OCBBF2000677, OCBBF2000703, OCBBF2000719, OCBBF2000824, OCBBF2000831, OCBBF2000846, OCBBF2000904, OCBBF2000986, OCBBF2000998, OCBBF2001075, OCBBF2001101, OCBBF2001124, OCBBF2001140, OCBBF2001166, OCBBF2001176, OCBBF2001186, OCBBF2001196,

[0933] OCBBF2001210, OCBBF2001252, OCBBF2001307, OCBBF2001323, OCBBF2001389, OCBBF2001402, OCBBF2001408, OCBBF2001416, OCBBF2001473, OCBBF2001494, OCBBF2001527, OCBBF2001528, OCBBF2001586, OCBBF2001639, OCBBF2001681, OCBBF2001687, OCBBF2001706, OCBBF2001749, OCBBF2001794, OCBBF2001910, OCBBF2001931, OCBBF2001961, OCBBF2001983, OCBBF2002015, OCBBF2002083, OCBBF2002086, OCBBF2002124, OCBBF2002161, OCBBF2002290, OCBBF2002357, OCBBF2002376, OCBBF2002615, OCBBF2002656, OCBBF2002663, OCBBF2002805, OCBBF2002865, OCBBF2002920, OCBBF2002980, OCBBF2003028, OCBBF2003052, OCBBF2003091, OCBBF2003246, OCBBF2003327, OCBBF2003518, OCBBF2003543, OCBBF2003593, OCBBF2003744, OCBBF2003819, OCBBF2003925, OCBBF2004038,

[0934] OCBBF2004104, OCBBF2004147, OCBBF2004168, OCBBF2004235, OCBBF2004259, OCBBF2004385, OCBBF2004418, OCBBF2004478, OCBBF2004482, OCBBF2004533, OCBBF2004567, OCBBF2004612, OCBBF2004647, OCBBF2004669, OCBBF2004757, OCBBF2004826, OCBBF2004866, OCBBF2004883, OCBBF2004889, OCBBF2004930, OCBBF2004984, OCBBF2005066, OCBBF2005077, OCBBF2005161, OCBBF2005343, OCBBF2005349, OCBBF2005373, OCBBF2005420, OCBBF2005428, OCBBF2005433, OCBBF2005476, OCBBF2005546, OCBBF2005843, OCBBF2005901, OCBBF2005956, OCBBF2006005, OCBBF2006030, OCBBF2006058, OCBBF2006113, OCBBF2006148, OCBBF2006151, OCBBF2006154, OCBBF2006172, OCBBF2006214, OCBBF2006241, OCBBF2006313, OCBBF2006388, OCBBF2006438, OCBBF2006567, OCBBF2006624,

[0935] OCBBF2006639, OCBBF2006660, OCBBF2006764, OCBBF2006849, OCBBF2006859, OCBBF2006972, OCBBF2006987, OCBBF2007028, OCBBF2007039, OCBBF2007051, OCBBF2007068, OCBBF2007114, OCBBF2007121, OCBBF2007184, OCBBF2007194, OCBBF2007196, OCBBF2007224, OCBBF2007238, OCBBF2007354, OCBBF2007414, OCBBF2007415, OCBBF2007428, OCBBF2007478, OCBBF2007485, OCBBF2007520, OCBBF2007555, OCBBF2007610, OCBBF2007622, OCBBF2007756, OCBBF2007762, OCBBF2007892, OCBBF2007931, OCBBF2007946, OCBBF2008005, OCBBF2008041, OCBBF2008116, OCBBF2008138, OCBBF2008283, OCBBF2008330, OCBBF2008340, OCBBF2008366, OCBBF2008466, OCBBF2008511, OCBBF2008520, OCBBF2008569, OCBBF2008586, OCBBF2008640, OCBBF2008691, OCBBF2008701, OCBBF2008724,

[0936] OCBBF2008760, OCBBF2008768, OCBBF2008770, OCBBF2008775, OCBBF2008790, OCBBF2008814, OCBBF2008822, OCBBF2009095, OCBBF2009115, OCBBF2009242, OCBBF2009301, OCBBF2009352, OCBBF2009391, OCBBF2009536, OCBBF2009571, OCBBF2009583, OCBBF2009603, OCBBF2009772, OCBBF2009788, OCBBF2009836, OCBBF2009920, OCBBF2009926, OCBBF2010040, OCBBF2010140, OCBBF2010281, OCBBF2010313, OCBBF2010404, OCBBF2010416, OCBBF2010420, OCBBF2010557, OCBBF2010604, OCBBF2010709, OCBBF2010792, OCBBF2010819, OCBBF2010841, OCBBF2010843, OCBBF2010858, OCBBF2010863, OCBBF2010871, OCBBF2010931, OCBBF2010945, OCBBF2010978, OCBBF2010989, OCBBF2011073, OCBBF2011137, OCBBF2011160, OCBBF2011177, OCBBF2011228, OCBBF2011232, OCBBF2011283,

[0937] OCBBF2011311, OCBBF2011625, OCBBF2011669, OCBBF2011685, OCBBF2011706, OCBBF2011722, OCBBF2011759, OCBBF2011767, OCBBF2011855, OCBBF2011872, OCBBF2011887, OCBBF2011897, OCBBF2011914, OCBBF2011960, OCBBF2011981, OCBBF2012001, OCBBF2012028, OCBBF2012039, OCBBF2012095, OCBBF2012139, OCBBF2012191, OCBBF2012262, OCBBF2012320, OCBBF2012436, OCBBF2012525, OCBBF2012553, OCBBF2012678, OCBBF2012704, OCBBF2012755, OCBBF2012812, OCBBF2012821, OCBBF2012881, OCBBF2012908, OCBBF2012936, OCBBF2012990, OCBBF2013011, OCBBF2013049, OCBBF2013091, OCBBF2013123, OCBBF2013127, OCBBF2013149, OCBBF2013208, OCBBF2013285, OCBBF2013319, OCBBF2013324, OCBBF2013366, OCBBF2013481, OCBBF2013507, OCBBF2013721, OCBBF2013789,

[0938] OCBBF2013843, OCBBF2013883, OCBBF2013926, OCBBF2014052, OCBBF2014064, OCBBF2014089, OCBBF2014322, OCBBF2014386, OCBBF2014541, OCBBF2014707, OCBBF2014745, OCBBF2014828, OCBBF2014873, OCBBF2014880, OCBBF2014928, OCBBF2015031, OCBBF2015081, OCBBF2015115, OCBBF2015232, OCBBF2015233, OCBBF2015285, OCBBF2015334, OCBBF2015335, OCBBF2015503, OCBBF2015506, OCBBF2015599, OCBBF2015645, OCBBF2015659, OCBBF2015751, OCBBF2015797, OCBBF2015931, OCBBF2015980, OCBBF2016038, OCBBF2016405, OCBBF2016467, OCBBF2016590, OCBBF2016591, OCBBF2016612, OCBBF2016689, OCBBF2016690, OCBBF2016729, OCBBF2016841, OCBBF2016928, OCBBF2017035, OCBBF2017055, OCBBF2017069, OCBBF2017306, OCBBF2017325, OCBBF2017398, OCBBF2017458,

[0939] OCBBF2017489, OCBBF2017516, OCBBF2017665, OCBBF2017754, OCBBF2017791, OCBBF2017815, OCBBF2017882, OCBBF2017888, OCBBF2017893, OCBBF2017920, OCBBF2018012, OCBBF2018014, OCBBF2018084, OCBBF2018167, OCBBF2018206, OCBBF2018229, OCBBF2018234, OCBBF2018362, OCBBF2018380, OCBBF2018563, OCBBF2018581, OCBBF2018618, OCBBF2018663, OCBBF2018687, OCBBF2018827, OCBBF2018828, OCBBF2018873, OCBBF2018934, OCBBF2019108, OCBBF2019195, OCBBF2019327, OCBBF2019684, OCBBF2019761, OCBBF2019823, OCBBF2019950, OCBBF2020048, OCBBF2020318, OCBBF2020343, OCBBF2020453, OCBBF2020741, OCBBF2020801, OCBBF2020825, OCBBF2020838, OCBBF2021020, OCBBF2021214, OCBBF2021286, OCBBF2021323, OCBBF2021518, OCBBF2021788, OCBBF2021833,

[0940] OCBBF2022351, OCBBF2022573, OCBBF2022574, OCBBF2023162, OCBBF2023598, OCBBF2023643, OCBBF2024463, OCBBF2024589, OCBBF2024719, OCBBF2024779, OCBBF2024781, OCBBF2025028, OCBBF2025115, OCBBF2025198, OCBBF2025451, OCBBF2025458, OCBBF2025527, OCBBF2025631, OCBBF2025730, OCBBF2026025, OCBBF2026035, OCBBF2026144, OCBBF2026368, OCBBF2026645, OCBBF2026649, OCBBF2026690, OCBBF2026981, OCBBF2027148, OCBBF2027197, OCBBF2027354, OCBBF2027423, OCBBF2027478, OCBBF2027481, OCBBF2027511, OCBBF2027661, OCBBF2027728, OCBBF2027782, OCBBF2027868, OCBBF2028055, OCBBF2028173, OCBBF2028421, OCBBF2029471, OCBBF2029901, OCBBF2030116, OCBBF2030329, OCBBF2030354, OCBBF2030517, OCBBF2030574, OCBBF2030708, OCBBF2030927,

[0941] OCBBF2030963, OCBBF2031167, OCBBF2031198, OCBBF2031366, OCBBF2031561, OCBBF2032152, OCBBF2032274, OCBBF2032539, OCBBF2032590, OCBBF2032599, OCBBF2032611, OCBBF2032671, OCBBF2033295, OCBBF2033413, OCBBF2033869, OCBBF2033948, OCBBF2034333, OCBBF2034529, OCBBF2034637, OCBBF2034906, OCBBF2035110, OCBBF2035214, OCBBF2035390, OCBBF2035564, OCBBF2035658, OCBBF2035823, OCBBF2035885, OCBBF2035916, OCBBF2036019, OCBBF2036031, OCBBF2036225, OCBBF2036476, OCBBF2036743, OCBBF2036752, OCBBF2037068, OCBBF2037340, OCBBF2037398, OCBBF2037464, OCBBF2037547, OCBBF2037598, OCBBF2037638, OCBBF2038238, OCBBF2038285, OCBBF2038317, OCBBF3000097, OCBBF3000213, OCBBF3000296, OCBBF3000323, OCBBF3000372, OCBBF3000380,

[0942] OCBBF3000743, OCBBF3000830, OCBBF3001076, OCBBF3001202, OCBBF3001333, OCBBF3001616, OCBBF3002553, OCBBF3002600, OCBBF3002654, OCBBF3003103, OCBBF3003209, OCBBF3003592, OCBBF3003745, OCBBF3003761, OCBBF3004264, OCBBF3004314, OCBBF3004487, OCBBF3004972, OCBBF3005330, OCBBF3005597, OCBBF3005843, OCBBF3006802, OCBBF3006986, OCBBF3007078, OCBBF3007704, OCBBF3008230, OCBBF3008392, OCBBF3008835, OCBBF3009192, OCBBF3009244, OCBBF3009279, PANCR1000012, PANCR1000021, PANCR1000081, PANCR1000086, PANCR1000091, PANCR1000185, PEBLM1000024, PEBLM1000029, PEBLM1000034, PEBLM1000062, PEBLM1000066, PEBLM1000068, PEBLM1000071, PEBLM1000083, PEBLM1000144, PEBLM1000147, PEBLM1000174, PEBLM1000180, PEBLM2000030,

[0943] PEBLM2000112, PEBLM2000126, PEBLM2000147, PEBLM2000170, PEBLM2000180, PEBLM2000213, PEBLM2000222, PEBLM2000248, PEBLM2000267, PEBLM2000270, PEBLM2000308, PEBLM2000321, PEBLM2000326, PEBLM2000333, PEBLM2000338, PEBLM2000395, PEBLM2000479, PEBLM2000502, PEBLM2001072, PEBLM2001312, PEBLM2001465, PEBLM2001488, PEBLM2001803, PEBLM2002432, PEBLM2002455, PEBLM2002594, PEBLM2002749, PEBLM2002887, PEBLM2003426, PEBLM2003765, PEBLM2003914, PEBLM2003935, PEBLM2004015, PEBLM2004216, PEBLM2004290, PEBLM2004452, PEBLM2004497, PEBLM2004666, PEBLM2004733, PEBLM2005282, PEBLM2005615, PEBLM2005632, PEBLM2005697, PEBLM2006031, PEBLM2006036, PEBLM2006049, PEBLM2006113, PEBLM2006135, PEBLM2006215, PEBLM2006283,

[0944] PEBLM2006298, PEBLM2006912, PEBLM2007112, PEBLM2007140, PEBLM2007188, PEBLM2007296, PEBLM2007437, PEBLM2007447, PEBLM2007598, PEBLM2007832, PEBLM2007834, PEBLM2008106, PEBLM2008576, PEBLM2008605, PEBLM2008826, PEBLM2008861, PERIC1000025, PERIC1000147, PERIC2000180, PERIC2000214, PERIC2000386, PERIC2000387, PERIC2000422, PERIC2000473, PERIC2000478, PERIC2000889, PERIC2000914, PERIC2001227, PERIC2001228, PERIC2001379, PERIC2001504, PERIC2001703, PERIC2001764, PERIC2002243, PERIC2002272, PERIC2002452, PERIC2002766, PERIC2003001, PERIC2003090, PERIC2003287, PERIC2003349, PERIC2003452, PERIC2003699, PERIC2003720, PERIC2003794, PERIC2003834, PERIC2003919, PERIC2003957, PERIC2004028, PERIC2004131,

[0945] PERIC2004259, PERIC2004379, PERIC2004429, PERIC2004510, PERIC2004613, PERIC2004909, PERIC2005111, PERIC2005117, PERIC2005305, PERIC2005347, PERIC2005370, PERIC2005936, PERIC2006035, PERIC2006121, PERIC2006443, PERIC2006945, PERIC2006960, PERIC2007068, PERIC2007439, PERIC2007914, PERIC2008008, PERIC2008385, PERIC2009001, PERIC2009086, PERIC2009329, PERIC2009566, PLACE5000001, PLACE5000013, PLACE5000037, PLACE5000058, PLACE5000066, PLACE5000067, PLACE5000068, PLACE5000070, PLACE5000105, PLACE5000113, PLACE5000115, PLACE5000116, PLACE5000129, PLACE5000139, PLACE5000153, PLACE5000159, PLACE5000171, PLACE5000172, PLACE5000178, PLACE5000245, PLACE5000260, PLACE5000297, PLACE5000372, PLACE5000492,

[0946] PLACE5000522, PLACE5000527, PLACE6000012, PLACE6000044, PLACE6000055, PLACE6000070, PLACE6000137, PLACE6000145, PLACE6000191, PLACE6000205, PLACE6000231, PLACE6000263, PLACE6000296, PLACE6000314, PLACE6000348, PLACE6000371, PLACE6000424, PLACE6000426, PLACE6000429, PLACE6000450, PLACE6000463, PLACE6000523, PLACE6000550, PLACE6000552, PLACE6000555, PLACE6000619, PLACE6000630, PLACE6000953, PLACE6001118, PLACE6001153, PLACE6001185, PLACE6001262, PLACE6001294, PLACE6001443, PLACE6001536, PLACE6001557, PLACE6001712, PLACE6001740, PLACE6001823, PLACE6001886, PLACE6001923, PLACE6001925, PLACE6001933, PLACE6002011, PLACE6002016, PLACE6002056, PLACE6002102, PLACE6002157, PLACE6002312, PLACE6002323,

[0947] PLACE6002345, PLACE6002419, PLACE6002462, PLACE6002647, PLACE6002668, PLACE6002692, PLACE6002699, PLACE6002710, PLACE6002871, PLACE6002949, PLACE6002960, PLACE6003004, PLACE6003038, PLACE6003077, PLACE6003094, PLACE6003109, PLACE6003204, PLACE6003218, PLACE6003372, PLACE6003393, PLACE6003399, PLACE6003539, PLACE6003621, PLACE6003705, PLACE6003740, PLACE6003745, PLACE6003771, PLACE6003796, PLACE6003839, PLACE6003850, PLACE6004005, PLACE6004101, PLACE6004219, PLACE6004336, PLACE6004368, PLACE6004380, PLACE6004396, PLACE6004397, PLACE6004454, PLACE6004464, PLACE6004491, PLACE6004663, PLACE6004687, PLACE6004738, PLACE6004931, PLACE6004966, PLACE6004993, PLACE6005007, PLACE6005029, PLACE6005108,

[0948] PLACE6005231, PLACE6005234, PLACE6005283, PLACE6005294, PLACE6005328, PLACE6005351, PLACE6005423, PLACE6005482, PLACE6005487, PLACE6005535, PLACE6005546, PLACE6005559, PLACE6005579, PLACE6005691, PLACE6005786, PLACE6006077, PLACE6006137, PLACE6006158, PLACE6006217, PLACE6006222, PLACE6006266, PLACE6006287, PLACE6006394, PLACE6006418, PLACE6006474, PLACE6006549, PLACE6006566, PLACE6006697, PLACE6006822, PLACE6006871, PLACE6006905, PLACE6006988, PLACE6007050, PLACE6007180, PLACE6007239, PLACE6007242, PLACE6007309, PLACE6007373, PLACE6007380, PLACE6007433, PLACE6007482, PLACE6007687, PLACE6007787, PLACE6007798, PLACE6007807, PLACE6007925, PLACE6008036, PLACE6008094, PLACE6008126, PLACE6008285,

[0949] PLACE6008444, PLACE6008453, PLACE6008640, PLACE6008750, PLACE6008768, PLACE6008775, PLACE6008793, PLACE6008824, PLACE6008989, PLACE6009006, PLACE6009008, PLACE6009228, PLACE6009237, PLACE6009338, PLACE6009419, PLACE6009430, PLACE6009482, PLACE6009524, PLACE6009527, PLACE6009560, PLACE6009590, PLACE6009821, PLACE6009835, PLACE6009853, PLACE6010077, PLACE6010463, PLACE6010485, PLACE6010568, PLACE6010701, PLACE6010704, PLACE6010732, PLACE6010765, PLACE6010925, PLACE6010936, PLACE6010991, PLACE6011057, PLACE6011102, PLACE6011156, PLACE6011211, PLACE6011260, PLACE6011334, PLACE6011627, PLACE6011774, PLACE6011881, PLACE6011907, PLACE6011970, PLACE6011975, PLACE6012108, PLACE6012168, PLACE6012297,

[0950] PLACE6012308, PLACE6012574, PLACE6012908, PLACE6012936, PLACE6012942, PLACE6013222, PLACE6013232, PLACE6013288, PLACE6013386, PLACE6013400, PLACE6013650, PLACE6013672, PLACE6013883, PLACE6013884, PLACE6013885, PLACE6014043, PLACE6014064, PLACE6014516, PLACE6015211, PLACE6015322, PLACE6015445, PLACE6015460, PLACE6015513, PLACE6015591, PLACE6015729, PLACE6015731, PLACE6015939, PLACE6016030, PLACE6016093, PLACE6016105, PLACE6016160, PLACE6016210, PLACE6016254, PLACE6016942, PLACE6016984, PLACE6017002, PLACE6017431, PLACE6017564, PLACE6017626, PLACE6017701, PLACE6017714, PLACE6017788, PLACE6018031, PLACE6018107, PLACE6018187, PLACE6018235, PLACE6018287, PLACE6018441, PLACE6018497, PLACE6018769,

[0951] PLACE6018834, PLACE6018843, PLACE6018863, PLACE6018938, PLACE6019195, PLACE6019542, PLACE6019600, PLACE6019674, PLACE6019676, PLACE6019701, PLACE6019932, PLACE6020031, PLACE7000167, PLACE7000170, PLACE7000266, PLACE7000333, PLACE7000410, PLACE7000502, PLACE7000707, PLACE7001022, PLACE7001544, PLACE7001759, PLACE7001936, PLACE7002303, PLACE7002641, PLACE7003639, PLACE7003657, PLACE7003684, PLACE7003985, PLACE7004103, PLACE7004961, PLACE7005169, PLACE7005671, PLACE7005840, PLACE7006051, PLACE7006090, PLACE7006240, PLACE7006268, PLACE7006275, PLACE7006498, PLACE7006540, PLACE7007379, PLACE7007644, PLACE7007973, PLACE7008136, PLACE7008261, PLACE7008431, PLACE7008623, PLACE7008766, PLACE7009563,

[0952] PROST1000033, PROST1000039, PROST1000065, PROST1000083, PROST1000085, PROST1000110, PROST1000120, PROST1000123, PROST1000136, PROST1000144, PROST1000145, PROST1000152, PROST1000167, PROST1000184, PROST1000215, PROST1000217, PROST1000220, PROST1000226, PROST1000246, PROST1000262, PROST1000272, PROST1000298, PROST1000322, PROST1000334, PROST1000362, PROST1000377, PROST1000383, PROST1000412, PROST1000419, PROST1000451, PROST1000480, PROST1000485, PROST1000493, PROST1000526, PROST1000527, PROST1000528, PROST1000559, PROST1000575, PROST2000036, PROST2000053, PROST2000067, PROST2000079, PROST2000105, PROST2000143, PROST2000162, PROST2000165, PROST2000176, PROST2000203, PROST2000206, PROST2000212,

[0953] PROST2000241, PROST2000267, PROST2000273, PROST2000274, PROST2000277, PROST2000284, PROST2000325, PROST2000337, PROST2000432, PROST2000452, PROST2000463, PROST2000470, PROST2000505, PROST2000567, PROST2000572, PROST2000717, PROST2000760, PROST2000761, PROST2000835, PROST2000893, PROST2000961, PROST2001002, PROST2001116, PROST2001138, PROST2001180, PROST2001213, PROST2001414, PROST2001415, PROST2001465, PROST2001521, PROST2001540, PROST2001552, PROST2001599, PROST2001611, PROST2001636, PROST2001739, PROST2001796, PROST2001805, PROST2001823, PROST2001883, PROST2001899, PROST2001997, PROST2001998, PROST2002101, PROST2002162, PROST2002212, PROST2002227, PROST2002338, PROST2002425, PROST2002488,

[0954] PROST2002489, PROST2002527, PROST2002591, PROST2002602, PROST2002633, PROST2002651, PROST2002682, PROST2002685, PROST2002722, PROST2002736, PROST2002842, PROST2002897, PROST2002906, PROST2002927, PROST2002960, PROST2003102, PROST2003117, PROST2003210, PROST2003232, PROST2003302, PROST2003303, PROST2003324, PROST2003340, PROST2003396, PROST2003428, PROST2003472, PROST2003537, PROST2003563, PROST2003577, PROST2003583, PROST2003586, PROST2003628, PROST2003635, PROST2003674, PROST2003676, PROST2003725, PROST2003732, PROST2003775, PROST2003922, PROST2003930, PROST2004115, PROST2004142, PROST2004146, PROST2004161, PROST2004251, PROST2004258, PROST2004270, PROST2004332, PROST2004481, PROST2004526,

[0955] PROST2004570, PROST2004727, PROST2004739, PROST2004742, PROST2004744, PROST2004817, PROST2005039, PROST2005067, PROST2005076, PROST2005093, PROST2005121, PROST2005131, PROST2005143, PROST2005228, PROST2005272, PROST2005285, PROST2005426, PROST2005466, PROST2005604, PROST2005630, PROST2005683, PROST2005788, PROST2005793, PROST2005880, PROST2005886, PROST2005904, PROST2005919, PROST2005943, PROST2006008, PROST2006020, PROST2006030, PROST2006060, PROST2006196, PROST2006201, PROST2006260, PROST2006282, PROST2006343, PROST2006450, PROST2006491, PROST2006510, PROST2006536, PROST2006579, PROST2006688, PROST2006737, PROST2006766, PROST2006782, PROST2006933, PROST2006988, PROST2007122, PROST2007200,

[0956] PROST2007237, PROST2007248, PROST2007289, PROST2007317, PROST2007328, PROST2007382, PROST2007389, PROST2007416, PROST2007528, PROST2007612, PROST2007818, PROST2007871, PROST2007950, PROST2007956, PROST2007974, PROST2007988, PROST2008079, PROST2008088, PROST2008243, PROST2008245, PROST2008268, PROST2008271, PROST2008360, PROST2008447, PROST2008468, PROST2008472, PROST2008516, PROST2008724, PROST2008770, PROST2008835, PROST2008993, PROST2009022, PROST2009208, PROST2009222, PROST2009254, PROST2009273, PROST2009320, PROST2009347, PROST2009365, PROST2009388, PROST2009400, PROST2009470, PROST2009483, PROST2009571, PROST2009731, PROST2009736, PROST2009795, PROST2009901, PROST2009909, PROST2010046,

[0957] PROST2010219, PROST2010250, PROST2010318, PROST2010326, PROST2010382, PROST2010400, PROST2010545, PROST2010579, PROST2010606, PROST2010885, PROST2011012, PROST2011038, PROST2011105, PROST2011297, PROST2011410, PROST2011439, PROST2011482, PROST2011577, PROST2011631, PROST2011660, PROST2012005, PROST2012007, PROST2012016, PROST2012088, PROST2012140, PROST2012157, PROST2012190, PROST2012249, PROST2012353, PROST2012400, PROST2012448, PROST2012504, PROST2012542, PROST2012550, PROST2012740, PROST2012888, PROST2012890, PROST2013032, PROST2013121, PROST2013260, PROST2013327, PROST2013531, PROST2013605, PROST2013627, PROST2013873, PROST2013880, PROST2014422, PROST2014585, PROST2014601, PROST2014659,

[0958] PROST2014862, PROST2014916, PROST2014925, PROST2015124, PROST2015137, PROST2015198, PROST2015243, PROST2015246, PROST2015251, PROST2015287, PROST2015332, PROST2015457, PROST2015464, PROST2015537, PROST2015545, PROST2015551, PROST2015636, PROST2015710, PROST2015756, PROST2015877, PROST2015900, PROST2015924, PROST2015932, PROST2016195, PROST2016246, PROST2016351, PROST2016379, PROST2016444, PROST2016462, PROST2016499, PROST2016512, PROST2016566, PROST2016582, PROST2016668, PROST2016684, PROST2016777, PROST2016829, PROST2016860, PROST2016918, PROST2016980, PROST2017098, PROST2017128, PROST2017367, PROST2017413, PROST2017441, PROST2017529, PROST2017578, PROST2017612, PROST2017617, PROST2017700,

[0959] PROST2017701, PROST2017729, PROST2017836, PROST2017910, PROST2017972, PROST2018030, PROST2018090, PROST2018235, PROST2018437, PROST2018487, PROST2018511, PROST2018583, PROST2018588, PROST2018607, PROST2018788, PROST2018902, PROST2018922, PROST2018977, PROST2019164, PROST2019253, PROST2019296, PROST2019398, PROST2019487, PROST2019781, PUAEN1000039, PUAEN1000057, PUAEN1000065, PUAEN1000081, PUAEN1000085, PUAEN1000087, PUAEN1000121, PUAEN1000147, PUAEN1000161, PUAEN1000164, PUAEN1000175, PUAEN1000239, PUAEN1000275, PUAEN1000276, PUAEN1000288, PUAEN1000322, PUAEN2000080, PUAEN2000152, PUAEN2000175, PUAEN2000247, PUAEN2000312, PUAEN2000394, PUAEN2000535, PUAEN2000594, PUAEN2000684, PUAEN2000942,

[0960] PUAEN2001260, PUAEN2001345, PUAEN2001526, PUAEN2001586, PUAEN2001882, PUAEN2002473, PUAEN2002489, PUAEN2002552, PUAEN2002568, PUAEN2002616, PUAEN2002758, PUAEN2003018, PUAEN2003079, PUAEN2003116, PUAEN2003408, PUAEN2003517, PUAEN2003954, PUAEN2004067, PUAEN2004083, PUAEN2004400, PUAEN2004511, PUAEN2004525, PUAEN2004875, PUAEN2005110, PUAEN2005247, PUAEN2005502, PUAEN2005588, PUAEN2005930, PUAEN2006029, PUAEN2006328, PUAEN2006335, PUAEN2006578, PUAEN2006639, PUAEN2006761, PUAEN2007044, PUAEN2007350, PUAEN2007785, PUAEN2007898, PUAEN2008123, PUAEN2008228, PUAEN2008314, PUAEN2008515, PUAEN2008815, PUAEN2008939, PUAEN2008980, PUAEN2008985, PUAEN2009174, PUAEN2009348, PUAEN2009534, PUAEN2009655,

[0961] PUAEN2009795, PUAEN2009852, PUAEN2010346, PUAEN2010824, RECTM1000051, RECTM1000141, RECTM2000220, RECTM2000349, RECTM2000433, RECTM2000510, RECTM2001307, RECTM2001347, RECTM2001519, RECTM2001666, RECTM2001691, RECTM2001749, RECTM2002172, RECTM2002602, RECTM2002632, SALGL1000005, SALGL1000024, SALGL1000028, SALGL1000047, SALGL1000065, SALGL1000107, SALGL1000171, SKMUS1000014, SKMUS1000022, SKMUS1000030, SKMUS1000067, SKMUS1000102, SKMUS1000104, SKMUS1000110, SKMUS1000118, SKMUS1000124, SKMUS1000129, SKMUS1000176, SKMUS1000177, SKMUS2000020, SKMUS2000061, SKMUS2000074, SKMUS2000078, SKMUS2000117, SKMUS2000137, SKMUS2000243, SKMUS2000271, SKMUS2000287, SKMUS2000317, SKMUS2000330, SKMUS2000339,

[0962] SKMUS2000343, SKMUS2000365, SKMUS2000390, SKMUS2000416, SKMUS2000467, SKMUS2000468, SKMUS2000484, SKMUS2000515, SKMUS2000690, SKMUS2000701, SKMUS2000705, SKMUS2000710, SKMUS2000724, SKMUS2000726, SKMUS2000774, SKMUS2000780, SKMUS2000847, SKMUS2000863, SKMUS2000894, SKMUS2000898, SKMUS2000902, SKMUS2000933, SKMUS2000945, SKMUS2000954, SKMUS2000961, SKMUS2000973, SKMUS2000980, SKMUS2001014, SKMUS2001129, SKMUS2001147, SKMUS2001157, SKMUS2001164, SKMUS2001199, SKMUS2001201, SKMUS2001215, SKMUS2001247, SKMUS2001254, SKMUS2001271, SKMUS2001287, SKMUS2001323, SKMUS2001364, SKMUS2001398, SKMUS2001402, SKMUS2001412, SKMUS2001454, SKMUS2001492, SKMUS2001528, SKMUS2001543, SKMUS2001580, SKMUS2001585,

[0963] SKMUS2001608, SKMUS2001631, SKMUS2001662, SKMUS2001663, SKMUS2001668, SKMUS2001671, SKMUS2001683, SKMUS2001693, SKMUS2001695, SKMUS2001703, SKMUS2001740, SKMUS2001742, SKMUS2001823, SKMUS2001850, SKMUS2002077, SKMUS2002084, SKMUS2002153, SKMUS2002475, SKMUS2002602, SKMUS2002634, SKMUS2002693, SKMUS2002821, SKMUS2002840, SKMUS2002920, SKMUS2003034, SKMUS2003074, SKMUS2003168, SKMUS2003194, SKMUS2003744, SKMUS2004044, SKMUS2004047, SKMUS2004483, SKMUS2004667, SKMUS2004897, SKMUS2004903, SKMUS2004908, SKMUS2005428, SKMUS2006481, SKMUS2006755, SKMUS2007315, SKMUS2007359, SKMUS2007568, SKMUS2007740, SKMUS2007816, SKMUS2007915, SKMUS2008338, SKMUS2008407, SKMUS2008474, SKMUS2008585, SKMUS2008607,

[0964] SKMUS2009190, SKMUS2009232, SKMUS2009479, SKMUS2009557, SKNMC1000110, SKNMC1000123, SKNMC1000124, SKNMC1000159, SKNMC1000229, SKNMC1000251, SKNMC1000264, SKNMC2000065, SKNMC2000097, SKNMC2000256, SKNMC2000305, SKNMC2000322, SKNMC2000356, SKNMC2000374, SKNMC2000583, SKNMC2000593, SKNMC2000612, SKNMC2000622, SKNMC2000877, SKNMC2000966, SKNMC2001113, SKNMC2001324, SKNMC2001503, SKNMC2001555, SKNMC2001596, SKNMC2001623, SKNMC2002402, SKNMC2003639, SKNMC2003924, SKNMC2003987, SKNMC2004457, SKNMC2004643, SKNMC2004651, SKNMC2005772, SKNMC2006173, SKNMC2006327, SKNMC2006998, SKNMC2007134, SKNMC2007502, SKNMC2007504, SKNMC2007961, SKNMC2009450, SKNSH1000002, SKNSH1000086, SKNSH1000101, SKNSH1000174,

[0965] SKNSH1000301, SKNSH1000308, SKNSH1000416, SKNSH2000051, SKNSH2000101, SKNSH2000151, SKNSH2000163, SKNSH2000250, SKNSH2000319, SKNSH2000347, SKNSH2000482, SKNSH2000516, SKNSH2000550, SKNSH2000819, SKNSH2000971, SKNSH2001222, SKNSH2001875, SKNSH2002054, SKNSH2002325, SKNSH2002866, SKNSH2003064, SKNSH2003174, SKNSH2003422, SKNSH2003466, SKNSH2003483, SKNSH2003528, SKNSH2003633, SKNSH2004039, SKNSH2005061, SKNSH2005120, SKNSH2005194, SKNSH2005240, SKNSH2005792, SKNSH2005816, SKNSH2005981, SKNSH2006304, SKNSH2006432, SKNSH2006822, SKNSH2007142, SKNSH2007149, SKNSH2007429, SKNSH2007739, SKNSH2008043, SKNSH2008940, SKNSH2008969, SKNSH2009197, SKNSH2009357, SKNSH2009435, SKNSH2009991, SKNSH2010015,

[0966] SMINT1000012, SMINT1000016, SMINT1000042, SMINT1000048, SMINT1000051, SMINT1000054, SMINT1000057, SMINT1000071, SMINT1000075, SMINT1000078, SMINT1000091, SMINT1000100, SMINT1000103, SMINT100011, SMINT1000118, SMINT1000137, SMINT2000007, SMINT2000018, SMINT2000032, SMINT2000040, SMINT2000060, SMINT2000073, SMINT2000084, SMINT2000145, SMINT2000159, SMINT2000176, SMINT2000185, SMINT2000227, SMINT2000229, SMINT2000232, SMINT2000239, SMINT2000267, SMINT2000400, SMINT2000454, SMINT2000518, SMINT2000529, SMINT2000530, SMINT2000537, SMINT2000538, SMINT2000541, SMINT2000545, SMINT2000558, SMINT2000562, SMINT2000568, SMINT2000602, SMINT2000609, SMINT2000629, SMINT2000659, SMINT2000747, SMINT2000811,

[0967] SMINT2000824, SMINT2000933, SMINT2000984, SMINT2001114, SMINT2001158, SMINT2001183, SMINT2001199, SMINT2001222, SMINT2001348, SMINT2001397, SMINT2001458, SMINT2001461, SMINT2001535, SMINT2001559, SMINT2001609, SMINT2001615, SMINT2001683, SMINT2001731, SMINT2001812, SMINT2001950, SMINT2002126, SMINT2002159, SMINT2002202, SMINT2002210, SMINT2002224, SMINT2002281, SMINT2002311, SMINT2002314, SMINT2002328, SMINT2002414, SMINT2002457, SMINT2002620, SMINT2002743, SMINT2002778, SMINT2002880, SMINT2002882, SMINT2002884, SMINT2002899, SMINT2002974, SMINT2002976, SMINT2003003, SMINT2003128, SMINT2003150, SMINT2003317, SMINT2003340, SMINT2003386, SMINT2003423, SMINT2003505, SMINT2003551, SMINT2003569,

[0968] SMINT2003641, SMINT2003644, SMINT2003866, SMINT2004023, SMINT2004037, SMINT2004047, SMINT2004086, SMINT2004280, SMINT2004299, SMINT2004339, SMINT2004350, SMINT2004414, SMINT2004473, SMINT2004547, SMINT2004583, SMINT2004589, SMINT2004729, SMINT2004781, SMINT2004872, SMINT2004891, SMINT2004909, SMINT2004972, SMINT2004992, SMINT2005075, SMINT2005161, SMINT2005174, SMINT2005213, SMINT2005330, SMINT2005368, SMINT2005387, SMINT2005402, SMINT2005405, SMINT2005621, SMINT2005623, SMINT2005624, SMINT2005688, SMINT2005800, SMINT2005956, SMINT2006078, SMINT2006205, SMINT2006331, SMINT2006596, SMINT2006641, SMINT2006648, SMINT2006708, SMINT2006716, SMINT2006801, SMINT2007062, SMINT2007101, SMINT2007140,

[0969] SMINT2007187, SMINT2007219, SMINT2007294, SMINT2007365, SMINT2.007391, SMINT2007508, SMINT2007526, SMINT2007579, SMINT2007647, SMINT2007729, SMINT2007790, SMINT2007792, SMINT2007796, SMINT2007867, SMINT2007932, SMINT2008042, SMINT2008054, SMINT2008133, SMINT2008277, SMINT2008329, SMINT2008455, SMINT2008491, SMINT2008531, SMINT2008545, SMINT2008558, SMINT2008590, SMINT2008625, SMINT2008672, SMINT2008690, SMINT2008715, SMINT2008720, SMINT2008817, SMINT2008844, SMINT2008869, SMINT2008917, SMINT2008921, SMINT2008960, SMINT2009119, SMINT2009121, SMINT2009212, SMINT2009216, SMINT2009233, SMINT2009259, SMINT2009272, SMINT2009292, SMINT2009363, SMINT2009415, SMINT2009468, SMINT2009505, SMINT2009529,

[0970] SMINT2009832, SMINT2009895, SMINT2009902, SMINT2009973, SMINT2010015, SMINT2010068, SMINT2010076, SMINT2010084, SMINT2010144, SMINT2010200, SMINT2010278, SMINT2010324, SMINT2010326, SMINT2010369, SMINT2010426, SMINT2010500, SMINT2010533, SMINT2010629, SMINT2010639, SMINT2010672, SMINT2010753, SMINT2010853, SMINT2010897, SMINT2010901, SMINT2010959, SMINT2010997, SMINT2011033, SMINT2011066, SMINT2011273, SMINT2011311, SMINT2011406, SMINT2011509, SMINT2011567, SMINT2011588, SMINT2011656, SMINT2011888, SMINT2011958, SMINT2012040, SMINT2012179, SMINT2012195, SMINT2012285, SMINT2012501, SMINT2012734, SMINT2012793, SMINT2013032, SMINT2013129, SMINT2013170, SMINT2013181, SMINT2013228, SMINT2013613,

[0971] SMINT2013626, SMINT2013695, SMINT2013833, SMINT2013890, SMINT2014166, SMINT2014282, SMINT2014443, SMINT2014480, SMINT2014489, SMINT2014721, SMINT2015006, SMINT2015294, SMINT2015306, SMINT2015326, SMINT2015353, SMINT2015454, SMINT2015518, SMINT2015745, SMINT2015787, SMINT2015810, SMINT2016122, SMINT2016146, SMINT2016286, SMINT2016313, SMINT2016396, SMINT2016412, SMINT2016440, SMINT2016477, SMINT2016544, SMINT2016857, SMINT2017134, SMINT2017319, SMINT2017324, SMINT2017410, SMINT2017431, SMINT2017432, SMINT2017436, SMINT2017659, SMINT2017736, SMINT2017781, SMINT2017855, SMINT2017884, SMINT2017964, SMINT2017974, SMINT2018343, SMINT2018592, SMINT2018681, SMINT2019017, SMINT2019105, SMINT2019142,

[0972] SMINT2019153, SMINT2019200, SPLEN1000013, SPLEN1000041, SPLEN1000049, SPLEN1000056, SPLEN1000087, SPLEN1000089, SPLEN1000091, SPLEN1000106, SPLEN1000134, SPLEN1000139, SPLEN1000143, SPLEN1000144, SPLEN1000145, SPLEN1000156, SPLEN1000163, SPLEN1000165, SPLEN1000178, SPLEN2000020, SPLEN2000047, SPLEN2000064, SPLEN2000072, SPLEN2000098, SPLEN2000126, SPLEN2000134, SPLEN2000143, SPLEN2000189, SPLEN2000197, SPLEN2000205, SPLEN2000210, SPLEN2000222, SPLEN2000242, SPLEN2000243, SPLEN2000247, SPLEN2000255, SPLEN2000267, SPLEN2000270, SPLEN2000307, SPLEN2000310, SPLEN2000341, SPLEN2000350, SPLEN2000357, SPLEN2000364, SPLEN2000402, SPLEN2000414, SPLEN2000420, SPLEN2000443, SPLEN2000448, SPLEN2000450,

[0973] SPLEN2000464, SPLEN2000496, SPLEN2000505, SPLEN2000515, SPLEN2000516, SPLEN2000537, SPLEN2000541, SPLEN2000607, SPLEN2000630, SPLEN2000695, SPLEN2000698, SPLEN2000839, SPLEN2001135, SPLEN2001141, SPLEN2001157, SPLEN2001176, SPLEN2001227, SPLEN2001245, SPLEN2001278, SPLEN2001354, SPLEN2001367, SPLEN2001383, SPLEN2001476, SPLEN2001503, SPLEN2001510, SPLEN2001599, SPLEN2001626, SPLEN2001650, SPLEN2001689, SPLEN2001710, SPLEN2001761, SPLEN2001781, SPLEN2001881, SPLEN2001912, SPLEN2001945, SPLEN2002007, SPLEN2002053, SPLEN2002133, SPLEN2002147, SPLEN2002166, SPLEN2002175, SPLEN2002223, SPLEN2002272, SPLEN2002314, SPLEN2002335, SPLEN2002343, SPLEN2002354, SPLEN2002385, SPLEN2002419, SPLEN2002451,

[0974] SPLEN2002462, SPLEN2002463, SPLEN2002467, SPLEN2002493, SPLEN2002662, SPLEN2002695, SPLEN2002707, SPLEN2002917, SPLEN2002931, SPLEN2002957, SPLEN2003160, SPLEN2003204, SPLEN2003219, SPLEN2003297, SPLEN2003396, SPLEN2003678, SPLEN2003878, SPLEN2003918, SPLEN2003924, SPLEN2004060, SPLEN2004078, SPLEN2004124, SPLEN2004148, SPLEN2004181, SPLEN2004220, SPLEN2004343, SPLEN2004346, SPLEN2004368, SPLEN2004555, SPLEN2004611, SPLEN2004662, SPLEN2004773, SPLEN2004844, SPLEN2004880, SPLEN2004984, SPLEN2005009, SPLEN2005227, SPLEN2005272, SPLEN2005342, SPLEN2005416, SPLEN2005429, SPLEN2005450, SPLEN2005474, SPLEN2005560, SPLEN2005727, SPLEN2005783, SPLEN2005790, SPLEN2005818, SPLEN2005838, SPLEN2005869,

[0975] SPLEN2005939, SPLEN2006122, SPLEN2006133, SPLEN2006143, SPLEN2006232, SPLEN2006268, SPLEN2006283, SPLEN2006305, SPLEN2006374, SPLEN2006389, SPLEN2006425, SPLEN2006671, SPLEN2006701, SPLEN2006785, SPLEN2006875, SPLEN2007182, SPLEN2007276, SPLEN2007314, SPLEN2007326, SPLEN2007350, SPLEN2007388, SPLEN2007498, SPLEN2007619, SPLEN2007653, SPLEN2007689, SPLEN2007695, SPLEN2007739, SPLEN2007750, SPLEN2007794, SPLEN2007879, SPLEN2007926, SPLEN2007951, SPLEN2008007, SPLEN2008135, SPLEN2008164, SPLEN2008317, SPLEN2008460, SPLEN2008496, SPLEN2008591, SPLEN2008786, SPLEN2009081, SPLEN2009088, SPLEN2009163, SPLEN2009315, SPLEN2009340, SPLEN2009512, SPLEN2009513, SPLEN2009541, SPLEN2009548, SPLEN2009555,

[0976] SPLEN2009581, SPLEN2009733, SPLEN2009803, SPLEN2009884, SPLEN2009918, SPLEN2009970, SPLEN2010004, SPLEN2010015, SPLEN2010112, SPLEN2010119, SPLEN2010146, SPLEN2010187, SPLEN2010195, SPLEN2010350, SPLEN2010395, SPLEN2010415, SPLEN2010447, SPLEN2010469, SPLEN2010510, SPLEN2010530, SPLEN2010534, SPLEN2010588, SPLEN2010625, SPLEN2010800, SPLEN2010846, SPLEN2010847, SPLEN2010862, SPLEN2010912, SPLEN2010978, SPLEN2010986, SPLEN2011018, SPLEN2011021, SPLEN2011025, SPLEN2011086, SPLEN2011139, SPLEN2011145, SPLEN2011248, SPLEN2011252, SPLEN2011419, SPLEN2011422, SPLEN2011672, SPLEN2011678, SPLEN2011737, SPLEN2011758, SPLEN2011766, SPLEN2011805, SPLEN2011820, SPLEN2011830, SPLEN2011931, SPLEN2011981,

[0977] SPLEN2012115, SPLEN2012175, SPLEN2012179, SPLEN2012185, SPLEN2012234, SPLEN2012453, SPLEN2012523, SPLEN2012524, SPLEN2012525, SPLEN2012571, SPLEN2012606, SPLEN2012611, SPLEN2012619, SPLEN2012624, SPLEN2012725, SPLEN2012743, SPLEN2012756, SPLEN2012800, SPLEN2012846, SPLEN2012889, SPLEN2012961, SPLEN2013108, SPLEN2013195, SPLEN2013644, SPLEN2013648, SPLEN2013670, SPLEN2013673, SPLEN2013714, SPLEN2013753, SPLEN2013821, SPLEN2013857, SPLEN2013860, SPLEN2013910, SPLEN2013923, SPLEN2013936, SPLEN2014041, SPLEN2014063, SPLEN2014073, SPLEN2014080, SPLEN2014119, SPLEN2014136, SPLEN2014199, SPLEN2014210, SPLEN2014293, SPLEN2014318, SPLEN2014381, SPLEN2014452, SPLEN2014454, SPLEN2014486, SPLEN2014543,

[0978] SPLEN2014645, SPLEN2014669, SPLEN2014711, SPLEN2014739, SPLEN2014860, SPLEN2014865, SPLEN2014911, SPLEN2014919, SPLEN2014920, SPLEN2014924, SPLEN2014937, SPLEN2014946, SPLEN2015031, SPLEN2015094, SPLEN2015121, SPLEN2015129, SPLEN2015158, SPLEN2015166, SPLEN2015216, SPLEN2015258, SPLEN2015261, SPLEN2015267, SPLEN2015276, SPLEN2015310, SPLEN2015415, SPLEN2015433, SPLEN2015593, SPLEN2015674, SPLEN2015679, SPLEN2015707, SPLEN2015730, SPLEN2015746, SPLEN2015788, SPLEN2015815, SPLEN2015890, SPLEN2015891, SPLEN2015899, SPLEN2016045, SPLEN2016053, SPLEN2016069, SPLEN2016098, SPLEN2016135, SPLEN2016139, SPLEN2016241, SPLEN2016250, SPLEN2016304, SPLEN2016356, SPLEN2016480, SPLEN2016531, SPLEN2016533,

[0979] SPLEN2016541, SPLEN2016552, SPLEN2016554, SPLEN2016602, SPLEN2016627, SPLEN2016678, SPLEN2016773, SPLEN2016781, SPLEN2016840, SPLEN2016863, SPLEN2016922, SPLEN2016932, SPLEN2016973, SPLEN2017043, SPLEN2017104, SPLEN2017121, SPLEN2017147, SPLEN2017187, SPLEN2017189, SPLEN2017212, SPLEN2017318, SPLEN2017351, SPLEN2017426, SPLEN2017452, SPLEN2017538, SPLEN2017592, SPLEN2017613, SPLEN2017620, SPLEN2017643, SPLEN2017687, SPLEN2017740, SPLEN2017781, SPLEN2017918, SPLEN2017999, SPLEN2018098, SPLEN2018112, SPLEN2018157, SPLEN2018159, SPLEN2018180, SPLEN2018181, SPLEN2018280, SPLEN2018285, SPLEN2018299, SPLEN2018364, SPLEN2018395, SPLEN2018643, SPLEN2018683, SPLEN2018732, SPLEN2018749, SPLEN2018933,

[0980] SPLEN2019008, SPLEN2019043, SPLEN2019077, SPLEN2019092, SPLEN2019102, SPLEN2019131, SPLEN2019169, SPLEN2019257, SPLEN2019311, SPLEN2019323, SPLEN2019349, SPLEN2019375, SPLEN2019379, SPLEN2019446, SPLEN2019471, SPLEN2019480, SPLEN2019505, SPLEN2019571, SPLEN2019575, SPLEN2019709, SPLEN2019774, SPLEN2019793, SPLEN2019811, SPLEN2019839, SPLEN2019956, SPLEN2019985, SPLEN2020007, SPLEN2020034, SPLEN2020153, SPLEN2020154, SPLEN2020166, SPLEN2020183, SPLEN2020223, SPLEN2020359, SPLEN2020417, SPLEN2020427, SPLEN2020467, SPLEN2020512, SPLEN2020608, SPLEN2020777, SPLEN2020805, SPLEN2021057, SPLEN2021122, SPLEN2021157, SPLEN2021194, SPLEN2021231, SPLEN2021273, SPLEN2021295, SPLEN2021298, SPLEN2021383,

[0981] SPLEN2021417, SPLEN2021440, SPLEN2021458, SPLEN2021463, SPLEN2021560, SPLEN2021701, SPLEN2021795, SPLEN2021983, SPLEN2021991, SPLEN2022040, SPLEN2022162, SPLEN2022227, SPLEN2022522, SPLEN2022591, SPLEN2022785, SPLEN2022920, SPLEN2023024, SPLEN2023118, SPLEN2023160, SPLEN2023423, SPLEN2023710, SPLEN2023733, SPLEN2023791, SPLEN2023977, SPLEN2024070, SPLEN2024127, SPLEN2024232, SPLEN2024273, SPLEN2024383, SPLEN2024489, SPLEN2024530, SPLEN2024571, SPLEN2024577, SPLEN2024617, SPLEN2024737, SPLEN2024922, SPLEN2024956, SPLEN2024990, SPLEN2025012, SPLEN2025017, SPLEN2025039, SPLEN2025219, SPLEN2025491, SPLEN2025626, SPLEN2025820, SPLEN2026144, SPLEN2026411, SPLEN2026765, SPLEN2027113, SPLEN2027157,

[0982] SPLEN2027395, SPLEN2027488, SPLEN2027780, SPLEN2027852, SPLEN2027868, SPLEN2027995, SPLEN2028046, SPLEN2028066, SPLEN2028138, SPLEN2028365, SPLEN2028417, SPLEN2028424, SPLEN2028466, SPLEN2028593, SPLEN2028844, SPLEN2028914, SPLEN2028994, SPLEN2029051, SPLEN2029176, SPLEN2029295, SPLEN2029380, SPLEN2029522, SPLEN2029683, SPLEN2029727, SPLEN2029904, SPLEN2030250, SPLEN2030335, SPLEN2030371, SPLEN2030397, SPLEN2030479, SPLEN2030495, SPLEN2030562, SPLEN2030763, SPLEN2030847, SPLEN2031004, SPLEN2031125, SPLEN2031424, SPLEN2031547, SPLEN2031674, SPLEN2031724, SPLEN2031780, SPLEN2032036, SPLEN2032112, SPLEN2032154, SPLEN2032321, SPLEN2032356, SPLEN2032677, SPLEN2032813, SPLEN2032924, SPLEN2033098,

[0983] SPLEN2033153, SPLEN2033333, SPLEN2033490, SPLEN2033539, SPLEN2033921, SPLEN2033996, SPLEN2034021, SPLEN2034081, SPLEN2034252, SPLEN2034448, SPLEN2034551, SPLEN2034601, SPLEN2034678, SPLEN2034781, SPLEN2034864, SPLEN2034934, SPLEN2035318, SPLEN2035615, SPLEN2036076, SPLEN2036103, SPLEN2036326, SPLEN2036475, SPLEN2036501, SPLEN2036579, SPLEN2036608, SPLEN2036702, SPLEN2036712, SPLEN2036821, SPLEN2036932, SPLEN2036953, SPLEN2037077, SPLEN2037194, SPLEN2037319, SPLEN2037444, SPLEN2037580, SPLEN2037630, SPLEN2037678, SPLEN2037722, SPLEN2037891, SPLEN2038055, SPLEN2038180, SPLEN2038345, SPLEN2038407, SPLEN2038473, SPLEN2038834, SPLEN2039311, SPLEN2039379, SPLEN2039672, SPLEN2039697, SPLEN2039845,

[0984] SPLEN2039936, SPLEN2040222, SPLEN2040237, SPLEN2040824, SPLEN2041304, SPLEN2041306, SPLEN2041310, SPLEN2041585, SPLEN2041645, SPLEN2041700, SPLEN2041720, SPLEN2041977, SPLEN2042051, SPLEN2042303, SPLEN2042521, SPLEN2042535, SPLEN2042598, SPLEN2042714, SPLEN2042920, STOMA1000013, STOMA1000047, STOMA1000052, STOMA1000074, STOMA1000091, STOMA1000117, STOMA1000133, STOMA1000175, STOMA1000186, STOMA1000190, STOMA1000191, STOMA2000032, STOMA2000072, STOMA2000088, STOMA2000104, STOMA2000148, STOMA2000168, STOMA2000183, STOMA2000188, STOMA2000257, STOMA2000279, STOMA2000289, STOMA2000383, STOMA2000386, STOMA2000478, STOMA2000482, STOMA2000529, STOMA2000539, STOMA2000567, STOMA2000640, STOMA2000678,

[0985] STOMA2000686, STOMA2000888, STOMA2001025, STOMA2001389, STOMA2002052, STOMA2002141, STOMA2002367, STOMA2002688, STOMA2002828, STOMA2003158, STOMA2003289, STOMA2003444, STOMA2003477, STOMA2003646, STOMA2003716, STOMA2003781, STOMA2003894, STOMA2004194, STOMA2004294, STOMA2004663, STOMA2004668, STOMA2004852, STOMA2004873, STOMA2004884, STOMA2004893, STOMA2004925, STOMA2005120, STOMA2005664, STOMA2005667, STOMA2005746, STOMA2005782, STOMA2006181, STOMA2006213, STOMA2006325, STOMA2006330, STOMA2006398, STOMA2006447, STOMA2006780, STOMA2006904, STOMA2007269, STOMA2007680, STOMA2007745, STOMA2008050, STOMA2008361, STOMA2008546, STOMA2008614, STOMA2008638, STOMA2008838, STOMA2009250, STOMA2009253,

[0986] STOMA2009256, STOMA2009289, SYNOV1000049, SYNOV1000118, SYNOV1000128, SYNOV1000164, SYNOV1000190, SYNOV1000256, SYNOV1000374, SYNOV2000152, SYNOV2000171, SYNOV2000173, SYNOV2000177, SYNOV2000178, SYNOV2000193, SYNOV2000251, SYNOV2000279, SYNOV2000291, SYNOV2000297, SYNOV2000397, SYNOV2000426, SYNOV2000601, SYNOV2000700, SYNOV2000820, SYNOV2000824, SYNOV2000923, SYNOV2001014, SYNOV2001035, SYNOV2001088, SYNOV2001111, SYNOV2001144, SYNOV2001212, SYNOV2001239, SYNOV2001251, SYNOV2001262, SYNOV2001300, SYNOV2001356, SYNOV2001374, SYNOV2001390, SYNOV2001451, SYNOV2001457, SYNOV2001468, SYNOV2001581, SYNOV2001648, SYNOV2001660, SYNOV2003326, SYNOV2005216, SYNOV2005448, SYNOV2005541, SYNOV2005673,

[0987] SYNOV2005817, SYNOV2005962, SYNOV2006430, SYNOV2006620, SYNOV2007758, SYNOV2007965, SYNOV2008765, SYNOV2011233, SYNOV2012326, SYNOV2013365, SYNOV2013637, SYNOV2014157, SYNOV2014364, SYNOV2016124, SYNOV2016837, SYNOV2017055, SYNOV2017179, SYNOV2018921, SYNOV2019280, SYNOV2020085, SYNOV2020463, SYNOV2021320, SYNOV2021953, SYNOV3000184, SYNOV3000231, SYNOV3000302, SYNOV3000345, SYNOV4000249, SYNOV4000472, SYNOV4000598, SYNOV4000706, SYNOV4001153, SYNOV4001224, SYNOV4001326, SYNOV4001342, SYNOV4001395, SYNOV4002001, SYNOV4002392, SYNOV4002875, SYNOV4002883, SYNOV4003174, SYNOV4003322, SYNOV4003681, SYNOV4003981, SYNOV4004184, SYNOV4004741, SYNOV4004823, SYNOV4004914, SYNOV4005256, SYNOV4005570,

[0988] SYNOV4005739, SYNOV4005889, SYNOV4005981, SYNOV4005989, SYNOV4006256, SYNOV4006327, SYNOV4006542, SYNOV4007012, SYNOV4007215, SYNOV4007360, SYNOV4007430, SYNOV4007521, SYNOV4007553, SYNOV4007671, SYNOV4007711, SYNOV4008245, SYNOV4008336, SYNOV4009129, SYNOV4009139, SYNOV4009298, SYNOV4009575, T1ESE2000116, T1ESE2000904, T1ESE2002665, TBAES2000004, TBAES2000059, TBAES2000116, TBAES2000255, TBAES2000315, TBAES2000352, TBAES2000932, TBAES2001171, TBAES2001220, TBAES2001229, TBAES2001258, TBAES2001296, TBAES2001492, TBAES2001553, TBAES2001751, TBAES2003435, TBAES2003492, TBAES2003550, TBAES2003702, TBAES2003917, TBAES2004055, TBAES2004105, TBAES2004939, TBAES2005157, TBAES2005361, TBAES2005543,

[0989] TBAES2006568, TBAES2006881, TBAES2007379, TBAES2007428, TBAES2007481, TBAES2007504, TBAES2007548, TBAES2007697, TBAES2007862, TBAES2007964, TBAES2008133, TBAES2009387, TCERX2000171, TCERX2000431, TCERX2000613, TCERX2000998, TCERX2002644, TCOLN1000037, TCOLN1000180, TCOLN2000139, TCOLN2000236, TCOLN2000641, TCOLN2001268, TCOLN2002047, TCOLN2002278, TESOP1000035, TESOP1000127, TESOP1000160, TESOP2000083, TESOP2000090, TESOP2000205, TESOP2000312, TESOP2000390, TESOP2000400, TESOP2000510, TESOP2000527, TESOP2000569, TESOP2000739, TESOP2000801, TESOP2001122, TESOP2001166, TESOP2001345, TESOP2001474, TESOP2001796, TESOP2001818, TESOP2001849, TESOP2001865, TESOP2001901, TESOP2001953, TESOP2002005,

[0990] TESOP2002110, TESOP2002150, TESOP2002273, TESOP2002489, TESOP2002539, TESOP2002545, TESOP2002804, TESOP2002950, TESOP2003273, TESOP2003308, TESOP2003553, TESOP2003753, TESOP2004110, TESOP2004114, TESOP2004173, TESOP2004214, TESOP2005199, TESOP2005285, TESOP2005485, TESOP2005498, TESOP2005579, TESOP2006041, TESOP2006053, TESOP2006060, TESOP2006068, TESOP2006110, TESOP2006398, TESOP2006670, TESOP2006704, TESOP2006746, TESOP2006865, TESOP2006893, TESOP2007041, TESOP2007052, TESOP2007262, TESOP2007384, TESOP2007636, TESOP2007674, TESOP2007688, TESOP2007725, TESOP2007912, TESOP2007978, TESOP2008127, TESOP2008552, TESOP2008556, TESOP2008563, TESOP2008820, TESOP2009121, TESOP2009201, TESOP2009247,

[0991] TESOP2009555, TESTI1000018, TESTI1000019, TESTI1000025, TESTI1000029, TESTI1000030, TESTI1000042, TESTI1000045, TESTI1000051, TESTI1000055, TESTI1000064, TESTI1000070, TESTI1000085, TESTI1000088, TESTI1000093, TESTI1000094, TESTI1000096, TESTI1000101, TESTI1000109, TESTI1000125, TESTI1000127, TESTI1000128, TESTI1000131, TESTI1000138, TESTI1000142, TESTI1000157, TESTI1000163, TESTI1000168, TESTI1000169, TESTI1000179, TESTI1000183, TESTI1000191, TESTI1000257, TESTI1000266, TESTI1000319, TESTI1000330, TESTI1000348, TESTI1000390, TESTI1000391, TESTI1000459, TESTI1000491, TESTI1000545, TESTI2000006, TESTI2000018, TESTI2000044, TESTI2000100, TESTI2000117, TESTI2000120, TESTI2000147, TESTI2000154,

[0992] TESTI2000172, TESTI2000177, TESTI2000179, TESTI2000184, TESTI2000207, TESTI2000208, TESTI2000221, TESTI2000238, TESTI2000253, TESTI2000272, TESTI2000278, TESTI2000349, TESTI2000356, TESTI2000358, TESTI2000372, TESTI2000427, TESTI2000431, TESTI2000435, TESTI2000443, TESTI2000452, TESTI2000462, TESTI2000489, TESTI2000520, TESTI2000571, TESTI2000591, TESTI2000598, TESTI2000600, TESTI2000616, TESTI2000627, TESTI2000644, TESTI2000671, TESTI2000683, TESTI2000689, TESTI2000695, TESTI2000699, TESTI2000707, TESTI2000745, TESTI2000756, TESTI2000762, TESTI2000784, TESTI2000808, TESTI2000819, TESTI2000830, TESTI2000840, TESTI2000849, TESTI2000850, TESTI2000874, TESTI2000883, TESTI2000909, TESTI2000951,

[0993] TESTI2000970, TESTI2000981, TESTI2001008, TESTI2001049, TESTI2001082, TESTI2001120, TESTI2001134, TESTI2001141, TESTI2001180, TESTI2001208, TESTI2001229, TESTI2001236, TESTI2001237, TESTI2001306, TESTI2001313, TESTI2001330, TESTI2001339, TESTI2001345, TESTI2001352, TESTI2001364, TESTI2001412, TESTI2001420, TESTI2001498, TESTI2001511, TESTI2001512, TESTI2001518, TESTI2001556, TESTI2001593, TESTI2001613, TESTI2001621, TESTI2001661, TESTI2001665, TESTI2001671, TESTI2001697, TESTI2001725, TESTI2001758, TESTI2001766, TESTI2001792, TESTI2001793, TESTI2001795, TESTI2001812, TESTI2001815, TESTI2001823, TESTI2001826, TESTI2001827, TESTI2001852, TESTI2001862, TESTI2001869, TESTI2001879, TESTI2001894,

[0994] TESTI2001898, TESTI2001915, TESTI2001950, TESTI2001959, TESTI2001968, TESTI2001985, TESTI2001991, TESTI2002002, TESTI2002012, TESTI2002036, TESTI2002048, TESTI2002057, TESTI2002081, TESTI2002090, TESTI2002105, TESTI2002149, TESTI2002216, TESTI2002223, TESTI2002245, TESTI2002251, TESTI2002256, TESTI2002264, TESTI2002282, TESTI2002293, TESTI2002294, TESTI2002326, TESTI2002351, TESTI2002361, TESTI2002365, TESTI2002369, TESTI2002406, TESTI2002415, TESTI2002423, TESTI2002453, TESTI2002461, TESTI2002465, TESTI2002467, TESTI2002498, TESTI2002516, TESTI2002544, TESTI2002578, TESTI2002580, TESTI2002618, TESTI2002632, TESTI2002676, TESTI2002690, TESTI2002696, TESTI2002698, TESTI2002700, TESTI2002707,

[0995] TESTI2002724, TESTI2002729, TESTI2002752, TESTI2002753, TESTI2002789, TESTI2002802, TESTI2002806, TESTI2002840, TESTI2002866, TESTI2002877, TESTI2002910, TESTI2002912, TESTI2002928, TESTI2002937, TESTI2002965, TESTI2002993, TESTI2003005, TESTI2003020, TESTI2003031, TESTI2003037, TESTI2003044, TESTI2003059, TESTI2003061, TESTI2003071, TESTI2003074, TESTI2003089, TESTI2003104, TESTI2003109, TESTI2003117, TESTI2003127, TESTI2003130, TESTI2003131, TESTI2003139, TESTI2003141, TESTI2003152, TESTI2003181, TESTI2003193, TESTI2003196, TESTI2003228, TESTI2003236, TESTI2003255, TESTI2003258, TESTI2003277, TESTI2003280, TESTI2003299, TESTI2003311, TESTI2003321, TESTI2003327, TESTI2003330, TESTI2003347,

[0996] TESTI2003354, TESTI2003356, TESTI2003372, TESTI2003376, TESTI2003418, TESTI2003419, TESTI2003432, TESTI2003454, TESTI2003475, TESTI2003476, TESTI2003498, TESTI2003512, TESTI2003539, TESTI2003541, TESTI2003545, TESTI2003551, TESTI2003574, TESTI2003580, TESTI2003589, TESTI2003596, TESTI2003598, TESTI2003615, TESTI2003625, TESTI2003638, TESTI2003649, TESTI2003692, TESTI2003718, TESTI2003727, TESTI2003756, TESTI2003768, TESTI2003781, TESTI2003787, TESTI2003824, TESTI2003827, TESTI2003894, TESTI2003911, TESTI2003914, TESTI2003940, TESTI2003962, TESTI2003998, TESTI2004000, TESTI2004031, TESTI2004073, TESTI2004080, TESTI2004085, TESTI2004089, TESTI2004111, TESTI2004119, TESTI2004122, TESTI2004153,

[0997] TESTI2004163, TESTI2004169, TESTI2004207, TESTI2004215, TESTI2004227, TESTI2004229, TESTI2004243, TESTI2004255, TESTI2004287, TESTI2004295, TESTI2004313, TESTI2004318, TESTI2004322, TESTI2004391, TESTI2004399, TESTI2004423, TESTI2004431, TESTI2004432, TESTI2004452, TESTI2004459, TESTI2004490, TESTI2004539, TESTI2004552, TESTI2004560, TESTI2004574, TESTI2004601, TESTI2004611, TESTI2004649, TESTI2004654, TESTI2004675, TESTI2004687, TESTI2004689, TESTI2004700, TESTI2004706, TESTI2004712, TESTI2004734, TESTI2004737, TESTI2004783, TESTI2004791, TESTI2004793, TESTI2004860, TESTI2004906, TESTI2004920, TESTI2004929, TESTI2004936, TESTI2004941, TESTI2004971, TESTI2004982, TESTI2004993, TESTI2004994,

[0998] TESTI2004999, TESTI2005017, TESTI2005025, TESTI2005040, TESTI2005060, TESTI2005072, TESTI2005085, TESTI2005112, TESTI2005120, TESTI2005153, TESTI2005155, TESTI2005173, TESTI2005267, TESTI2005268, TESTI2005280, TESTI2005307, TESTI2005326, TESTI2005363, TESTI2005376, TESTI2005378, TESTI2005380, TESTI2005391, TESTI2005395, TESTI2005396, TESTI2005408, TESTI2005415, TESTI2005470, TESTI2005492, TESTI2005564, TESTI2005568, TESTI2005584, TESTI2005588, TESTI2005590, TESTI2005603, TESTI2005609, TESTI2005610, TESTI2005630, TESTI2005672, TESTI2005683, TESTI2005690, TESTI2005692, TESTI2005703, TESTI2005720, TESTI2005731, TESTI2005739, TESTI2005742, TESTI2005743, TESTI2005767, TESTI2005775, TESTI2005784,

[0999] TESTI2005788, TESTI2005827, TESTI2005835, TESTI2005860, TESTI2005892, TESTI2005911, TESTI2005933, TESTI2005937, TESTI2005948, TESTI2005979, TESTI2005981, TESTI2005982, TESTI2005984, TESTI2005986, TESTI2005987, TESTI2006007, TESTI2006008, TESTI2006015, TESTI2006016, TESTI2006035, TESTI2006040, TESTI2006041, TESTI2006045, TESTI2006067, TESTI2006083, TESTI2006097, TESTI2006109, TESTI2006111, TESTI2006120, TESTI2006125, TESTI2006179, TESTI2006209, TESTI2006210, TESTI2006212, TESTI2006218, TESTI2006238, TESTI2006255, TESTI2006258, TESTI2006278, TESTI2006333, TESTI2006341, TESTI2006360, TESTI2006383, TESTI2006409, TESTI2006425, TESTI2006437, TESTI2006453, TESTI2006457, TESTI2006460, TESTI2006465,

[1000] TESTI2006483, TESTI2006499, TESTI2006523, TESTI2006543, TESTI2006565, TESTI2006572, TESTI2006615, TESTI2006617, TESTI2006624, TESTI2006628, TESTI2006633, TESTI2006643, TESTI2006648, TESTI2006659, TESTI2006660, TESTI2006665, TESTI2006667, TESTI2006677, TESTI2006720, TESTI2006735, TESTI2006744, TESTI2006774, TESTI2006853, TESTI2006866, TESTI2006872, TESTI2006877, TESTI2006879, TESTI2006894, TESTI2006940, TESTI2006955, TESTI2006978, TESTI2006979, TESTI2006990, TESTI2007040, TESTI2007074, TESTI2007078, TESTI2007113, TESTI2007152, TESTI2007163, TESTI2007183, TESTI2007220, TESTI2007234, TESTI2007311, TESTI2007320, TESTI2007346, TESTI2007358, TESTI2007402, TESTI2007405, TESTI2007407, TESTI2007422,

[1001] TESTI2007452, TESTI2007466, TESTI2007480, TESTI2007490, TESTI2007502, TESTI2007524, TESTI2007533, TESTI2007576, TESTI2007613, TESTI2007657, TESTI2007685, TESTI2007692, TESTI2007749, TESTI2007750, TESTI2007808, TESTI2007814, TESTI2007829, TESTI2007864, TESTI2007867, TESTI2007872, TESTI2007906, TESTI2007922, TESTI2007951, TESTI2007972, TESTI2007973, TESTI2007998, TESTI2008014, TESTI2008020, TESTI2008032, TESTI2008033, TESTI2008046, TESTI2008081, TESTI2008099, TESTI2008139, TESTI2008144, TESTI2008161, TESTI2008189, TESTI2008204, TESTI2008219, TESTI2008233, TESTI2008234, TESTI2008237, TESTI2008278, TESTI2008320, TESTI2008331, TESTI2008343, TESTI2008387, TESTI2008389, TESTI2008394, TESTI2008405,

[1002] TESTI2008420, TESTI2008425, TESTI2008440, TESTI2008567, TESTI2008595, TESTI2008621, TESTI2008636, TESTI2008657, TESTI2008684, TESTI2008699, TESTI2008715, TESTI2008762, TESTI2008774, TESTI2008786, TESTI2008822, TESTI2008835, TESTI2008840, TESTI2008847, TESTI2008884, TESTI2008901, TESTI2008929, TESTI2008946, TESTI2008960, TESTI2009018, TESTI2009091, TESTI2009097, TESTI2009136, TESTI2009185, TESTI2009190, TESTI2009217, TESTI2009239, TESTI2009325, TESTI2009388, TESTI2009390, TESTI2009400, TESTI2009402, TESTI2009412, TESTI2009423, TESTI2009447, TESTI2009462, TESTI2009474, TESTI2009477, TESTI2009497, TESTI2009502, TESTI2009511, TESTI2009520, TESTI2009544, TESTI2009545, TESTI2009551, TESTI2009577,

[1003] TESTI2009585, TESTI2009588, TESTI2009683, TESTI2009727, TESTI2009739, TESTI2009785, TESTI2009812, TESTI2009835, TESTI2009853, TESTI2009935, TESTI2009977, TESTI2009987, TESTI2010009, TESTI2010154, TESTI2010180, TESTI2010239, TESTI2010280, TESTI2010354, TESTI2010396, TESTI2010400, TESTI2010409, TESTI2010572, TESTI2010587, TESTI2010591, TESTI2010617, TESTI2010682, TESTI2010724, TESTI2010732, TESTI2010734, TESTI2010755, TESTI2010793, TESTI2010806, TESTI2010833, TESTI2010872, TESTI2011009, TESTI2011020, TESTI2011028, TESTI2011033, TESTI2011254, TESTI2011294, TESTI2011314, TESTI2011315, TESTI2011394, TESTI2011407, TESTI2011448, TESTI2011480, TESTI2011549, TESTI2011575, TESTI2011605, TESTI2011612,

[1004] TESTI2011665, TESTI2011680, TESTI2011683, TESTI2011712, TESTI2011750, TESTI2011840, TESTI2011846, TESTI2011915, TESTI2011928, TESTI2011971, TESTI2012019, TESTI2012050, TESTI2012090, TESTI2012095, TESTI2012104, TESTI2012152, TESTI2012155, TESTI2012171, TESTI2012207, TESTI2012231, TESTI2012244, TESTI2012289, TESTI2012308, TESTI2012356, TESTI2012387, TESTI2012394, TESTI2012444, TESTI2012528, TESTI2012544, TESTI2012550, TESTI2012571, TESTI2012592, TESTI2012617, TESTI2012628, TESTI2012812, TESTI2012834, TESTI2012835, TESTI2012861, TESTI2012900, TESTI2012915, TESTI2012922, TESTI2013001, TESTI2013012, TESTI2013053, TESTI2013144, TESTI2013163, TESTI2013169, TESTI2013212, TESTI2013231, TESTI2013257,

[1005] TESTI2013264, TESTI2013268, TESTI2013295, TESTI2013322, TESTI2013381, TESTI2013382, TESTI2013401, TESTI2013427, TESTI2013468, TESTI2013497, TESTI2013545, TESTI2013546, TESTI2013566, TESTI2013601, TESTI2013604, TESTI2013607, TESTI2013610, TESTI2013691, TESTI2013699, TESTI2013737, TESTI2013767, TESTI2013832, TESTI2013873, TESTI2013889, TESTI2014007, TESTI2014036, TESTI2014097, TESTI2014160, TESTI2014248, TESTI2014254, TESTI2014269, TESTI2014274, TESTI2014318, TESTI2014324, TESTI2014339, TESTI2014362, TESTI2014385, TESTI2014415, TESTI2014439, TESTI2014474, TESTI2014505, TESTI2014577, TESTI2014578, TESTI2014716, TESTI2014780, TESTI2014800, TESTI2014838, TESTI2014843, TESTI2014979, TESTI2014988,

[1006] TESTI2015042, TESTI2015092, TESTI2015105, TESTI2015180, TESTI2015246, TESTI2015249, TESTI2015327, TESTI2015331, TESTI2015335, TESTI2015350, TESTI2015375, TESTI2015437, TESTI2015590, TESTI2015610, TESTI2015626, TESTI2015647, TESTI2015675, TESTI2015710, TESTI2015752, TESTI2015830, TESTI2015914, TESTI2015938, TESTI2015947, TESTI2015962, TESTI2015987, TESTI2016033, TESTI2016046, TESTI2016101, TESTI2016162, TESTI2016197, TESTI2016278, TESTI2016298, TESTI2016331, TESTI2016337, TESTI2016410, TESTI2016421, TESTI2016509, TESTI2016568, TESTI2016583, TESTI2016599, TESTI2016629, TESTI2016663, TESTI2016667, TESTI2016688, TESTI2016701, TESTI2016758, TESTI2016848, TESTI2016863, TESTI2016888, TESTI2016896,

[1007] TESTI2016922, TESTI2016942, TESTI2016950, TESTI2016996, TESTI2017017, TESTI2017028, TESTI2017035, TESTI2017069, TESTI2017089, TESTI2017102, TESTI2017107, TESTI2017113, TESTI2017125, TESTI2017256, TESTI2017305, TESTI2017311, TESTI2017396, TESTI2017507, TESTI2017537, TESTI2017582, TESTI2017584, TESTI2017645, TESTI2017727, TESTI2017740, TESTI2017775, TESTI2017816, TESTI2017832, TESTI2017923, TESTI2017932, TESTI2017951, TESTI2018014, TESTI2018031, TESTI2018035, TESTI2018060, TESTI2018083, TESTI2018178, TESTI2018221, TESTI2018276, TESTI2018290, TESTI2018335, TESTI2018337, TESTI2018368, TESTI2018421, TESTI2018428, TESTI2018462, TESTI2018475, TESTI2018482, TESTI2018521, TESTI2018565, TESTI2018581,

[1008] TESTI2018611, TESTI2018687, TESTI2018697, TESTI2018838, TESTI2018867, TESTI2018941, TESTI2018957, TESTI2018974, TESTI2018975, TESTI2019042, TESTI2019077, TESTI2019228, TESTI2019257, TESTI2019280, TESTI2019282, TESTI2019308, TESTI2019336, TESTI2019352, TESTI2019406, TESTI2019430, TESTI2019455, TESTI2019481, TESTI2019488, TESTI2019501, TESTI2019648, TESTI2019669, TESTI2019697, TESTI2019729, TESTI2019760, TESTI2019787, TESTI2019794, TESTI2019854, TESTI2019859, TESTI2019860, TESTI2019872, TESTI2019911, TESTI2019917, TESTI2019975, TESTI2019998, TESTI2020012, TESTI2020026, TESTI2020029, TESTI2020071, TESTI2020084, TESTI2020265, TESTI2020283, TESTI2020316, TESTI2020344, TESTI2020379, TESTI2020426,

[1009] TESTI2020445, TESTI2020510, TESTI2020515, TESTI2020525, TESTI2020579, TESTI2020717, TESTI2020840, TESTI2020871, TESTI2020905, TESTI2020906, TESTI2020946, TESTI2020956, TESTI2020981, TESTI2020999, TESTI2021003, TESTI2021038, TESTI2021057, TESTI2021077, TESTI2021112, TESTI2021114, TESTI2021116, TESTI2021118, TESTI2021122, TESTI2021124, TESTI2021138, TESTI2021315, TESTI2021358, TESTI2021447, TESTI2021463, TESTI2021531, TESTI2021599, TESTI2021637, TESTI2021654, TESTI2021667, TESTI2021736, TESTI2021785, TESTI2021819, TESTI2021851, TESTI2021895, TESTI2021911, TESTI2021939, TESTI2021999, TESTI2022010, TESTI2022023, TESTI2022065, TESTI2022086, TESTI2022179, TESTI2022203, TESTI2022246, TESTI2022323,

[1010] TESTI2022338, TESTI2022400, TESTI2022462, TESTI2022495, TESTI2022623, TESTI2022649, TESTI2022652, TESTI2022738, TESTI2022798, TESTI2022812, TESTI2022814, TESTI2022874, TESTI2022940, TESTI2022952, TESTI2023025, TESTI2023033, TESTI2023053, TESTI2023085, TESTI2023192, TESTI2023194, TESTI2023214, TESTI2023254, TESTI2023386, TESTI2023414, TESTI2023427, TESTI2023436, TESTI2023599, TESTI2023752, TESTI2023800, TESTI2023861, TESTI2023903, TESTI2023942, TESTI2023947, TESTI2023951, TESTI2023968, TESTI2024009, TESTI2024090, TESTI2024125, TESTI2024153, TESTI2024192, TESTI2024267, TESTI2024283, TESTI2024299, TESTI2024419, TESTI2024422, TESTI2024443, TESTI2024446, TESTI2024473, TESTI2024476, TESTI2024498,

[1011] TESTI2024560, TESTI2024567, TESTI2024586, TESTI2024598, TESTI2024641, TESTI2024648, TESTI2024718, TESTI2024744, TESTI2024864, TESTI2024885, TESTI2024936, TESTI2024978, TESTI2024999, TESTI2025006, TESTI2025013, TESTI2025022, TESTI2025063, TESTI2025117, TESTI2025144, TESTI2025161, TESTI2025174, TESTI2025229, TESTI2025269, TESTI2025365, TESTI2025403, TESTI2025409, TESTI2025448, TESTI2025454, TESTI2025486, TESTI2025546, TESTI2025582, TESTI2025609, TESTI2025656, TESTI2025757, TESTI2025791, TESTI2025846, TESTI2025872, TESTI2025879, TESTI2025911, TESTI2025920, TESTI2025924, TESTI2026014, TESTI2026024, TESTI2026064, TESTI2026077, TESTI2026104, TESTI2026116, TESTI2026134, TESTI2026168, TESTI2026196,

[1012] TESTI2026215, TESTI2026218, TESTI2026233, TESTI2026291, TESTI2026294, TESTI2026401, TESTI2026403, TESTI2026453, TESTI2026461, TESTI2026491, TESTI2026505, TESTI2026515, TESTI2026525, TESTI2026534, TESTI2026537, TESTI2026589, TESTI2026597, TESTI2026605, TESTI2026647, TESTI2026674, TESTI2026794, TESTI2026824, TESTI2026854, TESTI2026925, TESTI2026936, TESTI2026957, TESTI2027013, TESTI2027019, TESTI2027108, TESTI2027165, TESTI2027171, TESTI2027173, TESTI2027179, TESTI2027185, TESTI2027206, TESTI2027238, TESTI2027239, TESTI2027243, TESTI2027271, TESTI2027296, TESTI2027378, TESTI2027411, TESTI2027450, TESTI2027496, TESTI2027503, TESTI2027562, TESTI2027615, TESTI2027645, TESTI2027730, TESTI2027736,

[1013] TESTI2027791, TESTI2027820, TESTI2027828, TESTI2027840, TESTI2027909, TESTI2028098, TESTI2028151, TESTI2028242, TESTI2028253, TESTI2028254, TESTI2028269, TESTI2028290, TESTI2028384, TESTI2028426, TESTI2028488, TESTI2028523, TESTI2028583, TESTI2028613, TESTI2028659, TESTI2028662, TESTI2028670, TESTI2028705, TESTI2028776, TESTI2028811, TESTI2028891, TESTI2028985, TESTI2028997, TESTI2029131, TESTI2029162, TESTI2029196, TESTI2029201, TESTI2029227, TESTI2029244, TESTI2029249, TESTI2029252, TESTI2029259, TESTI2029264, TESTI2029470, TESTI2029672, TESTI2029785, TESTI2029880, TESTI2030136, TESTI2030322, TESTI2030336, TESTI2030342, TESTI2030519, TESTI2030554, TESTI2030556, TESTI2030728, TESTI2030754,

[1014] TESTI2030770, TESTI2030860, TESTI2030901, TESTI2030917, TESTI2030930, TESTI2031006, TESTI2031007, TESTI2031060, TESTI2031129, TESTI2031356, TESTI2031418, TESTI2031504, TESTI2031529, TESTI2031687, TESTI2031760, TESTI2031809, TESTI2031919, TESTI2031935, TESTI2031986, TESTI2032044, TESTI2032067, TESTI2032079, TESTI2032643, TESTI2032681, TESTI2032761, TESTI2032768, TESTI2032774, TESTI2032828, TESTI2033031, TESTI2033242, TESTI2033254, TESTI2033300, TESTI2033395, TESTI2033441, TESTI2033453, TESTI2033505, TESTI2033520, TESTI2033641, TESTI2033710, TESTI2033905, TESTI2034187, TESTI2034243, TESTI2034249, TESTI2034307, TESTI2034357, TESTI2034401, TESTI2034407, TESTI2034506, TESTI2034520, TESTI2034718,

[1015] TESTI2034730, TESTI2034749, TESTI2034767, TESTI2034774, TESTI2034777, TESTI2034785, TESTI2034799, TESTI2034847, TESTI2034913, TESTI2034916, TESTI2034931, TESTI2034953, TESTI2034997, TESTI2035003, TESTI2035078, TESTI2035084, TESTI2035107, TESTI2035121, TESTI2035124, TESTI2035183, TESTI2035236, TESTI2035262, TESTI2035309, TESTI2035688, TESTI2035775, TESTI2035793, TESTI2035898, TESTI2035962, TESTI2035981, TESTI2035997, TESTI2036114, TESTI2036129, TESTI2036285, TESTI2036288, TESTI2036513, TESTI2036589, TESTI2036650, TESTI2036684, TESTI2036691, TESTI2036736, TESTI2036822, TESTI2036833, TESTI2036913, TESTI2036922, TESTI2036951, TESTI2036965, TESTI2036969, TESTI2037002, TESTI2037055, TESTI2037081,

[1016] TESTI2037085, TESTI2037103, TESTI2037106, TESTI2037111, TESTI2037209, TESTI2037255, TESTI2037359, TESTI2037375, TESTI2037382, TESTI2037534, TESTI2037569, TESTI2037572, TESTI2037643, TESTI2037657, TESTI2037673, TESTI2037723, TESTI2037819, TESTI2037830, TESTI2037845, TESTI2037877, TESTI2037976, TESTI2038048, TESTI2038065, TESTI2038104, TESTI2038275, TESTI2038388, TESTI2038573, TESTI2038596, TESTI2038623, TESTI2038644, TESTI2038733, TESTI2038858, TESTI2038958, TESTI2039025, TESTI2039026, TESTI2039038, TESTI2039041, TESTI2039060, TESTI2039113, TESTI2039121, TESTI2039177, TESTI2039209, TESTI2039225, TESTI2039227, TESTI2039276, TESTI2039342, TESTI2039353, TESTI2039544, TESTI2039613, TESTI2039707,

[1017] TESTI2039732, TESTI2039738, TESTI2039776, TESTI2039867, TESTI2039908, TESTI2040018, TESTI2040094, TESTI2040102, TESTI2040128, TESTI2040143, TESTI2040297, TESTI2040372, TESTI2040377, TESTI2040424, TESTI2040642, TESTI2040815, TESTI2040897, TESTI2040944, TESTI2040964, TESTI2040983, TESTI2040989, TESTI2041330, TESTI2041362, TESTI2041517, TESTI2041564, TESTI2041664, TESTI2041730, TESTI2041734, TESTI2041778, TESTI2041800, TESTI2041947, TESTI2041956, TESTI2041976, TESTI2042062, TESTI2042149, TESTI2042264, TESTI2042295, TESTI2042302, TESTI2042326, TESTI2042400, TESTI2042450, TESTI2042473, TESTI2042507, TESTI2042508, TESTI2042750, TESTI2042783, TESTI2042806, TESTI2042928, TESTI2042946, TESTI2042958,

[1018] TESTI2043275, TESTI2043277, TESTI2043282, TESTI2043313, TESTI2043477, TESTI2043585, TESTI2043758, TESTI2043817, TESTI2043857, TESTI2043866, TESTI2043869, TESTI2044064, TESTI2044118, TESTI2044194, TESTI2044276, TESTI2044306, TESTI2044309, TESTI2044413, TESTI2044418, TESTI2044754, TESTI2044788, TESTI2044796, TESTI2044833, TESTI2044892, TESTI2044920, TESTI2044968, TESTI2045139, TESTI2045155, TESTI2045171, TESTI2045199, TESTI2045353, TESTI2045509, TESTI2045562, TESTI2045611, TESTI2045819, TESTI2045850, TESTI2045920, TESTI2045964, TESTI2045983, TESTI2046100, TESTI2046188, TESTI2046347, TESTI2046352, TESTI2046358, TESTI2046439, TESTI2046456, TESTI2046535, TESTI2046536, TESTI2046552, TESTI2046569,

[1019] TESTI2046686, TESTI2046721, TESTI2046732, TESTI2046786, TESTI2046797, TESTI2046863, TESTI2046872, TESTI2047071, TESTI2047141, TESTI2047147, TESTI2047153, TESTI2047212, TESTI2047342, TESTI2047383, TESTI2047605, TESTI2047792, TESTI2047801, TESTI2047818, TESTI2047824, TESTI2047885, TESTI2047930, TESTI2048105, TESTI2048109, TESTI2048465, TESTI2048603, TESTI2048898, TESTI2049041, TESTI2049062, TESTI2049206, TESTI2049246, TESTI2049277, TESTI2049422, TESTI2049452, TESTI2049469, TESTI2049553, TESTI2049576, TESTI2049857, TESTI2049956, TESTI2050137, TESTI2050681, TESTI2050780, TESTI2050987, TESTI2051148, TESTI2051177, TESTI2051279, TESTI2051488, TESTI2051543, TESTI2051627, TESTI2051742, TESTI2051767,

[1020] TESTI2051791, TESTI2051806, TESTI2051867, TESTI2051873, TESTI2052110, TESTI2052202, TESTI2052211, TESTI2052256, TESTI2052288, TESTI2052525, TESTI2052670, TESTI2052693, TESTI2052698, TESTI2052799, TESTI2052822, TESTI2052985, TESTI2053151, TESTI2053242, TESTI2053399, TESTI2053526, TESTI2053561, TESTI2053621, TESTI2053667, TESTI2053723, TESTI3000002, TESTI3000005, TESTI4000068, TESTI4000079, TESTI4000093, TESTI4000134, TESTI4000137, TESTI4000153, TESTI4000155, TESTI4000157, TESTI4000183, TESTI4000214, TESTI4000215, TESTI4000228, TESTI4000250, TESTI4000288, TESTI4000319, TESTI4000349, TESTI4000370, TESTI4000394, TESTI4000434, TESTI4000462, TESTI4000530, TESTI4000534, TESTI4000598, TESTI4000600,

[1021] TESTI4000621, TESTI4000703, TESTI4000724, TESTI4000957, TESTI4000970, TESTI4001036, TESTI4001037, TESTI4001060, TESTI4001106, TESTI4001148, TESTI4001176, TESTI4001195, TESTI4001201, TESTI4001206, TESTI4001348, TESTI4001441, TESTI4001467, TESTI4001473, TESTI4001517, TESTI4001527, TESTI4001561, TESTI4001569, TESTI4001604, TESTI4001665, TESTI4001679, TESTI4001795, TESTI4001923, TESTI4001925, TESTI4001984, TESTI4002003, TESTI4002072, TESTI4002141, TESTI4002195, TESTI4002202, TESTI4002290, TESTI4002319, TESTI4002491, TESTI4002520, TESTI4002552, TESTI4002647, TESTI4002703, TESTI4002754, TESTI4002868, TESTI4002878, TESTI4002889, TESTI4002988, TESTI4003150, TESTI4003179, TESTI4003279, TESTI4003319,

[1022] TESTI4003404, TESTI4003565, TESTI4003574, TESTI4003579, TESTI4003602, TESTI4003703, TESTI4003733, TESTI4003796, TESTI4003944, TESTI4004003, TESTI4004031, TESTI4004200, TESTI4004210, TESTI4004539, TESTI4004626, TESTI4004653, TESTI4004695, TESTI4004722, TESTI4004887, TESTI4004917, TESTI4005015, TESTI4005039, TESTI4005133, TESTI4005158, TESTI4005317, TESTI4005322, TESTI4005399, TESTI4005470, TESTI4005500, TESTI4005534, TESTI4005543, TESTI4005628, TESTI4005801, TESTI4005805, TESTI4005857, TESTI4005961, TESTI4006053, TESTI4006079, TESTI4006112, TESTI4006137, TESTI4006148, TESTI4006219, TESTI4006234, TESTI4006308, TESTI4006326, TESTI4006393, TESTI4006407, TESTI4006412, TESTI4006420, TESTI4006441,

[1023] TESTI4006473, TESTI4006539, TESTI4006546, TESTI4006567, TESTI4006704, TESTI4006728, TESTI4006802, TESTI4006819, TESTI4007064, TESTI4007163, TESTI4007176, TESTI4007203, TESTI4007239, TESTI4007369, TESTI4007373, TESTI4007382, TESTI4007404, TESTI4007489, TESTI4007565, TESTI4007671, TESTI4007775, TESTI4007778, TESTI4007799, TESTI4007810, TESTI4007816, TESTI4007965, TESTI4008007, TESTI4008018, TESTI4008050, TESTI4008058, TESTI4008086, TESTI4008097, TESTI4008176, TESTI4008209, TESTI4008219, TESTI4008250, TESTI4008302, TESTI4008305, TESTI4008401, TESTI4008417, TESTI4008429, TESTI4008573, TESTI4008797, TESTI4008816, TESTI4008840, TESTI4008935, TESTI4008993, TESTI4009022, TESTI4009028, TESTI4009034,

[1024] TESTI4009123, TESTI4009160, TESTI4009215, TESTI4009283, TESTI4009286, TESTI4009306, TESTI4009374, TESTI4009406, TESTI4009454, TESTI4009457, TESTI4009501, TESTI4009563, TESTI4009608, TESTI4009638, TESTI4009752, TESTI4009881, TESTI4009886, TESTI4009928, TESTI4010076, TESTI4010082, TESTI4010095, TESTI4010211, TESTI4010377, TESTI4010475, TESTI4010544, TESTI4010713, TESTI4010721, TESTI4010789, TESTI4010817, TESTI4010831, TESTI4010902, TESTI4010928, TESTI4010979, TESTI4011070, TESTI4011072, TESTI4011084, TESTI4011118, TESTI4011246, TESTI4011484, TESTI4011505, TESTI4011532, TESTI4011616, TESTI4011744, TESTI4011745, TESTI4011829, TESTI4011926, TESTI4011956, TESTI4012010, TESTI4012086, TESTI4012258,

[1025] TESTI4012293, TESTI4012329, TESTI4012382, TESTI4012406, TESTI4012448, TESTI4012451, TESTI4012505, TESTI4012556, TESTI4012623, TESTI4012646, TESTI4012679, TESTI4012911, TESTI4012956, TESTI4012960, TESTI4013365, TESTI4013369, TESTI4013410, TESTI4013474, TESTI4013602, TESTI4013667, TESTI4013675, TESTI4013685, TESTI4013735, TESTI4013742, TESTI4013774, TESTI4013817, TESTI4013830, TESTI4013852, TESTI4013894, TESTI4013924, TESTI4013960, TESTI4013962, TESTI4014159, TESTI4014175, TESTI4014265, TESTI4014276, TESTI4014306, TESTI4014392, TESTI4014415, TESTI4014445, TESTI4014553, TESTI4014661, TESTI4014694, TESTI4014801, TESTI4014818, TESTI4014891, TESTI4014908, TESTI4014924, TESTI4014932, TESTI4014977,

[1026] TESTI4015012, TESTI4015129, TESTI4015145, TESTI4015204, TESTI4015263, TESTI4015293, TESTI4015299, TESTI4015339, TESTI4015398, TESTI4015442, TESTI4015471, TESTI4015477, TESTI4015600, TESTI4015646, TESTI4015681, TESTI4015688, TESTI4015790, TESTI4016110, TESTI4016238, TESTI4016551, TESTI4016812, TESTI4016822, TESTI4016865, TESTI4016882, TESTI4016925, TESTI4017001, TESTI4017116, TESTI4017137, TESTI4017229, TESTI4017254, TESTI4017269, TESTI4017380, TESTI4017382, TESTI4017543, TESTI4017575, TESTI4017647, TESTI4017714, TESTI4017763, TESTI4017848, TESTI4017854, TESTI4017901, TESTI4017961, TESTI4017984, TESTI4018101, TESTI4018152, TESTI4018208, TESTI4018382, TESTI4018436, TESTI4018506, TESTI4018555,

[1027] TESTI4018751, TESTI4018806, TESTI4018835, TESTI4018859, TESTI4018881, TESTI4018886, TESTI4018938, TESTI4019140, TESTI4019149, TESTI4019299, TESTI4019417, TESTI4019440, TESTI4019566, TESTI4019657, TESTI4019756, TESTI4019843, TESTI4020092, TESTI4020102, TESTI4020342, TESTI4020460, TESTI4020596, TESTI4020806, TESTI4020819, TESTI4020920, TESTI4021129, TESTI4021197, TESTI4021294, TESTI4021377, TESTI4021456, TESTI4021491, TESTI4021569, TESTI4021713, TESTI4021821, TESTI4022158, TESTI4022577, TESTI4022716, TESTI4022873, TESTI4023096, TESTI4023172, TESTI4023546, TESTI4023555, TESTI4023654, TESTI4023722, TESTI4023762, TESTI4023942, TESTI4024096, TESTI4024240, TESTI4024245, TESTI4024294, TESTI4024344,

[1028] TESTI4024387, TESTI4024420, TESTI4024494, TESTI4024740, TESTI4024874, TESTI4024890, TESTI4024907, TESTI4024930, TESTI4025062, TESTI4025268, TESTI4025401, TESTI4025494, TESTI4025547, TESTI4025731, TESTI4025797, TESTI4025865, TESTI4025908, TESTI4025920, TESTI4026079, TESTI4026080, TESTI4026192, TESTI4026207, TESTI4026295, TESTI4026390, TESTI4026456, TESTI4026510, TESTI4026524, TESTI4026680, TESTI4026700, TESTI4026762, TESTI4026785, TESTI4027139, TESTI4027170, TESTI4027262, TESTI4027516, TESTI4027557, TESTI4027660, TESTI4027821, TESTI4027969, TESTI4028042, TESTI4028059, TESTI4028062, TESTI4028182, TESTI4028429, TESTI4028612, TESTI4028692, TESTI4028809, TESTI4028823, TESTI4028880, TESTI4028904,

[1029] TESTI4028938, TESTI4028958, TESTI4028983, TESTI4029023, TESTI4029348, TESTI4029370, TESTI4029528, TESTI4029651, TESTI4029671, TESTI4029676, TESTI4029690, TESTI4029731, TESTI4029743, TESTI4030069, TESTI4030159, TESTI4030319, TESTI4030505, TESTI4030603, TESTI4030669, TESTI4030673, TESTI4030864, TESTI4031066, TESTI4031173, TESTI4031335, TESTI4031745, TESTI4031818, TESTI4032090, TESTI4032112, TESTI4032128, TESTI4032270, TESTI4032375, TESTI4032834, TESTI4032856, TESTI4032895, TESTI4032913, TESTI4033146, TESTI4033177, TESTI4033433, TESTI4033690, TESTI4034172, TESTI4034212, TESTI4034432, TESTI4034495, TESTI4034632, TESTI4034633, TESTI4034912, TESTI4034973, TESTI4035063, TESTI4035065, TESTI4035498,

[1030] TESTI4035508, TESTI4035581, TESTI4035602, TESTI4035637, TESTI4035649, TESTI4035770, TESTI4035872, TESTI4035895, TESTI4035898, TESTI4035989, TESTI4036012, TESTI4036042, TESTI4036048, TESTI4036315, TESTI4036319, TESTI4036449, TESTI4036767, TESTI4036909, TESTI4037066, TESTI4037156, TESTI4037188, TESTI4037228, TESTI4037244, TESTI4037727, TESTI4037949, TESTI4038047, TESTI4038099, TESTI4038156, TESTI4038223, TESTI4038258, TESTI4038284, TESTI4038339, TESTI4038492, TESTI4038721, TESTI4038758, TESTI4038779, TESTI4038818, TESTI4039038, TESTI4039086, TESTI4039451, TESTI4039575, TESTI4039659, TESTI4039744, TESTI4039904, TESTI4040197, TESTI4040363, TESTI4040535, TESTI4040559, TESTI4040598, TESTI4040800,

[1031] TESTI4040804, TESTI4040939, TESTI4040956, TESTI4041049, TESTI4041053, TESTI4041086, TESTI4041099, TESTI4041143, TESTI4041482, TESTI4041519, TESTI4041624, TESTI4041629, TESTI4041832, TESTI4041844, TESTI4041903, TESTI4041954, TESTI4041984, TESTI4041985, TESTI4041986, TESTI4042098, TESTI4042420, TESTI4042440, TESTI4042444, TESTI4042711, TESTI4042846, TESTI4043067, TESTI4043129, TESTI4043140, TESTI4043166, TESTI4043203, TESTI4043223, TESTI4043371, TESTI4043378, TESTI4043512, TESTI4043551, TESTI4043710, TESTI4043947, TESTI4044035, TESTI4044076, TESTI4044084, TESTI4044123, TESTI4044186, TESTI4044234, TESTI4044291, TESTI4044296, TESTI4044300, TESTI4044682, TESTI4044704, TESTI4044770, TESTI4045168,

[1032] TESTI4045312, TESTI4045330, TESTI4045470, TESTI4045701, TESTI4045908, TESTI4045955, TESTI4045982, TESTI4046073, TESTI4046090, TESTI4046240, TESTI4046245, TESTI4046253, TESTI4046282, TESTI4046328, TESTI4046450, TESTI4046457, TESTI4046487, TESTI4046502, TESTI4046523, TESTI4046819, TESTI4046873, TESTI4046884, TESTI4046896, TESTI4046903, TESTI4046962, TESTI4047069, TESTI4047119, TESTI4047305, TESTI4047328, TESTI4047437, TESTI4047569, TESTI4047746, TESTI4047808, THYMU1000010, THYMU1000016, THYMU1000017, THYMU1000025, THYMU1000029, THYMU1000032, THYMU1000033, THYMU1000041, THYMU1000060, THYMU1000074, THYMU1000083, THYMU1000098, THYMU1000103, THYMU1000105, THYMU1000136, THYMU1000142, THYMU1000144,

[1033] THYMU1000158, THYMU1000176, THYMU1000179, THYMU1000191, THYMU1000198, THYMU1000217, THYMU1000240, THYMU1000242, THYMU1000291, THYMU1000316, THYMU1000318, THYMU1000331, THYMU1000336, THYMU1000359, THYMU1000366, THYMU1000374, THYMU1000382, THYMU1000393, THYMU1000394, THYMU1000399, THYMU1000426, THYMU1000428, THYMU1000440, THYMU1000459, THYMU1000473, THYMU1000490, THYMU1000491, THYMU1000496, THYMU1000499, THYMU1000527, THYMU1000532, THYMU1000536, THYMU1000554, THYMU1000558, THYMU1000576, THYMU1000600, THYMU1000677, THYMU1000692, THYMU2000022, THYMU2000032, THYMU2000057, THYMU2000120, THYMU2000138, THYMU2000140, THYMU2000155, THYMU2000162, THYMU2000171, THYMU2000176, THYMU2000179, THYMU2000231,

[1034] THYMU2000236, THYMU2000276, THYMU2000280, THYMU2000300, THYMU2000317, THYMU2000368, THYMU2000369, THYMU2000418, THYMU2000440, THYMU2000489, THYMU2000492, THYMU2000519, THYMU2000570, THYMU2000602, THYMU2000660, THYMU2000671, THYMU2000672, THYMU2000684, THYMU2000702, THYMU2000767, THYMU2000775, THYMU2000800, THYMU2000879, THYMU2000932, THYMU2000946, THYMU2000950, THYMU2000971, THYMU2000982, THYMU2000990, THYMU2001007, THYMU2001018, THYMU2001053, THYMU2001071, THYMU2001090, THYMU2001139, THYMU2001195, THYMU2001202, THYMU2001203, THYMU2001256, THYMU2001270, THYMU2001291, THYMU2001314, THYMU2001325, THYMU2001357, THYMU2001381, THYMU2001422, THYMU2001443, THYMU2001515, THYMU2001521, THYMU2001556,

[1035] THYMU2001622, THYMU2001727, THYMU2001819, THYMU2001825, THYMU2001839, THYMU2001868, THYMU2001898, THYMU2001900, THYMU2001916, THYMU2001926, THYMU2001989, THYMU2002023, THYMU2002037, THYMU2002080, THYMU2002109, THYMU2002147, THYMU2002154, THYMU2002157, THYMU2002162, THYMU2002177, THYMU2002203, THYMU2002229, THYMU2002242, THYMU2002338, THYMU2002356, THYMU2002376, THYMU2002384, THYMU2002450, THYMU2002490, THYMU2002548, THYMU2002583, THYMU2002695, THYMU2002745, THYMU2002789, THYMU2002792, THYMU2002815, THYMU2002841, THYMU2002852, THYMU2002910, THYMU2002950, THYMU2002983, THYMU2003012, THYMU2003069, THYMU2003107, THYMU2003124, THYMU2003166, THYMU2003232, THYMU2003242, THYMU2003249, THYMU2003270,

[1036] THYMU2003282, THYMU2003287, THYMU2003336, THYMU2003366, THYMU2003397, THYMU2003419, THYMU2003440, THYMU2003446, THYMU2003470, THYMU2003479, THYMU2003499, THYMU2003542, THYMU2003632, THYMU2003650, THYMU2003700, THYMU2003760, THYMU2003803, THYMU2003855, THYMU2003891, THYMU2003907, THYMU2003932, THYMU2003981, THYMU2004003, THYMU2004008, THYMU2004042, THYMU2004108, THYMU2004111, THYMU2004123, THYMU2004139, THYMU2004152, THYMU2004169, THYMU2004320, THYMU2004336, THYMU2004344, THYMU2004356, THYMU2004410, THYMU2004452, THYMU2004508, THYMU2004512, THYMU2004635, THYMU2004639, THYMU2004668, THYMU2004677, THYMU2004688, THYMU2004693, THYMU2004733, THYMU2004835, THYMU2004843, THYMU2004906, THYMU2004916,

[1037] THYMU2004986, THYMU2005001, THYMU2005046, THYMU2005134, THYMU2005156, THYMU2005190, THYMU2005225, THYMU2005240, THYMU2005246, THYMU2005270, THYMU2005283, THYMU2005303, THYMU2005321, THYMU2005356, THYMU2005369, THYMU2005439, THYMU2005480, THYMU2005507, THYMU2005545, THYMU2005546, THYMU2005574, THYMU2005576, THYMU2005748, THYMU2005759, THYMU2005807, THYMU2005815, THYMU2005855, THYMU2005881, THYMU2005948, THYMU2005997, THYMU2006001, THYMU2006048, THYMU2006098, THYMU2006160, THYMU2006170, THYMU2006252, THYMU2006261, THYMU2006277, THYMU2006303, THYMU2006324, THYMU2006350, THYMU2006357, THYMU2006365, THYMU2006420, THYMU2006468, THYMU2006505, THYMU2006610, THYMU2006666, THYMU2006712, THYMU2006813,

[1038] THYMU2006913, THYMU2006946, THYMU2006965, THYMU2007025, THYMU2007036, THYMU2007060, THYMU2007065, THYMU2007095, THYMU2007112, THYMU2007146, THYMU2007179, THYMU2007258, THYMU2007307, THYMU2007308, THYMU2007339, THYMU2007350, THYMU2007384, THYMU2007415, THYMU2007467, THYMU2007493, THYMU2007521, THYMU2007528, THYMU2007530, THYMU2007532, THYMU2007561, THYMU2007571, THYMU2007635, THYMU2007658, THYMU2007667, THYMU2007694, THYMU2007725, THYMU2007729, THYMU2007802, THYMU2007824, THYMU2007854, THYMU2007886, THYMU2007952, THYMU2007969, THYMU2008035, THYMU2008036, THYMU2008049, THYMU2008072, THYMU2008111, THYMU2008145, THYMU2008149, THYMU2008185, THYMU2008191, THYMU2008207, THYMU2008226, THYMU2008282,

[1039] THYMU2008339, THYMU2008350, THYMU2008351, THYMU2008383, THYMU2008452, THYMU2008643, THYMU2008686, THYMU2008691, THYMU2008714, THYMU2008725, THYMU2008727, THYMU2008781, THYMU2008799, THYMU2008876, THYMU2008910, THYMU2008917, THYMU2008928, THYMU2008990, THYMU2008994, THYMU2009023, THYMU2009046, THYMU2009101, THYMU2009104, THYMU2009134, THYMU2009157, THYMU2009181, THYMU2009186, THYMU2009338, THYMU2009425, THYMU2009516, THYMU2009526, THYMU2009546, THYMU2009592, THYMU2009596, THYMU2009658, THYMU2009792, THYMU2009835, THYMU2009906, THYMU2009948, THYMU2010030, THYMU2010041, THYMU2010046, THYMU2010059, THYMU2010082, THYMU2010094, THYMU2010161, THYMU2010192, THYMU2010448, THYMU2010519, THYMU2010637,

[1040] THYMU2010671, THYMU2010699, THYMU2010705, THYMU2010779, THYMU2010816, THYMU2010831, THYMU2010848, THYMU2011053, THYMU2011063, THYMU2011072, THYMU2011096, THYMU2011118, THYMU2011142, THYMU2011183, THYMU2011257, THYMU2011259, THYMU2011295, THYMU2011308, THYMU2011390, THYMU2011431, THYMU2011447, THYMU2011482, THYMU2011538, THYMU2011548, THYMU2011551, THYMU2011564, THYMU2011573, THYMU2011585, THYMU2011621, THYMU2011666, THYMU2011736, THYMU2011785, THYMU2011806, THYMU2011852, THYMU2011875, THYMU2011881, THYMU2011937, THYMU2011939, THYMU2012002, THYMU2012024, THYMU2012073, THYMU2012104, THYMU2012113, THYMU2012273, THYMU2012401, THYMU2012492, THYMU2012507, THYMU2012565, THYMU2012574, THYMU2012631,

[1041] THYMU2012665, THYMU2012690, THYMU2012701, THYMU2012807, THYMU2012826, THYMU2012882, THYMU2012891, THYMU2012902, THYMU2012919, THYMU2013023, THYMU2013047, THYMU2013051, THYMU2013089, THYMU2013136, THYMU2013170, THYMU2013364, THYMU2013386, THYMU2013426, THYMU2013578, THYMU2013648, THYMU2013705, THYMU2013757, THYMU2013779, THYMU2013863, THYMU2013916, THYMU2013950, THYMU2013981, THYMU2014067, THYMU2014068, THYMU2014167, THYMU2014183, THYMU2014204, THYMU2014297, THYMU2014323, THYMU2014327, THYMU2014353, THYMU2014492, THYMU2014500, THYMU2014599, THYMU2014762, THYMU2014777, THYMU2014801, THYMU2014901, THYMU2014923, THYMU2015019, THYMU2015161, THYMU2015316, THYMU2015321, THYMU2015439, THYMU2015441,

[1042] THYMU2015479, THYMU2015762, THYMU2015775, THYMU2015825, THYMU2015918, THYMU2015943, THYMU2015984, THYMU2016113, THYMU2016164, THYMU2016204, THYMU2016219, THYMU2016360, THYMU2016496, THYMU2016523, THYMU2016840, THYMU2016968, THYMU2017008, THYMU2017010, THYMU2017023, THYMU2017085, THYMU2017099, THYMU2017158, THYMU2017162, THYMU2017215, THYMU2017362, THYMU2017366, THYMU2017398, THYMU2017449, THYMU2017479, THYMU2017522, THYMU2017526, THYMU2017601, THYMU2017675, THYMU2017707, THYMU2017831, THYMU2017844, THYMU2017878, THYMU2017948, THYMU2018028, THYMU2018071, THYMU2018126, THYMU2018189, THYMU2018197, THYMU2018384, THYMU2018455, THYMU2018547, THYMU2018565, THYMU2018639, THYMU2018673, THYMU2018721,

[1043] THYMU2018772, THYMU2018819, THYMU2018841, THYMU2018997, THYMU2019021, THYMU2019054, THYMU2019197, THYMU2019210, THYMU2019364, THYMU2019436, THYMU2019442, THYMU2019587, THYMU2019599, THYMU2019686, THYMU2019813, THYMU2020198, THYMU2020289, THYMU2020416, THYMU2020491, THYMU2020499, THYMU2020560, THYMU2020667, THYMU2020830, THYMU2020883, THYMU2020959, THYMU2021361, THYMU2021509, THYMU2021597, THYMU2021684, THYMU2021714, THYMU2022213, THYMU2022289, THYMU2022660, THYMU2022854, THYMU2022922, THYMU2023209, THYMU2023264, THYMU2023576, THYMU2023711, THYMU2023900, THYMU2023943, THYMU2023967, THYMU2024071, THYMU2024121, THYMU2024185, THYMU2024207, THYMU2024616, THYMU2024684, THYMU2024748, THYMU2025042,

[1044] THYMU2025189, THYMU2025319, THYMU2025325, THYMU2025406, THYMU2025557, THYMU2025572, THYMU2025707, THYMU2025849, THYMU2025909, THYMU2025939, THYMU2026182, THYMU2026350, THYMU2026530, THYMU2026531, THYMU2026835, THYMU2026904, THYMU2027053, THYMU2027168, THYMU2027249, THYMU2027282, THYMU2027497, THYMU2027695, THYMU2027734, THYMU2027894, THYMU2027975, THYMU2027996, THYMU2028041, THYMU2028368, THYMU2028379, THYMU2028394, THYMU2028412, THYMU2028629, THYMU2028632, THYMU2028724, THYMU2028739, THYMU2028942, THYMU2028978, THYMU2029134, THYMU2029578, THYMU2029676, THYMU2029688, THYMU2029788, THYMU2030068, THYMU2030226, THYMU2030264, THYMU2030462, THYMU2030543, THYMU2030637, THYMU2030655, THYMU2030796,

[1045] THYMU2030912, THYMU2030982, THYMU2031046, THYMU2031139, THYMU2031218, THYMU2031249, THYMU2031258, THYMU2031341, THYMU2031368, THYMU2031579, THYMU2031847, THYMU2031890, THYMU2031994, THYMU2032014, THYMU2032035, THYMU2032080, THYMU2032150, THYMU2032358, THYMU2032437, THYMU2032601, THYMU2032655, THYMU2032696, THYMU2032715, THYMU2032732, THYMU2032825, THYMU2032976, THYMU2033053, THYMU2033059, THYMU2033070, THYMU2033079, THYMU2033085, THYMU2033104, THYMU2033227, THYMU2033263, THYMU2033308, THYMU2033401, THYMU2033583, THYMU2033755, THYMU2033787, THYMU2033816, THYMU2034182, THYMU2034279, THYMU2034314, THYMU2034338, THYMU2034374, THYMU2034647, THYMU2034917, THYMU2035064, THYMU2035078, THYMU2035101,

[1046] THYMU2035319, THYMU2035321, THYMU2035388, THYMU2035400, THYMU2035554, THYMU2035710, THYMU2035735, THYMU2036058, THYMU2036105, THYMU2036207, THYMU2036215, THYMU2036252, THYMU2036265, THYMU2036366, THYMU2036459, THYMU2036461, THYMU2036604, THYMU2036653, THYMU2037081, THYMU2037208, THYMU2037226, THYMU2037233, THYMU2037234, THYMU2037348, THYMU2037406, THYMU2037965, THYMU2038058, THYMU2038189, THYMU2038199, THYMU2038220, THYMU2038301, THYMU2038369, THYMU2038389, THYMU2038615, THYMU2038636, THYMU2038739, THYMU2038772, THYMU2038797, THYMU2038906, THYMU2039305, THYMU2039315, THYMU2039334, THYMU2039350, THYMU2039411, THYMU2039634, THYMU2039719, THYMU2039780, THYMU2039788, THYMU2039989, THYMU2040029,

[1047] THYMU2040110, THYMU2040114, THYMU2040140, THYMU2040412, THYMU2040427, THYMU2040824, THYMU2040925, THYMU2041007, THYMU2041015, THYMU2041252, THYMU3000028, THYMU3000036, THYMU3000037, THYMU3000082, THYMU3000194, THYMU3000224, THYMU3000269, THYMU3000306, THYMU3000360, THYMU3000390, THYMU3000420, THYMU3000490, THYMU3000504, THYMU3000542, THYMU3000655, THYMU3000776, THYMU3000826, THYMU3000841, THYMU3001077, THYMU3001082, THYMU3001083, THYMU3001133, THYMU3001151, THYMU3001379, THYMU3001472, THYMU3001593, THYMU3001883, THYMU3001939, THYMU3001991, THYMU3002452, THYMU3002578, THYMU3002661, THYMU3003007, THYMU3003092, THYMU3003212, THYMU3003309, THYMU3003350, THYMU3003403, THYMU3003565, THYMU3003763,

[1048] THYMU3003865, THYMU3003958, THYMU3003965, THYMU3004157, THYMU3004628, THYMU3004632, THYMU3004835, THYMU3004866, THYMU3005050, THYMU3005378, THYMU3005407, THYMU3005415, THYMU3005427, THYMU3005482, THYMU3005491, THYMU3005629, THYMU3005696, THYMU3006118, THYMU3006132, THYMU3006168, THYMU3006172, THYMU3006371, THYMU3006485, THYMU3006640, THYMU3006767, THYMU3006811, THYMU3006963, THYMU3007137, THYMU3007308, THYMU3007368, THYMU3007423, THYMU3007559, THYMU3007845, THYMU3008060, THYMU3008105, THYMU3008136, THYMU3008171, THYMU3008216, THYMU3008436, THYMU3008672, THYMU3008883, THYMU3008935, THYMU3009006, THYMU3009255, THYMU3009391, THYMU3009643, THYMU3009755, THYMU3010247, THYMU3011012, THYMU3011081,

[1049] THYMU3011244, THYMU3011360, THYMU3011534, THYMU3011543, THYMU3011556, THYMU3011717, THYMU3011827, THYMU3012402, THYMU3012907, THYMU3012983, THYMU3013114, THYMU3013197, THYMU3013241, THYMU3013386, THYMU3013470, THYMU3013785, THYMU3013897, THYMU3014038, THYMU3014173, THYMU3014372, THYMU3014555, THYMU3014620, THYMU3014701, THYMU3015042, THYMU3015457, THYMU3015571, THYMU3015592, THYMU3015625, THYMU3015647, THYMU3015759, THYMU3015962, THYMU3016022, THYMU3016518, THYMU3016797, THYMU3016822, THYMU3016850, THYMU3017562, THYMU3017688, THYMU3017689, THYMU3017761, THYMU3018151, THYMU3018896, THYMU3019095, THYMU3019476, THYMU3019605, THYMU3019916, THYMU3020221, THYMU3020595, THYMU3020713, THYMU3020856,

[1050] THYMU3020869, THYMU3020970, THYMU3021404, THYMU3021586, THYMU3021755, THYMU3021900, THYMU3022211, THYMU3022434, THYMU3022528, THYMU3022668, THYMU3022982, THYMU3023107, THYMU3023211, THYMU3023216, THYMU3023394, THYMU3023400, THYMU3023797, THYMU3024164, THYMU3024339, THYMU3024602, THYMU3024879, THYMU3025118, THYMU3025313, THYMU3025642, THYMU3025683, THYMU3025772, THYMU3025865, THYMU3026000, THYMU3026350, THYMU3026479, THYMU3026532, THYMU3026783, THYMU3026869, THYMU3027251, THYMU3027540, THYMU3027655, THYMU3027671, THYMU3028075, THYMU3028410, THYMU3028461, THYMU3028702, THYMU3029188, THYMU3029318, THYMU3029421, THYMU3029719, THYMU3029774, THYMU3029832, THYMU3030072, THYMU3030231, THYMU3030706,

[1051] THYMU3030710, THYMU3030752, THYMU3031146, THYMU3031402, THYMU3031610, THYMU3031612, THYMU3031868, THYMU3031878, THYMU3032032, THYMU3032798, THYMU3032867, THYMU3033402, THYMU3033630, THYMU3033649, THYMU3033754, THYMU3033759, THYMU3034078, THYMU3034099, THYMU3034453, THYMU3034616, THYMU3034671, THYMU3034853, THYMU3034867, THYMU3034983, THYMU3036200, THYMU3036310, THYMU3036934, THYMU3036953, THYMU3037052, THYMU3037192, THYMU3037617, THYMU3037772, THYMU3037827, THYMU3037836, THYMU3037856, THYMU3037867, THYMU3037909, THYMU3037980, THYMU3038158, THYMU3038167, THYMU3038214, THYMU3038266, THYMU3038328, THYMU3038347, THYMU3038375, THYMU3038603, THYMU3038687, THYMU3038759, THYMU3038879, THYMU3038970,

[1052] THYMU3039807, THYMU3039846, THYMU3040068, THYMU3040126, THYMU3040146, THYMU3040168, THYMU3040172, THYMU3040725, THYMU3040746, THYMU3040816, THYMU3040829, THYMU3040830, THYMU3040986, THYMU3041354, THYMU3041386, THYMU3041428, THYMU3041573, THYMU3041603, THYMU3041736, THYMU3041918, THYMU3042075, THYMU3042321, THYMU3042372, THYMU3042758, THYMU3042929, THYMU3043200, THYMU3043327, THYMU3043482, THYMU3043597, THYMU3043688, THYMU3043779, THYMU3043883, THYMU3043993, THYMU3044175, THYMU3044441, THYMU3044445, THYMU3045510, THYMU3045673, THYMU3045692, THYMU3045704, THYMU3046140, THYMU3046350, THYMU3046360, THYMU3046856, THYMU3047115, THYMU3047144, THYMU3047156, THYMU3047366, THYMU3047513, THYMU3047542,

[1053] THYMU3047760, THYMU3047891, TKIDN1000001, TKIDN1.000044, TKIDN1000062, TKIDN1000066, TKIDN1000164, TKIDN1000171, TKIDN1000192, TKIDN2000127, TKIDN2000240, TKIDN2000246, TKIDN2000319, TKIDN2000464, TKIDN2000521, TKIDN2000701, TKIDN2001529, TKIDN2001662, TKIDN2002318, TKIDN2002329, TKIDN2002424, TKIDN2002632, TKIDN2002738, TKIDN2003044, TKIDN2003059, TKIDN2003062, TKIDN2003078, TKIDN2003366, TKIDN2003396, TKIDN2003413, TKIDN2003597, TKIDN2003601, TKIDN2004386, TKIDN2004458, TKIDN2005721, TKIDN2005934, TKIDN2005947, TKIDN2005956, TKIDN2006525, TKIDN2006761, TKIDN2006852, TKIDN2007605, TKIDN2007667, TKIDN2007828, TKIDN2008176, TKIDN2008778, TKIDN2009092, TKIDN2009330, TKIDN2009481, TKIDN2009641,

[1054] TKIDN2009794, TKIDN2009889, TKIDN2010200, TKIDN2010232, TKIDN2010278, TKIDN2010602, TKIDN2010812, TKIDN2010934, TKIDN2011051, TKIDN2011160, TKIDN2011289, TKIDN2011324, TKIDN2012034, TKIDN2012771, TKIDN2012824, TKIDN2013134, TKIDN2013287, TKIDN2014570, TKIDN2014757, TKIDN2014771, TKIDN2014964, TKIDN2015025, TKIDN2015071, TKIDN2015161, TKIDN2015263, TKIDN2015285, TKIDN2015423, TKIDN2016309, TKIDN2016399, TKIDN2016846, TKIDN2018926, TKIDN2019116, TLIVE2000023, TLIVE2000142, TLIVE2000292, TLIVE2000762, TLIVE2000979, TLIVE2001327, TLIVE2001616, TLIVE2001684, TLIVE2001828, TLIVE2001927, TLIVE2002046, TLIVE2002336, TLIVE2002338, TLIVE2002562, TLIVE2002690, TLIVE2002882, TLIVE2003197, TLIVE2003200,

[1055] TLIVE2003225, TLIVE2003381, TLIVE2003737, TLIVE2003961, TLIVE2003970, TLIVE2004110, TLIVE2004320, TLIVE2004331, TLIVE2004601, TLIVE2005180, TLIVE2005390, TLIVE2005516, TLIVE2005731, TLIVE2005866, TLIVE2006236, TLIVE2006359, TLIVE2006529, TLIVE2006621, TLIVE2006733, TLIVE2007000, TLIVE2007016, TLIVE2007132, TLIVE2007192, TLIVE2007528, TLIVE2007607, TLIVE2007736, TLIVE2007816, TLIVE2007919, TLIVE2008083, TLIVE2008213, TLIVE2008221, TLIVE2008229, TLIVE2008712, TLIVE2008797, TLIVE2009087, TLIVE2009163, TLIVE2009489, TLIVE2009541, TLUNG2000179, TOVAR2000476, TOVAR2000575, TOVAR2000649, TOVAR2000904, TOVAR2001281, TOVAR2001556, TOVAR2001730, TOVAR2002247, TOVAR2002514, TOVAR2002549, TOVAR2002800,

[1056] TRACH1000011, TRACH1000018, TRACH1000030, TRACH1000038, TRACH1000057, TRACH1000063, TRACH1000074, TRACH1000100, TRACH1000106, TRACH1000125, TRACH1000140, TRACH1000144, TRACH1000181, TRACH1000193, TRACH1000205, TRACH1000212, TRACH1000240, TRACH2000002, TRACH2000015, TRACH2000024, TRACH2000032, TRACH2000045, TRACH2000081, TRACH2000083, TRACH2000148, TRACH2000185, TRACH2000196, TRACH2000235, TRACH2000237, TRACH2000243, TRACH2000250, TRACH2000259, TRACH2000272, TRACH2000282, TRACH2000287, TRACH2000289, TRACH2000306, TRACH2000312, TRACH2000336, TRACH2000359, TRACH2000393, TRACH2000411, TRACH2000420, TRACH2000461, TRACH2000472, TRACH2000496, TRACH2000497, TRACH2000502, TRACH2000522, TRACH2000559,

[1057] TRACH2000660, TRACH2000665, TRACH2000675, TRACH2000677, TRACH2000702, TRACH2000703, TRACH2000767, TRACH2000775, TRACH2000780, TRACH2000807, TRACH2000862, TRACH2000873, TRACH2000894, TRACH2000898, TRACH2000920, TRACH2000923, TRACH2000926, TRACH2000944, TRACH2000959, TRACH2000972, TRACH2000981, TRACH2000986, TRACH2001037, TRACH2001060, TRACH2001085, TRACH2001101, TRACH2001109, TRACH2001121, TRACH2001147, TRACH2001154, TRACH2001188, TRACH2001192, TRACH2001249, TRACH2001275, TRACH2001314, TRACH2001335, TRACH2001339, TRACH2001341, TRACH2001347, TRACH2001395, TRACH2001400, TRACH2001403, TRACH2001416, TRACH2001428, TRACH2001432, TRACH2001443, TRACH2001463, TRACH2001474, TRACH2001478, TRACH2001523,

[1058] TRACH2001525, TRACH2001532, TRACH2001549, TRACH2001592, TRACH2001596, TRACH2001612, TRACH2001621, TRACH2001646, TRACH2001651, TRACH2001684, TRACH2001810, TRACH2001898, TRACH2001933, TRACH2001968, TRACH2001996, TRACH2002043, TRACH2002054, TRACH2002092, TRACH2002100, TRACH2002138, TRACH2002333, TRACH2002537, TRACH2002664, TRACH2002784, TRACH2002803, TRACH2002840, TRACH2002847, TRACH2002853, TRACH2002862, TRACH2002954, TRACH2002960, TRACH2002988, TRACH2003070, TRACH2003272, TRACH2003323, TRACH2003347, TRACH2003484, TRACH2003516, TRACH2003605, TRACH2003736, TRACH2003759, TRACH2003941, TRACH2004039, TRACH2004054, TRACH2004087, TRACH2004109, TRACH2004170, TRACH2004183, TRACH2004251, TRACH2004292,

[1059] TRACH2004336, TRACH2004399, TRACH2004428, TRACH2004458, TRACH2004499, TRACH2004521, TRACH2004570, TRACH2004845, TRACH2004887, TRACH2004950, TRACH2005004, TRACH2005017, TRACH2005066, TRACH2005159, TRACH2005314, TRACH2005444, TRACH2005541, TRACH2005666, TRACH2005698, TRACH2005720, TRACH2005769, TRACH2005796, TRACH2005800, TRACH2006015, TRACH2006049, TRACH2006097, TRACH2006194, TRACH2006327, TRACH2006331, TRACH2006378, TRACH2006387, TRACH2006528, TRACH2006670, TRACH2006762, TRACH2006866, TRACH2006870, TRACH2006918, TRACH2007059, TRACH2007324, TRACH2007358, TRACH2007483, TRACH2007542, TRACH2007577, TRACH2007674, TRACH2007676, TRACH2007688, TRACH2007733, TRACH2007754, TRACH2007816, TRACH2007894,

[1060] TRACH2007969, TRACH2007988, TRACH2008081, TRACH2008112, TRACH2008113, TRACH2008127, TRACH2008130, TRACH2008278, TRACH2008300, TRACH2008472, TRACH2008478, TRACH2008540, TRACH2008583, TRACH2008597, TRACH2008716, TRACH2008820, TRACH2008891, TRACH200892.1, TRACH2009006, TRACH2009060, TRACH20091.07, TRACH2009123, TRACH2009268, TRACH2009291, TRACH2009310, TRACH2009340, TRACH2009348, TRACH2009358, TRACH2009661, TRACH2009730, TRACH2009743, TRACH2009754, TRACH2009851, TRACH2009862, TRACH2009934, TRACH2010159, TRACH2010218, TRACH2010251, TRACH2010272, TRACH2010317, TRACH2010419, TRACH2010451, TRACH2010505, TRACH2010587, TRACH2010600, TRACH2010634, TRACH2010639, TRACH2010677, TRACH2010698, TRACH2010771,

[1061] TRACH2010824, TRACH2010883, TRACH2010965, TRACH2010974, TRACH2011057, TRACH2011093, TRACH2011290, TRACH2011293, TRACH2011302, TRACH2011500, TRACH2011574, TRACH2011894, TRACH2011956, TRACH2012000, TRACH2012138, TRACH2012242, TRACH2012298, TRACH2012370, TRACH2012376, TRACH2012387, TRACH2012497, TRACH2012536, TRACH2012562, TRACH2012742, TRACH2012811, TRACH2012823, TRACH2012918, TRACH2013081, TRACH2013123, TRACH2013265, TRACH2013369, TRACH2013450, TRACH2013495, TRACH2013552, TRACH2013585, TRACH2013671, TRACH2013726, TRACH2013902, TRACH2013928, TRACH2013982, TRACH2013991, TRACH2014018, TRACH2014045, TRACH2014046, TRACH2014077, TRACH2014082, TRACH2014268, TRACH2014284, TRACH2014337, TRACH2014356,

[1062] TRACH2014371, TRACH2014442, TRACH2014483, TRACH2014495, TRACH2014544, TRACH2014573, TRACH2014725, TRACH2014760, TRACH2014815, TRACH2014839, TRACH2014938, TRACH2014950, TRACH2014972, TRACH2014974, TRACH2014997, TRACH2015180, TRACH2015243, TRACH2015316, TRACH2015381, TRACH2015486, TRACH2015654, TRACH2015823, TRACH2015939, TRACH2015987, TRACH2016080, TRACH2016131, TRACH2016286, TRACH2016317, TRACH2016347, TRACH2016380, TRACH2016384, TRACH2016410, TRACH2016481, TRACH2016498, TRACH2016533, TRACH2016551, TRACH2016554, TRACH2016651, TRACH2016690, TRACH2016709, TRACH2016722, TRACH2016835, TRACH2016980, TRACH2017086, TRACH2017368, TRACH2017498, TRACH2017609, TRACH2017949, TRACH2017965, TRACH2017980,

[1063] TRACH2018034, TRACH2018084, TRACH2018262, TRACH2018273, TRACH2018278, TRACH2018317, TRACH2018345, TRACH2018380, TRACH2018446, TRACH2018449, TRACH2018512, TRACH2018646, TRACH2018663, TRACH2018718, TRACH2018835, TRACH2018882, TRACH2018914, TRACH2018950, TRACH2019024, TRACH2019046, TRACH2019080, TRACH2019151, TRACH2019154, TRACH2019176, TRACH2019248, TRACH2019309, TRACH2019425, TRACH2019473, TRACH2019602, TRACH2019661, TRACH2019672, TRACH2019673, TRACH2019844, TRACH2019879, TRACH2020048, TRACH2020336, TRACH2020525, TRACH2021398, TRACH2021622, TRACH2021635, TRACH2021964, TRACH2022042, TRACH2022113, TRACH2022253, TRACH2022425, TRACH2022553, TRACH2022649, TRACH2022839, TRACH2023246, TRACH2023299,

[1064] TRACH2023306, TRACH2023416, TRACH2023479, TRACH2023684, TRACH2023860, TRACH2023876, TRACH2024139, TRACH2024187, TRACH2024271, TRACH2024293, TRACH2024408, TRACH2024512, TRACH2024559, TRACH2024647, TRACH2024651, TRACH2024730, TRACH2024735, TRACH2024749, TRACH2024821, TRACH2025057, TRACH2025084, TRACH2025155, TRACH2025224, TRACH2025344, TRACH2025379, TRACH2025507, TRACH2025535, TRACH2025569, TRACH2025705, TRACH2025749, TRACH2025753, TRACH2025810, TRACH2025853, TRACH2025911, TRACH2025932, TRACH3000014, TRACH3000017, TRACH3000043, TRACH3000134, TRACH3000180, TRACH3000342, TRACH3000420, TRACH3000515, TRACH3000530, TRACH3000548, TRACH3000558, TRACH3000586, TRACH3000692, TRACH3000780, TRACH3000892,

[1065] TRACH3000926, TRACH3001119, TRACH3001443, TRACH3001550, TRACH3001759, TRACH3002064, TRACH3002107, TRACH3002168, TRACH3002188, TRACH3002245, TRACH3002293, TRACH3002533, TRACH3002561, TRACH3002567, TRACH3002605, TRACH3002650, TRACH3002752, TRACH3002866, TRACH3002871, TRACH3002876, TRACH3002890, TRACH3003009, TRACH3003037, TRACH3003357, TRACH3003379, TRACH3003547, TRACH3003586, TRACH3003683, TRACH3003780, TRACH3003805, TRACH3003832, TRACH3003872, TRACH3004068, TRACH3004113, TRACH3004288, TRACH3004303, TRACH3004412, TRACH3004424, TRACH3004456, TRACH3004537, TRACH3004596, TRACH3004651, TRACH3004652, TRACH3004671, TRACH3004721, TRACH3004747, TRACH3004760, TRACH3004783, TRACH3004786, TRACH3004840,

[1066] TRACH3004931, TRACH3004934, TRACH3005072, TRACH3005085, TRACH3005102, TRACH3005173, TRACH3005191, TRACH3005211, TRACH3005274, TRACH3005479, TRACH3005549, TRACH3005699, TRACH3005702, TRACH3005808, TRACH3005852, TRACH3005896, TRACH3006038, TRACH3006149, TRACH3006228, TRACH3006264, TRACH3006336, TRACH3006379, TRACH3006392, TRACH3006395, TRACH3006397, TRACH3006412, TRACH3006470, TRACH3006589, TRACH3006626, TRACH3006699, TRACH3006717, TRACH3006800, TRACH3006889, TRACH3006985, TRACH3007097, TRACH3007268, TRACH3007274, TRACH3007277, TRACH3007391, TRACH3007541, TRACH3007595, TRACH3007625, TRACH3007627, TRACH3007689, TRACH3007766, TRACH3007866, TRACH3007995, TRACH3008042, TRACH3008061, TRACH3008093,

[1067] TRACH3008201, TRACH3008508, TRACH3008535, TRACH3008629, TRACH3008632, TRACH3008688, TRACH3008697, TRACH3008713, TRACH3008887, TRACH3008902, TRACH3008990, TRACH3009001, TRACH3009008, TRACH3009059, TRACH3009061, TRACH3009148, TRACH3009455, TRACH3009701, TRACH3009715, TRACH3009894, TRACH3009956, TRACH3010079, TRACH3010167, TRACH3010331, TRACH3010342, TRACH3010382, TRACH3010757, TRACH3010901, TRACH3011004, TRACH3011082, TRACH3011184, TRACH3011282, TRACH3011313, TRACH3011454, TRACH3011485, TRACH3011503, TRACH3011538, TRACH3011542, TRACH3012106, TRACH3012161, TRACH3012232, TRACH3012261, TRACH3012445, TRACH3012460, TRACH3012659, TRACH3012718, TRACH3012864, TRACH3012891, TRACH3012942, TRACH3013043,

[1068] TRACH3013072, TRACH3013426, TRACH3013454, TRACH3013558, TRACH3013684, TRACH3013693, TRACH3013700, TRACH3013766, TRACH3013900, TRACH3013926, TRACH3014063, TRACH3014183, TRACH3014215, TRACH3014316, TRACH3014415, TRACH3014580, TRACH3014641, TRACH3014885, TRACH3015136, TRACH3015336, TRACH3015346, TRACH3015354, TRACH3015467, TRACH3015626, TRACH3015951, TRACH3016051, TRACH3016120, TRACH3016264, TRACH3016277, TRACH3016368, TRACH3016455, TRACH3016614, TRACH3016805, TRACH3016992, TRACH3017171, TRACH3017409, TRACH3017934, TRACH3018108, TRACH3018191, TRACH3018240, TRACH3018261, TRACH3018519, TRACH3018524, TRACH3018606, TRACH3018783, TRACH3018907, TRACH3018933, TRACH3018943, TRACH3019018, TRACH3019058,

[1069] TRACH3019142, TRACH3019290, TRACH3019347, TRACH3019370, TRACH3019447, TRACH3019598, TRACH3019621, TRACH3019662, TRACH3019807, TRACH3019924, TRACH3019977, TRACH3020137, TRACH3020410, TRACH3020563, TRACH3020605, TRACH3020750, TRACH3020769, TRACH3020928, TRACH3020930, TRACH3021023, TRACH3021066, TRACH3021212, TRACH3021335, TRACH3021373, TRACH3021544, TRACH3021778, TRACH3021834, TRACH3021883, TRACH3022170, TRACH3022198, TRACH3022296, TRACH3022482, TRACH3022732, TRACH3022758, TRACH3022875, TRACH3022910, TRACH3022960, TRACH3023063, TRACH3023203, TRACH3023242, TRACH3023373, TRACH3023516, TRACH3023752, TRACH3023945, TRACH3023960, TRACH3024020, TRACH3024081, TRACH3024342, TRACH3024423, TRACH3024428,

[1070] TRACH3024512, TRACH3024671, TRACH3024823, TRACH3025302, TRACH3025316, TRACH3025346, TRACH3025520, TRACH3026148, TRACH3026283, TRACH3026299, TRACH3026303, TRACH3026542, TRACH3026650, TRACH3026676, TRACH3026744, TRACH3026949, TRACH3027229, TRACH3027527, TRACH3027681, TRACH3027701, TRACH3027885, TRACH3028031, TRACH3028164, TRACH3028180, TRACH3028195, TRACH3028441, TRACH3028597, TRACH3028678, TRACH3028837, TRACH3028847, TRACH3028855, TRACH3029139, TRACH3029329, TRACH3029451, TRACH3029462, TRACH3029520, TRACH3029592, TRACH3029629, TRACH3029665, TRACH3029670, TRACH3029800, TRACH3030111, TRACH3030130, TRACH3030176, TRACH3030252, TRACH3030725, TRACH3030855, TRACH3030883, TRACH3031316, TRACH3031400,

[1071] TRACH3031463, TRACH3031479, TRACH3031518, TRACH3031660, TRACH3031678, TRACH3031936, TRACH3032044, TRACH3032065, TRACH3032150, TRACH3032372, TRACH3032480, TRACH3032570, TRACH3032755, TRACH3032827, TRACH3032873, TRACH3033535, TRACH3033680, TRACH3033868, TRACH3034145, TRACH3034414, TRACH3034488, TRACH3034680, TRACH3034731, TRACH3034745, TRACH3034762, TRACH3034903, TRACH3035187, TRACH3035199, TRACH3035235, TRACH3035451, TRACH3035482, TRACH3035526, TRACH3036004, TRACH3036103, TRACH3036193, TRACH3036207, TRACH3036278, TRACH3036309, TRACH3036456, TRACH3036609, TRACH3036638, TRACH3036683, TRACH3036750, TRACH3036792, TRACH3036843, TRACH3036897, TRACH3036932, TRACH3036942, TRACH3036997, TRACH3037063,

[1072] TRACH3037067, TRACH3037267, TRACH3037288, TRACH3037505, TRACH3037573, TRACH3037696, TRACH3037897, TRACH3038086, TRACH3038399, TSTOM1000135, TSTOM1000186, TSTOM2000139, TSTOM2000235, TSTOM2000315, TSTOM2000442, TSTOM2000553, TSTOM2000569, TSTOM2000588, TSTOM2001195, TSTOM2001274, TSTOM2001571, TSTOM2001996, TSTOM2002265, TSTOM2002505, TSTOM2002561, TSTOM2002611, TSTOM2002672, TSTOM2002682, TUTER1000014, TUTER1000122, TUTER1000137, TUTER2000057, TUTER2000283, TUTER2000425, TUTER2000904, TUTER2000916, TUTER2001286, TUTER2001341, TUTER2001387, TUTER2001433, TUTER2001461, TUTER2002028, TUTER2002074, TUTER2002158, TUTER2002228, TUTER2002323, TUTER2002356, TUTER2002729, UMVEN1000122, UMVEN1000143,

[1073] UMVEN1000156, UMVEN2000046, UMVEN2000069, UMVEN2000121, UMVEN2000152, UMVEN2000354, UMVEN2000453, UTERU1000008, UTERU1000015, UTERU1000024, UTERU1000031, UTERU1000032, UTERU1000057, UTERU1000065, UTERU1000077, UTERU1000093, UTERU1000096, UTERU1000106, UTERU1000109, UTERU1000131, UTERU1000138, UTERU1000148, UTERU1000160, UTERU1000183, UTERU1000187, UTERU1000192, UTERU1000249, UTERU1000337, UTERU1000339, UTERU1000384, UTERU2000023, UTERU2000047, UTERU2000074, UTERU2000099, UTERU2000154, UTERU2000197, UTERU2000218, UTERU2000238, UTERU2000243, UTERU2000260, UTERU2000300, -UTERU2000329, UTERU2000332, UTERU2000338, UTERU2000349, UTERU2000377, UTERU2000393, UTERU2000418, UTERU2000465, UTERU2000517,

[1074] UTERU2000524, UTERU2000537, UTERU2000539, UTERU2000541, UTERU2000542, UTERU2000546, UTERU2000550, UTERU2000569, UTERU2000607, UTERU2000629, UTERU2000649, UTERU2000663, UTERU2000696, UTERU2000794, UTERU2000830, UTERU2000844, UTERU2000922, UTERU2000925, UTERU2001024, UTERU2001110, UTERU2001176, UTERU2001281, UTERU2001389, UTERU2001409, UTERU2001412, UTERU2001504, UTERU2001658, UTERU2001747, UTERU2001876, UTERU2002001, UTERU2002011, UTERU2002176, UTERU2002198, UTERU2002332, UTERU2002410, UTERU2002473, UTERU2002547, UTERU2002662, UTERU2002693, UTERU2002733, UTERU2002736, UTERU2002737, UTERU2002826, UTERU2002841, UTERU2002964, UTERU2002993, UTERU2003035, UTERU2003057, UTERU2003126, UTERU2003135,

[1075] UTERU2003321, UTERU2003399, UTERU2003411, UTERU2003456, UTERU2003577, UTERU2003704, UTERU2003926, UTERU2003973, UTERU2004015, UTERU2004039, UTERU2004061, UTERU2004073, UTERU2004163, UTERU2004197, UTERU2004299, UTERU2004461, UTERU2004520, UTERU2004564, UTERU2004664, UTERU2004688, UTERU2004698, UTERU2004807, UTERU2004861, UTERU2004929, UTERU2005004, UTERU2005050, UTERU2005069, UTERU2005074, UTERU2005179, UTERU2005346, UTERU2005354, UTERU2005446, UTERU2005449, UTERU2005450, UTERU2005533, UTERU2005593, UTERU2005601, UTERU2005621, UTERU2005664, UTERU2005822, UTERU2005903, UTERU2005905, UTERU2006103, UTERU2006115, UTERU2006137, UTERU2006182, UTERU2006412, UTERU2006429, UTERU2006486, UTERU2006524,

[1076] UTERU2006547, UTERU2006568, UTERU2006593, UTERU2006643, UTERU2006651, UTERU2006705, UTERU2006899, UTERU2007004, UTERU2007075, UTERU2007081, UTERU2007128, UTERU2007253, UTERU2007267, UTERU2007444, UTERU2007499, UTERU2007639, UTERU2007724, UTERU2007942, UTERU2008018, UTERU2008019, UTERU2008027, UTERU2008040, UTERU2008077, UTERU2008130, UTERU2008302, UTERU2008347, UTERU2008426, UTERU2008516, UTERU2008561, UTERU2008653, UTERU2008705, UTERU2008707, UTERU2008747, UTERU2008785, UTERU2008845, UTERU2008901, UTERU2008930, UTERU2008939, UTERU2008962, UTERU2009094, UTERU2009120, UTERU2009131, UTERU2009147, UTERU2009206, UTERU2009283, UTERU2009414, UTERU2009435, UTERU2009483, UTERU2009510, UTERU2009538,

[1077] UTERU2009540, UTERU2009776, UTERU2009904, UTERU2009951, UTERU2009972, UTERU2010115, UTERU2010124, UTERU2010164, UTERU2010226, UTERU2010231, UTERU2010304, UTERU2010320, UTERU2010431, UTERU2010525, UTERU2010651, UTERU2010724, UTERU2010747, UTERU2011195, UTERU2011199, UTERU2011220, UTERU2011261, UTERU2011287, UTERU2011410, UTERU2011574, UTERU2011621, UTERU2011657, UTERU2011741, UTERU2011806, UTERU2011811, UTERU2011897, UTERU2011906, UTERU2011962, UTERU2011968, UTERU2012031, UTERU2012101, UTERU2012114, UTERU2012252, UTERU2012286, UTERU2012333, UTERU2012407, UTERU2012526, UTERU2012581, UTERU2012610, UTERU2012615, UTERU2012688, UTERU2012703, UTERU2012715, UTERU2012741, UTERU2012767, UTERU2012786,

[1078] UTERU2012856, UTERU2012890, UTERU2012938, UTERU2012976, UTERU2013048, UTERU2013078, UTERU2013231, UTERU2013262, UTERU2013280, UTERU2013322, UTERU2013483, UTERU2013491, UTERU2013502, UTERU2013586, UTERU2013926, UTERU2013976, UTERU2014001, UTERU2014024, UTERU2014167, UTERU2014223, UTERU2014398, UTERU2014464, UTERU2014548, UTERU2014601, UTERU2014631, UTERU2014668, UTERU2014678, UTERU2014728, UTERU2014998, UTERU2015062, UTERU2015087, UTERU2015108, UTERU2015190, UTERU2015198, UTERU2015202, UTERU2015405, UTERU2015640, UTERU2015830, UTERU2015880, UTERU2016147, UTERU2016157, UTERU2016426, UTERU2016464, UTERU2016669, UTERU2016757, UTERU2016761, UTERU2016799, UTERU2016822, UTERU2016896, UTERU2016902,

[1079] UTERU2016979, UTERU2016981, UTERU2017123, UTERU2017303, UTERU2017421, UTERU2017492, UTERU2017613, UTERU2017623, UTERU2017632, UTERU2017761, UTERU2017762, UTERU2017810, UTERU2017988, UTERU2018127, UTERU2018180, UTERU2018200, UTERU2018333, UTERU2018364, UTERU2018514, UTERU2018522, UTERU2018523, UTERU2018544, UTERU2018566, UTERU2018609, UTERU2018674, UTERU2018712, UTERU2018784, UTERU2018789, UTERU2018811, UTERU2018867, UTERU2018881, UTERU2018884, UTERU2018955, UTERU2019005, UTERU2019038, UTERU2019096, UTERU2019163, UTERU2019257, UTERU2019453, UTERU2019491, UTERU2019534, UTERU2019681, UTERU2019706, UTERU2019710, UTERU2019940, UTERU2019959, UTERU2019964, UTERU2020226, UTERU2020242, UTERU2020292,

[1080] UTERU2020351, UTERU2020491, UTERU2020718, UTERU2021163, UTERU2021380, UTERU2021649, UTERU2021820, UTERU2022020, UTERU2022773, UTERU2022955, UTERU2022981, UTERU2023039, UTERU2023262, UTERU2023550, UTERU2023651, UTERU2023687, UTERU2023712, UTERU2023941, UTERU2024002, UTERU2024042, UTERU2024141, UTERU2024481, UTERU2024656, UTERU2024758, UTERU2024820, UTERU2024881, UTERU2024969, UTERU2025025, UTERU2025041, UTERU2025301, UTERU2025366, UTERU2025415, UTERU2025579, UTERU2025645, UTERU2025891, UTERU2026025, UTERU2026090, UTERU2026142, UTERU2026203, UTERU2026775, UTERU2027023, UTERU2027369, UTERU2027591, UTERU2027616, UTERU2027941, UTERU2028377, UTERU2028734, UTERU2029503, UTERU2029660, UTERU2029742,

[1081] UTERU2029953, UTERU2030213, UTERU2030270, UTERU2030280, UTERU2031060, UTERU2031084, UTERU2031268, UTERU2031295, UTERU2031521, UTERU2031611, UTERU2031703, UTERU2031834, UTERU2031851, UTERU2032075, UTERU2032220, UTERU2032279, UTERU2032726, UTERU2033172, UTERU2033375, UTERU2033382, UTERU2033420, UTERU2033530, UTERU2033577, UTERU2034053, UTERU2034147, UTERU2034695, UTERU2035114, UTERU2035187, UTERU2035231, UTERU2035306, UTERU2035323, UTERU2035328, UTERU2035331, UTERU2035452, UTERU2035469, UTERU2035503, UTERU2035745, UTERU2035908, UTERU2035926, UTERU2035978, UTERU2036089, UTERU2036347, UTERU2036507, UTERU2036512, UTERU2036530, UTERU2036623, UTERU2036690, UTERU2037224, UTERU2037361, UTERU2037423,

[1082] UTERU2037577, UTERU2037674, UTERU2037791, UTERU2037843, UTERU2038171, UTERU2038251, UTERU3000226, UTERU3000298, UTERU3000402, UTERU3000645, UTERU3000665, UTERU3000670, UTERU3000727, UTERU3000738, UTERU3000828, UTERU3000844, UTERU3000899, UTERU3000959, UTERU3001029, UTERU3001053, UTERU3001059, UTERU3001158, UTERU3001240, UTERU3001394, UTERU3001542, UTERU3001558, UTERU3001571, UTERU3001585, UTERU3001632, UTERU3001652, UTERU3001766, UTERU3001988, UTERU3002209, UTERU3002218, UTERU3002383, UTERU3002600, UTERU3002620, UTERU3002667, UTERU3002701, UTERU3002731, UTERU3002768, UTERU3002786, UTERU3002993, UTERU3003116, UTERU3003135, UTERU3003178, UTERU3003465, UTERU3003495, UTERU3003523, UTERU3003660,

[1083] UTERU3003774, UTERU3003776, UTERU3004384, UTERU3004418, UTERU3004477, UTERU3004523, UTERU3004616, UTERU3004635, UTERU3004709, UTERU3004938, UTERU3004992, UTERU3005049, UTERU3005159, UTERU3005205, UTERU3005230, UTERU3005264, UTERU3005422, UTERU3005460, UTERU3005536, UTERU3005585, UTERU3005767, UTERU3005907, UTERU3005970, UTERU3006008, UTERU3006228, UTERU3006308, UTERU3006538, UTERU3006640, UTERU3006687, UTERU3006720, UTERU3006798, UTERU3006884, UTERU3007021, UTERU3007104, UTERU3007108, UTERU3007134, UTERU3007419, UTERU3007640, UTERU3007731, UTERU3007913, UTERU3008280, UTERU3008463, UTERU3008660, UTERU3008671, UTERU3008722, UTERU3008917, UTERU3009259, UTERU3009490, UTERU3009517, UTERU3009690,

[1084] UTERU3009775, UTERU3009871, UTERU3009979, UTERU3009987, UTERU3010029, UTERU3010409, UTERU3010526, UTERU3010604, UTERU3010892, UTERU3010919, UTERU3011063, UTERU3011092, UTERU3011273, UTERU3011398, UTERU3011558, UTERU3011579, UTERU3011795, UTERU3011837, UTERU3012293, UTERU3012414, UTERU3012476, UTERU3012599, UTERU3012999, UTERU3013167, UTERU3013302, UTERU3013781, UTERU3014274, UTERU3014446, UTERU3014611, UTERU3014647, UTERU3014791, UTERU3014906, UTERU3015011, UTERU3015086, UTERU3015299, UTERU3015412, UTERU3015500, UTERU3015647, UTERU3015844, UTERU3016070, UTERU3016273, UTERU3016274, UTERU3016308, UTERU3016789, UTERU3017176, UTERU3017441, UTERU3017626, UTERU3017995, UTERU3018154, UTERU3018172,

UTERU3018255, UTERU3018616, UTERU3018711, UTERU3019078

[1085] Of the 17,176 genes including the cDNAs of the present invention, genes, whose expression levels were high enough to detect in each library of HELAC, HHDPC, HLUNG, HSYRA, IMR32, JCMLC, and KIDNE, were analyzed for the expression frequencies. The analysis results are described below. Each is a relative value, where the expression level over all tissues is taken as 100. The larger this value, the greater the level of expression.

TABLE 32

| Clone Name | HELAC | HHDPC | HLUNG | HSYRA | IMR32 | JCMLC | KIDNE |
|---|---|---|---|---|---|---|---|
| 3NB691000113 | 0 | 0 | 0 | 50.609 | 0 | 0 | 0 |
| 3NB691000116 | 0 | 11.451 | 0 | 0 | 0 | 0 | 0 |
| 3NB691000173 | 0 | 0 | 0 | 0 | 11.145 | 0 | 0 |
| 3NB692000281 | 0 | 0 | 0 | 0 | 3.107 | 0 | 0 |
| 3NB692000330 | 0 | 0 | 1.618 | 0 | 3.113 | 0 | 1.538 |
| 3NB692000374 | 0 | 7.636 | 3.978 | 0 | 0 | 0 | 0 |
| 3NB692000545 | 0 | 0 | 0 | 0 | 9.955 | 0 | 0 |
| 3NB692000912 | 0 | 0 | 0 | 0 | 3.316 | 0 | 1.638 |
| 3NB692001002 | 0 | 0 | 7.176 | 0 | 0 | 0 | 0 |
| 3NB692001022 | 0 | 0 | 0 | 0 | 4.390 | 0 | 0 |
| 3NB692001288 | 0 | 10.549 | 0 | 0 | 0 | 0 | 5.223 |
| 3NB692001334 | 0 | 0 | 0.985 | 2.006 | 7.577 | 0 | 0 |
| 3NB692001442 | 0 | 0 | 0 | 9.028 | 4.262 | 0 | 0 |
| 3NB692001459 | 0 | 0 | 0 | 0 | 19.948 | 0 | 0 |
| 3NB692001511 | 0 | 0 | 31.576 | 0 | 0 | 0 | 0 |
| 3NB692001637 | 0 | 0 | 0 | 33.877 | 0 | 0 | 0 |
| ADRGL2002477 | 0 | 0 | 6.240 | 0 | 0 | 0 | 5.931 |
| ADRGL2005838 | 0 | 0 | 38.763 | 0 | 0 | 0 | 0 |
| ADRGL2012038 | 0 | 0 | 0 | 15.365 | 0 | 0 | 0 |
| ASTRO1000165 | 0 | 0 | 0 | 16.566 | 0 | 0 | 7.727 |
| ASTRO2000014 | 36.043 | 0 | 0 | 0 | 0 | 0 | 0 |
| ASTRO2000046 | 0 | 2.873 | 0 | 3.050 | 0 | 0 | 0 |
| ASTRO2000480 | 0 | 0 | 0 | 0 | 9.990 | 0 | 0 |
| ASTRO2000801 | 0 | 0 | 0 | 0 | 3.600 | 0 | 0 |
| ASTRO2000914 | 0 | 0 | 7.139 | 0 | 0 | 0 | 6.786 |
| ASTRO2001029 | 0 | 0 | 9.198 | 0 | 0 | 0 | 0 |
| ASTRO2001076 | 0 | 0 | 0 | 0 | 0 | 39.073 | 0 |
| ASTRO2001806 | 0 | 10.074 | 0 | 0 | 0 | 0 | 0 |
| ASTRO2001823 | 0 | 10.221 | 0 | 0 | 0 | 0 | 0 |
| ASTRO2002459 | 0 | 0 | 0 | 6.543 | 0 | 0 | 0 |
| ASTRO2003024 | 0 | 0 | 3.476 | 0 | 0 | 0 | 0 |
| ASTRO2003632 | 0 | 2.925 | 12.190 | 0 | 0 | 0 | 0 |
| ASTRO2005687 | 0 | 0 | 0 | 24.993 | 0 | 0 | 0 |
| ASTRO2007047 | 0 | 0 | 15.330 | 0 | 0 | 0 | 0 |
| ASTRO2010819 | 0 | 0 | 0 | 0 | 0 | 0 | 2.346 |
| ASTRO2012552 | 0 | 0 | 0 | 0 | 10.431 | 0 | 0 |
| ASTRO2013585 | 0 | 0 | 0 | 3.644 | 0 | 0 | 1.700 |
| ASTRO2016491 | 0 | 0 | 1.847 | 0 | 0 | 0 | 0 |
| ASTRO2018169 | 82.898 | 0 | 0 | 0 | 0 | 0 | 0 |
| BGGI11000123 | 61.509 | 0 | 0 | 0 | 0 | 0 | 0 |
| BGGI12000533 | 0 | 15.896 | 0 | 0 | 0 | 0 | 0 |
| BGGI12000616 | 0 | 0 | 0 | 0 | 0 | 0 | 3.117 |
| BGGI12000839 | 0 | 0 | 2.705 | 0 | 0 | 0 | 0 |
| BGGI12001097 | 0 | 0 | 4.122 | 0 | 0 | 0 | 3.918 |
| BGGI12001682 | 0 | 0 | 0 | 0 | 3.644 | 0 | 0 |
| BLADE2002744 | 0 | 0 | 0 | 0 | 0 | 67.097 | 0 |
| BLADE2006830 | 0 | 0 | 0 | 0 | 0 | 46.211 | 0 |
| BLADE2007589 | 0 | 0 | 18.131 | 0 | 0 | 0 | 0 |
| BNGH41000153 | 0 | 0 | 17.235 | 0 | 0 | 0 | 0 |
| BNGH41000198 | 0 | 0 | 7.620 | 0 | 7.331 | 0 | 0 |
| BNGH42000130 | 91.923 | 0 | 0 | 0 | 0 | 0 | 0 |
| BNGH42000360 | 0 | 0 | 0 | 0 | 1.110 | 0 | 0 |
| BNGH42000739 | 0 | 0 | 2.282 | 0 | 0 | 0 | 0 |
| BNGH42007709 | 0 | 0 | 3.377 | 0 | 0.812 | 0 | 0.802 |
| BNGH42007788 | 0 | 0 | 0 | 23.009 | 0 | 0 | 0 |
| BRACE1000131 | 0 | 7.334 | 0 | 7.785 | 0 | 0 | 0 |
| BRACE1000159 | 0 | 0 | 0 | 0 | 6.515 | 0 | 0 |
| BRACE1000186 | 0 | 15.224 | 0 | 0 | 0 | 0 | 0 |
| BRACE2000245 | 0 | 0 | 0 | 0 | 0 | 0 | 30.833 |
| BRACE2000505 | 0 | 0 | 0 | 91.327 | 0 | 0 | 0 |
| BRACE2000525 | 0 | 0 | 0 | 0 | 0 | 0 | 5.664 |
| BRACE2000969 | 0 | 0 | 83.786 | 0 | 0 | 0 | 0 |
| BRACE2001117 | 0 | 0 | 0 | 0 | 19.410 | 0 | 9.589 |
| BRACE2001497 | 0 | 0 | 0 | 13.927 | 0 | 0 | 0 |
| BRACE2001692 | 0 | 0 | 0 | 0 | 2.137 | 0 | 0 |
| BRACE2001855 | 0 | 0 | 12.661 | 8.600 | 0 | 0 | 0 |
| BRACE2001892 | 0 | 0 | 0 | 0 | 1.069 | 0 | 0 |
| BRACE2001971 | 0 | 0 | 0 | 0 | 7.914 | 0 | 0 |
| BRACE2002081 | 0 | 0 | 70.380 | 0 | 0 | 0 | 0 |
| BRACE2002091 | 0 | 0 | 0 | 0 | 7.451 | 0 | 7.362 |
| BRACE2002392 | 0 | 0 | 0 | 0 | 6.082 | 0 | 0 |
| BRACE2002441 | 0 | 7.930 | 0 | 0 | 0 | 30.961 | 0 |
| BRACE2002685 | 0 | 0 | 0 | 0 | 0 | 0 | 11.950 |
| BRACE2002860 | 0 | 0 | 0 | 0 | 0 | 0 | 8.777 |
| BRACE2003172 | 0 | 0 | 0 | 0 | 0 | 0 | 4.532 |
| BRACE2003217 | 0 | 0 | 0 | 0 | 15.210 | 0 | 0 |
| BRACE2003254 | 0 | 0 | 3.321 | 0 | 3.195 | 0 | 0 |
| BRACE2003527 | 0 | 18.150 | 0 | 0 | 0 | 0 | 0 |
| BRACE2003827 | 0 | 0 | 0 | 0 | 3.091 | 0 | 0 |
| BRACE2003846 | 57.200 | 0 | 0 | 0 | 0 | 0 | 0 |
| BRACE2003892 | 0 | 0 | 8.005 | 0 | 0 | 0 | 0 |
| BRACE2003904 | 0 | 0 | 0 | 0 | 0 | 0 | 9.038 |
| BRACE2005099 | 0 | 0 | 0 | 0 | 0 | 0 | 9.269 |
| BRACE2005231 | 0 | 0 | 0 | 0 | 0 | 0 | 11.130 |
| BRACE2005434 | 0 | 0 | 0 | 0 | 2.433 | 0 | 0 |
| BRACE2005448 | 0 | 0 | 0 | 0 | 0 | 0 | 23.706 |
| BRACE2005681 | 0 | 0 | 0 | 0 | 3.522 | 0 | 0 |
| BRACE2006055 | 0 | 28.171 | 0 | 0 | 0 | 0 | 6.974 |
| BRACE2006089 | 0 | 28.709 | 0 | 0 | 0 | 0 | 0 |
| BRACE2006258 | 0 | 0 | 3.004 | 0 | 8.671 | 0 | 2.856 |
| BRACE2006397 | 0 | 0 | 6.496 | 0 | 0 | 8.114 | 1.029 |
| BRACE2006514 | 0 | 0 | 0 | 6.493 | 0 | 0 | 3.029 |
| BRACE2006871 | 0 | 0 | 0 | 0 | 3.528 | 0 | 0 |
| BRACE2006900 | 0 | 0 | 0 | 0 | 0 | 0 | 1.794 |
| BRACE2006911 | 0 | 0 | 68.109 | 0 | 0 | 0 | 0 |
| BRACE2007089 | 74.315 | 0 | 0 | 0 | 0 | 0 | 0 |
| BRACE2007401 | 0 | 0 | 0 | 0 | 6.449 | 0 | 0 |
| BRACE2007518 | 0 | 0 | 8.324 | 0 | 0 | 0 | 0 |
| BRACE2007577 | 0 | 0 | 3.591 | 0 | 0 | 0 | 0 |
| BRACE2008097 | 0 | 0 | 0 | 0 | 0 | 0 | 16.738 |
| BRACE2008251 | 0 | 0 | 49.689 | 0 | 0 | 0 | 0 |
| BRACE2008380 | 0 | 0 | 0 | 0 | 6.894 | 0 | 0 |
| BRACE2008385 | 0 | 0 | 7.660 | 0 | 0 | 0 | 0 |
| BRACE2008495 | 0 | 0 | 83.786 | 0 | 0 | 0 | 0 |
| BRACE2008706 | 0 | 0 | 0 | 49.117 | 0 | 0 | 0 |
| BRACE2008968 | 0 | 0 | 2.133 | 4.346 | 2.052 | 0 | 2.027 |
| BRACE2009037 | 0 | 2.056 | 2.142 | 2.182 | 0 | 0 | 1.018 |
| BRACE2009620 | 0 | 0 | 70.380 | 0 | 0 | 0 | 0 |
| BRACE2011265 | 0 | 0 | 0 | 0 | 13.090 | 0 | 0 |
| BRACE2012061 | 0 | 0 | 0 | 0 | 0 | 0 | 58.734 |
| BRACE2018337 | 0 | 16.771 | 0 | 0 | 0 | 0 | 0 |
| BRACE2021478 | 0 | 0 | 0 | 0 | 0 | 0 | 45.131 |
| BRACE2039624 | 0 | 0 | 3.548 | 0 | 0 | 0 | 3.373 |
| BRACE3004150 | 0 | 27.348 | 0 | 0 | 0 | 0 | 0 |
| BRACE3004371 | 0 | 0 | 0 | 0 | 0 | 0 | 13.097 |
| BRACE3005938 | 0 | 7.754 | 4.039 | 0 | 0 | 0 | 0 |
| BRACE3010428 | 0 | 0 | 0 | 17.112 | 0 | 0 | 3.991 |
| BRALZ2009482 | 0 | 0 | 1.363 | 0 | 0 | 0 | 5.182 |
| BRAMY2000151 | 0 | 0 | 0 | 0 | 77.787 | 0 | 0 |
| BRAMY2000354 | 0 | 0 | 0 | 0 | 0 | 0 | 4.791 |
| BRAMY2000388 | 0 | 0 | 0 | 0 | 0 | 0 | 21.330 |
| BRAMY2009934 | 0 | 0 | 0 | 0 | 20.859 | 0 | 0 |
| BRAMY2010208 | 0 | 0 | 0 | 0 | 0 | 0 | 63.370 |
| BRAMY2015911 | 0 | 0 | 0 | 0 | 0 | 0 | 51.943 |
| BRAMY2016325 | 0 | 26.531 | 0 | 0 | 0 | 0 | 0 |
| BRAMY2019554 | 0 | 0 | 0 | 0 | 0 | 21.938 | 0 |
| BRAMY2020412 | 0 | 0 | 0 | 80.233 | 0 | 0 | 0 |
| BRAMY2020427 | 0 | 0 | 2.172 | 0 | 4.179 | 0 | 2.064 |
| BRAMY2021310 | 0 | 87.482 | 0 | 0 | 0 | 0 | 0 |
| BRAMY2022786 | 0 | 17.573 | 0 | 0 | 0 | 0 | 0 |
| BRAMY2024004 | 0 | 0 | 0 | 0 | 0 | 76.038 | 0 |
| BRAMY2025230 | 0 | 0 | 0 | 73.283 | 0 | 0 | 0 |
| BRAMY2026778 | 0 | 34.114 | 0 | 0 | 0 | 0 | 0 |
| BRAMY2028914 | 0 | 0 | 0 | 0 | 62.506 | 0 | 0 |
| BRAMY2031516 | 0 | 0 | 27.091 | 0 | 0 | 0 | 0 |
| BRAMY2038832 | 0 | 0 | 44.706 | 0 | 0 | 0 | 0 |
| BRAMY2039630 | 0 | 0 | 0 | 0 | 0 | 0 | 60.511 |
| BRAMY2040095 | 0 | 0 | 1.254 | 0 | 0 | 18.794 | 0 |
| BRAMY2047420 | 0 | 0 | 0 | 0 | 7.149 | 0 | 0 |
| BRAMY3004364 | 0 | 0 | 0 | 0 | 0 | 0 | 23.683 |
| BRAMY3004377 | 0 | 5.840 | 3.042 | 6.199 | 2.926 | 0 | 0 |
| BRAMY3008044 | 0 | 0 | 0 | 0 | 0 | 0 | 6.254 |
| BRAMY3010008 | 0 | 0 | 2.135 | 0 | 0 | 0 | 0 |
| BRAMY3010492 | 0 | 0 | 21.124 | 0 | 0 | 0 | 0 |
| BRAWH1000040 | 0 | 0 | 0 | 5.143 | 0 | 0 | 0 |
| BRAWH1000083 | 0 | 0 | 0 | 0 | 0 | 0 | 15.796 |
| BRAWH1000093 | 0 | 3.248 | 0 | 0 | 0 | 12.679 | 0 |
| BRAWH2000417 | 0 | 0 | 2.266 | 0 | 0 | 0 | 0 |
| BRAWH2000460 | 0 | 4.297 | 2.238 | 0 | 0 | 0 | 2.128 |
| BRAWH2000522 | 0 | 0 | 0 | 0 | 12.791 | 0 | 0 |
| BRAWH2000588 | 0 | 0 | 0 | 9.377 | 0 | 0 | 0 |
| BRAWH2000633 | 0 | 0 | 0 | 0 | 4.678 | 0 | 0 |
| BRAWH2000636 | 0 | 0 | 0 | 3.950 | 0 | 0 | 0 |
| BRAWH2000697 | 0 | 0 | 3.710 | 0 | 0 | 0 | 3.527 |
| BRAWH2000944 | 0 | 0 | 19.134 | 0 | 0 | 0 | 0 |
| BRAWH2001092 | 0 | 3.713 | 1.289 | 1.314 | 0.620 | 0 | 1.225 |
| BRAWH2001166 | 0 | 0 | 11.578 | 0 | 0 | 0 | 0 |
| BRAWH2001239 | 0 | 51.373 | 0 | 0 | 0 | 0 | 0 |
| BRAWH2001424 | 0 | 0 | 0 | 0 | 0 | 0 | 17.750 |
| BRAWH2001461 | 0 | 0 | 13.038 | 0 | 0 | 0 | 0 |
| BRAWH2003025 | 0 | 0 | 11.121 | 0 | 0 | 0 | 0 |
| BRAWH2003693 | 0 | 24.090 | 0 | 0 | 0 | 0 | 0 |
| BRAWH2003818 | 0 | 0 | 0 | 22.621 | 0 | 0 | 0 |
| BRAWH2004078 | 0 | 0 | 0 | 0 | 0 | 0 | 18.371 |
| BRAWH2005068 | 0 | 0 | 0 | 0 | 2.839 | 0 | 0 |
| BRAWH2006996 | 0 | 0 | 0 | 25.423 | 0 | 0 | 0 |
| BRAWH2008255 | 0 | 0 | 0 | 63.154 | 0 | 0 | 0 |
| BRAWH2009307 | 0 | 0 | 7.303 | 0 | 0 | 0 | 0 |
| BRAWH2011812 | 0 | 0 | 0 | 0 | 47.789 | 0 | 0 |
| BRAWH2012538 | 0 | 0 | 0 | 0 | 0 | 0 | 35.370 |
| BRAWH2014188 | 0 | 0 | 2.626 | 5.351 | 0 | 0 | 0 |
| BRAWH2015349 | 0 | 0 | 0 | 0 | 0 | 0 | 38.345 |
| BRAWH2016269 | 0 | 0 | 0 | 0 | 4.652 | 0 | 4.596 |
| BRAWH2018526 | 0 | 0 | 0 | 0 | 1.086 | 0 | 0 |
| BRAWH2018729 | 0 | 0 | 0 | 22.271 | 0 | 0 | 0 |
| BRAWH3002853 | 0 | 10.416 | 2.713 | 0 | 0 | 0 | 0 |
| BRAWH3023172 | 80.380 | 0 | 0 | 0 | 3.232 | 0 | 0 |
| BRCAN2000639 | 0 | 0 | 61.519 | 0 | 0 | 0 | 0 |
| BRCAN2002173 | 0 | 0 | 0 | 0 | 0 | 0 | 6.932 |
| BRCAN2003944 | 0 | 1.983 | 0 | 4.210 | 0 | 0 | 0.982 |
| BRCAN2021028 | 0 | 0 | 38.589 | 0 | 0 | 0 | 0 |
| BRCAN2024572 | 0 | 0 | 0 | 20.413 | 0 | 0 | 0 |
| BRCAN2026197 | 0 | 10.993 | 0 | 0 | 0 | 0 | 0 |
| BRCAN2028036 | 0 | 0 | 8.855 | 0 | 0 | 0 | 0 |
| BRCOC2010123 | 0 | 0 | 0 | 8.188 | 0 | 0 | 0 |
| BRCOC2011506 | 83.518 | 0 | 0 | 0 | 0 | 0 | 0 |
| BRCOC2014013 | 0 | 0 | 0 | 0 | 0 | 0 | 18.907 |
| BRHIP1000104 | 0 | 0 | 2.397 | 0 | 0 | 0 | 0 |
| BRHIP2000534 | 0 | 0 | 0 | 2.558 | 0 | 18.818 | 0 |
| BRHIP2000553 | 0 | 18.094 | 0 | 0 | 0 | 0 | 0 |
| BRHIP2000819 | 0 | 0 | 7.923 | 0 | 0 | 0 | 0 |
| BRHIP2001099 | 0 | 0 | 25.425 | 0 | 0 | 0 | 24.167 |
| BRHIP2007305 | 0 | 0 | 4.152 | 8.461 | 0 | 0 | 3.947 |
| BRHIP2011576 | 0 | 0 | 0 | 0 | 0 | 0 | 66.835 |
| BRHIP2012627 | 0 | 0 | 0 | 0 | 55.428 | 0 | 0 |
| BRHIP2020509 | 0 | 0 | 0 | 0 | 0 | 0 | 65.282 |
| BRHIP2021870 | 0 | 0 | 0 | 0 | 0 | 0 | 15.479 |
| BRHIP2023272 | 0 | 0 | 12.379 | 0 | 0 | 0 | 0 |
| BRHIP2023888 | 0 | 0 | 1.350 | 0 | 0 | 10.115 | 1.283 |
| BRHIP2024398 | 0 | 0 | 30.880 | 0 | 0 | 0 | 0 |
| BRHIP3000111 | 0 | 0 | 0 | 7.652 | 0 | 0 | 0 |
| BRHIP3006717 | 0 | 11.985 | 0 | 0 | 0 | 0 | 0 |
| BRSSN2003012 | 0 | 0 | 15.866 | 32.333 | 0 | 0 | 0 |
| BRSSN2007464 | 0 | 0 | 0 | 0 | 14.440 | 0 | 0 |
| BRSSN2009518 | 0 | 0 | 0 | 25.748 | 0 | 0 | 0 |
| BRSTN2011961 | 0 | 4.078 | 2.124 | 8.658 | 0 | 0 | 0 |
| BRSTN2012069 | 0 | 0.133 | 0.763 | 0.848 | 2.503 | 0 | 0.429 |
| BRSTN2012174 | 0 | 0 | 0 | 1.512 | 4.996 | 0 | 0 |
| BRSTN2013171 | 0 | 0 | 25.419 | 0 | 0 | 0 | 0 |
| BRSTN2016470 | 0 | 0 | 0.803 | 0 | 1.545 | 0 | 0.763 |
| BRSTN2016892 | 0 | 0 | 0 | 0 | 10.529 | 0 | 0 |
| BRSTN2017104 | 0 | 0 | 0 | 0 | 6.880 | 0 | 0 |
| BRTHA2005864 | 0 | 0 | 5.951 | 0 | 0 | 0 | 0 |
| BRTHA2012714 | 0 | 0 | 9.194 | 0 | 0 | 0 | 0 |
| BRTHA2016577 | 0 | 0 | 0 | 0 | 8.326 | 0 | 0 |
| BRTHA2027229 | 0 | 0 | 0 | 0 | 3.230 | 0 | 0 |
| BRTHA3010540 | 0 | 0 | 0 | 0 | 0 | 92.534 | 0 |
| CTONG1000052 | 0 | 0 | 2.216 | 0 | 0 | 0 | 0 |
| CTONG1000087 | 0 | 0 | 3.835 | 0 | 0 | 0 | 3.646 |
| CTONG1000094 | 0 | 0 | 1.428 | 0 | 1.374 | 0 | 0 |
| CTONG1000175 | 0 | 0 | 0 | 0 | 0 | 0 | 5.870 |
| CTONG2000469 | 0 | 20.562 | 0 | 0 | 0 | 0 | 0 |
| CTONG2001226 | 0 | 0 | 0 | 0 | 0 | 0 | 26.463 |
| CTONG2002453 | 0 | 0 | 0 | 0 | 27.393 | 0 | 0 |
| CTONG2002903 | 0 | 0 | 11.298 | 0 | 0 | 0 | 0 |
| CTONG2003298 | 0 | 5.110 | 0 | 0 | 0 | 0 | 0 |
| CTONG2003524 | 0 | 0 | 5.910 | 24.087 | 0 | 0 | 0 |
| CTONG2003937 | 0 | 0 | 0 | 0 | 0 | 0 | 65.178 |
| CTONG2004487 | 0 | 0 | 3.469 | 0 | 0 | 0 | 0 |
| CTONG2004550 | 0 | 0 | 0 | 0 | 0 | 0 | 65.178 |
| CTONG2005265 | 0 | 0 | 0 | 0 | 0 | 0 | 65.178 |
| CTONG2005553 | 0 | 0 | 0 | 0 | 2.527 | 19.687 | 0 |
| CTONG2006004 | 0 | 0 | 3.871 | 0 | 0 | 0 | 0 |
| CTONG2006562 | 0 | 0 | 0 | 0 | 9.880 | 0 | 0 |
| CTONG2006611 | 0 | 0 | 26.485 | 0 | 0 | 0 | 0 |
| CTONG2006932 | 0 | 7.748 | 0 | 0 | 0 | 0 | 0 |
| CTONG2007072 | 0 | 15.148 | 0 | 0 | 0 | 0 | 0 |
| CTONG2007078 | 0 | 0 | 0 | 0 | 4.509 | 0 | 0 |
| CTONG2007500 | 0 | 5.295 | 5.517 | 0 | 0 | 20.674 | 0 |
| CTONG2008269 | 0 | 47.906 | 0 | 0 | 0 | 0 | 0 |
| CTONG2008398 | 0 | 0 | 0 | 5.714 | 0 | 0 | 2.665 |
| CTONG2008506 | 0 | 0 | 0 | 0 | 0 | 0 | 6.561 |
| CTONG2010348 | 0 | 0 | 6.495 | 0 | 0 | 0 | 0 |
| CTONG2010821 | 0 | 0 | 0 | 0 | 0 | 0 | 2.491 |
| CTONG2012029 | 0 | 0 | 0 | 0 | 0 | 0 | 65.178 |
| CTONG2012158 | 0 | 0 | 0 | 0 | 32.190 | 0 | 0 |
| CTONG2012452 | 0 | 0 | 2.612 | 0 | 3.769 | 0 | 0 |
| CTONG2012607 | 0 | 0 | 0 | 0 | 0 | 47.544 | 0 |
| CTONG2012847 | 0 | 0 | 0 | 0 | 0 | 0 | 6.004 |
| CTONG2012996 | 0 | 20.559 | 10.709 | 0 | 0 | 0 | 0 |
| CTONG2013348 | 0 | 0 | 0 | 0 | 19.412 | 0 | 19.179 |
| CTONG2013907 | 0 | 0 | 0 | 0 | 7.607 | 0 | 7.516 |
| CTONG2015091 | 0 | 0 | 0 | 6.070 | 2.865 | 0 | 0 |
| CTONG2015518 | 0 | 0 | 48.707 | 0 | 0 | 0 | 0 |
| CTONG2016056 | 0 | 14.001 | 0 | 0 | 0 | 0 | 0 |
| CTONG2016575 | 0 | 3.501 | 1.824 | 0 | 0 | 0 | 0 |
| CTONG2016824 | 0 | 0 | 0 | 0 | 15.019 | 0 | 0 |
| CTONG2016869 | 0 | 0 | 9.687 | 0 | 0 | 0 | 0 |
| CTONG2016931 | 0 | 0 | 11.193 | 0 | 0 | 0 | 0 |
| CTONG2017429 | 0 | 0 | 0 | 0 | 25.465 | 0 | 0 |
| CTONG2017444 | 0 | 0 | 13.506 | 0 | 0 | 0 | 0 |
| CTONG2018334 | 0 | 0 | 26.829 | 0 | 0 | 0 | 0 |
| CTONG2020484 | 0 | 0 | 2.156 | 4.394 | 0 | 0 | 0 |
| CTONG2022835 | 0 | 12.080 | 0 | 0 | 0 | 0 | 0 |
| CTONG2028124 | 0 | 0 | 9.217 | 3.756 | 0 | 0 | 3.504 |
| CTONG3008894 | 0 | 0 | 0 | 0 | 0 | 0 | 2.534 |
| CTONG3009028 | 0 | 0 | 0 | 0 | 0 | 44.240 | 0 |
| CTONG3009239 | 0 | 0 | 0 | 10.791 | 0 | 0 | 0 |
| D3OST2002068 | 0 | 0 | 0.788 | 0 | 0 | 0 | 0 |
| D3OST2002648 | 0 | 0 | 0 | 0 | 0 | 82.485 | 0 |
| D6OST2000464 | 0 | 0 | 0 | 8.189 | 0 | 0 | 0 |
| D9OST2000031 | 0 | 0 | 0 | 0 | 0 | 0 | 16.470 |
| D9OST2002608 | 0 | 0 | 8.171 | 0 | 0 | 0 | 0 |
| D9OST2002673 | 0 | 0 | 0 | 0 | 0 | 80.305 | 0 |
| DFNES1000150 | 0 | 0 | 0 | 0 | 0 | 30.700 | 3.893 |
| DFNES2000011 | 0 | 0 | 0 | 4.087 | 0 | 0 | 0 |
| DFNES2000153 | 0 | 0 | 0 | 0 | 0 | 0 | 11.162 |
| DFNES2000268 | 0 | 0 | 8.100 | 0 | 3.896 | 0 | 0 |
| DFNES2002509 | 0 | 0 | 0 | 37.950 | 0 | 0 | 0 |
| DFNES2004371 | 0 | 0 | 0 | 11.792 | 0 | 0 | 0 |
| DFNES2005766 | 0 | 0 | 6.724 | 0 | 0 | 0 | 0 |
| DFNES2008088 | 0 | 18.511 | 0 | 0 | 0 | 0 | 9.165 |
| FCBBF1000023 | 0 | 49.531 | 0 | 0 | 0 | 0 | 0 |
| FCBBF1000027 | 0 | 2.579 | 0 | 2.738 | 1.293 | 10.070 | 1.277 |
| FCBBF1000121 | 0 | 0 | 36.439 | 0 | 0 | 0 | 0 |
| FCBBF1000182 | 0 | 0 | 0 | 0 | 0 | 0 | 59.128 |
| FCBBF1000294 | 0 | 0 | 3.949 | 0 | 0 | 0 | 0 |
| FCBBF1000466 | 0 | 0 | 2.336 | 0 | 0 | 0 | 0 |
| FCBBF1000506 | 0 | 0 | 0 | 0 | 65.635 | 0 | 0 |
| FCBBF1000563 | 0 | 0 | 0 | 0 | 0 | 0 | 5.236 |
| FCBBF1000760 | 0 | 0 | 0 | 0 | 0 | 18.002 | 2.283 |
| FCBBF2000199 | 0 | 0 | 0 | 0 | 9.872 | 0 | 0 |
| FCBBF2000885 | 0 | 0 | 5.630 | 0 | 5.416 | 0 | 0 |
| FCBBF2001088 | 0 | 0 | 0 | 0 | 0 | 0 | 56.526 |
| FCBBF2001105 | 0 | 0 | 0 | 0 | 0 | 0 | 21.165 |
| FCBBF2002349 | 0 | 0 | 0 | 0 | 0 | 0 | 13.763 |
| FCBBF2002801 | 0 | 0 | 0 | 0 | 9.158 | 0 | 0 |
| FCBBF2005966 | 0 | 0 | 34.736 | 0 | 0 | 0 | 0 |
| FCBBF3000110 | 0 | 0 | 23.687 | 0 | 0 | 0 | 0 |
| FCBBF3000115 | 0 | 0 | 14.638 | 0 | 0 | 0 | 0 |
| FCBBF3000434 | 0 | 0 | 6.790 | 0 | 6.533 | 0 | 0 |
| FCBBF3000536 | 0 | 0 | 0 | 0 | 0 | 73.279 | 0 |
| FCBBF3001470 | 0 | 0 | 4.979 | 0 | 4.790 | 0 | 0 |
| FCBBF3001632 | 0 | 10.870 | 0 | 0 | 5.447 | 0 | 0 |
| FCBBF3003435 | 0 | 0 | 0 | 66.919 | 0 | 0 | 0 |
| FCBBF3003800 | 0 | 5.547 | 0 | 0 | 1.390 | 0 | 1.373 |
| FCBBF3004473 | 0 | 0 | 8.428 | 0 | 0 | 0 | 0 |
| FCBBF3005320 | 0 | 0 | 0 | 0 | 0 | 0 | 9.510 |
| FCBBF3005330 | 0 | 0 | 2.541 | 0 | 2.444 | 0 | 0 |
| FCBBF3005497 | 0 | 0 | 0 | 0 | 8.322 | 0 | 0 |
| FCBBF3007829 | 0 | 79.216 | 0 | 0 | 0 | 0 | 0 |
| FCBBF3016134 | 0 | 0 | 0 | 0 | 0 | 0 | 36.291 |
| FCBBF3017396 | 0 | 0 | 0 | 0 | 7.204 | 56.122 | 0 |
| FCBBF3017531 | 0 | 0 | 0 | 0 | 0 | 44.077 | 0 |
| FCBBF3018796 | 0 | 0 | 0 | 0 | 0 | 0 | 10.823 |
| FCBBF3019714 | 0 | 0 | 7.513 | 0 | 0 | 0 | 0 |
| FCBBF3023667 | 11.655 | 0 | 0.487 | 0.993 | 0 | 0 | 0.463 |
| FCBBF3028244 | 0 | 0 | 0 | 0 | 3.276 | 0 | 0 |
| FCBBF4000446 | 0 | 5.289 | 0 | 0 | 0 | 0 | 0 |
| FEBRA1000088 | 0 | 0 | 0 | 0 | 0 | 0 | 14.878 |
| FEBRA2000105 | 0 | 0 | 2.631 | 0 | 0 | 0 | 15.003 |
| FEBRA2000129 | 0 | 0 | 0 | 0 | 0 | 0 | 9.063 |
| FEBRA2000210 | 0 | 0 | 0 | 0 | 0 | 0 | 4.929 |
| FEBRA2000228 | 0 | 0 | 14.488 | 0 | 0 | 0 | 0 |
| FEBRA2000510 | 0 | 0 | 0 | 0 | 13.019 | 0 | 0 |
| FEBRA2000536 | 0 | 0 | 0 | 23.543 | 0 | 0 | 0 |
| FEBRA2000733 | 0 | 7.120 | 1.236 | 1.260 | 0 | 0 | 0 |
| FEBRA2000881 | 0 | 0 | 11.610 | 23.659 | 11.169 | 0 | 0 |
| FEBRA2000901 | 0 | 0 | 0 | 0 | 36.652 | 0 | 0 |
| FEBRA2001383 | 0 | 0 | 0 | 0 | 36.809 | 0 | 0 |
| FEBRA2001814 | 0 | 0 | 0 | 0 | 0 | 0 | 9.225 |
| FEBRA2002027 | 0 | 0 | 9.292 | 0 | 0 | 0 | 0 |
| FEBRA2002707 | 0 | 0 | 0 | 26.932 | 0 | 0 | 0 |
| FEBRA2003100 | 0 | 4.637 | 0 | 0 | 0 | 0 | 0 |
| FEBRA2003926 | 0 | 0 | 2.560 | 0 | 0 | 0 | 4.867 |
| FEBRA2003930 | 0 | 0 | 0 | 0 | 6.342 | 0 | 0 |
| FEBRA2004224 | 0 | 0 | 0 | 8.653 | 0 | 0 | 0 |
| FEBRA2004325 | 0 | 0 | 0 | 0 | 0 | 0 | 12.279 |
| FEBRA2004412 | 0 | 0 | 10.768 | 0 | 0 | 0 | 0 |
| FEBRA2004818 | 0 | 0 | 24.972 | 0 | 0 | 0 | 0 |
| FEBRA2005752 | 0 | 29.308 | 0 | 0 | 0 | 0 | 0 |
| FEBRA2005778 | 0 | 0 | 11.002 | 0 | 0 | 0 | 0 |
| FEBRA2006055 | 0 | 18.599 | 0 | 0 | 0 | 0 | 0 |
| FEBRA2006092 | 0 | 0 | 0 | 0 | 2.194 | 0 | 0 |
| FEBRA2006370 | 0 | 0 | 0 | 0 | 0 | 0 | 49.808 |
| FEBRA2006372 | 0 | 0 | 0 | 0 | 4.739 | 0 | 0 |
| FEBRA2006485 | 0 | 0 | 11.157 | 0 | 0 | 0 | 0 |
| FEBRA2006553 | 0 | 27.857 | 0 | 0 | 0 | 0 | 0 |
| FEBRA2007801 | 0 | 17.382 | 0 | 0 | 0 | 0 | 0 |
| FEBRA2007880 | 0 | 0 | 13.804 | 0 | 0 | 0 | 0 |
| FEBRA2008036 | 0 | 0 | 0 | 0 | 5.040 | 0 | 0 |
| FEBRA2008081 | 0 | 4.986 | 0 | 0 | 0 | 0 | 0 |
| FEBRA2008087 | 15.732 | 0 | 1.315 | 0 | 1.265 | 0 | 0.625 |
| FEBRA2008255 | 0 | 0 | 18.560 | 0 | 0 | 0 | 0 |
| FEBRA2008302 | 0 | 7.493 | 0 | 0 | 0 | 0 | 0 |
| FEBRA2014417 | 0 | 0 | 1.980 | 12.107 | 0 | 0 | 0 |
| FEBRA2018476 | 0 | 0 | 0 | 0 | 0 | 0 | 3.809 |
| FEBRA2019711 | 0 | 0 | 7.756 | 0 | 0 | 0 | 0 |
| FEBRA2022055 | 46.701 | 0 | 1.952 | 7.954 | 0 | 0 | 0 |
| FEBRA2022504 | 0 | 0 | 0 | 12.276 | 0 | 0 | 0 |
| FEBRA2025838 | 0 | 5.784 | 0 | 0 | 0 | 22.582 | 2.864 |
| FEBRA2028516 | 0 | 0 | 4.195 | 0 | 0 | 31.443 | 0 |
| FELIV1000153 | 0 | 1.161 | 0 | 0 | 0 | 0 | 0 |
| HCASM2000016 | 0 | 0 | 0 | 5.578 | 0 | 0 | 0 |
| HCASM2000363 | 0 | 0 | 2.494 | 10.165 | 0 | 0 | 0 |
| HCASM2003076 | 0 | 0 | 0 | 0 | 0 | 0 | 19.851 |
| HCHON1000030 | 0 | 2.554 | 0.665 | 1.356 | 0 | 4.986 | 4.426 |
| HCHON1000191 | 0 | 3.401 | 0 | 7.220 | 0 | 0 | 0 |
| HCHON2000056 | 0 | 1.997 | 2.081 | 4.240 | 3.002 | 7.797 | 0.989 |
| HCHON2000087 | 0 | 0 | 4.538 | 0 | 0 | 0 | 0 |
| HCHON2000160 | 0 | 0 | 0 | 7.524 | 0 | 0 | 7.019 |
| HCHON2000226 | 0 | 0 | 2.958 | 0 | 0 | 0 | 0 |
| HCHON2000244 | 0 | 9.264 | 0 | 0 | 0 | 18.084 | 4.587 |
| HCHON2000265 | 0 | 0 | 0 | 0 | 0 | 0 | 7.054 |
| HCHON2000364 | 0 | 6.261 | 0 | 3.323 | 0 | 0 | 0 |
| HCHON2000475 | 0 | 0 | 0 | 9.949 | 0 | 0 | 0 |
| HCHON2000508 | 0 | 5.259 | 1.370 | 0 | 0 | 0 | 0 |
| HCHON2000626 | 0 | 8.277 | 0 | 0 | 0 | 0 | 0 |
| HCHON2000738 | 0 | 0 | 0 | 0 | 10.506 | 0 | 0 |
| HCHON2000826 | 0 | 5.039 | 0 | 0 | 0 | 0 | 0 |
| HCHON2000898 | 0 | 0 | 0 | 0 | 0 | 0 | 35.524 |
| HCHON2001039 | 0 | 0 | 0 | 0 | 0 | 0 | 3.890 |
| HCHON2001050 | 0 | 0 | 0 | 0 | 0 | 0 | 5.053 |
| HCHON2001108 | 0 | 0 | 7.832 | 0 | 0 | 0 | 0 |
| HCHON2001359 | 0 | 0 | 0 | 0 | 0 | 0 | 2.968 |
| HCHON2001407 | 0 | 0 | 0 | 0 | 2.786 | 0 | 0 |
| HCHON2001434 | 0 | 0 | 0 | 0 | 0 | 0 | 5.326 |
| HCHON2001505 | 0 | 0 | 0 | 0 | 15.856 | 0 | 0 |
| HCHON2001546 | 0 | 0 | 0 | 54.154 | 0 | 0 | 0 |
| HCHON2001665 | 0 | 0 | 0 | 0 | 0 | 0 | 5.380 |
| HCHON2004002 | 0 | 5.528 | 0 | 0 | 0 | 0 | 0 |
| HEART1000074 | 0 | 0 | 2.784 | 0 | 0 | 0 | 2.646 |
| HEART1000149 | 0 | 0 | 3.444 | 0 | 0 | 0 | 16.370 |
| HEART1000185 | 0 | 0 | 0 | 5.909 | 0 | 0 | 0 |
| HEART2003440 | 0 | 0 | 0 | 0 | 0 | 80.471 | 0 |
| HEART2004941 | 0 | 0 | 0 | 0 | 33.520 | 0 | 0 |
| HELAC2000158 | 100 | 0 | 0 | 0 | 0 | 0 | 0 |
| HELAC2000301 | 100 | 0 | 0 | 0 | 0 | 0 | 0 |
| HHDPC1000001 | 0 | 100 | 0 | 0 | 0 | 0 | 0 |
| HHDPC1000065 | 0 | 64.387 | 0 | 0 | 0 | 0 | 0 |
| HHDPC1000083 | 0 | 6.892 | 0 | 7.316 | 0 | 0 | 0 |
| HHDPC1000114 | 0 | 40.929 | 0 | 0 | 0 | 0 | 0 |
| HHDPC1000118 | 0 | 14.757 | 0 | 0 | 0 | 0 | 7.307 |
| HHDPC1000163 | 0 | 8.855 | 0 | 0 | 4.437 | 0 | 0 |
| HHDPC2000055 | 0 | 12.875 | 0 | 0 | 12.904 | 0 | 0 |
| HHDPC2000070 | 0 | 67.761 | 0 | 0 | 0 | 0 | 0 |
| HHDPC2000102 | 0 | 33.433 | 0 | 0 | 0 | 0 | 0 |
| HHDPC2000104 | 0 | 13.026 | 0 | 0 | 0 | 0 | 0 |
| HHDPC2000115 | 0 | 18.420 | 0 | 0 | 0 | 0 | 0 |
| HHDPC2000149 | 0 | 31.462 | 16.389 | 0 | 0 | 0 | 0 |
| HHDPC2000258 | 0 | 66.528 | 0 | 0 | 0 | 0 | 0 |
| HHDPC2000315 | 0 | 100 | 0 | 0 | 0 | 0 | 0 |
| HHDPC2000455 | 0 | 3.869 | 0 | 0 | 0 | 0 | 0 |
| HHDPC2000456 | 0 | 10.932 | 0 | 0 | 0 | 0 | 0 |
| HHDPC2000462 | 0 | 79.486 | 0 | 0 | 0 | 0 | 0 |
| HHDPC2000572 | 0 | 46.099 | 0 | 0 | 0 | 0 | 0 |
| HHDPC2000656 | 0 | 60.189 | 0 | 0 | 0 | 0 | 0 |
| HHDPC2000692 | 0 | 100 | 0 | 0 | 0 | 0 | 0 |
| HHDPC2001337 | 0 | 100 | 0 | 0 | 0 | 0 | 0 |
| HHDPC2001432 | 0 | 100 | 0 | 0 | 0 | 0 | 0 |
| HHDPC2001896 | 0 | 66.020 | 0 | 0 | 0 | 0 | 0 |
| HHDPC2002963 | 0 | 100 | 0 | 0 | 0 | 0 | 0 |
| HHDPC2003049 | 0 | 100 | 0 | 0 | 0 | 0 | 0 |
| HHDPC2003113 | 0 | 100 | 0 | 0 | 0 | 0 | 0 |
| HHDPC2003381 | 0 | 24.557 | 0 | 0 | 0 | 0 | 0 |
| HHDPC2003439 | 0 | 7.163 | 0.933 | 0 | 0 | 13.983 | 0 |
| HHDPC2003472 | 0 | 91.505 | 0 | 0 | 0 | 0 | 0 |
| HHDPC2003983 | 0 | 1.961 | 1.021 | 0 | 3.930 | 0 | 0 |
| HHDPC2004757 | 0 | 100 | 0 | 0 | 0 | 0 | 0 |
| HHDPC2005185 | 0 | 100 | 0 | 0 | 0 | 0 | 0 |
| HHDPC2005513 | 0 | 100 | 0 | 0 | 0 | 0 | 0 |
| HHDPC2005742 | 0 | 89.412 | 0 | 0 | 0 | 0 | 0 |
| HHDPC2005794 | 0 | 56.010 | 0 | 0 | 0 | 0 | 0 |
| HHDPC2006460 | 0 | 66.929 | 0 | 0 | 0 | 0 | 0 |
| HHDPC2006862 | 0 | 52.700 | 0 | 0 | 0 | 0 | 0 |
| HHDPC2006927 | 0 | 100 | 0 | 0 | 0 | 0 | 0 |
| HHDPC2007267 | 0 | 3.438 | 1.791 | 0 | 0 | 26.843 | 0 |
| HHDPC2007302 | 0 | 100 | 0 | 0 | 0 | 0 | 0 |
| HHDPC2007775 | 0 | 76.087 | 0 | 0 | 0 | 0 | 0 |
| HHDPC2008123 | 0 | 89.412 | 0 | 0 | 0 | 0 | 0 |
| HHDPC2008185 | 0 | 100 | 0 | 0 | 0 | 0 | 0 |
| HHDPC2008279 | 0 | 100 | 0 | 0 | 0 | 0 | 0 |
| HHDPC2008297 | 0 | 52.669 | 0 | 0 | 0 | 0 | 0 |
| HHDPC2008414 | 0 | 100 | 0 | 0 | 0 | 0 | 0 |
| HHDPC2008474 | 0 | 100 | 0 | 0 | 0 | 0 | 0 |
| HHDPC2008816 | 0 | 86.394 | 0 | 0 | 0 | 0 | 0 |
| HHDPC2008843 | 0 | 100 | 0 | 0 | 0 | 0 | 0 |
| HHDPC2009114 | 0 | 100 | 0 | 0 | 0 | 0 | 0 |
| HHDPC2009178 | 0 | 71.472 | 0 | 0 | 0 | 0 | 0 |
| HHDPC2009208 | 0 | 100 | 0 | 0 | 0 | 0 | 0 |
| HHDPC2009272 | 0 | 86.275 | 0 | 0 | 0 | 0 | 0 |
| HHDPC2009528 | 0 | 45.763 | 0 | 0 | 0 | 0 | 0 |
| HLUNG1000017 | 0 | 0 | 100 | 0 | 0 | 0 | 0 |
| HLUNG1000024 | 0 | 0 | 100 | 0 | 0 | 0 | 0 |
| HLUNG1000030 | 0 | 0 | 100 | 0 | 0 | 0 | 0 |
| HLUNG1000034 | 0 | 0 | 100 | 0 | 0 | 0 | 0 |
| HLUNG1000037 | 0 | 0 | 32.229 | 0 | 0 | 0 | 0 |
| HLUNG1000053 | 0 | 0 | 100 | 0 | 0 | 0 | 0 |
| HLUNG1000055 | 0 | 0 | 3.971 | 0 | 0 | 0 | 0 |
| HLUNG1000064 | 0 | 0 | 49.950 | 0 | 0 | 0 | 0 |
| HLUNG1000076 | 0 | 0 | 12.342 | 0 | 0 | 0 | 0 |
| HLUNG1000084 | 0 | 0 | 100 | 0 | 0 | 0 | 0 |
| HLUNG1000091 | 0 | 0 | 54.277 | 0 | 0 | 0 | 0 |
| HLUNG1000099 | 0 | 0 | 39.587 | 0 | 0 | 0 | 0 |
| HLUNG1000104 | 0 | 0 | 100 | 0 | 0 | 0 | 0 |
| HLUNG1000105 | 0 | 0 | 38.763 | 0 | 0 | 0 | 0 |
| HLUNG1000110 | 0 | 0 | 84.874 | 0 | 0 | 0 | 0 |
| HLUNG1000151 | 0 | 0 | 100 | 0 | 0 | 0 | 0 |
| HLUNG1000169 | 0 | 0 | 100 | 0 | 0 | 0 | 0 |
| HLUNG2000004 | 0 | 0 | 46.386 | 0 | 0 | 0 | 0 |
| HLUNG2000014 | 0 | 0 | 100 | 0 | 0 | 0 | 0 |
| HLUNG2000027 | 0 | 0 | 100 | 0 | 0 | 0 | 0 |
| HLUNG2000063 | 0 | 0 | 18.092 | 0 | 0 | 0 | 0 |
| HLUNG2000068 | 0 | 0 | 100 | 0 | 0 | 0 | 0 |
| HLUNG2000116 | 0 | 0 | 100 | 0 | 0 | 0 | 0 |
| HLUNG2000125 | 0 | 0 | 26.171 | 0 | 0 | 0 | 0 |
| HLUNG2000130 | 0 | 0 | 100 | 0 | 0 | 0 | 0 |
| HLUNG2000142 | 0 | 0 | 100 | 0 | 0 | 0 | 0 |
| HLUNG2000174 | 0 | 0 | 100 | 0 | 0 | 0 | 0 |
| HLUNG2000176 | 0 | 0 | 81.477 | 0 | 0 | 0 | 0 |
| HLUNG2000217 | 0 | 0 | 100 | 0 | 0 | 0 | 0 |
| HLUNG2000232 | 0 | 0 | 46.224 | 0 | 0 | 0 | 0 |
| HLUNG2000255 | 0 | 0 | 100 | 0 | 0 | 0 | 0 |
| HLUNG2000281 | 0 | 0 | 100 | 0 | 0 | 0 | 0 |
| HLUNG2000314 | 0 | 0 | 8.998 | 0 | 0 | 0 | 0 |
| HLUNG2000315 | 0 | 0 | 55.942 | 0 | 0 | 0 | 0 |
| HLUNG2000340 | 0 | 0 | 100 | 0 | 0 | 0 | 0 |
| HLUNG2000362 | 0 | 0 | 100 | 0 | 0 | 0 | 0 |
| HLUNG2000363 | 0 | 0 | 100 | 0 | 0 | 0 | 0 |
| HLUNG2000412 | 0 | 0 | 9.821 | 0 | 0 | 0 | 0 |
| HLUNG2000431 | 0 | 0 | 100 | 0 | 0 | 0 | 0 |
| HLUNG2000480 | 0 | 0 | 100 | 0 | 0 | 0 | 0 |
| HLUNG2000489 | 0 | 0 | 100 | 0 | 0 | 0 | 0 |
| HLUNG2000501 | 0 | 0 | 6.293 | 0 | 0 | 0 | 0 |
| HLUNG2000549 | 0 | 0 | 100 | 0 | 0 | 0 | 0 |
| HLUNG2000557 | 0 | 0 | 100 | 0 | 0 | 0 | 0 |
| HLUNG2000570 | 0 | 0 | 100 | 0 | 0 | 0 | 0 |
| HLUNG2000751 | 0 | 0 | 63.370 | 0 | 0 | 0 | 0 |
| HLUNG2000761 | 0 | 0 | 100 | 0 | 0 | 0 | 0 |
| HLUNG2000777 | 0 | 0 | 100 | 0 | 0 | 0 | 0 |
| HLUNG2000846 | 0 | 0 | 16.570 | 0 | 0 | 0 | 0 |
| HLUNG2000870 | 0 | 0 | 100 | 0 | 0 | 0 | 0 |
| HLUNG2000884 | 0 | 0 | 7.851 | 0 | 0 | 0 | 0 |
| HLUNG2000926 | 0 | 0 | 100 | 0 | 0 | 0 | 0 |
| HLUNG2000950 | 0 | 0 | 45.344 | 0 | 0 | 0 | 0 |
| HLUNG2000955 | 0 | 0 | 100 | 0 | 0 | 0 | 0 |
| HLUNG2000970 | 0 | 0 | 100 | 0 | 0 | 0 | 0 |
| HLUNG2001013 | 0 | 0 | 100 | 0 | 0 | 0 | 0 |
| HLUNG2001126 | 0 | 0 | 100 | 0 | 0 | 0 | 0 |
| HLUNG2001144 | 0 | 0 | 100 | 0 | 0 | 0 | 0 |
| HLUNG2001146 | 0 | 0 | 19.226 | 0 | 0 | 0 | 0 |
| HLUNG2001214 | 0 | 0 | 100 | 0 | 0 | 0 | 0 |
| HLUNG2001439 | 0 | 0 | 3.235 | 0 | 0 | 0 | 0 |
| HLUNG2001459 | 0 | 0 | 24.038 | 0 | 0 | 0 | 0 |
| HLUNG2001507 | 0 | 0 | 18.366 | 0 | 0 | 0 | 0 |
| HLUNG2001518 | 0 | 0 | 4.011 | 0 | 0 | 0 | 0 |
| HLUNG2001633 | 0 | 0 | 29.367 | 0 | 0 | 0 | 0 |
| HLUNG2001677 | 0 | 0 | 12.888 | 0 | 0 | 0 | 0 |
| HLUNG2001712 | 0 | 0 | 12.093 | 0 | 11.634 | 0 | 0 |
| HLUNG2001814 | 0 | 0 | 100 | 0 | 0 | 0 | 0 |
| HLUNG2001996 | 0 | 0 | 76.784 | 0 | 0 | 0 | 0 |
| HLUNG2002006 | 0 | 0 | 100 | 0 | 0 | 0 | 0 |
| HLUNG2002050 | 0 | 0 | 100 | 0 | 0 | 0 | 0 |
| HLUNG2002059 | 0 | 0 | 10.047 | 0 | 0 | 0 | 0 |
| HLUNG2002085 | 0 | 0 | 100 | 0 | 0 | 0 | 0 |
| HLUNG2002145 | 0 | 0 | 50.966 | 0 | 0 | 0 | 0 |
| HLUNG2002295 | 0 | 0 | 100 | 0 | 0 | 0 | 0 |
| HLUNG2002303 | 0 | 0 | 100 | 0 | 0 | 0 | 0 |
| HLUNG2002334 | 0 | 0 | 33.714 | 0 | 0 | 0 | 0 |
| HLUNG2002405 | 0 | 0 | 100 | 0 | 0 | 0 | 0 |
| HLUNG2002429 | 0 | 0 | 100 | 0 | 0 | 0 | 0 |
| HLUNG2002465 | 0 | 0 | 4.436 | 0 | 0 | 0 | 0 |
| HLUNG2002562 | 0 | 0 | 100 | 0 | 0 | 0 | 0 |
| HLUNG2002648 | 0 | 0 | 13.257 | 0 | 0 | 0 | 0 |
| HLUNG2002659 | 0 | 0 | 100 | 0 | 0 | 0 | 0 |
| HLUNG2002707 | 0 | 0 | 100 | 0 | 0 | 0 | 0 |
| HLUNG2002811 | 0 | 0 | 17.874 | 0 | 0 | 0 | 0 |
| HLUNG2002916 | 0 | 0 | 31.642 | 0 | 0 | 0 | 0 |
| HLUNG2002942 | 0 | 0 | 100 | 0 | 0 | 0 | 0 |
| HLUNG2002949 | 0 | 0 | 67.829 | 0 | 0 | 0 | 0 |
| HLUNG2002958 | 0 | 0 | 100 | 0 | 0 | 0 | 0 |
| HLUNG2002982 | 0 | 0 | 100 | 0 | 0 | 0 | 0 |
| HLUNG2003003 | 0 | 0 | 29.311 | 0 | 0 | 0 | 0 |
| HLUNG2003042 | 0 | 0 | 43.654 | 0 | 0 | 0 | 0 |
| HLUNG2003049 | 0 | 0 | 100 | 0 | 0 | 0 | 0 |
| HLUNG2003061 | 0 | 0 | 100 | 0 | 0 | 0 | 0 |
| HLUNG2003162 | 0 | 0 | 100 | 0 | 0 | 0 | 0 |
| HLUNG2003246 | 0 | 0 | 100 | 0 | 0 | 0 | 0 |
| HLUNG2003306 | 0 | 0 | 46.963 | 0 | 0 | 0 | 0 |
| HLUNG2003331 | 0 | 0 | 30.365 | 0 | 0 | 0 | 0 |
| HLUNG2003335 | 0 | 0 | 100 | 0 | 0 | 0 | 0 |
| HLUNG2003378 | 0 | 0 | 33.957 | 0 | 0 | 0 | 32.277 |
| HLUNG2003497 | 0 | 0 | 81.477 | 0 | 0 | 0 | 0 |
| HLUNG2003691 | 0 | 0 | 100 | 0 | 0 | 0 | 0 |
| HLUNG2003710 | 0 | 0 | 100 | 0 | 0 | 0 | 0 |
| HLUNG2003714 | 0 | 0 | 100 | 0 | 0 | 0 | 0 |
| HLUNG2003716 | 0 | 0 | 83.786 | 0 | 0 | 0 | 0 |
| HLUNG2003778 | 0 | 0 | 18.920 | 0 | 0 | 0 | 0 |
| HLUNG2003833 | 0 | 0 | 100 | 0 | 0 | 0 | 0 |
| HLUNG2003872 | 0 | 0 | 100 | 0 | 0 | 0 | 0 |
| HLUNG2003918 | 0 | 0 | 100 | 0 | 0 | 0 | 0 |
| HLUNG2003991 | 0 | 0 | 100 | 0 | 0 | 0 | 0 |
| HLUNG2004014 | 0 | 0 | 100 | 0 | 0 | 0 | 0 |
| HLUNG2004037 | 0 | 0 | 55.992 | 0 | 0 | 0 | 0 |
| HLUNG2004067 | 0 | 0 | 40.386 | 0 | 0 | 0 | 0 |
| HLUNG2004154 | 0 | 0 | 38.142 | 0 | 0 | 0 | 0 |
| HLUNG2004159 | 0 | 0 | 6.650 | 0 | 0 | 0 | 6.321 |
| HLUNG2004170 | 0 | 0 | 22.600 | 0 | 0 | 0 | 0 |
| HLUNG2004217 | 0 | 0 | 100 | 0 | 0 | 0 | 0 |
| HLUNG2004273 | 0 | 0 | 100 | 0 | 0 | 0 | 0 |
| HLUNG2004388 | 0 | 0 | 32.754 | 0 | 0 | 0 | 0 |
| HLUNG2004416 | 0 | 0 | 100 | 0 | 0 | 0 | 0 |
| HLUNG2004521 | 0 | 0 | 100 | 0 | 0 | 0 | 0 |
| HLUNG2004534 | 0 | 0 | 10.639 | 0 | 0 | 0 | 0 |
| HLUNG2004684 | 0 | 0 | 24.764 | 0 | 0 | 0 | 0 |
| HLUNG2004707 | 0 | 0 | 100 | 0 | 0 | 0 | 0 |
| HLUNG2004774 | 0 | 0 | 59.535 | 0 | 0 | 0 | 0 |
| HLUNG2004775 | 0 | 0 | 100 | 0 | 0 | 0 | 0 |
| HLUNG2005012 | 0 | 0 | 100 | 0 | 0 | 0 | 0 |
| HLUNG2005030 | 0 | 0 | 100 | 0 | 0 | 0 | 0 |
| HLUNG2005045 | 0 | 0 | 100 | 0 | 0 | 0 | 0 |
| HLUNG2005076 | 0 | 0 | 100 | 0 | 0 | 0 | 0 |
| HLUNG2005133 | 0 | 0 | 51.963 | 0 | 0 | 0 | 0 |
| HLUNG2005203 | 0 | 0 | 76.605 | 0 | 0 | 0 | 0 |
| HLUNG2005230 | 0 | 0 | 8.384 | 0 | 0 | 0 | 0 |
| HLUNG2005479 | 0 | 0 | 100 | 0 | 0 | 0 | 0 |
| HLUNG2005524 | 0 | 0 | 100 | 0 | 0 | 0 | 0 |
| HLUNG2005656 | 0 | 0 | 83.786 | 0 | 0 | 0 | 0 |
| HLUNG2005738 | 0 | 0 | 67.330 | 0 | 0 | 0 | 0 |
| HLUNG2005774 | 0 | 0 | 100 | 0 | 0 | 0 | 0 |
| HLUNG2005813 | 0 | 0 | 100 | 0 | 0 | 0 | 0 |
| HLUNG2005924 | 0 | 0 | 100 | 0 | 0 | 0 | 0 |
| HLUNG2006026 | 0 | 0 | 100 | 0 | 0 | 0 | 0 |
| HLUNG2006067 | 0 | 0 | 100 | 0 | 0 | 0 | 0 |
| HLUNG2006094 | 0 | 0 | 100 | 0 | 0 | 0 | 0 |
| HLUNG2006370 | 0 | 0 | 89.793 | 0 | 0 | 0 | 0 |
| HLUNG2006397 | 0 | 0 | 100 | 0 | 0 | 0 | 0 |
| HLUNG2006570 | 0 | 0 | 71.114 | 0 | 0 | 0 | 0 |
| HLUNG2006599 | 0 | 0 | 100 | 0 | 0 | 0 | 0 |
| HLUNG2006614 | 0 | 0 | 100 | 0 | 0 | 0 | 0 |
| HLUNG2006671 | 0 | 0 | 100 | 0 | 0 | 0 | 0 |
| HLUNG2006781 | 0 | 0 | 100 | 0 | 0 | 0 | 0 |
| HLUNG2006812 | 0 | 0 | 21.691 | 0 | 0 | 0 | 10.309 |
| HLUNG2006843 | 0 | 0 | 38.068 | 0 | 0 | 0 | 0 |
| HLUNG2006852 | 0 | 0 | 100 | 0 | 0 | 0 | 0 |
| HLUNG2006935 | 0 | 0 | 100 | 0 | 0 | 0 | 0 |
| HLUNG2007041 | 0 | 0 | 100 | 0 | 0 | 0 | 0 |
| HLUNG2007163 | 0 | 0 | 49.414 | 0 | 0 | 0 | 0 |
| HLUNG2007210 | 0 | 0 | 7.539 | 0 | 0 | 0 | 0 |
| HLUNG2007219 | 0 | 0 | 81.477 | 0 | 0 | 0 | 0 |
| HLUNG2007245 | 0 | 0 | 12.742 | 0 | 0 | 0 | 12.111 |
| HLUNG2007433 | 0 | 0 | 100 | 0 | 0 | 0 | 0 |
| HLUNG2007931 | 0 | 0 | 100 | 0 | 0 | 0 | 0 |
| HLUNG2008066 | 0 | 0 | 100 | 0 | 0 | 0 | 0 |
| HLUNG2008139 | 0 | 0 | 42.036 | 0 | 0 | 0 | 0 |
| HLUNG2008153 | 0 | 0 | 24.966 | 0 | 0 | 0 | 0 |
| HLUNG2008225 | 0 | 0 | 60.513 | 0 | 0 | 0 | 0 |
| HLUNG2008235 | 0 | 0 | 100 | 0 | 0 | 0 | 0 |
| HLUNG2008247 | 0 | 0 | 100 | 0 | 0 | 0 | 0 |
| HLUNG2008333 | 0 | 0 | 75.461 | 0 | 0 | 0 | 0 |
| HLUNG2008348 | 0 | 0 | 46.606 | 0 | 0 | 0 | 0 |
| HLUNG2008384 | 0 | 0 | 100 | 0 | 0 | 0 | 0 |
| HLUNG2008396 | 0 | 0 | 100 | 0 | 0 | 0 | 0 |
| HLUNG2008439 | 0 | 0 | 100 | 0 | 0 | 0 | 0 |
| HLUNG2008479 | 0 | 0 | 66.321 | 0 | 0 | 0 | 0 |
| HLUNG2008480 | 0 | 0 | 100 | 0 | 0 | 0 | 0 |
| HLUNG2008521 | 0 | 0 | 100 | 0 | 0 | 0 | 0 |
| HLUNG2008637 | 0 | 0 | 6.196 | 0 | 5.960 | 0 | 0 |
| HLUNG2008833 | 0 | 0 | 100 | 0 | 0 | 0 | 0 |
| HLUNG2008875 | 0 | 0 | 100 | 0 | 0 | 0 | 0 |
| HLUNG2008885 | 0 | 0 | 39.593 | 0 | 0 | 0 | 0 |
| HLUNG2008958 | 0 | 0 | 100 | 0 | 0 | 0 | 0 |
| HLUNG2008959 | 0 | 0 | 100 | 0 | 0 | 0 | 0 |
| HLUNG2009067 | 0 | 0 | 76.784 | 0 | 0 | 0 | 0 |
| HLUNG2009215 | 0 | 0 | 50.841 | 0 | 0 | 0 | 0 |
| HLUNG2009225 | 0 | 0 | 5.531 | 0 | 0 | 0 | 0 |
| HLUNG2009253 | 0 | 0 | 100 | 0 | 0 | 0 | 0 |
| HLUNG2009303 | 0 | 0 | 100 | 0 | 0 | 0 | 0 |
| HLUNG2009413 | 0 | 0 | 100 | 0 | 0 | 0 | 0 |
| HLUNG2009729 | 0 | 0 | 100 | 0 | 0 | 0 | 0 |
| HLUNG2010181 | 0 | 0 | 100 | 0 | 0 | 0 | 0 |
| HLUNG2010464 | 0 | 0 | 100 | 0 | 0 | 0 | 0 |
| HLUNG2010562 | 0 | 0 | 100 | 0 | 0 | 0 | 0 |
| HLUNG2010845 | 0 | 0 | 100 | 0 | 0 | 0 | 0 |
| HLUNG2011041 | 0 | 0 | 100 | 0 | 0 | 0 | 0 |
| HLUNG2011298 | 0 | 0 | 35.254 | 0 | 0 | 0 | 0 |
| HLUNG2011461 | 0 | 0 | 78.577 | 0 | 0 | 0 | 0 |
| HLUNG2011833 | 0 | 0 | 15.055 | 0 | 0 | 0 | 0 |
| HLUNG2012049 | 0 | 0 | 100 | 0 | 0 | 0 | 0 |
| HLUNG2012287 | 0 | 0 | 100 | 0 | 0 | 0 | 0 |
| HLUNG2012315 | 0 | 0 | 100 | 0 | 0 | 0 | 0 |
| HLUNG2012546 | 0 | 0 | 100 | 0 | 0 | 0 | 0 |
| HLUNG2012600 | 0 | 0 | 100 | 0 | 0 | 0 | 0 |
| HLUNG2012727 | 0 | 0 | 100 | 0 | 0 | 0 | 0 |
| HLUNG2013097 | 0 | 0 | 100 | 0 | 0 | 0 | 0 |
| HLUNG2013204 | 0 | 0 | 100 | 0 | 0 | 0 | 0 |
| HLUNG2013304 | 0 | 0 | 100 | 0 | 0 | 0 | 0 |
| HLUNG2013350 | 0 | 0 | 100 | 0 | 0 | 0 | 0 |
| HLUNG2013622 | 0 | 0 | 100 | 0 | 0 | 0 | 0 |
| HLUNG2013643 | 0 | 0 | 100 | 0 | 0 | 0 | 0 |
| HLUNG2013784 | 0 | 0 | 12.816 | 0 | 0 | 0 | 0 |
| HLUNG2013851 | 0 | 0 | 100 | 0 | 0 | 0 | 0 |
| HLUNG2014262 | 0 | 0 | 100 | 0 | 0 | 0 | 0 |
| HLUNG2014288 | 0 | 0 | 100 | 0 | 0 | 0 | 0 |
| HLUNG2014449 | 0 | 0 | 100 | 0 | 0 | 0 | 0 |
| HLUNG2014821 | 0 | 0 | 62.081 | 0 | 0 | 0 | 0 |
| HLUNG2015184 | 0 | 0 | 48.026 | 0 | 0 | 0 | 0 |
| HLUNG2015418 | 0 | 0 | 76.605 | 0 | 0 | 0 | 0 |
| HLUNG2015548 | 0 | 0 | 100 | 0 | 0 | 0 | 0 |
| HLUNG2015578 | 0 | 0 | 100 | 0 | 0 | 0 | 0 |
| HLUNG2015617 | 0 | 0 | 100 | 0 | 0 | 0 | 0 |
| HLUNG2016022 | 0 | 0 | 100 | 0 | 0 | 0 | 0 |
| HLUNG2016862 | 0 | 0 | 100 | 0 | 0 | 0 | 0 |
| HLUNG2017262 | 0 | 0 | 5.816 | 0 | 0 | 0 | 0 |
| HLUNG2017286 | 0 | 0 | 100 | 0 | 0 | 0 | 0 |
| HLUNG2017307 | 0 | 0 | 100 | 0 | 0 | 0 | 0 |
| HLUNG2017350 | 0 | 0 | 100 | 0 | 0 | 0 | 0 |
| HLUNG2017546 | 0 | 0 | 12.944 | 0 | 0 | 0 | 0 |
| HLUNG2017806 | 0 | 0 | 100 | 0 | 0 | 0 | 0 |
| HLUNG2018029 | 0 | 0 | 100 | 0 | 0 | 0 | 0 |
| HLUNG2018282 | 0 | 0 | 100 | 0 | 0 | 0 | 0 |
| HLUNG2018626 | 0 | 0 | 100 | 0 | 0 | 0 | 0 |
| HLUNG2019058 | 0 | 0 | 100 | 0 | 0 | 0 | 0 |
| HSYRA1000062 | 0 | 3.016 | 1.571 | 3.201 | 1.511 | 0 | 0 |
| HSYRA1000119 | 0 | 3.237 | 1.686 | 3.437 | 0 | 0 | 4.809 |
| HSYRA1000131 | 0 | 0 | 0 | 100 | 0 | 0 | 0 |
| HSYRA1000137 | 0 | 0 | 0 | 27.855 | 13.150 | 0 | 0 |
| HSYRA1000148 | 0 | 0 | 0 | 49.288 | 0 | 0 | 0 |
| HSYRA1000152 | 0 | 0 | 0 | 8.915 | 0 | 0 | 4.158 |
| HSYRA1000178 | 0 | 0 | 9.197 | 18.741 | 0 | 0 | 0 |
| HSYRA2000044 | 0 | 0 | 0 | 89.963 | 0 | 0 | 0 |
| HSYRA2000135 | 0 | 27.849 | 0 | 29.561 | 0 | 0 | 0 |
| HSYRA2000137 | 0 | 0 | 0 | 16.941 | 0 | 0 | 0 |
| HSYRA2000159 | 0 | 0.849 | 0 | 0.901 | 0 | 0 | 0.420 |
| HSYRA2000190 | 0 | 0 | 0 | 17.752 | 8.381 | 0 | 0 |
| HSYRA2000221 | 0 | 0 | 0 | 70.752 | 0 | 0 | 0 |
| HSYRA2000224 | 0 | 0 | 6.595 | 13.440 | 0 | 0 | 0 |
| HSYRA2000232 | 0 | 0 | 0 | 5.527 | 0 | 0 | 2.578 |
| HSYRA2000237 | 0 | 0 | 0 | 100 | 0 | 0 | 0 |
| HSYRA2000248 | 0 | 0 | 0 | 15.240 | 0 | 0 | 0 |
| HSYRA2000253 | 0 | 0 | 0 | 63.145 | 29.810 | 0 | 0 |
| HSYRA2000255 | 0 | 0 | 0 | 3.354 | 0 | 0 | 0 |
| HSYRA2000332 | 0 | 0 | 2.861 | 29.148 | 0 | 0 | 0 |
| HSYRA2000371 | 0 | 0 | 0 | 100 | 0 | 0 | 0 |
| HSYRA2000424 | 0 | 0 | 0 | 86.967 | 0 | 0 | 0 |
| HSYRA2000507 | 0 | 0 | 0 | 91.958 | 0 | 0 | 0 |
| HSYRA2000510 | 0 | 0 | 0 | 100 | 0 | 0 | 0 |
| HSYRA2000605 | 0 | 0 | 0 | 44.719 | 0 | 0 | 0 |
| HSYRA2000629 | 0 | 0 | 0 | 74.837 | 0 | 0 | 0 |
| HSYRA2000640 | 0 | 5.999 | 0 | 6.367 | 6.012 | 0 | 0 |
| HSYRA2000706 | 0 | 0 | 0 | 91.327 | 0 | 0 | 0 |
| HSYRA2000743 | 0 | 0 | 0 | 5.784 | 0 | 0 | 0 |
| HSYRA2000760 | 0 | 0 | 0 | 100 | 0 | 0 | 0 |
| HSYRA2000787 | 0 | 0 | 0 | 23.247 | 0 | 0 | 0 |
| HSYRA2000792 | 0 | 0 | 0 | 18.101 | 0 | 66.575 | 0 |
| HSYRA2000828 | 0 | 0 | 0 | 21.296 | 0 | 0 | 0 |
| HSYRA2000832 | 0 | 0 | 32.918 | 67.082 | 0 | 0 | 0 |
| HSYRA2000925 | 0 | 1.560 | 0 | 1.656 | 0.782 | 0 | 0 |
| HSYRA2000927 | 0 | 0 | 0 | 100 | 0 | 0 | 0 |
| HSYRA2001003 | 0 | 0 | 0 | 64.164 | 0 | 0 | 0 |
| HSYRA2001103 | 0 | 17.916 | 0 | 6.339 | 0 | 0 | 0 |
| HSYRA2001105 | 0 | 0 | 0 | 20.593 | 0 | 0 | 0 |
| HSYRA2001138 | 0 | 5.385 | 1.870 | 11.433 | 0.900 | 0 | 5.333 |
| HSYRA2001142 | 0 | 0 | 0 | 100 | 0 | 0 | 0 |
| HSYRA2001153 | 0 | 0 | 0 | 68.327 | 0 | 0 | 0 |
| HSYRA2001225 | 0 | 0 | 0 | 5.525 | 0 | 0 | 0 |
| HSYRA2001232 | 0 | 0 | 0 | 57.829 | 0 | 0 | 0 |
| HSYRA2001255 | 0 | 0 | 0 | 100 | 0 | 0 | 0 |
| HSYRA2001332 | 0 | 0 | 0 | 100 | 0 | 0 | 0 |
| HSYRA2001353 | 0 | 0 | 0 | 37.924 | 0 | 0 | 0 |
| HSYRA2001396 | 0 | 0 | 0 | 11.355 | 0 | 0 | 0 |
| HSYRA2001420 | 0 | 0 | 20.436 | 41.645 | 0 | 0 | 0 |
| HSYRA2001476 | 0 | 3.399 | 0 | 3.608 | 0 | 0 | 0 |
| HSYRA2001484 | 0 | 0 | 0 | 67.457 | 0 | 0 | 0 |
| HSYRA2001552 | 0 | 0 | 0 | 100 | 0 | 0 | 0 |
| HSYRA2001567 | 0 | 0 | 0 | 33.500 | 0 | 0 | 0 |
| HSYRA2001574 | 0 | 0 | 0 | 5.624 | 0 | 0 | 0 |
| HSYRA2001580 | 0 | 0 | 0 | 40.964 | 0 | 0 | 0 |
| HSYRA2001595 | 0 | 0 | 2.089 | 4.258 | 0 | 0 | 0 |
| HSYRA2001615 | 0 | 0 | 0 | 15.501 | 0 | 0 | 0 |
| HSYRA2001621 | 0 | 0 | 0 | 1.371 | 0 | 0 | 0 |
| HSYRA2001631 | 0 | 0 | 0 | 43.582 | 0 | 0 | 0 |
| HSYRA2001638 | 0 | 0 | 0 | 16.905 | 0 | 0 | 0 |
| HSYRA2001983 | 0 | 0 | 0 | 36.074 | 0 | 0 | 16.826 |
| HSYRA2002103 | 0 | 0 | 0 | 100 | 0 | 0 | 0 |
| HSYRA2002590 | 0 | 0 | 0 | 100 | 0 | 0 | 0 |
| HSYRA2002741 | 0 | 0 | 0 | 52.597 | 0 | 0 | 0 |
| HSYRA2003168 | 0 | 0 | 0 | 100 | 0 | 0 | 0 |
| HSYRA2004550 | 0 | 0 | 0 | 100 | 0 | 0 | 0 |
| HSYRA2004858 | 0 | 0 | 0 | 100 | 0 | 0 | 0 |
| HSYRA2005456 | 0 | 0 | 0 | 100 | 0 | 0 | 0 |
| HSYRA2005496 | 0 | 0 | 0 | 100 | 0 | 0 | 0 |
| HSYRA2005628 | 0 | 0 | 0 | 50.126 | 0 | 0 | 0 |
| HSYRA2005970 | 0 | 0 | 0 | 100 | 0 | 0 | 0 |
| HSYRA2006049 | 0 | 0 | 0 | 50.609 | 0 | 0 | 0 |
| HSYRA2006873 | 0 | 0 | 0 | 100 | 0 | 0 | 0 |
| HSYRA2007241 | 0 | 0 | 0 | 57.334 | 0 | 0 | 0 |
| HSYRA2007338 | 0 | 0 | 0 | 100 | 0 | 0 | 0 |
| HSYRA2007650 | 0 | 0 | 0 | 35.551 | 0 | 0 | 0 |
| HSYRA2007667 | 0 | 0 | 0 | 66.840 | 0 | 0 | 0 |
| HSYRA2008154 | 0 | 0 | 0 | 100 | 0 | 0 | 0 |
| HSYRA2008714 | 0 | 0 | 0 | 100 | 0 | 0 | 0 |
| HSYRA2009102 | 0 | 0 | 0 | 100 | 0 | 0 | 0 |
| IMR321000155 | 0 | 0 | 0 | 0 | 100 | 0 | 0 |
| IMR321000158 | 0 | 5.360 | 0 | 0 | 13.429 | 0 | 0 |
| IMR321000161 | 0 | 0 | 0 | 0 | 80.886 | 0 | 0 |
| IMR321000165 | 0 | 0 | 0 | 0 | 100 | 0 | 0 |
| IMR321000193 | 0 | 0 | 0 | 0 | 15.487 | 0 | 15.302 |
| IMR321000207 | 0 | 0 | 0 | 0 | 49.332 | 0 | 0 |
| IMR321000210 | 0 | 0 | 0 | 0 | 7.153 | 0 | 0 |
| IMR321000219 | 0 | 0 | 1.029 | 0 | 0.990 | 0 | 0 |
| IMR321000230 | 0 | 0 | 0 | 0 | 100 | 0 | 0 |
| IMR321000242 | 0 | 0 | 0 | 0 | 19.843 | 0 | 0 |
| IMR321000253 | 0 | 0 | 0 | 0 | 3.594 | 0 | 0 |
| IMR321000266 | 0 | 0 | 10.379 | 0 | 9.985 | 0 | 0 |
| IMR322000010 | 0 | 0 | 0 | 0 | 33.404 | 0 | 0 |
| IMR322000072 | 0 | 0 | 0 | 0 | 25.481 | 0 | 0 |
| IMR322000107 | 0 | 0 | 0 | 0 | 100 | 0 | 0 |
| IMR322000121 | 0 | 0 | 0 | 0 | 7.867 | 0 | 0 |
| IMR322000127 | 0 | 0 | 0 | 0 | 5.466 | 0 | 0 |
| IMR322000144 | 0 | 0 | 0 | 0 | 11.511 | 0 | 0 |
| IMR322000152 | 0 | 0 | 0 | 0 | 28.585 | 0 | 0 |
| IMR322000164 | 0 | 0 | 0 | 0 | 100 | 0 | 0 |
| IMR322000178 | 0 | 0 | 0 | 0 | 6.562 | 0 | 0 |
| IMR322000223 | 0 | 0 | 0 | 0 | 2.402 | 0 | 0 |
| IMR322000243 | 0 | 0 | 3.147 | 0 | 6.055 | 0 | 0 |
| IMR322000302 | 0 | 0 | 0 | 0 | 20.933 | 0 | 0 |
| IMR322000316 | 0 | 0 | 0 | 0 | 1.464 | 0 | 0 |
| IMR322000374 | 0 | 0 | 0 | 0 | 19.436 | 0 | 0 |
| IMR322000379 | 0 | 0 | 0 | 0 | 100 | 0 | 0 |
| IMR322000383 | 0 | 0 | 0 | 0 | 100 | 0 | 0 |
| IMR322000418 | 0 | 0 | 0 | 0 | 100 | 0 | 0 |
| IMR322000518 | 0 | 0 | 0 | 0 | 32.511 | 0 | 0 |
| IMR322000555 | 0 | 0 | 0 | 0 | 21.051 | 0 | 0 |
| IMR322000604 | 0 | 0 | 0 | 0 | 77.918 | 0 | 0 |
| IMR322000609 | 0 | 0 | 0 | 0 | 77.918 | 0 | 0 |
| IMR322000656 | 0 | 0 | 0 | 0 | 100 | 0 | 0 |
| IMR322000672 | 0 | 0 | 0 | 0 | 100 | 0 | 0 |
| IMR322000730 | 0 | 2.895 | 0.503 | 0 | 1.934 | 0 | 0 |
| IMR322000742 | 0 | 0 | 0 | 0 | 17.529 | 0 | 5.773 |
| IMR322000775 | 0 | 0 | 0 | 0 | 29.259 | 0 | 0 |
| IMR322000791 | 0 | 0 | 0 | 0 | 18.307 | 0 | 0 |
| IMR322000811 | 0 | 0 | 0 | 0 | 49.874 | 0 | 0 |
| IMR322000819 | 0 | 0 | 0 | 0 | 30.079 | 0 | 0 |
| IMR322000838 | 0 | 0 | 0 | 0 | 76.087 | 0 | 0 |
| IMR322000859 | 0 | 0 | 0 | 0 | 71.312 | 0 | 0 |
| IMR322000863 | 0 | 0 | 0 | 0 | 95.212 | 0 | 0 |
| IMR322000917 | 0 | 0 | 0 | 0 | 41.680 | 0 | 0 |
| IMR322000918 | 0 | 0 | 0 | 0 | 10.343 | 0 | 0 |
| IMR322000919 | 0 | 0 | 0 | 0 | 100 | 0 | 0 |
| IMR322000935 | 0 | 0 | 0 | 0 | 5.283 | 0 | 0 |
| IMR322000953 | 0 | 0 | 0 | 0 | 100 | 0 | 0 |
| IMR322000973 | 0 | 0 | 0 | 0 | 2.845 | 0 | 0 |
| IMR322000984 | 0 | 0 | 0 | 0 | 100 | 0 | 0 |
| IMR322001018 | 0 | 0 | 0 | 0 | 100 | 0 | 0 |
| IMR322001049 | 0 | 0 | 0 | 0 | 20.440 | 0 | 0 |
| IMR322001167 | 0 | 0 | 0 | 0 | 100 | 0 | 0 |
| IMR322001185 | 0 | 0 | 0 | 0 | 49.459 | 0 | 0 |
| IMR322001218 | 0 | 0 | 0 | 0 | 7.900 | 0 | 0 |
| IMR322001245 | 0 | 0 | 0 | 0 | 100 | 0 | 0 |
| IMR322001317 | 0 | 0 | 0 | 0 | 22.291 | 0 | 0 |
| IMR322001318 | 0 | 0 | 0 | 0 | 77.787 | 0 | 0 |
| IMR322001322 | 0 | 0 | 0 | 0 | 77.787 | 0 | 0 |
| IMR322001332 | 0 | 0 | 0 | 0 | 28.184 | 0 | 0 |
| IMR322001380 | 0 | 0 | 0 | 0 | 13.989 | 0 | 0 |
| IMR322001435 | 0 | 6.615 | 3.446 | 0 | 6.630 | 0 | 3.275 |
| IMR322001438 | 0 | 0 | 0 | 0 | 29.322 | 0 | 0 |
| IMR322001452 | 0 | 0 | 0 | 0 | 100 | 0 | 0 |
| IMR322001491 | 0 | 0 | 0 | 0 | 34.025 | 0 | 0 |
| IMR322001534 | 0 | 0 | 0 | 0 | 29.156 | 0 | 0 |
| IMR322001541 | 0 | 0 | 0 | 0 | 47.754 | 0 | 0 |
| IMR322001584 | 0 | 0 | 0 | 0 | 4.405 | 34.316 | 0 |
| IMR322001600 | 0 | 1.134 | 0 | 0 | 0.568 | 0 | 0 |
| IMR322001665 | 0 | 0 | 0 | 0 | 100 | 0 | 0 |
| IMR322001670 | 0 | 0 | 0 | 0 | 16.098 | 0 | 0 |
| IMR322001710 | 0 | 0 | 0 | 0 | 13.687 | 0 | 0 |
| IMR322001724 | 0 | 0 | 0 | 0 | 100 | 0 | 0 |
| IMR322001879 | 0 | 0 | 0 | 0 | 34.007 | 0 | 0 |
| IMR322002035 | 0 | 0 | 0 | 0 | 63.824 | 0 | 0 |
| IMR322002110 | 0 | 0 | 0 | 0 | 100 | 0 | 0 |
| IMR322002470 | 0 | 0 | 0 | 0 | 100 | 0 | 0 |
| IMR322002993 | 0 | 0 | 0 | 0 | 54.923 | 0 | 0 |
| IMR322003675 | 0 | 0 | 0 | 0 | 100 | 0 | 0 |
| IMR322004768 | 0 | 0 | 0 | 0 | 100 | 0 | 0 |
| IMR322005293 | 0 | 0 | 0 | 0 | 100 | 0 | 0 |
| IMR322005833 | 0 | 0 | 0 | 0 | 100 | 0 | 0 |
| IMR322006012 | 0 | 0 | 0 | 0 | 100 | 0 | 0 |
| IMR322006222 | 0 | 0 | 0 | 0 | 100 | 0 | 0 |
| IMR322006495 | 0 | 0 | 0 | 0 | 100 | 0 | 0 |
| IMR322006520 | 0 | 0 | 0 | 0 | 100 | 0 | 0 |
| IMR322006886 | 0 | 0 | 0 | 0 | 100 | 0 | 0 |
| IMR322006947 | 0 | 0 | 0 | 0 | 32.603 | 0 | 0 |
| IMR322007078 | 0 | 0 | 0 | 0 | 100 | 0 | 0 |
| IMR322007225 | 0 | 0 | 0 | 0 | 100 | 0 | 0 |
| IMR322007704 | 0 | 0 | 0 | 0 | 100 | 0 | 0 |
| IMR322008651 | 0 | 0 | 0 | 0 | 100 | 0 | 0 |
| IMR322009710 | 0 | 0 | 0 | 0 | 83.254 | 0 | 0 |
| IMR322009807 | 0 | 0 | 0 | 0 | 100 | 0 | 0 |
| IMR322010295 | 0 | 0 | 0 | 0 | 100 | 0 | 0 |
| IMR322010953 | 0 | 0 | 0 | 0 | 100 | 0 | 0 |
| IMR322011689 | 0 | 0 | 0 | 0 | 100 | 0 | 0 |
| IMR322012314 | 0 | 0 | 0 | 0 | 100 | 0 | 0 |
| IMR322012529 | 0 | 0 | 0 | 0 | 16.616 | 0 | 0 |
| IMR322013053 | 0 | 0 | 0 | 0 | 100 | 0 | 0 |
| IMR322013396 | 0 | 0 | 0 | 0 | 100 | 0 | 0 |
| IMR322013731 | 0 | 0 | 0 | 0 | 100 | 0 | 0 |
| IMR322013805 | 0 | 0 | 0 | 0 | 47.665 | 0 | 0 |
| IMR322015523 | 0 | 0 | 0 | 0 | 100 | 0 | 0 |
| IMR322016146 | 0 | 0 | 0 | 0 | 100 | 0 | 0 |
| IMR322017049 | 0 | 0 | 0 | 0 | 100 | 0 | 0 |
| IMR322018117 | 0 | 0 | 0 | 0 | 100 | 0 | 0 |
| IMR322018192 | 0 | 0 | 0 | 0 | 100 | 0 | 0 |
| IMR322019070 | 0 | 0 | 9.813 | 0 | 9.441 | 0 | 0 |
| JCMLC2000273 | 0 | 0 | 0 | 0 | 0 | 84.957 | 0 |
| KIDNE1000008 | 0 | 0 | 0 | 0 | 0 | 0 | 56.319 |
| KIDNE1000012 | 0 | 0 | 0 | 0 | 0 | 0 | 100 |
| KIDNE1000015 | 0 | 0 | 0 | 0 | 0 | 0 | 100 |
| KIDNE1000028 | 0 | 0 | 0 | 0 | 0 | 0 | 100 |
| KIDNE1000036 | 0 | 0 | 0 | 0 | 0 | 0 | 74.510 |
| KIDNE1000064 | 0 | 0 | 0 | 0 | 0 | 0 | 100 |
| KIDNE1000104 | 0 | 0 | 0 | 0 | 0 | 0 | 57.817 |
| KIDNE1000121 | 0 | 0 | 0 | 0 | 0 | 0 | 100 |
| KIDNE1000143 | 0 | 0 | 0 | 0 | 0 | 0 | 55.638 |
| KIDNE1000145 | 0 | 0 | 0 | 0 | 0 | 0 | 9.641 |
| KIDNE1000152 | 0 | 0 | 0 | 0 | 0 | 0 | 100 |
| KIDNE2000026 | 0 | 0 | 0 | 0 | 0 | 0 | 100 |
| KIDNE2000041 | 0 | 0 | 0 | 0 | 0 | 0 | 100 |
| KIDNE2000046 | 0 | 0 | 0 | 0 | 0 | 0 | 100 |
| KIDNE2000051 | 0 | 0 | 0 | 0 | 0 | 0 | 100 |
| KIDNE2000070 | 0 | 0 | 0 | 0 | 0 | 0 | 100 |
| KIDNE2000085 | 0 | 0 | 0 | 0 | 0 | 0 | 7.170 |
| KIDNE2000167 | 0 | 0 | 0 | 0 | 0 | 0 | 100 |
| KIDNE2000174 | 0 | 0 | 0 | 0 | 0 | 0 | 100 |
| KIDNE2000192 | 0 | 0 | 0 | 0 | 0 | 0 | 100 |
| KIDNE2000227 | 0 | 0 | 0 | 0 | 0 | 0 | 100 |
| KIDNE2000244 | 0 | 0 | 0 | 0 | 0 | 0 | 100 |
| KIDNE2000245 | 0 | 0 | 0 | 0 | 0 | 0 | 100 |
| KIDNE2000252 | 0 | 0 | 0 | 6.388 | 0 | 0 | 2.979 |
| KIDNE2000266 | 0 | 0 | 15.443 | 0 | 0 | 0 | 14.679 |
| KIDNE2000287 | 0 | 0 | 0 | 0 | 0 | 0 | 100 |
| KIDNE2000315 | 0 | 0 | 0 | 0 | 0 | 0 | 47.614 |
| KIDNE2000317 | 0 | 0 | 0 | 0 | 0 | 0 | 49.600 |
| KIDNE2000328 | 0 | 0 | 0 | 0 | 0 | 0 | 100 |
| KIDNE2000330 | 0 | 0 | 0 | 0 | 0 | 0 | 11.902 |
| KIDNE2000335 | 0 | 0 | 0 | 0 | 0 | 0 | 100 |
| KIDNE2000349 | 0 | 0 | 0 | 0 | 0 | 52.159 | 30.868 |
| KIDNE2000375 | 0 | 0 | 0 | 0 | 0 | 0 | 100 |
| KIDNE2000383 | 0 | 0 | 0 | 0 | 0 | 0 | 17.169 |
| KIDNE2000394 | 0 | 0 | 0 | 0 | 0 | 0 | 100 |
| KIDNE2000403 | 0 | 0 | 0 | 0 | 0 | 0 | 2.880 |
| KIDNE2000422 | 0 | 0 | 0 | 0 | 0 | 0 | 77.710 |
| KIDNE2000493 | 0 | 0 | 0 | 0 | 0 | 0 | 100 |
| KIDNE2000497 | 0 | 0 | 0 | 0 | 0 | 0 | 10.932 |
| KIDNE2000510 | 0 | 0 | 0 | 0 | 0 | 0 | 100 |
| KIDNE2000513 | 0 | 0 | 0 | 0 | 0 | 0 | 100 |
| KIDNE2000517 | 0 | 0 | 0 | 0 | 0 | 0 | 27.300 |
| KIDNE2000519 | 0 | 0 | 0 | 0 | 0 | 0 | 100 |
| KIDNE2000555 | 0 | 0 | 0 | 0 | 0 | 0 | 100 |
| KIDNE2000574 | 0 | 5.271 | 0 | 0 | 2.641 | 0 | 2.610 |
| KIDNE2000624 | 0 | 0 | 0 | 0 | 0 | 0 | 100 |
| KIDNE2000665 | 0 | 0 | 0 | 0 | 0 | 0 | 13.498 |
| KIDNE2000678 | 0 | 0 | 0 | 0 | 0 | 0 | 100 |
| KIDNE2000717 | 0 | 0 | 0 | 0 | 0 | 0 | 100 |
| KIDNE2000721 | 0 | 0 | 0 | 0 | 0 | 0 | 73.728 |
| KIDNE2000722 | 0 | 0 | 0 | 0 | 0 | 0 | 100 |
| KIDNE2000777 | 0 | 0 | 0 | 0 | 0 | 0 | 19.958 |
| KIDNE2000801 | 0 | 0 | 0 | 0 | 0 | 0 | 100 |
| KIDNE2000832 | 0 | 0 | 0 | 0 | 0 | 0 | 32.592 |
| KIDNE2000833 | 0 | 0 | 0 | 0 | 0 | 0 | 25.115 |
| KIDNE2000846 | 0 | 0 | 0 | 0 | 0 | 0 | 100 |
| KIDNE2000867 | 0 | 0 | 0 | 0 | 0 | 0 | 100 |
| KIDNE2000909 | 0 | 0 | 0 | 0 | 0 | 0 | 7.157 |
| KIDNE2000947 | 0 | 0 | 0 | 0 | 0 | 0 | 8.811 |
| KIDNE2001117 | 0 | 0 | 0 | 0 | 0 | 0 | 77.710 |
| KIDNE2001140 | 0 | 0 | 0 | 0 | 0 | 0 | 100 |
| KIDNE2001162 | 0 | 0 | 0 | 3.489 | 1.647 | 0 | 1.627 |
| KIDNE2001269 | 0 | 0 | 0 | 0 | 0 | 0 | 100 |
| KIDNE2001361 | 0 | 0 | 0 | 0 | 0 | 0 | 80.699 |
| KIDNE2001373 | 0 | 0 | 0 | 0 | 0 | 0 | 24.839 |
| KIDNE2001467 | 0 | 0 | 0 | 0 | 0 | 7.165 | 0.909 |
| KIDNE2001636 | 0 | 0 | 0 | 0 | 0 | 0 | 49.423 |
| KIDNE2001713 | 0 | 0 | 0 | 0 | 0 | 0 | 54.019 |
| KIDNE2001802 | 0 | 0 | 0 | 0 | 0 | 0 | 100 |
| KIDNE2001840 | 0 | 0 | 0 | 0 | 0 | 0 | 100 |
| KIDNE2001847 | 0 | 0 | 0 | 0 | 0 | 0 | 12.687 |
| KIDNE2001857 | 0 | 0 | 0 | 0 | 0 | 0 | 100 |
| KIDNE2001873 | 0 | 0 | 0 | 0 | 0 | 0 | 100 |
| KIDNE2001897 | 0 | 0 | 0 | 0 | 0 | 0 | 100 |
| KIDNE2001931 | 0 | 0 | 0 | 0 | 0 | 0 | 100 |
| KIDNE2001979 | 0 | 0 | 0 | 44.035 | 0 | 0 | 20.540 |
| KIDNE2002015 | 0 | 0 | 0 | 0 | 0 | 0 | 100 |
| KIDNE2002162 | 0 | 0 | 0 | 0 | 0 | 0 | 100 |
| KIDNE2002168 | 0 | 0 | 0 | 0 | 0 | 0 | 100 |
| KIDNE2002191 | 0 | 0 | 0 | 0 | 0 | 0 | 24.850 |
| KIDNE2002198 | 0 | 0 | 0 | 0 | 0 | 0 | 100 |
| KIDNE2002252 | 0 | 0 | 0 | 0 | 0 | 0 | 7.600 |
| KIDNE2002262 | 0 | 0 | 0 | 0 | 0 | 0 | 100 |
| KIDNE2002265 | 0 | 0 | 0 | 0 | 0 | 0 | 6.341 |
| KIDNE2002438 | 0 | 0 | 0 | 0 | 0 | 0 | 65.363 |
| KIDNE2002483 | 0 | 0 | 0 | 0 | 0 | 0 | 100 |
| KIDNE2002725 | 0 | 0 | 0 | 0 | 0 | 0 | 35.870 |
| KIDNE2002768 | 0 | 0 | 0 | 0 | 0 | 0 | 100 |
| KIDNE2002795 | 0 | 0 | 0 | 0 | 0 | 0 | 100 |
| KIDNE2002798 | 0 | 0 | 44.388 | 0 | 0 | 0 | 42.192 |
| KIDNE2002839 | 0 | 0 | 0 | 0 | 0 | 0 | 25.593 |
| KIDNE2002845 | 0 | 0 | 0 | 0 | 0 | 0 | 100 |
| KIDNE2002872 | 0 | 0 | 0 | 0 | 0 | 0 | 1.993 |
| KIDNE2002882 | 0 | 0 | 0 | 0 | 0 | 0 | 28.683 |
| KIDNE2002883 | 0 | 0 | 0 | 0 | 0 | 0 | 7.907 |
| KIDNE2002980 | 0 | 0 | 0 | 0 | 0 | 0 | 10.988 |
| KIDNE2002991 | 0 | 0 | 0 | 0 | 0 | 0 | 100 |
| KIDNE2003185 | 0 | 0 | 0 | 0 | 0 | 0 | 100 |
| KIDNE2003188 | 0 | 0 | 0 | 0 | 0 | 0 | 100 |
| KIDNE2003233 | 0 | 0 | 0 | 0 | 0 | 0 | 83.085 |
| KIDNE2003305 | 0 | 0 | 6.174 | 0 | 0 | 0 | 8.803 |
| KIDNE2003316 | 0 | 0 | 0 | 0 | 0 | 0 | 26.377 |
| KIDNE2003335 | 0 | 0 | 0 | 0 | 0 | 0 | 100 |
| KIDNE2003357 | 0 | 0 | 0 | 0 | 0 | 0 | 51.547 |
| KIDNE2003373 | 0 | 0 | 0 | 0 | 0 | 0 | 54.019 |
| KIDNE2003377 | 0 | 0 | 0 | 0 | 0 | 0 | 100 |
| KIDNE2003507 | 0 | 0 | 0 | 0 | 0 | 0 | 23.607 |
| KIDNE2003752 | 0 | 0 | 0 | 0 | 0 | 0 | 100 |
| KIDNE2003764 | 0 | 0 | 39.509 | 0 | 0 | 0 | 37.554 |
| KIDNE2003837 | 0 | 0 | 0 | 0 | 0 | 0 | 100 |
| KIDNE2003941 | 0 | 0 | 0 | 0 | 0 | 0 | 1.758 |
| KIDNE2003994 | 0 | 0 | 0 | 0 | 0 | 0 | 28.111 |
| KIDNE2004034 | 0 | 0 | 0 | 0 | 0 | 0 | 100 |
| KIDNE2004054 | 0 | 0 | 0 | 0 | 0 | 0 | 45.509 |
| KIDNE2004084 | 0 | 0 | 0 | 0 | 0 | 0 | 100 |
| KIDNE2004095 | 0 | 0 | 0 | 0 | 0 | 0 | 100 |
| KIDNE2004115 | 0 | 0 | 0 | 0 | 0 | 0 | 83.085 |
| KIDNE2004233 | 0 | 0 | 0 | 0 | 0 | 0 | 100 |
| KIDNE2004262 | 0 | 0 | 0 | 0 | 0 | 0 | 100 |
| KIDNE2004279 | 0 | 0 | 0 | 0 | 0 | 0 | 100 |
| KIDNE2004294 | 0 | 0 | 0 | 0 | 0 | 0 | 100 |
| KIDNE2004295 | 0 | 0 | 23.416 | 0 | 0 | 0 | 22.257 |
| KIDNE2004305 | 0 | 0 | 0 | 0 | 0 | 0 | 65.363 |
| KIDNE2004344 | 0 | 0 | 0 | 0 | 0 | 0 | 80.699 |
| KIDNE2004394 | 0 | 0 | 0 | 0 | 0 | 0 | 100 |
| KIDNE2004411 | 0 | 0 | 0 | 0 | 0 | 0 | 59.417 |
| KIDNE2004475 | 0 | 0 | 0 | 0 | 9.083 | 0 | 8.974 |
| KIDNE2004519 | 0 | 0 | 0 | 0 | 0 | 0 | 100 |
| KIDNE2004520 | 0 | 0 | 0 | 0 | 0 | 0 | 100 |
| KIDNE2004531 | 0 | 0 | 0 | 0 | 0 | 0 | 80.699 |
| KIDNE2004534 | 0 | 0 | 0 | 0 | 13.171 | 0 | 13.013 |
| KIDNE2004562 | 0 | 0 | 0 | 0 | 0 | 0 | 100 |
| KIDNE2004579 | 0 | 0 | 0 | 0 | 0 | 0 | 100 |
| KIDNE2004626 | 0 | 0 | 0 | 0 | 0 | 0 | 44.933 |
| KIDNE2004681 | 0 | 0 | 0 | 0 | 0 | 0 | 100 |
| KIDNE2004828 | 0 | 0 | 0 | 0 | 0 | 0 | 100 |
| KIDNE2004846 | 0 | 0 | 0 | 0 | 0 | 0 | 22.995 |
| KIDNE2004864 | 0 | 0 | 0 | 0 | 0 | 0 | 34.038 |
| KIDNE2004879 | 0 | 0 | 0 | 0 | 0 | 0 | 100 |
| KIDNE2004981 | 0 | 0 | 0 | 0 | 0 | 0 | 100 |
| KIDNE2004985 | 0 | 0 | 0 | 0 | 0 | 0 | 100 |
| KIDNE2004999 | 0 | 0 | 0 | 0 | 0 | 0 | 100 |
| KIDNE2005038 | 0 | 0 | 0 | 0 | 0 | 0 | 100 |
| KIDNE2005042 | 0 | 0 | 0 | 0 | 0 | 0 | 28.069 |
| KIDNE2005062 | 0 | 0 | 0 | 0 | 0 | 0 | 100 |
| KIDNE2005266 | 0 | 0 | 0 | 0 | 0 | 0 | 100 |
| KIDNE2005296 | 0 | 0 | 0 | 0 | 0 | 0 | 100 |
| KIDNE2005321 | 0 | 0 | 0 | 0 | 0 | 0 | 34.448 |
| KIDNE2005327 | 0 | 0 | 0 | 0 | 0 | 0 | 100 |
| KIDNE2005336 | 0 | 0 | 0 | 0 | 0 | 0 | 58.307 |
| KIDNE2005400 | 0 | 0 | 0 | 0 | 0 | 0 | 100 |
| KIDNE2005424 | 0 | 0 | 0 | 0 | 0 | 0 | 100 |
| KIDNE2005477 | 0 | 0 | 0 | 0 | 0 | 0 | 100 |
| KIDNE2005526 | 0 | 0 | 0 | 0 | 0 | 0 | 100 |
| KIDNE2005543 | 0 | 0 | 0 | 0 | 0 | 0 | 62.084 |
| KIDNE2005603 | 0 | 0 | 0 | 0 | 0 | 0 | 100 |
| KIDNE2005629 | 0 | 0 | 0 | 0 | 0 | 0 | 100 |
| KIDNE2005676 | 0 | 0 | 0 | 0 | 0 | 0 | 4.905 |
| KIDNE2005781 | 0 | 0 | 0 | 0 | 0 | 0 | 100 |
| KIDNE2005798 | 0 | 0 | 0 | 0 | 0 | 0 | 100 |
| KIDNE2005854 | 0 | 0 | 0 | 0 | 0 | 0 | 100 |
| KIDNE2005908 | 0 | 0 | 0 | 0 | 0 | 0 | 100 |
| KIDNE2005937 | 0 | 0 | 0 | 0 | 0 | 0 | 94.471 |
| KIDNE2006009 | 0 | 25.959 | 0 | 0 | 0 | 0 | 12.853 |
| KIDNE2006014 | 0 | 0 | 0 | 0 | 0 | 0 | 10.352 |
| KIDNE2006030 | 0 | 0 | 0 | 0 | 0 | 0 | 7.440 |
| KIDNE2006039 | 0 | 0 | 0 | 0 | 0 | 0 | 55.033 |
| KIDNE2006053 | 0 | 0 | 0 | 0 | 0 | 0 | 100 |
| KIDNE2006062 | 0 | 0 | 0 | 0 | 0 | 0 | 39.197 |
| KIDNE2006092 | 0 | 0 | 0 | 0 | 0 | 0 | 100 |
| KIDNE2006145 | 0 | 0 | 0 | 0 | 0 | 0 | 100 |
| KIDNE2006149 | 0 | 0 | 0 | 0 | 0 | 0 | 100 |
| KIDNE2006210 | 0 | 0 | 0 | 0 | 0 | 0 | 48.873 |
| KIDNE2006248 | 27.288 | 0 | 1.140 | 0 | 0 | 8.547 | 1.084 |
| KIDNE2006299 | 0 | 0 | 0 | 0 | 0 | 0 | 100 |
| KIDNE2006334 | 0 | 0 | 0 | 0 | 0 | 0 | 100 |
| KIDNE2006353 | 0 | 0 | 14.344 | 0 | 0 | 0 | 13.634 |
| KIDNE2006376 | 0 | 0 | 0 | 0 | 0 | 0 | 100 |
| KIDNE2006378 | 0 | 0 | 0 | 0 | 0 | 0 | 100 |
| KIDNE2006465 | 0 | 0 | 0 | 0 | 0 | 0 | 10.787 |
| KIDNE2006580 | 0 | 0 | 0 | 0 | 0 | 0 | 48.900 |
| KIDNE2006652 | 0 | 0 | 0 | 0 | 0 | 0 | 90.326 |
| KIDNE2006687 | 0 | 0 | 0 | 0 | 0 | 0 | 100 |
| KIDNE2006733 | 0 | 0 | 0 | 0 | 0 | 0 | 100 |
| KIDNE2006760 | 0 | 0 | 24.742 | 0 | 0 | 0 | 23.517 |
| KIDNE2006775 | 0 | 0 | 0 | 0 | 0 | 0 | 6.387 |
| KIDNE2006811 | 0 | 0 | 11.935 | 0 | 0 | 0 | 11.345 |
| KIDNE2006820 | 0 | 0 | 0 | 0 | 0 | 0 | 100 |
| KIDNE2006880 | 0 | 0 | 11.775 | 0 | 0 | 0 | 11.193 |
| KIDNE2007005 | 0 | 0 | 0 | 0 | 0 | 0 | 66.711 |
| KIDNE2007040 | 0 | 0 | 0 | 0 | 0 | 0 | 74.510 |
| KIDNE2007077 | 0 | 0 | 0 | 0 | 0 | 0 | 100 |
| KIDNE2007186 | 0 | 0 | 0 | 0 | 0 | 0 | 66.711 |
| KIDNE2007222 | 0 | 0 | 0 | 0 | 0 | 0 | 100 |
| KIDNE2007328 | 0 | 0 | 3.245 | 0 | 0 | 0 | 3.084 |
| KIDNE2007352 | 0 | 0 | 3.049 | 3.107 | 0 | 11.428 | 5.797 |
| KIDNE2007356 | 0 | 0 | 0 | 0 | 0 | 0 | 49.573 |
| KIDNE2007422 | 0 | 0 | 0 | 0 | 0 | 0 | 100 |
| KIDNE2007569 | 0 | 0 | 0 | 0 | 0 | 0 | 100 |
| KIDNE2007810 | 0 | 0 | 0 | 0 | 0 | 0 | 100 |
| KIDNE2007811 | 0 | 0 | 0 | 0 | 0 | 0 | 29.868 |
| KIDNE2007910 | 0 | 0 | 0 | 0 | 0 | 0 | 31.595 |
| KIDNE2007944 | 0 | 0 | 0 | 0 | 0 | 0 | 35.045 |
| KIDNE2007954 | 0 | 0 | 7.732 | 0 | 0 | 0 | 7.349 |
| KIDNE2008022 | 0 | 0 | 0 | 0 | 0 | 0 | 84.210 |
| KIDNE2008048 | 0 | 3.777 | 0 | 0 | 0 | 0 | 3.740 |
| KIDNE2008069 | 0 | 0 | 0 | 0 | 0 | 0 | 4.069 |
| KIDNE2008072 | 0 | 0 | 0 | 0 | 0 | 0 | 100 |
| KIDNE2008116 | 0 | 0 | 0 | 0 | 0 | 0 | 4.045 |
| KIDNE2008117 | 0 | 0 | 0 | 0 | 0 | 0 | 100 |
| KIDNE2008218 | 0 | 0 | 0 | 0 | 0 | 0 | 100 |
| KIDNE2008315 | 0 | 0 | 0 | 0 | 0 | 0 | 100 |
| KIDNE2008362 | 0 | 0 | 0 | 0 | 16.112 | 0 | 15.919 |
| KIDNE2008378 | 0 | 0 | 0 | 0 | 0 | 0 | 100 |
| KIDNE2008403 | 0 | 0 | 0 | 0 | 0 | 0 | 4.741 |
| KIDNE2008404 | 0 | 0 | 0 | 0 | 0 | 0 | 32.332 |
| KIDNE2008446 | 0 | 0 | 0 | 0 | 0 | 0 | 100 |
| KIDNE2008473 | 0 | 0 | 0 | 0 | 0 | 0 | 100 |
| KIDNE2008480 | 0 | 0 | 0 | 0 | 0 | 0 | 100 |
| KIDNE2008649 | 0 | 0 | 0 | 0 | 0 | 0 | 89.133 |
| KIDNE2008666 | 0 | 0 | 0 | 0 | 0 | 0 | 77.710 |
| KIDNE2008697 | 0 | 0 | 0 | 0 | 0 | 0 | 100 |
| KIDNE2008758 | 0 | 0 | 0 | 0 | 0 | 0 | 75.867 |
| KIDNE2008788 | 0 | 0 | 0 | 0 | 0 | 0 | 100 |
| KIDNE2008795 | 0 | 0 | 0 | 0 | 0 | 0 | 100 |
| KIDNE2008824 | 0 | 0 | 0 | 0 | 0 | 0 | 100 |
| KIDNE2008832 | 0 | 0 | 0 | 0 | 0 | 0 | 100 |
| KIDNE2008869 | 0 | 0 | 0 | 0 | 0 | 0 | 100 |
| KIDNE2008914 | 0 | 0 | 0 | 0 | 0 | 0 | 60.644 |
| KIDNE2008975 | 0 | 0 | 0 | 0 | 0 | 0 | 100 |
| KIDNE2008987 | 0 | 0 | 0 | 0 | 0 | 0 | 10.043 |
| KIDNE2009019 | 0 | 0 | 0 | 0 | 0 | 0 | 73.728 |
| KIDNE2009109 | 0 | 0 | 0 | 0 | 0 | 0 | 100 |
| KIDNE2009180 | 0 | 0 | 0 | 0 | 0 | 0 | 100 |
| KIDNE2009191 | 0 | 0 | 0 | 0 | 0 | 0 | 100 |
| KIDNE2009332 | 0 | 0 | 0 | 0 | 0 | 0 | 65.735 |
| KIDNE2009367 | 0 | 0 | 0 | 0 | 2.659 | 0 | 2.628 |
| KIDNE2009426 | 0 | 0 | 0 | 0 | 0 | 0 | 100 |
| KIDNE2009467 | 0 | 0 | 0 | 0 | 0 | 0 | 100 |
| KIDNE2009490 | 0 | 0 | 0 | 0 | 0 | 0 | 100 |
| KIDNE2009553 | 0 | 0 | 0 | 0 | 0 | 0 | 100 |
| KIDNE2009605 | 0 | 0 | 0 | 0 | 0 | 0 | 52.649 |
| KIDNE2009628 | 0 | 0 | 0 | 0 | 0 | 0 | 100 |
| KIDNE2009647 | 0 | 0 | 0 | 0 | 0 | 0 | 100 |
| KIDNE2009676 | 0 | 0 | 0 | 0 | 0 | 0 | 100 |
| KIDNE2009723 | 0 | 0 | 0 | 0 | 0 | 0 | 100 |
| KIDNE2010007 | 0 | 0 | 0 | 0 | 0 | 0 | 100 |
| KIDNE2010049 | 0 | 0 | 0 | 0 | 0 | 0 | 11.987 |
| KIDNE2010052 | 0 | 0 | 0 | 0 | 0 | 0 | 100 |
| KIDNE2010084 | 0 | 0 | 0 | 0 | 0 | 0 | 100 |
| KIDNE2010137 | 0 | 0 | 0 | 0 | 0 | 0 | 100 |
| KIDNE2010151 | 0 | 0 | 0 | 0 | 0 | 0 | 100 |
| KIDNE2010264 | 0 | 0 | 0 | 0 | 0 | 0 | 100 |
| KIDNE2010265 | 0 | 0 | 0 | 0 | 0 | 0 | 8.237 |
| KIDNE2010271 | 0 | 0 | 0 | 0 | 0 | 0 | 100 |
| KIDNE2010419 | 0 | 0 | 0 | 0 | 0 | 0 | 100 |
| KIDNE2010430 | 0 | 0 | 0 | 0 | 0 | 0 | 33.246 |
| KIDNE2010574 | 0 | 0 | 0 | 0 | 0 | 0 | 100 |
| KIDNE2010674 | 0 | 0 | 0 | 0 | 0 | 0 | 100 |
| KIDNE2010739 | 0 | 0 | 0 | 0 | 0 | 0 | 100 |
| KIDNE2010750 | 0 | 0 | 0 | 0 | 0 | 0 | 74.264 |
| KIDNE2010762 | 0 | 0 | 0 | 0 | 0 | 0 | 100 |
| KIDNE2010863 | 0 | 0 | 0 | 0 | 0 | 0 | 100 |
| KIDNE2010973 | 0 | 0 | 0 | 0 | 0 | 0 | 100 |
| KIDNE2010989 | 0 | 0 | 0 | 0 | 0 | 0 | 100 |
| KIDNE2011200 | 0 | 0 | 0 | 0 | 0 | 0 | 100 |
| KIDNE2011314 | 0 | 0 | 0 | 0 | 0 | 0 | 75.867 |
| KIDNE2011508 | 0 | 0 | 0 | 0 | 0 | 0 | 65.178 |
| KIDNE2011532 | 0 | 0 | 0 | 0 | 0 | 0 | 100 |
| KIDNE2011635 | 0 | 0 | 0 | 0 | 0 | 0 | 48.502 |
| KIDNE2011752 | 0 | 0 | 0 | 0 | 0 | 0 | 83.085 |
| KIDNE2011782 | 0 | 0 | 0 | 0 | 0 | 0 | 100 |
| KIDNE2011858 | 0 | 0 | 0 | 0 | 0 | 0 | 100 |
| KIDNE2012009 | 0 | 0 | 0 | 0 | 0 | 0 | 33.186 |
| KIDNE2012025 | 0 | 0 | 0 | 0 | 0 | 0 | 16.362 |
| KIDNE2012188 | 0 | 0 | 0 | 0 | 0 | 0 | 62.256 |
| KIDNE2012291 | 0 | 0 | 0 | 0 | 0 | 0 | 83.085 |
| KIDNE2012316 | 0 | 0 | 0 | 0 | 0 | 0 | 59.126 |
| KIDNE2012361 | 0 | 0 | 0 | 0 | 0 | 0 | 100 |
| KIDNE2012440 | 0 | 0 | 0 | 13.230 | 0 | 0 | 6.171 |
| KIDNE2012453 | 0 | 0 | 0 | 0 | 0 | 0 | 100 |
| KIDNE2012563 | 0 | 0 | 0 | 0 | 0 | 0 | 100 |
| KIDNE2012601 | 0 | 0 | 0 | 0 | 0 | 0 | 100 |
| KIDNE2012613 | 0 | 0 | 0 | 0 | 0 | 0 | 100 |
| KIDNE2012710 | 0 | 0 | 0 | 0 | 0 | 0 | 33.012 |
| KIDNE2012745 | 0 | 0 | 0 | 0 | 0 | 0 | 100 |
| KIDNE2012775 | 0 | 0 | 0 | 0 | 0 | 0 | 100 |
| KIDNE2012784 | 0 | 0 | 0 | 0 | 0 | 0 | 59.375 |
| KIDNE2012945 | 0 | 0 | 51.268 | 0 | 0 | 0 | 48.732 |
| KIDNE2013045 | 0 | 0 | 0 | 0 | 0 | 0 | 100 |
| KIDNE2013095 | 0 | 0 | 0 | 0 | 0 | 0 | 100 |
| KIDNE2013158 | 0 | 0 | 0 | 0 | 0 | 0 | 63.240 |
| KIDNE2013218 | 0 | 0 | 0 | 0 | 0 | 0 | 100 |
| KIDNE2013263 | 0 | 0 | 0 | 0 | 0 | 0 | 100 |
| KIDNE2013346 | 0 | 0 | 0 | 0 | 0 | 0 | 72.727 |
| KIDNE2013388 | 0 | 0 | 0 | 0 | 0 | 0 | 100 |
| KIDNE2013413 | 0 | 0 | 0 | 0 | 0 | 0 | 65.363 |
| KIDNE2013489 | 0 | 0 | 0 | 0 | 0 | 0 | 100 |
| KIDNE2013639 | 0 | 0 | 0 | 0 | 0 | 0 | 100 |
| KIDNE2013731 | 0 | 0 | 0 | 0 | 0 | 0 | 100 |
| KIDNE2013734 | 0 | 0 | 0 | 0 | 0 | 0 | 100 |
| KIDNE2013775 | 0 | 0 | 0 | 0 | 0 | 0 | 100 |
| KIDNE2013801 | 0 | 0 | 0 | 0 | 0 | 0 | 100 |
| KIDNE2013845 | 0 | 0 | 4.099 | 0 | 0 | 0 | 3.897 |
| KIDNE2013866 | 0 | 0 | 0 | 0 | 0 | 0 | 84.210 |
| KIDNE2014087 | 0 | 0 | 0 | 0 | 0 | 0 | 100 |
| KIDNE2014112 | 0 | 0 | 0 | 0 | 0 | 0 | 100 |
| KIDNE2014119 | 0 | 0 | 0 | 0 | 0 | 0 | 49.697 |
| KIDNE2014170 | 0 | 0 | 0 | 0 | 0 | 0 | 100 |
| KIDNE2014184 | 0 | 0 | 0 | 0 | 0 | 0 | 100 |
| KIDNE2014268 | 0 | 0 | 0 | 0 | 0 | 0 | 100 |
| KIDNE2014290 | 0 | 0 | 10.285 | 5.240 | 0 | 0 | 2.444 |
| KIDNE2014298 | 0 | 0 | 0 | 0 | 0 | 0 | 100 |
| KIDNE2014320 | 0 | 0 | 0 | 0 | 0 | 0 | 75.867 |
| KIDNE2014325 | 0 | 26.636 | 13.875 | 0 | 0 | 0 | 13.188 |
| KIDNE2014415 | 0 | 0 | 0 | 0 | 0 | 0 | 100 |
| KIDNE2014489 | 0 | 0 | 0 | 0 | 0 | 0 | 100 |
| KIDNE2014496 | 0 | 0 | 0 | 0 | 0 | 0 | 100 |
| KIDNE2014661 | 0 | 0 | 0 | 0 | 0 | 0 | 100 |
| KIDNE2014717 | 0 | 0 | 0 | 0 | 0 | 0 | 100 |
| KIDNE2014789 | 0 | 0 | 0 | 0 | 0 | 0 | 100 |
| KIDNE2014808 | 0 | 0 | 0 | 0 | 0 | 0 | 75.683 |
| KIDNE2014890 | 0 | 0 | 0 | 0 | 0 | 0 | 100 |
| KIDNE2014978 | 0 | 0 | 0 | 0 | 0 | 0 | 77.579 |
| KIDNE2015073 | 0 | 0 | 0 | 0 | 0 | 0 | 100 |
| KIDNE2015221 | 0 | 0 | 0 | 0 | 0 | 0 | 100 |
| KIDNE2015244 | 0 | 0 | 0 | 0 | 0 | 0 | 100 |
| KIDNE2015313 | 0 | 0 | 0 | 0 | 0 | 0 | 100 |
| KIDNE2015433 | 0 | 0 | 0 | 0 | 0 | 0 | 30.805 |
| KIDNE2015445 | 0 | 0 | 0 | 0 | 0 | 0 | 11.977 |
| KIDNE2015483 | 0 | 0 | 0 | 0 | 0 | 0 | 100 |
| KIDNE2015515 | 0 | 0 | 0 | 0 | 0 | 0 | 100 |
| KIDNE2015546 | 0 | 0 | 0 | 0 | 0 | 0 | 48.502 |
| KIDNE2015556 | 0 | 0 | 0 | 0 | 0 | 0 | 100 |
| KIDNE2015598 | 0 | 0 | 0 | 0 | 0 | 0 | 80.699 |
| KIDNE2015660 | 0 | 0 | 0 | 0 | 0 | 0 | 100 |
| KIDNE2015710 | 0 | 0 | 0 | 0 | 0 | 0 | 6.526 |
| KIDNE2015987 | 0 | 0 | 0 | 0 | 0 | 0 | 100 |
| KIDNE2016000 | 0 | 0 | 0 | 0 | 0 | 0 | 100 |
| KIDNE2016036 | 0 | 0 | 0 | 0 | 0 | 0 | 100 |
| KIDNE2016096 | 0 | 0 | 0 | 0 | 0 | 0 | 100 |
| KIDNE2016101 | 0 | 0 | 0 | 0 | 0 | 0 | 83.085 |
| KIDNE2016142 | 0 | 0 | 0 | 0 | 0 | 0 | 100 |
| KIDNE2016188 | 0 | 0 | 0 | 0 | 0 | 0 | 100 |
| KIDNE2016327 | 0 | 0 | 0 | 0 | 0 | 0 | 60.998 |
| KIDNE2016371 | 0 | 0 | 0 | 0 | 0 | 0 | 31.410 |
| KIDNE2016388 | 0 | 0 | 0 | 0 | 0 | 0 | 100 |
| KIDNE2016464 | 0 | 0 | 0 | 0 | 0 | 0 | 100 |
| KIDNE2016539 | 0 | 0 | 0 | 0 | 50.301 | 0 | 49.699 |
| KIDNE2016570 | 0 | 0 | 0 | 0 | 0 | 0 | 84.210 |
| KIDNE2016918 | 0 | 0 | 0 | 0 | 0 | 0 | 100 |
| KIDNE2017007 | 0 | 0 | 0 | 0 | 0 | 0 | 100 |
| KIDNE2017040 | 0 | 0 | 0 | 0 | 0 | 0 | 11.723 |
| KIDNE2017052 | 0 | 0 | 0 | 0 | 0 | 0 | 80.699 |
| KIDNE2017151 | 0 | 0 | 0 | 0 | 0 | 0 | 100 |
| KIDNE2017153 | 0 | 0 | 0 | 0 | 0 | 0 | 83.085 |
| KIDNE2017315 | 0 | 0 | 0 | 0 | 0 | 0 | 100 |
| KIDNE2017332 | 0 | 0 | 0 | 0 | 0 | 0 | 100 |
| KIDNE2017343 | 0 | 0 | 0 | 0 | 0 | 0 | 46.057 |
| KIDNE2017454 | 0 | 0 | 0 | 0 | 0 | 0 | 100 |
| KIDNE2017603 | 0 | 0 | 0 | 0 | 0 | 0 | 100 |
| KIDNE2017956 | 0 | 0 | 0 | 0 | 0 | 0 | 100 |
| KIDNE2018071 | 0 | 0 | 0 | 0 | 0 | 0 | 49.105 |
| KIDNE2018166 | 0 | 0 | 0 | 0 | 0 | 0 | 100 |
| KIDNE2018167 | 0 | 0 | 0 | 0 | 0 | 0 | 100 |
| KIDNE2018217 | 0 | 0 | 0 | 0 | 0 | 0 | 21.156 |
| KIDNE2018254 | 0 | 0 | 0 | 0 | 0 | 0 | 100 |
| KIDNE2018268 | 0 | 0 | 0 | 0 | 0 | 0 | 100 |
| KIDNE2018269 | 0 | 0 | 0 | 0 | 0 | 0 | 100 |
| KIDNE2018287 | 0 | 0 | 0 | 0 | 0 | 0 | 100 |
| KIDNE2018294 | 0 | 0 | 0 | 0 | 0 | 0 | 100 |
| KIDNE2018352 | 0 | 0 | 13.079 | 0 | 0 | 0 | 12.432 |
| KIDNE2018462 | 0 | 0 | 0 | 0 | 0 | 0 | 100 |
| KIDNE2018493 | 0 | 0 | 0 | 0 | 0 | 0 | 12.423 |
| KIDNE2018617 | 0 | 0 | 0 | 0 | 0 | 0 | 100 |
| KIDNE2018678 | 0 | 0 | 0 | 0 | 0 | 0 | 100 |
| KIDNE2018727 | 0 | 0 | 0 | 0 | 0 | 0 | 100 |
| KIDNE2018863 | 0 | 0 | 0 | 0 | 0 | 0 | 100 |
| KIDNE2018891 | 0 | 0 | 0 | 0 | 0 | 0 | 21.260 |
| KIDNE2018989 | 0 | 0 | 0 | 0 | 0 | 0 | 100 |
| KIDNE2018996 | 0 | 0 | 0 | 0 | 0 | 0 | 100 |
| KIDNE2019074 | 0 | 0 | 0 | 0 | 0 | 0 | 100 |
| KIDNE2019187 | 0 | 0 | 0 | 0 | 0 | 0 | 100 |
| LIVER1000079 | 0 | 0 | 0 | 0 | 0 | 0 | 6.109 |
| LIVER1000104 | 0 | 0 | 0 | 0 | 0 | 0 | 43.110 |
| LIVER1000132 | 0 | 0 | 12.847 | 0 | 0 | 0 | 0 |
| LIVER2002842 | 0 | 0 | 14.004 | 0 | 0 | 0 | 0 |
| LIVER2003511 | 0 | 0 | 0 | 0 | 0 | 0 | 28.683 |
| LIVER2006006 | 0 | 5.007 | 0 | 0 | 0 | 0 | 0 |
| MAMGL1000032 | 0 | 1.135 | 0 | 0 | 0.569 | 0 | 1.685 |
| MAMGL1000035 | 0 | 0 | 0 | 0 | 0 | 0 | 0.702 |
| MAMGL1000173 | 0 | 1.866 | 0 | 0 | 0 | 0 | 0 |
| MESAN2000264 | 0 | 13.875 | 0 | 14.729 | 6.953 | 0 | 0 |
| MESAN2000267 | 0 | 5.767 | 1.502 | 0 | 4.335 | 0 | 0 |
| MESAN2000337 | 0 | 55.830 | 0 | 0 | 0 | 0 | 0 |
| MESAN2000572 | 0 | 0 | 0 | 0 | 0 | 0 | 3.564 |
| MESAN2000608 | 0 | 0 | 5.768 | 0 | 0 | 0 | 0 |
| MESAN2001980 | 0 | 0 | 49.727 | 0 | 0 | 0 | 0 |
| MESAN2002086 | 0 | 0 | 1.527 | 18.668 | 0 | 0 | 0 |
| MESAN2002519 | 0 | 0 | 0 | 0 | 0 | 0 | 16.169 |
| MESAN2002724 | 0 | 0 | 0 | 0 | 0 | 25.351 | 0 |
| MESAN2003622 | 0 | 0 | 2.204 | 8.983 | 2.121 | 0 | 0 |
| MESAN2005284 | 0 | 0 | 0 | 36.243 | 17.110 | 0 | 0 |
| MESAN2005689 | 0 | 0 | 0 | 0 | 0 | 0 | 10.816 |
| MESAN2005766 | 0 | 0 | 0 | 0 | 3.480 | 27.109 | 0 |
| MESAN2006563 | 0 | 4.862 | 0 | 0 | 0 | 0 | 0 |
| MESAN2006971 | 0 | 42.308 | 0 | 0 | 0 | 0 | 0 |
| MESAN2008679 | 0 | 0 | 0 | 0 | 24.725 | 0 | 0 |
| MESAN2013845 | 0 | 39.288 | 0 | 0 | 0 | 0 | 0 |
| MESAN2015708 | 0 | 65.504 | 0 | 0 | 0 | 0 | 0 |
| NHNPC2000062 | 0 | 0 | 0 | 0 | 0 | 0 | 7.306 |
| NHNPC2000187 | 0 | 0 | 1.660 | 6.765 | 0 | 0 | 0 |
| NHNPC2000206 | 0 | 0 | 0 | 5.133 | 0 | 0 | 0 |
| NHNPC2001931 | 0 | 0 | 0 | 3.567 | 0 | 0 | 0 |
| NOVAR1000091 | 0 | 0 | 0 | 0 | 6.833 | 0 | 0 |
| NOVAR2000038 | 0 | 0 | 2.278 | 0 | 0 | 0 | 2.166 |
| NT2NE1000004 | 0 | 0 | 30.290 | 0 | 0 | 0 | 0 |
| NT2NE1000163 | 0 | 2.852 | 0 | 0 | 0 | 0 | 0 |
| NT2NE2000174 | 0 | 2.687 | 0 | 2.852 | 4.039 | 0 | 0 |
| NT2NE2000195 | 0 | 0 | 0 | 0 | 5.424 | 0 | 0 |
| NT2NE2000260 | 0 | 0 | 0.443 | 0 | 0 | 3.321 | 0 |
| NT2NE2000575 | 0 | 0 | 2.645 | 0 | 1.697 | 0 | 3.352 |
| NT2NE2000707 | 0 | 0 | 2.455 | 5.002 | 0 | 0 | 3.500 |
| NT2NE2000763 | 0 | 0 | 0 | 8.970 | 0 | 0 | 0 |
| NT2NE2000963 | 0 | 0 | 1.683 | 0 | 0 | 0 | 0.800 |
| NT2NE2001000 | 0 | 0 | 3.156 | 0 | 0 | 0 | 0 |
| NT2NE2001048 | 0 | 10.539 | 0 | 0 | 0 | 0 | 10.436 |
| NT2NE2001176 | 0 | 0 | 0 | 0 | 4.030 | 0 | 0 |
| NT2NE2001435 | 0 | 0 | 7.799 | 0 | 0 | 0 | 0 |
| NT2NE2001530 | 0 | 49.265 | 0 | 0 | 0 | 0 | 0 |
| NT2NE2001655 | 0 | 0 | 0 | 0 | 0 | 0 | 4.881 |
| NT2NE2002870 | 0 | 16.073 | 0 | 0 | 0 | 0 | 0 |
| NT2NE2003393 | 0 | 9.051 | 0 | 0 | 0 | 0 | 0 |
| NT2NE2004519 | 0 | 0 | 0 | 13.393 | 0 | 0 | 0 |
| NT2NE2004716 | 0 | 0 | 7.040 | 0 | 0 | 0 | 0 |
| NT2NE2006103 | 0 | 0 | 31.757 | 0 | 0 | 0 | 0 |
| NT2NE2010842 | 0 | 0 | 0 | 0 | 3.327 | 0 | 0 |
| NT2NE2012790 | 0 | 0 | 0 | 0 | 21.167 | 0 | 10 |
| NT2NE2014104 | 0 | 0 | 0 | 12.545 | 0 | 0 | 0 |
| NT2NE2018180 | 0 | 0 | 0 | 0 | 13.268 | 0 | 0 |
| NT2NE2019076 | 0 | 0 | 0 | 67.346 | 0 | 0 | 0 |
| NT2RI1000027 | 0 | 0 | 3.708 | 0 | 7.135 | 0 | 0 |
| NT2RI1000127 | 0 | 0 | 0 | 0 | 6.404 | 0 | 0 |
| NT2RI2000064 | 0 | 3.790 | 0 | 0 | 3.798 | 0 | 0 |
| NT2RI2000107 | 0 | 0 | 8.496 | 0 | 0 | 0 | 0 |
| NT2RI2000263 | 0 | 0 | 6.274 | 0 | 6.036 | 0 | 0 |
| NT2RI2000282 | 0 | 6.686 | 1.161 | 11.829 | 0 | 0 | 2.207 |
| NT2RI2000284 | 0 | 3.210 | 6.688 | 0 | 1.609 | 0 | 0 |
| NT2RI2000578 | 0 | 0 | 0 | 2.499 | 1.180 | 0 | 0 |
| NT2RI2000671 | 0 | 7.406 | 0 | 0 | 0 | 0 | 3.667 |
| NT2RI2000685 | 0 | 0 | 3.634 | 0 | 0 | 0 | 6.908 |
| NT2RI2000727 | 0 | 1.822 | 0 | 1.934 | 0 | 0 | 0.902 |
| NT2RI2000974 | 0 | 15.188 | 0 | 0 | 0 | 0 | 0 |
| NT2RI2001054 | 0 | 8.379 | 0 | 4.447 | 0 | 0 | 2.074 |
| NT2RI2001385 | 0 | 27.741 | 0 | 0 | 13.902 | 0 | 0 |
| NT2RI2001540 | 0 | 1.202 | 0.626 | 2.127 | 2.009 | 0 | 0.397 |
| NT2RI2001657 | 0 | 7.535 | 3.925 | 0 | 0 | 0 | 20.519 |
| NT2RI2001731 | 0 | 0 | 0 | 0 | 6.683 | 0 | 6.603 |
| NT2RI2001846 | 0 | 34.698 | 0 | 0 | 0 | 0 | 17.180 |
| NT2RI2001859 | 0 | 6.833 | 0 | 0 | 0 | 0 | 0 |
| NT2RI2001910 | 0 | 0 | 27.394 | 0 | 0 | 0 | 0 |
| NT2RI2002091 | 7.063 | 4.250 | 12.607 | 1.704 | 0 | 3.318 | 0.561 |
| NT2RI2002152 | 0 | 0 | 0 | 0 | 8.875 | 0 | 0 |
| NT2RI2002266 | 0 | 0 | 0 | 0 | 0 | 0 | 8.738 |
| NT2RI2002316 | 0 | 0 | 0 | 0 | 2.829 | 0 | 0 |
| NT2RI2002391 | 0 | 0 | 8.923 | 0 | 0 | 0 | 0 |
| NT2RI2002554 | 0 | 0 | 0 | 0 | 0 | 0 | 6.321 |
| NT2RI2002729 | 0 | 14.810 | 0 | 0 | 0 | 57.819 | 0 |
| NT2RI2003184 | 0 | 0 | 0 | 0 | 0 | 0 | 65.735 |
| NT2RI2003304 | 0 | 1.848 | 1.925 | 0 | 0 | 0 | 0.915 |
| NT2RI2003317 | 0 | 0 | 5.781 | 0 | 11.124 | 0 | 0 |
| NT2RI2003344 | 0 | 0 | 7.142 | 0 | 0 | 0 | 0 |
| NT2RI2003419 | 0 | 79.486 | 0 | 0 | 0 | 0 | 0 |
| NT2RI2003695 | 0 | 0 | 2.888 | 0 | 0 | 0 | 0 |
| NT2RI2003738 | 0 | 2.464 | 0.642 | 2.615 | 0.617 | 9.618 | 0 |
| NT2RI2003921 | 0 | 0 | 0 | 0 | 0 | 39.112 | 0 |
| NT2RI2003993 | 0 | 0 | 13.924 | 0 | 0 | 0 | 0 |
| NT2RI2004209 | 0 | 0 | 26.927 | 0 | 0 | 0 | 25.595 |
| NT2RI2004230 | 0 | 0 | 4.208 | 0 | 0 | 0 | 0 |
| NT2RI2004312 | 0 | 0 | 0 | 0 | 53.560 | 0 | 0 |
| NT2RI2004535 | 0 | 13.478 | 0 | 0 | 0 | 0 | 6.673 |
| NT2RI2004608 | 0 | 0 | 0 | 0 | 13.055 | 0 | 0 |
| NT2RI2004884 | 0 | 0 | 0 | 5.775 | 0 | 0 | 0 |
| NT2RI2005150 | 0 | 0 | 5.055 | 0 | 7.294 | 0 | 0 |
| NT2RI2005335 | 0 | 0 | 0 | 0 | 1.366 | 0 | 0 |
| NT2RI2005368 | 0 | 0 | 0 | 0 | 0 | 0 | 7.044 |
| NT2RI2005405 | 0 | 5.930 | 2.059 | 0 | 0 | 0 | 2.936 |
| NT2RI2005713 | 0 | 0 | 0 | 0 | 0 | 0 | 10.311 |
| NT2RI2005723 | 0 | 7.067 | 1.841 | 0 | 1.771 | 0 | 0 |
| NT2RI2005814 | 0 | 0 | 0 | 9.735 | 0 | 0 | 0 |
| NT2RI2005818 | 0 | 0 | 0 | 0 | 8.987 | 0 | 0 |
| NT2RI2006070 | 0 | 0 | 7.538 | 0 | 0 | 0 | 0 |
| NT2RI2006412 | 0 | 5.772 | 3.007 | 0 | 0 | 0 | 0 |
| NT2RI2006553 | 0 | 26.043 | 0 | 0 | 0 | 0 | 12.894 |
| NT2RI2006565 | 0 | 0 | 21.916 | 0 | 0 | 0 | 0 |
| NT2RI2006853 | 0 | 0 | 8.227 | 0 | 0 | 0 | 7.820 |
| NT2RI2006856 | 0 | 0 | 1.718 | 0 | 0 | 0 | 0 |
| NT2RI2007054 | 0 | 0 | 0 | 0 | 0 | 0 | 9.052 |
| NT2RI2007084 | 0 | 22.981 | 11.971 | 8.131 | 0 | 0 | 0 |
| NT2RI2007133 | 0 | 0 | 1.439 | 0 | 0 | 0 | 0 |
| NT2RI2007377 | 0 | 0 | 4.296 | 0 | 0 | 0 | 0 |
| NT2RI2007498 | 0 | 0 | 0 | 6.096 | 0 | 0 | 0 |
| NT2RI2007572 | 0 | 5.261 | 0 | 5.585 | 0 | 0 | 0 |
| NT2RI2007593 | 0 | 23.199 | 0 | 0 | 0 | 0 | 0 |
| NT2RI2007629 | 0 | 0 | 0 | 15.067 | 0 | 0 | 0 |
| NT2RI2007884 | 0 | 0 | 0 | 0 | 8.958 | 0 | 8.851 |
| NT2RI2007987 | 0 | 0 | 0 | 0 | 0 | 0 | 6.277 |
| NT2RI2008045 | 0 | 0 | 0 | 0 | 0 | 0 | 2.707 |
| NT2RI2008336 | 0 | 2.821 | 0 | 0 | 1.414 | 0 | 0 |
| NT2RI2008396 | 0 | 9.311 | 1.617 | 0 | 0 | 12.118 | 4.610 |
| NT2RI2008481 | 64.910 | 0 | 0 | 0 | 0 | 0 | 0 |
| NT2RI2008526 | 0 | 0 | 2.812 | 0 | 2.705 | 0 | 0 |
| NT2RI2008749 | 49.624 | 0 | 0 | 4.226 | 0 | 0 | 0 |
| NT2RI2009037 | 0 | 0 | 3.092 | 6.301 | 0 | 0 | 0 |
| NT2RI2009065 | 0 | 0 | 0 | 3.491 | 1.648 | 0 | 0 |
| NT2RI2009066 | 0 | 0 | 20.105 | 0 | 0 | 0 | 9.555 |
| NT2RI2009173 | 0 | 0 | 4.091 | 0 | 0 | 0 | 0 |
| NT2RI2009194 | 0 | 13.840 | 0 | 0 | 0 | 0 | 0 |
| NT2RI2009239 | 0 | 0 | 5.126 | 0 | 0 | 0 | 0 |
| NT2RI2009406 | 0 | 0 | 0 | 0 | 0 | 0 | 9.808 |
| NT2RI2009583 | 0 | 0 | 0 | 0 | 0 | 0 | 10.920 |
| NT2RI2012350 | 0 | 0 | 0 | 0 | 0 | 11.003 | 0 |
| NT2RI2015342 | 0 | 0 | 0 | 0 | 10.616 | 0 | 0 |
| NT2RI3001348 | 0 | 73.590 | 0 | 0 | 0 | 0 | 0 |
| NT2RI3007543 | 0 | 0 | 0 | 6.341 | 2.994 | 0 | 0 |
| NT2RP6000005 | 0 | 0 | 8.067 | 0 | 0 | 0 | 0 |
| NT2RP6000072 | 0 | 0 | 0 | 12.077 | 0 | 0 | 0 |
| NT2RP6000078 | 0 | 0 | 0 | 0 | 0 | 19.769 | 0 |
| NT2RP6000123 | 0 | 2.756 | 1.436 | 0 | 1.381 | 0 | 1.365 |
| NT2RP7000076 | 0 | 4.291 | 0 | 0 | 0 | 0 | 0 |
| NT2RP7000173 | 0 | 0 | 2.039 | 0 | 0 | 0 | 0 |
| NT2RP7000271 | 0 | 21.355 | 0 | 0 | 0 | 0 | 0 |
| NT2RP7000477 | 0 | 0 | 0 | 0 | 0 | 0 | 6.897 |
| NT2RP7000600 | 0 | 0 | 8.127 | 0 | 0 | 0 | 0 |
| NT2RP7000906 | 0 | 0 | 4.785 | 9.750 | 0 | 0 | 0 |
| NT2RP7001166 | 0 | 0 | 2.743 | 0 | 0 | 0 | 0 |
| NT2RP7001283 | 0 | 0 | 0 | 4.207 | 0 | 15.473 | 0 |
| NT2RP7001962 | 0 | 0 | 9.743 | 0 | 0 | 0 | 0 |
| NT2RP7002449 | 0 | 0 | 0 | 15.099 | 0 | 0 | 0 |
| NT2RP7002829 | 0 | 0 | 32.071 | 0 | 0 | 0 | 0 |
| NT2RP7003688 | 0 | 5.199 | 0 | 0 | 0 | 0 | 0 |
| NT2RP7004348 | 0 | 0 | 0 | 0 | 0 | 0 | 7.879 |
| NT2RP7004373 | 0 | 0 | 0 | 0 | 0 | 0 | 8.206 |
| NT2RP7004428 | 0 | 0 | 12.369 | 0 | 0 | 0 | 0 |
| NT2RP7004728 | 0 | 0 | 0 | 0 | 0 | 0 | 5.480 |
| NT2RP7004751 | 0 | 0 | 0 | 3.498 | 3.303 | 0 | 0 |
| NT2RP7004884 | 0 | 0 | 0 | 0 | 0 | 0 | 9.571 |
| NT2RP7004911 | 0 | 0 | 0 | 0 | 0 | 48.454 | 0 |
| NT2RP7004946 | 0 | 6.062 | 3.157 | 0 | 3.038 | 0 | 0 |
| NT2RP7006141 | 0 | 0 | 0 | 0 | 0 | 0 | 2.575 |
| NT2RP7006717 | 0 | 4.632 | 0 | 0 | 2.321 | 0 | 0 |
| NT2RP7006886 | 0 | 0 | 0 | 0 | 33.560 | 0 | 0 |
| NT2RP7006986 | 0 | 0 | 0 | 0 | 0 | 0 | 13.097 |
| NT2RP7007154 | 0 | 0 | 2.092 | 0 | 0 | 0 | 0 |
| NT2RP7007177 | 0 | 0 | 4.995 | 0 | 4.805 | 0 | 0 |
| NT2RP7007387 | 0 | 0 | 0 | 15.341 | 0 | 0 | 7.156 |
| NT2RP7007610 | 0 | 0 | 10.615 | 0 | 0 | 0 | 0 |
| NT2RP7008015 | 88.555 | 0 | 0 | 0 | 0 | 0 | 0 |
| NT2RP7008190 | 0 | 0 | 0 | 0 | 4.681 | 0 | 4.625 |
| NT2RP7014910 | 0 | 0 | 0 | 0 | 4.219 | 0 | 0 |
| NT2RP7018126 | 0 | 0 | 0 | 0 | 59.416 | 0 | 0 |
| NT2RP7020112 | 0 | 0 | 0 | 0 | 0 | 0 | 59.126 |
| NTONG1000098 | 0 | 0 | 0 | 0 | 0 | 0 | 2.221 |
| NTONG1000246 | 0 | 0 | 11.470 | 11.687 | 0 | 0 | 0 |
| NTONG1000257 | 0 | 7.749 | 0 | 0 | 0 | 0 | 0 |
| NTONG2000800 | 0 | 0 | 3.884 | 0 | 0 | 0 | 1.846 |
| NTONG2001137 | 0 | 0 | 4.198 | 0 | 4.038 | 0 | 0 |
| NTONG2001567 | 0 | 0 | 5.623 | 11.459 | 0 | 0 | 0 |
| NTONG2001612 | 0 | 0 | 4.117 | 0 | 7.922 | 0 | 0 |
| NTONG2001676 | 0 | 0 | 0 | 0 | 25.171 | 0 | 0 |
| NTONG2003839 | 0 | 0 | 0 | 19.596 | 0 | 0 | 0 |
| NTONG2004918 | 0 | 0 | 0 | 0 | 22.850 | 0 | 0 |
| NTONG2005520 | 0 | 4.687 | 0 | 0 | 0 | 0 | 2.321 |
| NTONG2007658 | 0 | 0 | 0 | 0 | 7.061 | 0 | 0 |
| NTONG2008483 | 0 | 0 | 2.930 | 0 | 2.819 | 0 | 0 |
| OCBBF1000086 | 0 | 0 | 0 | 0 | 0 | 0 | 2.669 |
| OCBBF1000114 | 0 | 0 | 0 | 0 | 8.995 | 0 | 0 |
| OCBBF1000188 | 0 | 0 | 0 | 0 | 3.674 | 0 | 0 |
| OCBBF2000467 | 0 | 14.202 | 0 | 0 | 0 | 0 | 0 |
| OCBBF2000522 | 0 | 17.805 | 0 | 0 | 0 | 0 | 0 |
| OCBBF2000824 | 0 | 0 | 0 | 44.912 | 0 | 0 | 0 |
| OCBBF2000846 | 0 | 0 | 0 | 5.470 | 0 | 0 | 0 |
| OCBBF2000986 | 0 | 0 | 0 | 0 | 3.400 | 26.492 | 0 |
| OCBBF2001494 | 0 | 0 | 0 | 0 | 0 | 0 | 73.728 |
| OCBBF2001586 | 0 | 0 | 0 | 0 | 12.652 | 0 | 0 |
| OCBBF2001687 | 0 | 0 | 0 | 0 | 0 | 0 | 6.706 |
| OCBBF2002083 | 0 | 0 | 40.304 | 0 | 0 | 0 | 0 |
| OCBBF2004757 | 0 | 0 | 0 | 0 | 8.745 | 0 | 0 |
| OCBBF2006148 | 0 | 0 | 24.838 | 0 | 0 | 0 | 0 |
| OCBBF2006172 | 0 | 0 | 0 | 0 | 18.501 | 0 | 0 |
| OCBBF2007829 | 0 | 0 | 0 | 4.104 | 1.937 | 0 | 0 |
| OCBBF2008041 | 0 | 14.718 | 0 | 0 | 0 | 0 | 0 |
| OCBBF2008569 | 0 | 0 | 0 | 0 | 73.961 | 0 | 0 |
| OCBBF2008760 | 0 | 0 | 0 | 0 | 58.681 | 0 | 0 |
| OCBBF2009772 | 0 | 8.291 | 0 | 0 | 0 | 0 | 0 |
| OCBBF2010830 | 0 | 0 | 3.227 | 6.577 | 3.105 | 0 | 0 |
| OCBBF2011160 | 0 | 0 | 0 | 0 | 0 | 0 | 60.858 |
| OCBBF2011536 | 0 | 0 | 7.317 | 0 | 0 | 0 | 0 |
| OCBBF2012553 | 0 | 8.258 | 4.302 | 0 | 0 | 0 | 0 |
| OCBBF2013843 | 0 | 0 | 0 | 3.994 | 0 | 0 | 0 |
| OCBBF2014064 | 0 | 0 | 0 | 0 | 0 | 37.548 | 0 |
| OCBBF2014292 | 0 | 0 | 0 | 0 | 3.655 | 0 | 3.611 |
| OCBBF2014541 | 0 | 0 | 28.761 | 0 | 0 | 0 | 0 |
| OCBBF2017035 | 0 | 0 | 0 | 0 | 0 | 0 | 4.226 |
| OCBBF2017893 | 0 | 0 | 6.362 | 0 | 0 | 0 | 0 |
| OCBBF2018707 | 0 | 0 | 0 | 0 | 7.936 | 0 | 0 |
| OCBBF2018956 | 0 | 11.917 | 0 | 0 | 0 | 0 | 0 |
| OCBBF2021020 | 0 | 0 | 0 | 0 | 0 | 73.294 | 0 |
| OCBBF2035226 | 0 | 0 | 0 | 0 | 2.073 | 0 | 0 |
| OCBBF3000323 | 0 | 0 | 12.198 | 0 | 0 | 0 | 0 |
| OCBBF3004487 | 0 | 0 | 0 | 0 | 15.987 | 0 | 0 |
| PEBLM1000174 | 0 | 0 | 0 | 0 | 0 | 0 | 16.672 |
| PEBLM2000147 | 0 | 0 | 0 | 0 | 0 | 35.070 | 0 |
| PEBLM2000222 | 0 | 0 | 0 | 0 | 2.050 | 0 | 0 |
| PEBLM2000267 | 0 | 0 | 0 | 0 | 14.884 | 0 | 0 |
| PEBLM2000308 | 0 | 0 | 7.271 | 0 | 0 | 0 | 0 |
| PEBLM2000395 | 0 | 6.409 | 0 | 0 | 6.423 | 0 | 0 |
| PEBLM2004666 | 0 | 0 | 0 | 0 | 0 | 0 | 12.953 |
| PEBLM2007774 | 0 | 0 | 1.105 | 0 | 0 | 0 | 1.050 |
| PERIC2002452 | 0 | 0 | 0 | 0 | 34.376 | 0 | 0 |
| PLACE5000172 | 0 | 0 | 0 | 0 | 0 | 0 | 13.594 |
| PLACE6000314 | 0 | 0 | 55.942 | 0 | 0 | 0 | 0 |
| PLACE6000379 | 0 | 0 | 1.943 | 1.320 | 0 | 0 | 1.847 |
| PLACE6000463 | 0 | 0 | 28.618 | 0 | 0 | 0 | 0 |
| PLACE6001443 | 0 | 0 | 0 | 0 | 0 | 0 | 6.848 |
| PLACE6001923 | 0 | 44.258 | 0 | 0 | 0 | 0 | 0 |
| PLACE6002084 | 0 | 2.600 | 0 | 0 | 0 | 0 | 2.575 |
| PLACE6002960 | 0 | 0 | 20.354 | 0 | 0 | 0 | 0 |
| PLACE6003038 | 0 | 25.411 | 0 | 0 | 0 | 0 | 0 |
| PLACE6003383 | 0 | 0 | 0 | 8.921 | 0 | 0 | 0 |
| PLACE6004312 | 0 | 0 | 2.212 | 0 | 0 | 0 | 2.103 |
| PLACE6004396 | 0 | 0 | 67.330 | 0 | 0 | 0 | 0 |
| PLACE6006549 | 0 | 0 | 11.715 | 0 | 0 | 0 | 0 |
| PLACE6007436 | 0 | 0 | 0 | 0 | 0 | 0 | 12.525 |
| PLACE6009560 | 0 | 0 | 0 | 80.768 | 0 | 0 | 0 |
| PLACE6010484 | 0 | 0 | 0 | 0 | 0 | 0 | 5.389 |
| PLACE6011057 | 0 | 0 | 0 | 0 | 0 | 0 | 7.857 |
| PLACE6011334 | 0 | 0 | 0 | 0 | 31.714 | 0 | 0 |
| PLACE6013222 | 0 | 0 | 18.072 | 0 | 0 | 0 | 0 |
| PLACE6016383 | 0 | 0 | 23.711 | 0 | 0 | 0 | 0 |
| PLACE6017626 | 0 | 0 | 0 | 0 | 0 | 0 | 49.481 |
| PLACE6018863 | 0 | 0 | 0 | 0 | 0 | 0 | 66.204 |
| PLACE7004103 | 0 | 9.106 | 0 | 0 | 0 | 0 | 0 |
| PROST1000033 | 0 | 0 | 40.409 | 0 | 0 | 0 | 0 |
| PROST1000097 | 0 | 0 | 0 | 0 | 0 | 0 | 2.050 |
| PROST1000120 | 0 | 0 | 12.095 | 0 | 0 | 0 | 0 |
| PROST1000144 | 0 | 22.079 | 0 | 11.718 | 0 | 0 | 0 |
| PROST1000226 | 0 | 0 | 6.562 | 0 | 0 | 0 | 0 |
| PROST1000343 | 0 | 0 | 0 | 0 | 0 | 0 | 9.903 |
| PROST2000036 | 0 | 0 | 0 | 0 | 0 | 77.280 | 0 |
| PROST2000138 | 0 | 2.441 | 1.907 | 3.239 | 0 | 0 | 2.115 |
| PROST2001180 | 0 | 0 | 0 | 0 | 8.761 | 0 | 0 |
| PROST2002651 | 0 | 0 | 21.937 | 0 | 0 | 0 | 0 |
| PROST2003338 | 0 | 0 | 0 | 8.366 | 0 | 0 | 7.804 |
| PROST2003517 | 0 | 0 | 0 | 0 | 18.579 | 0 | 0 |
| PROST2004095 | 0 | 0 | 0 | 3.498 | 0 | 0 | 0 |
| PROST2004270 | 0 | 4.140 | 2.157 | 8.790 | 0 | 0 | 0 |
| PROST2005285 | 0 | 0 | 27.376 | 0 | 0 | 0 | 0 |
| PROST2005604 | 0 | 0 | 0 | 23.249 | 0 | 0 | 0 |
| PROST2005793 | 0 | 0 | 14.383 | 0 | 0 | 0 | 0 |
| PROST2006260 | 0 | 0 | 0 | 0 | 14.368 | 0 | 0 |
| PROST2006536 | 0 | 0 | 0 | 0 | 7.830 | 0 | 0 |
| PROST2006737 | 0 | 17.066 | 0 | 0 | 0 | 0 | 0 |
| PROST2008271 | 0 | 0 | 14.374 | 0 | 0 | 0 | 0 |
| PROST2008489 | 0 | 0 | 0 | 19.362 | 0 | 0 | 0 |
| PROST2008770 | 0 | 0 | 0 | 5.830 | 0 | 0 | 0 |
| PROST2010782 | 0 | 0 | 0.892 | 0 | 0 | 0 | 1.696 |
| PROST2011577 | 0 | 0 | 0 | 0 | 3.631 | 0 | 0 |
| PROST2012007 | 0 | 0 | 0 | 8.483 | 4.005 | 31.201 | 0 |
| PROST2012353 | 0 | 0 | 0 | 0 | 0 | 0 | 32.771 |
| PROST2015287 | 0 | 0 | 0 | 0 | 37.880 | 0 | 0 |
| PROST2015464 | 0 | 0 | 0 | 0 | 0 | 0 | 41.857 |
| PROST2016195 | 0 | 0 | 0 | 0 | 0 | 0 | 20.387 |
| PROST2017203 | 0 | 0 | 4.763 | 0 | 0 | 0 | 0 |
| PROST2017529 | 0 | 0 | 0 | 18.971 | 0 | 0 | 0 |
| PROST2017692 | 0 | 0 | 0 | 16.523 | 2.600 | 0 | 0 |
| PROST2018583 | 0 | 0 | 33.898 | 0 | 0 | 0 | 0 |
| PUAEN1000065 | 0 | 0 | 2.457 | 0 | 0 | 0 | 4.670 |
| PUAEN1000164 | 34.934 | 0 | 0 | 0 | 2.809 | 0 | 0 |
| PUAEN1000239 | 0 | 0 | 0 | 0 | 10.939 | 0 | 0 |
| PUAEN2000374 | 28.090 | 2.254 | 0 | 2.392 | 0 | 8.798 | 0 |
| PUAEN2000497 | 0 | 18.152 | 0 | 0 | 0 | 0 | 0 |
| PUAEN2000535 | 70.586 | 0 | 0 | 0 | 0 | 0 | 0 |
| PUAEN2003018 | 0 | 0 | 12.294 | 0 | 0 | 0 | 46.744 |
| PUAEN2003954 | 0 | 0 | 0 | 0 | 38.474 | 0 | 0 |
| PUAEN2004400 | 0 | 0 | 0 | 0 | 25.421 | 0 | 0 |
| PUAEN2008939 | 0 | 0 | 12.588 | 0 | 0 | 0 | 0 |
| SALGL1000157 | 0 | 0 | 1.431 | 1.944 | 0 | 0 | 0 |
| SKMUS1000177 | 0 | 0 | 0 | 0 | 8.332 | 0 | 0 |
| SKMUS1000186 | 0 | 0 | 1.472 | 3.000 | 0 | 0 | 0 |
| SKMUS2000361 | 0 | 0 | 0 | 0 | 0 | 0 | 3.728 |
| SKMUS2000484 | 0 | 0 | 6.441 | 0 | 0 | 0 | 0 |
| SKMUS2000931 | 0 | 3.831 | 0 | 0 | 1.920 | 0 | 0 |
| SKMUS2001147 | 0 | 0 | 0 | 0 | 19.562 | 0 | 0 |
| SKMUS2001454 | 0 | 0 | 2.476 | 0 | 2.382 | 0 | 1.177 |
| SKMUS2001528 | 0 | 0 | 0 | 0 | 0 | 0 | 4.376 |
| SKMUS2001634 | 0 | 0 | 4.802 | 0 | 0 | 0 | 0 |
| SKMUS2002084 | 0 | 0 | 0 | 0 | 22.031 | 0 | 0 |
| SKNMC1000110 | 0 | 0 | 0 | 0 | 0 | 0 | 12.622 |
| SKNMC1000168 | 0 | 0 | 0 | 0 | 0 | 0 | 2.919 |
| SKNMC2000065 | 0 | 7.601 | 0 | 0 | 0 | 0 | 0 |
| SKNMC2000097 | 0 | 6.277 | 0 | 0 | 0 | 0 | 0 |
| SKNMC2000322 | 0 | 0 | 0 | 0 | 9.966 | 0 | 0 |
| SKNMC2000593 | 0 | 0 | 31.996 | 0 | 0 | 0 | 0 |
| SKNMC2000635 | 0 | 3.789 | 0.658 | 6.703 | 0 | 0 | 0 |
| SKNMC2000649 | 0 | 6.424 | 6.692 | 0 | 0 | 0 | 0 |
| SKNMC2000698 | 0 | 14.544 | 0 | 0 | 0 | 0 | 0 |
| SKNMC2001503 | 0 | 0 | 11.374 | 0 | 0 | 0 | 0 |
| SKNSH1000002 | 0 | 0 | 0 | 0 | 0 | 0 | 5.011 |
| SKNSH2000151 | 0 | 0 | 0 | 0 | 19.196 | 0 | 18.966 |
| SKNSH2000347 | 0 | 0 | 0 | 0 | 7.917 | 0 | 0 |
| SKNSH2000716 | 0 | 0 | 0 | 0 | 24.462 | 0 | 0 |
| SKNSH2000971 | 0 | 50.629 | 0 | 0 | 0 | 0 | 0 |
| SKNSH2006234 | 0 | 24.647 | 0 | 0 | 0 | 0 | 0 |
| SMINT1000016 | 0 | 0 | 0 | 0 | 0 | 0 | 25.659 |
| SMINT1000048 | 0 | 0 | 28.889 | 0 | 0 | 0 | 0 |
| SMINT1000131 | 0 | 0 | 3.359 | 13.690 | 0 | 0 | 0 |
| SMINT2000007 | 0 | 0 | 22.061 | 0 | 0 | 0 | 0 |
| SMINT2000018 | 0 | 0 | 15.442 | 0 | 0 | 0 | 0 |
| SMINT2000159 | 0 | 0 | 0 | 0 | 0 | 0 | 19.053 |
| SMINT2000239 | 0 | 0 | 30.764 | 0 | 0 | 0 | 0 |
| SMINT2000277 | 0 | 0 | 33.247 | 0 | 0 | 0 | 0 |
| SMINT2000396 | 0 | 0 | 4.490 | 0 | 0 | 0 | 0 |
| SMINT2000441 | 0 | 0 | 1.656 | 0 | 0 | 0 | 3.147 |
| SMINT2000602 | 0 | 0 | 2.016 | 0 | 0 | 15.111 | 0 |
| SMINT2000659 | 0 | 0 | 0 | 0 | 0 | 0 | 0.969 |
| SMINT2000933 | 0 | 0 | 3.738 | 0 | 0 | 0 | 3.553 |
| SMINT2001812 | 0 | 0 | 0 | 0 | 0 | 0 | 27.880 |
| SMINT2002314 | 0 | 0 | 0 | 0 | 0 | 33.271 | 0 |
| SMINT2002882 | 0 | 0 | 0 | 0 | 10.246 | 0 | 0 |
| SMINT2002884 | 0 | 0 | 13.548 | 0 | 0 | 0 | 0 |
| SMINT2003074 | 0 | 0 | 5.028 | 0 | 0 | 0 | 0 |
| SMINT2003169 | 0 | 3.312 | 1.725 | 0 | 0 | 12.930 | 0 |
| SMINT2003340 | 0 | 0 | 0 | 0 | 0 | 0 | 10.243 |
| SMINT2004023 | 0 | 0 | 5.594 | 0 | 0 | 0 | 0 |
| SMINT2004144 | 0 | 0 | 0 | 0 | 0 | 0 | 7.912 |
| SMINT2004280 | 0 | 0 | 0 | 0 | 0 | 0 | 44.418 |
| SMINT2005368 | 0 | 0 | 0 | 0 | 8.288 | 0 | 0 |
| SMINT2008960 | 0 | 0 | 0 | 0 | 0 | 0 | 4.770 |
| SMINT2010901 | 0 | 24.729 | 0 | 0 | 0 | 0 | 0 |
| SMINT2012122 | 0 | 0 | 12.822 | 0 | 0 | 0 | 0 |
| SPLEN1000106 | 0 | 0 | 0 | 0 | 0 | 0 | 8.115 |
| SPLEN1000144 | 0 | 0 | 38.347 | 0 | 0 | 0 | 0 |
| SPLEN1000165 | 0 | 0 | 0 | 0 | 0 | 0 | 17.398 |
| SPLEN1000166 | 0 | 0 | 8.292 | 0 | 0 | 0 | 0 |
| SPLEN2000047 | 0 | 0 | 0 | 0 | 0 | 0 | 57.532 |
| SPLEN2000134 | 0 | 0 | 0 | 0 | 0 | 0 | 73.057 |
| SPLEN2000222 | 0 | 0 | 44.799 | 0 | 0 | 0 | 0 |
| SPLEN2000255 | 0 | 0 | 5.633 | 0 | 0 | 0 | 0 |
| SPLEN2000258 | 0 | 0 | 0 | 32.721 | 0 | 0 | 0 |
| SPLEN2000348 | 0 | 0 | 10.260 | 0 | 0 | 0 | 0 |
| SPLEN2000505 | 0 | 0 | 0 | 3.150 | 0 | 0 | 0 |
| SPLEN2000874 | 0 | 0 | 1.788 | 0 | 0 | 0 | 0 |
| SPLEN2001157 | 0 | 0 | 0 | 0 | 9.705 | 0 | 0 |
| SPLEN2001245 | 98.056 | 0 | 0 | 0 | 0 | 0 | 0 |
| SPLEN2001761 | 0 | 0 | 0 | 0 | 0 | 0 | 37.096 |
| SPLEN2002467 | 0 | 0 | 0 | 24.349 | 0 | 0 | 0 |
| SPLEN2002744 | 0 | 0 | 0 | 16.670 | 0 | 0 | 0 |
| SPLEN2004181 | 0 | 0 | 28.873 | 0 | 0 | 0 | 0 |
| SPLEN2004220 | 0 | 0 | 0 | 0 | 0 | 79.064 | 0 |
| SPLEN2004880 | 0 | 0 | 1.080 | 0 | 0 | 0 | 0 |
| SPLEN2004984 | 0 | 0 | 9.634 | 0 | 0 | 0 | 0 |
| SPLEN2005429 | 0 | 0 | 26.875 | 0 | 0 | 0 | 0 |
| SPLEN2005560 | 92.383 | 0 | 0 | 0 | 0 | 0 | 0 |
| SPLEN2005806 | 0 | 0 | 0 | 9.141 | 0 | 0 | 0 |
| SPLEN2006143 | 0 | 0 | 0 | 0 | 0 | 61.507 | 0 |
| SPLEN2006305 | 0 | 0 | 2.317 | 0 | 0 | 0 | 0 |
| SPLEN2006374 | 0 | 0 | 0 | 0 | 10.726 | 0 | 5.299 |
| SPLEN2007498 | 0 | 0 | 0 | 19.560 | 0 | 0 | 0 |
| SPLEN2008460 | 0 | 0 | 0 | 0 | 0 | 36.014 | 0 |
| SPLEN2010195 | 0 | 0 | 1.423 | 0 | 0 | 0 | 0 |
| SPLEN2011737 | 0 | 0 | 0 | 0 | 0 | 0 | 9.083 |
| SPLEN2012523 | 0 | 0 | 0 | 0 | 7.535 | 0 | 0 |
| SPLEN2012611 | 0 | 0 | 0 | 0 | 0 | 0 | 50.050 |
| SPLEN2012800 | 29.977 | 0 | 1.253 | 0 | 0 | 0 | 0 |
| SPLEN2013503 | 0 | 0 | 18.412 | 0 | 0 | 0 | 8.750 |
| SPLEN2013936 | 0 | 0 | 0 | 0 | 0 | 0 | 23.261 |
| SPLEN2014711 | 0 | 0 | 0 | 19.823 | 0 | 72.911 | 0 |
| SPLEN2014911 | 0 | 0 | 0 | 0 | 0 | 29.002 | 0 |
| SPLEN2015310 | 0 | 0 | 0 | 0 | 8.090 | 0 | 0 |
| SPLEN2015730 | 0 | 0 | 51.319 | 0 | 0 | 0 | 0 |
| SPLEN2016743 | 0 | 0 | 21.029 | 0 | 0 | 0 | 0 |
| SPLEN2016972 | 0 | 0 | 0 | 15.156 | 0 | 0 | 0 |
| SPLEN2017351 | 0 | 0 | 0 | 0 | 10.613 | 0 | 0 |
| SPLEN2017620 | 0 | 0 | 18.800 | 0 | 0 | 0 | 0 |
| SPLEN2017918 | 0 | 0 | 3.344 | 0 | 0 | 0 | 0 |
| SPLEN2021194 | 0 | 0 | 12.373 | 0 | 0 | 0 | 0 |
| SPLEN2028466 | 0 | 0 | 0 | 0 | 0 | 0 | 5.769 |
| SPLEN2028914 | 0 | 0 | 10.242 | 0 | 0 | 0 | 0 |
| SPLEN2029912 | 0 | 0 | 0 | 0 | 0 | 44.906 | 0 |
| SPLEN2031547 | 0 | 0 | 5.775 | 0 | 0 | 0 | 0 |
| SPLEN2037722 | 0 | 0 | 0 | 0 | 0 | 45.295 | 0 |
| SPLEN2038473 | 0 | 0 | 50.451 | 0 | 0 | 0 | 0 |
| SPLEN2041306 | 0 | 0 | 28.248 | 0 | 0 | 0 | 0 |
| SPLEN2042920 | 0 | 0 | 0 | 0 | 0 | 74.811 | 0 |
| STOMA1000047 | 0 | 0 | 11.622 | 0 | 0 | 0 | 22.094 |
| STOMA1000189 | 0 | 0 | 0 | 0 | 0 | 0 | 16.356 |
| STOMA2000257 | 0 | 0 | 7.240 | 0 | 0 | 0 | 0 |
| STOMA2000529 | 0 | 50.852 | 0 | 0 | 0 | 0 | 0 |
| STOMA2001389 | 0 | 0 | 21.183 | 0 | 0 | 0 | 0 |
| STOMA2002166 | 0 | 0 | 4.292 | 0 | 4.129 | 0 | 0 |
| SYNOV1000045 | 0 | 0 | 25.765 | 0 | 0 | 0 | 0 |
| SYNOV1000124 | 0 | 0 | 0 | 8.315 | 0 | 0 | 0 |
| SYNOV2001144 | 0 | 0 | 0 | 0 | 0 | 38.881 | 0 |
| SYNOV2001239 | 0 | 0 | 6.905 | 0 | 0 | 0 | 0 |
| SYNOV2001374 | 0 | 0 | 13.436 | 0 | 12.926 | 0 | 0 |
| SYNOV2009172 | 0 | 3.664 | 0 | 0 | 1.836 | 0 | 0 |
| SYNOV4001153 | 0 | 16.331 | 0 | 0 | 0 | 0 | 0 |
| SYNOV4007671 | 0 | 0 | 2.689 | 0 | 0 | 0 | 2.556 |
| TBAES2000059 | 0 | 0 | 5.527 | 0 | 0 | 0 | 5.253 |
| TBAES2001258 | 0 | 0 | 0 | 0 | 0 | 0 | 33.137 |
| TBAES2007428 | 0 | 37.819 | 0 | 0 | 0 | 0 | 0 |
| TBAES2009387 | 0 | 0 | 0 | 0 | 1.886 | 0 | 0 |
| TCERX2000431 | 0 | 0 | 7.705 | 15.701 | 14.824 | 0 | 0 |
| TESOP1000127 | 0 | 0 | 34.899 | 0 | 0 | 0 | 0 |
| TESTI1000023 | 0 | 0 | 3.076 | 6.268 | 0 | 0 | 0 |
| TESTI1000070 | 0 | 0 | 0 | 0 | 0 | 0 | 12.588 |
| TESTI1000168 | 0 | 0 | 11.494 | 0 | 0 | 0 | 0 |
| TESTI2001099 | 0 | 0 | 0 | 3.663 | 0 | 0 | 1.708 |
| TESTI2001120 | 84.853 | 0 | 0 | 0 | 0 | 0 | 0 |
| TESTI2001153 | 0 | 2.804 | 0 | 0 | 0 | 0 | 0 |
| TESTI2001269 | 0 | 3.844 | 0 | 0 | 1.926 | 15.006 | 1.903 |
| TESTI2001829 | 74.526 | 0 | 0 | 0 | 0 | 0 | 0 |
| TESTI2002632 | 0 | 0 | 39.711 | 0 | 0 | 0 | 0 |
| TESTI2002707 | 0 | 0 | 0 | 0 | 0 | 0 | 11.553 |
| TESTI2002866 | 0 | 0 | 0 | 0 | 0 | 0 | 37.093 |
| TESTI2003280 | 0 | 0 | 0 | 0 | 14.474 | 0 | 0 |
| TESTI2003325 | 0 | 0 | 15.522 | 0 | 14.933 | 0 | 0 |
| TESTI2003533 | 0 | 0 | 0 | 0 | 0 | 23.834 | 0 |
| TESTI2003625 | 0 | 0 | 28.073 | 0 | 0 | 0 | 0 |
| TESTI2004031 | 0 | 0 | 0 | 0 | 4.244 | 0 | 1.398 |
| TESTI2004431 | 0 | 0 | 0 | 0 | 0 | 0 | 29.162 |
| TESTI2004712 | 99.261 | 0 | 0 | 0 | 0 | 0 | 0 |
| TESTI2004737 | 0 | 0 | 6.497 | 0 | 0 | 0 | 0 |
| TESTI2005017 | 0 | 0 | 0 | 0 | 11.653 | 0 | 0 |
| TESTI2005112 | 0 | 0 | 0 | 0 | 0 | 0 | 67.827 |
| TESTI2005173 | 0 | 0 | 52.879 | 0 | 0 | 0 | 0 |
| TESTI2005408 | 0 | 24.949 | 0 | 0 | 0 | 0 | 0 |
| TESTI2005743 | 0 | 0 | 0 | 0 | 7.751 | 0 | 0 |
| TESTI2005788 | 0 | 0 | 16.963 | 0 | 0 | 0 | 0 |
| TESTI2005908 | 0 | 11.087 | 0 | 11.769 | 0 | 0 | 0 |
| TESTI2006097 | 0 | 0 | 0 | 78.748 | 0 | 0 | 0 |
| TESTI2006120 | 0 | 0 | 17.800 | 0 | 0 | 0 | 16.919 |
| TESTI2006453 | 0 | 0 | 3.087 | 0 | 0 | 0 | 0 |
| TESTI2006588 | 0 | 0 | 3.971 | 0 | 0 | 0 | 3.775 |
| TESTI2006748 | 0 | 0 | 12.617 | 0 | 0 | 0 | 0 |
| TESTI2007311 | 0 | 0 | 0 | 0 | 0 | 0 | 13.412 |
| TESTI2007998 | 0 | 11.133 | 0 | 11.818 | 0 | 0 | 0 |
| TESTI2008233 | 0 | 0 | 0 | 0 | 0 | 0 | 45.847 |
| TESTI2008240 | 0 | 0 | 0 | 0 | 0 | 0 | 1.744 |
| TESTI2008840 | 0 | 0 | 0 | 0 | 72.965 | 0 | 0 |
| TESTI2009423 | 0 | 0 | 59.311 | 0 | 0 | 0 | 0 |
| TESTI2009520 | 0 | 0 | 0 | 5.605 | 0 | 20.616 | 10.458 |
| TESTI2009577 | 0 | 0 | 0 | 0 | 6.236 | 0 | 0 |
| TESTI2009785 | 0 | 0 | 5.262 | 0 | 0 | 0 | 0 |
| TESTI2009977 | 0 | 0 | 0 | 0 | 0 | 0 | 84.210 |
| TESTI2011605 | 0 | 0 | 13.220 | 0 | 0 | 0 | 0 |
| TESTI2012289 | 0 | 0 | 0 | 0 | 0 | 0 | 30.091 |
| TESTI2012778 | 0 | 0 | 0 | 0 | 1.304 | 0 | 0 |
| TESTI2015213 | 0 | 3.614 | 3.765 | 3.836 | 0 | 0 | 0 |
| TESTI2015626 | 0 | 0 | 2.412 | 0 | 2.321 | 0 | 0 |
| TESTI2017954 | 0 | 9.329 | 0 | 0 | 0 | 0 | 0 |
| TESTI2018462 | 0 | 0 | 10.365 | 0 | 0 | 0 | 0 |
| TESTI2018611 | 92.200 | 0 | 0 | 0 | 0 | 0 | 0 |
| TESTI2024844 | 0 | 0 | 0 | 0 | 4.042 | 0 | 0 |
| TESTI2026215 | 0 | 0 | 0 | 0 | 0 | 0 | 24.148 |
| TESTI2027271 | 0 | 0 | 0 | 39.466 | 0 | 0 | 0 |
| TESTI2033441 | 0 | 0 | 8.049 | 0 | 0 | 0 | 0 |
| TESTI2034916 | 0 | 0 | 0 | 56.816 | 0 | 0 | 0 |
| TESTI2034940 | 0 | 0 | 1.911 | 3.894 | 1.838 | 0 | 0.908 |
| TESTI2040094 | 0 | 0 | 0 | 91.958 | 0 | 0 | 0 |
| TESTI2046456 | 0 | 0 | 1.698 | 0 | 0 | 0 | 3.227 |
| TESTI2051177 | 0 | 0 | 0 | 0 | 84.370 | 0 | 0 |
| TESTI4000014 | 0 | 0 | 0.655 | 0 | 0.630 | 4.909 | 1.245 |
| TESTI4002799 | 38.761 | 0 | 0 | 0 | 0 | 0 | 0 |
| TESTI4003703 | 0 | 0 | 16.229 | 0 | 0 | 0 | 0 |
| TESTI4010851 | 0 | 3.849 | 0 | 0 | 0 | 0 | 0 |
| TESTI4013441 | 0 | 2.209 | 0.575 | 0 | 0.553 | 0 | 0.547 |
| TESTI4013474 | 0 | 0 | 3.790 | 0 | 0 | 0 | 0 |
| TESTI4037156 | 0 | 0 | 2.030 | 0 | 0.976 | 0 | 0 |
| TESTI4043140 | 0 | 0 | 10.170 | 0 | 0 | 0 | 0 |
| TESTI4044704 | 0 | 0 | 18.694 | 0 | 0 | 0 | 0 |
| THYMU1000016 | 0 | 0 | 0 | 0 | 2.727 | 0 | 0 |
| THYMU1000041 | 0 | 0 | 0 | 0 | 0 | 0 | 8.290 |
| THYMU1000109 | 0 | 0 | 2.887 | 0 | 0 | 0 | 2.744 |
| THYMU1000359 | 0 | 0 | 0 | 0 | 0 | 0 | 1.869 |
| THYMU1000374 | 0 | 0 | 0 | 0 | 0 | 0 | 5.222 |
| THYMU1000394 | 0 | 0 | 18.030 | 0 | 0 | 0 | 0 |
| THYMU1000428 | 0 | 0 | 2.085 | 0 | 0 | 0 | 1.982 |
| THYMU1000473 | 0 | 0 | 0 | 0 | 0 | 91.440 | 0 |
| THYMU1000499 | 0 | 40.188 | 0 | 0 | 20.139 | 0 | 0 |
| THYMU2000057 | 0 | 0 | 4.974 | 0 | 0 | 0 | 0 |
| THYMU2000300 | 0 | 0 | 0 | 21.836 | 0 | 0 | 0 |
| THYMU2000369 | 0 | 0 | 0 | 0 | 0 | 0 | 62.676 |
| THYMU2000436 | 0 | 0 | 6.759 | 0 | 6.502 | 0 | 0 |
| THYMU2000702 | 0 | 0 | 0 | 0 | 0 | 86.018 | 0 |
| THYMU2000775 | 0 | 0 | 34.340 | 0 | 0 | 0 | 0 |
| THYMU2000946 | 0 | 0 | 0 | 10.814 | 0 | 0 | 0 |
| THYMU2001018 | 0 | 0 | 33.126 | 0 | 0 | 0 | 0 |
| THYMU2002080 | 0 | 0 | 54.584 | 0 | 0 | 0 | 0 |
| THYMU2002583 | 0 | 3.649 | 0 | 3.874 | 0 | 0 | 1.807 |
| THYMU2002745 | 0 | 0 | 0 | 0 | 13.509 | 0 | 0 |
| THYMU2003012 | 0 | 0 | 0 | 6.550 | 0 | 0 | 0 |
| THYMU2003446 | 0 | 0 | 8.748 | 0 | 0 | 0 | 0 |
| THYMU2003891 | 0 | 0 | 1.070 | 0 | 0 | 0 | 0 |
| THYMU2003981 | 0 | 0 | 1.915 | 0 | 0 | 0 | 0 |
| THYMU2004410 | 0 | 0 | 14.055 | 0 | 0 | 0 | 0 |
| THYMU2004916 | 0 | 0 | 11.447 | 0 | 0 | 0 | 5.440 |
| THYMU2006505 | 0 | 0 | 0 | 10.203 | 9.634 | 0 | 0 |
| THYMU2007415 | 0 | 0 | 8.875 | 0 | 0 | 0 | 0 |
| THYMU2007467 | 0 | 0 | 14.815 | 0 | 0 | 0 | 0 |
| THYMU2007729 | 0 | 0 | 17.926 | 0 | 0 | 0 | 17.039 |
| THYMU2009658 | 0 | 0 | 0 | 0 | 3.708 | 0 | 0 |
| THYMU2009792 | 0 | 0 | 0 | 0 | 0 | 76.990 | 0 |
| THYMU2012401 | 0 | 0 | 0 | 0 | 0 | 0 | 80.699 |
| THYMU2013136 | 0 | 5.759 | 0 | 0 | 0 | 0 | 0 |
| THYMU2013170 | 0 | 0 | 0 | 0 | 80.886 | 0 | 0 |
| THYMU2013916 | 0 | 7.810 | 4.068 | 0 | 0 | 0 | 7.734 |
| THYMU2015775 | 0 | 0 | 81.477 | 0 | 0 | 0 | 0 |
| THYMU2022660 | 0 | 0 | 0 | 0 | 80.886 | 0 | 0 |
| THYMU2027125 | 0 | 0 | 0 | 0 | 0.632 | 0 | 0 |
| THYMU2032014 | 0 | 0 | 0 | 0 | 0 | 0 | 57.532 |
| THYMU2032696 | 92.236 | 0 | 0 | 0 | 0 | 0 | 0 |
| THYMU2033059 | 0 | 0 | 81.477 | 0 | 0 | 0 | 0 |
| THYMU3005629 | 0 | 0 | 55.420 | 0 | 0 | 0 | 0 |
| THYMU3015759 | 0 | 0 | 0 | 8.415 | 0 | 0 | 0 |
| THYMU3032867 | 0 | 0 | 0 | 0 | 0 | 0 | 44.871 |
| THYMU3033626 | 0 | 0 | 20.615 | 0 | 0 | 0 | 0 |
| THYMU3034671 | 0 | 0 | 8.747 | 0 | 0 | 0 | 0 |
| THYMU3041428 | 0 | 0 | 0.935 | 0 | 0 | 0 | 0 |
| TKIDN2002738 | 0 | 2.953 | 0 | 0 | 0 | 0 | 1.462 |
| TKIDN2005487 | 63.052 | 0 | 2.635 | 0 | 0 | 0 | 0 |
| TKIDN2011289 | 0 | 0 | 0 | 0 | 21.094 | 0 | 0 |
| TRACH1000030 | 0 | 0 | 2.530 | 5.156 | 0 | 0 | 4.810 |
| TRACH1000063 | 0 | 0 | 0 | 0 | 7.589 | 0 | 0 |
| TRACH2000045 | 0 | 0 | 0 | 0 | 0 | 0 | 9.587 |
| TRACH2000079 | 0 | 7.629 | 0 | 0 | 0 | 0 | 0 |
| TRACH2000250 | 0 | 0 | 0 | 0 | 0 | 0 | 64.083 |
| TRACH2000321 | 0 | 3.460 | 1.802 | 7.344 | 0 | 0 | 1.713 |
| TRACH2000461 | 0 | 0 | 6.289 | 0 | 0 | 0 | 0 |
| TRACH2000702 | 0 | 0 | 14.400 | 0 | 0 | 0 | 0 |
| TRACH2000780 | 0 | 0 | 3.206 | 0 | 0 | 0 | 3.047 |
| TRACH2000926 | 0 | 0 | 10.233 | 0 | 0 | 0 | 0 |
| TRACH2000959 | 0 | 0 | 0.895 | 0 | 0 | 0 | 0 |
| TRACH2000972 | 0 | 0 | 0 | 0 | 0 | 0 | 4.132 |
| TRACH2001021 | 0 | 0 | 1.536 | 0 | 0 | 0 | 0 |
| TRACH2001101 | 0 | 0 | 19.498 | 0 | 0 | 0 | 9.267 |
| TRACH2001289 | 0 | 2.393 | 0 | 0 | 1.199 | 0 | 1.185 |
| TRACH2001314 | 0 | 0 | 0 | 0 | 6.449 | 0 | 0 |
| TRACH2001341 | 0 | 0 | 23.377 | 0 | 0 | 0 | 0 |
| TRACH2001432 | 0 | 0 | 0 | 8.314 | 0 | 0 | 0 |
| TRACH2001478 | 0 | 0 | 0 | 0 | 0 | 15.958 | 0 |
| TRACH2001684 | 0 | 0 | 0 | 0 | 0 | 0 | 62.100 |
| TRACH2001810 | 0 | 5.468 | 0 | 0 | 5.480 | 0 | 0 |
| TRACH2002092 | 0 | 19.765 | 0 | 0 | 0 | 0 | 0 |
| TRACH2002537 | 0 | 13.060 | 0 | 13.863 | 0 | 0 | 3.233 |
| TRACH2002664 | 0 | 0 | 5.582 | 0 | 0 | 0 | 0 |
| TRACH2002847 | 0 | 0 | 0 | 33.924 | 0 | 0 | 0 |
| TRACH2003272 | 0 | 0 | 0 | 0 | 0 | 0 | 12.917 |
| TRACH2003347 | 0 | 0 | 5.827 | 0 | 5.606 | 0 | 0 |
| TRACH2005800 | 0 | 0 | 0 | 35.963 | 0 | 0 | 0 |
| TRACH2005811 | 0 | 0 | 3.868 | 0 | 0 | 0 | 0 |
| TRACH2007399 | 0 | 3.317 | 0 | 7.041 | 0 | 0 | 0 |
| TRACH2009291 | 0 | 0 | 76.605 | 0 | 0 | 0 | 0 |
| TRACH2009851 | 0 | 0 | 55.151 | 0 | 0 | 0 | 0 |
| TRACH2010634 | 0 | 0 | 0 | 0 | 61.166 | 0 | 0 |
| TRACH2011302 | 0 | 86.275 | 0 | 0 | 0 | 0 | 0 |
| TRACH2012376 | 0 | 0 | 0 | 20.060 | 0 | 0 | 0 |
| TRACH2013081 | 0 | 0 | 0 | 86.967 | 0 | 0 | 0 |
| TRACH2014077 | 0 | 0 | 0 | 0 | 12.003 | 0 | 23.718 |
| TRACH2014124 | 0 | 0 | 3.786 | 0 | 0 | 0 | 0 |
| TRACH2014442 | 0 | 31.705 | 0 | 0 | 0 | 0 | 0 |
| TRACH2014997 | 0 | 24.910 | 0 | 0 | 0 | 0 | 0 |
| TRACH2015654 | 0 | 0 | 76.605 | 0 | 0 | 0 | 0 |
| TRACH2016317 | 0 | 0 | 0 | 0 | 82.533 | 0 | 0 |
| TRACH2018317 | 0 | 0 | 10.745 | 0 | 0 | 0 | 0 |
| TRACH2018446 | 0 | 0 | 15.339 | 0 | 0 | 0 | 0 |
| TRACH2019672 | 0 | 0 | 76.605 | 0 | 0 | 0 | 0 |
| TRACH2025535 | 0 | 0 | 0 | 4.339 | 4.097 | 0 | 0 |
| TRACH3000692 | 0 | 0 | 0 | 0 | 0 | 0 | 16.340 |
| TRACH3002192 | 0 | 4.391 | 0 | 0 | 2.201 | 0 | 0 |
| TRACH3004068 | 0 | 0 | 5.227 | 0 | 0 | 0 | 0 |
| TRACH3008093 | 0 | 34.493 | 0 | 18.307 | 0 | 0 | 0 |
| TRACH3022198 | 0 | 0 | 30.484 | 0 | 0 | 0 | 0 |
| UMVEN1000186 | 0 | 1.860 | 0 | 0 | 0 | 0 | 0 |
| UMVEN2000354 | 0 | 0 | 0 | 0 | 2.906 | 0 | 0 |
| UTERU1000384 | 0 | 0 | 0 | 0 | 25.149 | 0 | 0 |
| UTERU2000095 | 0 | 2.914 | 0 | 3.093 | 0 | 0 | 0 |
| UTERU2000263 | 0 | 0 | 0 | 3.830 | 0 | 0 | 0 |
| UTERU2000537 | 0 | 0 | 0 | 0 | 0 | 0 | 7.887 |
| UTERU2000696 | 0 | 0 | 0 | 21.268 | 0 | 0 | 0 |
| UTERU2000925 | 0 | 0 | 38.195 | 0 | 0 | 0 | 0 |
| UTERU2001658 | 0 | 0 | 32.488 | 0 | 0 | 0 | 0 |
| UTERU2002410 | 51.532 | 0 | 0 | 0 | 0 | 0 | 0 |
| UTERU2003057 | 0 | 0 | 0 | 19.331 | 0 | 0 | 0 |
| UTERU2004037 | 0 | 15.438 | 0 | 0 | 0 | 0 | 0 |
| UTERU2004197 | 0 | 0 | 0 | 15.029 | 0 | 0 | 0 |
| UTERU2004807 | 0 | 0 | 7.369 | 22.526 | 0 | 0 | 0 |
| UTERU2005354 | 0 | 0 | 0 | 0 | 7.718 | 0 | 0 |
| UTERU2005593 | 0 | 0 | 0 | 0 | 3.960 | 0 | 0 |
| UTERU2005621 | 0 | 0 | 8.268 | 0 | 0 | 0 | 0 |
| UTERU2006643 | 0 | 59.791 | 0 | 0 | 0 | 0 | 0 |
| UTERU2007724 | 0 | 46.260 | 0 | 0 | 0 | 0 | 0 |
| UTERU2008085 | 0 | 0 | 0.662 | 0 | 3.505 | 0 | 1.574 |
| UTERU2008747 | 0 | 0 | 0 | 0 | 31.185 | 0 | 0 |
| UTERU2008938 | 0 | 0 | 9.027 | 0 | 0 | 0 | 0 |
| UTERU2009972 | 0 | 0 | 0 | 0 | 0 | 0 | 12.351 |
| UTERU2010417 | 0 | 0 | 0 | 2.356 | 0 | 0 | 1.099 |
| UTERU2012286 | 0 | 0 | 9.292 | 0 | 8.940 | 0 | 0 |
| UTERU2012703 | 0 | 0 | 75.461 | 0 | 0 | 0 | 0 |
| UTERU2012767 | 0 | 0 | 0 | 0 | 18.790 | 0 | 0 |
| UTERU2014024 | 0 | 0 | 0 | 0 | 0 | 0 | 45.181 |
| UTERU2014167 | 0 | 0 | 0 | 6.812 | 0 | 0 | 3.177 |
| UTERU2015653 | 0 | 0 | 0 | 4.360 | 0 | 0 | 0 |
| UTERU2016799 | 0 | 0 | 0 | 0 | 20.520 | 0 | 0 |
| UTERU2023175 | 0 | 0 | 0 | 0 | 5.253 | 0 | 5.190 |

[1086] Genes whose expression levels were negligibly low in each of the above-described libraries are shown with their clone names below.

[1087] 3NB691000018, 3NB691000085, 3NB691000129, 3NB691000191, 3NB692000012, 3NB692000029, 3NB692000102, 3NB692000154, 3NB692000276, 3NB692000305, 3NB692000429, 3NB692000484, 3NB692000529, 3NB692000973, 3NB692001034, 3NB692001040, 3NB692001123, 3NB692001267, 3NB692001339, 3NB692001349, 3NB692001366, 3NB692001408, 3NB692001433, 3NB692001471, 3NB692001496, 3NB692001501, 3NB692001507, 3NB692001519, 3NB692001520, 3NB692001528, 3NB692001538, 3NB692001548, 3NB692001557, 3NB692001719, 3NB692001853, 3NB692001861, 3NB692002051, 3NB692002365, 3NB692002685, 3NB692002806, 3NB692003538, 3NB692004045, 3NB692004724, 3NB692005439, 3NB692006952, 3NB692008178, 3NB692008729, ACTVT2000380, ADIPS1000064, ADIPS2000069,

[1088] ADIPS2000088, ADIPS2000245, ADIPS2000425, ADRGL1000002, ADRGL1000018, ADRGL1000033, ADRGL1000038, ADRGL1000065, ADRGL1000067, ADRGL1000111, ADRGL1000144, ADRGL1000147, ADRGL1000160, ADRGL1000165, ADRGL1000182, ADRGL2000006, ADRGL2000042, ADRGL2000056, ADRGL2000064, ADRGL2000074, ADRGL2000085, ADRGL2000097, ADRGL2000117, ADRGL2000142, ADRGL2000172, ADRGL2000248, ADRGL2000261, ADRGL2000323, ADRGL2000328, ADRGL2000353, ADRGL2000384, ADRGL2000428, ADRGL2000636, ADRGL2000644, ADRGL2000968, ADRGL2001119, ADRGL2001229, ADRGL2001287, ADRGL2001301, ADRGL2001354, ADRGL2001554, ADRGL2001651, ADRGL2001756, ADRGL2001830, ADRGL2001836, ADRGL2001854, ADRGL2002013, ADRGL2002029, ADRGL2002191, ADRGL2002260,

[1089] ADRGL2002392, ADRGL2002679, ADRGL2002753, ADRGL2002857, ADRGL2003017, ADRGL2003329, ADRGL2003552, ADRGL2003585, ADRGL2003638, ADRGL2003684, ADRGL2003773, ADRGL2003785, ADRGL2004031, ADRGL2004077, ADRGL2004451, ADRGL2004459, ADRGL2004676, ADRGL2004708, ADRGL2004724, ADRGL2004749, ADRGL2004770, ADRGL2004777, ADRGL2004833, ADRGL2005336, ADRGL2005564, ADRGL2005756, ADRGL2005926, ADRGL2005961, ADRGL2006034, ADRGL2006124, ADRGL2006177, ADRGL2006193, ADRGL2006377, ADRGL2006677, ADRGL2006732, ADRGL2006767, ADRGL2006817, ADRGL2006846, ADRGL2006886, ADRGL2007080, ADRGL2007125, ADRGL2007283, ADRGL2007313, ADRGL2007357, ADRGL2007636, ADRGL2007651, ADRGL2007810, ADRGL2007877, ADRGL2007906, ADRGL2007974,

[1090] ADRGL2008023, ADRGL2008331, ADRGL2008337, ADRGL2008535, ADRGL2008966, ADRGL2009146, ADRGL2009273, ADRGL2009324, ADRGL2009489, ADRGL2009533, ADRGL2009691, ADRGL2009755, ADRGL2010152, ADRGL2010315, ADRGL2010594, ADRGL2010860, ADRGL2010974, ADRGL2011190, ADRGL2011330, ADRGL2012179, AHMSC1000138, ASTRO1000009, ASTRO1000018, ASTRO1000029, ASTRO1000096, ASTRO2000011, ASTRO2000095, ASTRO2000141, ASTRO2000191, ASTRO2000278, ASTRO2000372, ASTRO2000381, ASTRO2000403, ASTRO2000417, ASTRO2000482, ASTRO2000533, ASTRO2000653, ASTRO2000662, ASTRO2000725, ASTRO2001001, ASTRO2001008, ASTRO2001088, ASTRO2001107, ASTRO2001122, ASTRO2001227, ASTRO2001249, ASTRO2001480, ASTRO2002024, ASTRO2002035, ASTRO2002064,

[1091] ASTRO2002202, ASTRO2002571, ASTRO2002632, ASTRO2002659, ASTRO2002693, ASTRO2002720, ASTRO2002733, ASTRO2002743, ASTRO2002842, ASTRO2003212, ASTRO2003316, ASTRO2003461, ASTRO2003574, ASTRO2003581, ASTRO2003740, ASTRO2003840, ASTRO2003925, ASTRO2003960, ASTRO2004032, ASTRO2004051, ASTRO2004177, ASTRO2004217, ASTRO2004297, ASTRO2004584, ASTRO2004628, ASTRO2004751, ASTRO2004877, ASTRO2004974, ASTRO2005008, ASTRO2005081, ASTRO2005096, ASTRO2005242, ASTRO2005273, ASTRO2005343, ASTRO2005360, ASTRO2005413, ASTRO2005423, ASTRO2005553, ASTRO2005557, ASTRO2005575, ASTRO2005593, ASTRO2005726, ASTRO2005863, ASTRO2005896, ASTRO2005902, ASTRO2006356, ASTRO2006475, ASTRO2006732, ASTRO2006747, ASTRO2006920,

[1092] ASTRO2006952, ASTRO2007221, ASTRO2007377, ASTRO2007515, ASTRO2007578, ASTRO2007643, ASTRO2007666, ASTRO2007948, ASTRO2007956, ASTRO2007962, ASTRO2008040, ASTRO2008216, ASTRO2008239, ASTRO2008409, ASTRO2008425, ASTRO2008508, ASTRO2008777, ASTRO2008895, ASTRO2008960, ASTRO2008972, ASTRO2009068, ASTRO2009118, ASTRO2009177, ASTRO2009333, ASTRO2009458, ASTRO2009526, ASTRO2009879, ASTRO2010072, ASTRO2010582, ASTRO2010615, ASTRO2010799, ASTRO2010962, ASTRO2010996, ASTRO2011149, ASTRO2011422, ASTRO2011426, ASTRO2011437, ASTRO2011461, ASTRO2011834, ASTRO2011893, ASTRO2013124, ASTRO2013671, ASTRO2013802, ASTRO2014135, ASTRO2014174, ASTRO2014211, ASTRO2014363, ASTRO2014392, ASTRO2014498, ASTRO2014561,

[1093] ASTRO2014576, ASTRO2014863, ASTRO2014923, ASTRO2014961, ASTRO2015162, ASTRO2015185, ASTRO2015328, ASTRO2015529, ASTRO2015987, ASTRO2016044, ASTRO2016114, ASTRO2016148, ASTRO2016681, ASTRO2016819, ASTRO2016847, ASTRO2016892, ASTRO2017348, ASTRO2017627, ASTRO2018373, ASTRO2018540, ASTRO2019039, ASTRO2019171, ASTRO3000154, ASTRO3000172, ASTRO3000177, ASTRO3000301, ASTRO3000474, ASTRO3000482, BEAST2000454, BGGI11000193, BGGI11000285, BGGI12000022, BGGI12000054, BGGI12000067, BGGI12000161, BGGI12000544, BGGI12000684, BGGI12000693, BGGI12001002, BGGI12001075, BGGI12001241, BGGI12001247, BGGI12001714, BLADE1000176, BLADE2000181, BLADE2000256, BLADE2000340, BLADE2000389, BLADE2000463, BLADE2000492,

[1094] BLADE2000579, BLADE2000640, BLADE2000866, BLADE2000938, BLADE2001031, BLADE2001133, BLADE2001138, BLADE2001141, BLADE2001371, BLADE2001458, BLADE2001575, BLADE2001753, BLADE2001935, BLADE2001940, BLADE2001987, BLADE2002073, BLADE2002310, BLADE2002730, BLADE2002738, BLADE2002782, BLADE2002947, BLADE2002972, BLADE2003474, BLADE2003916, BLADE2004089, BLADE2004345, BLADE2004389, BLADE2004462, BLADE2004628, BLADE2004670, BLADE2004722, BLADE2004849, BLADE2005036, BLADE2005038, BLADE2005229, BLADE2005459, BLADE2005792, BLADE2006043, BLADE2006412, BLADE2006415, BLADE2006607, BLADE2006826, BLADE2006849, BLADE2006947, BLADE2007033, BLADE2007043, BLADE2007666, BLADE2007722, BLADE2007735, BLADE2007744,

[1095] BLADE2007799, BLADE2007923, BLADE2007935, BLADE2007958, BLADE2008281, BLADE2008398, BLADE2008454, BLADE2008461, BLADE2008479, BLADE2008539, BLADE2008809, BLADE2008995, BLADE2009452, BLADE2009479, BLADE2009593, BNGH41000098, BNGH41000104, BNGH41000118, BNGH41000137, BNGH41000169, BNGH41000177, BNGH41000190, BNGH41000216, BNGH41000235, BNGH42000132, BNGH42000405, BNGH42000532, BNGH42000675, BNGH42000791, BNGH42000815, BNGH42000994, BNGH42001247, BNGH42001406, BNGH42001576, BNGH42001724, BNGH42002168, BNGH42002244, BNGH42002387, BNGH42002487, BNGH42002489, BNGH42003529, BNGH42003570, BNGH42003641, BNGH42004076, BNGH42004291, BNGH42004538, BNGH42004679, BNGH42005017, BNGH42005235, BNGH42005504,

[1096] BNGH42005968, BNGH42006135, BNGH42006226, BNGH42006234, BNGH42007037, BNGH42007366, BNGH42007460, BNGH42007594, BNGH42007798, BNGH42008199, BNGH42008510, BNGH42008603, BNGH42008649, BNGH42008743, BNGH42008832, BNGH42008850, BNGH42008943, BNGH42009021, BNGH42009025, BRACE1000020, BRACE1000042, BRACE1000047, BRACE1000051, BRACE1000065, BRACE1000070, BRACE1000073, BRACE1000084, BRACE1000087, BRACE1000092, BRACE1000093, BRACE1000101, BRACE1000114, BRACE1000115, BRACE1000124, BRACE1000132, BRACE1000166, BRACE1000169, BRACE1000187, BRACE1000239, BRACE1000258, BRACE1000451, BRACE1000475, BRACE1000572, BRACE2000061, BRACE2000077, BRACE2000078, BRACE2000100, BRACE2000109, BRACE2000141, BRACE2000148,

[1097] BRACE2000183, BRACE2000229, BRACE2000232, BRACE2000256, BRACE2000266, BRACE2000267, BRACE2000280, BRACE2000300, BRACE2000307, BRACE2000331, BRACE2000332, BRACE2000347, BRACE2000351, BRACE2000368, BRACE2000392, BRACE2000441, BRACE2000487, BRACE2000489, BRACE2000526, BRACE2000531, BRACE2000545, BRACE2000553, BRACE2000565, BRACE2000577, BRACE2000640, BRACE2000650, BRACE2000677, BRACE2000698, BRACE2000718, BRACE2000733, BRACE2000743, BRACE2000750, BRACE2000753, BRACE2000815, BRACE2000864, BRACE2000885, BRACE2000893, BRACE2000905, BRACE2000936, BRACE2000947, BRACE2000965, BRACE2000975, BRACE2000988, BRACE2001017, BRACE2001065, BRACE2001070, BRACE2001094, BRACE2001107, BRACE2001143, BRACE2001151,

[1098] BRACE2001154, BRACE2001188, BRACE2001191, BRACE2001197, BRACE2001236, BRACE2001239, BRACE2001269, BRACE2001312, BRACE2001313, BRACE2001330, BRACE2001340, BRACE2001352, BRACE2001353, BRACE2001374, BRACE2001375, BRACE2001423, BRACE2001424, BRACE2001445, BRACE2001453, BRACE2001455, BRACE2001477, BRACE2001492, BRACE2001496, BRACE2001508, BRACE2001534, BRACE2001543, BRACE2001564, BRACE2001588, BRACE2001607, BRACE2001626, BRACE2001673, BRACE2001677, BRACE2001705, BRACE2001709, BRACE2001711, BRACE2001726, BRACE2001733, BRACE2001737, BRACE2001742, BRACE2001777, BRACE2001779, BRACE2001834, BRACE2001859, BRACE2001865, BRACE2001872, BRACE2001881, BRACE2001898, BRACE2001923, BRACE2001942, BRACE2001944,

[1099] BRACE2001954, BRACE2001972, BRACE2001973, BRACE2002026, BRACE2002034, BRACE2002050, BRACE2002139, BRACE2002142, BRACE2002151, BRACE2002157, BRACE2002176, BRACE2002202, BRACE2002206, BRACE2002227, BRACE2002260, BRACE2002297, BRACE2002304, BRACE2002356, BRACE2002394, BRACE2002409, BRACE2002431, BRACE2002444, BRACE2002458, BRACE2002467, BRACE2002468, BRACE2002478, BRACE2002495, BRACE2002582, BRACE2002585, BRACE2002589, BRACE2002590, BRACE2002606, BRACE2002613, BRACE2002614, BRACE2002617, BRACE2002623, BRACE2002635, BRACE2002649, BRACE2002661, BRACE2002676, BRACE2002677, BRACE2002682, BRACE2002695, BRACE2002707, BRACE2002736, BRACE2002752, BRACE2002755, BRACE2002762, BRACE2002772, BRACE2002792,

[1100] BRACE2002796, BRACE2002803, BRACE2002807, BRACE2002812, BRACE2002834, BRACE2002849, BRACE2002857, BRACE2002861, BRACE2002884, BRACE2002896, BRACE2002948, BRACE2003037, BRACE2003078, BRACE2003097, BRACE2003110, BRACE2003168, BRACE2003199, BRACE2003210, BRACE2003269, BRACE2003285, BRACE2003304, BRACE2003319, BRACE2003398, BRACE2003420, BRACE2003428, BRACE2003431, BRACE2003512, BRACE2003516, BRACE2003539, BRACE2003540, BRACE2003594, BRACE2003598, BRACE2003609, BRACE2003614, BRACE2003628, BRACE2003639, BRACE2003700, BRACE2003713, BRACE2003766, BRACE2003785, BRACE2003788, BRACE2003800, BRACE2003802, BRACE2003825, BRACE2003845, BRACE2003847, BRACE2003848, BRACE2003873, BRACE2003885, BRACE2003887,

[1101] BRACE2003905, BRACE2003928, BRACE2003944, BRACE2003954, BRACE2003982, BRACE2003987, BRACE2005034, BRACE2005047, BRACE2005063, BRACE2005083, BRACE2005087, BRACE2005090, BRACE2005118, BRACE2005124, BRACE2005138, BRACE2005151, BRACE2005160, BRACE2005169, BRACE2005189, BRACE2005193, BRACE2005196, BRACE2005198, BRACE2005216, BRACE2005243, BRACE2005251, BRACE2005253, BRACE2005290, BRACE2005298, BRACE2005328, BRACE2005329, BRACE2005337, BRACE2005348, BRACE2005363, BRACE2005395, BRACE2005408, BRACE2005433, BRACE2005450, BRACE2005453, BRACE2005457, BRACE2005460, BRACE2005489, BRACE2005518, BRACE2005556, BRACE2005562, BRACE2005624, BRACE2005642, BRACE2005661, BRACE2005667, BRACE2005719, BRACE2005731,

[1102] BRACE2005742, BRACE2005762, BRACE2005773, BRACE2005787, BRACE2005795, BRACE2005800, BRACE2005858, BRACE2005869, BRACE2005875, BRACE2005881, BRACE2005898, BRACE2005904, BRACE2005906, BRACE2005907, BRACE2005911, BRACE2005937, BRACE2005949, BRACE2005981, BRACE2005991, BRACE2006072, BRACE2006075, BRACE2006084, BRACE2006102, BRACE2.006105, BRACE2006122, BRACE2006137, BRACE2006143, BRACE2006162, BRACE2006167, BRACE2006174, BRACE2006240, BRACE2006245, BRACE2006249, BRACE2006264, BRACE2006274, BRACE2006281, BRACE2006298, BRACE2006319, BRACE2006344, BRACE2006354, BRACE2006363, BRACE2006378, BRACE2006380, BRACE2006393, BRACE2006413, BRACE2006417, BRACE2006453, BRACE2006459, BRACE2006488, BRACE2006534,

[1103] BRACE2006537, BRACE2006540, BRACE2006547, BRACE2006564, BRACE2006587, BRACE2006598, BRACE2006636, BRACE2006685, BRACE2006703, BRACE2006743, BRACE2006753, BRACE2006783, BRACE2006821, BRACE2006833, BRACE2006859, BRACE2006909, BRACE2006924, BRACE2006935, BRACE2006937, BRACE2006944, BRACE2006951, BRACE2006982, BRACE2006986, BRACE2007013, BRACE2007064, BRACE2007068, BRACE2007087, BRACE2007109, BRACE2007138, BRACE2007174, BRACE2007191, BRACE2007197, BRACE2007201, BRACE2007203, BRACE2007232, BRACE2007254, BRACE2007262, BRACE2007274, BRACE2007281, BRACE2007295, BRACE2007358, BRACE2007396, BRACE2007398, BRACE2007411, BRACE2007447, BRACE2007477, BRACE2007502, BRACE2007503, BRACE2007522, BRACE2007527,

[1104] BRACE2007538, BRACE2007563, BRACE2007567, BRACE2007621, BRACE2007640, BRACE2007641, BRACE2007646, BRACE2007663, BRACE2007671, BRACE2007682, BRACE2007685, BRACE2007708, BRACE2007727, BRACE2007749, BRACE2007760, BRACE2007761, BRACE2007764, BRACE2007767, BRACE2007768, BRACE2007769, BRACE2007784, BRACE2007786, BRACE2007798, BRACE2007799, BRACE2007801, BRACE2007832, BRACE2007836, BRACE2007868, BRACE2007882, BRACE2007888, BRACE2007902, BRACE2007920, BRACE2007937, BRACE2007944, BRACE2007952, BRACE2008008, BRACE2008015, BRACE2008021, BRACE2008102, BRACE2008114, BRACE2008144, BRACE2008172, BRACE2008216, BRACE2008218, BRACE2008276, BRACE2008295, BRACE2008308, BRACE2008336, BRACE2008358, BRACE2008361,

[1105] BRACE2008399, BRACE2008401, BRACE2008402, BRACE2008410, BRACE2008420, BRACE2008443, BRACE2008473, BRACE2008480, BRACE2008481, BRACE2008488, BRACE2008500, BRACE2008553, BRACE2008594, BRACE2008604, BRACE2008615, BRACE2008622, BRACE2008629, BRACE2008653, BRACE2008655, BRACE2008656, BRACE2008708, BRACE2008710, BRACE2008754, BRACE2008797, BRACE2008847, BRACE2008857, BRACE2008861, BRACE2008867, BRACE2008881, BRACE2008883, BRACE2008917, BRACE2008919, BRACE2008941, BRACE2008948, BRACE2008960, BRACE2008999, BRACE2009014, BRACE2009016, BRACE2009031, BRACE2009044, BRACE2009045, BRACE2009053, BRACE2009122, BRACE2009131, BRACE2009185, BRACE2009188, BRACE2009212, BRACE2009221, BRACE2009235, BRACE2009238,

[1106] BRACE2009255, BRACE2009270, BRACE2009272, BRACE2009274, BRACE2009275, BRACE2009291, BRACE2009293, BRACE2009307, BRACE2009311, BRACE2009318, BRACE2009323, BRACE2009366, BRACE2009421, BRACE2009428, BRACE2009434, BRACE2009437, BRACE2009483, BRACE2009517, BRACE2009533, BRACE2009558, BRACE2009566, BRACE2009591, BRACE2009654, BRACE2009721, BRACE2009732, BRACE2009754, BRACE2009828, BRACE2009886, BRACE2009907, BRACE2009957, BRACE2010170, BRACE2010171, BRACE2010203, BRACE2010208, BRACE2010336, BRACE2010348, BRACE2010440, BRACE2010444, BRACE2010477, BRACE2010489, BRACE2010535, BRACE2010550, BRACE2010598, BRACE2010632, BRACE2010642, BRACE2010651, BRACE2010669, BRACE2010684, BRACE2010753, BRACE2010813,

[1107] BRACE2010828, BRACE2010837, BRACE2010888, BRACE2010937, BRACE2010983, BRACE2011007, BRACE2011025, BRACE2011183, BRACE2011199, BRACE2011389, BRACE2011478, BRACE2011545, BRACE2011592, BRACE2011611, BRACE2011646, BRACE2011677, BRACE2011703, BRACE2011747, BRACE2011838, BRACE2011892, BRACE2011904, BRACE2011947, BRACE2012062, BRACE2012185, BRACE2012222, BRACE2012232, BRACE2012291, BRACE2012317, BRACE2012510, BRACE2012528, BRACE2012625, BRACE2012653, BRACE2012814, BRACE2012833, BRACE2012838, BRACE2012936, BRACE2012947, BRACE2013009, BRACE2013010, BRACE2013126, BRACE2013132, BRACE2013149, BRACE2013369, BRACE2013806, BRACE2013855, BRACE2013911, BRACE2014108, BRACE2014161, BRACE2014232, BRACE2014257,

[1108] BRACE2014268, BRACE2014306, BRACE2014475, BRACE2014657, BRACE2014746, BRACE2014780, BRACE2014818, BRACE2014821, BRACE2014824, BRACE2014850, BRACE2014854, BRACE2015031, BRACE2015058, BRACE2015132, BRACE2015262, BRACE2015270, BRACE2015287, BRACE2015314, BRACE2015352, BRACE2015368, BRACE2015412, BRACE2015436, BRACE2015741, BRACE2015756, BRACE2015969, BRACE2015995, BRACE2016058, BRACE2016194, BRACE2016315, BRACE2016325, BRACE2016335, BRACE2016362, BRACE2016366, BRACE2016465, BRACE2016516, BRACE2016583, BRACE2016708, BRACE2016821, BRACE2016896, BRACE2016981, BRACE2017108, BRACE2017124, BRACE2017298, BRACE2017359, BRACE2017397, BRACE2017410, BRACE2017438, BRACE2017574, BRACE2017580, BRACE2017587,

[1109] BRACE2017720, BRACE2017844, BRACE2017872, BRACE2017929, BRACE2017934, BRACE2017985, BRACE2017992, BRACE2018443, BRACE2018448, BRACE2018568, BRACE2018700, BRACE2018727, BRACE2018736, BRACE2018759, BRACE2018762, BRACE2018782, BRACE2018847, BRACE2019004, BRACE2019044, BRACE2019147, BRACE2019244, BRACE2019258, BRACE2019327, BRACE2019348, BRACE2019371, BRACE2019467, BRACE2019510, BRACE2019519, BRACE2019528, BRACE2019618, BRACE2019696, BRACE2019703, BRACE2019843, BRACE2019865, BRACE2019872, BRACE2019877, BRACE2020028, BRACE2020077, BRACE2020097, BRACE2020157, BRACE2020278, BRACE2020358, BRACE2020467, BRACE2020584, BRACE2020652, BRACE2020709, BRACE2020742, BRACE2020756, BRACE2020863, BRACE2020982,

[1110] BRACE2021014, BRACE2021143, BRACE2021148, BRACE2021245, BRACE2021254, BRACE2021264, BRACE2021344, BRACE2021433, BRACE2021541, BRACE2021670, BRACE2021695, BRACE2021708, BRACE2021721, BRACE2021932, BRACE2021936, BRACE2022030, BRACE2022158, BRACE2022196, BRACE2022270, BRACE2022328, BRACE2022333, BRACE2022389, BRACE2022394, BRACE2022435, BRACE2022448, BRACE2022450, BRACE2022549, BRACE2022633, BRACE2022638, BRACE2022693, BRACE2022848, BRACE2022928, BRACE2022990, BRACE2023069, BRACE2023070, BRACE2023223, BRACE2023268, BRACE2023284, BRACE2023404, BRACE2023451, BRACE2023540, BRACE2023633, BRACE2023718, BRACE2023727, BRACE2023744, BRACE2023800, BRACE2023801, BRACE2024074, BRACE2024222, BRACE2024610,

[1111] BRACE2024627, BRACE2024781, BRACE2024826, BRACE2025018, BRACE2025316, BRACE2025333, BRACE2025437, BRACE2025452, BRACE2025492, BRACE2025710, BRACE2025796, BRACE2025992, BRACE2026054, BRACE2026131, BRACE2026141, BRACE2026142, BRACE2026293, BRACE2026294, BRACE2026404, BRACE2026675, BRACE2026725, BRACE2026836, BRACE2026920, BRACE2026971, BRACE2027018, BRACE2027221, BRACE2027258, BRACE2027312, BRACE2027382, BRACE2027389, BRACE2027408, BRACE2027643, BRACE2027767, BRACE2027770, BRACE2027879, BRACE2027896, BRACE2027970, BRACE2028171, BRACE2028392, BRACE2028410, BRACE2028636, BRACE2028741, BRACE2028956, BRACE2028970, BRACE2029112, BRACE2029356, BRACE2029396, BRACE2029581, BRACE2029644, BRACE2029849,

[1112] BRACE2030039, BRACE2030096, BRACE2030323, BRACE2030326, BRACE2030341, BRACE2030345, BRACE2030736, BRACE2030883, BRACE2030884, BRACE2031154, BRACE2031232, BRACE2031527, BRACE2031531, BRACE2031553, BRACE2031899, BRACE2032044, BRACE2032090, BRACE2032134, BRACE2032148, BRACE2032182, BRACE2032329, BRACE2032385, BRACE2032436, BRACE2032477, BRACE2032502, BRACE2032538, BRACE2032584, BRACE2032823, BRACE2033128, BRACE2033394, BRACE2033478, BRACE2033720, BRACE2033786, BRACE2034434, BRACE2034523, BRACE2034616, BRACE2034622, BRACE2034870, BRACE2035003, BRACE2035120, BRACE2035124, BRACE2035191, BRACE2035278, BRACE2035381, BRACE2035441, BRACE2035485, BRACE2036005, BRACE2036096, BRACE2036743, BRACE2036830,

[1113] BRACE2036834, BRACE2036900, BRACE2037132, BRACE2037294, BRACE2037295, BRACE2037299, BRACE2037310, BRACE2037431, BRACE2037692, BRACE2037847, BRACE2038114, BRACE2038269, BRACE2038271, BRACE2038329, BRACE2038492, BRACE2038551, BRACE2038618, BRACE2039009, BRACE2039128, BRACE2039170, BRACE2039249, BRACE2039286, BRACE2039297, BRACE2039327, BRACE2039362, BRACE2039475, BRACE2039600, BRACE2039607, BRACE2039734, BRACE2039823, BRACE2039832, BRACE2039893, BRACE2039986, BRACE2040138, BRACE2040325, BRACE2040514, BRACE2040640, BRACE2040987, BRACE2041009, BRACE2041095, BRACE2041200, BRACE2041264, BRACE2041890, BRACE2041898, BRACE2042394, BRACE2042398, BRACE2042550, BRACE2042620, BRACE2042628, BRACE2042873,

[1114] BRACE2043036, BRACE2043105, BRACE2043142, BRACE2043248, BRACE2043349, BRACE2043381, BRACE2043774, BRACE2043942, BRACE2044057, BRACE2044105, BRACE2044263, BRACE2044286, BRACE2044304, BRACE2044473, BRACE2044510, BRACE2044640, BRACE2044816, BRACE2044946, BRACE2044949, BRACE2045300, BRACE2045428, BRACE2045445, BRACE2045596, BRACE2045772, BRACE2045947, BRACE2045954, BRACE2046251, BRACE2046295, BRACE2046976, BRACE2047011, BRACE2047232, BRACE2047350, BRACE2047377, BRACE2047385, BRACE2047492, BRACE2047558, BRACE2047573, BRACE2047835, BRACE2047893, BRACE2047975, BRACE3000071, BRACE3000404, BRACE3000520, BRACE3000697, BRACE3000840, BRACE3000973, BRACE3001002, BRACE3001058, BRACE3001066, BRACE3001113,

[1115] BRACE3001217, BRACE3001299, BRACE3001384, BRACE3001391, BRACE3001403, BRACE3001595, BRACE3001754, BRACE3001948, BRACE3001973, BRACE3002184, BRACE3002298, BRACE3002344, BRACE3002390, BRACE3002420, BRACE3002508, BRACE3002541, BRACE3002756, BRACE3003004, BRACE3003026, BRACE3003053, BRACE3003192, BRACE3003413, BRACE3003595, BRACE3003698, BRACE3003866, BRACE3003920, BRACE3004046, BRACE3004058, BRACE3004113, BRACE3004205, BRACE3004358, BRACE3004435, BRACE3004477, BRACE3004767, BRACE3004772, BRACE3004783, BRACE3004843, BRACE3004862, BRACE3004880, BRACE3004887, BRACE3004981, BRACE3004996, BRACE3004998, BRACE3005103, BRACE3005127, BRACE3005145, BRACE3005217, BRACE3005225, BRACE3005430, BRACE3005499,

[1116] BRACE3005760, BRACE3005870, BRACE3005903, BRACE3005989, BRACE3006113, BRACE3006185, BRACE3006226, BRACE3006462, BRACE3006463, BRACE3006553, BRACE3006872, BRACE3006917, BRACE3007058, BRACE3007084, BRACE3007085, BRACE3007258, BRACE3007322, BRACE3007472, BRACE3007480, BRACE3007559, BRACE3007625, BRACE3007642, BRACE3007649, BRACE3007767, BRACE3007869, BRACE3008036, BRACE3008066, BRACE3008092, BRACE3008095, BRACE3008137, BRACE3008255, BRACE3008337, BRACE3008384, BRACE3008720, BRACE3008772, BRACE3009044, BRACE3009075, BRACE3009090, BRACE3009127, BRACE3009197, BRACE3009237, BRACE3009265, BRACE3009297, BRACE3009377, BRACE3009392, BRACE3009416, BRACE3009539, BRACE3009574, BRACE3009701, BRACE3009708,

[1117] BRACE3009724, BRACE3009993, BRACE3010076, BRACE3010079, BRACE3010086, BRACE3010221, BRACE3010283, BRACE3010315, BRACE3010397, BRACE3010416, BRACE3010435, BRACE3010438, BRACE3010702, BRACE3010862, BRACE3011271, BRACE3011421, BRACE3011447, BRACE3011505, BRACE3011634, BRACE3011774, BRACE3012357, BRACE3012574, BRACE3012806, BRACE3012930, BRACE3013119, BRACE3013418, BRACE3013576, BRACE3013740, BRACE3013780, BRACE3013874, BRACE3013936, BRACE3013986, BRACE3014005, BRACE3014068, BRACE3014231, BRACE3014290, BRACE3014317, BRACE3014523, BRACE3014714, BRACE3014807, BRACE3014942, BRACE3015090, BRACE3015121, BRACE3015262, BRACE3015521, BRACE3015808, BRACE3015829, BRACE3015894, BRACE3015898, BRACE3016020,

[1118] BRACE3016122, BRACE3016167, BRACE3016170, BRACE3016580, BRACE3016788, BRACE3016810, BRACE3016862, BRACE3016884, BRACE3017083, BRACE3017253, BRACE3018083, BRACE3018308, BRACE3018963, BRACE3019055, BRACE3019071, BRACE3019084, BRACE3019570, BRACE3019611, BRACE3019817, BRACE3019828, BRACE3019941, BRACE3020151, BRACE3020194, BRACE3020286, BRACE3020356, BRACE3020594, BRACE3020669, BRACE3020671, BRACE3020890, BRACE3021148, BRACE3021430, BRACE3021517, BRACE3021805, BRACE3022051, BRACE3022303, BRACE3022312, BRACE3022340, BRACE3022847, BRACE3023604, BRACE3023912, BRACE3024073, BRACE3024359, BRACE3024379, BRACE3024444, BRACE3024497, BRACE3024537, BRACE3024659, BRACE3024662, BRACE3024879, BRACE3025153,

[1119] BRACE3025302, BRACE3025457, BRACE3025531, BRACE3025627, BRACE3025630, BRACE3025719, BRACE3026008, BRACE3026075, BRACE3026161, BRACE3026290, BRACE3026345, BRACE3026456, BRACE3026735, BRACE3026802, BRACE3026844, BRACE3026947, BRACE3026993, BRACE3027242, BRACE3027256, BRACE3027326, BRACE3027478, BRACE3027480, BRACE3027931, BRACE3027976, BRACE3028214, BRACE3028241, BRACE3028360, BRACE3028895, BRACE3028998, BRACE3029005, BRACE3029021, BRACE3029205, BRACE3029447, BRACE3030057, BRACE3030103, BRACE3030538, BRACE3030748, BRACE3030866, BRACE3031161, BRACE3031184, BRACE3031185, BRACE3031315, BRACE3031372, BRACE3031579, BRACE3031728, BRACE3031838, BRACE3031843, BRACE3032427, BRACE3032455, BRACE3032537,

[1120] BRACE3032538, BRACE3032631, BRACE3032771, BRACE3032980, BRACE3032983, BRACE3033525, BRACE3034159, BRACE3034183, BRACE3034389, BRACE3034964, BRACE3034993, BRACE3035168, BRACE3035227, BRACE3036156, BRACE3036271, BRACE3037612, BRACE3037637, BRACE3037803, BRACE3038012, BRACE3038030, BRACE3038569, BRACE3038570, BRACE3038687, BRACE3038760, BRACE3039288, BRACE3039358, BRACE3039378, BRACE3039454, BRACE3040012, BRACE3040239, BRACE3040504, BRACE3040644, BRACE3040856, BRACE3040863, BRACE3041059, BRACE3041162, BRACE3041827, BRACE3042046, BRACE3042210, BRACE3042326, BRACE3042409, BRACE3042432, BRACE3042594, BRACE3043597, BRACE3044090, BRACE3044172, BRACE3044247, BRACE3044377, BRACE3044389, BRACE3044495,

[1121] BRACE3045011, BRACE3045033, BRACE3045078, BRACE3045145, BRACE3045424, BRACE3045708, BRACE3045981, BRACE3046049, BRACE3046152, BRACE3046294, BRACE3046450, BRACE3046466, BRACE3046491, BRACE3046609, BRACE3046762, BRACE3046837, BRACE3046855, BRACE3046966, BRACE3047018, BRACE3047482, BRACE3047801, BRALZ1000047, BRALZ1000103, BRALZ2000189, BRALZ2000263, BRALZ2000988, BRALZ2001038, BRALZ2001279, BRALZ2001350, BRALZ2001445, BRALZ2001559, BRALZ2001743, BRALZ2001834, BRALZ2002174, BRALZ2002418, BRALZ2002477, BRALZ2003119, BRALZ2003330, BRALZ2003453, BRALZ2003525, BRALZ2004397, BRALZ2005467, BRALZ2005471, BRALZ2005888, BRALZ2005950, BRALZ2005992, BRALZ2006288, BRALZ2006474, BRALZ2006560, BRALZ2006734,

[1122] BRALZ2006800, BRALZ2006976, BRALZ2007376, BRALZ2007545, BRALZ2007576, BRALZ2007661, BRALZ2007790, BRALZ2007793, BRALZ2007952, BRALZ2008031, BRALZ2008166, BRALZ2008462, BRALZ2008617, BRALZ2008696, BRALZ2008763, BRALZ2008869, BRALZ2008930, BRALZ2009446, BRALZ2009486, BRALZ2010186, BRALZ2010842, BRALZ2011337, BRALZ2011796, BRALZ2011880, BRALZ2012050, BRALZ2012183, BRALZ2012848, BRALZ2013621, BRALZ2013690, BRALZ2014054, BRALZ2014316, BRALZ2014484, BRALZ2014951, BRALZ2015168, BRALZ2015811, BRALZ2016085, BRALZ2016498, BRALZ2017359, BRALZ2017531, BRALZ2017607, BRALZ2017620, BRALZ2017844, BRALZ2018342, BRALZ2018492, BRALZ2018834, BRALZ2019047, BRAMY1000095, BRAMY1000098, BRAMY1000130, BRAMY1000157,

[1123] BRAMY1000173, BRAMY2000021, BRAMY2000025, BRAMY2000052, BRAMY2000076, BRAMY2000086, BRAMY2000181, BRAMY2000196, BRAMY2000231, BRAMY2000277, BRAMY2000411, BRAMY2000508, BRAMY2000562, BRAMY2000585, BRAMY2000653, BRAMY2000814, BRAMY2000893, BRAMY2000946, BRAMY2000981, BRAMY2000987, BRAMY2001068, BRAMY2001114, BRAMY2001203, BRAMY2001282, BRAMY2001367, BRAMY2001427, BRAMY2001473, BRAMY2001678, BRAMY2002005, BRAMY2002044, BRAMY2002072, BRAMY2002158, BRAMY2002311, BRAMY2002339, BRAMY2002364, BRAMY2002369, BRAMY2002479, BRAMY2002493, BRAMY2002525, BRAMY2002584, BRAMY2002604, BRAMY2002621, BRAMY2002638, BRAMY2002739, BRAMY2002799, BRAMY2002853, BRAMY2002862, BRAMY2002956, BRAMY2003008, BRAMY2003037,

[1124] BRAMY2003117, BRAMY2003287, BRAMY2003325, BRAMY2003529, BRAMY2003538, BRAMY2003585, BRAMY2003634, BRAMY2003653, BRAMY2003681, BRAMY2003893, BRAMY2003897, BRAMY2003898, BRAMY2003904, BRAMY2003926, BRAMY2003929, BRAMY2004031, BRAMY2004058, BRAMY2004183, BRAMY2004335, BRAMY2004351, BRAMY2004352, BRAMY2004363, BRAMY2004387, BRAMY2004492, BRAMY2004521, BRAMY2004524, BRAMY2004537, BRAMY2004542, BRAMY2004756, BRAMY2004771, BRAMY2005052, BRAMY2005064, BRAMY2005094, BRAMY2005151, BRAMY2005182, BRAMY2005244, BRAMY2005391, BRAMY2005488, BRAMY2005576, BRAMY2005648, BRAMY2005662, BRAMY2005708, BRAMY2005711, BRAMY2006092, BRAMY2006118, BRAMY2006149, BRAMY2006366, BRAMY2006375, BRAMY2006397, BRAMY2006411,

[1125] BRAMY2006459, BRAMY2006466, BRAMY2006659, BRAMY2006779, BRAMY2006809, BRAMY2006879, BRAMY2007043, BRAMY2007078, BRAMY2007110, BRAMY2007185, BRAMY2007244, BRAMY2007249, BRAMY2007255, BRAMY2007287, BRAMY2007308, BRAMY2007411, BRAMY2007458, BRAMY2007486, BRAMY2007546, BRAMY2007567, BRAMY2007594, BRAMY2007610, BRAMY2007613, BRAMY2007653, BRAMY2007753, BRAMY2007859, BRAMY2008333, BRAMY2008382, BRAMY2008563, BRAMY2008583, BRAMY2008977, BRAMY2008979, BRAMY2009013, BRAMY2009023, BRAMY2009034, BRAMY2009105, BRAMY2009123, BRAMY2009192, BRAMY2009344, BRAMY2009349, BRAMY2009394, BRAMY2009489, BRAMY2009508, BRAMY2009528, BRAMY2009557, BRAMY2009612, BRAMY2009693, BRAMY2010068, BRAMY2010135, BRAMY2010145,

[1126] BRAMY2010171, BRAMY2010239, BRAMY2010272, BRAMY2010290, BRAMY2010357, BRAMY2010366, BRAMY2010395, BRAMY2010441, BRAMY2010442, BRAMY2010464, BRAMY2010581, BRAMY2010798, BRAMY2010808, BRAMY2010919, BRAMY2011064, BRAMY2011105, BRAMY2011178, BRAMY2011196, BRAMY2011216, BRAMY2011253, BRAMY2011446, BRAMY2011480, BRAMY2011639, BRAMY2011679, BRAMY2011811, BRAMY2011841, BRAMY2011846, BRAMY2011849, BRAMY2011872, BRAMY2011961, BRAMY2012017, BRAMY2012091, BRAMY2012119, BRAMY2012162, BRAMY2012163, BRAMY2012277, BRAMY2012340, BRAMY2012426, BRAMY2012497, BRAMY2012517, BRAMY2012536, BRAMY2012555, BRAMY2012568, BRAMY2012581, BRAMY2012691, BRAMY2012721, BRAMY2012731, BRAMY2012776, BRAMY2012880, BRAMY2012881,

[1127] BRAMY2013169, BRAMY2013200, BRAMY2013216, BRAMY2013405, BRAMY2013414, BRAMY2013572, BRAMY2013590, BRAMY2013621, BRAMY2013659, BRAMY2013722, BRAMY2013736, BRAMY2013756, BRAMY2013944, BRAMY2013975, BRAMY2014019, BRAMY2014205, BRAMY2014387, BRAMY2014462, BRAMY2014469, BRAMY2014541, BRAMY2014754, BRAMY2014813, BRAMY2015211, BRAMY2015251, BRAMY2015311, BRAMY2015420, BRAMY2015503, BRAMY2015516, BRAMY2015550, BRAMY2015551, BRAMY2015559, BRAMY2015688, BRAMY2015705, BRAMY2015782, BRAMY2015833, BRAMY2015855, BRAMY2015890, BRAMY2015925, BRAMY2016002, BRAMY2016009, BRAMY2016020, BRAMY2016070, BRAMY2016251, BRAMY2016327, BRAMY2016386, BRAMY2016706, BRAMY2016771, BRAMY2016892, BRAMY2016938, BRAMY2016953,

[1128] BRAMY2017014, BRAMY2017249, BRAMY2017348, BRAMY2017450, BRAMY2017455, BRAMY2017528, BRAMY2017864, BRAMY2018027, BRAMY2018106, BRAMY2018122, BRAMY2018126, BRAMY2018272, BRAMY2018273, BRAMY2018279, BRAMY2018295, BRAMY2018308, BRAMY2018396, BRAMY2018467, BRAMY2018635, BRAMY2018785, BRAMY2019055, BRAMY2019111, BRAMY2019277, BRAMY2019300, BRAMY2019468, BRAMY2019509, BRAMY2019600, BRAMY2019643, BRAMY2019710, BRAMY2019963, BRAMY2019985, BRAMY2019989, BRAMY2020050, BRAMY2020058, BRAMY2020106, BRAMY2020270, BRAMY2020354, BRAMY2020355, BRAMY2020445, BRAMY2020466, BRAMY2020520, BRAMY2020574, BRAMY2020634, BRAMY2020713, BRAMY2021040, BRAMY2021063, BRAMY2021098, BRAMY2021139, BRAMY2021142, BRAMY2021276,

[1129] BRAMY2021388, BRAMY2021498, BRAMY2021523, BRAMY2021710, BRAMY2021732, BRAMY2021746, BRAMY2021825, BRAMY2021867, BRAMY2021962, BRAMY2021982, BRAMY2022052, BRAMY2022160, BRAMY2022168, BRAMY2022263, BRAMY2022301, BRAMY2022320, BRAMY2022383, BRAMY2022445, BRAMY2022454, BRAMY2022493, BRAMY2022525, BRAMY2022532, BRAMY2022723, BRAMY2022796, BRAMY2022929, BRAMY2022980, BRAMY2022984, BRAMY2023060, BRAMY2023110, BRAMY2023115, BRAMY2023161, BRAMY2023172, BRAMY2023238, BRAMY2023327, BRAMY2023358, BRAMY2023406, BRAMY2023482, BRAMY2023514, BRAMY2023719, BRAMY2023729, BRAMY2023786, BRAMY2023852, BRAMY2023863, BRAMY2023939, BRAMY2024073, BRAMY2024312, BRAMY2024374, BRAMY2024390, BRAMY2024416, BRAMY2024449,

[1130] BRAMY2024489, BRAMY2024497, BRAMY2024514, BRAMY2024530, BRAMY2024535, BRAMY2024545, BRAMY2024576, BRAMY2024593, BRAMY2024711, BRAMY2024715, BRAMY2024728, BRAMY2024827, BRAMY2024849, BRAMY2025024, BRAMY2025032, BRAMY2025121, BRAMY2025175, BRAMY2025218, BRAMY2025272, BRAMY2025277, BRAMY2025495, BRAMY2025812, BRAMY2025996, BRAMY2026009, BRAMY2026091, BRAMY2026168, BRAMY2026300, BRAMY2026347, BRAMY2026395, BRAMY2026405, BRAMY2026533, BRAMY2026538, BRAMY2026685, BRAMY2026713, BRAMY2026824, BRAMY2026899, BRAMY2026902, BRAMY2026904, BRAMY2026976, BRAMY2027073, BRAMY2027114, BRAMY2027140, BRAMY2027242, BRAMY2027396, BRAMY2027451, BRAMY2027461, BRAMY2027467, BRAMY2027587, BRAMY2027714, BRAMY2027717,

[1131] BRAMY2027739, BRAMY2027752, BRAMY2027782, BRAMY2028072, BRAMY2028183, BRAMY2028188, BRAMY2028269, BRAMY2028282, BRAMY2028472, BRAMY2028491, BRAMY2028516, BRAMY2028565, BRAMY2028593, BRAMY2028682, BRAMY2028740, BRAMY2028783, BRAMY2028796, BRAMY2028856, BRAMY2029204, BRAMY2029602, BRAMY2029988, BRAMY2030098, BRAMY2030109, BRAMY2030206, BRAMY2030477, BRAMY2030545, BRAMY2030607, BRAMY2030702, BRAMY2030703, BRAMY2030768, BRAMY2030799, BRAMY2030859, BRAMY2030915, BRAMY2031317, BRAMY2031377, BRAMY2031442, BRAMY2032014, BRAMY2032087, BRAMY2032231, BRAMY2032242, BRAMY2032290, BRAMY2032311, BRAMY2032317, BRAMY2032344, BRAMY2032589, BRAMY2032678, BRAMY2032696, BRAMY2032777, BRAMY2032994, BRAMY2033003,

[1132] BRAMY2033116, BRAMY2033240, BRAMY2033267, BRAMY2033316, BRAMY2033332, BRAMY2033506, BRAMY2033594, BRAMY2033895, BRAMY2033914, BRAMY2034072, BRAMY2034185, BRAMY2034187, BRAMY2034305, BRAMY2034561, BRAMY2034920, BRAMY2034993, BRAMY2035070, BRAMY2035449, BRAMY2035545, BRAMY2035606, BRAMY2035718, BRAMY2035719, BRAMY2035801, BRAMY2035869, BRAMY2035923, BRAMY2036076, BRAMY2036079, BRAMY2036254, BRAMY2036266, BRAMY2036387, BRAMY2036396, BRAMY2036459, BRAMY2036567, BRAMY2036615, BRAMY2036699, BRAMY2036913, BRAMY2036918, BRAMY2036968, BRAMY2037147, BRAMY2037328, BRAMY2037609, BRAMY2037629, BRAMY2037800, BRAMY2037823, BRAMY2037971, BRAMY2038100, BRAMY2038128, BRAMY2038317, BRAMY2038475, BRAMY2038484,

[1133] BRAMY2038516, BRAMY2038846, BRAMY2038887, BRAMY2038904, BRAMY2039287, BRAMY2039300, BRAMY2039314, BRAMY2039341, BRAMY2039695, BRAMY2039728, BRAMY2039872, BRAMY2040051, BRAMY2040159, BRAMY2040214, BRAMY2040478, BRAMY2040592, BRAMY2040915, BRAMY2041261, BRAMY2041347, BRAMY2041378, BRAMY2041384, BRAMY2041434, BRAMY2041507, BRAMY2041542, BRAMY2041738, BRAMY2042122, BRAMY2042131, BRAMY2042178, BRAMY2042195, BRAMY2042244, BRAMY2042549, BRAMY2042596, BRAMY2042612, BRAMY2042641, BRAMY2042711, BRAMY2042760, BRAMY2042804, BRAMY2042899, BRAMY2042918, BRAMY2043069, BRAMY2043103, BRAMY2043314, BRAMY2043345, BRAMY2044246, BRAMY2044317, BRAMY2044349, BRAMY2044686, BRAMY2044838, BRAMY2045036, BRAMY2045299,

[1134] BRAMY2045471, BRAMY2045530, BRAMY2046109, BRAMY2046478, BRAMY2046489, BRAMY2046537, BRAMY2046667, BRAMY2046742, BRAMY2046871, BRAMY2046984, BRAMY2046989, BRAMY2047169, BRAMY2047280, BRAMY2047676, BRAMY2047692, BRAMY2047746, BRAMY2047751, BRAMY2047765, BRAMY2047884, BRAMY2047948, BRAMY3000206, BRAMY3000210, BRAMY3000213, BRAMY3000224, BRAMY3000254, BRAMY3000307, BRAMY3000692, BRAMY3001356, BRAMY3001401, BRAMY3001409, BRAMY3001794, BRAMY3002120, BRAMY3002312, BRAMY3002329, BRAMY3002458, BRAMY3002508, BRAMY3002620, BRAMY3002803, BRAMY3002805, BRAMY3002886, BRAMY3002991, BRAMY3003026, BRAMY3003109, BRAMY3003205, BRAMY3003310, BRAMY3003566, BRAMY3003723, BRAMY3004126, BRAMY3004224, BRAMY3004672,

[1135] BRAMY3004800, BRAMY3004900, BRAMY3004919, BRAMY3005091, BRAMY3005184, BRAMY3005656, BRAMY3005912, BRAMY3005932, BRAMY3006032, BRAMY3006297, BRAMY3006761, BRAMY3007078, BRAMY3007206, BRAMY3007311, BRAMY3007350, BRAMY3007449, BRAMY3007471, BRAMY3007609, BRAMY3007723, BRAMY3007968, BRAMY3008088, BRAMY3008096, BRAMY3008335, BRAMY3008466, BRAMY3008505, BRAMY3008650, BRAMY3008937, BRAMY3009158, BRAMY3009207, BRAMY3009491, BRAMY3009556, BRAMY3009782, BRAMY3009811, BRAMY3009904, BRAMY3010264, BRAMY3010321, BRAMY3010411, BRAMY3010603, BRAMY3010654, BRAMY4000089, BRAMY4000095, BRAMY4000229, BRAMY4000277, BRAMY4000915, BRAMY4000962, BRAMY4001173, BRAMY4001200, BRAMY4001234, BRAMY4001449, BRAMY4001652,

[1136] BRAMY4001863, BRAMY4001913, BRAMY4002575, BRAMY4002628, BRASW1000053, BRASW1000125, BRAWH1000001, BRAWH1000002, BRAWH1000007, BRAWH1000037, BRAWH1000045, BRAWH1000094, BRAWH1000116, BRAWH1000127, BRAWH1000130, BRAWH1000157, BRAWH1000162, BRAWH1000164, BRAWH1000168, BRAWH1000174, BRAWH1000180, BRAWH1000369, BRAWH2000034, BRAWH2000048, BRAWH2000071, BRAWH2000082, BRAWH2000093, BRAWH2000109, BRAWH2000131, BRAWH2000142, BRAWH2000169, BRAWH2000177, BRAWH2000218, BRAWH2000232, BRAWH2000248, BRAWH2000256, BRAWH2000274, BRAWH2000323, BRAWH2000353, BRAWH2000370, BRAWH2000409, BRAWH2000443, BRAWH2000471, BRAWH2000476, BRAWH2000482, BRAWH2000488, BRAWH2000494, BRAWH2000500, BRAWH2000503, BRAWH2000554,

[1137] BRAWH2000595, BRAWH2000643, BRAWH2000651, BRAWH2000682, BRAWH2000686, BRAWH2000752, BRAWH2000839, BRAWH2000859, BRAWH2000866, BRAWH2000892, BRAWH2000901, BRAWH2000924, BRAWH2000926, BRAWH2000984, BRAWH2001019, BRAWH2001037, BRAWH2001052, BRAWH2001103, BRAWH2001129, BRAWH2001137, BRAWH2001141, BRAWH2001159, BRAWH2001171, BRAWH2001186, BRAWH2001203, BRAWH2001238, BRAWH2001255, BRAWH2001321, BRAWH2001355, BRAWH2001378, BRAWH2001395, BRAWH2001406, BRAWH2001412, BRAWH2001418, BRAWH2001436, BRAWH2001438, BRAWH2001439, BRAWH2001459, BRAWH2001484, BRAWH2001492, BRAWH2001503, BRAWH2001519, BRAWH2001530, BRAWH2001535, BRAWH2001589, BRAWH2001662, BRAWH2001666, BRAWH2001671, BRAWH2001679, BRAWH2001686,

[1138] BRAWH2001701, BRAWH2001842, BRAWH2001862, BRAWH2001873, BRAWH2001940, BRAWH2001973, BRAWH2002047, BRAWH2002060, BRAWH2002062, BRAWH2002125, BRAWH2002191, BRAWH2002318, BRAWH2002333, BRAWH2002352, BRAWH2002383, BRAWH2002549, BRAWH2002560, BRAWH2002601, BRAWH2002623, BRAWH2002630, BRAWH2002635, BRAWH2002662, BRAWH2002679, BRAWH2002725, BRAWH2002761, BRAWH2002811, BRAWH2002861, BRAWH2002911, BRAWH2002963, BRAWH2002967, BRAWH2002976, BRAWH2003000, BRAWH2003135, BRAWH2003240, BRAWH2003307, BRAWH2003355, BRAWH2003366, BRAWH2003662, BRAWH2003689, BRAWH2003832, BRAWH2003948, BRAWH2003964, BRAWH2004044, BRAWH2004068, BRAWH2004095, BRAWH2004136, BRAWH2004217, BRAWH2004580, BRAWH2004731, BRAWH2004779,

[1139] BRAWH2004842, BRAWH2004884, BRAWH2004923, BRAWH2005008, BRAWH2005074, BRAWH2005225, BRAWH2005315, BRAWH2005517, BRAWH2005524, BRAWH2005533, BRAWH2005578, BRAWH2005661, BRAWH2005812, BRAWH2005974, BRAWH2005998, BRAWH2006044, BRAWH2006083, BRAWH2006207, BRAWH2006301, BRAWH2006395, BRAWH2006405, BRAWH2006450, BRAWH2006493, BRAWH2006526, BRAWH2006543, BRAWH2006622, BRAWH2006760, BRAWH2006960, BRAWH2006989, BRAWH2007069, BRAWH2007308, BRAWH2007406, BRAWH2007550, BRAWH2007570, BRAWH2007591, BRAWH2007605, BRAWH2007658, BRAWH2007664, BRAWH2007800, BRAWH2007808, BRAWH2007825, BRAWH2007862, BRAWH2007890, BRAWH2008058, BRAWH2008128, BRAWH2008219, BRAWH2008292, BRAWH2008297, BRAWH2008366, BRAWH2008380,

[1140] BRAWH2008540, BRAWH2008577, BRAWH2008706, BRAWH2008790, BRAWH2008903, BRAWH2008956, BRAWH2008993, BRAWH2009112, BRAWH2009227, BRAWH2009238, BRAWH2009261, BRAWH2009263, BRAWH2009298, BRAWH2009304, BRAWH2009360, BRAWH2009393, BRAWH2009485, BRAWH2009490, BRAWH2009558, BRAWH2009590, BRAWH2009626, BRAWH2009678, BRAWH2009695, BRAWH2009907, BRAWH2010000, BRAWH2010069, BRAWH2010084, BRAWH2010136, BRAWH2010318, BRAWH2010329, BRAWH2010354, BRAWH2010364, BRAWH2010536, BRAWH2010552, BRAWH2010584, BRAWH2010618, BRAWH2010619, BRAWH2010754, BRAWH2010980, BRAWH2011066, BRAWH2011079, BRAWH2011096, BRAWH2011155, BRAWH2011166, BRAWH2011204, BRAWH2011286, BRAWH2011294, BRAWH2011343, BRAWH2011400, BRAWH2011762,

[1141] BRAWH2011795, BRAWH2011796, BRAWH2011823, BRAWH2011860, BRAWH2011920, BRAWH2011958, BRAWH2012054, BRAWH2012077, BRAWH2012161, BRAWH2012162, BRAWH2012164, BRAWH2012258, BRAWH2012277, BRAWH2012326, BRAWH2012540, BRAWH2012619, BRAWH2012698, BRAWH2012749, BRAWH2012827, BRAWH2012866, BRAWH2012963, BRAWH2013047, BRAWH2013219, BRAWH2013294, BRAWH2013748, BRAWH2013866, BRAWH2013871, BRAWH2013914, BRAWH2013941, BRAWH2013955, BRAWH2014053, BRAWH2014234, BRAWH2014379, BRAWH2014414, BRAWH2014473, BRAWH2014511, BRAWH2014645, BRAWH2014662, BRAWH2014717, BRAWH2014729, BRAWH2014876, BRAWH2014934, BRAWH2014954, BRAWH2015247, BRAWH2015375, BRAWH2015385, BRAWH2015595, BRAWH2015728, BRAWH2015853, BRAWH2015866,

[1142] BRAWH2016028, BRAWH2016106, BRAWH2016160, BRAWH2016166, BRAWH2016209, BRAWH2016221, BRAWH2016223, BRAWH2016305, BRAWH2016439, BRAWH2016446, BRAWH2016514, BRAWH2016562, BRAWH2016655, BRAWH2016679, BRAWH2016702, BRAWH2016724, BRAWH2016785, BRAWH2016792, BRAWH2016800, BRAWH2017002, BRAWH2017103, BRAWH2017250, BRAWH2017294, BRAWH2017304, BRAWH2017305, BRAWH2017379, BRAWH2017407, BRAWH2017433, BRAWH2017523, BRAWH2017534, BRAWH2017542, BRAWH2017635, BRAWH2017685, BRAWH2017913, BRAWH2018206, BRAWH2018267, BRAWH2018282, BRAWH2018317, BRAWH2018506, BRAWH2018514, BRAWH2018527, BRAWH2018601, BRAWH2018745, BRAWH2018875, BRAWH2019053, BRAWH2019055, BRAWH2019198, BRAWH3000078, BRAWH3000088, BRAWH3000100,

[1143] BRAWH3000166, BRAWH3000314, BRAWH3000329, BRAWH3000410, BRAWH3000446, BRAWH3000491, BRAWH3000604, BRAWH3000884, BRAWH3001053, BRAWH3001319, BRAWH3001326, BRAWH3001475, BRAWH3001636, BRAWH3001638, BRAWH3001712, BRAWH3001760, BRAWH3001783, BRAWH3001833, BRAWH3001879, BRAWH3001891, BRAWH3001918, BRAWH3002433, BRAWH3002467, BRAWH3002513, BRAWH3002574, BRAWH3002600, BRAWH3002819, BRAWH3003019, BRAWH3003136, BRAWH3003244, BRAWH3003343, BRAWH3003411, BRAWH3003522, BRAWH3003573, BRAWH3003598, BRAWH3003727, BRAWH3003801, BRAWH3003975, BRAWH3004222, BRAWH3004335, BRAWH3004350, BRAWH3004453, BRAWH3004530, BRAWH3004666, BRAWH3005037, BRAWH3005047, BRAWH3005132, BRAWH3005146, BRAWH3005292, BRAWH3005300,

[1144] BRAWH3005422, BRAWH3005534, BRAWH3005886, BRAWH3005892, BRAWH3005896, BRAWH3005912, BRAWH3005981, BRAWH3006547, BRAWH3006548, BRAWH3006761, BRAWH3006792, BRAWH3007129, BRAWH3007221, BRAWH3007441, BRAWH3007455, BRAWH3007506, BRAWH3007726, BRAWH3007783, BRAWH3008167, BRAWH3008341, BRAWH3008559, BRAWH3008697, BRAWH3008867, BRAWH3008931, BRAWH3009017, BRAWH3009285, BRAWH3009297, BRAWH3009546, BRAWH3009961, BRAWH3010461, BRAWH3010560, BRAWH3010602, BRAWH3010657, BRAWH3010726, BRAWH3010833, BRAWH3011101, BRAWH3011331, BRAWH3011402, BRAWH3011577, BRAWH3011623, BRAWH3011637, BRAWH3011685, BRAWH3011907, BRAWH3011929, BRAWH3012005, BRAWH3012662, BRAWH3012779, BRAWH3013009, BRAWH3013049, BRAWH3013197,

[1145] BRAWH3013264, BRAWH3013508, BRAWH3014609, BRAWH3014639, BRAWH3015017, BRAWH3015175, BRAWH3015260, BRAWH3015610, BRAWH3015825, BRAWH3016123, BRAWH3016271, BRAWH3016715, BRAWH3017259, BRAWH3017260, BRAWH3017477, BRAWH3017537, BRAWH3017980, BRAWH3018063, BRAWH3018369, BRAWH3018548, BRAWH3018969, BRAWH3019026, BRAWH3019529, BRAWH3019594, BRAWH3019629, BRAWH3019820, BRAWH3020200, BRAWH3020318, BRAWH3020486, BRAWH3020884, BRAWH3020928, BRAWH3021012, BRAWH3021545, BRAWH3021574, BRAWH3021580, BRAWH3021641, BRAWH3021643, BRAWH3021724, BRAWH3022347, BRAWH3022431, BRAWH3022459, BRAWH3022542, BRAWH3022719, BRAWH3022866, BRAWH3022900, BRAWH3023156, BRAWH3023168, BRAWH3023274, BRAWH3023421, BRAWH3024231,

[1146] BRAWH3024242, BRAWH3024469, BRAWH3024506, BRAWH3024613, BRAWH3024989, BRAWH3026349, BRAWH3026394, BRAWH3026529, BRAWH3027420, BRAWH3027440, BRAWH3027533, BRAWH3027574, BRAWH3027607, BRAWH3027616, BRAWH3027675, BRAWH3027806, BRAWH3027880, BRAWH3027927, BRAWH3028202, BRAWH3028223, BRAWH3028306, BRAWH3028461, BRAWH3028645, BRAWH3028754, BRAWH3028796, BRAWH3029254, BRAWH3029313, BRAWH3029538, BRAWH3029556, BRAWH3029806, BRAWH3030613, BRAWH3030772, BRAWH3030810, BRAWH3030892, BRAWH3030910, BRAWH3030950, BRAWH3031054, BRAWH3031710, BRAWH3031902, BRAWH3032298, BRAWH3032340, BRAWH3032571, BRAWH3032620, BRAWH3032930, BRAWH3033117, BRAWH3033293, BRAWH3033448, BRAWH3033513, BRAWH3034097, BRAWH3034114,

[1147] BRAWH3034134, BRAWH3034668, BRAWH3034743, BRAWH3034775, BRAWH3034890, BRAWH3035154, BRAWH3035403, BRAWH3035904, BRAWH3035914, BRAWH3035936, BRAWH3036077, BRAWH3036247, BRAWH3036270, BRAWH3036561, BRAWH3036738, BRAWH3036951, BRAWH3037265, BRAWH3037394, BRAWH3037533, BRAWH3037979, BRAWH3038055, BRAWH3038230, BRAWH3038252, BRAWH3038324, BRCAN1000065, BRCAN1000076, BRCAN1000105, BRCAN1000149, BRCAN1000168, BRCAN2000148, BRCAN2000149, BRCAN2000209, BRCAN2000239, BRCAN2000346, BRCAN2000364, BRCAN2000383, BRCAN2000418, BRCAN2000523, BRCAN2000541, BRCAN2000563, BRCAN2000577, BRCAN2000620, BRCAN2000763, BRCAN2000832, BRCAN2000923, BRCAN2001223, BRCAN2001866, BRCAN2002416, BRCAN2002473, BRCAN2002562,

[1148] BRCAN2002662, BRCAN2002826, BRCAN2002854, BRCAN2002856, BRCAN2002892, BRCAN2002944, BRCAN2002948, BRCAN2003070, BRCAN2003269, BRCAN2003389, BRCAN2003628, BRCAN2003703, BRCAN2003746, BRCAN2003814, BRCAN2003987, BRCAN2004173, BRCAN2004355, BRCAN2004371, BRCAN2004653, BRCAN2004699, BRCAN2005436, BRCAN2005449, BRCAN2006019, BRCAN2006051, BRCAN2006063, BRCAN2006117, BRCAN2006174, BRCAN2006290, BRCAN2006297, BRCAN2006323, BRCAN2006401, BRCAN2006411, BRCAN2006450, BRCAN2006955, BRCAN2007119, BRCAN2007144, BRCAN2007409, BRCAN2007426, BRCAN2007525, BRCAN2007700, BRCAN2008494, BRCAN2008528, BRCAN2008701, BRCAN2008894, BRCAN2009156, BRCAN2009168, BRCAN2009203, BRCAN2009432, BRCAN2010374, BRCAN2010376,

[1149] BRCAN2010547, BRCAN2010581, BRCAN2010665, BRCAN2011254, BRCAN2011316, BRCAN2011602, BRCAN2011946, BRCAN2012110, BRCAN2012355, BRCAN2012402, BRCAN2012408, BRCAN2012481, BRCAN2012613, BRCAN2012713, BRCAN2012929, BRCAN2013655, BRCAN2013660, BRCAN2014143, BRCAN2014229, BRCAN2014370, BRCAN2014602, BRCAN2014652, BRCAN2014788, BRCAN2014881, BRCAN2014952, BRCAN2015371, BRCAN2015402, BRCAN2015464, BRCAN2015719, BRCAN2015757, BRCAN2015886, BRCAN2016025, BRCAN2016046, BRCAN2016174, BRCAN2016433, BRCAN2016619, BRCAN2016762, BRCAN2016814, BRCAN2017442, BRCAN2017905, BRCAN2018240, BRCAN2018269, BRCAN2018490, BRCAN2018566, BRCAN2018667, BRCAN2018748, BRCAN2018935, BRCAN2019002, BRCAN2019387, BRCAN2019653,

[1150] BRCAN2019773, BRCAN2019907, BRCAN2020234, BRCAN2020331, BRCAN2020412, BRCAN2020467, BRCAN2020710, BRCAN2020880, BRCAN2021024, BRCAN2021325, BRCAN2021452, BRCAN2021669, BRCAN2021718, BRCAN2022126, BRCAN2022191, BRCAN2022472, BRCAN2022474, BRCAN2023347, BRCAN2023724, BRCAN2024451, BRCAN2024563, BRCAN2025009, BRCAN2025093, BRCAN2025349, BRCAN2025368, BRCAN2025712, BRCAN2025982, BRCAN2026117, BRCAN2026340, BRCAN2026711, BRCAN2027150, BRCAN2027310, BRCAN2027334, BRCAN2027355, BRCAN2027364, BRCAN2027513, BRCAN2027593, BRCAN2027970, BRCAN2028021, BRCAN2028040, BRCAN2028319, BRCAN2028338, BRCAN2028355, BRCAN2028378, BRCAN2028460, BRCAN2028545, BRCAN2028634, BRCAN2028702, BRCOC1000040, BRCOC1000087,

[1151] BRCOC1000094, BRCOC2000004, BRCOC2000047, BRCOC2000152, BRCOC2000184, BRCOC2000186, BRCOC2000333, BRCOC2000360, BRCOC2000404, BRCOC2000487, BRCOC2000637, BRCOC2000670, BRCOC2000816, BRCOC2000850, BRCOC2001355, BRCOC2002085, BRCOC2002155, BRCOC2002323, BRCOC2002659, BRCOC2002664, BRCOC2002686, BRCOC2002751, BRCOC2002756, BRCOC2002777, BRCOC2002835, BRCOC2003100, BRCOC2003125, BRCOC2003187, BRCOC2003213, BRCOC2003513, BRCOC2003732, BRCOC2003740, BRCOC2004036, BRCOC200.4175, BRCOC2004354, BRCOC2004455, BRCOC2004950, BRCOC2005542, BRCOC2005903, BRCOC2005951, BRCOC2006164, BRCOC2006189, BRCOC2006243, BRCOC2006270, BRCOC2006639, BRCOC2006942, BRCOC2007034, BRCOC2007593, BRCOC2007733, BRCOC2007769,

[1152] BRCOC2008064, BRCOC2008225, BRCOC2008642, BRCOC2008993, BRCOC2009052, BRCOC2009196, BRCOC2009380, BRCOC2009638, BRCOC2009937, BRCOC2010115, BRCOC2010510, BRCOC2010730, BRCOC2010980, BRCOC2010994, BRCOC2011010, BRCOC2011398, BRCOC2011418, BRCOC2011769, BRCOC2011996, BRCOC2012172, BRCOC2012229, BRCOC2012386, BRCOC2012551, BRCOC2012813, BRCOC2013448, BRCOC2013573, BRCOC2013675, BRCOC2013780, BRCOC2014033, BRCOC2014400, BRCOC2014748, BRCOC2014833, BRCOC2015597, BRCOC2015824, BRCOC2015908, BRCOC2015944, BRCOC2016525, BRCOC2016661, BRCOC2017061, BRCOC2017652, BRCOC2017856, BRCOC2018775, BRCOC2018877, BRCOC2019255, BRCOC2019549, BRCOC2019841, BRCOC2019896, BRCOC2019903, BRCOC2019910, BRCOC2019934,

[1153] BRCOC2020122, BRCOC2020142, BRHIP1000058, BRHIP1000072, BRHIP1000108, BRHIP1000129, BRHIP1000174, BRHIP1000258, BRHIP2000021, BRHIP2000079, BRHIP2000087, BRHIP2000163, BRHIP2000210, BRHIP2000239, BRHIP2000245, BRHIP2000312, BRHIP2000359, BRHIP2000445, BRHIP2000506, BRHIP2000532, BRHIP2000621, BRHIP2000691, BRHIP2000826, BRHIP2000920, BRHIP2001074, BRHIP2001686, BRHIP2001782, BRHIP2001802, BRHIP2001805, BRHIP2001886, BRHIP2001927, BRHIP2002122, BRHIP2002143, BRHIP2002172, BRHIP2002339, BRHIP2002346, BRHIP2002510, BRHIP2002664, BRHIP2002722, BRHIP2002929, BRHIP2003048, BRHIP2003062, BRHIP2003242, BRHIP2003272, BRHIP2003748, BRHIP2003786, BRHIP2003828, BRHIP2003917, BRHIP2004312, BRHIP2004355,

[1154] BRHIP2004359, BRHIP2004814, BRHIP2004883, BRHIP2004902, BRHIP2005010, BRHIP2005236, BRHIP2005271, BRHIP2005354, BRHIP2005600, BRHIP2005719, BRHIP2005724, BRHIP2005752, BRHIP2005932, BRHIP2006617, BRHIP2006782, BRHIP2006800, BRHIP2006819, BRHIP2006921, BRHIP2007307, BRHIP2007616, BRHIP2007690, BRHIP2007741, BRHIP2007928, BRHIP2007969, BRHIP2008269, BRHIP2008389, BRHIP2008607, BRHIP2008756, BRHIP2008909, BRHIP2009019, BRHIP2009177, BRHIP2009340, BRHIP2009351, BRHIP2009414, BRHIP2009474, BRHIP2009617, BRHIP2009685, BRHIP2010217, BRHIP2010309, BRHIP2010444, BRHIP2010487, BRHIP2010571, BRHIP2010593, BRHIP2010610, BRHIP2010723, BRHIP2010744, BRHIP2011080, BRHIP2011120, BRHIP2011199, BRHIP2011491,

[1155] BRHIP2011508, BRHIP2011616, BRHIP2011783, BRHIP2011838, BRHIP2011891, BRHIP2011933, BRHIP2012054, BRHIP2012059, BRHIP2012141, BRHIP2012314, BRHIP2012360, BRHIP2012545, BRHIP2012580, BRHIP2012642, BRHIP2012750, BRHIP2012922, BRHIP2012923, BRHIP2012972, BRHIP2013286, BRHIP2013447, BRHIP2013510, BRHIP2013699, BRHIP2013723, BRHIP2013958, BRHIP2013972, BRHIP2014063, BRHIP2014228, BRHIP2014285, BRHIP2014291, BRHIP2014373, BRHIP2014386, BRHIP2014387, BRHIP2014954, BRHIP2015153, BRHIP2015224, BRHIP2015245, BRHIP2015356, BRHIP2015360, BRHIP2015679, BRHIP2016005, BRHIP2016125, BRHIP2016788, BRHIP2016968, BRHIP2016990, BRHIP2017010, BRHIP2017315, BRHIP2017385, BRHIP2017404, BRHIP2017542, BRHIP2017553,

[1156] BRHIP2017642, BRHIP2017714, BRHIP2017780, BRHIP2017945, BRHIP2018014, BRHIP2018369, BRHIP2018612, BRHIP2018635, BRHIP2018650, BRHIP2018712, BRHIP2018719, BRHIP2018805, BRHIP2018998, BRHIP2019007, BRHIP2019047, BRHIP2019149, BRHIP2019177, BRHIP2019186, BRHIP2019291, BRHIP2019494, BRHIP2019589, BRHIP2019641, BRHIP2019819, BRHIP2019884, BRHIP2019972, BRHIP2020182, BRHIP2020573, BRHIP2020622, BRHIP2020695, BRHIP2020743, BRHIP2020799, BRHIP2020842, BRHIP2020859, BRHIP2020930, BRHIP2021102, BRHIP2021289, BRHIP2021495, BRHIP2021615, BRHIP2021744, BRHIP2021762, BRHIP2021858, BRHIP2021929, BRHIP2022006, BRHIP2022054, BRHIP2022221, BRHIP2022228, BRHIP2022298, BRHIP2022326, BRHIP2022467, BRHIP2022708,

[1157] BRHIP2022986, BRHIP2023071, BRHIP2023229, BRHIP2023292, BRHIP2023309, BRHIP2023369, BRHIP2023438, BRHIP2023695, BRHIP2023735, BRHIP2023762, BRHIP2023773, BRHIP2023860, BRHIP2023869, BRHIP2024046, BRHIP2024165, BRHIP2024201, BRHIP2024347, BRHIP2024549, BRHIP2024742, BRHIP2024789, BRHIP2024911, BRHIP2024941, BRHIP2025245, BRHIP2025366, BRHIP2025448, BRHIP2025679, BRHIP2025739, BRHIP2025797, BRHIP2026021, BRHIP2026061, BRHIP2026155, BRHIP2026214, BRHIP2026288, BRHIP2026346, BRHIP2026557, BRHIP2026723, BRHIP2026877, BRHIP2027017, BRHIP2027054, BRHIP2027077, BRHIP2027563, BRHIP2027685, BRHIP2027762, BRHIP2028187, BRHIP2028303, BRHIP2028330, BRHIP2028480, BRHIP2028583, BRHIP2028593, BRHIP2029176,

[1158] BRHIP2029283, BRHIP2029393, BRHIP2029529, BRHIP2029643, BRHIP2029663, BRHIP3000017, BRHIP3000060, BRHIP3000070, BRHIP3000081, BRHIP3000131, BRHIP3000240, BRHIP3000377, BRHIP3000457, BRHIP3000475, BRHIP3000488, BRHIP3000526, BRHIP3000626, BRHIP3000859, BRHIP3000907, BRHIP3001076, BRHIP3001079, BRHIP3001141, BRHIP3001283, BRHIP3001338, BRHIP3001360, BRHIP3001481, BRHIP3001878, BRHIP3001964, BRHIP3002114, BRHIP3002124, BRHIP3002141, BRHIP3002363, BRHIP3002691, BRHIP3002920, BRHIP3002931, BRHIP3003063, BRHIP3003126, BRHIP3003306, BRHIP3003340, BRHIP3003395, BRHIP3003484, BRHIP3003644, BRHIP3003688, BRHIP3003795, BRHIP3003961, BRHIP3003984, BRHIP3004193, BRHIP3004215, BRHIP3004416, BRHIP3004710,

[1159] BRHIP3004725, BRHIP3004774, BRHIP3004786, BRHIP3004863, BRHIP3004968, BRHIP3005037, BRHIP3005137, BRHIP3005142, BRHIP3005231, BRHIP3005307, BRHIP3005574, BRHIP3005673, BRHIP3005768, BRHIP3005801, BRHIP3005944, BRHIP3006279, BRHIP3006294, BRHIP3006390, BRHIP3006449, BRHIP3006683, BRHIP3006786, BRHIP3006950, BRHIP3007172, BRHIP3007183, BRHIP3007195, BRHIP3007223, BRHIP3007239, BRHIP3007291, BRHIP3007409, BRHIP3007424, BRHIP3007483, BRHIP3007586, BRHIP3007609, BRHIP3007640, BRHIP3007960, BRHIP3008082, BRHIP3008183, BRHIP3008314, BRHIP3008320, BRHIP3008344, BRHIP3008405, BRHIP3008565, BRHIP3008598, BRHIP3008606, BRHIP3008691, BRHIP3008714, BRHIP3008997, BRHIP3009099, BRHIP3009140, BRHIP3009181,

[1160] BRHIP3009318, BRHIP3009427, BRHIP3009448, BRHIP3009672, BRHIP3009753, BRHIP3010135, BRHIP3010289, BRHIP3010529, BRHIP3011082, BRHIP3011241, BRHIP3011269, BRHIP3011460, BRHIP3011567, BRHIP3011831, BRHIP3012185, BRHIP3012289, BRHIP3012357, BRHIP3012736, BRHIP3012745, BRHIP3012868, BRHIP3012997, BRHIP3013078, BRHIP3013271, BRHIP3013588, BRHIP3013698, BRHIP3013765, BRHIP3013897, BRHIP3014237, BRHIP3014675, BRHIP3015620, BRHIP3015751, BRHIP3015854, BRHIP3016032, BRHIP3016213, BRHIP3016302, BRHIP3016421, BRHIP3017109, BRHIP3017146, BRHIP3017256, BRHIP3017325, BRHIP3017558, BRHIP3017637, BRHIP3017855, BRHIP3018278, BRHIP3018784, BRHIP3019643, BRHIP3019824, BRHIP3019880, BRHIP3019956, BRHIP3020046,

[1161] BRHIP3020155, BRHIP3020182, BRHIP3020733, BRHIP3021019, BRHIP3021499, BRHIP3021534, BRHIP3021778, BRHIP3021987, BRHIP3022656, BRHIP3023922, BRHIP3024118, BRHIP3024533, BRHIP3024703, BRHIP3024725, BRHIP3024820, BRHIP3025161, BRHIP3025702, BRHIP3025795, BRHIP3025844, BRHIP3026052, BRHIP3026097, BRHIP3026231, BRHIP3026335, BRHIP3026651, BRHIP3027105, BRHIP3027137, BRHIP3027160, BRHIP3027191, BRHIP3027501, BRHIP3027594, BRHIP3027651, BRHIP3027854, BRHIP3027947, BRHIP3028570, BRHIP3028742, BRSSN1000056, BRSSN1000059, BRSSN1000092, BRSSN1000153, BRSSN2000097, BRSSN2000175, BRSSN2000197, BRSSN2000244, BRSSN2000293, BRSSN2000295, BRSSN2000312, BRSSN2000498, BRSSN2000518, BRSSN2000561, BRSSN2000566,

[1162] BRSSN2000684, BRSSN2000715, BRSSN2000832, BRSSN2001213, BRSSN2001275, BRSSN2001342, BRSSN2001426, BRSSN2001503, BRSSN2001579, BRSSN2001758, BRSSN2001810, BRSSN2001869, BRSSN2002857, BRSSN2002859, BRSSN2003086, BRSSN2003093, BRSSN2003820, BRSSN2003841, BRSSN2003937, BRSSN2004142, BRSSN2004303, BRSSN2004304, BRSSN2004496, BRSSN2004657, BRSSN2004679, BRSSN2004686, BRSSN2004710, BRSSN2004719, BRSSN2005847, BRSSN2006133, BRSSN2006390, BRSSN2006575, BRSSN2006611, BRSSN2006644, BRSSN2006892, BRSSN2007076, BRSSN2007168, BRSSN2007202, BRSSN2007338, BRSSN2007504, BRSSN2007819, BRSSN2008125, BRSSN2008419, BRSSN2008464, BRSSN2008549, BRSSN2008797, BRSSN2009119, BRSSN2009378, BRSSN2009389, BRSSN2009395,

[1163] BRSSN2009627, BRSSN2009630, BRSSN2009702, BRSSN2010019, BRSSN2010110, BRSSN2010587, BRSSN2010596, BRSSN2010830, BRSSN2011262, BRSSN2011653, BRSSN2011738, BRSSN2011843, BRSSN2012081, BRSSN2012103, BRSSN2012157, BRSSN2012198, BRSSN2012254, BRSSN2012439, BRSSN2012622, BRSSN2012691, BRSSN2012838, BRSSN2013095, BRSSN2013544, BRSSN2013696, BRSSN2013702, BRSSN2013733, BRSSN2013753, BRSSN2013874, BRSSN2014112, BRSSN2014294, BRSSN2014299, BRSSN2014424, BRSSN2014513, BRSSN2014556, BRSSN2014573, BRSSN2014610, BRSSN2014636, BRSSN2014685, BRSSN2015199, BRSSN2015238, BRSSN2015369, BRSSN2015493, BRSSN2015497, BRSSN2015554, BRSSN2015707, BRSSN2015773, BRSSN2015907, BRSSN2015982, BRSSN2016589, BRSSN2016768,

[1164] BRSSN2016905, BRSSN2017297, BRSSN2017422, BRSSN2017530, BRSSN2017682, BRSSN2017757, BRSSN2018218, BRSSN2018440, BRSSN2018447, BRSSN2018581, BRSSN2018731, BRSSN2018771, BRSSN2018925, BRSTN1000083, BRSTN1000097, BRSTN2000058, BRSTN2000070, BRSTN2000220, BRSTN2000312, BRSTN2000367, BRSTN2000536, BRSTN2000872, BRSTN2001067, BRSTN2001613, BRSTN2001801, BRSTN2002105, BRSTN2002400, BRSTN2002532, BRSTN2002691, BRSTN2003590, BRSTN2003835, BRSTN2004863, BRSTN2004869, BRSTN2004987, BRSTN2005721, BRSTN2006306, BRSTN2006466, BRSTN2006580, BRSTN2006583, BRSTN2006638, BRSTN2006865, BRSTN2007000, BRSTN2007118, BRSTN2007284, BRSTN2007765, BRSTN2008052, BRSTN2008283, BRSTN2008367, BRSTN2008418, BRSTN2008457,

[1165] BRSTN2008475, BRSTN2008930, BRSTN2009247, BRSTN2010089, BRSTN2010107, BRSTN2010363, BRSTN2010416, BRSTN2010500, BRSTN2010569, BRSTN2010750, BRSTN2010923, BRSTN2011211, BRSTN2011597, BRSTN2011688, BRSTN2011799, BRSTN2012089, BRSTN2012284, BRSTN2012320, BRSTN2012380, BRSTN2012451, BRSTN2013354, BRSTN2013502, BRSTN2013931, BRSTN2014490, BRSTN2014633, BRSTN2014751, BRSTN2014770, BRSTN2015015, BRSTN2015889, BRSTN2015978, BRSTN2016066, BRSTN2016335, BRSTN2016678, BRSTN2016918, BRSTN2016992, BRSTN2017151, BRSTN2017237, BRSTN2017379, BRSTN2017761, BRSTN2017771, BRSTN2017995, BRSTN2018077, BRSTN2018083, BRSTN2018596, BRSTN2018692, BRSTN2018712, BRSTN2019079, BRSTN2019129, BRTHA1000021, BRTHA1000063,

[1166] BRTHA1000311, BRTHA2000057, BRTHA2000474, BRTHA2000514, BRTHA2000574, BRTHA2000855, BRTHA2000969, BRTHA2000972, BRTHA2001304, BRTHA2001370, BRTHA2001462, BRTHA2001717, BRTHA2001812, BRTHA2002091, BRTHA2002115, BRTHA2002133, BRTHA2002281, BRTHA2002376, BRTHA2002442, BRTHA2002493, BRTHA2002565, BRTHA2002608, BRTHA2002702, BRTHA2002721, BRTHA2002726, BRTHA2002741, BRTHA2002808, BRTHA2002896, BRTHA2002903, BRTHA2003030, BRTHA2003110, BRTHA2003116, BRTHA2003436, BRTHA2003759, BRTHA2003794, BRTHA2004361, BRTHA2004371, BRTHA2004582, BRTHA2004629, BRTHA2004639, BRTHA2004642, BRTHA2004812, BRTHA2004821, BRTHA2004978, BRTHA2004992, BRTHA2005005, BRTHA2005013, BRTHA2005448, BRTHA2005579, BRTHA2005831,

[1167] BRTHA2005942, BRTHA2005956, BRTHA2006075, BRTHA2006146, BRTHA2006194, BRTHA2006232, BRTHA2006720, BRTHA2006735, BRTHA2006974, BRTHA2006975, BRTHA2007060, BRTHA2007122, BRTHA2007422, BRTHA2007603, BRTHA2007665, BRTHA2007998, BRTHA2008316, BRTHA2008335, BRTHA2008502, BRTHA2008513, BRTHA2008527, BRTHA2008535, BRTHA2008598, BRTHA2008669, BRTHA2008955, BRTHA2009311, BRTHA2009349, BRTHA2009486, BRTHA2009803, BRTHA2009846, BRTHA2009886, BRTHA2009972, BRTHA2010008, BRTHA2010033, BRTHA2010073, BRTHA2010097, BRTHA2010191, BRTHA2010397, BRTHA2010608, BRTHA2010672, BRTHA2010884, BRTHA2010907, BRTHA2011062, BRTHA2011194, BRTHA2011321, BRTHA2011351, BRTHA2011500, BRTHA2011641, BRTHA2011691, BRTHA2012129,

[1168] BRTHA2012183, BRTHA2012189, BRTHA2012351, BRTHA2012392, BRTHA2012466, BRTHA2012555, BRTHA2012562, BRTHA2012980, BRTHA2013054, BRTHA2013262, BRTHA2013275, BRTHA2013426, BRTHA2013460, BRTHA2013515, BRTHA2013540, BRTHA2013595, BRTHA2013610, BRTHA2013707, BRTHA2013942, BRTHA2014287, BRTHA2014334, BRTHA2014381, BRTHA2014578, BRTHA2014647, BRTHA2014663, BRTHA2014792, BRTHA2014828, BRTHA2014909, BRTHA2014975, BRTHA2014997, BRTHA2015406, BRTHA2015478, BRTHA2015696, BRTHA2015700, BRTHA2015853, BRTHA2015878, BRTHA2016179, BRTHA2016215, BRTHA2016267, BRTHA2016318, BRTHA2016496, BRTHA2016543, BRTHA2016552, BRTHA2016765, BRTHA2016918, BRTHA2017178, BRTHA2017353, BRTHA2017364, BRTHA2017972, BRTHA2017985,

[1169] BRTHA2018011, BRTHA2018129, BRTHA2018165, BRTHA2018304, BRTHA2018344, BRTHA2018420, BRTHA2018443, BRTHA2018504, BRTHA2018558, BRTHA2018591, BRTHA2018624, BRTHA2018706, BRTHA2018707, BRTHA2019014, BRTHA2019022, BRTHA2019048, BRTHA2019073, BRTHA2019726, BRTHA2019743, BRTHA2020400, BRTHA2020566, BRTHA2020642, BRTHA2020695, BRTHA2020721, BRTHA2020781, BRTHA2020811, BRTHA2020910, BRTHA2021212, BRTHA2021440, BRTHA2021450, BRTHA2022074, BRTHA2022914, BRTHA2022968, BRTHA2023402, BRTHA2023437, BRTHA2024177, BRTHA2024354, BRTHA2024712, BRTHA2025869, BRTHA2026071, BRTHA2026290, BRTHA2026311, BRTHA2027227, BRTHA2027250, BRTHA2027546, BRTHA2028297, BRTHA2029969, BRTHA2030036, BRTHA2030213, BRTHA2031517,

[1170] BRTHA2031800, BRTHA2031917, BRTHA2032763, BRTHA2032845, BRTHA2033122, BRTHA2033155, BRTHA2033264, BRTHA2033320, BRTHA2033469, BRTHA2033683, BRTHA2034281, BRTHA2034576, BRTHA2034874, BRTHA2035448, BRTHA2035743, BRTHA2036055, BRTHA2036295, BRTHA2036660, BRTHA2037247, BRTHA2038279, BRTHA2038345, BRTHA2038353, BRTHA2038396, BRTHA3000252, BRTHA3000273, BRTHA3000296, BRTHA3000297, BRTHA3000325, BRTHA3000456, BRTHA3000633, BRTHA3000789, BRTHA3001221, BRTHA3001623, BRTHA3002265, BRTHA3002401, BRTHA3002411, BRTHA3002427, BRTHA3002864, BRTHA3002933, BRTHA3002955, BRTHA3003000, BRTHA3003023, BRTHA3003074, BRTHA3003225, BRTHA3003339, BRTHA3003343, BRTHA3003417, BRTHA3003449, BRTHA3003474, BRTHA3003490,

[1171] BRTHA3003704, BRTHA3003736, BRTHA3004307, BRTHA3004432, BRTHA3004475, BRTHA3004502, BRTHA3004610, BRTHA3005046, BRTHA3005735, BRTHA3005988, BRTHA3006318, BRTHA3006593, BRTHA3006856, BRTHA3007113, BRTHA3007130, BRTHA3007148, BRTHA3007319, BRTHA3007469, BRTHA3007472, BRTHA3007532, BRTHA3007662, BRTHA3007685, BRTHA3007769, BRTHA3007922, BRTHA3008143, BRTHA3008293, BRTHA3008310, BRTHA3008386, BRTHA3008520, BRTHA3008608, BRTHA3008694, BRTHA3008778, BRTHA3008826, BRTHA3009037, BRTHA3009090, BRTHA3009291, BRTHA3009858, BRTHA3010135, BRTHA3010366, BRTHA3010469, BRTHA3010530, BRTHA3010717, BRTHA3011149, BRTHA3011187, BRTHA3011194, BRTHA3011229, BRTHA3011265, BRTHA3011361, BRTHA3011510, BRTHA3011892,

[1172] BRTHA3012265, BRTHA3013860, BRTHA3013882, BRTHA3013884, BRTHA3013981, BRTHA3014000, BRTHA3014105, BRTHA3014507, BRTHA3014547, BRTHA3014691, BRTHA3014835, BRTHA3014854, BRTHA3014908, BRTHA3014920, BRTHA3015815, BRTHA3016616, BRTHA3016835, BRTHA3016845, BRTHA3016917, BRTHA3017047, BRTHA3017589, BRTHA3017848, BRTHA3018409, BRTHA3018514, BRTHA3018617, BRTHA3018623, BRTHA3018656, BRTHA3019048, BRTHA3019105, BRTHA3019183, BRTHA3020000, BRTHA3020314, BRTHA3020369, BRTHA3021569, BRTHA3021708, BRTHA3021786, BRTHA3021971, BRTHA3022641, BRTHA3023403, BRTHA3023523, BRTHA3023590, BRTHA3023929, BRTHA3024233, BRTHA3024600, BRTHA3025073, BRTHA3025789, BRTHA3025826, BRTHA3026161, BRTHA3026180, BRTHA3026507,

[1173] BRTHA3026556, BRTHA3026916, BRTHA3027171, BRTHA3027318, BRTHA3027638, BRTHA3027820, BRTHA3027879, BRTHA3027957, BRTHA3028339, BRTHA3028505, BRTHA3028782, CD34C2000051, CD34C2000152, CD34C2000175, CD34C2000443, CD34C3000125, CD34C3000252, CD34C3000314, CD34C3000424, CD34C3000494, CERVX1000042, CERVX2000812, CERVX2000968, CERVX2002006, CERVX2002013, CERVX2002430, CERVX2002770, CHONS1000058, CHONS2000172, CHONS2000797, CHONS2001287, CHONS2001382, CHONS2001797, CHONS2001834, CHONS2002419, CHONS2002829, COLON1000030, COLON1000084, COLON1000135, COLON2000470, COLON2000557, COLON2000568, COLON2001721, COLON2001829, COLON2001866, COLON2002443, COLON2002520, COLON2003043, COLON2003529, COLON2004318,

[1174] COLON2004351, COLON2004478, COLON2004911, COLON2005126, COLON2005623, COLON2005735, COLON2005772, COLON2006263, COLON2006282, COLON2006417, COLON2007274, COLON2007733, COLON2008105, COLON2009337, COLON2009499, CORDB1000140, CORDB2000061, CORDB2000127, CORDB2000541, CTONG1000009, CTONG1000010, CTONG1000020, CTONG1000022, CTONG1000040, CTONG1000056, CTONG1000062, CTONG1000086, CTONG1000088, CTONG1000093, CTONG1000097, CTONG1000113, CTONG1000137, CTONG1000165, CTONG1000180, CTONG1000181, CTONG1000218, CTONG1000220, CTONG1000241, CTONG1000277, CTONG1000283, CTONG1000288, CTONG1000302, CTONG1000341, CTONG1000467, CTONG1000476, CTONG1000488, CTONG1000508, CTONG1000540, CTONG2000031, CTONG2000034,

[1175] CTONG2000042, CTONG2000063, CTONG2000201, CTONG2000218, CTONG2000279, CTONG2000303, CTONG2000330, CTONG2000395, CTONG2000411, CTONG2000452, CTONG2000465, CTONG2000480, CTONG2000508, CTONG2000561, CTONG2000589, CTONG2000766, CTONG2000771, CTONG2000819, CTONG2000827, CTONG2000846, CTONG2000855, CTONG2000977, CTONG2001139, CTONG2001320, CTONG2001366, CTONG2001413, CTONG2001428, CTONG2001513, CTONG2001524, CTONG2001533, CTONG2001598, CTONG2001681, CTONG2001724, CTONG2001748, CTONG2001749, CTONG2001800, CTONG2001820, CTONG2001858, CTONG2001877, CTONG2001911, CTONG2001932, CTONG2001955, CTONG2002066, CTONG2002073, CTONG2002095, CTONG2002143, CTONG2002270, CTONG2002395, CTONG2002417, CTONG2002418,

[1176] CTONG2002520, CTONG2002558, CTONG2002590, CTONG2002709, CTONG2002721, CTONG2002744, CTONG2002766, CTONG2002803, CTONG2002816, CTONG2002820, CTONG2002832, CTONG2002841, CTONG2002965, CTONG2002999, CTONG2003028, CTONG2003094, CTONG2003100, CTONG2003115, CTONG2003189, CTONG2003245, CTONG2003293, CTONG2003348, CTONG2003350, CTONG2003361, CTONG2003372, CTONG2003375, CTONG2003427, CTONG2003517, CTONG2003599, CTONG2003680, CTONG2003699, CTONG2003764, CTONG2003782, CTONG2003889, CTONG2003945, CTONG2004000, CTONG2004062, CTONG2004115, CTONG2004126, CTONG2004264, CTONG2004305, CTONG2004397, CTONG2004423, CTONG2004454, CTONG2004669, CTONG2004716, CTONG2004912, CTONG2004941, CTONG2004948, CTONG2005028,

[1177] CTONG2005049, CTONG2005110, CTONG2005145, CTONG2005278, CTONG2005290, CTONG2005374, CTONG2005399, CTONG2005468, CTONG2005567, CTONG2005585, CTONG2005615, CTONG2005635, CTONG2005775, CTONG2005795, CTONG2005890, CTONG2005904, CTONG2005913, CTONG2006129, CTONG2006223, CTONG2006235, CTONG2006273, CTONG2006310, CTONG2006377, CTONG2006393, CTONG2006412, CTONG2006449, CTONG2006515, CTONG2006524, CTONG2006568, CTONG2006620, CTONG2006666, CTONG2006691, CTONG2006709, CTONG2006798, CTONG2006836, CTONG2006942, CTONG2006964, CTONG2007007, CTONG2007009, CTONG2007091, CTONG2007104, CTONG2007168, CTONG2007175, CTONG2007259, CTONG2007272, CTONG2007293, CTONG2007297, CTONG2007399, CTONG2007400, CTONG2007417,

[1178] CTONG2007441, CTONG2007474, CTONG2007586, CTONG2007613, CTONG2007623, CTONG2007681, CTONG2007776, CTONG2007779, CTONG2007898, CTONG2007959, CTONG2007970, CTONG2008014, CTONG2008184, CTONG2008262, CTONG2008321, CTONG2008343, CTONG2008402, CTONG2008405, CTONG2008466, CTONG2008518, CTONG2008521, CTONG2008562, CTONG2008577, CTONG2008595, CTONG2008621, CTONG2008689, CTONG2008720, CTONG2008721, CTONG2008773, CTONG2008792, CTONG2008989, CTONG2009033, CTONG2009108, CTONG2009132, CTONG2009156, CTONG2009181, CTONG2009257, CTONG2009258, CTONG2009268, CTONG2009270, CTONG2009395, CTONG2009423, CTONG2009440, CTONG2009527, CTONG2009529, CTONG2009531, CTONG2009534, CTONG2009570, CTONG2009572, CTONG2009604,

[1179] CTONG2009643, CTONG2009675, CTONG2009689, CTONG2009725, CTONG2009766, CTONG2009768, CTONG2009844, CTONG2009871, CTONG2009887, CTONG2009891, CTONG2009923, CTONG2009938, CTONG2009955, CTONG2009958, CTONG2009963, CTONG2010018, CTONG2010024, CTONG2010116, CTONG2010133, CTONG2010148, CTONG2010276, CTONG2010330, CTONG2010408, CTONG2010508, CTONG2010566, CTONG2010623, CTONG2010649, CTONG2010652, CTONG2010803, CTONG2011188, CTONG2011429, CTONG2011474, CTONG2011676, CTONG2011716, CTONG2011765, CTONG2011779, CTONG2011801, CTONG2011815, CTONG2011822, CTONG2011825, CTONG2011920, CTONG2011985, CTONG2012001, CTONG2012050, CTONG2012077, CTONG2012101, CTONG2012123, CTONG2012230, CTONG2012401, CTONG2012422,

[1180] CTONG2012425, CTONG2012447, CTONG2012453, CTONG2012473, CTONG2012476, CTONG2012533, CTONG2012554, CTONG2012564, CTONG2012661, CTONG2012724, CTONG2012738, CTONG2012745, CTONG2012758, CTONG2012843, CTONG2012879, CTONG2012901, CTONG2013128, CTONG2013149, CTONG2013156, CTONG2013178, CTONG2013222, CTONG2013284, CTONG2013339, CTONG2013352, CTONG2013381, CTONG2013393, CTONG2013511, CTONG2013630, CTONG2013803, CTONG2013934, CTONG2013985, CTONG2013986, CTONG2014032, CTONG2014058, CTONG2014119, CTONG2014165, CTONG2014191, CTONG2014206, CTONG2014234, CTONG2014264, CTONG2014280, CTONG2014369, CTONG2014389, CTONG2014491, CTONG2014630, CTONG2014635, CTONG2014646, CTONG2014705, CTONG2014898, CTONG2014946,

[1181] CTONG2014954, CTONG2014959, CTONG2014966, CTONG2014995, CTONG2015204, CTONG2015316, CTONG2015330, CTONG2015345, CTONG2015358, CTONG2015434, CTONG2015540, CTONG2015596, CTONG2015633, CTONG2015678, CTONG2015717, CTONG2015804, CTONG2015815, CTONG2015866, CTONG2015914, CTONG2015953, CTONG2016185, CTONG2016217, CTONG2016355, CTONG2016408, CTONG2016499, CTONG2016505, CTONG2016559, CTONG2016658, CTONG2016775, CTONG2016797, CTONG2016846, CTONG2016904, CTONG2016942, CTONG2016953, CTONG2017021, CTONG2017094, CTONG2017292, CTONG2017409, CTONG2017458, CTONG2017500, CTONG2017604, CTONG2017650, CTONG2017798, CTONG2017804, CTONG2017814, CTONG2017910, CTONG2017939, CTONG2017989, CTONG2017998, CTONG2018062,

[1182] CTONG2018069, CTONG2018147, CTONG2018211, CTONG2018217, CTONG2018279, CTONG2018343, CTONG2018379, CTONG2018383, CTONG2018413, CTONG2018483, CTONG2018629, CTONG2018632, CTONG2018637, CTONG2018652, CTONG2018653, CTONG2018655, CTONG2018735, CTONG2018739, CTONG2018808, CTONG2018843, CTONG2018898, CTONG2018900, CTONG2018976, CTONG2019029, CTONG2019063, CTONG2019144, CTONG2019232, CTONG2019248, CTONG2019400, CTONG2019590, CTONG2019652, CTONG2019704, CTONG2019788, CTONG2019822, CTONG2019833, CTONG2020031, CTONG2020108, CTONG2020127, CTONG2020171, CTONG2020374, CTONG2020378, CTONG2020411, CTONG2020445, CTONG2020522, CTONG2020560, CTONG2020582, CTONG2020638, CTONG2020806, CTONG2020831, CTONG2020974,

[1183] CTONG2021024, CTONG2021132, CTONG2021168, CTONG2021289, CTONG2022153, CTONG2022601, CTONG2023021, CTONG2023449, CTONG2023512, CTONG2024031, CTONG2024206, CTONG2024614, CTONG2024749, CTONG2025496, CTONG2025513, CTONG2025516, CTONG2025610, CTONG2025900, CTONG2026513, CTONG2026770, CTONG2026920, CTONG2026987, CTONG2027150, CTONG2027263, CTONG2027327, CTONG2027361, CTONG2027591, CTONG2027736, CTONG2027783, CTONG2027828, CTONG2027959, CTONG2028097, CTONG2028208, CTONG2028309, CTONG2028486, CTONG2028518, CTONG2028687, CTONG2028758, CTONG3000657, CTONG3000686, CTONG3000707, CTONG3000896, CTONG3001123, CTONG3001420, CTONG3001501, CTONG3001560, CTONG3001605, CTONG3001746, CTONG3002020, CTONG3002127,

[1184] CTONG3002370, CTONG3002412, CTONG3002433, CTONG3002518, CTONG3002552, CTONG3002588, CTONG3002674, CTONG3002728, CTONG3002835, CTONG3002909, CTONG3002947, CTONG3002983, CTONG3003165, CTONG3003179, CTONG3003483, CTONG3003553, CTONG3003598, CTONG3003652, CTONG3003654, CTONG3003669, CTONG3003737, CTONG3003905, CTONG3003972, CTONG3004072, CTONG3004317, CTONG3004397, CTONG3004550, CTONG3004576, CTONG3004607, CTONG3004712, CTONG3004726, CTONG3005325, CTONG3005648, CTONG3005713, CTONG3005803, CTONG3005813, CTONG3006067, CTONG3006073, CTONG3006186, CTONG3006629, CTONG3006650, CTONG3006659, CTONG3007244, CTONG3007444, CTONG3007528, CTONG3007586, CTONG3007870, CTONG3008223, CTONG3008252, CTONG3008258,

[1185] CTONG3008457, CTONG3008496, CTONG3008566, CTONG3008639, CTONG3008831, CTONG3008951, CTONG3008959, CTONG3009227, CTONG3009287, CTONG3009328, CTONG3009385, D3OST1000066, D3OST1000109, D3OST1000238, D3OST1000267, D3OST1000270, D3OST2000184, D3OST2000618, D3OST2000654, D3OST2000734, D3OST2001328, D3OST2001669, D3OST2001670, D3OST2001788, D3OST2002182, D3OST2002223, D3OST2002262, D3OST2002272, D3OST2002417, D3OST2002436, D3OST2003024, D3OST2003331, D3OST2003607, D3OST2003797, D3OST2004637, D3OST3000169, D3OST3000195, D3OST3000258, D3OST3000291, D3OST3000388, D3OST3000493, D6OST2000127, D6OST2000169, D6OST2000245, D6OST2000358, D6OST2000507, D9OST2000278, D9OST2000440, D9OST2000869, D9OST2001319,

[1186] D9OST2001433, D9OST2002397, D9OST2003106, D9OST2003108, D9OST2003137, D9OST2003397, D9OST2003580, D9OST2003594, D9OST2003762, D9OST2003791, D9OST2003989, D9OST2004018, D9OST2004073, D9OST2004417, DFNES1000003, DFNES1000083, DFNES1000107, DFNES1000185, DFNES2000143, DFNES2000146, DFNES2000212, DFNES2000292, DFNES2000335, DFNES2000426, DFNES2000432, DFNES2000443, DFNES2000457, DFNES2000471, DFNES2000526, DFNES2000913, DFNES2001091, DFNES2001096, DFNES2001108, DFNES2001177, DFNES2001404, DFNES2001564, DFNES2001565, DFNES2001647, DFNES2001800, DFNES2001829, DFNES2002220, DFNES2002550, DFNES2002588, DFNES2002817, DFNES2002966, DFNES2003081, DFNES2003192, DFNES2003255, DFNES2003742, DFNES2004346,

[1187] DFNES2004354, DFNES2004383, DFNES2004608, DFNES2004684, DFNES2005266, DFNES2005527, DFNES2005540, DFNES2005690, DFNES2005779, DFNES2005875, DFNES2006346, DFNES2006944, DFNES2007113, DFNES2007299, DFNES2007332, DFNES2007634, DFNES2007641, DFNES2007757, DFNES2008160, DFNES2008280, DFNES2008881, DFNES2009482, DFNES2010502, DFNES2011192, DFNES2011221, DFNES2011239, DFNES2011245, DFNES2011380, DFNES2011499, ERLTF1000021, ERLTF2000324, ERLTF2000465, FCBBF1000024, FCBBF1000025, FCBBF1000038, FCBBF1000053, FCBBF1000061, FCBBF1000063, FCBBF1000069, FCBBF1000077, FCBBF1000115, FCBBF1000117, FCBBF1000118, FCBBF1000125, FCBBF1000131, FCBBF1000139, FCBBF1000155, FCBBF1000157, FCBBF1000171, FCBBF1000174,

[1188] FCBBF1000197, FCBBF1000198, FCBBF1000206, FCBBF1000220, FCBBF1000232, FCBBF1000233, FCBBF1000243, FCBBF1000270, FCBBF1000272, FCBBF1000280, FCBBF1000297, FCBBF1000305, FCBBF1000314, FCBBF1000322, FCBBF1000349, FCBBF1000367, FCBBF1000374, FCBBF1000376, FCBBF1000377, FCBBF1000395, FCBBF1000397, FCBBF1000403, FCBBF1000412, FCBBF1000425, FCBBF1000437, FCBBF1000449, FCBBF1000476, FCBBF1000509, FCBBF1000546, FCBBF1000550, FCBBF1000556, FCBBF1000574, FCBBF1000581, FCBBF1000582, FCBBF1000598, FCBBF1000604, FCBBF1000618, FCBBF1000627, FCBBF1000671, FCBBF1000675, FCBBF1000684, FCBBF1000686, FCBBF1000687, FCBBF1000691, FCBBF1000732, FCBBF1000748, FCBBF2000038, FCBBF2000087, FCBBF2000094, FCBBF2000105,

[1189] FCBBF2000123, FCBBF2000195, FCBBF2000214, FCBBF2000232, FCBBF2000259, FCBBF2000276, FCBBF2000291, FCBBF2000362, FCBBF2000379, FCBBF2000473, FCBBF2000502, FCBBF2000566, FCBBF2000576, FCBBF2000591, FCBBF2000677, FCBBF2000678, FCBBF2000685, FCBBF2000733, FCBBF2000782, FCBBF2000808, FCBBF2000815, FCBBF2000825, FCBBF2000940, FCBBF2000951, FCBBF2001001, FCBBF2001116, FCBBF2001183, FCBBF2001188, FCBBF2001211, FCBBF2001238, FCBBF2001243, FCBBF2001291, FCBBF2001299, FCBBF2001309, FCBBF2001400, FCBBF2001427, FCBBF2001480, FCBBF2001529, FCBBF2001538, FCBBF2001594, FCBBF2001672, FCBBF2001675, FCBBF2001718, FCBBF2001720, FCBBF2001817, FCBBF2001868, FCBBF2002044, FCBBF2002111, FCBBF2002281, FCBBF2002370,

[1190] FCBBF2002541, FCBBF2002626, FCBBF2002897, FCBBF2002898, FCBBF2002904, FCBBF2002928, FCBBF2002953, FCBBF2003083, FCBBF2003102, FCBBF2003269, FCBBF2003293, FCBBF2003297, FCBBF2003395, FCBBF2003528, FCBBF2003543, FCBBF2003549, FCBBF2003567, FCBBF2003636, FCBBF2003823, FCBBF2003895, FCBBF2004066, FCBBF2004090, FCBBF2004138, FCBBF2004217, FCBBF2004256, FCBBF2004373, FCBBF2004448, FCBBF2004671, FCBBF2004707, FCBBF2004788, FCBBF2005069, FCBBF2005122, FCBBF2005428, FCBBF2005439, FCBBF2005538, FCBBF2005637, FCBBF2005645, FCBBF2005658, FCBBF2005733, FCBBF2005909, FCBBF2006131, FCBBF2006380, FCBBF2006418, FCBBF2006452, FCBBF2006634, FCBBF2006781, FCBBF2007012, FCBBF2007186, FCBBF2007265, FCBBF2007302,

[1191] FCBBF2007556, FCBBF2007610, FCBBF2007633, FCBBF2007840, FCBBF3000102, FCBBF3000120, FCBBF3000168, FCBBF3000175, FCBBF3000227, FCBBF3000228, FCBBF3000229, FCBBF3000233, FCBBF3000269, FCBBF3000361, FCBBF3000367, FCBBF3000388, FCBBF3000462, FCBBF3000473, FCBBF3000501, FCBBF3000518, FCBBF3000550, FCBBF3000847, FCBBF3001018, FCBBF3001020, FCBBF3001081, FCBBF3001235, FCBBF3001281, FCBBF3001302, FCBBF3001377, FCBBF3001594, FCBBF3001657, FCBBF3001818, FCBBF3001855, FCBBF3001890, FCBBF3001912, FCBBF3001914, FCBBF3001918, FCBBF3001924, FCBBF3001977, FCBBF3002163, FCBBF3002188, FCBBF3002190, FCBBF3002268, FCBBF3002475, FCBBF3002556, FCBBF3002592, FCBBF3002658, FCBBF3002782, FCBBF3002818, FCBBF3002925,

[1192] FCBBF3003216, FCBBF3003305, FCBBF3003373, FCBBF3003475, FCBBF3003481, FCBBF3003557, FCBBF3003787, FCBBF3003902, FCBBF3004021, FCBBF3004041, FCBBF3004261, FCBBF3004323, FCBBF3004390, FCBBF3004409, FCBBF3004502, FCBBF3004715, FCBBF3004842, FCBBF3004847, FCBBF3004955, FCBBF3005160, FCBBF3005218, FCBBF3005444, FCBBF3005698, FCBBF3005729, FCBBF3006171, FCBBF3006249, FCBBF3006288, FCBBF3006399, FCBBF3006628, FCBBF3006821, FCBBF3007077, FCBBF3007150, FCBBF3007152, FCBBF3007242, FCBBF3007244, FCBBF3007248, FCBBF3007453, FCBBF3007462, FCBBF3007540, FCBBF3007597, FCBBF3007604, FCBBF3007631, FCBBF3007855, FCBBF3007859, FCBBF3007860, FCBBF3008073, FCBBF3008100, FCBBF3008153, FCBBF3008159, FCBBF3008251,

[1193] FCBBF3008311, FCBBF3008362, FCBBF3008382, FCBBF3008475, FCBBF3008556, FCBBF3008644, FCBBF3008689, FCBBF3008748, FCBBF3008870, FCBBF3008938, FCBBF3008944, FCBBF3009069, FCBBF3009101, FCBBF3009152, FCBBF3009256, FCBBF3009317, FCBBF3009428, FCBBF3009464, FCBBF3009479, FCBBF3009526, FCBBF3009541, FCBBF3009703, FCBBF3009717, FCBBF3009888, FCBBF3009949, FCBBF3009978, FCBBF3010008, FCBBF3010012, FCBBF3010124, FCBBF3010130, FCBBF3010142, FCBBF3010149, FCBBF3010211, FCBBF3010361, FCBBF3010508, FCBBF3010544, FCBBF3010586, FCBBF3010601, FCBBF3010665, FCBBF3010695, FCBBF3010729, FCBBF3010733, FCBBF3011003, FCBBF3011418, FCBBF3011485, FCBBF3011523, FCBBF3011570, FCBBF3011592, FCBBF3011867, FCBBF3011889,

[1194] FCBBF3012170, FCBBF3012182, FCBBF3012288, FCBBF3012332, FCBBF3012347, FCBBF3012443, FCBBF3012588, FCBBF3012667, FCBBF3012842, FCBBF3012901, FCBBF3013041, FCBBF3013058, FCBBF3013205, FCBBF3013266, FCBBF3013307, FCBBF3013341, FCBBF3013506, FCBBF3013589, FCBBF3013623, FCBBF3013800, FCBBF3013846, FCBBF3014229, FCBBF3014260, FCBBF3014355, FCBBF3014567, FCBBF3014770, FCBBF3015100, FCBBF3015119, FCBBF3015131, FCBBF3015317, FCBBF3015727, FCBBF3015758, FCBBF3015809, FCBBF3015870, FCBBF3016018, FCBBF3016178, FCBBF3016451, FCBBF3016618, FCBBF3016622, FCBBF3016644, FCBBF3016667, FCBBF3016928, FCBBF3016987, FCBBF3017024, FCBBF3017059, FCBBF3017071, FCBBF3017123, FCBBF3017233, FCBBF3017255, FCBBF3017288,

[1195] FCBBF3017535, FCBBF3017681, FCBBF3017729, FCBBF3017873, FCBBF3017918, FCBBF3017974, FCBBF3018067, FCBBF3018173, FCBBF3018453, FCBBF3018591, FCBBF3018753, FCBBF3018826, FCBBF3018949, FCBBF3019085, FCBBF3019320, FCBBF3019437, FCBBF3019455, FCBBF3019564, FCBBF3019569, FCBBF3019570, FCBBF3019663, FCBBF3019716, FCBBF3019784, FCBBF3019839, FCBBF3019867, FCBBF3019961, FCBBF3020030, FCBBF3020138, FCBBF3020140, FCBBF3020163, FCBBF3020232, FCBBF3020599, FCBBF3021026, FCBBF3021191, FCBBF3021221, FCBBF3021501, FCBBF3021506, FCBBF3021524, FCBBF3021807, FCBBF3021940, FCBBF3021985, FCBBF3022005, FCBBF3022291, FCBBF3022311, FCBBF3022504, FCBBF3022566, FCBBF3022593, FCBBF3022765, FCBBF3022767, FCBBF3022894,

[1196] FCBBF3023061, FCBBF3023078, FCBBF3023368, FCBBF3023372, FCBBF3023443, FCBBF3023599, FCBBF3023704, FCBBF3023887, FCBBF3023895, FCBBF3024002, FCBBF3024096, FCBBF3024225, FCBBF3024266, FCBBF3024364, FCBBF3024623, FCBBF3024793, FCBBF3024911, FCBBF3025098, FCBBF3025252, FCBBF3025280, FCBBF3025285, FCBBF3025417, FCBBF3025528, FCBBF3025568, FCBBF3025650, FCBBF3025674, FCBBF3025730, FCBBF3025737, FCBBF3025905, FCBBF3026021, FCBBF3026048, FCBBF3026251, FCBBF3026308, FCBBF3026651, FCBBF3026678, FCBBF3026692, FCBBF3027104, FCBBF3027199, FCBBF3027328, FCBBF3027559, FCBBF3027717, FCBBF3027755, FCBBF3027768, FCBBF3027854, FCBBF3027863, FCBBF3027903, FCBBF3028102, FCBBF3028143, FCBBF3028188, FCBBF3028202,

[1197] FCBBF3028472, FCBBF3028528, FCBBF3028582, FCBBF3028593, FCBBF3028671, FCBBF3028794, FCBBF4000017, FCBBF4000061, FCBBF4000076, FCBBF4000142, FCBBF4000173, FCBBF4000192, FCBBF4000193, FCBBF4000268, FCBBF4000282, FCBBF4000399, FCBBF4000415, FCBBF4000500, FCBBF4000529, FCBBF4000548, FCBBF5000041, FCBBF5000061, FCBBF5000165, FCBBF5000261, FCBBF5000325, FCBBF5000353, FCBBF5000384, FCBBF5000483, FCBBF5000495, FEBRA1000005, FEBRA1000008, FEBRA1000022, FEBRA1000030, FEBRA1000057, FEBRA1000138, FEBRA1000148, FEBRA1000149, FEBRA1000183, FEBRA1000188, FEBRA1000189, FEBRA1000190, FEBRA2000007, FEBRA2000021, FEBRA2000035, FEBRA2000053, FEBRA2000126, FEBRA2000220, FEBRA2000253, FEBRA2000282, FEBRA2000286,

[1198] FEBRA2000297, FEBRA2000311, FEBRA2000321, FEBRA2000333, FEBRA2000377, FEBRA2000378, FEBRA2000391, FEBRA2000394, FEBRA2000397, FEBRA2000399, FEBRA2000402, FEBRA2000404, FEBRA2000409, FEBRA2000415, FEBRA2000436, FEBRA2000438, FEBRA2000452, FEBRA2000454, FEBRA2000462, FEBRA2000468, FEBRA2000491, FEBRA2000504, FEBRA2000532, FEBRA2000538, FEBRA2000575, FEBRA2000581, FEBRA2000656, FEBRA2000659, FEBRA2000680, FEBRA2000690, FEBRA2000727, FEBRA2000734, FEBRA2000740, FEBRA2000757, FEBRA2000762, FEBRA2000771, FEBRA2000772, FEBRA2000782, FEBRA2000787, FEBRA2000790, FEBRA2000793, FEBRA2000803, FEBRA2000805, FEBRA2000809, FEBRA2000815, FEBRA2000856, FEBRA2000862, FEBRA2000877, FEBRA2000880, FEBRA2000909,

[1199] FEBRA2000917, FEBRA2000928, FEBRA2000936, FEBRA2000937, FEBRA2000959, FEBRA2000972, FEBRA2001004, FEBRA2001012, FEBRA2001020, FEBRA2001093, FEBRA2001124, FEBRA2001133, FEBRA2001146, FEBRA2001161, FEBRA2001175, FEBRA2001197, FEBRA2001217, FEBRA2001227, FEBRA2001245, FEBRA2001267, FEBRA2001294, FEBRA2001334, FEBRA2001351, FEBRA2001438, FEBRA2001440, FEBRA2001487, FEBRA2001492, FEBRA2001523, FEBRA2001561, FEBRA2001571, FEBRA2001581, FEBRA2001584, FEBRA2001590, FEBRA2001591, FEBRA2001610, FEBRA2001620, FEBRA2001659, FEBRA2001669, FEBRA2001698, FEBRA2001705, FEBRA2001706, FEBRA2001715, FEBRA2001745, FEBRA2001752, FEBRA2001772, FEBRA2001790, FEBRA2001828, FEBRA2001867, FEBRA2001914, FEBRA2001974,

[1200] FEBRA2001989, FEBRA2001990, FEBRA2002009, FEBRA2002086, FEBRA2002109, FEBRA2002191, FEBRA2002260, FEBRA2002352, FEBRA2002399, FEBRA2002410, FEBRA2002429, FEBRA2002442, FEBRA2002456, FEBRA2002508, FEBRA2002525, FEBRA2002527, FEBRA2002552, FEBRA2002574, FEBRA2002601, FEBRA2002611, FEBRA2002628, FEBRA2002662, FEBRA2002682, FEBRA2002727, FEBRA2002781, FEBRA2002783, FEBRA2002792, FEBRA2002818, FEBRA2002858, FEBRA2002882, FEBRA2002897, FEBRA2002908, FEBRA2002931, FEBRA2002933, FEBRA2002962, FEBRA2002986, FEBRA2003054, FEBRA2003115, FEBRA2003128, FEBRA2003155, FEBRA2003163, FEBRA2003181, FEBRA2003198, FEBRA2003253, FEBRA2003258, FEBRA2003275, FEBRA2003308, FEBRA2003327, FEBRA2003429, FEBRA2003436,

[1201] FEBRA20.03454, FEBRA2003468, FEBRA2003470, FEBRA2003520, FEBRA2003524, FEBRA2003541, FEBRA2003675, FEBRA2003707, FEBRA2003711, FEBRA2003726, FEBRA2003750, FEBRA2003822, FEBRA2003833, FEBRA2003897, FEBRA2003907, FEBRA2004023, FEBRA2004026, FEBRA2004029, FEBRA2004042, FEBRA2004053, FEBRA2004056, FEBRA2004091, FEBRA2004110, FEBRA2004191, FEBRA2004202, FEBRA2004219, FEBRA2004237, FEBRA2004268, FEBRA2004293, FEBRA2004329, FEBRA2004331, FEBRA2004443, FEBRA2004485, FEBRA2004490, FEBRA2004538, FEBRA2004592, FEBRA2004620, FEBRA2004628, FEBRA2004651, FEBRA2004767, FEBRA2004813, FEBRA2004840, FEBRA2004852, FEBRA2004867, FEBRA2004914, FEBRA2004933, FEBRA2004987, FEBRA2005014, FEBRA2005036, FEBRA2005079,

[1202] FEBRA2005114, FEBRA2005216, FEBRA2005291, FEBRA2005361, FEBRA2005377, FEBRA2005380, FEBRA2005416, FEBRA2005427, FEBRA2005458, FEBRA2005476, FEBRA2005572, FEBRA2005701, FEBRA2005726, FEBRA2005734, FEBRA2005787, FEBRA2005788, FEBRA2005824, FEBRA2005995, FEBRA2005998, FEBRA2006061, FEBRA2006112, FEBRA2006150, FEBRA2006165, FEBRA2006255, FEBRA2006270, FEBRA2006315, FEBRA2006346, FEBRA2006354, FEBRA2006357, FEBRA2006368, FEBRA2006379, FEBRA2006396, FEBRA2006401, FEBRA2006409, FEBRA2006418, FEBRA2006427, FEBRA2006476, FEBRA2006491, FEBRA2006519, FEBRA2006521, FEBRA2006627, FEBRA2006664, FEBRA2006667, FEBRA2006726, FEBRA2006736, FEBRA2006793, FEBRA2006808, FEBRA2006817, FEBRA2006873, FEBRA2006890,

[1203] FEBRA2006942, FEBRA2006977, FEBRA2007017, FEBRA2007176, FEBRA2007200, FEBRA2007212, FEBRA2007247, FEBRA2007280, FEBRA2007414, FEBRA2007436, FEBRA2007449, FEBRA2007458, FEBRA2007534, FEBRA2007544, FEBRA2007551, FEBRA2007566, FEBRA2007589, FEBRA2007613, FEBRA2007620, FEBRA2007622, FEBRA2007708, FEBRA2007714, FEBRA2007793, FEBRA2007818, FEBRA2007823, FEBRA2007900, FEBRA2007901, FEBRA2007931, FEBRA2007957, FEBRA2008009, FEBRA2008086, FEBRA2008134, FEBRA2008135, FEBRA2008159, FEBRA2008165, FEBRA2008172, FEBRA2008201, FEBRA2008210, FEBRA2008265, FEBRA2008266, FEBRA2008282, FEBRA2008287, FEBRA2008311, FEBRA2008341, FEBRA2008360, FEBRA2008459, FEBRA2008468, FEBRA2008475, FEBRA2008481, FEBRA2008542,

[1204] FEBRA2008583, FEBRA2008660, FEBRA2008662, FEBRA2008681, FEBRA2008692, FEBRA2008741, FEBRA2008755, FEBRA2008836, FEBRA2008859, FEBRA2008861, FEBRA2008866, FEBRA2008881, FEBRA2008928, FEBRA2008983, FEBRA2009016, FEBRA2009022, FEBRA2009029, FEBRA2009074, FEBRA2009117, FEBRA2009120, FEBRA2009162, FEBRA2009185, FEBRA2009240, FEBRA2009265, FEBRA2009276, FEBRA2009289, FEBRA2009327, FEBRA2009328, FEBRA2009352, FEBRA2009362, FEBRA2009385, FEBRA2009416, FEBRA2009419, FEBRA2009437, FEBRA2009478, FEBRA2009507, FEBRA2009514, FEBRA2009541, FEBRA2009567, FEBRA2009588, FEBRA2009731, FEBRA2009754, FEBRA2009780, FEBRA2009846, FEBRA2009986, FEBRA2010141, FEBRA2010299, FEBRA2010484, FEBRA2010719, FEBRA2010746,

[1205] FEBRA2010768, FEBRA2010802, FEBRA2011063, FEBRA2011090, FEBRA2011356, FEBRA2011392, FEBRA2011414, FEBRA2011593, FEBRA2011665, FEBRA2012090, FEBRA2012120, FEBRA2012181, FEBRA2012195, FEBRA2012397, FEBRA2012418, FEBRA2012507, FEBRA2012625, FEBRA2013019, FEBRA2013069, FEBRA2013274, FEBRA2013465, FEBRA2013570, FEBRA2013699, FEBRA2013905, FEBRA2013951, FEBRA2014010, FEBRA2014122, FEBRA2014198, FEBRA2014213, FEBRA2014297, FEBRA2014443, FEBRA2014578, FEBRA2014939, FEBRA2015076, FEBRA2015085, FEBRA2015175, FEBRA2015292, FEBRA2015588, FEBRA2016112, FEBRA2016398, FEBRA2016572, FEBRA2016583, FEBRA2016621, FEBRA2016654, FEBRA2016739, FEBRA2017024, FEBRA2017098, FEBRA2017138, FEBRA2017154, FEBRA2017200,

[1206] FEBRA2017223, FEBRA2017333, FEBRA2017502, FEBRA2017533, FEBRA2017680, FEBRA2017736, FEBRA2017780, FEBRA2017811, FEBRA2017850, FEBRA2018051, FEBRA2018203, FEBRA2018407, FEBRA2018433, FEBRA2018746, FEBRA2019172, FEBRA2019242, FEBRA2019298, FEBRA2019389, FEBRA2019457, FEBRA2019519, FEBRA2019582, FEBRA2019637, FEBRA2019663, FEBRA2019690, FEBRA2019867, FEBRA2020406, FEBRA2020566, FEBRA2020582, FEBRA2020668, FEBRA2020801, FEBRA2020845, FEBRA2020886, FEBRA2020977, FEBRA2021032, FEBRA2021134, FEBRA2021171, FEBRA2021339, FEBRA2021431, FEBRA2021497, FEBRA2021550, FEBRA2021571, FEBRA2021636, FEBRA2021864, FEBRA2021892, FEBRA2021908, FEBRA2021966, FEBRA2022013, FEBRA2022148, FEBRA2022204, FEBRA2022255,

[1207] FEBRA2022322, FEBRA2022601, FEBRA2022696, FEBRA2022729, FEBRA2022787, FEBRA2022911, FEBRA2022956, FEBRA2022963, FEBRA2022972, FEBRA2023227, FEBRA2023285, FEBRA2023351, FEBRA2023377, FEBRA2023399, FEBRA2023498, FEBRA2023550, FEBRA2023721, FEBRA2023927, FEBRA2023989, FEBRA2023990, FEBRA2024019, FEBRA2024136, FEBRA2024150, FEBRA2024343, FEBRA2024570, FEBRA2024693, FEBRA2024727, FEBRA2024744, FEBRA2024797, FEBRA2024987, FEBRA2025249, FEBRA2025427, FEBRA2025463, FEBRA2025477, FEBRA2026474, FEBRA2026582, FEBRA2026629, FEBRA2026769, FEBRA2026879, FEBRA2026890, FEBRA2026977, FEBRA2026984, FEBRA2027082, FEBRA2027297, FEBRA2027352, FEBRA2027364, FEBRA2027609, FEBRA2028158, FEBRA2028222, FEBRA2028366,

[1208] FEBRA2028457, FEBRA2028477, FEBRA2028503, FEHRT2000325, FEHRT2000364, FEKID1000018, FELIV1000101, FELIV1000137, FELIV1000164, FELNG2000241, HCASM1000021, HCASM1000050, HCASM1000061, HCASM1000115, HCASM1000130, HCASM2000138, HCASM2000156, HCASM2000202, HCASM2000214, HCASM2000266, HCASM2000307, HCASM2000534, HCASM2000536, HCASM2000560, HCASM2000871, HCASM2001285, HCASM2001810, HCASM2001866, HCASM2001890, HCASM2002148, HCASM2002502, HCASM2002754, HCASM2002918, HCASM2003018, HCASM2003099, HCASM2003212, HCASM2003237, HCASM2003357, HCASM2003415, HCASM2005388, HCASM2005484, HCASM2006131, HCASM2006338, HCASM2006359, HCASM2006632, HCASM2007047, HCASM2007317, HCASM2007737, HCASM2007773, HCASM2008154,

[1209] HCASM2008536, HCASM2009405, HCASM2009424, HCASM2009463, HCASM2009588, HCHON1000015, HCHON1000131, HCHON1000142, HCHON1000166, HCHON1000176, HCHON2000028, HCHON2000038, HCHON2000062, HCHON2000100, HCHON2000156, HCHON2000199, HCHON2000212, HCHON2000271, HCHON2000295, HCHON2000315, HCHON2000322, HCHON2000323, HCHON2000344, HCHON2000373, HCHON2000395, HCHON2000417, HCHON2000418, HCHON2000473, HCHON2000503, HCHON2000660, HCHON2000663, HCHON2000673, HCHON2000676, HCHON2000698, HCHON2000699, HCHON2000705, HCHON2000743, HCHON2000751, HCHON2000815, HCHON2000817, HCHON2000818, HCHON2000819, HCHON2000832, HCHON2000851, HCHON2000935, HCHON2000942, HCHON2000956, HCHON2000994, HCHON2001084, HCHON2001099,

[1210] HCHON2001110, HCHON2001116, HCHON2001161, HCHON2001200, HCHON2001214, HCHON2001217, HCHON2001233, HCHON2001269, HCHON2001450, HCHON2001453, HCHON2001497, HCHON2001519, HCHON2001523, HCHON2001535, HCHON2001548, HCHON2001577, HCHON2001598, HCHON2001604, HCHON2001607, HCHON2001646, HCHON2001712, HCHON2001768, HCHON2001801, HCHON2001853, HCHON2002123, HCHON2002194, HCHON2002241, HCHON2002247, HCHON2002354, HCHON2002496, HCHON2002676, HCHON2002770, HCHON2002964, HCHON2002971, HCHON2003131, HCHON2003134, HCHON2003327, HCHON2003513, HCHON2003532, HCHON2003642, HCHON2003659, HCHON2003676, HCHON2004007, HCHON2004279, HCHON2004359, HCHON2004531, HCHON2004776, HCHON2004858, HCHON2005048, HCHON2005118,

[1211] HCHON2005166, HCHON2005802, HCHON2005921, HCHON2005987, HCHON2006250, HCHON2006459, HCHON2006714, HCHON2006722, HCHON2006770, HCHON2006786, HCHON2006841, HCHON2006871, HCHON2007046, HCHON2007482, HCHON2007650, HCHON2007674, HCHON2007774, HCHON2007881, HCHON2008112, HCHON2008239, HCHON2008444, HCHON2008582, HCHON2008672, HCHON2008856, HCHON2008871, HCHON2008989, HCHON2009191, HCHON2009384, HCHON2009749, HCHON2009766, HCHON2009795, HCHON2010074, HCHON2010543, HEART1000010, HEART1000088, HEART1000099, HEART1000102, HEART1000118, HEART1000132, HEART1000139, HEART1000142, HEART1000151, HEART1000173, HEART2000024, HEART2000035, HEART2000099, HEART2000298, HEART2000306, HEART2000309, HEART2000411,

[1212] HEART2000418, HEART2000444, HEART2000448, HEART2000492, HEART2000506, HEART2000520, HEART2000541, HEART2000568, HEART2000611, HEART2000959, HEART2001680, HEART2001756, HEART2002129, HEART2002184, HEART2002220, HEART2002432, HEART2002531, HEART2002598, HEART2002717, HEART2003027, HEART2003168, HEART2003432, HEART2003781, HEART2003836, HEART2003852, HEART2004570, HEART2004764, HEART2004931, HEART2004940, HEART2004980, HEART2005244, HEART2005310, HEART2005581, HEART2005610, HEART2006131, HEART2006195, HEART2006310, HEART2006334, HEART2006487, HEART2006521, HEART2006557, HEART2006787, HEART2006789, HEART2006909, HEART2007031, HEART2007231, HEART2007443, HEART2007696, HEART2007767, HEART2008108,

[1213] HEART2008111, HEART2008257, HEART2008509, HEART2008994, HEART2009000, HEART2009599, HEART2009680, HEART2010391, HEART2010492, HEART2010495, LIVER1000017, LIVER1000050, LIVER1000055, LIVER1000058, LIVER1000063, LIVER1000067, LIVER1000073, LIVER1000082, LIVER1000099, LIVER1000111, LIVER1000126, LIVER1000139, LIVER1000155, LIVER1000165, LIVER1000175, LIVER1000224, LIVER1000230, LIVER1000278, LIVER1000303, LIVER1000397, LIVER1000421, LIVER1000433, LIVER1000479, LIVER1000482, LIVER1000542, LIVER2000003, LIVER2000033, LIVER2000037, LIVER2000158, LIVER2000216, LIVER2000237, LIVER2000247, LIVER2000360, LIVER2000416, LIVER2000446, LIVER2000515, LIVER2000592, LIVER2000626, LIVER2000682, LIVER2000769,

[1214] LIVER2000775, LIVER2001051, LIVER2001076, LIVER2001099, LIVER2001113, LIVER2001164, LIVER2001191, LIVER2001265, LIVER2001329, LIVER2001389, LIVER2001461, LIVER2001539, LIVER2001608, LIVER2001835, LIVER2002638, LIVER2002644, LIVER2002660, LIVER2002702, LIVER2003008, LIVER2003065, LIVER2003234, LIVER2003524, LIVER2003568, LIVER2003581, LIVER2003800, LIVER2003854, LIVER2004074, LIVER2004392, LIVER2004514, LIVER2004565, LIVER2005028, LIVER2005198, LIVER2005218, LIVER2005376, LIVER2005385, LIVER2005512, LIVER2005520, LIVER2005527, LIVER2005544, LIVER2005625, LIVER2005728, LIVER2005789, LIVER2005973, LIVER2005981, LIVER2006251, LIVER2006410, LIVER2006469, LIVER2006644, LIVER2006764, LIVER2007415,

[1215] LIVER2007548, LIVER2007568, LIVER2007721, LIVER2007783, LIVER2008053, LIVER2008465, LIVER2008473, LIVER2008580, LIVER2008706, LIVER2008751, LIVER2008945, LIVER2008998, LIVER2009110, LIVER2009118, LIVER2009554, LYMPB1000141, LYMPB1000158, LYMPB2000083, MAMGL1000017, MAMGL1000083, MAMGL1000096, MAMGL1000100, MAMGL1000132, MAMGL1000151, MAMGL1000178, MAMGL1000182, MAMGL1000184, MESAN1000032, MESAN1000035, MESAN1000050, MESAN1000079, MESAN1000080, MESAN1000101, MESAN1000121, MESAN1000126, MESAN1000147, MESAN1000180, MESAN2000023, MESAN2000026, MESAN2000067, MESAN2000092, MESAN2000149, MESAN2000167, MESAN2000291, MESAN2000434, MESAN2000457, MESAN2000462, MESAN2000501, MESAN2000620, MESAN2000711,

[1216] MESAN2000815, MESAN2000894, MESAN2000909, MESAN2001154, MESAN2001450, MESAN2001627, MESAN2001770, MESAN2001979, MESAN2002113, MESAN2002122, MESAN2002147, MESAN2002186, MESAN2002424, MESAN2002687, MESAN2002709, MESAN2002790, MESAN2002844, MESAN2002940, MESAN2002978, MESAN2003035, MESAN2003037, MESAN2003039, MESAN2003058, MESAN2003101, MESAN2003190, MESAN2003322, MESAN2003444, MESAN2003490, MESAN2003529, MESAN2003646, MESAN2003662, MESAN2003709, MESAN2003851, MESAN2004138, MESAN2004288, MESAN2004575, MESAN2005303, MESAN2005371, MESAN2005633, MESAN2005724, MESAN2005808, MESAN2005811, MESAN2005957, MESAN2005958, MESAN2006022, MESAN2006043, MESAN2006328, MESAN2006401, MESAN2006580, MESAN2006599,

[1217] MESAN2006743, MESAN2006953, MESAN2007032, MESAN2007440, MESAN2007597, MESAN2007755, MESAN2008222, MESAN2008334, MESAN2008415, MESAN2008460, MESAN2008536, MESAN2008729, MESAN2008821, MESAN2008926, MESAN2008936, MESAN2009019, MESAN2009081, MESAN2009105, MESAN2009311, MESAN2009418, MESAN2009503, MESAN2009522, MESAN2009580, MESAN2010031, MESAN2010114, MESAN2010312, MESAN2010321, MESAN2010664, MESAN2010681, MESAN2011545, MESAN2011597, MESAN2011627, MESAN2011632, MESAN2011977, MESAN2011984, MESAN2012054, MESAN2012113, MESAN2012586, MESAN2012708, MESAN2012735, MESAN2013019, MESAN2013022, MESAN2013183, MESAN2013211, MESAN2013283, MESAN2013284, MESAN2013611, MESAN2013674, MESAN2013908, MESAN2013936,

[1218] MESAN2014192, MESAN2014295, MESAN2014298, MESAN2014412, MESAN2014624, MESAN2015277, MESAN2015365, MESAN2015391, MESAN2015401, MESAN2015501, MESAN2015515, MESAN2016159, MESAN2016304, MESAN2016409, MESAN2016552, MESAN2016965, MESAN2017133, MESAN2017152, MESAN2017373, MESAN2017417, MESAN2018209, MESAN2018576, MESAN2018670, MESAN2018699, MESTC1000042, MESTC1000147, MESTC2000150, MESTC2000153, MESTC2000170, N1ESE2000698, NB9N41000011, NB9N41000047, NB9N41000121, NB9N41000135, NB9N41000142, NB9N41000146, NB9N41000340, NB9N42000104, NB9N42000122, NB9N42000196, NB9N42000281, NB9N42000314, NB9N42000342, NB9N42000430, NB9N42000495, NB9N42001300, NCRRP1000129, NESOP1000010, NESOP1000087, NESOP1000108,

[1219] NESOP2000231, NESOP2000452, NESOP2000499, NESOP2000504, NESOP2000744, NESOP2001144, NESOP2001433, NESOP2001656, NESOP2001694, NESOP2001752, NESOP2002352, NESOP2002418, NESOP2002487, NESOP2002738, NESOP2002780, NETRP1000034, NETRP1000082, NETRP2000086, NETRP2000182, NETRP2000439, NHNPC1000034, NHNPC1000037, NHNPC1000084, NHNPC1000101, NHNPC1000124, NHNPC2000212, NHNPC2000606, NHNPC2000877, NHNPC2001108, NHNPC2001223, NHNPC2001312, NHNPC2001816, NHNPC2002565, NHNPC2002749, NOVAR1000015, NOVAR1000102, NOVAR2000136, NOVAR2000352, NOVAR2000412, NOVAR2000710, NOVAR2000783, NOVAR2000962, NOVAR2001108, NOVAR2001620, NOVAR2001783, NOVAR2001876, NOVAR2002039, NT2NE1000014, NT2NE1000018, NT2NE1000023,

[1220] NT2NE1000024, NT2NE1000059, NT2NE1000063, NT2NE1000073, NT2NE1000083, NT2NE1000120, NT2NE1000122, NT2NE1000175, NT2NE1000181, NT2NE1000185, NT2NE2000038, NT2NE2000054, NT2NE2000056, NT2NE2000057, NT2NE2000064, NT2NE2000109, NT2NE2000137, NT2NE2000156, NT2NE2000222, NT2NE2000259, NT2NE2000284, NT2NE2000299, NT2NE2000327, NT2NE2000353, NT2NE2000356, NT2NE2000369, NT2NE2000374, NT2NE2000383, NT2NE2000384, NT2NE2000386, NT2NE2000390, NT2NE2000392, NT2NE2000455, NT2NE2000470, NT2NE2000488, NT2NE2000517, NT2NE2000536, NT2NE2000546, NT2NE2000548, NT2NE2000550, NT2NE2000586, NT2NE2000612, NT2NE2000636, NT2NE2000658, NT2NE2000706, NT2NE2000802, NT2NE2000808, NT2NE2000809, NT2NE2000864, NT2NE2000909,

[1221] NT2NE2000913, NT2NE2000950, NT2NE2000951, NT2NE2000980, NT2NE2001005, NT2NE2001021, NT2NE2001040, NT2NE2001049, NT2NE2001142, NT2NE2001156, NT2NE2001180, NT2NE2001181, NT2NE2001188, NT2NE2001191, NT2NE2001247, NT2NE2001252, NT2NE2001324, NT2NE2001326, NT2NE2001337, NT2NE2001364, NT2NE2001372, NT2NE2001397, NT2NE2001403, NT2NE2001428, NT2NE2001432, NT2NE2001442, NT2NE2001524, NT2NE2001545, NT2NE2001598, NT2NE2001617, NT2NE2001623, NT2NE2001626, NT2NE2001634, NT2NE2001648, NT2NE2001660, NT2NE2001666, NT2NE2001677, NT2NE2001697, NT2NE2001698, NT2NE2001723, NT2NE2001725, NT2NE2001793, NT2NE2001874, NT2NE2001889, NT2NE2001923, NT2NE2002100, -NT2NE2002162, NT2NE2002186, NT2NE2002285, NT2NE2002311,

[1222] NT2NE2002620, NT2NE2002651, NT2NE2002732, NT2NE2002768, NT2NE2002791, NT2NE2002856, NT2NE2003150, NT2NE2003185, NT2NE2003252, NT2NE2003280, NT2NE2003308, NT2NE2003309, NT2NE2003315, NT2NE2003408, NT2NE2003457, NT2NE2003485, NT2NE2003540, NT2NE2003569, NT2NE2003571, NT2NE2003705, NT2NE2003752, NT2NE2003887, NT2NE2003921, NT2NE2004255, NT2NE2004378, NT2NE2004490, NT2NE2004606, NT2NE2004740, NT2NE2004787, NT2NE2004916, NT2NE2005035, NT2NE2005223, NT2NE2005276, NT2NE2005317, NT2NE2005323, NT2NE2005358, NT2NE2005371, NT2NE2005395, NT2NE2005419, NT2NE2005441, NT2NE2005517, NT2NE2005537, NT2NE2005555, NT2NE2005588, NT2NE2005676, NT2NE2005688, NT2NE2005720, NT2NE2005784, NT2NE2005804, NT2NE2005821,

[1223] NT2NE2005876, NT2NE2005890, NT2NE2005921, NT2NE2005968, NT2NE2006075, NT2NE2006087, NT2NE2006217, NT2NE2006288, NT2NE2006382, NT2NE2006387, NT2NE2006427, NT2NE2006432, NT2NE2006458, NT2NE2006478, NT2NE2006531, NT2NE2006659, NT2NE2006784, NT2NE2006813, NT2NE2006894, NT2NE2006909, NT2NE2006942, NT2NE2006958, NT2NE2007052, NT2NE2007220, NT2NE2007425, NT2NE2007725, NT2NE2007727, NT2NE2007786, NT2NE2007877, NT2NE2007967, NT2NE2008017, NT2NE2008060, NT2NE2008077, NT2NE2008213, NT2NE2008260, NT2NE2008378, NT2NE2008607, NT2NE2008639, NT2NE2008727, NT2NE2008783, NT2NE2008785, NT2NE2008803, NT2NE2008867, NT2NE2008961, NT2NE2008997, NT2NE2009138, NT2NE2009295, NT2NE2009426, NT2NE2009523, NT2NE2009608,

[1224] NT2NE2009691, NT2NE2010056, NT2NE2010105, NT2NE2010150, NT2NE2010400, NT2NE2010632, NT2NE2010633, NT2NE2010654, NT2NE2010688, NT2NE2010781, NT2NE2010854, NT2NE2011033, NT2NE2011036, NT2NE2011107, NT2NE2011119, NT2NE2011154, NT2NE2011221, NT2NE2011411, NT2NE2011485, NT2NE2011650, NT2NE2011684, NT2NE2011687, NT2NE2011691, NT2NE2011758, NT2NE2011823, NT2NE2011896, NT2NE2011998, NT2NE2012113, NT2NE2012199, NT2NE2012243, NT2NE2012361, NT2NE2012448, NT2NE2012457, NT2NE2012493, NT2NE2012505, NT2NE2012533, NT2NE2012603, NT2NE2012747, NT2NE2012847, NT2NE2012928, NT2NE2013019, NT2NE2013081, NT2NE2013189, NT2NE2013217, NT2NE2013547, NT2NE2014013, NT2NE2014028, NT2NE2014113, NT2NE2014176, NT2NE2014221,

[1225] NT2NE2014525, NT2NE2014650, NT2NE2014651, NT2NE2014681, NT2NE2014758, NT2NE2014869, NT2NE2014950, NT2NE2015061, NT2NE2015262, NT2NE2015275, NT2NE2015362, NT2NE2015480, NT2NE2015511, NT2NE2015565, NT2NE2015626, NT2NE2015747, NT2NE2015860, NT2NE2015885, NT2NE2015904, NT2NE2015974, NT2NE2016041, NT2NE2016387, NT2NE2016419, NT2NE2016519, NT2NE2016608, NT2NE2016766, NT2NE2016774, NT2NE2016971, NT2NE2017259, NT2NE2017332, NT2NE2017397, NT2NE2017480, NT2NE2017492, NT2NE2017508, NT2NE2017562, NT2NE2017590, NT2NE2017612, NT2NE2017721, NT2NE2017752, NT2NE2017792, NT2NE2017982, NT2NE2018165, NT2NE2018176, NT2NE2018273, NT2NE2018376, NT2NE2018472, NT2NE2018490, NT2NE2018594, NT2NE2018739, NT2NE2018916,

[1226] NT2NE2019056, NT2NE2019091, NT2NE2019099, NT2RI1000016, NT2RI1000035, NT2RI1000048, NT2RI1000164, NT2RI1000172, NT2RI2000004, NT2RI2000007, NT2RI2000116, NT2RI2000117, NT2RI2000128, NT2RI2000133, NT2RI2000167, NT2RI2000173, NT2RI2000187, NT2RI2000255, NT2RI2000270, NT2RI2000276, NT2RI2000294, NT2RI2000313, NT2RI2000341, NT2RI2000344, NT2RI2000348, NT2RI2000412, NT2RI2000421, NT2RI2000480, NT2RI2000575, NT2RI2000588, NT2RI2000597, NT2RI2000669, NT2RI2000688, NT2RI2000689, NT2RI2000704, NT2RI2000738, NT2RI2000775, NT2RI2000822, NT2RI2000829, NT2RI2000841, NT2RI2000865, NT2RI2000932, NT2RI2000987, NT2RI2001010, NT2RI2001017, NT2RI2001030, NT2RI2001083, NT2RI2001091, NT2RI2001167, NT2RI2001178,

[1227] NT2RI2001230, NT2RI2001235, NT2RI2001244, NT2RI2001307, NT2RI2001342, NT2RI2001409, NT2RI2001410, NT2RI2001422, NT2RI2001425, NT2RI2001449, NT2RI2001450, NT2RI2001474, NT2RI2001519, NT2RI2001595, NT2RI2001621, NT2RI2001624, NT2RI2001726, NT2RI2001769, NT2RI2001782, NT2RI2001836, NT2RI2001866, NT2RI2001952, NT2RI2002022, NT2RI2002041, NT2RI2002117, NT2RI2002120, NT2RI2002153, NT2RI2002179, NT2RI2002243, NT2RI2002252, NT2RI2002260, NT2RI2002270, NT2RI2002334, NT2RI2002359, NT2RI2002447, NT2RI2002481, NT2RI2002507, NT2RI2002517, NT2RI2002530, NT2RI2002540, NT2RI2002549, NT2RI2002564, NT2RI2002585, NT2RI2002592, NT2RI2002602, NT2RI2002654, NT2RI2002699, NT2RI2002802, NT2RI2002819, NT2RI2002822,

[1228] NT2RI2002847, NT2RI2002852, NT2RI2002865, NT2RI2002923, NT2RI2002926, NT2RI2002958, NT2RI2002970, NT2RI2003011, NT2RI2003019, NT2RI2003051, NT2RI2003067, NT2RI2003205, NT2RI2003222, NT2RI2003301, NT2RI2003338, NT2RI2003360, NT2RI2003361, NT2RI2003383, NT2RI2003392, NT2RI2003399, NT2RI2003407, NT2RI2003420, NT2RI2003481, NT2RI2003487, NT2RI2003556, NT2RI2003655, NT2RI2003667, NT2RI2003678, NT2RI2003751, NT2RI2003884, NT2RI2003973, NT2RI2004059, NT2RI2004078, NT2RI2004079, NT2RI2004093, NT2RI2004136, NT2RI2004157, NT2RI2004188, NT2RI2004190, NT2RI2004284, NT2RI2004290, NT2RI2004304, NT2RI2004381, NT2RI2004398, NT2RI2004410, NT2RI2004442, NT2RI2004468, NT2RI2004606, NT2RI2004618, NT2RI2004783,

[1229] NT2RI2004818, NT2RI2004840, NT2RI2004916, NT2RI2004962, NT2RI2004984, NT2RI2004985, NT2RI2005048, NT2RI2005061, NT2RI2005069, NT2RI2005087, NT2RI2005096, NT2RI2005115, NT2RI2005116, NT2RI2005130, NT2RI2005166, NT2RI2005239, NT2RI2005246, NT2RI2005315, NT2RI2005353, NT2RI2005358, NT2RI2005382, NT2RI2005473, NT2RI2005520, NT2RI2005564, NT2RI2005579, NT2RI2005621, NT2RI2005628, NT2RI2005647, NT2RI2005670, NT2RI2005710, NT2RI2005772, NT2RI2005811, NT2RI2005816, NT2RI2005851, NT2RI2005966, NT2RI2006071, NT2RI2006072, NT2RI2006081, NT2RI2006126, NT2RI2006127, NT2RI2006183, NT2RI2006257, NT2RI2006271, NT2RI2006294, NT2RI2006345, NT2RI2006403, NT2RI2006445, NT2RI2006487, NT2RI2006506, NT2RI2006640,

[1230] NT2RI2006647, NT2RI2006659, NT2RI2006662, NT2RI2006667, NT2RI2006679, NT2RI2006682, NT2RI2006686, NT2RI2006703, NT2RI2006716, NT2RI2006735, NT2RI2006762, NT2RI2006788, NT2RI2006825, NT2RI2006838, NT2RI2006855, NT2RI2006943, NT2RI2006973, NT2RI2007046, NT2RI2007048, NT2RI2007096, NT2RI2007116, NT2RI2007148, NT2RI2007214, NT2RI2007277, NT2RI2007303, NT2RI2007334, NT2RI2007384, NT2RI2007386, NT2RI2007406, NT2RI2007439, NT2RI2007445, NT2RI2007468, NT2RI2007469, NT2RI2007507, NT2RI2007589, NT2RI2007723, NT2RI2007729, NT2RI2007751, NT2RI2007754, NT2RI2007827, NT2RI2007853, NT2RI2007877, NT2RI2007879, NT2RI2007891, NT2RI2007956, NT2RI2007965, NT2RI2008007, NT2RI2008050, NT2RI2008141, NT2RI2008171,

[1231] NT2RI2008188, NT2RI2008204, NT2RI2008221, NT2RI2008233, NT2RI2008455, NT2RI2008502, NT2RI2008566, NT2RI2008598, NT2RI2008622, NT2RI2008656, NT2RI2008714, NT2RI2008724, NT2RI2008791, NT2RI2008801, NT2RI2008808, NT2RI2008812, NT2RI2008841, NT2RI200.8942, NT2RI2008952, NT2RI2009005, NT2RI2009083, NT2RI2009101, NT2RI2009103, NT2RI2009144, NT2RI2009151, NT2RI2009215, NT2RI2009233, NT2RI2009259, NT2RI2009269, NT2RI2009281, NT2RI2009289, NT2RI2009301, NT2RI2009402, NT2RI2009517, NT2RI2009585, NT2RI2009595, NT2RI2009855, NT2RI2010283, NT2RI2010508, NT2RI2010795, NT2RI2011422, NT2RI2011450, NT2RI2011683, NT2RI2011803, NT2RI2012659, NT2RI2012726, NT2RI2012990, NT2RI2013345, NT2RI2013357, NT2RI2013373,

[1232] NT2RI2014247, NT2RI2014551, NT2RI2014683, NT2RI2014733, NT2RI2015239, NT2RI2015533, NT2RI2016128, NT2RI2016134, NT2RI2017529, NT2RI2018311, NT2RI2018363, NT2RI2018448, NT2RI2018883, NT2RI2018950, NT2RI2019751, NT2RI2019826, NT2RI2020390, NT2RI2020703, NT2RI2021463, NT2RI2021625, NT2RI2022468, NT2RI2022584, NT2RI2023303, NT2RI2023671, NT2RI2024008, NT2RI2024313, NT2RI2024460, NT2RI2024496, NT2RI2024935, NT2RI2025075, NT2RI2025255, NT2RI2025564, NT2RI2025565, NT2RI2025909, NT2RI2025957, NT2RI2025976, NT2RI2026758, NT2RI2027081, NT2RI2027157, NT2RI2027224, NT2RI2027323, NT2RI2027396, NT2RI2027484, NT2RI2027975, NT2RI2028213, NT2RI2028222, NT2RI2028537, NT2RI2028642, NT2RI3000174, NT2RI3000213,

[1233] NT2RI3000423, NT2RI3000622, NT2RI3001132, NT2RI3001263, NT2RI3001279, NT2RI3001445, NT2RI3001458, NT2RI3001515, NT2RI3001573, NT2RI3001967, NT2RI3002303, NT2RI3002557, NT2RI3002842, NT2RI3003027, NT2RI3003031, NT2RI3003095, NT2RI3003104, NT2RI3003162, NT2RI3003362, NT2RI3003382, NT2RI3003409, NT2RI3003738, NT2RI3003925, NT2RI3004133, NT2RI3004381, NT2RI3004510, NT2RI3005202, NT2RI3005403, NT2RI3005416, NT2RI3005724, NT2RI3005861, NT2RI3005923, NT2RI3005928, NT2RI3006132, NT2RI3006171, NT2RI3006284, NT2RI3006340, NT2RI3006376, NT2RI3006666, NT2RI3006673, NT2RI3006796, NT2RI3007065, NT2RI3007095, NT2RI3007158, NT2RI3007167, NT2RI3007213, NT2RI3007291, NT2RI3007443, NT2RI3007684, NT2RI3007757,

[1234] NT2RI3007878, NT2RI3007978, NT2RI3008055, NT2RI3008162, NT2RI3008179, NT2RI3008228, NT2RI3008442, NT2RI3008652, NT2RI3008697, NT2RI3008974, NT2RI3009158, NT2RI3009480, NT2RI3009524, NT2RP6000008, NT2RP6000017, NT2RP6000032, NT2RP6000033, NT2RP6000039, NT2RP6000043, NT2RP6000059, NT2RP6000060, NT2RP6000077, NT2RP6000085, NT2RP6000086, NT2RP6000100, NT2RP6000109, NT2RP6000110, NT2RP6000119, NT2RP6000127, NT2RP6000130, NT2RP6000140, NT2RP6000150, NT2RP7000041, NT2RP7000069, NT2RP7000086, NT2RP7000109, NT2RP7000112, NT2RP7000238, NT2RP7000259, NT2RP7000311, NT2RP7000359, NT2RP7000364, NT2RP7000380, NT2RP7000391, NT2RP7000425, NT2RP7000579, NT2RP7000586, NT2RP7000624, NT2RP7000812, NT2RP7000926,

[1235] NT2RP7001074, NT2RP7001080, NT2RP7001156, NT2RP7001231, NT2RP7001306, NT2RP7001319, NT2RP7001335, NT2RP7001364, NT2RP7001475, NT2RP7001532, NT2RP7001591, NT2RP7001602, NT2RP7001678, NT2RP7001856, NT2RP7002028, NT2RP7002064, NT2RP7002151, NT2RP7002163, NT2RP7002243, NT2RP7002282, NT2RP7002376, NT2RP7002379, NT2RP7002450, NT2RP7002478, NT2RP7002554, NT2RP7002594, NT2RP7002603, NT2RP7002619, NT2RP7002650, NT2RP7002738, NT2RP7002779, NT2RP7002802, NT2RP7002841, NT2RP7002875, NT2RP7002906, NT2RP7002978, NT2RP7002982, NT2RP7003025, NT2RP7003050, NT2RP7003055, NT2RP7003084, NT2RP7003091, NT2RP7003107, NT2RP7003134, NT2RP7003148, NT2RP7003203, NT2RP7003261, NT2RP7003319, NT2RP7003439, NT2RP7003511,

[1236] NT2RP7003629, NT2RP7003632, NT2RP7003647, NT2RP7003680, NT2RP7003724, NT2RP7003960, NT2RP7004027, NT2RP7004080, NT2RP7004114, NT2RP7004123, NT2RP7004173, NT2RP7004196, NT2RP7004204, NT2RP7004233, NT2RP7004260, NT2RP7004352, NT2RP7004358, NT2RP7004396, NT2RP7004481, NT2RP7004541, NT2RP7004559, NT2RP7004641, NT2RP7004656, NT2RP7004687, NT2RP7004722, NT2RP7004766, NT2RP7004790, NT2RP7004915, NT2RP7004925, NT2RP7004961, NT2RP7004964, NT2RP7004975, NT2RP7005118, NT2RP7005205, NT2RP7005219, NT2RP7005323, NT2RP7005468, NT2RP7005493, NT2RP7005513, NT2RP7005529, NT2RP7005629, NT2RP7005631, NT2RP7005669, NT2RP7005675, NT2RP7005750, NT2RP7005846, NT2RP7006033, NT2RP7006075, NT2RP7006160, NT2RP7006162,

[1237] NT2RP7006188, NT2RP7006223, NT2RP7006263, NT2RP7006296, NT2RP7006304, NT2RP7006374, NT2RP7006395, NT2RP7006408, NT2RP7006457, NT2RP7006490, NT2RP7006539, NT2RP7006547, NT2RP7006601, NT2RP7006619, NT2RP7006621, NT2RP7006636, NT2RP7006701, NT2RP7006853, NT2RP7006887, NT2RP7006980, NT2RP7006995, NT2RP7007114, NT2RP7007221, NT2RP7007226, NT2RP7007252, NT2RP7007269, NT2RP7007310, NT2RP7007359, NT2RP7007381, NT2RP7007406, NT2RP7007480, NT2RP7007504, NT2RP7007530, NT2RP7007537, NT2RP7007580, NT2RP7007594, NT2RP7007617, NT2RP7007643, NT2RP7007766, NT2RP7007842, NT2RP7007925, NT2RP7007930, NT2RP7007975, NT2RP7008013, NT2RP7008133, NT2RP7008137, NT2RP7008142, NT2RP7008144, NT2RP7008161, NT2RP7008167,

[1238] NT2RP7008315, NT2RP7008360, NT2RP7008396, NT2RP7008406, NT2RP7008435, NT2RP7008441, NT2RP7008454, NT2RP7008487, NT2RP7008543, NT2RP7008544, NT2RP7008550, NT2RP7008557, NT2RP7008623, NT2RP7008657, NT2RP7008714, NT2RP7008720, NT2RP7008855, NT2RP7008863, NT2RP7009012, NT2RP7009019, NT2RP7009030, NT2RP7009087, NT2RP7009097, NT2RP7009108, NT2RP7009147, NT2RP7009149, NT2RP7009168, NT2RP7009215, NT2RP7009225, NT2RP7009236, NT2RP7009253, NT2RP7009259, NT2RP7009267, NT2RP7009322, NT2RP7009363, NT2RP7009370, NT2RP7009373, NT2RP7009394, NT2RP7009397, NT2RP7009429, NT2RP7009439, NT2RP7009466, NT2RP7009481, NT2RP7009482, NT2RP7009498, NT2RP7009502, NT2RP7009507, NT2RP7009577, NT2RP7009743, NT2RP7009867,

[1239] NT2RP7010109, NT2RP7010128, NT2RP7010235, NT2RP7010275, NT2RP7010521, NT2RP7010599, NT2RP7010612, NT2RP7010817, NT2RP7011086, NT2RP7011132, NT2RP7011268, NT2RP7011318, NT2RP7011452, NT2RP7011570, NT2RP7011721, NT2RP7011909, NT2RP7012291, NT2RP7012516, NT2RP7012776, NT2RP7013002, NT2RP7013374, NT2RP7013499, NT2RP7013573, NT2RP7013729, NT2RP7013764, NT2RP7013795, NT2RP7013999, NT2RP7014005, NT2RP7014178, NT2RP7014348, NT2RP7014420, NT2RP7014583, NT2RP7014721, NT2RP7014743, NT2RP7014778, NT2RP7014906, NT2RP7015080, NT2RP7015431, NT2RP7015503, NT2RP7015512, NT2RP7015676, NT2RP7015789, NT2RP7015996, NT2RP7016508, NT2RP7016574, NT2RP7016622, NT2RP7016911, NT2RP7017139, NT2RP7017284, NT2RP7017365,

[1240] NT2RP7017474, NT2RP7017546, NT2RP7017567, NT2RP7017795, NT2RP7017971, NT2RP7018032, NT2RP7018197, NT2RP7018206, NT2RP7018340, NT2RP7018586, NT2RP7018802, NT2RP7018871, NT2RP7019064, NT2RP7019135, NT2RP7019273, NT2RP7019367, NT2RP7019401, NT2RP7019445, NT2RP7019543, NT2RP7019682, NT2RP7019835, NT2RP7020123, NT2RP7020343, NT2RP7020379, NT2RP8000137, NT2RP8000296, NT2RP8000435, NT2RP8000483, NT2RP8000521, NT2RP8000633, NT2RP8001363, NT2RP8001407, NT2RP8001584, NT2RP8001604, NT2RP8001605, NT2RP8003490, NT2RP8003657, NT2RP8003787, NT2RP8004306, NT2RP8005546, NT2RP8006452, NT2RP8006521, NT2RP8007416, NT2RP8007503, NT2RP8007715, NT2RP8007920, NT2RP8008057, NT2RP8009248, NTONG1000006, NTONG1000033,

[1241] NTONG1000047, NTONG1000052, NTONG1000075, NTONG1000087, NTONG1000123, NTONG1000130, NTONG1000161, NTONG1000172, NTONG1000182, NTONG1000213, NTONG1000214, NTONG1000247, NTONG1000264, NTONG2000040, NTONG2000107, NTONG2000231, NTONG2000265, NTONG2000334, NTONG2000363, NTONG2000413, NTONG2000492, NTONG2000499, NTONG2000531, NTONG2000583, NTONG2000858, NTONG2000876, NTONG2000878, NTONG2000966, NTONG2000977, NTONG2000985, NTONG2001014, NTONG2001079, NTONG2001157, NTONG2001173, NTONG2001220, NTONG2001222, NTONG2001362, NTONG2001428, NTONG2001532, NTONG2001550, NTONG2001587, NTONG2001619, NTONG2001642, NTONG2001657, NTONG2001762, NTONG2002278, NTONG2002582, NTONG2002807, NTONG2002948, NTONG2002970,

[1242] NTONG2002985, NTONG2003158, NTONG2003210, NTONG2003316, NTONG2003409, NTONG2003454, NTONG2003515, NTONG2003805, NTONG2003852, NTONG2003897, NTONG2003928, NTONG2004095, NTONG2004308, NTONG2004521, NTONG2004614, NTONG2004690, NTONG2004806, NTONG2004829, NTONG2004844, NTONG2004991, NTONG2005062, NTONG2005086, NTONG2005137, NTONG2005153, NTONG2005265, NTONG2005277, NTONG2005363, NTONG2005373, NTONG2005391, NTONG2005480, NTONG2005497, NTONG2005577, NTONG2005657, NTONG2005801, NTONG2005822, NTONG2005897, NTONG2005969, NTONG2006099, NTONG2006187, NTONG2006301, NTONG2006324, NTONG2006354, NTONG2006440, NTONG2006484, NTONG2006501, NTONG2006646, NTONG2006709, NTONG2006783, NTONG2007020, NTONG2007028,

[1243] NTONG2007034, NTONG2007249, NTONG2007517, NTONG2007522, NTONG2007693, NTONG2007756, NTONG2008088, NTONG2008093, NTONG2008143, NTONG2008365, NTONG2008522, NTONG2008672, NTONG2008862, NTONG2008939, NTONG2008944, NTONG2009060, NTONG2009068, NTONG2009229, NTONG2009233, NTONG2009468, NTONG2009576, OCBBF1000016, OCBBF1000030, OCBBF1000042, OCBBF1000049, OCBBF1000054, OCBBF1000067, OCBBF1000080, OCBBF1000085, OCBBF1000091, OCBBF1000104, OCBBF1000118, OCBBF1000119, OCBBF1000122, OCBBF1000130, OCBBF1000138, OCBBF1000145, OCBBF1000146, OCBBF1000153, OCBBF1000175, OCBBF1000185, OCBBF1000192, OCBBF1000254, OCBBF1000315, OCBBF2000013, OCBBF2000015, OCBBF2000126, OCBBF2000178, OCBBF2000231, OCBBF2000277,

[1244] OCBBF2000287, OCBBF2000323, OCBBF2000452, OCBBF2000677, OCBBF2000703, OCBBF2000712, OCBBF2000719, OCBBF2000831, OCBBF2000904, OCBBF2000982, OCBBF2000998, OCBBF2001075, OCBBF2001101, OCBBF2001124, OCBBF2001140, OCBBF2001166, OCBBF2001176, OCBBF2001186, OCBBF2001196, OCBBF2001210, OCBBF2001252, OCBBF2001307, OCBBF2001323, OCBBF2001389, OCBBF2001402, OCBBF2001408, OCBBF2001416, OCBBF2001473, OCBBF2001492, OCBBF2001527, OCBBF2001528, OCBBF2001639, OCBBF2001681, OCBBF2001706, OCBBF2001749, OCBBF2001794, OCBBF2001910, OCBBF2001931, OCBBF2001961, OCBBF2001983, OCBBF2002015, OCBBF2002086, OCBBF2002124, OCBBF2002161, OCBBF2002290, OCBBF2002357, OCBBF2002376, OCBBF2002615, OCBBF2002626, OCBBF2002656,

[1245] OCBBF2002663, OCBBF2002805, OCBBF2002865, OCBBF2002920, OCBBF2002980, OCBBF2003028, OCBBF2003052, OCBBF2003091, OCBBF2003246, OCBBF2003327, OCBBF2003518, OCBBF2003543, OCBBF2003593, OCBBF2003744, OCBBF2003819, OCBBF2003925, OCBBF2004038, OCBBF2004104, OCBBF2004147, OCBBF2004168, OCBBF2004235, OCBBF2004259, OCBBF2004273, OCBBF2004385, OCBBF2004418, OCBBF2004478, OCBBF2004482, OCBBF2004533, OCBBF2004567, OCBBF2004612, OCBBF2004647, OCBBF2004669, OCBBF2004826, OCBBF2004866, OCBBF2004883, OCBBF2004889, OCBBF2004930, OCBBF2004984, OCBBF2005066, OCBBF2005077, OCBBF2005161, OCBBF2005343, OCBBF2005349, OCBBF2005373, OCBBF2005420, OCBBF2005428, OCBBF2005433, OCBBF2005476, OCBBF2005546, OCBBF2005843,

[1246] OCBBF2005901, OCBBF2005956, OCBBF2006005, OCBBF2006030, OCBBF2006058, OCBBF2006113, OCBBF2006151, OCBBF2006154, OCBBF2006214, OCBBF2006241, OCBBF2006313, OCBBF2006388, OCBBF2006438, OCBBF2006567, OCBBF2006624, OCBBF2006639, OCBBF2006660, OCBBF2006764, OCBBF2006849, OCBBF2006859, OCBBF2006972, OCBBF2006987, OCBBF2007028, OCBBF2007039, OCBBF2007051, OCBBF2007068, OCBBF2007114, OCBBF2007121, OCBBF2007184, OCBBF2007194, OCBBF2007196, OCBBF2007224, OCBBF2007238, OCBBF2007354, OCBBF2007414, OCBBF2007415, OCBBF2007428, OCBBF2007478, OCBBF2007485, OCBBF2007520, OCBBF2007555, OCBBF2007610, OCBBF2007622, OCBBF2007756, OCBBF2007762, OCBBF2007892, OCBBF2007931, OCBBF2007946, OCBBF2008005, OCBBF2008116,

[1247] OCBBF2008138, OCBBF2008144, OCBBF2008283, OCBBF2008330, OCBBF2008340, OCBBF2008366, OCBBF2008466, OCBBF2008483, OCBBF2008511, OCBBF2008520, OCBBF2008586, OCBBF2008640, OCBBF2008691, OCBBF2008701, OCBBF2008724, OCBBF2008768, OCBBF2008770, OCBBF2008775, OCBBF2008790, OCBBF2008814, OCBBF2008822, OCBBF2009095, OCBBF2009115, OCBBF2009242, OCBBF2009301, OCBBF2009352, OCBBF2009391, OCBBF2009424, OCBBF2009536, OCBBF2009571, OCBBF2009583, OCBBF2009603, OCBBF2009788, OCBBF2009836, OCBBF2009920, OCBBF2009926, OCBBF2010040, OCBBF2010140, OCBBF2010281, OCBBF2010313, OCBBF2010404, OCBBF2010416, OCBBF2010420, OCBBF2010557, OCBBF2010604, OCBBF2010709, OCBBF2010792, OCBBF2010819, OCBBF2010841, OCBBF2010843,

[1248] OCBBF2010858, OCBBF2010863, OCBBF2010871, OCBBF2010931, OCBBF2010945, OCBBF2010978, OCBBF2010989, OCBBF2011021, OCBBF2011073, OCBBF2011137, OCBBF2011177, OCBBF2011228, OCBBF2011232, OCBBF2011283, OCBBF2011311, OCBBF2011625, OCBBF2011669, OCBBF2011685, OCBBF2011706, OCBBF2011722, OCBBF2011759, OCBBF2011767, OCBBF2011855, OCBBF2011872, OCBBF2011887, OCBBF2011897, OCBBF2011914, OCBBF2011960, OCBBF2011981, OCBBF2012001, OCBBF2012028, OCBBF2012039, OCBBF2012095, OCBBF2012139, OCBBF2012191, OCBBF2012262, OCBBF2012320, OCBBF2012436, OCBBF2012525, OCBBF2012678, OCBBF2012704, OCBBF2012714, OCBBF2012755, OCBBF2012812, OCBBF2012821, OCBBF2012881, OCBBF2012908, OCBBF2012936, OCBBF2012990, OCBBF2013011,

[1249] OCBBF2013049, OCBBF2013091, OCBBF2013123, OCBBF2013127, OCBBF2013149, OCBBF2013208, OCBBF2013285, OCBBF2013319, OCBBF2013324, OCBBF2013366, OCBBF2013481, OCBBF2013507, OCBBF2013721, OCBBF2013789, OCBBF2013883, OCBBF2013926, OCBBF2014052, OCBBF2014089, OCBBF2014322, OCBBF2014386, OCBBF2014576, OCBBF2014707, OCBBF2014745, OCBBF2014828, OCBBF2014873, OCBBF2014880, OCBBF2014928, OCBBF2015031, OCBBF2015081, OCBBF2015115, OCBBF2015232, OCBBF2015233, OCBBF2015285, OCBBF2015334, OCBBF2015335, OCBBF2015503, OCBBF2015506, OCBBF2015599, OCBBF2015645, OCBBF2015659, OCBBF2015751, OCBBF2015797, OCBBF2015931, OCBBF2015980, OCBBF2016038, OCBBF2016405, OCBBF2016467, OCBBF2016590, OCBBF2016591, OCBBF2016612,

[1250] OCBBF2016689, OCBBF2016690, OCBBF2016729, OCBBF2016841, OCBBF2016928, OCBBF2017055, OCBBF2017069, OCBBF2017306, OCBBF2017325, OCBBF2017398, OCBBF2017458, OCBBF2017489, OCBBF2017516, OCBBF2017665, OCBBF2017754, OCBBF2017791, OCBBF2017815, OCBBF2017882, OCBBF2017888, OCBBF2017920, OCBBF2018012, OCBBF2018014, OCBBF2018084, OCBBF2018167, OCBBF2018206, OCBBF2018229, OCBBF2018234, OCBBF2018362, OCBBF2018380, OCBBF2018563, OCBBF2018581, OCBBF2018618, OCBBF2018663, OCBBF2018687, OCBBF2018827, OCBBF2018828, OCBBF2018873, OCBBF2018934, OCBBF2019108, OCBBF2019195, OCBBF2019327, OCBBF2019684, OCBBF2019761, OCBBF2019823, OCBBF2019950, OCBBF2020048, OCBBF2020318, OCBBF2020343, OCBBF2020453, OCBBF2020741,

[1251] OCBBF2020801, OCBBF2020825, OCBBF2020838, OCBBF2021214, OCBBF2021286, OCBBF2021323, OCBBF2021518, OCBBF2021788, OCBBF2021833, OCBBF2022351, OCBBF2022573, OCBBF2022574, OCBBF2023162, OCBBF2023598, OCBBF2023643, OCBBF2024463, OCBBF2024589, OCBBF2024719, OCBBF2024779, OCBBF2024781, OCBBF2024850, OCBBF2025028, OCBBF2025115, OCBBF2025198, OCBBF2025451, OCBBF2025458, OCBBF2025527, OCBBF2025631, OCBBF2025730, OCBBF2026025, OCBBF2026035, OCBBF2026144, OCBBF2026368, OCBBF2026645, OCBBF2026649, OCBBF2026690, OCBBF2026981, OCBBF2027148, OCBBF2027197, OCBBF2027354, OCBBF2027423, OCBBF2027478, OCBBF2027481, OCBBF2027511, OCBBF2027661, OCBBF2027728, OCBBF2027782, OCBBF2027868, OCBBF2028055, OCBBF2028173,

[1252] OCBBF2028421, OCBBF2029471, OCBBF2029901, OCBBF2030116, OCBBF2030329, OCBBF2030354, OCBBF2030517, OCBBF2030574, OCBBF2030708, OCBBF2030927, OCBBF2030963, OCBBF2031167, OCBBF2031198, OCBBF2031366, OCBBF2031561, OCBBF2032152, OCBBF2032274, OCBBF2032539, OCBBF2032590, OCBBF2032599, OCBBF2032611, OCBBF2032671, OCBBF2033295, OCBBF2033413, OCBBF2033869, OCBBF2033948, OCBBF2034333, OCBBF2034529, OCBBF2034637, OCBBF2034906, OCBBF2035110, OCBBF2035214, OCBBF2035390, OCBBF2035564, OCBBF2035658, OCBBF2035823, OCBBF2035885, OCBBF2035916, OCBBF2036019, OCBBF2036031, OCBBF2036225, OCBBF2036476, OCBBF2036743, OCBBF2036752, OCBBF2037068, OCBBF2037340, OCBBF2037398, OCBBF2037464, OCBBF2037547, OCBBF2037598,

[1253] OCBBF2037638, OCBBF2038238, OCBBF2038285, OCBBF2038317, OCBBF3000097, OCBBF3000213, OCBBF3000296, OCBBF3000372, OCBBF3000380, OCBBF3000743, OCBBF3000830, OCBBF3001076, OCBBF3001202, OCBBF3001333, OCBBF3001616, OCBBF3002553, OCBBF3002600, OCBBF3002654, OCBBF3003103, OCBBF3003209, OCBBF3003592, OCBBF3003745, OCBBF3003761, OCBBF3004264, OCBBF3004314, OCBBF3004972, OCBBF3005330, OCBBF3005597, OCBBF3005843, OCBBF3006802, OCBBF3006986, OCBBF3007078, OCBBF3007704, OCBBF3008230, OCBBF3008392, OCBBF3008835, OCBBF3009192, OCBBF3009244, OCBBF3009279, PANCR1000012, PANCR1000021, PANCR1000081, PANCR1000086, PANCR1000091, PANCR1000185, PEBLM1000024, PEBLM1000029, PEBLM1000034, PEBLM1000062, PEBLM1000066,

[1254] PEBLM1000068, PEBLM1000071, PEBLM1000083, PEBLM1000144, PEBLM1000147, PEBLM1000180, PEBLM2000030, PEBLM2000112, PEBLM2000126, PEBLM2000170, PEBLM2000180, PEBLM2000213, PEBLM2000248, PEBLM2000270, PEBLM2000321, PEBLM2000326, PEBLM2000333, PEBLM2000338, PEBLM2000479, PEBLM2000502, PEBLM2001072, PEBLM2001312, PEBLM2001465, PEBLM2001488, PEBLM2001803, PEBLM2002432, PEBLM2002455, PEBLM2002594, PEBLM2002749, PEBLM2002887, PEBLM2003426, PEBLM2003765, PEBLM2003914, PEBLM2003935, PEBLM2004015, PEBLM2004216, PEBLM2004290, PEBLM2004452, PEBLM2004497, PEBLM2004733, PEBLM2005282, PEBLM2005615, PEBLM2005632, PEBLM2005697, PEBLM2006031, PEBLM2006036, PEBLM2006049, PEBLM2006113, PEBLM2006135, PEBLM2006215,

[1255] PEBLM2006283, PEBLM2006298, PEBLM2006366, PEBLM2006709, PEBLM2006912, PEBLM2007112, PEBLM2007140, PEBLM2007188, PEBLM2007296, PEBLM2007437, PEBLM2007447, PEBLM2007598, PEBLM2007832, PEBLM2007834, PEBLM2008106, PEBLM2008576, PEBLM2008605, PEBLM2008826, PEBLM2008861, PERIC1000025, PERIC1000147, PERIC2000180, PERIC2000214, PERIC2000386, PERIC2000387, PERIC2000422, PERIC2000473, PERIC2000478, PERIC2000889, PERIC2000914, PERIC2001227, PERIC2001228, PERIC2001379, PERIC2001504, PERIC2001703, PERIC2001764, PERIC2002243, PERIC2002272, PERIC2002766, PERIC2003001, PERIC2003090, PERIC2003287, PERIC2003349, PERIC2003452, PERIC2003699, PERIC2003720, PERIC2003794, PERIC2003834, PERIC2003919, PERIC2003957,

[1256] PERIC2004028, PERIC2004131, PERIC2004259, PERIC2004379, PERIC2004429, PERIC2004510, PERIC2004613, PERIC2004909, PERIC2005111, PERIC2005117, PERIC2005305, PERIC2005347, PERIC2005370, PERIC2005936, PERIC2006035, PERIC2006121, PERIC2006443, PERIC2006945, PERIC2006960, PERIC2007068, PERIC2007439, PERIC2007914, PERIC2008008, PERIC2008385, PERIC2009001, PERIC2009086, PERIC2009329, PERIC2009566, PLACE5000001, PLACE5000013, PLACE5000037, PLACE5000058, PLACE5000066, PLACE5000067, PLACE5000068, PLACE5000070, PLACE5000080, PLACE5000105, PLACE5000113, PLACE5000115, PLACE5000116, PLACE5000129, PLACE5000139, PLACE5000153, PLACE5000159, PLACE5000170, PLACE5000171, PLACE5000178, PLACE5000245, PLACE5000260,

[1257] PLACE5000282, PLACE5000297, PLACE5000372, PLACE5000492, PLACE5000522, PLACE5000527, PLACE6000012, PLACE6000044, PLACE6000055, PLACE6000070, PLACE6000137, PLACE6000145, PLACE6000191, PLACE6000205, PLACE6000231, PLACE6000263, PLACE6000296, PLACE6000325, PLACE6000348, PLACE6000371, PLACE6000414, PLACE6000424, PLACE6000426, PLACE6000429, PLACE6000450, PLACE6000523, PLACE6000550, PLACE6000552, PLACE6000555, PLACE6000619, PLACE6000630, PLACE6000953, PLACE6001064, PLACE6001118, PLACE6001153, PLACE6001185, PLACE6001262, PLACE6001281, PLACE6001294, PLACE6001536, PLACE6001557, PLACE6001712, PLACE6001740, PLACE6001823, PLACE6001886, PLACE6001925, PLACE6001933, PLACE6002011, PLACE6002016, PLACE6002056,

[1258] PLACE6002102, PLACE6002157, PLACE6002312, PLACE6002323, PLACE6002345, PLACE6002419, PLACE6002462, PLACE6002647, PLACE6002668, PLACE6002692, PLACE6002699, PLACE6002710, PLACE6002871, PLACE6002949, PLACE6003004, PLACE6003077, PLACE6003094, PLACE6003109, PLACE6003204, PLACE6003218, PLACE6003372, PLACE6003393, PLACE6003399, PLACE6003539, PLACE6003621, PLACE6003705, PLACE6003740, PLACE6003745, PLACE6003771, PLACE6003796, PLACE6003839, PLACE6003850, PLACE6004005, PLACE6004101, PLACE6004219, PLACE6004336, PLACE6004368, PLACE6004380, PLACE6004397, PLACE6004454, PLACE6004464, PLACE6004491, PLACE6004578, PLACE6004663, PLACE6004687, PLACE6004738, PLACE6004931, PLACE6004966, PLACE6004993, PLACE6005007,

[1259] PLACE6005029, PLACE6005108, PLACE6005231, PLACE6005234, PLACE6005283, PLACE6005294, PLACE6005328, PLACE6005351, PLACE6005423, PLACE6005482, PLACE6005487, PLACE6005535, PLACE6005546, PLACE6005559, PLACE6005579, PLACE6005691, PLACE6005786, PLACE6006042, PLACE6006077, PLACE6006137, PLACE6006158, PLACE6006186, PLACE6006217, PLACE6006222, PLACE6006266, PLACE6006287, PLACE6006394, PLACE6006418, PLACE6006474, PLACE6006566, PLACE6006697, PLACE6006822, PLACE6006871, PLACE6006905, PLACE6006988, PLACE6007050, PLACE6007180, PLACE6007239, PLACE6007242, PLACE6007309, PLACE6007373, PLACE6007380, PLACE6007433, PLACE6007482, PLACE6007687, PLACE6007787, PLACE6007798, PLACE6007807, PLACE6007925, PLACE6008036,

[1260] PLACE6008094, PLACE6008126, PLACE6008285, PLACE6008444, PLACE6008453, PLACE6008640, PLACE6008750, PLACE6008768, PLACE6008775, PLACE6008793, PLACE6008824, PLACE6008989, PLACE6009006, PLACE6009008, PLACE6009228, PLACE6009237, PLACE6009338, PLACE6009419, PLACE6009430, PLACE6009482, PLACE6009524, PLACE6009527, PLACE6009590, PLACE6009821, PLACE6009835, PLACE6009853, PLACE6010077, PLACE6010463, PLACE6010485, PLACE6010568, PLACE6010701, PLACE6010704, PLACE6010732, PLACE6010765, PLACE6010848, PLACE6010925, PLACE6010936, PLACE6010991, PLACE6011041, PLACE6011102, PLACE6011156, PLACE6011211, PLACE6011260, PLACE6011627, PLACE6011774, PLACE6011881, PLACE6011907, PLACE6011970, PLACE6011975, PLACE6012028,

[1261] PLACE6012108, PLACE6012168, PLACE6012297, PLACE6012308, PLACE6012574, PLACE6012908, PLACE6012936, PLACE6012942, PLACE6013232, PLACE6013288, PLACE6013386, PLACE6013400, PLACE6013650, PLACE6013672, PLACE6013883, PLACE6013884, PLACE6013885, PLACE6014043, PLACE6014064, PLACE6014516, PLACE6014882, PLACE6015051, PLACE6015211, PLACE6015322, PLACE6015445, PLACE6015460, PLACE6015513, PLACE6015591, PLACE6015729, PLACE6015731, PLACE6015939, PLACE6016030, PLACE6016093, PLACE6016105, PLACE6016160, PLACE6016210, PLACE6016254, PLACE6016942, PLACE6016984, PLACE6017002, PLACE6017431, PLACE6017564, PLACE6017578, PLACE6017701, PLACE6017714, PLACE6017788, PLACE6017791, PLACE6018031, PLACE6018107, PLACE6018187,

[1262] PLACE6018235, PLACE6018287, PLACE6018441, PLACE6018487, PLACE6018497, PLACE6018769, PLACE6018834, PLACE6018843, PLACE6018938, PLACE6019195, PLACE6019385, PLACE6019542, PLACE6019600, PLACE6019674, PLACE6019676, PLACE6019701, PLACE6019932, PLACE6020031, PLACE6020145, PLACE7000167, PLACE7000170, PLACE7000266, PLACE7000333, PLACE7000410, PLACE7000502, PLACE7000707, PLACE7001022, PLACE7001544, PLACE7001759, PLACE7001936, PLACE7002303, PLACE7002641, PLACE7003639, PLACE7003657, PLACE7003684, PLACE7003985, PLACE7004961, PLACE7005169, PLACE7005671, PLACE7005840, PLACE7006051, PLACE7006090, PLACE7006240, PLACE7006268, PLACE7006275, PLACE7006498, PLACE7006540, PLACE7007379, PLACE7007644, PLACE7007973,

[1263] PLACE7008136, PLACE7008261, PLACE7008431, PLACE7008623, PLACE7008766, PLACE7009563, PROST1000039, PROST1000065, PROST1000083, PROST1000085, PROST1000110, PROST1000123, PROST1000136, PROST1000145, PROST1000152, PROST1000167, PROST1000184, PROST1000199, PROST1000215, PROST1000217, PROST1000220, PROST1000246, PROST1000262, PROST1000272, PROST1000298, PROST1000322, PROST1000334, PROST1000362, PROST1000377, PROST1000383, PROST1000412, PROST1000419, PROST1000451, PROST1000480, PROST1000485, PROST1000493, PROST1000512, PROST1000526, PROST1000527, PROST1000528, PROST1000536, PROST1000559, PROST1000564, PROST1000575, PROST2000053, PROST2000067, PROST2000079, PROST2000105, PROST2000143, PROST2000162,

[1264] PROST2000165, PROST2000176, PROST2000203, PROST2000206, PROST2000212, PROST2000241, PROST2000267, PROST2000273, PROST2000274, PROST2000277, PROST2000284, PROST2000325, PROST2000337, PROST2000432, PROST2000452, PROST2000463, PROST2000470, PROST2000505, PROST2000567, PROST2000572, PROST2000717, PROST2000760, PROST2000761, PROST2000835, PROST2000893, PROST2000961, PROST2001002, PROST2001116, PROST2001138, PROST2001213, PROST2001283, PROST2001414, PROST2001415, PROST2001465, PROST2001521, PROST2001540, PROST2001552, PROST2001599, PROST2001611, PROST2001636, PROST2001739, PROST2001796, PROST2001805, PROST2001823, PROST2001883, PROST2001899, PROST2001997, PROST2001998, PROST2002078, PROST2002101,

[1265] PROST2002162, PROST2002212, PROST2002227, PROST2002338, PROST2002425, PROST2002488, PROST2002489, PROST2002527, PROST2002591, PROST2002602, PROST2002633, PROST2002682, PROST2002685, PROST2002722, PROST2002736, PROST2002842, PROST2002897, PROST2002906, PROST2002927, PROST2002960, PROST2003102, PROST2003117, PROST2003210, PROST2003232, PROST2003302, PROST2003303, PROST2003324, PROST2003340, PROST2003396, PROST2003428, PROST2003472, PROST2003537, PROST2003563, PROST2003577, PROST2003583, PROST2003586, PROST2003628, PROST2003635, PROST2003674, PROST2003676, PROST2003725, PROST2003732, PROST2003775, PROST2003922, PROST2003930, PROST2004115, PROST2004142, PROST2004146, PROST2004161, PROST2004251,

[1266] PROST2004258, PROST2004332, PROST2004416, PROST2004481, PROST2004526, PROST2004570, PROST2004727, PROST2004739, PROST2004742, PROST2004744, PROST2004817, PROST2005039, PROST2005067, PROST2005076, PROST2005093, PROST2005121, PROST2005131, PROST2005143, PROST2005228, PROST2005272, PROST2005426, PROST2005466, PROST2005630, PROST2005683, PROST2005788, PROST2005880, PROST2005886, PROST2005904, PROST2005919, PROST2005943, PROST2006008, PROST2006020, PROST2006030, PROST2006060, PROST2006196, PROST2006201, PROST2006282, PROST2006343, PROST2006450, PROST2006491, PROST2006510, PROST2006579, PROST2006688, PROST2006766, PROST2006782, PROST2006933, PROST2006988, PROST2007122, PROST2007200, PROST2007237,

[1267] PROST2007248, PROST2007289, PROST2007317, PROST2007328, PROST2007382, PROST2007389, PROST2007416, PROST2007528, PROST2007612, PROST2007818, PROST2007871, PROST2007950, PROST2007956, PROST2007974, PROST2007988, PROST2008079, PROST2008088, PROST2008243, PROST2008245, PROST2008268, PROST2008360, PROST2008447, PROST2008468, PROST2008472, PROST2008516, PROST2008724, PROST2008835, PROST2008993, PROST2009022, PROST2009208, PROST2009222, PROST2009254, PROST2009273, PROST2009320, PROST2009347, PROST2009365, PROST2009388, PROST2009400, PROST2009470, PROST2009483, PROST2009571, PROST2009731, PROST2009736, PROST2009795, PROST2009901, PROST2009909, PROST2010046, PROST2010219, PROST2010250, PROST2010318,

[1268] PROST2010326, PROST2010382, PROST2010400, PROST2010545, PROST2010579, PROST2010606, PROST2010885, PROST2011012, PROST2011038, PROST2011105, PROST2011297, PROST2011410, PROST2011439, PROST2011482, PROST2011631, PROST2011660, PROST2012005, PROST2012016, PROST2012088, PROST2012140, PROST2012157, PROST2012190, PROST2012249, PROST2012400, PROST2012448, PROST2012504, PROST2012542, PROST2012550, PROST2012740, PROST2012745, PROST2012780, PROST2012888, PROST2012890, PROST2013032, PROST2013053, PROST2013121, PROST2013260, PROST2013327, PROST2013531, PROST2013605, PROST2013627, PROST2013873, PROST2013880, PROST2014422, PROST2014585, PROST2014601, PROST2014659, PROST2014862, PROST2014916, PROST2014925,

[1269] PROST2015124, PROST2015137, PROST2015198, PROST2015243, PROST2015246, PROST2015251, PROST2015332, PROST2015457, PROST2015537, PROST2015545, PROST2015551, PROST2015636, PROST2015710, PROST2015756, PROST2015877, PROST2015900, PROST2015924, PROST2015932, PROST2016246, PROST2016351, PROST2016379, PROST2016444, PROST2016462, PROST2016499, PROST2016512, PROST2016566, PROST2016582, PROST2016668, PROST2016684, PROST2016777, PROST2016829, PROST2016860, PROST2016918, PROST2016980, PROST2017098, PROST2017128, PROST2017367, PROST2017413, PROST2017441, PROST2017578, PROST2017612, PROST2017617, PROST2017700, PROST2017701, PROST2017729, PROST2017836, PROST2017910, PROST2017972, PROST2018030, PROST2018090,

[1270] PROST2018235, PROST2018437, PROST2018487, PROST2018511, PROST2018588, PROST2018607, PROST2018788, PROST2018902, PROST2018922, PROST2018977, PROST2019164, PROST2019253, PROST2019296, PROST2019398, PROST2019487, PROST2019781, PUAEN1000039, PUAEN1000057, PUAEN1000081, PUAEN1000085, PUAEN1000087, PUAEN1000121, PUAEN1000147, PUAEN1000161, PUAEN1000175, PUAEN1000275, PUAEN1000276, PUAEN1000288, PUAEN1000322, PUAEN2000080, PUAEN2000152, PUAEN2000175, PUAEN2000247, PUAEN2000312, PUAEN2000394, PUAEN2000594, PUAEN2000684, PUAEN2000942, PUAEN2001260, PUAEN2001345, PUAEN2001526, PUAEN2001586, PUAEN2001882, PUAEN2002473, PUAEN2002489, PUAEN2002552, PUAEN2002568, PUAEN2002616, PUAEN2002758, PUAEN2003079,

[1271] PUAEN2003116, PUAEN2003408, PUAEN2003517, PUAEN2004067, PUAEN2004083, PUAEN2004511, PUAEN2004525, PUAEN2004875, PUAEN2005110, PUAEN2005247, PUAEN2005502, PUAEN2005588, PUAEN2005930, PUAEN2006029, PUAEN2006328, PUAEN2006335, PUAEN2006578, PUAEN2006639, PUAEN2006761, PUAEN2007044, PUAEN2007350, PUAEN2007785, PUAEN2007898, PUAEN2008123, PUAEN2008228, PUAEN2008314, PUAEN2008515, PUAEN2008815, PUAEN2008980, PUAEN2008985, PUAEN2009174, PUAEN2009348, PUAEN2009534, PUAEN2009655, PUAEN2009795, PUAEN2009852, PUAEN2010346, PUAEN2010824, RECTM1000051, RECTM1000141, RECTM2000220, RECTM2000349, RECTM2000433, RECTM2000510, RECTM2001307, RECTM2001347, RECTM2001519, RECTM2001666, RECTM2001691, RECTM2001749,

[1272] RECTM2002172, RECTM2002602, RECTM2002632, SALGL1000005, SALGL1000024, SALGL1000028, SALGL1000047, SALGL1000065, SALGL1000107, SALGL1000171, SKMUS1000014, SKMUS1000022, SKMUS1000030, SKMUS1000064, SKMUS1000067, SKMUS1000084, SKMUS1000102, SKMUS1000104, SKMUS1000110, SKMUS1000118, SKMUS1000124, SKMUS1000129, SKMUS1000138, SKMUS1000176, SKMUS2000020, SKMUS2000061, SKMUS2000074, SKMUS2000078, SKMUS2000117, SKMUS2000137, SKMUS2000198, SKMUS2000243, SKMUS2000271, SKMUS2000287, SKMUS2000317, SKMUS2000330, SKMUS2000339, SKMUS2000343, SKMUS2000365, SKMUS2000380, SKMUS2000390, SKMUS2000416, SKMUS2000458, SKMUS2000467, SKMUS2000468, SKMUS2000515, SKMUS2000679, SKMUS2000690, SKMUS2000701, SKMUS2000705,

[1273] SKMUS2000710, SKMUS2000724, SKMUS2000726, SKMUS2000757, SKMUS2000774, SKMUS2000780, SKMUS2000821, SKMUS2000847, SKMUS2000863, SKMUS2000873, SKMUS2000894, SKMUS2000898, SKMUS2000902, SKMUS2000933, SKMUS2000945, SKMUS2000954, SKMUS2000961, SKMUS2000973, SKMUS2000980, SKMUS2001008, SKMUS2001014, SKMUS2001129, SKMUS2001157, SKMUS2001164, SKMUS2001199, SKMUS2001201, SKMUS2001215, SKMUS2001247, SKMUS2001254, SKMUS2001271, SKMUS2001287, SKMUS2001323, SKMUS2001364, SKMUS2001398, SKMUS2001402, SKMUS2001412, SKMUS2001492, SKMUS2001501, SKMUS2001543, SKMUS2001580, SKMUS2001585, SKMUS2001608, SKMUS2001631, SKMUS2001662, SKMUS2001663, SKMUS2001668, SKMUS2001671, SKMUS2001683, SKMUS2001693, SKMUS2001695,

[1274] SKMUS2001703, SKMUS2001740, SKMUS2001742, SKMUS2001823, SKMUS2001850, SKMUS2002077, SKMUS2002153, SKMUS2002475, SKMUS2002602, SKMUS2002634, SKMUS2002693, SKMUS2002821, SKMUS2002840, SKMUS2002920, SKMUS2003034, SKMUS2003074, SKMUS2003168, SKMUS2003194, SKMUS2003744, SKMUS2004044, SKMUS2004047, SKMUS2004483, SKMUS2004667, SKMUS2004897, SKMUS2004903, SKMUS2004908, SKMUS2005428, SKMUS2006394, SKMUS2006481, SKMUS2006755, SKMUS2007315, SKMUS2007359, SKMUS2007568, SKMUS2007740, SKMUS2007816, SKMUS2007915, SKMUS2008338, SKMUS2008407, SKMUS2008474, SKMUS2008585, SKMUS2008607, SKMUS2009190, SKMUS2009232, SKMUS2009479, SKMUS2009557, SKNMC1000123, SKNMC1000124, SKNMC1000137, SKNMC1000159, SKNMC1000229,

[1275] SKNMC1000251, SKNMC1000264, SKNMC2000224, SKNMC2000256, SKNMC2000305, SKNMC2000356, SKNMC2000374, SKNMC2000583, SKNMC2000612, SKNMC2000622, SKNMC2000877, SKNMC2000966, SKNMC2001113, SKNMC2001324, SKNMC2001555, SKNMC2001596, SKNMC2001623, SKNMC2002402, SKNMC2003639, SKNMC2003924, SKNMC2003987, SKNMC2004457, SKNMC2004643, SKNMC2004651, SKNMC2005772, SKNMC2006173, SKNMC2006327, SKNMC2006998, SKNMC2007134, SKNMC2007502, SKNMC2007504, SKNMC2007961, SKNMC2009450, SKNSH1000086, SKNSH1000101, SKNSH1000174, SKNSH1000301, SKNSH1000308, SKNSH1000416, SKNSH2000051, SKNSH2000101, SKNSH2000163, SKNSH2000250, SKNSH2000319, SKNSH2000482, SKNSH2000516, SKNSH2000550, SKNSH2000819, SKNSH2001222, SKNSH2001875,

[1276] SKNSH2001931, SKNSH2002054, SKNSH2002325, SKNSH2002768, SKNSH2002866, SKNSH2003064, SKNSH2003174, SKNSH2003422, SKNSH2003466, SKNSH2003483, SKNSH2003528, SKNSH2003633, SKNSH2004039, SKNSH2005061, SKNSH2005120, SKNSH2005194, SKNSH2005240, SKNSH2005792, SKNSH2005816, SKNSH2005981, SKNSH2006304, SKNSH2006432, SKNSH2006822, SKNSH2007142, SKNSH2007149, SKNSH2007429, SKNSH2007739, SKNSH2008043, SKNSH2008940, SKNSH2008969, SKNSH2009197, SKNSH2009357, SKNSH2009435, SKNSH2009991, SKNSH2010015, SMINT1000012, SMINT1000039, SMINT1000042, SMINT1000051, SMINT1000054, SMINT1000057, SMINT1000071, SMINT1000075, SMINT1000078, SMINT1000091, SMINT1000100, SMINT1000103, SMINT1000117, SMINT1000118, SMINT1000137,

[1277] SMINT1000192, SMINT2000032, SMINT2000040, SMINT2000060, SMINT2000073, SMINT2000084, SMINT2000145, SMINT2000176, SMINT2000185, SMINT2000227, SMINT2000229, SMINT2000232, SMINT2000267, SMINT2000400, SMINT2000454, SMINT2000468, SMINT2000518, SMINT2000529, SMINT2000530, SMINT2000537, SMINT2000538, SMINT2000541, SMINT2000545, SMINT2000558, SMINT2000562, SMINT2000568, SMINT2000609, SMINT2000629, SMINT2000694, SMINT2000747, SMINT2000811, SMINT2000824, SMINT2000984, SMINT2001114, SMINT2001158, SMINT2001183, SMINT2001199, SMINT2001222, SMINT2001348, SMINT2001397, SMINT2001458, SMINT2001461, SMINT2001535, SMINT2001559, SMINT2001609, SMINT2001615, SMINT2001683, SMINT2001731, SMINT2001818, SMINT2001950,

[1278] SMINT2002126, SMINT2002159, SMINT2002202, SMINT2002210, SMINT2002224, SMINT2002281, SMINT2002311, SMINT2002328, SMINT2002414, SMINT2002457, SMINT2002620, SMINT2002689, SMINT2002743, SMINT2002778, SMINT2002880, SMINT2002899, SMINT2002974, SMINT2002976, SMINT2003003, SMINT2003128, SMINT2003150, SMINT2003317, SMINT2003386, SMINT2003423, SMINT2003505, SMINT2003551, SMINT2003569, SMINT2003641, SMINT2003644, SMINT2003866, SMINT2003905, SMINT2004037, SMINT2004047, SMINT2004086, SMINT2004299, SMINT2004339, SMINT2004350, SMINT2004414, SMINT2004473, SMINT2004547, SMINT2004583, SMINT2004589, SMINT2004729, SMINT2004781, SMINT2004872, SMINT2004891, SMINT2004909, SMINT2004972, SMINT2004992, SMINT2005075,

[1279] SMINT2005161, SMINT2005174, SMINT2005213, SMINT2005330, SMINT2005387, SMINT2005402, SMINT2005405, SMINT2005621, SMINT2005623, SMINT2005624, SMINT2005688, SMINT2005800, SMINT2005956, SMINT2006078, SMINT2006205, SMINT2006331, SMINT2006596, SMINT2006641, SMINT2006648, SMINT2006708, SMINT2006716, SMINT2006801, SMINT2007062, SMINT2007101, SMINT2007140, SMINT2007187, SMINT2007219, SMINT2007294, SMINT2007365, SMINT2007391, SMINT2007433, SMINT2007508, SMINT2007526, SMINT2007579, SMINT2007647, SMINT2007729, SMINT2007790, SMINT2007792, SMINT2007796, SMINT2007867, SMINT2007932, SMINT2008042, SMINT2008054, SMINT2008133, SMINT2008277, SMINT2008329, SMINT2008455, SMINT2008491, SMINT2008531, SMINT2008545,

[1280] SMINT2008558, SMINT2008590, SMINT2008625, SMINT2008672, SMINT2008690, SMINT2008715, SMINT2008720, SMINT2008817, SMINT2008844, SMINT2008869, SMINT2008917, SMINT2008921, SMINT2009119, SMINT2009121, SMINT2009212, SMINT2009216, SMINT2009233, SMINT2009259, SMINT2009272, SMINT2009292, SMINT2009363, SMINT2009415, SMINT2009468, SMINT2009505, SMINT2009529, SMINT2009832, SMINT2009895, SMINT2009902, SMINT2009973, SMINT2010015, SMINT2010068, SMINT2010076, SMINT2010084, SMINT2010144, SMINT2010200, SMINT2010278, SMINT2010324, SMINT2010326, SMINT2010369, SMINT2010426, SMINT2010500, SMINT2010533, SMINT2010629, SMINT2010639, SMINT2010672, SMINT2010753, SMINT2010853, SMINT2010897, SMINT2010959, SMINT2010997,

[1281] SMINT2011033, SMINT2011066, SMINT2011273, SMINT2011311, SMINT2011406, SMINT2011509, SMINT2011567, SMINT2011588, SMINT2011656, SMINT2011888, SMINT2011958, SMINT2012040, SMINT2012179, SMINT2012195, SMINT2012285, SMINT2012291, SMINT2012501, SMINT2012734, SMINT2012793, SMINT2013031, SMINT2013032, SMINT2013129, SMINT2013170, SMINT2013181, SMINT2013228, SMINT2013613, SMINT2013626, SMINT2013695, SMINT2013833, SMINT2013890, SMINT2014166, SMINT2014282, SMINT2014443, SMINT2014480, SMINT2014489, SMINT2014721, SMINT2015006, SMINT2015294, SMINT2015306, SMINT2015326, SMINT2015353, SMINT2015454, SMINT2015518, SMINT2015745, SMINT2015787, SMINT2015810, SMINT2016122, SMINT2016146, SMINT2016286, SMINT2016313,

[1282] SMINT2016396, SMINT2016412, SMINT2016440, SMINT2016477, SMINT2016544, SMINT2016857, SMINT2017134, SMINT2017319, SMINT2017324, SMINT2017410, SMINT2017431, SMINT2017432, SMINT2017436, SMINT2017599, SMINT2017659, SMINT2017736, SMINT2017781, SMINT2017855, SMINT2017884, SMINT2017964, SMINT2017974, SMINT2018343, SMINT2018353, SMINT2018592, SMINT2018681, SMINT2019017, SMINT2019105, SMINT2019142, SMINT2019153, SMINT2019200, SPLEN1000013, SPLEN1000041, SPLEN1000049, SPLEN1000056, SPLEN1000087, SPLEN1000089, SPLEN1000091, SPLEN1000116, SPLEN1000134, SPLEN1000139, SPLEN1000143, SPLEN1000145, SPLEN1000156, SPLEN1000163, SPLEN1000178, SPLEN2000020, SPLEN2000064, SPLEN2000072, SPLEN2000098, SPLEN2000126,

[1283] SPLEN2000143, SPLEN2000189, SPLEN2000197, SPLEN2000205, SPLEN2000210, SPLEN2000242, SPLEN2000243, SPLEN2000247, SPLEN2000267, SPLEN2000270, SPLEN2000307, SPLEN2000310, SPLEN2000341, SPLEN2000350, SPLEN2000357, SPLEN2000364, SPLEN2000402, SPLEN2000414, SPLEN2000420, SPLEN2000443, SPLEN2000448, SPLEN2000450, SPLEN2000464, SPLEN2000496, SPLEN2000515, SPLEN2000516, SPLEN2000537, SPLEN2000541, SPLEN2000607, SPLEN2000630, SPLEN2000695, SPLEN2000698, SPLEN2000839, SPLEN2000882, SPLEN2001135, SPLEN2001141, SPLEN2001176, SPLEN2001227, SPLEN2001278, SPLEN2001354, SPLEN2001367, SPLEN2001383, SPLEN2001476, SPLEN2001503, SPLEN2001510, SPLEN2001599, SPLEN2001626, SPLEN2001650, SPLEN2001689, SPLEN2001710,

[1284] SPLEN2001781, SPLEN2001881, SPLEN2001912, SPLEN2001945, SPLEN2002007, SPLEN2002053, SPLEN2002133, SPLEN2002147, SPLEN2002166, SPLEN2002175, SPLEN2002223, SPLEN2002272, SPLEN2002314, SPLEN2002335, SPLEN2002343, SPLEN2002354, SPLEN2002385, SPLEN2002419, SPLEN2002451, SPLEN2002462, SPLEN2002463, SPLEN2002477, SPLEN2002493, SPLEN2002662, SPLEN2002695, SPLEN2002707, SPLEN2002917, SPLEN2002931, SPLEN2002957, SPLEN2003160, SPLEN2003204, SPLEN2003219, SPLEN2003297, SPLEN2003396, SPLEN2003678, SPLEN2003878, SPLEN2003918, SPLEN2003924, SPLEN2004060, SPLEN2004078, SPLEN2004124, SPLEN2004148, SPLEN2004343, SPLEN2004346, SPLEN2004368, SPLEN2004555, SPLEN2004611, SPLEN2004662, SPLEN2004773, SPLEN2004844,

[1285] SPLEN2005009, SPLEN2005227, SPLEN2005272, SPLEN2005342, SPLEN2005416, SPLEN2005450, SPLEN2005474, SPLEN2005727, SPLEN2005783, SPLEN2005790, SPLEN2005818, SPLEN2005838, SPLEN2005869, SPLEN2005927, SPLEN2005939, SPLEN2006122, SPLEN2006133, SPLEN2006232, SPLEN2006268, SPLEN2006283, SPLEN2006325, SPLEN2006389, SPLEN2006425, SPLEN2006671, SPLEN2006701, SPLEN2006785, SPLEN2006875, SPLEN2007182, SPLEN2007276, SPLEN2007314, SPLEN2007326, SPLEN2007350, SPLEN2007388, SPLEN2007619, SPLEN2007653, SPLEN2007689, SPLEN2007695, SPLEN2007739, SPLEN2007750, SPLEN2007794, SPLEN2007879, SPLEN2007926, SPLEN2007951, SPLEN2008007, SPLEN2008135, SPLEN2008164, SPLEN2008317, SPLEN2008496, SPLEN2008591, SPLEN2008786,

[1286] SPLEN2009081, SPLEN2009088, SPLEN2009163, SPLEN2009315, SPLEN2009340, SPLEN2009512, SPLEN2009513, SPLEN2009541, SPLEN2009548, SPLEN2009555, SPLEN2009581, SPLEN2009733, SPLEN2009803, SPLEN2009884, SPLEN2009918, SPLEN2009970, SPLEN2010004, SPLEN2010015, SPLEN2010112, SPLEN2010119, SPLEN2010146, SPLEN2010187, SPLEN2010350, SPLEN2010395, SPLEN2010415, SPLEN2010447, SPLEN2010469, SPLEN2010510, SPLEN2010530, SPLEN2010534, SPLEN2010588, SPLEN2010625, SPLEN2010800, SPLEN2010846, SPLEN2010847, SPLEN2010862, SPLEN2010912, SPLEN2010978, SPLEN2010986, SPLEN2011018, SPLEN2011021, SPLEN2011025, SPLEN2011086, SPLEN2011139, SPLEN2011145, SPLEN2011248, SPLEN2011252, SPLEN2011419, SPLEN2011422, SPLEN2011672,

[1287] SPLEN2011678, SPLEN2011758, SPLEN2011766, SPLEN2011805, SPLEN2011820, SPLEN2011830, SPLEN2011931, SPLEN2011981, SPLEN2012115, SPLEN2012175, SPLEN2012179, SPLEN2012185, SPLEN2012234, SPLEN2012453, SPLEN2012524, SPLEN2012525, SPLEN2012571, SPLEN2012606, SPLEN2012619, SPLEN2012624, SPLEN2012725, SPLEN2012743, SPLEN2012756, SPLEN2012846, SPLEN2012889, SPLEN2012961, SPLEN2013108, SPLEN2013195, SPLEN2013644, SPLEN2013648, SPLEN2013670, SPLEN2013673, SPLEN2013690, SPLEN2013714, SPLEN2013753, SPLEN2013821, SPLEN2013857, SPLEN2013860, SPLEN2013910, SPLEN2013923, SPLEN2014041, SPLEN2014063, SPLEN2014073, SPLEN2014080, SPLEN2014119, SPLEN2014136, SPLEN2014199, SPLEN2014210, SPLEN2014293, SPLEN2014318,

[1288] SPLEN2014381, SPLEN2014452, SPLEN2014454, SPLEN2014486, SPLEN2014543, SPLEN2014572, SPLEN2014645, SPLEN2014669, SPLEN2014739, SPLEN2014860, SPLEN2014865, SPLEN2014919, SPLEN2014920, SPLEN2014924, SPLEN2014937, SPLEN2014946, SPLEN2015031, SPLEN2015094, SPLEN2015121, SPLEN2015129, SPLEN2015158, SPLEN2015166, SPLEN2015216, SPLEN2015258, SPLEN2015261, SPLEN2015267, SPLEN2015276, SPLEN2015415, SPLEN2015433, SPLEN2015593, SPLEN2015674, SPLEN2015679, SPLEN2015707, SPLEN2015746, SPLEN2015788, SPLEN2015815, SPLEN2015890, SPLEN2015891, SPLEN2015899, SPLEN2016045, SPLEN2016053, SPLEN2016069, SPLEN2016098, SPLEN2016135, SPLEN2016139, SPLEN2016241, SPLEN2016250, SPLEN2016268, SPLEN2016304, SPLEN2016356,

[1289] SPLEN2016421, SPLEN2016480, SPLEN2016531, SPLEN2016533, SPLEN2016541, SPLEN2016552, SPLEN2016554, SPLEN2016602, SPLEN2016627, SPLEN2016678, SPLEN2016773, SPLEN2016781, SPLEN2016840, SPLEN2016863, SPLEN2016922, SPLEN2016932, SPLEN2016973, SPLEN2017043, SPLEN2017104, SPLEN2017121, SPLEN2017147, SPLEN2017187, SPLEN2017189, SPLEN2017212, SPLEN2017318, SPLEN2017426, SPLEN2017452, SPLEN2017538, SPLEN2017592, SPLEN2017613, SPLEN2017643, SPLEN2017687, SPLEN2017740, SPLEN2017781, SPLEN2017999, SPLEN2018098, SPLEN2018112, SPLEN2018157, SPLEN2018159, SPLEN2018180, SPLEN2018181, SPLEN2018280, SPLEN2018285, SPLEN2018299, SPLEN2018302, SPLEN2018364, SPLEN2018395, SPLEN2018643, SPLEN2018683, SPLEN2018732,

[1290] SPLEN2018749, SPLEN2018933, SPLEN2019008, SPLEN2019043, SPLEN2019077, SPLEN2019092, SPLEN2019102, SPLEN2019131, SPLEN2019169, SPLEN2019257, SPLEN2019311, SPLEN2019323, SPLEN2019349, SPLEN2019375, SPLEN2019379, SPLEN2019405, SPLEN2019446, SPLEN2019471, SPLEN2019480, SPLEN2019505, SPLEN2019571, SPLEN2019575, SPLEN2019709, SPLEN2019774, SPLEN2019793, SPLEN2019811, SPLEN2019839, SPLEN2019956, SPLEN2019985, SPLEN2020007, SPLEN2020034, SPLEN2020153, SPLEN2020154, SPLEN2020166, SPLEN2020183, SPLEN2020223, SPLEN2020359, SPLEN2020417, SPLEN2020427, SPLEN2020467, SPLEN2020512, SPLEN2020608, SPLEN2020777, SPLEN2020805, SPLEN2021057, SPLEN2021122, SPLEN2021157, SPLEN2021231, SPLEN2021273, SPLEN2021295,

[1291] SPLEN2021298, SPLEN2021383, SPLEN2021417, SPLEN2021440, SPLEN2021458, SPLEN2021463, SPLEN2021560, SPLEN2021701, SPLEN2021795, SPLEN2021983, SPLEN2021991, SPLEN2022040, SPLEN2022162, SPLEN2022227, SPLEN2022522, SPLEN2022591, SPLEN2022785, SPLEN2022920, SPLEN2023024, SPLEN2023118, SPLEN2023160, SPLEN2023423, SPLEN2023710, SPLEN2023733, SPLEN2023791, SPLEN2023977, SPLEN2024070, SPLEN2024127, SPLEN2024232, SPLEN2024273, SPLEN2024383, SPLEN2024489, SPLEN2024530, SPLEN2024571, SPLEN2024577, SPLEN2024617, SPLEN2024737, SPLEN2024922, SPLEN2024956, SPLEN2024990, SPLEN2025012, SPLEN2025017, SPLEN2025039, SPLEN2025219, SPLEN2025491, SPLEN2025626, SPLEN2025820, SPLEN2026144, SPLEN2026411, SPLEN2026765,

[1292] SPLEN2027113, SPLEN2027157, SPLEN2027395, SPLEN2027488, SPLEN2027780, SPLEN2027852, SPLEN2027868, SPLEN2027995, SPLEN2028046, SPLEN2028066, SPLEN2028138, SPLEN2028365, SPLEN2028417, SPLEN2028424, SPLEN2028593, SPLEN2028844, SPLEN2028994, SPLEN2029051, SPLEN2029176, SPLEN2029295, SPLEN2029380, SPLEN2029522, SPLEN2029683, SPLEN2029727, SPLEN2029904, SPLEN2030250, SPLEN2030335, SPLEN2030371, SPLEN2030397, SPLEN2030479, SPLEN2030495, SPLEN2030562, SPLEN2030763, SPLEN2030847, SPLEN2031004, SPLEN2031125, SPLEN2031424, SPLEN2031674, SPLEN2031724, SPLEN2031780, SPLEN2032036, SPLEN2032112, SPLEN2032154, SPLEN2032157, SPLEN2032321, SPLEN2032356, SPLEN2032677, SPLEN2032813, SPLEN2032924, SPLEN2033098,

[1293] SPLEN2033153, SPLEN2033333, SPLEN2033490, SPLEN2033539, SPLEN2033921, SPLEN2033996, SPLEN2034021, SPLEN2034081, SPLEN2034252, SPLEN2034448, SPLEN2034551, SPLEN2034601, SPLEN2034678, SPLEN2034781, SPLEN2034864, SPLEN2034934, SPLEN2035318, SPLEN2035615, SPLEN2036076, SPLEN2036103, SPLEN2036326, SPLEN2036475, SPLEN2036501, SPLEN2036579, SPLEN2036608, SPLEN2036702, SPLEN2036712, SPLEN2036821, SPLEN2036932, SPLEN2036953, SPLEN2037077, SPLEN2037194, SPLEN2037319, SPLEN2037444, SPLEN2037580, SPLEN2037630, SPLEN2037678, SPLEN2037891, SPLEN2038055, SPLEN2038180, SPLEN2038345, SPLEN2038407, SPLEN2038834, SPLEN2039311, SPLEN2039379, SPLEN2039672, SPLEN2039697, SPLEN2039845, SPLEN2039936, SPLEN2040222,

[1294] SPLEN2040237, SPLEN2040824, SPLEN2041304, SPLEN2041310, SPLEN2041585, SPLEN2041645, SPLEN2041700, SPLEN2041720, SPLEN2041977, SPLEN2042051, SPLEN2042303, SPLEN2042521, SPLEN2042535, SPLEN2042598, SPLEN2042714, STOMA1000013, STOMA1000052, STOMA1000074, STOMA1000091, STOMA1000117, STOMA1000133, STOMA1000175, STOMA1000186, STOMA1000190, STOMA1000191, STOMA2000032, STOMA2000072, STOMA2000088, STOMA2000104, STOMA2000121, STOMA2000148, STOMA2000168, STOMA2000183, STOMA2000188, STOMA2000279, STOMA2000289, STOMA2000383, STOMA2000386, STOMA2000395, STOMA2000396, STOMA2000478, STOMA2000482, STOMA2000539, STOMA2000567, STOMA2000640, STOMA2000678, STOMA2000686, STOMA2000888, STOMA2001025, STOMA2002052,

[1295] STOMA2002141, STOMA2002367, STOMA2002688, STOMA2002828, STOMA2003158, STOMA2003289, STOMA2003444, STOMA2003477, STOMA2003646, STOMA2003716, STOMA2003781, STOMA2003894, STOMA2004194, STOMA2004294, STOMA2004663, STOMA2004668, STOMA2004852, STOMA2004873, STOMA2004884, STOMA2004893, STOMA2004925, STOMA2005120, STOMA2005664, STOMA2005667, STOMA2005746, STOMA2005782, STOMA2006181, STOMA2006213, STOMA2006229, STOMA2006325, STOMA2006330, STOMA2006398, STOMA2006447, STOMA2006780, STOMA2006904, STOMA2007269, STOMA2007680, STOMA2007745, STOMA2008050, STOMA2008361, STOMA2008546, STOMA2008614, STOMA2008638, STOMA2008838, STOMA2009250, STOMA2009253, STOMA2009256, STOMA2009289, SYNOV1000049, SYNOV1000118,

[1296] SYNOV1000128, SYNOV1000164, SYNOV1000190, SYNOV1000256, SYNOV1000374, SYNOV2000152, SYNOV2000171, SYNOV2000173, SYNOV2000177, SYNOV2000178, SYNOV2000193, SYNOV2000251, SYNOV2000279, SYNOV2000291, SYNOV2000297, SYNOV2000397, SYNOV2000426, SYNOV2000601, SYNOV2000700, SYNOV2000820, SYNOV2000824, SYNOV2000923, SYNOV2001014, SYNOV2001033, SYNOV2001035, SYNOV2001088, SYNOV2001111, SYNOV2001212, SYNOV2001251, SYNOV2001262, SYNOV2001300, SYNOV2001356, SYNOV2001390, SYNOV2001451, SYNOV2001457, SYNOV2001468, SYNOV2001581, SYNOV2001648, SYNOV2001660, SYNOV2003326, SYNOV2005216, SYNOV2005448, SYNOV2005541, SYNOV2005673, SYNOV2005817, SYNOV2005962, SYNOV2006430, SYNOV2006620, SYNOV2007758, SYNOV2007965,

[1297] SYNOV2008765, SYNOV2011233, SYNOV2012326, SYNOV2013365, SYNOV2013637, SYNOV2014157, SYNOV2014364, SYNOV2016124, SYNOV2016837, SYNOV2017055, SYNOV2017179, SYNOV2018921, SYNOV2019280, SYNOV2020085, SYNOV2020463, SYNOV2021320, SYNOV2021953, SYNOV3000184, SYNOV3000231, SYNOV3000302, SYNOV3000345, SYNOV4000249, SYNOV4000472, SYNOV4000598, SYNOV4000706, SYNOV4001224, SYNOV4001326, SYNOV4001342, SYNOV4001395, SYNOV4002001, SYNOV4002392, SYNOV4002875, SYNOV4002883, SYNOV4003174, SYNOV4003322, SYNOV4003681, SYNOV4003981, SYNOV4004184, SYNOV4004741, SYNOV4004823, SYNOV4004914, SYNOV4005256, SYNOV4005570, SYNOV4005739, SYNOV4005889, SYNOV4005981, SYNOV4005989, SYNOV4006256, SYNOV4006327, SYNOV4006542,

[1298] SYNOV4007012, SYNOV4007215, SYNOV4007360, SYNOV4007430, SYNOV4007521, SYNOV4007553, SYNOV4007711, SYNOV4008245, SYNOV4008336, SYNOV4009129, SYNOV4009139, SYNOV4009298, SYNOV4009575, T1ESE2000116, T1ESE2000609, T1ESE2000904, T1ESE2002665, TBAES2000004, TBAES2000116, TBAES2000255, TBAES2000315, TBAES2000352, TBAES2000932, TBAES2001171, TBAES2001220, TBAES2001229, TBAES2001296, TBAES2001492, TBAES2001553, TBAES2001751, TBAES2003435, TBAES2003492, TBAES2003550, TBAES2003702, TBAES2003917, TBAES2004055, TBAES2004105, TBAES2004939, TBAES2005157, TBAES2005361, TBAES2005543, TBAES2006568, TBAES2006881, TBAES2007379, TBAES2007481, TBAES2007504, TBAES2007548, TBAES2007697, TBAES2007862, TBAES2007964,

[1299] TBAES2008133, TCERX2000171, TCERX2000613, TCERX2000998, TCERX2002644, TCOLN1000037, TCOLN1000180, TCOLN2000139, TCOLN2000236, TCOLN2000641, TCOLN2001268, TCOLN2002047, TCOLN2002278, TESOP1000035, TESOP1000160, TESOP2000083, TESOP2000090, TESOP2000205, TESOP2000312, TESOP2000390, TESOP2000400, TESOP2000510, TESOP2000527, TESOP2000569, TESOP2000739, TESOP2000801, TESOP2001122, TESOP2001166, TESOP2001345, TESOP2001474, TESOP2001796, TESOP2001818, TESOP2001849, TESOP2001865, TESOP2001901, TESOP2001953, TESOP2002005, TESOP2002110, TESOP2002150, TESOP2002273, TESOP2002451, TESOP2002489, TESOP2002539, TESOP2002545, TESOP2002804, TESOP2002950, TESOP2003273, TESOP2003308, TESOP2003553, TESOP2003753,

[1300] TESOP2004110, TESOP2004114, TESOP2004173, TESOP2004214, TESOP2005199, TESOP2005285, TESOP2005485, TESOP2005498, TESOP2005579, TESOP2006041, TESOP2006053, TESOP2006060, TESOP2006068, TESOP2006110, TESOP2006398, TESOP2006670, TESOP2006704, TESOP2006746, TESOP2006865, TESOP2006893, TESOP2007041, TESOP2007052, TESOP2007262, TESOP2007384, TESOP2007636, TESOP2007674, TESOP2007688, TESOP2007725, TESOP2007912, TESOP2007978, TESOP2008127, TESOP2008552, TESOP2008556, TESOP2008563, TESOP2008820, TESOP2009121, TESOP2009201, TESOP2009247, TESOP2009555, TESTI1000018, TESTI1000019, TESTI1000025, TESTI1000029, TESTI1000030, TESTI1000042, TESTI1000045, TESTI1000051, TESTI1000055, TESTI1000064, TESTI1000085,

[1301] TESTI1000088, TESTI1000093, TESTI1000094, TESTI1000096, TESTI1000101, TESTI1000109, TESTI1000125, TESTI1000127, TESTI1000128, TESTI1000131, TESTI1000138, TESTI1000142, TESTI1000157, TESTI1000163, TESTI1000169, TESTI1000179, TESTI1000183, TESTI1000191, TESTI1000257, TESTI1000266, TESTI1000319, TESTI1000330, TESTI1000348, TESTI1000390, TESTI1000391, TESTI1000459, TESTI1000491, TESTI1000545, TESTI2000006, TESTI2000018, TESTI2000044, TESTI2000100, TESTI2000117, TESTI2000120, TESTI2000147, TESTI2000154, TESTI2000172, TESTI2000177, TESTI2000179, TESTI2000184, TESTI2000207, TESTI2000208, TESTI2000221, TESTI2000238, TESTI2000253, TESTI2000272, TESTI2000278, TESTI2000349, TESTI2000356, TESTI2000358,

[1302] TESTI2000372, TESTI2000427, TESTI2000431, TESTI2000435, TESTI2000443, TESTI2000452, TESTI2000462, TESTI2000489, TESTI2000520, TESTI2000571, TESTI2000591, TESTI2000598, TESTI2000600, TESTI2000616, TESTI2000627, TESTI2000644, TESTI2000671, TESTI2000683, TESTI2000689, TESTI2000695, TESTI2000699, TESTI2000707, TESTI2000745, TESTI2000756, TESTI2000762, TESTI2000784, TESTI2000808, TESTI2000819, TESTI2000830, TESTI2000840, TESTI2000849, TESTI2000850, TESTI2000874, TESTI2000883, TESTI2000909, TESTI2000951, TESTI2000970, TESTI2000981, TESTI2001008, TESTI2001049, TESTI2001082, TESTI2001134, TESTI2001141, TESTI2001180, TESTI2001208, TESTI2001229, TESTI2001236, TESTI2001237, TESTI2001306, TESTI2001313,

[1303] TESTI2001330, TESTI2001339, TESTI2001345, TESTI2001352, TESTI2001364, TESTI2001412, TESTI2001420, TESTI2001498, TESTI2001511, TESTI2001512, TESTI2001518, TESTI2001556, TESTI2001593, TESTI2001613, TESTI2001621, TESTI2001661, TESTI2001665, TESTI2001671, TESTI2001697, TESTI2001725, TESTI2001758, TESTI2001766, TESTI2001792, TESTI2001793, TESTI2001795, TESTI2001812, TESTI2001815, TESTI2001823, TESTI2001826, TESTI2001827, TESTI2001852, TESTI2001862, TESTI2001869, TESTI2001879, TESTI2001894, TESTI2001898, TESTI2001915, TESTI2001950, TESTI2001959, TESTI2001968, TESTI2001985, TESTI2001991, TESTI2002002, TESTI2002012, TESTI2002036, TESTI2002048, TESTI2002057, TESTI2002081, TESTI2002090, TESTI2002105,

[1304] TESTI2002149, TESTI2002216, TESTI2002223, TESTI2002245, TESTI2002251, TESTI2002256, TESTI2002264, TESTI2002282, TESTI2002293, TESTI2002294, TESTI2002326, TESTI2002351, TESTI2002361, TESTI2002365, TESTI2002369, TESTI2002406, TESTI2002415, TESTI2002423, TESTI2002453, TESTI2002461, TESTI2002465, TESTI2002467, TESTI2002498, TESTI2002516, TESTI2002544, TESTI2002578, TESTI2002580, TESTI2002618, TESTI2002676, TESTI2002690, TESTI2002696, TESTI2002698, TESTI2002700, TESTI2002724, TESTI2002729, TESTI2002752, TESTI2002753, TESTI2002789, TESTI2002802, TESTI2002806, TESTI2002840, TESTI2002877, TESTI2002910, TESTI2002912, TESTI2002928, TESTI2002937, TESTI2002965, TESTI2002993, TESTI2003005, TESTI2003020,

[1305] TESTI2003031, TESTI2003037, TESTI2003044, TESTI2003059, TESTI2003061, TESTI2003071, TESTI2003074, TESTI2003089, TESTI2003104, TESTI2003109, TESTI2003117, TESTI2003127, TESTI2003130, TESTI2003131, TESTI2003139, TESTI2003141, TESTI2003152, TESTI2003181, TESTI2003193, TESTI2003196, TESTI2003228, TESTI2003236, TESTI2003255, TESTI2003258, TESTI2003277, TESTI2003299, TESTI2003311, TESTI2003321, TESTI2003327, TESTI2003330, TESTI2003347, TESTI2003354, TESTI2003356, TESTI2003372, TESTI2003376, TESTI2003413, TESTI2003418, TESTI2003419, TESTI2003432, TESTI2003454, TESTI2003475, TESTI2003476, TESTI2003498, TESTI2003512, TESTI2003539, TESTI2003541, TESTI2003545, TESTI2003551, TESTI2003574, TESTI2003579,

[1306] TESTI2003580, TESTI2003589, TESTI2003596, TESTI2003598, TESTI2003615, TESTI2003638, TESTI2003649, TESTI2003692, TESTI2003718, TESTI2003727, TESTI2003756, TESTI2003768, TESTI2003781, TESTI2003787, TESTI2003824, TESTI2003827, TESTI2003894, TESTI2003911, TESTI2003914, TESTI2003940, TESTI2003962, TESTI2003998, TESTI2004000, TESTI2004073, TESTI2004080, TESTI2004085, TESTI2004089, TESTI2004111, TESTI2004119, TESTI2004122, TESTI2004153, TESTI2004163, TESTI2004169, TESTI2004207, TESTI2004215, TESTI2004227, TESTI2004229, TESTI2004243, TESTI2004255, TESTI2004287, TESTI2004295, TESTI2004313, TESTI2004318, TESTI2004322, TESTI2004391, TESTI2004399, TESTI2004423, TESTI2004432, TESTI2004452, TESTI2004459,

[1307] TESTI2004490, TESTI2004539, TESTI2004552, TESTI2004560, TESTI2004574, TESTI2004601, TESTI2004611, TESTI2004649, TESTI2004654, TESTI2004675, TESTI2004687, TESTI2004689, TESTI2004700, TESTI2004706, TESTI2004734, TESTI2004783, TESTI2004791, TESTI2004793, TESTI2004860, TESTI2004906, TESTI2004920, TESTI2004929, TESTI2004936, TESTI2004941, TESTI2004971, TESTI2004982, TESTI2004993, TESTI2004994, TESTI2004999, TESTI2005025, TESTI2005040, TESTI2005060, TESTI2005072, TESTI2005085, TESTI2005120, TESTI2005153, TESTI2005155, TESTI2005267, TESTI2005268, TESTI2005280, TESTI2005307, TESTI2005326, TESTI2005363, TESTI2005376, TESTI2005378, TESTI2005380, TESTI2005391, TESTI2005395, TESTI2005396, TESTI2005415,

[1308] TESTI2005470, TESTI2005492, TESTI2005564, TESTI2005568, TESTI2005584, TESTI2005588, TESTI2005590, TESTI2005603, TESTI2005609, TESTI2005610, TESTI2005630, TESTI2005672, TESTI2005683, TESTI2005690, TESTI2005692, TESTI2005703, TESTI2005720, TESTI2005731, TESTI2005739, TESTI2005742, TESTI2005759, TESTI2005767, TESTI2005775, TESTI2005784, TESTI2005827, TESTI2005835, TESTI2005860, TESTI2005892, TESTI2005911, TESTI2005933, TESTI2005937, TESTI2005948, TESTI2005979, TESTI2005981, TESTI2005982, TESTI2005984, TESTI2005986, TESTI2005987, TESTI2006007, TESTI2006008, TESTI2006015, TESTI2006016, TESTI2006035, TESTI2006040, TESTI2006041, TESTI2006045, TESTI2006051, TESTI2006067, TESTI2006083, TESTI2006109,

[1309] TESTI2006111, TESTI2006125, TESTI2006179, TESTI2006209, TESTI2006210, TESTI2006212, TESTI2006218, TESTI2006238, TESTI2006255, TESTI2006258, TESTI2006278, TESTI2006333, TESTI2006341, TESTI2006360, TESTI2006383, TESTI2006409, TESTI2006425, TESTI2006437, TESTI2006457, TESTI2006460, TESTI2006465, TESTI2006483, TESTI2006499, TESTI2006523, TESTI2006543, TESTI2006565, TESTI2006572, TESTI2006615, TESTI2006617, TESTI2006624, TESTI2006628, TESTI2006633, TESTI2006643, TESTI2006648, TESTI2006659, TESTI2006660, TESTI2006665, TESTI2006667, TESTI2006677, TESTI2006720, TESTI2006735, TESTI2006744, TESTI2006774, TESTI2006853, TESTI2006866, TESTI2006872, TESTI2006877, TESTI2006879, TESTI2006894, TESTI2006940,

[1310] TESTI2006955, TESTI2006978, TESTI2006979, TESTI2006990, TESTI2007040, TESTI2007074, TESTI2007078, TESTI2007113, TESTI2007152, TESTI2007163, TESTI2007183, TESTI2007211, TESTI2007220, TESTI2007234, TESTI2007320, TESTI2007346, TESTI2007358, TESTI2007402, TESTI2007405, TESTI2007407, TESTI2007422, TESTI2007452, TESTI2007464, TESTI2007466, TESTI2007480, TESTI2007490, TESTI2007502, TESTI2007524, TESTI2007533, TESTI2007576, TESTI2007613, TESTI2007657, TESTI2007685, TESTI2007692, TESTI2007749, TESTI2007750, TESTI2007808, TESTI2007814, TESTI2007829, TESTI2007864, TESTI2007867, TESTI2007872, TESTI2007906, TESTI2007922, TESTI2007951, TESTI2007972, TESTI2007973, TESTI2008014, TESTI2008020, TESTI2008032,

[1311] TESTI2008033, TESTI2008046, TESTI2008081, TESTI2008099, TESTI2008139, TESTI2008144, TESTI2008161, TESTI2008189, TESTI2008204, TESTI2008219, TESTI2008234, TESTI2008237, TESTI2008278, TESTI2008320, TESTI2008331, TESTI2008343, TESTI2008387, TESTI2008389, TESTI2008394, TESTI2008405, TESTI2008420, TESTI2008425, TESTI2008440, TESTI2008567, TESTI2008595, TESTI2008621, TESTI2008636, TESTI2008657, TESTI2008684, TESTI2008699, TESTI2008715, TESTI2008762, TESTI2008774, TESTI2008786, TESTI2008822, TESTI2008835, TESTI2008847, TESTI2008884, TESTI2008901, TESTI2008929, TESTI2008946, TESTI2008960, TESTI2009018, TESTI2009091, TESTI2009097, TESTI2009136, TESTI2009185, TESTI2009190, TESTI2009217, TESTI2009239,

[1312] TESTI2009325, TESTI2009388, TESTI2009390, TESTI2009400, TESTI2009402, TESTI2009412, TESTI2009447, TESTI2009462, TESTI2009474, TESTI2009477, TESTI2009497, TESTI2009502, TESTI2009511, TESTI2009544, TESTI2009545, TESTI2009551, TESTI2009585, TESTI2009588, TESTI2009683, TESTI2009727, TESTI2009739, TESTI2009812, TESTI2009835, TESTI2009853, TESTI2009935, TESTI2009987, TESTI2010009, TESTI2010154, TESTI2010180, TESTI2010239, TESTI2010280, TESTI2010354, TESTI2010396, TESTI2010400, TESTI2010409, TESTI2010513, TESTI2010572, TESTI2010587, TESTI2010591, TESTI2010617, TESTI2010682, TESTI2010724, TESTI2010732, TESTI2010734, TESTI2010755, TESTI2010793, TESTI2010806, TESTI2010833, TESTI2010872, TESTI2011009,

[1313] TESTI2011020, TESTI2011028, TESTI2011033, TESTI2011254, TESTI2011286, TESTI2011294, TESTI2011314, TESTI2011315, TESTI2011394, TESTI2011407, TESTI2011448, TESTI2011480, TESTI2011549, TESTI2011575, TESTI2011612, TESTI2011665, TESTI2011680, TESTI2011683, TESTI2011712, TESTI2011750, TESTI2011840, TESTI2011846, TESTI2011915, TESTI2011928, TESTI2011971, TESTI2012019, TESTI2012050, TESTI2012090, TESTI2012095, TESTI2012104, TESTI2012152, TESTI2012155, TESTI2012171, TESTI2012207, TESTI2012231, TESTI2012244, TESTI2012308, TESTI2012356, TESTI2012387, TESTI2012394, TESTI2012444, TESTI2012511, TESTI2012528, TESTI2012544, TESTI2012550, TESTI2012571, TESTI2012592, TESTI2012617, TESTI2012628, TESTI2012812,

[1314] TESTI2012834, TESTI2012835, TESTI2012861, TESTI2012900, TESTI2012915, TESTI2012922, TESTI2013001, TESTI2013012, TESTI2013053, TESTI2013144, TESTI2013163, TESTI2013169, TESTI2013212, TESTI2013231, TESTI2013257, TESTI2013264, TESTI2013268, TESTI2013295, TESTI2013322, TESTI2013381, TESTI2013382, TESTI2013401, TESTI2013427, TESTI2013468, TESTI2013497, TESTI2013545, TESTI2013546, TESTI2013566, TESTI2013601, TESTI2013604, TESTI2013607, TESTI2013610, TESTI2013691, TESTI2013699, TESTI2013737, TESTI2013767, TESTI2013832, TESTI2013873, TESTI2013889, TESTI2014007, TESTI2014036, TESTI2014097, TESTI2014160, TESTI2014248, TESTI2014254, TESTI2014269, TESTI2014274, TESTI2014318, TESTI2014324, TESTI2014339,

[1315] TESTI2014362, TESTI2014385, TESTI2014415, TESTI2014439, TESTI2014474, TESTI2014505, TESTI2014577, TESTI2014578, TESTI2014716, TESTI2014780, TESTI2014800, TESTI2014838, TESTI2014843, TESTI2014979, TESTI2014988, TESTI2015042, TESTI2015092, TESTI2015105, TESTI2015180, TESTI2015246, TESTI2015249, TESTI2015327, TESTI2015331, TESTI2015335, TESTI2015350, TESTI2015375, TESTI2015437, TESTI2015590, TESTI2015610, TESTI2015647, TESTI2015675, TESTI2015710, TESTI2015752, TESTI2015830, TESTI2015914, TESTI2015938, TESTI2015947, TESTI2015962, TESTI2015987, TESTI2016033, TESTI2016046, TESTI2016101, TESTI2016162, TESTI2016197, TESTI2016278, TESTI2016298, TESTI2016331, TESTI2016337, TESTI2016410, TESTI2016421,

[1316] TESTI2016509, TESTI2016568, TESTI2016583, TESTI2016599, TESTI2016629, TESTI2016663, TESTI2016667, TESTI2016688, TESTI2016701, TESTI2016758, TESTI2016848, TESTI2016863, TESTI2016888, TESTI2016896, TESTI2016922, TESTI2016942, TESTI2016950, TESTI2016996, TESTI2017017, TESTI2017028, TESTI2017035, TESTI2017069, TESTI2017089, TESTI2017102, TESTI2017107, TESTI2017113, TESTI2017125, TESTI2017256, TESTI2017305, TESTI2017311, TESTI2017396, TESTI2017507, TESTI2017537, TESTI2017582, TESTI2017584, TESTI2017645, TESTI2017727, TESTI2017740, TESTI2017775, TESTI2017816, TESTI2017832, TESTI2017923, TESTI2017932, TESTI2017951, TESTI2018014, TESTI2018031, TESTI2018035, TESTI2018060, TESTI2018083, TESTI2018178,

[1317] TESTI2018221, TESTI2018276, TESTI2018290, TESTI2018335, TESTI2018337, TESTI2018368, TESTI2018421, TESTI2018428, TESTI2018475, TESTI2018482, TESTI2018521, TESTI2018565, TESTI2018581, TESTI2018687, TESTI2018697, TESTI2018838, TESTI2018867, TESTI2018941, TESTI2018957, TESTI2018974, TESTI2018975, TESTI2018997, TESTI2019042, TESTI2019077, TESTI2019228, TESTI2019257, TESTI2019280, TESTI2019282, TESTI2019308, TESTI2019336, TESTI2019352, TESTI2019406, TESTI2019430, TESTI2019455, TESTI2019481, TESTI2019488, TESTI2019501, TESTI2019648, TESTI2019669, TESTI2019697, TESTI2019729, TESTI2019760, TESTI2019787, TESTI2019794, TESTI2019854, TESTI2019859, TESTI2019860, TESTI2019872, TESTI2019911, TESTI2019917,

[1318] TESTI2019975, TESTI2019998, TESTI2020012, TESTI2020026, TESTI2020029, TESTI2020071, TESTI2020084, TESTI2020265, TESTI2020283, TESTI2020316, TESTI2020344, TESTI2020379, TESTI2020426, TESTI2020445, TESTI2020510, TESTI2020515, TESTI2020525, TESTI2020579, TESTI2020717, TESTI2020840, TESTI2020871, TESTI2020905, TESTI2020906, TESTI2020946, TESTI2020956, TESTI2020981, TESTI2020999, TESTI2021003, TESTI2021038, TESTI2021057, TESTI2021077, TESTI2021112, TESTI2021114, TESTI2021116, TESTI2021118, TESTI2021122, TESTI2021124, TESTI2021138, TESTI2021297, TESTI2021315, TESTI2021358, TESTI2021425, TESTI2021447, TESTI2021463, TESTI2021531, TESTI2021599, TESTI2021637, TESTI2021654, TESTI2021667, TESTI2021736,

[1319] TESTI2021785, TESTI2021819, TESTI2021851, TESTI2021895, TESTI2021911, TESTI2021939, TESTI2021999, TESTI2022010, TESTI2022023, TESTI2022065, TESTI2022086, TESTI2022179, TESTI2022203, TESTI2022246, TESTI2022323, TESTI2022338, TESTI2022400, TESTI2022462, TESTI2022495, TESTI2022623, TESTI2022649, TESTI2022652, TESTI2022738, TESTI2022798, TESTI2022812, TESTI2022814, TESTI2022874, TESTI2022940, TESTI2022952, TESTI2023025, TESTI2023033, TESTI2023053, TESTI2023085, TESTI2023192, TESTI2023194, TESTI2023214, TESTI2023254, TESTI2023386, TESTI2023414, TESTI2023427, TESTI2023436, TESTI2023599, TESTI2023752, TESTI2023800, TESTI2023861, TESTI2023903, TESTI2023942, TESTI2023947, TESTI2023951, TESTI2023968,

[1320] TESTI2024009, TESTI2024090, TESTI2024125, TESTI2024153, TESTI2024192, TESTI2024267, TESTI2024283, TESTI2024299, TESTI2024419, TESTI2024422, TESTI2024443, TESTI2024446, TESTI2024473, TESTI2024476, TESTI2024498, TESTI2024560, TESTI2024567, TESTI2024586, TESTI2024598, TESTI2024641, TESTI2024648, TESTI2024718, TESTI2024744, TESTI2024864, TESTI2024885, TESTI2024936, TESTI2024978, TESTI2024999, TESTI2025006, TESTI2025013, TESTI2025022, TESTI2025063, TESTI2025117, TESTI2025144, TESTI2025161, TESTI2025174, TESTI2025229, TESTI2025269, TESTI2025365, TESTI2025403, TESTI2025409, TESTI2025422, TESTI2025448, TESTI2025454, TESTI2025486, TESTI2025546, TESTI2025582, TESTI2025609, TESTI2025656, TESTI2025757,

[1321] TESTI2025791, TESTI2025846, TESTI2025872, TESTI2025879, TESTI2025911, TESTI2025920, TESTI2025924, TESTI2026014, TESTI2026024, TESTI2026064, TESTI2026077, TESTI2026104, TESTI2026116, TESTI2026134, TESTI2026168, TESTI2026196, TESTI2026218, TESTI2026233, TESTI2026291, TESTI2026294, TESTI2026401, TESTI2026403, TESTI2026453, TESTI2026461, TESTI2026491, TESTI2026505, TESTI2026515, TESTI2026525, TESTI2026534, TESTI2026537, TESTI2026589, TESTI2026597, TESTI2026605, TESTI2026647, TESTI2026674, TESTI2026794, TESTI2026824, TESTI2026854, TESTI2026925, TESTI2026936, TESTI2026957, TESTI2027013, TESTI2027019, TESTI2027108, TESTI2027165, TESTI2027171, TESTI2027173, TESTI2027179, TESTI2027185, TESTI2027206,

[1322] TESTI2027238, TESTI2027239, TESTI2027243, TESTI2027296, TESTI2027378, TESTI2027411, TESTI2027450, TESTI2027496, TESTI2027503, TESTI2027562, TESTI2027615, TESTI2027645, TESTI2027730, TESTI2027736, TESTI2027791, TESTI2027820, TESTI2027828, TESTI2027840, TESTI2027909, TESTI2028098, TESTI2028151, TESTI2028242, TESTI2028253, TESTI2028254, TESTI2028269, TESTI2028290, TESTI2028296, TESTI2028384, TESTI2028426, TESTI2028488, TESTI2028523, TESTI2028583, TESTI2028613, TESTI2028659, TESTI2028662, TESTI2028670, TESTI2028705, TESTI2028776, TESTI2028811, TESTI2028891, TESTI2028985, TESTI2028997, TESTI2029131, TESTI2029162, TESTI2029196, TESTI2029201, TESTI2029227, TESTI2029244, TESTI2029249, TESTI2029252,

[1323] TESTI2029259, TESTI2029264, TESTI2029470, TESTI2029672, TESTI2029785, TESTI2029880, TESTI2030136, TESTI2030322, TESTI2030336, TESTI2030342, TESTI2030519, TESTI2030554, TESTI2030556, TESTI2030728, TESTI2030754, TESTI2030770, TESTI2030860, TESTI2030901, TESTI2030917, TESTI2030930, TESTI2031006, TESTI2031007, TESTI2031060, TESTI2031129, TESTI2031356, TESTI2031418, TESTI2031504, TESTI2031529, TESTI2031687, TESTI2031760, TESTI2031809, TESTI2031919, TESTI2031935, TESTI2031986, TESTI2032044, TESTI2032067, TESTI2032079, TESTI2032643, TESTI2032681, TESTI2032761, TESTI2032768, TESTI2032774, TESTI2032828, TESTI2033031, TESTI2033242, TESTI2033254, TESTI2033300, TESTI2033395, TESTI2033453, TESTI2033505,

[1324] TESTI2033520, TESTI2033641, TESTI2033710, TESTI2033905, TESTI2034187, TESTI2034243, TESTI2034249, TESTI2034307, TESTI2034357, TESTI2034401, TESTI2034407, TESTI2034506, TESTI2034520, TESTI2034718, TESTI2034730, TESTI2034749, TESTI2034767, TESTI2034774, TESTI2034777, TESTI2034785, TESTI2034799, TESTI2034847, TESTI2034913, TESTI2034931, TESTI2034953, TESTI2034997, TESTI2035003, TESTI2035078, TESTI2035084, TESTI2035107, TESTI2035121, TESTI2035124, TESTI2035183, TESTI2035236, TESTI2035262, TESTI2035309, TESTI2035688, TESTI2035775, TESTI2035793, TESTI2035898, TESTI2035962, TESTI2035981, TESTI2035997, TESTI2036114, TESTI2036129, TESTI2036285, TESTI2036288, TESTI2036513, TESTI2036589, TESTI2036650,

[1325] TESTI2036684, TESTI2036691, TESTI2036736, TESTI2036822, TESTI2036833, TESTI2036913, TESTI2036922, TESTI2036951, TESTI2036965, TESTI2036969, TESTI2037002, TESTI2037055, TESTI2037081, TESTI2037085, TESTI2037103, TESTI2037106, TESTI2037111, TESTI2037209, TESTI2037255, TESTI2037359, TESTI2037375, TESTI2037382, TESTI2037534, TESTI2037569, TESTI2037572, TESTI2037643, TESTI2037657, TESTI2037673, TESTI2037723, TESTI2037819, TESTI2037830, TESTI2037845, TESTI2037877, TESTI2037976, TESTI2038048, TESTI2038065, TESTI2038104, TESTI2038275, TESTI2038388, TESTI2038573, TESTI2038596, TESTI2038623, TESTI2038644, TESTI2038733, TESTI2038858, TESTI2038958, TESTI2039025, TESTI2039026, TESTI2039038, TESTI2039041,

[1326] TESTI2039060, TESTI2039113, TESTI2039121, TESTI2039177, TESTI2039209, TESTI2039225, TESTI2039227, TESTI2039276, TESTI2039342, TESTI2039353, TESTI2039544, TESTI2039613, TESTI2039707, TESTI2039732, TESTI2039738, TESTI2039776, TESTI2039867, TESTI2039908, TESTI2040018, TESTI2040102, TESTI2040128, TESTI2040143, TESTI2040297, TESTI2040372, TESTI2040377, TESTI2040424, TESTI2040642, TESTI2040815, TESTI2040897, TESTI2040944, TESTI2040964, TESTI2040983, TESTI2040989, TESTI2041330, TESTI2041362, TESTI2041517, TESTI2041564, TESTI2041664, TESTI2041730, TESTI2041734, TESTI2041778, TESTI2041800, TESTI2041947, TESTI2041956, TESTI2041976, TESTI2042062, TESTI2042149, TESTI2042264, TESTI2042295, TESTI2042302,

[1327] TESTI2042326, TESTI2042400, TESTI2042450, TESTI2042473, TESTI2042507, TESTI2042508, TESTI2042750, TESTI2042783, TESTI2042806, TESTI2042928, TESTI2042946, TESTI2042958, TESTI2043275, TESTI2043277, TESTI2043282, TESTI2043313, TESTI2043477, TESTI2043585, TESTI2043758, TESTI2043817, TESTI2043857, TESTI2043866, TESTI2043869, TESTI2044064, TESTI2044118, TESTI2044194, TESTI2044276, TESTI2044306, TESTI2044309, TESTI2044413, TESTI2044418, TESTI2044754, TESTI2044788, TESTI2044796, TESTI2044833, TESTI2044892, TESTI2044920, TESTI2044968, TESTI2045139, TESTI2045155, TESTI2045171, TESTI2045199, TESTI2045353, TESTI2045509, TESTI2045562, TESTI2045611, TESTI2045819, TESTI2045850, TESTI2045920, TESTI2045964,

[1328] TESTI2045983, TESTI2046100, TESTI2046188, TESTI2046347, TESTI2046352, TESTI2046358, TESTI2046439, TESTI2046535, TESTI2046536, TESTI2046552, TESTI2046569, TESTI2046686, TESTI2046721, TESTI2046732, TESTI2046786, TESTI2046797, TESTI2046863, TESTI2046872, TESTI2047071, TESTI2047141, TESTI2047147, TESTI2047153, TESTI2047212, TESTI2047342, TESTI2047383, TESTI2047605, TESTI2047792, TESTI2047801, TESTI2047818, TESTI2047824, TESTI2047885, TESTI2047930, TESTI2048105, TESTI2048109, TESTI2048465, TESTI2048603, TESTI2048898, TESTI2049041, TESTI2049062, TESTI2049206, TESTI2049246, TESTI2049277, TESTI2049422, TESTI2049452, TESTI2049469, TESTI2049553, TESTI2049576, TESTI2049857, TESTI2049956, TESTI2050137,

[1329] TESTI2050681, TESTI2050780, TESTI2050987, TESTI2051148, TESTI2051279, TESTI2051488, TESTI2051543, TESTI2051627, TESTI2051742, TESTI2051767, TESTI2051791, TESTI2051806, TESTI2051867, TESTI2051873, TESTI2052110, TESTI2052202, TESTI2052211, TESTI2052256, TESTI2052288, TESTI2052525, TESTI2052670, TESTI2052693, TESTI2052698, TESTI2052799, TESTI2052822, TESTI2052985, TESTI2053151, TESTI2053242, TESTI2053399, TESTI2053526, TESTI2053561, TESTI2053621, TESTI2053667, TESTI2053723, TESTI3000002, TESTI3000005, TESTI4000068, TESTI4000079, TESTI4000093, TESTI4000134, TESTI4000137, TESTI4000153, TESTI4000155, TESTI4000157, TESTI4000183, TESTI4000214, TESTI4000215, TESTI4000228, TESTI4000250, TESTI4000288,

[1330] TESTI4000319, TESTI4000349, TESTI4000370, TESTI4000394, TESTI4000434, TESTI4000462, TESTI4000530, TESTI4000534, TESTI4000598, TESTI4000600, TESTI4000621, TESTI4000703, TESTI4000724, TESTI4000957, TESTI4000970, TESTI4001036, TESTI4001037, TESTI4001060, TESTI4001106, TESTI4001148, TESTI4001176, TESTI4001195, TESTI4001201, TESTI4001206, TESTI4001348, TESTI4001441, TESTI4001467, TESTI4001473, TESTI4001517, TESTI4001527, TESTI4001561, TESTI4001569, TESTI4001604, TESTI4001665, TESTI4001679, TESTI4001795, TESTI4001923, TESTI4001925, TESTI4001984, TESTI4002003, TESTI4002072, TESTI4002141, TESTI4002195, TESTI4002202, TESTI4002290, TESTI4002319, TESTI4002491, TESTI4002520, TESTI4002552, TESTI4002647,

[1331] TESTI4002703, TESTI4002754, TESTI4002868, TESTI4002878, TESTI4002889, TESTI4002988, TESTI4003150, TESTI4003179, TESTI4003279, TESTI4003319, TESTI4003404, TESTI4003565, TESTI4003574, TESTI4003579, TESTI4003602, TESTI4003733, TESTI4003796, TESTI4003944, TESTI4004003, TESTI4004031, TESTI4004200, TESTI4004210, TESTI4004539, TESTI4004626, TESTI4004653, TESTI4004695, TESTI4004722, TESTI4004887, TESTI4004917, TESTI4005015, TESTI4005039, TESTI4005133, TESTI4005158, TESTI4005317, TESTI4005322, TESTI4005399, TESTI4005470, TESTI4005500, TESTI4005534, TESTI4005543, TESTI4005628, TESTI4005801, TESTI4005805, TESTI4005857, TESTI4005961, TESTI4006053, TESTI4006079, TESTI4006112, TESTI4006137, TESTI4006148,

[1332] TESTI4006219, TESTI4006234, TESTI4006308, TESTI4006326, TESTI4006393, TESTI4006407, TESTI4006412, TESTI4006420, TESTI4006441, TESTI4006473, TESTI4006539, TESTI4006546, TESTI4006567, TESTI4006704, TESTI4006728, TESTI4006802, TESTI4006819, TESTI4007064, TESTI4007163, TESTI4007176, TESTI4007203, TESTI4007239, TESTI4007369, TESTI4007373, TESTI4007382, TESTI4007404, TESTI4007489, TESTI4007565, TESTI4007671, TESTI4007775, TESTI4007778, TESTI4007799, TESTI4007810, TESTI4007816, TESTI4007965, TESTI4008007, TESTI4008018, TESTI4008050, TESTI4008058, TESTI4008086, TESTI4008097, TESTI4008176, TESTI4008209, TESTI4008219, TESTI4008250, TESTI4008302, TESTI4008305, TESTI4008401, TESTI4008417, TESTI4008429,

[1333] TESTI4008573, TESTI4008797, TESTI4008816, TESTI4008840, TESTI4008935, TESTI4008993, TESTI4009022, TESTI4009028, TESTI4009034, TESTI4009123, TESTI4009160, TESTI4009215, TESTI4009283, TESTI4009286, TESTI4009306, TESTI4009374, TESTI4009406, TESTI4009454, TESTI4009457, TESTI4009501, TESTI4009563, TESTI4009608, TESTI4009638, TESTI4009752, TESTI4009881, TESTI4009886, TESTI4009928, TESTI4010076, TESTI4010082, TESTI4010095, TESTI4010211, TESTI4010377, TESTI4010475, TESTI4010544, TESTI4010713, TESTI4010721, TESTI4010789, TESTI4010817, TESTI4010831, TESTI4010902, TESTI4010928, TESTI4010979, TESTI4011070, TESTI4011072, TESTI4011084, TESTI4011118, TESTI4011246, TESTI4011484, TESTI4011505, TESTI4011532,

[1334] TESTI4011616, TESTI4011744, TESTI4011745, TESTI4011829, TESTI4011926, TESTI4011956, TESTI4012010, TESTI4012086, TESTI4012258, TESTI4012293, TESTI4012329, TESTI4012382, TESTI4012406, TESTI4012448, TESTI4012451, TESTI4012505, TESTI4012556, TESTI4012623, TESTI4012646, TESTI4012679, TESTI4012911, TESTI4012956, TESTI4012960, TESTI4013365, TESTI4013369, TESTI4013410, TESTI4013602, TESTI4013667, TESTI4013675, TESTI4013685, TESTI4013735, TESTI4013742, TESTI4013774, TESTI4013817, TESTI4013830, TESTI4013852, TESTI4013894, TESTI4013924, TESTI4013960, TESTI4013962, TESTI4014159, TESTI4014175, TESTI4014265, TESTI4014276, TESTI4014306, TESTI4014392, TESTI4014415, TESTI4014445, TESTI4014553, TESTI4014661,

[1335] TESTI4014694, TESTI4014801, TESTI4014818, TESTI4014891, TESTI4014908, TESTI4014924, TESTI4014932, TESTI4014977, TESTI4015012, TESTI4015129, TESTI4015145, TESTI4015204, TESTI4015263, TESTI4015293, TESTI4015299, TESTI4015339, TESTI4015398, TESTI4015442, TESTI4015471, TESTI4015477, TESTI4015600, TESTI4015646, TESTI4015681, TESTI4015688, TESTI4015790, TESTI4016110, TESTI4016238, TESTI4016551, TESTI4016812, TESTI4016822, TESTI4016865, TESTI4016882, TESTI4016925, TESTI4017001, TESTI4017116, TESTI4017137, TESTI4017229, TESTI4017254, TESTI4017269, TESTI4017380, TESTI4017382, TESTI4017543, TESTI4017575, TESTI4017647, TESTI4017714, TESTI4017763, TESTI4017848, TESTI4017854, TESTI4017901, TESTI4017961,

[1336] TESTI4017984, TESTI4018101, TESTI4018152, TESTI4018208, TESTI4018382, TESTI4018436, TESTI4018506, TESTI4018555, TESTI4018751, TESTI4018806, TESTI4018835, TESTI4018859, TESTI4018881, TESTI4018886, TESTI4018938, TESTI4019140, TESTI4019149, TESTI4019299, TESTI4019417, TESTI4019440, TESTI4019566, TESTI4019657, TESTI4019756, TESTI4019843, TESTI4020092, TESTI4020102, TESTI4020342, TESTI4020460, TESTI4020596, TESTI4020806, TESTI4020819, TESTI4020920, TESTI4021129, TESTI4021197, TESTI4021294, TESTI4021377, TESTI4021456, TESTI4021491, TESTI4021569, TESTI4021713, TESTI4021821, TESTI4022158, TESTI4022577, TESTI4022716, TESTI4022873, TESTI4023096, TESTI4023172, TESTI4023546, TESTI4023555, TESTI4023654,

[1337] TESTI4023722, TESTI4023762, TESTI4023942, TESTI4024096, TESTI4024240, TESTI4024245, TESTI4024294, TESTI4024344, TESTI4024387, TESTI4024420, TESTI4024494, TESTI4024740, TESTI4024874, TESTI4024890, TESTI4024907, TESTI4024930, TESTI4025062, TESTI4025268, TESTI4025401, TESTI4025494, TESTI4025547, TESTI4025731, TESTI4025797, TESTI4025865, TESTI4025908, TESTI4025920, TESTI4026079, TESTI4026080, TESTI4026192, TESTI4026207, TESTI4026295, TESTI4026390, TESTI4026456, TESTI4026510, TESTI4026524, TESTI4026680, TESTI4026700, TESTI4026762, TESTI4026785, TESTI4027139, TESTI4027170, TESTI4027262, TESTI4027516, TESTI4027557, TESTI4027660, TESTI4027821, TESTI4027969, TESTI4028042, TESTI4028059, TESTI4028062,

[1338] TESTI4028182, TESTI4028429, TESTI4028612, TESTI4028692, TESTI4028809, TESTI4028823, TESTI4028880, TESTI4028904, TESTI4028938, TESTI4028958, TESTI4028983, TESTI4029023, TESTI4029348, TESTI4029370, TESTI4029528, TESTI4029651, TESTI4029671, TESTI4029676, TESTI4029690, TESTI4029731, TESTI4029743, TESTI4030069, TESTI4030159, TESTI4030319, TESTI4030505, TESTI4030603, TESTI4030669, TESTI4030673, TESTI4030864, TESTI4031066, TESTI4031173, TESTI4031335, TESTI4031745, TESTI4031818, TESTI4032090, TESTI4032112, TESTI4032128, TESTI4032270, TESTI4032375, TESTI4032834, TESTI4032856, TESTI4032895, TESTI4032913, TESTI4033146, TESTI4033177, TESTI4033433, TESTI4033690, TESTI4034172, TESTI4034212, TESTI4034432,

[1339] TESTI4034495, TESTI4034632, TESTI4034633, TESTI4034912, TESTI4034973, TESTI4035063, TESTI4035065, TESTI4035498, TESTI4035508, TESTI4035581, TESTI4035602, TESTI4035637, TESTI4035649, TESTI4035770, TESTI4035872, TESTI4035895, TESTI4035898, TESTI4035989, TESTI4036012, TESTI4036042, TESTI4036048, TESTI4036315, TESTI4036319, TESTI4036449, TESTI4036767, TESTI4036909, TESTI4037066, TESTI4037188, TESTI4037228, TESTI4037244, TESTI4037727, TESTI4037949, TESTI4038047, TESTI4038099, TESTI4038156, TESTI4038223, TESTI4038258, TESTI4038284, TESTI4038339, TESTI4038492, TESTI4038721, TESTI4038758, TESTI4038779, TESTI4038818, TESTI4039038, TESTI4039086, TESTI4039451, TESTI4039575, TESTI4039659, TESTI4039744,

[1340] TESTI4039904, TESTI4040197, TESTI4040363, TESTI4040535, TESTI4040559, TESTI4040598, TESTI4040800, TESTI4040804, TESTI4040939, TESTI4040956, TESTI4041049, TESTI4041053, TESTI4041086, TESTI4041099, TESTI4041143, TESTI4041482, TESTI4041519, TESTI4041624, TESTI4041629, TESTI4041832, TESTI4041844, TESTI4041903, TESTI4041954, TESTI4041984, TESTI4041985, TESTI4041986, TESTI4042098, TESTI4042420, TESTI4042440, TESTI4042444, TESTI4042711, TESTI4042846, TESTI4043067, TESTI4043129, TESTI4043166, TESTI4043203, TESTI4043223, TESTI4043371, TESTI4043378, TESTI4043512, TESTI4043551, TESTI4043710, TESTI4043947, TESTI4044035, TESTI4044076, TESTI4044084, TESTI4044123, TESTI4044186, TESTI4044234, TESTI4044291,

[1341] TESTI4044296, TESTI4044300, TESTI4044682, TESTI4044770, TESTI4045168, TESTI4045312, TESTI4045330, TESTI4045470, TESTI4045701, TESTI4045908, TESTI4045955, TESTI4045982, TESTI4046073, TESTI4046090, TESTI4046240, TESTI4046245, TESTI4046253, TESTI4046282, TESTI4046328, TESTI4046450, TESTI4046457, TESTI4046487, TESTI4046502, TESTI4046523, TESTI4046819, TESTI4046873, TESTI4046884, TESTI4046896, TESTI4046903, TESTI4046962, TESTI4047069, TESTI4047119, TESTI4047305, TESTI4047328, TESTI4047437, TESTI4047569, TESTI4047746, TESTI4047808, THYMU1000002, THYMU1000010, THYMU1000017, THYMU1000025, THYMU1000029, THYMU1000032, THYMU1000033, THYMU1000060, THYMU1000074, THYMU1000083, THYMU1000098, THYMU1000103,

[1342] THYMU1000105, THYMU1000136, THYMU1000142, THYMU1000144, THYMU1000158, THYMU1000176, THYMU1000179, THYMU1000191, THYMU1000198, THYMU1000217, THYMU1000240, THYMU1000242, THYMU1000291, THYMU1000316, THYMU1000318, THYMU1000329, THYMU1000331, THYMU1000336, THYMU1000366, THYMU1000382, THYMU1000393, THYMU1000399, THYMU1000426, THYMU1000440, THYMU1000459, THYMU1000490, THYMU1000491, THYMU1000496, THYMU1000527, THYMU1000532, THYMU1000536, THYMU1000554, THYMU1000558, THYMU1000576, THYMU1000600, THYMU1000677, THYMU1000692, THYMU2000022, THYMU2000032, THYMU2000120, THYMU2000138, THYMU2000140, THYMU2000155, THYMU2000162, THYMU2000171, THYMU2000176, THYMU2000179, THYMU2000231, THYMU2000236, THYMU2000276,

[1343] THYMU2000280, THYMU2000317, THYMU2000368, THYMU2000382, THYMU2000418, THYMU2000440, THYMU2000489, THYMU2000492, THYMU2000519, THYMU2000570, THYMU2000602, THYMU2000660, THYMU2000671, THYMU2000672, THYMU2000684, THYMU2000767, THYMU2000800, THYMU2000879, THYMU2000932, THYMU2000950, THYMU2000971, THYMU2000982, THYMU2000990, THYMU2001007, THYMU2001053, THYMU2001071, THYMU2001090, THYMU2001139, THYMU2001195, THYMU2001202, THYMU2001203, THYMU2001256, THYMU2001270, THYMU2001291, THYMU2001314, THYMU2001325, THYMU2001357, THYMU2001381, THYMU2001422, THYMU2001443, THYMU2001515, THYMU2001521, THYMU2001556, THYMU2001622, THYMU2001727, THYMU2001819, THYMU2001825, THYMU2001839, THYMU2001868, THYMU2001898,

[1344] THYMU2001900, THYMU2001916, THYMU2001926, THYMU2001989, THYMU2002023, THYMU2002037, THYMU2002109, THYMU2002147, THYMU2002154, THYMU2002157, THYMU2002162, THYMU2002177, THYMU2002203, THYMU2002229, THYMU2002242, THYMU2002338, THYMU2002356, THYMU2002376, THYMU2002384, THYMU2002450, THYMU2002490, THYMU2002548, THYMU2002695, THYMU2002756, THYMU2002789, THYMU2002792, THYMU2002815, THYMU2002841, THYMU2002852, THYMU2002910, THYMU2002950, THYMU2002983, THYMU2003046, THYMU2003069, THYMU2003107, THYMU2003124, THYMU2003133, THYMU2003166, THYMU2003232, THYMU2003242, THYMU2003249, THYMU2003270, THYMU2003282, THYMU2003287, THYMU2003336, THYMU2003366, THYMU2003397, THYMU2003419, THYMU2003440, THYMU2003470,

[1345] THYMU2003479, THYMU2003499, THYMU2003542, THYMU2003632, THYMU2003650, THYMU2003700, THYMU2003760, THYMU2003803, THYMU2003855, THYMU2003907, THYMU2003932, THYMU2004003, THYMU2004008, THYMU2004042, THYMU2004108, THYMU2004111, THYMU2004123, THYMU2004139, THYMU2004152, THYMU2004169, THYMU2004284, THYMU2004320, THYMU2004336, THYMU2004344, THYMU2004356, THYMU2004452, THYMU2004508, THYMU2004512, THYMU2004635, THYMU2004639, THYMU2004668, THYMU2004677, THYMU2004688, THYMU2004693, THYMU2004733, THYMU2004835, THYMU2004843, THYMU2004906, THYMU2004986, THYMU2005001, THYMU2005003, THYMU2005046, THYMU2005134, THYMU2005156, THYMU2005190, THYMU2005225, THYMU2005240, THYMU2005246, THYMU2005270, THYMU2005283,

[1346] THYMU2005303, THYMU2005321, THYMU2005356, THYMU2005369, THYMU2005439, THYMU2005480, THYMU2005482, THYMU2005507, THYMU2005545, THYMU2005546, THYMU2005574, THYMU2005576, THYMU2005748, THYMU2005759, THYMU2005807, THYMU2005815, THYMU2005855, THYMU2005881, THYMU2005948, THYMU2005980, THYMU2005997, THYMU2006001, THYMU2006048, THYMU2006098, THYMU2006160, THYMU2006170, THYMU2006252, THYMU2006261, THYMU2006277, THYMU2006303, THYMU2006324, THYMU2006350, THYMU2006357, THYMU2006365, THYMU2006420, THYMU2006468, THYMU2006610, THYMU2006666, THYMU2006712, THYMU2006813, THYMU2006913, THYMU2006946, THYMU2006965, THYMU2007025, THYMU2007036, THYMU2007060, THYMU2007065, THYMU2007095, THYMU2007112, THYMU2007146,

[1347] THYMU2007179, THYMU2007258, THYMU2007307, THYMU2007308, THYMU2007339, THYMU2007350, THYMU2007384, THYMU2007493, THYMU2007521, THYMU2007528, THYMU2007530, THYMU2007532, THYMU2007561, THYMU2007571, THYMU2007635, THYMU2007658, THYMU2007667, THYMU2007694, THYMU2007725, THYMU2007802, THYMU2007824, THYMU2007854, THYMU2007886, THYMU2007952, THYMU2007969, THYMU2008035, THYMU2008036, THYMU2008049, THYMU2008072, THYMU2008111, THYMU2008145, THYMU2008149, THYMU2008185, THYMU2008191, THYMU2008207, THYMU2008226, THYMU2008282, THYMU2008321, THYMU2008339, THYMU2008350, THYMU2008351, THYMU2008383, THYMU2008452, THYMU2008643, THYMU2008686, THYMU2008691, THYMU2008714, THYMU2008725, THYMU2008727, THYMU2008781,

[1348] THYMU2008799, THYMU2008876, THYMU2008910, THYMU2008917, THYMU2008928, THYMU2008990, THYMU2008994, THYMU2009023, THYMU2009046, THYMU2009101, THYMU2009104, THYMU2009134, THYMU2009157, THYMU2009181, THYMU2009186, THYMU2009338, THYMU2009425, THYMU2009516, THYMU2009526, THYMU2009546, THYMU2009592, THYMU2009596, THYMU2009835, THYMU2009906, THYMU2009948, THYMU2010030, THYMU2010041, THYMU2010046, THYMU2010059, THYMU2010082, THYMU2010094, THYMU2010161, THYMU2010192, THYMU2010448, THYMU2010519, THYMU2010637, THYMU2010671, THYMU2010699, THYMU2010705, THYMU2010779, THYMU2010816, THYMU2010831, THYMU2010848, THYMU2011053, THYMU2011063, THYMU2011072, THYMU2011096, THYMU2011118, THYMU2011142, THYMU2011183,

[1349] THYMU2011257, THYMU2011259, THYMU2011295, THYMU2011308, THYMU2011390, THYMU2011431, THYMU2011447, THYMU2011482, THYMU2011538, THYMU2011548, THYMU2011551, THYMU2011564, THYMU2011573, THYMU2011585, THYMU2011621, THYMU2011666, THYMU2011736, THYMU2011785, THYMU2011806, THYMU2011852, THYMU2011875, THYMU2011881, THYMU2011937, THYMU2011939, THYMU2012002, THYMU2012024, THYMU2012073, THYMU2012104, THYMU2012113, THYMU2012273, THYMU2012492, THYMU2012507, THYMU2012565, THYMU2012574, THYMU2012625, THYMU2012631, THYMU2012665, THYMU2012690, THYMU2012701, THYMU2012807, THYMU2012826, THYMU2012882, THYMU2012891, THYMU2012902, THYMU2012919, THYMU2013023, THYMU2013047, THYMU2013051, THYMU2013089, THYMU2013364,

[1350] THYMU2013386, THYMU2013426, THYMU2013578, THYMU2013648, THYMU2013705, THYMU2013757, THYMU2013779, THYMU2013863, THYMU2013950, THYMU2013981, THYMU2014067, THYMU2014068, THYMU2014167, THYMU2014183, THYMU2014204, THYMU2014297, THYMU2014323, THYMU2014327, THYMU2014353, THYMU2014492, THYMU2014500, THYMU2014599, THYMU2014762, THYMU2014777, THYMU2014801, THYMU2014901, THYMU2014923, THYMU2015019, THYMU2015161, THYMU2015316, THYMU2015321, THYMU2015439, THYMU2015441, THYMU2015479, THYMU2015762, THYMU2015825, THYMU2015918, THYMU2015943, THYMU2015984, THYMU2016113, THYMU2016164, THYMU2016204, THYMU2016219, THYMU2016360, THYMU2016496, THYMU2016523, THYMU2016840, THYMU2016968, THYMU2017008, THYMU2017010,

[1351] THYMU2017023, THYMU2017085, THYMU2017099, THYMU2017158, THYMU2017162, THYMU2017215, THYMU2017362, THYMU2017366, THYMU2017398, THYMU2017449, THYMU2017479, THYMU2017522, THYMU2017526, THYMU2017601, THYMU2017675, THYMU2017707, THYMU2017831, THYMU2017844, THYMU2017878, THYMU2017948, THYMU2018028, THYMU2018071, THYMU2018126, THYMU2018189, THYMU2018197, THYMU2018384, THYMU2018455, THYMU2018547, THYMU2018565, THYMU2018639, THYMU2018673, THYMU2018721, THYMU2018772, THYMU2018819, THYMU2018841, THYMU2018997, THYMU2019021, THYMU2019054, THYMU2019197, THYMU2019210, THYMU2019364, THYMU2019436, THYMU2019442, THYMU2019587, THYMU2019599, THYMU2019686, THYMU2019813, THYMU2020198, THYMU2020289, THYMU2020416,

[1352] THYMU2020491, THYMU2020499, THYMU2020560, THYMU2020667, THYMU2020830, THYMU2020883, THYMU2020959, THYMU2021361, THYMU2021509, THYMU2021597, THYMU2021684, THYMU2021714, THYMU2022213, THYMU2022289, THYMU2022854, THYMU2022922, THYMU2023209, THYMU2023264, THYMU2023576, THYMU2023711, THYMU2023900, THYMU2023943, THYMU2023967, THYMU2024071, THYMU2024121, THYMU2024185, THYMU2024207, THYMU2024616, THYMU2024684, THYMU2024748, THYMU2025042, THYMU2025189, THYMU2025319, THYMU2025325, THYMU2025406, THYMU2025557, THYMU2025572, THYMU2025707, THYMU2025849, THYMU2025909, THYMU2025939, THYMU2026182, THYMU2026350, THYMU2026530, THYMU2026531, THYMU2026835, THYMU2026904, THYMU2027053, THYMU2027168, THYMU2027249,

[1353] THYMU2027282, THYMU2027497, THYMU2027695, THYMU2027734, THYMU2027894, THYMU2027975, THYMU2027996, THYMU2028041, THYMU2028368, THYMU2028379, THYMU2028394, THYMU2028412, THYMU2028629, THYMU2028632, THYMU2028724, THYMU2028739, THYMU2028942, THYMU2028978, THYMU2029134, THYMU2029578, THYMU2029676, THYMU2029688, THYMU2029788, THYMU2030068, THYMU2030226, THYMU2030264, THYMU2030462, THYMU2030543, THYMU2030637, THYMU2030655, THYMU2030796, THYMU2030912, THYMU2030982, THYMU2031046, THYMU2031139, THYMU2031218, THYMU2031249, THYMU2031258, THYMU2031341, THYMU2031368, THYMU2031579, THYMU2031847, THYMU2031890, THYMU2031994, THYMU2032035, THYMU2032080, THYMU2032150, THYMU2032155, THYMU2032358, THYMU2032437,

[1354] THYMU2032601, THYMU2032655, THYMU2032715, THYMU2032732, THYMU2032825, THYMU2032976, THYMU2033053, THYMU2033070, THYMU2033079, THYMU2033085, THYMU2033104, THYMU2033227, THYMU2033263, THYMU2033308, THYMU2033401, THYMU2033583, THYMU2033755, THYMU2033787, THYMU2033816, THYMU2034182, THYMU2034279, THYMU2034314, THYMU2034338, THYMU2034374, THYMU2034647, THYMU2034917, THYMU2035064, THYMU2035078, THYMU2035101, THYMU2035319, THYMU2035321, THYMU2035388, THYMU2035400, THYMU2035554, THYMU2035710, THYMU2035735, THYMU2036058, THYMU2036105, THYMU2036207, THYMU2036215, THYMU2036252, THYMU2036265, THYMU2036366, THYMU2036459, THYMU2036461, THYMU2036604, THYMU2036653, THYMU2037081, THYMU2037208, THYMU2037226,

[1355] THYMU2037233, THYMU2037234, THYMU2037348, THYMU2037406, THYMU2037965, THYMU2038058, THYMU2038189, THYMU2038199, THYMU2038220, THYMU2038301, THYMU2038369, THYMU2038389, THYMU2038615, THYMU2038636, THYMU2038739, THYMU2038772, THYMU2038797, THYMU2038906, THYMU2039305, THYMU2039315, THYMU2039334, THYMU2039350, THYMU2039411, THYMU2039634, THYMU2039719, THYMU2039780, THYMU2039788, THYMU2039989, THYMU2040029, THYMU2040110, THYMU2040114, THYMU2040140, THYMU2040412, THYMU2040427, THYMU2040824, THYMU2040925, THYMU2041007, THYMU2041015, THYMU2041252, THYMU3000028, THYMU3000036, THYMU3000037, THYMU3000082, THYMU3000194, THYMU3000224, THYMU3000269, THYMU3000306, THYMU3000360, THYMU3000390, THYMU3000420,

[1356] THYMU3000490, THYMU3000504, THYMU3000542, THYMU3000655, THYMU3000776, THYMU3000826, THYMU3000841, THYMU3001077, THYMU3001082, THYMU3001083, THYMU3001133, THYMU3001151, THYMU3001379, THYMU3001472, THYMU3001593, THYMU3001883, THYMU3001939, THYMU3001991, THYMU3002452, THYMU3002578, THYMU3002661, THYMU3003007, THYMU3003092, THYMU3003212, THYMU3003309, THYMU3003350, THYMU3003403, THYMU3003565, THYMU3003763, THYMU3003865, THYMU3003958, THYMU3003965, THYMU3004157, THYMU3004628, THYMU3004632, THYMU3004835, THYMU3004866, THYMU3005050, THYMU3005378, THYMU3005407, THYMU3005415, THYMU3005427, THYMU3005482, THYMU3005491, THYMU3005696, THYMU3006118, THYMU3006132, THYMU3006168, THYMU3006172, THYMU3006371,

[1357] THYMU3006485, THYMU3006640, THYMU3006767, THYMU3006811, THYMU3006963, THYMU3007137, THYMU3007308, THYMU3007368, THYMU3007423, THYMU3007559, THYMU3007845, THYMU3008060, THYMU3008105, THYMU3008136, THYMU3008171, THYMU3008216, THYMU3008436, THYMU3008672, THYMU3008883, THYMU3008935, THYMU3009006, THYMU3009255, THYMU3009391, THYMU3009643, THYMU3009755, THYMU3010247, THYMU3011012, THYMU3011081, THYMU3011244, THYMU3011360, THYMU3011534, THYMU3011543, THYMU3011556, THYMU3011717, THYMU3011827, THYMU3012402, THYMU3012907, THYMU3012983, THYMU3013114, THYMU3013197, THYMU3013241, THYMU3013386, THYMU3013470, THYMU3013785, THYMU3013897, THYMU3014038, THYMU3014173, THYMU3014372, THYMU3014555, THYMU3014620,

[1358] THYMU3014701, THYMU3015042, THYMU3015457, THYMU3015571, THYMU3015592, THYMU3015625, THYMU3015647, THYMU3015962, THYMU3016022, THYMU3016518, THYMU3016797, THYMU3016822, THYMU3016850, THYMU3017562, THYMU3017688, THYMU3017689, THYMU3017761, THYMU3018151, THYMU3018896, THYMU3019095, THYMU3019476, THYMU3019605, THYMU3019916, THYMU3020221, THYMU3020595, THYMU3020713, THYMU3020856, THYMU3020869, THYMU3020970, THYMU3021404, THYMU3021586, THYMU3021755, THYMU3021900, THYMU3022211, THYMU3022434, THYMU3022528, THYMU3022668, THYMU3022982, THYMU3023107, THYMU3023211, THYMU3023216, THYMU3023394, THYMU3023400, THYMU3023797, THYMU3024164, THYMU3024339, THYMU3024602, THYMU3024879, THYMU3025118, THYMU3025313,

[1359] THYMU3025642, THYMU3025683, THYMU3025772, THYMU3025865, THYMU3026000, THYMU3026350, THYMU3026479, THYMU3026532, THYMU3026783, THYMU3026869, THYMU3027251, THYMU3027540, THYMU3027655, THYMU3027671, THYMU3028075, THYMU3028410, THYMU3028461, THYMU3028702, THYMU3029188, THYMU3029318, THYMU3029421, THYMU3029719, THYMU3029774, THYMU3029832, THYMU3030072, THYMU3030231, THYMU3030706, THYMU3030710, THYMU3030752, THYMU3031146, THYMU3031402, THYMU3031610, THYMU3031612, THYMU3031868, THYMU3031878, THYMU3032032, THYMU3032798, THYMU3033402, THYMU3033630, THYMU3033649, THYMU3033754, THYMU3033759, THYMU3034078, THYMU3034099, THYMU3034453, THYMU3034616, THYMU3034853, THYMU3034867, THYMU3034983, THYMU3036200,

[1360] THYMU3036310, THYMU3036934, THYMU3036953, THYMU3037052, THYMU3037192, THYMU3037617, THYMU3037772, THYMU3037827, THYMU3037836, THYMU3037856, THYMU3037867, THYMU3037909, THYMU3037980, THYMU3038158, THYMU3038167, THYMU3038214, THYMU3038266, THYMU3038328, THYMU3038347, THYMU3038375, THYMU3038603, THYMU3038687, THYMU3038759, THYMU3038879, THYMU3038970, THYMU3039807, THYMU3039846, THYMU3040068, THYMU3040126, THYMU3040146, THYMU3040168, THYMU3040172, THYMU3040725, THYMU3040746, THYMU3040816, THYMU3040829, THYMU3040830, THYMU3040986, THYMU3041354, THYMU3041386, THYMU3041573, THYMU3041603, THYMU3041736, THYMU3041918, THYMU3042075, THYMU3042321, THYMU3042372, THYMU3042758, THYMU3042929, THYMU3043200,

[1361] THYMU3043327, THYMU3043482, THYMU3043597, THYMU3043688, THYMU3043779, THYMU3043883, THYMU3043993, THYMU3044175, THYMU3044188, THYMU3044441, THYMU3044445, THYMU3045510, THYMU3045673, THYMU3045692, THYMU3045704, THYMU3046140, THYMU3046350, THYMU3046360, THYMU3046856, THYMU3047115, THYMU3047144, THYMU3047156, THYMU3047366, THYMU3047513, THYMU3047542, THYMU3047760, THYMU3047891, TKIDN1000001, TKIDN1000044, TKIDN1000062, TKIDN1000066, TKIDN1000164, TKIDN1000171, TKIDN1000192, TKIDN2000127, TKIDN2000240, TKIDN2000246, TKIDN2000319, TKIDN2000464, TKIDN2000521, TKIDN2000701, TKIDN2001529, TKIDN2001662, TKIDN2002318, TKIDN2002329, TKIDN2002424, TKIDN2002632, TKIDN2003044, TKIDN2003059, TKIDN2003062,

[1362] TKIDN2003078, TKIDN2003366, TKIDN2003396, TKIDN2003413, TKIDN2003597, TKIDN2003601, TKIDN2004185, TKIDN2004386, TKIDN2004458, TKIDN2004748, TKIDN2005721, TKIDN2005934, TKIDN2005947, TKIDN2005956, TKIDN2006525, TKIDN2006761, TKIDN2006852, TKIDN2007605, TKIDN2007667, TKIDN2007828, TKIDN2008176, TKIDN2008778, TKIDN2009092, TKIDN2009330, TKIDN2009481, TKIDN2009641, TKIDN2009794, TKIDN2009889, TKIDN2010200, TKIDN2010232, TKIDN2010278, TKIDN2010602, TKIDN2010812, TKIDN2010934, TKIDN2011051, TKIDN2011160, TKIDN2011324, TKIDN2012034, TKIDN2012771, TKIDN2012824, TKIDN2013134, TKIDN2013287, TKIDN2014570, TKIDN2014757, TKIDN2014771, TKIDN2014964, TKIDN2015025, TKIDN2015071, TKIDN2015161, TKIDN2015263,

[1363] TKIDN2015285, TKIDN2015423, TKIDN2015788, TKIDN2016309, TKIDN2016399, TKIDN2016846, TKIDN2018926, TKIDN2019116, TLIVE2000023, TLIVE2000142, TLIVE2000292, TLIVE2000762, TLIVE2000979, TLIVE2001327, TLIVE2001616, TLIVE2001684, TLIVE2001828, TLIVE2001927, TLIVE2002046, TLIVE2002336, TLIVE2002338, TLIVE2002562, TLIVE2002690, TLIVE2002882, TLIVE2003197, TLIVE2003200, TLIVE2003225, TLIVE2003381, TLIVE2003737, TLIVE2003961, TLIVE2003970, TLIVE2004110, TLIVE2004320, TLIVE2004331, TLIVE2004601, TLIVE2005180, TLIVE2005390, TLIVE2005516, TLIVE2005731, TLIVE2005866, TLIVE2006236, TLIVE2006359, TLIVE2006529, TLIVE2006621, TLIVE2006733, TLIVE2007000, TLIVE2007016, TLIVE2007132, TLIVE2007192, TLIVE2007528,

[1364] TLIVE2007607, TLIVE2007736, TLIVE2007816, TLIVE2007919, TLIVE2008083, TLIVE2008213, TLIVE2008221, TLIVE2008229, TLIVE2008712, TLIVE2008797, TLIVE2009087, TLIVE2009163, TLIVE2009489, TLIVE2009541, TLUNG2000179, TOVAR2000476, TOVAR2000575, TOVAR2000649, TOVAR2000904, TOVAR2001281, TOVAR2001556, TOVAR2001730, TOVAR2002247, TOVAR2002514, TOVAR2002549, TOVAR2002800, TRACH1000011, TRACH1000018, TRACH100003.8, TRACH1000057, TRACH1000074, TRACH1000100, TRACH1000106, TRACH1000125, TRACH1000140, TRACH1000144, TRACH1000181, TRACH1000193, TRACH1000205, TRACH1000212, TRACH1000240, TRACH2000002, TRACH2000015, TRACH2000024, TRACH2000032, TRACH2000047, TRACH2000081, TRACH2000083, TRACH2000148, TRACH2000185,

[1365] TRACH2000196, TRACH2000235, TRACH2000237, TRACH2000243, TRACH2000248, TRACH2000259, TRACH2000272, TRACH2000282, TRACH2000287, TRACH2000289, TRACH2000306, TRACH2000312, TRACH2000336, TRACH2000359, TRACH2000393, TRACH2000411, TRACH2000420, TRACH2000472, TRACH2000496, TRACH2000497, TRACH2000502, TRACH2000522, TRACH2000540, TRACH2000559, TRACH2000660, TRACH2000665, TRACH2000675, TRACH2000677, TRACH2000703, TRACH2000767, TRACH2000775, TRACH2000807, TRACH2000862, TRACH2000873, TRACH2000894, TRACH2000898, TRACH2000920, TRACH2000923, TRACH2000944, TRACH2000981, TRACH2000986, TRACH2001037, TRACH2001060, TRACH2001085, TRACH2001109, TRACH2001121, TRACH2001147, TRACH2001154, TRACH2001188, TRACH2001192,

[1366] TRACH2001249, TRACH2001275, TRACH2001335, TRACH2001339, TRACH2001347, TRACH2001395, TRACH2001400, TRACH2001403, TRACH2001416, TRACH2001428, TRACH2001443, TRACH2001463, TRACH2001474, TRACH2001523, TRACH2001525, TRACH2001532, TRACH2001549, TRACH2001592, TRACH2001596, TRACH2001607, TRACH2001612, TRACH2001621, TRACH2001646, TRACH2001651, TRACH2001898, TRACH2001933, TRACH2001968, TRACH2001996, TRACH2002043, TRACH2002054, TRACH2002100, TRACH2002138, TRACH2002333, TRACH2002784, TRACH2002803, TRACH2002840, TRACH2002853, TRACH2002862, TRACH2002954, TRACH2002960, TRACH2002988, TRACH2003070, TRACH2003323, TRACH2003484, TRACH2003516, TRACH2003605, TRACH2003736, TRACH2003759, TRACH2003941, TRACH2004039,

[1367] TRACH2004054, TRACH2004087, TRACH2004109, TRACH2004170, TRACH2004183, TRACH2004251, TRACH2004292, TRACH2004336, TRACH2004399, TRACH2004428, TRACH2004458, TRACH2004499, TRACH2004521, TRACH2004570, TRACH2004845, TRACH2004887, TRACH2004950, TRACH2005004, TRACH2005017, TRACH2005066, TRACH2005159, TRACH2005314, TRACH2005444, TRACH2005541, TRACH2005666, TRACH2005698, TRACH2005710, TRACH2005720, TRACH2005769, TRACH2005796, TRACH2006015, TRACH2006049, TRACH2006097, TRACH2006194, TRACH2006327, TRACH2006331, TRACH2006378, TRACH2006387, TRACH2006528, TRACH2006670, TRACH2006762, TRACH2006866, TRACH2006870, TRACH2006918, TRACH2007059, TRACH2007324, TRACH2007358, TRACH2007483, TRACH2007542, TRACH2007577,

[1368] TRACH2007674, TRACH2007676, TRACH2007688, TRACH2007733, TRACH2007754, TRACH2007816, TRACH2007894, TRACH2007969, TRACH2007988, TRACH2008081, TRACH2008112, TRACH2008113, TRACH2008127, TRACH2008130, TRACH2008278, TRACH2008300, TRACH2008472, TRACH2008478, TRACH2008540, TRACH2008583, TRACH2008597, TRACH2008716, TRACH2008820, TRACH2008891, TRACH2008921, TRACH2009006, TRACH2009060, TRACH2009107, TRACH2009123, TRACH2009268, TRACH2009310, TRACH2009340, TRACH2009348, TRACH2009358, TRACH2009661, TRACH2009730, TRACH2009743, TRACH2009754, TRACH2009862, TRACH2009934, TRACH2010159, TRACH2010218, TRACH2010251, TRACH2010272, TRACH2010317, TRACH2010419, TRACH2010451, TRACH2010505, TRACH2010587, TRACH2010600,

[1369] TRACH2010639, TRACH2010677, TRACH2010698, TRACH2010771, TRACH2010824, TRACH2010883, TRACH2010965, TRACH2010974, TRACH2011057, TRACH2011093, TRACH2011113, TRACH2011290, TRACH2011293, TRACH2011500, TRACH2011574, TRACH2011894, TRACH2011956, TRACH2012000, TRACH2012138, TRACH2012242, TRACH2012298, TRACH2012370, TRACH2012387, TRACH2012497, TRACH2012536, TRACH2012562, TRACH2012742, TRACH2012811, TRACH2012823, TRACH2012918, TRACH2013123, TRACH2013265, TRACH2013369, TRACH2013450, TRACH2013495, TRACH2013552, TRACH2013585, TRACH2013671, TRACH2013726, TRACH2013902, TRACH2013928, TRACH2013982, TRACH2013991, TRACH2014018, TRACH2014045, TRACH2014046, TRACH2014082, TRACH2014268, TRACH2014284, TRACH2014337,

[1370] TRACH2014356, TRACH2014371, TRACH2014483, TRACH2014495, TRACH2014544, TRACH2014573, TRACH2014725, TRACH2014760, TRACH2014815, TRACH2014839, TRACH2014938, TRACH2014950, TRACH2014972, TRACH2014974, TRACH2015180, TRACH2015243, TRACH2015316, TRACH2015381, TRACH2015486, TRACH2015823, TRACH2015824, TRACH2015939, TRACH2015987, TRACH2016080, TRACH2016131, TRACH2016286, TRACH2016347, TRACH2016380, TRACH2016384, TRACH2016410, TRACH2016481, TRACH2016498, TRACH2016533, TRACH2016551, TRACH2016554, TRACH2016651, TRACH2016690, TRACH2016709, TRACH2016722, TRACH2016835, TRACH2016980, TRACH2017086, TRACH2017368, TRACH2017498, TRACH2017609, TRACH2017949, TRACH2017965, TRACH2017980, TRACH2018034, TRACH2018084,

[1371] TRACH2018262, TRACH2018273, TRACH2018278, TRACH2018345, TRACH2018380, TRACH2018449, TRACH2018512, TRACH2018646, TRACH2018663, TRACH2018718, TRACH2018835, TRACH2018882, TRACH2018914, TRACH2018950, TRACH2019024, TRACH2019046, TRACH2019080, TRACH2019151, TRACH2019154, TRACH2019176, TRACH2019248, TRACH2019309, TRACH2019425, TRACH2019473, TRACH2019602, TRACH2019661, TRACH2019673, TRACH2019844, TRACH2019879, TRACH2020048, TRACH2020336, TRACH2020525, TRACH2021398, TRACH2021622, TRACH2021635, TRACH2021964, TRACH2022042, TRACH2022113, TRACH2022253, TRACH2022425, TRACH2022553, TRACH2022649, TRACH2022839, TRACH2023246, TRACH2023299, TRACH2023306, TRACH2023416, TRACH2023479, TRACH2023684, TRACH2023860,

[1372] TRACH2023876, TRACH2024139, TRACH2024187, TRACH2024271, TRACH2024293, TRACH2024408, TRACH2024512, TRACH2024559, TRACH2024647, TRACH2024651, TRACH2024730, TRACH2024735, TRACH2024749, TRACH2024821, TRACH2025057, TRACH2025084, TRACH2025155, TRACH2025224, TRACH2025344, TRACH2025379, TRACH2025507, TRACH2025569, TRACH2025705, TRACH2025749, TRACH2025753, TRACH2025810, TRACH2025853, TRACH2025911, TRACH2025932, TRACH3000014, TRACH3000017, TRACH3000043, TRACH3000134, TRACH3000180, TRACH3000342, TRACH3000420, TRACH3000515, TRACH3000530, TRACH3000548, TRACH3000558, TRACH3000586, TRACH3000780, TRACH3000892, TRACH3000926, TRACH3001119, TRACH3001443, TRACH3001550, TRACH3001759, TRACH3002064, TRACH3002107,

[1373] TRACH3002168, TRACH3002188, TRACH3002245, TRACH3002293, TRACH3002533, TRACH3002561, TRACH3002567, TRACH3002605, TRACH3002650, TRACH3002752, TRACH3002866, TRACH3002871, TRACH3002876, TRACH3002890, TRACH3003009, TRACH3003037, TRACH3003357, TRACH3003379, TRACH3003547, TRACH3003586, TRACH3003683, TRACH3003780, TRACH3003805, TRACH3003832, TRACH3003872, TRACH3004113, TRACH3004288, TRACH3004303, TRACH3004412, TRACH3004424, TRACH3004456, TRACH3004537, TRACH3004596, TRACH3004651, TRACH3004652, TRACH3004671, TRACH3004721, TRACH3004747, TRACH3004760, TRACH3004783, TRACH3004786, TRACH3004840, TRACH3004931, TRACH3004934, TRACH3005072, TRACH3005085, TRACH3005102, TRACH3005173, TRACH3005191, TRACH3005211,

[1374] TRACH3005274, TRACH3005294, TRACH3005479, TRACH3005549, TRACH3005699, TRACH3005702, TRACH3005808, TRACH3005852, TRACH3005896, TRACH3006038, TRACH3006149, TRACH3006228, TRACH3006264, TRACH3006336, TRACH3006379, TRACH3006392, TRACH3006395, TRACH3006397, TRACH3006412, TRACH3006470, TRACH3006589, TRACH3006626, TRACH3006699, TRACH3006717, TRACH3006800, TRACH3006889, TRACH3006985, TRACH3007097, TRACH3007268, TRACH3007274, TRACH3007277, TRACH3007391, TRACH3007479, TRACH3007541, TRACH3007595, TRACH3007625, TRACH3007627, TRACH3007689, TRACH3007766, TRACH3007866, TRACH3007995, TRACH3008042, TRACH3008061, TRACH3008201, TRACH3008508, TRACH3008535, TRACH3008629, TRACH3008632, TRACH3008688, TRACH3008697,

[1375] TRACH3008713, TRACH3008887, TRACH3008902, TRACH3008990, TRACH3009001, TRACH3009008, TRACH3009059, TRACH3009061, TRACH3009148, TRACH3009455, TRACH3009701, TRACH3009715, TRACH3009894, TRACH3009956, TRACH3010079, TRACH3010167, TRACH3010331, TRACH3010342, TRACH3010382, TRACH3010757, TRACH3010901, TRACH3011004, TRACH3011082, TRACH3011184, TRACH3011282, TRACH3011313, TRACH3011454, TRACH3011485, TRACH3011503, TRACH3011538, TRACH3011542, TRACH3012106, TRACH3012161, TRACH3012232, TRACH3012261, TRACH3012445, TRACH3012460, TRACH3012659, TRACH3012718, TRACH3012864, TRACH3012891, TRACH3012942, TRACH3013043, TRACH3013072, TRACH3013426, TRACH3013454, TRACH3013558, TRACH3013684, TRACH3013693, TRACH3013700,

[1376] TRACH3013766, TRACH3013900, TRACH3013926, TRACH3014063, TRACH3014183, TRACH3014215, TRACH3014316, TRACH3014415, TRACH3014580, TRACH3014641, TRACH3014885, TRACH3015136, TRACH3015336, TRACH3015346, TRACH3015354, TRACH3015467, TRACH3015626, TRACH3015951, TRACH3016051, TRACH3016120, TRACH3016264, TRACH3016277, TRACH3016368, TRACH3016455, TRACH3016614, TRACH3016805, TRACH3016992, TRACH3017171, TRACH3017409, TRACH3017934, TRACH3018108, TRACH3018191, TRACH3018240, TRACH3018261, TRACH3018519, TRACH3018524, TRACH3018606, TRACH3018783, TRACH3018907, TRACH3018933, TRACH3018943, TRACH3019018, TRACH3019058, TRACH3019142, TRACH3019290, TRACH3019347, TRACH3019370, TRACH3019447, TRACH3019598, TRACH3019621,

[1377] TRACH3019662, TRACH3019807, TRACH3019924, TRACH3019977, TRACH3020137, TRACH3020410, TRACH3020563, TRACH3020605, TRACH3020750, TRACH3020769, TRACH3020928, TRACH3020930, TRACH3021023, TRACH3021066, TRACH3021212, TRACH3021335, TRACH3021373, TRACH3021544, TRACH3021778, TRACH3021834, TRACH3021883, TRACH3022170, TRACH3022296, TRACH3022482, TRACH3022732, TRACH3022758, TRACH3022875, TRACH3022910, TRACH3022960, TRACH3023063, TRACH3023203, TRACH3023242, TRACH3023373, TRACH3023516, TRACH3023752, TRACH3023945, TRACH3023960, TRACH3024020, TRACH3024081, TRACH3024342, TRACH3024423, TRACH3024428, TRACH3024512, TRACH3024671, TRACH3024823, TRACH3025302, TRACH3025316, TRACH3025346, TRACH3025520, TRACH3026148,

[1378] TRACH3026283, TRACH3026299, TRACH3026303, TRACH3026542, TRACH3026650, TRACH3026676, TRACH3026744, TRACH3026949, TRACH3027229, TRACH3027527, TRACH3027681, TRACH3027701, TRACH3027885, TRACH3028031, TRACH3028164, TRACH3028180, TRACH3028195, TRACH3028441, TRACH3028597, TRACH3028678, TRACH3028837, TRACH3028847, TRACH3028855, TRACH3029139, TRACH3029329, TRACH3029451, TRACH3029462, TRACH3029520, TRACH3029592, TRACH3029629, TRACH3029665, TRACH3029670, TRACH3029800, TRACH3030111, TRACH3030130, TRACH3030176, TRACH3030252, TRACH3030725, TRACH3030855, TRACH3030883, TRACH3031316, TRACH3031400, TRACH3031463, TRACH3031479, TRACH3031518, TRACH3031660, TRACH3031678, TRACH3031936, TRACH3032044, TRACH3032065,

[1379] TRACH3032150, TRACH3032372, TRACH3032480, TRACH3032570, TRACH3032755, TRACH3032827, TRACH3032873, TRACH3033535, TRACH3033680, TRACH3033868, TRACH3034145, TRACH3034414, TRACH3034488, TRACH3034680, TRACH3034731, TRACH3034745, TRACH3034762, TRACH3034903, TRACH3035187, TRACH3035199, TRACH3035235, TRACH3035451, TRACH3035482, TRACH3035526, TRACH3036004, TRACH3036103, TRACH3036193, TRACH3036207, TRACH3036278, TRACH3036309, TRACH3036456, TRACH3036609, TRACH3036638, TRACH3036683, TRACH3036750, TRACH3036792, TRACH3036843, TRACH3036897, TRACH3036932, TRACH3036942, TRACH3036997, TRACH3037063, TRACH3037067, TRACH3037267, TRACH3037288, TRACH3037505, TRACH3037573, TRACH3037696, TRACH3037897, TRACH3038086,

[1380] TRACH3038399, TSTOM1000135, TSTOM1000186, TSTOM2000139, TSTOM2000235, TSTOM2000315, TSTOM2000442, TSTOM2000553, TSTOM2000569, TSTOM2000588, TSTOM2001195, TSTOM2001274, TSTOM2001571, TSTOM2001996, TSTOM2002265, TSTOM2002505, TSTOM2002561, TSTOM2002611, TSTOM2002672, TSTOM2002682, TUTER1000014, TUTER1000122, TUTER1000137, TUTER2000057, TUTER2000283, TUTER2000425, TUTER2000904, TUTER2000916, TUTER2001286, TUTER2001341, TUTER2001387, TUTER2001433, TUTER2001461, TUTER2002028, TUTER2002074, TUTER2002158, TUTER2002228, TUTER2002323, TUTER2002356, TUTER2002729, UMVEN1000122, UMVEN1000143, UMVEN1000156, UMVEN2000046, UMVEN2000069, UMVEN2000121, UMVEN2000133, UMVEN2000152, UMVEN2000453, UTERU1000008,

[1381] UTERU1000015, UTERU1000024, UTERU1000031, UTERU1000032, UTERU1000057, UTERU1000065, UTERU1000077, UTERU1000093, UTERU1000096, UTERU1000106, UTERU1000109, UTERU1000131, UTERU1000138, UTERU1000148, UTERU1000160, UTERU1000182, UTERU1000183, UTERU1000187, UTERU1000192, UTERU1000249, UTERU1000337, UTERU1000339, UTERU2000023, UTERU2000047, UTERU2000074, UTERU2000099, UTERU2000154, UTERU2000197, UTERU2000218, UTERU2000238, UTERU2000243, UTERU2000260, UTERU2000300, UTERU2000329, UTERU2000332, UTERU2000338, UTERU2000349, UTERU2000377, UTERU2000393, UTERU2000418, UTERU2000424, UTERU2000465, UTERU2000485, UTERU2000517, UTERU2000524, UTERU2000539, UTERU2000541, UTERU2000542, UTERU2000546, UTERU2000550,

[1382] UTERU2000569, UTERU2000607, UTERU2000629, UTERU2000649, UTERU2000663, UTERU2000794, UTERU2000830, UTERU2000844, UTERU2000922, UTERU2001024, UTERU2001110, UTERU2001176, UTERU2001281, UTERU2001389, UTERU2001409, UTERU2001412, UTERU2001504, UTERU2001607, UTERU2001747, UTERU2001876, UTERU2002001, UTERU2002011, UTERU2002176, UTERU2002198, UTERU2002294, UTERU2002332, UTERU2002473, UTERU2002547, UTERU2002662, UTERU2002693, UTERU2002733, UTERU2002736, UTERU2002737, UTERU2002826, UTERU2002841, UTERU2002964, UTERU2002993, UTERU2003035, UTERU2003126, UTERU2003135, UTERU2003321, UTERU2003399, UTERU2003411, UTERU2003456, UTERU2003577, UTERU2003704, UTERU2003926, UTERU2003973, UTERU2004015, UTERU2004039,

[1383] UTERU2004061, UTERU2004073, UTERU2004163, UTERU2004299, UTERU2004461, UTERU2004520, UTERU2004564, UTERU2004664, UTERU2004688, UTERU2004698, UTERU2004861, UTERU2004929, UTERU2005004, UTERU2005050, UTERU2005069, UTERU2005074, UTERU2005179, UTERU2005292, UTERU2005346, UTERU2005446, UTERU2005449, UTERU2005450, UTERU2005533, UTERU2005601, UTERU2005664, UTERU2005822, UTERU2005903, UTERU2005905, UTERU2006103, UTERU2006115, UTERU2006137, UTERU2006182, UTERU2006400, UTERU2006412, UTERU2006429, UTERU2006486, UTERU2006524, UTERU2006547, UTERU2006568, UTERU2006593, UTERU2006651, UTERU2006705, UTERU2006899, UTERU2007004, UTERU2007075, UTERU2007081, UTERU2007128, UTERU2007253, UTERU2007267, UTERU2007444,

[1384] UTERU2007499, UTERU2007639, UTERU2007924, UTERU2007942, UTERU2008018, UTERU2008019, UTERU2008027, UTERU2008040, UTERU2008077, UTERU2008130, UTERU2008302, UTERU2008347, UTERU2008426, UTERU2008516, UTERU2008561, UTERU2008653, UTERU2008705, UTERU2008707, UTERU2008785, UTERU2008845, UTERU2008901, UTERU2008930, UTERU2008939, UTERU2008962, UTERU2009094, UTERU2009120, UTERU2009131, UTERU2009147, UTERU2009206, UTERU2009283, UTERU2009335, UTERU2009414, UTERU2009435, UTERU2009483, UTERU2009510, UTERU2009538, UTERU2009540, UTERU2009776, UTERU2009904, UTERU2009951, UTERU2010115, UTERU2010124, UTERU2010164, UTERU2010226, UTERU2010231, UTERU2010304, UTERU2010320, UTERU2010431, UTERU2010525, UTERU2010651,

[1385] UTERU2010724, UTERU2010747, UTERU2011195, UTERU2011199, UTERU2011220, UTERU2011261, UTERU2011287, UTERU2011410, UTERU2011574, UTERU2011621, UTERU2011657, UTERU2011741, UTERU2011806, UTERU2011811, UTERU2011897, UTERU2011906, UTERU2011962, UTERU2011968, UTERU2012031, UTERU2012101, UTERU2012114, UTERU2012230, UTERU2012252, UTERU2012333, UTERU2012407, UTERU2012526, UTERU2012581, UTERU2012610, UTERU2012615, UTERU2012688, UTERU2012715, UTERU2012741, UTERU2012786, UTERU2012856, UTERU2012890, UTERU2012938, UTERU2012976, UTERU2013048, UTERU2013078, UTERU2013231, UTERU2013262, UTERU2013280, UTERU2013322, UTERU2013483, UTERU2013491, UTERU2013502, UTERU2013586, UTERU2013926, UTERU2013976, UTERU2014001,

[1386] UTERU2014223, UTERU2014398, UTERU2014464, UTERU2014548, UTERU2014601, UTERU2014631, UTERU2014668, UTERU2014678, UTERU2014728, UTERU2014898, UTERU2014998, UTERU2015062, UTERU2015087, UTERU2015108, UTERU2015190, UTERU2015198, UTERU2015202, UTERU2015405, UTERU2015640, UTERU2015830, UTERU2015880, UTERU2016147, UTERU2016157, UTERU2016426, UTERU2016464, UTERU2016669, UTERU2016757, UTERU2016761, UTERU2016822, UTERU2016896, UTERU2016902, UTERU2016979, UTERU2016981, UTERU2017123, UTERU2017303, UTERU2017421, UTERU2017492, UTERU2017613, UTERU2017623, UTERU2017632, UTERU2017761, UTERU2017762, UTERU2017810, UTERU2017988, UTERU2018127, UTERU2018180, UTERU2018200, UTERU2018333, UTERU2018364, UTERU2018514,

[1387] UTERU2018522, UTERU2018523, UTERU2018544, UTERU2018566, UTERU2018609, UTERU2018674, UTERU2018712, UTERU2018784, UTERU2018789, UTERU2018811, UTERU2018867, UTERU2018881, UTERU2018884, UTERU2018955, UTERU2019005, UTERU2019038, UTERU2019096, UTERU2019163, UTERU2019257, UTERU2019453, UTERU2019491, UTERU2019534, UTERU2019681, UTERU2019706, UTERU2019710, UTERU2019940, UTERU2019959, UTERU2019964, UTERU2020226, UTERU2020242, UTERU2020292, UTERU2020351, UTERU2020491, UTERU2020718, UTERU2021163, UTERU2021380, UTERU2021649, UTERU2021820, UTERU2022020, UTERU2022773, UTERU2022955, UTERU2022981, UTERU2023039, UTERU2023045, UTERU2023262, UTERU2023550, UTERU2023651, UTERU2023687, UTERU2023712, UTERU2023941,

[1388] UTERU2024002, UTERU2024042, UTERU2024141, UTERU2024481, UTERU2024656, UTERU2024758, UTERU2024820, UTERU2024881, UTERU2024969, UTERU2025025, UTERU2025041, UTERU2025301, UTERU2025366, UTERU2025415, UTERU2025579, UTERU2025645, UTERU2025891, UTERU2026025, UTERU2026090, UTERU2026142, UTERU2026203, UTERU2026775, UTERU2027023, UTERU2027369, UTERU2027591, UTERU2027616, UTERU2027941, UTERU2028377, UTERU2028734, UTERU2029503, UTERU2029660, UTERU2029742, UTERU2029953, UTERU2030213, UTERU2030270, UTERU2030280, UTERU2031060, UTERU2031084, UTERU2031268, UTERU2031295, UTERU2031521, UTERU2031611, UTERU2031703, UTERU2031834, UTERU2031851, UTERU2032075, UTERU2032220, UTERU2032279, UTERU2032726, UTERU2033172,

[1389] UTERU2033375, UTERU2033382, UTERU2033420, UTERU2033530, UTERU2033577, UTERU2034053, UTERU2034147, UTERU2034695, UTERU2035114, UTERU2035187, UTERU2035231, UTERU2035306, UTERU2035323, UTERU2035328, UTERU2035331, UTERU2035452, UTERU2035469, UTERU2035503, UTERU2035745, UTERU2035908, UTERU2035926, UTERU2035978, UTERU2036089, UTERU2036347, UTERU2036507, UTERU2036512, UTERU2036530, UTERU2036623, UTERU2036690, UTERU2037224, UTERU2037361, UTERU2037423, UTERU2037577, UTERU2037674, UTERU2037791, UTERU2037843, UTERU2038171, UTERU2038251, UTERU3000226, UTERU3000298, UTERU3000402, UTERU3000645, UTERU3000665, UTERU3000670, UTERU3000727, UTERU3000738, UTERU3000828, UTERU3000844, UTERU3000899, UTERU3000959,

[1390] UTERU3001029, UTERU3001053, UTERU3001059, UTERU3001158, UTERU3001240, UTERU3001394, UTERU3001542, UTERU3001558, UTERU3001571, UTERU3001585, UTERU3001632, UTERU3001652, UTERU3001766, UTERU3001988, UTERU3002209, UTERU3002218, UTERU3002383, UTERU3002600, UTERU3002620, UTERU3002667, UTERU3002701, UTERU3002731, UTERU3002768, UTERU3002786, UTERU3002993, UTERU3003116, UTERU3003135, UTERU3003178, UTERU3003465, UTERU3003495, UTERU3003523, UTERU3003660, UTERU3003774, UTERU3003776, UTERU3004384, UTERU3004418, UTERU3004477, UTERU3004523, UTERU3004616, UTERU3004635, UTERU3004709, UTERU3004938, UTERU3004992, UTERU3005049, UTERU3005159, UTERU3005205, UTERU3005230, UTERU3005264, UTERU3005422, UTERU3005460,

[1391] UTERU3005536, UTERU3005585, UTERU3005767, UTERU3005907, UTERU3005970, UTERU3006008, UTERU3006228, UTERU3006308, UTERU3006538, UTERU3006640, UTERU3006687, UTERU3006720, UTERU3006798, UTERU3006884, UTERU3007021, UTERU3007104, UTERU3007108, UTERU3007134, UTERU3007419, UTERU3007640, UTERU3007731, UTERU3007913, UTERU3008280, UTERU3008463, UTERU3008660, UTERU3008671, UTERU3008722, UTERU3008917, UTERU3009259, UTERU3009490, UTERU3009517, UTERU3009690, UTERU3009775, UTERU3009871, UTERU3009979, UTERU3009987, UTERU3010029, UTERU3010409, UTERU3010526, UTERU3010604, UTERU3010892, UTERU3010919, UTERU3011063, UTERU3011092, UTERU3011273, UTERU3011398, UTERU3011558, UTERU3011579, UTERU3011795, UTERU3011837,

[1392] UTERU3012293, UTERU3012414, UTERU3012476, UTERU3012599, UTERU3012999, UTERU3013167, UTERU3013302, UTERU3013781, UTERU3014274, UTERU3014446, UTERU3014611, UTERU3014647, UTERU3014791, UTERU3014906, UTERU3015011, UTERU3015086, UTERU3015299, UTERU3015412, UTERU3015500, UTERU3015647, UTERU3015844, UTERU3016070, UTERU3016273, UTERU3016274, UTERU3016308, UTERU3016789, UTERU3017176, UTERU3017441, UTERU3017626, UTERU3017995, UTERU3018154, UTERU3018172, UTERU3018255, UTERU3018616, UTERU3018711, UTERU3019078

[1393] Of the 17,176 genes that include the cDNAs of the present invention, genes whose expression levels were high enough to detect in each of the LIVER, LYMPB, MAMGL, MESAN, MESTC, N1ESE, and NB9N4 libraries were analyzed for expression frequency. The analysis results are described below. Each is a relative value, where the expression level over all tissues is taken as 100. The larger this value, the greater the level of expression.

TABLE 33

| Clone Name | LIVER | LYMPB | MAMGL | MESAN | MESTC | N1ESE | NB9N4 |
|---|---|---|---|---|---|---|---|
| 3NB691000116 | 0 | 0 | 0 | 12.061 | 0 | 0 | 0 |
| 3NB692000281 | 0 | 4.995 | 0 | 0.816 | 0 | 4.999 | 0 |
| 3NB692000912 | 0 | 10.662 | 0 | 0 | 0 | 0 | 0 |
| 3NB692001334 | 0 | 0 | 0 | 0 | 0 | 0 | 9.082 |
| ADIPS2000425 | 0 | 0 | 0 | 0 | 0 | 17.629 | 0 |
| ADRGL2009273 | 0 | 0 | 0 | 5.151 | 0 | 0 | 0 |
| ADRGL2012038 | 0 | 0 | 0 | 0 | 0 | 0 | 69.551 |
| ASTRO1000009 | 0 | 0 | 0 | 0 | 0 | 0 | 88.342 |
| ASTRO2000046 | 0 | 0 | 0 | 4.539 | 0 | 0 | 0 |
| ASTRO2001806 | 0 | 0 | 0 | 5.305 | 0 | 0 | 0 |
| ASTRO2002035 | 0 | 0 | 0 | 40.248 | 0 | 0 | 0 |
| ASTRO2003632 | 0 | 0 | 0 | 15.405 | 0 | 0 | 14.056 |
| ASTRO2004974 | 0 | 0 | 0 | 0 | 0 | 0 | 65.738 |
| ASTRO2005687 | 9.662 | 0 | 0 | 0 | 0 | 0 | 0 |
| ASTRO2009068 | 0 | 0 | 0 | 20.982 | 0 | 0 | 0 |
| ASTRO2010819 | 0 | 0 | 0 | 2.495 | 0 | 0 | 0 |
| ASTRO2012552 | 0 | 0 | 0 | 5.481 | 0 | 0 | 0 |
| ASTRO2013585 | 0 | 0 | 0 | 1.808 | 0 | 0 | 0 |
| ASTRO2015328 | 0 | 0 | 0 | 14.112 | 0 | 0 | 0 |
| BNGH42000360 | 4.090 | 0 | 0 | 0 | 0 | 0 | 0 |
| BNGH42000815 | 0 | 0 | 0 | 32.470 | 0 | 0 | 0 |
| BNGH42005017 | 0 | 0 | 0 | 32.470 | 0 | 0 | 0 |
| BNGH42005968 | 0 | 0 | 0 | 17.034 | 0 | 0 | 0 |
| BNGH42007460 | 0 | 0 | 0 | 7.473 | 0 | 0 | 0 |
| BNGH42007709 | 1.995 | 0 | 0 | 0 | 0 | 0 | 0 |
| BRACE1000115 | 1.623 | 0 | 0 | 0 | 0 | 0 | 0 |
| BRACE2001711 | 33.720 | 0 | 0 | 0 | 0 | 0 | 0 |
| BRACE2002441 | 0 | 0 | 0 | 4.176 | 0 | 0 | 0 |
| BRACE2003172 | 2.817 | 0 | 0 | 0 | 0 | 0 | 0 |
| BRACE2003254 | 0 | 20.545 | 0 | 3.357 | 0 | 0 | 0 |
| BRACE2003846 | 0 | 14.789 | 0 | 0 | 0 | 0 | 0 |
| BRACE2007567 | 0 | 31.488 | 0 | 0 | 0 | 0 | 0 |
| BRACE2007577 | 0 | 0 | 0 | 0 | 84.570 | 0 | 0 |
| BRACE2008358 | 19.643 | 0 | 0 | 0 | 0 | 0 | 0 |
| BRACE2008653 | 0 | 0 | 0 | 3.911 | 0 | 0 | 0 |
| BRACE2008968 | 0 | 13.195 | 0 | 0 | 0 | 0 | 0 |
| BRACE2009037 | 0 | 0 | 0 | 1.083 | 0 | 0 | 0 |
| BRACE2009291 | 11.466 | 0 | 0 | 0 | 0 | 0 | 44.754 |
| BRACE2019147 | 0 | 48.599 | 0 | 0 | 0 | 0 | 0 |
| BRACE2045772 | 0 | 0 | 0 | 0 | 0 | 0 | 97.945 |
| BRACE3004150 | 0 | 0 | 0 | 14.402 | 0 | 0 | 0 |
| BRACE3005938 | 0 | 0 | 0 | 0 | 0 | 25.009 | 0 |
| BRACE3010438 | 0 | 0 | 0 | 6.640 | 0 | 0 | 0 |
| BRAMY2000585 | 0 | 0 | 0 | 0 | 0 | 55.777 | 0 |
| BRAMY2004521 | 0 | 0 | 0 | 17.578 | 0 | 0 | 0 |
| BRAMY2015211 | 0 | 0 | 0 | 48.167 | 0 | 0 | 0 |
| BRAMY2019600 | 0 | 0 | 0 | 29.939 | 0 | 0 | 0 |
| BRAMY2019989 | 0 | 43.763 | 0 | 0 | 0 | 0 | 0 |
| BRAMY2021523 | 0 | 0 | 0 | 78.633 | 0 | 0 | 0 |
| BRAMY2028796 | 0 | 0 | 0 | 0 | 0 | 33.758 | 0 |
| BRAMY2032087 | 0 | 27.482 | 0 | 4.491 | 0 | 0 | 0 |
| BRAMY2040095 | 0 | 0 | 0 | 2.535 | 0 | 0 | 0 |
| BRAMY3004377 | 0 | 0 | 0 | 3.075 | 0 | 0 | 0 |
| BRAMY3010008 | 0 | 0 | 0 | 2.158 | 50.268 | 0 | 19.691 |
| BRAWH1000040 | 0 | 0 | 0 | 2.551 | 0 | 0 | 0 |
| BRAWH1000093 | 0 | 20.933 | 0 | 0 | 0 | 0 | 0 |
| BRAWH2000588 | 0 | 0 | 0 | 4.652 | 0 | 0 | 0 |
| BRAWH2000633 | 0 | 0 | 0 | 4.916 | 0 | 0 | 0 |
| BRAWH2000839 | 0 | 0 | 0 | 6.092 | 0 | 9.327 | 0 |
| BRAWH2000926 | 0 | 0 | 0 | 0 | 0 | 95.782 | 0 |
| BRAWH2001092 | 0 | 0 | 0 | 2.607 | 15.180 | 0 | 5.946 |
| BRAWH2001103 | 56.964 | 0 | 0 | 0 | 0 | 0 | 0 |
| BRAWH2001424 | 0 | 0 | 0 | 18.879 | 0 | 0 | 0 |
| BRAWH2001439 | 0 | 0 | 0 | 3.815 | 0 | 0 | 0 |
| BRAWH2004095 | 0 | 26.826 | 0 | 0 | 0 | 0 | 0 |
| BRAWH2005068 | 0 | 0 | 0 | 0 | 0 | 0 | 13.609 |
| BRAWH2007800 | 0 | 0 | 0 | 0 | 0 | 53.345 | 0 |
| BRAWH2014188 | 0 | 16.246 | 0 | 2.655 | 0 | 0 | 0 |
| BRAWH2014511 | 0 | 0 | 0 | 15.933 | 0 | 0 | 0 |
| BRAWH2016679 | 83.525 | 0 | 0 | 0 | 0 | 0 | 0 |
| BRAWH2017685 | 0 | 0 | 0 | 0 | 0 | 11.525 | 0 |
| BRAWH2018729 | 0 | 67.618 | 0 | 0 | 0 | 0 | 0 |
| BRAWH3016271 | 0 | 0 | 0 | 20 | 0 | 0 | 0 |
| BRAWH3018063 | 0 | 0 | 0 | 19.573 | 0 | 0 | 0 |
| BRCAN2018935 | 79.072 | 0 | 0 | 0 | 0 | 0 | 0 |
| BRHIP2000534 | 0 | 0 | 0 | 3.807 | 0 | 0 | 0 |
| BRHIP2007741 | 0 | 39.391 | 0 | 0 | 0 | 0 | 0 |
| BRHIP2011491 | 0 | 0 | 0 | 0 | 0 | 18.771 | 0 |
| BRHIP2022054 | 0 | 55.882 | 0 | 0 | 0 | 0 | 0 |
| BRHIP2023888 | 0 | 0 | 0 | 2.729 | 0 | 8.356 | 0 |
| BRHIP3007586 | 0 | 0 | 0 | 12.796 | 0 | 0 | 0 |
| BRSSN1000059 | 0 | 0 | 0 | 49.907 | 0 | 0 | 0 |
| BRSSN2001869 | 0 | 0 | 0 | 11.193 | 0 | 0 | 0 |
| BRSTN2011961 | 0 | 0 | 0 | 0 | 0 | 6.577 | 0 |
| BRSTN2012069 | 0 | 0 | 0 | 0.070 | 0.817 | 1.718 | 0 |
| BRSTN2016470 | 1.897 | 0 | 0 | 0.812 | 0 | 0 | 0 |
| BRSTN2016892 | 0 | 67.714 | 0 | 0 | 0 | 0 | 0 |
| BRTHA2007998 | 0 | 0 | 0 | 0 | 74.482 | 0 | 0 |
| BRTHA2010097 | 0 | 0 | 0 | 0 | 0 | 95.344 | 0 |
| BRTHA2017972 | 0 | 0 | 0 | 62.573 | 0 | 0 | 0 |
| BRTHA3003023 | 0 | 0 | 0 | 14.988 | 0 | 45.898 | 0 |
| BRTHA3003074 | 0 | 0 | 0 | 41.752 | 0 | 0 | 0 |
| BRTHA3003736 | 18.647 | 0 | 0 | 0 | 0 | 0 | 0 |
| CD34C3000252 | 0 | 0 | 0 | 3.043 | 0 | 18.640 | 0 |
| CTONG1000087 | 0 | 23.730 | 0 | 0 | 0 | 0 | 0 |
| CTONG1000218 | 0 | 0 | 0 | 1.786 | 41.589 | 0 | 0 |
| CTONG1000241 | 18.389 | 0 | 0 | 7.866 | 0 | 0 | 0 |
| CTONG2000508 | 6.845 | 0 | 0 | 0 | 0 | 0 | 0 |
| CTONG2002073 | 12.697 | 0 | 0 | 0 | 0 | 0 | 0 |
| CTONG2002803 | 0 | 0 | 0 | 5.460 | 0 | 0 | 0 |
| CTONG2003517 | 0 | 0 | 0 | 41.570 | 0 | 0 | 0 |
| CTONG2004487 | 8.199 | 0 | 0 | 0 | 0 | 0 | 0 |
| CTONG2005028 | 0 | 0 | 0 | 25.383 | 0 | 0 | 0 |
| CTONG2005553 | 0 | 16.251 | 0 | 0 | 0 | 0 | 24.229 |
| CTONG2005585 | 0 | 0 | 0 | 0 | 0 | 0 | 94.782 |
| CTONG2006004 | 0 | 0 | 0 | 0 | 0 | 0 | 35.710 |
| CTONG2006235 | 14.200 | 0 | 0 | 0 | 0 | 0 | 0 |
| CTONG2006449 | 0 | 0 | 0 | 32.597 | 0 | 0 | 0 |
| CTONG2006611 | 0 | 0 | 0 | 26.777 | 0 | 0 | 0 |
| CTONG2006932 | 9.539 | 0 | 0 | 0 | 0 | 0 | 0 |
| CTONG2008398 | 0 | 0 | 0 | 2.835 | 0 | 0 | 0 |
| CTONG2010348 | 15.350 | 0 | 0 | 0 | 0 | 0 | 0 |
| CTONG2012158 | 0 | 0 | 0 | 33.828 | 0 | 0 | 0 |
| CTONG2012401 | 0 | 0 | 0 | 15.599 | 0 | 0 | 0 |
| CTONG2012452 | 0 | 0 | 0 | 0 | 0 | 0 | 12.048 |
| CTONG2012879 | 0 | 0 | 0 | 12.610 | 0 | 0 | 0 |
| CTONG2013907 | 0 | 0 | 0 | 7.994 | 0 | 0 | 0 |
| CTONG2013985 | 0 | 0 | 0 | 21.715 | 0 | 0 | 0 |
| CTONG2015091 | 0 | 0 | 0 | 0 | 0 | 18.442 | 0 |
| CTONG2016575 | 0 | 0 | 0 | 1.844 | 0 | 0 | 0 |
| CTONG2017500 | 0 | 0 | 0 | 9.823 | 0 | 0 | 0 |
| CTONG2017998 | 0 | 0 | 0 | 9.289 | 0 | 0 | 0 |
| CTONG2019590 | 0 | 0 | 0 | 39.901 | 0 | 0 | 0 |
| CTONG2019822 | 0 | 73.780 | 0 | 0 | 0 | 0 | 0 |
| CTONG2020484 | 0 | 0 | 0 | 2.180 | 0 | 0 | 0 |
| CTONG2022835 | 0 | 0 | 0 | 6.362 | 0 | 0 | 0 |
| CTONG3008894 | 0 | 0 | 0 | 5.391 | 0 | 0 | 0 |
| DFNES1000150 | 0 | 0 | 0 | 20.705 | 0 | 0 | 0 |
| DFNES2000011 | 0 | 0 | 0 | 0 | 47.230 | 0 | 0 |
| DFNES2000268 | 0 | 25.058 | 0 | 0 | 0 | 0 | 0 |
| DFNES2000292 | 0 | 0 | 0 | 13.916 | 0 | 0 | 0 |
| DFNES2000335 | 0 | 0 | 0 | 17.567 | 0 | 0 | 0 |
| DFNES2007299 | 0 | 74.528 | 0 | 0 | 0 | 0 | 0 |
| FCBBF1000025 | 0 | 0 | 0 | 23.732 | 0 | 0 | 0 |
| FCBBF1000027 | 0 | 0 | 0 | 4.075 | 0 | 0 | 0 |
| FCBBF1000077 | 0 | 0 | 0 | 0 | 0 | 0 | 27.401 |
| FCBBF1000197 | 0 | 0 | 0 | 3.961 | 0 | 0 | 0 |
| FCBBF1000294 | 0 | 0 | 0 | 3.992 | 0 | 0 | 0 |
| FCBBF1000367 | 0 | 0 | 0 | 5.633 | 0 | 0 | 0 |
| FCBBF1000466 | 0 | 14.452 | 0 | 0 | 0 | 0 | 0 |
| FCBBF2000591 | 0 | 0 | 92.989 | 0 | 0 | 0 | 0 |
| FCBBF2001538 | 0 | 0 | 0 | 0 | 0 | 17.303 | 0 |
| FCBBF2005658 | 0 | 0 | 0 | 28.860 | 0 | 0 | 0 |
| FCBBF3003800 | 0 | 0 | 0 | 1.461 | 0 | 0 | 0 |
| FCBBF3004473 | 0 | 0 | 0 | 8.520 | 0 | 0 | 0 |
| FCBBF3005330 | 0 | 0 | 0 | 2.569 | 0 | 0 | 0 |
| FCBBF3005497 | 0 | 17.840 | 0 | 5.830 | 0 | 0 | 0 |
| FCBBF3009541 | 0 | 9.355 | 0 | 1.529 | 0 | 0 | 0 |
| FCBBF3022593 | 0 | 0 | 0 | 25.691 | 0 | 0 | 0 |
| FCBBF3023667 | 1.151 | 0 | 0 | 1.477 | 0 | 0 | 4.493 |
| FCBBF4000446 | 0 | 0 | 0 | 2.785 | 0 | 0 | 0 |
| FEBRA2000105 | 12.434 | 0 | 0 | 0 | 0 | 0 | 0 |
| FEBRA2000581 | 0 | 0 | 0 | 2.950 | 0 | 0 | 0 |
| FEBRA2000733 | 0 | 0 | 0 | 0.625 | 0 | 3.827 | 11.403 |
| FEBRA2002527 | 0 | 64.989 | 0 | 10.620 | 0 | 0 | 0 |
| FEBRA2002933 | 3.208 | 8.398 | 0 | 2.744 | 0 | 0 | 12.520 |
| FEBRA2003822 | 47.676 | 0 | 0 | 0 | 0 | 0 | 0 |
| FEBRA2003833 | 0 | 0 | 0 | 6.412 | 0 | 0 | 0 |
| FEBRA2003926 | 6.051 | 0 | 0 | 2.588 | 0 | 15.853 | 0 |
| FEBRA2004224 | 0 | 0 | 0 | 4.293 | 0 | 0 | 0 |
| FEBRA2005572 | 0 | 40.433 | 0 | 0 | 0 | 0 | 0 |
| FEBRA2005752 | 0 | 0 | 0 | 15.434 | 0 | 0 | 0 |
| FEBRA2006270 | 0 | 0 | 0 | 0 | 0 | 26.548 | 0 |
| FEBRA2006485 | 0 | 0 | 0 | 11.280 | 0 | 0 | 0 |
| FEBRA2007801 | 0 | 0 | 0 | 18.308 | 0 | 0 | 0 |
| FEBRA2008081 | 0 | 0 | 0 | 2.626 | 0 | 0 | 0 |
| FEBRA2008302 | 0 | 0 | 0 | 11.839 | 0 | 0 | 0 |
| FEBRA2008583 | 1.146 | 0 | 0 | 0 | 0 | 0 | 0 |
| FEBRA2009022 | 0 | 0 | 0 | 12.383 | 0 | 0 | 0 |
| FEBRA2019298 | 0 | 0 | 0 | 0 | 0 | 0 | 81.897 |
| FEBRA2022504 | 0 | 0 | 0 | 6.090 | 0 | 0 | 0 |
| FELIV1000153 | 0 | 0 | 0 | 1.223 | 0 | 0 | 5.580 |
| HCASM2000363 | 0 | 0 | 0 | 7.565 | 0 | 0 | 0 |
| HCHON1000015 | 0 | 0 | 0 | 5.780 | 0 | 0 | 0 |
| HCHON1000030 | 0 | 4.116 | 0 | 0.673 | 0 | 4.119 | 0 |
| HCHON1000191 | 0 | 0 | 0 | 0 | 41.718 | 10.969 | 0 |
| HCHON2000028 | 0 | 0 | 0 | 35.299 | 0 | 0 | 0 |
| HCHON2000056 | 0 | 0 | 0 | 3.155 | 0 | 0 | 0 |
| HCHON2000226 | 0 | 0 | 0 | 0 | 0 | 9.158 | 0 |
| HCHON2000244 | 0 | 0 | 0 | 4.878 | 0 | 0 | 0 |
| HCHON2000295 | 0 | 0 | 0 | 0 | 37.831 | 0 | 0 |
| HCHON2000364 | 0 | 0 | 0 | 0 | 38.398 | 10.096 | 0 |
| HCHON2000373 | 0 | 0 | 0 | 15.033 | 0 | 0 | 0 |
| HCHON2000508 | 0 | 0 | 0 | 1.385 | 0 | 0 | 0 |
| HCHON2000676 | 0 | 0 | 0 | 22.111 | 0 | 0 | 0 |
| HCHON2000705 | 0 | 0 | 0 | 36.949 | 0 | 0 | 0 |
| HCHON2000751 | 0 | 0 | 0 | 13.239 | 0 | 0 | 0 |
| HCHON2000819 | 0 | 0 | 0 | 27.167 | 0 | 0 | 0 |
| HCHON2001108 | 0 | 0 | 0 | 0 | 0 | 0 | 72.243 |
| HCHON2001200 | 0 | 9.815 | 0 | 1.604 | 0 | 0 | 0 |
| HCHON2001217 | 0 | 0 | 0 | 7.719 | 0 | 0 | 0 |
| HCHON2001598 | 0 | 0 | 0 | 27.029 | 0 | 0 | 0 |
| HEART2000541 | 11.598 | 0 | 0 | 0 | 0 | 0 | 0 |
| HHDPC1000083 | 0 | 0 | 0 | 0 | 0 | 22.229 | 0 |
| HHDPC2000455 | 0 | 0 | 0 | 14.264 | 47.462 | 12.480 | 0 |
| HHDPC2003439 | 0 | 0 | 0 | 5.659 | 0 | 0 | 0 |
| HHDPC2003983 | 2.414 | 0 | 0 | 0 | 0 | 0 | 0 |
| HLUNG1000064 | 0 | 0 | 0 | 25.250 | 0 | 0 | 0 |
| HLUNG2000004 | 0 | 0 | 0 | 9.379 | 0 | 0 | 0 |
| HLUNG2001507 | 0 | 0 | 0 | 18.568 | 0 | 0 | 0 |
| HLUNG2001518 | 0 | 0 | 0 | 4.055 | 0 | 0 | 0 |
| HLUNG2004154 | 0 | 0 | 0 | 38.561 | 0 | 0 | 0 |
| HLUNG2004388 | 0 | 0 | 0 | 16.557 | 0 | 0 | 0 |
| HLUNG2007210 | 0 | 0 | 0 | 0 | 0 | 0 | 69.546 |
| HSYRA1000062 | 0 | 0 | 0 | 1.588 | 0 | 0 | 0 |
| HSYRA1000119 | 0 | 0 | 0 | 1.705 | 0 | 0 | 0 |
| HSYRA1000152 | 10.339 | 0 | 0 | 0 | 0 | 0 | 0 |
| HSYRA2000159 | 0 | 0 | 0 | 0.447 | 10.413 | 0 | 0 |
| HSYRA2000255 | 0 | 0 | 0 | 1.664 | 0 | 30.570 | 0 |
| HSYRA2000332 | 0 | 0 | 0 | 0 | 0 | 17.713 | 0 |
| HSYRA2000925 | 0 | 0 | 0 | 0.822 | 0 | 5.032 | 0 |
| HSYRA2001103 | 0 | 0 | 0 | 3.145 | 0 | 0 | 0 |
| HSYRA2001138 | 0 | 0 | 0 | 1.891 | 0 | 0 | 0 |
| HSYRA2001225 | 0 | 0 | 0 | 5.482 | 0 | 0 | 0 |
| HSYRA2001476 | 0 | 0 | 0 | 3.580 | 0 | 21.927 | 0 |
| HSYRA2001574 | 0 | 0 | 0 | 0 | 0 | 51.263 | 0 |
| HSYRA2001615 | 0 | 0 | 0 | 7.690 | 0 | 0 | 0 |
| HSYRA2001621 | 0 | 0 | 0 | 1.361 | 0 | 0 | 6.208 |
| HSYRA2007241 | 0 | 0 | 0 | 42.666 | 0 | 0 | 0 |
| HSYRA2007667 | 0 | 0 | 0 | 33.160 | 0 | 0 | 0 |
| IMR321000219 | 0 | 6.369 | 0 | 0 | 0 | 6.374 | 0 |
| IMR321000253 | 0 | 0 | 0 | 0 | 0 | 0 | 34.459 |
| IMR322000072 | 0 | 0 | 0 | 0 | 0 | 0 | 27.147 |
| IMR322000121 | 0 | 0 | 0 | 8.267 | 0 | 0 | 0 |
| IMR322000243 | 0 | 38.938 | 0 | 3.181 | 0 | 0 | 0 |
| IMR322000918 | 0 | 0 | 0 | 10.869 | 0 | 0 | 0 |
| IMR322000935 | 0 | 0 | 0 | 5.552 | 0 | 0 | 0 |
| IMR322000973 | 0 | 18.298 | 0 | 0 | 0 | 0 | 27.281 |
| IMR322001435 | 0 | 0 | 0 | 6.967 | 0 | 0 | 0 |
| IMR322001584 | 0 | 0 | 0 | 4.629 | 0 | 0 | 0 |
| IMR322001600 | 0 | 3.654 | 0 | 0 | 0 | 3.657 | 0 |
| IMR322001710 | 0 | 0 | 0 | 21.575 | 0 | 0 | 0 |
| IMR322012529 | 40.820 | 0 | 0 | 0 | 0 | 0 | 0 |
| KIDNE2000252 | 0 | 19.394 | 0 | 0 | 0 | 0 | 0 |
| KIDNE2000574 | 0 | 0 | 0 | 0 | 0 | 16.999 | 0 |
| KIDNE2001467 | 0 | 0 | 0 | 1.933 | 0 | 0 | 0 |
| KIDNE2002252 | 0 | 49.468 | 0 | 0 | 0 | 0 | 0 |
| KIDNE2002265 | 0 | 0 | 0 | 0 | 0 | 0 | 61.533 |
| KIDNE2002882 | 71.317 | 0 | 0 | 0 | 0 | 0 | 0 |
| KIDNE2003941 | 0 | 0 | 0 | 0 | 43.564 | 0 | 0 |
| KIDNE2004534 | 0 | 0 | 0 | 13.841 | 0 | 0 | 0 |
| KIDNE2006248 | 5.390 | 0 | 0 | 0 | 0 | 0 | 0 |
| KIDNE2006880 | 27.829 | 0 | 0 | 0 | 0 | 0 | 0 |
| KIDNE2008048 | 4.650 | 0 | 0 | 3.978 | 0 | 0 | 0 |
| KIDNE2008116 | 0 | 0 | 0 | 4.302 | 0 | 0 | 0 |
| KIDNE2013845 | 0 | 0 | 0 | 0 | 0 | 25.383 | 0 |
| KIDNE2014290 | 6.077 | 0 | 0 | 0 | 0 | 0 | 0 |
| LIVER1000017 | 54.117 | 0 | 0 | 0 | 0 | 0 | 0 |
| LIVER1000050 | 100 | 0 | 0 | 0 | 0 | 0 | 0 |
| LIVER1000055 | 100 | 0 | 0 | 0 | 0 | 0 | 0 |
| LIVER1000058 | 100 | 0 | 0 | 0 | 0 | 0 | 0 |
| LIVER1000063 | 100 | 0 | 0 | 0 | 0 | 0 | 0 |
| LIVER1000067 | 60.172 | 0 | 0 | 0 | 0 | 0 | 0 |
| LIVER1000073 | 100 | 0 | 0 | 0 | 0 | 0 | 0 |
| LIVER1000079 | 30.377 | 0 | 0 | 0 | 0 | 0 | 0 |
| LIVER1000082 | 100 | 0 | 0 | 0 | 0 | 0 | 0 |
| LIVER1000099 | 100 | 0 | 0 | 0 | 0 | 0 | 0 |
| LIVER1000104 | 21.438 | 0 | 0 | 0 | 0 | 0 | 0 |
| LIVER1000111 | 54.743 | 0 | 0 | 0 | 0 | 0 | 0 |
| LIVER1000126 | 66.455 | 0 | 0 | 0 | 0 | 0 | 0 |
| LIVER1000132 | 4.338 | 0 | 0 | 0 | 0 | 0 | 0 |
| LIVER1000139 | 100 | 0 | 0 | 0 | 0 | 0 | 0 |
| LIVER1000155 | 100 | 0 | 0 | 0 | 0 | 0 | 0 |
| LIVER1000165 | 100 | 0 | 0 | 0 | 0 | 0 | 0 |
| LIVER1000175 | 100 | 0 | 0 | 0 | 0 | 0 | 0 |
| LIVER1000224 | 100 | 0 | 0 | 0 | 0 | 0 | 0 |
| LIVER1000230 | 50.270 | 0 | 0 | 0 | 0 | 0 | 0 |
| LIVER1000278 | 100 | 0 | 0 | 0 | 0 | 0 | 0 |
| LIVER1000303 | 77.605 | 0 | 0 | 0 | 0 | 0 | 0 |
| LIVER1000397 | 100 | 0 | 0 | 0 | 0 | 0 | 0 |
| LIVER1000421 | 71.069 | 0 | 0 | 0 | 0 | 0 | 0 |
| LIVER1000433 | 100 | 0 | 0 | 0 | 0 | 0 | 0 |
| LIVER1000479 | 100 | 0 | 0 | 0 | 0 | 0 | 0 |
| LIVER1000482 | 100 | 0 | 0 | 0 | 0 | 0 | 0 |
| LIVER1000542 | 28.522 | 0 | 0 | 0 | 0 | 0 | 0 |
| LIVER2000003 | 100 | 0 | 0 | 0 | 0 | 0 | 0 |
| LIVER2000033 | 11.991 | 0 | 0 | 10.259 | 0 | 31.416 | 0 |
| LIVER2000037 | 13.711 | 0 | 0 | 0 | 0 | 0 | 0 |
| LIVER2000158 | 59.936 | 0 | 0 | 0 | 0 | 0 | 0 |
| LIVER2000216 | 100 | 0 | 0 | 0 | 0 | 0 | 0 |
| LIVER2000237 | 100 | 0 | 0 | 0 | 0 | 0 | 0 |
| LIVER2000247 | 100 | 0 | 0 | 0 | 0 | 0 | 0 |
| LIVER2000360 | 100 | 0 | 0 | 0 | 0 | 0 | 0 |
| LIVER2000416 | 19.614 | 0 | 0 | 0 | 0 | 0 | 0 |
| LIVER2000446 | 35.657 | 0 | 0 | 0 | 0 | 0 | 0 |
| LIVER2000515 | 100 | 0 | 0 | 0 | 0 | 0 | 0 |
| LIVER2000592 | 100 | 0 | 0 | 0 | 0 | 0 | 0 |
| LIVER2000626 | 100 | 0 | 0 | 0 | 0 | 0 | 0 |
| LIVER2000682 | 100 | 0 | 0 | 0 | 0 | 0 | 0 |
| LIVER2000769 | 100 | 0 | 0 | 0 | 0 | 0 | 0 |
| LIVER2000775 | 100 | 0 | 0 | 0 | 0 | 0 | 0 |
| LIVER2001051 | 100 | 0 | 0 | 0 | 0 | 0 | 0 |
| LIVER2001076 | 100 | 0 | 0 | 0 | 0 | 0 | 0 |
| LIVER2001099 | 100 | 0 | 0 | 0 | 0 | 0 | 0 |
| LIVER2001113 | 92.988 | 0 | 0 | 0 | 0 | 0 | 0 |
| LIVER2001164 | 100 | 0 | 0 | 0 | 0 | 0 | 0 |
| LIVER2001191 | 100 | 0 | 0 | 0 | 0 | 0 | 0 |
| LIVER2001265 | 89.587 | 0 | 0 | 0 | 0 | 0 | 0 |
| LIVER2001329 | 100 | 0 | 0 | 0 | 0 | 0 | 0 |
| LIVER2001389 | 100 | 0 | 0 | 0 | 0 | 0 | 0 |
| LIVER2001461 | 100 | 0 | 0 | 0 | 0 | 0 | 0 |
| LIVER2001539 | 43.167 | 0 | 0 | 0 | 0 | 0 | 0 |
| LIVER2001608 | 22.768 | 0 | 0 | 0 | 0 | 0 | 0 |
| LIVER2001835 | 70.989 | 0 | 0 | 0 | 0 | 0 | 0 |
| LIVER2002638 | 70.623 | 0 | 0 | 0 | 0 | 0 | 0 |
| LIVER2002644 | 100 | 0 | 0 | 0 | 0 | 0 | 0 |
| LIVER2002660 | 100 | 0 | 0 | 0 | 0 | 0 | 0 |
| LIVER2002702 | 100 | 0 | 0 | 0 | 0 | 0 | 0 |
| LIVER2002842 | 16.548 | 0 | 0 | 0 | 0 | 0 | 0 |
| LIVER2003008 | 89.587 | 0 | 0 | 0 | 0 | 0 | 0 |
| LIVER2003065 | 55.769 | 0 | 0 | 0 | 0 | 0 | 0 |
| LIVER2003234 | 87.905 | 0 | 0 | 0 | 0 | 0 | 0 |
| LIVER2003511 | 71.317 | 0 | 0 | 0 | 0 | 0 | 0 |
| LIVER2003524 | 100 | 0 | 0 | 0 | 0 | 0 | 0 |
| LIVER2003568 | 100 | 0 | 0 | 0 | 0 | 0 | 0 |
| LIVER2003581 | 29.021 | 0 | 0 | 0 | 0 | 0 | 0 |
| LIVER2003800 | 9.037 | 0 | 0 | 0 | 0 | 0 | 0 |
| LIVER2003854 | 100 | 0 | 0 | 0 | 0 | 0 | 0 |
| LIVER2004074 | 100 | 0 | 0 | 0 | 0 | 0 | 0 |
| LIVER2004392 | 100 | 0 | 0 | 0 | 0 | 0 | 0 |
| LIVER2004514 | 88.557 | 0 | 0 | 0 | 0 | 0 | 0 |
| LIVER2004565 | 100 | 0 | 0 | 0 | 0 | 0 | 0 |
| LIVER2005028 | 65.496 | 0 | 0 | 0 | 0 | 0 | 0 |
| LIVER2005198 | 100 | 0 | 0 | 0 | 0 | 0 | 0 |
| LIVER2005218 | 42.758 | 0 | 0 | 0 | 0 | 0 | 0 |
| LIVER2005376 | 100 | 0 | 0 | 0 | 0 | 0 | 0 |
| LIVER2005385 | 100 | 0 | 0 | 0 | 0 | 0 | 0 |
| LIVER2005512 | 100 | 0 | 0 | 0 | 0 | 0 | 0 |
| LIVER2005520 | 100 | 0 | 0 | 0 | 0 | 0 | 0 |
| LIVER2005527 | 100 | 0 | 0 | 0 | 0 | 0 | 0 |
| LIVER2005544 | 100 | 0 | 0 | 0 | 0 | 0 | 0 |
| LIVER2005625 | 100 | 0 | 0 | 0 | 0 | 0 | 0 |
| LIVER2005728 | 100 | 0 | 0 | 0 | 0 | 0 | 0 |
| LIVER2005789 | 15.607 | 0 | 0 | 0 | 0 | 0 | 0 |
| LIVER2005973 | 89.470 | 0 | 0 | 0 | 0 | 0 | 0 |
| LIVER2005981 | 24.820 | 0 | 0 | 0 | 0 | 65.025 | 0 |
| LIVER2006006 | 6.164 | 0 | 0 | 5.274 | 0 | 0 | 0 |
| LIVER2006251 | 100 | 0 | 0 | 0 | 0 | 0 | 0 |
| LIVER2006410 | 88.658 | 0 | 0 | 0 | 0 | 0 | 0 |
| LIVER2006469 | 100 | 0 | 0 | 0 | 0 | 0 | 0 |
| LIVER2006644 | 100 | 0 | 0 | 0 | 0 | 0 | 0 |
| LIVER2006764 | 100 | 0 | 0 | 0 | 0 | 0 | 0 |
| LIVER2007415 | 100 | 0 | 0 | 0 | 0 | 0 | 0 |
| LIVER2007548 | 100 | 0 | 0 | 0 | 0 | 0 | 0 |
| LIVER2007568 | 100 | 0 | 0 | 0 | 0 | 0 | 0 |
| LIVER2007721 | 100 | 0 | 0 | 0 | 0 | 0 | 0 |
| LIVER2007783 | 17.786 | 0 | 0 | 0 | 0 | 0 | 0 |
| LIVER2008053 | 100 | 0 | 0 | 0 | 0 | 0 | 0 |
| LIVER2008465 | 57.368 | 0 | 0 | 0 | 0 | 0 | 0 |
| LIVER2008473 | 100 | 0 | 0 | 0 | 0 | 0 | 0 |
| LIVER2008580 | 100 | 0 | 0 | 0 | 0 | 0 | 0 |
| LIVER2008706 | 38.666 | 0 | 0 | 0 | 0 | 0 | 0 |
| LIVER2008751 | 75.266 | 0 | 0 | 0 | 0 | 0 | 0 |
| LIVER2008945 | 100 | 0 | 0 | 0 | 0 | 0 | 0 |
| LIVER2008998 | 100 | 0 | 0 | 0 | 0 | 0 | 0 |
| LIVER2009110 | 100 | 0 | 0 | 0 | 0 | 0 | 0 |
| LIVER2009118 | 100 | 0 | 0 | 0 | 0 | 0 | 0 |
| LIVER2009554 | 100 | 0 | 0 | 0 | 0 | 0 | 0 |
| LYMPB1000141 | 0 | 97.200 | 0 | 0 | 0 | 0 | 0 |
| LYMPB1000158 | 0 | 100 | 0 | 0 | 0 | 0 | 0 |
| LYMPB2000083 | 0 | 100 | 0 | 0 | 0 | 0 | 0 |
| MAMGL1000017 | 0 | 0 | 98.615 | 0 | 0 | 0 | 0 |
| MAMGL1000032 | 0 | 0 | 52.261 | 0 | 0 | 0 | 0 |
| MAMGL1000035 | 0 | 13.709 | 65.316 | 0.747 | 0 | 4.573 | 0 |
| MAMGL1000083 | 0 | 0 | 93.965 | 0 | 0 | 0 | 0 |
| MAMGL1000096 | 0 | 0 | 97.735 | 0 | 0 | 0 | 0 |
| MAMGL1000100 | 0 | 0 | 95.758 | 0 | 0 | 0 | 0 |
| MAMGL1000132 | 0 | 0 | 100 | 0 | 0 | 0 | 0 |
| MAMGL1000151 | 0 | 0 | 100 | 0 | 0 | 0 | 0 |
| MAMGL1000173 | 0 | 0 | 85.972 | 0 | 0 | 0 | 0 |
| MAMGL1000178 | 0 | 0 | 99.213 | 0 | 0 | 0 | 0 |
| MAMGL1000182 | 0 | 0 | 100 | 0 | 0 | 0 | 0 |
| MAMGL1000184 | 0 | 0 | 100 | 0 | 0 | 0 | 0 |
| MESAN1000032 | 0 | 0 | 0 | 76.979 | 0 | 0 | 0 |
| MESAN1000035 | 0 | 0 | 0 | 100 | 0 | 0 | 0 |
| MESAN1000050 | 0 | 0 | 0 | 11.905 | 0 | 0 | 0 |
| MESAN1000079 | 0 | 0 | 0 | 53.297 | 0 | 0 | 0 |
| MESAN1000080 | 0 | 0 | 0 | 10.589 | 0 | 0 | 0 |
| MESAN1000101 | 0 | 0 | 0 | 21.403 | 0 | 0 | 0 |
| MESAN1000121 | 0 | 0 | 0 | 100 | 0 | 0 | 0 |
| MESAN1000126 | 0 | 0 | 0 | 6.622 | 0 | 0 | 0 |
| MESAN1000147 | 0 | 0 | 0 | 38.021 | 0 | 0 | 0 |
| MESAN1000180 | 0 | 0 | 0 | 100 | 0 | 0 | 0 |
| MESAN2000023 | 0 | 0 | 0 | 100 | 0 | 0 | 0 |
| MESAN2000026 | 0 | 0 | 0 | 100 | 0 | 0 | 0 |
| MESAN2000067 | 0 | 0 | 0 | 66.746 | 0 | 0 | 0 |
| MESAN2000092 | 0 | 0 | 0 | 32.812 | 0 | 0 | 0 |
| MESAN2000149 | 0 | 0 | 0 | 9.109 | 0 | 0 | 0 |
| MESAN2000167 | 0 | 0 | 0 | 100 | 0 | 0 | 0 |
| MESAN2000264 | 0 | 0 | 0 | 29.229 | 0 | 0 | 0 |
| MESAN2000267 | 0 | 0 | 0 | 1.518 | 0 | 9.300 | 0 |
| MESAN2000291 | 0 | 0 | 0 | 85.013 | 0 | 0 | 0 |
| MESAN2000337 | 0 | 0 | 0 | 29.402 | 0 | 0 | 0 |
| MESAN2000434 | 0 | 0 | 0 | 85.013 | 0 | 0 | 0 |
| MESAN2000457 | 0 | 0 | 0 | 29.370 | 0 | 0 | 0 |
| MESAN2000462 | 0 | 0 | 0 | 100 | 0 | 0 | 0 |
| MESAN2000501 | 0 | 0 | 0 | 11.125 | 0 | 0 | 0 |
| MESAN2000572 | 0 | 0 | 0 | 7.582 | 0 | 0 | 0 |
| MESAN2000608 | 6.817 | 0 | 0 | 5.832 | 0 | 0 | 0 |
| MESAN2000620 | 0 | 0 | 0 | 67.570 | 0 | 0 | 0 |
| MESAN2000711 | 0 | 0 | 0 | 100 | 0 | 0 | 0 |
| MESAN2000815 | 0 | 0 | 0 | 57.898 | 0 | 0 | 0 |
| MESAN2000894 | 0 | 0 | 0 | 75.663 | 0 | 0 | 0 |
| MESAN2000909 | 0 | 0 | 0 | 61.441 | 0 | 0 | 0 |
| MESAN2001154 | 0 | 0 | 0 | 4.940 | 0 | 0 | 0 |
| MESAN2001450 | 0 | 0 | 0 | 10.694 | 0 | 0 | 0 |
| MESAN2001627 | 0 | 0 | 0 | 48.501 | 0 | 0 | 0 |
| MESAN2001770 | 0 | 0 | 0 | 100 | 0 | 0 | 0 |
| MESAN2001979 | 0 | 0 | 0 | 100 | 0 | 0 | 0 |
| MESAN2001980 | 0 | 0 | 0 | 50.273 | 0 | 0 | 0 |
| MESAN2002086 | 0 | 0 | 0 | 3.087 | 0 | 0 | 0 |
| MESAN2002113 | 0 | 0 | 0 | 100 | 0 | 0 | 0 |
| MESAN2002122 | 0 | 0 | 0 | 32.891 | 0 | 0 | 0 |
| MESAN2002147 | 0 | 0 | 0 | 100 | 0 | 0 | 0 |
| MESAN2002186 | 0 | 0 | 0 | 8.128 | 0 | 0 | 0 |
| MESAN2002424 | 0 | 0 | 0 | 75.663 | 0 | 0 | 0 |
| MESAN2002519 | 0 | 0 | 0 | 17.197 | 0 | 0 | 0 |
| MESAN2002687 | 0 | 0 | 0 | 100 | 0 | 0 | 0 |
| MESAN2002709 | 0 | 0 | 0 | 100 | 0 | 0 | 0 |
| MESAN2002724 | 0 | 0 | 0 | 13.678 | 0 | 0 | 0 |
| MESAN2002790 | 0 | 0 | 0 | 18.138 | 0 | 0 | 0 |
| MESAN2002844 | 0 | 0 | 0 | 26.869 | 0 | 0 | 0 |
| MESAN2002940 | 0 | 0 | 0 | 11.793 | 0 | 0 | 0 |
| MESAN2002978 | 0 | 0 | 0 | 100 | 0 | 0 | 0 |
| MESAN2003035 | 0 | 0 | 0 | 53.150 | 0 | 0 | 0 |
| MESAN2003037 | 0 | 0 | 0 | 100 | 0 | 0 | 0 |
| MESAN2003039 | 0 | 0 | 0 | 60.362 | 0 | 0 | 0 |
| MESAN2003058 | 0 | 0 | 0 | 22.208 | 0 | 0 | 0 |
| MESAN2003101 | 0 | 0 | 0 | 100 | 0 | 0 | 0 |
| MESAN2003190 | 0 | 0 | 0 | 65.620 | 0 | 0 | 0 |
| MESAN2003322 | 0 | 0 | 0 | 100 | 0 | 0 | 0 |
| MESAN2003444 | 0 | 0 | 0 | 13.813 | 0 | 0 | 0 |
| MESAN2003490 | 0 | 0 | 0 | 100 | 0 | 0 | 0 |
| MESAN2003529 | 0 | 0 | 0 | 100 | 0 | 0 | 0 |
| MESAN2003622 | 0 | 0 | 0 | 2.228 | 0 | 0 | 0 |
| MESAN2003646 | 0 | 0 | 0 | 76.979 | 0 | 0 | 0 |
| MESAN2003662 | 0 | 0 | 0 | 100 | 0 | 0 | 0 |
| MESAN2003709 | 0 | 0 | 0 | 30.755 | 0 | 0 | 0 |
| MESAN2003851 | 0 | 0 | 0 | 100 | 0 | 0 | 0 |
| MESAN2004138 | 0 | 0 | 0 | 100 | 0 | 0 | 0 |
| MESAN2004288 | 0 | 0 | 0 | 19.269 | 0 | 0 | 0 |
| MESAN2004575 | 0 | 0 | 0 | 23.931 | 0 | 0 | 0 |
| MESAN2005284 | 0 | 0 | 0 | 17.981 | 0 | 0 | 0 |
| MESAN2005303 | 0 | 0 | 0 | 29.377 | 0 | 0 | 0 |
| MESAN2005371 | 0 | 0 | 0 | 100 | 0 | 0 | 0 |
| MESAN2005633 | 0 | 0 | 0 | 31.828 | 0 | 0 | 0 |
| MESAN2005689 | 0 | 0 | 0 | 23.008 | 0 | 0 | 0 |
| MESAN2005724 | 0 | 0 | 0 | 100 | 0 | 0 | 0 |
| MESAN2005766 | 0 | 0 | 0 | 3.657 | 0 | 0 | 0 |
| MESAN2005808 | 0 | 0 | 0 | 100 | 0 | 0 | 0 |
| MESAN2005811 | 0 | 0 | 0 | 100 | 0 | 0 | 0 |
| MESAN2005957 | 0 | 0 | 0 | 36.616 | 0 | 0 | 0 |
| MESAN2005958 | 0 | 0 | 0 | 9.986 | 0 | 0 | 0 |
| MESAN2006022 | 0 | 0 | 0 | 100 | 0 | 0 | 0 |
| MESAN2006043 | 0 | 0 | 0 | 59.068 | 0 | 0 | 0 |
| MESAN2006328 | 0 | 0 | 0 | 100 | 0 | 0 | 0 |
| MESAN2006401 | 0 | 0 | 0 | 6.708 | 0 | 0 | 0 |
| MESAN2006563 | 0 | 0 | 0 | 5.121 | 0 | 0 | 0 |
| MESAN2006580 | 0 | 0 | 0 | 75.663 | 0 | 0 | 0 |
| MESAN2006599 | 0 | 0 | 0 | 100 | 0 | 0 | 0 |
| MESAN2006743 | 0 | 0 | 0 | 28.586 | 0 | 0 | 0 |
| MESAN2006953 | 0 | 0 | 0 | 25.426 | 0 | 0 | 0 |
| MESAN2006971 | 0 | 0 | 0 | 22.281 | 0 | 0 | 0 |
| MESAN2007032 | 0 | 0 | 0 | 100 | 0 | 0 | 0 |
| MESAN2007440 | 0 | 0 | 0 | 100 | 0 | 0 | 0 |
| MESAN2007597 | 0 | 0 | 0 | 100 | 0 | 0 | 0 |
| MESAN2007755 | 0 | 0 | 0 | 33.922 | 0 | 0 | 0 |
| MESAN2008222 | 0 | 0 | 0 | 100 | 0 | 0 | 0 |
| MESAN2008334 | 0 | 0 | 0 | 30.484 | 0 | 0 | 0 |
| MESAN2008415 | 0 | 0 | 0 | 39.656 | 0 | 0 | 0 |
| MESAN2008460 | 0 | 0 | 0 | 100 | 0 | 0 | 0 |
| MESAN2008536 | 0 | 0 | 0 | 100 | 0 | 0 | 0 |
| MESAN2008679 | 0 | 0 | 0 | 25.983 | 0 | 0 | 0 |
| MESAN2008729 | 0 | 0 | 0 | 83.934 | 0 | 0 | 0 |
| MESAN2008821 | 0 | 0 | 0 | 100 | 0 | 0 | 0 |
| MESAN2008926 | 0 | 72.444 | 0 | 11.838 | 0 | 0 | 0 |
| MESAN2008936 | 0 | 0 | 0 | 14.752 | 0 | 0 | 0 |
| MESAN2009019 | 0 | 0 | 0 | 28.967 | 0 | 0 | 0 |
| MESAN2009081 | 0 | 0 | 0 | 17.454 | 0 | 0 | 0 |
| MESAN2009105 | 0 | 0 | 0 | 100 | 0 | 0 | 0 |
| MESAN2009311 | 0 | 0 | 0 | 100 | 0 | 0 | 0 |
| MESAN2009418 | 0 | 0 | 0 | 100 | 0 | 0 | 0 |
| MESAN2009503 | 0 | 0 | 0 | 61.778 | 0 | 0 | 0 |
| MESAN2009522 | 0 | 0 | 0 | 100 | 0 | 0 | 0 |
| MESAN2009580 | 0 | 0 | 0 | 4.118 | 0 | 0 | 0 |
| MESAN2010031 | 0 | 0 | 0 | 100 | 0 | 0 | 0 |
| MESAN2010114 | 0 | 0 | 0 | 100 | 0 | 0 | 0 |
| MESAN2010312 | 0 | 0 | 0 | 100 | 0 | 0 | 0 |
| MESAN2010321 | 0 | 0 | 0 | 100 | 0 | 0 | 0 |
| MESAN2010664 | 0 | 0 | 0 | 32.181 | 0 | 0 | 0 |
| MESAN2010681 | 0 | 0 | 0 | 100 | 0 | 0 | 0 |
| MESAN2011545 | 0 | 0 | 0 | 100 | 0 | 0 | 0 |
| MESAN2011597 | 0 | 0 | 0 | 100 | 0 | 0 | 0 |
| MESAN2011627 | 0 | 0 | 0 | 13.955 | 0 | 0 | 0 |
| MESAN2011632 | 0 | 0 | 0 | 78.423 | 0 | 0 | 0 |
| MESAN2011977 | 0 | 0 | 0 | 100 | 0 | 0 | 0 |
| MESAN2011984 | 29.577 | 0 | 0 | 6.326 | 0 | 0 | 0 |
| MESAN2012054 | 0 | 0 | 0 | 9.459 | 0 | 0 | 0 |
| MESAN2012113 | 0 | 0 | 0 | 21.877 | 0 | 0 | 0 |
| MESAN2012586 | 0 | 0 | 0 | 100 | 0 | 0 | 0 |
| MESAN2012708 | 0 | 0 | 0 | 100 | 0 | 0 | 0 |
| MESAN2012735 | 0 | 0 | 0 | 36.949 | 0 | 0 | 0 |
| MESAN2013019 | 0 | 0 | 0 | 100 | 0 | 0 | 0 |
| MESAN2013022 | 0 | 0 | 0 | 100 | 0 | 0 | 0 |
| MESAN2013183 | 0 | 0 | 0 | 100 | 0 | 0 | 0 |
| MESAN2013211 | 0 | 0 | 0 | 100 | 0 | 0 | 0 |
| MESAN2013283 | 0 | 0 | 0 | 61.778 | 0 | 0 | 0 |
| MESAN2013284 | 0 | 0 | 0 | 9.108 | 0 | 0 | 0 |
| MESAN2013611 | 0 | 0 | 0 | 100 | 0 | 0 | 0 |
| MESAN2013674 | 0 | 0 | 0 | 100 | 0 | 0 | 0 |
| MESAN2013845 | 0 | 0 | 0 | 41.380 | 0 | 0 | 0 |
| MESAN2013908 | 0 | 0 | 0 | 25.584 | 0 | 0 | 0 |
| MESAN2013936 | 0 | 0 | 0 | 100 | 0 | 0 | 0 |
| MESAN2014192 | 0 | 0 | 0 | 81.641 | 0 | 0 | 0 |
| MESAN2014295 | 0 | 0 | 0 | 75.663 | 0 | 0 | 0 |
| MESAN2014298 | 0 | 0 | 0 | 100 | 0 | 0 | 0 |
| MESAN2014412 | 0 | 0 | 0 | 71.370 | 0 | 0 | 0 |
| MESAN2014624 | 0 | 0 | 0 | 100 | 0 | 0 | 0 |
| MESAN2015277 | 0 | 0 | 0 | 100 | 0 | 0 | 0 |
| MESAN2015365 | 0 | 0 | 0 | 83.934 | 0 | 0 | 0 |
| MESAN2015391 | 0 | 0 | 0 | 74.905 | 0 | 0 | 0 |
| MESAN2015401 | 0 | 0 | 0 | 100 | 0 | 0 | 0 |
| MESAN2015501 | 0 | 0 | 0 | 100 | 0 | 0 | 0 |
| MESAN2015515 | 0 | 0 | 0 | 9.850 | 0 | 0 | 0 |
| MESAN2015708 | 0 | 0 | 0 | 34.496 | 0 | 0 | 0 |
| MESAN2016159 | 0 | 0 | 0 | 85.013 | 0 | 0 | 0 |
| MESAN2016304 | 0 | 0 | 0 | 100 | 0 | 0 | 0 |
| MESAN2016409 | 0 | 0 | 0 | 61.778 | 0 | 0 | 0 |
| MESAN2016552 | 0 | 0 | 0 | 45.115 | 0 | 0 | 0 |
| MESAN2016965 | 0 | 0 | 0 | 100 | 0 | 0 | 0 |
| MESAN2017133 | 0 | 0 | 0 | 32.534 | 0 | 0 | 0 |
| MESAN2017152 | 0 | 0 | 0 | 75.663 | 0 | 0 | 0 |
| MESAN2017373 | 0 | 0 | 0 | 12.988 | 0 | 0 | 0 |
| MESAN2017417 | 0 | 0 | 0 | 100 | 0 | 0 | 0 |
| MESAN2018209 | 0 | 0 | 0 | 100 | 0 | 0 | 0 |
| MESAN2018576 | 0 | 0 | 0 | 39.023 | 0 | 0 | 0 |
| MESAN2018670 | 0 | 0 | 0 | 100 | 0 | 0 | 0 |
| MESAN2018699 | 0 | 0 | 0 | 57.088 | 0 | 0 | 0 |
| MESTC1000042 | 0 | 0 | 0 | 0 | 96.958 | 0 | 0 |
| MESTC1000147 | 0 | 0 | 0 | 0 | 100 | 0 | 0 |
| MESTC2000150 | 0 | 0 | 0 | 0 | 100 | 0 | 0 |
| MESTC2000153 | 0 | 0 | 0 | 0 | 100 | 0 | 0 |
| MESTC2000170 | 0 | 0 | 0 | 0 | 100 | 0 | 0 |
| N1ESE2000698 | 0 | 0 | 0 | 0 | 0 | 96.458 | 0 |
| NB9N41000011 | 0 | 0 | 0 | 0 | 0 | 0 | 72.006 |
| NB9N41000047 | 0 | 0 | 0 | 0 | 0 | 0 | 88.925 |
| NB9N41000121 | 0 | 0 | 0 | 2.785 | 0 | 0 | 50.813 |
| NB9N41000135 | 0 | 0 | 0 | 0 | 0 | 0 | 75.036 |
| NB9N41000142 | 0 | 0 | 0 | 0 | 0 | 0 | 90.579 |
| NB9N41000146 | 0 | 0 | 0 | 0 | 0 | 0 | 100 |
| NB9N41000340 | 0 | 0 | 0 | 0 | 0 | 0 | 49.068 |
| NB9N42000104 | 0 | 18.811 | 0 | 6.147 | 0 | 0 | 56.090 |
| NB9N42000122 | 0 | 0 | 0 | 0 | 0 | 0 | 100 |
| NB9N42000196 | 0 | 0 | 0 | 0 | 0 | 0 | 68.342 |
| NB9N42000281 | 0 | 0 | 0 | 0 | 0 | 0 | 64.692 |
| NB9N42000314 | 0 | 0 | 0 | 0 | 0 | 0 | 100 |
| NB9N42000342 | 0 | 0 | 0 | 10.694 | 0 | 0 | 24.394 |
| NB9N42000430 | 0 | 0 | 0 | 0 | 0 | 0 | 93.650 |
| NB9N42000495 | 0 | 0 | 0 | 0 | 0 | 0 | 100 |
| NB9N42001300 | 0 | 0 | 0 | 0 | 0 | 0 | 91.584 |
| NHNPC2000187 | 0 | 0 | 0 | 0 | 0 | 0 | 15.310 |
| NHNPC2000206 | 0 | 0 | 0 | 5.093 | 0 | 0 | 0 |
| NHNPC2001931 | 0 | 0 | 0 | 5.309 | 0 | 0 | 0 |
| NT2NE1000004 | 0 | 0 | 0 | 30.623 | 0 | 0 | 0 |
| NT2NE1000163 | 0 | 0 | 0 | 1.502 | 0 | 0 | 0 |
| NT2NE2000056 | 0 | 0 | 0 | 2.913 | 0 | 0 | 0 |
| NT2NE2000260 | 0 | 19.189 | 0 | 0.448 | 0 | 0 | 0 |
| NT2NE2000913 | 0 | 0 | 0 | 27.352 | 0 | 0 | 0 |
| NT2NE2001000 | 7.460 | 0 | 0 | 0 | 0 | 0 | 0 |
| NT2NE2001617 | 0 | 0 | 0 | 16.823 | 0 | 0 | 0 |
| NT2NE2001793 | 0 | 0 | 0 | 3.846 | 0 | 0 | 0 |
| NT2NE2003887 | 54.102 | 0 | 0 | 0 | 0 | 0 | 0 |
| NT2NE2004519 | 0 | 0 | 0 | 0 | 0 | 40.694 | 0 |
| NT2NE2005688 | 0 | 0 | 0 | 0 | 64.494 | 0 | 0 |
| NT2NE2010842 | 0 | 21.396 | 0 | 0 | 0 | 0 | 0 |
| NT2NE2014104 | 14.549 | 0 | 0 | 0 | 0 | 0 | 0 |
| NT2RI1000027 | 8.764 | 0 | 0 | 0 | 0 | 0 | 0 |
| NT2RI2000064 | 0 | 0 | 0 | 1.996 | 0 | 0 | 0 |
| NT2RI2000255 | 0 | 0 | 0 | 4.438 | 0 | 0 | 0 |
| NT2RI2000282 | 0 | 0 | 0 | 1.174 | 0 | 0 | 10.709 |
| NT2RI2000284 | 0 | 0 | 0 | 1.690 | 0 | 0 | 0 |
| NT2RI2000344 | 0 | 0 | 0 | 3.002 | 0 | 0 | 0 |
| NT2RI2000578 | 0 | 0 | 0 | 0 | 0 | 7.594 | 22.627 |
| NT2RI2000671 | 0 | 0 | 0 | 0 | 0 | 0 | 35.587 |
| NT2RI2000727 | 0 | 0 | 0 | 3.837 | 0 | 0 | 0 |
| NT2RI2000865 | 0 | 0 | 0 | 0 | 0 | 0 | 94.903 |
| NT2RI2001054 | 0 | 0 | 0 | 2.206 | 0 | 0 | 0 |
| NT2RI2001540 | 0 | 0 | 0 | 0.211 | 0 | 1.293 | 3.852 |
| NT2RI2001657 | 0 | 12.142 | 0 | 7.936 | 0 | 0 | 0 |
| NT2RI2001731 | 0 | 0 | 0 | 14.045 | 0 | 0 | 0 |
| NT2RI2001769 | 0 | 0 | 0 | 0 | 0 | 50.483 | 0 |
| NT2RI2001846 | 0 | 0 | 0 | 18.273 | 0 | 0 | 0 |
| NT2RI2001859 | 0 | 0 | 0 | 7.197 | 0 | 0 | 0 |
| NT2RI2002091 | 0.233 | 0.304 | 0 | 2.487 | 1.158 | 2.741 | 2.269 |
| NT2RI2002152 | 0 | 0 | 0 | 0 | 0 | 0 | 42.547 |
| NT2RI2002316 | 0 | 0 | 0 | 2.973 | 0 | 0 | 0 |
| NT2RI2002530 | 0 | 0 | 0 | 22.382 | 0 | 0 | 0 |
| NT2RI2002654 | 0 | 0 | 0 | 2.178 | 0 | 0 | 0 |
| NT2RI2002822 | 0 | 0 | 0 | 18.605 | 0 | 0 | 0 |
| NT2RI2003051 | 8.874 | 0 | 0 | 0 | 0 | 0 | 0 |
| NT2RI2003304 | 2.275 | 11.910 | 0 | 0.973 | 0 | 5.960 | 0 |
| NT2RI2003407 | 0 | 27.466 | 0 | 4.488 | 0 | 0 | 0 |
| NT2RI2003738 | 3.033 | 3.970 | 0 | 0.649 | 0 | 0 | 0 |
| NT2RI2003751 | 0 | 0 | 0 | 5.137 | 0 | 0 | 0 |
| NT2RI2004188 | 0 | 65.160 | 0 | 0 | 0 | 0 | 0 |
| NT2RI2004284 | 0 | 0 | 0 | 0 | 0 | 0 | 54.386 |
| NT2RI2004884 | 0 | 0 | 0 | 2.865 | 0 | 0 | 0 |
| NT2RI2005115 | 0 | 0 | 0 | 22.659 | 0 | 0 | 0 |
| NT2RI2005116 | 0 | 0 | 0 | 4.740 | 0 | 29.030 | 0 |
| NT2RI2005335 | 0 | 8.784 | 0 | 0 | 0 | 0 | 0 |
| NT2RI2005405 | 0 | 6.370 | 0 | 2.082 | 0 | 0 | 0 |
| NT2RI2005579 | 0 | 0 | 0 | 34.800 | 0 | 0 | 0 |
| NT2RI2005710 | 0 | 0 | 0 | 19.356 | 0 | 0 | 0 |
| NT2RI2005814 | 0 | 29.555 | 0 | 0 | 0 | 0 | 0 |
| NT2RI2006412 | 0 | 0 | 0 | 3.040 | 0 | 0 | 0 |
| NT2RI2006647 | 0 | 0 | 0 | 17.003 | 0 | 0 | 0 |
| NT2RI2007133 | 0 | 0 | 0 | 1.455 | 0 | 0 | 0 |
| NT2RI2007277 | 0 | 22.247 | 0 | 0 | 0 | 0 | 0 |
| NT2RI2007384 | 0 | 0 | 0 | 1.606 | 0 | 0 | 0 |
| NT2RI2007498 | 0 | 0 | 0 | 0 | 35.222 | 0 | 0 |
| NT2RI2007572 | 0 | 0 | 0 | 0 | 0 | 16.968 | 0 |
| NT2RI2007827 | 0 | 0 | 0 | 27.837 | 0 | 0 | 0 |
| NT2RI2007853 | 0 | 0 | 0 | 0 | 0 | 50.846 | 0 |
| NT2RI2008045 | 0 | 0 | 0 | 2.879 | 0 | 0 | 0 |
| NT2RI2008141 | 0 | 0 | 0 | 23.787 | 0 | 0 | 0 |
| NT2RI2008336 | 3.473 | 9.091 | 0 | 1.485 | 0 | 0 | 0 |
| NT2RI2008526 | 0 | 17.398 | 0 | 0 | 0 | 0 | 0 |
| NT2RI2008724 | 0 | 0 | 0 | 0 | 0 | 41.706 | 0 |
| NT2RI2008791 | 0 | 26.476 | 0 | 0 | 0 | 0 | 0 |
| NT2RI2009065 | 4.048 | 0 | 0 | 5.195 | 0 | 10.606 | 0 |
| NT2RI2009233 | 0 | 0 | 0 | 8.364 | 0 | 0 | 0 |
| NT2RI2009583 | 1.939 | 0 | 0 | 0 | 0 | 0 | 0 |
| NT2RI2012350 | 0 | 0 | 0 | 1.484 | 0 | 0 | 0 |
| NT2RI3007543 | 0 | 0 | 0 | 3.146 | 0 | 0 | 0 |
| NT2RP6000072 | 0 | 0 | 0 | 5.992 | 0 | 0 | 0 |
| NT2RP6000077 | 0 | 0 | 0 | 23.835 | 0 | 0 | 0 |
| NT2RP7000238 | 0 | 29.375 | 0 | 0 | 0 | 0 | 0 |
| NT2RP7000624 | 0 | 0 | 0 | 16.178 | 0 | 0 | 0 |
| NT2RP7001166 | 0 | 0 | 0 | 2.773 | 0 | 0 | 0 |
| NT2RP7002379 | 0 | 0 | 0 | 3.733 | 0 | 11.432 | 0 |
| NT2RP7002450 | 0 | 0 | 0 | 0 | 0 | 60.611 | 0 |
| NT2RP7002619 | 0 | 24.725 | 0 | 0 | 0 | 24.743 | 0 |
| NT2RP7002802 | 0 | 0 | 0 | 13.551 | 0 | 0 | 0 |
| NT2RP7002875 | 0 | 0 | 0 | 3.422 | 0 | 0 | 0 |
| NT2RP7003960 | 0 | 0 | 0 | 6.144 | 0 | 0 | 0 |
| NT2RP7004114 | 0 | 0 | 0 | 20.677 | 0 | 0 | 0 |
| NT2RP7004123 | 0 | 43.546 | 0 | 7.116 | 0 | 0 | 0 |
| NT2RP7004173 | 0 | 0 | 0 | 5.664 | 0 | 17.344 | 0 |
| NT2RP7004204 | 0 | 0 | 0 | 6.323 | 0 | 0 | 0 |
| NT2RP7004728 | 0 | 0 | 0 | 5.828 | 0 | 0 | 0 |
| NT2RP7005513 | 0 | 0 | 0 | 0 | 0 | 0 | 57.185 |
| NT2RP7005750 | 0 | 0 | 0 | 13.268 | 0 | 0 | 0 |
| NT2RP7006141 | 32.007 | 0 | 0 | 0 | 0 | 0 | 0 |
| NT2RP7006188 | 0 | 0 | 0 | 9.654 | 0 | 0 | 0 |
| NT2RP7006263 | 0 | 0 | 0 | 14.931 | 0 | 0 | 0 |
| NT2RP7006717 | 0 | 0 | 0 | 7.319 | 0 | 0 | 0 |
| NT2RP7007154 | 4.943 | 0 | 0 | 0 | 0 | 0 | 0 |
| NT2RP7007842 | 0 | 0 | 0 | 7.112 | 0 | 0 | 0 |
| NT2RP7007975 | 0 | 0 | 0 | 10.120 | 0 | 0 | 0 |
| NT2RP7009097 | 0 | 0 | 0 | 6.667 | 0 | 0 | 0 |
| NT2RP7009259 | 0 | 0 | 0 | 2.083 | 0 | 0 | 0 |
| NT2RP7014910 | 0 | 0 | 0 | 0 | 0 | 0 | 40.452 |
| NT2RP7019401 | 0 | 0 | 0 | 38.500 | 0 | 0 | 0 |
| NTONG1000098 | 0 | 0 | 0 | 4.725 | 0 | 0 | 0 |
| NTONG1000264 | 0 | 0 | 0 | 3.614 | 0 | 0 | 0 |
| NTONG2000265 | 0 | 0 | 0 | 6.322 | 0 | 0 | 0 |
| NTONG2000876 | 0 | 0 | 0 | 5.163 | 0 | 0 | 0 |
| NTONG2000977 | 0 | 0 | 0 | 3.645 | 0 | 0 | 0 |
| NTONG2001137 | 9.920 | 0 | 0 | 0 | 0 | 0 | 0 |
| NTONG2001567 | 0 | 0 | 0 | 2.274 | 0 | 6.964 | 0 |
| NTONG2003839 | 0 | 0 | 0 | 9.722 | 0 | 0 | 0 |
| NTONG2004844 | 0 | 0 | 0 | 6.009 | 0 | 0 | 0 |
| NTONG2005520 | 0 | 15.106 | 0 | 2.468 | 0 | 0 | 0 |
| NTONG2006301 | 47.641 | 0 | 0 | 0 | 0 | 0 | 0 |
| NTONG2008483 | 0 | 0 | 0 | 2.963 | 0 | 0 | 0 |
| OCBBF2000013 | 0 | 0 | 0 | 7.215 | 0 | 0 | 0 |
| OCBBF2000522 | 0 | 0 | 0 | 9.376 | 0 | 0 | 0 |
| OCBBF2000712 | 0 | 0 | 0 | 0 | 81.622 | 0 | 0 |
| OCBBF2000846 | 0 | 16.606 | 0 | 0 | 0 | 0 | 0 |
| OCBBF2000982 | 0 | 19.789 | 0 | 0 | 0 | 0 | 0 |
| OCBBF2000986 | 0 | 0 | 0 | 3.573 | 0 | 0 | 0 |
| OCBBF2001687 | 0 | 0 | 0 | 7.133 | 0 | 0 | 0 |
| OCBBF2002626 | 0 | 0 | 0 | 0 | 72.937 | 0 | 0 |
| OCBBF2006849 | 0 | 45.862 | 0 | 0 | 0 | 0 | 0 |
| OCBBF2007224 | 0 | 0 | 0 | 35.012 | 0 | 0 | 0 |
| OCBBF2008041 | 0 | 0 | 0 | 7.751 | 0 | 0 | 0 |
| OCBBF2008822 | 0 | 0 | 0 | 0 | 0 | 0 | 80.650 |
| OCBBF2011021 | 0 | 0 | 0 | 5.360 | 0 | 0 | 0 |
| OCBBF2012553 | 0 | 0 | 0 | 0 | 0 | 26.635 | 0 |
| OCBBF2016841 | 0 | 0 | 0 | 22.652 | 0 | 0 | 0 |
| OCBBF2018873 | 0 | 0 | 0 | 5.138 | 0 | 0 | 0 |
| OCBBF2035226 | 0 | 0 | 0 | 0 | 0 | 0 | 19.876 |
| PEBLM1000174 | 0 | 0 | 0 | 17.733 | 0 | 0 | 0 |
| PEBLM2000222 | 0 | 0 | 0 | 0 | 50.169 | 0 | 0 |
| PEBLM2000267 | 0 | 0 | 0 | 5.214 | 0 | 0 | 0 |
| PEBLM2004452 | 0 | 0 | 0 | 5.005 | 0 | 0 | 0 |
| PEBLM2007774 | 5.222 | 0 | 0 | 0 | 26.013 | 0 | 0 |
| PERIC2005117 | 0 | 0 | 0 | 0 | 0 | 0 | 72.680 |
| PLACE5000068 | 54.438 | 0 | 0 | 0 | 0 | 0 | 0 |
| PLACE5000172 | 22.534 | 0 | 0 | 0 | 0 | 0 | 0 |
| PLACE6000379 | 0 | 12.024 | 0 | 6.550 | 0 | 0 | 0 |
| PLACE6002084 | 0 | 0 | 0 | 2.739 | 0 | 0 | 0 |
| PLACE6006549 | 20.765 | 0 | 0 | 0 | 0 | 0 | 0 |
| PLACE6008793 | 0 | 0 | 0 | 0 | 0 | 0 | 53.643 |
| PLACE6010077 | 0 | 0 | 0 | 3.228 | 0 | 0 | 0 |
| PROST1000144 | 0 | 35.578 | 0 | 0 | 0 | 0 | 0 |
| PROST1000199 | 0 | 0 | 0 | 0 | 0 | 16.593 | 0 |
| PROST1000526 | 0 | 0 | 0 | 9.369 | 0 | 0 | 0 |
| PROST1000564 | 11.652 | 0 | 0 | 4.985 | 0 | 0 | 0 |
| PROST2000138 | 0 | 0 | 0 | 3.857 | 7.486 | 5.905 | 0 |
| PROST2000432 | 0 | 0 | 0 | 51.115 | 0 | 0 | 0 |
| PROST2003517 | 0 | 0 | 0 | 9.762 | 0 | 0 | 0 |
| PROST2004095 | 4.057 | 0 | 0 | 0 | 0 | 0 | 0 |
| PROST2004251 | 0 | 20.330 | 0 | 0 | 0 | 0 | 0 |
| PROST2004270 | 0 | 0 | 0 | 2.180 | 0 | 0 | 0 |
| PROST2004416 | 0 | 0 | 0 | 5.043 | 0 | 0 | 0 |
| PROST2005793 | 0 | 0 | 0 | 14.541 | 0 | 0 | 0 |
| PROST2008360 | 0 | 0 | 0 | 6.674 | 0 | 0 | 0 |
| PROST2008770 | 6.762 | 0 | 0 | 0 | 0 | 0 | 0 |
| PROST2009731 | 0 | 0 | 0 | 0 | 93.666 | 0 | 0 |
| PROST2010782 | 2.108 | 0 | 0 | 0.902 | 0 | 0 | 0 |
| PROST2014916 | 0 | 0 | 0 | 0 | 0 | 82.735 | 0 |
| PROST2017692 | 0 | 0 | 0 | 2.733 | 0 | 16.735 | 0 |
| PUAEN1000164 | 0 | 0 | 0 | 0 | 34.378 | 0 | 0 |
| PUAEN1000322 | 0 | 0 | 0 | 4.740 | 0 | 0 | 0 |
| PUAEN2000175 | 0 | 80.086 | 0 | 0 | 0 | 0 | 0 |
| PUAEN2000374 | 0 | 0 | 0 | 1.187 | 0 | 0 | 10.828 |
| PUAEN2000594 | 0 | 0 | 0 | 39.656 | 0 | 0 | 0 |
| PUAEN2003408 | 0 | 0 | 0 | 11.167 | 0 | 0 | 0 |
| PUAEN2008314 | 0 | 0 | 0 | 39.656 | 0 | 0 | 0 |
| SALGL1000157 | 1.127 | 0 | 0 | 0 | 11.231 | 0 | 0 |
| SKMUS1000022 | 0 | 0 | 0 | 0 | 35.949 | 0 | 0 |
| SKMUS1000186 | 3.479 | 0 | 0 | 0 | 0 | 0 | 0 |
| SKMUS2000484 | 0 | 39.848 | 0 | 0 | 0 | 0 | 0 |
| SKMUS2000679 | 11.615 | 0 | 0 | 0 | 0 | 0 | 0 |
| SKMUS2000931 | 0 | 0 | 0 | 2.018 | 0 | 0 | 0 |
| SKMUS2001454 | 0 | 0 | 0 | 1.252 | 0 | 0 | 11.419 |
| SKNMC1000137 | 9.189 | 0 | 0 | 3.931 | 0 | 0 | 0 |
| SKNMC2000305 | 0 | 0 | 0 | 13.061 | 0 | 0 | 0 |
| SKNMC2000635 | 0 | 0 | 0 | 3.326 | 0 | 8.147 | 0 |
| SKNMC2000877 | 0 | 0 | 0 | 4.394 | 0 | 0 | 0 |
| SKNSH2008940 | 0 | 43.514 | 0 | 0 | 0 | 0 | 0 |
| SMINT1000016 | 21.266 | 0 | 0 | 0 | 0 | 0 | 0 |
| SMINT2000396 | 0 | 0 | 0 | 4.539 | 0 | 0 | 0 |
| SMINT2000400 | 0 | 0 | 0 | 24.805 | 0 | 0 | 0 |
| SMINT2000441 | 0 | 0 | 0 | 1.674 | 0 | 0 | 15.271 |
| SMINT2000694 | 0 | 26.973 | 0 | 0 | 0 | 0 | 0 |
| SMINT2001348 | 0 | 0 | 0 | 34.400 | 0 | 0 | 0 |
| SMINT2001818 | 0 | 21.272 | 0 | 0 | 0 | 0 | 0 |
| SMINT2003169 | 0 | 0 | 0 | 1.744 | 0 | 0 | 0 |
| SMINT2004144 | 55.082 | 0 | 0 | 0 | 0 | 0 | 0 |
| SMINT2008921 | 0 | 25.178 | 0 | 0 | 0 | 0 | 0 |
| SMINT2010639 | 23.481 | 0 | 0 | 0 | 0 | 0 | 0 |
| SPLEN1000106 | 0 | 0 | 0 | 8.631 | 0 | 0 | 0 |
| SPLEN1000116 | 4.290 | 11.231 | 0 | 0 | 0 | 0 | 0 |
| SPLEN2000242 | 83.286 | 0 | 0 | 0 | 0 | 0 | 0 |
| SPLEN2000505 | 0 | 0 | 0 | 4.688 | 0 | 0 | 0 |
| SPLEN2000882 | 0 | 0 | 0 | 13.028 | 0 | 0 | 0 |
| SPLEN2004555 | 0 | 0 | 0 | 3.947 | 0 | 0 | 0 |
| SPLEN2005806 | 0 | 0 | 0 | 0 | 0 | 13.887 | 0 |
| SPLEN2006122 | 0 | 19.112 | 0 | 0 | 0 | 0 | 0 |
| SPLEN2006133 | 0 | 21.527 | 0 | 0 | 0 | 0 | 0 |
| SPLEN2009555 | 0 | 0 | 0 | 31.496 | 0 | 0 | 0 |
| SPLEN2011419 | 0 | 0 | 0 | 8.861 | 0 | 0 | 0 |
| SPLEN2012115 | 0 | 92.880 | 0 | 0 | 0 | 0 | 0 |
| SPLEN2012624 | 43.831 | 0 | 0 | 0 | 0 | 0 | 0 |
| SPLEN2015310 | 4.968 | 0 | 0 | 0 | 0 | 0 | 0 |
| SPLEN2016268 | 0 | 0 | 0 | 1.602 | 0 | 0 | 0 |
| SPLEN2016421 | 0 | 0 | 0 | 7.682 | 0 | 0 | 0 |
| SPLEN2017620 | 0 | 0 | 0 | 19.007 | 0 | 0 | 0 |
| SPLEN2017918 | 0 | 0 | 0 | 6.762 | 0 | 20.705 | 0 |
| SPLEN2027113 | 0 | 0 | 0 | 0 | 0 | 37.161 | 0 |
| SPLEN2028466 | 0 | 0 | 0 | 1.534 | 0 | 0 | 0 |
| SPLEN2036076 | 14.241 | 0 | 0 | 0 | 0 | 0 | 0 |
| STOMA2002166 | 0 | 13.276 | 0 | 0 | 0 | 0 | 0 |
| SYNOV2001033 | 0 | 0 | 0 | 4.446 | 0 | 0 | 0 |
| SYNOV2005541 | 0 | 0 | 0 | 53.086 | 0 | 0 | 0 |
| SYNOV2009172 | 0 | 0 | 0 | 1.930 | 0 | 0 | 0 |
| SYNOV4001153 | 0 | 0 | 0 | 8.600 | 0 | 0 | 0 |
| SYNOV4007671 | 0 | 0 | 0 | 2.718 | 0 | 0 | 0 |
| TBAES2009387 | 0 | 0 | 0 | 0 | 46.168 | 0 | 18.085 |
| TESTI2000253 | 38.706 | 0 | 0 | 0 | 0 | 0 | 0 |
| TESTI2001099 | 0 | 11.120 | 0 | 3.634 | 0 | 0 | 0 |
| TESTI2001269 | 0 | 0 | 0 | 0 | 0 | 24.794 | 0 |
| TESTI2001826 | 0 | 0 | 0 | 41.489 | 0 | 0 | 0 |
| TESTI2002149 | 0 | 37.954 | 0 | 0 | 0 | 0 | 0 |
| TESTI2002365 | 0 | 0 | 0 | 4.049 | 0 | 0 | 0 |
| TESTI2005326 | 0 | 0 | 0 | 85.013 | 0 | 0 | 0 |
| TESTI2005743 | 0 | 0 | 0 | 8.145 | 0 | 0 | 0 |
| TESTI2005759 | 0 | 0 | 0 | 3.468 | 0 | 0 | 0 |
| TESTI2006588 | 0 | 0 | 0 | 2.007 | 0 | 0 | 0 |
| TESTI2007922 | 0 | 89.668 | 0 | 0 | 0 | 0 | 0 |
| TESTI2008240 | 0 | 0 | 0 | 1.855 | 0 | 0 | 0 |
| TESTI2009577 | 0 | 40.108 | 0 | 6.554 | 0 | 0 | 0 |
| TESTI2010513 | 0 | 0 | 0 | 1.457 | 0 | 0 | 0 |
| TESTI2012356 | 0 | 0 | 0 | 0 | 0 | 0 | 98.105 |
| TESTI2012778 | 0 | 8.386 | 0 | 0 | 0 | 0 | 0 |
| TESTI2017954 | 0 | 0 | 0 | 2.456 | 0 | 15.044 | 0 |
| TESTI2018014 | 0 | 0 | 0 | 14.293 | 0 | 0 | 0 |
| TESTI2018997 | 0 | 47.262 | 0 | 0 | 0 | 0 | 0 |
| TESTI2021118 | 92.988 | 0 | 0 | 0 | 0 | 0 | 0 |
| TESTI2033441 | 0 | 0 | 0 | 0 | 0 | 24.920 | 0 |
| TESTI4001467 | 0 | 0 | 0 | 20.529 | 0 | 0 | 0 |
| TESTI4002799 | 0 | 0 | 0 | 1.638 | 0 | 0 | 0 |
| TESTI4013441 | 0 | 0 | 0 | 3.489 | 13.546 | 0 | 0 |
| TESTI4014694 | 0 | 0 | 0 | 0 | 96.252 | 0 | 0 |
| TESTI4037156 | 0 | 6.280 | 0 | 1.026 | 23.900 | 0 | 9.362 |
| TESTI4040598 | 0 | 0 | 0 | 0 | 0 | 97.202 | 0 |
| THYMU1000002 | 0 | 0 | 0 | 6.584 | 0 | 0 | 20.026 |
| THYMU1000010 | 0 | 61.173 | 0 | 0 | 0 | 0 | 0 |
| THYMU1000016 | 0 | 0 | 0 | 0 | 33.377 | 0 | 0 |
| THYMU1000032 | 0 | 17.713 | 0 | 0 | 0 | 0 | 0 |
| THYMU1000359 | 4.647 | 0 | 0 | 0 | 0 | 0 | 0 |
| THYMU1000428 | 4.927 | 0 | 0 | 0 | 0 | 0 | 0 |
| THYMU2000382 | 5.254 | 13.754 | 0 | 0 | 0 | 0 | 0 |
| THYMU2000946 | 0 | 0 | 0 | 16.095 | 0 | 0 | 0 |
| THYMU2001018 | 0 | 0 | 0 | 33.490 | 0 | 0 | 0 |
| THYMU2001422 | 0 | 0 | 0 | 46.185 | 0 | 0 | 0 |
| THYMU2002583 | 0 | 23.522 | 0 | 0 | 0 | 0 | 0 |
| THYMU2002983 | 25.942 | 0 | 0 | 0 | 0 | 0 | 0 |
| THYMU2003891 | 0 | 6.622 | 0 | 0 | 0 | 0 | 0 |
| THYMU2004152 | 8.607 | 0 | 0 | 0 | 0 | 0 | 0 |
| THYMU2004344 | 0 | 28.989 | 0 | 0 | 0 | 0 | 0 |
| THYMU2005546 | 0 | 0 | 0 | 2.028 | 0 | 0 | 0 |
| THYMU2006505 | 0 | 0 | 0 | 10.124 | 0 | 0 | 0 |
| THYMU2007886 | 0 | 0 | 0 | 5.135 | 0 | 0 | 0 |
| THYMU2008185 | 0 | 0 | 0 | 0 | 0 | 0 | 97.595 |
| THYMU2009658 | 0 | 0 | 0 | 1.299 | 0 | 7.955 | 0 |
| THYMU2012625 | 9.005 | 0 | 0 | 0 | 0 | 0 | 0 |
| THYMU2013136 | 0 | 0 | 0 | 0 | 70.643 | 0 | 0 |
| THYMU2013916 | 9.614 | 0 | 0 | 0 | 0 | 0 | 0 |
| THYMU2027125 | 0 | 0 | 0 | 0 | 0 | 0 | 6.056 |
| THYMU2035735 | 0 | 0 | 0 | 4.892 | 0 | 0 | 0 |
| THYMU3038158 | 53.382 | 0 | 0 | 0 | 0 | 0 | 0 |
| TKIDN2000246 | 0 | 0 | 0 | 0 | 0 | 6.908 | 0 |
| TRACH2000472 | 7.402 | 0 | 0 | 0 | 0 | 0 | 0 |
| TRACH2000540 | 12.349 | 0 | 0 | 0 | 0 | 0 | 0 |
| TRACH2000559 | 0 | 0 | 0 | 0 | 0 | 88.443 | 0 |
| TRACH2001021 | 3.630 | 0 | 0 | 0 | 0 | 0 | 0 |
| TRACH2001289 | 0 | 0 | 0 | 0 | 29.356 | 0 | 0 |
| TRACH2001478 | 0 | 0 | 0 | 2.153 | 50.138 | 0 | 0 |
| TRACH2001607 | 8.706 | 0 | 0 | 0 | 0 | 0 | 0 |
| TRACH2001810 | 0 | 0 | 0 | 0 | 0 | 0 | 26.274 |
| TRACH2001898 | 0 | 0 | 0 | 0 | 88.050 | 0 | 0 |
| TRACH2002092 | 0 | 0 | 0 | 20.818 | 0 | 0 | 0 |
| TRACH2004499 | 0 | 0 | 0 | 0 | 0 | 66.734 | 0 |
| TRACH2005800 | 0 | 0 | 0 | 0 | 0 | 54.636 | 0 |
| TRACH2012298 | 0 | 0 | 0 | 0 | 0 | 0 | 48.010 |
| TRACH3007479 | 0 | 0 | 0 | 11.964 | 0 | 0 | 0 |
| TRACH3027229 | 93.931 | 0 | 0 | 0 | 0 | 0 | 0 |
| UMVEN1000186 | 0 | 0 | 0 | 5.878 | 0 | 0 | 0 |
| UMVEN2000133 | 0 | 13.301 | 0 | 0 | 0 | 0 | 0 |
| UTERU2000095 | 0 | 0 | 0 | 1.535 | 0 | 0 | 0 |
| UTERU2000263 | 0 | 0 | 0 | 0 | 44.254 | 0 | 0 |
| UTERU2001607 | 0 | 33.475 | 0 | 5.470 | 0 | 0 | 0 |
| UTERU2002294 | 15.736 | 0 | 0 | 0 | 0 | 0 | 0 |
| UTERU2002662 | 0 | 0 | 0 | 6.598 | 0 | 0 | 0 |
| UTERU2005593 | 0 | 0 | 0 | 4.162 | 0 | 0 | 0 |
| UTERU2005621 | 19.540 | 0 | 0 | 0 | 0 | 0 | 0 |
| UTERU2007253 | 0 | 0 | 0 | 38.210 | 0 | 0 | 0 |
| UTERU2008085 | 0 | 0 | 0 | 0.335 | 0 | 2.051 | 3.055 |
| UTERU2008302 | 0 | 0 | 0 | 0 | 0 | 30.340 | 0 |
| UTERU2010417 | 0 | 0 | 0 | 1.169 | 0 | 0 | 0 |
| UTERU2011220 | 0 | 88.827 | 0 | 0 | 0 | 0 | 0 |
| UTERU2015108 | 0 | 0 | 0 | 23.399 | 0 | 0 | 0 |
| UTERU2018566 | 0 | 0 | 0 | 66.092 | 0 | 0 | 0 |
| UTERU2019005 | 0 | 0 | 0 | 23.949 | 0 | 0 | 0 |

[1394] Genes whose expression levels were negligibly low in each of the above-described libraries are shown with their clone names below.

[1395] 3NB691000018, 3NB691000085, 3NB691000113, 3NB691000129, 3NB691000173, 3NB691000191, 3NB692000012, 3NB692000029, 3NB692000102, 3NB692000154, 3NB692000276, 3NB692000305, 3NB692000330, 3NB692000374, 3NB692000429, 3NB692000484, 3NB692000529, 3NB692000545, 3NB692000973, 3NB692001002, 3NB692001022, 3NB692001034, 3NB692001040, 3NB692001123, 3NB692001267, 3NB692001288, 3NB692001339, 3NB692001349, 3NB692001366, 3NB692001408, 3NB692001433, 3NB692001442, 3NB692001459, 3NB692001471, 3NB692001496, 3NB692001501, 3NB692001507, 3NB692001511, 3NB692001519, 3NB692001520, 3NB692001528, 3NB692001538, 3NB692001548, 3NB692001557, 3NB692001637, 3NB692001719, 3NB692001853, 3NB692001861, 3NB692002051, 3NB692002365,

[1396] 3NB692002685, 3NB692002806, 3NB692003538, 3NB692004045, 3NB692004724, 3NB692005439, 3NB692006952, 3NB692008178, 3NB692008729, ACTVT2000380, ADIPS1000064, ADIPS2000069, ADIPS2000088, ADIPS2000245, ADRGL1000002, ADRGL1000018, ADRGL1000033, ADRGL1000038, ADRGL1000065, ADRGL1000067, ADRGL1000111, ADRGL1000144, ADRGL1000147, ADRGL1000160, ADRGL1000165, ADRGL1000182, ADRGL2000006, ADRGL2000042, ADRGL2000056, ADRGL2000064, ADRGL2000074, ADRGL2000085, ADRGL2000097, ADRGL2000117, ADRGL2000142, ADRGL2000172, ADRGL2000248, ADRGL2000261, ADRGL2000323, ADRGL2000328, ADRGL2000353, ADRGL2000384, ADRGL2000428, ADRGL2000636, ADRGL2000644, ADRGL2000968, ADRGL2001119, ADRGL2001229, ADRGL2001287, ADRGL2001301,

[1397] ADRGL2001354, ADRGL2001554, ADRGL2001651, ADRGL2001756, ADRGL2001830, ADRGL2001836, ADRGL2001854, ADRGL2002013, ADRGL2002029, ADRGL2002191, ADRGL2002260, ADRGL2002392, ADRGL2002477, ADRGL2002679, ADRGL2002753, ADRGL2002857, ADRGL2003017, ADRGL2003329, ADRGL2003552, ADRGL2003585, ADRGL2003638, ADRGL2003684, ADRGL2003773, ADRGL2003785, ADRGL2004031, ADRGL2004077, ADRGL2004451, ADRGL2004459, ADRGL2004676, ADRGL2004708, ADRGL2004724, ADRGL2004749, ADRGL2004770, ADRGL2004777, ADRGL2004833, ADRGL2005336, ADRGL2005564, ADRGL2005756, ADRGL2005838, ADRGL2005926, ADRGL2005961, ADRGL2006034, ADRGL2006124, ADRGL2006177, ADRGL2006193, ADRGL2006377, ADRGL2006677, ADRGL2006732, ADRGL2006767, ADRGL2006817,

[1398] ADRGL2006846, ADRGL2006886, ADRGL2007080, ADRGL2007125, ADRGL2007283, ADRGL2007313, ADRGL2007357, ADRGL2007636, ADRGL2007651, ADRGL2007810, ADRGL2007877, ADRGL2007906, ADRGL2007974, ADRGL2008023, ADRGL2008331, ADRGL2008337, ADRGL2008535, ADRGL2008966, ADRGL2009146, ADRGL2009324, ADRGL2009489, ADRGL2009533, ADRGL2009691, ADRGL2009755, ADRGL2010152, ADRGL2010315, ADRGL2010594, ADRGL2010860, ADRGL2010974, ADRGL2011190, ADRGL2011330, ADRGL2012179, AHMSC1000138, ASTRO1000018, ASTRO1000029, ASTRO1000096, ASTRO1000165, ASTRO2000011, ASTRO2000014, ASTRO2000095, ASTRO2000141, ASTRO2000191, ASTRO2000278, ASTRO2000372, ASTRO2000381, ASTRO2000403, ASTRO2000417, ASTRO2000480, ASTRO2000482, ASTRO2000533,

[1399] ASTRO2000653, ASTRO2000662, ASTRO2000725, ASTRO2000801, ASTRO2000914, ASTRO2001001, ASTRO2001008, ASTRO2001029, ASTRO2001076, ASTRO2001088, ASTRO2001107, ASTRO2001122, ASTRO2001227, ASTRO2001249, ASTRO2001480, ASTRO2001823, ASTRO2002024, ASTRO2002064, ASTRO2002202, ASTRO2002459, ASTRO2002571, ASTRO2002632, ASTRO2002659, ASTRO2002693, ASTRO2002720, ASTRO2002733, ASTRO2002743, ASTRO2002842, ASTRO2003024, ASTRO2003212, ASTRO2003316, ASTRO2003461, ASTRO2003574, ASTRO2003581, ASTRO2003740, ASTRO2003840, ASTRO2003925, ASTRO2003960, ASTRO2004032, ASTRO2004051, ASTRO2004177, ASTRO2004217, ASTRO2004297, ASTRO2004584, ASTRO2004628, ASTRO2004751, ASTRO2004877, ASTRO2005008, ASTRO2005081, ASTRO2005096,

[1400] ASTRO2005242, ASTRO2005273, ASTRO2005343, ASTRO2005360, ASTRO2005413, ASTRO2005423, ASTRO2005553, ASTRO2005557, ASTRO2005575, ASTRO2005593, ASTRO2005726, ASTRO2005863, ASTRO2005896, ASTRO2005902, ASTRO2006356, ASTRO2006475, ASTRO2006732, ASTRO2006747, ASTRO2006920, ASTRO2006952, ASTRO2007047, ASTRO2007221, ASTRO2007377, ASTRO2007515, ASTRO2007578, ASTRO2007643, ASTRO2007666, ASTRO2007948, ASTRO2007956, ASTRO2007962, ASTRO2008040, ASTRO2008216, ASTRO2008239, ASTRO2008409, ASTRO2008425, ASTRO2008508, ASTRO2008777, ASTRO2008895, ASTRO2008960, ASTRO2008972, ASTRO2009118, ASTRO2009177, ASTRO2009333, ASTRO2009458, ASTRO2009526, ASTRO2009879, ASTRO2010072, ASTRO2010582, ASTRO2010615, ASTRO2010799,

[1401] ASTRO2010962, ASTRO2010996, ASTRO2011149, ASTRO2011422, ASTRO2011426, ASTRO2011437, ASTRO2011461, ASTRO2011834, ASTRO2011893, ASTRO2013124, ASTRO2013671, ASTRO2013802, ASTRO2014135, ASTRO2014174, ASTRO2014211, ASTRO2014363, ASTRO2014392, ASTRO2014498, ASTRO2014561, ASTRO2014576, ASTRO2014863, ASTRO2014923, ASTRO2014961, ASTRO2015162, ASTRO2015185, ASTRO2015529, ASTRO2015987, ASTRO2016044, ASTRO2016114, ASTRO2016148, ASTRO2016491, ASTRO2016681, ASTRO2016819, ASTRO2016847, ASTRO2016892, ASTRO2017348, ASTRO2017627, ASTRO2018169, ASTRO2018373, ASTRO2018540, ASTRO2019039, ASTRO2019171, ASTRO3000154, ASTRO3000172, ASTRO3000177, ASTRO3000301, ASTRO3000474, ASTRO3000482, BEAST2000454, BGGI11000123,

[1402] BGGI11000193, BGGI11000285, BGGI12000022, BGGI12000054, BGGI12000067, BGGI12000161, BGGI12000533, BGGI12000544, BGGI12000616, BGGI12000684, BGGI12000693, BGGI12000839, BGGI12001002, BGGI12001075, BGGI12001097, BGGI12001241, BGGI12001247, BGGI12001682, BGGI12001714, BLADE1000176, BLADE2000181, BLADE2000256, BLADE2000340, BLADE2000389, BLADE2000463, BLADE2000492, BLADE2000579, BLADE2000640, BLADE2000866, BLADE2000938, BLADE2001031, BLADE2001133, BLADE2001138, BLADE2001141, BLADE2001371, BLADE2001458, BLADE2001575, BLADE2001753, BLADE2001935, BLADE2001940, BLADE2001987, BLADE2002073, BLADE2002310, BLADE2002730, BLADE2002738, BLADE2002744, BLADE2002782, BLADE2002947, BLADE2002972, BLADE2003474,

[1403] BLADE2003916, BLADE2004089, BLADE2004345, BLADE2004389, BLADE2004462, BLADE2004628, BLADE2004670, BLADE2004722, BLADE2004849, BLADE2005036, BLADE2005038, BLADE2005229, BLADE2005459, BLADE2005792, BLADE2006043, BLADE2006412, BLADE2006415, BLADE2006607, BLADE2006826, BLADE2006830, BLADE2006849, BLADE2006947, BLADE2007033, BLADE2007043, BLADE2007589, BLADE2007666, BLADE2007722, BLADE2007735, BLADE2007744, BLADE2007799, BLADE2007923, BLADE2007935, BLADE2007958, BLADE2008281, BLADE2008398, BLADE2008454, BLADE2008461, BLADE2008479, BLADE2008539, BLADE2008809, BLADE2008995, BLADE2009452, BLADE2009479, BLADE2009593, BNGH41000098, BNGH41000104, BNGH41000118, BNGH41000137, BNGH41000153, BNGH41000169,

[1404] BNGH41000177, BNGH41000190, BNGH41000198, BNGH41000216, BNGH41000235, BNGH42000130, BNGH42000132, BNGH42000405, BNGH42000532, BNGH42000675, BNGH42000739, BNGH42000791, BNGH42000994, BNGH42001247, BNGH42001406, BNGH42001576, BNGH42001724, BNGH42002168, BNGH42002244, BNGH42002387, BNGH42002487, BNGH42002489, BNGH42003529, BNGH42003570, BNGH42003641, BNGH42004076, BNGH42004291, BNGH42004538, BNGH42004679, BNGH42005235, BNGH42005504, BNGH42006135, BNGH42006226, BNGH42006234, BNGH42007037, BNGH42007366, BNGH42007594, BNGH42007788, BNGH42007798, BNGH42008199, BNGH42008510, BNGH42008603, BNGH42008649, BNGH42008743, BNGH42008832, BNGH42008850, BNGH42008943, BNGH42009021, BNGH42009025, BRACE1000020,

[1405] BRACE1000042, BRACE1000047, BRACE1000051, BRACE1000065, BRACE1000070, BRACE1000073, BRACE1000084, BRACE1000087, BRACE1000092, BRACE1000093, BRACE1000101, BRACE1000114, BRACE1000124, BRACE1000131, BRACE1000132, BRACE1000159, BRACE1000166, BRACE1000169, BRACE1000186, BRACE1000187, BRACE1000239, BRACE1000258, BRACE1000451, BRACE1000475, BRACE1000572, BRACE2000061, BRACE2000077, BRACE2000078, BRACE2000100, BRACE2000109, BRACE2000141, BRACE2000148, BRACE2000183, BRACE2000229, BRACE2000232, BRACE2000245, BRACE2000256, BRACE2000266, BRACE2000267, BRACE2000280, BRACE2000300, BRACE2000307, BRACE2000331, BRACE2000332, BRACE2000347, BRACE2000351, BRACE2000368, BRACE2000392, BRACE2000441, BRACE2000487,

[1406] BRACE2000489, BRACE2000505, BRACE2000525, BRACE2000526, BRACE2000531, BRACE2000545, BRACE2000553, BRACE2000565, BRACE2000577, BRACE2000640, BRACE2000650, BRACE2000677, BRACE2000698, BRACE2000718, BRACE2000733, BRACE2000743, BRACE2000750, BRACE2000753, BRACE2000815, BRACE2000864, BRACE2000885, BRACE2000893, BRACE2000905, BRACE2000936, BRACE2000947, BRACE2000965, BRACE2000969, BRACE2000975, BRACE2000988, BRACE2001017, BRACE2001065, BRACE2001070, BRACE2001094, BRACE2001107, BRACE2001117, BRACE2001143, BRACE2001151, BRACE2001154, BRACE2001188, BRACE2001191, BRACE2001197, BRACE2001236, BRACE2001239, BRACE2001269, BRACE2001312, BRACE2001313, BRACE2001330, BRACE2001340, BRACE2001352, BRACE2001353,

[1407] BRACE2001374, BRACE2001375, BRACE2001423, BRACE2001424, BRACE2001445, BRACE2001453, BRACE2001455, BRACE2001477, BRACE2001492, BRACE2001496, BRACE2001497, BRACE2001508, BRACE2001534, BRACE2001543, BRACE2001564, BRACE2001588, BRACE2001607, BRACE2001626, BRACE2001673, BRACE2001677, BRACE2001692, BRACE2001705, BRACE2001709, BRACE2001726, BRACE2001733, BRACE2001737, BRACE2001742, BRACE2001777, BRACE2001779, BRACE2001834, BRACE2001855, BRACE2001859, BRACE2001865, BRACE2001872, BRACE2001881, BRACE2001892, BRACE2001898, BRACE2001923, BRACE2001942, BRACE2001944, BRACE2001954, BRACE2001971, BRACE2001972, BRACE2001973, BRACE2002026, BRACE2002034, BRACE2002050, BRACE2002081, BRACE2002091, BRACE2002139,

[1408] BRACE2002142, BRACE2002151, BRACE2002157, BRACE2002176, BRACE2002202, BRACE2002206, BRACE2002227, BRACE2002260, BRACE2002297, BRACE2002304, BRACE2002356, BRACE2002392, BRACE2002394, BRACE2002409, BRACE2002431, BRACE2002444, BRACE2002458, BRACE2002467, BRACE2002468, BRACE2002478, BRACE2002495, BRACE2002582, BRACE2002585, BRACE2002589, BRACE2002590, BRACE2002606, BRACE2002613, BRACE2002614, BRACE2002617, BRACE2002623, BRACE2002635, BRACE2002649, BRACE2002661, BRACE2002676, BRACE2002677, BRACE2002682, BRACE2002685, BRACE2002695, BRACE2002707, BRACE2002736, BRACE2002752, BRACE2002755, BRACE2002762, BRACE2002772, BRACE2002792, BRACE2002796, BRACE2002803, BRACE2002807, BRACE2002812, BRACE2002834,

[1409] BRACE2002849, BRACE2002857, BRACE2002860, BRACE2002861, BRACE2002884, BRACE2002896, BRACE2002948, BRACE2003037, BRACE2003078, BRACE2003097, BRACE2003110, BRACE2003168, BRACE2003199, BRACE2003210, BRACE2003217, BRACE2003269, BRACE2003285, BRACE2003304, BRACE2003319, BRACE2003398, BRACE2003420, BRACE2003428, BRACE2003431, BRACE2003512, BRACE2003516, BRACE2003527, BRACE2003539, BRACE2003540, BRACE2003594, BRACE2003598, BRACE2003609, BRACE2003614, BRACE2003628, BRACE2003639, BRACE2003700, BRACE2003713, BRACE2003766, BRACE2003785, BRACE2003788, BRACE2003800, BRACE2003802, BRACE2003825, BRACE2003827, BRACE2003845, BRACE2003847, BRACE2003848, BRACE2003873, BRACE2003885, BRACE2003887, BRACE2003892,

[1410] BRACE2003904, BRACE2003905, BRACE2003928, BRACE2003944, BRACE2003954, BRACE2003982, BRACE2003987, BRACE2005034, BRACE2005047, BRACE2005063, BRACE2005083, BRACE2005087, BRACE2005090, BRACE2005099, BRACE2005118, BRACE2005124, BRACE2005138, BRACE2005151, BRACE2005160, BRACE2005169, BRACE2005189, BRACE2005193, BRACE2005196, BRACE2005198, BRACE2005216, BRACE2005231, BRACE2005243, BRACE2005251, BRACE2005253, BRACE2005290, BRACE2005298, BRACE2005328, BRACE2005329, BRACE2005337, BRACE2005348, BRACE2005363, BRACE2005395, BRACE2005408, BRACE2005433, BRACE2005434, BRACE2005448, BRACE2005450, BRACE2005453, BRACE2005457, BRACE2005460, BRACE2005489, BRACE2005518, BRACE2005556, BRACE2005562, BRACE2005624,

[1411] BRACE2005642, BRACE2005661, BRACE2005667, BRACE2005681, BRACE2005719, BRACE2005731, BRACE2005742, BRACE2005762, BRACE2005773, BRACE2005787, BRACE2005795, BRACE2005800, BRACE2005858, BRACE2005869, BRACE2005875, BRACE2005881, BRACE2005898, BRACE2005904, BRACE2005906, BRACE2005907, BRACE2005911, BRACE2005937, BRACE2005949, BRACE2005981, BRACE2005991, BRACE2006055, BRACE2006072, BRACE2006075, BRACE2006084, BRACE2006089, BRACE2006102, BRACE2006105, BRACE2006122, BRACE2006137, BRACE2006143, BRACE2006162, BRACE2006167, BRACE2006174, BRACE2006240, BRACE2006245, BRACE2006249, BRACE2006258, BRACE2006264, BRACE2006274, BRACE2006281, BRACE2006298, BRACE2006319, BRACE2006344, BRACE2006354, BRACE2006363,

[1412] BRACE2006378, BRACE2006380, BRACE2006393, BRACE2006397, BRACE2006413, BRACE2006417, BRACE2006453, BRACE2006459, BRACE2006488, BRACE2006514, BRACE2006534, BRACE2006537, BRACE2006540, BRACE2006547, BRACE2006564, BRACE2006587, BRACE2006598, BRACE2006636, BRACE2006685, BRACE2006703, BRACE2006743, BRACE2006753, BRACE2006783, BRACE2006821, BRACE2006833, BRACE2006859, BRACE2006871, BRACE2006900, BRACE2006909, BRACE2006911, BRACE2006924, BRACE2006935, BRACE2006937, BRACE2006944, BRACE2006951, BRACE2006982, BRACE2006986, BRACE2007013, BRACE2007064, BRACE2007068, BRACE2007087, BRACE2007089, BRACE2007109, BRACE2007138, BRACE2007174, BRACE2007191, BRACE2007197, BRACE2007201, BRACE2007203, BRACE2007232,

[1413] BRACE2007254, BRACE2007262, BRACE2007274, BRACE2007281, BRACE2007295, BRACE2007358, BRACE2007396, BRACE2007398, BRACE2007401, BRACE2007411, BRACE2007447, BRACE2007477, BRACE2007502, BRACE2007503, BRACE2007518, BRACE2007522, BRACE2007527, BRACE2007538, BRACE2007563, BRACE2007621, BRACE2007640, BRACE2007641, BRACE2007646, BRACE2007663, BRACE2007671, BRACE2007682, BRACE2007685, BRACE2007708, BRACE2007727, BRACE2007749, BRACE2007760, BRACE2007761, BRACE2007764, BRACE2007767, BRACE2007768, BRACE2007769, BRACE2007784, BRACE2007786, BRACE2007798, BRACE2007799, BRACE2007801, BRACE2007832, BRACE2007836, BRACE2007868, BRACE2007882, BRACE2007888, BRACE2007902, BRACE2007920, BRACE2007937, BRACE2007944,

[1414] BRACE2007952, BRACE2008008, BRACE2008015, BRACE2008021, BRACE2008097, BRACE2008102, BRACE2008114, BRACE2008144, BRACE2008172, BRACE2008216, BRACE2008218, BRACE2008251, BRACE2008276, BRACE2008295, BRACE2008308, BRACE2008336, BRACE2008361, BRACE2008380, BRACE2008385, BRACE2008399, BRACE2008401, BRACE2008402, BRACE2008410, BRACE2008420, BRACE2008443, BRACE2008473, BRACE2008480, BRACE2008481, BRACE2008488, BRACE2008495, BRACE2008500, BRACE2008553, BRACE2008594, BRACE2008604, BRACE2008615, BRACE2008622, BRACE2008629, BRACE2008655, BRACE2008656, BRACE2008706, BRACE2008708, BRACE2008710, BRACE2008754, BRACE2008797, BRACE2008847, BRACE2008857, BRACE2008861, BRACE2008867, BRACE2008881, BRACE2008883,

[1415] BRACE2008917, BRACE2008919, BRACE2008941, BRACE2008948, BRACE2008960, BRACE2008999, BRACE2009014, BRACE2009016, BRACE2009031, BRACE2009044, BRACE2009045, BRACE2009053, BRACE2009122, BRACE2009131, BRACE2009185, BRACE2009188, BRACE2009212, BRACE2009221, BRACE2009235, BRACE2009238, BRACE2009255, BRACE2009270, BRACE2009272, BRACE2009274, BRACE2009275, BRACE2009293, BRACE2009307, BRACE2009311, BRACE2009318, BRACE2009323, BRACE2009366, BRACE2009421, BRACE2009428, BRACE2009434, BRACE2009437, BRACE2009483, BRACE2009517, BRACE2009533, BRACE2009558, BRACE2009566, BRACE2009591, BRACE2009620, BRACE2009654, BRACE2009721, BRACE2009732, BRACE2009754, BRACE2009828, BRACE2009886, BRACE2009907, BRACE2009957,

[1416] BRACE2010170, BRACE2010171, BRACE2010203, BRACE2010208, BRACE2010336, BRACE2010348, BRACE2010440, BRACE2010444, BRACE2010477, BRACE2010489, BRACE2010535, BRACE2010550, BRACE2010598, BRACE2010632, BRACE2010642, BRACE2010651, BRACE2010669, BRACE2010684, BRACE2010753, BRACE2010813, BRACE2010828, BRACE2010837, BRACE2010888, BRACE2010937, BRACE2010983, BRACE2011007, BRACE2011025, BRACE2011183, BRACE2011199, BRACE2011265, BRACE2011389, BRACE2011478, BRACE2011545, BRACE2011592, BRACE2011611, BRACE2011646, BRACE2011677, BRACE2011703, BRACE2011747, BRACE2011838, BRACE2011892, BRACE2011904, BRACE2011947, BRACE2012061, BRACE2012062, BRACE2012185, BRACE2012222, BRACE2012232, BRACE2012291, BRACE2012317,

[1417] BRACE2012510, BRACE2012528, BRACE2012625, BRACE2012653, BRACE2012814, BRACE2012833, BRACE2012838, BRACE2012936, BRACE2012947, BRACE2013009, BRACE2013010, BRACE2013126, BRACE2013132, BRACE2013149, BRACE2013369, BRACE2013806, BRACE2013855, BRACE2013911, BRACE2014108, BRACE2014161, BRACE2014232, BRACE2014257, BRACE2014268, BRACE2014306, BRACE2014475, BRACE2014657, BRACE2014746, BRACE2014780, BRACE2014818, BRACE2014821, BRACE2014824, BRACE2014850, BRACE2014854, BRACE2015031, BRACE2015058, BRACE2015132, BRACE2015262, BRACE2015270, BRACE2015287, BRACE2015314, BRACE2015352, BRACE2015368, BRACE2015412, BRACE2015436, BRACE2015741, BRACE2015756, BRACE2015969, BRACE2015995, BRACE2016058, BRACE2016194,

[1418] BRACE2016315, BRACE2016325, BRACE2016335, BRACE2016362, BRACE2016366, BRACE2016465, BRACE2016516, BRACE2016583, BRACE2016708, BRACE2016821, BRACE2016896, BRACE2016981, BRACE2017108, BRACE2017124, BRACE2017298, BRACE2017359, BRACE2017397, BRACE2017410, BRACE2017438, BRACE2017574, BRACE2017580, BRACE2017587, BRACE2017720, BRACE2017844, BRACE2017872, BRACE2017929, BRACE2017934, BRACE2017985, BRACE2017992, BRACE2018337, BRACE2018443, BRACE2018448, BRACE2018568, BRACE2018700, BRACE2018727, BRACE2018736, BRACE2018759, BRACE2018762, BRACE2018782, BRACE2018847, BRACE2019004, BRACE2019044, BRACE2019244, BRACE2019258, BRACE2019327, BRACE2019348, BRACE2019371, BRACE2019467, BRACE2019510, BRACE2019519,

[1419] BRACE2019528, BRACE2019618, BRACE2019696, BRACE2019703, BRACE2019843, BRACE2019865, BRACE2019872, BRACE2019877, BRACE2020028, BRACE2020077, BRACE2020097, BRACE2020157, BRACE2020278, BRACE2020358, BRACE2020467, BRACE2020584, BRACE2020652, BRACE2020709, BRACE2020742, BRACE2020756, BRACE2020863, BRACE2020982, BRACE2021014, BRACE2021143, BRACE2021148, BRACE2021245, BRACE2021254, BRACE2021264, BRACE2021344, BRACE2021433, BRACE2021478, BRACE2021541, BRACE2021670, BRACE2021695, BRACE2021708, BRACE2021721, BRACE2021932, BRACE2021936, BRACE2022030, BRACE2022158, BRACE2022196, BRACE2022270, BRACE2022328, BRACE2022333, BRACE2022389, BRACE2022394, BRACE2022435, BRACE2022448, BRACE2022450, BRACE2022549,

[1420] BRACE2022633, BRACE2022638, BRACE2022693, BRACE2022848, BRACE2022928, BRACE2022990, BRACE2023069, BRACE2023070, BRACE2023223, BRACE2023268, BRACE2023284, BRACE2023404, BRACE2023451, BRACE2023540, BRACE2023633, BRACE2023718, BRACE2023727, BRACE2023744, BRACE2023800, BRACE2023801, BRACE2024074, BRACE2024222, BRACE2024610, BRACE2024627, BRACE2024781, BRACE2024826, BRACE2025018, BRACE2025316, BRACE2025333, BRACE2025437, BRACE2025452, BRACE2025492, BRACE2025710, BRACE2025796, BRACE2025992, BRACE2026054, BRACE2026131, BRACE2026141, BRACE2026142, BRACE2026293, BRACE2026294, BRACE2026404, BRACE2026675, BRACE2026725, BRACE2026836, BRACE2026920, BRACE2026971, BRACE2027018, BRACE2027221, BRACE2027258,

[1421] BRACE2027312, BRACE2027382, BRACE2027389, BRACE2027408, BRACE2027643, BRACE2027767, BRACE2027770, BRACE2027879, BRACE2027896, BRACE2027970, BRACE2028171, BRACE2028392, BRACE2028410, BRACE2028636, BRACE2028741, BRACE2028956, BRACE2028970, BRACE2029112, BRACE2029356, BRACE2029396, BRACE2029581, BRACE2029644, BRACE2029849, BRACE2030039, BRACE2030096, BRACE2030323, BRACE2030326, BRACE2030341, BRACE2030345, BRACE2030736, BRACE2030883, BRACE2030884, BRACE2031154, BRACE2031232, BRACE2031527, BRACE2031531, BRACE2031553, BRACE2031899, BRACE2032044, BRACE2032090, BRACE2032134, BRACE2032148, BRACE2032182, BRACE2032329, BRACE2032385, BRACE2032436, BRACE2032477, BRACE2032502, BRACE2032538, BRACE2032584,

[1422] BRACE2032823, BRACE2033128, BRACE2033394, BRACE2033478, BRACE2033720, BRACE2033786, BRACE2034434, BRACE2034523, BRACE2034616, BRACE2034622, BRACE2034870, BRACE2035003, BRACE2035120, BRACE2035124, BRACE2035191, BRACE2035278, BRACE2035381, BRACE2035441, BRACE2035485, BRACE2036005, BRACE2036096, BRACE2036743, BRACE2036830, BRACE2036834, BRACE2036900, BRACE2037132, BRACE2037294, BRACE2037295, BRACE2037299, BRACE2037310, BRACE2037431, BRACE2037692, BRACE2037847, BRACE2038114, BRACE2038269, BRACE2038271, BRACE2038329, BRACE2038492, BRACE2038551, BRACE2038618, BRACE2039009, BRACE2039128, BRACE2039170, BRACE2039249, BRACE2039286, BRACE2039297, BRACE2039327, BRACE2039362, BRACE2039475, BRACE2039600,

[1423] BRACE2039607, BRACE2039624, BRACE2039734, BRACE2039823, BRACE2039832, BRACE2039893, BRACE2039986, BRACE2040138, BRACE2040325, BRACE2040514, BRACE2040640, BRACE2040987, BRACE2041009, BRACE2041095, BRACE2041200, BRACE2041264, BRACE2041890, BRACE2041898, BRACE2042394, BRACE2042398, BRACE2042550, BRACE2042620, BRACE2042628, BRACE2042873, BRACE2043036, BRACE2043105, BRACE2043142, BRACE2043248, BRACE2043349, BRACE2043381, BRACE2043774, BRACE2043942, BRACE2044057, BRACE2044105, BRACE2044263, BRACE2044286, BRACE2044304, BRACE2044473, BRACE2044510, BRACE2044640, BRACE2044816, BRACE2044946, BRACE2044949, BRACE2045300, BRACE2045428, BRACE2045445, BRACE2045596, BRACE2045947, BRACE2045954, BRACE2046251,

[1424] BRACE2046295, BRACE2046976, BRACE2047011, BRACE2047232, BRACE2047350, BRACE2047377, BRACE2047385, BRACE2047492, BRACE2047558, BRACE2047573, BRACE2047835, BRACE2047893, BRACE2047975, BRACE3000071, BRACE3000404, BRACE3000520, BRACE3000697, BRACE3000840, BRACE3000973, BRACE3001002, BRACE3001058, BRACE3001066, BRACE3001113, BRACE3001217, BRACE3001299, BRACE3001384, BRACE3001391, BRACE3001403, BRACE3001595, BRACE3001754, BRACE3001948, BRACE3001973, BRACE3002184, BRACE3002298, BRACE3002344, BRACE3002390, BRACE3002420, BRACE3002508, BRACE3002541, BRACE3002756, BRACE3003004, BRACE3003026, BRACE3003053, BRACE3003192, BRACE3003413, BRACE3003595, BRACE3003698, BRACE3003866, BRACE3003920, BRACE3004046,

[1425] BRACE3004058, BRACE3004113, BRACE3004205, BRACE3004358, BRACE3004371, BRACE3004435, BRACE3004477, BRACE3004767, BRACE3004772, BRACE3004783, BRACE3004843, BRACE3004862, BRACE3004880, BRACE3004887, BRACE3004981, BRACE3004996, BRACE3004998, BRACE3005103, BRACE3005127, BRACE3005145, BRACE3005217, BRACE3005225, BRACE3005430, BRACE3005499, BRACE3005760, BRACE3005870, BRACE3005903, BRACE3005989, BRACE3006113, BRACE3006185, BRACE3006226, BRACE3006462, BRACE3006463, BRACE3006553, BRACE3006872, BRACE3006917, BRACE3007058, BRACE3007084, BRACE3007085, BRACE3007258, BRACE3007322, BRACE3007472, BRACE3007480, BRACE3007559, BRACE3007625, BRACE3007642, BRACE3007649, BRACE3007767, BRACE3007869, BRACE3008036,

[1426] BRACE3008066, BRACE3008092, BRACE3008095, BRACE3008137, BRACE3008255, BRACE3008337, BRACE3008384, BRACE3008720, BRACE3008772, BRACE3009044, BRACE3009075, BRACE3009090, BRACE3009127, BRACE3009197, BRACE3009237, BRACE3009265, BRACE3009297, BRACE3009377, BRACE3009392, BRACE3009416, BRACE3009539, BRACE3009574, BRACE3009701, BRACE3009708, BRACE3009724, BRACE3009993, BRACE3010076, BRACE3010079, BRACE3010086, BRACE3010221, BRACE3010283, BRACE3010315, BRACE3010397, BRACE3010416, BRACE3010428, BRACE3010435, BRACE3010702, BRACE3010862, BRACE3011271, BRACE3011421, BRACE3011447, BRACE3011505, BRACE3011634, BRACE3011774, BRACE3012357, BRACE3012574, BRACE3012806, BRACE3012930, BRACE3013119, BRACE3013418,

[1427] BRACE3013576, BRACE3013740, BRACE3013780, BRACE3013874, BRACE3013936, BRACE3013986, BRACE3014005, BRACE3014068, BRACE3014231, BRACE3014290, BRACE3014317, BRACE3014523, BRACE3014714, BRACE3014807, BRACE3014942, BRACE3015090, BRACE3015121, BRACE3015262, BRACE3015521, BRACE3015808, BRACE3015829, BRACE3015894, BRACE3015898, BRACE3016020, BRACE3016122, BRACE3016167, BRACE3016170, BRACE3016580, BRACE3016788, BRACE3016810, BRACE3016862, BRACE3016884, BRACE3017083, BRACE3017253, BRACE3018083, BRACE3018308, BRACE3018963, BRACE3019055, BRACE3019071, BRACE3019084, BRACE3019570, BRACE3019611, BRACE3019817, BRACE3019828, BRACE3019941, BRACE3020151, BRACE3020194, BRACE3020286, BRACE3020356, BRACE3020594,

[1428] BRACE3020669, BRACE3020671, BRACE3020890, BRACE3021148, BRACE3021430, BRACE3021517, BRACE3021805, BRACE3022051, BRACE3022303, BRACE3022312, BRACE3022340, BRACE3022847, BRACE3023604, BRACE3023912, BRACE3024073, BRACE3024359, BRACE3024379, BRACE3024444, BRACE3024497, BRACE3024537, BRACE3024659, BRACE3024662, BRACE3024879, BRACE3025153, BRACE3025302, BRACE3025457, BRACE3025531, BRACE3025627, BRACE3025630, BRACE3025719, BRACE3026008, BRACE3026075, BRACE3026161, BRACE3026290, BRACE3026345, BRACE3026456, BRACE3026735, BRACE3026802, BRACE3026844, BRACE3026947, BRACE3026993, BRACE3027242, BRACE3027256, BRACE3027326, BRACE3027478, BRACE3027480, BRACE3027931, BRACE3027976, BRACE3028214, BRACE3028241,

[1429] BRACE3028360, BRACE3028895, BRACE3028998, BRACE3029005, BRACE3029021, BRACE3029205, BRACE3029447, BRACE3030057, BRACE3030103, BRACE3030538, BRACE3030748, BRACE3030866, BRACE3031161, BRACE3031184, BRACE3031185, BRACE3031315, BRACE3031372, BRACE3031579, BRACE3031728, BRACE3031838, BRACE3031843, BRACE3032427, BRACE3032455, BRACE3032537, BRACE3032538, BRACE3032631, BRACE3032771, BRACE3032980, BRACE3032983, BRACE3033525, BRACE3034159, BRACE3034183, BRACE3034389, BRACE3034964, BRACE3034993, BRACE3035168, BRACE3035227, BRACE3036156, BRACE3036271, BRACE3037612, BRACE3037637, BRACE3037803, BRACE3038012, BRACE3038030, BRACE3038569, BRACE3038570, BRACE3038687, BRACE3038760, BRACE3039288, BRACE3039358,

[1430] BRACE3039378, BRACE3039454, BRACE3040012, BRACE3040239, BRACE3040504, BRACE3040644, BRACE3040856, BRACE3040863, BRACE3041059, BRACE3041162, BRACE3041827, BRACE3042046, BRACE3042210, BRACE3042326, BRACE3042409, BRACE3042432, BRACE3042594, BRACE3043597, BRACE3044090, BRACE3044172, BRACE3044247, BRACE3044377, BRACE3044389, BRACE3044495, BRACE3045011, BRACE3045033, BRACE3045078, BRACE3045145, BRACE3045424, BRACE3045708, BRACE3045981, BRACE3046049, BRACE3046152, BRACE3046294, BRACE3046450, BRACE3046466, BRACE3046491, BRACE3046609, BRACE3046762, BRACE3046837, BRACE3046855, BRACE3046966, BRACE3047018, BRACE3047482, BRACE3047801, BRALZ1000047, BRALZ1000103, BRALZ2000189, BRALZ2000263, BRALZ2000988,

[1431] BRALZ2001038, BRALZ2001279, BRALZ2001350, BRALZ2001445, BRALZ2001559, BRALZ2001743, BRALZ2001834, BRALZ2002174, BRALZ2002418, BRALZ2002477, BRALZ2003119, BRALZ2003330, BRALZ2003453, BRALZ2003525, BRALZ2004397, BRALZ2005467, BRALZ2005471, BRALZ2005888, BRALZ2005950, BRALZ2005992, BRALZ2006288, BRALZ2006474, BRALZ2006560, BRALZ2006734, BRALZ2006800, BRALZ2006976, BRALZ2007376, BRALZ2007545, BRALZ2007576, BRALZ2007661, BRALZ2007790, BRALZ2007793, BRALZ2007952, BRALZ2008031, BRALZ2008166, BRALZ2008462, BRALZ2008617, BRALZ2008696, BRALZ2008763, BRALZ2008869, BRALZ2008930, BRALZ2009446, BRALZ2009482, BRALZ2009486, BRALZ2010186, BRALZ2010842, BRALZ2011337, BRALZ2011796, BRALZ2011880, BRALZ2012050,

[1432] BRALZ2012183, BRALZ2012848, BRALZ2013621, BRALZ2013690, BRALZ2014054, BRALZ2014316, BRALZ2014484, BRALZ2014951, BRALZ2015168, BRALZ2015811, BRALZ2016085, BRALZ2016498, BRALZ2017359, BRALZ2017531, BRALZ2017607, BRALZ2017620, BRALZ2017844, BRALZ2018342, BRALZ2018492, BRALZ2018834, BRALZ2019047, BRAMY1000095, BRAMY1000098, BRAMY1000130, BRAMY1000157, BRAMY1000173, BRAMY2000021, BRAMY2000025, BRAMY2000052, BRAMY2000076, BRAMY2000086, BRAMY2000151, BRAMY2000181, BRAMY2000196, BRAMY2000231, BRAMY2000277, BRAMY2000354, BRAMY2000388, BRAMY2000411, BRAMY2000508, BRAMY2000562, BRAMY2000653, BRAMY2000814, BRAMY2000893, BRAMY2000946, BRAMY2000981, BRAMY2000987, BRAMY2001068, BRAMY2001114, BRAMY2001203,

[1433] BRAMY2001282, BRAMY2001367, BRAMY2001427, BRAMY2001473, BRAMY2001678, BRAMY2002005, BRAMY2002044, BRAMY2002072, BRAMY2002158, BRAMY2002311, BRAMY2002339, BRAMY2002364, BRAMY2002369, BRAMY2002479, BRAMY2002493, BRAMY2002525, BRAMY2002584, BRAMY2002604, BRAMY2002621, BRAMY2002638, BRAMY2002739, BRAMY2002799, BRAMY2002853, BRAMY2002862, BRAMY2002956, BRAMY2003008, BRAMY2003037, BRAMY2003117, BRAMY2003287, BRAMY2003325, BRAMY2003529, BRAMY2003538, BRAMY2003585, BRAMY2003634, BRAMY2003653, BRAMY2003681, BRAMY2003893, BRAMY2003897, BRAMY2003898, BRAMY2003904, BRAMY2003926, BRAMY2003929, BRAMY2004031, BRAMY2004058, BRAMY2004183, BRAMY2004335, BRAMY2004351, BRAMY2004352, BRAMY2004363, BRAMY2004387,

[1434] BRAMY2004492, BRAMY2004524, BRAMY2004537, BRAMY2004542, BRAMY2004756, BRAMY2004771, BRAMY2005052, BRAMY2005064, BRAMY2005094, BRAMY2005151, BRAMY2005182, BRAMY2005244, BRAMY2005391, BRAMY2005488, BRAMY2005576, BRAMY2005648, BRAMY2005662, BRAMY2005708, BRAMY2005711, BRAMY2006092, BRAMY2006118, BRAMY2006149, BRAMY2006366, BRAMY2006375, BRAMY2006397, BRAMY2006411, BRAMY2006459, BRAMY2006466, BRAMY2006659, BRAMY2006779, BRAMY2006809, BRAMY2006879, BRAMY2007043, BRAMY2007078, BRAMY2007110, BRAMY2007185, BRAMY2007244, BRAMY2007249, BRAMY2007255, BRAMY2007287, BRAMY2007308, BRAMY2007411, BRAMY2007458, BRAMY2007486, BRAMY2007546, BRAMY2007567, BRAMY2007594, BRAMY2007610, BRAMY2007613, BRAMY2007653,

[1435] BRAMY2007753, BRAMY2007859, BRAMY2008333, BRAMY2008382, BRAMY2008563, BRAMY2008583, BRAMY2008977, BRAMY2008979, BRAMY2009013, BRAMY2009023, BRAMY2009034, BRAMY2009105, BRAMY2009123, BRAMY2009192, BRAMY2009344, BRAMY2009349, BRAMY2009394, BRAMY2009489, BRAMY2009508, BRAMY2009528, BRAMY2009557, BRAMY2009612, BRAMY2009693, BRAMY2009934, BRAMY2010068, BRAMY2010135, BRAMY2010145, BRAMY2010171, BRAMY2010208, BRAMY2010239, BRAMY2010272, BRAMY2010290, BRAMY2010357, BRAMY2010366, BRAMY2010395, BRAMY2010441, BRAMY2010442, BRAMY2010464, BRAMY2010581, BRAMY2010798, BRAMY2010808, BRAMY2010919, BRAMY2011064, BRAMY2011105, BRAMY2011178, BRAMY2011196, BRAMY2011216, BRAMY2011253, BRAMY2011446, BRAMY2011480,

[1436] BRAMY2011639, BRAMY2011679, BRAMY2011811, BRAMY2011841, BRAMY2011846, BRAMY2011849, BRAMY2011872, BRAMY2011961, BRAMY2012017, BRAMY2012091, BRAMY2012119, BRAMY2012162, BRAMY2012163, BRAMY2012277, BRAMY2012340, BRAMY2012426, BRAMY2012497, BRAMY2012517, BRAMY2012536, BRAMY2012555, BRAMY2012568, BRAMY2012581, BRAMY2012691, BRAMY2012721, BRAMY2012731, BRAMY2012776, BRAMY2012880, BRAMY2012881, BRAMY2013169, BRAMY2013200, BRAMY2013216, BRAMY2013405, BRAMY2013414, BRAMY2013572, BRAMY2013590, BRAMY2013621, BRAMY2013659, BRAMY2013722, BRAMY2013736, BRAMY2013756, BRAMY2013944, BRAMY2013975, BRAMY2014019, BRAMY2014205, BRAMY2014387, BRAMY2014462, BRAMY2014469, BRAMY2014541, BRAMY2014754, BRAMY2014813,

[1437] BRAMY2015251, BRAMY2015311, BRAMY2015420, BRAMY2015503, BRAMY2015516, BRAMY2015550, BRAMY2015551, BRAMY2015559, BRAMY2015688, BRAMY2015705, BRAMY2015782, BRAMY2015833, BRAMY2015855, BRAMY2015890, BRAMY2015911, BRAMY2015925, BRAMY2016002, BRAMY2016009, BRAMY2016020, BRAMY2016070, BRAMY2016251, BRAMY2016325, BRAMY2016327, BRAMY2016386, BRAMY2016706, BRAMY2016771, BRAMY2016892, BRAMY2016938, BRAMY2016953, BRAMY2017014, BRAMY2017249, BRAMY2017348, BRAMY2017450, BRAMY2017455, BRAMY2017528, BRAMY2017864, BRAMY2018027, BRAMY2018106, BRAMY2018122, BRAMY2018126, BRAMY2018272, BRAMY2018273, BRAMY2018279, BRAMY2018295, BRAMY2018308, BRAMY2018396, BRAMY2018467, BRAMY2018635, BRAMY2018785, BRAMY2019055,

[1438] BRAMY2019111, BRAMY2019277, BRAMY2019300, BRAMY2019468, BRAMY2019509, BRAMY2019554, BRAMY2019643, BRAMY2019710, BRAMY2019963, BRAMY2019985, BRAMY2020050, BRAMY2020058, BRAMY2020106, BRAMY2020270, BRAMY2020354, BRAMY2020355, BRAMY2020412, BRAMY2020427, BRAMY2020445, BRAMY2020466, BRAMY2020520, BRAMY2020574, BRAMY2020634, BRAMY2020713, BRAMY2021040, BRAMY2021063, BRAMY2021098, BRAMY2021139, BRAMY2021142, BRAMY2021276, BRAMY2021310, BRAMY2021388, BRAMY2021498, BRAMY2021710, BRAMY2021732, BRAMY2021746, BRAMY2021825, BRAMY2021867, BRAMY2021962, BRAMY2021982, BRAMY2022052, BRAMY2022160, BRAMY2022168, BRAMY2022263, BRAMY2022301, BRAMY2022320, BRAMY2022383, BRAMY2022445, BRAMY2022454, BRAMY2022493,

[1439] BRAMY2022525, BRAMY2022532, BRAMY2022723, BRAMY2022786, BRAMY2022796, BRAMY2022929, BRAMY2022980, BRAMY2022984, BRAMY2023060, BRAMY2023110, BRAMY2023115, BRAMY2023161, BRAMY2023172, BRAMY2023238, BRAMY2023327, BRAMY2023358, BRAMY2023406, BRAMY2023482, BRAMY2023514, BRAMY2023719, BRAMY2023729, BRAMY2023786, BRAMY2023852, BRAMY2023863, BRAMY2023939, BRAMY2024004, BRAMY2024073, BRAMY2024312, BRAMY2024374, BRAMY2024390, BRAMY2024416, BRAMY2024449, BRAMY2024489, BRAMY2024497, BRAMY2024514, BRAMY2024530, BRAMY2024535, BRAMY2024545, BRAMY2024576, BRAMY2024593, BRAMY2024711, BRAMY2024715, BRAMY2024728, BRAMY2024827, BRAMY2024849, BRAMY2025024, BRAMY2025032, BRAMY2025121, BRAMY2025175, BRAMY2025218,

[1440] BRAMY2025230, BRAMY2025272, BRAMY2025277, BRAMY2025495, BRAMY2025812, BRAMY2025996, BRAMY2026009, BRAMY2026091, BRAMY2026168, BRAMY2026300, BRAMY2026347, BRAMY2026395, BRAMY2026405, BRAMY2026533, BRAMY2026538, BRAMY2026685, BRAMY2026713, BRAMY2026778, BRAMY2026824, BRAMY2026899, BRAMY2026902, BRAMY2026904, BRAMY2026976, BRAMY2027073, BRAMY2027114, BRAMY2027140, BRAMY2027242, BRAMY2027396, BRAMY2027451, BRAMY2027461, BRAMY2027467, BRAMY2027587, BRAMY2027714, BRAMY2027717, BRAMY2027739, BRAMY2027752, BRAMY2027782, BRAMY2028072, BRAMY2028183, BRAMY2028188, BRAMY2028269, BRAMY2028282, BRAMY2028472, BRAMY2028491, BRAMY2028516, BRAMY2028565, BRAMY2028593, BRAMY2028682, BRAMY2028740, BRAMY2028783,

[1441] BRAMY2028856, BRAMY2028914, BRAMY2029204, BRAMY2029602, BRAMY2029988, BRAMY2030098, BRAMY2030109, BRAMY2030206, BRAMY2030477, BRAMY2030545, BRAMY2030607, BRAMY2030702, BRAMY2030703, BRAMY2030768, BRAMY2030799, BRAMY2030859, BRAMY2030915, BRAMY2031317, BRAMY2031377, BRAMY2031442, BRAMY2031516, BRAMY2032014, BRAMY2032231, BRAMY2032242, BRAMY2032290, BRAMY2032311, BRAMY2032317, BRAMY2032344, BRAMY2032589, BRAMY2032678, BRAMY2032696, BRAMY2032777, BRAMY2032994, BRAMY2033003, BRAMY2033116, BRAMY2033240, BRAMY2033267, BRAMY2033316, BRAMY2033332, BRAMY2033506, BRAMY2033594, BRAMY2033895, BRAMY2033914, BRAMY2034072, BRAMY2034185, BRAMY2034187, BRAMY2034305, BRAMY2034561, BRAMY2034920, BRAMY2034993,

[1442] BRAMY2035070, BRAMY2035449, BRAMY2035545, BRAMY2035606, BRAMY2035718, BRAMY2035719, BRAMY2035801, BRAMY2035869, BRAMY2035923, BRAMY2036076, BRAMY2036079, BRAMY2036254, BRAMY2036266, BRAMY2036387, BRAMY2036396, BRAMY2036459, BRAMY2036567, BRAMY2036615, BRAMY2036699, BRAMY2036913, BRAMY2036918, BRAMY2036968, BRAMY2037147, BRAMY2037328, BRAMY2037609, BRAMY2037629, BRAMY2037800, BRAMY2037823, BRAMY2037971, BRAMY2038100, BRAMY2038128, BRAMY2038317, BRAMY2038475, BRAMY2038484, BRAMY2038516, BRAMY2038832, BRAMY2038846, BRAMY2038887, BRAMY2038904, BRAMY2039287, BRAMY2039300, BRAMY2039314, BRAMY2039341, BRAMY2039630, BRAMY2039695, BRAMY2039728, BRAMY2039872, BRAMY2040051, BRAMY2040159, BRAMY2040214,

[1443] BRAMY2040478, BRAMY2040592, BRAMY2040915, BRAMY2041261, BRAMY2041347, BRAMY2041378, BRAMY2041384, BRAMY2041434, BRAMY2041507, BRAMY2041542, BRAMY2041738, BRAMY2042122, BRAMY2042131, BRAMY2042178, BRAMY2042195, BRAMY2042244, BRAMY2042549, BRAMY2042596, BRAMY2042612, BRAMY2042641, BRAMY2042711, BRAMY2042760, BRAMY2042804, BRAMY2042899, BRAMY2042918, BRAMY2043069, BRAMY2043103, BRAMY2043314, BRAMY2043345, BRAMY2044246, BRAMY2044317, BRAMY2044349, BRAMY2044686, BRAMY2044838, BRAMY2045036, BRAMY2045299, BRAMY2045471, BRAMY2045530, BRAMY2046109, BRAMY2046478, BRAMY2046489, BRAMY2046537, BRAMY2046667, BRAMY2046742, BRAMY2046871, BRAMY2046984, BRAMY2046989, BRAMY2047169, BRAMY2047280, BRAMY2047420,

[1444] BRAMY2047676, BRAMY2047692, BRAMY2047746, BRAMY2047751, BRAMY2047765, BRAMY2047884, BRAMY2047948, BRAMY3000206, BRAMY3000210, BRAMY3000213, BRAMY3000224, BRAMY3000254, BRAMY3000307, BRAMY3000692, BRAMY3001356, BRAMY3001401, BRAMY3001409, BRAMY3001794, BRAMY3002120, BRAMY3002312, BRAMY3002329, BRAMY3002458, BRAMY3002508, BRAMY3002620, BRAMY3002803, BRAMY3002805, BRAMY3002886, BRAMY3002991, BRAMY3003026, BRAMY3003109, BRAMY3003205, BRAMY3003310, BRAMY3003566, BRAMY3003723, BRAMY3004126, BRAMY3004224, BRAMY3004364, BRAMY3004672, BRAMY3004800, BRAMY3004900, BRAMY3004919, BRAMY3005091, BRAMY3005184, BRAMY3005656, BRAMY3005912, BRAMY3005932, BRAMY3006032, BRAMY3006297, BRAMY3006761, BRAMY3007078,

[1445] BRAMY3007206, BRAMY3007311, BRAMY3007350, BRAMY3007449, BRAMY3007471, BRAMY3007609, BRAMY3007723, BRAMY3007968, BRAMY3008044, BRAMY3008088, BRAMY3008096, BRAMY3008335, BRAMY3008466, BRAMY3008505, BRAMY3008650, BRAMY3008937, BRAMY3009158, BRAMY3009207, BRAMY3009491, BRAMY3009556, BRAMY3009782, BRAMY3009811, BRAMY3009904, BRAMY3010264, BRAMY3010321, BRAMY3010411, BRAMY3010492, BRAMY3010603, BRAMY3010654, BRAMY4000089, BRAMY4000095, BRAMY4000229, BRAMY4000277, BRAMY4000915, BRAMY4000962, BRAMY4001173, BRAMY4001200, BRAMY4001234, BRAMY4001449, BRAMY4001652, BRAMY4001863, BRAMY4001913, BRAMY4002575, BRAMY4002628, BRASW1000053, BRASW1000125, BRAWH1000001, BRAWH1000002, BRAWH1000007, BRAWH1000037,

[1446] BRAWH1000045, BRAWH1000083, BRAWH1000094, BRAWH1000116, BRAWH1000127, BRAWH1000130, BRAWH1000157, BRAWH1000162, BRAWH1000164, BRAWH1000168, BRAWH1000174, BRAWH1000180, BRAWH1000369, BRAWH2000034, BRAWH2000048, BRAWH2000071, BRAWH2000082, BRAWH2000093, BRAWH2000109, BRAWH2000131, BRAWH2000142, BRAWH2000169, BRAWH2000177, BRAWH2000218, BRAWH2000232, BRAWH2000248, BRAWH2000256, BRAWH2000274, BRAWH2000323, BRAWH2000353, BRAWH2000370, BRAWH2000409, BRAWH2000417, BRAWH2000443, BRAWH2000460, BRAWH2000471, BRAWH2000476, BRAWH2000482, BRAWH2000488, BRAWH2000494, BRAWH2000500, BRAWH2000503, BRAWH2000522, BRAWH2000554, BRAWH2000595, BRAWH2000636, BRAWH2000643, BRAWH2000651, BRAWH2000682, BRAWH2000686,

[1447] BRAWH2000697, BRAWH2000752, BRAWH2000859, BRAWH2000866, BRAWH2000892, BRAWH2000901, BRAWH2000924, BRAWH2000944, BRAWH2000984, BRAWH2001019, BRAWH2001037, BRAWH2001052, BRAWH2001129, BRAWH2001137, BRAWH2001141, BRAWH2001159, BRAWH2001166, BRAWH2001171, BRAWH2001186, BRAWH2001203, BRAWH2001238, BRAWH2001239, BRAWH2001255, BRAWH2001321, BRAWH2001355, BRAWH2001378, BRAWH2001395, BRAWH2001406, BRAWH2001412, BRAWH2001418, BRAWH2001436, BRAWH2001438, BRAWH2001459, BRAWH2001461, BRAWH2001484, BRAWH2001492, BRAWH2001503, BRAWH2001519, BRAWH2001530, BRAWH2001535, BRAWH2001589, BRAWH2001662, BRAWH2001666, BRAWH2001671, BRAWH2001679, BRAWH2001686, BRAWH2001701, BRAWH2001842, BRAWH2001862, BRAWH2001873,

[1448] BRAWH2001940, BRAWH2001973, BRAWH2002047, BRAWH2002060, BRAWH2002062, BRAWH2002125, BRAWH2002191, BRAWH2002318, BRAWH2002333, BRAWH2002352, BRAWH2002383, BRAWH2002549, BRAWH2002560, BRAWH2002601, BRAWH2002623, BRAWH2002630, BRAWH2002635, BRAWH2002662, BRAWH2002679, BRAWH2002725, BRAWH2002761, BRAWH2002811, BRAWH2002861, BRAWH2002911, BRAWH2002963, BRAWH2002967, BRAWH2002976, BRAWH2003000, BRAWH2003025, BRAWH2003135, BRAWH2003240, BRAWH2003307, BRAWH2003355, BRAWH2003366, BRAWH2003662, BRAWH2003689, BRAWH2003693, BRAWH2003818, BRAWH2003832, BRAWH2003948, BRAWH2003964, BRAWH2004044, BRAWH2004068, BRAWH2004078, BRAWH2004136, BRAWH2004217, BRAWH2004580, BRAWH2004731, BRAWH2004779, BRAWH2004842,

[1449] BRAWH2004884, BRAWH2004923, BRAWH2005008, BRAWH2005074, BRAWH2005225, BRAWH2005315, BRAWH2005517, BRAWH2005524, BRAWH2005533, BRAWH2005578, BRAWH2005661, BRAWH2005812, BRAWH2005974, BRAWH2005998, BRAWH2006044, BRAWH2006083, BRAWH2006207, BRAWH2006301, BRAWH2006395, BRAWH2006405, BRAWH2006450, BRAWH2006493, BRAWH2006526, BRAWH2006543, BRAWH2006622, BRAWH2006760, BRAWH2006960, BRAWH2006989, BRAWH2006996, BRAWH2007069, BRAWH2007308, BRAWH2007406, BRAWH2007550, BRAWH2007570, BRAWH2007591, BRAWH2007605, BRAWH2007658, BRAWH2007664, BRAWH2007808, BRAWH2007825, BRAWH2007862, BRAWH2007890, BRAWH2008058, BRAWH2008128, BRAWH2008219, BRAWH2008255, BRAWH2008292, BRAWH2008297, BRAWH2008366, BRAWH2008380,

[1450] BRAWH2008540, BRAWH2008577, BRAWH2008706, BRAWH2008790, BRAWH2008903, BRAWH2008956, BRAWH2008993, BRAWH2009112, BRAWH2009227, BRAWH2009238, BRAWH2009261, BRAWH2009263, BRAWH2009298, BRAWH2009304, BRAWH2009307, BRAWH2009360, BRAWH2009393, BRAWH2009485, BRAWH2009490, BRAWH2009558, BRAWH2009590, BRAWH2009626, BRAWH2009678, BRAWH2009695, BRAWH2009907, BRAWH2010000, BRAWH2010069, BRAWH2010084, BRAWH2010136, BRAWH2010318, BRAWH2010329, BRAWH2010354, BRAWH2010364, BRAWH2010536, BRAWH2010552, BRAWH2010584, BRAWH2010618, BRAWH2010619, BRAWH2010754, BRAWH2010980, BRAWH2011066, BRAWH2011079, BRAWH2011096, BRAWH2011155, BRAWH2011166, BRAWH2011204, BRAWH2011286, BRAWH2011294, BRAWH2011343, BRAWH2011400,

[1451] BRAWH2011762, BRAWH2011795, BRAWH2011796, BRAWH2011812, BRAWH2011823, BRAWH2011860, BRAWH2011920, BRAWH2011958, BRAWH2012054, BRAWH2012077, BRAWH2012161, BRAWH2012162, BRAWH2012164, BRAWH2012258, BRAWH2012277, BRAWH2012326, BRAWH2012538, BRAWH2012540, BRAWH2012619, BRAWH2012698, BRAWH2012749, BRAWH2012827, BRAWH2012866, BRAWH2012963, BRAWH2013047, BRAWH2013219, BRAWH2013294, BRAWH2013748, BRAWH2013866, BRAWH2013871, BRAWH2013914, BRAWH2013941, BRAWH2013955, BRAWH2014053, BRAWH2014234, BRAWH2014379, BRAWH2014414, BRAWH2014473, BRAWH2014645, BRAWH2014662, BRAWH2014717, BRAWH2014729, BRAWH2014876, BRAWH2014934, BRAWH2014954, BRAWH2015247, BRAWH2015349, BRAWH2015375, BRAWH2015385, BRAWH2015595,

[1452] BRAWH2015728, BRAWH2015853, BRAWH2015866, BRAWH2016028, BRAWH2016106, BRAWH2016160, BRAWH2016166, BRAWH2016209, BRAWH2016221, BRAWH2016223, BRAWH2016269, BRAWH2016305, BRAWH2016439, BRAWH2016446, BRAWH2016514, BRAWH2016562, BRAWH2016655, BRAWH2016702, BRAWH2016724, BRAWH2016785, BRAWH2016792, BRAWH2016800, BRAWH2017002, BRAWH2017103, BRAWH2017250, BRAWH2017294, BRAWH2017304, BRAWH2017305, BRAWH2017379, BRAWH2017407, BRAWH2017433, BRAWH2017523, BRAWH2017534, BRAWH2017542, BRAWH2017635, BRAWH2017913, BRAWH2018206, BRAWH2018267, BRAWH2018282, BRAWH2018317, BRAWH2018506, BRAWH2018514, BRAWH2018526, BRAWH2018527, BRAWH2018601, BRAWH2018745, BRAWH2018875, BRAWH2019053, BRAWH2019055, BRAWH2019198,

[1453] BRAWH3000078, BRAWH3000088, BRAWH3000100, BRAWH3000166, BRAWH3000314, BRAWH3000329, BRAWH3000410, BRAWH3000446, BRAWH3000491, BRAWH3000604, BRAWH3000884, BRAWH3001053, BRAWH3001319, BRAWH3001326, BRAWH3001475, BRAWH3001636, BRAWH3001638, BRAWH3001712, BRAWH3001760, BRAWH3001783, BRAWH3001833, BRAWH3001879, BRAWH3001891, BRAWH3001918, BRAWH3002433, BRAWH3002467, BRAWH3002513, BRAWH3002574, BRAWH3002600, BRAWH3002819, BRAWH3002853, BRAWH3003019, BRAWH3003136, BRAWH3003244, BRAWH3003343, BRAWH3003411, BRAWH3003522, BRAWH3003573, BRAWH3003598, BRAWH3003727, BRAWH3003801, BRAWH3003975, BRAWH3004222, BRAWH3004335, BRAWH3004350, BRAWH3004453, BRAWH3004530, BRAWH3004666, BRAWH3005037, BRAWH3005047,

[1454] BRAWH3005132, BRAWH3005146, BRAWH3005292, BRAWH3005300, BRAWH3005422, BRAWH3005534, BRAWH3005886, BRAWH3005892, BRAWH3005896, BRAWH3005912, BRAWH3005981, BRAWH3006547, BRAWH3006548, BRAWH3006761, BRAWH3006792, BRAWH3007129, BRAWH3007221, BRAWH3007441, BRAWH3007455, BRAWH3007506, BRAWH3007726, BRAWH3007783, BRAWH3008167, BRAWH3008341, BRAWH3008559, BRAWH3008697, BRAWH3008867, BRAWH3008931, BRAWH3009017, BRAWH3009285, BRAWH3009297, BRAWH3009546, BRAWH3009961, BRAWH3010461, BRAWH3010560, BRAWH3010602, BRAWH3010657, BRAWH3010726, BRAWH3010833, BRAWH3011101, BRAWH3011331, BRAWH3011402, BRAWH3011577, BRAWH3011623, BRAWH3011637, BRAWH3011685, BRAWH3011907, BRAWH3011929, BRAWH3012005, BRAWH3012662,

[1455] BRAWH3012779, BRAWH3013009, BRAWH3013049, BRAWH3013197, BRAWH3013264, BRAWH3013508, BRAWH3014609, BRAWH3014639, BRAWH3015017, BRAWH3015175, BRAWH3015260, BRAWH3015610, BRAWH3015825, BRAWH3016123, BRAWH3016715, BRAWH3017259, BRAWH3017260, BRAWH3017477, BRAWH3017537, BRAWH3017980, BRAWH3018369, BRAWH3018548, BRAWH3018969, BRAWH3019026, BRAWH3019529, BRAWH3019594, BRAWH3019629, BRAWH3019820, BRAWH3020200, BRAWH3020318, BRAWH3020486, BRAWH3020884, BRAWH3020928, BRAWH3021012, BRAWH3021545, BRAWH3021574, BRAWH3021580, BRAWH3021641, BRAWH3021643, BRAWH3021724, BRAWH3022347, BRAWH3022431, BRAWH3022459, BRAWH3022542, BRAWH3022719, BRAWH3022866, BRAWH3022900, BRAWH3023156, BRAWH3023168, BRAWH3023172,

[1456] BRAWH3023274, BRAWH3023421, BRAWH3024231, BRAWH3024242, BRAWH3024469, BRAWH3024506, BRAWH3024613, BRAWH3024989, BRAWH3026349, BRAWH3026394, BRAWH3026529, BRAWH3027420, BRAWH3027440, BRAWH3027533, BRAWH3027574, BRAWH3027607, BRAWH3027616, BRAWH3027675, BRAWH3027806, BRAWH3027880, BRAWH3027927, BRAWH3028202, BRAWH3028223, BRAWH3028306, BRAWH3028461, BRAWH3028645, BRAWH3028754, BRAWH3028796, BRAWH3029254, BRAWH3029313, BRAWH3029538, BRAWH3029556, BRAWH3029806, BRAWH3030613, BRAWH3030772, BRAWH3030810, BRAWH3030892, BRAWH3030910, BRAWH3030950, BRAWH3031054, BRAWH3031710, BRAWH3031902, BRAWH3032298, BRAWH3032340, BRAWH3032571, BRAWH3032620, BRAWH3032930, BRAWH3033117, BRAWH3033293, BRAWH3033448,

[1457] BRAWH3033513, BRAWH3034097, BRAWH3034114, BRAWH3034134, BRAWH3034668, BRAWH3034743, BRAWH3034775, BRAWH3034890, BRAWH3035154, BRAWH3035403, BRAWH3035904, BRAWH3035914, BRAWH3035936, BRAWH3036077, BRAWH3036247, BRAWH3036270, BRAWH3036561, BRAWH3036738, BRAWH3036951, BRAWH3037265, BRAWH3037394, BRAWH3037533, BRAWH3037979, BRAWH3038055, BRAWH3038230, BRAWH3038252, BRAWH3038324, BRCAN1000065, BRCAN1000076, BRCAN1000105, BRCAN1000149, BRCAN1000168, BRCAN2000148, BRCAN2000149, BRCAN2000209, BRCAN2000239, BRCAN2000346, BRCAN2000364, BRCAN2000383, BRCAN2000418, BRCAN2000523, BRCAN2000541, BRCAN2000563, BRCAN2000577, BRCAN2000620, BRCAN2000639, BRCAN2000763, BRCAN2000832, BRCAN2000923, BRCAN2001223,

[1458] BRCAN2001866, BRCAN2002173, BRCAN2002416, BRCAN2002473, BRCAN2002562, BRCAN2002662, BRCAN2002826, BRCAN2002854, BRCAN2002856, BRCAN2002892, BRCAN2002944, BRCAN2002948, BRCAN2003070, BRCAN2003269, BRCAN2003389, BRCAN2003628, BRCAN2003703, BRCAN2003746, BRCAN2003814, BRCAN2003944, BRCAN2003987, BRCAN2004173, BRCAN2004355, BRCAN2004371, BRCAN2004653, BRCAN2004699, BRCAN2005436, BRCAN2005449, BRCAN2006019, BRCAN2006051, BRCAN2006063, BRCAN2006117, BRCAN2006174, BRCAN2006290, BRCAN2006297, BRCAN2006323, BRCAN2006401, BRCAN2006411, BRCAN2006450, BRCAN2006955, BRCAN2007119, BRCAN2007144, BRCAN2007409, BRCAN2007426, BRCAN2007525, BRCAN2007700, BRCAN2008494, BRCAN2008528, BRCAN2008701, BRCAN2008894,

[1459] BRCAN2009156, BRCAN2009168, BRCAN2009203, BRCAN2009432, BRCAN2010374, BRCAN2010376, BRCAN2010547, BRCAN2010581, BRCAN2010665, BRCAN2011254, BRCAN2011316, BRCAN2011602, BRCAN2011946, BRCAN2012110, BRCAN2012355, BRCAN2012402, BRCAN2012408, BRCAN2012481, BRCAN2012613, BRCAN2012713, BRCAN2012929, BRCAN2013655, BRCAN2013660, BRCAN2014143, BRCAN2014229, BRCAN2014370, BRCAN2014602, BRCAN2014652, BRCAN2014788, BRCAN2014881, BRCAN2014952, BRCAN2015371, BRCAN2015402, BRCAN2015464, BRCAN2015719, BRCAN2015757, BRCAN2015886, BRCAN2016025, BRCAN2016046, BRCAN2016174, BRCAN2016433, BRCAN2016619, BRCAN2016762, BRCAN2016814, BRCAN2017442, BRCAN2017905, BRCAN2018240, BRCAN2018269, BRCAN2018490, BRCAN2018566,

[1460] BRCAN2018667, BRCAN2018748, BRCAN2019002, BRCAN2019387, BRCAN2019653, BRCAN2019773, BRCAN2019907, BRCAN2020234, BRCAN2020331, BRCAN2020412, BRCAN2020467, BRCAN2020710, BRCAN2020880, BRCAN2021024, BRCAN2021028, BRCAN2021325, BRCAN2021452, BRCAN2021669, BRCAN2021718, BRCAN2022126, BRCAN2022191, BRCAN2022472, BRCAN2022474, BRCAN2023347, BRCAN2023724, BRCAN2024451, BRCAN2024563, BRCAN2024572, BRCAN2025009, BRCAN2025093, BRCAN2025349, BRCAN2025368, BRCAN2025712, BRCAN2025982, BRCAN2026117, BRCAN2026197, BRCAN2026340, BRCAN2026711, BRCAN2027150, BRCAN2027310, BRCAN2027334, BRCAN2027355, BRCAN2027364, BRCAN2027513, BRCAN2027593, BRCAN2027970, BRCAN2028021, BRCAN2028036, BRCAN2028040, BRCAN2028319,

[1461] BRCAN2028338, BRCAN2028355, BRCAN2028378, BRCAN2028460, BRCAN2028545, BRCAN2028634, BRCAN2028702, BRCOC1000040, BRCOC1000087, BRCOC1000094, BRCOC2000004, BRCOC2000047, BRCOC2000152, BRCOC2000184, BRCOC2000186, BRCOC2000333, BRCOC2000360, BRCOC2000404, BRCOC2000487, BRCOC2000637, BRCOC2000670, BRCOC2000816, BRCOC2000850, BRCOC2001355, BRCOC2002085, BRCOC2002155, BRCOC2002323, BRCOC2002659, BRCOC2002664, BRCOC2002686, BRCOC2002751, BRCOC2002756, BRCOC2002777, BRCOC2002835, BRCOC2003100, BRCOC2003125, BRCOC2003187, BRCOC2003213, BRCOC2003513, BRCOC2003732, BRCOC2003740, BRCOC2004036, BRCOC2004175, BRCOC2004354, BRCOC2004455, BRCOC2004950, BRCOC2005542, BRCOC2005903, BRCOC2005951, BRCOC2006164,

[1462] BRCOC2006189, BRCOC2006243, BRCOC2006270, BRCOC2006639, BRCOC2006942, BRCOC2007034, BRCOC2007593, BRCOC2007733, BRCOC2007769, BRCOC2008064, BRCOC2008225, BRCOC2008642, BRCOC2008993, BRCOC2009052, BRCOC2009196, BRCOC2009380, BRCOC2009638, BRCOC2009937, BRCOC2010115, BRCOC2010123, BRCOC2010510, BRCOC2010730, BRCOC2010980, BRCOC2010994, BRCOC2011010, BRCOC2011398, BRCOC2011418, BRCOC2011506, BRCOC2011769, BRCOC2011996, BRCOC2012172, BRCOC2012229, BRCOC2012386, BRCOC2012551, BRCOC2012813, BRCOC2013448, BRCOC2013573, BRCOC2013675, BRCOC2013780, BRCOC2014013, BRCOC2014033, BRCOC2014400, BRCOC2014748, BRCOC2014833, BRCOC2015597, BRCOC2015824, BRCOC2015908, BRCOC2015944, BRCOC2016525, BRCOC2016661,

[1463] BRCOC2017061, BRCOC2017652, BRCOC2017856, BRCOC2018775, BRCOC2018877, BRCOC2019255, BRCOC2019549, BRCOC2019841, BRCOC2019896, BRCOC2019903, BRCOC2019910, BRCOC2019934, BRCOC2020122, BRCOC2020142, BRHIP1000058, BRHIP1000072, BRHIP1000104, BRHIP1000108, BRHIP1000129, BRHIP1000174, BRHIP1000258, BRHIP2000021, BRHIP2000079, BRHIP2000087, BRHIP2000163, BRHIP2000210, BRHIP2000239, BRHIP2000245, BRHIP2000312, BRHIP2000359, BRHIP2000445, BRHIP2000506, BRHIP2000532, BRHIP2000553, BRHIP2000621, BRHIP2000691, BRHIP2000819, BRHIP2000826, BRHIP2000920, BRHIP2001074, BRHIP2001099, BRHIP2001686, BRHIP2001782, BRHIP2001802, BRHIP2001805, BRHIP2001886, BRHIP2001927, BRHIP2002122, BRHIP2002143, BRHIP2002172,

[1464] BRHIP2002339, BRHIP2002346, BRHIP2002510, BRHIP2002664, BRHIP2002722, BRHIP2002929, BRHIP2003048, BRHIP2003062, BRHIP2003242, BRHIP2003272, BRHIP2003748, BRHIP2003786, BRHIP2003828, BRHIP2003917, BRHIP2004312, BRHIP2004355, BRHIP2004359, BRHIP2004814, BRHIP2004883, BRHIP2004902, BRHIP2005010, BRHIP2005236, BRHIP2005271, BRHIP2005354, BRHIP2005600, BRHIP2005719, BRHIP2005724, BRHIP2005752, BRHIP2005932, BRHIP2006617, BRHIP2006782, BRHIP2006800, BRHIP2006819, BRHIP2006921, BRHIP2007305, BRHIP2007307, BRHIP2007616, BRHIP2007690, BRHIP2007928, BRHIP2007969, BRHIP2008269, BRHIP2008389, BRHIP2008607, BRHIP2008756, BRHIP2008909, BRHIP2009019, BRHIP2009177, BRHIP2009340, BRHIP2009351, BRHIP2009414,

[1465] BRHIP2009474, BRHIP2009617, BRHIP2009685, BRHIP2010217, BRHIP2010309, BRHIP2010444, BRHIP2010487, BRHIP2010571, BRHIP2010593, BRHIP2010610, BRHIP2010723, BRHIP2010744, BRHIP2011080, BRHIP2011120, BRHIP2011199, BRHIP2011508, BRHIP2011576, BRHIP2011616, BRHIP2011783, BRHIP2011838, BRHIP2011891, BRHIP2011933, BRHIP2012054, BRHIP2012059, BRHIP2012141, BRHIP2012314, BRHIP2012360, BRHIP2012545, BRHIP2012580, BRHIP2012627, BRHIP2012642, BRHIP2012750, BRHIP2012922, BRHIP2012923, BRHIP2012972, BRHIP2013286, BRHIP2013447, BRHIP2013510, BRHIP2013699, BRHIP2013723, BRHIP2013958, BRHIP2013972, BRHIP2014063, BRHIP2014228, BRHIP2014285, BRHIP2014291, BRHIP2014373, BRHIP2014386, BRHIP2014387, BRHIP2014954,

[1466] BRHIP2015153, BRHIP2015224, BRHIP2015245, BRHIP2015356, BRHIP2015360, BRHIP2015679, BRHIP2016005, BRHIP2016125, BRHIP2016788, BRHIP2016968, BRHIP2016990, BRHIP2017010, BRHIP2017315, BRHIP2017385, BRHIP2017404, BRHIP2017542, BRHIP2017553, BRHIP2017642, BRHIP2017714, BRHIP2017780, BRHIP2017945, BRHIP2018014, BRHIP2018369, BRHIP2018612, BRHIP2018635, BRHIP2018650, BRHIP2018712, BRHIP2018719, BRHIP2018805, BRHIP2018998, BRHIP2019007, BRHIP2019047, BRHIP2019149, BRHIP2019177, BRHIP2019186, BRHIP2019291, BRHIP2019494, BRHIP2019589, BRHIP2019641, BRHIP2019819, BRHIP2019884, BRHIP2019972, BRHIP2020182, BRHIP2020509, BRHIP2020573, BRHIP2020622, BRHIP2020695, BRHIP2020743, BRHIP2020799, BRHIP2020842,

[1467] BRHIP2020859, BRHIP2020930, BRHIP2021102, BRHIP2021289, BRHIP2021495, BRHIP2021615, BRHIP2021744, BRHIP2021762, BRHIP2021858, BRHIP2021870, BRHIP2021929, BRHIP2022006, BRHIP2022221, BRHIP2022228, BRHIP2022298, BRHIP2022326, BRHIP2022467, BRHIP2022708, BRHIP2022986, BRHIP2023071, BRHIP2023229, BRHIP2023272, BRHIP2023292, BRHIP2023309, BRHIP2023369, BRHIP2023438, BRHIP2023695, BRHIP2023735, BRHIP2023762, BRHIP2023773, BRHIP2023860, BRHIP2023869, BRHIP2024046, BRHIP2024165, BRHIP2024201, BRHIP2024347, BRHIP2024398, BRHIP2024549, BRHIP2024742, BRHIP2024789, BRHIP2024911, BRHIP2024941, BRHIP2025245, BRHIP2025366, BRHIP2025448, BRHIP2025679, BRHIP2025739, BRHIP2025797, BRHIP2026021, BRHIP2026061,

[1468] BRHIP2026155, BRHIP2026214, BRHIP2026288, BRHIP2026346, BRHIP2026557, BRHIP2026723, BRHIP2026877, BRHIP2027017, BRHIP2027054, BRHIP2027077, BRHIP2027563, BRHIP2027685, BRHIP2027762, BRHIP2028187, BRHIP2028303, BRHIP2028330, BRHIP2028480, BRHIP2028583, BRHIP2028593, BRHIP2029176, BRHIP2029283, BRHIP2029393, BRHIP2029529, BRHIP2029643, BRHIP2029663, BRHIP3000017, BRHIP3000060, BRHIP3000070, BRHIP3000081, BRHIP3000111, BRHIP3000131, BRHIP3000240, BRHIP3000377, BRHIP3000457, BRHIP3000475, BRHIP3000488, BRHIP3000526, BRHIP3000626, BRHIP3000859, BRHIP3000907, BRHIP3001076, BRHIP3001079, BRHIP3001141, BRHIP3001283, BRHIP3001338, BRHIP3001360, BRHIP3001481, BRHIP3001878, BRHIP3001964, BRHIP3002114,

[1469] BRHIP3002124, BRHIP3002141, BRHIP3002363, BRHIP3002691, BRHIP3002920, BRHIP3002931, BRHIP3003063, BRHIP3003126, BRHIP3003306, BRHIP3003340, BRHIP3003395, BRHIP3003484, BRHIP3003644, BRHIP3003688, BRHIP3003795, BRHIP3003961, BRHIP3003984, BRHIP3004193, BRHIP3004215, BRHIP3004416, BRHIP3004710, BRHIP3004725, BRHIP3004774, BRHIP3004786, BRHIP3004863, BRHIP3004968, BRHIP3005037, BRHIP3005137, BRHIP3005142, BRHIP3005231, BRHIP3005307, BRHIP3005574, BRHIP3005673, BRHIP3005768, BRHIP3005801, BRHIP3005944, BRHIP3006279, BRHIP3006294, BRHIP3006390, BRHIP3006449, BRHIP3006683, BRHIP3006717, BRHIP3006786, BRHIP3006950, BRHIP3007172, BRHIP3007183, BRHIP3007195, BRHIP3007223, BRHIP3007239, BRHIP3007291,

[1470] BRHIP3007409, BRHIP3007424, BRHIP3007483, BRHIP3007609, BRHIP3007640, BRHIP3007960, BRHIP3008082, BRHIP3008183, BRHIP3008314, BRHIP3008320, BRHIP3008344, BRHIP3008405, BRHIP3008565, BRHIP3008598, BRHIP3008606, BRHIP3008691, BRHIP3008714, BRHIP3008997, BRHIP3009099, BRHIP3009140, BRHIP3009181, BRHIP3009318, BRHIP3009427, BRHIP3009448, BRHIP3009672, BRHIP3009753, BRHIP3010135, BRHIP3010289, BRHIP3010529, BRHIP3011082, BRHIP3011241, BRHIP3011269, BRHIP3011460, BRHIP3011567, BRHIP3011831, BRHIP3012185, BRHIP3012289, BRHIP3012357, BRHIP3012736, BRHIP3012745, BRHIP3012868, BRHIP3012997, BRHIP3013078, BRHIP3013271, BRHIP3013588, BRHIP3013698, BRHIP3013765, BRHIP3013897, BRHIP3014237, BRHIP3014675,

[1471] BRHIP3015620, BRHIP3015751, BRHIP3015854, BRHIP3016032, BRHIP3016213, BRHIP3016302, BRHIP3016421, BRHIP3017109, BRHIP3017146, BRHIP3017256, BRHIP3017325, BRHIP3017558, BRHIP3017637, BRHIP3017855, BRHIP3018278, BRHIP3018784, BRHIP3019643, BRHIP3019824, BRHIP3019880, BRHIP3019956, BRHIP3020046, BRHIP3020155, BRHIP3020182, BRHIP3020733, BRHIP3021019, BRHIP3021499, BRHIP3021534, BRHIP3021778, BRHIP3021987, BRHIP3022656, BRHIP3023922, BRHIP3024118, BRHIP3024533, BRHIP3024703, BRHIP3024725, BRHIP3024820, BRHIP3025161, BRHIP3025702, BRHIP3025795, BRHIP3025844, BRHIP3026052, BRHIP3026097, BRHIP3026231, BRHIP3026335, BRHIP3026651, BRHIP3027105, BRHIP3027137, BRHIP3027160, BRHIP3027191, BRHIP3027501,

[1472] BRHIP3027594, BRHIP3027651, BRHIP3027854, BRHIP3027947, BRHIP3028570, BRHIP3028742, BRSSN1000056, BRSSN1000092, BRSSN1000153, BRSSN2000097, BRSSN2000175, BRSSN2000197, BRSSN2000244, BRSSN2000293, BRSSN2000295, BRSSN2000312, BRSSN2000498, BRSSN2000518, BRSSN2000561, BRSSN2000566, BRSSN2000684, BRSSN2000715, BRSSN2000832, BRSSN2001213, BRSSN2001275, BRSSN2001342, BRSSN2001426, BRSSN2001503, BRSSN2001579, BRSSN2001758, BRSSN2001810, BRSSN2002857, BRSSN2002859, BRSSN2003012, BRSSN2003086, BRSSN2003093, BRSSN2003820, BRSSN2003841, BRSSN2003937, BRSSN2004142, BRSSN2004303, BRSSN2004304, BRSSN2004496, BRSSN2004657, BRSSN2004679, BRSSN2004686, BRSSN2004710, BRSSN2004719, BRSSN2005847, BRSSN2006133,

[1473] BRSSN2006390, BRSSN2006575, BRSSN2006611, BRSSN2006644, BRSSN2006892, BRSSN2007076, BRSSN2007168, BRSSN2007202, BRSSN2007338, BRSSN2007464, BRSSN2007504, BRSSN2007819, BRSSN2008125, BRSSN2008419, BRSSN2008464, BRSSN2008549, BRSSN2008797, BRSSN2009119, BRSSN2009378, BRSSN2009389, BRSSN2009395, BRSSN2009518, BRSSN2009627, BRSSN2009630, BRSSN2009702, BRSSN2010019, BRSSN2010110, BRSSN2010587, BRSSN2010596, BRSSN2010830, BRSSN2011262, BRSSN2011653, BRSSN2011738, BRSSN2011843, BRSSN2012081, BRSSN2012103, BRSSN2012157, BRSSN2012198, BRSSN2012254, BRSSN2012439, BRSSN2012622, BRSSN2012691, BRSSN2012838, BRSSN2013095, BRSSN2013544, BRSSN2013696, BRSSN2013702, BRSSN2013733, BRSSN2013753, BRSSN2013874,

[1474] BRSSN2014112, BRSSN2014294, BRSSN2014299, BRSSN2014424, BRSSN2014513, BRSSN2014556, BRSSN2014573, BRSSN2014610, BRSSN2014636, BRSSN2014685, BRSSN2015199, BRSSN2015238, BRSSN2015369, BRSSN2015493, BRSSN2015497, BRSSN2015554, BRSSN2015707, BRSSN2015773, BRSSN2015907, BRSSN2015982, BRSSN2016589, BRSSN2016768, BRSSN2016905, BRSSN2017297, BRSSN2017422, BRSSN2017530, BRSSN2017682, BRSSN2017757, BRSSN2018218, BRSSN2018440, BRSSN2018447, BRSSN2018581, BRSSN2018731, BRSSN2018771, BRSSN2018925, BRSTN1000083, BRSTN1000097, BRSTN2000058, BRSTN2000070, BRSTN2000220, BRSTN2000312, BRSTN2000367, BRSTN2000536, BRSTN2000872, BRSTN2001067, BRSTN2001613, BRSTN2001801, BRSTN2002105, BRSTN2002400, BRSTN2002532,

[1475] BRSTN2002691, BRSTN2003590, BRSTN2003835, BRSTN2004863, BRSTN2004869, BRSTN2004987, BRSTN2005721, BRSTN2006306, BRSTN2006466, BRSTN2006580, BRSTN2006583, BRSTN2006638, BRSTN2006865, BRSTN2007000, BRSTN2007118, BRSTN2007284, BRSTN2007765, BRSTN2008052, BRSTN2008283, BRSTN2008367, BRSTN2008418, BRSTN2008457, BRSTN2008475, BRSTN2008930, BRSTN2009247, BRSTN2010089, BRSTN2010107, BRSTN2010363, BRSTN2010416, BRSTN2010500, BRSTN2010569, BRSTN2010750, BRSTN2010923, BRSTN2011211, BRSTN2011597, BRSTN2011688, BRSTN2011799, BRSTN2012089, BRSTN2012174, BRSTN2012284, BRSTN2012320, BRSTN2012380, BRSTN2012451, BRSTN2013171, BRSTN2013354, BRSTN2013502, BRSTN2013931, BRSTN2014490, BRSTN2014633, BRSTN2014751,

[1476] BRSTN2014770, BRSTN2015015, BRSTN2015889, BRSTN2015978, BRSTN2016066, BRSTN2016335, BRSTN2016678, BRSTN2016918, BRSTN2016992, BRSTN2017104, BRSTN2017151, BRSTN2017237, BRSTN2017379, BRSTN2017761, BRSTN2017771, BRSTN2017995, BRSTN2018077, BRSTN2018083, BRSTN2018596, BRSTN2018692, BRSTN2018712, BRSTN2019079, BRSTN2019129, BRTHA1000021, BRTHA1000063, BRTHA1000311, BRTHA2000057, BRTHA2000474, BRTHA2000514, BRTHA2000574, BRTHA2000855, BRTHA2000969, BRTHA2000972, BRTHA2001304, BRTHA2001370, BRTHA2001462, BRTHA2001717, BRTHA2001812, BRTHA2002091, BRTHA2002115, BRTHA2002133, BRTHA2002281, BRTHA2002376, BRTHA2002442, BRTHA2002493, BRTHA2002565, BRTHA2002608, BRTHA2002702, BRTHA2002721, BRTHA2002726,

[1477] BRTHA2002741, BRTHA2002808, BRTHA2002896, BRTHA2002903, BRTHA2003030, BRTHA2003110, BRTHA2003116, BRTHA2003436, BRTHA2003759, BRTHA2003794, BRTHA2004361, BRTHA2004371, BRTHA2004582, BRTHA2004629, BRTHA2004639, BRTHA2004642, BRTHA2004812, BRTHA2004821, BRTHA2004978, BRTHA2004992, BRTHA2005005, BRTHA2005013, BRTHA2005448, BRTHA2005579, BRTHA2005831, BRTHA2005864, BRTHA2005942, BRTHA2005956, BRTHA2006075, BRTHA2006146, BRTHA2006194, BRTHA2006232, BRTHA2006720, BRTHA2006735, BRTHA2006974, BRTHA2006975, BRTHA2007060, BRTHA2007122, BRTHA2007422, BRTHA2007603, BRTHA2007665, BRTHA2008316, BRTHA2008335, BRTHA2008502, BRTHA2008513, BRTHA2008527, BRTHA2008535, BRTHA2008598, BRTHA2008669, BRTHA2008955,

[1478] BRTHA2009311, BRTHA2009349, BRTHA2009486, BRTHA2009803, BRTHA2009846, BRTHA2009886, BRTHA2009972, BRTHA2010008, BRTHA2010033, BRTHA2010073, BRTHA2010191, BRTHA2010397, BRTHA2010608, BRTHA2010672, BRTHA2010884, BRTHA2010907, BRTHA2011062, BRTHA2011194, BRTHA2011321, BRTHA2011351, BRTHA2011500, BRTHA2011641, BRTHA2011691, BRTHA2012129, BRTHA2012183, BRTHA2012189, BRTHA2012351, BRTHA2012392, BRTHA2012466, BRTHA2012555, BRTHA2012562, BRTHA2012714, BRTHA2012980, BRTHA2013054, BRTHA2013262, BRTHA2013275, BRTHA2013426, BRTHA2013460, BRTHA2013515, BRTHA2013540, BRTHA2013595, BRTHA2013610, BRTHA2013707, BRTHA2013942, BRTHA2014287, BRTHA2014334, BRTHA2014381, BRTHA2014578, BRTHA2014647, BRTHA2014663,

[1479] BRTHA2014792, BRTHA2014828, BRTHA2014909, BRTHA2014975, BRTHA2014997, BRTHA2015406, BRTHA2015478, BRTHA2015696, BRTHA2015700, BRTHA2015853, BRTHA2015878, BRTHA2016179, BRTHA2016215, BRTHA2016267, BRTHA2016318, BRTHA2016496, BRTHA2016543, BRTHA2016552, BRTHA2016577, BRTHA2016765, BRTHA2016918, BRTHA2017178, BRTHA2017353, BRTHA2017364, BRTHA2017985, BRTHA2018011, BRTHA2018129, BRTHA2018165, BRTHA2018304, BRTHA2018344, BRTHA2018420, BRTHA2018443, BRTHA2018504, BRTHA2018558, BRTHA2018591, BRTHA2018624, BRTHA2018706, BRTHA2018707, BRTHA2019014, BRTHA2019022, BRTHA2019048, BRTHA2019073, BRTHA2019726, BRTHA2019743, BRTHA2020400, BRTHA2020566, BRTHA2020642, BRTHA2020695, BRTHA2020721, BRTHA2020781,

[1480] BRTHA2020811, BRTHA2020910, BRTHA2021212, BRTHA2021440, BRTHA2021450, BRTHA2022074, BRTHA2022914, BRTHA2022968, BRTHA2023402, BRTHA2023437, BRTHA2024177, BRTHA2024354, BRTHA2024712, BRTHA2025869, BRTHA2026071, BRTHA2026290, BRTHA2026311, BRTHA2027227, BRTHA2027229, BRTHA2027250, BRTHA2027546, BRTHA2028297, BRTHA2029969, BRTHA2030036, BRTHA2030213, BRTHA2031517, BRTHA2031800, BRTHA2031917, BRTHA2032763, BRTHA2032845, BRTHA2033122, BRTHA2033155, BRTHA2033264, BRTHA2033320, BRTHA2033469, BRTHA2033683, BRTHA2034281, BRTHA2034576, BRTHA2034874, BRTHA2035448, BRTHA2035743, BRTHA2036055, BRTHA2036295, BRTHA2036660, BRTHA2037247, BRTHA2038279, BRTHA2038345, BRTHA2038353, BRTHA2038396, BRTHA3000252,

[1481] BRTHA3000273, BRTHA3000296, BRTHA3000297, BRTHA3000325, BRTHA3000456, BRTHA3000633, BRTHA3000789, BRTHA3001221, BRTHA3001623, BRTHA3002265, BRTHA3002401, BRTHA3002411, BRTHA3002427, BRTHA3002864, BRTHA3002933, BRTHA3002955, BRTHA3003000, BRTHA3003225, BRTHA3003339, BRTHA3003343, BRTHA3003417, BRTHA3003449, BRTHA3003474, BRTHA3003490, BRTHA3003704, BRTHA3004307, BRTHA3004432, BRTHA3004475, BRTHA3004502, BRTHA3004610, BRTHA3005046, BRTHA3005735, BRTHA3005988, BRTHA3006318, BRTHA3006593, BRTHA3006856, BRTHA3007113, BRTHA3007130, BRTHA3007148, BRTHA3007319, BRTHA3007469, BRTHA3007472, BRTHA3007532, BRTHA3007662, BRTHA3007685, BRTHA3007769, BRTHA3007922, BRTHA3008143, BRTHA3008293, BRTHA3008310,

[1482] BRTHA3008386, BRTHA3008520, BRTHA3008608, BRTHA3008694, BRTHA3008778, BRTHA3008826, BRTHA3009037, BRTHA3009090, BRTHA3009291, BRTHA3009858, BRTHA3010135, BRTHA3010366, BRTHA3010469, BRTHA3010530, BRTHA3010540, BRTHA3010717, BRTHA3011149, BRTHA3011187, BRTHA3011194, BRTHA3011229, BRTHA3011265, BRTHA3011361, BRTHA3011510, BRTHA3011892, BRTHA3012265, BRTHA3013860, BRTHA3013882, BRTHA3013884, BRTHA3013981, BRTHA3014000, BRTHA3014105, BRTHA3014507, BRTHA3014547, BRTHA3014691, BRTHA3014835, BRTHA3014854, BRTHA3014908, BRTHA3014920, BRTHA3015815, BRTHA3016616, BRTHA3016835, BRTHA3016845, BRTHA3016917, BRTHA3017047, BRTHA3017589, BRTHA3017848, BRTHA3018409, BRTHA3018514, BRTHA3018617, BRTHA3018623,

[1483] BRTHA3018656, BRTHA3019048, BRTHA3019105, BRTHA3019183, BRTHA3020000, BRTHA3020314, BRTHA3020369, BRTHA3021569, BRTHA3021708, BRTHA3021786, BRTHA3021971, BRTHA3022641, BRTHA3023403, BRTHA3023523, BRTHA3023590, BRTHA3023929, BRTHA3024233, BRTHA3024600, BRTHA3025073, BRTHA3025789, BRTHA3025826, BRTHA3026161, BRTHA3026180, BRTHA3026507, BRTHA3026556, BRTHA3026916, BRTHA3027171, BRTHA3027318, BRTHA3027638, BRTHA3027820, BRTHA3027879, BRTHA3027957, BRTHA3028339, BRTHA3028505, BRTHA3028782, CD34C2000051, CD34C2000152, CD34C2000175, CD34C2000443, CD34C3000125, CD34C3000314, CD34C3000424, CD3.4C3000494, CERVX1000042, CERVX2000812, CERVX2000968, CERVX2002006, CERVX2002013, CERVX2002430, CERVX2002770,

[1484] CHONS1000058, CHONS2000172, CHONS2000797, CHONS2001287, CHONS2001382, CHONS2001797, CHONS2001834, CHONS2002419, CHONS2002829, COLON1000030, COLON1000084, COLON1000135, COLON2000470, COLON2000557, COLON2000568, COLON2001721, COLON2001829, COLON2001866, COLON2002443, COLON2002520, COLON2003043, COLON2003529, COLON2004318, COLON2004351, COLON2004478, COLON2004911, COLON2005126, COLON2005623, COLON2005735, COLON2005772, COLON2006263, COLON2006282, COLON2006417, COLON2007274, COLON2007733, COLON2008105, COLON2009337, COLON2009499, CORDB1000140, CORDB2000061, CORDB2000127, CORDB2000541, CTONG1000009, CTONG1000010, CTONG1000020, CTONG1000022, CTONG1000040, CTONG1000052, CTONG1000056, CTONG1000062,

[1485] CTONG1000086, CTONG1000088, CTONG1000093, CTONG1000094, CTONG1000097, CTONG1000113, CTONG1000137, CTONG1000165, CTONG1000175, CTONG1000180, CTONG1000181, CTONG1000220, CTONG1000277, CTONG1000283, CTONG1000288, CTONG1000302, CTONG1000341, CTONG1000467, CTONG1000476, CTONG1000488, CTONG1000508, CTONG1000540, CTONG2000031, CTONG2000034, CTONG2000042, CTONG2000063, CTONG2000201, CTONG2000218, CTONG2000279, CTONG2000303, CTONG2000330, CTONG2000395, CTONG2000411, CTONG2000452, CTONG2000465, CTONG2000469, CTONG2000480, CTONG2000561, CTONG2000589, CTONG2000766, CTONG2000771, CTONG2000819, CTONG2000827, CTONG2000846, CTONG2000855, CTONG2000977, CTONG2001139, CTONG2001226, CTONG2001320, CTONG2001366,

[1486] CTONG2001413, CTONG2001428, CTONG2001513, CTONG2001524, CTONG2001533, CTONG2001598, CTONG2001681, CTONG2001724, CTONG2001748, CTONG2001749, CTONG2001800, CTONG2001820, CTONG2001858, CTONG2001877, CTONG2001911, CTONG2001932, CTONG2001955, CTONG2002066, CTONG2002095, CTONG2002143, CTONG2002270, CTONG2002395, CTONG2002417, CTONG2002418, CTONG2002453, CTONG2002520, CTONG2002558, CTONG2002590, CTONG2002709, CTONG2002721, CTONG2002744, CTONG2002766, CTONG2002816, CTONG2002820, CTONG2002832, CTONG2002841, CTONG2002903, CTONG2002965, CTONG2002999, CTONG2003028, CTONG2003094, CTONG2003100, CTONG2003115, CTONG2003189, CTONG2003245, CTONG2003293, CTONG2003298, CTONG2003348, CTONG2003350, CTONG2003361,

[1487] CTONG2003372, CTONG2003375, CTONG2003427, CTONG2003524, CTONG2003599, CTONG2003680, CTONG2003699, CTONG2003764, CTONG2003782, CTONG2003889, CTONG2003937, CTONG2003945, CTONG2004000, CTONG2004062, CTONG2004115, CTONG2004126, CTONG2004264, CTONG2004305, CTONG2004397, CTONG2004423, CTONG2004454, CTONG2004550, CTONG2004669, CTONG2004716, CTONG2004912, CTONG2004941, CTONG2004948, CTONG2005049, CTONG2005110, CTONG2005145, CTONG2005265, CTONG2005278, CTONG2005290, CTONG2005374, CTONG2005399, CTONG2005468, CTONG2005567, CTONG2005615, CTONG2005635, CTONG2005775, CTONG2005795, CTONG2005890, CTONG2005904, CTONG2005913, CTONG2006129, CTONG2006223, CTONG2006273, CTONG2006310, CTONG2006377, CTONG2006393,

[1488] CTONG2006412, CTONG2006515, CTONG2006524, CTONG2006562, CTONG2006568, CTONG2006620, CTONG2006666, CTONG2006691, CTONG2006709, CTONG2006798, CTONG2006836, CTONG2006942, CTONG2006964, CTONG2007007, CTONG2007009, CTONG2007072, CTONG2007078, CTONG2007091, CTONG2007104, CTONG2007168, CTONG2007175, CTONG2007259, CTONG2007272, CTONG2007293, CTONG2007297, CTONG2007399, CTONG2007400, CTONG2007417, CTONG2007441, CTONG2007474, CTONG2007500, CTONG2007586, CTONG2007613, CTONG2007623, CTONG2007681, CTONG2007776, CTONG2007779, CTONG2007898, CTONG2007959, CTONG2007970, CTONG2008014, CTONG2008184, CTONG2008262, CTONG2008269, CTONG2008321, CTONG2008343, CTONG2008402, CTONG2008405, CTONG2008466, CTONG2008506,

[1489] CTONG2008518, CTONG2008521, CTONG2008562, CTONG2008577, CTONG2008595, CTONG2008621, CTONG2008689, CTONG2008720, CTONG2008721, CTONG2008773, CTONG2008792, CTONG2008989, CTONG2009033, CTONG2009108, CTONG2009132, CTONG2009156, CTONG2009181, CTONG2009257, CTONG2009258, CTONG2009268, CTONG2009270, CTONG2009395, CTONG2009423, CTONG2009440, CTONG2009527, CTONG2009529, CTONG2009531, CTONG2009534, CTONG2009570, CTONG2009572, CTONG2009604, CTONG2009643, CTONG2009675, CTONG2009689, CTONG2009725, CTONG2009766, CTONG2009768, CTONG2009844, CTONG2009871, CTONG2009887, CTONG2009891, CTONG2009923, CTONG2009938, CTONG2009955, CTONG2009958, CTONG2009963, CTONG2010018, CTONG2010024, CTONG2010116, CTONG2010133,

[1490] CTONG2010148, CTONG2010276, CTONG2010330, CTONG2010408, CTONG2010508, CTONG2010566, CTONG2010623, CTONG2010649, CTONG2010652, CTONG2010803, CTONG2010821, CTONG2011188, CTONG2011429, CTONG2011474, CTONG2011676, CTONG2011716, CTONG2011765, CTONG2011779, CTONG2011801, CTONG2011815, CTONG2011822, CTONG2011825, CTONG2011920, CTONG2011985, CTONG2012001, CTONG2012029, CTONG2012050, CTONG2012077, CTONG2012101, CTONG2012123, CTONG2012230, CTONG2012422, CTONG2012425, CTONG2012447, CTONG2012453, CTONG2012473, CTONG2012476, CTONG2012533, CTONG2012554, CTONG2012564, CTONG2012607, CTONG2012661, CTONG2012724, CTONG2012738, CTONG2012745, CTONG2012758, CTONG2012843, CTONG2012847, CTONG2012901, CTONG2012996,

[1491] CTONG2013128, CTONG2013149, CTONG2013156, CTONG2013178, CTONG2013222, CTONG2013284, CTONG2013339, CTONG2013348, CTONG2013352, CTONG2013381, CTONG2013393, CTONG2013511, CTONG2013630, CTONG2013803, CTONG2013934, CTONG2013986, CTONG2014032, CTONG2014058, CTONG2014119, CTONG2014165, CTONG2014191, CTONG2014206, CTONG2014234, CTONG2014264, CTONG2014280, CTONG2014369, CTONG2014389, CTONG2014491, CTONG2014630, CTONG2014635, CTONG2014646, CTONG2014705, CTONG2014898, CTONG2014946, CTONG2014954, CTONG2014959, CTONG2014966, CTONG2014995, CTONG2015204, CTONG2015316, CTONG2015330, CTONG2015345, CTONG2015358, CTONG2015434, CTONG2015518, CTONG2015540, CTONG2015596, CTONG2015633, CTONG2015678, CTONG2015717,

[1492] CTONG2015804, CTONG2015815, CTONG2015866, CTONG2015914, CTONG2015953, CTONG2016056, CTONG2016185, CTONG2016217, CTONG2016355, CTONG2016408, CTONG2016499, CTONG2016505, CTONG2016559, CTONG2016658, CTONG2016775, CTONG2016797, CTONG2016824, CTONG2016846, CTONG2016869, CTONG2016904, CTONG2016931, CTONG2016942, CTONG2016953, CTONG2017021, CTONG2017094, CTONG2017292, CTONG2017409, CTONG2017429, CTONG2017444, CTONG2017458, CTONG2017604, CTONG2017650, CTONG2017798, CTONG2017804, CTONG2017814, CTONG2017910, CTONG2017939, CTONG2017989, CTONG2018062, CTONG2018069, CTONG2018147, CTONG2018211, CTONG2018217, CTONG2018279, CTONG2018334, CTONG2018343, CTONG2018379, CTONG2018383, CTONG2018413, CTONG2018483,

[1493] CTONG2018629, CTONG2018632, CTONG2018637, CTONG2018652, CTONG2018653, CTONG2018655, CTONG2018735, CTONG2018739, CTONG2018808, CTONG2018843, CTONG2018898, CTONG2018900, CTONG2018976, CTONG2019029, CTONG2019063, CTONG2019144, CTONG2019232, CTONG2019248, CTONG2019400, CTONG2019652, CTONG2019704, CTONG2019788, CTONG2019833, CTONG2020031, CTONG2020108, CTONG2020127, CTONG2020171, CTONG2020374, CTONG2020378, CTONG2020411, CTONG2020445, CTONG2020522, CTONG2020560, CTONG2020582, CTONG2020638, CTONG2020806, CTONG2020831, CTONG2020974, CTONG2021024, CTONG2021132, CTONG2021168, CTONG2021289, CTONG2022153, CTONG2022601, CTONG2023021, CTONG2023449, CTONG2023512, CTONG2024031, CTONG2024206, CTONG2024614,

[1494] CTONG2024749, CTONG2025496, CTONG2025513, CTONG2025516, CTONG2025610, CTONG2025900, CTONG2026513, CTONG2026770, CTONG2026920, CTONG2026987, CTONG2027150, CTONG2027263, CTONG2027327, CTONG2027361, CTONG2027591, CTONG2027736, CTONG2027783, CTONG2027828, CTONG2027959, CTONG2028097, CTONG2028124, CTONG2028208, CTONG2028309, CTONG2028486, CTONG2028518, CTONG2028687, CTONG2028758, CTONG3000657, CTONG3000686, CTONG3000707, CTONG3000896, CTONG3001123, CTONG3001420, CTONG3001501, CTONG3001560, CTONG3001605, CTONG3001746, CTONG3002020, CTONG3002127, CTONG3002370, CTONG3002412, CTONG3002433, CTONG3002518, CTONG3002552, CTONG3002588, CTONG3002674, CTONG3002728, CTONG3002835, CTONG3002909, CTONG3002947,

[1495] CTONG3002983, CTONG3003165, CTONG3003179, CTONG3003483, CTONG3003553, CTONG3003598, CTONG3003652, CTONG3003654, CTONG3003669, CTONG3003737, CTONG3003905, CTONG3003972, CTONG3004072, CTONG3004317, CTONG3004397, CTONG3004550, CTONG3004576, CTONG3004607, CTONG3004712, CTONG3004726, CTONG3005325, CTONG3005648, CTONG3005713, CTONG3005803, CTONG3005813, CTONG3006067, CTONG3006073, CTONG3006186, CTONG3006629, CTONG3006650, CTONG3006659, CTONG3007244, CTONG3007444, CTONG3007528, CTONG3007586, CTONG3007870, CTONG3008223, CTONG3008252, CTONG3008258, CTONG3008457, CTONG3008496, CTONG3008566, CTONG3008639, CTONG3008831, CTONG3008951, CTONG3008959, CTONG3009028, CTONG3009227, CTONG3009239, CTONG3009287,

[1496] CTONG3009328, CTONG3009385, D3OST1000066, D3OST1000109, D3OST1000238, D3OST1000267, D3OST1000270, D3OST2000184, D3OST2000618, D3OST2000654, D3OST2000734, D3OST2001328, D3OST2001669, D3OST2001670, D3OST2001788, D3OST2002068, D3OST2002182, D3OST2002223, D3OST2002262, D3OST2002272, D3OST2002417, D3OST2002436, D3OST2002648, D3OST2003024, D3OST2003331, D3OST2003607, D3OST2003797, D3OST2004637, D3OST3000169, D3OST3000195, D3OST3000258, D3OST3000291, D3OST3000388, D3OST3000493, D6OST2000127, D6OST2000169, D6OST2000245, D6OST2000358, D6OST2000464, D6OST2000507, D9OST2000031, D9OST2000278, D9OST2000440, D9OST2000869, D9OST2001319, D9OST2001433, D9OST2002397, D9OST2002608, D9OST2002673, D9OST2003106,

[1497] D9OST2003108, D9OST2003137, D9OST2003397, D9OST2003580, D9OST2003594, D9OST2003762, D9OST2003791, D9OST2003989, D9OST2004018, D9OST2004073, D9OST2004417, DFNES1000003, DFNES1000083, DFNES1000107, DFNES1000185, DFNES2000143, DFNES2000146, DFNES2000153, DFNES2000212, DFNES2000426, DFNES2000432, DFNES2000443, DFNES2000457, DFNES2000471, DFNES2000526, DFNES2000913, DFNES2001091, DFNES2001096, DFNES2001108, DFNES2001177, DFNES2001404, DFNES2001564, DFNES2001565, DFNES2001647, DFNES2001800, DFNES2001829, DFNES2002220, DFNES2002509, DFNES2002550, DFNES2002588, DFNES2002817, DFNES2002966, DFNES2003081, DFNES2003192, DFNES2003255, DFNES2003742, DFNES2004346, DFNES2004354, DFNES2004371, DFNES2004383,

[1498] DFNES2004608, DFNES2004684, DFNES2005266, DFNES2005527, DFNES2005540, DFNES2005690, DFNES2005766, DFNES2005779, DFNES2005875, DFNES2006346, DFNES2006944, DFNES2007113, DFNES2007332, DFNES2007634, DFNES2007641, DFNES2007757, DFNES2008088, DFNES2008160, DFNES2008280, DFNES2008881, DFNES2009482, DFNES2010502, DFNES2011192, DFNES2011221, DFNES2011239, DFNES2011245, DFNES2011380, DFNES2011499, ERLTF1000021, ERLTF2000324, ERLTF2000465, FCBBF1000023, FCBBF1000024, FCBBF1000038, FCBBF1000053, FCBBF1000061, FCBBF1000063, FCBBF1000069, FCBBF1000115, FCBBF1000117, FCBBF1000118, FCBBF1000121, FCBBF1000125, FCBBF1000131, FCBBF1000139, FCBBF1000155, FCBBF1000157, FCBBF1000171, FCBBF1000174, FCBBF1000182,

[1499] FCBBF1000198, FCBBF1000206, FCBBF1000220, FCBBF1000232, FCBBF1000233, FCBBF1000243, FCBBF1000270, FCBBF1000272, FCBBF1000280, FCBBF1000297, FCBBF1000305, FCBBF1000314, FCBBF1000322, FCBBF1000349, FCBBF1000374, FCBBF1000376, FCBBF1000377, FCBBF1000395, FCBBF1000397, FCBBF1000403, FCBBF1000412, FCBBF1000425, FCBBF1000437, FCBBF1000449, FCBBF1000476, FCBBF1000506, FCBBF1000509, FCBBF1000546, FCBBF1000550, FCBBF1000556, FCBBF1000563, FCBBF1000574, FCBBF1000581, FCBBF1000582, FCBBF1000598, FCBBF1000604, FCBBF1000618, FCBBF1000627, FCBBF1000671, FCBBF1000675, FCBBF1000684, FCBBF1000686, FCBBF1000687, FCBBF1000691, FCBBF1000732, FCBBF1000748, FCBBF1000760, FCBBF2000038, FCBBF2000087, FCBBF2000094,

[1500] FCBBF2000105, FCBBF2000123, FCBBF2000195, FCBBF2000199, FCBBF2000214, FCBBF2000232, FCBBF2000259, FCBBF2000276, FCBBF2000291, FCBBF2000362, FCBBF2000379, FCBBF2000473, FCBBF2000502, FCBBF2000566, FCBBF2000576, FCBBF2000677, FCBBF2000678, FCBBF2000685, FCBBF2000733, FCBBF2000782, FCBBF2000808, FCBBF2000815, FCBBF2000825, FCBBF2000885, FCBBF2000940, FCBBF2000951, FCBBF2001001, FCBBF2001088, FCBBF2001105, FCBBF2001116, FCBBF2001183, FCBBF2001188, FCBBF2001211, FCBBF2001238, FCBBF2001243, FCBBF2001291, FCBBF2001299, FCBBF2001309, FCBBF2001400, FCBBF2001427, FCBBF2001480, FCBBF2001529, FCBBF2001594, FCBBF2001672, FCBBF2001675, FCBBF2001718, FCBBF2001720, FCBBF2001817, FCBBF2001868, FCBBF2002044,

[1501] FCBBF2002111, FCBBF2002281, FCBBF2002349, FCBBF2002370, FCBBF2002541, FCBBF2002626, FCBBF2002801, FCBBF2002897, FCBBF2002898, FCBBF2002904, FCBBF2002928, FCBBF2002953, FCBBF2003083, FCBBF2003102, FCBBF2003269, FCBBF2003293, FCBBF2003297, FCBBF2003395, FCBBF2003528, FCBBF2003543, FCBBF2003549, FCBBF2003567, FCBBF2003636, FCBBF2003823, FCBBF2003895, FCBBF2004066, FCBBF2004090, FCBBF2004138, FCBBF2004217, FCBBF2004256, FCBBF2004373, FCBBF2004448, FCBBF2004671, FCBBF2004707, FCBBF2004788, FCBBF2005069, FCBBF2005122, FCBBF2005428, FCBBF2005439, FCBBF2005538, FCBBF2005637, FCBBF2005645, FCBBF2005733, FCBBF2005909, FCBBF2005966, FCBBF2006131, FCBBF2006380, FCBBF2006418, FCBBF2006452, FCBBF2006634,

[1502] FCBBF2006781, FCBBF2007012, FCBBF2007186, FCBBF2007265, FCBBF2007302, FCBBF2007556, FCBBF2007610, FCBBF2007633, FCBBF2007840, FCBBF3000102, FCBBF3000110, FCBBF3000115, FCBBF3000120, FCBBF3000168, FCBBF3000175, FCBBF3000227, FCBBF3000228, FCBBF3000229, FCBBF3000233, FCBBF3000269, FCBBF3000361, FCBBF3000367, FCBBF3000388, FCBBF3000434, FCBBF3000462, FCBBF3000473, FCBBF3000501, FCBBF3000518, FCBBF3000536, FCBBF3000550, FCBBF3000847, FCBBF3001018, FCBBF3001020, FCBBF3001081, FCBBF3001235, FCBBF3001281, FCBBF3001302, FCBBF3001377, FCBBF3001470, FCBBF3001594, FCBBF3001632, FCBBF3001657, FCBBF3001818, FCBBF3001855, FCBBF3001890, FCBBF3001912, FCBBF3001914, FCBBF3001918, FCBBF3001924, FCBBF3001977,

[1503] FCBBF3002163, FCBBF3002188, FCBBF3002190, FCBBF3002268, FCBBF3002475, FCBBF3002556, FCBBF3002592, FCBBF3002658, FCBBF3002782, FCBBF3002818, FCBBF3002925, FCBBF3003216, FCBBF3003305, FCBBF3003373, FCBBF3003435, FCBBF3003475, FCBBF3003481, FCBBF3003557, FCBBF3003787, FCBBF3003902, FCBBF3004021, FCBBF3004041, FCBBF3004261, FCBBF3004323, FCBBF3004390, FCBBF3004409, FCBBF3004502, FCBBF3004715, FCBBF3004842, FCBBF3004847, FCBBF3004955, FCBBF3005160, FCBBF3005218, FCBBF3005320, FCBBF3005444, FCBBF3005698, FCBBF3005729, FCBBF3006171, FCBBF3006249, FCBBF3006288, FCBBF3006399, FCBBF3006628, FCBBF3006821, FCBBF3007077, FCBBF3007150, FCBBF3007152, FCBBF3007242, FCBBF3007244, FCBBF3007248, FCBBF3007453,

[1504] FCBBF3007462, FCBBF3007540, FCBBF3007597, FCBBF3007604, FCBBF3007631, FCBBF3007829, FCBBF3007855, FCBBF3007859, FCBBF3007860, FCBBF3008073, FCBBF3008100, FCBBF3008153, FCBBF3008159, FCBBF3008251, FCBBF3008311, FCBBF3008362, FCBBF3008382, FCBBF3008475, FCBBF3008556, FCBBF3008644, FCBBF3008689, FCBBF3008748, FCBBF3008870, FCBBF3008938, FCBBF3008944, FCBBF3009069, FCBBF3009101, FCBBF3009152, FCBBF3009256, FCBBF3009317, FCBBF3009428, FCBBF3009464, FCBBF3009479, FCBBF3009526, FCBBF3009703, FCBBF3009717, FCBBF3009888, FCBBF3009949, FCBBF3009978, FCBBF3010008, FCBBF3010012, FCBBF3010124, FCBBF3010130, FCBBF3010142, FCBBF3010149, FCBBF3010211, FCBBF3010361, FCBBF3010508, FCBBF3010544, FCBBF3010586,

[1505] FCBBF3010601, FCBBF3010665, FCBBF3010695, FCBBF3010729, FCBBF3010733, FCBBF3011003, FCBBF3011418, FCBBF3011485, FCBBF3011523, FCBBF3011570, FCBBF3011592, FCBBF3011867, FCBBF3011889, FCBBF3012170, FCBBF3012182, FCBBF3012288, FCBBF3012332, FCBBF3012347, FCBBF3012443, FCBBF3012588, FCBBF3012667, FCBBF3012842, FCBBF3012901, FCBBF3013041, FCBBF3013058, FCBBF3013205, FCBBF3013266, FCBBF3013307, FCBBF3013341, FCBBF3013506, FCBBF3013589, FCBBF3013623, FCBBF3013800, FCBBF3013846, FCBBF3014229, FCBBF3014260, FCBBF3014355, FCBBF3014567, FCBBF3014770, FCBBF3015100, FCBBF3015119, FCBBF3015131, FCBBF3015317, FCBBF3015727, FCBBF3015758, FCBBF3015809, FCBBF3015870, FCBBF3016018, FCBBF3016134, FCBBF3016178,

[1506] FCBBF3016451, FCBBF3016618, FCBBF3016622, FCBBF3016644, FCBBF3016667, FCBBF3016928, FCBBF3016987, FCBBF3017024, FCBBF3017059, FCBBF3017071, FCBBF3017123, FCBBF3017233, FCBBF3017255, FCBBF3017288, FCBBF3017396, FCBBF3017531, FCBBF3017535, FCBBF3017681, FCBBF3017729, FCBBF3017873, FCBBF3017918, FCBBF3017974, FCBBF3018067, FCBBF3018173, FCBBF3018453, FCBBF3018591, FCBBF3018753, FCBBF3018796, FCBBF3018826, FCBBF3018949, FCBBF3019085, FCBBF3019320, FCBBF3019437, FCBBF3019455, FCBBF3019564, FCBBF3019569, FCBBF3019570, FCBBF3019663, FCBBF3019714, FCBBF3019716, FCBBF3019784, FCBBF3019839, FCBBF3019867, FCBBF3019961, FCBBF3020030, FCBBF3020138, FCBBF3020140, FCBBF3020163, FCBBF3020232, FCBBF3020599,

[1507] FCBBF3021026, FCBBF3021191, FCBBF3021221, FCBBF3021501, FCBBF3021506, FCBBF3021524, FCBBF3021807, FCBBF3021940, FCBBF3021985, FCBBF3022005, FCBBF3022291, FCBBF3022311, FCBBF3022504, FCBBF3022566, FCBBF3022765, FCBBF3022767, FCBBF3022894, FCBBF3023061, FCBBF3023078, FCBBF3023368, FCBBF3023372, FCBBF3023443, FCBBF3023599, FCBBF3023704, FCBBF3023887, FCBBF3023895, FCBBF3024002, FCBBF3024096, FCBBF3024225, FCBBF3024266, FCBBF3024364, FCBBF3024623, FCBBF3024793, FCBBF3024911, FCBBF3025098, FCBBF3025252, FCBBF3025280, FCBBF3025285, FCBBF3025417, FCBBF3025528, FCBBF3025568, FCBBF3025650, FCBBF3025674, FCBBF3025730, FCBBF3025737, FCBBF3025905, FCBBF3026021, FCBBF3026048, FCBBF3026251, FCBBF3026308,

[1508] FCBBF3026651, FCBBF3026678, FCBBF3026692, FCBBF3027104, FCBBF3027199, FCBBF3027328, FCBBF3027559, FCBBF3027717, FCBBF3027755, FCBBF3027768, FCBBF3027854, FCBBF3027863, FCBBF3027903, FCBBF3028102, FCBBF3028143, FCBBF3028188, FCBBF3028202, FCBBF3028244, FCBBF3028472, FCBBF3028528, FCBBF3028582, FCBBF3028593, FCBBF3028671, FCBBF3028794, FCBBF4000017, FCBBF4000061, FCBBF4000076, FCBBF4000142, FCBBF4000173, FCBBF4000192, FCBBF4000193, FCBBF4000268, FCBBF4000282, FCBBF4000399, FCBBF4000415, FCBBF4000500, FCBBF4000529, FCBBF4000548, FCBBF5000041, FCBBF5000061, FCBBF5000165, FCBBF5000261, FCBBF5000325, FCBBF5000353, FCBBF5000384, FCBBF5000483, FCBBF5000495, FEBRA1000005, FEBRA1000008, FEBRA1000022,

[1509] FEBRA1000030, FEBRA1000057, FEBRA1000088, FEBRA1000138, FEBRA1000148, FEBRA1000149, FEBRA1000183, FEBRA1000188, FEBRA1000189, FEBRA1000190, FEBRA2000007, FEBRA2000021, FEBRA2000035, FEBRA2000053, FEBRA2000126, FEBRA2000129, FEBRA2000210, FEBRA2000220, FEBRA2000228, FEBRA2000253, FEBRA2000282, FEBRA2000286, FEBRA2000297, FEBRA2000311, FEBRA2000321, FEBRA2000333, FEBRA2000377, FEBRA2000378, FEBRA2000391, FEBRA2000394, FEBRA2000397, FEBRA2000399, FEBRA2000402, FEBRA2000404, FEBRA2000409, FEBRA2000415, FEBRA2000436, FEBRA2000438, FEBRA2000452, FEBRA2000454, FEBRA2000462, FEBRA2000468, FEBRA2000491, FEBRA2000504, FEBRA2000510, FEBRA2000532, FEBRA2000536, FEBRA2000538, FEBRA2000575, FEBRA2000656,

[1510] FEBRA2000659, FEBRA2000680, FEBRA2000690, FEBRA2000727, FEBRA2000734, FEBRA2000740, FEBRA2000757, FEBRA2000762, FEBRA2000771, FEBRA2000772, FEBRA2000782, FEBRA2000787, FEBRA2000790, FEBRA2000793, FEBRA2000803, FEBRA2000805, FEBRA2000809, FEBRA2000815, FEBRA2000856, FEBRA2000862, FEBRA2000877, FEBRA2000880, FEBRA2000881, FEBRA2000901, FEBRA2000909, FEBRA2000917, FEBRA2000928, FEBRA2000936, FEBRA2000937, FEBRA2000959, FEBRA2000972, FEBRA2001004, FEBRA2001012, FEBRA2001020, FEBRA2001093, FEBRA2001124, FEBRA2001133, FEBRA2001146, FEBRA2001161, FEBRA2001175, FEBRA2001197, FEBRA2001217, FEBRA2001227, FEBRA2001245, FEBRA2001267, FEBRA2001294, FEBRA2001334, FEBRA2001351, FEBRA2001383, FEBRA2001438,

[1511] FEBRA2001440, FEBRA2001487, FEBRA2001492, FEBRA2001523, FEBRA2001561, FEBRA2001571, FEBRA2001581, FEBRA2001584, FEBRA2001590, FEBRA2001591, FEBRA2001610, FEBRA2001620, FEBRA2001659, FEBRA2001669, FEBRA2001698, FEBRA2001705, FEBRA2001706, FEBRA2001715, FEBRA2001745, FEBRA2001752, FEBRA2001772, FEBRA2001790, FEBRA2001814, FEBRA2001828, FEBRA2001867, FEBRA2001914, FEBRA2001974, FEBRA2001989, FEBRA2001990, FEBRA2002009, FEBRA2002027, FEBRA2002086, FEBRA2002109, FEBRA2002191, FEBRA2002260, FEBRA2002352, FEBRA2002399, FEBRA2002410, FEBRA2002429, FEBRA2002442, FEBRA2002456, FEBRA2002508, FEBRA2002525, FEBRA2002552, FEBRA2002574, FEBRA2002601, FEBRA2002611, FEBRA2002628, FEBRA2002662, FEBRA2002682,

[1512] FEBRA2002707, FEBRA2002727, FEBRA2002781, FEBRA2002783, FEBRA2002792, FEBRA2002818, FEBRA2002858, FEBRA2002882, FEBRA2002897, FEBRA2002908, FEBRA2002931, FEBRA2002962, FEBRA2002986, FEBRA2003054, FEBRA2003100, FEBRA2003115, FEBRA2003128, FEBRA2003155, FEBRA2003163, FEBRA2003181, FEBRA2003198, FEBRA2003253, FEBRA2003258, FEBRA2003275, FEBRA2003308, FEBRA2003327, FEBRA2003429, FEBRA2003436, FEBRA2003454, FEBRA2003468, FEBRA2003470, FEBRA2003520, FEBRA2003524, FEBRA2003541, FEBRA2003675, FEBRA2003707, FEBRA2003711, FEBRA2003726, FEBRA2003750, FEBRA2003897, FEBRA2003907, FEBRA2003930, FEBRA2004023, FEBRA2004026, FEBRA2004029, FEBRA2004042, FEBRA2004053, FEBRA2004056, FEBRA2004091, FEBRA2004110,

[1513] FEBRA2004191, FEBRA2004202, FEBRA2004219, FEBRA2004237, FEBRA2004268, FEBRA2004293, FEBRA2004325, FEBRA2004329, FEBRA2004331, FEBRA2004412, FEBRA2004443, FEBRA2004485, FEBRA2004490, FEBRA2004538, FEBRA2004592, FEBRA2004620, FEBRA2004628, FEBRA2004651, FEBRA2004767, FEBRA2004813, FEBRA2004818, FEBRA2004840, FEBRA2004852, FEBRA2004867, FEBRA2004914, FEBRA2004933, FEBRA2004987, FEBRA2005014, FEBRA2005036, FEBRA2005079, FEBRA2005114, FEBRA2005216, FEBRA2005291, FEBRA2005361, FEBRA2005377, FEBRA2005380, FEBRA2005416, FEBRA2005427, FEBRA2005458, FEBRA2005476, FEBRA2005701, FEBRA2005726, FEBRA2005734, FEBRA2005778, FEBRA2005787, FEBRA2005788, FEBRA2005824, FEBRA2005995, FEBRA2005998, FEBRA2006055,

[1514] FEBRA2006061, FEBRA2006092, FEBRA2006112, FEBRA2006150, FEBRA2006165, FEBRA2006255, FEBRA2006315, FEBRA2006346, FEBRA2006354, FEBRA2006357, FEBRA2006368, FEBRA2006370, FEBRA2006372, FEBRA2006379, FEBRA2006396, FEBRA2006401, FEBRA2006409, FEBRA2006418, FEBRA2006427, FEBRA2006476, FEBRA2006491, FEBRA2006519, FEBRA2006521, FEBRA2006553, FEBRA2006627, FEBRA2006664, FEBRA2006667, FEBRA2006726, FEBRA2006736, FEBRA2006793, FEBRA2006808, FEBRA2006817, FEBRA2006873, FEBRA2006890, FEBRA2006942, FEBRA2006977, FEBRA2007017, FEBRA2007176, FEBRA2007200, FEBRA2007212, FEBRA2007247, FEBRA2007280, FEBRA2007414, FEBRA2007436, FEBRA2007449, FEBRA2007458, FEBRA2007534, FEBRA2007544, FEBRA2007551, FEBRA2007566,

[1515] FEBRA2007589, FEBRA2007613, FEBRA2007620, FEBRA2007622, FEBRA2007708, FEBRA2007714, FEBRA2007793, FEBRA2007818, FEBRA2007823, FEBRA2007880, FEBRA2007900, FEBRA2007901, FEBRA2007931, FEBRA2007957, FEBRA2008009, FEBRA2008036, FEBRA2008086, FEBRA2008087, FEBRA2008134, FEBRA2008135, FEBRA2008159, FEBRA2008165, FEBRA2008172, FEBRA2008201, FEBRA2008210, FEBRA2008255, FEBRA2008265, FEBRA2008266, FEBRA2008282, FEBRA2008287, FEBRA2008311, FEBRA2008341, FEBRA2008360, FEBRA2008459, FEBRA2008468, FEBRA2008475, FEBRA2008481, FEBRA2008542, FEBRA2008660, FEBRA2008662, FEBRA2008681, FEBRA2008692, FEBRA2008741, FEBRA2008755, FEBRA2008836, FEBRA2008859, FEBRA2008861, FEBRA2008866, FEBRA2008881, FEBRA2008928,

[1516] FEBRA2008983, FEBRA2009016, FEBRA2009029, FEBRA2009074, FEBRA2009117, FEBRA2009120, FEBRA2009162, FEBRA2009185, FEBRA2009240, FEBRA2009265, FEBRA2009276, FEBRA2009289, FEBRA2009327, FEBRA2009328, FEBRA2009352, FEBRA2009362, FEBRA2009385, FEBRA2009416, FEBRA2009419, FEBRA2009437, FEBRA2009478, FEBRA2009507, FEBRA2009514, FEBRA2009541, FEBRA2009567, FEBRA2009588, FEBRA2009731, FEBRA2009754, FEBRA2009780, FEBRA2009846, FEBRA2009986, FEBRA2010141, FEBRA2010299, FEBRA2010484, FEBRA2010719, FEBRA2010746, FEBRA2010768, FEBRA2010802, FEBRA2011063, FEBRA2011090, FEBRA2011356, FEBRA2011392, FEBRA2011414, FEBRA2011593, FEBRA2011665, FEBRA2012090, FEBRA2012120, FEBRA2012181, FEBRA2012195, FEBRA2012397,

[1517] FEBRA2012418, FEBRA2012507, FEBRA2012625, FEBRA2013019, FEBRA2013069, FEBRA2013274, FEBRA2013465, FEBRA2013570, FEBRA2013699, FEBRA2013905, FEBRA2013951, FEBRA2014010, FEBRA2014122, FEBRA2014198, FEBRA2014213, FEBRA2014297, FEBRA2014417, FEBRA2014443, FEBRA2014578, FEBRA2014939, FEBRA2015076, FEBRA2015085, FEBRA2015175, FEBRA2015292, FEBRA2015588, FEBRA2016112, FEBRA2016398, FEBRA2016572, FEBRA2016583, FEBRA2016621, FEBRA2016654, FEBRA2016739, FEBRA2017024, FEBRA2017098, FEBRA2017138, FEBRA2017154, FEBRA2017200, FEBRA2017223, FEBRA2017333, FEBRA2017502, FEBRA2017533, FEBRA2017680, FEBRA2017736, FEBRA2017780, FEBRA2017811, FEBRA2017850, FEBRA2018051, FEBRA2018203, FEBRA2018407, FEBRA2018433,

[1518] FEBRA2018476, FEBRA2018746, FEBRA2019172, FEBRA2019242, FEBRA2019389, FEBRA2019457, FEBRA2019519, FEBRA2019582, FEBRA2019637, FEBRA2019663, FEBRA2019690, FEBRA2019711, FEBRA2019867, FEBRA2020406, FEBRA2020566, FEBRA2020582, FEBRA2020668, FEBRA2020801, FEBRA2020845, FEBRA2020886, FEBRA2020977, FEBRA2021032, FEBRA2021134, FEBRA2021171, FEBRA2021339, FEBRA2021431, FEBRA2021497, FEBRA2021550, FEBRA2021571, FEBRA2021636, FEBRA2021864, FEBRA2021892, FEBRA2021908, FEBRA2021966, FEBRA2022013, FEBRA2022055, FEBRA2022148, FEBRA2022204, FEBRA2022255, FEBRA2022322, FEBRA2022601, FEBRA2022696, FEBRA2022729, FEBRA2022787, FEBRA2022911, FEBRA2022956, FEBRA2022963, FEBRA2022972, FEBRA2023227, FEBRA2023285,

[1519] FEBRA2023351, FEBRA2023377, FEBRA2023399, FEBRA2023498, FEBRA2023550, FEBRA2023721, FEBRA2023927, FEBRA2023989, FEBRA2023990, FEBRA2024019, FEBRA2024136, FEBRA2024150, FEBRA2024343, FEBRA2024570, FEBRA2024693, FEBRA2024727, FEBRA2024744, FEBRA2024797, FEBRA2024987, FEBRA2025249, FEBRA2025427, FEBRA2025463, FEBRA2025477, FEBRA2025838, FEBRA2026474, FEBRA2026582, FEBRA2026629, FEBRA2026769, FEBRA2026879, FEBRA2026890, FEBRA2026977, FEBRA2026984, FEBRA2027082, FEBRA2027297, FEBRA2027352, FEBRA2027364, FEBRA2027609, FEBRA2028158, FEBRA2028222, FEBRA2028366, FEBRA2028457, FEBRA2028477, FEBRA2028503, FEBRA2028516, FEHRT2000325, FEHRT2000364, FEKID1000018, FELIV1000101, FELIV1000137, FELIV1000164,

[1520] FELNG2000241, HCASM1000021, HCASM1000050, HCASM1000061, HCASM1000115, HCASM1000130, HCASM2000016, HCASM2000138, HCASM2000156, HCASM2000202, HCASM2000214, HCASM2000266, HCASM2000307, HCASM2000534, HCASM2000536, HCASM2000560, HCASM2000871, HCASM2001285, HCASM2001810, HCASM2001866, HCASM2001890, HCASM2002148, HCASM2002502, HCASM2002754, HCASM2002918, HCASM2003018, HCASM2003076, HCASM2003099, HCASM2003212, HCASM2003237, HCASM2003357, HCASM2003415, HCASM2005388, HCASM2005484, HCASM2006131, HCASM2006338, HCASM2006359, HCASM2006632, HCASM2007047, HCASM2007317, HCASM2007737, HCASM2007773, HCASM2008154, HCASM2008536, HCASM2009405, HCASM2009424, HCASM2009463, HCASM2009588, HCHON1000131, HCHON1000142,

[1521] HCHON1000166, HCHON1000176, HCHON2000038, HCHON2000062, HCHON2000087, HCHON2000100, HCHON2000156, HCHON2000160, HCHON2000199, HCHON2000212, HCHON2000265, HCHON2000271, HCHON2000315, HCHON2000322, HCHON2000323, HCHON2000344, HCHON2000395, HCHON2000417, HCHON2000418, HCHON2000473, HCHON2000475, HCHON2000503, HCHON2000626, HCHON2000660, HCHON2000663, HCHON2000673, HCHON2000698, HCHON2000699, HCHON2000738, HCHON2000743, HCHON2000815, HCHON2000817, HCHON2000818, HCHON2000826, HCHON2000832, HCHON2000851, HCHON2000898, HCHON2000935, HCHON2000942, HCHON2000956, HCHON2000994, HCHON2001039, HCHON2001050, HCHON2001084, HCHON2001099, HCHON2001110, HCHON2001116, HCHON2001161, HCHON2001214, HCHON2001233,

[1522] HCHON2001269, HCHON2001359, HCHON2001407, HCHON2001434, HCHON2001450, HCHON2001453, HCHON2001497, HCHON2001505, HCHON2001519, HCHON2001523, HCHON2001535, HCHON2001546, HCHON2001548, HCHON2001577, HCHON2001604, HCHON2001607, HCHON2001646, HCHON2001665, HCHON2001712, HCHON2001768, HCHON2001801, HCHON2001853, HCHON2002123, HCHON2002194, HCHON2002241, HCHON2002247, HCHON2002354, HCHON2002496, HCHON2002676, HCHON2002770, HCHON2002964, HCHON2002971, HCHON2003131, HCHON2003134, HCHON2003327, HCHON2003513, HCHON2003532, HCHON2003642, HCHON2003659, HCHON2003676, HCHON2004002, HCHON2004007, HCHON2004279, HCHON2004359, HCHON2004531, HCHON2004776, HCHON2004858, HCHON2005048, HCHON2005118, HCHON2005166,

[1523] HCHON2005802, HCHON2005921, HCHON2005987, HCHON2006250, HCHON2006459, HCHON2006714, HCHON2006722, HCHON2006770, HCHON2006786, HCHON2006841, HCHON2006871, HCHON2007046, HCHON2007482, HCHON2007650, HCHON2007674, HCHON2007774, HCHON2007881, HCHON2008112, HCHON2008239, HCHON2008444, HCHON2008582, HCHON2008672, HCHON2008856, HCHON2008871, HCHON2008989, HCHON2009191, HCHON2009384, HCHON2009749, HCHON2009766, HCHON2009795, HCHON2010074, HCHON2010543, HEART1000010, HEART1000074, HEART1000088, HEART1000099, HEART1000102, HEART1000118, HEART1000132, HEART1000139, HEART1000142, HEART1000149, HEART1000151, HEART1000173, HEART1000185, HEART2000024, HEART2000035, HEART2000099, HEART2000298, HEART2000306,

[1524] HEART2000309, HEART2000411, HEART2000418, HEART2000444, HEART2000448, HEART2000492, HEART2000506, HEART2000520, HEART2000568, HEART2000611, HEART2000959, HEART2001680, HEART2001756, HEART2002129, HEART2002184, HEART2002220, HEART2002432, HEART2002531, HEART2002598, HEART2002717, HEART2003027, HEART2003168, HEART2003432, HEART2003440, HEART2003781, HEART2003836, HEART2003852, HEART2004570, HEART2004764, HEART2004931, HEART2004940, HEART2004941, HEART2004980, HEART2005244, HEART2005310, HEART2005581, HEART2005610, HEART2006131, HEART2006195, HEART2006310, HEART2006334, HEART2006487, HEART2006521, HEART2006557, HEART2006787, HEART2006789, HEART2006909, HEART2007031, HEART2007231, HEART2007443,

[1525] HEART2007696, HEART2007767, HEART2008108, HEART2008111, HEART2008257, HEART2008509, HEART2008994, HEART2009000, HEART2009599, HEART2009680, HEART2010391, HEART2010492, HEART2010495, HELAC2000158, HELAC2000301, HHDPC1000001, HHDPC1000065, HHDPC1000114, HHDPC1000118, HHDPC1000163, HHDPC2000055, HHDPC2000070, HHDPC2000102, HHDPC2000104, HHDPC2000115, HHDPC2000149, HHDPC2000258, HHDPC2000315, HHDPC2000456, HHDPC2000462, HHDPC2000572, HHDPC2000656, HHDPC2000692, HHDPC2001337, HHDPC2001432, HHDPC2001896, HHDPC2002963, HHDPC2003049, HHDPC2003113, HHDPC2003381, HHDPC2003472, HHDPC2004757, HHDPC2005185, HHDPC2005513, HHDPC2005742, HHDPC2005794, HHDPC2006460, HHDPC2006862, HHDPC2006927, HHDPC2007267,

[1526] HHDPC2007302, HHDPC2007775, HHDPC2008123, HHDPC2008185, HHDPC2008279, HHDPC2008297, HHDPC2008414, HHDPC2008474, HHDPC2008816, HHDPC2008843, HHDPC2009114, HHDPC2009178, HHDPC2009208, HHDPC2009272, HHDPC2009528, HLUNG1000017, HLUNG1000024, HLUNG1000030, HLUNG1000034, HLUNG1000037, HLUNG1000053, HLUNG1000055, HLUNG1000076, HLUNG1000084, HLUNG1000091, HLUNG1000099, HLUNG1000104, HLUNG1000105, HLUNG1000110, HLUNG1000151, HLUNG1000169, HLUNG2000014, HLUNG2000027, HLUNG2000063, HLUNG2000068, HLUNG2000116, HLUNG2000125, HLUNG2000130, HLUNG2000142, HLUNG2000174, HLUNG2000176, HLUNG2000217, HLUNG2000232, HLUNG2000255, HLUNG2000281, HLUNG2000314, HLUNG2000315, HLUNG2000340, HLUNG2000362, HLUNG2000363,

[1527] HLUNG2000412, HLUNG2000431, HLUNG2000480, HLUNG2000489, HLUNG2000501, HLUNG2000549, HLUNG2000557, HLUNG2000570, HLUNG2000751, HLUNG2000761, HLUNG2000777, HLUNG2000846, HLUNG2000870, HLUNG2000884, HLUNG2000926, HLUNG2000950, HLUNG2000955, HLUNG2000970, HLUNG2001013, HLUNG2001126, HLUNG2001144, HLUNG2001146, HLUNG2001214, HLUNG2001439, HLUNG2001459, HLUNG2001633, HLUNG2001677, HLUNG2001712, HLUNG2001814, HLUNG2001996, HLUNG2002006, HLUNG2002050, HLUNG2002059, HLUNG2002085, HLUNG2002145, HLUNG2002295, HLUNG2002303, HLUNG2002334, HLUNG2002405, HLUNG2002429, HLUNG2002465, HLUNG2002562, HLUNG2002648, HLUNG2002659, HLUNG2002707, HLUNG2002811, HLUNG2002916, HLUNG2002942, HLUNG2002949, HLUNG2002958,

[1528] HLUNG2002982, HLUNG2003003, HLUNG2003042, HLUNG2003049, HLUNG2003061, HLUNG2003162, HLUNG2003246, HLUNG2003306, HLUNG2003331, HLUNG2003335, HLUNG2003378, HLUNG2003497, HLUNG2003691, HLUNG2003710, HLUNG2003714, HLUNG2003716, HLUNG2003778, HLUNG2003833, HLUNG2003872, HLUNG2003918, HLUNG2003991, HLUNG2004014, HLUNG2004037, HLUNG2004067, HLUNG2004159, HLUNG2004170, HLUNG2004217, HLUNG2004273, HLUNG2004416, HLUNG2004521, HLUNG2004534, HLUNG2004684, HLUNG2004707, HLUNG2004774, HLUNG2004775, HLUNG2005012, HLUNG2005030, HLUNG2005045, HLUNG2005076, HLUNG2005133, HLUNG2005203, HLUNG2005230, HLUNG2005479, HLUNG2005524, HLUNG2005656, HLUNG2005738, HLUNG2005774, HLUNG2005813, HLUNG2005924, HLUNG2006026,

[1529] HLUNG2006067, HLUNG2006094, HLUNG2006370, HLUNG2006397, HLUNG2006570, HLUNG2006599, HLUNG2006614, HLUNG2006671, HLUNG2006781, HLUNG2006812, HLUNG2006843, HLUNG2006852, HLUNG2006935, HLUNG2007041, HLUNG2007163, HLUNG2007219, HLUNG2007245, HLUNG2007433, HLUNG2007931, HLUNG2008066, HLUNG2008139, HLUNG2008153, HLUNG2008225, HLUNG2008235, HLUNG2008247, HLUNG2008333, HLUNG2008348, HLUNG2008384, HLUNG2008396, HLUNG2008439, HLUNG2008479, HLUNG2008480, HLUNG2008521, HLUNG2008637, HLUNG2008833, HLUNG2008875, HLUNG2008885, HLUNG2008958, HLUNG2008959, HLUNG2009067, HLUNG2009215, HLUNG2009225, HLUNG2009253, HLUNG2009303, HLUNG2009413, HLUNG2009729, HLUNG2010181, HLUNG2010464, HLUNG2010562, HLUNG2010845,

[1530] HLUNG2011041, HLUNG2011298, HLUNG2011461, HLUNG2011833, HLUNG2012049, HLUNG2012287, HLUNG2012315, HLUNG2012546, HLUNG2012600, HLUNG2012727, HLUNG2013097, HLUNG2013204, HLUNG2013304, HLUNG2013350, HLUNG2013622, HLUNG2013643, HLUNG2013784, HLUNG2013851, HLUNG2014262, HLUNG2014288, HLUNG2014449, HLUNG2014821, HLUNG2015184, HLUNG2015418, HLUNG2015548, HLUNG2015578, HLUNG2015617, HLUNG2016022, HLUNG2016862, HLUNG2017262, HLUNG2017286, HLUNG2017307, HLUNG2017350, HLUNG2017546, HLUNG2017806, HLUNG2018029, HLUNG2018282, HLUNG2018626, HLUNG2019058, HSYRA1000131, HSYRA1000137, HSYRA1000148, HSYRA1000178, HSYRA2000044, HSYRA2000135, HSYRA2000137, HSYRA2000190, HSYRA2000221, HSYRA2000224, HSYRA2000232,

[1531] HSYRA2000237, HSYRA2000248, HSYRA2000253, HSYRA2000371, HSYRA2000424, HSYRA2000507, HSYRA2000510, HSYRA2000605, HSYRA2000629, HSYRA2000640, HSYRA2000706, HSYRA2000743, HSYRA2000760, HSYRA2000787, HSYRA2000792, HSYRA2000828, HSYRA2000832, HSYRA2000927, HSYRA2001003, HSYRA2001105, HSYRA2001142, HSYRA2001153, HSYRA2001232, HSYRA2001255, HSYRA2001332, HSYRA2001353, HSYRA2001396, HSYRA2001420, HSYRA2001484, HSYRA2001552, HSYRA2001567, HSYRA2001580, HSYRA2001595, HSYRA2001631, HSYRA2001638, HSYRA2001983, HSYRA2002103, HSYRA2002590, HSYRA2002741, HSYRA2003168, HSYRA2004550, HSYRA2004858, HSYRA2005456, HSYRA2005496, HSYRA2005628, HSYRA2005970, HSYRA2006049, HSYRA2006873, HSYRA2007338, HSYRA2007650,

[1532] HSYRA2008154, HSYRA2008714, HSYRA2009102, IMR321000155, IMR321000158, IMR321000161, IMR321000165, IMR321000193, IMR321000207, IMR321000210, IMR321000230, IMR321000242, IMR321000266, IMR322000010, IMR322000107, IMR322000127, IMR322000144, IMR322000152, IMR322000164, IMR322000178, IMR322000223, IMR322000302, IMR322000316, IMR322000374, IMR322000379, IMR322000383, IMR322000418, IMR322000518, IMR322000555, IMR322000604, IMR322000609, IMR322000656, IMR322000672, IMR322000730, IMR322000742, IMR322000775, IMR322000791, IMR322000811, IMR322000819, IMR322000838, IMR322000859, IMR322000863, IMR322000917, IMR322000919, IMR322000953, IMR322000984, IMR322001018, IMR322001049, IMR322001167, IMR322001185,

[1533] IMR322001218, IMR322001245, IMR322001317, IMR322001318, IMR322001322, IMR322001332, IMR322001380, IMR322001438, IMR322001452, IMR322001491, IMR322001534, IMR322001541, IMR322001665, IMR322001670, IMR322001724, IMR322001879, IMR322002035, IMR322002110, IMR322002470, IMR322002993, IMR322003675, IMR322004768, IMR322005293, IMR322005833, IMR322006012, IMR322006222, IMR322006495, IMR322006520, IMR322006886, IMR322006947, IMR322007078, IMR322007225, IMR322007704, IMR322008651, IMR322009710, IMR322009807, IMR322010295, IMR322010953, IMR322011689, IMR322012314, IMR322013053, IMR322013396, IMR322013731, IMR322013805, IMR322015523, IMR322016146, IMR322017049, IMR322018117, IMR322018192, IMR322019070,

[1534] JCMLC2000273, KIDNE1000008, KIDNE1000012, KIDNE1000015, KIDNE1000028, KIDNE1000036, KIDNE1000064, KIDNE1000104, KIDNE1000121, KIDNE1000143, KIDNE1000145, KIDNE1000152, KIDNE2000026, KIDNE2000041, KIDNE2000046, KIDNE2000051, KIDNE2000070, KIDNE2000085, KIDNE2000167, KIDNE2000174, KIDNE2000192, KIDNE2000227, KIDNE2000244, KIDNE2000245, KIDNE2000266, KIDNE2000287, KIDNE2000315, KIDNE2000317, KIDNE2000328, KIDNE2000330, KIDNE2000335, KIDNE2000349, KIDNE2000375, KIDNE2000383, KIDNE2000394, KIDNE2000403, KIDNE2000422, KIDNE2000493, KIDNE2000497, KIDNE2000510, KIDNE2000513, KIDNE2000517, KIDNE2000519, KIDNE2000555, KIDNE2000624, KIDNE2000665, KIDNE2000678, KIDNE2000717, KIDNE2000721, KIDNE2000722,

[1535] KIDNE2000777, KIDNE2000801, KIDNE2000832, KIDNE2000833, KIDNE2000846, KIDNE2000867, KIDNE2000909, KIDNE2000947, KIDNE2001117, KIDNE2001140, KIDNE2001162, KIDNE2001269, KIDNE2001361, KIDNE2001373, KIDNE2001636, KIDNE2001713, KIDNE2001802, KIDNE2001840, KIDNE2001847, KIDNE2001857, KIDNE2001873, KIDNE2001897, KIDNE2001931, KIDNE2001979, KIDNE2002015, KIDNE2002162, KIDNE2002168, KIDNE2002191, KIDNE2002198, KIDNE2002262, KIDNE2002438, KIDNE2002483, KIDNE2002725, KIDNE2002768, KIDNE2002795, KIDNE2002798, KIDNE2002839, KIDNE2002845, KIDNE2002872, KIDNE2002883, KIDNE2002980, KIDNE2002991, KIDNE2003185, KIDNE2003188, KIDNE2003233, KIDNE2003305, KIDNE2003316, KIDNE2003335, KIDNE2003357, KIDNE2003373,

[1536] KIDNE2003377, KIDNE2003507, KIDNE2003752, KIDNE2003764, KIDNE2003837, KIDNE2003994, KIDNE2004034, KIDNE2004054, KIDNE2004084, KIDNE2004095, KIDNE2004115, KIDNE2004233, KIDNE2004262, KIDNE2004279, KIDNE2004294, KIDNE2004295, KIDNE2004305, KIDNE2004344, KIDNE2004394, KIDNE2004411, KIDNE2004475, KIDNE2004519, KIDNE2004520, KIDNE2004531, KIDNE2004562, KIDNE2004579, KIDNE2004626, KIDNE2004681, KIDNE2004828, KIDNE2004846, KIDNE2004864, KIDNE2004879, KIDNE2004981, KIDNE2004985, KIDNE2004999, KIDNE2005038, KIDNE2005042, KIDNE2005062, KIDNE2005266, KIDNE2005296, KIDNE2005321, KIDNE2005327, KIDNE2005336, KIDNE2005400, KIDNE2005424, KIDNE2005477, KIDNE2005526, KIDNE2005543, KIDNE2005603, KIDNE2005629,

[1537] KIDNE2005676, KIDNE2005781, KIDNE2005798, KIDNE2005854, KIDNE2005908, KIDNE2005937, KIDNE2006009, KIDNE2006014, KIDNE2006030, KIDNE2006039, KIDNE2006053, KIDNE2006062, KIDNE2006092, KIDNE2006145, KIDNE2006149, KIDNE2006210, KIDNE2006299, KIDNE2006334, KIDNE2006353, KIDNE2006376, KIDNE2006378, KIDNE2006465, KIDNE2006580, KIDNE2006652, KIDNE2006687, KIDNE2006733, KIDNE2006760, KIDNE2006775, KIDNE2006811, KIDNE2006820, KIDNE2007005, KIDNE2007040, KIDNE2007077, KIDNE2007186, KIDNE2007222, KIDNE2007328, KIDNE2007352, KIDNE2007356, KIDNE2007422, KIDNE2007569, KIDNE2007810, KIDNE2007811, KIDNE2007910, KIDNE2007944, KIDNE2007954, KIDNE2008022, KIDNE2008069, KIDNE2008072, KIDNE2008117, KIDNE2008218,

[1538] KIDNE2008315, KIDNE2008362, KIDNE2008378, KIDNE2008403, KIDNE2008404, KIDNE2008446, KIDNE2008473, KIDNE2008480, KIDNE2008649, KIDNE2008666, KIDNE2008697, KIDNE2008758, KIDNE2008788, KIDNE2008795, KIDNE2008824, KIDNE2008832, KIDNE2008869, KIDNE2008914, KIDNE2008975, KIDNE2008987, KIDNE2009019, KIDNE2009109, KIDNE2009180, KIDNE2009191, KIDNE2009332, KIDNE2009367, KIDNE2009426, KIDNE2009467, KIDNE2009490, KIDNE2009553, KIDNE2009605, KIDNE2009628, KIDNE2009647, KIDNE2009676, KIDNE2009723, KIDNE2010007, KIDNE2010049, KIDNE2010052, KIDNE2010084, KIDNE2010137, KIDNE2010151, KIDNE2010264, KIDNE2010265, KIDNE2010271, KIDNE2010419, KIDNE2010430, KIDNE2010574, KIDNE2010674, KIDNE2010739, KIDNE2010750,

[1539] KIDNE2010762, KIDNE2010863, KIDNE2010973, KIDNE2010989, KIDNE2011200, KIDNE2011314, KIDNE2011508, KIDNE2011532, KIDNE2011635, KIDNE2011752, KIDNE2011782, KIDNE2011858, KIDNE2012009, KIDNE2012025, KIDNE2012188, KIDNE2012291, KIDNE2012316, KIDNE2012361, KIDNE2012440, KIDNE2012453, KIDNE2012563, KIDNE2012601, KIDNE2012613, KIDNE2012710, KIDNE2012745, KIDNE2012775, KIDNE2012784, KIDNE2012945, KIDNE2013045, KIDNE2013095, KIDNE2013158, KIDNE2013218, KIDNE2013263, KIDNE2013346, KIDNE2013388, KIDNE2013413, KIDNE2013489, KIDNE2013639, KIDNE2013731, KIDNE2013734, KIDNE2013775, KIDNE2013801, KIDNE2013866, KIDNE2014087, KIDNE2014112, KIDNE2014119, KIDNE2014170, KIDNE2014184, KIDNE2014268, KIDNE2014298,

[1540] KIDNE2014320, KIDNE2014325, KIDNE2014415, KIDNE2014489, KIDNE2014496, KIDNE2014661, KIDNE2014717, KIDNE2014789, KIDNE2014808, KIDNE2014890, KIDNE2014978, KIDNE2015073, KIDNE2015221, KIDNE2015244, KIDNE2015313, KIDNE2015433, KIDNE2015445, KIDNE2015483, KIDNE2015515, KIDNE2015546, KIDNE2015556, KIDNE2015598, KIDNE2015660, KIDNE2015710, KIDNE2015987, KIDNE2016000, KIDNE2016036, KIDNE2016096, KIDNE2016101, KIDNE2016142, KIDNE2016188, KIDNE2016327, KIDNE2016371, KIDNE2016388, KIDNE2016464, KIDNE2016539, KIDNE2016570, KIDNE2016918, KIDNE2017007, KIDNE2017040, KIDNE2017052, KIDNE2017151, KIDNE2017153, KIDNE2017315, KIDNE2017332, KIDNE2017343, KIDNE2017454, KIDNE2017603, KIDNE2017956, KIDNE2018071,

[1541] KIDNE2018166, KIDNE2018167, KIDNE2018217, KIDNE2018254, KIDNE2018268, KIDNE2018269, KIDNE2018287, KIDNE2018294, KIDNE2018352, KIDNE2018462, KIDNE2018493, KIDNE2018617, KIDNE2018678, KIDNE2018727, KIDNE2018863, KIDNE2018891, KIDNE2018989, KIDNE2018996, KIDNE2019074, KIDNE2019187, NCRRP1000129, NESOP1000010, NESOP1000087, NESOP1000108, NESOP2000231, NESOP2000452, NESOP2000499, NESOP2000504, NESOP2000744, NESOP2001144, NESOP2001433, NESOP2001656, NESOP2001694, NESOP2001752, NESOP2002352, NESOP2002418, NESOP2002487, NESOP2002738, NESOP2002780, NETRP1000034, NETRP1000082, NETRP2000086, NETRP2000182, NETRP2000439, NHNPC1000034, NHNPC1000037, NHNPC1000084, NHNPC1000101, NHNPC1000124, NHNPC2000062,

[1542] NHNPC2000212, NHNPC2000606, NHNPC2000877, NHNPC2001108, NHNPC2001223, NHNPC2001312, NHNPC2001816, NHNPC2002565, NHNPC2002749, NOVAR1000015, NOVAR1000091, NOVAR1000102, NOVAR2000038, NOVAR2000136, NOVAR2000352, NOVAR2000412, NOVAR2000710, NOVAR2000783, NOVAR2000962, NOVAR2001108, NOVAR2001620, NOVAR2001783, NOVAR2001876, NOVAR2002039, NT2NE1000014, NT2NE1000018, NT2NE1000023, NT2NE1000024, NT2NE1000059, NT2NE1000063, NT2NE1000073, NT2NE1000083, NT2NE1000120, NT2NE1000122, NT2NE1000175, NT2NE1000181, NT2NE1000185, NT2NE2000038, NT2NE2000054, NT2NE2000057, NT2NE2000064, NT2NE2000109, NT2NE2000137, NT2NE2000156, NT2NE2000174, NT2NE2000195, NT2NE2000222, NT2NE2000259, NT2NE2000284, NT2NE2000299,

[1543] NT2NE2000327, NT2NE2000353, NT2NE2000356, NT2NE2000369, NT2NE2000374, NT2NE2000383, NT2NE2000384, NT2NE2000386, NT2NE2000390, NT2NE2000392, NT2NE2000455, NT2NE2000470, NT2NE2000488, NT2NE2000517, NT2NE2000536, NT2NE2000546, NT2NE2000548, NT2NE2000550, NT2NE2000575, NT2NE2000586, NT2NE2000612, NT2NE2000636, NT2NE2000658, NT2NE2000706, NT2NE2000707, NT2NE2000763, NT2NE2000802, NT2NE2000808, NT2NE2000809, NT2NE2000864, NT2NE2000909, NT2NE2000950, NT2NE2000951, NT2NE2000963, NT2NE2000980, NT2NE2001005, NT2NE2001021, NT2NE2001040, NT2NE2001048, NT2NE2001049, NT2NE2001142, NT2NE2001156, NT2NE2001176, NT2NE2001180, NT2NE2001181, NT2NE2001188, NT2NE2001191, NT2NE2001247, NT2NE2001252, NT2NE2001324,

[1544] NT2NE2001326, NT2NE2001337, NT2NE2001364, NT2NE2001372, NT2NE2001397, NT2NE2001403, NT2NE2001428, NT2NE2001432, NT2NE2001435, NT2NE2001442, NT2NE2001524, NT2NE2001530, NT2NE2001545, NT2NE2001598, NT2NE2001623, NT2NE2001626, NT2NE2001634, NT2NE2001648, NT2NE2001655, NT2NE2001660, NT2NE2001666, NT2NE2001677, NT2NE2001697, NT2NE2001698, NT2NE2001723, NT2NE2001725, NT2NE2001874, NT2NE2001889, NT2NE2001923, NT2NE2002100, NT2NE2002162, NT2NE2002186, NT2NE2002285, NT2NE2002311, NT2NE2002620, NT2NE2002651, NT2NE2002732, NT2NE2002768, NT2NE2002791, NT2NE2002856, NT2NE2002870, NT2NE2003150, NT2NE2003185, NT2NE2003252, NT2NE2003280, NT2NE2003308, NT2NE2003309, NT2NE2003315, NT2NE2003393, NT2NE2003408,

[1545] NT2NE2003457, NT2NE2003485, NT2NE2003540, NT2NE2003569, NT2NE2003571, NT2NE2003705, NT2NE2003752, NT2NE2003921, NT2NE2004255, NT2NE2004378, NT2NE2004490, NT2NE2004606, NT2NE2004716, NT2NE2004740, NT2NE2004787, NT2NE2004916, NT2NE2005035, NT2NE2005223, NT2NE2005276, NT2NE2005317, NT2NE2005323, NT2NE2005358, NT2NE2005371, NT2NE2005395, NT2NE2005419, NT2NE2005441, NT2NE2005517, NT2NE2005537, NT2NE2005555, NT2NE2005588, NT2NE2005676, NT2NE2005720, NT2NE2005784, NT2NE2005804, NT2NE2005821, NT2NE2005876, NT2NE2005890, NT2NE2005921, NT2NE2005968, NT2NE2006075, NT2NE2006087, NT2NE2006103, NT2NE2006217, NT2NE2006288, NT2NE2006382, NT2NE2006387, NT2NE2006427, NT2NE2006432, NT2NE2006458, NT2NE2006478,

[1546] NT2NE2006531, NT2NE2006659, NT2NE2006784, NT2NE2006813, NT2NE2006894, NT2NE2006909, NT2NE2006942, NT2NE2006958, NT2NE2007052, NT2NE2007220, NT2NE2007425, NT2NE2007725, NT2NE2007727, NT2NE2007786, NT2NE2007877, NT2NE2007967, NT2NE2008017, NT2NE2008060, NT2NE2008077, NT2NE2008213, NT2NE2008260, NT2NE2008378, NT2NE2008607, NT2NE2008639, NT2NE2008727, NT2NE2008783, NT2NE2008785, NT2NE2008803, NT2NE2008867, NT2NE2008961, NT2NE2008997, NT2NE2009138, NT2NE2009295, NT2NE2009426, NT2NE2009523, NT2NE2009608, NT2NE2009691, NT2NE2010056, NT2NE2010105, NT2NE2010150, NT2NE2010400, NT2NE2010632, NT2NE2010633, NT2NE2010654, NT2NE2010688, NT2NE2010781, NT2NE2010854, NT2NE2011033, NT2NE2011036, NT2NE2011107,

[1547] NT2NE2011119, NT2NE2011154, NT2NE2011221, NT2NE2011411, NT2NE2011485, NT2NE2011650, NT2NE2011684, NT2NE2011687, NT2NE2011691, NT2NE2011758, NT2NE2011823, NT2NE2011896, NT2NE2011998, NT2NE2012113, NT2NE2012199, NT2NE2012243, NT2NE2012361, NT2NE2012448, NT2NE2012457, NT2NE2012493, NT2NE2012505, NT2NE2012533, NT2NE2012603, NT2NE2012747, NT2NE2012790, NT2NE2012847, NT2NE2012928, NT2NE2013019, NT2NE2013081, NT2NE2013189, NT2NE2013217, NT2NE2013547, NT2NE2014013, NT2NE2014028, NT2NE2014113, NT2NE2014176, NT2NE2014221, NT2NE2014525, NT2NE2014650, NT2NE2014651, NT2NE2014681, NT2NE2014758, NT2NE2014869, NT2NE2014950, NT2NE2015061, NT2NE2015262, NT2NE2015275, NT2NE2015362, NT2NE2015480, NT2NE2015511,

[1548] NT2NE2015565, NT2NE2015626, NT2NE2015747, NT2NE2015860, NT2NE2015885, NT2NE2015904, NT2NE2015974, NT2NE2016041, NT2NE2016387, NT2NE2016419, NT2NE2016519, NT2NE2016608, NT2NE2016766, NT2NE2016774, NT2NE2016971, NT2NE2017259, NT2NE2017332, NT2NE2017397, NT2NE2017480, NT2NE2017492, NT2NE2017508, NT2NE2017562, NT2NE2017590, NT2NE2017612, NT2NE2017721, NT2NE2017752, NT2NE2017792, NT2NE2017982, NT2NE2018165, NT2NE2018176, NT2NE2018180, NT2NE2018273, NT2NE2018376, NT2NE2018472, NT2NE2018490, NT2NE2018594, NT2NE2018739, NT2NE2018916, NT2NE2019056, NT2NE2019076, NT2NE2019091, NT2NE2019099, NT2RI1000016, NT2RI1000035, NT2RI1000048, NT2RI1000127, NT2RI1000164, NT2RI1000172, NT2RI2000004, NT2RI2000007,

[1549] NT2RI2000107, NT2RI2000116, NT2RI2000117, NT2RI2000128, NT2RI2000133, NT2RI2000167, NT2RI2000173, NT2RI2000187, NT2RI2000263, NT2RI2000270, NT2RI2000276, NT2RI2000294, NT2RI2000313, NT2RI2000341, NT2RI2000348, NT2RI2000412, NT2RI2000421, NT2RI2000480, NT2RI2000575, NT2RI2000588, NT2RI2000597, NT2RI2000669, NT2RI2000685, NT2RI2000688, NT2RI2000689, NT2RI2000704, NT2RI2000738, NT2RI2000775, NT2RI2000822, NT2RI2000829, NT2RI2000841, NT2RI2000932, NT2RI2000974, NT2RI2000987, NT2RI2001010, NT2RI2001017, NT2RI2001030, NT2RI2001083, NT2RI2001091, NT2RI2001167, NT2RI2001178, NT2RI2001230, NT2RI2001235, NT2RI2001244, NT2RI2001307, NT2RI2001342, NT2RI2001385, NT2RI2001409, NT2RI2001410, NT2RI2001422,

[1550] NT2RI2001425, NT2RI2001449, NT2RI2001450, NT2RI2001474, NT2RI2001519, NT2RI2001595, NT2RI2001621, NT2RI2001624, NT2RI2001726, NT2RI2001782, NT2RI2001836, NT2RI2001866, NT2RI2001910, NT2RI2001952, NT2RI2002022, NT2RI2002041, NT2RI2002117, NT2RI2002120, NT2RI2002153, NT2RI2002179, NT2RI2002243, NT2RI2002252, NT2RI2002260, NT2RI2002266, NT2RI2002270, NT2RI2002334, NT2RI2002359, NT2RI2002391, NT2RI2002447, NT2RI2002481, NT2RI2002507, NT2RI2002517, NT2RI2002540, NT2RI2002549, NT2RI2002554, NT2RI2002564, NT2RI2002585, NT2RI2002592, NT2RI2002602, NT2RI2002699, NT2RI2002729, NT2RI2002802, NT2RI2002819, NT2RI2002847, NT2RI2002852, NT2RI2002865, NT2RI2002923, NT2RI2002926, NT2RI2002958, NT2RI2002970,

[1551] NT2RI2003011, NT2RI2003019, NT2RI2003067, NT2RI2003184, NT2RI2003205, NT2RI2003222, NT2RI2003301, NT2RI2003317, NT2RI2003338, NT2RI2003344, NT2RI2003360, NT2RI2003361, NT2RI2003383, NT2RI2003392, NT2RI2003399, NT2RI2003419, NT2RI2003420, NT2RI2003481, NT2RI2003487, NT2RI2003556, NT2RI2003655, NT2RI2003667, NT2RI2003678, NT2RI2003695, NT2RI2003884, NT2RI2003921, NT2RI2003973, NT2RI2003993, NT2RI2004059, NT2RI2004078, NT2RI2004079, NT2RI2004093, NT2RI2004136, NT2RI2004157, NT2RI2004190, NT2RI2004209, NT2RI2004230, NT2RI2004290, NT2RI2004304, NT2RI2004312, NT2RI2004381, NT2RI2004398, NT2RI2004410, NT2RI2004442, NT2RI2004468, NT2RI2004535, NT2RI2004606, NT2RI2004608, NT2RI2004618, NT2RI2004783,

[1552] NT2RI2004818, NT2RI2004840, NT2RI2004916, NT2RI2004962, NT2RI2004984, NT2RI2004985, NT2RI2005048, NT2RI2005061, NT2RI2005069, NT2RI2005087, NT2RI2005096, NT2RI2005130, NT2RI2005150, NT2RI2005166, NT2RI2005239, NT2RI2005246, NT2RI2005315, NT2RI2005353, NT2RI2005358, NT2RI2005368, NT2RI2005382, NT2RI2005473, NT2RI2005520, NT2RI2005564, NT2RI2005621, NT2RI2005628, NT2RI2005647, NT2RI2005670, NT2RI2005713, NT2RI2005723, NT2RI2005772, NT2RI2005811, NT2RI2005816, NT2RI2005818, NT2RI2005851, NT2RI2005966, NT2RI2006070, NT2RI2006071, NT2RI2006072, NT2RI2006081, NT2RI2006126, NT2RI2006127, NT2RI2006183, NT2RI2006257, NT2RI2006271, NT2RI2006294, NT2RI2006345, NT2RI2006403, NT2RI2006445, NT2RI2006487,

[1553] NT2RI2006506, NT2RI2006553, NT2RI2006565, NT2RI2006640, NT2RI2006659, NT2RI2006662, NT2RI2006667, NT2RI2006679, NT2RI2006682, NT2RI2006686, NT2RI2006703, NT2RI2006716, NT2RI2006735, NT2RI2006762, NT2RI2006788, NT2RI2006825, NT2RI2006838, NT2RI2006853, NT2RI2006855, NT2RI2006856, NT2RI2006943, NT2RI2006973, NT2RI2007046, NT2RI2007048, NT2RI2007054, NT2RI2007084, NT2RI2007096, NT2RI2007116, NT2RI2007148, NT2RI2007214, NT2RI2007303, NT2RI2007334, NT2RI2007377, NT2RI2007386, NT2RI2007406, NT2RI2007439, NT2RI2007445, NT2RI2007468, NT2RI2007469, NT2RI2007507, NT2RI2007589, NT2RI2007593, NT2RI2007629, NT2RI2007723, NT2RI2007729, NT2RI2007751, NT2RI2007754, NT2RI2007877, NT2RI2007879, NT2RI2007884,

[1554] NT2RI2007891, NT2RI2007956, NT2RI2007965, NT2RI2007987, NT2RI2008007, NT2RI2008050, NT2RI2008171, NT2RI2008188, NT2RI2008204, NT2RI2008221, NT2RI2008233, NT2RI2008396, NT2RI2008455, NT2RI2008481, NT2RI2008502, NT2RI2008566, NT2RI2008598, NT2RI2008622, NT2RI2008656, NT2RI2008714, NT2RI2008749, NT2RI2008801, NT2RI200880.8, NT2RI2008812, NT2RI2008841, NT2RI2008942, NT2RI2008952, NT2RI2009005, NT2RI2009037, NT2RI2009066, NT2RI2009083, NT2RI2009101, NT2RI2009103, NT2RI2009144, NT2RI2009151, NT2RI2009173, NT2RI2009194, NT2RI2009215, NT2RI2009239, NT2RI2009259, NT2RI2009269, NT2RI2009281, NT2RI2009289, NT2RI2009301, NT2RI2009402, NT2RI2009406, NT2RI2009517, NT2RI2009585, NT2RI2009595, NT2RI2009855,

[1555] NT2RI2010283, NT2RI2010508, NT2RI2010795, NT2RI2011422, NT2RI2011450, NT2RI2011683, NT2RI2011803, NT2RI2012659, NT2RI2012726, NT2RI2012990, NT2RI2013345, NT2RI2013357, NT2RI2013373, NT2RI2014247, NT2RI2014551, NT2RI2014683, NT2RI2014733, NT2RI2015239, NT2RI2015342, NT2RI2015533, NT2RI2016128, NT2RI2016134, NT2RI2017529, NT2RI2018311, NT2RI2018363, NT2RI2018448, NT2RI2018883, NT2RI2018950, NT2RI2019751, NT2RI2019826, NT2RI2020390, NT2RI2020703, NT2RI2021463, NT2RI2021625, NT2RI2022468, NT2RI2022584, NT2RI2023303, NT2RI2023671, NT2RI2024008, NT2RI2024313, NT2RI2024460, NT2RI2024496, NT2RI2024935, NT2RI2025075, NT2RI2025255, NT2RI2025564, NT2RI2025565, NT2RI2025909, NT2RI2025957, NT2RI2025976,

[1556] NT2RI2026758, NT2RI2027081, NT2RI2027157, NT2RI2027224, NT2RI2027323, NT2RI2027396, NT2RI2027484, NT2RI2027975, NT2RI2028213, NT2RI2028222, NT2RI2028537, NT2RI2028642, NT2RI3000174, NT2RI3000213, NT2RI3000423, NT2RI3000622, NT2RI3001132, NT2RI3001263, NT2RI3001279, NT2RI3001348, NT2RI3001445, NT2RI3001458, NT2RI3001515, NT2RI3001573, NT2RI3001967, NT2RI3002303, NT2RI3002557, NT2RI3002842, NT2RI3003027, NT2RI3003031, NT2RI3003095, NT2RI3003104, NT2RI3003162, NT2RI3003362, NT2RI3003382, NT2RI3003409, NT2RI3003738, NT2RI3003925, NT2RI3004133, NT2RI3004381, NT2RI3004510, NT2RI3005202, NT2RI3005403, NT2RI3005416, NT2RI3005724, NT2RI3005861, NT2RI3005923, NT2RI3005928, NT2RI3006132, NT2RI3006171,

[1557] NT2RI3006284, NT2RI3006340, NT2RI3006376, NT2RI3006666, NT2RI3006673, NT2RI3006796, NT2RI3007065, NT2RI3007095, NT2RI3007158, NT2RI3007167, NT2RI3007213, NT2RI3007291, NT2RI3007443, NT2RI3007684, NT2RI3007757, NT2RI3007878, NT2RI3007978, NT2RI3008055, NT2RI3008162, NT2RI3008179, NT2RI3008228, NT2RI3008442, NT2RI3008652, NT2RI3008697, NT2RI3008974, NT2RI3009158, NT2RI3009480, NT2RI3009524, NT2RP6000005, NT2RP6000008, NT2RP6000017, NT2RP6000032, NT2RP6000033, NT2RP6000039, NT2RP6000043, NT2RP6000059, NT2RP6000060, NT2RP6000078, NT2RP6000085, NT2RP6000086, NT2RP6000100, NT2RP6000109, NT2RP6000110, NT2RP6000119, NT2RP6000123, NT2RP6000127, NT2RP6000130, NT2RP6000140, NT2RP6000150, NT2RP7000041,

[1558] NT2RP7000069, NT2RP7000076, NT2RP7000086, NT2RP7000109, NT2RP7000112, NT2RP7000173, NT2RP7000259, NT2RP7000271, NT2RP7000311, NT2RP7000359, NT2RP7000364, NT2RP7000380, NT2RP7000391, NT2RP7000425, NT2RP7000477, NT2RP7000579, NT2RP7000586, NT2RP7000600, NT2RP7000812, NT2RP7000906, NT2RP7000926, NT2RP7001074, NT2RP7001080, NT2RP7001156, NT2RP7001231, NT2RP7001283, NT2RP7001306, NT2RP7001319, NT2RP7001335, NT2RP7001364, NT2RP7001475, NT2RP7001532, NT2RP7001591, NT2RP7001602, NT2RP7001678, NT2RP7001856, NT2RP7001962, NT2RP7002028, NT2RP7002064, NT2RP7002151, NT2RP7002163, NT2RP7002243, NT2RP7002282, NT2RP7002376, NT2RP7002449, NT2RP7002478, NT2RP7002554, NT2RP7002594, NT2RP7002603, NT2RP7002650,

[1559] NT2RP7002738, NT2RP7002779, NT2RP7002829, NT2RP7002841, NT2RP7002906, NT2RP7002978, NT2RP7002982, NT2RP7003025, NT2RP7003050, NT2RP7003055, NT2RP7003084, NT2RP7003091, NT2RP7003107, NT2RP7003134, NT2RP7003148, NT2RP7003203, NT2RP7003261, NT2RP7003319, NT2RP7003439, NT2RP7003511, NT2RP7003629, NT2RP7003632, NT2RP7003647, NT2RP7003680, NT2RP7003688, NT2RP7003724, NT2RP7004027, NT2RP7004080, NT2RP7004196, NT2RP7004233, NT2RP7004260, NT2RP7004348, NT2RP7004352, NT2RP7004358, NT2RP7004373, NT2RP7004396, NT2RP7004428, NT2RP7004481, NT2RP7004541, NT2RP7004559, NT2RP7004641, NT2RP7004656, NT2RP7004687, NT2RP7004722, NT2RP7004751, NT2RP7004766, NT2RP7004790, NT2RP7004884, NT2RP7004911, NT2RP7004915,

[1560] NT2RP7004925, NT2RP7004946, NT2RP7004961, NT2RP7004964, NT2RP7004975, NT2RP7005118, NT2RP7005205, NT2RP7005219, NT2RP7005323, NT2RP7005468, NT2RP7005493, NT2RP7005529, NT2RP7005629, NT2RP7005631, NT2RP7005669, NT2RP7005675, NT2RP7005846, NT2RP7006033, NT2RP7006075, NT2RP7006160, NT2RP7006162, NT2RP7006223, NT2RP7006296, NT2RP7006304, NT2RP7006374, NT2RP7006395, NT2RP7006408, NT2RP7006457, NT2RP7006490, NT2RP7006539, NT2RP7006547, NT2RP7006601, NT2RP7006619, NT2RP7006621, NT2RP7006636, NT2RP7006701, NT2RP7006853, NT2RP7006886, NT2RP7006887, NT2RP7006980, NT2RP7006986, NT2RP7006995, NT2RP7007114, NT2RP7007177, NT2RP7007221, NT2RP7007226, NT2RP7007252, NT2RP7007269, NT2RP7007310, NT2RP7007359,

[1561] NT2RP7007381, NT2RP7007387, NT2RP7007406, NT2RP7007480, NT2RP7007504, NT2RP7007530, NT2RP7007537, NT2RP7007580, NT2RP7007594, NT2RP7007610, NT2RP7007617, NT2RP7007643, NT2RP7007766, NT2RP7007925, NT2RP7007930, NT2RP7008013, NT2RP7008015, NT2RP7008133, NT2RP7008137, NT2RP7008142, NT2RP7008144, NT2RP7008161, NT2RP7008167, NT2RP7008190, NT2RP7008315, NT2RP7008360, NT2RP7008396, NT2RP7008406, NT2RP7008435, NT2RP7008441, NT2RP7008454, NT2RP7008487, NT2RP7008543, NT2RP7008544, NT2RP7008550, NT2RP7008557, NT2RP7008623, NT2RP7008657, NT2RP7008714, NT2RP7008720, NT2RP7008855, NT2RP7008863, NT2RP7009012, NT2RP7009019, NT2RP7009030, NT2RP7009087, NT2RP7009108, NT2RP7009147, NT2RP7009149, NT2RP7009168,

[1562] NT2RP7009215, NT2RP7009225, NT2RP7009236, NT2RP7009253, NT2RP7009267, NT2RP7009322, NT2RP7009363, NT2RP7009370, NT2RP7009373, NT2RP7009394, NT2RP7009397, NT2RP7009429, NT2RP7009439, NT2RP7009466, NT2RP7009481, NT2RP7009482, NT2RP7009498, NT2RP7009502, NT2RP7009507, NT2RP7009577, NT2RP7009743, NT2RP7009867, NT2RP7010109, NT2RP7010128, NT2RP7010235, NT2RP7010275, NT2RP7010521, NT2RP7010599, NT2RP7010612, NT2RP7010817, NT2RP7011086, NT2RP7011132, NT2RP7011268, NT2RP7011318, NT2RP7011452, NT2RP7011570, NT2RP7011721, NT2RP7011909, NT2RP7012291, NT2RP7012516, NT2RP7012776, NT2RP7013002, NT2RP7013374, NT2RP7013499, NT2RP7013573, NT2RP7013729, NT2RP7013764, NT2RP7013795, NT2RP7013999, NT2RP7014005,

[1563] NT2RP7014178, NT2RP7014348, NT2RP7014420, NT2RP7014583, NT2RP7014721, NT2RP7014743, NT2RP7014778, NT2RP7014906, NT2RP7015080, NT2RP7015431, NT2RP7015503, NT2RP7015512, NT2RP7015676, NT2RP7015789, NT2RP7015996, NT2RP7016508, NT2RP7016574, NT2RP7016622, NT2RP7016911, NT2RP7017139, NT2RP7017284, NT2RP7017365, NT2RP7017474, NT2RP7017546, NT2RP7017567, NT2RP7017795, NT2RP7017971, NT2RP7018032, NT2RP7018126, NT2RP7018197, NT2RP7018206, NT2RP7018340, NT2RP7018586, NT2RP7018802, NT2RP7018871, NT2RP7019064, NT2RP7019135, NT2RP7019273, NT2RP7019367, NT2RP7019445, NT2RP7019543, NT2RP7019682, NT2RP7019835, NT2RP7020112, NT2RP7020123, NT2RP7020343, NT2RP7020379, NT2RP8000137, NT2RP8000296, NT2RP8000435,

[1564] NT2RP8000483, NT2RP8000521, NT2RP8000633, NT2RP8001363, NT2RP8001407, NT2RP8001584, NT2RP8001604, NT2RP8001605, NT2RP8003490, NT2RP8003657, NT2RP8003787, NT2RP8004306, NT2RP8005546, NT2RP8006452, NT2RP8006521, NT2RP8007416, NT2RP8007503, NT2RP8007715, NT2RP8007920, NT2RP8008057, NT2RP8009248, NTONG1000006, NTONG1000033, NTONG1000047, NTONG1000052, NTONG1000075, NTONG1000087, NTONG1000123, NTONG1000130, NTONG1000161, NTONG1000172, NTONG1000182, NTONG1000213, NTONG1000214, NTONG1000246, NTONG1000247, NTONG1000257, NTONG2000040, NTONG2000107, NTONG2000231, NTONG2000334, NTONG2000363, NTONG2000413, NTONG2000492, NTONG2000499, NTONG2000531, NTONG2000583, NTONG2000800, NTONG2000858, NTONG2000878,

[1565] NTONG2000966, NTONG2000985, NTONG2001014, NTONG2001079, NTONG2001157, NTONG2001173, NTONG2001220, NTONG2001222, NTONG2001362, NTONG2001428, NTONG2001532, NTONG2001550, NTONG2001587, NTONG2001612, NTONG2001619, NTONG2001642, NTONG2001657, NTONG2001676, NTONG2001762, NTONG2002278, NTONG2002582, NTONG2002807, NTONG2002948, NTONG2002970, NTONG2002985, NTONG2003158, NTONG2003210, NTONG2003316, NTONG2003409, NTONG2003454, NTONG2003515, NTONG2003805, NTONG2003852, NTONG2003897, NTONG2003928, NTONG2004095, NTONG2004308, NTONG2004521, NTONG2004614, NTONG2004690, NTONG2004806, NTONG2004829, NTONG2004918, NTONG2004991, NTONG2005062, NTONG2005086, NTONG2005137, NTONG2005153, NTONG2005265, NTONG2005277,

[1566] NTONG2005363, NTONG2005373, NTONG2005391, NTONG2005480, NTONG2005497, NTONG2005577, NTONG2005657, NTONG2005801, NTONG2005822, NTONG2005897, NTONG2005969, NTONG2006099, NTONG2006187, NTONG2006324, NTONG2006354, NTONG2006440, NTONG2006484, NTONG2006501, NTONG2006646, NTONG2006709, NTONG2006783, NTONG2007020, NTONG2007028, NTONG2007034, NTONG2007249, NTONG2007517, NTONG2007522, NTONG2007658, NTONG2007693, NTONG2007756, NTONG2008088, NTONG2008093, NTONG2008143, NTONG2008365, NTONG2008522, NTONG2008672, NTONG2008862, NTONG2008939, NTONG2008944, NTONG2009060, NTONG2009068, NTONG2009229, NTONG2009233, NTONG2009468, NTONG2009576, OCBBF1000016, OCBBF1000030, OCBBF1000042, OCBBF1000049, OCBBF1000054,

[1567] OCBBF1000067, OCBBF1000080, OCBBF1000085, OCBBF1000086, OCBBF1000091, OCBBF1000104, OCBBF1000114, OCBBF1000118, OCBBF1000119, OCBBF1000122, OCBBF1000130, OCBBF1000138, OCBBF1000145, OCBBF1000146, OCBBF1000153, OCBBF1000175, OCBBF1000185, OCBBF1000188, OCBBF1000192, OCBBF1000254, OCBBF1000315, OCBBF2000015, OCBBF2000126, OCBBF2000178, OCBBF2000231, OCBBF2000277, OCBBF2000287, OCBBF2000323, OCBBF2000452, OCBBF2000467, OCBBF2000677, OCBBF2000703, OCBBF2000719, OCBBF2000824, OCBBF2000831, OCBBF2000904, OCBBF2000998, OCBBF2001075, OCBBF2001101, OCBBF2001124, OCBBF2001140, OCBBF2001166, OCBBF2001176, OCBBF2001186, OCBBF2001196, OCBBF2001210, OCBBF2001252, OCBBF2001307, OCBBF2001323, OCBBF2001389,

[1568] OCBBF2001402, OCBBF2001408, OCBBF2001416, OCBBF2001473, OCBBF2001492, OCBBF2001494, OCBBF2001527, OCBBF2001528, OCBBF2001586, OCBBF2001639, OCBBF2001681, OCBBF2001706, OCBBF2001749, OCBBF2001794, OCBBF2001910, OCBBF2001931, OCBBF2001961, OCBBF2001983, OCBBF2002015, OCBBF2002083, OCBBF2002086, OCBBF2002124, OCBBF2002161, OCBBF2002290, OCBBF2002357, OCBBF2002376, OCBBF2002615, OCBBF2002656, OCBBF2002663, OCBBF2002805, OCBBF2002865, OCBBF2002920, OCBBF2002980, OCBBF2003028, OCBBF2003052, OCBBF2003091, OCBBF2003246, OCBBF2003327, OCBBF2003518, OCBBF2003543, OCBBF2003593, OCBBF2003744, OCBBF2003819, OCBBF2003925, OCBBF2004038, OCBBF2004104, OCBBF2004147, OCBBF2004168, OCBBF2004235, OCBBF2004259,

[1569] OCBBF2004273, OCBBF2004385, OCBBF2004418, OCBBF2004478, OCBBF2004482, OCBBF2004533, OCBBF2004567, OCBBF2004612, OCBBF2004647, OCBBF2004669, OCBBF2004757, OCBBF2004826, OCBBF2004866, OCBBF2004883, OCBBF2004889, OCBBF2004930, OCBBF2004984, OCBBF2005066, OCBBF2005077, OCBBF2005161, OCBBF2005343, OCBBF2005349, OCBBF2005373, OCBBF2005420, OCBBF2005428, OCBBF2005433, OCBBF2005476, OCBBF2005546, OCBBF2005843, OCBBF2005901, OCBBF2005956, OCBBF2006005, OCBBF2006030, OCBBF2006058, OCBBF2006113, OCBBF2006148, OCBBF2006151, OCBBF2006154, OCBBF2006172, OCBBF2006214, OCBBF2006241, OCBBF2006313, OCBBF2006388, OCBBF2006438, OCBBF2006567, OCBBF2006624, OCBBF2006639, OCBBF2006660, OCBBF2006764, OCBBF2006859,

[1570] OCBBF2006972, OCBBF2006987, OCBBF2007028, OCBBF2007039, OCBBF2007051, OCBBF2007068, OCBBF2007114, OCBBF2007121, OCBBF2007184, OCBBF2007194, OCBBF2007196, OCBBF2007238, OCBBF2007354, OCBBF2007414, OCBBF2007415, OCBBF2007428, OCBBF2007478, OCBBF2007485, OCBBF2007520, OCBBF2007555, OCBBF2007610, OCBBF2007622, OCBBF2007756, OCBBF2007762, OCBBF2007829, OCBBF2007892, OCBBF2007931, OCBBF2007946, OCBBF2008005, OCBBF2008116, OCBBF2008138, OCBBF2008144, OCBBF2008283, OCBBF2008330, OCBBF2008340, OCBBF2008366, OCBBF2008466, OCBBF2008483, OCBBF2008511, OCBBF2008520, OCBBF2008569, OCBBF2008586, OCBBF2008640, OCBBF2008691, OCBBF2008701, OCBBF2008724, OCBBF2008760, OCBBF2008768, OCBBF2008770, OCBBF2008775,

[1571] OCBBF2008790, OCBBF2008814, OCBBF2009095, OCBBF2009115, OCBBF2009242, OCBBF2009301, OCBBF2009352, OCBBF2009391, OCBBF2009424, OCBBF2009536, OCBBF2009571, OCBBF2009583, OCBBF2009603, OCBBF2009772, OCBBF2009788, OCBBF2009836, OCBBF2009920, OCBBF2009926, OCBBF2010040, OCBBF2010140, OCBBF2010281, OCBBF2010313, OCBBF2010404, OCBBF2010416, OCBBF2010420, OCBBF2010557, OCBBF2010604, OCBBF2010709, OCBBF2010792, OCBBF2010819, OCBBF2010830, OCBBF2010841, OCBBF2010843, OCBBF2010858, OCBBF2010863, OCBBF2010871, OCBBF2010931, OCBBF2010945, OCBBF2010978, OCBBF2010989, OCBBF2011073, OCBBF2011137, OCBBF2011160, OCBBF2011177, OCBBF2011228, OCBBF2011232, OCBBF2011283, OCBBF2011311, OCBBF2011536, OCBBF2011625,

[1572] OCBBF2011669, OCBBF2011685, OCBBF2011706, OCBBF2011722, OCBBF2011759, OCBBF2011767, OCBBF2011855, OCBBF2011872, OCBBF2011887, OCBBF2011897, OCBBF2011914, OCBBF2011960, OCBBF2011981, OCBBF2012001, OCBBF2012028, OCBBF2012039, OCBBF2012095, OCBBF2012139, OCBBF2012191, OCBBF2012262, OCBBF2012320, OCBBF2012436, OCBBF2012525, OCBBF2012678, OCBBF2012704, OCBBF2012714, OCBBF2012755, OCBBF2012812, OCBBF2012821, OCBBF2012881, OCBBF2012908, OCBBF2012936, OCBBF2012990, OCBBF2013011, OCBBF2013049, OCBBF2013091, OCBBF2013123, OCBBF2013127, OCBBF2013149, OCBBF2013208, OCBBF2013285, OCBBF2013319, OCBBF2013324, OCBBF2013366, OCBBF2013481, OCBBF2013507, OCBBF2013721, OCBBF2013789, OCBBF2013843, OCBBF2013883,

[1573] OCBBF2013926, OCBBF2014052, OCBBF2014064, OCBBF2014089, OCBBF2014292, OCBBF2014322, OCBBF2014386, OCBBF2014541, OCBBF2014576, OCBBF2014707, OCBBF2014745, OCBBF2014828, OCBBF2014873, OCBBF2014880, OCBBF2014928, OCBBF2015031, OCBBF2015081, OCBBF2015115, OCBBF2015232, OCBBF2015233, OCBBF2015285, OCBBF2015334, OCBBF2015335, OCBBF2015503, OCBBF2015506, OCBBF2015599, OCBBF2015645, OCBBF2015659, OCBBF2015751, OCBBF2015797, OCBBF2015931, OCBBF2015980, OCBBF2016038, OCBBF2016405, OCBBF2016467, OCBBF2016590, OCBBF2016591, OCBBF2016612, OCBBF2016689, OCBBF2016690, OCBBF2016729, OCBBF2016928, OCBBF2017035, OCBBF2017055, OCBBF2017069, OCBBF2017306, OCBBF2017325, OCBBF2017398, OCBBF2017458, OCBBF2017489,

[1574] OCBBF2017516, OCBBF2017665, OCBBF2017754, OCBBF2017791, OCBBF2017815, OCBBF2017882, OCBBF2017888, OCBBF2017893, OCBBF2017920, OCBBF2018012, OCBBF2018014, OCBBF2018084, OCBBF2018167, OCBBF2018206, OCBBF2018229, OCBBF2018234, OCBBF2018362, OCBBF2018380, OCBBF2018563, OCBBF2018581, OCBBF2018618, OCBBF2018663, OCBBF2018687, OCBBF2018707, OCBBF2018827, OCBBF2018828, OCBBF2018934, OCBBF2018956, OCBBF2019108, OCBBF2019195, OCBBF2019327, OCBBF2019684, OCBBF2019761, OCBBF2019823, OCBBF2019950, OCBBF2020048, OCBBF2020318, OCBBF2020343, OCBBF2020453, OCBBF2020741, OCBBF2020801, OCBBF2020825, OCBBF2020838, OCBBF2021020, OCBBF2021214, OCBBF2021286, OCBBF2021323, OCBBF2021518, OCBBF2021788, OCBBF2021833,

[1575] OCBBF2022351, OCBBF2022573, OCBBF2022574, OCBBF2023162, OCBBF2023598, OCBBF2023643, OCBBF2024463, OCBBF2024589, OCBBF2024719, OCBBF2024779, OCBBF2024781, OCBBF2024850, OCBBF2025028, OCBBF2025115, OCBBF2025198, OCBBF2025451, OCBBF2025458, OCBBF2025527, OCBBF2025631, OCBBF2025730, OCBBF2026025, OCBBF2026035, OCBBF2026144, OCBBF2026368, OCBBF2026645, OCBBF2026649, OCBBF2026690, OCBBF2026981, OCBBF2027148, OCBBF2027197, OCBBF2027354, OCBBF2027423, OCBBF2027478, OCBBF2027481, OCBBF2027511, OCBBF2027661, OCBBF2027728, OCBBF2027782, OCBBF2027868, OCBBF2028055, OCBBF2028173, OCBBF2028421, OCBBF2029471, OCBBF2029901, OCBBF2030116, OCBBF2030329, OCBBF2030354, OCBBF2030517, OCBBF2030574, OCBBF2030708,

[1576] OCBBF2030927, OCBBF2030963, OCBBF2031167, OCBBF2031198, OCBBF2031366, OCBBF2031561, OCBBF2032152, OCBBF2032274, OCBBF2032539, OCBBF2032590, OCBBF2032599, OCBBF2032611, OCBBF2032671, OCBBF2033295, OCBBF2033413, OCBBF2033869, OCBBF2033948, OCBBF2034333, OCBBF2034529, OCBBF2034637, OCBBF2034906, OCBBF2035110, OCBBF2035214, OCBBF2035390, OCBBF2035564, OCBBF2035658, OCBBF2035823, OCBBF2035885, OCBBF2035916, OCBBF2036019, OCBBF2036031, OCBBF2036225, OCBBF2036476, OCBBF2036743, OCBBF2036752, OCBBF2037068, OCBBF2037340, OCBBF2037398, OCBBF2037464, OCBBF2037547, OCBBF2037598, OCBBF2037638, OCBBF2038238, OCBBF2038285, OCBBF2038317, OCBBF3000097, OCBBF3000213, OCBBF3000296, OCBBF3000323, OCBBF3000372,

[1577] OCBBF3000380, OCBBF3000743, OCBBF3000830, OCBBF3001076, OCBBF3001202, OCBBF3001333, OCBBF3001616, OCBBF3002553, OCBBF3002600, OCBBF3002654, OCBBF3003103, OCBBF3003209, OCBBF3003592, OCBBF3003745, OCBBF3003761, OCBBF3004264, OCBBF3004314, OCBBF3004487, OCBBF3004972, OCBBF3005330, OCBBF3005597, OCBBF3005843, OCBBF3006802, OCBBF3006986, OCBBF3007078, OCBBF3007704, OCBBF3008230, OCBBF3008392, OCBBF3008835, OCBBF3009192, OCBBF3009244, OCBBF3009279, PANCR1000012, PANCR1000021, PANCR1000081, PANCR1000086, PANCR1000091, PANCR1000185, PEBLM1000024, PEBLM1000029, PEBLM1000034, PEBLM1000062, PEBLM1000066, PEBLM1000068, PEBLM1000071, PEBLM1000083, PEBLM1000144, PEBLM1000147, PEBLM1000180, PEBLM2000030,

[1578] PEBLM2000112, PEBLM2000126, PEBLM2000147, PEBLM2000170, PEBLM2000180, PEBLM2000213, PEBLM2000248, PEBLM2000270, PEBLM2000308, PEBLM2000321, PEBLM2000326, PEBLM2000333, PEBLM2000338, PEBLM2000395, PEBLM2000479, PEBLM2000502, PEBLM2001072, PEBLM2001312, PEBLM2001465, PEBLM2001488, PEBLM2001803, PEBLM2002432, PEBLM2002455, PEBLM2002594, PEBLM2002749, PEBLM2002887, PEBLM2003426, PEBLM2003765, PEBLM2003914, PEBLM2003935, PEBLM2004015, PEBLM2004216, PEBLM2004290, PEBLM2004497, PEBLM2004666, PEBLM2004733, PEBLM2005282, PEBLM2005615, PEBLM2005632, PEBLM2005697, PEBLM2006031, PEBLM2006036, PEBLM2006049, PEBLM2006113, PEBLM2006135, PEBLM2006215, PEBLM2006283, PEBLM2006298, PEBLM2006366, PEBLM2006709,

[1579] PEBLM2006912, PEBLM2007112, PEBLM2007140, PEBLM2007188, PEBLM2007296, PEBLM2007437, PEBLM2007447, PEBLM2007598, PEBLM2007832, PEBLM2007834, PEBLM2008106, PEBLM2008576, PEBLM2008605, PEBLM2008826, PEBLM2008861, PERIC1000025, PERIC1000147, PERIC2000180, PERIC2000214, PERIC2000386, PERIC2000387, PERIC2000422, PERIC2000473, PERIC2000478, PERIC2000889, PERIC2000914, PERIC2001227, PERIC2001228, PERIC2001379, PERIC2001504, PERIC2001703, PERIC2001764, PERIC2002243, PERIC2002272, PERIC2002452, PERIC2002766, PERIC2003001, PERIC2003090, PERIC2003287, PERIC2003349, PERIC2003452, PERIC2003699, PERIC2003720, PERIC2003794, PERIC2003834, PERIC2003919, PERIC2003957, PERIC2004028, PERIC2004131, PERIC2004259,

[1580] PERIC2004379, PERIC2004429, PERIC2004510, PERIC2004613, PERIC2004909, PERIC2005111, PERIC2005305, PERIC2005347, PERIC2005370, PERIC2005936, PERIC2006035, PERIC2006121, PERIC2006443, PERIC2006945, PERIC2006960, PERIC2007068, PERIC2007439, PERIC2007914, PERIC2008008, PERIC2008385, PERIC2009001, PERIC2009086, PERIC2009329, PERIC2009566, PLACE5000001, PLACE5000013, PLACE5000037, PLACE5000058, PLACE5000066, PLACE5000067, PLACE5000070, PLACE5000080, PLACE5000105, PLACE5000113, PLACE5000115, PLACE5000116, PLACE5000129, PLACE5000139, PLACE5000153, PLACE5000159, PLACE5000170, PLACE5000171, PLACE5000178, PLACE5000245, PLACE5000260, PLACE5000282, PLACE5000297, PLACE5000372, PLACE5000492, PLACE5000522,

[1581] PLACE5000527, PLACE6000012, PLACE6000044, PLACE6000055, PLACE6000070, PLACE6000137, PLACE6000145, PLACE6000191, PLACE6000205, PLACE6000231, PLACE6000263, PLACE6000296, PLACE6000314, PLACE6000325, PLACE6000348, PLACE6000371, PLACE6000414, PLACE6000424, PLACE6000426, PLACE6000429, PLACE6000450, PLACE6000463, PLACE6000523, PLACE6000550, PLACE6000552, PLACE6000555, PLACE6000619, PLACE6000630, PLACE6000953, PLACE6001064, PLACE6001118, PLACE6001153, PLACE6001185, PLACE6001262, PLACE6001281, PLACE6001294, PLACE6001443, PLACE6001536, PLACE6001557, PLACE6001712, PLACE6001740, PLACE6001823, PLACE6001886, PLACE6001923, PLACE6001925, PLACE6001933, PLACE6002011, PLACE6002016, PLACE6002056, PLACE6002102,

[1582] PLACE6002157, PLACE6002312, PLACE6002323, PLACE6002345, PLACE6002419, PLACE6002462, PLACE6002647, PLACE6002668, PLACE6002692, PLACE6002699, PLACE6002710, PLACE6002871, PLACE6002949, PLACE6002960, PLACE6003004, PLACE6003038, PLACE6003077, PLACE6003094, PLACE6003109, PLACE6003204, PLACE6003218, PLACE6003372, PLACE6003383, PLACE6003393, PLACE6003399, PLACE6003539, PLACE6003621, PLACE6003705, PLACE6003740, PLACE6003745, PLACE6003771, PLACE6003796, PLACE6003839, PLACE6003850, PLACE6004005, PLACE6004101, PLACE6004219, PLACE6004312, PLACE6004336, PLACE6004368, PLACE6004380, PLACE6004396, PLACE6004397, PLACE6004454, PLACE6004464, PLACE6004491, PLACE6004578, PLACE6004663, PLACE6004687, PLACE6004738,

[1583] PLACE6004931, PLACE6004966, PLACE6004993, PLACE6005007, PLACE6005029, PLACE6005108, PLACE6005231, PLACE6005234, PLACE6005283, PLACE6005294, PLACE6005328, PLACE6005351, PLACE6005423, PLACE6005482, PLACE6005487, PLACE6005535, PLACE6005546, PLACE6005559, PLACE6005579, PLACE6005691, PLACE6005786, PLACE6006042, PLACE6006077, PLACE6006137, PLACE6006158, PLACE6006186, PLACE6006217, PLACE6006222, PLACE6006266, PLACE6006287, PLACE6006394, PLACE6006418, PLACE6006474, PLACE6006566, PLACE6006697, PLACE6006822, PLACE6006871, PLACE6006905, PLACE6006988, PLACE6007050, PLACE6007180, PLACE6007239, PLACE6007242, PLACE6007309, PLACE6007373, PLACE6007380, PLACE6007433, PLACE6007436, PLACE6007482, PLACE6007687,

[1584] PLACE6007787, PLACE6007798, PLACE6007807, PLACE6007925, PLACE6008036, PLACE6008094, PLACE6008126, PLACE6008285, PLACE6008444, PLACE6008453, PLACE6008640, PLACE6008750, PLACE6008768, PLACE6008775, PLACE6008824, PLACE6008989, PLACE6009006, PLACE6009008, PLACE6009228, PLACE6009237, PLACE6009338, PLACE6009419, PLACE6009430, PLACE6009482, PLACE6009524, PLACE6009527, PLACE6009560, PLACE6009590, PLACE6009821, PLACE6009835, PLACE6009853, PLACE6010463, PLACE6010484, PLACE6010485, PLACE6010568, PLACE6010701, PLACE6010704, PLACE6010732, PLACE6010765, PLACE6010848, PLACE6010925, PLACE6010936, PLACE6010991, PLACE6011041, PLACE6011057, PLACE6011102, PLACE6011156, PLACE6011211, PLACE6011260, PLACE6011334,

[1585] PLACE6011627, PLACE6011774, PLACE6011881, PLACE6011907, PLACE6011970, PLACE6011975, PLACE6012028, PLACE6012108, PLACE6012168, PLACE6012297, PLACE6012308, PLACE6012574, PLACE6012908, PLACE6012936, PLACE6012942, PLACE6013222, PLACE6013232, PLACE6013288, PLACE6013386, PLACE6013400, PLACE6013650, PLACE6013672, PLACE6013883, PLACE6013884, PLACE6013885, PLACE6014043, PLACE6014064, PLACE6014516, PLACE6014882, PLACE6015051, PLACE6015211, PLACE6015322, PLACE6015445, PLACE6015460, PLACE6015513, PLACE6015591, PLACE6015729, PLACE6015731, PLACE6015939, PLACE6016030, PLACE6016093, PLACE6016105, PLACE6016160, PLACE6016210, PLACE6016254, PLACE6016383, PLACE6016942, PLACE6016984, PLACE6017002, PLACE6017431,

[1586] PLACE6017564, PLACE6017578, PLACE6017626, PLACE6017701, PLACE6017714, PLACE6017788, PLACE6017791, PLACE6018031, PLACE6018107, PLACE6018187, PLACE6018235, PLACE6018287, PLACE6018441, PLACE6018487, PLACE6018497, PLACE6018769, PLACE6018834, PLACE6018843, PLACE6018863, PLACE6018938, PLACE6019195, PLACE6019385, PLACE6019542, PLACE6019600, PLACE6019674, PLACE6019676, PLACE6019701, PLACE6019932, PLACE6020031, PLACE6020145, PLACE7000167, PLACE7000170, PLACE7000266, PLACE7000333, PLACE7000410, PLACE7000502, PLACE7000707, PLACE7001022, PLACE7001544, PLACE7001759, PLACE7001936, PLACE7002303, PLACE7002641, PLACE7003639, PLACE7003657, PLACE7003684, PLACE7003985, PLACE7004103, PLACE7004961, PLACE7005169,

[1587] PLACE7005671, PLACE7005840, PLACE7006051, PLACE7006090, PLACE7006240, PLACE7006268, PLACE7006275, PLACE7006498, PLACE7006540, PLACE7007379, PLACE7007644, PLACE7007973, PLACE7008136, PLACE7008261, PLACE7008431, PLACE7008623, PLACE7008766, PLACE7009563, PROST1000033, PROST1000039, PROST1000065, PROST1000083, PROST1000085, PROST1000097, PROST1000110, PROST1000120, PROST1000123, PROST1000136, PROST1000145, PROST1000152, PROST1000167, PROST1000184, PROST1000215, PROST1000217, PROST1000220, PROST1000226, PROST1000246, PROST1000262, PROST1000272, PROST1000298, PROST1000322, PROST1000334, PROST1000343, PROST1000362, PROST1000377, PROST1000383, PROST1000412, PROST1000419, PROST1000451, PROST1000480,

[1588] PROST1000485, PROST1000493, PROST1000512, PROST1000527, PROST1000528, PROST1000536, PROST1000559, PROST1000575, PROST2000036, PROST2000053, PROST2000067, PROST2000079, PROST2000105, PROST2000143, PROST2000162, PROST2000165, PROST2000176, PROST2000203, PROST2000206, PROST2000212, PROST2000241, PROST2000267, PROST2000273, PROST2000274, PROST2000277, PROST2000284, PROST2000325, PROST2000337, PROST2000452, PROST2000463, PROST2000470, PROST2000505, PROST2000567, PROST2000572, PROST2000717, PROST2000760, PROST2000761, PROST2000835, PROST2000893, PROST2000961, PROST2001002, PROST2001116, PROST2001138, PROST2001180, PROST2001213, PROST2001283, PROST2001414, PROST2001415, PROST2001465, PROST2001521,

[1589] PROST2001540, PROST2001552, PROST2001599, PROST2001611, PROST2001636, PROST2001739, PROST2001796, PROST2001805, PROST2001823, PROST2001883, PROST2001899, PROST2001997, PROST2001998, PROST2002078, PROST2002101, PROST2002162, PROST2002212, PROST2002227, PROST2002338, PROST2002425, PROST2002488, PROST2002489, PROST2002527, PROST2002591, PROST2002602, PROST2002633, PROST2002651, PROST2002682, PROST2002685, PROST2002722, PROST2002736, PROST2002842, PROST2002897, PROST2002906, PROST2002927, PROST2002960, PROST2003102, PROST2003117, PROST2003210, PROST2003232, PROST2003302, PROST2003303, PROST2003324, PROST2003338, PROST2003340, PROST2003396, PROST2003428, PROST2003472, PROST2003537, PROST2003563,

[1590] PROST2003577, PROST2003583, PROST2003586, PROST2003628, PROST2003635, PROST2003674, PROST2003676, PROST2003725, PROST2003732, PROST2003775, PROST2003922, PROST2003930, PROST2004115, PROST2004142, PROST2004146, PROST2004161, PROST2004258, PROST2004332, PROST2004481, PROST2004526, PROST2004570, PROST2004727, PROST2004739, PROST2004742, PROST2004744, PROST2004817, PROST2005039, PROST2005067, PROST2005076, PROST2005093, PROST2005121, PROST2005131, PROST2005143, PROST2005228, PROST2005272, PROST2005285, PROST2005426, PROST2005466, PROST2005604, PROST2005630, PROST2005683, PROST2005788, PROST2005880, PROST2005886, PROST2005904, PROST2005919, PROST2005943, PROST2006008, PROST2006020, PROST2006030,

[1591] PROST2006060, PROST2006196, PROST2006201, PROST2006260, PROST2006282, PROST2006343, PROST2006450, PROST2006491, PROST2006510, PROST2006536, PROST2006579, PROST2006688, PROST2006737, PROST2006766, PROST2006782, PROST2006933, PROST2006988, PROST2007122, PROST2007200, PROST2007237, PROST2007248, PROST2007289, PROST2001317, PROST2007328, PROST2007382, PROST2007389, PROST2007416, PROST2007528, PROST2007612, PROST2007818, PROST2007871, PROST2007950, PROST2007956, PROST2007974, PROST2007988, PROST2008079, PROST2008088, PROST2008243, PROST2008245, PROST2008268, PROST2008271, PROST2008447, PROST2008468, PROST2008472, PROST2008489, PROST2008516, PROST2008724, PROST2008835, PROST2008993, PROST2009022,

[1592] PROST2009208, PROST2009222, PROST2009254, PROST2009273, PROST2009320, PROST2009347, PROST2009365, PROST2009388, PROST2009400, PROST2009470, PROST2009483, PROST2009571, PROST2009736, PROST2009795, PROST2009901, PROST2009909, PROST2010046, PROST2010219, PROST2010250, PROST2010318, PROST2010326, PROST2010382, PROST2010400, PROST2010545, PROST2010579, PROST2010606, PROST2010885, PROST2011012, PROST2011038, PROST2011105, PROST2011297, PROST2011410, PROST2011439, PROST2011482, PROST2011577, PROST2011631, PROST2011660, PROST2012005, PROST2012007, PROST2012016, PROST2012088, PROST2012140, PROST2012157, PROST2012190, PROST2012249, PROST2012353, PROST2012400, PROST2012448, PROST2012504, PROST2012542,

[1593] PROST2012550, PROST2012740, PROST2012745, PROST2012780, PROST2012888, PROST2012890, PROST2013032, PROST2013053, PROST2013121, PROST2013260, PROST2013327, PROST2013531, PROST2013605, PROST2013627, PROST2013873, PROST2013880, PROST2014422, PROST2014585, PROST2014601, PROST2014659, PROST2014862, PROST2014925, PROST2015124, PROST2015137, PROST2015198, PROST2015243, PROST2015246, PROST2015251, PROST2015287, PROST2015332, PROST2015457, PROST2015464, PROST2015537, PROST2015545, PROST2015551, PROST2015636, PROST2015710, PROST2015756, PROST2015877, PROST2015900, PROST2015924, PROST2015932, PROST2016195, PROST2016246, PROST2016351, PROST2016379, PROST2016444, PROST2016462, PROST2016499, PROST2016512,

[1594] PROST2016566, PROST2016582, PROST2016668, PROST2016684, PROST2016777, PROST2016829, PROST2016860, PROST2016918, PROST2016980, PROST2017098, PROST2017128, PROST2017203, PROST2017367, PROST2017413, PROST2017441, PROST2017529, PROST2017578, PROST2017612, PROST2017617, PROST2017700, PROST2017701, PROST2017729, PROST2017836, PROST2017910, PROST2017972, PROST2018030, PROST2018090, PROST2018235, PROST2018437, PROST2018487, PROST2018511, PROST2018583, PROST2018588, PROST2018607, PROST2018788, PROST2018902, PROST2018922, PROST2018977, PROST2019164, PROST2019253, PROST2019296, PROST2019398, PROST2019487, PROST2019781, PUAEN1000039, PUAEN1000057, PUAEN1000065, PUAEN1000081, PUAEN1000085, PUAEN1000087,

[1595] PUAEN1000121, PUAEN1000147, PUAEN1000161, PUAEN1000175, PUAEN1000239, PUAEN1000275, PUAEN1000276, PUAEN1000288, PUAEN2000080, PUAEN2000152, PUAEN2000247, PUAEN2000312, PUAEN2000394, PUAEN2000497, PUAEN2000535, PUAEN2000684, PUAEN2000942, PUAEN2001260, PUAEN2001345, PUAEN2001526, PUAEN2001586, PUAEN2001882, PUAEN2002473, PUAEN2002489, PUAEN2002552, PUAEN2002568, PUAEN2002616, PUAEN2002758, PUAEN2003018, PUAEN2003079, PUAEN2003116, PUAEN2003517, PUAEN2003954, PUAEN2004067, PUAEN2004083, PUAEN2004400, PUAEN2004511, PUAEN2004525, PUAEN2004875, PUAEN2005110, PUAEN2005247, PUAEN2005502, PUAEN2005588, PUAEN2005930, PUAEN2006029, PUAEN2006328, PUAEN2006335, PUAEN2006578, PUAEN2006639, PUAEN2006761,

[1596] PUAEN2007044, PUAEN2007350, PUAEN2007785, PUAEN2007898, PUAEN2008123, PUAEN2008228, PUAEN2008515, PUAEN2008815, PUAEN2008939, PUAEN2008980, PUAEN2008985, PUAEN2009174, PUAEN2009348, PUAEN2009534, PUAEN2009655, PUAEN2009795, PUAEN2009852, PUAEN2010346, PUAEN2010824, RECTM1000051, RECTM1000141, RECTM2000220, RECTM2000349, RECTM2000433, RECTM2000510, RECTM2001307, RECTM2001347, RECTM2001519, RECTM2001666, RECTM2001691, RECTM2001749, RECTM2002172, RECTM2002602, RECTM2002632, SALGL1000005, SALGL1000024, SALGL1000028, SALGL1000047, SALGL1000065, SALGL1000107, SALGL1000171, SKMUS1000014, SKMUS1000030, SKMUS1000064, SKMUS1000067, SKMUS1000084, SKMUS1000102, SKMUS1000104, SKMUS1000110, SKMUS1000118,

[1597] SKMUS1000124, SKMUS1000129, SKMUS1000138, SKMUS1000176, SKMUS1000177, SKMUS2000020, SKMUS2000061, SKMUS2000074, SKMUS2000078, SKMUS2000117, SKMUS2000137, SKMUS2000198, SKMUS2000243, SKMUS2000271, SKMUS2000287, SKMUS2000317, SKMUS2000330, SKMUS2000339, SKMUS2000343, SKMUS2000361, SKMUS2000365, SKMUS2000380, SKMUS2000390, SKMUS2000416, SKMUS2000458, SKMUS2000467, SKMUS2000468, SKMUS2000515, SKMUS2000690, SKMUS2000701, SKMUS2000705, SKMUS2000710, SKMUS2000724, SKMUS2000726, SKMUS2000757, SKMUS2000774, SKMUS2000780, SKMUS2000821, SKMUS2000847, SKMUS2000863, SKMUS2000873, SKMUS2000894, SKMUS2000898, SKMUS2000902, SKMUS2000933, SKMUS2000945, SKMUS2000954, SKMUS2000961, SKMUS2000973, SKMUS2000980,

[1598] SKMUS2001008, SKMUS2001014, SKMUS2001129, SKMUS2001147, SKMUS2001157, SKMUS2001164, SKMUS2001199, SKMUS2001201, SKMUS2001215, SKMUS2001247, SKMUS2001254, SKMUS2001271, SKMUS2001287, SKMUS2001323, SKMUS2001364, SKMUS2001398, SKMUS2001402, SKMUS2001412, SKMUS2001492, SKMUS2001501, SKMUS2001528, SKMUS2001543, SKMUS2001580, SKMUS2001585, SKMUS2001608, SKMUS2001631, SKMUS2001634, SKMUS2001662, SKMUS2001663, SKMUS2001668, SKMUS2001671, SKMUS2001683, SKMUS2001693, SKMUS2001695, SKMUS2001703, SKMUS2001740, SKMUS2001742, SKMUS2001823, SKMUS2001850, SKMUS2002077, SKMUS2002084, SKMUS2002153, SKMUS2002475, SKMUS2002602, SKMUS2002634, SKMUS2002693, SKMUS2002821, SKMUS2002840, SKMUS2002920, SKMUS2003034,

[1599] SKMUS2003074, SKMUS2003168, SKMUS2003194, SKMUS2003744, SKMUS2004044, SKMUS2004047, SKMUS2004483, SKMUS2004667, SKMUS2004897, SKMUS2004903, SKMUS2004908, SKMUS2005428, SKMUS2006394, SKMUS2006481, SKMUS2006755, SKMUS2007315, SKMUS2007359, SKMUS2007568, SKMUS2007740, SKMUS2007816, SKMUS2007915, SKMUS2008338, SKMUS2008407, SKMUS2008474, SKMUS2008585, SKMUS2008607, SKMUS2009190, SKMUS2009232, SKMUS2009479, SKMUS2009557, SKNMC1000110, SKNMC1000123, SKNMC1000124, SKNMC1000159, SKNMC1000168, SKNMC1000229, SKNMC1000251, SKNMC1000264, SKNMC2000065, SKNMC2000097, SKNMC2000224, SKNMC2000256, SKNMC2000322, SKNMC2000356, SKNMC2000374, SKNMC2000583, SKNMC2000593, SKNMC2000612, SKNMC2000622, SKNMC2000649,

[1600] SKNMC2000698, SKNMC2000966, SKNMC2001113, SKNMC2001324, SKNMC2001503, SKNMC2001555, SKNMC2001596, SKNMC2001623, SKNMC2002402, SKNMC2003639, SKNMC2003924, SKNMC2003987, SKNMC2004457, SKNMC2004643, SKNMC2004651, SKNMC2005772, SKNMC2006173, SKNMC2006327, SKNMC2006998, SKNMC2007134, SKNMC2007502, SKNMC2007504, SKNMC2007961, SKNMC2009450, SKNSH1000002, SKNSH1000086, SKNSH1000101, SKNSH1000174, SKNSH1000301, SKNSH1000308, SKNSH1000416, SKNSH2000051, SKNSH2000101, SKNSH2000151, SKNSH2000163, SKNSH2000250, SKNSH2000319, SKNSH2000347, SKNSH2000482, SKNSH2000516, SKNSH2000550, SKNSH2000716, SKNSH2000819, SKNSH2000971, SKNSH2001222, SKNSH2001875, SKNSH2001931, SKNSH2002054, SKNSH2002325, SKNSH2002768,

[1601] SKNSH2002866, SKNSH2003064, SKNSH2003174, SKNSH2003422, SKNSH2003466, SKNSH2003483, SKNSH2003528, SKNSH2003633, SKNSH2004039, SKNSH2005061, SKNSH2005120, SKNSH2005194, SKNSH2005240, SKNSH2005792, SKNSH2005816, SKNSH2005981, SKNSH2006234, SKNSH2006304, SKNSH2006432, SKNSH2006822, SKNSH2007142, SKNSH2007149, SKNSH2007429, SKNSH2007739, SKNSH2008043, SKNSH2008969, SKNSH2009197, SKNSH2009357, SKNSH2009435, SKNSH2009991, SKNSH2010015, SMINT1000012, SMINT1000039, SMINT1000042, SMINT1000048, SMINT1000051, SMINT1000054, SMINT1000057, SMINT1000071, SMINT1000075, SMINT1000078, SMINT1000091, SMINT1000100, SMINT1000103, SMINT1000117, SMINT1000118, SMINT1000131, SMINT1000137, SMINT1000192, SMINT2000007,

[1602] SMINT2000018, SMINT2000032, SMINT2000040, SMINT2000060, SMINT2000073, SMINT2000084, SMINT2000145, SMINT2000159, SMINT2000176, SMINT2000185, SMINT2000227, SMINT2000229, SMINT2000232, SMINT2000239, SMINT2000267, SMINT2000277, SMINT2000454, SMINT2000468, SMINT2000518, SMINT2000529, SMINT2000530, SMINT2000537, SMINT2000538, SMINT2000541, SMINT2000545, SMINT2000558, SMINT2000562, SMINT2000568, SMINT2000602, SMINT2000609, SMINT2000629, SMINT2000659, SMINT2000747, SMINT2000811, SMINT2000824, SMINT2000933, SMINT2000984, SMINT2001114, SMINT2001158, SMINT2001183, SMINT2001199, SMINT2001222, SMINT2001397, SMINT2001458, SMINT2001461, SMINT2001535, SMINT2001559, SMINT2001609, SMINT2001615, SMINT2001683,

[1603] SMINT2001731, SMINT2001812, SMINT2001950, SMINT2002126, SMINT2002159, SMINT2002202, SMINT2002210, SMINT2002224, SMINT2002281, SMINT2002311, SMINT2002314, SMINT2002328, SMINT2002414, SMINT2002457, SMINT2002620, SMINT2002689, SMINT2002743, SMINT2002778, SMINT2002880, SMINT2002882, SMINT2002884, SMINT2002899, SMINT2002974, SMINT2002976, SMINT2003003, SMINT2003074, SMINT2003128, SMINT2003150, SMINT2003317, SMINT2003340, SMINT2003386, SMINT2003423, SMINT2003505, SMINT2003551, SMINT2003569, SMINT2003641, SMINT2003644, SMINT2003866, SMINT2003905, SMINT2004023, SMINT2004037, SMINT2004047, SMINT2004086, SMINT2004280, SMINT2004299, SMINT2004339, SMINT2004350, SMINT2004414, SMINT2004473, SMINT2004547,

[1604] SMINT2004583, SMINT2004589, SMINT2004729, SMINT2004781, SMINT2004872, SMINT2004891, SMINT2004909, SMINT2004972, SMINT2004992, SMINT2005075, SMINT2005161, SMINT2005174, SMINT2005213, SMINT2005330, SMINT2005368, SMINT2005387, SMINT2005402, SMINT2005405, SMINT2005621, SMINT2005623, SMINT2005624, SMINT2005688, SMINT2005800, SMINT2005956, SMINT2006078, SMINT2006205, SMINT2006331, SMINT2006596, SMINT2006641, SMINT2006648, SMINT2006708, SMINT2006716, SMINT2006801, SMINT2007062, SMINT2007101, SMINT2007140, SMINT2007187, SMINT2007219, SMINT2007294, SMINT2007365, SMINT2007391, SMINT2007433, SMINT2007508, SMINT2007526, SMINT2007579, SMINT2007647, SMINT2007729, SMINT2007790, SMINT2007792, SMINT2007796,

[1605] SMINT2007867, SMINT2007932, SMINT2008042, SMINT2008054, SMINT2008133, SMINT2008277, SMINT2008329, SMINT2008455, SMINT2008491, SMINT2008531, SMINT2008545, SMINT2008558, SMINT2008590, SMINT2008625, SMINT2008672, SMINT2008690, SMINT2008715, SMINT2008720, SMINT2008817, SMINT2008844, SMINT2008869, SMINT2008917, SMINT2008960, SMINT2009119, SMINT2009121, SMINT2009212, SMINT2009216, SMINT2009233, SMINT2009259, SMINT2009272, SMINT2009292, SMINT2009363, SMINT2009415, SMINT2009468, SMINT2009505, SMINT2009529, SMINT2009832, SMINT2009895, SMINT2009902, SMINT2009973, SMINT2010015, SMINT2010068, SMINT2010076, SMINT2010084, SMINT2010144, SMINT2010200, SMINT2010278, SMINT2010324, SMINT2010326, SMINT2010369,

[1606] SMINT2010426, SMINT2010500, SMINT2010533, SMINT2010629, SMINT2010672, SMINT2010753, SMINT2010853, SMINT2010897, SMINT2010901, SMINT2010959, SMINT2010997, SMINT2011033, SMINT2011066, SMINT2011273, SMINT2011311, SMINT2011406, SMINT2011509, SMINT2011567, SMINT2011588, SMINT2011656, SMINT2011888, SMINT2011958, SMINT2012040, SMINT2012122, SMINT2012179, SMINT2012195, SMINT2012285, SMINT2012291, SMINT2012501, SMINT2012734, SMINT2012793, SMINT2013031, SMINT2013032, SMINT2013129, SMINT2013170, SMINT2013181, SMINT2013228, SMINT2013613, SMINT2013626, SMINT2013695, SMINT2013833, SMINT2013890, SMINT2014166, SMINT2014282, SMINT2014443, SMINT2014480, SMINT2014489, SMINT2014721, SMINT2015006, SMINT2015294,

[1607] SMINT2015306, SMINT2015326, SMINT2015353, SMINT2015454, SMINT2015518, SMINT2015745, SMINT2015787, SMINT2015810, SMINT2016122, SMINT2016146, SMINT2016286, SMINT2016313, SMINT2016396, SMINT2016412, SMINT2016440, SMINT2016477, SMINT2016544, SMINT2016857, SMINT2017134, SMINT2017319, SMINT2017324, SMINT2017410, SMINT2017431, SMINT2017432, SMINT2017436, SMINT2017599, SMINT2017659, SMINT2017736, SMINT2017781, SMINT2017855, SMINT2017884, SMINT2017964, SMINT2017974, SMINT2018343, SMINT2018353, SMINT2018592, SMINT2018681, SMINT2019017, SMINT2019105, SMINT2019142, SMINT2019153, SMINT2019200, SPLEN1000013, SPLEN1000041, SPLEN1000049, SPLEN1000056, SPLEN1000087, SPLEN1000089, SPLEN1000091, SPLEN1000134,

[1608] SPLEN1000139, SPLEN1000143, SPLEN1000144, SPLEN1000145, SPLEN1000156, SPLEN1000163, SPLEN1000165, SPLEN1000166, SPLEN1000178, SPLEN2000020, SPLEN2000047, SPLEN2000064, SPLEN2000072, SPLEN2000098, SPLEN2000126, SPLEN2000134, SPLEN2000143, SPLEN2000189, SPLEN2000197, SPLEN2000205, SPLEN2000210, SPLEN2000222, SPLEN2000243, SPLEN2000247, SPLEN2000255, SPLEN2000258, SPLEN2000267, SPLEN2000270, SPLEN2000307, SPLEN2000310, SPLEN2000341, SPLEN2000348, SPLEN2000350, SPLEN2000357, SPLEN2000364, SPLEN2000402, SPLEN2000414, SPLEN2000420, SPLEN2000443, SPLEN2000448, SPLEN2000450, SPLEN2000464, SPLEN2000496, SPLEN2000515, SPLEN2000516, SPLEN2000537, SPLEN2000541, SPLEN2000607, SPLEN2000630, SPLEN2000695,

[1609] SPLEN2000698, SPLEN2000839, SPLEN2000874, SPLEN2001135, SPLEN2001141, SPLEN2001157, SPLEN2001176, SPLEN2001227, SPLEN2001245, SPLEN2001278, SPLEN2001354, SPLEN2001367, SPLEN2001383, SPLEN2001476, SPLEN2001503, SPLEN2001510, SPLEN2001599, SPLEN2001626, SPLEN2001650, SPLEN2001689, SPLEN2001710, SPLEN2001761, SPLEN2001781, SPLEN2001881, SPLEN2001912, SPLEN2001945, SPLEN2002007, SPLEN2002053, SPLEN2002133, SPLEN2002147, SPLEN2002166, SPLEN2002175, SPLEN2002223, SPLEN2002272, SPLEN2002314, SPLEN2002335, SPLEN2002343, SPLEN2002354, SPLEN2002385, SPLEN2002419, SPLEN2002451, SPLEN2002462, SPLEN2002463, SPLEN2002467, SPLEN2002477, SPLEN2002493, SPLEN2002662, SPLEN2002695, SPLEN2002707, SPLEN2002744,

[1610] SPLEN2002917, SPLEN2002931, SPLEN2002957, SPLEN2003160, SPLEN2003204, SPLEN2003219, SPLEN2003297, SPLEN2003396, SPLEN2003678, SPLEN2003878, SPLEN2003918, SPLEN2003924, SPLEN2004060, SPLEN2004078, SPLEN2004124, SPLEN2004148, SPLEN2004181, SPLEN2004220, SPLEN2004343, SPLEN2004346, SPLEN2004368, SPLEN2004611, SPLEN2004662, SPLEN2004773, SPLEN2004844, SPLEN2004880, SPLEN2004984, SPLEN2005009, SPLEN2005227, SPLEN2005272, SPLEN2005342, SPLEN2005416, SPLEN2005429, SPLEN2005450, SPLEN2005474, SPLEN2005560, SPLEN2005727, SPLEN2005783, SPLEN2005790, SPLEN2005818, SPLEN2005838, SPLEN2005869, SPLEN2005927, SPLEN2005939, SPLEN2006143, SPLEN2006232, SPLEN2006268, SPLEN2006283, SPLEN2006305, SPLEN2006325,

[1611] SPLEN2006374, SPLEN2006389, SPLEN2006425, SPLEN2006671, SPLEN2006701, SPLEN2006785, SPLEN2006875, SPLEN2007182, SPLEN2007276, SPLEN2007314, SPLEN2007326, SPLEN2007350, SPLEN2007388, SPLEN2007498, SPLEN2007619, SPLEN2007653, SPLEN2007689, SPLEN2007695, SPLEN2007739, SPLEN2007750, SPLEN2007794, SPLEN2007879, SPLEN2007926, SPLEN2007951, SPLEN2008007, SPLEN2008135, SPLEN2008164, SPLEN2008317, SPLEN2008460, SPLEN2008496, SPLEN2008591, SPLEN2008786, SPLEN2009081, SPLEN2009088, SPLEN2009163, SPLEN2009315, SPLEN2009340, SPLEN2009512, SPLEN2009513, SPLEN2009541, SPLEN2009548, SPLEN2009581, SPLEN2009733, SPLEN2009803, SPLEN2009884, SPLEN2009918, SPLEN2009970, SPLEN2010004, SPLEN2010015, SPLEN2010112,

[1612] SPLEN2010119, SPLEN2010146, SPLEN2010187, SPLEN2010195, SPLEN2010350, SPLEN2010395, SPLEN2010415, SPLEN2010447, SPLEN2010469, SPLEN2010510, SPLEN2010530, SPLEN2010534, SPLEN2010588, SPLEN2010625, SPLEN2010800, SPLEN2010846, SPLEN2010847, SPLEN2010862, SPLEN2010912, SPLEN2010978, SPLEN2010986, SPLEN2011018, SPLEN2011021, SPLEN2011025, SPLEN2011086, SPLEN2011139, SPLEN2011145, SPLEN2011248, SPLEN2011252, SPLEN2011422, SPLEN2011672, SPLEN2011678, SPLEN2011737, SPLEN2011758, SPLEN2011766, SPLEN2011805, SPLEN2011820, SPLEN2011830, SPLEN2011931, SPLEN2011981, SPLEN2012175, SPLEN2012179, SPLEN2012185, SPLEN2012234, SPLEN2012453, SPLEN2012523, SPLEN2012524, SPLEN2012525, SPLEN2012571, SPLEN2012606,

[1613] SPLEN2012611, SPLEN2012619, SPLEN2012725, SPLEN2012743, SPLEN2012756, SPLEN2012800, SPLEN2012846, SPLEN2012889, SPLEN2012961, SPLEN2013108, SPLEN2013195, SPLEN2013503, SPLEN2013644, SPLEN2013648, SPLEN2013670, SPLEN2013673, SPLEN2013690, SPLEN2013714, SPLEN2013753, SPLEN2013821, SPLEN2013857, SPLEN2013860, SPLEN2013910, SPLEN2013923, SPLEN2013936, SPLEN2014041, SPLEN2014063, SPLEN2014073, SPLEN2014080, SPLEN2014119, SPLEN2014136, SPLEN2014199, SPLEN2014210, SPLEN2014293, SPLEN2014318, SPLEN2014381, SPLEN2014452, SPLEN2014454, SPLEN2014486, SPLEN2014543, SPLEN2014572, SPLEN2014645, SPLEN2014669, SPLEN2014711, SPLEN2014739, SPLEN2014860, SPLEN2014865, SPLEN2014911, SPLEN2014919, SPLEN2014920,

[1614] SPLEN2014924, SPLEN2014937, SPLEN2014946, SPLEN2015031, SPLEN2015094, SPLEN2015121, SPLEN2015129, SPLEN2015158, SPLEN2015166, SPLEN2015216, SPLEN2015258, SPLEN2015261, SPLEN2015267, SPLEN2015276, SPLEN2015415, SPLEN2015433, SPLEN2015593, SPLEN2015674, SPLEN2015679, SPLEN2015707, SPLEN2015730, SPLEN2015746, SPLEN2015788, SPLEN2015815, SPLEN2015890, SPLEN2015891, SPLEN2015899, SPLEN2016045, SPLEN2016053, SPLEN2016069, SPLEN2016098, SPLEN2016135, SPLEN2016139, SPLEN2016241, SPLEN2016250, SPLEN2016304, SPLEN2016356, SPLEN2016480, SPLEN2016531, SPLEN2016533, SPLEN2016541, SPLEN2016552, SPLEN2016554, SPLEN2016602, SPLEN2016627, SPLEN2016678, SPLEN2016743, SPLEN2016773, SPLEN2016781, SPLEN2016840,

[1615] SPLEN2016863, SPLEN2016922, SPLEN2016932, SPLEN2016972, SPLEN2016973, SPLEN2017043, SPLEN2017.104, SPLEN2017121, SPLEN2017147, SPLEN2017187, SPLEN2017189, SPLEN2017212, SPLEN2017318, SPLEN2017351, SPLEN2017426, SPLEN2017452, SPLEN2017538, SPLEN2017592, SPLEN2017613, SPLEN2017643, SPLEN2017687, SPLEN2017740, SPLEN2017781, SPLEN2017999, SPLEN2018098, SPLEN2018112, SPLEN2018157, SPLEN2018159, SPLEN2018180, SPLEN2018181, SPLEN2018280, SPLEN2018285, SPLEN2018299, SPLEN2018302, SPLEN2018364, SPLEN2018395, SPLEN2018643, SPLEN2018683, SPLEN2018732, SPLEN2018749, SPLEN2018933, SPLEN2019008, SPLEN2019043, SPLEN2019077, SPLEN2019092, SPLEN2019102, SPLEN2019131, SPLEN2019169, SPLEN2019257, SPLEN2019311,

[1616] SPLEN2019323, SPLEN2019349, SPLEN2019375, SPLEN2019379, SPLEN2019405, SPLEN2019446, SPLEN2019471, SPLEN2019480, SPLEN2019505, SPLEN2019571, SPLEN2019575, SPLEN2019709, SPLEN2019774, SPLEN2019793, SPLEN2019811, SPLEN2019839, SPLEN2019956, SPLEN2019985, SPLEN2020007, SPLEN2020034, SPLEN2020153, SPLEN2020154, SPLEN2020166, SPLEN2020183, SPLEN2020223, SPLEN2020359, SPLEN2020417, SPLEN2020427, SPLEN2020467, SPLEN2020512, SPLEN2020608, SPLEN2020777, SPLEN2020805, SPLEN2021057, SPLEN2021122, SPLEN2021157, SPLEN2021194, SPLEN2021231, SPLEN2021273, SPLEN2021295, SPLEN2021298, SPLEN2021383, SPLEN2021417, SPLEN2021440, SPLEN2021458, SPLEN2021463, SPLEN2021560, SPLEN2021701, SPLEN2021795, SPLEN2021983,

[1617] SPLEN2021991, SPLEN2022040, SPLEN2022162, SPLEN2022227, SPLEN2022522, SPLEN2022591, SPLEN2022785, SPLEN2022920, SPLEN2023024, SPLEN2023118, SPLEN2023160, SPLEN2023423, SPLEN2023710, SPLEN2023733, SPLEN2023791, SPLEN2023977, SPLEN2024070, SPLEN2024127, SPLEN2024232, SPLEN2024273, SPLEN2024383, SPLEN2024489, SPLEN2024530, SPLEN2024571, SPLEN2024577, SPLEN2024617, SPLEN2024737, SPLEN2024922, SPLEN2024956, SPLEN2024990, SPLEN2025012, SPLEN2025017, SPLEN2025039, SPLEN2025219, SPLEN2025491, SPLEN2025626, SPLEN2025820, SPLEN2026144, SPLEN2026411, SPLEN2026765, SPLEN2027157, SPLEN2027395, SPLEN2027488, SPLEN2027780, SPLEN2027852, SPLEN2027868, SPLEN2027995, SPLEN2028046, SPLEN2028066, SPLEN2028138,

[1618] SPLEN2028365, SPLEN2028417, SPLEN2028424, SPLEN2028593, SPLEN2028844, SPLEN2028914, SPLEN2028994, SPLEN2029051, SPLEN2029176, SPLEN2029295, SPLEN2029380, SPLEN2029522, SPLEN2029683, SPLEN2029727, SPLEN2029904, SPLEN2029912, SPLEN2030250, SPLEN2030335, SPLEN2030371, SPLEN2030397, SPLEN2030479, SPLEN2030495, SPLEN2030562, SPLEN2030763, SPLEN2030847, SPLEN2031004, SPLEN2031125, SPLEN2031424, SPLEN2031547, SPLEN2031674, SPLEN2031724, SPLEN2031780, SPLEN2032036, SPLEN2032112, SPLEN2032154, SPLEN2032157, SPLEN2032321, SPLEN2032356, SPLEN2032677, SPLEN2032813, SPLEN2032924, SPLEN2033098, SPLEN2033153, SPLEN2033333, SPLEN2033490, SPLEN2033539, SPLEN2033921, SPLEN2033996, SPLEN2034021, SPLEN2034081,

[1619] SPLEN2034252, SPLEN2034448, SPLEN2034551, SPLEN2034601, SPLEN2034678, SPLEN2034781, SPLEN2034864, SPLEN2034934, SPLEN2035318, SPLEN2035615, SPLEN2036103, SPLEN2036326, SPLEN2036475, SPLEN2036501, SPLEN2036579, SPLEN2036608, SPLEN2036702, SPLEN2036712, SPLEN2036821, SPLEN2036932, SPLEN2036953, SPLEN2037077, SPLEN2037194, SPLEN2037319, SPLEN2037444, SPLEN2037580, SPLEN2037630, SPLEN2037678, SPLEN2037722, SPLEN2037891, SPLEN2038055, SPLEN2038180, SPLEN2038345, SPLEN2038407, SPLEN2038473, SPLEN2038834, SPLEN2039311, SPLEN2039379, SPLEN2039672, SPLEN2039697, SPLEN2039845, SPLEN2039936, SPLEN2040222, SPLEN2040237, SPLEN2040824, SPLEN2041304, SPLEN2041306, SPLEN2041310, SPLEN2041585, SPLEN2041645,

[1620] SPLEN2041700, SPLEN2041720, SPLEN2041977, SPLEN2042051, SPLEN2042303, SPLEN2042521, SPLEN2042535, SPLEN2042598, SPLEN2042714, SPLEN2042920, STOMA1000013, STOMA1000047, STOMA1000052, STOMA1000074, STOMA1000091, STOMA1000117, STOMA1000133, STOMA1000175, STOMA1000186, STOMA1000189, STOMA1000190, STOMA1000191, STOMA2000032, STOMA2000072, STOMA2000088, STOMA2000104, STOMA2000121, STOMA2000148, STOMA2000168, STOMA2000183, STOMA2000188, STOMA2000257, STOMA2000279, STOMA2000289, STOMA2000383, STOMA2000386, STOMA2000395, STOMA2000396, STOMA2000478, STOMA2000482, STOMA2000529, STOMA2000539, STOMA2000567, STOMA2000640, STOMA2000678, STOMA2000686, STOMA2000888, STOMA2001025, STOMA2001389, STOMA2002052,

[1621] STOMA2002141, STOMA2002367, STOMA2002688, STOMA2002828, STOMA2003158, STOMA2003289, STOMA2003444, STOMA2003477, STOMA2003646, STOMA2003716, STOMA2003781, STOMA2003894, STOMA2004194, STOMA2004294, STOMA2004663, STOMA2004668, STOMA2004852, STOMA2004873, STOMA2004884, STOMA2004893, STOMA2004925, STOMA2005120, STOMA2005664, STOMA2005667, STOMA2005746, STOMA2005782, STOMA2006181, STOMA2006213, STOMA2006229, STOMA2006325, STOMA2006330, STOMA2006398, STOMA2006447, STOMA2006780, STOMA2006904, STOMA2007269, STOMA2007680, STOMA2007745, STOMA2008050, STOMA2008361, STOMA2008546, STOMA2008614, STOMA2008638, STOMA2008838, STOMA2009250, STOMA2009253, STOMA2009256, STOMA2009289, SYNOV1000045, SYNOV1000049,

[1622] SYNOV1000118, SYNOV1000124, SYNOV1000128, SYNOV1000164, SYNOV1000190, SYNOV1000256, SYNOV1000374, SYNOV2000152, SYNOV2000171, SYNOV2000173, SYNOV2000177, SYNOV2000178, SYNOV2000193, SYNOV2000251, SYNOV2000279, SYNOV2000291, SYNOV2000297, SYNOV2000397, SYNOV2000426, SYNOV2000601, SYNOV2000700, SYNOV2000820, SYNOV2000824, SYNOV2000923, SYNOV2001014, SYNOV2001035, SYNOV2001088, SYNOV2001111, SYNOV2001144, SYNOV2001212, SYNOV2001239, SYNOV2001251, SYNOV2001262, SYNOV2001300, SYNOV2001356, SYNOV2001374, SYNOV2001390, SYNOV2001451, SYNOV2001457, SYNOV2001468, SYNOV2001581, SYNOV2001648, SYNOV2001660, SYNOV2003326, SYNOV2005216, SYNOV2005448, SYNOV2005673, SYNOV2005817, SYNOV2005962, SYNOV2006430,

[1623] SYNOV2006620, SYNOV2007758, SYNOV2007965, SYNOV2008765, SYNOV2011233, SYNOV2012326, SYNOV2013365, SYNOV2013637, SYNOV2014157, SYNOV2014364, SYNOV2016124, SYNOV2016837, SYNOV2017055, SYNOV2017179, SYNOV2018921, SYNOV2019280, SYNOV2020085, SYNOV2020463, SYNOV2021320, SYNOV2021953, SYNOV3000184, SYNOV3000231, SYNOV3000302, SYNOV3000345, SYNOV4000249, SYNOV4000472, SYNOV4000598, SYNOV4000706, SYNOV4001224, SYNOV4001326, SYNOV4001342, SYNOV4001395, SYNOV4002001, SYNOV4002392, SYNOV4002875, SYNOV4002883, SYNOV4003174, SYNOV4003322, SYNOV4003681, SYNOV4003981, SYNOV4004184, SYNOV4004741, SYNOV4004823, SYNOV4004914, SYNOV4005256, SYNOV4005570, SYNOV4005739, SYNOV4005889, SYNOV4005981, SYNOV4005989,

[1624] SYNOV4006256, SYNOV4006327, SYNOV4006542, SYNOV4007012, SYNOV4007215, SYNOV4007360, SYNOV4007430, SYNOV4007521, SYNOV4007553, SYNOV4007711, SYNOV4008245, SYNOV4008336, SYNOV4009129, SYNOV4009139, SYNOV4009298, SYNOV4009575, T1ESE2000116, T1ESE2000609, T1ESE2000904, T1ESE2002665, TBAES2000004, TBAES2000059, TBAES2000116, TBAES2000255, TBAES2000315, TBAES2000352, TBAES2000932, TBAES2001171, TBAES2001220, TBAES2001229, TBAES2001258, TBAES2001296, TBAES2001492, TBAES2001553, TBAES2001751, TBAES2003435, TBAES2003492, TBAES2003550, TBAES2003702, TBAES2003917, TBAES2004055, TBAES2004105, TBAES2004939, TBAES2005157, TBAES2005361, TBAES2005543, TBAES2006568, TBAES2006881, TBAES2007379, TBAES2007428,

[1625] TBAES2007481, TBAES2007504, TBAES2007548, TBAES2007697, TBAES2007862, TBAES2007964, TBAES2008133, TCERX2000171, TCERX2000431, TCERX2000613, TCERX2000998, TCERX2002644, TCOLN1000037, TCOLN1000180, TCOLN2000139, TCOLN2000236, TCOLN2000641, TCOLN2001268, TCOLN2002047, TCOLN2002278, TESOP1000035, TESOP1000127, TESOP1000160, TESOP2000083, TESOP2000090, TESOP2000205, TESOP2000312, TESOP2000390, TESOP2000400, TESOP2000510, TESOP2000527, TESOP2000569, TESOP2000739, TESOP2000801, TESOP2001122, TESOP2001166, TESOP2001345, TESOP2001474, TESOP2001796, TESOP2001818, TESOP2001849, TESOP2001865, TESOP2001901, TESOP2001953, TESOP2002005, TESOP2002110, TESOP2002150, TESOP2002273, TESOP2002451, TESOP2002489,

[1626] TESOP2002539, TESOP2002545, TESOP2002804, TESOP2002950, TESOP2003273, TESOP2003308, TESOP2003553, TESOP2003753, TESOP2004110, TESOP2004114, TESOP2004173, TESOP2004214, TESOP2005199, TESOP2005285, TESOP2005485, TESOP2005498, TESOP2005579, TESOP2006041, TESOP2006053, TESOP2006060, TESOP2006068, TESOP2006110, TESOP2006398, TESOP2006670, TESOP2006704, TESOP2006746, TESOP2006865, TESOP2006893, TESOP2007041, TESOP2007052, TESOP2007262, TESOP2007384, TESOP2007636, TESOP2007674, TESOP2007688, TESOP2007725, TESOP2007912, TESOP2007978, TESOP2008127, TESOP2008552, TESOP2008556, TESOP2008563, TESOP2008820, TESOP2009121, TESOP2009201, TESOP2009247, TESOP2009555, TESTI1000018, TESTI1000019, TESTI1000023,

[1627] TESTI1000025, TESTI1000029, TESTI1000030, TESTI1000042, TESTI1000045, TESTI1000051, TESTI1000055, TESTI1000064, TESTI1000070, TESTI1000085, TESTI1000088, TESTI1000093, TESTI1000094, TESTI1000096, TESTI1000101, TESTI1000109, TESTI1000125, TESTI1000127, TESTI1000128, TESTI1000131, TESTI1000138, TESTI1000142, TESTI1000157, TESTI1000163, TESTI1000168, TESTI1000169, TESTI1000179, TESTI1000183, TESTI1000191, TESTI1000257, TESTI1000266, TESTI1000319, TESTI1000330, TESTI1000348, TESTI1000390, TESTI1000391, TESTI1000459, TESTI1000491, TESTI1000545, TESTI2000006, TESTI2000018, TESTI2000044, TESTI2000100, TESTI2000117, TESTI2000120, TESTI2000147, TESTI2000154, TESTI2000172, TESTI2000177, TESTI2000179,

[1628] TESTI2000184, TESTI2000207, TESTI2000208, TESTI2000221, TESTI2000238, TESTI2000272, TESTI2000278, TESTI2000349, TESTI2000356, TESTI2000358, TESTI2000372, TESTI2000427, TESTI2000431, TESTI2000435, TESTI2000443, TESTI2000452, TESTI2000462, TESTI2000489, TESTI2000520, TESTI2000571, TESTI2000591, TESTI2000598, TESTI2000600, TESTI2000616, TESTI2000627, TESTI2000644, TESTI2000671, TESTI2000683, TESTI2000689, TESTI2000695, TESTI2000699, TESTI2000707, TESTI2000745, TESTI2000756, TESTI2000762, TESTI2000784, TESTI2000808, TESTI2000819, TESTI2000830, TESTI2000840, TESTI2000849, TESTI2000850, TESTI2000874, TESTI2000883, TESTI2000909, TESTI2000951, TESTI2000970, TESTI2000981, TESTI2001008, TESTI2001049,

[1629] TESTI2001082, TESTI2001120, TESTI2001134, TESTI2001141, TESTI2001153, TESTI2001180, TESTI2001208, TESTI2001229, TESTI2001236, TESTI2001237, TESTI2001306, TESTI2001313, TESTI2001330, TESTI2001339, TESTI2001345, TESTI2001352, TESTI2001364, TESTI2001412, TESTI2001420, TESTI2001498, TESTI2001511, TESTI2001512, TESTI2001518, TESTI2001556, TESTI2001593, TESTI2001613, TESTI2001621, TESTI2001661, TESTI2001665, TESTI2001671, TESTI2001697, TESTI2001725, TESTI2001758, TESTI2001766, TESTI2001792, TESTI2001793, TESTI2001795, TESTI2001812, TESTI2001815, TESTI2001823, TESTI2001827, TESTI2001829, TESTI2001852, TESTI2001862, TESTI2001869, TESTI2001879, TESTI2001894, TESTI2001898, TESTI2001915, TESTI2001950,

[1630] TESTI2001959, TESTI2001968, TESTI2001985, TESTI2001991, TESTI2002002, TESTI2002012, TESTI2002036, TESTI2002048, TESTI2002057, TESTI2002081, TESTI2002090, TESTI2002105, TESTI2002216, TESTI2002223, TESTI2002245, TESTI2002251, TESTI2002256, TESTI2002264, TESTI2002282, TESTI2002293, TESTI2002294, TESTI2002326, TESTI2002351, TESTI2002361, TESTI2002369, TESTI2002406, TESTI2002415, TESTI2002423, TESTI2002453, TESTI2002461, TESTI2002465, TESTI2002467, TESTI2002498, TESTI2002516, TESTI2002544, TESTI2002578, TESTI2002580, TESTI2002618, TESTI2002632, TESTI2002676, TESTI2002690, TESTI2002696, TESTI2002698, TESTI2002700, TESTI2002707, TESTI2002724, TESTI2002729, TESTI2002752, TESTI2002753, TESTI2002789,

[1631] TESTI2002802, TESTI2002806, TESTI2002840, TESTI2002866, TESTI2002877, TESTI2002910, TESTI2002912, TESTI2002928, TESTI2002937, TESTI2002965, TESTI2002993, TESTI2003005, TESTI2003020, TESTI2003031, TESTI2003037, TESTI2003044, TESTI2003059, TESTI2003061, TESTI2003071, TESTI2003074, TESTI2003089, TESTI2003104, TESTI2003109, TESTI2003117, TESTI2003127, TESTI2003130, TESTI2003131, TESTI2003139, TESTI2003141, TESTI2003152, TESTI2003181, TESTI2003193, TESTI2003196, TESTI2003228, TESTI2003236, TESTI2003255, TESTI2003258, TESTI2003277, TESTI2003280, TESTI2003299, TESTI2003311, TESTI2003321, TESTI2003325, TESTI2003327, TESTI2003330, TESTI2003347, TESTI2003354, TESTI2003356, TESTI2003372, TESTI2003376,

[1632] TESTI2003413, TESTI2003418, TESTI2003419, TESTI2003432, TESTI2003454, TESTI2003475, TESTI2003476, TESTI2003498, TESTI2003512, TESTI2003533, TESTI2003539, TESTI2003541, TESTI2003545, TESTI2003551, TESTI2003574, TESTI2003579, TESTI2003580, TESTI2003589, TESTI2003596, TESTI2003598, TESTI2003615, TESTI2003625, TESTI2003638, TESTI2003649, TESTI2003692, TESTI2003718, TESTI2003727, TESTI2003756, TESTI2003768, TESTI2003781, TESTI2003787, TESTI2003824, TESTI2003827, TESTI2003894, TESTI2003911, TESTI2003914, TESTI2003940, TESTI2003962, TESTI2003998, TESTI2004000, TESTI2004031, TESTI2004073, TESTI2004080, TESTI2004085, TESTI2004089, TESTI2004111, TESTI2004119, TESTI2004122, TESTI2004153, TESTI2004163,

[1633] TESTI2004169, TESTI2004207, TESTI2004215, TESTI2004227, TESTI2004229, TESTI2004243, TESTI2004255, TESTI2004287, TESTI2004295, TESTI2004313, TESTI2004318, TESTI2004322, TESTI2004391, TESTI2004399, TESTI2004423, TESTI2004431, TESTI2004432, TESTI2004452, TESTI2004459, TESTI2004490, TESTI2004539, TESTI2004552, TESTI2004560, TESTI2004574, TESTI2004601, TESTI2004611, TESTI2004649, TESTI2004654, TESTI2004675, TESTI2004687, TESTI2004689, TESTI2004700, TESTI2004706, TESTI2004712, TESTI2004734, TESTI2004737, TESTI2004783, TESTI2004791, TESTI2004793, TESTI2004860, TESTI2004906, TESTI2004920, TESTI2004929, TESTI2004936, TESTI2004941, TESTI2004971, TESTI2004982, TESTI2004993, TESTI2004994, TESTI2004999,

[1634] TESTI2005017, TESTI2005025, TESTI2005040, TESTI2005060, TESTI2005072, TESTI2005085, TESTI2005112, TESTI2005120, TESTI2005153, TESTI2005155, TESTI2005173, TESTI2005267, TESTI2005268, TESTI2005280, TESTI2005307, TESTI2005363, TESTI2005376, TESTI2005378, TESTI2005380, TESTI2005391, TESTI2005395, TESTI2005396, TESTI2005408, TESTI2005415, TESTI2005470, TESTI2005492, TESTI2005564, TESTI2005568, TESTI2005584, TESTI2005588, TESTI2005590, TESTI2005603, TESTI2005609, TESTI2005610, TESTI2005630, TESTI2005672, TESTI2005683, TESTI2005690, TESTI2005692, TESTI2005703, TESTI2005720, TESTI2005731, TESTI2005739, TESTI2005742, TESTI2005767, TESTI2005775, TESTI2005784, TESTI2005788, TESTI2005827, TESTI2005835,

[1635] TESTI2005860, TESTI2005892, TESTI2005908, TESTI2005911, TESTI2005933, TESTI2005937, TESTI2005948, TESTI2005979, TESTI2005981, TESTI2005982, TESTI2005984, TESTI2005986, TESTI2005987, TESTI2006007, TESTI2006008, TESTI2006015, TESTI2006016, TESTI2006035, TESTI2006040, TESTI2006041, TESTI2006045, TESTI2006051, TESTI2006067, TESTI2006083, TESTI2006097, TESTI2006109, TESTI2006111, TESTI2006120, TESTI2006125, TESTI2006179, TESTI2006209, TESTI2006210, TESTI2006212, TESTI2006218, TESTI2006238, TESTI2006255, TESTI2006258, TESTI2006278, TESTI2006333, TESTI2006341, TESTI2006360, TESTI2006383, TESTI2006409, TESTI2006425, TESTI2006437, TESTI2006453, TESTI2006457, TESTI2006460, TESTI2006465, TESTI2006483,

[1636] TESTI2006499, TESTI2006523, TESTI2006543, TESTI2006565, TESTI2006572, TESTI2006615, TESTI2006617, TESTI2006624, TESTI2006628, TESTI2006633, TESTI2006643, TESTI2006648, TESTI2006659, TESTI2006660, TESTI2006665, TESTI2006667, TESTI2006677, TESTI2006720, TESTI2006735, TESTI2006744, TESTI2006748, TESTI2006774, TESTI2006853, TESTI2006866, TESTI2006872, TESTI2006877, TESTI2006879, TESTI2006894, TESTI2006940, TESTI2006955, TESTI2006978, TESTI2006979, TESTI2006990, TESTI2007040, TESTI2007074, TESTI2007078, TESTI2007113, TESTI2007152, TESTI2007163, TESTI2007183, TESTI2007211, TESTI2007220, TESTI2007234, TESTI2007311, TESTI2007320, TESTI2007346, TESTI2007358, TESTI2007402, TESTI2007405, TESTI2007407,

[1637] TESTI2007422, TESTI2007452, TESTI2007464, TESTI2007466, TESTI2007480, TESTI2007490, TESTI2007502, TESTI2007524, TESTI2007533, TESTI2007576, TESTI2007613, TESTI2007657, TESTI2007685, TESTI2007692, TESTI2007749, TESTI2007750, TESTI2007808, TESTI2007814, TESTI2007829, TESTI2007864, TESTI2007867, TESTI2007872, TESTI2007906, TESTI2007951, TESTI2007972, TESTI2007973, TESTI2007998, TESTI2008014, TESTI2008020, TESTI2008032, TESTI2008033, TESTI2008046, TESTI2008081, TESTI2008099, TESTI2008139, TESTI2008144, TESTI2008161, TESTI2008189, TESTI2008204, TESTI2008219, TESTI2008233, TESTI2008234, TESTI2008237, TESTI2008278, TESTI2008320, TESTI2008331, TESTI2008343, TESTI2008387, TESTI2008389, TESTI2008394,

[1638] TESTI2008405, TESTI2008420, TESTI2008425, TESTI2008440, TESTI2008567, TESTI2008595, TESTI2008621, TESTI2008636, TESTI2008657, TESTI2008684, TESTI2008699, TESTI2008715, TESTI2008762, TESTI2008774, TESTI2008786, TESTI2008822, TESTI2008835, TESTI2008840, TESTI2008847, TESTI2008884, TESTI2008901, TESTI2008929, TESTI2008946, TESTI2008960, TESTI2009018, TESTI2009091, TESTI2009097, TESTI2009136, TESTI2009185, TESTI2009190, TESTI2009217, TESTI2009239, TESTI2009325, TESTI2009388, TESTI2009390, TESTI2009400, TESTI2009402, TESTI2009412, TESTI2009423, TESTI2009447, TESTI2009462, TESTI2009474, TESTI2009477, TESTI2009497, TESTI2009502, TESTI2009511, TESTI2009520, TESTI2009544, TESTI2009545, TESTI2009551,

[1639] TESTI2009585, TESTI2009588, TESTI2009683, TESTI2009727, TESTI2009739, TESTI2009785, TESTI2009812, TESTI2009835, TESTI2009853, TESTI2009935, TESTI2009977, TESTI2009987, TESTI2010009, TESTI2010154, TESTI2010180, TESTI2010239, TESTI2010280, TESTI2010354, TESTI2010396, TESTI2010400, TESTI2010409, TESTI2010572, TESTI2010587, TESTI2010591, TESTI2010617, TESTI2010682, TESTI2010724, TESTI2010732, TESTI2010734, TESTI2010755, TESTI2010793, TESTI2010806, TESTI2010833, TESTI2010872, TESTI2011009, TESTI2011020, TESTI2011028, TESTI2011033, TESTI2011254, TESTI2011286, TESTI2011294, TESTI2011314, TESTI2011315, TESTI2011394, TESTI2011407, TESTI2011448, TESTI2011480, TESTI2011549, TESTI2011575, TESTI2011605,

[1640] TESTI2011612, TESTI2011665, TESTI2011680, TESTI2011683, TESTI2011712, TESTI2011750, TESTI2011840, TESTI2011846, TESTI2011915, TESTI2011928, TESTI2011971, TESTI2012019, TESTI2012050, TESTI2012090, TESTI2012095, TESTI2012104, TESTI2012152, TESTI2012155, TESTI2012171, TESTI2012207, TESTI2012231, TESTI2012244, TESTI2012289, TESTI2012308, TESTI2012387, TESTI2012394, TESTI2012444, TESTI2012511, TESTI2012528, TESTI2012544, TESTI2012550, TESTI2012571, TESTI2012592, TESTI2012617, TESTI2012628, TESTI2012812, TESTI2012834, TESTI2012835, TESTI2012861, TESTI2012900, TESTI2012915, TESTI2012922, TESTI2013001, TESTI2013012, TESTI2013053, TESTI2013144, TESTI2013163, TESTI2013169, TESTI2013212, TESTI2013231,

[1641] TESTI2013257, TESTI2013264, TESTI2013268, TESTI2013295, TESTI2013322, TESTI2013381, TESTI2013382, TESTI2013401, TESTI2013427, TESTI2013468, TESTI2013497, TESTI2013545, TESTI2013546, TESTI2013566, TESTI2013601, TESTI2013604, TESTI2013607, TESTI2013610, TESTI2013691, TESTI2013699, TESTI2013737, TESTI2013767, TESTI2013832, TESTI2013873, TESTI2013889, TESTI2014007, TESTI2014036, TESTI2014097, TESTI2014160, TESTI2014248, TESTI2014254, TESTI2014269, TESTI2014274, TESTI2014318, TESTI2014324, TESTI2014339, TESTI2014362, TESTI2014385, TESTI2014415, TESTI2014439, TESTI2014474, TESTI2014505, TESTI2014577, TESTI2014578, TESTI2014716, TESTI2014780, TESTI2014800, TESTI2014838, TESTI2014843, TESTI2014979,

[1642] TESTI2014988, TESTI2015042, TESTI2015092, TESTI2015105, TESTI2015180, TESTI2015213, TESTI2015246, TESTI2015249, TESTI2015327, TESTI2015331, TESTI2015335, TESTI2015350, TESTI2015375, TESTI2015437, TESTI2015590, TESTI2015610, TESTI2015626, TESTI2015647, TESTI2015675, TESTI2015710, TESTI2015752, TESTI2015830, TESTI2015914, TESTI2015938, TESTI2015947, TESTI2015962, TESTI2015987, TESTI2016033, TESTI2016046, TESTI2016101, TESTI2016162, TESTI2016197, TESTI2016278, TESTI2016298, TESTI2016331, TESTI2016337, TESTI2016410, TESTI2016421, TESTI2016509, TESTI2016568, TESTI2016583, TESTI2016599, TESTI2016629, TESTI2016663, TESTI2016667, TESTI2016688, TESTI2016701, TESTI2016758, TESTI2016848, TESTI2016863,

[1643] TESTI2016888, TESTI2016896, TESTI2016922, TESTI2016942, TESTI2016950, TESTI2016996, TESTI2017017, TESTI2017028, TESTI2017035, TESTI2017069, TESTI2017089, TESTI2017102, TESTI2017107, TESTI2017113, TESTI2017125, TESTI2017256, TESTI2017305, TESTI2017311, TESTI2017396, TESTI2017507, TESTI2017537, TESTI2017582, TESTI2017584, TESTI2017645, TESTI2017727, TESTI2017740, TESTI2017775, TESTI2017816, TESTI2017832, TESTI2017923, TESTI2017932, TESTI2017951, TESTI2018031, TESTI2018035, TESTI2018060, TESTI2018083, TESTI2018178, TESTI2018221, TESTI2018276, TESTI2018290, TESTI2018335, TESTI2018337, TESTI2018368, TESTI2018421, TESTI2018428, TESTI2018462, TESTI2018475, TESTI2018482, TESTI2018521, TESTI2018565,

[1644] TESTI2018581, TESTI2018611, TESTI2018687, TESTI2018697, TESTI2018838, TESTI2018867, TESTI2018941, TESTI2018957, TESTI2018974, TESTI2018975, TESTI2019042, TESTI2019077, TESTI2019228, TESTI2019257, TESTI2019280, TESTI2019282, TESTI2019308, TESTI2019336, TESTI2019352, TESTI2019406, TESTI2019430, TESTI2019455, TESTI2019481, TESTI2019488, TESTI2019501, TESTI2019648, TESTI2019669, TESTI2019697, TESTI2019729, TESTI2019760, TESTI2019787, TESTI2019794, TESTI2019854, TESTI2019859, TESTI2019860, TESTI2019872, TESTI2019911, TESTI2019917, TESTI2019975, TESTI2019998, TESTI2020012, TESTI2020026, TESTI2020029, TESTI2020071, TESTI2020084, TESTI2020265, TESTI2020283, TESTI2020316, TESTI2020344, TESTI2020379,

[1645] TESTI2020426, TESTI2020445, TESTI2020510, TESTI2020515, TESTI2020525, TESTI2020579, TESTI2020717, TESTI2020840, TESTI2020871, TESTI2020905, TESTI2020906, TESTI2020946, TESTI2020956, TESTI2020981, TESTI2020999, TESTI2021003, TESTI2021038, TESTI2021057, TESTI2021077, TESTI2021112, TESTI2021114, TESTI2021116, TESTI2021122, TESTI2021124, TESTI2021138, TESTI2021297, TESTI2021315, TESTI2021358, TESTI2021425, TESTI2021447, TESTI2021463, TESTI2021531, TESTI2021599, TESTI2021637, TESTI2021654, TESTI2021667, TESTI2021736, TESTI2021785, TESTI2021819, TESTI2021851, TESTI2021895, TESTI2021911, TESTI2021939, TESTI2021999, TESTI2022010, TESTI2022023, TESTI2022065, TESTI2022086, TESTI2022179, TESTI2022203,

[1646] TESTI2022246, TESTI2022323, TESTI2022338, TESTI2022400, TESTI2022462, TESTI2022495, TESTI2022623, TESTI2022649, TESTI2022652, TESTI2022738, TESTI2022798, TESTI2022812, TESTI2022814, TESTI2022874, TESTI2022940, TESTI2022952, TESTI2023025, TESTI2023033, TESTI2023053, TESTI2023085, TESTI2023192, TESTI2023194, TESTI2023214, TESTI2023254, TESTI2023386, TESTI2023414, TESTI2023427, TESTI2023436, TESTI2023599, TESTI2023752, TESTI2023800, TESTI2023861, TESTI2023903, TESTI2023942, TESTI2023947, TESTI2023951, TESTI2023968, TESTI2024009, TESTI2024090, TESTI2024125, TESTI2024153, TESTI2024192, TESTI2024267, TESTI2024283, TESTI2024299, TESTI2024419, TESTI2024422, TESTI2024443, TESTI2024446, TESTI2024473,

[1647] TESTI2024476, TESTI2024498, TESTI2024560, TESTI2024567, TESTI2024586, TESTI2024598, TESTI2024641, TESTI2024648, TESTI2024718, TESTI2024744, TESTI2024844, TESTI2024864, TESTI2024885, TESTI2024936, TESTI2024978, TESTI2024999, TESTI2025006, TESTI2025013, TESTI2025022, TESTI2025063, TESTI2025117, TESTI2025144, TESTI2025161, TESTI2025174, TESTI2025229, TESTI2025269, TESTI2025365, TESTI2025403, TESTI2025409, TESTI2025422, TESTI2025448, TESTI2025454, TESTI2025486, TESTI2025546, TESTI2025582, TESTI2025609, TESTI2025656, TESTI2025757, TESTI2025791, TESTI2025846, TESTI2025872, TESTI2025879, TESTI2025911, TESTI2025920, TESTI2025924, TESTI2026014, TESTI2026024, TESTI2026064, TESTI2026077, TESTI2026104,

[1648] TESTI2026116, TESTI2026134, TESTI2026168, TESTI2026196, TESTI2026215, TESTI2026218, TESTI2026233, TESTI2026291, TESTI2026294, TESTI2026401, TESTI2026403, TESTI2026453, TESTI2026461, TESTI2026491, TESTI2026505, TESTI2026515, TESTI2026525, TESTI2026534, TESTI2026537, TESTI2026589, TESTI2026597, TESTI2026605, TESTI2026647, TESTI2026674, TESTI2026794, TESTI2026824, TESTI2026854, TESTI2026925, TESTI2026936, TESTI2026957, TESTI2027013, TESTI2027019, TESTI2027108, TESTI2027165, TESTI2027171, TESTI2027173, TESTI2027179, TESTI2027185, TESTI2027206, TESTI2027238, TESTI2027239, TESTI2027243, TESTI2027271, TESTI2027296, TESTI2027378, TESTI2027411, TESTI2027450, TESTI2027496, TESTI2027503, TESTI2027562,

[1649] TESTI2027615, TESTI2027645, TESTI2027730, TESTI2027736, TESTI2027791, TESTI2027820, TESTI2027828, TESTI2027840, TESTI2027909, TESTI2028098, TESTI2028151, TESTI2028242, TESTI2028253, TESTI2028254, TESTI2028269, TESTI2028290, TESTI2028296, TESTI2028384, TESTI2028426, TESTI2028488, TESTI2028523, TESTI2028583, TESTI2028613, TESTI2028659, TESTI2028662, TESTI2028670, TESTI2028705, TESTI2028776, TESTI2028811, TESTI2028891, TESTI2028985, TESTI2028997, TESTI2029131, TESTI2029162, TESTI2029196, TESTI2029201, TESTI2029227, TESTI2029244, TESTI2029249, TESTI2029252, TESTI2029259, TESTI2029264, TESTI2029470, TESTI2029672, TESTI2029785, TESTI2029880, TESTI2030136, TESTI2030322, TESTI2030336, TESTI2030342,

[1650] TESTI2030519, TESTI2030554, TESTI2030556, TESTI2030728, TESTI2030754, TESTI2030770, TESTI2030860, TESTI2030901, TESTI2030917, TESTI2030930, TESTI2031006, TESTI2031007, TESTI2031060, TESTI2031129, TESTI2031356, TESTI2031418, TESTI2031504, TESTI2031529, TESTI2031687, TESTI2031760, TESTI2031809, TESTI2031919, TESTI2031935, TESTI2031986, TESTI2032044, TESTI2032067, TESTI2032079, TESTI2032643, TESTI2032681, TESTI2032761, TESTI2032768, TESTI2032774, TESTI2032828, TESTI2033031, TESTI2033242, TESTI2033254, TESTI2033300, TESTI2033395, TESTI2033453, TESTI2033505, TESTI2033520, TESTI2033641, TESTI2033710, TESTI2033905, TESTI2034187, TESTI2034243, TESTI2034249, TESTI2034307, TESTI2034357, TESTI2034401,

[1651] TESTI2034407, TESTI2034506, TESTI2034520, TESTI2034718, TESTI2034730, TESTI2034749, TESTI2034767, TESTI2034774, TESTI2034777, TESTI2034785, TESTI2034799, TESTI2034847, TESTI2034913, TESTI2034916, TESTI2034931, TESTI2034940, TESTI2034953, TESTI2034997, TESTI2035003, TESTI2035078, TESTI2035084, TESTI2035107, TESTI2035121, TESTI2035124, TESTI2035183, TESTI2035236, TESTI2035262, TESTI2035309, TESTI2035688, TESTI2035775, TESTI2035793, TESTI2035898, TESTI2035962, TESTI2035981, TESTI2035997, TESTI2036114, TESTI2036129, TESTI2036285, TESTI2036288, TESTI2036513, TESTI2036589, TESTI2036650, TESTI2036684, TESTI2036691, TESTI2036736, TESTI2036822, TESTI2036833, TESTI2036913, TESTI2036922, TESTI2036951,

[1652] TESTI2036965, TESTI2036969, TESTI2037002, TESTI2037055, TESTI2037081, TESTI2037085, TESTI2037103, TESTI2037106, TESTI2037111, TESTI2037209, TESTI2037255, TESTI2037359, TESTI2037375, TESTI2037382, TESTI2037534, TESTI2037569, TESTI2037572, TESTI2037643, TESTI2037657, TESTI2037673, TESTI2037723, TESTI2037819, TESTI2037830, TESTI2037845, TESTI2037877, TESTI2037976, TESTI2038048, TESTI2038065, TESTI2038104, TESTI2038275, TESTI2038388, TESTI2038573, TESTI2038596, TESTI2038623, TESTI2038644, TESTI2038733, TESTI2038858, TESTI2038958, TESTI2039025, TESTI2039026, TESTI2039038, TESTI2039041, TESTI2039060, TESTI2039113, TESTI2039121, TESTI2039177, TESTI2039209, TESTI2039225, TESTI2039227, TESTI2039276,

[1653] TESTI2039342, TESTI2039353, TESTI2039544, TESTI2039613, TESTI2039707, TESTI2039732, TESTI2039738, TESTI2039776, TESTI2039867, TESTI2039908, TESTI2040018, TESTI2040094, TESTI2040102, TESTI2040128, TESTI2040143, TESTI2040297, TESTI2040372, TESTI2040377, TESTI2040424, TESTI2040642, TESTI2040815, TESTI2040897, TESTI2040944, TESTI2040964, TESTI2040983, TESTI2040989, TESTI2041330, TESTI2041362, TESTI2041517, TESTI2041564, TESTI2041664, TESTI2041730, TESTI2041734, TESTI2041778, TESTI2041800, TESTI2041947, TESTI2041956, TESTI2041976, TESTI2042062, TESTI2042149, TESTI2042264, TESTI2042295, TESTI2042302, TESTI2042326, TESTI2042400, TESTI2042450, TESTI2042473, TESTI2042507, TESTI2042508, TESTI2042750,

[1654] TESTI2042783, TESTI2042806, TESTI2042928, TESTI2042946, TESTI2042958, TESTI2043275, TESTI2043277, TESTI2043282, TESTI2043313, TESTI2043477, TESTI2043585, TESTI2043758, TESTI2043817, TESTI2043857, TESTI2043866, TESTI2043869, TESTI2044064, TESTI2044118, TESTI2044194, TESTI2044276, TESTI2044306, TESTI2044309, TESTI2044413, TESTI2044418, TESTI2044754, TESTI2044788, TESTI2044796, TESTI2044833, TESTI2044892, TESTI2044920, TESTI2044968, TESTI2045139, TESTI2045155, TESTI2045171, TESTI2045199, TESTI2045353, TESTI2045509, TESTI2045562, TESTI2045611, TESTI2045819, TESTI2045850, TESTI2045920, TESTI2045964, TESTI2045983, TESTI2046100, TESTI2046188, TESTI2046347, TESTI2046352, TESTI2046358, TESTI2046439,

[1655] TESTI2046456, TESTI2046535, TESTI2046536, TESTI2046552, TESTI2046569, TESTI2046686, TESTI2046721, TESTI2046732, TESTI2046786, TESTI2046797, TESTI2046863, TESTI2046872, TESTI2047071, TESTI2047141, TESTI2047147, TESTI2047153, TESTI2047212, TESTI2047342, TESTI2047383, TESTI2047605, TESTI2047792, TESTI2047801, TESTI2047818, TESTI2047824, TESTI2047885, TESTI2047930, TESTI2048105, TESTI2048109, TESTI2048465, TESTI2048603, TESTI2048898, TESTI2049041, TESTI2049062, TESTI2049206, TESTI2049246, TESTI2049277, TESTI2049422, TESTI2049452, TESTI2049469, TESTI2049553, TESTI2049576, TESTI2049857, TESTI2049956, TESTI2050137, TESTI2050681, TESTI2050780, TESTI2050987, TESTI2051148, TESTI2051177, TESTI2051279,

[1656] TESTI2051488, TESTI2051543, TESTI2051627, TESTI2051742, TESTI2051767, TESTI2051791, TESTI2051806, TESTI2051867, TESTI2051873, TESTI2052110, TESTI2052202, TESTI2052211, TESTI2052256, TESTI2052288, TESTI2052525, TESTI2052670, TESTI2052693, TESTI2052698, TESTI2052799, TESTI2052822, TESTI2052985, TESTI2053151, TESTI2053242, TESTI2053399, TESTI2053526, TESTI2053561, TESTI2053621, TESTI2053667, TESTI2053723, TESTI3000002, TESTI3000005, TESTI4000014, TESTI4000068, TESTI4000079, TESTI4000093, TESTI4000134, TESTI4000137, TESTI4000153, TESTI4000155, TESTI4000157, TESTI4000183, TESTI4000214, TESTI4000215, TESTI4000228, TESTI4000250, TESTI4000288, TESTI4000319, TESTI4000349, TESTI4000370, TESTI4000394,

[1657] TESTI4000434, TESTI4000462, TESTI4000530, TESTI4000534, TESTI4000598, TESTI4000600, TESTI4000621, TESTI4000703, TESTI4000724, TESTI4000957, TESTI4000970, TESTI4001036, TESTI4001037, TESTI4001060, TESTI4001106, TESTI4001148, TESTI4001176, TESTI4001195, TESTI4001201, TESTI4001206, TESTI4001348, TESTI4001441, TESTI4001473, TESTI4001517, TESTI4001527, TESTI4001561, TESTI4001569, TESTI4001604, TESTI4001665, TESTI4001679, TESTI4001795, TESTI4001923, TESTI4001925, TESTI4001984, TESTI4002003, TESTI4002072, TESTI4002141, TESTI4002195, TESTI4002202, TESTI4002290, TESTI4002319, TESTI4002491, TESTI4002520, TESTI4002552, TESTI4002647, TESTI4002703, TESTI4002754, TESTI4002868, TESTI4002878, TESTI4002889,

[1658] TESTI4002988, TESTI4003150, TESTI4003179, TESTI4003279, TESTI4003319, TESTI4003404, TESTI4003565, TESTI4003574, TESTI4003579, TESTI4003602, TESTI4003703, TESTI4003733, TESTI4003796, TESTI4003944, TESTI4004003, TESTI4004031, TESTI4004200, TESTI4004210, TESTI4004539, TESTI4004626, TESTI4004653, TESTI4004695, TESTI4004722, TESTI4004887, TESTI4004917, TESTI4005015, TESTI4005039, TESTI4005133, TESTI4005158, TESTI4005317, TESTI4005322, TESTI4005399, TESTI4005470, TESTI4005500, TESTI4005534, TESTI4005543, TESTI4005628, TESTI4005801, TESTI4005805, TESTI4005857, TESTI4005961, TESTI4006053, TESTI4006079, TESTI4006112, TESTI4006137, TESTI4006148, TESTI4006219, TESTI4006234, TESTI4006308, TESTI4006326,

[1659] TESTI4006393, TESTI4006407, TESTI4006412, TESTI4006420, TESTI4006441, TESTI4006473, TESTI4006539, TESTI4006546, TESTI4006567, TESTI4006704, TESTI4006728, TESTI4006802, TESTI4006819, TESTI4007064, TESTI4007163, TESTI4007176, TESTI4007203, TESTI4007239, TESTI4007369, TESTI4007373, TESTI4007382, TESTI4007404, TESTI4007489, TESTI4007565, TESTI4007671, TESTI4007775, TESTI4007778, TESTI4007799, TESTI4007810, TESTI4007816, TESTI4007965, TESTI4008007, TESTI4008018, TESTI4008050, TESTI4008058, TESTI4008086, TESTI4008097, TESTI4008176, TESTI4008209, TESTI4008219, TESTI4008250, TESTI4008302, TESTI4008305, TESTI4008401, TESTI4008417, TESTI4008429, TESTI4008573, TESTI4008797, TESTI4008816, TESTI4008840,

[1660] TESTI4008935, TESTI4008993, TESTI4009022, TESTI4009028, TESTI4009034, TESTI4009123, TESTI4009160, TESTI4009215, TESTI4009283, TESTI4009286, TESTI4009306, TESTI4009374, TESTI4009406, TESTI4009454, TESTI4009457, TESTI4009501, TESTI4009563, TESTI4009608, TESTI4009638, TESTI4009752, TESTI4009881, TESTI4009886, TESTI4009928, TESTI4010076, TESTI4010082, TESTI4010095, TESTI4010211, TESTI4010377, TESTI4010475, TESTI4010544, TESTI4010713, TESTI4010721, TESTI4010789, TESTI4010817, TESTI4010831, TESTI4010851, TESTI4010902, TESTI4010928, TESTI4010979, TESTI4011070, TESTI4011072, TESTI4011084, TESTI4011118, TESTI4011246, TESTI4011484, TESTI4011505, TESTI4011532, TESTI4011616, TESTI4011744, TESTI4011745,

[1661] TESTI4011829, TESTI4011926, TESTI4011956, TESTI4012010, TESTI4012086, TESTI4012258, TESTI4012293, TESTI4012329, TESTI4012382, TESTI4012406, TESTI4012448, TESTI4012451, TESTI4012505, TESTI4012556, TESTI4012623, TESTI4012646, TESTI4012679, TESTI4012911, TESTI4012956, TESTI4012960, TESTI4013365, TESTI4013369, TESTI4013410, TESTI4013474, TESTI4013602, TESTI4013667, TESTI4013675, TESTI4013685, TESTI4013735, TESTI4013742, TESTI4013774, TESTI4013817, TESTI4013830, TESTI4013852, TESTI4013894, TESTI4013924, TESTI4013960, TESTI4013962, TESTI4014159, TESTI4014175, TESTI4014265, TESTI4014276, TESTI4014306, TESTI4014392, TESTI4014415, TESTI4014445, TESTI4014553, TESTI4014661, TESTI4014801, TESTI4014818,

[1662] TESTI4014891, TESTI4014908, TESTI4014924, TESTI4014932, TESTI4014977, TESTI4015012, TESTI4015129, TESTI4015145, TESTI4015204, TESTI4015263, TESTI4015293, TESTI4015299, TESTI4015339, TESTI4015398, TESTI4015442, TESTI4015471, TESTI4015477, TESTI4015600, TESTI4015646, TESTI4015681, TESTI4015688, TESTI4015790, TESTI4016110, TESTI4016238, TESTI4016551, TESTI4016812, TESTI4016822, TESTI4016865, TESTI4016882, TESTI4016925, TESTI4017001, TESTI4017116, TESTI4017137, TESTI4017229, TESTI4017254, TESTI4017269, TESTI4017380, TESTI4017382, TESTI4017543, TESTI4017575, TESTI4017647, TESTI4017714, TESTI4017763, TESTI4017848, TESTI4017854, TESTI4017901, TESTI4017961, TESTI4017984, TESTI4018101, TESTI4018152,

[1663] TESTI4018208, TESTI4018382, TESTI4018436, TESTI4018506, TESTI4018555, TESTI4018751, TESTI4018806, TESTI4018835, TESTI4018859, TESTI4018881, TESTI4018886, TESTI4018938, TESTI4019140, TESTI4019149, TESTI4019299, TESTI4019417, TESTI4019440, TESTI4019566, TESTI4019657, TESTI4019756, TESTI4019843, TESTI4020092, TESTI4020102, TESTI4020342, TESTI4020460, TESTI4020596, TESTI4020806, TESTI4020819, TESTI4020920, TESTI4021129, TESTI4021197, TESTI4021294, TESTI4021377, TESTI4021456, TESTI4021491, TESTI4021569, TESTI4021713, TESTI4021821, TESTI4022158, TESTI4022577, TESTI4022716, TESTI4022873, TESTI4023096, TESTI4023172, TESTI4023546, TESTI4023555, TESTI4023654, TESTI4023722, TESTI4023762, TESTI4023942,

[1664] TESTI4024096, TESTI4024240, TESTI4024245, TESTI4024294, TESTI4024344, TESTI4024387, TESTI4024420, TESTI4024494, TESTI4024740, TESTI4024874, TESTI4024890, TESTI4024907, TESTI4024930, TESTI4025062, TESTI4025268, TESTI4025401, TESTI4025494, TESTI4025547, TESTI4025731, TESTI4025797, TESTI4025865, TESTI4025908, TESTI4025920, TESTI4026079, TESTI4026080, TESTI4026192, TESTI4026207, TESTI4026295, TESTI4026390, TESTI4026456, TESTI4026510, TESTI4026524, TESTI4026680, TESTI4026700, TESTI4026762, TESTI4026785, TESTI4027139, TESTI4027170, TESTI4027262, TESTI4027516, TESTI4027557, TESTI4027660, TESTI4027821, TESTI4027969, TESTI4028042, TESTI4028059, TESTI4028062, TESTI4028182, TESTI4028429, TESTI4028612,

[1665] TESTI4028692, TESTI4028809, TESTI4028823, TESTI4028880, TESTI4028904, TESTI4028938, TESTI4028958, TESTI4028983, TESTI4029023, TESTI4029348, TESTI4029370, TESTI4029528, TESTI4029651, TESTI4029671, TESTI4029676, TESTI4029690, TESTI4029731, TESTI4029743, TESTI4030069, TESTI4030159, TESTI4030319, TESTI4030505, TESTI4030603, TESTI4030669, TESTI4030673, TESTI4030864, TESTI4031066, TESTI4031173, TESTI4031335, TESTI4031745, TESTI4031818, TESTI4032090, TESTI4032112, TESTI4032128, TESTI4032270, TESTI4032375, TESTI4032834, TESTI4032856, TESTI4032895, TESTI4032913, TESTI4033146, TESTI4033177, TESTI4033433, TESTI4033690, TESTI4034172, TESTI4034212, TESTI4034432, TESTI4034495, TESTI4034632, TESTI4034633,

[1666] TESTI4034912, TESTI4034973, TESTI4035063, TESTI4035065, TESTI4035498, TESTI4035508, TESTI4035581, TESTI4035602, TESTI4035637, TESTI4035649, TESTI4035770, TESTI4035872, TESTI4035895, TESTI4035898, TESTI4035989, TESTI4036012, TESTI4036042, TESTI4036048, TESTI4036315, TESTI4036319, TESTI4036449, TESTI4036767, TESTI4036909, TESTI4037066, TESTI4037188, TESTI4037228, TESTI4037244, TESTI4037727, TESTI4037949, TESTI4038047, TESTI4038099, TESTI4038156, TESTI4038223, TESTI4038258, TESTI4038284, TESTI4038339, TESTI4038492, TESTI4038721, TESTI4038758, TESTI4038779, TESTI4038818, TESTI4039038, TESTI4039086, TESTI4039451, TESTI4039575, TESTI4039659, TESTI4039744, TESTI4039904, TESTI4040197, TESTI4040363,

[1667] TESTI4040535, TESTI4040559, TESTI4040800, TESTI4040804, TESTI4040939, TESTI4040956, TESTI4041049, TESTI4041053, TESTI4041086, TESTI4041099, TESTI4041143, TESTI4041482, TESTI4041519, TESTI4041624, TESTI4041629, TESTI4041832, TESTI4041844, TESTI4041903, TESTI4041954, TESTI4041984, TESTI4041985, TESTI4041986, TESTI4042098, TESTI4042420, TESTI4042440, TESTI4042444, TESTI4042711, TESTI4042846, TESTI4043067, TESTI4043129, TESTI4043140, TESTI4043166, TESTI4043203, TESTI4043223, TESTI4043371, TESTI4043378, TESTI4043512, TESTI4043551, TESTI4043710, TESTI4043947, TESTI4044035, TESTI4044076, TESTI4044084, TESTI4044123, TESTI4044186, TESTI4044234, TESTI4044291, TESTI4044296, TESTI4044300, TESTI4044682,

[1668] TESTI4044704, TESTI4044770, TESTI4045168, TESTI4045312, TESTI4045330, TESTI4045470, TESTI4045701, TESTI4045908, TESTI4045955, TESTI4045982, TESTI4046073, TESTI4046090, TESTI4046240, TESTI4046245, TESTI4046253, TESTI4046282, TESTI4046328, TESTI4046450, TESTI4046457, TESTI4046487, TESTI4046502, TESTI4046523, TESTI4046819, TESTI4046873, TESTI4046884, TESTI4046896, TESTI4046903, TESTI4046962, TESTI4047069, TESTI4047119, TESTI4047305, TESTI4047328, TESTI4047437, TESTI4047569, TESTI4047746, TESTI4047808, THYMU1000017, THYMU1000025, THYMU1000029, THYMU1000033, THYMU1000041, THYMU1000060, THYMU1000074, THYMU1000083, THYMU1000098, THYMU1000103, THYMU1000105, THYMU1000109, THYMU1000136, THYMU1000142,

[1669] THYMU1000144, THYMU1000158, THYMU1000176, THYMU1000179, THYMU1000191, THYMU1000198, THYMU1000217, THYMU1000240, THYMU1000242, THYMU1000291, THYMU1000316, THYMU1000318, THYMU1000329, THYMU1000331, THYMU1000336, THYMU1000366, THYMU1000374, THYMU1000382, THYMU1000393, THYMU1000394, THYMU1000399, THYMU1000426, THYMU1000440, THYMU1000459, THYMU1000473, THYMU1000490, THYMU1000491, THYMU1000496, THYMU1000499, THYMU1000527, THYMU1000532, THYMU1000536, THYMU1000554, THYMU1000558, THYMU1000576, THYMU1000600, THYMU1000677, THYMU1000692, THYMU2000022, THYMU2000032, THYMU2000057, THYMU2000120, THYMU2000138, THYMU2000140, THYMU2000155, THYMU2000162, THYMU2000171, THYMU2000176, THYMU2000179, THYMU2000231,

[1670] THYMU2000236, THYMU2000276, THYMU2000280, THYMU2000300, THYMU2000317, THYMU2000368, THYMU2000369, THYMU2000418, THYMU2000436, THYMU2000440, THYMU2000489, THYMU2000492, THYMU2000519, THYMU2000570, THYMU2000602, THYMU2000660, THYMU2000671, THYMU2000672, THYMU2000684, THYMU2000702, THYMU2000767, THYMU2000775, THYMU2000800, THYMU2000879, THYMU2000932, THYMU2000950, THYMU2000971, THYMU2000982, THYMU2000990, THYMU2001007, THYMU2001053, THYMU2001071, THYMU2001090, THYMU2001139, THYMU2001195, THYMU2001202, THYMU2001203, THYMU2001256, THYMU2001270, THYMU2001291, THYMU2001314, THYMU2001325, THYMU2001357, THYMU2001381, THYMU2001443, THYMU2001515, THYMU2001521, THYMU2001556, THYMU2001622, THYMU2001727,

[1671] THYMU2001819, THYMU2001825, THYMU2001839, THYMU2001868, THYMU2001898, THYMU2001900, THYMU2001916, THYMU2001926, THYMU2001989, THYMU2002023, THYMU2002037, THYMU2002080, THYMU2002109, THYMU2002147, THYMU2002154, THYMU2002157, THYMU2002162, THYMU2002177, THYMU2002203, THYMU2002229, THYMU2002242, THYMU2002338, THYMU2002356, THYMU2002376, THYMU2002384, THYMU2002450, THYMU2002490, THYMU2002548, THYMU2002695, THYMU2002745, THYMU2002756, THYMU2002789, THYMU2002792, THYMU2002815, THYMU2002841, THYMU2002852, THYMU2002910, THYMU2002950, THYMU2003012, THYMU2003046, THYMU2003069, THYMU2003107, THYMU2003124, THYMU2003133, THYMU2003166, THYMU2003232, THYMU2003242, THYMU2003249, THYMU2003270, THYMU2003282,

[1672] THYMU2003287, THYMU2003336, THYMU2003366, THYMU2003397, THYMU2003419, THYMU2003440, THYMU2003446, THYMU2003470, THYMU2003479, THYMU2003499, THYMU2003542, THYMU2003632, THYMU2003650, THYMU2003700, THYMU2003760, THYMU2003803, THYMU2003855, THYMU2003907, THYMU2003932, THYMU2003981, THYMU2004003, THYMU2004008, THYMU2004042, THYMU2004108, THYMU2004111, THYMU2004123, THYMU2004139, THYMU2004169, THYMU2004284, THYMU2004320, THYMU2004336, THYMU2004356, THYMU2004410, THYMU2004452, THYMU2004508, THYMU2004512, THYMU2004635, THYMU2004639, THYMU2004668, THYMU2004677, THYMU2004688, THYMU2004693, THYMU2004733, THYMU2004835, THYMU2004843, THYMU2004906, THYMU2004916, THYMU2004986, THYMU2005001, THYMU2005003,

[1673] THYMU2005046, THYMU2005134, THYMU2005156, THYMU2005190, THYMU2005225, THYMU2005240, THYMU2005246, THYMU2005270, THYMU2005283, THYMU2005303, THYMU2005321, THYMU2005356, THYMU2005369, THYMU2005439, THYMU2005480, THYMU2005482, THYMU2005507, THYMU2005545, THYMU2005574, THYMU2005576, THYMU2005748, THYMU2005759, THYMU2005807, THYMU2005815, THYMU2005855, THYMU2005881, THYMU2005948, THYMU2005980, THYMU2005997, THYMU2006001, THYMU2006048, THYMU2006098, THYMU2006160, THYMU2006170, THYMU2006252, THYMU2006261, THYMU2006277, THYMU2006303, THYMU2006324, THYMU2006350, THYMU2006357, THYMU2006365, THYMU2006420, THYMU2006468, THYMU2006610, THYMU2006666, THYMU2006712, THYMU2006813, THYMU2006913, THYMU2006946,

[1674] THYMU2006965, THYMU2007025, THYMU2007036, THYMU2007060, THYMU2007065, THYMU2007095, THYMU2007112, THYMU2007146, THYMU2007179, THYMU2007258, THYMU2007307, THYMU2007308, THYMU2007339, THYMU2007350, THYMU2007384, THYMU2007415, THYMU2007467, THYMU2007493, THYMU2007521, THYMU2007528, THYMU2007530, THYMU2007532, THYMU2007561, THYMU2007571, THYMU2007635, THYMU2007658, THYMU2007667, THYMU2007694, THYMU2007725, THYMU2007729, THYMU2007802, THYMU2007824, THYMU2007854, THYMU2007952, THYMU2007969, THYMU2008035, THYMU2008036, THYMU2008049, THYMU2008072, THYMU2008111, THYMU2008145, THYMU2008149, THYMU2008191, THYMU2008207, THYMU2008226, THYMU2008282, THYMU2008321, THYMU2008339, THYMU2008350, THYMU2008351,

[1675] THYMU2008383, THYMU2008452, THYMU2008643, THYMU2008686, THYMU2008691, THYMU2008714, THYMU2008725, THYMU2008727, THYMU2008781, THYMU2008799, THYMU2008876, THYMU2008910, THYMU2008917, THYMU2008928, THYMU2008990, THYMU2008994, THYMU2009023, THYMU2009046, THYMU2009101, THYMU2009104, THYMU2009134, THYMU2009157, THYMU2009181, THYMU2009186, THYMU2009338, THYMU2009425, THYMU2009516, THYMU2009526, THYMU2009546, THYMU2009592, THYMU2009596, THYMU2009792, THYMU2009835, THYMU2009906, THYMU2009948, THYMU2010030, THYMU2010041, THYMU2010046, THYMU2010059, THYMU2010082, THYMU2010094, THYMU2010161, THYMU2010192, THYMU2010448, THYMU2010519, THYMU2010637, THYMU2010671, THYMU2010699, THYMU2010705, THYMU2010779,

[1676] THYMU2010816, THYMU2010831, THYMU2010848, THYMU2011053, THYMU2011063, THYMU2011072, THYMU2011096, THYMU2011118, THYMU2011142, THYMU2011183, THYMU2011257, THYMU2011259, THYMU2011295, THYMU2011308, THYMU2011390, THYMU2011431, THYMU2011447, THYMU2011482, THYMU2011538, THYMU2011548, THYMU2011551, THYMU2011564, THYMU2011573, THYMU2011585, THYMU2011621, THYMU2011666, THYMU2011736, THYMU2011785, THYMU2011806, THYMU2011852, THYMU2011875, THYMU2011881, THYMU2011937, THYMU2011939, THYMU2012002, THYMU2012024, THYMU2012073, THYMU2012104, THYMU2012113, THYMU2012273, THYMU2012401, THYMU2012492, THYMU2012507, THYMU2012565, THYMU2012574, THYMU2012631, THYMU2012665, THYMU2012690, THYMU2012701, THYMU2012807,

[1677] THYMU2012826, THYMU2012882, THYMU2012891, THYMU2012902, THYMU2012919, THYMU2013023, THYMU2013047, THYMU2013051, THYMU2013089, THYMU2013170, THYMU2013364, THYMU2013386, THYMU2013426, THYMU2013578, THYMU2013648, THYMU2013705, THYMU2013757, THYMU2013779, THYMU2013863, THYMU2013950, THYMU2013981, THYMU2014067, THYMU2014068, THYMU2014167, THYMU2014183, THYMU2014204, THYMU2014297, THYMU2014323, THYMU2014327, THYMU2014353, THYMU2014492, THYMU2014500, THYMU2014599, THYMU2014762, THYMU2014777, THYMU2014801, THYMU2014901, THYMU2014923, THYMU2015019, THYMU2015161, THYMU2015316, THYMU2015321, THYMU2015439, THYMU2015441, THYMU2015479, THYMU2015762, THYMU2015775, THYMU2015825, THYMU2015918, THYMU2015943,

[1678] THYMU2015984, THYMU2016113, THYMU2016164, THYMU2016204, THYMU2016219, THYMU2016360, THYMU2016496, THYMU2016523, THYMU2016840, THYMU2016968, THYMU2017008, THYMU2017010, THYMU2017023, THYMU2017085, THYMU2017099, THYMU2017158, THYMU2017162, THYMU2017215, THYMU2017362, THYMU2017366, THYMU2017398, THYMU2017449, THYMU2017479, THYMU2017522, THYMU2017526, THYMU2017601, THYMU2017675, THYMU2017707, THYMU2017831, THYMU2017844, THYMU2017878, THYMU2017948, THYMU2018028, THYMU2018071, THYMU2018126, THYMU2018189, THYMU2018197, THYMU2018384, THYMU2018455, THYMU2018547, THYMU2018565, THYMU2018639, THYMU2018673, THYMU2018721, THYMU2018772, THYMU2018819, THYMU2018841, THYMU2018997, THYMU2019021, THYMU2019054,

[1679] THYMU2019197, THYMU2019210, THYMU2019364, THYMU2019436, THYMU2019442, THYMU2019587, THYMU2019599, THYMU2019686, THYMU2019813, THYMU2020198, THYMU2020289, THYMU2020416, THYMU2020491, THYMU2020499, THYMU2020560, THYMU2020667, THYMU2020830, THYMU2020883, THYMU2020959, THYMU2021361, THYMU2021509, THYMU2021597, THYMU2021684, THYMU2021714, THYMU2022213, THYMU2022289, THYMU2022660, THYMU2022854, THYMU2022922, THYMU2023209, THYMU2023264, THYMU2023576, THYMU2023711, THYMU2023900, THYMU2023943, THYMU2023967, THYMU2024071, THYMU2024121, THYMU2024185, THYMU2024207, THYMU2024616, THYMU2024684, THYMU2024748, THYMU2025042, THYMU2025189, THYMU2025319, THYMU2025325, THYMU2025406, THYMU2025557, THYMU2025572,

[1680] THYMU2025707, THYMU2025849, THYMU2025909, THYMU2025939, THYMU2026182, THYMU2026350, THYMU2026530, THYMU2026531, THYMU2026835, THYMU2026904, THYMU2027053, THYMU2027168, THYMU2027249, THYMU2027282, THYMU2027497, THYMU2027695, THYMU2027734, THYMU2027894, THYMU2027975, THYMU2027996, THYMU2028041, THYMU2028368, THYMU2028379, THYMU2028394, THYMU2028412, THYMU2028629, THYMU2028632, THYMU2028724, THYMU2028739, THYMU2028942, THYMU2028978, THYMU2029134, THYMU2029578, THYMU2029676, THYMU2029688, THYMU2029788, THYMU2030068, THYMU2030226, THYMU2030264, THYMU2030462, THYMU2030543, THYMU2030637, THYMU2030655, THYMU2030796, THYMU2030912, THYMU2030982, THYMU2031046, THYMU2031139, THYMU2031218, THYMU2031249,

[1681] THYMU2031258, THYMU2031341, THYMU2031368, THYMU2031579, THYMU2031847, THYMU2031890, THYMU2031994, THYMU2032014, THYMU2032035, THYMU2032080, THYMU2032150, THYMU2032155, THYMU2032358, THYMU2032437, THYMU2032601, THYMU2032655, THYMU2032696, THYMU2032715, THYMU2032732, THYMU2032825, THYMU2032976, THYMU2033053, THYMU2033059, THYMU2033070, THYMU2033079, THYMU2033085, THYMU2033104, THYMU2033227, THYMU2033263, THYMU2033308, THYMU2033401, THYMU2033583, THYMU2033755, THYMU2033787, THYMU2033816, THYMU2034182, THYMU2034279, THYMU2034314, THYMU2034338, THYMU2034374, THYMU2034647, THYMU2034917, THYMU2035064, THYMU2035078, THYMU2035101, THYMU2035319, THYMU2035321, THYMU2035388, THYMU2035400, THYMU2035554,

[1682] THYMU2035710, THYMU2036058, THYMU2036105, THYMU2036207, THYMU2036215, THYMU2036252, THYMU2036265, THYMU2036366, THYMU2036459, THYMU2036461, THYMU2036604, THYMU2036653, THYMU2037081, THYMU2037208, THYMU2037226, THYMU2037233, THYMU2037234, THYMU2037348, THYMU2037406, THYMU2037965, THYMU2038058, THYMU2038189, THYMU2038199, THYMU2038220, THYMU2038301, THYMU2038369, THYMU2038389, THYMU2038615, THYMU2038636, THYMU2038739, THYMU2038772, THYMU2038797, THYMU2038906, THYMU2039305, THYMU2039315, THYMU2039334, THYMU2039350, THYMU2039411, THYMU2039634, THYMU2039719, THYMU2039780, THYMU2039788, THYMU2039989, THYMU2040029, THYMU2040110, THYMU2040114, THYMU2040140, THYMU2040412, THYMU2040427, THYMU2040824,

[1683] THYMU2040925, THYMU2041007, THYMU2041015, THYMU2041252, THYMU3000028, THYMU3000036, THYMU3000037, THYMU3000082, THYMU3000194, THYMU3000224, THYMU3000269, THYMU3000306, THYMU3000360, THYMU3000390, THYMU3000420, THYMU3000490, THYMU3000504, THYMU3000542, THYMU3000655, THYMU3000776, THYMU3000826, THYMU3000841, THYMU3001077, THYMU3001082, THYMU3001083, THYMU3001133, THYMU3001151, THYMU3001379, THYMU3001472, THYMU3001593, THYMU3001883, THYMU3001939, THYMU3001991, THYMU3002452, THYMU3002578, THYMU3002661, THYMU3003007, THYMU3003092, THYMU3003212, THYMU3003309, THYMU3003350, THYMU3003403, THYMU3003565, THYMU3003763, THYMU3003865, THYMU3003958, THYMU3003965, THYMU3004157, THYMU3004628, THYMU3004632,

[1684] THYMU3004835, THYMU3004866, THYMU3005050, THYMU3005378, THYMU3005407, THYMU3005415, THYMU3005427, THYMU3005482, THYMU3005491, THYMU3005629, THYMU3005696, THYMU3006118, THYMU3006132, THYMU3006168, THYMU3006172, THYMU3006371, THYMU3006485, THYMU3006640, THYMU3006767, THYMU3006811, THYMU3006963, THYMU3007137, THYMU3007308, THYMU3007368, THYMU3007423, THYMU3007559, THYMU3007845, THYMU3008060, THYMU3008105, THYMU3008136, THYMU3008171, THYMU3008216, THYMU3008436, THYMU3008672, THYMU3008883, THYMU3008935, THYMU3009006, THYMU3009255, THYMU3009391, THYMU3009643, THYMU3009755, THYMU3010247, THYMU3011012, THYMU3011081, THYMU3011244, THYMU3011360, THYMU3011534, THYMU3011543, THYMU3011556, THYMU3011717,

[1685] THYMU3011827, THYMU3012402, THYMU3012907, THYMU3012983, THYMU3013114, THYMU3013197, THYMU3013241, THYMU3013386, THYMU3013470, THYMU3013785, THYMU3013897, THYMU3014038, THYMU3014173, THYMU3014372, THYMU3014555, THYMU3014620, THYMU3014701, THYMU3015042, THYMU3015457, THYMU3015571, THYMU3015592, THYMU3015625, THYMU3015647, THYMU3015759, THYMU3015962, THYMU3016022, THYMU3016518, THYMU3016797, THYMU3016822, THYMU3016850, THYMU3017562, THYMU3017688, THYMU3017689, THYMU3017761, THYMU3018151, THYMU3018896, THYMU3019095, THYMU3019476, THYMU3019605, THYMU3019916, THYMU3020221, THYMU3020595, THYMU3020713, THYMU3020856, THYMU3020869, THYMU3020970, THYMU3021404, THYMU3021586, THYMU3021755, THYMU3021900,

[1686] THYMU3022211, THYMU3022434, THYMU3022528, THYMU3022668, THYMU3022982, THYMU3023107, THYMU3023211, THYMU3023216, THYMU3023394, THYMU3023400, THYMU3023797, THYMU3024164, THYMU3024339, THYMU3024602, THYMU3024879, THYMU3025118, THYMU3025313, THYMU3025642, THYMU3025683, THYMU3025772, THYMU3025865, THYMU3026000, THYMU3026350, THYMU3026479, THYMU3026532, THYMU3026783, THYMU3026869, THYMU3027251, THYMU3027540, THYMU3027655, THYMU3027671, THYMU3028075, THYMU3028410, THYMU3028461, THYMU3028702, THYMU3029188, THYMU3029318, THYMU3029421, THYMU3029719, THYMU3029774, THYMU3029832, THYMU3030072, THYMU3030231, THYMU3030706, THYMU3030710, THYMU3030752, THYMU3031146, THYMU3031402, THYMU3031610, THYMU3031612,

[1687] THYMU3031868, THYMU3031878, THYMU3032032, THYMU3032798, THYMU3032867, THYMU3033402, THYMU3033626, THYMU3033630, THYMU3033649, THYMU3033754, THYMU3033759, THYMU3034078, THYMU3034099, THYMU3034453, THYMU3034616, THYMU3034671, THYMU3034853, THYMU3034867, THYMU3034983, THYMU3036200, THYMU3036310, THYMU3036934, THYMU3036953, THYMU3037052, THYMU3037192, THYMU3037617, THYMU3037772, THYMU3037827, THYMU3037836, THYMU3037856, THYMU3037867, THYMU3037909, THYMU3037980, THYMU3038167, THYMU3038214, THYMU3038266, THYMU3038328, THYMU3038347, THYMU3038375, THYMU3038603, THYMU3038687, THYMU3038759, THYMU3038879, THYMU3038970, THYMU3039807, THYMU3039846, THYMU3040068, THYMU3040126, THYMU3040146, THYMU3040168,

[1688] THYMU3040172, THYMU3040725, THYMU3040746, THYMU3040816, THYMU3040829, THYMU3040830, THYMU3040986, THYMU3041354, THYMU3041386, THYMU3041428, THYMU3041573, THYMU3041603, THYMU3041736, THYMU3041918, THYMU3042075, THYMU3042321, THYMU3042372, THYMU3042758, THYMU3042929, THYMU3043200, THYMU3043327, THYMU3043482, THYMU3043597, THYMU3043688, THYMU3043779, THYMU3043883, THYMU3043993, THYMU3044175, THYMU3044188, THYMU3044441, THYMU3044445, THYMU3045510, THYMU3045673, THYMU3045692, THYMU3045704, THYMU3046140, THYMU3046350, THYMU3046360, THYMU3046856, THYMU3047115, THYMU3047144, THYMU3047156, THYMU3047366, THYMU3047513, THYMU3047542, THYMU3047760, THYMU3047891, TKIDN1000001, TKIDN1000044, TKIDN1000062,

[1689] TKIDN1000066, TKIDN1000164, TKIDN1000171, TKIDN1000192, TKIDN2000127, TKIDN2000240, TKIDN2000319, TKIDN2000464, TKIDN2000521, TKIDN2000701, TKIDN2001529, TKIDN2001662, TKIDN2002318, TKIDN2002329, TKIDN2002424, TKIDN2002632, TKIDN2002738, TKIDN2003044, TKIDN2003059, TKIDN2003062, TKIDN2003078, TKIDN2003366, TKIDN2003396, TKIDN2003413, TKIDN2003597, TKIDN2003601, TKIDN2004185, TKIDN2004386, TKIDN2004458, TKIDN2004748, TKIDN2005487, TKIDN2005721, TKIDN2005934, TKIDN2005947, TKIDN2005956, TKIDN2006525, TKIDN2006761, TKIDN2006852, TKIDN2007605, TKIDN2007667, TKIDN2007828, TKIDN2008176, TKIDN2008778, TKIDN2009092, TKIDN2009330, TKIDN2009481, TKIDN2009641, TKIDN2009794, TKIDN2009889, TKIDN2010200,

[1690] TKIDN2010232, TKIDN2010278, TKIDN2010602, TKIDN2010812, TKIDN2010934, TKIDN2011051, TKIDN2011160, TKIDN2011289, TKIDN2011324, TKIDN2012034, TKIDN2012771, TKIDN2012824, TKIDN2013134, TKIDN2013287, TKIDN2014570, TKIDN2014757, TKIDN2014771, TKIDN2014964, TKIDN2015025, TKIDN2015071, TKIDN2015161, TKIDN2015263, TKIDN2015285, TKIDN2015423, TKIDN2015788, TKIDN2016309, TKIDN2016399, TKIDN2016846, TKIDN2018926, TKIDN2019116, TLIVE2000023, TLIVE2000142, TLIVE2000292, TLIVE2000762, TLIVE2000979, TLIVE2001327, TLIVE2001616, TLIVE2001684, TLIVE2001828, TLIVE2001927, TLIVE2002046, TLIVE2002336, TLIVE2002338, TLIVE2002562, TLIVE2002690, TLIVE2002882, TLIVE2003197, TLIVE2003200, TLIVE2003225, TLIVE2003381,

[1691] TLIVE2003737, TLIVE2003961, TLIVE2003970, TLIVE2004110, TLIVE2004320, TLIVE2004331, TLIVE2004601, TLIVE2005180, TLIVE2005390, TLIVE2005516, TLIVE2005731, TLIVE2005866, TLIVE2006236, TLIVE2006359, TLIVE2006529, TLIVE2006621, TLIVE2006733, TLIVE2007000, TLIVE2007016, TLIVE2007132, TLIVE2007192, TLIVE2007528, TLIVE2007607, TLIVE2007736, TLIVE2007816, TLIVE2007919, TLIVE2008083, TLIVE2008213, TLIVE2008221, TLIVE2008229, TLIVE2008712, TLIVE2008797, TLIVE2009087, TLIVE2009163, TLIVE2009489, TLIVE2009541, TLUNG2000179, TOVAR2000476, TOVAR2000575, TOVAR2000649, TOVAR2000904, TOVAR2001281, TOVAR2001556, TOVAR2001730, TOVAR2002247, TOVAR2002514, TOVAR2002549, TOVAR2002800, TRACH1000011, TRACH1000018,

[1692] TRACH1000030, TRACH1000038, TRACH1000057, TRACH1000063, TRACH1000074, TRACH1000100, TRACH1000106, TRACH1000125, TRACH1000140, TRACH1000144, TRACH1000181, TRACH1000193, TRACH1000205, TRACH1000212, TRACH1000240, TRACH2000002, TRACH2000015, TRACH2000024, TRACH2000032, TRACH2000045, TRACH2000047, TRACH2000079, TRACH2000081, TRACH2000083, TRACH2000148, TRACH2000185, TRACH2000196, TRACH2000235, TRACH2000237, TRACH2000243, TRACH2000248, TRACH2000250, TRACH2000259, TRACH2000272, TRACH2000282, TRACH2000287, TRACH2000289, TRACH2000306, TRACH2000312, TRACH2000321, TRACH2000336, TRACH2000359, TRACH2000393, TRACH2000411, TRACH2000420, TRACH2000461, TRACH2000496, TRACH2000497, TRACH2000502, TRACH2000522,

[1693] TRACH2000660, TRACH2000665, TRACH2000675, TRACH2000677, TRACH2000702, TRACH2000703, TRACH2000767, TRACH2000775, TRACH2000780, TRACH2000807, TRACH2000862, TRACH2000873, TRACH2000894, TRACH2000898, TRACH2000920, TRACH2000923, TRACH2000926, TRACH2000944, TRACH2000959, TRACH2000972, TRACH2000981, TRACH2000986, TRACH2001037, TRACH2001060, TRACH2001085, TRACH2001101, TRACH2001109, TRACH2001121, TRACH2001147, TRACH2001154, TRACH2001188, TRACH2001192, TRACH2001249, TRACH2001275, TRACH2001314, TRACH2001335, TRACH2001339, TRACH2001341, TRACH2001347, TRACH2001395, TRACH2001400, TRACH2001403, TRACH2001416, TRACH2001428, TRACH2001432, TRACH2001443, TRACH2001463, TRACH2001474, TRACH2001523, TRACH2001525,

[1694] TRACH2001532, TRACH2001549, TRACH2001592, TRACH2001596, TRACH2001612, TRACH2001621, TRACH2001646, TRACH2001651, TRACH2001684, TRACH2001933, TRACH2001968, TRACH2001996, TRACH2002043, TRACH2002054, TRACH2002100, TRACH2002138, TRACH2002333, TRACH2002537, TRACH2002664, TRACH2002784, TRACH2002803, TRACH2002840, TRACH2002847, TRACH2002853, TRACH2002862, TRACH2002954, TRACH2002960, TRACH2002988, TRACH2003070, TRACH2003272, TRACH2003323, TRACH2003347, TRACH2003484, TRACH2003516, TRACH2003605, TRACH2003736, TRACH2003759, TRACH2003941, TRACH2004039, TRACH2004054, TRACH2004087, TRACH2004109, TRACH2004170, TRACH2004183, TRACH2004251, TRACH2004292, TRACH2004336, TRACH2004399, TRACH2004428, TRACH2004458,

[1695] TRACH2004521, TRACH2004570, TRACH2004845, TRACH2004887, TRACH2004950, TRACH2005004, TRACH2005017, TRACH2005066, TRACH2005159, TRACH2005314, TRACH2005444, TRACH2005541, TRACH2005666, TRACH2005698, TRACH2005710, TRACH2005720, TRACH2005769, TRACH2005796, TRACH2005811, TRACH2006015, TRACH2006049, TRACH2006097, TRACH2006194, TRACH2006327, TRACH2006331, TRACH2006378, TRACH2006387, TRACH2006528, TRACH2006670, TRACH2006762, TRACH2006866, TRACH2006870, TRACH2006918, TRACH2007059, TRACH2007324, TRACH2007358, TRACH2007399, TRACH2007483, TRACH2007542, TRACH2007577, TRACH2007674, TRACH2007676, TRACH2007688, TRACH2007733, TRACH2007754, TRACH2007816, TRACH2007894, TRACH2007969, TRACH2007988, TRACH2008081,

[1696] TRACH2008112, TRACH2008113, TRACH2008127, TRACH2008130, TRACH2008278, TRACH2008300, TRACH2008472, TRACH2008478, TRACH2008540, TRACH2008583, TRACH2008597, TRACH2008716, TRACH2008820, TRACH2008891, TRACH2008921, TRACH2009006, TRACH2009060, TRACH2009107, TRACH2009123, TRACH2009268, TRACH2009291, TRACH2009310, TRACH2009340, TRACH2009348, TRACH2009358, TRACH2009661, TRACH2009730, TRACH2009743, TRACH2009754, TRACH2009851, TRACH2009862, TRACH2009934, TRACH2010159, TRACH2010218, TRACH2010251, TRACH2010272, TRACH2010317, TRACH2010419, TRACH2010451, TRACH2010505, TRACH2010587, TRACH2010600, TRACH2010634, TRACH2010639, TRACH2010677, TRACH2010698, TRACH2010771, TRACH2010824, TRACH2010883, TRACH2010965,

[1697] TRACH2010974, TRACH2011057, TRACH2011093, TRACH2011113, TRACH2011290, TRACH2011293, TRACH2011302, TRACH2011500, TRACH2011574, TRACH2011894, TRACH2011956, TRACH2012000, TRACH2012138, TRACH2012242, TRACH2012370, TRACH2012376, TRACH2012387, TRACH2012497, TRACH2012536, TRACH2012562, TRACH2012742, TRACH2012811, TRACH2012823, TRACH2012918, TRACH2013081, TRACH2013123, TRACH2013265, TRACH2013369, TRACH2013450, TRACH2013495, TRACH2013552, TRACH2013585, TRACH2013671, TRACH2013726, TRACH2013902, TRACH2013928, TRACH2013982, TRACH2013991, TRACH2014018, TRACH2014045, TRACH2014046, TRACH2014077, TRACH2014082, TRACH2014124, TRACH2014268, TRACH2014284, TRACH2014337, TRACH2014356, TRACH2014371, TRACH2014442,

[1698] TRACH2014483, TRACH2014495, TRACH2014544, TRACH2014573, TRACH2014725, TRACH2014760, TRACH2014815, TRACH2014839, TRACH2014938, TRACH2014950, TRACH2014972, TRACH2014974, TRACH2014997, TRACH2015180, TRACH2015243, TRACH2015316, TRACH2015381, TRACH2015486, TRACH2015654, TRACH2015823, TRACH2015824, TRACH2015939, TRACH2015987, TRACH2016080, TRACH2016131, TRACH2016286, TRACH2016317, TRACH2016347, TRACH2016380, TRACH2016384, TRACH2016410, TRACH2016481, TRACH2016498, TRACH2016533, TRACH2016551, TRACH2016554, TRACH2016651, TRACH2016690, TRACH2016709, TRACH2016722, TRACH2016835, TRACH2016980, TRACH2017086, TRACH2017368, TRACH2017498, TRACH2017609, TRACH2017949, TRACH2017965, TRACH2017980, TRACH2018034,

[1699] TRACH2018084, TRACH2018262, TRACH2018273, TRACH2018278, TRACH2018317, TRACH2018345, TRACH2018380, TRACH2018446, TRACH2018449, TRACH2018512, TRACH2018646, TRACH2018663, TRACH2018718, TRACH2018835, TRACH2018882, TRACH2018914, TRACH2018950, TRACH2019024, TRACH2019046, TRACH2019080, TRACH2019151, TRACH2019154, TRACH2019176, TRACH2019248, TRACH2019309, TRACH2019425, TRACH2019473, TRACH2019602, TRACH2019661, TRACH2019672, TRACH2019673, TRACH2019844, TRACH2019879, TRACH2020048, TRACH2020336, TRACH2020525, TRACH2021398, TRACH2021622, TRACH2021635, TRACH2021964, TRACH2022042, TRACH2022113, TRACH2022253, TRACH2022425, TRACH2022553, TRACH2022649, TRACH2022839, TRACH2023246, TRACH2023299, TRACH2023306,

[1700] TRACH2023416, TRACH2023479, TRACH2023684, TRACH2023860, TRACH2023876, TRACH2024139, TRACH2024187, TRACH2024271, TRACH2024293, TRACH2024408, TRACH2024512, TRACH2024559, TRACH2024647, TRACH2024651, TRACH2024730, TRACH2024735, TRACH2024749, TRACH2024821, TRACH2025057, TRACH2025084, TRACH2025155, TRACH2025224, TRACH2025344, TRACH2025379, TRACH2025507, TRACH2025535, TRACH2025569, TRACH2025705, TRACH2025749, TRACH2025753, TRACH2025810, TRACH2025853, TRACH2025911, TRACH2025932, TRACH3000014, TRACH3000017, TRACH3000043, TRACH3000134, TRACH3000180, TRACH3000342, TRACH3000420, TRACH3000515, TRACH3000530, TRACH3000548, TRACH3000558, TRACH3000586, TRACH3000692, TRACH3000780, TRACH3000892, TRACH3000926,

[1701] TRACH3001119, TRACH3001443, TRACH3001550, TRACH3001759, TRACH3002064, TRACH3002107, TRACH3002168, TRACH3002188, TRACH3002192, TRACH3002245, TRACH3002293, TRACH3002533, TRACH3002561, TRACH3002567, TRACH3002605, TRACH3002650, TRACH3002752, TRACH3002866, TRACH3002871, TRACH3002876, TRACH3002890, TRACH3003009, TRACH3003037, TRACH3003357, TRACH3003379, TRACH3003547, TRACH3003586, TRACH3003683, TRACH3003780, TRACH3003805, TRACH3003832, TRACH3003872, TRACH3004068, TRACH3004113, TRACH3004288, TRACH3004303, TRACH3004412, TRACH3004424, TRACH3004456, TRACH3004537, TRACH3004596, TRACH3004651, TRACH3004652, TRACH3004671, TRACH3004721, TRACH3004747, TRACH3004760, TRACH3004783, TRACH3004786, TRACH3004840,

[1702] TRACH3004931, TRACH3004934, TRACH3005072, TRACH3005085, TRACH3005102, TRACH3005173, TRACH3005191, TRACH3005211, TRACH3005274, TRACH3005294, TRACH3005479, TRACH3005549, TRACH3005699, TRACH3005702, TRACH3005808, TRACH3005852, TRACH3005896, TRACH3006038, TRACH3006149, TRACH3006228, TRACH3006264, TRACH3006336, TRACH3006379, TRACH3006392, TRACH3006395, TRACH3006397, TRACH3006412, TRACH3006470, TRACH3006589, TRACH3006626, TRACH3006699, TRACH3006717, TRACH3006800, TRACH3006889, TRACH3006985, TRACH3007097, TRACH3007268, TRACH3007274, TRACH3007277, TRACH3007391, TRACH3007541, TRACH3007595, TRACH3007625, TRACH3007627, TRACH3007689, TRACH3007766, TRACH3007866, TRACH3007995, TRACH3008042, TRACH3008061,

[1703] TRACH3008093, TRACH3008201, TRACH3008508, TRACH3008535, TRACH3008629, TRACH3008632, TRACH3008688, TRACH3008697, TRACH3008713, TRACH3008887, TRACH3008902, TRACH3008990, TRACH3009001, TRACH3009008, TRACH3009059, TRACH3009061, TRACH3009148, TRACH3009455, TRACH3009701, TRACH3009715, TRACH3009894, TRACH3009956, TRACH3010079, TRACH3010167, TRACH3010331, TRACH3010342, TRACH3010382, TRACH3010757, TRACH3010901, TRACH3011004, TRACH3011082, TRACH3011184, TRACH3011282, TRACH3011313, TRACH3011454, TRACH3011485, TRACH3011503, TRACH3011538, TRACH3011542, TRACH3012106, TRACH3012161, TRACH3012232, TRACH3012261, TRACH3012445, TRACH3012460, TRACH3012659, TRACH3012718, TRACH3012864, TRACH3012891, TRACH3012942,

[1704] TRACH3013043, TRACH3013072, TRACH3013426, TRACH3013454, TRACH3013558, TRACH3013684, TRACH3013693, TRACH3013700, TRACH3013766, TRACH3013900, TRACH3013926, TRACH3014063, TRACH3014183, TRACH3014215, TRACH3014316, TRACH3014415, TRACH3014580, TRACH3014641, TRACH3014885, TRACH3015136, TRACH3015336, TRACH3015346, TRACH3015354, TRACH3015467, TRACH3015626, TRACH3015951, TRACH3016051, TRACH3016120, TRACH3016264, TRACH3016277, TRACH3016368, TRACH3016455, TRACH3016614, TRACH3016805, TRACH3016992, TRACH3017171, TRACH3017409, TRACH3017934, TRACH3018108, TRACH3018191, TRACH3018240, TRACH3018261, TRACH3018519, TRACH3018524, TRACH3018606, TRACH3018783, TRACH3018907, TRACH3018933, TRACH3018943, TRACH3019018,

[1705] TRACH3019058, TRACH3019142, TRACH3019290, TRACH3019347, TRACH3019370, TRACH3019447, TRACH3019598, TRACH3019621, TRACH3019662, TRACH3019807, TRACH3019924, TRACH3019977, TRACH3020137, TRACH3020410, TRACH3020563, TRACH3020605, TRACH3020750, TRACH3020769, TRACH3020928, TRACH3020930, TRACH3021023, TRACH3021066, TRACH3021212, TRACH3021335, TRACH3021373, TRACH3021544, TRACH3021778, TRACH3021834, TRACH3021883, TRACH3022170, TRACH3022198, TRACH3022296, TRACH3022482, TRACH3022732, TRACH3022758, TRACH3022875, TRACH3022910, TRACH3022960, TRACH3023063, TRACH3023203, TRACH3023242, TRACH3023373, TRACH3023516, TRACH3023752, TRACH3023945, TRACH3023960, TRACH3024020, TRACH3024081, TRACH3024342, TRACH3024423,

[1706] TRACH3024428, TRACH3024512, TRACH3024671, TRACH3024823, TRACH3025302, TRACH3025316, TRACH3025346, TRACH3025520, TRACH3026148, TRACH3026283, TRACH3026299, TRACH3026303, TRACH3026542, TRACH3026650, TRACH3026676, TRACH3026744, TRACH3026949, TRACH3027527, TRACH3027681, TRACH3027701, TRACH3027885, TRACH3028031, TRACH3028164, TRACH3028180, TRACH3028195, TRACH3028441, TRACH3028597, TRACH3028678, TRACH3028837, TRACH3028847, TRACH3028855, TRACH3029139, TRACH3029329, TRACH3029451, TRACH3029462, TRACH3029520, TRACH3029592, TRACH3029629, TRACH3029665, TRACH3029670, TRACH3029800, TRACH3030111, TRACH3030130, TRACH3030176, TRACH3030252, TRACH3030725, TRACH3030855, TRACH3030883, TRACH3031316, TRACH3031400,

[1707] TRACH3031463, TRACH3031479, TRACH3031518, TRACH3031660, TRACH3031678, TRACH3031936, TRACH3032044, TRACH3032065, TRACH3032150, TRACH3032372, TRACH3032480, TRACH3032570, TRACH3032755, TRACH3032827, TRACH3032873, TRACH3033535, TRACH3033680, TRACH3033868, TRACH3034145, TRACH3034414, TRACH3034488, TRACH3034680, TRACH3034731, TRACH3034745, TRACH3034762, TRACH3034903, TRACH3035187, TRACH3035199, TRACH3035235, TRACH3035451, TRACH3035482, TRACH3035526, TRACH3036004, TRACH3036103, TRACH3036193, TRACH3036207, TRACH3036278, TRACH3036309, TRACH3036456, TRACH3036609, TRACH3036638, TRACH3036683, TRACH3036750, TRACH3036792, TRACH3036843, TRACH3036897, TRACH3036932, TRACH3036942, TRACH3036997, TRACH3037063,

[1708] TRACH3037067, TRACH3037267, TRACH3037288, TRACH3037505, TRACH3037573, TRACH3037696, TRACH3037897, TRACH3038086, TRACH3038399, TSTOM1000135, TSTOM1000186, TSTOM2000139, TSTOM2000235, TSTOM2000315, TSTOM2000442, TSTOM2000553, TSTOM2000569, TSTOM2000588, TSTOM2001195, TSTOM2001274, TSTOM2001571, TSTOM2001996, TSTOM2002265, TSTOM2002505, TSTOM2002561, TSTOM2002611, TSTOM2002672, TSTOM2002682, TUTER1000014, TUTER1000122, TUTER1000137, TUTER2000057, TUTER2000283, TUTER2000425, TUTER2000904, TUTER2000916, TUTER2001286, TUTER2001341, TUTER2001387, TUTER2001433, TUTER2001461, TUTER2002028, TUTER2002074, TUTER2002158, TUTER2002228, TUTER2002323, TUTER2002356, TUTER2002729, UMVEN1000122, UMVEN1000143,

[1709] UMVEN1000156, UMVEN2000046, UMVEN2000069, UMVEN2000121, UMVEN2000152, UMVEN2000354, UMVEN2000453, UTERU1000008, UTERU1000015, UTERU1000024, UTERU1000031, UTERU1000032, UTERU1000057, UTERU1000065, UTERU1000077, UTERU1000093, UTERU1000096, UTERU1000106, UTERU1000109, UTERU1000131, UTERU1000138, UTERU1000148, UTERU1000160, UTERU1000182, UTERU1000183, UTERU1000187, UTERU1000192, UTERU1000249, UTERU1000337, UTERU1000339, UTERU1000384, UTERU2000023, UTERU2000047, UTERU2000074, UTERU2000099, UTERU2000154, UTERU2000197, UTERU2000218, UTERU2000238, UTERU2000243, UTERU2000260, UTERU2000300, UTERU2000329, UTERU2000332, UTERU2000338, UTERU2000349, UTERU2000377, UTERU2000393, UTERU2000418, UTERU2000424,

[1710] UTERU2000465, UTERU2000485, UTERU2000517, UTERU2000524, UTERU2000537, UTERU2000539, UTERU2000541, UTERU2000542, UTERU2000546, UTERU2000550, UTERU2000569, UTERU2000607, UTERU2000629, UTERU2000649, UTERU2000663, UTERU2000696, UTERU2000794, UTERU2000830, UTERU2000844, UTERU2000922, UTERU2000925, UTERU2001024, UTERU2001110, UTERU2001176, UTERU2001281, UTERU2001389, UTERU2001409, UTERU2001412, UTERU2001504, UTERU2001658, UTERU2001747, UTERU2001876, UTERU2002001, UTERU2002011, UTERU2002176, UTERU2002198, UTERU2002332, UTERU2002410, UTERU2002473, UTERU2002547, UTERU2002693, UTERU2002733, UTERU2002736, UTERU2002737, UTERU2002826, UTERU2002841, UTERU2002964, UTERU2002993, UTERU2003035, UTERU2003057,

[1711] UTERU2003126, UTERU2003135, UTERU2003321, UTERU2003399, UTERU2003411, UTERU2003456, UTERU2003577, UTERU2003704, UTERU2003926, UTERU2003973, UTERU2004015, UTERU2004037, UTERU2004039, UTERU2004061, UTERU2004073, UTERU2004163, UTERU2004197, UTERU2004299, UTERU2004461, UTERU2004520, UTERU2004564, UTERU2004664, UTERU2004688, UTERU2004698, UTERU2004807, UTERU2004861, UTERU2004929, UTERU2005004, UTERU2005050, UTERU2005069, UTERU2005074, UTERU2005179, UTERU2005292, UTERU2005346, UTERU2005354, UTERU2005446, UTERU2005449, UTERU2005450, UTERU2005533, UTERU2005601, UTERU2005664, UTERU2005822, UTERU2005903, UTERU2005905, UTERU2006103, UTERU2006115, UTERU2006137, UTERU2006182, UTERU2006400, UTERU2006412,

[1712] UTERU2006429, UTERU2006486, UTERU2006524, UTERU2006547, UTERU2006568, UTERU2006593, UTERU2006643, UTERU2006651, UTERU2006705, UTERU2006899, UTERU2007004, UTERU2007075, UTERU2007081, UTERU2007128, UTERU2007267, UTERU2007444, UTERU2007499, UTERU2007639, UTERU2007724, UTERU2007924, UTERU2007942, UTERU2008018, UTERU2008019, UTERU2008027, UTERU2008040, UTERU2008077, UTERU2008130, UTERU2008347, UTERU2008426, UTERU2008516, UTERU2008561, UTERU2008653, UTERU2008705, UTERU2008707, UTERU2008747, UTERU2008785, UTERU2008845, UTERU2008901, UTERU2008930, UTERU2008938, UTERU2008939, UTERU2008962, UTERU2009094, UTERU2009120, UTERU2009131, UTERU2009147, UTERU2009206, UTERU2009283, UTERU2009335, UTERU2009414,

[1713] UTERU2009435, UTERU2009483, UTERU2009510, UTERU2009538, UTERU2009540, UTERU2009776, UTERU2009904, UTERU2009951, UTERU2009972, UTERU2010115, UTERU2010124, UTERU2010164, UTERU2010226, UTERU2010231, UTERU2010304, UTERU2010320, UTERU2010431, UTERU2010525, UTERU2010651, UTERU2010724, UTERU2010747, UTERU2011195, UTERU2011199, UTERU2011261, UTERU2011287, UTERU2011410, UTERU2011574, UTERU2011621, UTERU2011657, UTERU2011741, UTERU2011806, UTERU2011811, UTERU2011897, UTERU2011906, UTERU2011962, UTERU2011968, UTERU2012031, UTERU2012101, UTERU2012114, UTERU2012230, UTERU2012252, UTERU2012286, UTERU2012333, UTERU2012407, UTERU2012526, UTERU2012581, UTERU2012610, UTERU2012615, UTERU2012688, UTERU2012703,

[1714] UTERU2012715, UTERU2012741, UTERU2012767, UTERU2012786, UTERU2012856, UTERU2012890, UTERU2012938, UTERU2012976, UTERU2013048, UTERU2013078, UTERU2013231, UTERU2013262, UTERU2013280, UTERU2013322, UTERU2013483, UTERU2013491, UTERU2013502, UTERU2013586, UTERU2013926, UTERU2013976, UTERU2014001, UTERU2014024, UTERU2014167, UTERU2014223, UTERU2014398, UTERU2014464, UTERU2014548, UTERU2014601, UTERU2014631, UTERU2014668, UTERU2014678, UTERU2014728, UTERU2014898, UTERU2014998, UTERU2015062, UTERU2015087, UTERU2015190, UTERU2015198, UTERU2015202, UTERU2015405, UTERU2015640, UTERU2015653, UTERU2015830, UTERU2015880, UTERU2016147, UTERU2016157, UTERU2016426, UTERU2016464, UTERU2016669, UTERU2016757,

[1715] UTERU2016761, UTERU2016799, UTERU2016822, UTERU2016896, UTERU2016902, UTERU2016979, UTERU2016981, UTERU2017123, UTERU2017303, UTERU2017421, UTERU2017492, UTERU2017613, UTERU2017623, UTERU2017632, UTERU2017761, UTERU2017762, UTERU2017810, UTERU2017988, UTERU2018127, UTERU2018180, UTERU2018200, UTERU2018333, UTERU2018364, UTERU2018514, UTERU2018522, UTERU2018523, UTERU2018544, UTERU2018609, UTERU2018674, UTERU2018712, UTERU2018784, UTERU2018789, UTERU2018811, UTERU2018867, UTERU2018881, UTERU2018884, UTERU2018955, UTERU2019038, UTERU2019096, UTERU2019163, UTERU2019257, UTERU2019453, UTERU2019491, UTERU2019534, UTERU2019681, UTERU2019706, UTERU2019710, UTERU2019940, UTERU2019959, UTERU2019964,

[1716] UTERU2020226, UTERU2020242, UTERU2020292, UTERU2020351, UTERU2020491, UTERU2020718, UTERU2021163, UTERU2021380, UTERU2021649, UTERU2021820, UTERU2022020, UTERU2022773, UTERU2022955, UTERU2022981, UTERU2023039, UTERU2023045, UTERU2023175, UTERU2023262, UTERU2023550, UTERU2023651, UTERU2023687, UTERU2023712, UTERU2023941, UTERU2024002, UTERU2024042, UTERU2024141, UTERU2024481, UTERU2024656, UTERU2024758, UTERU2024820, UTERU2024881, UTERU2024969, UTERU2025025, UTERU2025041, UTERU2025301, UTERU2025366, UTERU2025415, UTERU2025579, UTERU2025645, UTERU2025891, UTERU2026025, UTERU2026090, UTERU2026142, UTERU2026203, UTERU2026775, UTERU2027023, UTERU2027369, UTERU2027591, UTERU2027616, UTERU2027941,

[1717] UTERU2028377, UTERU2028734, UTERU2029503, UTERU2029660, UTERU2029742, UTERU2029953, UTERU2030213, UTERU2030270, UTERU2030280, UTERU2031060, UTERU2031084, UTERU2031268, UTERU2031295, UTERU2031521, UTERU2031611, UTERU2031703, UTERU2031834, UTERU2031851, UTERU2032075, UTERU2032220, UTERU2032279, UTERU2032726, UTERU2033172, UTERU2033375, UTERU2033382, UTERU2033420, UTERU2033530, UTERU2033577, UTERU2034053, UTERU2034147, UTERU2034695, UTERU2035114, UTERU2035187, UTERU2035231, UTERU2035306, UTERU2035323, UTERU2035328, UTERU2035331, UTERU2035452, UTERU2035469, UTERU2035503, UTERU2035745, UTERU2035908, UTERU2035926, UTERU2035978, UTERU2036089, UTERU2036347, UTERU2036507, UTERU2036512, UTERU2036530,

[1718] UTERU2036623, UTERU2036690, UTERU2037224, UTERU2037361, UTERU2037423, UTERU2037577, UTERU2037674, UTERU2037791, UTERU2037843, UTERU2038171, UTERU2038251, UTERU3000226, UTERU3000298, UTERU3000402, UTERU3000645, UTERU3000665, UTERU3000670, UTERU3000727, UTERU3000738, UTERU3000828, UTERU3000844, UTERU3000899, UTERU3000959, UTERU3001029, UTERU3001053, UTERU3001059, UTERU3001158, UTERU3001240, UTERU3001394, UTERU3001542, UTERU3001558, UTERU3001571, UTERU3001585, UTERU3001632, UTERU3001652, UTERU3001766, UTERU3001988, UTERU3002209, UTERU3002218, UTERU3002383, UTERU3002600, UTERU3002620, UTERU3002667, UTERU3002701, UTERU3002731, UTERU3002768, UTERU3002786, UTERU3002993, UTERU3003116, UTERU3003135,

[1719] UTERU3003178, UTERU3003465, UTERU3003495, UTERU3003523, UTERU3003660, UTERU3003774, UTERU3003776, UTERU3004384, UTERU3004418, UTERU3004477, UTERU3004523, UTERU3004616, UTERU3004635, UTERU3004709, UTERU3004938, UTERU3004992, UTERU3005049, UTERU3005159, UTERU3005205, UTERU3005230, UTERU3005264, UTERU3005422, UTERU3005460, UTERU3005536, UTERU3005585, UTERU3005767, UTERU3005907, UTERU3005970, UTERU3006008, UTERU3006228, UTERU3006308, UTERU3006538, UTERU3006640, UTERU3006687, UTERU3006720, UTERU3006798, UTERU3006884, UTERU3007021, UTERU3007104, UTERU3007108, UTERU3007134, UTERU3007419, UTERU3007640, UTERU3007731, UTERU3007913, UTERU3008280, UTERU3008463, UTERU3008660, UTERU3008671, UTERU3008722,

[1720] UTERU3008917, UTERU3009259, UTERU3009490, UTERU3009517, UTERU3009690, UTERU3009775, UTERU3009871, UTERU3009979, UTERU3009987, UTERU3010029, UTERU3010409, UTERU3010526, UTERU3010604, UTERU3010892, UTERU3010919, UTERU3011063, UTERU3011092, UTERU3011273, UTERU3011398, UTERU3011558, UTERU3011579, UTERU3011795, UTERU3011837, UTERU3012293, UTERU3012414, UTERU3012476, UTERU3012599, UTERU3012999, UTERU3013167, UTERU3013302, UTERU3013781, UTERU3014274, UTERU3014446, UTERU3014611, UTERU3014647, UTERU3014791, UTERU3014906, UTERU3015011, UTERU3015086, UTERU3015299, UTERU3015412, UTERU3015500, UTERU3015647, UTERU3015844, UTERU3016070, UTERU3016273, UTERU3016274, UTERU3016308, UTERU3016789, UTERU3017176,

UTERU3017441, UTERU3017626, UTERU3017995, UTERU3018154, UTERU3018172, UTERU3018255, UTERU3018616, UTERU3018711, UTERU3019078

[1721] Of the 17,176 genes that include the cDNAs of the present invention, genes whose expression levels were high enough to detect in each of the NCRRM, NCRRP, NESOP, NETRP, NHNPC, and NOVAR libraries were analyzed for expression frequency. The analysis results are described below. Each is a relative value, where the expression level over all tissues is taken as 100. The larger this value, the greater the level of expression.

TABLE 34

| Clone Name | NCRRM | NCRRP | NESOP | NETRP | NHNPC | NOVAR |
|---|---|---|---|---|---|---|
| 3NB692000281 | 0 | 0 | 4.684 | 0 | 5.492 | 0 |
| 3NB692000374 | 0 | 0 | 0 | 0 | 27.059 | 0 |
| 3NB692000912 | 0 | 0 | 0 | 0 | 11.723 | 0 |
| 3NB692001334 | 0 | 0 | 0 | 5.204 | 6.697 | 0 |
| 3NB692001339 | 0 | 0 | 49.901 | 0 | 0 | 0 |
| ADRGL2000006 | 0 | 0 | 0 | 0 | 0 | 24.778 |
| ADRGL2009273 | 0 | 0 | 29.556 | 0 | 0 | 0 |
| ASTRO1000096 | 0 | 0 | 0 | 65.097 | 0 | 0 |
| ASTRO2000014 | 0 | 35.063 | 0 | 0 | 0 | 0 |
| ASTRO2000801 | 86.606 | 0 | 0 | 0 | 0 | 0 |
| ASTRO2002202 | 0 | 0 | 0 | 0 | 0 | 54.926 |
| ASTRO2007047 | 0 | 0 | 0 | 0 | 52.143 | 0 |
| ASTRO2008216 | 0 | 0 | 0 | 20.620 | 0 | 0 |
| ASTRO2008508 | 0 | 0 | 0 | 58.115 | 0 | 0 |
| ASTRO2016491 | 0 | 0 | 0 | 3.254 | 0 | 0 |
| BGGI12000054 | 0 | 0 | 5.011 | 1.522 | 0 | 0 |
| BGGI12000616 | 0 | 0 | 0 | 0 | 0 | 21.310 |
| BLADE2002744 | 0 | 0 | 0 | 15.772 | 0 | 0 |
| BNGH42000360 | 0 | 0 | 0 | 0 | 0 | 3.749 |
| BNGH42007709 | 0 | 0 | 0 | 1.487 | 5.743 | 0 |
| BRACE1000131 | 0 | 0 | 0 | 0 | 25.988 | 0 |
| BRACE2001692 | 0 | 0 | 12.883 | 0 | 0 | 0 |
| BRACE2002677 | 0 | 0 | 0 | 12.475 | 0 | 0 |
| BRACE2002685 | 0 | 0 | 72.930 | 0 | 0 | 0 |
| BRACE2003172 | 0 | 0 | 0 | 0 | 0 | 7.746 |
| BRACE2003827 | 0 | 0 | 0 | 0 | 0 | 20.882 |
| BRACE2005433 | 0 | 0 | 0 | 74.625 | 0 | 0 |
| BRACE2005875 | 0 | 0 | 91.597 | 0 | 0 | 0 |
| BRACE2006344 | 0 | 0 | 76.055 | 0 | 0 | 0 |
| BRACE2006397 | 0 | 0 | 0 | 0 | 7.365 | 0 |
| BRACE2006900 | 0 | 0 | 0 | 3.325 | 0 | 0 |
| BRACE2007109 | 0 | 0 | 20.309 | 0 | 0 | 0 |
| BRACE2008097 | 0 | 0 | 0 | 31.024 | 0 | 0 |
| BRACE2008385 | 0 | 0 | 0 | 53.984 | 0 | 0 |
| BRACE2009517 | 0 | 0 | 0 | 17.526 | 0 | 0 |
| BRACE2016335 | 0 | 0 | 0 | 90.103 | 0 | 0 |
| BRACE2044949 | 0 | 0 | 0 | 0 | 97.234 | 0 |
| BRACE3019941 | 0 | 0 | 0 | 0 | 72.896 | 0 |
| BRALZ2009482 | 0 | 31.729 | 0 | 0 | 0 | 8.857 |
| BRAMY2006397 | 0 | 0 | 0 | 18.146 | 0 | 0 |
| BRAMY2020427 | 0 | 0 | 0 | 0 | 0 | 14.113 |
| BRAMY2023719 | 0 | 0 | 0 | 38.634 | 0 | 0 |
| BRAMY2027739 | 0 | 0 | 0 | 0 | 33.576 | 0 |
| BRAMY2036387 | 0 | 0 | 0 | 86.510 | 0 | 0 |
| BRAMY2040095 | 0 | 0 | 0 | 15.462 | 0 | 8.147 |
| BRAMY2047420 | 0 | 0 | 21.553 | 0 | 0 | 0 |
| BRAWH1000040 | 0 | 0 | 0 | 0 | 17.168 | 0 |
| BRAWH1000093 | 0 | 0 | 0 | 11.921 | 0 | 0 |
| BRAWH2000588 | 0 | 0 | 0 | 8.107 | 0 | 0 |
| BRAWH2001092 | 0 | 0 | 0 | 0 | 4.385 | 0 |
| BRAWH2007800 | 0 | 0 | 0 | 30.357 | 0 | 0 |
| BRAWH2008577 | 0 | 0 | 0 | 22.974 | 0 | 0 |
| BRAWH2009490 | 0 | 0 | 0 | 0 | 84.417 | 0 |
| BRAWH2012161 | 0 | 0 | 81.923 | 0 | 0 | 0 |
| BRAWH2016269 | 0 | 0 | 0 | 0 | 32.893 | 0 |
| BRAWH2017685 | 0 | 0 | 0 | 0 | 25.325 | 0 |
| BRAWH2018526 | 26.126 | 0 | 0 | 0 | 23.035 | 0 |
| BRAWH3002853 | 0 | 0 | 0 | 4.780 | 0 | 0 |
| BRCAN2009432 | 0 | 0 | 0 | 8.509 | 0 | 0 |
| BRHIP2000534 | 0 | 0 | 0 | 8.847 | 0 | 8.158 |
| BRHIP2010593 | 0 | 0 | 0 | 0 | 0 | 83.465 |
| BRHIP2011491 | 0 | 0 | 0 | 0 | 0 | 19.701 |
| BRHIP2019186 | 0 | 0 | 0 | 0 | 0 | 47.038 |
| BRHIP3007223 | 0 | 0 | 42.899 | 0 | 0 | 0 |
| BRHIP3009753 | 98.813 | 0 | 0 | 0 | 0 | 0 |
| BRHIP3018784 | 0 | 0 | 0 | 67.175 | 0 | 0 |
| BRSSN2015238 | 0 | 0 | 0 | 22.121 | 0 | 0 |
| BRSTN1000083 | 0 | 54.516 | 0 | 0 | 0 | 0 |
| BRSTN2012069 | 0 | 0 | 1.409 | 0 | 0.472 | 5.861 |
| BRSTN2012174 | 0 | 0 | 0 | 0 | 5.046 | 14.462 |
| CTONG1000010 | 0 | 0 | 0 | 41.893 | 0 | 0 |
| CTONG1000052 | 0 | 0 | 0 | 3.904 | 0 | 0 |
| CTONG1000094 | 33.063 | 0 | 0 | 0 | 0 | 0 |
| CTONG1000218 | 0 | 0 | 0 | 3.111 | 0 | 0 |
| CTONG2002744 | 0 | 0 | 12.530 | 0 | 0 | 0 |
| CTONG2007500 | 0 | 0 | 0 | 4.860 | 0 | 0 |
| CTONG2012452 | 0 | 0 | 0 | 0 | 8.885 | 0 |
| CTONG2015091 | 0 | 0 | 0 | 0 | 20.262 | 0 |
| CTONG2016185 | 0 | 0 | 0 | 16.799 | 0 | 0 |
| CTONG2017604 | 0 | 0 | 0 | 77.625 | 0 | 0 |
| CTONG2019788 | 0 | 0 | 0 | 0 | 0 | 72.878 |
| CTONG2028124 | 0 | 0 | 0 | 9.743 | 0 | 0 |
| CTONG2028208 | 0 | 0 | 0 | 22.882 | 0 | 0 |
| CTONG3002412 | 0 | 0 | 0 | 69.150 | 0 | 0 |
| CTONG3008894 | 0 | 0 | 0 | 4.697 | 0 | 0 |
| CTONG3009028 | 0 | 0 | 0 | 20.798 | 0 | 0 |
| D30ST3000169 | 0 | 0 | 0 | 3.162 | 0 | 0 |
| D90ST2003762 | 0 | 0 | 0 | 14.084 | 0 | 0 |
| DFNES2000268 | 0 | 0 | 0 | 14.271 | 0 | 0 |
| DFNES2000443 | 57.628 | 0 | 0 | 0 | 0 | 0 |
| FCBBF1000294 | 0 | 0 | 0 | 6.957 | 0 | 0 |
| FCBBF2000087 | 0 | 0 | 61.380 | 0 | 0 | 0 |
| FCBBF3001470 | 0 | 0 | 28.883 | 0 | 0 | 0 |
| FCBBF3003800 | 0 | 0 | 0 | 0 | 9.828 | 0 |
| FCBBF3004041 | 0 | 0 | 0 | 0 | 93.106 | 0 |
| FCBBF3009541 | 0 | 35.198 | 0 | 0 | 0 | 0 |
| FEBRA2000733 | 0 | 0 | 0 | 1.089 | 0 | 0 |
| FEBRA2001715 | 0 | 0 | 0 | 0 | 24.879 | 0 |
| FEBRA2001745 | 0 | 0 | 0 | 0 | 31.268 | 29.870 |
| FEBRA2002933 | 0 | 31.597 | 0 | 0 | 0 | 0 |
| FEBRA2003100 | 55.911 | 0 | 0 | 0 | 0 | 0 |
| FEBRA2003541 | 0 | 0 | 0 | 0 | 38.072 | 0 |
| FEBRA2003726 | 84.540 | 0 | 0 | 0 | 0 | 0 |
| FEBRA2003930 | 0 | 0 | 38.240 | 0 | 0 | 0 |
| FEBRA2005734 | 0 | 0 | 0 | 5.456 | 21.067 | 0 |
| FEBRA2008087 | 0 | 0 | 0 | 0 | 0 | 4.272 |
| FEBRA2008583 | 0 | 0 | 0 | 0 | 6.596 | 0 |
| FEBRA2009437 | 0 | 0 | 0 | 0 | 90.916 | 0 |
| FEBRA2013570 | 0 | 0 | 0 | 72.161 | 0 | 0 |
| FEBRA2018476 | 0 | 0 | 0 | 7.060 | 0 | 0 |
| FEBRA2019711 | 0 | 0 | 0 | 13.664 | 0 | 0 |
| FELIV1000153 | 0 | 0 | 3.509 | 0 | 0 | 3.931 |
| HCHON2000056 | 0 | 0 | 0 | 5.498 | 7.077 | 0 |
| HCHON2000087 | 0 | 0 | 0 | 3.998 | 0 | 0 |
| HCHON2000295 | 0 | 0 | 27.959 | 0 | 0 | 0 |
| HCHON2000815 | 0 | 0 | 0 | 18.046 | 0 | 0 |
| HCHON2001359 | 0 | 0 | 0 | 5.501 | 0 | 0 |
| HCHON2004002 | 0 | 0 | 0 | 5.073 | 0 | 0 |
| HEART1000173 | 0 | 0 | 0 | 0 | 65.485 | 0 |
| HHDPC1000114 | 0 | 0 | 15.460 | 0 | 0 | 0 |
| HHDPC2000104 | 0 | 0 | 0 | 0 | 0 | 44.094 |
| HHDPC2000456 | 0 | 0 | 0 | 10.033 | 0 | 0 |
| HHDPC2003439 | 0 | 0 | 0 | 1.643 | 0 | 0 |
| HHDPC2003983 | 0 | 0 | 0 | 0 | 0 | 6.637 |
| HLUNG2000501 | 0 | 0 | 18.252 | 0 | 0 | 0 |
| HLUNG2001439 | 74.869 | 0 | 0 | 0 | 0 | 0 |
| HLUNG2002465 | 0 | 0 | 0 | 31.261 | 0 | 0 |
| HLUNG2003778 | 0 | 0 | 0 | 33.333 | 0 | 0 |
| HLUNG2013784 | 0 | 0 | 0 | 0 | 87.184 | 0 |
| HLUNG2017546 | 0 | 0 | 0 | 0 | 0 | 84.114 |
| HSYRA1000119 | 0 | 0 | 0 | 0 | 11.472 | 0 |
| HSYRA2000159 | 0 | 0 | 0 | 5.454 | 0 | 0 |
| HSYRA2001225 | 62.759 | 0 | 0 | 0 | 0 | 0 |
| HSYRA2001476 | 0 | 0 | 0 | 6.239 | 0 | 0 |
| HSYRA2001595 | 0 | 0 | 0 | 0 | 14.213 | 0 |
| HSYRA2001621 | 0 | 0 | 3.904 | 0 | 0 | 0 |
| IMR321000210 | 0 | 0 | 0 | 0 | 0 | 24.159 |
| IMR321000219 | 0 | 0 | 0 | 1.814 | 0 | 0 |
| IMR321000253 | 0 | 0 | 0 | 0 | 25.412 | 0 |
| IMR322000121 | 0 | 0 | 0 | 14.407 | 27.814 | 0 |
| IMR322000223 | 0 | 0 | 0 | 0 | 16.987 | 16.228 |
| IMR322001218 | 0 | 0 | 0 | 0 | 27.932 | 26.683 |
| IMR322001600 | 13.670 | 0 | 0 | 0 | 0 | 0 |
| KIDNE2001467 | 0 | 22.254 | 0 | 0 | 6.503 | 0 |
| KIDNE2003941 | 0 | 0 | 0 | 0 | 12.585 | 0 |
| KIDNE2007328 | 0 | 0 | 0 | 5.717 | 0 | 0 |
| KIDNE2007352 | 0 | 0 | 0 | 2.686 | 0 | 9.908 |
| KIDNE2007944 | 0 | 0 | 0 | 64.955 | 0 | 0 |
| KIDNE2012440 | 0 | 0 | 0 | 0 | 44.165 | 0 |
| KIDNE2014290 | 0 | 0 | 0 | 9.060 | 0 | 0 |
| LIVER1000132 | 0 | 0 | 0 | 0 | 0 | 11.927 |
| MAMGL1000032 | 0 | 0 | 0 | 2.082 | 0 | 3.840 |
| MESAN2000267 | 0 | 0 | 0 | 0 | 10.217 | 0 |
| MESAN2002724 | 0 | 0 | 0 | 5.959 | 0 | 0 |
| MESAN2003622 | 0 | 0 | 0 | 0 | 0 | 14.324 |
| MESAN2006563 | 0 | 0 | 0 | 0 | 34.458 | 0 |
| MESAN2017373 | 0 | 0 | 0 | 0 | 0 | 83.483 |
| NB9N42000342 | 0 | 0 | 0 | 4.659 | 0 | 0 |
| NCRRP1000129 | 0 | 100 | 0 | 0 | 0 | 0 |
| NESOP1000010 | 0 | 0 | 100 | 0 | 0 | 0 |
| NESOP1000087 | 0 | 0 | 85.774 | 0 | 0 | 0 |
| NESOP1000108 | 0 | 0 | 100 | 0 | 0 | 0 |
| NESOP2000231 | 0 | 0 | 100 | 0 | 0 | 0 |
| NESOP2000452 | 0 | 0 | 100 | 0 | 0 | 0 |
| NESOP2000499 | 0 | 0 | 100 | 0 | 0 | 0 |
| NESOP2000504 | 0 | 0 | 96.229 | 0 | 0 | 0 |
| NESOP2000744 | 0 | 0 | 100 | 0 | 0 | 0 |
| NESOP2001144 | 0 | 0 | 100 | 0 | 0 | 0 |
| NESOP2001433 | 0 | 0 | 100 | 0 | 0 | 0 |
| NESOP2001656 | 0 | 0 | 85.181 | 0 | 0 | 0 |
| NESOP2001694 | 0 | 0 | 100 | 0 | 0 | 0 |
| NESOP2001752 | 0 | 0 | 96.772 | 0 | 0 | 0 |
| NESOP2002352 | 0 | 0 | 100 | 0 | 0 | 0 |
| NESOP2002418 | 0 | 0 | 100 | 0 | 0 | 0 |
| NESOP2002487 | 0 | 0 | 100 | 0 | 0 | 0 |
| NESOP2002738 | 0 | 0 | 100 | 0 | 0 | 0 |
| NESOP2002780 | 0 | 0 | 100 | 0 | 0 | 0 |
| NETRP1000034 | 0 | 0 | 0 | 100 | 0 | 0 |
| NETRP1000082 | 0 | 0 | 0 | 100 | 0 | 0 |
| NETRP2000086 | 0 | 0 | 0 | 100 | 0 | 0 |
| NETRP2000182 | 0 | 0 | 0 | 100 | 0 | 0 |
| NETRP2000439 | 0 | 0 | 0 | 100 | 0 | 0 |
| NHNPC1000034 | 0 | 0 | 0 | 0 | 96.118 | 0 |
| NHNPC1000037 | 0 | 0 | 0 | 0 | 100 | 0 |
| NHNPC1000084 | 0 | 0 | 0 | 0 | 100 | 0 |
| NHNPC1000101 | 0 | 0 | 0 | 0 | 100 | 0 |
| NHNPC1000124 | 0 | 0 | 0 | 0 | 100 | 0 |
| NHNPC2000062 | 0 | 0 | 0 | 0 | 52.287 | 0 |
| NHNPC2000187 | 0 | 0 | 0 | 2.924 | 11.291 | 0 |
| NHNPC2000206 | 0 | 0 | 0 | 4.437 | 17.134 | 0 |
| NHNPC2000212 | 0 | 0 | 0 | 0 | 86.954 | 0 |
| NHNPC2000606 | 0 | 0 | 0 | 0 | 100 | 0 |
| NHNPC2000877 | 0 | 0 | 0 | 0 | 100 | 0 |
| NHNPC2001108 | 0 | 0 | 0 | 0 | 97.447 | 0 |
| NHNPC2001223 | 0 | 0 | 0 | 0 | 93.106 | 0 |
| NHNPC2001312 | 0 | 0 | 0 | 0 | 95.257 | 0 |
| NHNPC2001816 | 0 | 0 | 0 | 0 | 100 | 0 |
| NHNPC2001931 | 0 | 0 | 0 | 0 | 11.907 | 0 |
| NHNPC2002565 | 0 | 0 | 0 | 0 | 100 | 0 |
| NHNPC2002749 | 0 | 0 | 0 | 0 | 100 | 0 |
| NOVAR1000015 | 0 | 0 | 0 | 0 | 0 | 72.374 |
| NOVAR1000091 | 0 | 0 | 0 | 0 | 0 | 46.155 |
| NOVAR1000102 | 0 | 0 | 0 | 0 | 0 | 99.094 |
| NOVAR2000038 | 0 | 0 | 0 | 0 | 0 | 14.805 |
| NOVAR2000136 | 0 | 0 | 0 | 0 | 0 | 100 |
| NOVAR2000352 | 0 | 0 | 0 | 0 | 0 | 100 |
| NOVAR2000412 | 0 | 0 | 0 | 0 | 0 | 100 |
| NOVAR2000710 | 0 | 0 | 0 | 0 | 0 | 83.961 |
| NOVAR2000783 | 0 | 0 | 0 | 0 | 0 | 90.145 |
| NOVAR2000962 | 0 | 0 | 0 | 0 | 0 | 100 |
| NOVAR2001108 | 0 | 0 | 0 | 0 | 0 | 100 |
| NOVAR2001620 | 0 | 0 | 0 | 0 | 0 | 100 |
| NOVAR2001783 | 0 | 0 | 0 | 0 | 0 | 95.973 |
| NOVAR2001876 | 0 | 0 | 0 | 0 | 0 | 100 |
| NOVAR2002039 | 0 | 0 | 0 | 0 | 0 | 96.620 |
| NT2NE2000260 | 0 | 0 | 0 | 3.903 | 3.014 | 0 |
| NT2NE2000575 | 0 | 0 | 5.115 | 0 | 0 | 0 |
| NT2NE2000963 | 0 | 0 | 0 | 0 | 0 | 10.935 |
| NT2NE2001000 | 0 | 0 | 0 | 5.561 | 0 | 0 |
| NT2NE2002870 | 0 | 0 | 0 | 0 | 56.954 | 0 |
| NT2RI2000421 | 0 | 0 | 0 | 0 | 75.923 | 0 |
| NT2RI2000727 | 0 | 0 | 0 | 1.672 | 0 | 0 |
| NT2RI2001230 | 65.484 | 0 | 0 | 0 | 0 | 0 |
| NT2RI2001342 | 0 | 0 | 33.584 | 0 | 0 | 0 |
| NT2RI2001540 | 0 | 0 | 1.211 | 0 | 0 | 2.714 |
| NT2RI2002091 | 0 | 0 | 0 | 0 | 0.669 | 0.639 |
| NT2RI2002316 | 0 | 0 | 17.058 | 5.181 | 0 | 0 |
| NT2RI2003304 | 0 | 0 | 0 | 0 | 6.548 | 0 |
| NT2RI2003481 | 0 | 0 | 41.086 | 0 | 0 | 0 |
| NT2RI2003487 | 0 | 0 | 0 | 0 | 93.211 | 0 |
| NT2RI2003556 | 32.299 | 0 | 0 | 0 | 9.492 | 0 |
| NT2RI2003695 | 0 | 0 | 0 | 5.088 | 0 | 0 |
| NT2RI2003738 | 0 | 0 | 0 | 1.130 | 0 | 0 |
| NT2RI2004284 | 0 | 0 | 0 | 0 | 0 | 38.313 |
| NT2RI2005150 | 0 | 0 | 0 | 0 | 34.386 | 0 |
| NT2RI2005368 | 0 | 0 | 0 | 0 | 0 | 48.158 |
| NT2RI2005814 | 0 | 0 | 0 | 0 | 32.496 | 0 |
| NT2RI2006072 | 64.954 | 0 | 0 | 0 | 0 | 0 |
| NT2RI2006127 | 0 | 0 | 0 | 78.050 | 0 | 0 |
| NT2RI2006271 | 0 | 0 | 0 | 0 | 69.688 | 0 |
| NT2RI2006856 | 0 | 0 | 9.966 | 0 | 0 | 0 |
| NT2RI2007084 | 0 | 0 | 0 | 0 | 27.144 | 0 |
| NT2RI2007133 | 33.304 | 33.495 | 0 | 0 | 0 | 0 |
| NT2RI2007148 | 80.174 | 0 | 0 | 0 | 0 | 0 |
| NT2RI2007384 | 0 | 0 | 9.214 | 0 | 0 | 0 |
| NT2RI2007879 | 0 | 0 | 0 | 10.256 | 0 | 0 |
| NT2RI2007884 | 0 | 0 | 0 | 16.405 | 0 | 0 |
| NT2RI2008622 | 0 | 0 | 0 | 20.392 | 0 | 0 |
| NT2RI2008724 | 0 | 0 | 0 | 11.867 | 0 | 0 |
| NT2RI2008749 | 0 | 0 | 0 | 0 | 14.107 | 0 |
| NT2RI2009194 | 0 | 0 | 0 | 0 | 24.520 | 0 |
| NT2RI2009281 | 0 | 0 | 0 | 0 | 35.116 | 0 |
| NT2RI2017529 | 82.371 | 0 | 0 | 0 | 0 | 0 |
| NT2RP6000005 | 0 | 0 | 0 | 0 | 54.879 | 0 |
| NT2RP6000017 | 0 | 0 | 0 | 0 | 0 | 35.661 |
| NT2RP6000078 | 0 | 0 | 0 | 4.647 | 0 | 0 |
| NT2RP7000076 | 0 | 0 | 0 | 0 | 15.206 | 0 |
| NT2RP7000173 | 0 | 0 | 0 | 0 | 13.871 | 0 |
| NT2RP7001856 | 0 | 0 | 0 | 0 | 85.512 | 0 |
| NT2RP7006490 | 0 | 0 | 0 | 0 | 0 | 51.161 |
| NT2RP7006717 | 0 | 0 | 0 | 4.251 | 0 | 0 |
| NT2RP7007177 | 0 | 0 | 0 | 0 | 33.978 | 0 |
| NT2RP7007530 | 0 | 0 | 0 | 0 | 0 | 52.253 |
| NT2RP7008190 | 0 | 0 | 0 | 0 | 33.097 | 0 |
| NT2RP7009147 | 0 | 0 | 33.894 | 0 | 0 | 0 |
| NT2RP7009482 | 39.344 | 0 | 0 | 2.995 | 0 | 0 |
| NT2RP7009498 | 85.550 | 0 | 0 | 0 | 0 | 0 |
| NT2RP7015503 | 0 | 0 | 0 | 0 | 0 | 75.473 |
| NTONG1000246 | 0 | 0 | 0 | 20.208 | 0 | 0 |
| NTONG1000257 | 0 | 0 | 0 | 56.890 | 0 | 0 |
| NTONG2000334 | 0 | 0 | 0 | 0 | 51.012 | 0 |
| NTONG2000800 | 0 | 0 | 56.331 | 0 | 0 | 0 |
| NTONG2001220 | 0 | 0 | 0 | 37.184 | 0 | 0 |
| NTONG2001222 | 0 | 0 | 35.287 | 0 | 0 | 0 |
| NTONG2001362 | 0 | 0 | 74.273 | 0 | 0 | 0 |
| NTONG2001587 | 0 | 0 | 69.673 | 0 | 0 | 0 |
| NTONG2004844 | 0 | 0 | 0 | 0 | 40.435 | 0 |
| OCBBF2000846 | 0 | 0 | 0 | 4.729 | 0 | 0 |
| OCBBF2000982 | 0 | 0 | 0 | 5.635 | 0 | 0 |
| OCBBF2002086 | 0 | 0 | 0 | 20.818 | 0 | 0 |
| OCBBF2003518 | 87.513 | 0 | 0 | 0 | 0 | 0 |
| OCBBF2003925 | 70.735 | 0 | 0 | 0 | 0 | 0 |
| OCBBF2005428 | 0 | 0 | 0 | 0 | 82.251 | 0 |
| OCBBF2006313 | 0 | 0 | 0 | 36.896 | 0 | 0 |
| OCBBF2007354 | 0 | 0 | 0 | 0 | 25.066 | 0 |
| OCBBF2007415 | 0 | 0 | 0 | 0 | 19.979 | 0 |
| OCBBF2008041 | 0 | 0 | 0 | 0 | 52.152 | 0 |
| OCBBF2009242 | 0 | 0 | 0 | 18.297 | 0 | 0 |
| OCBBF2010830 | 0 | 0 | 18.722 | 17.058 | 0 | 0 |
| OCBBF2012821 | 0 | 0 | 53.237 | 0 | 0 | 0 |
| OCBBF2013366 | 0 | 0 | 0 | 0 | 67.349 | 0 |
| OCBBF2015751 | 0 | 0 | 0 | 0 | 70.707 | 0 |
| PANCR1000081 | 0 | 0 | 0 | 1.932 | 0 | 0 |
| PEBLM2000395 | 0 | 0 | 0 | 5.881 | 0 | 0 |
| PEBLM2008861 | 0 | 0 | 0 | 31.108 | 0 | 0 |
| PLACE6000630 | 0 | 0 | 82.098 | 0 | 0 | 0 |
| PLACE6001262 | 0 | 0 | 0 | 56.464 | 0 | 0 |
| PLACE6003038 | 0 | 0 | 0 | 23.320 | 0 | 0 |
| PLACE6004312 | 0 | 0 | 0 | 7.794 | 15.048 | 0 |
| PLACE6005487 | 0 | 0 | 0 | 0 | 93.342 | 0 |
| PLACE6012574 | 0 | 87.267 | 0 | 0 | 0 | 0 |
| PLACE6019932 | 0 | 0 | 92.281 | 0 | 0 | 0 |
| PROST2000079 | 0 | 0 | 0 | 0 | 74.684 | 0 |
| PROST2000138 | 0 | 14.800 | 1.844 | 1.680 | 0 | 0 |
| PROST2002162 | 0 | 0 | 82.370 | 0 | 0 | 0 |
| PROST2004251 | 0 | 76.493 | 0 | 0 | 0 | 0 |
| PROST2016195 | 0 | 0 | 0 | 37.788 | 0 | 0 |
| PUAEN1000322 | 0 | 0 | 27.200 | 0 | 0 | 0 |
| PUAEN2000374 | 0 | 0 | 0 | 2.068 | 0 | 0 |
| SALGL1000024 | 0 | 0 | 0 | 1.964 | 0 | 0 |
| SALGL1000157 | 0 | 0 | 2.767 | 3.361 | 0 | 0 |
| SKMUS1000186 | 0 | 34.269 | 0 | 0 | 0 | 19.133 |
| SKMUS2001528 | 0 | 0 | 0 | 8.111 | 0 | 0 |
| SKNMC2000322 | 0 | 0 | 0 | 0 | 35.235 | 0 |
| SKNMC2000635 | 0 | 0 | 0 | 0 | 4.476 | 0 |
| SMINT1000131 | 0 | 0 | 19.486 | 0 | 0 | 0 |
| SMINT2000545 | 0 | 0 | 0 | 15.318 | 0 | 0 |
| SMINT2000933 | 0 | 0 | 0 | 13.171 | 0 | 0 |
| SMINT2001199 | 0 | 0 | 0 | 64.679 | 0 | 0 |
| SMINT2001818 | 0 | 0 | 0 | 24.229 | 0 | 0 |
| SMINT2002884 | 0 | 0 | 0 | 23.868 | 0 | 0 |
| SMINT2003505 | 0 | 0 | 0 | 20.349 | 0 | 0 |
| SMINT2003905 | 0 | 66.100 | 0 | 0 | 0 | 0 |
| SMINT2004023 | 0 | 0 | 0 | 29.565 | 0 | 0 |
| SMINT2004583 | 0 | 0 | 82.426 | 0 | 0 | 0 |
| SMINT2005688 | 0 | 0 | 0 | 0 | 62.271 | 0 |
| SMINT2008960 | 0 | 0 | 0 | 4.421 | 0 | 0 |
| SMINT2014480 | 0 | 0 | 0 | 10.266 | 0 | 0 |
| SMINT2015306 | 0 | 0 | 0 | 64.679 | 0 | 0 |
| SPLEN1000089 | 0 | 0 | 0 | 25.678 | 0 | 0 |
| SPLEN1000116 | 42.016 | 0 | 0 | 0 | 0 | 0 |
| SPLEN2000505 | 0 | 35.982 | 0 | 0 | 0 | 0 |
| SPLEN2000698 | 0 | 0 | 0 | 0 | 0 | 50.540 |
| SPLEN2000874 | 0 | 0 | 0 | 3.150 | 0 | 0 |
| SPLEN2000882 | 0 | 0 | 0 | 11.351 | 0 | 0 |
| SPLEN2001141 | 0 | 0 | 0 | 24.408 | 0 | 0 |
| SPLEN2001503 | 0 | 0 | 0 | 65.001 | 0 | 0 |
| SPLEN2002467 | 0 | 0 | 0 | 21.051 | 0 | 0 |
| SPLEN2004181 | 0 | 0 | 0 | 50.868 | 0 | 0 |
| SPLEN2004984 | 0 | 0 | 0 | 50.919 | 0 | 0 |
| SPLEN2005342 | 0 | 0 | 0 | 34.473 | 0 | 0 |
| SPLEN2005806 | 0 | 52.211 | 0 | 0 | 0 | 0 |
| SPLEN2006122 | 0 | 0 | 0 | 5.442 | 0 | 0 |
| SPLEN2007276 | 0 | 0 | 0 | 34.275 | 0 | 0 |
| SPLEN2011678 | 96.754 | 0 | 0 | 0 | 0 | 0 |
| SPLEN2012571 | 0 | 0 | 0 | 20.542 | 0 | 0 |
| SPLEN2012800 | 57.993 | 0 | 0 | 0 | 0 | 0 |
| SPLEN2017918 | 0 | 0 | 0 | 0 | 22.748 | 0 |
| SPLEN2021194 | 0 | 0 | 0 | 43.596 | 0 | 0 |
| SPLEN2022522 | 0 | 0 | 0 | 18.320 | 0 | 0 |
| SPLEN2024232 | 0 | 0 | 0 | 42.861 | 0 | 0 |
| SPLEN2028466 | 0 | 0 | 0 | 0 | 10.321 | 0 |
| SPLEN2028914 | 0 | 0 | 0 | 18.044 | 0 | 0 |
| SPLEN2034448 | 0 | 0 | 0 | 33.504 | 0 | 0 |
| STOMA1000091 | 0 | 0 | 0 | 44.949 | 0 | 0 |
| SYNOV1000164 | 0 | 0 | 0 | 49.698 | 0 | 0 |
| SYNOV2001239 | 0 | 0 | 0 | 2.027 | 0 | 7.478 |
| SYNOV2001262 | 0 | 0 | 0 | 13.482 | 0 | 0 |
| SYNOV2001581 | 0 | 0 | 0 | 17.017 | 0 | 0 |
| SYNOV2001648 | 0 | 0 | 0 | 7.002 | 0 | 0 |
| TESTI2000591 | 0 | 0 | 38.854 | 0 | 0 | 43.525 |
| TESTI2001862 | 0 | 0 | 56.260 | 0 | 0 | 0 |
| TESTI2002149 | 0 | 0 | 0 | 0 | 0 | 39.864 |
| TESTI2003005 | 0 | 0 | 0 | 0 | 75.802 | 0 |
| TESTI2003071 | 0 | 0 | 0 | 0 | 0 | 83.156 |
| TESTI2003127 | 0 | 0 | 0 | 68.997 | 0 | 0 |
| TESTI2003756 | 0 | 0 | 0 | 67.792 | 0 | 0 |
| TESTI2004031 | 0 | 34.228 | 8.530 | 0 | 0 | 0 |
| TESTI2006588 | 0 | 0 | 0 | 0 | 0 | 12.903 |
| TESTI2009474 | 0 | 0 | 0 | 13.055 | 0 | 0 |
| TESTI2010513 | 33.353 | 0 | 0 | 0 | 0 | 0 |
| TESTI2012019 | 0 | 0 | 0 | 0 | 0 | 92.398 |
| TESTI2012778 | 47.058 | 0 | 0 | 0 | 0 | 0 |
| TESTI2013231 | 0 | 0 | 0 | 0 | 0 | 47.426 |
| TESTI2015213 | 0 | 0 | 0 | 0 | 12.805 | 0 |
| TESTI2015437 | 0 | 0 | 0 | 0 | 0 | 97.331 |
| TESTI2015626 | 0 | 0 | 0 | 0 | 0 | 7.838 |
| TESTI2017954 | 0 | 0 | 0 | 0 | 16.528 | 0 |
| TESTI2021654 | 0 | 0 | 0 | 63.153 | 0 | 0 |
| TESTI2025013 | 0 | 0 | 0 | 0 | 0 | 84.839 |
| TESTI2026525 | 0 | 0 | 0 | 28.114 | 0 | 0 |
| TESTI2034940 | 0 | 0 | 0 | 1.683 | 6.500 | 0 |
| TESTI2052693 | 0 | 0 | 0 | 0 | 0 | 39.903 |
| TESTI4000014 | 0 | 30.495 | 0 | 0 | 0 | 0 |
| TESTI4009286 | 0 | 0 | 15.424 | 4.684 | 0 | 0 |
| TESTI4013441 | 0 | 13.391 | 0 | 0 | 0 | 0 |
| TESTI4018436 | 0 | 0 | 0 | 33.629 | 0 | 0 |
| THYMU1000016 | 0 | 0 | 8.222 | 2.497 | 0 | 0 |
| THYMU1000359 | 0 | 0 | 0 | 24.247 | 0 | 0 |
| THYMU1000394 | 0 | 0 | 0 | 31.765 | 0 | 0 |
| THYMU2000057 | 0 | 0 | 0 | 43.820 | 0 | 0 |
| THYMU2003012 | 0 | 0 | 0 | 11.326 | 0 | 0 |
| THYMU2003419 | 0 | 0 | 0 | 9.735 | 0 | 0 |
| THYMU2003891 | 0 | 0 | 0 | 12.257 | 0 | 0 |
| THYMU2003981 | 0 | 0 | 0 | 10.124 | 0 | 0 |
| THYMU2006277 | 0 | 99.033 | 0 | 0 | 0 | 0 |
| THYMU2007060 | 0 | 0 | 0 | 55.100 | 0 | 0 |
| THYMU2007886 | 0 | 0 | 0 | 8.948 | 0 | 0 |
| THYMU2009658 | 0 | 0 | 0 | 0 | 0 | 8.349 |
| THYMU2020416 | 0 | 0 | 0 | 88.571 | 0 | 0 |
| THYMU2027125 | 0 | 0 | 0 | 0 | 0 | 4.266 |
| THYMU2032825 | 0 | 0 | 0 | 60.077 | 0 | 0 |
| THYMU3015759 | 0 | 0 | 0 | 7.275 | 0 | 0 |
| THYMU3032798 | 0 | 0 | 0 | 12.495 | 0 | 0 |
| TKIDN2000246 | 0 | 0 | 0 | 0 | 7.590 | 0 |
| TKIDN2002738 | 35.603 | 0 | 0 | 0 | 0 | 0 |
| TLIVE2001327 | 0 | 0 | 0 | 30.308 | 0 | 0 |
| TLIVE2003970 | 0 | 0 | 0 | 0 | 57.706 | 0 |
| TRACH2000079 | 0 | 0 | 0 | 3.500 | 0 | 0 |
| TRACH2000196 | 0 | 0 | 0 | 85.226 | 0 | 0 |
| TRACH2000321 | 0 | 0 | 20.907 | 3.175 | 0 | 0 |
| TRACH2000540 | 0 | 0 | 0 | 36.823 | 0 | 0 |
| TRACH2000780 | 0 | 0 | 0 | 0 | 21.807 | 0 |
| TRACH2001109 | 0 | 0 | 0 | 0 | 5.222 | 0 |
| TRACH2001523 | 0 | 07 | 36.173 | 0 | 0 | 0 |
| TRACH2001810 | 0 | 0 | 0 | 10.036 | 0 | 0 |
| TRACH2002043 | 0 | 90.545 | 0 | 0 | 0 | 0 |
| TRACH2007754 | 0 | 0 | 31.967 | 0 | 0 | 0 |
| TRACH2008081 | 0 | 0 | 0 | 8.255 | 0 | 0 |
| TRACH2011293 | 0 | 0 | 94.999 | 0 | 0 | 0 |
| TRACH3003832 | 0 | 0 | 0 | 78.462 | 0 | 0 |
| TRACH3036942 | 0 | 0 | 0 | 0 | 0 | 5.816 |
| UMVEN2000133 | 0 | 0 | 0 | 11.363 | 0 | 0 |
| UMVEN2000453 | 0 | 0 | 0 | 3.374 | 0 | 0 |
| UTERU1000182 | 68.865 | 0 | 0 | 0 | 0 | 0 |
| UTERU2000095 | 0 | 0 | 0 | 2.674 | 0 | 0 |
| UTERU2000332 | 0 | 0 | 0 | 61.113 | 0 | 0 |
| UTERU2004664 | 0 | 0 | 0 | 0 | 42.338 | 0 |
| UTERU2005593 | 0 | 0 | 0 | 7.253 | 0 | 0 |
| UTERU2008027 | 0 | 0 | 0 | 0 | 95.438 | 0 |
| UTERU2008085 | 0 | 0 | 0 | 0 | 0 | 8.610 |
| UTERU2010417 | 0 | 0 | 0 | 2.037 | 0 | 0 |
| UTERU2011741 | 0 | 0 | 0 | 76.126 | 0 | 0 |
| UTERU2015108 | 0 | 0 | 0 | 40.775 | 0 | 0 |
| UTERU2018884 | 0 | 0 | 0 | 0 | 77.306 | 0 |
| UTERU2033375 | 98.615 | 0 | 0 | 0 | 0 | 0 |

[1722] Genes whose expression levels were negligibly low in each of the above-described libraries are shown with their clone names below.

[1723] 3NB691000018, 3NB691000085, 3NB691000113, 3NB691000116, 3NB691000129, 3NB691000173, 3NB691000191, 3NB692000012, 3NB692000029, 3NB692000102, 3NB692000154, 3NB692000276, 3NB692000305, 3NB692000330, 3NB692000429, 3NB692000484, 3NB692000529, 3NB692000545, 3NB692000973, 3NB692001002, 3NB692001022, 3NB692001034, 3NB692001040, 3NB692001123, 3NB692001267, 3NB692001288, 3NB692001349, 3NB692001366, 3NB692001408, 3NB692001433, 3NB692001442, 3NB692001459, 3NB692001471, 3NB692001496, 3NB692001501, 3NB692001507, 3NB692001511, 3NB692001519, 3NB692001520, 3NB692001528, 3NB692001538, 3NB692001548, 3NB692001557, 3NB692001637, 3NB692001719, 3NB692001853, 3NB692001861, 3NB692002051, 3NB692002365, 3NB692002685,

[1724] 3NB692002806, 3NB692003538, 3NB692004045, 3NB692004724, 3NB692005439, 3NB692006952, 3NB692008178, 3NB692008729, ACTVT2000380, ADIPS1000064, ADIPS2000069, ADIPS2000088, ADIPS2000245, ADIPS2000425, ADRGL1000002, ADRGL1000018, ADRGL1000033, ADRGL1000038, ADRGL1000065, ADRGL1000067, ADRGL1000111, ADRGL1000144, ADRGL1000147, ADRGL1000160, ADRGL1000165, ADRGL1000182, ADRGL2000042, ADRGL2000056, ADRGL2000064, ADRGL2000074, ADRGL2000085, ADRGL2000097, ADRGL2000117, ADRGL2000142, ADRGL2000172, ADRGL2000248, ADRGL2000261, ADRGL2000323, ADRGL2000328, ADRGL2000353, ADRGL2000384, ADRGL2000428, ADRGL2000636, ADRGL2000644, ADRGL2000968, ADRGL2001119, ADRGL2001229, ADRGL2001287, ADRGL2001301, ADRGL2001354, ADRGL2001554, ADRGL2001651, ADRGL2001756, ADRGL2001830, ADRGL2001836, ADRGL2001854, ADRGL2002013, ADRGL2002029, ADRGL2002191, ADRGL2002260, ADRGL2002392, ADRGL2002477, ADRGL2002679, ADRGL2002753, ADRGL2002857, ADRGL2003017, ADRGL2003329, ADRGL2003552, ADRGL2003585, ADRGL2003638, ADRGL2003684, ADRGL2003773, ADRGL2003785, ADRGL2004031, ADRGL2004077, ADRGL2004451, ADRGL2004459, ADRGL2004676, ADRGL2004708, ADRGL2004724, ADRGL2004749, ADRGL2004770, ADRGL2004777, ADRGL2004833, ADRGL2005336, ADRGL2005564, ADRGL2005756, ADRGL2005838, ADRGL2005926, ADRGL2005961, ADRGL2006034, ADRGL2006124, ADRGL2006177, ADRGL2006193, ADRGL2006377, ADRGL2006677, ADRGL2006732, ADRGL2006767,

[1725] ADRGL2006817, ADRGL2006846, ADRGL2006886, ADRGL2007080, ADRGL2007125, ADRGL2007283, ADRGL2007313, ADRGL2007357, ADRGL2007636, ADRGL2007651, ADRGL2007810, ADRGL2007877, ADRGL2007906, ADRGL2007974, ADRGL2008023, ADRGL2008331, ADRGL2008337, ADRGL2008535, ADRGL2008966, ADRGL2009146, ADRGL2009324, ADRGL2009489, ADRGL2009533, ADRGL2009691, ADRGL2009755, ADRGL2010152, ADRGL2010315, ADRGL2010594, ADRGL2010860, ADRGL2010974, ADRGL2011190, ADRGL2011330, ADRGL2012038, ADRGL2012179, AHMSC1000138, ASTRO1000009, ASTRO1000018, ASTRO1000029, ASTRO1000165, ASTRO2000011, ASTRO2000046, ASTRO2000095, ASTRO2000141, ASTRO2000191, ASTRO2000278, ASTRO2000372, ASTRO2000381, ASTRO2000403, ASTRO2000417, ASTRO2000480,

[1726] ASTRO2000482, ASTRO2000533, ASTRO2000653, ASTRO2000662, ASTRO2000725, ASTRO2000914, ASTRO2001001, ASTRO2001008, ASTRO2001029, ASTRO2001076, ASTRO2001088, ASTRO2001107, ASTRO2001122, ASTRO2001227, ASTRO2001249, ASTRO2001480, ASTRO2001806, ASTRO2001823, ASTRO2002024, ASTRO2002035, ASTRO2002064, ASTRO2002459, ASTRO2002571, ASTRO2002632, ASTRO2002659, ASTRO2002693, ASTRO2002720, ASTRO2002733, ASTRO2002743, ASTRO2002842, ASTRO2003024, ASTRO2003212, ASTRO2003316, ASTRO2003461, ASTRO2003574, ASTRO2003581, ASTRO2003632, ASTRO2003740, ASTRO2003840, ASTRO2003925, ASTRO2003960, ASTRO2004032, ASTRO2004051, ASTRO2004177, ASTRO2004217, ASTRO2004297, ASTRO2004584, ASTRO2004628, ASTRO2004751, ASTRO2004877,

[1727] ASTRO2004974, ASTRO2005008, ASTRO2005081, ASTRO2005096, ASTRO2005242, ASTRO2005273, ASTRO2005343, ASTRO2005360, ASTRO2005413, ASTRO2005423, ASTRO2005553, ASTRO2005557, ASTRO2005575, ASTRO2005593, ASTRO2005687, ASTRO2005726, ASTRO2005863, ASTRO2005896, ASTRO2005902, ASTRO2006356, ASTRO2006475, ASTRO2006732, ASTRO2006747, ASTRO2006920, ASTRO2006952, ASTRO2007221, ASTRO2007377, ASTRO2007515, ASTRO2007578, ASTRO2007643, ASTRO2007666, ASTRO2007948, ASTRO2007956, ASTRO2007962, ASTRO2008040, ASTRO2008239, ASTRO2008409, ASTRO2008425, ASTRO2008777, ASTRO2008895, ASTRO2008960, ASTRO2008972, ASTRO2009068, ASTRO2009118, ASTRO2009177, ASTRO2009333, ASTRO2009458, ASTRO2009526, ASTRO2009879, ASTRO2010072,

[1728] ASTRO2010582, ASTRO2010615, ASTRO2010799, ASTRO2010819, ASTRO2010962, ASTRO2010996, ASTRO2011149, ASTRO2011422, ASTRO2011426, ASTRO2011437, ASTRO2011461, ASTRO2011834, ASTRO2011893, ASTRO2012552, ASTRO2013124, ASTRO2013585, ASTRO2013671, ASTRO2013802, ASTRO2014135, ASTRO2014174, ASTRO2014211, ASTRO2014363, ASTRO2014392, ASTRO2014498, ASTRO2014561, ASTRO2014576, ASTRO2014863, ASTRO2014923, ASTRO2014961, ASTRO2015162, ASTRO2015185, ASTRO2015328, ASTRO2015529, ASTRO2015987, ASTRO2016044, ASTRO2016114, ASTRO2016148, ASTRO2016681, ASTRO2016819, ASTRO2016847, ASTRO2016892, ASTRO2017348, ASTRO2017627, ASTRO2018169, ASTRO2018373, ASTRO2018540, ASTRO2019039, ASTRO2019171, ASTRO3000154, ASTRO3000172,

[1729] ASTRO3000177, ASTRO3000301, ASTRO3000474, ASTRO3000482, BEAST2000454, BGGI11000123, BGGI11000193, BGGI11000285, BGGI12000022, BGGI12000067, BGGI12000161, BGGI12000533, BGGI12000544, BGGI12000684, BGGI12000693, BGGI12000839, BGGI12001002, BGGI12001075, BGGI12001097, BGGI12001241, BGGI12001247, BGGI12001682, BGGI12001714, BLADE1000176, BLADE2000181, BLADE2000256, BLADE2000340, BLADE2000389, BLADE2000463, BLADE2000492, BLADE2000579, BLADE2000640, BLADE2000866, BLADE2000938, BLADE2001031, BLADE2001133, BLADE2001138, BLADE2001141, BLADE2001371, BLADE2001458, BLADE2001575, BLADE2001753, BLADE2001935, BLADE2001940, BLADE2001987, BLADE2002073, BLADE2002310, BLADE2002730, BLADE2002738, BLADE2002782,

[1730] BLADE2002947, BLADE2002972, BLADE2003474, BLADE2003916, BLADE2004089, BLADE2004345, BLADE2004389, BLADE2004462, BLADE2004628, BLADE2004670, BLADE2004722, BLADE2004849, BLADE2005036, BLADE2005038, BLADE2005229, BLADE2005459, BLADE2005792, BLADE2006043, BLADE2006412, BLADE2006415, BLADE2006607, BLADE2006826, BLADE2006830, BLADE2006849, BLADE2006947, BLADE2007033, BLADE2007043, BLADE2007589, BLADE2007666, BLADE2007722, BLADE2007735, BLADE2007744, BLADE2007799, BLADE2007923, BLADE2007935, BLADE2007958, BLADE2008281, BLADE2008398, BLADE2008454, BLADE2008461, BLADE2008479, BLADE2008539, BLADE2008809, BLADE2008995, BLADE2009452, BLADE2009479, BLADE2009593, BNGH41000098, BNGH41000104, BNGH41000118,

[1731] BNGH41000137, BNGH41000153, BNGH41000169, BNGH41000177, BNGH41000190, BNGH41000198, BNGH41000216, BNGH41000235, BNGH42000130, BNGH42000132, BNGH42000405, BNGH42000532, BNGH42000675, BNGH42000739, BNGH42000791, BNGH42000815, BNGH42000994, BNGH42001247, BNGH42001406, BNGH42001576, BNGH42001724, BNGH42002168, BNGH42002244, BNGH42002387, BNGH42002487, BNGH42002489, BNGH42003529, BNGH42003570, BNGH42003641, BNGH42004076, BNGH42004291, BNGH42004538, BNGH42004679, BNGH42005017, BNGH42005235, BNGH42005504, BNGH42005968, BNGH42006135, BNGH42006226, BNGH42006234, BNGH42007037, BNGH42007366, BNGH42007460, BNGH42007594, BNGH42007788, BNGH42007798, BNGH42008199, BNGH42008510, BNGH42008603, BNGH42008649,

[1732] BNGH42008743, BNGH42008832, BNGH42008850, BNGH42008943, BNGH42009021, BNGH42009025, BRACE1000020, BRACE1000042, BRACE1000047, BRACE1000051, BRACE1000065, BRACE1000070, BRACE1000073, BRACE1000084, BRACE1000087, BRACE1000092, BRACE1000093, BRACE1000101, BRACE1000114, BRACE1000115, BRACE1000124, BRACE1000132, BRACE1000159, BRACE1000166, BRACE1000169, BRACE1000186, BRACE1000187, BRACE1000239, BRACE1000258, BRACE1000451, BRACE1000475, BRACE1000572, BRACE2000061, BRACE2000077, BRACE2000078, BRACE2000100, BRACE2000109, BRACE2000141, BRACE2000148, BRACE2000183, BRACE2000229, BRACE2000232, BRACE2000245, BRACE2000256, BRACE2000266, BRACE2000267, BRACE2000280, BRACE2000300, BRACE2000307, BRACE2000331,

[1733] BRACE2000332, BRACE2000347, BRACE2000351, BRACE2000368, BRACE2000392, BRACE2000441, BRACE2000487, BRACE2000489, BRACE2000505, BRACE2000525, BRACE2000526, BRACE2000531, BRACE2000545, BRACE2000553, BRACE2000565, BRACE2000577, BRACE2000640, BRACE2000650, BRACE2000677, BRACE2000698, BRACE2000718, BRACE2000733, BRACE2000743, BRACE2000750, BRACE2000753, BRACE2000815, BRACE2000864, BRACE2000885, BRACE2000893, BRACE2000905, BRACE2000936, BRACE2000947, BRACE2000965, BRACE2000969, BRACE2000975, BRACE2000988, BRACE2001017, BRACE2001065, BRACE2001070, BRACE2001094, BRACE2001107, BRACE2001117, BRACE2001143, BRACE2001151, BRACE2001154, BRACE2001188, BRACE2001191, BRACE2001197, BRACE2001236, BRACE2001239,

[1734] BRACE2001269, BRACE2001312, BRACE2001313, BRACE2001330, BRACE2001340, BRACE2001352, BRACE2001353, BRACE2001374, BRACE2001375, BRACE2001423, BRACE2001424, BRACE2001445, BRACE2001453, BRACE2001455, BRACE2001477, BRACE2001492, BRACE2001496, BRACE2001497, BRACE2001508, BRACE2001534, BRACE2001543, BRACE2001564, BRACE2001588, BRACE2001607, BRACE2001626, BRACE2001673, BRACE2001677, BRACE2001705, BRACE2001709, BRACE2001711, BRACE2001726, BRACE2001733, BRACE2001737, BRACE2001742, BRACE2001777, BRACE2001779, BRACE2001834, BRACE2001855, BRACE2001859, BRACE2001865, BRACE2001872, BRACE2001881, BRACE2001892, BRACE2001898, BRACE2001923, BRACE2001942, BRACE2001944, BRACE2001954, BRACE2001971, BRACE2001972,

[1735] BRACE2001973, BRACE2002026, BRACE2002034, BRACE2002050, BRACE2002081, BRACE2002091, BRACE2002139, BRACE2002142, BRACE2002151, BRACE2002157, BRACE2002176, BRACE2002202, BRACE2002206, BRACE2002227, BRACE2002260, BRACE2002297, BRACE2002304, BRACE2002356, BRACE2002392, BRACE2002394, BRACE2002409, BRACE2002431, BRACE2002441, BRACE2002444, BRACE2002458, BRACE2002467, BRACE2002468, BRACE2002478, BRACE2002495, BRACE2002582, BRACE2002585, BRACE2002589, BRACE2002590, BRACE2002606, BRACE2002613, BRACE2002614, BRACE2002617, BRACE2002623, BRACE2002635, BRACE2002649, BRACE2002661, BRACE2002676, BRACE2002682, BRACE2002695, BRACE2002707, BRACE2002736, BRACE2002752, BRACE2002755, BRACE2002762, BRACE2002772,

[1736] BRACE2002792, BRACE2002796, BRACE2002803, BRACE2002807, BRACE2002812, BRACE2002834, BRACE2002849, BRACE2002857, BRACE2002860, BRACE2002861, BRACE2002884, BRACE2002896, BRACE2002948, BRACE2003037, BRACE2003078, BRACE2003097, BRACE2003110, BRACE2003168, BRACE2003199, BRACE2003210, BRACE2003217, BRACE2003254, BRACE2003269, BRACE2003285, BRACE2003304, BRACE2003319, BRACE2003398, BRACE2003420, BRACE2003428, BRACE2003431, BRACE2003512, BRACE2003516, BRACE2003527, BRACE2003539, BRACE2003540, BRACE2003594, BRACE2003598, BRACE2003609, BRACE2003614, BRACE2003628, BRACE2003639, BRACE2003700, BRACE2003713, BRACE2003766, BRACE2003785, BRACE2003788, BRACE2003800, BRACE2003802, BRACE2003825, BRACE2003845,

[1737] BRACE2003846, BRACE2003847, BRACE2003848, BRACE2003873, BRACE2003885, BRACE2003887, BRACE2003892, BRACE2003904, BRACE2003905, BRACE2003928, BRACE2003944, BRACE2003954, BRACE2003982, BRACE2003987, BRACE2005034, BRACE2005047, BRACE2005063, BRACE2005083, BRACE2005087, BRACE2005090, BRACE2005099, BRACE2005118, BRACE2005124, BRACE2005138, BRACE2005151, BRACE2005160, BRACE2005169, BRACE2005189, BRACE2005193, BRACE2005196, BRACE2005198, BRACE2005216, BRACE2005231, BRACE2005243, BRACE2005251, BRACE2005253, BRACE2005290, BRACE2005298, BRACE2005328, BRACE2005329, BRACE2005337, BRACE2005348, BRACE2005363, BRACE2005395, BRACE2005408, BRACE2005434, BRACE2005448, BRACE2005450, BRACE2005453, BRACE2005457,

[1738] BRACE2005460, BRACE2005489, BRACE2005518, BRACE2005556, BRACE2005562, BRACE2005624, BRACE2005642, BRACE2005661, BRACE2005667, BRACE2005681, BRACE2005719, BRACE2005731, BRACE2005742, BRACE2005762, BRACE2005773, BRACE2005787, BRACE2005795, BRACE2005800, BRACE2005858, BRACE2005869, BRACE2005881, BRACE2005898, BRACE2005904, BRACE2005906, BRACE2005907, BRACE2005911, BRACE2005937, BRACE2005949, BRACE2005981, BRACE2005991, BRACE2006055, BRACE2006072, BRACE2006075, BRACE2006084, BRACE2006089, BRACE2006102, BRACE2006105, BRACE2006122, BRACE2006137, BRACE2006143, BRACE2006162, BRACE2006167, BRACE2006174, BRACE2006240, BRACE2006245, BRACE2006249, BRACE2006258, BRACE2006264, BRACE2006274, BRACE2006281,

[1739] BRACE2006298, BRACE2006319, BRACE2006354, BRACE2006363, BRACE2006378, BRACE2006380, BRACE2006393, BRACE2006413, BRACE2006417, BRACE2006453, BRACE2006459, BRACE2006488, BRACE2006514, BRACE2006534, BRACE2006537, BRACE2006540, BRACE2006547, BRACE2006564, BRACE2006587, BRACE2006598, BRACE2006636, BRACE2006685, BRACE2006703, BRACE2006743, BRACE2006753, BRACE2006783, BRACE2006821, BRACE2006833, BRACE2006859, BRACE2006871, BRACE2006909, BRACE2006911, BRACE2006924, BRACE2006935, BRACE2006937, BRACE2006944, BRACE2006951, BRACE2006982, BRACE2006986, BRACE2007013, BRACE2007064, BRACE2007068, BRACE2007087, BRACE2007089, BRACE2007138, BRACE2007174, BRACE2007191, BRACE2007197, BRACE2007201, BRACE2007203,

[1740] BRACE2007232, BRACE2007254, BRACE2007262, BRACE2007274, BRACE2007281, BRACE2007295, BRACE2007358, BRACE2007396, BRACE2007398, BRACE2007401, BRACE2007411, BRACE2007447, BRACE2007477, BRACE2007502, BRACE2007503, BRACE2007518, BRACE2007522, BRACE2007527, BRACE2007538, BRACE2007563, BRACE2007567, BRACE2007577, BRACE2007621, BRACE2007640, BRACE2007641, BRACE2007646, BRACE2007663, BRACE2007671, BRACE2007682, BRACE2007685, BRACE2007708, BRACE2007727, BRACE2007749, BRACE2007760, BRACE2007761, BRACE2007764, BRACE2007767, BRACE2007768, BRACE2007769, BRACE2007784, BRACE2007786, BRACE2007798, BRACE2007799, BRACE2007801, BRACE2007832, BRACE2007836, BRACE2007868, BRACE2007882, BRACE2007888, BRACE2007902,

[1741] BRACE2007920, BRACE2007937, BRACE2007944, BRACE2007952, BRACE2008008, BRACE2008015, BRACE2008021, BRACE2008102, BRACE2008114, BRACE2008144, BRACE2008172, BRACE2008216, BRACE2008218, BRACE2008251, BRACE2008276, BRACE2008295, BRACE2008308, BRACE2008336, BRACE2008358, BRACE2008361, BRACE2008380, BRACE2008399, BRACE2008401, BRACE2008402, BRACE2008410, BRACE2008420, BRACE2008443, BRACE2008473, BRACE2008480, BRACE2008481, BRACE2008488, BRACE2008495, BRACE2008500, BRACE2008553, BRACE2008594, BRACE2008604, BRACE2008615, BRACE2008622, BRACE2008629, BRACE2008653, BRACE2008655, BRACE2008656, BRACE2008706, BRACE2008708, BRACE2008710, BRACE2008754, BRACE2008797, BRACE2008847, BRACE2008857, BRACE2008861,

[1742] BRACE2008867, BRACE2008881, BRACE2008883, BRACE2008917, BRACE2008919, BRACE2008941, BRACE2008948, BRACE2008960, BRACE2008968, BRACE2008999, BRACE2009014, BRACE2009016, BRACE2009031, BRACE2009037, BRACE2009044, BRACE2009045, BRACE2009053, BRACE2009122, BRACE2009131, BRACE2009185, BRACE2009188, BRACE2009212, BRACE2009221, BRACE2009235, BRACE2009238, BRACE2009255, BRACE2009270, BRACE2009272, BRACE2009274, BRACE2009275, BRACE2009291, BRACE2009293, BRACE2009307, BRACE2009311, BRACE2009318, BRACE2009323, BRACE2009366, BRACE2009421, BRACE2009428, BRACE2009434, BRACE2009437, BRACE2009483, BRACE2009533, BRACE2009558, BRACE2009566, BRACE2009591, BRACE2009620, BRACE2009654, BRACE2009721, BRACE2009732,

[1743] BRACE2009754, BRACE2009828, BRACE2009886, BRACE2009907, BRACE2009957, BRACE2010170, BRACE2010171, BRACE2010203, BRACE2010208, BRACE2010336, BRACE2010348, BRACE2010440, BRACE2010444, BRACE2010477, BRACE2010489, BRACE2010535, BRACE2010550, BRACE2010598, BRACE2010632, BRACE2010642, BRACE2010651, BRACE2010669, BRACE2010684, BRACE2010753, BRACE2010813, BRACE2010828, BRACE2010837, BRACE2010888, BRACE2010937, BRACE2010983, BRACE2011007, BRACE2011025, BRACE2011183, BRACE2011199, BRACE2011265, BRACE2011389, BRACE2011478, BRACE2011545, BRACE2011592, BRACE2011611, BRACE2011646, BRACE2011677, BRACE2011703, BRACE2011747, BRACE2011838, BRACE2011892, BRACE2011904, BRACE2011947, BRACE2012061, BRACE2012062,

[1744] BRACE2012185, BRACE2012222, BRACE2012232, BRACE2012291, BRACE2012317, BRACE2012510, BRACE2012528, BRACE2012625, BRACE2012653, BRACE2012814, BRACE2012833, BRACE2012838, BRACE2012936, BRACE2012947, BRACE2013009, BRACE2013010, BRACE2013126, BRACE2013132, BRACE2013149, BRACE2013369, BRACE2013806, BRACE2013855, BRACE2013911, BRACE2014108, BRACE2014161, BRACE2014232, BRACE2014257, BRACE2014268, BRACE2014306, BRACE2014475, BRACE2014657, BRACE2014746, BRACE2014780, BRACE2014818, BRACE2014821, BRACE2014824, BRACE2014850, BRACE2014854, BRACE2015031, BRACE2015058, BRACE2015132, BRACE2015262, BRACE2015270, BRACE2015287, BRACE2015314, BRACE2015352, BRACE2015368, BRACE2015412, BRACE2015436, BRACE2015741,

[1745] BRACE2015756, BRACE2015969, BRACE2015995, BRACE2016058, BRACE2016194, BRACE2016315, BRACE2016325, BRACE2016362, BRACE2016366, BRACE2016465, BRACE2016516, BRACE2016583, BRACE2016708, BRACE2016821, BRACE2016896, BRACE2016981, BRACE2017108, BRACE2017124, BRACE2017298, BRACE2017359, BRACE2017397, BRACE2017410, BRACE2017438, BRACE2017574, BRACE2017580, BRACE2017587, BRACE2017720, BRACE2017844, BRACE2017872, BRACE2017929, BRACE2017934, BRACE2017985, BRACE2017992, BRACE2018337, BRACE2018443, BRACE2018448, BRACE2018568, BRACE2018700, BRACE2018727, BRACE2018736, BRACE2018759, BRACE2018762, BRACE2018782, BRACE2018847, BRACE2019004, BRACE2019044, BRACE2019147, BRACE2019244, BRACE2019258, BRACE2019327,

[1746] BRACE2019348, BRACE2019371, BRACE2019467, BRACE2019510, BRACE2019519, BRACE2019528, BRACE2019618, BRACE2019696, BRACE2019703, BRACE2019843, BRACE2019865, BRACE2019872, BRACE2019877, BRACE2020028, BRACE2020077, BRACE2020097, BRACE2020157, BRACE2020278, BRACE2020358, BRACE2020467, BRACE2020584, BRACE2020652, BRACE2020709, BRACE2020742, BRACE2020756, BRACE2020863, BRACE2020982, BRACE2021014, BRACE2021143, BRACE2021148, BRACE2021245, BRACE2021254, BRACE2021264, BRACE2021344, BRACE2021433, BRACE2021478, BRACE2021541, BRACE2021670, BRACE2021695, BRACE2021708, BRACE2021721, BRACE2021932, BRACE2021936, BRACE2022030, BRACE2022158, BRACE2022196, BRACE2022270, BRACE2022328, BRACE2022333, BRACE2022389,

[1747] BRACE2022394, BRACE2022435, BRACE2022448, BRACE2022450, BRACE2022549, BRACE2022633, BRACE2022638, BRACE2022693, BRACE2022848, BRACE2022928, BRACE2022990, BRACE2023069, BRACE2023070, BRACE2023223, BRACE2023268, BRACE2023284, BRACE2023404, BRACE2023451, BRACE2023540, BRACE2023633, BRACE2023718, BRACE2023727, BRACE2023744, BRACE2023800, BRACE2023801, BRACE2024074, BRACE2024222, BRACE2024610, BRACE2024627, BRACE2024781, BRACE2024826, BRACE2025018, BRACE2025316, BRACE2025333, BRACE2025437, BRACE2025452, BRACE2025492, BRACE2025710, BRACE2025796, BRACE2025992, BRACE2026054, BRACE2026131, BRACE2026141, BRACE2026142, BRACE2026293, BRACE2026294, BRACE2026404, BRACE2026675, BRACE2026725, BRACE2026836,

[1748] BRACE2026920, BRACE2026971, BRACE2027018, BRACE2027221, BRACE2027258, BRACE2027312, BRACE2027382, BRACE2027389, BRACE2027408, BRACE2027643, BRACE2027767, BRACE2027770, BRACE2027879, BRACE2027896, BRACE2027970, BRACE2028171, BRACE2028392, BRACE2028410, BRACE2028636, BRACE2028741, BRACE2028956, BRACE2028970, BRACE2029112, BRACE2029356, BRACE2029396, BRACE2029581, BRACE2029644, BRACE2029849, BRACE2030039, BRACE2030096, BRACE2030323, BRACE2030326, BRACE2030341, BRACE2030345, BRACE2030736, BRACE2030883, BRACE2030884, BRACE2031154, BRACE2031232, BRACE2031527, BRACE2031531, BRACE2031553, BRACE2031899, BRACE2032044, BRACE2032090, BRACE2032134, BRACE2032148, BRACE2032182, BRACE2032329, BRACE2032385,

[1749] BRACE2032436, BRACE2032477, BRACE2032502, BRACE2032538, BRACE2032584, BRACE2032823, BRACE2033128, BRACE2033394, BRACE2033478, BRACE2033720, BRACE2033786, BRACE2034434, BRACE2034523, BRACE2034616, BRACE2034622, BRACE2034870, BRACE2035003, BRACE2035120, BRACE2035124, BRACE2035191, BRACE2035278, BRACE2035381, BRACE2035441, BRACE2035485, BRACE2036005, BRACE2036096, BRACE2036743, BRACE2036830, BRACE2036834, BRACE2036900, BRACE2037132, BRACE2037294, BRACE2037295, BRACE2037299, BRACE2037310, BRACE2037431, BRACE2037692, BRACE2037847, BRACE2038114, BRACE2038269, BRACE2038271, BRACE2038329, BRACE2038492, BRACE2038551, BRACE2038618, BRACE2039009, BRACE2039128, BRACE2039170, BRACE2039249, BRACE2039286,

[1750] BRACE2039297, BRACE2039327, BRACE2039362, BRACE2039475, BRACE2039600, BRACE2039607, BRACE2039624, BRACE2039734, BRACE2039823, BRACE2039832, BRACE2039893, BRACE2039986, BRACE2040138, BRACE2040325, BRACE2040514, BRACE2040640, BRACE2040987, BRACE2041009, BRACE2041095, BRACE2041200, BRACE2041264, BRACE2041890, BRACE2041898, BRACE2042394, BRACE2042398, BRACE2042550, BRACE2042620, BRACE2042628, BRACE2042873, BRACE2043036, BRACE2043105, BRACE2043142, BRACE2043248, BRACE2043349, BRACE2043381, BRACE2043774, BRACE2043942, BRACE2044057, BRACE2044105, BRACE2044263, BRACE2044286, BRACE2044304, BRACE2044473, BRACE2044510, BRACE2044640, BRACE2044816, BRACE2044946, BRACE2045300, BRACE2045428, BRACE2045445,

[1751] BRACE2045596, BRACE2045772, BRACE2045947, BRACE2045954, BRACE2046251, BRACE2046295, BRACE2046976, BRACE2047011, BRACE2047232, BRACE2047350, BRACE2047377, BRACE2047385, BRACE2047492, BRACE2047558, BRACE2047573, BRACE2047835, BRACE2047893, BRACE2047975, BRACE3000071, BRACE3000404, BRACE3000520, BRACE3000697, BRACE3000840, BRACE3000973, BRACE3001002, BRACE3001058, BRACE3001066, BRACE3001113, BRACE3001217, BRACE3001299, BRACE3001384, BRACE3001391, BRACE3001403, BRACE3001595, BRACE3001754, BRACE3001948, BRACE3001973, BRACE3002184, BRACE3002298, BRACE3002344, BRACE3002390, BRACE3002420, BRACE3002508, BRACE3002541, BRACE3002756, BRACE3003004, BRACE3003026, BRACE3003053, BRACE3003192, BRACE3003413,

[1752] BRACE3003595, BRACE3003698, BRACE3003866, BRACE3003920, BRACE3004046, BRACE3004058, BRACE3004113, BRACE3004150, BRACE3004205, BRACE3004358, BRACE3004371, BRACE3004435, BRACE3004477, BRACE3004767, BRACE3004772, BRACE3004783, BRACE3004843, BRACE3004862, BRACE3004880, BRACE3004887, BRACE3004981, BRACE3004996, BRACE3004998, BRACE3005103, BRACE3005127, BRACE3005145, BRACE3005217, BRACE3005225, BRACE3005430, BRACE3005499, BRACE3005760, BRACE3005870, BRACE3005903, BRACE3005938, BRACE3005989, BRACE3006113, BRACE3006185, BRACE3006226, BRACE3006462, BRACE3006463, BRACE3006553, BRACE3006872, BRACE3006917, BRACE3007058, BRACE3007084, BRACE3007085, BRACE3007258, BRACE3007322, BRACE3007472, BRACE3007480,

[1753] BRACE3007559, BRACE3007625, BRACE3007642, BRACE3007649, BRACE3007767, BRACE3007869, BRACE3008036, BRACE3008066, BRACE3008092, BRACE3008095, BRACE3008137, BRACE3008255, BRACE3008337, BRACE3008384, BRACE3008720, BRACE3008772, BRACE3009044, BRACE3009075, BRACE3009090, BRACE3009127, BRACE3009197, BRACE3009237, BRACE3009265, BRACE3009297, BRACE3009377, BRACE3009392, BRACE3009416, BRACE3009539, BRACE3009574, BRACE3009701, BRACE3009708, BRACE3009724, BRACE3009993, BRACE3010076, BRACE3010079, BRACE3010086, BRACE3010221, BRACE3010283, BRACE3010315, BRACE3010397, BRACE3010416, BRACE3010428, BRACE3010435, BRACE3010438, BRACE3010702, BRACE3010862, BRACE3011271, BRACE3011421, BRACE3011447, BRACE3011505,

[1754] BRACE3011634, BRACE3011774, BRACE3012357, BRACE3012574, BRACE3012806, BRACE3012930, BRACE3013119, BRACE3013418, BRACE3013576, BRACE3013740, BRACE3013780, BRACE3013874, BRACE3013936, BRACE3013986, BRACE3014005, BRACE3014068, BRACE3014231, BRACE3014290, BRACE3014317, BRACE3014523, BRACE3014714, BRACE3014807, BRACE3014942, BRACE3015090, BRACE3015121, BRACE3015262, BRACE3015521, BRACE3015808, BRACE3015829, BRACE3015894, BRACE3015898, BRACE3016020, BRACE3016122, BRACE3016167, BRACE3016170, BRACE3016580, BRACE3016788, BRACE3016810, BRACE3016862, BRACE3016884, BRACE3017083, BRACE3017253, BRACE3018083, BRACE3018308, BRACE3018963, BRACE3019055, BRACE3019071, BRACE3019084, BRACE3019570, BRACE3019611,

[1755] BRACE3019817, BRACE3019828, BRACE3020151, BRACE3020194, BRACE3020286, BRACE3020356, BRACE3020594, BRACE3020669, BRACE3020671, BRACE3020890, BRACE3021148, BRACE3021430, BRACE3021517, BRACE3021805, BRACE3022051, BRACE3022303, BRACE3022312, BRACE3022340, BRACE3022847, BRACE3023604, BRACE3023912, BRACE3024073, BRACE3024359, BRACE3024379, BRACE3024444, BRACE3024497, BRACE3024537, BRACE3024659, BRACE3024662, BRACE3024879, BRACE3025153, BRACE3025302, BRACE3025457, BRACE3025531, BRACE3025627, BRACE3025630, BRACE3025719, BRACE3026008, BRACE3026075, BRACE3026161, BRACE3026290, BRACE3026345, BRACE3026456, BRACE3026735, BRACE3026802, BRACE3026844, BRACE3026947, BRACE3026993, BRACE3027242, BRACE3027256,

[1756] BRACE3027326, BRACE3027478, BRACE3027480, BRACE3027931, BRACE3027976, BRACE3028214, BRACE3028241, BRACE3028360, BRACE3028895, BRACE3028998, BRACE3029005, BRACE3029021, BRACE3029205, BRACE3029447, BRACE3030057, BRACE3030103, BRACE3030538, BRACE3030748, BRACE3030866, BRACE3031161, BRACE3031184, BRACE3031185, BRACE3031315, BRACE3031372, BRACE3031579, BRACE3031728, BRACE3031838, BRACE3031843, BRACE3032427, BRACE3032455, BRACE3032537, BRACE3032538, BRACE3032631, BRACE3032771, BRACE3032980, BRACE3032983, BRACE3033525, BRACE3034159, BRACE3034183, BRACE3034389, BRACE3034964, BRACE3034993, BRACE3035168, BRACE3035227, BRACE3036156, BRACE3036271, BRACE3037612, BRACE3037637, BRACE3037803, BRACE3038012,

[1757] BRACE3038030, BRACE3038569, BRACE3038570, BRACE3038687, BRACE3038760, BRACE3039288, BRACE3039358, BRACE3039378, BRACE3039454, BRACE3040012, BRACE3040239, BRACE3040504, BRACE3040644, BRACE3040856, BRACE3040863, BRACE3041059, BRACE3041162, BRACE3041827, BRACE3042046, BRACE3042210, BRACE3042326, BRACE3042409, BRACE3042432, BRACE3042594, BRACE3043597, BRACE3044090, BRACE3044172, BRACE3044247, BRACE3044377, BRACE3044389, BRACE3044495, BRACE3045011, BRACE3045033, BRACE3045078, BRACE3045145, BRACE3045424, BRACE3045708, BRACE3045981, BRACE3046049, BRACE3046152, BRACE3046294, BRACE3046450, BRACE3046466, BRACE3046491, BRACE3046609, BRACE3046762, BRACE3046837, BRACE3046855, BRACE3046966, BRACE3047018,

[1758] BRACE3047482, BRACE3047801, BRALZ1000047, BRALZ1000103, BRALZ2000189, BRALZ2000263, BRALZ2000988, BRALZ2001038, BRALZ2001279, BRALZ2001350, BRALZ2001445, BRALZ2001559, BRALZ2001743, BRALZ2001834, BRALZ2002174, BRALZ2002418, BRALZ2002477, BRALZ2003119, BRALZ2003330, BRALZ2003453, BRALZ2003525, BRALZ2004397, BRALZ2005467, BRALZ2005471, BRALZ2005888, BRALZ2005950, BRALZ2005992, BRALZ2006288, BRALZ2006474, BRALZ2006560, BRALZ2006734, BRALZ2006800, BRALZ2006976, BRALZ2007376, BRALZ2007545, BRALZ2007576, BRALZ2007661, BRALZ2007790, BRALZ2007793, BRALZ2007952, BRALZ2008031, BRALZ2008166, BRALZ2008462, BRALZ2008617, BRALZ2008696, BRALZ2008763, BRALZ2008869, BRALZ2008930, BRALZ2009446, BRALZ2009486,

[1759] BRALZ2010186, BRALZ2010842, BRALZ2011337, BRALZ2011796, BRALZ2011880, BRALZ2012050, BRALZ2012183, BRALZ2012848, BRALZ2013621, BRALZ2013690, BRALZ2014054, BRALZ2014316, BRALZ2014484, BRALZ2014951, BRALZ2015168, BRALZ2015811, BRALZ2016085, BRALZ2016498, BRALZ2017359, BRALZ2017531, BRALZ2017607, BRALZ2017620, BRALZ2017844, BRALZ2018342, BRALZ2018492, BRALZ2018834, BRALZ2019047, BRAMY1000095, BRAMY1000098, BRAMY1000130, BRAMY1000157, BRAMY1000173, BRAMY2000021, BRAMY2000025, BRAMY2000052, BRAMY2000076, BRAMY2000086, BRAMY2000151, BRAMY2000181, BRAMY2000196, BRAMY2000231, BRAMY2000277, BRAMY2000354, BRAMY2000388, BRAMY2000411, BRAMY2000508, BRAMY2000562, BRAMY2000585, BRAMY2000653, BRAMY2000814,

[1760] BRAMY2000893, BRAMY2000946, BRAMY2000981, BRAMY2000987, BRAMY2001068, BRAMY2001114, BRAMY2001203, BRAMY2001282, BRAMY2001367, BRAMY2001427, BRAMY2001473, BRAMY2001678, BRAMY2002005, BRAMY2002044, BRAMY2002072, BRAMY2002158, BRAMY2002311, BRAMY2002339, BRAMY2002364, BRAMY2002369, BRAMY2002479, BRAMY2002493, BRAMY2002525, BRAMY2002584, BRAMY2002604, BRAMY2002621, BRAMY2002638, BRAMY2002739, BRAMY2002799, BRAMY2002853, BRAMY2002862, BRAMY2002956, BRAMY2003008, BRAMY2003037, BRAMY2003117, BRAMY2003287, BRAMY2003325, BRAMY2003529, BRAMY2003538, BRAMY2003585, BRAMY2003634, BRAMY2003653, BRAMY2003681, BRAMY2003893, BRAMY2003897, BRAMY2003898, BRAMY2003904, BRAMY2003926, BRAMY2003929, BRAMY2004031,

[1761] BRAMY2004058, BRAMY2004183, BRAMY2004335, BRAMY2004351, BRAMY2004352, BRAMY2004363, BRAMY2004387, BRAMY2004492, BRAMY2004521, BRAMY2004524, BRAMY2004537, BRAMY2004542, BRAMY2004756, BRAMY2004771, BRAMY2005052, BRAMY2005064, BRAMY2005094, BRAMY2005151, BRAMY2005182, BRAMY2005244, BRAMY2005391, BRAMY2005488, BRAMY2005576, BRAMY2005648, BRAMY2005662, BRAMY2005708, BRAMY2005711, BRAMY2006092, BRAMY2006118, BRAMY2006149, BRAMY2006366, BRAMY2006375, BRAMY2006411, BRAMY2006459, BRAMY2006466, BRAMY2006659, BRAMY2006779, BRAMY2006809, BRAMY2006879, BRAMY2007043, BRAMY2007078, BRAMY2007110, BRAMY2007185, BRAMY2007244, BRAMY2007249, BRAMY2007255, BRAMY2007287, BRAMY2007308, BRAMY2007411, BRAMY2007458,

[1762] BRAMY2007486, BRAMY2007546, BRAMY2007567, BRAMY2007594, BRAMY2007610, BRAMY2007613, BRAMY2007653, BRAMY2007753, BRAMY2007859, BRAMY2008333, BRAMY2008382, BRAMY2008563, BRAMY2008583, BRAMY2008977, BRAMY2008979, BRAMY2009013, BRAMY2009023, BRAMY2009034, BRAMY2009105, BRAMY2009123, BRAMY2009192, BRAMY2009344, BRAMY2009349, BRAMY2009394, BRAMY2009489, BRAMY2009508, BRAMY2009528, BRAMY2009557, BRAMY2009612, BRAMY2009693, BRAMY2009934, BRAMY2010068, BRAMY2010135, BRAMY2010145, BRAMY2010171, BRAMY2010208, BRAMY2010239, BRAMY2010272, BRAMY2010290, BRAMY2010357, BRAMY2010366, BRAMY2010395, BRAMY2010441, BRAMY2010442, BRAMY2010464, BRAMY2010581, BRAMY2010798, BRAMY2010808, BRAMY2010919, BRAMY2011064,

[1763] BRAMY2011105, BRAMY2011178, BRAMY2011196, BRAMY2011216, BRAMY2011253, BRAMY2011446, BRAMY2011480, BRAMY2011639, BRAMY2011679, BRAMY2011811, BRAMY2011841, BRAMY2011846, BRAMY2011849, BRAMY2011872, BRAMY2011961, BRAMY2012017, BRAMY2012091, BRAMY2012119, BRAMY2012162, BRAMY2012163, BRAMY2012277, BRAMY2012340, BRAMY2012426, BRAMY2012497, BRAMY2012517, BRAMY2012536, BRAMY2012555, BRAMY2012568, BRAMY2012581, BRAMY2012691, BRAMY2012721, BRAMY2012731, BRAMY2012776, BRAMY2012880, BRAMY2012881, BRAMY2013169, BRAMY2013200, BRAMY2013216, BRAMY2013405, BRAMY2013414, BRAMY2013572, BRAMY2013590, BRAMY2013621, BRAMY2013659, BRAMY2013722, BRAMY2013736, BRAMY2013756, BRAMY2013944, BRAMY2013975, BRAMY2014019,

[1764] BRAMY2014205, BRAMY2014387, BRAMY2014462, BRAMY2014469, BRAMY2014541, BRAMY2014754, BRAMY2014813, BRAMY2015211, BRAMY2015251, BRAMY2015311, BRAMY2015420, BRAMY2015503, BRAMY2015516, BRAMY2015550, BRAMY2015551, BRAMY2015559, BRAMY2015688, BRAMY2015705, BRAMY2015782, BRAMY2015833, BRAMY2015855, BRAMY2015890, BRAMY2015911, BRAMY2015925, BRAMY2016002, BRAMY2016009, BRAMY2016020, BRAMY2016070, BRAMY2016251, BRAMY2016325, BRAMY2016327, BRAMY2016386, BRAMY2016706, BRAMY2016771, BRAMY2016892, BRAMY2016938, BRAMY2016953, BRAMY2017014, BRAMY2017249, BRAMY2017348, BRAMY2017450, BRAMY2017455, BRAMY2017528, BRAMY2017864, BRAMY2018027, BRAMY2018106, BRAMY2018122, BRAMY2018126, BRAMY2018272, BRAMY2018273,

[1765] BRAMY2018279, BRAMY2018295, BRAMY2018308, BRAMY2018396, BRAMY2018467, BRAMY2018635, BRAMY2018785, BRAMY2019055, BRAMY2019111, BRAMY2019277, BRAMY2019300, BRAMY2019468, BRAMY2019509, BRAMY2019554, BRAMY2019600, BRAMY2019643, BRAMY2019710, BRAMY2019963, BRAMY2019985, BRAMY2019989, BRAMY2020050, BRAMY2020058, BRAMY2020106, BRAMY2020270, BRAMY2020354, BRAMY2020355, BRAMY2020412, BRAMY2020445, BRAMY2020466, BRAMY2020520, BRAMY2020574, BRAMY2020634, BRAMY2020713, BRAMY2021040, BRAMY2021063, BRAMY2021098, BRAMY2021139, BRAMY2021142, BRAMY2021276, BRAMY2021310, BRAMY2021388, BRAMY2021498, BRAMY2021523, BRAMY2021710, BRAMY2021732, BRAMY2021746, BRAMY2021825, BRAMY2021867, BRAMY2021962, BRAMY2021982,

[1766] BRAMY2022052, BRAMY2022160, BRAMY2022168, BRAMY2022263, BRAMY2022301, BRAMY2022320, BRAMY2022383, BRAMY2022445, BRAMY2022454, BRAMY2022493, BRAMY2022525, BRAMY2022532, BRAMY2022723, BRAMY2022786, BRAMY2022796, BRAMY2022929, BRAMY2022980, BRAMY2022984, BRAMY2023060, BRAMY2023110, BRAMY2023115, BRAMY2023161, BRAMY2023172, BRAMY2023238, BRAMY2023327, BRAMY2023358, BRAMY2023406, BRAMY2023482, BRAMY2023514, BRAMY2023729, BRAMY2023786, BRAMY2023852, BRAMY2023863, BRAMY2023939, BRAMY2024004, BRAMY2024073, BRAMY2024312, BRAMY2024374, BRAMY2024390, BRAMY2024416, BRAMY2024449, BRAMY2024489, BRAMY2024497, BRAMY2024514, BRAMY2024530, BRAMY2024535, BRAMY2024545, BRAMY2024576, BRAMY2024593, BRAMY2024711,

[1767] BRAMY2024715, BRAMY2024728, BRAMY2024827, BRAMY2024849, BRAMY2025024, BRAMY2025032, BRAMY2025121, BRAMY2025175, BRAMY2025218, BRAMY2025230, BRAMY2025272, BRAMY2025277, BRAMY2025495, BRAMY2025812, BRAMY2025996, BRAMY2026009, BRAMY2026091, BRAMY2026168, BRAMY2026300, BRAMY2026347, BRAMY2026395, BRAMY2026405, BRAMY2026533, BRAMY2026538, BRAMY2026685, BRAMY2026713, BRAMY2026778, BRAMY2026824, BRAMY2026899, BRAMY2026902, BRAMY2026904, BRAMY2026976, BRAMY2027073, BRAMY2027114, BRAMY2027140, BRAMY2027242, BRAMY2027396, BRAMY2027451, BRAMY2027461, BRAMY2027467, BRAMY2027587, BRAMY2027714, BRAMY2027717, BRAMY2027752, BRAMY2027782, BRAMY2028072, BRAMY2028183, BRAMY2028188, BRAMY2028269, BRAMY2028282,

[1768] BRAMY2028472, BRAMY2028491, BRAMY2028516, BRAMY2028565, BRAMY2028593, BRAMY2028682, BRAMY2028740, BRAMY2028783, BRAMY2028796, BRAMY2028856, BRAMY2028914, BRAMY2029204, BRAMY2029602, BRAMY2029988, BRAMY2030098, BRAMY2030109, BRAMY2030206, BRAMY2030477, BRAMY2030545, BRAMY2030607, BRAMY2030702, BRAMY2030703, BRAMY2030768, BRAMY2030799, BRAMY2030859, BRAMY2030915, BRAMY2031317, BRAMY2031377, BRAMY2031442, BRAMY2031516, BRAMY2032014, BRAMY2032087, BRAMY2032231, BRAMY2032242, BRAMY2032290, BRAMY2032311, BRAMY2032317, BRAMY2032344, BRAMY2032589, BRAMY2032678, BRAMY2032696, BRAMY2032777, BRAMY2032994, BRAMY2033003, BRAMY2033116, BRAMY2033240, BRAMY2033267, BRAMY2033316, BRAMY2033332, BRAMY2033506,

[1769] BRAMY2033594, BRAMY2033895, BRAMY2033914, BRAMY2034072, BRAMY2034185, BRAMY2034187, BRAMY2034305, BRAMY2034561, BRAMY2034920, BRAMY2034993, BRAMY2035070, BRAMY2035449, BRAMY2035545, BRAMY2035606, BRAMY2035718, BRAMY2035719, BRAMY2035801, BRAMY2035869, BRAMY2035923, BRAMY2036076, BRAMY2036079, BRAMY2036254, BRAMY2036266, BRAMY2036396, BRAMY2036459, BRAMY2036567, BRAMY2036615, BRAMY2036699, BRAMY2036913, BRAMY2036918, BRAMY2036968, BRAMY2037147, BRAMY2037328, BRAMY2037609, BRAMY2037629, BRAMY2037800, BRAMY2037823, BRAMY2037971, BRAMY2038100, BRAMY2038128, BRAMY2038317, BRAMY2038475, BRAMY2038484, BRAMY2038516, BRAMY2038832, BRAMY2038846, BRAMY2038887, BRAMY2038904, BRAMY2039287, BRAMY2039300,

[1770] BRAMY2039314, BRAMY2039341, BRAMY2039630, BRAMY2039695, BRAMY2039728, BRAMY2039872, BRAMY2040051, BRAMY2040159, BRAMY2040214, BRAMY2040478, BRAMY2040592, BRAMY2040915, BRAMY2041261, BRAMY2041347, BRAMY2041378, BRAMY2041384, BRAMY2041434, BRAMY2041507, BRAMY2041542, BRAMY2041738, BRAMY2042122, BRAMY2042131, BRAMY2042178, BRAMY2042195, BRAMY2042244, BRAMY2042549, BRAMY2042596, BRAMY2042612, BRAMY2042641, BRAMY2042711, BRAMY2042760, BRAMY2042804, BRAMY2042899, BRAMY2042918, BRAMY2043069, BRAMY2043103, BRAMY2043314, BRAMY2043345, BRAMY2044246, BRAMY2044317, BRAMY2044349, BRAMY2044686, BRAMY2044838, BRAMY2045036, BRAMY2045299, BRAMY2045471, BRAMY2045530, BRAMY2046109, BRAMY2046478, BRAMY2046489,

[1771] BRAMY2046537, BRAMY2046667, BRAMY2046742, BRAMY2046871, BRAMY2046984, BRAMY2046989, BRAMY2047169, BRAMY2047280, BRAMY2047676, BRAMY2047692, BRAMY2047746, BRAMY2047751, BRAMY2047765, BRAMY2047884, BRAMY2047948, BRAMY3000206, BRAMY3000210, BRAMY3000213, BRAMY3000224, BRAMY3000254, BRAMY3000307, BRAMY3000692, BRAMY3001356, BRAMY3001401, BRAMY3001409, BRAMY3001794, BRAMY3002120, BRAMY3002312, BRAMY3002329, BRAMY3002458, BRAMY3002508, BRAMY3002620, BRAMY3002803, BRAMY3002805, BRAMY3002886, BRAMY3002991, BRAMY3003026, BRAMY3003109, BRAMY3003205, BRAMY3003310, BRAMY3003566, BRAMY3003723, BRAMY3004126, BRAMY3004224, BRAMY3004364, BRAMY3004377, BRAMY3004672, BRAMY3004800, BRAMY3004900, BRAMY3004919,

[1772] BRAMY3005091, BRAMY3005184, BRAMY3005656, BRAMY3005912, BRAMY3005932, BRAMY3006032, BRAMY3006297, BRAMY3006761, BRAMY3007078, BRAMY3007206, BRAMY3007311, BRAMY3007350, BRAMY3007449, BRAMY3007471, BRAMY3007609, BRAMY3007723, BRAMY3007968, BRAMY3008044, BRAMY3008088, BRAMY3008096, BRAMY3008335, BRAMY3008466, BRAMY3008505, BRAMY3008650, BRAMY3008937, BRAMY3009158, BRAMY3009207, BRAMY3009491, BRAMY3009556, BRAMY3009782, BRAMY3009811, BRAMY3009904, BRAMY3010008, BRAMY3010264, BRAMY3010321, BRAMY3010411, BRAMY3010492, BRAMY3010603, BRAMY3010654, BRAMY4000089, BRAMY4000095, BRAMY4000229, BRAMY4000277, BRAMY4000915, BRAMY4000962, BRAMY4001173, BRAMY4001200, BRAMY4001234, BRAMY4001449, BRAMY4001652,

[1773] BRAMY4001863, BRAMY4001913, BRAMY4002575, BRAMY4002628, BRASW1000053, BRASW1000125, BRAWH1000001, BRAWH1000002, BRAWH1000007, BRAWH1000037, BRAWH1000045, BRAWH1000083, BRAWH1000094, BRAWH1000116, BRAWH1000127, BRAWH1000130, BRAWH1000157, BRAWH1000162, BRAWH1000164, BRAWH1000168, BRAWH1000174, BRAWH1000180, BRAWH1000369, BRAWH2000034, BRAWH2000048, BRAWH2000071, BRAWH2000082, BRAWH2000093, BRAWH2000109, BRAWH2000131, BRAWH2000142, BRAWH2000169, BRAWH2000177, BRAWH2000218, BRAWH2000232, BRAWH2000248, BRAWH2000256, BRAWH2000274, BRAWH2000323, BRAWH2000353, BRAWH2000370, BRAWH2000409, BRAWH2000417, BRAWH2000443, BRAWH2000460, BRAWH2000471, BRAWH2000476, BRAWH2000482, BRAWH2000488, BRAWH2000494,

[1774] BRAWH2000500, BRAWH2000503, BRAWH2000522, BRAWH2000554, BRAWH2000595, BRAWH2000633, BRAWH2000636, BRAWH2000643, BRAWH2000651, BRAWH2000682, BRAWH2000686, BRAWH2000697, BRAWH2000752, BRAWH2000839, BRAWH2000859, BRAWH2000866, BRAWH2000892, BRAWH2000901, BRAWH2000924, BRAWH2000926, BRAWH2000944, BRAWH2000984, BRAWH2001019, BRAWH2001037, BRAWH2001052, BRAWH2001103, BRAWH2001129, BRAWH2001137, BRAWH2001141, BRAWH2001159, BRAWH2001166, BRAWH2001171, BRAWH2001186, BRAWH2001203, BRAWH2001238, BRAWH2001239, BRAWH2001255, BRAWH2001321, BRAWH2001355, BRAWH2001378, BRAWH2001395, BRAWH2001406, BRAWH2001412, BRAWH2001418, BRAWH2001424, BRAWH2001436, BRAWH2001438, BRAWH2001439, BRAWH2001459, BRAWH2001461,

[1775] BRAWH2001484, BRAWH2001492, BRAWH2001503, BRAWH2001519, BRAWH2001530, BRAWH2001535, BRAWH2001589, BRAWH2001662, BRAWH2001666, BRAWH2001671, BRAWH2001679, BRAWH2001686, BRAWH2001701, BRAWH2001842, BRAWH2001862, BRAWH2001873, BRAWH2001940, BRAWH2001973, BRAWH2002047, BRAWH2002060, BRAWH2002062, BRAWH2002125, BRAWH2002191, BRAWH2002318, BRAWH2002333, BRAWH2002352, BRAWH2002383, BRAWH2002549, BRAWH2002560, BRAWH2002601, BRAWH2002623, BRAWH2002630, BRAWH2002635, BRAWH2002662, BRAWH2002679, BRAWH2002725, BRAWH2002761, BRAWH2002811, BRAWH2002861, BRAWH2002911, BRAWH2002963, BRAWH2002967, BRAWH2002976, BRAWH2003000, BRAWH2003025, BRAWH2003135, BRAWH2003240, BRAWH2003307, BRAWH2003355, BRAWH2003366,

[1776] BRAWH2003662, BRAWH2003689, BRAWH2003693, BRAWH2003818, BRAWH2003832, BRAWH2003948, BRAWH2003964, BRAWH2004044, BRAWH2004068, BRAWH2004078, BRAWH2004095, BRAWH2004136, BRAWH2004217, BRAWH2004580, BRAWH2004731, BRAWH2004779, BRAWH2004842, BRAWH2004884, BRAWH2004923, BRAWH2005008, BRAWH2005068, BRAWH2005074, BRAWH2005225, BRAWH2005315, BRAWH2005517, BRAWH2005524, BRAWH2005533, BRAWH2005578, BRAWH2005661, BRAWH2005812, BRAWH2005974, BRAWH2005998, BRAWH2006044, BRAWH2006083, BRAWH2006207, BRAWH2006301, BRAWH2006395, BRAWH2006405, BRAWH2006450, BRAWH2006493, BRAWH2006526, BRAWH2006543, BRAWH2006622, BRAWH2006760, BRAWH2006960, BRAWH2006989, BRAWH2006996, BRAWH2007069, BRAWH2007308, BRAWH2007406,

[1777] BRAWH2007550, BRAWH2007570, BRAWH2007591, BRAWH2007605, BRAWH2007658, BRAWH2007664, BRAWH2007808, BRAWH2007825, BRAWH2007862, BRAWH2007890, BRAWH2008058, BRAWH2008128, BRAWH2008219, BRAWH2008255, BRAWH2008292, BRAWH2008297, BRAWH2008366, BRAWH2008380, BRAWH2008540, BRAWH2008706, BRAWH2008790, BRAWH2008903, BRAWH2008956, BRAWH2008993, BRAWH2009112, BRAWH2009227, BRAWH2009238, BRAWH2009261, BRAWH2009263, BRAWH2009298, BRAWH2009304, BRAWH2009307, BRAWH2009360, BRAWH2009393, BRAWH2009485, BRAWH2009558, BRAWH2009590, BRAWH2009626, BRAWH2009678, BRAWH2009695, BRAWH2009907, BRAWH2010000, BRAWH2010069, BRAWH2010084, BRAWH2010136, BRAWH2010318, BRAWH2010329, BRAWH2010354, BRAWH2010364, BRAWH2010536,

[1778] BRAWH2010552, BRAWH2010584, BRAWH2010618, BRAWH2010619, BRAWH2010754, BRAWH2010980, BRAWH2011066, BRAWH2011079, BRAWH2011096, BRAWH2011155, BRAWH2011166, BRAWH2011204, BRAWH2011286, BRAWH2011294, BRAWH2011343, BRAWH2011400, BRAWH2011762, BRAWH2011795, BRAWH2011796, BRAWH2011812, BRAWH2011823, BRAWH2011860, BRAWH2011920, BRAWH2011958, BRAWH2012054, BRAWH2012077, BRAWH2012162, BRAWH2012164, BRAWH2012258, BRAWH2012277, BRAWH2012326, BRAWH2012538, BRAWH2012540, BRAWH2012619, BRAWH2012698, BRAWH2012749, BRAWH2012827, BRAWH2012866, BRAWH2012963, BRAWH2013047, BRAWH2013219, BRAWH2013294, BRAWH2013748, BRAWH2013866, BRAWH2013871, BRAWH2013914, BRAWH2013941, BRAWH2013955, BRAWH2014053, BRAWH2014188,

[1779] BRAWH2014234, BRAWH2014379, BRAWH2014414, BRAWH2014473, BRAWH2014511, BRAWH2014645, BRAWH2014662, BRAWH2014717, BRAWH2014729, BRAWH2014876, BRAWH2014934, BRAWH2014954, BRAWH2015247, BRAWH2015349, BRAWH2015375, BRAWH2015385, BRAWH2015595, BRAWH2015728, BRAWH2015853, BRAWH2015866, BRAWH2016028, BRAWH2016106, BRAWH2016160, BRAWH2016166, BRAWH2016209, BRAWH2016221, BRAWH2016223, BRAWH2016305, BRAWH2016439, BRAWH2016446, BRAWH2016514, BRAWH2016562, BRAWH2016655, BRAWH2016679, BRAWH2016702, BRAWH2016724, BRAWH2016785, BRAWH2016792, BRAWH2016800, BRAWH2017002, BRAWH2017103, BRAWH2017250, BRAWH2017294, BRAWH2017304, BRAWH2017305, BRAWH2017379, BRAWH2017407, BRAWH2017433, BRAWH2017523, BRAWH2017534,

[1780] BRAWH2017542, BRAWH2017635, BRAWH2017913, BRAWH2018206, BRAWH2018267, BRAWH2018282, BRAWH2018317, BRAWH2018506, BRAWH2018514, BRAWH2018527, BRAWH2018601, BRAWH2018729, BRAWH2018745, BRAWH2018875, BRAWH2019053, BRAWH2019055, BRAWH2019198, BRAWH3000078, BRAWH3000088, BRAWH3000100, BRAWH3000166, BRAWH3000314, BRAWH3000329, BRAWH3000410, BRAWH3000446, BRAWH3000491, BRAWH3000604, BRAWH3000884, BRAWH3001053, BRAWH3001319, BRAWH3001326, BRAWH3001475, BRAWH3001636, BRAWH3001638, BRAWH3001712, BRAWH3001760, BRAWH3001783, BRAWH3001833, BRAWH3001879, BRAWH3001891, BRAWH3001918, BRAWH3002433, BRAWH3002467, BRAWH3002513, BRAWH3002574, BRAWH3002600, BRAWH3002819, BRAWH3003019, BRAWH3003136, BRAWH3003244,

[1781] BRAWH3003343, BRAWH3003411, BRAWH3003522, BRAWH3003573, BRAWH3003598, BRAWH3003727, BRAWH3003801, BRAWH3003975, BRAWH3004222, BRAWH3004335, BRAWH3004350, BRAWH3004453, BRAWH3004530, BRAWH3004666, BRAWH3005037, BRAWH3005047, BRAWH3005132, BRAWH3005146, BRAWH3005292, BRAWH3005300, BRAWH3005422, BRAWH3005534, BRAWH3005886, BRAWH3005892, BRAWH3005896, BRAWH3005912, BRAWH3005981, BRAWH3006547, BRAWH3006548, BRAWH3006761, BRAWH3006792, BRAWH3007129, BRAWH3007221, BRAWH3007441, BRAWH3007455, BRAWH3007506, BRAWH3007726, BRAWH3007783, BRAWH3008167, BRAWH3008341, BRAWH3008559, BRAWH3008697, BRAWH3008867, BRAWH3008931, BRAWH3009017, BRAWH3009285, BRAWH3009297, BRAWH3009546, BRAWH3009961, BRAWH3010461,

[1782] BRAWH3010560, BRAWH3010602, BRAWH3010657, BRAWH3010726, BRAWH3010833, BRAWH3011101, BRAWH3011331, BRAWH3011402, BRAWH3011577, BRAWH3011623, BRAWH3011637, BRAWH3011685, BRAWH3011907, BRAWH3011929, BRAWH3012005, BRAWH3012662, BRAWH3012779, BRAWH3013009, BRAWH3013049, BRAWH3013197, BRAWH3013264, BRAWH3013508, BRAWH3014609, BRAWH3014639, BRAWH3015017, BRAWH3015175, BRAWH3015260, BRAWH3015610, BRAWH3015825, BRAWH3016123, BRAWH3016271, BRAWH3016715, BRAWH3017259, BRAWH3017260, BRAWH3017477, BRAWH3017537, BRAWH3017980, BRAWH3018063, BRAWH3018369, BRAWH3018548, BRAWH3018969, BRAWH3019026, BRAWH3019529, BRAWH3019594, BRAWH3019629, BRAWH3019820, BRAWH3020200, BRAWH3020318, BRAWH3020486, BRAWH3020884,

[1783] BRAWH3020928, BRAWH3021012, BRAWH3021545, BRAWH3021574, BRAWH3021580, BRAWH3021641, BRAWH3021643, BRAWH3021724, BRAWH3022347, BRAWH3022431, BRAWH3022459, BRAWH3022542, BRAWH3022719, BRAWH3022866, BRAWH3022900, BRAWH3023156, BRAWH3023168, BRAWH3023172, BRAWH3023274, BRAWH3023421, BRAWH3024231, BRAWH3024242, BRAWH3024469, BRAWH3024506, BRAWH3024613, BRAWH3024989, BRAWH3026349, BRAWH3026394, BRAWH3026529, BRAWH3027420, BRAWH3027440, BRAWH3027533, BRAWH3027574, BRAWH3027607, BRAWH3027616, BRAWH3027675, BRAWH3027806, BRAWH3027880, BRAWH3027927, BRAWH3028202, BRAWH3028223, BRAWH3028306, BRAWH3028461, BRAWH3028645, BRAWH3028754, BRAWH3028796, BRAWH3029254, BRAWH3029313, BRAWH3029538, BRAWH3029556,

[1784] BRAWH3029806, BRAWH3030613, BRAWH3030772, BRAWH3030810, BRAWH3030892, BRAWH3030910, BRAWH3030950, BRAWH3031054, BRAWH3031710, BRAWH3031902, BRAWH3032298, BRAWH3032340, BRAWH3032571, BRAWH3032620, BRAWH3032930, BRAWH3033117, BRAWH3033293, BRAWH3033448, BRAWH3033513, BRAWH3034097, BRAWH3034114, BRAWH3034134, BRAWH3034668, BRAWH3034743, BRAWH3034775, BRAWH3034890, BRAWH3035154, BRAWH3035403, BRAWH3035904, BRAWH3035914, BRAWH3035936, BRAWH3036077, BRAWH3036247, BRAWH3036270, BRAWH3036561, BRAWH3036738, BRAWH3036951, BRAWH3037265, BRAWH3037394, BRAWH3037533, BRAWH3037979, BRAWH3038055, BRAWH3038230, BRAWH3038252, BRAWH3038324, BRCAN1000065, BRCAN1000076, BRCAN1000105, BRCAN1000149, BRCAN1000168,

[1785] BRCAN2000148, BRCAN2000149, BRCAN2000209, BRCAN2000239, BRCAN2000346, BRCAN2000364, BRCAN2000383, BRCAN2000418, BRCAN2000523, BRCAN2000541, BRCAN2000563, BRCAN2000577, BRCAN2000620, BRCAN2000639, BRCAN2000763, BRCAN2000832, BRCAN2000923, BRCAN2001223, BRCAN2001866, BRCAN2002173, BRCAN2002416, BRCAN2002473, BRCAN2002562, BRCAN2002662, BRCAN2002826, BRCAN2002854, BRCAN2002856, BRCAN2002892, BRCAN2002944, BRCAN2002948, BRCAN2003070, BRCAN2003269, BRCAN2003389, BRCAN2003628, BRCAN2003703, BRCAN2003746, BRCAN2003814, BRCAN2003944, BRCAN2003987, BRCAN2004173, BRCAN2004355, BRCAN2004371, BRCAN2004653, BRCAN2004699, BRCAN2005436, BRCAN2005449, BRCAN2006019, BRCAN2006051, BRCAN2006063, BRCAN2006117,

[1786] BRCAN2006174, BRCAN2006290, BRCAN2006297, BRCAN2006323, BRCAN2006401, BRCAN2006411, BRCAN2006450, BRCAN2006955, BRCAN2007119, BRCAN2007144, BRCAN2007409, BRCAN2007426, BRCAN2007525, BRCAN2007700, BRCAN2008494, BRCAN2008528, BRCAN2008701, BRCAN2008894, BRCAN2009156, BRCAN2009168, BRCAN2009203, BRCAN2010374, BRCAN2010376, BRCAN2010547, BRCAN2010581, BRCAN2010665, BRCAN2011254, BRCAN2011316, BRCAN2011602, BRCAN2011946, BRCAN2012110, BRCAN2012355, BRCAN2012402, BRCAN2012408, BRCAN2012481, BRCAN2012613, BRCAN2012713, BRCAN2012929, BRCAN2013655, BRCAN2013660, BRCAN2014143, BRCAN2014229, BRCAN2014370, BRCAN2014602, BRCAN2014652, BRCAN2014788, BRCAN2014881, BRCAN2014952, BRCAN2015371, BRCAN2015402,

[1787] BRCAN2015464, BRCAN2015719, BRCAN2015757, BRCAN2015886, BRCAN2016025, BRCAN2016046, BRCAN2016174, BRCAN2016433, BRCAN2016619, BRCAN2016762, BRCAN2016814, BRCAN2017442, BRCAN2017905, BRCAN2018240, BRCAN2018269, BRCAN2018490, BRCAN2018566, BRCAN2018667, BRCAN2018748, BRCAN2018935, BRCAN2019002, BRCAN2019387, BRCAN2019653, BRCAN2019773, BRCAN2019907, BRCAN2020234, BRCAN2020331, BRCAN2020412, BRCAN2020467, BRCAN2020710, BRCAN2020880, BRCAN2021024, BRCAN2021028, BRCAN2021325, BRCAN2021452, BRCAN2021669, BRCAN2021718, BRCAN2022126, BRCAN2022191, BRCAN2022472, BRCAN2022474, BRCAN2023347, BRCAN2023724, BRCAN2024451, BRCAN2024563, BRCAN2024572, BRCAN2025009, BRCAN2025093, BRCAN2025349, BRCAN2025368,

[1788] BRCAN2025712, BRCAN2025982, BRCAN2026117, BRCAN2026197, BRCAN2026340, BRCAN2026711, BRCAN2027150, BRCAN2027310, BRCAN2027334, BRCAN2027355, BRCAN2027364, BRCAN2027513, BRCAN2027593, BRCAN2027970, BRCAN2028021, BRCAN2028036, BRCAN2028040, BRCAN2028319, BRCAN2028338, BRCAN2028355, BRCAN2028378, BRCAN2028460, BRCAN2028545, BRCAN2028634, BRCAN2028702, BRCOC1000040, BRCOC1000087, BRCOC1000094, BRCOC2000004, BRCOC2000047, BRCOC2000152, BRCOC2000184, BRCOC2000186, BRCOC2000333, BRCOC2000360, BRCOC2000404, BRCOC2000487, BRCOC2000637, BRCOC2000670, BRCOC2000816, BRCOC2000850, BRCOC2001355, BRCOC2002085, BRCOC2002155, BRCOC2002323, BRCOC2002659, BRCOC2002664, BRCOC2002686, BRCOC2002751, BRCOC2002756,

[1789] BRCOC2002777, BRCOC2002835, BRCOC2003100, BRCOC2003125, BRCOC2003187, BRCOC2003213, BRCOC2003513, BRCOC2003732, BRCOC2003740, BRCOC2004036, BRCOC2004175, BRCOC2004354, BRCOC2004455, BRCOC2004950, BRCOC2005542, BRCOC2005903, BRCOC2005951, BRCOC2006164, BRCOC2006189, BRCOC2006243, BRCOC2006270, BRCOC2006639, BRCOC2006942, BRCOC2007034, BRCOC2007593, BRCOC2007733, BRCOC2007769, BRCOC2008064, BRCOC2008225, BRCOC2008642, BRCOC2008993, BRCOC2009052, BRCOC2009196, BRCOC2009380, BRCOC2009638, BRCOC2009937, BRCOC2010115, BRCOC2010123, BRCOC2010510, BRCOC2010730, BRCOC2010980, BRCOC2010994, BRCOC2011010, BRCOC2011398, BRCOC2011418, BRCOC2011506, BRCOC2011769, BRCOC2011996, BRCOC2012172, BRCOC2012229,

[1790] BRCOC2012386, BRCOC2012551, BRCOC2012813, BRCOC2013448, BRCOC2013573, BRCOC2013675, BRCOC2013780, BRCOC2014013, BRCOC2014033, BRCOC2014400, BRCOC2014748, BRCOC2014833, BRCOC2015597, BRCOC2015824, BRCOC2015908, BRCOC2015944, BRCOC2016525, BRCOC2016661, BRCOC2017061, BRCOC2017652, BRCOC2017856, BRCOC2018775, BRCOC2018877, BRCOC2019255, BRCOC2019549, BRCOC2019841, BRCOC2019896, BRCOC2019903, BRCOC2019910, BRCOC2019934, BRCOC2020122, BRCOC2020142, BRHIP1000058, BRHIP1000072, BRHIP1000104, BRHIP1000108, BRHIP1000129, BRHIP1000174, BRHIP1000258, BRHIP2000021, BRHIP2000079, BRHIP2000087, BRHIP2000163, BRHIP2000210, BRHIP2000239, BRHIP2000245, BRHIP2000312, BRHIP2000359, BRHIP2000445, BRHIP2000506,

[1791] BRHIP2000532, BRHIP2000553, BRHIP2000621, BRHIP2000691, BRHIP2000819, BRHIP2000826, BRHIP2000920, BRHIP2001074, BRHIP2001099, BRHIP2001686, BRHIP2001782, BRHIP2001802, BRHIP2001805, BRHIP2001886, BRHIP2001927, BRHIP2002122, BRHIP2002143, BRHIP2002172, BRHIP2002339, BRHIP2002346, BRHIP2002510, BRHIP2002664, BRHIP2002722, BRHIP2002929, BRHIP2003048, BRHIP2003062, BRHIP2003242, BRHIP2003272, BRHIP2003748, BRHIP2003786, BRHIP2003828, BRHIP2003917, BRHIP2004312, BRHIP2004355, BRHIP2004359, BRHIP2004814, BRHIP2004883, BRHIP2004902, BRHIP2005010, BRHIP2005236, BRHIP2005271, BRHIP2005354, BRHIP2005600, BRHIP2005719, BRHIP2005724, BRHIP2005752, BRHIP2005932, BRHIP2006617, BRHIP2006782, BRHIP2006800,

[1792] BRHIP2006819, BRHIP2006921, BRHIP2007305, BRHIP2007307, BRHIP2007616, BRHIP2007690, BRHIP2007741, BRHIP2007928, BRHIP2007969, BRHIP2008269, BRHIP2008389, BRHIP2008607, BRHIP2008756, BRHIP2008909, BRHIP2009019, BRHIP2009177, BRHIP2009340, BRHIP2009351, BRHIP2009414, BRHIP2009474, BRHIP2009617, BRHIP2009685, BRHIP2010217, BRHIP2010309, BRHIP2010444, BRHIP2010487, BRHIP2010571, BRHIP2010610, BRHIP2010723, BRHIP2010744, BRHIP2011080, BRHIP2011120, BRHIP2011199, BRHIP2011508, BRHIP2011576, BRHIP2011616, BRHIP2011783, BRHIP2011838, BRHIP2011891, BRHIP2011933, BRHIP2012054, BRHIP2012059, BRHIP2012141, BRHIP2012314, BRHIP2012360, BRHIP2012545, BRHIP2012580, BRHIP2012627, BRHIP2012642, BRHIP2012750,

[1793] BRHIP2012922, BRHIP2012923, BRHIP2012972, BRHIP2013286, BRHIP2013447, BRHIP2013510, BRHIP2013699, BRHIP2013723, BRHIP2013958, BRHIP2013972, BRHIP2014063, BRHIP2014228, BRHIP2014285, BRHIP2014291, BRHIP2014373, BRHIP2014386, BRHIP2014387, BRHIP2014954, BRHIP2015153, BRHIP2015224, BRHIP2015245, BRHIP2015356, BRHIP2015360, BRHIP2015679, BRHIP2016005, BRHIP2016125, BRHIP2016788, BRHIP2016968, BRHIP2016990, BRHIP2017010, BRHIP2017315, BRHIP2017385, BRHIP2017404, BRHIP2017542, BRHIP2017553, BRHIP2017642, BRHIP2017714, BRHIP2017780, BRHIP2017945, BRHIP2018014, BRHIP2018369, BRHIP2018612, BRHIP2018635, BRHIP2018650, BRHIP2018712, BRHIP2018719, BRHIP2018805, BRHIP2018998, BRHIP2019007, BRHIP2019047,

[1794] BRHIP2019149, BRHIP2019177, BRHIP2019291, BRHIP2019494, BRHIP2019589, BRHIP2019641, BRHIP2019819, BRHIP2019884, BRHIP2019972, BRHIP2020182, BRHIP2020509, BRHIP2020573, BRHIP2020622, BRHIP2020695, BRHIP2020743, BRHIP2020799, BRHIP2020842, BRHIP2020859, BRHIP2020930, BRHIP2021102, BRHIP2021289, BRHIP2021495, BRHIP2021615, BRHIP2021744, BRHIP2021762, BRHIP2021858, BRHIP2021870, BRHIP2021929, BRHIP2022006, BRHIP2022054, BRHIP2022221, BRHIP2022228, BRHIP2022298, BRHIP2022326, BRHIP2022467, BRHIP2022708, BRHIP2022986, BRHIP2023071, BRHIP2023229, BRHIP2023272, BRHIP2023292, BRHIP2023309, BRHIP2023369, BRHIP2023438, BRHIP2023695, BRHIP2023735, BRHIP2023762, BRHIP2023773, BRHIP2023860, BRHIP2023869,

[1795] BRHIP2023888, BRHIP2024046, BRHIP2024165, BRHIP2024201, BRHIP2024347, BRHIP2024398, BRHIP2024549, BRHIP2024742, BRHIP2024789, BRHIP2024911, BRHIP2024941, BRHIP2025245, BRHIP2025366, BRHIP2025448, BRHIP2025679, BRHIP2025739, BRHIP2025797, BRHIP2026021, BRHIP2026061, BRHIP2026155, BRHIP2026214, BRHIP2026288, BRHIP2026346, BRHIP2026557, BRHIP2026723, BRHIP2026877, BRHIP2027017, BRHIP2027054, BRHIP2027077, BRHIP2027563, BRHIP2027685, BRHIP2027762, BRHIP2028187, BRHIP2028303, BRHIP2028330, BRHIP2028480, BRHIP2028583, BRHIP2028593, BRHIP2029176, BRHIP2029283, BRHIP2029393, BRHIP2029529, BRHIP2029643, BRHIP2029663, BRHIP3000017, BRHIP3000060, BRHIP3000070, BRHIP3000081, BRHIP3000111, BRHIP3000131,

[1796] BRHIP3000240, BRHIP3000377, BRHIP3000457, BRHIP3000475, BRHIP3000488, BRHIP3000526, BRHIP3000626, BRHIP3000859, BRHIP3000907, BRHIP3001076, BRHIP3001079, BRHIP3001141, BRHIP3001283, BRHIP3001338, BRHIP3001360, BRHIP3001481, BRHIP3001878, BRHIP3001964, BRHIP3002114, BRHIP3002124, BRHIP3002141, BRHIP3002363, BRHIP3002691, BRHIP3002920, BRHIP3002931, BRHIP3003063, BRHIP3003126, BRHIP3003306, BRHIP3003340, BRHIP3003395, BRHIP3003484, BRHIP3003644, BRHIP3003688, BRHIP3003795, BRHIP3003961, BRHIP3003984, BRHIP3004193, BRHIP3004215, BRHIP3004416, BRHIP3004710, BRHIP3004725, BRHIP3004774, BRHIP3004786, BRHIP3004863, BRHIP3004968, BRHIP3005037, BRHIP3005137, BRHIP3005142, BRHIP3005231, BRHIP3005307,

[1797] BRHIP3005574, BRHIP3005673, BRHIP3005768, BRHIP3005801, BRHIP3005944, BRHIP3006279, BRHIP3006294, BRHIP3006390, BRHIP3006449, BRHIP3006683, BRHIP3006717, BRHIP3006786, BRHIP3006950, BRHIP3007172, BRHIP3007183, BRHIP3007195, BRHIP3007239, BRHIP3007291, BRHIP3007409, BRHIP3007424, BRHIP3007483, BRHIP3007586, BRHIP3007609, BRHIP3007640, BRHIP3007960, BRHIP3008082, BRHIP3008183, BRHIP3008314, BRHIP3008320, BRHIP3008344, BRHIP3008405, BRHIP3008565, BRHIP3008598, BRHIP3008606, BRHIP3008691, BRHIP3008714, BRHIP3008997, BRHIP3009099, BRHIP3009140, BRHIP3009181, BRHIP3009318, BRHIP3009427, BRHIP3009448, BRHIP3009672, BRHIP3010135, BRHIP3010289, BRHIP3010529, BRHIP3011082, BRHIP3011241, BRHIP3011269,

[1798] BRHIP3011460, BRHIP3011567, BRHIP3011831, BRHIP3012185, BRHIP3012289, BRHIP3012357, BRHIP3012736, BRHIP3012745, BRHIP3012868, BRHIP3012997, BRHIP3013078, BRHIP3013271, BRHIP3013588, BRHIP3013698, BRHIP3013765, BRHIP3013897, BRHIP3014237, BRHIP3014675, BRHIP3015620, BRHIP3015751, BRHIP3015854, BRHIP3016032, BRHIP3016213, BRHIP3016302, BRHIP3016421, BRHIP3017109, BRHIP3017146, BRHIP3017256, BRHIP3017325, BRHIP3017558, BRHIP3017637, BRHIP3017855, BRHIP3018278, BRHIP3019643, BRHIP3019824, BRHIP3019880, BRHIP3019956, BRHIP3020046, BRHIP3020155, BRHIP3020182, BRHIP3020733, BRHIP3021019, BRHIP3021499, BRHIP3021534, BRHIP3021778, BRHIP3021987, BRHIP3022656, BRHIP3023922, BRHIP3024118, BRHIP3024533,

[1799] BRHIP3024703, BRHIP3024725, BRHIP3024820, BRHIP3025161, BRHIP3025702, BRHIP3025795, BRHIP3025844, BRHIP3026052, BRHIP3026097, BRHIP3026231, BRHIP3026335, BRHIP3026651, BRHIP3027105, BRHIP3027137, BRHIP3027160, BRHIP3027191, BRHIP3027501, BRHIP3027594, BRHIP3027651, BRHIP3027854, BRHIP3027947, BRHIP3028570, BRHIP3028742, BRSSN1000056, BRSSN1000059, BRSSN1000092, BRSSN1000153, BRSSN2000097, BRSSN2000175, BRSSN2000197, BRSSN2000244, BRSSN2000293, BRSSN2000295, BRSSN2000312, BRSSN2000498, BRSSN2000518, BRSSN2000561, BRSSN2000566, BRSSN2000684, BRSSN2000715, BRSSN2000832, BRSSN2001213, BRSSN2001275, BRSSN2001342, BRSSN2001426, BRSSN2001503, BRSSN2001579, BRSSN2001758, BRSSN2001810, BRSSN2001869,

[1800] BRSSN2002857, BRSSN2002859, BRSSN2003012, BRSSN2003086, BRSSN2003093, BRSSN2003820, BRSSN2003841, BRSSN2003937, BRSSN2004142, BRSSN2004303, BRSSN2004304, BRSSN2004496, BRSSN2004657, BRSSN2004679, BRSSN2004686, BRSSN2004710, BRSSN2004719, BRSSN2005847, BRSSN2006133, BRSSN2006390, BRSSN2006575, BRSSN2006611, BRSSN2006644, BRSSN2006892, BRSSN2007076, BRSSN2007168, BRSSN2007202, BRSSN2007338, BRSSN2007464, BRSSN2007504, BRSSN2007819, BRSSN2008125, BRSSN2008419, BRSSN2008464, BRSSN2008549, BRSSN2008797, BRSSN2009119, BRSSN2009378, BRSSN2009389, BRSSN2009395, BRSSN2009518, BRSSN2009627, BRSSN2009630, BRSSN2009702, BRSSN2010019, BRSSN2010110, BRSSN2010587, BRSSN2010596, BRSSN2010830, BRSSN2011262,

[1801] BRSSN2011653, BRSSN2011738, BRSSN2011843, BRSSN2012081, BRSSN2012103, BRSSN2012157, BRSSN2012198, BRSSN2012254, BRSSN2012439, BRSSN2012622, BRSSN2012691, BRSSN2012838, BRSSN2013095, BRSSN2013544, BRSSN2013696, BRSSN2013702, BRSSN2013733, BRSSN2013753, BRSSN2013874, BRSSN2014112, BRSSN2014294, BRSSN2014299, BRSSN2014424, BRSSN2014513, BRSSN2014556, BRSSN2014573, BRSSN2014610, BRSSN2014636, BRSSN2014685, BRSSN2015199, BRSSN2015369, BRSSN2015493, BRSSN2015497, BRSSN2015554, BRSSN2015707, BRSSN2015773, BRSSN2015907, BRSSN2015982, BRSSN2016589, BRSSN2016768, BRSSN2016905, BRSSN2017297, BRSSN2017422, BRSSN2017530, BRSSN2017682, BRSSN2017757, BRSSN2018218, BRSSN2018440, BRSSN2018447, BRSSN2018581,

[1802] BRSSN2018731, BRSSN2018771, BRSSN2018925, BRSTN1000097, BRSTN2000058, BRSTN2000070, BRSTN2000220, BRSTN2000312, BRSTN2000367, BRSTN2000536, BRSTN2000872, BRSTN2001067, BRSTN2001613, BRSTN2001801, BRSTN2002105, BRSTN2002400, BRSTN2002532, BRSTN2002691, BRSTN2003590, BRSTN2003835, BRSTN2004863, BRSTN2004869, BRSTN2004987, BRSTN2005721, BRSTN2006306, BRSTN2006466, BRSTN2006580, BRSTN2006583, BRSTN2006638, BRSTN2006865, BRSTN2007000, BRSTN2007118, BRSTN2007284, BRSTN2007765, BRSTN2008052, BRSTN2008283, BRSTN2008367, BRSTN2008418, BRSTN2008457, BRSTN2008475, BRSTN2008930, BRSTN2009247, BRSTN2010089, BRSTN2010107, BRSTN2010363, BRSTN2010416, BRSTN2010500, BRSTN2010569, BRSTN2010750, BRSTN2010923,

[1803] BRSTN2011211, BRSTN2011597, BRSTN2011688, BRSTN2011799, BRSTN2011961, BRSTN2012089, BRSTN2012284, BRSTN2012320, BRSTN2012380, BRSTN2012451, BRSTN2013171, BRSTN2013354, BRSTN2013502, BRSTN2013931, BRSTN2014490, BRSTN2014633, BRSTN2014751, BRSTN2014770, BRSTN2015015, BRSTN2015889, BRSTN2015978, BRSTN2016066, BRSTN2016335, BRSTN2016470, BRSTN2016678, BRSTN2016892, BRSTN2016918, BRSTN2016992, BRSTN2017104, BRSTN2017151, BRSTN2017237, BRSTN2017379, BRSTN2017761, BRSTN2017771, BRSTN2017995, BRSTN2018077, BRSTN2018083, BRSTN2018596, BRSTN2018692, BRSTN2018712, BRSTN2019079, BRSTN2019129, BRTHA1000021, BRTHA1000063, BRTHA1000311, BRTHA2000057, BRTHA2000474, BRTHA2000514, BRTHA2000574, BRTHA2000855,

[1804] BRTHA2000969, BRTHA2000972, BRTHA2001304, BRTHA2001370, BRTHA2001462, BRTHA2001717, BRTHA2001812, BRTHA2002091, BRTHA2002115, BRTHA2002133, BRTHA2002281, BRTHA2002376, BRTHA2002442, BRTHA2002493, BRTHA2002565, BRTHA2002608, BRTHA2002702, BRTHA2002721, BRTHA2002726, BRTHA2002741, BRTHA2002808, BRTHA2002896, BRTHA2002903, BRTHA2003030, BRTHA2003110, BRTHA2003116, BRTHA2003436, BRTHA2003759, BRTHA2003794, BRTHA2004361, BRTHA2004371, BRTHA2004582, BRTHA2004629, BRTHA2004639, BRTHA2004642, BRTHA2004812, BRTHA2004821, BRTHA2004978, BRTHA2004992, BRTHA2005005, BRTHA2005013, BRTHA2005448, BRTHA2005579, BRTHA2005831, BRTHA2005864, BRTHA2005942, BRTHA2005956, BRTHA2006075, BRTHA2006146, BRTHA2006194,

[1805] BRTHA2006232, BRTHA2006720, BRTHA2006735, BRTHA2006974, BRTHA2006975, BRTHA2007060, BRTHA2007122, BRTHA2007422, BRTHA2007603, BRTHA2007665, BRTHA2007998, BRTHA2008316, BRTHA2008335, BRTHA2008502, BRTHA2008513, BRTHA2008527, BRTHA2008535, BRTHA2008598, BRTHA2008669, BRTHA2008955, BRTHA2009311, BRTHA2009349, BRTHA2009486, BRTHA2009803, BRTHA2009846, BRTHA2009886, BRTHA2009972, BRTHA2010008, BRTHA2010033, BRTHA2010073, BRTHA2010097, BRTHA2010191, BRTHA2010397, BRTHA2010608, BRTHA2010672, BRTHA2010884, BRTHA2010907, BRTHA2011062, BRTHA2011194, BRTHA2011321, BRTHA2011351, BRTHA2011500, BRTHA2011641, BRTHA2011691, BRTHA2012129, BRTHA2012183, BRTHA2012189, BRTHA2012351, BRTHA2012392, BRTHA2012466,

[1806] BRTHA2012555, BRTHA2012562, BRTHA2012714, BRTHA2012980, BRTHA2013054, BRTHA2013262, BRTHA2013275, BRTHA2013426, BRTHA2013460, BRTHA2013515, BRTHA2013540, BRTHA2013595, BRTHA2013610, BRTHA2013707, BRTHA2013942, BRTHA2014287, BRTHA2014334, BRTHA2014381, BRTHA2014578, BRTHA2014647, BRTHA2014663, BRTHA2014792, BRTHA2014828, BRTHA2014909, BRTHA2014975, BRTHA2014997, BRTHA2015406, BRTHA2015478, BRTHA2015696, BRTHA2015700, BRTHA2015853, BRTHA2015878, BRTHA2016179, BRTHA2016215, BRTHA2016267, BRTHA2016318, BRTHA2016496, BRTHA2016543, BRTHA2016552, BRTHA2016577, BRTHA2016765, BRTHA2016918, BRTHA2017178, BRTHA2017353, BRTHA2017364, BRTHA2017972, BRTHA2017985, BRTHA2018011, BRTHA2018129, BRTHA2018165,

[1807] BRTHA2018304, BRTHA2018344, BRTHA2018420, BRTHA2018443, BRTHA2018504, BRTHA2018558, BRTHA2018591, BRTHA2018624, BRTHA2018706, BRTHA2018707, BRTHA2019014, BRTHA2019022, BRTHA2019048, BRTHA2019073, BRTHA2019726, BRTHA2019743, BRTHA2020400, BRTHA2020566, BRTHA2020642, BRTHA2020695, BRTHA2020721, BRTHA2020781, BRTHA2020811, BRTHA2020910, BRTHA2021212, BRTHA2021440, BRTHA2021450, BRTHA2022074, BRTHA2022914, BRTHA2022968, BRTHA2023402, BRTHA2023437, BRTHA2024177, BRTHA2024354, BRTHA2024712, BRTHA2025869, BRTHA2026071, BRTHA2026290, BRTHA2026311, BRTHA2027227, BRTHA2027229, BRTHA2027250, BRTHA2027546, BRTHA2028297, BRTHA2029969, BRTHA2030036, BRTHA2030213, BRTHA2031517, BRTHA2031800, BRTHA2031917,

[1808] BRTHA2032763, BRTHA2032845, BRTHA2033122, BRTHA2033155, BRTHA2033264, BRTHA2033320, BRTHA2033469, BRTHA2033683, BRTHA2034281, BRTHA2034576, BRTHA2034874, BRTHA2035448, BRTHA2035743, BRTHA2036055, BRTHA2036295, BRTHA2036660, BRTHA2037247, BRTHA2038279, BRTHA2038345, BRTHA2038353, BRTHA2038396, BRTHA3000252, BRTHA3000273, BRTHA3000296, BRTHA3000297, BRTHA3000325, BRTHA3000456, BRTHA3000633, BRTHA3000789, BRTHA3001221, BRTHA3001623, BRTHA3002265, BRTHA3002401, BRTHA3002411, BRTHA3002427, BRTHA3002864, BRTHA3002933, BRTHA3002955, BRTHA3003000, BRTHA3003023, BRTHA3003074, BRTHA3003225, BRTHA3003339, BRTHA3003343, BRTHA3003417, BRTHA3003449, BRTHA3003474, BRTHA3003490, BRTHA3003704, BRTHA3003736,

[1809] BRTHA3004307, BRTHA3004432, BRTHA3004475, BRTHA3004502, BRTHA3004610, BRTHA3005046, BRTHA3005735, BRTHA3005988, BRTHA3006318, BRTHA3006593, BRTHA3006856, BRTHA3007113, BRTHA3007130, BRTHA3007148, BRTHA3007319, BRTHA3007469, BRTHA3007472, BRTHA3007532, BRTHA3007662, BRTHA3007685, BRTHA3007769, BRTHA3007922, BRTHA3008143, BRTHA3008293, BRTHA3008310, BRTHA3008386, BRTHA3008520, BRTHA3008608, BRTHA3008694, BRTHA3008778, BRTHA3008826, BRTHA3009037, BRTHA3009090, BRTHA3009291, BRTHA3009858, BRTHA3010135, BRTHA3010366, BRTHA3010469, BRTHA3010530, BRTHA3010540, BRTHA3010717, BRTHA3011149, BRTHA3011187, BRTHA3011194, BRTHA3011229, BRTHA3011265, BRTHA3011361, BRTHA3011510, BRTHA3011892, BRTHA3012265,

[1810] BRTHA3013860, BRTHA3013882, BRTHA3013884, BRTHA3013981, BRTHA3014000, BRTHA3014105, BRTHA3014507, BRTHA3014547, BRTHA3014691, BRTHA3014835, BRTHA3014854, BRTHA3014908, BRTHA3014920, BRTHA3015815, BRTHA3016616, BRTHA3016835, BRTHA3016845, BRTHA3016917, BRTHA3017047, BRTHA3017589, BRTHA3017848, BRTHA3018409, BRTHA3018514, BRTHA3018617, BRTHA3018623, BRTHA3018656, BRTHA3019048, BRTHA3019105, BRTHA3019183, BRTHA3020000, BRTHA3020314, BRTHA3020369, BRTHA3021569, BRTHA3021708, BRTHA3021786, BRTHA3021971, BRTHA3022641, BRTHA3023403, BRTHA3023523, BRTHA3023590, BRTHA3023929, BRTHA3024233, BRTHA3024600, BRTHA3025073, BRTHA3025789, BRTHA3025826, BRTHA3026161, BRTHA3026180, BRTHA3026507, BRTHA3026556,

[1811] BRTHA3026916, BRTHA3027171, BRTHA3027318, BRTHA3027638, BRTHA3027820, BRTHA3027879, BRTHA3027957, BRTHA3028339, BRTHA3028505, BRTHA3028782, CD34C2000051, CD34C2000152, CD34C2000175, CD34C2000443, CD34C3000125, CD34C3000252, CD34C3000314, CD34C3000424, CD34C3000494, CERVX1000042, CERVX2000812, CERVX2000968, CERVX2002006, CERVX2002013, CERVX2002430, CERVX2002770, CHONS1000058, CHONS2000172, CHONS2000797, CHONS2001287, CHONS2001382, CHONS2001797, CHONS2001834, CHONS2002419, CHONS2002829, COLON1000030, COLON1000084, COLON1000135, COLON2000470, COLON2000557, COLON2000568, COLON2001721, COLON2001829, COLON2001866, COLON2002443, COLON2002520, COLON2003043, COLON2003529, COLON2004318, COLON2004351,

[1812] COLON2004478, COLON2004911, COLON2005126, COLON2005623, COLON2005735, COLON2005772, COLON2006263, COLON2006282, COLON2006417, COLON2007274, COLON2007733, COLON2008105, COLON2009337, COLON2009499, CORDB1000140, CORDB2000061, CORDB2000127, CORDB2000541, CTONG1000009, CTONG1000020, CTONG1000022, CTONG1000040, CTONG1000056, CTONG1000062, CTONG1000086, CTONG1000087, CTONG1000088, CTONG1000093, CTONG1000097, CTONG1000113, CTONG1000137, CTONG1000165, CTONG1000175, CTONG1000180, CTONG1000181, CTONG1000220, CTONG1000241, CTONG1000277, CTONG1000283, CTONG1000288, CTONG1000302, CTONG1000341, CTONG1000467, CTONG1000476, CTONG1000488, CTONG1000508, CTONG1000540, CTONG2000031, CTONG2000034, CTONG2000042,

[1813] CTONG2000063, CTONG2000201, CTONG2000218, CTONG2000279, CTONG2000303, CTONG2000330, CTONG2000395, CTONG2000411, CTONG2000452, CTONG2000465, CTONG2000469, CTONG2000480, CTONG2000508, CTONG2000561, CTONG2000589, CTONG2000766, CTONG2000771, CTONG2000819, CTONG2000827, CTONG2000846, CTONG2000855, CTONG2000977, CTONG2001139, CTONG2001226, CTONG2001320, CTONG2001366, CTONG2001413, CTONG2001428, CTONG2001513, CTONG2001524, CTONG2001533, CTONG2001598, CTONG2001681, CTONG2001724, CTONG2001748, CTONG2001749, CTONG2001800, CTONG2001820, CTONG2001858, CTONG2001877, CTONG2001911, CTONG2001932, CTONG2001955, CTONG2002066, CTONG2002073, CTONG2002095, CTONG2002143, CTONG2002270, CTONG2002395, CTONG2002417,

[1814] CTONG2002418, CTONG2002453, CTONG2002520, CTONG2002558, CTONG2002590, CTONG2002709, CTONG2002721, CTONG2002766, CTONG2002803, CTONG2002816, CTONG2002820, CTONG2002832, CTONG2002841, CTONG2002903, CTONG2002965, CTONG2002999, CTONG2003028, CTONG2003094, CTONG2003100, CTONG2003115, CTONG2003189, CTONG2003245, CTONG2003293, CTONG2003298, CTONG2003348, CTONG2003350, CTONG2003361, CTONG2003372, CTONG2003375, CTONG2003427, CTONG2003517, CTONG2003524, CTONG2003599, CTONG2003680, CTONG2003699, CTONG2003764, CTONG2003782, CTONG2003889, CTONG2003937, CTONG2003945, CTONG2004000, CTONG2004062, CTONG2004115, CTONG2004126, CTONG2004264, CTONG2004305, CTONG2004397, CTONG2004423, CTONG2004454, CTONG2004487,

[1815] CTONG2004550, CTONG2004669, CTONG2004716, CTONG2004912, CTONG2004941, CTONG2004948, CTONG2005028, CTONG2005049, CTONG2005110, CTONG2005145, CTONG2005265, CTONG2005278, CTONG2005290, CTONG2005374, CTONG2005399, CTONG2005468, CTONG2005553, CTONG2005567, CTONG2005585, CTONG2005615, CTONG2005635, CTONG2005775, CTONG2005795, CTONG2005890, CTONG2005904, CTONG2005913, CTONG2006004, CTONG2006129, CTONG2006223, CTONG2006235, CTONG2006273, CTONG2006310, CTONG2006377, CTONG2006393, CTONG2006412, CTONG2006449, CTONG2006515, CTONG2006524, CTONG2006562, CTONG2006568, CTONG2006611, CTONG2006620, CTONG2006666, CTONG2006691, CTONG2006709, CTONG2006798, CTONG2006836, CTONG2006932, CTONG2006942, CTONG2006964,

[1816] CTONG2007007, CTONG2007009, CTONG2007072, CTONG2007078, CTONG2007091, CTONG2007104, CTONG2007168, CTONG2007175, CTONG2007259, CTONG2007272, CTONG2007293, CTONG2007297, CTONG2007399, CTONG2007400, CTONG2007417, CTONG2007441, CTONG2007474, CTONG2007586, CTONG2007613, CTONG2007623, CTONG2007681, CTONG2007776, CTONG2007779, CTONG2007898, CTONG2007959, CTONG2007970, CTONG2008014, CTONG2008184, CTONG2008262, CTONG2008269, CTONG2008321, CTONG2008343, CTONG2008398, CTONG2008402, CTONG2008405, CTONG2008466, CTONG2008506, CTONG2008518, CTONG2008521, CTONG2008562, CTONG2008577, CTONG2008595, CTONG2008621, CTONG2008689, CTONG2008720, CTONG2008721, CTONG2008773, CTONG2008792, CTONG2008989, CTONG2009033,

[1817] CTONG2009108, CTONG2009132, CTONG2009156, CTONG2009181, CTONG2009257, CTONG2009258, CTONG2009268, CTONG2009270, CTONG2009395, CTONG2009423, CTONG2009440, CTONG2009527, CTONG2009529, CTONG2009531, CTONG2009534, CTONG2009570, CTONG2009572, CTONG2009604, CTONG2009643, CTONG2009675, CTONG2009689, CTONG2009725, CTONG2009766, CTONG2009768, CTONG2009844, CTONG2009871, CTONG2009887, CTONG2009891, CTONG2009923, CTONG2009938, CTONG2009955, CTONG2009958, CTONG2009963, CTONG2010018, CTONG2010024, CTONG2010116, CTONG2010133, CTONG2010148, CTONG2010276, CTONG2010330, CTONG2010348, CTONG2010408, CTONG2010508, CTONG2010566, CTONG2010623, CTONG2010649, CTONG2010652, CTONG2010803, CTONG2010821, CTONG2011188,

[1818] CTONG2011429, CTONG2011474, CTONG2011676, CTONG2011716, CTONG2011765, CTONG2011779, CTONG2011801, CTONG2011815, CTONG2011822, CTONG2011825, CTONG2011920, CTONG2011985, CTONG2012001, CTONG2012029, CTONG2012050, CTONG2012077, CTONG2012101, CTONG2012123, CTONG2012158, CTONG2012230, CTONG2012401, CTONG2012422, CTONG2012425, CTONG2012447, CTONG2012453, CTONG2012473, CTONG2012476, CTONG2012533, CTONG2012554, CTONG2012564, CTONG2012607, CTONG2012661, CTONG2012724, CTONG2012738, CTONG2012745, CTONG2012758, CTONG2012843, CTONG2012847, CTONG2012879, CTONG2012901, CTONG2012996, CTONG2013128, CTONG2013149, CTONG2013156, CTONG2013178, CTONG2013222, CTONG2013284, CTONG2013339, CTONG2013348, CTONG2013352,

[1819] CTONG2013381, CTONG2013393, CTONG2013511, CTONG2013630, CTONG2013803, CTONG2013907, CTONG2013934, CTONG2013985, CTONG2013986, CTONG2014032, CTONG2014058, CTONG2014119, CTONG2014165, CTONG2014191, CTONG2014206, CTONG2014234, CTONG2014264, CTONG2014280, CTONG2014369, CTONG2014389, CTONG2014491, CTONG2014630, CTONG2014635, CTONG2014646, CTONG2014705, CTONG2014898, CTONG2014946, CTONG2014954, CTONG2014959, CTONG2014966, CTONG2014995, CTONG2015204, CTONG2015316, CTONG2015330, CTONG2015345, CTONG2015358, CTONG2015434, CTONG2015518, CTONG2015540, CTONG2015596, CTONG2015633, CTONG2015678, CTONG2015717, CTONG2015804, CTONG2015815, CTONG2015866, CTONG2015914, CTONG2015953, CTONG2016056, CTONG2016217,

[1820] CTONG2016355, CTONG2016408, CTONG2016499, CTONG2016505, CTONG2016559, CTONG2016575, CTONG2016658, CTONG2016775, CTONG2016797, CTONG2016824, CTONG2016846, CTONG2016869, CTONG2016904, CTONG2016931, CTONG2016942, CTONG2016953, CTONG2017021, CTONG2017094, CTONG2017292, CTONG2017409, CTONG2017429, CTONG2017444, CTONG2017458, CTONG2017500, CTONG2017650, CTONG2017798, CTONG2017804, CTONG2017814, CTONG2017910, CTONG2017939, CTONG2017989, CTONG2017998, CTONG2018062, CTONG2018069, CTONG2018147, CTONG2018211, CTONG2018217, CTONG2018279, CTONG2018334, CTONG2018343, CTONG2018379, CTONG2018383, CTONG2018413, CTONG2018483, CTONG2018629, CTONG2018632, CTONG2018637, CTONG2018652, CTONG2018653, CTONG2018655,

[1821] CTONG2018735, CTONG2018739, CTONG2018808, CTONG2018843, CTONG2018898, CTONG2018900, CTONG2018976, CTONG2019029, CTONG2019063, CTONG2019144, CTONG2019232, CTONG2019248, CTONG2019400, CTONG2019590, CTONG2019652, CTONG2019704, CTONG2019822, CTONG2019833, CTONG2020031, CTONG2020108, CTONG2020127, CTONG2020171, CTONG2020374, CTONG2020378, CTONG2020411, CTONG2020445, CTONG2020484, CTONG2020522, CTONG2020560, CTONG2020582, CTONG2020638, CTONG2020806, CTONG2020831, CTONG2020974, CTONG2021024, CTONG2021132, CTONG2021168, CTONG2021289, CTONG2022153, CTONG2022601, CTONG2022835, CTONG2023021, CTONG2023449, CTONG2023512, CTONG2024031, CTONG2024206, CTONG2024614, CTONG2024749, CTONG2025496, CTONG2025513,

[1822] CTONG2025516, CTONG2025610, CTONG2025900, CTONG2026513, CTONG2026770, CTONG2026920, CTONG2026987, CTONG2027150, CTONG2027263, CTONG2027327, CTONG2027361, CTONG2027591, CTONG2027736, CTONG2027783, CTONG2027828, CTONG2027959, CTONG2028097, CTONG2028309, CTONG2028486, CTONG2028518, CTONG2028687, CTONG2028758, CTONG3000657, CTONG3000686, CTONG3000707, CTONG3000896, CTONG3001123, CTONG3001420, CTONG3001501, CTONG3001560, CTONG3001605, CTONG3001746, CTONG3002020, CTONG3002127, CTONG3002370, CTONG3002433, CTONG3002518, CTONG3002552, CTONG3002588, CTONG3002674, CTONG3002728, CTONG3002835, CTONG3002909, CTONG3002947, CTONG3002983, CTONG3003165, CTONG3003179, CTONG3003483, CTONG3003553, CTONG3003598,

[1823] CTONG3003652, CTONG3003654, CTONG3003669, CTONG3003737, CTONG3003905, CTONG3003972, CTONG3004072, CTONG3004317, CTONG3004397, CTONG3004550, CTONG3004576, CTONG3004607, CTONG3004712, CTONG3004726, CTONG3005325, CTONG3005648, CTONG3005713, CTONG3005803, CTONG3005813, CTONG3006067, CTONG3006073, CTONG3006186, CTONG3006629, CTONG3006650, CTONG3006659, CTONG3007244, CTONG3007444, CTONG3007528, CTONG3007586, CTONG3007870, CTONG3008223, CTONG3008252, CTONG3008258, CTONG3008457, CTONG3008496, CTONG3008566, CTONG3008639, CTONG3008831, CTONG3008951, CTONG3008959, CTONG3009227, CTONG3009239, CTONG3009287, CTONG3009328, CTONG3009385, D3OST1000066, D3OST1000109, D3OST1000238, D3OST1000267, D3OST1000270,

[1824] D3OST2000184, D3OST2000618, D3OST2000654, D3OST2000734, D3OST2001328, D3OST2001669, D3OST2001670, D3OST2001788, D3OST2002068, D3OST2002182, D3OST2002223, D3OST2002262, D3OST2002272, D3OST2002417, D3OST2002436, D3OST2002648, D3OST2003024, D3OST2003331, D3OST2003607, D3OST2003797, D3OST2004637, D3OST3000195, D3OST3000258, D3OST3000291, D3OST3000388, D3OST3000493, D6OST2000127, D6OST2000169, D6OST2000245, D6OST2000358, D6OST2000464, D6OST2000507, D9OST2000031, D9OST2000278, D9OST2000440, D9OST2000869, D9OST2001319, D9OST2001433, D9OST2002397, D9OST2002608, D9OST2002673, D9OST2003106, D9OST2003108, D9OST2003137, D9OST2003397, D9OST2003580, D9OST2003594, D9OST2003791, D9OST2003989, D9OST2004018,

[1825] D9OST2004073, D9OST2004417, DFNES1000003, DFNES1000083, DFNES1000107, DFNES1000150, DFNES1000185, DFNES2000011, DFNES2000143, DFNES2000146, DFNES2000153, DFNES2000212, DFNES2000292, DFNES2000335, DFNES2000426, DFNES2000432, DFNES2000457, DFNES2000471, DFNES2000526, DFNES2000913, DFNES2001091, DFNES2001096, DFNES2001108, DFNES2001177, DFNES2001404, DFNES2001564, DFNES2001565, DFNES2001647, DFNES2001800, DFNES2001829, DFNES2002220, DFNES2002509, DFNES2002550, DFNES2002588, DFNES2002817, DFNES2002966, DFNES2003081, DFNES2003192, DFNES2003255, DFNES2003742, DFNES2004346, DFNES2004354, DFNES2004371, DFNES2004383, DFNES2004608, DFNES2004684, DFNES2005266, DFNES2005527, DFNES2005540, DFNES2005690,

[1826] DFNES2005766, DFNES2005779, DFNES2005875, DFNES2006346, DFNES2006944, DFNES2007113, DFNES2007299, DFNES2007332, DFNES2007634, DFNES2007641, DFNES2007757, DFNES2008088, DFNES2008160, DFNES2008280, DFNES2008881, DFNES2009482, DFNES2010502, DFNES2011192, DFNES2011221, DFNES2011239, DFNES2011245, DFNES2011380, DFNES2011499, ERLTF1000021, ERLTF2000324, ERLTF2000465, FCBBF1000023, FCBBF1000024, FCBBF1000025, FCBBF1000027, FCBBF1000038, FCBBF1000053, FCBBF1000061, FCBBF1000063, FCBBF1000069, FCBBF1000077, FCBBF1000115, FCBBF1000117, FCBBF1000118, FCBBF1000121, FCBBF1000125, FCBBF1000131, FCBBF1000139, FCBBF1000155, FCBBF1000157, FCBBF1000171, FCBBF1000174, FCBBF1000182, FCBBF1000197, FCBBF1000198,

[1827] FCBBF1000206, FCBBF1000220, FCBBF1000232, FCBBF1000233, FCBBF1000243, FCBBF1000270, FCBBF1000272, FCBBF1000280, FCBBF1000297, FCBBF1000305, FCBBF1000314, FCBBF1000322, FCBBF1000349, FCBBF1000367, FCBBF1000374, FCBBF1000376, FCBBF1000377, FCBBF1000395, FCBBF1000397, FCBBF1000403, FCBBF1000412, FCBBF1000425, FCBBF1000437, FCBBF1000449, FCBBF1000466, FCBBF1000476, FCBBF1000506, FCBBF1000509, FCBBF1000546, FCBBF1000550, FCBBF1000556, FCBBF1000563, FCBBF1000574, FCBBF1000581, FCBBF1000582, FCBBF1000598, FCBBF1000604, FCBBF1000618, FCBBF1000627, FCBBF1000671, FCBBF1000675, FCBBF1000684, FCBBF1000686, FCBBF1000687, FCBBF1000691, FCBBF1000732, FCBBF1000748, FCBBF1000760, FCBBF2000038, FCBBF2000094,

[1828] FCBBF2000105, FCBBF2000123, FCBBF2000195, FCBBF2000199, FCBBF2000214, FCBBF2000232, FCBBF2000259, FCBBF2000276, FCBBF2000291, FCBBF2000362, FCBBF2000379, FCBBF2000473, FCBBF2000502, FCBBF2000566, FCBBF2000576, FCBBF2000591, FCBBF2000677, FCBBF2000678, FCBBF2000685, FCBBF2000733, FCBBF2000782, FCBBF2000808, FCBBF2000815, FCBBF2000825, FCBBF2000885, FCBBF2000940, FCBBF2000951, FCBBF2001001, FCBBF2001088, FCBBF2001105, FCBBF2001116, FCBBF2001183, FCBBF2001188, FCBBF2001211, FCBBF2001238, FCBBF2001243, FCBBF2001291, FCBBF2001299, FCBBF2001309, FCBBF2001400, FCBBF2001427, FCBBF2001480, FCBBF2001529, FCBBF2001538, FCBBF2001594, FCBBF2001672, FCBBF2001675, FCBBF2001718, FCBBF2001720, FCBBF2001817,

[1829] FCBBF2001868, FCBBF2002044, FCBBF2002111, FCBBF2002281, FCBBF2002349, FCBBF2002370, FCBBF2002541, FCBBF2002626, FCBBF2002801, FCBBF2002897, FCBBF2002898, FCBBF2002904, FCBBF2002928, FCBBF2002953, FCBBF2003083, FCBBF2003102, FCBBF2003269, FCBBF2003293, FCBBF2003297, FCBBF2003395, FCBBF2003528, FCBBF2003543, FCBBF2003549, FCBBF2003567, FCBBF2003636, FCBBF2003823, FCBBF2003895, FCBBF2004066, FCBBF2004090, FCBBF2004138, FCBBF2004217, FCBBF2004256, FCBBF2004373, FCBBF2004448, FCBBF2004671, FCBBF2004707, FCBBF2004788, FCBBF2005069, FCBBF2005122, FCBBF2005428, FCBBF2005439, FCBBF2005538, FCBBF2005637, FCBBF2005645, FCBBF2005658, FCBBF2005733, FCBBF2005909, FCBBF2005966, FCBBF2006131, FCBBF2006380,

[1830] FCBBF2006418, FCBBF2006452, FCBBF2006634, FCBBF2006781, FCBBF2007012, FCBBF2007186, FCBBF2007265, FCBBF2007302, FCBBF2007556, FCBBF2007610, FCBBF2007633, FCBBF2007840, FCBBF3000102, FCBBF3000110, FCBBF3000115, FCBBF3000120, FCBBF3000168, FCBBF3000175, FCBBF3000227, FCBBF3000228, FCBBF3000229, FCBBF3000233, FCBBF3000269, FCBBF3000361, FCBBF3000367, FCBBF3000388, FCBBF3000434, FCBBF3000462, FCBBF3000473, FCBBF3000501, FCBBF3000518, FCBBF3000536, FCBBF3000550, FCBBF3000847, FCBBF3001018, FCBBF3001020, FCBBF3001081, FCBBF3001235, FCBBF3001281, FCBBF3001302, FCBBF3001377, FCBBF3001594, FCBBF3001632, FCBBF3001657, FCBBF3001818, FCBBF3001855, FCBBF3001890, FCBBF3001912, FCBBF3001914, FCBBF3001918,

[1831] FCBBF3001924, FCBBF3001977, FCBBF3002163, FCBBF3002188, FCBBF3002190, FCBBF3002268, FCBBF3002475, FCBBF3002556, FCBBF3002592, FCBBF3002658, FCBBF3002782, FCBBF3002818, FCBBF3002925, FCBBF3003216, FCBBF3003305, FCBBF3003373, FCBBF3003435, FCBBF3003475, FCBBF3003481, FCBBF3003557, FCBBF3003787, FCBBF3003902, FCBBF3004021, FCBBF3004261, FCBBF3004323, FCBBF3004390, FCBBF3004409, FCBBF3004473, FCBBF3004502, FCBBF3004715, FCBBF3004842, FCBBF3004847, FCBBF3004955, FCBBF3005160, FCBBF3005218, FCBBF3005320, FCBBF3005330, FCBBF3005444, FCBBF3005497, FCBBF3005698, FCBBF3005729, FCBBF3006171, FCBBF3006249, FCBBF3006288, FCBBF3006399, FCBBF3006628, FCBBF3006821, FCBBF3007077, FCBBF3007150, FCBBF3007152,

[1832] FCBBF3007242, FCBBF3007244, FCBBF3007248, FCBBF3007453, FCBBF3007462, FCBBF3007540, FCBBF3007597, FCBBF3007604, FCBBF3007631, FCBBF3007829, FCBBF3007855, FCBBF3007859, FCBBF3007860, FCBBF3008073, FCBBF3008100, FCBBF3008153, FCBBF3008159, FCBBF3008251, FCBBF3008311, FCBBF3008362, FCBBF3008382, FCBBF3008475, FCBBF3008556, FCBBF3008644, FCBBF3008689, FCBBF3008748, FCBBF3008870, FCBBF3008938, FCBBF3008944, FCBBF3009069, FCBBF3009101, FCBBF3009152, FCBBF3009256, FCBBF3009317, FCBBF3009428, FCBBF3009464, FCBBF3009479, FCBBF3009526, FCBBF3009703, FCBBF3009717, FCBBF3009888, FCBBF3009949, FCBBF3009978, FCBBF3010008, FCBBF3010012, FCBBF3010124, FCBBF3010130, FCBBF3010142, FCBBF3010149, FCBBF3010211,

[1833] FCBBF3010361, FCBBF3010508, FCBBF3010544, FCBBF3010586, FCBBF3010601, FCBBF3010665, FCBBF3010695, FCBBF3010729, FCBBF3010733, FCBBF3011003, FCBBF3011418, FCBBF3011485, FCBBF3011523, FCBBF3011570, FCBBF3011592, FCBBF3011867, FCBBF3011889, FCBBF3012170, FCBBF3012182, FCBBF3012288, FCBBF3012332, FCBBF3012347, FCBBF3012443, FCBBF3012588, FCBBF3012667, FCBBF3012842, FCBBF3012901, FCBBF3013041, FCBBF3013058, FCBBF3013205, FCBBF3013266, FCBBF3013307, FCBBF3013341, FCBBF3013506, FCBBF3013589, FCBBF3013623, FCBBF3013800, FCBBF3013846, FCBBF3014229, FCBBF3014260, FCBBF3014355, FCBBF3014567, FCBBF3014770, FCBBF3015100, FCBBF3015119, FCBBF3015131, FCBBF3015317, FCBBF3015727, FCBBF3015758, FCBBF3015809,

[1834] FCBBF3015870, FCBBF3016018, FCBBF3016134, FCBBF3016178, FCBBF3016451, FCBBF3016618, FCBBF3016622, FCBBF3016644, FCBBF3016667, FCBBF3016928, FCBBF3016987, FCBBF3017024, FCBBF3017059, FCBBF3017071, FCBBF3017123, FCBBF3017233, FCBBF3017255, FCBBF3017288, FCBBF3017396, FCBBF3017531, FCBBF3017535, FCBBF3017681, FCBBF3017729, FCBBF3017873, FCBBF3017918, FCBBF3017974, FCBBF3018067, FCBBF3018173, FCBBF3018453, FCBBF3018591, FCBBF3018753, FCBBF3018796, FCBBF3018826, FCBBF3018949, FCBBF3019085, FCBBF3019320, FCBBF3019437, FCBBF3019455, FCBBF3019564, FCBBF3019569, FCBBF3019570, FCBBF3019663, FCBBF3019714, FCBBF3019716, FCBBF3019784, FCBBF3019839, FCBBF3019867, FCBBF3019961, FCBBF3020030, FCBBF3020138,

[1835] FCBBF3020140, FCBBF3020163, FCBBF3020232, FCBBF3020599, FCBBF3021026, FCBBF3021191, FCBBF3021221, FCBBF3021501, FCBBF3021506, FCBBF3021524, FCBBF3021807, FCBBF3021940, FCBBF3021985, FCBBF3022005, FCBBF3022291, FCBBF3022311, FCBBF3022504, FCBBF3022566, FCBBF3022593, FCBBF3022765, FCBBF3022767, FCBBF3022894, FCBBF3023061, FCBBF3023078, FCBBF3023368, FCBBF3023372, FCBBF3023443, FCBBF3023599, FCBBF3023667, FCBBF3023704, FCBBF3023887, FCBBF3023895, FCBBF3024002, FCBBF3024096, FCBBF3024225, FCBBF3024266, FCBBF3024364, FCBBF3024623, FCBBF3024793, FCBBF3024911, FCBBF3025098, FCBBF3025252, FCBBF3025280, FCBBF3025285, FCBBF3025417, FCBBF3025528, FCBBF3025568, FCBBF3025650, FCBBF3025674, FCBBF3025730,

[1836] FCBBF3025737, FCBBF3025905, FCBBF3026021, FCBBF3026048, FCBBF3026251, FCBBF3026308, FCBBF3026651, FCBBF3026678, FCBBF3026692, FCBBF3027104, FCBBF3027199, FCBBF3027328, FCBBF3027559, FCBBF3027717, FCBBF3027755, FCBBF3027768, FCBBF3027854, FCBBF3027863, FCBBF3027903, FCBBF3028102, FCBBF3028143, FCBBF3028188, FCBBF3028202, FCBBF3028244, FCBBF3028472, FCBBF3028528, FCBBF3028582, FCBBF3028593, FCBBF3028671, FCBBF3028794, FCBBF4000017, FCBBF4000061, FCBBF4000076, FCBBF4000142, FCBBF4000173, FCBBF4000192, FCBBF4000193, FCBBF4000268, FCBBF4000282, FCBBF4000399, FCBBF4000415, FCBBF4000446, FCBBF4000500, FCBBF4000529, FCBBF4000548, FCBBF5000041, FCBBF5000061, FCBBF5000165, FCBBF5000261, FCBBF5000325,

[1837] FCBBF5000353, FCBBF5000384, FCBBF5000483, FCBBF5000495, FEBRA1000005, FEBRA1000008, FEBRA1000022, FEBRA1000030, FEBRA1000057, FEBRA1000088, FEBRA1000138, FEBRA1000148, FEBRA1000149, FEBRA1000183, FEBRA1000188, FEBRA1000189, FEBRA1000190, FEBRA2000007, FEBRA2000021, FEBRA2000035, FEBRA2000053, FEBRA2000105, FEBRA2000126, FEBRA2000129, FEBRA2000210, FEBRA2000220, FEBRA2000228, FEBRA2000253, FEBRA2000282, FEBRA2000286, FEBRA2000297, FEBRA2000311, FEBRA2000321, FEBRA2000333, FEBRA2000377, FEBRA2000378, FEBRA2000391, FEBRA2000394, FEBRA2000397, FEBRA2000399, FEBRA2000402, FEBRA2000404, FEBRA2000409, FEBRA2000415, FEBRA2000436, FEBRA2000438, FEBRA2000452, FEBRA2000454, FEBRA2000462, FEBRA2000468,

[1838] FEBRA2000491, FEBRA2000504, FEBRA2000510, FEBRA2000532, FEBRA2000536, FEBRA2000538, FEBRA2000575, FEBRA2000581, FEBRA2000656, FEBRA2000659, FEBRA2000680, FEBRA2000690, FEBRA2000727, FEBRA2000734, FEBRA2000740, FEBRA2000757, FEBRA2000762, FEBRA2000771, FEBRA2000772, FEBRA2000782, FEBRA2000787, FEBRA2000790, FEBRA2000793, FEBRA2000803, FEBRA2000805, FEBRA2000809, FEBRA2000815, FEBRA2000856, FEBRA2000862, FEBRA2000877, FEBRA2000880, FEBRA2000881, FEBRA2000901, FEBRA2000909, FEBRA2000917, FEBRA2000928, FEBRA2000936, FEBRA2000937, FEBRA2000959, FEBRA2000972, FEBRA2001004, FEBRA2001012, FEBRA2001020, FEBRA2001093, FEBRA2001124, FEBRA2001133, FEBRA2001146, FEBRA2001161, FEBRA2001175, FEBRA2001197,

[1839] FEBRA2001217, FEBRA2001227, FEBRA2001245, FEBRA2001267, FEBRA2001294, FEBRA2001334, FEBRA2001351, FEBRA2001383, FEBRA2001438, FEBRA2001440, FEBRA2001487, FEBRA2001492, FEBRA2001523, FEBRA2001561, FEBRA2001571, FEBRA2001581, FEBRA2001584, FEBRA2001590, FEBRA2001591, FEBRA2001610, FEBRA2001620, FEBRA2001659, FEBRA2001669, FEBRA2001698, FEBRA2001705, FEBRA2001706, FEBRA2001752, FEBRA2001772, FEBRA2001790, FEBRA2001814, FEBRA2001828, FEBRA2001867, FEBRA2001914, FEBRA2001974, FEBRA2001989, FEBRA2001990, FEBRA2002009, FEBRA2002027, FEBRA2002086, FEBRA2002109, FEBRA2002191, FEBRA2002260, FEBRA2002352, FEBRA2002399, FEBRA2002410, FEBRA2002429, FEBRA2002442, FEBRA2002456, FEBRA2002508, FEBRA2002525,

[1840] FEBRA2002527, FEBRA2002552, FEBRA2002574, FEBRA2002601, FEBRA2002611, FEBRA2002628, FEBRA2002662, FEBRA2002682, FEBRA2002707, FEBRA2002727, FEBRA2002781, FEBRA2002783, FEBRA2002792, FEBRA2002818, FEBRA2002858, FEBRA2002882, FEBRA2002897, FEBRA2002908, FEBRA2002931, FEBRA2002962, FEBRA2002986, FEBRA2003054, FEBRA2003115, FEBRA2003128, FEBRA2003155, FEBRA2003163, FEBRA2003181, FEBRA2003198, FEBRA2003253, FEBRA2003258, FEBRA2003275, FEBRA2003308, FEBRA2003327, FEBRA2003429, FEBRA2003436, FEBRA2003454, FEBRA2003468, FEBRA2003470, FEBRA2003520, FEBRA2003524, FEBRA2003675, FEBRA2003707, FEBRA2003711, FEBRA2003750, FEBRA2003822, FEBRA2003833, FEBRA2003897, FEBRA2003907, FEBRA2003926, FEBRA2004023,

[1841] FEBRA2004026, FEBRA2004029, FEBRA2004042, FEBRA2004053, FEBRA2004056, FEBRA2004091, FEBRA2004110, FEBRA2004191, FEBRA2004202, FEBRA2004219, FEBRA2004224, FEBRA2004237, FEBRA2004268, FEBRA2004293, FEBRA2004325, FEBRA2004329, FEBRA2004331, FEBRA2004412, FEBRA2004443, FEBRA2004485, FEBRA2004490, FEBRA2004538, FEBRA2004592, FEBRA2004620, FEBRA2004628, FEBRA2004651, FEBRA2004767, FEBRA2004813, FEBRA2004818, FEBRA2004840, FEBRA2004852, FEBRA2004867, FEBRA2004914, FEBRA2004933, FEBRA2004987, FEBRA2005014, FEBRA2005036, FEBRA2005079, FEBRA2005114, FEBRA2005216, FEBRA2005291, FEBRA2005361, FEBRA2005377, FEBRA2005380, FEBRA2005416, FEBRA2005427, FEBRA2005458, FEBRA2005476, FEBRA2005572, FEBRA2005701,

[1842] FEBRA2005726, FEBRA2005752, FEBRA2005778, FEBRA2005787, FEBRA2005788, FEBRA2005824, FEBRA2005995, FEBRA2005998, FEBRA2006055, FEBRA2006061, FEBRA2006092, FEBRA2006112, FEBRA2006150, FEBRA2006165, FEBRA2006255, FEBRA2006270, FEBRA2006315, FEBRA2006346, FEBRA2006354, FEBRA2006357, FEBRA2006368, FEBRA2006370, FEBRA2006372, FEBRA2006379, FEBRA2006396, FEBRA2006401, FEBRA2006409, FEBRA2006418, FEBRA2006427, FEBRA2006476, FEBRA2006485, FEBRA2006491, FEBRA2006519, FEBRA2006521, FEBRA2006553, FEBRA2006627, FEBRA2006664, FEBRA2006667, FEBRA2006726, FEBRA2006736, FEBRA2006793, FEBRA2006808, FEBRA2006817, FEBRA2006873, FEBRA2006890, FEBRA2006942, FEBRA2006977, FEBRA2007017, FEBRA2007176, FEBRA2007200,

[1843] FEBRA2007212, FEBRA2007247, FEBRA2007280, FEBRA2007414, FEBRA2007436, FEBRA2007449, FEBRA2007458, FEBRA2007534, FEBRA2007544, FEBRA2007551, FEBRA2007566, FEBRA2007589, FEBRA2007613, FEBRA2007620, FEBRA2007622, FEBRA2007708, FEBRA2007714, FEBRA2007793, FEBRA2007801, FEBRA2007818, FEBRA2007823, FEBRA2007880, FEBRA2007900, FEBRA2007901, FEBRA2007931, FEBRA2007957, FEBRA2008009, FEBRA2008036, FEBRA2008081, FEBRA2008086, FEBRA2008134, FEBRA2008135, FEBRA2008159, FEBRA2008165, FEBRA2008172, FEBRA2008201, FEBRA2008210, FEBRA2008255, FEBRA2008265, FEBRA2008266, FEBRA2008282, FEBRA2008287, FEBRA2008302, FEBRA2008311, FEBRA2008341, FEBRA2008360, FEBRA2008459, FEBRA2008468, FEBRA2008475, FEBRA2008481,

[1844] FEBRA2008542, FEBRA2008660, FEBRA2008662, FEBRA2008681, FEBRA2008692, FEBRA2008741, FEBRA2008755, FEBRA2008836, FEBRA2008859, FEBRA2008861, FEBRA2008866, FEBRA2008881, FEBRA2008928, FEBRA2008983, FEBRA2009016, FEBRA2009022, FEBRA2009029, FEBRA2009074, FEBRA2009117, FEBRA2009120, FEBRA2009162, FEBRA2009185, FEBRA2009240, FEBRA2009265, FEBRA2009276, FEBRA2009289, FEBRA2009327, FEBRA2009328, FEBRA2009352, FEBRA2009362, FEBRA2009385, FEBRA2009416, FEBRA2009419, FEBRA2009478, FEBRA2009507, FEBRA2009514, FEBRA2009541, FEBRA2009567, FEBRA2009588, FEBRA2009731, FEBRA2009754, FEBRA2009780, FEBRA2009846, FEBRA2009986, FEBRA2010141, FEBRA2010299, FEBRA2010484, FEBRA2010719, FEBRA2010746, FEBRA2010768,

[1845] FEBRA2010802, FEBRA2011063, FEBRA2011090, FEBRA2011356, FEBRA2011392, FEBRA2011414, FEBRA2011593, FEBRA2011665, FEBRA2012090, FEBRA2012120, FEBRA2012181, FEBRA2012195, FEBRA2012397, FEBRA2012418, FEBRA2012507, FEBRA2012625, FEBRA2013019, FEBRA2013069, FEBRA2013274, FEBRA2013465, FEBRA2013699, FEBRA2013905, FEBRA2013951, FEBRA2014010, FEBRA2014122, FEBRA2014198, FEBRA2014213, FEBRA2014297, FEBRA2014417, FEBRA2014443, FEBRA2014578, FEBRA2014939, FEBRA2015076, FEBRA2015085, FEBRA2015175, FEBRA2015292, FEBRA2015588, FEBRA2016112, FEBRA2016398, FEBRA2016572, FEBRA2016583, FEBRA2016621, FEBRA2016654, FEBRA2016739, FEBRA2017024, FEBRA2017098, FEBRA2017138, FEBRA2017154, FEBRA2017200, FEBRA2017223,

[1846] FEBRA2017333, FEBRA2017502, FEBRA2017533, FEBRA2017680, FEBRA2017736, FEBRA2017780, FEBRA2017811, FEBRA2017850, FEBRA2018051, FEBRA2018203, FEBRA2018407, FEBRA2018433, FEBRA2018746, FEBRA2019172, FEBRA2019242, FEBRA2019298, FEBRA2019389, FEBRA2019457, FEBRA2019519, FEBRA2019582, FEBRA2019637, FEBRA2019663, FEBRA2019690, FEBRA2019867, FEBRA2020406, FEBRA2020566, FEBRA2020582, FEBRA2020668, FEBRA2020801, FEBRA2020845, FEBRA2020886, FEBRA2020977, FEBRA2021032, FEBRA2021134, FEBRA2021171, FEBRA2021339, FEBRA2021431, FEBRA2021497, FEBRA2021550, FEBRA2021571, FEBRA2021636, FEBRA2021864, FEBRA2021892, FEBRA2021908, FEBRA2021966, FEBRA2022013, FEBRA2022055, FEBRA2022148, FEBRA2022204, FEBRA2022255,

[1847] FEBRA2022322, FEBRA2022504, FEBRA2022601, FEBRA2022696, FEBRA2022729, FEBRA2022787, FEBRA2022911, FEBRA2022956, FEBRA2022963, FEBRA2022972, FEBRA2023227, FEBRA2023285, FEBRA2023351, FEBRA2023377, FEBRA2023399, FEBRA2023498, FEBRA2023550, FEBRA2023721, FEBRA2023927, FEBRA2023989, FEBRA2023990, FEBRA2024019, FEBRA2024136, FEBRA2024150, FEBRA2024343, FEBRA2024570, FEBRA2024693, FEBRA2024727, FEBRA2024744, FEBRA2024797, FEBRA2024987, FEBRA2025249, FEBRA2025427, FEBRA2025463, FEBRA2025477, FEBRA2025838, FEBRA2026474, FEBRA2026582, FEBRA2026629, FEBRA2026769, FEBRA2026879, FEBRA2026890, FEBRA2026977, FEBRA2026984, FEBRA2027082, FEBRA2027297, FEBRA2027352, FEBRA2027364, FEBRA2027609, FEBRA2028158,

[1848] FEBRA2028222, FEBRA2028366, FEBRA2028457, FEBRA2028477, FEBRA2028503, FEBRA2028516, FEHRT2000325, FEHRT2000364, FEKID1000018, FELIV1000101, FELIV1000137, FELIV1000164, FELNG2000241, HCASM1000021, HCASM1000050, HCASM1000061, HCASM1000115, HCASM1000130, HCASM2000016, HCASM2000138, HCASM2000156, HCASM2000202, HCASM2000214, HCASM2000266, HCASM2000307, HCASM2000363, HCASM2000534, HCASM2000536, HCASM2000560, HCASM2000871, HCASM2001285, HCASM2001810, HCASM2001866, HCASM2001890, HCASM2002148, HCASM2002502, HCASM2002754, HCASM2002918, HCASM2003018, HCASM2003076, HCASM2003099, HCASM2003212, HCASM2003237, HCASM2003357, HCASM2003415, HCASM2005388, HCASM2005484, HCASM2006131, HCASM2006338, HCASM2006359,

[1849] HCASM2006632, HCASM2007047, HCASM2007317, HCASM2007737, HCASM2007773, HCASM2008154, HCASM2008536, HCASM2009405, HCASM2009424, HCASM2009463, HCASM2009588, HCHON1000015, HCHON1000030, HCHON1000131, HCHON1000142, HCHON1000166, HCHON1000176, HCHON1000191, HCHON2000028, HCHON2000038, HCHON2000062, HCHON2000100, HCHON2000156, HCHON2000160, HCHON2000199, HCHON2000212, HCHON2000226, HCHON2000244, HCHON2000265, HCHON2000271, HCHON2000315, HCHON2000322, HCHON2000323, HCHON2000344, HCHON2000364, HCHON2000373, HCHON2000395, HCHON2000417, HCHON2000418, HCHON2000473, HCHON2000475, HCHON2000503, HCHON2000508, HCHON2000626, HCHON2000660, HCHON2000663, HCHON2000673, HCHON2000676, HCHON2000698, HCHON2000699,

[1850] HCHON2000705, HCHON2000738, HCHON2000743, HCHON2000751, HCHON2000817, HCHON2000818, HCHON2000819, HCHON2000826, HCHON2000832, HCHON2000851, HCHON2000898, HCHON2000935, HCHON2000942, HCHON2000956, HCHON2000994, HCHON2001039, HCHON2001050, HCHON2001084, HCHON2001099, HCHON2001108, HCHON2001110, HCHON2001116, HCHON2001161, HCHON2001200, HCHON2001214, HCHON2001217, HCHON2001233, HCHON2001269, HCHON2001407, HCHON2001434, HCHON2001450, HCHON2001453, HCHON2001497, HCHON2001505, HCHON2001519, HCHON2001523, HCHON2001535, HCHON2001546, HCHON2001548, HCHON2001577, HCHON2001598, HCHON2001604, HCHON2001607, HCHON2001646, HCHON2001665, HCHON2001712, HCHON2001768, HCHON2001801, HCHON2001853, HCHON2002123,

[1851] HCHON2002194, HCHON2002241, HCHON2002247, HCHON2002354, HCHON2002496, HCHON2002676, HCHON2002770, HCHON2002964, HCHON2002971, HCHON2003131, HCHON2003134, HCHON2003327, HCHON2003513, HCHON2003532, HCHON2003642, HCHON2003659, HCHON2003676, HCHON2004007, HCHON2004279, HCHON2004359, HCHON2004531, HCHON2004776, HCHON2004858, HCHON2005048, HCHON2005118, HCHON2005166, HCHON2005802, HCHON2005921, HCHON2005987, HCHON2006250, HCHON2006459, HCHON2006714, HCHON2006722, HCHON2006770, HCHON2006786, HCHON2006841, HCHON2006871, HCHON2007046, HCHON2007482, HCHON2007650, HCHON2007674, HCHON2007774, HCHON2007881, HCHON2008112, HCHON2008239, HCHON2008444, HCHON2008582, HCHON2008672, HCHON2008856, HCHON2008871,

[1852] HCHON2008989, HCHON2009191, HCHON2009384, HCHON2009749, HCHON2009766, HCHON2009795, HCHON2010074, HCHON2010543, HEART1000010, HEART1000074, HEART1000088, HEART1000099, HEART1000102, HEART1000118, HEART1000132, HEART1000139, HEART1000142, HEART1000149, HEART1000151, HEART1000185, HEART2000024, HEART2000035, HEART2000099, HEART2000298, HEART2000306, HEART2000309, HEART2000411, HEART2000418, HEART2000444, HEART2000448, HEART2000492, HEART2000506, HEART2000520, HEART2000541, HEART2000568, HEART2000611, HEART2000959, HEART2001680, HEART2001756, HEART2002129, HEART2002184, HEART2002220, HEART2002432, HEART2002531, HEART2002598, HEART2002717, HEART2003027, HEART2003168, HEART2003432, HEART2003440,

[1853] HEART2003781, HEART2003836, HEART2003852, HEART2004570, HEART2004764, HEART2004931, HEART2004940, HEART2004941, HEART2004980, HEART2005244, HEART2005310, HEART2005581, HEART2005610, HEART2006131, HEART2006195, HEART2006310, HEART2006334, HEART2006487, HEART2006521, HEART2006557, HEART2006787, HEART2006789, HEART2006909, HEART2007031, HEART2007231, HEART2007443, HEART2007696, HEART2007767, HEART2008108, HEART2008111, HEART2008257, HEART2008509, HEART2008994, HEART2009000, HEART2009599, HEART2009680, HEART2010391, HEART2010492, HEART2010495, HELAC2000158, HELAC2000301, HHDPC1000001, HHDPC1000065, HHDPC1000083, HHDPC1000118, HHDPC1000163, HHDPC2000055, HHDPC2000070, HHDPC2000102, HHDPC2000115,

[1854] HHDPC2000149, HHDPC2000258, HHDPC2000315, HHDPC2000455, HHDPC2000462, HHDPC2000572, HHDPC2000656, HHDPC2000692, HHDPC2001337, HHDPC2001432, HHDPC2001896, HHDPC2002963, HHDPC2003049, HHDPC2003113, HHDPC2003381, HHDPC2003472, HHDPC2004757, HHDPC2005185, HHDPC2005513, HHDPC2005742, HHDPC2005794, HHDPC2006460, HHDPC2006862, HHDPC2006927, HHDPC2007267, HHDPC2007302, HHDPC2007775, HHDPC2008123, HHDPC2008185, HHDPC2008279, HHDPC2008297, HHDPC2008414, HHDPC2008474, HHDPC2008816, HHDPC2008843, HHDPC2009114, HHDPC2009178, HHDPC2009208, HHDPC2009272, HHDPC2009528, HLUNG1000017, HLUNG1000024, HLUNG1000030, HLUNG1000034, HLUNG1000037, HLUNG1000053, HLUNG1000055, HLUNG1000064, HLUNG1000076, HLUNG1000084,

[1855] HLUNG1000091, HLUNG1000099, HLUNG1000104, HLUNG1000105, HLUNG1000110, HLUNG1000151, HLUNG1000169, HLUNG2000004, HLUNG2000014, HLUNG2000027, HLUNG2000063, HLUNG2000068, HLUNG2000116, HLUNG2000125, HLUNG2000130, HLUNG2000142, HLUNG2000174, HLUNG2000176, HLUNG2000217, HLUNG2000232, HLUNG2000255, HLUNG2000281, HLUNG2000314, HLUNG2000315, HLUNG2000340, HLUNG2000362, HLUNG2000363, HLUNG2000412, HLUNG2000431, HLUNG2000480, HLUNG2000489, HLUNG2000549, HLUNG2000557, HLUNG2000570, HLUNG2000751, HLUNG2000761, HLUNG2000777, HLUNG2000846, HLUNG2000870, HLUNG2000884, HLUNG2000926, HLUNG2000950, HLUNG2000955, HLUNG2000970, HLUNG2001013, HLUNG2001126, HLUNG2001144, HLUNG2001146, HLUNG2001214, HLUNG2001459,

[1856] HLUNG2001507, HLUNG2001518, HLUNG2001633, HLUNG2001677, HLUNG2001712, HLUNG2001814, HLUNG2001996, HLUNG2002006, HLUNG2002050, HLUNG2002059, HLUNG2002085, HLUNG2002145, HLUNG2002295, HLUNG2002303, HLUNG2002334, HLUNG2002405, HLUNG2002429, HLUNG2002562, HLUNG2002648, HLUNG2002659, HLUNG2002707, HLUNG2002811, HLUNG2002916, HLUNG2002942, HLUNG2002949, HLUNG2002958, HLUNG2002982, HLUNG2003003, HLUNG2003042, HLUNG2003049, HLUNG2003061, HLUNG2003162, HLUNG2003246, HLUNG2003306, HLUNG2003331, HLUNG2003335, HLUNG2003378, HLUNG2003497, HLUNG2003691, HLUNG2003710, HLUNG2003714, HLUNG2003716, HLUNG2003833, HLUNG2003872, HLUNG2003918, HLUNG2003991, HLUNG2004014, HLUNG2004037, HLUNG2004067, HLUNG2004154,

[1857] HLUNG2004159, HLUNG2004170, HLUNG2004217, HLUNG2004273, HLUNG2004388, HLUNG2004416, HLUNG2004521, HLUNG2004534, HLUNG2004684, HLUNG2004707, HLUNG2004774, HLUNG2004775, HLUNG2005012, HLUNG2005030, HLUNG2005045, HLUNG2005076, HLUNG2005133, HLUNG2005203, HLUNG2005230, HLUNG2005479, HLUNG2005524, HLUNG2005656, HLUNG2005738, HLUNG2005774, HLUNG2005813, HLUNG2005924, HLUNG2006026, HLUNG2006067, HLUNG2006094, HLUNG2006370, HLUNG2006397, HLUNG2006570, HLUNG2006599, HLUNG2006614, HLUNG2006671, HLUNG2006781, HLUNG2006812, HLUNG2006843, HLUNG2006852, HLUNG2006935, HLUNG2007041, HLUNG2007163, HLUNG2007210, HLUNG2007219, HLUNG2007245, HLUNG2007433, HLUNG2007931, HLUNG2008066, HLUNG2008139, HLUNG2008153,

[1858] HLUNG2008225, HLUNG2008235, HLUNG2008247, HLUNG2008333, HLUNG2008348, HLUNG2008384, HLUNG2008396, HLUNG2008439, HLUNG2008479, HLUNG2008480, HLUNG2008521, HLUNG2008637, HLUNG2008833, HLUNG2008875, HLUNG2008885, HLUNG2008958, HLUNG2008959, HLUNG2009067, HLUNG2009215, HLUNG2009225, HLUNG2009253, HLUNG2009303, HLUNG2009413, HLUNG2009729, HLUNG2010181, HLUNG2010464, HLUNG2010562, HLUNG2010845, HLUNG2011041, HLUNG2011298, HLUNG2011461, HLUNG2011833, HLUNG2012049, HLUNG2012287, HLUNG2012315, HLUNG2012546, HLUNG2012600, HLUNG2012727, HLUNG2013097, HLUNG2013204, HLUNG2013304, HLUNG2013350, HLUNG2013622, HLUNG2013643, HLUNG2013851, HLUNG2014262, HLUNG2014288, HLUNG2014449, HLUNG2014821, HLUNG2015184,

[1859] HLUNG2015418, HLUNG2015548, HLUNG2015578, HLUNG2015617, HLUNG2016022, HLUNG2016862, HLUNG2017262, HLUNG2017286, HLUNG2017307, HLUNG2017350, HLUNG2017806, HLUNG2018029, HLUNG2018282, HLUNG2018626, HLUNG2019058, HSYRA1000062, HSYRA1000131, HSYRA1000137, HSYRA1000148, HSYRA1000152, HSYRA1000178, HSYRA2000044, HSYRA2000135, HSYRA2000137, HSYRA2000190, HSYRA2000221, HSYRA2000224, HSYRA2000232, HSYRA2000237, HSYRA2000248, HSYRA2000253, HSYRA2000255, HSYRA2000332, HSYRA2000371, HSYRA2000424, HSYRA2000507, HSYRA2000510, HSYRA2000605, HSYRA2000629, HSYRA2000640, HSYRA2000706, HSYRA2000743, HSYRA2000760, HSYRA2000787, HSYRA2000792, HSYRA2000828, HSYRA2000832, HSYRA2000925, HSYRA2000927, HSYRA2001003,

[1860] HSYRA2001103, HSYRA2001105, HSYRA2001138, HSYRA2001142, HSYRA2001153, HSYRA2001232, HSYRA2001255, HSYRA2001332, HSYRA2001353, HSYRA2001396, HSYRA2001420, HSYRA2001484, HSYRA2001552, HSYRA2001567, HSYRA2001574, HSYRA2001580, HSYRA2001615, HSYRA2001631, HSYRA2001638, HSYRA2001983, HSYRA2002103, HSYRA2002590, HSYRA2002741, HSYRA2003168, HSYRA2004550, HSYRA2004858, HSYRA2005456, HSYRA2005496, HSYRA2005628, HSYRA2005970, HSYRA2006049, HSYRA2006873, HSYRA2007241, HSYRA2007338, HSYRA2007650, HSYRA2007667, HSYRA2008154, HSYRA2008714, HSYRA2009102, IMR321000155, IMR321000158, IMR321000161, IMR321000165, IMR321000193, IMR321000207, IMR321000230, IMR321000242, IMR321000266, IMR322000010, IMR322000072,

[1861] IMR322000107, IMR322000127, IMR322000144, IMR322000152, IMR322000164, IMR322000178, IMR322000243, IMR322000302, IMR322000316, IMR322000374, IMR322000379, IMR322000383, IMR322000418, IMR322000518, IMR322000555, IMR322000604, IMR322000609, IMR322000656, IMR322000672, IMR322000730, IMR322000742, IMR322000775, IMR322000791, IMR322000811, IMR322000819, IMR322000838, IMR322000859, IMR322000863, IMR322000917, IMR322000918, IMR322000919, IMR322000935, IMR322000953, IMR322000973, IMR322000984, IMR322001018, IMR322001049, IMR322001167, IMR322001185, IMR322001245, IMR322001317, IMR322001318, IMR322001322, IMR322001332, IMR322001380, IMR322001435, IMR322001438, IMR322001452, IMR322001491, IMR322001534,

[1862] IMR322001541, IMR322001584, IMR322001665, IMR322001670, IMR322001710, IMR322001724, IMR322001879, IMR322002035, IMR322002110, IMR322002470, IMR322002993, IMR322003675, IMR322004768, IMR322005293, IMR322005833, IMR322006012, IMR322006222, IMR322006495, IMR322006520, IMR322006886, IMR322006947, IMR322007078, IMR322007225, IMR322007704, IMR322008651, IMR322009710, IMR322009807, IMR322010295, IMR322010953, IMR322011689, IMR322012314, IMR322012529, IMR322013053, IMR322013396, IMR322013731, IMR322013805, IMR322015523, IMR322016146, IMR322017049, IMR322018117, IMR322018192, IMR322019070, JCMLC2000273, KIDNE1000008, KIDNE1000012, KIDNE1000015, KIDNE1000028, KIDNE1000036, KIDNE1000064, KIDNE1000104,

[1863] KIDNE1000121, KIDNE1000143, KIDNE1000145, KIDNE1000152, KIDNE2000026, KIDNE2000041, KIDNE2000046, KIDNE2000051, KIDNE2000070, KIDNE2000085, KIDNE2000167, KIDNE2000174, KIDNE2000192, KIDNE2000227, KIDNE2000244, KIDNE2000245, KIDNE2000252, KIDNE2000266, KIDNE2000287, KIDNE2000315, KIDNE2000317, KIDNE2000328, KIDNE2000330, KIDNE2000335, KIDNE2000349, KIDNE2000375, KIDNE2000383, KIDNE2000394, KIDNE2000403, KIDNE2000422, KIDNE2000493, KIDNE2000497, KIDNE2000510, KIDNE2000513, KIDNE2000517, KIDNE2000519, KIDNE2000555, KIDNE2000574, KIDNE2000624, KIDNE2000665, KIDNE2000678, KIDNE2000717, KIDNE2000721, KIDNE2000722, KIDNE2000777, KIDNE2000801, KIDNE2000832, KIDNE2000833, KIDNE2000846, KIDNE2000867,

[1864] KIDNE2000909, KIDNE2000947, KIDNE2001117, KIDNE2001140, KIDNE2001162, KIDNE2001269, KIDNE2001361, KIDNE2001373, KIDNE2001636, KIDNE2001713, KIDNE2001802, KIDNE2001840, KIDNE2001847, KIDNE2001857, KIDNE2001873, KIDNE2001897, KIDNE2001931, KIDNE2001979, KIDNE2002015, KIDNE2002162, KIDNE2002168, KIDNE2002191, KIDNE2002198, KIDNE2002252, KIDNE2002262, KIDNE2002265, KIDNE2002438, KIDNE2002483, KIDNE2002725, KIDNE2002768, KIDNE2002795, KIDNE2002798, KIDNE2002839, KIDNE2002845, KIDNE2002872, KIDNE2002882, KIDNE2002883, KIDNE2002980, KIDNE2002991, KIDNE2003185, KIDNE2003188, KIDNE2003233, KIDNE2003305, KIDNE2003316, KIDNE2003335, KIDNE2003357, KIDNE2003373, KIDNE2003377, KIDNE2003507, KIDNE2003752,

[1865] KIDNE2003764, KIDNE2003837, KIDNE2003994, KIDNE2004034, KIDNE2004054, KIDNE2004084, KIDNE2004095, KIDNE2004115, KIDNE2004233, KIDNE2004262, KIDNE2004279, KIDNE2004294, KIDNE2004295, KIDNE2004305, KIDNE2004344, KIDNE2004394, KIDNE2004411, KIDNE2004475, KIDNE2004519, KIDNE2004520, KIDNE2004531, KIDNE2004534, KIDNE2004562, KIDNE2004579, KIDNE2004626, KIDNE2004681, KIDNE2004828, KIDNE2004846, KIDNE2004864, KIDNE2004879, KIDNE2004981, KIDNE2004985, KIDNE2004999, KIDNE2005038, KIDNE2005042, KIDNE2005062, KIDNE2005266, KIDNE2005296, KIDNE2005321, KIDNE2005327, KIDNE2005336, KIDNE2005400, KIDNE2005424, KIDNE2005477, KIDNE2005526, KIDNE2005543, KIDNE2005603, KIDNE2005629, KIDNE2005676, KIDNE2005781,

[1866] KIDNE2005798, KIDNE2005854, KIDNE2005908, KIDNE2005937, KIDNE2006009, KIDNE2006014, KIDNE2006030, KIDNE2006039, KIDNE2006053, KIDNE2006062, KIDNE2006092, KIDNE2006145, KIDNE2006149, KIDNE2006210, KIDNE2006248, KIDNE2006299, KIDNE2006334, KIDNE2006353, KIDNE2006376, KIDNE2006378, KIDNE2006465, KIDNE2006580, KIDNE2006652, KIDNE2006687, KIDNE2006733, KIDNE2006760, KIDNE2006775, KIDNE2006811, KIDNE2006820, KIDNE2006880, KIDNE2007005, KIDNE2007040, KIDNE2007077, KIDNE2007186, KIDNE2007222, KIDNE2007356, KIDNE2007422, KIDNE2007569, KIDNE2007810, KIDNE2007811, KIDNE2007910, KIDNE2007954, KIDNE2008022, KIDNE2008048, KIDNE2008069, KIDNE2008072, KIDNE2008116, KIDNE2008117, KIDNE2008218, KIDNE2008315,

[1867] KIDNE2008362, KIDNE2008378, KIDNE2008403, KIDNE2008404, KIDNE2008446, KIDNE2008473, KIDNE2008480, KIDNE2008649, KIDNE2008666, KIDNE2008697, KIDNE2008758, KIDNE2008788, KIDNE2008795, KIDNE2008824, KIDNE2008832, KIDNE2008869, KIDNE2008914, KIDNE2008975, KIDNE2008987, KIDNE2009019, KIDNE2009109, KIDNE2009180, KIDNE2009191, KIDNE2009332, KIDNE2009367, KIDNE2009426, KIDNE2009467, KIDNE2009490, KIDNE2009553, KIDNE2009605, KIDNE2009628, KIDNE2009647, KIDNE2009676, KIDNE2009723, KIDNE2010007, KIDNE2010049, KIDNE2010052, KIDNE2010084, KIDNE2010137, KIDNE2010151, KIDNE2010264, KIDNE2010265, KIDNE2010271, KIDNE2010419, KIDNE2010430, KIDNE2010574, KIDNE2010674, KIDNE2010739, KIDNE2010750, KIDNE2010762,

[1868] KIDNE2010863, KIDNE2010973, KIDNE2010989, KIDNE2011200, KIDNE2011314, KIDNE2011508, KIDNE2011532, KIDNE2011635, KIDNE2011752, KIDNE2011782, KIDNE2011858, KIDNE2012009, KIDNE2012025, KIDNE2012188, KIDNE2012291, KIDNE2012316, KIDNE2012361, KIDNE2012453, KIDNE2012563, KIDNE2012601, KIDNE2012613, KIDNE2012710, KIDNE2012745, KIDNE2012775, KIDNE2012784, KIDNE2012945, KIDNE2013045, KIDNE2013095, KIDNE2013158, KIDNE2013218, KIDNE2013263, KIDNE2013346, KIDNE2013388, KIDNE2013413, KIDNE2013489, KIDNE2013639, KIDNE2013731, KIDNE2013734, KIDNE2013775, KIDNE2013801, KIDNE2013845, KIDNE2013866, KIDNE2014087, KIDNE2014112, KIDNE2014119, KIDNE2014170, KIDNE2014184, KIDNE2014268, KIDNE2014298, KIDNE2014320,

[1869] KIDNE2014325, KIDNE2014415, KIDNE2014489, KIDNE2014496, KIDNE2014661, KIDNE2014717, KIDNE2014789, KIDNE2014808, KIDNE2014890, KIDNE2014978, KIDNE2015073, KIDNE2015221, KIDNE2015244, KIDNE2015313, KIDNE2015433, KIDNE2015445, KIDNE2015483, KIDNE2015515, KIDNE2015546, KIDNE2015556, KIDNE2015598, KIDNE2015660, KIDNE2015710, KIDNE2015987, KIDNE2016000, KIDNE2016036, KIDNE2016096, KIDNE2016101, KIDNE2016142, KIDNE2016188, KIDNE2016327, KIDNE2016371, KIDNE2016388, KIDNE2016464, KIDNE2016539, KIDNE2016570, KIDNE2016918, KIDNE2017007, KIDNE2017040, KIDNE2017052, KIDNE2017151, KIDNE2017153, KIDNE2017315, KIDNE2017332, KIDNE2017343, KIDNE2017454, KIDNE2017603, KIDNE2017956, KIDNE2018071, KIDNE2018166,

[1870] KIDNE2018167, KIDNE2018217, KIDNE2018254, KIDNE2018268, KIDNE2018269, KIDNE2018287, KIDNE2018294, KIDNE2018352, KIDNE2018462, KIDNE2018493, KIDNE2018617, KIDNE2018678, KIDNE2018727, KIDNE2018863, KIDNE2018891, KIDNE2018989, KIDNE2018996, KIDNE2019074, KIDNE2019187, LIVER1000017, LIVER1000050, LIVER1000055, LIVER1000058, LIVER1000063, LIVER1000067, LIVER1000073, LIVER1000079, LIVER1000082, LIVER1000099, LIVER1000104, LIVER1000111, LIVER1000126, LIVER1000139, LIVER1000155, LIVER1000165, LIVER1000175, LIVER1000224, LIVER1000230, LIVER1000278, LIVER1000303, LIVER1000397, LIVER1000421, LIVER1000433, LIVER1000479, LIVER1000482, LIVER1000542, LIVER2000003, LIVER2000033, LIVER2000037, LIVER2000158,

[1871] LIVER2000216, LIVER2000237, LIVER2000247, LIVER2000360, LIVER2000416, LIVER2000446, LIVER2000515, LIVER2000592, LIVER2000626, LIVER2000682, LIVER2000769, LIVER2000775, LIVER2001051, LIVER2001076, LIVER2001099, LIVER2001113, LIVER2001164, LIVER2001191, LIVER2001265, LIVER2001329, LIVER2001389, LIVER2001461, LIVER2001539, LIVER2001608, LIVER2001835, LIVER2002638, LIVER2002644, LIVER2002660, LIVER2002702, LIVER2002842, LIVER2003008, LIVER2003065, LIVER2003234, LIVER2003511, LIVER2003524, LIVER2003568, LIVER2003581, LIVER2003800, LIVER2003854, LIVER2004074, LIVER2004392, LIVER2004514, LIVER2004565, LIVER2005028, LIVER2005198, LIVER2005218, LIVER2005376, LIVER2005385, LIVER2005512, LIVER2005520,

[1872] LIVER2005527, LIVER2005544, LIVER2005625, LIVER2005728, LIVER2005789, LIVER2005973, LIVER2005981, LIVER2006006, LIVER2006251, LIVER2006410, LIVER2006469, LIVER2006644, LIVER2006764, LIVER2007415, LIVER2007548, LIVER2007568, LIVER2007721, LIVER2007783, LIVER2008053, LIVER2008465, LIVER2008473, LIVER2008580, LIVER2008706, LIVER2008751, LIVER2008945, LIVER2008998, LIVER2009110, LIVER2009118, LIVER2009554, LYMPB1000141, LYMPB1000158, LYMPB2000083, MAMGL1000017, MAMGL1000035, MAMGL1000083, MAMGL1000096, MAMGL1000100, MAMGL1000132, MAMGL1000151, MAMGL1000173, MAMGL1000178, MAMGL1000182, MAMGL1000184, MESAN1000032, MESAN1000035, MESAN1000050, MESAN1000079, MESAN1000080, MESAN1000101, MESAN1000121,

[1873] MESAN1000126, MESAN1000147, MESAN1000180, MESAN2000023, MESAN2000026, MESAN2000067, MESAN2000092, MESAN2000149, MESAN2000167, MESAN2000264, MESAN2000291, MESAN2000337, MESAN2000434, MESAN2000457, MESAN2000462, MESAN2000501, MESAN2000572, MESAN2000608, MESAN2000620, MESAN2000711, MESAN2000815, MESAN2000894, MESAN2000909, MESAN2001154, MESAN2001450, MESAN2001627, MESAN2001770, MESAN2001979, MESAN2001980, MESAN2002086, MESAN2002113, MESAN2002122, MESAN2002147, MESAN2002186, MESAN2002424, MESAN2002519, MESAN2002687, MESAN2002709, MESAN2002790, MESAN2002844, MESAN2002940, MESAN2002978, MESAN2003035, MESAN2003037, MESAN2003039, MESAN2003058, MESAN2003101, MESAN2003190, MESAN2003322, MESAN2003444,

[1874] MESAN2003490, MESAN2003529, MESAN2003646, MESAN2003662, MESAN2003709, MESAN2003851, MESAN2004138, MESAN2004288, MESAN2004575, MESAN2005284, MESAN2005303, MESAN2005371, MESAN2005633, MESAN2005689, MESAN2005724, MESAN2005766, MESAN2005808, MESAN2005811, MESAN2005957, MESAN2005958, MESAN2006022, MESAN2006043, MESAN2006328, MESAN2006401, MESAN2006580, MESAN2006599, MESAN2006743, MESAN2006953, MESAN2006971, MESAN2007032, MESAN2007440, MESAN2007597, MESAN2007755, MESAN2008222, MESAN2008334, MESAN2008415, MESAN2008460, MESAN2008536, MESAN2008679, MESAN2008729, MESAN2008821, MESAN2008926, MESAN2008936, MESAN2009019, MESAN2009081, MESAN2009105, MESAN2009311, MESAN2009418, MESAN2009503, MESAN2009522,

[1875] MESAN2009580, MESAN2010031, MESAN2010114, MESAN2010312, MESAN2010321, MESAN2010664, MESAN2010681, MESAN2011545, MESAN2011597, MESAN2011627, MESAN2011632, MESAN2011977, MESAN2011984, MESAN2012054, MESAN2012113, MESAN2012586, MESAN2012708, MESAN2012735, MESAN2013019, MESAN2013022, MESAN2013183, MESAN2013211, MESAN2013283, MESAN2013284, MESAN2013611, MESAN2013674, MESAN2013845, MESAN2013908, MESAN2013936, MESAN2014192, MESAN2014295, MESAN2014298, MESAN2014412, MESAN2014624, MESAN2015277, MESAN2015365, MESAN2015391, MESAN2015401, MESAN2015501, MESAN2015515, MESAN2015708, MESAN2016159, MESAN2016304, MESAN2016409, MESAN2016552, MESAN2016965, MESAN2017133, MESAN2017152, MESAN2017417, MESAN2018209,

[1876] MESAN2018576, MESAN2018670, MESAN2018699, MESTC1000042, MESTC1000147, MESTC2000150, MESTC2000153, MESTC2000170, N1ESE2000698, NB9N41000011, NB9N41000047, NB9N41000121, NB9N41000135, NB9N41000142, NB9N41000146, NB9N41000340, NB9N42000104, NB9N42000122, NB9N42000196, NB9N42000281, NB9N42000314, NB9N42000430, NB9N42000495, NB9N42001300, NT2NE1000004, NT2NE1000014, NT2NE1000018, NT2NE1000023, NT2NE1000024, NT2NE1000059, NT2NE1000063, NT2NE1000073, NT2NE1000083, NT2NE1000120, NT2NE1000122, NT2NE1000163, NT2NE1000175, NT2NE1000181, NT2NE1000185, NT2NE2000038, NT2NE2000054, NT2NE2000056, NT2NE2000057, NT2NE2000064, NT2NE2000109, NT2NE2000137, NT2NE2000156, NT2NE2000174, NT2NE2000195, NT2NE2000222,

[1877] NT2NE2000259, NT2NE2000284, NT2NE2000299, NT2NE2000327, NT2NE2000353, NT2NE2000356, NT2NE2000369, NT2NE2000374, NT2NE2000383, NT2NE2000384, NT2NE2000386, NT2NE2000390, NT2NE2000392, NT2NE2000455, NT2NE2000470, NT2NE2000488, NT2NE2000517, NT2NE2000536, NT2NE2000546, NT2NE2000548, NT2NE2000550, NT2NE2000586, NT2NE2000612, NT2NE2000636, NT2NE2000658, NT2NE2000706, NT2NE2000707, NT2NE2000763, NT2NE2000802, NT2NE2000808, NT2NE2000809, NT2NE2000864, NT2NE2000909, NT2NE2000913, NT2NE2000950, NT2NE2000951, NT2NE2000980, NT2NE2001005, NT2NE2001021, NT2NE2001040, NT2NE2001048, NT2NE2001049, NT2NE2001142, NT2NE2001156, NT2NE2001176, NT2NE2001180, NT2NE2001181, NT2NE2001188, NT2NE2001191, NT2NE2001247,

[1878] NT2NE2001252, NT2NE2001324, NT2NE2001326, NT2NE2001337, NT2NE2001364, NT2NE2001372, NT2NE2001397, NT2NE2001403, NT2NE2001428, NT2NE2001432, NT2NE2001435, NT2NE2001442, NT2NE2001524, NT2NE2001530, NT2NE2001545, NT2NE2001598, NT2NE2001617, NT2NE2001623, NT2NE2001626, NT2NE2001634, NT2NE2001648, NT2NE2001655, NT2NE2001660, NT2NE2001666, NT2NE2001677, NT2NE2001697, NT2NE2001698, NT2NE2001723, NT2NE2001725, NT2NE2001793, NT2NE2001874, NT2NE2001889, NT2NE2001923, NT2NE2002100, NT2NE2002162, NT2NE2002186, NT2NE2002285, NT2NE2002311, NT2NE2002620, NT2NE2002651, NT2NE2002732, NT2NE2002768, NT2NE2002791, NT2NE2002856, NT2NE2003150, NT2NE2003185, NT2NE2003252, NT2NE2003280, NT2NE2003308, NT2NE2003309,

[1879] NT2NE2003315, NT2NE2003393, NT2NE2003408, NT2NE2003457, NT2NE2003485, NT2NE2003540, NT2NE2003569, NT2NE2003571, NT2NE2003705, NT2NE2003752, NT2NE2003887, NT2NE2003921, NT2NE2004255, NT2NE2004378, NT2NE2004490, NT2NE2004519, NT2NE2004606, NT2NE2004716, NT2NE2004740, NT2NE2004787, NT2NE2004916, NT2NE2005035, NT2NE2005223, NT2NE2005276, NT2NE2005317, NT2NE2005323, NT2NE2005358, NT2NE2005371, NT2NE2005395, NT2NE2005419, NT2NE2005441, NT2NE2005517, NT2NE2005537, NT2NE2005555, NT2NE2005588, NT2NE2005676, NT2NE2005688, NT2NE2005720, NT2NE2005784, NT2NE2005804, NT2NE2005821, NT2NE2005876, NT2NE2005890, NT2NE2005921, NT2NE2005968, NT2NE2006075, NT2NE2006087, NT2NE2006103, NT2NE2006217, NT2NE2006288,

[1880] NT2NE2006382, NT2NE2006387, NT2NE2006427, NT2NE2006432, NT2NE2006458, NT2NE2006478, NT2NE2006531, NT2NE2006659, NT2NE2006784, NT2NE2006813, NT2NE2006894, NT2NE2006909, NT2NE2006942, NT2NE2006958, NT2NE2007052, NT2NE2007220, NT2NE2007425, NT2NE2007725, NT2NE2007727, NT2NE2007786, NT2NE2007877, NT2NE2007967, NT2NE2008017, NT2NE2008060, NT2NE2008077, NT2NE2008213, NT2NE2008260, NT2NE2008378, NT2NE2008607, NT2NE2008639, NT2NE2008727, NT2NE2008783, NT2NE2008785, NT2NE2008803, NT2NE2008867, NT2NE2008961, NT2NE2008997, NT2NE2009138, NT2NE2009295, NT2NE2009426, NT2NE2009523, NT2NE2009608, NT2NE2009691, NT2NE2010056, NT2NE2010105, NT2NE2010150, NT2NE2010400, NT2NE2010632, NT2NE2010633, NT2NE2010654,

[1881] NT2NE2010688, NT2NE2010781, NT2NE2010842, NT2NE2010854, NT2NE2011033, NT2NE2011036, NT2NE2011107, NT2NE2011119, NT2NE2011154, NT2NE2011221, NT2NE2011411, NT2NE2011485, NT2NE2011650, NT2NE2011684, NT2NE2011687, NT2NE2011691, NT2NE2011758, NT2NE2011823, NT2NE2011896, NT2NE2011998, NT2NE2012113, NT2NE2012199, NT2NE2012243, NT2NE2012361, NT2NE2012448, NT2NE2012457, NT2NE2012493, NT2NE2012505, NT2NE2012533, NT2NE2012603, NT2NE2012747, NT2NE2012790, NT2NE2012847, NT2NE2012928, NT2NE2013019, NT2NE2013081, NT2NE2013189, NT2NE2013217, NT2NE2013547, NT2NE2014013, NT2NE2014028, NT2NE2014104, NT2NE2014113, NT2NE2014176, NT2NE2014221, NT2NE2014525, NT2NE2014650, NT2NE2014651, NT2NE2014681, NT2NE2014758,

[1882] NT2NE2014869, NT2NE2014950, NT2NE2015061, NT2NE2015262, NT2NE2015275, NT2NE2015362, NT2NE2015480, NT2NE2015511, NT2NE2015565, NT2NE2015626, NT2NE2015747, NT2NE2015860, NT2NE2015885, NT2NE2015904, NT2NE2015974, NT2NE2016041, NT2NE2016387, NT2NE2016419, NT2NE2016519, NT2NE2016608, NT2NE2016766, NT2NE2016774, NT2NE2016971, NT2NE2017259, NT2NE2017332, NT2NE2017397, NT2NE2017480, NT2NE2017492, NT2NE2017508, NT2NE2017562, NT2NE2017590, NT2NE2017612, NT2NE2017721, NT2NE2017752, NT2NE2017792, NT2NE2017982, NT2NE2018165, NT2NE2018176, NT2NE2018180, NT2NE2018273, NT2NE2018376, NT2NE2018472, NT2NE2018490, NT2NE2018594, NT2NE2018739, NT2NE2018916, NT2NE2019056, NT2NE2019076, NT2NE2019091, NT2NE2019099,

[1883] NT2RI1000016, NT2RI1000027, NT2RI1000035, NT2RI1000048, NT2RI1000127, NT2RI1000164, NT2RI1000172, NT2RI2000004, NT2RI2000007, NT2RI2000064, NT2RI2000107, NT2RI2000116, NT2RI2000117, NT2RI2000128, NT2RI2000133, NT2RI2000167, NT2RI2000173, NT2RI2000187, NT2RI2000255, NT2RI2000263, NT2RI2000270, NT2RI2000276, NT2RI2000282, NT2RI2000284, NT2RI2000294, NT2RI2000313, NT2RI2000341, NT2RI2000344, NT2RI2000348, NT2RI2000412, NT2RI2000480, NT2RI2000575, NT2RI2000578, NT2RI2000588, NT2RI2000597, NT2RI2000669, NT2RI2000671, NT2RI2000685, NT2RI2000688, NT2RI2000689, NT2RI2000704, NT2RI2000738, NT2RI2000775, NT2RI2000822, NT2RI2000829, NT2RI2000841, NT2RI2000865, NT2RI2000932, NT2RI2000974, NT2RI2000987,

[1884] NT2RI2001010, NT2RI2001017, NT2RI2001030, NT2RI2001054, NT2RI2001083, NT2RI2001091, NT2RI2001167, NT2RI2001178, NT2RI2001235, NT2RI2001244, NT2RI2001307, NT2RI2001385, NT2RI2001409, NT2RI2001410, NT2RI2001422, NT2RI2001425, NT2RI2001449, NT2RI2001450, NT2RI2001474, NT2RI2001519, NT2RI2001595, NT2RI2001621, NT2RI2001624, NT2RI2001657, NT2RI2001726, NT2RI2001731, NT2RI2001769, NT2RI2001782, NT2RI2001836, NT2RI2001846, NT2RI2001859, NT2RI2001866, NT2RI2001910, NT2RI2001952, NT2RI2002022, NT2RI2002041, NT2RI2002117, NT2RI2002120, NT2RI2002152, NT2RI2002153, NT2RI2002179, NT2RI2002243, NT2RI2002252, NT2RI2002260, NT2RI2002266, NT2RI2002270, NT2RI2002334, NT2RI2002359, NT2RI2002391, NT2RI2002447,

[1885] NT2RI2002481, NT2RI2002507, NT2RI2002517, NT2RI2002530, NT2RI2002540, NT2RI2002549, NT2RI2002554, NT2RI2002564, NT2RI2002585, NT2RI2002592, NT2RI2002602, NT2RI2002654, NT2RI2002699, NT2RI2002729, NT2RI2002802, NT2RI2002819, NT2RI2002822, NT2RI2002847, NT2RI2002852, NT2RI2002865, NT2RI2002923, NT2RI2002926, NT2RI2002958, NT2RI2002970, NT2RI2003011, NT2RI2003019, NT2RI2003051, NT2RI2003067, NT2RI2003184, NT2RI2003205, NT2RI2003222, NT2RI2003301, NT2RI2003317, NT2RI2003338, NT2RI2003344, NT2RI2003360, NT2RI2003361, NT2RI2003383, NT2RI2003392, NT2RI2003399, NT2RI2003407, NT2RI2003419, NT2RI2003420, NT2RI2003655, NT2RI2003667, NT2RI2003678, NT2RI2003751, NT2RI2003884, NT2RI2003921, NT2RI2003973,

[1886] NT2RI2003993, NT2RI200405.9, NT2RI2004078, NT2RI2004079, NT2RI2004093, NT2RI2004136, NT2RI2004157, NT2RI2004188, NT2RI2004190, NT2RI2004209, NT2RI2004230, NT2RI2004290, NT2RI2004304, NT2RI2004312, NT2RI2004381, NT2RI2004398, NT2RI2004410, NT2RI2004442, NT2RI2004468, NT2RI2004535, NT2RI2004606, NT2RI2004608, NT2RI2004618, NT2RI2004783, NT2RI2004818, NT2RI2004840, NT2RI2004884, NT2RI2004916, NT2RI2004962, NT2RI2004984, NT2RI2004985, NT2RI2005048, NT2RI2005061, NT2RI2005069, NT2RI2005087, NT2RI2005096, NT2RI2005115, NT2RI2005116, NT2RI2005130, NT2RI2005166, NT2RI2005239, NT2RI2005246, NT2RI2005315, NT2RI2005335, NT2RI2005353, NT2RI2005358, NT2RI2005382, NT2RI2005405, NT2RI2005473, NT2RI2005520,

[1887] NT2RI2005564, NT2RI2005579, NT2RI2005621, NT2RI2005628, NT2RI2005647, NT2RI2005670, NT2RI2005710, NT2RI2005713, NT2RI2005723, NT2RI2005772, NT2RI2005811, NT2RI2005816, NT2RI2005818, NT2RI2005851, NT2RI2005966, NT2RI2006070, NT2RI2006071, NT2RI2006081, NT2RI2006126, NT2RI2006183, NT2RI2006257, NT2RI2006294, NT2RI2006345, NT2RI2006403, NT2RI2006412, NT2RI2006445, NT2RI2006487, NT2RI2006506, NT2RI2006553, NT2RI2006565, NT2RI2006640, NT2RI2006647, NT2RI2006659, NT2RI2006662, NT2RI2006667, NT2RI2006679, NT2RI2006682, NT2RI2006686, NT2RI2006703, NT2RI2006716, NT2RI2006735, NT2RI2006762, NT2RI2006788, NT2RI2006825, NT2RI2006838, NT2RI2006853, NT2RI2006855, NT2RI2006943, NT2RI2006973, NT2RI2007046,

[1888] NT2RI2007048, NT2RI2007054, NT2RI2007096, NT2RI2007116, NT2RI2007214, NT2RI2007277, NT2RI2007303, NT2RI2007334, NT2RI2007377, NT2RI2007386, NT2RI2007406, NT2RI2007439, NT2RI2007445, NT2RI2007468, NT2RI2007469, NT2RI2007498, NT2RI2007507, NT2RI2007572, NT2RI2007589, NT2RI2007593, NT2RI2007629, NT2RI2007723, NT2RI2007729, NT2RI2007751, NT2RI2007754, NT2RI2007827, NT2RI2007853, NT2RI2007877, NT2RI2007891, NT2RI2007956, NT2RI2007965, NT2RI2007987, NT2RI2008007, NT2RI2008045, NT2RI2008050, NT2RI2008141, NT2RI2008171, NT2RI2008188, NT2RI2008204, NT2RI2008221, NT2RI2008233, NT2RI2008336, NT2RI2008396, NT2RI2008455, NT2RI2008481, NT2RI2008502, NT2RI2008526, NT2RI2008566, NT2RI2008598, NT2RI2008656,

[1889] NT2RI2008714, NT2RI2008791, NT2RI2008801, NT2RI2008808, NT2RI2008812, NT2RI2008841, NT2RI2008942, NT2RI2008952, NT2RI2009005, NT2RI2009037, NT2RI2009065, NT2RI2009066, NT2RI2009083, NT2RI2009101, NT2RI2009103, NT2RI2009144, NT2RI2009151, NT2RI2009173, NT2RI2009215, NT2RI2009233, NT2RI2009239, NT2RI2009259, NT2RI2009269, NT2RI2009289, NT2RI2009301, NT2RI2009402, NT2RI2009406, NT2RI2009517, NT2RI2009583, NT2RI2009585, NT2RI2009595, NT2RI2009855, NT2RI2010283, NT2RI2010508, NT2RI2010795, NT2RI2011422, NT2RI2011450, NT2RI2011683, NT2RI2011803, NT2RI2012350, NT2RI2012659, NT2RI2012726, NT2RI2012990, NT2RI2013345, NT2RI2013357, NT2RI2013373, NT2RI2014247, NT2RI2014551, NT2RI2014683, NT2RI2014733,

[1890] NT2RI2015239, NT2RI2015342, NT2RI2015533, NT2RI2016128, NT2RI2016134, NT2RI2018311, NT2RI2018363, NT2RI2018448, NT2RI2018883, NT2RI2018950, NT2RI2019751, NT2RI2019826, NT2RI2020390, NT2RI2020703, NT2RI2021463, NT2RI2021625, NT2RI2022468, NT2RI2022584, NT2RI2023303, NT2RI2023671, NT2RI2024008, NT2RI2024313, NT2RI2024460, NT2RI2024496, NT2RI2024935, NT2RI2025075, NT2RI2025255, NT2RI2025564, NT2RI2025565, NT2RI2025909, NT2RI2025957, NT2RI2025976, NT2RI2026758, NT2RI2027081, NT2RI2027157, NT2RI2027224, NT2RI2027323, NT2RI2027396, NT2RI2027484, NT2RI2027975, NT2RI2028213, NT2RI2028222, NT2RI2028537, NT2RI2028642, NT2RI3000174, NT2RI3000213, NT2RI3000423, NT2RI3000622, NT2RI3001132, NT2RI3001263,

[1891] NT2RI3001279, NT2RI3001348, NT2RI3001445, NT2RI3001458, NT2RI3001515, NT2RI3001573, NT2RI3001967, NT2RI3002303, NT2RI3002557, NT2RI3002842, NT2RI3003027, NT2RI3003031, NT2RI3003095, NT2RI3003104, NT2RI3003162, NT2RI3003362, NT2RI3003382, NT2RI3003409, NT2RI3003738, NT2RI3003925, NT2RI3004133, NT2RI3004381, NT2RI3004510, NT2RI3005202, NT2RI3005403, NT2RI3005416, NT2RI3005724, NT2RI3005861, NT2RI3005923, NT2RI3005928, NT2RI3006132, NT2RI3006171, NT2RI3006284, NT2RI3006340, NT2RI3006376, NT2RI3006666, NT2RI3006673, NT2RI3006796, NT2RI3007065, NT2RI3007095, NT2RI3007158, NT2RI3007167, NT2RI3007213, NT2RI3007291, NT2RI3007443, NT2RI3007543, NT2RI3007684, NT2RI3007757, NT2RI3007878, NT2RI3007978,

[1892] NT2RI3008055, NT2RI3008162, NT2RI3008179, NT2RI3008228, NT2RI3008442, NT2RI3008652, NT2RI3008697, NT2RI3008974, NT2RI3009158, NT2RI3009480, NT2RI3009524, NT2RP6000008, NT2RP6000032, NT2RP6000033, NT2RP6000039, NT2RP6000043, NT2RP6000059, NT2RP6000060, NT2RP6000072, NT2RP6000077, NT2RP6000085, NT2RP6000086, NT2RP6000100, NT2RP6000109, NT2RP6000110, NT2RP6000119, NT2RP6000123, NT2RP6000127, NT2RP6000130, NT2RP6000140, NT2RP6000150, NT2RP7000041, NT2RP7000069, NT2RP7000086, NT2RP7000109, NT2RP7000112, NT2RP7000238, NT2RP7000259, NT2RP7000271, NT2RP7000311, NT2RP7000359, NT2RP7000364, NT2RP7000380, NT2RP7000391, NT2RP7000425, NT2RP7000477, NT2RP7000579, NT2RP7000586, NT2RP7000600, NT2RP7000624,

[1893] NT2RP7000812, NT2RP7000906, NT2RP7000926, NT2RP7001074, NT2RP7001080, NT2RP7001156, NT2RP7001166, NT2RP7001231, NT2RP7001283, NT2RP7001306, NT2RP7001319, NT2RP7001335, NT2RP7001364, NT2RP7001475, NT2RP7001532, NT2RP7001591, NT2RP7001602, NT2RP7001678, NT2RP7001962, NT2RP7002028, NT2RP7002064, NT2RP7002151, NT2RP7002163, NT2RP7002243, NT2RP7002282, NT2RP7002376, NT2RP7002379, NT2RP7002449, NT2RP7002450, NT2RP7002478, NT2RP7002554, NT2RP7002594, NT2RP7002603, NT2RP7002619, NT2RP7002650, NT2RP7002738, NT2RP7002779, NT2RP7002802, NT2RP7002829, NT2RP7002841, NT2RP7002875, NT2RP7002906, NT2RP7002978, NT2RP7002982, NT2RP7003025, NT2RP7003050, NT2RP7003055, NT2RP7003084, NT2RP7003091, NT2RP7003107,

[1894] NT2RP7003134, NT2RP7003148, NT2RP7003203, NT2RP7003261, NT2RP7003319, NT2RP7003439, NT2RP7003511, NT2RP7003629, NT2RP7003632, NT2RP7003647, NT2RP7003680, NT2RP7003688, NT2RP7003724, NT2RP7003960, NT2RP7004027, NT2RP7004080, NT2RP7004114, NT2RP7004123, NT2RP7004173, NT2RP7004196, NT2RP7004204, NT2RP7004233, NT2RP7004260, NT2RP7004348, NT2RP7004352, NT2RP7004358, NT2RP7004373, NT2RP7004396, NT2RP7004428, NT2RP7004481, NT2RP7004541, NT2RP7004559, NT2RP7004641, NT2RP7004656, NT2RP7004687, NT2RP7004722, NT2RP7004728, NT2RP7004751, NT2RP7004766, NT2RP7004790, NT2RP7004884, NT2RP7004911, NT2RP7004915, NT2RP7004925, NT2RP7004946, NT2RP7004961, NT2RP7004964, NT2RP7004975, NT2RP7005118, NT2RP7005205,

[1895] NT2RP7005219, NT2RP7005323, NT2RP7005468, NT2RP7005493, NT2RP7005513, NT2RP7005529, NT2RP7005629, NT2RP7005631, NT2RP7005669, NT2RP7005675, NT2RP7005750, NT2RP7005846, NT2RP7006033, NT2RP7006075, NT2RP7006141, NT2RP7006160, NT2RP7006162, NT2RP7006188, NT2RP7006223, NT2RP7006263, NT2RP7006296, NT2RP7006304, NT2RP7006374, NT2RP7006395, NT2RP7006408, NT2RP7006457, NT2RP7006539, NT2RP7006547, NT2RP7006601, NT2RP7006619, NT2RP7006621, NT2RP7006636, NT2RP7006701, NT2RP7006853, NT2RP7006886, NT2RP7006887, NT2RP7006980, NT2RP7006986, NT2RP7006995, NT2RP7007114, NT2RP7007154, NT2RP7007221, NT2RP7007226, NT2RP7007252, NT2RP7007269, NT2RP7007310, NT2RP7007359, NT2RP7007381, NT2RP7007387, NT2RP7007406,

[1896] NT2RP7007480, NT2RP7007504, NT2RP7007537, NT2RP7007580, NT2RP7007594, NT2RP7007610, NT2RP7007617, NT2RP7007643, NT2RP7007766, NT2RP7007842, NT2RP7007925, NT2RP7007930, NT2RP7007975, NT2RP7008013, NT2RP7008015, NT2RP7008133, NT2RP7008137, NT2RP7008142, NT2RP7008144, NT2RP7008161, NT2RP7008167, NT2RP7008315, NT2RP7008360, NT2RP7008396, NT2RP7008406, NT2RP7008435, NT2RP7008441, NT2RP7008454, NT2RP7008487, NT2RP7008543, NT2RP7008544, NT2RP7008550, NT2RP7008557, NT2RP7008623, NT2RP7008657, NT2RP7008714, NT2RP7008720, NT2RP7008855, NT2RP7008863, NT2RP7009012, NT2RP7009019, NT2RP7009030, NT2RP7009087, NT2RP7009097, NT2RP7009108, NT2RP7009149, NT2RP7009168, NT2RP7009215, NT2RP7009225, NT2RP7009236,

[1897] NT2RP7009253, NT2RP7009259, NT2RP7009267, NT2RP7009322, NT2RP7009363, NT2RP7009370, NT2RP7009373, NT2RP7009394, NT2RP7009397, NT2RP7009429, NT2RP7009439, NT2RP7009466, NT2RP7009481, NT2RP7009502, NT2RP7009507, NT2RP7009577, NT2RP7009743, NT2RP7009867, NT2RP7010109, NT2RP7010128, NT2RP7010235, NT2RP7010275, NT2RP7010521, NT2RP7010599, NT2RP7010612, NT2RP7010817, NT2RP7011086, NT2RP7011132, NT2RP7011268, NT2RP7011318, NT2RP7011452, NT2RP7011570, NT2RP7011721, NT2RP7011909, NT2RP7012291, NT2RP7012516, NT2RP7012776, NT2RP7013002, NT2RP7013374, NT2RP7013499, NT2RP7013573, NT2RP7013729, NT2RP7013764, NT2RP7013795, NT2RP7013999, NT2RP7014005, NT2RP7014178, NT2RP7014348, NT2RP7014420, NT2RP7014583,

[1898] NT2RP7014721, NT2RP7014743, NT2RP7014778, NT2RP7014906, NT2RP7014910, NT2RP7015080, NT2RP7015431, NT2RP7015512, NT2RP7015676, NT2RP7015789, NT2RP7015996, NT2RP7016508, NT2RP7016574, NT2RP7016622, NT2RP7016911, NT2RP7017139, NT2RP7017284, NT2RP7017365, NT2RP7017474, NT2RP7017546, NT2RP7017567, NT2RP7017795, NT2RP7017971, NT2RP7018032, NT2RP7018126, NT2RP7018197, NT2RP7018206, NT2RP7018340, NT2RP7018586, NT2RP7018802, NT2RP7018871, NT2RP7019064, NT2RP7019135, NT2RP7019273, NT2RP7019367, NT2RP7019401, NT2RP7019445, NT2RP7019543, NT2RP7019682, NT2RP7019835, NT2RP7020112, NT2RP7020123, NT2RP7020343, NT2RP7020379, NT2RP8000137, NT2RP8000296, NT2RP8000435, NT2RP8000483, NT2RP8000521, NT2RP8000633,

[1899] NT2RP8001363, NT2RP8001407, NT2RP8001584, NT2RP8001604, NT2RP8001605, NT2RP8003490, NT2RP8003657, NT2RP8003787, NT2RP8004306, NT2RP8005546, NT2RP8006452, NT2RP8006521, NT2RP8007416, NT2RP8007503, NT2RP8007715, NT2RP8007920, NT2RP8008057, NT2RP8009248, NTONG1000006, NTONG1000033, NTONG1000047, NTONG1000052, NTONG1000075, NTONG1000087, NTONG1000098, NTONG1000123, NTONG1000130, NTONG1000161, NTONG1000172, NTONG1000182, NTONG1000213, NTONG1000214, NTONG1000247, NTONG1000264, NTONG2000040, NTONG2000107, NTONG2000231, NTONG2000265, NTONG2000363, NTONG2000413, NTONG2000492, NTONG2000499, NTONG2000531, NTONG2000583, NTONG2000858, NTONG2000876, NTONG2000878, NTONG2000966, NTONG2000977, NTONG2000985,

[1900] NTONG2001014, NTONG2001079, NTONG2001137, NTONG2001157, NTONG2001173, NTONG2001428, NTONG2001532, NTONG2001550, NTONG2001567, NTONG2001612, NTONG2001619, NTONG2001642, NTONG2001657, NTONG2001676, NTONG2001762, NTONG2002278, NTONG2002582, NTONG2002807, NTONG2002948, NTONG2002970, NTONG2002985, NTONG2003158, NTONG2003210, NTONG2003316, NTONG2003409, NTONG2003454, NTONG2003515, NTONG2003805, NTONG2003839, NTONG2003852, NTONG2003897, NTONG2003928, NTONG2004095, NTONG2004308, NTONG2004521, NTONG2004614, NTONG2004690, NTONG2004806, NTONG2004829, NTONG2004918, NTONG2004991, NTONG2005062, NTONG2005086, NTONG2005137, NTONG2005153, NTONG2005265, NTONG2005277, NTONG2005363, NTONG2005373, NTONG2005391,

[1901] NTONG2005480, NTONG2005497, NTONG2005520, NTONG2005577, NTONG2005657, NTONG2005801, NTONG2005822, NTONG2005897, NTONG2005969, NTONG2006099, NTONG2006187, NTONG2006301, NTONG2006324, NTONG2006354, NTONG2006440, NTONG2006484, NTONG2006501, NTONG2006646, NTONG2006709, NTONG2006783, NTONG2007020, NTONG2007028, NTONG2007034, NTONG2007249, NTONG2007517, NTONG2007522, NTONG2007658, NTONG2007693, NTONG2007756, NTONG2008088, NTONG2008093, NTONG2008143, NTONG2008365, NTONG2008483, NTONG2008522, NTONG2008672, NTONG2008862, NTONG2008939, NTONG2008944, NTONG2009060, NTONG2009068, NTONG2009229, NTONG2009233, NTONG2009468, NTONG2009576, OCBBF1000016, OCBBF1000030, OCBBF1000042, OCBBF1000049, OCBBF1000054,

[1902] OCBBF1000067, OCBBF1000080, OCBBF1000085, OCBBF1000086, OCBBF1000091, OCBBF1000104, OCBBF1000114, OCBBF1000118, OCBBF1000119, OCBBF1000122, OCBBF1000130, OCBBF1000138, OCBBF1000145, OCBBF1000146, OCBBF1000153, OCBBF1000175, OCBBF1000185, OCBBF1000188, OCBBF1000192, OCBBF1000254, OCBBF1000315, OCBBF2000013, OCBBF2000015, OCBBF2000126, OCBBF2000178, OCBBF2000231, OCBBF2000277, OCBBF2000287, OCBBF2000323, OCBBF2000452, OCBBF2000467, OCBBF2000522, OCBBF2000677, OCBBF2000703, OCBBF2000712, OCBBF2000719, OCBBF2000824, OCBBF2000831, OCBBF2000904, OCBBF2000986, OCBBF2000998, OCBBF2001075, OCBBF2001101, OCBBF2001124, OCBBF2001140, OCBBF2001166, OCBBF2001176, OCBBF2001186, OCBBF2001196, OCBBF2001210,

[1903] OCBBF2001252, OCBBF2001307, OCBBF2001323, OCBBF2001389, OCBBF2001402, OCBBF2001408, OCBBF2001416, OCBBF2001473, OCBBF2001492, OCBBF2001494, OCBBF2001527, OCBBF2001528, OCBBF2001586, OCBBF2001639, OCBBF2001681, OCBBF2001687, OCBBF2001706, OCBBF2001749, OCBBF2001794, OCBBF2001910, OCBBF2001931, OCBBF2001961, OCBBF2001983, OCBBF2002015, OCBBF2002083, OCBBF2002124, OCBBF2002161, OCBBF2002290, OCBBF2002357, OCBBF2002376, OCBBF2002615, OCBBF2002626, OCBBF2002656, OCBBF2002663, OCBBF2002805, OCBBF2002865, OCBBF2002920, OCBBF2002980, OCBBF2003028, OCBBF2003052, OCBBF2003091, OCBBF2003246, OCBBF2003327, OCBBF2003543, OCBBF2003593, OCBBF2003744, OCBBF2003819, OCBBF2004038, OCBBF2004104, OCBBF2004147,

[1904] OCBBF2004168, OCBBF2004235, OCBBF2004259, OCBBF2004273, OCBBF2004385, OCBBF2004418, OCBBF2004478, OCBBF2004482, OCBBF2004533, OCBBF2004567, OCBBF2004612, OCBBF2004647, OCBBF2004669, OCBBF2004757, OCBBF2004826, OCBBF2004866, OCBBF2004883, OCBBF2004889, OCBBF2004930, OCBBF2004984, OCBBF2005066, OCBBF2005077, OCBBF2005161, OCBBF2005343, OCBBF2005349, OCBBF2005373, OCBBF2005420, OCBBF2005433, OCBBF2005476, OCBBF2005546, OCBBF2005843, OCBBF2005901, OCBBF2005956, OCBBF2006005, OCBBF2006030, OCBBF2006058, OCBBF2006113, OCBBF2006148, OCBBF2006151, OCBBF2006154, OCBBF2006172, OCBBF2006214, OCBBF2006241, OCBBF2006388, OCBBF2006438, OCBBF2006567, OCBBF2006624, OCBBF2006639, OCBBF2006660, OCBBF2006764,

[1905] OCBBF2006849, OCBBF2006859, OCBBF2006972, OCBBF2006987, OCBBF2007028, OCBBF2007039, OCBBF2007051, OCBBF2007068, OCBBF2007114, OCBBF2007121, OCBBF2007184, OCBBF2007194, OCBBF2007196, OCBBF2007224, OCBBF2007238, OCBBF2007414, OCBBF2007428, OCBBF2007478, OCBBF2007485, OCBBF2007520, OCBBF2007555, OCBBF2007610, OCBBF2007622, OCBBF2007756, OCBBF2007762, OCBBF2007829, OCBBF2007892, OCBBF2007931, OCBBF2007946, OCBBF2008005, OCBBF2008116, OCBBF2008138, OCBBF2008144, OCBBF2008283, OCBBF2008330, OCBBF2008340, OCBBF2008366, OCBBF2008466, OCBBF2008483, OCBBF2008511, OCBBF2008520, OCBBF2008569, OCBBF2008586, OCBBF2008640, OCBBF2008691, OCBBF2008701, OCBBF2008724, OCBBF2008760, OCBBF2008768, OCBBF2008770,

[1906] OCBBF2008775, OCBBF2008790, OCBBF2008814, OCBBF2008822, OCBBF2009095, OCBBF2009115, OCBBF2009301, OCBBF2009352, OCBBF2009391, OCBBF2009424, OCBBF2009536, OCBBF2009571, OCBBF2009583, OCBBF2009603, OCBBF2009772, OCBBF2009788, OCBBF2009836, OCBBF2009920, OCBBF2009926, OCBBF2010040, OCBBF2010140, OCBBF2010281, OCBBF2010313, OCBBF2010404, OCBBF2010416, OCBBF2010420, OCBBF2010557, OCBBF2010604, OCBBF2010709, OCBBF2010792, OCBBF2010819, OCBBF2010841, OCBBF2010843, OCBBF2010858, OCBBF2010863, OCBBF2010871, OCBBF2010931, OCBBF2010945, OCBBF2010978, OCBBF2010989, OCBBF2011021, OCBBF2011073, OCBBF2011137, OCBBF2011160, OCBBF2011177, OCBBF2011228, OCBBF2011232, OCBBF2011283, OCBBF2011311, OCBBF2011536,

[1907] OCBBF2011625, OCBBF2011669, OCBBF2011685, OCBBF2011706, OCBBF2011722, OCBBF2011759, OCBBF2011767, OCBBF2011855, OCBBF2011872, OCBBF2011887, OCBBF2011897, OCBBF2011914, OCBBF2011960, OCBBF2011981, OCBBF2012001, OCBBF2012028, OCBBF2012039, OCBBF2012095, OCBBF2012139, OCBBF2012191, OCBBF2012262, OCBBF2012320, OCBBF2012436, OCBBF2012525, OCBBF2012553, OCBBF2012678, OCBBF2012704, OCBBF2012714, OCBBF2012755, OCBBF2012812, OCBBF2012881, OCBBF2012908, OCBBF2012936, OCBBF2012990, OCBBF2013011, OCBBF2013049, OCBBF2013091, OCBBF2013123, OCBBF2013127, OCBBF2013149, OCBBF2013208, OCBBF2013285, OCBBF2013319, OCBBF2013324, OCBBF2013481, OCBBF2013507, OCBBF2013721, OCBBF2013789, OCBBF2013843, OCBBF2013883,

[1908] OCBBF2013926, OCBBF2014052, OCBBF2014064, OCBBF2014089, OCBBF2014292, OCBBF2014322, OCBBF2014386, OCBBF2014541, OCBBF2014576, OCBBF2014707, OCBBF2014745, OCBBF2014828, OCBBF2014873, OCBBF2014880, OCBBF2014928, OCBBF2015031, OCBBF2015081, OCBBF2015115, OCBBF2015232, OCBBF2015233, OCBBF2015285, OCBBF2015334, OCBBF2015335, OCBBF2015503, OCBBF2015506, OCBBF2015599, OCBBF2015645, OCBBF2015659, OCBBF2015797, OCBBF2015931, OCBBF2015980, OCBBF2016038, OCBBF2016405, OCBBF2016467, OCBBF2016590, OCBBF2016591, OCBBF2016612, OCBBF2016689, OCBBF2016690, OCBBF2016729, OCBBF2016841, OCBBF2016928, OCBBF2017035, OCBBF2017055, OCBBF2017069, OCBBF2017306, OCBBF2017325, OCBBF2017398, OCBBF2017458, OCBBF2017489,

[1909] OCBBF2017516, OCBBF2017665, OCBBF2017754, OCBBF2017791, OCBBF2017815, OCBBF2017882, OCBBF2017888, OCBBF2017893, OCBBF2017920, OCBBF2018012, OCBBF2018014, OCBBF2018084, OCBBF2018167, OCBBF2018206, OCBBF2018229, OCBBF2018234, OCBBF2018362, OCBBF2018380, OCBBF2018563, OCBBF2018581, OCBBF2018618, OCBBF2018663, OCBBF2018687, OCBBF2018707, OCBBF2018827, OCBBF2018828, OCBBF2018873, OCBBF2018934, OCBBF2018956, OCBBF2019108, OCBBF2019195, OCBBF2019327, OCBBF2019684, OCBBF2019761, OCBBF2019823, OCBBF2019950, OCBBF2020048, OCBBF2020318, OCBBF2020343, OCBBF2020453, OCBBF2020741, OCBBF2020801, OCBBF2020825, OCBBF2020838, OCBBF2021020, OCBBF2021214, OCBBF2021286, OCBBF2021323, OCBBF2021518, OCBBF2021788,

[1910] OCBBF2021833, OCBBF2022351, OCBBF2022573, OCBBF2022574, OCBBF2023162, OCBBF2023598, OCBBF2023643, OCBBF2024463, OCBBF2024589, OCBBF2024719, OCBBF2024779, OCBBF2024781, OCBBF2024850, OCBBF2025028, OCBBF2025115, OCBBF2025198, OCBBF2025451, OCBBF2025458, OCBBF2025527, OCBBF2025631, OCBBF2025730, OCBBF2026025, OCBBF2026035, OCBBF2026144, OCBBF2026368, OCBBF2026645, OCBBF2026649, OCBBF2026690, OCBBF2026981, OCBBF2027148, OCBBF2027197, OCBBF2027354, OCBBF2027423, OCBBF2027478, OCBBF2027481, OCBBF2027511, OCBBF2027661, OCBBF2027728, OCBBF2027782, OCBBF2027868, OCBBF2028055, OCBBF2028173, OCBBF2028421, OCBBF2029471, OCBBF2029901, OCBBF2030116, OCBBF2030329, OCBBF2030354, OCBBF2030517, OCBBF2030574,

[1911] OCBBF2030708, OCBBF2030927, OCBBF2030963, OCBBF2031167, OCBBF2031198, OCBBF2031366, OCBBF2031561, OCBBF2032152, OCBBF2032274, OCBBF2032539, OCBBF2032590, OCBBF2032599, OCBBF2032611, OCBBF2032671, OCBBF2033295, OCBBF2033413, OCBBF2033869, OCBBF2033948, OCBBF2034333, OCBBF2034529, OCBBF2034637, OCBBF2034906, OCBBF2035110, OCBBF2035214, OCBBF2035226, OCBBF2035390, OCBBF2035564, OCBBF2035658, OCBBF2035823, OCBBF2035885, OCBBF2035916, OCBBF2036019, OCBBF2036031, OCBBF2036225, OCBBF2036476, OCBBF2036743, OCBBF2036752, OCBBF2037068, OCBBF2037340, OCBBF2037398, OCBBF2037464, OCBBF2037547, OCBBF2037598, OCBBF2037638, OCBBF2038238, OCBBF2038285, OCBBF2038317, OCBBF3000097, OCBBF3000213, OCBBF3000296,

[1912] OCBBF3000323, OCBBF3000372, OCBBF3000380, OCBBF3000743, OCBBF3000830, OCBBF3001076, OCBBF3001202, OCBBF3001333, OCBBF3001616, OCBBF3002553, OCBBF3002600, OCBBF3002654, OCBBF3003103, OCBBF3003209, OCBBF3003592, OCBBF3003745, OCBBF3003761, OCBBF3004264, OCBBF3004314, OCBBF3004487, OCBBF3004972, OCBBF3005330, OCBBF3005597, OCBBF3005843, OCBBF3006802, OCBBF3006986, OCBBF3007078, OCBBF3007704, OCBBF3008230, OCBBF3008392, OCBBF3008835, OCBBF3009192, OCBBF3009244, OCBBF3009279, PANCR1000012, PANCR1000021, PANCR1000086, PANCR1000091, PANCR1000185, PEBLM1000024, PEBLM1000029, PEBLM1000034, PEBLM1000062, PEBLM1000066, PEBLM1000068, PEBLM1000071, PEBLM1000083, PEBLM1000144, PEBLM1000147, PEBLM1000174,

[1913] PEBLM1000180, PEBLM2000030, PEBLM2000112, PEBLM2000126, PEBLM2000147, PEBLM2000170, PEBLM2000180, PEBLM2000213, PEBLM2000222, PEBLM2000248, PEBLM2000267, PEBLM2000270, PEBLM2000308, PEBLM2000321, PEBLM2000326, PEBLM2000333, PEBLM2000338, PEBLM2000479, PEBLM2000502, PEBLM2001072, PEBLM2001312, PEBLM2001465, PEBLM2001488, PEBLM2001803, PEBLM2002432, PEBLM2002455, PEBLM2002594, PEBLM2002749, PEBLM2002887, PEBLM2003426, PEBLM2003765, PEBLM2003914, PEBLM2003935, PEBLM2004015, PEBLM2004216, PEBLM2004290, PEBLM2004452, PEBLM2004497, PEBLM2004666, PEBLM2004733, PEBLM2005282, PEBLM2005615, PEBLM2005632, PEBLM2005697, PEBLM2006031, PEBLM2006036, PEBLM2006049, PEBLM2006113, PEBLM2006135, PEBLM2006215,

[1914] PEBLM2006283, PEBLM2006298, PEBLM2006366, PEBLM2006709, PEBLM2006912, PEBLM2007112, PEBLM2007140, PEBLM2007188, PEBLM2007296, PEBLM2007437, PEBLM2007447, PEBLM2007598, PEBLM2007774, PEBLM2007832, PEBLM2007834, PEBLM2008106, PEBLM2008576, PEBLM2008605, PEBLM2008826, PERIC1000025, PERIC1000147, PERIC2000180, PERIC2000214, PERIC2000386, PERIC2000387, PERIC2000422, PERIC2000473, PERIC2000478, PERIC2000889, PERIC2000914, PERIC2001227, PERIC2001228, PERIC2001379, PERIC2001504, PERIC2001703, PERIC2001764, PERIC2002243, PERIC2002272, PERIC2002452, PERIC2002766, PERIC2003001, PERIC2003090, PERIC2003287, PERIC2003349, PERIC2003452, PERIC2003699, PERIC2003720, PERIC2003794, PERIC2003834, PERIC2003919,

[1915] PERIC2003957, PERIC2004028, PERIC2004131, PERIC2004259, PERIC2004379, PERIC2004429, PERIC2004510, PERIC2004613, PERIC2004909, PERIC2005111, PERIC2005117, PERIC2005305, PERIC2005347, PERIC2005370, PERIC2005936, PERIC2006035, PERIC2006121, PERIC2006443, PERIC2006945, PERIC2006960, PERIC2007068, PERIC2007439, PERIC2007914, PERIC2008008, PERIC2008385, PERIC2009001, PERIC2009086, PERIC2009329, PERIC2009566, PLACE5000001, PLACE5000013, PLACE5000037, PLACE5000058, PLACE5000066, PLACE5000067, PLACE5000068, PLACE5000070, PLACE5000080, PLACE5000105, PLACE5000113, PLACE5000115, PLACE5000116, PLACE5000129, PLACE5000139, PLACE5000153, PLACE5000159, PLACE5000170, PLACE5000171, PLACE5000172, PLACE5000178,

[1916] PLACE5000245, PLACE5000260, PLACE5000282, PLACE5000297, PLACE5000372, PLACE5000492, PLACE5000522, PLACE5000527, PLACE6000012, PLACE6000044, PLACE6000055, PLACE6000070, PLACE6000137, PLACE6000145, PLACE6000191, PLACE6000205, PLACE6000231, PLACE6000263, PLACE6000296, PLACE6000314, PLACE6000325, PLACE6000348, PLACE6000371, PLACE6000379, PLACE6000414, PLACE6000424, PLACE6000426, PLACE6000429, PLACE6000450, PLACE6000463, PLACE6000523, PLACE6000550, PLACE6000552, PLACE6000555, PLACE6000619, PLACE6000953, PLACE6001064, PLACE6001118, PLACE6001153, PLACE6001185, PLACE6001281, PLACE6001294, PLACE6001443, PLACE6001536, PLACE6001557, PLACE6001712, PLACE6001740, PLACE6001823, PLACE6001886, PLACE6001923,

[1917] PLACE6001925, PLACE6001933, PLACE6002011, PLACE6002016, PLACE6002056, PLACE6002084, PLACE6002102, PLACE6002157, PLACE6002312, PLACE6002323, PLACE6002345, PLACE6002419, PLACE6002462, PLACE6002647, PLACE6002668, PLACE6002692, PLACE6002699, PLACE6002710, PLACE6002871, PLACE6002949, PLACE6002960, PLACE6003004, PLACE6003077, PLACE6003094, PLACE6003109, PLACE6003204, PLACE6003218, PLACE6003372, PLACE6003383, PLACE6003393, PLACE6003399, PLACE6003539, PLACE6003621, PLACE6003705, PLACE6003740, PLACE6003745, PLACE6003771, PLACE6003796, PLACE6003839, PLACE6003850, PLACE6004005, PLACE6004101, PLACE6004219, PLACE6004336, PLACE6004368, PLACE6004380, PLACE6004396, PLACE6004397, PLACE6004454, PLACE6004464,

[1918] PLACE6004491, PLACE6004578, PLACE6004663, PLACE6004687, PLACE6004738, PLACE6004931, PLACE6004966, PLACE6004993, PLACE6005007, PLACE6005029, PLACE6005108, PLACE6005231, PLACE6005234, PLACE6005283, PLACE6005294, PLACE6005328, PLACE6005351, PLACE6005423, PLACE6005482, PLACE6005535, PLACE6005546, PLACE6005559, PLACE6005579, PLACE6005691, PLACE6005786, PLACE6006042, PLACE6006077, PLACE6006137, PLACE6006158, PLACE6006186, PLACE6006217, PLACE6006222, PLACE6006266, PLACE6006287, PLACE6006394, PLACE6006418, PLACE6006474, PLACE6006549, PLACE6006566, PLACE6006697, PLACE6006822, PLACE6006871, PLACE6006905, PLACE6006988, PLACE6007050, PLACE6007180, PLACE6007239, PLACE6007242, PLACE6007309, PLACE6007373,

[1919] PLACE6007380, PLACE6007433, PLACE6007436, PLACE6007482, PLACE6007687, PLACE6007787, PLACE6007798, PLACE6007807, PLACE6007925, PLACE6008036, PLACE6008094, PLACE6008126, PLACE6008285, PLACE6008444, PLACE6008453, PLACE6008640, PLACE6008750, PLACE6008768, PLACE6008775, PLACE6008793, PLACE6008824, PLACE6008989, PLACE6009006, PLACE6009008, PLACE6009228, PLACE6009237, PLACE6009338, PLACE6009419, PLACE6009430, PLACE6009482, PLACE6009524, PLACE6009527, PLACE6009560, PLACE6009590, PLACE6009821, PLACE6009835, PLACE6009853, PLACE6010077, PLACE6010463, PLACE6010484, PLACE6010485, PLACE6010568, PLACE6010701, PLACE6010704, PLACE6010732, PLACE6010765, PLACE6010848, PLACE6010925, PLACE6010936, PLACE6010991,

[1920] PLACE6011041, PLACE6011057, PLACE6011102, PLACE6011156, PLACE6011211, PLACE6011260, PLACE6011334, PLACE6011627, PLACE6011774, PLACE6011881, PLACE6011907, PLACE6011970, PLACE6011975, PLACE6012028, PLACE6012108, PLACE6012168, PLACE6012297, PLACE6012308, PLACE6012908, PLACE6012936, PLACE6012942, PLACE6013222, PLACE6013232, PLACE6013288, PLACE6013386, PLACE6013400, PLACE6013650, PLACE6013672, PLACE6013883, PLACE6013884, PLACE6013885, PLACE6014043, PLACE6014064, PLACE6014516, PLACE6014882, PLACE6015051, PLACE6015211, PLACE6015322, PLACE6015445, PLACE6015460, PLACE6015513, PLACE6015591, PLACE6015729, PLACE6015731, PLACE6015939, PLACE6016030, PLACE6016093, PLACE6016105, PLACE6016160, PLACE6016210,

[1921] PLACE6016254, PLACE6016383, PLACE6016942, PLACE6016984, PLACE6017002, PLACE6017431, PLACE6017564, PLACE6017578, PLACE6017626, PLACE6017701, PLACE6017714, PLACE6017788, PLACE6017791, PLACE6018031, PLACE6018107, PLACE6018187, PLACE6018235, PLACE6018287, PLACE6018441, PLACE6018487, PLACE6018497, PLACE6018769, PLACE6018834, PLACE6018843, PLACE6018863, PLACE6018938, PLACE6019195, PLACE6019385, PLACE6019542, PLACE6019600, PLACE6019674, PLACE6019676, PLACE6019701, PLACE6020031, PLACE6020145, PLACE7000167, PLACE7000170, PLACE7000266, PLACE7000333, PLACE7000410, PLACE7000502, PLACE7000707, PLACE7001022, PLACE7001544, PLACE7001759, PLACE7001936, PLACE7002303, PLACE7002641, PLACE7003639, PLACE7003657,

[1922] PLACE7003684, PLACE7003985, PLACE7004103, PLACE7004961, PLACE7005169, PLACE7005671, PLACE7005840, PLACE7006051, PLACE7006090, PLACE7006240, PLACE7006268, PLACE7006275, PLACE7006498, PLACE7006540, PLACE7007379, PLACE7007644, PLACE7007973, PLACE7008136, PLACE7008261, PLACE7008431, PLACE7008623, PLACE7008766, PLACE7009563, PROST1000033, PROST1000039, PROST1000065, PROST1000083, PROST1000085, PROST1000097, PROST1000110, PROST1000120, PROST1000123, PROST1000136, PROST1000144, PROST1000145, PROST1000152, PROST1000167, PROST1000184, PROST1000199, PROST1000215, PROST1000217, PROST1000220, PROST1000226, PROST1000246, PROST1000262, PROST1000272, PROST1000298, PROST1000322, PROST1000334, PROST1000343,

[1923] PROST1000362, PROST1000377, PROST1000383, PROST1000412, PROST1000419, PROST1000451, PROST1000480, PROST1000485, PROST1000493, PROST1000512, PROST1000526, PROST1000527, PROST1000528, PROST1000536, PROST1000559, PROST1000564, PROST1000575, PROST2000036, PROST2000053, PROST2000067, PROST2000105, PROST2000143, PROST2000162, PROST2000165, PROST2000176, PROST2000203, PROST2000206, PROST2000212, PROST2000241, PROST2000267, PROST2000273, PROST2000274, PROST2000277, PROST2000284, PROST2000325, PROST2000337, PROST2000432, PROST2000452, PROST2000463, PROST2000470, PROST2000505, PROST2000567, PROST2000572, PROST2000717, PROST2000760, PROST2000761, PROST2000835, PROST2000893, PROST2000961, PROST2001002,

[1924] PROST2001116, PROST2001138, PROST2001180, PROST2001213, PROST2001283, PROST2001414, PROST2001415, PROST2001465, PROST2001521, PROST2001540, PROST2001552, PROST2001599, PROST2001611, PROST2001636, PROST2001739, PROST2001796, PROST2001805, PROST2001823, PROST2001883, PROST2001899, PROST2001997, PROST2001998, PROST2002078, PROST2002101, PROST2002212, PROST2002227, PROST2002338, PROST2002425, PROST2002488, PROST2002489, PROST2002527, PROST2002591, PROST2002602, PROST2002633, PROST2002651, PROST2002682, PROST2002685, PROST2002722, PROST2002736, PROST2002842, PROST2002897, PROST2002906, PROST2002927, PROST2002960, PROST2003102, PROST2003117, PROST2003210, PROST2003232, PROST2003302, PROST2003303,

[1925] PROST2003324, PROST2003338, PROST2003340, PROST2003396, PROST2003428, PROST2003472, PROST2003517, PROST2003537, PROST2003563, PROST2003577, PROST2003583, PROST2003586, PROST2003628, PROST2003635, PROST2003674, PROST2003676, PROST2003725, PROST2003732, PROST2003775, PROST2003922, PROST2003930, PROST2004095, PROST2004115, PROST2004142, PROST2004146, PROST2004161, PROST2004258, PROST2004270, PROST2004332, PROST2004416, PROST2004481, PROST2004526, PROST2004570, PROST2004727, PROST2004739, PROST2004742, PROST2004744, PROST2004817, PROST2005039, PROST2005067, PROST2005076, PROST2005093, PROST2005121, PROST2005131, PROST2005143, PROST2005228, PROST2005272, PROST2005285, PROST2005426, PROST2005466,

[1926] PROST2005604, PROST2005630, PROST2005683, PROST2005788, PROST2005793, PROST2005880, PROST2005886, PROST2005904, PROST2005919, PROST2005943, PROST2006008, PROST2006020, PROST2006030, PROST2006060, PROST2006196, PROST2006201, PROST2006260, PROST2006282, PROST2006343, PROST2006450, PROST2006491, PROST2006510, PROST2006536, PROST2006579, PROST2006688, PROST2006737, PROST2006766, PROST2006782, PROST2006933, PROST2006988, PROST2007122, PROST2007200, PROST2007237, PROST2007248, PROST2007289, PROST2007317, PROST2007328, PROST2007382, PROST2007389, PROST2007416, PROST2007528, PROST2007612, PROST2007818, PROST2007871, PROST2007950, PROST2007956, PROST2007974, PROST2007988, PROST2008079, PROST2008088,

[1927] PROST2008243, PROST2008245, PROST2008268, PROST2008271, PROST2008360, PROST2008447, PROST2008468, PROST2008472, PROST2008489, PROST2008516, PROST2008724, PROST2008770, PROST2008835, PROST2008993, PROST2009022, PROST2009208, PROST2009222, PROST2009254, PROST2009273, PROST2009320, PROST2009347, PROST2009365, PROST2009388, PROST2009400, PROST2009470, PROST2009483, PROST2009571, PROST2009731, PROST2009736, PROST2009795, PROST2009901, PROST2009909, PROST2010046, PROST2010219, PROST2010250, PROST2010318, PROST2010326, PROST2010382, PROST2010400, PROST2010545, PROST2010579, PROST2010606, PROST2010782, PROST2010885, PROST2011012, PROST2011038, PROST2011105, PROST2011297, PROST2011410, PROST2011439,

[1928] PROST2011482, PROST2011577, PROST2011631, PROST2011660, PROST2012005, PROST2012007, PROST2012016, PROST2012088, PROST2012140, PROST2012157, PROST2012190, PROST2012249, PROST2012353, PROST2012400, PROST2012448, PROST2012504, PROST2012542, PROST2012550, PROST2012740, PROST2012745, PROST2012780, PROST2012888, PROST2012890, PROST2013032, PROST2013053, PROST2013121, PROST2013260, PROST2013327, PROST2013531, PROST2013605, PROST2013627, PROST2013873, PROST2013880, PROST2014422, PROST2014585, PROST2014601, PROST2014659, PROST2014862, PROST2014916, PROST2014925, PROST2015124, PROST2015137, PROST2015198, PROST2015243, PROST2015246, PROST2015251, PROST2015287, PROST2015332, PROST2015457, PROST2015464,

[1929] PROST2015537, PROST2015545, PROST2015551, PROST2015636, PROST2015710, PROST2015756, PROST2015877, PROST2015900, PROST2015924, PROST2015932, PROST2016246, PROST2016351, PROST2016379, PROST2016444, PROST2016462, PROST2016499, PROST2016512, PROST2016566, PROST2016582, PROST2016668, PROST2016684, PROST2016777, PROST2016829, PROST2016860, PROST2016918, PROST2016980, PROST2017098, PROST2017128, PROST2017203, PROST2017367, PROST2017413, PROST2017441, PROST2017529, PROST2017578, PROST2017612, PROST2017617, PROST2017692, PROST2017700, PROST2017701, PROST2017729, PROST2017836, PROST2017910, PROST2017972, PROST2018030, PROST2018090, PROST2018235, PROST2018437, PROST2018487, PROST2018511, PROST2018583,

[1930] PROST2018588, PROST2018607, PROST2018788, PROST2018902, PROST2018922, PROST2018977, PROST2019164, PROST2019253, PROST2019296, PROST2019398, PROST2019487, PROST2019781, PUAEN1000039, PUAEN1000057, PUAEN1000065, PUAEN1000081, PUAEN1000085, PUAEN1000087, PUAEN1000121, PUAEN1000147, PUAEN1000161, PUAEN1000164, PUAEN1000175, PUAEN1000239, PUAEN1000275, PUAEN1000276, PUAEN1000288, PUAEN2000080, PUAEN2000152, PUAEN2000175, PUAEN2000247, PUAEN2000312, PUAEN2000394, PUAEN2000497, PUAEN2000535, PUAEN2000594, PUAEN2000684, PUAEN2000942, PUAEN2001260, PUAEN2001345, PUAEN2001526, PUAEN2001586, PUAEN2001882, PUAEN2002473, PUAEN2002489, PUAEN2002552, PUAEN2002568, PUAEN2002616, PUAEN2002758, PUAEN2003018,

[1931] PUAEN2003079, PUAEN2003116, PUAEN2003408, PUAEN2003517, PUAEN2003954, PUAEN2004067, PUAEN2004083, PUAEN2004400, PUAEN2004511, PUAEN2004525, PUAEN2004875, PUAEN2005110, PUAEN2005247, PUAEN2005502, PUAEN2005588, PUAEN2005930, PUAEN2006029, PUAEN2006328, PUAEN2006335, PUAEN2006578, PUAEN2006639, PUAEN2006761, PUAEN2007044, PUAEN2007350, PUAEN2007785, PUAEN2007898, PUAEN2008123, PUAEN2008228, PUAEN2008314, PUAEN2008515, PUAEN2008815, PUAEN2008939, PUAEN2008980, PUAEN2008985, PUAEN2009174, PUAEN2009348, PUAEN2009534, PUAEN2009655, PUAEN2009795, PUAEN2009852, PUAEN2010346, PUAEN2010824, RECTM1000051, RECTM1000141, RECTM2000220, RECTM2000349, RECTM2000433, RECTM2000510, RECTM2001307, RECTM2001347,

[1932] RECTM2001519, RECTM2001666, RECTM2001691, RECTM2001749, RECTM2002172, RECTM2002602, RECTM2002632, SALGL1000005, SALGL1000028, SALGL1000047, SALGL1000065, SALGL1000107, SALGL1000171, SKMUS1000014, SKMUS1000022, SKMUS1000030, SKMUS1000064, SKMUS1000067, SKMUS1000084, SKMUS1000102, SKMUS1000104, SKMUS1000110, SKMUS1000118, SKMUS1000124, SKMUS1000129, SKMUS1000138, SKMUS1000176, SKMUS1000177, SKMUS2000020, SKMUS2000061, SKMUS2000074, SKMUS2000078, SKMUS2000117, SKMUS2000137, SKMUS2000198, SKMUS2000243, SKMUS2000271, SKMUS2000287, SKMUS2000317, SKMUS2000330, SKMUS2000339, SKMUS2000343, SKMUS2000361, SKMUS2000365, SKMUS2000380, SKMUS2000390, SKMUS2000416, SKMUS2000458, SKMUS2000467, SKMUS2000468,

[1933] SKMUS2000484, SKMUS2000515, SKMUS2000679, SKMUS2000690, SKMUS2000701, SKMUS2000705, SKMUS2000710, SKMUS2000724, SKMUS2000726, SKMUS2000757, SKMUS2000774, SKMUS2000780, SKMUS2000821, SKMUS2000847, SKMUS2000863, SKMUS2000873, SKMUS2000894, SKMUS2000898, SKMUS2000902, SKMUS2000931, SKMUS2000933, SKMUS2000945, SKMUS2000954, SKMUS2000961, SKMUS2000973, SKMUS2000980, SKMUS2001008, SKMUS2001014, SKMUS2001129, SKMUS2001147, SKMUS2001157, SKMUS2001164, SKMUS2001199, SKMUS2001201, SKMUS2001215, SKMUS2001247, SKMUS2001254, SKMUS2001271, SKMUS2001287, SKMUS2001323, SKMUS2001364, SKMUS2001398, SKMUS2001402, SKMUS2001412, SKMUS2001454, SKMUS2001492, SKMUS2001501, SKMUS2001543, SKMUS2001580, SKMUS2001585,

[1934] SKMUS2001608, SKMUS2001631, SKMUS2001634, SKMUS2001662, SKMUS2001663, SKMUS2001668, SKMUS2001671, SKMUS2001683, SKMUS2001693, SKMUS2001695, SKMUS2001703, SKMUS2001740, SKMUS2001742, SKMUS2001823, SKMUS2001850, SKMUS2002077, SKMUS2002084, SKMUS2002153, SKMUS2002475, SKMUS2002602, SKMUS2002634, SKMUS2002693, SKMUS2002821, SKMUS2002840, SKMUS2002920, SKMUS2003034, SKMUS2003074, SKMUS2003168, SKMUS2003194, SKMUS2003744, SKMUS2004044, SKMUS2004047, SKMUS2004483, SKMUS2004667, SKMUS2004897, SKMUS2004903, SKMUS2004908, SKMUS2005428, SKMUS2006394, SKMUS2006481, SKMUS2006755, SKMUS2007315, SKMUS2007359, SKMUS2007568, SKMUS2007740, SKMUS2007816, SKMUS2007915, SKMUS2008338, SKMUS2008407, SKMUS2008474,

[1935] SKMUS2008585, SKMUS2008607, SKMUS2009190, SKMUS2009232, SKMUS2009479, SKMUS2009557, SKNMC1000110, SKNMC1000123, SKNMC1000124, SKNMC1000137, SKNMC1000159, SKNMC1000168, SKNMC1000229, SKNMC1000251, SKNMC1000264, SKNMC2000065, SKNMC2000097, SKNMC2000224, SKNMC2000256, SKNMC2000305, SKNMC2000356, SKNMC2000374, SKNMC2000583, SKNMC2000593, SKNMC2000612, SKNMC2000622, SKNMC2000649, SKNMC2000698, SKNMC2000877, SKNMC2000966, SKNMC2001113, SKNMC2001324, SKNMC2001503, SKNMC2001555, SKNMC2001596, SKNMC2001623, SKNMC2002402, SKNMC2003639, SKNMC2003924, SKNMC2003987, SKNMC2004457, SKNMC2004643, SKNMC2004651, SKNMC2005772, SKNMC2006173, SKNMC2006327, SKNMC2006998, SKNMC2007134, SKNMC2007502, SKNMC2007504,

[1936] SKNMC2007961, SKNMC2009450, SKNSH1000002, SKNSH1000086, SKNSH1000101, SKNSH1000174, SKNSH1000301, SKNSH1000308, SKNSH1000416, SKNSH2000051, SKNSH2000101, SKNSH2000151, SKNSH2000163, SKNSH2000250, SKNSH2000319, SKNSH2000347, SKNSH2000482, SKNSH2000516, SKNSH2000550, SKNSH2000716, SKNSH2000819, SKNSH2000971, SKNSH2001222, SKNSH2001875, SKNSH2001931, SKNSH2002054, SKNSH2002325, SKNSH2002768, SKNSH2002866, SKNSH2003064, SKNSH2003174, SKNSH2003422, SKNSH2003466, SKNSH2003483, SKNSH2003528, SKNSH2003633, SKNSH2004039, SKNSH2005061, SKNSH2005120, SKNSH2005194, SKNSH2005240, SKNSH2005792, SKNSH2005816, SKNSH2005981, SKNSH2006234, SKNSH2006304, SKNSH2006432, SKNSH2006822, SKNSH2007142, SKNSH2007149,

[1937] SKNSH2007429, SKNSH2007739, SKNSH2008043, SKNSH2008940, SKNSH2008969, SKNSH2009197, SKNSH2009357, SKNSH2009435, SKNSH2009991, SKNSH2010015, SMINT1000012, SMINT1000016, SMINT1000039, SMINT1000042, SMINT1000048, SMINT1000051, SMINT1000054, SMINT1000057, SMINT1000071, SMINT1000075, SMINT1000078, SMINT1000091, SMINT1000100, SMINT1000103, SMINT1000117, SMINT1000118, SMINT1000137, SMINT1000192, SMINT2000007, SMINT2000018, SMINT2000032, SMINT2000040, SMINT2000060, SMINT2000073, SMINT2000084, SMINT2000145, SMINT2000159, SMINT2000176, SMINT2000185, SMINT2000227, SMINT2000229, SMINT2000232, SMINT2000239, SMINT2000267, SMINT2000277, SMINT2000396, SMINT2000400, SMINT2000441, SMINT2000454, SMINT2000468,

[1938] SMINT2000518, SMINT2000529, SMINT2000530, SMINT2000537, SMINT2000538, SMINT2000541, SMINT2000558, SMINT2000562, SMINT2000568, SMINT2000602, SMINT2000609, SMINT2000629, SMINT2000659, SMINT2000694, SMINT2000747, SMINT2000811, SMINT2000824, SMINT2000984, SMINT2001114, SMINT2001158, SMINT2001183, SMINT2001222, SMINT2001348, SMINT2001397, SMINT2001458, SMINT2001461, SMINT2001535, SMINT2001559, SMINT2001609, SMINT2001615, SMINT2001683, SMINT2001731, SMINT2001812, SMINT2001950, SMINT2002126, SMINT2002159, SMINT2002202, SMINT2002210, SMINT2002224, SMINT2002281, SMINT2002311, SMINT2002314, SMINT2002328, SMINT2002414, SMINT2002457, SMINT2002620, SMINT2002689, SMINT2002743, SMINT2002778, SMINT2002880,

[1939] SMINT2002882, SMINT2002899, SMINT2002974, SMINT2002976, SMINT2003003, SMINT2003074, SMINT2003128, SMINT2003150, SMINT2003169, SMINT2003317, SMINT2003340, SMINT2003386, SMINT2003423, SMINT2003551, SMINT2003569, SMINT2003641, SMINT2003644, SMINT2003866, SMINT2004037, SMINT2004047, SMINT2004086, SMINT2004144, SMINT2004280, SMINT2004299, SMINT2004339, SMINT2004350, SMINT2004414, SMINT2004473, SMINT2004547, SMINT2004589, SMINT2004729, SMINT2004781, SMINT2004872, SMINT2004891, SMINT2004909, SMINT2004972, SMINT2004992, SMINT2005075, SMINT2005161, SMINT2005174, SMINT2005213, SMINT2005330, SMINT2005368, SMINT2005387, SMINT2005402, SMINT2005405, SMINT2005621, SMINT2005623, SMINT2005624, SMINT2005800,

[1940] SMINT2005956, SMINT2006078, SMINT2006205, SMINT2006331, SMINT2006596, SMINT2006641, SMINT2006648, SMINT2006708, SMINT2006716, SMINT2006801, SMINT2007062, SMINT2007101, SMINT2007140, SMINT2007187, SMINT2007219, SMINT2007294, SMINT2007365, SMINT2007391, SMINT2007433, SMINT2007508, SMINT2007526, SMINT2007579, SMINT2007647, SMINT2007729, SMINT2007790, SMINT2007792, SMINT2007796, SMINT2007867, SMINT2007932, SMINT2008042, SMINT2008054, SMINT2008133, SMINT2008277, SMINT2008329, SMINT2008455, SMINT2008491, SMINT2008531, SMINT2008545, SMINT2008558, SMINT2008590, SMINT2008625, SMINT2008672, SMINT2008690, SMINT2008715, SMINT2008720, SMINT2008817, SMINT2008844, SMINT2008869, SMINT2008917, SMINT2008921,

[1941] SMINT2009119, SMINT2009121, SMINT2009212, SMINT2009216, SMINT2009233, SMINT2009259, SMINT2009272, SMINT2009292, SMINT2009363, SMINT2009415, SMINT2009468, SMINT2009505, SMINT2009529, SMINT2009832, SMINT2009895, SMINT2009902, SMINT2009973, SMINT2010015, SMINT2010068, SMINT2010076, SMINT2010084, SMINT2010144, SMINT2010200, SMINT2010278, SMINT2010324, SMINT2010326, SMINT2010369, SMINT2010426, SMINT2010500, SMINT2010533, SMINT2010629, SMINT2010639, SMINT2010672, SMINT2010753, SMINT2010853, SMINT2010897, SMINT2010901, SMINT2010959, SMINT2010997, SMINT2011033, SMINT2011066, SMINT2011273, SMINT2011311, SMINT2011406, SMINT2011509, SMINT2011567, SMINT2011588, SMINT2011656, SMINT2011888, SMINT2011958,

[1942] SMINT2012040, SMINT2012122, SMINT2012179, SMINT2012195, SMINT2012285, SMINT2012291, SMINT2012501, SMINT2012734, SMINT2012793, SMINT2013031, SMINT2013032, SMINT2013129, SMINT2013170, SMINT2013181, SMINT2013228, SMINT2013613, SMINT2013626, SMINT2013695, SMINT2013833, SMINT2013890, SMINT2014166, SMINT2014282, SMINT2014443, SMINT2014489, SMINT2014721, SMINT2015006, SMINT2015294, SMINT2015326, SMINT2015353, SMINT2015454, SMINT2015518, SMINT2015745, SMINT2015787, SMINT2015810, SMINT2016122, SMINT2016146, SMINT2016286, SMINT2016313, SMINT2016396, SMINT2016412, SMINT2016440, SMINT2016477, SMINT2016544, SMINT2016857, SMINT2017134, SMINT2017319, SMINT2017324, SMINT2017410, SMINT2017431, SMINT2017432,

[1943] SMINT2017436, SMINT2017599, SMINT2017659, SMINT2017736, SMINT2017781, SMINT2017855, SMINT2017884, SMINT2017964, SMINT2017974, SMINT2018343, SMINT2018353, SMINT2018592, SMINT2018681, SMINT2019017, SMINT2019105, SMINT2019142, SMINT2019153, SMINT2019200, SPLEN1000013, SPLEN1000041, SPLEN1000049, SPLEN1000056, SPLEN1000087, SPLEN1000091, SPLEN1000106, SPLEN1000134, SPLEN1000139, SPLEN1000143, SPLEN1000144, SPLEN1000145, SPLEN1000156, SPLEN1000163, SPLEN1000165, SPLEN1000166, SPLEN1000178, SPLEN2000020, SPLEN2000047, SPLEN2000064, SPLEN2000072, SPLEN2000098, SPLEN2000126, SPLEN2000134, SPLEN2000143, SPLEN2000189, SPLEN2000197, SPLEN2000205, SPLEN2000210, SPLEN2000222, SPLEN2000242, SPLEN2000243,

[1944] SPLEN2000247, SPLEN2000255, SPLEN2000258, SPLEN2000267, SPLEN2000270, SPLEN2000307, SPLEN2000310, SPLEN2000341, SPLEN2000348, SPLEN2000350, SPLEN2000357, SPLEN2000364, SPLEN2000402, SPLEN2000414, SPLEN2000420, SPLEN2000443, SPLEN2000448, SPLEN2000450, SPLEN2000464, SPLEN2000496, SPLEN2000515, SPLEN2000516, SPLEN2000537, SPLEN2000541, SPLEN2000607, SPLEN2000630, SPLEN2000695, SPLEN2000839, SPLEN2001135, SPLEN2001157, SPLEN2001176, SPLEN2001227, SPLEN2001245, SPLEN2001278, SPLEN2001354, SPLEN2001367, SPLEN2001383, SPLEN2001476, SPLEN2001510, SPLEN2001599, SPLEN2001626, SPLEN2001650, SPLEN2001689, SPLEN2001710, SPLEN2001761, SPLEN2001781, SPLEN2001881, SPLEN2001912, SPLEN2001945, SPLEN2002007,

[1945] SPLEN2002053, SPLEN2002133, SPLEN2002147, SPLEN2002166, SPLEN2002175, SPLEN2002223, SPLEN2002272, SPLEN2002314, SPLEN2002335, SPLEN2002343, SPLEN2002354, SPLEN2002385, SPLEN2002419, SPLEN2002451, SPLEN2002462, SPLEN2002463, SPLEN2002477, SPLEN2002493, SPLEN2002662, SPLEN2002695, SPLEN2002707, SPLEN2002744, SPLEN2002917, SPLEN2002931, SPLEN2002957, SPLEN2003160, SPLEN2003204, SPLEN2003219, SPLEN2003297, SPLEN2003396, SPLEN2003678, SPLEN2003878, SPLEN2003918, SPLEN2003924, SPLEN2004060, SPLEN2004078, SPLEN2004124, SPLEN2004148, SPLEN2004220, SPLEN2004343, SPLEN2004346, SPLEN2004368, SPLEN2004555, SPLEN2004611, SPLEN2004662, SPLEN2004773, SPLEN2004844, SPLEN2004880, SPLEN2005009, SPLEN2005227,

[1946] SPLEN2005272, SPLEN2005416, SPLEN2005429, SPLEN2005450, SPLEN2005474, SPLEN2005560, SPLEN2005727, SPLEN2005783, SPLEN2005790, SPLEN2005818, SPLEN2005838, SPLEN2005869, SPLEN2005927, SPLEN2005939, SPLEN2006133, SPLEN2006143, SPLEN2006232, SPLEN2006268, SPLEN2006283, SPLEN2006305, SPLEN2006325, SPLEN2006374, SPLEN2006389, SPLEN2006425, SPLEN2006671, SPLEN2006701, SPLEN2006785, SPLEN2006875, SPLEN2007182, SPLEN2007314, SPLEN2007326, SPLEN2007350, SPLEN2007388, SPLEN2007498, SPLEN2007619, SPLEN2007653, SPLEN2007689, SPLEN2007695, SPLEN2007739, SPLEN2007750, SPLEN2007794, SPLEN2007879, SPLEN2007926, SPLEN2007951, SPLEN2008007, SPLEN2008135, SPLEN2008164, SPLEN2008317, SPLEN2008460, SPLEN2008496,

[1947] SPLEN2008591, SPLEN2008786, SPLEN2009081, SPLEN2009088, SPLEN2009163, SPLEN2009315, SPLEN2009340, SPLEN2009512, SPLEN2009513, SPLEN2009541, SPLEN2009548, SPLEN2009555, SPLEN2009581, SPLEN2009733, SPLEN2009803, SPLEN2009884, SPLEN2009918, SPLEN2009970, SPLEN2010004, SPLEN2010015, SPLEN2010112, SPLEN2010119, SPLEN2010146, SPLEN2010187, SPLEN2010195, SPLEN2010350, SPLEN2010395, SPLEN2010415, SPLEN2010447, SPLEN2010469, SPLEN2010510, SPLEN2010530, SPLEN2010534, SPLEN2010588, SPLEN2010625, SPLEN2010800, SPLEN2010846, SPLEN2010847, SPLEN2010862, SPLEN2010912, SPLEN2010978, SPLEN2010986, SPLEN2011018, SPLEN2011021, SPLEN2011025, SPLEN2011086, SPLEN2011139, SPLEN2011145, SPLEN2011248, SPLEN2011252,

[1948] SPLEN2011419, SPLEN2011422, SPLEN2011672, SPLEN2011737, SPLEN2011758, SPLEN2011766, SPLEN2011805, SPLEN2011820, SPLEN2011830, SPLEN2011931, SPLEN2011981, SPLEN2012115, SPLEN2012175, SPLEN2012179, SPLEN2012185, SPLEN2012234, SPLEN2012453, SPLEN2012523, SPLEN2012524, SPLEN2012525, SPLEN2012606, SPLEN2012611, SPLEN2012619, SPLEN2012624, SPLEN2012725, SPLEN2012743, SPLEN2012756, SPLEN2012846, SPLEN2012889, SPLEN2012961, SPLEN2013108, SPLEN2013195, SPLEN2013503, SPLEN2013644, SPLEN2013648, SPLEN2013670, SPLEN2013673, SPLEN2013690, SPLEN2013714, SPLEN2013753, SPLEN2013821, SPLEN2013857, SPLEN2013860, SPLEN2013910, SPLEN2013923, SPLEN2013936, SPLEN2014041, SPLEN2014063, SPLEN2014073, SPLEN2014080,

[1949] SPLEN2014119, SPLEN2014136, SPLEN2014199, SPLEN2014210, SPLEN2014293, SPLEN2014318, SPLEN2014381, SPLEN2014452, SPLEN2014454, SPLEN2014486, SPLEN2014543, SPLEN2014572, SPLEN2014645, SPLEN2014669, SPLEN2014711, SPLEN2014739, SPLEN2014860, SPLEN2014865, SPLEN2014911, SPLEN2014919, SPLEN2014920, SPLEN2014924, SPLEN2014937, SPLEN2014946, SPLEN2015031, SPLEN2015094, SPLEN2015121, SPLEN2015129, SPLEN2015158, SPLEN2015166, SPLEN2015216, SPLEN2015258, SPLEN2015261, SPLEN2015267, SPLEN2015276, SPLEN2015310, SPLEN2015415, SPLEN2015433, SPLEN2015593, SPLEN2015674, SPLEN2015679, SPLEN2015707, SPLEN2015730, SPLEN2015746, SPLEN2015788, SPLEN2015815, SPLEN2015890, SPLEN2015891, SPLEN2015899, SPLEN2016045,

[1950] SPLEN2016053, SPLEN2016069, SPLEN2016098, SPLEN2016135, SPLEN2016139, SPLEN2016241, SPLEN2016250, SPLEN2016268, SPLEN2016304, SPLEN2016356, SPLEN2016421, SPLEN2016480, SPLEN2016531, SPLEN2016533, SPLEN2016541, SPLEN2016552, SPLEN2016554, SPLEN2016602, SPLEN2016627, SPLEN2016678, SPLEN2016743, SPLEN2016773, SPLEN2016781, SPLEN2016840, SPLEN2016863, SPLEN2016922, SPLEN2016932, SPLEN2016972, SPLEN2016973, SPLEN2017043, SPLEN2017104, SPLEN2017121, SPLEN2017147, SPLEN2017187, SPLEN2017189, SPLEN2017212, SPLEN2017318, SPLEN2017351, SPLEN2017426, SPLEN2017452, SPLEN2017538, SPLEN2017592, SPLEN2017613, SPLEN2017620, SPLEN2017643, SPLEN2017687, SPLEN2017740, SPLEN2017781, SPLEN2017999, SPLEN2018098,

[1951] SPLEN2018112, SPLEN2018157, SPLEN2018159, SPLEN2018180, SPLEN2018181, SPLEN2018280, SPLEN2018285, SPLEN2018299, SPLEN2018302, SPLEN2018364, SPLEN2018395, SPLEN2018643, SPLEN2018683, SPLEN2018732, SPLEN2018749, SPLEN2018933, SPLEN2019008, SPLEN2019043, SPLEN2019077, SPLEN2019092, SPLEN2019102, SPLEN2019131, SPLEN2019169, SPLEN2019257, SPLEN2019311, SPLEN2019323, SPLEN2019349, SPLEN2019375, SPLEN2019379, SPLEN2019405, SPLEN2019446, SPLEN2019471, SPLEN2019480, SPLEN2019505, SPLEN2019571, SPLEN2019575, SPLEN2019709, SPLEN2019774, SPLEN2019793, SPLEN2019811, SPLEN2019839, SPLEN2019956, SPLEN2019985, SPLEN2020007, SPLEN2020034, SPLEN2020153, SPLEN2020154, SPLEN2020166, SPLEN2020183, SPLEN2020223,

[1952] SPLEN2020359, SPLEN2020417, SPLEN2020427, SPLEN2020467, SPLEN2020512, SPLEN2020608, SPLEN2020777, SPLEN2020805, SPLEN2021057, SPLEN2021122, SPLEN2021157, SPLEN2021231, SPLEN2021273, SPLEN2021295, SPLEN2021298, SPLEN2021383, SPLEN2021417, SPLEN2021440, SPLEN2021458, SPLEN2021463, SPLEN2021560, SPLEN2021701, SPLEN2021795, SPLEN2021983, SPLEN2021991, SPLEN2022040, SPLEN2022162, SPLEN2022227, SPLEN2022591, SPLEN2022785, SPLEN2022920, SPLEN2023024, SPLEN2023118, SPLEN2023160, SPLEN2023423, SPLEN2023710, SPLEN2023733, SPLEN2023791, SPLEN2023977, SPLEN2024070, SPLEN2024127, SPLEN2024273, SPLEN2024383, SPLEN2024489, SPLEN2024530, SPLEN2024571, SPLEN2024577, SPLEN2024617, SPLEN2024737, SPLEN2024922,

[1953] SPLEN2024956, SPLEN2024990, SPLEN2025012, SPLEN2025017, SPLEN2025039, SPLEN2025219, SPLEN2025491, SPLEN2025626, SPLEN2025820, SPLEN2026144, SPLEN2026411, SPLEN2026765, SPLEN2027113, SPLEN2027157, SPLEN2027395, SPLEN2027488, SPLEN2027780, SPLEN2027852, SPLEN2027868, SPLEN2027995, SPLEN2028046, SPLEN2028066, SPLEN2028138, SPLEN2028365, SPLEN2028417, SPLEN2028424, SPLEN2028593, SPLEN2028844, SPLEN2028994, SPLEN2029051, SPLEN2029176, SPLEN2029295, SPLEN2029380, SPLEN2029522, SPLEN2029683, SPLEN2029727, SPLEN2029904, SPLEN2029912, SPLEN2030250, SPLEN2030335, SPLEN2030371, SPLEN2030397, SPLEN2030479, SPLEN2030495, SPLEN2030562, SPLEN2030763, SPLEN2030847, SPLEN2031004, SPLEN2031125, SPLEN2031424,

[1954] SPLEN2031547, SPLEN2031674, SPLEN2031724, SPLEN2031780, SPLEN2032036, SPLEN2032112, SPLEN2032154, SPLEN2032157, SPLEN2032321, SPLEN2032356, SPLEN2032677, SPLEN2032813, SPLEN2032924, SPLEN2033098, SPLEN2033153, SPLEN2033333, SPLEN2033490, SPLEN2033539, SPLEN2033921, SPLEN2033996, SPLEN2034021, SPLEN2034081, SPLEN2034252, SPLEN2034551, SPLEN2034601, SPLEN2034678, SPLEN2034781, SPLEN2034864, SPLEN2034934, SPLEN2035318, SPLEN2035615, SPLEN2036076, SPLEN2036103, SPLEN2036326, SPLEN2036475, SPLEN2036501, SPLEN2036579, SPLEN2036608, SPLEN2036702, SPLEN2036712, SPLEN2036821, SPLEN2036932, SPLEN2036953, SPLEN2037077, SPLEN2037194, SPLEN2037319, SPLEN2037444, SPLEN2037580, SPLEN2037630, SPLEN2037678,

[1955] SPLEN2037722, SPLEN2037891, SPLEN2038055, SPLEN2038180, SPLEN2038345, SPLEN2038407, SPLEN2038473, SPLEN2038834, SPLEN2039311, SPLEN2039379, SPLEN2039672, SPLEN2039697, SPLEN2039845, SPLEN2039936, SPLEN2040222, SPLEN2040237, SPLEN2040824, SPLEN2041304, SPLEN2041306, SPLEN2041310, SPLEN2041585, SPLEN2041645, SPLEN2041700, SPLEN2041720, SPLEN2041977, SPLEN2042051, SPLEN2042303, SPLEN2042521, SPLEN2042535, SPLEN2042598, SPLEN2042714, SPLEN2042920, STOMA1000013, STOMA1000047, STOMA1000052, STOMA1000074, STOMA1000117, STOMA1000133, STOMA1000175, STOMA1000186, STOMA1000189, STOMA1000190, STOMA1000191, STOMA2000032, STOMA2000072, STOMA2000088, STOMA2000104, STOMA2000121, STOMA2000148, STOMA2000168,

[1956] STOMA2000183, STOMA2000188, STOMA2000257, STOMA2000279, STOMA2000289, STOMA2000383, STOMA2000386, STOMA2000395, STOMA2000396, STOMA2000478, STOMA2000482, STOMA2000529, STOMA2000539, STOMA2000567, STOMA2000640, STOMA2000678, STOMA2000686, STOMA2000888, STOMA2001025, STOMA2001389, STOMA2002052, STOMA2002141, STOMA2002166, STOMA2002367, STOMA2002688, STOMA2002828, STOMA2003158, STOMA2003289, STOMA2003444, STOMA2003477, STOMA2003646, STOMA2003716, STOMA2003781, STOMA2003894, STOMA2004194, STOMA2004294, STOMA2004663, STOMA2004668, STOMA2004852, STOMA2004873, STOMA2004884, STOMA2004893, STOMA2004925, STOMA2005120, STOMA2005664, STOMA2005667, STOMA2005746, STOMA2005782, STOMA2006181, STOMA2006213,

[1957] STOMA2006229, STOMA2006325, STOMA2006330, STOMA2006398, STOMA2006447, STOMA2006780, STOMA2006904, STOMA2007269, STOMA2007680, STOMA2007745, STOMA2008050, STOMA2008361, STOMA2008546, STOMA2008614, STOMA2008638, STOMA2008838, STOMA2009250, STOMA2009253, STOMA2009256, STOMA2009289, SYNOV1000045, SYNOV1000049, SYNOV1000118, SYNOV1000124, SYNOV1000128, SYNOV1000190, SYNOV1000256, SYNOV1000374, SYNOV2000152, SYNOV2000171, SYNOV2000173, SYNOV2000177, SYNOV2000178, SYNOV2000193, SYNOV2000251, SYNOV2000279, SYNOV2000291, SYNOV2000297, SYNOV2000397, SYNOV2000426, SYNOV2000601, SYNOV2000700, SYNOV2000820, SYNOV2000824, SYNOV2000923, SYNOV2001014, SYNOV2001033, SYNOV2001035, SYNOV2001088, SYNOV2001111,

[1958] SYNOV2001144, SYNOV2001212, SYNOV2001251, SYNOV2001300, SYNOV2001356, SYNOV2001374, SYNOV2001390, SYNOV2001451, SYNOV2001457, SYNOV2001468, SYNOV2001660, SYNOV2003326, SYNOV2005216, SYNOV2005448, SYNOV2005541, SYNOV2005673, SYNOV2005817, SYNOV2005962, SYNOV2006430, SYNOV2006620, SYNOV2007758, SYNOV2007965, SYNOV2008765, SYNOV2009172, SYNOV2011233, SYNOV2012326, SYNOV2013365, SYNOV2013637, SYNOV2014157, SYNOV2014364, SYNOV2016124, SYNOV2016837, SYNOV2017055, SYNOV2017179, SYNOV2018921, SYNOV2019280, SYNOV2020085, SYNOV2020463, SYNOV2021320, SYNOV2021953, SYNOV3000184, SYNOV3000231, SYNOV3000302, SYNOV3000345, SYNOV4000249, SYNOV4000472, SYNOV4000598, SYNOV4000706, SYNOV4001153, SYNOV4001224,

[1959] SYNOV4001326, SYNOV4001342, SYNOV4001395, SYNOV4002001, SYNOV4002392, SYNOV4002875, SYNOV4002883, SYNOV4003174, SYNOV4003322, SYNOV4003681, SYNOV4003981, SYNOV4004184, SYNOV4004741, SYNOV4004823, SYNOV4004914, SYNOV4005256, SYNOV4005570, SYNOV4005739, SYNOV4005889, SYNOV4005981, SYNOV4005989, SYNOV4006256, SYNOV4006327, SYNOV4006542, SYNOV4007012, SYNOV4007215, SYNOV4007360, SYNOV4007430, SYNOV4007521, SYNOV4007553, SYNOV4007671, SYNOV4007711, SYNOV4008245, SYNOV4008336, SYNOV4009129, SYNOV4009139, SYNOV4009298, SYNOV4009575, T1ESE2000116, T1ESE2000609, T1ESE2000904, T1ESE2002665, TBAES2000004, TBAES2000059, TBAES2000116, TBAES2000255, TBAES2000315, TBAES2000352, TBAES2000932, TBAES2001171,

[1960] TBAES2001220, TBAES2001229, TBAES2001258, TBAES2001296, TBAES2001492, TBAES2001553, TBAES2001751, TBAES2003435, TBAES2003492, TBAES2003550, TBAES2003702, TBAES2003917, TBAES2004055, TBAES2004105, TBAES2004939, TBAES2005157, TBAES2005361, TBAES2005543, TBAES2006568, TBAES2006881, TBAES2007379, TBAES2007428, TBAES2007481, TBAES2007504, TBAES2007548, TBAES2007697, TBAES2007862, TBAES2007964, TBAES2008133, TBAES2009387, TCERX2000171, TCERX2000431, TCERX2000613, TCERX2000998, TCERX2002644, TCOLN1000037, TCOLN1000180, TCOLN2000139, TCOLN2000236, TCOLN2000641, TCOLN2001268, TCOLN2002047, TCOLN2002278, TESOP1000035, TESOP1000127, TESOP1000160, TESOP2000083, TESOP2000090, TESOP2000205, TESOP2000312,

[1961] TESOP2000390, TESOP2000400, TESOP2000510, TESOP2000527, TESOP2000569, TESOP2000739, TESOP2000801, TESOP2001122, TESOP2001166, TESOP2001345, TESOP2001474, TESOP2001796, TESOP2001818, TESOP2001849, TESOP2001865, TESOP2001901, TESOP2001953, TESOP2002005, TESOP2002110, TESOP2002150, TESOP2002273, TESOP2002451, TESOP2002489, TESOP2002539, TESOP2002545, TESOP2002804, TESOP2002950, TESOP2003273, TESOP2003308, TESOP2003553, TESOP2003753, TESOP2004110, TESOP2004114, TESOP2004173, TESOP2004214, TESOP2005199, TESOP2005285, TESOP2005485, TESOP2005498, TESOP2005579, TESOP2006041, TESOP2006053, TESOP2006060, TESOP2006068, TESOP2006110, TESOP2006398, TESOP2006670, TESOP2006704, TESOP2006746, TESOP2006865,

[1962] TESOP2006893, TESOP2007041, TESOP2007052, TESOP2007262, TESOP2007384, TESOP2007636, TESOP2007674, TESOP2007688, TESOP2007725, TESOP2007912, TESOP2007978, TESOP2008127, TESOP2008552, TESOP2008556, TESOP2008563, TESOP2008820, TESOP2009121, TESOP2009201, TESOP2009247, TESOP2009555, TESTI1000018, TESTI1000019, TESTI1000023, TESTI1000025, TESTI1000029, TESTI1000030, TESTI1000042, TESTI1000045, TESTI1000051, TESTI1000055, TESTI1000064, TESTI1000070, TESTI1000085, TESTI1000088, TESTI1000093, TESTI1000094, TESTI1000096, TESTI1000101, TESTI1000109, TESTI1000125, TESTI1000127, TESTI1000128, TESTI1000131, TESTI1000138, TESTI1000142, TESTI1000157, TESTI1000163, TESTI1000168, TESTI1000169, TESTI1000179,

[1963] TESTI1000183, TESTI1000191, TESTI1000257, TESTI1000266, TESTI1000319, TESTI1000330, TESTI1000348, TESTI1000390, TESTI1000391, TESTI1000459, TESTI1000491, TESTI1000545, TESTI2000006, TESTI2000018, TESTI2000044, TESTI2000100, TESTI2000117, TESTI2000120, TESTI2000147, TESTI2000154, TESTI2000172, TESTI2000177, TESTI2000179, TESTI2000184, TESTI2000207, TESTI2000208, TESTI2000221, TESTI2000238, TESTI2000253, TESTI2000272, TESTI2000278, TESTI2000349, TESTI2000356, TESTI2000358, TESTI2000372, TESTI2000427, TESTI2000431, TESTI2000435, TESTI2000443, TESTI2000452, TESTI2000462, TESTI2000489, TESTI2000520, TESTI2000571, TESTI2000598, TESTI2000600, TESTI2000616, TESTI2000627, TESTI2000644, TESTI2000671,

[1964] TESTI2000683, TESTI2000689, TESTI2000695, TESTI2000699, TESTI2000707, TESTI2000745, TESTI2000756, TESTI2000762, TESTI2000784, TESTI2000808, TESTI2000819, TESTI2000830, TESTI2000840, TESTI2000849, TESTI2000850, TESTI2000874, TESTI2000883, TESTI2000909, TESTI2000951, TESTI2000970, TESTI2000981, TESTI2001008, TESTI2001049, TESTI2001082, TESTI2001099, TESTI2001120, TESTI2001134, TESTI2001141, TESTI2001153, TESTI2001180, TESTI2001208, TESTI2001229, TESTI2001236, TESTI2001237, TESTI2001269, TESTI2001306, TESTI2001313, TESTI2001330, TESTI2001339, TESTI2001345, TESTI2001352, TESTI2001364, TESTI2001412, TESTI2001420, TESTI2001498, TESTI2001511, TESTI2001512, TESTI2001518, TESTI2001556, TESTI2001593,

[1965] TESTI2001613, TESTI2001621, TESTI2001661, TESTI2001665, TESTI2001671, TESTI2001697, TESTI2001725, TESTI2001758, TESTI2001766, TESTI2001792, TESTI2001793, TESTI2001795, TESTI2001812, TESTI2001815, TESTI2001823, TESTI2001826, TESTI2001827, TESTI2001829, TESTI2001852, TESTI2001869, TESTI2001879, TESTI2001894, TESTI2001898, TESTI2001915, TESTI2001950, TESTI2001959, TESTI2001968, TESTI2001985, TESTI2001991, TESTI2002002, TESTI2002012, TESTI2002036, TESTI2002048, TESTI2002057, TESTI2002081, TESTI2002090, TESTI2002105, TESTI2002216, TESTI2002223, TESTI2002245, TESTI2002251, TESTI2002256, TESTI2002264, TESTI2002282, TESTI2002293, TESTI2002294, TESTI2002326, TESTI2002351, TESTI2002361, TESTI2002365,

[1966] TESTI2002369, TESTI2002406, TESTI2002415, TESTI2002423, TESTI2002453, TESTI2002461, TESTI2002465, TESTI2002467, TESTI2002498, TESTI2002516, TESTI2002544, TESTI2002578, TESTI2002580, TESTI2002618, TESTI2002632, TESTI2002676, TESTI2002690, TESTI2002696, TESTI2002698, TESTI2002700, TESTI2002707, TESTI2002724, TESTI2002729, TESTI2002752, TESTI2002753, TESTI2002789, TESTI2002802, TESTI2002806, TESTI2002840, TESTI2002866, TESTI2002877, TESTI2002910, TESTI2002912, TESTI2002928, TESTI2002937, TESTI2002965, TESTI2002993, TESTI2003020, TESTI2003031, TESTI2003037, TESTI2003044, TESTI2003059, TESTI2003061, TESTI2003074, TESTI2003089, TESTI2003104, TESTI2003109, TESTI2003117, TESTI2003130, TESTI2003131,

[1967] TESTI2003139, TESTI2003141, TESTI2003152, TESTI2003181, TESTI2003193, TESTI2003196, TESTI2003228, TESTI2003236, TESTI2003255, TESTI2003258, TESTI2003277, TESTI2003280, TESTI2003299, TESTI2003311, TESTI2003321, TESTI2003325, TESTI2003327, TESTI2003330, TESTI2003347, TESTI2003354, TESTI2003356, TESTI2003372, TESTI2003376, TESTI2003413, TESTI2003418, TESTI2003419, TESTI2003432, TESTI2003454, TESTI2003475, TESTI2003476, TESTI2003498, TESTI2003512, TESTI2003533, TESTI2003539, TESTI2003541, TESTI2003545, TESTI2003551, TESTI2003574, TESTI2003579, TESTI2003580, TESTI2003589, TESTI2003596, TESTI2003598, TESTI2003615, TESTI2003625, TESTI2003638, TESTI2003649, TESTI2003692, TESTI2003718, TESTI2003727,

[1968] TESTI2003768, TESTI2003781, TESTI2003787, TESTI2003824, TESTI2003827, TESTI2003894, TESTI2003911, TESTI2003914, TESTI2003940, TESTI2003962, TESTI2003998, TESTI2004000, TESTI2004073, TESTI2004080, TESTI2004085, TESTI2004089, TESTI2004111, TESTI2004119, TESTI2004122, TESTI2004153, TESTI2004163, TESTI2004169, TESTI2004207, TESTI2004215, TESTI2004227, TESTI2004229, TESTI2004243, TESTI2004255, TESTI2004287, TESTI2004295, TESTI2004313, TESTI2004318, TESTI2004322, TESTI2004391, TESTI2004399, TESTI2004423, TESTI2004431, TESTI2004432, TESTI2004452, TESTI2004459, TESTI2004490, TESTI2004539, TESTI2004552, TESTI2004560, TESTI2004574, TESTI2004601, TESTI2004611, TESTI2004649, TESTI2004654, TESTI2004675,

[1969] TESTI2004687, TESTI2004689, TESTI2004700, TESTI2004706, TESTI2004712, TESTI2004734, TESTI2004737, TESTI2004783, TESTI2004791, TESTI2004793, TESTI2004860, TESTI2004906, TESTI2004920, TESTI2004929, TESTI2004936, TESTI2004941, TESTI2004971, TESTI2004982, TESTI2004993, TESTI2004994, TESTI2004999, TESTI2005017, TESTI2005025, TESTI2005040, TESTI2005060, TESTI2005072, TESTI2005085, TESTI2005112, TESTI2005120, TESTI2005153, TESTI2005155, TESTI2005173, TESTI2005267, TESTI2005268, TESTI2005280, TESTI2005307, TESTI2005326, TESTI2005363, TESTI2005376, TESTI2005378, TESTI2005380, TESTI2005391, TESTI2005395, TESTI2005396, TESTI2005408, TESTI2005415, TESTI2005470, TESTI2005492, TESTI2005564, TESTI2005568,

[1970] TESTI2005584, TESTI2005588, TESTI2005590, TESTI2005603, TESTI2005609, TESTI2005610, TESTI2005630, TESTI2005672, TESTI2005683, TESTI2005690, TESTI2005692, TESTI2005703, TESTI2005720, TESTI2005731, TESTI2005739, TESTI2005742, TESTI2005743, TESTI2005759, TESTI2005767, TESTI2005775, TESTI2005784, TESTI2005788, TESTI2005827, TESTI2005835, TESTI2005860, TESTI2005892, TESTI2005908, TESTI2005911, TESTI2005933, TESTI2005937, TESTI2005948, TESTI2005979, TESTI2005981, TESTI2005982, TESTI2005984, TESTI2005986, TESTI2005987, TESTI2006007, TESTI2006008, TESTI2006015, TESTI2006016, TESTI2006035, TESTI2006040, TESTI2006041, TESTI2006045, TESTI2006051, TESTI2006067, TESTI2006083, TESTI2006097, TESTI2006109,

[1971] TESTI2006111, TESTI2006120, TESTI2006125, TESTI2006179, TESTI2006209, TESTI2006210, TESTI2006212, TESTI2006218, TESTI2006238, TESTI2006255, TESTI2006258, TESTI2006278, TESTI2006333, TESTI2006341, TESTI2006360, TESTI2006383, TESTI2006409, TESTI2006425, TESTI2006437, TESTI2006453, TESTI2006457, TESTI2006460, TESTI2006465, TESTI2006483, TESTI2006499, TESTI2006523, TESTI2006543, TESTI2006565, TESTI2006572, TESTI2006615, TESTI2006617, TESTI2006624, TESTI2006628, TESTI2006633, TESTI2006643, TESTI2006648, TESTI2006659, TESTI2006660, TESTI2006665, TESTI2006667, TESTI2006677, TESTI2006720, TESTI2006735, TESTI2006744, TESTI2006748, TESTI2006774, TESTI2006853, TESTI2006866, TESTI2006872, TESTI2006877,

[1972] TESTI2006879, TESTI2006894, TESTI2006940, TESTI2006955, TESTI2006978, TESTI2006979, TESTI2006990, TESTI2007040, TESTI2007074, TESTI2007078, TESTI2007113, TESTI2007152, TESTI2007163, TESTI2007183, TESTI2007211, TESTI2007220, TESTI2007234, TESTI2007311, TESTI2007320, TESTI2007346, TESTI2007358, TESTI2007402, TESTI2007405, TESTI2007407, TESTI2007422, TESTI2007452, TESTI2007464, TESTI2007466, TESTI2007480, TESTI2007490, TESTI2007502, TESTI2007524, TESTI2007533, TESTI2007576, TESTI2007613, TESTI2007657, TESTI2007685, TESTI2007692, TESTI2007749, TESTI2007750, TESTI2007808, TESTI2007814, TESTI2007829, TESTI2007864, TESTI2007867, TESTI2007872, TESTI2007906, TESTI2007922, TESTI2007951, TESTI2007972,

[1973] TESTI2007973, TESTI2007998, TESTI2008014, TESTI2008020, TESTI2008032, TESTI2008033, TESTI2008046, TESTI2008081, TESTI2008099, TESTI2008139, TESTI2008144, TESTI2008161, TESTI2008189, TESTI2008204, TESTI2008219, TESTI2008233, TESTI2008234, TESTI2008237, TESTI2008240, TESTI2008278, TESTI2008320, TESTI2008331, TESTI2008343, TESTI2008387, TESTI2008389, TESTI2008394, TESTI2008405, TESTI2008420, TESTI2008425, TESTI2008440, TESTI2008567, TESTI2008595, TESTI2008621, TESTI2008636, TESTI2008657, TESTI2008684, TESTI2008699, TESTI2008715, TESTI2008762, TESTI2008774, TESTI2008786, TESTI2008822, TESTI2008835, TESTI2008840, TESTI2008847, TESTI2008884, TESTI2008901, TESTI2008929, TESTI2008946, TESTI2008960,

[1974] TESTI2009018, TESTI2009091, TESTI2009097, TESTI2009136, TESTI2009185, TESTI2009190, TESTI2009217, TESTI2009239, TESTI2009325, TESTI2009388, TESTI2009390, TESTI2009400, TESTI2009402, TESTI2009412, TESTI2009423, TESTI2009447, TESTI2009462, TESTI2009477, TESTI2009497, TESTI2009502, TESTI2009511, TESTI2009520, TESTI2009544, TESTI2009545, TESTI2009551, TESTI2009577, TESTI2009585, TESTI2009588, TESTI2009683, TESTI2009727, TESTI2009739, TESTI2009785, TESTI2009812, TESTI2009835, TESTI2009853, TESTI2009935, TESTI2009977, TESTI2009987, TESTI2010009, TESTI2010154, TESTI2010180, TESTI2010239, TESTI2010280, TESTI2010354, TESTI2010396, TESTI2010400, TESTI2010409, TESTI2010572, TESTI2010587, TESTI2010591,

[1975] TESTI2010617, TESTI2010682, TESTI2010724, TESTI2010732, TESTI2010734, TESTI2010755, TESTI2010793, TESTI2010806, TESTI2010833, TESTI2010872, TESTI2011009, TESTI2011020, TESTI2011028, TESTI2011033, TESTI2011254, TESTI2011286, TESTI2011294, TESTI2011314, TESTI2011315, TESTI2011394, TESTI2011407, TESTI2011448, TESTI2011480, TESTI2011549, TESTI2011575, TESTI2011605, TESTI2011612, TESTI2011665, TESTI2011680, TESTI2011683, TESTI2011712, TESTI2011750, TESTI2011840, TESTI2011846, TESTI2011915, TESTI2011928, TESTI2011971, TESTI2012050, TESTI2012090, TESTI2012095, TESTI2012104, TESTI2012152, TESTI2012155, TESTI2012171, TESTI2012207, TESTI2012231, TESTI2012244, TESTI2012289, TESTI2012308, TESTI2012356,

[1976] TESTI2012387, TESTI2012394, TESTI2012444, TESTI2012511, TESTI2012528, TESTI2012544, TESTI2012550, TESTI2012571, TESTI2012592, TESTI2012617, TESTI2012628, TESTI2012812, TESTI2012834, TESTI2012835, TESTI2012861, TESTI2012900, TESTI2012915, TESTI2012922, TESTI2013001, TESTI2013012, TESTI2013053, TESTI2013144, TESTI2013163, TESTI2013169, TESTI2013212, TESTI2013257, TESTI2013264, TESTI2013268, TESTI2013295, TESTI2013322, TESTI2013381, TESTI2013382, TESTI2013401, TESTI2013427, TESTI2013468, TESTI2013497, TESTI2013545, TESTI2013546, TESTI2013566, TESTI2013601, TESTI2013604, TESTI2013607, TESTI2013610, TESTI2013691, TESTI2013699, TESTI2013737, TESTI2013767, TESTI2013832, TESTI2013873, TESTI2013889,

[1977] TESTI2014007, TESTI2014036, TESTI2014097, TESTI2014160, TESTI2014248, TESTI2014254, TESTI2014269, TESTI2014274, TESTI2014318, TESTI2014324, TESTI2014339, TESTI2014362, TESTI2014385, TESTI2014415, TESTI2014439, TESTI2014474, TESTI2014505, TESTI2014577, TESTI2014578, TESTI2014716, TESTI2014780, TESTI2014800, TESTI2014838, TESTI2014843, TESTI2014979, TESTI2014988, TESTI2015042, TESTI2015092, TESTI2015105, TESTI2015180, TESTI2015246, TESTI2015249, TESTI2015327, TESTI2015331, TESTI2015335, TESTI2015350, TESTI2015375, TESTI2015590, TESTI2015610, TESTI2015647, TESTI2015675, TESTI2015710, TESTI2015752, TESTI2015830, TESTI2015914, TESTI2015938, TESTI2015947, TESTI2015962, TESTI2015987, TESTI2016033,

[1978] TESTI2016046, TESTI2016101, TESTI2016162, TESTI2016197, TESTI2016278, TESTI2016298, TESTI2016331, TESTI2016337, TESTI2016410, TESTI2016421, TESTI2016509, TESTI2016568, TESTI2016583, TESTI2016599, TESTI2016629, TESTI2016663, TESTI2016667, TESTI2016688, TESTI2016701, TESTI2016758, TESTI2016848, TESTI2016863, TESTI2016888, TESTI2016896, TESTI2016922, TESTI2016942, TESTI2016950, TESTI2016996, TESTI2017017, TESTI2017028, TESTI2017035, TESTI2017069, TESTI2017089, TESTI2017102, TESTI2017107, TESTI2017113, TESTI2017125, TESTI2017256, TESTI2017305, TESTI2017311, TESTI2017396, TESTI2017507, TESTI2017537, TESTI2017582, TESTI2017584, TESTI2017645, TESTI2017727, TESTI2017740, TESTI2017775, TESTI2017816,

[1979] TESTI2017832, TESTI2017923, TESTI2017932, TESTI2017951, TESTI2018014, TESTI2018031, TESTI2018035, TESTI2018060, TESTI2018083, TESTI2018178, TESTI2018221, TESTI2018276, TESTI2018290, TESTI2018335, TESTI2018337, TESTI2018368, TESTI2018421, TESTI2018428, TESTI2018462, TESTI2018475, TESTI2018482, TESTI2018521, TESTI2018565, TESTI2018581, TESTI2018611, TESTI2018687, TESTI2018697, TESTI2018838, TESTI2018867, TESTI2018941, TESTI2018957, TESTI2018974, TESTI2018975, TESTI2018997, TESTI2019042, TESTI2019077, TESTI2019228, TESTI2019257, TESTI2019280, TESTI2019282, TESTI2019308, TESTI2019336, TESTI2019352, TESTI2019406, TESTI2019430, TESTI2019455, TESTI2019481, TESTI2019488, TESTI2019501, TESTI2019648,

[1980] TESTI2019669, TESTI2019697, TESTI2019729, TESTI2019760, TESTI2019787, TESTI2019794, TESTI2019854, TESTI2019859, TESTI2019860, TESTI2019872, TESTI2019911, TESTI2019917, TESTI2019975, TESTI2019998, TESTI2020012, TESTI2020026, TESTI2020029, TESTI2020071, TESTI2020084, TESTI2020265, TESTI2020283, TESTI2020316, TESTI2020344, TESTI2020379, TESTI2020426, TESTI2020445, TESTI2020510, TESTI2020515, TESTI2020525, TESTI2020579, TESTI2020717, TESTI2020840, TESTI2020871, TESTI2020905, TESTI2020906, TESTI2020946, TESTI2020956, TESTI2020981, TESTI2020999, TESTI2021003, TESTI2021038, TESTI2021057, TESTI2021077, TESTI2021112, TESTI2021114, TESTI2021116, TESTI2021118, TESTI2021122, TESTI2021124, TESTI2021138,

[1981] TESTI2021297, TESTI2021315, TESTI2021358, TESTI2021425, TESTI2021447, TESTI2021463, TESTI2021531, TESTI2021599, TESTI2021637, TESTI2021667, TESTI2021736, TESTI2021785, TESTI2021819, TESTI2021851, TESTI2021895, TESTI2021911, TESTI2021939, TESTI2021999, TESTI2022010, TESTI2022023, TESTI2022065, TESTI2022086, TESTI2022179, TESTI2022203, TESTI2022246, TESTI2022323, TESTI2022338, TESTI2022400, TESTI2022462, TESTI2022495, TESTI2022623, TESTI2022649, TESTI2022652, TESTI2022738, TESTI2022798, TESTI2022812, TESTI2022814, TESTI2022874, TESTI2022940, TESTI2022952, TESTI2023025, TESTI2023033, TESTI2023053, TESTI2023085, TESTI2023192, TESTI2023194, TESTI2023214, TESTI2023254, TESTI2023386, TESTI2023414,

[1982] TESTI2023427, TESTI2023436, TESTI2023599, TESTI2023752, TESTI2023800, TESTI2023861, TESTI2023903, TESTI2023942, TESTI2023947, TESTI2023951, TESTI2023968, TESTI2024009, TESTI2024090, TESTI2024125, TESTI2024153, TESTI2024192, TESTI2024267, TESTI2024283, TESTI2024299, TESTI2024419, TESTI2024422, TESTI2024443, TESTI2024446, TESTI2024473, TESTI2024476, TESTI2024498, TESTI2024560, TESTI2024567, TESTI2024586, TESTI2024598, TESTI2024641, TESTI2024648, TESTI2024718, TESTI2024744, TESTI2024844, TESTI2024864, TESTI2024885, TESTI2024936, TESTI2024978, TESTI2024999, TESTI2025006, TESTI2025022, TESTI2025063, TESTI2025117, TESTI2025144, TESTI2025161, TESTI2025174, TESTI2025229, TESTI2025269, TESTI2025365,

[1983] TESTI2025403, TESTI2025409, TESTI2025422, TESTI2025448, TESTI2025454, TESTI2025486, TESTI2025546, TESTI2025582, TESTI2025609, TESTI2025656, TESTI2025757, TESTI2025791, TESTI2025846, TESTI2025872, TESTI2025879, TESTI2025911, TESTI2025920, TESTI2025924, TESTI2026014, TESTI2026024, TESTI2026064, TESTI2026077, TESTI2026104, TESTI2026116, TESTI2026134, TESTI2026168, TESTI2026196, TESTI2026215, TESTI2026218, TESTI2026233, TESTI2026291, TESTI2026294, TESTI2026401, TESTI2026403, TESTI2026453, TESTI2026461, TESTI2026491, TESTI2026505, TESTI2026515, TESTI2026534, TESTI2026537, TESTI2026589, TESTI2026597, TESTI2026605, TESTI2026647, TESTI2026674, TESTI2026794, TESTI2026824, TESTI2026854, TESTI2026925,

[1984] TESTI2026936, TESTI2026957, TESTI2027013, TESTI2027019, TESTI2027108, TESTI2027165, TESTI2027171, TESTI2027173, TESTI2027179, TESTI2027185, TESTI2027206, TESTI2027238, TESTI2027239, TESTI2027243, TESTI2027271, TESTI2027296, TESTI2027378, TESTI2027411, TESTI2027450, TESTI2027496, TESTI2027503, TESTI2027562, TESTI2027615, TESTI2027645, TESTI2027730, TESTI2027736, TESTI2027791, TESTI2027820, TESTI2027828, TESTI2027840, TESTI2027909, TESTI2028098, TESTI2028151, TESTI2028242, TESTI2028253, TESTI2028254, TESTI2028269, TESTI2028290, TESTI2028296, TESTI2028384, TESTI2028426, TESTI2028488, TESTI2028523, TESTI2028583, TESTI2028613, TESTI2028659, TESTI2028662, TESTI2028670, TESTI2028705, TESTI2028776,

[1985] TESTI2028811, TESTI2028891, TESTI2028985, TESTI2028997, TESTI2029131, TESTI2029162, TESTI2029196, TESTI2029201, TESTI2029227, TESTI2029244, TESTI2029249, TESTI2029252, TESTI2029259, TESTI2029264, TESTI2029470, TESTI2029672, TESTI2029785, TESTI2029880, TESTI2030136, TESTI2030322, TESTI2030336, TESTI2030342, TESTI2030519, TESTI2030554, TESTI2030556, TESTI2030728, TESTI2030754, TESTI2030770, TESTI2030860, TESTI2030901, TESTI2030917, TESTI2030930, TESTI2031006, TESTI2031007, TESTI2031060, TESTI2031129, TESTI2031356, TESTI2031418, TESTI2031504, TESTI2031529, TESTI2031687, TESTI2031760, TESTI2031809, TESTI2031919, TESTI2031935, TESTI2031986, TESTI2032044, TESTI2032067, TESTI2032079, TESTI2032643,

[1986] TESTI2032681, TESTI2032761, TESTI2032768, TESTI2032774, TESTI2032828, TESTI2033031, TESTI2033242, TESTI2033254, TESTI2033300, TESTI2033395, TESTI2033441, TESTI2033453, TESTI2033505, TESTI2033520, TESTI2033641, TESTI2033710, TESTI2033905, TESTI2034187, TESTI2034243, TESTI2034249, TESTI2034307, TESTI2034357, TESTI2034401, TESTI2034407, TESTI2034506, TESTI2034520, TESTI2034718, TESTI2034730, TESTI2034749, TESTI2034767, TESTI2034774, TESTI2034777, TESTI2034785, TESTI2034799, TESTI2034847, TESTI2034913, TESTI2034916, TESTI2034931, TESTI2034953, TESTI2034997, TESTI2035003, TESTI2035078, TESTI2035084, TESTI2035107, TESTI2035121, TESTI2035124, TESTI2035183, TESTI2035236, TESTI2035262, TESTI2035309,

[1987] TESTI2035688, TESTI2035775, TESTI2035793, TESTI2035898, TESTI2035962, TESTI2035981, TESTI2035997, TESTI2036114, TESTI2036129, TESTI2036285, TESTI2036288, TESTI2036513, TESTI2036589, TESTI2036650, TESTI2036684, TESTI2036691, TESTI2036736, TESTI2036822, TESTI2036833, TESTI2036913, TESTI2036922, TESTI2036951, TESTI2036965, TESTI2036969, TESTI2037002, TESTI2037055, TESTI2037081, TESTI2037085, TESTI2037103, TESTI2037106, TESTI2037111, TESTI2037209, TESTI2037255, TESTI2037359, TESTI2037375, TESTI2037382, TESTI2037534, TESTI2037569, TESTI2037572, TESTI2037643, TESTI2037657, TESTI2037673, TESTI2037723, TESTI2037819, TESTI2037830, TESTI2037845, TESTI2037877, TESTI2037976, TESTI2038048, TESTI2038065,

[1988] TESTI2038104, TESTI2038275, TESTI2038388, TESTI2038573, TESTI2038596, TESTI2038623, TESTI2038644, TESTI2038733, TESTI2038858, TESTI2038958, TESTI2039025, TESTI2039026, TESTI2039038, TESTI2039041, TESTI2039060, TESTI2039113, TESTI2039121, TESTI2039177, TESTI2039209, TESTI2039225, TESTI2039227, TESTI2039276, TESTI2039342, TESTI2039353, TESTI2039544, TESTI2039613, TESTI2039707, TESTI2039732, TESTI2039738, TESTI2039776, TESTI2039867, TESTI2039908, TESTI2040018, TESTI2040094, TESTI2040102, TESTI2040128, TESTI2040143, TESTI2040297, TESTI2040372, TESTI2040377, TESTI2040424, TESTI2040642, TESTI2040815, TESTI2040897, TESTI2040944, TESTI2040964, TESTI2040983, TESTI2040989, TESTI2041330, TESTI2041362,

[1989] TESTI2041517, TESTI2041564, TESTI2041664, TESTI2041730, TESTI2041734, TESTI2041778, TESTI2041800, TESTI2041947, TESTI2041956, TESTI2041976, TESTI2042062, TESTI2042149, TESTI2042264, TESTI2042295, TESTI2042302, TESTI2042326, TESTI2042400, TESTI2042450, TESTI2042473, TESTI2042507, TESTI2042508, TESTI2042750, TESTI2042783, TESTI2042806, TESTI2042928, TESTI2042946, TESTI2042958, TESTI2043275, TESTI2043277, TESTI2043282, TESTI2043313, TESTI2043477, TESTI2043585, TESTI2043758, TESTI2043817, TESTI2043857, TESTI2043866, TESTI2043869, TESTI2044064, TESTI2044118, TESTI2044194, TESTI2044276, TESTI2044306, TESTI2044309, TESTI2044413, TESTI2044418, TESTI2044754, TESTI2044788, TESTI2044796, TESTI2044833,

[1990] TESTI2044892, TESTI2044920, TESTI2044968, TESTI2045139, TESTI2045155, TESTI2045171, TESTI2045199, TESTI2045353, TESTI2045509, TESTI2045562, TESTI2045611, TESTI2045819, TESTI2045850, TESTI2045920, TESTI2045964, TESTI2045983, TESTI2046100, TESTI2046188, TESTI2046347, TESTI2046352, TESTI2046358, TESTI2046439, TESTI2046456, TESTI2046535, TESTI2046536, TESTI2046552, TESTI2046569, TESTI2046686, TESTI2046721, TESTI2046732, TESTI2046786, TESTI2046797, TESTI2046863, TESTI2046872, TESTI2047071, TESTI2047141, TESTI2047147, TESTI2047153, TESTI2047212, TESTI2047342, TESTI2047383, TESTI2047605, TESTI2047792, TESTI2047801, TESTI2047818, TESTI2047824, TESTI2047885, TESTI2047930, TESTI2048105, TESTI2048109,

[1991] TESTI2048465, TESTI2048603, TESTI2048898, TESTI2049041, TESTI2049062, TESTI2049206, TESTI2049246, TESTI2049277, TESTI2049422, TESTI2049452, TESTI2049469, TESTI2049553, TESTI2049576, TESTI2049857, TESTI2049956, TESTI2050137, TESTI2050681, TESTI2050780, TESTI2050987, TESTI2051148, TESTI2051177, TESTI2051279, TESTI2051488, TESTI2051543, TESTI2051627, TESTI2051742, TESTI2051767, TESTI2051791, TESTI2051806, TESTI2051867, TESTI2051873, TESTI2052110, TESTI2052202, TESTI2052211, TESTI2052256, TESTI2052288, TESTI2052525, TESTI2052670, TESTI2052698, TESTI2052799, TESTI2052822, TESTI2052985, TESTI2053151, TESTI2053242, TESTI2053399, TESTI2053526, TESTI2053561, TESTI2053621, TESTI2053667, TESTI2053723,

[1992] TESTI3000002, TESTI3000005, TESTI4000068, TESTI4000079, TESTI4000093, TESTI4000134, TESTI4000137, TESTI4000153, TESTI4000155, TESTI4000157, TESTI4000183, TESTI4000214, TESTI4000215, TESTI4000228, TESTI4000250, TESTI4000288, TESTI4000319, TESTI4000349, TESTI4000370, TESTI4000394, TESTI4000434, TESTI4000462, TESTI4000530, TESTI4000534, TESTI4000598, TESTI4000600, TESTI4000621, TESTI4000703, TESTI4000724, TESTI4000957, TESTI4000970, TESTI4001036, TESTI4001037, TESTI4001060, TESTI4001106, TESTI4001148, TESTI4001176, TESTI4001195, TESTI4001201, TESTI4001206, TESTI4001348, TESTI4001441, TESTI4001467, TESTI4001473, TESTI4001517, TESTI4001527, TESTI4001561, TESTI4001569, TESTI4001604, TESTI4001665,

[1993] TESTI4001679, TESTI4001795, TESTI4001923, TESTI4001925, TESTI4001984, TESTI4002003, TESTI4002072, TESTI4002141, TESTI4002195, TESTI4002202, TESTI4002290, TESTI4002319, TESTI4002491, TESTI4002520, TESTI4002552, TESTI4002647, TESTI4002703, TESTI4002754, TESTI4002799, TESTI4002868, TESTI4002878, TESTI4002889, TESTI4002988, TESTI4003150, TESTI4003179, TESTI4003279, TESTI4003319, TESTI4003404, TESTI4003565, TESTI4003574, TESTI4003579, TESTI4003602, TESTI4003703, TESTI4003733, TESTI4003796, TESTI4003944, TESTI4004003, TESTI4004031, TESTI4004200, TESTI4004210, TESTI4004539, TESTI4004626, TESTI4004653, TESTI4004695, TESTI4004722, TESTI4004887, TESTI4004917, TESTI4005015, TESTI4005039, TESTI4005133,

[1994] TESTI4005158, TESTI4005317, TESTI4005322, TESTI4005399, TESTI4005470, TESTI4005500, TESTI4005534, TESTI4005543, TESTI4005628, TESTI4005801, TESTI4005805, TESTI4005857, TESTI4005961, TESTI4006053, TESTI4006079, TESTI4006112, TESTI4006137, TESTI4006148, TESTI4006219, TESTI4006234, TESTI4006308, TESTI4006326, TESTI4006393, TESTI4006407, TESTI4006412, TESTI4006420, TESTI4006441, TESTI4006473, TESTI4006539, TESTI4006546, TESTI4006567, TESTI4006704, TESTI4006728, TESTI4006802, TESTI4006819, TESTI4007064, TESTI4007163, TESTI4007176, TESTI4007203, TESTI4007239, TESTI4007369, TESTI4007373, TESTI4007382, TESTI4007404, TESTI4007489, TESTI4007565, TESTI4007671, TESTI4007775, TESTI4007778, TESTI4007799,

[1995] TESTI4007810, TESTI4007816, TESTI4007965, TESTI4008007, TESTI4008018, TESTI4008050, TESTI4008058, TESTI4008086, TESTI4008097, TESTI4008176, TESTI4008209, TESTI4008219, TESTI4008250, TESTI4008302, TESTI4008305, TESTI4008401, TESTI4008417, TESTI4008429, TESTI4008573, TESTI4008797, TESTI4008816, TESTI4008840, TESTI4008935, TESTI4008993, TESTI4009022, TESTI4009028, TESTI4009034, TESTI4009123, TESTI4009160, TESTI4009215, TESTI4009283, TESTI4009306, TESTI4009374, TESTI4009406, TESTI4009454, TESTI4009457, TESTI4009501, TESTI4009563, TESTI4009608, TESTI4009638, TESTI4009752, TESTI4009881, TESTI4009886, TESTI4009928, TESTI4010076, TESTI4010082, TESTI4010095, TESTI4010211, TESTI4010377, TESTI4010475,

[1996] TESTI4010544, TESTI4010713, TESTI4010721, TESTI4010789, TESTI4010817, TESTI4010831, TESTI4010851, TESTI4010902, TESTI4010928, TESTI4010979, TESTI4011070, TESTI4011072, TESTI4011084, TESTI4011118, TESTI4011246, TESTI4011484, TESTI4011505, TESTI4011532, TESTI4011616, TESTI4011744, TESTI4011745, TESTI4011829, TESTI4011926, TESTI4011956, TESTI4012010, TESTI4012086, TESTI4012258, TESTI4012293, TESTI4012329, TESTI4012382, TESTI4012406, TESTI4012448, TESTI4012451, TESTI4012505, TESTI4012556, TESTI4012623, TESTI4012646, TESTI4012679, TESTI4012911, TESTI4012956, TESTI4012960, TESTI4013365, TESTI4013369, TESTI4013410, TESTI4013474, TESTI4013602, TESTI4013667, TESTI4013675, TESTI4013685, TESTI4013735,

[1997] TESTI4013742, TESTI4013774, TESTI4013817, TESTI4013830, TESTI4013852, TESTI4013894, TESTI4013924, TESTI4013960, TESTI4013962, TESTI4014159, TESTI4014175, TESTI4014265, TESTI4014276, TESTI4014306, TESTI4014392, TESTI4014415, TESTI4014445, TESTI4014553, TESTI4014661, TESTI4014694, TESTI4014801, TESTI4014818, TESTI4014891, TESTI4014908, TESTI4014924, TESTI4014932, TESTI4014977, TESTI4015012, TESTI4015129, TESTI4015145, TESTI4015204, TESTI4015263, TESTI4015293, TESTI4015299, TESTI4015339, TESTI4015398, TESTI4015442, TESTI4015471, TESTI4015477, TESTI4015600, TESTI4015646, TESTI4015681, TESTI4015688, TESTI4015790, TESTI4016110, TESTI4016238, TESTI4016551, TESTI4016812, TESTI4016822, TESTI4016865,

[1998] TESTI4016882, TESTI4016925, TESTI4017001, TESTI4017116, TESTI4017137, TESTI4017229, TESTI4017254, TESTI4017269, TESTI4017380, TESTI4017382, TESTI4017543, TESTI4017575, TESTI4017647, TESTI4017714, TESTI4017763, TESTI4017848, TESTI4017854, TESTI4017901, TESTI4017961, TESTI4017984, TESTI4018101, TESTI4018152, TESTI4018208, TESTI4018382, TESTI4018506, TESTI4018555, TESTI4018751, TESTI4018806, TESTI4018835, TESTI4018859, TESTI4018881, TESTI4018886, TESTI4018938, TESTI4019140, TESTI4019149, TESTI4019299, TESTI4019417, TESTI4019440, TESTI4019566, TESTI4019657, TESTI4019756, TESTI4019843, TESTI4020092, TESTI4020102, TESTI4020342, TESTI4020460, TESTI4020596, TESTI4020806, TESTI4020819, TESTI4020920,

[1999] TESTI4021129, TESTI4021197, TESTI4021294, TESTI4021377, TESTI4021456, TESTI4021491, TESTI4021569, TESTI4021713, TESTI4021821, TESTI4022158, TESTI4022577, TESTI4022716, TESTI4022873, TESTI4023096, TESTI4023172, TESTI4023546, TESTI4023555, TESTI4023654, TESTI4023722, TESTI4023762, TESTI4023942, TESTI4024096, TESTI4024240, TESTI4024245, TESTI4024294, TESTI4024344, TESTI4024387, TESTI4024420, TESTI4024494, TESTI4024740, TESTI4024874, TESTI4024890, TESTI4024907, TESTI4024930, TESTI4025062, TESTI4025268, TESTI4025401, TESTI4025494, TESTI4025547, TESTI4025731, TESTI4025797, TESTI4025865, TESTI4025908, TESTI4025920, TESTI4026079, TESTI4026080, TESTI4026192, TESTI4026207, TESTI4026295, TESTI4026390,

[2000] TESTI4026456, TESTI4026510, TESTI4026524, TESTI4026680, TESTI4026700, TESTI4026762, TESTI4026785, TESTI4027139, TESTI4027170, TESTI4027262, TESTI4027516, TESTI4027557, TESTI4027660, TESTI4027821, TESTI4027969, TESTI4028042, TESTI4028059, TESTI4028062, TESTI4028182, TESTI4028429, TESTI4028612, TESTI4028692, TESTI4028809, TESTI4028823, TESTI4028880, TESTI4028904, TESTI4028938, TESTI4028958, TESTI4028983, TESTI4029023, TESTI4029348, TESTI4029370, TESTI4029528, TESTI4029651, TESTI4029671, TESTI4029676, TESTI4029690, TESTI4029731, TESTI4029743, TESTI4030069, TESTI4030159, TESTI4030319, TESTI4030505, TESTI4030603, TESTI4030669, TESTI4030673, TESTI4030864, TESTI4031066, TESTI4031173, TESTI4031335,

[2001] TESTI4031745, TESTI4031818, TESTI4032090, TESTI4032112, TESTI4032128, TESTI4032270, TESTI4032375, TESTI4032834, TESTI4032856, TESTI4032895, TESTI4032913, TESTI4033146, TESTI4033177, TESTI4033433, TESTI4033690, TESTI4034172, TESTI4034212, TESTI4034432, TESTI4034495, TESTI4034632, TESTI4034633, TESTI4034912, TESTI4034973, TESTI4035063, TESTI4035065, TESTI4035498, TESTI4035508, TESTI4035581, TESTI4035602, TESTI4035637, TESTI4035649, TESTI4035770, TESTI4035872, TESTI4035895, TESTI4035898, TESTI4035989, TESTI4036012, TESTI4036042, TESTI4036048, TESTI4036315, TESTI4036319, TESTI4036449, TESTI4036767, TESTI4036909, TESTI4037066, TESTI4037156, TESTI4037188, TESTI4037228, TESTI4037244, TESTI4037727,

[2002] TESTI4037949, TESTI4038047, TESTI4038099, TESTI4038156, TESTI4038223, TESTI4038258, TESTI4038284, TESTI4038339, TESTI4038492, TESTI4038721, TESTI4038758, TESTI4038779, TESTI4038818, TESTI4039038, TESTI4039086, TESTI4039451, TESTI4039575, TESTI4039659, TESTI4039744, TESTI4039904, TESTI4040197, TESTI4040363, TESTI4040535, TESTI4040559, TESTI4040598, TESTI4040800, TESTI4040804, TESTI4040939, TESTI4040956, TESTI4041049, TESTI4041053, TESTI4041086, TESTI4041099, TESTI4041143, TESTI4041482, TESTI4041519, TESTI4041624, TESTI4041629, TESTI4041832, TESTI4041844, TESTI4041903, TESTI4041954, TESTI4041984, TESTI4041985, TESTI4041986, TESTI4042098, TESTI4042420, TESTI4042440, TESTI4042444, TESTI4042711,

[2003] TESTI4042846, TESTI4043067, TESTI4043129, TESTI4043140, TESTI4043166, TESTI4043203, TESTI4043223, TESTI4043371, TESTI4043378, TESTI4043512, TESTI4043551, TESTI4043710, TESTI4043947, TESTI4044035, TESTI4044076, TESTI4044084, TESTI4044123, TESTI4044186, TESTI4044234, TESTI4044291, TESTI4044296, TESTI4044300, TESTI4044682, TESTI4044704, TESTI4044770, TESTI4045168, TESTI4045312, TESTI4045330, TESTI4045470, TESTI4045701, TESTI4045908, TESTI4045955, TESTI4045982, TESTI4046073, TESTI4046090, TESTI4046240, TESTI4046245, TESTI4046253, TESTI4046282, TESTI4046328, TESTI4046450, TESTI4046457, TESTI4046487, TESTI4046502, TESTI4046523, TESTI4046819, TESTI4046873, TESTI4046884, TESTI4046896, TESTI4046903,

[2004] TESTI4046962, TESTI4047069, TESTI4047119, TESTI4047305, TESTI4047328, TESTI4047437, TESTI4047569, TESTI4047746, TESTI4047808, THYMU1000002, THYMU1000010, THYMU1000017, THYMU1000025, THYMU1000029, THYMU1000032, THYMU1000033, THYMU1000041, THYMU1000060, THYMU1000074, THYMU1000083, THYMU1000098, THYMU1000103, THYMU1000105, THYMU1000109, THYMU1000136, THYMU1000142, THYMU1000144, THYMU1000158, THYMU1000176, THYMU1000179, THYMU1000191, THYMU1000198, THYMU1000217, THYMU1000240, THYMU1000242, THYMU1000291, THYMU1000316, THYMU1000318, THYMU1000329, THYMU1000331, THYMU1000336, THYMU1000366, THYMU1000374, THYMU1000382, THYMU1000393, THYMU1000399, THYMU1000426, THYMU1000428, THYMU1000440, THYMU1000459,

[2005] THYMU1000473, THYMU1000490, THYMU1000491, THYMU1000496, THYMU1000499, THYMU1000527, THYMU1000532, THYMU1000536, THYMU1000554, THYMU1000558, THYMU1000576, THYMU1000600, THYMU1000677, THYMU1000692, THYMU2000022, THYMU2000032, THYMU2000120, THYMU2000138, THYMU2000140, THYMU2000155, THYMU2000162, THYMU2000171, THYMU2000176, THYMU2000179, THYMU2000231, THYMU2000236, THYMU2000276, THYMU2000280, THYMU2000300, THYMU2000317, THYMU2000368, THYMU2000369, THYMU2000382, THYMU2000418, THYMU2000436, THYMU2000440, THYMU2000489, THYMU2000492, THYMU2000519, THYMU2000570, THYMU2000602, THYMU2000660, THYMU2000671, THYMU2000672, THYMU2000684, THYMU2000702, THYMU2000767, THYMU2000775, THYMU2000800, THYMU2000879,

[2006] THYMU2000932, THYMU2000946, THYMU2000950, THYMU2000971, THYMU2000982, THYMU2000990, THYMU2001007, THYMU2001018, THYMU2001053, THYMU2001071, THYMU2001090, THYMU2001139, THYMU2001195, THYMU2001202, THYMU2001203, THYMU2001256, THYMU2001270, THYMU2001291, THYMU2001314, THYMU2001325, THYMU2001357, THYMU2001381, THYMU2001422, THYMU2001443, THYMU2001515, THYMU2001521, THYMU2001556, THYMU2001622, THYMU2001727, THYMU2001819, THYMU2001825, THYMU2001839, THYMU2001868, THYMU2001898, THYMU2001900, THYMU2001916, THYMU2001926, THYMU2001989, THYMU2002023, THYMU2002037, THYMU2002080, THYMU2002109, THYMU2002147, THYMU2002154, THYMU2002157, THYMU2002162, THYMU2002177, THYMU2002203, THYMU2002229, THYMU2002242,

[2007] THYMU2002338, THYMU2002356, THYMU2002376, THYMU2002384, THYMU2002450, THYMU2002490, THYMU2002548, THYMU2002583, THYMU2002695, THYMU2002745, THYMU2002756, THYMU2002789, THYMU2002792, THYMU2002815, THYMU2002841, THYMU2002852, THYMU2002910, THYMU2002950, THYMU2002983, THYMU2003046, THYMU2003069, THYMU2003107, THYMU2003124, THYMU2003133, THYMU2003166, THYMU2003232, THYMU2003242, THYMU2003249, THYMU2003270, THYMU2003282, THYMU2003287, THYMU2003336, THYMU2003366, THYMU2003397, THYMU2003440, THYMU2003446, THYMU2003470, THYMU2003479, THYMU2003499, THYMU2003542, THYMU2003632, THYMU2003650, THYMU2003700, THYMU2003760, THYMU2003803, THYMU2003855, THYMU2003907, THYMU2003932, THYMU2004003, THYMU2004008,

[2008] THYMU2004042, THYMU2004108, THYMU2004111, THYMU2004123, THYMU2004139, THYMU2004152, THYMU2004169, THYMU2004284, THYMU2004320, THYMU2004336, THYMU2004344, THYMU2004356, THYMU2004410, THYMU2004452, THYMU2004508, THYMU2004512, THYMU2004635, THYMU2004639, THYMU2004668, THYMU2004677, THYMU2004688, THYMU2004693, THYMU2004733, THYMU2004835, THYMU2004843, THYMU2004906, THYMU2004916, THYMU2004986, THYMU2005001, THYMU2005003, THYMU2005046, THYMU2005134, THYMU2005156, THYMU2005190, THYMU2005225, THYMU2005240, THYMU2005246, THYMU2005270, THYMU2005283, THYMU2005303, THYMU2005321, THYMU2005356, THYMU2005369, THYMU2005439, THYMU2005480, THYMU2005482, THYMU2005507, THYMU2005545, THYMU2005546, THYMU2005574,

[2009] THYMU2005576, THYMU2005748, THYMU2005759, THYMU2005807, THYMU2005815, THYMU2005855, THYMU2005881, THYMU2005948, THYMU2005980, THYMU2005997, THYMU2006001, THYMU2006048, THYMU2006098, THYMU2006160, THYMU2006170, THYMU2006252, THYMU2006261, THYMU2006303, THYMU2006324, THYMU2006350, THYMU2006357, THYMU2006365, THYMU2006420, THYMU2006468, THYMU2006505, THYMU2006610, THYMU2006666, THYMU2006712, THYMU2006813, THYMU2006913, THYMU2006946, THYMU2006965, THYMU2007025, THYMU2007036, THYMU2007065, THYMU2007095, THYMU2007112, THYMU2007146, THYMU2007179, THYMU2007258, THYMU2007307, THYMU2007308, THYMU2007339, THYMU2007350, THYMU2007384, THYMU2007415, THYMU2007467, THYMU2007493, THYMU2007521, THYMU2007528,

[2010] THYMU2007530, THYMU2007532, THYMU2007561, THYMU2007571, THYMU2007635, THYMU2007658, THYMU2007667, THYMU2007694, THYMU2007725, THYMU2007729, THYMU2007802, THYMU2007824, THYMU2007854, THYMU2007952, THYMU2007969, THYMU2008035, THYMU2008036, THYMU2008049, THYMU2008072, THYMU2008111, THYMU2008145, THYMU2008149, THYMU2008185, THYMU2008191, THYMU2008207, THYMU2008226, THYMU2008282, THYMU2008321, THYMU2008339, THYMU2008350, THYMU2008351, THYMU2008383, THYMU2008452, THYMU2008643, THYMU2008686, THYMU2008691, THYMU2008714, THYMU2008725, THYMU2008727, THYMU2008781, THYMU2008799, THYMU2008876, THYMU2008910, THYMU2008917, THYMU2008928, THYMU2008990, THYMU2008994, THYMU2009023, THYMU2009046, THYMU2009101,

[2011] THYMU2009104, THYMU2009134, THYMU2009157, THYMU2009181, THYMU2009186, THYMU2009338, THYMU2009425, THYMU2009516, THYMU2009526, THYMU2009546, THYMU2009592, THYMU2009596, THYMU2009792, THYMU2009835, THYMU2009906, THYMU2009948, THYMU2010030, THYMU2010041, THYMU2010046, THYMU2010059, THYMU2010082, THYMU2010094, THYMU2010161, THYMU2010192, THYMU2010448, THYMU2010519, THYMU2010637, THYMU2010671, THYMU2010699, THYMU2010705, THYMU2010779, THYMU2010816, THYMU2010831, THYMU2010848, THYMU2011053, THYMU2011063, THYMU2011072, THYMU2011096, THYMU2011118, THYMU2011142, THYMU2011183, THYMU2011257, THYMU2011259, THYMU2011295, THYMU2011308, THYMU2011390, THYMU2011431, THYMU2011447, THYMU2011482, THYMU2011538,

[2012] THYMU2011548, THYMU2011551, THYMU2011564, THYMU2011573, THYMU2011585, THYMU2011621, THYMU2011666, THYMU2011736, THYMU2011785, THYMU2011806, THYMU2011852, THYMU2011875, THYMU2011881, THYMU2011937, THYMU2011939, THYMU2012002, THYMU2012024, THYMU2012073, THYMU2012104, THYMU2012113, THYMU2012273, THYMU2012401, THYMU2012492, THYMU2012507, THYMU2012565, THYMU2012574, THYMU2012625, THYMU2012631, THYMU2012665, THYMU2012690, THYMU2012701, THYMU2012807, THYMU2012826, THYMU2012882, THYMU2012891, THYMU2012902, THYMU2012919, THYMU2013023, THYMU2013047, THYMU2013051, THYMU2013089, THYMU2013136, THYMU2013170, THYMU2013364, THYMU2013386, THYMU2013426, THYMU2013578, THYMU2013648, THYMU2013705, THYMU2013757,

[2013] THYMU2013779, THYMU2013863, THYMU2013916, THYMU2013950, THYMU2013981, THYMU2014067, THYMU2014068, THYMU2014167, THYMU2014183, THYMU2014204, THYMU2014297, THYMU2014323, THYMU2014327, THYMU2014353, THYMU2014492, THYMU2014500, THYMU2014599, THYMU2014762, THYMU2014777, THYMU2014801, THYMU2014901, THYMU2014923, THYMU2015019, THYMU2015161, THYMU2015316, THYMU2015321, THYMU2015439, THYMU2015441, THYMU2015479, THYMU2015762, THYMU2015775, THYMU2015825, THYMU2015918, THYMU2015943, THYMU2015984, THYMU2016113, THYMU2016164, THYMU2016204, THYMU2016219, THYMU2016360, THYMU2016496, THYMU2016523, THYMU2016840, THYMU2016968, THYMU2017008, THYMU2017010, THYMU2017023, THYMU2017085, THYMU2017099, THYMU2017158,

[2014] THYMU2017162, THYMU2017215, THYMU2017362, THYMU2017366, THYMU2017398, THYMU2017449, THYMU2017479, THYMU2017522, THYMU2017526, THYMU2017601, THYMU2017675, THYMU2017707, THYMU2017831, THYMU2017844, THYMU2017878, THYMU2017948, THYMU2018028, THYMU2018071, THYMU2018126, THYMU2018189, THYMU2018197, THYMU2018384, THYMU2018455, THYMU2018547, THYMU2018565, THYMU2018639, THYMU2018673, THYMU2018721, THYMU2018772, THYMU2018819, THYMU2018841, THYMU2018997, THYMU2019021, THYMU2019054, THYMU2019197, THYMU2019210, THYMU2019364, THYMU2019436, THYMU2019442, THYMU2019587, THYMU2019599, THYMU2019686, THYMU2019813, THYMU2020198, THYMU2020289, THYMU2020491, THYMU2020499, THYMU2020560, THYMU2020667, THYMU2020830,

[2015] THYMU2020883, THYMU2020959, THYMU2021361, THYMU2021509, THYMU2021597, THYMU2021684, THYMU2021714, THYMU2022213, THYMU2022289, THYMU2022660, THYMU2022854, THYMU2022922, THYMU2023209, THYMU2023264, THYMU2023576, THYMU2023711, THYMU2023900, THYMU2023943, THYMU2023967, THYMU2024071, THYMU2024121, THYMU2024185, THYMU2024207, THYMU2024616, THYMU2024684, THYMU2024748, THYMU2025042, THYMU2025189, THYMU2025319, THYMU2025325, THYMU2025406, THYMU2025557, THYMU2025572, THYMU2025707, THYMU2025849, THYMU2025909, THYMU2025939, THYMU2026182, THYMU2026350, THYMU2026530, THYMU2026531, THYMU2026835, THYMU2026904, THYMU2027053, THYMU2027168, THYMU2027249, THYMU2027282, THYMU2027497, THYMU2027695, THYMU2027734,

[2016] THYMU2027894, THYMU2027975, THYMU2027996, THYMU2028041, THYMU2028368, THYMU2028379, THYMU2028394, THYMU2028412, THYMU2028629, THYMU2028632, THYMU2028724, THYMU2028739, THYMU2028942, THYMU2028978, THYMU2029134, THYMU2029578, THYMU2029676, THYMU2029688, THYMU2029788, THYMU2030068, THYMU2030226, THYMU2030264, THYMU2030462, THYMU2030543, THYMU2030637, THYMU2030655, THYMU2030796, THYMU2030912, THYMU2030982, THYMU2031046, THYMU2031139, THYMU2031218, THYMU2031249, THYMU2031258, THYMU2031341, THYMU2031368, THYMU2031579, THYMU2031847, THYMU2031890, THYMU2031994, THYMU2032014, THYMU2032035, THYMU2032080, THYMU2032150, THYMU2032155, THYMU2032358, THYMU2032437, THYMU2032601, THYMU2032655, THYMU2032696,

[2017] THYMU2032715, THYMU2032732, THYMU2032976, THYMU20.33053, THYMU2033059, THYMU2033070, THYMU2033079, THYMU2033085, THYMU2033104, THYMU2033227, THYMU2033263, THYMU2033308, THYMU2033401, THYMU2033583, THYMU2033755, THYMU2033787, THYMU2033816, THYMU2034182, THYMU2034279, THYMU2034314, THYMU2034338, THYMU2034374, THYMU2034647, THYMU2034917, THYMU2035064, THYMU2035078, THYMU2035101, THYMU2035319, THYMU2035321, THYMU2035388, THYMU2035400, THYMU2035554, THYMU2035710, THYMU2035735, THYMU2036058, THYMU2036105, THYMU2036207, THYMU2036215, THYMU2036252, THYMU2036265, THYMU2036366, THYMU2036459, THYMU2036461, THYMU2036604, THYMU2036653, THYMU2037081, THYMU2037208, THYMU2037226, THYMU2037233, THYMU2037234,

[2018] THYMU2037348, THYMU2037406, THYMU2037965, THYMU2038058, THYMU2038189, THYMU2038199, THYMU2038220, THYMU2038301, THYMU2038369, THYMU2038389, THYMU2038615, THYMU2038636, THYMU2038739, THYMU2038772, THYMU2038797, THYMU2038906, THYMU2039305, THYMU2039315, THYMU2039334, THYMU2039350, THYMU2039411, THYMU2039634, THYMU2039719, THYMU2039780, THYMU2039788, THYMU2039989, THYMU2040029, THYMU2040110, THYMU2040114, THYMU2040140, THYMU2040412, THYMU2040427, THYMU2040824, THYMU2040925, THYMU2041007, THYMU2041015, THYMU2041252, THYMU3000028, THYMU3000036, THYMU3000037, THYMU3000082, THYMU3000194, THYMU3000224, THYMU3000269, THYMU3000306, THYMU3000360, THYMU3000390, THYMU3000420, THYMU3000490, THYMU3000504,

[2019] THYMU3000542, THYMU3000655, THYMU3000776, THYMU3000826, THYMU3000841, THYMU3001077, THYMU3001082, THYMU3001083, THYMU3001133, THYMU3001151, THYMU3001379, THYMU3001472, THYMU3001593, THYMU3001883, THYMU3001939, THYMU3001991, THYMU3002452, THYMU3002578, THYMU3002661, THYMU3003007, THYMU3003092, THYMU3003212, THYMU3003309, THYMU3003350, THYMU3003403, THYMU3003565, THYMU3003763, THYMU3003865, THYMU3003958, THYMU3003965, THYMU3004157, THYMU3004628, THYMU3004632, THYMU3004835, THYMU3004866, THYMU3005050, THYMU3005378, THYMU3005407, THYMU3005415, THYMU3005427, THYMU3005482, THYMU3005491, THYMU3005629, THYMU3005696, THYMU3006118, THYMU3006132, THYMU3006168, THYMU3006172, THYMU3006371, THYMU3006485,

[2020] THYMU3006640, THYMU3006767, THYMU3006811, THYMU3006963, THYMU3007137, THYMU3007308, THYMU3007368, THYMU3007423, THYMU3007559, THYMU3007845, THYMU3008060, THYMU3008105, THYMU3008136, THYMU3008171, THYMU3008216, THYMU3008436, THYMU3008672, THYMU3008883, THYMU3008935, THYMU3009006, THYMU3009255, THYMU3009391, THYMU3009643, THYMU3009755, THYMU3010247, THYMU3011012, THYMU3011081, THYMU3011244, THYMU3011360, THYMU3011534, THYMU3011543, THYMU3011556, THYMU3011717, THYMU3011827, THYMU3012402, THYMU3012907, THYMU3012983, THYMU3013114, THYMU3013197, THYMU3013241, THYMU3013386, THYMU3013470, THYMU3013785, THYMU3013897, THYMU3014038, THYMU3014173, THYMU3014372, THYMU3014555, THYMU3014620, THYMU3014701,

[2021] THYMU3015042, THYMU3015457, THYMU3015571, THYMU3015592, THYMU3015625, THYMU3015647, THYMU3015962, THYMU3016022, THYMU3016518, THYMU3016797, THYMU3016822, THYMU3016850, THYMU3017562, THYMU3017688, THYMU3017689, THYMU3017761, THYMU3018151, THYMU3018896, THYMU3019095, THYMU3019476, THYMU3019605, THYMU3019916, THYMU3020221, THYMU3020595, THYMU3020713, THYMU3020856, THYMU3020869, THYMU3020970, THYMU3021404, THYMU3021586, THYMU3021755, THYMU3021900, THYMU3022211, THYMU3022434, THYMU3022528, THYMU3022668, THYMU3022982, THYMU3023107, THYMU3023211, THYMU3023216, THYMU3023394, THYMU3023400, THYMU3023797, THYMU3024164, THYMU3024339, THYMU3024602, THYMU3024879, THYMU3025118, THYMU3025313, THYMU3025642,

[2022] THYMU3025683, THYMU3025772, THYMU3025865, THYMU3026000, THYMU3026350, THYMU3026479, THYMU3026532, THYMU3026783, THYMU3026869, THYMU3027251, THYMU3027540, THYMU3027655, THYMU3027671, THYMU3028075, THYMU3028410, THYMU3028461, THYMU3028702, THYMU3029188, THYMU3029318, THYMU3029421, THYMU3029719, THYMU3029774, THYMU3029832, THYMU3030072, THYMU3030231, THYMU3030706, THYMU3030710, THYMU3030752, THYMU3031146, THYMU3031402, THYMU3031610, THYMU3031612, THYMU3031868, THYMU3031878, THYMU3032032, THYMU3032867, THYMU3033402, THYMU3033626, THYMU3033630, THYMU3033649, THYMU3033754, THYMU3033759, THYMU3034078, THYMU3034099, THYMU3034453, THYMU3034616, THYMU3034671, THYMU3034853, THYMU3034867, THYMU3034983,

[2023] THYMU3036200, THYMU3036310, THYMU3036934, THYMU3036953, THYMU3037052, THYMU3037192, THYMU3037617, THYMU3037772, THYMU3037827, THYMU3037836, THYMU3037856, THYMU3037867, THYMU3037909, THYMU3037980, THYMU3038158, THYMU3038167, THYMU3038214, THYMU3038266, THYMU3038328, THYMU3038347, THYMU3038375, THYMU3038603, THYMU3038687, THYMU3038759, THYMU3038879, THYMU3038970, THYMU3039807, THYMU3039846, THYMU3040068, THYMU3040126, THYMU3040146, THYMU3040168, THYMU3040172, THYMU3040725, THYMU3040746, THYMU3040816, THYMU3040829, THYMU3040830, THYMU3040986, THYMU3041354, THYMU3041386, THYMU3041428, THYMU3041573, THYMU3041603, THYMU3041736, THYMU3041918, THYMU3042075, THYMU3042321, THYMU3042372, THYMU3042758,

[2024] THYMU3042929, THYMU3043200, THYMU3043327, THYMU3043482, THYMU3043597, THYMU3043688, THYMU3043779, THYMU3043883, THYMU3043993, THYMU3044175, THYMU3044188, THYMU3044441, THYMU3044445, THYMU3045510, THYMU3045673, THYMU3045692, THYMU3045704, THYMU3046140, THYMU3046350, THYMU3046360, THYMU3046856, THYMU3047115, THYMU3047144, THYMU3047156, THYMU3047366, THYMU3047513, THYMU3047542, THYMU3047760, THYMU3047891, TKIDN1000001, TKIDN1000044, TKIDN1000062, TKIDN1000066, TKIDN1000164, TKIDN1000171, TKIDN1000192, TKIDN2000127, TKIDN2000240, TKIDN2000319, TKIDN2000464, TKIDN2000521, TKIDN2000701, TKIDN2001529, TKIDN2001662, TKIDN2002318, TKIDN2002329, TKIDN2002424, TKIDN2002632, TKIDN2003044, TKIDN2003059,

[2025] TKIDN2003062, TKIDN2003078, TKIDN2003366, TKIDN2003396, TKIDN2003413, TKIDN2003597, TKIDN2003601, TKIDN2004185, TKIDN2004386, TKIDN2004458, TKIDN2004748, TKIDN2005487, TKIDN2005721, TKIDN2005934, TKIDN2005947, TKIDN2005956, TKIDN2006525, TKIDN2006761, TKIDN2006852, TKIDN2007605, TKIDN2007667, TKIDN2007828, TKIDN2008176, TKIDN2008778, TKIDN2009092, TKIDN2009330, TKIDN2009481, TKIDN2009641, TKIDN2009794, TKIDN2009889, TKIDN2010200, TKIDN2010232, TKIDN2010278, TKIDN2010602, TKIDN2010812, TKIDN2010934, TKIDN2011051, TKIDN2011160, TKIDN2011289, TKIDN2011324, TKIDN2012034, TKIDN2012771, TKIDN2012824, TKIDN2013134, TKIDN2013287, TKIDN2014570, TKIDN2014757, TKIDN2014771, TKIDN2014964, TKIDN2015025,

[2026] TKIDN2015071, TKIDN2015161, TKIDN2015263, TKIDN2015285, TKIDN2015423, TKIDN2015788, TKIDN2016309, TKIDN2016399, TKIDN2016846, TKIDN2018926, TKIDN2019116, TLIVE2000023, TLIVE2000142, TLIVE2000292, TLIVE2000762, TLIVE2000979, TLIVE2001616, TLIVE2001684, TLIVE2001828, TLIVE2001927, TLIVE2002046, TLIVE2002336, TLIVE2002338, TLIVE2002562, TLIVE2002690, TLIVE2002882, TLIVE2003197, TLIVE2003200, TLIVE2003225, TLIVE2003381, TLIVE2003737, TLIVE2003961, TLIVE2004110, TLIVE2004320, TLIVE2004331, TLIVE2004601, TLIVE2005180, TLIVE2005390, TLIVE2005516, TLIVE2005731, TLIVE2005866, TLIVE2006236, TLIVE2006359, TLIVE2006529, TLIVE2006621, TLIVE2006733, TLIVE2007000, TLIVE2007016, TLIVE2007132, TLIVE2007192,

[2027] TLIVE2007528, TLIVE2007607, TLIVE2007736, TLIVE2007816, TLIVE2007919, TLIVE2008083, TLIVE2008213, TLIVE2008221, TLIVE2008229, TLIVE2008712, TLIVE2008797, TLIVE2009087, TLIVE2009163, TLIVE2009489, TLIVE2009541, TLUNG2000179, TOVAR2000476, TOVAR2000575, TOVAR2000649, TOVAR2000904, TOVAR2001281, TOVAR2001556, TOVAR2001730, TOVAR2002247, TOVAR2002514, TOVAR2002549, TOVAR2002800, TRACH1000011, TRACH1000018, TRACH1000030, TRACH1000038, TRACH1000057, TRACH1000063, TRACH1000074, TRACH1000100, TRACH1000106, TRACH1000125, TRACH1000140, TRACH1000144, TRACH1000181, TRACH1000193, TRACH1000205, TRACH1000212, TRACH1000240, TRACH2000002, TRACH2000015, TRACH2000024, TRACH2000032, TRACH2000045, TRACH2000047,

[2028] TRACH2000081, TRACH2000083, TRACH2000148, TRACH2000185, TRACH2000235, TRACH2000237, TRACH2000243, TRACH2000248, TRACH2000250, TRACH2000259, TRACH2000272, TRACH2000282, TRACH2000287, TRACH2000289, TRACH2000306, TRACH2000312, TRACH2000336, TRACH2000359, TRACH2000393, TRACH2000411, TRACH2000420, TRACH2000461, TRACH2000472, TRACH2000496, TRACH2000497, TRACH2000502, TRACH2000522, TRACH2000559, TRACH2000660, TRACH2000665, TRACH2000675, TRACH2000677, TRACH2000702, TRACH2000703, TRACH2000767, TRACH2000775, TRACH2000807, TRACH2000862, TRACH2000873, TRACH2000894, TRACH2000898, TRACH2000920, TRACH2000923, TRACH2000926, TRACH2000944, TRACH2000959, TRACH2000972, TRACH2000981, TRACH2000986, TRACH2001021,

[2029] TRACH2001037, TRACH2001060, TRACH2001085, TRACH2001101, TRACH2001121, TRACH2001147, TRACH2001154, TRACH2001188, TRACH2001192, TRACH2001249, TRACH2001275, TRACH2001289, TRACH2001314, TRACH2001335, TRACH2001339, TRACH2001341, TRACH2001347, TRACH2001395, TRACH2001400, TRACH2001403, TRACH2001416, TRACH2001428, TRACH2001432, TRACH2001443, TRACH2001463, TRACH2001474, TRACH2001478, TRACH2001525, TRACH2001532, TRACH2001549, TRACH2001592, TRACH2001596, TRACH2001607, TRACH2001612, TRACH2001621, TRACH2001646, TRACH2001651, TRACH2001684, TRACH2001898, TRACH2001933, TRACH2001968, TRACH2001996, TRACH2002054, TRACH2002092, TRACH2002100, TRACH2002138, TRACH2002333, TRACH2002537, TRACH2002664, TRACH2002784,

[2030] TRACH2002803, TRACH2002840, TRACH2002847, TRACH2002853, TRACH2002862, TRACH2002954, TRACH2002960, TRACH2002988, TRACH2003070, TRACH2003272, TRACH2003323, TRACH2003347, TRACH2003484, TRACH2003516, TRACH2003605, TRACH2003736, TRACH2003759, TRACH2003941, TRACH2004039, TRACH2004054, TRACH2004087, TRACH2004109, TRACH2004170, TRACH2004183, TRACH2004251, TRACH2004292, TRACH2004336, TRACH2004399, TRACH2004428, TRACH2004458, TRACH2004499, TRACH2004521, TRACH2004570, TRACH2004845, TRACH2004887, TRACH2004950, TRACH2005004, TRACH2005017, TRACH2005066, TRACH2005159, TRACH2005314, TRACH2005444, TRACH2005541, TRACH2005666, TRACH2005698, TRACH2005710, TRACH2005720, TRACH2005769, TRACH2005796, TRACH2005800,

[2031] TRACH2005811, TRACH2006015, TRACH2006049, TRACH2006097, TRACH2006194, TRACH2006327, TRACH2006331, TRACH2006378, TRACH2006387, TRACH2006528, TRACH2006670, TRACH2006762, TRACH2006866, TRACH2006870, TRACH2006918, TRACH2007059, TRACH2007324, TRACH2007358, TRACH2007399, TRACH2007483, TRACH2007542, TRACH2007577, TRACH2007674, TRACH2007676, TRACH2007688, TRACH2007733, TRACH2007816, TRACH2007894, TRACH2007969, TRACH2007988, TRACH2008112, TRACH2008113, TRACH2008127, TRACH2008130, TRACH2008278, TRACH2008300, TRACH2008472, TRACH2008478, TRACH2008540, TRACH2008583, TRACH2008597, TRACH2008716, TRACH2008820, TRACH2008891, TRACH2008921, TRACH2009006, TRACH2009060, TRACH2009107, TRACH2009123, TRACH2009268,

[2032] TRACH2009291, TRACH2009310, TRACH2009340, TRACH2009348, TRACH2009358, TRACH2009661, TRACH2009730, TRACH2009743, TRACH2009754, TRACH2009851, TRACH2009862, TRACH2009934, TRACH2010159, TRACH2010218, TRACH2010251, TRACH2010272, TRACH2010317, TRACH2010419, TRACH2010451, TRACH2010505, TRACH2010587, TRACH2010600, TRACH2010634, TRACH2010639, TRACH2010677, TRACH2010698, TRACH2010771, TRACH2010824, TRACH2010883, TRACH2010965, TRACH2010974, TRACH2011057, TRACH2011093, TRACH2011113, TRACH2011290, TRACH2011302, TRACH2011500, TRACH2011574, TRACH2011894, TRACH2011956, TRACH2012000, TRACH2012138, TRACH2012242, TRACH2012298, TRACH2012370, TRACH2012376, TRACH2012387, TRACH2012497, TRACH2012536, TRACH2012562,

[2033] TRACH2012742, TRACH2012811, TRACH2012823, TRACH2012918, TRACH2013081, TRACH2013123, TRACH2013265, TRACH2013369, TRACH2013450, TRACH2013495, TRACH2013552, TRACH2013585, TRACH2013671, TRACH2013726, TRACH2013902, TRACH2013928, TRACH2013982, TRACH2013991, TRACH2014018, TRACH2014045, TRACH2014046, TRACH2014077, TRACH2014082, TRACH2014124, TRACH2014268, TRACH2014284, TRACH2014337, TRACH2014356, TRACH2014371, TRACH2014442, TRACH2014483, TRACH2014495, TRACH2014544, TRACH2014573, TRACH2014725, TRACH2014760, TRACH2014815, TRACH2014839, TRACH2014938, TRACH2014950, TRACH2014972, TRACH2014974, TRACH2014997, TRACH2015180, TRACH2015243, TRACH2015316, TRACH2015381, TRACH2015486, TRACH2015654, TRACH2015823,

[2034] TRACH2015824, TRACH2015939, TRACH2015987, TRACH2016080, TRACH2016131, TRACH2016286, TRACH2016317, TRACH2016347, TRACH2016380, TRACH2016384, TRACH2016410, TRACH2016481, TRACH2016498, TRACH2016533, TRACH2016551, TRACH2016554, TRACH2016651, TRACH2016690, TRACH2016709, TRACH2016722, TRACH2016835, TRACH2016980, TRACH2017086, TRACH2017368, TRACH2017498, TRACH2017609, TRACH2017949, TRACH2017965, TRACH2017980, TRACH2018034, TRACH2018084, TRACH2018262, TRACH2018273, TRACH2018278, TRACH2018317, TRACH2018345, TRACH2018380, TRACH2018446, TRACH2018449, TRACH2018512, TRACH2018646, TRACH2018663, TRACH2018718, TRACH2018835, TRACH2018882, TRACH2018914, TRACH2018950, TRACH2019024, TRACH2019046, TRACH2019080,

[2035] TRACH2019151, TRACH2019154, TRACH2019176, TRACH2019248, TRACH2019309, TRACH2019425, TRACH2019473, TRACH2019602, TRACH2019661, TRACH2019672, TRACH2019673, TRACH2019844, TRACH2019879, TRACH2020048, TRACH2020336, TRACH2020525, TRACH2021398, TRACH2021622, TRACH2021635, TRACH2021964, TRACH2022042, TRACH2022113, TRACH2022253, TRACH2022425, TRACH2022553, TRACH2022649, TRACH2022839, TRACH2023246, TRACH2023299, TRACH2023306, TRACH2023416, TRACH2023479, TRACH2023684, TRACH2023860, TRACH2023876, TRACH2024139, TRACH2024187, TRACH2024271, TRACH2024293, TRACH2024408, TRACH2024512, TRACH2024559, TRACH2024647, TRACH2024651, TRACH2024730, TRACH2024735, TRACH2024749, TRACH2024821, TRACH2025057, TRACH2025084,

[2036] TRACH2025155, TRACH2025224, TRACH2025344, TRACH2025379, TRACH2025507, TRACH2025535, TRACH2025569, TRACH2025705, TRACH2025749, TRACH2025753, TRACH2025810, TRACH2025853, TRACH2025911, TRACH2025932, TRACH3000014, TRACH3000017, TRACH3000043, TRACH3000134, TRACH3000180, TRACH3000342, TRACH3000420, TRACH3000515, TRACH3000530, TRACH3000548, TRACH3000558, TRACH3000586, TRACH3000692, TRACH3000780, TRACH3000892, TRACH3000926, TRACH3001119, TRACH3001443, TRACH3001550, TRACH3001759, TRACH3002064, TRACH3002107, TRACH3002168, TRACH3002188, TRACH3002192, TRACH3002245, TRACH3002293, TRACH3002533, TRACH3002561, TRACH3002567, TRACH3002605, TRACH3002650, TRACH3002752, TRACH3002866, TRACH3002871, TRACH3002876,

[2037] TRACH3002890, TRACH3003009, TRACH3003037, TRACH3003357, TRACH3003379, TRACH3003547, TRACH3003586, TRACH3003683, TRACH3003780, TRACH3003805, TRACH3003872, TRACH3004068, TRACH3004113, TRACH3004288, TRACH3004303, TRACH3004412, TRACH3004424, TRACH3004456, TRACH3004537, TRACH3004596, TRACH3004651, TRACH3004652, TRACH3004671, TRACH3004721, TRACH3004747, TRACH3004760, TRACH3004783, TRACH3004786, TRACH3004840, TRACH3004931, TRACH3004934, TRACH3005072, TRACH3005085, TRACH3005102, TRACH3005173, TRACH3005191, TRACH3005211, TRACH3005274, TRACH3005294, TRACH3005479, TRACH3005549, TRACH3005699, TRACH3005702, TRACH3005808, TRACH3005852, TRACH3005896, TRACH3006038, TRACH3006149, TRACH3006228, TRACH3006264,

[2038] TRACH3006336, TRACH3006379, TRACH3006392, TRACH3006395, TRACH3006397, TRACH3006412, TRACH3006470, TRACH3006589, TRACH3006626, TRACH3006699, TRACH3006717, TRACH3006800, TRACH3006889, TRACH3006985, TRACH3007097, TRACH3007268, TRACH3007274, TRACH3007277, TRACH3007391, TRACH3007479, TRACH3007541, TRACH3007595, TRACH3007625, TRACH3007627, TRACH3007689, TRACH3007766, TRACH3007866, TRACH3007995, TRACH3008042, TRACH3008061, TRACH3008093, TRACH3008201, TRACH3008508, TRACH3008535, TRACH3008629, TRACH3008632, TRACH3008688, TRACH3008697, TRACH3008713, TRACH3008887, TRACH3008902, TRACH3008990, TRACH3009001, TRACH3009008, TRACH3009059, TRACH3009061, TRACH3009148, TRACH3009455, TRACH3009701, TRACH3009715,

[2039] TRACH3009894, TRACH3009956, TRACH3010079, TRACH3010167, TRACH3010331, TRACH3010342, TRACH3010382, TRACH3010757, TRACH3010901, TRACH3011004, TRACH3011082, TRACH3011184, TRACH3011282, TRACH3011313, TRACH3011454, TRACH3011485, TRACH3011503, TRACH3011538, TRACH3011542, TRACH3012106, TRACH3012161, TRACH3012232, TRACH3012261, TRACH3012445, TRACH3012460, TRACH3012659, TRACH3012718, TRACH3012864, TRACH3012891, TRACH3012942, TRACH3013043, TRACH3013072, TRACH3013426, TRACH3013454, TRACH3013558, TRACH3013684, TRACH3013693, TRACH3013700, TRACH3013766, TRACH3013900, TRACH3013926, TRACH3014063, TRACH3014183, TRACH3014215, TRACH3014316, TRACH3014415, TRACH3014580, TRACH3014641, TRACH3014885, TRACH3015136,

[2040] TRACH3015336, TRACH3015346, TRACH3015354, TRACH3015467, TRACH3015626, TRACH3015951, TRACH3016051, TRACH3016120, TRACH3016264, TRACH3016277, TRACH3016368, TRACH3016455, TRACH3016614, TRACH3016805, TRACH3016992, TRACH3017171, TRACH3017409, TRACH3017934, TRACH3018108, TRACH3018191, TRACH3018240, TRACH3018261, TRACH3018519, TRACH3018524, TRACH3018606, TRACH3018783, TRACH3018907, TRACH3018933, TRACH3018943, TRACH3019018, TRACH3019058, TRACH3019142, TRACH3019290, TRACH3019347, TRACH3019370, TRACH3019447, TRACH3019598, TRACH3019621, TRACH3019662, TRACH3019807, TRACH3019924, TRACH3019977, TRACH3020137, TRACH3020410, TRACH3020563, TRACH3020605, TRACH3020750, TRACH3020769, TRACH3020928, TRACH3020930,

[2041] TRACH3021023, TRACH3021066, TRACH3021212, TRACH3021335, TRACH3021373, TRACH3021544, TRACH3021778, TRACH3021834, TRACH3021883, TRACH3022170, TRACH3022198, TRACH3022296, TRACH3022482, TRACH3022732, TRACH3022758, TRACH3022875, TRACH3022910, TRACH3022960, TRACH3023063, TRACH3023203, TRACH3023242, TRACH3023373, TRACH3023516, TRACH3023752, TRACH3023945, TRACH3023960, TRACH3024020, TRACH3024081, TRACH3024342, TRACH3024423, TRACH3024428, TRACH3024512, TRACH3024671, TRACH3024823, TRACH3025302, TRACH3025316, TRACH3025346, TRACH3025520, TRACH3026148, TRACH3026283, TRACH3026299, TRACH3026303, TRACH3026542, TRACH3026650, TRACH3026676, TRACH3026744, TRACH3026949, TRACH3027229, TRACH3027527, TRACH3027681,

[2042] TRACH3027701, TRACH3027885, TRACH3028031, TRACH3028164, TRACH3028180, TRACH3028195, TRACH3028441, TRACH3028597, TRACH3028678, TRACH3028837, TRACH3028847, TRACH3028855, TRACH3029139, TRACH3029329, TRACH3029451, TRACH3029462, TRACH3029520, TRACH3029592, TRACH3029629, TRACH3029665, TRACH3029670, TRACH3029800, TRACH3030111, TRACH3030130, TRACH3030176, TRACH3030252, TRACH3030725, TRACH3030855, TRACH3030883, TRACH3031316, TRACH3031400, TRACH3031463, TRACH3031479, TRACH3031518, TRACH3031660, TRACH3031678, TRACH3031936, TRACH3032044, TRACH3032065, TRACH3032150, TRACH3032372, TRACH3032480, TRACH3032570, TRACH3032755, TRACH3032827, TRACH3032873, TRACH3033535, TRACH3033680, TRACH3033868, TRACH3034145,

[2043] TRACH3034414, TRACH3034488, TRACH3034680, TRACH3034731, TRACH3034745, TRACH3034762, TRACH3034903, TRACH3035187, TRACH3035199, TRACH3035235, TRACH3035451, TRACH3035482, TRACH3035526, TRACH3036004, TRACH3036103, TRACH3036193, TRACH3036207, TRACH3036278, TRACH3036309, TRACH3036456, TRACH3036609, TRACH3036638, TRACH3036683, TRACH3036750, TRACH3036792, TRACH3036843, TRACH3036897, TRACH3036932, TRACH3036997, TRACH3037063, TRACH3037067, TRACH3037267, TRACH3037288, TRACH3037505, TRACH3037573, TRACH3037696, TRACH3037897, TRACH3038086, TRACH3038399, TSTOM1000135, TSTOM1000186, TSTOM2000139, TSTOM2000235, TSTOM2000315, TSTOM2000442, TSTOM2000553, TSTOM2000569, TSTOM2000588, TSTOM2001195, TSTOM2001274,

[2044] TSTOM2001571, TSTOM2001996, TSTOM2002265, TSTOM2002505, TSTOM2002561, TSTOM2002611, TSTOM2002672, TSTOM2002682, TUTER1000014, TUTER1000122, TUTER1000137, TUTER2000057, TUTER2000283, TUTER2000425, TUTER2000904, TUTER2000916, TUTER2001286, TUTER2001341, TUTER2001387, TUTER2001433, TUTER2001461, TUTER2002028, TUTER2002074, TUTER2002158, TUTER2002228, TUTER2002323, TUTER2002356, TUTER2002729, UMVEN1000122, UMVEN1000143, UMVEN1000156, UMVEN1000186, UMVEN2000046, UMVEN2000069, UMVEN2000121, UMVEN2000152, UMVEN2000354, UTERU1000008, UTERU1000015, UTERU1000024, UTERU1000031, UTERU1000032, UTERU1000057, UTERU1000065, UTERU1000077, UTERU1000093, UTERU1000096, UTERU1000106, UTERU1000109, UTERU1000131,

[2045] UTERU1000138, UTERU1000148, UTERU1000160, UTERU1000183, UTERU1000187, UTERU1000192, UTERU1000249, UTERU1000337, UTERU1000339, UTERU1000384, UTERU2000023, UTERU2000047, UTERU2000074, UTERU2000099, UTERU2000154, UTERU2000197, UTERU2000218, UTERU2000238, UTERU2000243, UTERU2000260, UTERU2000263, UTERU2000300, UTERU2000329, UTERU2000338, UTERU2000349, UTERU2000377, UTERU2000393, UTERU2000418, UTERU2000424, UTERU2000465, UTERU2000485, UTERU2000517, UTERU2000524, UTERU2000537, UTERU2000539, UTERU2000541, UTERU2000542, UTERU2000546, UTERU2000550, UTERU2000569, UTERU2000607, UTERU2000629, UTERU2000649, UTERU2000663, UTERU2000696, UTERU2000794, UTERU2000830, UTERU2000844, UTERU2000922, UTERU2000925,

[2046] UTERU2001024, UTERU2001110, UTERU2001176, UTERU2001281, UTERU2001389, UTERU2001409, UTERU2001412, UTERU2001504, UTERU2001607, UTERU2001658, UTERU2001747, UTERU2001876, UTERU2002001, UTERU2002011, UTERU2002176, UTERU2002198, UTERU2002294, UTERU2002332, UTERU2002410, UTERU2002473, UTERU2002547, UTERU2002662, UTERU2002693, UTERU2002733, UTERU2002736, UTERU2002737, UTERU2002826, UTERU2002841, UTERU2002964, UTERU2002993, UTERU2003035, UTERU2003057, UTERU2003126, UTERU2003135, UTERU2003321, UTERU2003399, UTERU2003411, UTERU2003456, UTERU2003577, UTERU2003704, UTERU2003926, UTERU2003973, UTERU2004015, UTERU2004037, UTERU2004039, UTERU2004061, UTERU2004073, UTERU2004163, UTERU2004197, UTERU2004299,

[2047] UTERU2004461, UTERU2004520, UTERU2004564, UTERU2004688, UTERU2004698, UTERU2004807, UTERU2004861, UTERU2004929, UTERU2005004, UTERU2005050, UTERU2005069, UTERU2005074, UTERU2005179, UTERU2005292, UTERU2005346, UTERU2005354, UTERU2005446, UTERU2005449, UTERU2005450, UTERU2005533, UTERU2005601, UTERU2005621, UTERU2005664, UTERU2005822, UTERU2005903, UTERU2005905, UTERU2006103, UTERU2006115, UTERU2006137, UTERU2006182, UTERU2006400, UTERU2006412, UTERU2006429, UTERU2006486, UTERU2006524, UTERU2006547, UTERU2006568, UTERU2006593, UTERU2006643, UTERU2006651, UTERU2006705, UTERU2006899, UTERU2007004, UTERU2007075, UTERU2007081, UTERU2007128, UTERU2007253, UTERU2007267, UTERU2007444, UTERU2007499,

[2048] UTERU2007639, UTERU2007724, UTERU2007924, UTERU2007942, UTERU2008018, UTERU2008019, UTERU2008040, UTERU2008077, UTERU2008130, UTERU2008302, UTERU2008347, UTERU2008426, UTERU2008516, UTERU2008561, UTERU2008653, UTERU2008705, UTERU2008707, UTERU2008747, UTERU2008785, UTERU2008845, UTERU2008901, UTERU2008930, UTERU2008938, UTERU2008939, UTERU2008962, UTERU2009094, UTERU2009120, UTERU2009131, UTERU2009147, UTERU2009206, UTERU2009283, UTERU2009335, UTERU2009414, UTERU2009435, UTERU2009483, UTERU2009510, UTERU2009538, UTERU2009540, UTERU2009776, UTERU2009904, UTERU2009951, UTERU2009972, UTERU2010115, UTERU2010124, UTERU2010164, UTERU2010226, UTERU2010231, UTERU2010304, UTERU2010320, UTERU2010431,

[2049] UTERU2010525, UTERU2010651, UTERU2010724, UTERU2010747, UTERU2011195, UTERU2011199, UTERU2011220, UTERU2011261, UTERU2011287, UTERU2011410, UTERU2011574, UTERU2011621, UTERU2011657, UTERU2011806, UTERU2011811, UTERU2011897, UTERU2011906, UTERU2011962, UTERU2011968, UTERU2012031, UTERU2012101, UTERU2012114, UTERU2012230, UTERU2012252, UTERU2012286, UTERU2012333, UTERU2012407, UTERU2012526, UTERU2012581, UTERU2012610, UTERU2012615, UTERU2012688, UTERU2012703, UTERU2012715, UTERU2012741, UTERU2012767, UTERU2012786, UTERU2012856, UTERU2012890, UTERU2012938, UTERU2012976, UTERU2013048, UTERU2013078, UTERU2013231, UTERU2013262, UTERU2013280, UTERU2013322, UTERU2013483, UTERU2013491, UTERU2013502,

[2050] UTERU2013586, UTERU2013926, UTERU2013976, UTERU2014001, UTERU2014024, UTERU2014167, UTERU2014223, UTERU2014398, UTERU2014464, UTERU2014548, UTERU2014601, UTERU2014631, UTERU2014668, UTERU2014678, UTERU2014728, UTERU2014898, UTERU2014998, UTERU2015062, UTERU2015087, UTERU2015190, UTERU2015198, UTERU2015202, UTERU2015405, UTERU2015640, UTERU2015653, UTERU2015830, UTERU2015880, UTERU2016147, UTERU2016157, UTERU2016426, UTERU2016464, UTERU2016669, UTERU2016757, UTERU2016761, UTERU2016799, UTERU2016822, UTERU2016896, UTERU2016902, UTERU2016979, UTERU2016981, UTERU2017123, UTERU2017303, UTERU2017421, UTERU2017492, UTERU2017613, UTERU2017623, UTERU2017632, UTERU2017761, UTERU2017762, UTERU2017810,

[2051] UTERU2017988, UTERU2018127, UTERU2018180, UTERU2018200, UTERU2018333, UTERU2018364, UTERU2018514, UTERU2018522, UTERU2018523, UTERU2018544, UTERU2018566, UTERU2018609, UTERU2018674, UTERU2018712, UTERU2018784, UTERU2018789, UTERU2018811, UTERU2018867, UTERU2018881, UTERU2018955, UTERU2019005, UTERU2019038, UTERU2019096, UTERU2019163, UTERU2019257, UTERU2019453, UTERU2019491, UTERU2019534, UTERU2019681, UTERU2019706, UTERU2019710, UTERU2019940, UTERU2019959, UTERU2019964, UTERU2020226, UTERU2020242, UTERU2020292, UTERU2020351, UTERU2020491, UTERU2020718, UTERU2021163, UTERU2021380, UTERU2021649, UTERU2021820, UTERU2022020, UTERU2022773, UTERU2022955, UTERU2022981, UTERU2023039, UTERU2023045,

[2052] UTERU2023175, UTERU2023262, UTERU2023550, UTERU2023651, UTERU2023687, UTERU2023712, UTERU2023941, UTERU2024002, UTERU2024042, UTERU2024141, UTERU2024481, UTERU2024656, UTERU2024758, UTERU2024820, UTERU2024881, UTERU2024969, UTERU2025025, UTERU2025041, UTERU2025301, UTERU2025366, UTERU2025415, UTERU2025579, UTERU2025645, UTERU2025891, UTERU2026025, UTERU2026090, UTERU2026142, UTERU2026203, UTERU2026775, UTERU2027023, UTERU2027369, UTERU2027591, UTERU2027616, UTERU2027941, UTERU2028377, UTERU2028734, UTERU2029503, UTERU2029660, UTERU2029742, UTERU2029953, UTERU2030213, UTERU2030270, UTERU2030280, UTERU2031060, UTERU2031084, UTERU2031268, UTERU2031295, UTERU2031521, UTERU2031611, UTERU2031703,

[2053] UTERU2031834, UTERU2031851, UTERU2032075, UTERU2032220, UTERU2032279, UTERU2032726, UTERU2033172, UTERU2033382, UTERU2033420, UTERU2033530, UTERU2033577, UTERU2034053, UTERU2034147, UTERU2034695, UTERU2035114, UTERU2035187, UTERU2035231, UTERU2035306, UTERU2035323, UTERU2035328, UTERU2035331, UTERU2035452, UTERU2035469, UTERU2035503, UTERU2035745, UTERU2035908, UTERU2035926, UTERU2035978, UTERU2036089, UTERU2036347, UTERU2036507, UTERU2036512, UTERU2036530, UTERU2036623, UTERU2036690, UTERU2037224, UTERU2037361, UTERU2037423, UTERU2037577, UTERU2037674, UTERU2037791, UTERU2037843, UTERU2038171, UTERU2038251, UTERU3000226, UTERU3000298, UTERU3000402, UTERU3000645, UTERU3000665, UTERU3000670,

[2054] UTERU3000727, UTERU3000738, UTERU3000828, UTERU3000844, UTERU3000899, UTERU3000959, UTERU3001029, UTERU3001053, UTERU3001059, UTERU3001158, UTERU3001240, UTERU3001394, UTERU3001542, UTERU3001558, UTERU3001571, UTERU3001585, UTERU3001632, UTERU3001652, UTERU3001766, UTERU3001988, UTERU3002209, UTERU3002218, UTERU3002383, UTERU3002600, UTERU3002620, UTERU3002667, UTERU3002701, UTERU3002731, UTERU3002768, UTERU3002786, UTERU3002993, UTERU3003116, UTERU3003135, UTERU3003178, UTERU3003465, UTERU3003495, UTERU3003523, UTERU3003660, UTERU3003774, UTERU3003776, UTERU3004384, UTERU3004418, UTERU3004477, UTERU3004523, UTERU3004616, UTERU3004635, UTERU3004709, UTERU3004938, UTERU3004992, UTERU3005049,

[2055] UTERU3005159, UTERU3005205, UTERU3005230, UTERU3005264, UTERU3005422, UTERU3005460, UTERU3005536, UTERU3005585, UTERU3005767, UTERU3005907, UTERU3005970, UTERU3006008, UTERU3006228, UTERU3006308, UTERU3006538, UTERU3006640, UTERU3006687, UTERU3006720, UTERU3006798, UTERU3006884, UTERU3007021, UTERU3007104, UTERU3007108, UTERU3007134, UTERU3007419, UTERU3007640, UTERU3007731, UTERU3007913, UTERU3008280, UTERU3008463, UTERU3008660, UTERU3008671, UTERU3008722, UTERU3008917, UTERU3009259, UTERU3009490, UTERU3009517, UTERU3009690, UTERU3009775, UTERU3009871, UTERU3009979, UTERU3009987, UTERU3010029, UTERU3010409, UTERU3010526, UTERU3010604, UTERU3010892, UTERU3010919, UTERU3011063, UTERU3011092,

[2056] UTERU3011273, UTERU3011398, UTERU3011558, UTERU3011579, UTERU3011795, UTERU3011837, UTERU3012293, UTERU3012414, UTERU3012476, UTERU3012599, UTERU3012999, UTERU3013167, UTERU3013302, UTERU3013781, UTERU3014274, UTERU3014446, UTERU3014611, UTERU3014647, UTERU3014791, UTERU3014906, UTERU3015011, UTERU3015086, UTERU3015299, UTERU3015412, UTERU3015500, UTERU3015647, UTERU3015844, UTERU3016070, UTERU3016273, UTERU3016274, UTERU3016308, UTERU3016789, UTERU3017176, UTERU3017441, UTERU3017626, UTERU3017995, UTERU3018154, UTERU3018172, UTERU3018255, UTERU3018616, UTERU3018711, UTERU3019078

[2057] Of the 17,176 genes that include the cDNAs of the present invention, genes whose expression levels were high enough to detect in each of the NT2NE, NT2R1, NT2RM, NT2RP, NTISM, NTONG, and OCBBF libraries were analyzed for expression frequency. The analysis results are described below. Each is a relative value, where the expression level over all tissues is taken as 100. The larger this value, the greater the level of expression.

TABLE 35

| Clone Name | NT2NE | NT2RI | NT2RM | NT2RP | NTISM | NTONG | OCBBF |
|---|---|---|---|---|---|---|---|
| 3NB691000116 | 0 | 0 | 0 | 0 | 0 | 0 | 2.020 |
| 3NB691000129 | 0 | 4.588 | 0 | 6.085 | 0 | 0 | 0 |
| 3NB691000173 | 5.723 | 0 | 0 | 0 | 0 | 0 | 0 |
| 3NB692000281 | 0 | 0.400 | 0 | 0.531 | 0 | 0 | 0 |
| 3NB692000374 | 0 | 0 | 0 | 0 | 0 | 0 | 2.694 |
| 3NB692000545 | 0 | 5.127 | 0 | 13.599 | 0 | 0 | 0 |
| 3NB692000912 | 5.108 | 0.854 | 0 | 1.132 | 0 | 3.463 | 0 |
| 3NB692001002 | 0 | 0 | 0 | 0 | 0 | 0 | 2.430 |
| 3NB692001022 | 0 | 0 | 0 | 0 | 0 | 0 | 3.091 |
| 3NB692001288 | 0 | 0 | 0 | 0 | 0 | 0 | 1.861 |
| 3NB692001334 | 1.946 | 0 | 0 | 0.647 | 0 | 1.978 | 1.667 |
| 3NB692001442 | 4.378 | 0 | 0 | 0 | 0 | 0 | 0 |
| 3NB692001496 | 27.896 | 0 | 0 | 0 | 0 | 0 | 0 |
| 3NB692001528 | 0 | 0 | 0 | 0 | 0 | 0 | 2.922 |
| 3NB692001719 | 0 | 0 | 0 | 0 | 0 | 0 | 8.556 |
| ADIPS2000425 | 0 | 0 | 0 | 0 | 0 | 0 | 0.964 |
| ADRGL1000002 | 0 | 0 | 0 | 0 | 0 | 0 | 53.185 |
| ADRGL1000065 | 0 | 0 | 0 | 0 | 0 | 0 | 7.006 |
| ADRGL1000144 | 0 | 0 | 0 | 16.110 | 0 | 0 | 4.152 |
| ADRGL2000006 | 3.767 | 1.889 | 0 | 0 | 0 | 0 | 12.914 |
| ADRGL2000042 | 9.204 | 0 | 0 | 0 | 0 | 0 | 0 |
| ADRGL2000097 | 0 | 0 | 0 | 5.358 | 0 | 0 | 0 |
| ADRGL2002477 | 0 | 0 | 0 | 0 | 0 | 0 | 4.227 |
| ADRGL2002679 | 0 | 0 | 0 | 0 | 0 | 0 | 15.458 |
| ADRGL2009273 | 0 | 0 | 0 | 0 | 0 | 0 | 3.451 |
| ADRGL2012179 | 0 | 0 | 0 | 0 | 0 | 0 | 17.655 |
| ASTRO1000165 | 0 | 8.055 | 0 | 0 | 0 | 0 | 11.014 |
| ASTRO2000046 | 0 | 10.381 | 0 | 4.917 | 0 | 0 | 1.014 |
| ASTRO2000381 | 0 | 0 | 0 | 0 | 0 | 0 | 23.405 |
| ASTRO2000480 | 0 | 0 | 0 | 6.823 | 0 | 0 | 0 |
| ASTRO2000801 | 0 | 0 | 0 | 0 | 0 | 0 | 1.267 |
| ASTRO2000914 | 0 | 3.537 | 0 | 0 | 0 | 0 | 0 |
| ASTRO2001029 | 0 | 2.279 | 0 | 12.089 | 0 | 0 | 1.558 |
| ASTRO2001076 | 0 | 0 | 0 | 3.426 | 0 | 0 | 5.297 |
| ASTRO2001107 | 0 | 0 | 0 | 0 | 0 | 0 | 9.074 |
| ASTRO2001823 | 0 | 0 | 0 | 3.498 | 0 | 0 | 0 |
| ASTRO2002202 | 0 | 0 | 0 | 5.554 | 0 | 0 | 0 |
| ASTRO2002693 | 25.689 | 0 | 0 | 0 | 0 | 0 | 0 |
| ASTRO2003316 | 0 | 10.721 | 0 | 0 | 0 | 0 | 0 |
| ASTRO2003461 | 0 | 0 | 0 | 0 | 0 | 0 | 14.800 |
| ASTRO2003632 | 0 | 0.755 | 0 | 1.001 | 0 | 0 | 0 |
| ASTRO2004032 | 0 | 0 | 0 | 0 | 0 | 0 | 15.142 |
| ASTRO2004974 | 0 | 0 | 0 | 0 | 0 | 0 | 4.828 |
| ASTRO2005423 | 12.479 | 0 | 0 | 8.299 | 0 | 0 | 12.832 |
| ASTRO2005553 | 0 | 0 | 0 | 0 | 0 | 0 | 6.438 |
| ASTRO2005687 | 0 | 0 | 0 | 0 | 0 | 0 | 1.385 |
| ASTRO2008216 | 0 | 0 | 0 | 0 | 0 | 0 | 3.964 |
| ASTRO2008409 | 0 | 23.625 | 0 | 31.333 | 0 | 0 | 0 |
| ASTRO2009068 | 0 | 0 | 0 | 0 | 0 | 0 | 7.029 |
| ASTRO2009118 | 0 | 28.385 | 0 | 0 | 0 | 0 | 0 |
| ASTRO2010819 | 0 | 0 | 0 | 1.622 | 0 | 0 | 6.687 |
| ASTRO2010996 | 0 | 34.405 | 0 | 0 | 0 | 0 | 0 |
| ASTRO2011422 | 0 | 0 | 0 | 17.485 | 0 | 0 | 18.025 |
| ASTRO2012552 | 5.357 | 2.686 | 0 | 0 | 0 | 0 | 0 |
| ASTRO2013585 | 3.533 | 1.772 | 0 | 2.350 | 0 | 0 | 0 |
| ASTRO2015529 | 0 | 0 | 0 | 0 | 0 | 13.655 | 0 |
| ASTRO2016148 | 0 | 0 | 0 | 0 | 0 | 0 | 26.393 |
| ASTRO2016491 | 0 | 0 | 0 | 3.641 | 0 | 0 | 1.877 |
| ASTRO2016819 | 0 | 23.453 | 0 | 0 | 0 | 0 | 0 |
| BGGI12000054 | 0 | 0.856 | 0 | 1.135 | 0 | 3.472 | 0 |
| BGGI12000533 | 0 | 0 | 0 | 0 | 0 | 0 | 2.805 |
| BGGI12000616 | 0 | 0 | 0 | 2.155 | 0 | 0 | 0 |
| BGGI12000684 | 0 | 4.483 | 0 | 0 | 0 | 18.183 | 0 |
| BGGI12000839 | 0 | 0 | 0 | 0 | 0 | 0 | 1.832 |
| BGGI12001002 | 0 | 0 | 0 | 0 | 0 | 13.083 | 0 |
| BGGI12001075 | 0 | 7.194 | 0 | 0 | 0 | 0 | 2.459 |
| BGGI12001097 | 0 | 2.042 | 0 | 0 | 0 | 0 | 0 |
| BGGI12001682 | 0 | 0 | 0 | 0 | 0 | 0 | 1.283 |
| BLADE2004089 | 0 | 0 | 0 | 0 | 0 | 0 | 12.311 |
| BLADE2004849 | 26.862 | 0 | 0 | 0 | 0 | 0 | 0 |
| BLADE2006830 | 0 | 0 | 0 | 0 | 0 | 24.778 | 0 |
| BLADE2008461 | 0 | 0 | 0 | 5.974 | 0 | 0 | 0 |
| BNGH41000098 | 0 | 0 | 0 | 0 | 0 | 0 | 3.149 |
| BNGH41000137 | 0 | 0 | 0 | 0 | 0 | 0 | 5.390 |
| BNGH41000153 | 0 | 8.539 | 0 | 11.325 | 0 | 0 | 0 |
| BNGH41000198 | 0 | 15.102 | 0 | 0 | 0 | 0 | 0 |
| BNGH42000360 | 0.570 | 0.286 | 0 | 0 | 0 | 0 | 0 |
| BNGH42000739 | 0 | 0 | 0 | 2.999 | 0 | 0 | 1.546 |
| BNGH42002168 | 0 | 0 | 38.287 | 0 | 0 | 9.806 | 0 |
| BNGH42006135 | 2.393 | 1.200 | 0 | 6.365 | 0 | 0 | 3.281 |
| BNGH42007460 | 0 | 1.831 | 0 | 0 | 0 | 0 | 1.252 |
| BNGH42007709 | 0.834 | 0 | 0 | 0 | 0 | 0 | 0 |
| BNGH42007788 | 0 | 0 | 0 | 7.419 | 0 | 0 | 0 |
| BNGH42007798 | 0 | 17.846 | 0 | 0 | 0 | 0 | 0 |
| BNGH42008603 | 5.242 | 0 | 0 | 0 | 0 | 0 | 5.390 |
| BNGH42008743 | 0 | 0 | 0 | 3.710 | 0 | 0 | 1.912 |
| BNGH42009025 | 5.052 | 0 | 0 | 0 | 0 | 0 | 0 |
| BRACE1000020 | 40.792 | 0 | 0 | 27.128 | 0 | 0 | 0 |
| BRACE1000042 | 0 | 0 | 0 | 0 | 0 | 0 | 1.891 |
| BRACE1000070 | 0 | 0 | 0 | 8.617 | 0 | 13.175 | 2.221 |
| BRACE1000087 | 0 | 0 | 0 | 35.366 | 0 | 0 | 0 |
| BRACE1000115 | 1.357 | 0 | 0 | 0 | 0 | 0 | 0 |
| BRACE1000131 | 3.775 | 0 | 0 | 2.510 | 0 | 0 | 1.294 |
| BRACE1000186 | 7.836 | 0 | 0 | 5.211 | 0 | 15.935 | 0 |
| BRACE1000187 | 0 | 0 | 0 | 0 | 0 | 0 | 23.470 |
| BRACE2000307 | 0 | 4.281 | 0 | 8.516 | 0 | 0 | 10.243 |
| BRACE2000332 | 0 | 0 | 0 | 0 | 0 | 0 | 3.372 |
| BRACE2000347 | 9.369 | 0 | 0 | 6.230 | 0 | 0 | 0 |
| BRACE2000487 | 29.738 | 0 | 0 | 0 | 0 | 0 | 0 |
| BRACE2000525 | 0 | 0 | 0 | 0 | 0 | 0 | 2.018 |
| BRACE2000698 | 0 | 0 | 0 | 0 | 0 | 63.412 | 0 |
| BRACE2000733 | 0 | 0 | 0 | 0 | 0 | 0 | 21.894 |
| BRACE2000975 | 2.322 | 0 | 0 | 1.544 | 0 | 0 | 7.958 |
| BRACE2001107 | 0 | 26.748 | 0 | 0 | 0 | 0 | 0 |
| BRACE2001143 | 0 | 2.700 | 0 | 0 | 0 | 0 | 0 |
| BRACE2001151 | 46.787 | 0 | 0 | 0 | 0 | 0 | 0 |
| BRACE2001236 | 0 | 0 | 0 | 0 | 0 | 0 | 22.352 |
| BRACE2001477 | 0 | 12.500 | 0 | 0 | 0 | 25.347 | 0 |
| BRACE2001497 | 0 | 3.386 | 0 | 0 | 0 | 0 | 11.574 |
| BRACE2001508 | 0 | 0 | 0 | 21.242 | 0 | 0 | 0 |
| BRACE2001692 | 0 | 0 | 0 | 1.459 | 0 | 0 | 0 |
| BRACE2001855 | 4.170 | 4.182 | 0 | 0 | 0 | 0 | 0 |
| BRACE2001881 | 83.623 | 0 | 0 | 0 | 0 | 0 | 0 |
| BRACE2001892 | 2.196 | 1.651 | 0 | 2.920 | 0 | 0 | 7.526 |
| BRACE2001944 | 0 | 0 | 0 | 0 | 0 | 0 | 15.586 |
| BRACE2001971 | 8.129 | 0 | 0 | 0 | 0 | 0 | 2.786 |
| BRACE2002050 | 0 | 0 | 0 | 0 | 0 | 0 | 3.602 |
| BRACE2002091 | 7.653 | 0 | 0 | 0 | 0 | 0 | 0 |
| BRACE2002356 | 0 | 0 | 0 | 43.792 | 0 | 0 | 0 |
| BRACE2002441 | 0 | 2.047 | 0 | 0 | 0 | 0 | 1.399 |
| BRACE2002582 | 0 | 23.746 | 0 | 0 | 0 | 0 | 0 |
| BRACE2002649 | 0 | 0 | 0 | 0 | 0 | 0 | 13.153 |
| BRACE2002677 | 0 | 0 | 0 | 0 | 0 | 0 | 2.398 |
| BRACE2002796 | 0 | 0 | 0 | 0 | 0 | 0 | 63.640 |
| BRACE2002803 | 0 | 0 | 0 | 0 | 0 | 0 | 22.636 |
| BRACE2002861 | 0 | 0 | 0 | 0 | 0 | 0 | 6.448 |
| BRACE2003037 | 0 | 0 | 0 | 0 | 0 | 0 | 5.365 |
| BRACE2003110 | 48.819 | 0 | 0 | 0 | 0 | 0 | 16.734 |
| BRACE2003172 | 0 | 0 | 0 | 0 | 0 | 0 | 17.361 |
| BRACE2003254 | 3.281 | 0 | 0 | 2.182 | 0 | 0 | 5.623 |
| BRACE2003304 | 0 | 19.864 | 0 | 10.538 | 0 | 0 | 2.716 |
| BRACE2003319 | 0 | 0 | 65.930 | 0 | 0 | 0 | 0 |
| BRACE2003527 | 9.342 | 0 | 0 | 0 | 0 | 0 | 0 |
| BRACE2003609 | 32.942 | 0 | 0 | 21.907 | 0 | 0 | 11.292 |
| BRACE2003628 | 0 | 0 | 0 | 16.442 | 0 | 0 | 0 |
| BRACE2003785 | 7.043 | 3.532 | 0 | 2.342 | 0 | 0 | 1.207 |
| BRACE2003827 | 15.876 | 4.776 | 0 | 0 | 0 | 0 | 0 |
| BRACE2003845 | 0 | 0 | 0 | 10.981 | 0 | 0 | 5.660 |
| BRACE2003846 | 0 | 1.184 | 0 | 3.141 | 0 | 0 | 3.238 |
| BRACE2003892 | 0 | 0 | 0 | 0 | 0 | 0 | 5.422 |
| BRACE2003904 | 0 | 4.711 | 0 | 6.248 | 0 | 0 | 0 |
| BRACE2003905 | 0 | 0 | 0 | 0 | 0 | 0 | 39.290 |
| BRACE2003944 | 0 | 0.941 | 0 | 0 | 0 | 34.336 | 0 |
| BRACE2005087 | 0 | 3.770 | 0 | 2.500 | 0 | 0 | 9.020 |
| BRACE2005151 | 7.615 | 0 | 0 | 0 | 0 | 0 | 0 |
| BRACE2005189 | 0 | 46.047 | 0 | 0 | 0 | 0 | 0 |
| BRACE2005196 | 0 | 0 | 0 | 0 | 0 | 0 | 39.504 |
| BRACE2005395 | 34.170 | 0 | 0 | 0 | 0 | 0 | 11.713 |
| BRACE2005434 | 2.499 | 0 | 0 | 0 | 0 | 0 | 0.856 |
| BRACE2005681 | 0 | 0 | 0 | 0 | 0 | 0 | 4.961 |
| BRACE2005719 | 10.763 | 0 | 0 | 0 | 0 | 0 | 0 |
| BRACE2005875 | 0 | 0 | 0 | 0 | 0 | 0 | 5.348 |
| BRACE2005937 | 0 | 0 | 0 | 0 | 0 | 0 | 7.504 |
| BRACE2006055 | 14.499 | 0 | 0 | 0 | 0 | 0 | 2.485 |
| BRACE2006162 | 0 | 0 | 0 | 0 | 0 | 11.404 | 0 |
| BRACE2006258 | 2.969 | 5.954 | 0 | 0 | 0 | 0 | 0 |
| BRACE2006281 | 0 | 0 | 86.959 | 0 | 0 | 0 | 0 |
| BRACE2006319 | 0 | 0 | 0 | 8.450 | 0 | 0 | 8.711 |
| BRACE2006354 | 0 | 0 | 0 | 0 | 0 | 0 | 23.191 |
| BRACE2006514 | 0 | 7.894 | 0 | 0 | 0 | 0 | 2.158 |
| BRACE2006636 | 0 | 0 | 0 | 0 | 0 | 0 | 17.031 |
| BRACE2006743 | 0 | 0 | 0 | 0 | 0 | 0 | 11.047 |
| BRACE2006833 | 0 | 0 | 0 | 0 | 0 | 0 | 46.671 |
| BRACE2006859 | 0 | 0 | 0 | 0 | 0 | 74.880 | 0 |
| BRACE2006900 | 0 | 0.935 | 0 | 0 | 0 | 0 | 0 |
| BRACE2006937 | 4.850 | 0 | 0 | 0 | 0 | 0 | 9.976 |
| BRACE2007064 | 0 | 0 | 0 | 0 | 0 | 0 | 8.074 |
| BRACE2007089 | 0 | 1.539 | 0 | 0 | 0 | 0 | 0 |
| BRACE2007174 | 0 | 28.390 | 0 | 0 | 0 | 0 | 0 |
| BRACE2007401 | 0 | 3.321 | 0 | 0 | 0 | 0 | 2.270 |
| BRACE2007518 | 0 | 0 | 0 | 0 | 0 | 0 | 8.458 |
| BRACE2007577 | 0 | 0 | 0 | 0 | 0 | 0 | 4.866 |
| BRACE2007641 | 0 | 0 | 0 | 0 | 0 | 0 | 33.106 |
| BRACE2007671 | 5.603 | 2.810 | 0 | 3.726 | 0 | 0 | 0 |
| BRACE2007760 | 0 | 0 | 0 | 0 | 0 | 0 | 16.281 |
| BRACE2007768 | 0 | 0 | 0 | 0 | 0 | 0 | 11.887 |
| BRACE2007902 | 0 | 0 | 0 | 77.250 | 0 | 0 | 0 |
| BRACE2007937 | 0 | 4.615 | 0 | 0 | 0 | 0 | 25.242 |
| BRACE2007952 | 0 | 0 | 0 | 0 | 0 | 0 | 3.012 |
| BRACE2008358 | 0 | 0 | 0 | 0 | 0 | 0 | 5.630 |
| BRACE2008380 | 0 | 3.550 | 0 | 0 | 0 | 0 | 2.427 |
| BRACE2008402 | 0 | 0 | 0 | 0 | 0 | 0 | 5.209 |
| BRACE2008481 | 10.117 | 0 | 0 | 0 | 0 | 0 | 0 |
| BRACE2008653 | 1.911 | 3.834 | 0 | 2.542 | 0 | 0 | 3.276 |
| BRACE2008968 | 2.107 | 0 | 0 | 1.401 | 0 | 0 | 0 |
| BRACE2009037 | 5.291 | 1.061 | 0 | 0 | 0 | 0 | 0.363 |
| BRACE2009045 | 0 | 0 | 0 | 0 | 0 | 0 | 22.440 |
| BRACE2009291 | 0 | 0 | 0 | 3.188 | 0 | 9.749 | 0 |
| BRACE2009307 | 0 | 0 | 0 | 0 | 0 | 0 | 18.399 |
| BRACE2009558 | 10.420 | 0 | 0 | 6.930 | 0 | 21.191 | 0 |
| BRACE2010669 | 0 | 0 | 0 | 0 | 0 | 0 | 31.677 |
| BRACE2011265 | 0 | 0 | 0 | 0 | 0 | 0 | 4.608 |
| BRACE2012317 | 0 | 1.247 | 0 | 0 | 0 | 5.057 | 1.705 |
| BRACE2012528 | 0 | 0.862 | 0 | 1.143 | 0 | 0 | 3.535 |
| BRACE2012814 | 5.557 | 0 | 0 | 3.696 | 0 | 0 | 3.810 |
| BRACE2014306 | 17.640 | 0 | 0 | 0 | 0 | 0 | 0 |
| BRACE2014850 | 0 | 0 | 0 | 0 | 0 | 0 | 9.317 |
| BRACE2015058 | 0 | 0 | 0 | 10.567 | 0 | 0 | 5.447 |
| BRACE2015132 | 0 | 29.940 | 0 | 0 | 0 | 0 | 0 |
| BRACE2017574 | 0 | 9.310 | 0 | 0 | 0 | 0 | 12.729 |
| BRACE2018337 | 0 | 4.328 | 0 | 0 | 0 | 0 | 5.918 |
| BRACE2019147 | 0 | 0 | 0 | 5.162 | 0 | 0 | 2.660 |
| BRACE2021014 | 0 | 0 | 0 | 0 | 0 | 0 | 14.719 |
| BRACE2021541 | 0 | 28.929 | 0 | 0 | 0 | 0 | 0 |
| BRACE2022389 | 0 | 0 | 0 | 0 | 0 | 0 | 13.200 |
| BRACE2022549 | 0 | 0 | 0 | 0 | 0 | 0 | 63.640 |
| BRACE2022638 | 0 | 2.709 | 0 | 3.593 | 0 | 0 | 2.778 |
| BRACE2025492 | 0 | 0 | 0 | 0 | 0 | 0 | 32.696 |
| BRACE2026054 | 0 | 41.542 | 0 | 0 | 0 | 0 | 0 |
| BRACE2026725 | 66.449 | 0 | 0 | 0 | 0 | 0 | 0 |
| BRACE2027258 | 0 | 0 | 0 | 0 | 0 | 0 | 41.974 |
| BRACE2027643 | 0 | 0 | 0 | 0 | 0 | 0 | 17.893 |
| BRACE2032477 | 0 | 0 | 0 | 0 | 0 | 0 | 20.768 |
| BRACE2035278 | 0 | 0 | 0 | 0 | 0 | 0 | 46.671 |
| BRACE2037295 | 23.776 | 0 | 0 | 0 | 0 | 0 | 0 |
| BRACE2037310 | 0 | 0 | 0 | 0 | 0 | 0 | 48.748 |
| BRACE2039624 | 0 | 3.516 | 0 | 4.663 | 0 | 0 | 2.404 |
| BRACE2044286 | 0 | 33.923 | 0 | 0 | 0 | 0 | 0 |
| BRACE2045954 | 0 | 0 | 0 | 0 | 0 | 0 | 33.925 |
| BRACE3001113 | 0 | 0 | 0 | 0 | 0 | 0 | 32.696 |
| BRACE3001973 | 0 | 0 | 0 | 0 | 0 | 0 | 63.640 |
| BRACE3002184 | 0 | 0 | 0 | 0 | 0 | 0 | 33.290 |
| BRACE3003026 | 0 | 59.349 | 0 | 0 | 0 | 0 | 0 |
| BRACE3003053 | 0 | 0 | 0 | 0 | 0 | 0 | 63.640 |
| BRACE3004371 | 0 | 0 | 0 | 0 | 0 | 0 | 9.334 |
| BRACE3005938 | 0 | 2.001 | 0 | 2.654 | 0 | 0 | 1.368 |
| BRACE3010428 | 0 | 2.080 | 0 | 0 | 0 | 0 | 4.266 |
| BRACE3011271 | 0 | 0 | 0 | 0 | 0 | 0 | 27.420 |
| BRACE3013780 | 0 | 0 | 0 | 0 | 0 | 0 | 5.958 |
| BRACE3027931 | 0 | 0 | 0 | 0 | 0 | 0 | 41.796 |
| BRACE3030538 | 0 | 0 | 0 | 0 | 0 | 0 | 63.640 |
| BRALZ2009482 | 0 | 2.026 | 0 | 0 | 0 | 2.739 | 0 |
| BRAMY1000173 | 0 | 0 | 0 | 0 | 0 | 0 | 26.275 |
| BRAMY2000354 | 4.980 | 0 | 0 | 0 | 0 | 0 | 0 |
| BRAMY2000562 | 0 | 0 | 0 | 0 | 0 | 0 | 4.775 |
| BRAMY2004363 | 0 | 3.715 | 0 | 0 | 0 | 0 | 10.159 |
| BRAMY2007567 | 0 | 0 | 0 | 0 | 0 | 0 | 9.640 |
| BRAMY2007613 | 0 | 4.869 | 0 | 0 | 0 | 0 | 8.321 |
| BRAMY2008382 | 56.197 | 28.179 | 0 | 0 | 0 | 0 | 0 |
| BRAMY2009013 | 0 | 11.068 | 0 | 14.679 | 0 | 0 | 52.965 |
| BRAMY2009508 | 0 | 13.626 | 0 | 0 | 0 | 0 | 0 |
| BRAMY2010357 | 0 | 0 | 0 | 0 | 0 | 0 | 18.549 |
| BRAMY2010464 | 0 | 40.041 | 0 | 0 | 0 | 0 | 0 |
| BRAMY2012091 | 0 | 0 | 0 | 0 | 0 | 0 | 7.377 |
| BRAMY2012581 | 0 | 0 | 0 | 0 | 0 | 0 | 28.378 |
| BRAMY2013169 | 0 | 0 | 0 | 0 | 0 | 0 | 14.126 |
| BRAMY2013621 | 0 | 0 | 0 | 70.518 | 0 | 0 | 0 |
| BRAMY2013659 | 0 | 0 | 0 | 0 | 0 | 0 | 36.086 |
| BRAMY2013756 | 0 | 68.630 | 0 | 0 | 0 | 0 | 0 |
| BRAMY2014205 | 0 | 0 | 0 | 0 | 0 | 0 | 17.799 |
| BRAMY2015251 | 0 | 0 | 0 | 0 | 0 | 0 | 7.608 |
| BRAMY2015705 | 0 | 0 | 0 | 70.518 | 0 | 0 | 0 |
| BRAMY2016009 | 0 | 0 | 0 | 12.604 | 0 | 0 | 6.496 |
| BRAMY2016251 | 0 | 0 | 0 | 0 | 0 | 0 | 8.934 |
| BRAMY2016706 | 0 | 9.007 | 0 | 0 | 0 | 0 | 0 |
| BRAMY2018785 | 0 | 0 | 0 | 16.390 | 0 | 0 | 0 |
| BRAMY2019554 | 2.892 | 1.450 | 0 | 3.847 | 0 | 0 | 15.862 |
| BRAMY2019600 | 0 | 0 | 0 | 0 | 0 | 0 | 30.091 |
| BRAMY2019963 | 0 | 0 | 0 | 0 | 0 | 0 | 25.378 |
| BRAMY2020106 | 0 | 0 | 0 | 0 | 0 | 0 | 27.775 |
| BRAMY2022493 | 0 | 0 | 0 | 6.394 | 0 | 0 | 3.296 |
| BRAMY2022525 | 0 | 40.075 | 0 | 0 | 0 | 0 | 0 |
| BRAMY2023863 | 0 | 64.331 | 0 | 0 | 0 | 0 | 0 |
| BRAMY2023939 | 22.151 | 11.107 | 0 | 0 | 0 | 0 | 15.186 |
| BRAMY2027587 | 0 | 0 | 0 | 0 | 0 | 0 | 16.588 |
| BRAMY2028269 | 0 | 29.661 | 0 | 0 | 0 | 0 | 0 |
| BRAMY2028282 | 0 | 0 | 0 | 0 | 0 | 0 | 30.319 |
| BRAMY2028740 | 0 | 1.692 | 0 | 2.244 | 0 | 0 | 0 |
| BRAMY2028796 | 0 | 0 | 0 | 0 | 0 | 0 | 3.693 |
| BRAMY2029988 | 0 | 0 | 0 | 0 | 0 | 0 | 14.633 |
| BRAMY2031516 | 0 | 0 | 0 | 17.802 | 0 | 0 | 0 |
| BRAMY2032087 | 0 | 0 | 0 | 0 | 0 | 0 | 6.018 |
| BRAMY2036459 | 0 | 0 | 0 | 0 | 0 | 0 | 2.341 |
| BRAMY2040095 | 1.239 | 1.864 | 0 | 2.472 | 0 | 0 | 0 |
| BRAMY3002991 | 14.210 | 0 | 0 | 0 | 0 | 0 | 0 |
| BRAMY3003026 | 0 | 0 | 0 | 0 | 0 | 0 | 55.216 |
| BRAMY3004377 | 9.017 | 1.507 | 0 | 3.998 | 0 | 6.112 | 2.061 |
| BRAMY3005184 | 0 | 0 | 0 | 0 | 0 | 0 | 27.836 |
| BRAMY3005912 | 0 | 0 | 0 | 0 | 0 | 0 | 26.605 |
| BRAMY3008044 | 0 | 3.260 | 0 | 0 | 0 | 0 | 20.056 |
| BRAMY3010008 | 0 | 0 | 0 | 0 | 0 | 4.289 | 0 |
| BRAMY4002628 | 0 | 12.908 | 0 | 17.119 | 0 | 0 | 8.824 |
| BRAWH1000007 | 0 | 0 | 0 | 21.657 | 0 | 0 | 11.163 |
| BRAWH1000037 | 0 | 3.314 | 0 | 4.395 | 0 | 0 | 0 |
| BRAWH1000040 | 0 | 1.250 | 0 | 1.658 | 0 | 0 | 5.129 |
| BRAWH1000045 | 3.628 | 1.819 | 0 | 0 | 0 | 0 | 4.974 |
| BRAWH1000093 | 0 | 0 | 0 | 0 | 0 | 0 | 2.292 |
| BRAWH1000127 | 0 | 0 | 0 | 0 | 0 | 0 | 3.971 |
| BRAWH1000162 | 0 | 0 | 0 | 0 | 0 | 0 | 9.069 |
| BRAWH2000082 | 0 | 1.394 | 0 | 5.547 | 0 | 0 | 0 |
| BRAWH2000274 | 0 | 0 | 0 | 0 | 0 | 0 | 7.357 |
| BRAWH2000460 | 0 | 5.545 | 0 | 1.471 | 0 | 0 | 1.516 |
| BRAWH2000488 | 0 | 18.321 | 0 | 0 | 0 | 0 | 12.525 |
| BRAWH2000522 | 13.137 | 0 | 0 | 0 | 0 | 0 | 2.252 |
| BRAWH2000588 | 4.547 | 2.280 | 0 | 0 | 0 | 0 | 1.559 |
| BRAWH2000633 | 0 | 0 | 0 | 0 | 0 | 0 | 4.941 |
| BRAWH2000636 | 1.915 | 0 | 0 | 5.094 | 0 | 0 | 5.908 |
| BRAWH2000686 | 0 | 0 | 0 | 0 | 0 | 0 | 10.630 |
| BRAWH2000697 | 3.666 | 1.838 | 0 | 2.438 | 0 | 7.455 | 0 |
| BRAWH2000839 | 1.488 | 2.239 | 0 | 1.980 | 0 | 0 | 0.510 |
| BRAWH2000924 | 0 | 0 | 0 | 0 | 0 | 0 | 0.713 |
| BRAWH2000944 | 0 | 9.480 | 0 | 0 | 0 | 0 | 0 |
| BRAWH2001037 | 0 | 0 | 0 | 0 | 0 | 0 | 24.911 |
| BRAWH2001092 | 0 | 2.555 | 0 | 0.847 | 0 | 0 | 2.838 |
| BRAWH2001141 | 0 | 0 | 0 | 0 | 0 | 0 | 6.313 |
| BRAWH2001166 | 0 | 5.736 | 0 | 22.824 | 0 | 0 | 3.921 |
| BRAWH2001171 | 0 | 2.245 | 0 | 8.931 | 0 | 0 | 15.345 |
| BRAWH2001186 | 0 | 0 | 81.991 | 0 | 0 | 0 | 0 |
| BRAWH2001321 | 6.222 | 1.560 | 0 | 0 | 0 | 0 | 7.465 |
| BRAWH2001412 | 54.493 | 0 | 0 | 0 | 0 | 0 | 0 |
| BRAWH2001424 | 0 | 0 | 0 | 0 | 0 | 37.524 | 0 |
| BRAWH2001439 | 3.729 | 1.870 | 0 | 4.960 | 0 | 0 | 7.669 |
| BRAWH2001484 | 0 | 0 | 0 | 0 | 0 | 0 | 13.199 |
| BRAWH2001530 | 0 | 0 | 0 | 0 | 0 | 0 | 9.483 |
| BRAWH2001662 | 0 | 0 | 0 | 22.162 | 0 | 0 | 5.712 |
| BRAWH2001862 | 0 | 0 | 96.642 | 0 | 0 | 0 | 0 |
| BRAWH2002560 | 0 | 0 | 0 | 0 | 0 | 0 | 24.052 |
| BRAWH2002811 | 0 | 15.672 | 0 | 0 | 0 | 0 | 0 |
| BRAWH2002967 | 0 | 0 | 0 | 0 | 0 | 0 | 55.403 |
| BRAWH2003662 | 0 | 0 | 0 | 0 | 0 | 0 | 7.699 |
| BRAWH2003693 | 0 | 12.434 | 0 | 0 | 0 | 0 | 0 |
| BRAWH2003818 | 0 | 0 | 0 | 7.294 | 0 | 0 | 11.280 |
| BRAWH2004095 | 0 | 0 | 0 | 5.698 | 0 | 0 | 7.343 |
| BRAWH2005225 | 0 | 0 | 0 | 0 | 0 | 0 | 21.603 |
| BRAWH2005517 | 0 | 0 | 0 | 0 | 0 | 0 | 55.403 |
| BRAWH2005661 | 0 | 0 | 0 | 0 | 0 | 0 | 3.972 |
| BRAWH2006044 | 0 | 31.972 | 0 | 0 | 0 | 0 | 0 |
| BRAWH2006622 | 59.966 | 0 | 0 | 0 | 0 | 0 | 0 |
| BRAWH2007605 | 0 | 7.455 | 0 | 9.887 | 0 | 0 | 2.548 |
| BRAWH2007664 | 37.081 | 0 | 0 | 0 | 0 | 0 | 0 |
| BRAWH2007800 | 0 | 0 | 0 | 0 | 0 | 0 | 2.918 |
| BRAWH2008058 | 0 | 0 | 0 | 0 | 0 | 0 | 29.101 |
| BRAWH2008255 | 15.311 | 0 | 0 | 0 | 0 | 0 | 5.248 |
| BRAWH2008706 | 0 | 0 | 0 | 0 | 0 | 0 | 3.572 |
| BRAWH2009626 | 0 | 0 | 0 | 0 | 0 | 0 | 55.403 |
| BRAWH2010329 | 0 | 0 | 0 | 0 | 0 | 0 | 6.217 |
| BRAWH2010754 | 40.540 | 0 | 0 | 0 | 0 | 0 | 0 |
| BRAWH2010980 | 25.609 | 0 | 0 | 0 | 0 | 0 | 0 |
| BRAWH2011286 | 0 | 0 | 0 | 21.508 | 0 | 0 | 0 |
| BRAWH2011823 | 78.374 | 0 | 0 | 0 | 0 | 0 | 0 |
| BRAWH2011920 | 0 | 0 | 0 | 0 | 0 | 0 | 23.538 |
| BRAWH2012164 | 0 | 0 | 0 | 0 | 0 | 0 | 25.884 |
| BRAWH2012866 | 0 | 0 | 0 | 0 | 0 | 0 | 18.485 |
| BRAWH2014188 | 0 | 5.204 | 0 | 0 | 0 | 0 | 2.668 |
| BRAWH2014379 | 0 | 37.724 | 0 | 0 | 0 | 0 | 0 |
| BRAWH2014645 | 0 | 1.921 | 0 | 7.643 | 0 | 0 | 6.566 |
| BRAWH2014662 | 56.250 | 0 | 0 | 0 | 0 | 0 | 0 |
| BRAWH2016446 | 0 | 0 | 0 | 20.968 | 0 | 0 | 10.808 |
| BRAWH2017002 | 0 | 0 | 0 | 0 | 0 | 0 | 12.365 |
| BRAWH2017304 | 0 | 0 | 0 | 40.020 | 0 | 0 | 0 |
| BRAWH2017685 | 1.839 | 0 | 0 | 3.669 | 0 | 3.740 | 5.044 |
| BRAWH2018526 | 0 | 0.559 | 0 | 0 | 0 | 0 | 0 |
| BRAWH3000088 | 4.192 | 8.409 | 0 | 2.788 | 0 | 0 | 4.311 |
| BRAWH3001918 | 0 | 0 | 0 | 0 | 0 | 0 | 17.250 |
| BRAWH3002574 | 0 | 12.014 | 0 | 0 | 0 | 0 | 8.213 |
| BRAWH3002853 | 0 | 1.344 | 0 | 5.348 | 0 | 0 | 1.838 |
| BRAWH3003727 | 0 | 0 | 0 | 0 | 0 | 0 | 12.492 |
| BRAWH3004222 | 0 | 0 | 0 | 0 | 0 | 0 | 55.403 |
| BRAWH3004350 | 0 | 0 | 0 | 0 | 0 | 0 | 20.597 |
| BRAWH3005981 | 0 | 0 | 0 | 70.676 | 0 | 0 | 0 |
| BRAWH3008931 | 0 | 0 | 0 | 0 | 0 | 0 | 4.303 |
| BRAWH3009546 | 0 | 0 | 0 | 0 | 0 | 0 | 29.283 |
| BRAWH3010461 | 0 | 3.733 | 0 | 0 | 0 | 0 | 15.313 |
| BRAWH3014609 | 0 | 0 | 0 | 0 | 0 | 0 | 55.403 |
| BRAWH3017259 | 50.722 | 0 | 0 | 0 | 0 | 0 | 17.387 |
| BRAWH3018063 | 0 | 14.389 | 0 | 0 | 0 | 0 | 3.279 |
| BRAWH3021545 | 0 | 0 | 0 | 0 | 0 | 26.887 | 0 |
| BRAWH3021574 | 0 | 0 | 0 | 0 | 0 | 0 | 11.677 |
| BRAWH3027533 | 0 | 0 | 0 | 0 | 0 | 0 | 13.675 |
| BRAWH3029806 | 0 | 0 | 0 | 0 | 0 | 0 | 22.142 |
| BRAWH3034743 | 0 | 0 | 0 | 0 | 0 | 0 | 10.350 |
| BRAWH3037265 | 0 | 0 | 0 | 0 | 0 | 0 | 55.403 |
| BRCAN1000168 | 0 | 0 | 0 | 0 | 0 | 10.397 | 0 |
| BRCAN2000563 | 0 | 23.897 | 0 | 0 | 0 | 0 | 0 |
| BRCAN2003389 | 0 | 5.526 | 87.498 | 0 | 0 | 0 | 0 |
| BRCAN2003944 | 1.021 | 0 | 0 | 2.036 | 0 | 0 | 0 |
| BRCAN2007409 | 0 | 0 | 0 | 0 | 0 | 0 | 3.727 |
| BRCAN2009432 | 0 | 0 | 0 | 3.173 | 0 | 0 | 0 |
| BRCAN2016619 | 0 | 23.940 | 0 | 0 | 0 | 0 | 0 |
| BRCAN2019653 | 0 | 0 | 0 | 15.031 | 0 | 0 | 0 |
| BRCAN2022126 | 0 | 8.824 | 0 | 0 | 0 | 0 | 0 |
| BRCAN2026197 | 0 | 0 | 0 | 0 | 0 | 0 | 1.940 |
| BRCAN2027364 | 0 | 0 | 0 | 0 | 0 | 0 | 7.379 |
| BRCAN2028036 | 0 | 4.387 | 0 | 0 | 0 | 0 | 0 |
| BRCAN2028355 | 5.354 | 0 | 0 | 0 | 0 | 0 | 0 |
| BRCOC1000040 | 0 | 0 | 0 | 0 | 0 | 0 | 3.664 |
| BRCOC2000152 | 0 | 0 | 0 | 0 | 0 | 0 | 25.963 |
| BRCOC2000184 | 0 | 0 | 0 | 0 | 0 | 61.762 | 0 |
| BRCOC2000487 | 0 | 0.526 | 0 | 0 | 95.528 | 0 | 0 |
| BRCOC2010123 | 3.970 | 3.981 | 0 | 2.640 | 0 | 0 | 0 |
| BRCOC2010510 | 0 | 0 | 0 | 0 | 0 | 0 | 14.918 |
| BRCOC2012172 | 0 | 5.112 | 0 | 13.559 | 0 | 0 | 0 |
| BRCOC2012386 | 0 | 20.721 | 0 | 27.482 | 0 | 0 | 0 |
| BRCOC2014400 | 0 | 0 | 0 | 40.488 | 0 | 0 | 0 |
| BRCOC2019910 | 0 | 0 | 0 | 0 | 0 | 0 | 2.329 |
| BRHIP1000104 | 2.369 | 0 | 0 | 0 | 0 | 0 | 0 |
| BRHIP1000108 | 0 | 0 | 0 | 0 | 0 | 0 | 5.354 |
| BRHIP1000174 | 0 | 0 | 0 | 0 | 0 | 0 | 6.298 |
| BRHIP2000312 | 0 | 0 | 0 | 0 | 0 | 0 | 8.056 |
| BRHIP2000534 | 1.240 | 1.244 | 0 | 0.825 | 0 | 0 | 0 |
| BRHIP2000553 | 0 | 9.340 | 0 | 12.387 | 0 | 0 | 12.769 |
| BRHIP2001074 | 0 | 0 | 0 | 47.218 | 0 | 0 | 0 |
| BRHIP2007305 | 0 | 0 | 0 | 0 | 0 | 0 | 2.813 |
| BRHIP2007741 | 6.291 | 6.309 | 0 | 0 | 0 | 0 | 4.313 |
| BRHIP2010217 | 0 | 0 | 0 | 0 | 0 | 0 | 6.938 |
| BRHIP2012627 | 0 | 28.546 | 0 | 0 | 0 | 0 | 0 |
| BRHIP2013286 | 0 | 0 | 0 | 82.532 | 0 | 0 | 0 |
| BRHIP2014228 | 0 | 0 | 0 | 35.475 | 0 | 0 | 0 |
| BRHIP2015224 | 0 | 0 | 0 | 0 | 0 | 0 | 11.303 |
| BRHIP2015245 | 0 | 0 | 0 | 0 | 0 | 0 | 14.746 |
| BRHIP2015679 | 9.091 | 0 | 0 | 0 | 0 | 18.488 | 0 |
| BRHIP2018712 | 0 | 0 | 0 | 0 | 0 | 0 | 7.547 |
| BRHIP2019819 | 0 | 0 | 0 | 0 | 0 | 0 | 10.771 |
| BRHIP2020573 | 0 | 0 | 0 | 0 | 0 | 0 | 22.485 |
| BRHIP2020799 | 0 | 9.197 | 0 | 0 | 0 | 0 | 0 |
| BRHIP2021762 | 0 | 5.063 | 0 | 0 | 0 | 0 | 3.461 |
| BRHIP2021858 | 0 | 0 | 0 | 0 | 0 | 0 | 8.314 |
| BRHIP2022228 | 0 | 0 | 0 | 0 | 0 | 0 | 11.352 |
| BRHIP2022326 | 0 | 1.546 | 0 | 4.101 | 0 | 0 | 1.057 |
| BRHIP2022986 | 0 | 0 | 0 | 0 | 0 | 0 | 10.604 |
| BRHIP2023762 | 0 | 0 | 0 | 5.752 | 0 | 0 | 0 |
| BRHIP2023888 | 2.667 | 7.355 | 0 | 2.660 | 0 | 0 | 3.200 |
| BRHIP2024398 | 0 | 0 | 0 | 0 | 0 | 0 | 10.459 |
| BRHIP2024742 | 0 | 0 | 0 | 12.023 | 0 | 0 | 9.296 |
| BRHIP2024911 | 0 | 67.372 | 0 | 0 | 0 | 0 | 0 |
| BRHIP2025448 | 0 | 0 | 0 | 0 | 0 | 0 | 37.989 |
| BRHIP2026061 | 0 | 0 | 0 | 0 | 0 | 0 | 37.989 |
| BRHIP2027017 | 0 | 20.920 | 0 | 0 | 0 | 0 | 14.301 |
| BRHIP2029643 | 0 | 0 | 0 | 0 | 0 | 0 | 18.557 |
| BRHIP2029663 | 0 | 0 | 0 | 0 | 0 | 0 | 54.907 |
| BRHIP3000017 | 0 | 8.013 | 0 | 0 | 0 | 0 | 5.478 |
| BRHIP3000111 | 3.710 | 1.860 | 0 | 0 | 0 | 0 | 0 |
| BRHIP3000131 | 0 | 6.673 | 0 | 0 | 0 | 0 | 0 |
| BRHIP3000457 | 0 | 0 | 0 | 0 | 0 | 0 | 33.739 |
| BRHIP3000475 | 0 | 0 | 0 | 0 | 0 | 0 | 53.721 |
| BRHIP3002691 | 0 | 0 | 0 | 0 | 0 | 0 | 10.303 |
| BRHIP3003795 | 0 | 0 | 0 | 0 | 0 | 0 | 54.907 |
| BRHIP3004968 | 0 | 0 | 0 | 0 | 0 | 0 | 41.796 |
| BRHIP3006717 | 6.168 | 0 | 0 | 0 | 0 | 0 | 8.458 |
| BRHIP3007223 | 0 | 3.664 | 0 | 4.859 | 0 | 14.859 | 2.505 |
| BRHIP3007586 | 12.507 | 0 | 0 | 0 | 0 | 0 | 0 |
| BRHIP3008082 | 0 | 0 | 0 | 0 | 0 | 0 | 54.907 |
| BRHIP3008320 | 0 | 0 | 0 | 0 | 0 | 0 | 29.007 |
| BRHIP3018784 | 0 | 0 | 0 | 0 | 0 | 0 | 4.305 |
| BRHIP3021019 | 0 | 14.074 | 0 | 0 | 0 | 0 | 28.863 |
| BRSSN2000498 | 0 | 1.989 | 0 | 0 | 0 | 0 | 0 |
| BRSSN2000561 | 0 | 0 | 0 | 15.113 | 0 | 0 | 7.790 |
| BRSSN2009518 | 12.485 | 0 | 0 | 4.151 | 0 | 0 | 0 |
| BRSSN2011653 | 0 | 0 | 0 | 0 | 0 | 0 | 24.622 |
| BRSSN2011738 | 0 | 0 | 0 | 0 | 0 | 0 | 13.066 |
| BRSSN2011843 | 0 | 0 | 0 | 0 | 0 | 0 | 14.868 |
| BRSSN2013753 | 0 | 26.797 | 0 | 0 | 0 | 0 | 18.319 |
| BRSSN2014610 | 0 | 0 | 0 | 17.209 | 0 | 0 | 0 |
| BRSSN2015238 | 0 | 0 | 0 | 0 | 0 | 0 | 8.505 |
| BRSSN2018440 | 0 | 0 | 0 | 0 | 0 | 0 | 25.025 |
| BRSTN1000083 | 0 | 3.481 | 0 | 0 | 0 | 4.706 | 4.759 |
| BRSTN2011961 | 3.149 | 0.526 | 8.334 | 0 | 0 | 2.134 | 0 |
| BRSTN2012069 | 0.788 | 0.052 | 0 | 0.479 | 0 | 0 | 0.047 |
| BRSTN2012174 | 1.466 | 1.470 | 5.820 | 0.487 | 0 | 0 | 0 |
| BRSTN2015889 | 0 | 7.039 | 0 | 0 | 0 | 0 | 0 |
| BRSTN2016992 | 0 | 0 | 0 | 0 | 0 | 0 | 0.611 |
| BRTHA1000311 | 0 | 0 | 0 | 0 | 0 | 0 | 7.331 |
| BRTHA2005864 | 0 | 0 | 0 | 0 | 0 | 0 | 6.047 |
| BRTHA2007998 | 0 | 0 | 0 | 0 | 0 | 0 | 2.143 |
| BRTHA2013054 | 0 | 0 | 0 | 0 | 0 | 0 | 7.462 |
| BRTHA2016577 | 0 | 4.288 | 0 | 0 | 0 | 17.389 | 2.931 |
| BRTHA2033155 | 0 | 7.729 | 0 | 0 | 0 | 0 | 21.134 |
| BRTHA3000633 | 0 | 62.102 | 0 | 0 | 0 | 0 | 0 |
| BRTHA3002427 | 0 | 0 | 0 | 0 | 0 | 0 | 3.551 |
| BRTHA3003225 | 0 | 0 | 0 | 0 | 0 | 0 | 52.835 |
| BRTHA3003490 | 0 | 0 | 0 | 3.913 | 0 | 11.964 | 8.067 |
| BRTHA3003736 | 0 | 0 | 0 | 0 | 0 | 0 | 8.017 |
| BRTHA3004307 | 0 | 0 | 0 | 0 | 0 | 0 | 11.227 |
| BRTHA3007472 | 0 | 7.091 | 0 | 0 | 0 | 0 | 4.847 |
| BRTHA3007922 | 0 | 0 | 0 | 37.613 | 0 | 0 | 0 |
| BRTHA3008778 | 0 | 0 | 0 | 0 | 0 | 0 | 30.863 |
| BRTHA3011194 | 12.809 | 0 | 0 | 0 | 0 | 0 | 13.172 |
| BRTHA3011265 | 0 | 0 | 0 | 20.563 | 0 | 0 | 0 |
| BRTHA3021971 | 0 | 0 | 55.855 | 0 | 0 | 0 | 2.411 |
| BRTHA3023403 | 0 | 0 | 0 | 0 | 0 | 0 | 27.684 |
| CD34C3000252 | 0 | 0 | 0 | 0 | 0 | 12.098 | 0 |
| CHONS2002829 | 0 | 2.969 | 0 | 0 | 0 | 0 | 0 |
| COLON2001721 | 0 | 10.053 | 0 | 0 | 0 | 0 | 0 |
| CTONG1000010 | 0 | 0 | 0 | 15.625 | 0 | 0 | 0 |
| CTONG1000052 | 0 | 1.098 | 0 | 11.650 | 0 | 4.453 | 6.005 |
| CTONG1000087 | 3.790 | 5.701 | 0 | 5.041 | 0 | 0 | 1.299 |
| CTONG1000094 | 0 | 1.415 | 0 | 0 | 0 | 0 | 4.354 |
| CTONG1000218 | 0 | 3.500 | 13.856 | 1.161 | 0 | 0 | 1.795 |
| CTONG1000241 | 0 | 0 | 0 | 0 | 0 | 0 | 7.906 |
| CTONG1000288 | 0 | 0 | 0 | 0 | 0 | 11.209 | 0 |
| CTONG2000034 | 0 | 0 | 0 | 0 | 0 | 66.426 | 0 |
| CTONG2000063 | 0 | 0 | 0 | 5.160 | 0 | 0 | 0 |
| CTONG2000452 | 0 | 0 | 0 | 0 | 0 | 0 | 3.618 |
| CTONG2000469 | 0 | 5.307 | 0 | 0 | 0 | 0 | 0 |
| CTONG2000508 | 0 | 1.435 | 0 | 1.903 | 0 | 0 | 3.924 |
| CTONG2001748 | 0 | 0 | 0 | 5.038 | 0 | 0 | 10.387 |
| CTONG2001820 | 0 | 49.384 | 0 | 0 | 0 | 0 | 0 |
| CTONG2001911 | 0 | 0 | 0 | 0 | 0 | 0 | 18.771 |
| CTONG2001932 | 0 | 0 | 0 | 0 | 0 | 0 | 12.834 |
| CTONG2002073 | 0 | 2.662 | 0 | 0 | 0 | 0 | 1.820 |
| CTONG2002095 | 0 | 12.727 | 0 | 33.758 | 0 | 0 | 8.700 |
| CTONG2002270 | 0 | 0.964 | 0 | 1.278 | 0 | 3.909 | 2.636 |
| CTONG2002709 | 0 | 0 | 62.349 | 0 | 0 | 0 | 0 |
| CTONG2002744 | 0 | 0 | 0 | 2.839 | 0 | 0 | 4.390 |
| CTONG2002803 | 0 | 10.703 | 0 | 3.549 | 0 | 0 | 1.829 |
| CTONG2002820 | 0 | 0 | 0 | 0 | 0 | 0 | 27.945 |
| CTONG2002832 | 0 | 0 | 0 | 0 | 0 | 0 | 27.853 |
| CTONG2002841 | 0 | 0 | 0 | 0 | 0 | 0 | 26.318 |
| CTONG2002903 | 0 | 5.598 | 0 | 0 | 0 | 0 | 0 |
| CTONG2003094 | 0 | 3.330 | 0 | 0 | 0 | 0 | 4.552 |
| CTONG2003293 | 0 | 0 | 0 | 22.278 | 0 | 0 | 11.483 |
| CTONG2003298 | 0 | 0 | 0 | 0 | 0 | 5.348 | 2.705 |
| CTONG2003524 | 0 | 2.928 | 0 | 0 | 0 | 11.875 | 4.003 |
| CTONG2004423 | 0 | 20.882 | 0 | 0 | 0 | 0 | 0 |
| CTONG2004487 | 0 | 0 | 0 | 2.280 | 0 | 6.971 | 3.525 |
| CTONG2005028 | 0 | 12.439 | 0 | 0 | 0 | 0 | 0 |
| CTONG2005278 | 10.444 | 0 | 0 | 6.946 | 0 | 0 | 21.481 |
| CTONG2005553 | 0 | 0 | 0 | 3.452 | 0 | 0 | 3.559 |
| CTONG2006004 | 0 | 1.918 | 0 | 2.544 | 0 | 0 | 2.622 |
| CTONG2006235 | 0 | 0 | 0 | 3.948 | 0 | 0 | 2.035 |
| CTONG2006412 | 0 | 0 | 0 | 14.961 | 0 | 0 | 15.423 |
| CTONG2006449 | 0 | 0 | 0 | 0 | 0 | 0 | 10.920 |
| CTONG2006562 | 0 | 0 | 0 | 0 | 0 | 10.318 | 3.479 |
| CTONG2006709 | 0 | 0 | 0 | 0 | 0 | 0 | 12.850 |
| CTONG2007078 | 0 | 0 | 0 | 0 | 0 | 0 | 1.588 |
| CTONG2007400 | 0 | 20.911 | 0 | 0 | 0 | 0 | 0 |
| CTONG2007500 | 0 | 1.367 | 0 | 1.812 | 0 | 0 | 0.934 |
| CTONG2007586 | 21.782 | 0 | 0 | 0 | 0 | 0 | 14.933 |
| CTONG2007959 | 0 | 66.117 | 0 | 0 | 0 | 0 | 0 |
| CTONG2008321 | 0 | 0 | 0 | 0 | 0 | 0 | 18.688 |
| CTONG2008398 | 0 | 2.779 | 0 | 0 | 0 | 0 | 1.900 |
| CTONG2008466 | 0 | 14.208 | 0 | 0 | 0 | 0 | 9.713 |
| CTONG2008506 | 0 | 0 | 0 | 4.536 | 0 | 0 | 5.845 |
| CTONG2008518 | 0 | 6.999 | 0 | 9.282 | 0 | 0 | 0 |
| CTONG2008792 | 0 | 13.353 | 0 | 0 | 0 | 0 | 9.128 |
| CTONG2009108 | 0 | 0 | 0 | 0 | 0 | 0 | 29.481 |
| CTONG2009529 | 22.915 | 0 | 0 | 0 | 0 | 0 | 0 |
| CTONG2010348 | 0 | 0 | 0 | 4.268 | 0 | 0 | 2.200 |
| CTONG2010566 | 0 | 24.642 | 0 | 0 | 0 | 0 | 0 |
| CTONG2010649 | 5.667 | 2.842 | 0 | 3.769 | 0 | 0 | 11.655 |
| CTONG2010821 | 0 | 0 | 0 | 1.722 | 0 | 0 | 0 |
| CTONG2011801 | 0 | 0 | 0 | 0 | 0 | 0 | 11.035 |
| CTONG2012452 | 0 | 3.236 | 0 | 0 | 0 | 0 | 1.327 |
| CTONG2012453 | 0 | 0 | 0 | 18.151 | 0 | 0 | 0 |
| CTONG2012564 | 0 | 7.180 | 0 | 0 | 0 | 0 | 0 |
| CTONG2012607 | 0 | 0 | 0 | 0 | 0 | 0 | 2.148 |
| CTONG2012661 | 0 | 0 | 0 | 0 | 0 | 0 | 26.030 |
| CTONG2012843 | 0 | 0 | 0 | 0 | 0 | 66.426 | 0 |
| CTONG2012879 | 0 | 12.359 | 0 | 24.588 | 0 | 0 | 2.112 |
| CTONG2012996 | 0 | 0 | 0 | 0 | 0 | 0 | 7.255 |
| CTONG2013352 | 0 | 49.384 | 0 | 0 | 0 | 0 | 0 |
| CTONG2013381 | 0 | 5.701 | 0 | 30.243 | 0 | 0 | 3.897 |
| CTONG2013907 | 0 | 0 | 0 | 10.392 | 0 | 0 | 0 |
| CTONG2013934 | 0 | 0 | 0 | 0 | 0 | 0 | 8.617 |
| CTONG2014280 | 0 | 0 | 0 | 30.295 | 0 | 0 | 0 |
| CTONG2014369 | 0 | 0 | 0 | 0 | 0 | 30.670 | 0 |
| CTONG2014898 | 0 | 0 | 0 | 0 | 0 | 0 | 14.331 |
| CTONG2015091 | 0 | 0 | 0 | 0 | 0 | 5.985 | 2.018 |
| CTONG2016056 | 0 | 0 | 57.220 | 0 | 0 | 0 | 0 |
| CTONG2016408 | 0 | 13.456 | 0 | 0 | 0 | 0 | 4.599 |
| CTONG2016575 | 1.802 | 7.228 | 0 | 1.198 | 0 | 0 | 9.265 |
| CTONG2016824 | 0 | 0 | 0 | 0 | 0 | 31.370 | 0 |
| CTONG2016931 | 0 | 0 | 0 | 0 | 0 | 22.490 | 0 |
| CTONG2017444 | 0 | 0 | 0 | 0 | 0 | 27.140 | 0 |
| CTONG2017500 | 0 | 0 | 0 | 0 | 0 | 0 | 3.291 |
| CTONG2018211 | 0 | 12.395 | 0 | 16.440 | 0 | 0 | 0 |
| CTONG2018383 | 0 | 0 | 0 | 10.895 | 0 | 0 | 0 |
| CTONG2018632 | 0 | 29.069 | 0 | 0 | 0 | 0 | 0 |
| CTONG2018637 | 0 | 0 | 0 | 0 | 0 | 0 | 16.300 |
| CTONG2018739 | 0 | 0 | 0 | 0 | 0 | 0 | 4.814 |
| CTONG2018808 | 0 | 0 | 0 | 0 | 0 | 58.046 | 0 |
| CTONG2018898 | 0 | 0.875 | 0 | 1.161 | 0 | 0 | 23.932 |
| CTONG2019400 | 0 | 0 | 0 | 0 | 0 | 0 | 24.523 |
| CTONG2019788 | 0 | 0 | 0 | 0 | 0 | 0 | 3.798 |
| CTONG2020411 | 0 | 25.022 | 0 | 16.593 | 0 | 0 | 0 |
| CTONG2020484 | 2.130 | 0 | 0 | 1.417 | 0 | 0 | 0 |
| CTONG2020560 | 0 | 0 | 0 | 3.616 | 0 | 0 | 0 |
| CTONG2020638 | 0 | 22.499 | 0 | 0 | 0 | 0 | 0 |
| CTONG2028124 | 0 | 0.913 | 0 | 1.211 | 0 | 3.704 | 1.249 |
| CTONG2028208 | 0 | 6.435 | 0 | 0 | 0 | 0 | 0 |
| CTONG3002835 | 0 | 1.996 | 0 | 0 | 0 | 0 | 2.730 |
| CTONG3003905 | 0 | 0 | 0 | 47.197 | 0 | 0 | 0 |
| CTONG3004726 | 0 | 0 | 0 | 0 | 0 | 0 | 21.039 |
| CTONG3006629 | 0 | 0 | 0 | 0 | 0 | 0 | 40.011 |
| CTONG3008894 | 2.634 | 9.247 | 0 | 7.008 | 0 | 0 | 12.642 |
| CTONG3009028 | 0 | 2.924 | 0 | 0 | 0 | 0 | 0 |
| CTONG3009239 | 0 | 2.624 | 0 | 0 | 0 | 0 | 0 |
| D30ST1000267 | 0 | 0 | 0 | 0 | 0 | 0 | 5.365 |
| D30ST1000270 | 0 | 4.695 | 0 | 6.227 | 0 | 0 | 0 |
| D30ST2002068 | 0 | 0.781 | 0 | 0 | 0 | 0 | 0 |
| D60ST2000464 | 0 | 0 | 0 | 0 | 0 | 0 | 1.361 |
| DFNES2000146 | 0 | 0 | 0 | 0 | 0 | 0 | 13.829 |
| DFNES2000153 | 0 | 0 | 0 | 0 | 0 | 0 | 3.977 |
| DFNES2000335 | 0 | 0 | 0 | 11.418 | 0 | 0 | 0 |
| DFNES2000443 | 0 | 0 | 0 | 3.272 | 0 | 0 | 0 |
| DFNES2000526 | 20.031 | 0 | 0 | 0 | 0 | 0 | 0 |
| DFNES2004346 | 11.342 | 0 | 0 | 0 | 0 | 0 | 0 |
| DFNES2004371 | 0 | 0 | 0 | 3.802 | 0 | 0 | 3.920 |
| DFNES2004608 | 0 | 0 | 0 | 0 | 0 | 55.567 | 0 |
| DFNES2005690 | 0 | 9.226 | 0 | 0 | 0 | 0 | 0 |
| DFNES2005766 | 0 | 0 | 52.757 | 0 | 0 | 0 | 0 |
| DFNES2006346 | 0 | 0 | 0 | 0 | 0 | 0 | 8.776 |
| DFNES2007634 | 0 | 1.615 | 0 | 0 | 0 | 0 | 2.208 |
| DFNES2008088 | 9.527 | 0 | 0 | 0 | 0 | 0 | 0 |
| DFNES2008160 | 0 | 0 | 0 | 0 | 0 | 0 | 11.131 |
| DFNES2009482 | 0 | 2.577 | 0 | 0 | 0 | 0 | 0 |
| DFNES2011499 | 0 | 22.548 | 0 | 0 | 0 | 0 | 0 |
| FCBBF1000024 | 0 | 0 | 0 | 10.583 | 0 | 0 | 10.910 |
| FCBBF1000027 | 0 | 1.997 | 0 | 3.531 | 0 | 0 | 1.820 |
| FCBBF1000038 | 0 | 0 | 0 | 0 | 0 | 0 | 41.870 |
| FCBBF1000053 | 19.616 | 0 | 0 | 0 | 0 | 0 | 3.362 |
| FCBBF1000061 | 0 | 0 | 0 | 0 | 0 | 0 | 17.530 |
| FCBBF1000063 | 0 | 0 | 0 | 14.415 | 0 | 0 | 7.430 |
| FCBBF1000077 | 0 | 1.472 | 0 | 0 | 0 | 0 | 13.079 |
| FCBBF1000115 | 0 | 0 | 0 | 0 | 0 | 0 | 25.252 |
| FCBBF1000118 | 0 | 0 | 0 | 0 | 0 | 0 | 56.514 |
| FCBBF1000139 | 0 | 0 | 0 | 12.640 | 0 | 0 | 34.747 |
| FCBBF1000197 | 0 | 1.941 | 0 | 0 | 0 | 0 | 0 |
| FCBBF1000280 | 0 | 10.265 | 0 | 0 | 0 | 0 | 0 |
| FCBBF1000294 | 0 | 0 | 0 | 0 | 0 | 7.935 | 6.688 |
| FCBBF1000305 | 0 | 0 | 0 | 0 | 0 | 0 | 66.858 |
| FCBBF1000377 | 0 | 19.652 | 0 | 0 | 0 | 0 | 13.434 |
| FCBBF1000403 | 0 | 15.241 | 0 | 0 | 0 | 0 | 0 |
| FCBBF1000412 | 0 | 0 | 0 | 0 | 0 | 0 | 7.212 |
| FCBBF1000449 | 0 | 0 | 0 | 0 | 0 | 0 | 16.611 |
| FCBBF1000466 | 0 | 2.315 | 0 | 1.535 | 0 | 0 | 3.165 |
| FCBBF1000476 | 0 | 0 | 0 | 0 | 0 | 0 | 10.789 |
| FCBBF1000509 | 6.762 | 0 | 0 | 0 | 0 | 0 | 0 |
| FCBBF1000556 | 0 | 0 | 0 | 5.138 | 0 | 0 | 0 |
| FCBBF1000563 | 5.443 | 24.565 | 0 | 7.240 | 0 | 0 | 1.866 |
| FCBBF1000574 | 0 | 0 | 0 | 0 | 0 | 0 | 15.473 |
| FCBBF1000671 | 0 | 0 | 0 | 0 | 0 | 0 | 51.023 |
| FCBBF1000675 | 0 | 23.076 | 0 | 0 | 0 | 0 | 0 |
| FCBBF1000687 | 31.307 | 0 | 0 | 0 | 0 | 0 | 0 |
| FCBBF1000732 | 0 | 5.089 | 0 | 0 | 0 | 0 | 0 |
| FCBBF1000760 | 0 | 1.190 | 0 | 0 | 0 | 0 | 0.814 |
| FCBBF2000038 | 0 | 0 | 0 | 0 | 0 | 0 | 5.006 |
| FCBBF2000199 | 0 | 0 | 0 | 0 | 0 | 0 | 31.279 |
| FCBBF2000259 | 0 | 0 | 0 | 0 | 0 | 0 | 14.857 |
| FCBBF2000362 | 30.336 | 0 | 0 | 0 | 0 | 0 | 0 |
| FCBBF2000566 | 0 | 0 | 0 | 0 | 0 | 0 | 32.322 |
| FCBBF2000591 | 0 | 0 | 0 | 0.691 | 0 | 0 | 0 |
| FCBBF2000885 | 5.563 | 0 | 0 | 7.399 | 0 | 0 | 9.534 |
| FCBBF2001001 | 0 | 17.368 | 0 | 0 | 0 | 0 | 0 |
| FCBBF2001105 | 0 | 16.549 | 0 | 0 | 0 | 0 | 3.771 |
| FCBBF2001183 | 0 | 0 | 0 | 0 | 0 | 0 | 8.217 |
| FCBBF2001211 | 0 | 11.646 | 0 | 0 | 0 | 0 | 0 |
| FCBBF2001291 | 6.895 | 3.457 | 0 | 4.585 | 0 | 0 | 0 |
| FCBBF2001309 | 0 | 7.906 | 0 | 0 | 0 | 0 | 21.620 |
| FCBBF2001538 | 0 | 2.769 | 0 | 0 | 0 | 0 | 0 |
| FCBBF2001594 | 0 | 6.911 | 0 | 0 | 0 | 0 | 9.449 |
| FCBBF2002349 | 0 | 7.174 | 0 | 0 | 0 | 0 | 4.904 |
| FCBBF2002801 | 0 | 0 | 0 | 0 | 0 | 0 | 12.897 |
| FCBBF2004066 | 0 | 0 | 0 | 0 | 0 | 0 | 5.009 |
| FCBBF2004373 | 0 | 0 | 0 | 56.608 | 0 | 0 | 0 |
| FCBBF2005733 | 0 | 0 | 0 | 0 | 0 | 0 | 40.207 |
| FCBBF2005909 | 0 | 0 | 0 | 0 | 0 | 0 | 31.013 |
| FCBBF2005966 | 34.323 | 0 | 0 | 0 | 0 | 0 | 0 |
| FCBBF2006781 | 0 | 0 | 0 | 30.502 | 0 | 0 | 0 |
| FCBBF2007302 | 0 | 0 | 0 | 56.608 | 0 | 0 | 0 |
| FCBBF2007556 | 0 | 0 | 0 | 0 | 0 | 0 | 11.353 |
| FCBBF2007840 | 45.139 | 0 | 0 | 0 | 0 | 0 | 0 |
| FCBBF3000102 | 0 | 0 | 0 | 0 | 0 | 0 | 77.076 |
| FCBBF3000110 | 0 | 0 | 0 | 0 | 0 | 0 | 8.023 |
| FCBBF3000115 | 0 | 0 | 0 | 0 | 0 | 0 | 9.916 |
| FCBBF3000168 | 0 | 14.795 | 0 | 0 | 0 | 0 | 20.229 |
| FCBBF3000388 | 8.952 | 0 | 0 | 5.953 | 0 | 0 | 6.137 |
| FCBBF3000434 | 6.709 | 0 | 0 | 0 | 0 | 0 | 2.300 |
| FCBBF3001081 | 0 | 0 | 0 | 6.328 | 0 | 0 | 0 |
| FCBBF3001281 | 0 | 0 | 0 | 49.073 | 0 | 0 | 0 |
| FCBBF3001377 | 0 | 0 | 0 | 24.817 | 0 | 0 | 0 |
| FCBBF3001632 | 5.595 | 2.805 | 0 | 7.441 | 0 | 0 | 13.424 |
| FCBBF3001657 | 0 | 0 | 0 | 0 | 0 | 0 | 11.722 |
| FCBBF3001818 | 0 | 16.553 | 0 | 0 | 0 | 0 | 0 |
| FCBBF3001855 | 0 | 5.089 | 0 | 0 | 0 | 20.639 | 3.479 |
| FCBBF3001890 | 9.969 | 4.999 | 0 | 0 | 0 | 0 | 3.417 |
| FCBBF3001977 | 0 | 13.536 | 0 | 17.952 | 0 | 0 | 9.253 |
| FCBBF3002556 | 0 | 0 | 0 | 0 | 0 | 0 | 40.207 |
| FCBBF3003787 | 0 | 0 | 0 | 0 | 0 | 72.131 | 0 |
| FCBBF3003800 | 1.428 | 2.863 | 0 | 1.899 | 0 | 0 | 10.766 |
| FCBBF3003902 | 0 | 0 | 0 | 56.608 | 0 | 0 | 0 |
| FCBBF3004261 | 0 | 0 | 0 | 21.802 | 0 | 0 | 0 |
| FCBBF3004323 | 0 | 0 | 0 | 0 | 0 | 0 | 27.378 |
| FCBBF3004409 | 0 | 0 | 0 | 0 | 0 | 0 | 40.207 |
| FCBBF3004473 | 0 | 4.176 | 0 | 0 | 0 | 0 | 2.854 |
| FCBBF3004715 | 0 | 0 | 0 | 0 | 0 | 0 | 4.652 |
| FCBBF3004955 | 0 | 0 | 0 | 0 | 0 | 0 | 28.723 |
| FCBBF3005320 | 0 | 0 | 0 | 0 | 0 | 0 | 6.778 |
| FCBBF3005330 | 2.511 | 3.777 | 0 | 0 | 0 | 0 | 2.582 |
| FCBBF3005497 | 0 | 0 | 0 | 3.789 | 0 | 0 | 2.930 |
| FCBBF3006821 | 0 | 10.388 | 0 | 0 | 0 | 0 | 0 |
| FCBBF3007859 | 0 | 11.805 | 0 | 0 | 0 | 0 | 8.070 |
| FCBBF3008100 | 0 | 0 | 0 | 0 | 0 | 0 | 18.533 |
| FCBBF3008382 | 0 | 0 | 0 | 0 | 0 | 0 | 13.381 |
| FCBBF3008644 | 0 | 0 | 0 | 0 | 0 | 0 | 10.704 |
| FCBBF3009069 | 0 | 0 | 0 | 0 | 0 | 0 | 5.563 |
| FCBBF3009152 | 0 | 0 | 0 | 45.841 | 0 | 0 | 0 |
| FCBBF3009479 | 35.849 | 0 | 0 | 0 | 0 | 0 | 0 |
| FCBBF3009541 | 0 | 0 | 0 | 5.961 | 0 | 0 | 1.536 |
| FCBBF3009703 | 0 | 0 | 0 | 0 | 0 | 0 | 40.207 |
| FCBBF3010012 | 0 | 0 | 0 | 0 | 0 | 0 | 22.837 |
| FCBBF3010142 | 0 | 0 | 0 | 0 | 0 | 0 | 17.930 |
| FCBBF3010695 | 0 | 0 | 0 | 0 | 0 | 0 | 3.081 |
| FCBBF3011485 | 0 | 0 | 0 | 0 | 0 | 0 | 49.834 |
| FCBBF3012347 | 0 | 3.989 | 0 | 0 | 0 | 0 | 0 |
| FCBBF3012443 | 0 | 49.588 | 0 | 0 | 0 | 0 | 0 |
| FCBBF3012667 | 0 | 0 | 0 | 0 | 0 | 0 | 30.319 |
| FCBBF3013589 | 0 | 0 | 0 | 19.996 | 0 | 0 | 0 |
| FCBBF3014260 | 0 | 0 | 0 | 21.767 | 0 | 0 | 8.415 |
| FCBBF3014770 | 0 | 0 | 0 | 0 | 0 | 0 | 11.854 |
| FCBBF3015100 | 0 | 0 | 0 | 0 | 0 | 0 | 43.390 |
| FCBBF3016134 | 0 | 0 | 0 | 25.089 | 0 | 0 | 0 |
| FCBBF3016451 | 0 | 0 | 0 | 56.608 | 0 | 0 | 0 |
| FCBBF3016667 | 0 | 0 | 0 | 0 | 0 | 0 | 15.903 |
| FCBBF3016928 | 0 | 1.592 | 25.214 | 2.112 | 0 | 0 | 1.089 |
| FCBBF3017024 | 0 | 0 | 0 | 0 | 0 | 0 | 12.734 |
| FCBBF3017288 | 0 | 0 | 0 | 0 | 0 | 0 | 40.207 |
| FCBBF3017396 | 0 | 0 | 0 | 0 | 0 | 0 | 7.608 |
| FCBBF3017918 | 0 | 23.796 | 0 | 31.560 | 0 | 0 | 0 |
| FCBBF3018453 | 16.741 | 8.394 | 0 | 0 | 0 | 0 | 22.954 |
| FCBBF3018826 | 0 | 0 | 0 | 23.511 | 0 | 0 | 0 |
| FCBBF3018949 | 0 | 0 | 0 | 0 | 0 | 0 | 17.580 |
| FCBBF3019437 | 0 | 0 | 0 | 0 | 0 | 0 | 40.207 |
| FCBBF3019455 | 0 | 0 | 0 | 0 | 0 | 0 | 20.235 |
| FCBBF3019714 | 0 | 0 | 0 | 0 | 0 | 0 | 2.545 |
| FCBBF3019784 | 0 | 49.588 | 0 | 0 | 0 | 0 | 0 |
| FCBBF3022504 | 0 | 0 | 0 | 0 | 0 | 0 | 19.361 |
| FCBBF3022593 | 0 | 12.591 | 0 | 0 | 0 | 0 | 8.607 |
| FCBBF3023368 | 0 | 0 | 0 | 0 | 0 | 0 | 6.096 |
| FCBBF3023667 | 0.481 | 2.655 | 3.821 | 1.600 | 0 | 0 | 0 |
| FCBBF3023887 | 0 | 0 | 0 | 0 | 0 | 0 | 58.866 |
| FCBBF3024002 | 0 | 0 | 0 | 0 | 0 | 0 | 28.201 |
| FCBBF3024623 | 0 | 5.091 | 0 | 0 | 0 | 0 | 0 |
| FCBBF3025528 | 0 | 0 | 0 | 0 | 0 | 0 | 11.995 |
| FCBBF3025730 | 0 | 0 | 0 | 0 | 0 | 0 | 24.596 |
| FCBBF3025737 | 0 | 0 | 0 | 15.666 | 0 | 0 | 0 |
| FCBBF3026048 | 0 | 0 | 0 | 0 | 0 | 0 | 40.207 |
| FCBBF3026651 | 0 | 0 | 0 | 0 | 0 | 0 | 9.065 |
| FCBBF3027854 | 0 | 28.447 | 0 | 0 | 0 | 0 | 0 |
| FCBBF3028244 | 3.365 | 1.687 | 0 | 8.951 | 0 | 0 | 11.534 |
| FCBBF3028593 | 0 | 0 | 0 | 0 | 0 | 0 | 20.063 |
| FCBBF4000017 | 0 | 0 | 0 | 0 | 0 | 0 | 11.034 |
| FCBBF4000142 | 0 | 0 | 0 | 8.811 | 0 | 0 | 18.167 |
| FCBBF4000193 | 0 | 0 | 0 | 0 | 0 | 0 | 40.207 |
| FCBBF4000446 | 8.166 | 6.825 | 0 | 5.431 | 0 | 0 | 17.729 |
| FCBBF5000061 | 0 | 38.068 | 0 | 0 | 0 | 0 | 0 |
| FCBBF5000165 | 11.929 | 0 | 0 | 0 | 0 | 0 | 8.178 |
| FEBRA1000008 | 0 | 42.162 | 0 | 0 | 0 | 0 | 0 |
| FEBRA1000030 | 59.247 | 0 | 0 | 0 | 0 | 0 | 0 |
| FEBRA1000057 | 0 | 9.464 | 0 | 0 | 0 | 0 | 0 |
| FEBRA1000088 | 15.466 | 0 | 0 | 0 | 0 | 0 | 0 |
| FEBRA1000188 | 0 | 0 | 0 | 5.044 | 0 | 0 | 36.398 |
| FEBRA2000105 | 0 | 0 | 0 | 1.729 | 0 | 0 | 0.891 |
| FEBRA2000228 | 0 | 0 | 0 | 0 | 0 | 0 | 9.814 |
| FEBRA2000253 | 0 | 0 | 0 | 0 | 0 | 0 | 36.369 |
| FEBRA2000297 | 28.740 | 0 | 0 | 0 | 0 | 0 | 9.852 |
| FEBRA2000377 | 0 | 0 | 0 | 0 | 0 | 0 | 12.427 |
| FEBRA2000397 | 42.133 | 0 | 0 | 0 | 0 | 0 | 28.885 |
| FEBRA2000452 | 0 | 3.645 | 0 | 9.669 | 0 | 0 | 11.213 |
| FEBRA2000462 | 0 | 0 | 0 | 0 | 0 | 0 | 7.013 |
| FEBRA2000532 | 0 | 0 | 0 | 0 | 0 | 0 | 3.973 |
| FEBRA2000581 | 2.883 | 0 | 0 | 0 | 0 | 0 | 12.847 |
| FEBRA2000733 | 1.832 | 0.306 | 0 | 0 | 0 | 0 | 0 |
| FEBRA2000740 | 0 | 2.055 | 0 | 0 | 0 | 0 | 4.215 |
| FEBRA2000757 | 0 | 0 | 0 | 0 | 0 | 0 | 19.021 |
| FEBRA2000787 | 0 | 0 | 0 | 4.760 | 0 | 0 | 7.361 |
| FEBRA2000793 | 0 | 0 | 0 | 0 | 0 | 0 | 28.583 |
| FEBRA2000815 | 0 | 0 | 0 | 0 | 0 | 0 | 17.964 |
| FEBRA2000881 | 0 | 0 | 0 | 7.629 | 0 | 0 | 0 |
| FEBRA2000972 | 0 | 0 | 0 | 0 | 0 | 0 | 18.817 |
| FEBRA2001146 | 0 | 0 | 0 | 0 | 0 | 0 | 13.892 |
| FEBRA2001197 | 0 | 0 | 0 | 0 | 0 | 0 | 35.024 |
| FEBRA2001227 | 0 | 0 | 0 | 0 | 0 | 0 | 4.593 |
| FEBRA2001245 | 9.141 | 0 | 0 | 0 | 0 | 0 | 12.534 |
| FEBRA2001492 | 0 | 0 | 0 | 15.601 | 0 | 0 | 4.021 |
| FEBRA2001571 | 0 | 0 | 0 | 0 | 0 | 15.455 | 7.816 |
| FEBRA2001581 | 14.860 | 0 | 0 | 0 | 0 | 0 | 0 |
| FEBRA2001669 | 0 | 0 | 0 | 2.582 | 0 | 0 | 23.955 |
| FEBRA2001715 | 0 | 0 | 0 | 7.210 | 0 | 0 | 9.910 |
| FEBRA2001745 | 4.542 | 0 | 0 | 0 | 0 | 0 | 9.341 |
| FEBRA2001814 | 9.589 | 0 | 0 | 0 | 0 | 0 | 3.287 |
| FEBRA2001828 | 0 | 9.887 | 0 | 0 | 0 | 0 | 0 |
| FEBRA2001867 | 0 | 0 | 0 | 17.865 | 0 | 0 | 4.604 |
| FEBRA2001990 | 0 | 0 | 0 | 0 | 0 | 0 | 4.508 |
| FEBRA2002027 | 0 | 0 | 0 | 0 | 0 | 0 | 3.147 |
| FEBRA2002352 | 12.580 | 6.308 | 0 | 0 | 0 | 0 | 8.625 |
| FEBRA2002410 | 0 | 0 | 0 | 0 | 0 | 0 | 33.259 |
| FEBRA2002456 | 0 | 0 | 0 | 2.629 | 0 | 0 | 8.130 |
| FEBRA2002525 | 0 | 0 | 0 | 0 | 0 | 0 | 33.259 |
| FEBRA2002682 | 0 | 0 | 0 | 0 | 0 | 0 | 33.259 |
| FEBRA2002707 | 0 | 0 | 0 | 0 | 0 | 26.556 | 0 |
| FEBRA2002781 | 0 | 0 | 0 | 0 | 0 | 0 | 25.500 |
| FEBRA2002792 | 0 | 2.432 | 0 | 3.226 | 0 | 0 | 0 |
| FEBRA2002931 | 0 | 0 | 0 | 15.825 | 0 | 0 | 12.236 |
| FEBRA2002933 | 0 | 1.345 | 0 | 2.676 | 0 | 0 | 0.460 |
| FEBRA2003100 | 2.387 | 2.394 | 0 | 0 | 0 | 0 | 5.727 |
| FEBRA2003128 | 0 | 15.858 | 0 | 0 | 0 | 0 | 7.227 |
| FEBRA2003198 | 0 | 0 | 0 | 0 | 0 | 0 | 33.259 |
| FEBRA2003470 | 0 | 0 | 0 | 0 | 0 | 0 | 18.131 |
| FEBRA2003541 | 0 | 0 | 0 | 0 | 0 | 0 | 32.225 |
| FEBRA2003750 | 0 | 0 | 0 | 0 | 0 | 0 | 2.268 |
| FEBRA2003833 | 0 | 0 | 0 | 16.670 | 0 | 0 | 4.296 |
| FEBRA2003926 | 0 | 1.269 | 0 | 5.047 | 0 | 5.145 | 0 |
| FEBRA2003930 | 0 | 3.266 | 0 | 0 | 0 | 0 | 2.233 |
| FEBRA2004042 | 0 | 0 | 0 | 15.337 | 0 | 0 | 5.270 |
| FEBRA2004110 | 0 | 0 | 0 | 0 | 0 | 0 | 33.259 |
| FEBRA2004191 | 0 | 0 | 0 | 0 | 0 | 0 | 24.636 |
| FEBRA2004224 | 0 | 0 | 0 | 0 | 0 | 0 | 1.438 |
| FEBRA2004293 | 0 | 0 | 0 | 0 | 0 | 0 | 6.605 |
| FEBRA2004325 | 0 | 6.401 | 0 | 0 | 0 | 0 | 0 |
| FEBRA2004412 | 0 | 0 | 0 | 0 | 0 | 0 | 3.647 |
| FEBRA2004485 | 0 | 0 | 0 | 0 | 0 | 0 | 17.243 |
| FEBRA2005114 | 24.318 | 12.194 | 0 | 0 | 0 | 0 | 0 |
| FEBRA2005361 | 0 | 0 | 0 | 0 | 0 | 0 | 1.740 |
| FEBRA2005416 | 0 | 0 | 0 | 2.588 | 0 | 0 | 1.334 |
| FEBRA2005476 | 0 | 4.733 | 0 | 6.277 | 0 | 0 | 0 |
| FEBRA2005572 | 6.457 | 0 | 0 | 0 | 0 | 0 | 0 |
| FEBRA2005734 | 6.120 | 3.069 | 0 | 4.070 | 0 | 0 | 0 |
| FEBRA2005778 | 0 | 0 | 0 | 7.229 | 0 | 0 | 11.179 |
| FEBRA2005824 | 0 | 0 | 0 | 0 | 0 | 5.498 | 1.853 |
| FEBRA2005995 | 0 | 2.548 | 0 | 0 | 0 | 0 | 19.157 |
| FEBRA2006092 | 2.253 | 0 | 0 | 1.499 | 0 | 0 | 1.545 |
| FEBRA2006112 | 0 | 0 | 0 | 0 | 0 | 0 | 8.200 |
| FEBRA2006255 | 0 | 0 | 0 | 0 | 0 | 0 | 14.569 |
| FEBRA2006270 | 0 | 0 | 0 | 0 | 0 | 8.616 | 1.452 |
| FEBRA2006357 | 0 | 0 | 0 | 0 | 0 | 9.763 | 4.114 |
| FEBRA2006368 | 0 | 0 | 0 | 0 | 0 | 0 | 11.580 |
| FEBRA2006372 | 0 | 0 | 38.646 | 3.237 | 0 | 0 | 3.337 |
| FEBRA2006396 | 0 | 14.606 | 0 | 0 | 0 | 0 | 29.955 |
| FEBRA2006401 | 0 | 1.824 | 0 | 0 | 82.760 | 0 | 1.247 |
| FEBRA2006485 | 0 | 0 | 0 | 0 | 0 | 0 | 3.779 |
| FEBRA2006521 | 0 | 0 | 0 | 0 | 0 | 0 | 9.501 |
| FEBRA2006553 | 0 | 0 | 0 | 0 | 0 | 0 | 4.915 |
| FEBRA2006627 | 0 | 0 | 0 | 0 | 0 | 0 | 25.634 |
| FEBRA2006808 | 0 | 0 | 0 | 0 | 0 | 0 | 5.099 |
| FEBRA2006873 | 0 | 8.160 | 0 | 0 | 0 | 0 | 11.157 |
| FEBRA2007458 | 29.545 | 14.815 | 0 | 0 | 0 | 0 | 20.255 |
| FEBRA2007544 | 0 | 0 | 0 | 0 | 0 | 0 | 9.124 |
| FEBRA2007622 | 0 | 1.875 | 0 | 0 | 0 | 7.603 | 2.563 |
| FEBRA2007714 | 0 | 0 | 0 | 0 | 0 | 0 | 31.096 |
| FEBRA2007793 | 0 | 0 | 0 | 0 | 0 | 0 | 49.917 |
| FEBRA2007801 | 0 | 0 | 0 | 5.950 | 0 | 0 | 0 |
| FEBRA2007880 | 0 | 0 | 0 | 0 | 0 | 0 | 4.676 |
| FEBRA2007900 | 0 | 0 | 0 | 18.681 | 0 | 0 | 0 |
| FEBRA2007901 | 0 | 0 | 0 | 0 | 0 | 0 | 4.604 |
| FEBRA2008036 | 0 | 0 | 0 | 0 | 0 | 0 | 10.646 |
| FEBRA2008081 | 2.566 | 5.147 | 0 | 6.827 | 0 | 10.438 | 4.399 |
| FEBRA2008087 | 1.949 | 0 | 5.158 | 0 | 0 | 0 | 0 |
| FEBRA2008201 | 0 | 0 | 0 | 17.339 | 0 | 0 | 0 |
| FEBRA2008210 | 0 | 0 | 0 | 0 | 0 | 0 | 8.332 |
| FEBRA2008287 | 0 | 0 | 0 | 0 | 0 | 0 | 3.662 |
| FEBRA2008302 | 0 | 3.868 | 0 | 0 | 0 | 0 | 2.644 |
| FEBRA2008360 | 0 | 0 | 0 | 0 | 0 | 0 | 25.401 |
| FEBRA2008583 | 0.479 | 0.721 | 0 | 0 | 43.582 | 0 | 10.016 |
| FEBRA2008662 | 11.505 | 0 | 0 | 0 | 0 | 0 | 1.972 |
| FEBRA2008861 | 0 | 10.618 | 0 | 4.694 | 0 | 0 | 14.517 |
| FEBRA2009022 | 12.103 | 0 | 0 | 0 | 0 | 0 | 0 |
| FEBRA2009419 | 0 | 4.802 | 0 | 0 | 0 | 0 | 6.566 |
| FEBRA2009514 | 0 | 6.019 | 0 | 0 | 0 | 0 | 0 |
| FEBRA2009588 | 0 | 0 | 0 | 0 | 0 | 0 | 42.136 |
| FEBRA2009846 | 0 | 0 | 0 | 0 | 0 | 0 | 25.645 |
| FEBRA2009986 | 0 | 0 | 0 | 0 | 0 | 0 | 23.954 |
| FEBRA2010719 | 0 | 0 | 0 | 0 | 0 | 0 | 21.556 |
| FEBRA2010746 | 0 | 0 | 0 | 0 | 0 | 0 | 63.946 |
| FEBRA2011090 | 0 | 0 | 0 | 0 | 0 | 0 | 21.561 |
| FEBRA2013699 | 0 | 13.005 | 0 | 0 | 0 | 0 | 8.891 |
| FEBRA2014122 | 0 | 0 | 0 | 0 | 0 | 0 | 33.259 |
| FEBRA2014417 | 1.957 | 0 | 0 | 0 | 0 | 0 | 2.012 |
| FEBRA2014578 | 0 | 0 | 0 | 0 | 0 | 0 | 27.189 |
| FEBRA2014939 | 0 | 0 | 0 | 0 | 0 | 0 | 51.886 |
| FEBRA2015085 | 5.526 | 0 | 0 | 7.349 | 0 | 0 | 22.729 |
| FEBRA2017024 | 0 | 0 | 0 | 0 | 0 | 0 | 11.986 |
| FEBRA2017850 | 0 | 0 | 0 | 0 | 0 | 0 | 22.253 |
| FEBRA2018203 | 0 | 0 | 0 | 0 | 0 | 0 | 18.850 |
| FEBRA2018407 | 0 | 29.440 | 0 | 0 | 0 | 0 | 0 |
| FEBRA2018476 | 0 | 0 | 0 | 0 | 0 | 0 | 2.715 |
| FEBRA2019242 | 0 | 58.974 | 0 | 0 | 0 | 0 | 0 |
| FEBRA2019637 | 59.247 | 0 | 0 | 0 | 0 | 0 | 0 |
| FEBRA2020886 | 0 | 0 | 0 | 0 | 0 | 0 | 15.061 |
| FEBRA2020977 | 0 | 0 | 0 | 0 | 0 | 0 | 6.546 |
| FEBRA2021966 | 0 | 0 | 0 | 0 | 0 | 31.791 | 0 |
| FEBRA2022055 | 0 | 0.967 | 0 | 0 | 0 | 0 | 0 |
| FEBRA2022504 | 5.952 | 2.985 | 0 | 3.958 | 0 | 0 | 0 |
| FEBRA2023377 | 0 | 0 | 0 | 0 | 0 | 0 | 9.637 |
| FEBRA2024019 | 4.860 | 0 | 0 | 3.232 | 0 | 0 | 0 |
| FEBRA2024727 | 0 | 0 | 0 | 0 | 0 | 0 | 33.259 |
| FEBRA2025427 | 0 | 0 | 0 | 0 | 0 | 0 | 3.079 |
| FEBRA2025838 | 2.977 | 0 | 0 | 0 | 0 | 0 | 1.020 |
| FEBRA2026582 | 0 | 42.162 | 0 | 0 | 0 | 0 | 0 |
| FEBRA2028503 | 0 | 0 | 0 | 0 | 0 | 0 | 8.685 |
| FEBRA2028516 | 0 | 6.236 | 0 | 11.027 | 0 | 0 | 2.842 |
| FELIV1000153 | 0 | 0 | 0 | 0 | 0 | 1.216 | 0.205 |
| HCASM1000115 | 0 | 1.884 | 0 | 2.498 | 0 | 0 | 1.288 |
| HCASM2000016 | 0 | 2.713 | 0 | 0 | 0 | 0 | 1.854 |
| HCASM2000138 | 0 | 7.675 | 0 | 0 | 0 | 0 | 0 |
| HCASM2000214 | 0 | 17.187 | 0 | 0 | 0 | 0 | 0 |
| HCASM2003018 | 0 | 0 | 0 | 0 | 0 | 0 | 10.964 |
| HCHON1000030 | 1.315 | 2.307 | 0 | 0.874 | 0 | 0 | 1.127 |
| HCHON1000131 | 0 | 7.456 | 0 | 0 | 0 | 0 | 5.097 |
| HCHON1000191 | 1.750 | 0.878 | 0 | 0 | 0 | 0 | 0 |
| HCHON2000028 | 0 | 5.766 | 0 | 0 | 0 | 0 | 0 |
| HCHON2000056 | 2.056 | 0 | 0 | 0 | 0 | 0 | 2.466 |
| HCHON2000160 | 3.648 | 0 | 0 | 0 | 0 | 0 | 2.501 |
| HCHON2000212 | 0 | 0 | 0 | 0 | 0 | 0 | 10.677 |
| HCHON2000226 | 1.461 | 0.733 | 0 | 0 | 0 | 0 | 0 |
| HCHON2000244 | 0 | 1.195 | 0 | 3.171 | 0 | 0 | 0 |
| HCHON2000265 | 0 | 0 | 58.221 | 0 | 0 | 0 | 0 |
| HCHON2000295 | 0 | 0.796 | 0 | 0 | 0 | 3.228 | 0 |
| HCHON2000323 | 0 | 0 | 0 | 0 | 0 | 0 | 4.602 |
| HCHON2000373 | 3.673 | 0 | 0 | 0 | 0 | 0 | 0 |
| HCHON2000473 | 0 | 0 | 0 | 0 | 0 | 0 | 7.272 |
| HCHON2000475 | 0 | 0 | 0 | 6.416 | 0 | 0 | 0 |
| HCHON2000508 | 0 | 0 | 0 | 0.900 | 0 | 2.752 | 0.464 |
| HCHON2000676 | 0 | 0 | 0 | 0 | 0 | 0 | 3.704 |
| HCHON2000698 | 10.388 | 0 | 0 | 0 | 0 | 0 | 3.561 |
| HCHON2000738 | 0 | 5.411 | 0 | 7.176 | 0 | 0 | 0 |
| HCHON2000743 | 0 | 0 | 0 | 0 | 0 | 0 | 7.585 |
| HCHON2000751 | 0 | 0 | 0 | 0 | 0 | 0 | 4.435 |
| HCHON2000815 | 20.242 | 5.075 | 0 | 0 | 0 | 0 | 3.469 |
| HCHON2000826 | 2.594 | 3.902 | 0 | 10.349 | 0 | 5.275 | 2.667 |
| HCHON2000832 | 12.822 | 19.287 | 0 | 17.053 | 0 | 0 | 0 |
| HCHON2001039 | 0 | 0 | 0 | 0 | 0 | 0 | 4.159 |
| HCHON2001084 | 0 | 4.173 | 0 | 0 | 0 | 0 | 0 |
| HCHON2001161 | 0 | 0 | 0 | 0 | 0 | 0 | 13.376 |
| HCHON2001200 | 3.135 | 0 | 0 | 3.127 | 0 | 3.188 | 1.612 |
| HCHON2001217 | 0 | 5.674 | 0 | 2.509 | 0 | 0 | 2.586 |
| HCHON2001359 | 0 | 1.547 | 0 | 0 | 0 | 0 | 0 |
| HCHON2001407 | 5.724 | 1.435 | 0 | 3.806 | 0 | 0 | 4.905 |
| HCHON2001548 | 0 | 0 | 0 | 27.583 | 0 | 0 | 0 |
| HCHON2001665 | 0 | 0 | 0 | 0 | 0 | 0 | 5.751 |
| HCHON2002247 | 10.174 | 0 | 0 | 6.766 | 0 | 0 | 0 |
| HCHON2004858 | 0 | 0 | 0 | 0 | 0 | 0 | 16.411 |
| HCHON2005921 | 0 | 0 | 0 | 0 | 0 | 0 | 5.152 |
| HCHON2006250 | 0 | 0 | 0 | 3.771 | 0 | 0 | 0 |
| HCHON2006459 | 0 | 19.614 | 0 | 0 | 0 | 0 | 0 |
| HCHON2007881 | 0 | 0 | 0 | 0 | 0 | 0 | 16.411 |
| HCHON2010543 | 0 | 0 | 0 | 0 | 0 | 0 | 11.144 |
| HEART1000074 | 0 | 0 | 0 | 1.830 | 0 | 0 | 2.829 |
| HEART1000118 | 0 | 0 | 0 | 0 | 0 | 0 | 13.769 |
| HEART1000132 | 0 | 0 | 0 | 0 | 0 | 21.405 | 0 |
| HEART1000142 | 0 | 0 | 0 | 0 | 0 | 13.139 | 0 |
| HEART1000149 | 0 | 1.707 | 0 | 0 | 0 | 0 | 1.167 |
| HEART1000173 | 9.512 | 0 | 0 | 0 | 0 | 0 | 0 |
| HEART1000185 | 0 | 0 | 0 | 0 | 0 | 11.653 | 0 |
| HEART2000411 | 0 | 0 | 0 | 0 | 0 | 15.549 | 0 |
| HEART2006521 | 0 | 4.346 | 0 | 5.764 | 0 | 0 | 0 |
| HEART2007231 | 0 | 17.605 | 0 | 11.675 | 0 | 0 | 0 |
| HEART2007696 | 0 | 0 | 0 | 12.004 | 0 | 0 | 0 |
| HHDPC1000083 | 0 | 1.779 | 0 | 0 | 0 | 0 | 2.432 |
| HHDPC1000114 | 5.267 | 2.641 | 0 | 0 | 0 | 0 | 0 |
| HHDPC1000118 | 15.191 | 3.809 | 0 | 10.102 | 0 | 0 | 0 |
| HHDPC1000163 | 4.557 | 0 | 0 | 3.031 | 0 | 0 | 0 |
| HHDPC2000055 | 0 | 0 | 0 | 4.407 | 0 | 0 | 0 |
| HHDPC2000102 | 0 | 8.628 | 0 | 0 | 0 | 0 | 5.899 |
| HHDPC2000104 | 0 | 0 | 0 | 4.459 | 0 | 0 | 4.596 |
| HHDPC2000455 | 0 | 0 | 0 | 1.324 | 0 | 0 | 0 |
| HHDPC2000456 | 0 | 0 | 0 | 3.742 | 0 | 0 | 1.929 |
| HHDPC2000462 | 0 | 20.514 | 0 | 0 | 0 | 0 | 0 |
| HHDPC2000572 | 0 | 11.897 | 0 | 0 | 0 | 0 | 0 |
| HHDPC2001896 | 33.980 | 0 | 0 | 0 | 0 | 0 | 0 |
| HHDPC2003439 | 0.922 | 1.387 | 0 | 0.613 | 0 | 0 | 5.371 |
| HHDPC2003983 | 0 | 6.072 | 0 | 3.356 | 0 | 0 | 1.038 |
| HHDPC2007267 | 0 | 0 | 0 | 1.177 | 0 | 7.196 | 0 |
| HHDPC2009528 | 0 | 0 | 0 | 0 | 0 | 0 | 8.074 |
| HLUNG1000037 | 0 | 0 | 0 | 21.178 | 0 | 0 | 0 |
| HLUNG1000055 | 1.962 | 0.984 | 0 | 2.609 | 0 | 0 | 4.035 |
| HLUNG1000091 | 0 | 0 | 0 | 0 | 0 | 0 | 18.384 |
| HLUNG2000412 | 0 | 4.866 | 0 | 0 | 0 | 0 | 3.326 |
| HLVNG2000846 | 0 | 0 | 0 | 0 | 0 | 0 | 5.612 |
| HLUNG2001146 | 0 | 0 | 0 | 0 | 0 | 0 | 13.024 |
| HLUNG2001518 | 0 | 0 | 0 | 0 | 0 | 0 | 4.075 |
| HLUNG2001633 | 0 | 0 | 0 | 0 | 0 | 0 | 9.947 |
| HLUNG2001677 | 0 | 6.385 | 0 | 0 | 0 | 0 | 0 |
| HLUNG2001712 | 0 | 0 | 0 | 0 | 0 | 0 | 4.096 |
| HLUNG2002334 | 33.313 | 0 | 0 | 0 | 0 | 0 | 0 |
| HLUNG2003042 | 0 | 4.326 | 0 | 0 | 0 | 17.544 | 0 |
| HLUNG2003306 | 0 | 0 | 0 | 0 | 0 | 0 | 15.907 |
| HLUNG2003378 | 0 | 16.824 | 0 | 0 | 0 | 0 | 0 |
| HLUNG2004067 | 0 | 0 | 0 | 26.538 | 0 | 0 | 0 |
| HLUNG2004159 | 0 | 3.295 | 0 | 0 | 0 | 0 | 2.252 |
| HLUNG2004170 | 0 | 0 | 0 | 0 | 0 | 0 | 7.655 |
| HLUNG2004388 | 0 | 8.114 | 0 | 0 | 0 | 0 | 0 |
| HLUNG2005133 | 0 | 0 | 0 | 34.145 | 0 | 0 | 0 |
| HLUNG2006812 | 0 | 0 | 0 | 7.127 | 0 | 21.793 | 3.673 |
| HLUNG2006843 | 0 | 18.861 | 0 | 25.015 | 0 | 0 | 0 |
| HLUNG2007210 | 0 | 0 | 0 | 9.908 | 0 | 0 | 0 |
| HLUNG2008153 | 24.669 | 0 | 0 | 0 | 0 | 0 | 0 |
| HLUNG2008348 | 0 | 0 | 0 | 0 | 0 | 0 | 31.571 |
| HLUNG2009225 | 0 | 0 | 0 | 0 | 0 | 0 | 3.747 |
| HLUNG2017262 | 0 | 0 | 0 | 0 | 0 | 0 | 9.850 |
| HSYRA1000062 | 3.105 | 2.335 | 0 | 1.032 | 0 | 0 | 3.193 |
| HSYRA1000119 | 0 | 1.671 | 0 | 0 | 0 | 0 | 0 |
| HSYRA1000137 | 0 | 6.772 | 0 | 0 | 0 | 0 | 18.519 |
| HSYRA1000148 | 0 | 0 | 0 | 0 | 0 | 0 | 8.192 |
| HSYRA1000152 | 0 | 2.167 | 0 | 2.875 | 0 | 0 | 7.409 |
| HSYRA1000178 | 0 | 4.557 | 0 | 0 | 0 | 0 | 3.115 |
| HSYRA2000135 | 14.334 | 7.187 | 0 | 0 | 0 | 0 | 0 |
| HSYRA2000137 | 0 | 4.119 | 0 | 0 | 0 | 0 | 0 |
| HSYRA2000159 | 0.437 | 1.534 | 0 | 0.291 | 0 | 0.889 | 1.947 |
| HSYRA2000190 | 8.607 | 0 | 0 | 0 | 0 | 0 | 2.950 |
| HSYRA2000221 | 0 | 0 | 0 | 0 | 0 | 0 | 11.760 |
| HSYRA2000224 | 0 | 0 | 0 | 0 | 0 | 0 | 2.234 |
| HSYRA2000232 | 8.039 | 1.344 | 0 | 1.782 | 0 | 0 | 6.430 |
| HSYRA2000248 | 2.463 | 0 | 0 | 1.638 | 0 | 0 | 4.222 |
| HSYRA2000255 | 0 | 0.815 | 0 | 0 | 0 | 0 | 0 |
| HSYRA2000332 | 0 | 0 | 0 | 0 | 0 | 0 | 1.938 |
| HSYRA2000605 | 0 | 10.873 | 0 | 0 | 0 | 0 | 0 |
| HSYRA2000743 | 0 | 4.219 | 0 | 5.595 | 0 | 0 | 5.768 |
| HSYRA2000828 | 0 | 2.589 | 0 | 10.301 | 0 | 0 | 0 |
| HSYRA2000925 | 0 | 0 | 0 | 0 | 0 | 0 | 0.275 |
| HSYRA2001105 | 0 | 0 | 0 | 6.640 | 0 | 0 | 0 |
| HSYRA2001138 | 0.924 | 1.390 | 0 | 0.614 | 0 | 0 | 0 |
| HSYRA2001225 | 0 | 0 | 0 | 3.563 | 0 | 0 | 1.837 |
| HSYRA2001396 | 0 | 2.761 | 0 | 0 | 0 | 0 | 0 |
| HSYRA2001476 | 0 | 0.877 | 0 | 1.164 | 0 | 0 | 0.600 |
| HSYRA2001567 | 0 | 0 | 0 | 0 | 0 | 0 | 2.784 |
| HSYRA2001574 | 0 | 1.367 | 0 | 1.813 | 0 | 0 | 1.869 |
| HSYRA2001595 | 8.258 | 1.035 | 16.393 | 5.492 | 0 | 0 | 1.415 |
| HSYRA2001615 | 0 | 11.306 | 0 | 0 | 0 | 0 | 2.576 |
| HSYRA2001621 | 0 | 0.667 | 5.280 | 0.442 | 0 | 0 | 0 |
| HSYRA2001638 | 0 | 0 | 0 | 10.902 | 0 | 0 | 5.619 |
| HSYRA2007650 | 0 | 8.644 | 0 | 0 | 0 | 0 | 0 |
| IMR321000158 | 0 | 5.533 | 0 | 0 | 0 | 0 | 0 |
| IMR321000207 | 50.668 | 0 | 0 | 0 | 0 | 0 | 0 |
| IMR321000210 | 3.673 | 5.526 | 0 | 4.886 | 0 | 7.470 | 3.778 |
| IMR321000219 | 1.017 | 4.590 | 0 | 2.029 | 0 | 2.069 | 4.881 |
| IMR321000242 | 0 | 0 | 0 | 0 | 0 | 0 | 6.986 |
| IMR321000266 | 0 | 5.143 | 0 | 0 | 0 | 0 | 0 |
| IMR322000072 | 0 | 0 | 0 | 1.934 | 0 | 0 | 0 |
| IMR322000121 | 0 | 0 | 0 | 0 | 0 | 8.216 | 1.385 |
| IMR322000127 | 0 | 0 | 0 | 3.733 | 0 | 0 | 1.924 |
| IMR322000144 | 0 | 0 | 0 | 3.931 | 0 | 0 | 2.026 |
| IMR322000223 | 2.467 | 2.475 | 0 | 0 | 0 | 0 | 0 |
| IMR322000243 | 0 | 3.118 | 0 | 0 | 0 | 6.323 | 2.132 |
| IMR322000302 | 21.500 | 10.781 | 0 | 0 | 0 | 0 | 0 |
| IMR322000316 | 9.023 | 5.278 | 0 | 1.000 | 0 | 0 | 10.310 |
| IMR322000555 | 0 | 0 | 0 | 0 | 0 | 0 | 7.411 |
| IMR322000730 | 0.497 | 0.249 | 3.944 | 0 | 0 | 0 | 0 |
| IMR322000775 | 0 | 0 | 0 | 0 | 0 | 30.557 | 0 |
| IMR322000791 | 18.803 | 0 | 0 | 0 | 0 | 0 | 0 |
| IMR322000917 | 0 | 0 | 0 | 0 | 0 | 0 | 14.674 |
| IMR322000935 | 5.426 | 0 | 0 | 0 | 0 | 0 | 1.860 |
| IMR322000973 | 0 | 0 | 0 | 1.943 | 0 | 0 | 0 |
| IMR322001317 | 5.724 | 0 | 0 | 0 | 0 | 0 | 0 |
| IMR322001332 | 9.649 | 0 | 0 | 0 | 0 | 0 | 0 |
| IMR322001380 | 7.184 | 3.602 | 0 | 0 | 0 | 0 | 0 |
| IMR322001435 | 3.405 | 0 | 0 | 0 | 0 | 0 | 1.167 |
| IMR322001541 | 6.131 | 0 | 0 | 0 | 0 | 0 | 0 |
| IMR322001600 | 0 | 0.585 | 0 | 1.164 | 0 | 2.373 | 0 |
| IMR322001670 | 0 | 0 | 0 | 0 | 0 | 0 | 5.667 |
| IMR322001710 | 0 | 3.524 | 0 | 4.674 | 0 | 14.294 | 0 |
| IMR322001879 | 0 | 35.028 | 0 | 0 | 0 | 0 | 0 |
| IMR322002993 | 0 | 0 | 0 | 0 | 0 | 0 | 19.337 |
| IMR322012529 | 0 | 0 | 0 | 0 | 0 | 0 | 17.550 |
| KIDNE1000143 | 0 | 1.208 | 0 | 0 | 0 | 0 | 0 |
| KIDNE1000145 | 0 | 0 | 0 | 6.665 | 0 | 0 | 0 |
| KIDNE2000085 | 0 | 0 | 0 | 4.957 | 0 | 0 | 0 |
| KIDNE2000252 | 6.195 | 1.553 | 0 | 0 | 0 | 0 | 6.370 |
| KIDNE2000330 | 0 | 0 | 0 | 8.228 | 0 | 0 | 0 |
| KIDNE2000403 | 0 | 0 | 0 | 1.991 | 0 | 0 | 0 |
| KIDNE2000574 | 0 | 0 | 0 | 0 | 0 | 0 | 0.930 |
| KIDNE2000665 | 7.016 | 0 | 0 | 0 | 0 | 0 | 2.405 |
| KIDNE2000721 | 0 | 0 | 0 | 0 | 0 | 0 | 26.272 |
| KIDNE2000947 | 0 | 0 | 0 | 0 | 0 | 0 | 9.419 |
| KIDNE2001162 | 3.383 | 0 | 0 | 1.125 | 0 | 0 | 0.580 |
| KIDNE2001467 | 0.945 | 2.368 | 0 | 2.513 | 0 | 1.921 | 4.857 |
| KIDNE2001979 | 0 | 0 | 0 | 28.399 | 0 | 0 | 0 |
| KIDNE2002191 | 0 | 0 | 0 | 34.358 | 0 | 0 | 17.710 |
| KIDNE2002252 | 0 | 3.961 | 0 | 0 | 0 | 0 | 2.708 |
| KIDNE2002265 | 0 | 0 | 0 | 4.383 | 0 | 0 | 11.297 |
| KIDNE2002883 | 0 | 0 | 0 | 0 | 0 | 16.715 | 0 |
| KIDNE2003305 | 0 | 0 | 0 | 2.029 | 0 | 0 | 0 |
| KIDNE2003941 | 0 | 1.833 | 0 | 3.647 | 0 | 0 | 0.627 |
| KIDNE2004475 | 9.329 | 0 | 0 | 0 | 0 | 0 | 9.593 |
| KIDNE2004534 | 0 | 0 | 0 | 8.996 | 0 | 0 | 9.274 |
| KIDNE2005042 | 0 | 0 | 0 | 0 | 0 | 0 | 10.002 |
| KIDNE2005321 | 35.810 | 17.956 | 0 | 0 | 0 | 0 | 0 |
| KIDNE2005676 | 0 | 7.670 | 0 | 6.781 | 0 | 0 | 1.748 |
| KIDNE2006014 | 0 | 10.792 | 0 | 7.156 | 0 | 0 | 0 |
| KIDNE2006030 | 0 | 3.878 | 0 | 0 | 0 | 0 | 5.302 |
| KIDNE2006248 | 2.254 | 3.390 | 0 | 0.749 | 0 | 0 | 0.386 |
| KIDNE2006465 | 0 | 5.623 | 0 | 7.458 | 0 | 0 | 19.220 |
| KIDNE2006775 | 0 | 3.329 | 0 | 0 | 0 | 0 | 0 |
| KIDNE2006811 | 0 | 0 | 0 | 0 | 0 | 0 | 4.043 |
| KIDNE2007328 | 0 | 6.431 | 0 | 0 | 0 | 0 | 0 |
| KIDNE2007352 | 1.507 | 1.511 | 0 | 0 | 0 | 3.064 | 1.033 |
| KIDNE2007954 | 15.279 | 0 | 0 | 0 | 0 | 0 | 0 |
| KIDNE2008048 | 1.944 | 6.824 | 0 | 1.293 | 0 | 3.954 | 5.998 |
| KIDNE2008914 | 0 | 0 | 0 | 0 | 0 | 0 | 21.609 |
| KIDNE2008987 | 10.440 | 0 | 0 | 0 | 0 | 0 | 0 |
| KIDNE2009019 | 0 | 0 | 0 | 0 | 0 | 0 | 26.272 |
| KIDNE2009332 | 0 | 34.265 | 0 | 0 | 0 | 0 | 0 |
| KIDNE2009367 | 0 | 0 | 0 | 0 | 0 | 5.555 | 0.936 |
| KIDNE2010430 | 0 | 17.330 | 0 | 0 | 0 | 0 | 0 |
| KIDNE2012025 | 0 | 0 | 67.526 | 0 | 0 | 0 | 0 |
| KIDNE2012188 | 0 | 16.225 | 0 | 21.519 | 0 | 0 | 0 |
| KIDNE2012316 | 0 | 0 | 0 | 40.874 | 0 | 0 | 0 |
| KIDNE2012440 | 0 | 0 | 0 | 0 | 0 | 0 | 2.199 |
| KIDNE2013845 | 0 | 0 | 0 | 0 | 0 | 0 | 5.554 |
| KIDNE2014290 | 0 | 0 | 0 | 0 | 0 | 0 | 0.871 |
| KIDNE2015445 | 0 | 0 | 0 | 0 | 0 | 0 | 4.268 |
| KIDNE2017040 | 0 | 0 | 0 | 0 | 0 | 0 | 8.355 |
| KIDNE2018217 | 21.992 | 11.027 | 0 | 0 | 0 | 0 | 0 |
| KIDNE2018891 | 0 | 0 | 0 | 0 | 0 | 0 | 7.576 |
| LIVER1000079 | 6.350 | 0 | 0 | 0 | 0 | 0 | 0 |
| LIVER2000033 | 0 | 2.514 | 0 | 0 | 0 | 0 | 0 |
| LIVER2001539 | 0 | 0 | 0 | 0 | 0 | 0 | 6.186 |
| LIVER2001608 | 0 | 0 | 0 | 0 | 0 | 0 | 1.631 |
| LIVER2006006 | 2.577 | 3.877 | 0 | 1.714 | 0 | 0 | 0 |
| LIVER2008465 | 0 | 0 | 0 | 15.950 | 0 | 0 | 0 |
| MAMGL1000032 | 0.584 | 0.293 | 0 | 0 | 0 | 0 | 0 |
| MAMGL1000035 | 0.730 | 0.732 | 0 | 0 | 0 | 0 | 0.500 |
| MAMGL1000173 | 0 | 0 | 0 | 0.639 | 0 | 0 | 0 |
| MESAN1000050 | 0 | 2.917 | 0 | 7.738 | 0 | 0 | 0 |
| MESAN1000101 | 0 | 0 | 0 | 0 | 0 | 0 | 14.341 |
| MESAN1000126 | 0 | 0 | 0 | 0 | 0 | 0 | 2.218 |
| MESAN1000147 | 0 | 37.266 | 0 | 24.712 | 0 | 0 | 0 |
| MESAN2000149 | 0 | 0 | 0 | 0 | 0 | 0 | 3.052 |
| MESAN2000267 | 4.452 | 0 | 0 | 1.974 | 0 | 3.018 | 2.035 |
| MESAN2000457 | 0 | 7.197 | 0 | 0 | 0 | 0 | 0 |
| MESAN2000501 | 0 | 5.452 | 0 | 0 | 0 | 0 | 0 |
| MESAN2000572 | 0 | 3.716 | 0 | 0 | 0 | 0 | 0 |
| MESAN2000608 | 2.850 | 0 | 0 | 1.895 | 0 | 5.795 | 0.977 |
| MESAN2001627 | 0 | 23.769 | 0 | 0 | 0 | 0 | 0 |
| MESAN2002086 | 0 | 3.026 | 0 | 1.003 | 0 | 0 | 0.517 |
| MESAN2002122 | 0 | 0 | 0 | 0 | 0 | 0 | 33.057 |
| MESAN2002186 | 7.944 | 0 | 0 | 0 | 0 | 0 | 0 |
| MESAN2002519 | 0 | 0 | 0 | 0 | 0 | 0 | 5.761 |
| MESAN2002844 | 26.260 | 0 | 0 | 0 | 0 | 0 | 0 |
| MESAN2002940 | 0 | 0 | 0 | 0 | 0 | 0 | 3.951 |
| MESAN2003035 | 0 | 0 | 0 | 0 | 0 | 0 | 8.903 |
| MESAN2003039 | 0 | 0 | 0 | 0 | 0 | 0 | 20.223 |
| MESAN2003058 | 0 | 0 | 0 | 14.434 | 0 | 0 | 7.440 |
| MESAN2003444 | 0 | 0 | 0 | 0 | 0 | 0 | 4.628 |
| MESAN2003622 | 2.178 | 2.184 | 0 | 0 | 0 | 4.429 | 0 |
| MESAN2005633 | 0 | 0 | 0 | 0 | 0 | 0 | 10.663 |
| MESAN2005689 | 0 | 0 | 0 | 7.477 | 0 | 0 | 7.708 |
| MESAN2005766 | 0 | 0 | 0 | 9.507 | 0 | 0 | 1.225 |
| MESAN2006043 | 0 | 14.474 | 0 | 0 | 0 | 0 | 0 |
| MESAN2006401 | 0 | 0 | 0 | 4.360 | 0 | 0 | 15.732 |
| MESAN2006563 | 0 | 2.510 | 0 | 1.664 | 0 | 0 | 2.573 |
| MESAN2006743 | 13.969 | 0 | 0 | 0 | 0 | 0 | 0 |
| MESAN2006953 | 0 | 12.461 | 0 | 0 | 0 | 0 | 0 |
| MESAN2008334 | 0 | 0 | 0 | 0 | 0 | 0 | 10.213 |
| MESAN2008926 | 0 | 0 | 0 | 0 | 0 | 0 | 3.966 |
| MESAN2008936 | 0 | 14.459 | 0 | 0 | 0 | 0 | 4.942 |
| MESAN2009019 | 0 | 0 | 0 | 56.483 | 0 | 0 | 0 |
| MESAN2011984 | 0 | 0 | 0 | 4.112 | 0 | 0 | 2.119 |
| MESAN2012054 | 0 | 4.636 | 0 | 0 | 0 | 0 | 3.169 |
| MESAN2012113 | 0 | 10.721 | 0 | 14.219 | 0 | 0 | 7.329 |
| MESAN2013284 | 8.902 | 6.696 | 0 | 8.880 | 0 | 0 | 9.154 |
| MESAN2013908 | 25.005 | 0 | 0 | 0 | 0 | 0 | 0 |
| MESAN2015391 | 0 | 0 | 0 | 0 | 0 | 0 | 25.095 |
| MESAN2015515 | 0 | 0 | 0 | 6.402 | 0 | 0 | 0 |
| MESAN2016552 | 0 | 0 | 0 | 0 | 0 | 0 | 30.229 |
| MESAN2017133 | 0 | 0 | 0 | 0 | 0 | 0 | 10.900 |
| NB9N41000011 | 0 | 0 | 0 | 0 | 0 | 0 | 2.644 |
| NB9N41000047 | 0 | 0 | 0 | 0 | 0 | 0 | 3.265 |
| NB9N41000121 | 0 | 0 | 0 | 0 | 0 | 0 | 0.933 |
| NB9N41000135 | 0 | 4.030 | 0 | 0 | 0 | 0 | 0 |
| NB9N41000142 | 0 | 0 | 0 | 6.452 | 0 | 0 | 0 |
| NB9N42000281 | 0 | 3.475 | 0 | 0 | 0 | 0 | 9.501 |
| NHNPC2000206 | 7.466 | 2.496 | 0 | 8.275 | 0 | 0 | 2.559 |
| NHNPC2000212 | 0 | 0 | 0 | 0 | 0 | 0 | 4.329 |
| NHNPC2001312 | 0 | 0 | 0 | 0 | 0 | 0 | 4.743 |
| NHNPC2001931 | 0 | 0 | 0 | 0 | 0 | 17.586 | 0 |
| NOVAR1000091 | 0 | 3.519 | 0 | 0 | 0 | 0 | 0 |
| NOVAR2000783 | 0 | 0 | 0 | 0 | 0 | 0 | 4.698 |
| NT2NE1000004 | 29.929 | 0 | 0 | 0 | 0 | 0 | 0 |
| NT2NE1000014 | 31.502 | 15.796 | 0 | 0 | 0 | 0 | 10.799 |
| NT2NE1000018 | 9.012 | 0 | 0 | 0 | 0 | 0 | 6.178 |
| NT2NE1000023 | 100 | 0 | 0 | 0 | 0 | 0 | 0 |
| NT2NE1000024 | 13.913 | 0 | 0 | 18.505 | 0 | 0 | 4.769 |
| NT2NE1000059 | 19.602 | 0 | 0 | 0 | 0 | 0 | 6.719 |
| NT2NE1000063 | 100 | 0 | 0 | 0 | 0 | 0 | 0 |
| NT2NE1000073 | 57.716 | 14.470 | 0 | 0 | 0 | 0 | 0 |
| NT2NE1000083 | 100 | 0 | 0 | 0 | 0 | 0 | 0 |
| NT2NE1000120 | 100 | 0 | 0 | 0 | 0 | 0 | 0 |
| NT2NE1000122 | 81.295 | 0 | 0 | 0 | 0 | 0 | 0 |
| NT2NE1000163 | 1.468 | 2.208 | 0 | 0 | 0 | 0 | 0.503 |
| NT2NE1000175 | 100 | 0 | 0 | 0 | 0 | 0 | 0 |
| NT2NE1000181 | 66.155 | 0 | 0 | 0 | 0 | 0 | 0 |
| NT2NE1000185 | 100 | 0 | 0 | 0 | 0 | 0 | 0 |
| NT2NE2000038 | 100 | 0 | 0 | 0 | 0 | 0 | 0 |
| NT2NE2000054 | 100 | 0 | 0 | 0 | 0 | 0 | 0 |
| NT2NE2000056 | 1.424 | 1.428 | 0 | 0 | 0 | 2.895 | 3.416 |
| NT2NE2000057 | 100 | 0 | 0 | 0 | 0 | 0 | 0 |
| NT2NE2000064 | 100 | 0 | 0 | 0 | 0 | 0 | 0 |
| NT2NE2000109 | 100 | 0 | 0 | 0 | 0 | 0 | 0 |
| NT2NE2000137 | 100 | 0 | 0 | 0 | 0 | 0 | 0 |
| NT2NE2000156 | 46.158 | 23.145 | 0 | 30.696 | 0 | 0 | 0 |
| NT2NE2000174 | 4.149 | 0 | 0 | 1.839 | 0 | 0 | 0 |
| NT2NE2000195 | 11.142 | 0 | 0 | 0 | 0 | 0 | 0 |
| NT2NE2000222 | 100 | 0 | 0 | 0 | 0 | 0 | 0 |
| NT2NE2000259 | 30.583 | 0 | 0 | 0 | 0 | 0 | 6.989 |
| NT2NE2000260 | 0.438 | 0 | 0 | 0.291 | 0 | 0 | 0 |
| NT2NE2000284 | 100 | 0 | 0 | 0 | 0 | 0 | 0 |
| NT2NE2000299 | 100 | 0 | 0 | 0 | 0 | 0 | 0 |
| NT2NE2000327 | 9.117 | 0 | 0 | 18.189 | 0 | 0 | 0 |
| NT2NE2000353 | 66.235 | 0 | 0 | 0 | 0 | 0 | 0 |
| NT2NE2000356 | 81.295 | 0 | 0 | 0 | 0 | 0 | 0 |
| NT2NE2000369 | 100 | 0 | 0 | 0 | 0 | 0 | 0 |
| NT2NE2000374 | 100 | 0 | 0 | 0 | 0 | 0 | 0 |
| NT2NE2000383 | 5.507 | 0 | 0 | 0 | 0 | 0 | 1.888 |
| NT2NE2000384 | 8.341 | 0 | 0 | 0 | 0 | 0 | 0 |
| NT2NE2000386 | 56.001 | 0 | 0 | 0 | 0 | 0 | 0 |
| NT2NE2000390 | 100 | 0 | 0 | 0 | 0 | 0 | 0 |
| NT2NE2000392 | 6.471 | 0 | 0 | 0 | 0 | 0 | 14.418 |
| NT2NE2000455 | 75.239 | 0 | 0 | 0 | 0 | 0 | 0 |
| NT2NE2000470 | 19.777 | 0 | 0 | 0 | 0 | 0 | 13.558 |
| NT2NE2000488 | 100 | 0 | 0 | 0 | 0 | 0 | 0 |
| NT2NE2000517 | 51.465 | 0 | 0 | 34.226 | 0 | 0 | 0 |
| NT2NE2000536 | 31.191 | 0 | 0 | 0 | 0 | 0 | 0 |
| NT2NE2000546 | 100 | 0 | 0 | 0 | 0 | 0 | 0 |
| NT2NE2000548 | 76.570 | 0 | 0 | 0 | 0 | 0 | 0 |
| NT2NE2000550 | 100 | 0 | 0 | 0 | 0 | 0 | 0 |
| NT2NE2000575 | 1.742 | 0.874 | 0 | 0 | 0 | 0 | 0.299 |
| NT2NE2000586 | 100 | 0 | 0 | 0 | 0 | 0 | 0 |
| NT2NE2000612 | 100 | 0 | 0 | 0 | 0 | 0 | 0 |
| NT2NE2000636 | 26.172 | 6.562 | 0 | 0 | 0 | 0 | 0 |
| NT2NE2000658 | 100 | 0 | 0 | 0 | 0 | 0 | 0 |
| NT2NE2000706 | 100 | 0 | 0 | 0 | 0 | 0 | 0 |
| NT2NE2000707 | 2.426 | 2.433 | 0 | 3.226 | 0 | 0 | 4.157 |
| NT2NE2000763 | 4.349 | 0 | 0 | 2.892 | 0 | 0 | 4.473 |
| NT2NE2000802 | 100 | 0 | 0 | 0 | 0 | 0 | 0 |
| NT2NE2000808 | 100 | 0 | 0 | 0 | 0 | 0 | 0 |
| NT2NE2000809 | 12.284 | 0 | 0 | 16.339 | 0 | 0 | 0 |
| NT2NE2000864 | 83.623 | 0 | 0 | 0 | 0 | 0 | 0 |
| NT2NE2000909 | 23.727 | 0 | 0 | 0 | 0 | 0 | 12.200 |
| NT2NE2000913 | 26.733 | 0 | 0 | 17.778 | 0 | 0 | 9.163 |
| NT2NE2000950 | 18.995 | 9.524 | 0 | 0 | 0 | 0 | 0 |
| NT2NE2000951 | 100 | 0 | 0 | 0 | 0 | 0 | 0 |
| NT2NE2000963 | 4.157 | 1.251 | 0 | 0.553 | 0 | 0 | 0 |
| NT2NE2000980 | 55.327 | 27.743 | 0 | 0 | 0 | 0 | 0 |
| NT2NE2001000 | 3.119 | 1.564 | 0 | 0 | 0 | 0 | 1.069 |
| NT2NE2001005 | 84.719 | 0 | 0 | 0 | 0 | 0 | 0 |
| NT2NE2001021 | 100 | 0 | 0 | 0 | 0 | 0 | 0 |
| NT2NE2001040 | 56.184 | 0 | 0 | 0 | 0 | 0 | 0 |
| NT2NE2001048 | 5.424 | 2.720 | 0 | 3.607 | 0 | 11.031 | 0 |
| NT2NE2001049 | 31.847 | 0 | 0 | 21.179 | 0 | 0 | 0 |
| NT2NE2001142 | 100 | 0 | 0 | 0 | 0 | 0 | 0 |
| NT2NE2001156 | 20.368 | 0 | 0 | 0 | 0 | 0 | 0 |
| NT2NE2001176 | 8.279 | 2.076 | 0 | 0 | 0 | 0 | 7.095 |
| NT2NE2001180 | 50.569 | 0 | 0 | 0 | 0 | 0 | 0 |
| NT2NE2001181 | 67.567 | 0 | 0 | 0 | 0 | 0 | 0 |
| NT2NE2001188 | 100 | 0 | 0 | 0 | 0 | 0 | 0 |
| NT2NE2001191 | 100 | 0 | 0 | 0 | 0 | 0 | 0 |
| NT2NE2001247 | 100 | 0 | 0 | 0 | 0 | 0 | 0 |
| NT2NE2001252 | 100 | 0 | 0 | 0 | 0 | 0 | 0 |
| NT2NE2001324 | 83.623 | 0 | 0 | 0 | 0 | 0 | 0 |
| NT2NE2001326 | 76.390 | 0 | 0 | 0 | 0 | 0 | 0 |
| NT2NE2001337 | 16.469 | 0 | 0 | 10.952 | 0 | 0 | 5.645 |
| NT2NE2001364 | 38.745 | 0 | 0 | 0 | 0 | 0 | 0 |
| NT2NE2001372 | 100 | 0 | 0 | 0 | 0 | 0 | 0 |
| NT2NE2001397 | 47.665 | 0 | 0 | 0 | 0 | 0 | 0 |
| NT2NE2001403 | 37.604 | 0 | 0 | 12.504 | 0 | 0 | 6.445 |
| NT2NE2001428 | 100 | 0 | 0 | 0 | 0 | 0 | 0 |
| NT2NE2001432 | 100 | 0 | 0 | 0 | 0 | 0 | 0 |
| NT2NE2001435 | 3.853 | 0 | 0 | 0 | 0 | 0 | 14.528 |
| NT2NE2001442 | 18.110 | 0 | 0 | 0 | 0 | 0 | 6.208 |
| NT2NE2001524 | 100 | 0 | 0 | 0 | 0 | 0 | 0 |
| NT2NE2001530 | 25.357 | 0 | 0 | 0 | 0 | 0 | 0 |
| NT2NE2001545 | 19.481 | 0 | 0 | 8.637 | 0 | 0 | 2.226 |
| NT2NE2001598 | 45.971 | 0 | 0 | 0 | 0 | 0 | 0 |
| NT2NE2001617 | 16.442 | 0 | 0 | 0 | 0 | 0 | 0 |
| NT2NE2001623 | 100 | 0 | 0 | 0 | 0 | 0 | 0 |
| NT2NE2001626 | 100 | 0 | 0 | 0 | 0 | 0 | 0 |
| NT2NE2001634 | 100 | 0 | 0 | 0 | 0 | 0 | 0 |
| NT2NE2001648 | 31.454 | 0 | 0 | 0 | 0 | 0 | 0 |
| NT2NE2001655 | 20.296 | 2.544 | 0 | 0 | 0 | 0 | 0 |
| NT2NE2001660 | 28.385 | 0 | 0 | 0 | 0 | 0 | 0 |
| NT2NE2001666 | 100 | 0 | 0 | 0 | 0 | 0 | 0 |
| NT2NE2001677 | 100 | 0 | 0 | 0 | 0 | 0 | 0 |
| NT2NE2001697 | 19.787 | 0 | 0 | 0 | 0 | 0 | 0 |
| NT2NE2001698 | 100 | 0 | 0 | 0 | 0 | 0 | 0 |
| NT2NE2001723 | 100 | 0 | 0 | 0 | 0 | 0 | 0 |
| NT2NE2001725 | 100 | 0 | 0 | 0 | 0 | 0 | 0 |
| NT2NE2001793 | 7.518 | 15.079 | 0 | 5.000 | 0 | 0 | 5.154 |
| NT2NE2001874 | 100 | 0 | 0 | 0 | 0 | 0 | 0 |
| NT2NE2001889 | 100 | 0 | 0 | 0 | 0 | 0 | 0 |
| NT2NE2001923 | 100 | 0 | 0 | 0 | 0 | 0 | 0 |
| NT2NE2002100 | 81.295 | 0 | 0 | 0 | 0 | 0 | 0 |
| NT2NE2002162 | 44.305 | 0 | 0 | 0 | 0 | 0 | 0 |
| NT2NE2002186 | 100 | 0 | 0 | 0 | 0 | 0 | 0 |
| NT2NE2002285 | 100 | 0 | 0 | 0 | 0 | 0 | 0 |
| NT2NE2002311 | 100 | 0 | 0 | 0 | 0 | 0 | 0 |
| NT2NE2002620 | 3.466 | 0 | 0 | 0 | 0 | 0 | 0 |
| NT2NE2002651 | 100 | 0 | 0 | 0 | 0 | 0 | 0 |
| NT2NE2002732 | 100 | 0 | 0 | 0 | 0 | 0 | 0 |
| NT2NE2002768 | 100 | 0 | 0 | 0 | 0 | 0 | 0 |
| NT2NE2002791 | 100 | 0 | 0 | 0 | 0 | 0 | 0 |
| NT2NE2002856 | 100 | 0 | 0 | 0 | 0 | 0 | 0 |
| NT2NE2002870 | 8.273 | 0 | 0 | 0 | 0 | 0 | 2.836 |
| NT2NE2003150 | 100 | 0 | 0 | 0 | 0 | 0 | 0 |
| NT2NE2003185 | 27.476 | 0 | 0 | 0 | 0 | 0 | 9.418 |
| NT2NE2003252 | 100 | 0 | 0 | 0 | 0 | 0 | 0 |
| NT2NE2003280 | 26.374 | 0 | 0 | 0 | 0 | 0 | 27.122 |
| NT2NE2003308 | 100 | 0 | 0 | 0 | 0 | 0 | 0 |
| NT2NE2003309 | 100 | 0 | 0 | 0 | 0 | 0 | 0 |
| NT2NE2003315 | 100 | 0 | 0 | 0 | 0 | 0 | 0 |
| NT2NE2003393 | 4.658 | 0 | 0 | 0 | 0 | 0 | 0 |
| NT2NE2003408 | 100 | 0 | 0 | 0 | 0 | 0 | 0 |
| NT2NE2003457 | 100 | 0 | 0 | 0 | 0 | 0 | 0 |
| NT2NE2003485 | 8.436 | 0 | 0 | 0 | 0 | 0 | 2.892 |
| NT2NE2003540 | 100 | 0 | 0 | 0 | 0 | 0 | 0 |
| NT2NE2003569 | 6.289 | 6.307 | 0 | 0 | 0 | 12.790 | 0 |
| NT2NE2003571 | 100 | 0 | 0 | 0 | 0 | 0 | 0 |
| NT2NE2003705 | 100 | 0 | 0 | 0 | 0 | 0 | 0 |
| NT2NE2003752 | 100 | 0 | 0 | 0 | 0 | 0 | 0 |
| NT2NE2003887 | 22.619 | 0 | 0 | 0 | 0 | 0 | 7.753 |
| NT2NE2003921 | 44.218 | 0 | 0 | 0 | 0 | 0 | 0 |
| NT2NE2004255 | 21.586 | 0 | 0 | 0 | 0 | 0 | 7.399 |
| NT2NE2004378 | 100 | 0 | 0 | 0 | 0 | 0 | 0 |
| NT2NE2004490 | 100 | 0 | 0 | 0 | 0 | 0 | 0 |
| NT2NE2004519 | 12.988 | 3.256 | 0 | 0 | 0 | 0 | 2.226 |
| NT2NE2004606 | 100 | 0 | 0 | 0 | 0 | 0 | 0 |
| NT2NE2004716 | 6.956 | 0 | 0 | 0 | 0 | 0 | 0 |
| NT2NE2004740 | 76.390 | 0 | 0 | 0 | 0 | 0 | 0 |
| NT2NE2004787 | 100 | 0 | 0 | 0 | 0 | 0 | 0 |
| NT2NE2004916 | 100 | 0 | 0 | 0 | 0 | 0 | 0 |
| NT2NE2005035 | 100 | 0 | 0 | 0 | 0 | 0 | 0 |
| NT2NE2005223 | 100 | 0 | 0 | 0 | 0 | 0 | 0 |
| NT2NE2005276 | 100 | 0 | 0 | 0 | 0 | 0 | 0 |
| NT2NE2005317 | 46.084 | 0 | 0 | 30.647 | 0 | 0 | 0 |
| NT2NE2005323 | 81.295 | 0 | 0 | 0 | 0 | 0 | 0 |
| NT2NE2005358 | 75.239 | 0 | 0 | 0 | 0 | 0 | 0 |
| NT2NE2005371 | 19.983 | 0 | 0 | 0 | 0 | 0 | 0 |
| NT2NE2005395 | 49.516 | 0 | 0 | 0 | 0 | 0 | 0 |
| NT2NE2005419 | 41.962 | 0 | 0 | 0 | 0 | 0 | 14.384 |
| NT2NE2005441 | 11.259 | 0 | 0 | 0 | 0 | 0 | 0 |
| NT2NE2005517 | 100 | 0 | 0 | 0 | 0 | 0 | 0 |
| NT2NE2005537 | 100 | 0 | 0 | 0 | 0 | 0 | 0 |
| NT2NE2005555 | 100 | 0 | 0 | 0 | 0 | 0 | 0 |
| NT2NE2005588 | 61.235 | 0 | 0 | 0 | 0 | 0 | 0 |
| NT2NE2005676 | 100 | 0 | 0 | 0 | 0 | 0 | 0 |
| NT2NE2005688 | 2.706 | 0 | 0 | 1.800 | 0 | 0 | 0 |
| NT2NE2005720 | 34.046 | 0 | 0 | 0 | 0 | 0 | 0 |
| NT2NE2005784 | 100 | 0 | 0 | 0 | 0 | 0 | 0 |
| NT2NE2005804 | 100 | 0 | 0 | 0 | 0 | 0 | 0 |
| NT2NE2005821 | 100 | 0 | 0 | 0 | 0 | 0 | 0 |
| NT2NE2005876 | 10.692 | 0 | 0 | 0 | 0 | 10.871 | 12.827 |
| NT2NE2005890 | 64.265 | 0 | 0 | 0 | 0 | 0 | 0 |
| NT2NE2005921 | 100 | 0 | 0 | 0 | 0 | 0 | 0 |
| NT2NE2005968 | 100 | 0 | 0 | 0 | 0 | 0 | 0 |
| NT2NE2006075 | 28.548 | 0 | 0 | 0 | 0 | 0 | 0 |
| NT2NE2006087 | 36.785 | 0 | 0 | 0 | 0 | 0 | 12.609 |
| NT2NE2006103 | 31.379 | 0 | 0 | 20.868 | 0 | 0 | 0 |
| NT2NE2006217 | 100 | 0 | 0 | 0 | 0 | 0 | 0 |
| NT2NE2006288 | 100 | 0 | 0 | 0 | 0 | 0 | 0 |
| NT2NE2006382 | 100 | 0 | 0 | 0 | 0 | 0 | 0 |
| NT2NE2006387 | 100 | 0 | 0 | 0 | 0 | 0 | 0 |
| NT2NE2006427 | 66.603 | 33.397 | 0 | 0 | 0 | 0 | 0 |
| NT2NE2006432 | 100 | 0 | 0 | 0 | 0 | 0 | 0 |
| NT2NE2006458 | 5.123 | 0 | 0 | 0 | 0 | 0 | 0 |
| NT2NE2006478 | 38.940 | 0 | 0 | 0 | 0 | 0 | 0 |
| NT2NE2006531 | 100 | 0 | 0 | 0 | 0 | 0 | 0 |
| NT2NE2006659 | 65.576 | 0 | 0 | 0 | 0 | 0 | 0 |
| NT2NE2006784 | 100 | 0 | 0 | 0 | 0 | 0 | 0 |
| NT2NE2006813 | 100 | 0 | 0 | 0 | 0 | 0 | 0 |
| NT2NE2006894 | 100 | 0 | 0 | 0 | 0 | 0 | 0 |
| NT2NE2006909 | 1.034 | 0 | 0 | 0 | 94.074 | 0 | 0 |
| NT2NE2006942 | 100 | 0 | 0 | 0 | 0 | 0 | 0 |
| NT2NE2006958 | 59.247 | 0 | 0 | 0 | 0 | 0 | 0 |
| NT2NE2007052 | 100 | 0 | 0 | 0 | 0 | 0 | 0 |
| NT2NE2007220 | 100 | 0 | 0 | 0 | 0 | 0 | 0 |
| NT2NE2007425 | 100 | 0 | 0 | 0 | 0 | 0 | 0 |
| NT2NE2007725 | 100 | 0 | 0 | 0 | 0 | 0 | 0 |
| NT2NE2007727 | 22.173 | 77.827 | 0 | 0 | 0 | 0 | 0 |
| NT2NE2007786 | 14.439 | 0 | 0 | 0 | 0 | 0 | 0 |
| NT2NE2007877 | 100 | 0 | 0 | 0 | 0 | 0 | 0 |
| NT2NE2007967 | 100 | 0 | 0 | 0 | 0 | 0 | 0 |
| NT2NE2008017 | 100 | 0 | 0 | 0 | 0 | 0 | 0 |
| NT2NE2008060 | 74.472 | 0 | 0 | 0 | 0 | 0 | 25.528 |
| NT2NE2008077 | 35.311 | 0 | 0 | 0 | 0 | 0 | 0 |
| NT2NE2008213 | 30.158 | 0 | 0 | 0 | 0 | 0 | 0 |
| NT2NE2008260 | 100 | 0 | 0 | 0 | 0 | 0 | 0 |
| NT2NE2008378 | 100 | 0 | 0 | 0 | 0 | 0 | 0 |
| NT2NE2008607 | 100 | 0 | 0 | 0 | 0 | 0 | 0 |
| NT2NE2008639 | 100 | 0 | 0 | 0 | 0 | 0 | 0 |
| NT2NE2008727 | 100 | 0 | 0 | 0 | 0 | 0 | 0 |
| NT2NE2008783 | 100 | 0 | 0 | 0 | 0 | 0 | 0 |
| NT2NE2008785 | 34.001 | 0 | 0 | 0 | 0 | 0 | 0 |
| NT2NE2008803 | 83.623 | 0 | 0 | 0 | 0 | 0 | 0 |
| NT2NE2008867 | 100 | 0 | 0 | 0 | 0 | 0 | 0 |
| NT2NE2008961 | 100 | 0 | 0 | 0 | 0 | 0 | 0 |
| NT2NE2008997 | 100 | 0 | 0 | 0 | 0 | 0 | 0 |
| NT2NE2009138 | 100 | 0 | 0 | 0 | 0 | 0 | 0 |
| NT2NE2009295 | 7.230 | 0 | 57.410 | 4.808 | 0 | 0 | 0 |
| NT2NE2009426 | 100 | 0 | 0 | 0 | 0 | 0 | 0 |
| NT2NE2009523 | 56.323 | 0 | 0 | 0 | 0 | 0 | 0 |
| NT2NE2009608 | 100 | 0 | 0 | 0 | 0 | 0 | 0 |
| NT2NE2009691 | 100 | 0 | 0 | 0 | 0 | 0 | 0 |
| NT2NE2010056 | 29.041 | 0 | 0 | 0 | 0 | 0 | 0 |
| NT2NE2010105 | 100 | 0 | 0 | 0 | 0 | 0 | 0 |
| NT2NE2010150 | 100 | 0 | 0 | 0 | 0 | 0 | 0 |
| NT2NE2010400 | 100 | 0 | 0 | 0 | 0 | 0 | 0 |
| NT2NE2010632 | 100 | 0 | 0 | 0 | 0 | 0 | 0 |
| NT2NE2010633 | 100 | 0 | 0 | 0 | 0 | 0 | 0 |
| NT2NE2010654 | 100 | 0 | 0 | 0 | 0 | 0 | 0 |
| NT2NE2010688 | 78.374 | 0 | 0 | 0 | 0 | 0 | 0 |
| NT2NE2010781 | 100 | 0 | 0 | 0 | 0 | 0 | 0 |
| NT2NE2010842 | 3.417 | 5.140 | 0 | 6.817 | 0 | 0 | 2.343 |
| NT2NE2010854 | 84.719 | 0 | 0 | 0 | 0 | 0 | 0 |
| NT2NE2011033 | 66.235 | 0 | 0 | 0 | 0 | 0 | 0 |
| NT2NE2011036 | 100 | 0 | 0 | 0 | 0 | 0 | 0 |
| NT2NE2011107 | 43.585 | 0 | 0 | 0 | 0 | 0 | 14.940 |
| NT2NE2011119 | 33.561 | 0 | 0 | 11.160 | 0 | 0 | 0 |
| NT2NE2011154 | 100 | 0 | 0 | 0 | 0 | 0 | 0 |
| NT2NE2011221 | 52.138 | 0 | 0 | 0 | 0 | 0 | 0 |
| NT2NE2011411 | 100 | 0 | 0 | 0 | 0 | 0 | 0 |
| NT2NE2011485 | 68.667 | 0 | 0 | 0 | 0 | 0 | 0 |
| NT2NE2011650 | 66.603 | 33.397 | 0 | 0 | 0 | 0 | 0 |
| NT2NE2011684 | 31.736 | 0 | 0 | 0 | 0 | 0 | 0 |
| NT2NE2011687 | 100 | 0 | 0 | 0 | 0 | 0 | 0 |
| NT2NE2011691 | 100 | 0 | 0 | 0 | 0 | 0 | 0 |
| NT2NE2011758 | 100 | 0 | 0 | 0 | 0 | 0 | 0 |
| NT2NE2011823 | 100 | 0 | 0 | 0 | 0 | 0 | 0 |
| NT2NE2011896 | 100 | 0 | 0 | 0 | 0 | 0 | 0 |
| NT2NE2011998 | 74.472 | 0 | 0 | 0 | 0 | 0 | 25.528 |
| NT2NE2012113 | 100 | 0 | 0 | 0 | 0 | 0 | 0 |
| NT2NE2012199 | 87.795 | 0 | 0 | 0 | 0 | 0 | 0 |
| NT2NE2012243 | 76.570 | 0 | 0 | 0 | 0 | 0 | 0 |
| NT2NE2012361 | 100 | 0 | 0 | 0 | 0 | 0 | 0 |
| NT2NE2012448 | 100 | 0 | 0 | 0 | 0 | 0 | 0 |
| NT2NE2012457 | 100 | 0 | 0 | 0 | 0 | 0 | 0 |
| NT2NE2012493 | 100 | 0 | 0 | 0 | 0 | 0 | 0 |
| NT2NE2012505 | 66.449 | 0 | 0 | 0 | 0 | 0 | 0 |
| NT2NE2012533 | 100 | 0 | 0 | 0 | 0 | 0 | 0 |
| NT2NE2012603 | 100 | 0 | 0 | 0 | 0 | 0 | 0 |
| NT2NE2012747 | 100 | 0 | 0 | 0 | 0 | 0 | 0 |
| NT2NE2012790 | 21.741 | 10.901 | 0 | 0 | 0 | 0 | 0 |
| NT2NE2012847 | 100 | 0 | 0 | 0 | 0 | 0 | 0 |
| NT2NE2012928 | 31.553 | 0 | 0 | 0 | 0 | 0 | 0 |
| NT2NE2013019 | 66.603 | 33.397 | 0 | 0 | 0 | 0 | 0 |
| NT2NE2013081 | 100 | 0 | 0 | 0 | 0 | 0 | 0 |
| NT2NE2013189 | 100 | 0 | 0 | 0 | 0 | 0 | 0 |
| NT2NE2013217 | 100 | 0 | 0 | 0 | 0 | 0 | 0 |
| NT2NE2013547 | 100 | 0 | 0 | 0 | 0 | 0 | 0 |
| NT2NE2014013 | 100 | 0 | 0 | 0 | 0 | 0 | 0 |
| NT2NE2014028 | 100 | 0 | 0 | 0 | 0 | 0 | 0 |
| NT2NE2014104 | 6.083 | 0 | 0 | 0 | 0 | 0 | 0 |
| NT2NE2014113 | 32.885 | 0 | 0 | 0 | 0 | 0 | 0 |
| NT2NE2014176 | 49.929 | 50.071 | 0 | 0 | 0 | 0 | 0 |
| NT2NE2014221 | 100 | 0 | 0 | 0 | 0 | 0 | 0 |
| NT2NE2014525 | 100 | 0 | 0 | 0 | 0 | 0 | 0 |
| NT2NE2014650 | 100 | 0 | 0 | 0 | 0 | 0 | 0 |
| NT2NE2014651 | 100 | 0 | 0 | 0 | 0 | 0 | 0 |
| NT2NE2014681 | 100 | 0 | 0 | 0 | 0 | 0 | 0 |
| NT2NE2014758 | 100 | 0 | 0 | 0 | 0 | 0 | 0 |
| NT2NE2014869 | 100 | 0 | 0 | 0 | 0 | 0 | 0 |
| NT2NE2014950 | 100 | 0 | 0 | 0 | 0 | 0 | 0 |
| NT2NE2015061 | 100 | 0 | 0 | 0 | 0 | 0 | 0 |
| NT2NE2015262 | 81.295 | 0 | 0 | 0 | 0 | 0 | 0 |
| NT2NE2015275 | 100 | 0 | 0 | 0 | 0 | 0 | 0 |
| NT2NE2015362 | 66.449 | 0 | 0 | 0 | 0 | 0 | 0 |
| NT2NE2015480 | 100 | 0 | 0 | 0 | 0 | 0 | 0 |
| NT2NE2015511 | 100 | 0 | 0 | 0 | 0 | 0 | 0 |
| NT2NE2015565 | 100 | 0 | 0 | 0 | 0 | 0 | 0 |
| NT2NE2015626 | 100 | 0 | 0 | 0 | 0 | 0 | 0 |
| NT2NE2015747 | 100 | 0 | 0 | 0 | 0 | 0 | 0 |
| NT2NE2015860 | 66.603 | 33.397 | 0 | 0 | 0 | 0 | 0 |
| NT2NE2015885 | 100 | 0 | 0 | 0 | 0 | 0 | 0 |
| NT2NE2015904 | 78.033 | 0 | 0 | 0 | 0 | 0 | 0 |
| NT2NE2015974 | 27.684 | 0 | 0 | 0 | 0 | 0 | 18.979 |
| NT2NE2016041 | 100 | 0 | 0 | 0 | 0 | 0 | 0 |
| NT2NE2016387 | 78.374 | 0 | 0 | 0 | 0 | 0 | 0 |
| NT2NE2016419 | 100 | 0 | 0 | 0 | 0 | 0 | 0 |
| NT2NE2016519 | 100 | 0 | 0 | 0 | 0 | 0 | 0 |
| NT2NE2016608 | 100 | 0 | 0 | 0 | 0 | 0 | 0 |
| NT2NE2016766 | 100 | 0 | 0 | 0 | 0 | 0 | 0 |
| NT2NE2016774 | 100 | 0 | 0 | 0 | 0 | 0 | 0 |
| NT2NE2016971 | 49.619 | 24.880 | 0 | 0 | 0 | 0 | 0 |
| NT2NE2017259 | 100 | 0 | 0 | 0 | 0 | 0 | 0 |
| NT2NE2017332 | 100 | 0 | 0 | 0 | 0 | 0 | 0 |
| NT2NE2017397 | 100 | 0 | 0 | 0 | 0 | 0 | 0 |
| NT2NE2017480 | 60.059 | 0 | 0 | 39.941 | 0 | 0 | 0 |
| NT2NE2017492 | 61.159 | 0 | 0 | 0 | 0 | 0 | 0 |
| NT2NE2017508 | 100 | 0 | 0 | 0 | 0 | 0 | 0 |
| NT2NE2017562 | 100 | 0 | 0 | 0 | 0 | 0 | 0 |
| NT2NE2017590 | 100 | 0 | 0 | 0 | 0 | 0 | 0 |
| NT2NE2017612 | 100 | 0 | 0 | 0 | 0 | 0 | 0 |
| NT2NE2017721 | 100 | 0 | 0 | 0 | 0 | 0 | 0 |
| NT2NE2017752 | 42.542 | 0 | 0 | 28.292 | 0 | 0 | 29.166 |
| NT2NE2017792 | 67.849 | 0 | 0 | 0 | 0 | 0 | 0 |
| NT2NE2017982 | 84.719 | 0 | 0 | 0 | 0 | 0 | 0 |
| NT2NE2018165 | 100 | 0 | 0 | 0 | 0 | 0 | 0 |
| NT2NE2018176 | 100 | 0 | 0 | 0 | 0 | 0 | 0 |
| NT2NE2018180 | 13.627 | 0 | 0 | 0 | 0 | 0 | 0 |
| NT2NE2018273 | 100 | 0 | 0 | 0 | 0 | 0 | 0 |
| NT2NE2018376 | 100 | 0 | 0 | 0 | 0 | 0 | 0 |
| NT2NE2018472 | 100 | 0 | 0 | 0 | 0 | 0 | 0 |
| NT2NE2018490 | 84.719 | 0 | 0 | 0 | 0 | 0 | 0 |
| NT2NE2018594 | 61.235 | 0 | 0 | 0 | 0 | 0 | 0 |
| NT2NE2018739 | 100 | 0 | 0 | 0 | 0 | 0 | 0 |
| NT2NE2018916 | 100 | 0 | 0 | 0 | 0 | 0 | 0 |
| NT2NE2019056 | 100 | 0 | 0 | 0 | 0 | 0 | 0 |
| NT2NE2019076 | 32.654 | 0 | 0 | 0 | 0 | 0 | 0 |
| NT2NE2019091 | 6.861 | 0 | 0 | 9.125 | 0 | 0 | 4.704 |
| NT2NE2019099 | 100 | 0 | 0 | 0 | 0 | 0 | 0 |
| NT2RI1000016 | 0 | 45.918 | 0 | 0 | 0 | 0 | 0 |
| NT2RI1000027 | 0 | 1.837 | 0 | 2.437 | 0 | 0 | 0 |
| NT2RI1000035 | 0 | 34.405 | 0 | 0 | 0 | 0 | 0 |
| NT2RI1000048 | 6.154 | 1.543 | 0 | 0 | 0 | 0 | 1.055 |
| NT2RI1000127 | 6.578 | 3.298 | 0 | 0 | 0 | 0 | 4.509 |
| NT2RI1000164 | 0 | 100 | 0 | 0 | 0 | 0 | 0 |
| NT2RI1000172 | 46.158 | 23.145 | 0 | 30.696 | 0 | 0 | 0 |
| NT2RI2000004 | 0 | 100 | 0 | 0 | 0 | 0 | 0 |
| NT2RI2000007 | 0 | 60.375 | 0 | 0 | 0 | 0 | 0 |
| NT2RI2000064 | 3.901 | 0.978 | 0 | 2.594 | 0 | 0 | 0.669 |
| NT2RI2000107 | 0 | 8.418 | 0 | 5.583 | 0 | 0 | 0 |
| NT2RI2000116 | 0 | 4.227 | 0 | 8.410 | 0 | 0 | 50.573 |
| NT2RI2000117 | 0 | 100 | 0 | 0 | 0 | 0 | 0 |
| NT2RI2000128 | 0 | 100 | 0 | 0 | 0 | 0 | 0 |
| NT2RI2000133 | 9.286 | 4.656 | 0 | 0 | 0 | 0 | 0 |
| NT2RI2000167 | 0 | 20.995 | 0 | 0 | 0 | 0 | 0 |
| NT2RI2000173 | 0 | 42.988 | 0 | 57.012 | 0 | 0 | 0 |
| NT2RI2000187 | 0 | 100 | 0 | 0 | 0 | 0 | 0 |
| NT2RI2000255 | 4.338 | 2.175 | 0 | 0 | 0 | 0 | 0 |
| NT2RI2000263 | 6.199 | 6.217 | 0 | 4.123 | 0 | 0 | 6.375 |
| NT2RI2000270 | 0 | 100 | 0 | 0 | 0 | 0 | 0 |
| NT2RI2000276 | 0 | 100 | 0 | 0 | 0 | 0 | 0 |
| NT2RI2000282 | 1.147 | 3.451 | 0 | 2.289 | 0 | 0 | 0 |
| NT2RI2000284 | 0 | 0.828 | 0 | 0 | 0 | 0 | 0 |
| NT2RI2000294 | 6.859 | 10.318 | 0 | 4.562 | 0 | 0 | 7.054 |
| NT2RI2000313 | 0 | 33.224 | 0 | 44.064 | 0 | 0 | 22.712 |
| NT2RI2000341 | 0 | 100 | 0 | 0 | 0 | 0 | 0 |
| NT2RI2000344 | 5.868 | 1.471 | 0 | 0 | 0 | 0 | 1.006 |
| NT2RI2000348 | 0 | 32.207 | 0 | 0 | 0 | 0 | 44.033 |
| NT2RI2000412 | 0 | 28.013 | 0 | 0 | 0 | 0 | 9.575 |
| NT2RI2000421 | 11.028 | 11.060 | 0 | 0 | 0 | 0 | 0 |
| NT2RI2000480 | 0 | 100 | 0 | 0 | 0 | 0 | 0 |
| NT2RI2000575 | 0 | 100 | 0 | 0 | 0 | 0 | 0 |
| NT2RI2000578 | 1.212 | 1.823 | 0 | 0.806 | 0 | 0 | 0 |
| NT2RI2000588 | 0 | 100 | 0 | 0 | 0 | 0 | 0 |
| NT2RI2000597 | 0 | 100 | 0 | 0 | 0 | 0 | 0 |
| NT2RI2000669 | 0 | 22.312 | 0 | 0 | 0 | 0 | 0 |
| NT2RI2000671 | 3.812 | 1.911 | 0 | 7.605 | 0 | 0 | 0 |
| NT2RI2000685 | 7.181 | 1.800 | 0 | 0 | 0 | 7.302 | 1.231 |
| NT2RI2000688 | 0 | 100 | 0 | 0 | 0 | 0 | 0 |
| NT2RI2000689 | 0 | 11.240 | 0 | 3.727 | 0 | 11.396 | 1.921 |
| NT2RI2000704 | 0 | 100 | 0 | 0 | 0 | 0 | 0 |
| NT2RI2000727 | 0.938 | 0.940 | 0 | 0 | 0 | 0 | 0.321 |
| NT2RI2000738 | 0 | 100 | 0 | 0 | 0 | 0 | 0 |
| NT2RI2000775 | 0 | 61.984 | 0 | 0 | 0 | 0 | 0 |
| NT2RI2000822 | 0 | 19.359 | 0 | 0 | 0 | 0 | 0 |
| NT2RI2000829 | 13.842 | 6.941 | 0 | 0 | 0 | 0 | 14.234 |
| NT2RI2000841 | 0 | 100 | 0 | 0 | 0 | 0 | 0 |
| NT2RI2000865 | 0 | 5.097 | 0 | 0 | 0 | 0 | 0 |
| NT2RI2000932 | 0 | 100 | 0 | 0 | 0 | 0 | 0 |
| NT2RI2000974 | 7.817 | 11.759 | 0 | 10.397 | 0 | 0 | 2.680 |
| NT2RI2000987 | 0 | 100 | 0 | 0 | 0 | 0 | 0 |
| NT2RI2001010 | 0 | 68.547 | 0 | 0 | 0 | 0 | 0 |
| NT2RI2001017 | 0 | 100 | 0 | 0 | 0 | 0 | 0 |
| NT2RI2001030 | 0 | 59.396 | 0 | 0 | 0 | 0 | 40.604 |
| NT2RI2001054 | 2.156 | 1.081 | 0 | 0 | 0 | 0 | 3.696 |
| NT2RI2001083 | 0 | 100 | 0 | 0 | 0 | 0 | 0 |
| NT2RI2001091 | 0 | 6.389 | 0 | 0 | 0 | 0 | 0 |
| NT2RI2001167 | 0 | 73.545 | 0 | 0 | 0 | 0 | 0 |
| NT2RI2001178 | 0 | 100 | 0 | 0 | 0 | 0 | 0 |
| NT2RI2001230 | 0 | 5.607 | 0 | 0 | 0 | 0 | 0 |
| NT2RI2001235 | 0 | 100 | 0 | 0 | 0 | 0 | 0 |
| NT2RI2001244 | 0 | 100 | 0 | 0 | 0 | 0 | 0 |
| NT2RI2001307 | 0 | 100 | 0 | 0 | 0 | 0 | 0 |
| NT2RI2001342 | 0 | 2.868 | 0 | 0 | 0 | 0 | 1.961 |
| NT2RI2001385 | 0 | 7.160 | 0 | 0 | 0 | 0 | 0 |
| NT2RI2001409 | 0 | 20.927 | 0 | 0 | 0 | 0 | 0 |
| NT2RI2001410 | 0 | 100 | 0 | 0 | 0 | 0 | 0 |
| NT2RI2001422 | 0 | 6.756 | 0 | 0 | 0 | 0 | 0 |
| NT2RI2001425 | 0 | 100 | 0 | 0 | 0 | 0 | 0 |
| NT2RI2001449 | 0 | 72.520 | 0 | 27.480 | 0 | 0 | 0 |
| NT2RI2001450 | 6.421 | 3.220 | 0 | 0 | 0 | 0 | 8.805 |
| NT2RI2001474 | 0 | 100 | 0 | 0 | 0 | 0 | 0 |
| NT2RI2001519 | 0 | 100 | 0 | 0 | 0 | 0 | 0 |
| NT2RI2001540 | 0.413 | 0.517 | 1.638 | 0.274 | 0 | 0 | 0.071 |
| NT2RI2001595 | 0 | 14.429 | 0 | 57.411 | 0 | 0 | 0 |
| NT2RI2001621 | 11.094 | 11.125 | 0 | 0 | 0 | 0 | 3.803 |
| NT2RI2001624 | 0 | 100 | 0 | 0 | 0 | 0 | 0 |
| NT2RI2001657 | 0 | 0.972 | 0 | 0 | 0 | 0 | 0 |
| NT2RI2001726 | 0 | 38.377 | 0 | 0 | 0 | 0 | 13.117 |
| NT2RI2001731 | 6.864 | 3.442 | 0 | 0 | 0 | 0 | 4.705 |
| NT2RI2001769 | 0 | 16.159 | 0 | 0 | 0 | 0 | 0 |
| NT2RI2001782 | 0 | 100 | 0 | 0 | 0 | 0 | 0 |
| NT2RI2001836 | 0 | 100 | 0 | 0 | 0 | 0 | 0 |
| NT2RI2001846 | 0 | 8.955 | 0 | 0 | 0 | 0 | 0 |
| NT2RI2001859 | 3.517 | 3.527 | 0 | 0 | 0 | 7.152 | 2.411 |
| NT2RI2001866 | 0 | 26.371 | 0 | 34.974 | 0 | 0 | 0 |
| NT2RI2001910 | 0 | 13.573 | 0 | 0 | 0 | 0 | 0 |
| NT2RI2001952 | 0 | 38.068 | 0 | 0 | 0 | 0 | 0 |
| NT2RI2002022 | 0 | 59.396 | 0 | 0 | 0 | 0 | 40.604 |
| NT2RI2002041 | 0 | 100 | 0 | 0 | 0 | 0 | 0 |
| NT2RI2002091 | 0.389 | 0.756 | 0 | 0.065 | 0 | 2.867 | 0 |
| NT2RI2002117 | 0 | 8.561 | 0 | 0 | 0 | 0 | 0 |
| NT2RI2002120 | 0 | 100 | 0 | 0 | 0 | 0 | 0 |
| NT2RI2002152 | 0 | 9.141 | 0 | 0 | 0 | 0 | 0 |
| NT2RI2002153 | 0 | 100 | 0 | 0 | 0 | 0 | 0 |
| NT2RI2002179 | 0 | 100 | 0 | 0 | 0 | 0 | 0 |
| NT2RI2002243 | 0 | 5.978 | 0 | 0 | 0 | 0 | 0 |
| NT2RI2002252 | 0 | 100 | 0 | 0 | 0 | 0 | 0 |
| NT2RI2002260 | 0 | 42.988 | 0 | 57.012 | 0 | 0 | 0 |
| NT2RI2002266 | 0 | 4.555 | 72.122 | 0 | 0 | 0 | 6.227 |
| NT2RI2002270 | 0 | 100 | 0 | 0 | 0 | 0 | 0 |
| NT2RI2002316 | 0 | 1.457 | 0 | 1.932 | 0 | 0 | 0.996 |
| NT2RI2002334 | 0 | 100 | 0 | 0 | 0 | 0 | 0 |
| NT2RI2002359 | 0 | 29.911 | 0 | 0 | 0 | 0 | 0 |
| NT2RI2002391 | 0 | 11.790 | 0 | 0 | 0 | 0 | 1.007 |
| NT2RI2002447 | 0 | 100 | 0 | 0 | 0 | 0 | 0 |
| NT2RI2002481 | 0 | 100 | 0 | 0 | 0 | 0 | 0 |
| NT2RI2002507 | 0 | 100 | 0 | 0 | 0 | 0 | 0 |
| NT2RI2002517 | 0 | 42.988 | 0 | 57.012 | 0 | 0 | 0 |
| NT2RI2002530 | 0 | 10.969 | 0 | 0 | 0 | 0 | 7.499 |
| NT2RI2002540 | 6.265 | 3.141 | 0 | 0 | 0 | 0 | 2.148 |
| NT2RI2002549 | 0 | 12.521 | 0 | 0 | 0 | 0 | 8.559 |
| NT2RI2002554 | 6.571 | 3.295 | 0 | 4.370 | 0 | 0 | 9.010 |
| NT2RI2002564 | 0 | 100 | 0 | 0 | 0 | 0 | 0 |
| NT2RI2002585 | 0 | 23.627 | 0 | 0 | 0 | 0 | 16.152 |
| NT2RI2002592 | 0 | 33.510 | 0 | 0 | 0 | 0 | 0 |
| NT2RI2002602 | 0 | 14.231 | 0 | 56.622 | 0 | 0 | 0 |
| NT2RI2002654 | 2.129 | 4.270 | 0 | 2.832 | 0 | 4.329 | 0.730 |
| NT2RI2002699 | 0 | 20.778 | 0 | 0 | 0 | 0 | 0 |
| NT2RI2002729 | 0 | 7.644 | 0 | 0 | 0 | 0 | 0 |
| NT2RI2002802 | 0 | 52.242 | 0 | 0 | 0 | 0 | 0 |
| NT2RI2002819 | 0 | 6.766 | 0 | 8.973 | 0 | 0 | 4.625 |
| NT2RI2002822 | 0 | 9.118 | 0 | 0 | 0 | 0 | 0 |
| NT2RI2002847 | 4.549 | 6.843 | 0 | 9.076 | 0 | 9.251 | 7.797 |
| NT2RI2002852 | 0 | 73.545 | 0 | 0 | 0 | 0 | 0 |
| NT2RI2002865 | 0 | 24.645 | 0 | 0 | 0 | 0 | 0 |
| NT2RI2002923 | 0 | 100 | 0 | 0 | 0 | 0 | 0 |
| NT2RI2002926 | 57.202 | 14.342 | 0 | 0 | 0 | 0 | 0 |
| NT2RI2002958 | 0 | 5.249 | 0 | 0 | 0 | 0 | 8.372 |
| NT2RI2002970 | 0 | 100 | 0 | 0 | 0 | 0 | 0 |
| NT2RI2003011 | 12.513 | 6.275 | 0 | 0 | 0 | 0 | 0 |
| NT2RI2003019 | 0 | 19.008 | 0 | 0 | 0 | 0 | 0 |
| NT2RI2003051 | 0 | 1.860 | 0 | 4.935 | 0 | 0 | 0 |
| NT2RI2003067 | 0 | 100 | 0 | 0 | 0 | 0 | 0 |
| NT2RI2003184 | 0 | 34.265 | 0 | 0 | 0 | 0 | 0 |
| NT2RI2003205 | 0 | 17.549 | 0 | 0 | 0 | 0 | 31.992 |
| NT2RI2003222 | 0 | 46.196 | 0 | 0 | 0 | 0 | 0 |
| NT2RI2003301 | 0 | 10.314 | 0 | 0 | 0 | 0 | 42.305 |
| NT2RI2003304 | 1.902 | 4.769 | 0 | 4.427 | 0 | 0 | 0.978 |
| NT2RI2003317 | 0 | 2.864 | 0 | 3.799 | 0 | 0 | 13.707 |
| NT2RI2003338 | 0 | 7.360 | 0 | 2.440 | 0 | 0 | 5.031 |
| NT2RI2003344 | 0 | 3.539 | 0 | 0 | 0 | 0 | 0 |
| NT2RI2003360 | 0 | 100 | 0 | 0 | 0 | 0 | 0 |
| NT2RI2003361 | 17.898 | 8.975 | 0 | 11.903 | 0 | 0 | 0 |
| NT2RI2003383 | 0 | 32.968 | 0 | 0 | 0 | 0 | 0 |
| NT2RI2003392 | 0 | 100 | 0 | 0 | 0 | 0 | 0 |
| NT2RI2003399 | 0 | 58.159 | 0 | 0 | 0 | 0 | 0 |
| NT2RI2003407 | 0 | 2.199 | 0 | 0 | 0 | 0 | 1.504 |
| NT2RI2003419 | 0 | 20.514 | 0 | 0 | 0 | 0 | 0 |
| NT2RI2003420 | 5.581 | 11.194 | 0 | 3.711 | 0 | 0 | 0 |
| NT2RI2003481 | 0 | 3.509 | 0 | 0 | 0 | 0 | 4.798 |
| NT2RI2003487 | 0 | 6.789 | 0 | 0 | 0 | 0 | 0 |
| NT2RI2003556 | 1.379 | 0.691 | 0 | 3.668 | 0 | 0 | 1.418 |
| NT2RI2003655 | 0 | 35.500 | 0 | 0 | 0 | 0 | 0 |
| NT2RI2003667 | 66.603 | 33.397 | 0 | 0 | 0 | 0 | 0 |
| NT2RI2003678 | 0 | 13.840 | 0 | 9.178 | 0 | 0 | 4.731 |
| NT2RI2003695 | 2.854 | 5.724 | 0 | 1.898 | 0 | 0 | 2.935 |
| NT2RI2003738 | 0.634 | 0.636 | 0 | 0.422 | 0 | 0 | 1.087 |
| NT2RI2003751 | 10.041 | 5.035 | 0 | 0 | 0 | 0 | 0 |
| NT2RI2003884 | 0 | 100 | 0 | 0 | 0 | 0 | 0 |
| NT2RI2003921 | 6.875 | 4.309 | 0 | 4.572 | 0 | 0 | 0 |
| NT2RI2003973 | 0 | 45.622 | 0 | 0 | 0 | 0 | 31.188 |
| NT2RI2003993 | 0 | 6.899 | 0 | 0 | 0 | 0 | 0 |
| NT2RI2004059 | 0 | 12.383 | 0 | 0 | 0 | 0 | 0 |
| NT2RI2004078 | 0 | 64.504 | 0 | 0 | 0 | 0 | 0 |
| NT2RI2004079 | 0 | 100 | 0 | 0 | 0 | 0 | 0 |
| NT2RI2004093 | 0 | 100 | 0 | 0 | 0 | 0 | 0 |
| NT2RI2004136 | 0 | 100 | 0 | 0 | 0 | 0 | 0 |
| NT2RI2004157 | 0 | 60.375 | 0 | 0 | 0 | 0 | 0 |
| NT2RI2004188 | 0 | 10.436 | 0 | 0 | 0 | 0 | 0 |
| NT2RI2004190 | 0 | 100 | 0 | 0 | 0 | 0 | 0 |
| NT2RI2004209 | 0 | 13.341 | 0 | 0 | 0 | 0 | 0 |
| NT2RI2004230 | 12.475 | 6.255 | 0 | 19.358 | 0 | 0 | 17.105 |
| NT2RI2004284 | 0 | 2.921 | 0 | 0 | 0 | 0 | 0 |
| NT2RI2004290 | 0 | 38.769 | 0 | 0 | 0 | 0 | 0 |
| NT2RI2004304 | 0 | 7.568 | 0 | 10.036 | 0 | 0 | 20.693 |
| NT2RI2004312 | 0 | 27.584 | 0 | 0 | 0 | 0 | 18.857 |
| NT2RI2004381 | 0 | 100 | 0 | 0 | 0 | 0 | 0 |
| NT2RI2004398 | 0 | 9.053 | 0 | 0 | 0 | 0 | 12.377 |
| NT2RI2004410 | 18.077 | 9.065 | 0 | 6.011 | 0 | 0 | 0 |
| NT2RI2004442 | 0 | 100 | 0 | 0 | 0 | 0 | 0 |
| NT2RI2004468 | 0 | 100 | 0 | 0 | 0 | 0 | 0 |
| NT2RI2004535 | 6.937 | 13.914 | 0 | 0 | 0 | 0 | 0 |
| NT2RI2004606 | 0 | 64.504 | 0 | 0 | 0 | 0 | 0 |
| NT2RI2004608 | 0 | 6.723 | 0 | 0 | 0 | 0 | 0 |
| NT2RI2004618 | 0 | 100 | 0 | 0 | 0 | 0 | 0 |
| NT2RI2004783 | 0 | 78.423 | 0 | 0 | 0 | 0 | 0 |
| NT2RI2004818 | 0 | 100 | 0 | 0 | 0 | 0 | 0 |
| NT2RI2004840 | 0 | 100 | 0 | 0 | 0 | 0 | 0 |
| NT2RI2004884 | 5.600 | 1.404 | 0 | 0 | 0 | 0 | 0.960 |
| NT2RI2004916 | 0 | 60.128 | 0 | 39.872 | 0 | 0 | 0 |
| NT2RI2004962 | 0 | 100 | 0 | 0 | 0 | 0 | 0 |
| NT2RI2004984 | 0 | 100 | 0 | 0 | 0 | 0 | 0 |
| NT2RI2004985 | 0 | 100 | 0 | 0 | 0 | 0 | 0 |
| NT2RI2005048 | 0 | 100 | 0 | 0 | 0 | 0 | 0 |
| NT2RI2005061 | 0 | 15.855 | 0 | 21.027 | 0 | 0 | 5.419 |
| NT2RI2005069 | 0 | 100 | 0 | 0 | 0 | 0 | 0 |
| NT2RI2005087 | 0 | 7.791 | 0 | 0 | 0 | 0 | 0 |
| NT2RI2005096 | 0 | 73.545 | 0 | 0 | 0 | 0 | 0 |
| NT2RI2005115 | 0 | 11.105 | 0 | 0 | 0 | 0 | 0 |
| NT2RI2005116 | 0 | 4.646 | 0 | 3.081 | 0 | 0 | 4.764 |
| NT2RI2005130 | 49.929 | 50.071 | 0 | 0 | 0 | 0 | 0 |
| NT2RI2005150 | 7.492 | 2.504 | 0 | 1.661 | 0 | 0 | 1.712 |
| NT2RI2005166 | 0 | 47.393 | 0 | 0 | 0 | 0 | 0 |
| NT2RI2005239 | 14.292 | 21.500 | 0 | 19.009 | 0 | 0 | 4.899 |
| NT2RI2005246 | 0 | 16.871 | 0 | 0 | 0 | 0 | 11.533 |
| NT2RI2005315 | 0 | 49.384 | 0 | 0 | 0 | 0 | 0 |
| NT2RI2005335 | 1.403 | 2.814 | 0 | 4.665 | 0 | 0 | 1.924 |
| NT2RI2005353 | 0 | 6.280 | 0 | 0 | 0 | 0 | 0 |
| NT2RI2005358 | 0 | 37.296 | 0 | 0 | 0 | 0 | 0 |
| NT2RI2005368 | 0 | 7.344 | 0 | 4.870 | 0 | 0 | 17.571 |
| NT2RI2005382 | 0 | 35.947 | 0 | 0 | 0 | 0 | 0 |
| NT2RI2005405 | 4.069 | 1.020 | 0 | 2.030 | 0 | 2.069 | 0.349 |
| NT2RI2005473 | 0 | 5.935 | 0 | 0 | 0 | 0 | 0 |
| NT2RI2005520 | 0 | 100 | 0 | 0 | 0 | 0 | 0 |
| NT2RI2005564 | 16.142 | 16.188 | 0 | 0 | 0 | 0 | 16.600 |
| NT2RI2005579 | 0 | 17.054 | 0 | 0 | 0 | 0 | 11.659 |
| NT2RI2005621 | 0 | 100 | 0 | 0 | 0 | 0 | 0 |
| NT2RI2005628 | 0 | 100 | 0 | 0 | 0 | 0 | 0 |
| NT2RI2005647 | 0 | 1.202 | 0 | 0 | 0 | 82.851 | 0 |
| NT2RI2005670 | 0 | 100 | 0 | 0 | 0 | 0 | 0 |
| NT2RI2005710 | 0 | 18.971 | 0 | 37.741 | 0 | 0 | 0 |
| NT2RI2005713 | 0 | 2.687 | 0 | 0 | 0 | 0 | 3.674 |
| NT2RI2005723 | 7.275 | 0.912 | 0 | 1.209 | 0 | 0 | 0 |
| NT2RI2005772 | 0 | 100 | 0 | 0 | 0 | 0 | 0 |
| NT2RI2005811 | 0 | 8.352 | 0 | 0 | 0 | 11.291 | 1.903 |
| NT2RI2005814 | 0 | 2.367 | 0 | 6.278 | 0 | 0 | 0 |
| NT2RI2005816 | 0 | 11.615 | 0 | 15.405 | 0 | 0 | 47.643 |
| NT2RI2005818 | 9.230 | 13.885 | 0 | 0 | 0 | 0 | 12.656 |
| NT2RI2005851 | 0 | 13.544 | 0 | 17.963 | 0 | 0 | 13.888 |
| NT2RI2005966 | 0 | 33.881 | 0 | 0 | 0 | 0 | 0 |
| NT2RI2006070 | 0 | 3.735 | 0 | 0 | 0 | 0 | 0 |
| NT2RI2006071 | 0 | 5.130 | 0 | 6.804 | 0 | 0 | 7.014 |
| NT2RI2006072 | 2.773 | 2.781 | 0 | 3.688 | 0 | 0 | 1.901 |
| NT2RI2006081 | 0 | 100 | 0 | 0 | 0 | 0 | 0 |
| NT2RI2006126 | 0 | 100 | 0 | 0 | 0 | 0 | 0 |
| NT2RI2006127 | 0 | 21.950 | 0 | 0 | 0 | 0 | 0 |
| NT2RI2006183 | 0 | 17.381 | 0 | 23.051 | 0 | 0 | 11.882 |
| NT2RI2006257 | 0 | 100 | 0 | 0 | 0 | 0 | 0 |
| NT2RI2006271 | 10.122 | 5.076 | 0 | 0 | 0 | 0 | 0 |
| NT2RI2006294 | 0 | 100 | 0 | 0 | 0 | 0 | 0 |
| NT2RI2006345 | 0 | 100 | 0 | 0 | 0 | 0 | 0 |
| NT2RI2006403 | 0 | 100 | 0 | 0 | 0 | 0 | 0 |
| NT2RI2006412 | 0 | 1.490 | 0 | 0 | 0 | 0 | 0 |
| NT2RI2006445 | 0 | 100 | 0 | 0 | 0 | 0 | 0 |
| NT2RI2006487 | 0 | 100 | 0 | 0 | 0 | 0 | 0 |
| NT2RI2006506 | 0 | 24.481 | 0 | 0 | 0 | 0 | 16.735 |
| NT2RI2006553 | 0 | 13.442 | 0 | 0 | 0 | 0 | 0 |
| NT2RI2006565 | 0 | 10.859 | 0 | 43.204 | 0 | 0 | 0 |
| NT2RI2006640 | 0 | 22.843 | 0 | 15.148 | 0 | 0 | 0 |
| NT2RI2006647 | 0 | 8.333 | 0 | 0 | 0 | 0 | 5.696 |
| NT2RI2006659 | 0 | 42.988 | 0 | 57.012 | 0 | 0 | 0 |
| NT2RI2006662 | 0 | 100 | 0 | 0 | 0 | 0 | 0 |
| NT2RI2006667 | 0 | 100 | 0 | 0 | 0 | 0 | 0 |
| NT2RI2006679 | 0 | 100 | 0 | 0 | 0 | 0 | 0 |
| NT2RI2006682 | 0 | 35.773 | 0 | 23.722 | 0 | 0 | 0 |
| NT2RI2006686 | 0 | 21.246 | 0 | 0 | 0 | 0 | 0 |
| NT2RI2006703 | 0 | 29.452 | 0 | 39.061 | 0 | 0 | 0 |
| NT2RI2006716 | 0 | 100 | 0 | 0 | 0 | 0 | 0 |
| NT2RI2006735 | 0 | 28.601 | 0 | 0 | 0 | 0 | 0 |
| NT2RI2006762 | 0 | 100 | 0 | 0 | 0 | 0 | 0 |
| NT2RI2006788 | 0 | 100 | 0 | 0 | 0 | 0 | 0 |
| NT2RI2006825 | 0 | 4.982 | 0 | 0 | 0 | 0 | 3.406 |
| NT2RI2006838 | 0 | 100 | 0 | 0 | 0 | 0 | 0 |
| NT2RI2006853 | 8.129 | 4.076 | 0 | 0 | 0 | 0 | 0 |
| NT2RI2006855 | 0 | 15.665 | 0 | 0 | 0 | 0 | 0 |
| NT2RI2006856 | 5.093 | 0.851 | 0 | 1.129 | 0 | 0 | 0 |
| NT2RI2006943 | 17.631 | 8.841 | 0 | 2.931 | 0 | 0 | 3.022 |
| NT2RI2006973 | 0 | 100 | 0 | 0 | 0 | 0 | 0 |
| NT2RI2007046 | 0 | 100 | 0 | 0 | 0 | 0 | 0 |
| NT2RI2007048 | 0 | 100 | 0 | 0 | 0 | 0 | 0 |
| NT2RI2007054 | 0 | 2.359 | 0 | 0 | 0 | 0 | 1.613 |
| NT2RI2007084 | 0 | 1.977 | 0 | 0 | 0 | 0 | 0 |
| NT2RI2007096 | 0 | 9.420 | 0 | 12.494 | 0 | 0 | 19.320 |
| NT2RI2007116 | 0 | 100 | 0 | 0 | 0 | 0 | 0 |
| NT2RI2007133 | 1.422 | 1.426 | 0 | 1.891 | 0 | 0 | 0 |
| NT2RI2007148 | 0 | 1.716 | 0 | 0 | 0 | 0 | 0 |
| NT2RI2007214 | 0 | 42.988 | 0 | 57.012 | 0 | 0 | 0 |
| NT2RI2007277 | 3.553 | 5.345 | 0 | 7.088 | 0 | 0 | 26.793 |
| NT2RI2007303 | 0 | 100 | 0 | 0 | 0 | 0 | 0 |
| NT2RI2007334 | 45.725 | 22.928 | 0 | 0 | 0 | 0 | 31.347 |
| NT2RI2007377 | 8.489 | 2.128 | 0 | 2.823 | 0 | 0 | 8.730 |
| NT2RI2007384 | 0 | 2.361 | 12.461 | 1.044 | 0 | 6.383 | 0 |
| NT2RI2007386 | 0 | 100 | 0 | 0 | 0 | 0 | 0 |
| NT2RI2007406 | 66.603 | 33.397 | 0 | 0 | 0 | 0 | 0 |
| NT2RI2007439 | 66.603 | 33.397 | 0 | 0 | 0 | 0 | 0 |
| NT2RI2007445 | 6.498 | 6.517 | 0 | 8.643 | 0 | 0 | 0 |
| NT2RI2007468 | 15.143 | 15.186 | 0 | 10.070 | 0 | 0 | 5.191 |
| NT2RI2007469 | 0 | 58.159 | 0 | 0 | 0 | 0 | 0 |
| NT2RI2007498 | 1.478 | 17.786 | 0 | 1.966 | 0 | 0 | 0 |
| NT2RI2007507 | 0 | 100 | 0 | 0 | 0 | 0 | 0 |
| NT2RI2007572 | 2.708 | 1.358 | 0 | 3.602 | 0 | 0 | 7.426 |
| NT2RI2007589 | 0 | 3.881 | 0 | 5.148 | 0 | 0 | 0 |
| NT2RI2007593 | 0 | 29.937 | 0 | 0 | 0 | 0 | 0 |
| NT2RI2007629 | 0 | 14.653 | 0 | 0 | 0 | 0 | 5.008 |
| NT2RI2007723 | 12.821 | 12.858 | 0 | 0 | 0 | 0 | 0 |
| NT2RI2007729 | 0 | 20.986 | 0 | 0 | 0 | 0 | 0 |
| NT2RI2007751 | 0 | 100 | 0 | 0 | 0 | 0 | 0 |
| NT2RI2007754 | 0 | 35.266 | 0 | 0 | 0 | 0 | 0 |
| NT2RI2007827 | 0 | 13.642 | 0 | 0 | 0 | 0 | 0 |
| NT2RI2007853 | 0 | 8.137 | 0 | 0 | 0 | 0 | 0 |
| NT2RI2007877 | 0 | 100 | 0 | 0 | 0 | 0 | 0 |
| NT2RI2007879 | 0 | 5.768 | 0 | 0 | 0 | 0 | 0 |
| NT2RI2007884 | 0 | 4.613 | 0 | 12.237 | 0 | 0 | 6.308 |
| NT2RI2007891 | 0 | 100 | 0 | 0 | 0 | 0 | 0 |
| NT2RI2007956 | 0 | 100 | 0 | 0 | 0 | 0 | 0 |
| NT2RI2007965 | 0 | 42.988 | 0 | 57.012 | 0 | 0 | 0 |
| NT2RI2007987 | 0 | 6.544 | 0 | 0 | 0 | 0 | 13.421 |
| NT2RI2008007 | 0 | 35.172 | 0 | 0 | 0 | 0 | 0 |
| NT2RI2008045 | 0 | 1.411 | 0 | 1.871 | 0 | 0 | 3.858 |
| NT2RI2008050 | 0 | 100 | 0 | 0 | 0 | 0 | 0 |
| NT2RI2008141 | 0 | 7.772 | 0 | 20.614 | 0 | 0 | 5.313 |
| NT2RI2008171 | 0 | 8.069 | 0 | 0 | 0 | 0 | 0 |
| NT2RI2008188 | 0 | 52.242 | 0 | 0 | 0 | 0 | 0 |
| NT2RI2008204 | 44.987 | 11.279 | 0 | 0 | 0 | 0 | 0 |
| NT2RI2008221 | 0 | 2.015 | 0 | 0 | 0 | 0 | 0 |
| NT2RI2008233 | 0 | 34.405 | 0 | 0 | 0 | 0 | 0 |
| NT2RI2008336 | 1.452 | 3.640 | 0 | 2.897 | 0 | 0 | 1.991 |
| NT2RI2008396 | 4.792 | 5.607 | 0 | 4.249 | 0 | 0 | 2.738 |
| NT2RI2008455 | 0 | 100 | 0 | 0 | 0 | 0 | 0 |
| NT2RI2008481 | 0 | 4.032 | 0 | 3.565 | 0 | 5.451 | 0.919 |
| NT2RI2008502 | 0 | 100 | 0 | 0 | 0 | 0 | 0 |
| NT2RI2008526 | 0 | 2.787 | 0 | 0 | 0 | 5.650 | 0 |
| NT2RI2008566 | 0 | 17.092 | 0 | 0 | 0 | 0 | 11.684 |
| NT2RI2008598 | 0 | 15.244 | 0 | 0 | 0 | 0 | 0 |
| NT2RI2008622 | 0 | 5.735 | 0 | 7.606 | 0 | 23.258 | 3.920 |
| NT2RI2008656 | 0 | 4.935 | 78.152 | 0 | 0 | 0 | 0 |
| NT2RI2008714 | 0 | 26.665 | 0 | 0 | 0 | 0 | 0 |
| NT2RI2008724 | 0 | 3.337 | 0 | 0 | 0 | 0 | 0 |
| NT2RI2008749 | 4.098 | 1.027 | 0 | 1.363 | 0 | 0 | 0 |
| NT2RI2008791 | 4.228 | 6.361 | 0 | 0 | 0 | 8.599 | 0 |
| NT2RI2008801 | 0 | 100 | 0 | 0 | 0 | 0 | 0 |
| NT2RI2008808 | 16.429 | 8.238 | 0 | 10.926 | 0 | 0 | 0 |
| NT2RI2008812 | 0 | 13.156 | 0 | 0 | 0 | 0 | 0 |
| NT2RI2008841 | 0 | 100 | 0 | 0 | 0 | 0 | 0 |
| NT2RI2008942 | 0 | 13.339 | 0 | 27.801 | 0 | 0 | 3.908 |
| NT2RI2008952 | 0 | 100 | 0 | 0 | 0 | 0 | 0 |
| NT2RI2009005 | 0 | 100 | 0 | 0 | 0 | 0 | 0 |
| NT2RI2009037 | 3.055 | 4.596 | 0 | 0 | 0 | 0 | 4.189 |
| NT2RI2009065 | 1.693 | 4.244 | 0 | 1.126 | 0 | 0 | 2.321 |
| NT2RI2009066 | 19.866 | 4.981 | 0 | 6.606 | 0 | 0 | 0 |
| NT2RI2009083 | 0 | 18.633 | 0 | 0 | 0 | 0 | 0 |
| NT2RI2009101 | 0 | 100 | 0 | 0 | 0 | 0 | 0 |
| NT2RI2009103 | 0 | 58.159 | 0 | 0 | 0 | 0 | 0 |
| NT2RI2009144 | 0 | 100 | 0 | 0 | 0 | 0 | 0 |
| NT2RI2009151 | 0 | 100 | 0 | 0 | 0 | 0 | 0 |
| NT2RI2009173 | 4.042 | 2.027 | 0 | 2.688 | 0 | 0 | 1.386 |
| NT2RI2009194 | 0 | 5.358 | 0 | 0 | 0 | 0 | 9.767 |
| NT2RI2009215 | 0 | 100 | 0 | 0 | 0 | 0 | 0 |
| NT2RI2009233 | 0 | 4.099 | 0 | 5.436 | 0 | 0 | 5.604 |
| NT2RI2009239 | 0 | 5.080 | 0 | 3.369 | 0 | 0 | 0 |
| NT2RI2009259 | 0 | 21.268 | 0 | 0 | 0 | 0 | 0 |
| NT2RI2009269 | 21.488 | 7.183 | 0 | 2.382 | 0 | 0 | 0 |
| NT2RI2009281 | 5.101 | 2.558 | 0 | 10.176 | 0 | 0 | 1.748 |
| NT2RI2009289 | 0 | 100 | 0 | 0 | 0 | 0 | 0 |
| NT2RI2009301 | 0 | 100 | 0 | 0 | 0 | 0 | 0 |
| NT2RI2009402 | 0 | 5.700 | 0 | 0 | 0 | 0 | 19.482 |
| NT2RI2009406 | 10.196 | 20.451 | 0 | 13.561 | 0 | 0 | 0 |
| NT2RI2009517 | 0 | 100 | 0 | 0 | 0 | 0 | 0 |
| NT2RI2009583 | 0.811 | 0.813 | 0 | 0 | 0 | 4.947 | 0 |
| NT2RI2009585 | 0 | 100 | 0 | 0 | 0 | 0 | 0 |
| NT2RI2009595 | 0 | 100 | 0 | 0 | 0 | 0 | 0 |
| NT2RI2009855 | 0 | 100 | 0 | 0 | 0 | 0 | 0 |
| NT2RI2010283 | 0 | 13.449 | 0 | 35.673 | 0 | 0 | 0 |
| NT2RI2010508 | 0 | 100 | 0 | 0 | 0 | 0 | 0 |
| NT2RI2010795 | 0 | 29.973 | 0 | 0 | 0 | 0 | 0 |
| NT2RI2011422 | 0 | 100 | 0 | 0 | 0 | 0 | 0 |
| NT2RI2011450 | 0 | 46.154 | 0 | 0 | 0 | 0 | 0 |
| NT2RI2011683 | 0 | 100 | 0 | 0 | 0 | 0 | 0 |
| NT2RI2011803 | 0 | 100 | 0 | 0 | 0 | 0 | 0 |
| NT2RI2012350 | 0 | 2.182 | 0 | 0 | 0 | 0 | 0 |
| NT2RI2012659 | 0 | 24.645 | 0 | 0 | 0 | 0 | 0 |
| NT2RI2012726 | 16.813 | 8.430 | 0 | 11.181 | 0 | 0 | 5.763 |
| NT2RI2012990 | 0 | 24.360 | 0 | 0 | 0 | 0 | 0 |
| NT2RI2013345 | 0 | 17.187 | 0 | 0 | 0 | 0 | 0 |
| NT2RI2013357 | 0 | 73.545 | 0 | 0 | 0 | 0 | 0 |
| NT2RI2013373 | 0 | 100 | 0 | 0 | 0 | 0 | 0 |
| NT2RI2014247 | 0 | 27.718 | 0 | 0 | 0 | 0 | 0 |
| NT2RI2014551 | 0 | 100 | 0 | 0 | 0 | 0 | 0 |
| NT2RI2014683 | 0 | 100 | 0 | 0 | 0 | 0 | 0 |
| NT2RI2014733 | 0 | 45.319 | 0 | 0 | 0 | 0 | 0 |
| NT2RI2015239 | 0 | 100 | 0 | 0 | 0 | 0 | 0 |
| NT2RI2015342 | 0 | 8.201 | 0 | 10.877 | 0 | 0 | 0 |
| NT2RI2015533 | 0 | 2.824 | 0 | 0 | 0 | 0 | 3.861 |
| NT2RI2016128 | 0 | 100 | 0 | 0 | 0 | 0 | 0 |
| NT2RI2016134 | 0 | 100 | 0 | 0 | 0 | 0 | 0 |
| NT2RI2017529 | 0 | 3.526 | 0 | 0 | 0 | 7.151 | 0 |
| NT2RI2018311 | 0 | 78.082 | 0 | 0 | 0 | 0 | 0 |
| NT2RI2018363 | 0 | 100 | 0 | 0 | 0 | 0 | 0 |
| NT2RI2018448 | 0 | 11.442 | 0 | 15.176 | 0 | 0 | 0 |
| NT2RI2018883 | 0 | 49.384 | 0 | 0 | 0 | 0 | 0 |
| NT2RI2018950 | 0 | 100 | 0 | 0 | 0 | 0 | 0 |
| NT2RI2019751 | 0 | 71.913 | 0 | 0 | 0 | 0 | 0 |
| NT2RI2019826 | 0 | 100 | 0 | 0 | 0 | 0 | 0 |
| NT2RI2020390 | 0 | 100 | 0 | 0 | 0 | 0 | 0 |
| NT2RI2020703 | 0 | 100 | 0 | 0 | 0 | 0 | 0 |
| NT2RI2021463 | 0 | 100 | 0 | 0 | 0 | 0 | 0 |
| NT2RI2021625 | 0 | 34.630 | 0 | 45.928 | 0 | 0 | 0 |
| NT2RI2022468 | 0 | 12.182 | 0 | 0 | 0 | 0 | 0 |
| NT2RI2022584 | 0 | 100 | 0 | 0 | 0 | 0 | 0 |
| NT2RI2023303 | 0 | 100 | 0 | 0 | 0 | 0 | 0 |
| NT2RI2023671 | 0 | 100 | 0 | 0 | 0 | 0 | 0 |
| NT2RI2024008 | 0 | 61.866 | 0 | 0 | 0 | 0 | 0 |
| NT2RI2024313 | 0 | 26.626 | 0 | 0 | 0 | 0 | 0 |
| NT2RI2024460 | 0 | 100 | 0 | 0 | 0 | 0 | 0 |
| NT2RI2024496 | 0 | 100 | 0 | 0 | 0 | 0 | 0 |
| NT2RI2024935 | 0 | 7.895 | 0 | 0 | 0 | 0 | 0 |
| NT2RI2025075 | 0 | 30.809 | 0 | 0 | 0 | 0 | 21.061 |
| NT2RI2025255 | 0 | 62.102 | 0 | 0 | 0 | 0 | 0 |
| NT2RI2025564 | 0 | 100 | 0 | 0 | 0 | 0 | 0 |
| NT2RI2025565 | 0 | 100 | 0 | 0 | 0 | 0 | 0 |
| NT2RI2025909 | 0 | 100 | 0 | 0 | 0 | 0 | 0 |
| NT2RI2025957 | 0 | 100 | 0 | 0 | 0 | 0 | 0 |
| NT2RI2025976 | 0 | 100 | 0 | 0 | 0 | 0 | 0 |
| NT2RI2026758 | 0 | 100 | 0 | 0 | 0 | 0 | 0 |
| NT2RI2027081 | 0 | 100 | 0 | 0 | 0 | 0 | 0 |
| NT2RI2027157 | 0 | 100 | 0 | 0 | 0 | 0 | 0 |
| NT2RI2027224 | 0 | 61.866 | 0 | 0 | 0 | 0 | 0 |
| NT2RI2027323 | 0 | 60.375 | 0 | 0 | 0 | 0 | 0 |
| NT2RI2027396 | 0 | 100 | 0 | 0 | 0 | 0 | 0 |
| NT2RI2027484 | 0 | 100 | 0 | 0 | 0 | 0 | 0 |
| NT2RI2027975 | 0 | 71.913 | 0 | 0 | 0 | 0 | 0 |
| NT2RI2028213 | 0 | 100 | 0 | 0 | 0 | 0 | 0 |
| NT2RI2028222 | 0 | 100 | 0 | 0 | 0 | 0 | 0 |
| NT2RI2028537 | 0 | 100 | 0 | 0 | 0 | 0 | 0 |
| NT2RI2028642 | 0 | 100 | 0 | 0 | 0 | 0 | 0 |
| NT2RI3000174 | 0 | 61.866 | 0 | 0 | 0 | 0 | 0 |
| NT2RI3000213 | 0 | 100 | 0 | 0 | 0 | 0 | 0 |
| NT2RI3000423 | 0 | 8.738 | 0 | 34.67 | 0 | 0 | 0 |
| NT2RI3000622 | 0 | 15.558 | 0 | 0 | 0 | 63.099 | 0 |
| NT2RI3001132 | 0 | 100 | 0 | 0 | 0 | 0 | 0 |
| NT2RI3001263 | 0 | 100 | 0 | 0 | 0 | 0 | 0 |
| NT2RI3001279 | 0 | 100 | 0 | 0 | 0 | 0 | 0 |
| NT2RI3001348 | 0 | 18.992 | 0 | 0 | 0 | 0 | 0 |
| NT2RI3001445 | 0 | 11.509 | 0 | 0 | 0 | 0 | 7.868 |
| NT2RI3001458 | 0 | 100 | 0 | 0 | 0 | 0 | 0 |
| NT2RI3001515 | 0 | 19.682 | 0 | 0 | 0 | 0 | 40.364 |
| NT2RI3001573 | 0 | 100 | 0 | 0 | 0 | 0 | 0 |
| NT2RI3001967 | 0 | 100 | 0 | 0 | 0 | 0 | 0 |
| NT2RI3002303 | 0 | 100 | 0 | 0 | 0 | 0 | 0 |
| NT2RI3002557 | 0 | 100 | 0 | 0 | 0 | 0 | 0 |
| NT2RI3002842 | 0 | 34.054 | 0 | 45.164 | 0 | 0 | 0 |
| NT2RI3003027 | 0 | 100 | 0 | 0 | 0 | 0 | 0 |
| NT2RI3003031 | 0 | 100 | 0 | 0 | 0 | 0 | 0 |
| NT2RI3003095 | 0 | 100 | 0 | 0 | 0 | 0 | 0 |
| NT2RI3003104 | 0 | 28.425 | 0 | 0 | 0 | 0 | 0 |
| NT2RI3003162 | 0 | 100 | 0 | 0 | 0 | 0 | 0 |
| NT2RI3003362 | 0 | 100 | 0 | 0 | 0 | 0 | 0 |
| NT2RI3003382 | 0 | 71.913 | 0 | 0 | 0 | 0 | 0 |
| NT2RI3003409 | 0 | 100 | 0 | 0 | 0 | 0 | 0 |
| NT2RI3003738 | 0 | 32.959 | 0 | 0 | 0 | 0 | 0 |
| NT2RI3003925 | 0 | 64.044 | 0 | 0 | 0 | 0 | 0 |
| NT2RI3004133 | 0 | 100 | 0 | 0 | 0 | 0 | 0 |
| NT2RI3004381 | 0 | 100 | 0 | 0 | 0 | 0 | 0 |
| NT2RI3004510 | 0 | 51.230 | 0 | 0 | 0 | 0 | 0 |
| NT2RI3005202 | 0 | 100 | 0 | 0 | 0 | 0 | 0 |
| NT2RI3005403 | 0 | 62.102 | 0 | 0 | 0 | 0 | 0 |
| NT2RI3005416 | 0 | 100 | 0 | 0 | 0 | 0 | 0 |
| NT2RI3005724 | 0 | 10.770 | 0 | 14.284 | 0 | 0 | 0 |
| NT2RI3005861 | 0 | 100 | 0 | 0 | 0 | 0 | 0 |
| NT2RI3005923 | 0 | 35.423 | 0 | 0 | 0 | 0 | 0 |
| NT2RI3005928 | 0 | 100 | 0 | 0 | 0 | 0 | 0 |
| NT2RI3006132 | 0 | 100 | 0 | 0 | 0 | 0 | 0 |
| NT2RI3006171 | 0 | 100 | 0 | 0 | 0 | 0 | 0 |
| NT2RI3006284 | 0 | 3.760 | 0 | 0 | 0 | 0 | 0 |
| NT2RI3006340 | 0 | 14.839 | 0 | 0 | 0 | 0 | 0 |
| NT2RI3006376 | 0 | 100 | 0 | 0 | 0 | 0 | 0 |
| NT2RI3006666 | 0 | 37.941 | 0 | 0 | 0 | 0 | 0 |
| NT2RI3006673 | 0 | 18.135 | 0 | 0 | 0 | 0 | 0 |
| NT2RI3006796 | 0 | 100 | 0 | 0 | 0 | 0 | 0 |
| NT2RI3007065 | 0 | 100 | 0 | 0 | 0 | 0 | 0 |
| NT2RI3007095 | 0 | 100 | 0 | 0 | 0 | 0 | 0 |
| NT2RI3007158 | 0 | 100 | 0 | 0 | 0 | 0 | 0 |
| NT2RI3007167 | 0 | 100 | 0 | 0 | 0 | 0 | 0 |
| NT2RI3007213 | 0 | 71.913 | 0 | 0 | 0 | 0 | 0 |
| NT2RI3007291 | 0 | 22.746 | 0 | 0 | 0 | 0 | 0 |
| NT2RI3007443 | 0 | 100 | 0 | 0 | 0 | 0 | 0 |
| NT2RI3007543 | 6.150 | 1.542 | 0 | 0 | 0 | 6.253 | 3.162 |
| NT2RI3007684 | 0 | 100 | 0 | 0 | 0 | 0 | 0 |
| NT2RI3007757 | 0 | 45.964 | 0 | 30.480 | 0 | 0 | 0 |
| NT2RI3007878 | 0 | 100 | 0 | 0 | 0 | 0 | 0 |
| NT2RI3007978 | 0 | 100 | 0 | 0 | 0 | 0 | 0 |
| NT2RI3008055 | 0 | 40.142 | 0 | 0 | 0 | 0 | 0 |
| NT2RI3008162 | 0 | 100 | 0 | 0 | 0 | 0 | 0 |
| NT2RI3008179 | 0 | 100 | 0 | 0 | 0 | 0 | 0 |
| NT2RI3008228 | 0 | 100 | 0 | 0 | 0 | 0 | 0 |
| NT2RI3008442 | 0 | 100 | 0 | 0 | 0 | 0 | 0 |
| NT2RI3008652 | 0 | 100 | 0 | 0 | 0 | 0 | 0 |
| NT2RI3008697 | 0 | 100 | 0 | 0 | 0 | 0 | 0 |
| NT2RI3008974 | 0 | 100 | 0 | 0 | 0 | 0 | 0 |
| NT2RI3009158 | 0 | 45.727 | 0 | 0 | 0 | 0 | 0 |
| NT2RI3009480 | 0 | 68.547 | 0 | 0 | 0 | 0 | 0 |
| NT2RI3009524 | 0 | 64.504 | 0 | 0 | 0 | 0 | 0 |
| NT2RP6000005 | 0 | 0 | 0 | 5.301 | 0 | 0 | 5.465 |
| NT2RP6000008 | 0 | 0 | 0 | 77.250 | 0 | 0 | 0 |
| NT2RP6000017 | 5.422 | 0 | 0 | 3.606 | 0 | 0 | 1.859 |
| NT2RP6000032 | 0 | 14.251 | 0 | 18.901 | 0 | 0 | 0 |
| NT2RP6000033 | 0 | 0 | 0 | 10.025 | 0 | 0 | 0 |
| NT2RP6000039 | 0 | 3.259 | 0 | 8.644 | 0 | 0 | 6.683 |
| NT2RP6000043 | 13.765 | 0 | 0 | 9.154 | 0 | 0 | 4.718 |
| NT2RP6000059 | 0 | 0 | 0 | 52.276 | 0 | 0 | 0 |
| NT2RP6000060 | 0 | 0 | 0 | 100 | 0 | 0 | 0 |
| NT2RP6000072 | 5.856 | 0 | 0 | 7.789 | 0 | 0 | 0 |
| NT2RP6000077 | 0 | 0 | 0 | 15.492 | 0 | 0 | 0 |
| NT2RP6000078 | 0 | 0 | 0 | 0.867 | 0 | 0 | 1.787 |
| NT2RP6000085 | 0 | 16.809 | 0 | 11.147 | 0 | 0 | 5.745 |
| NT2RP6000086 | 0 | 0 | 0 | 77.250 | 0 | 0 | 0 |
| NT2RP6000100 | 0 | 0 | 0 | 52.773 | 0 | 0 | 0 |
| NT2RP6000109 | 6.922 | 6.941 | 0 | 13.809 | 0 | 0 | 11.863 |
| NT2RP6000110 | 0 | 9.952 | 0 | 6.600 | 0 | 0 | 17.009 |
| NT2RP6000119 | 0 | 0 | 0 | 100 | 0 | 0 | 0 |
| NT2RP6000123 | 1.419 | 2.134 | 0 | 1.887 | 0 | 0 | 2.918 |
| NT2RP6000127 | 0 | 0 | 0 | 100 | 0 | 0 | 0 |
| NT2RP6000130 | 0 | 0 | 0 | 38.584 | 0 | 0 | 0 |
| NT2RP6000140 | 0 | 0 | 0 | 100 | 0 | 0 | 0 |
| NT2RP6000150 | 0 | 0 | 0 | 100 | 0 | 0 | 0 |
| NT2RP7000041 | 0 | 0 | 0 | 100 | 0 | 0 | 0 |
| NT2RP7000069 | 0 | 0 | 0 | 16.237 | 0 | 0 | 4.185 |
| NT2RP7000076 | 0 | 2.215 | 0 | 2.938 | 0 | 0 | 2.271 |
| NT2RP7000086 | 0 | 0 | 0 | 30.820 | 0 | 0 | 0 |
| NT2RP7000109 | 0 | 0 | 0 | 100 | 0 | 0 | 0 |
| NT2RP7000112 | 0 | 0 | 0 | 38.711 | 0 | 0 | 19.954 |
| NT2RP7000173 | 0 | 2.021 | 0 | 13.399 | 0 | 0 | 19.338 |
| NT2RP7000238 | 0 | 16.467 | 0 | 24.959 | 0 | 0 | 1.608 |
| NT2RP7000259 | 0 | 0 | 0 | 32.229 | 0 | 0 | 0 |
| NT2RP7000271 | 0 | 0 | 0 | 7.310 | 0 | 0 | 0 |
| NT2RP7000311 | 0 | 0 | 0 | 100 | 0 | 0 | 0 |
| NT2RP7000359 | 0 | 0 | 0 | 100 | 0 | 0 | 0 |
| NT2RP7000364 | 0 | 0 | 0 | 100 | 0 | 0 | 0 |
| NT2RP7000380 | 0 | 0 | 0 | 100 | 0 | 0 | 0 |
| NT2RP7000391 | 0 | 0 | 0 | 100 | 0 | 0 | 0 |
| NT2RP7000425 | 0 | 0 | 0 | 49.156 | 0 | 0 | 0 |
| NT2RP7000477 | 7.170 | 3.595 | 0 | 14.305 | 0 | 0 | 2.458 |
| NT2RP7000579 | 0 | 0 | 0 | 87.165 | 0 | 0 | 0 |
| NT2RP7000586 | 0 | 19.966 | 0 | 26.480 | 0 | 0 | 0 |
| NT2RP7000600 | 0 | 0 | 0 | 10.681 | 0 | 0 | 2.753 |
| NT2RP7000624 | 0 | 0 | 0 | 10.515 | 0 | 0 | 16.260 |
| NT2RP7000812 | 0 | 0 | 0 | 38.463 | 0 | 0 | 0 |
| NT2RP7000906 | 0 | 2.371 | 0 | 3.144 | 0 | 0 | 3.241 |
| NT2RP7000926 | 0 | 0 | 0 | 100 | 0 | 0 | 0 |
| NT2RP7001074 | 0 | 0 | 0 | 100 | 0 | 0 | 0 |
| NT2RP7001080 | 24.260 | 18.247 | 0 | 32.267 | 0 | 0 | 0 |
| NT2RP7001156 | 0 | 0 | 0 | 78.664 | 0 | 0 | 0 |
| NT2RP7001166 | 2.710 | 2.718 | 0 | 7.210 | 0 | 0 | 1.858 |
| NT2RP7001231 | 0 | 0 | 0 | 9.953 | 0 | 0 | 10.261 |
| NT2RP7001283 | 2.040 | 1.023 | 0 | 2.713 | 0 | 0 | 2.098 |
| NT2RP7001306 | 0 | 0 | 0 | 17.531 | 0 | 0 | 0 |
| NT2RP7001319 | 0 | 0 | 0 | 100 | 0 | 0 | 0 |
| NT2RP7001335 | 0 | 0 | 0 | 25.176 | 0 | 0 | 0 |
| NT2RP7001364 | 0 | 0 | 0 | 70.518 | 0 | 0 | 0 |
| NT2RP7001475 | 0 | 0 | 0 | 42.341 | 0 | 0 | 0 |
| NT2RP7001532 | 0 | 0 | 0 | 100 | 0 | 0 | 0 |
| NT2RP7001591 | 0 | 0 | 0 | 6.266 | 0 | 19.161 | 0 |
| NT2RP7001602 | 0 | 0 | 0 | 100 | 0 | 0 | 0 |
| NT2RP7001678 | 0 | 0 | 0 | 37.485 | 0 | 0 | 0 |
| NT2RP7001856 | 0 | 6.228 | 0 | 8.260 | 0 | 0 | 0 |
| NT2RP7001962 | 0 | 0 | 0 | 12.805 | 0 | 0 | 6.600 |
| NT2RP7002028 | 0 | 0 | 0 | 4.843 | 0 | 0 | 2.496 |
| NT2RP7002064 | 0 | 0 | 0 | 53.332 | 0 | 0 | 0 |
| NT2RP7002151 | 0 | 0 | 0 | 65.987 | 0 | 0 | 34.013 |
| NT2RP7002163 | 0 | 0 | 0 | 100 | 0 | 0 | 0 |
| NT2RP7002243 | 0 | 0 | 0 | 49.240 | 0 | 0 | 50.760 |
| NT2RP7002282 | 0 | 0 | 0 | 37.009 | 0 | 0 | 19.076 |
| NT2RP7002376 | 0 | 0 | 0 | 29.242 | 0 | 0 | 0 |
| NT2RP7002379 | 0 | 0.915 | 0 | 2.426 | 0 | 0 | 3.127 |
| NT2RP7002449 | 0 | 3.671 | 0 | 4.869 | 0 | 0 | 5.019 |
| NT2RP7002450 | 0 | 0 | 0 | 6.432 | 0 | 0 | 0 |
| NT2RP7002478 | 0 | 0 | 0 | 70.259 | 0 | 0 | 0 |
| NT2RP7002554 | 0 | 0 | 0 | 100 | 0 | 0 | 0 |
| NT2RP7002594 | 0 | 0 | 0 | 32.922 | 0 | 0 | 0 |
| NT2RP7002603 | 0 | 0 | 0 | 100 | 0 | 0 | 0 |
| NT2RP7002619 | 0 | 0 | 0 | 2.626 | 0 | 0 | 4.061 |
| NT2RP7002650 | 0 | 0 | 0 | 100 | 0 | 0 | 0 |
| NT2RP7002738 | 0 | 0 | 0 | 27.748 | 0 | 0 | 35.756 |
| NT2RP7002779 | 0 | 0 | 0 | 78.664 | 0 | 0 | 0 |
| NT2RP7002802 | 0 | 6.641 | 0 | 26.423 | 0 | 0 | 9.080 |
| NT2RP7002829 | 0 | 0 | 0 | 21.074 | 0 | 0 | 0 |
| NT2RP7002841 | 0 | 0 | 0 | 100 | 0 | 0 | 0 |
| NT2RP7002875 | 3.344 | 1.677 | 0 | 4.448 | 0 | 0 | 14.902 |
| NT2RP7002906 | 10.161 | 0 | 0 | 6.757 | 0 | 0 | 13.932 |
| NT2RP7002978 | 0 | 0 | 0 | 100 | 0 | 0 | 0 |
| NT2RP7002982 | 0 | 7.064 | 0 | 18.738 | 0 | 0 | 0 |
| NT2RP7003025 | 0 | 0 | 0 | 100 | 0 | 0 | 0 |
| NT2RP7003050 | 0 | 0 | 0 | 100 | 0 | 0 | 0 |
| NT2RP7003055 | 38.242 | 0 | 0 | 25.432 | 0 | 0 | 13.109 |
| NT2RP7003084 | 0 | 0 | 0 | 100 | 0 | 0 | 0 |
| NT2RP7003091 | 0 | 0 | 0 | 100 | 0 | 0 | 0 |
| NT2RP7003107 | 0 | 0 | 0 | 100 | 0 | 0 | 0 |
| NT2RP7003134 | 0 | 0 | 0 | 100 | 0 | 0 | 0 |
| NT2RP7003148 | 0 | 0 | 0 | 100 | 0 | 0 | 0 |
| NT2RP7003203 | 0 | 6.713 | 0 | 4.452 | 0 | 0 | 13.768 |
| NT2RP7003261 | 0 | 0 | 39.095 | 3.274 | 0 | 10.013 | 3.376 |
| NT2RP7003319 | 0 | 1.658 | 0 | 2.199 | 0 | 0 | 5.667 |
| NT2RP7003439 | 0 | 0 | 0 | 100 | 0 | 0 | 0 |
| NT2RP7003511 | 0 | 0 | 0 | 15.928 | 0 | 0 | 8.210 |
| NT2RP7003629 | 0 | 0 | 0 | 27.270 | 0 | 0 | 0 |
| NT2RP7003632 | 5.901 | 0 | 0 | 3.924 | 0 | 12.001 | 2.023 |
| NT2RP7003647 | 0 | 2.139 | 0 | 5.673 | 0 | 0 | 4.386 |
| NT2RP7003680 | 27.035 | 0 | 0 | 35.957 | 0 | 0 | 0 |
| NT2RP7003688 | 0 | 5.367 | 0 | 1.780 | 0 | 5.442 | 8.256 |
| NT2RP7003724 | 0 | 0 | 0 | 22.256 | 0 | 0 | 0 |
| NT2RP7003960 | 0 | 3.011 | 0 | 11.979 | 0 | 0 | 8.233 |
| NT2RP7004027 | 0 | 0 | 0 | 100 | 0 | 0 | 0 |
| NT2RP7004080 | 0 | 0 | 0 | 100 | 0 | 0 | 0 |
| NT2RP7004114 | 0 | 10.133 | 0 | 26.878 | 0 | 0 | 6.927 |
| NT2RP7004123 | 0 | 0 | 0 | 4.625 | 0 | 0 | 0 |
| NT2RP7004173 | 2.768 | 1.388 | 0 | 1.841 | 0 | 0 | 4.744 |
| NT2RP7004196 | 4.748 | 9.524 | 0 | 6.315 | 0 | 0 | 6.511 |
| NT2RP7004204 | 0 | 0 | 0 | 8.219 | 0 | 0 | 2.118 |
| NT2RP7004233 | 0 | 0 | 0 | 28.819 | 0 | 0 | 14.855 |
| NT2RP7004260 | 0 | 0 | 0 | 61.835 | 0 | 0 | 0 |
| NT2RP7004348 | 0 | 4.107 | 0 | 10.893 | 0 | 0 | 16.844 |
| NT2RP7004352 | 0 | 9.259 | 0 | 16.373 | 0 | 0 | 12.659 |
| NT2RP7004358 | 0 | 0 | 0 | 100 | 0 | 0 | 0 |
| NT2RP7004373 | 0 | 0 | 0 | 2.837 | 0 | 0 | 1.462 |
| NT2RP7004396 | 0 | 0 | 0 | 100 | 0 | 0 | 0 |
| NT2RP7004428 | 0 | 0 | 0 | 16.256 | 0 | 0 | 12.569 |
| NT2RP7004481 | 0 | 9.773 | 0 | 38.885 | 0 | 0 | 26.724 |
| NT2RP7004541 | 0 | 0 | 0 | 58.079 | 0 | 0 | 0 |
| NT2RP7004559 | 0 | 0 | 0 | 20.543 | 0 | 0 | 0 |
| NT2RP7004641 | 0 | 0 | 0 | 61.835 | 0 | 0 | 0 |
| NT2RP7004656 | 0 | 0 | 0 | 51.826 | 0 | 0 | 0 |
| NT2RP7004687 | 0 | 0 | 0 | 45.439 | 0 | 0 | 0 |
| NT2RP7004722 | 0 | 0 | 0 | 100 | 0 | 0 | 0 |
| NT2RP7004728 | 0 | 0 | 0 | 7.576 | 0 | 0 | 9.763 |
| NT2RP7004751 | 0 | 0 | 13.468 | 2.256 | 0 | 0 | 0 |
| NT2RP7004766 | 0 | 0 | 0 | 100 | 0 | 0 | 0 |
| NT2RP7004790 | 0 | 0 | 0 | 37.619 | 0 | 0 | 0 |
| NT2RP7004884 | 0 | 0 | 0 | 13.233 | 0 | 0 | 13.642 |
| NT2RP7004911 | 0 | 3.203 | 0 | 4.248 | 0 | 0 | 2.190 |
| NT2RP7004915 | 0 | 13.491 | 0 | 35.784 | 0 | 0 | 0 |
| NT2RP7004925 | 0 | 6.884 | 36.334 | 6.086 | 0 | 0 | 3.137 |
| NT2RP7004946 | 0 | 3.129 | 0 | 8.299 | 0 | 0 | 8.555 |
| NT2RP7004961 | 0 | 0 | 0 | 81.144 | 0 | 0 | 0 |
| NT2RP7004964 | 0 | 0 | 0 | 100 | 0 | 0 | 0 |
| NT2RP7004975 | 0 | 0 | 0 | 100 | 0 | 0 | 0 |
| NT2RP7005118 | 0 | 0 | 0 | 100 | 0 | 0 | 0 |
| NT2RP7005205 | 0 | 0 | 0 | 100 | 0 | 0 | 0 |
| NT2RP7005219 | 0 | 0 | 0 | 62.933 | 0 | 0 | 0 |
| NT2RP7005323 | 0 | 0 | 0 | 100 | 0 | 0 | 0 |
| NT2RP7005468 | 0 | 33.224 | 0 | 44.064 | 0 | 0 | 22.712 |
| NT2RP7005493 | 0 | 0 | 0 | 29.165 | 0 | 0 | 0 |
| NT2RP7005513 | 0 | 0 | 0 | 4.074 | 0 | 0 | 2.100 |
| NT2RP7005529 | 0 | 0 | 0 | 35.588 | 0 | 0 | 0 |
| NT2RP7005629 | 0 | 0 | 0 | 100 | 0 | 0 | 0 |
| NT2RP7005631 | 0 | 0 | 0 | 100 | 0 | 0 | 0 |
| NT2RP7005669 | 0 | 0 | 0 | 100 | 0 | 0 | 0 |
| NT2RP7005675 | 0 | 0 | 0 | 7.009 | 0 | 0 | 7.226 |
| NT2RP7005750 | 0 | 13.005 | 0 | 17.247 | 0 | 0 | 4.445 |
| NT2RP7005846 | 0 | 0 | 0 | 100 | 0 | 0 | 0 |
| NT2RP7006033 | 0 | 0 | 0 | 37.056 | 0 | 0 | 9.550 |
| NT2RP7006075 | 18.990 | 0 | 0 | 6.315 | 0 | 0 | 0 |
| NT2RP7006141 | 0 | 0 | 0 | 1.780 | 0 | 0 | 0 |
| NT2RP7006160 | 0 | 0 | 0 | 100 | 0 | 0 | 0 |
| NT2RP7006162 | 0 | 0 | 0 | 77.250 | 0 | 0 | 0 |
| NT2RP7006188 | 0 | 0 | 0 | 18.824 | 0 | 0 | 6.468 |
| NT2RP7006223 | 0 | 7.678 | 0 | 10.183 | 0 | 0 | 10.498 |
| NT2RP7006263 | 0 | 7.317 | 0 | 9.705 | 0 | 0 | 10.004 |
| NT2RP7006296 | 0 | 0 | 0 | 78.664 | 0 | 0 | 0 |
| NT2RP7006304 | 0 | 0 | 0 | 78.664 | 0 | 0 | 0 |
| NT2RP7006374 | 0 | 0 | 0 | 100 | 0 | 0 | 0 |
| NT2RP7006395 | 0 | 0 | 0 | 82.532 | 0 | 0 | 0 |
| NT2RP7006408 | 0 | 0 | 0 | 100 | 0 | 0 | 0 |
| NT2RP7006457 | 0 | 0 | 0 | 100 | 0 | 0 | 0 |
| NT2RP7006490 | 7.779 | 7.801 | 0 | 5.173 | 0 | 0 | 5.333 |
| NT2RP7006539 | 0 | 0 | 0 | 14.024 | 0 | 0 | 0 |
| NT2RP7006547 | 0 | 0 | 0 | 78.664 | 0 | 0 | 0 |
| NT2RP7006601 | 0 | 0 | 0 | 68.270 | 0 | 0 | 0 |
| NT2RP7006619 | 0 | 0 | 0 | 5.320 | 0 | 0 | 2.742 |
| NT2RP7006621 | 0 | 0 | 0 | 100 | 0 | 0 | 0 |
| NT2RP7006636 | 0 | 0 | 0 | 100 | 0 | 0 | 0 |
| NT2RP7006701 | 18.221 | 0 | 0 | 12.117 | 0 | 0 | 0 |
| NT2RP7006717 | 2.384 | 0 | 0 | 3.171 | 0 | 0 | 5.721 |
| NT2RP7006853 | 0 | 0 | 0 | 100 | 0 | 0 | 0 |
| NT2RP7006886 | 0 | 0 | 0 | 22.923 | 0 | 0 | 11.816 |
| NT2RP7006887 | 0 | 0 | 0 | 100 | 0 | 0 | 0 |
| NT2RP7006980 | 0 | 0 | 0 | 40.647 | 0 | 0 | 0 |
| NT2RP7006986 | 0 | 6.827 | 0 | 9.054 | 0 | 0 | 9.334 |
| NT2RP7006995 | 0 | 0 | 0 | 51.826 | 0 | 0 | 0 |
| NT2RP7007114 | 0 | 0 | 0 | 39.485 | 0 | 0 | 0 |
| NT2RP7007154 | 0 | 0 | 0 | 1.374 | 0 | 0 | 1.417 |
| NT2RP7007177 | 4.935 | 2.475 | 0 | 6.564 | 0 | 0 | 3.383 |
| NT2RP7007221 | 0 | 0 | 0 | 100 | 0 | 0 | 0 |
| NT2RP7007226 | 0 | 0 | 0 | 100 | 0 | 0 | 0 |
| NT2RP7007252 | 0 | 0 | 0 | 33.100 | 0 | 0 | 0 |
| NT2RP7007269 | 0 | 0 | 0 | 56.608 | 0 | 0 | 0 |
| NT2RP7007310 | 0 | 0 | 0 | 8.975 | 0 | 0 | 0 |
| NT2RP7007359 | 0 | 0 | 0 | 100 | 0 | 0 | 0 |
| NT2RP7007381 | 0 | 0 | 0 | 37.796 | 0 | 0 | 0 |
| NT2RP7007387 | 0 | 3.730 | 0 | 9.894 | 0 | 0 | 5.100 |
| NT2RP7007406 | 0 | 0 | 0 | 74.295 | 0 | 0 | 0 |
| NT2RP7007480 | 0 | 0 | 0 | 100 | 0 | 0 | 0 |
| NT2RP7007504 | 0 | 0 | 0 | 100 | 0 | 0 | 0 |
| NT2RP7007530 | 0 | 0 | 0 | 10.568 | 0 | 0 | 2.723 |
| NT2RP7007537 | 4.456 | 2.234 | 0 | 11.854 | 0 | 9.062 | 0 |
| NT2RP7007580 | 0 | 0 | 0 | 57.604 | 0 | 0 | 0 |
| NT2RP7007594 | 0 | 0 | 0 | 100 | 0 | 0 | 0 |
| NT2RP7007610 | 0 | 5.259 | 0 | 13.950 | 0 | 0 | 3.595 |
| NT2RP7007617 | 0 | 28.588 | 0 | 37.916 | 0 | 0 | 0 |
| NT2RP7007643 | 0 | 0 | 0 | 78.664 | 0 | 0 | 0 |
| NT2RP7007766 | 0 | 0 | 0 | 74.295 | 0 | 0 | 0 |
| NT2RP7007842 | 13.902 | 3.485 | 0 | 4.623 | 0 | 0 | 2.383 |
| NT2RP7007925 | 0 | 0 | 0 | 100 | 0 | 0 | 0 |
| NT2RP7007930 | 0 | 0 | 0 | 78.664 | 0 | 0 | 0 |
| NT2RP7007975 | 0 | 4.960 | 0 | 13.156 | 0 | 0 | 1.695 |
| NT2RP7008013 | 0 | 0 | 0 | 100 | 0 | 0 | 0 |
| NT2RP7008015 | 0 | 0 | 0 | 4.863 | 0 | 0 | 1.253 |
| NT2RP7008133 | 0 | 0 | 0 | 100 | 0 | 0 | 0 |
| NT2RP7008137 | 0 | 0 | 0 | 100 | 0 | 0 | 0 |
| NT2RP7008142 | 0 | 0 | 0 | 100 | 0 | 0 | 0 |
| NT2RP7008144 | 0 | 0 | 0 | 100 | 0 | 0 | 0 |
| NT2RP7008161 | 0 | 22.818 | 0 | 15.131 | 0 | 0 | 15.599 |
| NT2RP7008167 | 0 | 1.649 | 0 | 8.750 | 0 | 6.689 | 3.382 |
| NT2RP7008190 | 0 | 0 | 0 | 3.197 | 0 | 0 | 3.296 |
| NT2RP7008315 | 0 | 0 | 0 | 18.087 | 0 | 0 | 0 |
| NT2RP7008360 | 0 | 60.128 | 0 | 39.872 | 0 | 0 | 0 |
| NT2RP7008396 | 0 | 22.370 | 0 | 29.668 | 0 | 0 | 0 |
| NT2RP7008406 | 0 | 0 | 0 | 100 | 0 | 0 | 0 |
| NT2RP7008435 | 0 | 0 | 0 | 100 | 0 | 0 | 0 |
| NT2RP7008441 | 0 | 0 | 0 | 48.519 | 0 | 0 | 0 |
| NT2RP7008454 | 0 | 0 | 0 | 100 | 0 | 0 | 0 |
| NT2RP7008487 | 0 | 0 | 0 | 36.879 | 0 | 0 | 19.009 |
| NT2RP7008543 | 0 | 0 | 0 | 13.261 | 0 | 0 | 3.418 |
| NT2RP7008544 | 0 | 0 | 0 | 100 | 0 | 0 | 0 |
| NT2RP7008550 | 0 | 20.085 | 0 | 79.915 | 0 | 0 | 0 |
| NT2RP7008557 | 0 | 0 | 0 | 100 | 0 | 0 | 0 |
| NT2RP7008623 | 0 | 0 | 0 | 10.373 | 0 | 0 | 0 |
| NT2RP7008657 | 0 | 0 | 0 | 100 | 0 | 0 | 0 |
| NT2RP7008714 | 14.055 | 14.095 | 0 | 9.347 | 0 | 0 | 0 |
| NT2RP7008720 | 0 | 42.988 | 0 | 57.012 | 0 | 0 | 0 |
| NT2RP7008855 | 0 | 0 | 0 | 100 | 0 | 0 | 0 |
| NT2RP7008863 | 0 | 0 | 0 | 100 | 0 | 0 | 0 |
| NT2RP7009012 | 0 | 20.604 | 0 | 27.326 | 0 | 0 | 0 |
| NT2RP7009019 | 0 | 0 | 0 | 100 | 0 | 0 | 0 |
| NT2RP7009030 | 0 | 0 | 0 | 46.373 | 0 | 0 | 35.854 |
| NT2RP7009087 | 0 | 4.415 | 0 | 11.710 | 0 | 17.904 | 6.036 |
| NT2RP7009097 | 0 | 0 | 0 | 4.333 | 0 | 13.250 | 0 |
| NT2RP7009108 | 0 | 0 | 0 | 8.568 | 0 | 0 | 0 |
| NT2RP7009147 | 0 | 2.895 | 0 | 7.679 | 0 | 0 | 1.979 |
| NT2RP7009149 | 0 | 8.696 | 0 | 2.883 | 0 | 0 | 0 |
| NT2RP7009168 | 0 | 0 | 0 | 65.987 | 0 | 0 | 34.013 |
| NT2RP7009215 | 0 | 0 | 0 | 100 | 0 | 0 | 0 |
| NT2RP7009225 | 0 | 15.334 | 0 | 20.337 | 0 | 0 | 3.494 |
| NT2RP7009236 | 0 | 0 | 0 | 100 | 0 | 0 | 0 |
| NT2RP7009253 | 0 | 0 | 0 | 100 | 0 | 0 | 0 |
| NT2RP7009259 | 2.036 | 6.126 | 0 | 9.479 | 0 | 4.141 | 2.094 |
| NT2RP7009267 | 0 | 0 | 0 | 100 | 0 | 0 | 0 |
| NT2RP7009322 | 0 | 0 | 0 | 26.050 | 0 | 0 | 0 |
| NT2RP7009363 | 0 | 0 | 0 | 100 | 0 | 0 | 0 |
| NT2RP7009370 | 0 | 0 | 0 | 78.664 | 0 | 0 | 0 |
| NT2RP7009373 | 14.559 | 0 | 0 | 19.364 | 0 | 0 | 9.981 |
| NT2RP7009394 | 0 | 0 | 0 | 5.829 | 0 | 0 | 6.009 |
| NT2RP7009397 | 0 | 0 | 0 | 100 | 0 | 0 | 0 |
| NT2RP7009429 | 0 | 0 | 0 | 100 | 0 | 0 | 0 |
| NT2RP7009439 | 0 | 0 | 0 | 100 | 0 | 0 | 0 |
| NT2RP7009466 | 0 | 0 | 0 | 74.295 | 0 | 0 | 0 |
| NT2RP7009481 | 0 | 0 | 0 | 29.611 | 0 | 0 | 0 |
| NT2RP7009482 | 0 | 5.053 | 0 | 5.585 | 0 | 0 | 6.333 |
| NT2RP7009498 | 0 | 1.831 | 0 | 2.429 | 0 | 0 | 0 |
| NT2RP7009502 | 0 | 0 | 0 | 100 | 0 | 0 | 0 |
| NT2RP7009507 | 0 | 0 | 0 | 70.676 | 0 | 0 | 0 |
| NT2RP7009577 | 0 | 0 | 0 | 56.608 | 0 | 0 | 0 |
| NT2RP7009743 | 0 | 0 | 0 | 100 | 0 | 0 | 0 |
| NT2RP7009867 | 0 | 0 | 0 | 100 | 0 | 0 | 0 |
| NT2RP7010109 | 0 | 0 | 0 | 75.744 | 0 | 0 | 0 |
| NT2RP7010128 | 0 | 0 | 0 | 100 | 0 | 0 | 0 |
| NT2RP7010235 | 0 | 15.860 | 0 | 84.140 | 0 | 0 | 0 |
| NT2RP7010275 | 0 | 0 | 0 | 100 | 0 | 0 | 0 |
| NT2RP7010521 | 0 | 0 | 0 | 100 | 0 | 0 | 0 |
| NT2RP7010599 | 0 | 0 | 0 | 77.250 | 0 | 0 | 0 |
| NT2RP7010612 | 0 | 0 | 0 | 52.133 | 0 | 0 | 0 |
| NT2RP7010817 | 0 | 0 | 0 | 100 | 0 | 0 | 0 |
| NT2RP7011086 | 0 | 0 | 0 | 100 | 0 | 0 | 0 |
| NT2RP7011132 | 0 | 0 | 0 | 100 | 0 | 0 | 0 |
| NT2RP7011268 | 0 | 0 | 0 | 100 | 0 | 0 | 0 |
| NT2RP7011318 | 0 | 0 | 0 | 56.608 | 0 | 0 | 0 |
| NT2RP7011452 | 0 | 0 | 0 | 100 | 0 | 0 | 0 |
| NT2RP7011570 | 0 | 0 | 0 | 100 | 0 | 0 | 0 |
| NT2RP7011721 | 0 | 0 | 0 | 100 | 0 | 0 | 0 |
| NT2RP7011909 | 0 | 0 | 0 | 0.683 | 93.459 | 0 | 0 |
| NT2RP7012291 | 0 | 0 | 0 | 100 | 0 | 0 | 0 |
| NT2RP7012516 | 0 | 0 | 0 | 100 | 0 | 0 | 0 |
| NT2RP7012776 | 0 | 0 | 0 | 20.256 | 0 | 0 | 0 |
| NT2RP7013002 | 0 | 42.988 | 0 | 57.012 | 0 | 0 | 0 |
| NT2RP7013374 | 0 | 0 | 0 | 100 | 0 | 0 | 0 |
| NT2RP7013499 | 0 | 0 | 0 | 100 | 0 | 0 | 0 |
| NT2RP7013573 | 0 | 13.095 | 0 | 17.367 | 0 | 0 | 8.952 |
| NT2RP7013729 | 0 | 0 | 0 | 100 | 0 | 0 | 0 |
| NT2RP7013764 | 0 | 0 | 0 | 54.725 | 0 | 0 | 0 |
| NT2RP7013795 | 0 | 0 | 0 | 10.432 | 0 | 0 | 0 |
| NT2RP7013999 | 0 | 0 | 0 | 100 | 0 | 0 | 0 |
| NT2RP7014005 | 0 | 21.145 | 0 | 14.022 | 0 | 0 | 0 |
| NT2RP7014178 | 0 | 0 | 0 | 100 | 0 | 0 | 0 |
| NT2RP7014348 | 0 | 0 | 0 | 100 | 0 | 0 | 0 |
| NT2RP7014420 | 0 | 0 | 0 | 100 | 0 | 0 | 0 |
| NT2RP7014583 | 0 | 0 | 0 | 39.434 | 0 | 0 | 0 |
| NT2RP7014721 | 0 | 0 | 0 | 100 | 0 | 0 | 0 |
| NT2RP7014743 | 0 | 0 | 0 | 100 | 0 | 0 | 0 |
| NT2RP7014778 | 0 | 0 | 0 | 100 | 0 | 0 | 0 |
| NT2RP7014906 | 0 | 0 | 0 | 100 | 0 | 0 | 0 |
| NT2RP7014910 | 0 | 6.518 | 0 | 5.763 | 0 | 0 | 2.971 |
| NT2RP7015080 | 0 | 0 | 0 | 100 | 0 | 0 | 0 |
| NT2RP7015431 | 0 | 0 | 0 | 100 | 0 | 0 | 0 |
| NT2RP7015503 | 0 | 0 | 0 | 7.632 | 0 | 0 | 0 |
| NT2RP7015512 | 0 | 0 | 0 | 31.156 | 0 | 0 | 0 |
| NT2RP7015676 | 0 | 0 | 0 | 100 | 0 | 0 | 0 |
| NT2RP7015789 | 0 | 0 | 0 | 100 | 0 | 0 | 0 |
| NT2RP7015996 | 0 | 0 | 0 | 100 | 0 | 0 | 0 |
| NT2RP7016508 | 0 | 0 | 0 | 100 | 0 | 0 | 0 |
| NT2RP7016574 | 0 | 0 | 0 | 53.243 | 0 | 0 | 0 |
| NT2RP7016622 | 0 | 0 | 0 | 100 | 0 | 0 | 0 |
| NT2RP7016911 | 0 | 0 | 0 | 100 | 0 | 0 | 0 |
| NT2RP7017139 | 0 | 0 | 0 | 100 | 0 | 0 | 0 |
| NT2RP7017284 | 0 | 0 | 0 | 100 | 0 | 0 | 0 |
| NT2RP7017365 | 0 | 0 | 0 | 100 | 0 | 0 | 0 |
| NT2RP7017474 | 0 | 0 | 0 | 45.366 | 0 | 0 | 0 |
| NT2RP7017546 | 0 | 0 | 0 | 100 | 0 | 0 | 0 |
| NT2RP7017567 | 0 | 0 | 0 | 100 | 0 | 0 | 0 |
| NT2RP7017795 | 0 | 0 | 0 | 100 | 0 | 0 | 0 |
| NT2RP7017971 | 0 | 0 | 0 | 100 | 0 | 0 | 0 |
| NT2RP7018032 | 0 | 0 | 0 | 100 | 0 | 0 | 0 |
| NT2RP7018126 | 0 | 0 | 0 | 40.584 | 0 | 0 | 0 |
| NT2RP7018197 | 0 | 0 | 0 | 100 | 0 | 0 | 0 |
| NT2RP7018206 | 0 | 0 | 0 | 100 | 0 | 0 | 0 |
| NT2RP7018340 | 0 | 0 | 0 | 100 | 0 | 0 | 0 |
| NT2RP7018586 | 0 | 0 | 0 | 100 | 0 | 0 | 0 |
| NT2RP7018802 | 0 | 0 | 0 | 100 | 0 | 0 | 0 |
| NT2RP7018871 | 0 | 0 | 0 | 100 | 0 | 0 | 0 |
| NT2RP7019064 | 0 | 23.338 | 0 | 30.952 | 0 | 0 | 0 |
| NT2RP7019135 | 0 | 0 | 0 | 70.676 | 0 | 0 | 0 |
| NT2RP7019273 | 0 | 0 | 0 | 100 | 0 | 0 | 0 |
| NT2RP7019367 | 0 | 0 | 0 | 100 | 0 | 0 | 0 |
| NT2RP7019401 | 0 | 0 | 0 | 25.024 | 0 | 0 | 0 |
| NT2RP7019445 | 0 | 0 | 0 | 100 | 0 | 0 | 0 |
| NT2RP7019543 | 0 | 0 | 0 | 50.987 | 0 | 0 | 0 |
| NT2RP7019682 | 0 | 0 | 0 | 100 | 0 | 0 | 0 |
| NT2RP7019835 | 0 | 0 | 0 | 2.512 | 0 | 0 | 0 |
| NT2RP7020112 | 0 | 0 | 0 | 40.874 | 0 | 0 | 0 |
| NT2RP7020123 | 0 | 0 | 0 | 10.250 | 0 | 0 | 0 |
| NT2RP7020343 | 0 | 0 | 0 | 100 | 0 | 0 | 0 |
| NT2RP7020379 | 0 | 0 | 0 | 100 | 0 | 0 | 0 |
| NT2RP8000137 | 0 | 0 | 0 | 100 | 0 | 0 | 0 |
| NT2RP8000296 | 0 | 0 | 0 | 100 | 0 | 0 | 0 |
| NT2RP8000435 | 0 | 24.247 | 0 | 32.158 | 0 | 0 | 0 |
| NT2RP8000483 | 0 | 0 | 0 | 100 | 0 | 0 | 0 |
| NT2RP8000521 | 0 | 0 | 0 | 62.933 | 0 | 0 | 0 |
| NT2RP8000633 | 0 | 0 | 0 | 100 | 0 | 0 | 0 |
| NT2RP8001363 | 0 | 0 | 0 | 100 | 0 | 0 | 0 |
| NT2RP8001407 | 0 | 0 | 0 | 100 | 0 | 0 | 0 |
| NT2RP8001584 | 0 | 0 | 0 | 100 | 0 | 0 | 0 |
| NT2RP8001604 | 0 | 25.218 | 0 | 33.445 | 0 | 0 | 0 |
| NT2RP8001605 | 0 | 0 | 0 | 70.676 | 0 | 0 | 0 |
| NT2RP8003490 | 0 | 0 | 0 | 100 | 0 | 0 | 0 |
| NT2RP8003657 | 0 | 0 | 0 | 100 | 0 | 0 | 0 |
| NT2RP8003787 | 0 | 0 | 0 | 100 | 0 | 0 | 0 |
| NT2RP8004306 | 0 | 0 | 0 | 100 | 0 | 0 | 0 |
| NT2RP8005546 | 0 | 0 | 0 | 59.103 | 0 | 0 | 0 |
| NT2RP8006452 | 0 | 0 | 0 | 100 | 0 | 0 | 0 |
| NT2RP8006521 | 0 | 0 | 0 | 100 | 0 | 0 | 0 |
| NT2RP8007416 | 0 | 0 | 0 | 100 | 0 | 0 | 0 |
| NT2RP8007503 | 0 | 0 | 0 | 100 | 0 | 0 | 0 |
| NT2RP8007715 | 0 | 0 | 0 | 30.282 | 0 | 0 | 0 |
| NT2RP8007920 | 0 | 0 | 0 | 9.535 | 0 | 0 | 31.946 |
| NT2RP8008057 | 0 | 0 | 0 | 68.270 | 0 | 0 | 0 |
| NT2RP8009248 | 0 | 0 | 0 | 100 | 0 | 0 | 0 |
| NTONG1000006 | 0 | 0 | 0 | 0 | 0 | 100 | 0 |
| NTONG1000033 | 0 | 6.679 | 0 | 0 | 0 | 9.030 | 0 |
| NTONG1000047 | 0 | 0 | 0 | 0 | 0 | 44.281 | 0 |
| NTONG1000052 | 0 | 0 | 0 | 0 | 0 | 52.799 | 0 |
| NTONG1000075 | 0 | 0 | 0 | 0 | 0 | 49.103 | 0 |
| NTONG1000087 | 0 | 0 | 0 | 0 | 0 | 100 | 0 |
| NTONG1000098 | 0 | 2.316 | 0 | 3.071 | 0 | 4.695 | 4.749 |
| NTONG1000123 | 0 | 0 | 0 | 0 | 0 | 68.634 | 0 |
| NTONG1000130 | 0 | 0 | 0 | 0 | 0 | 86.807 | 0 |
| NTONG1000161 | 0 | 0 | 0 | 0 | 0 | 100 | 0 |
| NTONG1000172 | 0 | 0 | 0 | 0 | 0 | 100 | 0 |
| NTONG1000182 | 0 | 2.250 | 0 | 0 | 0 | 27.372 | 0 |
| NTONG1000213 | 0 | 0 | 0 | 0 | 0 | 100 | 0 |
| NTONG1000214 | 0 | 0 | 0 | 8.919 | 0 | 81.823 | 0 |
| NTONG1000246 | 0 | 0 | 0 | 0 | 0 | 11.524 | 0 |
| NTONG1000247 | 0 | 0 | 0 | 0 | 0 | 100 | 0 |
| NTONG1000257 | 0 | 0 | 0 | 0 | 0 | 8.111 | 0 |
| NTONG1000264 | 3.532 | 1.771 | 0 | 2.349 | 0 | 7.183 | 15.741 |
| NTONG2000040 | 0 | 0 | 0 | 0 | 0 | 100 | 0 |
| NTONG2000107 | 0 | 0 | 0 | 0 | 0 | 78.591 | 0 |
| NTONG2000231 | 0 | 0 | 0 | 0 | 0 | 100 | 0 |
| NTONG2000265 | 0 | 0 | 0 | 2.055 | 0 | 6.283 | 3.177 |
| NTONG2000334 | 0 | 0 | 0 | 0 | 0 | 15.068 | 7.620 |
| NTONG2000363 | 0 | 0 | 0 | 0 | 0 | 100 | 0 |
| NTONG2000413 | 0 | 0 | 0 | 0 | 0 | 79.538 | 13.407 |
| NTONG2000492 | 0 | 0 | 0 | 0 | 0 | 100 | 0 |
| NTONG2000499 | 0 | 0 | 0 | 0 | 0 | 68.022 | 0 |
| NTONG2000531 | 0 | 0 | 0 | 0 | 0 | 100 | 0 |
| NTONG2000583 | 0 | 0 | 0 | 0 | 0 | 100 | 0 |
| NTONG2000800 | 0 | 0 | 0 | 0 | 0 | 15.610 | 0 |
| NTONG2000858 | 0 | 0 | 0 | 0 | 0 | 21.285 | 0 |
| NTONG2000876 | 0 | 0 | 0 | 0 | 0 | 10.262 | 1.730 |
| NTONG2000878 | 0 | 2.146 | 0 | 0 | 0 | 8.703 | 0 |
| NTONG2000966 | 0 | 0 | 0 | 0 | 0 | 100 | 0 |
| NTONG2000977 | 0 | 0 | 0 | 0 | 0 | 7.245 | 2.442 |
| NTONG2000985 | 0 | 0 | 53.648 | 0 | 0 | 13.740 | 2.316 |
| NTONG2001014 | 0 | 0 | 0 | 0 | 0 | 100 | 0 |
| NTONG2001079 | 0 | 0 | 0 | 0 | 0 | 85.575 | 14.425 |
| NTONG2001137 | 0 | 0 | 0 | 0 | 0 | 8.434 | 0 |
| NTONG2001157 | 0 | 0 | 0 | 0 | 0 | 100 | 0 |
| NTONG2001173 | 0 | 0 | 0 | 0 | 0 | 100 | 0 |
| NTONG2001220 | 0 | 0 | 0 | 0 | 0 | 42.409 | 0 |
| NTONG2001222 | 0 | 0 | 0 | 0 | 0 | 30.557 | 0 |
| NTONG2001362 | 0 | 0 | 0 | 0 | 0 | 25.727 | 0 |
| NTONG2001428 | 0 | 0 | 0 | 0 | 0 | 77.689 | 0 |
| NTONG2001532 | 0 | 0 | 0 | 0 | 0 | 100 | 0 |
| NTONG2001550 | 0 | 0 | 0 | 0 | 0 | 25.651 | 0 |
| NTONG2001567 | 0 | 0 | 0 | 0 | 0 | 9.039 | 0 |
| NTONG2001587 | 0 | 0 | 0 | 0 | 0 | 17.552 | 0 |
| NTONG2001612 | 0 | 2.040 | 0 | 2.705 | 0 | 8.273 | 4.184 |
| NTONG2001619 | 0 | 0 | 0 | 0 | 0 | 100 | 0 |
| NTONG2001642 | 0 | 0 | 0 | 0 | 0 | 100 | 0 |
| NTONG2001657 | 0 | 0 | 0 | 0 | 0 | 48.867 | 0 |
| NTONG2001676 | 0 | 0 | 0 | 17.193 | 0 | 52.573 | 0 |
| NTONG2001762 | 0 | 0 | 0 | 0 | 0 | 13.290 | 11.201 |
| NTONG2002278 | 0 | 0 | 0 | 0 | 0 | 100 | 0 |
| NTONG2002582 | 0 | 0 | 0 | 0 | 0 | 27.719 | 0 |
| NTONG2002807 | 0 | 0 | 0 | 0 | 0 | 86.921 | 0 |
| NTONG2002948 | 0 | 0 | 0 | 0 | 0 | 32.729 | 0 |
| NTONG2002970 | 0 | 0 | 0 | 0 | 0 | 100 | 0 |
| NTONG2002985 | 0 | 0 | 0 | 0 | 0 | 88.053 | 0 |
| NTONG2003158 | 0 | 0 | 0 | 0 | 0 | 100 | 0 |
| NTONG2003210 | 0 | 0 | 0 | 0 | 0 | 100 | 0 |
| NTONG2003316 | 0 | 0 | 0 | 0 | 0 | 100 | 0 |
| NTONG2003409 | 0 | 0 | 0 | 0 | 0 | 100 | 0 |
| NTONG2003454 | 0 | 0 | 0 | 0 | 0 | 21.971 | 0 |
| NTONG2003515 | 0 | 0 | 0 | 0 | 0 | 72.123 | 0 |
| NTONG2003805 | 0 | 0 | 0 | 0 | 0 | 100 | 0 |
| NTONG2003839 | 0 | 9.529 | 0 | 0 | 0 | 19.323 | 0 |
| NTONG2003852 | 0 | 0 | 0 | 0 | 0 | 49.507 | 0 |
| NTONG2003897 | 0 | 0 | 0 | 0 | 0 | 100 | 0 |
| NTONG2003928 | 0 | 0 | 0 | 0 | 0 | 42.932 | 0 |
| NTONG2004095 | 0 | 0 | 0 | 0 | 0 | 67.666 | 0 |
| NTONG2004308 | 0 | 0 | 0 | 0 | 0 | 86.807 | 0 |
| NTONG2004521 | 0 | 0 | 0 | 0 | 0 | 100 | 0 |
| NTONG2004614 | 0 | 0 | 0 | 0 | 0 | 43.643 | 0 |
| NTONG2004690 | 0 | 0 | 0 | 0 | 0 | 100 | 0 |
| NTONG2004806 | 0 | 0 | 0 | 0 | 0 | 51.123 | 0 |
| NTONG2004829 | 0 | 0 | 0 | 0 | 0 | 100 | 0 |
| NTONG2004844 | 0 | 10 | 0 | 0 | 0 | 11.944 | 0 |
| NTONG2004918 | 0 | 0 | 0 | 0 | 0 | 47.726 | 0 |
| NTONG2004991 | 0 | 0 | 0 | 0 | 0 | 100 | 0 |
| NTONG2005062 | 0 | 0 | 0 | 0 | 0 | 100 | 0 |
| NTONG2005086 | 0 | 0 | 0 | 0 | 0 | 100 | 0 |
| NTONG2005137 | 0 | 0 | 0 | 0 | 0 | 100 | 0 |
| NTONG2005153 | 0 | 0 | 0 | 0 | 0 | 58.314 | 0 |
| NTONG2005265 | 0 | 0 | 0 | 0 | 0 | 100 | 0 |
| NTONG2005277 | 0 | 0 | 0 | 0 | 0 | 100 | 0 |
| NTONG2005363 | 0 | 0 | 0 | 0 | 0 | 86.071 | 0 |
| NTONG2005373 | 0 | 0 | 0 | 0 | 0 | 86.864 | 0 |
| NTONG2005391 | 0 | 4.236 | 0 | 11.237 | 0 | 17.181 | 2.896 |
| NTONG2005480 | 0 | 0 | 0 | 0 | 0 | 100 | 0 |
| NTONG2005497 | 0 | 0 | 0 | 0 | 90.363 | 2.020 | 0 |
| NTONG2005520 | 0 | 6.048 | 0 | 0 | 0 | 4.906 | 0 |
| NTONG2005577 | 0 | 0 | 0 | 0 | 0 | 100 | 0 |
| NTONG2005657 | 0 | 0 | 0 | 0 | 0 | 100 | 0 |
| NTONG2005801 | 0 | 0 | 0 | 0 | 0 | 26.260 | 0 |
| NTONG2005822 | 0 | 0 | 0 | 0 | 0 | 67.622 | 0 |
| NTONG2005897 | 0 | 0 | 0 | 0 | 0 | 50.588 | 0 |
| NTONG2005969 | 0 | 0 | 0 | 15.484 | 0 | 23.675 | 0 |
| NTONG2006099 | 0 | 0 | 0 | 0 | 0 | 100 | 0 |
| NTONG2006187 | 0 | 0 | 0 | 0 | 0 | 100 | 0 |
| NTONG2006301 | 0 | 0 | 0 | 0 | 0 | 40.505 | 0 |
| NTONG2006324 | 0 | 0 | 0 | 0 | 0 | 100 | 0 |
| NTONG2006354 | 0 | 0 | 0 | 0 | 0 | 100 | 0 |
| NTONG2006440 | 0 | 0 | 0 | 0 | 0 | 100 | 0 |
| NTONG2006484 | 0 | 0 | 0 | 0 | 0 | 31.857 | 0 |
| NTONG2006501 | 0 | 0 | 0 | 0 | 0 | 100 | 0 |
| NTONG2006646 | 0 | 0 | 0 | 0 | 0 | 100 | 0 |
| NTONG2006709 | 0 | 16.469 | 0 | 0 | 0 | 66.789 | 0 |
| NTONG2006783 | 0 | 0 | 0 | 0 | 0 | 20.865 | 0 |
| NTONG2007020 | 0 | 0 | 0 | 0 | 0 | 100 | 0 |
| NTONG2007028 | 0 | 0 | 0 | 0 | 0 | 88.053 | 0 |
| NTONG2007034 | 0 | 0 | 0 | 0 | 0 | 52.247 | 0 |
| NTONG2007249 | 0 | 0 | 0 | 0 | 0 | 100 | 0 |
| NTONG2007517 | 0 | 0 | 0 | 0 | 0 | 100 | 0 |
| NTONG2007522 | 0 | 0 | 0 | 0 | 0 | 100 | 0 |
| NTONG2007658 | 0 | 0 | 0 | 0 | 0 | 14.749 | 0 |
| NTONG2007693 | 0 | 0 | 0 | 0 | 0 | 51.858 | 0 |
| NTONG2007756 | 0 | 0 | 0 | 0 | 0 | 49.744 | 0 |
| NTONG2008088 | 0 | 0 | 0 | 0 | 0 | 75.309 | 0 |
| NTONG2008093 | 0 | 0 | 0 | 0 | 0 | 100 | 0 |
| NTONG2008143 | 0 | 0 | 0 | 0 | 0 | 80.075 | 0 |
| NTONG2008365 | 0 | 0 | 0 | 0 | 0 | 100 | 0 |
| NTONG2008483 | 0 | 4.356 | 0 | 0 | 0 | 17.664 | 1.985 |
| NTONG2008522 | 0 | 0 | 0 | 0 | 0 | 57.763 | 0 |
| NTONG2008672 | 0 | 0 | 0 | 0 | 0 | 100 | 0 |
| NTONG2008862 | 0 | 0 | 0 | 0 | 0 | 100 | 0 |
| NTONG2008939 | 0 | 0 | 0 | 0 | 0 | 100 | 0 |
| NTONG2008944 | 0 | 0 | 0 | 14.075 | 0 | 21.519 | 3.627 |
| NTONG2009060 | 0 | 0 | 0 | 0 | 0 | 20.536 | 0 |
| NTONG2009068 | 0 | 0 | 0 | 0 | 0 | 100 | 0 |
| NTONG2009229 | 0 | 0 | 0 | 0 | 0 | 100 | 0 |
| NTONG2009233 | 0 | 0 | 0 | 0 | 0 | 100 | 0 |
| NTONG2009468 | 0 | 0 | 0 | 0 | 0 | 69.996 | 0 |
| NTONG2009576 | 0 | 0 | 0 | 0 | 0 | 52.366 | 0 |
| OCBBF1000016 | 0 | 0 | 0 | 0 | 0 | 0 | 100 |
| OCBBF1000030 | 0 | 0 | 0 | 0 | 0 | 0 | 54.907 |
| OCBBF1000042 | 0 | 0 | 0 | 0 | 0 | 0 | 100 |
| OCBBF1000049 | 0 | 9.030 | 0 | 0 | 0 | 0 | 49.386 |
| OCBBF1000054 | 0 | 0 | 0 | 0 | 0 | 0 | 100 |
| OCBBF1000067 | 0 | 0 | 0 | 0 | 0 | 0 | 22.706 |
| OCBBF1000080 | 0 | 0 | 0 | 0 | 0 | 0 | 23.753 |
| OCBBF1000085 | 0 | 0 | 0 | 0 | 0 | 0 | 100 |
| OCBBF1000086 | 0 | 0 | 0 | 1.845 | 0 | 0 | 1.902 |
| OCBBF1000091 | 0 | 0 | 0 | 0 | 0 | 0 | 100 |
| OCBBF1000104 | 0 | 0 | 0 | 24.822 | 0 | 0 | 25.588 |
| OCBBF1000114 | 0 | 0 | 0 | 0 | 0 | 0 | 3.167 |
| OCBBF1000118 | 0 | 0 | 0 | 0 | 0 | 0 | 100 |
| OCBBF1000119 | 0 | 0 | 0 | 0 | 0 | 0 | 100 |
| OCBBF1000122 | 0 | 0 | 0 | 0 | 0 | 0 | 100 |
| OCBBF1000130 | 0 | 0 | 0 | 0 | 0 | 0 | 100 |
| OCBBF1000138 | 0 | 0 | 0 | 0 | 0 | 0 | 100 |
| OCBBF1000145 | 0 | 0 | 0 | 0 | 0 | 0 | 52.835 |
| OCBBF1000146 | 6.252 | 1.568 | 0 | 6.237 | 0 | 0 | 10.716 |
| OCBBF1000153 | 0 | 0 | 0 | 0 | 0 | 0 | 84.325 |
| OCBBF1000175 | 0 | 13.090 | 0 | 0 | 0 | 0 | 17.896 |
| OCBBF1000185 | 0 | 7.650 | 0 | 20.293 | 0 | 0 | 31.379 |
| OCBBF1000188 | 3.774 | 1.892 | 0 | 0 | 0 | 0 | 3.881 |
| OCBBF1000192 | 0 | 0 | 0 | 0 | 0 | 0 | 100 |
| OCBBF1000254 | 0 | 0 | 0 | 0 | 0 | 0 | 55.216 |
| OCBBF1000315 | 0 | 0 | 0 | 0 | 0 | 0 | 21.738 |
| OCBBF2000013 | 0 | 14.144 | 0 | 4.690 | 0 | 0 | 12.086 |
| OCBBF2000015 | 0 | 2.875 | 0 | 11.441 | 0 | 0 | 13.760 |
| OCBBF2000126 | 0 | 0 | 0 | 9.367 | 0 | 0 | 4.828 |
| OCBBF2000178 | 11.854 | 1.981 | 0 | 2.628 | 0 | 0 | 31.152 |
| OCBBF2000231 | 0 | 0 | 0 | 9.441 | 0 | 0 | 29.197 |
| OCBBF2000277 | 0 | 26.701 | 0 | 0 | 0 | 0 | 18.253 |
| OCBBF2000287 | 0 | 0 | 0 | 0 | 0 | 0 | 26.038 |
| OCBBF2000323 | 0 | 0 | 0 | 0 | 0 | 0 | 18.850 |
| OCBBF2000452 | 0 | 0 | 0 | 0 | 0 | 0 | 100 |
| OCBBF2000467 | 0 | 0 | 0 | 0 | 0 | 14.865 | 22.551 |
| OCBBF2000522 | 0 | 4.595 | 0 | 0 | 0 | 18.636 | 3.141 |
| OCBBF2000677 | 0 | 0 | 0 | 0 | 0 | 0 | 20.236 |
| OCBBF2000703 | 0 | 0 | 0 | 0 | 0 | 0 | 100 |
| OCBBF2000712 | 0 | 0 | 0 | 0 | 0 | 0 | 2.348 |
| OCBBF2000719 | 0 | 0 | 0 | 0 | 0 | 0 | 100 |
| OCBBF2000824 | 0 | 0 | 0 | 0 | 0 | 0 | 14.930 |
| OCBBF2000831 | 0 | 0 | 0 | 0 | 0 | 0 | 47.849 |
| OCBBF2000846 | 0 | 0 | 0 | 0 | 0 | 0 | 0.909 |
| OCBBF2000904 | 29.296 | 0 | 0 | 9.741 | 0 | 0 | 10.042 |
| OCBBF2000982 | 0 | 0 | 25.094 | 0 | 0 | 0 | 6.500 |
| OCBBF2000986 | 0 | 3.502 | 0 | 2.323 | 0 | 0 | 8.380 |
| OCBBF2000998 | 0 | 0 | 0 | 0 | 0 | 0 | 100 |
| OCBBF2001075 | 0 | 0 | 0 | 0 | 0 | 0 | 100 |
| OCBBF2001101 | 0 | 0 | 0 | 0 | 0 | 0 | 100 |
| OCBBF2001124 | 0 | 0 | 0 | 0 | 0 | 0 | 100 |
| OCBBF2001140 | 0 | 0 | 0 | 0 | 0 | 0 | 7.024 |
| OCBBF2001166 | 0 | 0 | 0 | 0 | 0 | 0 | 13.617 |
| OCBBF2001176 | 0 | 0 | 0 | 0 | 0 | 0 | 100 |
| OCBBF2001186 | 0 | 0 | 0 | 0 | 0 | 0 | 43.982 |
| OCBBF2001196 | 0 | 0 | 0 | 0 | 0 | 0 | 19.673 |
| OCBBF2001210 | 0 | 0 | 10 | 0 | 0 | 0 | 27.026 |
| OCBBF2001252 | 0 | 0 | 0 | 0 | 0 | 0 | 40.027 |
| OCBBF2001307 | 0 | 0 | 0 | 0 | 0 | 0 | 2.066 |
| OCBBF2001323 | 0 | 0 | 0 | 20.724 | 0 | 0 | 21.364 |
| OCBBF2001389 | 0 | 0 | 0 | 0 | 0 | 0 | 100 |
| OCBBF2001402 | 0 | 0 | 0 | 0 | 0 | 0 | 40.207 |
| OCBBF2001408 | 0 | 0 | 0 | 0 | 0 | 0 | 47.976 |
| OCBBF2001416 | 0 | 0 | 0 | 0 | 0 | 0 | 51.849 |
| OCBBF2001473 | 0 | 0 | 0 | 0 | 0 | 0 | 100 |
| OCBBF2001492 | 2.487 | 0 | 0 | 3.307 | 0 | 0 | 8.524 |
| OCBBF2001494 | 0 | 0 | 0 | 0 | 0 | 0 | 26.272 |
| OCBBF2001527 | 0 | 0 | 0 | 0 | 0 | 0 | 100 |
| OCBBF2001528 | 0 | 0 | 0 | 0 | 0 | 0 | 41.188 |
| OCBBF2001586 | 12.994 | 0 | 0 | 8.642 | 0 | 26.425 | 4.454 |
| OCBBF2001639 | 0 | 0 | 0 | 0 | 0 | 0 | 5.842 |
| OCBBF2001681 | 0 | 0 | 0 | 0 | 0 | 0 | 100 |
| OCBBF2001687 | 0 | 0 | 0 | 0 | 0 | 0 | 7.169 |
| OCBBF2001706 | 0 | 0 | 0 | 0 | 0 | 0 | 59.836 |
| OCBBF2001749 | 0 | 0 | 0 | 0 | 0 | 0 | 40.207 |
| OCBBF2001794 | 0 | 0 | 0 | 0 | 0 | 34.843 | 11.746 |
| OCBBF2001910 | 0 | 0 | 0 | 0 | 0 | 0 | 100 |
| OCBBF2001931 | 0 | 0 | 0 | 0 | 0 | 0 | 20.802 |
| OCBBF2001961 | 0 | 0 | 0 | 0 | 0 | 0 | 51.019 |
| OCBBF2001983 | 0 | 0 | 0 | 0 | 0 | 0 | 8.974 |
| OCBBF2002015 | 0 | 0 | 0 | 0 | 0 | 0 | 17.182 |
| OCBBF2002083 | 0 | 0 | 0 | 0 | 0 | 0 | 27.302 |
| OCBBF2002086 | 0 | 5.855 | 0 | 7.765 | 0 | 0 | 4.002 |
| OCBBF2002124 | 0 | 0 | 0 | 0 | 0 | 0 | 100 |
| OCBBF2002161 | 0 | 0 | 0 | 0 | 0 | 0 | 100 |
| OCBBF2002290 | 0 | 0 | 0 | 0 | 0 | 0 | 12.529 |
| OCBBF2002357 | 0 | 0 | 0 | 0 | 0 | 0 | 100 |
| OCBBF2002376 | 0 | 0 | 0 | 0 | 0 | 0 | 18.916 |
| OCBBF2002615 | 0 | 0 | 0 | 0 | 0 | 0 | 100 |
| OCBBF2002626 | 3.060 | 1.535 | 0 | 0 | 0 | 0 | 4.196 |
| OCBBF2002656 | 0 | 0 | 0 | 0 | 0 | 0 | 6.165 |
| OCBBF2002663 | 0 | 0 | 0 | 0 | 0 | 0 | 40.207 |
| OCBBF2002805 | 0 | 0 | 0 | 0 | 0 | 0 | 100 |
| OCBBF2002865 | 0 | 0 | 0 | 0 | 0 | 0 | 65.522 |
| OCBBF2002920 | 0 | 0 | 0 | 0 | 0 | 0 | 100 |
| OCBBF2002980 | 0 | 0 | 0 | 0 | 0 | 0 | 54.907 |
| OCBBF2003028 | 0 | 0 | 0 | 0 | 0 | 0 | 100 |
| OCBBF2003052 | 0 | 0 | 0 | 0 | 0 | 0 | 14.156 |
| OCBBF2003091 | 0 | 0 | 0 | 0 | 0 | 0 | 100 |
| OCBBF2003246 | 0 | 0 | 0 | 0 | 0 | 0 | 24.315 |
| OCBBF2003327 | 0 | 0 | 0 | 0 | 0 | 0 | 100 |
| OCBBF2003518 | 0 | 1.873 | 0 | 0 | 0 | 0 | 1.281 |
| OCBBF2003543 | 0 | 0 | 0 | 0 | 0 | 0 | 59.836 |
| OCBBF2003593 | 0 | 0 | 0 | 0 | 0 | 0 | 55.403 |
| OCBBF2003744 | 0 | 0 | 0 | 0 | 0 | 0 | 52.585 |
| OCBBF2003819 | 0 | 0 | 0 | 0 | 0 | 0 | 26.175 |
| OCBBF2003925 | 0 | 0 | 0 | 4.016 | 0 | 0 | 1.035 |
| OCBBF2004038 | 0 | 0 | 0 | 0 | 0 | 0 | 33.259 |
| OCBBF2004104 | 0 | 0 | 0 | 0 | 0 | 0 | 22.118 |
| OCBBF2004147 | 0 | 0 | 0 | 0 | 0 | 0 | 100 |
| OCBBF2004168 | 0 | 0 | 0 | 0 | 0 | 0 | 100 |
| OCBBF2004235 | 0 | 0 | 0 | 0 | 0 | 0 | 14.817 |
| OCBBF2004259 | 0 | 0 | 0 | 0 | 0 | 0 | 52.835 |
| OCBBF2004273 | 0 | 4.887 | 0 | 0 | 0 | 0 | 3.341 |
| OCBBF2004385 | 0 | 0 | 0 | 0 | 0 | 0 | 100 |
| OCBBF2004418 | 0 | 0 | 0 | 0 | 0 | 0 | 17.655 |
| OCBBF2004478 | 0 | 0 | 0 | 0 | 0 | 0 | 100 |
| OCBBF2004482 | 0 | 0 | 0 | 0 | 0 | 0 | 100 |
| OCBBF2004533 | 0 | 0 | 0 | 0 | 0 | 0 | 25.025 |
| OCBBF2004567 | 0 | 0 | 0 | 0 | 0 | 0 | 100 |
| OCBBF2004612 | 0 | 0 | 0 | 0 | 0 | 0 | 100 |
| OCBBF2004647 | 0 | 0 | 0 | 0 | 0 | 0 | 100 |
| OCBBF2004669 | 0 | 0 | 0 | 0 | 0 | 0 | 54.907 |
| OCBBF2004757 | 0 | 4.504 | 0 | 0 | 0 | 0 | 12.315 |
| OCBBF2004826 | 0 | 0 | 0 | 0 | 0 | 0 | 100 |
| OCBBF2004866 | 0 | 0 | 0 | 0 | 0 | 0 | 100 |
| OCBBF2004883 | 0 | 0 | 0 | 0 | 0 | 0 | 100 |
| OCBBF2004889 | 0 | 0 | 0 | 0 | 0 | 0 | 55.403 |
| OCBBF2004930 | 0 | 0 | 0 | 0 | 0 | 0 | 12.893 |
| OCBBF2004984 | 0 | 0 | 0 | 0 | 0 | 0 | 29.587 |
| OCBBF2005066 | 0 | 0 | 0 | 0 | 0 | 0 | 100 |
| OCBBF2005077 | 0 | 0 | 0 | 0 | 0 | 0 | 100 |
| OCBBF2005161 | 0 | 0 | 0 | 0 | 0 | 0 | 54.907 |
| OCBBF2005343 | 0 | 0 | 0 | 0 | 0 | 0 | 100 |
| OCBBF2005349 | 0 | 0 | 0 | 0 | 0 | 0 | 100 |
| OCBBF2005373 | 0 | 0 | 0 | 0 | 0 | 0 | 100 |
| OCBBF2005420 | 0 | 0 | 0 | 0 | 0 | 0 | 78.844 |
| OCBBF2005428 | 0 | 0 | 0 | 0 | 0 | 0 | 4.095 |
| OCBBF2005433 | 0 | 0 | 0 | 0 | 0 | 0 | 100 |
| OCBBF2005476 | 0 | 8.495 | 0 | 0 | 0 | 0 | 5.808 |
| OCBBF2005546 | 0 | 0 | 0 | 0 | 0 | 0 | 54.907 |
| OCBBF2005843 | 0 | 0 | 0 | 0 | 0 | 0 | 100 |
| OCBBF2005901 | 0 | 0 | 0 | 0 | 0 | 0 | 100 |
| OCBBF2005956 | 0 | 10.318 | 0 | 0 | 0 | 0 | 3.527 |
| OCBBF2006005 | 0 | 0 | 0 | 0 | 0 | 0 | 5.922 |
| OCBBF2006030 | 0 | 0 | 0 | 0 | 0 | 0 | 100 |
| OCBBF2006058 | 0 | 0 | 0 | 0 | 0 | 0 | 100 |
| OCBBF2006113 | 0 | 0 | 0 | 0 | 0 | 0 | 32.696 |
| OCBBF2006148 | 0 | 0 | 0 | 0 | 0 | 0 | 16.826 |
| OCBBF2006151 | 0 | 0 | 0 | 0 | 0 | 0 | 7.162 |
| OCBBF2006154 | 0 | 0 | 0 | 0 | 0 | 0 | 100 |
| OCBBF2006172 | 0 | 0 | 0 | 0 | 0 | 0 | 13.027 |
| OCBBF2006214 | 0 | 0 | 0 | 0 | 0 | 0 | 100 |
| OCBBF2006241 | 0 | 0 | 0 | 0 | 0 | 0 | 100 |
| OCBBF2006313 | 0 | 0 | 0 | 13.761 | 0 | 0 | 7.093 |
| OCBBF2006388 | 0 | 0 | 0 | 0 | 0 | 0 | 100 |
| OCBBF2006438 | 0 | 0 | 0 | 0 | 0 | 0 | 100 |
| OCBBF2006567 | 0 | 0 | 0 | 0 | 0 | 0 | 100 |
| OCBBF2006624 | 0 | 0 | 0 | 0 | 0 | 0 | 100 |
| OCBBF2006639 | 0 | 0 | 0 | 0 | 0 | 0 | 100 |
| OCBBF2006660 | 0 | 0 | 0 | 0 | 0 | 0 | 18.751 |
| OCBBF2006764 | 0 | 0 | 0 | 0 | 0 | 0 | 19.063 |
| OCBBF2006849 | 0 | 0 | 0 | 0 | 0 | 14.895 | 7.532 |
| OCBBF2006859 | 0 | 13.615 | 0 | 0 | 0 | 0 | 9.307 |
| OCBBF2006972 | 0 | 0 | 0 | 0 | 0 | 0 | 55.403 |
| OCBBF2006987 | 0 | 0 | 0 | 62.306 | 0 | 0 | 16.058 |
| OCBBF2007028 | 0 | 2.509 | 0 | 0 | 0 | 0 | 15.437 |
| OCBBF2007039 | 0 | 0 | 0 | 0 | 0 | 0 | 100 |
| OCBBF2007051 | 0 | 0 | 0 | 0 | 0 | 0 | 54.907 |
| OCBBF2007068 | 0 | 0 | 0 | 0 | 0 | 0 | 54.907 |
| OCBBF2007114 | 0 | 0 | 0 | 0 | 0 | 0 | 39.836 |
| OCBBF2007121 | 0 | 0 | 0 | 0 | 0 | 0 | 52.585 |
| OCBBF2007184 | 0 | 0 | 0 | 0 | 0 | 0 | 100 |
| OCBBF2007194 | 0 | 0 | 0 | 0 | 0 | 0 | 100 |
| OCBBF2007196 | 0 | 0 | 0 | 0 | 0 | 0 | 66.858 |
| OCBBF2007224 | 0 | 0 | 0 | 0 | 0 | 0 | 11.730 |
| OCBBF2007238 | 0 | 0 | 0 | 0 | 0 | 0 | 100 |
| OCBBF2007354 | 0 | 3.651 | 0 | 0 | 0 | 0 | 1.248 |
| OCBBF2007414 | 0 | 0 | 0 | 0 | 0 | 0 | 59.836 |
| OCBBF2007415 | 2.902 | 0 | 0 | 1.930 | 0 | 0 | 1.990 |
| OCBBF2007428 | 0 | 0 | 0 | 0 | 0 | 0 | 100 |
| OCBBF2007478 | 0 | 0 | 0 | 0 | 0 | 0 | 100 |
| OCBBF2007485 | 0 | 0 | 0 | 0 | 0 | 0 | 100 |
| OCBBF2007520 | 0 | 0 | 0 | 0 | 0 | 0 | 100 |
| OCBBF2007555 | 0 | 0 | 0 | 0 | 0 | 0 | 100 |
| OCBBF2007610 | 0 | 0 | 0 | 0 | 0 | 0 | 100 |
| OCBBF2007622 | 0 | 0 | 0 | 0 | 0 | 0 | 4.561 |
| OCBBF2007756 | 0 | 0 | 0 | 0 | 0 | 0 | 100 |
| OCBBF2007762 | 0 | 0 | 0 | 0 | 0 | 0 | 39.066 |
| OCBBF2007829 | 0 | 1.996 | 0 | 1.323 | 0 | 4.047 | 2.728 |
| OCBBF2007892 | 0 | 0 | 0 | 0 | 0 | 0 | 5.292 |
| OCBBF2007931 | 0 | 0 | 0 | 0 | 0 | 0 | 100 |
| OCBBF2007946 | 0 | 0 | 0 | 0 | 0 | 0 | 100 |
| OCBBF2008005 | 0 | 0 | 0 | 0 | 0 | 0 | 21.697 |
| OCBBF2008041 | 0 | 0 | 0 | 5.038 | 0 | 0 | 2.597 |
| OCBBF2008116 | 0 | 0 | 0 | 0 | 0 | 0 | 100 |
| OCBBF2008138 | 0 | 0 | 0 | 0 | 0 | 0 | 100 |
| OCBBF2008144 | 0 | 0 | 0 | 0 | 0 | 0 | 7.165 |
| OCBBF2008283 | 0 | 0 | 0 | 0 | 0 | 0 | 100 |
| OCBBF2008330 | 0 | 0 | 0 | 0 | 0 | 0 | 100 |
| OCBBF2008340 | 0 | 0 | 0 | 0 | 0 | 0 | 47.948 |
| OCBBF2008366 | 0 | 0 | 0 | 0 | 0 | 0 | 15.035 |
| OCBBF2008466 | 0 | 0 | 0 | 0 | 0 | 0 | 10.627 |
| OCBBF2008483 | 0 | 0 | 0 | 0 | 0 | 0 | 10.814 |
| OCBBF2008511 | 0 | 0 | 0 | 0 | 0 | 0 | 41.146 |
| OCBBF2008520 | 0 | 0 | 0 | 0 | 0 | 0 | 100 |
| OCBBF2008569 | 0 | 0 | 0 | 0 | 0 | 0 | 26.039 |
| OCBBF2008586 | 0 | 0 | 0 | 0 | 0 | 0 | 100 |
| OCBBF2008640 | 0 | 0 | 0 | 0 | 0 | 0 | 100 |
| OCBBF2008691 | 0 | 0 | 0 | 0 | 0 | 0 | 100 |
| OCBBF2008701 | 0 | 0 | 0 | 0 | 0 | 0 | 40.389 |
| OCBBF2008724 | 0 | 0 | 0 | 0 | 0 | 0 | 100 |
| OCBBF2008760 | 0 | 0 | 0 | 0 | 0 | 0 | 41.319 |
| OCBBF2008768 | 0 | 0 | 0 | 0 | 0 | 0 | 100 |
| OCBBF2008770 | 0 | 0 | 0 | 0 | 0 | 0 | 33.223 |
| OCBBF2008775 | 0 | 0 | 0 | 0 | 0 | 0 | 55.216 |
| OCBBF2008790 | 0 | 0 | 0 | 0 | 0 | 0 | 100 |
| OCBBF2008814 | 0 | 0 | 0 | 0 | 0 | 0 | 100 |
| OCBBF2008822 | 0 | 0 | 0 | 0 | 0 | 0 | 2.961 |
| OCBBF2009095 | 0 | 0 | 0 | 0 | 0 | 0 | 8.165 |
| OCBBF2009115 | 0 | 0 | 0 | 0 | 0 | 0 | 100 |
| OCBBF2009242 | 0 | 0 | 0 | 0 | 0 | 0 | 3.517 |
| OCBBF2009301 | 0 | 15.068 | 0 | 0 | 0 | 0 | 15.451 |
| OCBBF2009352 | 0 | 0 | 0 | 0 | 0 | 0 | 6.993 |
| OCBBF2009391 | 0 | 0 | 0 | 0 | 0 | 0 | 40.207 |
| OCBBF2009424 | 0 | 0 | 0 | 0 | 0 | 0 | 9.015 |
| OCBBF2009536 | 0 | 0 | 0 | 0 | 0 | 0 | 52.835 |
| OCBBF2009571 | 0 | 0 | 0 | 0 | 0 | 0 | 100 |
| OCBBF2009583 | 0 | 0 | 0 | 0 | 0 | 0 | 100 |
| OCBBF2009603 | 0 | 0 | 0 | 0 | 0 | 0 | 41.108 |
| OCBBF2009772 | 0 | 4.280 | 0 | 5.676 | 0 | 0 | 5.851 |
| OCBBF2009788 | 0 | 0 | 0 | 0 | 0 | 0 | 100 |
| OCBBF2009836 | 0 | 0 | 0 | 0 | 0 | 0 | 10.181 |
| OCBBF2009920 | 0 | 0 | 0 | 0 | 0 | 0 | 54.907 |
| OCBBF2009926 | 0 | 0 | 0 | 0 | 0 | 0 | 100 |
| OCBBF2010040 | 0 | 0 | 0 | 0 | 0 | 0 | 100 |
| OCBBF2010140 | 0 | 0 | 0 | 0 | 0 | 0 | 40.385 |
| OCBBF2010281 | 0 | 0 | 0 | 0 | 0 | 0 | 52.585 |
| OCBBF2010313 | 0 | 0 | 0 | 0 | 0 | 0 | 34.079 |
| OCBBF2010404 | 0 | 0 | 0 | 0 | 0 | 0 | 100 |
| OCBBF2010416 | 0 | 0 | 0 | 0 | 0 | 0 | 100 |
| OCBBF2010420 | 0 | 0 | 0 | 0 | 0 | 0 | 100 |
| OCBBF2010557 | 0 | 0 | 0 | 0 | 0 | 0 | 22.763 |
| OCBBF2010604 | 0 | 0 | 0 | 0 | 0 | 0 | 100 |
| OCBBF2010709 | 0 | 0 | 0 | 0 | 0 | 0 | 100 |
| OCBBF2010792 | 0 | 0 | 0 | 0 | 0 | 0 | 100 |
| OCBBF2010819 | 0 | 0 | 0 | 30.231 | 0 | 0 | 15.583 |
| OCBBF2010830 | 0 | 4.797 | 0 | 2.121 | 0 | 0 | 2.186 |
| OCBBF2010841 | 0 | 0 | 0 | 14.981 | 0 | 0 | 7.722 |
| OCBBF2010843 | 53.980 | 0 | 0 | 0 | 0 | 0 | 18.503 |
| OCBBF2010858 | 0 | 0 | 0 | 16.054 | 0 | 0 | 33.100 |
| OCBBF2010863 | 0 | 0 | 0 | 0 | 0 | 0 | 55.216 |
| OCBBF2010871 | 0 | 0 | 0 | 0 | 0 | 0 | 34.069 |
| OCBBF2010931 | 0 | 0 | 0 | 0 | 0 | 0 | 100 |
| OCBBF2010945 | 0 | 0 | 0 | 0 | 0 | 0 | 51.019 |
| OCBBF2010978 | 0 | 0 | 0 | 0 | 0 | 0 | 100 |
| OCBBF2010989 | 0 | 0 | 0 | 0 | 0 | 0 | 100 |
| OCBBF2011021 | 0 | 0 | 0 | 0 | 0 | 0 | 10.774 |
| OCBBF2011073 | 0 | 6.201 | 0 | 0 | 0 | 0 | 21.195 |
| OCBBF2011137 | 0 | 0 | 0 | 0 | 0 | 0 | 100 |
| OCBBF2011160 | 0 | 0 | 0 | 0 | 0 | 0 | 21.686 |
| OCBBF2011177 | 0 | 0 | 0 | 0 | 0 | 0 | 100 |
| OCBBF2011228 | 0 | 0 | 0 | 0 | 0 | 0 | 53.120 |
| OCBBF2011232 | 0 | 0 | 0 | 0 | 0 | 0 | 39.814 |
| OCBBF2011283 | 0 | 0 | 0 | 0 | 0 | 0 | 80.940 |
| OCBBF2011311 | 0 | 0 | 0 | 0 | 0 | 0 | 100 |
| OCBBF2011536 | 0 | 0 | 0 | 0 | 0 | 0 | 4.957 |
| OCBBF2011625 | 0 | 0 | 0 | 0 | 0 | 0 | 33.259 |
| OCBBF2011669 | 0 | 0 | 0 | 0 | 0 | 0 | 63.640 |
| OCBBF2011685 | 0 | 0 | 0 | 0 | 0 | 0 | 100 |
| OCBBF2011706 | 0 | 0 | 0 | 0 | 0 | 0 | 100 |
| OCBBF2011722 | 0 | 0 | 0 | 0 | 0 | 0 | 100 |
| OCBBF2011759 | 0 | 1.698 | 0 | 2.252 | 0 | 0 | 9.288 |
| OCBBF2011767 | 0 | 0 | 0 | 0 | 0 | 0 | 36.946 |
| OCBBF2011855 | 0 | 0 | 0 | 0 | 0 | 0 | 100 |
| OCBBF2011872 | 0 | 0 | 0 | 0 | 0 | 0 | 100 |
| OCBBF2011887 | 0 | 8.546 | 0 | 0 | 0 | 0 | 17.527 |
| OCBBF2011897 | 0 | 0 | 0 | 0 | 0 | 0 | 21.447 |
| OCBBF2011914 | 0 | 0 | 0 | 0 | 0 | 0 | 18.119 |
| OCBBF2011960 | 0 | 0 | 0 | 0 | 0 | 0 | 100 |
| OCBBF2011981 | 0 | 0 | 0 | 0 | 0 | 0 | 100 |
| OCBBF2012001 | 0 | 0 | 0 | 0 | 0 | 0 | 30.933 |
| OCBBF2012028 | 0 | 0 | 0 | 0 | 0 | 0 | 100 |
| OCBBF2012039 | 0 | 0 | 0 | 0 | 0 | 0 | 9.527 |
| OCBBF2012095 | 0 | 0 | 0 | 0 | 0 | 0 | 19.009 |
| OCBBF2012139 | 0 | 0 | 0 | 0 | 0 | 0 | 100 |
| OCBBF2012191 | 0 | 0 | 0 | 0 | 0 | 0 | 40.207 |
| OCBBF2012262 | 0 | 0 | 0 | 34.956 | 0 | 0 | 36.036 |
| OCBBF2012320 | 0 | 0 | 0 | 0 | 0 | 0 | 100 |
| OCBBF2012436 | 0 | 0 | 0 | 0 | 0 | 0 | 59.836 |
| OCBBF2012525 | 0 | 0 | 0 | 0 | 0 | 0 | 84.002 |
| OCBBF2012553 | 0 | 2.131 | 0 | 0 | 0 | 0 | 4.371 |
| OCBBF2012678 | 0 | 12.535 | 0 | 0 | 0 | 0 | 25.707 |
| OCBBF2012704 | 0 | 37.942 | 0 | 0 | 0 | 0 | 25.938 |
| OCBBF2012714 | 0 | 0 | 0 | 0 | 0 | 0 | 7.211 |
| OCBBF2012755 | 0 | 0 | 0 | 0 | 0 | 0 | 100 |
| OCBBF2012812 | 0 | 0 | 0 | 0 | 0 | 0 | 25.584 |
| OCBBF2012821 | 0 | 0 | 0 | 0 | 0 | 0 | 3.108 |
| OCBBF2012881 | 0 | 0 | 0 | 0 | 0 | 0 | 55.216 |
| OCBBF2012908 | 11.876 | 0 | 0 | 0 | 0 | 0 | 12.212 |
| OCBBF2012936 | 0 | 0 | 0 | 0 | 0 | 0 | 55.403 |
| OCBBF2012990 | 0 | 0 | 0 | 0 | 0 | 0 | 100 |
| OCBBF2013011 | 0 | 0 | 0 | 18.197 | 0 | 0 | 9.380 |
| OCBBF2013049 | 0 | 0 | 0 | 0 | 0 | 0 | 100 |
| OCBBF2013091 | 0 | 0 | 0 | 0 | 0 | 0 | 100 |
| OCBBF2013123 | 0 | 0 | 0 | 0 | 0 | 0 | 28.345 |
| OCBBF2013127 | 0 | 0 | 0 | 0 | 0 | 0 | 100 |
| OCBBF2013149 | 0 | 0 | 0 | 0 | 0 | 0 | 1.927 |
| OCBBF2013208 | 0 | 0 | 0 | 0 | 0 | 0 | 100 |
| OCBBF2013285 | 0 | 0 | 0 | 0 | 0 | 0 | 63.640 |
| OCBBF2013319 | 0 | 0 | 0 | 0 | 0 | 0 | 100 |
| OCBBF2013324 | 0 | 0 | 0 | 0 | 0 | 0 | 46.671 |
| OCBBF2013366 | 9.783 | 4.905 | 0 | 0 | 0 | 0 | 3.353 |
| OCBBF2013481 | 0 | 0 | 0 | 0 | 0 | 0 | 6.792 |
| OCBBF2013507 | 0 | 0 | 0 | 0 | 0 | 0 | 100 |
| OCBBF2013721 | 0 | 0 | 0 | 0 | 0 | 0 | 100 |
| OCBBF2013789 | 0 | 0 | 0 | 0 | 0 | 0 | 37.496 |
| OCBBF2013843 | 0 | 0 | 0 | 0 | 0 | 3.938 | 3.983 |
| OCBBF2013883 | 74.472 | 0 | 0 | 0 | 0 | 0 | 25.528 |
| OCBBF2013926 | 0 | 0 | 0 | 0 | 0 | 0 | 77.076 |
| OCBBF2014052 | 0 | 0 | 0 | 0 | 0 | 0 | 52.585 |
| OCBBF2014064 | 0 | 0 | 0 | 0 | 0 | 0 | 3.394 |
| OCBBF2014089 | 0 | 35.863 | 0 | 0 | 0 | 0 | 24.517 |
| OCBBF2014292 | 3.754 | 0 | 0 | 2.496 | 0 | 7.633 | 25.733 |
| OCBBF2014322 | 0 | 0 | 0 | 0 | 0 | 0 | 25.645 |
| OCBBF2014386 | 0 | 0 | 0 | 43.822 | 0 | 0 | 22.588 |
| OCBBF2014541 | 0 | 0 | 0 | 0 | 0 | 0 | 34.096 |
| OCBBF2014576 | 0 | 0 | 0 | 0 | 0 | 0 | 4.539 |
| OCBBF2014707 | 0 | 0 | 0 | 0 | 0 | 0 | 100 |
| OCBBF2014745 | 0 | 0 | 0 | 0 | 0 | 0 | 63.640 |
| OCBBF2014828 | 0 | 0 | 0 | 0 | 0 | 0 | 100 |
| OCBBF2014873 | 0 | 0 | 0 | 0 | 0 | 0 | 17.619 |
| OCBBF2014880 | 0 | 0 | 0 | 0 | 0 | 0 | 40.207 |
| OCBBF2014928 | 0 | 0 | 0 | 0 | 0 | 0 | 40.207 |
| OCBBF2015031 | 0 | 0 | 0 | 0 | 0 | 0 | 100 |
| OCBBF2015081 | 0 | 0 | 0 | 0 | 0 | 0 | 100 |
| OCBBF2015115 | 0 | 0 | 0 | 43.004 | 0 | 0 | 44.332 |
| OCBBF2015232 | 0 | 0 | 0 | 0 | 0 | 0 | 100 |
| OCBBF2015233 | 0 | 0 | 0 | 0 | 0 | 0 | 77.781 |
| OCBBF2015285 | 0 | 0 | 0 | 0 | 0 | 0 | 100 |
| OCBBF2015334 | 0 | 0 | 0 | 0 | 0 | 0 | 65.522 |
| OCBBF2015335 | 0 | 0 | 0 | 0 | 0 | 0 | 100 |
| OCBBF2015503 | 0 | 0 | 0 | 18.086 | 0 | 0 | 18.645 |
| OCBBF2015506 | 0 | 0 | 0 | 0 | 0 | 0 | 100 |
| OCBBF2015599 | 0 | 0 | 0 | 0 | 0 | 0 | 40.207 |
| OCBBF2015645 | 0 | 0 | 0 | 0 | 0 | 0 | 100 |
| OCBBF2015659 | 0 | 0 | 0 | 0 | 0 | 0 | 100 |
| OCBBF2015751 | 0 | 0 | 0 | 0 | 0 | 0 | 10.561 |
| OCBBF2015797 | 0 | 0 | 0 | 0 | 0 | 0 | 65.522 |
| OCBBF2015931 | 0 | 0 | 0 | 0 | 0 | 0 | 25.025 |
| OCBBF2015980 | 0 | 0 | 0 | 0 | 0 | 0 | 100 |
| OCBBF2016038 | 0 | 0 | 0 | 0 | 0 | 0 | 100 |
| OCBBF2016405 | 0 | 0 | 0 | 0 | 0 | 0 | 28.747 |
| OCBBF2016467 | 0 | 0 | 0 | 0 | 0 | 0 | 100 |
| OCBBF2016590 | 0 | 0 | 0 | 0 | 0 | 0 | 100 |
| OCBBF2016591 | 0 | 0 | 0 | 0 | 0 | 0 | 100 |
| OCBBF2016612 | 0 | 0 | 0 | 0 | 0 | 0 | 52.585 |
| OCBBF2016689 | 0 | 0 | 0 | 0 | 0 | 0 | 77.781 |
| OCBBF2016690 | 0 | 0 | 0 | 0 | 0 | 0 | 100 |
| OCBBF2016729 | 0 | 0 | 0 | 0 | 0 | 0 | 11.324 |
| OCBBF2016841 | 22.139 | 0 | 0 | 0 | 0 | 0 | 7.589 |
| OCBBF2016928 | 0 | 0 | 0 | 0 | 0 | 0 | 13.608 |
| OCBBF2017035 | 0 | 0 | 0 | 2.922 | 0 | 8.935 | 6.024 |
| OCBBF2017055 | 0 | 0 | 0 | 0 | 0 | 0 | 22.290 |
| OCBBF2017069 | 0 | 0 | 0 | 0 | 0 | 0 | 100 |
| OCBBF2017306 | 0 | 0 | 0 | 0 | 0 | 0 | 55.403 |
| OCBBF2017325 | 0 | 0 | 0 | 0 | 0 | 0 | 100 |
| OCBBF2017398 | 0 | 2.338 | 0 | 3.100 | 0 | 0 | 9.588 |
| OCBBF2017458 | 0 | 10.117 | 0 | 0 | 0 | 0 | 20.748 |
| OCBBF2017489 | 0 | 0 | 0 | 0 | 0 | 0 | 100 |
| OCBBF2017516 | 0 | 0 | 0 | 0 | 0 | 0 | 100 |
| OCBBF2017665 | 0 | 0 | 0 | 0 | 0 | 0 | 100 |
| OCBBF2017754 | 0 | 0 | 0 | 9.049 | 0 | 0 | 27.986 |
| OCBBF2017791 | 0 | 4.655 | 0 | 6.174 | 0 | 0 | 1.591 |
| OCBBF2017815 | 0 | 0 | 0 | 0 | 0 | 0 | 65.522 |
| OCBBF2017882 | 0 | 0 | 0 | 0 | 0 | 0 | 8.864 |
| OCBBF2017888 | 0 | 0 | 0 | 0 | 0 | 0 | 21.165 |
| OCBBF2017893 | 0 | 0 | 0 | 0 | 0 | 0 | 4.310 |
| OCBBF2017920 | 0 | 0 | 0 | 31.033 | 0 | 0 | 31.992 |
| OCBBF2018012 | 0 | 0 | 0 | 0 | 0 | 0 | 3.487 |
| OCBBF2018014 | 0 | 0 | 0 | 0 | 0 | 0 | 100 |
| OCBBF2018084 | 0 | 0 | 0 | 0 | 0 | 0 | 16.434 |
| OCBBF2018167 | 0 | 0 | 0 | 0 | 0 | 0 | 100 |
| OCBBF2018206 | 0 | 0 | 0 | 0 | 0 | 0 | 54.907 |
| OCBBF2018229 | 0 | 0 | 0 | 0 | 0 | 0 | 100 |
| OCBBF2018234 | 0 | 11.770 | 0 | 0 | 0 | 0 | 16.093 |
| OCBBF2018362 | 0 | 0 | 0 | 0 | 0 | 0 | 57.154 |
| OCBBF2018380 | 0 | 0 | 0 | 0 | 0 | 0 | 100 |
| OCBBF2018563 | 0 | 0 | 0 | 0 | 0 | 0 | 25.548 |
| OCBBF2018581 | 0 | 7.818 | 0 | 0 | 0 | 0 | 21.378 |
| OCBBF2018618 | 0 | 0 | 0 | 0 | 0 | 0 | 40.294 |
| OCBBF2018663 | 0 | 0 | 0 | 0 | 0 | 0 | 100 |
| OCBBF2018687 | 0 | 0 | 0 | 0 | 0 | 0 | 100 |
| OCBBF2018707 | 0 | 0 | 0 | 0 | 0 | 0 | 2.794 |
| OCBBF2018827 | 0 | 0 | 0 | 11.826 | 0 | 0 | 6.095 |
| OCBBF2018828 | 0 | 0 | 0 | 0 | 0 | 0 | 100 |
| OCBBF2018873 | 0 | 0 | 39.876 | 0 | 0 | 10.213 | 5.164 |
| OCBBF2018934 | 0 | 0 | 0 | 0 | 0 | 0 | 100 |
| OCBBF2018956 | 0 | 0 | 0 | 4.079 | 0 | 0 | 2.102 |
| OCBBF2019108 | 0 | 0 | 0 | 0 | 0 | 0 | 42.690 |
| OCBBF2019195 | 0 | 0 | 0 | 0 | 0 | 0 | 100 |
| OCBBF2019327 | 0 | 0 | 0 | 0 | 0 | 0 | 100 |
| OCBBF2019684 | 0 | 0 | 0 | 0 | 0 | 0 | 100 |
| OCBBF2019761 | 0 | 0 | 0 | 0 | 0 | 0 | 100 |
| OCBBF2019823 | 0 | 0 | 0 | 0 | 0 | 0 | 100 |
| OCBBF2019950 | 0 | 0 | 0 | 0 | 0 | 0 | 54.907 |
| OCBBF2020048 | 0 | 0 | 0 | 0 | 0 | 0 | 65.522 |
| OCBBF2020318 | 0 | 0 | 0 | 0 | 0 | 0 | 59.836 |
| OCBBF2020343 | 0 | 0 | 0 | 0 | 0 | 0 | 63.640 |
| OCBBF2020453 | 0 | 0 | 0 | 0 | 0 | 0 | 100 |
| OCBBF2020741 | 0 | 0 | 0 | 0 | 0 | 0 | 17.527 |
| OCBBF2020801 | 0 | 0 | 0 | 0 | 0 | 0 | 59.836 |
| OCBBF2020825 | 0 | 0 | 0 | 0 | 0 | 0 | 100 |
| OCBBF2020838 | 0 | 0 | 0 | 0 | 0 | 0 | 100 |
| OCBBF2021020 | 0 | 0 | 0 | 0 | 0 | 0 | 3.312 |
| OCBBF2021214 | 0 | 0 | 0 | 0 | 0 | 0 | 100 |
| OCBBF2021286 | 0 | 0 | 0 | 0 | 0 | 0 | 22.928 |
| OCBBF2021323 | 0 | 0 | 0 | 0 | 0 | 0 | 100 |
| OCBBF2021518 | 0 | 0 | 0 | 0 | 0 | 0 | 100 |
| OCBBF2021788 | 0 | 0 | 0 | 0 | 0 | 0 | 100 |
| OCBBF2021833 | 0 | 0 | 0 | 0 | 0 | 0 | 36.034 |
| OCBBF2022351 | 0 | 0 | 0 | 0 | 0 | 0 | 63.640 |
| OCBBF2022573 | 0 | 0 | 0 | 0 | 0 | 0 | 100 |
| OCBBF2022574 | 0 | 0 | 0 | 0 | 0 | 0 | 100 |
| OCBBF2023162 | 0 | 0 | 0 | 0 | 0 | 0 | 12.773 |
| OCBBF2023598 | 0 | 0 | 0 | 0 | 0 | 0 | 100 |
| OCBBF2023643 | 0 | 0 | 0 | 0 | 0 | 0 | 100 |
| OCBBF2024463 | 0 | 0 | 0 | 0 | 0 | 0 | 100 |
| OCBBF2024589 | 0 | 0 | 0 | 0 | 0 | 0 | 100 |
| OCBBF2024719 | 0 | 0 | 0 | 0 | 0 | 0 | 36.847 |
| OCBBF2024779 | 0 | 0 | 0 | 0 | 0 | 0 | 100 |
| OCBBF2024781 | 0 | 0 | 0 | 0 | 0 | 0 | 100 |
| OCBBF2024850 | 0 | 0 | 0 | 0 | 0 | 0 | 5.522 |
| OCBBF2025028 | 0 | 0 | 0 | 0 | 0 | 0 | 100 |
| OCBBF2025115 | 0 | 0 | 0 | 0 | 0 | 0 | 100 |
| OCBBF2025198 | 0 | 0 | 0 | 0 | 0 | 0 | 100 |
| OCBBF2025451 | 0 | 0 | 0 | 0 | 0 | 0 | 100 |
| OCBBF2025458 | 0 | 0 | 0 | 0 | 0 | 0 | 100 |
| OCBBF2025527 | 0 | 0 | 0 | 0 | 0 | 0 | 63.640 |
| OCBBF2025631 | 0 | 0 | 0 | 0 | 0 | 0 | 100 |
| OCBBF2025730 | 0 | 0 | 0 | 0 | 0 | 0 | 100 |
| OCBBF2026025 | 0 | 0 | 0 | 0 | 0 | 0 | 100 |
| OCBBF2026035 | 0 | 0 | 0 | 0 | 0 | 0 | 100 |
| OCBBF2026144 | 0 | 0 | 0 | 0 | 0 | 0 | 100 |
| OCBBF2026368 | 0 | 0 | 0 | 0 | 0 | 0 | 30.795 |
| OCBBF2026645 | 0 | 0 | 0 | 0 | 0 | 0 | 100 |
| OCBBF2026649 | 0 | 0 | 0 | 0 | 0 | 0 | 63.640 |
| OCBBF2026690 | 0 | 0 | 0 | 0 | 0 | 0 | 100 |
| OCBBF2026981 | 0 | 0 | 0 | 0 | 0 | 0 | 100 |
| OCBBF2027148 | 0 | 0 | 0 | 0 | 0 | 0 | 28.907 |
| OCBBF2027197 | 0 | 0 | 0 | 0 | 0 | 0 | 63.640 |
| OCBBF2027354 | 0 | 0 | 0 | 0 | 0 | 0 | 100 |
| OCBBF2027423 | 0 | 0 | 0 | 0 | 0 | 0 | 100 |
| OCBBF2027478 | 0 | 0 | 0 | 0 | 0 | 0 | 100 |
| OCBBF2027481 | 0 | 0 | 0 | 0 | 0 | 0 | 100 |
| OCBBF2027511 | 0 | 0 | 0 | 0 | 0 | 0 | 100 |
| OCBBF2027661 | 0 | 0 | 0 | 0 | 0 | 0 | 46.671 |
| OCBBF2027728 | 0 | 0 | 0 | 0 | 0 | 0 | 100 |
| OCBBF2027782 | 0 | 0 | 0 | 0 | 0 | 0 | 100 |
| OCBBF2027868 | 0 | 0 | 0 | 0 | 0 | 0 | 100 |
| OCBBF2028055 | 0 | 0 | 0 | 0 | 0 | 0 | 55.403 |
| OCBBF2028173 | 0 | 0 | 0 | 0 | 0 | 0 | 100 |
| OCBBF2028421 | 0 | 0 | 0 | 0 | 0 | 0 | 52.585 |
| OCBBF2029471 | 0 | 0 | 0 | 0 | 0 | 0 | 100 |
| OCBBF2029901 | 0 | 0 | 0 | 0 | 0 | 0 | 100 |
| OCBBF2030116 | 0 | 0 | 0 | 0 | 0 | 0 | 54.907 |
| OCBBF2030329 | 0 | 0 | 0 | 0 | 0 | 0 | 55.216 |
| OCBBF2030354 | 0 | 0 | 0 | 0 | 0 | 0 | 100 |
| OCBBF2030517 | 0 | 0 | 0 | 0 | 0 | 0 | 100 |
| OCBBF2030574 | 0 | 0 | 0 | 0 | 0 | 0 | 100 |
| OCBBF2030708 | 0 | 0 | 0 | 0 | 0 | 0 | 100 |
| OCBBF2030927 | 0 | 0 | 0 | 0 | 0 | 0 | 55.216 |
| OCBBF2030963 | 0 | 0 | 0 | 0 | 0 | 0 | 100 |
| OCBBF2031167 | 0 | 0 | 0 | 0 | 0 | 0 | 100 |
| OCBBF2031198 | 0 | 0 | 0 | 0 | 0 | 0 | 100 |
| OCBBF2031366 | 0 | 0 | 0 | 0 | 0 | 0 | 100 |
| OCBBF2031561 | 0 | 0 | 0 | 0 | 0 | 0 | 39.003 |
| OCBBF2032152 | 0 | 0 | 0 | 0 | 0 | 0 | 100 |
| OCBBF2032274 | 0 | 0 | 0 | 0 | 0 | 0 | 100 |
| OCBBF2032539 | 0 | 0 | 0 | 0 | 0 | 0 | 100 |
| OCBBF2032590 | 0 | 0 | 0 | 0 | 0 | 0 | 100 |
| OCBBF2032599 | 0 | 0 | 0 | 0 | 0 | 0 | 100 |
| OCBBF2032611 | 0 | 0 | 0 | 0 | 0 | 0 | 100 |
| OCBBF2032671 | 0 | 0 | 0 | 0 | 0 | 0 | 100 |
| OCBBF2033295 | 0 | 0 | 0 | 12.672 | 0 | 0 | 39.191 |
| OCBBF2033413 | 0 | 0 | 0 | 0 | 0 | 0 | 100 |
| OCBBF2033869 | 0 | 0 | 0 | 0 | 0 | 0 | 100 |
| OCBBF2033948 | 0 | 0 | 0 | 0 | 0 | 0 | 100 |
| OCBBF2034333 | 0 | 0 | 0 | 0 | 0 | 0 | 100 |
| OCBBF2034529 | 0 | 0 | 0 | 0 | 0 | 0 | 100 |
| OCBBF2034637 | 0 | 0 | 0 | 0 | 0 | 0 | 100 |
| OCBBF2034906 | 0 | 0 | 0 | 0 | 0 | 0 | 100 |
| OCBBF2035110 | 0 | 0 | 0 | 0 | 0 | 0 | 100 |
| OCBBF2035214 | 0 | 0 | 0 | 0 | 0 | 0 | 55.216 |
| OCBBF2035226 | 0 | 0 | 0 | 1.416 | 0 | 0 | 0.730 |
| OCBBF2035390 | 0 | 0 | 0 | 0 | 0 | 0 | 100 |
| OCBBF2035564 | 0 | 0 | 0 | 0 | 0 | 0 | 100 |
| OCBBF2035658 | 0 | 0 | 0 | 0 | 0 | 0 | 100 |
| OCBBF2035823 | 0 | 0 | 0 | 0 | 0 | 0 | 42.690 |
| OCBBF2035885 | 0 | 0 | 0 | 0 | 0 | 0 | 100 |
| OCBBF2035916 | 0 | 0 | 0 | 0 | 0 | 0 | 100 |
| OCBBF2036019 | 0 | 0 | 0 | 0 | 0 | 0 | 100 |
| OCBBF2036031 | 0 | 0 | 0 | 0 | 0 | 0 | 100 |
| OCBBF2036225 | 0 | 0 | 0 | 0 | 0 | 0 | 100 |
| OCBBF2036476 | 0 | 0 | 0 | 0 | 0 | 0 | 100 |
| OCBBF2036743 | 0 | 0 | 0 | 0 | 0 | 0 | 27.462 |
| OCBBF2036752 | 0 | 0 | 0 | 0 | 0 | 0 | 100 |
| OCBBF2037068 | 54.224 | 27.189 | 0 | 0 | 0 | 0 | 18.587 |
| OCBBF2037340 | 0 | 0 | 0 | 0 | 0 | 0 | 100 |
| OCBBF2037398 | 0 | 0 | 0 | 0 | 0 | 0 | 100 |
| OCBBF2037464 | 0 | 0 | 0 | 0 | 0 | 0 | 100 |
| OCBBF2037547 | 0 | 0 | 0 | 0 | 0 | 0 | 100 |
| OCBBF2037598 | 0 | 0 | 0 | 0 | 0 | 0 | 100 |
| OCBBF2037638 | 0 | 0 | 0 | 0 | 0 | 0 | 100 |
| OCBBF2038238 | 0 | 0 | 0 | 0 | 0 | 0 | 100 |
| OCBBF2038285 | 0 | 0 | 0 | 0 | 0 | 0 | 100 |
| OCBBF2038317 | 0 | 0 | 0 | 0 | 0 | 0 | 12.245 |
| OCBBF3000097 | 0 | 0 | 0 | 0 | 0 | 0 | 100 |
| OCBBF3000213 | 0 | 0 | 0 | 0 | 0 | 0 | 100 |
| OCBBF3000296 | 0 | 0 | 0 | 0 | 0 | 0 | 47.069 |
| OCBBF3000323 | 0 | 0 | 0 | 0 | 0 | 0 | 4.132 |
| OCBBF3000372 | 0 | 0 | 0 | 0 | 0 | 0 | 100 |
| OCBBF3000380 | 0 | 0 | 0 | 0 | 0 | 0 | 100 |
| OCBBF3000743 | 0 | 0 | 0 | 0 | 0 | 0 | 100 |
| OCBBF3000830 | 0 | 0 | 0 | 0 | 0 | 0 | 100 |
| OCBBF3001076 | 0 | 0 | 0 | 0 | 0 | 0 | 100 |
| OCBBF3001202 | 0 | 0 | 0 | 0 | 0 | 0 | 100 |
| OCBBF3001333 | 0 | 5.839 | 0 | 7.743 | 0 | 0 | 11.974 |
| OCBBF3001616 | 0 | 0 | 0 | 0 | 0 | 0 | 100 |
| OCBBF3002553 | 0 | 0 | 0 | 0 | 0 | 0 | 100 |
| OCBBF3002600 | 0 | 0 | 0 | 0 | 0 | 0 | 100 |
| OCBBF3002654 | 0 | 0 | 0 | 0 | 0 | 0 | 100 |
| OCBBF3003103 | 0 | 0 | 0 | 0 | 0 | 0 | 55.403 |
| OCBBF3003209 | 0 | 0 | 0 | 0 | 0 | 0 | 100 |
| OCBBF3003592 | 0 | 0 | 0 | 0 | 0 | 0 | 100 |
| OCBBF3003745 | 0 | 0 | 0 | 0 | 0 | 0 | 100 |
| OCBBF3003761 | 0 | 0 | 0 | 0 | 0 | 0 | 100 |
| OCBBF3004264 | 0 | 0 | 0 | 0 | 0 | 0 | 100 |
| OCBBF3004314 | 0 | 0 | 0 | 0 | 0 | 0 | 100 |
| OCBBF3004487 | 0 | 0 | 0 | 0 | 0 | 0 | 11.257 |
| OCBBF3004972 | 0 | 0 | 0 | 0 | 0 | 0 | 100 |
| OCBBF3005330 | 0 | 0 | 0 | 0 | 0 | 0 | 100 |
| OCBBF3005597 | 0 | 0 | 0 | 0 | 0 | 0 | 100 |
| OCBBF3005843 | 0 | 0 | 0 | 0 | 0 | 0 | 100 |
| OCBBF3006802 | 0 | 0 | 0 | 0 | 0 | 0 | 100 |
| OCBBF3006986 | 0 | 0 | 0 | 0 | 0 | 0 | 100 |
| OCBBF3007078 | 0 | 0 | 0 | 0 | 0 | 0 | 100 |
| OCBBF3007704 | 0 | 0 | 0 | 0 | 0 | 0 | 100 |
| OCBBF3008230 | 0 | 0 | 0 | 0 | 0 | 0 | 37.069 |
| OCBBF3008392 | 0 | 0 | 0 | 0 | 0 | 0 | 100 |
| OCBBF3008835 | 0 | 0 | 0 | 0 | 0 | 0 | 52.835 |
| OCBBF3009192 | 0 | 0 | 0 | 0 | 0 | 0 | 100 |
| OCBBF3009244 | 0 | 0 | 0 | 0 | 0 | 0 | 42.785 |
| OCBBF3009279 | 0 | 0 | 0 | 0 | 0 | 0 | 100 |
| PEBLM1000066 | 0 | 0 | 0 | 0 | 0 | 0 | 5.887 |
| PEBLM1000144 | 0 | 10.899 | 0 | 0 | 0 | 0 | 0 |
| PEBLM2000147 | 0 | 0 | 0 | 0 | 0 | 0 | 4.754 |
| PEBLM2000222 | 0 | 2.111 | 0 | 0 | 0 | 0 | 0 |
| PEBLM2000308 | 0 | 0 | 0 | 4.778 | 0 | 0 | 9.851 |
| PEBLM2000326 | 0 | 0 | 0 | 0 | 0 | 0 | 13.487 |
| PEBLM2000395 | 0 | 3.308 | 0 | 4.387 | 0 | 0 | 3.392 |
| PEBLM2001072 | 0 | 0 | 0 | 4.371 | 0 | 0 | 2.253 |
| PEBLM2004452 | 0 | 2.453 | 0 | 3.253 | 0 | 0 | 5.030 |
| PEBLM2006366 | 0 | 5.030 | 0 | 0 | 0 | 0 | 3.438 |
| PEBLM2006709 | 0 | 10.110 | 0 | 0 | 0 | 0 | 0 |
| PEBLM2007188 | 0 | 0 | 0 | 0 | 0 | 0 | 10.845 |
| PERIC2002766 | 0 | 0 | 0 | 0 | 0 | 0 | 15.571 |
| PERIC2005117 | 0 | 0 | 0 | 0 | 0 | 0 | 5.337 |
| PERIC2007068 | 0 | 2.804 | 0 | 3.719 | 0 | 0 | 3.834 |
| PLACE5000013 | 0 | 2.885 | 0 | 7.651 | 0 | 0 | 0 |
| PLACE5000113 | 0 | 12.506 | 0 | 16.586 | 0 | 0 | 4.275 |
| PLACE5000159 | 0 | 4.130 | 0 | 16.432 | 0 | 0 | 14.117 |
| PLACE6000263 | 0 | 5.526 | 0 | 0 | 0 | 0 | 0 |
| PLACE6000379 | 3.201 | 0.963 | 0 | 1.277 | 0 | 0 | 1.755 |
| PLACE6001064 | 0 | 13.553 | 0 | 9.679 | 0 | 0 | 1.425 |
| PLACE6001281 | 0 | 6.256 | 0 | 0 | 0 | 0 | 4.277 |
| PLACE6001443 | 0 | 3.569 | 0 | 0 | 0 | 0 | 0 |
| PLACE6001923 | 22.779 | 0 | 0 | 0 | 0 | 0 | 0 |
| PLACE6002084 | 6.692 | 0 | 0 | 0.890 | 0 | 0 | 1.376 |
| PLACE6002102 | 0 | 7.700 | 0 | 3.404 | 0 | 0 | 22.809 |
| PLACE6002960 | 0 | 0 | 0 | 0 | 0 | 8.180 | 4.136 |
| PLACE6003383 | 0 | 0 | 0 | 0 | 0 | 8.796 | 0 |
| PLACE6003393 | 0 | 0 | 0 | 0 | 0 | 55.964 | 0 |
| PLACE6003745 | 0 | 9.549 | 0 | 0 | 0 | 0 | 0 |
| PLACE6004005 | 14.313 | 5.383 | 0 | 0 | 0 | 0 | 1.227 |
| PLACE6004312 | 0 | 0 | 0 | 0 | 0 | 0 | 1.498 |
| PLACE6004397 | 0 | 3.340 | 0 | 8.860 | 0 | 0 | 0 |
| PLACE6004931 | 0 | 11.899 | 0 | 0 | 0 | 0 | 0 |
| PLACE6005482 | 0 | 9.610 | 0 | 0 | 0 | 0 | 0 |
| PLACE6006042 | 0 | 0 | 0 | 0 | 0 | 0 | 6.763 |
| PLACE6006137 | 0 | 0 | 0 | 8.232 | 0 | 0 | 4.243 |
| PLACE6006988 | 0 | 0 | 0 | 0 | 0 | 0 | 41.108 |
| PLACE6008793 | 5.746 | 0 | 0 | 3.821 | 0 | 0 | 0 |
| PLACE6010484 | 5.602 | 0 | 0 | 0 | 0 | 0 | 0 |
| PLACE6011041 | 0 | 0 | 0 | 0 | 0 | 0 | 3.380 |
| PLACE6011057 | 0 | 0 | 0 | 5.432 | 0 | 0 | 2.800 |
| PLACE6011334 | 0 | 0 | 0 | 0 | 0 | 0 | 11.165 |
| PLACE6011627 | 0 | 0 | 0 | 0 | 0 | 0 | 41.108 |
| PLACE6011970 | 0 | 0 | 0 | 0 | 0 | 0 | 32.218 |
| PLACE6016210 | 45.894 | 0 | 0 | 0 | 0 | 0 | 0 |
| PLACE6018938 | 0 | 0 | 0 | 18.491 | 0 | 0 | 0 |
| PLACE6019385 | 0 | 0 | 0 | 0 | 0 | 0 | 5.039 |
| PLACE7004103 | 0 | 9.400 | 0 | 6.234 | 0 | 9.531 | 1.607 |
| PROST1000097 | 0 | 0 | 0 | 0 | 0 | 0 | 0.730 |
| PROST1000144 | 0 | 0 | 0 | 0 | 0 | 0 | 5.843 |
| PROST1000199 | 0 | 1.328 | 0 | 1.761 | 0 | 0 | 0.908 |
| PROST1000215 | 0 | 0 | 0 | 0 | 0 | 0 | 12.708 |
| PROST1000220 | 0 | 0 | 0 | 0 | 0 | 30.022 | 0 |
| PROST1000226 | 0 | 6.503 | 0 | 0 | 0 | 0 | 0 |
| PROST1000322 | 0 | 0 | 0 | 57.613 | 0 | 0 | 0 |
| PROST1000526 | 9.156 | 0 | 0 | 0 | 0 | 0 | 0 |
| PROST1000564 | 0 | 0 | 0 | 3.240 | 0 | 0 | 0 |
| PROST2000079 | 0 | 0 | 0 | 7.214 | 0 | 0 | 0 |
| PROST2000138 | 0 | 0.945 | 0 | 0.209 | 0 | 0.639 | 0.108 |
| PROST2000274 | 0 | 0 | 0 | 24.872 | 0 | 0 | 0 |
| PROST2000284 | 0 | 0 | 0 | 16.880 | 0 | 0 | 4.350 |
| PROST2000325 | 0 | 0 | 0 | 17.061 | 0 | 0 | 0 |
| PROST2000760 | 0 | 0 | 0 | 0 | 0 | 0 | 3.485 |
| PROST2001180 | 0 | 0 | 0 | 5.984 | 0 | 0 | 0 |
| PROST2001213 | 0 | 0 | 0 | 20.091 | 0 | 0 | 0 |
| PROST2001552 | 0 | 3.164 | 0 | 2.098 | 0 | 0 | 0 |
| PROST2002227 | 0 | 0 | 73.145 | 0 | 0 | 0 | 0 |
| PROST2002651 | 0 | 0 | 0 | 0 | 0 | 22.039 | 7.430 |
| PROST2002960 | 0 | 24.426 | 0 | 0 | 0 | 0 | 16.698 |
| PROST2003232 | 0 | 0 | 0 | 0 | 0 | 0 | 0.848 |
| PROST2003338 | 0 | 0 | 0 | 2.698 | 0 | 0 | 0 |
| PROST2003396 | 0 | 0 | 0 | 0 | 0 | 0 | 7.422 |
| PROST2003517 | 0 | 0 | 0 | 0 | 0 | 0 | 3.271 |
| PROST2004095 | 0 | 0 | 0 | 2.256 | 0 | 3.449 | 5.233 |
| PROST2004258 | 0 | 0 | 0 | 9.195 | 0 | 0 | 0 |
| PROST2004270 | 0 | 1.069 | 16.921 | 4.252 | 0 | 0 | 7.305 |
| PROST2004416 | 2.464 | 2.471 | 19.566 | 0 | 0 | 10.022 | 0 |
| PROST2004570 | 27.165 | 0 | 0 | 0 | 0 | 0 | 0 |
| PROST2004739 | 0 | 0 | 0 | 0 | 0 | 0 | 27.713 |
| PROST2005143 | 0 | 0 | 0 | 0 | 0 | 0 | 8.427 |
| PROST2005272 | 0 | 0 | 0 | 0 | 0 | 0 | 10.202 |
| PROST2005793 | 0 | 0 | 0 | 0 | 0 | 0 | 4.872 |
| PROST2006030 | 0 | 13.752 | 0 | 9.119 | 0 | 0 | 0 |
| PROST2006260 | 0 | 0 | 0 | 0 | 0 | 0 | 10.117 |
| PROST2006343 | 0 | 0 | 0 | 0 | 0 | 32.585 | 0 |
| PROST2006536 | 0 | 4.033 | 0 | 10.696 | 0 | 0 | 0 |
| PROST2007200 | 0 | 0 | 0 | 0 | 0 | 0 | 44.022 |
| PROST2007871 | 39.973 | 0 | 0 | 0 | 0 | 0 | 13.702 |
| PROST2008271 | 0 | 0 | 0 | 0 | 0 | 0 | 9.737 |
| PROST2008489 | 2.347 | 1.177 | 0 | 0 | 0 | 0 | 0 |
| PROST2008770 | 14.135 | 0 | 0 | 1.880 | 0 | 0 | 2.907 |
| PROST2009400 | 0 | 21.671 | 0 | 0 | 0 | 0 | 14.815 |
| PROST2010782 | 2.644 | 0 | 0 | 0.586 | 0 | 0 | 0 |
| PROST2011577 | 0 | 0 | 0 | 0 | 0 | 0 | 1.278 |
| PROST2012007 | 0 | 2.062 | 0 | 0 | 0 | 0 | 0 |
| PROST2012448 | 0 | 0 | 0 | 0 | 0 | 0 | 10.136 |
| PROST2012888 | 0 | 0 | 0 | 40.462 | 0 | 0 | 0 |
| PROST2012890 | 0 | 27.718 | 0 | 0 | 0 | 0 | 0 |
| PROST2015137 | 0 | 0 | 0 | 0 | 0 | 0 | 22.826 |
| PROST2015332 | 0 | 0 | 0 | 0 | 0 | 0 | 3.202 |
| PROST2016918 | 0 | 0 | 0 | 0 | 0 | 0 | 7.895 |
| PROST2017203 | 0 | 0 | 0 | 0 | 0 | 9.571 | 1.613 |
| PROST2017692 | 0 | 2.678 | 0 | 0 | 0 | 0 | 0 |
| PROST2017910 | 0 | 0 | 0 | 25.185 | 0 | 0 | 0 |
| PROST2018607 | 0 | 0 | 0 | 40.462 | 0 | 0 | 0 |
| PROST2019253 | 0 | 0 | 0 | 0 | 0 | 0 | 8.349 |
| PUAEN1000057 | 0 | 7.462 | 0 | 4.948 | 0 | 0 | 7.651 |
| PUAEN1000065 | 0 | 0 | 0 | 1.614 | 0 | 9.872 | 0 |
| PUAEN1000161 | 0 | 0 | 0 | 0 | 0 | 0 | 7.166 |
| PUAEN1000164 | 0 | 0.723 | 0 | 0.959 | 0 | 0 | 0 |
| PUAEN1000239 | 11.235 | 0 | 0 | 0 | 0 | 0 | 23.107 |
| PUAEN1000322 | 0 | 4.646 | 0 | 0 | 0 | 0 | 0 |
| PUAEN2000374 | 1.160 | 0.582 | 0 | 2.314 | 0 | 2.359 | 1.590 |
| PUAEN2000497 | 0 | 4.685 | 0 | 0 | 0 | 0 | 0 |
| PUAEN2002489 | 0 | 0 | 0 | 0 | 0 | 0 | 8.106 |
| PUAEN2003408 | 0 | 0 | 0 | 0 | 0 | 0 | 3.741 |
| PUAEN2006335 | 0 | 0 | 0 | 0 | 0 | 0 | 15.755 |
| PUAEN2007044 | 0 | 13.024 | 0 | 3.455 | 0 | 0 | 3.561 |
| PUAEN2007350 | 0 | 24.360 | 0 | 0 | 0 | 0 | 0 |
| PUAEN2008815 | 0 | 0 | 0 | 29.929 | 0 | 0 | 0 |
| RECTM1000051 | 0 | 0 | 0 | 0 | 0 | 0 | 2.867 |
| RECTM2000510 | 10.923 | 0 | 0 | 0 | 0 | 0 | 0 |
| RECTM2001347 | 0 | 0 | 0 | 0 | 0 | 0 | 5.153 |
| SALGL1000047 | 0 | 0.538 | 0 | 0.714 | 0 | 0 | 0.368 |
| SALGL1000157 | 0 | 1.654 | 0 | 0.313 | 0 | 0 | 0 |
| SKMUS1000022 | 0 | 0.756 | 0 | 1.003 | 0 | 0 | 0.517 |
| SKMUS1000064 | 0 | 0.853 | 0 | 0 | 0 | 0 | 0 |
| SKMUS1000084 | 0 | 2.799 | 0 | 0 | 0 | 0 | 7.653 |
| SKMUS1000138 | 0 | 0 | 0 | 0 | 0 | 1.416 | 0 |
| SKMUS1000186 | 1.455 | 0.729 | 0 | 0 | 0 | 0 | 0.499 |
| SKMUS2000198 | 0 | 0 | 0 | 0 | 0 | 23.281 | 0 |
| SKMUS2000361 | 0 | 1.943 | 0 | 0 | 0 | 0 | 0 |
| SKMUS2000467 | 0 | 20.503 | 0 | 0 | 0 | 0 | 0 |
| SKMUS2000679 | 0 | 0 | 0 | 0 | 0 | 4.937 | 0 |
| SKMUS2000931 | 1.972 | 2.967 | 0 | 1.311 | 0 | 4.010 | 2.028 |
| SKMUS2001147 | 0 | 0 | 0 | 6.681 | 0 | 0 | 3.444 |
| SKMUS2001323 | 0 | 0 | 50.550 | 0 | 0 | 0 | 0 |
| SKMUS2001454 | 2.446 | 3.067 | 0 | 1.627 | 0 | 0 | 2.096 |
| SKMUS2001634 | 0 | 0 | 0 | 0 | 0 | 9.649 | 4.879 |
| SKMUS2002084 | 22.628 | 11.346 | 0 | 0 | 0 | 0 | 0 |
| SKMUS2004908 | 0 | 5.969 | 0 | 23.749 | 0 | 0 | 8.161 |
| SKNMC1000110 | 0 | 0 | 0 | 17.451 | 0 | 26.682 | 0 |
| SKNMC1000168 | 3.035 | 0 | 0 | 0 | 0 | 0 | 2.081 |
| SKNMC1000229 | 0 | 0 | 0 | 25.340 | 0 | 0 | 0 |
| SKNMC1000264 | 0 | 0 | 0 | 12.641 | 0 | 0 | 0 |
| SKNMC2000065 | 0 | 7.847 | 0 | 7.805 | 0 | 0 | 9.388 |
| SKNMC2000097 | 0 | 0 | 12.826 | 1.074 | 0 | 0 | 1.107 |
| SKNMC2000635 | 1.950 | 2.608 | 0 | 0.865 | 0 | 0 | 0 |
| SKNMC2000649 | 0 | 1.658 | 0 | 2.199 | 0 | 6.724 | 1.133 |
| SKNMC2000698 | 0 | 0 | 0 | 4.978 | 0 | 0 | 2.566 |
| SKNMC2000877 | 0 | 0 | 0 | 0 | 0 | 0 | 1.472 |
| SKNMC2001324 | 0 | 0 | 0 | 0 | 0 | 0 | 8.022 |
| SKNMC2002402 | 0 | 0 | 0 | 0 | 0 | 0 | 9.158 |
| SKNMC2006173 | 0 | 13.984 | 0 | 0 | 0 | 0 | 9.559 |
| SKNSH1000002 | 0 | 2.612 | 0 | 0 | 0 | 10.593 | 0 |
| SKNSH1000086 | 0 | 0 | 0 | 20.579 | 0 | 0 | 10.607 |
| SKNSH1000101 | 0 | 0 | 0 | 0 | 0 | 0 | 0.798 |
| SKNSH2000051 | 0 | 0 | 0 | 0 | 0 | 0 | 41.985 |
| SKNSH2000101 | 0 | 0 | 0 | 0 | 0 | 0 | 8.186 |
| SKNSH2000250 | 0 | 0 | 0 | 0 | 0 | 0 | 3.500 |
| SKNSH2000347 | 0 | 0 | 0 | 0 | 0 | 0 | 5.575 |
| SKNSH2000819 | 0 | 4.523 | 0 | 0 | 0 | 0 | 0 |
| SKNSH2001931 | 0 | 0 | 0 | 24.633 | 0 | 0 | 6.348 |
| SKNSH2002325 | 0 | 6.937 | 0 | 0 | 0 | 0 | 0 |
| SKNSH2005061 | 0 | 3.081 | 0 | 0 | 0 | 0 | 0 |
| SKNSH2008043 | 0 | 18.400 | 0 | 0 | 0 | 0 | 0 |
| SMINT1000042 | 0 | 0 | 0 | 0 | 0 | 0 | 3.328 |
| SMINT1000054 | 0 | 33.993 | 0 | 0 | 0 | 0 | 0 |
| SMINT1000117 | 0 | 0 | 0 | 0 | 0 | 0 | 3.268 |
| SMINT1000131 | 3.319 | 0 | 0 | 0 | 0 | 0 | 0 |
| SMINT2000018 | 0 | 0 | 0 | 0 | 0 | 0 | 5.230 |
| SMINT2000073 | 0 | 0 | 0 | 0 | 0 | 0 | 21.554 |
| SMINT2000176 | 50.667 | 0 | 0 | 0 | 0 | 0 | 0 |
| SMINT2000232 | 0 | 0 | 0 | 0 | 0 | 0 | 17.685 |
| SMINT2000277 | 0 | 0 | 0 | 0 | 0 | 0 | 2.252 |
| SMINT2000396 | 0 | 0 | 0 | 2.950 | 0 | 0 | 3.041 |
| SMINT2000400 | 0 | 12.156 | 0 | 16.123 | 0 | 0 | 16.621 |
| SMINT2000441 | 0 | 2.461 | 0 | 1.088 | 0 | 0 | 0.561 |
| SMINT2000468 | 0 | 0 | 0 | 0 | 0 | 0 | 2.842 |
| SMINT2000537 | 0 | 0 | 0 | 0 | 0 | 0 | 26.038 |
| SMINT2000609 | 0 | 33.993 | 0 | 0 | 0 | 0 | 0 |
| SMINT2000659 | 0 | 0 | 0 | 0 | 91.616 | 0 | 0 |
| SMINT2000694 | 4.308 | 0 | 0 | 0 | 0 | 0 | 0 |
| SMINT2001615 | 0 | 0 | 0 | 40.582 | 0 | 0 | 0 |
| SMINT2002224 | 0 | 0 | 0 | 0 | 0 | 0 | 15.727 |
| SMINT2002620 | 0 | 0 | 0 | 10.921 | 0 | 0 | 0 |
| SMINT2002882 | 10.523 | 0 | 0 | 6.998 | 0 | 0 | 0 |
| SMINT2002976 | 0 | 0 | 0 | 0 | 0 | 0 | 6.480 |
| SMINT2003074 | 0 | 0 | 0 | 6.607 | 0 | 0 | 1.703 |
| SMINT2003169 | 1.705 | 0 | 0 | 1.134 | 0 | 0 | 1.169 |
| SMINT2003551 | 0 | 25.210 | 0 | 0 | 0 | 0 | 0 |
| SMINT2003905 | 2.806 | 4.221 | 0 | 0 | 0 | 0 | 0 |
| SMINT2004729 | 0 | 0 | 0 | 30.953 | 0 | 0 | 0 |
| SMINT2005368 | 8.512 | 0 | 0 | 0 | 0 | 0 | 1.459 |
| SMINT2005956 | 0 | 4.783 | 0 | 0 | 0 | 0 | 0 |
| SMINT2007187 | 0 | 12.199 | 0 | 0 | 0 | 0 | 25.019 |
| SMINT2008590 | 0 | 0 | 0 | 0 | 0 | 0 | 11.892 |
| SMINT2008672 | 0 | 0 | 0 | 32.753 | 0 | 0 | 0 |
| SMINT2008921 | 0 | 0 | 0 | 0 | 0 | 0 | 1.378 |
| SMINT2008960 | 0 | 0 | 0 | 0 | 0 | 0 | 0.850 |
| SMINT2009292 | 0 | 6.446 | 0 | 0 | 0 | 0 | 4.406 |
| SMINT2010426 | 0 | 0 | 0 | 0 | 0 | 0 | 6.730 |
| SMINT2010639 | 0 | 4.923 | 0 | 0 | 0 | 0 | 0 |
| SMINT2010901 | 0 | 0 | 0 | 8.464 | 0 | 0 | 0 |
| SMINT2012291 | 0 | 0 | 0 | 0 | 0 | 33.985 | 0 |
| SMINT2013890 | 0 | 0 | 0 | 0 | 0 | 67.622 | 0 |
| SMINT2014480 | 0 | 2.887 | 0 | 0 | 0 | 0 | 0 |
| SPLEN1000106 | 0 | 0 | 0 | 0 | 0 | 0 | 5.783 |
| SPLEN1000116 | 0 | 0 | 0 | 0 | 0 | 0 | 1.230 |
| SPLEN1000165 | 0 | 9.069 | 0 | 0 | 0 | 0 | 12.399 |
| SPLEN1000166 | 20.484 | 0 | 0 | 2.724 | 0 | 0 | 7.022 |
| SPLEN2000258 | 0 | 0 | 0 | 0 | 0 | 0 | 5.439 |
| SPLEN2000267 | 0 | 0 | 0 | 0 | 0 | 0 | 14.505 |
| SPLEN2000505 | 0 | 0 | 0 | 0 | 0 | 6.212 | 0.524 |
| SPLEN2000516 | 0 | 0 | 0 | 0 | 0 | 0 | 14.849 |
| SPLEN2000698 | 0 | 0 | 0 | 0 | 0 | 0 | 2.634 |
| SPLEN2000839 | 0 | 0 | 0 | 0 | 0 | 67.269 | 0 |
| SPLEN2000882 | 0 | 0 | 0 | 0 | 0 | 0 | 2.182 |
| SPLEN2001157 | 9.968 | 0 | 0 | 0 | 0 | 0 | 0 |
| SPLEN2002335 | 0 | 0 | 0 | 0 | 0 | 0 | 3.774 |
| SPLEN2002467 | 0 | 0 | 0 | 7.852 | 0 | 0 | 4.047 |
| SPLEN2002493 | 0 | 3.145 | 0 | 8.343 | 0 | 0 | 0 |
| SPLEN2002744 | 0 | 4.053 | 0 | 0 | 0 | 0 | 0 |
| SPLEN2004078 | 0 | 0 | 0 | 0 | 0 | 0 | 18.564 |
| SPLEN2004555 | 0 | 0 | 0 | 0 | 0 | 15.689 | 2.645 |
| SPLEN2004773 | 0 | 0 | 0 | 1.715 | 0 | 10.490 | 0 |
| SPLEN2005009 | 0 | 31.245 | 0 | 0 | 0 | 0 | 0 |
| SPLEN2005783 | 0 | 0 | 0 | 0 | 0 | 0 | 8.098 |
| SPLEN2006122 | 0 | 1.530 | 0 | 0 | 0 | 0 | 0 |
| SPLEN2006133 | 0 | 0 | 0 | 0 | 0 | 0 | 1.178 |
| SPLEN2006143 | 0 | 0 | 0 | 0 | 0 | 0 | 2.779 |
| SPLEN2006305 | 0 | 2.296 | 0 | 1.522 | 0 | 0 | 2.354 |
| SPLEN2006325 | 30.193 | 0 | 0 | 0 | 0 | 0 | 0 |
| SPLEN2006374 | 5.509 | 0 | 0 | 0 | 0 | 0 | 3.776 |
| SPLEN2007182 | 0 | 0 | 0 | 0 | 0 | 0 | 15.878 |
| SPLEN2007739 | 0 | 0 | 0 | 0 | 0 | 0 | 7.543 |
| SPLEN2008460 | 0 | 0 | 0 | 0 | 0 | 0 | 1.627 |
| SPLEN2009555 | 0 | 15.436 | 0 | 0 | 0 | 0 | 10.552 |
| SPLEN2009970 | 0 | 0 | 0 | 0 | 0 | 37.585 | 12.671 |
| SPLEN2010195 | 0 | 0.705 | 0 | 1.870 | 0 | 0 | 0.964 |
| SPLEN2010912 | 0 | 0 | 0 | 0 | 0 | 0 | 15.386 |
| SPLEN2011737 | 0 | 0 | 0 | 0 | 0 | 0 | 3.237 |
| SPLEN2011758 | 19.034 | 0 | 0 | 0 | 0 | 0 | 6.525 |
| SPLEN2012571 | 0 | 5.777 | 0 | 15.323 | 0 | 0 | 0 |
| SPLEN2014080 | 0 | 8.610 | 0 | 0 | 0 | 0 | 11.772 |
| SPLEN2014911 | 0 | 0 | 0 | 0 | 0 | 7.775 | 0 |
| SPLEN2015310 | 0 | 1.042 | 0 | 0 | 0 | 0 | 0 |
| SPLEN2016268 | 6.263 | 2.355 | 12.432 | 0 | 0 | 3.184 | 2.147 |
| SPLEN2016972 | 7.349 | 0 | 0 | 0 | 0 | 0 | 0 |
| SPLEN2017318 | 0 | 0 | 0 | 0 | 0 | 0 | 6.304 |
| SPLEN2017351 | 0 | 10.932 | 0 | 7.249 | 0 | 0 | 7.473 |
| SPLEN2018157 | 0 | 0 | 0 | 5.813 | 0 | 0 | 14.982 |
| SPLEN2018159 | 0 | 17.210 | 0 | 0 | 0 | 0 | 0 |
| SPLEN2019446 | 0 | 0 | 0 | 0 | 0 | 0 | 12.927 |
| SPLEN2021122 | 0 | 0 | 0 | 0 | 0 | 0 | 20.261 |
| SPLEN2021194 | 0 | 0 | 0 | 0 | 0 | 0 | 4.191 |
| SPLEN2025017 | 0 | 0 | 0 | 0 | 0 | 0 | 41.660 |
| SPLEN2027113 | 0 | 2.974 | 0 | 7.887 | 0 | 0 | 2.033 |
| SPLEN2028466 | 1.499 | 1.503 | 0 | 0 | 0 | 9.146 | 0 |
| SPLEN2028914 | 0 | 10.149 | 0 | 6.730 | 0 | 0 | 3.469 |
| SPLEN2031547 | 0 | 2.861 | 0 | 0 | 0 | 0 | 11.735 |
| SPLEN2039379 | 0 | 0 | 0 | 0 | 0 | 0 | 10.793 |
| SPLEN2042303 | 0 | 0 | 0 | 0 | 0 | 0 | 32.557 |
| STOMA1000047 | 0 | 0 | 0 | 7.637 | 0 | 0 | 0 |
| STOMA2000121 | 4.416 | 0 | 0 | 0 | 0 | 0 | 0 |
| STOMA2000289 | 9.873 | 0 | 0 | 0 | 0 | 0 | 0 |
| STOMA2000396 | 0 | 0 | 0 | 0 | 0 | 0 | 6.402 |
| STOMA2000482 | 0 | 0 | 0 | 0 | 0 | 28.412 | 0 |
| STOMA2002166 | 0 | 2.126 | 16.835 | 0 | 0 | 0 | 0 |
| STOMA2006780 | 0 | 0 | 0 | 0 | 0 | 0 | 10.791 |
| SYNOV1000049 | 0 | 0 | 0 | 52.773 | 0 | 0 | 0 |
| SYNOV1000118 | 15.338 | 0 | 0 | 0 | 0 | 0 | 10.515 |
| SYNOV1000124 | 0 | 1.011 | 0 | 2.681 | 0 | 0 | 3.455 |
| SYNOV2001033 | 0 | 1.090 | 0 | 1.445 | 0 | 0 | 0.745 |
| SYNOV2001144 | 0 | 0 | 0 | 0 | 0 | 10.424 | 0 |
| SYNOV2001374 | 6.638 | 0 | 0 | 4.414 | 0 | 0 | 0 |
| SYNOV2005216 | 0 | 0 | 0 | 0 | 0 | 0 | 12.130 |
| SYNOV4007671 | 2.657 | 0 | 42.189 | 0 | 0 | 0 | 0 |
| SYNOV4009129 | 0 | 0 | 0 | 0 | 0 | 0 | 9.644 |
| SYNOV4009298 | 0 | 0 | 0 | 0 | 0 | 0 | 36.547 |
| T1ESE2000904 | 0 | 0 | 0 | 11.128 | 0 | 0 | 0 |
| TESOP1000035 | 0 | 0 | 0 | 0 | 0 | 0 | 5.494 |
| TESOP2002273 | 0 | 0 | 0 | 9.782 | 0 | 0 | 15.126 |
| TESOP2002451 | 0 | 0 | 0 | 0 | 0 | 0 | 5.902 |
| TESOP2007384 | 0 | 0 | 0 | 0 | 0 | 44.382 | 0 |
| TESTI1000023 | 6.079 | 0 | 0 | 0 | 0 | 0 | 2.084 |
| TESTI1000051 | 0 | 0 | 0 | 12.552 | 0 | 0 | 0 |
| TESTI1000096 | 0 | 0 | 0 | 42.162 | 0 | 0 | 0 |
| TESTI1000142 | 0 | 0 | 0 | 0 | 0 | 0 | 8.382 |
| TESTI1000266 | 0 | 0 | 0 | 0 | 0 | 0 | 65.522 |
| TESTI2000172 | 0 | 0 | 0 | 20.618 | 0 | 0 | 0 |
| TESTI2000179 | 0 | 0 | 0 | 0 | 0 | 0 | 45.508 |
| TESTI2000184 | 0 | 4.108 | 0 | 5.449 | 0 | 0 | 5.617 |
| TESTI2000598 | 0 | 0 | 0 | 12.107 | 0 | 0 | 49.922 |
| TESTI2000627 | 0 | 0 | 0 | 0 | 0 | 0 | 26.175 |
| TESTI2000784 | 0 | 0 | 0 | 16.432 | 0 | 0 | 5.647 |
| TESTI2000874 | 45.303 | 0 | 0 | 0 | 0 | 0 | 0 |
| TESTI2000970 | 0 | 0 | 0 | 0 | 0 | 0 | 12.078 |
| TESTI2001099 | 0 | 2.671 | 0 | 0 | 0 | 0 | 0.609 |
| TESTI2001269 | 0 | 0.992 | 0 | 1.316 | 0 | 4.023 | 0.678 |
| TESTI2001511 | 0 | 0 | 0 | 8.433 | 0 | 0 | 0 |
| TESTI2001613 | 0 | 0 | 0 | 0 | 0 | 0 | 16.971 |
| TESTI2001869 | 0 | 0 | 0 | 0 | 0 | 0 | 29.647 |
| TESTI2001985 | 21.274 | 0 | 0 | 0 | 0 | 0 | 7.293 |
| TESTI2002149 | 0 | 0 | 0 | 4.031 | 0 | 0 | 0 |
| TESTI2002365 | 0 | 7.938 | 0 | 2.632 | 0 | 0 | 1.357 |
| TESTI2002369 | 0 | 27.307 | 0 | 36.216 | 0 | 0 | 0 |
| TESTI2002707 | 0 | 0 | 0 | 0 | 0 | 0 | 6.175 |
| TESTI2002866 | 0 | 19.335 | 0 | 0 | 0 | 0 | 0 |
| TESTI2003127 | 0 | 0 | 0 | 0 | 0 | 0 | 13.265 |
| TESTI2003280 | 0 | 0 | 0 | 0 | 0 | 0 | 5.096 |
| TESTI2003413 | 0 | 0 | 0 | 6.275 | 0 | 0 | 3.234 |
| TESTI2003533 | 9.426 | 0 | 0 | 0 | 0 | 0 | 0 |
| TESTI2004031 | 2.906 | 0 | 0 | 0 | 0 | 0 | 2.490 |
| TESTI2004122 | 0 | 0 | 87.855 | 0 | 0 | 0 | 0 |
| TESTI2004153 | 31.445 | 0 | 0 | 10.456 | 0 | 0 | 0 |
| TESTI2004391 | 15.305 | 7.674 | 0 | 0 | 0 | 0 | 5.246 |
| TESTI2004734 | 0 | 0 | 0 | 0 | 0 | 0 | 42.599 |
| TESTI2004737 | 0 | 0 | 0 | 0 | 0 | 0 | 2.200 |
| TESTI2004929 | 10.290 | 0 | 0 | 0 | 0 | 0 | 0 |
| TESTI2005395 | 0 | 0 | 0 | 0 | 0 | 0 | 48.724 |
| TESTI2005396 | 0 | 26.815 | 0 | 35.563 | 0 | 0 | 18.331 |
| TESTI2005408 | 0 | 3.220 | 0 | 0 | 0 | 0 | 2.201 |
| TESTI2005731 | 0 | 6.004 | 0 | 0 | 0 | 0 | 0 |
| TESTI2005742 | 0 | 0 | 0 | 0 | 0 | 0 | 25.334 |
| TESTI2005743 | 0 | 0 | 0 | 0 | 0 | 0 | 2.729 |
| TESTI2005784 | 0 | 5.405 | 0 | 0 | 0 | 0 | 7.390 |
| TESTI2006120 | 0 | 17.639 | 0 | 0 | 0 | 0 | 0 |
| TESTI2006383 | 14.689 | 0 | 0 | 9.768 | 0 | 0 | 0 |
| TESTI2006588 | 1.962 | 0.984 | 0 | 0 | 0 | 0 | 1.345 |
| TESTI2006615 | 0 | 0 | 0 | 11.123 | 0 | 0 | 0 |
| TESTI2006748 | 0 | 0 | 0 | 8.291 | 0 | 0 | 4.273 |
| TESTI2006872 | 0 | 19.972 | 0 | 0 | 0 | 0 | 0 |
| TESTI2007211 | 0 | 0 | 0 | 0 | 0 | 0 | 4.103 |
| TESTI2007464 | 0 | 7.289 | 0 | 19.333 | 0 | 0 | 0 |
| TESTI2007998 | 0 | 0 | 0 | 0 | 0 | 0 | 1.964 |
| TESTI2008020 | 13.899 | 0 | 0 | 0 | 0 | 0 | 0 |
| TESTI2008240 | 0 | 0 | 0 | 0 | 0 | 1.843 | 1.243 |
| TESTI2008835 | 0 | 0 | 0 | 0 | 0 | 79.966 | 0 |
| TESTI2009388 | 72.663 | 0 | 0 | 0 | 0 | 0 | 0 |
| TESTI2009402 | 0 | 16.660 | 0 | 0 | 0 | 0 | 0 |
| TESTI2009474 | 0 | 0 | 0 | 0 | 0 | 0 | 7.530 |
| TESTI2009497 | 0 | 0 | 0 | 0 | 0 | 0 | 65.522 |
| TESTI2009520 | 0 | 0 | 0 | 3.615 | 0 | 0 | 0 |
| TESTI2009577 | 0 | 0 | 0 | 4.260 | 0 | 0 | 2.196 |
| TESTI2009785 | 5.200 | 2.607 | 0 | 6.916 | 0 | 0 | 5.347 |
| TESTI2010513 | 0 | 0 | 0 | 0 | 0 | 0 | 2.440 |
| TESTI2010617 | 0 | 0 | 0 | 16.783 | 0 | 0 | 8.651 |
| TESTI2010724 | 0 | 6.817 | 0 | 0 | 0 | 0 | 0 |
| TESTI2011680 | 0 | 13.594 | 0 | 18.029 | 0 | 0 | 18.586 |
| TESTI2011683 | 0 | 0 | 0 | 0 | 0 | 0 | 40.221 |
| TESTI2012155 | 0 | 0 | 0 | 15.444 | 0 | 0 | 7.961 |
| TESTI2013295 | 19.306 | 0 | 0 | 12.839 | 0 | 0 | 13.236 |
| TESTI2014318 | 0 | 52.242 | 0 | 0 | 0 | 0 | 0 |
| TESTI2015213 | 3.720 | 0.933 | 14.768 | 0 | 0 | 0 | 0 |
| TESTI2015246 | 0 | 0 | 0 | 28.533 | 0 | 0 | 0 |
| TESTI2015626 | 2.384 | 0 | 9.463 | 0 | 0 | 0 | 0.409 |
| TESTI2017645 | 0 | 0 | 0 | 0 | 0 | 0 | 41.342 |
| TESTI2017954 | 0 | 1.204 | 0 | 3.193 | 0 | 0 | 1.646 |
| TESTI2018014 | 0 | 0 | 0 | 9.290 | 0 | 28.407 | 0 |
| TESTI2018462 | 0 | 0 | 0 | 0 | 0 | 0 | 7.021 |
| TESTI2018867 | 0 | 0 | 0 | 0 | 0 | 20.987 | 0 |
| TESTI2020510 | 0 | 0 | 0 | 0 | 0 | 0 | 26.958 |
| TESTI2020525 | 0 | 0 | 0 | 78.664 | 0 | 0 | 0 |
| TESTI2021124 | 0 | 0 | 0 | 13.774 | 0 | 0 | 7.100 |
| TESTI2021447 | 0 | 0 | 0 | 0 | 0 | 0 | 32.208 |
| TESTI2021851 | 68.568 | 0 | 0 | 0 | 0 | 0 | 0 |
| TESTI2022179 | 0 | 19.086 | 0 | 0 | 0 | 0 | 0 |
| TESTI2023414 | 0 | 0 | 0 | 39.241 | 0 | 0 | 5.057 |
| TESTI2025757 | 0 | 0 | 0 | 40.866 | 0 | 0 | 0 |
| TESTI2026215 | 0 | 0 | 0 | 0 | 0 | 0 | 8.605 |
| TESTI2026525 | 15.768 | 0 | 0 | 0 | 0 | 0 | 0 |
| TESTI2027496 | 0 | 17.073 | 0 | 0 | 0 | 0 | 0 |
| TESTI2029227 | 0 | 0 | 0 | 14.307 | 0 | 0 | 14.749 |
| TESTI2034940 | 1.888 | 0.947 | 0 | 0 | 0 | 0 | 0 |
| TESTI2036969 | 0 | 6.529 | 0 | 0 | 0 | 0 | 8.927 |
| TESTI2039177 | 0 | 7.531 | 0 | 0 | 0 | 0 | 0 |
| TESTI2041734 | 0 | 0 | 0 | 0 | 0 | 0 | 48.724 |
| TESTI2044276 | 0 | 17.235 | 0 | 0 | 0 | 0 | 11.782 |
| TESTI2046456 | 0 | 2.523 | 0 | 5.578 | 0 | 0 | 2.300 |
| TESTI2053723 | 0 | 0 | 0 | 0 | 0 | 0 | 5.624 |
| TESTI4000014 | 0 | 0.974 | 0 | 3.443 | 0 | 2.632 | 2.440 |
| TESTI4000434 | 0 | 0 | 0 | 0 | 0 | 0 | 16.243 |
| TESTI4002072 | 0 | 6.068 | 0 | 8.048 | 0 | 0 | 4.148 |
| TESTI4002647 | 0 | 0 | 0 | 0 | 0 | 0 | 65.522 |
| TESTI4002799 | 0 | 1.605 | 0 | 4.258 | 0 | 0 | 1.646 |
| TESTI4005133 | 0 | 0 | 0 | 0 | 0 | 0 | 14.814 |
| TESTI4005399 | 0 | 0 | 0 | 0 | 0 | 0 | 9.686 |
| TESTI4006326 | 0 | 0 | 0 | 0 | 0 | 0 | 48.724 |
| TESTI4007965 | 0 | 32.797 | 0 | 0 | 0 | 0 | 0 |
| TESTI4008058 | 0 | 0 | 0 | 0 | 0 | 0 | 21.899 |
| TESTI4009286 | 0 | 0 | 0 | 1.747 | 0 | 0 | 0 |
| TESTI4009454 | 14.566 | 0 | 0 | 9.687 | 0 | 0 | 0 |
| TESTI4010851 | 0 | 1.987 | 0 | 5.270 | 0 | 0 | 4.075 |
| TESTI4012960 | 0 | 0 | 0 | 71.770 | 0 | 0 | 18.497 |
| TESTI4013441 | 0.568 | 0.285 | 0 | 0.378 | 0 | 1.156 | 1.169 |
| TESTI4014175 | 0 | 0 | 0 | 0 | 0 | 0 | 33.186 |
| TESTI4015442 | 0 | 0 | 0 | 48.593 | 0 | 0 | 25.047 |
| TESTI4017714 | 0 | 0 | 0 | 0 | 0 | 0 | 48.724 |
| TESTI4018436 | 0 | 9.457 | 0 | 0 | 0 | 0 | 0 |
| TESTI4020596 | 0 | 0 | 0 | 0 | 0 | 0 | 65.522 |
| TESTI4024740 | 0 | 0 | 0 | 43.356 | 0 | 0 | 0 |
| TESTI4029671 | 0 | 0 | 0 | 44.826 | 0 | 0 | 0 |
| TESTI4032913 | 0 | 0 | 0 | 0 | 0 | 59.736 | 0 |
| TESTI4035770 | 0 | 0 | 0 | 0 | 0 | 0 | 65.522 |
| TESTI4037156 | 2.006 | 1.509 | 0 | 4.669 | 0 | 0 | 0.688 |
| TESTI4038284 | 0 | 3.347 | 0 | 8.877 | 0 | 0 | 4.576 |
| TESTI4043140 | 0 | 0 | 0 | 0 | 0 | 0 | 3.445 |
| TESTI4043223 | 0 | 0 | 0 | 0 | 0 | 0 | 34.381 |
| THYMU1000002 | 0 | 1.076 | 0 | 1.427 | 0 | 4.362 | 0 |
| THYMU1000016 | 0 | 0.702 | 0 | 1.863 | 0 | 0 | 0.480 |
| THYMU1000041 | 0 | 0 | 0 | 0 | 0 | 17.525 | 0 |
| THYMU1000083 | 0 | 5.449 | 0 | 0 | 0 | 22.099 | 7.450 |
| THYMU1000103 | 0 | 6.408 | 0 | 4.249 | 0 | 0 | 0 |
| THYMU1000144 | 0 | 0 | 0 | 0 | 0 | 0 | 11.247 |
| THYMU1000329 | 19.315 | 0 | 0 | 0 | 0 | 0 | 0 |
| THYMU1000374 | 0 | 0 | 0 | 7.220 | 0 | 0 | 1.861 |
| THYMU1000428 | 0 | 0 | 0 | 1.370 | 0 | 0 | 0 |
| THYMU1000499 | 20.685 | 0 | 0 | 0 | 0 | 0 | 0 |
| THYMU2000369 | 0 | 0 | 0 | 0 | 0 | 0 | 22.334 |
| THYMU2000436 | 3.339 | 0 | 0 | 0 | 0 | 0 | 0 |
| THYMU2000702 | 0 | 11.372 | 0 | 0 | 0 | 0 | 0 |
| THYMU2000946 | 5.243 | 5.258 | 0 | 3.487 | 0 | 0 | 3.595 |
| THYMU2001007 | 0 | 0 | 0 | 0 | 0 | 19.994 | 0 |
| THYMU2001926 | 0 | 35.271 | 0 | 0 | 0 | 0 | 0 |
| THYMU2002583 | 0 | 0 | 0 | 1.249 | 0 | 0 | 0 |
| THYMU2002841 | 0 | 5.274 | 0 | 0 | 0 | 0 | 0 |
| THYMU2003046 | 0 | 0 | 0 | 0 | 0 | 14.168 | 0 |
| THYMU2003419 | 1.820 | 0 | 0 | 1.210 | 0 | 0 | 0 |
| THYMU2003446 | 0 | 4.334 | 0 | 0 | 0 | 0 | 0 |
| THYMU2003981 | 0 | 0 | 0 | 0 | 0 | 0 | 0.649 |
| THYMU2004152 | 0 | 0 | 0 | 0 | 0 | 0 | 1.233 |
| THYMU2004344 | 4.630 | 2.321 | 0 | 6.158 | 0 | 0 | 6.348 |
| THYMU2004916 | 0 | 0 | 0 | 3.761 | 0 | 0 | 0 |
| THYMU2005546 | 0 | 0 | 0 | 0 | 0 | 0 | 2.718 |
| THYMU2006505 | 0 | 0 | 0 | 0 | 0 | 0 | 6.783 |
| THYMU2006813 | 0 | 0 | 0 | 0 | 0 | 0 | 3.931 |
| THYMU2007036 | 0 | 0 | 0 | 0 | 0 | 0 | 19.184 |
| THYMU2007065 | 14.696 | 0 | 0 | 0 | 0 | 0 | 0 |
| THYMU2007112 | 0 | 0 | 0 | 0 | 0 | 0 | 11.363 |
| THYMU2007339 | 0 | 0 | 0 | 74.295 | 0 | 0 | 0 |
| THYMU2007694 | 0 | 0 | 0 | 0 | 0 | 0 | 25.756 |
| THYMU2007886 | 0 | 0 | 0 | 3.337 | 0 | 0 | 0 |
| THYMU2008049 | 0 | 0 | 0 | 0 | 0 | 0 | 56.118 |
| THYMU2008321 | 20.953 | 0 | 0 | 0 | 0 | 0 | 3.591 |
| THYMU2009592 | 0 | 0 | 0 | 0 | 0 | 0 | 34.320 |
| THYMU2010448 | 0 | 19.245 | 0 | 0 | 0 | 0 | 6.578 |
| THYMU2011482 | 0 | 0 | 0 | 0 | 0 | 0 | 3.813 |
| THYMU2011875 | 81.295 | 0 | 0 | 0 | 0 | 0 | 0 |
| THYMU2011881 | 0 | 0 | 0 | 0 | 0 | 0 | 12.950 |
| THYMU2012002 | 0 | 0 | 0 | 0 | 0 | 0 | 31.541 |
| THYMU2012024 | 0 | 0 | 0 | 0 | 0 | 0 | 3.702 |
| THYMU2012625 | 0 | 0 | 0 | 0 | 0 | 7.656 | 0 |
| THYMU2013136 | 0 | 2.973 | 0 | 0 | 0 | 0 | 2.032 |
| THYMU2013916 | 0 | 2.016 | 0 | 0 | 0 | 0 | 0 |
| THYMU2014167 | 0 | 0 | 0 | 0 | 0 | 0 | 20.480 |
| THYMU2015762 | 0 | 0 | 0 | 0 | 0 | 0 | 2.463 |
| THYMU2016204 | 0 | 0 | 0 | 0 | 0 | 0 | 59.836 |
| THYMU2017158 | 0 | 0 | 0 | 0 | 0 | 0 | 59.836 |
| THYMU2019021 | 0 | 0 | 0 | 11.713 | 0 | 0 | 0 |
| THYMU2025939 | 0 | 0 | 0 | 0 | 0 | 0 | 19.812 |
| THYMU2026350 | 0 | 0 | 0 | 0 | 0 | 0 | 59.836 |
| THYMU2027125 | 1.297 | 0.651 | 0 | 0.431 | 0 | 0 | 0 |
| THYMU2031341 | 0 | 0 | 0 | 0 | 0 | 0 | 4.286 |
| THYMU2032825 | 0 | 0 | 0 | 0 | 0 | 0 | 11.550 |
| THYMU2034917 | 0 | 0 | 0 | 46.831 | 0 | 0 | 0 |
| THYMU3001939 | 0 | 0 | 0 | 0 | 0 | 0 | 59.836 |
| THYMU3002578 | 0 | 0 | 0 | 0 | 0 | 0 | 38.004 |
| THYMU3003309 | 0 | 0 | 0 | 0 | 0 | 0 | 36.117 |
| THYMU3008105 | 0 | 0 | 0 | 0 | 0 | 0 | 25.159 |
| THYMU3011827 | 0 | 0 | 0 | 0 | 0 | 0 | 28.855 |
| THYMU3015759 | 0 | 4.092 | 0 | 0 | 0 | 0 | 1.399 |
| THYMU3026000 | 0 | 0 | 0 | 0 | 0 | 30.477 | |
| THYMU3032798 | 0 | 0 | 0 | 0 | 0 | 0 | 4.804 |
| THYMU3033626 | 0 | 0 | 0 | 0 | 0 | 0 | 6.982 |
| THYMU3034671 | 0 | 0 | 0 | 0 | 0 | 0 | 5.926 |
| THYMU3041428 | 0 | 0.463 | 0 | 0.614 | 0 | 0 | 0 |
| THYMU3047115 | 0 | 0.747 | 0 | 0 | 0 | 57.541 | 0 |
| TKIDN1000044 | 0 | 0 | 0 | 0 | 0 | 0 | 11.633 |
| TKIDN1000192 | 0 | 0 | 0 | 13.315 | 0 | 0 | 6.863 |
| TKIDN2000127 | 0 | 32.928 | 0 | 0 | 0 | 0 | 0 |
| TKIDN2000246 | 0 | 1.106 | 0 | 0 | 0 | 0 | 0 |
| TKIDN2001529 | 0 | 0 | 0 | 0 | 0 | 0 | 25.127 |
| TKIDN2002738 | 0 | 0 | 0 | 0 | 0 | 3.091 | 0 |
| TKIDN2003078 | 0 | 0 | 0 | 33.378 | 0 | 0 | 0 |
| TKIDN2005487 | 0 | 0 | 0 | 0 | 0 | 0 | 1.785 |
| TKIDN2009641 | 0 | 0 | 0 | 0 | 0 | 0 | 7.182 |
| TKIDN2010812 | 0 | 0 | 0 | 0 | 0 | 0 | 13.244 |
| TKIDN2010934 | 0 | 0 | 0 | 0 | 0 | 0 | 25.127 |
| TKIDN2011289 | 0 | 0 | 0 | 14.408 | 0 | 0 | 0 |
| TKIDN2013287 | 0 | 0 | 0 | 0 | 0 | 0 | 21.501 |
| TKIDN2014964 | 0 | 19.916 | 0 | 0 | 0 | 0 | 0 |
| TKIDN2015285 | 0 | 18.041 | 0 | 0 | 0 | 0 | 0 |
| TKIDN2015423 | 0 | 0 | 0 | 1.534 | 0 | 0 | 4.745 |
| TLIVE2002046 | 0 | 3.298 | 0 | 0 | 0 | 0 | 2.255 |
| TLIVE2002690 | 0 | 0 | 0 | 0 | 0 | 44.414 | 0 |
| TRACH1000030 | 2.500 | 0 | 0 | 0 | 0 | 0 | 0.857 |
| TRACH1000106 | 43.031 | 0 | 0 | 0 | 0 | 0 | 0 |
| TRACH1000181 | 0 | 0 | 0 | 0 | 0 | 34.915 | 5.885 |
| TRACH1000205 | 0 | 7.152 | 0 | 0 | 0 | 0 | 4.889 |
| TRACH2000079 | 0 | 0 | 0 | 0 | 0 | 7.985 | 1.346 |
| TRACH2000237 | 0 | 9.770 | 0 | 25.916 | 0 | 0 | 0 |
| TRACH2000248 | 0 | 0 | 0 | 0 | 0 | 0 | 3.467 |
| TRACH2000321 | 1.781 | 0.893 | 0 | 1.184 | 0 | 0 | 7.324 |
| TRACH2000420 | 0 | 6.094 | 0 | 0 | 0 | 0 | 4.166 |
| TRACH2000461 | 0 | 6.231 | 0 | 8.264 | 0 | 0 | 6.390 |
| TRACH2000472 | 3.095 | 0 | 0 | 4.116 | 0 | 0 | 0 |
| TRACH2000702 | 0 | 7.134 | 0 | 9.462 | 0 | 0 | 0 |
| TRACH2000780 | 3.168 | 7.941 | 0 | 6.319 | 0 | 0 | 1.086 |
| TRACH2000920 | 0 | 0 | 0 | 7.990 | 0 | 0 | 16.474 |
| TRACH2000926 | 0 | 0 | 0 | 0 | 0 | 20.562 | 0 |
| TRACH2000959 | 0 | 0.444 | 0 | 0 | 0 | 0 | 0.607 |
| TRACH2001021 | 0 | 0.761 | 0 | 1.009 | 0 | 0 | 0 |
| TRACH2001109 | 0 | 0.380 | 0 | 1.009 | 0 | 0 | 1.560 |
| TRACH2001289 | 1.232 | 2.471 | 0 | 2.458 | 0 | 0 | 2.956 |
| TRACH2001314 | 0 | 0 | 0 | 17.621 | 0 | 0 | 0 |
| TRACH2001463 | 0 | 11.128 | 0 | 7.379 | 0 | 0 | 3.804 |
| TRACH2001478 | 0 | 1.055 | 0 | 0 | 0 | 0 | 0.721 |
| TRACH2001607 | 0 | 0 | 0 | 0 | 0 | 0 | 1.248 |
| TRACH2001612 | 0 | 7.259 | 0 | 9.627 | 0 | 0 | 0 |
| TRACH2001810 | 0 | 1.411 | 0 | 1.872 | 0 | 0 | 2.894 |
| TRACH2001898 | 0 | 0 | 0 | 2.457 | 0 | 0 | 1.266 |
| TRACH2002537 | 0 | 0 | 0 | 0 | 0 | 0 | 2.304 |
| TRACH2002803 | 0 | 0 | 0 | 0 | 0 | 0 | 2.589 |
| TRACH2003272 | 0 | 0 | 0 | 0 | 0 | 0 | 9.205 |
| TRACH2003323 | 0 | 0 | 0 | 0 | 0 | 13.116 | 4.422 |
| TRACH2003347 | 5.758 | 0 | 0 | 3.829 | 0 | 0 | 3.947 |
| TRACH2005800 | 0 | 0 | 0 | 2.899 | 0 | 0 | 0 |
| TRACH2005811 | 3.822 | 0 | 0 | 0 | 0 | 0 | 0 |
| TRACH2007358 | 0 | 0 | 0 | 0 | 0 | 86.807 | 0 |
| TRACH2007399 | 0 | 1.712 | 0 | 0 | 0 | 0 | 0.585 |
| TRACH2008081 | 0 | 0 | 0 | 0 | 0 | 0 | 1.587 |
| TRACH2008130 | 0 | 0 | 0 | 0 | 0 | 0 | 52.585 |
| TRACH2008300 | 0 | 0 | 0 | 0 | 0 | 0 | 6.327 |
| TRACH2008472 | 0 | 5.703 | 0 | 0 | 0 | 0 | 3.898 |
| TRACH2010771 | 0 | 61.866 | 0 | 0 | 0 | 0 | 0 |
| TRACH2011290 | 0 | 0 | 0 | 0 | 0 | 0 | 52.585 |
| TRACH2011894 | 0 | 16.160 | 0 | 0 | 0 | 0 | 0 |
| TRACH2012298 | 0 | 2.579 | 0 | 3.420 | 0 | 0 | 0 |
| TRACH2013123 | 0 | 21.855 | 0 | 28.985 | 0 | 0 | 0 |
| TRACH2013552 | 0 | 0 | 0 | 0 | 0 | 0 | 12.906 |
| TRACH2014124 | 0 | 0 | 0 | 0 | 0 | 0 | 2.565 |
| TRACH2015823 | 0 | 7.950 | 0 | 0 | 0 | 0 | 5.435 |
| TRACH2018446 | 0 | 0 | 0 | 0 | 0 | 0 | 5.195 |
| TRACH2025535 | 4.208 | 3.165 | 0 | 1.399 | 0 | 0 | 0 |
| TRACH3000134 | 0 | 0 | 0 | 43.581 | 0 | 0 | 0 |
| TRACH3000692 | 0 | 0 | 0 | 11.296 | 0 | 0 | 0 |
| TRACH3002192 | 4.520 | 2.267 | 0 | 0 | 0 | 0 | 8.522 |
| TRACH3003547 | 0 | 0 | 0 | 0 | 0 | 0 | 5.253 |
| TRACH3003872 | 0 | 0 | 0 | 13.230 | 0 | 0 | 0 |
| TRACH3004424 | 0 | 30.905 | 0 | 0 | 0 | 0 | 0 |
| TRACH3004721 | 10.536 | 5.283 | 0 | 14.013 | 0 | 0 | 3.611 |
| TRACH3005211 | 0 | 0 | 0 | 44.416 | 0 | 0 | 22.894 |
| TRACH3005294 | 0 | 0 | 0 | 0 | 0 | 0 | 4.614 |
| TRACH3006717 | 0 | 6.668 | 0 | 0 | 0 | 0 | 4.558 |
| TRACH3007625 | 4.260 | 2.136 | 0 | 2.833 | 0 | 0 | 4.381 |
| TRACH3008093 | 0 | 8.902 | 0 | 0 | 0 | 0 | 9.128 |
| TRACH3008535 | 0 | 0 | 0 | 68.270 | 0 | 0 | 0 |
| TRACH3008713 | 0 | 0 | 0 | 68.270 | 0 | 0 | 0 |
| TRACH3009008 | 0 | 0 | 0 | 11.807 | 0 | 0 | 0 |
| TRACH3014316 | 0 | 0 | 0 | 0 | 0 | 0 | 52.585 |
| TRACH3016805 | 0 | 0 | 0 | 10.851 | 0 | 0 | 11.187 |
| TRACH3021544 | 0 | 0 | 0 | 0 | 0 | 0 | 52.585 |
| TRACH3026303 | 0 | 0 | 0 | 27.016 | 0 | 0 | 20.888 |
| TRACH3028855 | 0 | 0 | 0 | 0 | 0 | 0 | 27.714 |
| TRACH3037067 | 0 | 2.921 | 0 | 0 | 0 | 0 | 0 |
| TUTER1000122 | 0 | 0 | 0 | 0 | 0 | 0 | 8.109 |
| TUTER2000057 | 0 | 7.539 | 0 | 0 | 0 | 0 | 0 |
| UMVEN2000152 | 0 | 0 | 0 | 0 | 0 | 0 | 2.935 |
| UMVEN2000354 | 0 | 0 | 0 | 1.985 | 0 | 0 | 0 |
| UMVEN2000453 | 0 | 0 | 0 | 1.258 | 0 | 3.848 | 0 |
| UTERU1000106 | 0 | 10.472 | 0 | 0 | 0 | 0 | 0 |
| UTERU1000182 | 0 | 2.948 | 0 | 0 | 0 | 0 | 0 |
| UTERU1000384 | 0 | 12.952 | 0 | 0 | 0 | 0 | 0 |
| UTERU2000095 | 0 | 2.256 | 0 | 0 | 0 | 3.050 | 1.028 |
| UTERU2000263 | 0 | 0.931 | 0 | 1.235 | 0 | 0 | 0 |
| UTERU2000300 | 0 | 0 | 0 | 0 | 0 | 0 | 6.127 |
| UTERU2000424 | 0 | 0 | 0 | 0 | 0 | 0 | 1.055 |
| UTERU2000696 | 0 | 0 | 0 | 6.858 | 0 | 0 | 0 |
| UTERU2001607 | 0 | 2.681 | 0 | 0 | 0 | 0 | 1.833 |
| UTERU2002294 | 0 | 9.896 | 0 | 0 | 0 | 0 | 0 |
| UTERU2002410 | 0 | 1.067 | 0 | 0 | 0 | 0 | 0 |
| UTERU2002662 | 6.448 | 3.233 | 0 | 12.865 | 0 | 0 | 2.210 |
| UTERU2003411 | 0 | 0 | 0 | 0 | 99.640 | 0 | 0 |
| UTERU2004197 | 0 | 7.308 | 0 | 0 | 0 | 0 | 2.498 |
| UTERU2004807 | 0 | 0 | 0 | 0 | 0 | 7.404 | 0 |
| UTERU2005354 | 7.928 | 3.975 | 0 | 5.272 | 0 | 0 | 2.717 |
| UTERU2006593 | 0 | 8.050 | 0 | 10.676 | 0 | 0 | 0 |
| UTERU2007924 | 9.693 | 0 | 0 | 0 | 0 | 0 | 0 |
| UTERU2008085 | 2.291 | 0.164 | 2.599 | 0.435 | 0 | 0 | 0.112 |
| UTERU2008302 | 0 | 0 | 0 | 3.220 | 0 | 9.846 | 0 |
| UTERU2008653 | 0 | 0 | 0 | 0 | 0 | 0 | 51.019 |
| UTERU2009335 | 10.992 | 0 | 0 | 0 | 0 | 0 | 3.768 |
| UTERU2009435 | 0 | 0 | 0 | 12.888 | 0 | 0 | 0 |
| UTERU2009972 | 0 | 0 | 0 | 0 | 0 | 0 | 39.610 |
| UTERU2010226 | 28.588 | 0 | 0 | 0 | 0 | 0 | 0 |
| UTERU2010417 | 1.143 | 1.146 | 0 | 3.799 | 0 | 4.647 | 1.567 |
| UTERU2011621 | 0 | 0 | 0 | 0 | 0 | 0 | 12.335 |
| UTERU2012230 | 0 | 3.198 | 0 | 4.241 | 0 | 0 | 0 |
| UTERU2012286 | 9.182 | 9.208 | 0 | 18.318 | 0 | 0 | 0 |
| UTERU2012526 | 0 | 0 | 0 | 22.255 | 0 | 0 | 0 |
| UTERU2012767 | 0 | 0 | 0 | 25.668 | 0 | 0 | 6.615 |
| UTERU2012938 | 0 | 0 | 0 | 0 | 0 | 0 | 51.019 |
| UTERU2013262 | 0 | 0 | 0 | 44.229 | 0 | 0 | 0 |
| UTERU2013491 | 0 | 0 | 0 | 0 | 0 | 86.071 | 0 |
| UTERU2013586 | 0 | 0 | 0 | 0 | 0 | 0 | 8.185 |
| UTERU2014167 | 0 | 1.656 | 0 | 0 | 0 | 0 | 0 |
| UTERU2014678 | 0 | 0 | 0 | 0 | 0 | 0 | 51.019 |
| UTERU2014898 | 5.514 | 0 | 0 | 0 | 0 | 0 | 0 |
| UTERU2015653 | 0 | 1.060 | 0 | 0 | 0 | 4.300 | 0 |
| UTERU2016426 | 0 | 0 | 0 | 30.630 | 0 | 0 | 0 |
| UTERU2016669 | 29.924 | 0 | 0 | 0 | 0 | 0 | 0 |
| UTERU2016799 | 0 | 0 | 0 | 0 | 0 | 0 | 7.224 |
| UTERU2018884 | 0 | 0 | 0 | 0 | 0 | 0 | 1.925 |
| UTERU2019005 | 0 | 0 | 0 | 0 | 0 | 0 | 8.023 |
| UTERU2019096 | 16.696 | 4.186 | 0 | 0 | 0 | 0 | 11.447 |
| UTERU2023175 | 5.396 | 0 | 0 | 7.176 | 0 | 0 | 1.850 |
| UTERU2024969 | 0 | 0 | 0 | 7.740 | 0 | 0 | 0 |
| UTERU2028734 | 0 | 0 | 0 | 0 | 0 | 0 | 27.272 |
| UTERU3000727 | 0 | 41.026 | 0 | 0 | 0 | 0 | 0 |
| UTERU3000899 | 0 | 0 | 0 | 0 | 0 | 0 | 35.054 |
| UTERU3003660 | 0 | 0 | 0 | 17.745 | 0 | 0 | 9.147 |
| UTERU3004418 | 0 | 0 | 0 | 0 | 0 | 0 | 36.166 |
| UTERU3010409 | 0 | 0 | 0 | 0 | 0 | 0 | 8.599 |

[2058] Genes whose expression levels were negligibly low in each of the above-described libraries are shown with their clone names below.

[2059] 3NB691000018, 3NB691000085, 3NB691000113, 3NB691000191, 3NB692000012, 3NB692000029, 3NB692000102, 3NB692000154, 3NB692000276, 3NB692000305, 3NB692000330, 3NB692000429, 3NB692000484, 3NB692000529, 3NB692000973, 3NB692001034, 3NB692001040, 3NB692001123, 3NB692001267, 3NB692001339, 3NB692001349, 3NB692001366, 3NB692001408, 3NB692001433, 3NB692001459, 3NB692001471, 3NB692001501, 3NB692001507, 3NB692001511, 3NB692001519, 3NB692001520, 3NB692001538, 3NB692001548, 3NB692001557, 3NB692001637, 3NB692001853, 3NB692001861, 3NB692002051, 3NB692002365, 3NB692002685, 3NB692002806, 3NB692003538, 3NB692004045, 3NB692004724, 3NB692005439, 3NB692006952, 3NB692008178, 3NB692008729, ACTVT2000380, ADIPS1000064,

[2060] ADIPS2000069, ADIPS2000088, ADIPS2000245, ADRGL1000018, ADRGL1000033, ADRGL1000038, ADRGL1000067, ADRGL1000111, ADRGL1000147, ADRGL1000160, ADRGL1000165, ADRGL1000182, ADRGL2000056, ADRGL2000064, ADRGL2000074, ADRGL2000085, ADRGL2000117, ADRGL2000142, ADRGL2000172, ADRGL2000248, ADRGL2000261, ADRGL2000323, ADRGL2000328, ADRGL2000353, ADRGL2000384, ADRGL2000428, ADRGL2000636, ADRGL2000644, ADRGL2000968, ADRGL2001119, ADRGL2001229, ADRGL2001287, ADRGL2001301, ADRGL2001354, ADRGL2001554, ADRGL2001651, ADRGL2001756, ADRGL2001830, ADRGL2001836, ADRGL2001854, ADRGL2002013, ADRGL2002029, ADRGL2002191, ADRGL2002260, ADRGL2002392, ADRGL2002753, ADRGL2002857, ADRGL2003017, ADRGL2003329, ADRGL2003552,

[2061] ADRGL2003585, ADRGL2003638, ADRGL2003684, ADRGL2003773, ADRGL2003785, ADRGL2004031, ADRGL2004077, ADRGL2004451, ADRGL2004459, ADRGL2004676, ADRGL2004708, ADRGL2004724, ADRGL2004749, ADRGL2004770, ADRGL2004777, ADRGL2004833, ADRGL2005336, ADRGL2005564, ADRGL2005756, ADRGL2005838, ADRGL2005926, ADRGL2005961, ADRGL2006034, ADRGL2006124, ADRGL2006177, ADRGL2006193, ADRGL2006377, ADRGL2006677, ADRGL2006732, ADRGL2006767, ADRGL2006817, ADRGL2006846, ADRGL2006886, ADRGL2007080, ADRGL2007125, ADRGL2007283, ADRGL2007313, ADRGL2007357, ADRGL2007636, ADRGL2007651, ADRGL2007810, ADRGL2007877, ADRGL2007906, ADRGL2007974, ADRGL2008023, ADRGL2008331, ADRGL2008337, ADRGL2008535, ADRGL2008966, ADRGL2009146,

[2062] ADRGL2009324, ADRGL2009489, ADRGL2009533, ADRGL2009691, ADRGL2009755, ADRGL2010152, ADRGL2010315, ADRGL2010594, ADRGL2010860, ADRGL2010974, ADRGL2011190, ADRGL2011330, ADRGL2012038, AHMSC1000138, ASTRO1000009, ASTRO1000018, ASTRO1000029, ASTRO1000096, ASTRO2000011, ASTRO2000014, ASTRO2000095, ASTRO2000141, ASTRO2000191, ASTRO2000278, ASTRO2000372, ASTRO2000403, ASTRO2000417, ASTRO2000482, ASTRO2000533, ASTRO2000653, ASTRO2000662, ASTRO2000725, ASTRO2001001, ASTRO2001008, ASTRO2001088, ASTRO2001122, ASTRO2001227, ASTRO2001249, ASTRO2001480, ASTRO2001806, ASTRO2002024, ASTRO2002035, ASTRO2002064, ASTRO2002459, ASTRO2002571, ASTRO2002632, ASTRO2002659, ASTRO2002720, ASTRO2002733, ASTRO2002743,

[2063] ASTRO2002842, ASTRO2003024, ASTRO2003212, ASTRO2003574, ASTRO2003581, ASTRO2003740, ASTRO2003840, ASTRO2003925, ASTRO2003960, ASTRO2004051, ASTRO2004177, ASTRO2004217, ASTRO2004297, ASTRO2004584, ASTRO2004628, ASTRO2004751, ASTRO2004877, ASTRO2005008, ASTRO2005081, ASTRO2005096, ASTRO2005242, ASTRO2005273, ASTRO2005343, ASTRO2005360, ASTRO2005413, ASTRO2005557, ASTRO2005575, ASTRO2005593, ASTRO2005726, ASTRO2005863, ASTRO2005896, ASTRO2005902, ASTRO2006356, ASTRO2006475, ASTRO2006732, ASTRO2006747, ASTRO2006920, ASTRO2006952, ASTRO2007047, ASTRO2007221, ASTRO2007377, ASTRO2007515, ASTRO2007578, ASTRO2007643, ASTRO2007666, ASTRO2007948, ASTRO2007956, ASTRO2007962, ASTRO2008040, ASTRO2008239,

[2064] ASTRO2008425, ASTRO2008508, ASTRO2008777, ASTRO2008895, ASTRO2008960, ASTRO2008972, ASTRO2009177, ASTRO2009333, ASTRO2009458, ASTRO2009526, ASTRO2009879, ASTRO2010072, ASTRO2010582, ASTRO2010615, ASTRO2010799, ASTRO2010962, ASTRO2011149, ASTRO2011426, ASTRO2011437, ASTRO2011461, ASTRO2011834, ASTRO2011893, ASTRO2013124, ASTRO2013671, ASTRO2013802, ASTRO2014135, ASTRO2014174, ASTRO2014211, ASTRO2014363, ASTRO2014392, ASTRO2014498, ASTRO2014561, ASTRO2014576, ASTRO2014863, ASTRO2014923, ASTRO2014961, ASTRO2015162, ASTRO2015185, ASTRO2015328, ASTRO2015987, ASTRO2016044, ASTRO2016114, ASTRO2016681, ASTRO2016847, ASTRO2016892, ASTRO2017348, ASTRO2017627, ASTRO2018169, ASTRO2018373, ASTRO2018540,

[2065] ASTRO2019039, ASTRO2019171, ASTRO3000154, ASTRO3000172, ASTRO3000177, ASTRO3000301, ASTRO3000474, ASTRO3000482, BEAST2000454, BGGI11000123, BGGI11000193, BGGI11000285, BGGI12000022, BGGI12000067, BGGI12000161, BGGI12000544, BGGI12000693, BGGI12001241, BGGI12001247, BGGI12001714, BLADE1000176, BLADE2000181, BLADE2000256, BLADE2000340, BLADE2000389, BLADE2000463, BLADE2000492, BLADE2000579, BLADE2000640, BLADE2000866, BLADE2000938, BLADE2001031, BLADE2001133, BLADE2001138, BLADE2001141, BLADE2001371, BLADE2001458, BLADE2001575, BLADE2001753, BLADE2001935, BLADE2001940, BLADE2001987, BLADE2002073, BLADE2002310, BLADE2002730, BLADE2002738, BLADE2002744, BLADE2002782, BLADE2002947, BLADE2002972,

[2066] BLADE2003474, BLADE2003916, BLADE2004345, BLADE2004389, BLADE2004462, BLADE2004628, BLADE2004670, BLADE2004722, BLADE2005036, BLADE2005038, BLADE2005229, BLADE2005459, BLADE2005792, BLADE2006043, BLADE2006412, BLADE2006415, BLADE2006607, BLADE2006826, BLADE2006849, BLADE2006947, BLADE2007033, BLADE2007043, BLADE2007589, BLADE2007666, BLADE2007722, BLADE2007735, BLADE2007744, BLADE2007799, BLADE2007923, BLADE2007935, BLADE2007958, BLADE2008281, BLADE2008398, BLADE2008454, BLADE2008479, BLADE2008539, BLADE2008809, BLADE2008995, BLADE2009452, BLADE2009479, BLADE2009593, BNGH41000104, BNGH41000118, BNGH41000169, BNGH41000177, BNGH41000190, BNGH41000216, BNGH41000235, BNGH42000130, BNGH42000132,

[2067] BNGH42000405, BNGH42000532, BNGH42000675, BNGH42000791, BNGH42000815, BNGH42000994, BNGH42001247, BNGH42001406, BNGH42001576, BNGH42001724, BNGH42002244, BNGH42002387, BNGH42002487, BNGH42002489, BNGH42003529, BNGH42003570, BNGH42003641, BNGH42004076, BNGH42004291, BNGH42004538, BNGH42004679, BNGH42005017, BNGH42005235, BNGH42005504, BNGH42005968, BNGH42006226, BNGH42006234, BNGH42007037, BNGH42007366, BNGH42007594, BNGH42008199, BNGH42008510, BNGH42008649, BNGH42008832, BNGH42008850, BNGH42008943, BNGH42009021, BRACE1000047, BRACE1000051, BRACE1000065, BRACE1000073, BRACE1000084, BRACE1000092, BRACE1000093, BRACE1000101, BRACE1000114, BRACE1000124, BRACE1000132, BRACE1000159, BRACE1000166,

[2068] BRACE1000169, BRACE1000239, BRACE1000258, BRACE1000451, BRACE1000475, BRACE1000572, BRACE2000061, BRACE2000077, BRACE2000078, BRACE2000100, BRACE2000109, BRACE2000141, BRACE2000148, BRACE2000183, BRACE2000229, BRACE2000232, BRACE2000245, BRACE2000256, BRACE2000266, BRACE2000267, BRACE2000280, BRACE2000300, BRACE2000331, BRACE2000351, BRACE2000368, BRACE2000392, BRACE2000441, BRACE2000489, BRACE2000505, BRACE2000526, BRACE2000531, BRACE2000545, BRACE2000553, BRACE2000565, BRACE2000577, BRACE2000640, BRACE2000650, BRACE2000677, BRACE2000718, BRACE2000743, BRACE2000750, BRACE2000753, BRACE2000815, BRACE2000864, BRACE2000885, BRACE2000893, BRACE2000905, BRACE2000936, BRACE2000947, BRACE2000965,

[2069] BRACE2000969, BRACE2000988, BRACE2001017, BRACE2001065, BRACE2001070, BRACE2001094, BRACE2001117, BRACE2001154, BRACE2001188, BRACE2001191, BRACE2001197, BRACE2001239, BRACE2001269, BRACE2001312, BRACE2001313, BRACE2001330, BRACE2001340, BRACE2001352, BRACE2001353, BRACE2001374, BRACE2001375, BRACE2001423, BRACE2001424, BRACE2001445, BRACE2001453, BRACE2001455, BRACE2001492, BRACE2001496, BRACE2001534, BRACE2001543, BRACE2001564, BRACE2001588, BRACE2001607, BRACE2001626, BRACE2001673, BRACE2001677, BRACE2001705, BRACE2001709, BRACE2001711, BRACE2001726, BRACE2001733, BRACE2001737, BRACE2001742, BRACE2001777, BRACE2001779, BRACE2001834, BRACE2001859, BRACE2001865, BRACE2001872, BRACE2001898,

[2070] BRACE2001923, BRACE2001942, BRACE2001954, BRACE2001972, BRACE2001973, BRACE2002026, BRACE2002034, BRACE2002081, BRACE2002139, BRACE2002142, BRACE2002151, BRACE2002157, BRACE2002176, BRACE2002202, BRACE2002206, BRACE2002227, BRACE2002260, BRACE2002297, BRACE2002304, BRACE2002392, BRACE2002394, BRACE2002409, BRACE2002431, BRACE2002444, BRACE2002458, BRACE2002467, BRACE2002468, BRACE2002478, BRACE2002495, BRACE2002585, BRACE2002589, BRACE2002590, BRACE2002606, BRACE2002613, BRACE2002614, BRACE2002617, BRACE2002623, BRACE2002635, BRACE2002661, BRACE2002676, BRACE2002682, BRACE2002685, BRACE2002695, BRACE2002707, BRACE2002736, BRACE2002752, BRACE2002755, BRACE2002762, BRACE2002772, BRACE2002792,

[2071] BRACE2002807, BRACE2002812, BRACE2002834, BRACE2002849, BRACE2002857, BRACE2002860, BRACE2002884, BRACE2002896, BRACE2002948, BRACE2003078, BRACE2003097, BRACE2003168, BRACE2003199, BRACE2003210, BRACE2003217, BRACE2003269, BRACE2003285, BRACE2003398, BRACE2003420, BRACE2003428, BRACE2003431, BRACE2003512, BRACE2003516, BRACE2003539, BRACE2003540, BRACE2003594, BRACE2003598, BRACE2003614, BRACE2003639, BRACE2003700, BRACE2003713, BRACE2003766, BRACE2003788, BRACE2003800, BRACE2003802, BRACE2003825, BRACE2003847, BRACE2003848, BRACE2003873, BRACE2003885, BRACE2003887, BRACE2003928, BRACE2003954, BRACE2003982, BRACE2003987, BRACE2005034, BRACE2005047, BRACE2005063, BRACE2005083, BRACE2005090,

[2072] BRACE2005099, BRACE2005118, BRACE2005124, BRACE2005138, BRACE2005160, BRACE2005169, BRACE2005193, BRACE2005198, BRACE2005216, BRACE2005231, BRACE2005243, BRACE2005251, BRACE2005253, BRACE2005290, BRACE2005298, BRACE2005328, BRACE2005329, BRACE2005337, BRACE2005348, BRACE2005363, BRACE2005408, BRACE2005433, BRACE2005448, BRACE2005450, BRACE2005453, BRACE2005457, BRACE2005460, BRACE2005489, BRACE2005518, BRACE2005556, BRACE2005562, BRACE2005624, BRACE2005642, BRACE2005661, BRACE2005667, BRACE2005731, BRACE2005742, BRACE2005762, BRACE2005773, BRACE2005787, BRACE2005795, BRACE2005800, BRACE2005858, BRACE2005869, BRACE2005881, BRACE2005898, BRACE2005904, BRACE2005906, BRACE2005907, BRACE2005911,

[2073] BRACE2005949, BRACE2005981, BRACE2005991, BRACE2006072, BRACE2006075, BRACE2006084, BRACE2006089, BRACE2006102, BRACE2006105, BRACE2006122, BRACE2006137, BRACE2006143, BRACE2006167, BRACE2006174, BRACE2006240, BRACE2006245, BRACE2006249, BRACE2006264, BRACE2006274, BRACE2006298, BRACE2006344, BRACE2006363, BRACE2006378, BRACE2006380, BRACE2006393, BRACE2006397, BRACE2006413, BRACE2006417, BRACE2006453, BRACE2006459, BRACE2006488, BRACE2006534, BRACE2006537, BRACE2006540, BRACE2006547, BRACE2006564, BRACE2006587, BRACE2006598, BRACE2006685, BRACE2006703, BRACE2006753, BRACE2006783, BRACE2006821, BRACE2006871, BRACE2006909, BRACE2006911, BRACE2006924, BRACE2006935, BRACE2006944, BRACE2006951,

[2074] BRACE2006982, BRACE2006986, BRACE2007013, BRACE2007068, BRACE2007087, BRACE2007109, BRACE2007138, BRACE2007191, BRACE2007197, BRACE2007201, BRACE2007203, BRACE2007232, BRACE2007254, BRACE2007262, BRACE2007274, BRACE2007281, BRACE2007295, BRACE2007358, BRACE2007396, BRACE2007398, BRACE2007411, BRACE2007447, BRACE2007477, BRACE2007502, BRACE2007503, BRACE2007522, BRACE2007527, BRACE2007538, BRACE2007563, BRACE2007567, BRACE2007621, BRACE2007640, BRACE2007646, BRACE2007663, BRACE2007682, BRACE2007685, BRACE2007708, BRACE2007727, BRACE2007749, BRACE2007761, BRACE2007764, BRACE2007767, BRACE2007769, BRACE2007784, BRACE2007786, BRACE2007798, BRACE2007799, BRACE2007801, BRACE2007832, BRACE2007836,

[2075] BRACE2007868, BRACE2007882, BRACE2007888, BRACE2007920, BRACE2007944, BRACE2008008, BRACE2008015, BRACE2008021, BRACE2008097, BRACE2008102, BRACE2008114, BRACE2008144, BRACE2008172, BRACE2008216, BRACE2008218, BRACE2008251, BRACE2008276, BRACE2008295, BRACE2008308, BRACE2008336, BRACE2008361, BRACE2008385, BRACE2008399, BRACE2008401, BRACE2008410, BRACE2008420, BRACE2008443, BRACE2008473, BRACE2008480, BRACE2008488, BRACE2008495, BRACE2008500, BRACE2008553, BRACE2008594, BRACE2008604, BRACE2008615, BRACE2008622, BRACE2008629, BRACE2008655, BRACE2008656, BRACE2008706, BRACE2008708, BRACE2008710, BRACE2008754, BRACE2008797, BRACE2008847, BRACE2008857, BRACE2008861, BRACE2008867, BRACE2008881,

[2076] BRACE2008883, BRACE2008917, BRACE2008919, BRACE2008941, BRACE2008948, BRACE2008960, BRACE2008999, BRACE2009014, BRACE2009016, BRACE2009031, BRACE2009044, BRACE2009053, BRACE2009122, BRACE2009131, BRACE2009185, BRACE2009188, BRACE2009212, BRACE2009221, BRACE2009235, BRACE2009238, BRACE2009255, BRACE2009270, BRACE2009272, BRACE2009274, BRACE2009275, BRACE2009293, BRACE2009311, BRACE2009318, BRACE2009323, BRACE2009366, BRACE2009421, BRACE2009428, BRACE2009434, BRACE2009437, BRACE2009483, BRACE2009517, BRACE2009533, BRACE2009566, BRACE2009591, BRACE2009620, BRACE2009654, BRACE2009721, BRACE2009732, BRACE2009754, BRACE2009828, BRACE2009886, BRACE2009907, BRACE2009957, BRACE2010170, BRACE2010171,

[2077] BRACE2010203, BRACE2010208, BRACE2010336, BRACE2010348, BRACE2010440, BRACE2010444, BRACE2010477, BRACE2010489, BRACE2010535, BRACE2010550, BRACE2010598, BRACE2010632, BRACE2010642, BRACE2010651, BRACE2010684, BRACE2010753, BRACE2010813, BRACE2010828, BRACE2010837, BRACE2010888, BRACE2010937, BRACE2010983, BRACE2011007, BRACE2011025, BRACE2011183, BRACE2011199, BRACE2011389, BRACE2011478, BRACE2011545, BRACE2011592, BRACE2011611, BRACE2011646, BRACE2011677, BRACE2011703, BRACE2011747, BRACE2011838, BRACE2011892, BRACE2011904, BRACE2011947, BRACE2012061, BRACE2012062, BRACE2012185, BRACE2012222, BRACE2012232, BRACE2012291, BRACE2012510, BRACE2012625, BRACE2012653, BRACE2012833, BRACE2012838,

[2078] BRACE2012936, BRACE2012947, BRACE2013009, BRACE2013010, BRACE2013126, BRACE2013132, BRACE2013149, BRACE2013369, BRACE2013806, BRACE2013855, BRACE2013911, BRACE2014108, BRACE2014161, BRACE2014232, BRACE2014257, BRACE2014268, BRACE2014475, BRACE2014657, BRACE2014746, BRACE2014780, BRACE2014818, BRACE2014821, BRACE2014824, BRACE2014854, BRACE2015031, BRACE2015262, BRACE2015270, BRACE2015287, BRACE2015314, BRACE2015352, BRACE2015368, BRACE2015412, BRACE2015436, BRACE2015741, BRACE2015756, BRACE2015969, BRACE2015995, BRACE2016058, BRACE2016194, BRACE2016315, BRACE2016325, BRACE2016335, BRACE2016362, BRACE2016366, BRACE2016465, BRACE2016516, BRACE2016583, BRACE2016708, BRACE2016821, BRACE2016896,

[2079] BRACE2016981, BRACE2017108, BRACE2017124, BRACE2017298, BRACE2017359, BRACE2017397, BRACE2017410, BRACE2017438, BRACE2017580, BRACE2017587, BRACE2017720, BRACE2017844, BRACE2017872, BRACE2017929, BRACE2017934, BRACE2017985, BRACE2017992, BRACE2018443, BRACE2018448, BRACE2018568, BRACE2018700, BRACE2018727, BRACE2018736, BRACE2018759, BRACE2018762, BRACE2018782, BRACE2018847, BRACE2019004, BRACE2019044, BRACE2019244, BRACE2019258, BRACE2019327, BRACE2019348, BRACE2019371, BRACE2019467, BRACE2019510, BRACE2019519, BRACE2019528, BRACE2019618, BRACE2019696, BRACE2019703, BRACE2019843, BRACE2019865, BRACE2019872, BRACE2019877, BRACE2020028, BRACE2020077, BRACE2020097, BRACE2020157, BRACE2020278,

[2080] BRACE2020358, BRACE2020467, BRACE2020584, BRACE2020652, BRACE2020709, BRACE2020742, BRACE2020756, BRACE2020863, BRACE2020982, BRACE2021143, BRACE2021148, BRACE2021245, BRACE2021254, BRACE2021264, BRACE2021344, BRACE2021433, BRACE2021478, BRACE2021670, BRACE2021695, BRACE2021708, BRACE2021721, BRACE2021932, BRACE2021936, BRACE2022030, BRACE2022158, BRACE2022196, BRACE2022270, BRACE2022328, BRACE2022333, BRACE2022394, BRACE2022435, BRACE2022448, BRACE2022450, BRACE2022633, BRACE2022693, BRACE2022848, BRACE2022928, BRACE2022990, BRACE2023069, BRACE2023070, BRACE2023223, BRACE2023268, BRACE2023284, BRACE2023404, BRACE2023451, BRACE2023540, BRACE2023633, BRACE2023718, BRACE2023727, BRACE2023744,

[2081] BRACE2023800, BRACE2023801, BRACE2024074, BRACE2024222, BRACE2024610, BRACE2024627, BRACE2024781, BRACE2024826, BRACE2025018, BRACE2025316, BRACE2025333, BRACE2025437, BRACE2025452, BRACE2025710, BRACE2025796, BRACE2025992, BRACE2026131, BRACE2026141, BRACE2026142, BRACE2026293, BRACE2026294, BRACE2026404, BRACE2026675, BRACE2026836, BRACE2026920, BRACE2026971, BRACE2027018, BRACE2027221, BRACE2027312, BRACE2027382, BRACE2027389, BRACE2027408, BRACE2027767, BRACE2027770, BRACE2027879, BRACE2027896, BRACE2027970, BRACE2028171, BRACE2028392, BRACE2028410, BRACE2028636, BRACE2028741, BRACE2028956, BRACE2028970, BRACE2029112, BRACE2029356, BRACE2029396, BRACE2029581, BRACE2029644, BRACE2029849,

[2082] BRACE2030039, BRACE2030096, BRACE2030323, BRACE2030326, BRACE2030341, BRACE2030345, BRACE2030736, BRACE2030883, BRACE2030884, BRACE2031154, BRACE2031232, BRACE2031527, BRACE2031531, BRACE2031553, BRACE2031899, BRACE2032044, BRACE2032090, BRACE2032134, BRACE2032148, BRACE2032182, BRACE2032329, BRACE2032385, BRACE2032436, BRACE2032502, BRACE2032538, BRACE2032584, BRACE2032823, BRACE2033128, BRACE2033394, BRACE2033478, BRACE2033720, BRACE2033786, BRACE2034434, BRACE2034523, BRACE2034616, BRACE2034622, BRACE2034870, BRACE2035003, BRACE2035120, BRACE2035124, BRACE2035191, BRACE2035381, BRACE2035441, BRACE2035485, BRACE2036005, BRACE2036096, BRACE2036743, BRACE2036830, BRACE2036834, BRACE2036900,

[2083] BRACE2037132, BRACE2037294, BRACE2037299, BRACE2037431, BRACE2037692, BRACE2037847, BRACE2038114, BRACE2038269, BRACE2038271, BRACE2038329, BRACE2038492, BRACE2038551, BRACE2038618, BRACE2039009, BRACE2039128, BRACE2039170, BRACE2039249, BRACE2039286, BRACE2039297, BRACE2039327, BRACE2039362, BRACE2039475, BRACE2039600, BRACE2039607, BRACE2039734, BRACE2039823, BRACE2039832, BRACE2039893, BRACE2039986, BRACE2040138, BRACE2040325, BRACE2040514, BRACE2040640, BRACE2040987, BRACE2041009, BRACE2041095, BRACE2041200, BRACE2041264, BRACE2041890, BRACE2041898, BRACE2042394, BRACE2042398, BRACE2042550, BRACE2042620, BRACE2042628, BRACE2042873, BRACE2043036, BRACE2043105, BRACE2043142, BRACE2043248,

[2084] BRACE2043349, BRACE2043381, BRACE2043774, BRACE2043942, BRACE2044057, BRACE2044105, BRACE2044263, BRACE2044304, BRACE2044473, BRACE2044510, BRACE2044640, BRACE2044816, BRACE2044946, BRACE2044949, BRACE2045300, BRACE2045428, BRACE2045445, BRACE2045596, BRACE2045772, BRACE2045947, BRACE2046251, BRACE2046295, BRACE2046976, BRACE2047011, BRACE2047232, BRACE2047350, BRACE2047377, BRACE2047385, BRACE2047492, BRACE2047558, BRACE2047573, BRACE2047835, BRACE2047893, BRACE2047975, BRACE3000071, BRACE3000404, BRACE3000520, BRACE3000697, BRACE3000840, BRACE3000973, BRACE3001002, BRACE3001058, BRACE3001066, BRACE3001217, BRACE3001299, BRACE3001384, BRACE3001391, BRACE3001403, BRACE3001595, BRACE3001754,

[2085] BRACE3001948, BRACE3002298, BRACE3002344, BRACE3002390, BRACE3002420, BRACE3002508, BRACE3002541, BRACE3002756, BRACE3003004, BRACE3003192, BRACE3003413, BRACE3003595, BRACE3003698, BRACE3003866, BRACE3003920, BRACE3004046, BRACE3004058, BRACE3004113, BRACE3004150, BRACE3004205, BRACE3004358, BRACE3004435, BRACE3004477, BRACE3004767, BRACE3004772, BRACE3004783, BRACE3004843, BRACE3004862, BRACE3004880, BRACE3004887, BRACE3004981, BRACE3004996, BRACE3004998, BRACE3005103, BRACE3005127, BRACE3005145, BRACE3005217, BRACE3005225, BRACE3005430, BRACE3005499, BRACE3005760, BRACE3005870, BRACE3005903, BRACE3005989, BRACE3006113, BRACE3006185, BRACE3006226, BRACE3006462, BRACE3006463, BRACE3006553,

[2086] BRACE3006872, BRACE3006917, BRACE3007058, BRACE3007084, BRACE3007085, BRACE3007258, BRACE3007322, BRACE3007472, BRACE3007480, BRACE3007559, BRACE3007625, BRACE3007642, BRACE3007649, BRACE3007767, BRACE3007869, BRACE3008036, BRACE3008066, BRACE3008092, BRACE3008095, BRACE3008137, BRACE3008255, BRACE3008337, BRACE3008384, BRACE3008720, BRACE3008772, BRACE3009044, BRACE3009075, BRACE3009090, BRACE3009127, BRACE3009197, BRACE3009237, BRACE3009265, BRACE3009297, BRACE3009377, BRACE3009392, BRACE3009416, BRACE3009539, BRACE3009574, BRACE3009701, BRACE3009708, BRACE3009724, BRACE3009993, BRACE3010076, BRACE3010079, BRACE3010086, BRACE3010221, BRACE3010283, BRACE3010315, BRACE3010397, BRACE3010416,

[2087] BRACE3010435, BRACE3010438, BRACE3010702, BRACE3010862, BRACE3011421, BRACE3011447, BRACE3011505, BRACE3011634, BRACE3011774, BRACE3012357, BRACE3012574, BRACE3012806, BRACE3012930, BRACE3013119, BRACE3013418, BRACE3013576, BRACE3013740, BRACE3013874, BRACE3013936, BRACE3013986, BRACE3014005, BRACE3014068, BRACE3014231, BRACE3014290, BRACE3014317, BRACE3014523, BRACE3014714, BRACE3014807, BRACE3014942, BRACE3015090, BRACE3015121, BRACE3015262, BRACE3015521, BRACE3015808, BRACE3015829, BRACE3015894, BRACE3015898, BRACE3016020, BRACE3016122, BRACE3016167, BRACE3016170, BRACE3016580, BRACE3016788, BRACE3016810, BRACE3016862, BRACE3016884, BRACE3017083, BRACE3017253, BRACE3018083, BRACE3018308,

[2088] BRACE3018963, BRACE3019055, BRACE3019071, BRACE3019084, BRACE3019570, BRACE3019611, BRACE3019817, BRACE3019828, BRACE3019941, BRACE3020151, BRACE3020194, BRACE3020286, BRACE3020356, BRACE3020594, BRACE3020669, BRACE3020671, BRACE3020890, BRACE3021148, BRACE3021430, BRACE3021517, BRACE3021805, BRACE3022051, BRACE3022303, BRACE3022312, BRACE3022340, BRACE3022847, BRACE3023604, BRACE3023912, BRACE3024073, BRACE3024359, BRACE3024379, BRACE3024444, BRACE3024497, BRACE3024537, BRACE3024659, BRACE3024662, BRACE3024879, BRACE3025153, BRACE3025302, BRACE3025457, BRACE3025531, BRACE3025627, BRACE3025630, BRACE3025719, BRACE3026008, BRACE3026075, BRACE3026161, BRACE3026290, BRACE3026345, BRACE3026456,

[2089] BRACE3026735, BRACE3026802, BRACE3026844, BRACE3026947, BRACE3026993, BRACE3027242, BRACE3027256, BRACE3027326, BRACE3027478, BRACE3027480, BRACE3027976, BRACE3028214, BRACE3028241, BRACE3028360, BRACE3028895, BRACE3028998, BRACE3029005, BRACE3029021, BRACE3029205, BRACE3029447, BRACE3030057, BRACE3030103, BRACE3030748, BRACE3030866, BRACE3031161, BRACE3031184, BRACE3031185, BRACE3031315, BRACE3031372, BRACE3031579, BRACE3031728, BRACE3031838, BRACE3031843, BRACE3032427, BRACE3032455, BRACE3032537, BRACE3032538, BRACE3032631, BRACE3032771, BRACE3032980, BRACE3032983, BRACE3033525, BRACE3034159, BRACE3034183, BRACE3034389, BRACE3034964, BRACE3034993, BRACE3035168, BRACE3035227, BRACE3036156,

[2090] BRACE3036271, BRACE3037612, BRACE3037637, BRACE3037803, BRACE3038012, BRACE3038030, BRACE3038569, BRACE3038570, BRACE3038687, BRACE3038760, BRACE3039288, BRACE3039358, BRACE3039378, BRACE3039454, BRACE3040012, BRACE3040239, BRACE3040504, BRACE3040644, BRACE3040856, BRACE3040863, BRACE3041059, BRACE3041162, BRACE3041827, BRACE3042046, BRACE3042210, BRACE3042326, BRACE3042409, BRACE3042432, BRACE3042594, BRACE3043597, BRACE3044090, BRACE3044172, BRACE3044247, BRACE3044377, BRACE3044389, BRACE3044495, BRACE3045011, BRACE3045033, BRACE3045078, BRACE3045145, BRACE3045424, BRACE3045708, BRACE3045981, BRACE3046049, BRACE3046152, BRACE3046294, BRACE3046450, BRACE3046466, BRACE3046491, BRACE3046609,

[2091] BRACE3046762, BRACE3046837, BRACE3046855, BRACE3046966, BRACE3047018, BRACE3047482, BRACE3047801, BRALZ1000047, BRALZ1000103, BRALZ2000189, BRALZ2000263, BRALZ2000988, BRALZ2001038, BRALZ2001279, BRALZ2001350, BRALZ2001445, BRALZ2001559, BRALZ2001743, BRALZ2001834, BRALZ2002174, BRALZ2002418, BRALZ2002477, BRALZ2003119, BRALZ2003330, BRALZ2003453, BRALZ2003525, BRALZ2004397, BRALZ2005467, BRALZ2005471, BRALZ2005888, BRALZ2005950, BRALZ2005992, BRALZ2006288, BRALZ2006474, BRALZ2006560, BRALZ2006734, BRALZ2006800, BRALZ2006976, BRALZ2007376, BRALZ2007545, BRALZ2007576, BRALZ2007661, BRALZ2007790, BRALZ2007793, BRALZ2007952, BRALZ2008031, BRALZ2008166, BRALZ2008462, BRALZ2008617, BRALZ2008696,

[2092] BRALZ2008763, BRALZ2008869, BRALZ2008930, BRALZ2009446, BRALZ2009486, BRALZ2010186, BRALZ2010842, BRALZ2011337, BRALZ2011796, BRALZ2011880, BRALZ2012050, BRALZ2012183, BRALZ2012848, BRALZ2013621, BRALZ2013690, BRALZ2014054, BRALZ2014316, BRALZ2014484, BRALZ2014951, BRALZ2015168, BRALZ2015811, BRALZ2016085, BRALZ2016498, BRALZ2017359, BRALZ2017531, BRALZ2017607, BRALZ2017620, BRALZ2017844, BRALZ2018342, BRALZ2018492, BRALZ2018834, BRALZ2019047, BRAMY1000095, BRAMY1000098, BRAMY1000130, BRAMY1000157, BRAMY2000021, BRAMY2000025, BRAMY2000052, BRAMY2000076, BRAMY2000086, BRAMY2000151, BRAMY2000181, BRAMY2000196, BRAMY2000231, BRAMY2000277, BRAMY2000388, BRAMY2000411, BRAMY2000508, BRAMY2000585,

[2093] BRAMY2000653, BRAMY2000814, BRAMY2000893, BRAMY2000946, BRAMY2000981, BRAMY2000987, BRAMY2001068, BRAMY2001114, BRAMY2001203, BRAMY2001282, BRAMY2001367, BRAMY2001427, BRAMY2001473, BRAMY2001678, BRAMY2002005, BRAMY2002044, BRAMY2002072, BRAMY2002158, BRAMY2002311, BRAMY2002339, BRAMY2002364, BRAMY2002369, BRAMY2002479, BRAMY2002493, BRAMY2002525, BRAMY2002584, BRAMY2002604, BRAMY2002621, BRAMY2002638, BRAMY2002739, BRAMY2002799, BRAMY2002853, BRAMY2002862, BRAMY2002956, BRAMY2003008, BRAMY2003037, BRAMY2003117, BRAMY2003287, BRAMY2003325, BRAMY2003529, BRAMY2003538, BRAMY2003585, BRAMY2003634, BRAMY2003653, BRAMY2003681, BRAMY2003893, BRAMY2003897, BRAMY2003898, BRAMY2003904, BRAMY2003926,

[2094] BRAMY2003929, BRAMY2004031, BRAMY2004058, BRAMY2004183, BRAMY2004335, BRAMY2004351, BRAMY2004352, BRAMY2004387, BRAMY2004492, BRAMY2004521, BRAMY2004524, BRAMY2004537, BRAMY2004542, BRAMY2004756, BRAMY2004771, BRAMY2005052, BRAMY2005064, BRAMY2005094, BRAMY2005151, BRAMY2005182, BRAMY2005244, BRAMY2005391, BRAMY2005488, BRAMY2005576, BRAMY2005648, BRAMY2005662, BRAMY2005708, BRAMY2005711, BRAMY2006092, BRAMY2006118, BRAMY2006149, BRAMY2006366, BRAMY2006375, BRAMY2006397, BRAMY2006411, BRAMY2006459, BRAMY2006466, BRAMY2006659, BRAMY2006779, BRAMY2006809, BRAMY2006879, BRAMY2007043, BRAMY2007078, BRAMY2007110, BRAMY2007185, BRAMY2007244, BRAMY2007249, BRAMY2007255, BRAMY2007287, BRAMY2007308,

[2095] BRAMY2007411, BRAMY2007458, BRAMY2007486, BRAMY2007546, BRAMY2007594, BRAMY2007610, BRAMY2007653, BRAMY2007753, BRAMY2007859, BRAMY2008333, BRAMY2008563, BRAMY2008583, BRAMY2008977, BRAMY2008979, BRAMY2009023, BRAMY2009034, BRAMY2009105, BRAMY2009123, BRAMY2009192, BRAMY2009344, BRAMY2009349, BRAMY2009394, BRAMY2009489, BRAMY2009528, BRAMY2009557, BRAMY2009612, BRAMY2009693, BRAMY2009934, BRAMY2010068, BRAMY2010135, BRAMY2010145, BRAMY2010171, BRAMY2010208, BRAMY2010239, BRAMY2010272, BRAMY2010290, BRAMY2010366, BRAMY2010395, BRAMY2010441, BRAMY2010442, BRAMY2010581, BRAMY2010798, BRAMY2010808, BRAMY2010919, BRAMY2011064, BRAMY2011105, BRAMY2011178, BRAMY2011196, BRAMY2011216, BRAMY2011253,

[2096] BRAMY2011446, BRAMY2011480, BRAMY2011639, BRAMY2011679, BRAMY2011811, BRAMY2011841, BRAMY2011846, BRAMY2011849, BRAMY2011872, BRAMY2011961, BRAMY2012017, BRAMY2012119, BRAMY2012162, BRAMY2012163, BRAMY2012277, BRAMY2012340, BRAMY2012426, BRAMY2012497, BRAMY2012517, BRAMY2012536, BRAMY2012555, BRAMY2012568, BRAMY2012691, BRAMY2012721, BRAMY2012731, BRAMY2012776, BRAMY2012880, BRAMY2012881, BRAMY2013200, BRAMY2013216, BRAMY2013405, BRAMY2013414, BRAMY2013572, BRAMY2013590, BRAMY2013722, BRAMY2013736, BRAMY2013944, BRAMY2013975, BRAMY2014019, BRAMY2014387, BRAMY2014462, BRAMY2014469, BRAMY2014541, BRAMY2014754, BRAMY2014813, BRAMY2015211, BRAMY2015311, BRAMY2015420, BRAMY2015503, BRAMY2015516,

[2097] BRAMY2015550, BRAMY2015551, BRAMY2015559, BRAMY2015688, BRAMY2015782, BRAMY2015833, BRAMY2015855, BRAMY2015890, BRAMY2015911, BRAMY2015925, BRAMY2016002, BRAMY2016020, BRAMY2016070, BRAMY2016325, BRAMY2016327, BRAMY2016386, BRAMY2016771, BRAMY2016892, BRAMY2016938, BRAMY2016953, BRAMY2017014, BRAMY2017249, BRAMY2017348, BRAMY2017450, BRAMY2017455, BRAMY2017528, BRAMY2017864, BRAMY2018027, BRAMY2018106, BRAMY2018122, BRAMY2018126, BRAMY2018272, BRAMY2018273, BRAMY2018279, BRAMY2018295, BRAMY2018308, BRAMY2018396, BRAMY2018467, BRAMY2018635, BRAMY2019055, BRAMY2019111, BRAMY2019277, BRAMY2019300, BRAMY2019468, BRAMY2019509, BRAMY2019643, BRAMY2019710, BRAMY2019985, BRAMY2019989, BRAMY2020050,

[2098] BRAMY2020058, BRAMY2020270, BRAMY2020354, BRAMY2020355, BRAMY2020412, BRAMY2020427, BRAMY2020445, BRAMY2020466, BRAMY2020520, BRAMY2020574, BRAMY2020634, BRAMY2020713, BRAMY2021040, BRAMY2021063, BRAMY2021098, BRAMY2021139, BRAMY2021142, BRAMY2021276, BRAMY2021310, BRAMY2021388, BRAMY2021498, BRAMY2021523, BRAMY2021710, BRAMY2021732, BRAMY2021746, BRAMY2021825, BRAMY2021867, BRAMY2021962, BRAMY2021982, BRAMY2022052, BRAMY2022160, BRAMY2022168, BRAMY2022263, BRAMY2022301, BRAMY2022320, BRAMY2022383, BRAMY2022445, BRAMY2022454, BRAMY2022532, BRAMY2022723, BRAMY2022786, BRAMY2022796, BRAMY2022929, BRAMY2022980, BRAMY2022984, BRAMY2023060, BRAMY2023110, BRAMY2023115, BRAMY2023161, BRAMY2023172,

[2099] BRAMY2023238, BRAMY2023327, BRAMY2023358, BRAMY2023406, BRAMY2023482, BRAMY2023514, BRAMY2023719, BRAMY2023729, BRAMY2023786, BRAMY2023852, BRAMY2024004, BRAMY2024073, BRAMY2024312, BRAMY2024374, BRAMY2024390, BRAMY2024416, BRAMY2024449, BRAMY2024489, BRAMY2024497, BRAMY2024514, BRAMY2024530, BRAMY2024535, BRAMY2024545, BRAMY2024576, BRAMY2024593, BRAMY2024711, BRAMY2024715, BRAMY2024728, BRAMY2024827, BRAMY2024849, BRAMY2025024, BRAMY2025032, BRAMY2025121, BRAMY2025175, BRAMY2025218, BRAMY2025230, BRAMY2025272, BRAMY2025277, BRAMY2025495, BRAMY2025812, BRAMY2025996, BRAMY2026009, BRAMY2026091, BRAMY2026168, BRAMY2026300, BRAMY2026347, BRAMY2026395, BRAMY2026405, BRAMY2026533, BRAMY2026538,

[2100] BRAMY2026685, BRAMY2026713, BRAMY2026778, BRAMY2026824, BRAMY2026899, BRAMY2026902, BRAMY2026904, BRAMY2026976, BRAMY2027073, BRAMY2027114, BRAMY2027140, BRAMY2027242, BRAMY2027396, BRAMY2027451, BRAMY2027461, BRAMY2027467, BRAMY2027714, BRAMY2027717, BRAMY2027739, BRAMY2027752, BRAMY2027782, BRAMY2028072, BRAMY2028183, BRAMY2028188, BRAMY2028472, BRAMY2028491, BRAMY2028516, BRAMY2028565, BRAMY2028593, BRAMY2028682, BRAMY2028783, BRAMY2028856, BRAMY2028914, BRAMY2029204, BRAMY2029602, BRAMY2030098, BRAMY2030109, BRAMY2030206, BRAMY2030477, BRAMY2030545, BRAMY2030607, BRAMY2030702, BRAMY2030703, BRAMY2030768, BRAMY2030799, BRAMY2030859, BRAMY2030915, BRAMY2031317, BRAMY2031377, BRAMY2031442,

[2101] BRAMY2032014, BRAMY2032231, BRAMY2032242, BRAMY2032290, BRAMY2032311, BRAMY2032317, BRAMY2032344, BRAMY2032589, BRAMY2032678, BRAMY2032696, BRAMY2032777, BRAMY2032994, BRAMY2033003, BRAMY2033116, BRAMY2033240, BRAMY2033267, BRAMY2033316, BRAMY2033332, BRAMY2033506, BRAMY2033594, BRAMY2033895, BRAMY2033914, BRAMY2034072, BRAMY2034185, BRAMY2034187, BRAMY2034305, BRAMY2034561, BRAMY2034920, BRAMY2034993, BRAMY2035070, BRAMY2035449, BRAMY2035545, BRAMY2035606, BRAMY2035718, BRAMY2035719, BRAMY2035801, BRAMY2035869, BRAMY2035923, BRAMY2036076, BRAMY2036079, BRAMY2036254, BRAMY2036266, BRAMY2036387, BRAMY2036396, BRAMY2036567, BRAMY2036615, BRAMY2036699, BRAMY2036913, BRAMY2036918, BRAMY2036968,

[2102] BRAMY2037147, BRAMY2037328, BRAMY2037609, BRAMY2037629, BRAMY2037800, BRAMY2037823, BRAMY2037971, BRAMY2038100, BRAMY2038128, BRAMY2038317, BRAMY2038475, BRAMY2038484, BRAMY2038516, BRAMY2038832, BRAMY2038846, BRAMY2038887, BRAMY2038904, BRAMY2039287, BRAMY2039300, BRAMY2039314, BRAMY2039341, BRAMY2039630, BRAMY2039695, BRAMY2039728, BRAMY2039872, BRAMY2040051, BRAMY2040159, BRAMY2040214, BRAMY2040478, BRAMY2040592, BRAMY2040915, BRAMY2041261, BRAMY2041347, BRAMY2041378, BRAMY2041384, BRAMY2041434, BRAMY2041507, BRAMY2041542, BRAMY2041738, BRAMY2042122, BRAMY2042131, BRAMY2042178, BRAMY2042195, BRAMY2042244, BRAMY2042549, BRAMY2042596, BRAMY2042612, BRAMY2042641, BRAMY2042711, BRAMY2042760,

[2103] BRAMY2042804, BRAMY2042899, BRAMY2042918, BRAMY2043069, BRAMY2043103, BRAMY2043314, BRAMY2043345, BRAMY2044246, BRAMY2044317, BRAMY2044349, BRAMY2044686, BRAMY2044838, BRAMY2045036, BRAMY2045299, BRAMY2045471, BRAMY2045530, BRAMY2046109, BRAMY2046478, BRAMY2046489, BRAMY2046537, BRAMY2046667, BRAMY2046742, BRAMY2046871, BRAMY2046984, BRAMY2046989, BRAMY2047169, BRAMY2047280, BRAMY2047420, BRAMY2047676, BRAMY2047692, BRAMY2047746, BRAMY2047751, BRAMY2047765, BRAMY2047884, BRAMY2047948, BRAMY3000206, BRAMY3000210, BRAMY3000213, BRAMY3000224, BRAMY3000254, BRAMY3000307, BRAMY3000692, BRAMY3001356, BRAMY3001401, BRAMY3001409, BRAMY3001794, BRAMY3002120, BRAMY3002312, BRAMY3002329, BRAMY3002458,

[2104] BRAMY3002508, BRAMY3002620, BRAMY3002803, BRAMY3002805, BRAMY3002886, BRAMY3003109, BRAMY3003205, BRAMY3003310, BRAMY3003566, BRAMY3003723, BRAMY3004126, BRAMY3004224, BRAMY3004364, BRAMY3004672, BRAMY3004800, BRAMY3004900, BRAMY3004919, BRAMY3005091, BRAMY3005656, BRAMY3005932, BRAMY3006032, BRAMY3006297, BRAMY3006761, BRAMY3007078, BRAMY3007206, BRAMY3007311, BRAMY3007350, BRAMY3007449, BRAMY3007471, BRAMY3007609, BRAMY3007723, BRAMY3007968, BRAMY3008088, BRAMY3008096, BRAMY3008335, BRAMY3008466, BRAMY3008505, BRAMY3008650, BRAMY3008937, BRAMY3009158, BRAMY3009207, BRAMY3009491, BRAMY3009556, BRAMY3009782, BRAMY3009811, BRAMY3009904, BRAMY3010264, BRAMY3010321, BRAMY3010411, BRAMY3010492,

[2105] BRAMY3010603, BRAMY3010654, BRAMY4000089, BRAMY4000095, BRAMY4000229, BRAMY4000277, BRAMY4000915, BRAMY4000962, BRAMY4001173, BRAMY4001200, BRAMY4001234, BRAMY4001449, BRAMY4001652, BRAMY4001863, BRAMY4001913, BRAMY4002575, BRASW1000053, BRASW1000125, BRAWH1000001, BRAWH1000002, BRAWH1000083, BRAWH1000094, BRAWH1000116, BRAWH1000130, BRAWH1000157, BRAWH1000164, BRAWH1000168, BRAWH1000174, BRAWH1000180, BRAWH1000369, BRAWH2000034, BRAWH2000048, BRAWH2000071, BRAWH2000093, BRAWH2000109, BRAWH2000131, BRAWH2000142, BRAWH2000169, BRAWH2000177, BRAWH2000218, BRAWH2000232, BRAWH2000248, BRAWH2000256, BRAWH2000323, BRAWH2000353, BRAWH2000370, BRAWH2000409, BRAWH2000417, BRAWH2000443, BRAWH2000471,

[2106] BRAWH2000476, BRAWH2000482, BRAWH2000494, BRAWH2000500, BRAWH2000503, BRAWH2000554, BRAWH2000595, BRAWH2000643, BRAWH2000651, BRAWH2000682, BRAWH2000752, BRAWH2000859, BRAWH2000866, BRAWH2000892, BRAWH2000901, BRAWH2000926, BRAWH2000984, BRAWH2001019, BRAWH2001052, BRAWH2001103, BRAWH2001129, BRAWH2001137, BRAWH2001159, BRAWH2001203, BRAWH2001238, BRAWH2001239, BRAWH2001255, BRAWH2001355, BRAWH2001378, BRAWH2001395, BRAWH2001406, BRAWH2001418, BRAWH2001436, BRAWH2001438, BRAWH2001459, BRAWH2001461, BRAWH2001492, BRAWH2001503, BRAWH2001519, BRAWH2001535, BRAWH2001589, BRAWH2001666, BRAWH2001671, BRAWH2001679, BRAWH2001686, BRAWH2001701, BRAWH2001842, BRAWH2001873, BRAWH2001940, BRAWH2001973,

[2107] BRAWH2002047, BRAWH2002060, BRAWH2002062, BRAWH2002125, BRAWH2002191, BRAWH2002318, BRAWH2002333, BRAWH2002352, BRAWH2002383, BRAWH2002549, BRAWH2002601, BRAWH2002623, BRAWH2002630, BRAWH2002635, BRAWH2002662, BRAWH2002679, BRAWH2002725, BRAWH2002761, BRAWH2002861, BRAWH2002911, BRAWH2002963, BRAWH2002976, BRAWH2003000, BRAWH2003025, BRAWH2003135, BRAWH2003240, BRAWH2003307, BRAWH2003355, BRAWH2003366, BRAWH2003689, BRAWH2003832, BRAWH2003948, BRAWH2003964, BRAWH2004044, BRAWH2004068, BRAWH2004078, BRAWH2004136, BRAWH2004217, BRAWH2004580, BRAWH2004731, BRAWH2004779, BRAWH2004842, BRAWH2004884, BRAWH2004923, BRAWH2005008, BRAWH2005068, BRAWH2005074, BRAWH2005315, BRAWH2005524, BRAWH2005533,

[2108] BRAWH2005578, BRAWH2005812, BRAWH2005974, BRAWH2005998, BRAWH2006083, BRAWH2006207, BRAWH2006301, BRAWH2006395, BRAWH2006405, BRAWH2006450, BRAWH2006493, BRAWH2006526, BRAWH2006543, BRAWH2006760, BRAWH2006960, BRAWH2006989, BRAWH2006996, BRAWH2007069, BRAWH2007308, BRAWH2007406, BRAWH2007550, BRAWH2007570, BRAWH2007591, BRAWH2007658, BRAWH2007808, BRAWH2007825, BRAWH2007862, BRAWH2007890, BRAWH2008128, BRAWH2008219, BRAWH2008292, BRAWH2008297, BRAWH2008366, BRAWH2008380, BRAWH2008540, BRAWH2008577, BRAWH2008790, BRAWH2008903, BRAWH2008956, BRAWH2008993, BRAWH2009112, BRAWH2009227, BRAWH2009238, BRAWH2009261, BRAWH2009263, BRAWH2009298, BRAWH2009304, BRAWH2009307, BRAWH2009360, BRAWH2009393,

[2109] BRAWH2009485, BRAWH2009490, BRAWH2009558, BRAWH2009590, BRAWH2009678, BRAWH2009695, BRAWH2009907, BRAWH2010000, BRAWH2010069, BRAWH2010084, BRAWH2010136, BRAWH2010318, BRAWH2010354, BRAWH2010364, BRAWH2010536, BRAWH2010552, BRAWH2010584, BRAWH2010618, BRAWH2010619, BRAWH2011066, BRAWH2011079, BRAWH2011096, BRAWH2011155, BRAWH2011166, BRAWH2011204, BRAWH2011294, BRAWH2011343, BRAWH2011400, BRAWH2011762, BRAWH2011795, BRAWH2011796, BRAWH2011812, BRAWH2011860, BRAWH2011958, BRAWH2012054, BRAWH2012077, BRAWH2012161, BRAWH2012162, BRAWH2012258, BRAWH2012277, BRAWH2012326, BRAWH2012538, BRAWH2012540, BRAWH2012619, BRAWH2012698, BRAWH2012749, BRAWH2012827, BRAWH2012963, BRAWH2013047, BRAWH2013219,

[2110] BRAWH2013294, BRAWH2013748, BRAWH2013866, BRAWH2013871, BRAWH2013914, BRAWH2013941, BRAWH2013955, BRAWH2014053, BRAWH2014234, BRAWH2014414, BRAWH2014473, BRAWH2014511, BRAWH2014717, BRAWH2014729, BRAWH2014876, BRAWH2014934, BRAWH2014954, BRAWH2015247, BRAWH2015349, BRAWH2015375, BRAWH2015385, BRAWH2015595, BRAWH2015728, BRAWH2015853, BRAWH2015866, BRAWH2016028, BRAWH2016106, BRAWH2016160, BRAWH2016166, BRAWH2016209, BRAWH2016221, BRAWH2016223, BRAWH2016269, BRAWH2016305, BRAWH2016439, BRAWH2016514, BRAWH2016562, BRAWH2016655, BRAWH2016679, BRAWH2016702, BRAWH2016724, BRAWH2016785, BRAWH2016792, BRAWH2016800, BRAWH2017103, BRAWH2017250, BRAWH2017294, BRAWH2017305, BRAWH2017379, BRAWH2017407,

[2111] BRAWH2017433, BRAWH2017523, BRAWH2017534, BRAWH2017542, BRAWH2017635, BRAWH2017913, BRAWH2018206, BRAWH2018267, BRAWH2018282, BRAWH2018317, BRAWH2018506, BRAWH2018514, BRAWH2018527, BRAWH2018601, BRAWH2018729, BRAWH2018745, BRAWH2018875, BRAWH2019053, BRAWH2019055, BRAWH2019198, BRAWH3000078, BRAWH3000100, BRAWH3000166, BRAWH3000314, BRAWH3000329, BRAWH3000410, BRAWH3000446, BRAWH3000491, BRAWH3000604, BRAWH3000884, BRAWH3001053, BRAWH3001319, BRAWH3001326, BRAWH3001475, BRAWH3001636, BRAWH3001638, BRAWH3001712, BRAWH3001760, BRAWH3001783, BRAWH3001833, BRAWH3001879, BRAWH3001891, BRAWH3002433, BRAWH3002467, BRAWH3002513, BRAWH3002600, BRAWH3002819, BRAWH3003019, BRAWH3003136, BRAWH3003244,

[2112] BRAWH3003343, BRAWH3003411, BRAWH3003522, BRAWH3003573, BRAWH3003598, BRAWH3003801, BRAWH3003975, BRAWH3004335, BRAWH3004453, BRAWH3004530, BRAWH3004666, BRAWH3005037, BRAWH3005047, BRAWH3005132, BRAWH3005146, BRAWH3005292, BRAWH3005300, BRAWH3005422, BRAWH3005534, BRAWH3005886, BRAWH3005892, BRAWH3005896, BRAWH3005912, BRAWH3006547, BRAWH3006548, BRAWH3006761, BRAWH3006792, BRAWH3007129, BRAWH3007221, BRAWH3007441, BRAWH3007455, BRAWH3007506, BRAWH3007726, BRAWH3007783, BRAWH3008167, BRAWH3008341, BRAWH3008559, BRAWH3008697, BRAWH3008867, BRAWH3009017, BRAWH3009285, BRAWH3009297, BRAWH3009961, BRAWH3010560, BRAWH3010602, BRAWH3010657, BRAWH3010726, BRAWH3010833, BRAWH3011101, BRAWH3011331,

[2113] BRAWH3011402, BRAWH3011577, BRAWH3011623, BRAWH3011637, BRAWH3011685, BRAWH3011907, BRAWH3011929, BRAWH3012005, BRAWH3012662, BRAWH3012779, BRAWH3013009, BRAWH3013049, BRAWH3013197, BRAWH3013264, BRAWH3013508, BRAWH3014639, BRAWH3015017, BRAWH3015175, BRAWH3015260, BRAWH3015610, BRAWH3015825, BRAWH3016123, BRAWH3016271, BRAWH3016715, BRAWH3017260, BRAWH3017477, BRAWH3017537, BRAWH3017980, BRAWH3018369, BRAWH3018548, BRAWH3018969, BRAWH3019026, BRAWH3019529, BRAWH3019594, BRAWH3019629, BRAWH3019820, BRAWH3020200, BRAWH3020318, BRAWH3020486, BRAWH3020884, BRAWH3020928, BRAWH3021012, BRAWH3021580, BRAWH3021641, BRAWH3021643, BRAWH3021724, BRAWH3022347, BRAWH3022431, BRAWH3022459, BRAWH3022542,

[2114] BRAWH3022719, BRAWH3022866, BRAWH3022900, BRAWH3023156, BRAWH3023168, BRAWH3023172, BRAWH3023274, BRAWH3023421, BRAWH3024231, BRAWH3024242, BRAWH3024469, BRAWH3024506, BRAWH3024613, BRAWH3024989, BRAWH3026349, BRAWH3026394, BRAWH3026529, BRAWH3027420, BRAWH3027440, BRAWH3027574, BRAWH3027607, BRAWH3027616, BRAWH3027675, BRAWH3027806, BRAWH3027880, BRAWH3027927, BRAWH3028202, BRAWH3028223, BRAWH3028306, BRAWH3028461, BRAWH3028645, BRAWH3028754, BRAWH3028796, BRAWH3029254, BRAWH3029313, BRAWH3029538, BRAWH3029556, BRAWH3030613, BRAWH3030772, BRAWH3030810, BRAWH3030892, BRAWH3030910, BRAWH3030950, BRAWH3031054, BRAWH3031710, BRAWH3031902, BRAWH3032298, BRAWH3032340, BRAWH3032571, BRAWH3032620,

[2115] BRAWH3032930, BRAWH3033117, BRAWH3033293, BRAWH3033448, BRAWH3033513, BRAWH3034097, BRAWH3034114, BRAWH3034134, BRAWH3034668, BRAWH3034775, BRAWH3034890, BRAWH3035154, BRAWH3035403, BRAWH3035904, BRAWH3035914, BRAWH3035936, BRAWH3036077, BRAWH3036247, BRAWH3036270, BRAWH3036561, BRAWH3036738, BRAWH3036951, BRAWH3037394, BRAWH3037533, BRAWH3037979, BRAWH3038055, BRAWH3038230, BRAWH3038252, BRAWH3038324, BRCAN1000065, BRCAN1000076, BRCAN1000105, BRCAN1000149, BRCAN2000148, BRCAN2000149, BRCAN2000209, BRCAN2000239, BRCAN2000346, BRCAN2000364, BRCAN2000383, BRCAN2000418, BRCAN2000523, BRCAN2000541, BRCAN2000577, BRCAN2000620, BRCAN2000639, BRCAN2000763, BRCAN2000832, BRCAN2000923, BRCAN2001223,

[2116] BRCAN2001866, BRCAN2002173, BRCAN2002416, BRCAN2002473, BRCAN2002562, BRCAN2002662, BRCAN2002826, BRCAN2002854, BRCAN2002856, BRCAN2002892, BRCAN2002944, BRCAN2002948, BRCAN2003070, BRCAN2003269, BRCAN2003628, BRCAN2003703, BRCAN2003746, BRCAN2003814, BRCAN2003987, BRCAN2004173, BRCAN2004355, BRCAN2004371, BRCAN2004653, BRCAN2004699, BRCAN2005436, BRCAN2005449, BRCAN2006019, BRCAN2006051, BRCAN2006063, BRCAN2006117, BRCAN2006174, BRCAN2006290, BRCAN2006297, BRCAN2006323, BRCAN2006401, BRCAN2006411, BRCAN2006450, BRCAN2006955, BRCAN2007119, BRCAN2007144, BRCAN2007426, BRCAN2007525, BRCAN2007700, BRCAN2008494, BRCAN2008528, BRCAN2008701, BRCAN2008894, BRCAN2009156, BRCAN2009168, BRCAN2009203,

[2117] BRCAN2010374, BRCAN2010376, BRCAN2010547, BRCAN2010581, BRCAN2010665, BRCAN2011254, BRCAN2011316, BRCAN2011602, BRCAN2011946, BRCAN2012110, BRCAN2012355, BRCAN2012402, BRCAN2012408, BRCAN2012481, BRCAN2012613, BRCAN2012713, BRCAN2012929, BRCAN2013655, BRCAN2013660, BRCAN2014143, BRCAN2014229, BRCAN2014370, BRCAN2014602, BRCAN2014652, BRCAN2014788, BRCAN2014881, BRCAN2014952, BRCAN2015371, BRCAN2015402, BRCAN2015464, BRCAN2015719, BRCAN2015757, BRCAN2015886, BRCAN2016025, BRCAN2016046, BRCAN2016174, BRCAN2016433, BRCAN2016762, BRCAN2016814, BRCAN2017442, BRCAN2017905, BRCAN2018240, BRCAN2018269, BRCAN2018490, BRCAN2018566, BRCAN2018667, BRCAN2018748, BRCAN2018935, BRCAN2019002, BRCAN2019387,

[2118] BRCAN2019773, BRCAN2019907, BRCAN2020234, BRCAN2020331, BRCAN2020412, BRCAN2020467, BRCAN2020710, BRCAN2020880, BRCAN2021024, BRCAN2021028, BRCAN2021325, BRCAN2021452, BRCAN2021669, BRCAN2021718, BRCAN2022191, BRCAN2022472, BRCAN2022474, BRCAN2023347, BRCAN2023724, BRCAN2024451, BRCAN2024563, BRCAN2024572, BRCAN2025009, BRCAN2025093, BRCAN2025349, BRCAN2025368, BRCAN2025712, BRCAN2025982, BRCAN2026117, BRCAN2026340, BRCAN2026711, BRCAN2027150, BRCAN2027310, BRCAN2027334, BRCAN2027355, BRCAN2027513, BRCAN2027593, BRCAN2027970, BRCAN2028021, BRCAN2028040, BRCAN2028319, BRCAN2028338, BRCAN2028378, BRCAN2028460, BRCAN2028545, BRCAN2028634, BRCAN2028702, BRCOC1000087, BRCOC1000094, BRCOC2000004,

[2119] BRCOC2000047, BRCOC2000186, BRCOC2000333, BRCOC2000360, BRCOC2000404, BRCOC2000637, BRCOC2000670, BRCOC2000816, BRCOC2000850, BRCOC2001355, BRCOC2002085, BRCOC2002155, BRCOC2002323, BRCOC2002659, BRCOC2002664, BRCOC2002686, BRCOC2002751, BRCOC2002756, BRCOC2002777, BRCOC2002835, BRCOC2003100, BRCOC2003125, BRCOC2003187, BRCOC2003213, BRCOC2003513, BRCOC2003732, BRCOC2003740, BRCOC2004036, BRCOC2004175, BRCOC2004354, BRCOC2004455, BRCOC2004950, BRCOC2005542, BRCOC2005903, BRCOC2005951, BRCOC2006164, BRCOC2006189, BRCOC2006243, BRCOC2006270, BRCOC2006639, BRCOC2006942, BRCOC2007034, BRCOC2007593, BRCOC2007733, BRCOC2007769, BRCOC2008064, BRCOC2008225, BRCOC2008642, BRCOC2008993, BRCOC2009052,

[2120] BRCOC2009196, BRCOC2009380, BRCOC2009638, BRCOC2009937, BRCOC2010115, BRCOC2010730, BRCOC2010980, BRCOC2010994, BRCOC2011010, BRCOC2011398, BRCOC2011418, BRCOC2011506, BRCOC2011769, BRCOC2011996, BRCOC2012229, BRCOC2012551, BRCOC2012813, BRCOC2013448, BRCOC2013573, BRCOC2013675, BRCOC2013780, BRCOC2014013, BRCOC2014033, BRCOC2014748, BRCOC2014833, BRCOC2015597, BRCOC2015824, BRCOC2015908, BRCOC2015944, BRCOC2016525, BRCOC2016661, BRCOC2017061, BRCOC2017652, BRCOC2017856, BRCOC2018775, BRCOC2018877, BRCOC2019255, BRCOC2019549, BRCOC2019841, BRCOC2019896, BRCOC2019903, BRCOC2019934, BRCOC2020122, BRCOC2020142, BRHIP1000058, BRHIP1000072, BRHIP1000129, BRHIP1000258, BRHIP2000021, BRHIP2000079,

[2121] BRHIP2000087, BRHIP2000163, BRHIP2000210, BRHIP2000239, BRHIP2000245, BRHIP2000359, BRHIP2000445, BRHIP2000506, BRHIP2000532, BRHIP2000621, BRHIP2000691, BRHIP2000819, BRHIP2000826, BRHIP2000920, BRHIP2001099, BRHIP2001686, BRHIP2001782, BRHIP2001802, BRHIP2001805, BRHIP2001886, BRHIP2001927, BRHIP2002122, BRHIP2002143, BRHIP2002172, BRHIP2002339, BRHIP2002346, BRHIP2002510, BRHIP2002664, BRHIP2002722, BRHIP2002929, BRHIP2003048, BRHIP2003062, BRHIP2003242, BRHIP2003272, BRHIP2003748, BRHIP2003786, BRHIP2003828, BRHIP2003917, BRHIP2004312, BRHIP2004355, BRHIP2004359, BRHIP2004814, BRHIP2004883, BRHIP2004902, BRHIP2005010, BRHIP2005236, BRHIP2005271, BRHIP2005354, BRHIP2005600, BRHIP2005719,

[2122] BRHIP2005724, BRHIP2005752, BRHIP2005932, BRHIP2006617, BRHIP2006782, BRHIP2006800, BRHIP2006819, BRHIP2006921, BRHIP2007307, BRHIP2007616, BRHIP2007690, BRHIP2007928, BRHIP2007969, BRHIP2008269, BRHIP2008389, BRHIP2008607, BRHIP2008756, BRHIP2008909, BRHIP2009019, BRHIP2009177, BRHIP2009340, BRHIP2009351, BRHIP2009414, BRHIP2009474, BRHIP2009617, BRHIP2009685, BRHIP2010309, BRHIP2010444, BRHIP2010487, BRHIP2010571, BRHIP2010593, BRHIP2010610, BRHIP2010723, BRHIP2010744, BRHIP2011080, BRHIP2011120, BRHIP2011199, BRHIP2011491, BRHIP2011508, BRHIP2011576, BRHIP2011616, BRHIP2011783, BRHIP2011838, BRHIP2011891, BRHIP2011933, BRHIP2012054, BRHIP2012059, BRHIP2012141, BRHIP2012314, BRHIP2012360,

[2123] BRHIP2012545, BRHIP2012580, BRHIP2012642, BRHIP2012750, BRHIP2012922, BRHIP2012923, BRHIP2012972, BRHIP2013447, BRHIP2013510, BRHIP2013699, BRHIP2013723, BRHIP2013958, BRHIP2013972, BRHIP2014063, BRHIP2014285, BRHIP2014291, BRHIP2014373, BRHIP2014386, BRHIP2014387, BRHIP2014954, BRHIP2015153, BRHIP2015356, BRHIP2015360, BRHIP2016005, BRHIP2016125, BRHIP2016788, BRHIP2016968, BRHIP2016990, BRHIP2017010, BRHIP2017315, BRHIP2017385, BRHIP2017404, BRHIP2017542, BRHIP2017553, BRHIP2017642, BRHIP2017714, BRHIP2017780, BRHIP2017945, BRHIP2018014, BRHIP2018369, BRHIP2018612, BRHIP2018635, BRHIP2018650, BRHIP2018719, BRHIP2018805, BRHIP2018998, BRHIP2019007, BRHIP2019047, BRHIP2019149, BRHIP2019177,

[2124] BRHIP2019186, BRHIP2019291, BRHIP2019494, BRHIP2019589, BRHIP2019641, BRHIP2019884, BRHIP2019972, BRHIP2020182, BRHIP2020509, BRHIP2020622, BRHIP2020695, BRHIP2020743, BRHIP2020842, BRHIP2020859, BRHIP2020930, BRHIP2021102, BRHIP2021289, BRHIP2021495, BRHIP2021615, BRHIP2021744, BRHIP2021870, BRHIP2021929, BRHIP2022006, BRHIP2022054, BRHIP2022221, BRHIP2022298, BRHIP2022467, BRHIP2022708, BRHIP2023071, BRHIP2023229, BRHIP2023272, BRHIP2023292, BRHIP2023309, BRHIP2023369, BRHIP2023438, BRHIP2023695, BRHIP2023735, BRHIP2023773, BRHIP2023860, BRHIP2023869, BRHIP2024046, BRHIP2024165, BRHIP2024201, BRHIP2024347, BRHIP2024549, BRHIP2024789, BRHIP2024941, BRHIP2025245, BRHIP2025366, BRHIP2025679,

[2125] BRHIP2025739, BRHIP2025797, BRHIP2026021, BRHIP2026155, BRHIP2026214, BRHIP2026288, BRHIP2026346, BRHIP2026557, BRHIP2026723, BRHIP2026877, BRHIP2027054, BRHIP2027077, BRHIP2027563, BRHIP2027685, BRHIP2027762, BRHIP2028187, BRHIP2028303, BRHIP2028330, BRHIP2028480, BRHIP2028583, BRHIP2028593, BRHIP2029176, BRHIP2029283, BRHIP2029393, BRHIP2029529, BRHIP3000060, BRHIP3000070, BRHIP3000081, BRHIP3000240, BRHIP3000377, BRHIP3000488, BRHIP3000526, BRHIP3000626, BRHIP3000859, BRHIP3000907, BRHIP3001076, BRHIP3001079, BRHIP3001141, BRHIP3001283, BRHIP3001338, BRHIP3001360, BRHIP3001481, BRHIP3001878, BRHIP3001964, BRHIP3002114, BRHIP3002124, BRHIP3002141, BRHIP3002363, BRHIP3002920, BRHIP3002931,

[2126] BRHIP3003063, BRHIP3003126, BRHIP3003306, BRHIP3003340, BRHIP3003395, BRHIP3003484, BRHIP3003644, BRHIP3003688, BRHIP3003961, BRHIP3003984, BRHIP3004193, BRHIP3004215, BRHIP3004416, BRHIP3004710, BRHIP3004725, BRHIP3004774, BRHIP3004786, BRHIP3004863, BRHIP3005037, BRHIP3005137, BRHIP3005142, BRHIP3005231, BRHIP3005307, BRHIP3005574, BRHIP3005673, BRHIP3005768, BRHIP3005801, BRHIP3005944, BRHIP3006279, BRHIP3006294, BRHIP3006390, BRHIP3006449, BRHIP3006683, BRHIP3006786, BRHIP3006950, BRHIP3007172, BRHIP3007183, BRHIP3007195, BRHIP3007239, BRHIP3007291, BRHIP3007409, BRHIP3007424, BRHIP3007483, BRHIP3007609, BRHIP3007640, BRHIP3007960, BRHIP3008183, BRHIP3008314, BRHIP3008344, BRHIP3008405,

[2127] BRHIP3008565, BRHIP3008598, BRHIP3008606, BRHIP3008691, BRHIP3008714, BRHIP3008997, BRHIP3009099, BRHIP3009140, BRHIP3009181, BRHIP3009318, BRHIP3009427, BRHIP3009448, BRHIP3009672, BRHIP3009753, BRHIP3010135, BRHIP3010289, BRHIP3010529, BRHIP3011082, BRHIP3011241, BRHIP3011269, BRHIP3011460, BRHIP3011567, BRHIP3011831, BRHIP3012185, BRHIP3012289, BRHIP3012357, BRHIP3012736, BRHIP3012745, BRHIP3012868, BRHIP3012997, BRHIP3013078, BRHIP3013271, BRHIP3013588, BRHIP3013698, BRHIP3013765, BRHIP3013897, BRHIP3014237, BRHIP3014675, BRHIP3015620, BRHIP3015751, BRHIP3015854, BRHIP3016032, BRHIP3016213, BRHIP3016302, BRHIP3016421, BRHIP3017109, BRHIP3017146, BRHIP3017256, BRHIP3017325, BRHIP3017558,

[2128] BRHIP3017637, BRHIP3017855, BRHIP3018278, BRHIP3019643, BRHIP3019824, BRHIP3019880, BRHIP3019956, BRHIP3020046, BRHIP3020155, BRHIP3020182, BRHIP3020733, BRHIP3021499, BRHIP3021534, BRHIP3021778, BRHIP3021987, BRHIP3022656, BRHIP3023922, BRHIP3024118, BRHIP3024533, BRHIP3024703, BRHIP3024725, BRHIP3024820, BRHIP3025161, BRHIP3025702, BRHIP3025795, BRHIP3025844, BRHIP3026052, BRHIP3026097, BRHIP3026231, BRHIP3026335, BRHIP3026651, BRHIP3027105, BRHIP3027137, BRHIP3027160, BRHIP3027191, BRHIP3027501, BRHIP3027594, BRHIP3027651, BRHIP3027854, BRHIP3027947, BRHIP3028570, BRHIP3028742, BRSSN1000056, BRSSN1000059, BRSSN1000092, BRSSN1000153, BRSSN2000097, BRSSN2000175, BRSSN2000197, BRSSN2000244,

[2129] BRSSN2000293, BRSSN2000295, BRSSN2000312, BRSSN2000518, BRSSN2000566, BRSSN2000684, BRSSN2000715, BRSSN2000832, BRSSN2001213, BRSSN2001275, BRSSN2001342, BRSSN2001426, BRSSN2001503, BRSSN2001579, BRSSN2001758, BRSSN2001810, BRSSN2001869, BRSSN2002857, BRSSN2002859, BRSSN2003012, BRSSN2003086, BRSSN2003093, BRSSN2003820, BRSSN2003841, BRSSN2003937, BRSSN2004142, BRSSN2004303, BRSSN2004304, BRSSN2004496, BRSSN2004657, BRSSN2004679, BRSSN2004686, BRSSN2004710, BRSSN2004719, BRSSN2005847, BRSSN2006133, BRSSN2006390, BRSSN2006575, BRSSN2006611, BRSSN2006644, BRSSN2006892, BRSSN2007076, BRSSN2007168, BRSSN2007202, BRSSN2007338, BRSSN2007464, BRSSN2007504, BRSSN2007819, BRSSN2008125, BRSSN2008419,

[2130] BRSSN2008464, BRSSN2008549, BRSSN2008797, BRSSN2009119, BRSSN2009378, BRSSN2009389, BRSSN2009395, BRSSN2009627, BRSSN2009630, BRSSN2009702, BRSSN2010019, BRSSN2010110, BRSSN2010587, BRSSN2010596, BRSSN2010830, BRSSN2011262, BRSSN2012081, BRSSN2012103, BRSSN2012157, BRSSN2012198, BRSSN2012254, BRSSN2012439, BRSSN2012622, BRSSN2012691, BRSSN2012838, BRSSN2013095, BRSSN2013544, BRSSN2013696, BRSSN2013702, BRSSN2013733, BRSSN2013874, BRSSN2014112, BRSSN2014294, BRSSN2014299, BRSSN2014424, BRSSN2014513, BRSSN2014556, BRSSN2014573, BRSSN2014636, BRSSN2014685, BRSSN2015199, BRSSN2015369, BRSSN2015493, BRSSN2015497, BRSSN2015554, BRSSN2015707, BRSSN2015773, BRSSN2015907, BRSSN2015982, BRSSN2016589,

[2131] BRSSN2016768, BRSSN2016905, BRSSN2017297, BRSSN2017422, BRSSN2017530, BRSSN2017682, BRSSN2017757, BRSSN2018218, BRSSN2018447, BRSSN2018581, BRSSN2018731, BRSSN2018771, BRSSN2018925, BRSTN1000097, BRSTN2000058, BRSTN2000070, BRSTN2000220, BRSTN2000312, BRSTN2000367, BRSTN2000536, BRSTN2000872, BRSTN2001067, BRSTN2001613, BRSTN2001801, BRSTN2002105, BRSTN2002400, BRSTN2002532, BRSTN2002691, BRSTN2003590, BRSTN2003835, BRSTN2004863, BRSTN2004869, BRSTN2004987, BRSTN2005721, BRSTN2006306, BRSTN2006466, BRSTN2006580, BRSTN2006583, BRSTN2006638, BRSTN2006865, BRSTN2007000, BRSTN2007118, BRSTN2007284, BRSTN2007765, BRSTN2008052, BRSTN2008283, BRSTN2008367, BRSTN2008418, BRSTN2008457, BRSTN2008475,

[2132] BRSTN2008930, BRSTN2009247, BRSTN2010089, BRSTN2010107, BRSTN2010363, BRSTN2010416, BRSTN2010500, BRSTN2010569, BRSTN2010750, BRSTN2010923, BRSTN2011211, BRSTN2011597, BRSTN2011688, BRSTN2011799, BRSTN2012089, BRSTN2012284, BRSTN2012320, BRSTN2012380, BRSTN2012451, BRSTN2013171, BRSTN2013354, BRSTN2013502, BRSTN2013931, BRSTN2014490, BRSTN2014633, BRSTN2014751, BRSTN2014770, BRSTN2015015, BRSTN2015978, BRSTN2016066, BRSTN2016335, BRSTN2016470, BRSTN2016678, BRSTN2016892, BRSTN2016918, BRSTN2017104, BRSTN2017151, BRSTN2017237, BRSTN2017379, BRSTN2017761, BRSTN2017771, BRSTN2017995, BRSTN2018077, BRSTN2018083, BRSTN2018596, BRSTN2018692, BRSTN2018712, BRSTN2019079, BRSTN2019129, BRTHA1000021,

[2133] BRTHA1000063, BRTHA2000057, BRTHA2000474, BRTHA2000514, BRTHA2000574, BRTHA2000855, BRTHA2000969, BRTHA2000972, BRTHA2001304, BRTHA2001370, BRTHA2001462, BRTHA2001717, BRTHA2001812, BRTHA2002091, BRTHA2002115, BRTHA2002133, BRTHA2002281, BRTHA2002376, BRTHA2002442, BRTHA2002493, BRTHA2002565, BRTHA2002608, BRTHA2002702, BRTHA2002721, BRTHA2002726, BRTHA2002741, BRTHA2002808, BRTHA2002896, BRTHA2002903, BRTHA2003030, BRTHA2003110, BRTHA2003116, BRTHA2003436, BRTHA2003759, BRTHA2003794, BRTHA2004361, BRTHA2004371, BRTHA2004582, BRTHA2004629, BRTHA2004639, BRTHA2004642, BRTHA2004812, BRTHA2004821, BRTHA2004978, BRTHA2004992, BRTHA2005005, BRTHA2005013, BRTHA2005448, BRTHA2005579, BRTHA2005831,

[2134] BRTHA2005942, BRTHA2005956, BRTHA2006075, BRTHA2006146, BRTHA2006194, BRTHA2006232, BRTHA2006720, BRTHA2006735, BRTHA2006974, BRTHA2006975, BRTHA2007060, BRTHA2007122, BRTHA2007422, BRTHA2007603, BRTHA2007665, BRTHA2008316, BRTHA2008335, BRTHA2008502, BRTHA2008513, BRTHA2008527, BRTHA2008535, BRTHA2008598, BRTHA2008669, BRTHA2008955, BRTHA2009311, BRTHA2009349, BRTHA2009486, BRTHA2009803, BRTHA2009846, BRTHA2009886, BRTHA2009972, BRTHA2010008, BRTHA2010033, BRTHA2010073, BRTHA2010097, BRTHA2010191, BRTHA2010397, BRTHA2010608, BRTHA2010672, BRTHA2010884, BRTHA2010907, BRTHA2011062, BRTHA2011194, BRTHA2011321, BRTHA2011351, BRTHA2011500, BRTHA2011641, BRTHA2011691, BRTHA2012129, BRTHA2012183,

[2135] BRTHA2012189, BRTHA2012351, BRTHA2012392, BRTHA2012466, BRTHA2012555, BRTHA2012562, BRTHA2012714, BRTHA2012980, BRTHA2013262, BRTHA2013275, BRTHA2013426, BRTHA2013460, BRTHA2013515, BRTHA2013540, BRTHA2013595, BRTHA2013610, BRTHA2013707, BRTHA2013942, BRTHA2014287, BRTHA2014334, BRTHA2014381, BRTHA2014578, BRTHA2014647, BRTHA2014663, BRTHA2014792, BRTHA2014828, BRTHA2014909, BRTHA2014975, BRTHA2014997, BRTHA2015406, BRTHA2015478, BRTHA2015696, BRTHA2015700, BRTHA2015853, BRTHA2015878, BRTHA2016179, BRTHA2016215, BRTHA2016267, BRTHA2016318, BRTHA2016496, BRTHA2016543, BRTHA2016552, BRTHA2016765, BRTHA2016918, BRTHA2017178, BRTHA2017353, BRTHA2017364, BRTHA2017972, BRTHA2017985, BRTHA2018011,

[2136] BRTHA2018129, BRTHA2018165, BRTHA2018304, BRTHA2018344, BRTHA2018420, BRTHA2018443, BRTHA2018504, BRTHA2018558, BRTHA2018591, BRTHA2018624, BRTHA2018706, BRTHA2018707, BRTHA2019014, BRTHA2019022, BRTHA2019048, BRTHA2019073, BRTHA2019726, BRTHA2019743, BRTHA2020400, BRTHA2020566, BRTHA2020642, BRTHA2020695, BRTHA2020721, BRTHA2020781, BRTHA2020811, BRTHA2020910, BRTHA2021212, BRTHA2021440, BRTHA2021450, BRTHA2022074, BRTHA2022914, BRTHA2022968, BRTHA2023402, BRTHA2023437, BRTHA2024177, BRTHA2024354, BRTHA2024712, BRTHA2025869, BRTHA2026071, BRTHA2026290, BRTHA2026311, BRTHA2027227, BRTHA2027229, BRTHA2027250, BRTHA2027546, BRTHA2028297, BRTHA2029969, BRTHA2030036, BRTHA2030213, BRTHA2031517,

[2137] BRTHA2031800, BRTHA2031917, BRTHA2032763, BRTHA2032845, BRTHA2033122, BRTHA2033264, BRTHA2033320, BRTHA2033469, BRTHA2033683, BRTHA2034281, BRTHA2034576, BRTHA2034874, BRTHA2035448, BRTHA2035743, BRTHA2036055, BRTHA2036295, BRTHA2036660, BRTHA2037247, BRTHA2038279, BRTHA2038345, BRTHA2038353, BRTHA2038396, BRTHA3000252, BRTHA3000273, BRTHA3000296, BRTHA3000297, BRTHA3000325, BRTHA3000456, BRTHA3000789, BRTHA3001221, BRTHA3001623, BRTHA3002265, BRTHA3002401, BRTHA3002411, BRTHA3002864, BRTHA3002933, BRTHA3002955, BRTHA3003000, BRTHA3003023, BRTHA3003074, BRTHA3003339, BRTHA3003343, BRTHA3003417, BRTHA3003449, BRTHA3003474, BRTHA3003704, BRTHA3004432, BRTHA3004475, BRTHA3004502, BRTHA3004610,

[2138] BRTHA3005046, BRTHA3005735, BRTHA3005988, BRTHA3006318, BRTHA3006593, BRTHA3006856, BRTHA3007113, BRTHA3007130, BRTHA3007148, BRTHA3007319, BRTHA3007469, BRTHA3007532, BRTHA3007662, BRTHA3007685, BRTHA3007769, BRTHA3008143, BRTHA3008293, BRTHA3008310, BRTHA3008386, BRTHA3008520, BRTHA3008608, BRTHA3008694, BRTHA3008826, BRTHA3009037, BRTHA3009090, BRTHA3009291, BRTHA3009858, BRTHA3010135, BRTHA3010366, BRTHA3010469, BRTHA3010530, BRTHA3010540, BRTHA3010717, BRTHA3011149, BRTHA3011187, BRTHA3011229, BRTHA3011361, BRTHA3011510, BRTHA3011892, BRTHA3012265, BRTHA3013860, BRTHA3013882, BRTHA3013884, BRTHA3013981, BRTHA3014000, BRTHA3014105, BRTHA3014507, BRTHA3014547, BRTHA3014691, BRTHA3014835,

[2139] BRTHA3014854, BRTHA3014908, BRTHA3014920, BRTHA3015815, BRTHA3016616, BRTHA3016835, BRTHA3016845, BRTHA3016917, BRTHA3017047, BRTHA3017589, BRTHA3017848, BRTHA3018409, BRTHA3018514, BRTHA3018617, BRTHA3018623, BRTHA3018656, BRTHA3019048, BRTHA3019105, BRTHA3019183, BRTHA3020000, BRTHA3020314, BRTHA3020369, BRTHA3021569, BRTHA3021708, BRTHA3021786, BRTHA3022641, BRTHA3023523, BRTHA3023590, BRTHA3023929, BRTHA3024233, BRTHA3024600, BRTHA3025073, BRTHA3025789, BRTHA3025826, BRTHA3026161, BRTHA3026180, BRTHA3026507, BRTHA3026556, BRTHA3026916, BRTHA3027171, BRTHA3027318, BRTHA3027638, BRTHA3027820, BRTHA3027879, BRTHA3027957, BRTHA3028339, BRTHA3028505, BRTHA3028782, CD34C2000051, CD34C2000152,

[2140] CD34C2000175, CD34C2000443, CD34C3000125, CD34C3000314, CD34C3000424, CD34C3000494, CERVX1000042, CERVX2000812, CERVX2000968, CERVX2002006, CERVX2002013, CERVX2002430, CERVX2002770, CHONS1000058, CHONS2000172, CHONS2000797, CHONS2001287, CHONS2001382, CHONS2001797, CHONS2001834, CHONS2002419, COLON1000030, COLON1000084, COLON1000135, COLON2000470, COLON2000557, COLON2000568, COLON2001829, COLON2001866, COLON2002443, COLON2002520, COLON2003043, COLON2003529, COLON2004318, COLON2004351, COLON2004478, COLON2004911, COLON2005126, COLON2005623, COLON2005735, COLON2005772, COLON2006263, COLON2006282, COLON2006417, COLON2007274, COLON2007733, COLON2008105, COLON2009337, COLON2009499, CORDB1000140,

[2141] CORDB2000061, CORDB2000127, CORDB2000541, CTONG1000009, CTONG1000020, CTONG1000022, CTONG1000040, CTONG1000056, CTONG1000062, CTONG1000086, CTONG1000088, CTONG1000093, CTONG1000097, CTONG1000113, CTONG1000137, CTONG1000165, CTONG1000175, CTONG1000180, CTONG1000181, CTONG1000220, CTONG1000277, CTONG1000283, CTONG1000302, CTONG1000341, CTONG1000467, CTONG1000476, CTONG1000488, CTONG1000508, CTONG1000540, CTONG2000031, CTONG2000042, CTONG2000201, CTONG2000218, CTONG2000279, CTONG2000303, CTONG2000330, CTONG2000395, CTONG2000411, CTONG2000465, CTONG2000480, CTONG2000561, CTONG2000589, CTONG2000766, CTONG2000771, CTONG2000819, CTONG2000827, CTONG2000846, CTONG2000855, CTONG2000977, CTONG2001139,

[2142] CTONG2001226, CTONG2001320, CTONG2001366, CTONG2001413, CTONG2001428, CTONG2001513, CTONG2001524, CTONG2001533, CTONG2001598, CTONG2001681, CTONG2001724, CTONG2001749, CTONG2001800, CTONG2001858, CTONG2001877, CTONG2001955, CTONG2002066, CTONG2002143, CTONG2002395, CTONG2002417, CTONG2002418, CTONG2002453, CTONG2002520, CTONG2002558, CTONG2002590, CTONG2002721, CTONG2002766, CTONG2002816, CTONG2002965, CTONG2002999, CTONG2003028, CTONG2003100, CTONG2003115, CTONG2003189, CTONG2003245, CTONG2003348, CTONG2003350, CTONG2003361, CTONG2003372, CTONG2003375, CTONG2003427, CTONG2003517, CTONG2003599, CTONG2003680, CTONG2003699, CTONG2003764, CTONG2003782, CTONG2003889, CTONG2003937, CTONG2003945,

[2143] CTONG2004000, CTONG2004062, CTONG2004115, CTONG2004126, CTONG2004264, CTONG2004305, CTONG2004397, CTONG2004454, CTONG2004550, CTONG2004669, CTONG2004716, CTONG2004912, CTONG2004941, CTONG2004948, CTONG2005049, CTONG2005110, CTONG2005145, CTONG2005265, CTONG2005290, CTONG2005374, CTONG2005399, CTONG2005468, CTONG2005567, CTONG2005585, CTONG2005615, CTONG2005635, CTONG2005775, CTONG2005795, CTONG2005890, CTONG2005904, CTONG2005913, CTONG2006129, CTONG2006223, CTONG2006273, CTONG2006310, CTONG2006377, CTONG2006393, CTONG2006515, CTONG2006524, CTONG2006568, CTONG2006611, CTONG2006620, CTONG2006666, CTONG2006691, CTONG2006798, CTONG2006836, CTONG2006932, CTONG2006942, CTONG2006964, CTONG2007007,

[2144] CTONG2007009, CTONG2007072, CTONG2007091, CTONG2007104, CTONG2007168, CTONG2007175, CTONG2007259, CTONG2007272, CTONG2007293, CTONG2007297, CTONG2007399, CTONG2007417, CTONG2007441, CTONG2007474, CTONG2007613, CTONG2007623, CTONG2007681, CTONG2007776, CTONG2007779, CTONG2007898, CTONG2007970, CTONG2008014, CTONG2008184, CTONG2008262, CTONG2008269, CTONG2008343, CTONG2008402, CTONG2008405, CTONG2008521, CTONG2008562, CTONG2008577, CTONG2008595, CTONG2008621, CTONG2008689, CTONG2008720, CTONG2008721, CTONG2008773, CTONG2008989, CTONG2009033, CTONG2009132, CTONG2009156, CTONG2009181, CTONG2009257, CTONG2009258, CTONG2009268, CTONG2009270, CTONG2009395, CTONG2009423, CTONG2009440, CTONG2009527,

[2145] CTONG2009531, CTONG2009534, CTONG2009570, CTONG2009572, CTONG2009604, CTONG2009643, CTONG2009675, CTONG2009689, CTONG2009725, CTONG2009766, CTONG2009768, CTONG2009844, CTONG2009871, CTONG2009887, CTONG2009891, CTONG2009923, CTONG2009938, CTONG2009955, CTONG2009958, CTONG2009963, CTONG2010018, CTONG2010024, CTONG2010116, CTONG2010133, CTONG2010148, CTONG2010276, CTONG2010330, CTONG2010408, CTONG2010508, CTONG2010623, CTONG2010652, CTONG2010803, CTONG2011188, CTONG2011429, CTONG2011474, CTONG2011676, CTONG2011716, CTONG2011765, CTONG2011779, CTONG2011815, CTONG2011822, CTONG2011825, CTONG2011920, CTONG2011985, CTONG2012001, CTONG2012029, CTONG2012050, CTONG2012077, CTONG2012101, CTONG2012123,

[2146] CTONG2012158, CTONG2012230, CTONG2012401, CTONG2012422, CTONG2012425, CTONG2012447, CTONG2012473, CTONG2012476, CTONG2012533, CTONG2012554, CTONG2012724, CTONG2012738, CTONG2012745, CTONG2012758, CTONG2012847, CTONG2012901, CTONG2013128, CTONG2013149, CTONG2013156, CTONG2013178, CTONG2013222, CTONG2013284, CTONG2013339, CTONG2013348, CTONG2013393, CTONG2013511, CTONG2013630, CTONG2013803, CTONG2013985, CTONG2013986, CTONG2014032, CTONG2014058, CTONG2014119, CTONG2014165, CTONG2014191, CTONG2014206, CTONG2014234, CTONG2014264, CTONG2014389, CTONG2014491, CTONG2014630, CTONG2014635, CTONG2014646, CTONG2014705, CTONG2014946, CTONG2014954, CTONG2014959, CTONG2014966, CTONG2014995, CTONG2015204,

[2147] CTONG2015316, CTONG2015330, CTONG2015345, CTONG2015358, CTONG2015434, CTONG2015518, CTONG2015540, CTONG2015596, CTONG2015633, CTONG2015678, CTONG2015717, CTONG2015804, CTONG2015815, CTONG2015866, CTONG2015914, CTONG2015953, CTONG2016185, CTONG2016217, CTONG2016355, CTONG2016499, CTONG2016505, CTONG2016559, CTONG2016658, CTONG2016775, CTONG2016797, CTONG2016846, CTONG2016869, CTONG2016904, CTONG2016942, CTONG2016953, CTONG2017021, CTONG2017094, CTONG2017292, CTONG2017409, CTONG2017429, CTONG2017458, CTONG2017604, CTONG2017650, CTONG2017798, CTONG2017804, CTONG2017814, CTONG2017910, CTONG2017939, CTONG2017989, CTONG2017998, CTONG2018062, CTONG2018069, CTONG2018147, CTONG2018217, CTONG2018279,

[2148] CTONG2018334, CTONG2018343, CTONG2018379, CTONG2018413, CTONG2018483, CTONG2018629, CTONG2018652, CTONG2018653, CTONG2018655, CTONG2018735, CTONG2018843, CTONG2018900, CTONG2018976, CTONG2019029, CTONG2019063, CTONG2019144, CTONG2019232, CTONG2019248, CTONG2019590, CTONG2019652, CTONG2019704, CTONG2019822, CTONG2019833, CTONG2020031, CTONG2020108, CTONG2020127, CTONG2020171, CTONG2020374, CTONG2020378, CTONG2020445, CTONG2020522, CTONG2020582, CTONG2020806, CTONG2020831, CTONG2020974, CTONG2021024, CTONG2021132, CTONG2021168, CTONG2021289, CTONG2022153, CTONG2022601, CTONG2022835, CTONG2023021, CTONG2023449, CTONG2023512, CTONG2024031, CTONG2024206, CTONG2024614, CTONG2024749, CTONG2025496,

[2149] CTONG2025513, CTONG2025516, CTONG2025610, CTONG2025900, CTONG2026513, CTONG2026770, CTONG2026920, CTONG2026987, CTONG2027150, CTONG2027263, CTONG2027327, CTONG2027361, CTONG2027591, CTONG2027736, CTONG2027783, CTONG2027828, CTONG2027959, CTONG2028097, CTONG2028309, CTONG2028486, CTONG2028518, CTONG2028687, CTONG2028758, CTONG3000657, CTONG3000686, CTONG3000707, CTONG3000896, CTONG3001123, CTONG3001420, CTONG3001501, CTONG3001560, CTONG3001605, CTONG3001746, CTONG3002020, CTONG3002127, CTONG3002370, CTONG3002412, CTONG3002433, CTONG3002518, CTONG3002552, CTONG3002588, CTONG3002674, CTONG3002728, CTONG3002909, CTONG3002947, CTONG3002983, CTONG3003165, CTONG3003179, CTONG3003483, CTONG3003553,

[2150] CTONG3003598, CTONG3003652, CTONG3003654, CTONG3003669, CTONG3003737, CTONG3003972, CTONG3004072, CTONG3004317, CTONG3004397, CTONG3004550, CTONG3004576, CTONG3004607, CTONG3004712, CTONG3005325, CTONG3005648, CTONG3005713, CTONG3005803, CTONG3005813, CTONG3006067, CTONG3006073, CTONG3006186, CTONG3006650, CTONG3006659, CTONG3007244, CTONG3007444, CTONG3007528, CTONG3007586, CTONG3007870, CTONG3008223, CTONG3008252, CTONG3008258, CTONG3008457, CTONG3008496, CTONG3008566, CTONG3008639, CTONG3008831, CTONG3008951, CTONG3008959, CTONG3009227, CTONG3009287, CTONG3009328, CTONG3009385, D3OST1000066, D3OST1000109, D3OST1000238, D3OST2000184, D3OST2000618, D3OST2000654, D3OST2000734, D3OST2001328,

[2151] D3OST2001669, D3OST2001670, D3OST2001788, D3OST2002182, D3OST2002223, D3OST2002262, D3OST2002272, D3OST2002417, D3OST2002436, D3OST2002648, D3OST2003024, D3OST2003331, D3OST2003607, D3OST2003797, D3OST2004637, D3OST3000169, D3OST3000195, D3OST3000258, D3OST3000291, D3OST3000388, D3OST3000493, D6OST2000127, D6OST2000169, D6OST2000245, D6OST2000358, D6OST2000507, D9OST2000031, D9OST2000278, D9OST2000440, D9OST2000869, D9OST2001319, D9OST2001433, D9OST2002397, D9OST2002608, D9OST2002673, D9OST2003106, D9OST2003108, D9OST2003137, D9OST2003397, D9OST2003580, D9OST2003594, D9OST2003762, D9OST2003791, D9OST2003989, D9OST2004018, D9OST2004073, D9OST2004417, DFNES1000003, DFNES1000083, DFNES1000107,

[2152] DFNES1000150, DFNES1000185, DFNES2000011, DFNES2000143, DFNES2000212, DFNES2000268, DFNES2000292, DFNES2000426, DFNES2000432, DFNES2000457, DFNES2000471, DFNES2000913, DFNES2001091, DFNES2001096, DFNES2001108, DFNES2001177, DFNES2001404, DFNES2001564, DFNES2001565, DFNES2001647, DFNES2001800, DFNES2001829, DFNES2002220, DFNES2002509, DFNES2002550, DFNES2002588, DFNES2002817, DFNES2002966, DFNES2003081, DFNES2003192, DFNES2003255, DFNES2003742, DFNES2004354, DFNES2004383, DFNES2004684, DFNES2005266, DFNES2005527, DFNES2005540, DFNES2005779, DFNES2005875, DFNES2006944, DFNES2007113, DFNES2007299, DFNES2007332, DFNES2007641, DFNES2007757, DFNES2008280, DFNES2008881, DFNES2010502, DFNES2011192,

[2153] DFNES2011221, DFNES2011239, DFNES2011245, DFNES2011380, ERLTF1000021, ERLTF2000324, ERLTF2000465, FCBBF1000023, FCBBF1000025, FCBBF1000069, FCBBF1000117, FCBBF1000121, FCBBF1000125, FCBBF1000131, FCBBF1000155, FCBBF1000157, FCBBF1000171, FCBBF1000174, FCBBF1000182, FCBBF1000198, FCBBF1000206, FCBBF1000220, FCBBF1000232, FCBBF1000233, FCBBF1000243, FCBBF1000270, FCBBF1000272, FCBBF1000297, FCBBF1000314, FCBBF1000322, FCBBF1000349, FCBBF1000367, FCBBF1000374, FCBBF1000376, FCBBF1000395, FCBBF1000397, FCBBF1000425, FCBBF1000437, FCBBF1000506, FCBBF1000546, FCBBF1000550, FCBBF1000581, FCBBF1000582, FCBBF1000598, FCBBF1000604, FCBBF1000618, FCBBF1000627, FCBBF1000684, FCBBF1000686, FCBBF1000691,

[2154] FCBBF1000748, FCBBF2000087, FCBBF2000094, FCBBF2000105, FCBBF2000123, FCBBF2000195, FCBBF2000214, FCBBF2000232, FCBBF2000276, FCBBF2000291, FCBBF2000379, FCBBF2000473, FCBBF2000502, FCBBF2000576, FCBBF2000677, FCBBF2000678, FCBBF2000685, FCBBF2000733, FCBBF2000782, FCBBF2000808, FCBBF2000815, FCBBF2000825, FCBBF2000940, FCBBF2000951, FCBBF2001088, FCBBF2001116, FCBBF2001188, FCBBF2001238, FCBBF2001243, FCBBF2001299, FCBBF2001400, FCBBF2001427, FCBBF2001480, FCBBF2001529, FCBBF2001672, FCBBF2001675, FCBBF2001718, FCBBF2001720, FCBBF2001817, FCBBF2001868, FCBBF2002044, FCBBF2002111, FCBBF2002281, FCBBF2002370, FCBBF2002541, FCBBF2002626, FCBBF2002897, FCBBF2002898, FCBBF2002904, FCBBF2002928,

[2155] FCBBF2002953, FCBBF2003083, FCBBF2003102, FCBBF2003269, FCBBF2003293, FCBBF2003297, FCBBF2003395, FCBBF2003528, FCBBF2003543, FCBBF2003549, FCBBF2003567, FCBBF2003636, FCBBF2003823, FCBBF2003895, FCBBF2004090, FCBBF2004138, FCBBF2004217, FCBBF2004256, FCBBF2004448, FCBBF2004671, FCBBF2004707, FCBBF2004788, FCBBF2005069, FCBBF2005122, FCBBF2005428, FCBBF2005439, FCBBF2005538, FCBBF2005637, FCBBF2005645, FCBBF2005658, FCBBF2006131, FCBBF2006380, FCBBF2006418, FCBBF2006452, FCBBF2006634, FCBBF2007012, FCBBF2007186, FCBBF2007265, FCBBF2007610, FCBBF2007633, FCBBF3000120, FCBBF3000175, FCBBF3000227, FCBBF3000228, FCBBF3000229, FCBBF3000233, FCBBF3000269, FCBBF3000361, FCBBF3000367, FCBBF3000462,

[2156] FCBBF3000473, FCBBF3000501, FCBBF3000518, FCBBF3000536, FCBBF3000550, FCBBF3000847, FCBBF3001018, FCBBF3001020, FCBBF3001235, FCBBF3001302, FCBBF3001470, FCBBF3001594, FCBBF3001912, FCBBF3001914, FCBBF3001918, FCBBF3001924, FCBBF3002163, FCBBF3002188, FCBBF3002190, FCBBF3002268, FCBBF3002475, FCBBF3002592, FCBBF3002658, FCBBF3002782, FCBBF3002818, FCBBF3002925, FCBBF3003216, FCBBF3003305, FCBBF3003373, FCBBF3003435, FCBBF3003475, FCBBF3003481, FCBBF3003557, FCBBF3004021, FCBBF3004041, FCBBF3004390, FCBBF3004502, FCBBF3004842, FCBBF3004847, FCBBF3005160, FCBBF3005218, FCBBF3005444, FCBBF3005698, FCBBF3005729, FCBBF3006171, FCBBF3006249, FCBBF3006288, FCBBF3006399, FCBBF3006628, FCBBF3007077,

[2157] FCBBF3007150, FCBBF3007152, FCBBF3007242, FCBBF3007244, FCBBF3007248, FCBBF3007453, FCBBF3007462, FCBBF3007540, FCBBF3007597, FCBBF3007604, FCBBF3007631, FCBBF3007829, FCBBF3007855, FCBBF3007860, FCBBF3008073, FCBBF3008153, FCBBF3008159, FCBBF3008251, FCBBF3008311, FCBBF3008362, FCBBF3008475, FCBBF3008556, FCBBF3008689, FCBBF3008748, FCBBF3008870, FCBBF3008938, FCBBF3008944, FCBBF3009101, FCBBF3009256, FCBBF3009317, FCBBF3009428, FCBBF3009464, FCBBF3009526, FCBBF3009717, FCBBF3009888, FCBBF3009949, FCBBF3009978, FCBBF3010008, FCBBF3010124, FCBBF3010130, FCBBF3010149, FCBBF3010211, FCBBF3010361, FCBBF3010508, FCBBF3010544, FCBBF3010586, FCBBF3010601, FCBBF3010665, FCBBF3010729, FCBBF3010733,

[2158] FCBBF3011003, FCBBF3011418, FCBBF3011523, FCBBF3011570, FCBBF3011592, FCBBF3011867, FCBBF3011889, FCBBF3012170, FCBBF3012182, FCBBF3012288, FCBBF3012332, FCBBF3012588, FCBBF3012842, FCBBF3012901, FCBBF3013041, FCBBF3013058, FCBBF3013205, FCBBF3013266, FCBBF3013307, FCBBF3013341, FCBBF3013506, FCBBF3013623, FCBBF3013800, FCBBF3013846, FCBBF3014229, FCBBF3014355, FCBBF3014567, FCBBF3015119, FCBBF3015131, FCBBF3015317, FCBBF3015727, FCBBF3015758, FCBBF3015809, FCBBF3015870, FCBBF3016018, FCBBF3016178, FCBBF3016618, FCBBF3016622, FCBBF3016644, FCBBF3016987, FCBBF3017059, FCBBF3017071, FCBBF3017123, FCBBF3017233, FCBBF3017255, FCBBF3017531, FCBBF3017535, FCBBF3017681, FCBBF3017729, FCBBF3017873,

[2159] FCBBF3017974, FCBBF3018067, FCBBF3018173, FCBBF3018591, FCBBF3018753, FCBBF3018796, FCBBF3019085, FCBBF3019320, FCBBF3019564, FCBBF3019569, FCBBF3019570, FCBBF3019663, FCBBF3019716, FCBBF3019839, FCBBF3019867, FCBBF3019961, FCBBF3020030, FCBBF3020138, FCBBF3020140, FCBBF3020163, FCBBF3020232, FCBBF3020599, FCBBF3021026, FCBBF3021191, FCBBF3021221, FCBBF3021501, FCBBF3021506, FCBBF3021524, FCBBF3021807, FCBBF3021940, FCBBF3021985, FCBBF3022005, FCBBF3022291, FCBBF3022311, FCBBF3022566, FCBBF3022765, FCBBF3022767, FCBBF3022894, FCBBF3023061, FCBBF3023078, FCBBF3023372, FCBBF3023443, FCBBF3023599, FCBBF3023704, FCBBF3023895, FCBBF3024096, FCBBF3024225, FCBBF3024266, FCBBF3024364, FCBBF3024793,

[2160] FCBBF3024911, FCBBF3025098, FCBBF3025252, FCBBF3025280, FCBBF3025285, FCBBF3025417, FCBBF3025568, FCBBF3025650, FCBBF3025674, FCBBF3025905, FCBBF3026021, FCBBF3026251, FCBBF3026308, FCBBF3026678, FCBBF3026692, FCBBF3027104, FCBBF3027199, FCBBF3027328, FCBBF3027559, FCBBF3027717, FCBBF3027755, FCBBF3027768, FCBBF3027863, FCBBF3027903, FCBBF3028102, FCBBF3028143, FCBBF3028188, FCBBF3028202, FCBBF3028472, FCBBF3028528, FCBBF3028582, FCBBF3028671, FCBBF3028794, FCBBF4000061, FCBBF4000076, FCBBF4000173, FCBBF4000192, FCBBF4000268, FCBBF4000282, FCBBF4000399, FCBBF4000415, FCBBF4000500, FCBBF4000529, FCBBF4000548, FCBBF5000041, FCBBF5000261, FCBBF5000325, FCBBF5000353, FCBBF5000384, FCBBF5000483,

[2161] FCBBF5000495, FEBRA1000005, FEBRA1000022, FEBRA1000138, FEBRA1000148, FEBRA1000149, FEBRA1000183, FEBRA1000189, FEBRA1000190, FEBRA2000007, FEBRA2000021, FEBRA2000035, FEBRA2000053, FEBRA2000126, FEBRA2000129, FEBRA2000210, FEBRA2000220, FEBRA2000282, FEBRA2000286, FEBRA2000311, FEBRA2000321, FEBRA2000333, FEBRA2000378, FEBRA2000391, FEBRA2000394, FEBRA2000399, FEBRA2000402, FEBRA2000404, FEBRA2000409, FEBRA2000415, FEBRA2000436, FEBRA2000438, FEBRA2000454, FEBRA2000468, FEBRA2000491, FEBRA2000504, FEBRA2000510, FEBRA2000536, FEBRA2000538, FEBRA2000575, FEBRA2000656, FEBRA2000659, FEBRA2000680, FEBRA2000690, FEBRA2000727, FEBRA2000734, FEBRA2000762, FEBRA2000771, FEBRA2000772, FEBRA2000782,

[2162] FEBRA2000790, FEBRA2000803, FEBRA2000805, FEBRA2000809, FEBRA2000856, FEBRA2000862, FEBRA2000877, FEBRA2000880, FEBRA2000901, FEBRA2000909, FEBRA2000917, FEBRA2000928, FEBRA2000936, FEBRA2000937, FEBRA2000959, FEBRA2001004, FEBRA2001012, FEBRA2001020, FEBRA2001093, FEBRA2001124, FEBRA2001133, FEBRA2001161, FEBRA2001175, FEBRA2001217, FEBRA2001267, FEBRA2001294, FEBRA2001334, FEBRA2001351, FEBRA2001383, FEBRA2001438, FEBRA2001440, FEBRA2001487, FEBRA2001523, FEBRA2001561, FEBRA2001584, FEBRA2001590, FEBRA2001591, FEBRA2001610, FEBRA2001620, FEBRA2001659, FEBRA2001698, FEBRA2001705, FEBRA2001706, FEBRA2001752, FEBRA2001772, FEBRA2001790, FEBRA2001914, FEBRA2001974, FEBRA2001989, FEBRA2002009,

[2163] FEBRA2002086, FEBRA2002109, FEBRA2002191, FEBRA2002260, FEBRA2002399, FEBRA2002429, FEBRA2002442, FEBRA2002508, FEBRA2002527, FEBRA2002552, FEBRA2002574, FEBRA2002601, FEBRA2002611, FEBRA2002628, FEBRA2002662, FEBRA2002727, FEBRA2002783, FEBRA2002818, FEBRA2002858, FEBRA2002882, FEBRA2002897, FEBRA2002908, FEBRA2002962, FEBRA2002986, FEBRA2003054, FEBRA2003115, FEBRA2003155, FEBRA2003163, FEBRA2003181, FEBRA2003253, FEBRA2003258, FEBRA2003275, FEBRA2003308, FEBRA2003327, FEBRA2003429, FEBRA2003436, FEBRA2003454, FEBRA2003468, FEBRA2003520, FEBRA2003524, FEBRA2003675, FEBRA2003707, FEBRA2003711, FEBRA2003726, FEBRA2003822, FEBRA2003897, FEBRA2003907, FEBRA2004023, FEBRA2004026, FEBRA2004029,

[2164] FEBRA2004053, FEBRA2004056, FEBRA2004091, FEBRA2004202, FEBRA2004219, FEBRA2004237, FEBRA2004268, FEBRA2004329, FEBRA2004331, FEBRA2004443, FEBRA2004490, FEBRA2004538, FEBRA2004592, FEBRA2004620, FEBRA2004628, FEBRA2004651, FEBRA2004767, FEBRA2004813, FEBRA2004818, FEBRA2004840, FEBRA2004852, FEBRA2004867, FEBRA2004914, FEBRA2004933, FEBRA2004987, FEBRA2005014, FEBRA2005036, FEBRA2005079, FEBRA2005216, FEBRA2005291, FEBRA2005377, FEBRA2005380, FEBRA2005427, FEBRA2005458, FEBRA2005701, FEBRA2005726, FEBRA2005752, FEBRA2005787, FEBRA2005788, FEBRA2005998, FEBRA2006055, FEBRA2006061, FEBRA2006150, FEBRA2006165, FEBRA2006315, FEBRA2006346, FEBRA2006354, FEBRA2006370, FEBRA2006379, FEBRA2006409,

[2165] FEBRA2006418, FEBRA2006427, FEBRA2006476, FEBRA2006491, FEBRA2006519, FEBRA2006664, FEBRA2006667, FEBRA2006726, FEBRA2006736, FEBRA2006793, FEBRA2006817, FEBRA2006890, FEBRA2006942, FEBRA2006977, FEBRA2007017, FEBRA2007176, FEBRA2007200, FEBRA2007212, FEBRA2007247, FEBRA2007280, FEBRA2007414, FEBRA2007436, FEBRA2007449, FEBRA2007534, FEBRA2007551, FEBRA2007566, FEBRA2007589, FEBRA2007613, FEBRA2007620, FEBRA2007708, FEBRA2007818, FEBRA2007823, FEBRA2007931, FEBRA2007957, FEBRA2008009, FEBRA2008086, FEBRA2008134, FEBRA2008135, FEBRA2008159, FEBRA2008165, FEBRA2008172, FEBRA2008255, FEBRA2008265, FEBRA2008266, FEBRA2008282, FEBRA2008311, FEBRA2008341, FEBRA2008459, FEBRA2008468, FEBRA2008475,

[2166] FEBRA2008481, FEBRA2008542, FEBRA2008660, FEBRA2008681, FEBRA2008692, FEBRA2008741, FEBRA2008755, FEBRA2008836, FEBRA2008859, FEBRA2008866, FEBRA2008881, FEBRA2008928, FEBRA2008983, FEBRA2009016, FEBRA2009029, FEBRA2009074, FEBRA2009117, FEBRA2009120, FEBRA2009162, FEBRA2009185, FEBRA2009240, FEBRA2009265, FEBRA2009276, FEBRA2009289, FEBRA2009327, FEBRA2009328, FEBRA2009352, FEBRA2009362, FEBRA2009385, FEBRA2009416, FEBRA2009437, FEBRA2009478, FEBRA2009507, FEBRA2009541, FEBRA2009567, FEBRA2009731, FEBRA2009754, FEBRA2009780, FEBRA2010141, FEBRA2010299, FEBRA2010484, FEBRA2010768, FEBRA2010802, FEBRA2011063, FEBRA2011356, FEBRA2011392, FEBRA2011414, FEBRA2011593, FEBRA2011665, FEBRA2012090,

[2167] FEBRA2012120, FEBRA2012181, FEBRA2012195, FEBRA2012397, FEBRA2012418, FEBRA2012507, FEBRA2012625, FEBRA2013019, FEBRA2013069, FEBRA2013274, FEBRA2013465, FEBRA2013570, FEBRA2013905, FEBRA2013951, FEBRA2014010, FEBRA2014198, FEBRA2014213, FEBRA2014297, FEBRA2014443, FEBRA2015076, FEBRA2015175, FEBRA2015292, FEBRA2015588, FEBRA2016112, FEBRA2016398, FEBRA2016572, FEBRA2016583, FEBRA2016621, FEBRA2016654, FEBRA2016739, FEBRA2017098, FEBRA2017138, FEBRA2017154, FEBRA2017200, FEBRA2017223, FEBRA2017333, FEBRA2017502, FEBRA2017533, FEBRA2017680, FEBRA2017736, FEBRA2017780, FEBRA2017811, FEBRA2018051, FEBRA2018433, FEBRA2018746, FEBRA2019172, FEBRA2019298, FEBRA2019389, FEBRA2019457, FEBRA2019519,

[2168] FEBRA2019582, FEBRA2019663, FEBRA2019690, FEBRA2019711, FEBRA2019867, FEBRA2020406, FEBRA2020566, FEBRA2020582, FEBRA2020668, FEBRA2020801, FEBRA2020845, FEBRA2021032, FEBRA2021134, FEBRA2021171, FEBRA2021339, FEBRA2021431, FEBRA2021497, FEBRA2021550, FEBRA2021571, FEBRA2021636, FEBRA2021864, FEBRA2021892, FEBRA2021908, FEBRA2022013, FEBRA2022148, FEBRA2022204, FEBRA2022255, FEBRA2022322, FEBRA2022601, FEBRA2022696, FEBRA2022729, FEBRA2022787, FEBRA2022911, FEBRA2022956, FEBRA2022963, FEBRA2022972, FEBRA2023227, FEBRA2023285, FEBRA2023351, FEBRA2023399, FEBRA2023498, FEBRA2023550, FEBRA2023721, FEBRA2023927, FEBRA2023989, FEBRA2023990, FEBRA2024136, FEBRA2024150, FEBRA2024343, FEBRA2024570,

[2169] FEBRA2024693, FEBRA2024744, FEBRA2024797, FEBRA2024987, FEBRA2025249, FEBRA2025463, FEBRA2025477, FEBRA2026474, FEBRA2026629, FEBRA2026769, FEBRA2026879, FEBRA2026890, FEBRA2026977, FEBRA2026984, FEBRA2027082, FEBRA2027297, FEBRA2027352, FEBRA2027364, FEBRA2027609, FEBRA2028158, FEBRA2028222, FEBRA2028366, FEBRA2028457, FEBRA2028477, FEHRT2000325, FEHRT2000364, FEKID1000018, FELIV1000101, FELIV1000137, FELIV1000164, FELNG2000241, HCASM1000021, HCASM1000050, HCASM1000061, HCASM1000130, HCASM2000156, HCASM2000202, HCASM2000266, HCASM2000307, HCASM2000363, HCASM2000534, HCASM2000536, HCASM2000560, HCASM2000871, HCASM2001285, HCASM2001810, HCASM2001866, HCASM2001890, HCASM2002148, HCASM2002502,

[2170] HCASM2002754, HCASM2002918, HCASM2003076, HCASM2003099, HCASM2003212, HCASM2003237, HCASM2003357, HCASM2003415, HCASM2005388, HCASM2005484, HCASM2006131, HCASM2006338, HCASM2006359, HCASM2006632, HCASM2007047, HCASM2007317, HCASM2007737, HCASM2007773, HCASM2008154, HCASM2008536, HCASM2009405, HCASM2009424, HCASM2009463, HCASM2009588, HCHON1000015, HCHON1000142, HCHON1000166, HCHON1000176, HCHON2000038, HCHON2000062, HCHON2000087, HCHON2000100, HCHON2000156, HCHON2000199, HCHON2000271, HCHON2000315, HCHON2000322, HCHON2000344, HCHON2000364, HCHON2000395, HCHON2000417, HCHON2000418, HCHON2000503, HCHON2000626, HCHON2000660, HCHON2000663, HCHON2000673, HCHON2000699, HCHON2000705, HCHON2000817,

[2171] HCHON2000818, HCHON2000819, HCHON2000851, HCHON2000898, HCHON2000935, HCHON2000942, HCHON2000956, HCHON2000994, HCHON2001050, HCHON2001099, HCHON2001108, HCHON2001110, HCHON2001116, HCHON2001214, HCHON2001233, HCHON2001269, HCHON2001434, HCHON2001450, HCHON2001453, HCHON2001497, HCHON2001505, HCHON2001519, HCHON2001523, HCHON2001535, HCHON2001546, HCHON2001577, HCHON2001598, HCHON2001604, HCHON2001607, HCHON2001646, HCHON2001712, HCHON2001768, HCHON2001801, HCHON2001853, HCHON2002123, HCHON2002194, HCHON2002241, HCHON2002354, HCHON2002496, HCHON2002676, HCHON2002770, HCHON2002964, HCHON2002971, HCHON2003131, HCHON2003134, HCHON2003327, HCHON2003513, HCHON2003532, HCHON2003642, HCHON2003659,

[2172] HCHON2003676, HCHON2004002, HCHON2004007, HCHON2004279, HCHON2004359, HCHON2004531, HCHON2004776, HCHON2005048, HCHON2005118, HCHON2005166, HCHON2005802, HCHON2005987, HCHON2006714, HCHON2006722, HCHON2006770, HCHON2006786, HCHON2006841, HCHON2006871, HCHON2007046, HCHON2007482, HCHON2007650, HCHON2007674, HCHON2007774, HCHON2008112, HCHON2008239, HCHON2008444, HCHON2008582, HCHON2008672, HCHON2008856, HCHON2008871, HCHON2008989, HCHON2009191, HCHON2009384, HCHON2009749, HCHON2009766, HCHON2009795, HCHON2010074, HEART1000010, HEART1000088, HEART1000099, HEART1000102, HEART1000139, HEART1000151, HEART2000024, HEART2000035, HEART2000099, HEART2000298, HEART2000306, HEART2000309, HEART2000418,

[2173] HEART2000444, HEART2000448, HEART2000492, HEART2000506, HEART2000520, HEART2000541, HEART2000568, HEART2000611, HEART2000959, HEART2001680, HEART2001756, HEART2002129, HEART2002184, HEART2002220, HEART2002432, HEART2002531, HEART2002598, HEART2002717, HEART2003027, HEART2003168, HEART2003432, HEART2003440, HEART2003781, HEART2003836, HEART2003852, HEART2004570, HEART2004764, HEART2004931, HEART2004940, HEART2004941, HEART2004980, HEART2005244, HEART2005310, HEART2005581, HEART2005610, HEART2006131, HEART2006195, HEART2006310, HEART2006334, HEART2006487, HEART2006557, HEART2006787, HEART2006789, HEART2006909, HEART2007031, HEART2007443, HEART2007767, HEART2008108, HEART2008111, HEART2008257,

[2174] HEART2008509, HEART2008994, HEART2009000, HEART2009599, HEART2009680, HEART2010391, HEART2010492, HEART2010495, HELAC2000158, HELAC2000301, HHDPC1000001, HHDPC1000065, HHDPC2000070, HHDPC2000115, HHDPC2000149, HHDPC2000258, HHDPC2000315, HHDPC2000656, HHDPC2000692, HHDPC2001337, HHDPC2001432, HHDPC2002963, HHDPC2003049, HHDPC2003113, HHDPC2003381, HHDPC2003472, HHDPC2004757, HHDPC2005185, HHDPC2005513, HHDPC2005742, HHDPC2005794, HHDPC2006460, HHDPC2006862, HHDPC2006927, HHDPC2007302, HHDPC2007775, HHDPC2008123, HHDPC2008185, HHDPC2008279, HHDPC2008297, HHDPC2008414, HHDPC2008474, HHDPC2008816, HHDPC2008843, HHDPC2009114, HHDPC2009178, HHDPC2009208, HHDPC2009272, HLUNG1000017, HLUNG1000024,

[2175] HLUNG1000030, HLUNG1000034, HLUNG1000053, HLUNG1000064, HLUNG1000076, HLUNG1000084, HLUNG1000099, HLUNG1000104, HLUNG1000105, HLUNG1000110, HLUNG1000151, HLUNG1000169, HLUNG2000004, HLUNG2000014, HLUNG2000027, HLUNG2000063, HLUNG2000068, HLUNG2000116, HLUNG2000125, HLUNG2000130, HLUNG2000142, HLUNG2000174, HLUNG2000176, HLUNG2000217, HLUNG2000232, HLUNG2000255, HLUNG2000281, HLUNG2000314, HLUNG2000315, HLUNG2000340, HLUNG2000362, HLUNG2000363, HLUNG2000431, HLUNG2000480, HLUNG2000489, HLUNG2000501, HLUNG2000549, HLUNG2000557, HLUNG2000570, HLUNG2000751, HLUNG2000761, HLUNG2000777, HLUNG2000870, HLUNG2000884, HLUNG2000926, HLUNG2000950, HLUNG2000955, HLUNG2000970, HLUNG2001013, HLUNG2001126,

[2176] HLUNG2001144, HLUNG2001214, HLUNG2001439, HLUNG2001459, HLUNG2001507, HLUNG2001814, HLUNG2001996, HLUNG2002006, HLUNG2002050, HLUNG2002059, HLUNG2002085, HLUNG2002145, HLUNG2002295, HLUNG2002303, HLUNG2002405, HLUNG2002429, HLUNG2002465, HLUNG2002562, HLUNG2002648, HLUNG2002659, HLUNG2002707, HLUNG2002811, HLUNG2002916, HLUNG2002942, HLUNG2002949, HLUNG2002958, HLUNG2002982, HLUNG2003003, HLUNG2003049, HLUNG2003061, HLUNG2003162, HLUNG2003246, HLUNG2003331, HLUNG2003335, HLUNG2003497, HLUNG2003691, HLUNG2003710, HLUNG2003714, HLUNG2003716, HLUNG2003778, HLUNG2003833, HLUNG2003872, HLUNG2003918, HLUNG2003991, HLUNG2004014, HLUNG2004037, HLUNG2004154, HLUNG2004217, HLUNG2004273, HLUNG2004416,

[2177] HLUNG2004521, HLUNG2004534, HLUNG2004684, HLUNG2004707, HLUNG2004774, HLUNG2004775, HLUNG2005012, HLUNG2005030, HLUNG2005045, HLUNG2005076, HLUNG2005203, HLUNG2005230, HLUNG2005479, HLUNG2005524, HLUNG2005656, HLUNG2005738, HLUNG2005774, HLUNG2005813, HLUNG2005924, HLUNG2006026, HLUNG2006067, HLUNG2006094, HLUNG2006370, HLUNG2006397, HLUNG2006570, HLUNG2006599, HLUNG2006614, HLUNG2006671, HLUNG2006781, HLUNG2006852, HLUNG2006935, HLUNG2007041, HLUNG2007163, HLUNG2007219, HLUNG2007245, HLUNG2007433, HLUNG2007931, HLUNG2008066, HLUNG2008139, HLUNG2008225, HLUNG2008235, HLUNG2008247, HLUNG2008333, HLUNG2008384, HLUNG2008396, HLUNG2008439, HLUNG2008479, HLUNG2008480, HLUNG2008521, HLUNG2008637,

[2178] HLUNG2008833, HLUNG2008875, HLUNG2008885, HLUNG2008958, HLUNG2008959, HLUNG2009067, HLUNG2009215, HLUNG2009253, HLUNG2009303, HLUNG2009413, HLUNG2009729, HLUNG2010181, HLUNG2010464, HLUNG2010562, HLUNG2010845, HLUNG2011041, HLUNG2011298, HLUNG2011461, HLUNG2011833, HLUNG2012049, HLUNG2012287, HLUNG2012315, HLUNG2012546, HLUNG2012600, HLUNG2012727, HLUNG2013097, HLUNG2013204, HLUNG2013304, HLUNG2013350, HLUNG2013622, HLUNG2013643, HLUNG2013784, HLUNG2013851, HLUNG2014262, HLUNG2014288, HLUNG2014449, HLUNG2014821, HLUNG2015184, HLUNG2015418, HLUNG2015548, HLUNG2015578, HLUNG2015617, HLUNG2016022, HLUNG2016862, HLUNG2017286, HLUNG2017307, HLUNG2017350, HLUNG2017546, HLUNG2017806, HLUNG2018029,

[2179] HLUNG2018282, HLUNG2018626, HLUNG2019058, HSYRA1000131, HSYRA2000044, HSYRA2000237, HSYRA2000253, HSYRA2000371, HSYRA2000424, HSYRA2000507, HSYRA2000510, HSYRA2000629, HSYRA2000640, HSYRA2000706, HSYRA2000760, HSYRA2000787, HSYRA2000792, HSYRA2000832, HSYRA2000927, HSYRA2001003, HSYRA2001103, HSYRA2001142, HSYRA2001153, HSYRA2001232, HSYRA2001255, HSYRA2001332, HSYRA2001353, HSYRA2001420, HSYRA2001484, HSYRA2001552, HSYRA2001580, HSYRA2001631, HSYRA2001983, HSYRA2002103, HSYRA2002590, HSYRA2002741, HSYRA2003168, HSYRA2004550, HSYRA2004858, HSYRA2005456, HSYRA2005496, HSYRA2005628, HSYRA2005970, HSYRA2006049, HSYRA2006873, HSYRA2007241, HSYRA2007338, HSYRA2007667, HSYRA2008154, HSYRA2008714,

[2180] HSYRA2009102, IMR321000155, IMR321000161, IMR321000165, IMR321000193, IMR321000230, IMR321000253, IMR322000010, IMR322000107, IMR322000152, IMR322000164, IMR322000178, IMR322000374, IMR322000379, IMR322000383, IMR322000418, IMR322000518, IMR322000604, IMR322000609, IMR322000656, IMR322000672, IMR322000742, IMR322000811, IMR322000819, IMR322000838, IMR322000859, IMR322000863, IMR322000918, IMR322000919, IMR322000953, IMR322000984, IMR322001018, IMR322001049, IMR322001167, IMR322001185, IMR322001218, IMR322001245, IMR322001318, IMR322001322, IMR322001438, IMR322001452, IMR322001491, IMR322001534, IMR322001584, IMR322001665, IMR322001724, IMR322002035, IMR322002110, IMR322002470, IMR322003675,

[2181] IMR322004768, IMR322005293, IMR322005833, IMR322006012, IMR322006222, IMR322006495, IMR322006520, IMR322006886, IMR322006947, IMR322007078, IMR322007225, IMR322007704, IMR322008651, IMR322009710, IMR322009807, IMR322010295, IMR322010953, IMR322011689, IMR322012314, IMR322013053, IMR322013396, IMR322013731, IMR322013805, IMR322015523, IMR322016146, IMR322017049, IMR322018117, IMR322018192, IMR322019070, JCMLC2000273, KIDNE1000008, KIDNE1000012, KIDNE1000015, KIDNE1000028, KIDNE1000036, KIDNE1000064, KIDNE1000104, KIDNE1000121, KIDNE1000152, KIDNE2000026, KIDNE2000041, KIDNE2000046, KIDNE2000051, KIDNE2000070, KIDNE2000167, KIDNE2000174, KIDNE2000192, KIDNE2000227, KIDNE2000244, KIDNE2000245,

[2182] KIDNE2000266, KIDNE2000287, KIDNE2000315, KIDNE2000317, KIDNE2000328, KIDNE2000335, KIDNE2000349, KIDNE2000375, KIDNE2000383, KIDNE2000394, KIDNE2000422, KIDNE2000493, KIDNE2000497, KIDNE2000510, KIDNE2000513, KIDNE2000517, KIDNE2000519, KIDNE2000555, KIDNE2000624, KIDNE2000678, KIDNE2000717, KIDNE2000722, KIDNE2000777, KIDNE2000801, KIDNE2000832, KIDNE2000833, KIDNE2000846, KIDNE2000867, KIDNE2000909, KIDNE2001117, KIDNE2001140, KIDNE2001269, KIDNE2001361, KIDNE2001373, KIDNE2001636, KIDNE2001713, KIDNE2001802, KIDNE2001840, KIDNE2001847, KIDNE2001857, KIDNE2001873, KIDNE2001897, KIDNE2001931, KIDNE2002015, KIDNE2002162, KIDNE2002168, KIDNE2002198, KIDNE2002262, KIDNE2002438, KIDNE2002483,

[2183] KIDNE2002725, KIDNE2002768, KIDNE2002795, KIDNE2002798, KIDNE2002839, KIDNE2002845, KIDNE2002872, KIDNE2002882, KIDNE2002980, KIDNE2002991, KIDNE2003185, KIDNE2003188, KIDNE2003233, KIDNE2003316, KIDNE2003335, KIDNE2003357, KIDNE2003373, KIDNE2003377, KIDNE2003507, KIDNE2003752, KIDNE2003764, KIDNE2003837, KIDNE2003994, KIDNE2004034, KIDNE2004054, KIDNE2004084, KIDNE2004095, KIDNE2004115, KIDNE2004233, KIDNE2004262, KIDNE2004279, KIDNE2004294, KIDNE2004295, KIDNE2004305, KIDNE2004344, KIDNE2004394, KIDNE2004411, KIDNE2004519, KIDNE2004520, KIDNE2004531, KIDNE2004562, KIDNE2004579, KIDNE2004626, KIDNE2004681, KIDNE2004828, KIDNE2004846, KIDNE2004864, KIDNE2004879, KIDNE2004981, KIDNE2004985,

[2184] KIDNE2004999, KIDNE2005038, KIDNE2005062, KIDNE2005266, KIDNE2005296, KIDNE2005327, KIDNE2005336, KIDNE2005400, KIDNE2005424, KIDNE2005477, KIDNE2005526, KIDNE2005543, KIDNE2005603, KIDNE2005629, KIDNE2005781, KIDNE2005798, KIDNE2005854, KIDNE2005908, KIDNE2005937, KIDNE2006009, KIDNE2006039, KIDNE2006053, KIDNE2006062, KIDNE2006092, KIDNE2006145, KIDNE2006149, KIDNE2006210, KIDNE2006299, KIDNE2006334, KIDNE2006353, KIDNE2006376, KIDNE2006378, KIDNE2006580, KIDNE2006652, KIDNE2006687, KIDNE2006733, KIDNE2006760, KIDNE2006820, KIDNE2006880, KIDNE2007005, KIDNE2007040, KIDNE2007077, KIDNE2007186, KIDNE2007222, KIDNE2007356, KIDNE2007422, KIDNE2007569, KIDNE2007810, KIDNE2007811, KIDNE2007910,

[2185] KIDNE2007944, KIDNE2008022, KIDNE2008069, KIDNE2008072, KIDNE2008116, KIDNE2008117, KIDNE2008218, KIDNE2008315, KIDNE2008362, KIDNE2008378, KIDNE2008403, KIDNE2008404, KIDNE2008446, KIDNE2008473, KIDNE2008480, KIDNE2008649, KIDNE2008666, KIDNE2008697, KIDNE2008758, KIDNE2008788, KIDNE2008795, KIDNE2008824, KIDNE2008832, KIDNE2008869, KIDNE2008975, KIDNE2009109, KIDNE2009180, KIDNE2009191, KIDNE2009426, KIDNE2009467, KIDNE2009490, KIDNE2009553, KIDNE2009605, KIDNE2009628, KIDNE2009647, KIDNE2009676, KIDNE2009723, KIDNE2010007, KIDNE2010049, KIDNE2010052, KIDNE2010084, KIDNE2010137, KIDNE2010151, KIDNE2010264, KIDNE2010265, KIDNE2010271, KIDNE2010419, KIDNE2010574, KIDNE2010674, KIDNE2010739,

[2186] KIDNE2010750, KIDNE2010762, KIDNE2010863, KIDNE2010973, KIDNE2010989, KIDNE2011200, KIDNE2011314, KIDNE2011508, KIDNE2011532, KIDNE2011635, KIDNE2011752, KIDNE2011782, KIDNE2011858, KIDNE2012009, KIDNE2012291, KIDNE2012361, KIDNE2012453, KIDNE2012563, KIDNE2012601, KIDNE2012613, KIDNE2012710, KIDNE2012745, KIDNE2012775, KIDNE2012784, KIDNE2012945, KIDNE2013045, KIDNE2013095, KIDNE2013158, KIDNE2013218, KIDNE2013263, KIDNE2013346, KIDNE2013388, KIDNE2013413, KIDNE2013489, KIDNE2013639, KIDNE2013731, KIDNE2013734, KIDNE2013775, KIDNE2013801, KIDNE2013866, KIDNE2014087, KIDNE2014112, KIDNE2014119, KIDNE2014170, KIDNE2014184, KIDNE2014268, KIDNE2014298, KIDNE2014320, KIDNE2014325, KIDNE2014415,

[2187] KIDNE2014489, KIDNE2014496, KIDNE2014661, KIDNE2014717, KIDNE2014789, KIDNE2014808, KIDNE2014890, KIDNE2014978, KIDNE2015073, KIDNE2015221, KIDNE2015244, KIDNE2015313, KIDNE2015433, KIDNE2015483, KIDNE2015515, KIDNE2015546, KIDNE2015556, KIDNE2015598, KIDNE2015660, KIDNE2015710, KIDNE2015987, KIDNE2016000, KIDNE2016036, KIDNE2016096, KIDNE2016101, KIDNE2016142, KIDNE2016188, KIDNE2016327, KIDNE2016371, KIDNE2016388, KIDNE2016464, KIDNE2016539, KIDNE2016570, KIDNE2016918, KIDNE2017007, KIDNE2017052, KIDNE2017151, KIDNE2017153, KIDNE2017315, KIDNE2017332, KIDNE2017343, KIDNE2017454, KIDNE2017603, KIDNE2017956, KIDNE2018071, KIDNE2018166, KIDNE2018167, KIDNE2018254, KIDNE2018268, KIDNE2018269,

[2188] KIDNE2018287, KIDNE2018294, KIDNE2018352, KIDNE2018462, KIDNE2018493, KIDNE2018617, KIDNE2018678, KIDNE2018727, KIDNE2018863, KIDNE2018989, KIDNE2018996, KIDNE2019074, KIDNE2019187, LIVER1000017, LIVER1000050, LIVER1000055, LIVER1000058, LIVER1000063, LIVER1000067, LIVER1000073, LIVER1000082, LIVER1000099, LIVER1000104, LIVER1000111, LIVER1000126, LIVER1000132, LIVER1000139, LIVER1000155, LIVER1000165, LIVER1000175, LIVER1000224, LIVER1000230, LIVER1000278, LIVER1000303, LIVER1000397, LIVER1000421, LIVER1000433, LIVER1000479, LIVER1000482, LIVER1000542, LIVER2000003, LIVER2000037, LIVER2000158, LIVER2000216, LIVER2000237, LIVER2000247, LIVER2000360, LIVER2000416, LIVER2000446, LIVER2000515,

[2189] LIVER2000592, LIVER2000626, LIVER2000682, LIVER2000769, LIVER2000775, LIVER2001051, LIVER2001076, LIVER2001099, LIVER2001113, LIVER2001164, LIVER2001191, LIVER2001265, LIVER2001329, LIVER2001389, LIVER2001461, LIVER2001835, LIVER2002638, LIVER2002644, LIVER2002660, LIVER2002702, LIVER2002842, LIVER2003008, LIVER2003065, LIVER2003234, LIVER2003511, LIVER2003524, LIVER2003568, LIVER2003581, LIVER2003800, LIVER2003854, LIVER2004074, LIVER2004392, LIVER2004514, LIVER2004565, LIVER2005028, LIVER2005198, LIVER2005218, LIVER2005376, LIVER2005385, LIVER2005512, LIVER2005520, LIVER2005527, LIVER2005544, LIVER2005625, LIVER2005728, LIVER2005789, LIVER2005973, LIVER2005981, LIVER2006251, LIVER2006410,

[2190] LIVER2006469, LIVER2006644, LIVER2006764, LIVER2007415, LIVER2007548, LIVER2007568, LIVER2007721, LIVER2007783, LIVER2008053, LIVER2008473, LIVER2008580, LIVER2008706, LIVER2008751, LIVER2008945, LIVER2008998, LIVER2009110, LIVER2009118, LIVER2009554, LYMPB1000141, LYMPB1000158, LYMPB2000083, MAMGL1000017, MAMGL1000083, MAMGL1000096, MAMGL1000100, MAMGL1000132, MAMGL1000151, MAMGL1000178, MAMGL1000182, MAMGL1000184, MESAN1000032, MESAN1000035, MESAN1000079, MESAN1000080, MESAN1000121, MESAN1000180, MESAN2000023, MESAN2000026, MESAN2000067, MESAN2000092, MESAN2000167, MESAN2000264, MESAN2000291, MESAN2000337, MESAN2000434, MESAN2000462, MESAN2000620, MESAN2000711, MESAN2000815, MESAN2000894,

[2191] MESAN2000909, MESAN2001154, MESAN2001450, MESAN2001770, MESAN2001979, MESAN2001980, MESAN2002113, MESAN2002147, MESAN2002424, MESAN2002687, MESAN2002709, MESAN2002724, MESAN2002790, MESAN2002978, MESAN2003037, MESAN2003101, MESAN2003190, MESAN2003322, MESAN2003490, MESAN2003529, MESAN2003646, MESAN2003662, MESAN2003709, MESAN2003851, MESAN2004138, MESAN2004288, MESAN2004575, MESAN2005284, MESAN2005303, MESAN2005371, MESAN2005724, MESAN2005808, MESAN2005811, MESAN2005957, MESAN2005958, MESAN2006022, MESAN2006328, MESAN2006580, MESAN2006599, MESAN2006971, MESAN2007032, MESAN2007440, MESAN2007597, MESAN2007755, MESAN2008222, MESAN2008415, MESAN2008460, MESAN2008536, MESAN2008679, MESAN2008729,

[2192] MESAN2008821, MESAN2009081, MESAN2009105, MESAN2009311, MESAN2009418, MESAN2009503, MESAN2009522, MESAN2009580, MESAN2010031, MESAN2010114, MESAN2010312, MESAN2010321, MESAN2010664, MESAN2010681, MESAN2011545, MESAN2011597, MESAN2011627, MESAN2011632, MESAN2011977, MESAN2012586, MESAN2012708, MESAN2012735, MESAN2013019, MESAN2013022, MESAN2013183, MESAN2013211, MESAN2013283, MESAN2013611, MESAN2013674, MESAN2013845, MESAN2013936, MESAN2014192, MESAN2014295, MESAN2014298, MESAN2014412, MESAN2014624, MESAN2015277, MESAN2015365, MESAN2015401, MESAN2015501, MESAN2015708, MESAN2016159, MESAN2016304, MESAN2016409, MESAN2016965, MESAN2017152, MESAN2017373, MESAN2017417, MESAN2018209, MESAN2018576,

[2193] MESAN2018670, MESAN2018699, MESTC1000042, MESTC1000147, MESTC2000150, MESTC2000153, MESTC2000170, N1ESE2000698, NB9N41000146, NB9N41000340, NB9N42000104, NB9N42000122, NB9N42000196, NB9N42000314, NB9N42000342, NB9N42000430, NB9N42000495, NB9N42001300, NCRRP1000129, NESOP1000010, NESOP1000087, NESOP1000108, NESOP2000231, NESOP2000452, NESOP2000499, NESOP2000504, NESOP2000744, NESOP2001144, NESOP2001433, NESOP2001656, NESOP2001694, NESOP2001752, NESOP2002352, NESOP2002418, NESOP2002487, NESOP2002738, NESOP2002780, NETRP1000034, NETRP1000082, NETRP2000086, NETRP2000182, NETRP2000439, NHNPC1000034, NHNPC1000037, NHNPC1000084, NHNPC1000101, NHNPC1000124, NHNPC2000062, NHNPC2000187, NHNPC2000606,

[2194] NHNPC2000877, NHNPC2001108, NHNPC2001223, NHNPC2001816, NHNPC2002565, NHNPC2002749, NOVAR1000015, NOVAR1000102, NOVAR2000038, NOVAR2000136, NOVAR2000352, NOVAR2000412, NOVAR2000710, NOVAR2000962, NOVAR2001108, NOVAR2001620, NOVAR2001783, NOVAR2001876, NOVAR2002039, PANCR1000012, PANCR1000021, PANCR1000081, PANCR1000086, PANCR1000091, PANCR1000185, PEBLM1000024, PEBLM1000029, PEBLM1000034, PEBLM1000062, PEBLM1000068, PEBLM1000071, PEBLM1000083, PEBLM1000147, PEBLM1000174, PEBLM1000180, PEBLM2000030, PEBLM2000112, PEBLM2000126, PEBLM2000170, PEBLM2000180, PEBLM2000213, PEBLM2000248, PEBLM2000267, PEBLM2000270, PEBLM2000321, PEBLM2000333, PEBLM2000338, PEBLM2000479, PEBLM2000502, PEBLM2001312,

[2195] PEBLM2001465, PEBLM2001488, PEBLM2001803, PEBLM2002432, PEBLM2002455, PEBLM2002594, PEBLM2002749, PEBLM2002887, PEBLM2003426, PEBLM2003765, PEBLM2003914, PEBLM2003935, PEBLM2004015, PEBLM2004216, PEBLM2004290, PEBLM2004497, PEBLM2004666, PEBLM2004733, PEBLM2005282, PEBLM2005615, PEBLM2005632, PEBLM2005697, PEBLM2006031, PEBLM2006036, PEBLM2006049, PEBLM2006113, PEBLM2006135, PEBLM2006215, PEBLM2006283, PEBLM2006298, PEBLM2006912, PEBLM2007112, PEBLM2007140, PEBLM2007296, PEBLM2007437, PEBLM2007447, PEBLM2007598, PEBLM2007774, PEBLM2007832, PEBLM2007834, PEBLM2008106, PEBLM2008576, PEBLM2008605, PEBLM2008826, PEBLM2008861, PERIC1000025, PERIC1000147, PERIC2000180, PERIC2000214, PERIC2000386,

[2196] PERIC2000387, PERIC2000422, PERIC2000473, PERIC2000478, PERIC2000889, PERIC2000914, PERIC2001227, PERIC2001228, PERIC2001379, PERIC2001504, PERIC2001703, PERIC2001764, PERIC2002243, PERIC2002272, PERIC2002452, PERIC2003001, PERIC2003090, PERIC2003287, PERIC2003349, PERIC2003452, PERIC2003699, PERIC2003720, PERIC2003794, PERIC2003834, PERIC2003919, PERIC2003957, PERIC2004028, PERIC2004131, PERIC2004259, PERIC2004379, PERIC2004429, PERIC2004510, PERIC2004613, PERIC2004909, PERIC2005111, PERIC2005305, PERIC2005347, PERIC2005370, PERIC2005936, PERIC2006035, PERIC2006121, PERIC2006443, PERIC2006945, PERIC2006960, PERIC2007439, PERIC2007914, PERIC2008008, PERIC2008385, PERIC2009001, PERIC2009086,

[2197] PERIC2009329, PERIC2009566, PLACE5000001, PLACE5000037, PLACE5000058, PLACE5000066, PLACE5000067, PLACE5000068, PLACE5000070, PLACE5000080, PLACE5000105, PLACE5000115, PLACE5000116, PLACE5000129, PLACE5000139, PLACE5000153, PLACE5000170, PLACE5000171, PLACE5000172, PLACE5000178, PLACE5000245, PLACE5000260, PLACE5000282, PLACE5000297, PLACE5000372, PLACE5000492, PLACE5000522, PLACE5000527, PLACE6000012, PLACE6000044, PLACE6000055, PLACE6000070, PLACE6000137, PLACE6000145, PLACE6000191, PLACE6000205, PLACE6000231, PLACE6000296, PLACE6000314, PLACE6000325, PLACE6000348, PLACE6000371, PLACE6000414, PLACE6000424, PLACE6000426, PLACE6000429, PLACE6000450, PLACE6000463, PLACE6000523, PLACE6000550,

[2198] PLACE6000552, PLACE6000555, PLACE6000619, PLACE6000630, PLACE6000953, PLACE6001118, PLACE6001153, PLACE6001185, PLACE6001262, PLACE6001294, PLACE6001536, PLACE6001557, PLACE6001712, PLACE6001740, PLACE6001823, PLACE6001886, PLACE6001925, PLACE6001933, PLACE6002011, PLACE6002016, PLACE6002056, PLACE6002157, PLACE6002312, PLACE6002323, PLACE6002345, PLACE6002419, PLACE6002462, PLACE6002647, PLACE6002668, PLACE6002692, PLACE6002699, PLACE6002710, PLACE6002871, PLACE6002949, PLACE6003004, PLACE6003038, PLACE6003077, PLACE6003094, PLACE6003109, PLACE6003204, PLACE6003218, PLACE6003372, PLACE6003399, PLACE6003539, PLACE6003621, PLACE6003705, PLACE6003740, PLACE6003771, PLACE6003796, PLACE6003839,

[2199] PLACE6003850, PLACE6004101, PLACE6004219, PLACE6004336, PLACE6004368, PLACE6004380, PLACE6004396, PLACE6004454, PLACE6004464, PLACE6004491, PLACE6004578, PLACE6004663, PLACE6004687, PLACE6004738, PLACE6004966, PLACE6004993, PLACE6005007, PLACE6005029, PLACE6005108, PLACE6005231, PLACE6005234, PLACE6005283, PLACE6005294, PLACE6005328, PLACE6005351, PLACE6005423, PLACE6005487, PLACE6005535, PLACE6005546, PLACE6005559, PLACE6005579, PLACE6005691, PLACE6005786, PLACE6006077, PLACE6006158, PLACE6006186, PLACE6006217, PLACE6006222, PLACE6006266, PLACE6006287, PLACE6006394, PLACE6006418, PLACE6006474, PLACE6006549, PLACE6006566, PLACE6006697, PLACE6006822, PLACE6006871, PLACE6006905, PLACE6007050,

[2200] PLACE6007180, PLACE6007239, PLACE6007242, PLACE6007309, PLACE6007373, PLACE6007380, PLACE6007433, PLACE6007436, PLACE6007482, PLACE6007687, PLACE6007787, PLACE6007798, PLACE6007807, PLACE6007925, PLACE6008036, PLACE6008094, PLACE6008126, PLACE6008285, PLACE6008444, PLACE6008453, PLACE6008640, PLACE6008750, PLACE6008768, PLACE6008775, PLACE6008824, PLACE6008989, PLACE6009006, PLACE6009008, PLACE6009228, PLACE6009237, PLACE6009338, PLACE6009419, PLACE6009430, PLACE6009482, PLACE6009524, PLACE6009527, PLACE6009560, PLACE6009590, PLACE6009821, PLACE6009835, PLACE6009853, PLACE6010077, PLACE6010463, PLACE6010485, PLACE6010568, PLACE6010701, PLACE6010704, PLACE6010732, PLACE6010765, PLACE6010848,

[2201] PLACE6010925, PLACE6010936, PLACE6010991, PLACE6011102, PLACE6011156, PLACE6011211, PLACE6011260, PLACE6011774, PLACE6011881, PLACE6011907, PLACE6011975, PLACE6012028, PLACE6012108, PLACE6012168, PLACE6012297, PLACE6012308, PLACE6012574, PLACE6012908, PLACE6012936, PLACE6012942, PLACE6013222, PLACE6013232, PLACE6013288, PLACE6013386, PLACE6013400, PLACE6013650, PLACE6013672, PLACE6013883, PLACE6013884, PLACE6013885, PLACE6014043, PLACE6014064, PLACE6014516, PLACE6014882, PLACE6015051, PLACE6015211, PLACE6015322, PLACE6015445, PLACE6015460, PLACE6015513, PLACE6015591, PLACE6015729, PLACE6015731, PLACE6015939, PLACE6016030, PLACE6016093, PLACE6016105, PLACE6016160, PLACE6016254, PLACE6016383,

[2202] PLACE6016942, PLACE6016984, PLACE6017002, PLACE6017431, PLACE6017564, PLACE6017578, PLACE6017626, PLACE6017701, PLACE6017714, PLACE6017788, PLACE6017791, PLACE6018031, PLACE6018107, PLACE6018187, PLACE6018235, PLACE6018287, PLACE6018441, PLACE6018487, PLACE6018497, PLACE6018769, PLACE6018834, PLACE6018843, PLACE6018863, PLACE6019195, PLACE6019542, PLACE6019600, PLACE6019674, PLACE6019676, PLACE6019701, PLACE6019932, PLACE6020031, PLACE6020145, PLACE7000167, PLACE7000170, PLACE7000266, PLACE7000333, PLACE7000410, PLACE7000502, PLACE7000707, PLACE7001022, PLACE7001544, PLACE7001759, PLACE7001936, PLACE7002303, PLACE7002641, PLACE7003639, PLACE7003657, PLACE7003684, PLACE7003985, PLACE7004961,

[2203] PLACE7005169, PLACE7005671, PLACE7005840, PLACE7006051, PLACE7006090, PLACE7006240, PLACE7006268, PLACE7006275, PLACE7006498, PLACE7006540, PLACE7007379, PLACE7007644, PLACE7007973, PLACE7008136, PLACE7008261, PLACE7008431, PLACE7008623, PLACE7008766, PLACE7009563, PROST1000033, PROST1000039, PROST1000065, PROST1000083, PROST1000085, PROST1000110, PROST1000120, PROST1000123, PROST1000136, PROST1000145, PROST1000152, PROST1000167, PROST1000184, PROST1000217, PROST1000246, PROST1000262, PROST1000272, PROST1000298, PROST1000334, PROST1000343, PROST1000362, PROST1000377, PROST1000383, PROST1000412, PROST1000419, PROST1000451, PROST1000480, PROST1000485, PROST1000493, PROST1000512, PROST1000527,

[2204] PROST1000528, PROST1000536, PROST1000559, PROST1000575, PROST2000036, PROST2000053, PROST2000067, PROST2000105, PROST2000143, PROST2000162, PROST2000165, PROST2000176, PROST2000203, PROST2000206, PROST2000212, PROST2000241, PROST2000267, PROST2000273, PROST2000277, PROST2000337, PROST2000432, PROST2000452, PROST2000463, PROST2000470, PROST2000505, PROST2000567, PROST2000572, PROST2000717, PROST2000761, PROST2000835, PROST2000893, PROST2000961, PROST2001002, PROST2001116, PROST2001138, PROST2001283, PROST2001414, PROST2001415, PROST2001465, PROST2001521, PROST2001540, PROST2001599, PROST2001611, PROST2001636, PROST2001739, PROST2001796, PROST2001805, PROST2001823, PROST2001883, PROST2001899,

[2205] PROST2001997, PROST2001998, PROST2002078, PROST2002101, PROST2002162, PROST2002212, PROST2002338, PROST2002425, PROST2002488, PROST2002489, PROST2002527, PROST2002591, PROST2002602, PROST2002633, PROST2002682, PROST2002685, PROST2002722, PROST2002736, PROST2002842, PROST2002897, PROST2002906, PROST2002927, PROST2003102, PROST2003117, PROST2003210, PROST2003302, PROST2003303, PROST2003324, PROST2003340, PROST2003428, PROST2003472, PROST2003537, PROST2003563, PROST2003577, PROST2003583, PROST2003586, PROST2003628, PROST2003635, PROST2003674, PROST2003676, PROST2003725, PROST2003732, PROST2003775, PROST2003922, PROST2003930, PROST2004115, PROST2004142, PROST2004146, PROST2004161, PROST2004251,

[2206] PROST2004332, PROST2004481, PROST2004526, PROST2004727, PROST2004742, PROST2004744, PROST2004817, PROST2005039, PROST2005067, PROST2005076, PROST2005093, PROST2005121, PROST2005131, PROST2005228, PROST2005285, PROST2005426, PROST2005466, PROST2005604, PROST2005630, PROST2005683, PROST2005788, PROST2005880, PROST2005886, PROST2005904, PROST2005919, PROST2005943, PROST2006008, PROST2006020, PROST2006060, PROST2006196, PROST2006201, PROST2006282, PROST2006450, PROST2006491, PROST2006510, PROST2006579, PROST2006688, PROST2006737, PROST2006766, PROST2006782, PROST2006933, PROST2006988, PROST2007122, PROST2007237, PROST2007248, PROST2007289, PROST2007317, PROST2007328, PROST2007382, PROST2007389,

[2207] PROST2007416, PROST2007528, PROST2007612, PROST2007818, PROST2007950, PROST2007956, PROST2007974, PROST2007988, PROST2008079, PROST2008088, PROST2008243, PROST2008245, PROST2008268, PROST2008360, PROST2008447, PROST2008468, PROST2008472, PROST2008516, PROST2008724, PROST2008835, PROST2008993, PROST2009022, PROST2009208, PROST2009222, PROST2009254, PROST2009273, PROST2009320, PROST2009347, PROST2009365, PROST2009388, PROST2009470, PROST2009483, PROST2009571, PROST2009731, PROST2009736, PROST2009795, PROST2009901, PROST2009909, PROST2010046, PROST2010219, PROST2010250, PROST2010318, PROST2010326, PROST2010382, PROST2010400, PROST2010545, PROST2010579, PROST2010606, PROST2010885, PROST2011012,

[2208] PROST2011038, PROST2011105, PROST2011297, PROST2011410, PROST2011439, PROST2011482, PROST2011631, PROST2011660, PROST2012005, PROST2012016, PROST2012088, PROST2012140, PROST2012157, PROST2012190, PROST2012249, PROST2012353, PROST2012400, PROST2012504, PROST2012542, PROST2012550, PROST2012740, PROST2012745, PROST2012780, PROST2013032, PROST2013053, PROST2013121, PROST2013260, PROST2013327, PROST2013531, PROST2013605, PROST2013627, PROST2013873, PROST2013880, PROST2014422, PROST2014585, PROST2014601, PROST2014659, PROST2014862, PROST2014916, PROST2014925, PROST2015124, PROST2015198, PROST2015243, PROST2015246, PROST2015251, PROST2015287, PROST2015457, PROST2015464, PROST2015537, PROST2015545,

[2209] PROST2015551, PROST2015636, PROST2015710, PROST2015756, PROST2015877, PROST2015900, PROST2015924, PROST2015932, PROST2016195, PROST2016246, PROST2016351, PROST2016379, PROST2016444, PROST2016462, PROST2016499, PROST2016512, PROST2016566, PROST2016582, PROST2016668, PROST2016684, PROST2016777, PROST2016829, PROST2016860, PROST2016980, PROST2017098, PROST2017128, PROST2017367, PROST2017413, PROST2017441, PROST2017529, PROST2017578, PROST2017612, PROST2017617, PROST2017700, PROST2017701, PROST2017729, PROST2017836, PROST2017972, PROST2018030, PROST2018090, PROST2018235, PROST2018437, PROST2018487, PROST2018511, PROST2018583, PROST2018588, PROST2018788, PROST2018902, PROST2018922, PROST2018977,

[2210] PROST2019164, PROST2019296, PROST2019398, PROST2019487, PROST2019781, PUAEN1000039, PUAEN1000081, PUAEN1000085, PUAEN1000087, PUAEN1000121, PUAEN1000147, PUAEN1000175, PUAEN1000275, PUAEN1000276, PUAEN1000288, PUAEN2000080, PUAEN2000152, PUAEN2000175, PUAEN2000247, PUAEN2000312, PUAEN2000394, PUAEN2000535, PUAEN2000594, PUAEN2000684, PUAEN2000942, PUAEN2001260, PUAEN2001345, PUAEN2001526, PUAEN2001586, PUAEN2001882, PUAEN2002473, PUAEN2002552, PUAEN2002568, PUAEN2002616, PUAEN2002758, PUAEN2003018, PUAEN2003079, PUAEN2003116, PUAEN2003517, PUAEN2003954, PUAEN2004067, PUAEN2004083, PUAEN2004400, PUAEN2004511, PUAEN2004525, PUAEN2004875, PUAEN2005110, PUAEN2005247, PUAEN2005502, PUAEN2005588,

[2211] PUAEN2005930, PUAEN2006029, PUAEN2006328, PUAEN2006578, PUAEN2006639, PUAEN2006761, PUAEN2007785, PUAEN2007898, PUAEN2008123, PUAEN2008228, PUAEN2008314, PUAEN2008515, PUAEN2008939, PUAEN2008980, PUAEN2008985, PUAEN2009174, PUAEN2009348, PUAEN2009534, PUAEN2009655, PUAEN2009795, PUAEN2009852, PUAEN2010346, PUAEN2010824, RECTM1000141, RECTM2000220, RECTM2000349, RECTM2000433, RECTM2001307, RECTM2001519, RECTM2001666, RECTM2001691, RECTM2001749, RECTM2002172, RECTM2002602, RECTM2002632, SALGL1000005, SALGL1000024, SALGL1000028, SALGL1000065, SALGL1000107, SALGL1000171, SKMUS1000014, SKMUS1000030, SKMUS1000067, SKMUS1000102, SKMUS1000104, SKMUS1000110, SKMUS1000118, SKMUS1000124, SKMUS1000129,

[2212] SKMUS1000176, SKMUS1000177, SKMUS2000020, SKMUS2000061, SKMUS2000074, SKMUS2000078, SKMUS2000117, SKMUS2000137, SKMUS2000243, SKMUS2000271, SKMUS2000287, SKMUS2000317, SKMUS2000330, SKMUS2000339, SKMUS2000343, SKMUS2000365, SKMUS2000380, SKMUS2000390, SKMUS2000416, SKMUS2000458, SKMUS2000468, SKMUS2000484, SKMUS2000515, SKMUS2000690, SKMUS2000701, SKMUS2000705, SKMUS2000710, SKMUS2000724, SKMUS2000726, SKMUS2000757, SKMUS2000774, SKMUS2000780, SKMUS2000821, SKMUS2000847, SKMUS2000863, SKMUS2000873, SKMUS2000894, SKMUS2000898, SKMUS2000902, SKMUS2000933, SKMUS2000945, SKMUS2000954, SKMUS2000961, SKMUS2000973, SKMUS2000980, SKMUS2001008, SKMUS2001014, SKMUS2001129, SKMUS2001157, SKMUS2001164,

[2213] SKMUS2001199, SKMUS2001201, SKMUS2001215, SKMUS2001247, SKMUS2001254, SKMUS2001271, SKMUS2001287, SKMUS2001364, SKMUS2001398, SKMUS2001402, SKMUS2001412, SKMUS2001492, SKMUS2001501, SKMUS2001528, SKMUS2001543, SKMUS2001580, SKMUS2001585, SKMUS2001608, SKMUS2001631, SKMUS2001662, SKMUS2001663, SKMUS2001668, SKMUS2001671, SKMUS2001683, SKMUS2001693, SKMUS2001695, SKMUS2001703, SKMUS2001740, SKMUS2001742, SKMUS2001823, SKMUS2001850, SKMUS2002077, SKMUS2002153, SKMUS2002475, SKMUS2002602, SKMUS2002634, SKMUS2002693, SKMUS2002821, SKMUS2002840, SKMUS2002920, SKMUS2003034, SKMUS2003074, SKMUS2003168, SKMUS2003194, SKMUS2003744, SKMUS2004044, SKMUS2004047, SKMUS2004483, SKMUS2004667, SKMUS2004897,

[2214] SKMUS2004903, SKMUS2005428, SKMUS2006394, SKMUS2006481, SKMUS2006755, SKMUS2007315, SKMUS2007359, SKMUS2007568, SKMUS2007740, SKMUS2007816, SKMUS2007915, SKMUS2008338, SKMUS2008407, SKMUS2008474, SKMUS2008585, SKMUS2008607, SKMUS2009190, SKMUS2009232, SKMUS2009479, SKMUS2009557, SKNMC1000123, SKNMC1000124, SKNMC1000137, SKNMC1000159, SKNMC1000251, SKNMC2000224, SKNMC2000256, SKNMC2000305, SKNMC2000322, SKNMC2000356, SKNMC2000374, SKNMC2000583, SKNMC2000593, SKNMC2000612, SKNMC2000622, SKNMC2000966, SKNMC2001113, SKNMC2001503, SKNMC2001555, SKNMC2001596, SKNMC2001623, SKNMC2003639, SKNMC2003924, SKNMC2003987, SKNMC2004457, SKNMC2004643, SKNMC2004651, SKNMC2005772, SKNMC2006327, SKNMC2006998,

[2215] SKNMC2007134, SKNMC2007502, SKNMC2007504, SKNMC2007961, SKNMC2009450, SKNSH1000174, SKNSH1000301, SKNSH1000308, SKNSH1000416, SKNSH2000151, SKNSH2000163, SKNSH2000319, SKNSH2000482, SKNSH2000516, SKNSH2000550, SKNSH2000716, SKNSH2000971, SKNSH2001222, SKNSH2001875, SKNSH2002054, SKNSH2002768, SKNSH2002866, SKNSH2003064, SKNSH2003174, SKNSH2003422, SKNSH2003466, SKNSH2003483, SKNSH2003528, SKNSH2003633, SKNSH2004039, SKNSH2005120, SKNSH2005194, SKNSH2005240, SKNSH2005792, SKNSH2005816, SKNSH2005981, SKNSH2006234, SKNSH2006304, SKNSH2006432, SKNSH2006822, SKNSH2007142, SKNSH2007149, SKNSH2007429, SKNSH2007739, SKNSH2008940, SKNSH2008969, SKNSH2009197, SKNSH2009357, SKNSH2009435, SKNSH2009991,

[2216] SKNSH2010015, SMINT1000012, SMINT1000016, SMINT1000039, SMINT1000048, SMINT1000051, SMINT1000057, SMINT1000071, SMINT1000075, SMINT1000078, SMINT1000091, SMINT1000100, SMINT1000103, SMINT1000118, SMINT1000137, SMINT1000192, SMINT2000007, SMINT2000032, SMINT2000040, SMINT2000060, SMINT2000084, SMINT2000145, SMINT2000159, SMINT2000185, SMINT2000227, SMINT2000229, SMINT2000239, SMINT2000267, SMINT2000454, SMINT2000518, SMINT2000529, SMINT2000530, SMINT2000538, SMINT2000541, SMINT2000545, SMINT2000558, SMINT2000562, SMINT2000568, SMINT2000602, SMINT2000629, SMINT2000747, SMINT2000811, SMINT2000824, SMINT2000933, SMINT2000984, SMINT2001114, SMINT2001158, SMINT2001183, SMINT2001199, SMINT2001222,

[2217] SMINT2001348, SMINT2001397, SMINT2001458, SMINT2001461, SMINT2001535, SMINT2001559, SMINT2001609, SMINT2001683, SMINT2001731, SMINT2001812, SMINT2001818, SMINT2001950, SMINT2002126, SMINT2002159, SMINT2002202, SMINT2002210, SMINT2002281, SMINT2002311, SMINT2002314, SMINT2002328, SMINT2002414, SMINT2002457, SMINT2002689, SMINT2002743, SMINT2002778, SMINT2002880, SMINT2002884, SMINT2002899, SMINT2002974, SMINT2003003, SMINT2003128, SMINT2003150, SMINT2003317, SMINT2003340, SMINT2003386, SMINT2003423, SMINT2003505, SMINT2003569, SMINT2003641, SMINT2003644, SMINT2003866, SMINT2004023, SMINT2004037, SMINT2004047, SMINT2004086, SMINT2004144, SMINT2004280, SMINT2004299, SMINT2004339, SMINT2004350,

[2218] SMINT2004414, SMINT2004473, SMINT2004547, SMINT2004583, SMINT2004589, SMINT2004781, SMINT2004872, SMINT2004891, SMINT2004909, SMINT2004972, SMINT2004992, SMINT2005075, SMINT2005161, SMINT2005174, SMINT2005213, SMINT2005330, SMINT2005387, SMINT2005402, SMINT2005405, SMINT2005621, SMINT2005623, SMINT2005624, SMINT2005688, SMINT2005800, SMINT2006078, SMINT2006205, SMINT2006331, SMINT2006596, SMINT2006641, SMINT2006648, SMINT2006708, SMINT2006716, SMINT2006801, SMINT2007062, SMINT2007101, SMINT2007140, SMINT2007219, SMINT2007294, SMINT2007365, SMINT2007391, SMINT2007433, SMINT2007508, SMINT2007526, SMINT2007579, SMINT2007647, SMINT2007729, SMINT2007790, SMINT2007792, SMINT2007796, SMINT2007867,

[2219] SMINT2007932, SMINT2008042, SMINT2008054, SMINT2008133, SMINT2008277, SMINT2008329, SMINT2008455, SMINT2008491, SMINT2008531, SMINT2008545, SMINT2008558, SMINT2008625, SMINT2008690, SMINT2008715, SMINT2008720, SMINT2008817, SMINT2008844, SMINT2008869, SMINT2008917, SMINT2009119, SMINT2009121, SMINT2009212, SMINT2009216, SMINT2009233, SMINT2009259, SMINT2009272, SMINT2009363, SMINT2009415, SMINT2009468, SMINT2009505, SMINT2009529, SMINT2009832, SMINT2009895, SMINT2009902, SMINT2009973, SMINT2010015, SMINT2010068, SMINT2010076, SMINT2010084, SMINT2010144, SMINT2010200, SMINT2010278, SMINT2010324, SMINT2010326, SMINT2010369, SMINT2010500, SMINT2010533, SMINT2010629, SMINT2010672, SMINT2010753,

[2220] SMINT2010853, SMINT2010897, SMINT2010959, SMINT2010997, SMINT2011033, SMINT2011066, SMINT2011273, SMINT2011311, SMINT2011406, SMINT2011509, SMINT2011567, SMINT2011588, SMINT2011656, SMINT2011888, SMINT2011958, SMINT2012040, SMINT2012122, SMINT2012179, SMINT2012195, SMINT2012285, SMINT2012501, SMINT2012734, SMINT2012793, SMINT2013031, SMINT2013032, SMINT2013129, SMINT2013170, SMINT2013181, SMINT2013228, SMINT2013613, SMINT2013626, SMINT2013695, SMINT2013833, SMINT2014166, SMINT2014282, SMINT2014443, SMINT2014489, SMINT2014721, SMINT2015006, SMINT2015294, SMINT2015306, SMINT2015326, SMINT2015353, SMINT2015454, SMINT2015518, SMINT2015745, SMINT2015787, SMINT2015810, SMINT2016122, SMINT2016146,

[2221] SMINT2016286, SMINT2016313, SMINT2016396, SMINT2016412, SMINT2016440, SMINT2016477, SMINT2016544, SMINT2016857, SMINT2017134, SMINT2017319, SMINT2017324, SMINT2017410, SMINT2017431, SMINT2017432, SMINT2017436, SMINT2017599, SMINT2017659, SMINT2017736, SMINT2017781, SMINT2017855, SMINT2017884, SMINT2017964, SMINT2017974, SMINT2018343, SMINT2018353, SMINT2018592, SMINT2018681, SMINT2019017, SMINT2019105, SMINT2019142, SMINT2019153, SMINT2019200, SPLEN1000013, SPLEN1000041, SPLEN1000049, SPLEN1000056, SPLEN1000087, SPLEN1000089, SPLEN1000091, SPLEN1000134, SPLEN1000139, SPLEN1000143, SPLEN1000144, SPLEN1000145, SPLEN1000156, SPLEN1000163, SPLEN1000178, SPLEN2000020, SPLEN2000047, SPLEN2000064,

[2222] SPLEN2000072, SPLEN2000098, SPLEN2000126, SPLEN2000134, SPLEN2000143, SPLEN2000189, SPLEN2000197, SPLEN2000205, SPLEN2000210, SPLEN2000222, SPLEN2000242, SPLEN2000243, SPLEN2000247, SPLEN2000255, SPLEN2000270, SPLEN2000307, SPLEN2000310, SPLEN2000341, SPLEN2000348, SPLEN2000350, SPLEN2000357, SPLEN2000364, SPLEN2000402, SPLEN2000414, SPLEN2000420, SPLEN2000443, SPLEN2000448, SPLEN2000450, SPLEN2000464, SPLEN2000496, SPLEN2000515, SPLEN2000537, SPLEN2000541, SPLEN2000607, SPLEN2000630, SPLEN2000695, SPLEN2000874, SPLEN2001135, SPLEN2001141, SPLEN2001176, SPLEN2001227, SPLEN2001245, SPLEN2001278, SPLEN2001354, SPLEN2001367, SPLEN2001383, SPLEN2001476, SPLEN2001503, SPLEN2001510, SPLEN2001599,

[2223] SPLEN2001626, SPLEN2001650, SPLEN2001689, SPLEN2001710, SPLEN2001761, SPLEN2001781, SPLEN2001881, SPLEN2001912, SPLEN2001945, SPLEN2002007, SPLEN2002053, SPLEN2002133, SPLEN2002147, SPLEN2002166, SPLEN2002175, SPLEN2002223, SPLEN2002272, SPLEN2002314, SPLEN2002343, SPLEN2002354, SPLEN2002385, SPLEN2002419, SPLEN2002451, SPLEN2002462, SPLEN2002463, SPLEN2002477, SPLEN2002662, SPLEN2002695, SPLEN2002707, SPLEN2002917, SPLEN2002931, SPLEN2002957, SPLEN2003160, SPLEN2003204, SPLEN2003219, SPLEN2003297, SPLEN2003396, SPLEN2003678, SPLEN2003878, SPLEN2003918, SPLEN2003924, SPLEN2004060, SPLEN2004124, SPLEN2004148, SPLEN2004181, SPLEN2004220, SPLEN2004343, SPLEN2004346, SPLEN2004368, SPLEN2004611,

[2224] SPLEN2004662, SPLEN2004844, SPLEN2004880, SPLEN2004984, SPLEN2005227, SPLEN2005272, SPLEN2005342, SPLEN2005416, SPLEN2005429, SPLEN2005450, SPLEN2005474, SPLEN2005560, SPLEN2005727, SPLEN2005790, SPLEN2005806, SPLEN2005818, SPLEN2005838, SPLEN2005869, SPLEN2005927, SPLEN2005939, SPLEN2006232, SPLEN2006268, SPLEN2006283, SPLEN2006389, SPLEN2006425, SPLEN2006671, SPLEN2006701, SPLEN2006785, SPLEN2006875, SPLEN2007276, SPLEN2007314, SPLEN2007326, SPLEN2007350, SPLEN2007388, SPLEN2007498, SPLEN2007619, SPLEN2007653, SPLEN2007689, SPLEN2007695, SPLEN2007750, SPLEN2007794, SPLEN2007879, SPLEN2007926, SPLEN2007951, SPLEN2008007, SPLEN2008135, SPLEN2008164, SPLEN2008317, SPLEN2008496, SPLEN2008591,

[2225] SPLEN2008786, SPLEN2009081, SPLEN2009088, SPLEN2009163, SPLEN2009315, SPLEN2009340, SPLEN2009512, SPLEN2009513, SPLEN2009541, SPLEN2009548, SPLEN2009581, SPLEN2009733, SPLEN2009803, SPLEN2009884, SPLEN2009918, SPLEN2010004, SPLEN2010015, SPLEN2010112, SPLEN2010119, SPLEN2010146, SPLEN2010187, SPLEN2010350, SPLEN2010395, SPLEN2010415, SPLEN2010447, SPLEN2010469, SPLEN2010510, SPLEN2010530, SPLEN2010534, SPLEN2010588, SPLEN2010625, SPLEN2010800, SPLEN2010846, SPLEN2010847, SPLEN2010862, SPLEN2010978, SPLEN2010986, SPLEN2011018, SPLEN2011021, SPLEN2011025, SPLEN2011086, SPLEN2011139, SPLEN2011145, SPLEN2011248, SPLEN2011252, SPLEN2011419, SPLEN2011422, SPLEN2011672, SPLEN2011678, SPLEN2011766,

[2226] SPLEN2011805, SPLEN2011820, SPLEN2011830, SPLEN2011931, SPLEN2011981, SPLEN2012115, SPLEN2012175, SPLEN2012179, SPLEN2012185, SPLEN2012234, SPLEN2012453, SPLEN2012523, SPLEN2012524, SPLEN2012525, SPLEN2012606, SPLEN2012611, SPLEN2012619, SPLEN2012624, SPLEN2012725, SPLEN2012743, SPLEN2012756, SPLEN2012800, SPLEN2012846, SPLEN2012889, SPLEN2012961, SPLEN2013108, SPLEN2013195, SPLEN2013503, SPLEN2013644, SPLEN2013648, SPLEN2013670, SPLEN2013673, SPLEN2013690, SPLEN2013714, SPLEN2013753, SPLEN2013821, SPLEN2013857, SPLEN2013860, SPLEN2013910, SPLEN2013923, SPLEN2013936, SPLEN2014041, SPLEN2014063, SPLEN2014073, SPLEN2014119, SPLEN2014136, SPLEN2014199, SPLEN2014210, SPLEN2014293, SPLEN2014318,

[2227] SPLEN2014381, SPLEN2014452, SPLEN2014454, SPLEN2014486, SPLEN2014543, SPLEN2014572, SPLEN2014645, SPLEN2014669, SPLEN2014711, SPLEN2014739, SPLEN2014860, SPLEN2014865, SPLEN2014919, SPLEN2014920, SPLEN2014924, SPLEN2014937, SPLEN2014946, SPLEN2015031, SPLEN2015094, SPLEN2015121, SPLEN2015129, SPLEN2015158, SPLEN2015166, SPLEN2015216, SPLEN2015258, SPLEN2015261, SPLEN2015267, SPLEN2015276, SPLEN2015415, SPLEN2015433, SPLEN2015593, SPLEN2015674, SPLEN2015679, SPLEN2015707, SPLEN2015730, SPLEN2015746, SPLEN2015788, SPLEN2015815, SPLEN2015890, SPLEN2015891, SPLEN2015899, SPLEN2016045, SPLEN2016053, SPLEN2016069, SPLEN2016098, SPLEN2016135, SPLEN2016139, SPLEN2016241, SPLEN2016250, SPLEN2016304,

[2228] SPLEN2016356, SPLEN2016421, SPLEN2016480, SPLEN2016531, SPLEN2016533, SPLEN2016541, SPLEN2016552, SPLEN2016554, SPLEN2016602, SPLEN2016627, SPLEN2016678, SPLEN2016743, SPLEN2016773, SPLEN2016781, SPLEN2016840, SPLEN2016863, SPLEN2016922, SPLEN2016932, SPLEN2016973, SPLEN2017043, SPLEN2017104, SPLEN2017121, SPLEN2017147, SPLEN2017187, SPLEN2017189, SPLEN2017212, SPLEN2017426, SPLEN2017452, SPLEN2017538, SPLEN2017592, SPLEN2017613, SPLEN2017620, SPLEN2017643, SPLEN2017687, SPLEN2017740, SPLEN2017781, SPLEN2017918, SPLEN2017999, SPLEN2018098, SPLEN2018112, SPLEN2018180, SPLEN2018181, SPLEN2018280, SPLEN2018285, SPLEN2018299, SPLEN2018302, SPLEN2018364, SPLEN2018395, SPLEN2018643, SPLEN2018683,

[2229] SPLEN2018732, SPLEN2018749, SPLEN2018933, SPLEN2019008, SPLEN2019043, SPLEN2019077, SPLEN2019092, SPLEN2019102, SPLEN2019131, SPLEN2019169, SPLEN2019257, SPLEN2019311, SPLEN2019323, SPLEN2019349, SPLEN2019375, SPLEN2019379, SPLEN2019405, SPLEN2019471, SPLEN2019480, SPLEN2019505, SPLEN2019571, SPLEN2019575, SPLEN2019709, SPLEN2019774, SPLEN2019793, SPLEN2019811, SPLEN2019839, SPLEN2019956, SPLEN2019985, SPLEN2020007, SPLEN2020034, SPLEN2020153, SPLEN2020154, SPLEN2020166, SPLEN2020183, SPLEN2020223, SPLEN2020359, SPLEN2020417, SPLEN2020427, SPLEN2020467, SPLEN2020512, SPLEN2020608, SPLEN2020777, SPLEN2020805, SPLEN2021057, SPLEN2021157, SPLEN2021231, SPLEN2021273, SPLEN2021295, SPLEN2021298,

[2230] SPLEN2021383, SPLEN2021417, SPLEN2021440, SPLEN2021458, SPLEN2021463, SPLEN2021560, SPLEN2021701, SPLEN2021795, SPLEN2021983, SPLEN2021991, SPLEN2022040, SPLEN2022162, SPLEN2022227, SPLEN2022522, SPLEN2022591, SPLEN2022785, SPLEN2022920, SPLEN2023024, SPLEN2023118, SPLEN2023160, SPLEN2023423, SPLEN2023710, SPLEN2023733, SPLEN2023791, SPLEN2023977, SPLEN2024070, SPLEN2024127, SPLEN2024232, SPLEN2024273, SPLEN2024383, SPLEN2024489, SPLEN2024530, SPLEN2024571, SPLEN2024577, SPLEN2024617, SPLEN2024737, SPLEN2024922, SPLEN2024956, SPLEN2024990, SPLEN2025012, SPLEN2025039, SPLEN2025219, SPLEN2025491, SPLEN2025626, SPLEN2025820, SPLEN2026144, SPLEN2026411, SPLEN2026765, SPLEN2027157, SPLEN2027395,

[2231] SPLEN2027488, SPLEN2027780, SPLEN2027852, SPLEN2027868, SPLEN2027995, SPLEN2028046, SPLEN2028066, SPLEN2028138, SPLEN2028365, SPLEN2028417, SPLEN2028424, SPLEN2028593, SPLEN2028844, SPLEN2028994, SPLEN2029051, SPLEN2029176, SPLEN2029295, SPLEN2029380, SPLEN2029522, SPLEN2029683, SPLEN2029727, SPLEN2029904, SPLEN2029912, SPLEN2030250, SPLEN2030335, SPLEN2030371, SPLEN2030397, SPLEN2030479, SPLEN2030495, SPLEN2030562, SPLEN2030763, SPLEN2030847, SPLEN2031004, SPLEN2031125, SPLEN2031424, SPLEN2031674, SPLEN2031724, SPLEN2031780, SPLEN2032036, SPLEN2032112, SPLEN2032154, SPLEN2032157, SPLEN2032321, SPLEN2032356, SPLEN2032677, SPLEN2032813, SPLEN2032924, SPLEN2033098, SPLEN2033153, SPLEN2033333,

[2232] SPLEN2033490, SPLEN2033539, SPLEN2033921, SPLEN2033996, SPLEN2034021, SPLEN2034081, SPLEN2034252, SPLEN2034448, SPLEN2034551, SPLEN2034601, SPLEN2034678, SPLEN2034781, SPLEN2034864, SPLEN2034934, SPLEN2035318, SPLEN2035615, SPLEN2036076, SPLEN2036103, SPLEN2036326, SPLEN2036475, SPLEN2036501, SPLEN2036579, SPLEN2036608, SPLEN2036702, SPLEN2036712, SPLEN2036821, SPLEN2036932, SPLEN2036953, SPLEN2037077, SPLEN2037194, SPLEN2037319, SPLEN2037444, SPLEN2037580, SPLEN2037630, SPLEN2037678, SPLEN2037722, SPLEN2037891, SPLEN2038055, SPLEN2038180, SPLEN2038345, SPLEN2038407, SPLEN2038473, SPLEN2038834, SPLEN2039311, SPLEN2039672, SPLEN2039697, SPLEN2039845, SPLEN2039936, SPLEN2040222, SPLEN2040237,

[2233] SPLEN2040824, SPLEN2041304, SPLEN2041306, SPLEN2041310, SPLEN2041585, SPLEN2041645, SPLEN2041700, SPLEN2041720, SPLEN2041977, SPLEN2042051, SPLEN2042521, SPLEN2042535, SPLEN2042598, SPLEN2042714, SPLEN2042920, STOMA1000013, STOMA1000052, STOMA1000074, STOMA1000091, STOMA1000117, STOMA1000133, STOMA1000175, STOMA1000186, STOMA1000189, STOMA1000190, STOMA1000191, STOMA2000032, STOMA2000072, STOMA2000088, STOMA2000104, STOMA2000148, STOMA2000168, STOMA2000183, STOMA2000188, STOMA2000257, STOMA2000279, STOMA2000383, STOMA2000386, STOMA2000395, STOMA2000478, STOMA2000529, STOMA2000539, STOMA2000567, STOMA2000640, STOMA2000678, STOMA2000686, STOMA2000888, STOMA2001025, STOMA2001389, STOMA2002052,

[2234] STOMA2002141, STOMA2002367, STOMA2002688, STOMA2002828, STOMA2003158, STOMA2003289, STOMA2003444, STOMA2003477, STOMA2003646, STOMA2003716, STOMA2003781, STOMA2003894, STOMA2004194, STOMA2004294, STOMA2004663, STOMA2004668, STOMA2004852, STOMA2004873, STOMA2004884, STOMA2004893, STOMA2004925, STOMA2005120, STOMA2005664, STOMA2005667, STOMA2005746, STOMA2005782, STOMA2006181, STOMA2006213, STOMA2006229, STOMA2006325, STOMA2006330, STOMA2006398, STOMA2006447, STOMA2006904, STOMA2007269, STOMA2007680, STOMA2007745, STOMA2008050, STOMA2008361, STOMA2008546, STOMA2008614, STOMA2008638, STOMA2008838, STOMA2009250, STOMA2009253, STOMA2009256, STOMA2009289, SYNOV1000045, SYNOV1000128, SYNOV1000164,

[2235] SYNOV1000190, SYNOV1000256, SYNOV1000374, SYNOV2000152, SYNOV2000171, SYNOV2000173, SYNOV2000177, SYNOV2000178, SYNOV2000193, SYNOV2000251, SYNOV2000279, SYNOV2000291, SYNOV2000297, SYNOV2000397, SYNOV2000426, SYNOV2000601, SYNOV2000700, SYNOV2000820, SYNOV2000824, SYNOV2000923, SYNOV2001014, SYNOV2001035, SYNOV2001088, SYNOV2001111, SYNOV2001212, SYNOV2001239, SYNOV2001251, SYNOV2001262, SYNOV2001300, SYNOV2001356, SYNOV2001390, SYNOV2001451, SYNOV2001457, SYNOV2001468, SYNOV2001581, SYNOV2001648, SYNOV2001660, SYNOV2003326, SYNOV2005448, SYNOV2005541, SYNOV2005673, SYNOV2005817, SYNOV2005962, SYNOV2006430, SYNOV2006620, SYNOV2007758, SYNOV2007965, SYNOV2008765, SYNOV2009172, SYNOV2011233,

[2236] SYNOV2012326, SYNOV2013365, SYNOV2013637, SYNOV2014157, SYNOV2014364, SYNOV2016124, SYNOV2016837, SYNOV2017055, SYNOV2017179, SYNOV2018921, SYNOV2019280, SYNOV2020085, SYNOV2020463, SYNOV2021320, SYNOV2021953, SYNOV3000184, SYNOV3000231, SYNOV3000302, SYNOV3000345, SYNOV4000249, SYNOV4000472, SYNOV4000598, SYNOV4000706, SYNOV4001153, SYNOV4001224, SYNOV4001326, SYNOV4001342, SYNOV4001395, SYNOV4002001, SYNOV4002392, SYNOV4002875, SYNOV4002883, SYNOV4003174, SYNOV4003322, SYNOV4003681, SYNOV4003981, SYNOV4004184, SYNOV4004741, SYNOV4004823, SYNOV4004914, SYNOV4005256, SYNOV4005570, SYNOV4005739, SYNOV4005889, SYNOV4005981, SYNOV4005989, SYNOV4006256, SYNOV4006327, SYNOV4006542, SYNOV4007012,

[2237] SYNOV4007215, SYNOV4007360, SYNOV4007430, SYNOV4007521, SYNOV4007553, SYNOV4007711, SYNOV4008245, SYNOV4008336, SYNOV4009139, SYNOV4009575, T1ESE2000116, T1ESE2000609, T1ESE2002665, TBAES2000004, TBAES2000059, TBAES2000116, TBAES2000255, TBAES2000315, TBAES2000352, TBAES2000932, TBAES2001171, TBAES2001220, TBAES2001229, TBAES2001258, TBAES2001296, TBAES2001492, TBAES2001553, TBAES2001751, TBAES2003435, TBAES2003492, TBAES2003550, TBAES2003702, TBAES2003917, TBAES2004055, TBAES2004105, TBAES2004939, TBAES2005157, TBAES2005361, TBAES2005543, TBAES2006568, TBAES2006881, TBAES2007379, TBAES2007428, TBAES2007481, TBAES2007504, TBAES2007548, TBAES2007697, TBAES2007862, TBAES2007964, TBAES2008133,

[2238] TBAES2009387, TCERX2000171, TCERX2000431, TCERX2000613, TCERX2000998, TCERX2002644, TCOLN1000037, TCOLN1000180, TCOLN2000139, TCOLN2000236, TCOLN2000641, TCOLN2001268, TCOLN2002047, TCOLN2002278, TESOP1000127, TESOP1000160, TESOP2000083, TESOP2000090, TESOP2000205, TESOP2000312, TESOP2000390, TESOP2000400, TESOP2000510, TESOP2000527, TESOP2000569, TESOP2000739, TESOP2000801, TESOP2001122, TESOP2001166, TESOP2001345, TESOP2001474, TESOP2001796, TESOP2001818, TESOP2001849, TESOP2001865, TESOP2001901, TESOP2001953, TESOP2002005, TESOP2002110, TESOP2002150, TESOP2002489, TESOP2002539, TESOP2002545, TESOP2002804, TESOP2002950, TESOP2003273, TESOP2003308, TESOP2003553, TESOP2003753, TESOP2004110,

[2239] TESOP2004114, TESOP2004173, TESOP2004214, TESOP2005199, TESOP2005285, TESOP2005485, TESOP2005498, TESOP2005579, TESOP2006041, TESOP2006053, TESOP2006060, TESOP2006068, TESOP2006110, TESOP2006398, TESOP2006670, TESOP2006704, TESOP2006746, TESOP2006865, TESOP2006893, TESOP2007041, TESOP2007052, TESOP2007262, TESOP2007636, TESOP2007674, TESOP2007688, TESOP2007725, TESOP2007912, TESOP2007978, TESOP2008127, TESOP2008552, TESOP2008556, TESOP2008563, TESOP2008820, TESOP2009121, TESOP2009201, TESOP2009247, TESOP2009555, TESTI1000018, TESTI1000019, TESTI1000025, TESTI1000029, TESTI1000030, TESTI1000042, TESTI1000045, TESTI1000055, TESTI1000064, TESTI1000070, TESTI1000085, TESTI1000088, TESTI1000093,

[2240] TESTI1000094, TESTI1000101, TESTI1000109, TESTI1000125, TESTI1000127, TESTI1000128, TESTI1000131, TESTI1000138, TESTI1000157, TESTI1000163, TESTI1000168, TESTI1000169, TESTI1000179, TESTI1000183, TESTI1000191, TESTI1000257, TESTI1000319, TESTI1000330, TESTI1000348, TESTI1000390, TESTI1000391, TESTI1000459, TESTI1000491, TESTI1000545, TESTI2000006, TESTI2000018, TESTI2000044, TESTI2000100, TESTI2000117, TESTI2000120, TESTI2000147, TESTI2000154, TESTI2000177, TESTI2000207, TESTI2000208, TESTI2000221, TESTI2000238, TESTI2000253, TESTI2000272, TESTI2000278, TESTI2000349, TESTI2000356, TESTI2000358, TESTI2000372, TESTI2000427, TESTI2000431, TESTI2000435, TESTI2000443, TESTI2000452, TESTI2000462,

[2241] TESTI2000489, TESTI2000520, TESTI2000571, TESTI2000591, TESTI2000600, TESTI2000616, TESTI2000644, TESTI2000671, TESTI2000683, TESTI2000689, TESTI2000695, TESTI2000699, TESTI2000707, TESTI2000745, TESTI2000756, TESTI2000762, TESTI2000808, TESTI2000819, TESTI2000830, TESTI2000840, TESTI2000849, TESTI2000850, TESTI2000883, TESTI2000909, TESTI2000951, TESTI2000981, TESTI2001008, TESTI2001049, TESTI2001082, TESTI2001120, TESTI2001134, TESTI2001141, TESTI2001153, TESTI2001180, TESTI2001208, TESTI2001229, TESTI2001236, TESTI2001237, TESTI2001306, TESTI2001313, TESTI2001330, TESTI2001339, TESTI2001345, TESTI2001352, TESTI2001364, TESTI2001412, TESTI2001420, TESTI2001498, TESTI2001512, TESTI2001518,

[2242] TESTI2001556, TESTI2001593, TESTI2001621, TESTI2001661, TESTI2001665, TESTI2001671, TESTI2001697, TESTI2001725, TESTI2001758, TESTI2001766, TESTI2001792, TESTI2001793, TESTI2001795, TESTI2001812, TESTI2001815, TESTI2001823, TESTI2001826, TESTI2001827, TESTI2001829, TESTI2001852, TESTI2001862, TESTI2001879, TESTI2001894, TESTI2001898, TESTI2001915, TESTI2001950, TESTI2001959, TESTI2001968, TESTI2001991, TESTI2002002, TESTI2002012, TESTI2002036, TESTI2002048, TESTI2002057, TESTI2002081, TESTI2002090, TESTI2002105, TESTI2002216, TESTI2002223, TESTI2002245, TESTI2002251, TESTI2002256, TESTI2002264, TESTI2002282, TESTI2002293, TESTI2002294, TESTI2002326, TESTI2002351, TESTI2002361, TESTI2002406,

[2243] TESTI2002415, TESTI2002423, TESTI2002453, TESTI2002461, TESTI2002465, TESTI2002467, TESTI2002498, TESTI2002516, TESTI2002544, TESTI2002578, TESTI2002580, TESTI2002618, TESTI2002632, TESTI2002676, TESTI2002690, TESTI2002696, TESTI2002698, TESTI2002700, TESTI2002724, TESTI2002729, TESTI2002752, TESTI2002753, TESTI2002789, TESTI2002802, TESTI2002806, TESTI2002840, TESTI2002877, TESTI2002910, TESTI2002912, TESTI2002928, TESTI2002937, TESTI2002965, TESTI2002993, TESTI2003005, TESTI2003020, TESTI2003031, TESTI2003037, TESTI2003044, TESTI2003059, TESTI2003061, TESTI2003071, TESTI2003074, TESTI2003089, TESTI2003104, TESTI2003109, TESTI2003117, TESTI2003130, TESTI2003131, TESTI2003139, TESTI2003141,

[2244] TESTI2003152, TESTI2003181, TESTI2003193, TESTI2003196, TESTI2003228, TESTI2003236, TESTI2003255, TESTI2003258, TESTI2003277, TESTI2003299, TESTI2003311, TESTI2003321, TESTI2003325, TESTI2003327, TESTI2003330, TESTI2003347, TESTI2003354, TESTI2003356, TESTI2003372, TESTI2003376, TESTI2003418, TESTI2003419, TESTI2003432, TESTI2003454, TESTI2003475, TESTI2003476, TESTI2003498, TESTI2003512, TESTI2003539, TESTI2003541, TESTI2003545, TESTI2003551, TESTI2003574, TESTI2003579, TESTI2003580, TESTI2003589, TESTI2003596, TESTI2003598, TESTI2003615, TESTI2003625, TESTI2003638, TESTI2003649, TESTI2003692, TESTI2003718, TESTI2003727, TESTI2003756, TESTI2003768, TESTI2003781, TESTI2003787, TESTI2003824,

[2245] TESTI2003827, TESTI2003894, TESTI2003911, TESTI2003914, TESTI2003940, TESTI2003962, TESTI2003998, TESTI2004000, TESTI2004073, TESTI2004080, TESTI2004085, TESTI2004089, TESTI2004111, TESTI2004119, TESTI2004163, TESTI2004169, TESTI2004207, TESTI2004215, TESTI2004227, TESTI2004229, TESTI2004243, TESTI2004255, TESTI2004287, TESTI2004295, TESTI2004313, TESTI2004318, TESTI2004322, TESTI2004399, TESTI2004423, TESTI2004431, TESTI2004432, TESTI2004452, TESTI2004459, TESTI2004490, TESTI2004539, TESTI2004552, TESTI2004560, TESTI2004574, TESTI2004601, TESTI2004611, TESTI2004649, TESTI2004654, TESTI2004675, TESTI2004687, TESTI2004689, TESTI2004700, TESTI2004706, TESTI2004712, TESTI2004783, TESTI2004791,

[2246] TESTI2004793, TESTI2004860, TESTI2004906, TESTI2004920, TESTI2004936, TESTI2004941, TESTI2004971, TESTI2004982, TESTI2004993, TESTI2004994, TESTI2004999, TESTI2005017, TESTI2005025, TESTI2005040, TESTI2005060, TESTI2005072, TESTI2005085, TESTI2005112, TESTI2005120, TESTI2005153, TESTI2005155, TESTI2005173, TESTI2005267, TESTI2005268, TESTI2005280, TESTI2005307, TESTI2005326, TESTI2005363, TESTI2005376, TESTI2005378, TESTI2005380, TESTI2005391, TESTI2005415, TESTI2005470, TESTI2005492, TESTI2005564, TESTI2005568, TESTI2005584, TESTI2005588, TESTI2005590, TESTI2005603, TESTI2005609, TESTI2005610, TESTI2005630, TESTI2005672, TESTI2005683, TESTI2005690, TESTI2005692, TESTI2005703, TESTI2005720,

[2247] TESTI2005739, TESTI2005759, TESTI2005767, TESTI2005775, TESTI2005788, TESTI2005827, TESTI2005835, TESTI2005860, TESTI2005892, TESTI2005908, TESTI2005911, TESTI2005933, TESTI2005937, TESTI2005948, TESTI2005979, TESTI2005981, TESTI2005982, TESTI2005984, TESTI2005986, TESTI2005987, TESTI2006007, TESTI2006008, TESTI2006015, TESTI2006016, TESTI2006035, TESTI2006040, TESTI2006041, TESTI2006045, TESTI2006051, TESTI2006067, TESTI2006083, TESTI2006097, TESTI2006109, TESTI2006111, TESTI2006125, TESTI2006179, TESTI2006209, TESTI2006210, TESTI2006212, TESTI2006218, TESTI2006238, TESTI2006255, TESTI2006258, TESTI2006278, TESTI2006333, TESTI2006341, TESTI2006360, TESTI2006409, TESTI2006425, TESTI2006437,

[2248] TESTI2006453, TESTI2006457, TESTI2006460, TESTI2006465, TESTI2006483, TESTI2006499, TESTI2006523, TESTI2006543, TESTI2006565, TESTI2006572, TESTI2006617, TESTI2006624, TESTI2006628, TESTI2006633, TESTI2006643, TESTI2006648, TESTI2006659, TESTI2006660, TESTI2006665, TESTI2006667, TESTI2006677, TESTI2006720, TESTI2006735, TESTI2006744, TESTI2006774, TESTI2006853, TESTI2006866, TESTI2006877, TESTI2006879, TESTI2006894, TESTI2006940, TESTI2006955, TESTI2006978, TESTI2006979, TESTI2006990, TESTI2007040, TESTI2007074, TESTI2007078, TESTI2007113, TESTI2007152, TESTI2007163, TESTI2007183, TESTI2007220, TESTI2007234, TESTI2007311, TESTI2007320, TESTI2007346, TESTI2007358, TESTI2007402, TESTI2007405,

[2249] TESTI2007407, TESTI2007422, TESTI2007452, TESTI2007466, TESTI2007480, TESTI2007490, TESTI2007502, TESTI2007524, TESTI2007533, TESTI2007576, TESTI2007613, TESTI2007657, TESTI2007685, TESTI2007692, TESTI2007749, TESTI2007750, TESTI2007808, TESTI2007814, TESTI2007829, TESTI2007864, TESTI2007867, TESTI2007872, TESTI2007906, TESTI2007922, TESTI2007951, TESTI2007972, TESTI2007973, TESTI2008014, TESTI2008032, TESTI2008033, TESTI2008046, TESTI2008081, TESTI2008099, TESTI2008139, TESTI2008144, TESTI2008161, TESTI2008189, TESTI2008204, TESTI2008219, TESTI2008233, TESTI2008234, TESTI2008237, TESTI2008278, TESTI2008320, TESTI2008331, TESTI2008343, TESTI2008387, TESTI2008389, TESTI2008394, TESTI2008405,

[2250] TESTI2008420, TESTI2008425, TESTI2008440, TESTI2008567, TESTI2008595, TESTI2008621, TESTI2008636, TESTI2008657, TESTI2008684, TESTI2008699, TESTI2008715, TESTI2008762, TESTI2008774, TESTI2008786, TESTI2008822, TESTI2008840, TESTI2008847, TESTI2008884, TESTI2008901, TESTI2008929, TESTI2008946, TESTI2008960, TESTI2009018, TESTI2009091, TESTI2009097, TESTI2009136, TESTI2009185, TESTI2009190, TESTI2009217, TESTI2009239, TESTI2009325, TESTI2009390, TESTI2009400, TESTI2009412, TESTI2009423, TESTI2009447, TESTI2009462, TESTI2009477, TESTI2009502, TESTI2009511, TESTI2009544, TESTI2009545, TESTI2009551, TESTI2009585, TESTI2009588, TESTI2009683, TESTI2009727, TESTI2009739, TESTI2009812, TESTI2009835,

[2251] TESTI2009853, TESTI2009935, TESTI2009977, TESTI2009987, TESTI2010009, TESTI2010154, TESTI2010180, TESTI2010239, TESTI2010280, TESTI2010354, TESTI2010396, TESTI2010400, TESTI2010409, TESTI2010572, TESTI2010587, TESTI2010591, TESTI2010682, TESTI2010732, TESTI2010734, TESTI2010755, TESTI2010793, TESTI2010806, TESTI2010833, TESTI2010872, TESTI2011009, TESTI2011020, TESTI2011028, TESTI2011033, TESTI2011254, TESTI2011286, TESTI2011294, TESTI2011314, TESTI2011315, TESTI2011394, TESTI2011407, TESTI2011448, TESTI2011480, TESTI2011549, TESTI2011575, TESTI2011605, TESTI2011612, TESTI2011665, TESTI2011712, TESTI2011750, TESTI2011840, TESTI2011846, TESTI2011915, TESTI2011928, TESTI2011971, TESTI2012019,

[2252] TESTI2012050, TESTI2012090, TESTI2012095, TESTI2012104, TESTI2012152, TESTI2012171, TESTI2012207, TESTI2012231, TESTI2012244, TESTI2012289, TESTI2012308, TESTI2012356, TESTI2012387, TESTI2012394, TESTI2012444, TESTI2012511, TESTI2012528, TESTI2012544, TESTI2012550, TESTI2012571, TESTI2012592, TESTI2012617, TESTI2012628, TESTI2012778, TESTI2012812, TESTI2012834, TESTI2012835, TESTI2012861, TESTI2012900, TESTI2012915, TESTI2012922, TESTI2013001, TESTI2013012, TESTI2013053, TESTI2013144, TESTI2013163, TESTI2013169, TESTI2013212, TESTI2013231, TESTI2013257, TESTI2013264, TESTI2013268, TESTI2013322, TESTI2013381, TESTI2013382, TESTI2013401, TESTI2013427, TESTI2013468, TESTI2013497, TESTI2013545,

[2253] TESTI2013546, TESTI2013566, TESTI2013601, TESTI2013604, TESTI2013607, TESTI2013610, TESTI2013691, TESTI2013699, TESTI2013737, TESTI2013767, TESTI2013832, TESTI2013873, TESTI2013889, TESTI2014007, TESTI2014036, TESTI2014097, TESTI2014160, TESTI2014248, TESTI2014254, TESTI2014269, TESTI2014274, TESTI2014324, TESTI2014339, TESTI2014362, TESTI2014385, TESTI2014415, TESTI2014439, TESTI2014474, TESTI2014505, TESTI2014577, TESTI2014578, TESTI2014716, TESTI2014780, TESTI2014800, TESTI2014838, TESTI2014843, TESTI2014979, TESTI2014988, TESTI2015042, TESTI2015092, TESTI2015105, TESTI2015180, TESTI2015249, TESTI2015327, TESTI2015331, TESTI2015335, TESTI2015350, TESTI2015375, TESTI2015437, TESTI2015590,

[2254] TESTI2015610, TESTI2015647, TESTI2015675, TESTI2015710, TESTI2015752, TESTI2015830, TESTI2015914, TESTI2015938, TESTI2015947, TESTI2015962, TESTI2015987, TESTI2016033, TESTI2016046, TESTI2016101, TESTI2016162, TESTI2016197, TESTI2016278, TESTI2016298, TESTI2016331, TESTI2016337, TESTI2016410, TESTI2016421, TESTI2016509, TESTI2016568, TESTI2016583, TESTI2016599, TESTI2016629, TESTI2016663, TESTI2016667, TESTI2016688, TESTI2016701, TESTI2016758, TESTI2016848, TESTI2016863, TESTI2016888, TESTI2016896, TESTI2016922, TESTI2016942, TESTI2016950, TESTI2016996, TESTI2017017, TESTI2017028, TESTI2017035, TESTI2017069, TESTI2017089, TESTI2017102, TESTI2017107, TESTI2017113, TESTI2017125, TESTI2017256,

[2255] TESTI2017305, TESTI2017311, TESTI2017396, TESTI2017507, TESTI2017537, TESTI2017582, TESTI2017584, TESTI2017727, TESTI2017740, TESTI2017775, TESTI2017816, TESTI2017832, TESTI2017923, TESTI2017932, TESTI2017951, TESTI2018031, TESTI2018035, TESTI2018060, TESTI2018083, TESTI2018178, TESTI2018221, TESTI2018276, TESTI2018290, TESTI2018335, TESTI2018337, TESTI2018368, TESTI2018421, TESTI2018428, TESTI2018475, TESTI2018482, TESTI2018521, TESTI2018565, TESTI2018581, TESTI2018611, TESTI2018687, TESTI2018697, TESTI2018838, TESTI2018941, TESTI2018957, TESTI2018974, TESTI2018975, TESTI2018997, TESTI2019042, TESTI2019077, TESTI2019228, TESTI2019257, TESTI2019280, TESTI2019282, TESTI2019308, TESTI2019336,

[2256] TESTI2019352, TESTI2019406, TESTI2019430, TESTI2019455, TESTI2019481, TESTI2019488, TESTI2019501, TESTI2019648, TESTI2019669, TESTI2019697, TESTI2019729, TESTI2019760, TESTI2019787, TESTI2019794, TESTI2019854, TESTI2019859, TESTI2019860, TESTI2019872, TESTI2019911, TESTI2019917, TESTI2019975, TESTI2019998, TESTI2020012, TESTI2020026, TESTI2020029, TESTI2020071, TESTI2020084, TESTI2020265, TESTI2020283, TESTI2020316, TESTI2020344, TESTI2020379, TESTI2020426, TESTI2020445, TESTI2020515, TESTI2020579, TESTI2020717, TESTI2020840, TESTI2020871, TESTI2020905, TESTI2020906, TESTI2020946, TESTI2020956, TESTI2020981, TESTI2020999, TESTI2021003, TESTI2021038, TESTI2021057, TESTI2021077, TESTI2021112,

[2257] TESTI2021114, TESTI2021116, TESTI2021118, TESTI2021122, TESTI2021138, TESTI2021297, TESTI2021315, TESTI2021358, TESTI2021425, TESTI2021463, TESTI2021531, TESTI2021599, TESTI2021637, TESTI2021654, TESTI2021667, TESTI2021736, TESTI2021785, TESTI2021819, TESTI2021895, TESTI2021911, TESTI2021939, TESTI2021999, TESTI2022010, TESTI2022023, TESTI2022065, TESTI2022086, TESTI2022203, TESTI2022246, TESTI2022323, TESTI2022338, TESTI2022400, TESTI2022462, TESTI2022495, TESTI2022623, TESTI2022649, TESTI2022652, TESTI2022738, TESTI2022798, TESTI2022812, TESTI2022814, TESTI2022874, TESTI2022940, TESTI2022952, TESTI2023025, TESTI2023033, TESTI2023053, TESTI2023085, TESTI2023192, TESTI2023194, TESTI2023214,

[2258] TESTI2023254, TESTI2023386, TESTI2023427, TESTI2023436, TESTI2023599, TESTI2023752, TESTI2023800, TESTI2023861, TESTI2023903, TESTI2023942, TESTI2023947, TESTI2023951, TESTI2023968, TESTI2024009, TESTI2024090, TESTI2024125, TESTI2024153, TESTI2024192, TESTI2024267, TESTI2024283, TESTI2024299, TESTI2024419, TESTI2024422, TESTI2024443, TESTI2024446, TESTI2024473, TESTI2024476, TESTI2024498, TESTI2024560, TESTI2024567, TESTI2024586, TESTI2024598, TESTI2024641, TESTI2024648, TESTI2024718, TESTI2024744, TESTI2024844, TESTI2024864, TESTI2024885, TESTI2024936, TESTI2024978, TESTI2024999, TESTI2025006, TESTI2025013, TESTI2025022, TESTI2025063, TESTI2025117, TESTI2025144, TESTI2025161, TESTI2025174,

[2259] TESTI2025229, TESTI2025269, TESTI2025365, TESTI2025403, TESTI2025409, TESTI2025422, TESTI2025448, TESTI2025454, TESTI2025486, TESTI2025546, TESTI2025582, TESTI2025609, TESTI2025656, TESTI2025791, TESTI2025846, TESTI2025872, TESTI2025879, TESTI2025911, TESTI2025920, TESTI2025924, TESTI2026014, TESTI2026024, TESTI2026064, TESTI2026077, TESTI2026104, TESTI2026116, TESTI2026134, TESTI2026168, TESTI2026196, TESTI2026218, TESTI2026233, TESTI2026291, TESTI2026294, TESTI2026401, TESTI2026403, TESTI2026453, TESTI2026461, TESTI2026491, TESTI2026505, TESTI2026515, TESTI2026534, TESTI2026537, TESTI2026589, TESTI2026597, TESTI2026605, TESTI2026647, TESTI2026674, TESTI2026794, TESTI2026824, TESTI2026854,

[2260] TESTI2026925, TESTI2026936, TESTI2026957, TESTI2027013, TESTI2027019, TESTI2027108, TESTI2027165, TESTI2027171, TESTI2027173, TESTI2027179, TESTI2027185, TESTI2027206, TESTI2027238, TESTI2027239, TESTI2027243, TESTI2027271, TESTI2027296, TESTI2027378, TESTI2027411, TESTI2027450, TESTI2027503, TESTI2027562, TESTI2027615, TESTI2027645, TESTI2027730, TESTI2027736, TESTI2027791, TESTI2027820, TESTI2027828, TESTI2027840, TESTI2027909, TESTI2028098, TESTI2028151, TESTI2028242, TESTI2028253, TESTI2028254, TESTI2028269, TESTI2028290, TESTI2028296, TESTI2028384, TESTI2028426, TESTI2028488, TESTI2028523, TESTI2028583, TESTI2028613, TESTI2028659, TESTI2028662, TESTI2028670, TESTI2028705, TESTI2028776,

[2261] TESTI2028811, TESTI2028891, TESTI2028985, TESTI2028997, TESTI2029131, TESTI2029162, TESTI2029196, TESTI2029201, TESTI2029244, TESTI2029249, TESTI2029252, TESTI2029259, TESTI2029264, TESTI2029470, TESTI2029672, TESTI2029785, TESTI2029880, TESTI2030136, TESTI2030322, TESTI2030336, TESTI2030342, TESTI2030519, TESTI2030554, TESTI2030556, TESTI2030728, TESTI2030754, TESTI2030770, TESTI2030860, TESTI2030901, TESTI2030917, TESTI2030930, TESTI2031006, TESTI2031007, TESTI2031060, TESTI2031129, TESTI2031356, TESTI2031418, TESTI2031504, TESTI2031529, TESTI2031687, TESTI2031760, TESTI2031809, TESTI2031919, TESTI2031935, TESTI2031986, TESTI2032044, TESTI2032067, TESTI2032079, TESTI2032643, TESTI2032681,

[2262] TESTI2032761, TESTI2032768, TESTI2032774, TESTI2032828, TESTI2033031, TESTI2033242, TESTI2033254, TESTI2033300, TESTI2033395, TESTI2033441, TESTI2033453, TESTI2033505, TESTI2033520, TESTI2033641, TESTI2033710, TESTI2033905, TESTI2034187, TESTI2034243, TESTI2034249, TESTI2034307, TESTI2034357, TESTI2034401, TESTI2034407, TESTI2034506, TESTI2034520, TESTI2034718, TESTI2034730, TESTI2034749, TESTI2034767, TESTI2034774, TESTI2034777, TESTI2034785, TESTI2034799, TESTI2034847, TESTI2034913, TESTI2034916, TESTI2034931, TESTI2034953, TESTI2034997, TESTI2035003, TESTI2035078, TESTI2035084, TESTI2035107, TESTI2035121, TESTI2035124, TESTI2035183, TESTI2035236, TESTI2035262, TESTI2035309, TESTI2035688,

[2263] TESTI2035775, TESTI2035793, TESTI2035898, TESTI2035962, TESTI2035981, TESTI2035997, TESTI2036114, TESTI2036129, TESTI2036285, TESTI2036288, TESTI2036513, TESTI2036589, TESTI2036650, TESTI2036684, TESTI2036691, TESTI2036736, TESTI2036822, TESTI2036833, TESTI2036913, TESTI2036922, TESTI2036951, TESTI2036965, TESTI2037002, TESTI2037055, TESTI2037081, TESTI2037085, TESTI2037103, TESTI2037106, TESTI2037111, TESTI2037209, TESTI2037255, TESTI2037359, TESTI2037375, TESTI2037382, TESTI2037534, TESTI2037569, TESTI2037572, TESTI2037643, TESTI2037657, TESTI2037673, TESTI2037723, TESTI2037819, TESTI2037830, TESTI2037845, TESTI2037877, TESTI2037976, TESTI2038048, TESTI2038065, TESTI2038104, TESTI2038275,

[2264] TESTI2038388, TESTI2038573, TESTI2038596, TESTI2038623, TESTI2038644, TESTI2038733, TESTI2038858, TESTI2038958, TESTI2039025, TESTI2039026, TESTI2039038, TESTI2039041, TESTI2039060, TESTI2039113, TESTI2039121, TESTI2039209, TESTI2039225, TESTI2039227, TESTI2039276, TESTI2039342, TESTI2039353, TESTI2039544, TESTI2039613, TESTI2039707, TESTI2039732, TESTI2039738, TESTI2039776, TESTI2039867, TESTI2039908, TESTI2040018, TESTI2040094, TESTI2040102, TESTI2040128, TESTI2040143, TESTI2040297, TESTI2040372, TESTI2040377, TESTI2040424, TESTI2040642, TESTI2040815, TESTI2040897, TESTI2040944, TESTI2040964, TESTI2040983, TESTI2040989, TESTI2041330, TESTI2041362, TESTI2041517, TESTI2041564, TESTI2041664,

[2265] TESTI2041730, TESTI2041778, TESTI2041800, TESTI2041947, TESTI2041956, TESTI2041976, TESTI2042062, TESTI2042149, TESTI2042264, TESTI2042295, TESTI2042302, TESTI2042326, TESTI2042400, TESTI2042450, TESTI2042473, TESTI2042507, TESTI2042508, TESTI2042750, TESTI2042783, TESTI2042806, TESTI2042928, TESTI2042946, TESTI2042958, TESTI2043275, TESTI2043277, TESTI2043282, TESTI2043313, TESTI2043477, TESTI2043585, TESTI2043758, TESTI2043817, TESTI2043857, TESTI2043866, TESTI2043869, TESTI2044064, TESTI2044118, TESTI2044194, TESTI2044306, TESTI2044309, TESTI2044413, TESTI2044418, TESTI2044754, TESTI2044788, TESTI2044796, TESTI2044833, TESTI2044892, TESTI2044920, TESTI2044968, TESTI2045139, TESTI2045155,

[2266] TESTI2045171, TESTI2045199, TESTI2045353, TESTI2045509, TESTI2045562, TESTI2045611, TESTI2045819, TESTI2045850, TESTI2045920, TESTI2045964, TESTI2045983, TESTI2046100, TESTI2046188, TESTI2046347, TESTI2046352, TESTI2046358, TESTI2046439, TESTI2046535, TESTI2046536, TESTI2046552, TESTI2046569, TESTI2046686, TESTI2046721, TESTI2046732, TESTI2046786, TESTI2046797, TESTI2046863, TESTI2046872, TESTI2047071, TESTI2047141, TESTI2047147, TESTI2047153, TESTI2047212, TESTI2047342, TESTI2047383, TESTI2047605, TESTI2047792, TESTI2047801, TESTI2047818, TESTI2047824, TESTI2047885, TESTI2047930, TESTI2048105, TESTI2048109, TESTI2048465, TESTI2048603, TESTI2048898, TESTI2049041, TESTI2049062, TESTI2049206,

[2267] TESTI2049246, TESTI2049277, TESTI2049422, TESTI2049452, TESTI2049469, TESTI2049553, TESTI2049576, TESTI2049857, TESTI2049956, TESTI2050137, TESTI2050681, TESTI2050780, TESTI2050987, TESTI2051148, TESTI2051177, TESTI2051279, TESTI2051488, TESTI2051543, TESTI2051627, TESTI2051742, TESTI2051767, TESTI2051791, TESTI2051806, TESTI2051867, TESTI2051873, TESTI2052110, TESTI2052202, TESTI2052211, TESTI2052256, TESTI2052288, TESTI2052525, TESTI2052670, TESTI2052693, TESTI2052698, TESTI2052799, TESTI2052822, TESTI2052985, TESTI2053151, TESTI2053242, TESTI2053399, TESTI2053526, TESTI2053561, TESTI2053621, TESTI2053667, TESTI3000002, TESTI3000005, TESTI4000068, TESTI4000079, TESTI4000093, TESTI4000134,

[2268] TESTI4000137, TESTI4000153, TESTI4000155, TESTI4000157, TESTI4000183, TESTI4000214, TESTI4000215, TESTI4000228, TESTI4000250, TESTI4000288, TESTI4000319, TESTI4000349, TESTI4000370, TESTI4000394, TESTI4000462, TESTI4000530, TESTI4000534, TESTI4000598, TESTI4000600, TESTI4000621, TESTI4000703, TESTI4000724, TESTI4000957, TESTI4000970, TESTI4001036, TESTI4001037, TESTI4001060, TESTI4001106, TESTI4001148, TESTI4001176, TESTI4001195, TESTI4001201, TESTI4001206, TESTI4001348, TESTI4001441, TESTI4001467, TESTI4001473, TESTI4001517, TESTI4001527, TESTI4001561, TESTI4001569, TESTI4001604, TESTI4001665, TESTI4001679, TESTI4001795, TESTI4001923, TESTI4001925, TESTI4001984, TESTI4002003, TESTI4002141,

[2269] TESTI4002195, TESTI4002202, TESTI4002290, TESTI4002319, TESTI4002491, TESTI4002520, TESTI4002552, TESTI4002703, TESTI4002754, TESTI4002868, TESTI4002878, TESTI4002889, TESTI4002988, TESTI4003150, TESTI4003179, TESTI4003279, TESTI4003319, TESTI4003404, TESTI4003565, TESTI4003574, TESTI4003579, TESTI4003602, TESTI4003703, TESTI4003733, TESTI4003796, TESTI4003944, TESTI4004003, TESTI4004031, TESTI4004200, TESTI4004210, TESTI4004539, TESTI4004626, TESTI4004653, TESTI4004695, TESTI4004722, TESTI4004887, TESTI4004917, TESTI4005015, TESTI4005039, TESTI4005158, TESTI4005317, TESTI4005322, TESTI4005470, TESTI4005500, TESTI4005534, TESTI4005543, TESTI4005628, TESTI4005801, TESTI4005805, TESTI4005857,

[2270] TESTI4005961, TESTI4006053, TESTI4006079, TESTI4006112, TESTI4006137, TESTI4006148, TESTI4006219, TESTI4006234, TESTI4006308, TESTI4006393, TESTI4006407, TESTI4006412, TESTI4006420, TESTI4006441, TESTI4006473, TESTI4006539, TESTI4006546, TESTI4006567, TESTI4006704, TESTI4006728, TESTI4006802, TESTI4006819, TESTI4007064, TESTI4007163, TESTI4007176, TESTI4007203, TESTI4007239, TESTI4007369, TESTI4007373, TESTI4007382, TESTI4007404, TESTI4007489, TESTI4007565, TESTI4007671, TESTI4007775, TESTI4007778, TESTI4007799, TESTI4007810, TESTI4007816, TESTI4008007, TESTI4008018, TESTI4008050, TESTI4008086, TESTI4008097, TESTI4008176, TESTI4008209, TESTI4008219, TESTI4008250, TESTI4008302, TESTI4008305,

[2271] TESTI4008401, TESTI4008417, TESTI4008429, TESTI4008573, TESTI4008797, TESTI4008816, TESTI4008840, TESTI4008935, TESTI4008993, TESTI4009022, TESTI4009028, TESTI4009034, TESTI4009123, TESTI4009160, TESTI4009215, TESTI4009283, TESTI4009306, TESTI4009374, TESTI4009406, TESTI4009457, TESTI4009501, TESTI4009563, TESTI4009608, TESTI4009638, TESTI4009752, TESTI4009881, TESTI4009886, TESTI4009928, TESTI4010076, TESTI4010082, TESTI4010095, TESTI4010211, TESTI4010377, TESTI4010475, TESTI4010544, TESTI4010713, TESTI4010721, TESTI4010789, TESTI4010817, TESTI4010831, TESTI4010902, TESTI4010928, TESTI4010979, TESTI4011070, TESTI4011072, TESTI4011084, TESTI4011118, TESTI4011246, TESTI4011484, TESTI4011505,

[2272] TESTI4011532, TESTI4011616, TESTI4011744, TESTI4011745, TESTI4011829, TESTI4011926, TESTI4011956, TESTI4012010, TESTI4012086, TESTI4012258, TESTI4012293, TESTI4012329, TESTI4012382, TESTI4012406, TESTI4012448, TESTI4012451, TESTI4012505, TESTI4012556, TESTI4012623, TESTI4012646, TESTI4012679, TESTI4012911, TESTI4012956, TESTI4013365, TESTI4013369, TESTI4013410, TESTI4013474, TESTI4013602, TESTI4013667, TESTI4013675, TESTI4013685, TESTI4013735, TESTI4013742, TESTI4013774, TESTI4013817, TESTI4013830, TESTI4013852, TESTI4013894, TESTI4013924, TESTI4013960, TESTI4013962, TESTI4014159, TESTI4014265, TESTI4014276, TESTI4014306, TESTI4014392, TESTI4014415, TESTI4014445, TESTI4014553, TESTI4014661,

[2273] TESTI4014694, TESTI4014801, TESTI4014818, TESTI4014891, TESTI4014908, TESTI4014924, TESTI4014932, TESTI4014977, TESTI4015012, TESTI4015129, TESTI4015145, TESTI4015204, TESTI4015263, TESTI4015293, TESTI4015299, TESTI4015339, TESTI4015398, TESTI4015471, TESTI4015477, TESTI4015600, TESTI4015646, TESTI4015681, TESTI4015688, TESTI4015790, TESTI4016110, TESTI4016238, TESTI4016551, TESTI4016812, TESTI4016822, TESTI4016865, TESTI4016882, TESTI4016925, TESTI4017001, TESTI4017116, TESTI4017137, TESTI4017229, TESTI4017254, TESTI4017269, TESTI4017380, TESTI4017382, TESTI4017543, TESTI4017575, TESTI4017647, TESTI4017763, TESTI4017848, TESTI4017854, TESTI4017901, TESTI4017961, TESTI4017984, TESTI4018101,

[2274] TESTI4018152, TESTI4018208, TESTI4018382, TESTI4018506, TESTI4018555, TESTI4018751, TESTI4018806, TESTI4018835, TESTI4018859, TESTI4018881, TESTI4018886, TESTI4018938, TESTI4019140, TESTI4019149, TESTI4019299, TESTI4019417, TESTI4019440, TESTI4019566, TESTI4019657, TESTI4019756, TESTI4019843, TESTI4020092, TESTI4020102, TESTI4020342, TESTI4020460, TESTI4020806, TESTI4020819, TESTI4020920, TESTI4021129, TESTI4021197, TESTI4021294, TESTI4021377, TESTI4021456, TESTI4021491, TESTI4021569, TESTI4021713, TESTI4021821, TESTI4022158, TESTI4022577, TESTI4022716, TESTI4022873, TESTI4023096, TESTI4023172, TESTI4023546, TESTI4023555, TESTI4023654, TESTI4023722, TESTI4023762, TESTI4023942, TESTI4024096,

[2275] TESTI4024240, TESTI4024245, TESTI4024294, TESTI4024344, TESTI4024387, TESTI4024420, TESTI4024494, TESTI4024874, TESTI4024890, TESTI4024907, TESTI4024930, TESTI4025062, TESTI4025268, TESTI4025401, TESTI4025494, TESTI4025547, TESTI4025731, TESTI4025797, TESTI4025865, TESTI4025908, TESTI4025920, TESTI4026079, TESTI4026080, TESTI4026192, TESTI4026207, TESTI4026295, TESTI4026390, TESTI4026456, TESTI4026510, TESTI4026524, TESTI4026680, TESTI4026700, TESTI4026762, TESTI4026785, TESTI4027139, TESTI4027170, TESTI4027262, TESTI4027516, TESTI4027557, TESTI4027660, TESTI4027821, TESTI4027969, TESTI4028042, TESTI4028059, TESTI4028062, TESTI4028182, TESTI4028429, TESTI4028612, TESTI4028692, TESTI4028809,

[2276] TESTI4028823, TESTI4028880, TESTI4028904, TESTI4028938, TESTI4028958, TESTI4028983, TESTI4029023, TESTI4029348, TESTI4029370, TESTI4029528, TESTI4029651, TESTI4029676, TESTI4029690, TESTI4029731, TESTI4029743, TESTI4030069, TESTI4030159, TESTI4030319, TESTI4030505, TESTI4030603, TESTI4030669, TESTI4030673, TESTI4030864, TESTI4031066, TESTI4031173, TESTI4031335, TESTI4031745, TESTI4031818, TESTI4032090, TESTI4032112, TESTI4032128, TESTI4032270, TESTI4032375, TESTI4032834, TESTI4032856, TESTI4032895, TESTI4033146, TESTI4033177, TESTI4033433, TESTI4033690, TESTI4034172, TESTI4034212, TESTI4034432, TESTI4034495, TESTI4034632, TESTI4034633, TESTI4034912, TESTI4034973, TESTI4035063, TESTI4035065,

[2277] TESTI4035498, TESTI4035508, TESTI4035581, TESTI4035602, TESTI4035637, TESTI4035649, TESTI4035872, TESTI4035895, TESTI4035898, TESTI4035989, TESTI4036012, TESTI4036042, TESTI4036048, TESTI4036315, TESTI4036319, TESTI4036449, TESTI4036767, TESTI4036909, TESTI4037066, TESTI4037188, TESTI4037228, TESTI4037244, TESTI4037727, TESTI4037949, TESTI4038047, TESTI4038099, TESTI4038156, TESTI4038223, TESTI4038258, TESTI4038339, TESTI4038492, TESTI4038721, TESTI4038758, TESTI4038779, TESTI4038818, TESTI4039038, TESTI4039086, TESTI4039451, TESTI4039575, TESTI4039659, TESTI4039744, TESTI4039904, TESTI4040197, TESTI4040363, TESTI4040535, TESTI4040559, TESTI4040598, TESTI4040800, TESTI4040804, TESTI4040939,

[2278] TESTI4040956, TESTI4041049, TESTI4041053, TESTI4041086, TESTI4041099, TESTI4041143, TESTI4041482, TESTI4041519, TESTI4041624, TESTI4041629, TESTI4041832, TESTI4041844, TESTI4041903, TESTI4041954, TESTI4041984, TESTI4041985, TESTI4041986, TESTI4042098, TESTI4042420, TESTI4042440, TESTI4042444, TESTI4042711, TESTI4042846, TESTI4043067, TESTI4043129, TESTI4043166, TESTI4043203, TESTI4043371, TESTI4043378, TESTI4043512, TESTI4043551, TESTI4043710, TESTI4043947, TESTI4044035, TESTI4044076, TESTI4044084, TESTI4044123, TESTI4044186, TESTI4044234, TESTI4044291, TESTI4044296, TESTI4044300, TESTI4044682, TESTI4044704, TESTI4044770, TESTI4045168, TESTI4045312, TESTI4045330, TESTI4045470, TESTI4045701,

[2279] TESTI4045908, TESTI4045955, TESTI4045982, TESTI4046073, TESTI4046090, TESTI4046240, TESTI4046245, TESTI4046253, TESTI4046282, TESTI4046328, TESTI4046450, TESTI4046457, TESTI4046487, TESTI4046502, TESTI4046523, TESTI4046819, TESTI4046873, TESTI4046884, TESTI4046896, TESTI4046903, TESTI4046962, TESTI4047069, TESTI4047119, TESTI4047305, TESTI4047328, TESTI4047437, TESTI4047569, TESTI4047746, TESTI4047808, THYMU1000010, THYMU1000017, THYMU1000025, THYMU1000029, THYMU1000032, THYMU1000033, THYMU1000060, THYMU1000074, THYMU1000098, THYMU1000105, THYMU1000109, THYMU1000136, THYMU1000142, THYMU1000158, THYMU1000176, THYMU1000179, THYMU1000191, THYMU1000198, THYMU1000217, THYMU1000240, THYMU1000242,

[2280] THYMU1000291, THYMU1000316, THYMU1000318, THYMU1000331, THYMU1000336, THYMU1000359, THYMU1000366, THYMU1000382, THYMU1000393, THYMU1000394, THYMU1000399, THYMU1000426, THYMU1000440, THYMU1000459, THYMU1000473, THYMU1000490, THYMU1000491, THYMU1000496, THYMU1000527, THYMU1000532, THYMU1000536, THYMU1000554, THYMU1000558, THYMU1000576, THYMU1000600, THYMU1000677, THYMU1000692, THYMU2000022, THYMU2000032, THYMU2000057, THYMU2000120, THYMU2000138, THYMU2000140, THYMU2000155, THYMU2000162, THYMU2000171, THYMU2000176, THYMU2000179, THYMU2000231, THYMU2000236, THYMU2000276, THYMU2000280, THYMU2000300, THYMU2000317, THYMU2000368, THYMU2000382, THYMU2000418, THYMU2000440, THYMU2000489, THYMU2000492,

[2281] THYMU2000519, THYMU2000570, THYMU2000602, THYMU2000660, THYMU2000671, THYMU2000672, THYMU2000684, THYMU2000767, THYMU2000775, THYMU2000800, THYMU2000879, THYMU2000932, THYMU2000950, THYMU2000971, THYMU2000982, THYMU2000990, THYMU2001018, THYMU2001053, THYMU2001071, THYMU2001090, THYMU2001139, THYMU2001195, THYMU2001202, THYMU2001203, THYMU2001256, THYMU2001270, THYMU2001291, THYMU2001314, THYMU2001325, THYMU2001357, THYMU2001381, THYMU2001422, THYMU2001443, THYMU2001515, THYMU2001521, THYMU2001556, THYMU2001622, THYMU2001727, THYMU2001819, THYMU2001825, THYMU2001839, THYMU2001868, THYMU2001898, THYMU2001900, THYMU2001916, THYMU2001989, THYMU2002023, THYMU2002037, THYMU2002080, THYMU2002109,

[2282] THYMU2002147, THYMU2002154, THYMU2002157, THYMU2002162, THYMU2002177, THYMU2002203, THYMU2002229, THYMU2002242, THYMU2002338, THYMU2002356, THYMU2002376, THYMU2002384, THYMU2002450, THYMU2002490, THYMU2002548, THYMU2002695, THYMU2002745, THYMU2002756, THYMU2002789, THYMU2002792, THYMU2002815, THYMU2002852, THYMU2002910, THYMU2002950, THYMU2002983, THYMU2003012, THYMU2003069, THYMU2003107, THYMU2003124, THYMU2003133, THYMU2003166, THYMU2003232, THYMU2003242, THYMU2003249, THYMU2003270, THYMU2003282, THYMU2003287, THYMU2003336, THYMU2003366, THYMU2003397, THYMU2003440, THYMU2003470, THYMU2003479, THYMU2003499, THYMU2003542, THYMU2003632, THYMU2003650, THYMU2003700, THYMU2003760, THYMU2003803,

[2283] THYMU2003855, THYMU2003891, THYMU2003907, THYMU2003932, THYMU2004003, THYMU2004008, THYMU2004042, THYMU2004108, THYMU2004111, THYMU2004123, THYMU2004139, THYMU2004169, THYMU2004284, THYMU2004320, THYMU2004336, THYMU2004356, THYMU2004410, THYMU2004452, THYMU2004508, THYMU2004512, THYMU2004635, THYMU2004639, THYMU2004668, THYMU2004677, THYMU2004688, THYMU2004693, THYMU2004733, THYMU2004835, THYMU2004843, THYMU2004906, THYMU2004986, THYMU2005001, THYMU2005003, THYMU2005046, THYMU2005134, THYMU2005156, THYMU2005190, THYMU2005225, THYMU2005240, THYMU2005246, THYMU2005270, THYMU2005283, THYMU2005303, THYMU2005321, THYMU2005356, THYMU2005369, THYMU2005439, THYMU2005480, THYMU2005482, THYMU2005507,

[2284] THYMU2005545, THYMU2005574, THYMU2005576, THYMU2005748, THYMU2005759, THYMU2005807, THYMU2005815, THYMU2005855, THYMU2005881, THYMU2005948, THYMU2005980, THYMU2005997, THYMU2006001, THYMU2006048, THYMU2006098, THYMU2006160, THYMU2006170, THYMU2006252, THYMU2006261, THYMU2006277, THYMU2006303, THYMU2006324, THYMU2006350, THYMU2006357, THYMU2006365, THYMU2006420, THYMU2006468, THYMU2006610, THYMU2006666, THYMU2006712, THYMU2006913, THYMU2006946, THYMU2006965, THYMU2007025, THYMU2007060, THYMU2007095, THYMU2007146, THYMU2007179, THYMU2007258, THYMU2007307, THYMU2007308, THYMU2007350, THYMU2007384, THYMU2007415, THYMU2007467, THYMU2007493, THYMU2007521, THYMU2007528, THYMU2007530, THYMU2007532,

[2285] THYMU2007561, THYMU2007571, THYMU2007635, THYMU2007658, THYMU2007667, THYMU2007725, THYMU2007729, THYMU2007802, THYMU2007824, THYMU2007854, THYMU2007952, THYMU2007969, THYMU2008035, THYMU2008036, THYMU2008072, THYMU2008111, THYMU2008145, THYMU2008149, THYMU2008185, THYMU2008191, THYMU2008207, THYMU2008226, THYMU2008282, THYMU2008339, THYMU2008350, THYMU2008351, THYMU2008383, THYMU2008452, THYMU2008643, THYMU2008686, THYMU2008691, THYMU2008714, THYMU2008725, THYMU2008727, THYMU2008781, THYMU2008799, THYMU2008876, THYMU2008910, THYMU2008917, THYMU2008928, THYMU2008990, THYMU2008994, THYMU2009023, THYMU2009046, THYMU2009101, THYMU2009104, THYMU2009134, THYMU2009157, THYMU2009181, THYMU2009186,

[2286] THYMU2009338, THYMU2009425, THYMU2009516, THYMU2009526, THYMU2009546, THYMU2009596, THYMU2009658, THYMU2009792, THYMU2009835, THYMU2009906, THYMU2009948, THYMU2010030, THYMU2010041, THYMU2010046, THYMU2010059, THYMU2010082, THYMU2010094, THYMU2010161, THYMU2010192, THYMU2010519, THYMU2010637, THYMU2010671, THYMU2010699, THYMU2010705, THYMU2010779, THYMU2010816, THYMU2010831, THYMU2010848, THYMU2011053, THYMU2011063, THYMU2011072, THYMU2011096, THYMU2011118, THYMU2011142, THYMU2011183, THYMU2011257, THYMU2011259, THYMU2011295, THYMU2011308, THYMU2011390, THYMU2011431, THYMU2011447, THYMU2011538, THYMU2011548, THYMU2011551, THYMU2011564, THYMU2011573, THYMU2011585, THYMU2011621, THYMU2011666,

[2287] THYMU2011736, THYMU2011785, THYMU2011806, THYMU2011852, THYMU2011937, THYMU2011939, THYMU2012073, THYMU2012104, THYMU2012113, THYMU2012273, THYMU2012401, THYMU2012492, THYMU2012507, THYMU2012565, THYMU2012574, THYMU2012631, THYMU2012665, THYMU2012690, THYMU2012701, THYMU2012807, THYMU2012826, THYMU2012882, THYMU2012891, THYMU2012902, THYMU2012919, THYMU2013023, THYMU2013047, THYMU2013051, THYMU2013089, THYMU2013170, THYMU2013364, THYMU2013386, THYMU2013426, THYMU2013578, THYMU2013648, THYMU2013705, THYMU2013757, THYMU2013779, THYMU2013863, THYMU2013950, THYMU2013981, THYMU2014067, THYMU2014068, THYMU2014183, THYMU2014204, THYMU2014297, THYMU2014323, THYMU2014327, THYMU2014353, THYMU2014492,

[2288] THYMU2014500, THYMU2014599, THYMU2014762, THYMU2014777, THYMU2014801, THYMU2014901, THYMU2014923, THYMU2015019, THYMU2015161, THYMU2015316, THYMU2015321, THYMU2015439, THYMU2015441, THYMU2015479, THYMU2015775, THYMU2015825, THYMU2015918, THYMU2015943, THYMU2015984, THYMU2016113, THYMU2016164, THYMU2016219, THYMU2016360, THYMU2016496, THYMU2016523, THYMU2016840, THYMU2016968, THYMU2017008, THYMU2017010, THYMU2017023, THYMU2017085, THYMU2017099, THYMU2017162, THYMU2017215, THYMU2017362, THYMU2017366, THYMU2017398, THYMU2017449, THYMU2017479, THYMU2017522, THYMU2017526, THYMU2017601, THYMU2017675, THYMU2017707, THYMU2017831, THYMU2017844, THYMU2017878, THYMU2017948, THYMU2018028, THYMU2018071,

[2289] THYMU2018126, THYMU2018189, THYMU2018197, THYMU2018384, THYMU2018455, THYMU2018547, THYMU2018565, THYMU2018639, THYMU2018673, THYMU2018721, THYMU2018772, THYMU2018819, THYMU2018841, THYMU2018997, THYMU2019054, THYMU2019197, THYMU2019210, THYMU2019364, THYMU2019436, THYMU2019442, THYMU2019587, THYMU2019599, THYMU2019686, THYMU2019813, THYMU2020198, THYMU2020289, THYMU2020416, THYMU2020491, THYMU2020499, THYMU2020560, THYMU2020667, THYMU2020830, THYMU2020883, THYMU2020959, THYMU2021361, THYMU2021509, THYMU2021597, THYMU2021684, THYMU2021714, THYMU2022213, THYMU2022289, THYMU2022660, THYMU2022854, THYMU2022922, THYMU2023209, THYMU2023264, THYMU2023576, THYMU2023711, THYMU2023900, THYMU2023943,

[2290] THYMU2023967, THYMU2024071, THYMU2024121, THYMU2024185, THYMU2024207, THYMU2024616, THYMU2024684, THYMU2024748, THYMU2025042, THYMU2025189, THYMU2025319, THYMU2025325, THYMU2025406, THYMU2025557, THYMU2025572, THYMU2025707, THYMU2025849, THYMU2025909, THYMU2026182, THYMU2026530, THYMU2026531, THYMU2026835, THYMU2026904, THYMU2027053, THYMU2027168, THYMU2027249, THYMU2027282, THYMU2027497, THYMU2027695, THYMU2027734, THYMU2027894, THYMU2027975, THYMU2027996, THYMU2028041, THYMU2028368, THYMU2028379, THYMU2028394, THYMU2028412, THYMU2028629, THYMU2028632, THYMU2028724, THYMU2028739, THYMU2028942, THYMU2028978, THYMU2029134, THYMU2029578, THYMU2029676, THYMU2029688, THYMU2029788, THYMU2030068,

[2291] THYMU2030226, THYMU2030264, THYMU2030462, THYMU2030543, THYMU2030637, THYMU2030655, THYMU2030796, THYMU2030912, THYMU2030982, THYMU2031046, THYMU2031139, THYMU2031218, THYMU2031249, THYMU2031258, THYMU2031368, THYMU2031579, THYMU2031847, THYMU2031890, THYMU2031994, THYMU2032014, THYMU2032035, THYMU2032080, THYMU2032150, THYMU2032155, THYMU2032358, THYMU2032437, THYMU2032601, THYMU2032655, THYMU2032696, THYMU2032715, THYMU2032732, THYMU2032976, THYMU2033053, THYMU2033059, THYMU2033070, THYMU2033079, THYMU2033085, THYMU2033104, THYMU2033227, THYMU2033263, THYMU2033308, THYMU2033401, THYMU2033583, THYMU2033755, THYMU2033787, THYMU2033816, THYMU2034182, THYMU2034279, THYMU2034314, THYMU2034338,

[2292] THYMU2034374, THYMU2034647, THYMU2035064, THYMU2035078, THYMU2035101, THYMU2035319, THYMU2035321, THYMU2035388, THYMU2035400, THYMU2035554, THYMU2035710, THYMU2035735, THYMU2036058, THYMU2036105, THYMU2036207, THYMU2036215, THYMU2036252, THYMU2036265, THYMU2036366, THYMU2036459, THYMU2036461, THYMU2036604, THYMU2036653, THYMU2037081, THYMU2037208, THYMU2037226, THYMU2037233, THYMU2037234, THYMU2037348, THYMU2037406, THYMU2037965, THYMU2038058, THYMU2038189, THYMU2038199, THYMU2038220, THYMU2038301, THYMU2038369, THYMU2038389, THYMU2038615, THYMU2038636, THYMU2038739, THYMU2038772, THYMU2038797, THYMU2038906, THYMU2039305, THYMU2039315, THYMU2039334, THYMU2039350, THYMU2039411, THYMU2039634,

[2293] THYMU2039719, THYMU2039780, THYMU2039788, THYMU2039989, THYMU2040029, THYMU2040110, THYMU2040114, THYMU2040140, THYMU2040412, THYMU2040427, THYMU2040824, THYMU2040925, THYMU2041007, THYMU2041015, THYMU2041252, THYMU3000028, THYMU3000036, THYMU3000037, THYMU3000082, THYMU3000194, THYMU3000224, THYMU3000269, THYMU3000306, THYMU3000360, THYMU3000390, THYMU3000420, THYMU3000490, THYMU3000504, THYMU3000542, THYMU3000655, THYMU3000776, THYMU3000826, THYMU3000841, THYMU3001077, THYMU3001082, THYMU3001083, THYMU3001133, THYMU3001151, THYMU3001379, THYMU3001472, THYMU3001593, THYMU3001883, THYMU3001991, THYMU3002452, THYMU3002661, THYMU3003007, THYMU3003092, THYMU3003212, THYMU3003350, THYMU3003403,

[2294] THYMU3003565, THYMU3003763, THYMU3003865, THYMU3003958, THYMU3003965, THYMU3004157, THYMU3004628, THYMU3004632, THYMU3004835, THYMU3004866, THYMU3005050, THYMU3005378, THYMU3005407, THYMU3005415, THYMU3005427, THYMU3005482, THYMU3005491, THYMU3005629, THYMU3005696, THYMU3006118, THYMU3006132, THYMU3006168, THYMU3006172, THYMU3006371, THYMU3006485, THYMU3006640, THYMU3006767, THYMU3006811, THYMU3006963, THYMU3007137, THYMU3007308, THYMU3007368, THYMU3007423, THYMU3007559, THYMU3007845, THYMU3008060, THYMU3008136, THYMU3008171, THYMU3008216, THYMU3008436, THYMU3008672, THYMU3008883, THYMU3008935, THYMU3009006, THYMU3009255, THYMU3009391, THYMU3009643, THYMU3009755, THYMU3010247, THYMU3011012,

[2295] THYMU3011081, THYMU3011244, THYMU3011360, THYMU3011534, THYMU3011543, THYMU3011556, THYMU3011717, THYMU3012402, THYMU3012907, THYMU3012983, THYMU3013114, THYMU3013197, THYMU3013241, THYMU3013386, THYMU3013470, THYMU3013785, THYMU3013897, THYMU3014038, THYMU3014173, THYMU3014372, THYMU3014555, THYMU3014620, THYMU3014701, THYMU3015042, THYMU3015457, THYMU3015571, THYMU3015592, THYMU3015625, THYMU3015647, THYMU3015962, THYMU3016022, THYMU3016518, THYMU3016797, THYMU3016822, THYMU3016850, THYMU3017562, THYMU3017688, THYMU3017689, THYMU3017761, THYMU3018151, THYMU3018896, THYMU3019095, THYMU3019476, THYMU3019605, THYMU3019916, THYMU3020221, THYMU3020595, THYMU3020713, THYMU3020856, THYMU3020869,

[2296] THYMU3020970, THYMU3021404, THYMU3021586, THYMU3021755, THYMU3021900, THYMU3022211, THYMU3022434, THYMU3022528, THYMU3022668, THYMU3022982, THYMU3023107, THYMU3023211, THYMU3023216, THYMU3023394, THYMU3023400, THYMU3023797, THYMU3024164, THYMU3024339, THYMU3024602, THYMU3024879, THYMU3025118, THYMU3025313, THYMU3025642, THYMU3025683, THYMU3025772, THYMU3025865, THYMU3026350, THYMU3026479, THYMU3026532, THYMU3026783, THYMU3026869, THYMU3027251, THYMU3027540, THYMU3027655, THYMU3027671, THYMU3028075, THYMU3028410, THYMU3028461, THYMU3028702, THYMU3029188, THYMU3029318, THYMU3029421, THYMU3029719, THYMU3029774, THYMU3029832, THYMU3030072, THYMU3030231, THYMU3030706, THYMU3030710, THYMU3030752,

[2297] THYMU3031146, THYMU3031402, THYMU3031610, THYMU3031612, THYMU3031868, THYMU3031878, THYMU3032032, THYMU3032867, THYMU3033402, THYMU3033630, THYMU3033649, THYMU3033754, THYMU3033759, THYMU3034078, THYMU3034099, THYMU3034453, THYMU3034616, THYMU3034853, THYMU3034867, THYMU3034983, THYMU3036200, THYMU3036310, THYMU3036934, THYMU3036953, THYMU3037052, THYMU3037192, THYMU3037617, THYMU3037772, THYMU3037827, THYMU3037836, THYMU3037856, THYMU3037867, THYMU3037909, THYMU3037980, THYMU3038158, THYMU3038167, THYMU3038214, THYMU3038266, THYMU3038328, THYMU3038347, THYMU3038375, THYMU3038603, THYMU3038687, THYMU3038759, THYMU3038879, THYMU3038970, THYMU3039807, THYMU3039846, THYMU3040068, THYMU3040126,

[2298] THYMU3040146, THYMU3040168, THYMU3040172, THYMU3040725, THYMU3040746, THYMU3040816, THYMU3040829, THYMU3040830, THYMU3040986, THYMU3041354, THYMU3041386, THYMU3041573, THYMU3041603, THYMU3041736, THYMU3041918, THYMU3042075, THYMU3042321, THYMU3042372, THYMU3042758, THYMU3042929, THYMU3043200, THYMU3043327, THYMU3043482, THYMU3043597, THYMU3043688, THYMU3043779, THYMU3043883, THYMU3043993, THYMU3044175, THYMU3044188, THYMU3044441, THYMU3044445, THYMU3045510, THYMU3045673, THYMU3045692, THYMU3045704, THYMU3046140, THYMU3046350, THYMU3046360, THYMU3046856, THYMU3047144, THYMU3047156, THYMU3047366, THYMU3047513, THYMU3047542, THYMU3047760, THYMU3047891, TKIDN1000001, TKIDN1000062, TKIDN1000066,

[2299] TKIDN1000164, TKIDN1000171, TKIDN2000240, TKIDN2000319, TKIDN2000464, TKIDN2000521, TKIDN2000701, TKIDN2001662, TKIDN2002318, TKIDN2002329, TKIDN2002424, TKIDN2002632, TKIDN2003044, TKIDN2003059, TKIDN2003062, TKIDN2003366, TKIDN2003396, TKIDN2003413, TKIDN2003597, TKIDN2003601, TKIDN2004185, TKIDN2004386, TKIDN2004458, TKIDN2004748, TKIDN2005721, TKIDN2005934, TKIDN2005947, TKIDN2005956, TKIDN2006525, TKIDN2006761, TKIDN2006852, TKIDN2007605, TKIDN2007667, TKIDN2007828, TKIDN2008176, TKIDN2008778, TKIDN2009092, TKIDN2009330, TKIDN2009481, TKIDN2009794, TKIDN2009889, TKIDN2010200, TKIDN2010232, TKIDN2010278, TKIDN2010602, TKIDN2011051, TKIDN2011160, TKIDN2011324, TKIDN2012034, TKIDN2012771,

[2300] TKIDN2012824, TKIDN2013134, TKIDN2014570, TKIDN2014757, TKIDN2014771, TKIDN2015025, TKIDN2015071, TKIDN2015161, TKIDN2015263, TKIDN2015788, TKIDN2016309, TKIDN2016399, TKIDN2016846, TKIDN2018926, TKIDN2019116, TLIVE2000023, TLIVE2000142, TLIVE2000292, TLIVE2000762, TLIVE2000979, TLIVE2001327, TLIVE2001616, TLIVE2001684, TLIVE2001828, TLIVE2001927, TLIVE2002336, TLIVE2002338, TLIVE2002562, TLIVE2002882, TLIVE2003197, TLIVE2003200, TLIVE2003225, TLIVE2003381, TLIVE2003737, TLIVE2003961, TLIVE2003970, TLIVE2004110, TLIVE2004320, TLIVE2004331, TLIVE2004601, TLIVE2005180, TLIVE2005390, TLIVE2005516, TLIVE2005731, TLIVE2005866, TLIVE2006236, TLIVE2006359, TLIVE2006529, TLIVE2006621, TLIVE2006733,

[2301] TLIVE2007000, TLIVE2007016, TLIVE2007132, TLIVE2007192, TLIVE2007528, TLIVE2007607, TLIVE2007736, TLIVE2007816, TLIVE2007919, TLIVE2008083, TLIVE2008213, TLIVE2008221, TLIVE2008229, TLIVE2008712, TLIVE2008797, TLIVE2009087, TLIVE2009163, TLIVE2009489, TLIVE2009541, TLUNG2000179, TOVAR2000476, TOVAR2000575, TOVAR2000649, TOVAR2000904, TOVAR2001281, TOVAR2001556, TOVAR2001730, TOVAR2002247, TOVAR2002514, TOVAR2002549, TOVAR2002800, TRACH1000011, TRACH1000018, TRACH1000038, TRACH1000057, TRACH1000063, TRACH1000074, TRACH1000100, TRACH1000125, TRACH1000140, TRACH1000144, TRACH1000193, TRACH1000212, TRACH1000240, TRACH2000002, TRACH2000015, TRACH2000024, TRACH2000032, TRACH2000045, TRACH2000047,

[2302] TRACH2000081, TRACH2000083, TRACH2000148, TRACH2000185, TRACH2000196, TRACH2000235, TRACH2000243, TRACH2000250, TRACH2000259, TRACH2000272, TRACH2000282, TRACH2000287, TRACH2000289, TRACH2000306, TRACH2000312, TRACH2000336, TRACH2000359, TRACH2000393, TRACH2000411, TRACH2000496, TRACH2000497, TRACH2000502, TRACH2000522, TRACH2000540, TRACH2000559, TRACH2000660, TRACH2000665, TRACH2000675, TRACH2000677, TRACH2000703, TRACH2000767, TRACH2000775, TRACH2000807, TRACH2000862, TRACH2000873, TRACH2000894, TRACH2000898, TRACH2000923, TRACH2000944, TRACH2000972, TRACH2000981, TRACH2000986, TRACH2001037, TRACH2001060, TRACH2001085, TRACH2001101, TRACH2001121, TRACH2001147, TRACH2001154, TRACH2001188,

[2303] TRACH2001192, TRACH2001249, TRACH2001275, TRACH2001335, TRACH2001339, TRACH2001341, TRACH2001347, TRACH2001395, TRACH2001400, TRACH2001403, TRACH2001416, TRACH2001428, TRACH2001432, TRACH2001443, TRACH2001474, TRACH2001523, TRACH2001525, TRACH2001532, TRACH2001549, TRACH2001592, TRACH2001596, TRACH2001621, TRACH2001646, TRACH2001651, TRACH2001684, TRACH2001933, TRACH2001968, TRACH2001996, TRACH2002043, TRACH2002054, TRACH2002092, TRACH2002100, TRACH2002138, TRACH2002333, TRACH2002664, TRACH2002784, TRACH2002840, TRACH2002847, TRACH2002853, TRACH2002862, TRACH2002954, TRACH2002960, TRACH2002988, TRACH2003070, TRACH2003484, TRACH2003516, TRACH2003605, TRACH2003736, TRACH2003759, TRACH2003941,

[2304] TRACH2004039, TRACH2004054, TRACH2004087, TRACH2004109, TRACH2004170, TRACH2004183, TRACH2004251, TRACH2004292, TRACH2004336, TRACH2004399, TRACH2004428, TRACH2004458, TRACH2004499, TRACH2004521, TRACH2004570, TRACH2004845, TRACH2004887, TRACH2004950, TRACH2005004, TRACH2005017, TRACH2005066, TRACH2005159, TRACH2005314, TRACH2005444, TRACH2005541, TRACH2005666, TRACH2005698, TRACH2005710, TRACH2005720, TRACH2005769, TRACH2005796, TRACH2006015, TRACH2006049, TRACH2006097, TRACH2006194, TRACH2006327, TRACH2006331, TRACH2006378, TRACH2006387, TRACH2006528, TRACH2006670, TRACH2006762, TRACH2006866, TRACH2006870, TRACH2006918, TRACH2007059, TRACH2007324, TRACH2007483, TRACH2007542, TRACH2007577,

[2305] TRACH2007674, TRACH2007676, TRACH2007688, TRACH2007733, TRACH2007754, TRACH2007816, TRACH2007894, TRACH2007969, TRACH2007988, TRACH2008112, TRACH2008113, TRACH2008127, TRACH2008278, TRACH2008478, TRACH2008540, TRACH2008583, TRACH2008597, TRACH2008716, TRACH2008820, TRACH2008891, TRACH2008921, TRACH2009006, TRACH2009060, TRACH2009107, TRACH2009123, TRACH2009268, TRACH2009291, TRACH2009310, TRACH2009340, TRACH2009348, TRACH2009358, TRACH2009661, TRACH2009730, TRACH2009743, TRACH2009754, TRACH2009851, TRACH2009862, TRACH2009934, TRACH2010159, TRACH2010218, TRACH2010251, TRACH2010272, TRACH2010317, TRACH2010419, TRACH2010451, TRACH2010505, TRACH2010587, TRACH2010600, TRACH2010634, TRACH2010639,

[2306] TRACH2010677, TRACH2010698, TRACH2010824, TRACH2010883, TRACH2010965, TRACH2010974, TRACH2011057, TRACH2011093, TRACH2011113, TRACH2011293, TRACH2011302, TRACH2011500, TRACH2011574, TRACH2011956, TRACH2012000, TRACH2012138, TRACH2012242, TRACH2012370, TRACH2012376, TRACH2012387, TRACH2012497, TRACH2012536, TRACH2012562, TRACH2012742, TRACH2012811, TRACH2012823, TRACH2012918, TRACH2013081, TRACH2013265, TRACH2013369, TRACH2013450, TRACH2013495, TRACH2013585, TRACH2013671, TRACH2013726, TRACH2013902, TRACH2013928, TRACH2013982, TRACH2013991, TRACH2014018, TRACH2014045, TRACH2014046, TRACH2014077, TRACH2014082, TRACH2014268, TRACH2014284, TRACH2014337, TRACH2014356, TRACH2014371, TRACH2014442,

[2307] TRACH2014483, TRACH2014495, TRACH2014544, TRACH2014573, TRACH2014725, TRACH2014760, TRACH2014815, TRACH2014839, TRACH2014938, TRACH2014950, TRACH2014972, TRACH2014974, TRACH2014997, TRACH2015180, TRACH2015243, TRACH2015316, TRACH2015381, TRACH2015486, TRACH2015654, TRACH2015824, TRACH2015939, TRACH2015987, TRACH2016080, TRACH2016131, TRACH2016286, TRACH2016317, TRACH2016347, TRACH2016380, TRACH2016384, TRACH2016410, TRACH2016481, TRACH2016498, TRACH2016533, TRACH2016551, TRACH2016554, TRACH2016651, TRACH2016690, TRACH2016709, TRACH2016722, TRACH2016835, TRACH2016980, TRACH2017086, TRACH2017368, TRACH2017498, TRACH2017609, TRACH2017949, TRACH2017965, TRACH2017980, TRACH2018034, TRACH2018084,

[2308] TRACH2018262, TRACH2018273, TRACH2018278, TRACH2018317, TRACH2018345, TRACH2018380, TRACH2018449, TRACH2018512, TRACH2018646, TRACH2018663, TRACH2018718, TRACH2018835, TRACH2018882, TRACH2018914, TRACH2018950, TRACH2019024, TRACH2019046, TRACH2019080, TRACH2019151, TRACH2019154, TRACH2019176, TRACH2019248, TRACH2019309, TRACH2019425, TRACH2019473, TRACH2019602, TRACH2019661, TRACH2019672, TRACH2019673, TRACH2019844, TRACH2019879, TRACH2020048, TRACH2020336, TRACH2020525, TRACH2021398, TRACH2021622, TRACH2021635, TRACH2021964, TRACH2022042, TRACH2022113, TRACH2022253, TRACH2022425, TRACH2022553, TRACH2022649, TRACH2022839, TRACH2023246, TRACH2023299, TRACH2023306, TRACH2023416, TRACH2023479,

[2309] TRACH2023684, TRACH2023860, TRACH2023876, TRACH2024139, TRACH2024187, TRACH2024271, TRACH2024293, TRACH2024408, TRACH2024512, TRACH2024559, TRACH2024647, TRACH2024651, TRACH2024730, TRACH2024735, TRACH2024749, TRACH2024821, TRACH2025057, TRACH2025084, TRACH2025155, TRACH2025224, TRACH2025344, TRACH2025379, TRACH2025507, TRACH2025569, TRACH2025705, TRACH2025749, TRACH2025753, TRACH2025810, TRACH2025853, TRACH2025911, TRACH2025932, TRACH3000014, TRACH3000017, TRACH3000043, TRACH3000180, TRACH3000342, TRACH3000420, TRACH3000515, TRACH3000530, TRACH3000548, TRACH3000558, TRACH3000586, TRACH3000780, TRACH3000892, TRACH3000926, TRACH3001119, TRACH3001443, TRACH3001550, TRACH3001759, TRACH3002064,

[2310] TRACH3002107, TRACH3002168, TRACH3002188, TRACH3002245, TRACH3002293, TRACH3002533, TRACH3002561, TRACH3002567, TRACH3002605, TRACH3002650, TRACH3002752, TRACH3002866, TRACH3002871, TRACH3002876, TRACH3002890, TRACH3003009, TRACH3003037, TRACH3003357, TRACH3003379, TRACH3003586, TRACH3003683, TRACH3003780, TRACH3003805, TRACH3003832, TRACH3004068, TRACH3004113, TRACH3004288, TRACH3004303, TRACH3004412, TRACH3004456, TRACH3004537, TRACH3004596, TRACH3004651, TRACH3004652, TRACH3004671, TRACH3004747, TRACH3004760, TRACH3004783, TRACH3004786, TRACH3004840, TRACH3004931, TRACH3004934, TRACH3005072, TRACH3005085, TRACH3005102, TRACH3005173, TRACH3005191, TRACH3005274, TRACH3005479, TRACH3005549,

[2311] TRACH3005699, TRACH3005702, TRACH3005808, TRACH3005852, TRACH3005896, TRACH3006038, TRACH3006149, TRACH3006228, TRACH3006264, TRACH3006336, TRACH3006379, TRACH3006392, TRACH3006395, TRACH3006397, TRACH3006412, TRACH3006470, TRACH3006589, TRACH3006626, TRACH3006699, TRACH3006800, TRACH3006889, TRACH3006985, TRACH3007097, TRACH3007268, TRACH3007274, TRACH3007277, TRACH3007391, TRACH3007479, TRACH3007541, TRACH3007595, TRACH3007627, TRACH3007689, TRACH3007766, TRACH3007866, TRACH3007995, TRACH3008042, TRACH3008061, TRACH3008201, TRACH3008508, TRACH3008629, TRACH3008632, TRACH3008688, TRACH3008697, TRACH3008887, TRACH3008902, TRACH3008990, TRACH3009001, TRACH3009059, TRACH3009061, TRACH3009148,

[2312] TRACH3009455, TRACH3009701, TRACH3009715, TRACH3009894, TRACH3009956, TRACH3010079, TRACH3010167, TRACH3010331, TRACH3010342, TRACH3010382, TRACH3010757, TRACH3010901, TRACH3011004, TRACH3011082, TRACH3011184, TRACH3011282, TRACH3011313, TRACH3011454, TRACH3011485, TRACH3011503, TRACH3011538, TRACH3011542, TRACH3012106, TRACH3012161, TRACH3012232, TRACH3012261, TRACH3012445, TRACH3012460, TRACH3012659, TRACH3012718, TRACH3012864, TRACH3012891, TRACH3012942, TRACH3013043, TRACH3013072, TRACH3013426, TRACH3013454, TRACH3013558, TRACH3013684, TRACH3013693, TRACH3013700, TRACH3013766, TRACH3013900, TRACH3013926, TRACH3014063, TRACH3014183, TRACH3014215, TRACH3014415, TRACH3014580, TRACH3014641,

[2313] TRACH3014885, TRACH3015136, TRACH3015336, TRACH3015346, TRACH3015354, TRACH3015467, TRACH3015626, TRACH3015951, TRACH3016051, TRACH3016120, TRACH3016264, TRACH3016277, TRACH3016368, TRACH3016455, TRACH3016614, TRACH3016992, TRACH3017171, TRACH3017409, TRACH3017934, TRACH3018108, TRACH3018191, TRACH3018240, TRACH3018261, TRACH3018519, TRACH3018524, TRACH3018606, TRACH3018783, TRACH3018907, TRACH3018933, TRACH3018943, TRACH3019018, TRACH3019058, TRACH3019142, TRACH3019290, TRACH3019347, TRACH3019370, TRACH3019447, TRACH3019598, TRACH3019621, TRACH3019662, TRACH3019807, TRACH3019924, TRACH3019977, TRACH3020137, TRACH3020410, TRACH3020563, TRACH3020605, TRACH3020750, TRACH3020769, TRACH3020928,

[2314] TRACH3020930, TRACH3021023, TRACH3021066, TRACH3021212, TRACH3021335, TRACH3021373, TRACH3021778, TRACH3021834, TRACH3021883, TRACH3022170, TRACH3022198, TRACH3022296, TRACH3022482, TRACH3022732, TRACH3022758, TRACH3022875, TRACH3022910, TRACH3022960, TRACH3023063, TRACH3023203, TRACH3023242, TRACH3023373, TRACH3023516, TRACH3023752, TRACH3023945, TRACH3023960, TRACH3024020, TRACH3024081, TRACH3024342, TRACH3024423, TRACH3024428, TRACH3024512, TRACH3024671, TRACH3024823, TRACH3025302, TRACH3025316, TRACH3025346, TRACH3025520, TRACH3026148, TRACH3026283, TRACH3026299, TRACH3026542, TRACH3026650, TRACH3026676, TRACH3026744, TRACH3026949, TRACH3027229, TRACH3027527, TRACH3027681, TRACH3027701,

[2315] TRACH3027885, TRACH3028031, TRACH3028164, TRACH3028180, TRACH3028195, TRACH3028441, TRACH3028597, TRACH3028678, TRACH3028837, TRACH3028847, TRACH3029139, TRACH3029329, TRACH3029451, TRACH3029462, TRACH3029520, TRACH3029592, TRACH3029629, TRACH3029665, TRACH3029670, TRACH3029800, TRACH3030111, TRACH3030130, TRACH3030176, TRACH3030252, TRACH3030725, TRACH3030855, TRACH3030883, TRACH3031316, TRACH3031400, TRACH3031463, TRACH3031479, TRACH3031518, TRACH3031660, TRACH3031678, TRACH3031936, TRACH3032044, TRACH3032065, TRACH3032150, TRACH3032372, TRACH3032480, TRACH3032570, TRACH3032755, TRACH3032827, TRACH3032873, TRACH3033535, TRACH3033680, TRACH3033868, TRACH3034145, TRACH3034414, TRACH3034488,

[2316] TRACH3034680, TRACH3034731, TRACH3034745, TRACH3034762, TRACH3034903, TRACH3035187, TRACH3035199, TRACH3035235, TRACH3035451, TRACH3035482, TRACH3035526, TRACH3036004, TRACH3036103, TRACH3036193, TRACH3036207, TRACH3036278, TRACH3036309, TRACH3036456, TRACH3036609, TRACH3036638, TRACH3036683, TRACH3036750, TRACH3036792, TRACH3036843, TRACH3036897, TRACH3036932, TRACH3036942, TRACH3036997, TRACH3037063, TRACH3037267, TRACH3037288, TRACH3037505, TRACH3037573, TRACH3037696, TRACH3037897, TRACH3038086, TRACH3038399, TSTOM1000135, TSTOM1000186, TSTOM2000139, TSTOM2000235, TSTOM2000315, TSTOM2000442, TSTOM2000553, TSTOM2000569, TSTOM2000588, TSTOM2001195, TSTOM2001274, TSTOM2001571, TSTOM2001996,

[2317] TSTOM2002265, TSTOM2002505, TSTOM2002561, TSTOM2002611, TSTOM2002672, TSTOM2002682, TUTER1000014, TUTER1000137, TUTER2000283, TUTER2000425, TUTER2000904, TUTER2000916, TUTER2001286, TUTER2001341, TUTER2001387, TUTER2001433, TUTER2001461, TUTER2002028, TUTER2002074, TUTER2002158, TUTER2002228, TUTER2002323, TUTER2002356, TUTER2002729, UMVEN1000122, UMVEN1000143, UMVEN1000156, UMVEN1000186, UMVEN2000046, UMVEN2000069, UMVEN2000121, UMVEN2000133, UTERU1000008, UTERU1000015, UTERU1000024, UTERU1000031, UTERU1000032, UTERU1000057, UTERU1000065, UTERU1000077, UTERU1000093, UTERU1000096, UTERU1000109, UTERU1000131, UTERU1000138, UTERU1000148, UTERU1000160, UTERU1000183, UTERU1000187, UTERU1000192,

[2318] UTERU1000249, UTERU1000337, UTERU1000339, UTERU2000023, UTERU2000047, UTERU2000074, UTERU2000099, UTERU2000154, UTERU2000197, UTERU2000218, UTERU2000238, UTERU2000243, UTERU2000260, UTERU2000329, UTERU2000332, UTERU2000338, UTERU2000349, UTERU2000377, UTERU2000393, UTERU2000418, UTERU2000465, UTERU2000485, UTERU2000517, UTERU2000524, UTERU2000537, UTERU2000539, UTERU2000541, UTERU2000542, UTERU2000546, UTERU2000550, UTERU2000569, UTERU2000607, UTERU2000629, UTERU2000649, UTERU2000663, UTERU2000794, UTERU2000830, UTERU2000844, UTERU2000922, UTERU2000925, UTERU2001024, UTERU2001110, UTERU2001176, UTERU2001281, UTERU2001389, UTERU2001409, UTERU2001412, UTERU2001504, UTERU2001658, UTERU2001747,

[2319] UTERU2001876, UTERU2002001, UTERU2002011, UTERU2002176, UTERU2002198, UTERU2002332, UTERU2002473, UTERU2002547, UTERU2002693, UTERU2002733, UTERU2002736, UTERU2002737, UTERU2002826, UTERU2002841, UTERU2002964, UTERU2002993, UTERU2003035, UTERU2003057, UTERU2003126, UTERU2003135, UTERU2003321, UTERU2003399, UTERU2003456, UTERU2003577, UTERU2003704, UTERU2003926, UTERU2003973, UTERU2004015, UTERU2004037, UTERU2004039, UTERU2004061, UTERU2004073, UTERU2004163, UTERU2004299, UTERU2004461, UTERU2004520, UTERU2004564, UTERU2004664, UTERU2004688, UTERU2004698, UTERU2004861, UTERU2004929, UTERU2005004, UTERU2005050, UTERU2005069, UTERU2005074, UTERU2005179, UTERU2005292, UTERU2005346, UTERU2005446,

[2320] UTERU2005449, UTERU2005450, UTERU2005533, UTERU2005593, UTERU2005601, UTERU2005621, UTERU2005664, UTERU2005822, UTERU2005903, UTERU2005905, UTERU2006103, UTERU2006115, UTERU2006137, UTERU2006182, UTERU2006400, UTERU2006412, UTERU2006429, UTERU2006486, UTERU2006524, UTERU2006547, UTERU2006568, UTERU2006643, UTERU2006651, UTERU2006705, UTERU2006899, UTERU2007004, UTERU2007075, UTERU2007081, UTERU2007128, UTERU2007253, UTERU2007267, UTERU2007444, UTERU2007499, UTERU2007639, UTERU2007724, UTERU2007942, UTERU2008018, UTERU2008019, UTERU2008027, UTERU2008040, UTERU2008077, UTERU2008130, UTERU2008347, UTERU2008426, UTERU2008516, UTERU2008561, UTERU2008705, UTERU2008707, UTERU2008747, UTERU2008785,

[2321] UTERU2008845, UTERU2008901, UTERU2008930, UTERU2008938, UTERU2008939, UTERU2008962, UTERU2009094, UTERU2009120, UTERU2009131, UTERU2009147, UTERU2009206, UTERU2009283, UTERU2009414, UTERU2009483, UTERU2009510, UTERU2009538, UTERU2009540, UTERU2009776, UTERU2009904, UTERU2009951, UTERU2010115, UTERU2010124, UTERU2010164, UTERU2010231, UTERU2010304, UTERU2010320, UTERU2010431, UTERU2010525, UTERU2010651, UTERU2010724, UTERU2010747, UTERU2011195, UTERU2011199, UTERU2011220, UTERU2011261, UTERU2011287, UTERU2011410, UTERU2011574, UTERU2011657, UTERU2011741, UTERU2011806, UTERU2011811, UTERU2011897, UTERU2011906, UTERU2011962, UTERU2011968, UTERU2012031, UTERU2012101, UTERU2012114, UTERU2012252,

[2322] UTERU2012333, UTERU2012407, UTERU2012581, UTERU2012610, UTERU2012615, UTERU2012688, UTERU2012703, UTERU2012715, UTERU2012741, UTERU2012786, UTERU2012856, UTERU2012890, UTERU2012976, UTERU2013048, UTERU2013078, UTERU2013231, UTERU2013280, UTERU2013322, UTERU2013483, UTERU2013502, UTERU2013926, UTERU2013976, UTERU2014001, UTERU2014024, UTERU2014223, UTERU2014398, UTERU2014464, UTERU2014548, UTERU2014601, UTERU2014631, UTERU2014668, UTERU2014728, UTERU2014998, UTERU2015062, UTERU2015087, UTERU2015108, UTERU2015190, UTERU2015198, UTERU2015202, UTERU2015405, UTERU2015640, UTERU2015830, UTERU2015880, UTERU2016147, UTERU2016157, UTERU2016464, UTERU2016757, UTERU2016761, UTERU2016822, UTERU2016896,

[2323] UTERU2016902, UTERU2016979, UTERU2016981, UTERU2017123, UTERU2017303, UTERU2017421, UTERU2017492, UTERU2017613, UTERU2017623, UTERU2017632, UTERU2017761, UTERU2017762, UTERU2017810, UTERU2017988, UTERU2018127, UTERU2018180, UTERU2018200, UTERU2018333, UTERU2018364, UTERU2018514, UTERU2018522, UTERU2018523, UTERU2018544, UTERU2018566, UTERU2018609, UTERU2018674, UTERU2018712, UTERU2018784, UTERU2018789, UTERU2018811, UTERU2018867, UTERU2018881, UTERU2018955, UTERU2019038, UTERU2019163, UTERU2019257, UTERU2019453, UTERU2019491, UTERU2019534, UTERU2019681, UTERU2019706, UTERU2019710, UTERU2019940, UTERU2019959, UTERU2019964, UTERU2020226, UTERU2020242, UTERU2020292, UTERU2020351, UTERU2020491,

[2324] UTERU2020718, UTERU2021163, UTERU2021380, UTERU2021649, UTERU2021820, UTERU2022020, UTERU2022773, UTERU2022955, UTERU2022981, UTERU2023039, UTERU2023045, UTERU2023262, UTERU2023550, UTERU2023651, UTERU2023687, UTERU2023712, UTERU2023941, UTERU2024002, UTERU2024042, UTERU2024141, UTERU2024481, UTERU2024656, UTERU2024758, UTERU2024820, UTERU2024881, UTERU2025025, UTERU2025041, UTERU2025301, UTERU2025366, UTERU2025415, UTERU2025579, UTERU2025645, UTERU2025891, UTERU2026025, UTERU2026090, UTERU2026142, UTERU2026203, UTERU2026775, UTERU2027023, UTERU2027369, UTERU2027591, UTERU2027616, UTERU2027941, UTERU2028377, UTERU2029503, UTERU2029660, UTERU2029742, UTERU2029953, UTERU2030213, UTERU2030270,

[2325] UTERU2030280, UTERU2031060, UTERU2031084, UTERU2031268, UTERU2031295, UTERU2031521, UTERU2031611, UTERU2031703, UTERU2031834, UTERU2031851, UTERU2032075, UTERU2032220, UTERU2032279, UTERU2032726, UTERU2033172, UTERU2033375, UTERU2033382, UTERU2033420, UTERU2033530, UTERU2033577, UTERU2034053, UTERU2034147, UTERU2034695, UTERU2035114, UTERU2035187, UTERU2035231, UTERU2035306, UTERU2035323, UTERU2035328, UTERU2035331, UTERU2035452, UTERU2035469, UTERU2035503, UTERU2035745, UTERU2035908, UTERU2035926, UTERU2035978, UTERU2036089, UTERU2036347, UTERU2036507, UTERU2036512, UTERU2036530, UTERU2036623, UTERU2036690, UTERU2037224, UTERU2037361, UTERU2037423, UTERU2037577, UTERU2037674, UTERU2037791,

[2326] UTERU2037843, UTERU2038171, UTERU2038251, UTERU3000226, UTERU3000298, UTERU3000402, UTERU3000645, UTERU3000665, UTERU3000670, UTERU3000738, UTERU3000828, UTERU3000844, UTERU3000959, UTERU3001029, UTERU3001053, UTERU3001059, UTERU3001158, UTERU3001240, UTERU3001394, UTERU3001542, UTERU3001558, UTERU3001571, UTERU3001585, UTERU3001632, UTERU3001652, UTERU3001766, UTERU3001988, UTERU3002209, UTERU3002218, UTERU3002383, UTERU3002600, UTERU3002620, UTERU3002667, UTERU3002701, UTERU3002731, UTERU3002768, UTERU3002786, UTERU3002993, UTERU3003116, UTERU3003135, UTERU3003178, UTERU3003465, UTERU3003495, UTERU3003523, UTERU3003774, UTERU3003776, UTERU3004384, UTERU3004477, UTERU3004523, UTERU3004616,

[2327] UTERU3004635, UTERU3004709, UTERU3004938, UTERU3004992, UTERU3005049, UTERU3005159, UTERU3005205, UTERU3005230, UTERU3005264, UTERU3005422, UTERU3005460, UTERU3005536, UTERU3005585, UTERU3005767, UTERU3005907, UTERU3005970, UTERU3006008, UTERU3006228, UTERU3006308, UTERU3006538, UTERU3006640, UTERU3006687, UTERU3006720, UTERU3006798, UTERU3006884, UTERU3007021, UTERU3007104, UTERU3007108, UTERU3007134, UTERU3007419, UTERU3007640, UTERU3007731, UTERU3007913, UTERU3008280, UTERU3008463, UTERU3008660, UTERU3008671, UTERU3008722, UTERU3008917, UTERU3009259, UTERU3009490, UTERU3009517, UTERU3009690, UTERU3009775, UTERU3009871, UTERU3009979, UTERU3009987, UTERU3010029, UTERU3010526, UTERU3010604,

[2328] UTERU3010892, UTERU3010919, UTERU3011063, UTERU3011092, UTERU3011273, UTERU3011398, UTERU3011558, UTERU3011579, UTERU3011795, UTERU3011837, UTERU3012293, UTERU3012414, UTERU3012476, UTERU3012599, UTERU3012999, UTERU3013167, UTERU3013302, UTERU3013781, UTERU3014274, UTERU3014446, UTERU3014611, UTERU3014647, UTERU3014791, UTERU3014906, UTERU3015011, UTERU3015086, UTERU3015299, UTERU3015412, UTERU3015500, UTERU3015647, UTERU3015844, UTERU3016070, UTERU3016273, UTERU3016274, UTERU3016308, UTERU3016789, UTERU3017176, UTERU3017441, UTERU3017626, UTERU3017995, UTERU3018154, UTERU3018172, UTERU3018255, UTERU3018616, UTERU3018711, UTERU3019078

[2329] Of the 17,176 genes that include the cDNAs of the present invention, genes whose expression levels were high enough to detect in each of the PANCR, PEBLM, PERIC, PLACE, PROST, PUAEN, and RECTM libraries were analyzed for expression frequency. The analysis results are described below. Each is a relative value, where the expression level over all tissues is taken as 100. The larger this value, the greater the level of expression.

TABLE 36

| Clone Name | PANCR | PEBLM | PERIC | PLACE | PROST | PUAEN | RECTM |
|---|---|---|---|---|---|---|---|
| 3NB691000085 | 0 | 0 | 0 | 0 | 30.703 | 0 | 0 |
| 3NB691000116 | 0 | 0 | 0 | 5.789 | 0 | 0 | 0 |
| 3NB691000129 | 0 | 0 | 0 | 0 | 0 | 0 | 54.934 |
| 3NB691000173 | 0 | 0 | 0 | 0 | 2.800 | 0 | 0 |
| 3NB692000281 | 0 | 1.655 | 1.483 | 0.392 | 0 | 0 | 0 |
| 3NB692000330 | 0 | 3.315 | 0 | 0 | 1.564 | 4.978 | 9.597 |
| 3NB692000374 | 0 | 0 | 0 | 1.930 | 0 | 0 | 0 |
| 3NB692000545 | 0 | 0 | 19.004 | 5.021 | 0 | 0 | 0 |
| 3NB692000912 | 0 | 7.063 | 3.165 | 0 | 0 | 2.651 | 0 |
| 3NB692001002 | 0 | 0 | 0 | 0 | 6.938 | 0 | 0 |
| 3NB692001022 | 0 | 9.352 | 0 | 0 | 0 | 0 | 0 |
| 3NB692001334 | 0 | 0 | 0 | 0 | 1.904 | 0 | 5.840 |
| 3NB692001528 | 0 | 0 | 0 | 0 | 8.342 | 0 | 0 |
| 3NB692001538 | 0 | 0 | 0 | 0 | 7.045 | 0 | 43.225 |
| 3NB692001557 | 0 | 45.597 | 0 | 0 | 0 | 0 | 0 |
| 3NB692001853 | 0 | 19.682 | 0 | 0 | 0 | 0 | 0 |
| ADIPS2000425 | 0 | 0 | 0 | 1.382 | 0 | 0 | 0 |
| ADRGL1000144 | 0 | 0 | 0 | 0 | 0 | 18.858 | 0 |
| ADRGL2000006 | 0 | 7.814 | 0 | 1.850 | 0 | 0 | 0 |
| ASTRO1000165 | 0 | 0 | 14.930 | 0 | 0 | 0 | 0 |
| ASTRO2000014 | 0 | 3.087 | 0 | 0 | 0 | 0 | 0 |
| ASTRO2000046 | 0 | 3.067 | 0 | 0 | 0 | 0 | 0 |
| ASTRO2000141 | 0 | 0 | 0 | 0 | 0 | 8.569 | 0 |
| ASTRO2000480 | 0 | 0 | 19.071 | 0 | 10.040 | 0 | 0 |
| ASTRO2000914 | 0 | 0 | 13.112 | 0 | 0 | 0 | 0 |
| ASTRO2001029 | 0 | 0 | 0 | 0 | 0 | 7.076 | 0 |
| ASTRO2001806 | 0 | 0 | 0 | 0 | 0 | 16.145 | 0 |
| ASTRO2001823 | 0 | 0 | 0 | 0 | 5.148 | 0 | 0 |
| ASTRO2004032 | 0 | 0 | 0 | 0 | 21.613 | 0 | 0 |
| ASTRO2004628 | 0 | 0 | 0 | 15.841 | 0 | 0 | 0 |
| ASTRO2005242 | 0 | 0 | 0 | 16.430 | 0 | 0 | 0 |
| ASTRO2005687 | 0 | 0 | 0 | 0 | 3.953 | 12.579 | 0 |
| ASTRO2005863 | 0 | 0 | 0 | 47.359 | 0 | 0 | 0 |
| ASTRO2006475 | 0 | 0 | 50.171 | 0 | 0 | 0 | 0 |
| ASTRO2006920 | 0 | 0 | 0 | 0 | 0 | 33.852 | 0 |
| ASTRO2007948 | 0 | 0 | 0 | 4.457 | 0 | 14.132 | 0 |
| ASTRO2008216 | 0 | 23.985 | 21.495 | 0 | 0 | 0 | 0 |
| ASTRO2010819 | 0 | 0 | 0 | 1.197 | 0 | 0 | 0 |
| ASTRO2012552 | 0 | 0 | 9.957 | 0 | 0 | 0 | 0 |
| ASTRO2013585 | 0 | 0 | 0 | 0.868 | 5.186 | 0 | 10.607 |
| ASTRO2015987 | 0 | 0 | 0 | 32.718 | 0 | 0 | 0 |
| ASTRO2016114 | 0 | 0 | 0 | 25.800 | 0 | 0 | 0 |
| ASTRO2016491 | 0 | 0 | 0 | 0.896 | 1.786 | 0 | 0 |
| ASTRO2018540 | 0 | 0 | 0 | 2.768 | 0 | 0 | 33.835 |
| BGGI12000054 | 0 | 0 | 3.173 | 0.419 | 0 | 33.224 | 0 |
| BGGI12000533 | 0 | 0 | 0 | 0 | 8.006 | 0 | 0 |
| BGGI12000616 | 0 | 0 | 6.023 | 0 | 0 | 0 | 0 |
| BGGI12000839 | 0 | 5.543 | 0 | 0 | 0 | 8.322 | 0 |
| BGGI12001097 | 0 | 0 | 0 | 0 | 0 | 12.682 | 0 |
| BGGI12001682 | 0 | 0 | 0 | 0 | 3.662 | 0 | 0 |
| BLADE2004722 | 0 | 0 | 0 | 17.812 | 0 | 0 | 0 |
| BLADE2007589 | 0 | 0 | 0 | 0 | 17.531 | 0 | 0 |
| BNGH41000098 | 0 | 0 | 0 | 0 | 0 | 28.605 | 0 |
| BNGH41000104 | 0 | 0 | 0 | 0 | 0 | 42.253 | 0 |
| BNGH41000153 | 0 | 0 | 0 | 0 | 16.664 | 0 | 0 |
| BNGH41000190 | 0 | 0 | 17.045 | 4.503 | 8.974 | 0 | 0 |
| BNGH42000360 | 0 | 0 | 0 | 0.560 | 0 | 0 | 0 |
| BNGH42000739 | 0 | 0 | 0 | 2.215 | 0 | 0 | 0 |
| BNGH42002487 | 0 | 0 | 0 | 16.657 | 0 | 0 | 0 |
| BNGH42005968 | 0 | 17.264 | 15.472 | 0 | 0 | 0 | 0 |
| BNGH42006135 | 0 | 0 | 0 | 3.525 | 0 | 3.725 | 0 |
| BNGH42007460 | 0 | 0 | 0 | 3.587 | 0 | 0 | 0 |
| BNGH42007709 | 0 | 5.191 | 3.101 | 1.639 | 0.816 | 0 | 0 |
| BNGH42007788 | 0 | 0 | 0 | 0 | 10.917 | 0 | 0 |
| BNGH42008603 | 0 | 0 | 0 | 0 | 0 | 16.323 | 0 |
| BNGH42008850 | 0 | 0 | 0 | 18.750 | 0 | 0 | 0 |
| BNGH42009025 | 0 | 0 | 0 | 0 | 4.944 | 0 | 0 |
| BRACE1000042 | 0 | 0 | 20.508 | 0 | 0 | 0 | 0 |
| BRACE1000070 | 0 | 0 | 0 | 0 | 6.340 | 0 | 0 |
| BRACE1000115 | 0 | 0 | 0 | 0.333 | 0 | 0 | 0 |
| BRACE1000131 | 0 | 0 | 0 | 0 | 3.694 | 0 | 0 |
| BRACE1000132 | 0 | 0 | 0 | 25.564 | 0 | 0 | 0 |
| BRACE1000159 | 0 | 0 | 12.437 | 0 | 0 | 0 | 0 |
| BRACE1000186 | 0 | 0 | 0 | 0 | 7.668 | 0 | 0 |
| BRACE1000239 | 0 | 0 | 0 | 35.265 | 0 | 0 | 0 |
| BRACE2000893 | 0 | 0 | 30.442 | 0 | 0 | 0 | 0 |
| BRACE2001143 | 0 | 0 | 0 | 0 | 5.268 | 0 | 0 |
| BRACE2001477 | 0 | 0 | 0 | 6.121 | 0 | 0 | 0 |
| BRACE2001497 | 0 | 0 | 0 | 3.316 | 0 | 0 | 0 |
| BRACE2001508 | 0 | 66.247 | 0 | 0 | 0 | 0 | 0 |
| BRACE2001673 | 0 | 0 | 0 | 0 | 0.831 | 0 | 0 |
| BRACE2001892 | 0 | 0 | 0 | 0 | 1.074 | 0 | 0 |
| BRACE2002091 | 0 | 0 | 0 | 0 | 0 | 0 | 45.947 |
| BRACE2002441 | 0 | 8.465 | 0 | 0 | 3.994 | 0 | 0 |
| BRACE2002606 | 0 | 0 | 0 | 0 | 0 | 90.728 | 0 |
| BRACE2002661 | 0 | 0 | 19.399 | 0 | 0 | 0 | 0 |
| BRACE2002677 | 0 | 0 | 13.004 | 3.436 | 0 | 0 | 0 |
| BRACE2002860 | 0 | 0 | 0 | 4.481 | 0 | 0 | 0 |
| BRACE2002861 | 0 | 0 | 0 | 4.618 | 0 | 0 | 0 |
| BRACE2003172 | 0 | 0 | 0 | 7.519 | 0 | 0 | 0 |
| BRACE2003217 | 0 | 0 | 29.036 | 0 | 0 | 0 | 0 |
| BRACE2003254 | 0 | 0 | 0 | 1.611 | 0 | 0 | 0 |
| BRACE2003628 | 0 | 0 | 0 | 0 | 24.194 | 0 | 0 |
| BRACE2003827 | 0 | 6.586 | 0 | 0 | 0 | 0 | 0 |
| BRACE2003944 | 0 | 0 | 34.870 | 0 | 1.836 | 5.842 | 0 |
| BRACE2005087 | 0 | 0 | 0 | 9.230 | 0 | 0 | 0 |
| BRACE2005434 | 0 | 0 | 0 | 0 | 2.445 | 0 | 0 |
| BRACE2005448 | 0 | 0 | 0 | 12.102 | 0 | 0 | 0 |
| BRACE2005937 | 0 | 0 | 0 | 21.500 | 0 | 0 | 0 |
| BRACE2006162 | 0 | 0 | 41.692 | 0 | 0 | 0 | 0 |
| BRACE2006258 | 0 | 0 | 0 | 0 | 0 | 4.622 | 0 |
| BRACE2006264 | 0 | 0 | 0 | 15.021 | 0 | 0 | 0 |
| BRACE2006319 | 0 | 0 | 23.616 | 0 | 0 | 0 | 0 |
| BRACE2006397 | 0 | 0 | 0 | 0.525 | 2.094 | 0 | 0 |
| BRACE2006514 | 0 | 0 | 0 | 0 | 0 | 4.902 | 0 |
| BRACE2006537 | 0 | 8.090 | 0 | 1.915 | 15.267 | 0 | 0 |
| BRACE2006547 | 0 | 0 | 0 | 0 | 53.061 | 0 | 0 |
| BRACE2006753 | 0 | 46.220 | 0 | 0 | 0 | 0 | 0 |
| BRACE2006900 | 0 | 0 | 0 | 0.916 | 0 | 0 | 0 |
| BRACE2007089 | 0 | 6.365 | 0 | 0 | 3.003 | 0 | 0 |
| BRACE2007191 | 0 | 0 | 0 | 4.890 | 2.436 | 0 | 0 |
| BRACE2007254 | 0 | 0 | 50.143 | 0 | 0 | 0 | 0 |
| BRACE2007518 | 0 | 0 | 0 | 4.039 | 0 | 0 | 0 |
| BRACE2007567 | 0 | 0 | 0 | 0 | 0 | 0 | 30.191 |
| BRACE2007671 | 0 | 0 | 10.414 | 0 | 10.966 | 8.724 | 0 |
| BRACE2007767 | 0 | 0 | 0 | 5.541 | 0 | 0 | 0 |
| BRACE2008358 | 0 | 0 | 0 | 4.033 | 16.072 | 0 | 0 |
| BRACE2008653 | 0 | 0 | 0 | 0.939 | 1.870 | 0 | 0 |
| BRACE2008706 | 0 | 0 | 0 | 0 | 11.652 | 0 | 0 |
| BRACE2008941 | 0 | 0 | 0 | 0 | 35.442 | 0 | 0 |
| BRACE2008968 | 0 | 0 | 0 | 0 | 6.186 | 0 | 0 |
| BRACE2009037 | 0 | 0 | 0 | 0 | 0 | 1.648 | 0 |
| BRACE2009291 | 0 | 0 | 8.910 | 0 | 0 | 0 | 0 |
| BRACE2009517 | 0 | 20.387 | 0 | 0 | 0 | 0 | 0 |
| BRACE2015287 | 0 | 0 | 0 | 0 | 0 | 0 | 49.965 |
| BRACE2016366 | 0 | 0 | 57.236 | 0 | 0 | 0 | 0 |
| BRACE2017397 | 0 | 0 | 0 | 8.395 | 0 | 0 | 0 |
| BRACE2017574 | 0 | 0 | 0 | 9.118 | 0 | 0 | 0 |
| BRACE2019147 | 0 | 16.098 | 0 | 0 | 0 | 0 | 0 |
| BRACE2022638 | 0 | 5.602 | 0 | 0 | 2.643 | 0 | 0 |
| BRACE2026836 | 0 | 0 | 46.481 | 0 | 0 | 0 | 0 |
| BRACE2037295 | 0 | 24.657 | 0 | 0 | 0 | 0 | 0 |
| BRACE2039624 | 0 | 0 | 0 | 0 | 3.431 | 0 | 0 |
| BRACE3000071 | 0 | 0 | 90.468 | 0 | 0 | 0 | 0 |
| BRACE3002184 | 0 | 0 | 0 | 47.691 | 0 | 0 | 0 |
| BRACE3003026 | 0 | 0 | 0 | 29.061 | 0 | 0 | 0 |
| BRACE3004371 | 0 | 0 | 0 | 6.686 | 0 | 0 | 0 |
| BRACE3004843 | 0 | 0 | 0 | 56.621 | 0 | 0 | 0 |
| BRACE3010428 | 0 | 8.604 | 0 | 2.037 | 0 | 0 | 0 |
| BRACE3010438 | 0 | 0 | 0 | 0 | 0 | 10.104 | 0 |
| BRACE3032631 | 0 | 0 | 0 | 22.445 | 0 | 0 | 0 |
| BRALZ2009482 | 0 | 0 | 0 | 5.952 | 0 | 0 | 8.085 |
| BRAMY2000354 | 0 | 0 | 9.256 | 0 | 0 | 0 | 29.898 |
| BRAMY2000893 | 0 | 0 | 0 | 0 | 0 | 0 | 33.110 |
| BRAMY2004363 | 0 | 0 | 0 | 0 | 0 | 11.536 | 0 |
| BRAMY2004521 | 0 | 0 | 0 | 4.218 | 0 | 0 | 0 |
| BRAMY2006366 | 0 | 0 | 0 | 16.395 | 0 | 0 | 0 |
| BRAMY2007078 | 0 | 28.583 | 0 | 0 | 0 | 21.457 | 0 |
| BRAMY2012091 | 0 | 0 | 40 | 0 | 0 | 0 | 0 |
| BRAMY2012536 | 0 | 4.339 | 0 | 0 | 0 | 0 | 0 |
| BRAMY2013590 | 0 | 0 | 0 | 38.449 | 0 | 0 | 0 |
| BRAMY2014813 | 0 | 72.515 | 0 | 0 | 0 | 0 | 0 |
| BRAMY2016009 | 0 | 0 | 0 | 9.307 | 0 | 0 | 0 |
| BRAMY2016706 | 0 | 0 | 0 | 0 | 17.578 | 0 | 0 |
| BRAMY2019554 | 0 | 0 | 0 | 0 | 2.830 | 0 | 0 |
| BRAMY2020427 | 0 | 4.451 | 0 | 2.108 | 0 | 0 | 0 |
| BRAMY2021139 | 0 | 0 | 0 | 45.546 | 0 | 0 | 0 |
| BRAMY2022786 | 0 | 0 | 0 | 2.221 | 0 | 0 | 0 |
| BRAMY2023719 | 0 | 44.940 | 0 | 0 | 0 | 0 | 0 |
| BRAMY2023939 | 0 | 0 | 0 | 10.878 | 0 | 0 | 0 |
| BRAMY2024827 | 0 | 0 | 0 | 0 | 0 | 0 | 43.406 |
| BRAMY2028491 | 0 | 0 | 0 | 63.850 | 0 | 0 | 0 |
| BRAMY2028740 | 0 | 0 | 0 | 0 | 3.302 | 0 | 0 |
| BRAMY2028796 | 0 | 0 | 0 | 2.645 | 0 | 0 | 0 |
| BRAMY2032087 | 0 | 0 | 0 | 2.155 | 0 | 0 | 0 |
| BRAMY2036459 | 0 | 0 | 0 | 0 | 0 | 0 | 41.005 |
| BRAMY2037147 | 0 | 0 | 0 | 63.850 | 0 | 0 | 0 |
| BRAMY2040592 | 0 | 0 | 0 | 0 | 12.349 | 0 | 0 |
| BRAMY3004377 | 0 | 0 | 0 | 0 | 2.941 | 4.680 | 0 |
| BRAMY3010008 | 0 | 0 | 0 | 1.036 | 0 | 0 | 0 |
| BRAWH1000007 | 0 | 0 | 0 | 0 | 0 | 50.702 | 0 |
| BRAWH1000040 | 0 | 5.172 | 0 | 0 | 0 | 0 | 0 |
| BRAWH1000093 | 0 | 3.467 | 0 | 1.642 | 0 | 2.602 | 0 |
| BRAWH2000460 | 0 | 4.587 | 0 | 1.086 | 2.164 | 3.444 | 0 |
| BRAWH2000488 | 0 | 0 | 0 | 0 | 35.754 | 0 | 0 |
| BRAWH2000503 | 0 | 0 | 0 | 36.922 | 0 | 0 | 0 |
| BRAWH2000588 | 0 | 0 | 0 | 0 | 8.898 | 7.079 | 0 |
| BRAWH2000633 | 0 | 0 | 0 | 0 | 0 | 7.480 | 0 |
| BRAWH2000697 | 0 | 0 | 0 | 3.600 | 0 | 5.708 | 0 |
| BRAWH2000839 | 0 | 3.087 | 0 | 0 | 1.457 | 4.635 | 0 |
| BRAWH2000924 | 0 | 0 | 0 | 0 | 0 | 1.619 | 0 |
| BRAWH2001092 | 0 | 1.321 | 0 | 0.313 | 0.623 | 2.975 | 3.824 |
| BRAWH2001141 | 0 | 0 | 0 | 0 | 18.022 | 0 | 0 |
| BRAWH2001166 | 0 | 0 | 0 | 0 | 11.195 | 0 | 0 |
| BRAWH2001171 | 0 | 0 | 4.160 | 1.099 | 0 | 0 | 0 |
| BRAWH2001439 | 0 | 0 | 0 | 0 | 3.649 | 0 | 0 |
| BRAWH2001484 | 0 | 0 | 0 | 18.909 | 0 | 0 | 0 |
| BRAWH2001671 | 0 | 0 | 0 | 0 | 13.485 | 0 | 0 |
| BRAWH2002679 | 0 | 0 | 0 | 0 | 33.575 | 0 | 0 |
| BRAWH2003025 | 0 | 0 | 0 | 0 | 10.753 | 0 | 0 |
| BRAWH2004095 | 0 | 0 | 0 | 2.104 | 0 | 0 | 0 |
| BRAWH2005225 | 0 | 0 | 0 | 0 | 20.557 | 32.708 | 0 |
| BRAWH2005661 | 0 | 0 | 0 | 0 | 5.669 | 0 | 0 |
| BRAWH2008219 | 0 | 0 | 0 | 0 | 51.103 | 0 | 0 |
| BRAWH2008706 | 0 | 0 | 0 | 5.117 | 0 | 0 | 0 |
| BRAWH2010136 | 0 | 0 | 0 | 46.991 | 0 | 0 | 0 |
| BRAWH2011343 | 0 | 0 | 0 | 12.485 | 0 | 0 | 0 |
| BRAWH2012162 | 0 | 0 | 0 | 0 | 63.940 | 0 | 0 |
| BRAWH2013748 | 0 | 0 | 0 | 0 | 0 | 0 | 58.070 |
| BRAWH2014188 | 0 | 5.381 | 0 | 8.919 | 0 | 4.040 | 0 |
| BRAWH2014934 | 0 | 0 | 0 | 64.025 | 0 | 0 | 0 |
| BRAWH2017685 | 0 | 0 | 0 | 0.903 | 0 | 2.864 | 0 |
| BRAWH2018526 | 0 | 4.626 | 0 | 0 | 2.183 | 3.473 | 0 |
| BRAWH3002574 | 0 | 0 | 0 | 0 | 23.446 | 0 | 0 |
| BRAWH3002853 | 0 | 0 | 4.982 | 1.316 | 5.246 | 0 | 0 |
| BRAWH3005146 | 0 | 0 | 0 | 0 | 0 | 28.570 | 0 |
| BRAWH3016271 | 0 | 0 | 0 | 0 | 0 | 30.435 | 0 |
| BRAWH3021574 | 0 | 0 | 0 | 8.364 | 0 | 0 | 0 |
| BRAWH3023172 | 0 | 0 | 6.169 | 0 | 0 | 0 | 0 |
| BRCAN1000168 | 0 | 0 | 0 | 2.511 | 5.003 | 0 | 0 |
| BRCAN2003944 | 0 | 0 | 0 | 0 | 0 | 4.767 | 0 |
| BRCAN2015371 | 0 | 0 | 0 | 0 | 38.874 | 0 | 0 |
| BRCAN2024572 | 0 | 0 | 0 | 4.861 | 0 | 0 | 0 |
| BRCAN2026197 | 0 | 0 | 0 | 0 | 0 | 8.810 | 0 |
| BRCAN2027150 | 0 | 76.615 | 0 | 0 | 0 | 0 | 0 |
| BRCAN2027364 | 0 | 0 | 0 | 5.285 | 0 | 0 | 0 |
| BRCAN2028036 | 0 | 0 | 0 | 0 | 0 | 13.623 | 0 |
| BRCAN2028355 | 0 | 0 | 9.952 | 0 | 0 | 0 | 0 |
| BRCOC1000040 | 0 | 0 | 0 | 5.248 | 0 | 0 | 0 |
| BRCOC2003187 | 0 | 0 | 0 | 0 | 0 | 0 | 17.111 |
| BRCOC2003213 | 0 | 0 | 0 | 0 | 36.816 | 0 | 0 |
| BRCOC2004175 | 0 | 0 | 65.535 | 0 | 0 | 0 | 0 |
| BRCOC2010123 | 0 | 0 | 0 | 1.950 | 0 | 0 | 0 |
| BRCOC2019255 | 0 | 0 | 0 | 30.447 | 0 | 0 | 0 |
| BRHIP2000534 | 0 | 2.573 | 0 | 0 | 1.214 | 3.862 | 0 |
| BRHIP2000553 | 0 | 0 | 0 | 4.573 | 0 | 0 | 0 |
| BRHIP2007305 | 0 | 0 | 0 | 2.015 | 0 | 6.388 | 0 |
| BRHIP2015245 | 0 | 0 | 0 | 4.225 | 0 | 0 | 0 |
| BRHIP2015679 | 0 | 0 | 0 | 8.929 | 0 | 0 | 0 |
| BRHIP2021762 | 0 | 0 | 0 | 4.958 | 0 | 0 | 0 |
| BRHIP2021870 | 0 | 33.373 | 0 | 0 | 0 | 0 | 0 |
| BRHIP2022326 | 0 | 0 | 5.731 | 0 | 0 | 0 | 0 |
| BRHIP2022986 | 0 | 21.388 | 0 | 5.064 | 0 | 32.111 | 0 |
| BRHIP2023229 | 0 | 0 | 0 | 0 | 0 | 84.688 | 0 |
| BRHIP2023438 | 0 | 0 | 0 | 45.400 | 0 | 0 | 0 |
| BRHIP2023695 | 0 | 0 | 0 | 63.562 | 0 | 0 | 0 |
| BRHIP2023762 | 0 | 17.938 | 0 | 0 | 0 | 0 | 0 |
| BRHIP2023888 | 0 | 0 | 0 | 3.274 | 1.305 | 2.076 | 0 |
| BRHIP2027077 | 0 | 15.182 | 0 | 0 | 0 | 0 | 0 |
| BRHIP3000111 | 0 | 0 | 0 | 0 | 0 | 5.777 | 0 |
| BRHIP3000131 | 0 | 0 | 0 | 6.535 | 0 | 20.721 | 0 |
| BRHIP3003961 | 0 | 0 | 0 | 33.755 | 0 | 0 | 0 |
| BRHIP3004215 | 0 | 0 | 0 | 24.161 | 0 | 0 | 0 |
| BRHIP3020046 | 0 | 7.614 | 0 | 0 | 0 | 0 | 0 |
| BRHIP3021987 | 0 | 0 | 0 | 63.562 | 0 | 0 | 0 |
| BRSSN2000498 | 0 | 16.450 | 0 | 0 | 0 | 0 | 0 |
| BRSSN2001869 | 0 | 22.689 | 0 | 0 | 0 | 0 | 0 |
| BRSSN2003012 | 0 | 0 | 0 | 7.699 | 0 | 0 | 0 |
| BRSSN2011262 | 0 | 0 | 18.984 | 0 | 0 | 0 | 0 |
| BRSSN2014610 | 0 | 0 | 0 | 12.708 | 0 | 0 | 0 |
| BRSSN2015982 | 0 | 0 | 0 | 28.913 | 0 | 0 | 0 |
| BRSTN1000083 | 0 | 0 | 4.301 | 2.273 | 0 | 0 | 0 |
| BRSTN2004863 | 0 | 0 | 0 | 17.731 | 0 | 0 | 0 |
| BRSTN2010089 | 0 | 0 | 0 | 11.742 | 0 | 0 | 0 |
| BRSTN2011961 | 0 | 0 | 3.902 | 1.031 | 1.027 | 3.268 | 0 |
| BRSTN2012069 | 0 | 0.355 | 0.446 | 0.219 | 0.403 | 0.107 | 3.704 |
| BRSTN2012174 | 0 | 1.520 | 0 | 0.720 | 0 | 0 | 0 |
| BRSTN2013502 | 0 | 0 | 0 | 0 | 0 | 0 | 52.880 |
| BRSTN2014490 | 0 | 0 | 0 | 0 | 32.674 | 0 | 0 |
| BRSTN2015889 | 0 | 0 | 0 | 0 | 13.737 | 0 | 0 |
| BRSTN2016470 | 0 | 0 | 0 | 1.169 | 0.776 | 0 | 0 |
| BRSTN2017104 | 0 | 0 | 0 | 0 | 6.915 | 0 | 0 |
| BRTHA1000311 | 0 | 0 | 0 | 5.251 | 0 | 0 | 0 |
| BRTHA2002726 | 0 | 0 | 0 | 0 | 76.179 | 0 | 0 |
| BRTHA2002808 | 0 | 87.143 | 0 | 0 | 0 | 0 | 0 |
| BRTHA2005864 | 0 | 0 | 0 | 5.775 | 0 | 0 | 0 |
| BRTHA2007998 | 0 | 0 | 0 | 0 | 0 | 4.866 | 0 |
| BRTHA2012392 | 0 | 0 | 0 | 61.610 | 0 | 0 | 0 |
| BRTHA2016765 | 0 | 0 | 79.260 | 0 | 0 | 0 | 0 |
| BRTHA2027229 | 0 | 0 | 0 | 0 | 0 | 5.165 | 0 |
| BRTHA3003490 | 0 | 0 | 0 | 0 | 0 | 9.160 | 0 |
| BRTHA3003736 | 0 | 0 | 0 | 0 | 7.629 | 0 | 0 |
| BRTHA3007472 | 0 | 29.330 | 0 | 0 | 0 | 22.018 | 0 |
| BRTHA3007922 | 0 | 0 | 0 | 27.774 | 0 | 0 | 0 |
| BRTHA3010135 | 0 | 0 | 0 | 35.611 | 0 | 0 | 0 |
| BRTHA3011265 | 0 | 0 | 0 | 15.184 | 0 | 0 | 0 |
| BRTHA3021971 | 0 | 14.590 | 0 | 0 | 0 | 0 | 0 |
| CERVX2002770 | 0 | 0 | 0 | 0 | 0 | 0 | 51.288 |
| CHONS2002829 | 0 | 0 | 0 | 5.815 | 0 | 0 | 0 |
| COLON2002443 | 0 | 33.895 | 0 | 0 | 0 | 0 | 0 |
| CTONG1000009 | 0 | 0 | 0 | 8.644 | 0 | 0 | 0 |
| CTONG1000052 | 0 | 0 | 4.070 | 1.075 | 2.143 | 0 | 0 |
| CTONG1000094 | 0 | 0 | 2.623 | 0 | 1.381 | 2.198 | 0 |
| CTONG1000175 | 0 | 0 | 0 | 2.996 | 11.942 | 0 | 0 |
| CTONG1000218 | 0 | 0 | 3.244 | 0 | 1.708 | 0 | 0 |
| CTONG1000220 | 0 | 0 | 0 | 0 | 0 | 75.183 | 0 |
| CTONG1000277 | 0 | 0 | 0 | 36.809 | 0 | 0 | 0 |
| CTONG1000467 | 0 | 0 | 0 | 15.292 | 0 | 0 | 0 |
| CTONG2000042 | 0 | 0 | 0 | 31.174 | 0 | 0 | 0 |
| CTONG2000063 | 0 | 0 | 0 | 3.810 | 0 | 0 | 0 |
| CTONG2000411 | 0 | 0 | 0 | 10.242 | 0 | 0 | 0 |
| CTONG2000452 | 0 | 0 | 0 | 5.183 | 0 | 16.434 | 0 |
| CTONG2000469 | 0 | 0 | 0 | 0 | 31.068 | 0 | 0 |
| CTONG2000561 | 0 | 0 | 0 | 38.747 | 0 | 0 | 0 |
| CTONG2000589 | 0 | 0 | 0 | 39.688 | 39.543 | 0 | 0 |
| CTONG2001320 | 0 | 0 | 0 | 0 | 0 | 29.748 | 0 |
| CTONG2001513 | 0 | 0 | 0 | 48.862 | 0 | 0 | 0 |
| CTONG2001748 | 0 | 0 | 0 | 3.720 | 0 | 0 | 0 |
| CTONG2001932 | 0 | 0 | 0 | 18.386 | 0 | 0 | 0 |
| CTONG2002073 | 0 | 0 | 0 | 2.607 | 5.194 | 0 | 0 |
| CTONG2002270 | 0 | 0 | 0 | 2.832 | 0 | 0 | 0 |
| CTONG2002453 | 0 | 0 | 0 | 0 | 0 | 43.805 | 0 |
| CTONG2002520 | 0 | 0 | 0 | 5.239 | 0 | 0 | 0 |
| CTONG2002709 | 0 | 0 | 0 | 0 | 15.368 | 0 | 0 |
| CTONG2002744 | 0 | 0 | 0 | 1.048 | 0 | 0 | 0 |
| CTONG2002903 | 0 | 0 | 0 | 5.482 | 10.924 | 0 | 0 |
| CTONG2003094 | 0 | 0 | 12.342 | 3.261 | 0 | 0 | 0 |
| CTONG2005553 | 0 | 0 | 0 | 1.274 | 0 | 0 | 0 |
| CTONG2005913 | 0 | 0 | 0 | 0 | 15.825 | 0 | 0 |
| CTONG2006562 | 0 | 0 | 0 | 2.492 | 0 | 0 | 0 |
| CTONG2006709 | 0 | 0 | 0 | 9.205 | 0 | 14.592 | 0 |
| CTONG2006932 | 0 | 0 | 0 | 0 | 3.903 | 0 | 0 |
| CTONG2007072 | 0 | 16.170 | 14.491 | 0 | 0 | 0 | 0 |
| CTONG2007078 | 0 | 19.211 | 0 | 0 | 0 | 0 | 0 |
| CTONG2007500 | 0 | 0 | 0 | 2.677 | 0 | 0 | 0 |
| CTONG2007613 | 0 | 0 | 0 | 0 | 0 | 49.390 | 0 |
| CTONG2007776 | 0 | 0 | 0 | 0 | 15.083 | 0 | 0 |
| CTONG2008398 | 0 | 0 | 0 | 0 | 0 | 4.314 | 0 |
| CTONG2008506 | 0 | 0 | 0 | 1.675 | 0 | 5.310 | 0 |
| CTONG2008518 | 0 | 0 | 0 | 6.854 | 0 | 0 | 0 |
| CTONG2010348 | 0 | 0 | 0 | 3.151 | 0 | 0 | 0 |
| CTONG2010821 | 0 | 5.371 | 0 | 0 | 2.534 | 0 | 0 |
| CTONG2011825 | 0 | 0 | 0 | 0 | 0 | 48.443 | 0 |
| CTONG2012001 | 0 | 0 | 0 | 12.726 | 0 | 0 | 0 |
| CTONG2012401 | 0 | 0 | 28.336 | 0 | 0 | 23.736 | 0 |
| CTONG2012452 | 0 | 2.677 | 0 | 1.901 | 0 | 0 | 0 |
| CTONG2012607 | 0 | 0 | 0 | 0 | 0 | 0 | 37.630 |
| CTONG2012847 | 0 | 0 | 0 | 0 | 6.107 | 9.717 | 0 |
| CTONG2012879 | 0 | 0 | 11.453 | 0 | 0 | 0 | 0 |
| CTONG2013149 | 0 | 0 | 0 | 0 | 0 | 75.183 | 0 |
| CTONG2013156 | 0 | 0 | 0 | 36.809 | 0 | 0 | 0 |
| CTONG2013222 | 0 | 0 | 0 | 0 | 13.327 | 0 | 0 |
| CTONG2015091 | 0 | 0 | 5.470 | 0 | 0 | 0 | 0 |
| CTONG2016056 | 0 | 0 | 13.394 | 0 | 0 | 0 | 0 |
| CTONG2016575 | 0 | 0 | 0 | 2.654 | 0 | 8.416 | 0 |
| CTONG2018383 | 0 | 33.978 | 0 | 0 | 0 | 0 | 0 |
| CTONG2018632 | 0 | 0 | 0 | 0 | 0 | 45.130 | 0 |
| CTONG2019029 | 0 | 0 | 0 | 14.402 | 0 | 0 | 0 |
| CTONG2019248 | 0 | 0 | 0 | 26.925 | 0 | 0 | 0 |
| CTONG2019590 | 0 | 0 | 0 | 19.151 | 0 | 0 | 0 |
| CTONG2020445 | 0 | 0 | 0 | 37.458 | 0 | 0 | 0 |
| CTONG2020484 | 0 | 0 | 0 | 0 | 0 | 6.634 | 0 |
| CTONG2020560 | 0 | 0 | 0 | 5.340 | 0 | 0 | 0 |
| CTONG2020582 | 0 | 0 | 12.925 | 13.659 | 6.804 | 0 | 0 |
| CTONG2024031 | 0 | 0 | 0 | 9.199 | 0 | 0 | 56.233 |
| CTONG2028124 | 0 | 3.778 | 3.385 | 0 | 7.129 | 0 | 0 |
| CTONG2028208 | 0 | 0 | 23.853 | 0 | 0 | 0 | 0 |
| CTONG2028309 | 0 | 0 | 0 | 13.063 | 0 | 0 | 0 |
| CTONG3000657 | 0 | 0 | 0 | 0 | 13.759 | 0 | 0 |
| CTONG3001420 | 0 | 0 | 0 | 48.862 | 0 | 0 | 0 |
| CTONG3002674 | 0 | 0 | 0 | 39.760 | 0 | 0 | 0 |
| CTONG3002835 | 0 | 0 | 7.401 | 0 | 0 | 0 | 0 |
| CTONG3004726 | 0 | 0 | 0 | 30.140 | 0 | 0 | 0 |
| CTONG3008894 | 0 | 0 | 0 | 1.294 | 0 | 0 | 0 |
| CTONG3009239 | 0 | 0 | 9.726 | 0 | 0 | 8.147 | 0 |
| D30ST1000109 | 0 | 13.416 | 0 | 0 | 0 | 0 | 0 |
| D30ST1000270 | 0 | 0 | 0 | 0 | 9.163 | 14.579 | 0 |
| D30ST2002068 | 0 | 8.074 | 0 | 0.382 | 0 | 0 | 0 |
| D30ST2002182 | 0 | 0 | 0 | 13.227 | 0 | 0 | 0 |
| D30ST3000169 | 0 | 11.035 | 0 | 0 | 0 | 0 | 0 |
| DFNES1000083 | 0 | 0 | 0 | 0 | 0 | 38.078 | 0 |
| DFNES1000150 | 0 | 0 | 0 | 3.975 | 0 | 0 | 0 |
| DFNES1000185 | 0 | 0 | 0 | 0 | 0 | 7.442 | 0 |
| DFNES2000011 | 0 | 0 | 0 | 1.946 | 0 | 0 | 0 |
| DFNES2000268 | 0 | 0 | 0 | 0 | 0 | 6.231 | 0 |
| DFNES2000292 | 0 | 0 | 0 | 0 | 0 | 42.353 | 0 |
| DFNES2000432 | 0 | 56.052 | 0 | 0 | 0 | 0 | 0 |
| DFNES2000457 | 0 | 0 | 0 | 0 | 31.500 | 0 | 0 |
| DFNES2003192 | 0 | 0 | 0 | 5.331 | 0 | 0 | 0 |
| DFNES2004371 | 0 | 0 | 0 | 5.616 | 0 | 0 | 0 |
| DFNES2005540 | 0 | 0 | 0 | 0 | 0 | 17.057 | 0 |
| DFNES2007634 | 0 | 0 | 0 | 3.164 | 0 | 0 | 0 |
| DFNES2011239 | 0 | 0 | 0 | 0 | 0 | 42.161 | 0 |
| DFNES2011499 | 0 | 0 | 0 | 11.041 | 0 | 0 | 0 |
| FCBBF1000024 | 0 | 0 | 0 | 3.907 | 0 | 0 | 0 |
| FCBBF1000025 | 0 | 0 | 0 | 0 | 0 | 18.057 | 0 |
| FCBBF1000027 | 0 | 2.753 | 0 | 0 | 1.299 | 0 | 0 |
| FCBBF1000053 | 0 | 20.343 | 0 | 0 | 0 | 0 | 0 |
| FCBBF1000061 | 0 | 0 | 0 | 4.186 | 0 | 0 | 0 |
| FCBBF1000077 | 0 | 0 | 0 | 0 | 0 | 4.570 | 0 |
| FCBBF1000139 | 0 | 0 | 0 | 3.111 | 0 | 0 | 0 |
| FCBBF1000182 | 0 | 0 | 0 | 15.092 | 0 | 0 | 0 |
| FCBBF1000197 | 0 | 8.030 | 0 | 9.506 | 0 | 0 | 0 |
| FCBBF1000294 | 0 | 8.093 | 0 | 3.832 | 0 | 0 | 0 |
| FCBBF1000367 | 0 | 0 | 10.233 | 0 | 0 | 0 | 33.054 |
| FCBBF1000412 | 0 | 14.546 | 0 | 3.444 | 0 | 10.920 | 0 |
| FCBBF1000425 | 0 | 39.241 | 0 | 0 | 0 | 0 | 0 |
| FCBBF1000449 | 0 | 50.253 | 0 | 0 | 0 | 0 | 0 |
| FCBBF1000466 | 0 | 0 | 4.290 | 0 | 2.258 | 0 | 0 |
| FCBBF1000563 | 0 | 0 | 0 | 0 | 0 | 8.475 | 0 |
| FCBBF2000502 | 0 | 49.587 | 0 | 0 | 0 | 0 | 0 |
| FCBBF2000566 | 0 | 27.938 | 0 | 0 | 0 | 0 | 0 |
| FCBBF2000591 | 0 | 2.155 | 0 | 0 | 0 | 0 | 0 |
| FCBBF2000685 | 0 | 0 | 0 | 0 | 0 | 38.388 | 0 |
| FCBBF2000885 | 0 | 0 | 0 | 5.464 | 0 | 0 | 0 |
| FCBBF2001105 | 0 | 0 | 0 | 0 | 21.530 | 0 | 0 |
| FCBBF2001309 | 0 | 0 | 0 | 7.743 | 0 | 0 | 0 |
| FCBBF2001538 | 0 | 0 | 5.132 | 0 | 2.702 | 0 | 0 |
| FCBBF2002349 | 0 | 0 | 26.593 | 0 | 0 | 0 | 0 |
| FCBBF2005637 | 0 | 0 | 18.719 | 0 | 0 | 0 | 0 |
| FCBBF2006634 | 0 | 0 | 0 | 16.801 | 0 | 0 | 0 |
| FCBBF3000228 | 0 | 0 | 0 | 15.949 | 0 | 0 | 0 |
| FCBBF3000434 | 0 | 0 | 0 | 0 | 6.566 | 0 | 0 |
| FCBBF3001081 | 0 | 0 | 17.687 | 9.346 | 0 | 0 | 0 |
| FCBBF3001657 | 0 | 0 | 15.891 | 0 | 0 | 0 | 0 |
| FCBBF3001890 | 0 | 0 | 0 | 0 | 9.755 | 0 | 0 |
| FCBBF3004021 | 0 | 80.271 | 0 | 0 | 0 | 0 | 0 |
| FCBBF3004261 | 0 | 0 | 0 | 16.099 | 0 | 0 | 0 |
| FCBBF3004473 | 0 | 0 | 0 | 0 | 8.149 | 0 | 0 |
| FCBBF3005320 | 0 | 0 | 0 | 0 | 9.674 | 0 | 0 |
| FCBBF3005330 | 0 | 5.207 | 0 | 0 | 0 | 0 | 0 |
| FCBBF3005497 | 0 | 5.909 | 0 | 2.798 | 0 | 8.872 | 0 |
| FCBBF3008644 | 0 | 64.763 | 0 | 0 | 0 | 0 | 0 |
| FCBBF3009541 | 0 | 0 | 0 | 1.467 | 0 | 2.326 | 0 |
| FCBBF3014260 | 0 | 0 | 0 | 4.018 | 0 | 0 | 0 |
| FCBBF3014770 | 0 | 0 | 64.279 | 0 | 0 | 0 | 0 |
| FCBBF3017024 | 0 | 38.525 | 0 | 18.243 | 0 | 0 | 0 |
| FCBBF3021191 | 0 | 0 | 0 | 0 | 65.749 | 0 | 0 |
| FCBBF3023667 | 0 | 0.998 | 0 | 0.945 | 0.471 | 0 | 0 |
| FCBBF3028244 | 0 | 0 | 6.254 | 0 | 0 | 0 | 0 |
| FCBBF4000446 | 0 | 0 | 0 | 1.337 | 0 | 0 | 0 |
| FEBRA2000105 | 0 | 0 | 0 | 2.553 | 0 | 0 | 0 |
| FEBRA2000402 | 0 | 0 | 0 | 0 | 19.655 | 0 | 0 |
| FEBRA2000404 | 0 | 0 | 67.776 | 0 | 0 | 0 | 0 |
| FEBRA2000510 | 0 | 0 | 0 | 0 | 0 | 20.820 | 0 |
| FEBRA2000581 | 0 | 0 | 0 | 0 | 0 | 4.489 | 0 |
| FEBRA2000733 | 0 | 1.267 | 2.270 | 1.200 | 1.195 | 0.951 | 0 |
| FEBRA2000787 | 0 | 0 | 0 | 3.515 | 0 | 0 | 0 |
| FEBRA2000881 | 0 | 0 | 0 | 5.633 | 0 | 0 | 0 |
| FEBRA2002933 | 0 | 0 | 0 | 0 | 2.625 | 2.088 | 8.052 |
| FEBRA2003100 | 0 | 0 | 0 | 1.172 | 0 | 0 | 0 |
| FEBRA2003750 | 0 | 0 | 0 | 3.249 | 0 | 0 | 0 |
| FEBRA2003833 | 0 | 0 | 0 | 6.155 | 0 | 0 | 0 |
| FEBRA2003926 | 0 | 0 | 0 | 0 | 2.476 | 3.939 | 0 |
| FEBRA2003930 | 0 | 13.509 | 0 | 0 | 0 | 0 | 0 |
| FEBRA2004042 | 0 | 0 | 0 | 3.775 | 0 | 0 | 0 |
| FEBRA2004293 | 0 | 0 | 0 | 0 | 18.855 | 0 | 0 |
| FEBRA2004325 | 0 | 0 | 0 | 6.268 | 0 | 39.749 | 0 |
| FEBRA2004412 | 0 | 0 | 0 | 5.225 | 0 | 0 | 0 |
| FEBRA2004628 | 0 | 0 | 0 | 0 | 10.116 | 0 | 0 |
| FEBRA2004818 | 0 | 0 | 0 | 2.423 | 0 | 0 | 0 |
| FEBRA2005416 | 0 | 0 | 0 | 1.911 | 0 | 6.059 | 0 |
| FEBRA2005572 | 0 | 0 | 0 | 3.171 | 0 | 0 | 0 |
| FEBRA2005734 | 0 | 0 | 0 | 0 | 2.994 | 0 | 0 |
| FEBRA2005824 | 0 | 2.804 | 0 | 0 | 0 | 0 | 0 |
| FEBRA2006055 | 0 | 0 | 0 | 4.701 | 0 | 0 | 57.471 |
| FEBRA2006112 | 0 | 0 | 0 | 23.494 | 0 | 0 | 0 |
| FEBRA2006270 | 0 | 0 | 0 | 2.080 | 0 | 0 | 0 |
| FEBRA2006372 | 0 | 0 | 0 | 0 | 0 | 7.578 | 0 |
| FEBRA2006519 | 0 | 0 | 0 | 21.163 | 0 | 0 | 0 |
| FEBRA2006553 | 0 | 0 | 0 | 0 | 14.030 | 0 | 0 |
| FEBRA2007212 | 0 | 29.506 | 0 | 0 | 0 | 0 | 0 |
| FEBRA2008081 | 0 | 0 | 0 | 3.781 | 0 | 0 | 0 |
| FEBRA2008087 | 0 | 2.695 | 0 | 1.276 | 1.271 | 0 | 7.800 |
| FEBRA2008255 | 0 | 0 | 0 | 9.006 | 0 | 0 | 0 |
| FEBRA2008302 | 0 | 0 | 0 | 1.894 | 0 | 0 | 0 |
| FEBRA2009276 | 0 | 0 | 0 | 41.654 | 0 | 0 | 0 |
| FEBRA2009419 | 0 | 9.932 | 0 | 4.703 | 0 | 7.455 | 0 |
| FEBRA2009541 | 0 | 0 | 0 | 29.601 | 0 | 0 | 0 |
| FEBRA2012397 | 0 | 0 | 0 | 41.654 | 0 | 0 | 0 |
| FEBRA2014417 | 0 | 0 | 0 | 0.961 | 0 | 3.047 | 0 |
| FEBRA2018476 | 0 | 0 | 7.360 | 0 | 7.750 | 0 | 0 |
| FEBRA2022055 | 0 | 0 | 3.584 | 0 | 7.548 | 3.002 | 0 |
| FEBRA2022504 | 0 | 0 | 0 | 0 | 5.824 | 0 | 0 |
| FEBRA2023927 | 0 | 0 | 0 | 7.249 | 0 | 0 | 0 |
| FEBRA2025838 | 0 | 6.175 | 0 | 0 | 0 | 0 | 0 |
| FELIV1000153 | 0 | 1.240 | 1.111 | 0 | 0 | 0 | 0 |
| HCASM2000363 | 0 | 5.112 | 0 | 0 | 2.412 | 3.837 | 0 |
| HCHON1000030 | 0 | 1.363 | 1.222 | 0.646 | 5.146 | 0 | 0 |
| HCHON1000166 | 0 | 0 | 0 | 0 | 10.668 | 0 | 0 |
| HCHON2000028 | 0 | 0 | 0 | 14.118 | 0 | 0 | 0 |
| HCHON2000056 | 0 | 0 | 0 | 0 | 2.012 | 1.600 | 0 |
| HCHON2000062 | 0 | 0 | 0 | 7.459 | 0 | 0 | 0 |
| HCHON2000087 | 0 | 0 | 0 | 0 | 0 | 3.491 | 0 |
| HCHON2000160 | 0 | 7.566 | 0 | 0 | 0 | 0 | 0 |
| HCHON2000226 | 0 | 0 | 0 | 0.718 | 0 | 0 | 8.774 |
| HCHON2000244 | 0 | 0 | 0 | 0 | 4.666 | 3.712 | 0 |
| HCHON2000265 | 0 | 0 | 13.629 | 0 | 0 | 0 | 0 |
| HCHON2000295 | 0 | 0 | 0 | 0.780 | 0 | 0 | 0 |
| HCHON2000322 | 0 | 0 | 0 | 19.541 | 0 | 0 | 0 |
| HCHON2000373 | 0 | 0 | 0 | 0 | 0 | 5.719 | 0 |
| HCHON2000475 | 0 | 10.005 | 0 | 0 | 0 | 0 | 0 |
| HCHON2000508 | 0 | 2.807 | 0 | 1.994 | 1.324 | 0 | 0 |
| HCHON2000826 | 0 | 0 | 0 | 0 | 2.538 | 4.038 | 0 |
| HCHON2001039 | 0 | 0 | 0 | 1.986 | 0 | 0 | 0 |
| HCHON2001084 | 0 | 0 | 0 | 0 | 8.143 | 0 | 0 |
| HCHON2001099 | 0 | 0 | 0 | 0 | 9.673 | 0 | 0 |
| HCHON2001200 | 0 | 3.251 | 2.913 | 0.770 | 1.534 | 0 | 0 |
| HCHON2001217 | 0 | 0 | 0 | 0 | 0 | 11.746 | 0 |
| HCHON2001359 | 0 | 6.399 | 5.735 | 0 | 0 | 0 | 0 |
| HCHON2001407 | 0 | 0 | 0 | 0 | 5.601 | 0 | 0 |
| HCHON2001434 | 0 | 0 | 0 | 0 | 5.417 | 0 | 0 |
| HCHON2001505 | 0 | 0 | 0 | 15.995 | 0 | 0 | 0 |
| HCHON2004002 | 0 | 23.605 | 0 | 1.397 | 0 | 0 | 0 |
| HCHON2005921 | 0 | 0 | 0 | 7.381 | 0 | 0 | 0 |
| HEART1000074 | 0 | 0 | 0 | 1.351 | 0 | 0 | 0 |
| HEART1000088 | 0 | 0 | 50.241 | 0 | 0 | 0 | 0 |
| HEART1000139 | 0 | 0 | 33.548 | 0 | 0 | 0 | 0 |
| HEART1000142 | 0 | 0 | 36.026 | 0 | 0 | 0 | 0 |
| HEART1000149 | 0 | 0 | 0 | 1.671 | 16.652 | 0 | 20.432 |
| HEART1000185 | 0 | 0 | 0 | 0 | 2.804 | 0 | 0 |
| HEART2000506 | 0 | 0 | 0 | 3.121 | 0 | 0 | 0 |
| HEART2000520 | 0 | 0 | 19.426 | 0 | 0 | 0 | 0 |
| HEART2000541 | 0 | 0 | 27.038 | 0 | 0 | 0 | 0 |
| HEART2003836 | 0 | 0 | 27.716 | 0 | 0 | 0 | 0 |
| HEART2006521 | 0 | 17.978 | 0 | 0 | 8.482 | 0 | 0 |
| HEART2007696 | 0 | 0 | 33.551 | 0 | 0 | 0 | 0 |
| HEART2010495 | 0 | 0 | 50.241 | 0 | 0 | 0 | 0 |
| HHDPC1000083 | 0 | 0 | 6.593 | 1.742 | 3.471 | 0 | 0 |
| HHDPC1000163 | 0 | 0 | 0 | 0 | 4.460 | 0 | 0 |
| HHDPC2000055 | 0 | 0 | 0 | 3.254 | 0 | 0 | 0 |
| HHDPC2000115 | 0 | 0 | 0 | 0 | 9.277 | 0 | 0 |
| HHDPC2000149 | 0 | 0 | 0 | 7.952 | 0 | 0 | 0 |
| HHDPC2000455 | 0 | 0 | 0 | 0.978 | 0 | 0 | 0 |
| HHDPC2000456 | 0 | 0 | 0 | 5.526 | 0 | 8.761 | 0 |
| HHDPC2003439 | 0 | 0 | 0 | 0.453 | 0 | 1.435 | 0 |
| HHDPC2003983 | 0 | 0 | 1.876 | 1.487 | 0 | 0 | 0 |
| HHDPC2007267 | 0 | 0 | 0 | 12.164 | 13.851 | 0 | 0 |
| HLUNG1000055 | 0 | 0 | 0 | 1.927 | 0 | 3.054 | 0 |
| HLUNG1000076 | 0 | 0 | 0 | 10.480 | 2.983 | 61.709 | 0 |
| HLUNG2000315 | 0 | 0 | 0 | 27.144 | 0 | 0 | 0 |
| HLUNG2000412 | 0 | 0 | 0 | 4.765 | 9.496 | 0 | 0 |
| HLUNG2000501 | 0 | 0 | 0 | 0 | 0 | 0 | 18.665 |
| HLUNG2000884 | 0 | 16.089 | 0 | 3.809 | 7.591 | 0 | 0 |
| HLUNG2001459 | 0 | 49.262 | 0 | 11.664 | 0 | 0 | 0 |
| HLUNG2001518 | 0 | 0 | 0 | 1.946 | 11.634 | 0 | 0 |
| HLUNG2001633 | 0 | 0 | 0 | 42.749 | 0 | 0 | 0 |
| HLUNG2001712 | 0 | 0 | 0 | 0 | 11.693 | 0 | 0 |
| HLUNG2002059 | 0 | 0 | 0 | 29.250 | 0 | 0 | 0 |
| HLUNG2002648 | 0 | 0 | 0 | 0 | 0 | 20.395 | 0 |
| HLUNG2003042 | 0 | 0 | 0 | 4.236 | 0 | 0 | 0 |
| HLUNG2003306 | 0 | 0 | 0 | 22.788 | 0 | 0 | 0 |
| HLUNG2003778 | 0 | 38.774 | 0 | 0 | 0 | 0 | 0 |
| HLUNG2004159 | 0 | 13.628 | 0 | 3.227 | 0 | 10.230 | 0 |
| HLUNG2004170 | 0 | 0 | 0 | 43.864 | 0 | 0 | 0 |
| HLUNG2005230 | 0 | 17.182 | 0 | 4.068 | 0 | 0 | 0 |
| HLUNG2005738 | 0 | 0 | 0 | 32.670 | 0 | 0 | 0 |
| HLUNG2008637 | 0 | 0 | 0 | 0 | 5.991 | 0 | 0 |
| HLUNG2009215 | 0 | 0 | 0 | 0 | 49.159 | 0 | 0 |
| HLUNG2011298 | 0 | 0 | 64.746 | 0 | 0 | 0 | 0 |
| HLUNG2017262 | 0 | 0 | 0 | 11.289 | 0 | 0 | 0 |
| HSYRA1000062 | 0 | 0 | 0 | 0.762 | 3.038 | 0 | 0 |
| HSYRA1000119 | 0 | 3.456 | 0 | 0 | 1.631 | 2.594 | 0 |
| HSYRA1000137 | 0 | 0 | 0 | 0 | 0 | 21.029 | 0 |
| HSYRA1000152 | 0 | 0 | 0 | 0 | 4.230 | 0 | 0 |
| HSYRA1000178 | 0 | 0 | 0 | 4.462 | 0 | 14.149 | 0 |
| HSYRA2000137 | 0 | 0 | 0 | 8.068 | 0 | 0 | 0 |
| HSYRA2000159 | 0 | 0.906 | 0.812 | 0.858 | 0 | 1.361 | 0 |
| HSYRA2000224 | 0 | 0 | 0 | 3.200 | 0 | 0 | 0 |
| HSYRA2000232 | 0 | 0 | 0 | 0 | 2.622 | 0 | 0 |
| HSYRA2000248 | 0 | 0 | 0 | 2.419 | 2.410 | 0 | 0 |
| HSYRA2000605 | 0 | 0 | 0 | 10.648 | 0 | 33.760 | 0 |
| HSYRA2000640 | 0 | 0 | 0 | 3.032 | 0 | 0 | 0 |
| HSYRA2000743 | 0 | 0 | 0 | 2.755 | 0 | 0 | 0 |
| HSYRA2000787 | 0 | 0 | 0 | 0 | 0 | 17.550 | 0 |
| HSYRA2000828 | 0 | 0 | 19.193 | 0 | 0 | 8.039 | 0 |
| HSYRA2001105 | 0 | 20.710 | 0 | 4.903 | 0 | 0 | 0 |
| HSYRA2001138 | 0 | 0 | 1.717 | 0 | 0 | 1.439 | 0 |
| HSYRA2001225 | 0 | 5.557 | 0 | 0 | 0 | 0 | 0 |
| HSYRA2001396 | 0 | 0 | 0 | 2.704 | 5.388 | 0 | 0 |
| HSYRA2001476 | 0 | 0 | 3.252 | 1.718 | 3.424 | 0 | 0 |
| HSYRA2001574 | 0 | 0 | 0 | 0 | 0 | 4.246 | 0 |
| HSYRA2001615 | 0 | 0 | 0 | 0 | 7.355 | 0 | 0 |
| HSYRA2001621 | 0 | 0 | 4.944 | 0 | 0 | 0 | 0 |
| HSYRA2001638 | 0 | 17.000 | 15.235 | 4.025 | 0 | 0 | 0 |
| HSYRA2002741 | 0 | 0 | 47.403 | 0 | 0 | 0 | 0 |
| HSYRA2007650 | 0 | 0 | 0 | 8.465 | 0 | 0 | 0 |
| IMR321000210 | 0 | 0 | 0 | 0 | 0 | 5.719 | 0 |
| IMR321000219 | 0 | 0 | 1.891 | 0 | 0 | 4.751 | 0 |
| IMR321000266 | 0 | 21.271 | 0 | 5.036 | 0 | 0 | 0 |
| IMR322000121 | 0 | 0 | 7.509 | 0 | 0 | 0 | 0 |
| IMR322000127 | 0 | 0 | 10.435 | 0 | 0 | 0 | 0 |
| IMR322000144 | 0 | 12.260 | 0 | 0 | 0 | 0 | 0 |
| IMR322000178 | 0 | 0 | 0 | 0 | 6.596 | 0 | 0 |
| IMR322000223 | 0 | 0 | 0 | 3.635 | 0 | 0 | 0 |
| IMR322000243 | 0 | 0 | 5.779 | 1.527 | 3.043 | 0 | 0 |
| IMR322000316 | 0 | 0 | 0 | 0 | 1.472 | 0 | 0 |
| IMR322000730 | 0 | 0 | 0.923 | 0.488 | 0 | 0 | 2.982 |
| IMR322000775 | 0 | 0 | 0 | 0 | 14.704 | 0 | 0 |
| IMR322000811 | 0 | 0 | 0 | 0 | 50.126 | 0 | 0 |
| IMR322000918 | 0 | 0 | 0 | 0 | 10.395 | 0 | 0 |
| IMR322000935 | 0 | 11.254 | 10.085 | 0 | 5.310 | 0 | 0 |
| IMR322001049 | 0 | 0 | 0 | 10.309 | 20.543 | 0 | 0 |
| IMR322001218 | 0 | 0 | 7.541 | 0 | 0 | 0 | 0 |
| IMR322001435 | 0 | 0 | 0 | 1.672 | 3.332 | 10.602 | 0 |
| IMR322001541 | 0 | 0 | 0 | 3.011 | 0 | 0 | 0 |
| IMR322001584 | 0 | 9.383 | 0 | 2.222 | 0 | 0 | 0 |
| IMR322001600 | 0 | 3.631 | 2.169 | 0.287 | 0.571 | 5.451 | 0 |
| IMR322019070 | 0 | 0 | 18.022 | 0 | 0 | 0 | 0 |
| KIDNE1000145 | 0 | 0 | 0 | 4.922 | 0 | 0 | 0 |
| KIDNE2000085 | 0 | 0 | 6.927 | 0 | 0 | 0 | 0 |
| KIDNE2000252 | 0 | 0 | 0 | 3.042 | 3.031 | 0 | 0 |
| KIDNE2000383 | 0 | 0 | 0 | 8.765 | 17.465 | 0 | 0 |
| KIDNE2000403 | 0 | 0 | 0 | 1.470 | 0 | 0 | 0 |
| KIDNE2000497 | 0 | 0 | 21.122 | 0 | 0 | 0 | 0 |
| KIDNE2000517 | 0 | 0 | 0 | 0 | 5.554 | 0 | 0 |
| KIDNE2000574 | 0 | 0 | 5.042 | 2.664 | 0 | 0 | 16.287 |
| KIDNE2000909 | 0 | 0 | 0 | 3.654 | 7.281 | 0 | 0 |
| KIDNE2001162 | 0 | 0 | 0 | 0.831 | 0 | 0 | 10.155 |
| KIDNE2001467 | 0 | 1.959 | 0 | 1.855 | 0.924 | 0 | 0 |
| KIDNE2001636 | 0 | 0 | 0 | 0 | 33.516 | 0 | 0 |
| KIDNE2002883 | 0 | 0 | 15.278 | 4.036 | 0 | 0 | 0 |
| KIDNE2002980 | 0 | 0 | 21.230 | 0 | 0 | 0 | 0 |
| KIDNE2003305 | 0 | 6.326 | 0 | 0 | 2.985 | 0 | 18.313 |
| KIDNE2004411 | 0 | 0 | 0 | 15.166 | 0 | 0 | 0 |
| KIDNE2004475 | 0 | 0 | 0 | 0 | 9.129 | 0 | 0 |
| KIDNE2004626 | 0 | 0 | 0 | 22.938 | 0 | 0 | 0 |
| KIDNE2005676 | 0 | 0 | 0 | 2.504 | 0 | 0 | 0 |
| KIDNE2006009 | 0 | 27.712 | 0 | 0 | 0 | 0 | 0 |
| KIDNE2006248 | 0 | 0 | 0 | 0 | 0 | 1.754 | 0 |
| KIDNE2007328 | 0 | 6.650 | 0 | 3.149 | 0 | 0 | 0 |
| KIDNE2007352 | 0 | 15.623 | 0 | 3.699 | 0 | 0 | 0 |
| KIDNE2007356 | 0 | 0 | 0 | 0 | 50.427 | 0 | 0 |
| KIDNE2007954 | 0 | 0 | 0 | 3.752 | 0 | 0 | 0 |
| KIDNE2008048 | 0 | 0 | 0 | 2.864 | 0 | 0 | 11.672 |
| KIDNE2008116 | 0 | 0 | 0 | 0 | 0 | 91.653 | 0 |
| KIDNE2008403 | 0 | 0 | 0 | 2.420 | 0 | 0 | 0 |
| KIDNE2010430 | 0 | 0 | 0 | 16.971 | 0 | 0 | 0 |
| KIDNE2012440 | 0 | 0 | 0 | 0 | 0 | 9.988 | 0 |
| KIDNE2013845 | 0 | 0 | 7.529 | 1.989 | 0 | 0 | 0 |
| KIDNE2014290 | 0 | 0 | 0 | 11.229 | 0 | 0 | 0 |
| KIDNE2014325 | 0 | 28.434 | 0 | 0 | 0 | 0 | 0 |
| KIDNE2015445 | 0 | 0 | 0 | 6.114 | 0 | 0 | 0 |
| KIDNE2016371 | 0 | 0 | 0 | 16.034 | 0 | 0 | 0 |
| KIDNE2017040 | 0 | 0 | 0 | 0 | 0 | 18.974 | 0 |
| KIDNE2018493 | 0 | 0 | 0 | 0 | 25.273 | 0 | 0 |
| LIVER1000079 | 0 | 13.171 | 0 | 0 | 0 | 0 | 0 |
| LIVER1000132 | 0 | 0 | 0 | 0 | 1.775 | 0 | 10.888 |
| LIVER2000416 | 0 | 0 | 0 | 0 | 0 | 12.767 | 49.230 |
| LIVER2000446 | 0 | 0 | 0 | 7.321 | 0 | 0 | 0 |
| LIVER2001539 | 0 | 0 | 0 | 0 | 0 | 28.099 | 0 |
| LIVER2001608 | 0 | 0 | 0 | 0 | 9.315 | 7.410 | 0 |
| LIVER2002842 | 0 | 0 | 0 | 3.397 | 0 | 0 | 0 |
| LIVER2005028 | 0 | 0 | 0 | 0 | 26.795 | 0 | 0 |
| LIVER2005789 | 0 | 0 | 0 | 1.602 | 0 | 0 | 19.587 |
| LIVER2005981 | 0 | 0 | 0 | 0 | 10.154 | 0 | 0 |
| LIVER2007783 | 0 | 0 | 13.821 | 0 | 0 | 0 | 0 |
| MAMGL1000032 | 0 | 0 | 0 | 0.287 | 0 | 0 | 0 |
| MAMGL1000035 | 0 | 0 | 0 | 0 | 0 | 1.136 | 0 |
| MAMGL1000096 | 0 | 2.265 | 0 | 0 | 0 | 0 | 0 |
| MAMGL1000173 | 0 | 0 | 0 | 0 | 1.880 | 0 | 0 |
| MESAN1000101 | 0 | 0 | 0 | 20.545 | 0 | 0 | 0 |
| MESAN1000126 | 0 | 0 | 0 | 9.534 | 0 | 0 | 0 |
| MESAN2000264 | 0 | 14.812 | 0 | 0 | 0 | 0 | 0 |
| MESAN2000267 | 0 | 0 | 0 | 2.915 | 0 | 0 | 0 |
| MESAN2000457 | 0 | 0 | 0 | 63.433 | 0 | 0 | 0 |
| MESAN2000572 | 0 | 0 | 0 | 1.820 | 0 | 0 | 0 |
| MESAN2000608 | 0 | 5.911 | 0 | 0 | 8.366 | 0 | 0 |
| MESAN2000620 | 0 | 0 | 0 | 32.430 | 0 | 0 | 0 |
| MESAN2001154 | 0 | 10.015 | 0 | 2.371 | 0 | 0 | 0 |
| MESAN2001450 | 0 | 0 | 0 | 0 | 0 | 16.273 | 0 |
| MESAN2002086 | 0 | 0 | 2.804 | 2.223 | 1.476 | 7.047 | 0 |
| MESAN2002724 | 0 | 0 | 0 | 4.924 | 0 | 0 | 0 |
| MESAN2002790 | 0 | 0 | 0 | 13.058 | 0 | 0 | 0 |
| MESAN2002940 | 0 | 0 | 0 | 0 | 0 | 17.945 | 0 |
| MESAN2003035 | 0 | 0 | 0 | 12.755 | 0 | 0 | 0 |
| MESAN2003058 | 0 | 0 | 0 | 0 | 0 | 33.793 | 0 |
| MESAN2003444 | 0 | 0 | 0 | 0 | 13.211 | 0 | 0 |
| MESAN2003622 | 0 | 0 | 0 | 1.070 | 0 | 0 | 0 |
| MESAN2005303 | 0 | 0 | 0 | 14.099 | 0 | 0 | 0 |
| MESAN2005766 | 0 | 0 | 0 | 0 | 3.497 | 0 | 0 |
| MESAN2005957 | 0 | 0 | 0 | 17.574 | 0 | 0 | 0 |
| MESAN2005958 | 0 | 0 | 0 | 9.585 | 0 | 0 | 0 |
| MESAN2006563 | 0 | 0 | 0 | 0 | 2.449 | 0 | 0 |
| MESAN2006743 | 0 | 0 | 0 | 0 | 0 | 21.750 | 0 |
| MESAN2008415 | 0 | 0 | 0 | 0 | 0 | 60.344 | 0 |
| MESAN2008936 | 0 | 0 | 0 | 0 | 0 | 22.448 | 0 |
| MESAN2009580 | 0 | 0 | 0 | 0 | 0 | 6.266 | 0 |
| MESAN2011627 | 0 | 28.288 | 0 | 0 | 0 | 0 | 0 |
| MESAN2011984 | 0 | 12.823 | 0 | 3.036 | 6.050 | 0 | 0 |
| MESAN2012054 | 0 | 0 | 0 | 4.540 | 0 | 0 | 0 |
| MESAN2012113 | 0 | 0 | 0 | 0 | 0 | 33.291 | 0 |
| MESAN2018699 | 0 | 0 | 0 | 27.399 | 0 | 0 | 0 |
| NB9N41000011 | 0 | 0 | 0 | 3.788 | 0 | 0 | 0 |
| NB9N42000342 | 0 | 0 | 0 | 0 | 0 | 4.068 | 0 |
| NHNPC2000187 | 0 | 0 | 3.048 | 2.416 | 0 | 0 | 0 |
| NHNPC2000206 | 0 | 0 | 0 | 2.444 | 0 | 0 | 0 |
| NHNPC2001931 | 0 | 0 | 9.644 | 1.699 | 0 | 0 | 10.384 |
| NOVAR1000091 | 0 | 0 | 0 | 3.446 | 0 | 0 | 0 |
| NOVAR2000038 | 0 | 0 | 0 | 0 | 2.203 | 0 | 0 |
| NT2NE1000163 | 0 | 0 | 2.728 | 0.721 | 0 | 0 | 0 |
| NT2NE2000056 | 0 | 0 | 0 | 0.699 | 0 | 0 | 0 |
| NT2NE2000174 | 0 | 0 | 0 | 0.679 | 0 | 2.153 | 0 |
| NT2NE2000195 | 0 | 11.554 | 0 | 0 | 5.451 | 0 | 0 |
| NT2NE2000259 | 0 | 21.143 | 0 | 0 | 0 | 0 | 0 |
| NT2NE2000260 | 0 | 5.448 | 0.814 | 0.430 | 0 | 0 | 0 |
| NT2NE2000327 | 0 | 0 | 0 | 4.477 | 0 | 0 | 0 |
| NT2NE2000383 | 0 | 11.422 | 0 | 2.704 | 0 | 0 | 0 |
| NT2NE2000384 | 0 | 0 | 0 | 4.096 | 0 | 12.987 | 0 |
| NT2NE2000575 | 0 | 0 | 3.239 | 0.428 | 0.853 | 1.356 | 0 |
| NT2NE2000707 | 0 | 0 | 0 | 0 | 1.187 | 1.888 | 0 |
| NT2NE2000963 | 0 | 0 | 1.545 | 0.408 | 0 | 1.294 | 9.982 |
| NT2NE2001000 | 0 | 0 | 5.797 | 0 | 3.052 | 0 | 0 |
| NT2NE2001337 | 0 | 0 | 0 | 8.087 | 0 | 25.641 | 0 |
| NT2NE2001435 | 0 | 7.991 | 0 | 0 | 3.770 | 0 | 0 |
| NT2NE2001530 | 0 | 0 | 0 | 12.452 | 0 | 0 | 0 |
| NT2NE2001545 | 0 | 13.468 | 0 | 3.189 | 6.354 | 0 | 0 |
| NT2NE2001655 | 0 | 0 | 0 | 2.492 | 4.965 | 0 | 0 |
| NT2NE2001793 | 0 | 0 | 0 | 3.692 | 0 | 0 | 0 |
| NT2NE2002870 | 0 | 0 | 0 | 0 | 0 | 12.880 | 0 |
| NT2NE2004716 | 0 | 0 | 0 | 0 | 0 | 0 | 41.761 |
| NT2NE2005371 | 0 | 0 | 0 | 0 | 19.554 | 0 | 0 |
| NT2NE2005441 | 0 | 0 | 0 | 0 | 0 | 0 | 67.598 |
| NT2NE2005688 | 0 | 0 | 5.030 | 1.329 | 0 | 4.213 | 0 |
| NT2NE2005876 | 0 | 11.088 | 0 | 0 | 0 | 0 | 0 |
| NT2NE2006458 | 0 | 0 | 0 | 0 | 0 | 7.976 | 0 |
| NT2NE2006478 | 0 | 0 | 0 | 19.122 | 0 | 0 | 0 |
| NT2NE2010842 | 0 | 14.174 | 0 | 0 | 0 | 10.641 | 0 |
| NT2NE2011119 | 0 | 34.804 | 0 | 0 | 0 | 0 | 0 |
| NT2NE2012928 | 0 | 0 | 0 | 0 | 30.876 | 0 | 0 |
| NT2NE2014104 | 0 | 0 | 0 | 2.987 | 0 | 0 | 0 |
| NT2RI1000027 | 0 | 0 | 0 | 1.799 | 0 | 0 | 0 |
| NT2RI2000064 | 0 | 0 | 7.251 | 0.958 | 0 | 6.074 | 11.711 |
| NT2RI2000107 | 0 | 52.232 | 0 | 0 | 0 | 0 | 0 |
| NT2RI2000255 | 0 | 0 | 0 | 2.130 | 8.490 | 0 | 0 |
| NT2RI2000282 | 0 | 0 | 0 | 0 | 1.122 | 1.786 | 0 |
| NT2RI2000671 | 0 | 0 | 0 | 0 | 3.730 | 0 | 0 |
| NT2RI2000685 | 0 | 0 | 6.674 | 0 | 3.514 | 0 | 0 |
| NT2RI2000689 | 0 | 0 | 0 | 0 | 10.967 | 0 | 0 |
| NT2RI2000727 | 0 | 0 | 0 | 0 | 0 | 1.460 | 0 |
| NT2RI2000822 | 0 | 0 | 71.758 | 0 | 0 | 0 | 0 |
| NT2RI2000974 | 0 | 0 | 14.530 | 0 | 0 | 0 | 0 |
| NT2RI2001230 | 0 | 5.798 | 0 | 1.373 | 0 | 4.352 | 0 |
| NT2RI2001342 | 0 | 0 | 0 | 2.809 | 0 | 0 | 0 |
| NT2RI2001540 | 0 | 2.139 | 1.917 | 1.013 | 0.807 | 0.642 | 3.716 |
| NT2RI2001595 | 0 | 0 | 0 | 0 | 28.159 | 0 | 0 |
| NT2RI2001657 | 0 | 0 | 0 | 1.904 | 1.897 | 3.019 | 0 |
| NT2RI2001859 | 0 | 7.294 | 6.537 | 0 | 3.441 | 0 | 0 |
| NT2RI2002091 | 0 | 0.202 | 0.361 | 1.552 | 0.618 | 1.665 | 1.751 |
| NT2RI2002316 | 0 | 0 | 5.401 | 0 | 0 | 0 | 0 |
| NT2RI2002359 | 0 | 61.860 | 0 | 0 | 0 | 0 | 0 |
| NT2RI2002391 | 0 | 0 | 0 | 1.443 | 0 | 0 | 0 |
| NT2RI2002530 | 0 | 0 | 0 | 0 | 0 | 34.059 | 0 |
| NT2RI2002554 | 0 | 0 | 0 | 3.227 | 0 | 0 | 0 |
| NT2RI2002654 | 0 | 4.416 | 0 | 1.045 | 4.167 | 0 | 0 |
| NT2RI2002699 | 0 | 0 | 0 | 20.348 | 0 | 0 | 0 |
| NT2RI2002729 | 0 | 15.809 | 0 | 0 | 0 | 0 | 0 |
| NT2RI2002819 | 0 | 27.984 | 0 | 0 | 0 | 0 | 0 |
| NT2RI2002847 | 0 | 9.435 | 0 | 0 | 4.452 | 0 | 0 |
| NT2RI2002865 | 0 | 0 | 0 | 12.068 | 0 | 0 | 0 |
| NT2RI2002958 | 0 | 0 | 0 | 0 | 13.657 | 0 | 0 |
| NT2RI2003019 | 0 | 0 | 0 | 0 | 18.547 | 0 | 0 |
| NT2RI2003051 | 0 | 0 | 0 | 10.932 | 0 | 0 | 0 |
| NT2RI2003304 | 0 | 1.973 | 0 | 0.467 | 0 | 0 | 0 |
| NT2RI2003317 | 0 | 0 | 0 | 0 | 5.590 | 0 | 0 |
| NT2RI2003338 | 0 | 0 | 6.821 | 0 | 0 | 5.713 | 0 |
| NT2RI2003407 | 0 | 0 | 0 | 4.308 | 0 | 0 | 0 |
| NT2RI2003420 | 0 | 0 | 0 | 2.741 | 0 | 0 | 0 |
| NT2RI2003556 | 0 | 2.860 | 0 | 0 | 1.349 | 0 | 0 |
| NT2RI2003695 | 0 | 0 | 0 | 1.401 | 5.585 | 0 | 0 |
| NT2RI2003738 | 0 | 0 | 0 | 0 | 3.102 | 0 | 0 |
| NT2RI2003921 | 0 | 0 | 0 | 0 | 1.682 | 2.676 | 0 |
| NT2RI2003993 | 0 | 0 | 0 | 6.756 | 0 | 0 | 0 |
| NT2RI2004230 | 0 | 0 | 0 | 0 | 4.069 | 6.474 | 0 |
| NT2RI2004398 | 0 | 0 | 0 | 8.866 | 0 | 0 | 0 |
| NT2RI2004608 | 0 | 0 | 0 | 6.584 | 0 | 0 | 0 |
| NT2RI2005061 | 0 | 32.789 | 0 | 7.763 | 0 | 0 | 0 |
| NT2RI2005115 | 0 | 0 | 0 | 0 | 0 | 34.481 | 0 |
| NT2RI2005116 | 0 | 9.608 | 0 | 0 | 4.533 | 0 | 0 |
| NT2RI2005335 | 0 | 2.910 | 0 | 1.378 | 1.373 | 0 | 0 |
| NT2RI2005353 | 0 | 0 | 0 | 4.100 | 0 | 0 | 0 |
| NT2RI2005405 | 0 | 2.110 | 0 | 0 | 0.996 | 6.336 | 0 |
| NT2RI2005723 | 0 | 0 | 3.380 | 0 | 1.780 | 0 | 0 |
| NT2RI2005811 | 0 | 11.516 | 0 | 0 | 5.433 | 0 | 0 |
| NT2RI2005814 | 0 | 0 | 0 | 0 | 0 | 7.349 | 0 |
| NT2RI2005966 | 0 | 0 | 0 | 0 | 66.119 | 0 | 0 |
| NT2RI2006070 | 0 | 0 | 0 | 0 | 7.288 | 11.597 | 0 |
| NT2RI2006553 | 0 | 0 | 0 | 0 | 13.117 | 0 | 0 |
| NT2RI2006565 | 0 | 0 | 0 | 10.634 | 0 | 0 | 0 |
| NT2RI2006647 | 0 | 0 | 0 | 8.161 | 0 | 0 | 0 |
| NT2RI2006682 | 0 | 0 | 16.576 | 0 | 0 | 13.885 | 0 |
| NT2RI2006686 | 0 | 0 | 78.754 | 0 | 0 | 0 | 0 |
| NT2RI2006825 | 0 | 0 | 0 | 9.758 | 0 | 0 | 0 |
| NT2RI2006855 | 0 | 0 | 58.068 | 0 | 0 | 0 | 0 |
| NT2RI2006856 | 0 | 0 | 0 | 0.834 | 1.661 | 0 | 10.191 |
| NT2RI2007054 | 0 | 0 | 0 | 0 | 4.604 | 0 | 0 |
| NT2RI2007133 | 0 | 0 | 0 | 0 | 1.391 | 0 | 0 |
| NT2RI2007377 | 0 | 0 | 0 | 2.084 | 0 | 0 | 0 |
| NT2RI2007384 | 0 | 0 | 2.917 | 1.541 | 0 | 4.887 | 0 |
| NT2RI2007498 | 0 | 0 | 0 | 3.629 | 0 | 0 | 0 |
| NT2RI2007589 | 0 | 0 | 7.194 | 0 | 0 | 0 | 0 |
| NT2RI2007853 | 0 | 0 | 0 | 0 | 0 | 25.267 | 0 |
| NT2RI2007879 | 0 | 0 | 0 | 0 | 5.629 | 0 | 0 |
| NT2RI2007987 | 0 | 0 | 12.129 | 0 | 0 | 0 | 0 |
| NT2RI2008141 | 0 | 0 | 0 | 7.611 | 0 | 0 | 0 |
| NT2RI2008221 | 0 | 8.333 | 0 | 0 | 0 | 0 | 0 |
| NT2RI2008336 | 0 | 0 | 0 | 0 | 4.262 | 0 | 0 |
| NT2RI2008396 | 0 | 0 | 0 | 1.569 | 1.563 | 0 | 0 |
| NT2RI2008526 | 0 | 0 | 0 | 0 | 0 | 8.652 | 0 |
| NT2RI2008749 | 0 | 0 | 7.617 | 2.012 | 0 | 0 | 0 |
| NT2RI2008791 | 0 | 0 | 0 | 0 | 4.138 | 6.583 | 0 |
| NT2RI2008812 | 0 | 0 | 0 | 0 | 0 | 40.851 | 0 |
| NT2RI2009037 | 0 | 6.337 | 0 | 0 | 0 | 4.757 | 0 |
| NT2RI2009065 | 0 | 3.511 | 0 | 0 | 1.656 | 0 | 0 |
| NT2RI2009239 | 0 | 0 | 0 | 2.488 | 0 | 0 | 0 |
| NT2RI2009269 | 0 | 0 | 0 | 3.517 | 0 | 5.576 | 0 |
| NT2RI2009281 | 0 | 0 | 0 | 0 | 4.991 | 0 | 0 |
| NT2RI2009583 | 0 | 0 | 4.521 | 0.398 | 1.587 | 0 | 0 |
| NT2RI2012350 | 0 | 0 | 0 | 0.712 | 0 | 2.258 | 0 |
| NT2RI2012990 | 0 | 0 | 0 | 0 | 0 | 75.640 | 0 |
| NT2RI2013345 | 0 | 0 | 63.707 | 0 | 0 | 0 | 0 |
| NT2RI2014247 | 0 | 0 | 0 | 0 | 54.091 | 0 | 0 |
| NT2RI2015342 | 0 | 0 | 0 | 2.677 | 0 | 0 | 0 |
| NT2RI2015533 | 0 | 0 | 10.469 | 0 | 0 | 0 | 0 |
| NT2RI3006284 | 0 | 0 | 0 | 3.682 | 0 | 0 | 0 |
| NT2RI3006340 | 0 | 0 | 55.006 | 0 | 0 | 0 | 0 |
| NT2RI3006666 | 0 | 0 | 0 | 37.157 | 0 | 0 | 0 |
| NT2RI3007543 | 0 | 0 | 5.715 | 1.510 | 0 | 0 | 0 |
| NT2RP6000005 | 0 | 16.533 | 0 | 0 | 0 | 0 | 0 |
| NT2RP6000032 | 0 | 58.947 | 0 | 0 | 0 | 0 | 0 |
| NT2RP6000039 | 0 | 0 | 0 | 12.765 | 0 | 0 | 0 |
| NT2RP6000072 | 0 | 0 | 10.884 | 0 | 0 | 0 | 0 |
| NT2RP6000077 | 0 | 0 | 0 | 22.879 | 0 | 0 | 0 |
| NT2RP6000078 | 0 | 5.405 | 0 | 0 | 0 | 0 | 0 |
| NT2RP6000110 | 0 | 0 | 0 | 4.873 | 0 | 0 | 0 |
| NT2RP6000123 | 0 | 0 | 0 | 0.697 | 5.553 | 2.209 | 0 |
| NT2RP7000069 | 0 | 0 | 0 | 11.990 | 0 | 0 | 0 |
| NT2RP7000076 | 0 | 9.162 | 0 | 0 | 8.645 | 0 | 0 |
| NT2RP7000173 | 0 | 0 | 0 | 0.989 | 1.972 | 0 | 0 |
| NT2RP7000271 | 0 | 0 | 0 | 5.398 | 0 | 0 | 0 |
| NT2RP7000477 | 0 | 0 | 13.327 | 0 | 0 | 0 | 0 |
| NT2RP7000600 | 0 | 0 | 0 | 3.944 | 0 | 0 | 0 |
| NT2RP7001166 | 0 | 0 | 0 | 1.331 | 0 | 0 | 0 |
| NT2RP7001283 | 0 | 0 | 0 | 0 | 1.996 | 0 | 0 |
| NT2RP7001962 | 0 | 0 | 0 | 9.455 | 0 | 0 | 0 |
| NT2RP7002028 | 0 | 0 | 0 | 0 | 0 | 11.339 | 0 |
| NT2RP7002379 | 0 | 0 | 0 | 0 | 1.785 | 2.840 | 0 |
| NT2RP7002619 | 0 | 8.190 | 0 | 1.939 | 0 | 6.148 | 0 |
| NT2RP7002982 | 0 | 0 | 0 | 0 | 55.144 | 0 | 0 |
| NT2RP7003203 | 0 | 13.884 | 0 | 3.287 | 0 | 0 | 0 |
| NT2RP7003261 | 0 | 0 | 0 | 2.418 | 0 | 0 | 0 |
| NT2RP7003319 | 0 | 0 | 6.146 | 3.247 | 0 | 0 | 0 |
| NT2RP7003629 | 0 | 0 | 0 | 20.137 | 0 | 0 | 0 |
| NT2RP7003647 | 0 | 0 | 0 | 6.283 | 0 | 0 | 0 |
| NT2RP7003688 | 0 | 0 | 0 | 2.628 | 2.619 | 0 | 0 |
| NT2RP7003724 | 0 | 0 | 0 | 16.434 | 0 | 0 | 0 |
| NT2RP7004114 | 0 | 0 | 0 | 9.924 | 0 | 0 | 0 |
| NT2RP7004173 | 0 | 0 | 0 | 4.077 | 0 | 0 | 0 |
| NT2RP7004196 | 0 | 0 | 0 | 0 | 0 | 7.393 | 0 |
| NT2RP7004373 | 0 | 0 | 0 | 6.284 | 4.174 | 0 | 0 |
| NT2RP7004728 | 0 | 11.814 | 0 | 2.797 | 0 | 0 | 0 |
| NT2RP7004751 | 0 | 0 | 0 | 0 | 0 | 2.641 | 0 |
| NT2RP7004925 | 0 | 0 | 0 | 2.247 | 4.478 | 0 | 0 |
| NT2RP7004946 | 0 | 6.471 | 0 | 3.064 | 0 | 0 | 0 |
| NT2RP7005513 | 0 | 0 | 11.385 | 0 | 0 | 9.537 | 0 |
| NT2RP7005675 | 0 | 0 | 0 | 5.176 | 0 | 0 | 0 |
| NT2RP7005750 | 0 | 0 | 0 | 0 | 25.379 | 0 | 0 |
| NT2RP7006033 | 0 | 0 | 0 | 13.681 | 0 | 0 | 0 |
| NT2RP7006075 | 0 | 0 | 0 | 9.326 | 0 | 0 | 0 |
| NT2RP7006141 | 0 | 0 | 0 | 0 | 2.619 | 0 | 0 |
| NT2RP7006188 | 0 | 0 | 0 | 9.266 | 0 | 0 | 0 |
| NT2RP7006619 | 0 | 0 | 0 | 3.928 | 0 | 0 | 0 |
| NT2RP7006980 | 0 | 0 | 0 | 30.014 | 0 | 0 | 0 |
| NT2RP7007154 | 0 | 0 | 0 | 1.015 | 0 | 0 | 0 |
| NT2RP7007177 | 0 | 0 | 0 | 0 | 0 | 7.684 | 0 |
| NT2RP7007387 | 0 | 0 | 0 | 3.653 | 0 | 0 | 0 |
| NT2RP7007537 | 0 | 0 | 8.283 | 0 | 4.361 | 0 | 0 |
| NT2RP7007975 | 0 | 0 | 0 | 2.429 | 0 | 0 | 0 |
| NT2RP7008161 | 0 | 0 | 0 | 11.173 | 0 | 0 | 0 |
| NT2RP7008167 | 0 | 0 | 0 | 0 | 3.219 | 0 | 0 |
| NT2RP7008190 | 0 | 0 | 0 | 2.361 | 4.704 | 0 | 0 |
| NT2RP7008396 | 0 | 0 | 0 | 21.908 | 0 | 0 | 0 |
| NT2RP7008543 | 0 | 0 | 0 | 9.792 | 9.756 | 0 | 0 |
| NT2RP7009097 | 0 | 0 | 0 | 3.200 | 0 | 0 | 0 |
| NT2RP7009147 | 0 | 0 | 0 | 2.835 | 0 | 0 | 0 |
| NT2RP7009149 | 0 | 0 | 8.058 | 0 | 0 | 0 | 0 |
| NT2RP7009259 | 0 | 0 | 0 | 4.000 | 0 | 0 | 0 |
| NT2RP7009394 | 0 | 0 | 0 | 2.152 | 0 | 0 | 0 |
| NT2RP7009482 | 0 | 0 | 0 | 0 | 1.644 | 2.615 | 0 |
| NT2RP7009498 | 0 | 0 | 0 | 3.587 | 0 | 0 | 0 |
| NT2RP7014910 | 0 | 0 | 0 | 2.128 | 0 | 0 | 0 |
| NT2RP7015512 | 0 | 0 | 0 | 34.509 | 0 | 0 | 0 |
| NT2RP7019064 | 0 | 0 | 0 | 45.711 | 0 | 0 | 0 |
| NT2RP8000435 | 0 | 0 | 0 | 23.746 | 0 | 0 | 0 |
| NT2RP8007920 | 0 | 14.869 | 0 | 0 | 0 | 0 | 0 |
| NTONG1000033 | 0 | 0 | 0 | 2.180 | 0 | 0 | 0 |
| NTONG1000052 | 0 | 0 | 35.389 | 0 | 5.081 | 0 | 0 |
| NTONG1000098 | 0 | 0 | 0 | 1.134 | 0 | 3.595 | 0 |
| NTONG1000123 | 0 | 0 | 31.366 | 0 | 0 | 0 | 0 |
| NTONG1000182 | 0 | 0 | 25.018 | 2.203 | 4.390 | 0 | 0 |
| NTONG1000257 | 0 | 0 | 0 | 0 | 0 | 6.210 | 0 |
| NTONG1000264 | 0 | 7.326 | 0 | 0 | 0 | 5.500 | 0 |
| NTONG2000265 | 0 | 0 | 0 | 1.517 | 0 | 0 | 0 |
| NTONG2000334 | 0 | 0 | 0 | 0 | 7.251 | 0 | 0 |
| NTONG2000858 | 0 | 0 | 58.364 | 0 | 0 | 0 | 0 |
| NTONG2000876 | 0 | 10.466 | 0 | 4.956 | 4.938 | 7.857 | 0 |
| NTONG2000878 | 0 | 0 | 0 | 2.102 | 0 | 0 | 25.694 |
| NTONG2000977 | 0 | 0 | 0 | 0 | 0 | 5.547 | 0 |
| NTONG2000985 | 0 | 0 | 12.558 | 0 | 0 | 0 | 0 |
| NTONG2001220 | 0 | 0 | 0 | 0 | 20.407 | 0 | 0 |
| NTONG2001550 | 0 | 0 | 0 | 0 | 12.343 | 0 | 0 |
| NTONG2001567 | 0 | 0 | 0 | 0 | 3.262 | 1.730 | 20.015 |
| NTONG2001612 | 0 | 0 | 0 | 0 | 0 | 6.334 | 0 |
| NTONG2002948 | 0 | 0 | 14.957 | 0 | 7.874 | 0 | 0 |
| NTONG2003454 | 0 | 0 | 0 | 10.611 | 0 | 0 | 0 |
| NTONG2003852 | 0 | 50.493 | 0 | 0 | 0 | 0 | 0 |
| NTONG2004614 | 0 | 0 | 0 | 10.539 | 0 | 0 | 0 |
| NTONG2004844 | 0 | 0 | 0 | 0 | 0 | 9.144 | 0 |
| NTONG2005391 | 0 | 0 | 0 | 12.447 | 0 | 0 | 0 |
| NTONG2005497 | 0 | 0 | 0 | 0 | 0 | 1.546 | 0 |
| NTONG2005520 | 0 | 0 | 0 | 1.185 | 0 | 3.756 | 0 |
| NTONG2005801 | 0 | 0 | 0 | 9.512 | 0 | 0 | 0 |
| NTONG2006484 | 0 | 0 | 0 | 0 | 30.659 | 0 | 0 |
| NTONG2006783 | 0 | 0 | 76.282 | 0 | 0 | 0 | 0 |
| NTONG2007034 | 0 | 0 | 47.753 | 0 | 0 | 0 | 0 |
| NTONG2007658 | 0 | 15.042 | 0 | 0 | 0 | 0 | 0 |
| NTONG2007756 | 0 | 0 | 45.466 | 0 | 0 | 0 | 0 |
| NTONG2008483 | 0 | 0 | 5.382 | 2.844 | 0 | 4.508 | 0 |
| NTONG2008944 | 0 | 0 | 0 | 25.982 | 0 | 0 | 0 |
| NTONG2009060 | 0 | 0 | 18.770 | 0 | 0 | 0 | 0 |
| OCBBF1000146 | 0 | 0 | 0 | 0 | 3.059 | 0 | 0 |
| OCBBF1000188 | 0 | 0 | 0 | 3.706 | 0 | 0 | 0 |
| OCBBF1000315 | 0 | 0 | 0 | 15.571 | 0 | 0 | 0 |
| OCBBF2000013 | 0 | 0 | 0 | 0 | 0 | 10.980 | 0 |
| OCBBF2000015 | 0 | 0 | 0 | 8.448 | 0 | 0 | 0 |
| OCBBF2000824 | 0 | 0 | 0 | 0 | 21.310 | 0 | 0 |
| OCBBF2000846 | 0 | 0 | 0 | 1.302 | 0 | 0 | 0 |
| OCBBF2000986 | 0 | 0 | 0 | 3.430 | 0 | 0 | 0 |
| OCBBF2001210 | 0 | 0 | 0 | 6.453 | 0 | 0 | 0 |
| OCBBF2001307 | 0 | 0 | 0 | 2.960 | 0 | 0 | 0 |
| OCBBF2001492 | 0 | 5.157 | 4.622 | 3.663 | 2.433 | 3.871 | 0 |
| OCBBF2001586 | 0 | 0 | 0 | 0 | 12.716 | 0 | 0 |
| OCBBF2001639 | 0 | 0 | 0 | 0 | 16.676 | 0 | 0 |
| OCBBF2001687 | 0 | 0 | 0 | 3.423 | 0 | 0 | 0 |
| OCBBF2001983 | 0 | 0 | 0 | 64.284 | 0 | 0 | 0 |
| OCBBF2002086 | 0 | 0 | 0 | 11.467 | 0 | 0 | 0 |
| OCBBF2002626 | 0 | 0 | 0 | 0 | 2.995 | 0 | 0 |
| OCBBF2003518 | 0 | 0 | 0 | 1.835 | 0 | 0 | 0 |
| OCBBF2004273 | 0 | 0 | 0 | 1.595 | 0 | 0 | 0 |
| OCBBF2005956 | 0 | 21.338 | 0 | 0 | 0 | 0 | 0 |
| OCBBF2006005 | 0 | 35.834 | 0 | 8.484 | 0 | 0 | 0 |
| OCBBF2006148 | 0 | 0 | 0 | 0 | 0 | 38.212 | 0 |
| OCBBF2006849 | 0 | 0 | 0 | 0 | 7.167 | 0 | 0 |
| OCBBF2007354 | 0 | 0 | 0 | 1.788 | 0 | 0 | 0 |
| OCBBF2007622 | 0 | 0 | 0 | 0 | 0 | 0 | 79.879 |
| OCBBF2007829 | 0 | 0 | 0 | 1.954 | 0 | 0 | 0 |
| OCBBF2009095 | 0 | 0 | 0 | 0 | 0 | 37.084 | 0 |
| OCBBF2009603 | 0 | 0 | 0 | 58.892 | 0 | 0 | 0 |
| OCBBF2009772 | 0 | 0 | 7.932 | 0 | 0 | 0 | 0 |
| OCBBF2011887 | 0 | 0 | 0 | 8.370 | 0 | 0 | 0 |
| OCBBF2012095 | 0 | 0 | 0 | 27.233 | 0 | 0 | 0 |
| OCBBF2012714 | 0 | 43.630 | 0 | 0 | 0 | 0 | 0 |
| OCBBF2012821 | 0 | 0 | 0 | 4.453 | 0 | 0 | 0 |
| OCBBF2014576 | 0 | 0 | 0 | 6.503 | 0 | 0 | 0 |
| OCBBF2015503 | 0 | 0 | 0 | 13.355 | 0 | 0 | 0 |
| OCBBF2016928 | 0 | 0 | 0 | 4.874 | 0 | 0 | 0 |
| OCBBF2017035 | 0 | 0 | 8.166 | 0 | 0 | 0 | 0 |
| OCBBF2017055 | 0 | 0 | 0 | 31.933 | 0 | 0 | 0 |
| OCBBF2017398 | 0 | 9.669 | 0 | 0 | 0 | 0 | 0 |
| OCBBF2017458 | 0 | 0 | 0 | 0 | 0 | 31.413 | 0 |
| OCBBF2017754 | 0 | 0 | 0 | 6.682 | 0 | 0 | 0 |
| OCBBF2017791 | 0 | 0 | 0 | 11.397 | 0 | 0 | 0 |
| OCBBF2017888 | 0 | 0 | 0 | 30.321 | 0 | 0 | 0 |
| OCBBF2018012 | 0 | 0 | 0 | 9.990 | 0 | 0 | 0 |
| OCBBF2018873 | 0 | 0 | 0 | 0 | 4.914 | 0 | 0 |
| OCBBF2018956 | 0 | 0 | 0 | 0 | 0 | 19.099 | 0 |
| OCBBF2024850 | 0 | 0 | 0 | 7.910 | 0 | 0 | 0 |
| OCBBF2026368 | 0 | 0 | 0 | 14.706 | 0 | 0 | 0 |
| OCBBF3000323 | 0 | 0 | 0 | 5.919 | 11.795 | 0 | 0 |
| OCBBF3001333 | 0 | 0 | 0 | 5.718 | 0 | 0 | 0 |
| OCBBF3004487 | 0 | 0 | 0 | 8.063 | 0 | 0 | 0 |
| PANCR1000012 | 100 | 0 | 0 | 0 | 0 | 0 | 0 |
| PANCR1000021 | 100 | 0 | 0 | 0 | 0 | 0 | 0 |
| PANCR1000081 | 98.068 | 0 | 0 | 0 | 0 | 0 | 0 |
| PANCR1000086 | 100 | 0 | 0 | 0 | 0 | 0 | 0 |
| PANCR1000091 | 98.673 | 0 | 0 | 0 | 0 | 0 | 0 |
| PANCR1000185 | 100 | 0 | 0 | 0 | 0 | 0 | 0 |
| PEBLM1000024 | 0 | 100 | 0 | 0 | 0 | 0 | 0 |
| PEBLM1000029 | 0 | 100 | 0 | 0 | 0 | 0 | 0 |
| PEBLM1000034 | 0 | 52.261 | 0 | 0 | 0 | 0 | 0 |
| PEBLM1000062 | 0 | 100 | 0 | 0 | 0 | 0 | 0 |
| PEBLM1000066 | 0 | 35.622 | 0 | 0 | 16.807 | 0 | 0 |
| PEBLM1000068 | 0 | 100 | 0 | 0 | 0 | 0 | 0 |
| PEBLM1000071 | 0 | 100 | 0 | 0 | 0 | 0 | 0 |
| PEBLM1000083 | 0 | 100 | 0 | 0 | 0 | 0 | 0 |
| PEBLM1000144 | 0 | 45.080 | 0 | 0 | 0 | 0 | 0 |
| PEBLM1000147 | 0 | 100 | 0 | 0 | 0 | 0 | 0 |
| PEBLM1000174 | 0 | 35.947 | 0 | 8.511 | 0 | 0 | 0 |
| PEBLM1000180 | 0 | 100 | 0 | 0 | 0 | 0 | 0 |
| PEBLM2000030 | 0 | 27.664 | 0 | 0 | 0 | 0 | 0 |
| PEBLM2000112 | 0 | 100 | 0 | 0 | 0 | 0 | 0 |
| PEBLM2000126 | 0 | 81.206 | 0 | 0 | 0 | 0 | 0 |
| PEBLM2000147 | 0 | 19.178 | 0 | 0 | 0 | 0 | 0 |
| PEBLM2000170 | 0 | 100 | 0 | 0 | 0 | 0 | 0 |
| PEBLM2000180 | 0 | 100 | 0 | 0 | 0 | 0 | 0 |
| PEBLM2000213 | 0 | 100 | 0 | 0 | 0 | 0 | 0 |
| PEBLM2000222 | 0 | 8.732 | 0 | 0 | 0 | 0 | 0 |
| PEBLM2000248 | 0 | 100 | 0 | 0 | 0 | 0 | 0 |
| PEBLM2000267 | 0 | 10.569 | 0 | 0 | 0 | 0 | 0 |
| PEBLM2000270 | 0 | 100 | 0 | 0 | 0 | 0 | 0 |
| PEBLM2000308 | 0 | 14.901 | 0 | 3.528 | 0 | 0 | 0 |
| PEBLM2000321 | 0 | 100 | 0 | 0 | 0 | 0 | 0 |
| PEBLM2000326 | 0 | 40.802 | 0 | 0 | 0 | 0 | 0 |
| PEBLM2000333 | 0 | 100 | 0 | 0 | 0 | 0 | 0 |
| PEBLM2000338 | 0 | 71.537 | 0 | 0 | 0 | 0 | 0 |
| PEBLM2000395 | 0 | 27.366 | 6.131 | 0 | 3.228 | 0 | 0 |
| PEBLM2000479 | 0 | 34.988 | 0 | 0 | 0 | 0 | 0 |
| PEBLM2000502 | 0 | 100 | 0 | 0 | 0 | 0 | 0 |
| PEBLM2001072 | 0 | 13.631 | 0 | 0 | 6.431 | 0 | 0 |
| PEBLM2001312 | 0 | 100 | 0 | 0 | 0 | 0 | 0 |
| PEBLM2001465 | 0 | 100 | 0 | 0 | 0 | 0 | 0 |
| PEBLM2001488 | 0 | 100 | 0 | 0 | 0 | 0 | 0 |
| PEBLM2001803 | 0 | 77.704 | 0 | 0 | 0 | 0 | 0 |
| PEBLM2002432 | 0 | 100 | 0 | 0 | 0 | 0 | 0 |
| PEBLM2002455 | 0 | 66.882 | 0 | 0 | 0 | 0 | 0 |
| PEBLM2002594 | 0 | 100 | 0 | 0 | 0 | 0 | 0 |
| PEBLM2002749 | 0 | 51.656 | 0 | 0 | 0 | 0 | 0 |
| PEBLM2002887 | 0 | 100 | 0 | 0 | 0 | 0 | 0 |
| PEBLM2003426 | 0 | 100 | 0 | 0 | 0 | 0 | 0 |
| PEBLM2003765 | 0 | 100 | 0 | 0 | 0 | 0 | 0 |
| PEBLM2003914 | 0 | 15.971 | 0 | 0 | 0 | 0 | 0 |
| PEBLM2003935 | 0 | 100 | 0 | 0 | 0 | 0 | 0 |
| PEBLM2004015 | 0 | 100 | 0 | 0 | 0 | 0 | 0 |
| PEBLM2004216 | 0 | 100 | 0 | 0 | 0 | 0 | 0 |
| PEBLM2004290 | 0 | 100 | 0 | 0 | 0 | 0 | 0 |
| PEBLM2004452 | 0 | 10.145 | 0 | 4.804 | 0 | 0 | 0 |
| PEBLM2004497 | 0 | 100 | 0 | 0 | 0 | 0 | 0 |
| PEBLM2004666 | 0 | 27.928 | 0 | 6.612 | 0 | 0 | 0 |
| PEBLM2004733 | 0 | 71.830 | 0 | 0 | 0 | 0 | 0 |
| PEBLM2005282 | 0 | 88.180 | 0 | 0 | 0 | 0 | 0 |
| PEBLM2005615 | 0 | 100 | 0 | 0 | 0 | 0 | 0 |
| PEBLM2005632 | 0 | 100 | 0 | 0 | 0 | 0 | 0 |
| PEBLM2005697 | 0 | 100 | 0 | 0 | 0 | 0 | 0 |
| PEBLM2006031 | 0 | 100 | 0 | 0 | 0 | 0 | 0 |
| PEBLM2006036 | 0 | 90.014 | 0 | 0 | 0 | 0 | 0 |
| PEBLM2006049 | 0 | 100 | 0 | 0 | 0 | 0 | 0 |
| PEBLM2006113 | 0 | 100 | 0 | 0 | 0 | 0 | 0 |
| PEBLM2006135 | 0 | 100 | 0 | 0 | 0 | 0 | 0 |
| PEBLM2006215 | 0 | 100 | 0 | 0 | 0 | 0 | 0 |
| PEBLM2006283 | 0 | 88.049 | 0 | 0 | 0 | 0 | 0 |
| PEBLM2006298 | 0 | 100 | 0 | 0 | 0 | 0 | 0 |
| PEBLM2006366 | 0 | 20.804 | 0 | 0 | 0 | 0 | 0 |
| PEBLM2006709 | 0 | 41.819 | 0 | 0 | 0 | 0 | 0 |
| PEBLM2006912 | 0 | 100 | 0 | 0 | 0 | 0 | 0 |
| PEBLM2007112 | 0 | 100 | 0 | 0 | 0 | 0 | 0 |
| PEBLM2007140 | 0 | 100 | 0 | 0 | 0 | 0 | 0 |
| PEBLM2007188 | 0 | 65.617 | 0 | 0 | 0 | 0 | 0 |
| PEBLM2007296 | 0 | 25.998 | 0 | 0 | 0 | 0 | 0 |
| PEBLM2007437 | 0 | 44.815 | 0 | 0 | 0 | 33.642 | 0 |
| PEBLM2007447 | 0 | 90.014 | 0 | 0 | 0 | 0 | 0 |
| PEBLM2007598 | 0 | 100 | 0 | 0 | 0 | 0 | 0 |
| PEBLM2007774 | 0 | 4.528 | 0 | 1.072 | 1.068 | 0 | 0 |
| PEBLM2007832 | 0 | 100 | 0 | 0 | 0 | 0 | 0 |
| PEBLM2007834 | 0 | 100 | 0 | 0 | 0 | 0 | 0 |
| PEBLM2008106 | 0 | 80.142 | 0 | 0 | 0 | 0 | 0 |
| PEBLM2008576 | 0 | 100 | 0 | 0 | 0 | 0 | 0 |
| PEBLM2008605 | 0 | 100 | 0 | 0 | 0 | 0 | 0 |
| PEBLM2008826 | 0 | 69.712 | 0 | 0 | 0 | 0 | 0 |
| PEBLM2008861 | 0 | 18.093 | 0 | 0 | 0 | 0 | 0 |
| PERIC1000025 | 0 | 0 | 100 | 0 | 0 | 0 | 0 |
| PERIC1000147 | 0 | 0 | 100 | 0 | 0 | 0 | 0 |
| PERIC2000180 | 0 | 0 | 100 | 0 | 0 | 0 | 0 |
| PERIC2000214 | 0 | 0 | 100 | 0 | 0 | 0 | 0 |
| PERIC2000386 | 0 | 0 | 100 | 0 | 0 | 0 | 0 |
| PERIC2000387 | 0 | 0 | 100 | 0 | 0 | 0 | 0 |
| PERIC2000422 | 0 | 0 | 100 | 0 | 0 | 0 | 0 |
| PERIC2000473 | 0 | 0 | 42.285 | 0 | 0 | 0 | 0 |
| PERIC2000478 | 0 | 0 | 73.334 | 0 | 0 | 0 | 0 |
| PERIC2000889 | 0 | 0 | 59.923 | 0 | 0 | 0 | 0 |
| PERIC2000914 | 0 | 0 | 100 | 0 | 0 | 0 | 0 |
| PERIC2001227 | 0 | 0 | 100 | 0 | 0 | 0 | 0 |
| PERIC2001228 | 0 | 0 | 100 | 0 | 0 | 0 | 0 |
| PERIC2001379 | 0 | 0 | 100 | 0 | 0 | 0 | 0 |
| PERIC2001504 | 0 | 0 | 100 | 0 | 0 | 0 | 0 |
| PERIC2001703 | 0 | 0 | 100 | 0 | 0 | 0 | 0 |
| PERIC2001764 | 0 | 0 | 100 | 0 | 0 | 0 | 0 |
| PERIC2002243 | 0 | 0 | 100 | 0 | 0 | 0 | 0 |
| PERIC2002272 | 0 | 0 | 100 | 0 | 0 | 0 | 0 |
| PERIC2002452 | 0 | 0 | 65.624 | 0 | 0 | 0 | 0 |
| PERIC2002766 | 0 | 0 | 84.429 | 0 | 0 | 0 | 0 |
| PERIC2003001 | 0 | 0 | 100 | 0 | 0 | 0 | 0 |
| PERIC2003090 | 0 | 0 | 100 | 0 | 0 | 0 | 0 |
| PERIC2003287 | 0 | 0 | 100 | 0 | 0 | 0 | 0 |
| PERIC2003349 | 0 | 0 | 100 | 0 | 0 | 0 | 0 |
| PERIC2003452 | 0 | 0 | 100 | 0 | 0 | 0 | 0 |
| PERIC2003699 | 0 | 0 | 79.101 | 20.899 | 0 | 0 | 0 |
| PERIC2003720 | 0 | 0 | 86.988 | 0 | 0 | 0 | 0 |
| PERIC2003794 | 0 | 0 | 91.154 | 0 | 0 | 0 | 0 |
| PERIC2003834 | 0 | 0 | 100 | 0 | 0 | 0 | 0 |
| PERIC2003919 | 0 | 0 | 100 | 0 | 0 | 0 | 0 |
| PERIC2003957 | 0 | 0 | 100 | 0 | 0 | 0 | 0 |
| PERIC2004028 | 0 | 0 | 100 | 0 | 0 | 0 | 0 |
| PERIC2004131 | 0 | 0 | 100 | 0 | 0 | 0 | 0 |
| PERIC2004259 | 0 | 0 | 100 | 0 | 0 | 0 | 0 |
| PERIC2004379 | 0 | 0 | 100 | 0 | 0 | 0 | 0 |
| PERIC2004429 | 0 | 0 | 100 | 0 | 0 | 0 | 0 |
| PERIC2004510 | 0 | 0 | 100 | 0 | 0 | 0 | 0 |
| PERIC2004613 | 0 | 0 | 100 | 0 | 0 | 0 | 0 |
| PERIC2004909 | 0 | 0 | 100 | 0 | 0 | 0 | 0 |
| PERIC2005111 | 0 | 0 | 100 | 0 | 0 | 0 | 0 |
| PERIC2005117 | 0 | 0 | 14.470 | 3.823 | 0 | 0 | 0 |
| PERIC2005305 | 0 | 0 | 100 | 0 | 0 | 0 | 0 |
| PERIC2005347 | 0 | 0 | 100 | 0 | 0 | 0 | 0 |
| PERIC2005370 | 0 | 0 | 100 | 0 | 0 | 0 | 0 |
| PERIC2005936 | 0 | 0 | 100 | 0 | 0 | 0 | 0 |
| PERIC2006035 | 0 | 0 | 100 | 0 | 0 | 0 | 0 |
| PERIC2006121 | 0 | 0 | 100 | 0 | 0 | 0 | 0 |
| PERIC2006443 | 0 | 0 | 32.715 | 0 | 0 | 27.404 | 0 |
| PERIC2006945 | 0 | 0 | 100 | 0 | 0 | 0 | 0 |
| PERIC2006960 | 0 | 0 | 100 | 0 | 0 | 0 | 0 |
| PERIC2007068 | 0 | 0 | 10.394 | 0 | 0 | 0 | 0 |
| PERIC2007439 | 0 | 0 | 100 | 0 | 0 | 0 | 0 |
| PERIC2007914 | 0 | 0 | 100 | 0 | 0 | 0 | 0 |
| PERIC2008008 | 0 | 0 | 100 | 0 | 0 | 0 | 0 |
| PERIC2008385 | 0 | 0 | 100 | 0 | 0 | 0 | 0 |
| PERIC2009001 | 0 | 0 | 100 | 0 | 0 | 0 | 0 |
| PERIC2009086 | 0 | 0 | 100 | 0 | 0 | 0 | 0 |
| PERIC2009329 | 0 | 0 | 100 | 0 | 0 | 0 | 0 |
| PERIC2009566 | 0 | 0 | 100 | 0 | 0 | 0 | 0 |
| PLACE5000001 | 0 | 0 | 0 | 100 | 0 | 0 | 0 |
| PLACE5000013 | 0 | 0 | 0 | 2.825 | 0 | 0 | 0 |
| PLACE5000037 | 0 | 0 | 0 | 100 | 0 | 0 | 0 |
| PLACE5000058 | 0 | 0 | 0 | 61.610 | 0 | 0 | 0 |
| PLACE5000066 | 0 | 0 | 0 | 16.284 | 0 | 0 | 0 |
| PLACE5000067 | 0 | 0 | 0 | 73.137 | 0 | 0 | 0 |
| PLACE5000068 | 0 | 0 | 0 | 11.176 | 0 | 0 | 0 |
| PLACE5000070 | 0 | 0 | 0 | 100 | 0 | 0 | 0 |
| PLACE5000080 | 0 | 0 | 0 | 21.952 | 0 | 0 | 0 |
| PLACE5000105 | 0 | 0 | 0 | 100 | 0 | 0 | 0 |
| PLACE5000113 | 0 | 0 | 0 | 12.248 | 0 | 0 | 0 |
| PLACE5000115 | 0 | 0 | 0 | 100 | 0 | 0 | 0 |
| PLACE5000116 | 0 | 0 | 0 | 100 | 0 | 0 | 0 |
| PLACE5000129 | 0 | 0 | 0 | 100 | 0 | 0 | 0 |
| PLACE5000139 | 0 | 0 | 79.101 | 20.899 | 0 | 0 | 0 |
| PLACE5000153 | 0 | 0 | 0 | 100 | 0 | 0 | 0 |
| PLACE5000159 | 0 | 0 | 0 | 4.045 | 0 | 0 | 0 |
| PLACE5000170 | 0 | 0 | 0 | 30.938 | 0 | 0 | 0 |
| PLACE5000171 | 0 | 0 | 0 | 100 | 0 | 0 | 0 |
| PLACE5000172 | 0 | 0 | 0 | 27.759 | 0 | 0 | 0 |
| PLACE5000178 | 0 | 0 | 0 | 64.025 | 0 | 0 | 0 |
| PLACE5000245 | 0 | 0 | 0 | 100 | 0 | 0 | 0 |
| PLACE5000260 | 0 | 0 | 0 | 100 | 0 | 0 | 0 |
| PLACE5000282 | 0 | 0 | 0 | 21.952 | 0 | 0 | 0 |
| PLACE5000297 | 0 | 0 | 0 | 63.562 | 0 | 0 | 0 |
| PLACE5000372 | 0 | 0 | 0 | 59.874 | 0 | 0 | 0 |
| PLACE5000492 | 0 | 0 | 0 | 43.685 | 0 | 0 | 0 |
| PLACE5000522 | 0 | 0 | 0 | 100 | 0 | 0 | 0 |
| PLACE5000527 | 0 | 0 | 0 | 100 | 0 | 0 | 0 |
| PLACE6000012 | 0 | 0 | 0 | 100 | 0 | 0 | 0 |
| PLACE6000044 | 0 | 0 | 0 | 100 | 0 | 0 | 0 |
| PLACE6000055 | 0 | 0 | 0 | 100 | 0 | 0 | 0 |
| PLACE6000070 | 0 | 0 | 0 | 100 | 0 | 0 | 0 |
| PLACE6000137 | 0 | 0 | 0 | 100 | 0 | 0 | 0 |
| PLACE6000145 | 0 | 0 | 0 | 1.844 | 0 | 0 | 0 |
| PLACE6000191 | 0 | 0 | 0 | 100 | 0 | 0 | 0 |
| PLACE6000205 | 0 | 0 | 0 | 100 | 0 | 0 | 0 |
| PLACE6000231 | 0 | 0 | 0 | 100 | 0 | 0 | 0 |
| PLACE6000263 | 0 | 0 | 10.241 | 2.706 | 0 | 0 | 0 |
| PLACE6000296 | 0 | 0 | 0 | 100 | 0 | 0 | 0 |
| PLACE6000314 | 0 | 0 | 0 | 27.144 | 0 | 0 | 0 |
| PLACE6000325 | 0 | 0 | 0 | 14.417 | 0 | 0 | 0 |
| PLACE6000348 | 0 | 0 | 0 | 50.674 | 0 | 0 | 0 |
| PLACE6000371 | 0 | 0 | 0 | 50.569 | 0 | 0 | 0 |
| PLACE6000379 | 0 | 3.983 | 0 | 1.257 | 0 | 2.990 | 0 |
| PLACE6000414 | 0 | 0 | 0 | 2.280 | 4.544 | 0 | 0 |
| PLACE6000424 | 0 | 0 | 0 | 100 | 0 | 0 | 0 |
| PLACE6000426 | 0 | 0 | 0 | 100 | 0 | 0 | 0 |
| PLACE6000429 | 0 | 0 | 0 | 100 | 0 | 0 | 0 |
| PLACE6000450 | 0 | 0 | 0 | 100 | 0 | 0 | 0 |
| PLACE6000463 | 0 | 0 | 0 | 13.886 | 0 | 0 | 0 |
| PLACE6000523 | 0 | 0 | 0 | 100 | 0 | 0 | 0 |
| PLACE6000550 | 0 | 0 | 0 | 100 | 0 | 0 | 0 |
| PLACE6000552 | 0 | 0 | 0 | 100 | 0 | 0 | 0 |
| PLACE6000555 | 0 | 0 | 0 | 100 | 0 | 0 | 0 |
| PLACE6000619 | 0 | 0 | 0 | 63.850 | 0 | 0 | 0 |
| PLACE6000630 | 0 | 0 | 0 | 6.867 | 0 | 0 | 0 |
| PLACE6000953 | 0 | 0 | 0 | 100 | 0 | 0 | 0 |
| PLACE6001064 | 0 | 4.312 | 0 | 3.063 | 0 | 0 | 0 |
| PLACE6001118 | 0 | 0 | 0 | 100 | 0 | 0 | 0 |
| PLACE6001153 | 0 | 0 | 0 | 100 | 0 | 0 | 0 |
| PLACE6001185 | 0 | 0 | 0 | 38.010 | 0 | 0 | 0 |
| PLACE6001262 | 0 | 0 | 0 | 15.551 | 0 | 0 | 0 |
| PLACE6001281 | 0 | 0 | 0 | 6.127 | 0 | 19.425 | 0 |
| PLACE6001294 | 0 | 0 | 0 | 100 | 0 | 0 | 0 |
| PLACE6001443 | 0 | 0 | 0 | 10.487 | 0 | 0 | 0 |
| PLACE6001536 | 0 | 0 | 0 | 100 | 0 | 0 | 0 |
| PLACE6001557 | 0 | 0 | 0 | 100 | 0 | 0 | 0 |
| PLACE6001712 | 0 | 0 | 0 | 100 | 0 | 0 | 0 |
| PLACE6001740 | 0 | 0 | 0 | 100 | 0 | 0 | 0 |
| PLACE6001823 | 0 | 0 | 0 | 50.708 | 0 | 0 | 0 |
| PLACE6001886 | 0 | 0 | 0 | 30.140 | 0 | 0 | 0 |
| PLACE6001923 | 0 | 0 | 0 | 11.186 | 0 | 0 | 0 |
| PLACE6001925 | 0 | 0 | 0 | 100 | 0 | 0 | 0 |
| PLACE6001933 | 0 | 0 | 0 | 100 | 0 | 0 | 0 |
| PLACE6002011 | 0 | 0 | 0 | 50.569 | 0 | 0 | 0 |
| PLACE6002016 | 0 | 0 | 0 | 100 | 0 | 0 | 0 |
| PLACE6002056 | 0 | 0 | 0 | 50.569 | 0 | 0 | 0 |
| PLACE6002084 | 0 | 2.776 | 2.488 | 0.657 | 0 | 4.168 | 0 |
| PLACE6002102 | 0 | 0 | 0 | 7.541 | 0 | 0 | 0 |
| PLACE6002157 | 0 | 0 | 0 | 100 | 0 | 0 | 0 |
| PLACE6002312 | 0 | 0 | 0 | 100 | 0 | 0 | 0 |
| PLACE6002323 | 0 | 0 | 0 | 100 | 0 | 0 | 0 |
| PLACE6002345 | 0 | 0 | 0 | 100 | 0 | 0 | 0 |
| PLACE6002419 | 0 | 0 | 0 | 18.553 | 0 | 0 | 0 |
| PLACE6002462 | 0 | 0 | 0 | 100 | 0 | 0 | 0 |
| PLACE6002647 | 0 | 0 | 0 | 100 | 0 | 0 | 0 |
| PLACE6002668 | 0 | 0 | 0 | 9.604 | 0 | 0 | 0 |
| PLACE6002692 | 0 | 0 | 0 | 63.850 | 0 | 0 | 0 |
| PLACE6002699 | 0 | 0 | 0 | 100 | 0 | 0 | 0 |
| PLACE6002710 | 0 | 0 | 0 | 100 | 0 | 0 | 0 |
| PLACE6002871 | 0 | 0 | 0 | 100 | 0 | 0 | 0 |
| PLACE6002949 | 0 | 0 | 0 | 100 | 0 | 0 | 0 |
| PLACE6002960 | 0 | 0 | 7.476 | 25.678 | 0 | 12.525 | 0 |
| PLACE6003004 | 0 | 0 | 0 | 61.610 | 0 | 0 | 0 |
| PLACE6003038 | 0 | 27.127 | 0 | 6.423 | 12.799 | 0 | 0 |
| PLACE6003077 | 0 | 0 | 0 | 45.210 | 0 | 0 | 0 |
| PLACE6003094 | 0 | 0 | 0 | 100 | 0 | 0 | 0 |
| PLACE6003109 | 0 | 0 | 0 | 100 | 0 | 0 | 0 |
| PLACE6003204 | 0 | 0 | 0 | 78.067 | 0 | 0 | 0 |
| PLACE6003218 | 0 | 0 | 0 | 51.794 | 0 | 0 | 0 |
| PLACE6003372 | 0 | 0 | 0 | 100 | 0 | 0 | 0 |
| PLACE6003383 | 0 | 0 | 0 | 2.124 | 12.698 | 0 | 0 |
| PLACE6003393 | 0 | 0 | 0 | 13.514 | 0 | 0 | 0 |
| PLACE6003399 | 0 | 0 | 0 | 100 | 0 | 0 | 0 |
| PLACE6003539 | 0 | 0 | 0 | 100 | 0 | 0 | 0 |
| PLACE6003621 | 0 | 0 | 0 | 71.489 | 0 | 0 | 0 |
| PLACE6003705 | 0 | 0 | 0 | 100 | 0 | 0 | 0 |
| PLACE6003740 | 0 | 0 | 0 | 100 | 0 | 0 | 0 |
| PLACE6003745 | 0 | 0 | 0 | 28.055 | 0 | 29.650 | 0 |
| PLACE6003771 | 0 | 0 | 0 | 100 | 0 | 0 | 0 |
| PLACE6003796 | 0 | 0 | 0 | 100 | 0 | 0 | 0 |
| PLACE6003839 | 0 | 0 | 0 | 100 | 0 | 0 | 0 |
| PLACE6003850 | 0 | 0 | 0 | 19.965 | 0 | 0 | 0 |
| PLACE6004005 | 0 | 0 | 0 | 1.757 | 0 | 0 | 0 |
| PLACE6004101 | 0 | 0 | 0 | 7.929 | 0 | 0 | 0 |
| PLACE6004219 | 0 | 0 | 0 | 100 | 0 | 0 | 0 |
| PLACE6004312 | 0 | 0 | 0 | 2.147 | 2.139 | 0 | 0 |
| PLACE6004336 | 0 | 0 | 0 | 100 | 0 | 0 | 0 |
| PLACE6004368 | 0 | 0 | 0 | 100 | 0 | 0 | 0 |
| PLACE6004380 | 0 | 0 | 0 | 100 | 0 | 0 | 0 |
| PLACE6004396 | 0 | 0 | 0 | 32.670 | 0 | 0 | 0 |
| PLACE6004397 | 0 | 13.816 | 0 | 3.271 | 0 | 10.371 | 0 |
| PLACE6004454 | 0 | 0 | 0 | 100 | 0 | 0 | 0 |
| PLACE6004464 | 0 | 0 | 0 | 67.171 | 0 | 0 | 0 |
| PLACE6004491 | 0 | 0 | 0 | 59.874 | 0 | 0 | 0 |
| PLACE6004578 | 0 | 0 | 0 | 6.618 | 0 | 0 | 0 |
| PLACE6004663 | 0 | 0 | 0 | 100 | 0 | 0 | 0 |
| PLACE6004687 | 0 | 0 | 0 | 100 | 0 | 0 | 0 |
| PLACE6004738 | 0 | 0 | 0 | 74.902 | 0 | 0 | 0 |
| PLACE6004931 | 0 | 0 | 0 | 11.653 | 0 | 0 | 0 |
| PLACE6004966 | 0 | 0 | 0 | 100 | 0 | 0 | 0 |
| PLACE6004993 | 0 | 0 | 0 | 33.936 | 0 | 0 | 0 |
| PLACE6005007 | 0 | 0 | 0 | 100 | 0 | 0 | 0 |
| PLACE6005029 | 0 | 0 | 0 | 100 | 0 | 0 | 0 |
| PLACE6005108 | 0 | 0 | 0 | 100 | 0 | 0 | 0 |
| PLACE6005231 | 0 | 0 | 0 | 19.656 | 0 | 0 | 0 |
| PLACE6005234 | 0 | 0 | 0 | 100 | 0 | 0 | 0 |
| PLACE6005283 | 0 | 0 | 0 | 100 | 0 | 0 | 0 |
| PLACE6005294 | 0 | 0 | 0 | 21.429 | 0 | 0 | 0 |
| PLACE6005328 | 0 | 0 | 0 | 100 | 0 | 0 | 0 |
| PLACE6005351 | 0 | 0 | 0 | 100 | 0 | 0 | 0 |
| PLACE6005423 | 0 | 0 | 0 | 100 | 0 | 0 | 0 |
| PLACE6005482 | 0 | 0 | 0 | 9.412 | 0 | 0 | 0 |
| PLACE6005487 | 0 | 0 | 0 | 6.658 | 0 | 0 | 0 |
| PLACE6005535 | 0 | 0 | 0 | 100 | 0 | 0 | 0 |
| PLACE6005546 | 0 | 0 | 0 | 100 | 0 | 0 | 0 |
| PLACE6005559 | 0 | 0 | 0 | 100 | 0 | 0 | 0 |
| PLACE6005579 | 0 | 0 | 0 | 100 | 0 | 0 | 0 |
| PLACE6005691 | 0 | 0 | 0 | 63.850 | 0 | 0 | 0 |
| PLACE6005786 | 0 | 0 | 0 | 100 | 0 | 0 | 0 |
| PLACE6006042 | 0 | 0 | 0 | 9.688 | 0 | 0 | 0 |
| PLACE6006077 | 0 | 0 | 0 | 100 | 0 | 0 | 0 |
| PLACE6006137 | 0 | 0 | 0 | 6.079 | 0 | 0 | 0 |
| PLACE6006158 | 0 | 0 | 0 | 100 | 0 | 0 | 0 |
| PLACE6006186 | 0 | 0 | 0 | 12.872 | 0 | 0 | 0 |
| PLACE6006217 | 0 | 0 | 0 | 100 | 0 | 0 | 0 |
| PLACE6006222 | 0 | 0 | 0 | 14.870 | 0 | 0 | 0 |
| PLACE6006266 | 0 | 0 | 0 | 100 | 0 | 0 | 0 |
| PLACE6006287 | 0 | 0 | 0 | 100 | 0 | 0 | 0 |
| PLACE6006394 | 0 | 0 | 0 | 100 | 0 | 0 | 0 |
| PLACE6006418 | 0 | 0 | 0 | 9.868 | 0 | 0 | 0 |
| PLACE6006474 | 0 | 0 | 0 | 100 | 0 | 0 | 0 |
| PLACE6006549 | 0 | 0 | 0 | 2.842 | 5.664 | 0 | 0 |
| PLACE6006566 | 0 | 0 | 0 | 100 | 0 | 0 | 0 |
| PLACE6006697 | 0 | 0 | 0 | 100 | 0 | 0 | 0 |
| PLACE6006822 | 0 | 0 | 0 | 100 | 0 | 0 | 0 |
| PLACE6006871 | 0 | 0 | 0 | 100 | 0 | 0 | 0 |
| PLACE6006905 | 0 | 0 | 0 | 100 | 0 | 0 | 0 |
| PLACE6006988 | 0 | 0 | 0 | 58.892 | 0 | 0 | 0 |
| PLACE6007050 | 0 | 0 | 0 | 100 | 0 | 0 | 0 |
| PLACE6007180 | 0 | 0 | 0 | 19.073 | 0 | 0 | 0 |
| PLACE6007239 | 0 | 0 | 0 | 95.382 | 0 | 0 | 0 |
| PLACE6007242 | 0 | 0 | 0 | 100 | 0 | 0 | 0 |
| PLACE6007309 | 0 | 0 | 0 | 32.348 | 0 | 0 | 0 |
| PLACE6007373 | 0 | 0 | 0 | 5.093 | 0 | 0 | 0 |
| PLACE6007380 | 0 | 0 | 0 | 100 | 0 | 0 | 0 |
| PLACE6007433 | 0 | 0 | 0 | 100 | 0 | 0 | 0 |
| PLACE6007436 | 0 | 0 | 0 | 19.181 | 0 | 0 | 0 |
| PLACE6007482 | 0 | 0 | 0 | 100 | 0 | 0 | 0 |
| PLACE6007687 | 0 | 0 | 0 | 100 | 0 | 0 | 0 |
| PLACE6007787 | 0 | 0 | 0 | 100 | 0 | 0 | 0 |
| PLACE6007798 | 0 | 0 | 0 | 100 | 0 | 0 | 0 |
| PLACE6007807 | 0 | 0 | 0 | 100 | 0 | 0 | 0 |
| PLACE6007925 | 0 | 0 | 0 | 18.034 | 0 | 0 | 0 |
| PLACE6008036 | 0 | 0 | 0 | 100 | 0 | 0 | 0 |
| PLACE6008094 | 0 | 0 | 0 | 100 | 0 | 0 | 0 |
| PLACE6008126 | 0 | 0 | 0 | 100 | 0 | 0 | 0 |
| PLACE6008285 | 0 | 0 | 0 | 100 | 0 | 0 | 0 |
| PLACE6008444 | 0 | 0 | 0 | 63.850 | 0 | 0 | 0 |
| PLACE6008453 | 0 | 0 | 0 | 100 | 0 | 0 | 0 |
| PLACE6008640 | 0 | 0 | 0 | 100 | 0 | 0 | 0 |
| PLACE6008750 | 0 | 0 | 0 | 100 | 0 | 0 | 0 |
| PLACE6008768 | 0 | 0 | 0 | 100 | 0 | 0 | 0 |
| PLACE6008775 | 0 | 0 | 0 | 6.560 | 0 | 0 | 0 |
| PLACE6008793 | 0 | 0 | 0 | 2.822 | 0 | 0 | 0 |
| PLACE6008824 | 0 | 0 | 0 | 59.874 | 0 | 0 | 0 |
| PLACE6008989 | 0 | 0 | 0 | 100 | 0 | 0 | 0 |
| PLACE6009006 | 0 | 0 | 0 | 100 | 0 | 0 | 0 |
| PLACE6009008 | 0 | 0 | 0 | 33.415 | 66.585 | 0 | 0 |
| PLACE6009228 | 0 | 0 | 0 | 50.569 | 0 | 0 | 0 |
| PLACE6009237 | 0 | 0 | 0 | 7.653 | 0 | 0 | 0 |
| PLACE6009338 | 0 | 0 | 0 | 44.716 | 0 | 0 | 0 |
| PLACE6009419 | 0 | 0 | 0 | 100 | 0 | 0 | 0 |
| PLACE6009430 | 0 | 0 | 0 | 100 | 0 | 0 | 0 |
| PLACE6009482 | 0 | 0 | 0 | 100 | 0 | 0 | 0 |
| PLACE6009524 | 0 | 0 | 0 | 100 | 0 | 0 | 0 |
| PLACE6009527 | 0 | 0 | 0 | 100 | 0 | 0 | 0 |
| PLACE6009560 | 0 | 0 | 0 | 19.232 | 0 | 0 | 0 |
| PLACE6009590 | 0 | 0 | 0 | 100 | 0 | 0 | 0 |
| PLACE6009821 | 0 | 0 | 0 | 27.404 | 0 | 0 | 0 |
| PLACE6009835 | 0 | 0 | 0 | 100 | 0 | 0 | 0 |
| PLACE6009853 | 0 | 0 | 0 | 100 | 0 | 0 | 0 |
| PLACE6010077 | 0 | 0 | 0 | 4.648 | 0 | 0 | 0 |
| PLACE6010463 | 0 | 0 | 0 | 100 | 0 | 0 | 0 |
| PLACE6010484 | 0 | 11.618 | 0 | 2.751 | 5.482 | 0 | 0 |
| PLACE6010485 | 0 | 0 | 0 | 100 | 0 | 0 | 0 |
| PLACE6010568 | 0 | 0 | 0 | 100 | 0 | 0 | 0 |
| PLACE6010701 | 0 | 0 | 0 | 33.415 | 66.585 | 0 | 0 |
| PLACE6010704 | 0 | 0 | 0 | 64.025 | 0 | 0 | 0 |
| PLACE6010732 | 0 | 0 | 0 | 43.685 | 0 | 0 | 0 |
| PLACE6010765 | 0 | 0 | 79.101 | 20.899 | 0 | 0 | 0 |
| PLACE6010848 | 0 | 0 | 0 | 14.563 | 0 | 0 | 0 |
| PLACE6010925 | 0 | 0 | 0 | 100 | 0 | 0 | 0 |
| PLACE6010936 | 0 | 0 | 0 | 87.601 | 0 | 0 | 0 |
| PLACE6010991 | 0 | 0 | 0 | 100 | 0 | 0 | 0 |
| PLACE6011041 | 0 | 0 | 0 | 29.052 | 0 | 0 | 0 |
| PLACE6011057 | 0 | 0 | 0 | 8.022 | 0 | 0 | 0 |
| PLACE6011102 | 0 | 0 | 0 | 100 | 0 | 0 | 0 |
| PLACE6011156 | 0 | 0 | 0 | 23.174 | 0 | 0 | 0 |
| PLACE6011211 | 0 | 0 | 0 | 100 | 0 | 0 | 0 |
| PLACE6011260 | 0 | 0 | 0 | 100 | 0 | 0 | 0 |
| PLACE6011334 | 0 | 0 | 0 | 15.995 | 0 | 0 | 0 |
| PLACE6011627 | 0 | 0 | 0 | 58.892 | 0 | 0 | 0 |
| PLACE6011774 | 0 | 0 | 0 | 100 | 0 | 0 | 0 |
| PLACE6011881 | 0 | 0 | 0 | 100 | 0 | 0 | 0 |
| PLACE6011907 | 0 | 0 | 0 | 100 | 0 | 0 | 0 |
| PLACE6011970 | 0 | 0 | 0 | 46.156 | 0 | 0 | 0 |
| PLACE6011975 | 0 | 0 | 0 | 100 | 0 | 0 | 0 |
| PLACE6012028 | 0 | 0 | 0 | 11.172 | 0 | 0 | 0 |
| PLACE6012108 | 0 | 0 | 0 | 100 | 0 | 0 | 0 |
| PLACE6012168 | 0 | 0 | 0 | 100 | 0 | 0 | 0 |
| PLACE6012297 | 0 | 0 | 0 | 100 | 0 | 0 | 0 |
| PLACE6012308 | 0 | 0 | 0 | 100 | 0 | 0 | 0 |
| PLACE6012574 | 0 | 0 | 0 | 12.733 | 0 | 0 | 0 |
| PLACE6012908 | 0 | 0 | 0 | 100 | 0 | 0 | 0 |
| PLACE6012936 | 0 | 0 | 0 | 68.095 | 0 | 0 | 0 |
| PLACE6012942 | 0 | 0 | 0 | 59.874 | 0 | 0 | 0 |
| PLACE6013222 | 0 | 0 | 0 | 17.538 | 0 | 0 | 0 |
| PLACE6013232 | 0 | 0 | 0 | 20.563 | 0 | 0 | 0 |
| PLACE6013288 | 0 | 0 | 0 | 100 | 0 | 0 | 0 |
| PLACE6013386 | 0 | 0 | 0 | 100 | 0 | 0 | 0 |
| PLACE6013400 | 0 | 0 | 0 | 100 | 0 | 0 | 0 |
| PLACE6013650 | 0 | 0 | 0 | 100 | 0 | 0 | 0 |
| PLACE6013672 | 0 | 0 | 0 | 49.147 | 0 | 0 | 0 |
| PLACE6013883 | 0 | 0 | 0 | 61.610 | 0 | 0 | 0 |
| PLACE6013884 | 0 | 0 | 0 | 100 | 0 | 0 | 0 |
| PLACE6013885 | 0 | 0 | 0 | 100 | 0 | 0 | 0 |
| PLACE6014043 | 0 | 0 | 0 | 100 | 0 | 0 | 0 |
| PLACE6014064 | 0 | 0 | 0 | 5.447 | 0 | 0 | 66.593 |
| PLACE6014516 | 0 | 0 | 0 | 100 | 0 | 0 | 0 |
| PLACE6014882 | 0 | 0 | 0 | 21.139 | 0 | 0 | 0 |
| PLACE6015051 | 0 | 0 | 0 | 8.204 | 0 | 0 | 0 |
| PLACE6015211 | 0 | 0 | 0 | 100 | 0 | 0 | 0 |
| PLACE6015322 | 0 | 0 | 0 | 50.569 | 0 | 0 | 0 |
| PLACE6015445 | 0 | 0 | 0 | 19.777 | 0 | 0 | 0 |
| PLACE6015460 | 0 | 0 | 0 | 100 | 0 | 0 | 0 |
| PLACE6015513 | 0 | 0 | 0 | 45.210 | 0 | 0 | 0 |
| PLACE6015591 | 0 | 0 | 0 | 100 | 0 | 0 | 0 |
| PLACE6015729 | 0 | 0 | 0 | 63.850 | 0 | 0 | 0 |
| PLACE6015731 | 0 | 0 | 0 | 27.317 | 0 | 0 | 0 |
| PLACE6015939 | 0 | 0 | 0 | 100 | 0 | 0 | 0 |
| PLACE6016030 | 0 | 0 | 0 | 100 | 0 | 0 | 0 |
| PLACE6016093 | 0 | 0 | 0 | 100 | 0 | 0 | 0 |
| PLACE6016105 | 0 | 0 | 0 | 100 | 0 | 0 | 0 |
| PLACE6016160 | 0 | 0 | 0 | 100 | 0 | 0 | 0 |
| PLACE6016210 | 0 | 0 | 0 | 22.537 | 0 | 0 | 0 |
| PLACE6016254 | 0 | 0 | 0 | 32.516 | 0 | 0 | 0 |
| PLACE6016383 | 0 | 0 | 0 | 11.505 | 0 | 0 | 0 |
| PLACE6016942 | 0 | 0 | 0 | 6.962 | 0 | 0 | 0 |
| PLACE6016984 | 0 | 0 | 0 | 65.750 | 0 | 0 | 0 |
| PLACE6017002 | 0 | 0 | 0 | 100 | 0 | 0 | 0 |
| PLACE6017431 | 0 | 0 | 0 | 59.874 | 0 | 0 | 0 |
| PLACE6017564 | 0 | 0 | 0 | 100 | 0 | 0 | 0 |
| PLACE6017578 | 0 | 0 | 0 | 36.001 | 0 | 0 | 0 |
| PLACE6017626 | 0 | 0 | 0 | 50.519 | 0 | 0 | 0 |
| PLACE6017701 | 0 | 0 | 0 | 43.685 | 0 | 0 | 0 |
| PLACE6017714 | 0 | 0 | 0 | 100 | 0 | 0 | 0 |
| PLACE6017788 | 0 | 0 | 0 | 73.137 | 0 | 0 | 0 |
| PLACE6017791 | 0 | 0 | 0 | 19.547 | 0 | 0 | 0 |
| PLACE6018031 | 0 | 0 | 0 | 11.966 | 0 | 0 | 0 |
| PLACE6018107 | 0 | 0 | 0 | 100 | 0 | 0 | 0 |
| PLACE6018187 | 0 | 0 | 0 | 100 | 0 | 0 | 0 |
| PLACE6018235 | 0 | 0 | 0 | 100 | 0 | 0 | 0 |
| PLACE6018287 | 0 | 0 | 0 | 84.484 | 0 | 0 | 0 |
| PLACE6018441 | 0 | 0 | 0 | 100 | 0 | 0 | 0 |
| PLACE6018487 | 0 | 0 | 0 | 1.188 | 0 | 0 | 0 |
| PLACE6018497 | 0 | 0 | 0 | 100 | 0 | 0 | 0 |
| PLACE6018769 | 0 | 0 | 0 | 100 | 0 | 0 | 0 |
| PLACE6018834 | 0 | 0 | 0 | 100 | 0 | 0 | 0 |
| PLACE6018843 | 0 | 0 | 0 | 100 | 0 | 0 | 0 |
| PLACE6018863 | 0 | 0 | 0 | 33.796 | 0 | 0 | 0 |
| PLACE6018938 | 0 | 0 | 0 | 54.615 | 0 | 0 | 0 |
| PLACE6019195 | 0 | 0 | 0 | 30.202 | 0 | 0 | 0 |
| PLACE6019385 | 0 | 0 | 0 | 7.219 | 0 | 0 | 0 |
| PLACE6019542 | 0 | 0 | 0 | 100 | 0 | 0 | 0 |
| PLACE6019600 | 0 | 0 | 0 | 100 | 0 | 0 | 0 |
| PLACE6019674 | 0 | 0 | 0 | 100 | 0 | 0 | 0 |
| PLACE6019676 | 0 | 0 | 0 | 100 | 0 | 0 | 0 |
| PLACE6019701 | 0 | 0 | 0 | 100 | 0 | 0 | 0 |
| PLACE6019932 | 0 | 0 | 0 | 7.719 | 0 | 0 | 0 |
| PLACE6020031 | 0 | 0 | 0 | 100 | 0 | 0 | 0 |
| PLACE6020145 | 0 | 0 | 0 | 14.936 | 0 | 0 | 0 |
| PLACE7000167 | 0 | 0 | 0 | 100 | 0 | 0 | 0 |
| PLACE7000170 | 0 | 0 | 0 | 100 | 0 | 0 | 0 |
| PLACE7000266 | 0 | 0 | 0 | 100 | 0 | 0 | 0 |
| PLACE7000333 | 0 | 0 | 0 | 100 | 0 | 0 | 0 |
| PLACE7000410 | 0 | 0 | 0 | 61.610 | 0 | 0 | 0 |
| PLACE7000502 | 0 | 0 | 0 | 100 | 0 | 0 | 0 |
| PLACE7000707 | 0 | 0 | 0 | 100 | 0 | 0 | 0 |
| PLACE7001022 | 0 | 0 | 0 | 50.083 | 0 | 0 | 0 |
| PLACE7001544 | 0 | 0 | 0 | 100 | 0 | 0 | 0 |
| PLACE7001759 | 0 | 0 | 0 | 100 | 0 | 0 | 0 |
| PLACE7001936 | 0 | 0 | 0 | 100 | 0 | 0 | 0 |
| PLACE7002303 | 0 | 0 | 0 | 100 | 0 | 0 | 0 |
| PLACE7002641 | 0 | 0 | 0 | 100 | 0 | 0 | 0 |
| PLACE7003639 | 0 | 0 | 0 | 100 | 0 | 0 | 0 |
| PLACE7003657 | 0 | 0 | 0 | 100 | 0 | 0 | 0 |
| PLACE7003684 | 0 | 0 | 0 | 100 | 0 | 0 | 0 |
| PLACE7003985 | 0 | 0 | 0 | 100 | 0 | 0 | 0 |
| PLACE7004103 | 0 | 0 | 0 | 11.508 | 0 | 0 | 0 |
| PLACE7004961 | 0 | 0 | 0 | 100 | 0 | 0 | 0 |
| PLACE7005169 | 0 | 0 | 0 | 100 | 0 | 0 | 0 |
| PLACE7005671 | 0 | 0 | 0 | 100 | 0 | 0 | 0 |
| PLACE7005840 | 0 | 0 | 0 | 68.095 | 0 | 0 | 0 |
| PLACE7006051 | 0 | 0 | 0 | 100 | 0 | 0 | 0 |
| PLACE7006090 | 0 | 0 | 0 | 100 | 0 | 0 | 0 |
| PLACE7006240 | 0 | 0 | 0 | 44.802 | 0 | 0 | 0 |
| PLACE7006268 | 0 | 0 | 0 | 33.415 | 66.585 | 0 | 0 |
| PLACE7006275 | 0 | 0 | 0 | 100 | 0 | 0 | 0 |
| PLACE7006498 | 0 | 0 | 0 | 100 | 0 | 0 | 0 |
| PLACE7006540 | 0 | 0 | 0 | 100 | 0 | 0 | 0 |
| PLACE7007379 | 0 | 0 | 0 | 100 | 0 | 0 | 0 |
| PLACE7007644 | 0 | 0 | 0 | 100 | 0 | 0 | 0 |
| PLACE7007973 | 0 | 0 | 0 | 100 | 0 | 0 | 0 |
| PLACE7008136 | 0 | 0 | 0 | 100 | 0 | 0 | 0 |
| PLACE7008261 | 0 | 0 | 0 | 50.708 | 0 | 0 | 0 |
| PLACE7008431 | 0 | 0 | 0 | 100 | 0 | 0 | 0 |
| PLACE7008623 | 0 | 0 | 0 | 100 | 0 | 0 | 0 |
| PLACE7008766 | 0 | 0 | 0 | 100 | 0 | 0 | 0 |
| PLACE7009563 | 0 | 0 | 0 | 100 | 0 | 0 | 0 |
| PROST1000033 | 0 | 0 | 0 | 0 | 39.071 | 0 | 0 |
| PROST1000039 | 0 | 0 | 0 | 0 | 100 | 0 | 0 |
| PROST1000065 | 0 | 0 | 0 | 0 | 100 | 0 | 0 |
| PROST1000083 | 0 | 0 | 0 | 0 | 100 | 0 | 0 |
| PROST1000085 | 0 | 0 | 0 | 0 | 24.534 | 0 | 0 |
| PROST1000097 | 0 | 0 | 7.922 | 2.093 | 2.085 | 0 | 0 |
| PROST1000110 | 0 | 0 | 0 | 0 | 100 | 0 | 0 |
| PROST1000120 | 0 | 24.787 | 0 | 5.869 | 11.695 | 18.607 | 0 |
| PROST1000123 | 0 | 0 | 0 | 0 | 100 | 0 | 0 |
| PROST1000136 | 0 | 0 | 0 | 0 | 100 | 0 | 0 |
| PROST1000144 | 0 | 0 | 0 | 2.790 | 5.560 | 0 | 0 |
| PROST1000145 | 0 | 0 | 0 | 0 | 100 | 0 | 0 |
| PROST1000152 | 0 | 0 | 0 | 0 | 100 | 0 | 0 |
| PROST1000167 | 0 | 0 | 0 | 0 | 100 | 0 | 0 |
| PROST1000184 | 0 | 0 | 0 | 0 | 100 | 0 | 0 |
| PROST1000199 | 0 | 0 | 0 | 1.300 | 5.182 | 0 | 0 |
| PROST1000215 | 0 | 0 | 0 | 0 | 18.139 | 28.860 | 0 |
| PROST1000217 | 0 | 0 | 0 | 0 | 100 | 0 | 0 |
| PROST1000220 | 0 | 0 | 0 | 0 | 43.340 | 0 | 0 |
| PROST1000226 | 0 | 0 | 0 | 6.368 | 12.690 | 0 | 0 |
| PROST1000246 | 0 | 0 | 0 | 0 | 38.964 | 0 | 0 |
| PROST1000262 | 0 | 0 | 0 | 0 | 100 | 0 | 0 |
| PROST1000272 | 0 | 0 | 0 | 0 | 11.190 | 0 | 0 |
| PROST1000298 | 0 | 0 | 0 | 0 | 100 | 0 | 0 |
| PROST1000322 | 0 | 0 | 0 | 0 | 42.387 | 0 | 0 |
| PROST1000334 | 0 | 0 | 0 | 0 | 100 | 0 | 0 |
| PROST1000343 | 0 | 0 | 0 | 0 | 10.074 | 0 | 0 |
| PROST1000362 | 0 | 0 | 0 | 0 | 100 | 0 | 0 |
| PROST1000377 | 0 | 0 | 0 | 0 | 100 | 0 | 0 |
| PROST1000383 | 0 | 0 | 0 | 0 | 76.179 | 0 | 0 |
| PROST1000412 | 0 | 0 | 0 | 0 | 100 | 0 | 0 |
| PROST1000419 | 0 | 0 | 0 | 0 | 100 | 0 | 0 |
| PROST1000451 | 0 | 0 | 0 | 0 | 100 | 0 | 0 |
| PROST1000480 | 0 | 0 | 0 | 0 | 67.090 | 0 | 0 |
| PROST1000485 | 0 | 0 | 0 | 0 | 100 | 0 | 0 |
| PROST1000493 | 0 | 0 | 0 | 0 | 100 | 0 | 0 |
| PROST1000512 | 0 | 0 | 0 | 0 | 53.436 | 0 | 0 |
| PROST1000526 | 0 | 0 | 0 | 0 | 8.960 | 0 | 0 |
| PROST1000527 | 0 | 0 | 0 | 0 | 100 | 0 | 0 |
| PROST1000528 | 0 | 0 | 0 | 0 | 100 | 0 | 0 |
| PROST1000536 | 0 | 0 | 0 | 10.700 | 42.645 | 0 | 0 |
| PROST1000559 | 0 | 0 | 0 | 0 | 100 | 0 | 0 |
| PROST1000564 | 0 | 0 | 0 | 0 | 4.767 | 0 | 0 |
| PROST1000575 | 0 | 0 | 0 | 0 | 100 | 0 | 0 |
| PROST2000036 | 0 | 0 | 0 | 0 | 9.969 | 0 | 0 |
| PROST2000053 | 0 | 0 | 0 | 0 | 100 | 0 | 0 |
| PROST2000067 | 0 | 0 | 0 | 0 | 100 | 0 | 0 |
| PROST2000079 | 0 | 0 | 0 | 0 | 10.615 | 0 | 0 |
| PROST2000105 | 0 | 0 | 0 | 0 | 100 | 0 | 0 |
| PROST2000138 | 0 | 0.651 | 1.168 | 3.085 | 1.537 | 0 | 0 |
| PROST2000143 | 0 | 0 | 0 | 0 | 100 | 0 | 0 |
| PROST2000162 | 0 | 0 | 0 | 0 | 100 | 0 | 0 |
| PROST2000165 | 0 | 0 | 0 | 0 | 32.383 | 0 | 0 |
| PROST2000176 | 0 | 0 | 0 | 0 | 9.001 | 0 | 0 |
| PROST2000203 | 0 | 0 | 0 | 0 | 100 | 0 | 0 |
| PROST2000206 | 0 | 0 | 0 | 0 | 77.659 | 0 | 0 |
| PROST2000212 | 0 | 0 | 0 | 0 | 100 | 0 | 0 |
| PROST2000241 | 0 | 0 | 0 | 0 | 21.702 | 0 | 0 |
| PROST2000267 | 0 | 0 | 0 | 0 | 100 | 0 | 0 |
| PROST2000273 | 0 | 0 | 0 | 0 | 74.833 | 0 | 0 |
| PROST2000274 | 0 | 0 | 0 | 18.366 | 36.598 | 0 | 0 |
| PROST2000277 | 0 | 0 | 0 | 0 | 75.996 | 0 | 0 |
| PROST2000284 | 0 | 0 | 0 | 0 | 12.419 | 0 | 0 |
| PROST2000325 | 0 | 53.208 | 0 | 0 | 25.104 | 0 | 0 |
| PROST2000337 | 0 | 0 | 0 | 0 | 65.749 | 0 | 0 |
| PROST2000432 | 0 | 0 | 0 | 0 | 48.885 | 0 | 0 |
| PROST2000452 | 0 | 0 | 0 | 0 | 100 | 0 | 0 |
| PROST2000463 | 0 | 0 | 0 | 0 | 60.719 | 0 | 0 |
| PROST2000470 | 0 | 0 | 0 | 0 | 100 | 0 | 0 |
| PROST2000505 | 0 | 0 | 0 | 0 | 100 | 0 | 0 |
| PROST2000567 | 0 | 0 | 0 | 0 | 50.797 | 0 | 0 |
| PROST2000572 | 0 | 0 | 0 | 0 | 100 | 0 | 0 |
| PROST2000717 | 0 | 0 | 0 | 0 | 100 | 0 | 0 |
| PROST2000760 | 0 | 0 | 0 | 0 | 9.948 | 0 | 0 |
| PROST2000761 | 0 | 0 | 0 | 0 | 33.566 | 0 | 0 |
| PROST2000835 | 0 | 0 | 0 | 0 | 75.996 | 0 | 0 |
| PROST2000893 | 0 | 0 | 0 | 0 | 58.722 | 0 | 0 |
| PROST2000961 | 0 | 0 | 0 | 0 | 100 | 0 | 0 |
| PROST2001002 | 0 | 0 | 0 | 0 | 69.674 | 0 | 0 |
| PROST2001116 | 0 | 0 | 0 | 0 | 75.996 | 0 | 0 |
| PROST2001138 | 0 | 0 | 0 | 0 | 100 | 0 | 0 |
| PROST2001180 | 0 | 0 | 0 | 0 | 8.805 | 0 | 0 |
| PROST2001213 | 0 | 0 | 0 | 0 | 59.127 | 0 | 0 |
| PROST2001283 | 0 | 0 | 0 | 0 | 7.546 | 0 | 0 |
| PROST2001414 | 0 | 0 | 0 | 0 | 100 | 0 | 0 |
| PROST2001415 | 0 | 0 | 0 | 0 | 100 | 0 | 0 |
| PROST2001465 | 0 | 0 | 0 | 0 | 100 | 0 | 0 |
| PROST2001521 | 0 | 0 | 0 | 0 | 4.309 | 0 | 52.873 |
| PROST2001540 | 0 | 0 | 0 | 0 | 100 | 0 | 0 |
| PROST2001552 | 0 | 0 | 0 | 0 | 3.087 | 0 | 0 |
| PROST2001599 | 0 | 0 | 0 | 0 | 100 | 0 | 0 |
| PROST2001611 | 0 | 0 | 0 | 0 | 100 | 0 | 0 |
| PROST2001636 | 0 | 0 | 0 | 0 | 100 | 0 | 0 |
| PROST2001739 | 0 | 0 | 0 | 0 | 11.723 | 0 | 0 |
| PROST2001796 | 0 | 0 | 0 | 0 | 100 | 0 | 0 |
| PROST2001805 | 0 | 0 | 0 | 0 | 100 | 0 | 0 |
| PROST2001823 | 0 | 0 | 0 | 0 | 65.749 | 0 | 0 |
| PROST2001883 | 0 | 0 | 0 | 0 | 3.167 | 0 | 0 |
| PROST2001899 | 0 | 0 | 0 | 0 | 100 | 0 | 0 |
| PROST2001997 | 0 | 0 | 0 | 0 | 20.676 | 0 | 0 |
| PROST2001998 | 0 | 0 | 0 | 0 | 100 | 0 | 0 |
| PROST2002078 | 0 | 0 | 0 | 0 | 8.618 | 0 | 0 |
| PROST2002101 | 0 | 0 | 0 | 0 | 100 | 0 | 0 |
| PROST2002162 | 0 | 0 | 0 | 0 | 13.729 | 0 | 0 |
| PROST2002212 | 0 | 0 | 0 | 0 | 100 | 0 | 0 |
| PROST2002227 | 0 | 0 | 0 | 0 | 9.014 | 0 | 0 |
| PROST2002338 | 0 | 0 | 0 | 0 | 100 | 0 | 0 |
| PROST2002425 | 0 | 0 | 0 | 0 | 56.349 | 0 | 0 |
| PROST2002488 | 0 | 0 | 0 | 0 | 100 | 0 | 0 |
| PROST2002489 | 0 | 0 | 0 | 0 | 100 | 0 | 0 |
| PROST2002527 | 0 | 0 | 0 | 0 | 100 | 0 | 0 |
| PROST2002591 | 0 | 0 | 0 | 0 | 100 | 0 | 0 |
| PROST2002602 | 0 | 0 | 0 | 0 | 100 | 0 | 0 |
| PROST2002633 | 0 | 0 | 0 | 0 | 100 | 0 | 0 |
| PROST2002651 | 0 | 0 | 0 | 0 | 10.605 | 0 | 0 |
| PROST2002682 | 0 | 0 | 0 | 0 | 100 | 0 | 0 |
| PROST2002685 | 0 | 0 | 0 | 0 | 100 | 0 | 0 |
| PROST2002722 | 0 | 0 | 0 | 0 | 100 | 0 | 0 |
| PROST2002736 | 0 | 0 | 0 | 0 | 100 | 0 | 0 |
| PROST2002842 | 0 | 0 | 0 | 0 | 100 | 0 | 0 |
| PROST2002897 | 0 | 0 | 0 | 0 | 75.996 | 0 | 0 |
| PROST2002906 | 0 | 0 | 0 | 0 | 100 | 0 | 0 |
| PROST2002927 | 0 | 0 | 0 | 0 | 37.967 | 0 | 0 |
| PROST2002960 | 0 | 0 | 0 | 0 | 47.668 | 0 | 0 |
| PROST2003102 | 0 | 0 | 0 | 0 | 100 | 0 | 0 |
| PROST2003117 | 0 | 0 | 0 | 0 | 100 | 0 | 0 |
| PROST2003210 | 0 | 0 | 0 | 0 | 100 | 0 | 0 |
| PROST2003232 | 0 | 0 | 0 | 1.214 | 4.839 | 0 | 0 |
| PROST2003302 | 0 | 0 | 0 | 0 | 100 | 0 | 0 |
| PROST2003303 | 0 | 0 | 0 | 0 | 100 | 0 | 0 |
| PROST2003324 | 0 | 0 | 0 | 0 | 62.709 | 0 | 0 |
| PROST2003338 | 0 | 0 | 0 | 0 | 3.969 | 6.316 | 0 |
| PROST2003340 | 0 | 0 | 0 | 0 | 100 | 0 | 0 |
| PROST2003396 | 0 | 0 | 0 | 21.264 | 21.187 | 0 | 0 |
| PROST2003428 | 0 | 0 | 0 | 0 | 67.090 | 0 | 0 |
| PROST2003472 | 0 | 0 | 0 | 0 | 100 | 0 | 0 |
| PROST2003517 | 0 | 0 | 0 | 0 | 18.673 | 0 | 0 |
| PROST2003537 | 0 | 0 | 0 | 0 | 75.996 | 0 | 0 |
| PROST2003563 | 0 | 0 | 0 | 0 | 100 | 0 | 0 |
| PROST2003577 | 0 | 0 | 0 | 0 | 100 | 0 | 0 |
| PROST2003583 | 0 | 0 | 0 | 0 | 100 | 0 | 0 |
| PROST2003586 | 0 | 0 | 0 | 0 | 100 | 0 | 0 |
| PROST2003628 | 0 | 0 | 0 | 0 | 100 | 0 | 0 |
| PROST2003635 | 0 | 0 | 0 | 0 | 100 | 0 | 0 |
| PROST2003674 | 0 | 0 | 0 | 0 | 100 | 0 | 0 |
| PROST2003676 | 0 | 0 | 0 | 0 | 100 | 0 | 0 |
| PROST2003725 | 0 | 0 | 0 | 0 | 80.963 | 0 | 0 |
| PROST2003732 | 0 | 0 | 0 | 0 | 100 | 0 | 0 |
| PROST2003775 | 0 | 0 | 0 | 0 | 100 | 0 | 0 |
| PROST2003922 | 0 | 0 | 0 | 0 | 100 | 0 | 0 |
| PROST2003930 | 0 | 0 | 0 | 0 | 100 | 0 | 0 |
| PROST2004095 | 0 | 0 | 0 | 0.833 | 4.980 | 0 | 0 |
| PROST2004115 | 0 | 0 | 0 | 0 | 100 | 0 | 0 |
| PROST2004142 | 0 | 0 | 0 | 0 | 100 | 0 | 0 |
| PROST2004146 | 0 | 0 | 0 | 0 | 100 | 0 | 0 |
| PROST2004161 | 0 | 0 | 0 | 0 | 100 | 0 | 0 |
| PROST2004251 | 0 | 0 | 0 | 0 | 3.177 | 0 | 0 |
| PROST2004258 | 0 | 0 | 0 | 0 | 27.061 | 0 | 0 |
| PROST2004270 | 0 | 0 | 0 | 0 | 10.427 | 0 | 0 |
| PROST2004332 | 0 | 0 | 0 | 0 | 100 | 0 | 0 |
| PROST2004416 | 0 | 0 | 0 | 1.210 | 2.411 | 0 | 0 |
| PROST2004481 | 0 | 0 | 0 | 0 | 100 | 0 | 0 |
| PROST2004526 | 0 | 0 | 0 | 0 | 100 | 0 | 0 |
| PROST2004570 | 0 | 0 | 0 | 0 | 26.582 | 0 | 0 |
| PROST2004727 | 0 | 0 | 0 | 0 | 100 | 0 | 0 |
| PROST2004739 | 0 | 0 | 0 | 0 | 26.371 | 0 | 0 |
| PROST2004742 | 0 | 0 | 0 | 0 | 100 | 0 | 0 |
| PROST2004744 | 0 | 39.737 | 0 | 0 | 18.748 | 0 | 0 |
| PROST2004817 | 0 | 0 | 0 | 0 | 100 | 0 | 0 |
| PROST2005039 | 0 | 0 | 0 | 0 | 48.872 | 0 | 0 |
| PROST2005067 | 0 | 0 | 0 | 0 | 57.209 | 0 | 0 |
| PROST2005076 | 0 | 0 | 48.502 | 0 | 25.535 | 0 | 0 |
| PROST2005093 | 0 | 0 | 0 | 0 | 83.324 | 0 | 0 |
| PROST2005121 | 0 | 0 | 0 | 0 | 100 | 0 | 0 |
| PROST2005131 | 0 | 0 | 0 | 0 | 100 | 0 | 0 |
| PROST2005143 | 0 | 0 | 0 | 0 | 24.058 | 0 | 0 |
| PROST2005228 | 0 | 0 | 0 | 0 | 100 | 0 | 0 |
| PROST2005272 | 0 | 0 | 0 | 0 | 29.123 | 0 | 0 |
| PROST2005285 | 0 | 0 | 0 | 13.283 | 26.470 | 0 | 0 |
| PROST2005426 | 0 | 0 | 0 | 0 | 100 | 0 | 0 |
| PROST2005466 | 0 | 0 | 0 | 0 | 83.324 | 0 | 0 |
| PROST2005604 | 0 | 0 | 0 | 0 | 11.031 | 0 | 0 |
| PROST2005630 | 0 | 0 | 0 | 0 | 100 | 0 | 0 |
| PROST2005683 | 0 | 0 | 61.281 | 0 | 32.263 | 0 | 0 |
| PROST2005788 | 0 | 0 | 0 | 0 | 100 | 0 | 0 |
| PROST2005793 | 0 | 0 | 0 | 0 | 13.907 | 0 | 0 |
| PROST2005880 | 0 | 0 | 0 | 0 | 100 | 0 | 0 |
| PROST2005886 | 0 | 0 | 0 | 0 | 100 | 0 | 0 |
| PROST2005904 | 0 | 0 | 0 | 0 | 100 | 0 | 0 |
| PROST2005919 | 0 | 0 | 0 | 0 | 100 | 0 | 0 |
| PROST2005943 | 0 | 0 | 0 | 0 | 100 | 0 | 0 |
| PROST2006008 | 0 | 0 | 0 | 0 | 100 | 0 | 0 |
| PROST2006020 | 0 | 0 | 0 | 0 | 100 | 0 | 0 |
| PROST2006030 | 0 | 0 | 0 | 6.734 | 13.418 | 0 | 0 |
| PROST2006060 | 0 | 0 | 0 | 0 | 23.679 | 0 | 0 |
| PROST2006196 | 0 | 0 | 0 | 0 | 100 | 0 | 0 |
| PROST2006201 | 0 | 0 | 0 | 0 | 100 | 0 | 0 |
| PROST2006260 | 0 | 0 | 0 | 7.247 | 14.441 | 0 | 0 |
| PROST2006282 | 0 | 0 | 0 | 0 | 31.502 | 0 | 0 |
| PROST2006343 | 0 | 0 | 0 | 0 | 31.360 | 0 | 0 |
| PROST2006450 | 0 | 0 | 0 | 0 | 100 | 0 | 0 |
| PROST2006491 | 0 | 0 | 0 | 0 | 100 | 0 | 0 |
| PROST2006510 | 0 | 0 | 0 | 0 | 100 | 0 | 0 |
| PROST2006536 | 0 | 0 | 0 | 0 | 23.609 | 0 | 0 |
| PROST2006579 | 0 | 0 | 0 | 0 | 100 | 0 | 0 |
| PROST2006688 | 0 | 0 | 0 | 0 | 100 | 0 | 0 |
| PROST2006737 | 0 | 0 | 0 | 0 | 8.595 | 0 | 0 |
| PROST2006766 | 0 | 0 | 0 | 0 | 100 | 0 | 0 |
| PROST2006782 | 0 | 0 | 0 | 0 | 100 | 0 | 0 |
| PROST2006933 | 0 | 0 | 0 | 0 | 67.090 | 0 | 0 |
| PROST2006988 | 0 | 0 | 0 | 0 | 51.786 | 0 | 0 |
| PROST2007122 | 0 | 0 | 0 | 0 | 100 | 0 | 0 |
| PROST2007200 | 0 | 0 | 0 | 0 | 41.890 | 0 | 0 |
| PROST2007237 | 0 | 0 | 0 | 0 | 100 | 0 | 0 |
| PROST2007248 | 0 | 0 | 0 | 0 | 66.101 | 0 | 0 |
| PROST2007289 | 0 | 0 | 0 | 0 | 100 | 0 | 0 |
| PROST2007317 | 0 | 0 | 0 | 0 | 84.436 | 0 | 0 |
| PROST2007328 | 0 | 0 | 0 | 0 | 100 | 0 | 0 |
| PROST2007382 | 0 | 0 | 0 | 0 | 100 | 0 | 0 |
| PROST2007389 | 0 | 0 | 0 | 0 | 100 | 0 | 0 |
| PROST2007416 | 0 | 0 | 0 | 0 | 100 | 0 | 0 |
| PROST2007528 | 0 | 0 | 0 | 0 | 100 | 0 | 0 |
| PROST2007612 | 0 | 0 | 0 | 0 | 11.325 | 0 | 0 |
| PROST2007818 | 0 | 0 | 0 | 0 | 100 | 0 | 0 |
| PROST2007871 | 0 | 0 | 0 | 0 | 39.115 | 0 | 0 |
| PROST2007950 | 0 | 0 | 0 | 0 | 100 | 0 | 0 |
| PROST2007956 | 0 | 0 | 0 | 0 | 100 | 0 | 0 |
| PROST2007974 | 0 | 0 | 0 | 0 | 100 | 0 | 0 |
| PROST2007988 | 0 | 0 | 0 | 0 | 100 | 0 | 0 |
| PROST2008079 | 0 | 0 | 0 | 0 | 100 | 0 | 0 |
| PROST2008088 | 0 | 0 | 0 | 0 | 100 | 0 | 0 |
| PROST2008243 | 0 | 0 | 0 | 0 | 100 | 0 | 0 |
| PROST2008245 | 0 | 0 | 0 | 0 | 100 | 0 | 0 |
| PROST2008268 | 0 | 0 | 0 | 0 | 65.749 | 0 | 0 |
| PROST2008271 | 0 | 0 | 0 | 0 | 13.898 | 0 | 0 |
| PROST2008360 | 0 | 0 | 0 | 0 | 12.766 | 0 | 0 |
| PROST2008447 | 0 | 0 | 0 | 0 | 100 | 0 | 0 |
| PROST2008468 | 0 | 0 | 0 | 0 | 100 | 0 | 0 |
| PROST2008472 | 0 | 0 | 0 | 0 | 100 | 0 | 0 |
| PROST2008489 | 0 | 0 | 0 | 0 | 2.297 | 7.309 | 0 |
| PROST2008516 | 0 | 0 | 0 | 0 | 100 | 0 | 0 |
| PROST2008724 | 0 | 0 | 0 | 0 | 100 | 0 | 0 |
| PROST2008770 | 0 | 0 | 0 | 0 | 2.766 | 0 | 0 |
| PROST2008835 | 0 | 0 | 0 | 0 | 100 | 0 | 0 |
| PROST2008993 | 0 | 0 | 0 | 0 | 100 | 0 | 0 |
| PROST2009022 | 0 | 0 | 0 | 0 | 100 | 0 | 0 |
| PROST2009208 | 0 | 0 | 0 | 0 | 100 | 0 | 0 |
| PROST2009222 | 0 | 0 | 0 | 0 | 100 | 0 | 0 |
| PROST2009254 | 0 | 0 | 0 | 0 | 100 | 0 | 0 |
| PROST2009273 | 0 | 0 | 0 | 0 | 100 | 0 | 0 |
| PROST2009320 | 0 | 0 | 0 | 0 | 50.124 | 0 | 0 |
| PROST2009347 | 0 | 0 | 0 | 0 | 67.212 | 0 | 0 |
| PROST2009365 | 0 | 0 | 0 | 0 | 100 | 0 | 0 |
| PROST2009388 | 0 | 0 | 0 | 0 | 100 | 0 | 0 |
| PROST2009400 | 0 | 0 | 0 | 21.223 | 42.291 | 0 | 0 |
| PROST2009470 | 0 | 0 | 0 | 0 | 100 | 0 | 0 |
| PROST2009483 | 0 | 0 | 0 | 0 | 100 | 0 | 0 |
| PROST2009571 | 0 | 0 | 0 | 0 | 100 | 0 | 0 |
| PROST2009731 | 0 | 0 | 0 | 0 | 3.846 | 0 | 0 |
| PROST2009736 | 0 | 0 | 0 | 0 | 100 | 0 | 0 |
| PROST2009795 | 0 | 0 | 0 | 0 | 100 | 0 | 0 |
| PROST2009901 | 0 | 0 | 0 | 0 | 100 | 0 | 0 |
| PROST2009909 | 0 | 0 | 0 | 0 | 100 | 0 | 0 |
| PROST2010046 | 0 | 0 | 0 | 0 | 100 | 0 | 0 |
| PROST2010219 | 0 | 0 | 0 | 0 | 75.996 | 0 | 0 |
| PROST2010250 | 0 | 0 | 0 | 0 | 100 | 0 | 0 |
| PROST2010318 | 0 | 0 | 0 | 0 | 85.605 | 0 | 0 |
| PROST2010326 | 0 | 0 | 0 | 0 | 100 | 0 | 0 |
| PROST2010382 | 0 | 0 | 0 | 0 | 11.098 | 0 | 0 |
| PROST2010400 | 0 | 0 | 0 | 0 | 100 | 0 | 0 |
| PROST2010545 | 0 | 0 | 0 | 0 | 46.670 | 0 | 0 |
| PROST2010579 | 0 | 0 | 0 | 0 | 66.659 | 0 | 0 |
| PROST2010606 | 0 | 0 | 0 | 0 | 100 | 0 | 0 |
| PROST2010782 | 0 | 0 | 0 | 0.866 | 2.587 | 0 | 0 |
| PROST2010885 | 0 | 0 | 0 | 0 | 100 | 0 | 0 |
| PROST2011012 | 0 | 0 | 0 | 0 | 100 | 0 | 0 |
| PROST2011038 | 0 | 0 | 0 | 0 | 42.556 | 0 | 0 |
| PROST2011105 | 0 | 0 | 0 | 0 | 63.107 | 0 | 0 |
| PROST2011297 | 0 | 0 | 0 | 0 | 100 | 0 | 0 |
| PROST2011410 | 0 | 0 | 0 | 0 | 14.062 | 0 | 0 |
| PROST2011439 | 0 | 0 | 0 | 0 | 100 | 0 | 0 |
| PROST2011482 | 0 | 0 | 0 | 0 | 65.749 | 0 | 0 |
| PROST2011577 | 0 | 0 | 0 | 0 | 3.649 | 0 | 0 |
| PROST2011631 | 0 | 0 | 0 | 0 | 100 | 0 | 0 |
| PROST2011660 | 0 | 0 | 0 | 0 | 83.324 | 0 | 0 |
| PROST2012005 | 0 | 0 | 0 | 0 | 100 | 0 | 0 |
| PROST2012007 | 0 | 0 | 0 | 2.020 | 4.025 | 0 | 0 |
| PROST2012016 | 0 | 0 | 0 | 0 | 77.874 | 0 | 0 |
| PROST2012088 | 0 | 0 | 0 | 0 | 100 | 0 | 0 |
| PROST2012140 | 0 | 0 | 0 | 0 | 65.565 | 0 | 0 |
| PROST2012157 | 0 | 0 | 0 | 0 | 100 | 0 | 0 |
| PROST2012190 | 0 | 0 | 0 | 0 | 100 | 0 | 0 |
| PROST2012249 | 0 | 0 | 0 | 0 | 100 | 0 | 0 |
| PROST2012353 | 0 | 0 | 0 | 0 | 33.336 | 0 | 0 |
| PROST2012400 | 0 | 0 | 0 | 0 | 100 | 0 | 0 |
| PROST2012448 | 0 | 0 | 0 | 0 | 28.935 | 0 | 0 |
| PROST2012504 | 0 | 0 | 0 | 0 | 80.963 | 0 | 0 |
| PROST2012542 | 0 | 0 | 0 | 0 | 100 | 0 | 0 |
| PROST2012550 | 0 | 0 | 0 | 0 | 100 | 0 | 0 |
| PROST2012740 | 0 | 0 | 0 | 0 | 100 | 0 | 0 |
| PROST2012745 | 0 | 0 | 0 | 0 | 13.715 | 0 | 0 |
| PROST2012780 | 0 | 0 | 0 | 0 | 25.798 | 0 | 0 |
| PROST2012888 | 0 | 0 | 0 | 0 | 59.538 | 0 | 0 |
| PROST2012890 | 0 | 0 | 0 | 0 | 54.091 | 0 | 0 |
| PROST2013032 | 0 | 0 | 0 | 0 | 100 | 0 | 0 |
| PROST2013053 | 0 | 0 | 0 | 5.271 | 10.504 | 0 | 0 |
| PROST2013121 | 0 | 0 | 0 | 19.142 | 38.145 | 0 | 0 |
| PROST2013260 | 0 | 0 | 0 | 0 | 100 | 0 | 0 |
| PROST2013327 | 0 | 0 | 0 | 0 | 100 | 0 | 0 |
| PROST2013531 | 0 | 0 | 0 | 0 | 100 | 0 | 0 |
| PROST2013605 | 0 | 0 | 0 | 0 | 100 | 0 | 0 |
| PROST2013627 | 0 | 0 | 0 | 0 | 100 | 0 | 0 |
| PROST2013873 | 0 | 0 | 0 | 0 | 100 | 0 | 0 |
| PROST2013880 | 0 | 0 | 0 | 0 | 100 | 0 | 0 |
| PROST2014422 | 0 | 0 | 0 | 0 | 100 | 0 | 0 |
| PROST2014585 | 0 | 0 | 0 | 0 | 100 | 0 | 0 |
| PROST2014601 | 0 | 0 | 0 | 0 | 100 | 0 | 0 |
| PROST2014659 | 0 | 0 | 0 | 0 | 100 | 0 | 0 |
| PROST2014862 | 0 | 0 | 0 | 0 | 56.349 | 0 | 0 |
| PROST2014916 | 0 | 0 | 0 | 0 | 12.920 | 0 | 0 |
| PROST2014925 | 0 | 0 | 0 | 0 | 100 | 0 | 0 |
| PROST2015124 | 0 | 0 | 0 | 0 | 100 | 0 | 0 |
| PROST2015137 | 0 | 0 | 0 | 0 | 65.163 | 0 | 0 |
| PROST2015198 | 0 | 0 | 0 | 0 | 100 | 0 | 0 |
| PROST2015243 | 0 | 0 | 0 | 0 | 100 | 0 | 0 |
| PROST2015246 | 0 | 0 | 0 | 0 | 100 | 0 | 0 |
| PROST2015251 | 0 | 0 | 0 | 0 | 76.179 | 0 | 0 |
| PROST2015287 | 0 | 0 | 0 | 0 | 38.071 | 0 | 0 |
| PROST2015332 | 0 | 0 | 17.362 | 0 | 9.141 | 0 | 0 |
| PROST2015457 | 0 | 0 | 0 | 0 | 100 | 0 | 0 |
| PROST2015464 | 0 | 0 | 0 | 0 | 6.083 | 0 | 37.318 |
| PROST2015537 | 0 | 0 | 0 | 0 | 100 | 0 | 0 |
| PROST2015545 | 0 | 0 | 0 | 0 | 100 | 0 | 0 |
| PROST2015551 | 0 | 0 | 0 | 0 | 100 | 0 | 0 |
| PROST2015636 | 0 | 0 | 0 | 0 | 100 | 0 | 0 |
| PROST2015710 | 0 | 0 | 0 | 0 | 43.675 | 0 | 0 |
| PROST2015756 | 0 | 0 | 0 | 0 | 100 | 0 | 0 |
| PROST2015877 | 0 | 0 | 0 | 0 | 100 | 0 | 0 |
| PROST2015900 | 0 | 0 | 0 | 0 | 83.324 | 0 | 0 |
| PROST2015924 | 0 | 50.935 | 0 | 0 | 24.031 | 0 | 0 |
| PROST2015932 | 0 | 0 | 0 | 0 | 100 | 0 | 0 |
| PROST2016195 | 0 | 0 | 0 | 0 | 20.739 | 0 | 0 |
| PROST2016246 | 0 | 0 | 0 | 0 | 100 | 0 | 0 |
| PROST2016351 | 0 | 0 | 59.664 | 0 | 31.411 | 0 | 0 |
| PROST2016379 | 0 | 0 | 0 | 0 | 100 | 0 | 0 |
| PROST2016444 | 0 | 0 | 0 | 0 | 100 | 0 | 0 |
| PROST2016462 | 0 | 0 | 0 | 0 | 100 | 0 | 0 |
| PROST2016499 | 0 | 0 | 0 | 0 | 100 | 0 | 0 |
| PROST2016512 | 0 | 0 | 0 | 0 | 100 | 0 | 0 |
| PROST2016566 | 0 | 0 | 0 | 0 | 100 | 0 | 0 |
| PROST2016582 | 0 | 0 | 65.511 | 0 | 34.489 | 0 | 0 |
| PROST2016668 | 0 | 0 | 0 | 0 | 100 | 0 | 0 |
| PROST2016684 | 0 | 0 | 0 | 0 | 100 | 0 | 0 |
| PROST2016777 | 0 | 0 | 0 | 0 | 100 | 0 | 0 |
| PROST2016829 | 0 | 0 | 0 | 0 | 100 | 0 | 0 |
| PROST2016860 | 0 | 0 | 0 | 0 | 100 | 0 | 0 |
| PROST2016918 | 0 | 0 | 0 | 0 | 22.538 | 0 | 0 |
| PROST2016980 | 0 | 0 | 0 | 0 | 80.304 | 0 | 0 |
| PROST2017098 | 0 | 0 | 0 | 0 | 100 | 0 | 0 |
| PROST2017128 | 0 | 0 | 54.279 | 0 | 28.576 | 0 | 0 |
| PROST2017203 | 0 | 0 | 0 | 0 | 4.605 | 0 | 0 |
| PROST2017367 | 0 | 0 | 0 | 0 | 100 | 0 | 0 |
| PROST2017413 | 0 | 0 | 0 | 0 | 100 | 0 | 0 |
| PROST2017441 | 0 | 0 | 0 | 0 | 100 | 0 | 0 |
| PROST2017529 | 0 | 0 | 0 | 0 | 9.001 | 0 | 0 |
| PROST2017578 | 0 | 0 | 0 | 0 | 100 | 0 | 0 |
| PROST2017612 | 0 | 0 | 0 | 0 | 75.996 | 0 | 0 |
| PROST2017617 | 0 | 0 | 0 | 0 | 74.833 | 0 | 0 |
| PROST2017692 | 0 | 0 | 0 | 0 | 2.613 | 0 | 0 |
| PROST2017700 | 0 | 0 | 0 | 0 | 100 | 0 | 0 |
| PROST2017701 | 0 | 0 | 0 | 0 | 100 | 0 | 0 |
| PROST2017729 | 0 | 0 | 0 | 0 | 50.124 | 0 | 0 |
| PROST2017$$36 | 0 | 0 | 0 | 0 | 100 | 0 | 0 |
| PROST2017910 | 0 | 0 | 0 | 0 | 37.058 | 0 | 0 |
| PROST2017972 | 0 | 0 | 0 | 0 | 42.891 | 0 | 0 |
| PROST2018030 | 0 | 0 | 0 | 0 | 100 | 0 | 0 |
| PROST2018090 | 0 | 0 | 0 | 0 | 7.715 | 0 | 47.331 |
| PROST2018235 | 0 | 0 | 0 | 0 | 100 | 0 | 0 |
| PROST2018437 | 0 | 0 | 0 | 0 | 100 | 0 | 0 |
| PROST2018487 | 0 | 0 | 0 | 0 | 100 | 0 | 0 |
| PROST2018511 | 0 | 0 | 0 | 0 | 100 | 0 | 0 |
| PROST2018583 | 0 | 0 | 0 | 0 | 32.777 | 0 | 0 |
| PROST2018588 | 0 | 0 | 0 | 23.355 | 46.539 | 0 | 0 |
| PROST2018607 | 0 | 0 | 0 | 0 | 59.538 | 0 | 0 |
| PROST2018788 | 0 | 0 | 0 | 0 | 100 | 0 | 0 |
| PROST2018902 | 0 | 0 | 0 | 0 | 100 | 0 | 0 |
| PROST2018922 | 0 | 0 | 0 | 0 | 100 | 0 | 0 |
| PROST2018977 | 0 | 0 | 0 | 0 | 46.084 | 0 | 0 |
| PROST2019164 | 0 | 0 | 0 | 0 | 13.077 | 0 | 0 |
| PROST2019253 | 0 | 0 | 0 | 0 | 5.958 | 0 | 0 |
| PROST2019296 | 0 | 0 | 0 | 0 | 20.168 | 0 | 0 |
| PROST2019398 | 0 | 0 | 0 | 0 | 100 | 0 | 0 |
| PROST2019487 | 0 | 0 | 0 | 0 | 100 | 0 | 0 |
| PROST2019781 | 0 | 0 | 0 | 0 | 100 | 0 | 0 |
| PUAEN1000039 | 0 | 0 | 0 | 0 | 0 | 100 | 0 |
| PUAEN1000057 | 0 | 0 | 0 | 0 | 0 | 23.169 | 0 |
| PUAEN1000065 | 0 | 0 | 13.535 | 0 | 16.627 | 3.779 | 0 |
| PUAEN1000081 | 0 | 0 | 0 | 0 | 0 | 75.183 | 0 |
| PUAEN1000085 | 0 | 0 | 0 | 0 | 0 | 100 | 0 |
| PUAEN1000087 | 0 | 0 | 0 | 0 | 0 | 100 | 0 |
| PUAEN1000121 | 0 | 0 | 0 | 0 | 0 | 100 | 0 |
| PUAEN1000147 | 0 | 0 | 0 | 0 | 0 | 52.615 | 0 |
| PUAEN1000161 | 0 | 0 | 0 | 20.531 | 0 | 32.548 | 0 |
| PUAEN1000164 | 0 | 0 | 0 | 0 | 0 | 4.492 | 0 |
| PUAEN1000175 | 0 | 0 | 0 | 0 | 0 | 100 | 0 |
| PUAEN1000239 | 0 | 0 | 0 | 0 | 0 | 17.492 | 0 |
| PUAEN1000275 | 0 | 0 | 0 | 0 | 0 | 100 | 0 |
| PUAEN1000276 | 0 | 0 | 0 | 0 | 0 | 100 | 0 |
| PUAEN1000288 | 0 | 0 | 0 | 0 | 0 | 100 | 0 |
| PUAEN1000322 | 0 | 0 | 0 | 0 | 0 | 7.213 | 0 |
| PUAEN2000080 | 0 | 0 | 0 | 0 | 0 | 100 | 0 |
| PUAEN2000152 | 0 | 0 | 0 | 0 | 0 | 66.977 | 0 |
| PUAEN2000175 | 0 | 0 | 0 | 0 | 0 | 19.914 | 0 |
| PUAEN2000247 | 0 | 0 | 0 | 0 | 19.593 | 62.349 | 0 |
| PUAEN2000312 | 0 | 0 | 0 | 0 | 0 | 49.955 | 0 |
| PUAEN2000374 | 0 | 0 | 0 | 1.709 | 0 | 5.418 | 0 |
| PUAEN2000394 | 0 | 0 | 0 | 0 | 0 | 100 | 0 |
| PUAEN2000497 | 0 | 0 | 0 | 0 | 0 | 14.547 | 0 |
| PUAEN2000535 | 0 | 6.045 | 0 | 0 | 0 | 4.538 | 0 |
| PUAEN2000594 | 0 | 0 | 0 | 0 | 0 | 60.344 | 0 |
| PUAEN2000684 | 0 | 0 | 0 | 0 | 0 | 100 | 0 |
| PUAEN2000942 | 0 | 0 | 0 | 0 | 0 | 75.335 | 0 |
| PUAEN2001260 | 0 | 0 | 0 | 0 | 0 | 100 | 0 |
| PUAEN2001345 | 0 | 0 | 0 | 0 | 0 | 16.521 | 0 |
| PUAEN2001526 | 0 | 0 | 0 | 0 | 0 | 100 | 0 |
| PUAEN2001586 | 0 | 0 | 0 | 5.082 | 0 | 16.112 | 0 |
| PUAEN2001882 | 0 | 0 | 0 | 0 | 0 | 61.957 | 0 |
| PUAEN2002473 | 0 | 0 | 0 | 0 | 0 | 100 | 0 |
| PUAEN2002489 | 0 | 0 | 0 | 0 | 0 | 36.817 | 0 |
| PUAEN2002552 | 0 | 0 | 0 | 0 | 0 | 100 | 0 |
| PUAEN2002568 | 0 | 0 | 0 | 0 | 0 | 61.524 | 0 |
| PUAEN2002616 | 0 | 0 | 0 | 0 | 0 | 100 | 0 |
| PUAEN2002758 | 0 | 0 | 0 | 0 | 0 | 100 | 0 |
| PUAEN2003018 | 0 | 0 | 0 | 0 | 0 | 18.914 | 0 |
| PUAEN2003079 | 0 | 0 | 0 | 0 | 0 | 100 | 0 |
| PUAEN2003116 | 0 | 0 | 0 | 0 | 0 | 100 | 0 |
| PUAEN2003408 | 0 | 0 | 0 | 0 | 0 | 16.993 | 0 |
| PUAEN2003517 | 0 | 0 | 0 | 0 | 0 | 100 | 0 |
| PUAEN2003954 | 0 | 0 | 0 | 0 | 0 | 61.526 | 0 |
| PUAEN2004067 | 0 | 0 | 0 | 0 | 0 | 100 | 0 |
| PUAEN2004083 | 0 | 0 | 0 | 0 | 0 | 100 | 0 |
| PUAEN2004400 | 0 | 0 | 0 | 0 | 0 | 40.652 | 0 |
| PUAEN2004511 | 0 | 0 | 0 | 0 | 0 | 100 | 0 |
| PUAEN2004525 | 0 | 0 | 0 | 0 | 0 | 100 | 0 |
| PUAEN2004875 | 0 | 0 | 0 | 0 | 0 | 100 | 0 |
| PUAEN2005110 | 0 | 0 | 0 | 0 | 0 | 100 | 0 |
| PUAEN2005247 | 0 | 0 | 0 | 0 | 0 | 100 | 0 |
| PUAEN2005502 | 0 | 0 | 0 | 0 | 0 | 60.392 | 0 |
| PUAEN2005588 | 0 | 0 | 0 | 0 | 0 | 100 | 0 |
| PUAEN2005930 | 0 | 0 | 0 | 0 | 0 | 51.805 | 0 |
| PUAEN2006029 | 0 | 0 | 0 | 0 | 0 | 100 | 0 |
| PUAEN2006328 | 0 | 0 | 0 | 0 | 0 | 20.807 | 0 |
| PUAEN2006335 | 0 | 0 | 0 | 0 | 0 | 71.562 | 0 |
| PUAEN2006578 | 0 | 0 | 0 | 0 | 0 | 100 | 0 |
| PUAEN2006639 | 0 | 0 | 0 | 0 | 0 | 100 | 0 |
| PUAEN2006761 | 0 | 0 | 0 | 0 | 0 | 100 | 0 |
| PUAEN2007044 | 0 | 0 | 0 | 5.102 | 0 | 8.088 | 0 |
| PUAEN2007350 | 0 | 0 | 0 | 0 | 0 | 75.640 | 0 |
| PUAEN2007785 | 0 | 0 | 0 | 0 | 0 | 100 | 0 |
| PUAEN2007898 | 0 | 0 | 0 | 0 | 0 | 60.962 | 0 |
| PUAEN2008123 | 0 | 0 | 0 | 0 | 0 | 100 | 0 |
| PUAEN2008228 | 0 | 0 | 0 | 0 | 0 | 82.551 | 0 |
| PUAEN2008314 | 0 | 0 | 0 | 0 | 0 | 60.344 | 0 |
| PUAEN2008515 | 0 | 0 | 0 | 0 | 0 | 54.781 | 0 |
| PUAEN2008815 | 0 | 0 | 0 | 0 | 0 | 70.071 | 0 |
| PUAEN2008939 | 0 | 0 | 0 | 6.108 | 0 | 77.460 | 0 |
| PUAEN2008980 | 0 | 0 | 0 | 0 | 0 | 100 | 0 |
| PUAEN2008985 | 0 | 0 | 0 | 0 | 0 | 25.036 | 0 |
| PUAEN2009174 | 0 | 0 | 0 | 0 | 0 | 31.987 | 0 |
| PUAEN2009348 | 0 | 0 | 0 | 0 | 0 | 44.559 | 0 |
| PUAEN2009534 | 0 | 0 | 0 | 0 | 0 | 100 | 0 |
| PUAEN2009655 | 0 | 0 | 0 | 0 | 0 | 20.623 | 0 |
| PUAEN2009795 | 0 | 0 | 0 | 0 | 0 | 100 | 0 |
| PUAEN2009852 | 0 | 0 | 0 | 0 | 0 | 100 | 0 |
| PUAEN2010346 | 0 | 0 | 0 | 0 | 0 | 56.319 | 0 |
| PUAEN2010824 | 0 | 0 | 0 | 0 | 0 | 29.560 | 0 |
| RECTM1000051 | 0 | 0 | 0 | 0 | 0 | 0 | 50.218 |
| RECTM1000141 | 0 | 0 | 0 | 0 | 0 | 0 | 100 |
| RECTM2000220 | 0 | 0 | 0 | 0 | 0 | 0 | 100 |
| RECTM2000349 | 0 | 0 | 0 | 0 | 0 | 0 | 92.174 |
| RECTM2000433 | 0 | 0 | 0 | 0 | 0 | 0 | 75.605 |
| RECTM2000510 | 0 | 0 | 0 | 0 | 0 | 0 | 65.580 |
| RECTM2001307 | 0 | 0 | 0 | 0 | 0 | 0 | 100 |
| RECTM2001347 | 0 | 0 | 0 | 0 | 0 | 0 | 90.247 |
| RECTM2001519 | 0 | 0 | 0 | 0 | 14.015 | 0 | 85.985 |
| RECTM2001666 | 0 | 0 | 0 | 0 | 0 | 0 | 100 |
| RECTM2001691 | 0 | 0 | 0 | 0 | 0 | 0 | 100 |
| RECTM2001749 | 0 | 0 | 0 | 0 | 0 | 0 | 100 |
| RECTM2002172 | 0 | 0 | 0 | 0 | 0 | 0 | 85.461 |
| RECTM2002602 | 0 | 0 | 0 | 0 | 0 | 0 | 100 |
| RECTM2002632 | 0 | 0 | 0 | 0 | 0 | 0 | 100 |
| SALGL1000005 | 0 | 0 | 0 | 0 | 1.075 | 0 | 0 |
| SALGL1000047 | 0 | 0 | 0 | 1.054 | 0 | 0 | 0 |
| SALGL1000157 | 0 | 0.977 | 0 | 0 | 0.922 | 0.734 | 0 |
| SKMUS1000022 | 0 | 0 | 2.804 | 0 | 0 | 0 | 0 |
| SKMUS1000064 | 0 | 0 | 15.807 | 0 | 0 | 0 | 0 |
| SKMUS1000084 | 0 | 0 | 0 | 2.741 | 0 | 0 | 0 |
| SKMUS1000138 | 0 | 0 | 0.647 | 0.171 | 0.341 | 0 | 0 |
| SKMUS1000186 | 0 | 3.017 | 2.704 | 2.143 | 0 | 0 | 0 |
| SKMUS2000361 | 0 | 0 | 0 | 0 | 0 | 12.068 | 0 |
| SKMUS2000380 | 0 | 0 | 0 | 0 | 7.691 | 0 | 0 |
| SKMUS2000458 | 0 | 0 | 6.438 | 0 | 0 | 0 | 0 |
| SKMUS2000515 | 0 | 0 | 0 | 20.164 | 0 | 0 | 0 |
| SKMUS2000679 | 0 | 0 | 22.564 | 0 | 0 | 0 | 0 |
| SKMUS2000873 | 0 | 0 | 18.526 | 0 | 1.951 | 0 | 0 |
| SKMUS2000931 | 0 | 8.180 | 3.665 | 1.937 | 0 | 0 | 0 |
| SKMUS2001008 | 0 | 0 | 3.192 | 0 | 0 | 0 | 0 |
| SKMUS2001129 | 0 | 0 | 34.255 | 9.050 | 0 | 0 | 0 |
| SKMUS2001147 | 0 | 0 | 0 | 0 | 0 | 15.641 | 0 |
| SKMUS2001157 | 0 | 0 | 24.165 | 0 | 0 | 0 | 0 |
| SKMUS2001201 | 0 | 0 | 47.998 | 0 | 0 | 0 | 0 |
| SKMUS2001402 | 0 | 0 | 56.794 | 0 | 0 | 0 | 0 |
| SKMUS2001454 | 0 | 0 | 2.273 | 1.201 | 0 | 0 | 0 |
| SKMUS2001634 | 0 | 0 | 0 | 4.660 | 0 | 0 | 0 |
| SKMUS2001668 | 0 | 0 | 19.961 | 0 | 0 | 0 | 0 |
| SKMUS2001693 | 0 | 0 | 32.341 | 0 | 0 | 0 | 0 |
| SKMUS2001695 | 0 | 0 | 36.451 | 0 | 0 | 0 | 0 |
| SKMUS2002634 | 0 | 0 | 57.706 | 0 | 6.076 | 0 | 0 |
| SKMUS2003168 | 0 | 0 | 0 | 0 | 33.480 | 0 | 0 |
| SKMUS2004667 | 0 | 0 | 0 | 0 | 33.480 | 0 | 0 |
| SKMUS2004903 | 0 | 0 | 48.875 | 0 | 0 | 0 | 0 |
| SKMUS2006755 | 0 | 0 | 48.875 | 0 | 0 | 0 | 0 |
| SKNMC1000137 | 0 | 0 | 0 | 15.092 | 0 | 0 | 0 |
| SKNMC1000168 | 0 | 0 | 0 | 0 | 8.909 | 0 | 18.220 |
| SKNMC2000097 | 0 | 3.350 | 0 | 0.793 | 0 | 0 | 0 |
| SKNMC2000322 | 0 | 0 | 0 | 2.513 | 0 | 0 | 0 |
| SKNMC2000635 | 0 | 0 | 0 | 1.277 | 1.908 | 2.024 | 0 |
| SKNMC2000649 | 0 | 0 | 0 | 6.495 | 0 | 0 | 0 |
| SKNMC2000698 | 0 | 0 | 0 | 0 | 7.325 | 11.655 | 0 |
| SKNMC2000877 | 0 | 0 | 0 | 0 | 0 | 0 | 25.782 |
| SKNMC2000966 | 0 | 0 | 0 | 0 | 28.717 | 0 | 0 |
| SKNMC2002402 | 0 | 0 | 0 | 13.120 | 0 | 0 | 0 |
| SKNSH1000002 | 0 | 0 | 0 | 2.558 | 5.097 | 0 | 0 |
| SKNSH1000101 | 0 | 4.828 | 0 | 0 | 0 | 0 | 0 |
| SKNSH2000347 | 0 | 0 | 0 | 7.986 | 0 | 0 | 0 |
| SKNSH2002768 | 0 | 0 | 0 | 8.427 | 8.397 | 13.360 | 0 |
| SKNSH2003528 | 0 | 0 | 0 | 5.403 | 0 | 17.130 | 0 |
| SKNSH2008940 | 0 | 0 | 0 | 0 | 0 | 10.820 | 0 |
| SMINT1000042 | 0 | 0 | 0 | 0 | 0 | 15.117 | 0 |
| SMINT1000078 | 0 | 0 | 0 | 0 | 66.777 | 0 | 0 |
| SMINT1000100 | 0 | 0 | 0 | 0 | 0 | 0 | 60.570 |
| SMINT1000117 | 0 | 9.886 | 0 | 0 | 0 | 0 | 0 |
| SMINT1000131 | 0 | 0 | 6.169 | 1.630 | 0 | 0 | 0 |
| SMINT2000018 | 0 | 0 | 0 | 0 | 14.931 | 0 | 0 |
| SMINT2000277 | 0 | 0 | 24.424 | 0 | 0 | 0 | 0 |
| SMINT2000396 | 0 | 0 | 0 | 13.071 | 0 | 6.907 | 0 |
| SMINT2000441 | 0 | 0 | 0 | 0.803 | 4.802 | 2.547 | 0 |
| SMINT2000468 | 0 | 0 | 0 | 4.072 | 0 | 0 | 0 |
| SMINT2000545 | 0 | 0 | 0 | 4.219 | 0 | 0 | 0 |
| SMINT2000602 | 0 | 8.263 | 0 | 0.978 | 0 | 0 | 0 |
| SMINT2000933 | 0 | 15.321 | 0 | 1.814 | 0 | 0 | 0 |
| SMINT2001818 | 0 | 7.046 | 0 | 0 | 3.324 | 0 | 0 |
| SMINT2002620 | 0 | 0 | 0 | 4.032 | 0 | 0 | 0 |
| SMINT2002689 | 0 | 0 | 0 | 4.184 | 0 | 0 | 0 |
| SMINT2002976 | 0 | 0 | 0 | 18.566 | 0 | 0 | 0 |
| SMINT2003505 | 0 | 23.670 | 0 | 0 | 0 | 0 | 0 |
| SMINT2004023 | 0 | 22.927 | 10.273 | 0 | 0 | 0 | 0 |
| SMINT2007433 | 0 | 0 | 0 | 14.856 | 0 | 0 | 0 |
| SMINT2008590 | 0 | 0 | 0 | 0 | 33.948 | 0 | 0 |
| SMINT2008917 | 0 | 0 | 0 | 0 | 39.679 | 0 | 0 |
| SMINT2008921 | 0 | 0 | 0 | 0 | 3.935 | 0 | 0 |
| SMINT2008960 | 0 | 0 | 4.608 | 0 | 0 | 0 | 0 |
| SMINT2009216 | 0 | 41.607 | 0 | 0 | 0 | 0 | 0 |
| SMINT2010084 | 0 | 0 | 0 | 6.115 | 0 | 0 | 0 |
| SMINT2010901 | 0 | 0 | 0 | 6.250 | 0 | 0 | 0 |
| SMINT2011311 | 0 | 0 | 0 | 33.526 | 0 | 0 | 0 |
| SMINT2011567 | 0 | 0 | 0 | 0 | 33.648 | 0 | 0 |
| SMINT2012122 | 0 | 0 | 23.549 | 0 | 0 | 0 | 0 |
| SMINT2013170 | 0 | 0 | 0 | 0 | 0 | 61.524 | 0 |
| SMINT2014480 | 0 | 11.942 | 0 | 0 | 0 | 0 | 0 |
| SMINT2018681 | 0 | 31.433 | 0 | 0 | 0 | 0 | 0 |
| SPLEN1000013 | 0 | 73.144 | 0 | 0 | 0 | 0 | 0 |
| SPLEN1000139 | 0 | 0 | 0 | 50.569 | 0 | 0 | 0 |
| SPLEN1000166 | 0 | 0 | 0 | 2.012 | 0 | 6.379 | 0 |
| SPLEN2000222 | 0 | 0 | 0 | 21.738 | 0 | 0 | 0 |
| SPLEN2000348 | 0 | 0 | 18.843 | 0 | 0 | 0 | 0 |
| SPLEN2000443 | 0 | 0 | 0 | 39.313 | 0 | 0 | 0 |
| SPLEN2000882 | 0 | 0 | 0 | 3.126 | 0 | 0 | 0 |
| SPLEN2001141 | 0 | 7.098 | 0 | 0 | 0 | 0 | 0 |
| SPLEN2001157 | 0 | 0 | 0 | 4.895 | 0 | 0 | 0 |
| SPLEN2002335 | 0 | 0 | 0 | 10.812 | 3.591 | 0 | 0 |
| SPLEN2002467 | 0 | 0 | 0 | 0 | 0 | 18.382 | 0 |
| SPLEN2002477 | 0 | 0 | 0 | 5.784 | 0 | 0 | 0 |
| SPLEN2002493 | 0 | 0 | 0 | 0 | 6.138 | 0 | 0 |
| SPLEN2002744 | 0 | 0 | 0 | 0 | 0 | 0 | 48.527 |
| SPLEN2005429 | 0 | 0 | 0 | 19.560 | 0 | 0 | 0 |
| SPLEN2006122 | 0 | 0 | 0 | 0 | 2.987 | 0 | 0 |
| SPLEN2006133 | 0 | 0 | 0 | 1.688 | 0 | 0 | 0 |
| SPLEN2006232 | 0 | 21.561 | 0 | 0 | 0 | 0 | 0 |
| SPLEN2006305 | 0 | 4.748 | 0 | 4.497 | 6.720 | 0 | 0 |
| SPLEN2007739 | 0 | 0 | 0 | 10.806 | 0 | 0 | 0 |
| SPLEN2007750 | 0 | 72.732 | 0 | 0 | 0 | 0 | 0 |
| SPLEN2007794 | 0 | 74.495 | 0 | 0 | 0 | 0 | 0 |
| SPLEN2008460 | 0 | 0 | 0 | 0 | 0 | 14.784 | 0 |
| SPLEN2010195 | 0 | 5.832 | 0 | 1.381 | 0 | 0 | 0 |
| SPLEN2010846 | 0 | 0 | 0 | 40.883 | 0 | 0 | 0 |
| SPLEN2011419 | 0 | 17.961 | 0 | 0 | 0 | 13.483 | 0 |
| SPLEN2011737 | 0 | 19.583 | 0 | 4.637 | 0 | 0 | 0 |
| SPLEN2011766 | 0 | 0 | 0 | 0 | 57.949 | 0 | 0 |
| SPLEN2012523 | 0 | 0 | 14.384 | 0 | 0 | 0 | 0 |
| SPLEN2012800 | 0 | 2.567 | 0 | 0 | 0 | 0 | 0 |
| SPLEN2014073 | 0 | 0 | 79.475 | 0 | 0 | 0 | 0 |
| SPLEN2014911 | 0 | 0 | 0 | 0 | 22.448 | 0 | 0 |
| SPLEN2015310 | 0 | 0 | 3.861 | 1.020 | 0 | 0 | 0 |
| SPLEN2016268 | 0 | 3.247 | 0 | 0 | 1.532 | 2.438 | 0 |
| SPLEN2016554 | 0 | 0 | 0 | 33.168 | 0 | 0 | 0 |
| SPLEN2017918 | 0 | 0 | 0 | 0 | 0 | 10.289 | 0 |
| SPLEN2018157 | 0 | 0 | 16.248 | 4.293 | 0 | 0 | 0 |
| SPLEN2019077 | 0 | 39.875 | 0 | 0 | 0 | 0 | 0 |
| SPLEN2023791 | 0 | 0 | 0 | 50.569 | 0 | 0 | 0 |
| SPLEN2027113 | 0 | 0 | 0 | 0 | 11.606 | 9.233 | 0 |
| SPLEN2028466 | 0 | 0 | 0 | 0 | 1.467 | 2.334 | 0 |
| SPLEN2028914 | 0 | 0 | 18.810 | 0 | 0 | 15.756 | 0 |
| SPLEN2029912 | 0 | 0 | 0 | 0 | 11.586 | 9.217 | 0 |
| SPLEN2031424 | 0 | 0 | 0 | 13.552 | 0 | 0 | 0 |
| SPLEN2033098 | 0 | 0 | 0 | 0 | 17.647 | 0 | 0 |
| SPLEN2036932 | 0 | 0 | 0 | 0 | 10.397 | 0 | 0 |
| SPLEN2037722 | 0 | 37.154 | 0 | 0 | 0 | 0 | 0 |
| SPLEN2038834 | 0 | 0 | 0 | 0 | 16.429 | 0 | 0 |
| SPLEN2042535 | 0 | 0 | 0 | 12.671 | 25.249 | 0 | 0 |
| SPLEN2042920 | 0 | 20.455 | 0 | 0 | 0 | 0 | 0 |
| STOMA1000189 | 0 | 0 | 0 | 2.783 | 0 | 0 | 0 |
| STOMA2000121 | 0 | 9.160 | 0 | 0 | 0 | 0 | 0 |
| STOMA2000257 | 0 | 0 | 0 | 0 | 7.000 | 0 | 0 |
| STOMA2000482 | 0 | 0 | 0 | 0 | 13.672 | 0 | 0 |
| STOMA2002166 | 0 | 0 | 0 | 0 | 2.075 | 0 | 0 |
| STOMA2004663 | 0 | 52.484 | 0 | 0 | 0 | 0 | 0 |
| SYNOV1000118 | 0 | 0 | 28.508 | 0 | 0 | 0 | 0 |
| SYNOV1000124 | 0 | 0 | 0 | 0 | 1.973 | 0 | 0 |
| SYNOV1000128 | 0 | 0 | 0 | 0 | 52.059 | 0 | 0 |
| SYNOV1000164 | 0 | 28.905 | 0 | 0 | 0 | 0 | 0 |
| SYNOV2001033 | 0 | 0 | 4.039 | 1.067 | 0 | 3.383 | 13.045 |
| SYNOV2001239 | 0 | 7.075 | 0 | 0 | 1.113 | 0 | 0 |
| SYNOV2001262 | 0 | 15.682 | 0 | 0 | 0 | 0 | 0 |
| SYNOV2001374 | 0 | 0 | 0 | 3.260 | 0 | 0 | 39.852 |
| SYNOV2001468 | 0 | 0 | 0 | 16.242 | 0 | 0 | 0 |
| SYNOV2009172 | 0 | 7.823 | 0 | 0 | 1.845 | 0 | 0 |
| SYNOV4001153 | 0 | 0 | 0 | 4.128 | 0 | 0 | 0 |
| SYNOV4007671 | 0 | 0 | 0 | 2.609 | 7.799 | 4.136 | 0 |
| SYNOV4009575 | 0 | 36.015 | 0 | 0 | 0 | 0 | 0 |
| T1ESE2002665 | 0 | 0 | 0 | 7.418 | 0 | 0 | 0 |
| TBAES2000116 | 0 | 0 | 0 | 20.191 | 0 | 0 | 0 |
| TBAES2009387 | 0 | 0 | 0 | 0.951 | 0 | 0 | 11.630 |
| TESOP1000035 | 0 | 33.245 | 0 | 0 | 0 | 0 | 0 |
| TESOP2002273 | 0 | 0 | 0 | 7.223 | 0 | 0 | 0 |
| TESOP2006053 | 0 | 0 | 49.610 | 0 | 0 | 0 | 0 |
| TESOP2008820 | 0 | 0 | 0 | 34.221 | 0 | 0 | 0 |
| TESTI1000023 | 0 | 0 | 5.649 | 0 | 0 | 0 | 0 |
| TESTI1000051 | 0 | 0 | 0 | 0 | 18.469 | 0 | 0 |
| TESTI1000064 | 0 | 0 | 0 | 0 | 17.264 | 0 | 0 |
| TESTI1000101 | 0 | 0 | 0 | 7.623 | 0 | 0 | 0 |
| TESTI1000142 | 0 | 0 | 0 | 0 | 0 | 38.072 | 0 |
| TESTI1000163 | 0 | 0 | 27.756 | 7.333 | 0 | 0 | 0 |
| TESTI2000006 | 0 | 74.325 | 0 | 0 | 0 | 0 | 0 |
| TESTI2000172 | 0 | 64.303 | 0 | 0 | 0 | 0 | 0 |
| TESTI2000184 | 0 | 8.497 | 0 | 4.024 | 0 | 0 | 0 |
| TESTI2000349 | 0 | 0 | 0 | 0 | 84.436 | 0 | 0 |
| TESTI2000435 | 0 | 0 | 0 | 0 | 68.199 | 0 | 0 |
| TESTI2000784 | 0 | 0 | 0 | 4.045 | 0 | 0 | 0 |
| TESTI2001099 | 0 | 0 | 3.301 | 1.744 | 0 | 2.765 | 0 |
| TESTI2001120 | 0 | 7.267 | 0 | 0 | 0 | 5.455 | 0 |
| TESTI2001153 | 0 | 0 | 32.187 | 0.709 | 0 | 0 | 0 |
| TESTI2001269 | 0 | 8.206 | 0 | 0 | 0 | 6.160 | 0 |
| TESTI2001829 | 0 | 0 | 0 | 1.511 | 6.023 | 0 | 0 |
| TESTI2002365 | 0 | 0 | 0 | 9.717 | 0 | 0 | 0 |
| TESTI2003005 | 0 | 0 | 0 | 0 | 10.774 | 0 | 0 |
| TESTI2003413 | 0 | 0 | 17.538 | 4.634 | 0 | 0 | 0 |
| TESTI2003533 | 0 | 0 | 5.840 | 0 | 3.075 | 0 | 0 |
| TESTI2003539 | 0 | 0 | 0 | 0 | 84.436 | 0 | 0 |
| TESTI2004031 | 0 | 0 | 0 | 1.427 | 0 | 0 | 0 |
| TESTI2004153 | 0 | 0 | 0 | 0 | 15.385 | 0 | 0 |
| TESTI2004431 | 0 | 0 | 0 | 0 | 29.665 | 0 | 0 |
| TESTI2004929 | 0 | 0 | 0 | 5.053 | 0 | 0 | 0 |
| TESTI2005408 | 0 | 13.317 | 0 | 0 | 6.283 | 0 | 0 |
| TESTI2005564 | 0 | 0 | 0 | 0 | 25.975 | 0 | 0 |
| TESTI2005784 | 0 | 0 | 0 | 5.293 | 0 | 0 | 0 |
| TESTI2005788 | 0 | 0 | 0 | 8.231 | 0 | 0 | 0 |
| TESTI2006051 | 0 | 0 | 8.557 | 0 | 0 | 0 | 0 |
| TESTI2006453 | 0 | 6.325 | 0 | 1.498 | 0 | 4.748 | 0 |
| TESTI2006588 | 0 | 0 | 0 | 2.890 | 3.840 | 0 | 0 |
| TESTI2006628 | 0 | 0 | 83.746 | 0 | 0 | 0 | 0 |
| TESTI2006633 | 0 | 0 | 0 | 47.576 | 0 | 0 | 0 |
| TESTI2006748 | 0 | 0 | 0 | 12.244 | 0 | 0 | 0 |
| TESTI2007407 | 0 | 0 | 0 | 0 | 0 | 17.320 | 0 |
| TESTI2007998 | 0 | 0 | 10.651 | 0 | 5.607 | 0 | 0 |
| TESTI2008240 | 0 | 0 | 1.684 | 18.246 | 1.774 | 0 | 0 |
| TESTI2008278 | 0 | 0 | 0 | 0 | 43.663 | 0 | 0 |
| TESTI2008621 | 0 | 0 | 0 | 17.980 | 0 | 0 | 0 |
| TESTI2009474 | 0 | 15.186 | 0 | 3.596 | 0 | 0 | 0 |
| TESTI2009520 | 0 | 0 | 0 | 4.004 | 0 | 0 | 0 |
| TESTI2009577 | 0 | 0 | 0 | 3.145 | 0 | 0 | 0 |
| TESTI2009785 | 0 | 0 | 0 | 0 | 5.088 | 0 | 0 |
| TESTI2010513 | 0 | 0 | 0 | 0 | 0 | 2.217 | 0 |
| TESTI2012155 | 0 | 48.166 | 0 | 0 | 0 | 0 | 0 |
| TESTI2012289 | 0 | 0 | 58.141 | 0 | 0 | 0 | 0 |
| TESTI2012778 | 0 | 2.778 | 0 | 0 | 0 | 1.043 | 0 |
| TESTI2013231 | 0 | 14.957 | 0 | 3.541 | 7.057 | 0 | 0 |
| TESTI2015092 | 0 | 0 | 22.316 | 0 | 0 | 0 | 0 |
| TESTI2015213 | 0 | 3.858 | 0 | 0 | 0 | 0 | 0 |
| TESTI2015626 | 0 | 2.472 | 0 | 0.585 | 0 | 0 | 0 |
| TESTI2016101 | 0 | 0 | 0 | 0 | 0 | 0 | 94.332 |
| TESTI2017954 | 0 | 0 | 0 | 0 | 2.349 | 0 | 0 |
| TESTI2018462 | 0 | 0 | 0 | 5.029 | 0 | 0 | 0 |
| TESTI2020510 | 0 | 0 | 0 | 0 | 0 | 40.816 | 0 |
| TESTI2020946 | 0 | 91.999 | 0 | 0 | 0 | 0 | 0 |
| TESTI2021297 | 0 | 0 | 0 | 0 | 0 | 38.736 | 0 |
| TESTI2021315 | 0 | 0 | 0 | 36.066 | 0 | 0 | 0 |
| TESTI2021425 | 0 | 0 | 0 | 6.128 | 0 | 0 | 0 |
| TESTI2023033 | 0 | 0 | 0 | 48.872 | 0 | 0 | 0 |
| TESTI2024090 | 0 | 0 | 0 | 73.137 | 0 | 0 | 0 |
| TESTI2024844 | 0 | 0 | 0 | 2.039 | 0 | 0 | 0 |
| TESTI2025546 | 0 | 0 | 0 | 12.354 | 0 | 19.584 | 0 |
| TESTI2026024 | 0 | 0 | 0 | 0 | 84.436 | 0 | 0 |
| TESTI2032643 | 0 | 0 | 81.912 | 0 | 0 | 0 | 0 |
| TESTI2033441 | 0 | 0 | 0 | 5.859 | 0 | 0 | 0 |
| TESTI2034249 | 0 | 0 | 0 | 6.955 | 13.858 | 0 | 0 |
| TESTI2034940 | 0 | 0 | 0 | 1.391 | 0.924 | 0 | 5.668 |
| TESTI2044276 | 0 | 0 | 0 | 16.878 | 0 | 0 | 0 |
| TESTI2046456 | 0 | 0 | 0 | 0.824 | 0 | 0 | 0 |
| TESTI2046721 | 0 | 91.999 | 0 | 0 | 0 | 0 | 0 |
| TESTI2053723 | 0 | 34.027 | 0 | 0 | 0 | 0 | 0 |
| TESTI4000014 | 0 | 2.685 | 0 | 0.318 | 0 | 0 | 0 |
| TESTI4001467 | 0 | 0 | 0 | 0 | 19.634 | 0 | 0 |
| TESTI4002072 | 0 | 0 | 0 | 5.943 | 0 | 0 | 0 |
| TESTI4002202 | 0 | 0 | 0 | 5.900 | 0 | 0 | 0 |
| TESTI4002799 | 0 | 0 | 2.975 | 0 | 0 | 0 | 0 |
| TESTI4009286 | 0 | 0 | 0 | 1.290 | 0 | 0 | 0 |
| TESTI4010851 | 0 | 0 | 3.683 | 2.919 | 0 | 0 | 0 |
| TESTI4013441 | 0 | 0 | 0 | 0 | 0.556 | 2.655 | 0 |
| TESTI4013474 | 0 | 15.533 | 0 | 0 | 0 | 0 | 0 |
| TESTI4018436 | 0 | 0 | 35.056 | 0 | 18.456 | 0 | 0 |
| TESTI4037156 | 0 | 2.080 | 0 | 0.492 | 0 | 0 | 0 |
| TESTI4038284 | 0 | 0 | 0 | 0 | 6.531 | 0 | 0 |
| TESTI4044704 | 0 | 38.311 | 0 | 0 | 0 | 0 | 0 |
| TESTI4046873 | 0 | 0 | 0 | 73.137 | 0 | 0 | 0 |
| THYMU1000002 | 0 | 0 | 7.974 | 1.053 | 2.099 | 3.340 | 0 |
| THYMU1000010 | 0 | 20.263 | 0 | 0 | 0 | 0 | 0 |
| THYMU1000016 | 0 | 0 | 0 | 0.688 | 0 | 2.181 | 0 |
| THYMU1000032 | 0 | 0 | 5.258 | 0 | 0 | 0 | 0 |
| THYMU1000083 | 0 | 0 | 0 | 0 | 10.634 | 0 | 0 |
| THYMU1000359 | 0 | 4.029 | 0 | 0 | 1.901 | 0 | 0 |
| THYMU1000394 | 0 | 0 | 0 | 8.749 | 17.433 | 0 | 0 |
| THYMU1000428 | 0 | 4.272 | 0 | 1.012 | 8.063 | 3.207 | 0 |
| THYMU2000057 | 0 | 20.389 | 0 | 0 | 0 | 0 | 0 |
| THYMU2000382 | 0 | 0 | 4.083 | 2.157 | 0 | 0 | 0 |
| THYMU2000684 | 0 | 0 | 0 | 7.410 | 14.765 | 0 | 0 |
| THYMU2001521 | 0 | 29.878 | 53.550 | 0 | 0 | 0 | 0 |
| THYMU2002229 | 0 | 81.842 | 0 | 0 | 0 | 0 | 0 |
| THYMU2002583 | 0 | 0 | 0 | 1.845 | 0 | 0 | 0 |
| THYMU2002745 | 0 | 0 | 0 | 0 | 0 | 0 | 83.299 |
| THYMU2002841 | 0 | 21.814 | 0 | 0 | 0 | 0 | 0 |
| THYMU2003012 | 0 | 6.587 | 0 | 0 | 0 | 0 | 0 |
| THYMU2003046 | 0 | 0 | 0 | 3.421 | 0 | 0 | 0 |
| THYMU2003069 | 0 | 0 | 0 | 7.866 | 0 | 0 | 0 |
| THYMU2003133 | 0 | 0 | 0 | 0 | 12.304 | 0 | 0 |
| THYMU2003419 | 0 | 0 | 0 | 4.469 | 1.781 | 0 | 0 |
| THYMU2003891 | 0 | 9.871 | 2.949 | 0 | 0.517 | 0 | 3.175 |
| THYMU2003981 | 0 | 3.926 | 0 | 0.929 | 0 | 0 | 0 |
| THYMU2004108 | 0 | 0 | 88.985 | 0 | 0 | 0 | 0 |
| THYMU2004152 | 0 | 14.926 | 0 | 0 | 0 | 0 | 0 |
| THYMU2004320 | 0 | 0 | 0 | 0 | 57.949 | 0 | 0 |
| THYMU2004344 | 0 | 0 | 0 | 2.273 | 4.530 | 0 | 0 |
| THYMU2004410 | 0 | 0 | 0 | 3.410 | 0 | 10.811 | 0 |
| THYMU2004733 | 0 | 0 | 37.726 | 0 | 0 | 0 | 0 |
| THYMU2005156 | 0 | 0 | 0 | 68.095 | 0 | 0 | 0 |
| THYMU2005546 | 0 | 0 | 0 | 0 | 0 | 3.086 | 0 |
| THYMU2005980 | 0 | 0 | 0 | 14.432 | 0 | 0 | 0 |
| THYMU2006505 | 0 | 0 | 0 | 2.429 | 0 | 0 | 0 |
| THYMU2006813 | 0 | 0 | 0 | 2.816 | 5.612 | 0 | 0 |
| THYMU2007036 | 0 | 58.036 | 0 | 0 | 0 | 0 | 0 |
| THYMU2007065 | 0 | 0 | 27.315 | 0 | 0 | 0 | 0 |
| THYMU2007112 | 0 | 0 | 0 | 0 | 16.219 | 0 | 0 |
| THYMU2007886 | 0 | 10.408 | 0 | 0 | 0 | 7.813 | 0 |
| THYMU2008725 | 0 | 0 | 0 | 0 | 0 | 73.576 | 0 |
| THYMU2009658 | 0 | 0 | 2.360 | 0 | 0 | 0 | 0 |
| THYMU2009792 | 0 | 0 | 0 | 0 | 0 | 15.803 | 0 |
| THYMU2010094 | 0 | 43.781 | 0 | 0 | 0 | 0 | 0 |
| THYMU2011881 | 0 | 78.357 | 0 | 0 | 0 | 0 | 0 |
| THYMU2012024 | 0 | 44.799 | 0 | 5.303 | 0 | 16.815 | 0 |
| THYMU2012625 | 0 | 0 | 0 | 0 | 0 | 0 | 22.602 |
| THYMU2013136 | 0 | 0 | 0 | 0 | 2.901 | 0 | 0 |
| THYMU2013648 | 0 | 90.014 | 0 | 0 | 0 | 0 | 0 |
| THYMU2013916 | 0 | 0 | 0 | 0 | 3.933 | 0 | 0 |
| THYMU2014167 | 0 | 0 | 0 | 0 | 19.488 | 0 | 0 |
| THYMU2014183 | 0 | 73.025 | 0 | 0 | 0 | 0 | 0 |
| THYMU2015019 | 0 | 0 | 0 | 0 | 0 | 77.187 | 0 |
| THYMU2018126 | 0 | 5.468 | 0 | 0 | 0 | 0 | 0 |
| THYMU2019021 | 0 | 0 | 32.736 | 0 | 0 | 0 | 0 |
| THYMU2025707 | 0 | 0 | 62.325 | 0 | 0 | 0 | 0 |
| THYMU2027125 | 0 | 0 | 0 | 1.274 | 0.635 | 0 | 3.895 |
| THYMU2027975 | 0 | 0 | 0 | 7.113 | 0 | 0 | 0 |
| THYMU2028629 | 0 | 0 | 0 | 32.582 | 0 | 0 | 0 |
| THYMU2031341 | 0 | 0 | 0 | 0 | 12.236 | 0 | 0 |
| THYMU2035735 | 0 | 0 | 0 | 0 | 4.678 | 0 | 28.704 |
| THYMU2036461 | 0 | 0 | 0 | 0 | 53.789 | 0 | 0 |
| THYMU3009006 | 0 | 0 | 0 | 33.017 | 0 | 0 | 0 |
| THYMU3013386 | 0 | 0 | 0 | 0 | 2.655 | 0 | 0 |
| THYMU3015759 | 0 | 8.463 | 0 | 0 | 3.993 | 6.353 | 0 |
| THYMU3024339 | 0 | 0 | 0 | 51.624 | 0 | 0 | 0 |
| THYMU3025642 | 0 | 0 | 0 | 68.095 | 0 | 0 | 0 |
| THYMU3034671 | 0 | 0 | 0 | 21.222 | 0 | 0 | 0 |
| THYMU3038158 | 0 | 0 | 41.483 | 0 | 0 | 0 | 0 |
| THYMU3047115 | 0 | 0 | 19.376 | 0 | 1.457 | 0 | 0 |
| TKIDN1000066 | 0 | 0 | 64.536 | 0 | 0 | 0 | 0 |
| TKIDN1000164 | 0 | 46.474 | 0 | 0 | 0 | 0 | 0 |
| TKIDN2001662 | 0 | 0 | 0 | 19.409 | 0 | 0 | 0 |
| TKIDN2002738 | 0 | 3.152 | 2.825 | 0 | 0 | 0 | 0 |
| TKIDN2003597 | 0 | 0 | 0 | 13.903 | 0 | 0 | 0 |
| TKIDN2007828 | 0 | 0 | 44.943 | 0 | 0 | 0 | 0 |
| TKIDN2015285 | 0 | 0 | 0 | 0 | 35.207 | 0 | 0 |
| TKIDN2015423 | 0 | 0 | 0 | 2.266 | 0 | 0 | 0 |
| TKIDN2015788 | 0 | 0 | 0 | 4.681 | 0 | 0 | 0 |
| TLIVE2002046 | 0 | 0 | 0 | 6.460 | 6.437 | 0 | 0 |
| TLIVE2003970 | 0 | 0 | 0 | 0 | 0 | 13.050 | 0 |
| TRACH1000030 | 0 | 0 | 0 | 3.683 | 4.893 | 15.571 | 0 |
| TRACH1000038 | 0 | 0 | 25.370 | 0 | 0 | 0 | 0 |
| TRACH1000063 | 0 | 16.166 | 0 | 0 | 0 | 0 | 0 |
| TRACH1000106 | 0 | 0 | 39.991 | 0 | 0 | 0 | 0 |
| TRACH1000205 | 0 | 0 | 0 | 0 | 0 | 22.206 | 0 |
| TRACH2000079 | 0 | 4.072 | 7.298 | 0 | 1.921 | 6.113 | 0 |
| TRACH2000081 | 0 | 0 | 85.742 | 0 | 0 | 0 | 0 |
| TRACH2000248 | 0 | 10.488 | 4.700 | 0 | 0 | 3.937 | 0 |
| TRACH2000321 | 0 | 0 | 3.310 | 1.749 | 0 | 0 | 0 |
| TRACH2000420 | 0 | 0 | 0 | 0 | 35.676 | 0 | 0 |
| TRACH2000472 | 0 | 0 | 0 | 0 | 6.056 | 0 | 37.157 |
| TRACH2000702 | 0 | 29.510 | 0 | 0 | 0 | 0 | 0 |
| TRACH2000959 | 0 | 0 | 0 | 0 | 0.866 | 0 | 0 |
| TRACH2000972 | 0 | 8.909 | 0 | 0 | 0 | 0 | 0 |
| TRACH2001021 | 0 | 0 | 5.641 | 1.490 | 1.485 | 0 | 9.110 |
| TRACH2001101 | 0 | 0 | 0 | 0 | 9.426 | 0 | 0 |
| TRACH2001289 | 0 | 5.110 | 2.290 | 1.210 | 2.411 | 0 | 0 |
| TRACH2001314 | 0 | 0 | 0 | 3.253 | 6.482 | 0 | 0 |
| TRACH2001443 | 0 | 0 | 0 | 16.537 | 0 | 0 | 0 |
| TRACH2001463 | 0 | 0 | 0 | 0 | 10.858 | 0 | 0 |
| TRACH2001478 | 0 | 0 | 3.910 | 0 | 0 | 3.276 | 0 |
| TRACH2001523 | 0 | 0 | 0 | 0 | 6.029 | 0 | 0 |
| TRACH2001607 | 0 | 0 | 0 | 1.787 | 3.562 | 0 | 0 |
| TRACH2001612 | 0 | 0 | 0 | 7.109 | 0 | 0 | 0 |
| TRACH2001898 | 0 | 0 | 0 | 0 | 3.615 | 0 | 0 |
| TRACH2002092 | 0 | 21.099 | 18.909 | 0 | 0 | 0 | 0 |
| TRACH2002537 | 0 | 0 | 0 | 0 | 3.289 | 5.233 | 0 |
| TRACH2002664 | 0 | 0 | 10.251 | 0 | 10.794 | 0 | 0 |
| TRACH2002847 | 0 | 0 | 0 | 0 | 0 | 25.610 | 0 |
| TRACH2003323 | 0 | 13.377 | 0 | 0 | 0 | 0 | 0 |
| TRACH2004499 | 0 | 0 | 19.794 | 0 | 0 | 0 | 0 |
| TRACH2005811 | 0 | 0 | 0 | 0 | 3.740 | 0 | 0 |
| TRACH2006762 | 0 | 0 | 0 | 0 | 75.996 | 0 | 0 |
| TRACH2007399 | 0 | 0 | 3.173 | 0 | 0 | 0 | 0 |
| TRACH2007754 | 0 | 0 | 0 | 2.674 | 0 | 0 | 32.689 |
| TRACH2007816 | 0 | 0 | 0 | 17.766 | 0 | 0 | 0 |
| TRACH2008472 | 0 | 0 | 10.569 | 0 | 0 | 0 | 0 |
| TRACH2008891 | 0 | 0 | 0 | 38.608 | 0 | 0 | 0 |
| TRACH2009006 | 0 | 52.758 | 0 | 0 | 0 | 0 | 0 |
| TRACH2010600 | 0 | 0 | 0 | 61.372 | 0 | 0 | 0 |
| TRACH2011500 | 0 | 0 | 0 | 0 | 47.884 | 0 | 0 |
| TRACH2012536 | 0 | 0 | 0 | 61.372 | 0 | 0 | 0 |
| TRACH2013991 | 0 | 0 | 85.742 | 0 | 0 | 0 | 0 |
| TRACH2014124 | 0 | 0 | 0 | 3.674 | 3.661 | 0 | 0 |
| TRACH2015823 | 0 | 0 | 0 | 3.893 | 0 | 0 | 0 |
| TRACH2015824 | 0 | 0 | 0 | 4.136 | 0 | 0 | 0 |
| TRACH2015939 | 0 | 42.223 | 0 | 0 | 0 | 0 | 0 |
| TRACH2017368 | 0 | 0 | 0 | 0 | 0 | 0 | 95.104 |
| TRACH2018317 | 0 | 0 | 0 | 0 | 0 | 16.530 | 0 |
| TRACH2018446 | 0 | 0 | 0 | 14.886 | 0 | 0 | 0 |
| TRACH3000692 | 0 | 0 | 0 | 8.341 | 0 | 26.446 | 0 |
| TRACH3002192 | 0 | 0 | 0 | 0 | 2.212 | 0 | 0 |
| TRACH3003547 | 0 | 0 | 0 | 0 | 14.997 | 0 | 0 |
| TRACH3004068 | 0 | 0 | 0 | 2.537 | 0 | 0 | 31.010 |
| TRACH3005699 | 0 | 0 | 0 | 17.081 | 0 | 0 | 0 |
| TRACH3006717 | 0 | 0 | 0 | 13.061 | 0 | 0 | 0 |
| TRACH3007625 | 0 | 0 | 7.918 | 0 | 4.169 | 0 | 0 |
| TRACH3008632 | 0 | 0 | 0 | 15.039 | 0 | 0 | 0 |
| TRACH3009148 | 0 | 0 | 0 | 31.925 | 0 | 0 | 0 |
| TRACH3016805 | 0 | 0 | 0 | 8.013 | 0 | 0 | 0 |
| TRACH3037067 | 0 | 48.330 | 0 | 0 | 0 | 0 | 0 |
| TSTOM2000139 | 0 | 0 | 0 | 7.443 | 0 | 0 | 0 |
| TSTOM2000315 | 0 | 17.130 | 0 | 0 | 0 | 0 | 0 |
| TSTOM2000553 | 0 | 0 | 0 | 3.000 | 0 | 0 | 0 |
| TUTER2000904 | 0 | 0 | 0 | 4.968 | 0 | 0 | 0 |
| UMVEN1000186 | 0 | 0 | 0 | 0.940 | 0 | 11.927 | 0 |
| UMVEN2000453 | 0 | 3.925 | 3.517 | 0.929 | 5.555 | 0 | 0 |
| UTERU1000182 | 0 | 0 | 0 | 2.887 | 2.877 | 0 | 0 |
| UTERU1000384 | 0 | 0 | 0 | 12.684 | 0 | 0 | 0 |
| UTERU2000095 | 0 | 0 | 5.576 | 0.737 | 0 | 4.671 | 0 |
| UTERU2000263 | 0 | 0 | 0 | 0 | 0 | 2.891 | 0 |
| UTERU2000300 | 0 | 0 | 0 | 0 | 0 | 27.831 | 0 |
| UTERU2000338 | 0 | 0 | 0 | 0 | 11.831 | 0 | 72.584 |
| UTERU2000424 | 0 | 6.384 | 0 | 0 | 6.024 | 0 | 0 |
| UTERU2000537 | 0 | 38.565 | 0 | 0 | 0 | 0 | 0 |
| UTERU2000542 | 0 | 0 | 60.821 | 0 | 0 | 0 | 0 |
| UTERU2000696 | 0 | 0 | 0 | 5.064 | 0 | 0 | 0 |
| UTERU2001607 | 0 | 0 | 0 | 2.625 | 0 | 0 | 0 |
| UTERU2001658 | 0 | 0 | 0 | 0 | 31.413 | 0 | 0 |
| UTERU2002001 | 0 | 0 | 0 | 59.874 | 0 | 0 | 0 |
| UTERU2002410 | 0 | 0 | 0 | 2.090 | 2.082 | 0 | 0 |
| UTERU2003704 | 0 | 0 | 0 | 30.632 | 0 | 0 | 0 |
| UTERU2003926 | 0 | 0 | 0 | 59.874 | 0 | 0 | 0 |
| UTERU2004037 | 0 | 16.480 | 0 | 0 | 0 | 0 | 0 |
| UTERU2004197 | 0 | 0 | 0 | 3.579 | 0 | 11.346 | 0 |
| UTERU2004807 | 0 | 0 | 0 | 8.939 | 7.125 | 0 | 0 |
| UTERU2004929 | 0 | 0 | 0 | 0 | 41.168 | 0 | 0 |
| UTERU2005354 | 0 | 16.442 | 0 | 3.893 | 0 | 0 | 0 |
| UTERU2005664 | 0 | 0 | 75.272 | 0 | 0 | 0 | 0 |
| UTERU2006593 | 0 | 0 | 0 | 5.255 | 5.236 | 0 | 0 |
| UTERU2007081 | 0 | 0 | 0 | 0 | 0 | 82.551 | 0 |
| UTERU2008040 | 0 | 0 | 0 | 0 | 41.737 | 0 | 0 |
| UTERU2008085 | 0 | 0.679 | 6.083 | 0.161 | 0.320 | 0.510 | 1.965 |
| UTERU2008302 | 0 | 10.042 | 0 | 0 | 0 | 0 | 0 |
| UTERU2008938 | 0 | 0 | 0 | 8.760 | 0 | 0 | 0 |
| UTERU2008939 | 0 | 0 | 0 | 26.435 | 0 | 0 | 0 |
| UTERU2010417 | 0 | 0 | 0 | 1.122 | 0 | 1.779 | 0 |
| UTERU2011220 | 0 | 0 | 0 | 3.483 | 0 | 0 | 0 |
| UTERU2012286 | 0 | 19.044 | 0 | 0 | 0 | 0 | 0 |
| UTERU2012856 | 0 | 0 | 0 | 6.279 | 0 | 0 | 0 |
| UTERU2013502 | 0 | 0 | 0 | 0 | 59.786 | 0 | 0 |
| UTERU2014167 | 0 | 0 | 0 | 0 | 3.232 | 0 | 0 |
| UTERU2014898 | 0 | 0 | 0 | 2.708 | 0 | 0 | 0 |
| UTERU2016822 | 0 | 0 | 0 | 14.308 | 0 | 11.341 | 0 |
| UTERU2016979 | 0 | 0 | 69.671 | 0 | 0 | 0 | 0 |
| UTERU2017492 | 0 | 0 | 0 | 0 | 0 | 0 | 94.803 |
| UTERU2017613 | 0 | 0 | 0 | 0 | 36.467 | 0 | 0 |
| UTERU2018523 | 0 | 0 | 0 | 59.874 | 0 | 0 | 0 |
| UTERU2018884 | 0 | 0 | 0 | 2.757 | 0 | 8.741 | 0 |
| UTERU2019005 | 0 | 0 | 0 | 0 | 22.904 | 0 | 0 |
| UTERU2019257 | 0 | 0 | 0 | 42.729 | 0 | 0 | 0 |
| UTERU2023175 | 0 | 0 | 0 | 5.299 | 0 | 0 | 0 |
| UTERU2023262 | 0 | 0 | 84.958 | 0 | 0 | 0 | 0 |
| UTERU2024969 | 0 | 24.138 | 0 | 0 | 0 | 0 | 0 |
| UTERU3004477 | 0 | 0 | 0 | 42.729 | 0 | 0 | 0 |
| UTERU3005907 | 0 | 0 | 0 | 69.877 | 0 | 0 | 0 |
| UTERU3010604 | 0 | 0 | 0 | 59.874 | 0 | 0 | 0 |
| UTERU3018616 | 0 | 0 | 0 | 0 | 74.833 | 0 | 0 |

[2330] Genes whose expression levels were negligibly low in each of the above-described libraries are shown with their clone names below.

[2331] 3NB691000018, 3NB691000113, 3NB691000191, 3NB692000012, 3NB692000029, 3NB692000102, 3NB692000154, 3NB692000276, 3NB692000305, 3NB692000429, 3NB692000484, 3NB692000529, 3NB692000973, 3NB692001034, 3NB692001040, 3NB692001123, 3NB692001267, 3NB692001288, 3NB692001339, 3NB692001349, 3NB692001366, 3NB692001408, 3NB692001433, 3NB692001442, 3NB692001459, 3NB692001471, 3NB692001496, 3NB692001501, 3NB692001507, 3NB692001511, 3NB692001519, 3NB692001520, 3NB692001548, 3NB692001637, 3NB692001719, 3NB692001861, 3NB692002051, 3NB692002365, 3NB692002685, 3NB692002806, 3NB692003538, 3NB692004045, 3NB692004724, 3NB692005439, 3NB692006952, 3NB692008178, 3NB692008729, ACTVT2000380, ADIPS1000064, ADIPS2000069,

[2332] ADIPS2000088, ADIPS2000245, ADRGL1000002, ADRGL1000018, ADRGL1000033, ADRGL1000038, ADRGL1000065, ADRGL1000067, ADRGL1000111, ADRGL1000147, ADRGL1000160, ADRGL1000165, ADRGL1000182, ADRGL2000042, ADRGL2000056, ADRGL2000064, ADRGL2000074, ADRGL2000085, ADRGL2000097, ADRGL2000117, ADRGL2000142, ADRGL2000172, ADRGL2000248, ADRGL2000261, ADRGL2000323, ADRGL2000328, ADRGL2000353, ADRGL2000384, ADRGL2000428, ADRGL2000636, ADRGL2000644, ADRGL2000968, ADRGL2001119, ADRGL2001229, ADRGL2001287, ADRGL2001301, ADRGL2001354, ADRGL2001554, ADRGL2001651, ADRGL2001756, ADRGL2001830, ADRGL2001836, ADRGL2001854, ADRGL2002013, ADRGL2002029, ADRGL2002191, ADRGL2002260, ADRGL2002392, ADRGL2002477, ADRGL2002679,

[2333] ADRGL2002753, ADRGL2002857, ADRGL2003017, ADRGL2003329, ADRGL2003552, ADRGL2003585, ADRGL2003638, ADRGL2003684, ADRGL2003773, ADRGL2003785, ADRGL2004031, ADRGL2004077, ADRGL2004451, ADRGL2004459, ADRGL2004676, ADRGL2004708, ADRGL2004724, ADRGL2004749, ADRGL2004770, ADRGL2004777, ADRGL2004833, ADRGL2005336, ADRGL2005564, ADRGL2005756, ADRGL2005838, ADRGL2005926, ADRGL2005961, ADRGL2006034, ADRGL2006124, ADRGL2006177, ADRGL2006193, ADRGL2006377, ADRGL2006677, ADRGL2006732, ADRGL2006767, ADRGL2006817, ADRGL2006846, ADRGL2006886, ADRGL2007080, ADRGL2007125, ADRGL2007283, ADRGL2007313, ADRGL2007357, ADRGL2007636, ADRGL2007651, ADRGL2007810, ADRGL2007877, ADRGL2007906, ADRGL2007974, ADRGL2008023,

[2334] ADRGL2008331, ADRGL2008337, ADRGL2008535, ADRGL2008966, ADRGL2009146, ADRGL2009273, ADRGL2009324, ADRGL2009489, ADRGL2009533, ADRGL2009691, ADRGL2009755, ADRGL2010152, ADRGL2010315, ADRGL2010594, ADRGL2010860, ADRGL2010974, ADRGL2011190, ADRGL2011330, ADRGL2012038, ADRGL2012179, AHMSC1000138, ASTRO1000009, ASTRO1000018, ASTRO1000029, ASTRO1000096, ASTRO2000011, ASTRO2000095, ASTRO2000191, ASTRO2000278, ASTRO2000372, ASTRO2000381, ASTRO2000403, ASTRO2000417, ASTRO2000482, ASTRO2000533, ASTRO2000653, ASTRO2000662, ASTRO2000725, ASTRO2000801, ASTRO2001001, ASTRO2001008, ASTRO2001076, ASTRO2001088, ASTRO2001107, ASTRO2001122, ASTRO2001227, ASTRO2001249, ASTRO2001480, ASTRO2002024, ASTRO2002035,

[2335] ASTRO2002064, ASTRO2002202, ASTRO2002459, ASTRO2002571, ASTRO2002632, ASTRO2002659, ASTRO2002693, ASTRO2002720, ASTRO2002733, ASTRO2002743, ASTRO2002842, ASTRO2003024, ASTRO2003212, ASTRO2003316, ASTRO2003461, ASTRO2003574, ASTRO2003581, ASTRO2003632, ASTRO2003740, ASTRO2003840, ASTRO2003925, ASTRO2003960, ASTRO2004051, ASTRO2004177, ASTRO2004217, ASTRO2004297, ASTRO2004584, ASTRO2004751, ASTRO2004877, ASTRO2004974, ASTRO2005008, ASTRO2005081, ASTRO2005096, ASTRO2005273, ASTRO2005343, ASTRO2005360, ASTRO2005413, ASTRO2005423, ASTRO2005553, ASTRO2005557, ASTRO2005575, ASTRO2005593, ASTRO2005726, ASTRO2005896, ASTRO2005902, ASTRO2006356, ASTRO2006732, ASTRO2006747, ASTRO2006952, ASTRO2007047,

[2336] ASTRO2007221, ASTRO2007377, ASTRO2007515, ASTRO2007578, ASTRO2007643, ASTRO2007666, ASTRO2007956, ASTRO2007962, ASTRO2008040, ASTRO2008239, ASTRO2008409, ASTRO2008425, ASTRO2008508, ASTRO2008777, ASTRO2008895, ASTRO2008960, ASTRO2008972, ASTRO2009068, ASTRO2009118, ASTRO2009177, ASTRO2009333, ASTRO2009458, ASTRO2009526, ASTRO2009879, ASTRO2010072, ASTRO2010582, ASTRO2010615, ASTRO2010799, ASTRO2010962, ASTRO2010996, ASTRO2011149, ASTRO2011422, ASTRO2011426, ASTRO2011437, ASTRO2011461, ASTRO2011834, ASTRO2011893, ASTRO2013124, ASTRO2013671, ASTRO2013802, ASTRO2014135, ASTRO2014174, ASTRO2014211, ASTRO2014363, ASTRO2014392, ASTRO2014498, ASTRO2014561, ASTRO2014576, ASTRO2014863, ASTRO2014923,

[2337] ASTRO2014961, ASTRO2015162, ASTRO2015185, ASTRO2015328, ASTRO2015529, ASTRO2016044, ASTRO2016148, ASTRO2016681, ASTRO2016819, ASTRO2016847, ASTRO2016892, ASTRO2017348, ASTRO2017627, ASTRO2018169, ASTRO2018373, ASTRO2019039, ASTRO2019171, ASTRO3000154, ASTRO3000172, ASTRO3000177, ASTRO3000301, ASTRO3000474, ASTRO3000482, BEAST2000454, BGGI11000123, BGGI11000193, BGGI11000285, BGGI12000022, BGGI12000067, BGGI12000161, BGGI12000544, BGGI12000684, BGGI12000693, BGGI12001002, BGGI12001075, BGGI12001241, BGGI12001247, BGGI12001714, BLADE1000176, BLADE2000181, BLADE2000256, BLADE2000340, BLADE2000389, BLADE2000463, BLADE2000492, BLADE2000579, BLADE2000640, BLADE2000866, BLADE2000938, BLADE2001031,

[2338] BLADE2001133, BLADE2001138, BLADE2001141, BLADE2001371, BLADE2001458, BLADE2001575, BLADE2001753, BLADE2001935, BLADE2001940, BLADE2001987, BLADE2002073, BLADE2002310, BLADE2002730, BLADE2002738, BLADE2002744, BLADE2002782, BLADE2002947, BLADE2002972, BLADE2003474, BLADE2003916, BLADE2004089, BLADE2004345, BLADE2004389, BLADE2004462, BLADE2004628, BLADE2004670, BLADE2004849, BLADE2005036, BLADE2005038, BLADE2005229, BLADE2005459, BLADE2005792, BLADE2006043, BLADE2006412, BLADE2006415, BLADE2006607, BLADE2006826, BLADE2006830, BLADE2006849, BLADE2006947, BLADE2007033, BLADE2007043, BLADE2007666, BLADE2007722, BLADE2007735, BLADE2007744, BLADE2007799, BLADE2007923, BLADE2007935, BLADE2007958,

[2339] BLADE2008281, BLADE2008398, BLADE2008454, BLADE2008461, BLADE2008479, BLADE2008539, BLADE2008809, BLADE2008995, BLADE2009452, BLADE2009479, BLADE2009593, BNGH41000118, BNGH41000137, BNGH41000169, BNGH41000177, BNGH41000198, BNGH41000216, BNGH41000235, BNGH42000130, BNGH42000132, BNGH42000405, BNGH42000532, BNGH42000675, BNGH42000791, BNGH42000815, BNGH42000994, BNGH42001247, BNGH42001406, BNGH42001576, BNGH42001724, BNGH42002168, BNGH42002244, BNGH42002387, BNGH42002489, BNGH42003529, BNGH42003570, BNGH42003641, BNGH42004076, BNGH42004291, BNGH42004538, BNGH42004679, BNGH42005017, BNGH42005235, BNGH42005504, BNGH42006226, BNGH42006234, BNGH42007037, BNGH42007366, BNGH42007594, BNGH42007798,

[2340] BNGH42008199, BNGH42008510, BNGH42008649, BNGH42008743, BNGH42008832, BNGH42008943, BNGH42009021, BRACE1000020, BRACE1000047, BRACE1000051, BRACE1000065, BRACE1000073, BRACE1000084, BRACE1000087, BRACE1000092, BRACE1000093, BRACE1000101, BRACE1000114, BRACE1000124, BRACE1000166, BRACE1000169, BRACE1000187, BRACE1000258, BRACE1000451, BRACE1000475, BRACE1000572, BRACE2000061, BRACE2000077, BRACE2000078, BRACE2000100, BRACE2000109, BRACE2000141, BRACE2000148, BRACE2000183, BRACE2000229, BRACE2000232, BRACE2000245, BRACE2000256, BRACE2000266, BRACE2000267, BRACE2000280, BRACE2000300, BRACE2000307, BRACE2000331, BRACE2000332, BRACE2000347, BRACE2000351, BRACE2000368, BRACE2000392, BRACE2000441,

[2341] BRACE2000487, BRACE2000489, BRACE2000505, BRACE2000525, BRACE2000526, BRACE2000531, BRACE2000545, BRACE2000553, BRACE2000565, BRACE2000577, BRACE2000640, BRACE2000650, BRACE2000677, BRACE2000698, BRACE2000718, BRACE2000733, BRACE2000743, BRACE2000750, BRACE2000753, BRACE2000815, BRACE2000864, BRACE2000885, BRACE2000905, BRACE2000936, BRACE2000947, BRACE2000965, BRACE2000969, BRACE2000975, BRACE2000988, BRACE2001017, BRACE2001065, BRACE2001070, BRACE2001094, BRACE2001107, BRACE2001117, BRACE2001151, BRACE2001154, BRACE2001188, BRACE2001191, BRACE2001197, BRACE2001236, BRACE2001239, BRACE2001269, BRACE2001312, BRACE2001313, BRACE2001330, BRACE2001340, BRACE2001352, BRACE2001353, BRACE2001374,

[2342] BRACE2001375, BRACE2001423, BRACE2001424, BRACE2001445, BRACE2001453, BRACE2001455, BRACE2001492, BRACE2001496, BRACE2001534, BRACE2001543, BRACE2001564, BRACE2001588, BRACE2001607, BRACE2001626, BRACE2001677, BRACE2001692, BRACE2001705, BRACE2001709, BRACE2001711, BRACE2001726, BRACE2001733, BRACE2001737, BRACE2001742, BRACE2001777, BRACE2001779, BRACE2001834, BRACE2001855, BRACE2001859, BRACE2001865, BRACE2001872, BRACE2001881, BRACE2001898, BRACE2001923, BRACE2001942, BRACE2001944, BRACE2001954, BRACE2001971, BRACE2001972, BRACE2001973, BRACE2002026, BRACE2002034, BRACE2002050, BRACE2002081, BRACE2002139, BRACE2002142, BRACE2002151, BRACE2002157, BRACE2002176, BRACE2002202, BRACE2002206,

[2343] BRACE2002227, BRACE2002260, BRACE2002297, BRACE2002304, BRACE2002356, BRACE2002392, BRACE2002394, BRACE2002409, BRACE2002431, BRACE2002444, BRACE2002458, BRACE2002467, BRACE2002468, BRACE2002478, BRACE2002495, BRACE2002582, BRACE2002585, BRACE2002589, BRACE2002590, BRACE2002613, BRACE2002614, BRACE2002617, BRACE2002623, BRACE2002635, BRACE2002649, BRACE2002676, BRACE2002682, BRACE2002685, BRACE2002695, BRACE2002707, BRACE2002736, BRACE2002752, BRACE2002755, BRACE2002762, BRACE2002772, BRACE2002792, BRACE2002796, BRACE2002803, BRACE2002807, BRACE2002812, BRACE2002834, BRACE2002849, BRACE2002857, BRACE2002884, BRACE2002896, BRACE2002948, BRACE2003037, BRACE2003078, BRACE2003097, BRACE2003110,

[2344] BRACE2003168, BRACE2003199, BRACE2003210, BRACE2003269, BRACE2003285, BRACE2003304, BRACE2003319, BRACE2003398, BRACE2003420, BRACE2003428, BRACE2003431, BRACE2003512, BRACE2003516, BRACE2003527, BRACE2003539, BRACE2003540, BRACE2003594, BRACE2003598, BRACE2003609, BRACE2003614, BRACE2003639, BRACE2003700, BRACE2003713, BRACE2003766, BRACE2003785, BRACE2003788, BRACE2003800, BRACE2003802, BRACE2003825, BRACE2003845, BRACE2003846, BRACE2003847, BRACE2003848, BRACE2003873, BRACE2003885, BRACE2003887, BRACE2003892, BRACE2003904, BRACE2003905, BRACE2003928, BRACE2003954, BRACE2003982, BRACE2003987, BRACE2005034, BRACE2005047, BRACE2005063, BRACE2005083, BRACE2005090, BRACE2005099, BRACE2005118,

[2345] BRACE2005124, BRACE2005138, BRACE2005151, BRACE2005160, BRACE2005169, BRACE2005189, BRACE2005193, BRACE2005196, BRACE2005198, BRACE2005216, BRACE2005231, BRACE2005243, BRACE2005251, BRACE2005253, BRACE2005290, BRACE2005298, BRACE2005328, BRACE2005329, BRACE2005337, BRACE2005348, BRACE2005363, BRACE2005395, BRACE2005408, BRACE2005433, BRACE2005450, BRACE2005453, BRACE2005457, BRACE2005460, BRACE2005489, BRACE2005518, BRACE2005556, BRACE2005562, BRACE2005624, BRACE2005642, BRACE2005661, BRACE2005667, BRACE2005681, BRACE2005719, BRACE2005731, BRACE2005742, BRACE2005762, BRACE2005773, BRACE2005787, BRACE2005795, BRACE2005800, BRACE2005858, BRACE2005869, BRACE2005875, BRACE2005881, BRACE2005898,

[2346] BRACE2005904, BRACE2005906, BRACE2005907, BRACE2005911, BRACE2005949, BRACE2005981, BRACE2005991, BRACE2006055, BRACE2006072, BRACE2006075, BRACE2006084, BRACE2006089, BRACE2006102, BRACE2006105, BRACE2006122, BRACE2006137, BRACE2006143, BRACE2006167, BRACE2006174, BRACE2006240, BRACE2006245, BRACE2006249, BRACE2006274, BRACE2006281, BRACE2006298, BRACE2006344, BRACE2006354, BRACE2006363, BRACE2006378, BRACE2006380, BRACE2006393, BRACE2006413, BRACE2006417, BRACE2006453, BRACE2006459, BRACE2006488, BRACE2006534, BRACE2006540, BRACE2006564, BRACE2006587, BRACE2006598, BRACE2006636, BRACE2006685, BRACE2006703, BRACE2006743, BRACE2006783, BRACE2006821, BRACE2006833, BRACE2006859, BRACE2006871,

[2347] BRACE2006909, BRACE2006911, BRACE2006924, BRACE2006935, BRACE2006937, BRACE2006944, BRACE2006951, BRACE2006982, BRACE2006986, BRACE2007013, BRACE2007064, BRACE2007068, BRACE2007087, BRACE2007109, BRACE2007138, BRACE2007174, BRACE2007197, BRACE2007201, BRACE2007203, BRACE2007232, BRACE2007262, BRACE2007274, BRACE2007281, BRACE2007295, BRACE2007358, BRACE2007396, BRACE2007398, BRACE2007401, BRACE2007411, BRACE2007447, BRACE2007477, BRACE2007502, BRACE2007503, BRACE2007522, BRACE2007527, BRACE2007538, BRACE2007563, BRACE2007577, BRACE2007621, BRACE2007640, BRACE2007641, BRACE2007646, BRACE2007663, BRACE2007682, BRACE2007685, BRACE2007708, BRACE2007727, BRACE2007749, BRACE2007760, BRACE2007761,

[2348] BRACE2007764, BRACE2007768, BRACE2007769, BRACE2007784, BRACE2007786, BRACE2007798, BRACE2007799, BRACE2007801, BRACE2007832, BRACE2007836, BRACE2007868, BRACE2007882, BRACE2007888, BRACE2007902, BRACE2007920, BRACE2007937, BRACE2007944, BRACE2007952, BRACE2008008, BRACE2008015, BRACE2008021, BRACE2008097, BRACE2008102, BRACE2008114, BRACE2008144, BRACE2008172, BRACE2008216, BRACE2008218, BRACE2008251, BRACE2008276, BRACE2008295, BRACE2008308, BRACE2008336, BRACE2008361, BRACE2008380, BRACE2008385, BRACE2008399, BRACE2008401, BRACE2008402, BRACE2008410, BRACE2008420, BRACE2008443, BRACE2008473, BRACE2008480, BRACE2008481, BRACE2008488, BRACE2008495, BRACE2008500, BRACE2008553, BRACE2008594,

[2349] BRACE2008604, BRACE2008615, BRACE2008622, BRACE2008629, BRACE2008655, BRACE2008656, BRACE2008708, BRACE2008710, BRACE2008754, BRACE2008797, BRACE2008847, BRACE2008857, BRACE2008861, BRACE2008867, BRACE2008881, BRACE2008883, BRACE2008917, BRACE2008919, BRACE2008948, BRACE2008960, BRACE2008999, BRACE2009014, BRACE2009016, BRACE2009031, BRACE2009044, BRACE2009045, BRACE2009053, BRACE2009122, BRACE2009131, BRACE2009185, BRACE2009188, BRACE2009212, BRACE2009221, BRACE2009235, BRACE2009238, BRACE2009255, BRACE2009270, BRACE2009272, BRACE2009274, BRACE2009275, BRACE2009293, BRACE2009307, BRACE2009311, BRACE2009318, BRACE2009323, BRACE2009366, BRACE2009421, BRACE2009428, BRACE2009434, BRACE2009437,

[2350] BRACE2009483, BRACE2009533, BRACE2009558, BRACE2009566, BRACE2009591, BRACE2009620, BRACE2009654, BRACE2009721, BRACE2009732, BRACE2009754, BRACE2009828, BRACE2009886, BRACE2009907, BRACE2009957, BRACE2010170, BRACE2010171, BRACE2010203, BRACE2010208, BRACE2010336, BRACE2010348, BRACE2010440, BRACE2010444, BRACE2010477, BRACE2010489, BRACE2010535, BRACE2010550, BRACE2010598, BRACE2010632, BRACE2010642, BRACE2010651, BRACE2010669, BRACE2010684, BRACE2010753, BRACE2010813, BRACE2010828, BRACE2010837, BRACE2010888, BRACE2010937, BRACE2010983, BRACE2011007, BRACE2011025, BRACE2011183, BRACE2011199, BRACE2011265, BRACE2011389, BRACE2011478, BRACE2011545, BRACE2011592, BRACE2011611, BRACE2011646,

[2351] BRACE2011677, BRACE2011703, BRACE2011747, BRACE2011838, BRACE2011892, BRACE2011904, BRACE2011947, BRACE2012061, BRACE2012062, BRACE2012185, BRACE2012222, BRACE2012232, BRACE2012291, BRACE2012317, BRACE2012510, BRACE2012528, BRACE2012625, BRACE2012653, BRACE2012814, BRACE2012833, BRACE2012838, BRACE2012936, BRACE2012947, BRACE2013009, BRACE2013010, BRACE2013126, BRACE2013132, BRACE2013149, BRACE2013369, BRACE2013806, BRACE2013855, BRACE2013911, BRACE2014108, BRACE2014161, BRACE2014232, BRACE2014257, BRACE2014268, BRACE2014306, BRACE2014475, BRACE2014657, BRACE2014746, BRACE2014780, BRACE2014818, BRACE2014821, BRACE2014824, BRACE2014850, BRACE2014854, BRACE2015031, BRACE2015058, BRACE2015132,

[2352] BRACE2015262, BRACE2015270, BRACE2015314, BRACE2015352, BRACE2015368, BRACE2015412, BRACE2015436, BRACE2015741, BRACE2015756, BRACE2015969, BRACE2015995, BRACE2016058, BRACE2016194, BRACE2016315, BRACE2016325, BRACE2016335, BRACE2016362, BRACE2016465, BRACE2016516, BRACE2016583, BRACE2016708, BRACE2016821, BRACE2016896, BRACE2016981, BRACE2017108, BRACE2017124, BRACE2017298, BRACE2017359, BRACE2017410, BRACE2017438, BRACE2017580, BRACE2017587, BRACE2017720, BRACE2017844, BRACE2017872, BRACE2017929, BRACE2017934, BRACE2017985, BRACE2017992, BRACE2018337, BRACE2018443, BRACE2018448, BRACE2018568, BRACE2018700, BRACE2018727, BRACE2018736, BRACE2018759, BRACE2018762, BRACE2018782, BRACE2018847,

[2353] BRACE2019004, BRACE2019044, BRACE2019244, BRACE2019258, BRACE2019327, BRACE2019348, BRACE2019371, BRACE2019467, BRACE2019510, BRACE2019519, BRACE2019528, BRACE2019618, BRACE2019696, BRACE2019703, BRACE2019843, BRACE2019865, BRACE2019872, BRACE2019877, BRACE2020028, BRACE2020077, BRACE2020097, BRACE2020157, BRACE2020278, BRACE2020358, BRACE2020467, BRACE2020584, BRACE2020652, BRACE2020709, BRACE2020742, BRACE2020756, BRACE2020863, BRACE2020982, BRACE2021014, BRACE2021143, BRACE2021148, BRACE2021245, BRACE2021254, BRACE2021264, BRACE2021344, BRACE2021433, BRACE2021478, BRACE2021541, BRACE2021670, BRACE2021695, BRACE2021708, BRACE2021721, BRACE2021932, BRACE2021936, BRACE2022030, BRACE2022158,

[2354] BRACE2022196, BRACE2022270, BRACE2022328, BRACE2022333, BRACE2022389, BRACE2022394, BRACE2022435, BRACE2022448, BRACE2022450, BRACE2022549, BRACE2022633, BRACE2022693, BRACE2022848, BRACE2022928, BRACE2022990, BRACE2023069, BRACE2023070, BRACE2023223, BRACE2023268, BRACE2023284, BRACE2023404, BRACE2023451, BRACE2023540, BRACE2023633, BRACE2023718, BRACE2023727, BRACE2023744, BRACE2023800, BRACE2023801, BRACE2024074, BRACE2024222, BRACE2024610, BRACE2024627, BRACE2024781, BRACE2024826, BRACE2025018, BRACE2025316, BRACE2025333, BRACE2025437, BRACE2025452, BRACE2025492, BRACE2025710, BRACE2025796, BRACE2025992, BRACE2026054, BRACE2026131, BRACE2026141, BRACE2026142, BRACE2026293, BRACE2026294,

[2355] BRACE2026404, BRACE2026675, BRACE2026725, BRACE2026920, BRACE2026971, BRACE2027018, BRACE2027221, BRACE2027258, BRACE2027312, BRACE2027382, BRACE2027389, BRACE2027408, BRACE2027643, BRACE2027767, BRACE2027770, BRACE2027879, BRACE2027896, BRACE2027970, BRACE2028171, BRACE2028392, BRACE2028410, BRACE2028636, BRACE2028741, BRACE2028956, BRACE2028970, BRACE2029112, BRACE2029356, BRACE2029396, BRACE2029581, BRACE2029644, BRACE2029849, BRACE2030039, BRACE2030096, BRACE2030323, BRACE2030326, BRACE2030341, BRACE2030345, BRACE2030736, BRACE2030883, BRACE2030884, BRACE2031154, BRACE2031232, BRACE2031527, BRACE2031531, BRACE2031553, BRACE2031899, BRACE2032044, BRACE2032090, BRACE2032134, BRACE2032148,

[2356] BRACE2032182, BRACE2032329, BRACE2032385, BRACE2032436, BRACE2032477, BRACE2032502, BRACE2032538, BRACE2032584, BRACE2032823, BRACE2033128, BRACE2033394, BRACE2033478, BRACE2033720, BRACE2033786, BRACE2034434, BRACE2034523, BRACE2034616, BRACE2034622, BRACE2034870, BRACE2035003, BRACE2035120, BRACE2035124, BRACE2035191, BRACE2035278, BRACE2035381, BRACE2035441, BRACE2035485, BRACE2036005, BRACE2036096, BRACE2036743, BRACE2036830, BRACE2036834, BRACE2036900, BRACE2037132, BRACE2037294, BRACE2037299, BRACE2037310, BRACE2037431, BRACE2037692, BRACE2037847, BRACE2038114, BRACE2038269, BRACE2038271, BRACE2038329, BRACE2038492, BRACE2038551, BRACE2038618, BRACE2039009, BRACE2039128, BRACE2039170,

[2357] BRACE2039249, BRACE2039286, BRACE2039297, BRACE2039327, BRACE2039362, BRACE2039475, BRACE2039600, BRACE2039607, BRACE2039734, BRACE2039823, BRACE2039832, BRACE2039893, BRACE2039986, BRACE2040138, BRACE2040325, BRACE2040514, BRACE2040640, BRACE2040987, BRACE2041009, BRACE2041095, BRACE2041200, BRACE2041264, BRACE2041890, BRACE2041898, BRACE2042394, BRACE2042398, BRACE2042550, BRACE2042620, BRACE2042628, BRACE2042873, BRACE2043036, BRACE2043105, BRACE2043142, BRACE2043248, BRACE2043349, BRACE2043381, BRACE2043774, BRACE2043942, BRACE2044057, BRACE2044105, BRACE2044263, BRACE2044286, BRACE2044304, BRACE2044473, BRACE2044510, BRACE2044640, BRACE2044816, BRACE2044946, BRACE2044949, BRACE2045300,

[2358] BRACE2045428, BRACE2045445, BRACE2045596, BRACE2045772, BRACE2045947, BRACE2045954, BRACE2046251, BRACE2046295, BRACE2046976, BRACE2047011, BRACE2047232, BRACE2047350, BRACE2047377, BRACE2047385, BRACE2047492, BRACE2047558, BRACE2047573, BRACE2047835, BRACE2047893, BRACE2047975, BRACE3000404, BRACE3000520, BRACE3000697, BRACE3000840, BRACE3000973, BRACE3001002, BRACE3001058, BRACE3001066, BRACE3001113, BRACE3001217, BRACE3001299, BRACE3001384, BRACE3001391, BRACE3001403, BRACE3001595, BRACE3001754, BRACE3001948, BRACE3001973, BRACE3002298, BRACE3002344, BRACE3002390, BRACE3002420, BRACE3002508, BRACE3002541, BRACE3002756, BRACE3003004, BRACE3003053, BRACE3003192, BRACE3003413, BRACE3003595,

[2359] BRACE3003698, BRACE3003866, BRACE3003920, BRACE3004046, BRACE3004058, BRACE3004113, BRACE3004150, BRACE3004205, BRACE3004358, BRACE3004435, BRACE3004477, BRACE3004767, BRACE3004772, BRACE3004783, BRACE3004862, BRACE3004880, BRACE3004887, BRACE3004981, BRACE3004996, BRACE3004998, BRACE3005103, BRACE3005127, BRACE3005145, BRACE3005217, BRACE3005225, BRACE3005430, BRACE3005499, BRACE3005760, BRACE3005870, BRACE3005903, BRACE3005938, BRACE3005989, BRACE3006113, BRACE3006185, BRACE3006226, BRACE3006462, BRACE3006463, BRACE3006553, BRACE3006872, BRACE3006917, BRACE3007058, BRACE3007084, BRACE3007085, BRACE3007258, BRACE3007322, BRACE3007472, BRACE3007480, BRACE3007559, BRACE3007625, BRACE3007642,

[2360] BRACE3007649, BRACE3007767, BRACE3007869, BRACE3008036, BRACE3008066, BRACE3008092, BRACE3008095, BRACE3008137, BRACE3008255, BRACE3008337, BRACE3008384, BRACE3008720, BRACE3008772, BRACE3009044, BRACE3009075, BRACE3009090, BRACE3009127, BRACE3009197, BRACE3009237, BRACE3009265, BRACE3009297, BRACE3009377, BRACE3009392, BRACE3009416, BRACE3009539, BRACE3009574, BRACE3009701, BRACE3009708, BRACE3009724, BRACE3009993, BRACE3010076, BRACE3010079, BRACE3010086, BRACE3010221, BRACE3010283, BRACE3010315, BRACE3010397, BRACE3010416, BRACE3010435, BRACE3010702, BRACE3010862, BRACE3011271, BRACE3011421, BRACE3011447, BRACE3011505, BRACE3011634, BRACE3011774, BRACE3012357, BRACE3012574, BRACE3012806,

[2361] BRACE3012930, BRACE3013119, BRACE3013418, BRACE3013576, BRACE3013740, BRACE3013780, BRACE3013874, BRACE3013936, BRACE3013986, BRACE3014005, BRACE3014068, BRACE3014231, BRACE3014290, BRACE3014317, BRACE3014523, BRACE3014714, BRACE3014807, BRACE3014942, BRACE3015090, BRACE3015121, BRACE3015262, BRACE3015521, BRACE3015808, BRACE3015829, BRACE3015894, BRACE3015898, BRACE3016020, BRACE3016122, BRACE3016167, BRACE3016170, BRACE3016580, BRACE3016788, BRACE3016810, BRACE3016862, BRACE3016884, BRACE3017083, BRACE3017253, BRACE3018083, BRACE3018308, BRACE3018963, BRACE3019055, BRACE3019071, BRACE3019084, BRACE3019570, BRACE3019611, BRACE3019817, BRACE3019828, BRACE3019941, BRACE3020151, BRACE3020194,

[2362] BRACE3020286, BRACE3020356, BRACE3020594, BRACE3020669, BRACE3020671, BRACE3020890, BRACE3021148, BRACE3021430, BRACE3021517, BRACE3021805, BRACE3022051, BRACE3022303, BRACE3022312, BRACE3022340, BRACE3022847, BRACE3023604, BRACE3023912, BRACE3024073, BRACE3024359, BRACE3024379, BRACE3024444, BRACE3024497, BRACE3024537, BRACE3024659, BRACE3024662, BRACE3024879, BRACE3025153, BRACE3025302, BRACE3025457, BRACE3025531, BRACE3025627, BRACE3025630, BRACE3025719, BRACE3026008, BRACE3026075, BRACE3026161, BRACE3026290, BRACE3026345, BRACE3026456, BRACE3026735, BRACE3026802, BRACE3026844, BRACE3026947, BRACE3026993, BRACE3027242, BRACE3027256, BRACE3027326, BRACE3027478, BRACE3027480, BRACE3027931,

[2363] BRACE3027976, BRACE3028214, BRACE3028241, BRACE3028360, BRACE3028895, BRACE3028998, BRACE3029005, BRACE3029021, BRACE3029205, BRACE3029447, BRACE3030057, BRACE3030103, BRACE3030538, BRACE3030748, BRACE3030866, BRACE3031161, BRACE3031184, BRACE3031185, BRACE3031315, BRACE3031372, BRACE3031579, BRACE3031728, BRACE3031838, BRACE3031843, BRACE3032427, BRACE3032455, BRACE3032537, BRACE3032538, BRACE3032771, BRACE3032980, BRACE3032983, BRACE3033525, BRACE3034159, BRACE3034183, BRACE3034389, BRACE3034964, BRACE3034993, BRACE3035168, BRACE3035227, BRACE3036156, BRACE3036271, BRACE3037612, BRACE3037637, BRACE3037803, BRACE3038012, BRACE3038030, BRACE3038569, BRACE3038570, BRACE3038687, BRACE3038760,

[2364] BRACE3039288, BRACE3039358, BRACE3039378, BRACE3039454, BRACE3040012, BRACE3040239, BRACE3040504, BRACE3040644, BRACE3040856, BRACE3040863, BRACE3041059, BRACE3041162, BRACE3041827, BRACE3042046, BRACE3042210, BRACE3042326, BRACE3042409, BRACE3042432, BRACE3042594, BRACE3043597, BRACE3044090, BRACE3044172, BRACE3044247, BRACE3044377, BRACE3044389, BRACE3044495, BRACE3045011, BRACE3045033, BRACE3045078, BRACE3045145, BRACE3045424, BRACE3045708, BRACE3045981, BRACE3046049, BRACE3046152, BRACE3046294, BRACE3046450, BRACE3046466, BRACE3046491, BRACE3046609, BRACE3046762, BRACE3046837, BRACE3046855, BRACE3046966, BRACE3047018, BRACE3047482, BRACE3047801, BRALZ1000047, BRALZ1000103, BRALZ2000189,

[2365] BRALZ2000263, BRALZ2000988, BRALZ2001038, BRALZ2001279, BRALZ2001350, BRALZ2001445, BRALZ2001559, BRALZ2001743, BRALZ2001834, BRALZ2002174, BRALZ2002418, BRALZ2002477, BRALZ2003119, BRALZ2003330, BRALZ2003453, BRALZ2003525, BRALZ2004397, BRALZ2005467, BRALZ2005471, BRALZ2005888, BRALZ2005950, BRALZ2005992, BRALZ2006288, BRALZ2006474, BRALZ2006560, BRALZ2006734, BRALZ2006800, BRALZ2006976, BRALZ2007376, BRALZ2007545, BRALZ2007576, BRALZ2007661, BRALZ2007790, BRALZ2007793, BRALZ2007952, BRALZ2008031, BRALZ2008166, BRALZ2008462, BRALZ2008617, BRALZ2008696, BRALZ2008763, BRALZ2008869, BRALZ2008930, BRALZ2009446, BRALZ2009486, BRALZ2010186, BRALZ2010842, BRALZ2011337, BRALZ2011796, BRALZ2011880,

[2366] BRALZ2012050, BRALZ2012183, BRALZ2012848, BRALZ2013621, BRALZ2013690, BRALZ2014054, BRALZ2014316, BRALZ2014484, BRALZ2014951, BRALZ2015168, BRALZ2015811, BRALZ2016085, BRALZ2016498, BRALZ2017359, BRALZ2017531, BRALZ2017607, BRALZ2017620, BRALZ2017844, BRALZ2018342, BRALZ2018492, BRALZ2018834, BRALZ2019047, BRAMY1000095, BRAMY1000098, BRAMY1000130, BRAMY1000157, BRAMY1000173, BRAMY2000021, BRAMY2000025, BRAMY2000052, BRAMY2000076, BRAMY2000086, BRAMY2000151, BRAMY2000181, BRAMY2000196, BRAMY2000231, BRAMY2000277, BRAMY2000388, BRAMY2000411, BRAMY2000508, BRAMY2000562, BRAMY2000585, BRAMY2000653, BRAMY2000814, BRAMY2000946, BRAMY2000981, BRAMY2000987, BRAMY2001068, BRAMY2001114, BRAMY2001203,

[2367] BRAMY2001282, BRAMY2001367, BRAMY2001427, BRAMY2001473, BRAMY2001678, BRAMY2002005, BRAMY2002044, BRAMY2002072, BRAMY2002158, BRAMY2002311, BRAMY2002339, BRAMY2002364, BRAMY2002369, BRAMY2002479, BRAMY2002493, BRAMY2002525, BRAMY2002584, BRAMY2002604, BRAMY2002621, BRAMY2002638, BRAMY2002739, BRAMY2002799, BRAMY2002853, BRAMY2002862, BRAMY2002956, BRAMY2003008, BRAMY2003037, BRAMY2003117, BRAMY2003287, BRAMY2003325, BRAMY2003529, BRAMY2003538, BRAMY2003585, BRAMY2003634, BRAMY2003653, BRAMY2003681, BRAMY2003893, BRAMY2003897, BRAMY2003898, BRAMY2003904, BRAMY2003926, BRAMY2003929, BRAMY2004031, BRAMY2004058, BRAMY2004183, BRAMY2004335, BRAMY2004351, BRAMY2004352, BRAMY2004387, BRAMY2004492,

[2368] BRAMY2004524, BRAMY2004537, BRAMY2004542, BRAMY2004756, BRAMY2004771, BRAMY2005052, BRAMY2005064, BRAMY2005094, BRAMY2005151, BRAMY2005182, BRAMY2005244, BRAMY2005391, BRAMY2005488, BRAMY2005576, BRAMY2005648, BRAMY2005662, BRAMY2005708, BRAMY2005711, BRAMY2006092, BRAMY2006118, BRAMY2006149, BRAMY2006375, BRAMY2006397, BRAMY2006411, BRAMY2006459, BRAMY2006466, BRAMY2006659, BRAMY2006779, BRAMY2006809, BRAMY2006879, BRAMY2007043, BRAMY2007110, BRAMY2007185, BRAMY2007244, BRAMY2007249, BRAMY2007255, BRAMY2007287, BRAMY2007308, BRAMY2007411, BRAMY2007458, BRAMY2007486, BRAMY2007546, BRAMY2007567, BRAMY2007594, BRAMY2007610, BRAMY2007613, BRAMY2007653, BRAMY2007753, BRAMY2007859, BRAMY2008333,

[2369] BRAMY2008382, BRAMY2008563, BRAMY2008583, BRAMY2008977, BRAMY2008979, BRAMY2009013, BRAMY2009023, BRAMY2009034, BRAMY2009105, BRAMY2009123, BRAMY2009192, BRAMY2009344, BRAMY2009349, BRAMY2009394, BRAMY2009489, BRAMY2009508, BRAMY2009528, BRAMY2009557, BRAMY2009612, BRAMY2009693, BRAMY2009934, BRAMY2010068, BRAMY2010135, BRAMY2010145, BRAMY2010171, BRAMY2010208, BRAMY2010239, BRAMY2010272, BRAMY2010290, BRAMY2010357, BRAMY2010366, BRAMY2010395, BRAMY2010441, BRAMY2010442, BRAMY2010464, BRAMY2010581, BRAMY2010798, BRAMY2010808, BRAMY2010919, BRAMY2011064, BRAMY2011105, BRAMY2011178, BRAMY2011196, BRAMY2011216, BRAMY2011253, BRAMY2011446, BRAMY2011480, BRAMY2011639, BRAMY2011679, BRAMY2011811,

[2370] BRAMY2011841, BRAMY2011846, BRAMY2011849, BRAMY2011872, BRAMY2011961, BRAMY2012017, BRAMY2012119, BRAMY2012162, BRAMY2012163, BRAMY2012277, BRAMY2012340, BRAMY2012426, BRAMY2012497, BRAMY2012517, BRAMY2012555, BRAMY2012568, BRAMY2012581, BRAMY2012691, BRAMY2012721, BRAMY2012731, BRAMY2012776, BRAMY2012880, BRAMY2012881, BRAMY2013169, BRAMY2013200, BRAMY2013216, BRAMY2013405, BRAMY2013414, BRAMY2013572, BRAMY2013621, BRAMY2013659, BRAMY2013722, BRAMY2013736, BRAMY2013756, BRAMY2013944, BRAMY2013975, BRAMY2014019, BRAMY2014205, BRAMY2014387, BRAMY2014462, BRAMY2014469, BRAMY2014541, BRAMY2014754, BRAMY2015211, BRAMY2015251, BRAMY2015311, BRAMY2015420, BRAMY2015503, BRAMY2015516, BRAMY2015550,

[2371] BRAMY2015551, BRAMY2015559, BRAMY2015688, BRAMY2015705, BRAMY2015782, BRAMY2015833, BRAMY2015855, BRAMY2015890, BRAMY2015911, BRAMY2015925, BRAMY2016002, BRAMY2016020, BRAMY2016070, BRAMY2016251, BRAMY2016325, BRAMY2016327, BRAMY2016386, BRAMY2016771, BRAMY2016892, BRAMY2016938, BRAMY2016953, BRAMY2017014, BRAMY2017249, BRAMY2017348, BRAMY2017450, BRAMY2017455, BRAMY2017528, BRAMY2017864, BRAMY2018027, BRAMY2018106, BRAMY2018122, BRAMY2018126, BRAMY2018272, BRAMY2018273, BRAMY2018279, BRAMY2018295, BRAMY2018308, BRAMY2018396, BRAMY2018467, BRAMY2018635, BRAMY2018785, BRAMY2019055, BRAMY2019111, BRAMY2019277, BRAMY2019300, BRAMY2019468, BRAMY2019509, BRAMY2019600, BRAMY2019643, BRAMY2019710,

[2372] BRAMY2019963, BRAMY2019985, BRAMY2019989, BRAMY2020050, BRAMY2020058, BRAMY2020106, BRAMY2020270, BRAMY2020354, BRAMY2020355, BRAMY2020412, BRAMY2020445, BRAMY2020466, BRAMY2020520, BRAMY2020574, BRAMY2020634, BRAMY2020713, BRAMY2021040, BRAMY2021063, BRAMY2021098, BRAMY2021142, BRAMY2021276, BRAMY2021310, BRAMY2021388, BRAMY2021498, BRAMY2021523, BRAMY2021710, BRAMY2021732, BRAMY2021746, BRAMY2021825, BRAMY2021867, BRAMY2021962, BRAMY2021982, BRAMY2022052, BRAMY2022160, BRAMY2022168, BRAMY2022263, BRAMY2022301, BRAMY2022320, BRAMY2022383, BRAMY2022445, BRAMY2022454, BRAMY2022493, BRAMY2022525, BRAMY2022532, BRAMY2022723, BRAMY2022796, BRAMY2022929, BRAMY2022980, BRAMY2022984, BRAMY2023060,

[2373] BRAMY2023110, BRAMY2023115, BRAMY2023161, BRAMY2023172, BRAMY2023238, BRAMY2023327, BRAMY2023358, BRAMY2023406, BRAMY2023482, BRAMY2023514, BRAMY2023729, BRAMY2023786, BRAMY2023852, BRAMY2023863, BRAMY2024004, BRAMY2024073, BRAMY2024312, BRAMY2024374, BRAMY2024390, BRAMY2024416, BRAMY2024449, BRAMY2024489, BRAMY2024497, BRAMY2024514, BRAMY2024530, BRAMY2024535, BRAMY2024545, BRAMY2024576, BRAMY2024593, BRAMY2024711, BRAMY2024715, BRAMY2024728, BRAMY2024849, BRAMY2025024, BRAMY2025032, BRAMY2025121, BRAMY2025175, BRAMY2025218, BRAMY2025230, BRAMY2025272, BRAMY2025277, BRAMY2025495, BRAMY2025812, BRAMY2025996, BRAMY2026009, BRAMY2026091, BRAMY2026168, BRAMY2026300, BRAMY2026347, BRAMY2026395,

[2374] BRAMY2026405, BRAMY2026533, BRAMY2026538, BRAMY2026685, BRAMY2026713, BRAMY2026778, BRAMY2026824, BRAMY2026899, BRAMY2026902, BRAMY2026904, BRAMY2026976, BRAMY2027073, BRAMY2027114, BRAMY2027140, BRAMY2027242, BRAMY2027396, BRAMY2027451, BRAMY2027461, BRAMY2027467, BRAMY2027587, BRAMY2027714, BRAMY2027717, BRAMY2027739, BRAMY2027752, BRAMY2027782, BRAMY2028072, BRAMY2028183, BRAMY2028188, BRAMY2028269, BRAMY2028282, BRAMY2028472, BRAMY2028516, BRAMY2028565, BRAMY2028593, BRAMY2028682, BRAMY2028783, BRAMY2028856, BRAMY2028914, BRAMY2029204, BRAMY2029602, BRAMY2029988, BRAMY2030098, BRAMY2030109, BRAMY2030206, BRAMY2030477, BRAMY2030545, BRAMY2030607, BRAMY2030702, BRAMY2030703, BRAMY2030768,

[2375] BRAMY2030799, BRAMY2030859, BRAMY2030915, BRAMY2031317, BRAMY2031377, BRAMY2031442, BRAMY2031516, BRAMY2032014, BRAMY2032231, BRAMY2032242, BRAMY2032290, BRAMY2032311, BRAMY2032317, BRAMY2032344, BRAMY2032589, BRAMY2032678, BRAMY2032696, BRAMY2032777, BRAMY2032994, BRAMY2033003, BRAMY2033116, BRAMY2033240, BRAMY2033267, BRAMY2033316, BRAMY2033332, BRAMY2033506, BRAMY2033594, BRAMY2033895, BRAMY2033914, BRAMY2034072, BRAMY2034185, BRAMY2034187, BRAMY2034305, BRAMY2034561, BRAMY2034920, BRAMY2034993, BRAMY2035070, BRAMY2035449, BRAMY2035545, BRAMY2035606, BRAMY2035718, BRAMY2035719, BRAMY2035801, BRAMY2035869, BRAMY2035923, BRAMY2036076, BRAMY2036079, BRAMY2036254, BRAMY2036266, BRAMY2036387,

[2376] BRAMY2036396, BRAMY2036567, BRAMY2036615, BRAMY2036699, BRAMY2036913, BRAMY2036918, BRAMY2036968, BRAMY2037328, BRAMY2037609, BRAMY2037629, BRAMY2037800, BRAMY2037823, BRAMY2037971, BRAMY2038100, BRAMY2038128, BRAMY2038317, BRAMY2038475, BRAMY2038484, BRAMY2038516, BRAMY2038832, BRAMY2038846, BRAMY2038887, BRAMY2038904, BRAMY2039287, BRAMY2039300, BRAMY2039314, BRAMY2039341, BRAMY2039630, BRAMY2039695, BRAMY2039728, BRAMY2039872, BRAMY2040051, BRAMY2040095, BRAMY2040159, BRAMY2040214, BRAMY2040478, BRAMY2040915, BRAMY2041261, BRAMY2041347, BRAMY2041378, BRAMY2041384, BRAMY2041434, BRAMY2041507, BRAMY2041542, BRAMY2041738, BRAMY2042122, BRAMY2042131, BRAMY2042178, BRAMY2042195, BRAMY2042244,

[2377] BRAMY2042549, BRAMY2042596, BRAMY2042612, BRAMY2042641, BRAMY2042711, BRAMY2042760, BRAMY2042804, BRAMY2042899, BRAMY2042918, BRAMY2043069, BRAMY2043103, BRAMY2043314, BRAMY2043345, BRAMY2044246, BRAMY2044317, BRAMY2044349, BRAMY2044686, BRAMY2044838, BRAMY2045036, BRAMY2045299, BRAMY2045471, BRAMY2045530, BRAMY2046109, BRAMY2046478, BRAMY2046489, BRAMY2046537, BRAMY2046667, BRAMY2046742, BRAMY2046871, BRAMY2046984, BRAMY2046989, BRAMY2047169, BRAMY2047280, BRAMY2047420, BRAMY2047676, BRAMY2047692, BRAMY2047746, BRAMY2047751, BRAMY2047765, BRAMY2047884, BRAMY2047948, BRAMY3000206, BRAMY3000210, BRAMY3000213, BRAMY3000224, BRAMY3000254, BRAMY3000307, BRAMY3000692, BRAMY3001356, BRAMY3001401,

[2378] BRAMY3001409, BRAMY3001794, BRAMY3002120, BRAMY3002312, BRAMY3002329, BRAMY3002458, BRAMY3002508, BRAMY3002620, BRAMY3002803, BRAMY3002805, BRAMY3002886, BRAMY3002991, BRAMY3003026, BRAMY3003109, BRAMY3003205, BRAMY3003310, BRAMY3003566, BRAMY3003723, BRAMY3004126, BRAMY3004224, BRAMY3004364, BRAMY3004672, BRAMY3004800, BRAMY3004900, BRAMY3004919, BRAMY3005091, BRAMY3005184, BRAMY3005656, BRAMY3005912, BRAMY3005932, BRAMY3006032, BRAMY3006297, BRAMY3006761, BRAMY3007078, BRAMY3007206, BRAMY3007311, BRAMY3007350, BRAMY3007449, BRAMY3007471, BRAMY3007609, BRAMY3007723, BRAMY3007968, BRAMY3008044, BRAMY3008088, BRAMY3008096, BRAMY3008335, BRAMY3008466, BRAMY3008505, BRAMY3008650, BRAMY3008937,

[2379] BRAMY3009158, BRAMY3009207, BRAMY3009491, BRAMY3009556, BRAMY3009782, BRAMY3009811, BRAMY3009904, BRAMY3010264, BRAMY3010321, BRAMY3010411, BRAMY3010492, BRAMY3010603, BRAMY3010654, BRAMY4000089, BRAMY4000095, BRAMY4000229, BRAMY4000277, BRAMY4000915, BRAMY4000962, BRAMY4001173, BRAMY4001200, BRAMY4001234, BRAMY4001449, BRAMY4001652, BRAMY4001863, BRAMY4001913, BRAMY4002575, BRAMY4002628, BRASW1000053, BRASW1000125, BRAWH1000001, BRAWH1000002, BRAWH1000037, BRAWH1000045, BRAWH1000083, BRAWH1000094, BRAWH1000116, BRAWH1000127, BRAWH1000130, BRAWH1000157, BRAWH1000162, BRAWH1000164, BRAWH1000168, BRAWH1000174, BRAWH1000180, BRAWH1000369, BRAWH2000034, BRAWH2000048, BRAWH2000071, BRAWH2000082,

[2380] BRAWH2000093, BRAWH2000109, BRAWH2000131, BRAWH2000142, BRAWH2000169, BRAWH2000177, BRAWH2000218, BRAWH2000232, BRAWH2000248, BRAWH2000256, BRAWH2000274, BRAWH2000323, BRAWH2000353, BRAWH2000370, BRAWH2000409, BRAWH2000417, BRAWH2000443, BRAWH2000471, BRAWH2000476, BRAWH2000482, BRAWH2000494, BRAWH2000500, BRAWH2000522, BRAWH2000554, BRAWH2000595, BRAWH2000636, BRAWH2000643, BRAWH2000651, BRAWH2000682, BRAWH2000686, BRAWH2000752, BRAWH2000859, BRAWH2000866, BRAWH2000892, BRAWH2000901, BRAWH2000926, BRAWH2000944, BRAWH2000984, BRAWH2001019, BRAWH2001037, BRAWH2001052, BRAWH2001103, BRAWH2001129, BRAWH2001137, BRAWH2001159, BRAWH2001186, BRAWH2001203, BRAWH2001238, BRAWH2001239, BRAWH2001255,

[2381] BRAWH2001321, BRAWH2001355, BRAWH2001378, BRAWH2001395, BRAWH2001406, BRAWH2001412, BRAWH2001418, BRAWH2001424, BRAWH2001436, BRAWH2001438, BRAWH2001459, BRAWH2001461, BRAWH2001492, BRAWH2001503, BRAWH2001519, BRAWH2001530, BRAWH2001535, BRAWH2001589, BRAWH2001662, BRAWH2001666, BRAWH2001679, BRAWH2001686, BRAWH2001701, BRAWH2001842, BRAWH2001862, BRAWH2001873, BRAWH2001940, BRAWH2001973, BRAWH2002047, BRAWH2002060, BRAWH2002062, BRAWH2002125, BRAWH2002191, BRAWH2002318, BRAWH2002333, BRAWH2002352, BRAWH2002383, BRAWH2002549, BRAWH2002560, BRAWH2002601, BRAWH2002623, BRAWH2002630, BRAWH2002635, BRAWH2002662, BRAWH2002725, BRAWH2002761, BRAWH2002811, BRAWH2002861, BRAWH2002911, BRAWH2002963,

[2382] BRAWH2002967, BRAWH2002976, BRAWH2003000, BRAWH2003135, BRAWH2003240, BRAWH2003307, BRAWH2003355, BRAWH2003366, BRAWH2003662, BRAWH2003689, BRAWH2003693, BRAWH2003818, BRAWH2003832, BRAWH2003948, BRAWH2003964, BRAWH2004044, BRAWH2004068, BRAWH2004078, BRAWH2004136, BRAWH2004217, BRAWH2004580, BRAWH2004731, BRAWH2004779, BRAWH2004842, BRAWH2004884, BRAWH2004923, BRAWH2005008, BRAWH2005068, BRAWH2005074, BRAWH2005315, BRAWH2005517, BRAWH2005524, BRAWH2005533, BRAWH2005578, BRAWH2005812, BRAWH2005974, BRAWH2005998, BRAWH2006044, BRAWH2006083, BRAWH2006207, BRAWH2006301, BRAWH2006395, BRAWH2006405, BRAWH2006450, BRAWH2006493, BRAWH2006526, BRAWH2006543, BRAWH2006622, BRAWH2006760, BRAWH2006960,

[2383] BRAWH2006989, BRAWH2006996, BRAWH2007069, BRAWH2007308, BRAWH2007406, BRAWH2007550, BRAWH2007570, BRAWH2007591, BRAWH2007605, BRAWH2007658, BRAWH2007664, BRAWH2007800, BRAWH2007808, BRAWH2007825, BRAWH2007862, BRAWH2007890, BRAWH2008058, BRAWH2008128, BRAWH2008255, BRAWH2008292, BRAWH2008297, BRAWH2008366, BRAWH2008380, BRAWH2008540, BRAWH2008577, BRAWH2008790, BRAWH2008903, BRAWH2008956, BRAWH2008993, BRAWH2009112, BRAWH2009227, BRAWH2009238, BRAWH2009261, BRAWH2009263, BRAWH2009298, BRAWH2009304, BRAWH2009307, BRAWH2009360, BRAWH2009393, BRAWH2009485, BRAWH2009490, BRAWH2009558, BRAWH2009590, BRAWH2009626, BRAWH2009678, BRAWH2009695, BRAWH2009907, BRAWH2010000, BRAWH2010069, BRAWH2010084,

[2384] BRAWH2010318, BRAWH2010329, BRAWH2010354, BRAWH2010364, BRAWH2010536, BRAWH2010552, BRAWH2010584, BRAWH2010618, BRAWH2010619, BRAWH2010754, BRAWH2010980, BRAWH2011066, BRAWH2011079, BRAWH2011096, BRAWH2011155, BRAWH2011166, BRAWH2011204, BRAWH2011286, BRAWH2011294, BRAWH2011400, BRAWH2011762, BRAWH2011795, BRAWH2011796, BRAWH2011812, BRAWH2011823, BRAWH2011860, BRAWH2011920, BRAWH2011958, BRAWH2012054, BRAWH2012077, BRAWH2012161, BRAWH2012164, BRAWH2012258, BRAWH2012277, BRAWH2012326, BRAWH2012538, BRAWH2012540, BRAWH2012619, BRAWH2012698, BRAWH2012749, BRAWH2012827, BRAWH2012866, BRAWH2012963, BRAWH2013047, BRAWH2013219, BRAWH2013294, BRAWH2013866, BRAWH2013871, BRAWH2013914, BRAWH2013941,

[2385] BRAWH2013955, BRAWH2014053, BRAWH2014234, BRAWH2014379, BRAWH2014414, BRAWH2014473, BRAWH2014511, BRAWH2014645, BRAWH2014662, BRAWH2014717, BRAWH2014729, BRAWH2014876, BRAWH2014954, BRAWH2015247, BRAWH2015349, BRAWH2015375, BRAWH2015385, BRAWH2015595, BRAWH2015728, BRAWH2015853, BRAWH2015866, BRAWH2016028, BRAWH2016106, BRAWH2016160, BRAWH2016166, BRAWH2016209, BRAWH2016221, BRAWH2016223, BRAWH2016269, BRAWH2016305, BRAWH2016439, BRAWH2016446, BRAWH2016514, BRAWH2016562, BRAWH2016655, BRAWH2016679, BRAWH2016702, BRAWH2016724, BRAWH2016785, BRAWH2016792, BRAWH2016800, BRAWH2017002, BRAWH2017103, BRAWH2017250, BRAWH2017294, BRAWH2017304, BRAWH2017305, BRAWH2017379, BRAWH2017407, BRAWH2017433,

[2386] BRAWH2017523, BRAWH2017534, BRAWH2017542, BRAWH2017635, BRAWH2017913, BRAWH2018206, BRAWH2018267, BRAWH2018282, BRAWH2018317, BRAWH2018506, BRAWH2018514, BRAWH2018527, BRAWH2018601, BRAWH2018729, BRAWH2018745, BRAWH2018875, BRAWH2019053, BRAWH2019055, BRAWH2019198, BRAWH3000078, BRAWH3000088, BRAWH3000100, BRAWH3000166, BRAWH3000314, BRAWH3000329, BRAWH3000410, BRAWH3000446, BRAWH3000491, BRAWH3000604, BRAWH3000884, BRAWH3001053, BRAWH3001319, BRAWH3001326, BRAWH3001475, BRAWH3001636, BRAWH3001638, BRAWH3001712, BRAWH3001760, BRAWH3001783, BRAWH3001833, BRAWH3001879, BRAWH3001891, BRAWH3001918, BRAWH3002433, BRAWH3002467, BRAWH3002513, BRAWH3002600, BRAWH3002819, BRAWH3003019, BRAWH3003136,

[2387] BRAWH3003244, BRAWH3003343, BRAWH3003411, BRAWH3003522, BRAWH3003573, BRAWH3003598, BRAWH3003727, BRAWH3003801, BRAWH3003975, BRAWH3004222, BRAWH3004335, BRAWH3004350, BRAWH3004453, BRAWH3004530, BRAWH3004666, BRAWH3005037, BRAWH3005047, BRAWH3005132, BRAWH3005292, BRAWH3005300, BRAWH3005422, BRAWH3005534, BRAWH3005886, BRAWH3005892, BRAWH3005896, BRAWH3005912, BRAWH3005981, BRAWH3006547, BRAWH3006548, BRAWH3006761, BRAWH3006792, BRAWH3007129, BRAWH3007221, BRAWH3007441, BRAWH3007455, BRAWH3007506, BRAWH3007726, BRAWH3007783, BRAWH3008167, BRAWH3008341, BRAWH3008559, BRAWH3008697, BRAWH3008867, BRAWH3008931, BRAWH3009017, BRAWH3009285, BRAWH3009297, BRAWH3009546, BRAWH3009961, BRAWH3010461,

[2388] BRAWH3010560, BRAWH3010602, BRAWH3010657, BRAWH3010726, BRAWH3010833, BRAWH3011101, BRAWH3011331, BRAWH3011402, BRAWH3011577, BRAWH3011623, BRAWH3011637, BRAWH3011685, BRAWH3011907, BRAWH3011929, BRAWH3012005, BRAWH3012662, BRAWH3012779, BRAWH3013009, BRAWH3013049, BRAWH3013197, BRAWH3013264, BRAWH3013508, BRAWH3014609, BRAWH3014639, BRAWH3015017, BRAWH3015175, BRAWH3015260, BRAWH3015610, BRAWH3015825, BRAWH3016123, BRAWH3016715, BRAWH3017259, BRAWH3017260, BRAWH3017477, BRAWH3017537, BRAWH3017980, BRAWH3018063, BRAWH3018369, BRAWH3018548, BRAWH3018969, BRAWH3019026, BRAWH3019529, BRAWH3019594, BRAWH3019629, BRAWH3019820, BRAWH3020200, BRAWH3020318, BRAWH3020486, BRAWH3020884, BRAWH3020928,

[2389] BRAWH3021012, BRAWH3021545, BRAWH3021580, BRAWH3021641, BRAWH3021643, BRAWH3021724, BRAWH3022347, BRAWH3022431, BRAWH3022459, BRAWH3022542, BRAWH3022719, BRAWH3022866, BRAWH3022900, BRAWH3023156, BRAWH3023168, BRAWH3023274, BRAWH3023421, BRAWH3024231, BRAWH3024242, BRAWH3024469, BRAWH3024506, BRAWH3024613, BRAWH3024989, BRAWH3026349, BRAWH3026394, BRAWH3026529, BRAWH3027420, BRAWH3027440, BRAWH3027533, BRAWH3027574, BRAWH3027607, BRAWH3027616, BRAWH3027675, BRAWH3027806, BRAWH3027880, BRAWH3027927, BRAWH3028202, BRAWH3028223, BRAWH3028306, BRAWH3028461, BRAWH3028645, BRAWH3028754, BRAWH3028796, BRAWH3029254, BRAWH3029313, BRAWH3029538, BRAWH3029556, BRAWH3029806, BRAWH3030613, BRAWH3030772,

[2390] BRAWH3030810, BRAWH3030892, BRAWH3030910, BRAWH3030950, BRAWH3031054, BRAWH3031710, BRAWH3031902, BRAWH3032298, BRAWH3032340, BRAWH3032571, BRAWH3032620, BRAWH3032930, BRAWH3033117, BRAWH3033293, BRAWH3033448, BRAWH3033513, BRAWH3034097, BRAWH3034114, BRAWH3034134, BRAWH3034668, BRAWH3034743, BRAWH3034775, BRAWH3034890, BRAWH3035154, BRAWH3035403, BRAWH3035904, BRAWH3035914, BRAWH3035936, BRAWH3036077, BRAWH3036247, BRAWH3036270, BRAWH3036561, BRAWH3036738, BRAWH3036951, BRAWH3037265, BRAWH3037394, BRAWH3037533, BRAWH3037979, BRAWH3038055, BRAWH3038230, BRAWH3038252, BRAWH3038324, BRCAN1000065, BRCAN1000076, BRCAN1000105, BRCAN1000149, BRCAN2000148, BRCAN2000149, BRCAN2000209, BRCAN2000239,

[2391] BRCAN2000346, BRCAN2000364, BRCAN2000383, BRCAN2000418, BRCAN2000523, BRCAN2000541, BRCAN2000563, BRCAN2000577, BRCAN2000620, BRCAN2000639, BRCAN2000763, BRCAN2000832, BRCAN2000923, BRCAN2001223, BRCAN2001866, BRCAN2002173, BRCAN2002416, BRCAN2002473, BRCAN2002562, BRCAN2002662, BRCAN2002826, BRCAN2002854, BRCAN2002856, BRCAN2002892, BRCAN2002944, BRCAN2002948, BRCAN2003070, BRCAN2003269, BRCAN2003389, BRCAN2003628, BRCAN2003703, BRCAN2003746, BRCAN2003814, BRCAN2003987, BRCAN2004173, BRCAN2004355, BRCAN2004371, BRCAN2004653, BRCAN2004699, BRCAN2005436, BRCAN2005449, BRCAN2006019, BRCAN2006051, BRCAN2006063, BRCAN2006117, BRCAN2006174, BRCAN2006290, BRCAN2006297, BRCAN2006323, BRCAN2006401,

[2392] BRCAN2006411, BRCAN2006450, BRCAN2006955, BRCAN2007119, BRCAN2007144, BRCAN2007409, BRCAN2007426, BRCAN2007525, BRCAN2007700, BRCAN2008494, BRCAN2008528, BRCAN2008701, BRCAN2008894, BRCAN2009156, BRCAN2009168, BRCAN2009203, BRCAN2009432, BRCAN2010374, BRCAN2010376, BRCAN2010547, BRCAN2010581, BRCAN2010665, BRCAN2011254, BRCAN2011316, BRCAN2011602, BRCAN2011946, BRCAN2012110, BRCAN2012355, BRCAN2012402, BRCAN2012408, BRCAN2012481, BRCAN2012613, BRCAN2012713, BRCAN2012929, BRCAN2013655, BRCAN2013660, BRCAN2014143, BRCAN2014229, BRCAN2014370, BRCAN2014602, BRCAN2014652, BRCAN2014788, BRCAN2014881, BRCAN2014952, BRCAN2015402, BRCAN2015464, BRCAN2015719, BRCAN2015757, BRCAN2015886, BRCAN2016025,

[2393] BRCAN2016046, BRCAN2016174, BRCAN2016433, BRCAN2016619, BRCAN2016762, BRCAN2016814, BRCAN2017442, BRCAN2017905, BRCAN2018240, BRCAN2018269, BRCAN2018490, BRCAN2018566, BRCAN2018667, BRCAN2018748, BRCAN2018935, BRCAN2019002, BRCAN2019387, BRCAN2019653, BRCAN2019773, BRCAN2019907, BRCAN2020234, BRCAN2020331, BRCAN2020412, BRCAN2020467, BRCAN2020710, BRCAN2020880, BRCAN2021024, BRCAN2021028, BRCAN2021325, BRCAN2021452, BRCAN2021669, BRCAN2021718, BRCAN2022126, BRCAN2022191, BRCAN2022472, BRCAN2022474, BRCAN2023347, BRCAN2023724, BRCAN2024451, BRCAN2024563, BRCAN2025009, BRCAN2025093, BRCAN2025349, BRCAN2025368, BRCAN2025712, BRCAN2025982, BRCAN2026117, BRCAN2026340, BRCAN2026711, BRCAN2027310,

[2394] BRCAN2027334, BRCAN2027355, BRCAN2027513, BRCAN2027593, BRCAN2027970, BRCAN2028021, BRCAN2028040, BRCAN2028319, BRCAN2028338, BRCAN2028378, BRCAN2028460, BRCAN2028545, BRCAN2028634, BRCAN2028702, BRCOC1000087, BRCOC1000094, BRCOC2000004, BRCOC2000047, BRCOC2000152, BRCOC2000184, BRCOC2000186, BRCOC2000333, BRCOC2000360, BRCOC2000404, BRCOC2000487, BRCOC2000637, BRCOC2000670, BRCOC2000816, BRCOC2000850, BRCOC2001355, BRCOC2002085, BRCOC2002155, BRCOC2002323, BRCOC2002659, BRCOC2002664, BRCOC2002686, BRCOC2002751, BRCOC2002756, BRCOC2002777, BRCOC2002835, BRCOC2003100, BRCOC2003125, BRCOC2003513, BRCOC2003732, BRCOC2003740, BRCOC2004036, BRCOC2004354, BRCOC2004455, BRCOC2004950, BRCOC2005542,

[2395] BRCOC2005903, BRCOC2005951, BRCOC2006164, BRCOC2006189, BRCOC2006243, BRCOC2006270, BRCOC2006639, BRCOC2006942, BRCOC2007034, BRCOC2007593, BRCOC2007733, BRCOC2007769, BRCOC2008064, BRCOC2008225, BRCOC2008642, BRCOC2008993, BRCOC2009052, BRCOC2009196, BRCOC2009380, BRCOC2009638, BRCOC2009937, BRCOC2010115, BRCOC2010510, BRCOC2010730, BRCOC2010980, BRCOC2010994, BRCOC2011010, BRCOC2011398, BRCOC2011418, BRCOC2011506, BRCOC2011769, BRCOC2011996, BRCOC2012172, BRCOC2012229, BRCOC2012386, BRCOC2012551, BRCOC2012813, BRCOC2013448, BRCOC2013573, BRCOC2013675, BRCOC2013780, BRCOC2014013, BRCOC2014033, BRCOC2014400, BRCOC2014748, BRCOC2014833, BRCOC2015597, BRCOC2015824, BRCOC2015908, BRCOC2015944,

[2396] BRCOC2016525, BRCOC2016661, BRCOC2017061, BRCOC2017652, BRCOC2017856, BRCOC2018775, BRCOC2018877, BRCOC2019549, BRCOC2019841, BRCOC2019896, BRCOC2019903, BRCOC2019910, BRCOC2019934, BRCOC2020122, BRCOC2020142, BRHIP1000058, BRHIP1000072, BRHIP1000104, BRHIP1000108, BRHIP1000129, BRHIP1000174, BRHIP1000258, BRHIP2000021, BRHIP2000079, BRHIP2000087, BRHIP2000163, BRHIP2000210, BRHIP2000239, BRHIP2000245, BRHIP2000312, BRHIP2000359, BRHIP2000445, BRHIP2000506, BRHIP2000532, BRHIP2000621, BRHIP2000691, BRHIP2000819, BRHIP2000826, BRHIP2000920, BRHIP2001074, BRHIP2001099, BRHIP2001686, BRHIP2001782, BRHIP2001802, BRHIP2001805, BRHIP2001886, BRHIP2001927, BRHIP2002122, BRHIP2002143, BRHIP2002172,

[2397] BRHIP2002339, BRHIP2002346, BRHIP2002510, BRHIP2002664, BRHIP2002722, BRHIP2002929, BRHIP2003048, BRHIP2003062, BRHIP2003242, BRHIP2003272, BRHIP2003748, BRHIP2003786, BRHIP2003828, BRHIP2003917, BRHIP2004312, BRHIP2004355, BRHIP2004359, BRHIP2004814, BRHIP2004883, BRHIP2004902, BRHIP2005010, BRHIP2005236, BRHIP2005271, BRHIP2005354, BRHIP2005600, BRHIP2005719, BRHIP2005724, BRHIP2005752, BRHIP2005932, BRHIP2006617, BRHIP2006782, BRHIP2006800, BRHIP2006819, BRHIP2006921, BRHIP2007307, BRHIP2007616, BRHIP2007690, BRHIP2007741, BRHIP2007928, BRHIP2007969, BRHIP2008269, BRHIP2008389, BRHIP2008607, BRHIP2008756, BRHIP2008909, BRHIP2009019, BRHIP2009177, BRHIP2009340, BRHIP2009351, BRHIP2009414,

[2398] BRHIP2009474, BRHIP2009617, BRHIP2009685, BRHIP2010217, BRHIP2010309, BRHIP2010444, BRHIP2010487, BRHIP2010571, BRHIP2010593, BRHIP2010610, BRHIP2010723, BRHIP2010744, BRHIP2011080, BRHIP2011120, BRHIP2011199, BRHIP2011491, BRHIP2011508, BRHIP2011576, BRHIP2011616, BRHIP2011783, BRHIP2011838, BRHIP2011891, BRHIP2011933, BRHIP2012054, BRHIP2012059, BRHIP2012141, BRHIP2012314, BRHIP2012360, BRHIP2012545, BRHIP2012580, BRHIP2012627, BRHIP2012642, BRHIP2012750, BRHIP2012922, BRHIP2012923, BRHIP2012972, BRHIP2013286, BRHIP2013447, BRHIP2013510, BRHIP2013699, BRHIP2013723, BRHIP2013958, BRHIP2013972, BRHIP2014063, BRHIP2014228, BRHIP2014285, BRHIP2014291, BRHIP2014373, BRHIP2014386, BRHIP2014387,

[2399] BRHIP2014954, BRHIP2015153, BRHIP2015224, BRHIP2015356, BRHIP2015360, BRHIP2016005, BRHIP2016125, BRHIP2016788, BRHIP2016968, BRHIP2016990, BRHIP2017010, BRHIP2017315, BRHIP2017385, BRHIP2017404, BRHIP2017542, BRHIP2017553, BRHIP2017642, BRHIP2017714, BRHIP2017780, BRHIP2017945, BRHIP2018014, BRHIP2018369, BRHIP2018612, BRHIP2018635, BRHIP2018650, BRHIP2018712, BRHIP2018719, BRHIP2018805, BRHIP2018998, BRHIP2019007, BRHIP2019047, BRHIP2019149, BRHIP2019177, BRHIP2019186, BRHIP2019291, BRHIP2019494, BRHIP2019589, BRHIP2019641, BRHIP2019819, BRHIP2019884, BRHIP2019972, BRHIP2020182, BRHIP2020509, BRHIP2020573, BRHIP2020622, BRHIP2020695, BRHIP2020743, BRHIP2020799, BRHIP2020842, BRHIP2020859,

[2400] BRHIP2020930, BRHIP2021102, BRHIP2021289, BRHIP2021495, BRHIP2021615, BRHIP2021744, BRHIP2021858, BRHIP2021929, BRHIP2022006, BRHIP2022054, BRHIP2022221, BRHIP2022228, BRHIP2022298, BRHIP2022467, BRHIP2022708, BRHIP2023071, BRHIP2023272, BRHIP2023292, BRHIP2023309, BRHIP2023369, BRHIP2023735, BRHIP2023773, BRHIP2023860, BRHIP2023869, BRHIP2024046, BRHIP2024165, BRHIP2024201, BRHIP2024347, BRHIP2024398, BRHIP2024549, BRHIP2024742, BRHIP2024789, BRHIP2024911, BRHIP2024941, BRHIP2025245, BRHIP2025366, BRHIP2025448, BRHIP2025679, BRHIP2025739, BRHIP2025797, BRHIP2026021, BRHIP2026061, BRHIP2026155, BRHIP2026214, BRHIP2026288, BRHIP2026346, BRHIP2026557, BRHIP2026723, BRHIP2026877, BRHIP2027017,

[2401] BRHIP2027054, BRHIP2027563, BRHIP2027685, BRHIP2027762, BRHIP2028187, BRHIP2028303, BRHIP2028330, BRHIP2028480, BRHIP2028583, BRHIP2028593, BRHIP2029176, BRHIP2029283, BRHIP2029393, BRHIP2029529, BRHIP2029643, BRHIP2029663, BRHIP3000017, BRHIP3000060, BRHIP3000070, BRHIP3000081, BRHIP3000240, BRHIP3000377, BRHIP3000457, BRHIP3000475, BRHIP3000488, BRHIP3000526, BRHIP3000626, BRHIP3000859, BRHIP3000907, BRHIP3001076, BRHIP3001079, BRHIP3001141, BRHIP3001283, BRHIP3001338, BRHIP3001360, BRHIP3001481, BRHIP3001878, BRHIP3001964, BRHIP3002114, BRHIP3002124, BRHIP3002141, BRHIP3002363, BRHIP3002691, BRHIP3002920, BRHIP3002931, BRHIP3003063, BRHIP3003126, BRHIP3003306, BRHIP3003340, BRHIP3003395,

[2402] BRHIP3003484, BRHIP3003644, BRHIP3003688, BRHIP3003795, BRHIP3003984, BRHIP3004193, BRHIP3004416, BRHIP3004710, BRHIP3004725, BRHIP3004774, BRHIP3004786, BRHIP3004863, BRHIP3004968, BRHIP3005037, BRHIP3005137, BRHIP3005142, BRHIP3005231, BRHIP3005307, BRHIP3005574, BRHIP3005673, BRHIP3005768, BRHIP3005801, BRHIP3005944, BRHIP3006279, BRHIP3006294, BRHIP3006390, BRHIP3006449, BRHIP3006683, BRHIP3006717, BRHIP3006786, BRHIP3006950, BRHIP3007172, BRHIP3007183, BRHIP3007195, BRHIP3007223, BRHIP3007239, BRHIP3007291, BRHIP3007409, BRHIP3007424, BRHIP3007483, BRHIP3007586, BRHIP3007609, BRHIP3007640, BRHIP3007960, BRHIP3008082, BRHIP3008183, BRHIP3008314, BRHIP3008320, BRHIP3008344, BRHIP3008405,

[2403] BRHIP3008565, BRHIP3008598, BRHIP3008606, BRHIP3008691, BRHIP3008714, BRHIP3008997, BRHIP3009099, BRHIP3009140, BRHIP3009181, BRHIP3009318, BRHIP3009427, BRHIP3009448, BRHIP3009672, BRHIP3009753, BRHIP3010135, BRHIP3010289, BRHIP3010529, BRHIP3011082, BRHIP3011241, BRHIP3011269, BRHIP3011460, BRHIP3011567, BRHIP3011831, BRHIP3012185, BRHIP3012289, BRHIP3012357, BRHIP3012736, BRHIP3012745, BRHIP3012868, BRHIP3012997, BRHIP3013078, BRHIP3013271, BRHIP3013588, BRHIP3013698, BRHIP3013765, BRHIP3013897, BRHIP3014237, BRHIP3014675, BRHIP3015620, BRHIP3015751, BRHIP3015854, BRHIP3016032, BRHIP3016213, BRHIP3016302, BRHIP3016421, BRHIP3017109, BRHIP3017146, BRHIP3017256, BRHIP3017325, BRHIP3017558,

[2404] BRHIP3017637, BRHIP3017855, BRHIP3018278, BRHIP3018784, BRHIP3019643, BRHIP3019824, BRHIP3019880, BRHIP3019956, BRHIP3020155, BRHIP3020182, BRHIP3020733, BRHIP3021019, BRHIP3021499, BRHIP3021534, BRHIP3021778, BRHIP3022656, BRHIP3023922, BRHIP3024118, BRHIP3024533, BRHIP3024703, BRHIP3024725, BRHIP3024820, BRHIP3025161, BRHIP3025702, BRHIP3025795, BRHIP3025844, BRHIP3026052, BRHIP3026097, BRHIP3026231, BRHIP3026335, BRHIP3026651, BRHIP3027105, BRHIP3027137, BRHIP3027160, BRHIP3027191, BRHIP3027501, BRHIP3027594, BRHIP3027651, BRHIP3027854, BRHIP3027947, BRHIP3028570, BRHIP3028742, BRSSN1000056, BRSSN1000059, BRSSN1000092, BRSSN1000153, BRSSN2000097, BRSSN2000175, BRSSN2000197, BRSSN2000244,

[2405] BRSSN2000293, BRSSN2000295, BRSSN2000312, BRSSN2000518, BRSSN2000561, BRSSN2000566, BRSSN2000684, BRSSN2000715, BRSSN2000832, BRSSN2001213, BRSSN2001275, BRSSN2001342, BRSSN2001426, BRSSN2001503, BRSSN2001579, BRSSN2001758, BRSSN2001810, BRSSN2002857, BRSSN2002859, BRSSN2003086, BRSSN2003093, BRSSN2003820, BRSSN2003841, BRSSN2003937, BRSSN2004142, BRSSN2004303, BRSSN2004304, BRSSN2004496, BRSSN2004657, BRSSN2004679, BRSSN2004686, BRSSN2004710, BRSSN2004719, BRSSN2005847, BRSSN2006133, BRSSN2006390, BRSSN2006575, BRSSN2006611, BRSSN2006644, BRSSN2006892, BRSSN2007076, BRSSN2007168, BRSSN2007202, BRSSN2007338, BRSSN2007464, BRSSN2007504, BRSSN2007819, BRSSN2008125, BRSSN2008419, BRSSN2008464,

[2406] BRSSN2008549, BRSSN2008797, BRSSN2009119, BRSSN2009378, BRSSN2009389, BRSSN2009395, BRSSN2009518, BRSSN2009627, BRSSN2009630, BRSSN2009702, BRSSN2010019, BRSSN2010110, BRSSN2010587, BRSSN2010596, BRSSN2010830, BRSSN2011653, BRSSN2011738, BRSSN2011843, BRSSN2012081, BRSSN2012103, BRSSN2012157, BRSSN2012198, BRSSN2012254, BRSSN2012439, BRSSN2012622, BRSSN2012691, BRSSN2012838, BRSSN2013095, BRSSN2013544, BRSSN2013696, BRSSN2013702, BRSSN2013733, BRSSN2013753, BRSSN2013874, BRSSN2014112, BRSSN2014294, BRSSN2014299, BRSSN2014424, BRSSN2014513, BRSSN2014556, BRSSN2014573, BRSSN2014636, BRSSN2014685, BRSSN2015199, BRSSN2015238, BRSSN2015369, BRSSN2015493, BRSSN2015497, BRSSN2015554, BRSSN2015707,

[2407] BRSSN2015773, BRSSN2015907, BRSSN2016589, BRSSN2016768, BRSSN2016905, BRSSN2017297, BRSSN2017422, BRSSN2017530, BRSSN2017682, BRSSN2017757, BRSSN2018218, BRSSN2018440, BRSSN2018447, BRSSN2018581, BRSSN2018731, BRSSN2018771, BRSSN2018925, BRSTN1000097, BRSTN2000058, BRSTN2000070, BRSTN2000220, BRSTN2000312, BRSTN2000367, BRSTN2000536, BRSTN2000872, BRSTN2001067, BRSTN2001613, BRSTN2001801, BRSTN2002105, BRSTN2002400, BRSTN2002532, BRSTN2002691, BRSTN2003590, BRSTN2003835, BRSTN2004869, BRSTN2004987, BRSTN2005721, BRSTN2006306, BRSTN2006466, BRSTN2006580, BRSTN2006583, BRSTN2006638, BRSTN2006865, BRSTN2007000, BRSTN2007118, BRSTN2007284, BRSTN2007765, BRSTN2008052, BRSTN2008283, BRSTN2008367,

[2408] BRSTN2008418, BRSTN2008457, BRSTN2008475, BRSTN2008930, BRSTN2009247, BRSTN2010107, BRSTN2010363, BRSTN2010416, BRSTN2010500, BRSTN2010569, BRSTN2010750, BRSTN2010923, BRSTN2011211, BRSTN2011597, BRSTN2011688, BRSTN2011799, BRSTN2012089, BRSTN2012284, BRSTN2012320, BRSTN2012380, BRSTN2012451, BRSTN2013171, BRSTN2013354, BRSTN2013931, BRSTN2014633, BRSTN2014751, BRSTN2014770, BRSTN2015015, BRSTN2015978, BRSTN2016066, BRSTN2016335, BRSTN2016678, BRSTN2016892, BRSTN2016918, BRSTN2016992, BRSTN2017151, BRSTN2017237, BRSTN2017379, BRSTN2017761, BRSTN2017771, BRSTN2017995, BRSTN2018077, BRSTN2018083, BRSTN2018596, BRSTN2018692, BRSTN2018712, BRSTN2019079, BRSTN2019129, BRTHA1000021, BRTHA1000063,

[2409] BRTHA2000057, BRTHA2000474, BRTHA2000514, BRTHA2000574, BRTHA2000855, BRTHA2000969, BRTHA2000972, BRTHA2001304, BRTHA2001370, BRTHA2001462, BRTHA2001717, BRTHA2001812, BRTHA2002091, BRTHA2002115, BRTHA2002133, BRTHA2002281, BRTHA2002376, BRTHA2002442, BRTHA2002493, BRTHA2002565, BRTHA2002608, BRTHA2002702, BRTHA2002721, BRTHA2002741, BRTHA2002896, BRTHA2002903, BRTHA2003030, BRTHA2003110, BRTHA2003116, BRTHA2003436, BRTHA2003759, BRTHA2003794, BRTHA2004361, BRTHA2004371, BRTHA2004582, BRTHA2004629, BRTHA2004639, BRTHA2004642, BRTHA2004812, BRTHA2004821, BRTHA2004978, BRTHA2004992, BRTHA2005005, BRTHA2005013, BRTHA2005448, BRTHA2005579, BRTHA2005831, BRTHA2005942, BRTHA2005956, BRTHA2006075,

[2410] BRTHA2006146, BRTHA2006194, BRTHA2006232, BRTHA2006720, BRTHA2006735, BRTHA2006974, BRTHA2006975, BRTHA2007060, BRTHA2007122, BRTHA2007422, BRTHA2007603, BRTHA2007665, BRTHA2008316, BRTHA2008335, BRTHA2008502, BRTHA2008513, BRTHA2008527, BRTHA2008535, BRTHA2008598, BRTHA2008669, BRTHA2008955, BRTHA2009311, BRTHA2009349, BRTHA2009486, BRTHA2009803, BRTHA2009846, BRTHA2009886, BRTHA2009972, BRTHA2010008, BRTHA2010033, BRTHA2010073, BRTHA2010097, BRTHA2010191, BRTHA2010397, BRTHA2010608, BRTHA2010672, BRTHA2010884, BRTHA2010907, BRTHA2011062, BRTHA2011194, BRTHA2011321, BRTHA2011351, BRTHA2011500, BRTHA2011641, BRTHA2011691, BRTHA2012129, BRTHA2012183, BRTHA2012189, BRTHA2012351, BRTHA2012466,

[2411] BRTHA2012555, BRTHA2012562, BRTHA2012714, BRTHA2012980, BRTHA2013054, BRTHA2013262, BRTHA2013275, BRTHA2013426, BRTHA2013460, BRTHA2013515, BRTHA2013540, BRTHA2013595, BRTHA2013610, BRTHA2013707, BRTHA2013942, BRTHA2014287, BRTHA2014334, BRTHA2014381, BRTHA2014578, BRTHA2014647, BRTHA2014663, BRTHA2014792, BRTHA2014828, BRTHA2014909, BRTHA2014975, BRTHA2014997, BRTHA2015406, BRTHA2015478, BRTHA2015696, BRTHA2015700, BRTHA2015853, BRTHA2015878, BRTHA2016179, BRTHA2016215, BRTHA2016267, BRTHA2016318, BRTHA2016496, BRTHA2016543, BRTHA2016552, BRTHA2016577, BRTHA2016918, BRTHA2017178, BRTHA2017353, BRTHA2017364, BRTHA2017972, BRTHA2017985, BRTHA2018011, BRTHA2018129, BRTHA2018165, BRTHA2018304,

[2412] BRTHA2018344, BRTHA2018420, BRTHA2018443, BRTHA2018504, BRTHA2018558, BRTHA2018591, BRTHA2018624, BRTHA2018706, BRTHA2018707, BRTHA2019014, BRTHA2019022, BRTHA2019048, BRTHA2019073, BRTHA2019726, BRTHA2019743, BRTHA2020400, BRTHA2020566, BRTHA2020642, BRTHA2020695, BRTHA2020721, BRTHA2020781, BRTHA2020811, BRTHA2020910, BRTHA2021212, BRTHA2021440, BRTHA2021450, BRTHA2022074, BRTHA2022914, BRTHA2022968, BRTHA2023402, BRTHA2023437, BRTHA2024177, BRTHA2024354, BRTHA2024712, BRTHA2025869, BRTHA2026071, BRTHA2026290, BRTHA2026311, BRTHA2027227, BRTHA2027250, BRTHA2027546, BRTHA2028297, BRTHA2029969, BRTHA2030036, BRTHA2030213, BRTHA2031517, BRTHA2031800, BRTHA2031917, BRTHA2032763, BRTHA2032845,

[2413] BRTHA2033122, BRTHA2033155, BRTHA2033264, BRTHA2033320, BRTHA2033469, BRTHA2033683, BRTHA2034281, BRTHA2034576, BRTHA2034874, BRTHA2035448, BRTHA2035743, BRTHA2036055, BRTHA2036295, BRTHA2036660, BRTHA2037247, BRTHA2038279, BRTHA2038345, BRTHA2038353, BRTHA2038396, BRTHA3000252, BRTHA3000273, BRTHA3000296, BRTHA3000297, BRTHA3000325, BRTHA3000456, BRTHA3000633, BRTHA3000789, BRTHA3001221, BRTHA3001623, BRTHA3002265, BRTHA3002401, BRTHA3002411, BRTHA3002427, BRTHA3002864, BRTHA3002933, BRTHA3002955, BRTHA3003000, BRTHA3003023, BRTHA3003074, BRTHA3003225, BRTHA3003339, BRTHA3003343, BRTHA3003417, BRTHA3003449, BRTHA3003474, BRTHA3003704, BRTHA3004307, BRTHA3004432, BRTHA3004475, BRTHA3004502,

[2414] BRTHA3004610, BRTHA3005046, BRTHA3005735, BRTHA3005988, BRTHA3006318, BRTHA3006593, BRTHA3006856, BRTHA3007113, BRTHA3007130, BRTHA3007148, BRTHA3007319, BRTHA3007469, BRTHA3007532, BRTHA3007662, BRTHA3007685, BRTHA3007769, BRTHA3008143, BRTHA3008293, BRTHA3008310, BRTHA3008386, BRTHA3008520, BRTHA3008608, BRTHA3008694, BRTHA3008778, BRTHA3008826, BRTHA3009037, BRTHA3009090, BRTHA3009291, BRTHA3009858, BRTHA3010366, BRTHA3010469, BRTHA3010530, BRTHA3010540, BRTHA3010717, BRTHA3011149, BRTHA3011187, BRTHA3011194, BRTHA3011229, BRTHA3011361, BRTHA3011510, BRTHA3011892, BRTHA3012265, BRTHA3013860, BRTHA3013882, BRTHA3013884, BRTHA3013981, BRTHA3014000, BRTHA3014105, BRTHA3014507, BRTHA3014547,

[2415] BRTHA3014691, BRTHA3014835, BRTHA3014854, BRTHA3014908, BRTHA3014920, BRTHA3015815, BRTHA3016616, BRTHA3016835, BRTHA3016845, BRTHA3016917, BRTHA3017047, BRTHA3017589, BRTHA3017848, BRTHA3018409, BRTHA3018514, BRTHA3018617, BRTHA3018623, BRTHA3018656, BRTHA3019048, BRTHA3019105, BRTHA3019183, BRTHA3020000, BRTHA3020314, BRTHA3020369, BRTHA3021569, BRTHA3021708, BRTHA3021786, BRTHA3022641, BRTHA3023403, BRTHA3023523, BRTHA3023590, BRTHA3023929, BRTHA3024233, BRTHA3024600, BRTHA3025073, BRTHA3025789, BRTHA3025826, BRTHA3026161, BRTHA3026180, BRTHA3026507, BRTHA3026556, BRTHA3026916, BRTHA3027171, BRTHA3027318, BRTHA3027638, BRTHA3027820, BRTHA3027879, BRTHA3027957, BRTHA3028339, BRTHA3028505,

[2416] BRTHA3028782, CD34C2000051, CD34C2000152, CD34C2000175, CD34C2000443, CD34C3000125, CD34C3000252, CD34C3000314, CD34C3000424, CD34C3000494, CERVX1000042, CERVX2000812, CERVX2000968, CERVX2002006, CERVX2002013, CERVX2002430, CHONS1000058, CHONS2000172, CHONS2000797, CHONS2001287, CHONS2001382, CHONS2001797, CHONS2001834, CHONS2002419, COLON1000030, COLON1000084, COLON1000135, COLON2000470, COLON2000557, COLON2000568, COLON2001721, COLON2001829, COLON2001866, COLON2002520, COLON2003043, COLON2003529, COLON2004318, COLON2004351, COLON2004478, COLON2004911, COLON2005126, COLON2005623, COLON2005735, COLON2005772, COLON2006263, COLON2006282, COLON2006417, COLON2007274, COLON2007733, COLON2008105,

[2417] COLON2009337, COLON2009499, CORDB1000140, CORDB2000061, CORDB2000127, CORDB2000541, CTONG1000010, CTONG1000020, CTONG1000022, CTONG1000040, CTONG1000056, CTONG1000062, CTONG1000086, CTONG1000087, CTONG1000088, CTONG1000093, CTONG1000097, CTONG1000113, CTONG1000137, CTONG1000165, CTONG1000180, CTONG1000181, CTONG1000241, CTONG1000283, CTONG1000288, CTONG1000302, CTONG1000341, CTONG1000476, CTONG1000488, CTONG1000508, CTONG1000540, CTONG2000031, CTONG2000034, CTONG2000201, CTONG2000218, CTONG2000279, CTONG2000303, CTONG2000330, CTONG2000395, CTONG2000465, CTONG2000480, CTONG2000508, CTONG2000766, CTONG2000771, CTONG2000819, CTONG2000827, CTONG2000846, CTONG2000855, CTONG2000977, CTONG2001139,

[2418] CTONG2001226, CTONG2001366, CTONG2001413, CTONG2001428, CTONG2001524, CTONG2001533, CTONG2001598, CTONG2001681, CTONG2001724, CTONG2001749, CTONG2001800, CTONG2001820, CTONG2001858, CTONG2001877, CTONG2001911, CTONG2001955, CTONG2002066, CTONG2002095, CTONG2002143, CTONG2002395, CTONG2002417, CTONG2002418, CTONG2002558, CTONG2002590, CTONG2002721, CTONG2002766, CTONG2002803, CTONG2002816, CTONG2002820, CTONG2002832, CTONG2002841, CTONG2002965, CTONG2002999, CTONG2003028, CTONG2003100, CTONG2003115, CTONG2003189, CTONG2003245, CTONG2003293, CTONG2003298, CTONG2003348, CTONG2003350, CTONG2003361, CTONG2003372, CTONG2003375, CTONG2003427, CTONG2003517, CTONG2003524, CTONG2003599, CTONG2003680,

[2419] CTONG2003699, CTONG2003764, CTONG2003782, CTONG2003889, CTONG2003937, CTONG2003945, CTONG2004000, CTONG2004062, CTONG2004115, CTONG2004126, CTONG2004264, CTONG2004305, CTONG2004397, CTONG2004423, CTONG2004454, CTONG2004487, CTONG2004550, CTONG2004669, CTONG2004716, CTONG2004912, CTONG2004941, CTONG2004948, CTONG2005028, CTONG2005049, CTONG2005110, CTONG2005145, CTONG2005265, CTONG2005278, CTONG2005290, CTONG2005374, CTONG2005399, CTONG2005468, CTONG2005567, CTONG2005585, CTONG2005615, CTONG2005635, CTONG2005775, CTONG2005795, CTONG2005890, CTONG2005904, CTONG2006004, CTONG2006129, CTONG2006223, CTONG2006235, CTONG2006273, CTONG2006310, CTONG2006377, CTONG2006393, CTONG2006412, CTONG2006449,

[2420] CTONG2006515, CTONG2006524, CTONG2006568, CTONG2006611, CTONG2006620, CTONG2006666, CTONG2006691, CTONG2006798, CTONG2006836, CTONG2006942, CTONG2006964, CTONG2007007, CTONG2007009, CTONG2007091, CTONG2007104, CTONG2007168, CTONG2007175, CTONG2007259, CTONG2007272, CTONG2007293, CTONG2007297, CTONG2007399, CTONG2007400, CTONG2007417, CTONG2007441, CTONG2007474, CTONG2007586, CTONG2007623, CTONG2007681, CTONG2007779, CTONG2007898, CTONG2007959, CTONG2007970, CTONG2008014, CTONG2008184, CTONG2008262, CTONG2008269, CTONG2008321, CTONG2008343, CTONG2008402, CTONG2008405, CTONG2008466, CTONG2008521, CTONG2008562, CTONG2008577, CTONG2008595, CTONG2008621, CTONG2008689, CTONG2008720, CTONG2008721,

[2421] CTONG2008773, CTONG2008792, CTONG2008989, CTONG2009033, CTONG2009108, CTONG2009132, CTONG2009156, CTONG2009181, CTONG2009257, CTONG2009258, CTONG2009268, CTONG2009270, CTONG2009395, CTONG2009423, CTONG2009440, CTONG2009527, CTONG2009529, CTONG2009531, CTONG2009534, CTONG2009570, CTONG2009572, CTONG2009604, CTONG2009643, CTONG2009675, CTONG2009689, CTONG2009725, CTONG2009766, CTONG2009768, CTONG2009844, CTONG2009871, CTONG2009887, CTONG2009891, CTONG2009923, CTONG2009938, CTONG2009955, CTONG2009958, CTONG2009963, CTONG2010018, CTONG2010024, CTONG2010116, CTONG2010133, CTONG2010148, CTONG2010276, CTONG2010330, CTONG2010408, CTONG2010508, CTONG2010566, CTONG2010623, CTONG2010649, CTONG2010652,

[2422] CTONG2010803, CTONG2011188, CTONG2011429, CTONG2011474, CTONG2011676, CTONG2011716, CTONG2011765, CTONG2011779, CTONG2011801, CTONG2011815, CTONG2011822, CTONG2011920, CTONG2011985, CTONG2012029, CTONG2012050, CTONG2012077, CTONG2012101, CTONG2012123, CTONG2012158, CTONG2012230, CTONG2012422, CTONG2012425, CTONG2012447, CTONG2012453, CTONG2012473, CTONG2012476, CTONG2012533, CTONG2012554, CTONG2012564, CTONG2012661, CTONG2012724, CTONG2012738, CTONG2012745, CTONG2012758, CTONG2012843, CTONG2012901, CTONG2012996, CTONG2013128, CTONG2013178, CTONG2013284, CTONG2013339, CTONG2013348, CTONG2013352, CTONG2013381, CTONG2013393, CTONG2013511, CTONG2013630, CTONG2013803, CTONG2013907, CTONG2013934,

[2423] CTONG2013985, CTONG2013986, CTONG2014032, CTONG2014058, CTONG2014119, CTONG2014165, CTONG2014191, CTONG2014206, CTONG2014234, CTONG2014264, CTONG2014280, CTONG2014369, CTONG2014389, CTONG2014491, CTONG2014630, CTONG2014635, CTONG2014646, CTONG2014705, CTONG2014898, CTONG2014946, CTONG2014954, CTONG2014959, CTONG2014966, CTONG2014995, CTONG2015204, CTONG2015316, CTONG2015330, CTONG2015345, CTONG2015358, CTONG2015434, CTONG2015518, CTONG2015540, CTONG2015596, CTONG2015633, CTONG2015678, CTONG2015717, CTONG2015804, CTONG2015815, CTONG2015866, CTONG2015914, CTONG2015953, CTONG2016185, CTONG2016217, CTONG2016355, CTONG2016408, CTONG2016499, CTONG2016505, CTONG2016559, CTONG2016658, CTONG2016775,

[2424] CTONG2016797, CTONG2016824, CTONG2016846, CTONG2016869, CTONG2016904, CTONG2016931, CTONG2016942, CTONG2016953, CTONG2017021, CTONG2017094, CTONG2017292, CTONG2017409, CTONG2017429, CTONG2017444, CTONG2017458, CTONG2017500, CTONG2017604, CTONG2017650, CTONG2017798, CTONG2017804, CTONG2017814, CTONG2017910, CTONG2017939, CTONG2017989, CTONG2017998, CTONG2018062, CTONG2018069, CTONG2018147, CTONG2018211, CTONG2018217, CTONG2018279, CTONG2018334, CTONG2018343, CTONG2018379, CTONG2018413, CTONG2018483, CTONG2018629, CTONG2018637, CTONG2018652, CTONG2018653, CTONG2018655, CTONG2018735, CTONG2018739, CTONG2018808, CTONG2018843, CTONG2018898, CTONG2018900, CTONG2018976, CTONG2019063, CTONG2019144,

[2425] CTONG2019232, CTONG2019400, CTONG2019652, CTONG2019704, CTONG2019788, CTONG2019822, CTONG2019833, CTONG2020031, CTONG2020108, CTONG2020127, CTONG2020171, CTONG2020374, CTONG2020378, CTONG2020411, CTONG2020522, CTONG2020638, CTONG2020806, CTONG2020831, CTONG2020974, CTONG2021024, CTONG2021132, CTONG2021168, CTONG2021289, CTONG2022153, CTONG2022601, CTONG2022835, CTONG2023021, CTONG2023449, CTONG2023512, CTONG2024206, CTONG2024614, CTONG2024749, CTONG2025496, CTONG2025513, CTONG2025516, CTONG2025610, CTONG2025900, CTONG2026513, CTONG2026770, CTONG2026920, CTONG2026987, CTONG2027150, CTONG2027263, CTONG2027327, CTONG2027361, CTONG2027591, CTONG2027736, CTONG2027783, CTONG2027828, CTONG2027959,

[2426] CTONG2028097, CTONG2028486, CTONG2028518, CTONG2028687, CTONG2028758, CTONG3000686, CTONG3000707, CTONG3000896, CTONG3001123, CTONG3001501, CTONG3001560, CTONG3001605, CTONG3001746, CTONG3002020, CTONG3002127, CTONG3002370, CTONG3002412, CTONG3002433, CTONG3002518, CTONG3002552, CTONG3002588, CTONG3002728, CTONG3002909, CTONG3002947, CTONG3002983, CTONG3003165, CTONG3003179, CTONG3003483, CTONG3003553, CTONG3003598, CTONG3003652, CTONG3003654, CTONG3003669, CTONG3003737, CTONG3003905, CTONG3003972, CTONG3004072, CTONG3004317, CTONG3004397, CTONG3004550, CTONG3004576, CTONG3004607, CTONG3004712, CTONG3005325, CTONG3005648, CTONG3005713, CTONG3005803, CTONG3005813, CTONG3006067, CTONG3006073,

[2427] CTONG3006186, CTONG3006629, CTONG3006650, CTONG3006659, CTONG3007244, CTONG3007444, CTONG3007528, CTONG3007586, CTONG3007870, CTONG3008223, CTONG3008252, CTONG3008258, CTONG3008457, CTONG3008496, CTONG3008566, CTONG3008639, CTONG3008831, CTONG3008951, CTONG3008959, CTONG3009028, CTONG3009227, CTONG3009287, CTONG3009328, CTONG3009385, D3OST1000066, D3OST1000238, D3OST1000267, D3OST2000184, D3OST2000618, D3OST2000654, D3OST2000734, D3OST2001328, D3OST2001669, D3OST2001670, D3OST2001788, D3OST2002223, D3OST2002262, D3OST2002272, D3OST2002417, D3OST2002436, D3OST2002648, D3OST2003024, D3OST2003331, D3OST2003607, D3OST2003797, D3OST2004637, D3OST3000195, D3OST3000258, D3OST3000291, D3OST3000388,

[2428] D3OST3000493, D6OST2000127, D6OST2000169, D6OST2000245, D6OST2000358, D6OST2000464, D6OST2000507, D9OST2000031, D9OST2000278, D9OST2000440, D9OST2000869, D9OST2001319, D9OST2001433, D9OST2002397, D9OST2002608, D9OST2002673, D9OST2003106, D9OST2003108, D9OST2003137, D9OST2003397, D9OST2003580, D9OST2003594, D9OST2003762, D9OST2003791, D9OST2003989, D9OST2004018, D9OST2004073, D9OST2004417, DFNES1000003, DFNES1000107, DFNES2000143, DFNES2000146, DFNES2000153, DFNES2000212, DFNES2000335, DFNES2000426, DFNES2000443, DFNES2000471, DFNES2000526, DFNES2000913, DFNES2001091, DFNES2001096, DFNES2001108, DFNES2001177, DFNES2001404, DFNES2001564, DFNES2001565, DFNES2001647, DFNES2001800, DFNES2001829,

[2429] DFNES2002220, DFNES2002509, DFNES2002550, DFNES2002588, DFNES2002817, DFNES2002966, DFNES2003081, DFNES2003255, DFNES2003742, DFNES2004346, DFNES2004354, DFNES2004383, DFNES2004608, DFNES2004684, DFNES2005266, DFNES2005527, DFNES2005690, DFNES2005766, DFNES2005779, DFNES2005875, DFNES2006346, DFNES2006944, DFNES2007113, DFNES2007299, DFNES2007332, DFNES2007641, DFNES2007757, DFNES2008088, DFNES2008160, DFNES2008280, DFNES2008881, DFNES2009482, DFNES2010502, DFNES2011192, DFNES2011221, DFNES2011245, DFNES2011380, ERLTF1000021, ERLTF2000324, ERLTF2000465, FCBBF1000023, FCBBF1000038, FCBBF1000063, FCBBF1000069, FCBBF1000115, FCBBF1000117, FCBBF1000118, FCBBF1000121, FCBBF1000125, FCBBF1000131,

[2430] FCBBF1000155, FCBBF1000157, FCBBF1000171, FCBBF1000174, FCBBF1000198, FCBBF1000206, FCBBF1000220, FCBBF1000232, FCBBF1000233, FCBBF1000243, FCBBF1000270, FCBBF1000272, FCBBF1000280, FCBBF1000297, FCBBF1000305, FCBBF1000314, FCBBF1000322, FCBBF1000349, FCBBF1000374, FCBBF1000376, FCBBF1000377, FCBBF1000395, FCBBF1000397, FCBBF1000403, FCBBF1000437, FCBBF1000476, FCBBF1000506, FCBBF1000509, FCBBF1000546, FCBBF1000550, FCBBF1000556, FCBBF1000574, FCBBF1000581, FCBBF1000582, FCBBF1000598, FCBBF1000604, FCBBF1000618, FCBBF1000627, FCBBF1000671, FCBBF1000675, FCBBF1000684, FCBBF1000686, FCBBF1000687, FCBBF1000691, FCBBF1000732, FCBBF1000748, FCBBF1000760, FCBBF2000038, FCBBF2000087, FCBBF2000094,

[2431] FCBBF2000105, FCBBF2000123, FCBBF2000195, FCBBF2000199, FCBBF2000214, FCBBF2000232, FCBBF2000259, FCBBF2000276, FCBBF2000291, FCBBF2000362, FCBBF2000379, FCBBF2000473, FCBBF2000576, FCBBF2000677, FCBBF2000678, FCBBF2000733, FCBBF2000782, FCBBF2000808, FCBBF2000815, FCBBF2000825, FCBBF2000940, FCBBF2000951, FCBBF2001001, FCBBF2001088, FCBBF2001116, FCBBF2001183, FCBBF2001188, FCBBF2001211, FCBBF2001238, FCBBF2001243, FCBBF2001291, FCBBF2001299, FCBBF2001400, FCBBF2001427, FCBBF2001480, FCBBF2001529, FCBBF2001594, FCBBF2001672, FCBBF2001675, FCBBF2001718, FCBBF2001720, FCBBF2001817, FCBBF2001868, FCBBF2002044, FCBBF2002111, FCBBF2002281, FCBBF2002370, FCBBF2002541, FCBBF2002626, FCBBF2002801,

[2432] FCBBF2002897, FCBBF2002898, FCBBF2002904, FCBBF2002928, FCBBF2002953, FCBBF2003083, FCBBF2003102, FCBBF2003269, FCBBF2003293, FCBBF2003297, FCBBF2003395, FCBBF2003528, FCBBF2003543, FCBBF2003549, FCBBF2003567, FCBBF2003636, FCBBF2003823, FCBBF2003895, FCBBF2004066, FCBBF2004090, FCBBF2004138, FCBBF2004217, FCBBF2004256, FCBBF2004373, FCBBF2004448, FCBBF2004671, FCBBF2004707, FCBBF2004788, FCBBF2005069, FCBBF2005122, FCBBF2005428, FCBBF2005439, FCBBF2005538, FCBBF2005645, FCBBF2005658, FCBBF2005733, FCBBF2005909, FCBBF2005966, FCBBF2006131, FCBBF2006380, FCBBF2006418, FCBBF2006452, FCBBF2006781, FCBBF2007012, FCBBF2007186, FCBBF2007265, FCBBF2007302, FCBBF2007556, FCBBF2007610, FCBBF2007633,

[2433] FCBBF2007840, FCBBF3000102, FCBBF3000110, FCBBF3000115, FCBBF3000120, FCBBF3000168, FCBBF3000175, FCBBF3000227, FCBBF3000229, FCBBF3000233, FCBBF3000269, FCBBF3000361, FCBBF3000367, FCBBF3000388, FCBBF3000462, FCBBF3000473, FCBBF3000501, FCBBF3000518, FCBBF3000536, FCBBF3000550, FCBBF3000847, FCBBF3001018, FCBBF3001020, FCBBF3001235, FCBBF3001281, FCBBF3001302, FCBBF3001377, FCBBF3001470, FCBBF3001594, FCBBF3001632, FCBBF3001818, FCBBF3001855, FCBBF3001912, FCBBF3001914, FCBBF3001918, FCBBF3001924, FCBBF3001977, FCBBF3002163, FCBBF3002188, FCBBF3002190, FCBBF3002268, FCBBF3002475, FCBBF3002556, FCBBF3002592, FCBBF3002658, FCBBF3002782, FCBBF3002818, FCBBF3002925, FCBBF3003216, FCBBF3003305,

[2434] FCBBF3003373, FCBBF3003435, FCBBF3003475, FCBBF3003481, FCBBF3003557, FCBBF3003787, FCBBF3003800, FCBBF3003902, FCBBF3004041, FCBBF3004323, FCBBF3004390, FCBBF3004409, FCBBF3004502, FCBBF3004715, FCBBF3004842, FCBBF3004847, FCBBF3004955, FCBBF3005160, FCBBF3005218, FCBBF3005444, FCBBF3005698, FCBBF3005729, FCBBF3006171, FCBBF3006249, FCBBF3006288, FCBBF3006399, FCBBF3006628, FCBBF3006821, FCBBF3007077, FCBBF3007150, FCBBF3007152, FCBBF3007242, FCBBF3007244, FCBBF3007248, FCBBF3007453, FCBBF3007462, FCBBF3007540, FCBBF3007597, FCBBF3007604, FCBBF3007631, FCBBF3007829, FCBBF3007855, FCBBF3007859, FCBBF3007860, FCBBF3008073, FCBBF3008100, FCBBF3008153, FCBBF3008159, FCBBF3008251, FCBBF3008311,

[2435] FCBBF3008362, FCBBF3008382, FCBBF3008475, FCBBF3008556, FCBBF3008689, FCBBF3008748, FCBBF3008870, FCBBF3008938, FCBBF3008944, FCBBF3009069, FCBBF3009101, FCBBF3009152, FCBBF3009256, FCBBF3009317, FCBBF3009428, FCBBF3009464, FCBBF3009479, FCBBF3009526, FCBBF3009703, FCBBF3009717, FCBBF3009888, FCBBF3009949, FCBBF3009978, FCBBF3010008, FCBBF3010012, FCBBF3010124, FCBBF3010130, FCBBF3010142, FCBBF3010149, FCBBF3010211, FCBBF3010361, FCBBF3010508, FCBBF3010544, FCBBF3010586, FCBBF3010601, FCBBF3010665, FCBBF3010695, FCBBF3010729, FCBBF3010733, FCBBF3011003, FCBBF3011418, FCBBF3011485, FCBBF3011523, FCBBF3011570, FCBBF3011592, FCBBF3011867, FCBBF3011889, FCBBF3012170, FCBBF3012182, FCBBF3012288,

[2436] FCBBF3012332, FCBBF3012347, FCBBF3012443, FCBBF3012588, FCBBF3012667, FCBBF3012842, FCBBF3012901, FCBBF3013041, FCBBF3013058, FCBBF3013205, FCBBF3013266, FCBBF3013307, FCBBF3013341, FCBBF3013506, FCBBF3013589, FCBBF3013623, FCBBF3013800, FCBBF3013846, FCBBF3014229, FCBBF3014355, FCBBF3014567, FCBBF3015100, FCBBF3015119, FCBBF3015131, FCBBF3015317, FCBBF3015727, FCBBF3015758, FCBBF3015809, FCBBF3015870, FCBBF3016018, FCBBF3016134, FCBBF3016178, FCBBF3016451, FCBBF3016618, FCBBF3016622, FCBBF3016644, FCBBF3016667, FCBBF3016928, FCBBF3016987, FCBBF3017059, FCBBF3017071, FCBBF3017123, FCBBF3017233, FCBBF3017255, FCBBF3017288, FCBBF3017396, FCBBF3017531, FCBBF3017535, FCBBF3017681, FCBBF3017729,

[2437] FCBBF3017873, FCBBF3017918, FCBBF3017974, FCBBF3018067, FCBBF3018173, FCBBF3018453, FCBBF3018591, FCBBF3018753, FCBBF3018796, FCBBF3018826, FCBBF3018949, FCBBF3019085, FCBBF3019320, FCBBF3019437, FCBBF3019455, FCBBF3019564, FCBBF3019569, FCBBF3019570, FCBBF3019663, FCBBF3019714, FCBBF3019716, FCBBF3019784, FCBBF3019839, FCBBF3019867, FCBBF3019961, FCBBF3020030, FCBBF3020138, FCBBF3020140, FCBBF3020163, FCBBF3020232, FCBBF3020599, FCBBF3021026, FCBBF3021221, FCBBF3021501, FCBBF3021506, FCBBF3021524, FCBBF3021807, FCBBF3021940, FCBBF3021985, FCBBF3022005, FCBBF3022291, FCBBF3022311, FCBBF3022504, FCBBF3022566, FCBBF3022593, FCBBF3022765, FCBBF3022767, FCBBF3022894, FCBBF3023061, FCBBF3023078,

[2438] FCBBF3023368, FCBBF3023372, FCBBF3023443, FCBBF3023599, FCBBF3023704, FCBBF3023887, FCBBF3023895, FCBBF3024002, FCBBF3024096, FCBBF3024225, FCBBF3024266, FCBBF3024364, FCBBF3024623, FCBBF3024793, FCBBF3024911, FCBBF3025098, FCBBF3025252, FCBBF3025280, FCBBF3025285, FCBBF3025417, FCBBF3025528, FCBBF3025568, FCBBF3025650, FCBBF3025674, FCBBF3025730, FCBBF3025737, FCBBF3025905, FCBBF3026021, FCBBF3026048, FCBBF3026251, FCBBF3026308, FCBBF3026651, FCBBF3026678, FCBBF3026692, FCBBF3027104, FCBBF3027199, FCBBF3027328, FCBBF3027559, FCBBF3027717, FCBBF3027755, FCBBF3027768, FCBBF3027854, FCBBF3027863, FCBBF3027903, FCBBF3028102, FCBBF3028143, FCBBF3028188, FCBBF3028202, FCBBF3028472, FCBBF3028528,

[2439] FCBBF3028582, FCBBF3028593, FCBBF3028671, FCBBF3028794, FCBBF4000017, FCBBF4000061, FCBBF4000076, FCBBF4000142, FCBBF4000173, FCBBF4000192, FCBBF4000193, FCBBF4000268, FCBBF4000282, FCBBF4000399, FCBBF4000415, FCBBF4000500, FCBBF4000529, FCBBF4000548, FCBBF5000041, FCBBF5000061, FCBBF5000165, FCBBF5000261, FCBBF5000325, FCBBF5000353, FCBBF5000384, FCBBF5000483, FCBBF5000495, FEBRA1000005, FEBRA1000008, FEBRA1000022, FEBRA1000030, FEBRA1000057, FEBRA1000088, FEBRA1000138, FEBRA1000148, FEBRA1000149, FEBRA1000183, FEBRA1000188, FEBRA1000189, FEBRA1000190, FEBRA2000007, FEBRA2000021, FEBRA2000035, FEBRA2000053, FEBRA2000126, FEBRA2000129, FEBRA2000210, FEBRA2000220, FEBRA2000228, FEBRA2000253,

[2440] FEBRA2000282, FEBRA2000286, FEBRA2000297, FEBRA2000311, FEBRA2000321, FEBRA2000333, FEBRA2000377, FEBRA2000378, FEBRA2000391, FEBRA2000394, FEBRA2000397, FEBRA2000399, FEBRA2000409, FEBRA2000415, FEBRA2000436, FEBRA2000438, FEBRA2000452, FEBRA2000454, FEBRA2000462, FEBRA2000468, FEBRA2000491, FEBRA2000504, FEBRA2000532, FEBRA2000536, FEBRA2000538, FEBRA2000575, FEBRA2000656, FEBRA2000659, FEBRA2000680, FEBRA2000690, FEBRA2000727, FEBRA2000734, FEBRA2000740, FEBRA2000757, FEBRA2000762, FEBRA2000771, FEBRA2000772, FEBRA2000782, FEBRA2000790, FEBRA2000793, FEBRA2000803, FEBRA2000805, FEBRA2000809, FEBRA2000815, FEBRA2000856, FEBRA2000862, FEBRA2000877, FEBRA2000880, FEBRA2000901, FEBRA2000909,

[2441] FEBRA2000917, FEBRA2000928, FEBRA2000936, FEBRA2000937, FEBRA2000959, FEBRA2000972, FEBRA2001004, FEBRA2001012, FEBRA2001020, FEBRA2001093, FEBRA2001124, FEBRA2001133, FEBRA2001146, FEBRA2001161, FEBRA2001175, FEBRA2001197, FEBRA2001217, FEBRA2001227, FEBRA2001245, FEBRA2001267, FEBRA2001294, FEBRA2001334, FEBRA2001351, FEBRA2001383, FEBRA2001438, FEBRA2001440, FEBRA2001487, FEBRA2001492, FEBRA2001523, FEBRA2001561, FEBRA2001571, FEBRA2001581, FEBRA2001584, FEBRA2001590, FEBRA2001591, FEBRA2001610, FEBRA2001620, FEBRA2001659, FEBRA2001669, FEBRA2001698, FEBRA2001705, FEBRA2001706, FEBRA2001715, FEBRA2001745, FEBRA2001752, FEBRA2001772, FEBRA2001790, FEBRA2001814, FEBRA2001828, FEBRA2001867,

[2442] FEBRA2001914, FEBRA2001974, FEBRA2001989, FEBRA2001990, FEBRA2002009, FEBRA2002027, FEBRA2002086, FEBRA2002109, FEBRA2002191, FEBRA2002260, FEBRA2002352, FEBRA2002399, FEBRA2002410, FEBRA2002429, FEBRA2002442, FEBRA2002456, FEBRA2002508, FEBRA2002525, FEBRA2002527, FEBRA2002552, FEBRA2002574, FEBRA2002601, FEBRA2002611, FEBRA2002628, FEBRA2002662, FEBRA2002682, FEBRA2002707, FEBRA2002727, FEBRA2002781, FEBRA2002783, FEBRA2002792, FEBRA2002818, FEBRA2002858, FEBRA2002882, FEBRA2002897, FEBRA2002908, FEBRA2002931, FEBRA2002962, FEBRA2002986, FEBRA2003054, FEBRA2003115, FEBRA2003128, FEBRA2003155, FEBRA2003163, FEBRA2003181, FEBRA2003198, FEBRA2003253, FEBRA2003258, FEBRA2003275, FEBRA2003308,

[2443] FEBRA2003327, FEBRA2003429, FEBRA2003436, FEBRA2003454, FEBRA2003468, FEBRA2003470, FEBRA2003520, FEBRA2003524, FEBRA2003541, FEBRA2003675, FEBRA2003707, FEBRA2003711, FEBRA2003726, FEBRA2003822, FEBRA2003897, FEBRA2003907, FEBRA2004023, FEBRA2004026, FEBRA2004029, FEBRA2004053, FEBRA2004056, FEBRA2004091, FEBRA2004110, FEBRA2004191, FEBRA2004202, FEBRA2004219, FEBRA2004224, FEBRA2004237, FEBRA2004268, FEBRA2004329, FEBRA2004331, FEBRA2004443, FEBRA2004485, FEBRA2004490, FEBRA2004538, FEBRA2004592, FEBRA2004620, FEBRA2004651, FEBRA2004767, FEBRA2004813, FEBRA2004840, FEBRA2004852, FEBRA2004867, FEBRA2004914, FEBRA2004933, FEBRA2004987, FEBRA2005014, FEBRA2005036, FEBRA2005079, FEBRA2005114,

[2444] FEBRA2005216, FEBRA2005291, FEBRA2005361, FEBRA2005377, FEBRA2005380, FEBRA2005427, FEBRA2005458, FEBRA2005476, FEBRA2005701, FEBRA2005726, FEBRA2005752, FEBRA2005778, FEBRA2005787, FEBRA2005788, FEBRA2005995, FEBRA2005998, FEBRA2006061, FEBRA2006092, FEBRA2006150, FEBRA2006165, FEBRA2006255, FEBRA2006315, FEBRA2006346, FEBRA2006354, FEBRA2006357, FEBRA2006368, FEBRA2006370, FEBRA2006379, FEBRA2006396, FEBRA2006401, FEBRA2006409, FEBRA2006418, FEBRA2006427, FEBRA2006476, FEBRA2006485, FEBRA2006491, FEBRA2006521, FEBRA2006627, FEBRA2006664, FEBRA2006667, FEBRA2006726, FEBRA2006736, FEBRA2006793, FEBRA2006808, FEBRA2006817, FEBRA2006873, FEBRA2006890, FEBRA2006942, FEBRA2006977, FEBRA2007017,

[2445] FEBRA2007176, FEBRA2007200, FEBRA2007247, FEBRA2007280, FEBRA2007414, FEBRA2007436, FEBRA2007449, FEBRA2007458, FEBRA2007534, FEBRA2007544, FEBRA2007551, FEBRA2007566, FEBRA2007589, FEBRA2007613, FEBRA2007620, FEBRA2007622, FEBRA2007708, FEBRA2007714, FEBRA2007793, FEBRA2007801, FEBRA2007818, FEBRA2007823, FEBRA2007880, FEBRA2007900, FEBRA2007901, FEBRA2007931, FEBRA2007957, FEBRA2008009, FEBRA2008036, FEBRA2008086, FEBRA2008134, FEBRA2008135, FEBRA2008159, FEBRA2008165, FEBRA2008172, FEBRA2008201, FEBRA2008210, FEBRA2008265, FEBRA2008266, FEBRA2008282, FEBRA2008287, FEBRA2008311, FEBRA2008341, FEBRA2008360, FEBRA2008459, FEBRA2008468, FEBRA2008475, FEBRA2008481, FEBRA2008542, FEBRA2008583,

[2446] FEBRA2008660, FEBRA2008662, FEBRA2008681, FEBRA2008692, FEBRA2008741, FEBRA2008755, FEBRA2008836, FEBRA2008859, FEBRA2008861, FEBRA2008866, FEBRA2008881, FEBRA2008928, FEBRA2008983, FEBRA2009016, FEBRA2009022, FEBRA2009029, FEBRA2009074, FEBRA2009117, FEBRA2009120, FEBRA2009162, FEBRA2009185, FEBRA2009240, FEBRA2009265, FEBRA2009289, FEBRA2009327, FEBRA2009328, FEBRA2009352, FEBRA2009362, FEBRA2009385, FEBRA2009416, FEBRA2009437, FEBRA2009478, FEBRA2009507, FEBRA2009514, FEBRA2009567, FEBRA2009588, FEBRA2009731, FEBRA2009754, FEBRA2009780, FEBRA2009846, FEBRA2009986, FEBRA2010141, FEBRA2010299, FEBRA2010484, FEBRA2010719, FEBRA2010746, FEBRA2010768, FEBRA2010802, FEBRA2011063, FEBRA2011090,

[2447] FEBRA2011356, FEBRA2011392, FEBRA2011414, FEBRA2011593, FEBRA2011665, FEBRA2012090, FEBRA2012120, FEBRA2012181, FEBRA2012195, FEBRA2012418, FEBRA2012507, FEBRA2012625, FEBRA2013019, FEBRA2013069, FEBRA2013274, FEBRA2013465, FEBRA2013570, FEBRA2013699, FEBRA2013905, FEBRA2013951, FEBRA2014010, FEBRA2014122, FEBRA2014198, FEBRA2014213, FEBRA2014297, FEBRA2014443, FEBRA2014578, FEBRA2014939, FEBRA2015076, FEBRA2015085, FEBRA2015175, FEBRA2015292, FEBRA2015588, FEBRA2016112, FEBRA2016398, FEBRA2016572, FEBRA2016583, FEBRA2016621, FEBRA2016654, FEBRA2016739, FEBRA2017024, FEBRA2017098, FEBRA2017138, FEBRA2017154, FEBRA2017200, FEBRA2017223, FEBRA2017333, FEBRA2017502, FEBRA2017533, FEBRA2017680,

[2448] FEBRA2017736, FEBRA2017780, FEBRA2017811, FEBRA2017850, FEBRA2018051, FEBRA2018203, FEBRA2018407, FEBRA2018433, FEBRA2018746, FEBRA2019172, FEBRA2019242, FEBRA2019298, FEBRA2019389, FEBRA2019457, FEBRA2019519, FEBRA2019582, FEBRA2019637, FEBRA2019663, FEBRA2019690, FEBRA2019711, FEBRA2019867, FEBRA2020406, FEBRA2020566, FEBRA2020582, FEBRA2020668, FEBRA2020801, FEBRA2020845, FEBRA2020886, FEBRA2020977, FEBRA2021032, FEBRA2021134, FEBRA2021171, FEBRA2021339, FEBRA2021431, FEBRA2021497, FEBRA2021550, FEBRA2021571, FEBRA2021636, FEBRA2021864, FEBRA2021892, FEBRA2021908, FEBRA2021966, FEBRA2022013, FEBRA2022148, FEBRA2022204, FEBRA2022255, FEBRA2022322, FEBRA2022601, FEBRA2022696, FEBRA2022729,

[2449] FEBRA2022787, FEBRA2022911, FEBRA2022956, FEBRA2022963, FEBRA2022972, FEBRA2023227, FEBRA2023285, FEBRA2023351, FEBRA2023377, FEBRA2023399, FEBRA2023498, FEBRA2023550, FEBRA2023721, FEBRA2023989, FEBRA2023990, FEBRA2024019, FEBRA2024136, FEBRA2024150, FEBRA2024343, FEBRA2024570, FEBRA2024693, FEBRA2024727, FEBRA2024744, FEBRA2024797, FEBRA2024987, FEBRA2025249, FEBRA2025427, FEBRA2025463, FEBRA2025477, FEBRA2026474, FEBRA2026582, FEBRA2026629, FEBRA2026769, FEBRA2026879, FEBRA2026890, FEBRA2026977, FEBRA2026984, FEBRA2027082, FEBRA2027297, FEBRA2027352, FEBRA2027364, FEBRA2027609, FEBRA2028158, FEBRA2028222, FEBRA2028366, FEBRA2028457, FEBRA2028477, FEBRA2028503, FEBRA2028516, FEHRT2000325,

[2450] FEHRT2000364, FEKID1000018, FELIV1000101, FELIV1000137, FELIV1000164, FELNG2000241, HCASM1000021, HCASM1000050, HCASM1000061, HCASM1000115, HCASM1000130, HCASM2000016, HCASM2000138, HCASM2000156, HCASM2000202, HCASM2000214, HCASM2000266, HCASM2000307, HCASM2000534, HCASM2000536, HCASM2000560, HCASM2000871, HCASM2001285, HCASM2001810, HCASM2001866, HCASM2001890, HCASM2002148, HCASM2002502, HCASM2002754, HCASM2002918, HCASM2003018, HCASM2003076, HCASM2003099, HCASM2003212, HCASM2003237, HCASM2003357, HCASM2003415, HCASM2005388, HCASM2005484, HCASM2006131, HCASM2006338, HCASM2006359, HCASM2006632, HCASM2007047, HCASM2007317, HCASM2007737, HCASM2007773, HCASM2008154, HCASM2008536, HCASM2009405,

[2451] HCASM2009424, HCASM2009463, HCASM2009588, HCHON1000015, HCHON1000131, HCHON1000142, HCHON1000176, HCHON1000191, HCHON2000038, HCHON2000100, HCHON2000156, HCHON2000199, HCHON2000212, HCHON2000271, HCHON2000315, HCHON2000323, HCHON2000344, HCHON2000364, HCHON2000395, HCHON2000417, HCHON2000418, HCHON2000473, HCHON2000503, HCHON2000626, HCHON2000660, HCHON2000663, HCHON2000673, HCHON2000676, HCHON2000698, HCHON2000699, HCHON2000705, HCHON2000738, HCHON2000743, HCHON2000751, HCHON2000815, HCHON2000817, HCHON2000818, HCHON2000819, HCHON2000832, HCHON2000851, HCHON2000898, HCHON2000935, HCHON2000942, HCHON2000956, HCHON2000994, HCHON2001050, HCHON2001108, HCHON2001110, HCHON2001116, HCHON2001161,

[2452] HCHON2001214, HCHON2001233, HCHON2001269, HCHON2001450, HCHON2001453, HCHON2001497, HCHON2001519, HCHON2001523, HCHON2001535, HCHON2001546, HCHON2001548, HCHON2001577, HCHON2001598, HCHON2001604, HCHON2001607, HCHON2001646, HCHON2001665, HCHON2001712, HCHON2001768, HCHON2001801, HCHON2001853, HCHON2002123, HCHON2002194, HCHON2002241, HCHON2002247, HCHON2002354, HCHON2002496, HCHON2002676, HCHON2002770, HCHON2002964, HCHON2002971, HCHON2003131, HCHON2003134, HCHON2003327, HCHON2003513, HCHON2003532, HCHON2003642, HCHON2003659, HCHON2003676, HCHON2004007, HCHON2004279, HCHON2004359, HCHON2004531, HCHON2004776, HCHON2004858, HCHON2005048, HCHON2005118, HCHON2005166, HCHON2005802, HCHON2005987,

[2453] HCHON2006250, HCHON2006459, HCHON2006714, HCHON2006722, HCHON2006770, HCHON2006786, HCHON2006841, HCHON2006871, HCHON2007046, HCHON2007482, HCHON2007650, HCHON2007674, HCHON2007774, HCHON2007881, HCHON2008112, HCHON2008239, HCHON2008444, HCHON2008582, HCHON2008672, HCHON2008856, HCHON2008871, HCHON2008989, HCHON2009191, HCHON2009384, HCHON2009749, HCHON2009766, HCHON2009795, HCHON2010074, HCHON2010543, HEART1000010, HEART1000099, HEART1000102, HEART1000118, HEART1000132, HEART1000151, HEART1000173, HEART2000024, HEART2000035, HEART2000099, HEART2000298, HEART2000306, HEART2000309, HEART2000411, HEART2000418, HEART2000444, HEART2000448, HEART2000492, HEART2000568, HEART2000611, HEART2000959,

[2454] HEART2001680, HEART2001756, HEART2002129, HEART2002184, HEART2002220, HEART2002432, HEART2002531, HEART2002598, HEART2002717, HEART2003027, HEART2003168, HEART2003432, HEART2003440, HEART2003781, HEART2003852, HEART2004570, HEART2004764, HEART2004931, HEART2004940, HEART2004941, HEART2004980, HEART2005244, HEART2005310, HEART2005581, HEART2005610, HEART2006131, HEART2006195, HEART2006310, HEART2006334, HEART2006487, HEART2006557, HEART2006787, HEART2006789, HEART2006909, HEART2007031, HEART2007231, HEART2007443, HEART2007767, HEART2008108, HEART2008111, HEART2008257, HEART2008509, HEART2008994, HEART2009000, HEART2009599, HEART2009680, HEART2010391, HEART2010492, HELAC2000158, HELAC2000301,

[2455] HHDPC1000001, HHDPC1000065, HHDPC1000114, HHDPC1000118, HHDPC2000070, HHDPC2000102, HHDPC2000104, HHDPC2000258, HHDPC2000315, HHDPC2000462, HHDPC2000572, HHDPC2000656, HHDPC2000692, HHDPC2001337, HHDPC2001432, HHDPC2001896, HHDPC2002963, HHDPC2003049, HHDPC2003113, HHDPC2003381, HHDPC2003472, HHDPC2004757, HHDPC2005185, HHDPC2005513, HHDPC2005742, HHDPC2005794, HHDPC2006460, HHDPC2006862, HHDPC2006927, HHDPC2007302, HHDPC2007775, HHDPC2008123, HHDPC2008185, HHDPC2008279, HHDPC2008297, HHDPC2008414, HHDPC2008474, HHDPC2008816, HHDPC2008843, HHDPC2009114, HHDPC2009178, HHDPC2009208, HHDPC2009272, HHDPC2009528, HLUNG1000017, HLUNG1000024, HLUNG1000030, HLUNG1000034, HLUNG1000037, HLUNG1000053,

[2456] HLUNG1000064, HLUNG1000084, HLUNG1000091, HLUNG1000099, HLUNG1000104, HLUNG1000105, HLUNG1000110, HLUNG1000151, HLUNG1000169, HLUNG2000004, HLUNG2000014, HLUNG2000027, HLUNG2000063, HLUNG2000068, HLUNG2000116, HLUNG2000125, HLUNG2000130, HLUNG2000142, HLUNG2000174, HLUNG2000176, HLUNG2000217, HLUNG2000232, HLUNG2000255, HLUNG2000281, HLUNG2000314, HLUNG2000340, HLUNG2000362, HLUNG2000363, HLUNG2000431, HLUNG2000480, HLUNG2000489, HLUNG2000549, HLUNG2000557, HLUNG2000570, HLUNG2000751, HLUNG2000761, HLUNG2000777, HLUNG2000846, HLUNG2000870, HLUNG2000926, HLUNG2000950, HLUNG2000955, HLUNG2000970, HLUNG2001013, HLUNG2001126, HLUNG2001144, HLUNG2001146, HLUNG2001214, HLUNG2001439, HLUNG2001507,

[2457] HLUNG2001677, HLUNG2001814, HLUNG2001996, HLUNG2002006, HLUNG2002050, HLUNG2002085, HLUNG2002145, HLUNG2002295, HLUNG2002303, HLUNG2002334, HLUNG2002405, HLUNG2002429, HLUNG2002465, HLUNG2002562, HLUNG2002659, HLUNG2002707, HLUNG2002811, HLUNG2002916, HLUNG2002942, HLUNG2002949, HLUNG2002958, HLUNG2002982, HLUNG2003003, HLUNG2003049, HLUNG2003061, HLUNG2003162, HLUNG2003246, HLUNG2003331, HLUNG2003335, HLUNG2003378, HLUNG2003497, HLUNG2003691, HLUNG2003710, HLUNG2003714, HLUNG2003716, HLUNG2003833, HLUNG2003872, HLUNG2003918, HLUNG2003991, HLUNG2004014, HLUNG2004037, HLUNG2004067, HLUNG2004154, HLUNG2004217, HLUNG2004273, HLUNG2004388, HLUNG2004416, HLUNG2004521, HLUNG2004534, HLUNG2004684,

[2458] HLUNG2004707, HLUNG2004774, HLUNG2004775, HLUNG2005012, HLUNG2005030, HLUNG2005045, HLUNG2005076, HLUNG2005133, HLUNG2005203, HLUNG2005479, HLUNG2005524, HLUNG2005656, HLUNG2005774, HLUNG2005813, HLUNG2005924, HLUNG2006026, HLUNG2006067, HLUNG2006094, HLUNG2006370, HLUNG2006397, HLUNG2006570, HLUNG2006599, HLUNG2006614, HLUNG2006671, HLUNG2006781, HLUNG2006812, HLUNG2006843, HLUNG2006852, HLUNG2006935, HLUNG2007041, HLUNG2007163, HLUNG2007210, HLUNG2007219, HLUNG2007245, HLUNG2007433, HLUNG2007931, HLUNG2008066, HLUNG2008139, HLUNG2008153, HLUNG2008225, HLUNG2008235, HLUNG2008247, HLUNG2008333, HLUNG2008348, HLUNG2008384, HLUNG2008396, HLUNG2008439, HLUNG2008479, HLUNG2008480, HLUNG2008521,

[2459] HLUNG2008833, HLUNG2008875, HLUNG2008885, HLUNG2008958, HLUNG2008959, HLUNG2009067, HLUNG2009225, HLUNG2009253, HLUNG2009303, HLUNG2009413, HLUNG2009729, HLUNG2010181, HLUNG2010464, HLUNG2010562, HLUNG2010845, HLUNG2011041, HLUNG2011461, HLUNG2011833, HLUNG2012049, HLUNG2012287, HLUNG2012315, HLUNG2012546, HLUNG2012600, HLUNG2012727, HLUNG2013097, HLUNG2013204, HLUNG2013304, HLUNG2013350, HLUNG2013622, HLUNG2013643, HLUNG2013784, HLUNG2013851, HLUNG2014262, HLUNG2014288, HLUNG2014449, HLUNG2014821, HLUNG2015184, HLUNG2015418, HLUNG2015548, HLUNG2015578, HLUNG2015617, HLUNG2016022, HLUNG2016862, HLUNG2017286, HLUNG2017307, HLUNG2017350, HLUNG2017546, HLUNG2017806, HLUNG2018029, HLUNG2018282,

[2460] HLUNG2018626, HLUNG2019058, HSYRA1000131, HSYRA1000148, HSYRA2000044, HSYRA2000135, HSYRA2000190, HSYRA2000221, HSYRA2000237, HSYRA2000253, HSYRA2000255, HSYRA2000332, HSYRA2000371, HSYRA2000424, HSYRA2000507, HSYRA2000510, HSYRA2000629, HSYRA2000706, HSYRA2000760, HSYRA2000792, HSYRA2000832, HSYRA2000925, HSYRA2000927, HSYRA2001003, HSYRA2001103, HSYRA2001142, HSYRA2001153, HSYRA2001232, HSYRA2001255, HSYRA2001332, HSYRA2001353, HSYRA2001420, HSYRA2001484, HSYRA2001552, HSYRA2001567, HSYRA2001580, HSYRA2001595, HSYRA2001631, HSYRA2001983, HSYRA2002103, HSYRA2002590, HSYRA2003168, HSYRA2004550, HSYRA2004858, HSYRA2005456, HSYRA2005496, HSYRA2005628, HSYRA2005970, HSYRA2006049, HSYRA2006873,

[2461] HSYRA2007241, HSYRA2007338, HSYRA2007667, HSYRA2008154, HSYRA2008714, HSYRA2009102, IMR321000155, IMR321000158, IMR321000161, IMR321000165, IMR321000193, IMR321000207, IMR321000230, IMR321000242, IMR321000253, IMR322000010, IMR322000072, IMR322000107, IMR322000152, IMR322000164, IMR322000302, IMR322000374, IMR322000379, IMR322000383, IMR322000418, IMR322000518, IMR322000555, IMR322000604, IMR322000609, IMR322000656, IMR322000672, IMR322000742, IMR322000791, IMR322000819, IMR322000838, IMR322000859, IMR322000863, IMR322000917, IMR322000919, IMR322000953, IMR322000973, IMR322000984, IMR322001018, IMR322001167, IMR322001185, IMR322001245, IMR322001317, IMR322001318, IMR322001322, IMR322001332,

[2462] IMR322001380, IMR322001438, IMR322001452, IMR322001491, IMR322001534, IMR322001665, IMR322001670, IMR322001710, IMR322001724, IMR322001879, IMR322002035, IMR322002110, IMR322002470, IMR322002993, IMR322003675, IMR322004768, IMR322005293, IMR322005833, IMR322006012, IMR322006222, IMR322006495, IMR322006520, IMR322006886, IMR322006947, IMR322007078, IMR322007225, IMR322007704, IMR322008651, IMR322009710, IMR322009807, IMR322010295, IMR322010953, IMR322011689, IMR322012314, IMR322012529, IMR322013053, IMR322013396, IMR322013731, IMR322013805, IMR322015523, IMR322016146, IMR322017049, IMR322018117, IMR322018192, JCMLC2000273, KIDNE1000008, KIDNE1000012, KIDNE1000015, KIDNE1000028, KIDNE1000036,

[2463] KIDNE1000064, KIDNE1000104, KIDNE1000121, KIDNE1000143, KIDNE1000152, KIDNE2000026, KIDNE2000041, KIDNE2000046, KIDNE2000051, KIDNE2000070, KIDNE2000167, KIDNE2000174, KIDNE2000192, KIDNE2000227, KIDNE2000244, KIDNE2000245, KIDNE2000266, KIDNE2000287, KIDNE2000315, KIDNE2000317, KIDNE2000328, KIDNE2000330, KIDNE2000335, KIDNE2000349, KIDNE2000375, KIDNE2000394, KIDNE2000422, KIDNE2000493, KIDNE2000510, KIDNE2000513, KIDNE2000519, KIDNE2000555, KIDNE2000624, KIDNE2000665, KIDNE2000678, KIDNE2000717, KIDNE2000721, KIDNE2000722, KIDNE2000777, KIDNE2000801, KIDNE2000832, KIDNE2000833, KIDNE2000846, KIDNE2000867, KIDNE2000947, KIDNE2001117, KIDNE2001140, KIDNE2001269, KIDNE2001361, KIDNE2001373,

[2464] KIDNE2001713, KIDNE2001802, KIDNE2001840, KIDNE2001847, KIDNE2001857, KIDNE2001873, KIDNE2001897, KIDNE2001931, KIDNE2001979, KIDNE2002015, KIDNE2002162, KIDNE2002168, KIDNE2002191, KIDNE2002198, KIDNE2002252, KIDNE2002262, KIDNE2002265, KIDNE2002438, KIDNE2002483, KIDNE2002725, KIDNE2002768, KIDNE2002795, KIDNE2002798, KIDNE2002839, KIDNE2002845, KIDNE2002872, KIDNE2002882, KIDNE2002991, KIDNE2003185, KIDNE2003188, KIDNE2003233, KIDNE2003316, KIDNE2003335, KIDNE2003357, KIDNE2003373, KIDNE2003377, KIDNE2003507, KIDNE2003752, KIDNE2003764, KIDNE2003837, KIDNE2003941, KIDNE2003994, KIDNE2004034, KIDNE2004054, KIDNE2004084, KIDNE2004095, KIDNE2004115, KIDNE2004233, KIDNE2004262, KIDNE2004279,

[2465] KIDNE2004294, KIDNE2004295, KIDNE2004305, KIDNE2004344, KIDNE2004394, KIDNE2004519, KIDNE2004520, KIDNE2004531, KIDNE2004534, KIDNE2004562, KIDNE2004579, KIDNE2004681, KIDNE2004828, KIDNE2004846, KIDNE2004864, KIDNE2004879, KIDNE2004981, KIDNE2004985, KIDNE2004999, KIDNE2005038, KIDNE2005042, KIDNE2005062, KIDNE2005266, KIDNE2005296, KIDNE2005321, KIDNE2005327, KIDNE2005336, KIDNE2005400, KIDNE2005424, KIDNE2005477, KIDNE2005526, KIDNE2005543, KIDNE2005603, KIDNE2005629, KIDNE2005781, KIDNE2005798, KIDNE2005854, KIDNE2005908, KIDNE2005937, KIDNE2006014, KIDNE2006030, KIDNE2006039, KIDNE2006053, KIDNE2006062, KIDNE2006092, KIDNE2006145, KIDNE2006149, KIDNE2006210, KIDNE2006299, KIDNE2006334,

[2466] KIDNE2006353, KIDNE2006376, KIDNE2006378, KIDNE2006465, KIDNE2006580, KIDNE2006652, KIDNE2006687, KIDNE2006733, KIDNE2006760, KIDNE2006775, KIDNE2006811, KIDNE2006820, KIDNE2006880, KIDNE2007005, KIDNE2007040, KIDNE2007077, KIDNE2007186, KIDNE2007222, KIDNE2007422, KIDNE2007569, KIDNE2007810, KIDNE2007811, KIDNE2007910, KIDNE2007944, KIDNE2008022, KIDNE2008069, KIDNE2008072, KIDNE2008117, KIDNE2008218, KIDNE2008315, KIDNE2008362, KIDNE2008378, KIDNE2008404, KIDNE2008446, KIDNE2008473, KIDNE2008480, KIDNE2008649, KIDNE2008666, KIDNE2008697, KIDNE2008758, KIDNE2008788, KIDNE2008795, KIDNE2008824, KIDNE2008832, KIDNE2008869, KIDNE2008914, KIDNE2008975, KIDNE2008987, KIDNE2009019, KIDNE2009109,

[2467] KIDNE2009180, KIDNE2009191, KIDNE2009332, KIDNE2009367, KIDNE2009426, KIDNE2009467, KIDNE2009490, KIDNE2009553, KIDNE2009605, KIDNE2009628, KIDNE2009647, KIDNE2009676, KIDNE2009723, KIDNE2010007, KIDNE2010049, KIDNE2010052, KIDNE2010084, KIDNE2010137, KIDNE2010151, KIDNE2010264, KIDNE2010265, KIDNE2010271, KIDNE2010419, KIDNE2010574, KIDNE2010674, KIDNE2010739, KIDNE2010750, KIDNE2010762, KIDNE2010863, KIDNE2010973, KIDNE2010989, KIDNE2011200, KIDNE2011314, KIDNE2011508, KIDNE2011532, KIDNE2011635, KIDNE2011752, KIDNE2011782, KIDNE2011858, KIDNE2012009, KIDNE2012025, KIDNE2012188, KIDNE2012291, KIDNE2012316, KIDNE2012361, KIDNE2012453, KIDNE2012563, KIDNE2012601, KIDNE2012613, KIDNE2012710,

[2468] KIDNE2012745, KIDNE2012775, KIDNE2012784, KIDNE2012945, KIDNE2013045, KIDNE2013095, KIDNE2013158, KIDNE2013218, KIDNE2013263, KIDNE2013346, KIDNE2013388, KIDNE2013413, KIDNE2013489, KIDNE2013639, KIDNE2013731, KIDNE2013734, KIDNE2013775, KIDNE2013801, KIDNE2013866, KIDNE2014087, KIDNE2014112, KIDNE2014119, KIDNE2014170, KIDNE2014184, KIDNE2014268, KIDNE2014298, KIDNE2014320, KIDNE2014415, KIDNE2014489, KIDNE2014496, KIDNE2014661, KIDNE2014717, KIDNE2014789, KIDNE2014808, KIDNE2014890, KIDNE2014978, KIDNE2015073, KIDNE2015221, KIDNE2015244, KIDNE2015313, KIDNE2015433, KIDNE2015483, KIDNE2015515, KIDNE2015546, KIDNE2015556, KIDNE2015598, KIDNE2015660, KIDNE2015710, KIDNE2015987, KIDNE2016000,

[2469] KIDNE2016036, KIDNE2016096, KIDNE2016101, KIDNE2016142, KIDNE2016188, KIDNE2016327, KIDNE2016388, KIDNE2016464, KIDNE2016539, KIDNE2016570, KIDNE2016918, KIDNE2017007, KIDNE2017052, KIDNE2017151, KIDNE2017153, KIDNE2017315, KIDNE2017332, KIDNE2017343, KIDNE2017454, KIDNE2017603, KIDNE2017956, KIDNE2018071, KIDNE2018166, KIDNE2018167, KIDNE2018217, KIDNE2018254, KIDNE2018268, KIDNE2018269, KIDNE2018287, KIDNE2018294, KIDNE2018352, KIDNE2018462, KIDNE2018617, KIDNE2018678, KIDNE2018727, KIDNE2018863, KIDNE2018891, KIDNE2018989, KIDNE2018996, KIDNE2019074, KIDNE2019187, LIVER1000017, LIVER1000050, LIVER1000055, LIVER1000058, LIVER1000063, LIVER1000067, LIVER1000073, LIVER1000082, LIVER1000099,

[2470] LIVER1000104, LIVER1000111, LIVER1000126, LIVER1000139, LIVER1000155, LIVER1000165, LIVER1000175, LIVER1000224, LIVER1000230, LIVER1000278, LIVER1000303, LIVER1000397, LIVER1000421, LIVER1000433, LIVER1000479, LIVER1000482, LIVER1000542, LIVER2000003, LIVER2000033, LIVER2000037, LIVER2000158, LIVER2000216, LIVER2000237, LIVER2000247, LIVER2000360, LIVER2000515, LIVER2000592, LIVER2000626, LIVER2000682, LIVER2000769, LIVER2000775, LIVER2001051, LIVER2001076, LIVER2001099, LIVER2001113, LIVER2001164, LIVER2001191, LIVER2001265, LIVER2001329, LIVER2001389, LIVER2001461, LIVER2001835, LIVER2002638, LIVER2002644, LIVER2002660, LIVER2002702, LIVER2003008, LIVER2003065, LIVER2003234, LIVER2003511,

[2471] LIVER2003524, LIVER2003568, LIVER2003581, LIVER2003800, LIVER2003854, LIVER2004074, LIVER2004392, LIVER2004514, LIVER2004565, LIVER2005198, LIVER2005218, LIVER2005376, LIVER2005385, LIVER2005512, LIVER2005520, LIVER2005527, LIVER2005544, LIVER2005625, LIVER2005728, LIVER2005973, LIVER2006006, LIVER2006251, LIVER2006410, LIVER2006469, LIVER2006644, LIVER2006764, LIVER2007415, LIVER2007548, LIVER2007568, LIVER2007721, LIVER2008053, LIVER2008465, LIVER2008473, LIVER2008580, LIVER2008706, LIVER2008751, LIVER2008945, LIVER2008998, LIVER2009110, LIVER2009118, LIVER2009554, LYMPB1000141, LYMPB1000158, LYMPB2000083, MAMGL1000017, MAMGL1000083, MAMGL1000100, MAMGL1000132, MAMGL1000151, MAMGL1000178,

[2472] MAMGL1000182, MAMGL1000184, MESAN1000032, MESAN1000035, MESAN1000050, MESAN1000079, MESAN1000080, MESAN1000121, MESAN1000147, MESAN1000180, MESAN2000023, MESAN2000026, MESAN2000067, MESAN2000092, MESAN2000149, MESAN2000167, MESAN2000291, MESAN2000337, MESAN2000434, MESAN2000462, MESAN2000501, MESAN2000711, MESAN2000815, MESAN2000894, MESAN2000909, MESAN2001627, MESAN2001770, MESAN2001979, MESAN2001980, MESAN2002113, MESAN2002122, MESAN2002147, MESAN2002186, MESAN2002424, MESAN2002519, MESAN2002687, MESAN2002709, MESAN2002844, MESAN2002978, MESAN2003037, MESAN2003039, MESAN2003101, MESAN2003190, MESAN2003322, MESAN2003490, MESAN2003529, MESAN2003646, MESAN2003662, MESAN2003709, MESAN2003851,

[2473] MESAN2004138, MESAN2004288, MESAN2004575, MESAN2005284, MESAN2005371, MESAN2005633, MESAN2005689, MESAN2005724, MESAN2005808, MESAN2005811, MESAN2006022, MESAN2006043, MESAN2006328, MESAN2006401, MESAN2006580, MESAN2006599, MESAN2006953, MESAN2006971, MESAN2007032, MESAN2007440, MESAN2007597, MESAN2007755, MESAN2008222, MESAN2008334, MESAN2008460, MESAN2008536, MESAN2008679, MESAN2008729, MESAN2008821, MESAN2008926, MESAN2009019, MESAN2009081, MESAN2009105, MESAN2009311, MESAN2009418, MESAN2009503, MESAN2009522, MESAN2010031, MESAN2010114, MESAN2010312, MESAN2010321, MESAN2010664, MESAN2010681, MESAN2011545, MESAN2011597, MESAN2011632, MESAN2011977, MESAN2012586, MESAN2012708, MESAN2012735,

[2474] MESAN2013019, MESAN2013022, MESAN2013183, MESAN2013211, MESAN2013283, MESAN2013284, MESAN2013611, MESAN2013674, MESAN2013845, MESAN2013908, MESAN2013936, MESAN2014192, MESAN2014295, MESAN2014298, MESAN2014412, MESAN2014624, MESAN2015277, MESAN2015365, MESAN2015391, MESAN2015401, MESAN2015501, MESAN2015515, MESAN2015708, MESAN2016159, MESAN2016304, MESAN2016409, MESAN2016552, MESAN2016965, MESAN2017133, MESAN2017152, MESAN2017373, MESAN2017417, MESAN2018209, MESAN2018576, MESAN2018670, MESTC1000042, MESTC1000147, MESTC2000150, MESTC2000153, MESTC2000170, N1ESE2000698, NB9N41000047, NB9N41000121, NB9N41000135, NB9N41000142, NB9N41000146, NB9N41000340, NB9N42000104, NB9N42000122, NB9N42000196,

[2475] NB9N42000281, NB9N42000314, NB9N42000430, NB9N42000495, NB9N42001300, NCRRP1000129, NESOP1000010, NESOP1000087, NESOP1000108, NESOP2000231, NESOP2000452, NESOP2000499, NESOP2000504, NESOP2000744, NESOP2001144, NESOP2001433, NESOP2001656, NESOP2001694, NESOP2001752, NESOP2002352, NESOP2002418, NESOP2002487, NESOP2002738, NESOP2002780, NETRP1000034, NETRP1000082, NETRP2000086, NETRP2000182, NETRP2000439, NHNPC1000034, NHNPC1000037, NHNPC1000084, NHNPC1000101, NHNPC1000124, NHNPC2000062, NHNPC2000212, NHNPC2000606, NHNPC2000877, NHNPC2001108, NHNPC2001223, NHNPC2001312, NHNPC2001816, NHNPC2002565, NHNPC2002749, NOVAR1000015, NOVAR1000102, NOVAR2000136, NOVAR2000352, NOVAR2000412, NOVAR2000710,

[2476] NOVAR2000783, NOVAR2000962, NOVAR2001108, NOVAR2001620, NOVAR2001783, NOVAR2001876, NOVAR2002039, NT2NE1000004, NT2NE1000014, NT2NE1000018, NT2NE1000023, NT2NE1000024, NT2NE1000059, NT2NE1000063, NT2NE1000073, NT2NE1000083, NT2NE1000120, NT2NE1000122, NT2NE1000175, NT2NE1000181, NT2NE1000185, NT2NE2000038, NT2NE2000054, NT2NE2000057, NT2NE2000064, NT2NE2000109, NT2NE2000137, NT2NE2000156, NT2NE2000222, NT2NE2000284, NT2NE2000299, NT2NE2000353, NT2NE2000356, NT2NE2000369, NT2NE2000374, NT2NE2000386, NT2NE2000390, NT2NE2000392, NT2NE2000455, NT2NE2000470, NT2NE2000488, NT2NE2000517, NT2NE2000536, NT2NE2000546, NT2NE2000548, NT2NE2000550, NT2NE2000586, NT2NE2000612, NT2NE2000636, NT2NE2000658,

[2477] NT2NE2000706, NT2NE2000763, NT2NE2000802, NT2NE2000808, NT2NE2000809, NT2NE2000864, NT2NE2000909, NT2NE2000913, NT2NE2000950, NT2NE2000951, NT2NE2000980, NT2NE2001005, NT2NE2001021, NT2NE2001040, NT2NE2001048, NT2NE2001049, NT2NE2001142, NT2NE2001156, NT2NE2001176, NT2NE2001180, NT2NE2001181, NT2NE2001188, NT2NE2001191, NT2NE2001247, NT2NE2001252, NT2NE2001324, NT2NE2001326, NT2NE2001364, NT2NE2001372, NT2NE2001397, NT2NE2001403, NT2NE2001428, NT2NE2001432, NT2NE2001442, NT2NE2001524, NT2NE2001598, NT2NE2001617, NT2NE2001623, NT2NE2001626, NT2NE2001634, NT2NE2001648, NT2NE2001660, NT2NE2001666, NT2NE2001677, NT2NE2001697, NT2NE2001698, NT2NE2001723, NT2NE2001725, NT2NE2001874, NT2NE2001889,

[2478] NT2NE2001923, NT2NE2002100, NT2NE2002162, NT2NE2002186, NT2NE2002285, NT2NE2002311, NT2NE2002620, NT2NE2002651, NT2NE2002732, NT2NE2002768, NT2NE2002791, NT2NE2002856, NT2NE2003150, NT2NE2003185, NT2NE2003252, NT2NE2003280, NT2NE2003308, NT2NE2003309, NT2NE2003315, NT2NE2003393, NT2NE2003408, NT2NE2003457, NT2NE2003485, NT2NE2003540, NT2NE2003569, NT2NE2003571, NT2NE2003705, NT2NE2003752, NT2NE2003887, NT2NE2003921, NT2NE2004255, NT2NE2004378, NT2NE2004490, NT2NE2004519, NT2NE2004606, NT2NE2004740, NT2NE2004787, NT2NE2004916, NT2NE2005035, NT2NE2005223, NT2NE2005276, NT2NE2005317, NT2NE2005323, NT2NE2005358, NT2NE2005395, NT2NE2005419, NT2NE2005517, NT2NE2005537, NT2NE2005555, NT2NE2005588,

[2479] NT2NE2005676, NT2NE2005720, NT2NE2005784, NT2NE2005804, NT2NE2005821, NT2NE2005890, NT2NE2005921, NT2NE2005968, NT2NE2006075, NT2NE2006087, NT2NE2006103, NT2NE2006217, NT2NE2006288, NT2NE2006382, NT2NE2006387, NT2NE2006427, NT2NE2006432, NT2NE2006531, NT2NE2006659, NT2NE2006784, NT2NE2006813, NT2NE2006894, NT2NE2006909, NT2NE2006942, NT2NE2006958, NT2NE2007052, NT2NE2007220, NT2NE2007425, NT2NE2007725, NT2NE2007727, NT2NE2007786, NT2NE2007877, NT2NE2007967, NT2NE2008017, NT2NE2008060, NT2NE2008077, NT2NE2008213, NT2NE2008260, NT2NE2008378, NT2NE2008607, NT2NE2008639, NT2NE2008727, NT2NE2008783, NT2NE2008785, NT2NE2008803, NT2NE2008867, NT2NE2008961, NT2NE2008997, NT2NE2009138, NT2NE2009295,

[2480] NT2NE2009426, NT2NE2009523, NT2NE2009608, NT2NE2009691, NT2NE2010056, NT2NE2010105, NT2NE2010150, NT2NE2010400, NT2NE2010632, NT2NE2010633, NT2NE2010654, NT2NE2010688, NT2NE2010781, NT2NE2010854, NT2NE2011033, NT2NE2011036, NT2NE2011107, NT2NE2011154, NT2NE2011221, NT2NE2011411, NT2NE2011485, NT2NE2011650, NT2NE2011684, NT2NE2011687, NT2NE2011691, NT2NE2011758, NT2NE2011823, NT2NE2011896, NT2NE2011998, NT2NE2012113, NT2NE2012199, NT2NE2012243, NT2NE2012361, NT2NE2012448, NT2NE2012457, NT2NE2012493, NT2NE2012505, NT2NE2012533, NT2NE2012603, NT2NE2012747, NT2NE2012790, NT2NE2012847, NT2NE2013019, NT2NE2013081, NT2NE2013189, NT2NE2013217, NT2NE2013547, NT2NE2014013, NT2NE2014028, NT2NE2014113,

[2481] NT2NE2014176, NT2NE2014221, NT2NE2014525, NT2NE2014650, NT2NE2014651, NT2NE2014681, NT2NE2014758, NT2NE2014869, NT2NE2014950, NT2NE2015061, NT2NE2015262, NT2NE2015275, NT2NE2015362, NT2NE2015480, NT2NE2015511, NT2NE2015565, NT2NE2015626, NT2NE2015747, NT2NE2015860, NT2NE2015885, NT2NE2015904, NT2NE2015974, NT2NE2016041, NT2NE2016387, NT2NE2016419, NT2NE2016519, NT2NE2016608, NT2NE2016766, NT2NE2016774, NT2NE2016971, NT2NE2017259, NT2NE2017332, NT2NE2017397, NT2NE2017480, NT2NE2017492, NT2NE2017508, NT2NE2017562, NT2NE2017590, NT2NE2017612, NT2NE2017721, NT2NE2017752, NT2NE2017792, NT2NE2017982, NT2NE2018165, NT2NE2018176, NT2NE2018180, NT2NE2018273, NT2NE2018376, NT2NE2018472, NT2NE2018490,

[2482] NT2NE2018594, NT2NE2018739, NT2NE2018916, NT2NE2019056, NT2NE2019076, NT2NE2019091, NT2NE2019099, NT2RI1000016, NT2RI1000035, NT2RI1000048, NT2RI1000127, NT2RI1000164, NT2RI1000172, NT2RI2000004, NT2RI2000007, NT2RI2000116, NT2RI2000117, NT2RI2000128, NT2RI2000133, NT2RI2000167, NT2RI2000173, NT2RI2000187, NT2RI2000263, NT2RI2000270, NT2RI2000276, NT2RI2000284, NT2RI2000294, NT2RI2000313, NT2RI2000341, NT2RI2000344, NT2RI2000348, NT2RI2000412, NT2RI2000421, NT2RI2000480, NT2RI2000575, NT2RI2000578, NT2RI2000588, NT2RI2000597, NT2RI2000669, NT2RI2000688, NT2RI2000704, NT2RI2000738, NT2RI2000775, NT2RI2000829, NT2RI2000841, NT2RI2000865, NT2RI2000932, NT2RI2000987, NT2RI2001010, NT2RI2001017,

[2483] NT2RI2001030, NT2RI2001054, NT2RI2001083, NT2RI2001091, NT2RI2001167, NT2RI2001178, NT2RI2001235, NT2RI2001244, NT2RI2001307, NT2RI2001385, NT2RI2001409, NT2RI2001410, NT2RI2001422, NT2RI2001425, NT2RI2001449, NT2RI2001450, NT2RI2001474, NT2RI2001519, NT2RI2001621, NT2RI2001624, NT2RI2001726, NT2RI2001731, NT2RI2001769, NT2RI2001782, NT2RI2001836, NT2RI2001846, NT2RI2001866, NT2RI2001910, NT2RI2001952, NT2RI2002022, NT2RI2002041, NT2RI2002117, NT2RI2002120, NT2RI2002152, NT2RI2002153, NT2RI2002179, NT2RI2002243, NT2RI2002252, NT2RI2002260, NT2RI2002266, NT2RI2002270, NT2RI2002334, NT2RI2002447, NT2RI2002481, NT2RI2002507, NT2RI2002517, NT2RI2002540, NT2RI2002549, NT2RI2002564, NT2RI2002585,

[2484] NT2RI2002592, NT2RI2002602, NT2RI2002802, NT2RI2002822, NT2RI2002852, NT2RI2002923, NT2RI2002926, NT2RI2002970, NT2RI2003011, NT2RI2003067, NT2RI2003184, NT2RI2003205, NT2RI2003222, NT2RI2003301, NT2RI2003344, NT2RI2003360, NT2RI2003361, NT2RI2003383, NT2RI2003392, NT2RI2003399, NT2RI2003419, NT2RI2003481, NT2RI2003487, NT2RI2003655, NT2RI2003667, NT2RI2003678, NT2RI2003751, NT2RI2003884, NT2RI2003973, NT2RI2004059, NT2RI2004078, NT2RI2004079, NT2RI2004093, NT2RI2004136, NT2RI2004157, NT2RI2004188, NT2RI2004190, NT2RI2004209, NT2RI2004284, NT2RI2004290, NT2RI2004304, NT2RI2004312, NT2RI2004381, NT2RI2004410, NT2RI2004442, NT2RI2004468, NT2RI2004535, NT2RI2004606, NT2RI2004618, NT2RI2004783,

[2485] NT2RI2004818, NT2RI2004840, NT2RI2004884, NT2RI2004916, NT2RI2004962, NT2RI2004984, NT2RI2004985, NT2RI2005048, NT2RI2005069, NT2RI2005087, NT2RI2005096, NT2RI2005130, NT2RI2005150, NT2RI2005166, NT2RI2005239, NT2RI2005246, NT2RI2005315, NT2RI2005358, NT2RI2005368, NT2RI2005382, NT2RI2005473, NT2RI2005520, NT2RI2005564, NT2RI2005579, NT2RI2005621, NT2RI2005628, NT2RI2005647, NT2RI2005670, NT2RI2005710, NT2RI2005713, NT2RI2005772, NT2RI2005816, NT2RI2005818, NT2RI2005851, NT2RI2006071, NT2RI2006072, NT2RI2006081, NT2RI2006126, NT2RI2006127, NT2RI2006183, NT2RI2006257, NT2RI2006271, NT2RI2006294, NT2RI2006345, NT2RI2006403, NT2RI2006412, NT2RI2006445, NT2RI2006487, NT2RI2006506, NT2RI2006640,

[2486] NT2RI2006659, NT2RI2006662, NT2RI2006667, NT2RI2006679, NT2RI2006703, NT2RI2006716, NT2RI2006735, NT2RI2006762, NT2RI2006788, NT2RI2006838, NT2RI2006853, NT2RI2006943, NT2RI2006973, NT2RI2007046, NT2RI2007048, NT2RI2007084, NT2RI2007096, NT2RI2007116, NT2RI2007148, NT2RI2007214, NT2RI2007277, NT2RI2007303, NT2RI2007334, NT2RI2007386, NT2RI2007406, NT2RI2007439, NT2RI2007445, NT2RI2007468, NT2RI2007469, NT2RI2007507, NT2RI2007572, NT2RI2007593, NT2RI2007629, NT2RI2007723, NT2RI2007729, NT2RI2007751, NT2RI2007754, NT2RI2007827, NT2RI2007877, NT2RI2007884, NT2RI2007891, NT2RI2007956, NT2RI2007965, NT2RI2008007, NT2RI2008045, NT2RI2008050, NT2RI2008171, NT2RI2008188, NT2RI2008204, NT2RI2008233,

[2487] NT2RI2008455, NT2RI2008481, NT2RI2008502, NT2RI2008566, NT2RI2008598, NT2RI2008622, NT2RI2008656, NT2RI2008714, NT2RI2008724, NT2RI2008801, NT2RI2008808, NT2RI2008841, NT2RI2008942, NT2RI2008952, NT2RI2009005, NT2RI2009066, NT2RI2009083, NT2RI2009101, NT2RI2009103, NT2RI2009144, NT2RI2009151, NT2RI2009173, NT2RI2009194, NT2RI2009215, NT2RI2009233, NT2RI2009259, NT2RI2009289, NT2RI2009301, NT2RI2009402, NT2RI2009406, NT2RI2009517, NT2RI2009585, NT2RI2009595, NT2RI2009855, NT2RI2010283, NT2RI2010508, NT2RI2010795, NT2RI2011422, NT2RI2011450, NT2RI2011683, NT2RI2011803, NT2RI2012659, NT2RI2012726, NT2RI2013357, NT2RI2013373, NT2RI2014551, NT2RI2014683, NT2RI2014733, NT2RI2015239, NT2RI2016128,

[2488] NT2RI2016134, NT2RI2017529, NT2RI2018311, NT2RI2018363, NT2RI2018448, NT2RI2018883, NT2RI2018950, NT2RI2019751, NT2RI2019826, NT2RI2020390, NT2RI2020703, NT2RI2021463, NT2RI2021625, NT2RI2022468, NT2RI2022584, NT2RI2023303, NT2RI2023671, NT2RI2024008, NT2RI2024313, NT2RI2024460, NT2RI2024496, NT2RI2024935, NT2RI2025075, NT2RI2025255, NT2RI2025564, NT2RI2025565, NT2RI2025909, NT2RI2025957, NT2RI2025976, NT2RI2026758, NT2RI2027081, NT2RI2027157, NT2RI2027224, NT2RI2027323, NT2RI2027396, NT2RI2027484, NT2RI2027975, NT2RI2028213, NT2RI2028222, NT2RI2028537, NT2RI2028642, NT2RI3000174, NT2RI3000213, NT2RI3000423, NT2RI3000622, NT2RI3001132, NT2RI3001263, NT2RI3001279, NT2RI3001348, NT2RI3001445,

[2489] NT2RI3001458, NT2RI3001515, NT2RI3001573, NT2RI3001967, NT2RI3002303, NT2RI3002557, NT2RI3002842, NT2RI3003027, NT2RI3003031, NT2RI3003095, NT2RI3003104, NT2RI3003162, NT2RI3003362, NT2RI3003382, NT2RI3003409, NT2RI3003738, NT2RI3003925, NT2RI3004133, NT2RI3004381, NT2RI3004510, NT2RI3005202, NT2RI3005403, NT2RI3005416, NT2RI3005724, NT2RI3005861, NT2RI3005923, NT2RI3005928, NT2RI3006132, NT2RI3006171, NT2RI3006376, NT2RI3006673, NT2RI3006796, NT2RI3007065, NT2RI3007095, NT2RI3007158, NT2RI3007167, NT2RI3007213, NT2RI3007291, NT2RI3007443, NT2RI3007684, NT2RI3007757, NT2RI3007878, NT2RI3007978, NT2RI3008055, NT2RI3008162, NT2RI3008179, NT2RI3008228, NT2RI3008442, NT2RI3008652, NT2RI3008697,

[2490] NT2RI3008974, NT2RI3009158, NT2RI3009480, NT2RI3009524, NT2RP6000008, NT2RP6000017, NT2RP6000033, NT2RP6000043, NT2RP6000059, NT2RP6000060, NT2RP6000085, NT2RP6000086, NT2RP6000100, NT2RP6000109, NT2RP6000119, NT2RP6000127, NT2RP6000130, NT2RP6000140, NT2RP6000150, NT2RP7000041, NT2RP7000086, NT2RP7000109, NT2RP7000112, NT2RP7000238, NT2RP7000259, NT2RP7000311, NT2RP7000359, NT2RP7000364, NT2RP7000380, NT2RP7000391, NT2RP7000425, NT2RP7000579, NT2RP7000586, NT2RP7000624, NT2RP7000812, NT2RP7000906, NT2RP7000926, NT2RP7001074, NT2RP7001080, NT2RP7001156, NT2RP7001231, NT2RP7001306, NT2RP7001319, NT2RP7001335, NT2RP7001364, NT2RP7001475, NT2RP7001532, NT2RP7001591, NT2RP7001602, NT2RP7001678,

[2491] NT2RP7001856, NT2RP7002064, NT2RP7002151, NT2RP7002163, NT2RP7002243, NT2RP7002282, NT2RP7002376, NT2RP7002449, NT2RP7002450, NT2RP7002478, NT2RP7002554, NT2RP7002594, NT2RP7002603, NT2RP7002650, NT2RP7002738, NT2RP7002779, NT2RP7002802, NT2RP7002829, NT2RP7002841, NT2RP7002875, NT2RP7002906, NT2RP7002978, NT2RP7003025, NT2RP7003050, NT2RP7003055, NT2RP7003084, NT2RP7003091, NT2RP7003107, NT2RP7003134, NT2RP7003148, NT2RP7003439, NT2RP7003511, NT2RP7003632, NT2RP7003680, NT2RP7003960, NT2RP7004027, NT2RP7004080, NT2RP7004123, NT2RP7004204, NT2RP7004233, NT2RP7004260, NT2RP7004348, NT2RP7004352, NT2RP7004358, NT2RP7004396, NT2RP7004428, NT2RP7004481, NT2RP7004541, NT2RP7004559, NT2RP7004641,

[2492] NT2RP7004656, NT2RP7004687, NT2RP7004722, NT2RP7004766, NT2RP7004790, NT2RP7004884, NT2RP7004911, NT2RP7004915, NT2RP7004961, NT2RP7004964, NT2RP7004975, NT2RP7005118, NT2RP7005205, NT2RP7005219, NT2RP7005323, NT2RP7005468, NT2RP7005493, NT2RP7005529, NT2RP7005629, NT2RP7005631, NT2RP7005669, NT2RP7005846, NT2RP7006160, NT2RP7006162, NT2RP7006223, NT2RP7006263, NT2RP7006296, NT2RP7006304, NT2RP7006374, NT2RP7006395, NT2RP7006408, NT2RP7006457, NT2RP7006490, NT2RP7006539, NT2RP7006547, NT2RP7006601, NT2RP7006621, NT2RP7006636, NT2RP7006701, NT2RP7006717, NT2RP7006853, NT2RP7006886, NT2RP7006887, NT2RP7006986, NT2RP7006995, NT2RP7007114, NT2RP7007221, NT2RP7007226, NT2RP7007252, NT2RP7007269,

[2493] NT2RP7007310, NT2RP7007359, NT2RP7007381, NT2RP7007406, NT2RP7007480, NT2RP7007504, NT2RP7007530, NT2RP7007580, NT2RP7007594, NT2RP7007610, NT2RP7007617, NT2RP7007643, NT2RP7007766, NT2RP7007842, NT2RP7007925, NT2RP7007930, NT2RP7008013, NT2RP7008015, NT2RP7008133, NT2RP7008137, NT2RP7008142, NT2RP7008144, NT2RP7008315, NT2RP7008360, NT2RP7008406, NT2RP7008435, NT2RP7008441, NT2RP7008454, NT2RP7008487, NT2RP7008544, NT2RP7008550, NT2RP7008557, NT2RP7008623, NT2RP7008657, NT2RP7008714, NT2RP7008720, NT2RP7008855, NT2RP7008863, NT2RP7009012, NT2RP7009019, NT2RP7009030, NT2RP7009087, NT2RP7009108, NT2RP7009168, NT2RP7009215, NT2RP7009225, NT2RP7009236, NT2RP7009253, NT2RP7009267, NT2RP7009322,

[2494] NT2RP7009363, NT2RP7009370, NT2RP7009373, NT2RP7009397, NT2RP7009429, NT2RP7009439, NT2RP7009466, NT2RP7009481, NT2RP7009502, NT2RP7009507, NT2RP7009577, NT2RP7009743, NT2RP7009867, NT2RP7010109, NT2RP7010128, NT2RP7010235, NT2RP7010275, NT2RP7010521, NT2RP7010599, NT2RP7010612, NT2RP7010817, NT2RP7011086, NT2RP7011132, NT2RP7011268, NT2RP7011318, NT2RP7011452, NT2RP7011570, NT2RP7011721, NT2RP7011909, NT2RP7012291, NT2RP7012516, NT2RP7012776, NT2RP7013002, NT2RP7013374, NT2RP7013499, NT2RP7013573, NT2RP7013729, NT2RP7013764, NT2RP7013795, NT2RP7013999, NT2RP7014005, NT2RP7014178, NT2RP7014348, NT2RP7014420, NT2RP7014583, NT2RP7014721, NT2RP7014743, NT2RP7014778, NT2RP7014906, NT2RP7015080,

[2495] NT2RP7015431, NT2RP7015503, NT2RP7015676, NT2RP7015789, NT2RP7015996, NT2RP7016508, NT2RP7016574, NT2RP7016622, NT2RP7016911, NT2RP7017139, NT2RP7017284, NT2RP7017365, NT2RP7017474, NT2RP7017546, NT2RP7017567, NT2RP7017795, NT2RP7017971, NT2RP7018032, NT2RP7018126, NT2RP7018197, NT2RP7018206, NT2RP7018340, NT2RP7018586, NT2RP7018802, NT2RP7018871, NT2RP7019135, NT2RP7019273, NT2RP7019367, NT2RP7019401, NT2RP7019445, NT2RP7019543, NT2RP7019682, NT2RP7019835, NT2RP7020112, NT2RP7020123, NT2RP7020343, NT2RP7020379, NT2RP8000137, NT2RP8000296, NT2RP8000483, NT2RP8000521, NT2RP8000633, NT2RP8001363, NT2RP8001407, NT2RP8001584, NT2RP8001604, NT2RP8001605, NT2RP8003490, NT2RP8003657, NT2RP8003787,

[2496] NT2RP8004306, NT2RP8005546, NT2RP8006452, NT2RP8006521, NT2RP8007416, NT2RP8007503, NT2RP8007715, NT2RP8008057, NT2RP8009248, NTONG1000006, NTONG1000047, NTONG1000075, NTONG1000087, NTONG1000130, NTONG1000161, NTONG1000172, NTONG1000213, NTONG1000214, NTONG1000246, NTONG1000247, NTONG2000040, NTONG2000107, NTONG2000231, NTONG2000363, NTONG2000413, NTONG2000492, NTONG2000499, NTONG2000531, NTONG2000583, NTONG2000800, NTONG2000966, NTONG2001014, NTONG2001079, NTONG2001137, NTONG2001157, NTONG2001173, NTONG2001222, NTONG2001362, NTONG2001428, NTONG2001532, NTONG2001587, NTONG2001619, NTONG2001642, NTONG2001657, NTONG2001676, NTONG2001762, NTONG2002278, NTONG2002582, NTONG2002807, NTONG2002970,

[2497] NTONG2002985, NTONG2003158, NTONG2003210, NTONG2003316, NTONG2003409, NTONG2003515, NTONG2003805, NTONG2003839, NTONG2003897, NTONG2003928, NTONG2004095, NTONG2004308, NTONG2004521, NTONG2004690, NTONG2004806, NTONG2004829, NTONG2004918, NTONG2004991, NTONG2005062, NTONG2005086, NTONG2005137, NTONG2005153, NTONG2005265, NTONG2005277, NTONG2005363, NTONG2005373, NTONG2005480, NTONG2005577, NTONG2005657, NTONG2005822, NTONG2005897, NTONG2005969, NTONG2006099, NTONG2006187, NTONG2006301, NTONG2006324, NTONG2006354, NTONG2006440, NTONG2006501, NTONG2006646, NTONG2006709, NTONG2007020, NTONG2007028, NTONG2007249, NTONG2007517, NTONG2007522, NTONG2007693, NTONG2008088, NTONG2008093, NTONG2008143,

[2498] NTONG2008365, NTONG2008522, NTONG2008672, NTONG2008862, NTONG2008939, NTONG2009068, NTONG2009229, NTONG2009233, NTONG2009468, NTONG2009576, OCBBF1000016, OCBBF1000030, OCBBF1000042, OCBBF1000049, OCBBF1000054, OCBBF1000067, OCBBF1000080, OCBBF1000085, OCBBF1000086, OCBBF1000091, OCBBF1000104, OCBBF1000114, OCBBF1000118, OCBBF1000119, OCBBF1000122, OCBBF1000130, OCBBF1000138, OCBBF1000145, OCBBF1000153, OCBBF1000175, OCBBF1000185, OCBBF1000192, OCBBF1000254, OCBBF2000126, OCBBF2000178, OCBBF2000231, OCBBF2000277, OCBBF2000287, OCBBF2000323, OCBBF2000452, OCBBF2000467, OCBBF2000522, OCBBF2000677, OCBBF2000703, OCBBF2000712, OCBBF2000719, OCBBF2000831, OCBBF2000904, OCBBF2000982, OCBBF2000998,

[2499] OCBBF2001075, OCBBF2001101, OCBBF2001124, OCBBF2001140, OCBBF2001166, OCBBF2001176, OCBBF2001186, OCBBF2001196, OCBBF2001252, OCBBF2001323, OCBBF2001389, OCBBF2001402, OCBBF2001408, OCBBF2001416, OCBBF2001473, OCBBF2001494, OCBBF2001527, OCBBF2001528, OCBBF2001681, OCBBF2001706, OCBBF2001749, OCBBF2001794, OCBBF2001910, OCBBF2001931, OCBBF2001961, OCBBF2002015, OCBBF2002083, OCBBF2002124, OCBBF2002161, OCBBF2002290, OCBBF2002357, OCBBF2002376, OCBBF2002615, OCBBF2002656, OCBBF2002663, OCBBF2002805, OCBBF2002865, OCBBF2002920, OCBBF2002980, OCBBF2003028, OCBBF2003052, OCBBF2003091, OCBBF2003246, OCBBF2003327, OCBBF2003543, OCBBF2003593, OCBBF2003744, OCBBF2003819, OCBBF2003925, OCBBF2004038,

[2500] OCBBF2004104, OCBBF2004147, OCBBF2004168, OCBBF2004235, OCBBF2004259, OCBBF2004385, OCBBF2004418, OCBBF2004478, OCBBF2004482, OCBBF2004533, OCBBF2004567, OCBBF2004612, OCBBF2004647, OCBBF2004669, OCBBF2004757, OCBBF2004826, OCBBF2004866, OCBBF2004883, OCBBF2004889, OCBBF2004930, OCBBF2004984, OCBBF2005066, OCBBF2005077, OCBBF2005161, OCBBF2005343, OCBBF2005349, OCBBF2005373, OCBBF2005420, OCBBF2005428, OCBBF2005433, OCBBF2005476, OCBBF2005546, OCBBF2005843, OCBBF2005901, OCBBF2006030, OCBBF2006058, OCBBF2006113, OCBBF2006151, OCBBF2006154, OCBBF2006172, OCBBF2006214, OCBBF2006241, OCBBF2006313, OCBBF2006388, OCBBF2006438, OCBBF2006567, OCBBF2006624, OCBBF2006639, OCBBF2006660, OCBBF2006764,

[2501] OCBBF2006859, OCBBF2006972, OCBBF2006987, OCBBF2007028, OCBBF2007039, OCBBF2007051, OCBBF2007068, OCBBF2007114, OCBBF2007121, OCBBF2007184, OCBBF2007194, OCBBF2007196, OCBBF2007224, OCBBF2007238, OCBBF2007414, OCBBF2007415, OCBBF2007428, OCBBF2007478, OCBBF2007485, OCBBF2007520, OCBBF2007555, OCBBF2007610, OCBBF2007756, OCBBF2007762, OCBBF2007892, OCBBF2007931, OCBBF2007946, OCBBF2008005, OCBBF2008041, OCBBF2008116, OCBBF2008138, OCBBF2008144, OCBBF2008283, OCBBF2008330, OCBBF2008340, OCBBF2008366, OCBBF2008466, OCBBF2008483, OCBBF2008511, OCBBF2008520, OCBBF2008569, OCBBF2008586, OCBBF2008640, OCBBF2008691, OCBBF2008701, OCBBF2008724, OCBBF2008760, OCBBF2008768, OCBBF2008770, OCBBF2008775,

[2502] OCBBF2008790, OCBBF2008814, OCBBF2008822, OCBBF2009115, OCBBF2009242, OCBBF2009301, OCBBF2009352, OCBBF2009391, OCBBF2009424, OCBBF2009536, OCBBF2009571, OCBBF2009583, OCBBF2009788, OCBBF2009836, OCBBF2009920, OCBBF2009926, OCBBF2010040, OCBBF2010140, OCBBF2010281, OCBBF2010313, OCBBF2010404, OCBBF2010416, OCBBF2010420, OCBBF2010557, OCBBF2010604, OCBBF2010709, OCBBF2010792, OCBBF2010819, OCBBF2010830, OCBBF2010841, OCBBF2010843, OCBBF2010858, OCBBF2010863, OCBBF2010871, OCBBF2010931, OCBBF2010945, OCBBF2010978, OCBBF2010989, OCBBF2011021, OCBBF2011073, OCBBF2011137, OCBBF2011160, OCBBF2011177, OCBBF2011228, OCBBF2011232, OCBBF2011283, OCBBF2011311, OCBBF2011536, OCBBF2011625, OCBBF2011669,

[2503] OCBBF2011685, OCBBF2011706, OCBBF2011722, OCBBF2011759, OCBBF2011767, OCBBF2011855, OCBBF2011872, OCBBF2011897, OCBBF2011914, OCBBF2011960, OCBBF2011981, OCBBF2012001, OCBBF2012028, OCBBF2012039, OCBBF2012139, OCBBF2012191, OCBBF2012262, OCBBF2012320, OCBBF2012436, OCBBF2012525, OCBBF2012553, OCBBF2012678, OCBBF2012704, OCBBF2012755, OCBBF2012812, OCBBF2012881, OCBBF2012908, OCBBF2012936, OCBBF2012990, OCBBF2013011, OCBBF2013049, OCBBF2013091, OCBBF2013123, OCBBF2013127, OCBBF2013149, OCBBF2013208, OCBBF2013285, OCBBF2013319, OCBBF2013324, OCBBF2013366, OCBBF2013481, OCBBF2013507, OCBBF2013721, OCBBF2013789, OCBBF2013843, OCBBF2013883, OCBBF2013926, OCBBF2014052, OCBBF2014064, OCBBF2014089,

[2504] OCBBF2014292, OCBBF2014322, OCBBF2014386, OCBBF2014541, OCBBF2014707, OCBBF2014745, OCBBF2014828, OCBBF2014873, OCBBF2014880, OCBBF2014928, OCBBF2015031, OCBBF2015081, OCBBF2015115, OCBBF2015232, OCBBF2015233, OCBBF2015285, OCBBF2015334, OCBBF2015335, OCBBF2015506, OCBBF2015599, OCBBF2015645, OCBBF2015659, OCBBF2015751, OCBBF2015797, OCBBF2015931, OCBBF2015980, OCBBF2016038, OCBBF2016405, OCBBF2016467, OCBBF2016590, OCBBF2016591, OCBBF2016612, OCBBF2016689, OCBBF2016690, OCBBF2016729, OCBBF2016841, OCBBF2017069, OCBBF2017306, OCBBF2017325, OCBBF2017489, OCBBF2017516, OCBBF2017665, OCBBF2017815, OCBBF2017882, OCBBF2017893, OCBBF2017920, OCBBF2018014, OCBBF2018084, OCBBF2018167, OCBBF2018206,

[2505] OCBBF2018229, OCBBF2018234, OCBBF2018362, OCBBF2018380, OCBBF2018563, OCBBF2018581, OCBBF2018618, OCBBF2018663, OCBBF2018687, OCBBF2018707, OCBBF2018827, OCBBF2018828, OCBBF2018934, OCBBF2019108, OCBBF2019195, OCBBF2019327, OCBBF2019684, OCBBF2019761, OCBBF2019823, OCBBF2019950, OCBBF2020048, OCBBF2020318, OCBBF2020343, OCBBF2020453, OCBBF2020741, OCBBF2020801, OCBBF2020825, OCBBF2020838, OCBBF2021020, OCBBF2021214, OCBBF2021286, OCBBF2021323, OCBBF2021518, OCBBF2021788, OCBBF2021833, OCBBF2022351, OCBBF2022573, OCBBF2022574, OCBBF2023162, OCBBF2023598, OCBBF2023643, OCBBF2024463, OCBBF2024589, OCBBF2024719, OCBBF2024779, OCBBF2024781, OCBBF2025028, OCBBF2025115, OCBBF2025198, OCBBF2025451,

[2506] OCBBF2025458, OCBBF2025527, OCBBF2025631, OCBBF2025730, OCBBF2026025, OCBBF2026035, OCBBF2026144, OCBBF2026645, OCBBF2026649, OCBBF2026690, OCBBF2026981, OCBBF2027148, OCBBF2027197, OCBBF2027354, OCBBF2027423, OCBBF2027478, OCBBF2027481, OCBBF2027511, OCBBF2027661, OCBBF2027728, OCBBF2027782, OCBBF2027868, OCBBF2028055, OCBBF2028173, OCBBF2028421, OCBBF2029471, OCBBF2029901, OCBBF2030116, OCBBF2030329, OCBBF2030354, OCBBF2030517, OCBBF2030574, OCBBF2030708, OCBBF2030927, OCBBF2030963, OCBBF2031167, OCBBF2031198, OCBBF2031366, OCBBF2031561, OCBBF2032152, OCBBF2032274, OCBBF2032539, OCBBF2032590, OCBBF2032599, OCBBF2032611, OCBBF2032671, OCBBF2033295, OCBBF2033413, OCBBF2033869, OCBBF2033948,

[2507] OCBBF2034333, OCBBF2034529, OCBBF2034637, OCBBF2034906, OCBBF2035110, OCBBF2035214, OCBBF2035226, OCBBF2035390, OCBBF2035564, OCBBF2035658, OCBBF2035823, OCBBF2035885, OCBBF2035916, OCBBF2036019, OCBBF2036031, OCBBF2036225, OCBBF2036476, OCBBF2036743, OCBBF2036752, OCBBF2037068, OCBBF2037340, OCBBF2037398, OCBBF2037464, OCBBF2037547, OCBBF2037598, OCBBF2037638, OCBBF2038238, OCBBF2038285, OCBBF2038317, OCBBF3000097, OCBBF3000213, OCBBF3000296, OCBBF3000372, OCBBF3000380, OCBBF3000743, OCBBF3000830, OCBBF3001076, OCBBF3001202, OCBBF3001616, OCBBF3002553, OCBBF3002600, OCBBF3002654, OCBBF3003103, OCBBF3003209, OCBBF3003592, OCBBF3003745, OCBBF3003761, OCBBF3004264, OCBBF3004314, OCBBF3004972,

[2508] OCBBF3005330, OCBBF3005597, OCBBF3005843, OCBBF3006802, OCBBF3006986, OCBBF3007078, OCBBF3007704, OCBBF3008230, OCBBF3008392, OCBBF3008835, OCBBF3009192, OCBBF3009244, OCBBF3009279, SALGL1000024, SALGL1000028, SALGL1000065, SALGL1000107, SALGL1000171, SKMUS1000014, SKMUS1000030, SKMUS1000067, SKMUS1000102, SKMUS1000104, SKMUS1000110, SKMUS1000118, SKMUS1000124, SKMUS1000129, SKMUS1000176, SKMUS1000177, SKMUS2000020, SKMUS2000061, SKMUS2000074, SKMUS2000078, SKMUS2000117, SKMUS2000137, SKMUS2000198, SKMUS2000243, SKMUS2000271, SKMUS2000287, SKMUS2000317, SKMUS2000330, SKMUS2000339, SKMUS2000343, SKMUS2000365, SKMUS2000390, SKMUS2000416, SKMUS2000467, SKMUS2000468, SKMUS2000484, SKMUS2000690,

[2509] SKMUS2000701, SKMUS2000705, SKMUS2000710, SKMUS2000724, SKMUS2000726, SKMUS2000757, SKMUS2000774, SKMUS2000780, SKMUS2000821, SKMUS2000847, SKMUS2000863, SKMUS2000894, SKMUS2000898, SKMUS2000902, SKMUS2000933, SKMUS2000945, SKMUS2000954, SKMUS2000961, SKMUS2000973, SKMUS2000980, SKMUS2001014, SKMUS2001164, SKMUS2001199, SKMUS2001215, SKMUS2001247, SKMUS2001254, SKMUS2001271, SKMUS2001287, SKMUS2001323, SKMUS2001364, SKMUS2001398, SKMUS2001412, SKMUS2001492, SKMUS2001501, SKMUS2001528, SKMUS2001543, SKMUS2001580, SKMUS2001585, SKMUS2001608, SKMUS2001631, SKMUS2001662, SKMUS2001663, SKMUS2001671, SKMUS2001683, SKMUS2001703, SKMUS2001740, SKMUS2001742, SKMUS2001823, SKMUS2001850, SKMUS2002077,

[2510] SKMUS2002084, SKMUS2002153, SKMUS2002475, SKMUS2002602, SKMUS2002693, SKMUS2002821, SKMUS2002840, SKMUS2002920, SKMUS2003034, SKMUS2003074, SKMUS2003194, SKMUS2003744, SKMUS2004044, SKMUS2004047, SKMUS2004483, SKMUS2004897, SKMUS2004908, SKMUS2005428, SKMUS2006394, SKMUS2006481, SKMUS2007315, SKMUS2007359, SKMUS2007568, SKMUS2007740, SKMUS2007816, SKMUS2007915, SKMUS2008338, SKMUS2008407, SKMUS2008474, SKMUS2008585, SKMUS2008607, SKMUS2009190, SKMUS2009232, SKMUS2009479, SKMUS2009557, SKNMC1000110, SKNMC1000123, SKNMC1000124, SKNMC1000159, SKNMC1000229, SKNMC1000251, SKNMC1000264, SKNMC2000065, SKNMC2000224, SKNMC2000256, SKNMC2000305, SKNMC2000356, SKNMC2000374, SKNMC2000583, SKNMC2000593,

[2511] SKNMC2000612, SKNMC2000622, SKNMC2001113, SKNMC2001324, SKNMC2001503, SKNMC2001555, SKNMC2001596, SKNMC2001623, SKNMC2003639, SKNMC2003924, SKNMC2003987, SKNMC2004457, SKNMC2004643, SKNMC2004651, SKNMC2005772, SKNMC2006173, SKNMC2006327, SKNMC2006998, SKNMC2007134, SKNMC2007502, SKNMC2007504, SKNMC2007961, SKNMC2009450, SKNSH1000086, SKNSH1000174, SKNSH1000301, SKNSH1000308, SKNSH1000416, SKNSH2000051, SKNSH2000101, SKNSH2000151, SKNSH2000163, SKNSH2000250, SKNSH2000319, SKNSH2000482, SKNSH2000516, SKNSH2000550, SKNSH2000716, SKNSH2000819, SKNSH2000971, SKNSH2001222, SKNSH2001875, SKNSH2001931, SKNSH2002054, SKNSH2002325, SKNSH2002866, SKNSH2003064, SKNSH2003174, SKNSH2003422, SKNSH2003466,

[2512] SKNSH2003483, SKNSH2003633, SKNSH2004039, SKNSH2005061, SKNSH2005120, SKNSH2005194, SKNSH2005240, SKNSH2005792, SKNSH2005816, SKNSH2005981, SKNSH2006234, SKNSH2006304, SKNSH2006432, SKNSH2006822, SKNSH2007142, SKNSH2007149, SKNSH2007429, SKNSH2007739, SKNSH2008043, SKNSH2008969, SKNSH2009197, SKNSH2009357, SKNSH2009435, SKNSH2009991, SKNSH2010015, SMINT1000012, SMINT1000016, SMINT1000039, SMINT1000048, SMINT1000051, SMINT1000054, SMINT1000057, SMINT1000071, SMINT1000075, SMINT1000091, SMINT1000103, SMINT1000118, SMINT1000137, SMINT1000192, SMINT2000007, SMINT2000032, SMINT2000040, SMINT2000060, SMINT2000073, SMINT2000084, SMINT2000145, SMINT2000159, SMINT2000176, SMINT2000185, SMINT2000227,

[2513] SMINT2000229, SMINT2000232, SMINT2000239, SMINT2000267, SMINT2000400, SMINT2000454, SMINT2000518, SMINT2000529, SMINT2000530, SMINT2000537, SMINT2000538, SMINT2000541, SMINT2000558, SMINT2000562, SMINT2000568, SMINT2000609, SMINT2000629, SMINT2000659, SMINT2000694, SMINT2000747, SMINT2000811, SMINT2000824, SMINT2000984, SMINT2001114, SMINT2001158, SMINT2001183, SMINT2001199, SMINT2001222, SMINT2001348, SMINT2001397, SMINT2001458, SMINT2001461, SMINT2001535, SMINT2001559, SMINT2001609, SMINT2001615, SMINT2001683, SMINT2001731, SMINT2001812, SMINT2001950, SMINT2002126, SMINT2002159, SMINT2002202, SMINT2002210, SMINT2002224, SMINT2002281, SMINT2002311, SMINT2002314, SMINT2002328, SMINT2002414,

[2514] SMINT2002457, SMINT2002743, SMINT2002778, SMINT2002880, SMINT2002882, SMINT2002884, SMINT2002899, SMINT2002974, SMINT2003003, SMINT2003074, SMINT2003128, SMINT2003150, SMINT2003169, SMINT2003317, SMINT2003340, SMINT2003386, SMINT2003423, SMINT2003551, SMINT2003569, SMINT2003641, SMINT2003644, SMINT2003866, SMINT2003905, SMINT2004037, SMINT2004047, SMINT2004086, SMINT2004144, SMINT2004280, SMINT2004299, SMINT2004339, SMINT2004350, SMINT2004414, SMINT2004473, SMINT2004547, SMINT2004583, SMINT2004589, SMINT2004729, SMINT2004781, SMINT2004872, SMINT2004891, SMINT2004909, SMINT2004972, SMINT2004992, SMINT2005075, SMINT2005161, SMINT2005174, SMINT2005213, SMINT2005330, SMINT2005368, SMINT2005387,

[2515] SMINT2005402, SMINT2005405, SMINT2005621, SMINT2005623, SMINT2005624, SMINT2005688, SMINT2005800, SMINT2005956, SMINT2006078, SMINT2006205, SMINT2006331, SMINT2006596, SMINT2006641, SMINT2006648, SMINT2006708, SMINT2006716, SMINT2006801, SMINT2007062, SMINT2007101, SMINT2007140, SMINT2007187, SMINT2007219, SMINT2007294, SMINT2007365, SMINT2007391, SMINT2007508, SMINT2007526, SMINT2007579, SMINT2007647, SMINT2007729, SMINT2007790, SMINT2007792, SMINT2007796, SMINT2007867, SMINT2007932, SMINT2008042, SMINT2008054, SMINT2008133, SMINT2008277, SMINT2008329, SMINT2008455, SMINT2008491, SMINT2008531, SMINT2008545, SMINT2008558, SMINT2008625, SMINT2008672, SMINT2008690, SMINT2008715, SMINT2008720,

[2516] SMINT2008817, SMINT2008844, SMINT2008869, SMINT2009119, SMINT2009121, SMINT2009212, SMINT2009233, SMINT2009259, SMINT2009272, SMINT2009292, SMINT2009363, SMINT2009415, SMINT2009468, SMINT2009505, SMINT2009529, SMINT2009832, SMINT2009895, SMINT2009902, SMINT2009973, SMINT2010015, SMINT2010068, SMINT2010076, SMINT2010144, SMINT2010200, SMINT2010278, SMINT2010324, SMINT2010326, SMINT2010369, SMINT2010426, SMINT2010500, SMINT2010533, SMINT2010629, SMINT2010639, SMINT2010672, SMINT2010753, SMINT2010853, SMINT2010897, SMINT2010959, SMINT2010997, SMINT2011033, SMINT2011066, SMINT2011273, SMINT2011406, SMINT2011509, SMINT2011588, SMINT2011656, SMINT2011888, SMINT2011958, SMINT2012040, SMINT2012179,

[2517] SMINT2012195, SMINT2012285, SMINT2012291, SMINT2012501, SMINT2012734, SMINT2012793, SMINT2013031, SMINT2013032, SMINT2013129, SMINT2013181, SMINT2013228, SMINT2013613, SMINT2013626, SMINT2013695, SMINT2013833, SMINT2013890, SMINT2014166, SMINT2014282, SMINT2014443, SMINT2014489, SMINT2014721, SMINT2015006, SMINT2015294, SMINT2015306, SMINT2015326, SMINT2015353, SMINT2015454, SMINT2015518, SMINT2015745, SMINT2015787, SMINT2015810, SMINT2016122, SMINT2016146, SMINT2016286, SMINT2016313, SMINT2016396, SMINT2016412, SMINT2016440, SMINT2016477, SMINT2016544, SMINT2016857, SMINT2017134, SMINT2017319, SMINT2017324, SMINT2017410, SMINT2017431, SMINT2017432, SMINT2017436, SMINT2017599, SMINT2017659,

[2518] SMINT2017736, SMINT2017781, SMINT2017855, SMINT2017884, SMINT2017964, SMINT2017974, SMINT2018343, SMINT2018353, SMINT2018592, SMINT2019017, SMINT2019105, SMINT2019142, SMINT2019153, SMINT2019200, SPLEN1000041, SPLEN1000049, SPLEN1000056, SPLEN1000087, SPLEN1000089, SPLEN1000091, SPLEN1000106, SPLEN1000116, SPLEN1000134, SPLEN1000143, SPLEN1000144, SPLEN1000145, SPLEN1000156, SPLEN1000163, SPLEN1000165, SPLEN1000178, SPLEN2000020, SPLEN2000047, SPLEN2000064, SPLEN2000072, SPLEN2000098, SPLEN2000126, SPLEN2000134, SPLEN2000143, SPLEN2000189, SPLEN2000197, SPLEN2000205, SPLEN2000210, SPLEN2000242, SPLEN2000243, SPLEN2000247, SPLEN2000255, SPLEN2000258, SPLEN2000267, SPLEN2000270, SPLEN2000307,

[2519] SPLEN2000310, SPLEN2000341, SPLEN2000350, SPLEN2000357, SPLEN2000364, SPLEN2000402, SPLEN2000414, SPLEN2000420, SPLEN2000448, SPLEN2000450, SPLEN2000464, SPLEN2000496, SPLEN2000505, SPLEN2000515, SPLEN2000516, SPLEN2000537, SPLEN2000541, SPLEN2000607, SPLEN2000630, SPLEN2000695, SPLEN2000698, SPLEN2000839, SPLEN2000874, SPLEN2001135, SPLEN2001176, SPLEN2001227, SPLEN2001245, SPLEN2001278, SPLEN2001354, SPLEN2001367, SPLEN2001383, SPLEN2001476, SPLEN2001503, SPLEN2001510, SPLEN2001599, SPLEN2001626, SPLEN2001650, SPLEN2001689, SPLEN2001710, SPLEN2001761, SPLEN2001781, SPLEN2001881, SPLEN2001912, SPLEN2001945, SPLEN2002007, SPLEN2002053, SPLEN2002133, SPLEN2002147, SPLEN2002166, SPLEN2002175,

[2520] SPLEN2002223, SPLEN2002272, SPLEN2002314, SPLEN2002343, SPLEN2002354, SPLEN2002385, SPLEN2002419, SPLEN2002451, SPLEN2002462, SPLEN2002463, SPLEN2002662, SPLEN2002695, SPLEN2002707, SPLEN2002917, SPLEN2002931, SPLEN2002957, SPLEN2003160, SPLEN2003204, SPLEN2003219, SPLEN2003297, SPLEN2003396, SPLEN2003678, SPLEN2003878, SPLEN2003918, SPLEN2003924, SPLEN2004060, SPLEN2004078, SPLEN2004124, SPLEN2004148, SPLEN2004181, SPLEN2004220, SPLEN2004343, SPLEN2004346, SPLEN2004368, SPLEN2004555, SPLEN2004611, SPLEN2004662, SPLEN2004773, SPLEN2004844, SPLEN2004880, SPLEN2004984, SPLEN2005009, SPLEN2005227, SPLEN2005272, SPLEN2005342, SPLEN2005416, SPLEN2005450, SPLEN2005474, SPLEN2005560, SPLEN2005727,

[2521] SPLEN2005783, SPLEN2005790, SPLEN2005806, SPLEN2005818, SPLEN2005838, SPLEN2005869, SPLEN2005927, SPLEN2005939, SPLEN2006143, SPLEN2006268, SPLEN2006283, SPLEN2006325, SPLEN2006374, SPLEN2006389, SPLEN2006425, SPLEN2006671, SPLEN2006701, SPLEN2006785, SPLEN2006875, SPLEN2007182, SPLEN2007276, SPLEN2007314, SPLEN2007326, SPLEN2007350, SPLEN2007388, SPLEN2007498, SPLEN2007619, SPLEN2007653, SPLEN2007689, SPLEN2007695, SPLEN2007879, SPLEN2007926, SPLEN2007951, SPLEN2008007, SPLEN2008135, SPLEN2008164, SPLEN2008317, SPLEN2008496, SPLEN2008591, SPLEN2008786, SPLEN2009081, SPLEN2009088, SPLEN2009163, SPLEN2009315, SPLEN2009340, SPLEN2009512, SPLEN2009513, SPLEN2009541, SPLEN2009548, SPLEN2009555,

[2522] SPLEN2009581, SPLEN2009733, SPLEN2009803, SPLEN2009884, SPLEN2009918, SPLEN2009970, SPLEN2010004, SPLEN2010015, SPLEN2010112, SPLEN2010119, SPLEN2010146, SPLEN2010187, SPLEN2010350, SPLEN2010395, SPLEN2010415, SPLEN2010447, SPLEN2010469, SPLEN2010510, SPLEN2010530, SPLEN2010534, SPLEN2010588, SPLEN2010625, SPLEN2010800, SPLEN2010847, SPLEN2010862, SPLEN2010912, SPLEN2010978, SPLEN2010986, SPLEN2011018, SPLEN2011021, SPLEN2011025, SPLEN2011086, SPLEN2011139, SPLEN2011145, SPLEN2011248, SPLEN2011252, SPLEN2011422, SPLEN2011672, SPLEN2011678, SPLEN2011758, SPLEN2011805, SPLEN2011820, SPLEN2011830, SPLEN2011931, SPLEN2011981, SPLEN2012115, SPLEN2012175, SPLEN2012179, SPLEN2012185, SPLEN2012234,

[2523] SPLEN2012453, SPLEN2012524, SPLEN2012525, SPLEN2012571, SPLEN2012606, SPLEN2012611, SPLEN2012619, SPLEN2012624, SPLEN2012725, SPLEN2012743, SPLEN2012756, SPLEN2012846, SPLEN2012889, SPLEN2012961, SPLEN2013108, SPLEN2013195, SPLEN2013503, SPLEN2013644, SPLEN2013648, SPLEN2013670, SPLEN2013673, SPLEN2013690, SPLEN2013714, SPLEN2013753, SPLEN2013821, SPLEN2013857, SPLEN2013860, SPLEN2013910, SPLEN2013923, SPLEN2013936, SPLEN2014041, SPLEN2014063, SPLEN2014080, SPLEN2014119, SPLEN2014136, SPLEN2014199, SPLEN2014210, SPLEN2014293, SPLEN2014318, SPLEN2014381, SPLEN2014452, SPLEN2014454, SPLEN2014486, SPLEN2014543, SPLEN2014572, SPLEN2014645, SPLEN2014669, SPLEN2014711, SPLEN2014739, SPLEN2014860,

[2524] SPLEN2014865, SPLEN2014919, SPLEN2014920, SPLEN2014924, SPLEN2014937, SPLEN2014946, SPLEN2015031, SPLEN2015094, SPLEN2015121, SPLEN2015129, SPLEN2015158, SPLEN2615166, SPLEN2015216, SPLEN2015258, SPLEN2015261, SPLEN2015267, SPLEN2015276, SPLEN2015415, SPLEN2015433, SPLEN2015593, SPLEN2015674, SPLEN2015679, SPLEN2015707, SPLEN2015730, SPLEN2015746, SPLEN2015788, SPLEN2015815, SPLEN2015890, SPLEN2015891, SPLEN2015899, SPLEN2016045, SPLEN2016053, SPLEN2016069, SPLEN2016098, SPLEN2016135, SPLEN2016139, SPLEN2016241, SPLEN2016250, SPLEN2016304, SPLEN2016356, SPLEN2016421, SPLEN2016480, SPLEN2016531, SPLEN2016533, SPLEN2016541, SPLEN2016552, SPLEN2016602, SPLEN2016627, SPLEN2016678, SPLEN2016743,

[2525] SPLEN2016773, SPLEN2016781, SPLEN2016840, SPLEN2016863, SPLEN2016922, SPLEN2016932, SPLEN2016972, SPLEN2016973, SPLEN2017043, SPLEN2017104, SPLEN2017121, SPLEN2017147, SPLEN2017187, SPLEN2017189, SPLEN2017212, SPLEN2017318, SPLEN2017351, SPLEN2017426, SPLEN2017452, SPLEN2017538, SPLEN2017592, SPLEN2017613, SPLEN2017620, SPLEN2017643, SPLEN2017687, SPLEN2017740, SPLEN2017781, SPLEN2017999, SPLEN2018098, SPLEN2018112, SPLEN2018159, SPLEN2018180, SPLEN2018181, SPLEN2018280, SPLEN2018285, SPLEN2018299, SPLEN2018302, SPLEN2018364, SPLEN2018395, SPLEN2018643, SPLEN2018683, SPLEN2018732, SPLEN2018749, SPLEN2018933, SPLEN2019008, SPLEN2019043, SPLEN2019092, SPLEN2019102, SPLEN2019131, SPLEN2019169,

[2526] SPLEN2019257, SPLEN2019311, SPLEN2019323, SPLEN2019349, SPLEN2019375, SPLEN2019379, SPLEN2019405, SPLEN2019446, SPLEN2019471, SPLEN2019480, SPLEN2019505, SPLEN2019571, SPLEN2019575, SPLEN2019709, SPLEN2019774, SPLEN2019793, SPLEN2019811, SPLEN2019839, SPLEN2019956, SPLEN2019985, SPLEN2020007, SPLEN2020034, SPLEN2020153, SPLEN2020154, SPLEN2020166, SPLEN2020183, SPLEN2020223, SPLEN2020359, SPLEN2020417, SPLEN2020427, SPLEN2020467, SPLEN2020512, SPLEN2020608, SPLEN2020777, SPLEN2020805, SPLEN2021057, SPLEN2021122, SPLEN2021157, SPLEN2021194, SPLEN2021231, SPLEN2021273, SPLEN2021295, SPLEN2021298, SPLEN2021383, SPLEN2021417, SPLEN2021440, SPLEN2021458, SPLEN2021463, SPLEN2021560, SPLEN2021701,

[2527] SPLEN2021795, SPLEN2021983, SPLEN2021991, SPLEN2022040, SPLEN2022162, SPLEN2022227, SPLEN2022522, SPLEN2022591, SPLEN2022785, SPLEN2022920, SPLEN2023024, SPLEN2023118, SPLEN2023160, SPLEN2023423, SPLEN2023710, SPLEN2023733, SPLEN2023977, SPLEN2024070, SPLEN2024127, SPLEN2024232, SPLEN2024273, SPLEN2024383, SPLEN2024489, SPLEN2024530, SPLEN2024571, SPLEN2024577, SPLEN2024617, SPLEN2024737, SPLEN2024922, SPLEN2024956, SPLEN2024990, SPLEN2025012, SPLEN2025017, SPLEN2025039, SPLEN2025219, SPLEN2025491, SPLEN2025626, SPLEN2025820, SPLEN2026144, SPLEN2026411, SPLEN2026765, SPLEN2027157, SPLEN2027395, SPLEN2027488, SPLEN2027780, SPLEN2027852, SPLEN2027868, SPLEN2027995, SPLEN2028046, SPLEN2028066,

[2528] SPLEN2028138, SPLEN2028365, SPLEN2028417, SPLEN2028424, SPLEN2028593, SPLEN2028844, SPLEN2028994, SPLEN2029051, SPLEN2029176, SPLEN2029295, SPLEN2029380, SPLEN2029522, SPLEN2029683, SPLEN2029727, SPLEN2029904, SPLEN2030250, SPLEN2030335, SPLEN2030371, SPLEN2030397, SPLEN2030479, SPLEN2030495, SPLEN2030562, SPLEN2030763, SPLEN2030847, SPLEN2031004, SPLEN2031125, SPLEN2031547, SPLEN2031674, SPLEN2031724, SPLEN2031780, SPLEN2032036, SPLEN2032112, SPLEN2032154, SPLEN2032157, SPLEN2032321, SPLEN2032356, SPLEN2032677, SPLEN2032813, SPLEN2032924, SPLEN2033153, SPLEN2033333, SPLEN2033490, SPLEN2033539, SPLEN2033921, SPLEN2033996, SPLEN2034021, SPLEN2034081, SPLEN2034252, SPLEN2034448, SPLEN2034551,

[2529] SPLEN2034601, SPLEN2034678, SPLEN2034781, SPLEN2034864, SPLEN2034934, SPLEN2035318, SPLEN2035615, SPLEN2036076, SPLEN2036103, SPLEN2036326, SPLEN2036475, SPLEN2036501, SPLEN2036579, SPLEN2036608, SPLEN2036702, SPLEN2036712, SPLEN2036821, SPLEN2036953, SPLEN2037077, SPLEN2037194, SPLEN2037319, SPLEN2037444, SPLEN2037580, SPLEN2037630, SPLEN2037678, SPLEN2037891, SPLEN2038055, SPLEN2038180, SPLEN2038345, SPLEN2038407, SPLEN2038473, SPLEN2039311, SPLEN2039379, SPLEN2039672, SPLEN2039697, SPLEN2039845, SPLEN2039936, SPLEN2040222, SPLEN2040237, SPLEN2040824, SPLEN2041304, SPLEN2041306, SPLEN2041310, SPLEN2041585, SPLEN2041645, SPLEN2041700, SPLEN2041720, SPLEN2041977, SPLEN2042051, SPLEN2042303,

[2530] SPLEN2042521, SPLEN2042598, SPLEN2042714, STOMA1000013, STOMA1000047, STOMA1000052, STOMA1000074, STOMA1000091, STOMA1000117, STOMA1000133, STOMA1000175, STOMA1000186, STOMA1000190, STOMA1000191, STOMA2000032, STOMA2000072, STOMA2000088, STOMA2000104, STOMA2000148, STOMA2000168, STOMA2000183, STOMA2000188, STOMA2000279, STOMA2000289, STOMA2000383, STOMA2000386, STOMA2000395, STOMA2000396, STOMA2000478, STOMA2000529, STOMA2000539, STOMA2000567, STOMA2000640, STOMA2000678, STOMA2000686, STOMA2000888, STOMA2001025, STOMA2001389, STOMA2002052, STOMA2002141, STOMA2002367, STOMA2002688, STOMA2002828, STOMA2003158, STOMA2003289, STOMA2003444, STOMA2003477, STOMA2003646, STOMA2003716, STOMA2003781,

[2531] STOMA2003894, STOMA2004194, STOMA2004294, STOMA2004668, STOMA2004852, STOMA2004873, STOMA2004884, STOMA2004893, STOMA2004925, STOMA2005120, STOMA2005664, STOMA2005667, STOMA2005746, STOMA2005782, STOMA2006181, STOMA2006213, STOMA2006229, STOMA2006325, STOMA2006330, STOMA2006398, STOMA2006447, STOMA2006780, STOMA2006904, STOMA2007269, STOMA2007680, STOMA2007745, STOMA2008050, STOMA2008361, STOMA2008546, STOMA2008614, STOMA2008638, STOMA2008838, STOMA2009250, STOMA2009253, STOMA2009256, STOMA2009289, SYNOV1000045, SYNOV1000049, SYNOV1000190, SYNOV1000256, SYNOV1000374, SYNOV2000152, SYNOV2000171, SYNOV2000173, SYNOV2000177, SYNOV2000178, SYNOV2000193, SYNOV2000251, SYNOV2000279, SYNOV2000291,

[2532] SYNOV2000297, SYNOV2000397, SYNOV2000426, SYNOV2000601, SYNOV2000700, SYNOV2000820, SYNOV2000824, SYNOV2000923, SYNOV2001014, SYNOV2001035, SYNOV2001088, SYNOV2001111, SYNOV2001144, SYNOV2001212, SYNOV2001251, SYNOV2001300, SYNOV2001356, SYNOV2001390, SYNOV2001451, SYNOV2001457, SYNOV2001581, SYNOV2001648, SYNOV2001660, SYNOV2003326, SYNOV2005216, SYNOV2005448, SYNOV2005541, SYNOV2005673, SYNOV2005817, SYNOV2005962, SYNOV2006430, SYNOV2006620, SYNOV2007758, SYNOV2007965, SYNOV2008765, SYNOV2011233, SYNOV2012326, SYNOV2013365, SYNOV2013637, SYNOV2014157, SYNOV2014364, SYNOV2016124, SYNOV2016837, SYNOV2017055, SYNOV2017179, SYNOV2018921, SYNOV2019280, SYNOV2020085, SYNOV2020463, SYNOV2021320,

[2533] SYNOV2021953, SYNOV3000184, SYNOV3000231, SYNOV3000302, SYNOV3000345, SYNOV4000249, SYNOV4000472, SYNOV4000598, SYNOV4000706, SYNOV4001224, SYNOV4001326, SYNOV4001342, SYNOV4001395, SYNOV4002001, SYNOV4002392, SYNOV4002875, SYNOV4002883, SYNOV4003174, SYNOV4003322, SYNOV4003681, SYNOV4003981, SYNOV4004184, SYNOV4004741, SYNOV4004823, SYNOV4004914, SYNOV4005256, SYNOV4005570, SYNOV4005739, SYNOV4005889, SYNOV4005981, SYNOV4005989, SYNOV4006256, SYNOV4006327, SYNOV4006542, SYNOV4007012, SYNOV4007215, SYNOV4007360, SYNOV4007430, SYNOV4007521, SYNOV4007553, SYNOV4007711, SYNOV4008245, SYNOV4008336, SYNOV4009129, SYNOV4009139, SYNOV4009298, T1ESE2000116, T1ESE2000609, T1ESE2000904, TBAES2000004,

[2534] TBAES2000059, TBAES2000255, TBAES2000315, TBAES2000352, TBAES2000932, TBAES2001171, TBAES2001220, TBAES2001229, TBAES2001258, TBAES2001296, TBAES2001492, TBAES2001553, TBAES2001751, TBAES2003435, TBAES2003492, TBAES2003550, TBAES2003702, TBAES2003917, TBAES2004055, TBAES2004105, TBAES2004939, TBAES2005157, TBAES2005361, TBAES2005543, TBAES2006568, TBAES2006881, TBAES2007379, TBAES2007428, TBAES2007481, TBAES2007504, TBAES2007548, TBAES2007697, TBAES2007862, TBAES2007964, TBAES2008133, TCERX2000171, TCERX2000431, TCERX2000613, TCERX2000998, TCERX2002644, TCOLN1000037, TCOLN1000180, TCOLN2000139, TCOLN2000236, TCOLN2000641, TCOLN2001268, TCOLN2002047, TCOLN2002278, TESOP1000127, TESOP1000160,

[2535] TESOP2000083, TESOP2000090, TESOP2000205, TESOP2000312, TESOP2000390, TESOP2000400, TESOP2000510, TESOP2000527, TESOP2000569, TESOP2000739, TESOP2000801, TESOP2001122, TESOP2001166, TESOP2001345, TESOP2001474, TESOP2001796, TESOP2001818, TESOP2001849, TESOP2001865, TESOP2001901, TESOP2001953, TESOP2002005, TESOP2002110, TESOP2002150, TESOP2002451, TESOP2002489, TESOP2002539, TESOP2002545, TESOP2002804, TESOP2002950, TESOP2003273, TESOP2003308, TESOP2003553, TESOP2003753, TESOP2004110, TESOP2004114, TESOP2004173, TESOP2004214, TESOP2005199, TESOP2005285, TESOP2005485, TESOP2005498, TESOP2005579, TESOP2006041, TESOP2006060, TESOP2006068, TESOP2006110, TESOP2006398, TESOP2006670, TESOP2006704,

[2536] TESOP2006746, TESOP2006865, TESOP2006893, TESOP2007041, TESOP2007052, TESOP2007262, TESOP2007384, TESOP2007636, TESOP2007674, TESOP2007688, TESOP2007725, TESOP2007912, TESOP2007978, TESOP2008127, TESOP2008552, TESOP2008556, TESOP2008563, TESOP2009121, TESOP2009201, TESOP2009247, TESOP2009555, TESTI1000018, TESTI1000019, TESTI1000025, TESTI1000029, TESTI1000030, TESTI1000042, TESTI1000045, TESTI1000055, TESTI1000070, TESTI1000085, TESTI1000088, TESTI1000093, TESTI1000094, TESTI1000096, TESTI1000109, TESTI1000125, TESTI1000127, TESTI1000128, TESTI1000131, TESTI1000138, TESTI1000157, TESTI1000168, TESTI1000169, TESTI1000179, TESTI1000183, TESTI1000191, TESTI1000257, TESTI1000266, TESTI1000319,

[2537] TESTI1000330, TESTI1000348, TESTI1000390, TESTI1000391, TESTI1000459, TESTI1000491, TESTI1000545, TESTI2000018, TESTI2000044, TESTI2000100, TESTI2000117, TESTI2000120, TESTI2000147, TESTI2000154, TESTI2000177, TESTI2000179, TESTI2000207, TESTI2000208, TESTI2000221, TESTI2000238, TESTI2000253, TESTI2000272, TESTI2000278, TESTI2000356, TESTI2000358, TESTI2000372, TESTI2000427, TESTI2000431, TESTI2000443, TESTI2000452, TESTI2000462, TESTI2000489, TESTI2000520, TESTI2000571, TESTI2000591, TESTI2000598, TESTI2000600, TESTI2000616, TESTI2000627, TESTI2000644, TESTI2000671, TESTI2000683, TESTI2000689, TESTI2000695, TESTI2000699, TESTI2000707, TESTI2000745, TESTI2000756, TESTI2000762, TESTI2000808,

[2538] TESTI2000819, TESTI2000830, TESTI2000840, TESTI2000849, TESTI2000850, TESTI2000874, TESTI2000883, TESTI2000909, TESTI2000951, TESTI2000970, TESTI2000981, TESTI2001008, TESTI2001049, TESTI2001082, TESTI2001134, TESTI2001141, TESTI2001180, TESTI2001208, TESTI2001229, TESTI2001236, TESTI2001237, TESTI2001306, TESTI2001313, TESTI2001330, TESTI2001339, TESTI2001345, TESTI2001352, TESTI2001364, TESTI2001412, TESTI2001420, TESTI2001498, TESTI2001511, TESTI2001512, TESTI2001518, TESTI2001556, TESTI2001593, TESTI2001613, TESTI2001621, TESTI2001661, TESTI2001665, TESTI2001671, TESTI2001697, TESTI2001725, TESTI2001758, TESTI2001766, TESTI2001792, TESTI2001793, TESTI2001795, TESTI2001812, TESTI2001815,

[2539] TESTI2001823, TESTI2001826, TESTI2001827, TESTI2001852, TESTI2001862, TESTI2001869, TESTI2001879, TESTI2001894, TESTI2001898, TESTI2001915, TESTI2001950, TESTI2001959, TESTI2001968, TESTI2001985, TESTI2001991, TESTI2002002, TESTI2002012, TESTI2002036, TESTI2002048, TESTI2002057, TESTI2002081, TESTI2002090, TESTI2002105, TESTI2002149, TESTI2002216, TESTI2002223, TESTI2002245, TESTI2002251, TESTI2002256, TESTI2002264, TESTI2002282, TESTI2002293, TESTI2002294, TESTI2002326, TESTI2002351, TESTI2002361, TESTI2002369, TESTI2002406, TESTI2002415, TESTI2002423, TESTI2002453, TESTI2002461, TESTI2002465, TESTI2002467, TESTI2002498, TESTI2002516, TESTI2002544, TESTI2002578, TESTI2002580, TESTI2002618,

[2540] TESTI2002632, TESTI2002676, TESTI2002690, TESTI2002696, TESTI2002698, TESTI2002700, TESTI2002707, TESTI2002724, TESTI2002729, TESTI2002752, TESTI2002753, TESTI2002789, TESTI2002802, TESTI2002806, TESTI2002840, TESTI2002866, TESTI2002877, TESTI2002910, TESTI2002912, TESTI2002928, TESTI2002937, TESTI2002965, TESTI2002993, TESTI2003020, TESTI2003031, TESTI2003037, TESTI2003044, TESTI2003059, TESTI2003061, TESTI2003071, TESTI2003074, TESTI2003089, TESTI2003104, TESTI2003109, TESTI2003117, TESTI2003127, TESTI2003130, TESTI2003131, TESTI2003139, TESTI2003141, TESTI2003152, TESTI2003181, TESTI2003193, TESTI2003196, TESTI2003228, TESTI2003236, TESTI2003255, TESTI2003258, TESTI2003277, TESTI2003280,

[2541] TESTI2003299, TESTI2003311, TESTI2003321, TESTI2003325, TESTI2003327, TESTI2003330, TESTI2003347, TESTI2003354, TESTI2003356, TESTI2003372, TESTI2003376, TESTI2003418, TESTI2003419, TESTI2003432, TESTI2003454, TESTI2003475, TESTI2003476, TESTI2003498, TESTI2003512, TESTI2003541, TESTI2003545, TESTI2003551, TESTI2003574, TESTI2003579, TESTI2003580, TESTI2003589, TESTI2003596, TESTI2003598, TESTI2003615, TESTI2003625, TESTI2003638, TESTI2003649, TESTI2003692, TESTI2003718, TESTI2003727, TESTI2003756, TESTI2003768, TESTI2003781, TESTI2003787, TESTI2003824, TESTI2003827, TESTI2003894, TESTI2003911, TESTI2003914, TESTI2003940, TESTI2003962, TESTI2003998, TESTI2004000, TESTI2004073, TESTI2004080,

[2542] TESTI2004085, TESTI2004089, TESTI2004111, TESTI2004119, TESTI2004122, TESTI2004163, TESTI2004169, TESTI2004207, TESTI2004215, TESTI2004227, TESTI2004229, TESTI2004243, TESTI2004255, TESTI2004287, TESTI2004295, TESTI2004313, TESTI2004318, TESTI2004322, TESTI2004391, TESTI2004399, TESTI2004423, TESTI2004432, TESTI2004452, TESTI2004459, TESTI2004490, TESTI2004539, TESTI2004552, TESTI2004560, TESTI2004574, TESTI2004601, TESTI2004611, TESTI2004649, TESTI2004654, TESTI2004675, TESTI2004687, TESTI2004689, TESTI2004700, TESTI2004706, TESTI2004712, TESTI2004734, TESTI2004737, TESTI2004783, TESTI2004791, TESTI2004793, TESTI2004860, TESTI2004906, TESTI2004920, TESTI2004936, TESTI2004941, TESTI2004971,

[2543] TESTI2004982, TESTI2004993, TESTI2004994, TESTI2004999, TESTI2005017, TESTI2005025, TESTI2005040, TESTI2005060, TESTI2005072, TESTI2005085, TESTI2005112, TESTI2005120, TESTI2005153, TESTI2005155, TESTI2005173, TESTI2005267, TESTI2005268, TESTI2005280, TESTI2005307, TESTI2005326, TESTI2005363, TESTI2005376, TESTI2005378, TESTI2005380, TESTI2005391, TESTI2005395, TESTI2005396, TESTI2005415, TESTI2005470, TESTI2005492, TESTI2005568, TESTI2005584, TESTI2005588, TESTI2005590, TESTI2005603, TESTI2005609, TESTI2005610, TESTI2005630, TESTI2005672, TESTI2005683, TESTI2005690, TESTI2005692, TESTI2005703, TESTI2005720, TESTI2005731, TESTI2005739, TESTI2005742, TESTI2005743, TESTI2005759, TESTI2005767,

[2544] TESTI2005775, TESTI2005827, TESTI2005835, TESTI2005860, TESTI2005892, TESTI2005908, TESTI2005911, TESTI2005933, TESTI2005937, TESTI2005948, TESTI2005979, TESTI2005981, TESTI2005982, TESTI2005984, TESTI2005986, TESTI2005987, TESTI2006007, TESTI2006008, TESTI2006015, TESTI2006016, TESTI2006035, TESTI2006040, TESTI2006041, TESTI2006045, TESTI2006067, TESTI2006083, TESTI2006097, TESTI2006109, TESTI2006111, TESTI2006120, TESTI2006125, TESTI2006179, TESTI2006209, TESTI2006210, TESTI2006212, TESTI2006218, TESTI2006238, TESTI2006255, TESTI2006258, TESTI2006278, TESTI2006333, TESTI2006341, TESTI2006360, TESTI2006383, TESTI2006409, TESTI2006425, TESTI2006437, TESTI2006457, TESTI2006460, TESTI2006465,

[2545] TESTI2006483, TESTI2006499, TESTI2006523, TESTI2006543, TESTI2006565, TESTI2006572, TESTI2006615, TESTI2006617, TESTI2006624, TESTI2006643, TESTI2006648, TESTI2006659, TESTI2006660, TESTI2006665, TESTI2006667, TESTI2006677, TESTI2006720, TESTI2006735, TESTI2006744, TESTI2006774, TESTI2006853, TESTI2006866, TESTI2006872, TESTI2006877, TESTI2006879, TESTI2006894, TESTI2006940, TESTI2006955, TESTI2006978, TESTI2006979, TESTI2006990, TESTI2007040, TESTI2007074, TESTI2007078, TESTI2007113, TESTI2007152, TESTI2007163, TESTI2007183, TESTI2007211, TESTI2007220, TESTI2007234, TESTI2007311, TESTI2007320, TESTI2007346, TESTI2007358, TESTI2007402, TESTI2007405, TESTI2007422, TESTI2007452, TESTI2007464,

[2546] TESTI2007466, TESTI2007480, TESTI2007490, TESTI2007502, TESTI2007524, TESTI2007533, TESTI2007576, TESTI2007613, TESTI2007657, TESTI2007685, TESTI2007692, TESTI2007749, TESTI2007750, TESTI2007808, TESTI2007814, TESTI2007829, TESTI2007864, TESTI2007867, TESTI2007872, TESTI2007906, TESTI2007922, TESTI2007951, TESTI2007972, TESTI2007973, TESTI2008014, TESTI2008020, TESTI2008032, TESTI2008033, TESTI2008046, TESTI2008081, TESTI2008099, TESTI2008139, TESTI2008144, TESTI2008161, TESTI2008189, TESTI2008204, TESTI2008219, TESTI2008233, TESTI2008234, TESTI2008237, TESTI2008320, TESTI2008331, TESTI2008343, TESTI2008387, TESTI2008389, TESTI2008394, TESTI2008405, TESTI2008420, TESTI2008425, TESTI2008440,

[2547] TESTI2008567, TESTI2008595, TESTI2008636, TESTI2008657, TESTI2008684, TESTI2008699, TESTI2008715, TESTI2008762, TESTI2008774, TESTI2008786, TESTI2008822, TESTI2008835, TESTI2008840, TESTI2008847, TESTI2008884, TESTI2008901, TESTI2008929, TESTI2008946, TESTI2008960, TESTI2009018, TESTI2009091, TESTI2009097, TESTI2009136, TESTI2009185, TESTI2009190, TESTI2009217, TESTI2009239, TESTI2009325, TESTI2009388, TESTI2009390, TESTI2009400, TESTI2009402, TESTI2009412, TESTI2009423, TESTI2009447, TESTI2009462, TESTI2009477, TESTI2009497, TESTI2009502, TESTI2009511, TESTI2009544, TESTI2009545, TESTI2009551, TESTI2009585, TESTI2009588, TESTI2009683, TESTI2009727, TESTI2009739, TESTI2009812, TESTI2009835,

[2548] TESTI2009853, TESTI2009935, TESTI2009977, TESTI2009987, TESTI2010009, TESTI2010154, TESTI2010180, TESTI2010239, TESTI2010280, TESTI2010354, TESTI2010396, TESTI2010400, TESTI2010409, TESTI2010572, TESTI2010587, TESTI2010591, TESTI2010617, TESTI2010682, TESTI2010724, TESTI2010732, TESTI2010734, TESTI2010755, TESTI2010793, TESTI2010806, TESTI2010833, TESTI2010872, TESTI2011009, TESTI2011020, TESTI2011028, TESTI2011033, TESTI2011254, TESTI2011286, TESTI2011294, TESTI2011314, TESTI2011315, TESTI2011394, TESTI2011407, TESTI2011448, TESTI2011480, TESTI2011549, TESTI2011575, TESTI2011605, TESTI2011612, TESTI2011665, TESTI2011680, TESTI2011683, TESTI2011712, TESTI2011750, TESTI2011840, TESTI2011846,

[2549] TESTI2011915, TESTI2011928, TESTI2011971, TESTI2012019, TESTI2012050, TESTI2012090, TESTI2012095, TESTI2012104, TESTI2012152, TESTI2012171, TESTI2012207, TESTI2012231, TESTI2012244, TESTI2012308, TESTI2012356, TESTI2012387, TESTI2012394, TESTI2012444, TESTI2012511, TESTI2012528, TESTI2012544, TESTI2012550, TESTI2012571, TESTI2012592, TESTI2012617, TESTI2012628, TESTI2012812, TESTI2012834, TESTI2012835, TESTI2012861, TESTI2012900, TESTI2012915, TESTI2012922, TESTI2013001, TESTI2013012, TESTI2013053, TESTI2013144, TESTI2013163, TESTI2013169, TESTI2013212, TESTI2013257, TESTI2013264, TESTI2013268, TESTI2013295, TESTI2013322, TESTI2013381, TESTI2013382, TESTI2013401, TESTI2013427, TESTI2013468,

[2550] TESTI2013497, TESTI2013545, TESTI2013546, TESTI2013566, TESTI2013601, TESTI2013604, TESTI2013607, TESTI2013610, TESTI2013691, TESTI2013699, TESTI2013737, TESTI2013767, TESTI2013832, TESTI2013873, TESTI2013889, TESTI2014007, TESTI2014036, TESTI2014097, TESTI2014160, TESTI2014248, TESTI2014254, TESTI2014269, TESTI2014274, TESTI2014318, TESTI2014324, TESTI2014339, TESTI2014362, TESTI2014385, TESTI2014415, TESTI2014439, TESTI2014474, TESTI2014505, TESTI2014577, TESTI2014578, TESTI2014716, TESTI2014780, TESTI2014800, TESTI2014838, TESTI2014843, TESTI2014979, TESTI2014988, TESTI2015042, TESTI2015105, TESTI2015180, TESTI2015246, TESTI2015249, TESTI2015327, TESTI2015331, TESTI2015335, TESTI2015350,

[2551] TESTI2015375, TESTI2015437, TESTI2015590, TESTI2015610, TESTI2015647, TESTI2015675, TESTI2015710, TESTI2015752, TESTI2015830, TESTI2015914, TESTI2015938, TESTI2015947, TESTI2015962, TESTI2015987, TESTI2016033, TESTI2016046, TESTI2016162, TESTI2016197, TESTI2016278, TESTI2016298, TESTI2016331, TESTI2016337, TESTI2016410, TESTI2016421, TESTI2016509, TESTI2016568, TESTI2016583, TESTI2016599, TESTI2016629, TESTI2016663, TESTI2016667, TESTI2016688, TESTI2016701, TESTI2016758, TESTI2016848, TESTI2016863, TESTI2016888, TESTI2016896, TESTI2016922, TESTI2016942, TESTI2016950, TESTI2016996, TESTI2017017, TESTI2017028, TESTI2017035, TESTI2017069, TESTI2017089, TESTI2017102, TESTI2017107, TESTI2017113,

[2552] TESTI2017125, TESTI2017256, TESTI2017305, TESTI2017311, TESTI2017396, TESTI2017507, TESTI2017537, TESTI2017582, TESTI2017584, TESTI2017645, TESTI2017727, TESTI2017740, TESTI2017775, TESTI2017816, TESTI2017832, TESTI2017923, TESTI2017932, TESTI2017951, TESTI2018014, TESTI2018031, TESTI2018035, TESTI2018060, TESTI2018083, TESTI2018178, TESTI2018221, TESTI2018276, TESTI2018290, TESTI2018335, TESTI2018337, TESTI2018368, TESTI2018421, TESTI2018428, TESTI2018475, TESTI2018482, TESTI2018521, TESTI2018565, TESTI2018581, TESTI2018611, TESTI2018687, TESTI2018697, TESTI2018838, TESTI2018867, TESTI2018941, TESTI2018957, TESTI2018974, TESTI2018975, TESTI2018997, TESTI2019042, TESTI2019077, TESTI2019228,

[2553] TESTI2019257, TESTI2019280, TESTI2019282, TESTI2019308, TESTI2019336, TESTI2019352, TESTI2019406, TESTI2019430, TESTI2019455, TESTI2019481, TESTI2019488, TESTI2019501, TESTI2019648, TESTI2019669, TESTI2019697, TESTI2019729, TESTI2019760, TESTI2019787, TESTI2019794, TESTI2019854, TESTI2019859, TESTI2019860, TESTI2019872, TESTI2019911, TESTI2019917, TESTI2019975, TESTI2019998, TESTI2020012, TESTI2020026, TESTI2020029, TESTI2020071, TESTI2020084, TESTI2020265, TESTI2020283, TESTI2020316, TESTI2020344, TESTI2020379, TESTI2020426, TESTI2020445, TESTI2020515, TESTI2020525, TESTI2020579, TESTI2020717, TESTI2020840, TESTI2020871, TESTI2020905, TESTI2020906, TESTI2020956, TESTI2020981, TESTI2020999,

[2554] TESTI2021003, TESTI2021038, TESTI2021057, TESTI2021077, TESTI2021112, TESTI2021114, TESTI2021116, TESTI2021118, TESTI2021122, TESTI2021124, TESTI2021138, TESTI2021358, TESTI2021447, TESTI2021463, TESTI2021531, TESTI2021599, TESTI2021637, TESTI2021654, TESTI2021667, TESTI2021736, TESTI2021785, TESTI2021819, TESTI2021851, TESTI2021895, TESTI2021911, TESTI2021939, TESTI2021999, TESTI2022010, TESTI2022023, TESTI2022065, TESTI2022086, TESTI2022179, TESTI2022203, TESTI2022246, TESTI2022323, TESTI2022338, TESTI2022400, TESTI2022462, TESTI2022495, TESTI2022623, TESTI2022649, TESTI2022652, TESTI2022738, TESTI2022798, TESTI2022812, TESTI2022814, TESTI2022874, TESTI2022940, TESTI2022952, TESTI2023025,

[2555] TESTI2023053, TESTI2023085, TESTI2023192, TESTI2023194, TESTI2023214, TESTI2023254, TESTI2023386, TESTI2023414, TESTI2023427, TESTI2023436, TESTI2023599, TESTI2023752, TESTI2023800, TESTI2023861, TESTI2023903, TESTI2023942, TESTI2023947, TESTI2023951, TESTI2023968, TESTI2024009, TESTI2024125, TESTI2024153, TESTI2024192, TESTI2024267, TESTI2024283, TESTI2024299, TESTI2024419, TESTI2024422, TESTI2024443, TESTI2024446, TESTI2024473, TESTI2024476, TESTI2024498, TESTI2024560, TESTI2024567, TESTI2024586, TESTI2024598, TESTI2024641, TESTI2024648, TESTI2024718, TESTI2024744, TESTI2024864, TESTI2024885, TESTI2024936, TESTI2024978, TESTI2024999, TESTI2025006, TESTI2025013, TESTI2025022, TESTI2025063,

[2556] TESTI2025117, TESTI2025144, TESTI2025161, TESTI2025174, TESTI2025229, TESTI2025269, TESTI2025365, TESTI2025403, TESTI2025409, TESTI2025422, TESTI2025448, TESTI2025454, TESTI2025486, TESTI2025582, TESTI2025609, TESTI2025656, TESTI2025757, TESTI2025791, TESTI2025846, TESTI2025872, TESTI2025879, TESTI2025911, TESTI2025920, TESTI2025924, TESTI2026014, TESTI2026064, TESTI2026077, TESTI2026104, TESTI2026116, TESTI2026134, TESTI2026168, TESTI2026196, TESTI2026215, TESTI2026218, TESTI2026233, TESTI2026291, TESTI2026294, TESTI2026401, TESTI2026403, TESTI2026453, TESTI2026461, TESTI2026491, TESTI2026505, TESTI2026515, TESTI2026525, TESTI2026534, TESTI2026537, TESTI2026589, TESTI2026597, TESTI2026605,

[2557] TESTI2026647, TESTI2026674, TESTI2026794, TESTI2026824, TESTI2026854, TESTI2026925, TESTI2026936, TESTI2026957, TESTI2027013, TESTI2027019, TESTI2027108, TESTI2027165, TESTI2027171, TESTI2027173, TESTI2027179, TESTI2027185, TESTI2027206, TESTI2027238, TESTI2027239, TESTI2027243, TESTI2027271, TESTI2027296, TESTI2027378, TESTI2027411, TESTI2027450, TESTI2027496, TESTI2027503, TESTI2027562, TESTI2027615, TESTI2027645, TESTI2027730, TESTI2027736, TESTI2027791, TESTI2027820, TESTI2027828, TESTI2027840, TESTI2027909, TESTI2028098, TESTI2028151, TESTI2028242, TESTI2028253, TESTI2028254, TESTI2028269, TESTI2028290, TESTI2028296, TESTI2028384, TESTI2028426, TESTI2028488, TESTI2028523, TESTI2028583,

[2558] TESTI2028613, TESTI2028659, TESTI2028662, TESTI2028670, TESTI2028705, TESTI2028776, TESTI2028811, TESTI2028891, TESTI2028985, TESTI2028997, TESTI2029131, TESTI2029162, TESTI2029196, TESTI2029201, TESTI2029227, TESTI2029244, TESTI2029249, TESTI2029252, TESTI2029259, TESTI2029264, TESTI2029470, TESTI2029672, TESTI2029785, TESTI2029880, TESTI2030136, TESTI2030322, TESTI2030336, TESTI2030342, TESTI2030519, TESTI2030554, TESTI2030556, TESTI2030728, TESTI2030754, TESTI2030770, TESTI2030860, TESTI2030901, TESTI2030917, TESTI2030930, TESTI2031006, TESTI2031007, TESTI2031060, TESTI2031129, TESTI2031356, TESTI2031418, TESTI2031504, TESTI2031529, TESTI2031687, TESTI2031760, TESTI2031809, TESTI2031919,

[2559] TESTI2031935, TESTI2031986, TESTI2032044, TESTI2032067, TESTI2032079, TESTI2032681, TESTI2032761, TESTI2032768, TESTI2032774, TESTI2032828, TESTI2033031, TESTI2033242, TESTI2033254, TESTI2033300, TESTI2033395, TESTI2033453, TESTI2033505, TESTI2033520, TESTI2033641, TESTI2033710, TESTI2033905, TESTI2034187, TESTI2034243, TESTI2034307, TESTI2034357, TESTI2034401, TESTI2034407, TESTI2034506, TESTI2034520, TESTI2034718, TESTI2034730, TESTI2034749, TESTI2034767, TESTI2034774, TESTI2034777, TESTI2034785, TESTI2034799, TESTI2034847, TESTI2034913, TESTI2034916, TESTI2034931, TESTI2034953, TESTI2034997, TESTI2035003, TESTI2035078, TESTI2035084, TESTI2035107, TESTI2035121, TESTI2035124, TESTI2035183,

[2560] TESTI2035236, TESTI2035262, TESTI2035309, TESTI2035688, TESTI2035775, TESTI2035793, TESTI2035898, TESTI2035962, TESTI2035981, TESTI2035997, TESTI2036114, TESTI2036129, TESTI2036285, TESTI2036288, TESTI2036513, TESTI2036589, TESTI2036650, TESTI2036684, TESTI2036691, TESTI2036736, TESTI2036822, TESTI2036833, TESTI2036913, TESTI2036922, TESTI2036951, TESTI2036965, TESTI2036969, TESTI2037002, TESTI2037055, TESTI2037081, TESTI2037085, TESTI2037103, TESTI2037106, TESTI2037111, TESTI2037209, TESTI2037255, TESTI2037359, TESTI2037375, TESTI2037382, TESTI2037534, TESTI2037569, TESTI2037572, TESTI2037643, TESTI2037657, TESTI2037673, TESTI2037723, TESTI2037819, TESTI2037830, TESTI2037845, TESTI2037877,

[2561] TESTI2037976, TESTI2038048, TESTI2038065, TESTI2038104, TESTI2038275, TESTI2038388, TESTI2038573, TESTI2038596, TESTI2038623, TESTI2038644, TESTI2038733, TESTI2038858, TESTI2038958, TESTI2039025, TESTI2039026, TESTI2039038, TESTI2039041, TESTI2039060, TESTI2039113, TESTI2039121, TESTI2039177, TESTI2039209, TESTI2039225, TESTI2039227, TESTI2039276, TESTI2039342, TESTI2039353, TESTI2039544, TESTI2039613, TESTI2039707, TESTI2039732, TESTI2039738, TESTI2039776, TESTI2039867, TESTI2039908, TESTI2040018, TESTI2040094, TESTI2040102, TESTI2040128, TESTI2040143, TESTI2040297, TESTI2040372, TESTI2040377, TESTI2040424, TESTI2040642, TESTI2040815, TESTI2040897, TESTI2040944, TESTI2040964, TESTI2040983,

[2562] TESTI2040989, TESTI2041330, TESTI2041362, TESTI2041517, TESTI2041564, TESTI2041664, TESTI2041730, TESTI2041734, TESTI2041778, TESTI2041800, TESTI2041947, TESTI2041956, TESTI2041976, TESTI2042062, TESTI2042149, TESTI2042264, TESTI2042295, TESTI2042302, TESTI2042326, TESTI2042400, TESTI2042450, TESTI2042473, TESTI2042507, TESTI2042508, TESTI2042750, TESTI2042783, TESTI2042806, TESTI2042928, TESTI2042946, TESTI2042958, TESTI2043275, TESTI2043277, TESTI2043282, TESTI2043313, TESTI2043477, TESTI2043585, TESTI2043758, TESTI2043817, TESTI2043857, TESTI2043866, TESTI2043869, TESTI2044064, TESTI2044118, TESTI2044194, TESTI2044306, TESTI2044309, TESTI2044413, TESTI2044418, TESTI2044754, TESTI2044788,

[2563] TESTI2044796, TESTI2044833, TESTI2044892, TESTI2044920, TESTI2044968, TESTI2045139, TESTI2045155, TESTI2045171, TESTI2045199, TESTI2045353, TESTI2045509, TESTI2045562, TESTI2045611, TESTI2045819, TESTI2045850, TESTI2045920, TESTI2045964, TESTI2045983, TESTI2046100, TESTI2046188, TESTI2046347, TESTI2046352, TESTI2046358, TESTI2046439, TESTI2046535, TESTI2046536, TESTI2046552, TESTI2046569, TESTI2046686, TESTI2046732, TESTI2046786, TESTI2046797, TESTI2046863, TESTI2046872, TESTI2047071, TESTI2047141, TESTI2047147, TESTI2047153, TESTI2047212, TESTI2047342, TESTI2047383, TESTI2047605, TESTI2047792, TESTI2047801, TESTI2047818, TESTI2047824, TESTI2047885, TESTI2047930, TESTI2048105, TESTI2048109,

[2564] TESTI2048465, TESTI2048603, TESTI2048898, TESTI2049041, TESTI2049062, TESTI2049206, TESTI2049246, TESTI2049277, TESTI2049422, TESTI2049452, TESTI2049469, TESTI2049553, TESTI2049576, TESTI2049857, TESTI2049956, TESTI2050137, TESTI2050681, TESTI2050780, TESTI2050987, TESTI2051148, TESTI2051177, TESTI2051279, TESTI2051488, TESTI2051543, TESTI2051627, TESTI2051742, TESTI2051767, TESTI2051791, TESTI2051806, TESTI2051867, TESTI2051873, TESTI2052110, TESTI2052202, TESTI2052211, TESTI2052256, TESTI2052288, TESTI2052525, TESTI2052670, TESTI2052693, TESTI2052698, TESTI2052799, TESTI2052822, TESTI2052985, TESTI2053151, TESTI2053242, TESTI2053399, TESTI2053526, TESTI2053561, TESTI2053621, TESTI2053667,

[2565] TESTI3000002, TESTI3000005, TESTI4000068, TESTI4000079, TESTI4000093, TESTI4000134, TESTI4000137, TESTI4000153, TESTI4000155, TESTI4000157, TESTI4000183, TESTI4000214, TESTI4000215, TESTI4000228, TESTI4000250, TESTI4000288, TESTI4000319, TESTI4000349, TESTI4000370, TESTI4000394, TESTI4000434, TESTI4000462, TESTI4000530, TESTI4000534, TESTI4000598, TESTI4000600, TESTI4000621, TESTI4000703, TESTI4000724, TESTI4000957, TESTI4000970, TESTI4001036, TESTI4001037, TESTI4001060, TESTI4001106, TESTI4001148, TESTI4001176, TESTI4001195, TESTI4001201, TESTI4001206, TESTI4001348, TESTI4001441, TESTI4001473, TESTI4001517, TESTI4001527, TESTI4001561, TESTI4001569, TESTI4001604, TESTI4001665, TESTI4001679,

[2566] TESTI4001795, TESTI4001923, TESTI4001925, TESTI4001984, TESTI4002003, TESTI4002141, TESTI4002195, TESTI4002290, TESTI4002319, TESTI4002491, TESTI4002520, TESTI4002552, TESTI4002647, TESTI4002703, TESTI4002754, TESTI4002868, TESTI4002878, TESTI4002889, TESTI4002988, TESTI4003150, TESTI4003179, TESTI4003279, TESTI4003319, TESTI4003404, TESTI4003565, TESTI4003574, TESTI4003579, TESTI4003602, TESTI4003703, TESTI4003733, TESTI4003796, TESTI4003944, TESTI4004003, TESTI4004031, TESTI4004200, TESTI4004210, TESTI4004539, TESTI4004626, TESTI4004653, TESTI4004695, TESTI4004722, TESTI4004887, TESTI4004917, TESTI4005015, TESTI4005039, TESTI4005133, TESTI4005158, TESTI4005317, TESTI4005322, TESTI4005399,

[2567] TESTI4005470, TESTI4005500, TESTI4005534, TESTI4005543, TESTI4005628, TESTI4005801, TESTI4005805, TESTI4005857, TESTI4005961, TESTI4006053, TESTI4006079, TESTI4006112, TESTI4006137, TESTI4006148, TESTI4006219, TESTI4006234, TESTI4006308, TESTI4006326, TESTI4006393, TESTI4006407, TESTI4006412, TESTI4006420, TESTI4006441, TESTI4006473, TESTI4006539, TESTI4006546, TESTI4006567, TESTI4006704, TESTI4006728, TESTI4006802, TESTI4006819, TESTI4007064, TESTI4007163, TESTI4007176, TESTI4007203, TESTI4007239, TESTI4007369, TESTI4007373, TESTI4007382, TESTI4007404, TESTI4007489, TESTI4007565, TESTI4007671, TESTI4007775, TESTI4007778, TESTI4007799, TESTI4007810, TESTI4007816, TESTI4007965, TESTI4008007,

[2568] TESTI4008018, TESTI4008050, TESTI4008058, TESTI4008086, TESTI4008097, TESTI4008176, TESTI4008209, TESTI4008219, TESTI4008250, TESTI4008302, TESTI4008305, TESTI4008401, TESTI4008417, TESTI4008429, TESTI4008573, TESTI4008797, TESTI4008816, TESTI4008840, TESTI4008935, TESTI4008993, TESTI4009022, TESTI4009028, TESTI4009034, TESTI4009123, TESTI4009160, TESTI4009215, TESTI4009283, TESTI4009306, TESTI4009374, TESTI4009406, TESTI4009454, TESTI4009457, TESTI4009501, TESTI4009563, TESTI4009608, TESTI4009638, TESTI4009752, TESTI4009881, TESTI4009886, TESTI4009928, TESTI4010076, TESTI4010082, TESTI4010095, TESTI4010211, TESTI4010377, TESTI4010475, TESTI4010544, TESTI4010713, TESTI4010721, TESTI4010789,

[2569] TESTI4010817, TESTI4010831, TESTI4010902, TESTI4010928, TESTI4010979, TESTI4011070, TESTI4011072, TESTI4011084, TESTI4011118, TESTI4011246, TESTI4011484, TESTI4011505, TESTI4011532, TESTI4011616, TESTI4011744, TESTI4011745, TESTI4011829, TESTI4011926, TESTI4011956, TESTI4012010, TESTI4012086, TESTI4012258, TESTI4012293, TESTI4012329, TESTI4012382, TESTI4012406, TESTI4012448, TESTI4012451, TESTI4012505, TESTI4012556, TESTI4012623, TESTI4012646, TESTI4012679, TESTI4012911, TESTI4012956, TESTI4012960, TESTI4013365, TESTI4013369, TESTI4013410, TESTI4013602, TESTI4013667, TESTI4013675, TESTI4013685, TESTI4013735, TESTI4013742, TESTI4013774, TESTI4013817, TESTI4013830, TESTI4013852, TESTI4013894,

[2570] TESTI4013924, TESTI4013960, TESTI4013962, TESTI4014159, TESTI4014175, TESTI4014265, TESTI4014276, TESTI4014306, TESTI4014392, TESTI4014415, TESTI4014445, TESTI4014553, TESTI4014661, TESTI4014694, TESTI4014801, TESTI4014818, TESTI4014891, TESTI4014908, TESTI4014924, TESTI4014932, TESTI4014977, TESTI4015012, TESTI4015129, TESTI4015145, TESTI4015204, TESTI4015263, TESTI4015293, TESTI4015299, TESTI4015339, TESTI4015398, TESTI4015442, TESTI4015471, TESTI4015477, TESTI4015600, TESTI4015646, TESTI4015681, TESTI4015688, TESTI4015790, TESTI4016110, TESTI4016238, TESTI4016551, TESTI4016812, TESTI4016822, TESTI4016865, TESTI4016882, TESTI4016925, TESTI4017001, TESTI4017116, TESTI4017137, TESTI4017229,

[2571] TESTI4017254, TESTI4017269, TESTI4017380, TESTI4017382, TESTI4017543, TESTI4017575, TESTI4017647, TESTI4017714, TESTI4017763, TESTI4017848, TESTI4017854, TESTI4017901, TESTI4017961, TESTI4017984, TESTI4018101, TESTI4018152, TESTI4018208, TESTI4018382, TESTI4018506, TESTI4018555, TESTI4018751, TESTI4018806, TESTI4018835, TESTI4018859, TESTI4018881, TESTI4018886, TESTI4018938, TESTI4019140, TESTI4019149, TESTI4019299, TESTI4019417, TESTI4019440, TESTI4019566, TESTI4019657, TESTI4019756, TESTI4019843, TESTI4020092, TESTI4020102, TESTI4020342, TESTI4020460, TESTI4020596, TESTI4020806, TESTI4020819, TESTI4020920, TESTI4021129, TESTI4021197, TESTI4021294, TESTI4021377, TESTI4021456, TESTI4021491,

[2572] TESTI4021569, TESTI4021713, TESTI4021821, TESTI4022158, TESTI4022577, TESTI4022716, TESTI4022873, TESTI4023096, TESTI4023172, TESTI4023546, TESTI4023555, TESTI4023654, TESTI4023722, TESTI4023762, TESTI4023942, TESTI4024096, TESTI4024240, TESTI4024245, TESTI4024294, TESTI4024344, TESTI4024387, TESTI4024420, TESTI4024494, TESTI4024740, TESTI4024874, TESTI4024890, TESTI4024907, TESTI4024930, TESTI4025062, TESTI4025268, TESTI4025401, TESTI4025494, TESTI4025547, TESTI4025731, TESTI4025797, TESTI4025865, TESTI4025908, TESTI4025920, TESTI4026079, TESTI4026080, TESTI4026192, TESTI4026207, TESTI4026295, TESTI4026390, TESTI4026456, TESTI4026510, TESTI4026524, TESTI4026680, TESTI4026700, TESTI4026762,

[2573] TESTI4026785, TESTI4027139, TESTI4027170, TESTI4027262, TESTI4027516, TESTI4027557, TESTI4027660, TESTI4027821, TESTI4027969, TESTI4028042, TESTI4028059, TESTI4028062, TESTI4028182, TESTI4028429, TESTI4028612, TESTI4028692, TESTI4028809, TESTI4028823, TESTI4028880, TESTI4028904, TESTI4028938, TESTI4028958, TESTI4028983, TESTI4029023, TESTI4029348, TESTI4029370, TESTI4029528, TESTI4029651, TESTI4029671, TESTI4029676, TESTI4029690, TESTI4029731, TESTI4029743, TESTI4030069, TESTI4030159, TESTI4030319, TESTI4030505, TESTI4030603, TESTI4030669, TESTI4030673, TESTI4030864, TESTI4031066, TESTI4031173, TESTI4031335, TESTI4031745, TESTI4031818, TESTI4032090, TESTI4032112, TESTI4032128, TESTI4032270,

[2574] TESTI4032375, TESTI4032834, TESTI4032856, TESTI4032895, TESTI4032913, TESTI4033146, TESTI4033177, TESTI4033433, TESTI4033690, TESTI4034172, TESTI4034212, TESTI4034432, TESTI4034495, TESTI4034632, TESTI4034633, TESTI4034912, TESTI4034973, TESTI4035063, TESTI4035065, TESTI4035498, TESTI4035508, TESTI4035581, TESTI4035602, TESTI4035637, TESTI4035649, TESTI4035770, TESTI4035872, TESTI4035895, TESTI4035898, TESTI4035989, TESTI4036012, TESTI4036042, TESTI4036048, TESTI4036315, TESTI4036319, TESTI4036449, TESTI4036767, TESTI4036909, TESTI4037066, TESTI4037188, TESTI4037228, TESTI4037244, TESTI4037727, TESTI4037949, TESTI4038047, TESTI4038099, TESTI4038156, TESTI4038223, TESTI4038258, TESTI4038339,

[2575] TESTI4038492, TESTI4038721, TESTI4038758, TESTI4038779, TESTI4038818, TESTI4039038, TESTI4039086, TESTI4039451, TESTI4039575, TESTI4039659, TESTI4039744, TESTI4039904, TESTI4040197, TESTI4040363, TESTI4040535, TESTI4040559, TESTI4040598, TESTI4040800, TESTI4040804, TESTI4040939, TESTI4040956, TESTI4041049, TESTI4041053, TESTI4041086, TESTI4041099, TESTI4041143, TESTI4041482, TESTI4041519, TESTI4041624, TESTI4041629, TESTI4041832, TESTI4041844, TESTI4041903, TESTI4041954, TESTI4041984, TESTI4041985, TESTI4041986, TESTI4042098, TESTI4042420, TESTI4042440, TESTI4042444, TESTI4042711, TESTI4042846, TESTI4043067, TESTI4043129, TESTI4043140, TESTI4043166, TESTI4043203, TESTI4043223, TESTI4043371,

[2576] TESTI4043378, TESTI4043512, TESTI4043551, TESTI4043710, TESTI4043947, TESTI4044035, TESTI4044076, TESTI4044084, TESTI4044123, TESTI4044186, TESTI4044234, TESTI4044291, TESTI4044296, TESTI4044300, TESTI4044682, TESTI4044770, TESTI4045168, TESTI4045312, TESTI4045330, TESTI4045470, TESTI4045701, TESTI4045908, TESTI4045955, TESTI4045982, TESTI4046073, TESTI4046090, TESTI4046240, TESTI4046245, TESTI4046253, TESTI4046282, TESTI4046328, TESTI4046450, TESTI4046457, TESTI4046487, TESTI4046502, TESTI4046523, TESTI4046819, TESTI4046884, TESTI4046896, TESTI4046903, TESTI4046962, TESTI4047069, TESTI4047119, TESTI4047305, TESTI4047328, TESTI4047437, TESTI4047569, TESTI4047746, TESTI4047808, THYMU1000017,

[2577] THYMU1000025, THYMU1000029, THYMU1000033, THYMU1000041, THYMU1000060, THYMU1000074, THYMU1000098, THYMU1000103, THYMU1000105, THYMU1000109, THYMU1000136, THYMU1000142, THYMU1000144, THYMU1000158, THYMU1000176, THYMU1000179, THYMU1000191, THYMU1000198, THYMU1000217, THYMU1000240, THYMU1000242, THYMU1000291, THYMU1000316, THYMU1000318, THYMU1000329, THYMU1000331, THYMU1000336, THYMU1000366, THYMU1000374, THYMU1000382, THYMU1000393, THYMU1000399, THYMU1000426, THYMU1000440, THYMU1000459, THYMU1000473, THYMU1000490, THYMU1000491, THYMU1000496, THYMU1000499, THYMU1000527, THYMU1000532, THYMU1000536, THYMU1000554, THYMU1000558, THYMU1000576, THYMU1000600, THYMU1000677, THYMU1000692, THYMU2000022,

[2578] THYMU2000032, THYMU2000120, THYMU2000138, THYMU2000140, THYMU2000155, THYMU2000162, THYMU2000171, THYMU2000176, THYMU2000179, THYMU2000231, THYMU2000236, THYMU2000276, THYMU2000280, THYMU2000300, THYMU2000317, THYMU2000368, THYMU2000369, THYMU2000418, THYMU2000436, THYMU2000440, THYMU2000489, THYMU2000492, THYMU2000519, THYMU2000570, THYMU2000602, THYMU2000660, THYMU2000671, THYMU2000672, THYMU2000702, THYMU2000767, THYMU2000775, THYMU2000800, THYMU2000879, THYMU2000932, THYMU2000946, THYMU2000950, THYMU2000971, THYMU2000982, THYMU2000990, THYMU2001007, THYMU2001018, THYMU2001053, THYMU2001071, THYMU2001090, THYMU2001139, THYMU2001195, THYMU2001202, THYMU2001203, THYMU2001256, THYMU2001270,

[2579] THYMU2001291, THYMU2001314, THYMU2001325, THYMU2001357, THYMU2001381, THYMU2001422, THYMU2001443, THYMU2001515, THYMU2001556, THYMU2001622, THYMU2001727, THYMU2001819, THYMU2001825, THYMU2001839, THYMU2001868, THYMU2001898, THYMU2001900, THYMU2001916, THYMU2001926, THYMU2001989, THYMU2002023, THYMU2002037, THYMU2002080, THYMU2002109, THYMU2002147, THYMU2002154, THYMU2002157, THYMU2002162, THYMU2002177, THYMU2002203, THYMU2002242, THYMU2002338, THYMU2002356, THYMU2002376, THYMU2002384, THYMU2002450, THYMU2002490, THYMU2002548, THYMU2002695, THYMU2002756, THYMU2002789, THYMU2002792, THYMU2002815, THYMU2002852, THYMU2002910, THYMU2002950, THYMU2002983, THYMU2003107, THYMU2003124, THYMU2003166,

[2580] THYMU2003232, THYMU2003242, THYMU2003249, THYMU2003270, THYMU2003282, THYMU2003287, THYMU2003336, THYMU2003366, THYMU2003397, THYMU2003440, THYMU2003446, THYMU2003470, THYMU2003479, THYMU2003499, THYMU2003542, THYMU2003632, THYMU2003650, THYMU2003700, THYMU2003760, THYMU2003803, THYMU2003855, THYMU2003907, THYMU2003932, THYMU2004003, THYMU2004008, THYMU2004042, THYMU2004111, THYMU2004123, THYMU2004139, THYMU2004169, THYMU2004284, THYMU2004336, THYMU2004356, THYMU2004452, THYMU2004508, THYMU2004512, THYMU2004635, THYMU2004639, THYMU2004668, THYMU2004677, THYMU2004688, THYMU2004693, THYMU2004835, THYMU2004843, THYMU2004906, THYMU2004916, THYMU2004986, THYMU2005001, THYMU2005003, THYMU2005046,

[2581] THYMU2005134, THYMU2005190, THYMU2005225, THYMU2005240, THYMU2005246, THYMU2005270, THYMU2005283, THYMU2005303, THYMU2005321, THYMU2005356, THYMU2005369, THYMU2005439, THYMU2005480, THYMU2005482, THYMU2005507, THYMU2005545, THYMU2005574, THYMU2005576, THYMU2005748, THYMU2005759, THYMU2005807, THYMU2005815, THYMU2005855, THYMU2005881, THYMU2005948, THYMU2005997, THYMU2006001, THYMU2006048, THYMU2006098, THYMU2006160, THYMU2006170, THYMU2006252, THYMU2006261, THYMU2006277, THYMU2006303, THYMU2006324, THYMU2006350, THYMU2006357, THYMU2006365, THYMU2006420, THYMU2006468, THYMU2006610, THYMU2006666, THYMU2006712, THYMU2006913, THYMU2006946, THYMU2006965, THYMU2007025, THYMU2007060, THYMU2007095,

[2582] THYMU2007146, THYMU2007179, THYMU2007258, THYMU2007307, THYMU2007308, THYMU2007339, THYMU2007350, THYMU2007384, THYMU2007415, THYMU2007467, THYMU2007493, THYMU2007521, THYMU2007528, THYMU2007530, THYMU2007532, THYMU2007561, THYMU2007571, THYMU2007635, THYMU2007658, THYMU2007667, THYMU2007694, THYMU2007725, THYMU2007729, THYMU2007802, THYMU2007824, THYMU2007854, THYMU2007952, THYMU2007969, THYMU2008035, THYMU2008036, THYMU2008049, THYMU2008072, THYMU2008111, THYMU2008145, THYMU2008149, THYMU2008185, THYMU2008191, THYMU2008207, THYMU2008226, THYMU2008282, THYMU2008321, THYMU2008339, THYMU2008350, THYMU2008351, THYMU2008383, THYMU2008452, THYMU2008643, THYMU2008686, THYMU2008691, THYMU2008714,

[2583] THYMU2008727, THYMU2008781, THYMU2008799, THYMU2008876, THYMU2008910, THYMU2008917, THYMU2008928, THYMU2008990, THYMU2008994, THYMU2009023, THYMU2009046, THYMU2009101, THYMU2009104, THYMU2009134, THYMU2009157, THYMU2009181, THYMU2009186, THYMU2009338, THYMU2009425, THYMU2009516, THYMU2009526, THYMU2009546, THYMU2009592, THYMU2009596, THYMU2009835, THYMU2009906, THYMU2009948, THYMU2010030, THYMU2010041, THYMU2010046, THYMU2010059, THYMU2010082, THYMU2010161, THYMU2010192, THYMU2010448, THYMU2010519, THYMU2010637, THYMU2010671, THYMU2010699, THYMU2010705, THYMU2010779, THYMU2010816, THYMU2010831, THYMU2010848, THYMU2011053, THYMU2011063, THYMU2011072, THYMU2011096, THYMU2011118, THYMU2011142,

[2584] THYMU2011183, THYMU2011257, THYMU2011259, THYMU2011295, THYMU2011308, THYMU2011390, THYMU2011431, THYMU2011447, THYMU2011482, THYMU2011538, THYMU2011548, THYMU2011551, THYMU2011564, THYMU2011573, THYMU2011585, THYMU2011621, THYMU2011666, THYMU2011736, THYMU2011785, THYMU2011806, THYMU2011852, THYMU2011875, THYMU2011937, THYMU2011939, THYMU2012002, THYMU2012073, THYMU2012104, THYMU2012113, THYMU2012273, THYMU2012401, THYMU2012492, THYMU2012507, THYMU2012565, THYMU2012574, THYMU2012631, THYMU2012665, THYMU2012690, THYMU2012701, THYMU2012807, THYMU2012826, THYMU2012882, THYMU2012891, THYMU2012902, THYMU2012919, THYMU2013023, THYMU2013047, THYMU2013051, THYMU2013089, THYMU2013170, THYMU2013364,

[2585] THYMU2013386, THYMU2013426, THYMU2013578, THYMU2013705, THYMU2013757, THYMU2013779, THYMU2013863, THYMU2013950, THYMU2013981, THYMU2014067, THYMU2014068, THYMU2014204, THYMU2014297, THYMU2014323, THYMU2014327, THYMU2014353, THYMU2014492, THYMU2014500, THYMU2014599, THYMU2014762, THYMU2014777, THYMU2014801, THYMU2014901, THYMU2014923, THYMU2015161, THYMU2015316, THYMU2015321, THYMU2015439, THYMU2015441, THYMU2015479, THYMU2015762, THYMU2015775, THYMU2015825, THYMU2015918, THYMU2015943, THYMU2015984, THYMU2016113, THYMU2016164, THYMU2016204, THYMU2016219, THYMU2016360, THYMU2016496, THYMU2016523, THYMU2016840, THYMU2016968, THYMU2017008, THYMU2017010, THYMU2017023, THYMU2017085, THYMU2017099,

[2586] THYMU2017158, THYMU2017162, THYMU2017215, THYMU2017362, THYMU2017366, THYMU2017398, THYMU2017449, THYMU2017479, THYMU2017522, THYMU2017526, THYMU2017601, THYMU2017675, THYMU2017707, THYMU2017831, THYMU2017844, THYMU2017878, THYMU2017948, THYMU2018028, THYMU2018071, THYMU2018189, THYMU2018197, THYMU2018384, THYMU2018455, THYMU2018547, THYMU2018565, THYMU2018639, THYMU2018673, THYMU2018721, THYMU2018772, THYMU2018819, THYMU2018841, THYMU2018997, THYMU2019054, THYMU2019197, THYMU2019210, THYMU2019364, THYMU2019436, THYMU2019442, THYMU2019587, THYMU2019599, THYMU2019686, THYMU2019813, THYMU2020198, THYMU2020289, THYMU2020416, THYMU2020491, THYMU2020499, THYMU2020560, THYMU2020667, THYMU2020830,

[2587] THYMU2020883, THYMU2020959, THYMU2021361, THYMU2021509, THYMU2021597, THYMU2021684, THYMU2021714, THYMU2022213, THYMU2022289, THYMU2022660, THYMU2022854, THYMU2022922, THYMU2023209, THYMU2023264, THYMU2023576, THYMU2023711, THYMU2023900, THYMU2023943, THYMU2023967, THYMU2024071, THYMU2024121, THYMU2024185, THYMU2024207, THYMU2024616, THYMU2024684, THYMU2024748, THYMU2025042, THYMU2025189, THYMU2025319, THYMU2025325, THYMU2025406, THYMU2025557, THYMU2025572, THYMU2025849, THYMU2025909, THYMU2025939, THYMU2026182, THYMU2026350, THYMU2026530, THYMU2026531, THYMU2026835, THYMU2026904, THYMU2027053, THYMU2027168, THYMU2027249, THYMU2027282, THYMU2027497, THYMU2027695, THYMU2027734, THYMU2027894,

[2588] THYMU2027996, THYMU2028041, THYMU2028368, THYMU2028379, THYMU2028394, THYMU2028412, THYMU2028632, THYMU2028724, THYMU2028739, THYMU2028942, THYMU2028978, THYMU2029134, THYMU2029578, THYMU2029676, THYMU2029688, THYMU2029788, THYMU2030068, THYMU2030226, THYMU2030264, THYMU2030462, THYMU2030543, THYMU2030637, THYMU2030655, THYMU2030796, THYMU2030912, THYMU2030982, THYMU2031046, THYMU2031139, THYMU2031218, THYMU2031249, THYMU2031258, THYMU2031368, THYMU2031579, THYMU2031847, THYMU2031890, THYMU2031994, THYMU2032014, THYMU2032035, THYMU2032080, THYMU2032150, THYMU2032155, THYMU2032358, THYMU2032437, THYMU2032601, THYMU2032655, THYMU2032696, THYMU2032715, THYMU2032732, THYMU2032825, THYMU2032976,

[2589] THYMU2033053, THYMU2033059, THYMU2033070, THYMU2033079, THYMU2033085, THYMU2033104, THYMU2033227, THYMU2033263, THYMU2033308, THYMU2033401, THYMU2033583, THYMU2033755, THYMU2033787, THYMU2033816, THYMU2034182, THYMU2034279, THYMU2034314, THYMU2034338, THYMU2034374, THYMU2034647, THYMU2034917, THYMU2035064, THYMU2035078, THYMU2035101, THYMU2035319, THYMU2035321, THYMU2035388, THYMU2035400, THYMU2035554, THYMU2035710, THYMU2036058, THYMU2036105, THYMU2036207, THYMU2036215, THYMU2036252, THYMU2036265, THYMU2036366, THYMU2036459, THYMU2036604, THYMU2036653, THYMU2037081, THYMU2037208, THYMU2037226, THYMU2037233, THYMU2037234, THYMU2037348, THYMU2037406, THYMU2037965, THYMU2038058, THYMU2038189,

[2590] THYMU2038199, THYMU2038220, THYMU2038301, THYMU2038369, THYMU2038389, THYMU2038615, THYMU2038636, THYMU2038739, THYMU2038772, THYMU2038797, THYMU2038906, THYMU2039305, THYMU2039315, THYMU2039334, THYMU2039350, THYMU2039411, THYMU2039634, THYMU2039719, THYMU2039780, THYMU2039788, THYMU2039989, THYMU2040029, THYMU2040110, THYMU2040114, THYMU2040140, THYMU2040412, THYMU2040427, THYMU2040824, THYMU2040925, THYMU2041007, THYMU2041015, THYMU2041252, THYMU3000028, THYMU3000036, THYMU3000037, THYMU3000082, THYMU3000194, THYMU3000224, THYMU3000269, THYMU3000306, THYMU3000360, THYMU3000390, THYMU3000420, THYMU3000490, THYMU3000504, THYMU3000542, THYMU3000655, THYMU3000776, THYMU3000826, THYMU3000841,

[2591] THYMU3001077, THYMU3001082, THYMU3001083, THYMU3001133, THYMU3001151, THYMU3001379, THYMU3001472, THYMU3001593, THYMU3001883, THYMU3001939, THYMU3001991, THYMU3002452, THYMU3002578, THYMU3002661, THYMU3003007, THYMU3003092, THYMU3003212, THYMU3003309, THYMU3003350, THYMU3003403, THYMU3003565, THYMU3003763, THYMU3003865, THYMU3003958, THYMU3003965, THYMU3004157, THYMU3004628, THYMU3004632, THYMU3004835, THYMU3004866, THYMU3005050, THYMU3005378, THYMU3005407, THYMU3005415, THYMU3005427, THYMU3005482, THYMU3005491, THYMU3005629, THYMU3005696, THYMU3006118, THYMU3006132, THYMU3006168, THYMU3006172, THYMU3006371, THYMU3006485, THYMU3006640, THYMU3006767, THYMU3006811, THYMU3006963, THYMU3007137,

[2592] THYMU3007308, THYMU3007368, THYMU3007423, THYMU3007559, THYMU3007845, THYMU3008060, THYMU3008105, THYMU3008136, THYMU3008171, THYMU3008216, THYMU3008436, THYMU3008672, THYMU3008883, THYMU3008935, THYMU3009255, THYMU3009391, THYMU3009643, THYMU3009755, THYMU3010247, THYMU3011012, THYMU3011081, THYMU3011244, THYMU3011360, THYMU3011534, THYMU3011543, THYMU3011556, THYMU3011717, THYMU3011827, THYMU3012402, THYMU3012907, THYMU3012983, THYMU3013114, THYMU3013197, THYMU3013241, THYMU3013470, THYMU3013785, THYMU3013897, THYMU3014038, THYMU3014173, THYMU3014372, THYMU3014555, THYMU3014620, THYMU3014701, THYMU3015042, THYMU3015457, THYMU3015571, THYMU3015592, THYMU3015625, THYMU3015647, THYMU3015962,

[2593] THYMU3016022, THYMU3016518, THYMU3016797, THYMU3016822, THYMU3016850, THYMU3017562, THYMU3017688, THYMU3017689, THYMU3017761, THYMU3018151, THYMU3018896, THYMU3019095, THYMU3019476, THYMU3019605, THYMU3019916, THYMU3020221, THYMU3020595, THYMU3020713, THYMU3020856, THYMU3020869, THYMU3020970, THYMU3021404, THYMU3021586, THYMU3021755, THYMU3021900, THYMU3022211, THYMU3022434, THYMU3022528, THYMU3022668, THYMU3022982, THYMU3023107, THYMU3023211, THYMU3023216, THYMU3023394, THYMU3023400, THYMU3023797, THYMU3024164, THYMU3024602, THYMU3024879, THYMU3025118, THYMU3025313, THYMU3025683, THYMU3025772, THYMU3025865, THYMU3026000, THYMU3026350, THYMU3026479, THYMU3026532, THYMU3026783, THYMU3026869,

[2594] THYMU3027251, THYMU3027540, THYMU3027655, THYMU3027671, THYMU3028075, THYMU3028410, THYMU3028461, THYMU3028702, THYMU3029188, THYMU3029318, THYMU3029421, THYMU3029719, THYMU3029774, THYMU3029832, THYMU3030072, THYMU3030231, THYMU3030706, THYMU3030710, THYMU3030752, THYMU3031146, THYMU3031402, THYMU3031610, THYMU3031612, THYMU3031868, THYMU3031878, THYMU3032032, THYMU3032798, THYMU3032867, THYMU3033402, THYMU3033626, THYMU3033630, THYMU3033649, THYMU3033754, THYMU3033759, THYMU3034078, THYMU3034099, THYMU3034453, THYMU3034616, THYMU3034853, THYMU3034867, THYMU3034983, THYMU3036200, THYMU3036310, THYMU3036934, THYMU3036953, THYMU3037052, THYMU3037192, THYMU3037617, THYMU3037772, THYMU3037827,

[2595] THYMU3037836, THYMU3037856, THYMU3037867, THYMU3037909, THYMU3037980, THYMU3038167, THYMU3038214, THYMU3038266, THYMU3038328, THYMU3038347, THYMU3038375, THYMU3038603, THYMU3038687, THYMU3038759, THYMU3038879, THYMU3038970, THYMU3039807, THYMU3039846, THYMU3040068, THYMU3040126, THYMU3040146, THYMU3040168, THYMU3040172, THYMU3040725, THYMU3040746, THYMU3040816, THYMU3040829, THYMU3040830, THYMU3040986, THYMU3041354, THYMU3041386, THYMU3041428, THYMU3041573, THYMU3041603, THYMU3041736, THYMU3041918, THYMU3042075, THYMU3042321, THYMU3042372, THYMU3042758, THYMU3042929, THYMU3043200, THYMU3043327, THYMU3043482, THYMU3043597, THYMU3043688, THYMU3043779, THYMU3043883, THYMU3043993, THYMU3044175,

[2596] THYMU3044188, THYMU3044441, THYMU3044445, THYMU3045510, THYMU3045673, THYMU3045692, THYMU3045704, THYMU3046140, THYMU3046350, THYMU3046360, THYMU3046856, THYMU3047144, THYMU3047156, THYMU3047366, THYMU3047513, THYMU3047542, THYMU3047760, THYMU3047891, TKIDN1000001, TKIDN1000044, TKIDN1000062, TKIDN1000171, TKIDN1000192, TKIDN2000127, TKIDN2000240, TKIDN2000246, TKIDN2000319, TKIDN2000464, TKIDN2000521, TKIDN2000701, TKIDN2001529, TKIDN2002318, TKIDN2002329, TKIDN2002424, TKIDN2002632, TKIDN2003044, TKIDN2003059, TKIDN2003062, TKIDN2003078, TKIDN2003366, TKIDN2003396, TKIDN2003413, TKIDN2003601, TKIDN2004185, TKIDN2004386, TKIDN2004458, TKIDN2004748, TKIDN2005487, TKIDN2005721, TKIDN2005934,

[2597] TKIDN2005947, TKIDN2005956, TKIDN2006525, TKIDN2006761, TKIDN2006852, TKIDN2007605, TKIDN2007667, TKIDN2008176, TKIDN2008778, TKIDN2009092, TKIDN2009330, TKIDN2009481, TKIDN2009641, TKIDN2009794, TKIDN2009889, TKIDN2010200, TKIDN2010232, TKIDN2010278, TKIDN2010602, TKIDN2010812, TKIDN2010934, TKIDN2011051, TKIDN2011160, TKIDN2011289, TKIDN2011324, TKIDN2012034, TKIDN2012771, TKIDN2012824, TKIDN2013134, TKIDN2013287, TKIDN2014570, TKIDN2014757, TKIDN2014771, TKIDN2014964, TKIDN2015025, TKIDN2015071, TKIDN2015161, TKIDN2015263, TKIDN2016309, TKIDN2016399, TKIDN2016846, TKIDN2018926, TKIDN2019116, TLIVE2000023, TLIVE2000142, TLIVE2000292, TLIVE2000762, TLIVE2000979, TLIVE2001327, TLIVE2001616,

[2598] TLIVE2001684, TLIVE2001828, TLIVE2001927, TLIVE2002336, TLIVE2002338, TLIVE2002562, TLIVE2002690, TLIVE2002882, TLIVE2003197, TLIVE2003200, TLIVE2003225, TLIVE2003381, TLIVE2003737, TLIVE2003961, TLIVE2004110, TLIVE2004320, TLIVE2004331, TLIVE2004601, TLIVE2005180, TLIVE2005390, TLIVE2005516, TLIVE2005731, TLIVE2005866, TLIVE2006236, TLIVE2006359, TLIVE2006529, TLIVE2006621, TLIVE2006733, TLIVE2007000, TLIVE2007016, TLIVE2007132, TLIVE2007192, TLIVE2007528, TLIVE2007607, TLIVE2007736, TLIVE2007816, TLIVE2007919, TLIVE2008083, TLIVE2008213, TLIVE2008221, TLIVE2008229, TLIVE2008712, TLIVE2008797, TLIVE2009087, TLIVE2009163, TLIVE2009489, TLIVE2009541, TLUNG2000179, TOVAR2000476, TOVAR2000575,

[2599] TOVAR2000649, TOVAR2000904, TOVAR2001281, TOVAR2001556, TOVAR2001730, TOVAR2002247, TOVAR2002514, TOVAR2002549, TOVAR2002800, TRACH1000011, TRACH1000018, TRACH1000057, TRACH1000074, TRACH1000100, TRACH1000125, TRACH1000140, TRACH1000144, TRACH1000181, TRACH1000193, TRACH1000212, TRACH1000240, TRACH2000002, TRACH2000015, TRACH2000024, TRACH2000032, TRACH2000045, TRACH2000047, TRACH2000083, TRACH2000148, TRACH2000185, TRACH2000196, TRACH2000235, TRACH2000237, TRACH2000243, TRACH2000250, TRACH2000259, TRACH2000272, TRACH2000282, TRACH2000287, TRACH2000289, TRACH2000306, TRACH2000312, TRACH2000336, TRACH2000359, TRACH2000393, TRACH2000411, TRACH2000461, TRACH2000496, TRACH2000497, TRACH2000502,

[2600] TRACH2000522, TRACH2000540, TRACH2000559, TRACH2000660, TRACH2000665, TRACH2000675, TRACH2000677, TRACH2000703, TRACH2000767, TRACH2000775, TRACH2000780, TRACH2000807, TRACH2000862, TRACH2000873, TRACH2000894, TRACH2000898, TRACH2000920, TRACH2000923, TRACH2000926, TRACH2000944, TRACH2000981, TRACH2000986, TRACH2001037, TRACH2001060, TRACH2001085, TRACH2001109, TRACH2001121, TRACH2001147, TRACH2001154, TRACH2001188, TRACH2001192, TRACH2001249, TRACH2001275, TRACH2001335, TRACH2001339, TRACH2001341, TRACH2001347, TRACH2001395, TRACH2001400, TRACH2001403, TRACH2001416, TRACH2001428, TRACH2001432, TRACH2001474, TRACH2001525, TRACH2001532, TRACH2001549, TRACH2001592, TRACH2001596, TRACH2001621,

[2601] TRACH2001646, TRACH2001651, TRACH2001684, TRACH2001810, TRACH2001933, TRACH2001968, TRACH2001996, TRACH2002043, TRACH2002054, TRACH2002100, TRACH2002138, TRACH2002333, TRACH2002784, TRACH2002803, TRACH2002840, TRACH2002853, TRACH2002862, TRACH2002954, TRACH2002960, TRACH2002988, TRACH2003070, TRACH2003272, TRACH2003347, TRACH2003484, TRACH2003516, TRACH2003605, TRACH2003736, TRACH2003759, TRACH2003941, TRACH2004039, TRACH2004054, TRACH2004087, TRACH2004109, TRACH2004170, TRACH2004183, TRACH2004251, TRACH2004292, TRACH2004336, TRACH2004399, TRACH2004428, TRACH2004458, TRACH2004521, TRACH2004570, TRACH2004845, TRACH2004887, TRACH2004950, TRACH2005004, TRACH2005017, TRACH2005066, TRACH2005159,

[2602] TRACH2005314, TRACH2005444, TRACH2005541, TRACH2005666, TRACH2005698, TRACH2005710, TRACH2005720, TRACH2005769, TRACH2005796, TRACH2005800, TRACH2006015, TRACH2006049, TRACH2006097, TRACH2006194, TRACH2006327, TRACH2006331, TRACH2006378, TRACH2006387, TRACH2006528, TRACH2006670, TRACH2006866, TRACH2006870, TRACH2006918, TRACH2007059, TRACH2007324, TRACH2007358, TRACH2007483, TRACH2007542, TRACH2007577, TRACH2007674, TRACH2007676, TRACH2007688, TRACH2007733, TRACH2007894, TRACH2007969, TRACH2007988, TRACH2008081, TRACH2008112, TRACH2008113, TRACH2008127, TRACH2008130, TRACH2008278, TRACH2008300, TRACH2008478, TRACH2008540, TRACH2008583, TRACH2008597, TRACH2008716, TRACH2008820, TRACH2008921,

[2603] TRACH2009060, TRACH2009107, TRACH2009123, TRACH2009268, TRACH2009291, TRACH2009310, TRACH2009340, TRACH2009348, TRACH2009358, TRACH2009661, TRACH2009730, TRACH2009743, TRACH2009754, TRACH2009851, TRACH2009862, TRACH2009934, TRACH2010159, TRACH2010218, TRACH2010251, TRACH2010272, TRACH2010317, TRACH2010419, TRACH2010451, TRACH2010505, TRACH2010587, TRACH2010634, TRACH2010639, TRACH2010677, TRACH2010698, TRACH2010771, TRACH2010824, TRACH2010883, TRACH2010965, TRACH2010974, TRACH2011057, TRACH2011093, TRACH2011113, TRACH2011290, TRACH2011293, TRACH2011302, TRACH2011574, TRACH2011894, TRACH2011956, TRACH2012000, TRACH2012138, TRACH2012242, TRACH2012298, TRACH2012370, TRACH2012376, TRACH2012387,

[2604] TRACH2012497, TRACH2012562, TRACH2012742, TRACH2012811, TRACH2012823, TRACH2012918, TRACH2013081, TRACH2013123, TRACH2013265, TRACH2013369, TRACH2013450, TRACH2013495, TRACH2013552, TRACH2013585, TRACH2013671, TRACH2013726, TRACH2013902, TRACH2013928, TRACH2013982, TRACH2014018, TRACH2014045, TRACH2014046, TRACH2014077, TRACH2014082, TRACH2014268, TRACH2014284, TRACH2014337, TRACH2014356, TRACH2014371, TRACH2014442, TRACH2014483, TRACH2014495, TRACH2014544, TRACH2014573, TRACH2014725, TRACH2014760, TRACH2014815, TRACH2014839, TRACH2014938, TRACH2014950, TRACH2014972, TRACH2014974, TRACH2014997, TRACH2015180, TRACH2015243, TRACH2015316, TRACH2015381, TRACH2015486, TRACH2015654, TRACH2015987,

[2605] TRACH2016080, TRACH2016131, TRACH2016286, TRACH2016317, TRACH2016347, TRACH2016380, TRACH2016384, TRACH2016410, TRACH2016481, TRACH2016498, TRACH2016533, TRACH2016551, TRACH2016554, TRACH2016651, TRACH2016690, TRACH2016709, TRACH2016722, TRACH2016835, TRACH2016980, TRACH2017086, TRACH2017498, TRACH2017609, TRACH2017949, TRACH2017965, TRACH2017980, TRACH2018034, TRACH2018084, TRACH2018262, TRACH2018273, TRACH2018278, TRACH2018345, TRACH2018380, TRACH2018449, TRACH2018512, TRACH2018646, TRACH2018663, TRACH2018718, TRACH2018835, TRACH2018882, TRACH2018914, TRACH2018950, TRACH2019024, TRACH2019046, TRACH2019080, TRACH2019151, TRACH2019154, TRACH2019176, TRACH2019248, TRACH2019309, TRACH2019425,

[2606] TRACH2019473, TRACH2019602, TRACH2019661, TRACH2019672, TRACH2019673, TRACH2019844, TRACH2019879, TRACH2020048, TRACH2020336, TRACH2020525, TRACH2021398, TRACH2021622, TRACH2021635, TRACH2021964, TRACH2022042, TRACH2022113, TRACH2022253, TRACH2022425, TRACH2022553, TRACH2022649, TRACH2022839, TRACH2023246, TRACH2023299, TRACH2023306, TRACH2023416, TRACH2023479, TRACH2023684, TRACH2023860, TRACH2023876, TRACH2024139, TRACH2024187, TRACH2024271, TRACH2024293, TRACH2024408, TRACH2024512, TRACH2024559, TRACH2024647, TRACH2024651, TRACH2024730, TRACH2024735, TRACH2024749, TRACH2024821, TRACH2025057, TRACH2025084, TRACH2025155, TRACH2025224, TRACH2025344, TRACH2025379, TRACH2025507, TRACH2025535,

[2607] TRACH2025569, TRACH2025705, TRACH2025749, TRACH2025753, TRACH2025810, TRACH2025853, TRACH2025911, TRACH2025932, TRACH3000014, TRACH3000017, TRACH3000043, TRACH3000134, TRACH3000180, TRACH3000342, TRACH3000420, TRACH3000515, TRACH3000530, TRACH3000548, TRACH3000558, TRACH3000586, TRACH3000780, TRACH3000892, TRACH3000926, TRACH3001119, TRACH3001443, TRACH3001550, TRACH3001759, TRACH3002064, TRACH3002107, TRACH3002168, TRACH3002188, TRACH3002245, TRACH3002293, TRACH3002533, TRACH3002561, TRACH3002567, TRACH3002605, TRACH3002650, TRACH3002752, TRACH3002866, TRACH3002871, TRACH3002876, TRACH3002890, TRACH3003009, TRACH3003037, TRACH3003357, TRACH3003379, TRACH3003586, TRACH3003683, TRACH3003780,

[2608] TRACH3003805, TRACH3003832, TRACH3003872, TRACH3004113, TRACH3004288, TRACH3004303, TRACH3004412, TRACH3004424, TRACH3004456, TRACH3004537, TRACH3004596, TRACH3004651, TRACH3004652, TRACH3004671, TRACH3004721, TRACH3004747, TRACH3004760, TRACH3004783, TRACH3004786, TRACH3004840, TRACH3004931, TRACH3004934, TRACH3005072, TRACH3005085, TRACH3005102, TRACH3005173, TRACH3005191, TRACH3005211, TRACH3005274, TRACH3005294, TRACH3005479, TRACH3005549, TRACH3005702, TRACH3005808, TRACH3005852, TRACH3005896, TRACH3006038, TRACH3006149, TRACH3006228, TRACH3006264, TRACH3006336, TRACH3006379, TRACH3006392, TRACH3006395, TRACH3006397, TRACH3006412, TRACH3006470, TRACH3006589, TRACH3006626, TRACH3006699,

[2609] TRACH3006800, TRACH3006889, TRACH3006985, TRACH3007097, TRACH3007268, TRACH3007274, TRACH3007277, TRACH3007391, TRACH3007479, TRACH3007541, TRACH3007595, TRACH3007627, TRACH3007689, TRACH3007766, TRACH3007866, TRACH3007995, TRACH3008042, TRACH3008061, TRACH3008093, TRACH3008201, TRACH3008508, TRACH3008535, TRACH3008629, TRACH3008688, TRACH3008697, TRACH3008713, TRACH3008887, TRACH3008902, TRACH3008990, TRACH3009001, TRACH3009008, TRACH3009059, TRACH3009061, TRACH3009455, TRACH3009701, TRACH3009715, TRACH3009894, TRACH3009956, TRACH3010079, TRACH3010167, TRACH3010331, TRACH3010342, TRACH3010382, TRACH3010757, TRACH3010901, TRACH3011004, TRACH3011082, TRACH3011184, TRACH3011282, TRACH3011313,

[2610] TRACH3011454, TRACH3011485, TRACH3011503, TRACH3011538, TRACH3011542, TRACH3012106, TRACH3012161, TRACH3012232, TRACH3012261, TRACH3012445, TRACH3012460, TRACH3012659, TRACH3012718, TRACH3012864, TRACH3012891, TRACH3012942, TRACH3013043, TRACH3013072, TRACH3013426, TRACH3013454, TRACH3013558, TRACH3013684, TRACH3013693, TRACH3013700, TRACH3013766, TRACH3013900, TRACH3013926, TRACH3014063, TRACH3014183, TRACH3014215, TRACH3014316, TRACH3014415, TRACH3014580, TRACH3014641, TRACH3014885, TRACH3015136, TRACH3015336, TRACH3015346, TRACH3015354, TRACH3015467, TRACH3015626, TRACH3015951, TRACH3016051, TRACH3016120, TRACH3016264, TRACH3016277, TRACH3016368, TRACH3016455, TRACH3016614, TRACH3016992,

[2611] TRACH3017171, TRACH3017409, TRACH3017934, TRACH3018108, TRACH3018191, TRACH3018240, TRACH3018261, TRACH3018519, TRACH3018524, TRACH3018606, TRACH3018783, TRACH3018907, TRACH3018933, TRACH3018943, TRACH3019018, TRACH3019058, TRACH3019142, TRACH3019290, TRACH3019347, TRACH3019370, TRACH3019447, TRACH3019598, TRACH3019621, TRACH3019662, TRACH3019807, TRACH3019924, TRACH3019977, TRACH3020137, TRACH3020410, TRACH3020563, TRACH3020605, TRACH3020750, TRACH3020769, TRACH3020928, TRACH3020930, TRACH3021023, TRACH3021066, TRACH3021212, TRACH3021335, TRACH3021373, TRACH3021544, TRACH3021778, TRACH3021834, TRACH3021883, TRACH3022170, TRACH3022198, TRACH3022296, TRACH3022482, TRACH3022732, TRACH3022758,

[2612] TRACH3022875, TRACH3022910, TRACH3022960, TRACH3023063, TRACH3023203, TRACH3023242, TRACH3023373, TRACH3023516, TRACH3023752, TRACH3023945, TRACH3023960, TRACH3024020, TRACH3024081, TRACH3024342, TRACH3024423, TRACH3024428, TRACH3024512, TRACH3024671, TRACH3024823, TRACH3025302, TRACH3025316, TRACH3025346, TRACH3025520, TRACH3026148, TRACH3026283, TRACH3026299, TRACH3026303, TRACH3026542, TRACH3026650, TRACH3026676, TRACH3026744, TRACH3026949, TRACH3027229, TRACH3027527, TRACH3027681, TRACH3027701, TRACH3027885, TRACH3028031, TRACH3028164, TRACH3028180, TRACH3028195, TRACH3028441, TRACH3028597, TRACH3028678, TRACH3028837, TRACH3028847, TRACH3028855, TRACH3029139, TRACH3029329, TRACH3029451,

[2613] TRACH3029462, TRACH3029520, TRACH3029592, TRACH3029629, TRACH3029665, TRACH3029670, TRACH3029800, TRACH3030111, TRACH3030130, TRACH3030176, TRACH3030252, TRACH3030725, TRACH3030855, TRACH3030883, TRACH3031316, TRACH3031400, TRACH3031463, TRACH3031479, TRACH3031518, TRACH3031660, TRACH3031678, TRACH3031936, TRACH3032044, TRACH3032065, TRACH3032150, TRACH3032372, TRACH3032480, TRACH3032570, TRACH3032755, TRACH3032827, TRACH3032873, TRACH3033535, TRACH3033680, TRACH3033868, TRACH3034145, TRACH3034414, TRACH3034488, TRACH3034680, TRACH3034731, TRACH3034745, TRACH3034762, TRACH3034903, TRACH3035187, TRACH3035199, TRACH3035235, TRACH3035451, TRACH3035482, TRACH3035526, TRACH3036004, TRACH3036103,

[2614] TRACH3036193, TRACH3036207, TRACH3036278, TRACH3036309, TRACH3036456, TRACH3036609, TRACH3036638, TRACH3036683, TRACH3036750, TRACH3036792, TRACH3036843, TRACH3036897, TRACH3036932, TRACH3036942, TRACH3036997, TRACH3037063, TRACH3037267, TRACH3037288, TRACH3037505, TRACH3037573, TRACH3037696, TRACH3037897, TRACH3038086, TRACH3038399, TSTOM1000135, TSTOM1000186, TSTOM2000235, TSTOM2000442, TSTOM2000569, TSTOM2000588, TSTOM2001195, TSTOM2001274, TSTOM2001571, TSTOM2001996, TSTOM2002265, TSTOM2002505, TSTOM2002561, TSTOM2002611, TSTOM2002672, TSTOM2002682, TUTER1000014, TUTER1000122, TUTER1000137, TUTER2000057, TUTER2000283, TUTER2000425, TUTER2000916, TUTER2001286, TUTER2001341, TUTER2001387,

[2615] TUTER2001433, TUTER2001461, TUTER2002028, TUTER2002074, TUTER2002158, TUTER2002228, TUTER2002323, TUTER2002356, TUTER2002729, UMVEN1000122, UMVEN1000143, UMVEN1000156, UMVEN2000046, UMVEN2000069, UMVEN2000121, UMVEN2000133, UMVEN2000152, UMVEN2000354, UTERU1000008, UTERU1000015, UTERU1000024, UTERU1000031, UTERU1000032, UTERU1000057, UTERU1000065, UTERU1000077, UTERU1000093, UTERU1000096, UTERU1000106, UTERU1000109, UTERU1000131, UTERU1000138, UTERU1000148, UTERU1000160, UTERU1000183, UTERU1000187, UTERU1000192, UTERU1000249, UTERU1000337, UTERU1000339, UTERU2000023, UTERU2000047, UTERU2000074, UTERU2000099, UTERU2000154, UTERU2000197, UTERU2000218, UTERU2000238, UTERU2000243, UTERU2000260,

[2616] UTERU2000329, UTERU2000332, UTERU2000349, UTERU2000377, UTERU2000393, UTERU2000418, UTERU2000465, UTERU2000485, UTERU2000517, UTERU2000524, UTERU2000539, UTERU2000541, UTERU2000546, UTERU2000550, UTERU2000569, UTERU2000607, UTERU2000629, UTERU2000649, UTERU2000663, UTERU2000794, UTERU2000830, UTERU2000844, UTERU2000922, UTERU2000925, UTERU2001024, UTERU2001110, UTERU2001176, UTERU2001281, UTERU2001389, UTERU2001409, UTERU2001412, UTERU2001504, UTERU2001747, UTERU2001876, UTERU2002011, UTERU2002176, UTERU2002198, UTERU2002294, UTERU2002332, UTERU2002473, UTERU2002547, UTERU2002662, UTERU2002693, UTERU2002733, UTERU2002736, UTERU2002737, UTERU2002826, UTERU2002841, UTERU2002964, UTERU2002993,

[2617] UTERU2003035, UTERU2003057, UTERU2003126, UTERU2003135, UTERU2003321, UTERU2003399, UTERU2003411, UTERU2003456, UTERU2003577, UTERU2003973, UTERU2004015, UTERU2004039, UTERU2004061, UTERU2004073, UTERU2004163, UTERU2004299, UTERU2004461, UTERU2004520, UTERU2004564, UTERU2004664, UTERU2004688, UTERU2004698, UTERU2004861, UTERU2005004, UTERU2005050, UTERU2005069, UTERU2005074, UTERU2005179, UTERU2005292, UTERU2005346, UTERU2005446, UTERU2005449, UTERU2005450, UTERU2005533, UTERU2005593, UTERU2005601, UTERU2005621, UTERU2005822, UTERU2005903, UTERU2005905, UTERU2006103, UTERU2006115, UTERU2006137, UTERU2006182, UTERU2006400, UTERU2006412, UTERU2006429, UTERU2006486, UTERU2006524, UTERU2006547,

[2618] UTERU2006568, UTERU2006643, UTERU2006651, UTERU2006705, UTERU2006899, UTERU2007004, UTERU2007075, UTERU2007128, UTERU2007253, UTERU2007267, UTERU2007444, UTERU2007499, UTERU2007639, UTERU2007724, UTERU2007924, UTERU2007942, UTERU2008018, UTERU2008019, UTERU2008027, UTERU2008077, UTERU2008130, UTERU2008347, UTERU2008426, UTERU2008516, UTERU2008561, UTERU2008653, UTERU2008705, UTERU2008707, UTERU2008747, UTERU2008785, UTERU2008845, UTERU2008901, UTERU2008930, UTERU2008962, UTERU2009094, UTERU2009120, UTERU2009131, UTERU2009147, UTERU2009206, UTERU2009283, UTERU2009335, UTERU2009414, UTERU2009435, UTERU2009483, UTERU2009510, UTERU2009538, UTERU2009540, UTERU2009776, UTERU2009904, UTERU2009951,

[2619] UTERU2009972, UTERU2010115, UTERU2010124, UTERU2010164, UTERU2010226, UTERU2010231, UTERU2010304, UTERU2010320, UTERU2010431, UTERU2010525, UTERU2010651, UTERU2010724, UTERU2010747, UTERU2011195, UTERU2011199, UTERU2011261, UTERU2011287, UTERU2011410, UTERU2011574, UTERU2011621, UTERU2011657, UTERU2011741, UTERU2011806, UTERU2011811, UTERU2011897, UTERU2011906, UTERU2011962, UTERU2011968, UTERU2012031, UTERU2012101, UTERU2012114, UTERU2012230, UTERU2012252, UTERU2012333, UTERU2012407, UTERU2012526, UTERU2012581, UTERU2012610, UTERU2012615, UTERU2012688, UTERU2012703, UTERU2012715, UTERU2012741, UTERU2012767, UTERU2012786, UTERU2012890, UTERU2012938, UTERU2012976, UTERU2013048, UTERU2013078,

[2620] UTERU2013231, UTERU2013262, UTERU2013280, UTERU2013322, UTERU2013483, UTERU2013491, UTERU2013586, UTERU2013926, UTERU2013976, UTERU2014001, UTERU2014024, UTERU2014223, UTERU2014398, UTERU2014464, UTERU2014548, UTERU2014601, UTERU2014631, UTERU2014668, UTERU2014678, UTERU2014728, UTERU2014998, UTERU2015062, UTERU2015087, UTERU2015108, UTERU2015190, UTERU2015198, UTERU2015202, UTERU2015405, UTERU2015640, UTERU2015653, UTERU2015830, UTERU2015880, UTERU2016147, UTERU2016157, UTERU2016426, UTERU2016464, UTERU2016669, UTERU2016757, UTERU2016761, UTERU2016799, UTERU2016896, UTERU2016902, UTERU2016981, UTERU2017123, UTERU2017303, UTERU2017421, UTERU2017623, UTERU2017632, UTERU2017761, UTERU2017762,

[2621] UTERU2017810, UTERU2017988, UTERU2018127, UTERU2018180, UTERU2018200, UTERU2018333, UTERU2018364, UTERU2018514, UTERU2018522, UTERU2018544, UTERU2018566, UTERU2018609, UTERU2018674, UTERU2018712, UTERU2018784, UTERU2018789, UTERU2018811, UTERU2018867, UTERU2018881, UTERU2018955, UTERU2019038, UTERU2019096, UTERU2019163, UTERU2019453, UTERU2019491, UTERU2019534, UTERU2019681, UTERU2019706, UTERU2019710, UTERU2019940, UTERU2019959, UTERU2019964, UTERU2020226, UTERU2020242, UTERU2020292, UTERU2020351, UTERU2020491, UTERU2020718, UTERU2021163, UTERU2021380, UTERU2021649, UTERU2021820, UTERU2022020, UTERU2022773, UTERU2022955, UTERU2022981, UTERU2023039, UTERU2023045, UTERU2023550, UTERU2023651,

[2622] UTERU2023687, UTERU2023712, UTERU2023941, UTERU2024002, UTERU2024042, UTERU2024141, UTERU2024481, UTERU2024656, UTERU2024758, UTERU2024820, UTERU2024881, UTERU2025025, UTERU2025041, UTERU2025301, UTERU2025366, UTERU2025415, UTERU2025579, UTERU2025645, UTERU2025891, UTERU2026025, UTERU2026090, UTERU2026142, UTERU2026203, UTERU2026775, UTERU2027023, UTERU2027369, UTERU2027591, UTERU2027616, UTERU2027941, UTERU2028377, UTERU2028734, UTERU2029503, UTERU2029660, UTERU2029742, UTERU2029953, UTERU2030213, UTERU2030270, UTERU2030280, UTERU2031060, UTERU2031084, UTERU2031268, UTERU2031295, UTERU2031521, UTERU2031611, UTERU2031703, UTERU2031834, UTERU2031851, UTERU2032075, UTERU2032220, UTERU2032279,

[2623] UTERU2032726, UTERU2033172, UTERU2033375, UTERU2033382, UTERU2033420, UTERU2033530, UTERU2033577, UTERU2034053, UTERU2034147, UTERU2034695, UTERU2035114, UTERU2035187, UTERU2035231, UTERU2035306, UTERU2035323, UTERU2035328, UTERU2035331, UTERU2035452, UTERU2035469, UTERU2035503, UTERU2035745, UTERU2035908, UTERU2035926, UTERU2035978, UTERU2036089, UTERU2036347, UTERU2036507, UTERU2036512, UTERU2036530, UTERU2036623, UTERU2036690, UTERU2037224, UTERU2037361, UTERU2037423, UTERU2037577, UTERU2037674, UTERU2037791, UTERU2037843, UTERU2038171, UTERU2038251, UTERU3000226, UTERU3000298, UTERU3000402, UTERU3000645, UTERU3000665, UTERU3000670, UTERU3000727, UTERU3000738, UTERU3000828, UTERU3000844,

[2624] UTERU3000899, UTERU3000959, UTERU3001029, UTERU3001053, UTERU3001059, UTERU3001158, UTERU3001240, UTERU3001394, UTERU3001542, UTERU3001558, UTERU3001571, UTERU3001585, UTERU3001632, UTERU3001652, UTERU3001766, UTERU3001988, UTERU3002209, UTERU3002218, UTERU3002383, UTERU3002600, UTERU3002620, UTERU3002667, UTERU3002701, UTERU3002731, UTERU3002768, UTERU3002786, UTERU3002993, UTERU3003116, UTERU3003135, UTERU3003178, UTERU3003465, UTERU3003495, UTERU3003523, UTERU3003660, UTERU3003774, UTERU3003776, UTERU3004384, UTERU3004418, UTERU3004523, UTERU3004616, UTERU3004635, UTERU3004709, UTERU3004938, UTERU3004992, UTERU3005049, UTERU3005159, UTERU3005205, UTERU3005230, UTERU3005264, UTERU3005422,

[2625] UTERU3005460, UTERU3005536, UTERU3005585, UTERU3005767, UTERU3005970, UTERU3006008, UTERU3006228, UTERU3006308, UTERU3006538, UTERU3006640, UTERU3006687, UTERU3006720, UTERU3006798, UTERU3006884, UTERU3007021, UTERU3007104, UTERU3007108, UTERU3007134, UTERU3007419, UTERU3007640, UTERU3007731, UTERU3007913, UTERU3008280, UTERU3008463, UTERU3008660, UTERU3008671, UTERU3008722, UTERU3008917, UTERU3009259, UTERU3009490, UTERU3009517, UTERU3009690, UTERU3009775, UTERU3009871, UTERU3009979, UTERU3009987, UTERU3010029, UTERU3010409, UTERU3010526, UTERU3010892, UTERU3010919, UTERU3011063, UTERU3011092, UTERU3011273, UTERU3011398, UTERU3011558, UTERU3011579, UTERU3011795, UTERU3011837, UTERU3012293,

[2626] UTERU3012414, UTERU3012476, UTERU3012599, UTERU3012999, UTERU3013167, UTERU3013302, UTERU3013781, UTERU3014274, UTERU3014446, UTERU3014611, UTERU3014647, UTERU3014791, UTERU3014906, UTERU3015011, UTERU3015086, UTERU3015299, UTERU3015412, UTERU3015500, UTERU3015647, UTERU3015844, UTERU3016070, UTERU3016273, UTERU3016274, UTERU3016308, UTERU3016789, UTERU3017176, UTERU3017441, UTERU3017626, UTERU3017995, UTERU3018154, UTERU3018172, UTERU3018255, UTERU3018711, UTERU3019078

[2627] Of the 17,176 genes that include the cDNAs of the present invention, genes whose expression levels were high enough to detect in each of the SALGL, SKMUS, SKNMC, SKNSH, SMINT, SPLEN, and STOMA libraries were analyzed for expression frequency. The analysis results are described below. Each is a relative value, where the expression level over all tissues is taken as 100. The larger this value, the greater the level of expression.

TABLE 37

| Clone Name | SALGL | SKMUS | SKNMC | SKNSH | SMINT | SPLEN | STOMA |
|---|---|---|---|---|---|---|---|
| 3NB691000116 | 0 | 0 | 0 | 0 | 0 | 5.658 | 0 |
| 3NB691000173 | 0 | 0 | 6.155 | 5.422 | 0 | 0 | 0 |
| 3NB692000281 | 0 | 0 | 0 | 1.511 | 0 | 0.766 | 0 |
| 3NB692000330 | 0 | 0 | 3.438 | 0 | 0 | 0.767 | 0 |
| 3NB692000545 | 0 | 0 | 0 | 0 | 0 | 4.908 | 0 |
| 3NB692000912 | 0 | 0 | 0 | 9.678 | 1.658 | 0.817 | 0 |
| 3NB692000973 | 0 | 0 | 0 | 48.489 | 0 | 0 | 0 |
| 3NB692001002 | 0 | 0 | 0 | 26.866 | 0 | 0 | 0 |
| 3NB692001022 | 0 | 0 | 19.398 | 0 | 0 | 0 | 0 |
| 3NB692001334 | 0 | 0 | 0 | 3.686 | 0.947 | 0 | 0 |
| 3NB692001339 | 0 | 16.526 | 0 | 0 | 0 | 0 | 0 |
| 3NB692001442 | 0 | 34.046 | 0 | 0 | 0 | 2.101 | 0 |
| 3NB692001459 | 0 | 0 | 0 | 38.816 | 0 | 0 | 0 |
| 3NB692001528 | 0 | 0 | 18.338 | 0 | 0 | 0 | 0 |
| 3NB692001538 | 0 | 0 | 0 | 0 | 7.010 | 0 | 0 |
| ADRGL1000144 | 0 | 0 | 26.053 | 0 | 0 | 0 | 0 |
| ADRGL2000117 | 0 | 0 | 0 | 0 | 30.118 | 14.848 | 0 |
| ADRGL2000323 | 0 | 0 | 0 | 0 | 0 | 23.091 | 0 |
| ADRGL2002477 | 0 | 0 | 13.262 | 0 | 0 | 2.960 | 0 |
| ASTRO1000165 | 0 | 0 | 0 | 15.219 | 0 | 0 | 0 |
| ASTRO2000480 | 0 | 0 | 22.070 | 0 | 0 | 0 | 0 |
| ASTRO2000914 | 0 | 0 | 15.174 | 0 | 0 | 0 | 0 |
| ASTRO2001076 | 0 | 0 | 0 | 9.759 | 0 | 0 | 0 |
| ASTRO2001249 | 0 | 67.038 | 0 | 0 | 0 | 0 | 0 |
| ASTRO2001806 | 0 | 0 | 0 | 9.823 | 0 | 0 | 0 |
| ASTRO2001823 | 0 | 0 | 0 | 9.967 | 0 | 2.525 | 0 |
| ASTRO2003024 | 0 | 6.678 | 0 | 0 | 3.345 | 0 | 0 |
| ASTRO2005360 | 0 | 0 | 0 | 0 | 0 | 10.378 | 0 |
| ASTRO2005553 | 0 | 0 | 0 | 0 | 0 | 4.508 | 0 |
| ASTRO2005687 | 0 | 0 | 0 | 15.307 | 0 | 0 | 0 |
| ASTRO2005896 | 0 | 0 | 69.231 | 0 | 0 | 0 | 0 |
| ASTRO2007047 | 0 | 0 | 0 | 0 | 0 | 3.636 | 0 |
| ASTRO2010819 | 0 | 0 | 5.245 | 0 | 2.374 | 2.341 | 0 |
| ASTRO2012552 | 0 | 0 | 0 | 10.149 | 0 | 0 | 10.059 |
| ASTRO2013585 | 0 | 0 | 0 | 3.347 | 3.440 | 2.544 | 0 |
| ASTRO2016491 | 0 | 0 | 0 | 0 | 1.777 | 0.876 | 0 |
| ASTRO2018540 | 0 | 0 | 12.123 | 0 | 5.488 | 2.705 | 0 |
| BGGI11000123 | 0 | 0 | 0 | 0 | 0 | 2.438 | 0 |
| BGGI12000054 | 0 | 0 | 0 | 0 | 0 | 0.410 | 0 |
| BGGI12000616 | 0 | 6.300 | 0 | 0 | 0 | 0 | 0 |
| BGGI12000839 | 0 | 0 | 0 | 5.063 | 2.602 | 0 | 0 |
| BGGI12001075 | 0 | 13.948 | 0 | 0 | 0 | 0 | 0 |
| BGGI12001714 | 0 | 0 | 0 | 17.511 | 0 | 0 | 0 |
| BLADE2000256 | 0 | 0 | 0 | 0 | 0 | 19.862 | 0 |
| BLADE2001575 | 0 | 0 | 0 | 0 | 33.455 | 0 | 0 |
| BLADE2004849 | 0 | 0 | 0 | 0 | 0 | 12.894 | 0 |
| BNGH41000137 | 0 | 0 | 0 | 0 | 0 | 7.548 | 0 |
| BNGH41000190 | 0 | 0 | 0 | 0 | 0 | 4.402 | 0 |
| BNGH41000235 | 0 | 0 | 0 | 0 | 22.999 | 0 | 0 |
| BNGH42000360 | 0 | 2.217 | 0 | 0 | 0.555 | 0 | 0 |
| BNGH42000739 | 0 | 0 | 0 | 0 | 2.196 | 0 | 0 |
| BNGH42001576 | 0 | 0 | 0 | 0 | 17.218 | 0 | 0 |
| BNGH42002168 | 0 | 0 | 20.744 | 0 | 0 | 0 | 0 |
| BNGH42007366 | 0 | 0 | 0 | 0 | 0 | 0 | 43.520 |
| BNGH42007709 | 0 | 0 | 0 | 1.580 | 0.812 | 1.201 | 3.133 |
| BNGH42009025 | 0 | 0 | 10.868 | 9.572 | 0 | 0 | 0 |
| BRACE1000042 | 0 | 0 | 0 | 0 | 0 | 5.296 | 0 |
| BRACE1000051 | 0 | 0 | 0 | 0 | 0 | 31.184 | 0 |
| BRACE1000115 | 0 | 0 | 0 | 0 | 0.661 | 0 | 0 |
| BRACE1000131 | 0 | 0 | 0 | 0 | 0 | 5.436 | 0 |
| BRACE2000267 | 0 | 0 | 0 | 0 | 0 | 23.250 | 0 |
| BRACE2000307 | 0 | 0 | 0 | 8.088 | 0 | 0 | 0 |
| BRACE2000332 | 0 | 0 | 0 | 18.638 | 0 | 9.444 | 18.472 |
| BRACE2000347 | 0 | 0 | 0 | 0 | 9.122 | 0 | 0 |
| BRACE2000525 | 0 | 0 | 0 | 0 | 0 | 36.744 | 0 |
| BRACE2000753 | 0 | 0 | 0 | 0 | 0 | 52.985 | 0 |
| BRACE2000864 | 0 | 14.875 | 0 | 0 | 0 | 0 | 3.591 |
| BRACE2001151 | 0 | 0 | 0 | 0 | 0 | 11.229 | 0 |
| BRACE2001313 | 0 | 0 | 0 | 0 | 0 | 52.985 | 0 |
| BRACE2001673 | 0 | 0 | 0 | 0 | 0 | 0 | 1.595 |
| BRACE2001709 | 0 | 0 | 0 | 0 | 11.452 | 16.937 | 0 |
| BRACE2002050 | 0 | 0 | 0 | 19.911 | 0 | 0 | 0 |
| BRACE2002091 | 0 | 0 | 0 | 0 | 0 | 3.674 | 0 |
| BRACE2002441 | 0 | 0 | 8.779 | 0 | 0 | 1.959 | 0 |
| BRACE2002661 | 0 | 0 | 0 | 0 | 10.162 | 5.010 | 19.598 |
| BRACE2002677 | 0 | 0 | 0 | 0 | 0 | 3.358 | 0 |
| BRACE2002807 | 0 | 0 | 0 | 0 | 0 | 56.062 | 0 |
| BRACE2002860 | 0 | 0 | 0 | 0 | 0 | 13.139 | 0 |
| BRACE2003172 | 0 | 0 | 2.533 | 0 | 2.294 | 0 | 0 |
| BRACE2003254 | 0 | 0 | 0 | 0 | 3.195 | 0 | 0 |
| BRACE2003319 | 0 | 0 | 0 | 15.732 | 0 | 0 | 0 |
| BRACE2003827 | 0 | 0 | 0 | 6.016 | 0 | 0 | 0 |
| BRACE2003845 | 0 | 0 | 0 | 0 | 48.233 | 7.926 | 0 |
| BRACE2003846 | 0 | 0 | 0 | 0 | 0 | 1.134 | 0 |
| BRACE2003892 | 0 | 0 | 0 | 0 | 0 | 3.797 | 0 |
| BRACE2003904 | 0 | 0 | 0 | 0 | 0 | 9.020 | 17.642 |
| BRACE2003944 | 0 | 3.648 | 0 | 0 | 0 | 0.901 | 0 |
| BRACE2003954 | 0 | 0 | 0 | 0 | 83.254 | 0 | 0 |
| BRACE2005087 | 0 | 0 | 8.086 | 0 | 0 | 3.609 | 0 |
| BRACE2005298 | 0 | 0 | 0 | 0 | 0 | 52.985 | 0 |
| BRACE2005434 | 0 | 0 | 0 | 9.468 | 0 | 0 | 0 |
| BRACE2006055 | 0 | 0 | 15.594 | 0 | 0 | 0 | 0 |
| BRACE2006162 | 0 | 10.903 | 0 | 0 | 0 | 0 | 0 |
| BRACE2006258 | 0 | 0 | 6.385 | 5.624 | 0 | 0 | 0 |
| BRACE2006264 | 0 | 0 | 0 | 0 | 0 | 14.683 | 0 |
| BRACE2006363 | 0 | 0 | 0 | 0 | 32.705 | 0 | 0 |
| BRACE2006397 | 0 | 0 | 0 | 0 | 0 | 1.027 | 2.009 |
| BRACE2006459 | 0 | 0 | 0 | 0 | 0 | 71.023 | 0 |
| BRACE2006514 | 0 | 0 | 13.545 | 0 | 0 | 0 | 0 |
| BRACE2006537 | 0 | 0 | 0 | 0 | 3.798 | 1.872 | 14.648 |
| BRACE2006598 | 0 | 0 | 0 | 0 | 0 | 50.322 | 0 |
| BRACE2006900 | 0 | 0 | 0 | 3.533 | 0 | 3.580 | 0 |
| BRACE2007064 | 0 | 0 | 0 | 0 | 0 | 2.827 | 0 |
| BRACE2007068 | 0 | 0 | 0 | 0 | 0 | 43.567 | 0 |
| BRACE2007089 | 0 | 0 | 0 | 0 | 0 | 2.946 | 0 |
| BRACE2007109 | 0 | 0 | 0 | 0 | 3.368 | 0 | 0 |
| BRACE2007191 | 0 | 0 | 0 | 4.716 | 0 | 2.390 | 0 |
| BRACE2007254 | 0 | 0 | 0 | 0 | 0 | 12.950 | 0 |
| BRACE2007295 | 0 | 0 | 73.303 | 0 | 0 | 0 | 0 |
| BRACE2007518 | 0 | 0 | 0 | 0 | 0 | 3.948 | 0 |
| BRACE2007567 | 0 | 0 | 0 | 0 | 0 | 7.242 | 9.443 |
| BRACE2007671 | 0 | 0 | 12.052 | 0 | 0 | 0 | 0 |
| BRACE2007708 | 0 | 0 | 0 | 0 | 7.499 | 0 | 0 |
| BRACE2007767 | 0 | 21.937 | 0 | 0 | 0 | 0 | 0 |
| BRACE2008216 | 0 | 0 | 0 | 0 | 46.720 | 0 | 0 |
| BRACE2008358 | 0 | 0 | 0 | 0 | 0 | 7.884 | 0 |
| BRACE200$$385 | 0 | 0 | 0 | 0 | 0 | 3.633 | 0 |
| BRACE2008553 | 0 | 29.305 | 0 | 0 | 0 | 0 | 0 |
| BRACE2008653 | 0 | 0 | 0 | 0 | 0 | 0.917 | 0 |
| BRACE2008968 | 0 | 4.097 | 0 | 0 | 6.155 | 0 | 0 |
| BRACE2008999 | 0 | 49.592 | 0 | 0 | 0 | 0 | 0 |
| BRACE2009037 | 0 | 2.058 | 0 | 2.005 | 1.030 | 0 | 1.987 |
| BRACE2009044 | 0 | 0 | 0 | 0 | 35.405 | 17.454 | 0 |
| BRACE2009366 | 0 | 0 | 0 | 0 | 0 | 6.285 | 0 |
| BRACE2009517 | 0 | 0 | 0 | 0 | 0 | 14.155 | 0 |
| BRACE2009558 | 0 | 0 | 22.414 | 0 | 0 | 5.002 | 19.567 |
| BRACE2011703 | 0 | 0 | 0 | 0 | 0 | 71.023 | 0 |
| BRACE2012061 | 0 | 0 | 0 | 0 | 0 | 29.308 | 0 |
| BRACE2012528 | 0 | 0 | 0 | 0 | 0 | 0.825 | 0 |
| BRACE2012814 | 0 | 0 | 0 | 0 | 5.411 | 0 | 0 |
| BRACE2013911 | 0 | 0 | 0 | 0 | 0 | 13.077 | 0 |
| BRACE2014818 | 0 | 0 | 0 | 0 | 0 | 71.023 | 0 |
| BRACE2015287 | 0 | 0 | 0 | 0 | 8.104 | 0 | 0 |
| BRACE2015969 | 0 | 0 | 0 | 0 | 0 | 71.023 | 0 |
| BRACE2019244 | 0 | 0 | 0 | 0 | 0 | 71.023 | 0 |
| BRACE2019327 | 0 | 63.143 | 0 | 0 | 0 | 0 | 0 |
| BRACE2019371 | 0 | 0 | 0 | 0 | 52.763 | 26.012 | 0 |
| BRACE2021143 | 0 | 0 | 0 | 0 | 27.925 | 0 | 0 |
| BRACE2021478 | 0 | 0 | 0 | 0 | 45.681 | 0 | 0 |
| BRACE2021541 | 0 | 0 | 0 | 0 | 0 | 27.693 | 0 |
| BRACE2022333 | 0 | 0 | 0 | 0 | 0 | 15.444 | 0 |
| BRACE2022389 | 0 | 0 | 0 | 0 | 0 | 0 | 72.312 |
| BRACE2022638 | 0 | 0 | 11.620 | 5.118 | 0 | 2.593 | 0 |
| BRACE2024627 | 0 | 0 | 0 | 0 | 0 | 0 | 83.309 |
| BRACE2026836 | 0 | 48.621 | 0 | 0 | 0 | 0 | 0 |
| BRACE2037295 | 0 | 0 | 25.571 | 0 | 0 | 0 | 0 |
| BRACE2039624 | 0 | 0 | 15.084 | 0 | 3.414 | 1.683 | 6.584 |
| BRACE2043381 | 0 | 0 | 0 | 0 | 0 | 18.723 | 0 |
| BRACE3005938 | 0 | 0 | 0 | 0 | 0 | 5.747 | 0 |
| BRACE3010428 | 0 | 0 | 0 | 0 | 0 | 1.991 | 0 |
| BRALZ2006288 | 0 | 0 | 0 | 0 | 38.482 | 0 | 0 |
| BRALZ2009482 | 0 | 0 | 0 | 0 | 1.311 | 0 | 0 |
| BRAMY2000231 | 0 | 0 | 0 | 0 | 0 | 63.323 | 0 |
| BRAMY2000354 | 0 | 0 | 0 | 0 | 0 | 2.390 | 0 |
| BRAMY2003325 | 0 | 87.489 | 0 | 0 | 0 | 0 | 0 |
| BRAMY2004521 | 0 | 0 | 18.477 | 0 | 0 | 0 | 0 |
| BRAMY2007613 | 0 | 0 | 0 | 0 | 0 | 2.330 | 0 |
| BRAMY2012426 | 0 | 0 | 0 | 0 | 0 | 0 | 42.064 |
| BRAMY2015782 | 0 | 0 | 0 | 0 | 0 | 6.812 | 0 |
| BRAMY2015833 | 0 | 0 | 0 | 0 | 16.267 | 0 | 31.370 |
| BRAMY2019554 | 0 | 0 | 0 | 0 | 8.448 | 0 | 0 |
| BRAMY2020427 | 0 | 0 | 0 | 4.066 | 0 | 0 | 0 |
| BRAMY2021710 | 0 | 0 | 0 | 0 | 26.542 | 13.085 | 0 |
| BRAMY2023719 | 0 | 0 | 0 | 0 | 0 | 10.401 | 0 |
| BRAMY2027739 | 0 | 0 | 0 | 0 | 0 | 2.341 | 0 |
| BRAMY2029988 | 0 | 0 | 0 | 0 | 0 | 20.491 | 0 |
| BRAMY2038832 | 0 | 0 | 0 | 0 | 43.012 | 0 | 0 |
| BRAMY2040095 | 0 | 0 | 0 | 2.347 | 1.206 | 1.189 | 0 |
| BRAMY2045530 | 0 | 0 | 0 | 0 | 0 | 16.412 | 0 |
| BRAMY3004377 | 0 | 0 | 0 | 0 | 0 | 1.443 | 0 |
| BRAMY3010008 | 0 | 0 | 0 | 0 | 0 | 1.012 | 0 |
| BRAMY4002628 | 0 | 0 | 0 | 0 | 0 | 12.356 | 0 |
| BRAWH1000040 | 0 | 0 | 0 | 0 | 4.856 | 2.394 | 0 |
| BRAWH1000083 | 0 | 0 | 0 | 0 | 0 | 7.882 | 0 |
| BRAWH1000093 | 0 | 0 | 0 | 0 | 0 | 6.419 | 0 |
| BRAWH1000094 | 0 | 0 | 0 | 0 | 14.857 | 0 | 0 |
| BRAWH2000177 | 0 | 0 | 0 | 0 | 0 | 13.909 | 0 |
| BRAWH2000417 | 0 | 0 | 0 | 0 | 0 | 1.075 | 0 |
| BRAWH2000460 | 0 | 0 | 0 | 4.191 | 0 | 0 | 0 |
| BRAWH2000522 | 0 | 0 | 0 | 37.336 | 0 | 0 | 0 |
| BRAWH2000588 | 0 | 0 | 0 | 0 | 0 | 2.183 | 0 |
| BRAWH2000633 | 0 | 0 | 0 | 0 | 4.678 | 2.306 | 0 |
| BRAWH2000839 | 0 | 0 | 0 | 0 | 0 | 2.143 | 0 |
| BRAWH2000924 | 0 | 0 | 0 | 0 | 0 | 0.499 | 0 |
| BRAWH2000944 | 0 | 0 | 0 | 0 | 0 | 9.075 | 0 |
| BRAWH2001092 | 0 | 0 | 2.740 | 1.207 | 1.240 | 1.529 | 0 |
| BRAWH2001103 | 0 | 0 | 0 | 0 | 23.189 | 0 | 0 |
| BRAWH2001141 | 0 | 0 | 0 | 0 | 0 | 26.522 | 0 |
| BRAWH2001166 | 0 | 0 | 0 | 0 | 0 | 5.491 | 0 |
| BRAWH2001186 | 0 | 0 | 0 | 0 | 0 | 9.913 | 0 |
| BRAWH2001321 | 0 | 0 | 0 | 0 | 3.029 | 0 | 0 |
| BRAWH2002318 | 0 | 0 | 0 | 0 | 0 | 46.425 | 0 |
| BRAWH2002601 | 0 | 0 | 0 | 0 | 0 | 17.305 | 0 |
| BRAWH2003025 | 0 | 0 | 0 | 0 | 0 | 10.550 | 0 |
| BRAWH2003818 | 0 | 0 | 0 | 20.781 | 0 | 0 | 0 |
| BRAWH2004095 | 0 | 0 | 0 | 0 | 0 | 4.113 | 0 |
| BRAWH2004580 | 0 | 0 | 0 | 0 | 0 | 63.265 | 0 |
| BRAWH2005661 | 0 | 0 | 0 | 0 | 0 | 2.781 | 10.879 |
| BRAWH2006405 | 0 | 0 | 0 | 0 | 45.793 | 0 | 0 |
| BRAWH2006996 | 0 | 0 | 0 | 0 | 0 | 0 | 23.147 |
| BRAWH2007605 | 0 | 0 | 0 | 0 | 0 | 3.568 | 0 |
| BRAWH2007800 | 0 | 0 | 0 | 0 | 0 | 4.086 | 0 |
| BRAWH2008128 | 0 | 0 | 0 | 0 | 77.919 | 0 | 0 |
| BRAWH2008219 | 0 | 0 | 0 | 0 | 0 | 25.068 | 0 |
| BRAWH2008292 | 0 | 0 | 0 | 0 | 0 | 63.499 | 0 |
| BRAWH2009304 | 0 | 0 | 0 | 26.931 | 0 | 0 | 0 |
| BRAWH2011286 | 0 | 0 | 69.568 | 0 | 0 | 0 | 0 |
| BRAWH2011343 | 0 | 0 | 0 | 0 | 0 | 12.204 | 0 |
| BRAWH2014188 | 0 | 0 | 0 | 0 | 0 | 1.245 | 0 |
| BRAWH2014645 | 0 | 0 | 0 | 0 | 3.730 | 3.678 | 0 |
| BRAWH2016106 | 0 | 0 | 0 | 0 | 0 | 63.499 | 0 |
| BRAWH2016166 | 0 | 0 | 0 | 0 | 0 | 13.156 | 0 |
| BRAWH2016209 | 0 | 58.527 | 0 | 0 | 0 | 14.450 | 0 |
| BRAWH2016269 | 0 | 0 | 10.277 | 0 | 0 | 0 | 0 |
| BRAWH2017685 | 0 | 0 | 0 | 0 | 1.791 | 1.766 | 0 |
| BRAWH2018526 | 0 | 0 | 2.399 | 2.113 | 0 | 0 | 0 |
| BRAWH2018527 | 0 | 59.979 | 0 | 0 | 0 | 0 | 0 |
| BRAWH2018729 | 0 | 0 | 0 | 0 | 0 | 5.184 | 0 |
| BRAWH3002467 | 0 | 0 | 0 | 0 | 0 | 63.499 | 0 |
| BRAWH3002853 | 0 | 0 | 0 | 0 | 5.220 | 1.287 | 0 |
| BRAWH3008931 | 0 | 0 | 0 | 0 | 12.222 | 0 | 0 |
| BRAWH3024989 | 0 | 16.693 | 0 | 0 | 0 | 0 | 0 |
| BRCAN1000149 | 0 | 0 | 0 | 0 | 0 | 43.126 | 0 |
| BRCAN2003944 | 0 | 0 | 2.195 | 5.801 | 0 | 0.490 | 0 |
| BRCAN2007409 | 0 | 0 | 0 | 0 | 0 | 10.439 | 0 |
| BRCAN2007700 | 0 | 0 | 0 | 0 | 0 | 63.468 | 0 |
| BRCAN2016619 | 0 | 0 | 0 | 0 | 0 | 45.836 | 0 |
| BRCAN2018566 | 0 | 0 | 0 | 0 | 0 | 43.126 | 0 |
| BRCAN2028036 | 0 | 0 | 0 | 0 | 0 | 4.200 | 0 |
| BRCOC1000040 | 0 | 0 | 0 | 0 | 0 | 5.130 | 0 |
| BRCOC2003187 | 0 | 0 | 0 | 0 | 8.325 | 0 | 10.704 |
| BRCOC2010730 | 0 | 0 | 0 | 0 | 0 | 18.804 | 0 |
| BRCOC2012172 | 0 | 0 | 0 | 0 | 9.926 | 0 | 0 |
| BRCOC2015908 | 0 | 0 | 0 | 0 | 0 | 32.934 | 0 |
| BRCOC2018877 | 0 | 0 | 0 | 0 | 0 | 32.934 | 0 |
| BRHIP1000104 | 0 | 0 | 0 | 0 | 0 | 1.137 | 0 |
| BRHIP2000021 | 0 | 0 | 88.427 | 0 | 0 | 0 | 0 |
| BRHIP2000534 | 0 | 0 | 0 | 0 | 0 | 0.595 | 0 |
| BRHIP2000819 | 0 | 0 | 0 | 0 | 7.623 | 3.758 | 14.701 |
| BRHIP2008269 | 0 | 0 | 0 | 0 | 0 | 48.408 | 0 |
| BRHIP2010217 | 0 | 0 | 43.536 | 0 | 0 | 0 | 0 |
| BRHIP2011491 | 0 | 11.648 | 0 | 0 | 0 | 0 | 0 |
| BRHIP2014063 | 0 | 0 | 0 | 0 | 0 | 63.033 | 0 |
| BRHIP2015153 | 0 | 0 | 0 | 0 | 0 | 17.429 | 0 |
| BRHIP2018712 | 0 | 14.270 | 0 | 0 | 0 | 14.092 | 0 |
| BRHIP2019186 | 0 | 0 | 0 | 0 | 0 | 0 | 13.430 |
| BRHIP2020799 | 0 | 0 | 0 | 0 | 0 | 8.804 | 0 |
| BRHIP2021762 | 0 | 0 | 0 | 0 | 0 | 4.847 | 0 |
| BRHIP2023888 | 0 | 0 | 0 | 0 | 1.298 | 0 | 0 |
| BRHIP2024398 | 0 | 0 | 0 | 0 | 0 | 14.647 | 0 |
| BRHIP2024742 | 0 | 0 | 0 | 0 | 0 | 2.170 | 0 |
| BRHIP3000017 | 0 | 0 | 0 | 0 | 15.559 | 0 | 0 |
| BRHIP3000111 | 0 | 0 | 0 | 0 | 3.613 | 0 | 0 |
| BRHIP3004215 | 0 | 0 | 0 | 0 | 0 | 23.618 | 0 |
| BRSSN2003012 | 0 | 0 | 0 | 0 | 0 | 7.525 | 0 |
| BRSSN2004679 | 0 | 0 | 0 | 0 | 0 | 26.476 | 0 |
| BRSSN2009119 | 0 | 0 | 0 | 0 | 0 | 31.852 | 0 |
| BRSSN2009518 | 0 | 0 | 0 | 11.827 | 6.078 | 0 | 0 |
| BRSSN2011653 | 0 | 0 | 38.627 | 0 | 0 | 0 | 0 |
| BRSSN2014299 | 0 | 0 | 0 | 0 | 0 | 6.428 | 0 |
| BRSSN2015238 | 0 | 0 | 0 | 0 | 0 | 11.911 | 0 |
| BRSTN1000083 | 0 | 0 | 0 | 0 | 0 | 1.111 | 0 |
| BRSTN2011961 | 0 | 0 | 0 | 0 | 1.022 | 1.008 | 0 |
| BRSTN2012069 | 0 | 0.067 | 0.958 | 0.844 | 1.202 | 0.543 | 1.995 |
| BRSTN2012174 | 0 | 0 | 3.153 | 0 | 0.714 | 0 | 0 |
| BRSTN2013171 | 0 | 0 | 0 | 0 | 0 | 6.028 | 0 |
| BRSTN2016470 | 0 | 6.169 | 0 | 0 | 0 | 0 | 1.490 |
| BRSTN2016992 | 0 | 3.468 | 0 | 0 | 0 | 0 | 0 |
| BRSTN2017104 | 0 | 0 | 0 | 0 | 0 | 3.392 | 0 |
| BRTHA2005864 | 0 | 0 | 0 | 0 | 0 | 2.823 | 11.042 |
| BRTHA2016215 | 0 | 0 | 0 | 0 | 0 | 61.070 | 0 |
| BRTHA2026071 | 0 | 0 | 0 | 0 | 43.314 | 0 | 0 |
| BRTHA2027229 | 0 | 0 | 0 | 0 | 3.230 | 0 | 0 |
| BRTHA2033469 | 0 | 0 | 0 | 0 | 0 | 61.070 | 0 |
| BRTHA3003736 | 0 | 0 | 16.769 | 14.770 | 0 | 0 | 0 |
| BRTHA3011194 | 0 | 0 | 27.553 | 0 | 0 | 0 | 0 |
| BRTHA3021971 | 0 | 0 | 0 | 0 | 6.849 | 0 | 0 |
| CHONS2002829 | 0 | 0 | 0 | 0 | 0 | 2.842 | 11.118 |
| COLON2002443 | 0 | 0 | 0 | 0 | 0 | 0 | 30.687 |
| CTONG1000010 | 0 | 0 | 0 | 0 | 0 | 11.278 | 0 |
| CTONG1000052 | 0 | 0 | 0 | 0 | 0 | 3.153 | 0 |
| CTONG1000094 | 0 | 0 | 0 | 0 | 0 | 0.678 | 0 |
| CTONG1000241 | 0 | 0 | 0 | 0 | 0 | 3.690 | 0 |
| CTONG1000341 | 0 | 0 | 0 | 0 | 0 | 48.294 | 0 |
| CTONG2000063 | 0 | 0 | 16.688 | 0 | 0 | 0 | 0 |
| CTONG2000452 | 0 | 0 | 0 | 0 | 0 | 0 | 19.820 |
| CTONG2000508 | 0 | 0 | 0 | 0 | 0 | 2.748 | 0 |
| CTONG2001226 | 0 | 0 | 0 | 0 | 0 | 0 | 51.655 |
| CTONG2001932 | 0 | 0 | 0 | 0 | 0 | 17.973 | 0 |
| CTONG2002270 | 0 | 0 | 0 | 0 | 0 | 0.923 | 0 |
| CTONG2002558 | 0 | 0 | 0 | 0 | 0 | 48.294 | 0 |
| CTONG2002744 | 0 | 0 | 0 | 0 | 0 | 1.024 | 0 |
| CTONG2003298 | 0 | 0 | 0 | 0 | 0 | 1.262 | 0 |
| CTONG2003361 | 0 | 0 | 0 | 0 | 0 | 40.876 | 0 |
| CTONG2003680 | 0 | 0 | 80.715 | 0 | 0 | 0 | 0 |
| CTONG2004397 | 0 | 0 | 0 | 0 | 0 | 48.294 | 0 |
| CTONG2005553 | 0 | 0 | 0 | 0 | 0 | 1.246 | 0 |
| CTONG2006004 | 0 | 0 | 0 | 0 | 0 | 3.672 | 0 |
| CTONG2006562 | 0 | 0 | 10.914 | 0 | 0 | 0 | 0 |
| CTONG2006611 | 0 | 0 | 0 | 0 | 0 | 12.562 | 0 |
| CTONG2006709 | 0 | 0 | 0 | 0 | 0 | 8.998 | 0 |
| CTONG2006932 | 0 | 0 | 0 | 0 | 0 | 1.914 | 0 |
| CTONG2007007 | 0 | 13.119 | 0 | 0 | 0 | 0 | 0 |
| CTONG2007078 | 0 | 0 | 9.962 | 8.775 | 0 | 0 | 0 |
| CTONG2007500 | 0 | 0 | 0 | 0 | 5.308 | 2.617 | 0 |
| CTONG2008506 | 0 | 0 | 0 | 6.461 | 0 | 0 | 0 |
| CTONG2010348 | 0 | 0 | 0 | 0 | 0 | 3.080 | 0 |
| CTONG2010408 | 0 | 0 | 0 | 0 | 30.235 | 0 | 0 |
| CTONG2011716 | 0 | 0 | 0 | 0 | 0 | 48.294 | 0 |
| CTONG2012425 | 0 | 0 | 0 | 0 | 0 | 48.294 | 0 |
| CTONG2012452 | 0 | 0 | 2.776 | 0 | 2.513 | 0 | 4.847 |
| CTONG2012847 | 0 | 0 | 0 | 0 | 0 | 0 | 11.719 |
| CTONG2013348 | 0 | 0 | 0 | 0 | 0 | 9.570 | 0 |
| CTONG2013907 | 0 | 0 | 16.806 | 0 | 0 | 3.750 | 0 |
| CTONG2013985 | 0 | 0 | 45.651 | 0 | 0 | 0 | 0 |
| CTONG2014165 | 0 | 0 | 0 | 0 | 0 | 16.752 | 0 |
| CTONG2014389 | 0 | 0 | 0 | 0 | 9.321 | 0 | 0 |
| CTONG2014954 | 0 | 0 | 0 | 0 | 43.143 | 0 | 0 |
| CTONG2015091 | 0 | 0 | 6.331 | 0 | 0 | 0 | 0 |
| CTONG2015815 | 0 | 0 | 68.575 | 0 | 0 | 0 | 0 |
| CTONG2016185 | 0 | 0 | 0 | 0 | 0 | 4.522 | 0 |
| CTONG2016575 | 0 | 0 | 3.876 | 0 | 0 | 0.865 | 0 |
| CTONG2016869 | 0 | 0 | 0 | 0 | 0 | 4.595 | 0 |
| CTONG2017444 | 0 | 0 | 0 | 0 | 0 | 0 | 25.060 |
| CTONG2017998 | 0 | 0 | 0 | 0 | 0 | 4.358 | 0 |
| CTONG2018211 | 0 | 0 | 0 | 0 | 12.035 | 0 | 0 |
| CTONG2018383 | 0 | 0 | 0 | 0 | 0 | 7.864 | 0 |
| CTONG2018637 | 0 | 0 | 0 | 0 | 0 | 11.413 | 0 |
| CTONG2018898 | 0 | 0 | 0 | 0 | 0 | 5.027 | 0 |
| CTONG2021289 | 0 | 0 | 0 | 0 | 0 | 17.899 | 0 |
| CTONG2028124 | 0 | 0 | 0 | 0 | 3.547 | 0.874 | 0 |
| CTONG3003972 | 0 | 0 | 0 | 0 | 0 | 48.294 | 0 |
| CTONG3008894 | 0 | 0 | 5.667 | 0 | 0 | 0 | 0 |
| CTONG3009239 | 0 | 0 | 0 | 0 | 0 | 2.512 | 0 |
| D3OST1000270 | 0 | 18.206 | 0 | 0 | 0 | 0 | 0 |
| D3OST2002068 | 0 | 0 | 1.675 | 0 | 0 | 0.374 | 0 |
| D90ST2002608 | 0 | 0 | 0 | 0 | 0 | 19.379 | 0 |
| DFNES1000083 | 0 | 0 | 17.535 | 0 | 0 | 0 | 0 |
| DFNES1000150 | 0 | 0 | 0 | 0 | 0 | 1.943 | 0 |
| DFNES2000153 | 0 | 0 | 0 | 21.984 | 0 | 0 | 0 |
| DFNES2000443 | 0 | 0 | 5.292 | 0 | 0 | 0 | 0 |
| DFNES2003081 | 0 | 0 | 0 | 0 | 0 | 0 | 53.591 |
| DFNES2005766 | 0 | 0 | 0 | 0 | 0 | 3.189 | 0 |
| DFNES2006346 | 0 | 0 | 0 | 0 | 0 | 12.289 | 0 |
| DFNES2007634 | 0 | 0 | 0 | 0 | 0 | 1.546 | 0 |
| FCBBF1000027 | 0 | 0 | 2.855 | 0 | 0 | 1.274 | 0 |
| FCBBF1000077 | 0 | 0 | 0 | 0 | 0 | 1.409 | 0 |
| FCBBF1000197 | 0 | 0 | 0 | 0 | 0 | 1.858 | 0 |
| FCBBF1000294 | 0 | 0 | 0 | 0 | 0 | 1.873 | 0 |
| FCBBF1000367 | 0 | 0 | 11.842 | 0 | 0 | 0 | 0 |
| FCBBF1000403 | 0 | 0 | 0 | 0 | 29.596 | 0 | 0 |
| FCBBF1000412 | 0 | 0 | 0 | 0 | 6.829 | 0 | 0 |
| FCBBF1000437 | 0 | 0 | 0 | 0 | 0 | 44.494 | 0 |
| FCBBF1000466 | 0 | 0 | 4.964 | 0 | 2.247 | 0 | 0 |
| FCBBF1000574 | 0 | 0 | 0 | 0 | 7.325 | 7.222 | 0 |
| FCBBF1000732 | 0 | 39.461 | 0 | 0 | 0 | 4.871 | 0 |
| FCBBF1000760 | 0 | 0 | 0 | 0 | 0 | 3.418 | 0 |
| FCBBF2000591 | 0 | 0 | 0 | 0 | 0 | 0.499 | 0 |
| FCBBF2001211 | 0 | 0 | 0 | 0 | 22.614 | 0 | 0 |
| FCBBF2001291 | 0 | 0 | 0 | 0 | 0 | 6.619 | 0 |
| FCBBF2002801 | 0 | 0 | 0 | 17.821 | 0 | 0 | 0 |
| FCBBF2002928 | 0 | 0 | 24.255 | 0 | 0 | 0 | 0 |
| FCBBF2003549 | 0 | 0 | 0 | 78.798 | 0 | 0 | 0 |
| FCBBF3000110 | 0 | 0 | 0 | 0 | 0 | 11.235 | 0 |
| FCBBF3000115 | 0 | 0 | 0 | 0 | 0 | 6.943 | 0 |
| FCBBF3000227 | 0 | 79.227 | 0 | 0 | 0 | 0 | 0 |
| FCBBF3000388 | 0 | 0 | 0 | 0 | 8.716 | 4.297 | 0 |
| FCBBF3001470 | 0 | 0 | 0 | 0 | 0 | 2.361 | 0 |
| FCBBF3003800 | 0 | 0 | 0 | 0 | 1.390 | 1.371 | 0 |
| FCBBF3004473 | 0 | 0 | 0 | 0 | 0 | 1.999 | 0 |
| FCBBF3005320 | 0 | 0 | 0 | 0 | 0 | 4.746 | 0 |
| FCBBF3005330 | 0 | 0 | 0 | 0 | 2.445 | 0 | 0 |
| FCBBF3005497 | 0 | 0 | 0 | 10.796 | 0 | 1.368 | 0 |
| FCBBF3008153 | 0 | 0 | 0 | 0 | 0 | 9.518 | 0 |
| FCBBF3008938 | 0 | 0 | 0 | 0 | 0 | 48.497 | 0 |
| FCBBF3009479 | 0 | 0 | 0 | 0 | 34.906 | 0 | 0 |
| FCBBF3009541 | 0 | 0 | 12.854 | 0 | 0 | 0 | 0 |
| FCBBF3013589 | 0 | 0 | 64.676 | 0 | 0 | 0 | 0 |
| FCBBF3014260 | 0 | 0 | 17.601 | 0 | 0 | 0 | 0 |
| FCBBF3016928 | 0 | 0 | 0 | 0 | 0 | 1.524 | 0 |
| FCBBF3018796 | 0 | 21.875 | 0 | 0 | 0 | 0 | 0 |
| FCBBF3019714 | 0 | 0 | 0 | 0 | 7.228 | 0 | 0 |
| FCBBF3020599 | 0 | 0 | 0 | 0 | 0 | 48.497 | 0 |
| FCBBF3023667 | 0 | 0 | 1.035 | 2.735 | 0.469 | 0.462 | 0 |
| FCBBF3026308 | 0 | 0 | 0 | 0 | 0 | 22.234 | 0 |
| FCBBF3028593 | 0 | 0 | 0 | 0 | 14.248 | 0 | 0 |
| FCBBF4000446 | 0 | 0 | 0 | 0 | 0 | 0 | 5.112 |
| FCBBF4000500 | 0 | 61.755 | 0 | 0 | 0 | 0 | 0 |
| FEBRA1000022 | 0 | 0 | 41.028 | 0 | 0 | 0 | 0 |
| FEBRA1000190 | 0 | 0 | 61.954 | 0 | 0 | 0 | 0 |
| FEBRA2000105 | 0 | 0 | 0 | 0 | 12.654 | 0 | 0 |
| FEBRA2000129 | 0 | 0 | 0 | 0 | 18.347 | 0 | 0 |
| FEBRA2000210 | 0 | 0 | 0 | 0 | 0 | 1.230 | 0 |
| FEBRA2000228 | 0 | 0 | 0 | 0 | 13.939 | 0 | 0 |
| FEBRA2000452 | 0 | 0 | 0 | 0 | 0 | 1.745 | 0 |
| FEBRA2000510 | 0 | 0 | 0 | 0 | 0 | 6.419 | 0 |
| FEBRA2000733 | 0 | 0 | 1.314 | 3.471 | 1.189 | 0.293 | 2.294 |
| FEBRA2000740 | 0 | 7.969 | 0 | 0 | 0 | 0 | 0 |
| FEBRA2000762 | 0 | 0 | 0 | 0 | 21.951 | 0 | 0 |
| FEBRA2000787 | 0 | 0 | 0 | 0 | 6.970 | 3.436 | 0 |
| FEBRA2000880 | 0 | 0 | 0 | 0 | 0 | 18.435 | 0 |
| FEBRA2001294 | 0 | 0 | 0 | 0 | 0 | 4.204 | 0 |
| FEBRA2001492 | 0 | 0 | 0 | 0 | 0 | 5.630 | 0 |
| FEBRA2001523 | 0 | 0 | 0 | 0 | 0 | 14.791 | 0 |
| FEBRA2001571 | 0 | 0 | 0 | 0 | 0 | 10.945 | 0 |
| FEBRA2001581 | 0 | 0 | 0 | 0 | 0 | 21.399 | 0 |
| FEBRA2001669 | 0 | 0 | 0 | 0 | 0 | 1.864 | 0 |
| FEBRA2001828 | 0 | 0 | 0 | 0 | 0 | 9.465 | 0 |
| FEBRA2002352 | 0 | 0 | 0 | 0 | 0 | 6.039 | 0 |
| FEBRA2002933 | 0 | 0 | 0 | 0 | 0 | 1.288 | 0 |
| FEBRA2003100 | 0 | 0 | 0 | 0 | 2.324 | 0 | 0 |
| FEBRA2003258 | 0 | 0 | 0 | 38.852 | 0 | 0 | 0 |
| FEBRA2003436 | 0 | 0 | 0 | 0 | 19.617 | 0 | 0 |
| FEBRA2003750 | 0 | 0 | 0 | 0 | 0 | 0 | 12.423 |
| FEBRA2003926 | 0 | 0 | 0 | 0 | 2.463 | 0 | 0 |
| FEBRA2003930 | 0 | 0 | 0 | 0 | 6.342 | 3.127 | 0 |
| FEBRA2004042 | 0 | 0 | 0 | 0 | 0 | 3.690 | 0 |
| FEBRA2004224 | 0 | 0 | 0 | 7.949 | 0 | 0 | 0 |
| FEBRA2004293 | 0 | 0 | 0 | 0 | 0 | 9.249 | 0 |
| FEBRA2004412 | 0 | 0 | 0 | 20.159 | 0 | 0 | 0 |
| FEBRA2004628 | 0 | 0 | 0 | 0 | 0 | 14.887 | 0 |
| FEBRA2005572 | 0 | 0 | 0 | 0 | 0 | 6.199 | 0 |
| FEBRA2005734 | 0 | 0 | 0 | 0 | 5.959 | 0 | 0 |
| FEBRA2005778 | 0 | 0 | 0 | 41.192 | 0 | 0 | 0 |
| FEBRA2005788 | 0 | 34.776 | 0 | 0 | 0 | 0 | 0 |
| FEBRA2005824 | 0 | 0 | 0 | 0 | 1.316 | 0.649 | 0 |
| FEBRA2006092 | 0 | 0 | 0 | 4.269 | 2.194 | 0 | 0 |
| FEBRA2006270 | 0 | 0 | 9.113 | 0 | 0 | 0 | 0 |
| FEBRA2006346 | 0 | 0 | 0 | 0 | 52.422 | 0 | 0 |
| FEBRA2006401 | 0 | 0 | 0 | 0 | 0 | 0.437 | 0 |
| FEBRA2006491 | 0 | 0 | 0 | 0 | 0 | 25.833 | 0 |
| FEBRA2006736 | 0 | 0 | 0 | 0 | 52.422 | 0 | 0 |
| FEBRA2007622 | 0 | 0 | 8.042 | 0 | 0 | 0 | 0 |
| FEBRA2007801 | 0 | 0 | 0 | 0 | 0 | 8.589 | 0 |
| FEBRA2007901 | 0 | 0 | 0 | 0 | 0 | 6.447 | 0 |
| FEBRA2008081 | 0 | 0 | 0 | 0 | 0 | 3.696 | 0 |
| FEBRA2008087 | 0 | 0 | 1.397 | 1.231 | 1.265 | 0.312 | 0 |
| FEBRA2008201 | 0 | 0 | 0 | 16.466 | 0 | 0 | 0 |
| FEBRA2008210 | 0 | 0 | 0 | 0 | 23.668 | 0 | 0 |
| FEBRA2008302 | 0 | 0 | 0 | 0 | 0 | 3.703 | 0 |
| FEBRA2008341 | 0 | 0 | 0 | 0 | 23.180 | 11.427 | 0 |
| FEBRA2008475 | 0 | 0 | 0 | 57.933 | 0 | 0 | 0 |
| FEBRA2008583 | 0 | 0 | 0 | 0 | 0.466 | 0 | 0 |
| FEBRA2008755 | 0 | 0 | 0 | 0 | 0 | 2.858 | 0 |
| FEBRA2009022 | 0 | 0 | 26.033 | 0 | 0 | 5.810 | 0 |
| FEBRA2009541 | 0 | 0 | 0 | 0 | 0 | 28.935 | 0 |
| FEBRA2014417 | 0 | 0 | 0 | 3.707 | 0 | 0 | 0 |
| FEBRA2018476 | 0 | 0 | 0 | 7.502 | 0 | 1.901 | 7.436 |
| FEBRA2019711 | 0 | 0 | 16.484 | 0 | 0 | 3.679 | 0 |
| FEBRA2020977 | 0 | 0 | 0 | 0 | 0 | 0 | 35.859 |
| FEBRA2021636 | 0 | 0 | 0 | 0 | 0 | 35.199 | 0 |
| FEBRA2021966 | 0 | 0 | 0 | 29.618 | 0 | 7.504 | 0 |
| FEBRA2022055 | 0 | 0 | 0 | 0 | 0 | 3.703 | 3.621 |
| FEBRA2023227 | 0 | 0 | 39.925 | 0 | 0 | 0 | 0 |
| FEBRA2025427 | 0 | 0 | 0 | 0 | 8.747 | 0 | 0 |
| FEHRT2000364 | 0 | 0 | 0 | 0 | 0 | 7.710 | 0 |
| FELIV1000153 | 0 | 0 | 1.286 | 1.132 | 0 | 1.148 | 1.122 |
| HCASM2000363 | 0 | 0 | 0 | 0 | 0 | 1.183 | 0 |
| HCHON1000015 | 0 | 54.915 | 0 | 0 | 0 | 2.712 | 0 |
| HCHON1000030 | 0 | 0 | 4.242 | 1.245 | 1.920 | 1.893 | 0 |
| HCHON1000131 | 0 | 0 | 0 | 0 | 0 | 14.275 | 0 |
| HCHON1000166 | 0 | 0 | 0 | 0 | 21.230 | 0 | 0 |
| HCHON2000028 | 0 | 0 | 0 | 0 | 0 | 2.760 | 0 |
| HCHON2000056 | 0 | 0 | 0 | 0 | 1.001 | 1.480 | 0 |
| HCHON2000087 | 0 | 0 | 0 | 0 | 0 | 2.152 | 0 |
| HCHON2000160 | 0 | 0 | 15.694 | 0 | 0 | 3.502 | 0 |
| HCHON2000226 | 0 | 0 | 0 | 0 | 0 | 2.806 | 0 |
| HCHON2000244 | 0 | 0 | 0 | 0 | 4.643 | 0 | 0 |
| HCHON2000295 | 0 | 3.086 | 0 | 0 | 0 | 0.762 | 0 |
| HCHON2000323 | 0 | 0 | 0 | 0 | 0 | 3.223 | 0 |
| HCHON2000373 | 0 | 0 | 0 | 0 | 0 | 0 | 6.897 |
| HCHON2000475 | 0 | 0 | 10.376 | 0 | 0 | 0 | 0 |
| HCHON2000626 | 0 | 0 | 0 | 0 | 4.148 | 0 | 0 |
| HCHON2000738 | 0 | 0 | 23.211 | 0 | 0 | 0 | 0 |
| HCHON2000751 | 0 | 0 | 0 | 0 | 0 | 6.211 | 0 |
| HCHON2000826 | 0 | 0 | 0 | 0 | 0 | 0 | 4.870 |
| HCHON2001039 | 0 | 0 | 0 | 0 | 3.937 | 0 | 0 |
| HCHON2001200 | 0 | 0 | 3.372 | 0 | 0 | 0 | 0 |
| HCHON2001217 | 0 | 0 | 0 | 7.147 | 0 | 0 | 0 |
| HCHON2001359 | 0 | 0 | 0 | 0 | 3.004 | 0 | 0 |
| HCHON2001407 | 0 | 0 | 6.156 | 0 | 0 | 0 | 0 |
| HCHON2001505 | 0 | 0 | 0 | 0 | 0 | 7.817 | 0 |
| HCHON2003642 | 0 | 0 | 0 | 0 | 0 | 21.564 | 0 |
| HCHON2004002 | 0 | 0 | 0 | 0 | 2.770 | 5.463 | 5.343 |
| HCHON2006250 | 0 | 0 | 0 | 0 | 0 | 2.722 | 0 |
| HCHON2007650 | 0 | 0 | 0 | 0 | 0 | 10.594 | 0 |
| HEART1000010 | 0 | 0 | 0 | 0 | 0 | 5.943 | 23.250 |
| HEART1000074 | 0 | 0 | 5.918 | 0 | 8.036 | 2.641 | 0 |
| HEART1000132 | 0 | 20.465 | 0 | 0 | 0 | 0 | 0 |
| HEART1000149 | 0 | 0 | 0 | 0 | 6.628 | 0 | 0 |
| HEART1000185 | 0 | 0 | 0 | 0 | 8.369 | 0 | 0 |
| HEART2000444 | 0 | 0 | 0 | 0 | 29.718 | 0 | 0 |
| HEART2000506 | 0 | 0 | 0 | 0 | 0 | 3.051 | 11.934 |
| HEART2000520 | 0 | 40.642 | 0 | 0 | 0 | 0 | 0 |
| HEART2003836 | 0 | 43.489 | 0 | 0 | 0 | 0 | 0 |
| HEART2003852 | 0 | 27.453 | 0 | 0 | 0 | 0 | 0 |
| HEART2006195 | 0 | 0 | 0 | 0 | 0 | 16.487 | 0 |
| HEART2006521 | 0 | 16.853 | 0 | 0 | 0 | 0 | 0 |
| HHDPC1000083 | 0 | 0 | 0 | 6.721 | 3.454 | 0 | 6.661 |
| HHDPC1000163 | 0 | 0 | 0 | 0 | 4.438 | 2.188 | 0 |
| HHDPC2000055 | 0 | 0 | 0 | 0 | 0 | 3.181 | 0 |
| HHDPC2000115 | 0 | 0 | 0 | 17.962 | 0 | 4.551 | 0 |
| HHDPC2000149 | 0 | 0 | 0 | 0 | 15.767 | 0 | 0 |
| HHDPC2003439 | 0 | 0 | 0 | 1.746 | 0.897 | 0.885 | 0 |
| HHDPC2003983 | 0 | 5.886 | 2.171 | 1.912 | 0 | 1.938 | 0 |
| HHDPC2005794 | 0 | 0 | 0 | 0 | 0 | 13.838 | 0 |
| HHDPC2006460 | 0 | 0 | 0 | 0 | 0 | 33.071 | 0 |
| HHDPC2007267 | 0 | 0 | 0 | 0 | 0 | 0.849 | 0 |
| HLUNG1000037 | 0 | 0 | 0 | 0 | 31.007 | 0 | 0 |
| HLUNG1000055 | 0 | 0 | 0 | 0 | 0 | 1.883 | 0 |
| HLUNG1000064 | 0 | 0 | 0 | 0 | 0 | 11.846 | 0 |
| HLUNG2000063 | 0 | 0 | 0 | 0 | 17.406 | 8.581 | 0 |
| HLUNG2000412 | 0 | 0 | 0 | 0 | 9.449 | 0 | 18.222 |
| HLUNG2000501 | 0 | 0 | 0 | 0 | 0 | 1.492 | 5.838 |
| HLUNG2000950 | 0 | 0 | 0 | 0 | 0 | 21.507 | 0 |
| HLUNG2001439 | 0 | 0 | 6.875 | 0 | 0 | 0 | 0 |
| HLUNG2001518 | 0 | 0 | 0 | 0 | 0 | 7.609 | 0 |
| HLUNG2002145 | 0 | 0 | 0 | 0 | 49.034 | 0 | 0 |
| HLUNG2002334 | 0 | 0 | 0 | 0 | 0 | 15.991 | 0 |
| HLUNG2002465 | 0 | 0 | 0 | 0 | 0 | 10.520 | 8.231 |
| HLUNG2002648 | 0 | 0 | 0 | 0 | 12.754 | 0 | 0 |
| HLUNG2002949 | 0 | 0 | 0 | 0 | 0 | 32.171 | 0 |
| HLUNG2003003 | 0 | 0 | 0 | 0 | 0 | 13.902 | 0 |
| HLUNG2003042 | 0 | 0 | 0 | 0 | 8.400 | 0 | 0 |
| HLUNG2003331 | 0 | 0 | 0 | 0 | 0 | 14.402 | 0 |
| HLUNG2003778 | 0 | 0 | 0 | 0 | 0 | 8.974 | 0 |
| HLUNG2004159 | 0 | 0 | 0 | 0 | 0 | 6.308 | 0 |
| HLUNG2004388 | 0 | 0 | 34.807 | 0 | 0 | 7.768 | 0 |
| HLUNG2005230 | 0 | 0 | 0 | 0 | 8.066 | 11.929 | 0 |
| HLUNG2006812 | 0 | 0 | 0 | 0 | 0 | 5.144 | 0 |
| HLUNG2006843 | 0 | 0 | 0 | 0 | 0 | 18.056 | 0 |
| HLUNG2007163 | 0 | 0 | 0 | 0 | 0 | 23.437 | 0 |
| HLUNG2008225 | 0 | 0 | 0 | 0 | 0 | 28.702 | 0 |
| HLUNG2008637 | 0 | 0 | 0 | 0 | 5.961 | 0 | 0 |
| HLUNG2008885 | 0 | 0 | 0 | 0 | 0 | 18.779 | 0 |
| HLUNG2009225 | 0 | 0 | 0 | 0 | 0 | 5.247 | 0 |
| HSYRA1000062 | 0 | 0 | 0 | 2.941 | 0 | 0 | 0 |
| HSYRA1000119 | 0 | 0 | 0 | 3.157 | 3.245 | 1.600 | 0 |
| HSYRA1000137 | 0 | 0 | 0 | 0 | 0 | 6.483 | 0 |
| HSYRA1000178 | 0 | 0 | 0 | 0 | 8.848 | 0 | 0 |
| HSYRA2000159 | 0 | 0 | 0 | 0 | 0.425 | 0 | 0 |
| HSYRA2000190 | 0 | 16.735 | 0 | 0 | 0 | 0 | 0 |
| HSYRA2000224 | 0 | 0 | 0 | 0 | 0 | 0 | 12.237 |
| HSYRA2000232 | 0 | 0 | 0 | 5.077 | 0 | 0 | 0 |
| HSYRA2000248 | 0 | 0 | 0 | 4.667 | 2.398 | 0 | 0 |
| HSYRA2000255 | 0 | 0 | 0 | 0 | 1.583 | 0 | 0 |
| HSYRA2000332 | 0 | 0 | 0 | 0 | 0 | 2.714 | 0 |
| HSYRA2000640 | 0 | 0 | 0 | 0 | 0 | 1.482 | 17.392 |
| HSYRA2000743 | 0 | 0 | 0 | 0 | 0 | 2.693 | 0 |
| HSYRA2000925 | 0 | 0 | 0 | 0 | 0.782 | 0 | 0 |
| HSYRA2001103 | 0 | 0 | 0 | 0 | 5.986 | 0 | 0 |
| HSYRA2001138 | 0 | 1.796 | 0 | 0 | 1.799 | 1.330 | 0 |
| HSYRA2001225 | 0 | 0 | 5.763 | 0 | 0 | 0 | 0 |
| HSYRA2001396 | 0 | 0 | 0 | 0 | 0 | 2.643 | 0 |
| HSYRA2001420 | 0 | 0 | 0 | 0 | 19.661 | 0 | 0 |
| HSYRA2001476 | 0 | 0 | 0 | 0 | 1.704 | 0 | 0 |
| HSYRA2001567 | 0 | 0 | 0 | 0 | 0 | 11.696 | 0 |
| HSYRA2001574 | 0 | 0 | 5.865 | 0 | 0 | 0 | 0 |
| HSYRA2001595 | 0 | 0 | 4.441 | 0 | 0 | 0 | 0 |
| HSYRA2001983 | 0 | 0 | 0 | 0 | 17.031 | 0 | 0 |
| HSYRA2007650 | 0 | 0 | 0 | 0 | 0 | 8.275 | 0 |
| IMR321000158 | 0 | 0 | 0 | 41.812 | 0 | 1.324 | 5.180 |
| IMR321000210 | 0 | 0 | 0 | 0 | 3.577 | 0 | 0 |
| IMR321000219 | 0 | 0 | 4.376 | 1.927 | 0 | 0 | 0 |
| IMR321000242 | 0 | 0 | 0 | 0 | 0 | 9.783 | 0 |
| IMR321000253 | 0 | 0 | 7.940 | 0 | 3.594 | 1.772 | 6.931 |
| IMR322000072 | 0 | 0 | 0 | 0 | 5.663 | 0 | 0 |
| IMR322000121 | 0 | 0 | 0 | 0 | 0 | 1.939 | 0 |
| IMR322000127 | 0 | 0 | 0 | 0 | 5.466 | 5.390 | 0 |
| IMR322000144 | 0 | 11.493 | 0 | 0 | 0 | 0 | 0 |
| IMR322000152 | 0 | 0 | 63.150 | 0 | 0 | 0 | 0 |
| IMR322000178 | 0 | 0 | 0 | 0 | 6.563 | 0 | 0 |
| IMR322000223 | 0 | 0 | 0 | 4.675 | 0 | 2.369 | 0 |
| IMR322000243 | 0 | 0 | 0 | 0 | 0 | 1.493 | 5.838 |
| IMR322000302 | 0 | 0 | 0 | 40.734 | 0 | 0 | 0 |
| IMR322000316 | 0 | 0 | 0 | 2.849 | 0 | 0 | 0 |
| IMR322000374 | 0 | 0 | 0 | 37.822 | 0 | 0 | 0 |
| IMR322000730 | 0 | 0.966 | 0 | 0.941 | 0 | 0.238 | 0.933 |
| IMR322000742 | 0 | 0 | 0 | 0 | 5.843 | 0 | 0 |
| IMR322000935 | 0 | 10.549 | 0 | 0 | 0 | 0 | 0 |
| IMR322000973 | 0 | 0 | 0 | 0 | 2.845 | 0 | 0 |
| IMR322001049 | 0 | 0 | 0 | 0 | 0 | 10.077 | 0 |
| IMR322001218 | 0 | 7.888 | 0 | 0 | 0 | 0 | 0 |
| IMR322001317 | 0 | 38.949 | 0 | 0 | 0 | 0 | 0 |
| IMR322001435 | 0 | 0 | 0 | 0 | 0 | 4.903 | 6.393 |
| IMR322001438 | 0 | 0 | 64.780 | 0 | 0 | 0 | 0 |
| IMR322001541 | 0 | 23.840 | 0 | 0 | 0 | 0 | 0 |
| IMR322001584 | 0 | 0 | 0 | 0 | 0 | 4.343 | 0 |
| IMR322001600 | 0 | 0 | 3.766 | 0 | 0 | 0 | 0 |
| JCMLC2000273 | 0 | 0 | 0 | 0 | 0 | 5.376 | 0 |
| KIDNE1000145 | 0 | 0 | 0 | 0 | 0 | 9.622 | 0 |
| KIDNE2000085 | 0 | 0 | 0 | 0 | 0 | 3.578 | 0 |
| KIDNE2000252 | 0 | 0 | 0 | 5.868 | 0 | 0 | 0 |
| KIDNE2000266 | 0 | 0 | 0 | 0 | 14.858 | 7.325 | 0 |
| KIDNE2000383 | 0 | 0 | 0 | 0 | 0 | 8.567 | 0 |
| KIDNE2000497 | 0 | 22.095 | 0 | 0 | 0 | 0 | 0 |
| KIDNE2000574 | 0 | 0 | 5.835 | 0 | 0 | 1.302 | 0 |
| KIDNE2000777 | 0 | 0 | 0 | 0 | 13.468 | 0 | 12.986 |
| KIDNE2000833 | 0 | 0 | 0 | 49.464 | 25.421 | 0 | 0 |
| KIDNE2000909 | 0 | 0 | 0 | 0 | 14.489 | 3.571 | 0 |
| KIDNE2001162 | 0 | 0 | 0 | 16.024 | 4.941 | 1.624 | 0 |
| KIDNE2001373 | 0 | 0 | 0 | 0 | 25.141 | 0 | 0 |
| KIDNE2001467 | 0 | 0 | 0 | 0 | 0 | 0.453 | 0 |
| KIDNE2002252 | 0 | 0 | 0 | 0 | 0 | 3.792 | 0 |
| KIDNE2002872 | 0 | 0 | 0 | 0 | 0 | 0.995 | 0 |
| KIDNE2002883 | 0 | 0 | 0 | 0 | 0 | 3.946 | 0 |
| KIDNE2003305 | 0 | 0 | 0 | 0 | 2.970 | 0 | 0 |
| KIDNE2003507 | 0 | 0 | 0 | 0 | 0 | 5.890 | 0 |
| KIDNE2003941 | 0 | 0 | 3.932 | 0 | 0 | 0 | 0 |
| KIDNE2003994 | 0 | 0 | 62.857 | 0 | 0 | 0 | 0 |
| KIDNE2004475 | 0 | 0 | 0 | 0 | 0 | 4.478 | 0 |
| KIDNE2004864 | 0 | 0 | 0 | 0 | 34.453 | 16.985 | 0 |
| KIDNE2006009 | 0 | 0 | 0 | 0 | 0 | 6.414 | 0 |
| KIDNE2006014 | 0 | 0 | 0 | 0 | 10.478 | 5.165 | 0 |
| KIDNE2006039 | 0 | 0 | 0 | 0 | 0 | 27.461 | 0 |
| KIDNE2006248 | 0 | 2.191 | 0 | 0 | 0 | 1.082 | 2.116 |
| KIDNE2006353 | 0 | 0 | 0 | 0 | 0 | 6.803 | 0 |
| KIDNE2006811 | 0 | 22.929 | 0 | 0 | 0 | 0 | 0 |
| KIDNE2007005 | 0 | 0 | 0 | 0 | 0 | 33.289 | 0 |
| KIDNE2007186 | 0 | 0 | 0 | 0 | 0 | 33.289 | 0 |
| KIDNE2007328 | 0 | 0 | 0 | 0 | 0 | 3.078 | 0 |
| KIDNE2007352 | 0 | 0 | 0 | 0 | 4.401 | 3.616 | 0 |
| KIDNE2007811 | 0 | 0 | 0 | 0 | 30.232 | 0 | 0 |
| KIDNE2007910 | 0 | 0 | 0 | 0 | 31.979 | 0 | 0 |
| KIDNE2008048 | 0 | 0 | 0 | 0 | 1.893 | 1.866 | 0 |
| KIDNE2008649 | 0 | 0 | 0 | 0 | 9.333 | 1.534 | 0 |
| KIDNE2008987 | 0 | 0 | 0 | 0 | 10.165 | 0 | 0 |
| KIDNE2010265 | 0 | 0 | 0 | 0 | 0 | 4.110 | 0 |
| KIDNE2012025 | 0 | 0 | 0 | 16.112 | 0 | 0 | 0 |
| KIDNE2013845 | 0 | 0 | 0 | 0 | 0 | 7.777 | 7.606 |
| KIDNE2014119 | 0 | 0 | 0 | 0 | 50.303 | 0 | 0 |
| KIDNE2014290 | 0 | 0 | 0 | 0 | 2.474 | 7.317 | 4.771 |
| KIDNE2015445 | 0 | 0 | 0 | 0 | 12.123 | 5.977 | 0 |
| KIDNE2017343 | 0 | 0 | 0 | 0 | 46.618 | 0 | 0 |
| KIDNE2018352 | 0 | 0 | 0 | 0 | 0 | 6.204 | 0 |
| KIDNE2018493 | 0 | 0 | 0 | 0 | 12.574 | 6.199 | 0 |
| KIDNE2018891 | 0 | 0 | 0 | 0 | 21.519 | 10.609 | 0 |
| LIVER1000132 | 0 | 0 | 0 | 0 | 3.532 | 0.871 | 0 |
| LIVER1000421 | 0 | 0 | 0 | 0 | 28.931 | 0 | 0 |
| LIVER2002842 | 0 | 0 | 0 | 0 | 6.736 | 3.321 | 0 |
| LIVER2005789 | 0 | 0 | 0 | 0 | 0 | 1.566 | 6.126 |
| LIVER2007783 | 0 | 0 | 0 | 0 | 0 | 3.569 | 0 |
| LIVER2008751 | 0 | 0 | 0 | 0 | 0 | 15.105 | 0 |
| MAMGL1000032 | 0 | 0 | 0 | 1.106 | 0.569 | 0.280 | 0 |
| MAMGL1000035 | 0 | 0 | 0 | 0 | 0.711 | 0.350 | 0 |
| MAMGL1000173 | 0 | 0 | 0 | 0 | 0.935 | 0 | 0 |
| MAMGL1000178 | 0 | 0 | 0 | 0 | 0 | 0.532 | 0 |
| MESAN1000126 | 0 | 0 | 0 | 12.261 | 0 | 0 | 0 |
| MESAN2000149 | 0 | 0 | 0 | 0 | 17.337 | 0 | 0 |
| MESAN2000264 | 0 | 0 | 0 | 13.531 | 0 | 0 | 0 |
| MESAN2000267 | 0 | 0 | 0 | 0 | 0 | 1.425 | 0 |
| MESAN2000501 | 0 | 0 | 0 | 0 | 0 | 10.438 | 0 |
| MESAN2000608 | 0 | 0 | 6.130 | 0 | 2.775 | 0 | 0 |
| MESAN2001154 | 0 | 0 | 0 | 9.148 | 0 | 0 | 0 |
| MESAN2002086 | 0 | 0 | 0 | 2.858 | 0 | 2.897 | 0 |
| MESAN2002940 | 0 | 0 | 0 | 21.837 | 0 | 0 | 0 |
| MESAN2003444 | 0 | 0 | 0 | 0 | 0 | 6.480 | 0 |
| MESAN2004288 | 0 | 0 | 40.508 | 0 | 0 | 0 | 0 |
| MESAN2005284 | 0 | 0 | 0 | 0 | 0 | 8.436 | 0 |
| MESAN2005689 | 0 | 0 | 0 | 0 | 0 | 10.794 | 0 |
| MESAN2005958 | 0 | 0 | 0 | 0 | 0 | 9.370 | 0 |
| MESAN2006563 | 0 | 0 | 0 | 4.741 | 2.437 | 0 | 0 |
| MESAN2009081 | 0 | 0 | 0 | 0 | 0 | 8.188 | 0 |
| MESAN2009580 | 0 | 0 | 0 | 0 | 0 | 1.932 | 0 |
| MESAN2013284 | 0 | 0 | 9.574 | 0 | 0 | 0 | 0 |
| NB9N41000135 | 0 | 0 | 0 | 15.228 | 0 | 0 | 0 |
| NB9N42000281 | 0 | 0 | 0 | 0 | 0 | 3.326 | 0 |
| NESOP1000087 | 0 | 0 | 0 | 0 | 14.226 | 0 | 0 |
| NHNPC2000062 | 0 | 0 | 0 | 0 | 14.790 | 7.291 | 0 |
| NHNPC2000206 | 0 | 0 | 0 | 0 | 0 | 1.195 | 0 |
| NOVAR1000015 | 0 | 0 | 0 | 0 | 10.715 | 0 | 0 |
| NOVAR2000038 | 0 | 4.377 | 0 | 0 | 0 | 3.242 | 4.227 |
| NT2NE1000163 | 0 | 0 | 0 | 0 | 0 | 0.705 | 0 |
| NT2NE2000056 | 0 | 0 | 0 | 5.395 | 0 | 0.683 | 0 |
| NT2NE2000174 | 0 | 0 | 0 | 5.240 | 0 | 0 | 0 |
| NT2NE2000259 | 0 | 0 | 0 | 0 | 0 | 4.893 | 0 |
| NT2NE2000260 | 0 | 0 | 0 | 0 | 0.426 | 0 | 0 |
| NT2NE2000383 | 0 | 0 | 0 | 0 | 0 | 2.643 | 0 |
| NT2NE2000470 | 0 | 0 | 42.540 | 0 | 0 | 9.493 | 0 |
| NT2NE2000575 | 0 | 0 | 0 | 0 | 2.545 | 2.927 | 0 |
| NT2NE2000707 | 0 | 0 | 0 | 4.596 | 1.181 | 1.164 | 0 |
| NT2NE2000763 | 0 | 0 | 0 | 0 | 0 | 2.088 | 0 |
| NT2NE2000950 | 0 | 0 | 40.857 | 0 | 0 | 0 | 0 |
| NT2NE2000963 | 0 | 0 | 0 | 0 | 1.619 | 0 | 1.561 |
| NT2NE2001000 | 0 | 0 | 0 | 0 | 0 | 4.491 | 0 |
| NT2NE2001049 | 0 | 0 | 0 | 0 | 0 | 15.287 | 0 |
| NT2NE2001156 | 0 | 0 | 43.812 | 0 | 0 | 9.777 | 0 |
| NT2NE2001181 | 0 | 0 | 0 | 0 | 0 | 32.433 | 0 |
| NT2NE2001617 | 0 | 0 | 0 | 0 | 16.009 | 0 | 0 |
| NT2NE2001793 | 0 | 0 | 0 | 0 | 0 | 1.804 | 0 |
| NT2NE2003185 | 0 | 0 | 0 | 0 | 0 | 6.594 | 0 |
| NT2NE2003485 | 0 | 0 | 0 | 0 | 0 | 4.049 | 0 |
| NT2NE2004519 | 0 | 0 | 0 | 0 | 0 | 6.235 | 0 |
| NT2NE2005371 | 0 | 0 | 0 | 0 | 0 | 0 | 37.523 |
| NT2NE2005441 | 0 | 0 | 0 | 0 | 0 | 0 | 21.143 |
| NT2NE2005688 | 0 | 0 | 0 | 0 | 0 | 1.299 | 0 |
| NT2NE2005876 | 0 | 0 | 0 | 10.128 | 0 | 2.566 | 0 |
| NT2NE2006075 | 0 | 0 | 0 | 0 | 0 | 13.704 | 0 |
| NT2NE2006458 | 0 | 0 | 0 | 0 | 0 | 2.459 | 0 |
| NT2NE2011684 | 0 | 0 | 68.264 | 0 | 0 | 0 | 0 |
| NT2NE2012790 | 0 | 42.270 | 0 | 0 | 0 | 0 | 0 |
| NT2NE2018180 | 0 | 0 | 29.311 | 0 | 0 | 0 | 0 |
| NT2RI1000027 | 0 | 0 | 0 | 0 | 0 | 3.518 | 0 |
| NT2RI2000064 | 0 | 0 | 4.196 | 3.696 | 1.899 | 0.936 | 0 |
| NT2RI2000107 | 0 | 0 | 0 | 0 | 0 | 4.029 | 0 |
| NT2RI2000255 | 0 | 0 | 9.331 | 0 | 4.224 | 0 | 8.145 |
| NT2RI2000263 | 0 | 12.053 | 0 | 0 | 0 | 0 | 0 |
| NT2RI2000282 | 0 | 0 | 0 | 6.520 | 3.351 | 1.101 | 0 |
| NT2RI2000284 | 0 | 0 | 0 | 0 | 1.609 | 3.172 | 0 |
| NT2RI2000412 | 0 | 0 | 0 | 0 | 0 | 13.408 | 0 |
| NT2RI2000671 | 0 | 0 | 0 | 0 | 3.712 | 1.830 | 0 |
| NT2RI2000685 | 0 | 0 | 0 | 0 | 0 | 5.171 | 6.742 |
| NT2RI2000689 | 0 | 0 | 0 | 0 | 0 | 2.690 | 0 |
| NT2RI2000727 | 0 | 0 | 2.017 | 1.776 | 0 | 0.900 | 3.521 |
| NT2RI2001054 | 0 | 0 | 0 | 0 | 0 | 1.035 | 0 |
| NT2RI2001091 | 0 | 0 | 0 | 0 | 12.406 | 0 | 0 |
| NT2RI2001230 | 0 | 0 | 0 | 0 | 0 | 1.342 | 0 |
| NT2RI2001385 | 0 | 0 | 0 | 0 | 0 | 6.854 | 0 |
| NT2RI2001409 | 0 | 0 | 0 | 79.073 | 0 | 0 | 0 |
| NT2RI2001422 | 0 | 0 | 0 | 0 | 13.118 | 0 | 0 |
| NT2RI2001540 | 0 | 1.604 | 1.331 | 1.173 | 2.410 | 1.981 | 2.324 |
| NT2RI2001621 | 0 | 0 | 0 | 0 | 0 | 5.325 | 0 |
| NT2RI2001657 | 0 | 0 | 0 | 0 | 0 | 1.862 | 3.641 |
| NT2RI2001726 | 0 | 0 | 0 | 0 | 0 | 18.369 | 0 |
| NT2RI2001859 | 0 | 0 | 0 | 0 | 0 | 3.376 | 0 |
| NT2RI2002091 | 0 | 0 | 1.046 | 1.473 | 1.373 | 0.677 | 0.639 |
| NT2RI2002117 | 0 | 0 | 0 | 32.348 | 0 | 8.196 | 0 |
| NT2RI2002152 | 0 | 0 | 9.803 | 0 | 0 | 0 | 0 |
| NT2RI2002316 | 0 | 5.649 | 0 | 5.505 | 0 | 1.395 | 0 |
| NT2RI2002391 | 0 | 0 | 0 | 0 | 2.862 | 1.411 | 0 |
| NT2RI2002549 | 0 | 0 | 0 | 47.308 | 0 | 23.972 | 0 |
| NT2RI2002554 | 0 | 0 | 0 | 12.450 | 0 | 6.309 | 0 |
| NT2RI2002847 | 0 | 0 | 9.785 | 0 | 0 | 0 | 0 |
| NT2RI2002958 | 0 | 0 | 0 | 0 | 0 | 1.675 | 0 |
| NT2RI2003205 | 0 | 0 | 0 | 0 | 0 | 0 | 21.906 |
| NT2RI2003304 | 0 | 0 | 0 | 0 | 0.926 | 0 | 1.786 |
| NT2RI2003338 | 0 | 0 | 0 | 0 | 0 | 3.523 | 0 |
| NT2RI2003407 | 0 | 0 | 0 | 0 | 0 | 2.106 | 0 |
| NT2RI2003420 | 0 | 0 | 0 | 0 | 0 | 2.679 | 10.480 |
| NT2RI2003695 | 0 | 0 | 0 | 0 | 0 | 1.370 | 0 |
| NT2RI2003738 | 0 | 0 | 0 | 1.201 | 0 | 1.217 | 0 |
| NT2RI2003921 | 0 | 0 | 0 | 3.256 | 1.674 | 0.825 | 0 |
| NT2RI2004059 | 0 | 0 | 0 | 0 | 0 | 11.854 | 0 |
| NT2RI2004188 | 0 | 0 | 0 | 0 | 0 | 4.995 | 0 |
| NT2RI2004608 | 0 | 0 | 28.841 | 0 | 0 | 0 | 0 |
| NT2RI2005115 | 0 | 0 | 0 | 0 | 0 | 21.261 | 0 |
| NT2RI2005150 | 0 | 0 | 0 | 14.194 | 0 | 1.199 | 0 |
| NT2RI2005239 | 0 | 0 | 0 | 0 | 0 | 6.861 | 0 |
| NT2RI2005405 | 0 | 0 | 0 | 0 | 1.981 | 0.488 | 1.910 |
| NT2RI2005713 | 0 | 0 | 0 | 0 | 0 | 2.573 | 0 |
| NT2RI2005723 | 0 | 3.536 | 0 | 0 | 0 | 0.873 | 0 |
| NT2RI2006070 | 0 | 0 | 0 | 0 | 0 | 0 | 13.986 |
| NT2RI2006072 | 0 | 0 | 0 | 0 | 0 | 1.331 | 0 |
| NT2RI2006412 | 0 | 0 | 0 | 0 | 0 | 0 | 5.578 |
| NT2RI2006825 | 0 | 0 | 0 | 0 | 0 | 0 | 18.657 |
| NT2RI2006853 | 0 | 0 | 0 | 0 | 7.915 | 0 | 30.528 |
| NT2RI2006855 | 0 | 0 | 0 | 0 | 0 | 14.996 | 0 |
| NT2RI2006856 | 0 | 0 | 0 | 3.216 | 0 | 2.445 | 0 |
| NT2RI2007054 | 0 | 9.148 | 0 | 0 | 4.581 | 0 | 8.835 |
| NT2RI2007084 | 0 | 0 | 0 | 0 | 3.839 | 0 | 7.404 |
| NT2RI2007096 | 0 | 0 | 0 | 0 | 0 | 9.018 | 0 |
| NT2RI2007133 | 0 | 0 | 0 | 0 | 1.384 | 0.682 | 2.670 |
| NT2RI2007384 | 0 | 0 | 3.376 | 0 | 4.584 | 1.507 | 2.947 |
| NT2RI2007498 | 0 | 0 | 0 | 0 | 0 | 0 | 2.775 |
| NT2RI2007589 | 0 | 0 | 0 | 7.333 | 0 | 0 | 0 |
| NT2RI2007629 | 0 | 0 | 0 | 0 | 7.113 | 3.507 | 0 |
| NT2RI2007723 | 0 | 0 | 0 | 0 | 0 | 0 | 24.075 |
| NT2RI2007827 | 0 | 0 | 58.521 | 0 | 0 | 0 | 0 |
| NT2RI2007884 | 0 | 0 | 0 | 0 | 0 | 4.416 | 0 |
| NT2RI2007987 | 0 | 0 | 0 | 0 | 0 | 3.132 | 12.253 |
| NT2RI2008045 | 0 | 0 | 6.053 | 0 | 0 | 0 | 0 |
| NT2RI2008171 | 0 | 0 | 0 | 30.488 | 0 | 0 | 0 |
| NT2RI2008204 | 0 | 43.734 | 0 | 0 | 0 | 0 | 0 |
| NT2RI2008221 | 0 | 0 | 0 | 15.225 | 0 | 0 | 0 |
| NT2RI2008336 | 0 | 2.823 | 0 | 2.751 | 0 | 0.697 | 2.726 |
| NT2RI2008481 | 0 | 5.211 | 0 | 0 | 0 | 0 | 0 |
| NT2RI2008526 | 0 | 0 | 11.953 | 0 | 0 | 2.668 | 0 |
| NT2RI2008622 | 0 | 0 | 0 | 0 | 11.136 | 0 | 0 |
| NT2RI2008749 | 0 | 0 | 0 | 0 | 0 | 1.967 | 0 |
| NT2RI2008791 | 0 | 0 | 0 | 0 | 0 | 2.030 | 0 |
| NT2RI2008812 | 0 | 0 | 0 | 0 | 0 | 12.594 | 0 |
| NT2RI2009037 | 0 | 0 | 0 | 0 | 0 | 1.467 | 0 |
| NT2RI2009065 | 0 | 0 | 3.641 | 0 | 0 | 1.625 | 0 |
| NT2RI2009083 | 0 | 0 | 0 | 0 | 0 | 35.675 | 0 |
| NT2RI2009173 | 0 | 0 | 0 | 0 | 0 | 5.821 | 7.590 |
| NT2RI2009239 | 0 | 9.849 | 0 | 0 | 4.932 | 0 | 0 |
| NT2RI2009269 | 0 | 0 | 0 | 0 | 0 | 0 | 13.450 |
| NT2RI2009281 | 0 | 0 | 0 | 0 | 0 | 4.897 | 0 |
| NT2RI2009583 | 0 | 0 | 0 | 0 | 0.790 | 0.778 | 7.613 |
| NT2RI2012726 | 0 | 0 | 0 | 0 | 0 | 8.070 | 0 |
| NT2RI2015533 | 0 | 0 | 0 | 0 | 0 | 2.704 | 0 |
| NT2RI2017529 | 0 | 0 | 0 | 0 | 0 | 3.376 | 0 |
| NT2RI2018448 | 0 | 0 | 0 | 0 | 0 | 10.954 | 0 |
| NT2RI2022468 | 0 | 0 | 0 | 0 | 23.655 | 11.662 | 0 |
| NT2RP6000043 | 0 | 0 | 0 | 0 | 0 | 6.607 | 0 |
| NT2RP6000072 | 0 | 0 | 0 | 0 | 5.702 | 0 | 0 |
| NT2RP6000078 | 0 | 0 | 0 | 0 | 2.538 | 6.255 | 2.447 |
| NT2RP6000123 | 0 | 2.758 | 0 | 0 | 1.381 | 1.362 | 2.664 |
| NT2RP7000076 | 0 | 0 | 4.751 | 0 | 0 | 1.060 | 0 |
| NT2RP7000112 | 0 | 0 | 0 | 0 | 0 | 27.942 | 0 |
| NT2RP7000271 | 0 | 0 | 0 | 0 | 0 | 5.276 | 0 |
| NT2RP7000906 | 0 | 0 | 0 | 0 | 0 | 2.269 | 0 |
| NT2RP7001166 | 0 | 0 | 11.660 | 0 | 0 | 1.301 | 0 |
| NT2RP7001283 | 0 | 0 | 4.388 | 0 | 0 | 0.979 | 0 |
| NT2RP7001306 | 0 | 0 | 56.702 | 0 | 0 | 0 | 0 |
| NT2RP7002282 | 0 | 0 | 0 | 0 | 0 | 26.714 | 0 |
| NT2RP7002379 | 0 | 0 | 0 | 0 | 0 | 0.876 | 0 |
| NT2RP7002449 | 0 | 0 | 0 | 0 | 0 | 3.514 | 0 |
| NT2RP7002619 | 0 | 0 | 0 | 0 | 0 | 1.895 | 0 |
| NT2RP7002829 | 0 | 0 | 0 | 0 | 30.855 | 0 | 0 |
| NT2RP7003261 | 0 | 0 | 10.591 | 0 | 0 | 0 | 0 |
| NT2RP7003688 | 0 | 0 | 5.756 | 0 | 0 | 0 | 0 |
| NT2RP7004173 | 0 | 0 | 0 | 0 | 0 | 5.314 | 0 |
| NT2RP7004348 | 0 | 0 | 0 | 0 | 0 | 3.931 | 0 |
| NT2RP7004373 | 0 | 0 | 0 | 0 | 8.306 | 4.095 | 0 |
| NT2RP7004541 | 0 | 0 | 0 | 0 | 0 | 41.921 | 0 |
| NT2RP7004751 | 0 | 0 | 0 | 3.214 | 0 | 1.628 | 0 |
| NT2RP7004884 | 0 | 0 | 0 | 0 | 9.688 | 0 | 0 |
| NT2RP7004925 | 0 | 0 | 0 | 0 | 0 | 2.197 | 0 |
| NT2RP7004946 | 0 | 0 | 0 | 0 | 3.038 | 1.498 | 0 |
| NT2RP7005513 | 0 | 0 | 0 | 0 | 0 | 2.940 | 0 |
| NT2RP7006075 | 0 | 0 | 0 | 0 | 9.245 | 13.674 | 0 |
| NT2RP7006141 | 0 | 0 | 0 | 0 | 0 | 1.285 | 0 |
| NT2RP7006539 | 0 | 0 | 0 | 0 | 0 | 5.061 | 0 |
| NT2RP7006717 | 0 | 0 | 0 | 0 | 0 | 1.145 | 0 |
| NT2RP7006980 | 0 | 0 | 0 | 0 | 0 | 29.339 | 0 |
| NT2RP7007154 | 0 | 0 | 0 | 0 | 4.024 | 2.976 | 0 |
| NT2RP7007387 | 0 | 0 | 0 | 0 | 0 | 3.571 | 0 |
| NT2RP7007530 | 0 | 0 | 0 | 0 | 7.736 | 0 | 0 |
| NT2RP7007842 | 0 | 0 | 0 | 26.339 | 6.768 | 0 | 0 |
| NT2RP7007975 | 0 | 0 | 0 | 0 | 0 | 2.374 | 0 |
| NT2RP7008167 | 0 | 0 | 0 | 6.232 | 0 | 1.579 | 0 |
| NT2RP7008543 | 0 | 0 | 0 | 0 | 0 | 4.786 | 0 |
| NT2RP7009097 | 0 | 0 | 0 | 0 | 0 | 3.128 | 0 |
| NT2RP7009259 | 0 | 3.959 | 4.380 | 0 | 0 | 0 | 0 |
| NT2RP7009394 | 0 | 0 | 0 | 0 | 0 | 2.104 | 0 |
| NT2RP7009482 | 0 | 0 | 0 | 3.182 | 0 | 0 | 0 |
| NT2RP7012776 | 0 | 0 | 0 | 0 | 0 | 14.621 | 0 |
| NT2RP7014910 | 0 | 0 | 0 | 0 | 0 | 2.080 | 0 |
| NTONG1000033 | 0 | 0 | 0 | 0 | 0 | 4.263 | 0 |
| NTONG1000047 | 0 | 0 | 0 | 0 | 0 | 20.905 | 0 |
| NTONG1000052 | 0 | 6.731 | 0 | 0 | 0 | 0 | 0 |
| NTONG1000075 | 0 | 0 | 0 | 0 | 0 | 0 | 45.341 |
| NTONG1000098 | 0 | 0 | 4.967 | 0 | 0 | 0 | 0 |
| NTONG1000182 | 0 | 0 | 0 | 0 | 0 | 2.154 | 0 |
| NTONG1000246 | 0 | 0 | 12.189 | 0 | 0 | 2.720 | 0 |
| NTONG1000257 | 0 | 0 | 0 | 0 | 0 | 3.829 | 0 |
| NTONG2000265 | 0 | 0 | 0 | 5.853 | 0 | 1.483 | 5.801 |
| NTONG2000858 | 0 | 20.351 | 0 | 0 | 0 | 0 | 0 |
| NTONG62000977 | 0 | 0 | 7.663 | 0 | 0 | 0 | 0 |
| NTONG2001567 | 0 | 0 | 0 | 0 | 2.164 | 0 | 0 |
| NTONG2001612 | 0 | 7.910 | 8.751 | 0 | 0 | 1.953 | 0 |
| NTONG2002582 | 0 | 0 | 0 | 0 | 0 | 6.543 | 25.595 |
| NTONG2003454 | 0 | 0 | 0 | 0 | 10.520 | 0 | 0 |
| NTONG2003515 | 0 | 0 | 0 | 0 | 0 | 17.024 | 0 |
| NTONG2003928 | 0 | 0 | 0 | 0 | 0 | 10.134 | 0 |
| NTONG2004806 | 0 | 48.877 | 0 | 0 | 0 | 0 | 0 |
| NTONG2004844 | 0 | 0 | 0 | 0 | 0 | 2.819 | 0 |
| NTONG2005153 | 0 | 0 | 0 | 0 | 27.921 | 13.765 | 0 |
| NTONG2005520 | 0 | 0 | 0 | 0 | 0 | 1.158 | 4.530 |
| NTONG2005822 | 0 | 0 | 0 | 0 | 32.378 | 0 | 0 |
| NTONG2008483 | 0 | 11.259 | 0 | 0 | 2.819 | 0 | 0 |
| NTONG2008522 | 0 | 0 | 30.549 | 0 | 0 | 0 | 0 |
| NTONG2009468 | 0 | 0 | 0 | 0 | 0 | 16.522 | 0 |
| OCBBF1000086 | 0 | 0 | 0 | 0 | 0 | 0 | 5.209 |
| OCBBF1000114 | 0 | 0 | 0 | 52.512 | 0 | 0 | 0 |
| OCBBF1000146 | 0 | 0 | 0 | 0 | 0 | 4.502 | 0 |
| OCBBF2000013 | 0 | 0 | 15.169 | 0 | 0 | 3.385 | 0 |
| OCBBF2000287 | 0 | 0 | 0 | 0 | 73.962 | 0 | 0 |
| OCBBF2000467 | 0 | 0 | 0 | 0 | 0 | 3.509 | 0 |
| OCBBF2000522 | 0 | 0 | 0 | 0 | 17.846 | 4.399 | 0 |
| OCBBF2000712 | 0 | 0 | 7.367 | 0 | 0 | 0 | 0 |
| OCBBF2000982 | 0 | 0 | 0 | 0 | 0 | 4.551 | 0 |
| OCBBF2001196 | 0 | 0 | 0 | 0 | 55.882 | 0 | 0 |
| OCBBF2001794 | 0 | 0 | 0 | 0 | 16.683 | 0 | 0 |
| OCBBF2002086 | 0 | 0 | 0 | 0 | 0 | 5.605 | 0 |
| OCBBF2002376 | 0 | 0 | 59.348 | 0 | 0 | 0 | 0 |
| OCBBF2004104 | 0 | 0 | 10.677 | 0 | 0 | 2.383 | 0 |
| OCBBF2004235 | 0 | 0 | 0 | 0 | 42.087 | 0 | 0 |
| OCBBF2005956 | 0 | 0 | 0 | 0 | 0 | 4.939 | 0 |
| OCBBF2006660 | 0 | 0 | 0 | 0 | 53.263 | 0 | 0 |
| OCBBF2006849 | 0 | 0 | 0 | 0 | 7.132 | 0 | 0 |
| OCBBF2006859 | 0 | 0 | 58.402 | 0 | 0 | 0 | 0 |
| OCBBF2007354 | 0 | 0 | 0 | 6.898 | 0 | 1.748 | 0 |
| OCBBF2007415 | 0 | 0 | 0 | 10.996 | 0 | 1.393 | 0 |
| OCBBF2007622 | 0 | 0 | 0 | 0 | 12.955 | 0 | 0 |
| OCBBF2008005 | 0 | 0 | 0 | 0 | 5.603 | 0 | 0 |
| OCBBF2008466 | 0 | 0 | 0 | 0 | 0 | 14.882 | 0 |
| OCBBF2009836 | 0 | 0 | 0 | 0 | 0 | 28.513 | 0 |
| OCBBF2010830 | 0 | 0 | 0 | 0 | 3.105 | 1.531 | 0 |
| OCBBF2010841 | 0 | 0 | 0 | 0 | 0 | 32.439 | 0 |
| OCBBF2011536 | 0 | 0 | 0 | 0 | 0 | 3.470 | 0 |
| OCBBF2011914 | 0 | 0 | 0 | 25.037 | 0 | 0 | 0 |
| OCBBF2012553 | 0 | 0 | 0 | 0 | 4.139 | 2.040 | 0 |
| OCBBF2012908 | 0 | 0 | 0 | 0 | 0 | 5.701 | 0 |
| OCBBF2013366 | 0 | 0 | 0 | 0 | 0 | 4.696 | 0 |
| OCBBF2014292 | 0 | 0 | 0 | 0 | 0 | 3.604 | 7.048 |
| OCBBF2014541 | 0 | 0 | 0 | 0 | 0 | 13.642 | 0 |
| OCBBF2015751 | 0 | 0 | 0 | 0 | 0 | 4.930 | 0 |
| OCBBF2016841 | 0 | 0 | 47.620 | 0 | 0 | 0 | 0 |
| OCBBF2016928 | 0 | 0 | 42.696 | 0 | 0 | 0 | 0 |
| OCBBF2017398 | 0 | 0 | 0 | 8.833 | 0 | 0 | 0 |
| OCBBF2017791 | 0 | 0 | 19.969 | 0 | 0 | 0 | 0 |
| OCBBF2018084 | 0 | 0 | 34.374 | 0 | 0 | 0 | 0 |
| OCBBF2018707 | 0 | 0 | 17.532 | 0 | 0 | 0 | 0 |
| OCBBF2021020 | 0 | 0 | 0 | 0 | 0 | 4.638 | 0 |
| OCBBF2035226 | 0 | 0 | 4.580 | 0 | 0 | 1.022 | 0 |
| OCBBF3000323 | 0 | 0 | 0 | 0 | 11.736 | 0 | 0 |
| OCBBF3001333 | 0 | 0 | 0 | 0 | 0 | 5.589 | 0 |
| PEBLM1000034 | 0 | 0 | 0 | 47.739 | 0 | 0 | 0 |
| PEBLM2000126 | 0 | 0 | 0 | 0 | 0 | 18.794 | 0 |
| PEBLM2000222 | 0 | 0 | 0 | 0 | 0 | 0 | 3.953 |
| PEBLM2000395 | 0 | 0 | 0 | 0 | 0 | 1.583 | 0 |
| PEBLM2000479 | 0 | 0 | 0 | 0 | 16.426 | 48.586 | 0 |
| PEBLM2001072 | 0 | 12.778 | 0 | 0 | 0 | 3.155 | 0 |
| PEBLM2004666 | 0 | 0 | 0 | 0 | 0 | 6.464 | 0 |
| PEBLM2007296 | 0 | 0 | 0 | 11.874 | 6.102 | 0 | 0 |
| PEBLM2007774 | 0 | 0 | 0 | 0 | 1.063 | 0.524 | 0 |
| PERIC2000478 | 0 | 0 | 0 | 0 | 0 | 18.939 | 0 |
| PERIC2007068 | 0 | 0 | 0 | 10.595 | 10.890 | 2.684 | 0 |
| PLACE5000013 | 0 | 0 | 0 | 0 | 11.203 | 0 | 0 |
| PLACE5000066 | 0 | 0 | 0 | 0 | 32.287 | 0 | 0 |
| PLACE5000113 | 0 | 0 | 0 | 0 | 0 | 2.993 | 0 |
| PLACE5000170 | 0 | 0 | 0 | 0 | 0 | 12.097 | 0 |
| PLACE6000371 | 0 | 0 | 0 | 0 | 0 | 49.431 | 0 |
| PLACE6000379 | 0 | 0 | 0 | 0 | 1.870 | 0.307 | 1.202 |
| PLACE6000414 | 0 | 0 | 0 | 0 | 4.522 | 2.229 | 8.720 |
| PLACE6000463 | 0 | 0 | 0 | 0 | 0 | 13.574 | 0 |
| PLACE6000630 | 0 | 0 | 0 | 0 | 0 | 6.713 | 0 |
| PLACE6001064 | 0 | 0 | 0 | 0 | 2.024 | 0 | 0 |
| PLACE6001443 | 0 | 0 | 0 | 0 | 6.931 | 0 | 13.367 |
| PLACE6001886 | 0 | 0 | 0 | 0 | 0 | 29.462 | 0 |
| PLACE6002011 | 0 | 0 | 0 | 0 | 0 | 49.431 | 0 |
| PLACE6002056 | 0 | 0 | 0 | 0 | 0 | 49.431 | 0 |
| PLACE6002084 | 0 | 0 | 0 | 0 | 0 | 3.855 | 0 |
| PLACE6002419 | 0 | 0 | 0 | 0 | 0 | 0 | 70.943 |
| PLACE6002668 | 0 | 0 | 0 | 0 | 0 | 9.388 | 0 |
| PLACE6002960 | 0 | 0 | 0 | 0 | 0 | 1.931 | 7.553 |
| PLACE6003383 | 0 | 8.410 | 0 | 0 | 0 | 0 | 0 |
| PLACE6003850 | 0 | 0 | 0 | 0 | 39.586 | 0 | 0 |
| PLACE6004005 | 0 | 0 | 0 | 6.779 | 0 | 0 | 0 |
| PLACE6004312 | 0 | 0 | 0 | 0 | 4.256 | 2.098 | 0 |
| PLACE6004464 | 0 | 0 | 0 | 0 | 0 | 32.829 | 0 |
| PLACE6004578 | 0 | 0 | 0 | 0 | 4.374 | 0 | 0 |
| PLACE6006042 | 0 | 0 | 0 | 0 | 19.210 | 0 | 0 |
| PLACE6006418 | 0 | 0 | 0 | 0 | 9.783 | 0 | 0 |
| PLACE6006549 | 0 | 0 | 0 | 0 | 2.818 | 0 | 0 |
| PLACE6008775 | 0 | 0 | 0 | 0 | 6.504 | 0 | 0 |
| PLACE6008793 | 0 | 0 | 12.360 | 0 | 0 | 5.516 | 0 |
| PLACE6009228 | 0 | 0 | 0 | 0 | 0 | 49.431 | 0 |
| PLACE6010077 | 0 | 0 | 6.787 | 0 | 0 | 1.515 | 0 |
| PLACE6010484 | 0 | 0 | 0 | 0 | 5.454 | 5.378 | 0 |
| PLACE6015322 | 0 | 0 | 0 | 0 | 0 | 49.431 | 0 |
| PLACE6016254 | 0 | 0 | 0 | 0 | 0 | 31.784 | 0 |
| PLACE6016942 | 0 | 0 | 0 | 0 | 0 | 6.805 | 0 |
| PROST1000097 | 0 | 4.143 | 0 | 0 | 2.075 | 2.046 | 0 |
| PROST1000120 | 0 | 0 | 0 | 0 | 0 | 5.737 | 0 |
| PROST1000144 | 0 | 0 | 0 | 10.765 | 0 | 0 | 0 |
| PROST1000199 | 0 | 0 | 0 | 0 | 0 | 2.542 | 0 |
| PROST1000215 | 0 | 0 | 0 | 0 | 0 | 17.795 | 0 |
| PROST1000226 | 0 | 0 | 0 | 0 | 6.314 | 18.675 | 0 |
| PROST1000246 | 0 | 0 | 0 | 0 | 38.770 | 0 | 0 |
| PROST1000480 | 0 | 0 | 0 | 0 | 0 | 32.910 | 0 |
| PROST1000526 | 0 | 0 | 19.695 | 0 | 0 | 0 | 0 |
| PROST1000564 | 0 | 0 | 10.479 | 0 | 4.744 | 0 | 0 |
| PROST2000138 | 0 | 0 | 0.676 | 0.595 | 2.753 | 0.302 | 1.180 |
| PROST2001180 | 0 | 0 | 0 | 0 | 8.762 | 4.319 | 0 |
| PROST2001283 | 0 | 14.993 | 0 | 0 | 0 | 0 | 0 |
| PROST2001552 | 0 | 0 | 0 | 0 | 0 | 0 | 5.924 |
| PROST2001739 | 0 | 0 | 0 | 0 | 11.664 | 0 | 0 |
| PROST2001883 | 0 | 0 | 6.962 | 6.133 | 0 | 0 | 0 |
| PROST2002078 | 0 | 0 | 0 | 0 | 8.576 | 0 | 0 |
| PROST2002425 | 0 | 0 | 0 | 0 | 0 | 27.641 | 0 |
| PROST2003232 | 0 | 0 | 0 | 0 | 0 | 2.374 | 0 |
| PROST2003338 | 0 | 0 | 0 | 0 | 0 | 1.947 | 0 |
| PROST2003428 | 0 | 0 | 0 | 0 | 0 | 32.910 | 0 |
| PROST2004095 | 0 | 0 | 0 | 0 | 0 | 0.814 | 0 |
| PROST2004258 | 0 | 0 | 0 | 0 | 0 | 6.637 | 0 |
| PROST2004270 | 0 | 0 | 0 | 0 | 0 | 1.023 | 0 |
| PROST2004416 | 0 | 4.791 | 0 | 0 | 0 | 5.914 | 0 |
| PROST2005143 | 0 | 0 | 0 | 0 | 0 | 11.801 | 0 |
| PROST2005272 | 0 | 0 | 0 | 0 | 28.978 | 14.286 | 0 |
| PROST2006282 | 0 | 0 | 0 | 0 | 62.691 | 0 | 0 |
| PROST2006933 | 0 | 0 | 0 | 0 | 0 | 32.910 | 0 |
| PROST2008360 | 0 | 0 | 0 | 0 | 0 | 0 | 12.248 |
| PROST2009320 | 0 | 0 | 0 | 0 | 49.876 | 0 | 0 |
| PROST2010545 | 0 | 0 | 0 | 0 | 0 | 22.894 | 0 |
| PROST2012745 | 0 | 0 | 0 | 0 | 0 | 0 | 26.318 |
| PROST2012780 | 0 | 0 | 0 | 0 | 25.670 | 0 | 0 |
| PROST2013053 | 0 | 0 | 0 | 0 | 0 | 0 | 20.156 |
| PROST2014862 | 0 | 0 | 0 | 0 | 0 | 27.641 | 0 |
| PROST2015464 | 0 | 0 | 0 | 0 | 6.052 | 2.984 | 0 |
| PROST2016980 | 0 | 0 | 0 | 0 | 0 | 19.696 | 0 |
| PROST2017692 | 0 | 0 | 0 | 5.060 | 0 | 0 | 5.015 |
| PROST2017729 | 0 | 0 | 0 | 0 | 49.876 | 0 | 0 |
| PROST2019164 | 0 | 25.982 | 0 | 0 | 0 | 0 | 0 |
| PROST2019253 | 0 | 0 | 0 | 0 | 0 | 2.923 | 0 |
| PUAEN1000065 | 0 | 0 | 0 | 0 | 0 | 2.330 | 4.558 |
| PUAEN1000164 | 0 | 0 | 0 | 0 | 0 | 0.692 | 0 |
| PUAEN1000322 | 0 | 0 | 19.931 | 0 | 0 | 0 | 0 |
| PUAEN2000535 | 0 | 0 | 6.269 | 0 | 0 | 0 | 0 |
| PUAEN2002568 | 0 | 0 | 0 | 0 | 38.476 | 0 | 0 |
| PUAEN2005502 | 0 | 0 | 0 | 0 | 0 | 18.619 | 0 |
| RECTM2000510 | 0 | 0 | 23.496 | 0 | 0 | 0 | 0 |
| SALGL1000005 | 97.831 | 0 | 0 | 0 | 0 | 0 | 0 |
| SALGL1000024 | 98.036 | 0 | 0 | 0 | 0 | 0 | 0 |
| SALGL1000028 | 100 | 0 | 0 | 0 | 0 | 0 | 0 |
| SALGL1000047 | 95.567 | 0 | 0 | 0 | 0 | 0 | 0 |
| SALGL1000065 | 100 | 0 | 0 | 0 | 0 | 0 | 0 |
| SALGL1000107 | 99.596 | 0 | 0 | 0 | 0 | 0 | 0 |
| SALGL1000157 | 41.950 | 0 | 0 | 0 | 0 | 0.905 | 0 |
| SALGL1000171 | 99.486 | 0 | 0 | 0 | 0 | 0 | 0 |
| SKMUS1000014 | 0 | 51.833 | 0 | 0 | 0 | 0 | 0 |
| SKMUS1000022 | 0 | 2.933 | 3.245 | 0 | 1.469 | 0 | 0 |
| SKMUS1000030 | 0 | 100 | 0 | 0 | 0 | 0 | 0 |
| SKMUS1000064 | 0 | 36.376 | 0 | 0 | 0 | 0 | 0 |
| SKMUS1000067 | 0 | 100 | 0 | 0 | 0 | 0 | 0 |
| SKMUS1000084 | 0 | 10.852 | 0 | 0 | 0 | 0 | 0 |
| SKMUS1000102 | 0 | 68.143 | 0 | 0 | 0 | 0 | 0 |
| SKMUS1000104 | 0 | 100 | 0 | 0 | 0 | 0 | 0 |
| SKMUS1000110 | 0 | 51.909 | 0 | 0 | 0 | 0 | 0 |
| SKMUS1000118 | 0 | 100 | 0 | 0 | 0 | 0 | 0 |
| SKMUS1000124 | 0 | 100 | 0 | 0 | 0 | 0 | 0 |
| SKMUS1000129 | 0 | 100 | 0 | 0 | 0 | 0 | 0 |
| SKMUS1000138 | 0 | 34.510 | 0 | 0 | 0 | 0 | 0 |
| SKMUS1000176 | 0 | 6.079 | 0 | 0 | 0 | 0 | 0 |
| SKMUS1000177 | 0 | 16.639 | 0 | 0 | 0 | 0 | 0 |
| SKMUS1000186 | 0 | 2.828 | 0 | 0 | 1.416 | 0 | 0 |
| SKMUS2000020 | 0 | 25.952 | 0 | 0 | 0 | 0 | 0 |
| SKMUS2000061 | 0 | 100 | 0 | 0 | 0 | 0 | 0 |
| SKMUS2000074 | 0 | 72.072 | 0 | 0 | 0 | 0 | 0 |
| SKMUS2000078 | 0 | 100 | 0 | 0 | 0 | 0 | 0 |
| SKMUS2000117 | 0 | 59.874 | 0 | 0 | 0 | 0 | 0 |
| SKMUS2000137 | 0 | 100 | 0 | 0 | 0 | 0 | 0 |
| SKMUS2000198 | 0 | 55.645 | 0 | 0 | 0 | 0 | 0 |
| SKMUS2000243 | 0 | 71.082 | 0 | 0 | 0 | 0 | 0 |
| SKMUS2000271 | 0 | 44.946 | 0 | 0 | 0 | 0 | 0 |
| SKMUS2000287 | 0 | 100 | 0 | 0 | 0 | 0 | 0 |
| SKMUS2000317 | 0 | 100 | 0 | 0 | 0 | 0 | 0 |
| SKMUS2000330 | 0 | 100 | 0 | 0 | 0 | 0 | 0 |
| SKMUS2000339 | 0 | 100 | 0 | 0 | 0 | 0 | 0 |
| SKMUS2000343 | 0 | 54.290 | 0 | 0 | 0 | 0 | 0 |
| SKMUS2000361 | 0 | 7.535 | 0 | 0 | 0 | 0 | 0 |
| SKMUS2000365 | 0 | 100 | 0 | 0 | 0 | 0 | 0 |
| SKMUS2000380 | 0 | 45.841 | 0 | 0 | 0 | 3.773 | 0 |
| SKMUS2000390 | 0 | 100 | 0 | 0 | 0 | 0 | 0 |
| SKMUS2000416 | 0 | 100 | 0 | 0 | 0 | 0 | 0 |
| SKMUS2000458 | 0 | 80.810 | 0 | 0 | 0 | 0 | 0 |
| SKMUS2000467 | 0 | 79.497 | 0 | 0 | 0 | 0 | 0 |
| SKMUS2000468 | 0 | 100 | 0 | 0 | 0 | 0 | 0 |
| SKMUS2000484 | 0 | 12.373 | 0 | 0 | 0 | 0 | 0 |
| SKMUS2000515 | 0 | 79.836 | 0 | 0 | 0 | 0 | 0 |
| SKMUS2000679 | 0 | 23.603 | 0 | 0 | 0 | 0 | 0 |
| SKMUS2000690 | 0 | 34.321 | 0 | 0 | 0 | 0 | 0 |
| SKMUS2000701 | 0 | 100 | 0 | 0 | 0 | 0 | 0 |
| SKMUS2000705 | 0 | 100 | 0 | 0 | 0 | 0 | 0 |
| SKMUS2000710 | 0 | 100 | 0 | 0 | 0 | 0 | 0 |
| SKMUS2000724 | 0 | 100 | 0 | 0 | 0 | 0 | 0 |
| SKMUS2000726 | 0 | 100 | 0 | 0 | 0 | 0 | 0 |
| SKMUS2000757 | 0 | 34.821 | 0 | 0 | 0 | 8.597 | 0 |
| SKMUS2000774 | 0 | 100 | 0 | 0 | 0 | 0 | 0 |
| SKMUS2000780 | 0 | 67.038 | 0 | 0 | 0 | 0 | 0 |
| SKMUS2000821 | 0 | 78.301 | 0 | 0 | 0 | 0 | 0 |
| SKMUS2000847 | 0 | 100 | 0 | 0 | 0 | 0 | 0 |
| SKMUS2000863 | 0 | 100 | 0 | 0 | 0 | 0 | 0 |
| SKMUS2000873 | 0 | 15.504 | 0 | 0 | 1.941 | 0 | 0 |
| SKMUS2000894 | 0 | 100 | 0 | 0 | 0 | 0 | 0 |
| SKMUS2000898 | 0 | 100 | 0 | 0 | 0 | 0 | 0 |
| SKMUS2000902 | 0 | 38.110 | 0 | 0 | 0 | 0 | 0 |
| SKMUS2000931 | 0 | 7.668 | 4.242 | 3.736 | 1.920 | 0 | 0 |
| SKMUS2000933 | 0 | 43.718 | 0 | 0 | 0 | 0 | 0 |
| SKMUS2000945 | 0 | 100 | 0 | 0 | 0 | 0 | 0 |
| SKMUS2000954 | 0 | 35.928 | 0 | 0 | 5.997 | 0 | 0 |
| SKMUS2000961 | 0 | 46.388 | 0 | 0 | 0 | 0 | 0 |
| SKMUS2000973 | 0 | 100 | 0 | 0 | 0 | 0 | 0 |
| SKMUS2000980 | 0 | 100 | 0 | 0 | 0 | 0 | 0 |
| SKMUS2001008 | 0 | 90.149 | 0 | 0 | 0 | 0 | 0 |
| SKMUS2001014 | 0 | 100 | 0 | 0 | 0 | 0 | 0 |
| SKMUS2001129 | 0 | 35.832 | 0 | 0 | 0 | 0 | 0 |
| SKMUS2001147 | 0 | 39.065 | 0 | 0 | 0 | 0 | 0 |
| SKMUS2001157 | 0 | 75.835 | 0 | 0 | 0 | 0 | 0 |
| SKMUS2001164 | 0 | 100 | 0 | 0 | 0 | 0 | 0 |
| SKMUS2001199 | 0 | 100 | 0 | 0 | 0 | 0 | 0 |
| SKMUS2001201 | 0 | 50.208 | 0 | 0 | 0 | 0 | 0 |
| SKMUS2001215 | 0 | 100 | 0 | 0 | 0 | 0 | 0 |
| SKMUS2001247 | 0 | 100 | 0 | 0 | 0 | 0 | 0 |
| SKMUS2001254 | 0 | 87.489 | 0 | 0 | 0 | 0 | 0 |
| SKMUS2001271 | 0 | 100 | 0 | 0 | 0 | 0 | 0 |
| SKMUS2001287 | 0 | 100 | 0 | 0 | 0 | 0 | 0 |
| SKMUS2001323 | 0 | 12.378 | 0 | 0 | 0 | 0 | 0 |
| SKMUS2001364 | 0 | 100 | 0 | 0 | 0 | 0 | 0 |
| SKMUS2001398 | 0 | 100 | 0 | 0 | 0 | 0 | 0 |
| SKMUS2001402 | 0 | 29.705 | 0 | 0 | 0 | 0 | 0 |
| SKMUS2001412 | 0 | 87.489 | 0 | 0 | 0 | 0 | 0 |
| SKMUS2001454 | 0 | 2.378 | 0 | 0 | 2.382 | 0.587 | 0 |
| SKMUS2001492 | 0 | 100 | 0 | 0 | 0 | 0 | 0 |
| SKMUS2001501 | 0 | 61.433 | 0 | 0 | 0 | 3.792 | 0 |
| SKMUS2001528 | 0 | 8.844 | 0 | 0 | 0 | 0 | 0 |
| SKMUS2001543 | 0 | 76.794 | 0 | 0 | 0 | 0 | 0 |
| SKMUS2001580 | 0 | 100 | 0 | 0 | 0 | 0 | 0 |
| SKMUS2001585 | 0 | 100 | 0 | 0 | 0 | 0 | 0 |
| SKMUS2001608 | 0 | 100 | 0 | 0 | 0 | 0 | 0 |
| SKMUS2001631 | 0 | 100 | 0 | 0 | 0 | 0 | 0 |
| SKMUS2001634 | 0 | 9.225 | 0 | 0 | 0 | 4.555 | 0 |
| SKMUS2001662 | 0 | 100 | 0 | 0 | 0 | 0 | 0 |
| SKMUS2001663 | 0 | 100 | 0 | 0 | 0 | 0 | 0 |
| SKMUS2001668 | 0 | 80.039 | 0 | 0 | 0 | 0 | 0 |
| SKMUS2001671 | 0 | 100 | 0 | 0 | 0 | 0 | 0 |
| SKMUS2001683 | 0 | 100 | 0 | 0 | 0 | 0 | 0 |
| SKMUS2001693 | 0 | 67.659 | 0 | 0 | 0 | 0 | 0 |
| SKMUS2001695 | 0 | 63.549 | 0 | 0 | 0 | 0 | 0 |
| SKMUS2001703 | 0 | 100 | 0 | 0 | 0 | 0 | 0 |
| SKMUS2001740 | 0 | 100 | 0 | 0 | 0 | 0 | 0 |
| SKMUS2001742 | 0 | 100 | 0 | 0 | 0 | 0 | 0 |
| SKMUS2001823 | 0 | 100 | 0 | 0 | 0 | 0 | 0 |
| SKMUS2001850 | 0 | 100 | 0 | 0 | 0 | 0 | 0 |
| SKMUS2002077 | 0 | 100 | 0 | 0 | 0 | 0 | 0 |
| SKMUS2002084 | 0 | 43.995 | 0 | 0 | 0 | 0 | 0 |
| SKMUS2002153 | 0 | 100 | 0 | 0 | 0 | 0 | 0 |
| SKMUS2002475 | 0 | 100 | 0 | 0 | 0 | 0 | 0 |
| SKMUS2002602 | 0 | 100 | 0 | 0 | 0 | 0 | 0 |
| SKMUS2002634 | 0 | 36.218 | 0 | 0 | 0 | 0 | 0 |
| SKMUS2002693 | 0 | 100 | 0 | 0 | 0 | 0 | 0 |
| SKMUS2002821 | 0 | 100 | 0 | 0 | 0 | 0 | 0 |
| SKMUS2002840 | 0 | 100 | 0 | 0 | 0 | 0 | 0 |
| SKMUS2002920 | 0 | 100 | 0 | 0 | 0 | 0 | 0 |
| SKMUS2003034 | 0 | 100 | 0 | 0 | 0 | 0 | 0 |
| SKMUS2003074 | 0 | 100 | 0 | 0 | 0 | 0 | 0 |
| SKMUS2003168 | 0 | 66.520 | 0 | 0 | 0 | 0 | 0 |
| SKMUS2003194 | 0 | 91.511 | 0 | 0 | 0 | 0 | 0 |
| SKMUS2003744 | 0 | 100 | 0 | 0 | 0 | 0 | 0 |
| SKMUS2004044 | 0 | 91.511 | 0 | 0 | 0 | 0 | 0 |
| SKMUS2004047 | 0 | 100 | 0 | 0 | 0 | 0 | 0 |
| SKMUS2004483 | 0 | 100 | 0 | 0 | 0 | 0 | 0 |
| SKMUS2004667 | 0 | 66.520 | 0 | 0 | 0 | 0 | 0 |
| SKMUS2004897 | 0 | 100 | 0 | 0 | 0 | 0 | 0 |
| SKMUS2004903 | 0 | 51.125 | 0 | 0 | 0 | 0 | 0 |
| SKMUS2004908 | 0 | 23.145 | 0 | 0 | 0 | 0 | 0 |
| SKMUS2005428 | 0 | 100 | 0 | 0 | 0 | 0 | 0 |
| SKMUS2006394 | 0 | 67.870 | 0 | 0 | 0 | 0 | 0 |
| SKMUS2006481 | 0 | 100 | 0 | 0 | 0 | 0 | 0 |
| SKMUS2006755 | 0 | 51.125 | 0 | 0 | 0 | 0 | 0 |
| SKMUS2007315 | 0 | 100 | 0 | 0 | 0 | 0 | 0 |
| SKMUS2007359 | 0 | 100 | 0 | 0 | 0 | 0 | 0 |
| SKMUS2007568 | 0 | 100 | 0 | 0 | 0 | 0 | 0 |
| SKMUS2007740 | 0 | 100 | 0 | 0 | 0 | 0 | 0 |
| SKMUS2007816 | 0 | 100 | 0 | 0 | 0 | 0 | 0 |
| SKMUS2007915 | 0 | 100 | 0 | 0 | 0 | 0 | 0 |
| SKMUS2008338 | 0 | 100 | 0 | 0 | 0 | 0 | 0 |
| SKMUS2008407 | 0 | 100 | 0 | 0 | 0 | 0 | 0 |
| SKMUS2008474 | 0 | 100 | 0 | 0 | 0 | 0 | 0 |
| SKMUS2008585 | 0 | 100 | 0 | 0 | 0 | 0 | 0 |
| SKMUS2008607 | 0 | 100 | 0 | 0 | 0 | 0 | 0 |
| SKMUS2009190 | 0 | 100 | 0 | 0 | 0 | 0 | 0 |
| SKMUS2009232 | 0 | 100 | 0 | 0 | 0 | 0 | 0 |
| SKMUS2009479 | 0 | 100 | 0 | 0 | 0 | 0 | 0 |
| SKMUS2009557 | 0 | 100 | 0 | 0 | 0 | 0 | 0 |
| SKNMC1000110 | 0 | 0 | 28.223 | 0 | 0 | 0 | 0 |
| SKNMC1000123 | 0 | 0 | 100 | 0 | 0 | 0 | 0 |
| SKNMC1000124 | 0 | 0 | 100 | 0 | 0 | 0 | 0 |
| SKNMC1000137 | 0 | 0 | 8.264 | 0 | 3.741 | 1.844 | 0 |
| SKNMC1000159 | 0 | 0 | 82.323 | 0 | 0 | 0 | 0 |
| SKNMC1000168 | 0 | 0 | 6.528 | 0 | 0 | 0 | 0 |
| SKNMC1000229 | 0 | 0 | 40.981 | 0 | 0 | 0 | 0 |
| SKNMC1000251 | 0 | 0 | 54.679 | 0 | 0 | 0 | 0 |
| SKNMC1000264 | 0 | 0 | 40.887 | 0 | 0 | 0 | 0 |
| SKNMC2000065 | 0 | 0 | 8.415 | 0 | 0 | 0 | 0 |
| SKNMC2000097 | 0 | 0 | 6.949 | 0 | 0 | 0.775 | 0 |
| SKNMC2000224 | 0 | 0 | 48.830 | 0 | 0 | 0 | 0 |
| SKNMC2000256 | 0 | 0 | 100 | 0 | 0 | 0 | 0 |
| SKNMC2000305 | 0 | 0 | 27.458 | 0 | 0 | 0 | 0 |
| SKNMC2000322 | 0 | 0 | 11.009 | 0 | 4.983 | 0 | 0 |
| SKNMC2000356 | 0 | 0 | 68.922 | 0 | 0 | 0 | 0 |
| SKNMC2000374 | 0 | 0 | 100 | 0 | 0 | 0 | 0 |
| SKNMC2000583 | 0 | 0 | 100 | 0 | 0 | 0 | 0 |
| SKNMC2000593 | 0 | 0 | 68.004 | 0 | 0 | 0 | 0 |
| SKNMC2000612 | 0 | 0 | 100 | 0 | 0 | 0 | 0 |
| SKNMC2000622 | 0 | 0 | 100 | 0 | 0 | 0 | 0 |
| SKNMC2000635 | 0 | 0 | 1.398 | 0 | 0 | 0 | 0 |
| SKNMC2000649 | 0 | 0 | 7.112 | 0 | 0 | 1.587 | 0 |
| SKNMC2000698 | 0 | 0 | 16.101 | 0 | 0 | 0 | 0 |
| SKNMC2000877 | 0 | 0 | 9.237 | 0 | 8.363 | 0 | 0 |
| SKNMC2000966 | 0 | 0 | 63.124 | 0 | 0 | 0 | 0 |
| SKNMC2001113 | 0 | 0 | 76.091 | 0 | 0 | 16.981 | 0 |
| SKNMC2001324 | 0 | 0 | 50.339 | 0 | 0 | 0 | 0 |
| SKNMC2001503 | 0 | 0 | 24.175 | 21.294 | 0 | 0 | 0 |
| SKNMC2001555 | 0 | 0 | 100 | 0 | 0 | 0 | 0 |
| SKNMC2001596 | 0 | 0 | 100 | 0 | 0 | 0 | 0 |
| SKNMC2001623 | 0 | 0 | 78.328 | 0 | 0 | 0 | 0 |
| SKNMC2002402 | 0 | 0 | 57.469 | 0 | 0 | 12.825 | 0 |
| SKNMC2003639 | 0 | 0 | 80.715 | 0 | 0 | 0 | 0 |
| SKNMC2003924 | 0 | 0 | 100 | 0 | 0 | 0 | 0 |
| SKNMC2003987 | 0 | 0 | 100 | 0 | 0 | 0 | 0 |
| SKNMC2004457 | 0 | 0 | 100 | 0 | 0 | 0 | 0 |
| SKNMC2004643 | 0 | 0 | 100 | 0 | 0 | 0 | 0 |
| SKNMC2004651 | 0 | 0 | 100 | 0 | 0 | 0 | 0 |
| SKNMC2005772 | 0 | 0 | 100 | 0 | 0 | 0 | 0 |
| SKNMC2006173 | 0 | 0 | 59.986 | 0 | 0 | 0 | 0 |
| SKNMC2006327 | 0 | 0 | 100 | 0 | 0 | 0 | 0 |
| SKNMC2006998 | 0 | 0 | 100 | 0 | 0 | 0 | 0 |
| SKNMC2007134 | 0 | 0 | 100 | 0 | 0 | 0 | 0 |
| SKNMC2007502 | 0 | 0 | 100 | 0 | 0 | 0 | 0 |
| SKNMC2007504 | 0 | 0 | 100 | 0 | 0 | 0 | 0 |
| SKNMC2007961 | 0 | 0 | 100 | 0 | 0 | 0 | 0 |
| SKNMC2009450 | 0 | 0 | 100 | 0 | 0 | 0 | 0 |
| SKNSH1000002 | 0 | 0 | 0 | 9.869 | 0 | 0 | 0 |
| SKNSH1000086 | 0 | 0 | 0 | 58.629 | 0 | 0 | 0 |
| SKNSH1000101 | 0 | 0 | 0 | 4.411 | 0 | 0 | 4.371 |
| SKNSH1000174 | 0 | 0 | 0 | 100 | 0 | 0 | 0 |
| SKNSH1000301 | 0 | 0 | 0 | 100 | 0 | 0 | 0 |
| SKNSH1000308 | 0 | 0 | 0 | 100 | 0 | 0 | 0 |
| SKNSH1000416 | 0 | 0 | 0 | 100 | 0 | 0 | 0 |
| SKNSH2000051 | 0 | 0 | 0 | 58.015 | 0 | 0 | 0 |
| SKNSH2000101 | 0 | 0 | 0 | 45.247 | 0 | 0 | 0 |
| SKNSH2000151 | 0 | 0 | 0 | 37.354 | 0 | 0 | 0 |
| SKNSH2000163 | 0 | 0 | 0 | 72.863 | 0 | 0 | 0 |
| SKNSH2000250 | 0 | 0 | 0 | 9.674 | 0 | 0 | 0 |
| SKNSH2000319 | 0 | 0 | 0 | 49.241 | 0 | 0 | 0 |
| SKNSH2000347 | 0 | 0 | 0 | 15.406 | 0 | 0 | 0 |
| SKNSH2000482 | 0 | 0 | 0 | 66.928 | 0 | 0 | 0 |
| SKNSH2000516 | 0 | 0 | 0 | 100 | 0 | 0 | 0 |
| SKNSH2000550 | 0 | 0 | 0 | 100 | 0 | 0 | 0 |
| SKNSH2000716 | 0 | 0 | 0 | 11.900 | 0 | 0 | 0 |
| SKNSH2000819 | 0 | 0 | 19.403 | 17.090 | 0 | 0 | 0 |
| SKNSH2000971 | 0 | 0 | 0 | 49.371 | 0 | 0 | 0 |
| SKNSH2001222 | 0 | 0 | 0 | 44.836 | 0 | 0 | 0 |
| SKNSH2001875 | 0 | 0 | 0 | 44.586 | 0 | 11.296 | 0 |
| SKNSH2001931 | 0 | 0 | 0 | 35.089 | 0 | 0 | 0 |
| SKNSH2002054 | 0 | 0 | 0 | 100 | 0 | 0 | 0 |
| SKNSH2002325 | 0 | 0 | 0 | 26.212 | 0 | 0 | 0 |
| SKNSH2002768 | 0 | 0 | 0 | 16.257 | 0 | 8.238 | 0 |
| SKNSH2002866 | 0 | 0 | 0 | 100 | 0 | 0 | 0 |
| SKNSH2003064 | 0 | 0 | 0 | 53.753 | 0 | 0 | 0 |
| SKNSH2003174 | 0 | 0 | 0 | 100 | 0 | 0 | 0 |
| SKNSH2003422 | 0 | 0 | 0 | 100 | 0 | 0 | 0 |
| SKNSH2003466 | 0 | 0 | 0 | 100 | 0 | 0 | 0 |
| SKNSH2003483 | 0 | 0 | 0 | 100 | 0 | 0 | 0 |
| SKNSH2003528 | 0 | 0 | 0 | 20.844 | 0 | 0 | 0 |
| SKNSH2003633 | 0 | 0 | 0 | 46.056 | 0 | 0 | 0 |
| SKNSH2004039 | 0 | 0 | 0 | 100 | 0 | 0 | 0 |
| SKNSH2005061 | 0 | 0 | 0 | 11.640 | 0 | 0 | 0 |
| SKNSH2005120 | 0 | 0 | 0 | 100 | 0 | 0 | 0 |
| SKNSH2005194 | 0 | 0 | 0 | 100 | 0 | 0 | 0 |
| SKNSH2005240 | 0 | 0 | 0 | 91.307 | 0 | 0 | 0 |
| SKNSH2005792 | 0 | 0 | 0 | 100 | 0 | 0 | 0 |
| SKNSH2005816 | 0 | 0 | 0 | 100 | 0 | 0 | 0 |
| SKNSH2005981 | 0 | 0 | 0 | 100 | 0 | 0 | 0 |
| SKNSH2006234 | 0 | 0 | 0 | 24.035 | 0 | 0 | 0 |
| SKNSH2006304 | 0 | 0 | 0 | 100 | 0 | 0 | 0 |
| SKNSH2006432 | 0 | 0 | 0 | 100 | 0 | 0 | 0 |
| SKNSH2006822 | 0 | 0 | 0 | 100 | 0 | 0 | 0 |
| SKNSH2007142 | 0 | 0 | 0 | 100 | 0 | 0 | 0 |
| SKNSH2007149 | 0 | 0 | 0 | 100 | 0 | 0 | 0 |
| SKNSH2007429 | 0 | 0 | 0 | 100 | 0 | 0 | 0 |
| SKNSH2007739 | 0 | 0 | 0 | 100 | 0 | 0 | 0 |
| SKNSH2008043 | 0 | 0 | 0 | 69.524 | 0 | 0 | 0 |
| SKNSH2008940 | 0 | 0 | 0 | 13.166 | 0 | 0 | 0 |
| SKNSH2008969 | 0 | 0 | 0 | 100 | 0 | 0 | 0 |
| SKNSH2009197 | 0 | 0 | 0 | 100 | 0 | 0 | 0 |
| SKNSH2009357 | 0 | 0 | 0 | 65.592 | 0 | 0 | 0 |
| SKNSH2009435 | 0 | 0 | 0 | 100 | 0 | 0 | 0 |
| SKNSH2009991 | 0 | 0 | 0 | 100 | 0 | 0 | 0 |
| SKNSH2010015 | 0 | 0 | 0 | 100 | 0 | 0 | 0 |
| SMINT1000012 | 0 | 0 | 0 | 0 | 100 | 0 | 0 |
| SMINT1000016 | 0 | 0 | 0 | 0 | 8.657 | 0 | 0 |
| SMINT1000039 | 0 | 0 | 0 | 0 | 34.704 | 0 | 0 |
| SMINT1000042 | 0 | 0 | 0 | 0 | 9.454 | 0 | 0 |
| SMINT1000048 | 0 | 0 | 0 | 0 | 27.794 | 27.404 | 0 |
| SMINT1000051 | 0 | 0 | 0 | 0 | 100 | 0 | 0 |
| SMINT1000054 | 0 | 0 | 0 | 0 | 66.007 | 0 | 0 |
| SMINT1000057 | 0 | 0 | 0 | 0 | 62.065 | 0 | 0 |
| SMINT1000071 | 0 | 0 | 0 | 0 | 100 | 0 | 0 |
| SMINT1000075 | 0 | 0 | 0 | 0 | 100 | 0 | 0 |
| SMINT1000078 | 0 | 0 | 0 | 0 | 33.223 | 0 | 0 |
| SMINT1000091 | 0 | 0 | 0 | 0 | 100 | 0 | 0 |
| SMINT1000100 | 0 | 0 | 0 | 0 | 19.647 | 0 | 0 |
| SMINT1000103 | 0 | 0 | 0 | 0 | 100 | 0 | 0 |
| SMINT1000117 | 0 | 0 | 0 | 0 | 4.641 | 0 | 0 |
| SMINT1000118 | 0 | 0 | 0 | 0 | 100 | 0 | 0 |
| SMINT1000131 | 0 | 0 | 0 | 0 | 3.232 | 0 | 6.232 |
| SMINT1000137 | 0 | 0 | 0 | 0 | 66.980 | 33.020 | 0 |
| SMINT1000192 | 0 | 0 | 0 | 0 | 10.508 | 0 | 0 |
| SMINT2000007 | 0 | 0 | 0 | 0 | 42.450 | 10.464 | 0 |
| SMINT2000018 | 0 | 0 | 0 | 0 | 14.856 | 0 | 0 |
| SMINT2000032 | 0 | 0 | 0 | 0 | 100 | 0 | 0 |
| SMINT2000040 | 0 | 0 | 0 | 0 | 100 | 0 | 0 |
| SMINT2000060 | 0 | 0 | 0 | 0 | 100 | 0 | 0 |
| SMINT2000073 | 0 | 0 | 0 | 0 | 30.613 | 0 | 0 |
| SMINT2000084 | 0 | 0 | 0 | 0 | 100 | 0 | 0 |
| SMINT2000145 | 0 | 0 | 0 | 0 | 100 | 0 | 0 |
| SMINT2000159 | 0 | 0 | 0 | 0 | 38.570 | 9.507 | 0 |
| SMINT2000176 | 0 | 0 | 0 | 0 | 49.333 | 0 | 0 |
| SMINT2000185 | 0 | 0 | 0 | 0 | 100 | 0 | 0 |
| SMINT2000227 | 0 | 0 | 0 | 0 | 100 | 0 | 0 |
| SMINT2000229 | 0 | 0 | 0 | 0 | 100 | 0 | 0 |
| SMINT2000232 | 0 | 0 | 0 | 0 | 50.236 | 0 | 0 |
| SMINT2000239 | 0 | 0 | 0 | 0 | 29.598 | 0 | 0 |
| SMINT2000267 | 0 | 0 | 0 | 0 | 76.088 | 0 | 0 |
| SMINT2000277 | 0 | 0 | 0 | 0 | 6.397 | 3.154 | 0 |
| SMINT2000396 | 0 | 0 | 0 | 0 | 4.320 | 2.130 | 0 |
| SMINT2000400 | 0 | 0 | 0 | 0 | 23.606 | 0 | 0 |
| SMINT2000441 | 0 | 0 | 0 | 0 | 1.593 | 1.570 | 0 |
| SMINT2000454 | 0 | 0 | 0 | 0 | 31.537 | 0 | 0 |
| SMINT2000468 | 0 | 0 | 0 | 0 | 8.074 | 0 | 0 |
| SMINT2000518 | 0 | 0 | 0 | 0 | 100 | 0 | 0 |
| SMINT2000529 | 0 | 0 | 0 | 0 | 100 | 0 | 0 |
| SMINT2000530 | 0 | 0 | 0 | 0 | 100 | 0 | 0 |
| SMINT2000537 | 0 | 0 | 0 | 0 | 73.962 | 0 | 0 |
| SMINT2000538 | 0 | 0 | 0 | 0 | 100 | 0 | 0 |
| SMINT2000541 | 0 | 0 | 0 | 0 | 100 | 0 | 0 |
| SMINT2000545 | 0 | 0 | 0 | 0 | 8.365 | 8.248 | 0 |
| SMINT2000558 | 0 | 0 | 0 | 0 | 100 | 0 | 0 |
| SMINT2000562 | 0 | 0 | 0 | 0 | 100 | 0 | 0 |
| SMINT2000568 | 0 | 0 | 0 | 0 | 100 | 0 | 0 |
| SMINT2000602 | 0 | 0 | 0 | 0 | 1.940 | 2.869 | 0 |
| SMINT2000609 | 0 | 0 | 0 | 0 | 66.007 | 0 | 0 |
| SMINT2000629 | 0 | 0 | 0 | 0 | 9.477 | 0 | 0 |
| SMINT2000659 | 0 | 0 | 0 | 0 | 1.961 | 0 | 0 |
| SMINT2000694 | 0 | 0 | 0 | 0 | 4.194 | 0 | 0 |
| SMINT2000747 | 0 | 0 | 0 | 0 | 57.827 | 28.508 | 0 |
| SMINT2000811 | 0 | 0 | 0 | 0 | 100 | 0 | 0 |
| SMINT2000824 | 0 | 0 | 0 | 0 | 100 | 0 | 0 |
| SMINT2000933 | 0 | 0 | 0 | 0 | 3.596 | 10.638 | 0 |
| SMINT2000984 | 0 | 0 | 0 | 0 | 100 | 0 | 0 |
| SMINT2001114 | 0 | 0 | 0 | 0 | 100 | 0 | 0 |
| SMINT2001158 | 0 | 0 | 0 | 0 | 100 | 0 | 0 |
| SMINT2001183 | 0 | 0 | 0 | 0 | 32.042 | 0 | 0 |
| SMINT2001199 | 0 | 0 | 0 | 0 | 35.321 | 0 | 0 |
| SMINT2001222 | 0 | 0 | 0 | 0 | 14.585 | 0 | 0 |
| SMINT2001348 | 0 | 0 | 0 | 0 | 32.736 | 0 | 0 |
| SMINT2001397 | 0 | 0 | 0 | 0 | 100 | 0 | 0 |
| SMINT2001458 | 0 | 0 | 0 | 0 | 100 | 0 | 0 |
| SMINT2001461 | 0 | 0 | 0 | 0 | 100 | 0 | 0 |
| SMINT2001535 | 0 | 0 | 0 | 0 | 100 | 0 | 0 |
| SMINT2001559 | 0 | 0 | 0 | 0 | 100 | 0 | 0 |
| SMINT2001609 | 0 | 0 | 0 | 0 | 100 | 0 | 0 |
| SMINT2001615 | 0 | 0 | 0 | 0 | 59.418 | 0 | 0 |
| SMINT2001683 | 0 | 0 | 0 | 0 | 100 | 0 | 0 |
| SMINT2001731 | 0 | 0 | 0 | 0 | 100 | 0 | 0 |
| SMINT2001812 | 0 | 0 | 0 | 0 | 56.438 | 0 | 0 |
| SMINT2001818 | 0 | 0 | 0 | 0 | 9.924 | 3.261 | 12.758 |
| SMINT2001950 | 0 | 0 | 0 | 0 | 75.408 | 0 | 0 |
| SMINT2002126 | 0 | 0 | 0 | 0 | 100 | 0 | 0 |
| SMINT2002159 | 0 | 0 | 0 | 0 | 24.194 | 0 | 0 |
| SMINT2002202 | 0 | 0 | 0 | 0 | 100 | 0 | 0 |
| SMINT2002210 | 0 | 0 | 0 | 0 | 100 | 0 | 0 |
| SMINT2002224 | 0 | 0 | 0 | 0 | 44.673 | 0 | 0 |
| SMINT2002281 | 0 | 0 | 0 | 0 | 100 | 0 | 0 |
| SMINT2002311 | 0 | 0 | 0 | 0 | 18.692 | 9.215 | 72.094 |
| SMINT2002314 | 0 | 0 | 0 | 0 | 4.271 | 0 | 0 |
| SMINT2002328 | 0 | 0 | 0 | 0 | 65.453 | 0 | 0 |
| SMINT2002414 | 0 | 0 | 0 | 0 | 100 | 0 | 0 |
| SMINT2002457 | 0 | 0 | 0 | 0 | 100 | 0 | 0 |
| SMINT2002620 | 0 | 0 | 0 | 0 | 7.995 | 0 | 0 |
| SMINT2002689 | 0 | 0 | 0 | 0 | 4.148 | 0 | 0 |
| SMINT2002743 | 0 | 0 | 0 | 0 | 100 | 0 | 0 |
| SMINT2002778 | 0 | 0 | 0 | 0 | 74.739 | 0 | 0 |
| SMINT2002880 | 0 | 0 | 0 | 0 | 100 | 0 | 0 |
| SMINT2002882 | 0 | 0 | 0 | 0 | 10.246 | 0 | 0 |
| SMINT2002884 | 0 | 0 | 0 | 0 | 13.034 | 6.426 | 0 |
| SMINT2002899 | 0 | 0 | 0 | 0 | 100 | 0 | 0 |
| SMINT2002974 | 0 | 0 | 0 | 0 | 100 | 0 | 0 |
| SMINT2002976 | 0 | 0 | 0 | 0 | 18.406 | 0 | 0 |
| SMINT2003003 | 0 | 0 | 0 | 0 | 69.568 | 0 | 0 |
| SMINT2003074 | 0 | 0 | 0 | 0 | 4.837 | 0 | 9.328 |
| SMINT2003128 | 0 | 0 | 0 | 0 | 100 | 0 | 0 |
| SMINT2003150 | 0 | 0 | 0 | 0 | 77.788 | 0 | 0 |
| SMINT2003169 | 0 | 0 | 0 | 3.230 | 1.660 | 2.455 | 0 |
| SMINT2003317 | 0 | 0 | 0 | 0 | 100 | 0 | 0 |
| SMINT2003340 | 0 | 0 | 0 | 0 | 10.368 | 5.111 | 0 |
| SMINT2003386 | 0 | 0 | 0 | 0 | 100 | 0 | 0 |
| SMINT2003423 | 0 | 0 | 0 | 0 | 38.336 | 0 | 0 |
| SMINT2003505 | 0 | 0 | 0 | 0 | 11.112 | 5.478 | 0 |
| SMINT2003551 | 0 | 0 | 0 | 0 | 48.952 | 0 | 0 |
| SMINT2003569 | 0 | 0 | 0 | 0 | 100 | 0 | 0 |
| SMINT2003641 | 0 | 0 | 0 | 0 | 100 | 0 | 0 |
| SMINT2003644 | 0 | 0 | 0 | 0 | 100 | 0 | 0 |
| SMINT2003866 | 0 | 0 | 0 | 0 | 100 | 0 | 0 |
| SMINT2003905 | 0 | 0 | 0 | 0 | 2.732 | 0 | 0 |
| SMINT2004023 | 0 | 10.746 | 0 | 0 | 5.382 | 0 | 0 |
| SMINT2004037 | 0 | 0 | 0 | 0 | 67.907 | 0 | 0 |
| SMINT2004047 | 0 | 0 | 0 | 0 | 100 | 0 | 0 |
| SMINT2004086 | 0 | 0 | 0 | 0 | 100 | 0 | 0 |
| SMINT2004144 | 0 | 0 | 0 | 0 | 4.805 | 0 | 0 |
| SMINT2004280 | 0 | 0 | 0 | 0 | 44.959 | 0 | 0 |
| SMINT2004299 | 0 | 0 | 0 | 0 | 31.847 | 0 | 0 |
| SMINT2004339 | 0 | 0 | 0 | 0 | 100 | 0 | 0 |
| SMINT2004350 | 0 | 0 | 0 | 0 | 46.110 | 0 | 0 |
| SMINT2004414 | 0 | 0 | 0 | 0 | 83.254 | 0 | 0 |
| SMINT2004473 | 0 | 0 | 0 | 0 | 100 | 0 | 0 |
| SMINT2004547 | 0 | 0 | 0 | 0 | 100 | 0 | 0 |
| SMINT2004583 | 0 | 0 | 0 | 0 | 13.670 | 0 | 0 |
| SMINT2004589 | 0 | 0 | 0 | 0 | 28.285 | 0 | 27.274 |
| SMINT2004729 | 0 | 0 | 0 | 0 | 45.320 | 0 | 0 |
| SMINT2004781 | 0 | 0 | 0 | 0 | 100 | 0 | 0 |
| SMINT2004872 | 0 | 0 | 0 | 0 | 14.926 | 0 | 0 |
| SMINT2004891 | 0 | 0 | 0 | 0 | 100 | 0 | 0 |
| SMINT2004909 | 0 | 0 | 0 | 0 | 100 | 0 | 0 |
| SMINT2004972 | 0 | 0 | 0 | 0 | 27.951 | 0 | 0 |
| SMINT2004992 | 0 | 0 | 0 | 0 | 100 | 0 | 0 |
| SMINT2005075 | 0 | 0 | 0 | 0 | 100 | 0 | 0 |
| SMINT2005161 | 0 | 0 | 0 | 0 | 100 | 0 | 0 |
| SMINT2005174 | 0 | 0 | 0 | 0 | 100 | 0 | 0 |
| SMINT2005213 | 0 | 0 | 0 | 0 | 100 | 0 | 0 |
| SMINT2005330 | 0 | 0 | 0 | 0 | 48.668 | 0 | 0 |
| SMINT2005368 | 0 | 0 | 0 | 0 | 12.432 | 0 | 0 |
| SMINT2005387 | 0 | 0 | 0 | 0 | 80.886 | 0 | 0 |
| SMINT2005402 | 0 | 0 | 0 | 0 | 83.254 | 0 | 0 |
| SMINT2005405 | 0 | 0 | 0 | 0 | 100 | 0 | 0 |
| SMINT2005621 | 0 | 0 | 0 | 0 | 100 | 0 | 0 |
| SMINT2005623 | 0 | 0 | 0 | 0 | 100 | 0 | 0 |
| SMINT2005624 | 0 | 0 | 0 | 0 | 100 | 0 | 0 |
| SMINT2005688 | 0 | 0 | 0 | 0 | 8.807 | 0 | 0 |
| SMINT2005800 | 0 | 0 | 0 | 0 | 100 | 0 | 0 |
| SMINT2005956 | 0 | 18.546 | 0 | 0 | 9.288 | 0 | 0 |
| SMINT2006078 | 0 | 0 | 0 | 0 | 100 | 0 | 0 |
| SMINT2006205 | 0 | 0 | 0 | 0 | 100 | 0 | 0 |
| SMINT2006331 | 0 | 0 | 0 | 0 | 100 | 0 | 0 |
| SMINT2006596 | 0 | 0 | 0 | 0 | 100 | 0 | 0 |
| SMINT2006641 | 0 | 0 | 0 | 0 | 100 | 0 | 0 |
| SMINT2006648 | 0 | 0 | 0 | 0 | 100 | 0 | 0 |
| SMINT2006708 | 0 | 0 | 0 | 0 | 100 | 0 | 0 |
| SMINT2006716 | 0 | 0 | 0 | 0 | 41.444 | 0 | 0 |
| SMINT2006801 | 0 | 0 | 0 | 0 | 56.833 | 0 | 0 |
| SMINT2007062 | 0 | 0 | 0 | 0 | 80.886 | 0 | 0 |
| SMINT2007101 | 0 | 0 | 0 | 0 | 76.088 | 0 | 0 |
| SMINT2007140 | 0 | 0 | 0 | 0 | 100 | 0 | 0 |
| SMINT2007187 | 0 | 0 | 0 | 0 | 23.689 | 0 | 0 |
| SMINT2007219 | 0 | 0 | 0 | 0 | 100 | 0 | 0 |
| SMINT2007294 | 0 | 0 | 0 | 0 | 100 | 0 | 0 |
| SMINT2007365 | 0 | 0 | 0 | 0 | 100 | 0 | 0 |
| SMINT2007391 | 0 | 0 | 0 | 0 | 100 | 0 | 0 |
| SMINT2007433 | 0 | 0 | 0 | 0 | 29.456 | 0 | 0 |
| SMINT2007508 | 0 | 0 | 0 | 0 | 58.601 | 0 | 0 |
| SMINT2007526 | 0 | 0 | 0 | 0 | 100 | 0 | 0 |
| SMINT2007579 | 0 | 0 | 0 | 0 | 100 | 0 | 0 |
| SMINT2007647 | 0 | 0 | 0 | 0 | 77.788 | 0 | 0 |
| SMINT2007729 | 0 | 0 | 0 | 0 | 20.292 | 0 | 0 |
| SMINT2007790 | 0 | 0 | 0 | 0 | 100 | 0 | 0 |
| SMINT2007792 | 0 | 0 | 0 | 0 | 29.494 | 0 | 0 |
| SMINT2007796 | 0 | 0 | 0 | 0 | 100 | 0 | 0 |
| SMINT2007867 | 0 | 0 | 0 | 0 | 100 | 0 | 0 |
| SMINT2007932 | 0 | 0 | 0 | 0 | 100 | 0 | 0 |
| SMINT2008042 | 0 | 0 | 0 | 0 | 100 | 0 | 0 |
| SMINT2008054 | 0 | 0 | 0 | 0 | 66.980 | 33.020 | 0 |
| SMINT2008133 | 0 | 0 | 0 | 0 | 83.254 | 0 | 0 |
| SMINT2008277 | 0 | 0 | 0 | 0 | 100 | 0 | 0 |
| SMINT2008329 | 0 | 0 | 0 | 0 | 100 | 0 | 0 |
| SMINT2008455 | 0 | 0 | 0 | 0 | 100 | 0 | 0 |
| SMINT2008491 | 0 | 0 | 0 | 0 | 100 | 0 | 0 |
| SMINT2008531 | 0 | 0 | 0 | 0 | 100 | 0 | 0 |
| SMINT2008545 | 0 | 0 | 0 | 0 | 100 | 0 | 0 |
| SMINT2008558 | 0 | 0 | 0 | 0 | 100 | 0 | 0 |
| SMINT2008590 | 0 | 0 | 0 | 0 | 33.779 | 0 | 0 |
| SMINT2008625 | 0 | 0 | 0 | 0 | 100 | 0 | 0 |
| SMINT2008672 | 0 | 0 | 0 | 0 | 47.955 | 0 | 0 |
| SMINT2008690 | 0 | 0 | 0 | 0 | 100 | 0 | 0 |
| SMINT2008715 | 0 | 0 | 0 | 0 | 100 | 0 | 0 |
| SMINT2008720 | 0 | 0 | 0 | 0 | 100 | 0 | 0 |
| SMINT2008817 | 0 | 0 | 0 | 0 | 100 | 0 | 0 |
| SMINT2008844 | 0 | 0 | 0 | 0 | 100 | 0 | 0 |
| SMINT2008869 | 0 | 0 | 0 | 0 | 49.902 | 0 | 0 |
| SMINT2008917 | 0 | 0 | 0 | 0 | 39.482 | 0 | 0 |
| SMINT2008921 | 0 | 0 | 0 | 0 | 3.915 | 0 | 0 |
| SMINT2008960 | 0 | 0 | 0 | 0 | 2.414 | 2.380 | 4.656 |
| SMINT2009119 | 0 | 0 | 0 | 0 | 100 | 0 | 0 |
| SMINT2009121 | 0 | 0 | 0 | 0 | 100 | 0 | 0 |
| SMINT2009212 | 0 | 0 | 0 | 0 | 100 | 0 | 0 |
| SMINT2009216 | 0 | 0 | 0 | 0 | 19.533 | 0 | 0 |
| SMINT2009233 | 0 | 0 | 0 | 0 | 83.254 | 0 | 0 |
| SMINT2009259 | 0 | 0 | 0 | 0 | 100 | 0 | 0 |
| SMINT2009272 | 0 | 0 | 0 | 0 | 100 | 0 | 0 |
| SMINT2009292 | 0 | 0 | 0 | 0 | 12.516 | 0 | 0 |
| SMINT2009363 | 0 | 0 | 0 | 0 | 100 | 0 | 0 |
| SMINT2009415 | 0 | 0 | 0 | 0 | 76.088 | 0 | 0 |
| SMINT2009468 | 0 | 0 | 0 | 0 | 100 | 0 | 0 |
| SMINT2009505 | 0 | 0 | 0 | 0 | 100 | 0 | 0 |
| SMINT2009529 | 0 | 0 | 0 | 0 | 100 | 0 | 0 |
| SMINT2009832 | 0 | 0 | 0 | 0 | 32.604 | 0 | 0 |
| SMINT2009895 | 0 | 0 | 0 | 0 | 100 | 0 | 0 |
| SMINT2009902 | 0 | 0 | 0 | 0 | 100 | 0 | 0 |
| SMINT2009973 | 0 | 0 | 0 | 0 | 100 | 0 | 0 |
| SMINT2010015 | 0 | 0 | 0 | 0 | 100 | 0 | 0 |
| SMINT2010068 | 0 | 0 | 0 | 0 | 100 | 0 | 0 |
| SMINT2010076 | 0 | 0 | 0 | 0 | 100 | 0 | 0 |
| SMINT2010084 | 0 | 0 | 0 | 0 | 12.125 | 5.977 | 0 |
| SMINT2010144 | 0 | 0 | 0 | 0 | 76.088 | 0 | 0 |
| SMINT2010200 | 0 | 0 | 0 | 0 | 33.450 | 0 | 0 |
| SMINT2010278 | 0 | 0 | 0 | 0 | 100 | 0 | 0 |
| SMINT2010324 | 0 | 0 | 0 | 0 | 76.088 | 0 | 0 |
| SMINT2010326 | 0 | 0 | 0 | 0 | 100 | 0 | 0 |
| SMINT2010369 | 0 | 0 | 0 | 0 | 80.886 | 0 | 0 |
| SMINT2010426 | 0 | 0 | 42.229 | 0 | 19.116 | 0 | 0 |
| SMINT2010500 | 0 | 0 | 0 | 0 | 100 | 0 | 0 |
| SMINT2010533 | 0 | 0 | 0 | 0 | 100 | 0 | 0 |
| SMINT2010629 | 0 | 0 | 0 | 0 | 100 | 0 | 0 |
| SMINT2010639 | 0 | 0 | 0 | 0 | 9.559 | 0 | 0 |
| SMINT2010672 | 0 | 0 | 0 | 0 | 100 | 0 | 0 |
| SMINT2010753 | 0 | 0 | 0 | 0 | 100 | 0 | 0 |
| SMINT2010853 | 0 | 0 | 0 | 0 | 100 | 0 | 0 |
| SMINT2010897 | 0 | 0 | 0 | 0 | 100 | 0 | 0 |
| SMINT2010901 | 0 | 0 | 0 | 0 | 12.393 | 6.110 | 0 |
| SMINT2010959 | 0 | 0 | 0 | 0 | 54.616 | 26.925 | 0 |
| SMINT2010997 | 0 | 0 | 0 | 0 | 100 | 0 | 0 |
| SMINT2011033 | 0 | 0 | 0 | 0 | 74.739 | 0 | 0 |
| SMINT2011066 | 0 | 0 | 0 | 0 | 100 | 0 | 0 |
| SMINT2011273 | 0 | 0 | 0 | 0 | 100 | 0 | 0 |
| SMINT2011311 | 0 | 0 | 0 | 0 | 66.474 | 0 | 0 |
| SMINT2011406 | 0 | 0 | 0 | 0 | 100 | 0 | 0 |
| SMINT2011509 | 0 | 0 | 0 | 0 | 100 | 0 | 0 |
| SMINT2011567 | 0 | 0 | 0 | 0 | 33.480 | 0 | 0 |
| SMINT2011588 | 0 | 0 | 0 | 0 | 65.637 | 0 | 0 |
| SMINT2011656 | 0 | 0 | 0 | 0 | 83.254 | 0 | 0 |
| SMINT2011888 | 0 | 0 | 0 | 0 | 100 | 0 | 0 |
| SMINT2011958 | 0 | 0 | 0 | 0 | 100 | 0 | 0 |
| SMINT2012040 | 0 | 0 | 0 | 0 | 100 | 0 | 0 |
| SMINT2012122 | 0 | 0 | 0 | 0 | 12.336 | 0 | 0 |
| SMINT2012179 | 0 | 0 | 0 | 0 | 65.556 | 0 | 0 |
| SMINT2012195 | 0 | 0 | 0 | 0 | 83.254 | 0 | 0 |
| SMINT2012285 | 0 | 0 | 0 | 0 | 100 | 0 | 0 |
| SMINT2012291 | 0 | 0 | 0 | 0 | 16.272 | 0 | 0 |
| SMINT2012501 | 0 | 0 | 0 | 0 | 28.061 | 0 | 0 |
| SMINT2012734 | 0 | 0 | 0 | 0 | 100 | 0 | 0 |
| SMINT2012793 | 0 | 0 | 0 | 0 | 100 | 0 | 0 |
| SMINT2013031 | 0 | 0 | 0 | 0 | 10.952 | 0 | 0 |
| SMINT2013032 | 0 | 0 | 0 | 0 | 42.206 | 0 | 0 |
| SMINT2013129 | 0 | 0 | 0 | 0 | 100 | 0 | 0 |
| SMINT2013170 | 0 | 0 | 0 | 0 | 38.476 | 0 | 0 |
| SMINT2013181 | 0 | 0 | 0 | 0 | 77.788 | 0 | 0 |
| SMINT2013228 | 0 | 0 | 0 | 0 | 100 | 0 | 0 |
| SMINT2013613 | 0 | 0 | 0 | 0 | 100 | 0 | 0 |
| SMINT2013626 | 0 | 0 | 0 | 0 | 100 | 0 | 0 |
| SMINT2013695 | 0 | 0 | 0 | 0 | 74.739 | 0 | 0 |
| SMINT2013833 | 0 | 0 | 0 | 0 | 100 | 0 | 0 |
| SMINT2013890 | 0 | 0 | 0 | 0 | 32.378 | 0 | 0 |
| SMINT2014166 | 0 | 0 | 0 | 0 | 100 | 0 | 0 |
| SMINT2014282 | 0 | 0 | 0 | 0 | 100 | 0 | 0 |
| SMINT2014443 | 0 | 0 | 0 | 0 | 100 | 0 | 0 |
| SMINT2014480 | 0 | 0 | 0 | 0 | 5.606 | 0 | 0 |
| SMINT2014489 | 0 | 0 | 0 | 0 | 100 | 0 | 0 |
| SMINT2014721 | 0 | 0 | 0 | 0 | 100 | 0 | 0 |
| SMINT2015006 | 0 | 0 | 0 | 0 | 100 | 0 | 0 |
| SMINT2015294 | 0 | 0 | 0 | 0 | 28.094 | 0 | 0 |
| SMINT2015306 | 0 | 0 | 0 | 0 | 35.321 | 0 | 0 |
| SMINT2015326 | 0 | 0 | 0 | 0 | 100 | 0 | 0 |
| SMINT2015353 | 0 | 0 | 0 | 0 | 100 | 0 | 0 |
| SMINT2015454 | 0 | 0 | 0 | 0 | 100 | 0 | 0 |
| SMINT2015518 | 0 | 0 | 0 | 0 | 100 | 0 | 0 |
| SMINT2015745 | 0 | 0 | 0 | 0 | 100 | 0 | 0 |
| SMINT2015787 | 0 | 0 | 0 | 0 | 100 | 0 | 0 |
| SMINT2015810 | 0 | 0 | 0 | 0 | 100 | 0 | 0 |
| SMINT2016122 | 0 | 0 | 0 | 0 | 100 | 0 | 0 |
| SMINT2016146 | 0 | 0 | 0 | 0 | 60.601 | 0 | 0 |
| SMINT2016286 | 0 | 0 | 0 | 0 | 100 | 0 | 0 |
| SMINT2016313 | 0 | 0 | 0 | 0 | 100 | 0 | 0 |
| SMINT2016396 | 0 | 0 | 0 | 0 | 49.902 | 0 | 0 |
| SMINT2016412 | 0 | 0 | 0 | 0 | 19.978 | 0 | 0 |
| SMINT2016440 | 0 | 0 | 0 | 0 | 100 | 0 | 0 |
| SMINT2016477 | 0 | 0 | 0 | 0 | 100 | 0 | 0 |
| SMINT2016544 | 0 | 0 | 0 | 0 | 100 | 0 | 0 |
| SMINT2016857 | 0 | 0 | 0 | 0 | 100 | 0 | 0 |
| SMINT2017134 | 0 | 0 | 0 | 0 | 76.088 | 0 | 0 |
| SMINT2017319 | 0 | 0 | 0 | 0 | 100 | 0 | 0 |
| SMINT2017324 | 0 | 0 | 0 | 0 | 100 | 0 | 0 |
| SMINT2017410 | 0 | 0 | 0 | 0 | 100 | 0 | 0 |
| SMINT2017431 | 0 | 0 | 0 | 0 | 100 | 0 | 0 |
| SMINT2017432 | 0 | 0 | 0 | 0 | 100 | 0 | 0 |
| SMINT2017436 | 0 | 0 | 0 | 0 | 100 | 0 | 0 |
| SMINT2017599 | 0 | 0 | 0 | 0 | 14.490 | 0 | 0 |
| SMINT2017659 | 0 | 0 | 0 | 0 | 100 | 0 | 0 |
| SMINT2017736 | 0 | 0 | 0 | 0 | 100 | 0 | 0 |
| SMINT2017781 | 0 | 0 | 0 | 0 | 100 | 0 | 0 |
| SMINT2017855 | 0 | 0 | 0 | 0 | 100 | 0 | 0 |
| SMINT2017884 | 0 | 0 | 0 | 0 | 83.254 | 0 | 0 |
| SMINT2017964 | 0 | 0 | 0 | 0 | 17.105 | 0 | 0 |
| SMINT2017974 | 0 | 0 | 0 | 0 | 100 | 0 | 0 |
| SMINT2018343 | 0 | 0 | 0 | 0 | 100 | 0 | 0 |
| SMINT2018353 | 0 | 0 | 0 | 0 | 34.595 | 0 | 0 |
| SMINT2018592 | 0 | 0 | 0 | 0 | 100 | 0 | 0 |
| SMINT2018681 | 0 | 0 | 0 | 0 | 14.757 | 0 | 0 |
| SMINT2019017 | 0 | 0 | 0 | 0 | 100 | 0 | 0 |
| SMINT2019105 | 0 | 0 | 0 | 0 | 100 | 0 | 0 |
| SMINT2019142 | 0 | 0 | 0 | 0 | 100 | 0 | 0 |
| SMINT2019153 | 0 | 0 | 0 | 0 | 100 | 0 | 0 |
| SMINT2019200 | 0 | 0 | 0 | 0 | 100 | 0 | 0 |
| SPLEN1000013 | 0 | 0 | 0 | 0 | 0 | 16.928 | 0 |
| SPLEN1000041 | 0 | 0 | 0 | 0 | 0 | 67.599 | 0 |
| SPLEN1000049 | 0 | 0 | 0 | 0 | 0 | 37.925 | 0 |
| SPLEN1000056 | 0 | 0 | 0 | 0 | 0 | 67.599 | 0 |
| SPLEN1000087 | 0 | 0 | 0 | 0 | 0 | 100 | 0 |
| SPLEN1000089 | 0 | 0 | 0 | 0 | 0 | 6.913 | 0 |
| SPLEN1000091 | 0 | 0 | 0 | 0 | 0 | 100 | 0 |
| SPLEN1000106 | 0 | 0 | 0 | 0 | 0 | 8.098 | 0 |
| SPLEN1000116 | 0 | 0 | 0 | 0 | 0 | 4.305 | 0 |
| SPLEN1000134 | 0 | 0 | 0 | 0 | 0 | 60.831 | 0 |
| SPLEN1000139 | 0 | 0 | 0 | 0 | 0 | 49.431 | 0 |
| SPLEN1000143 | 0 | 0 | 0 | 0 | 0 | 100 | 0 |
| SPLEN1000144 | 0 | 0 | 0 | 0 | 0 | 18.188 | 0 |
| SPLEN1000145 | 0 | 0 | 0 | 0 | 0 | 100 | 0 |
| SPLEN1000156 | 0 | 0 | 0 | 0 | 0 | 100 | 0 |
| SPLEN1000163 | 0 | 0 | 0 | 0 | 0 | 100 | 0 |
| SPLEN1000165 | 0 | 0 | 0 | 0 | 0 | 8.681 | 0 |
| SPLEN1000166 | 0 | 0 | 0 | 0 | 0 | 1.967 | 7.693 |
| SPLEN1000178 | 0 | 0 | 0 | 0 | 0 | 100 | 0 |
| SPLEN2000020 | 0 | 0 | 0 | 0 | 0 | 100 | 0 |
| SPLEN2000047 | 0 | 0 | 0 | 0 | 0 | 28.708 | 0 |
| SPLEN2000064 | 0 | 0 | 0 | 0 | 0 | 100 | 0 |
| SPLEN2000072 | 0 | 0 | 0 | 0 | 42.383 | 10.447 | 0 |
| SPLEN2000098 | 0 | 0 | 0 | 0 | 0 | 20.954 | 0 |
| SPLEN2000126 | 0 | 0 | 0 | 0 | 0 | 100 | 0 |
| SPLEN2000134 | 0 | 0 | 0 | 0 | 0 | 9.114 | 0 |
| SPLEN2000143 | 0 | 0 | 0 | 0 | 0 | 80.667 | 0 |
| SPLEN2000189 | 0 | 0 | 0 | 0 | 0 | 100 | 0 |
| SPLEN2000197 | 0 | 0 | 0 | 0 | 0 | 61.070 | 0 |
| SPLEN2000205 | 0 | 0 | 0 | 0 | 0 | 100 | 0 |
| SPLEN2000210 | 0 | 0 | 0 | 0 | 0 | 23.091 | 0 |
| SPLEN2000222 | 0 | 0 | 0 | 0 | 0 | 21.249 | 0 |
| SPLEN2000242 | 0 | 0 | 0 | 0 | 0 | 16.714 | 0 |
| SPLEN2000243 | 0 | 0 | 0 | 0 | 0 | 37.818 | 0 |
| SPLEN2000247 | 0 | 0 | 0 | 0 | 0 | 100 | 0 |
| SPLEN2000255 | 0 | 0 | 0 | 0 | 21.677 | 18.702 | 0 |
| SPLEN2000258 | 0 | 0 | 0 | 0 | 15.448 | 7.616 | 0 |
| SPLEN2000267 | 0 | 0 | 0 | 0 | 0 | 10.156 | 0 |
| SPLEN2000270 | 0 | 0 | 0 | 0 | 0 | 100 | 0 |
| SPLEN2000307 | 0 | 0 | 0 | 0 | 0 | 100 | 0 |
| SPLEN2000310 | 0 | 0 | 0 | 0 | 0 | 23.091 | 0 |
| SPLEN2000341 | 0 | 0 | 0 | 0 | 47.783 | 23.557 | 0 |
| SPLEN2000348 | 0 | 0 | 0 | 0 | 0 | 9.733 | 0 |
| SPLEN2000350 | 0 | 0 | 0 | 0 | 0 | 100 | 0 |
| SPLEN2000357 | 0 | 0 | 0 | 0 | 0 | 100 | 0 |
| SPLEN2000364 | 0 | 0 | 0 | 0 | 0 | 100 | 0 |
| SPLEN2000402 | 0 | 0 | 0 | 0 | 0 | 100 | 0 |
| SPLEN2000414 | 0 | 0 | 0 | 0 | 0 | 23.091 | 0 |
| SPLEN2000420 | 0 | 0 | 0 | 0 | 0 | 100 | 0 |
| SPLEN2000443 | 0 | 0 | 0 | 0 | 0 | 38.429 | 0 |
| SPLEN2000448 | 0 | 0 | 0 | 0 | 0 | 100 | 0 |
| SPLEN2000450 | 0 | 0 | 0 | 0 | 0 | 100 | 0 |
| SPLEN2000464 | 0 | 0 | 0 | 0 | 0 | 100 | 0 |
| SPLEN2000496 | 0 | 0 | 0 | 0 | 0 | 100 | 0 |
| SPLEN2000505 | 0 | 0 | 3.285 | 0 | 0 | 0.733 | 0 |
| SPLEN2000515 | 0 | 0 | 0 | 0 | 0 | 100 | 0 |
| SPLEN2000516 | 0 | 0 | 0 | 0 | 0 | 41.589 | 0 |
| SPLEN2000537 | 0 | 0 | 0 | 0 | 0 | 63.499 | 0 |
| SPLEN2000541 | 0 | 0 | 0 | 0 | 0 | 100 | 0 |
| SPLEN2000607 | 0 | 0 | 0 | 0 | 0 | 100 | 0 |
| SPLEN2000630 | 0 | 0 | 0 | 0 | 0 | 100 | 0 |
| SPLEN2000695 | 0 | 0 | 0 | 0 | 0 | 100 | 0 |
| SPLEN2000698 | 0 | 0 | 0 | 0 | 0 | 3.689 | 0 |
| SPLEN2000839 | 0 | 0 | 0 | 0 | 0 | 15.878 | 0 |
| SPLEN2000874 | 0 | 0 | 0 | 3.347 | 0 | 0.848 | 0 |
| SPLEN2000882 | 0 | 0 | 0 | 0 | 6.199 | 12.224 | 0 |
| SPLEN2001135 | 0 | 0 | 0 | 0 | 0 | 100 | 0 |
| SPLEN2001141 | 0 | 0 | 0 | 0 | 0 | 8.214 | 0 |
| SPLEN2001157 | 0 | 0 | 42.883 | 0 | 0 | 9.570 | 0 |
| SPLEN2001176 | 0 | 0 | 0 | 0 | 0 | 100 | 0 |
| SPLEN2001227 | 0 | 0 | 0 | 0 | 0 | 100 | 0 |
| SPLEN2001245 | 0 | 0 | 0 | 0 | 0 | 1.944 | 0 |
| SPLEN2001278 | 0 | 0 | 0 | 0 | 0 | 67.599 | 0 |
| SPLEN2001354 | 0 | 0 | 0 | 0 | 0 | 100 | 0 |
| SPLEN2001367 | 0 | 0 | 0 | 0 | 0 | 100 | 0 |
| SPLEN2001383 | 0 | 0 | 0 | 0 | 0 | 100 | 0 |
| SPLEN2001476 | 0 | 0 | 0 | 0 | 0 | 67.599 | 0 |
| SPLEN2001503 | 0 | 0 | 0 | 0 | 0 | 34.999 | 0 |
| SPLEN2001510 | 0 | 0 | 0 | 0 | 0 | 100 | 0 |
| SPLEN2001599 | 0 | 0 | 0 | 0 | 0 | 24.827 | 0 |
| SPLEN2001626 | 0 | 0 | 0 | 0 | 0 | 32.545 | 0 |
| SPLEN2001650 | 0 | 0 | 0 | 0 | 0 | 100 | 0 |
| SPLEN2001689 | 0 | 0 | 0 | 0 | 0 | 48.561 | 0 |
| SPLEN2001710 | 0 | 0 | 0 | 0 | 0 | 13.491 | 0 |
| SPLEN2001761 | 0 | 0 | 0 | 0 | 0 | 18.511 | 0 |
| SPLEN2001781 | 0 | 0 | 0 | 0 | 0 | 100 | 0 |
| SPLEN2001881 | 0 | 0 | 0 | 0 | 0 | 100 | 0 |
| SPLEN2001912 | 0 | 0 | 0 | 0 | 0 | 100 | 0 |
| SPLEN2001945 | 0 | 0 | 0 | 0 | 0 | 100 | 0 |
| SPLEN2002007 | 0 | 0 | 0 | 0 | 0 | 33.199 | 0 |
| SPLEN2002053 | 0 | 0 | 0 | 0 | 0 | 63.499 | 0 |
| SPLEN2002133 | 0 | 0 | 0 | 0 | 0 | 72.687 | 0 |
| SPLEN2002147 | 0 | 0 | 0 | 0 | 0 | 100 | 0 |
| SPLEN2002166 | 0 | 0 | 0 | 0 | 0 | 100 | 0 |
| SPLEN2002175 | 0 | 0 | 0 | 0 | 0 | 100 | 0 |
| SPLEN2002223 | 0 | 0 | 0 | 0 | 0 | 60.831 | 0 |
| SPLEN2002272 | 0 | 0 | 0 | 0 | 0 | 32.545 | 0 |
| SPLEN2002314 | 0 | 0 | 0 | 0 | 0 | 100 | 0 |
| SPLEN2002335 | 0 | 0 | 0 | 0 | 0 | 3.523 | 0 |
| SPLEN2002343 | 0 | 0 | 0 | 0 | 0 | 100 | 0 |
| SPLEN2002354 | 0 | 0 | 0 | 0 | 0 | 100 | 0 |
| SPLEN2002385 | 0 | 0 | 0 | 0 | 0 | 100 | 0 |
| SPLEN2002419 | 0 | 0 | 0 | 0 | 0 | 100 | 0 |
| SPLEN2002451 | 0 | 0 | 0 | 0 | 0 | 67.599 | 0 |
| SPLEN2002462 | 0 | 0 | 0 | 0 | 0 | 100 | 0 |
| SPLEN2002463 | 0 | 0 | 0 | 0 | 0 | 13.174 | 0 |
| SPLEN2002467 | 0 | 0 | 0 | 0 | 0 | 5.667 | 0 |
| SPLEN2002477 | 0 | 0 | 0 | 0 | 5.734 | 45.229 | 0 |
| SPLEN2002493 | 0 | 0 | 0 | 0 | 0 | 3.011 | 0 |
| SPLEN2002662 | 0 | 0 | 0 | 0 | 0 | 100 | 0 |
| SPLEN2002695 | 0 | 0 | 0 | 0 | 0 | 100 | 0 |
| SPLEN2002707 | 0 | 0 | 0 | 0 | 0 | 100 | 0 |
| SPLEN2002744 | 0 | 0 | 0 | 0 | 0 | 3.880 | 0 |
| SPLEN2002917 | 0 | 0 | 0 | 0 | 0 | 100 | 0 |
| SPLEN2002931 | 0 | 0 | 0 | 0 | 0 | 7.094 | 0 |
| SPLEN2002957 | 0 | 0 | 0 | 0 | 0 | 100 | 0 |
| SPLEN2003160 | 0 | 0 | 0 | 0 | 0 | 100 | 0 |
| SPLEN2003204 | 0 | 0 | 0 | 0 | 0 | 100 | 0 |
| SPLEN2003219 | 0 | 0 | 0 | 0 | 0 | 100 | 0 |
| SPLEN2003297 | 0 | 0 | 0 | 0 | 0 | 46.191 | 0 |
| SPLEN2003396 | 0 | 0 | 0 | 0 | 0 | 32.545 | 0 |
| SPLEN2003678 | 0 | 0 | 0 | 0 | 0 | 61.070 | 0 |
| SPLEN2003878 | 0 | 0 | 0 | 0 | 0 | 100 | 0 |
| SPLEN2003918 | 0 | 0 | 0 | 0 | 0 | 100 | 0 |
| SPLEN2003924 | 0 | 0 | 0 | 0 | 0 | 100 | 0 |
| SPLEN2004060 | 0 | 0 | 0 | 0 | 0 | 100 | 0 |
| SPLEN2004078 | 0 | 0 | 0 | 0 | 0 | 25.996 | 0 |
| SPLEN2004124 | 0 | 0 | 0 | 0 | 0 | 100 | 0 |
| SPLEN2004148 | 0 | 0 | 0 | 0 | 0 | 100 | 0 |
| SPLEN2004181 | 0 | 0 | 0 | 0 | 0 | 13.695 | 0 |
| SPLEN2004220 | 0 | 0 | 0 | 0 | 0 | 10.007 | 0 |
| SPLEN2004343 | 0 | 0 | 0 | 0 | 0 | 31.298 | 0 |
| SPLEN2004346 | 0 | 0 | 0 | 0 | 0 | 100 | 0 |
| SPLEN2004368 | 0 | 0 | 0 | 0 | 0 | 100 | 0 |
| SPLEN2004555 | 0 | 0 | 8.297 | 0 | 0 | 3.703 | 0 |
| SPLEN2004611 | 0 | 0 | 0 | 0 | 0 | 67.599 | 0 |
| SPLEN2004662 | 0 | 0 | 0 | 0 | 0 | 65.533 | 0 |
| SPLEN2004773 | 0 | 0 | 0 | 0 | 0 | 3.714 | 0 |
| SPLEN2004844 | 0 | 0 | 0 | 0 | 0 | 19.862 | 0 |
| SPLEN2004880 | 95.022 | 0 | 0 | 0 | 0 | 1.025 | 2.004 |
| SPLEN2004984 | 0 | 0 | 0 | 0 | 0 | 13.708 | 0 |
| SPLEN2005009 | 0 | 0 | 0 | 0 | 0 | 14.955 | 0 |
| SPLEN2005227 | 0 | 0 | 0 | 0 | 0 | 100 | 0 |
| SPLEN2005272 | 0 | 0 | 0 | 0 | 0 | 100 | 0 |
| SPLEN2005342 | 0 | 0 | 0 | 0 | 0 | 9.281 | 0 |
| SPLEN2005416 | 0 | 0 | 0 | 0 | 0 | 60.831 | 0 |
| SPLEN2005429 | 0 | 0 | 0 | 0 | 0 | 6.373 | 0 |
| SPLEN2005450 | 0 | 0 | 0 | 0 | 0 | 100 | 0 |
| SPLEN2005474 | 0 | 0 | 0 | 0 | 0 | 100 | 0 |
| SPLEN2005560 | 0 | 0 | 0 | 0 | 0 | 1.831 | 0 |
| SPLEN2005727 | 0 | 0 | 0 | 0 | 0 | 100 | 0 |
| SPLEN2005783 | 0 | 0 | 0 | 0 | 0 | 11.340 | 0 |
| SPLEN2005790 | 0 | 0 | 0 | 0 | 0 | 67.599 | 0 |
| SPLEN2005806 | 0 | 0 | 0 | 0 | 0 | 2.128 | 0 |
| SPLEN2005818 | 0 | 0 | 0 | 0 | 0 | 38.781 | 0 |
| SPLEN2005838 | 0 | 0 | 0 | 0 | 0 | 63.033 | 0 |
| SPLEN2005869 | 0 | 0 | 0 | 0 | 0 | 11.172 | 0 |
| SPLEN2005927 | 0 | 0 | 33.569 | 0 | 15.196 | 7.491 | 0 |
| SPLEN2005939 | 0 | 0 | 0 | 0 | 0 | 100 | 0 |
| SPLEN2006122 | 0 | 0 | 0 | 0 | 0 | 2.930 | 0 |
| SPLEN2006133 | 0 | 0 | 0 | 6.514 | 6.695 | 6.601 | 0 |
| SPLEN2006143 | 0 | 0 | 0 | 0 | 0 | 3.892 | 0 |
| SPLEN2006232 | 0 | 0 | 0 | 0 | 0 | 14.970 | 0 |
| SPLEN2006268 | 0 | 0 | 0 | 0 | 0 | 100 | 0 |
| SPLEN2006283 | 0 | 0 | 0 | 0 | 0 | 100 | 0 |
| SPLEN2006305 | 0 | 0 | 0 | 4.337 | 4.458 | 8.791 | 0 |
| SPLEN2006325 | 0 | 0 | 0 | 0 | 0 | 14.493 | 0 |
| SPLEN2006374 | 0 | 0 | 0 | 0 | 0 | 2.644 | 0 |
| SPLEN2006389 | 0 | 0 | 0 | 0 | 0 | 100 | 0 |
| SPLEN2006425 | 0 | 0 | 0 | 0 | 0 | 100 | 0 |
| SPLEN2006671 | 0 | 0 | 0 | 0 | 0 | 32.498 | 0 |
| SPLEN2006701 | 0 | 0 | 0 | 0 | 0 | 100 | 0 |
| SPLEN2006785 | 0 | 0 | 0 | 0 | 0 | 100 | 0 |
| SPLEN2006875 | 0 | 0 | 0 | 0 | 0 | 100 | 0 |
| SPLEN2007182 | 0 | 0 | 0 | 0 | 0 | 22.235 | 0 |
| SPLEN2007276 | 0 | 0 | 0 | 0 | 0 | 4.614 | 0 |
| SPLEN2007314 | 0 | 0 | 0 | 0 | 0 | 100 | 0 |
| SPLEN2007326 | 0 | 0 | 0 | 0 | 0 | 67.599 | 0 |
| SPLEN2007350 | 0 | 0 | 0 | 0 | 0 | 100 | 0 |
| SPLEN2007388 | 0 | 0 | 0 | 0 | 0 | 46.191 | 0 |
| SPLEN2007498 | 0 | 0 | 0 | 0 | 0 | 4.553 | 0 |
| SPLEN2007619 | 0 | 0 | 0 | 0 | 0 | 100 | 0 |
| SPLEN2007653 | 0 | 0 | 0 | 0 | 0 | 100 | 0 |
| SPLEN2007689 | 0 | 0 | 0 | 0 | 0 | 100 | 0 |
| SPLEN2007695 | 0 | 0 | 0 | 0 | 0 | 100 | 0 |
| SPLEN2007739 | 0 | 0 | 0 | 0 | 0 | 10.563 | 0 |
| SPLEN2007750 | 0 | 0 | 0 | 0 | 0 | 16.833 | 0 |
| SPLEN2007794 | 0 | 0 | 0 | 0 | 0 | 17.241 | 0 |
| SPLEN2007879 | 0 | 0 | 0 | 0 | 50.875 | 25.081 | 0 |
| SPLEN2007926 | 0 | 0 | 0 | 0 | 0 | 100 | 0 |
| SPLEN2007951 | 0 | 0 | 0 | 0 | 0 | 41.102 | 0 |
| SPLEN2008007 | 0 | 0 | 0 | 0 | 0 | 100 | 0 |
| SPLEN2008135 | 0 | 0 | 0 | 0 | 0 | 100 | 0 |
| SPLEN2008164 | 0 | 0 | 0 | 0 | 0 | 100 | 0 |
| SPLEN2008317 | 0 | 0 | 0 | 0 | 0 | 100 | 0 |
| SPLEN2008460 | 0 | 0 | 0 | 0 | 0 | 4.558 | 0 |
| SPLEN2008496 | 0 | 0 | 0 | 0 | 0 | 13.469 | 0 |
| SPLEN2008591 | 0 | 0 | 0 | 0 | 0 | 72.687 | 0 |
| SPLEN2008786 | 0 | 0 | 0 | 0 | 0 | 100 | 0 |
| SPLEN2009081 | 0 | 0 | 0 | 0 | 0 | 11.259 | 0 |
| SPLEN2009088 | 0 | 0 | 0 | 0 | 0 | 100 | 0 |
| SPLEN2009163 | 0 | 0 | 0 | 0 | 0 | 31.971 | 0 |
| SPLEN2009315 | 0 | 0 | 0 | 0 | 0 | 59.326 | 0 |
| SPLEN2009340 | 0 | 0 | 0 | 0 | 0 | 100 | 0 |
| SPLEN2009512 | 0 | 0 | 0 | 0 | 0 | 28.811 | 0 |
| SPLEN2009513 | 0 | 0 | 0 | 0 | 0 | 10.785 | 42.191 |
| SPLEN2009541 | 0 | 0 | 0 | 0 | 0 | 100 | 0 |
| SPLEN2009548 | 0 | 0 | 0 | 0 | 0 | 100 | 0 |
| SPLEN2009555 | 0 | 0 | 0 | 0 | 0 | 14.776 | 0 |
| SPLEN2009581 | 0 | 0 | 0 | 0 | 0 | 100 | 0 |
| SPLEN2009733 | 0 | 0 | 0 | 0 | 0 | 100 | 0 |
| SPLEN2009803 | 0 | 0 | 0 | 0 | 0 | 100 | 0 |
| SPLEN2009884 | 0 | 0 | 0 | 0 | 0 | 100 | 0 |
| SPLEN2009918 | 0 | 0 | 0 | 0 | 0 | 100 | 0 |
| SPLEN2009970 | 0 | 0 | 0 | 0 | 0 | 8.872 | 0 |
| SPLEN2010004 | 0 | 0 | 0 | 0 | 0 | 100 | 0 |
| SPLEN2010015 | 0 | 0 | 0 | 0 | 0 | 27.044 | 0 |
| SPLEN2010112 | 0 | 0 | 0 | 0 | 0 | 100 | 0 |
| SPLEN2010119 | 0 | 0 | 0 | 0 | 0 | 100 | 0 |
| SPLEN2010146 | 0 | 0 | 0 | 0 | 0 | 100 | 0 |
| SPLEN2010187 | 0 | 0 | 0 | 0 | 0 | 100 | 0 |
| SPLEN2010195 | 0 | 0 | 0 | 0 | 0 | 2.025 | 0 |
| SPLEN2010350 | 0 | 0 | 0 | 0 | 0 | 100 | 0 |
| SPLEN2010395 | 0 | 0 | 0 | 0 | 0 | 100 | 0 |
| SPLEN2010415 | 0 | 0 | 0 | 0 | 0 | 100 | 0 |
| SPLEN2010447 | 0 | 0 | 0 | 0 | 0 | 100 | 0 |
| SPLEN2010469 | 0 | 0 | 0 | 0 | 0 | 43.126 | 0 |
| SPLEN2010510 | 0 | 0 | 0 | 0 | 0 | 100 | 0 |
| SPLEN2010530 | 0 | 0 | 0 | 0 | 0 | 100 | 0 |
| SPLEN2010534 | 0 | 0 | 0 | 0 | 0 | 100 | 0 |
| SPLEN2010588 | 0 | 0 | 0 | 0 | 0 | 100 | 0 |
| SPLEN2010625 | 0 | 0 | 0 | 0 | 0 | 67.599 | 0 |
| SPLEN2010800 | 0 | 0 | 0 | 0 | 0 | 100 | 0 |
| SPLEN2010846 | 0 | 0 | 0 | 0 | 0 | 39.963 | 0 |
| SPLEN2010847 | 0 | 0 | 0 | 0 | 0 | 28.694 | 0 |
| SPLEN2010862 | 0 | 0 | 0 | 0 | 0 | 100 | 0 |
| SPLEN2010912 | 0 | 0 | 0 | 0 | 0 | 21.546 | 0 |
| SPLEN2010978 | 0 | 0 | 0 | 0 | 0 | 100 | 0 |
| SPLEN2010986 | 0 | 0 | 0 | 0 | 0 | 35.034 | 0 |
| SPLEN2011018 | 0 | 0 | 0 | 0 | 0 | 100 | 0 |
| SPLEN2011021 | 0 | 0 | 0 | 0 | 57.827 | 28.508 | 0 |
| SPLEN2011025 | 0 | 0 | 0 | 0 | 66.980 | 33.020 | 0 |
| SPLEN2011086 | 0 | 0 | 0 | 0 | 0 | 100 | 0 |
| SPLEN2011139 | 0 | 0 | 0 | 0 | 0 | 100 | 0 |
| SPLEN2011145 | 0 | 0 | 0 | 0 | 0 | 100 | 0 |
| SPLEN2011248 | 0 | 0 | 0 | 0 | 0 | 100 | 0 |
| SPLEN2011252 | 0 | 0 | 0 | 0 | 0 | 100 | 0 |
| SPLEN2011419 | 0 | 0 | 0 | 0 | 0 | 4.157 | 0 |
| SPLEN2011422 | 0 | 0 | 0 | 0 | 0 | 100 | 0 |
| SPLEN2011672 | 0 | 0 | 0 | 0 | 0 | 100 | 0 |
| SPLEN2011678 | 0 | 0 | 0 | 0 | 0 | 1.983 | 0 |
| SPLEN2011737 | 0 | 0 | 0 | 0 | 0 | 9.065 | 0 |
| SPLEN2011758 | 0 | 0 | 0 | 0 | 0 | 18.273 | 0 |
| SPLEN2011766 | 0 | 0 | 0 | 0 | 0 | 28.426 | 0 |
| SPLEN2011805 | 0 | 0 | 0 | 0 | 0 | 100 | 0 |
| SPLEN2011820 | 0 | 0 | 0 | 0 | 0 | 100 | 0 |
| SPLEN2011830 | 0 | 0 | 0 | 0 | 0 | 100 | 0 |
| SPLEN2011931 | 0 | 0 | 0 | 0 | 0 | 100 | 0 |
| SPLEN2011981 | 0 | 0 | 0 | 0 | 0 | 100 | 0 |
| SPLEN2012115 | 0 | 0 | 0 | 0 | 0 | 7.120 | 0 |
| SPLEN2012175 | 0 | 0 | 0 | 0 | 0 | 100 | 0 |
| SPLEN2012179 | 0 | 0 | 0 | 0 | 0 | 100 | 0 |
| SPLEN2012185 | 0 | 0 | 0 | 0 | 0 | 100 | 0 |
| SPLEN2012234 | 0 | 0 | 0 | 0 | 0 | 100 | 0 |
| SPLEN2012453 | 0 | 0 | 0 | 0 | 0 | 71.023 | 0 |
| SPLEN2012523 | 0 | 0 | 0 | 0 | 0 | 1.857 | 7.266 |
| SPLEN2012524 | 0 | 0 | 0 | 0 | 0 | 100 | 0 |
| SPLEN2012525 | 0 | 0 | 0 | 0 | 0 | 100 | 0 |
| SPLEN2012571 | 0 | 0 | 0 | 0 | 11.218 | 5.530 | 0 |
| SPLEN2012606 | 0 | 0 | 0 | 0 | 0 | 100 | 0 |
| SPLEN2012611 | 0 | 0 | 0 | 0 | 0 | 49.950 | 0 |
| SPLEN2012619 | 0 | 0 | 0 | 0 | 0 | 63.499 | 0 |
| SPLEN2012624 | 0 | 0 | 0 | 0 | 0 | 17.593 | 0 |
| SPLEN2012725 | 0 | 0 | 0 | 0 | 0 | 100 | 0 |
| SPLEN2012743 | 0 | 0 | 0 | 0 | 0 | 100 | 0 |
| SPLEN2012756 | 0 | 0 | 0 | 0 | 0 | 100 | 0 |
| SPLEN2012800 | 0 | 0 | 0 | 0 | 0 | 0.594 | 0 |
| SPLEN2012846 | 0 | 0 | 0 | 0 | 0 | 47.098 | 0 |
| SPLEN2012889 | 0 | 0 | 0 | 0 | 0 | 67.599 | 0 |
| SPLEN2012961 | 0 | 0 | 0 | 0 | 0 | 100 | 0 |
| SPLEN2013108 | 0 | 0 | 0 | 0 | 0 | 60.831 | 0 |
| SPLEN2013195 | 0 | 0 | 0 | 0 | 0 | 71.023 | 0 |
| SPLEN2013503 | 0 | 0 | 0 | 0 | 0 | 13.099 | 0 |
| SPLEN2013644 | 0 | 0 | 0 | 0 | 0 | 100 | 0 |
| SPLEN2013648 | 0 | 0 | 0 | 0 | 0 | 100 | 0 |
| SPLEN2013670 | 0 | 0 | 0 | 0 | 0 | 20.398 | 0 |
| SPLEN2013673 | 0 | 0 | 0 | 0 | 0 | 100 | 0 |
| SPLEN2013690 | 0 | 0 | 0 | 0 | 0 | 18.787 | 0 |
| SPLEN2013714 | 0 | 0 | 0 | 0 | 0 | 100 | 0 |
| SPLEN2013753 | 0 | 0 | 0 | 0 | 0 | 67.599 | 0 |
| SPLEN2013821 | 0 | 0 | 0 | 0 | 0 | 12.968 | 0 |
| SPLEN2013857 | 0 | 0 | 0 | 0 | 0 | 63.499 | 0 |
| SPLEN2013860 | 0 | 0 | 0 | 0 | 0 | 100 | 0 |
| SPLEN2013910 | 0 | 0 | 0 | 0 | 0 | 100 | 0 |
| SPLEN2013923 | 0 | 0 | 0 | 0 | 0 | 47.098 | 0 |
| SPLEN2013936 | 0 | 0 | 0 | 0 | 0 | 11.607 | 45.406 |
| SPLEN2014041 | 0 | 0 | 0 | 0 | 0 | 67.599 | 0 |
| SPLEN2014063 | 0 | 0 | 0 | 0 | 0 | 100 | 0 |
| SPLEN2014073 | 0 | 0 | 0 | 0 | 0 | 20.525 | 0 |
| SPLEN2014080 | 0 | 0 | 0 | 0 | 0 | 8.242 | 0 |
| SPLEN2014119 | 0 | 0 | 0 | 0 | 0 | 29.033 | 0 |
| SPLEN2014136 | 0 | 0 | 0 | 0 | 0 | 100 | 0 |
| SPLEN2014199 | 0 | 0 | 0 | 0 | 0 | 100 | 0 |
| SPLEN2014210 | 0 | 0 | 0 | 0 | 0 | 100 | 0 |
| SPLEN2014293 | 0 | 0 | 0 | 0 | 0 | 100 | 0 |
| SPLEN2014318 | 0 | 0 | 0 | 0 | 0 | 100 | 0 |
| SPLEN2014381 | 0 | 0 | 0 | 0 | 0 | 25.867 | 0 |
| SPLEN2014452 | 0 | 0 | 0 | 0 | 0 | 31.971 | 0 |
| SPLEN2014454 | 0 | 0 | 0 | 0 | 0 | 100 | 0 |
| SPLEN2014486 | 0 | 0 | 0 | 0 | 0 | 100 | 0 |
| SPLEN2014543 | 0 | 0 | 0 | 0 | 0 | 100 | 0 |
| SPLEN2014572 | 0 | 0 | 0 | 0 | 0 | 10.827 | 0 |
| SPLEN2014645 | 0 | 0 | 0 | 0 | 0 | 31.852 | 0 |
| SPLEN2014669 | 0 | 0 | 0 | 0 | 0 | 100 | 0 |
| SPLEN2014711 | 0 | 0 | 0 | 0 | 0 | 4.614 | 0 |
| SPLEN2014739 | 0 | 0 | 0 | 0 | 0 | 75.784 | 0 |
| SPLEN2014860 | 0 | 0 | 0 | 0 | 0 | 100 | 0 |
| SPLEN2014865 | 0 | 0 | 0 | 0 | 0 | 100 | 0 |
| SPLEN2014911 | 0 | 0 | 0 | 0 | 3.723 | 9.176 | 7.179 |
| SPLEN2014919 | 0 | 0 | 0 | 0 | 0 | 100 | 0 |
| SPLEN2014920 | 0 | 0 | 0 | 0 | 0 | 100 | 0 |
| SPLEN2014924 | 0 | 0 | 0 | 0 | 0 | 100 | 0 |
| SPLEN2014937 | 0 | 0 | 0 | 0 | 0 | 100 | 0 |
| SPLEN2014946 | 0 | 0 | 0 | 0 | 0 | 100 | 0 |
| SPLEN2015031 | 0 | 0 | 0 | 0 | 0 | 100 | 0 |
| SPLEN2015094 | 0 | 0 | 0 | 0 | 0 | 100 | 0 |
| SPLEN2015121 | 0 | 0 | 0 | 0 | 0 | 67.599 | 0 |
| SPLEN2015129 | 0 | 0 | 0 | 0 | 0 | 63.499 | 0 |
| SPLEN2015158 | 0 | 0 | 0 | 0 | 0 | 100 | 0 |
| SPLEN2015166 | 0 | 0 | 0 | 0 | 66.980 | 33.020 | 0 |
| SPLEN2015216 | 0 | 0 | 0 | 0 | 0 | 100 | 0 |
| SPLEN2015258 | 0 | 0 | 0 | 0 | 0 | 100 | 0 |
| SPLEN2015261 | 0 | 0 | 0 | 0 | 0 | 100 | 0 |
| SPLEN2015267 | 0 | 0 | 0 | 0 | 0 | 100 | 0 |
| SPLEN2015276 | 0 | 0 | 0 | 0 | 0 | 100 | 0 |
| SPLEN2015310 | 0 | 0 | 0 | 3.936 | 6.068 | 0.997 | 0 |
| SPLEN2015415 | 0 | 0 | 0 | 0 | 0 | 100 | 0 |
| SPLEN2015433 | 0 | 0 | 0 | 0 | 0 | 100 | 0 |
| SPLEN2015593 | 0 | 0 | 0 | 0 | 0 | 100 | 0 |
| SPLEN2015674 | 0 | 0 | 0 | 0 | 0 | 100 | 0 |
| SPLEN2015679 | 0 | 0 | 0 | 0 | 0 | 100 | 0 |
| SPLEN2015707 | 0 | 0 | 0 | 0 | 0 | 100 | 0 |
| SPLEN2015730 | 0 | 0 | 0 | 0 | 0 | 48.681 | 0 |
| SPLEN2015746 | 0 | 0 | 0 | 0 | 0 | 100 | 0 |
| SPLEN2015788 | 0 | 0 | 0 | 0 | 0 | 25.263 | 32.942 |
| SPLEN2015815 | 0 | 0 | 0 | 0 | 0 | 100 | 0 |
| SPLEN2015890 | 0 | 0 | 0 | 0 | 0 | 71.023 | 0 |
| SPLEN2015891 | 0 | 0 | 0 | 0 | 0 | 100 | 0 |
| SPLEN2015899 | 0 | 0 | 0 | 0 | 0 | 100 | 0 |
| SPLEN2016045 | 0 | 0 | 0 | 0 | 0 | 100 | 0 |
| SPLEN2016053 | 0 | 0 | 0 | 0 | 0 | 100 | 0 |
| SPLEN2016069 | 0 | 0 | 0 | 0 | 0 | 100 | 0 |
| SPLEN2016098 | 0 | 0 | 0 | 0 | 0 | 31.971 | 0 |
| SPLEN2016135 | 0 | 0 | 0 | 0 | 0 | 100 | 0 |
| SPLEN2016139 | 0 | 0 | 0 | 0 | 0 | 2.229 | 0 |
| SPLEN2016241 | 0 | 0 | 0 | 0 | 0 | 100 | 0 |
| SPLEN2016250 | 0 | 0 | 0 | 0 | 0 | 100 | 0 |
| SPLEN2016268 | 0 | 0 | 0 | 2.966 | 1.525 | 1.503 | 0 |
| SPLEN2016304 | 0 | 0 | 0 | 0 | 0 | 100 | 0 |
| SPLEN2016356 | 0 | 0 | 0 | 0 | 0 | 100 | 0 |
| SPLEN2016421 | 0 | 0 | 0 | 0 | 7.310 | 7.208 | 0 |
| SPLEN2016480 | 0 | 0 | 0 | 0 | 0 | 100 | 0 |
| SPLEN2016531 | 0 | 0 | 0 | 0 | 0 | 100 | 0 |
| SPLEN2016533 | 0 | 0 | 0 | 0 | 0 | 61.070 | 0 |
| SPLEN2016541 | 0 | 0 | 0 | 0 | 0 | 100 | 0 |
| SPLEN2016552 | 0 | 0 | 0 | 0 | 0 | 100 | 0 |
| SPLEN2016554 | 0 | 0 | 0 | 0 | 0 | 32.422 | 0 |
| SPLEN2016602 | 0 | 0 | 0 | 0 | 0 | 100 | 0 |
| SPLEN2016627 | 0 | 0 | 0 | 0 | 0 | 100 | 0 |
| SPLEN2016678 | 0 | 0 | 0 | 0 | 0 | 34.278 | 0 |
| SPLEN2016743 | 0 | 0 | 0 | 0 | 20.232 | 9.974 | 0 |
| SPLEN2016773 | 0 | 0 | 0 | 0 | 0 | 71.023 | 0 |
| SPLEN2016781 | 0 | 0 | 0 | 0 | 0 | 67.599 | 0 |
| SPLEN2016840 | 0 | 0 | 0 | 0 | 0 | 100 | 0 |
| SPLEN2016863 | 0 | 0 | 0 | 0 | 0 | 100 | 0 |
| SPLEN2016922 | 0 | 0 | 0 | 0 | 0 | 100 | 0 |
| SPLEN2016932 | 0 | 0 | 0 | 0 | 0 | 61.070 | 0 |
| SPLEN2016972 | 0 | 0 | 0 | 13.923 | 0 | 3.528 | 0 |
| SPLEN2016973 | 0 | 0 | 0 | 0 | 0 | 100 | 0 |
| SPLEN2017043 | 0 | 0 | 0 | 0 | 0 | 18.106 | 0 |
| SPLEN2017104 | 0 | 0 | 0 | 0 | 0 | 100 | 0 |
| SPLEN2017121 | 0 | 0 | 0 | 0 | 0 | 13.487 | 0 |
| SPLEN2017147 | 0 | 0 | 0 | 0 | 0 | 100 | 0 |
| SPLEN2017187 | 0 | 0 | 0 | 0 | 0 | 100 | 0 |
| SPLEN2017189 | 0 | 0 | 0 | 0 | 0 | 100 | 0 |
| SPLEN2017212 | 0 | 0 | 0 | 0 | 0 | 100 | 0 |
| SPLEN2017318 | 0 | 0 | 0 | 0 | 17.905 | 8.827 | 0 |
| SPLEN2017351 | 0 | 0 | 0 | 0 | 0 | 5.233 | 0 |
| SPLEN2017426 | 0 | 0 | 0 | 0 | 0 | 100 | 0 |
| SPLEN2017452 | 0 | 0 | 0 | 0 | 0 | 100 | 0 |
| SPLEN2017538 | 0 | 0 | 0 | 0 | 0 | 100 | 0 |
| SPLEN2017592 | 0 | 0 | 0 | 0 | 0 | 71.023 | 0 |
| SPLEN2017613 | 0 | 0 | 0 | 0 | 0 | 100 | 0 |
| SPLEN2017620 | 0 | 0 | 0 | 0 | 0 | 8.917 | 0 |
| SPLEN2017643 | 0 | 0 | 0 | 0 | 0 | 100 | 0 |
| SPLEN2017687 | 0 | 0 | 0 | 0 | 0 | 100 | 0 |
| SPLEN2017740 | 0 | 0 | 0 | 0 | 0 | 100 | 0 |
| SPLEN2017781 | 0 | 0 | 0 | 0 | 0 | 71.023 | 0 |
| SPLEN2017918 | 0 | 0 | 0 | 0 | 3.217 | 4.758 | 0 |
| SPLEN2017999 | 0 | 0 | 0 | 0 | 0 | 100 | 0 |
| SPLEN2018098 | 0 | 0 | 0 | 0 | 0 | 59.326 | 0 |
| SPLEN2018112 | 0 | 0 | 0 | 0 | 0 | 100 | 0 |
| SPLEN2018157 | 0 | 0 | 0 | 0 | 0 | 12.588 | 16.414 |
| SPLEN2018159 | 0 | 0 | 0 | 0 | 0 | 16.475 | 0 |
| SPLEN2018180 | 0 | 0 | 0 | 0 | 0 | 100 | 0 |
| SPLEN2018181 | 0 | 0 | 0 | 0 | 0 | 100 | 0 |
| SPLEN2018280 | 0 | 0 | 0 | 0 | 0 | 100 | 0 |
| SPLEN2018285 | 0 | 0 | 0 | 0 | 0 | 100 | 0 |
| SPLEN2018299 | 0 | 0 | 0 | 0 | 0 | 35.797 | 0 |
| SPLEN2018302 | 0 | 42.846 | 0 | 0 | 0 | 10.578 | 0 |
| SPLEN2018364 | 0 | 0 | 0 | 0 | 0 | 100 | 0 |
| SPLEN2018395 | 0 | 0 | 0 | 0 | 0 | 100 | 0 |
| SPLEN2018643 | 0 | 0 | 0 | 0 | 0 | 63.499 | 0 |
| SPLEN2018683 | 0 | 0 | 0 | 0 | 0 | 67.599 | 0 |
| SPLEN2018732 | 0 | 0 | 0 | 0 | 0 | 100 | 0 |
| SPLEN2018749 | 0 | 0 | 0 | 0 | 0 | 100 | 0 |
| SPLEN2018933 | 0 | 0 | 0 | 0 | 0 | 100 | 0 |
| SPLEN2019008 | 0 | 0 | 0 | 0 | 0 | 100 | 0 |
| SPLEN2019043 | 0 | 0 | 0 | 0 | 0 | 100 | 0 |
| SPLEN2019077 | 0 | 0 | 0 | 0 | 0 | 18.457 | 0 |
| SPLEN2019092 | 0 | 0 | 0 | 0 | 0 | 48.294 | 0 |
| SPLEN2019102 | 0 | 0 | 0 | 0 | 0 | 100 | 0 |
| SPLEN2019131 | 0 | 0 | 0 | 0 | 0 | 100 | 0 |
| SPLEN2019169 | 0 | 0 | 0 | 0 | 0 | 9.849 | 0 |
| SPLEN2019257 | 0 | 0 | 0 | 0 | 0 | 71.023 | 0 |
| SPLEN2019311 | 0 | 0 | 0 | 0 | 0 | 42.173 | 0 |
| SPLEN2019323 | 0 | 0 | 0 | 0 | 0 | 100 | 0 |
| SPLEN2019349 | 0 | 0 | 0 | 0 | 0 | 63.033 | 0 |
| SPLEN2019375 | 0 | 0 | 0 | 0 | 0 | 100 | 0 |
| SPLEN2019379 | 0 | 0 | 0 | 0 | 0 | 19.862 | 0 |
| SPLEN2019405 | 0 | 0 | 0 | 0 | 0 | 7.474 | 0 |
| SPLEN2019446 | 0 | 0 | 0 | 0 | 0 | 18.102 | 0 |
| SPLEN2019471 | 0 | 0 | 0 | 0 | 0 | 100 | 0 |
| SPLEN2019480 | 0 | 0 | 0 | 0 | 0 | 100 | 0 |
| SPLEN2019505 | 0 | 0 | 0 | 0 | 0 | 8.528 | 0 |
| SPLEN2019571 | 0 | 0 | 0 | 0 | 0 | 100 | 0 |
| SPLEN2019575 | 0 | 0 | 0 | 0 | 0 | 100 | 0 |
| SPLEN2019709 | 0 | 0 | 0 | 0 | 0 | 100 | 0 |
| SPLEN2019774 | 0 | 0 | 0 | 0 | 0 | 15.455 | 0 |
| SPLEN2019793 | 0 | 0 | 0 | 0 | 0 | 100 | 0 |
| SPLEN2019811 | 0 | 0 | 0 | 0 | 0 | 100 | 0 |
| SPLEN2019839 | 0 | 0 | 0 | 0 | 0 | 100 | 0 |
| SPLEN2019956 | 0 | 0 | 0 | 0 | 0 | 52.985 | 0 |
| SPLEN2019985 | 0 | 0 | 0 | 0 | 0 | 100 | 0 |
| SPLEN2020007 | 0 | 0 | 0 | 0 | 0 | 32.498 | 0 |
| SPLEN2020034 | 0 | 0 | 0 | 0 | 0 | 43.126 | 0 |
| SPLEN2020153 | 0 | 0 | 0 | 0 | 0 | 100 | 0 |
| SPLEN2020154 | 0 | 0 | 0 | 0 | 0 | 100 | 0 |
| SPLEN2020166 | 0 | 0 | 0 | 0 | 0 | 100 | 0 |
| SPLEN2020183 | 0 | 0 | 0 | 0 | 0 | 100 | 0 |
| SPLEN2020223 | 0 | 0 | 0 | 0 | 0 | 100 | 0 |
| SPLEN2020359 | 0 | 0 | 0 | 0 | 0 | 100 | 0 |
| SPLEN2020417 | 0 | 0 | 0 | 0 | 0 | 24.283 | 0 |
| SPLEN2020427 | 0 | 0 | 0 | 0 | 0 | 100 | 0 |
| SPLEN2020467 | 0 | 0 | 0 | 0 | 0 | 100 | 0 |
| SPLEN2020512 | 0 | 0 | 0 | 0 | 0 | 100 | 0 |
| SPLEN2020608 | 0 | 0 | 0 | 0 | 0 | 100 | 0 |
| SPLEN2020777 | 0 | 0 | 0 | 0 | 0 | 100 | 0 |
| SPLEN2020805 | 0 | 0 | 0 | 0 | 0 | 100 | 0 |
| SPLEN2021057 | 0 | 0 | 0 | 0 | 0 | 100 | 0 |
| SPLEN2021122 | 0 | 0 | 0 | 0 | 0 | 28.373 | 0 |
| SPLEN2021157 | 0 | 0 | 0 | 0 | 0 | 100 | 0 |
| SPLEN2021194 | 0 | 0 | 0 | 0 | 0 | 5.868 | 0 |
| SPLEN2021231 | 0 | 0 | 0 | 0 | 0 | 100 | 0 |
| SPLEN2021273 | 0 | 0 | 0 | 0 | 0 | 51.310 | 0 |
| SPLEN2021295 | 0 | 0 | 0 | 0 | 0 | 100 | 0 |
| SPLEN2021298 | 0 | 0 | 0 | 0 | 0 | 100 | 0 |
| SPLEN2021383 | 0 | 0 | 0 | 0 | 0 | 100 | 0 |
| SPLEN2021417 | 0 | 0 | 0 | 0 | 0 | 100 | 0 |
| SPLEN2021440 | 0 | 0 | 0 | 0 | 0 | 100 | 0 |
| SPLEN2021458 | 0 | 0 | 0 | 0 | 0 | 61.070 | 0 |
| SPLEN2021463 | 0 | 0 | 0 | 0 | 0 | 100 | 0 |
| SPLEN2021560 | 0 | 0 | 0 | 0 | 0 | 100 | 0 |
| SPLEN2021701 | 0 | 0 | 0 | 0 | 0 | 100 | 0 |
| SPLEN2021795 | 0 | 0 | 0 | 0 | 0 | 100 | 0 |
| SPLEN2021983 | 0 | 0 | 0 | 0 | 0 | 100 | 0 |
| SPLEN2021991 | 0 | 0 | 0 | 0 | 0 | 100 | 0 |
| SPLEN2022040 | 0 | 0 | 0 | 0 | 0 | 100 | 0 |
| SPLEN2022162 | 0 | 0 | 0 | 0 | 0 | 100 | 0 |
| SPLEN2022227 | 0 | 0 | 0 | 0 | 0 | 100 | 0 |
| SPLEN2022522 | 0 | 0 | 0 | 0 | 0 | 4.932 | 0 |
| SPLEN2022591 | 0 | 0 | 0 | 0 | 0 | 100 | 0 |
| SPLEN2022785 | 0 | 0 | 0 | 0 | 0 | 100 | 0 |
| SPLEN2022920 | 0 | 0 | 0 | 0 | 0 | 100 | 0 |
| SPLEN2023024 | 0 | 0 | 0 | 0 | 0 | 100 | 0 |
| SPLEN2023118 | 0 | 0 | 0 | 0 | 0 | 19.364 | 0 |
| SPLEN2023160 | 0 | 0 | 0 | 0 | 0 | 34.195 | 0 |
| SPLEN2023423 | 0 | 0 | 0 | 0 | 0 | 100 | 0 |
| SPLEN2023710 | 0 | 0 | 0 | 0 | 0 | 100 | 0 |
| SPLEN2023733 | 0 | 0 | 0 | 0 | 0 | 70.051 | 0 |
| SPLEN2023791 | 0 | 0 | 0 | 0 | 0 | 49.431 | 0 |
| SPLEN2023977 | 0 | 0 | 0 | 0 | 0 | 100 | 0 |
| SPLEN2024070 | 0 | 0 | 0 | 0 | 0 | 100 | 0 |
| SPLEN2024127 | 0 | 0 | 0 | 0 | 0 | 100 | 0 |
| SPLEN2024232 | 0 | 0 | 0 | 0 | 0 | 11.539 | 0 |
| SPLEN2024273 | 0 | 0 | 0 | 0 | 0 | 100 | 0 |
| SPLEN2024383 | 0 | 0 | 0 | 0 | 0 | 100 | 0 |
| SPLEN2024489 | 0 | 0 | 0 | 0 | 0 | 19.007 | 0 |
| SPLEN2024530 | 0 | 0 | 0 | 0 | 0 | 100 | 0 |
| SPLEN2024571 | 0 | 0 | 0 | 0 | 0 | 100 | 0 |
| SPLEN2024577 | 0 | 0 | 0 | 0 | 0 | 100 | 0 |
| SPLEN2024617 | 0 | 0 | 0 | 0 | 0 | 100 | 0 |
| SPLEN2024737 | 0 | 0 | 0 | 0 | 0 | 100 | 0 |
| SPLEN2024922 | 0 | 0 | 0 | 0 | 0 | 44.836 | 0 |
| SPLEN2024956 | 0 | 0 | 0 | 0 | 0 | 100 | 0 |
| SPLEN2024990 | 0 | 0 | 0 | 0 | 0 | 80.667 | 0 |
| SPLEN2025012 | 0 | 0 | 0 | 0 | 0 | 100 | 0 |
| SPLEN2025017 | 0 | 0 | 0 | 0 | 0 | 58.340 | 0 |
| SPLEN2025039 | 0 | 0 | 0 | 0 | 0 | 71.023 | 0 |
| SPLEN2025219 | 0 | 0 | 0 | 0 | 0 | 100 | 0 |
| SPLEN2025491 | 0 | 0 | 0 | 0 | 0 | 61.070 | 0 |
| SPLEN2025626 | 0 | 0 | 0 | 0 | 0 | 100 | 0 |
| SPLEN2025820 | 0 | 0 | 0 | 0 | 0 | 100 | 0 |
| SPLEN2026144 | 0 | 0 | 0 | 0 | 0 | 100 | 0 |
| SPLEN2026411 | 0 | 0 | 0 | 0 | 0 | 19.827 | 0 |
| SPLEN2026765 | 0 | 0 | 0 | 0 | 0 | 100 | 0 |
| SPLEN2027113 | 0 | 0 | 0 | 0 | 0 | 2.847 | 0 |
| SPLEN2027157 | 0 | 0 | 0 | 0 | 0 | 100 | 0 |
| SPLEN2027395 | 0 | 0 | 0 | 0 | 0 | 100 | 0 |
| SPLEN2027488 | 0 | 0 | 0 | 0 | 0 | 100 | 0 |
| SPLEN2027780 | 0 | 0 | 0 | 0 | 0 | 48.294 | 0 |
| SPLEN2027852 | 0 | 0 | 0 | 0 | 0 | 100 | 0 |
| SPLEN2027868 | 0 | 0 | 0 | 0 | 0 | 100 | 0 |
| SPLEN2027995 | 0 | 0 | 0 | 0 | 0 | 100 | 0 |
| SPLEN2028046 | 0 | 0 | 0 | 0 | 0 | 100 | 0 |
| SPLEN2028066 | 0 | 0 | 0 | 0 | 0 | 100 | 0 |
| SPLEN2028138 | 0 | 0 | 0 | 0 | 0 | 100 | 0 |
| SPLEN2028365 | 0 | 0 | 0 | 0 | 0 | 5.970 | 0 |
| SPLEN2028417 | 0 | 0 | 0 | 0 | 0 | 100 | 0 |
| SPLEN2028424 | 0 | 0 | 0 | 0 | 0 | 48.497 | 0 |
| SPLEN2028466 | 0 | 0 | 0 | 0 | 2.919 | 1.439 | 0 |
| SPLEN2028593 | 0 | 0 | 0 | 0 | 0 | 100 | 0 |
| SPLEN2028844 | 0 | 0 | 0 | 0 | 0 | 100 | 0 |
| SPLEN2028914 | 0 | 0 | 0 | 0 | 0 | 4.858 | 0 |
| SPLEN2028994 | 0 | 0 | 0 | 0 | 0 | 100 | 0 |
| SPLEN2029051 | 0 | 0 | 0 | 0 | 0 | 100 | 0 |
| SPLEN2029176 | 0 | 0 | 0 | 0 | 0 | 100 | 0 |
| SPLEN2029295 | 0 | 0 | 0 | 0 | 0 | 60.831 | 0 |
| SPLEN2029380 | 0 | 0 | 0 | 0 | 0 | 100 | 0 |
| SPLEN2029522 | 0 | 0 | 0 | 0 | 0 | 100 | 0 |
| SPLEN2029683 | 0 | 0 | 0 | 0 | 0 | 60.831 | 0 |
| SPLEN2029727 | 0 | 0 | 0 | 0 | 0 | 100 | 0 |
| SPLEN2029904 | 0 | 0 | 0 | 0 | 0 | 100 | 0 |
| SPLEN2029912 | 0 | 11.510 | 0 | 0 | 0 | 2.842 | 0 |
| SPLEN2030250 | 0 | 0 | 0 | 0 | 0 | 100 | 0 |
| SPLEN2030335 | 0 | 0 | 0 | 0 | 0 | 100 | 0 |
| SPLEN2030371 | 0 | 0 | 0 | 0 | 0 | 100 | 0 |
| SPLEN2030397 | 0 | 0 | 0 | 0 | 0 | 100 | 0 |
| SPLEN2030479 | 0 | 0 | 0 | 0 | 0 | 100 | 0 |
| SPLEN2030495 | 0 | 0 | 0 | 0 | 0 | 100 | 0 |
| SPLEN2030562 | 0 | 0 | 0 | 0 | 0 | 100 | 0 |
| SPLEN2030763 | 0 | 74.205 | 0 | 0 | 0 | 18.320 | 0 |
| SPLEN2030847 | 0 | 0 | 0 | 0 | 0 | 100 | 0 |
| SPLEN2031004 | 0 | 0 | 0 | 0 | 0 | 100 | 0 |
| SPLEN2031125 | 0 | 0 | 0 | 0 | 0 | 100 | 0 |
| SPLEN2031424 | 0 | 0 | 0 | 0 | 0 | 13.24 | 0 |
| SPLEN2031547 | 0 | 0 | 0 | 0 | 0 | 5.478 | 0 |
| SPLEN2031674 | 0 | 0 | 0 | 0 | 0 | 38.519 | 0 |
| SPLEN2031724 | 0 | 0 | 0 | 0 | 0 | 100 | 0 |
| SPLEN2031780 | 0 | 0 | 0 | 0 | 0 | 100 | 0 |
| SPLEN2032036 | 0 | 0 | 0 | 0 | 0 | 100 | 0 |
| SPLEN2032112 | 0 | 0 | 0 | 0 | 0 | 100 | 0 |
| SPLEN2032154 | 0 | 0 | 0 | 0 | 0 | 61.070 | 0 |
| SPLEN2032157 | 0 | 0 | 0 | 0 | 0 | 9.941 | 0 |
| SPLEN2032321 | 0 | 0 | 0 | 0 | 0 | 100 | 0 |
| SPLEN2032356 | 0 | 0 | 0 | 0 | 0 | 33.427 | 0 |
| SPLEN2032677 | 0 | 0 | 0 | 0 | 0 | 100 | 0 |
| SPLEN2032813 | 0 | 0 | 0 | 0 | 0 | 100 | 0 |
| SPLEN2032924 | 0 | 0 | 0 | 0 | 0 | 100 | 0 |
| SPLEN2033098 | 0 | 0 | 0 | 0 | 0 | 25.970 | 0 |
| SPLEN2033153 | 0 | 0 | 0 | 0 | 0 | 100 | 0 |
| SPLEN2033333 | 0 | 0 | 0 | 0 | 0 | 100 | 0 |
| SPLEN2033490 | 0 | 0 | 0 | 0 | 0 | 100 | 0 |
| SPLEN2033539 | 0 | 0 | 0 | 0 | 0 | 100 | 0 |
| SPLEN2033921 | 0 | 0 | 0 | 0 | 0 | 100 | 0 |
| SPLEN2033996 | 0 | 0 | 0 | 0 | 0 | 100 | 0 |
| SPLEN2034021 | 0 | 0 | 0 | 0 | 0 | 100 | 0 |
| SPLEN2034081 | 0 | 0 | 0 | 0 | 0 | 100 | 0 |
| SPLEN2034252 | 0 | 0 | 0 | 0 | 0 | 100 | 0 |
| SPLEN2034448 | 0 | 0 | 0 | 0 | 0 | 18.039 | 0 |
| SPLEN2034551 | 0 | 0 | 0 | 0 | 0 | 100 | 0 |
| SPLEN2034601 | 0 | 0 | 0 | 0 | 0 | 100 | 0 |
| SPLEN2034678 | 0 | 0 | 0 | 0 | 0 | 100 | 0 |
| SPLEN2034781 | 0 | 0 | 0 | 0 | 0 | 48.682 | 0 |
| SPLEN2034864 | 0 | 0 | 0 | 0 | 0 | 100 | 0 |
| SPLEN2034934 | 0 | 0 | 0 | 0 | 0 | 100 | 0 |
| SPLEN2035318 | 0 | 0 | 0 | 0 | 0 | 100 | 0 |
| SPLEN2035615 | 0 | 0 | 0 | 0 | 0 | 100 | 0 |
| SPLEN2036076 | 0 | 0 | 0 | 0 | 0 | 2.858 | 0 |
| SPLEN2036103 | 0 | 0 | 0 | 0 | 0 | 100 | 0 |
| SPLEN2036326 | 0 | 0 | 0 | 0 | 0 | 100 | 0 |
| SPLEN2036475 | 0 | 0 | 0 | 0 | 0 | 100 | 0 |
| SPLEN2036501 | 0 | 0 | 0 | 0 | 0 | 67.599 | 0 |
| SPLEN2036579 | 0 | 0 | 0 | 0 | 0 | 100 | 0 |
| SPLEN2036608 | 0 | 0 | 0 | 0 | 0 | 100 | 0 |
| SPLEN2036702 | 0 | 0 | 0 | 0 | 0 | 100 | 0 |
| SPLEN2036712 | 0 | 0 | 0 | 0 | 0 | 100 | 0 |
| SPLEN2036821 | 0 | 0 | 0 | 0 | 0 | 61.070 | 0 |
| SPLEN2036932 | 0 | 0 | 0 | 0 | 0 | 15.301 | 0 |
| SPLEN2036953 | 0 | 0 | 0 | 0 | 0 | 100 | 0 |
| SPLEN2037077 | 0 | 0 | 0 | 0 | 0 | 100 | 0 |
| SPLEN2037194 | 0 | 0 | 0 | 0 | 0 | 71.023 | 0 |
| SPLEN2037319 | 0 | 0 | 0 | 0 | 0 | 100 | 0 |
| SPLEN2037444 | 0 | 0 | 0 | 0 | 0 | 100 | 0 |
| SPLEN2037580 | 0 | 0 | 0 | 0 | 0 | 100 | 0 |
| SPLEN2037630 | 0 | 0 | 0 | 0 | 0 | 100 | 0 |
| SPLEN2037678 | 0 | 0 | 0 | 0 | 0 | 100 | 0 |
| SPLEN2037722 | 0 | 0 | 0 | 0 | 0 | 14.332 | 0 |
| SPLEN2037891 | 0 | 0 | 0 | 0 | 0 | 100 | 0 |
| SPLEN2038055 | 0 | 0 | 0 | 0 | 0 | 100 | 0 |
| SPLEN2038180 | 0 | 0 | 0 | 0 | 0 | 100 | 0 |
| SPLEN2038345 | 0 | 0 | 0 | 0 | 0 | 51.152 | 0 |
| SPLEN2038407 | 0 | 0 | 0 | 0 | 0 | 100 | 0 |
| SPLEN2038473 | 0 | 0 | 0 | 0 | 0 | 23.929 | 0 |
| SPLEN2038834 | 0 | 0 | 0 | 0 | 0 | 8.059 | 0 |
| SPLEN2039311 | 0 | 0 | 0 | 0 | 0 | 100 | 0 |
| SPLEN2039379 | 0 | 0 | 0 | 0 | 0 | 5.038 | 0 |
| SPLEN2039672 | 0 | 0 | 0 | 0 | 0 | 67.599 | 0 |
| SPLEN2039697 | 0 | 0 | 0 | 0 | 0 | 100 | 0 |
| SPLEN2039845 | 0 | 0 | 0 | 0 | 0 | 100 | 0 |
| SPLEN2039936 | 0 | 0 | 0 | 0 | 0 | 100 | 0 |
| SPLEN2040222 | 0 | 0 | 0 | 0 | 0 | 100 | 0 |
| SPLEN2040237 | 0 | 0 | 0 | 0 | 0 | 71.023 | 0 |
| SPLEN2040824 | 0 | 0 | 0 | 0 | 0 | 35.879 | 0 |
| SPLEN2041304 | 0 | 0 | 0 | 0 | 0 | 100 | 0 |
| SPLEN2041306 | 0 | 0 | 0 | 0 | 0 | 26.797 | 0 |
| SPLEN2041310 | 0 | 0 | 0 | 0 | 0 | 100 | 0 |
| SPLEN2041585 | 0 | 0 | 0 | 0 | 0 | 59.326 | 0 |
| SPLEN2041645 | 0 | 0 | 0 | 0 | 0 | 100 | 0 |
| SPLEN2041700 | 0 | 0 | 0 | 0 | 0 | 100 | 0 |
| SPLEN2041720 | 0 | 0 | 0 | 0 | 0 | 100 | 0 |
| SPLEN2041977 | 0 | 0 | 0 | 0 | 0 | 100 | 0 |
| SPLEN2042051 | 0 | 0 | 0 | 0 | 0 | 100 | 0 |
| SPLEN2042303 | 0 | 0 | 0 | 0 | 0 | 45.591 | 0 |
| SPLEN2042521 | 0 | 0 | 0 | 0 | 0 | 100 | 0 |
| SPLEN2042535 | 0 | 0 | 0 | 0 | 0 | 12.386 | 0 |
| SPLEN2042598 | 0 | 0 | 0 | 0 | 0 | 100 | 0 |
| SPLEN2042714 | 0 | 0 | 0 | 0 | 0 | 59.326 | 0 |
| SPLEN2042920 | 0 | 0 | 0 | 0 | 0 | 4.734 | 0 |
| STOMA1000013 | 0 | 0 | 0 | 0 | 0 | 0 | 100 |
| STOMA1000047 | 0 | 0 | 0 | 0 | 0 | 5.512 | 21.564 |
| STOMA1000052 | 0 | 0 | 0 | 0 | 0 | 0 | 100 |
| STOMA1000074 | 0 | 0 | 0 | 0 | 0 | 0 | 100 |
| STOMA1000091 | 0 | 0 | 0 | 0 | 0 | 0 | 47.337 |
| STOMA1000117 | 0 | 0 | 0 | 0 | 0 | 0 | 100 |
| STOMA1000133 | 0 | 0 | 0 | 0 | 0 | 0 | 100 |
| STOMA1000175 | 0 | 0 | 0 | 0 | 0 | 0 | 100 |
| STOMA1000186 | 0 | 0 | 0 | 0 | 0 | 0 | 85.088 |
| STOMA1000189 | 0 | 0 | 0 | 0 | 0 | 0 | 10.642 |
| STOMA1000190 | 0 | 0 | 0 | 0 | 0 | 0 | 100 |
| STOMA1000191 | 0 | 0 | 0 | 0 | 0 | 0 | 100 |
| STOMA2000032 | 0 | 0 | 0 | 0 | 0 | 0 | 100 |
| STOMA2000072 | 0 | 0 | 0 | 0 | 0 | 0 | 100 |
| STOMA2000088 | 0 | 0 | 0 | 0 | 0 | 0 | 100 |
| STOMA2000104 | 0 | 0 | 0 | 0 | 0 | 0 | 100 |
| STOMA2000121 | 0 | 0 | 9.500 | 0 | 0 | 4.240 | 8.293 |
| STOMA2000148 | 0 | 0 | 0 | 0 | 0 | 20.359 | 79.641 |
| STOMA2000168 | 0 | 0 | 0 | 0 | 0 | 0 | 100 |
| STOMA2000183 | 0 | 0 | 0 | 0 | 0 | 0 | 100 |
| STOMA2000188 | 0 | 0 | 0 | 0 | 0 | 0 | 100 |
| STOMA2000257 | 0 | 0 | 0 | 0 | 6.966 | 0 | 13.433 |
| STOMA2000279 | 0 | 0 | 0 | 0 | 0 | 0 | 100 |
| STOMA2000289 | 0 | 0 | 0 | 0 | 9.613 | 4.739 | 18.539 |
| STOMA2000383 | 0 | 0 | 0 | 0 | 0 | 20.359 | 79.641 |
| STOMA2000386 | 0 | 0 | 0 | 0 | 0 | 0 | 100 |
| STOMA2000395 | 0 | 0 | 0 | 0 | 15.066 | 0 | 14.527 |
| STOMA2000396 | 0 | 0 | 0 | 0 | 0 | 0 | 35.071 |
| STOMA2000478 | 0 | 0 | 0 | 0 | 0 | 0 | 100 |
| STOMA2000482 | 0 | 0 | 0 | 0 | 13.604 | 0 | 26.235 |
| STOMA2000529 | 0 | 0 | 0 | 0 | 0 | 0 | 49.148 |
| STOMA2000539 | 0 | 0 | 0 | 0 | 0 | 0 | 100 |
| STOMA2000567 | 0 | 0 | 0 | 0 | 0 | 0 | 100 |
| STOMA2000640 | 0 | 0 | 0 | 0 | 0 | 0 | 100 |
| STOMA2000678 | 0 | 0 | 0 | 0 | 0 | 0 | 100 |
| STOMA2000686 | 0 | 0 | 0 | 0 | 0 | 0 | 100 |
| STOMA2000888 | 0 | 0 | 0 | 0 | 0 | 0 | 100 |
| STOMA2001025 | 0 | 0 | 0 | 0 | 0 | 0 | 100 |
| STOMA2001389 | 0 | 0 | 0 | 0 | 0 | 0 | 39.303 |
| STOMA2002052 | 0 | 0 | 0 | 0 | 0 | 0 | 37.850 |
| STOMA2002141 | 0 | 0 | 0 | 0 | 0 | 0 | 100 |
| STOMA2002166 | 0 | 4.122 | 0 | 0 | 0 | 0 | 7.963 |
| STOMA2002367 | 0 | 0 | 0 | 0 | 0 | 0 | 100 |
| STOMA2002688 | 0 | 0 | 0 | 0 | 0 | 0 | 100 |
| STOMA2002828 | 0 | 0 | 0 | 0 | 0 | 19.068 | 37.296 |
| STOMA2003158 | 0 | 0 | 0 | 0 | 0 | 53.241 | 41.655 |
| STOMA2003289 | 0 | 0 | 0 | 0 | 0 | 0 | 100 |
| STOMA2003444 | 0 | 0 | 0 | 0 | 0 | 0 | 91.236 |
| STOMA2003477 | 0 | 0 | 0 | 0 | 0 | 0 | 100 |
| STOMA2003646 | 0 | 0 | 0 | 0 | 0 | 0 | 100 |
| STOMA2003716 | 0 | 0 | 0 | 0 | 0 | 0 | 77.692 |
| STOMA2003781 | 0 | 0 | 0 | 0 | 0 | 0 | 85.866 |
| STOMA2003894 | 0 | 0 | 0 | 0 | 0 | 0 | 100 |
| STOMA2004194 | 0 | 0 | 0 | 0 | 0 | 0 | 100 |
| STOMA2004294 | 0 | 0 | 0 | 0 | 0 | 0 | 100 |
| STOMA2004663 | 0 | 0 | 0 | 0 | 0 | 0 | 47.516 |
| STOMA2004668 | 0 | 0 | 0 | 0 | 0 | 0 | 100 |
| STOMA2004852 | 0 | 0 | 0 | 0 | 0 | 0 | 100 |
| STOMA2004873 | 0 | 0 | 0 | 0 | 0 | 0 | 100 |
| STOMA2004884 | 0 | 0 | 0 | 0 | 0 | 0 | 100 |
| STOMA2004893 | 0 | 0 | 0 | 0 | 0 | 0 | 49.171 |
| STOMA2004925 | 0 | 0 | 0 | 0 | 0 | 0 | 85.088 |
| STOMA2005120 | 0 | 0 | 0 | 0 | 0 | 0 | 85.988 |
| STOMA2005664 | 0 | 0 | 0 | 0 | 0 | 0 | 100 |
| STOMA2005667 | 0 | 0 | 0 | 0 | 0 | 0 | 100 |
| STOMA2005746 | 0 | 0 | 0 | 0 | 0 | 0 | 100 |
| STOMA2005782 | 0 | 0 | 0 | 0 | 0 | 0 | 91.236 |
| STOMA2006181 | 0 | 0 | 0 | 0 | 0 | 0 | 100 |
| STOMA2006213 | 0 | 0 | 0 | 0 | 0 | 0 | 100 |
| STOMA2006229 | 0 | 0 | 0 | 0 | 0 | 0 | 40.913 |
| STOMA2006325 | 0 | 0 | 0 | 0 | 0 | 0 | 100 |
| STOMA2006330 | 0 | 0 | 0 | 0 | 0 | 0 | 100 |
| STOMA2006398 | 0 | 0 | 0 | 0 | 0 | 0 | 100 |
| STOMA2006447 | 0 | 0 | 0 | 0 | 0 | 0 | 100 |
| STOMA2006780 | 0 | 0 | 0 | 0 | 0 | 0 | 59.113 |
| STOMA2006904 | 0 | 0 | 0 | 0 | 0 | 0 | 100 |
| STOMA2007269 | 0 | 0 | 0 | 0 | 0 | 0 | 100 |
| STOMA2007680 | 0 | 0 | 0 | 0 | 0 | 0 | 100 |
| STOMA2007745 | 0 | 0 | 0 | 0 | 0 | 0 | 100 |
| STOMA2008050 | 0 | 0 | 0 | 0 | 0 | 0 | 100 |
| STOMA2008361 | 0 | 0 | 0 | 0 | 0 | 0 | 100 |
| STOMA2008546 | 0 | 0 | 0 | 0 | 0 | 0 | 100 |
| STOMA2008614 | 0 | 0 | 0 | 0 | 0 | 0 | 100 |
| STOMA2008638 | 0 | 0 | 0 | 0 | 0 | 0 | 49.866 |
| STOMA2008838 | 0 | 0 | 0 | 0 | 0 | 0 | 100 |
| STOMA2009250 | 0 | 0 | 0 | 0 | 0 | 0 | 100 |
| STOMA2009253 | 0 | 0 | 0 | 0 | 0 | 0 | 100 |
| STOMA2009256 | 0 | 0 | 0 | 0 | 0 | 0 | 100 |
| STOMA2009289 | 0 | 0 | 44.723 | 0 | 0 | 0 | 39.042 |
| SYNOV1000045 | 0 | 0 | 0 | 0 | 0 | 12.220 | 0 |
| SYNOV1000124 | 0 | 0 | 0 | 0 | 0 | 1.935 | 3.785 |
| SYNOV1000164 | 0 | 0 | 0 | 0 | 0 | 6.690 | 0 |
| SYNOV2001033 | 0 | 0 | 9.347 | 0 | 0 | 0 | 0 |
| SYNOV2001239 | 0 | 0 | 0 | 0 | 1.107 | 4.367 | 4.270 |
| SYNOV2001262 | 0 | 0 | 0 | 0 | 0 | 7.259 | 0 |
| SYNOV2001648 | 0 | 0 | 0 | 0 | 0 | 1.885 | 0 |
| SYNOV2009172 | 0 | 0 | 0 | 0 | 0 | 1.811 | 3.541 |
| SYNOV2017055 | 0 | 0 | 0 | 0 | 0 | 29.371 | 0 |
| SYNOV4006327 | 0 | 0 | 0 | 0 | 0 | 53.776 | 0 |
| SYNOV4007671 | 0 | 0 | 0 | 0 | 0 | 0 | 4.989 |
| SYNOV4009575 | 0 | 0 | 0 | 0 | 16.908 | 0 | 0 |
| TBAES2000059 | 0 | 0 | 0 | 0 | 0 | 2.621 | 0 |
| TBAES2009387 | 0 | 0 | 0 | 0 | 0 | 0.930 | 0 |
| TESOP2000527 | 0 | 0 | 0 | 0 | 0 | 17.952 | 0 |
| TESOP2006670 | 0 | 0 | 0 | 0 | 0 | 20.272 | 0 |
| TESTI1000023 | 0 | 0 | 0 | 0 | 2.959 | 1.459 | 0 |
| TESTI1000163 | 0 | 0 | 0 | 0 | 0 | 0 | 28.041 |
| TESTI2000184 | 0 | 0 | 0 | 0 | 0 | 1.966 | 0 |
| TESTI2000598 | 0 | 0 | 0 | 0 | 0 | 8.739 | 0 |
| TESTI2001099 | 0 | 0 | 0 | 0 | 1.729 | 0.852 | 0 |
| TESTI2001153 | 0 | 5.611 | 0 | 0 | 0 | 0 | 0 |
| TESTI2001339 | 0 | 0 | 0 | 0 | 0 | 72.687 | 0 |
| TESTI2001829 | 0 | 0 | 0 | 0 | 0 | 1.477 | 0 |
| TESTI2001862 | 0 | 0 | 0 | 0 | 0 | 9.200 | 0 |
| TESTI2002696 | 0 | 91.511 | 0 | 0 | 0 | 0 | 0 |
| TESTI2003454 | 0 | 0 | 0 | 0 | 18.739 | 0 | 0 |
| TESTI2003533 | 0 | 0 | 0 | 5.953 | 3.059 | 0 | 5.900 |
| TESTI2004000 | 0 | 0 | 0 | 0 | 0 | 0 | 95.417 |
| TESTI2004737 | 0 | 0 | 0 | 12.162 | 0 | 0 | 0 |
| TESTI2004929 | 0 | 60.020 | 0 | 0 | 10.019 | 0 | 0 |
| TESTI2005017 | 0 | 0 | 25.744 | 0 | 0 | 0 | 0 |
| TESTI2005408 | 0 | 0 | 0 | 0 | 0 | 3.082 | 0 |
| TESTI2005743 | 0 | 0 | 17.124 | 0 | 0 | 0 | 0 |
| TESTI2005759 | 0 | 0 | 0 | 0 | 0 | 1.627 | 0 |
| TESTI2006051 | 0 | 14.918 | 0 | 0 | 0 | 0.737 | 0 |
| TESTI2006341 | 0 | 0 | 0 | 0 | 72.130 | 0 | 0 |
| TESTI2006383 | 0 | 0 | 0 | 0 | 14.302 | 0 | 0 |
| TESTI2006588 | 0 | 3.815 | 0 | 0 | 7.642 | 3.767 | 3.684 |
| TESTI2006615 | 0 | 0 | 0 | 0 | 0 | 8.029 | 0 |
| TESTI2007407 | 0 | 0 | 23.927 | 0 | 0 | 0 | 0 |
| TESTI2007422 | 0 | 0 | 0 | 0 | 0 | 53.906 | 0 |
| TESTI2007998 | 0 | 0 | 0 | 10.857 | 0 | 0 | 0 |
| TESTI2008240 | 0 | 0 | 0 | 0 | 0.882 | 1.305 | 1.702 |
| TESTI2008699 | 0 | 0 | 0 | 0 | 0 | 0 | 66.267 |
| TESTI2009785 | 0 | 0 | 0 | 0 | 5.063 | 4.992 | 0 |
| TESTI2010513 | 0 | 0 | 0 | 0 | 1.386 | 0.683 | 0 |
| TESTI2011605 | 0 | 0 | 0 | 0 | 0 | 6.270 | 0 |
| TESTI2011712 | 0 | 0 | 0 | 0 | 72.967 | 0 | 0 |
| TESTI2012104 | 0 | 68.595 | 0 | 0 | 0 | 0 | 0 |
| TESTI2012778 | 0 | 0 | 7.202 | 2.537 | 1.304 | 0.321 | 0 |
| TESTI2013295 | 0 | 0 | 20.764 | 0 | 0 | 0 | 0 |
| TESTI2014505 | 0 | 0 | 0 | 0 | 0 | 34.281 | 0 |
| TESTI2015092 | 0 | 0 | 0 | 0 | 0 | 0 | 22.545 |
| TESTI2015626 | 0 | 0 | 5.127 | 0 | 2.321 | 1.144 | 2.238 |
| TESTI2016033 | 0 | 12.276 | 0 | 0 | 0 | 0 | 0 |
| TESTI2017954 | 0 | 0 | 5.164 | 4.549 | 2.338 | 1.152 | 0 |
| TESTI2018462 | 0 | 0 | 0 | 0 | 0 | 4.916 | 19.231 |
| TESTI2018997 | 0 | 0 | 0 | 0 | 7.349 | 3.623 | 0 |
| TESTI2020026 | 0 | 91.511 | 0 | 0 | 0 | 0 | 0 |
| TESTI2024885 | 0 | 0 | 0 | 91.307 | 0 | 0 | 0 |
| TESTI2025454 | 0 | 0 | 0 | 0 | 39.745 | 19.594 | 0 |
| TESTI2026116 | 0 | 0 | 0 | 0 | 0 | 25.947 | 0 |
| TESTI2027271 | 0 | 0 | 0 | 0 | 18.633 | 0 | 0 |
| TESTI2033441 | 0 | 0 | 0 | 0 | 3.872 | 5.727 | 0 |
| TESTI2034940 | 0 | 0 | 2.031 | 3.577 | 3.677 | 1.360 | 1.773 |
| TESTI2046456 | 0 | 0 | 0 | 0 | 1.633 | 0.805 | 0 |
| TESTI2047605 | 0 | 0 | 0 | 0 | 0 | 25.348 | 0 |
| TESTI4000014 | 0 | 0 | 1.392 | 0 | 1.890 | 0.932 | 0 |
| TESTI4001206 | 0 | 0 | 0 | 0 | 0 | 72.687 | 0 |
| TESTI4002202 | 0 | 0 | 0 | 0 | 0 | 11.535 | 0 |
| TESTI4005534 | 0 | 0 | 0 | 0 | 0 | 48.512 | 0 |
| TESTI4007816 | 0 | 0 | 0 | 0 | 0 | 7.535 | 0 |
| TESTI4009286 | 0 | 0 | 0 | 4.977 | 0 | 1.261 | 0 |
| TESTI4010851 | 0 | 0 | 0 | 3.754 | 0 | 0.951 | 3.720 |
| TESTI4013441 | 0 | 0 | 0 | 0 | 0.553 | 0.273 | 0 |
| TESTI4013474 | 0 | 0 | 0 | 0 | 3.646 | 8.987 | 0 |
| TESTI4037156 | 0 | 0 | 0 | 0 | 1.953 | 1.926 | 0 |
| TESTI4043140 | 0 | 0 | 0 | 0 | 0 | 9.647 | 0 |
| TESTI4044704 | 0 | 0 | 0 | 0 | 17.985 | 0 | 0 |
| THYMU1000010 | 0 | 0 | 0 | 0 | 0 | 14.069 | 0 |
| THYMU1000032 | 0 | 0 | 0 | 0 | 13.772 | 6.789 | 0 |
| THYMU1000083 | 0 | 0 | 0 | 0 | 10.581 | 5.216 | 0 |
| THYMU1000103 | 0 | 0 | 0 | 0 | 0 | 3.067 | 0 |
| THYMU1000109 | 0 | 0 | 0 | 0 | 0 | 0 | 5.356 |
| THYMU1000329 | 0 | 0 | 0 | 0 | 0 | 9.271 | 0 |
| THYMU1000359 | 0 | 0 | 0 | 0 | 3.783 | 26.110 | 0 |
| THYMU1000374 | 0 | 0 | 0 | 0 | 10.570 | 13.028 | 10.193 |
| THYMU1000428 | 0 | 0 | 0 | 0 | 4.012 | 1.978 | 0 |
| THYMU1000473 | 0 | 0 | 0 | 0 | 0 | 5.786 | 0 |
| THYMU1000490 | 0 | 0 | 0 | 0 | 20.235 | 0 | 0 |
| THYMU2000057 | 0 | 0 | 0 | 0 | 0 | 2.359 | 0 |
| THYMU2000120 | 0 | 0 | 0 | 0 | 0 | 67.599 | 0 |
| THYMU2000300 | 0 | 0 | 0 | 0 | 0 | 5.082 | 0 |
| THYMU2000382 | 0 | 0 | 0 | 0 | 2.139 | 6.327 | 0 |
| THYMU2000672 | 0 | 0 | 0 | 0 | 0 | 39.350 | 0 |
| THYMU2000684 | 0 | 0 | 0 | 0 | 14.692 | 0 | 0 |
| THYMU2000775 | 0 | 0 | 0 | 0 | 0 | 16.288 | 0 |
| THYMU2001195 | 0 | 0 | 0 | 0 | 0 | 67.599 | 0 |
| THYMU2001819 | 0 | 0 | 0 | 0 | 80.886 | 0 | 0 |
| THYMU2001839 | 0 | 0 | 0 | 0 | 0 | 27.218 | 0 |
| THYMU2002147 | 0 | 0 | 0 | 0 | 0 | 41.018 | 0 |
| THYMU2002583 | 0 | 0 | 0 | 0 | 1.829 | 0 | 0 |
| THYMU2002756 | 0 | 0 | 0 | 0 | 0 | 12.736 | 0 |
| THYMU2002983 | 0 | 0 | 0 | 0 | 0 | 15.619 | 0 |
| THYMU2003012 | 0 | 0 | 0 | 0 | 3.092 | 4.574 | 0 |
| THYMU2003046 | 0 | 0 | 0 | 0 | 20.350 | 10.033 | 0 |
| THYMU2003133 | 0 | 0 | 0 | 0 | 0 | 18.107 | 0 |
| THYMU2003287 | 0 | 0 | 0 | 0 | 0 | 20.684 | 0 |
| THYMU2003419 | 0 | 0 | 0 | 0 | 0 | 1.747 | 0 |
| THYMU2003446 | 0 | 0 | 0 | 0 | 8.416 | 0 | 0 |
| THYMU2003499 | 0 | 0 | 0 | 0 | 0 | 52.442 | 0 |
| THYMU2003542 | 0 | 0 | 0 | 0 | 0 | 3.760 | 0 |
| THYMU2003891 | 0 | 0 | 0 | 0 | 3.604 | 6.092 | 1.986 |
| THYMU2003932 | 0 | 0 | 0 | 0 | 0 | 33.649 | 0 |
| THYMU2003981 | 0 | 0 | 0 | 0 | 0 | 7.268 | 0 |
| THYMU2004152 | 0 | 0 | 0 | 0 | 3.504 | 13.818 | 0 |
| THYMU2004320 | 0 | 0 | 0 | 0 | 0 | 28.426 | 0 |
| THYMU2004410 | 0 | 0 | 14.936 | 0 | 0 | 9.999 | 0 |
| THYMU2004733 | 0 | 0 | 0 | 0 | 0 | 9.743 | 0 |
| THYMU2004906 | 0 | 0 | 0 | 0 | 0 | 21.804 | 0 |
| THYMU2005439 | 0 | 0 | 0 | 0 | 19.505 | 28.848 | 0 |
| THYMU2005546 | 0 | 11.562 | 0 | 0 | 0 | 0.952 | 0 |
| THYMU2005980 | 0 | 0 | 0 | 0 | 0 | 14.107 | 0 |
| THYMU2006610 | 0 | 0 | 0 | 0 | 0 | 47.241 | 0 |
| THYMU2006813 | 0 | 0 | 0 | 0 | 0 | 2.753 | 0 |
| THYMU2007060 | 0 | 0 | 0 | 0 | 0 | 7.417 | 0 |
| THYMU2007065 | 0 | 0 | 0 | 0 | 0 | 7.054 | 0 |
| THYMU2007415 | 0 | 0 | 0 | 0 | 0 | 8.419 | 0 |
| THYMU2007467 | 0 | 0 | 0 | 0 | 0 | 7.027 | 0 |
| THYMU2007694 | 0 | 0 | 0 | 0 | 0 | 36.067 | 0 |
| THYMU2007886 | 0 | 0 | 10.794 | 0 | 0 | 2.409 | 0 |
| THYMU2008321 | 0 | 0 | 0 | 0 | 0 | 5.029 | 0 |
| THYMU2008686 | 0 | 0 | 0 | 0 | 0 | 21.200 | 0 |
| THYMU2009186 | 0 | 0 | 0 | 0 | 0 | 67.599 | 0 |
| THYMU2009658 | 0 | 0 | 0 | 2.405 | 0 | 0 | 0 |
| THYMU2009792 | 0 | 0 | 0 | 0 | 0 | 4.872 | 0 |
| THYMU2010448 | 0 | 0 | 0 | 0 | 0 | 18.423 | 0 |
| THYMU2010519 | 0 | 0 | 0 | 0 | 0 | 13.829 | 0 |
| THYMU2011063 | 0 | 0 | 0 | 0 | 0 | 9.154 | 0 |
| THYMU2011482 | 0 | 0 | 0 | 0 | 10.832 | 5.340 | 0 |
| THYMU2012492 | 0 | 0 | 0 | 0 | 0 | 45.490 | 0 |
| THYMU2012690 | 0 | 0 | 0 | 0 | 0 | 6.760 | 0 |
| THYMU2013916 | 0 | 0 | 0 | 0 | 0 | 5.788 | 0 |
| THYMU2014167 | 0 | 0 | 0 | 0 | 19.391 | 0 | 0 |
| THYMU2014492 | 0 | 0 | 0 | 0 | 67.907 | 0 | 0 |
| THYMU2015762 | 0 | 0 | 0 | 6.807 | 0 | 1.725 | 0 |
| THYMU2018126 | 0 | 0 | 0 | 0 | 2.567 | 0 | 0 |
| THYMU2018639 | 0 | 0 | 0 | 0 | 0 | 67.599 | 0 |
| THYMU2024121 | 0 | 0 | 0 | 0 | 0 | 51.056 | 0 |
| THYMU2024748 | 0 | 0 | 0 | 0 | 0 | 67.599 | 0 |
| THYMU2027125 | 0 | 1.261 | 0 | 1.229 | 0 | 0.311 | 0 |
| THYMU2027975 | 0 | 0 | 0 | 0 | 0 | 6.953 | 0 |
| THYMU2028629 | 0 | 0 | 0 | 0 | 0 | 31.849 | 0 |
| THYMU2029578 | 0 | 0 | 0 | 0 | 0 | 23.924 | 0 |
| THYMU2032014 | 0 | 0 | 0 | 0 | 0 | 28.708 | 0 |
| THYMU2033263 | 0 | 78.387 | 0 | 0 | 0 | 0 | 0 |
| THYMU2034374 | 0 | 0 | 0 | 0 | 44.389 | 21.883 | 0 |
| THYMU2034647 | 0 | 0 | 0 | 0 | 0 | 67.599 | 0 |
| THYMU3003007 | 0 | 0 | 0 | 0 | 0 | 33.064 | 0 |
| THYMU3003565 | 0 | 0 | 0 | 0 | 0 | 51.056 | 0 |
| THYMU3013386 | 0 | 0 | 0 | 5.140 | 0 | 0 | 0 |
| THYMU3015759 | 0 | 0 | 8.777 | 0 | 0 | 1.959 | 0 |
| THYMU3032798 | 0 | 0 | 0 | 0 | 0 | 3.364 | 0 |
| THYMU3032867 | 0 | 0 | 0 | 0 | 0 | 22.391 | 0 |
| THYMU3040068 | 0 | 0 | 0 | 0 | 0 | 67.599 | 0 |
| THYMU3040816 | 0 | 0 | 90.337 | 0 | 0 | 0 | 0 |
| THYMU3041428 | 0 | 0 | 0 | 0 | 0 | 0.443 | 0 |
| THYMU3045510 | 0 | 0 | 0 | 0 | 0 | 41.018 | 0 |
| THYMU3047115 | 0 | 20.268 | 0 | 0 | 0 | 0 | 0 |
| TKIDN2000464 | 0 | 0 | 0 | 0 | 0 | 31.971 | 0 |
| TKIDN2002738 | 0 | 0 | 3.269 | 0 | 1.480 | 0 | 0 |
| TKIDN2005487 | 0 | 0 | 0 | 4.933 | 0 | 0 | 0 |
| TKIDN2007605 | 0 | 0 | 0 | 0 | 0 | 21.732 | 0 |
| TKIDN2011289 | 0 | 0 | 0 | 0 | 0 | 10.400 | 0 |
| TLIVE2002690 | 0 | 14.154 | 0 | 0 | 0 | 0 | 0 |
| TLIVE2003970 | 0 | 0 | 0 | 0 | 8.161 | 0 | 0 |
| TRACH1000011 | 0 | 0 | 0 | 0 | 0 | 12.805 | 0 |
| TRACH1000030 | 0 | 0 | 0 | 0 | 0 | 2.400 | 0 |
| TRACH1000038 | 0 | 0 | 0 | 0 | 26.581 | 0 | 0 |
| TRACH1000063 | 0 | 0 | 0 | 14.767 | 0 | 0 | 0 |
| TRACH1000106 | 0 | 0 | 0 | 0 | 0 | 10.328 | 0 |
| TRACH2000045 | 0 | 0 | 0 | 0 | 0 | 4.784 | 0 |
| TRACH2000047 | 0 | 0 | 0 | 0 | 0 | 9.317 | 0 |
| TRACH2000237 | 0 | 0 | 0 | 36.917 | 0 | 0 | 0 |
| TRACH2000243 | 99.654 | 0 | 0 | 0 | 0 | 0 | 0 |
| TRACH2000248 | 0 | 0 | 0 | 0 | 0 | 2.427 | 0 |
| TRACH2000282 | 0 | 0 | 0 | 0 | 0 | 60.831 | 0 |
| TRACH2000321 | 0 | 0 | 0 | 0 | 1.734 | 0 | 0 |
| TRACH2000359 | 0 | 0 | 0 | 0 | 0 | 0 | 40.588 |
| TRACH2000472 | 0 | 0 | 0 | 0 | 3.013 | 4.456 | 0 |
| TRACH2000540 | 0 | 0 | 0 | 0 | 5.027 | 4.957 | 0 |
| TRACH2000702 | 0 | 0 | 0 | 26.957 | 0 | 0 | 0 |
| TRACH2000920 | 0 | 0 | 0 | 0 | 0 | 11.535 | 0 |
| TRACH2000972 | 0 | 0 | 0 | 0 | 2.091 | 0 | 0 |
| TRACH2001021 | 0 | 2.950 | 0 | 0 | 2.955 | 1.457 | 0 |
| TRACH2001289 | 0 | 0 | 0 | 0 | 2.399 | 1.774 | 0 |
| TRACH2001428 | 0 | 0 | 0 | 0 | 0 | 2.196 | 0 |
| TRACH2001432 | 0 | 0 | 0 | 0 | 0 | 0 | 7.570 |
| TRACH2001463 | 0 | 0 | 0 | 0 | 10.804 | 10.653 | 0 |
| TRACH2001523 | 0 | 0 | 0 | 11.673 | 0 | 0 | 0 |
| TRACH2001549 | 0 | 0 | 0 | 0 | 0 | 0 | 28.775 |
| TRACH2001596 | 0 | 0 | 0 | 0 | 0 | 35.602 | 0 |
| TRACH2001607 | 0 | 0 | 0 | 6.896 | 0 | 1.747 | 0 |
| TRACH2002043 | 0 | 0 | 8.267 | 0 | 0 | 0 | 0 |
| TRACH2002138 | 0 | 0 | 0 | 0 | 75.905 | 0 | 0 |
| TRACH2002537 | 0 | 0 | 0 | 0 | 3.273 | 0 | 0 |
| TRACH2002664 | 0 | 0 | 0 | 0 | 0 | 0 | 10.356 |
| TRACH2002803 | 0 | 0 | 0 | 0 | 0 | 3.625 | 0 |
| TRACH2002847 | 0 | 0 | 35.382 | 0 | 0 | 0 | 0 |
| TRACH2003323 | 0 | 0 | 0 | 0 | 0 | 3.096 | 0 |
| TRACH2003347 | 0 | 0 | 12.385 | 0 | 0 | 0 | 0 |
| TRACH2004109 | 0 | 0 | 0 | 0 | 0 | 60.831 | 0 |
| TRACH2005811 | 0 | 0 | 8.221 | 0 | 0 | 0 | 0 |
| TRACH2006866 | 0 | 0 | 0 | 0 | 10.505 | 0 | 6.753 |
| TRACH2007399 | 0 | 0 | 0 | 0 | 1.662 | 0 | 0 |
| TRACH2007816 | 0 | 0 | 0 | 0 | 0 | 17.367 | 0 |
| TRACH2008472 | 0 | 0 | 12.231 | 0 | 0 | 0 | 0 |
| TRACH2008478 | 0 | 0 | 0 | 0 | 0 | 62.137 | 0 |
| TRACH2008540 | 0 | 0 | 0 | 0 | 0 | 82.330 | 0 |
| TRACH2008716 | 0 | 0 | 39.545 | 0 | 0 | 0 | 0 |
| TRACH2009006 | 0 | 0 | 0 | 0 | 12.384 | 0 | 0 |
| TRACH2011113 | 0 | 0 | 0 | 0 | 0 | 8.213 | 0 |
| TRACH2011500 | 0 | 0 | 0 | 0 | 0 | 23.489 | 0 |
| TRACH2012298 | 0 | 0 | 11.062 | 0 | 0 | 0 | 0 |
| TRACH2012376 | 0 | 0 | 20.922 | 0 | 0 | 0 | 0 |
| TRACH2012497 | 0 | 0 | 0 | 0 | 0 | 11.261 | 0 |
| TRACH2013495 | 0 | 0 | 87.436 | 0 | 0 | 0 | 0 |
| TRACH2014077 | 0 | 0 | 0 | 0 | 0 | 5.918 | 0 |
| TRACH2014124 | 0 | 0 | 0 | 0 | 10.927 | 7.183 | 0 |
| TRACH2015823 | 0 | 0 | 17.053 | 0 | 0 | 0 | 0 |
| TRACH2016533 | 0 | 0 | 0 | 0 | 0 | 49.869 | 0 |
| TRACH2018317 | 0 | 0 | 0 | 0 | 10.338 | 5.096 | 19.936 |
| TRACH2018950 | 0 | 0 | 0 | 0 | 0 | 0 | 51.111 |
| TRACH2019425 | 0 | 0 | 87.436 | 0 | 0 | 0 | 0 |
| TRACH2024293 | 0 | 0 | 0 | 0 | 0 | 28.081 | 0 |
| TRACH3002192 | 0 | 0 | 4.861 | 0 | 0 | 0 | 0 |
| TRACH3003547 | 0 | 0 | 0 | 0 | 0 | 7.357 | 0 |
| TRACH3005294 | 0 | 0 | 0 | 0 | 0 | 6.461 | 0 |
| TRACH3006717 | 0 | 0 | 0 | 0 | 0 | 6.383 | 0 |
| TRACH3008093 | 0 | 0 | 0 | 0 | 0 | 8.522 | 0 |
| TRACH3009008 | 0 | 0 | 38.190 | 0 | 0 | 0 | 0 |
| TRACH3037067 | 0 | 0 | 0 | 0 | 0 | 2.796 | 0 |
| TSTOM2000315 | 0 | 0 | 17.765 | 0 | 0 | 0 | 0 |
| UMVEN2000133 | 0 | 0 | 0 | 0 | 4.137 | 1.020 | 0 |
| UMVEN2000453 | 0 | 0 | 4.070 | 0 | 0 | 0 | 0 |
| UTERU2000095 | 0 | 0 | 0 | 0 | 0 | 1.440 | 0 |
| UTERU2000332 | 0 | 0 | 0 | 0 | 16.686 | 8.226 | 0 |
| UTERU2000338 | 0 | 0 | 0 | 0 | 0 | 11.607 | 0 |
| UTERU2000424 | 0 | 0 | 0 | 0 | 5.994 | 8.865 | 0 |
| UTERU2000537 | 0 | 0 | 0 | 0 | 18.105 | 8.926 | 0 |
| UTERU2000541 | 0 | 0 | 0 | 0 | 0 | 10.972 | 0 |
| UTERU2002294 | 0 | 0 | 0 | 0 | 0 | 3.158 | 0 |
| UTERU2002410 | 0 | 0 | 0 | 0 | 2.072 | 1.021 | 0 |
| UTERU2003057 | 0 | 0 | 0 | 0 | 9.127 | 0 | 0 |
| UTERU2003456 | 0 | 76.204 | 0 | 0 | 0 | 0 | 0 |
| UTERU2004197 | 0 | 0 | 0 | 0 | 7.095 | 0 | 0 |
| UTERU2004664 | 0 | 0 | 0 | 0 | 5.988 | 0 | 0 |
| UTERU2004807 | 0 | 7.079 | 0 | 0 | 3.545 | 3.495 | 0 |
| UTERU2005292 | 0 | 0 | 0 | 0 | 0 | 5.417 | 0 |
| UTERU2005354 | 0 | 0 | 0 | 0 | 0 | 3.805 | 0 |
| UTERU2005593 | 0 | 0 | 8.750 | 0 | 0 | 0 | 0 |
| UTERU2005621 | 0 | 0 | 0 | 0 | 0 | 3.921 | 0 |
| UTERU2006115 | 0 | 0 | 0 | 0 | 0 | 0 | 53.335 |
| UTERU2006593 | 0 | 0 | 11.510 | 0 | 0 | 0 | 0 |
| UTERU2008085 | 0 | 3.818 | 1.408 | 3.721 | 0.956 | 0.157 | 1.229 |
| UTERU2008302 | 0 | 0 | 10.415 | 0 | 0 | 2.324 | 0 |
| UTERU2008939 | 0 | 0 | 0 | 0 | 0 | 25.840 | 0 |
| UTERU2009538 | 0 | 0 | 0 | 0 | 0 | 59.326 | 0 |
| UTERU2010226 | 0 | 0 | 0 | 0 | 27.836 | 0 | 0 |
| UTERU2010417 | 0 | 0 | 0 | 0 | 1.113 | 0.548 | 0 |
| UTERU2012741 | 0 | 0 | 0 | 0 | 63.521 | 0 | 0 |
| UTERU2012856 | 0 | 0 | 0 | 24.224 | 0 | 0 | 0 |
| UTERU2014898 | 0 | 0 | 0 | 20.896 | 0 | 0 | 0 |
| UTERU2015190 | 0 | 0 | 0 | 0 | 0 | 59.326 | 0 |
| UTERU2016822 | 0 | 0 | 0 | 0 | 0 | 10.490 | 0 |
| UTERU2016979 | 0 | 0 | 0 | 0 | 0 | 17.993 | 0 |
| UTERU2023045 | 0 | 0 | 0 | 0 | 31.937 | 0 | 0 |
| UTERU2023550 | 0 | 59.011 | 0 | 0 | 0 | 0 | 0 |
| UTERU2031084 | 0 | 0 | 0 | 0 | 0 | 37.818 | 0 |
| UTERU3005767 | 0 | 0 | 0 | 0 | 4.200 | 2.071 | 0 |
| UTERU3015011 | 0 | 0 | 0 | 0 | 0 | 12.277 | 0 |

[2628] Genes whose expression levels were negligibly low in each of the above-described libraries are shown with their clone names below.

[2629] 3NB691000018, 3NB691000085, 3NB691000113, 3NB691000129, 3NB691000191, 3NB692000012, 3NB692000029, 3NB692000102, 3NB692000154, 3NB692000276, 3NB692000305, 3NB692000374, 3NB692000429, 3NB692000484, 3NB692000529, 3NB692001034, 3NB692001040, 3NB692001123, 3NB692001267, 3NB692001288, 3NB692001349, 3NB692001366, 3NB692001408, 3NB692001433, 3NB692001471, 3NB692001496, 3NB692001501, 3NB692001507, 3NB692001511, 3NB692001519, 3NB692001520, 3NB692001548, 3NB692001557, 3NB692001637, 3NB692001719, 3NB692001853, 3NB692001861, 3NB692002051, 3NB692002365, 3NB692002685, 3NB692002806, 3NB692003538, 3NB692004045, 3NB692004724, 3NB692005439, 3NB692006952, 3NB692008178, 3NB692008729, ACTVT2000380, ADIPS1000064,

[2630] ADIPS2000069, ADIPS2000088, ADIPS2000245, ADIPS2000425, ADRGL1000002, ADRGL1000018, ADRGL1000033, ADRGL1000038, ADRGL1000065, ADRGL1000067, ADRGL1000111, ADRGL1000147, ADRGL1000160, ADRGL1000165, ADRGL1000182, ADRGL2000006, ADRGL2000042, ADRGL2000056, ADRGL2000064, ADRGL2000074, ADRGL2000085, ADRGL2000097, ADRGL2000142, ADRGL2000172, ADRGL2000248, ADRGL2000261, ADRGL2000328, ADRGL2000353, ADRGL2000384, ADRGL2000428, ADRGL2000636, ADRGL2000644, ADRGL2000968, ADRGL2001119, ADRGL2001229, ADRGL2001287, ADRGL2001301, ADRGL2001354, ADRGL2001554, ADRGL2001651, ADRGL2001756, ADRGL2001830, ADRGL2001836, ADRGL2001854, ADRGL2002013, ADRGL2002029, ADRGL2002191, ADRGL2002260, ADRGL2002392, ADRGL2002679,

[2631] ADRGL2002753, ADRGL2002857, ADRGL2003017, ADRGL2003329, ADRGL2003552, ADRGL2003585, ADRGL2003638, ADRGL2003684, ADRGL2003773, ADRGL2003785, ADRGL2004031, ADRGL2004077, ADRGL2004451, ADRGL2004459, ADRGL2004676, ADRGL2004708, ADRGL2004724, ADRGL2004749, ADRGL2004770, ADRGL2004777, ADRGL2004833, ADRGL2005336, ADRGL2005564, ADRGL2005756, ADRGL2005838, ADRGL2005926, ADRGL2005961, ADRGL2006034, ADRGL2006124, ADRGL2006177, ADRGL2006193, ADRGL2006377, ADRGL2006677, ADRGL2006732, ADRGL2006767, ADRGL2006817, ADRGL2006846, ADRGL2006886, ADRGL2007080, ADRGL2007125, ADRGL2007283, ADRGL2007313, ADRGL2007357, ADRGL2007636, ADRGL2007651, ADRGL2007810, ADRGL2007877, ADRGL2007906, ADRGL2007974, ADRGL2008023,

[2632] ADRGL2008331, ADRGL2008337, ADRGL2008535, ADRGL2008966, ADRGL2009146, ADRGL2009273, ADRGL2009324, ADRGL2009489, ADRGL2009533, ADRGL2009691, ADRGL2009755, ADRGL2010152, ADRGL2010315, ADRGL2010594, ADRGL2010860, ADRGL2010974, ADRGL2011190, ADRGL2011330, ADRGL2012038, ADRGL2012179, AHMSC1000138, ASTRO1000009, ASTRO1000018, ASTRO1000029, ASTRO1000096, ASTRO2000011, ASTRO2000014, ASTRO2000046, ASTRO2000095, ASTRO2000141, ASTRO2000191, ASTRO2000278, ASTRO2000372, ASTRO2000381, ASTRO2000403, ASTRO2000417, ASTRO2000482, ASTRO2000533, ASTRO2000653, ASTRO2000662, ASTRO2000725, ASTRO2000801, ASTRO2001001, ASTRO2001008, ASTRO2001029, ASTRO2001088, ASTRO2001107, ASTRO2001122, ASTRO2001227, ASTRO2001480,

[2633] ASTRO2002024, ASTRO2002035, ASTRO2002064, ASTRO2002202, ASTRO2002459, ASTRO2002571, ASTRO2002632, ASTRO2002659, ASTRO2002693, ASTRO2002720, ASTRO2002733, ASTRO2002743, ASTRO2002842, ASTRO2003212, ASTRO2003316, ASTRO2003461, ASTRO2003574, ASTRO2003581, ASTRO2003632, ASTRO2003740, ASTRO2003840, ASTRO2003925, ASTRO2003960, ASTRO2004032, ASTRO2004051, ASTRO2004177, ASTRO2004217, ASTRO2004297, ASTRO2004584, ASTRO2004628, ASTRO2004751, ASTRO2004877, ASTRO2004974, ASTRO2005008, ASTRO2005081, ASTRO2005096, ASTRO2005242, ASTRO2005273, ASTRO2005343, ASTRO2005413, ASTRO2005423, ASTRO2005557, ASTRO2005575, ASTRO2005593, ASTRO2005726, ASTRO2005863, ASTRO2005902, ASTRO2006356, ASTRO2006475, ASTRO2006732,

[2634] ASTRO2006747, ASTRO2006920, ASTRO2006952, ASTRO2007221, ASTRO2007377, ASTRO2007515, ASTRO2007578, ASTRO2007643, ASTRO2007666, ASTRO2007948, ASTRO2007956, ASTRO2007962, ASTRO2008040, ASTRO2008216, ASTRO2008239, ASTRO2008409, ASTRO2008425, ASTRO2008508, ASTRO2008777, ASTRO2008895, ASTRO2008960, ASTRO2008972, ASTRO2009068, ASTRO2009118, ASTRO2009177, ASTRO2009333, ASTRO2009458, ASTRO2009526, ASTRO2009879, ASTRO2010072, ASTRO2010582, ASTRO2010615, ASTRO2010799, ASTRO2010962, ASTRO2010996, ASTRO2011149, ASTRO2011422, ASTRO2011426, ASTRO2011437, ASTRO2011461, ASTRO2011834, ASTRO2011893, ASTRO2013124, ASTRO2013671, ASTRO2013802, ASTRO2014135, ASTRO2014174, ASTRO2014211, ASTRO2014363, ASTRO2014392,

[2635] ASTRO2014498, ASTRO2014561, ASTRO2014576, ASTRO2014863, ASTRO2014923, ASTRO2014961, ASTRO2015162, ASTRO2015185, ASTRO2015328, ASTRO2015529, ASTRO2015987, ASTRO2016044, ASTRO2016114, ASTRO2016148, ASTRO2016681, ASTRO2016819, ASTRO2016847, ASTRO2016892, ASTRO2017348, ASTRO2017627, ASTRO2018169, ASTRO2018373, ASTRO2019039, ASTRO2019171, ASTRO3000154, ASTRO3000172, ASTRO3000177, ASTRO3000301, ASTRO3000474, ASTRO3000482, BEAST2000454, BGGI11000193, BGGI11000285, BGGI12000022, BGGI12000067, BGGI12000161, BGGI12000533, BGGI12000544, BGGI12000684, BGGI12000693, BGGI12001002, BGGI12001097, BGGI12001241, BGGI12001247, BGGI12001682, BLADE1000176, BLADE2000181, BLADE2000340, BLADE2000389, BLADE2000463,

[2636] BLADE2000492, BLADE2000579, BLADE2000640, BLADE2000866, BLADE2000938, BLADE2001031, BLADE2001133, BLADE2001138, BLADE2001141, BLADE2001371, BLADE2001458, BLADE2001753, BLADE2001935, BLADE2001940, BLADE2001987, BLADE2002073, BLADE2002310, BLADE2002730, BLADE2002738, BLADE2002744, BLADE2002782, BLADE2002947, BLADE2002972, BLADE2003474, BLADE2003916, BLADE2004089, BLADE2004345, BLADE2004389, BLADE2004462, BLADE2004628, BLADE2004670, BLADE2004722, BLADE2005036, BLADE2005038, BLADE2005229, BLADE2005459, BLADE2005792, BLADE2006043, BLADE2006412, BLADE2006415, BLADE2006607, BLADE2006826, BLADE2006830, BLADE2006849, BLADE2006947, BLADE2007033, BLADE2007043, BLADE2007589, BLADE2007666, BLADE2007722,

[2637] BLADE2007735, BLADE2007744, BLADE2007799, BLADE2007923, BLADE2007935, BLADE2007958, BLADE2008281, BLADE2008398, BLADE2008454, BLADE2008461, BLADE2008479, BLADE2008539, BLADE2008809, BLADE2008995, BLADE2009452, BLADE2009479, BLADE2009593, BNGH41000098, BNGH41000104, BNGH41000118, BNGH41000153, BNGH41000169, BNGH41000177, BNGH41000198, BNGH41000216, BNGH42000130, BNGH42000132, BNGH42000405, BNGH42000532, BNGH42000675, BNGH42000791, BNGH42000815, BNGH42000994, BNGH42001247, BNGH42001406, BNGH42001724, BNGH42002244, BNGH42002387, BNGH42002487, BNGH42002489, BNGH42003529, BNGH42003570, BNGH42003641, BNGH42004076, BNGH42004291, BNGH42004538, BNGH42004679, BNGH42005017, BNGH42005235, BNGH42005504,

[2638] BNGH42005968, BNGH42006135, BNGH42006226, BNGH42006234, BNGH42007037, BNGH42007460, BNGH42007594, BNGH42007788, BNGH42007798, BNGH42008199, BNGH42008510, BNGH42008603, BNGH42008649, BNGH42008743, BNGH42008832, BNGH42008850, BNGH42008943, BNGH42009021, BRACE1000020, BRACE1000047, BRACE1000065, BRACE1000070, BRACE1000073, BRACE1000084, BRACE1000087, BRACE1000092, BRACE1000093, BRACE1000101, BRACE1000114, BRACE1000124, BRACE1000132, BRACE1000159, BRACE1000166, BRACE1000169, BRACE1000186, BRACE1000187, BRACE1000239, BRACE1000258, BRACE1000451, BRACE1000475, BRACE1000572, BRACE2000061, BRACE2000077, BRACE2000078, BRACE2000100, BRACE2000109, BRACE2000141, BRACE2000148, BRACE2000183, BRACE2000229,

[2639] BRACE2000232, BRACE2000245, BRACE2000256, BRACE2000266, BRACE2000280, BRACE2000300, BRACE2000331, BRACE2000351, BRACE2000368, BRACE2000392, BRACE2000441, BRACE2000487, BRACE2000489, BRACE2000505, BRACE2000526, BRACE2000531, BRACE2000545, BRACE2000553, BRACE2000565, BRACE2000577, BRACE2000640, BRACE2000650, BRACE2000677, BRACE2000698, BRACE2000718, BRACE2000733, BRACE2000743, BRACE2000750, BRACE2000815, BRACE2000885, BRACE2000893, BRACE2000905, BRACE2000936, BRACE2000947, BRACE2000965, BRACE2000969, BRACE2000975, BRACE2000988, BRACE2001017, BRACE2001065, BRACE2001070, BRACE2001094, BRACE2001107, BRACE2001117, BRACE2001143, BRACE2001154, BRACE2001188, BRACE2001191, BRACE2001197, BRACE2001236,

[2640] BRACE2001239, BRACE2001269, BRACE2001312, BRACE2001330, BRACE2001340, BRACE2001352, BRACE2001353, BRACE2001374, BRACE2001375, BRACE2001423, BRACE2001424, BRACE2001445, BRACE2001453, BRACE2001455, BRACE2001477, BRACE2001492, BRACE2001496, BRACE2001497, BRACE2001508, BRACE2001534, BRACE2001543, BRACE2001564, BRACE2001588, BRACE2001607, BRACE2001626, BRACE2001677, BRACE2001692, BRACE2001705, BRACE2001711, BRACE2001726, BRACE2001733, BRACE2001737, BRACE2001742, BRACE2001777, BRACE2001779, BRACE2001834, BRACE2001855, BRACE2001859, BRACE2001865, BRACE2001872, BRACE2001881, BRACE2001892, BRACE2001898, BRACE2001923, BRACE2001942, BRACE2001944, BRACE2001954, BRACE2001971, BRACE2001972, BRACE2001973,

[2641] BRACE2002026, BRACE2002034, BRACE2002081, BRACE2002139, BRACE2002142, BRACE2002151, BRACE2002157, BRACE2002176, BRACE2002202, BRACE2002206, BRACE2002227, BRACE2002260, BRACE2002297, BRACE2002304, BRACE2002356, BRACE2002392, BRACE2002394, BRACE2002409, BRACE2002431, BRACE2002444, BRACE2002458, BRACE2002467, BRACE2002468, BRACE2002478, BRACE2002495, BRACE2002582, BRACE2002585, BRACE2002589, BRACE2002590, BRACE2002606, BRACE2002613, BRACE2002614, BRACE2002617, BRACE2002623, BRACE2002635, BRACE2002649, BRACE2002676, BRACE2002682, BRACE2002685, BRACE2002695, BRACE2002707, BRACE2002736, BRACE2002752, BRACE2002755, BRACE2002762, BRACE2002772, BRACE2002792, BRACE2002796, BRACE2002803, BRACE2002812,

[2642] BRACE2002834, BRACE2002849, BRACE2002857, BRACE2002861, BRACE2002884, BRACE2002896, BRACE2002948, BRACE2003037, BRACE2003078, BRACE2003097, BRACE2003110, BRACE2003168, BRACE2003199, BRACE2003210, BRACE2003217, BRACE2003269, BRACE2003285, BRACE2003304, BRACE2003398, BRACE2003420, BRACE2003428, BRACE2003431, BRACE2003512, BRACE2003516, BRACE2003527, BRACE2003539, BRACE2003540, BRACE2003594, BRACE2003598, BRACE2003609, BRACE2003614, BRACE2003628, BRACE2003639, BRACE2003700, BRACE2003713, BRACE2003766, BRACE2003785, BRACE2003788, BRACE2003800, BRACE2003802, BRACE2003825, BRACE2003847, BRACE2003848, BRACE2003873, BRACE2003885, BRACE2003887, BRACE2003905, BRACE2003928, BRACE2003982, BRACE2003987,

[2643] BRACE2005034, BRACE2005047, BRACE2005063, BRACE2005083, BRACE2005090, BRACE2005099, BRACE2005118, BRACE2005124, BRACE2005138, BRACE2005151, BRACE2005160, BRACE2005169, BRACE2005189, BRACE2005193, BRACE2005196, BRACE2005198, BRACE2005216, BRACE2005231, BRACE2005243, BRACE2005251, BRACE2005253, BRACE2005290, BRACE2005328, BRACE2005329, BRACE2005337, BRACE2005348, BRACE2005363, BRACE2005395, BRACE2005408, BRACE2005433, BRACE2005448, BRACE2005450, BRACE2005453, BRACE2005457, BRACE2005460, BRACE2005489, BRACE2005518, BRACE2005556, BRACE2005562, BRACE2005624, BRACE2005642, BRACE2005661, BRACE2005667, BRACE2005681, BRACE2005719, BRACE2005731, BRACE2005742, BRACE2005762, BRACE2005773, BRACE2005787,

[2644] BRACE2005795, BRACE2005800, BRACE2005858, BRACE2005869, BRACE2005875, BRACE2005881, BRACE2005898, BRACE2005904, BRACE2005906, BRACE2005907, BRACE2005911, BRACE2005937, BRACE2005949, BRACE2005981, BRACE2005991, BRACE2006072, BRACE2006075, BRACE2006084, BRACE2006089, BRACE2006102, BRACE2006105, BRACE2006122, BRACE2006137, BRACE2006143, BRACE2006167, BRACE2006174, BRACE2006240, BRACE2006245, BRACE2006249, BRACE2006274, BRACE2006281, BRACE2006298, BRACE2006319, BRACE2006344, BRACE2006354, BRACE2006378, BRACE2006380, BRACE2006393, BRACE2006413, BRACE2006417, BRACE2006453, BRACE2006488, BRACE2006534, BRACE2006540, BRACE2006547, BRACE2006564, BRACE2006587, BRACE2006636, BRACE2006685, BRACE2006703,

[2645] BRACE2006743, BRACE2006753, BRACE2006783, BRACE2006821, BRACE2006833, BRACE2006859, BRACE2006871, BRACE2006909, BRACE2006911, BRACE2006924, BRACE2006935, BRACE2006937, BRACE2006944, BRACE2006951, BRACE2006982, BRACE2006986, BRACE2007013, BRACE2007087, BRACE2007138, BRACE2007174, BRACE2007197, BRACE2007201, BRACE2007203, BRACE2007232, BRACE2007262, BRACE2007274, BRACE2007281, BRACE2007358, BRACE2007396, BRACE2007398, BRACE2007401, BRACE2007411, BRACE2007447, BRACE2007477, BRACE2007502, BRACE2007503, BRACE2007522, BRACE2007527, BRACE2007538, BRACE2007563, BRACE2007577, BRACE2007621, BRACE2007640, BRACE2007641, BRACE2007646, BRACE2007663, BRACE2007682, BRACE2007685, BRACE2007727, BRACE2007749,

[2646] BRACE2007760, BRACE2007761, BRACE2007764, BRACE2007768, BRACE2007769, BRACE2007784, BRACE2007786, BRACE2007798, BRACE2007799, BRACE2007801, BRACE2007832, BRACE2007836, BRACE2007868, BRACE2007882, BRACE2007888, BRACE2007902, BRACE2007920, BRACE2007937, BRACE2007944, BRACE2007952, BRACE2008008, BRACE2008015, BRACE2008021, BRACE2008097, BRACE2008102, BRACE2008114, BRACE2008144, BRACE2008172, BRACE2008218, BRACE2008251, BRACE2008276, BRACE2008295, BRACE2008308, BRACE2008336, BRACE2008361, BRACE2008380, BRACE2008399, BRACE2008401, BRACE2008402, BRACE2008410, BRACE2008420, BRACE2008443, BRACE2008473, BRACE2008480, BRACE2008481, BRACE2008488, BRACE2008495, BRACE2008500, BRACE2008594, BRACE2008604,

[2647] BRACE2008615, BRACE2008622, BRACE2008629, BRACE2008655, BRACE2008656, BRACE2008706, BRACE2008708, BRACE2008710, BRACE2008754, BRACE2008797, BRACE2008847, BRACE2008857, BRACE2008861, BRACE2008867, BRACE2008881, BRACE2008883, BRACE2008917, BRACE2008919, BRACE2008941, BRACE2008948, BRACE2008960, BRACE2009014, BRACE2009016, BRACE2009031, BRACE2009045, BRACE2009053, BRACE2009122, BRACE2009131, BRACE2009185, BRACE2009188, BRACE2009212, BRACE2009221, BRACE2009235, BRACE2009238, BRACE2009255, BRACE2009270, BRACE2009272, BRACE2009274, BRACE2009275, BRACE2009291, BRACE2009293, BRACE2009307, BRACE2009311, BRACE2009318, BRACE2009323, BRACE2009421, BRACE2009428, BRACE2009434, BRACE2009437, BRACE2009483,

[2648] BRACE2009533, BRACE2009566, BRACE2009591, BRACE2009620, BRACE2009654, BRACE2009721, BRACE2009732, BRACE2009754, BRACE2009828, BRACE2009886, BRACE2009907, BRACE2009957, BRACE2010170, BRACE2010171, BRACE2010203, BRACE2010208, BRACE2010336, BRACE2010348, BRACE2010440, BRACE2010444, BRACE2010477, BRACE2010489, BRACE2010535, BRACE2010550, BRACE2010598, BRACE2010632, BRACE2010642, BRACE2010651, BRACE2010669, BRACE2010684, BRACE2010753, BRACE2010813, BRACE2010828, BRACE2010837, BRACE2010888, BRACE2010937, BRACE2010983, BRACE2011007, BRACE2011025, BRACE2011183, BRACE2011199, BRACE2011265, BRACE2011389, BRACE2011478, BRACE2011545, BRACE2011592, BRACE2011611, BRACE2011646, BRACE2011677, BRACE2011747,

[2649] BRACE2011838, BRACE2011892, BRACE2011904, BRACE2011947, BRACE2012062, BRACE2012185, BRACE2012222, BRACE2012232, BRACE2012291, BRACE2012317, BRACE2012510, BRACE2012625, BRACE2012653, BRACE2012833, BRACE2012838, BRACE2012936, BRACE2012947, BRACE2013009, BRACE2013010, BRACE2013126, BRACE2013132, BRACE2013149, BRACE2013369, BRACE2013806, BRACE2013855, BRACE2014108, BRACE2014161, BRACE2014232, BRACE2014257, BRACE2014268, BRACE2014306, BRACE2014475, BRACE2014657, BRACE2014746, BRACE2014780, BRACE2014821, BRACE2014824, BRACE2014850, BRACE2014854, BRACE2015031, BRACE2015058, BRACE2015132, BRACE2015262, BRACE2015270, BRACE2015314, BRACE2015352, BRACE2015368, BRACE2015412, BRACE2015436, BRACE2015741,

[2650] BRACE2015756, BRACE2015995, BRACE2016058, BRACE2016194, BRACE2016315, BRACE2016325, BRACE2016335, BRACE2016362, BRACE2016366, BRACE2016465, BRACE2016516, BRACE2016583, BRACE2016708, BRACE2016821, BRACE2016896, BRACE2016981, BRACE2017108, BRACE2017124, BRACE2017298, BRACE2017359, BRACE2017397, BRACE2017410, BRACE2017438, BRACE2017574, BRACE2017580, BRACE2017587, BRACE2017720, BRACE2017844, BRACE2017872, BRACE2017929, BRACE2017934, BRACE2017985, BRACE2017992, BRACE2018337, BRACE2018443, BRACE2018448, BRACE2018568, BRACE2018700, BRACE2018727, BRACE2018736, BRACE2018759, BRACE2018762, BRACE2018782, BRACE2018847, BRACE2019004, BRACE2019044, BRACE2019147, BRACE2019258, BRACE2019348, BRACE2019467,

[2651] BRACE2019510, BRACE2019519, BRACE2019528, BRACE2019618, BRACE2019696, BRACE2019703, BRACE2019843, BRACE2019865, BRACE2019872, BRACE2019877, BRACE2020028, BRACE2020077, BRACE2020097, BRACE2020157, BRACE2020278, BRACE2020358, BRACE2020467, BRACE2020584, BRACE2020652, BRACE2020709, BRACE2020742, BRACE2020756, BRACE2020863, BRACE2020982, BRACE2021014, BRACE2021148, BRACE2021245, BRACE2021254, BRACE2021264, BRACE2021344, BRACE2021433, BRACE2021670, BRACE2021695, BRACE2021708, BRACE2021721, BRACE2021932, BRACE2021936, BRACE2022030, BRACE2022158, BRACE2022196, BRACE2022270, BRACE2022328, BRACE2022394, BRACE2022435, BRACE2022448, BRACE2022450, BRACE2022549, BRACE2022633, BRACE2022693, BRACE2022848,

[2652] BRACE2022928, BRACE2022990, BRACE2023069, BRACE2023070, BRACE2023223, BRACE2023268, BRACE2023284, BRACE2023404, BRACE2023451, BRACE2023540, BRACE2023633, BRACE2023718, BRACE2023727, BRACE2023744, BRACE2023800, BRACE2023801, BRACE2024074, BRACE2024222, BRACE2024610, BRACE2024781, BRACE2024826, BRACE2025018, BRACE2025316, BRACE2025333, BRACE2025437, BRACE2025452, BRACE2025492, BRACE2025710, BRACE2025796, BRACE2025992, BRACE2026054, BRACE2026131, BRACE2026141, BRACE2026142, BRACE2026293, BRACE2026294, BRACE2026404, BRACE2026675, BRACE2026725, BRACE2026920, BRACE2026971, BRACE2027018, BRACE2027221, BRACE2027258, BRACE2027312, BRACE2027382, BRACE2027389, BRACE2027408, BRACE2027643, BRACE2027767,

[2653] BRACE2027770, BRACE2027879, BRACE2027896, BRACE2027970, BRACE2028171, BRACE2028392, BRACE2028410, BRACE2028636, BRACE2028741, BRACE2028956, BRACE2028970, BRACE2029112, BRACE2029356, BRACE2029396, BRACE2029581, BRACE2029644, BRACE2029849, BRACE2030039, BRACE2030096, BRACE2030323, BRACE2030326, BRACE2030341, BRACE2030345, BRACE2030736, BRACE2030883, BRACE2030884, BRACE2031154, BRACE2031232, BRACE2031527, BRACE2031531, BRACE2031553, BRACE2031899, BRACE2032044, BRACE2032090, BRACE2032134, BRACE2032148, BRACE2032182, BRACE2032329, BRACE2032385, BRACE2032436, BRACE2032477, BRACE2032502, BRACE2032538, BRACE2032584, BRACE2032823, BRACE2033128, BRACE2033394, BRACE2033478, BRACE2033720, BRACE2033786,

[2654] BRACE2034434, BRACE2034523, BRACE2034616, BRACE2034622, BRACE2034870, BRACE2035003, BRACE2035120, BRACE2035124, BRACE2035191, BRACE2035278, BRACE2035381, BRACE2035441, BRACE2035485, BRACE2036005, BRACE2036096, BRACE2036743, BRACE2036830, BRACE2036834, BRACE2036900, BRACE2037132, BRACE2037294, BRACE2037299, BRACE2037310, BRACE2037431, BRACE2037692, BRACE2037847, BRACE2038114, BRACE2038269, BRACE2038271, BRACE2038329, BRACE2038492, BRACE2038551, BRACE2038618, BRACE2039009, BRACE2039128, BRACE2039170, BRACE2039249, BRACE2039286, BRACE2039297, BRACE2039327, BRACE2039362, BRACE2039475, BRACE2039600, BRACE2039607, BRACE2039734, BRACE2039823, BRACE2039832, BRACE2039893, BRACE2039986, BRACE2040138,

[2655] BRACE2040325, BRACE2040514, BRACE2040640, BRACE2040987, BRACE2041009, BRACE2041095, BRACE2041200, BRACE2041264, BRACE2041890, BRACE2041898, BRACE2042394, BRACE2042398, BRACE2042550, BRACE2042620, BRACE2042628, BRACE2042873, BRACE2043036, BRACE2043105, BRACE2043142, BRACE2043248, BRACE2043349, BRACE2043774, BRACE2043942, BRACE2044057, BRACE2044105, BRACE2044263, BRACE2044286, BRACE2044304, BRACE2044473, BRACE2044510, BRACE2044640, BRACE2044816, BRACE2044946, BRACE2044949, BRACE2045300, BRACE2045428, BRACE2045445, BRACE2045596, BRACE2045772, BRACE2045947, BRACE2045954, BRACE2046251, BRACE2046295, BRACE2046976, BRACE2047011, BRACE2047232, BRACE2047350, BRACE2047377, BRACE2047385, BRACE2047492,

[2656] BRACE2047558, BRACE2047573, BRACE2047835, BRACE2047893, BRACE2047975, BRACE3000071, BRACE3000404, BRACE3000520, BRACE3000697, BRACE3000840, BRACE3000973, BRACE3001002, BRACE3001058, BRACE3001066, BRACE3001113, BRACE3001217, BRACE3001299, BRACE3001384, BRACE3001391, BRACE3001403, BRACE3001595, BRACE3001754, BRACE3001948, BRACE3001973, BRACE3002184, BRACE3002298, BRACE3002344, BRACE3002390, BRACE3002420, BRACE3002508, BRACE3002541, BRACE3002756, BRACE3003004, BRACE3003026, BRACE3003053, BRACE3003192, BRACE3003413, BRACE3003595, BRACE3003698, BRACE3003866, BRACE3003920, BRACE3004046, BRACE3004058, BRACE3004113, BRACE3004150, BRACE3004205, BRACE3004358, BRACE3004371, BRACE3004435, BRACE3004477,

[2657] BRACE3004767, BRACE3004772, BRACE3004783, BRACE3004843, BRACE3004862, BRACE3004880, BRACE3004887, BRACE3004981, BRACE3004996, BRACE3004998, BRACE3005103, BRACE3005127, BRACE3005145, BRACE3005217, BRACE3005225, BRACE3005430, BRACE3005499, BRACE3005760, BRACE3005870, BRACE3005903, BRACE3005989, BRACE3006113, BRACE3006185, BRACE3006226, BRACE3006462, BRACE3006463, BRACE3006553, BRACE3006872, BRACE3006917, BRACE3007058, BRACE3007084, BRACE3007085, BRACE3007258, BRACE3007322, BRACE3007472, BRACE3007480, BRACE3007559, BRACE3007625, BRACE3007642, BRACE3007649, BRACE3007767, BRACE3007869, BRACE3008036, BRACE3008066, BRACE3008092, BRACE3008095, BRACE3008137, BRACE3008255, BRACE3008337, BRACE3008384,

[2658] BRACE3008720, BRACE3008772, BRACE3009044, BRACE3009075, BRACE3009090, BRACE3009127, BRACE3009197, BRACE3009237, BRACE3009265, BRACE3009297, BRACE3009377, BRACE3009392, BRACE3009416, BRACE3009539, BRACE3009574, BRACE3009701, BRACE3009708, BRACE3009724, BRACE3009993, BRACE3010076, BRACE3010079, BRACE3010086, BRACE3010221, BRACE3010283, BRACE3010315, BRACE3010397, BRACE3010416, BRACE3010435, BRACE3010438, BRACE3010702, BRACE3010862, BRACE3011271, BRACE3011421, BRACE3011447, BRACE3011505, BRACE3011634, BRACE3011774, BRACE3012357, BRACE3012574, BRACE3012806, BRACE3012930, BRACE3013119, BRACE3013418, BRACE3013576, BRACE3013740, BRACE3013780, BRACE3013874, BRACE3013936, BRACE3013986, BRACE3014005,

[2659] BRACE3014068, BRACE3014231, BRACE3014290, BRACE3014317, BRACE3014523, BRACE3014714, BRACE3014807, BRACE3014942, BRACE3015090, BRACE3015121, BRACE3015262, BRACE3015521, BRACE3015808, BRACE3015829, BRACE3015894, BRACE3015898, BRACE3016020, BRACE3016122, BRACE3016167, BRACE3016170, BRACE3016580, BRACE3016788, BRACE3016810, BRACE3016862, BRACE3016884, BRACE3017083, BRACE3017253, BRACE3018083, BRACE3018308, BRACE3018963, BRACE3019055, BRACE3019071, BRACE3019084, BRACE3019570, BRACE3019611, BRACE3019817, BRACE3019828, BRACE3019941, BRACE3020151, BRACE3020194, BRACE3020286, BRACE3020356, BRACE3020594, BRACE3020669, BRACE3020671, BRACE3020890, BRACE3021148, BRACE3021430, BRACE3021517, BRACE3021805,

[2660] BRACE3022051, BRACE3022303, BRACE3022312, BRACE3022340, BRACE3022847, BRACE3023604, BRACE3023912, BRACE3024073, BRACE3024359, BRACE3024379, BRACE3024444, BRACE3024497, BRACE3024537, BRACE3024659, BRACE3024662, BRACE3024879, BRACE3025153, BRACE3025302, BRACE3025457, BRACE3025531, BRACE3025627, BRACE3025630, BRACE3025719, BRACE3026008, BRACE3026075, BRACE3026161, BRACE3026290, BRACE3026345, BRACE3026456, BRACE3026735, BRACE3026802, BRACE3026844, BRACE3026947, BRACE3026993, BRACE3027242, BRACE3027256, BRACE3027326, BRACE3027478, BRACE3027480, BRACE3027931, BRACE3027976, BRACE3028214, BRACE3028241, BRACE3028360, BRACE3028895, BRACE3028998, BRACE3029005, BRACE3029021, BRACE3029205, BRACE3029447,

[2661] BRACE3030057, BRACE3030103, BRACE3030538, BRACE3030748, BRACE3030866, BRACE3031161, BRACE3031184, BRACE3031185, BRACE3031315, BRACE3031372, BRACE3031579, BRACE3031728, BRACE3031838, BRACE3031843, BRACE3032427, BRACE3032455, BRACE3032537, BRACE3032538, BRACE3032631, BRACE3032771, BRACE3032980, BRACE3032983, BRACE3033525, BRACE3034159, BRACE3034183, BRACE3034389, BRACE3034964, BRACE3034993, BRACE3035168, BRACE3035227, BRACE3036156, BRACE3036271, BRACE3037612, BRACE3037637, BRACE3037803, BRACE3038012, BRACE3038030, BRACE3038569, BRACE3038570, BRACE3038687, BRACE3038760, BRACE3039288, BRACE3039358, BRACE3039378, BRACE3039454, BRACE3040012, BRACE3040239, BRACE3040504, BRACE3040644, BRACE3040856,

[2662] BRACE3040863, BRACE3041059, BRACE3041162, BRACE3041827, BRACE3042046, BRACE3042210, BRACE3042326, BRACE3042409, BRACE3042432, BRACE3042594, BRACE3043597, BRACE3044090, BRACE3044172, BRACE3044247, BRACE3044377, BRACE3044389, BRACE3044495, BRACE3045011, BRACE3045033, BRACE3045078, BRACE3045145, BRACE3045424, BRACE3045708, BRACE3045981, BRACE3046049, BRACE3046152, BRACE3046294, BRACE3046450, BRACE3046466, BRACE3046491, BRACE3046609, BRACE3046762, BRACE3046837, BRACE3046855, BRACE3046966, BRACE3047018, BRACE3047482, BRACE3047801, BRALZ1000047, BRALZ1000103, BRALZ2000189, BRALZ2000263, BRALZ2000988, BRALZ2001038, BRALZ2001279, BRALZ2001350, BRALZ2001445, BRALZ2001559, BRALZ2001743, BRALZ2001834,

[2663] BRALZ2002174, BRALZ2002418, BRALZ2002477, BRALZ2003119, BRALZ2003330, BRALZ2003453, BRALZ2003525, BRALZ2004397, BRALZ2005467, BRALZ2005471, BRALZ2005888, BRALZ2005950, BRALZ2005992, BRALZ2006474, BRALZ2006560, BRALZ2006734, BRALZ2006800, BRALZ2006976, BRALZ2007376, BRALZ2007545, BRALZ2007576, BRALZ2007661, BRALZ2007790, BRALZ2007793, BRALZ2007952, BRALZ2008031, BRALZ2008166, BRALZ2008462, BRALZ2008617, BRALZ2008696, BRALZ2008763, BRALZ2008869, BRALZ2008930, BRALZ2009446, BRALZ2009486, BRALZ2010186, BRALZ2010842, BRALZ2011337, BRALZ2011796, BRALZ2011880, BRALZ2012050, BRALZ2012183, BRALZ2012848, BRALZ2013621, BRALZ2013690, BRALZ2014054, BRALZ2014316, BRALZ2014484, BRALZ2014951, BRALZ2015168,

[2664] BRALZ2015811, BRALZ2016085, BRALZ2016498, BRALZ2017359, BRALZ2017531, BRALZ2017607, BRALZ2017620, BRALZ2017844, BRALZ2018342, BRALZ2018492, BRALZ2018834, BRALZ2019047, BRAMY1000095, BRAMY1000098, BRAMY1000130, BRAMY1000157, BRAMY1000173, BRAMY2000021, BRAMY2000025, BRAMY2000052, BRAMY2000076, BRAMY2000086, BRAMY2000151, BRAMY2000181, BRAMY2000196, BRAMY2000277, BRAMY2000388, BRAMY2000411, BRAMY2000508, BRAMY2000562, BRAMY2000585, BRAMY2000653, BRAMY2000814, BRAMY2000893, BRAMY2000946, BRAMY2000981, BRAMY2000987, BRAMY2001068, BRAMY2001114, BRAMY2001203, BRAMY2001282, BRAMY2001367, BRAMY2001427, BRAMY2001473, BRAMY2001678, BRAMY2002005, BRAMY2002044, BRAMY2002072, BRAMY2002158, BRAMY2002311,

[2665] BRAMY2002339, BRAMY2002364, BRAMY2002369, BRAMY2002479, BRAMY2002493, BRAMY2002525, BRAMY2002584, BRAMY2002604, BRAMY2002621, BRAMY2002638, BRAMY2002739, BRAMY2002799, BRAMY2002853, BRAMY2002862, BRAMY2002956, BRAMY2003008, BRAMY2003037, BRAMY2003117, BRAMY2003287, BRAMY2003529, BRAMY2003538, BRAMY2003585, BRAMY2003634, BRAMY2003653, BRAMY2003681, BRAMY2003893, BRAMY2003897, BRAMY2003898, BRAMY2003904, BRAMY2003926, BRAMY2003929, BRAMY2004031, BRAMY2004058, BRAMY2004183, BRAMY2004335, BRAMY2004351, BRAMY2004352, BRAMY2004363, BRAMY2004387, BRAMY2004492, BRAMY2004524, BRAMY2004537, BRAMY2004542, BRAMY2004756, BRAMY2004771, BRAMY2005052, BRAMY2005064, BRAMY2005094, BRAMY2005151, BRAMY2005182,

[2666] BRAMY2005244, BRAMY2005391, BRAMY2005488, BRAMY2005576, BRAMY2005648, BRAMY2005662, BRAMY2005708, BRAMY2005711, BRAMY2006092, BRAMY2006118, BRAMY2006149, BRAMY2006366, BRAMY2006375, BRAMY2006397, BRAMY2006411, BRAMY2006459, BRAMY2006466, BRAMY2006659, BRAMY2006779, BRAMY2006809, BRAMY2006879, BRAMY2007043, BRAMY2007078, BRAMY2007110, BRAMY2007185, BRAMY2007244, BRAMY2007249, BRAMY2007255, BRAMY2007287, BRAMY2007308, BRAMY2007411, BRAMY2007458, BRAMY2007486, BRAMY2007546, BRAMY2007567, BRAMY2007594, BRAMY2007610, BRAMY2007653, BRAMY2007753, BRAMY2007859, BRAMY2008333, BRAMY2008382, BRAMY2008563, BRAMY2008583, BRAMY2008977, BRAMY2008979, BRAMY2009013, BRAMY2009023, BRAMY2009034, BRAMY2009105,

[2667] BRAMY2009123, BRAMY2009192, BRAMY2009344, BRAMY2009349, BRAMY2009394, BRAMY2009489, BRAMY2009508, BRAMY2009528, BRAMY2009557, BRAMY2009612, BRAMY2009693, BRAMY2009934, BRAMY2010068, BRAMY2010135, BRAMY2010145, BRAMY2010171, BRAMY2010208, BRAMY2010239, BRAMY2010272, BRAMY2010290, BRAMY2010357, BRAMY2010366, BRAMY2010395, BRAMY2010441, BRAMY2010442, BRAMY2010464, BRAMY2010581, BRAMY2010798, BRAMY2010808, BRAMY2010919, BRAMY2011064, BRAMY2011105, BRAMY2011178, BRAMY2011196, BRAMY2011216, BRAMY2011253, BRAMY2011446, BRAMY2011480, BRAMY2011639, BRAMY2011679, BRAMY2011811, BRAMY2011841, BRAMY2011846, BRAMY2011849, BRAMY2011872, BRAMY2011961, BRAMY2012017, BRAMY2012091, BRAMY2012119, BRAMY2012162,

[2668] BRAMY2012163, BRAMY2012277, BRAMY2012340, BRAMY2012497, BRAMY2012517, BRAMY2012536, BRAMY2012555, BRAMY2012568, BRAMY2012581, BRAMY2012691, BRAMY2012721, BRAMY2012731, BRAMY2012776, BRAMY2012880, BRAMY2012881, BRAMY2013169, BRAMY2013200, BRAMY2013216, BRAMY2013405, BRAMY2013414, BRAMY2013572, BRAMY2013590, BRAMY2013621, BRAMY2013659, BRAMY2013722, BRAMY2013736, BRAMY2013756, BRAMY2013944, BRAMY2013975, BRAMY2014019, BRAMY2014205, BRAMY2014387, BRAMY2014462, BRAMY2014469, BRAMY2014541, BRAMY2014754, BRAMY2014813, BRAMY2015211, BRAMY2015251, BRAMY2015311, BRAMY2015420, BRAMY2015503, BRAMY2015516, BRAMY2015550, BRAMY2015551, BRAMY2015559, BRAMY2015688, BRAMY2015705, BRAMY2015855, BRAMY2015890,

[2669] BRAMY2015911, BRAMY2015925, BRAMY2016002, BRAMY2016009, BRAMY2016020, BRAMY2016070, BRAMY2016251, BRAMY2016325, BRAMY2016327, BRAMY2016386, BRAMY2016706, BRAMY2016771, BRAMY2016892, BRAMY2016938, BRAMY2016953, BRAMY2017014, BRAMY2017249, BRAMY2017348, BRAMY2017450, BRAMY2017455, BRAMY2017528, BRAMY2017864, BRAMY2018027, BRAMY2018106, BRAMY2018122, BRAMY2018126, BRAMY2018272, BRAMY2018273, BRAMY2018279, BRAMY2018295, BRAMY2018308, BRAMY2018396, BRAMY2018467, BRAMY2018635, BRAMY2018785, BRAMY2019055, BRAMY2019111, BRAMY2019277, BRAMY2019300, BRAMY2019468, BRAMY2019509, BRAMY2019600, BRAMY2019643, BRAMY2019710, BRAMY2019963, BRAMY2019985, BRAMY2019989, BRAMY2020050, BRAMY2020058, BRAMY2020106,

[2670] BRAMY2020270, BRAMY2020354, BRAMY2020355, BRAMY2020412, BRAMY2020445, BRAMY2020466, BRAMY2020520, BRAMY2020574, BRAMY2020634, BRAMY2020713, BRAMY2021040, BRAMY2021063, BRAMY2021098, BRAMY2021139, BRAMY2021142, BRAMY2021276, BRAMY2021310, BRAMY2021388, BRAMY2021498, BRAMY2021523, BRAMY2021732, BRAMY2021746, BRAMY2021825, BRAMY2021867, BRAMY2021962, BRAMY2021982, BRAMY2022052, BRAMY2022160, BRAMY2022168, BRAMY2022263, BRAMY2022301, BRAMY2022320, BRAMY2022383, BRAMY2022445, BRAMY2022454, BRAMY2022493, BRAMY2022525, BRAMY2022532, BRAMY2022723, BRAMY2022786, BRAMY2022796, BRAMY2022929, BRAMY2022980, BRAMY2022984, BRAMY2023060, BRAMY2023110, BRAMY2023115, BRAMY2023161, BRAMY2023172, BRAMY2023238,

[2671] BRAMY2023327, BRAMY2023358, BRAMY2023406, BRAMY2023482, BRAMY2023514, BRAMY2023729, BRAMY2023786, BRAMY2023852, BRAMY2023863, BRAMY2023939, BRAMY2024004, BRAMY2024073, BRAMY2024312, BRAMY2024374, BRAMY2024390, BRAMY2024416, BRAMY2024449, BRAMY2024489, BRAMY2024497, BRAMY2024514, BRAMY2024530, BRAMY2024535, BRAMY2024545, BRAMY2024576, BRAMY2024593, BRAMY2024711, BRAMY2024715, BRAMY2024728, BRAMY2024827, BRAMY2024849, BRAMY2025024, BRAMY2025032, BRAMY2025121, BRAMY2025175, BRAMY2025218, BRAMY2025230, BRAMY2025272, BRAMY2025277, BRAMY2025495, BRAMY2025812, BRAMY2025996, BRAMY2026009, BRAMY2026091, BRAMY2026168, BRAMY2026300, BRAMY2026347, BRAMY2026395, BRAMY2026405, BRAMY2026533, BRAMY2026538,

[2672] BRAMY2026685, BRAMY2026713, BRAMY2026778, BRAMY2026824, BRAMY2026899, BRAMY2026902, BRAMY2026904, BRAMY2026976, BRAMY2027073, BRAMY2027114, BRAMY2027140, BRAMY2027242, BRAMY2027396, BRAMY2027451, BRAMY2027461, BRAMY2027467, BRAMY2027587, BRAMY2027714, BRAMY2027717, BRAMY2027752, BRAMY2027782, BRAMY2028072, BRAMY2028183, BRAMY2028188, BRAMY2028269, BRAMY2028282, BRAMY2028472, BRAMY2028491, BRAMY2028516, BRAMY2028565, BRAMY2028593, BRAMY2028682, BRAMY2028740, BRAMY2028783, BRAMY2028796, BRAMY2028856, BRAMY2028914, BRAMY2029204, BRAMY2029602, BRAMY2030098, BRAMY2030109, BRAMY2030206, BRAMY2030477, BRAMY2030545, BRAMY2030607, BRAMY2030702, BRAMY2030703, BRAMY2030768, BRAMY2030799, BRAMY2030859,

[2673] BRAMY2030915, BRAMY2031317, BRAMY2031377, BRAMY2031442, BRAMY2031516, BRAMY2032014, BRAMY2032087, BRAMY2032231, BRAMY2032242, BRAMY2032290, BRAMY2032311, BRAMY2032317, BRAMY2032344, BRAMY2032589, BRAMY2032678, BRAMY2032696, BRAMY2032777, BRAMY2032994, BRAMY2033003, BRAMY2033116, BRAMY2033240, BRAMY2033267, BRAMY2033316, BRAMY2033332, BRAMY2033506, BRAMY2033594, BRAMY2033895, BRAMY2033914, BRAMY2034072, BRAMY2034185, BRAMY2034187, BRAMY2034305, BRAMY2034561, BRAMY2034920, BRAMY2034993, BRAMY2035070, BRAMY2035449, BRAMY2035545, BRAMY2035606, BRAMY2035718, BRAMY2035719, BRAMY2035801, BRAMY2035869, BRAMY2035923, BRAMY2036076, BRAMY2036079, BRAMY2036254, BRAMY2036266, BRAMY2036387, BRAMY2036396,

[2674] BRAMY2036459, BRAMY2036567, BRAMY2036615, BRAMY2036699, BRAMY2036913, BRAMY2036918, BRAMY2036968, BRAMY2037147, BRAMY2037328, BRAMY2037609, BRAMY2037629, BRAMY2037800, BRAMY2037823, BRAMY2037971, BRAMY2038100, BRAMY2038128, BRAMY2038317, BRAMY2038475, BRAMY2038484, BRAMY2038516, BRAMY2038846, BRAMY2038887, BRAMY2038904, BRAMY2039287, BRAMY2039300, BRAMY2039314, BRAMY2039341, BRAMY2039630, BRAMY2039695, BRAMY2039728, BRAMY2039872, BRAMY2040051, BRAMY2040159, BRAMY2040214, BRAMY2040478, BRAMY2040592, BRAMY2040915, BRAMY2041261, BRAMY2041347, BRAMY2041378, BRAMY2041384, BRAMY2041434, BRAMY2041507, BRAMY2041542, BRAMY2041738, BRAMY2042122, BRAMY2042131, BRAMY2042178, BRAMY2042195, BRAMY2042244,

[2675] BRAMY2042549, BRAMY2042596, BRAMY2042612, BRAMY2042641, BRAMY2042711, BRAMY2042760, BRAMY2042804, BRAMY2042899, BRAMY2042918, BRAMY2043069, BRAMY2043103, BRAMY2043314, BRAMY2043345, BRAMY2044246, BRAMY2044317, BRAMY2044349, BRAMY2044686, BRAMY2044838, BRAMY2045036, BRAMY2045299, BRAMY2045471, BRAMY2046109, BRAMY2046478, BRAMY2046489, BRAMY2046537, BRAMY2046667, BRAMY2046742, BRAMY2046871, BRAMY2046984, BRAMY2046989, BRAMY2047169, BRAMY2047280, BRAMY2047420, BRAMY2047676, BRAMY2047692, BRAMY2047746, BRAMY2047751, BRAMY2047765, BRAMY2047884, BRAMY2047948, BRAMY3000206, BRAMY3000210, BRAMY3000213, BRAMY3000224, BRAMY3000254, BRAMY3000307, BRAMY3000692, BRAMY3001356, BRAMY3001401, BRAMY3001409,

[2676] BRAMY3001794, BRAMY3002120, BRAMY3002312, BRAMY3002329, BRAMY3002458, BRAMY3002508, BRAMY3002620, BRAMY3002803, BRAMY3002805, BRAMY3002886, BRAMY3002991, BRAMY3003026, BRAMY3003109, BRAMY3003205, BRAMY3003310, BRAMY3003566, BRAMY3003723, BRAMY3004126, BRAMY3004224, BRAMY3004364, BRAMY3004672, BRAMY3004800, BRAMY3004900, BRAMY3004919, BRAMY3005091, BRAMY3005184, BRAMY3005656, BRAMY3005912, BRAMY3005932, BRAMY3006032, BRAMY3006297, BRAMY3006761, BRAMY3007078, BRAMY3007206, BRAMY3007311, BRAMY3007350, BRAMY3007449, BRAMY3007471, BRAMY3007609, BRAMY3007723, BRAMY3007968, BRAMY3008044, BRAMY3008088, BRAMY3008096, BRAMY3008335, BRAMY3008466, BRAMY3008505, BRAMY3008650, BRAMY3008937, BRAMY3009158,

[2677] BRAMY3009207, BRAMY3009491, BRAMY3009556, BRAMY3009782, BRAMY3009811, BRAMY3009904, BRAMY3010264, BRAMY3010321, BRAMY3010411, BRAMY3010492, BRAMY3010603, BRAMY3010654, BRAMY4000089, BRAMY4000095, BRAMY4000229, BRAMY4000277, BRAMY4000915, BRAMY4000962, BRAMY4001173, BRAMY4001200, BRAMY4001234, BRAMY4001449, BRAMY4001652, BRAMY4001863, BRAMY4001913, BRAMY4002575, BRASW1000053, BRASW1000125, BRAWH1000001, BRAWH1000002, BRAWH1000007, BRAWH1000037, BRAWH1000045, BRAWH1000116, BRAWH1000127, BRAWH1000130, BRAWH1000157, BRAWH1000162, BRAWH1000164, BRAWH1000168, BRAWH1000174, BRAWH1000180, BRAWH1000369, BRAWH2000034, BRAWH2000048, BRAWH2000071, BRAWH2000082, BRAWH2000093, BRAWH2000109, BRAWH2000131,

[2678] BRAWH2000142, BRAWH2000169, BRAWH2000218, BRAWH2000232, BRAWH2000248, BRAWH2000256, BRAWH2000274, BRAWH2000323, BRAWH2000353, BRAWH2000370, BRAWH2000409, BRAWH2000443, BRAWH2000471, BRAWH2000476, BRAWH2000482, BRAWH2000488, BRAWH2000494, BRAWH2000500, BRAWH2000503, BRAWH2000554, BRAWH2000595, BRAWH2000636, BRAWH2000643, BRAWH2000651, BRAWH2000682, BRAWH2000686, BRAWH2000697, BRAWH2000752, BRAWH2000859, BRAWH2000866, BRAWH2000892, BRAWH2000901, BRAWH2000926, BRAWH2000984, BRAWH2001019, BRAWH2001037, BRAWH2001052, BRAWH2001129, BRAWH2001137, BRAWH2001159, BRAWH2001171, BRAWH2001203, BRAWH2001238, BRAWH2001239, BRAWH2001255, BRAWH2001355, BRAWH2001378, BRAWH2001395, BRAWH2001406, BRAWH2001412,

[2679] BRAWH2001418, BRAWH2001424, BRAWH2001436, BRAWH2001438, BRAWH2001439, BRAWH2001459, BRAWH2001461, BRAWH2001484, BRAWH2001492, BRAWH2001503, BRAWH2001519, BRAWH2001530, BRAWH2001535, BRAWH2001589, BRAWH2001662, BRAWH2001666, BRAWH2001671, BRAWH2001679, BRAWH2001686, BRAWH2001701, BRAWH2001842, BRAWH2001862, BRAWH2001873, BRAWH2001940, BRAWH2001973, BRAWH2002047, BRAWH2002060, BRAWH2002062, BRAWH2002125, BRAWH2002191, BRAWH2002333, BRAWH2002352, BRAWH2002383, BRAWH2002549, BRAWH2002560, BRAWH2002623, BRAWH2002630, BRAWH2002635, BRAWH2002662, BRAWH2002679, BRAWH2002725, BRAWH2002761, BRAWH2002811, BRAWH2002861, BRAWH2002911, BRAWH2002963, BRAWH2002967, BRAWH2002976, BRAWH2003000, BRAWH2003135,

[2680] BRAWH2003240, BRAWH2003307, BRAWH2003355, BRAWH2003366, BRAWH2003662, BRAWH2003689, BRAWH2003693, BRAWH2003832, BRAWH2003948, BRAWH2003964, BRAWH2004044, BRAWH2004068, BRAWH2004078, BRAWH2004136, BRAWH2004217, BRAWH2004731, BRAWH2004779, BRAWH2004842, BRAWH2004884, BRAWH2004923, BRAWH2005008, BRAWH2005068, BRAWH2005074, BRAWH2005225, BRAWH2005315, BRAWH2005517, BRAWH2005524, BRAWH2005533, BRAWH2005578, BRAWH2005812, BRAWH2005974, BRAWH2005998, BRAWH2006044, BRAWH2006083, BRAWH2006207, BRAWH2006301, BRAWH2006395, BRAWH2006450, BRAWH2006493, BRAWH2006526, BRAWH2006543, BRAWH2006622, BRAWH2006760, BRAWH2006960, BRAWH2006989, BRAWH2007069, BRAWH2007308, BRAWH2007406, BRAWH2007550, BRAWH2007570,

[2681] BRAWH2007591, BRAWH2007658, BRAWH2007664, BRAWH2007808, BRAWH2007825, BRAWH2007862, BRAWH2007890, BRAWH2008058, BRAWH2008255, BRAWH2008297, BRAWH2008366, BRAWH2008380, BRAWH2008540, BRAWH2008577, BRAWH2008706, BRAWH2008790, BRAWH2008903, BRAWH2008956, BRAWH2008993, BRAWH2009112, BRAWH2009227, BRAWH2009238, BRAWH2009261, BRAWH2009263, BRAWH2009298, BRAWH2009307, BRAWH2009360, BRAWH2009393, BRAWH2009485, BRAWH2009490, BRAWH2009558, BRAWH2009590, BRAWH2009626, BRAWH2009678, BRAWH2009695, BRAWH2009907, BRAWH2010000, BRAWH2010069, BRAWH2010084, BRAWH2010136, BRAWH2010318, BRAWH2010329, BRAWH2010354, BRAWH2010364, BRAWH2010536, BRAWH2010552, BRAWH2010584, BRAWH2010618, BRAWH2010619, BRAWH2010754,

[2682] BRAWH2010980, BRAWH2011066, BRAWH2011079, BRAWH2011096, BRAWH2011155, BRAWH2011166, BRAWH2011204, BRAWH2011294, BRAWH2011400, BRAWH2011762, BRAWH2011795, BRAWH2011796, BRAWH2011812, BRAWH2011823, BRAWH2011860, BRAWH2011920, BRAWH2011958, BRAWH2012054, BRAWH2012077, BRAWH2012161, BRAWH2012162, BRAWH2012164, BRAWH2012258, BRAWH2012277, BRAWH2012326, BRAWH2012538, BRAWH2012540, BRAWH2012619, BRAWH2012698, BRAWH2012749, BRAWH2012827, BRAWH2012866, BRAWH2012963, BRAWH2013047, BRAWH2013219, BRAWH2013294, BRAWH2013748, BRAWH2013866, BRAWH2013871, BRAWH2013914, BRAWH2013941, BRAWH2013955, BRAWH2014053, BRAWH2014234, BRAWH2014379, BRAWH2014414, BRAWH2014473, BRAWH2014511, BRAWH2014662, BRAWH2014717,

[2683] BRAWH2014729, BRAWH2014876, BRAWH2014934, BRAWH2014954, BRAWH2015247, BRAWH2015349, BRAWH2015375, BRAWH2015385, BRAWH2015595, BRAWH2015728, BRAWH2015853, BRAWH2015866, BRAWH2016028, BRAWH2016160, BRAWH2016221, BRAWH2016223, BRAWH2016305, BRAWH2016439, BRAWH2016446, BRAWH2016514, BRAWH2016562, BRAWH2016655, BRAWH2016679, BRAWH2016702, BRAWH2016724, BRAWH2016785, BRAWH2016792, BRAWH2016800, BRAWH2017002, BRAWH2017103, BRAWH2017250, BRAWH2017294, BRAWH2017304, BRAWH2017305, BRAWH2017379, BRAWH2017407, BRAWH2017433, BRAWH2017523, BRAWH2017534, BRAWH2017542, BRAWH2017635, BRAWH2017913, BRAWH2018206, BRAWH2018267, BRAWH2018282, BRAWH2018317, BRAWH2018506, BRAWH2018514, BRAWH2018601, BRAWH2018745,

[2684] BRAWH2018875, BRAWH2019053, BRAWH2019055, BRAWH2019198, BRAWH3000078, BRAWH3000088, BRAWH3000100, BRAWH3000166, BRAWH3000314, BRAWH3000329, BRAWH3000410, BRAWH3000446, BRAWH3000491, BRAWH3000604, BRAWH3000884, BRAWH3001053, BRAWH3001319, BRAWH3001326, BRAWH3001475, BRAWH3001636, BRAWH3001638, BRAWH3001712, BRAWH3001760, BRAWH3001783, BRAWH3001833, BRAWH3001879, BRAWH3001891, BRAWH3001918, BRAWH3002433, BRAWH3002513, BRAWH3002574, BRAWH3002600, BRAWH3002819, BRAWH3003019, BRAWH3003136, BRAWH3003244, BRAWH3003343, BRAWH3003411, BRAWH3003522, BRAWH3003573, BRAWH3003598, BRAWH3003727, BRAWH3003801, BRAWH3003975, BRAWH3004222, BRAWH3004335, BRAWH3004350, BRAWH3004453, BRAWH3004530, BRAWH3004666,

[2685] BRAWH3005037, BRAWH3005047, BRAWH3005132, BRAWH3005146, BRAWH3005292, BRAWH3005300, BRAWH3005422, BRAWH3005534, BRAWH3005886, BRAWH3005892, BRAWH3005896, BRAWH3005912, BRAWH3005981, BRAWH3006547, BRAWH3006548, BRAWH3006761, BRAWH3006792, BRAWH3007129, BRAWH3007221, BRAWH3007441, BRAWH3007455, BRAWH3007506, BRAWH3007726, BRAWH3007783, BRAWH3008167, BRAWH3008341, BRAWH3008559, BRAWH3008697, BRAWH3008867, BRAWH3009017, BRAWH3009285, BRAWH3009297, BRAWH3009546, BRAWH3009961, BRAWH3010461, BRAWH3010560, BRAWH3010602, BRAWH3010657, BRAWH3010726, BRAWH3010833, BRAWH3011101, BRAWH3011331, BRAWH3011402, BRAWH3011577, BRAWH3011623, BRAWH3011637, BRAWH3011685, BRAWH3011907, BRAWH3011929, BRAWH3012005,

[2686] BRAWH3012662, BRAWH3012779, BRAWH3013009, BRAWH3013049, BRAWH3013197, BRAWH3013264, BRAWH3013508, BRAWH3014609, BRAWH3014639, BRAWH3015017, BRAWH3015175, BRAWH3015260, BRAWH3015610, BRAWH3015825, BRAWH3016123, BRAWH3016271, BRAWH3016715, BRAWH3017259, BRAWH3017260, BRAWH3017477, BRAWH3017537, BRAWH3017980, BRAWH3018063, BRAWH3018369, BRAWH3018548, BRAWH3018969, BRAWH3019026, BRAWH3019529, BRAWH3019594, BRAWH3019629, BRAWH3019820, BRAWH3020200, BRAWH3020318, BRAWH3020486, BRAWH3020884, BRAWH3020928, BRAWH3021012, BRAWH3021545, BRAWH3021574, BRAWH3021580, BRAWH3021641, BRAWH3021643, BRAWH3021724, BRAWH3022347, BRAWH3022431, BRAWH3022459, BRAWH3022542, BRAWH3022719, BRAWH3022866, BRAWH3022900,

[2687] BRAWH3023156, BRAWH3023168, BRAWH3023172, BRAWH3023274, BRAWH3023421, BRAWH3024231, BRAWH3024242, BRAWH3024469, BRAWH3024506, BRAWH3024613, BRAWH3026349, BRAWH3026394, BRAWH3026529, BRAWH3027420, BRAWH3027440, BRAWH3027533, BRAWH3027574, BRAWH3027607, BRAWH3027616, BRAWH3027675, BRAWH3027806, BRAWH3027880, BRAWH3027927, BRAWH3028202, BRAWH3028223, BRAWH3028306, BRAWH3028461, BRAWH3028645, BRAWH3028754, BRAWH3028796, BRAWH3029254, BRAWH3029313, BRAWH3029538, BRAWH3029556, BRAWH3029806, BRAWH3030613, BRAWH3030772, BRAWH3030810, BRAWH3030892, BRAWH3030910, BRAWH3030950, BRAWH3031054, BRAWH3031710, BRAWH3031902, BRAWH3032298, BRAWH3032340, BRAWH3032571, BRAWH3032620, BRAWH3032930, BRAWH3033117,

[2688] BRAWH3033293, BRAWH3033448, BRAWH3033513, BRAWH3034097, BRAWH3034114, BRAWH3034134, BRAWH3034668, BRAWH3034743, BRAWH3034775, BRAWH3034890, BRAWH3035154, BRAWH3035403, BRAWH3035904, BRAWH3035914, BRAWH3035936, BRAWH3036077, BRAWH3036247, BRAWH3036270, BRAWH3036561, BRAWH3036738, BRAWH3036951, BRAWH3037265, BRAWH3037394, BRAWH3037533, BRAWH3037979, BRAWH3038055, BRAWH3038230, BRAWH3038252, BRAWH3038324, BRCAN1000065, BRCAN1000076, BRCAN1000105, BRCAN1000168, BRCAN2000148, BRCAN2000149, BRCAN2000209, BRCAN2000239, BRCAN2000346, BRCAN2000364, BRCAN2000383, BRCAN2000418, BRCAN2000523, BRCAN2000541, BRCAN2000563, BRCAN2000577, BRCAN2000620, BRCAN2000639, BRCAN2000763, BRCAN2000832, BRCAN2000923,

[2689] BRCAN2001223, BRCAN2001866, BRCAN2002173, BRCAN2002416, BRCAN2002473, BRCAN2002562, BRCAN2002662, BRCAN2002826, BRCAN2002854, BRCAN2002856, BRCAN2002892, BRCAN2002944, BRCAN2002948, BRCAN2003070, BRCAN2003269, BRCAN2003389, BRCAN2003628, BRCAN2003703, BRCAN2003746, BRCAN2003814, BRCAN2003987, BRCAN2004173, BRCAN2004355, BRCAN2004371, BRCAN2004653, BRCAN2004699, BRCAN2005436, BRCAN2005449, BRCAN2006019, BRCAN2006051, BRCAN2006063, BRCAN2006117, BRCAN2006174, BRCAN2006290, BRCAN2006297, BRCAN2006323, BRCAN2006401, BRCAN2006411, BRCAN2006450, BRCAN2006955, BRCAN2007119, BRCAN2007144, BRCAN2007426, BRCAN2007525, BRCAN2008494, BRCAN2008528, BRCAN2008701, BRCAN2008894, BRCAN2009156, BRCAN2009168,

[2690] BRCAN2009203, BRCAN2009432, BRCAN2010374, BRCAN2010376, BRCAN2010547, BRCAN2010581, BRCAN2010665, BRCAN2011254, BRCAN2011316, BRCAN2011602, BRCAN2011946, BRCAN2012110, BRCAN2012355, BRCAN2012402, BRCAN2012408, BRCAN2012481, BRCAN2012613, BRCAN2012713, BRCAN2012929, BRCAN2013655, BRCAN2013660, BRCAN2014143, BRCAN2014229, BRCAN2014370, BRCAN2014602, BRCAN2014652, BRCAN2014788, BRCAN2014881, BRCAN2014952, BRCAN2015371, BRCAN2015402, BRCAN2015464, BRCAN2015719, BRCAN2015757, BRCAN2015886, BRCAN2016025, BRCAN2016046, BRCAN2016174, BRCAN2016433, BRCAN2016762, BRCAN2016814, BRCAN2017442, BRCAN2017905, BRCAN2018240, BRCAN2018269, BRCAN2018490, BRCAN2018667, BRCAN2018748, BRCAN2018935, BRCAN2019002,

[2691] BRCAN2019387, BRCAN2019653, BRCAN2019773, BRCAN2019907, BRCAN2020234, BRCAN2020331, BRCAN2020412, BRCAN2020467, BRCAN2020710, BRCAN2020880, BRCAN2021024, BRCAN2021028, BRCAN2021325, BRCAN2021452, BRCAN2021669, BRCAN2021718, BRCAN2022126, BRCAN2022191, BRCAN2022472, BRCAN2022474, BRCAN2023347, BRCAN2023724, BRCAN2024451, BRCAN2024563, BRCAN2024572, BRCAN2025009, BRCAN2025093, BRCAN2025349, BRCAN2025368, BRCAN2025712, BRCAN2025982, BRCAN2026117, BRCAN2026197, BRCAN2026340, BRCAN2026711, BRCAN2027150, BRCAN2027310, BRCAN2027334, BRCAN2027355, BRCAN2027364, BRCAN2027513, BRCAN2027593, BRCAN2027970, BRCAN2028021, BRCAN2028040, BRCAN2028319, BRCAN2028338, BRCAN2028355, BRCAN2028378, BRCAN2028460,

[2692] BRCAN2028545, BRCAN2028634, BRCAN2028702, BRCOC1000087, BRCOC1000094, BRCOC2000004, BRCOC2000047, BRCOC2000152, BRCOC2000184, BRCOC2000186, BRCOC2000333, BRCOC2000360, BRCOC2000404, BRCOC2000487, BRCOC2000637, BRCOC2000670, BRCOC2000816, BRCOC2000850, BRCOC2001355, BRCOC2002085, BRCOC2002155, BRCOC2002323, BRCOC2002659, BRCOC2002664, BRCOC2002686, BRCOC2002751, BRCOC2002756, BRCOC2002777, BRCOC2002835, BRCOC2003100, BRCOC2003125, BRCOC2003213, BRCOC2003513, BRCOC2003732, BRCOC2003740, BRCOC2004036, BRCOC2004175, BRCOC2004354, BRCOC2004455, BRCOC2004950, BRCOC2005542, BRCOC2005903, BRCOC2005951, BRCOC2006164, BRCOC2006189, BRCOC2006243, BRCOC2006270, BRCOC2006639, BRCOC2006942, BRCOC2007034,

[2693] BRCOC2007593, BRCOC2007733, BRCOC2007769, BRCOC2008064, BRCOC2008225, BRCOC2008642, BRCOC2008993, BRCOC2009052, BRCOC2009196, BRCOC2009380, BRCOC2009638, BRCOC2009937, BRCOC2010115, BRCOC2010123, BRCOC2010510, BRCOC2010980, BRCOC2010994, BRCOC2011010, BRCOC2011398, BRCOC2011418, BRCOC2011506, BRCOC2011769, BRCOC2011996, BRCOC2012229, BRCOC2012386, BRCOC2012551, BRCOC2012813, BRCOC2013448, BRCOC2013573, BRCOC2013675, BRCOC2013780, BRCOC2014013, BRCOC2014033, BRCOC2014400, BRCOC2014748, BRCOC2014833, BRCOC2015597, BRCOC2015824, BRCOC2015944, BRCOC2016525, BRCOC2016661, BRCOC2017061, BRCOC2017652, BRCOC2017856, BRCOC2018775, BRCOC2019255, BRCOC2019549, BRCOC2019841, BRCOC2019896, BRCOC2019903,

[2694] BRCOC2019910, BRCOC2019934, BRCOC2020122, BRCOC2020142, BRHIP1000058, BRHIP1000072, BRHIP1000108, BRHIP1000129, BRHIP1000174, BRHIP1000258, BRHIP2000079, BRHIP2000087, BRHIP2000163, BRHIP2000210, BRHIP2000239, BRHIP2000245, BRHIP2000312, BRHIP2000359, BRHIP2000445, BRHIP2000506, BRHIP2000532, BRHIP2000553, BRHIP2000621, BRHIP2000691, BRHIP2000826, BRHIP2000920, BRHIP2001074, BRHIP2001099, BRHIP2001686, BRHIP2001782, BRHIP2001802, BRHIP2001805, BRHIP2001886, BRHIP2001927, BRHIP2002122, BRHIP2002143, BRHIP2002172, BRHIP2002339, BRHIP2002346, BRHIP2002510, BRHIP2002664, BRHIP2002722, BRHIP2002929, BRHIP2003048, BRHIP2003062, BRHIP2003242, BRHIP2003272, BRHIP2003748, BRHIP2003786, BRHIP2003828,

[2695] BRHIP2003917, BRHIP2004312, BRHIP2004355, BRHIP2004359, BRHIP2004814, BRHIP2004883, BRHIP2004902, BRHIP2005010, BRHIP2005236, BRHIP2005271, BRHIP2005354, BRHIP2005600, BRHIP2005719, BRHIP2005724, BRHIP2005752, BRHIP2005932, BRHIP2006617, BRHIP2006782, BRHIP2006800, BRHIP2006819, BRHIP2006921, BRHIP2007305, BRHIP2007307, BRHIP2007616, BRHIP2007690, BRHIP2007741, BRHIP2007928, BRHIP2007969, BRHIP2008389, BRHIP2008607, BRHIP2008756, BRHIP2008909, BRHIP2009019, BRHIP2009177, BRHIP2009340, BRHIP2009351, BRHIP2009414, BRHIP2009474, BRHIP2009617, BRHIP2009685, BRHIP2010309, BRHIP2010444, BRHIP2010487, BRHIP2010571, BRHIP2010593, BRHIP2010610, BRHIP2010723, BRHIP2010744, BRHIP2011080, BRHIP2011120,

[2696] BRHIP2011199, BRHIP2011508, BRHIP2011576, BRHIP2011616, BRHIP2011783, BRHIP2011838, BRHIP2011891, BRHIP2011933, BRHIP2012054, BRHIP2012059, BRHIP2012141, BRHIP2012314, BRHIP2012360, BRHIP2012545, BRHIP2012580, BRHIP2012627, BRHIP2012642, BRHIP2012750, BRHIP2012922, BRHIP2012923, BRHIP2012972, BRHIP2013286, BRHIP2013447, BRHIP2013510, BRHIP2013699, BRHIP2013723, BRHIP2013958, BRHIP2013972, BRHIP2014228, BRHIP2014285, BRHIP2014291, BRHIP2014373, BRHIP2014386, BRHIP2014387, BRHIP2014954, BRHIP2015224, BRHIP2015245, BRHIP2015356, BRHIP2015360, BRHIP2015679, BRHIP2016005, BRHIP2016125, BRHIP2016788, BRHIP2016968, BRHIP2016990, BRHIP2017010, BRHIP2017315, BRHIP2017385, BRHIP2017404, BRHIP2017542,

[2697] BRHIP2017553, BRHIP2017642, BRHIP2017714, BRHIP2017780, BRHIP2017945, BRHIP2018014, BRHIP2018369, BRHIP2018612, BRHIP2018635, BRHIP2018650, BRHIP2018719, BRHIP2018805, BRHIP2018998, BRHIP2019007, BRHIP2019047, BRHIP2019149, BRHIP2019177, BRHIP2019291, BRHIP2019494, BRHIP2019589, BRHIP2019641, BRHIP2019819, BRHIP2019884, BRHIP2019972, BRHIP2020182, BRHIP2020509, BRHIP2020573, BRHIP2020622, BRHIP2020695, BRHIP2020743, BRHIP2020842, BRHIP2020859, BRHIP2020930, BRHIP2021102, BRHIP2021289, BRHIP2021495, BRHIP2021615, BRHIP2021744, BRHIP2021858, BRHIP2021870, BRHIP2021929, BRHIP2022006, BRHIP2022054, BRHIP2022221, BRHIP2022228, BRHIP2022298, BRHIP2022326, BRHIP2022467, BRHIP2022708, BRHIP2022986,

[2698] BRHIP2023071, BRHIP2023229, BRHIP2023272, BRHIP2023292, BRHIP2023309, BRHIP2023369, BRHIP2023438, BRHIP2023695, BRHIP2023735, BRHIP2023762, BRHIP2023773, BRHIP2023860, BRHIP2023869, BRHIP2024046, BRHIP2024165, BRHIP2024201, BRHIP2024347, BRHIP2024549, BRHIP2024789, BRHIP2024911, BRHIP2024941, BRHIP2025245, BRHIP2025366, BRHIP2025448, BRHIP2025679, BRHIP2025739, BRHIP2025797, BRHIP2026021, BRHIP2026061, BRHIP2026155, BRHIP2026214, BRHIP2026288, BRHIP2026346, BRHIP2026557, BRHIP2026723, BRHIP2026877, BRHIP2027017, BRHIP2027054, BRHIP2027077, BRHIP2027563, BRHIP2027685, BRHIP2027762, BRHIP2028187, BRHIP2028303, BRHIP2028330, BRHIP2028480, BRHIP2028583, BRHIP2028593, BRHIP2029176, BRHIP2029283,

[2699] BRHIP2029393, BRHIP2029529, BRHIP2029643, BRHIP2029663, BRHIP3000060, BRHIP3000070, BRHIP3000081, BRHIP3000131, BRHIP3000240, BRHIP3000377, BRHIP3000457, BRHIP3000475, BRHIP3000488, BRHIP3000526, BRHIP3000626, BRHIP3000859, BRHIP3000907, BRHIP3001076, BRHIP3001079, BRHIP3001141, BRHIP3001283, BRHIP3001338, BRHIP3001360, BRHIP3001481, BRHIP3001878, BRHIP3001964, BRHIP3002114, BRHIP3002124, BRHIP3002141, BRHIP3002363, BRHIP3002691, BRHIP3002920, BRHIP3002931, BRHIP3003063, BRHIP3003126, BRHIP3003306, BRHIP3003340, BRHIP3003395, BRHIP3003484, BRHIP3003644, BRHIP3003688, BRHIP3003795, BRHIP3003961, BRHIP3003984, BRHIP3004193, BRHIP3004416, BRHIP3004710, BRHIP3004725, BRHIP3004774, BRHIP3004786,

[2700] BRHIP3004863, BRHIP3004968, BRHIP3005037, BRHIP3005137, BRHIP3005142, BRHIP3005231, BRHIP3005307, BRHIP3005574, BRHIP3005673, BRHIP3005768, BRHIP3005801, BRHIP3005944, BRHIP3006279, BRHIP3006294, BRHIP3006390, BRHIP3006449, BRHIP3006683, BRHIP3006717, BRHIP3006786, BRHIP3006950, BRHIP3007172, BRHIP3007183, BRHIP3007195, BRHIP3007223, BRHIP3007239, BRHIP3007291, BRHIP3007409, BRHIP3007424, BRHIP3007483, BRHIP3007586, BRHIP3007609, BRHIP3007640, BRHIP3007960, BRHIP3008082, BRHIP3008183, BRHIP3008314, BRHIP3008320, BRHIP3008344, BRHIP3008405, BRHIP3008565, BRHIP3008598, BRHIP3008606, BRHIP3008691, BRHIP3008714, BRHIP3008997, BRHIP3009099, BRHIP3009140, BRHIP3009181, BRHIP3009318, BRHIP3009427,

[2701] BRHIP3009448, BRHIP3009672, BRHIP3009753, BRHIP3010135, BRHIP3010289, BRHIP3010529, BRHIP3011082, BRHIP3011241, BRHIP3011269, BRHIP3011460, BRHIP3011567, BRHIP3011831, BRHIP3012185, BRHIP3012289, BRHIP3012357, BRHIP3012736, BRHIP3012745, BRHIP3012868, BRHIP3012997, BRHIP3013078, BRHIP3013271, BRHIP3013588, BRHIP3013698, BRHIP3013765, BRHIP3013897, BRHIP3014237, BRHIP3014675, BRHIP3015620, BRHIP3015751, BRHIP3015854, BRHIP3016032, BRHIP3016213, BRHIP3016302, BRHIP3016421, BRHIP3017109, BRHIP3017146, BRHIP3017256, BRHIP3017325, BRHIP3017558, BRHIP3017637, BRHIP3017855, BRHIP3018278, BRHIP3018784, BRHIP3019643, BRHIP3019824, BRHIP3019880, BRHIP3019956, BRHIP3020046, BRHIP3020155, BRHIP3020182,

[2702] BRHIP3020733, BRHIP3021019, BRHIP3021499, BRHIP3021534, BRHIP3021778, BRHIP3021987, BRHIP3022656, BRHIP3023922, BRHIP3024118, BRHIP3024533, BRHIP3024703, BRHIP3024725, BRHIP3024820, BRHIP3025161, BRHIP3025702, BRHIP3025795, BRHIP3025844, BRHIP3026052, BRHIP3026097, BRHIP3026231, BRHIP3026335, BRHIP3026651, BRHIP3027105, BRHIP3027137, BRHIP3027160, BRHIP3027191, BRHIP3027501, BRHIP3027594, BRHIP3027651, BRHIP3027854, BRHIP3027947, BRHIP3028570, BRHIP3028742, BRSSN1000056, BRSSN1000059, BRSSN1000092, BRSSN1000153, BRSSN2000097, BRSSN2000175, BRSSN2000197, BRSSN2000244, BRSSN2000293, BRSSN2000295, BRSSN2000312, BRSSN2000498, BRSSN2000518, BRSSN2000561, BRSSN2000566, BRSSN2000684, BRSSN2000715,

[2703] BRSSN2000832, BRSSN2001213, BRSSN2001275, BRSSN2001342, BRSSN2001426, BRSSN2001503, BRSSN2001579, BRSSN2001758, BRSSN2001810, BRSSN2001869, BRSSN2002857, BRSSN2002859, BRSSN2003086, BRSSN2003093, BRSSN2003820, BRSSN2003841, BRSSN2003937, BRSSN2004142, BRSSN2004303, BRSSN2004304, BRSSN2004496, BRSSN2004657, BRSSN2004686, BRSSN2004710, BRSSN2004719, BRSSN2005847, BRSSN2006133, BRSSN2006390, BRSSN2006575, BRSSN2006611, BRSSN2006644, BRSSN2006892, BRSSN2007076, BRSSN2007168, BRSSN2007202, BRSSN2007338, BRSSN2007464, BRSSN2007504, BRSSN2007819, BRSSN2008125, BRSSN2008419, BRSSN2008464, BRSSN2008549, BRSSN2008797, BRSSN2009378, BRSSN2009389, BRSSN2009395, BRSSN2009627, BRSSN2009630, BRSSN2009702,

[2704] BRSSN2010019, BRSSN2010110, BRSSN2010587, BRSSN2010596, BRSSN2010830, BRSSN2011262, BRSSN2011738, BRSSN2011843, BRSSN2012081, BRSSN2012103, BRSSN2012157, BRSSN2012198, BRSSN2012254, BRSSN2012439, BRSSN2012622, BRSSN2012691, BRSSN2012838, BRSSN2013095, BRSSN2013544, BRSSN2013696, BRSSN2013702, BRSSN2013733, BRSSN2013753, BRSSN2013874, BRSSN2014112, BRSSN2014294, BRSSN2014424, BRSSN2014513, BRSSN2014556, BRSSN2014573, BRSSN2014610, BRSSN2014636, BRSSN2014685, BRSSN2015199, BRSSN2015369, BRSSN2015493, BRSSN2015497, BRSSN2015554, BRSSN2015707, BRSSN2015773, BRSSN2015907, BRSSN2015982, BRSSN2016589, BRSSN2016768, BRSSN2016905, BRSSN2017297, BRSSN2017422, BRSSN2017530, BRSSN2017682, BRSSN2017757,

[2705] BRSSN2018218, BRSSN2018440, BRSSN2018447, BRSSN2018581, BRSSN2018731, BRSSN2018771, BRSSN2018925, BRSTN1000097, BRSTN2000058, BRSTN2000070, BRSTN2000220, BRSTN2000312, BRSTN2000367, BRSTN2000536, BRSTN2000872, BRSTN2001067, BRSTN2001613, BRSTN2001801, BRSTN2002105, BRSTN2002400, BRSTN2002532, BRSTN2002691, BRSTN2003590, BRSTN2003835, BRSTN2004863, BRSTN2004869, BRSTN2004987, BRSTN2005721, BRSTN2006306, BRSTN2006466, BRSTN2006580, BRSTN2006583, BRSTN2006638, BRSTN2006865, BRSTN2007000, BRSTN2007118, BRSTN2007284, BRSTN2007765, BRSTN2008052, BRSTN2008283, BRSTN2008367, BRSTN2008418, BRSTN2008457, BRSTN2008475, BRSTN2008930, BRSTN2009247, BRSTN2010089, BRSTN2010107, BRSTN2010363, BRSTN2010416,

[2706] BRSTN2010500, BRSTN2010569, BRSTN2010750, BRSTN2010923, BRSTN2011211, BRSTN2011597, BRSTN2011688, BRSTN2011799, BRSTN2012089, BRSTN2012284, BRSTN2012320, BRSTN2012380, BRSTN2012451, BRSTN2013354, BRSTN2013502, BRSTN2013931, BRSTN2014490, BRSTN2014633, BRSTN2014751, BRSTN2014770, BRSTN2015015, BRSTN2015889, BRSTN2015978, BRSTN2016066, BRSTN2016335, BRSTN2016678, BRSTN2016892, BRSTN2016918, BRSTN2017151, BRSTN2017237, BRSTN2017379, BRSTN2017761, BRSTN2017771, BRSTN2017995, BRSTN2018077, BRSTN2018083, BRSTN2018596, BRSTN2018692, BRSTN2018712, BRSTN2019079, BRSTN2019129, BRTHA1000021, BRTHA1000063, BRTHA1000311, BRTHA2000057, BRTHA2000474, BRTHA2000514, BRTHA2000574, BRTHA2000855, BRTHA2000969,

[2707] BRTHA2000972, BRTHA2001304, BRTHA2001370, BRTHA2001462, BRTHA2001717, BRTHA2001812, BRTHA2002091, BRTHA2002115, BRTHA2002133, BRTHA2002281, BRTHA2002376, BRTHA2002442, BRTHA2002493, BRTHA2002565, BRTHA2002608, BRTHA2002702, BRTHA2002721, BRTHA2002726, BRTHA2002741, BRTHA2002808, BRTHA2002896, BRTHA2002903, BRTHA2003030, BRTHA2003110, BRTHA2003116, BRTHA2003436, BRTHA2003759, BRTHA2003794, BRTHA2004361, BRTHA2004371, BRTHA2004582, BRTHA2004629, BRTHA2004639, BRTHA2004642, BRTHA2004812, BRTHA2004821, BRTHA2004978, BRTHA2004992, BRTHA2005005, BRTHA2005013, BRTHA2005448, BRTHA2005579, BRTHA2005831, BRTHA2005942, BRTHA2005956, BRTHA2006075, BRTHA2006146, BRTHA2006194, BRTHA2006232, BRTHA2006720,

[2708] BRTHA2006735, BRTHA2006974, BRTHA2006975, BRTHA2007060, BRTHA2007122, BRTHA2007422, BRTHA2007603, BRTHA2007665, BRTHA2007998, BRTHA2008316, BRTHA2008335, BRTHA2008502, BRTHA2008513, BRTHA2008527, BRTHA2008535, BRTHA2008598, BRTHA2008669, BRTHA2008955, BRTHA2009311, BRTHA2009349, BRTHA2009486, BRTHA2009803, BRTHA2009846, BRTHA2009886, BRTHA2009972, BRTHA2010008, BRTHA2010033, BRTHA2010073, BRTHA2010097, BRTHA2010191, BRTHA2010397, BRTHA2010608, BRTHA2010672, BRTHA2010884, BRTHA2010907, BRTHA2011062, BRTHA2011194, BRTHA2011321, BRTHA2011351, BRTHA2011500, BRTHA2011641, BRTHA2011691, BRTHA2012129, BRTHA2012183, BRTHA2012189, BRTHA2012351, BRTHA2012392, BRTHA2012466, BRTHA2012555, BRTHA2012562,

[2709] BRTHA2012714, BRTHA2012980, BRTHA2013054, BRTHA2013262, BRTHA2013275, BRTHA2013426, BRTHA2013460, BRTHA2013515, BRTHA2013540, BRTHA2013595, BRTHA2013610, BRTHA2013707, BRTHA2013942, BRTHA2014287, BRTHA2014334, BRTHA2014381, BRTHA2014578, BRTHA2014647, BRTHA2014663, BRTHA2014792, BRTHA2014828, BRTHA2014909, BRTHA2014975, BRTHA2014997, BRTHA2015406, BRTHA2015478, BRTHA2015696, BRTHA2015700, BRTHA2015853, BRTHA2015878, BRTHA2016179, BRTHA2016267, BRTHA2016318, BRTHA2016496, BRTHA2016543, BRTHA2016552, BRTHA2016577, BRTHA2016765, BRTHA2016918, BRTHA2017178, BRTHA2017353, BRTHA2017364, BRTHA2017972, BRTHA2017985, BRTHA2018011, BRTHA2018129, BRTHA2018165, BRTHA2018304, BRTHA2018344, BRTHA2018420,

[2710] BRTHA2018443, BRTHA2018504, BRTHA2018558, BRTHA2018591, BRTHA2018624, BRTHA2018706, BRTHA2018707, BRTHA2019014, BRTHA2019022, BRTHA2019048, BRTHA2019073, BRTHA2019726, BRTHA2019743, BRTHA2020400, BRTHA2020566, BRTHA2020642, BRTHA2020695, BRTHA2020721, BRTHA2020781, BRTHA2020811, BRTHA2020910, BRTHA2021212, BRTHA2021440, BRTHA2021450, BRTHA2022074, BRTHA2022914, BRTHA2022968, BRTHA2023402, BRTHA2023437, BRTHA2024177, BRTHA2024354, BRTHA2024712, BRTHA2025869, BRTHA2026290, BRTHA2026311, BRTHA2027227, BRTHA2027250, BRTHA2027546, BRTHA2028297, BRTHA2029969, BRTHA2030036, BRTHA2030213, BRTHA2031517, BRTHA2031800, BRTHA2031917, BRTHA2032763, BRTHA2032845, BRTHA2033122, BRTHA2033155, BRTHA2033264,

[2711] BRTHA2033320, BRTHA2033683, BRTHA2034281, BRTHA2034576, BRTHA2034874, BRTHA2035448, BRTHA2035743, BRTHA2036055, BRTHA2036295, BRTHA2036660, BRTHA2037247, BRTHA2038279, BRTHA2038345, BRTHA2038353, BRTHA2038396, BRTHA3000252, BRTHA3000273, BRTHA3000296, BRTHA3000297, BRTHA3000325, BRTHA3000456, BRTHA3000633, BRTHA3000789, BRTHA3001221, BRTHA3001623, BRTHA3002265, BRTHA3002401, BRTHA3002411, BRTHA3002427, BRTHA3002864, BRTHA3002933, BRTHA3002955, BRTHA3003000, BRTHA3003023, BRTHA3003074, BRTHA3003225, BRTHA3003339, BRTHA3003343, BRTHA3003417, BRTHA3003449, BRTHA3003474, BRTHA3003490, BRTHA3003704, BRTHA3004307, BRTHA3004432, BRTHA3004475, BRTHA3004502, BRTHA3004610, BRTHA3005046, BRTHA3005735,

[2712] BRTHA3005988, BRTHA3006318, BRTHA3006593, BRTHA3006856, BRTHA3007113, BRTHA3007130, BRTHA3007148, BRTHA3007319, BRTHA3007469, BRTHA3007472, BRTHA3007532, BRTHA3007662, BRTHA3007685, BRTHA3007769, BRTHA3007922, BRTHA3008143, BRTHA3008293, BRTHA3008310, BRTHA3008386, BRTHA3008520, BRTHA3008608, BRTHA3008694, BRTHA3008778, BRTHA3008826, BRTHA3009037, BRTHA3009090, BRTHA3009291, BRTHA3009858, BRTHA3010135, BRTHA3010366, BRTHA3010469, BRTHA3010530, BRTHA3010540, BRTHA3010717, BRTHA3011149, BRTHA3011187, BRTHA3011229, BRTHA3011265, BRTHA3011361, BRTHA3011510, BRTHA3011892, BRTHA3012265, BRTHA3013860, BRTHA3013882, BRTHA3013884, BRTHA3013981, BRTHA3014000, BRTHA3014105, BRTHA3014507, BRTHA3014547,

[2713] BRTHA3014691, BRTHA3014835, BRTHA3014854, BRTHA3014908, BRTHA3014920, BRTHA3015815, BRTHA3016616, BRTHA3016835, BRTHA3016845, BRTHA3016917, BRTHA3017047, BRTHA3017589, BRTHA3017848, BRTHA3018409, BRTHA3018514, BRTHA3018617, BRTHA3018623, BRTHA3018656, BRTHA3019048, BRTHA3019105, BRTHA3019183, BRTHA3020000, BRTHA3020314, BRTHA3020369, BRTHA3021569, BRTHA3021708, BRTHA3021786, BRTHA3022641, BRTHA3023403, BRTHA3023523, BRTHA3023590, BRTHA3023929, BRTHA3024233, BRTHA3024600, BRTHA3025073, BRTHA3025789, BRTHA3025826, BRTHA3026161, BRTHA3026180, BRTHA3026507, BRTHA3026556, BRTHA3026916, BRTHA3027171, BRTHA3027318, BRTHA3027638, BRTHA3027820, BRTHA3027879, BRTHA3027957, BRTHA3028339, BRTHA3028505,

[2714] BRTHA3028782, CD34C2000051, CD34C2000152, CD34C2000175, CD34C2000443, CD34C3000125, CD34C3000252, CD34C3000314, CD34C3000424, CD34C3000494, CERVX1000042, CERVX2000812, CERVX2000968, CERVX2002006, CERVX2002013, CERVX2002430, CERVX2002770, CHONS1000058, CHONS2000172, CHONS2000797, CHONS2001287, CHONS2001382, CHONS2001797, CHONS2001834, CHONS2002419, COLON1000030, COLON1000084, COLON1000135, COLON2000470, COLON2000557, COLON2000568, COLON2001721, COLON2001829, COLON2001866, COLON2002520, COLON2003043, COLON2003529, COLON2004318, COLON2004351, COLON2004478, COLON2004911, COLON2005126, COLON2005623, COLON2005735, COLON2005772, COLON2006263, COLON2006282, COLON2006417, COLON2007274, COLON2007733,

[2715] COLON2008105, COLON2009337, COLON2009499, CORDB1000140, CORDB2000061, CORDB2000127, CORDB2000541, CTONG1000009, CTONG1000020, CTONG1000022, CTONG1000040, CTONG1000056, CTONG1000062, CTONG1000086, CTONG1000087, CTONG1000088, CTONG1000093, CTONG1000097, CTONG1000113, CTONG1000137, CTONG1000165, CTONG1000175, CTONG1000180, CTONG1000181, CTONG1000218, CTONG1000220, CTONG1000277, CTONG1000283, CTONG1000288, CTONG1000302, CTONG1000467, CTONG1000476, CTONG1000488, CTONG1000508, CTONG1000540, CTONG2000031, CTONG2000034, CTONG2000042, CTONG2000201, CTONG2000218, CTONG2000279, CTONG2000303, CTONG2000330, CTONG2000395, CTONG2000411, CTONG2000465, CTONG2000469, CTONG2000480, CTONG2000561, CTONG2000589,

[2716] CTONG2000766, CTONG2000771, CTONG2000819, CTONG2000827, CTONG2000846, CTONG2000855, CTONG2000977, CTONG2001139, CTONG2001320, CTONG2001366, CTONG2001413, CTONG2001428, CTONG2001513, CTONG2001524, CTONG2001533, CTONG2001598, CTONG2001681, CTONG2001724, CTONG2001748, CTONG2001749, CTONG2001800, CTONG2001820, CTONG2001858, CTONG2001877, CTONG2001911, CTONG2001955, CTONG2002066, CTONG2002073, CTONG2002095, CTONG2002143, CTONG2002395, CTONG2002417, CTONG2002418, CTONG2002453, CTONG2002520, CTONG2002590, CTONG2002709, CTONG2002721, CTONG2002766, CTONG2002803, CTONG2002816, CTONG2002820, CTONG2002832, CTONG2002841, CTONG2002903, CTONG2002965, CTONG2002999, CTONG2003028, CTONG2003094, CTONG2003100,

[2717] CTONG2003115, CTONG2003189, CTONG2003245, CTONG2003293, CTONG2003348, CTONG2003350, CTONG2003372, CTONG2003375, CTONG2003427, CTONG2003517, CTONG2003524, CTONG2003599, CTONG2003699, CTONG2003764, CTONG2003782, CTONG2003889, CTONG2003937, CTONG2003945, CTONG2004000, CTONG2004062, CTONG2004115, CTONG2004126, CTONG2004264, CTONG2004305, CTONG2004423, CTONG2004454, CTONG2004487, CTONG2004550, CTONG2004669, CTONG2004716, CTONG2004912, CTONG2004941, CTONG2004948, CTONG2005028, CTONG2005049, CTONG2005110, CTONG2005145, CTONG2005265, CTONG2005278, CTONG2005290, CTONG2005374, CTONG2005399, CTONG2005468, CTONG2005567, CTONG2005585, CTONG2005615, CTONG2005635, CTONG2005775, CTONG2005795, CTONG2005890,

[2718] CTONG2005904, CTONG2005913, CTONG2006129, CTONG2006223, CTONG2006235, CTONG2006273, CTONG2006310, CTONG2006377, CTONG2006393, CTONG2006412, CTONG2006449, CTONG2006515, CTONG2006524, CTONG2006568, CTONG2006620, CTONG2006666, CTONG2006691, CTONG2006798, CTONG2006836, CTONG2006942, CTONG2006964, CTONG2007009, CTONG2007072, CTONG2007091, CTONG2007104, CTONG2007168, CTONG2007175, CTONG2007259, CTONG2007272, CTONG2007293, CTONG2007297, CTONG2007399, CTONG2007400, CTONG2007417, CTONG2007441, CTONG2007474, CTONG2007586, CTONG2007613, CTONG2007623, CTONG2007681, CTONG2007776, CTONG2007779, CTONG2007898, CTONG2007959, CTONG2007970, CTONG2008014, CTONG2008184, CTONG2008262, CTONG2008269, CTONG2008321,

[2719] CTONG2008343, CTONG2008398, CTONG2008402, CTONG2008405, CTONG2008466, CTONG2008518, CTONG2008521, CTONG2008562, CTONG2008577, CTONG2008595, CTONG2008621, CTONG2008689, CTONG2008720, CTONG2008721, CTONG2008773, CTONG2008792, CTONG2008989, CTONG2009033, CTONG2009108, CTONG2009132, CTONG2009156, CTONG2009181, CTONG2009257, CTONG2009258, CTONG2009268, CTONG2009270, CTONG2009395, CTONG2009423, CTONG2009440, CTONG2009527, CTONG2009529, CTONG2009531, CTONG2009534, CTONG2009570, CTONG2009572, CTONG2009604, CTONG2009643, CTONG2009675, CTONG2009689, CTONG2009725, CTONG2009766, CTONG2009768, CTONG2009844, CTONG2009871, CTONG2009887, CTONG2009891, CTONG2009923, CTONG2009938, CTONG2009955, CTONG2009958,

[2720] CTONG2009963, CTONG2010018, CTONG2010024, CTONG2010116, CTONG2010133, CTONG2010148, CTONG2010276, CTONG2010330, CTONG2010508, CTONG2010566, CTONG2010623, CTONG2010649, CTONG2010652, CTONG2010803, CTONG2010821, CTONG2011188, CTONG2011429, CTONG2011474, CTONG2011676, CTONG2011765, CTONG2011779, CTONG2011801, CTONG2011815, CTONG2011822, CTONG2011825, CTONG2011920, CTONG2011985, CTONG2012001, CTONG2012029, CTONG2012050, CTONG2012077, CTONG2012101, CTONG2012123, CTONG2012158, CTONG2012230, CTONG2012401, CTONG2012422, CTONG2012447, CTONG2012453, CTONG2012473, CTONG2012476, CTONG2012533, CTONG2012554, CTONG2012564, CTONG2012607, CTONG2012661, CTONG2012724, CTONG2012738, CTONG2012745, CTONG2012758,

[2721] CTONG2012843, CTONG2012879, CTONG2012901, CTONG2012996, CTONG2013128, CTONG2013149, CTONG2013156, CTONG2013178, CTONG2013222, CTONG2013284, CTONG2013339, CTONG2013352, CTONG2013381, CTONG2013393, CTONG2013511, CTONG2013630, CTONG2013803, CTONG2013934, CTONG2013986, CTONG2014032, CTONG2014058, CTONG2014119, CTONG2014191, CTONG2014206, CTONG2014234, CTONG2014264, CTONG2014280, CTONG2014369, CTONG2014491, CTONG2014630, CTONG2014635, CTONG2014646, CTONG2014705, CTONG2014898, CTONG2014946, CTONG2014959, CTONG2014966, CTONG2014995, CTONG2015204, CTONG2015316, CTONG2015330, CTONG2015345, CTONG2015358, CTONG2015434, CTONG2015518, CTONG2015540, CTONG2015596, CTONG2015633, CTONG2015678, CTONG2015717,

[2722] CTONG2015804, CTONG2015866, CTONG2015914, CTONG2015953, CTONG2016056, CTONG2016217, CTONG2016355, CTONG2016408, CTONG2016499, CTONG2016505, CTONG2016559, CTONG2016658, CTONG2016775, CTONG2016797, CTONG2016824, CTONG2016846, CTONG2016904, CTONG2016931, CTONG2016942, CTONG2016953, CTONG2017021, CTONG2017094, CTONG2017292, CTONG2017409, CTONG2017429, CTONG2017458, CTONG2017500, CTONG2017604, CTONG2017650, CTONG2017798, CTONG2017804, CTONG2017814, CTONG2017910, CTONG2017939, CTONG2017989, CTONG2018062, CTONG2018069, CTONG2018147, CTONG2018217, CTONG2018279, CTONG2018334, CTONG2018343, CTONG2018379, CTONG2018413, CTONG2018483, CTONG2018629, CTONG2018632, CTONG2018652, CTONG2018653, CTONG2018655,

[2723] CTONG2018735, CTONG2018739, CTONG2018808, CTONG2018843, CTONG2018900, CTONG2018976, CTONG2019029, CTONG2019063, CTONG2019144, CTONG2019232, CTONG2019248, CTONG2019400, CTONG2019590, CTONG2019652, CTONG2019704, CTONG2019788, CTONG2019822, CTONG2019833, CTONG2020031, CTONG2020108, CTONG2020127, CTONG2020171, CTONG2020374, CTONG2020378, CTONG2020411, CTONG2020445, CTONG2020484, CTONG2020522, CTONG2020560, CTONG2020582, CTONG2020638, CTONG2020806, CTONG2020831, CTONG2020974, CTONG2021024, CTONG2021132, CTONG2021168, CTONG2022153, CTONG2022601, CTONG2022835, CTONG2023021, CTONG2023449, CTONG2023512, CTONG2024031, CTONG2024206, CTONG2024614, CTONG2024749, CTONG2025496, CTONG2025513, CTONG2025516,

[2724] CTONG2025610, CTONG2025900, CTONG2026513, CTONG2026770, CTONG2026920, CTONG2026987, CTONG2027150, CTONG2027263, CTONG2027327, CTONG2027361, CTONG2027591, CTONG2027736, CTONG2027783, CTONG2027828, CTONG2027959, CTONG2028097, CTONG2028208, CTONG2028309, CTONG2028486, CTONG2028518, CTONG2028687, CTONG2028758, CTONG3000657, CTONG3000686, CTONG3000707, CTONG3000896, CTONG3001123, CTONG3001420, CTONG3001501, CTONG3001560, CTONG3001605, CTONG3001746, CTONG3002020, CTONG3002127, CTONG3002370, CTONG3002412, CTONG3002433, CTONG3002518, CTONG3002552, CTONG3002588, CTONG3002674, CTONG3002728, CTONG3002835, CTONG3002909, CTONG3002947, CTONG3002983, CTONG3003165, CTONG3003179, CTONG3003483, CTONG3003553,

[2725] CTONG3003598, CTONG3003652, CTONG3003654, CTONG3003669, CTONG3003737, CTONG3003905, CTONG3004072, CTONG3004317, CTONG3004397, CTONG3004550, CTONG3004576, CTONG3004607, CTONG3004712, CTONG3004726, CTONG3005325, CTONG3005648, CTONG3005713, CTONG3005803, CTONG3005813, CTONG3006067, CTONG3006073, CTONG3006186, CTONG3006629, CTONG3006650, CTONG3006659, CTONG3007244, CTONG3007444, CTONG3007528, CTONG3007586, CTONG3007870, CTONG3008223, CTONG3008252, CTONG3008258, CTONG3008457, CTONG3008496, CTONG3008566, CTONG3008639, CTONG3008831, CTONG3008951, CTONG3008959, CTONG3009028, CTONG3009227, CTONG3009287, CTONG3009328, CTONG3009385, D3OST1000066, D3OST1000109, D3OST1000238, D3OST1000267, D3OST2000184,

[2726] D3OST2000618, D3OST2000654, D3OST2000734, D3OST2001328, D3OST2001669, D3OST2001670, D3OST2001788, D3OST2002182, D3OST2002223, D3OST2002262, D3OST2002272, D3OST2002417, D3OST2002436, D3OST2002648, D3OST2003024, D3OST2003331, D3OST2003607, D3OST2003797, D3OST2004637, D3OST3000169, D3OST3000195, D3OST3000258, D3OST3000291, D3OST3000388, D3OST3000493, D6OST2000127, D6OST2000169, D6OST2000245, D6OST2000358, D6OST2000464, D6OST2000507, D9OST2000031, D9OST2000278, D9OST2000440, D9OST2000869, D9OST2001319, D9OST2001433, D9OST2002397, D9OST2002673, D9OST2003106, D9OST2003108, D9OST2003137, D9OST2003397, D9OST2003580, D9OST2003594, D9OST2003762, D9OST2003791, D9OST2003989, D9OST2004018, D9OST2004073,

[2727] D9OST2004417, DFNES1000003, DFNES1000107, DFNES1000185, DFNES2000011, DFNES2000143, DFNES2000146, DFNES2000212, DFNES2000268, DFNES2000292, DFNES2000335, DFNES2000426, DFNES2000432, DFNES2000457, DFNES2000471, DFNES2000526, DFNES2000913, DFNES2001091, DFNES2001096, DFNES2001108, DFNES2001177, DFNES2001404, DFNES2001564, DFNES2001565, DFNES2001647, DFNES2001800, DFNES2001829, DFNES2002220, DFNES2002509, DFNES2002550, DFNES2002588, DFNES2002817, DFNES2002966, DFNES2003192, DFNES2003255, DFNES2003742, DFNES2004346, DFNES2004354, DFNES2004371, DFNES2004383, DFNES2004608, DFNES2004684, DFNES2005266, DFNES2005527, DFNES2005540, DFNES2005690, DFNES2005779, DFNES2005875, DFNES2006944, DFNES2007113,

[2728] DFNES2007299, DFNES2007332, DFNES2007641, DFNES2007757, DFNES2008088, DFNES2008160, DFNES2008280, DFNES2008881, DFNES2009482, DFNES2010502, DFNES2011192, DFNES2011221, DFNES2011239, DFNES2011245, DFNES2011380, DFNES2011499, ERLTF1000021, ERLTF2000324, ERLTF2000465, FCBBF1000023, FCBBF1000024, FCBBF1000025, FCBBF1000038, FCBBF1000053, FCBBF1000061, FCBBF1000063, FCBBF1000069, FCBBF1000115, FCBBF1000117, FCBBF1000118, FCBBF1000121, FCBBF1000125, FCBBF1000131, FCBBF1000139, FCBBF1000155, FCBBF1000157, FCBBF1000171, FCBBF1000174, FCBBF1000182, FCBBF1000198, FCBBF1000206, FCBBF1000220, FCBBF1000232, FCBBF1000233, FCBBF1000243, FCBBF1000270, FCBBF1000272, FCBBF1000280, FCBBF1000297, FCBBF1000305,

[2729] FCBBF1000314, FCBBF1000322, FCBBF1000349, FCBBF1000374, FCBBF1000376, FCBBF1000377, FCBBF1000395, FCBBF1000397, FCBBF1000425, FCBBF1000449, FCBBF1000476, FCBBF1000506, FCBBF1000509, FCBBF1000546, FCBBF1000550, FCBBF1000556, FCBBF1000563, FCBBF1000581, FCBBF1000582, FCBBF1000598, FCBBF1000604, FCBBF1000618, FCBBF1000627, FCBBF1000671, FCBBF1000675, FCBBF1000684, FCBBF1000686, FCBBF1000687, FCBBF1000691, FCBBF1000748, FCBBF2000038, FCBBF2000087, FCBBF2000094, FCBBF2000105, FCBBF2000123, FCBBF2000195, FCBBF2000199, FCBBF2000214, FCBBF2000232, FCBBF2000259, FCBBF2000276, FCBBF2000291, FCBBF2000362, FCBBF2000379, FCBBF2000473, FCBBF2000502, FCBBF2000566, FCBBF2000576, FCBBF2000677, FCBBF2000678,

[2730] FCBBF2000685, FCBBF2000733, FCBBF2000782, FCBBF2000808, FCBBF2000815, FCBBF2000825, FCBBF2000885, FCBBF2000940, FCBBF2000951, FCBBF2001001, FCBBF2001088, FCBBF2001105, FCBBF2001116, FCBBF2001183, FCBBF2001188, FCBBF2001238, FCBBF2001243, FCBBF2001299, FCBBF2001309, FCBBF2001400, FCBBF2001427, FCBBF2001480, FCBBF2001529, FCBBF2001538, FCBBF2001594, FCBBF2001672, FCBBF2001675, FCBBF2001718, FCBBF2001720, FCBBF2001817, FCBBF2001868, FCBBF2002044, FCBBF2002111, FCBBF2002281, FCBBF2002349, FCBBF2002370, FCBBF2002541, FCBBF2002626, FCBBF2002897, FCBBF2002898, FCBBF2002904, FCBBF2002953, FCBBF2003083, FCBBF2003102, FCBBF2003269, FCBBF2003293, FCBBF2003297, FCBBF2003395, FCBBF2003528, FCBBF2003543,

[2731] FCBBF2003567, FCBBF2003636, FCBBF2003823, FCBBF2003895, FCBBF2004066, FCBBF2004090, FCBBF2004138, FCBBF2004217, FCBBF2004256, FCBBF2004373, FCBBF2004448, FCBBF2004671, FCBBF2004707, FCBBF2004788, FCBBF2005069, FCBBF2005122, FCBBF2005428, FCBBF2005439, FCBBF2005538, FCBBF2005637, FCBBF2005645, FCBBF2005658, FCBBF2005733, FCBBF2005909, FCBBF2005966, FCBBF2006131, FCBBF2006380, FCBBF2006418, FCBBF2006452, FCBBF2006634, FCBBF2006781, FCBBF2007012, FCBBF2007186, FCBBF2007265, FCBBF2007302, FCBBF2007556, FCBBF2007610, FCBBF2007633, FCBBF2007840, FCBBF3000102, FCBBF3000120, FCBBF3000168, FCBBF3000175, FCBBF3000228, FCBBF3000229, FCBBF3000233, FCBBF3000269, FCBBF3000361, FCBBF3000367, FCBBF3000434,

[2732] FCBBF3000462, FCBBF3000473, FCBBF3000501, FCBBF3000518, FCBBF3000536, FCBBF3000550, FCBBF3000847, FCBBF3001018, FCBBF3001020, FCBBF3001081, FCBBF3001235, FCBBF3001281, FCBBF3001302, FCBBF3001377, FCBBF3001594, FCBBF3001632, FCBBF3001657, FCBBF3001818, FCBBF3001855, FCBBF3001890, FCBBF3001912, FCBBF3001914, FCBBF3001918, FCBBF3001924, FCBBF3001977, FCBBF3002163, FCBBF3002188, FCBBF3002190, FCBBF3002268, FCBBF3002475, FCBBF3002556, FCBBF3002592, FCBBF3002658, FCBBF3002782, FCBBF3002818, FCBBF3002925, FCBBF3003216, FCBBF3003305, FCBBF3003373, FCBBF3003435, FCBBF3003475, FCBBF3003481, FCBBF3003557, FCBBF3003787, FCBBF3003902, FCBBF3004021, FCBBF3004041, FCBBF3004261, FCBBF3004323, FCBBF3004390,

[2733] FCBBF3004409, FCBBF3004502, FCBBF3004715, FCBBF3004842, FCBBF3004847, FCBBF3004955, FCBBF3005160, FCBBF3005218, FCBBF3005444, FCBBF3005698, FCBBF3005729, FCBBF3006171, FCBBF3006249, FCBBF3006288, FCBBF3006399, FCBBF3006628, FCBBF3006821, FCBBF3007077, FCBBF3007150, FCBBF3007152, FCBBF3007242, FCBBF3007244, FCBBF3007248, FCBBF3007453, FCBBF3007462, FCBBF3007540, FCBBF3007597, FCBBF3007604, FCBBF3007631, FCBBF3007829, FCBBF3007855, FCBBF3007859, FCBBF3007860, FCBBF3008073, FCBBF3008100, FCBBF3008159, FCBBF3008251, FCBBF3008311, FCBBF3008362, FCBBF3008382, FCBBF3008475, FCBBF3008556, FCBBF3008644, FCBBF3008689, FCBBF3008748, FCBBF3008870, FCBBF3008944, FCBBF3009069, FCBBF3009101, FCBBF3009152,

[2734] FCBBF3009256, FCBBF3009317, FCBBF3009428, FCBBF3009464, FCBBF3009526, FCBBF3009703, FCBBF3009717, FCBBF3009888, FCBBF3009949, FCBBF3009978, FCBBF3010008, FCBBF3010012, FCBBF3010124, FCBBF3010130, FCBBF3010142, FCBBF3010149, FCBBF3010211, FCBBF3010361, FCBBF3010508, FCBBF3010544, FCBBF3010586, FCBBF3010601, FCBBF3010665, FCBBF3010695, FCBBF3010729, FCBBF3010733, FCBBF3011003, FCBBF3011418, FCBBF3011485, FCBBF3011523, FCBBF3011570, FCBBF3011592, FCBBF3011867, FCBBF3011889, FCBBF3012170, FCBBF3012182, FCBBF3012288, FCBBF3012332, FCBBF3012347, FCBBF3012443, FCBBF3012588, FCBBF3012667, FCBBF3012842, FCBBF3012901, FCBBF3013041, FCBBF3013058, FCBBF3013205, FCBBF3013266, FCBBF3013307, FCBBF3013341,

[2735] FCBBF3013506, FCBBF3013623, FCBBF3013800, FCBBF3013846, FCBBF3014229, FCBBF3014355, FCBBF3014567, FCBBF3014770, FCBBF3015100, FCBBF3015119, FCBBF3015131, FCBBF3015317, FCBBF3015727, FCBBF3015758, FCBBF3015809, FCBBF3015870, FCBBF3016018, FCBBF3016134, FCBBF3016178, FCBBF3016451, FCBBF3016618, FCBBF3016622, FCBBF3016644, FCBBF3016667, FCBBF3016987, FCBBF3017024, FCBBF3017059, FCBBF3017071, FCBBF3017123, FCBBF3017233, FCBBF3017255, FCBBF3017288, FCBBF3017396, FCBBF3017531, FCBBF3017535, FCBBF3017681, FCBBF3017729, FCBBF3017873, FCBBF3017918, FCBBF3017974, FCBBF3018067, FCBBF3018173, FCBBF3018453, FCBBF3018591, FCBBF3018753, FCBBF3018826, FCBBF3018949, FCBBF3019085, FCBBF3019320, FCBBF3019437,

[2736] FCBBF3019455, FCBBF3019564, FCBBF3019569, FCBBF3019570, FCBBF3019663, FCBBF3019716, FCBBF3019784, FCBBF3019839, FCBBF3019867, FCBBF3019961, FCBBF3020030, FCBBF3020138, FCBBF3020140, FCBBF3020163, FCBBF3020232, FCBBF3021026, FCBBF3021191, FCBBF3021221, FCBBF3021501, FCBBF3021506, FCBBF3021524, FCBBF3021807, FCBBF3021940, FCBBF3021985, FCBBF3022005, FCBBF3022291, FCBBF3022311, FCBBF3022504, FCBBF3022566, FCBBF3022593, FCBBF3022765, FCBBF3022767, FCBBF3022894, FCBBF3023061, FCBBF3023078, FCBBF3023368, FCBBF3023372, FCBBF3023443, FCBBF3023599, FCBBF3023704, FCBBF3023887, FCBBF3023895, FCBBF3024002, FCBBF3024096, FCBBF3024225, FCBBF3024266, FCBBF3024364, FCBBF3024623, FCBBF3024793, FCBBF3024911,

[2737] FCBBF3025098, FCBBF3025252, FCBBF3025280, FCBBF3025285, FCBBF3025417, FCBBF3025528, FCBBF3025568, FCBBF3025650, FCBBF3025674, FCBBF3025730, FCBBF3025737, FCBBF3025905, FCBBF3026021, FCBBF3026048, FCBBF3026251, FCBBF3026651, FCBBF3026678, FCBBF3026692, FCBBF3027104, FCBBF3027199, FCBBF3027328, FCBBF3027559, FCBBF3027717, FCBBF3027755, FCBBF3027768, FCBBF3027854, FCBBF3027863, FCBBF3027903, FCBBF3028102, FCBBF3028143, FCBBF3028188, FCBBF3028202, FCBBF3028244, FCBBF3028472, FCBBF3028528, FCBBF3028582, FCBBF3028671, FCBBF3028794, FCBBF4000017, FCBBF4000061, FCBBF4000076, FCBBF4000142, FCBBF4000173, FCBBF4000192, FCBBF4000193, FCBBF4000268, FCBBF4000282, FCBBF4000399, FCBBF4000415, FCBBF4000529,

[2738] FCBBF4000548, FCBBF5000041, FCBBF5000061, FCBBF5000165, FCBBF5000261, FCBBF5000325, FCBBF5000353, FCBBF5000384, FCBBF5000483, FCBBF5000495, FEBRA1000005, FEBRA1000008, FEBRA1000030, FEBRA1000057, FEBRA1000088, FEBRA1000138, FEBRA1000148, FEBRA1000149, FEBRA1000183, FEBRA1000188, FEBRA1000189, FEBRA2000007, FEBRA2000021, FEBRA2000035, FEBRA2000053, FEBRA2000126, FEBRA2000220, FEBRA2000253, FEBRA2000282, FEBRA2000286, FEBRA2000297, FEBRA2000311, FEBRA2000321, FEBRA2000333, FEBRA2000377, FEBRA2000378, FEBRA2000391, FEBRA2000394, FEBRA2000397, FEBRA2000399, FEBRA2000402, FEBRA2000404, FEBRA2000409, FEBRA2000415, FEBRA2000436, FEBRA2000438, FEBRA2000454, FEBRA2000462, FEBRA2000468, FEBRA2000491,

[2739] FEBRA2000504, FEBRA2000532, FEBRA2000536, FEBRA2000538, FEBRA2000575, FEBRA2000581, FEBRA2000656, FEBRA2000659, FEBRA2000680, FEBRA2000690, FEBRA2000727, FEBRA2000734, FEBRA2000757, FEBRA2000771, FEBRA2000772, FEBRA2000782, FEBRA2000790, FEBRA2000793, FEBRA2000803, FEBRA2000805, FEBRA2000809, FEBRA2000815, FEBRA2000856, FEBRA2000862, FEBRA2000877, FEBRA2000881, FEBRA2000901, FEBRA2000909, FEBRA2000917, FEBRA2000928, FEBRA2000936, FEBRA2000937, FEBRA2000959, FEBRA2000972, FEBRA2001004, FEBRA2001012, FEBRA2001020, FEBRA2001093, FEBRA2001124, FEBRA2001133, FEBRA2001146, FEBRA2001161, FEBRA2001175, FEBRA2001197, FEBRA2001217, FEBRA2001227, FEBRA2001245, FEBRA2001267, FEBRA2001334, FEBRA2001351,

[2740] FEBRA2001383, FEBRA2001438, FEBRA2001440, FEBRA2001487, FEBRA2001561, FEBRA2001584, FEBRA2001590, FEBRA2001591, FEBRA2001610, FEBRA2001620, FEBRA2001659, FEBRA2001698, FEBRA2001705, FEBRA2001706, FEBRA2001715, FEBRA2001745, FEBRA2001752, FEBRA2001772, FEBRA2001790, FEBRA2001814, FEBRA2001867, FEBRA2001914, FEBRA2001974, FEBRA2001989, FEBRA2001990, FEBRA2002009, FEBRA2002027, FEBRA2002086, FEBRA2002109, FEBRA2002191, FEBRA2002260, FEBRA2002399, FEBRA2002410, FEBRA2002429, FEBRA2002442, FEBRA2002456, FEBRA2002508, FEBRA2002525, FEBRA2002527, FEBRA2002552, FEBRA2002574, FEBRA2002601, FEBRA2002611, FEBRA2002628, FEBRA2002662, FEBRA2002682, FEBRA2002707, FEBRA2002727, FEBRA2002781, FEBRA2002783,

[2741] FEBRA2002792, FEBRA2002818, FEBRA2002858, FEBRA2002882, FEBRA2002897, FEBRA2002908, FEBRA2002931, FEBRA2002962, FEBRA2002986, FEBRA2003054, FEBRA2003115, FEBRA2003128, FEBRA2003155, FEBRA2003163, FEBRA2003181, FEBRA2003198, FEBRA2003253, FEBRA2003275, FEBRA2003308, FEBRA2003327, FEBRA2003429, FEBRA2003454, FEBRA2003468, FEBRA2003470, FEBRA2003520, FEBRA2003524, FEBRA2003541, FEBRA2003675, FEBRA2003707, FEBRA2003711, FEBRA2003726, FEBRA2003822, FEBRA2003833, FEBRA2003897, FEBRA2003907, FEBRA2004023, FEBRA2004026, FEBRA2004029, FEBRA2004053, FEBRA2004056, FEBRA2004091, FEBRA2004110, FEBRA2004191, FEBRA2004202, FEBRA2004219, FEBRA2004237, FEBRA2004268, FEBRA2004325, FEBRA2004329, FEBRA2004331,

[2742] FEBRA2004443, FEBRA2004485, FEBRA2004490, FEBRA2004538, FEBRA2004592, FEBRA2004620, FEBRA2004651, FEBRA2004767, FEBRA2004813, FEBRA2004818, FEBRA2004840, FEBRA2004852, FEBRA2004867, FEBRA2004914, FEBRA2004933, FEBRA2004987, FEBRA2005014, FEBRA2005036, FEBRA2005079, FEBRA2005114, FEBRA2005216, FEBRA2005291, FEBRA2005361, FEBRA2005377, FEBRA2005380, FEBRA2005416, FEBRA2005427, FEBRA2005458, FEBRA2005476, FEBRA2005701, FEBRA2005726, FEBRA2005752, FEBRA2005787, FEBRA2005995, FEBRA2005998, FEBRA2006055, FEBRA2006061, FEBRA2006112, FEBRA2006150, FEBRA2006165, FEBRA2006255, FEBRA2006315, FEBRA2006354, FEBRA2006357, FEBRA2006368, FEBRA2006370, FEBRA2006372, FEBRA2006379, FEBRA2006396, FEBRA2006409,

[2743] FEBRA2006418, FEBRA2006427, FEBRA2006476, FEBRA2006485, FEBRA2006519, FEBRA2006521, FEBRA2006553, FEBRA2006627, FEBRA2006664, FEBRA2006667, FEBRA2006726, FEBRA2006793, FEBRA2006808, FEBRA2006817, FEBRA2006873, FEBRA2006890, FEBRA2006942, FEBRA2006977, FEBRA2007017, FEBRA2007176, FEBRA2007200, FEBRA2007212, FEBRA2007247, FEBRA2007280, FEBRA2007414, FEBRA2007436, FEBRA2007449, FEBRA2007458, FEBRA2007534, FEBRA2007544, FEBRA2007551, FEBRA2007566, FEBRA2007589, FEBRA2007613, FEBRA2007620, FEBRA2007708, FEBRA2007714, FEBRA2007793, FEBRA2007818, FEBRA2007823, FEBRA2007880, FEBRA2007900, FEBRA2007931, FEBRA2007957, FEBRA2008009, FEBRA2008036, FEBRA2008086, FEBRA2008134, FEBRA2008135, FEBRA2008159,

[2744] FEBRA2008165, FEBRA2008172, FEBRA2008255, FEBRA2008265, FEBRA2008266, FEBRA2008282, FEBRA2008287, FEBRA2008311, FEBRA2008360, FEBRA2008459, FEBRA2008468, FEBRA2008481, FEBRA2008542, FEBRA2008660, FEBRA2008662, FEBRA2008681, FEBRA2008692, FEBRA2008741, FEBRA2008836, FEBRA2008859, FEBRA2008861, FEBRA2008866, FEBRA2008881, FEBRA2008928, FEBRA2008983, FEBRA2009016, FEBRA2009029, FEBRA2009074, FEBRA2009117, FEBRA2009120, FEBRA2009162, FEBRA2009185, FEBRA2009240, FEBRA2009265, FEBRA2009276, FEBRA2009289, FEBRA2009327, FEBRA2009328, FEBRA2009352, FEBRA2009362, FEBRA2009385, FEBRA2009416, FEBRA2009419, FEBRA2009437, FEBRA2009478, FEBRA2009507, FEBRA2009514, FEBRA2009567, FEBRA2009588, FEBRA2009731,

[2745] FEBRA2009754, FEBRA2009780, FEBRA2009846, FEBRA2009986, FEBRA2010141, FEBRA2010299, FEBRA2010484, FEBRA2010719, FEBRA2010746, FEBRA2010768, FEBRA2010802, FEBRA2011063, FEBRA2011090, FEBRA2011356, FEBRA2011392, FEBRA2011414, FEBRA2011593, FEBRA2011665, FEBRA2012090, FEBRA2012120, FEBRA2012181, FEBRA2012195, FEBRA2012397, FEBRA2012418, FEBRA2012507, FEBRA2012625, FEBRA2013019, FEBRA2013069, FEBRA2013274, FEBRA2013465, FEBRA2013570, FEBRA2013699, FEBRA2013905, FEBRA2013951, FEBRA2014010, FEBRA2014122, FEBRA2014198, FEBRA2014213, FEBRA2014297, FEBRA2014443, FEBRA2014578, FEBRA2014939, FEBRA2015076, FEBRA2015085, FEBRA2015175, FEBRA2015292, FEBRA2015588, FEBRA2016112, FEBRA2016398, FEBRA2016572,

[2746] FEBRA2016583, FEBRA2016621, FEBRA2016654, FEBRA2016739, FEBRA2017024, FEBRA2017098, FEBRA2017138, FEBRA2017154, FEBRA2017200, FEBRA2017223, FEBRA2017333, FEBRA2017502, FEBRA2017533, FEBRA2017680, FEBRA2017736, FEBRA2017780, FEBRA2017811, FEBRA2017850, FEBRA2018051, FEBRA2018203, FEBRA2018407, FEBRA2018433, FEBRA2018746, FEBRA2019172, FEBRA2019242, FEBRA2019298, FEBRA2019389, FEBRA2019457, FEBRA2019519, FEBRA2019582, FEBRA2019637, FEBRA2019663, FEBRA2019690, FEBRA2019867, FEBRA2020406, FEBRA2020566, FEBRA2020582, FEBRA2020668, FEBRA2020801, FEBRA2020845, FEBRA2020886, FEBRA2021032, FEBRA2021134, FEBRA2021171, FEBRA2021339, FEBRA2021431, FEBRA2021497, FEBRA2021550, FEBRA2021571, FEBRA2021864,

[2747] FEBRA2021892, FEBRA2021908, FEBRA2022013, FEBRA2022148, FEBRA2022204, FEBRA2022255, FEBRA2022322, FEBRA2022504, FEBRA2022601, FEBRA2022696, FEBRA2022729, FEBRA2022787, FEBRA2022911, FEBRA2022956, FEBRA2022963, FEBRA2022972, FEBRA2023285, FEBRA2023351, FEBRA2023377, FEBRA2023399, FEBRA2023498, FEBRA2023550, FEBRA2023721, FEBRA2023927, FEBRA2023989, FEBRA2023990, FEBRA2024019, FEBRA2024136, FEBRA2024150, FEBRA2024343, FEBRA2024570, FEBRA2024693, FEBRA2024727, FEBRA2024744, FEBRA2024797, FEBRA2024987, FEBRA2025249, FEBRA2025463, FEBRA2025477, FEBRA2025838, FEBRA2026474, FEBRA2026582, FEBRA2026629, FEBRA2026769, FEBRA2026879, FEBRA2026890, FEBRA2026977, FEBRA2026984, FEBRA2027082, FEBRA2027297,

[2748] FEBRA2027352, FEBRA2027364, FEBRA2027609, FEBRA2028158, FEBRA2028222, FEBRA2028366, FEBRA2028457, FEBRA2028477, FEBRA2028503, FEBRA2028516, FEHRT2000325, FEKID1000018, FELIV1000101, FELIV1000137, FELIV1000164, FELNG2000241, HCASM1000021, HCASM1000050, HCASM1000061, HCASM1000115, HCASM1000130, HCASM2000016, HCASM2000138, HCASM2000156, HCASM2000202, HCASM2000214, HCASM2000266, HCASM2000307, HCASM2000534, HCASM2000536, HCASM2000560, HCASM2000871, HCASM2001285, HCASM2001810, HCASM2001866, HCASM2001890, HCASM2002148, HCASM2002502, HCASM2002754, HCASM2002918, HCASM2003018, HCASM2003076, HCASM2003099, HCASM2003212, HCASM2003237, HCASM2003357, HCASM2003415, HCASM2005388, HCASM2005484, HCASM2006131,

[2749] HCASM2006338, HCASM2006359, HCASM2006632, HCASM2007047, HCASM2007317, HCASM2007737, HCASM2007773, HCASM2008154, HCASM2008536, HCASM2009405, HCASM2009424, HCASM2009463, HCASM2009588, HCHON1000142, HCHON1000176, HCHON1000191, HCHON2000038, HCHON2000062, HCHON2000100, HCHON2000156, HCHON2000199, HCHON2000212, HCHON2000265, HCHON2000271, HCHON2000315, HCHON2000322, HCHON2000344, HCHON2000364, HCHON2000395, HCHON2000417, HCHON2000418, HCHON2000473, HCHON2000503, HCHON2000508, HCHON2000660, HCHON2000663, HCHON2000673, HCHON2000676, HCHON2000698, HCHON2000699, HCHON2000705, HCHON2000743, HCHON2000815, HCHON2000817, HCHON2000818, HCHON2000819, HCHON2000832, HCHON2000851, HCHON2000898, HCHON2000935,

[2750] HCHON2000942, HCHON2000956, HCHON2000994, HCHON2001050, HCHON2001084, HCHON2001099, HCHON2001108, HCHON2001110, HCHON2001116, HCHON2001161, HCHON2001214, HCHON2001233, HCHON2001269, HCHON2001434, HCHON2001450, HCHON2001453, HCHON2001497, HCHON2001519, HCHON2001523, HCHON2001535, HCHON2001546, HCHON2001548, HCHON2001577, HCHON2001598, HCHON2001604, HCHON2001607, HCHON2001646, HCHON2001665, HCHON2001712, HCHON2001768, HCHON2001801, HCHON2001853, HCHON2002123, HCHON2002194, HCHON2002241, HCHON2002247, HCHON2002354, HCHON2002496, HCHON2002676, HCHON2002770, HCHON2002964, HCHON2002971, HCHON2003131, HCHON2003134, HCHON2003327, HCHON2003513, HCHON2003532, HCHON2003659, HCHON2003676, HCHON2004007,

[2751] HCHON2004279, HCHON2004359, HCHON2004531, HCHON2004776, HCHON2004858, HCHON2005048, HCHON2005118, HCHON2005166, HCHON2005802, HCHON2005921, HCHON2005987, HCHON2006459, HCHON2006714, HCHON2006722, HCHON2006770, HCHON2006786, HCHON2006841, HCHON2006871, HCHON2007046, HCHON2007482, HCHON2007674, HCHON2007774, HCHON2007881, HCHON2008112, HCHON2008239, HCHON2008444, HCHON2008582, HCHON2008672, HCHON2008856, HCHON2008871, HCHON2008989, HCHON2009191, HCHON2009384, HCHON2009749, HCHON2009766, HCHON2009795, HCHON2010074, HCHON2010543, HEART1000088, HEART1000099, HEART1000102, HEART1000118, HEART1000139, HEART1000142, HEART1000151, HEART1000173, HEART2000024, HEART2000035, HEART2000099, HEART2000298,

[2752] HEART2000306, HEART2000309, HEART2000411, HEART2000418, HEART2000448, HEART2000492, HEART2000541, HEART2000568, HEART2000611, HEART2000959, HEART2001680, HEART2001756, HEART2002129, HEART2002184, HEART2002220, HEART2002432, HEART2002531, HEART2002598, HEART2002717, HEART2003027, HEART2003168, HEART2003432, HEART2003440, HEART2003781, HEART2004570, HEART2004764, HEART2004931, HEART2004940, HEART2004941, HEART2004980, HEART2005244, HEART2005310, HEART2005581, HEART2005610, HEART2006131, HEART2006310, HEART2006334, HEART2006487, HEART2006557, HEART2006787, HEART2006789, HEART2006909, HEART2007031, HEART2007231, HEART2007443, HEART2007696, HEART2007767, HEART2008108, HEART2008111, HEART2008257,

[2753] HEART2008509, HEART2008994, HEART2009000, HEART2009599, HEART2009680, HEART2010391, HEART2010492, HEART2010495, HELAC2000158, HELAC2000301, HHDPC1000001, HHDPC1000065, HHDPC1000114, HHDPC1000118, HHDPC2000070, HHDPC2000102, HHDPC2000104, HHDPC2000258, HHDPC2000315, HHDPC2000455, HHDPC2000456, HHDPC2000462, HHDPC2000572, HHDPC2000656, HHDPC2000692, HHDPC2001337, HHDPC2001432, HHDPC2001896, HHDPC2002963, HHDPC2003049, HHDPC2003113, HHDPC2003381, HHDPC2003472, HHDPC2004757, HHDPC2005185, HHDPC2005513, HHDPC2005742, HHDPC2006862, HHDPC2006927, HHDPC2007302, HHDPC2007775, HHDPC2008123, HHDPC2008185, HHDPC2008279, HHDPC2008297, HHDPC2008414, HHDPC2008474, HHDPC2008816, HHDPC2008843, HHDPC2009114,

[2754] HHDPC2009178, HHDPC2009208, HHDPC2009272, HHDPC2009528, HLUNG1000017, HLUNG1000024, HLUNG1000030, HLUNG1000034, HLUNG1000053, HLUNG1000076, HLUNG1000084, HLUNG1000091, HLUNG1000099, HLUNG1000104, HLUNG1000105, HLUNG1000110, HLUNG1000151, HLUNG1000169, HLUNG2000004, HLUNG2000014, HLUNG2000027, HLUNG2000068, HLUNG2000116, HLUNG2000125, HLUNG2000130, HLUNG2000142, HLUNG2000174, HLUNG2000176, HLUNG2000217, HLUNG2000232, HLUNG2000255, HLUNG2000281, HLUNG2000314, HLUNG2000315, HLUNG2000340, HLUNG2000362, HLUNG2000363, HLUNG2000431, HLUNG2000480, HLUNG2000489, HLUNG2000549, HLUNG2000557, HLUNG2000570, HLUNG2000751, HLUNG2000761, HLUNG2000777, HLUNG2000846, HLUNG2000870, HLUNG2000884, HLUNG2000926,

[2755] HLUNG2000955, HLUNG2000970, HLUNG2001013, HLUNG2001126, HLUNG2001144, HLUNG2001146, HLUNG2001214, HLUNG2001459, HLUNG2001507, HLUNG2001633, HLUNG2001677, HLUNG2001712, HLUNG2001814, HLUNG2001996, HLUNG2002006, HLUNG2002050, HLUNG2002059, HLUNG2002085, HLUNG2002295, HLUNG2002303, HLUNG2002405, HLUNG2002429, HLUNG2002562, HLUNG2002659, HLUNG2002707, HLUNG2002811, HLUNG2002916, HLUNG2002942, HLUNG2002958, HLUNG2002982, HLUNG2003049, HLUNG2003061, HLUNG2003162, HLUNG2003246, HLUNG2003306, HLUNG2003335, HLUNG2003378, HLUNG2003497, HLUNG2003691, HLUNG2003710, HLUNG2003714, HLUNG2003716, HLUNG2003833, HLUNG2003872, HLUNG2003918, HLUNG2003991, HLUNG2004014, HLUNG2004037, HLUNG2004067, HLUNG2004154,

[2756] HLUNG2004170, HLUNG2004217, HLUNG2004273, HLUNG2004416, HLUNG2004521, HLUNG2004534, HLUNG2004684, HLUNG2004707, HLUNG2004774, HLUNG2004775, HLUNG2005012, HLUNG2005030, HLUNG2005045, HLUNG2005076, HLUNG2005133, HLUNG2005203, HLUNG2005479, HLUNG2005524, HLUNG2005656, HLUNG2005738, HLUNG2005774, HLUNG2005813, HLUNG2005924, HLUNG2006026, HLUNG2006067, HLUNG2006094, HLUNG2006370, HLUNG2006397, HLUNG2006570, HLUNG2006599, HLUNG2006614, HLUNG2006671, HLUNG2006781, HLUNG2006852, HLUNG2006935, HLUNG2007041, HLUNG2007210, HLUNG2007219, HLUNG2007245, HLUNG2007433, HLUNG2007931, HLUNG2008066, HLUNG2008139, HLUNG2008153, HLUNG2008235, HLUNG2008247, HLUNG2008333, HLUNG2008348, HLUNG2008384, HLUNG2008396,

[2757] HLUNG2008439, HLUNG2008479, HLUNG2008480, HLUNG2008521, HLUNG2008833, HLUNG2008875, HLUNG2008958, HLUNG2008959, HLUNG2009067, HLUNG2009215, HLUNG2009253, HLUNG2009303, HLUNG2009413, HLUNG2009729, HLUNG2010181, HLUNG2010464, HLUNG2010562, HLUNG2010845, HLUNG2011041, HLUNG2011298, HLUNG2011461, HLUNG2011833, HLUNG2012049, HLUNG2012287, HLUNG2012315, HLUNG2012546, HLUNG2012600, HLUNG2012727, HLUNG2013097, HLUNG2013204, HLUNG2013304, HLUNG2013350, HLUNG2013622, HLUNG2013643, HLUNG2013784, HLUNG2013851, HLUNG2014262, HLUNG2014288, HLUNG2014449, HLUNG2014821, HLUNG2015184, HLUNG2015418, HLUNG2015548, HLUNG2015578, HLUNG2015617, HLUNG2016022, HLUNG2016862, HLUNG2017262, HLUNG2017286, HLUNG2017307,

[2758] HLUNG2017350, HLUNG2017546, HLUNG2017806, HLUNG2018029, HLUNG2018282, HLUNG2018626, HLUNG2019058, HSYRA1000131, HSYRA1000148, HSYRA1000152, HSYRA2000044, HSYRA2000135, HSYRA2000137, HSYRA2000221, HSYRA2000237, HSYRA2000253, HSYRA2000371, HSYRA2000424, HSYRA2000507, HSYRA2000510, HSYRA2000605, HSYRA2000629, HSYRA2000706, HSYRA2000760, HSYRA2000787, HSYRA2000792, HSYRA2000828, HSYRA2000832, HSYRA2000927, HSYRA2001003, HSYRA2001105, HSYRA2001142, HSYRA2001153, HSYRA2001232, HSYRA2001255, HSYRA2001332, HSYRA2001353, HSYRA2001484, HSYRA2001552, HSYRA2001580, HSYRA2001615, HSYRA2001621, HSYRA2001631, HSYRA2001638, HSYRA2002103, HSYRA2002590, HSYRA2002741, HSYRA2003168, HSYRA2004550, HSYRA2004858,

[2759] HSYRA2005456, HSYRA2005496, HSYRA2005628, HSYRA2005970, HSYRA2006049, HSYRA2006873, HSYRA2007241, HSYRA2007338, HSYRA2007667, HSYRA2008154, HSYRA2008714, HSYRA2009102, IMR321000155, IMR321000161, IMR321000165, IMR321000193, IMR321000207, IMR321000230, IMR321000266, IMR322000010, IMR322000107, IMR322000164, IMR322000379, IMR322000383, IMR322000418, IMR322000518, IMR322000555, IMR322000604, IMR322000609, IMR322000656, IMR322000672, IMR322000775, IMR322000791, IMR322000811, IMR322000819, IMR322000838, IMR322000859, IMR322000863, IMR322000917, IMR322000918, IMR322000919, IMR322000953, IMR322000984, IMR322001018, IMR322001167, IMR322001185, IMR322001245, IMR322001318, IMR322001322, IMR322001332,

[2760] IMR322001380, IMR322001452, IMR322001491, IMR322001534, IMR322001665, IMR322001670, IMR322001710, IMR322001724, IMR322001879, IMR322002035, IMR322002110, IMR322002470, IMR322002993, IMR322003675, IMR322004768, IMR322005293, IMR322005833, IMR322006012, IMR322006222, IMR322006495, IMR322006520, IMR322006886, IMR322006947, IMR322007078, IMR322007225, IMR322007704, IMR322008651, IMR322009710, IMR322009807, IMR322010295, IMR322010953, IMR322011689, IMR322012314, IMR322012529, IMR322013053, IMR322013396, IMR322013731, IMR322013805, IMR322015523, IMR322016146, IMR322017049, IMR322018117, IMR322018192, IMR322019070, KIDNE1000008, KIDNE1000012, KIDNE1000015, KIDNE1000028, KIDNE1000036, KIDNE1000064,

[2761] KIDNE1000104, KIDNE1000121, KIDNE1000143, KIDNE1000152, KIDNE2000026, KIDNE2000041, KIDNE2000046, KIDNE2000051, KIDNE2000070, KIDNE2000167, KIDNE2000174, KIDNE2000192, KIDNE2000227, KIDNE2000244, KIDNE2000245, KIDNE2000287, KIDNE2000315, KIDNE2000317, KIDNE2000328, KIDNE2000330, KIDNE2000335, KIDNE2000349, KIDNE2000375, KIDNE2000394, KIDNE2000403, KIDNE2000422, KIDNE2000493, KIDNE2000510, KIDNE2000513, KIDNE2000517, KIDNE2000519, KIDNE2000555, KIDNE2000624, KIDNE2000665, KIDNE2000678, KIDNE2000717, KIDNE2000721, KIDNE2000722, KIDNE2000801, KIDNE2000832, KIDNE2000846, KIDNE2000867, KIDNE2000947, KIDNE2001117, KIDNE2001140, KIDNE2001269, KIDNE2001361, KIDNE2001636, KIDNE2001713, KIDNE2001802,

[2762] KIDNE2001840, KIDNE2001847, KIDNE2001857, KIDNE2001873, KIDNE2001897, KIDNE2001931, KIDNE2001979, KIDNE2002015, KIDNE2002162, KIDNE2002168, KIDNE2002191, KIDNE2002198, KIDNE2002262, KIDNE2002265, KIDNE2002438, KIDNE2002483, KIDNE2002725, KIDNE2002768, KIDNE2002795, KIDNE2002798, KIDNE2002839, KIDNE2002845, KIDNE2002882, KIDNE2002980, KIDNE2002991, KIDNE2003185, KIDNE2003188, KIDNE2003233, KIDNE2003316, KIDNE2003335, KIDNE2003357, KIDNE2003373, KIDNE2003377, KIDNE2003752, KIDNE2003764, KIDNE2003837, KIDNE2004034, KIDNE2004054, KIDNE2004084, KIDNE2004095, KIDNE2004115, KIDNE2004233, KIDNE2004262, KIDNE2004279, KIDNE2004294, KIDNE2004295, KIDNE2004305, KIDNE2004344, KIDNE2004394, KIDNE2004411,

[2763] KIDNE2004519, KIDNE2004520, KIDNE2004531, KIDNE2004534, KIDNE2004562, KIDNE2004579, KIDNE2004626, KIDNE2004681, KIDNE2004828, KIDNE2004846, KIDNE2004879, KIDNE2004981, KIDNE2004985, KIDNE2004999, KIDNE2005038, KIDNE2005042, KIDNE2005062, KIDNE2005266, KIDNE2005296, KIDNE2005321, KIDNE2005327, KIDNE2005336, KIDNE2005400, KIDNE2005424, KIDNE2005477, KIDNE2005526, KIDNE2005543, KIDNE2005603, KIDNE2005629, KIDNE2005676, KIDNE2005781, KIDNE2005798, KIDNE2005854, KIDNE2005908, KIDNE2005937, KIDNE2006030, KIDNE2006053, KIDNE2006062, KIDNE2006092, KIDNE2006145, KIDNE2006149, KIDNE2006210, KIDNE2006299, KIDNE2006334, KIDNE2006376, KIDNE2006378, KIDNE2006465, KIDNE2006580, KIDNE2006652, KIDNE2006687,

[2764] KIDNE2006733, KIDNE2006760, KIDNE2006775, KIDNE2006820, KIDNE2006880, KIDNE2007040, KIDNE2007077, KIDNE2007222, KIDNE2007356, KIDNE2007422, KIDNE2007569, KIDNE2007810, KIDNE2007944, KIDNE2007954, KIDNE2008022, KIDNE2008069, KIDNE2008072, KIDNE2008116, KIDNE2008117, KIDNE2008218, KIDNE2008315, KIDNE2008362, KIDNE2008378, KIDNE2008403, KIDNE2008404, KIDNE2008446, KIDNE2008473, KIDNE2008480, KIDNE2008666, KIDNE2008697, KIDNE2008758, KIDNE2008788, KIDNE2008795, KIDNE2008824, KIDNE2008832, KIDNE2008869, KIDNE2008914, KIDNE2008975, KIDNE2009019, KIDNE2009109, KIDNE2009180, KIDNE2009191, KIDNE2009332, KIDNE2009367, KIDNE2009426, KIDNE2009467, KIDNE2009490, KIDNE2009553, KIDNE2009605, KIDNE2009628,

[2765] KIDNE2009647, KIDNE2009676, KIDNE2009723, KIDNE2010007, KIDNE2010049, KIDNE2010052, KIDNE2010084, KIDNE2010137, KIDNE2010151, KIDNE2010264, KIDNE2010271, KIDNE2010419, KIDNE2010430, KIDNE2010574, KIDNE2010674, KIDNE2010739, KIDNE2010750, KIDNE2010762, KIDNE2010863, KIDNE2010973, KIDNE2010989, KIDNE2011200, KIDNE2011314, KIDNE2011508, KIDNE2011532, KIDNE2011635, KIDNE2011752, KIDNE2011782, KIDNE2011858, KIDNE2012009, KIDNE2012188, KIDNE2012291, KIDNE2012316, KIDNE2012361, KIDNE2012440, KIDNE2012453, KIDNE2012563, KIDNE2012601, KIDNE2012613, KIDNE2012710, KIDNE2012745, KIDNE2012775, KIDNE2012784, KIDNE2012945, KIDNE2013045, KIDNE2013095, KIDNE2013158, KIDNE2013218, KIDNE2013263, KIDNE2013346,

[2766] KIDNE2013388, KIDNE2013413, KIDNE2013489, KIDNE2013639, KIDNE2013731, KIDNE2013734, KIDNE2013775, KIDNE2013801, KIDNE2013866, KIDNE2014087, KIDNE2014112, KIDNE2014170, KIDNE2014184, KIDNE2014268, KIDNE2014298, KIDNE2014320, KIDNE2014325, KIDNE2014415, KIDNE2014489, KIDNE2014496, KIDNE2014661, KIDNE2014717, KIDNE2014789, KIDNE2014808, KIDNE2014890, KIDNE2014978, KIDNE2015073, KIDNE2015221, KIDNE2015244, KIDNE2015313, KIDNE2015433, KIDNE2015483, KIDNE2015515, KIDNE2015546, KIDNE2015556, KIDNE2015598, KIDNE2015660, KIDNE2015710, KIDNE2015987, KIDNE2016000, KIDNE2016036, KIDNE2016096, KIDNE2016101, KIDNE2016142, KIDNE2016188, KIDNE2016327, KIDNE2016371, KIDNE2016388, KIDNE2016464, KIDNE2016539,

[2767] KIDNE2016570, KIDNE2016918, KIDNE2017007, KIDNE2017040, KIDNE2017052, KIDNE2017151, KIDNE2017153, KIDNE2017315, KIDNE2017332, KIDNE2017454, KIDNE2017603, KIDNE2017956, KIDNE2018071, KIDNE2018166, KIDNE2018167, KIDNE2018217, KIDNE2018254, KIDNE2018268, KIDNE2018269, KIDNE2018287, KIDNE2018294, KIDNE2018462, KIDNE2018617, KIDNE2018678, KIDNE2018727, KIDNE2018863, KIDNE2018989, KIDNE2018996, KIDNE2019074, KIDNE2019187, LIVER1000017, LIVER1000050, LIVER1000055, LIVER1000058, LIVER1000063, LIVER1000067, LIVER1000073, LIVER1000079, LIVER1000082, LIVER1000099, LIVER1000104, LIVER1000111, LIVER1000126, LIVER1000139, LIVER1000155, LIVER1000165, LIVER1000175, LIVER1000224, LIVER1000230, LIVER1000278,

[2768] LIVER1000303, LIVER1000397, LIVER1000433, LIVER1000479, LIVER1000482, LIVER1000542, LIVER2000003, LIVER2000033, LIVER2000037, LIVER2000158, LIVER2000216, LIVER2000237, LIVER2000247, LIVER2000360, LIVER2000416, LIVER2000446, LIVER2000515, LIVER2000592, LIVER2000626, LIVER2000682, LIVER2000769, LIVER2000775, LIVER2001051, LIVER2001076, LIVER2001099, LIVER2001113, LIVER2001164, LIVER2001191, LIVER2001265, LIVER2001329, LIVER2001389, LIVER2001461, LIVER2001539, LIVER2001608, LIVER2001835, LIVER2002638, LIVER2002644, LIVER2002660, LIVER2002702, LIVER2003008, LIVER2003065, LIVER2003234, LIVER2003511, LIVER2003524, LIVER2003568, LIVER2003581, LIVER2003800, LIVER2003854, LIVER2004074, LIVER2004392,

[2769] LIVER2004514, LIVER2004565, LIVER2005028, LIVER2005198, LIVER2005218, LIVER2005376, LIVER2005385, LIVER2005512, LIVER2005520, LIVER2005527, LIVER2005544, LIVER2005625, LIVER2005728, LIVER2005973, LIVER2005981, LIVER2006006, LIVER2006251, LIVER2006410, LIVER2006469, LIVER2006644, LIVER2006764, LIVER2007415, LIVER2007548, LIVER2007568, LIVER2007721, LIVER2008053, LIVER2008465, LIVER2008473, LIVER2008580, LIVER2008706, LIVER2008945, LIVER2008998, LIVER2009110, LIVER2009118, LIVER2009554, LYMPB1000141, LYMPB1000158, LYMPB2000083, MAMGL1000017, MAMGL1000083, MAMGL1000096, MAMGL1000100, MAMGL1000132, MAMGL1000151, MAMGL1000182, MAMGL1000184, MESAN1000032, MESAN1000035, MESAN1000050, MESAN1000079,

[2770] MESAN1000080, MESAN1000101, MESAN1000121, MESAN1000147, MESAN1000180, MESAN2000023, MESAN2000026, MESAN2000067, MESAN2000092, MESAN2000167, MESAN2000291, MESAN2000337, MESAN2000434, MESAN2000457, MESAN2000462, MESAN2000572, MESAN2000620, MESAN2000711, MESAN2000815, MESAN2000894, MESAN2000909, MESAN2001450, MESAN2001627, MESAN2001770, MESAN2001979, MESAN2001980, MESAN2002113, MESAN2002122, MESAN2002147, MESAN2002186, MESAN2002424, MESAN2002519, MESAN2002687, MESAN2002709, MESAN2002724, MESAN2002790, MESAN2002844, MESAN2002978, MESAN2003035, MESAN2003037, MESAN2003039, MESAN2003058, MESAN2003101, MESAN2003190, MESAN2003322, MESAN2003490, MESAN2003529, MESAN2003622, MESAN2003646, MESAN2003662,

[2771] MESAN2003709, MESAN2003851, MESAN2004138, MESAN2004575, MESAN2005303, MESAN2005371, MESAN2005633, MESAN2005724, MESAN2005766, MESAN2005808, MESAN2005811, MESAN2005957, MESAN2006022, MESAN2006043, MESAN2006328, MESAN2006401, MESAN2006580, MESAN2006599, MESAN2006743, MESAN2006953, MESAN2006971, MESAN2007032, MESAN2007440, MESAN2007597, MESAN2007755, MESAN2008222, MESAN2008334, MESAN2008415, MESAN2008460, MESAN2008536, MESAN2008679, MESAN2008729, MESAN2008821, MESAN2008926, MESAN2008936, MESAN2009019, MESAN2009105, MESAN2009311, MESAN2009418, MESAN2009503, MESAN2009522, MESAN2010031, MESAN2010114, MESAN2010312, MESAN2010321, MESAN2010664, MESAN2010681, MESAN2011545, MESAN2011597, MESAN2011627,

[2772] MESAN2011632, MESAN2011977, MESAN2011984, MESAN2012054, MESAN2012113, MESAN2012586, MESAN2012708, MESAN2012735, MESAN2013019, MESAN2013022, MESAN2013183, MESAN2013211, MESAN2013283, MESAN2013611, MESAN2013674, MESAN2013845, MESAN2013908, MESAN2013936, MESAN2014192, MESAN2014295, MESAN2014298, MESAN2014412, MESAN2014624, MESAN2015277, MESAN2015365, MESAN2015391, MESAN2015401, MESAN2015501, MESAN2015515, MESAN2015708, MESAN2016159, MESAN2016304, MESAN2016409, MESAN2016552, MESAN2016965, MESAN2017133, MESAN2017152, MESAN2017373, MESAN2017417, MESAN2018209, MESAN2018576, MESAN2018670, MESAN2018699, MESTC1000042, MESTC1000147, MESTC2000150, MESTC2000153, MESTC2000170, N1ESE2000698, NB9N41000011,

[2773] NB9N41000047, NB9N41000121, NB9N41000142, NB9N41000146, NB9N41000340, NB9N42000104, NB9N42000122, NB9N42000196, NB9N42000314, NB9N42000342, NB9N42000430, NB9N42000495, NB9N42001300, NCRRP1000129, NESOP1000010, NESOP1000108, NESOP2000231, NESOP2000452, NESOP2000499, NESOP2000504, NESOP2000744, NESOP2001144, NESOP2001433, NESOP2001656, NESOP2001694, NESOP2001752, NESOP2002352, NESOP2002418, NESOP2002487, NESOP2002738, NESOP2002780, NETRP1000034, NETRP1000082, NETRP2000086, NETRP2000182, NETRP2000439, NHNPC1000034, NHNPC1000037, NHNPC1000084, NHNPC1000101, NHNPC1000124, NHNPC2000187, NHNPC2000212, NHNPC2000606, NHNPC2000877, NHNPC2001108, NHNPC2001223, NHNPC2001312, NHNPC2001816, NHNPC2001931,

[2774] NHNPC2002565, NHNPC2002749, NOVAR1000091, NOVAR1000102, NOVAR2000136, NOVAR2000352, NOVAR2000412, NOVAR2000710, NOVAR2000783, NOVAR2000962, NOVAR2001108, NOVAR2001620, NOVAR2001783, NOVAR2001876, NOVAR2002039, NT2NE1000004, NT2NE1000014, NT2NE1000018, NT2NE1000023, NT2NE1000024, NT2NE1000059, NT2NE1000063, NT2NE1000073, NT2NE1000083, NT2NE1000120, NT2NE1000122, NT2NE1000175, NT2NE1000181, NT2NE1000185, NT2NE2000038, NT2NE2000054, NT2NE2000057, NT2NE2000064, NT2NE2000109, NT2NE2000137, NT2NE2000156, NT2NE2000195, NT2NE2000222, NT2NE2000284, NT2NE2000299, NT2NE2000327, NT2NE2000353, NT2NE2000356, NT2NE2000369, NT2NE2000374, NT2NE2000384, NT2NE2000386, NT2NE2000390, NT2NE2000392, NT2NE2000455,

[2775] NT2NE2000488, NT2NE2000517, NT2NE2000536, NT2NE2000546, NT2NE2000548, NT2NE2000550, NT2NE2000586, NT2NE2000612, NT2NE2000636, NT2NE2000658, NT2NE2000706, NT2NE2000802, NT2NE2000808, NT2NE2000809, NT2NE2000864, NT2NE2000909, NT2NE2000913, NT2NE2000951, NT2NE2000980, NT2NE2001005, NT2NE2001021, NT2NE2001040, NT2NE2001048, NT2NE2001142, NT2NE2001176, NT2NE2001180, NT2NE2001188, NT2NE2001191, NT2NE2001247, NT2NE2001252, NT2NE2001324, NT2NE2001326, NT2NE2001337, NT2NE2001364, NT2NE2001372, NT2NE2001397, NT2NE2001403, NT2NE2001428, NT2NE2001432, NT2NE2001435, NT2NE2001442, NT2NE2001524, NT2NE2001530, NT2NE2001545, NT2NE2001598, NT2NE2001623, NT2NE2001626, NT2NE2001634, NT2NE2001648, NT2NE2001655,

[2776] NT2NE2001660, NT2NE2001666, NT2NE2001677, NT2NE2001697, NT2NE2001698, NT2NE2001723, NT2NE2001725, NT2NE2001874, NT2NE2001889, NT2NE2001923, NT2NE2002100, NT2NE2002162, NT2NE2002186, NT2NE2002285, NT2NE2002311, NT2NE2002620, NT2NE2002651, NT2NE2002732, NT2NE2002768, NT2NE2002791, NT2NE2002856, NT2NE2002870, NT2NE2003150, NT2NE2003252, NT2NE2003280, NT2NE2003308, NT2NE2003309, NT2NE2003315, NT2NE2003393, NT2NE2003408, NT2NE2003457, NT2NE2003540, NT2NE2003569, NT2NE2003571, NT2NE2003705, NT2NE2003752, NT2NE2003887, NT2NE2003921, NT2NE2004255, NT2NE2004378, NT2NE2004490, NT2NE2004606, NT2NE2004716, NT2NE2004740, NT2NE2004787, NT2NE2004916, NT2NE2005035, NT2NE2005223, NT2NE2005276, NT2NE2005317,

[2777] NT2NE2005323, NT2NE2005358, NT2NE2005395, NT2NE2005419, NT2NE2005517, NT2NE2005537, NT2NE2005555, NT2NE2005588, NT2NE2005676, NT2NE2005720, NT2NE2005784, NT2NE2005804, NT2NE2005821, NT2NE2005890, NT2NE2005921, NT2NE2005968, NT2NE2006087, NT2NE2006103, NT2NE2006217, NT2NE2006288, NT2NE2006382, NT2NE2006387, NT2NE2006427, NT2NE2006432, NT2NE2006478, NT2NE2006531, NT2NE2006659, NT2NE2006784, NT2NE2006813, NT2NE2006894, NT2NE2006909, NT2NE2006942, NT2NE2006958, NT2NE2007052, NT2NE2007220, NT2NE2007425, NT2NE2007725, NT2NE2007727, NT2NE2007786, NT2NE2007877, NT2NE2007967, NT2NE2008017, NT2NE2008060, NT2NE2008077, NT2NE2008213, NT2NE2008260, NT2NE2008378, NT2NE2008607, NT2NE2008639, NT2NE2008727,

[2778] NT2NE2008783, NT2NE2008785, NT2NE2008803, NT2NE2008867, NT2NE2008961, NT2NE2008997, NT2NE2009138, NT2NE2009295, NT2NE2009426, NT2NE2009523, NT2NE2009608, NT2NE2009691, NT2NE2010056, NT2NE2010105, NT2NE2010150, NT2NE2010400, NT2NE2010632, NT2NE2010633, NT2NE2010654, NT2NE2010688, NT2NE2010781, NT2NE2010842, NT2NE2010854, NT2NE2011033, NT2NE2011036, NT2NE2011107, NT2NE2011119, NT2NE2011154, NT2NE2011221, NT2NE2011411, NT2NE2011485, NT2NE2011650, NT2NE2011687, NT2NE2011691, NT2NE2011758, NT2NE2011823, NT2NE2011896, NT2NE2011998, NT2NE2012113, NT2NE2012199, NT2NE2012243, NT2NE2012361, NT2NE2012448, NT2NE2012457, NT2NE2012493, NT2NE2012505, NT2NE2012533, NT2NE2012603, NT2NE2012747, NT2NE2012847,

[2779] NT2NE2012928, NT2NE2013019, NT2NE2013081, NT2NE2013189, NT2NE2013217, NT2NE2013547, NT2NE2014013, NT2NE2014028, NT2NE2014104, NT2NE2014113, NT2NE2014176, NT2NE2014221, NT2NE2014525, NT2NE2014650, NT2NE2014651, NT2NE2014681, NT2NE2014758, NT2NE2014869, NT2NE2014950, NT2NE2015061, NT2NE2015262, NT2NE2015275, NT2NE2015362, NT2NE2015480, NT2NE2015511, NT2NE2015565, NT2NE2015626, NT2NE2015747, NT2NE2015860, NT2NE2015885, NT2NE2015904, NT2NE2015974, NT2NE2016041, NT2NE2016387, NT2NE2016419, NT2NE2016519, NT2NE2016608, NT2NE2016766, NT2NE2016774, NT2NE2016971, NT2NE2017259, NT2NE2017332, NT2NE2017397, NT2NE2017480, NT2NE2017492, NT2NE2017508, NT2NE2017562, NT2NE2017590, NT2NE2017612, NT2NE2017721,

[2780] NT2NE2017752, NT2NE2017792, NT2NE2017982, NT2NE2018165, NT2NE2018176, NT2NE2018273, NT2NE2018376, NT2NE2018472, NT2NE2018490, NT2NE2018594, NT2NE2018739, NT2NE2018916, NT2NE2019056, NT2NE2019076, NT2NE2019091, NT2NE2019099, NT2RI1000016, NT2RI1000035, NT2RI1000048, NT2RI1000127, NT2RI1000164, NT2RI1000172, NT2RI2000004, NT2RI2000007, NT2RI2000116, NT2RI2000117, NT2RI2000128, NT2RI2000133, NT2RI2000167, NT2RI2000173, NT2RI2000187, NT2RI2000270, NT2RI2000276, NT2RI2000294, NT2RI2000313, NT2RI2000341, NT2RI2000344, NT2RI2000348, NT2RI2000421, NT2RI2000480, NT2RI2000575, NT2RI2000578, NT2RI2000588, NT2RI2000597, NT2RI2000669, NT2RI2000688, NT2RI2000704, NT2RI2000738, NT2RI2000775, NT2RI2000822,

[2781] NT2RI2000829, NT2RI2000841, NT2RI200.0865, NT2RI2000932, NT2RI2000974, NT2RI2000987, NT2RI2001010, NT2RI2001017, NT2RI2001030, NT2RI2001083, NT2RI2001167, NT2RI2001178, NT2RI2001235, NT2RI2001244, NT2RI2001307, NT2RI2001342, NT2RI2001410, NT2RI2001425, NT2RI2001449, NT2RI2001450, NT2RI2001474, NT2RI2001519, NT2RI2001595, NT2RI2001624, NT2RI2001731, NT2RI2001769, NT2RI2001782, NT2RI2001836, NT2RI2001846, NT2RI2001866, NT2RI2001910, NT2RI2001952, NT2RI2002022, NT2RI2002041, NT2RI2002120, NT2RI2002153, NT2RI2002179, NT2RI2002243, NT2RI2002252, NT2RI2002260, NT2RI2002266, NT2RI2002270, NT2RI2002334, NT2RI2002359, NT2RI2002447, NT2RI2002481, NT2RI2002507, NT2RI2002517, NT2RI2002530, NT2RI2002540,

[2782] NT2RI2002564, NT2RI2002585, NT2RI2002592, NT2RI2002602, NT2RI2002654, NT2RI2002699, NT2RI2002729, NT2RI2002802, NT2RI2002819, NT2RI2002822, NT2RI2002852, NT2RI2002865, NT2RI2002923, NT2RI2002926, NT2RI2002970, NT2RI2003011, NT2RI2003019, NT2RI2003051, NT2RI2003067, NT2RI2003184, NT2RI2003222, NT2RI2003301, NT2RI2003317, NT2RI2003344, NT2RI2003360, NT2RI2003361, NT2RI2003383, NT2RI2003392, NT2RI2003399, NT2RI2003419, NT2RI2003481, NT2RI2003487, NT2RI2003556, NT2RI2003655, NT2RI2003667, NT2RI2003678, NT2RI2003751, NT2RI2003884, NT2RI2003973, NT2RI2003993, NT2RI2004078, NT2RI2004079, NT2RI2004093, NT2RI2004136, NT2RI2004157, NT2RI2004190, NT2RI2004209, NT2RI2004230, NT2RI2004284, NT2RI2004290,

[2783] NT2RI2004304, NT2RI2004312, NT2RI2004381, NT2RI2004398, NT2RI2004410, NT2RI2004442, NT2RI2004468, NT2RI2004535, NT2RI2004606, NT2RI2004618, NT2RI2004783, NT2RI2004818, NT2RI2004840, NT2RI2004884, NT2RI2004916, NT2RI2004962, NT2RI2004984, NT2RI2004985, NT2RI2005048, NT2RI2005061, NT2RI2005069, NT2RI2005087, NT2RI2005096, NT2RI2005116, NT2RI2005130, NT2RI2005166, NT2RI2005246, NT2RI2005315, NT2RI2005335, NT2RI2005353, NT2RI2005358, NT2RI2005368, NT2RI2005382, NT2RI2005473, NT2RI2005520, NT2RI2005564, NT2RI2005579, NT2RI2005621, NT2RI2005628, NT2RI2005647, NT2RI2005670, NT2RI200.5710, NT2RI2005772, NT2RI2005811, NT2RI2005814, NT2RI2005816, NT2RI2005818, NT2RI2005851, NT2RI2005966, NT2RI2006071,

[2784] NT2RI2006081, NT2RI2006126, NT2RI2006127, NT2RI2006183, NT2RI2006257, NT2RI2006271, NT2RI2006294, NT2RI2006345, NT2RI2006403, NT2RI2006445, NT2RI2006487, NT2RI2006506, NT2RI2006553, NT2RI2006565, NT2RI2006640, NT2RI2006647, NT2RI2006659, NT2RI2006662, NT2RI2006667, NT2RI2006679, NT2RI2006682, NT2RI2006686, NT2RI2006703, NT2RI2006716, NT2RI2006735, NT2RI2006762, NT2RI2006788, NT2RI2006838, NT2RI2006943, NT2RI2006973, NT2RI2007046, NT2RI2007048, NT2RI2007116, NT2RI2007148, NT2RI2007214, NT2RI2007277, NT2RI2007303, NT2RI2007334, NT2RI2007377, NT2RI2007386, NT2RI2007406, NT2RI2007439, NT2RI2007445, NT2RI2007468, NT2RI2007469, NT2RI2007507, NT2RI2007572, NT2RI2007593, NT2RI2007729, NT2RI2007751,

[2785] NT2RI2007754, NT2RI2007853, NT2RI2007877, NT2RI2007879, NT2RI2007891, NT2RI2007956, NT2RI2007965, NT2RI2008007, NT2RI2008050, NT2RI2008141, NT2RI2008188, NT2RI2008233, NT2RI2008396, NT2RI2008455, NT2RI2008502, NT2RI2008566, NT2RI2008598, NT2RI2008656, NT2RI2008714, NT2RI2008724, NT2RI2008801, NT2RI2008808, NT2RI2008841, NT2RI2008942, NT2RI2008952, NT2RI2009005, NT2RI2009066, NT2RI2009101, NT2RI2009103, NT2RI2009144, NT2RI2009151, NT2RI2009194, NT2RI2009215, NT2RI2009233, NT2RI2009259, NT2RI2009289, NT2RI2009301, NT2RI2009402, NT2RI2009406, NT2RI2009517, NT2RI2009585, NT2RI2009595, NT2RI2009855, NT2RI2010283, NT2RI2010508, NT2RI2010795, NT2RI2011422, NT2RI2011450, NT2RI2011683, NT2RI2011803,

[2786] NT2RI2012350, NT2RI2012659, NT2RI2012990, NT2RI2013345, NT2RI2013357, NT2RI2013373, NT2RI2014247, NT2RI2014551, NT2RI2014683, NT2RI2014733, NT2RI2015239, NT2RI2015342, NT2RI2016128, NT2RI2016134, NT2RI2018311, NT2RI2018363, NT2RI2018883, NT2RI2018950, NT2RI2019751, NT2RI2019826, NT2RI2020390, NT2RI2020703, NT2RI2021463, NT2RI2021625, NT2RI2022584, NT2RI2023303, NT2RI2023671, NT2RI2024008, NT2RI2024313, NT2RI2024460, NT2RI2024496, NT2RI2024935, NT2RI2025075, NT2RI2025255, NT2RI2025564, NT2RI2025565, NT2RI2025909, NT2RI2025957, NT2RI2025976, NT2RI2026758, NT2RI2027081, NT2RI2027157, NT2RI2027224, NT2RI2027323, NT2RI2027396, NT2RI2027484, NT2RI2027975, NT2RI2028213, NT2RI2028222, NT2RI2028537,

[2787] NT2RI2028642, NT2RI3000174, NT2RI3000213, NT2RI3000423, NT2RI3000622, NT2RI3001132, NT2RI3001263, NT2RI3001279, NT2RI3001348, NT2RI3001445, NT2RI3001458, NT2RI3001515, NT2RI3001573, NT2RI3001967, NT2RI3002303, NT2RI3002557, NT2RI3002842, NT2RI3003027, NT2RI3003031, NT2RI3003095, NT2RI3003104, NT2RI3003162, NT2RI3003362, NT2RI3003382, NT2RI3003409, NT2RI3003738, NT2RI3003925, NT2RI3004133, NT2RI3004381, NT2RI3004510, NT2RI3005202, NT2RI3005403, NT2RI3005416, NT2RI3005724, NT2RI3005861, NT2RI3005923, NT2RI3005928, NT2RI3006132, NT2RI3006171, NT2RI3006284, NT2RI3006340, NT2RI3006376, NT2RI3006666, NT2RI3006673, NT2RI3006796, NT2RI3007065, NT2RI3007095, NT2RI3007158, NT2RI3007167, NT2RI3007213,

[2788] NT2RI3007291, NT2RI3007443, NT2RI3007543, NT2RI3007684, NT2RI3007757, NT2RI3007878, NT2RI3007978, NT2RI3008055, NT2RI3008162, NT2RI3008179, NT2RI3008228, NT2RI3008442, NT2RI3008652, NT2RI3008697, NT2RI3008974, NT2RI3009158, NT2RI3009480, NT2RI3009524, NT2RP6000005, NT2RP6000008, NT2RP6000017, NT2RP6000032, NT2RP6000033, NT2RP6000039, NT2RP6000059, NT2RP6000060, NT2RP6000077, NT2RP6000085, NT2RP6000086, NT2RP6000100, NT2RP6000109, NT2RP6000110, NT2RP6000119, NT2RP6000127, NT2RP6000130, NT2RP6000140, NT2RP6000150, NT2RP7000041, NT2RP7000069, NT2RP7000086, NT2RP7000109, NT2RP7000173, NT2RP7000238, NT2RP7000259, NT2RP7000311, NT2RP7000359, NT2RP7000364, NT2RP7000380, NT2RP7000391, NT2RP7000425,

[2789] NT2RP7000477, NT2RP7000579, NT2RP7000586, NT2RP7000600, NT2RP7000624, NT2RP7000812, NT2RP7000926, NT2RP7001074, NT2RP7001080, NT2RP7001156, NT2RP7001231, NT2RP7001319, NT2RP7001335, NT2RP7001364, NT2RP7001475, NT2RP7001532, NT2RP7001591, NT2RP7001602, NT2RP7001678, NT2RP7001856, NT2RP7001962, NT2RP7002028, NT2RP7002064, NT2RP7002151, NT2RP7002163, NT2RP7002243, NT2RP7002376, NT2RP7002450, NT2RP7002478, NT2RP7002554, NT2RP7002594, NT2RP7002603, NT2RP7002650, NT2RP7002738, NT2RP7002779, NT2RP7002802, NT2RP7002841, NT2RP7002875, NT2RP7002906, NT2RP7002978, NT2RP7002982, NT2RP7003025, NT2RP7003050, NT2RP7003055, NT2RP7003084, NT2RP7003091, NT2RP7003107, NT2RP7003134, NT2RP7003148, NT2RP7003203,

[2790] NT2RP7003319, NT2RP7003439, NT2RP7003511, NT2RP7003629, NT2RP7003632, NT2RP7003647, NT2RP7003680, NT2RP7003724, NT2RP7003960, NT2RP7004027, NT2RP7004080, NT2RP7004114, NT2RP7004123, NT2RP7004196, NT2RP7004204, NT2RP7004233, NT2RP7004260, NT2RP7004352, NT2RP7004358, NT2RP7004396, NT2RP7004428, NT2RP7004481, NT2RP7004559, NT2RP7004641, NT2RP7004656, NT2RP7004687, NT2RP7004722, NT2RP7004728, NT2RP7004766, NT2RP7004790, NT2RP7004911, NT2RP7004915, NT2RP7004961, NT2RP7004964, NT2RP7004975, NT2RP7005118, NT2RP7005205, NT2RP7005219, NT2RP7005323, NT2RP7005468, NT2RP7005493, NT2RP7005529, NT2RP7005629, NT2RP7005631, NT2RP7005669, NT2RP7005675, NT2RP7005750, NT2RP7005846, NT2RP7006033, NT2RP7006160,

[2791] NT2RP7006162, NT2RP7006188, NT2RP7006223, NT2RP7006263, NT2RP7006296, NT2RP7006304, NT2RP7006374, NT2RP7006395, NT2RP7006408, NT2RP7006457, NT2RP7006490, NT2RP7006547, NT2RP7006601, NT2RP7006619, NT2RP7006621, NT2RP7006636, NT2RP7006701, NT2RP7006853, NT2RP7006886, NT2RP7006887, NT2RP7006986, NT2RP7006995, NT2RP7007114, NT2RP7007177, NT2RP7007221, NT2RP7007226, NT2RP7007252, NT2RP7007269, NT2RP7007310, NT2RP7007359, NT2RP7007381, NT2RP7007406, NT2RP7007480, NT2RP7007504, NT2RP7007537, NT2RP7007580, NT2RP7007594, NT2RP7007610, NT2RP7007617, NT2RP7007643, NT2RP7007766, NT2RP7007925, NT2RP7007930, NT2RP7008013, NT2RP7008015, NT2RP7008133, NT2RP7008137, NT2RP7008142, NT2RP7008144, NT2RP7008161,

[2792] NT2RP7008190, NT2RP7008315, NT2RP7008360, NT2RP7008396, NT2RP7008406, NT2RP7008435, NT2RP7008441, NT2RP7008454, NT2RP7008487, NT2RP7008544, NT2RP7008550, NT2RP7008557, NT2RP7008623, NT2RP7008657, NT2RP7008714, NT2RP7008720, NT2RP7008855, NT2RP7008863, NT2RP7009012, NT2RP7009019, NT2RP7009030, NT2RP7009087, NT2RP7009108, NT2RP7009147, NT2RP7009149, NT2RP7009168, NT2RP7009215, NT2RP7009225, NT2RP7009236, NT2RP7009253, NT2RP7009267, NT2RP7009322, NT2RP7009363, NT2RP7009370, NT2RP7009373, NT2RP7009397, NT2RP7009429, NT2RP7009439, NT2RP7009466, NT2RP7009481, NT2RP7009498, NT2RP7009502, NT2RP7009507, NT2RP7009577, NT2RP7009743, NT2RP7009867, NT2RP7010109, NT2RP7010128, NT2RP7010235, NT2RP7010275,

[2793] NT2RP7010521, NT2RP7010599, NT2RP7010612, NT2RP7010817, NT2RP7011086, NT2RP7011132, NT2RP7011268, NT2RP7011318, NT2RP7011452, NT2RP7011570, NT2RP7011721, NT2RP7011909, NT2RP7012291, NT2RP7012516, NT2RP7013002, NT2RP7013374, NT2RP7013499, NT2RP7013573, NT2RP7013729, NT2RP7013764, NT2RP7013795, NT2RP7013999, NT2RP7014005, NT2RP7014178, NT2RP7014348, NT2RP7014420, NT2RP7014583, NT2RP7014721, NT2RP7014743, NT2RP7014778, NT2RP7014906, NT2RP7015080, NT2RP7015431, NT2RP7015503, NT2RP7015512, NT2RP7015676, NT2RP7015789, NT2RP7015996, NT2RP7016508, NT2RP7016574, NT2RP7016622, NT2RP7016911, NT2RP7017139, NT2RP7017284, NT2RP7017365, NT2RP7017474, NT2RP7017546, NT2RP7017567, NT2RP7017795, NT2RP7017971,

[2794] NT2RP7018032, NT2RP7018126, NT2RP7018197, NT2RP7018206, NT2RP7018340, NT2RP7018586, NT2RP7018802, NT2RP7018871, NT2RP7019064, NT2RP7019135, NT2RP7019273, NT2RP7019367, NT2RP7019401, NT2RP7019445, NT2RP7019543, NT2RP7019682, NT2RP7019835, NT2RP7020112, NT2RP7020123, NT2RP7020343, NT2RP7020379, NT2RP8000137, NT2RP8000296, NT2RP8000435, NT2RP8000483, NT2RP8000521, NT2RP8000633, NT2RP8001363, NT2RP8001407, NT2RP8001584, NT2RP8001604, NT2RP8001605, NT2RP8003490, NT2RP8003657, NT2RP8003787, NT2RP8004306, NT2RP8005546, NT2RP8006452, NT2RP8006521, NT2RP8007416, NT2RP8007503, NT2RP8007715, NT2RP8007920, NT2RP8008057, NT2RP8009248, NTONG1000006, NTONG1000087, NTONG1000123, NTONG1000130, NTONG1000161,

[2795] NTONG1000172, NTONG1000213, NTONG1000214, NTONG1000247, NTONG1000264, NTONG2000040, NTONG2000107, NTONG2000231, NTONG2000334, NTONG2000363, NTONG2000413, NTONG2000492, NTONG2000499, NTONG2000531, NTONG2000583, NTONG2000800, NTONG2000876, NTONG2000878, NTONG2000966, NTONG2000985, NTONG2001014, NTONG2001079, NTONG2001137, NTONG2001157, NTONG2001173, NTONG2001220, NTONG2001222, NTONG2001362, NTONG2001428, NTONG2001532, NTONG2001550, NTONG2001587, NTONG2001619, NTONG2001642, NTONG2001657, NTONG2001676, NTONG2001762, NTONG2002278, NTONG2002807, NTONG2002948, NTONG2002970, NTONG2002985, NTONG2003158, NTONG2003210, NTONG2003316, NTONG2003409, NTONG2003805, NTONG2003839, NTONG2003852, NTONG2003897,

[2796] NTONG2004095, NTONG2004308, NTONG2004521, NTONG2004614, NTONG2004690, NTONG2004829, NTONG2004918, NTONG2004991, NTONG2005062, NTONG2005086, NTONG2005137, NTONG2005265, NTONG2005277, NTONG2005363, NTONG2005373, NTONG2005391, NTONG2005480, NTONG2005497, NTONG2005577, NTONG2005657, NTONG2005801, NTONG2005897, NTONG2005969, NTONG2006099, NTONG2006187, NTONG2006301, NTONG2006324, NTONG2006354, NTONG2006440, NTONG2006484, NTONG2006501, NTONG2006646, NTONG2006709, NTONG2006783, NTONG2007020, NTONG2007028, NTONG2007034, NTONG2007249, NTONG2007517, NTONG2007522, NTONG2007658, NTONG2007693, NTONG2007756, NTONG2008088, NTONG2008093, NTONG2008143, NTONG2008365, NTONG2008672, NTONG2008862, NTONG2008939,

[2797] NTONG2008944, NTONG2009060, NTONG2009068, NTONG2009229, NTONG2009233, NTONG2009576, OCBBF1000016, OCBBF1000030, OCBBF1000042, OCBBF1000049, OCBBF1000054, OCBBF1000067, OCBBF1000080, OCBBF1000085, OCBBF1000091, OCBBF1000104, OCBBF1000118, OCBBF1000119, OCBBF1000122, OCBBF1000130, OCBBF1000138, OCBBF1000145, OCBBF1000153, OCBBF1000175, OCBBF1000185, OCBBF1000188, OCBBF1000192, OCBBF1000254, OCBBF1000315, OCBBF2000015, OCBBF2000126, OCBBF2000178, OCBBF2000231, OCBBF2000277, OCBBF2000323, OCBBF2000452, OCBBF2000677, OCBBF2000703, OCBBF2000719, OCBBF2000824, OCBBF2000831, OCBBF2000846, OCBBF2000904, OCBBF2000986, OCBBF2000998, OCBBF2001075, OCBBF2001101, OCBBF2001124, OCBBF2001140, OCBBF2001166,

[2798] OCBBF2001176, OCBBF2001186, OCBBF2001210, OCBBF2001252, OCBBF2001307, OCBBF2001323, OCBBF2001389, OCBBF2001402, OCBBF2001408, OCBBF2001416, OCBBF2001473, OCBBF2001492, OCBBF2001494, OCBBF2001527, OCBBF2001528, OCBBF2001586, OCBBF2001639, OCBBF2001681, OCBBF2001687, OCBBF2001706, OCBBF2001749, OCBBF2001910, OCBBF2001931, OCBBF2001961, OCBBF2001983, OCBBF2002015, OCBBF2002083, OCBBF2002124, OCBBF2002161, OCBBF2002290, OCBBF2002357, OCBBF2002615, OCBBF2002626, OCBBF2002656, OCBBF2002663, OCBBF2002805, OCBBF2002865, OCBBF2002920, OCBBF2002980, OCBBF2003028, OCBBF2003052, OCBBF2003091, OCBBF2003246, OCBBF2003327, OCBBF2003518, OCBBF2003543, OCBBF2003593, OCBBF2003744, OCBBF2003819, OCBBF2003925,

[2799] OCBBF2004038, OCBBF2004147, OCBBF2004168, OCBBF2004259, OCBBF2004273, OCBBF2004385, OCBBF2004418, OCBBF2004478, OCBBF2004482, OCBBF2004533, OCBBF2004567, OCBBF2004612, OCBBF2004647, OCBBF2004669, OCBBF2004757, OCBBF2004826, OCBBF2004866, OCBBF2004883, OCBBF2004889, OCBBF2004930, OCBBF2004984, OCBBF2005066, OCBBF2005077, OCBBF2005161, OCBBF2005343, OCBBF2005349, OCBBF2005373, OCBBF2005420, OCBBF2005428, OCBBF2005433, OCBBF2005476, OCBBF2005546, OCBBF2005843, OCBBF2005901, OCBBF2006005, OCBBF2006030, OCBBF2006058, OCBBF2006113, OCBBF2006148, OCBBF2006151, OCBBF2006154, OCBBF2006172, OCBBF2006214, OCBBF2006241, OCBBF2006313, OCBBF2006388, OCBBF2006438, OCBBF2006567, OCBBF2006624, OCBBF2006639,

[2800] OCBBF2006764, OCBBF2006972, OCBBF2006987, OCBBF2007028, OCBBF2007039, OCBBF2007051, OCBBF2007068, OCBBF2007114, OCBBF2007121, OCBBF2007184, OCBBF2007194, OCBBF2007196, OCBBF2007224, OCBBF2007238, OCBBF2007414, OCBBF2007428, OCBBF2007478, OCBBF2007485, OCBBF2007520, OCBBF2007555, OCBBF2007610, OCBBF2007756, OCBBF2007762, OCBBF2007829, OCBBF2007892, OCBBF2007931, OCBBF2007946, OCBBF2008041, OCBBF2008116, OCBBF2008138, OCBBF2008144, OCBBF2008283, OCBBF2008330, OCBBF2008340, OCBBF2008366, OCBBF2008483, OCBBF2008511, OCBBF2008520, OCBBF2008569, OCBBF2008586, OCBBF2008640, OCBBF2008691, OCBBF2008701, OCBBF2008724, OCBBF2008760, OCBBF2008768, OCBBF2008770, OCBBF2008775, OCBBF2008790, OCBBF2008814,

[2801] OCBBF2008822, OCBBF2009095, OCBBF2009115, OCBBF2009242, OCBBF2009301, OCBBF2009352, OCBBF2009391, OCBBF2009424, OCBBF2009536, OCBBF2009571, OCBBF2009583, OCBBF2009603, OCBBF2009772, OCBBF2009788, OCBBF2009920, OCBBF2009926, OCBBF2010040, OCBBF2010140, OCBBF2010281, OCBBF2010313, OCBBF2010404, OCBBF2010416, OCBBF2010420, OCBBF2010557, OCBBF2010604, OCBBF2010709, OCBBF2010792, OCBBF2010819, OCBBF2010843, OCBBF2010858, OCBBF2010863, OCBBF2010871, OCBBF2010931, OCBBF2010945, OCBBF2010978, OCBBF2010989, OCBBF2011021, OCBBF2011073, OCBBF2011137, OCBBF2011160, OCBBF2011177, OCBBF2011228, OCBBF2011232, OCBBF2011283, OCBBF2011311, OCBBF2011625, OCBBF2011669, OCBBF2011685, OCBBF2011706, OCBBF2011722,

[2802] OCBBF2011759, OCBBF2011767, OCBBF2011855, OCBBF2011872, OCBBF2011887, OCBBF2011897, OCBBF2011960, OCBBF2011981, OCBBF2012001, OCBBF2012028, OCBBF2012039, OCBBF2012095, OCBBF2012139, OCBBF2012191, OCBBF2012262, OCBBF2012320, OCBBF2012436, OCBBF2012525, OCBBF2012678, OCBBF2012704, OCBBF2012714, OCBBF2012755, OCBBF2012812, OCBBF2012821, OCBBF2012881, OCBBF2012936, OCBBF2012990, OCBBF2013011, OCBBF2013049, OCBBF2013091, OCBBF2013123, OCBBF2013127, OCBBF2013149, OCBBF2013208, OCBBF2013285, OCBBF2013319, OCBBF2013324, OCBBF2013481, OCBBF2013507, OCBBF2013721, OCBBF2013789, OCBBF2013843, OCBBF2013883, OCBBF2013926, OCBBF2014052, OCBBF2014064, OCBBF2014089, OCBBF2014322, OCBBF2014386, OCBBF2014576,

[2803] OCBBF2014707, OCBBF2014745, OCBBF2014828, OCBBF2014873, OCBBF2014880, OCBBF2014928, OCBBF2015031, OCBBF2015081, OCBBF2015115, OCBBF2015232, OCBBF2015233, OCBBF2015285, OCBBF2015334, OCBBF2015335, OCBBF2015503, OCBBF2015506, OCBBF2015599, OCBBF2015645, OCBBF2015659, OCBBF2015797, OCBBF2015931, OCBBF2015980, OCBBF2016038, OCBBF2016405, OCBBF2016467, OCBBF2016590, OCBBF2016591, OCBBF2016612, OCBBF2016689, OCBBF2016690, OCBBF2016729, OCBBF2017035, OCBBF2017055, OCBBF2017069, OCBBF2017306, OCBBF2017325, OCBBF2017458, OCBBF2017489, OCBBF2017516, OCBBF2017665, OCBBF2017754, OCBBF2017815, OCBBF2017882, OCBBF2017888, OCBBF2017893, OCBBF2017920, OCBBF2018012, OCBBF2018014, OCBBF2018167, OCBBF2018206,

[2804] OCBBF2018229, OCBBF2018234, OCBBF2018362, OCBBF2018380, OCBBF2018563, OCBBF2018581, OCBBF2018618, OCBBF2018663, OCBBF2018687, OCBBF2018827, OCBBF2018828, OCBBF2018873, OCBBF2018934, OCBBF2018956, OCBBF2019108, OCBBF2019195, OCBBF2019327, OCBBF2019684, OCBBF2019761, OCBBF2019823, OCBBF2019950, OCBBF2020048, OCBBF2020318, OCBBF2020343, OCBBF2020453, OCBBF2020741, OCBBF2020801, OCBBF2020825, OCBBF2020838, OCBBF2021214, OCBBF2021286, OCBBF2021323, OCBBF2021518, OCBBF2021788, OCBBF2021833, OCBBF2022351, OCBBF2022573, OCBBF2022574, OCBBF2023162, OCBBF2023598, OCBBF2023643, OCBBF2024463, OCBBF2024589, OCBBF2024719, OCBBF2024779, OCBBF2024781, OCBBF2024850, OCBBF2025028, OCBBF2025115, OCBBF2025198,

[2805] OCBBF2025451, OCBBF2025458, OCBBF2025527, OCBBF2025631, OCBBF2025730, OCBBF2026025, OCBBF2026035, OCBBF2026144, OCBBF2026368, OCBBF2026645, OCBBF2026649, OCBBF2026690, OCBBF2026981, OCBBF2027148, OCBBF2027197, OCBBF2027354, OCBBF2027423, OCBBF2027478, OCBBF2027481, OCBBF2027511, OCBBF2027661, OCBBF2027728, OCBBF2027782, OCBBF2027868, OCBBF2028055, OCBBF2028173, OCBBF2028421, OCBBF2029471, OCBBF2029901, OCBBF2030116, OCBBF2030329, OCBBF2030354, OCBBF2030517, OCBBF2030574, OCBBF2030708, OCBBF2030927, OCBBF2030963, OCBBF2031167, OCBBF2031198, OCBBF2031366, OCBBF2031561, OCBBF2032152, OCBBF2032274, OCBBF2032539, OCBBF2032590, OCBBF2032599, OCBBF2032611, OCBBF2032671, OCBBF2033295, OCBBF2033413,

[2806] OCBBF2033869, OCBBF2033948, OCBBF2034333, OCBBF2034529, OCBBF2034637, OCBBF2034906, OCBBF2035110, OCBBF2035214, OCBBF2035390, OCBBF2035564, OCBBF2035658, OCBBF2035823, OCBBF2035885, OCBBF2035916, OCBBF2036019, OCBBF2036031, OCBBF2036225, OCBBF2036476, OCBBF2036743, OCBBF2036752, OCBBF2037068, OCBBF2037340, OCBBF2037398, OCBBF2037464, OCBBF2037547, OCBBF2037598, OCBBF2037638, OCBBF2038238, OCBBF2038285, OCBBF2038317, OCBBF3000097, OCBBF3000213, OCBBF3000296, OCBBF3000372, OCBBF3000380, OCBBF3000743, OCBBF3000830, OCBBF3001076, OCBBF3001202, OCBBF3001616, OCBBF3002553, OCBBF3002600, OCBBF3002654, OCBBF3003103, OCBBF3003209, OCBBF3003592, OCBBF3003745, OCBBF3003761, OCBBF3004264, OCBBF3004314,

[2807] OCBBF3004487, OCBBF3004972, OCBBF3005330, OCBBF3005597, OCBBF3005843, OCBBF3006802, OCBBF3006986, OCBBF3007078, OCBBF3007704, OCBBF3008230, OCBBF3008392, OCBBF3008835, OCBBF3009192, OCBBF3009244, OCBBF3009279, PANCR1000012, PANCR1000021, PANCR1000081, PANCR1000086, PANCR1000091, PANCR1000185, PEBLM1000024, PEBLM1000029, PEBLM1000062, PEBLM1000066, PEBLM1000068, PEBLM1000071, PEBLM1000083, PEBLM1000144, PEBLM1000147, PEBLM1000174, PEBLM1000180, PEBLM2000030, PEBLM2000112, PEBLM2000147, PEBLM2000170, PEBLM2000180, PEBLM2000213, PEBLM2000248, PEBLM2000267, PEBLM2000270, PEBLM2000308, PEBLM2000321, PEBLM2000326, PEBLM2000333, PEBLM2000338, PEBLM2000502, PEBLM2001312, PEBLM2001465, PEBLM2001488,

[2808] PEBLM2001803, PEBLM2002432, PEBLM2002455, PEBLM2002594, PEBLM2002749, PEBLM2002887, PEBLM2003426, PEBLM2003765, PEBLM2003914, PEBLM2003935, PEBLM2004015, PEBLM2004216, PEBLM2004290, PEBLM2004452, PEBLM2004497, PEBLM2004733, PEBLM2005282, PEBLM2005615, PEBLM2005632, PEBLM2005697, PEBLM2006031, PEBLM2006036, PEBLM2006049, PEBLM2006113, PEBLM2006135, PEBLM2006215, PEBLM2006283, PEBLM2006298, PEBLM2006366, PEBLM2006709, PEBLM2006912, PEBLM2007112, PEBLM2007140, PEBLM2007188, PEBLM2007437, PEBLM2007447, PEBLM2007598, PEBLM2007832, PEBLM2007834, PEBLM2008106, PEBLM2008576, PEBLM2008605, PEBLM2008826, PEBLM2008861, PERIC1000025, PERIC1000147, PERIC2000180, PERIC2000214, PERIC2000386, PERIC2000387,

[2809] PERIC2000422, PERIC2000473, PERIC2000889, PERIC2000914, PERIC2001227, PERIC2001228, PERIC2001379, PERIC2001504, PERIC2001703, PERIC2001764, PERIC2002243, PERIC2002272, PERIC2002452, PERIC2002766, PERIC2003001, PERIC2003090, PERIC2003287, PERIC2003349, PERIC2003452, PERIC2003699, PERIC2003720, PERIC2003794, PERIC2003834, PERIC2003919, PERIC2003957, PERIC2004028, PERIC2004131, PERIC2004259, PERIC2004379, PERIC2004429, PERIC2004510, PERIC2004613, PERIC2004909, PERIC2005111, PERIC2005117, PERIC2005305, PERIC2005347, PERIC2005370, PERIC2005936, PERIC2006035, PERIC2006121, PERIC2006443, PERIC2006945, PERIC2006960, PERIC2007439, PERIC2007914, PERIC2008008, PERIC2008385, PERIC2009001, PERIC2009086,

[2810] PERIC2009329, PERIC2009566, PLACE5000001, PLACE5000037, PLACE5000058, PLACE5000067, PLACE5000068, PLACE5000070, PLACE5000080, PLACE5000105, PLACE5000115, PLACE5000116, PLACE5000129, PLACE5000139, PLACE5000153, PLACE5000159, PLACE5000171, PLACE5000172, PLACE5000178, PLACE5000245, PLACE5000260, PLACE5000282, PLACE5000297, PLACE5000372, PLACE5000492, PLACE5000522, PLACE5000527, PLACE6000012, PLACE6000044, PLACE6000055, PLACE6000070, PLACE6000137, PLACE6000145, PLACE6000191, PLACE6000205, PLACE6000231, PLACE6000263, PLACE6000296, PLACE6000314, PLACE6000325, PLACE6000348, PLACE6000424, PLACE6000426, PLACE6000429, PLACE6000450, PLACE6000523, PLACE6000550, PLACE6000552, PLACE6000555, PLACE6000619,

[2811] PLACE6000953, PLACE6001118, PLACE6001153, PLACE6001185, PLACE6001262, PLACE6001281, PLACE6001294, PLACE6001536, PLACE6001557, PLACE6001712, PLACE6001740, PLACE6001823, PLACE6001923, PLACE6001925, PLACE6001933, PLACE6002016, PLACE6002102, PLACE6002157, PLACE6002312, PLACE6002323, PLACE6002345, PLACE6002462, PLACE6002647, PLACE6002692, PLACE6002699, PLACE6002710, PLACE6002871, PLACE6002949, PLACE6003004, PLACE6003038, PLACE6003077, PLACE6003094, PLACE6003109, PLACE6003204, PLACE6003218, PLACE6003372, PLACE6003393, PLACE6003399, PLACE6003539, PLACE6003621, PLACE6003705, PLACE6003740, PLACE6003745, PLACE6003771, PLACE6003796, PLACE6003839, PLACE6004101, PLACE6004219, PLACE6004336, PLACE6004368,

[2812] PLACE6004380, PLACE6004396, PLACE6004397, PLACE6004454, PLACE6004491, PLACE6004663, PLACE6004687, PLACE6004738, PLACE6004931, PLACE6004966, PLACE6004993, PLACE6005007, PLACE6005029, PLACE6005108, PLACE6005231, PLACE6005234, PLACE6005283, PLACE6005294, PLACE6005328, PLACE6005351, PLACE6005423, PLACE6005482, PLACE6005487, PLACE6005535, PLACE6005546, PLACE6005559, PLACE6005579, PLACE6005691, PLACE6005786, PLACE6006077, PLACE6006137, PLACE6006158, PLACE6006186, PLACE6006217, PLACE6006222, PLACE6006266, PLACE6006287, PLACE6006394, PLACE6006474, PLACE6006566, PLACE6006697, PLACE6006822, PLACE6006871, PLACE6006905, PLACE6006988, PLACE6007050, PLACE6007180, PLACE6007239, PLACE6007242, PLACE6007309,

[2813] PLACE6007373, PLACE6007380, PLACE6007433, PLACE6007436, PLACE6007482, PLACE6007687, PLACE6007787, PLACE6007798, PLACE6007807, PLACE6007925, PLACE6008036, PLACE6008094, PLACE6008126, PLACE6008285, PLACE6008444, PLACE6008453, PLACE6008640, PLACE6008750, PLACE6008768, PLACE6008824, PLACE6008989, PLACE6009006, PLACE6009008, PLACE6009237, PLACE6009338, PLACE6009419, PLACE6009430, PLACE6009482, PLACE6009524, PLACE6009527, PLACE6009560, PLACE6009590, PLACE6009821, PLACE6009835, PLACE6009853, PLACE6010463, PLACE6010485, PLACE6010568, PLACE6010701, PLACE6010704, PLACE6010732, PLACE6010765, PLACE6010848, PLACE6010925, PLACE6010936, PLACE6010991, PLACE6011041, PLACE6011057, PLACE6011102, PLACE6011156,

[2814] PLACE6011211, PLACE6011260, PLACE6011334, PLACE6011627, PLACE6011774, PLACE6011881, PLACE6011907, PLACE6011970, PLACE6011975, PLACE6012028, PLACE6012108, PLACE6012168, PLACE6012297, PLACE6012308, PLACE6012574, PLACE6012908, PLACE6012936, PLACE6012942, PLACE6013222, PLACE6013232, PLACE6013288, PLACE6013386, PLACE6013400, PLACE6013650, PLACE6013672, PLACE6013883, PLACE6013884, PLACE6013885, PLACE6014043, PLACE6014064, PLACE6014516, PLACE6014882, PLACE6015051, PLACE6015211, PLACE6015445, PLACE6015460, PLACE6015513, PLACE6015591, PLACE6015729, PLACE6015731, PLACE6015939, PLACE6016030, PLACE6016093, PLACE6016105, PLACE6016160, PLACE6016210, PLACE6016383, PLACE6016984, PLACE6017002, PLACE6017431,

[2815] PLACE6017564, PLACE6017578, PLACE6017626, PLACE6017701, PLACE6017714, PLACE6017788, PLACE6017791, PLACE6018031, PLACE6018107, PLACE6018187, PLACE6018235, PLACE6018287, PLACE6018441, PLACE6018487, PLACE6018497, PLACE6018769, PLACE6018834, PLACE6018843, PLACE6018863, PLACE6018938, PLACE6019195, PLACE6019385, PLACE6019542, PLACE6019600, PLACE6019674, PLACE6019676, PLACE6019701, PLACE6019932, PLACE6020031, PLACE6020145, PLACE7000167, PLACE7000170, PLACE7000266, PLACE7000333, PLACE7000410, PLACE7000502, PLACE7000707, PLACE7001022, PLACE7001544, PLACE7001759, PLACE7001936, PLACE7002303, PLACE7002641, PLACE7003639, PLACE7003657, PLACE7003684, PLACE7003985, PLACE7004103, PLACE7004961, PLACE7005169,

[2816] PLACE7005671, PLACE7005840, PLACE7006051, PLACE7006090, PLACE7006240, PLACE7006268, PLACE7006275, PLACE7006498, PLACE7006540, PLACE7007379, PLACE7007644, PLACE7007973, PLACE7008136, PLACE7008261, PLACE7008431, PLACE7008623, PLACE7008766, PLACE7009563, PROST1000033, PROST1000039, PROST1000065, PROST1000083, PROST1000085, PROST1000110, PROST1000123, PROST1000136, PROST1000145, PROST1000152, PROST1000167, PROST1000184, PROST1000217, PROST1000220, PROST1000262, PROST1000272, PROST1000298, PROST1000322, PROST1000334, PROST1000343, PROST1000362, PROST1000377, PROST1000383, PROST1000412, PROST1000419, PROST1000451, PROST1000485, PROST1000493, PROST1000512, PROST1000527, PROST1000528, PROST1000536,

[2817] PROST1000559, PROST1000575, PROST2000036, PROST2000053, PROST2000067, PROST2000079, PROST2000105, PROST2000143, PROST2000162, PROST2000165, PROST2000176, PROST2000203, PROST2000206, PROST2000212, PROST2000241, PROST2000267, PROST2000273, PROST2000274, PROST2000277, PROST2000284, PROST2000325, PROST2000337, PROST2000432, PROST2000452, PROST2000463, PROST2000470, PROST2000505, PROST2000567, PROST2000572, PROST2000717, PROST2000760, PROST2000761, PROST2000835, PROST2000893, PROST2000961, PROST2001002, PROST2001116, PROST2001138, PROST2001213, PROST2001414, PROST2001415, PROST2001465, PROST2001521, PROST2001540, PROST2001599, PROST2001611, PROST2001636, PROST2001796, PROST2001805, PROST2001823,

[2818] PROST2001899, PROST2.001997, PROST2001998, PROST2002101, PROST2002162, PROST2002212, PROST2002227, PROST2002338, PROST2002488, PROST2002489, PROST2002527, PROST2002591, PROST2002602, PROST2002633, PROST2002651, PROST2002682, PROST2002685, PROST2002722, PROST2002736, PROST2002842, PROST2002897, PROST2002906, PROST2002927, PROST2002960, PROST2003102, PROST2003117, PROST2003210, PROST2003302, PROST2003303, PROST2003324, PROST2003340, PROST2003396, PROST2003472, PROST2003517, PROST2003537, PROST2003563, PROST2003577, PROST2003583, PROST2003586, PROST2003628, PROST2003635, PROST2003674, PROST2003676, PROST2003725, PROST2003732, PROST2003775, PROST2003922, PROST2003930, PROST2004115, PROST2004142,

[2819] PROST2004146, PROST2004161, PROST2004251, PROST2004332, PROST2004481, PROST2004526, PROST2004570, PROST2004727, PROST2004739, PROST2004742, PROST2004744, PROST2004817, PROST2005039, PROST2005067, PROST2005076, PROST2005093, PROST2005121, PROST2005131, PROST2005228, PROST2005285, PROST2005426, PROST2005466, PROST2005604, PROST2005630, PROST2005683, PROST2005788, PROST2005793, PROST2005880, PROST2005886, PROST2005904, PROST2005919, PROST2005943, PROST2006008, PROST2006020, PROST2006030, PROST2006060, PROST2006196, PROST2006201, PROST2006260, PROST2006343, PROST2006450, PROST2006491, PROST2006510, PROST2006536, PROST2006579, PROST2006688, PROST2006737, PROST2006766, PROST2006782, PROST2006988,

[2820] PROST2007122, PROST2007200, PROST2007237, PROST2007248, PROST2007289, PROST2007317, PROST2007328, PROST2007382, PROST2007389, PROST2007416, PROST2007528, PROST2007612, PROST2007818, PROST2007871, PROST2007950, PROST2007956, PROST2007974, PROST2007988, PROST2008079, PROST2008088, PROST2008243, PROST2008245, PROST2008268, PROST2008271, PROST2008447, PROST2008468, PROST2008472, PROST2008489, PROST2008516, PROST2008724, PROST2008770, PROST2008835, PROST2008993, PROST2009022, PROST2009208, PROST2009222, PROST2009254, PROST2009273, PROST2009347, PROST2009365, PROST2009388, PROST2009400, PROST2009470, PROST2009483, PROST2009571, PROST2009731, PROST2009736, PROST2009795, PROST2009901, PROST2009909,

[2821] PROST2010046, PROST2010219, PROST2010250, PROST2010318, PROST2010326, PROST2010382, PROST2010400, PROST2010579, PROST2010606, PROST2010782, PROST2010885, PROST2011012, PROST2011038, PROST2011105, PROST2011297, PROST2011410, PROST2011439, PROST2011482, PROST2011577, PROST2011631, PROST2011660, PROST2012005, PROST2012007, PROST2012016, PROST2012088, PROST2012140, PROST2012157, PROST2012190, PROST2012249, PROST2012353, PROST2012400, PROST2012448, PROST2012504, PROST2012542, PROST2012550, PROST2012740, PROST2012888, PROST2012890, PROST2013032, PROST2013121, PROST2013260, PROST2013327, PROST2013531, PROST2013605, PROST2013627, PROST2013873, PROST2013880, PROST2014422, PROST2014585, PROST2014601,

[2822] PROST2014659, PROST2014916, PROST2014925, PROST2015124, PROST2015137, PROST2015198, PROST2015243, PROST2015246, PROST2015251, PROST2015287, PROST2015332, PROST2015457, PROST2015537, PROST2015545, PROST2015551, PROST2015636, PROST2015710, PROST2015756, PROST2015877, PROST2015900, PROST2015924, PROST2015932, PROST2016195, PROST2016246, PROST2016351, PROST2016379, PROST2016444, PROST2016462, PROST2016499, PROST2016512, PROST2016566, PROST2016582, PROST2016668, PROST2016684, PROST2016777, PROST2016829, PROST2016860, PROST2016918, PROST2017098, PROST2017128, PROST2017203, PROST2017367, PROST2017413, PROST2017441, PROST2017529, PROST2017578, PROST2017612, PROST2017617, PROST2017700, PROST2017701,

[2823] PROST2017836, PROST2017910, PROST2017972, PROST2018030, PROST2018090, PROST2018235, PROST2018437, PROST2018487, PROST2018511, PROST2018583, PROST2018588, PROST2018607, PROST2018788, PROST2018902, PROST2018922, PROST2018977, PROST2019296, PROST2019398, PROST2019487, PROST2019781, PUAEN1000039, PUAEN1000057, PUAEN1000081, PUAEN1000085, PUAEN1000087, PUAEN1000121, PUAEN1000147, PUAEN1000161, PUAEN1000175, PUAEN1000239, PUAEN1000275, PUAEN1000276, PUAEN1000288, PUAEN2000080, PUAEN2000152, PUAEN2000175, PUAEN2000247, PUAEN2000312, PUAEN2000374, PUAEN2000394, PUAEN2000497, PUAEN2000594, PUAEN2000684, PUAEN2000942, PUAEN2001260, PUAEN2001345, PUAEN2001526, PUAEN2001586, PUAEN2001882, PUAEN2002473,

[2824] PUAEN2002489, PUAEN2002552, PUAEN2002616, PUAEN2002758, PUAEN2003018, PUAEN2003079, PUAEN2003116, PUAEN2003408, PUAEN2003517, PUAEN2003954, PUAEN2004067, PUAEN2004083, PUAEN2004400, PUAEN2004511, PUAEN2004525, PUAEN2004875, PUAEN2005110, PUAEN2005247, PUAEN2005588, PUAEN2005930, PUAEN2006029, PUAEN2006328, PUAEN2006335, PUAEN2006578, PUAEN2006639, PUAEN2006761, PUAEN2007044, PUAEN2007350, PUAEN2007785, PUAEN2007898, PUAEN2008123, PUAEN2008228, PUAEN2008314, PUAEN2008515, PUAEN2008815, PUAEN2008939, PUAEN2008980, PUAEN2008985, PUAEN2009174, PUAEN2009348, PUAEN2009534, PUAEN2009655, PUAEN2009795, PUAEN2009852, PUAEN2010346, PUAEN2010824, RECTM1000051, RECTM1000141, RECTM2000220, RECTM2000349,

[2825] RECTM2000433, RECTM2001307, RECTM2001347, RECTM2001519, RECTM2001666, RECTM2001691, RECTM2001749, RECTM2002172, RECTM2002602, RECTM2002632, SYNOV1000049, SYNOV1000118, SYNOV1000128, SYNOV1000190, SYNOV1000256, SYNOV1000374, SYNOV2000152, SYNOV2000171, SYNOV2000173, SYNOV2000177, SYNOV2000178, SYNOV2000193, SYNOV2000251, SYNOV2000279, SYNOV2000291, SYNOV2000297, SYNOV2000397, SYNOV2000426, SYNOV2000601, SYNOV2000700, SYNOV2000820, SYNOV2000824, SYNOV2000923, SYNOV2001014, SYNOV2001035, SYNOV2001088, SYNOV2001111, SYNOV2001144, SYNOV2001212, SYNOV2001251, SYNOV2001300, SYNOV2001356, SYNOV2001374, SYNOV2001390, SYNOV2001451, SYNOV2001457, SYNOV2001468, SYNOV2001581, SYNOV2001660, SYNOV2003326,

[2826] SYNOV2005216, SYNOV2005448, SYNOV2005541, SYNOV2005673, SYNOV2005817, SYNOV2005962, SYNOV2006430, SYNOV2006620, SYNOV2007758, SYNOV2007965, SYNOV2008765, SYNOV2011233, SYNOV2012326, SYNOV2013365, SYNOV2013637, SYNOV2014157, SYNOV2014364, SYNOV2016124, SYNOV2016837, SYNOV2017179, SYNOV2018921, SYNOV2019280, SYNOV2020085, SYNOV2020463, SYNOV2021320, SYNOV2021953, SYNOV3000184, SYNOV3000231, SYNOV3000302, SYNOV3000345, SYNOV4000249, SYNOV4000472, SYNOV4000598, SYNOV4000706, SYNOV4001153, SYNOV4001224, SYNOV4001326, SYNOV4001342, SYNOV4001395, SYNOV4002001, SYNOV4002392, SYNOV4002875, SYNOV4002883, SYNOV4003174, SYNOV4003322, SYNOV4003681, SYNOV4003981, SYNOV4004184, SYNOV4004741, SYNOV4004823,

[2827] SYNOV4004914, SYNOV4005256, SYNOV4005570, SYNOV4005739, SYNOV4005889, SYNOV4005981, SYNOV4005989, SYNOV4006256, SYNOV4006542, SYNOV4007012, SYNOV4007215, SYNOV4007360, SYNOV4007430, SYNOV4007521, SYNOV4007553, SYNOV4007711, SYNOV4008245, SYNOV4008336, SYNOV4009129, SYNOV4009139, SYNOV4009298, T1ESE2000116, T1ESE2000609, T1ESE2000904, T1ESE2002665, TBAES2000004, TBAES2000116, TBAES2000255, TBAES2000315, TBAES2000352, TBAES2000932, TBAES2001171, TBAES2001220, TBAES2001229, TBAES2001258, TBAES2001296, TBAES2001492, TBAES2001553, TBAES2001751, TBAES2003435, TBAES2003492, TBAES2003550, TBAES2003702, TBAES2003917, TBAES2004055, TBAES2004105, TBAES2004939, TBAES2005157, TBAES2005361, TBAES2005543,

[2828] TBAES2006568, TBAES2006881, TBAES2007379, TBAES2007428, TBAES2007481, TBAES2007504, TBAES2007548, TBAES2007697, TBAES2007862, TBAES2007964, TBAES2008133, TCERX2000171, TCERX2000431, TCERX2000613, TCERX2000998, TCERX2002644, TCOLN1000037, TCOLN1000180, TCOLN2000139, TCOLN2000236, TCOLN2000641, TCOLN2001268, TCOLN2002047, TCOLN2002278, TESOP1000035, TESOP1000127, TESOP1000160, TESOP2000083, TESOP2000090, TESOP2000205, TESOP2000312, TESOP2000390, TESOP2000400, TESOP2000510, TESOP2000569, TESOP2000739, TESOP2000801, TESOP2001122, TESOP2001166, TESOP2001345, TESOP2001474, TESOP2001796, TESOP2001818, TESOP2001849, TESOP2001865, TESOP2001901, TESOP2001953, TESOP2002005, TESOP2002110, TESOP2002150,

[2829] TESOP2002273, TESOP2002451, TESOP2002489, TESOP2002539, TESOP2002545, TESOP2002804, TESOP2002950, TESOP2003273, TESOP2003308, TESOP2003553, TESOP2003753, TESOP2004110, TESOP2004114, TESOP2004173, TESOP2004214, TESOP2005199, TESOP2005285, TESOP2005485, TESOP2005498, TESOP2005579, TESOP2006041, TESOP2006053, TESOP2006060, TESOP2006068, TESOP2006110, TESOP2006398, TESOP2006704, TESOP2006746, TESOP2006865, TESOP2006893, TESOP2007041, TESOP2007052, TESOP2007262, TESOP2007384, TESOP2007636, TESOP2007674, TESOP2007688, TESOP2007725, TESOP2007912, TESOP2007978, TESOP2008127, TESOP2008552, TESOP2008556, TESOP2008563, TESOP2008820, TESOP2009121, TESOP2009201, TESOP2009247, TESOP2009555, TESTI1000018,

[2830] TESTI1000019, TESTI1000025, TESTI1000029, TESTI1000030, TESTI1000042, TESTI1000045, TESTI1000051, TESTI1000055, TESTI1000064, TESTI1000070, TESTI1000085, TESTI1000088, TESTI1000093, TESTI1000094, TESTI1000096, TESTI1000101, TESTI1000109, TESTI1000125, TESTI1000127, TESTI1000128, TESTI1000131, TESTI1000138, TESTI1000142, TESTI1000157, TESTI1000168, TESTI1000169, TESTI1000179, TESTI1000183, TESTI1000191, TESTI1000257, TESTI1000266, TESTI1000319, TESTI1000330, TESTI1000348, TESTI1000390, TESTI1000391, TESTI1000459, TESTI1000491, TESTI1000545, TESTI2000006, TESTI2000018, TESTI2000044, TESTI2000100, TESTI2000117, TESTI2000120, TESTI2000147, TESTI2000154, TESTI2000172, TESTI2000177, TESTI2000179,

[2831] TESTI2000207, TESTI2000208, TESTI2000221, TESTI2000238, TESTI2000253, TESTI2000272, TESTI2000278, TESTI2000349, TESTI2000356, TESTI2000358, TESTI2000372, TESTI2000427, TESTI2000431, TESTI2000435, TESTI2000443, TESTI2000452, TESTI2000462, TESTI2000489, TESTI2000520, TESTI2000571, TESTI2000591, TESTI2000600, TESTI2000616, TESTI2000627, TESTI2000644, TESTI2000671, TESTI2000683, TESTI2000689, TESTI2000695, TESTI2000699, TESTI2000707, TESTI2000745, TESTI2000756, TESTI2000762, TESTI2000784, TESTI2000808, TESTI2000819, TESTI2000830, TESTI2000840, TESTI2000849, TESTI2000850, TESTI2000874, TESTI2000883, TESTI2000909, TESTI2000951, TESTI2000970, TESTI2000981, TESTI2001008, TESTI2001049, TESTI2001082,

[2832] TESTI2001120, TESTI2001134, TESTI2001141, TESTI2001180, TESTI2001208, TESTI2001229, TESTI2001236, TESTI2001237, TESTI2001269, TESTI2001306, TESTI2001313, TESTI2001330, TESTI2001345, TESTI2001352, TESTI2001364, TESTI2001412, TESTI2001420, TESTI2001498, TESTI2001511, TESTI2001512, TESTI2001518, TESTI2001556, TESTI2001593, TESTI2001613, TESTI2001621, TESTI2001661, TESTI2001665, TESTI2001671, TESTI2001697, TESTI2001725, TESTI2001758, TESTI2001766, TESTI2001792, TESTI2001793, TESTI2001795, TESTI2001812, TESTI2001815, TESTI2001823, TESTI2001826, TESTI2001827, TESTI2001852, TESTI2001869, TESTI2001879, TESTI2001894, TESTI2001898, TESTI2001915, TESTI2001950, TESTI2001959, TESTI2001968, TESTI2001985,

[2833] TESTI2001991, TESTI2002002, TESTI2002012, TESTI2002036, TESTI2002048, TESTI2002057, TESTI2002081, TESTI2002090, TESTI2002105, TESTI2002149, TESTI2002216, TESTI2002223, TESTI2002245, TESTI2002251, TESTI2002256, TESTI2002264, TESTI2002282, TESTI2002293, TESTI2002294, TESTI2002326, TESTI2002351, TESTI2002361, TESTI2002365, TESTI2002369, TESTI2002406, TESTI2002415, TESTI2002423, TESTI2002453, TESTI2002461, TESTI2002465, TESTI2002467, TESTI2002498, TESTI2002516, TESTI2002544, TESTI2002578, TESTI2002580, TESTI2002618, TESTI2002632, TESTI2002676, TESTI2002690, TESTI2002698, TESTI2002700, TESTI2002707, TESTI2002724, TESTI2002729, TESTI2002752, TESTI2002753, TESTI2002789, TESTI2002802, TESTI2002806,

[2834] TESTI2002840, TESTI2002866, TESTI2002877, TESTI2002910, TESTI2002912, TESTI2002928, TESTI2002937, TESTI2002965, TESTI2002993, TESTI2003005, TESTI2003020, TESTI2003031, TESTI2003037, TESTI2003044, TESTI2003059, TESTI2003061, TESTI2003071, TESTI2003074, TESTI2003089, TESTI2003104, TESTI2003109, TESTI2003117, TESTI2003127, TESTI2003130, TESTI2003131, TESTI2003139, TESTI2003141, TESTI2003152, TESTI2003181, TESTI2003193, TESTI2003196, TESTI2003228, TESTI2003236, TESTI2003255, TESTI2003258, TESTI2003277, TESTI2003280, TESTI2003299, TESTI2003311, TESTI2003321, TESTI2003325, TESTI2003327, TESTI2003330, TESTI2003347, TESTI2003354, TESTI2003356, TESTI2003372, TESTI2003376, TESTI2003413, TESTI2003418,

[2835] TESTI2003419, TESTI2003432, TESTI2003475, TESTI2003476, TESTI2003498, TESTI2003512, TESTI2003539, TESTI2003541, TESTI2003545, TESTI2003551, TESTI2003574, TESTI2003579, TESTI2003580, TESTI2003589, TESTI2003596, TESTI2003598, TESTI2003615, TESTI2003625, TESTI2003638, TESTI2003649, TESTI2003692, TESTI2003718, TESTI2003727, TESTI2003756, TESTI2003768, TESTI2003781, TESTI2003787, TESTI2003824, TESTI2003827, TESTI2003894, TESTI2003911, TESTI2003914, TESTI2003940, TESTI2003962, TESTI2003998, TESTI2004031, TESTI2004073, TESTI2004080, TESTI2004085, TESTI2004089, TESTI2004111, TESTI2004119, TESTI2004122, TESTI2004153, TESTI2004163, TESTI2004169, TESTI2004207, TESTI2004215, TESTI2004227, TESTI2004229,

[2836] TESTI2004243, TESTI2004255, TESTI2004287, TESTI2004295, TESTI2004313, TESTI2004318, TESTI2004322, TESTI2004391, TESTI2004399, TESTI2004423, TESTI2004431, TESTI2004432, TESTI2004452, TESTI2004459, TESTI2004490, TESTI2004539, TESTI2004552, TESTI2004560, TESTI2004574, TESTI2004601, TESTI2004611, TESTI2004649, TESTI2004654, TESTI2004675, TESTI2004687, TESTI2004689, TESTI2004700, TESTI2004706, TESTI2004712, TESTI2004734, TESTI2004783, TESTI2004791, TESTI2004793, TESTI2004860, TESTI2004906, TESTI2004920, TESTI2004936, TESTI2004941, TESTI2004971, TESTI2004982, TESTI2004993, TESTI2004994, TESTI2004999, TESTI2005025, TESTI2005040, TESTI2005060, TESTI2005072, TESTI2005085, TESTI2005112, TESTI2005120,

[2837] TESTI2005153, TESTI2005155, TESTI2005173, TESTI2005267, TESTI2005268, TESTI2005280, TESTI2005307, TESTI2005326, TESTI2005363, TESTI2005376, TESTI2005378, TESTI2005380, TESTI2005391, TESTI2005395, TESTI2005396, TESTI2005415, TESTI2005470, TESTI2005492, TESTI2005564, TESTI2005568, TESTI2005584, TESTI2005588, TESTI2005590, TESTI2005603, TESTI2005609, TESTI2005610, TESTI2005630, TESTI2005672, TESTI2005683, TESTI2005690, TESTI2005692, TESTI2005703, TESTI2005720, TESTI2005731, TESTI2005739, TESTI2005742, TESTI2005767, TESTI2005775, TESTI2005784, TESTI2005788, TESTI2005827, TESTI2005835, TESTI2005860, TESTI2005892, TESTI2005908, TESTI2005911, TESTI2005933, TESTI2005937, TESTI2005948, TESTI2005979,

[2838] TESTI2005981, TESTI2005982, TESTI2005984, TESTI2005986, TESTI2005987, TESTI2006007, TESTI2006008, TESTI2006015, TESTI2006016, TESTI2006035, TESTI2006040, TESTI2006041, TESTI2006045, TESTI2006067, TESTI2006083, TESTI2006097, TESTI2006109, TESTI2006111, TESTI2006120, TESTI2006125, TESTI2006179, TESTI2006209, TESTI2006210, TESTI2006212, TESTI2006218, TESTI2006238, TESTI2006255, TESTI2006258, TESTI2006278, TESTI2006333, TESTI2006360, TESTI2006409, TESTI2006425, TESTI2006437, TESTI2006453, TESTI2006457, TESTI2006460, TESTI2006465, TESTI2006483, TESTI2006499, TESTI2006523, TESTI2006543, TESTI2006565, TESTI2006572, TESTI2006617, TESTI2006624, TESTI2006628, TESTI2006633, TESTI2006643, TESTI2006648,

[2839] TESTI2006659, TESTI2006660, TESTI2006665, TESTI2006667, TESTI2006677, TESTI2006720, TESTI2006735, TESTI2006744, TESTI2006748, TESTI2006774, TESTI2006853, TESTI2006866, TESTI2006872, TESTI2006877, TESTI2006879, TESTI2006894, TESTI2006940, TESTI2006955, TESTI2006978, TESTI2006979, TESTI2006990, TESTI2007040, TESTI2007074, TESTI2007078, TESTI2007113, TESTI2007152, TESTI2007163, TESTI2007183, TESTI2007211, TESTI2007220, TESTI2007234, TESTI2007311, TESTI2007320, TESTI2007346, TESTI2007358, TESTI2007402, TESTI2007405, TESTI2007452, TESTI2007464, TESTI2007466, TESTI2007480, TESTI2007490, TESTI2007502, TESTI2007524, TESTI2007533, TESTI2007576, TESTI2007613, TESTI2007657, TESTI2007685, TESTI2007692,

[2840] TESTI2007749, TESTI2007750, TESTI2007808, TESTI2007814, TESTI2007829, TESTI2007864, TESTI2007867, TESTI2007872, TESTI2007906, TESTI2007922, TESTI2007951, TESTI2007972, TESTI2007973, TESTI2008014, TESTI2008020, TESTI2008032, TESTI2008033, TESTI2008046, TESTI2008081, TESTI2008099, TESTI2008139, TESTI2008144, TESTI2008161, TESTI2008189, TESTI2008204, TESTI2008219, TESTI2008233, TESTI2008234, TESTI2008237, TESTI2008278, TESTI2008320, TESTI2008331, TESTI2008343, TESTI2008387, TESTI2008389, TESTI2008394, TESTI2008405, TESTI2008420, TESTI2008425, TESTI2008440, TESTI2008567, TESTI2008595, TESTI2008621, TESTI2008636, TESTI2008657, TESTI2008684, TESTI2008715, TESTI2008762, TESTI2008774, TESTI2008786,

[2841] TESTI2008822, TESTI2008835, TESTI2008840, TESTI2008847, TESTI2008884, TESTI2008901, TESTI2008929, TESTI2008946, TESTI2008960, TESTI2009018, TESTI2009091, TESTI2009097, TESTI2009136, TESTI2009185, TESTI2009190, TESTI2009217, TESTI2009239, TESTI2009325, TESTI2009388, TESTI2009390, TESTI2009400, TESTI2009402, TESTI2009412, TESTI2009423, TESTI2009447, TESTI2009462, TESTI2009474, TESTI2009477, TESTI2009497, TESTI2009502, TESTI2009511, TESTI2009520, TESTI2009544, TESTI2009545, TESTI2009551, TESTI2009577, TESTI2009585, TESTI2009588, TESTI2009683, TESTI2009727, TESTI2009739, TESTI2009812, TESTI2009835, TESTI2009853, TESTI2009935, TESTI2009977, TESTI2009987, TESTI2010009, TESTI2010154, TESTI2010180,

[2842] TESTI2010239, TESTI2010280, TESTI2010354, TESTI2010396, TESTI2010400, TESTI2010409, TESTI2010572, TESTI2010587, TESTI2010591, TESTI2010617, TESTI2010682, TESTI2010724, TESTI2010732, TESTI2010734, TESTI2010755, TESTI2010793, TESTI2010806, TESTI2010833, TESTI2010872, TESTI2011009, TESTI2011020, TESTI2011028, TESTI2011033, TESTI2011254, TESTI2011286, TESTI2011294, TESTI2011314, TESTI2011315, TESTI2011394, TESTI2011407, TESTI2011448, TESTI2011480, TESTI2011549, TESTI2011575, TESTI2011612, TESTI2011665, TESTI2011680, TESTI2011683, TESTI2011750, TESTI2011840, TESTI2011846, TESTI2011915, TESTI2011928, TESTI2011971, TESTI2012019, TESTI2012050, TESTI2012090, TESTI2012095, TESTI2012152, TESTI2012155,

[2843] TESTI2012171, TESTI2012207, TESTI2012231, TESTI2012244, TESTI2012289, TESTI2012308, TESTI2012356, TESTI2012387, TESTI2012394, TESTI2012444, TESTI2012511, TESTI2012528, TESTI2012544, TESTI2012550, TESTI2012571, TESTI2012592, TESTI2012617, TESTI2012628, TESTI2012812, TESTI2012834, TESTI2012835, TESTI2012861, TESTI2012900, TESTI2012915, TESTI2012922, TESTI2013001, TESTI2013012, TESTI2013053, TESTI2013144, TESTI2013163, TESTI2013169, TESTI2013212, TESTI2013231, TESTI2013257, TESTI2013264, TESTI2013268, TESTI2013322, TESTI2013381, TESTI2013382, TESTI2013401, TESTI2013427, TESTI2013468, TESTI2013497, TESTI2013545, TESTI2013546, TESTI2013566, TESTI2013601, TESTI2013604, TESTI2013607, TESTI2013610,

[2844] TESTI2013691, TESTI2013699, TESTI2013737, TESTI2013767, TESTI2013832, TESTI2013873, TESTI2013889, TESTI2014007, TESTI2014036, TESTI2014097, TESTI2014160, TESTI2014248, TESTI2014254, TESTI2014269, TESTI2014274, TESTI2014318, TESTI2014324, TESTI2014339, TESTI2014362, TESTI2014385, TESTI2014415, TESTI2014439, TESTI2014474, TESTI2014577, TESTI2014578, TESTI2014716, TESTI2014780, TESTI2014800, TESTI2014838, TESTI2014843, TESTI2014979, TESTI2014988, TESTI2015042, TESTI2015105, TESTI2015180, TESTI2015213, TESTI2015246, TESTI2015249, TESTI2015327, TESTI2015331, TESTI2015335, TESTI2015350, TESTI2015375, TESTI2015437, TESTI2015590, TESTI2015610, TESTI2015647, TESTI2015675, TESTI2015710, TESTI2015752,

[2845] TESTI2015830, TESTI2015914, TESTI2015938, TESTI2015947, TESTI2015962, TESTI2015987, TESTI2016046, TESTI2016101, TESTI2016162, TESTI2016197, TESTI2016278, TESTI2016298, TESTI2016331, TESTI2016337, TESTI2016410, TESTI2016421, TESTI2016509, TESTI2016568, TESTI2016583, TESTI2016599, TESTI2016629, TESTI2016663, TESTI2016667, TESTI2016688, TESTI2016701, TESTI2016758, TESTI2016848, TESTI2016863, TESTI2016888, TESTI2016896, TESTI2016922, TESTI2016942, TESTI2016950, TESTI2016996, TESTI2017017, TESTI2017028, TESTI2017035, TESTI2017069, TESTI2017089, TESTI2017102, TESTI2017107, TESTI2017113, TESTI2017125, TESTI2017256, TESTI2017305, TESTI2017311, TESTI2017396, TESTI2017507, TESTI2017537, TESTI2017582,

[2846] TESTI2017584, TESTI2017645, TESTI2017727, TESTI2017740, TESTI2017775, TESTI2017816, TESTI2017832, TESTI2017923, TESTI2017932, TESTI2017951, TESTI2018014, TESTI2018031, TESTI2018035, TESTI2018060, TESTI2018083, TESTI2018178, TESTI2018221, TESTI2018276, TESTI2018290, TESTI2018335, TESTI2018337, TESTI2018368, TESTI2018421, TESTI2018428, TESTI2018475, TESTI2018482, TESTI2018521, TESTI2018565, TESTI2018581, TESTI2018611, TESTI2018687, TESTI2018697, TESTI2018838, TESTI2018867, TESTI2018941, TESTI2018957, TESTI2018974, TESTI2018975, TESTI2019042, TESTI2019077, TESTI2019228, TESTI2019257, TESTI2019280, TESTI2019282, TESTI2019308, TESTI2019336, TESTI2019352, TESTI2019406, TESTI2019430, TESTI2019455,

[2847] TESTI2019481, TESTI2019488, TESTI2019501, TESTI2019648, TESTI2019669, TESTI2019697, TESTI2019729, TESTI2019760, TESTI2019787, TESTI2019794, TESTI2019854, TESTI2019859, TESTI2019860, TESTI2019872, TESTI2019911, TESTI2019917, TESTI2019975, TESTI2019998, TESTI2020012, TESTI2020029, TESTI2020071, TESTI2020084, TESTI2020265, TESTI2020283, TESTI2020316, TESTI2020344, TESTI2020379, TESTI2020426, TESTI2020445, TESTI2020510, TESTI2020515, TESTI2020525, TESTI2020579, TESTI2020717, TESTI2020840, TESTI2020871, TESTI2020905, TESTI2020906, TESTI2020946, TESTI2020956, TESTI2020981, TESTI2020999, TESTI2021003, TESTI2021038, TESTI2021057, TESTI2021077, TESTI2021112, TESTI2021114, TESTI2021116, TESTI2021118,

[2848] TESTI2021122, TESTI2021124, TESTI2021138, TESTI2021297, TESTI2021315, TESTI2021358, TESTI2021425, TESTI2021447, TESTI2021463, TESTI2021531, TESTI2021599, TESTI2021637, TESTI2021654, TESTI2021667, TESTI2021736, TESTI2021785, TESTI2021819, TESTI2021851, TESTI2021895, TESTI2021911, TESTI2021939, TESTI2021999, TESTI2022010, TESTI2022023, TESTI2022065, TESTI2022086, TESTI2022179, TESTI2022203, TESTI2022246, TESTI2022323, TESTI2022338, TESTI2022400, TESTI2022462, TESTI2022495, TESTI2022623, TESTI2022649, TESTI2022652, TESTI2022738, TESTI2022798, TESTI2022812, TESTI2022814, TESTI2022874, TESTI2022940, TESTI2022952, TESTI2023025, TESTI2023033, TESTI2023053, TESTI2023085, TESTI2023192, TESTI2023194,

[2849] TESTI2023214, TESTI2023254, TESTI2023386, TESTI2023414, TESTI2023427, TESTI2023436, TESTI2023599, TESTI2023752, TESTI2023800, TESTI2023861, TESTI2023903, TESTI2023942, TESTI2023947, TESTI2023951, TESTI2023968, TESTI2024009, TESTI2024090, TESTI2024125, TESTI2024153, TESTI2024192, TESTI2024267, TESTI2024283, TESTI2024299, TESTI2024419, TESTI2024422, TESTI2024443, TESTI2024446, TESTI2024473, TESTI2024476, TESTI2024498, TESTI2024560, TESTI2024567, TESTI2024586, TESTI2024598, TESTI2024641, TESTI2024648, TESTI2024718, TESTI2024744, TESTI2024844, TESTI2024864, TESTI2024936, TESTI2024978, TESTI2024999, TESTI2025006, TESTI2025013, TESTI2025022, TESTI2025063, TESTI2025117, TESTI2025144, TESTI2025161,

[2850] TESTI2025174, TESTI2025229, TESTI2025269, TESTI2025365, TESTI2025403, TESTI2025409, TESTI2025422, TESTI2025448, TESTI2025486, TESTI2025546, TESTI2025582, TESTI2025609, TESTI2025656, TESTI2025757, TESTI2025791, TESTI2025846, TESTI2025872, TESTI2025879, TESTI2025911, TESTI2025920, TESTI2025924, TESTI2026014, TESTI2026024, TESTI2026064, TESTI2026077, TESTI2026104, TESTI2026134, TESTI2026168, TESTI2026196, TESTI2026215, TESTI2026218, TESTI2026233, TESTI2026291, TESTI2026294, TESTI2026401, TESTI2026403, TESTI2026453, TESTI2026461, TESTI2026491, TESTI2026505, TESTI2026515, TESTI2026525, TESTI2026534, TESTI2026537, TESTI2026589, TESTI2026597, TESTI2026605, TESTI2026647, TESTI2026674, TESTI2026794,

[2851] TESTI2026824, TESTI2026854, TESTI2026925, TESTI2026936, TESTI2026957, TESTI2027013, TESTI2027019, TESTI2027108, TESTI2027165, TESTI2027171, TESTI2027173, TESTI2027179, TESTI2027185, TESTI2027206, TESTI2027238, TESTI2027239, TESTI2027243, TESTI2027296, TESTI2027378, TESTI2027411, TESTI2027450, TESTI2027496, TESTI2027503, TESTI2027562, TESTI2027615, TESTI2027645, TESTI2027730, TESTI2027736, TESTI2027791, TESTI2027820, TESTI2027828, TESTI2027840, TESTI2027909, TESTI2028098, TESTI2028151, TESTI2028242, TESTI2028253, TESTI2028254, TESTI2028269, TESTI2028290, TESTI2028296, TESTI2028384, TESTI2028426, TESTI2028488, TESTI2028523, TESTI2028583, TESTI2028613, TESTI2028659, TESTI2028662, TESTI2028670,

[2852] TESTI2028705, TESTI2028776, TESTI2028811, TESTI2028891, TESTI2028985, TESTI2028997, TESTI2029131, TESTI2029162, TESTI2029196, TESTI2029201, TESTI2029227, TESTI2029244, TESTI2029249, TESTI2029252, TESTI2029259, TESTI2029264, TESTI2029470, TESTI2029672, TESTI2029785, TESTI2029880, TESTI2030136, TESTI2030322, TESTI2030336, TESTI2030342, TESTI2030519, TESTI2030554, TESTI2030556, TESTI2030728, TESTI2030754, TESTI2030770, TESTI2030860, TESTI2030901, TESTI2030917, TESTI2030930, TESTI2031006, TESTI2031007, TESTI2031060, TESTI2031129, TESTI2031356, TESTI2031418, TESTI2031504, TESTI2031529, TESTI2031687, TESTI2031760, TESTI2031809, TESTI2031919, TESTI2031935, TESTI2031986, TESTI2032044, TESTI2032067,

[2853] TESTI2032079, TESTI2032643, TESTI2032681, TESTI2032761, TESTI2032768, TESTI2032774, TESTI2032828, TESTI2033031, TESTI2033242, TESTI2033254, TESTI2033300, TESTI2033395, TESTI2033453, TESTI2033505, TESTI2033520, TESTI2033641, TESTI2033710, TESTI2033905, TESTI2034187, TESTI2034243, TESTI2034249, TESTI2034307, TESTI2034357, TESTI2034401, TESTI2034407, TESTI2034506, TESTI2034520, TESTI2034718, TESTI2034730, TESTI2034749, TESTI2034767, TESTI2034774, TESTI2034777, TESTI2034785, TESTI2034799, TESTI2034847, TESTI2034913, TESTI2034916, TESTI2034931, TESTI2034953, TESTI2034997, TESTI2035003, TESTI2035078, TESTI2035084, TESTI2035107, TESTI2035121, TESTI2035124, TESTI2035183, TESTI2035236, TESTI2035262,

[2854] TESTI2035309, TESTI2035688, TESTI2035775, TESTI2035793, TESTI2035898, TESTI2035962, TESTI2035981, TESTI2035997, TESTI2036114, TESTI2036129, TESTI2036285, TESTI2036288, TESTI2036513, TESTI2036589, TESTI2036650, TESTI2036684, TESTI2036691, TESTI2036736, TESTI2036822, TESTI2036833, TESTI2036913, TESTI2036922, TESTI2036951, TESTI2036965, TESTI2036969, TESTI2037002, TESTI2037055, TESTI2037081, TESTI2037085, TESTI2037103, TESTI2037106, TESTI2037111, TESTI2037209, TESTI2037255, TESTI2037359, TESTI2037375, TESTI2037382, TESTI2037534, TESTI2037569, TESTI2037572, TESTI2037643, TESTI2037657, TESTI2037673, TESTI2037723, TESTI2037819, TESTI2037830, TESTI2037845, TESTI2037877, TESTI2037976, TESTI2038048,

[2855] TESTI2038065, TESTI2038104, TESTI2038275, TESTI2038388, TESTI2038573, TESTI2038596, TESTI2038623, TESTI2038644, TESTI2038733, TESTI2038858, TESTI2038958, TESTI2039025, TESTI2039026, TESTI2039038, TESTI2039041, TESTI2039060, TESTI2039113, TESTI2039121, TESTI2039177, TESTI2039209, TESTI2039225, TESTI2039227, TESTI2039276, TESTI2039342, TESTI2039353, TESTI2039544, TESTI2039613, TESTI2039707, TESTI2039732, TESTI2039738, TESTI2039776, TESTI2039867, TESTI2039908, TESTI2040018, TESTI2040094, TESTI2040102, TESTI2040128, TESTI2040143, TESTI2040297, TESTI2040372, TESTI2040377, TESTI2040424, TESTI2040642, TESTI2040815, TESTI2040897, TESTI2040944, TESTI2040964, TESTI2040983, TESTI2040989, TESTI2041330,

[2856] TESTI2041362, TESTI2041517, TESTI2041564, TESTI2041664, TESTI2041730, TESTI2041734, TESTI2041778, TESTI2041800, TESTI2041947, TESTI2041956, TESTI2041976, TESTI2042062, TESTI2042149, TESTI2042264, TESTI2042295, TESTI2042302, TESTI2042326, TESTI2042400, TESTI2042450, TESTI2042473, TESTI2042507, TESTI2042508, TESTI2042750, TESTI2042783, TESTI2042806, TESTI2042928, TESTI2042946, TESTI2042958, TESTI2043275, TESTI2043277, TESTI2043282, TESTI2043313, TESTI2043477, TESTI2043585, TESTI2043758, TESTI2043817, TESTI2043857, TESTI2043866, TESTI2043869, TESTI2044064, TESTI2044118, TESTI2044194, TESTI2044276, TESTI2044306, TESTI2044309, TESTI2044413, TESTI2044418, TESTI2044754, TESTI2044788, TESTI2044796,

[2857] TESTI2044833, TESTI2044892, TESTI2044920, TESTI2044968, TESTI2045139, TESTI2045155, TESTI2045171, TESTI2045199, TESTI2045353, TESTI2045509, TESTI2045562, TESTI2045611, TESTI2045819, TESTI2045850, TESTI2045920, TESTI2045964, TESTI2045983, TESTI2046100, TESTI2046188, TESTI2046347, TESTI2046352, TESTI2046358, TESTI2046439, TESTI2046535, TESTI2046536, TESTI2046552, TESTI2046569, TESTI2046686, TESTI2046721, TESTI2046732, TESTI2046786, TESTI2046797, TESTI2046863, TESTI2046872, TESTI2047071, TESTI2047141, TESTI2047147, TESTI2047153, TESTI2047212, TESTI2047342, TESTI2047383, TESTI2047792, TESTI2047801, TESTI2047818, TESTI2047824, TESTI2047885, TESTI2047930, TESTI2048105, TESTI2048109, TESTI2048465,

[2858] TESTI2048603, TESTI2048898, TESTI2049041, TESTI2049062, TESTI2049206, TESTI2049246, TESTI2049277, TESTI2049422, TESTI2049452, TESTI2049469, TESTI2049553, TESTI2049576, TESTI2049857, TESTI2049956, TESTI2050137, TESTI2050681, TESTI2050780, TESTI2050987, TESTI2051148, TESTI2051177, TESTI2051279, TESTI2051488, TESTI2051543, TESTI2051627, TESTI2051742, TESTI2051767, TESTI2051791, TESTI2051806, TESTI2051867, TESTI2051873, TESTI2052110, TESTI2052202, TESTI2052211, TESTI2052256, TESTI2052288, TESTI2052525, TESTI2052670, TESTI2052693, TESTI2052698, TESTI2052799, TESTI2052822, TESTI2052985, TESTI2053151, TESTI2053242, TESTI2053399, TESTI2053526, TESTI2053561, TESTI2053621, TESTI2053667, TESTI2053723,

[2859] TESTI3000002, TESTI3000005, TESTI4000068, TESTI4000079, TESTI4000093, TESTI4000134, TESTI4000137, TESTI4000153, TESTI4000155, TESTI4000157, TESTI4000183, TESTI4000214, TESTI4000215, TESTI4000228, TESTI4000250, TESTI4000288, TESTI4000319, TESTI4000349, TESTI4000370, TESTI4000394, TESTI4000434, TESTI4000462, TESTI4000530, TESTI4000534, TESTI4000598, TESTI4000600, TESTI4000621, TESTI4000703, TESTI4000724, TESTI4000957, TESTI4000970, TESTI4001036, TESTI4001037, TESTI4001060, TESTI4001106, TESTI4001148, TESTI4001176, TESTI4001195, TESTI4001201, TESTI4001348, TESTI4001441, TESTI4001467, TESTI4001473, TESTI4001517, TESTI4001527, TESTI4001561, TESTI4001569, TESTI4001604, TESTI4001665, TESTI4001679,

[2860] TESTI4001795, TESTI4001923, TESTI4001925, TESTI4001984, TESTI4002003, TESTI4002072, TESTI4002141, TESTI4002195, TESTI4002290, TESTI4002319, TESTI4002491, TESTI4002520, TESTI4002552, TESTI4002647, TESTI4002703, TESTI4002754, TESTI4002799, TESTI4002868, TESTI4002878, TESTI4002889, TESTI4002988, TESTI4003150, TESTI4003179, TESTI4003279, TESTI4003319, TESTI4003404, TESTI4003565, TESTI4003574, TESTI4003579, TESTI4003602, TESTI4003703, TESTI4003733, TESTI4003796, TESTI4003944, TESTI4004003, TESTI4004031, TESTI4004200, TESTI4004210, TESTI4004539, TESTI4004626, TESTI4004653, TESTI4004695, TESTI4004722, TESTI4004887, TESTI4004917, TESTI4005015, TESTI4005039, TESTI4005133, TESTI4005158, TESTI4005317,

[2861] TESTI4005322, TESTI4005399, TESTI4005470, TESTI4005500, TESTI4005543, TESTI4005628, TESTI4005801, TESTI4005805, TESTI4005857, TESTI4005961, TESTI4006053, TESTI4006079, TESTI4006112, TESTI4006137, TESTI4006148, TESTI4006219, TESTI4006234, TESTI4006308, TESTI4006326, TESTI4006393, TESTI4006407, TESTI4006412, TESTI4006420, TESTI4006441, TESTI4006473, TESTI4006539, TESTI4006546, TESTI4006567, TESTI4006704, TESTI4006728, TESTI4006802, TESTI4006819, TESTI4007064, TESTI4007163, TESTI4007176, TESTI4007203, TESTI4007239, TESTI4007369, TESTI4007373, TESTI4007382, TESTI4007404, TESTI4007489, TESTI4007565, TESTI4007671, TESTI4007775, TESTI4007778, TESTI4007799, TESTI4007810, TESTI4007965, TESTI4008007,

[2862] TESTI4008018, TESTI4008050, TESTI4008058, TESTI4008086, TESTI4008097, TESTI4008176, TESTI4008209, TESTI4008219, TESTI4008250, TESTI4008302, TESTI4008305, TESTI4008401, TESTI4008417, TESTI4008429, TESTI4008573, TESTI4008797, TESTI4008816, TESTI4008840, TESTI4008935, TESTI4008993, TESTI4009022, TESTI4009028, TESTI4009034, TESTI4009123, TESTI4009160, TESTI4009215, TESTI4009283, TESTI4009306, TESTI4009374, TESTI4009406, TESTI4009454, TESTI4009457, TESTI4009501, TESTI4009563, TESTI4009608, TESTI4009638, TESTI4009752, TESTI4009881, TESTI4009886, TESTI4009928, TESTI4010076, TESTI4010082, TESTI4010095, TESTI4010211, TESTI4010377, TESTI4010475, TESTI4010544, TESTI4010713, TESTI4010721, TESTI4010789,

[2863] TESTI4010817, TESTI4010831, TESTI4010902, TESTI4010928, TESTI4010979, TESTI4011070, TESTI4011072, TESTI4011084, TESTI4011118, TESTI4011246, TESTI4011484, TESTI4011505, TESTI4011532, TESTI4011616, TESTI4011744, TESTI4011745, TESTI4011829, TESTI4011926, TESTI4011956, TESTI4012010, TESTI4012086, TESTI4012258, TESTI4012293, TESTI4012329, TESTI4012382, TESTI4012406, TESTI4012448, TESTI4012451, TESTI4012505, TESTI4012556, TESTI4012623, TESTI4012646, TESTI4012679, TESTI4012911, TESTI4012956, TESTI4012960, TESTI4013365, TESTI4013369, TESTI4013410, TESTI4013602, TESTI4013667, TESTI4013675, TESTI4013685, TESTI4013735, TESTI4013742, TESTI4013774, TESTI4013817, TESTI4013830, TESTI4013852, TESTI4013894,

[2864] TESTI4013924, TESTI4013960, TESTI4013962, TESTI4014159, TESTI4014175, TESTI4014265, TESTI4014276, TESTI4014306, TESTI4014392, TESTI4014415, TESTI4014445, TESTI4014553, TESTI4014661, TESTI4014694, TESTI4014801, TESTI4014818, TESTI4014891, TESTI4014908, TESTI4014924, TESTI4014932, TESTI4014977, TESTI4015012, TESTI4015129, TESTI4015145, TESTI4015204, TESTI4015263, TESTI4015293, TESTI4015299, TESTI4015339, TESTI4015398, TESTI4015442, TESTI4015471, TESTI4015477, TESTI4015600, TESTI4015646, TESTI4015681, TESTI4015688, TESTI4015790, TESTI4016110, TESTI4016238, TESTI4016551, TESTI4016812, TESTI4016822, TESTI4016865, TESTI4016882, TESTI4016925, TESTI4017001, TESTI4017116, TESTI4017137, TESTI4017229,

[2865] TESTI4017254, TESTI4017269, TESTI4017380, TESTI4017382, TESTI4017543, TESTI4017575, TESTI4017647, TESTI4017714, TESTI4017763, TESTI4017848, TESTI4017854, TESTI4017901, TESTI4017961, TESTI4017984, TESTI4018101, TESTI4018152, TESTI4018208, TESTI4018382, TESTI4018436, TESTI4018506, TESTI4018555, TESTI4018751, TESTI4018806, TESTI4018835, TESTI4018859, TESTI4018881, TESTI4018886, TESTI4018938, TESTI4019140, TESTI4019149, TESTI4019299, TESTI4019417, TESTI4019440, TESTI4019566, TESTI4019657, TESTI4019756, TESTI4019843, TESTI4020092, TESTI4020102, TESTI4020342, TESTI4020460, TESTI4020596, TESTI4020806, TESTI4020819, TESTI4020920, TESTI4021129, TESTI4021197, TESTI4021294, TESTI4021377, TESTI4021456,

[2866] TESTI4021491, TESTI4021569, TESTI4021713, TESTI4021821, TESTI4022158, TESTI4022577, TESTI4022716, TESTI4022873, TESTI4023096, TESTI4023172, TESTI4023546, TESTI4023555, TESTI4023654, TESTI4023722, TESTI4023762, TESTI4023942, TESTI4024096, TESTI4024240, TESTI4024245, TESTI4024294, TESTI4024344, TESTI4024387, TESTI4024420, TESTI4024494, TESTI4024740, TESTI4024874, TESTI4024890, TESTI4024907, TESTI4024930, TESTI4025062, TESTI4025268, TESTI4025401, TESTI4025494, TESTI4025547, TESTI4025731, TESTI4025797, TESTI4025865, TESTI4025908, TESTI4025920, TESTI4026079, TESTI4026080, TESTI4026192, TESTI4026207, TESTI4026295, TESTI4026390, TESTI4026456, TESTI4026510, TESTI4026524, TESTI4026680, TESTI4026700,

[2867] TESTI4026762, TESTI4026785, TESTI4027139, TESTI4027170, TESTI4027262, TESTI4027516, TESTI4027557, TESTI4027660, TESTI4027821, TESTI4027969, TESTI4028042, TESTI4028059, TESTI4028062, TESTI4028182, TESTI4028429, TESTI4028612, TESTI4028692, TESTI4028809, TESTI4028823, TESTI4028880, TESTI4028904, TESTI4028938, TESTI4028958, TESTI4028983, TESTI4029023, TESTI4029348, TESTI4029370, TESTI4029528, TESTI4029651, TESTI4029671, TESTI4029676, TESTI4029690, TESTI4029731, TESTI4029743, TESTI4030069, TESTI4030159, TESTI4030319, TESTI4030505, TESTI4030603, TESTI4030669, TESTI4030673, TESTI4030864, TESTI4031066, TESTI4031173, TESTI4031335, TESTI4031745, TESTI4031818, TESTI4032090, TESTI4032112, TESTI4032128,

[2868] TESTI4032270, TESTI4032375, TESTI4032834, TESTI4032856, TESTI4032895, TESTI4032913, TESTI4033146, TESTI4033177, TESTI4033433, TESTI4033690, TESTI4034172, TESTI4034212, TESTI4034432, TESTI4034495, TESTI4034632, TESTI4034633, TESTI4034912, TESTI4034973, TESTI4035063, TESTI4035065, TESTI4035498, TESTI4035508, TESTI4035581, TESTI4035602, TESTI4035637, TESTI4035649, TESTI4035770, TESTI4035872, TESTI4035895, TESTI4035898, TESTI4035989, TESTI4036012, TESTI4036042, TESTI4036048, TESTI4036315, TESTI4036319, TESTI4036449, TESTI4036767, TESTI4036909, TESTI4037066, TESTI4037188, TESTI4037228, TESTI4037244, TESTI4037727, TESTI4037949, TESTI4038047, TESTI4038099, TESTI4038156, TESTI4038223, TESTI4038258,

[2869] TESTI4038284, TESTI4038339, TESTI4038492, TESTI4038721, TESTI4038758, TESTI4038779, TESTI4038818, TESTI4039038, TESTI4039086, TESTI4039451, TESTI4039575, TESTI4039659, TESTI4039744, TESTI4039904, TESTI4040197, TESTI4040363, TESTI4040535, TESTI4040559, TESTI4040598, TESTI4040800, TESTI4040804, TESTI4040939, TESTI4040956, TESTI4041049, TESTI4041053, TESTI4041086, TESTI4041099, TESTI4041143, TESTI4041482, TESTI4041519, TESTI4041624, TESTI4041629, TESTI4041832, TESTI4041844, TESTI4041903, TESTI4041954, TESTI4041984, TESTI4041985, TESTI4041986, TESTI4042098, TESTI4042420, TESTI4042440, TESTI4042444, TESTI4042711, TESTI4042846, TESTI4043067, TESTI4043129, TESTI4043166, TESTI4043203, TESTI4043223,

[2870] TESTI4043371, TESTI4043378, TESTI4043512, TESTI4043551, TESTI4043710, TESTI4043947, TESTI4044035, TESTI4044076, TESTI4044084, TESTI4044123, TESTI4044186, TESTI4044234, TESTI4044291, TESTI4044296, TESTI4044300, TESTI4044682, TESTI4044770, TESTI4045168, TESTI4045312, TESTI4045330, TESTI4045470, TESTI4045701, TESTI4045908, TESTI4045955, TESTI4045982, TESTI4046073, TESTI4046090, TESTI4046240, TESTI4046245, TESTI4046253, TESTI4046282, TESTI4046328, TESTI4046450, TESTI4046457, TESTI4046487, TESTI4046502, TESTI4046523, TESTI4046819, TESTI4046873, TESTI4046884, TESTI4046896, TESTI4046903, TESTI4046962, TESTI4047069, TESTI4047119, TESTI4047305, TESTI4047328, TESTI4047437, TESTI4047569, TESTI4047746,

[2871] TESTI4047808, THYMU1000002, THYMU1000016, THYMU1000017, THYMU1000025, THYMU1000029, THYMU1000033, THYMU1000041, THYMU1000060, THYMU1000074, THYMU1000098, THYMU1000105, THYMU1000136, THYMU1000142, THYMU1000144, THYMU1000158, THYMU1000176, THYMU1000179, THYMU1000191, THYMU1000198, THYMU1000217, THYMU1000240, THYMU1000242, THYMU1000291, THYMU1000316, THYMU1000318, THYMU1000331, THYMU1000336, THYMU1000366, THYMU1000382, THYMU1000393, THYMU1000394, THYMU1000399, THYMU1000426, THYMU1000440, THYMU1000459, THYMU1000491, THYMU1000496, THYMU1000499, THYMU1000527, THYMU1000532, THYMU1000536, THYMU1000554, THYMU1000558, THYMU1000576, THYMU1000600, THYMU1000677, THYMU1000692, THYMU2000022, THYMU2000032,

[2872] THYMU2000138, THYMU2000140, THYMU2000155, THYMU2000162, THYMU2000171, THYMU2000176, THYMU2000179, THYMU2000231, THYMU2000236, THYMU2000276, THYMU2000280, THYMU2000317, THYMU2000368, THYMU2000369, THYMU2000418, THYMU2000436, THYMU2000440, THYMU2000489, THYMU2000492, THYMU2000519, THYMU2000570, THYMU2000602, THYMU2000660, THYMU2000671, THYMU2000702, THYMU2000767, THYMU2000800, THYMU2000879, THYMU2000932, THYMU2000946, THYMU2000950, THYMU2000971, THYMU2000982, THYMU2000990, THYMU2001007, THYMU2001018, THYMU2001053, THYMU2001071, THYMU2001090, THYMU2001139, THYMU2001202, THYMU2001203, THYMU2001256, THYMU2001270, THYMU2001291, THYMU2001314, THYMU2001325, THYMU2001357, THYMU2001381, THYMU2001422,

[2873] THYMU2001443, THYMU2001515, THYMU2001521, THYMU2001556, THYMU2001622, THYMU2001727, THYMU2001825, THYMU2001868, THYMU2001898, THYMU2001900, THYMU2001916, THYMU2001926, THYMU2001989, THYMU2002023, THYMU2002037, THYMU2002080, THYMU2002109, THYMU2002154, THYMU2002157, THYMU2002162, THYMU2002177, THYMU2002203, THYMU2002229, THYMU2002242, THYMU2002338, THYMU2002356, THYMU2002376, THYMU2002384, THYMU2002450, THYMU2002490, THYMU2002548, THYMU2002695, THYMU2002745, THYMU2002789, THYMU2002792, THYMU2002815, THYMU2002841, THYMU2002852, THYMU2002910, THYMU2002950, THYMU2003069, THYMU2003107, THYMU2003124, THYMU2003166, THYMU2003232, THYMU2003242, THYMU2003249, THYMU2003270, THYMU2003282, THYMU2003336,

[2874] THYMU2003366, THYMU2003397, THYMU2003440, THYMU2003470, THYMU2003479, THYMU2003632, THYMU2003650, THYMU2003700, THYMU2003760, THYMU2003803, THYMU2003855, THYMU2003907, THYMU2004003, THYMU2004008, THYMU2004042, THYMU2004108, THYMU2004111, THYMU2004123, THYMU2004139, THYMU2004169, THYMU2004284, THYMU2004336, THYMU2004344, THYMU2004356, THYMU2004452, THYMU2004508, THYMU2004512, THYMU2004635, THYMU2004639, THYMU2004668, THYMU2004677, THYMU2004688, THYMU2004693, THYMU2004835, THYMU2004843, THYMU2004916, THYMU2004986, THYMU2005001, THYMU2005003, THYMU2005046, THYMU2005134, THYMU2005156, THYMU2005190, THYMU2005225, THYMU2005240, THYMU2005246, THYMU2005270, THYMU2005283, THYMU2005303, THYMU2005321,

[2875] THYMU2005356, THYMU2005369, THYMU2005480, THYMU2005482, THYMU2005507, THYMU2005545, THYMU2005574, THYMU2005576, THYMU2005748, THYMU2005759, THYMU2005807, THYMU2005815, THYMU2005855, THYMU2005881, THYMU2005948, THYMU2005997, THYMU2006001, THYMU2006048, THYMU2006098, THYMU2006160, THYMU2006170, THYMU2006252, THYMU2006261, THYMU2006277, THYMU2006303, THYMU2006324, THYMU2006350, THYMU2006357, THYMU2006365, THYMU2006420, THYMU2006468, THYMU2006505, THYMU2006666, THYMU2006712, THYMU2006913, THYMU2006946, THYMU2006965, THYMU2007025, THYMU2007036, THYMU2007095, THYMU2007112, THYMU2007146, THYMU2007179, THYMU2007258, THYMU2007307, THYMU2007308, THYMU2007339, THYMU2007350, THYMU2007384, THYMU2007493,

[2876] THYMU2007521, THYMU2007528, THYMU2007530, THYMU2007532, THYMU2007561, THYMU2007571, THYMU2007635, THYMU2007658, THYMU2007667, THYMU2007725, THYMU2007729, THYMU2007802, THYMU2007824, THYMU2007854, THYMU2007952, THYMU2007969, THYMU2008035, THYMU2008036, THYMU2008049, THYMU2008072, THYMU2008111, THYMU2008145, THYMU2008149, THYMU2008185, THYMU2008191, THYMU2008207, THYMU2008226, THYMU2008282, THYMU2008339, THYMU2008350, THYMU2008351, THYMU2008383, THYMU2008452, THYMU2008643, THYMU2008691, THYMU2008714, THYMU2008725, THYMU2008727, THYMU2008781, THYMU2008799, THYMU2008876, THYMU2008910, THYMU2008917, THYMU2008928, THYMU2008990, THYMU2008994, THYMU2009023, THYMU2009046, THYMU2009101, THYMU2009104,

[2877] THYMU2009134, THYMU2009157, THYMU2009181, THYMU2009338, THYMU2009425, THYMU2009516, THYMU2009526, THYMU2009546, THYMU2009592, THYMU2009596, THYMU2009835, THYMU2009906, THYMU2009948, THYMU2010030, THYMU2010041, THYMU2010046, THYMU2010059, THYMU2010082, THYMU2010094, THYMU2010161, THYMU2010192, THYMU2010637, THYMU2010671, THYMU2010699, THYMU2010705, THYMU2010779, THYMU2010816, THYMU2010831, THYMU2010848, THYMU2011053, THYMU2011072, THYMU2011096, THYMU2011118, THYMU2011142, THYMU2011183, THYMU2011257, THYMU2011259, THYMU2011295, THYMU2011308, THYMU2011390, THYMU2011431, THYMU2011447, THYMU2011538, THYMU2011548, THYMU2011551, THYMU2011564, THYMU2011573, THYMU2011585, THYMU2011621, THYMU2011666,

[2878] THYMU2011736, THYMU2011785, THYMU2011806, THYMU2011852, THYMU2011875, THYMU2011881, THYMU2011937, THYMU2011939, THYMU2012002, THYMU2012024, THYMU2012073, THYMU2012104, THYMU2012113, THYMU2012273, THYMU2012401, THYMU2012507, THYMU2012565, THYMU2012574, THYMU2012625, THYMU2012631, THYMU2012665, THYMU2012701, THYMU2012807, THYMU2012826, THYMU2012882, THYMU2012891, THYMU2012902, THYMU2012919, THYMU2013023, THYMU2013047, THYMU2013051, THYMU2013089, THYMU2013136, THYMU2013170, THYMU2013364, THYMU2013386, THYMU2013426, THYMU2013578, THYMU2013648, THYMU2013705, THYMU2013757, THYMU2013779, THYMU2013863, THYMU2013950, THYMU2013981, THYMU2014067, THYMU2014068, THYMU2014183, THYMU2014204, THYMU2014297,

[2879] THYMU2014323, THYMU2014327, THYMU2014353, THYMU2014500, THYMU2014599, THYMU2014762, THYMU2014777, THYMU2014801, THYMU2014901, THYMU2014923, THYMU2015019, THYMU2015161, THYMU2015316, THYMU2015321, THYMU2015439, THYMU2015441, THYMU2015479, THYMU2015775, THYMU2015825, THYMU2015918, THYMU2015943, THYMU2015984, THYMU2016113, THYMU2016164, THYMU2016204, THYMU2016219, THYMU2016360, THYMU2016496, THYMU2016523, THYMU2016840, THYMU2016968, THYMU2017008, THYMU2017010, THYMU2017023, THYMU2017085, THYMU2017099, THYMU2017158, THYMU2017162, THYMU2017215, THYMU2017362, THYMU2017366, THYMU2017398, THYMU2017449, THYMU2017479, THYMU2017522, THYMU2017526, THYMU2017601, THYMU2017675, THYMU2017707, THYMU2017831,

[2880] THYMU2017844, THYMU2017878, THYMU2017948, THYMU2018028, THYMU2018071, THYMU2018189, THYMU2018197, THYMU2018384, THYMU2018455, THYMU2018547, THYMU2018565, THYMU2018673, THYMU2018721, THYMU2018772, THYMU2018819, THYMU2018841, THYMU2018997, THYMU2019021, THYMU2019054, THYMU2019197, THYMU2019210, THYMU2019364, THYMU2019436, THYMU2019442, THYMU2019587, THYMU2019599, THYMU2019686, THYMU2019813, THYMU2020198, THYMU2020289, THYMU2020416, THYMU2020491, THYMU2020499, THYMU2020560, THYMU2020667, THYMU2020830, THYMU2020883, THYMU2020959, THYMU2021361, THYMU2021509, THYMU2021597, THYMU2021684, THYMU2021714, THYMU2022213, THYMU2022289, THYMU2022660, THYMU2022854, THYMU2022922, THYMU2023209, THYMU2023264,

[2881] THYMU2023576, THYMU2023711, THYMU2023900, THYMU2023943, THYMU2023967, THYMU2024071, THYMU2024185, THYMU2024207, THYMU2024616, THYMU2024684, THYMU2025042, THYMU2025189, THYMU2025319, THYMU2025325, THYMU2025406, THYMU2025557, THYMU2025572, THYMU2025707, THYMU2025849, THYMU2025909, THYMU2025939, THYMU2026182, THYMU2026350, THYMU2026530, THYMU2026531, THYMU2026835, THYMU2026904, THYMU2027053, THYMU2027168, THYMU2027249, THYMU2027282, THYMU2027497, THYMU2027695, THYMU2027734, THYMU2027894, THYMU2027996, THYMU2028041, THYMU2028368, THYMU2028379, THYMU2028394, THYMU2028412, THYMU2028632, THYMU2028724, THYMU2028739, THYMU2028942, THYMU2028978, THYMU2029134, THYMU2029676, THYMU2029688, THYMU2029788,

[2882] THYMU2030068, THYMU2030226, THYMU2030264, THYMU2030462, THYMU2030543, THYMU2030637, THYMU2030655, THYMU2030796, THYMU2030912, THYMU2030982, THYMU2031046, THYMU2031139, THYMU2031218, THYMU2031249, THYMU2031258, THYMU2031341, THYMU2031368, THYMU2031579, THYMU2031847, THYMU2031890, THYMU2031994, THYMU2032035, THYMU2032080, THYMU2032150, THYMU2032155, THYMU2032358, THYMU2032437, THYMU2032601, THYMU2032655, THYMU2032696, THYMU2032715, THYMU2032732, THYMU2032825, THYMU2032976, THYMU2033053, THYMU2033059, THYMU2033070, THYMU2033079, THYMU2033085, THYMU2033104, THYMU2033227, THYMU2033308, THYMU2033401, THYMU2033583, THYMU2033755, THYMU2033787, THYMU2033816, THYMU2034182, THYMU2034279, THYMU2034314,

[2883] THYMU2034338, THYMU2034917, THYMU2035064, THYMU2035078, THYMU2035101, THYMU2035319, THYMU2035321, THYMU2035388, THYMU2035400, THYMU2035554, THYMU2035710, THYMU2035735, THYMU2036058, THYMU2036105, THYMU2036207, THYMU2036215, THYMU2036252, THYMU2036265, THYMU2036366, THYMU2036459, THYMU2036461, THYMU2036604, THYMU2036653, THYMU2037081, THYMU2037208, THYMU2037226, THYMU2037233, THYMU2037234, THYMU2037348, THYMU2037406, THYMU2037965, THYMU2038058, THYMU2038189, THYMU2038199, THYMU2038220, THYMU2038301, THYMU2038369, THYMU2038389, THYMU2038615, THYMU2038636, THYMU2038739, THYMU2038772, THYMU2038797, THYMU2038906, THYMU2039305, THYMU2039315, THYMU2039334, THYMU2039350, THYMU2039411, THYMU2039634,

[2884] THYMU2039719, THYMU2039780, THYMU2039788, THYMU2039989, THYMU2040029, THYMU2040110, THYMU2040114, THYMU2040140, THYMU2040412, THYMU2040427, THYMU2040824, THYMU2040925, THYMU2041007, THYMU2041015, THYMU2041252, THYMU3000028, THYMU3000036, THYMU3000037, THYMU3000082, THYMU3000194, THYMU3000224, THYMU3000269, THYMU3000306, THYMU3000360, THYMU3000390, THYMU3000420, THYMU3000490, THYMU3000504, THYMU3000542, THYMU3000655, THYMU3000776, THYMU3000826, THYMU3000841, THYMU3001077, THYMU3001082, THYMU3001083, THYMU3001133, THYMU3001151, THYMU3001379, THYMU3001472, THYMU3001593, THYMU3001883, THYMU3001939, THYMU3001991, THYMU3002452, THYMU3002578, THYMU3002661, THYMU3003092, THYMU3003212, THYMU3003309,

[2885] THYMU3003350, THYMU3003403, THYMU3003763, THYMU3003865, THYMU3003958, THYMU3003965, THYMU3004157, THYMU3004628, THYMU3004632, THYMU3004835, THYMU3004866, THYMU3005050, THYMU3005378, THYMU3005407, THYMU3005415, THYMU3005427, THYMU3005482, THYMU3005491, THYMU3005629, THYMU3005696, THYMU3006118, THYMU3006132, THYMU3006168, THYMU3006172, THYMU3006371, THYMU3006485, THYMU3006640, THYMU3006767, THYMU3006811, THYMU3006963, THYMU3007137, THYMU3007308, THYMU3007368, THYMU3007423, THYMU3007559, THYMU3007845, THYMU3008060, THYMU3008105, THYMU3008136, THYMU3008171, THYMU3008216, THYMU3008436, THYMU3008672, THYMU3008883, THYMU3008935, THYMU3009006, THYMU3009255, THYMU3009391, THYMU3009643, THYMU3009755,

[2886] THYMU3010247, THYMU3011012, THYMU3011081, THYMU3011244, THYMU3011360, THYMU3011534, THYMU3011543, THYMU3011556, THYMU3011717, THYMU3011827, THYMU3012402, THYMU3012907, THYMU3012983, THYMU3013114, THYMU3013197, THYMU3013241, THYMU3013470, THYMU3013785, THYMU3013897, THYMU3014038, THYMU3014173, THYMU3014372, THYMU3014555, THYMU3014620, THYMU3014701, THYMU3015042, THYMU3015457, THYMU3015571, THYMU3015592, THYMU3015625, THYMU3015647, THYMU3015962, THYMU3016022, THYMU3016518, THYMU3016797, THYMU3016822, THYMU3016850, THYMU3017562, THYMU3017688, THYMU3017689, THYMU3017761, THYMU3018151, THYMU3018896, THYMU3019095, THYMU3019476, THYMU3019605, THYMU3019916, THYMU3020221, THYMU3020595, THYMU3020713,

[2887] THYMU3020856, THYMU3020869, THYMU3020970, THYMU3021404, THYMU3021586, THYMU3021755, THYMU3021900, THYMU3022211, THYMU3022434, THYMU3022528, THYMU3022668, THYMU3022982, THYMU3023107, THYMU3023211, THYMU3023216, THYMU3023394, THYMU3023400, THYMU3023797, THYMU3024164, THYMU3024339, THYMU3024602, THYMU3024879, THYMU3025118, THYMU3025313, THYMU3025642, THYMU3025683, THYMU3025772, THYMU3025865, THYMU3026000, THYMU3026350, THYMU3026479, THYMU3026532, THYMU3026783, THYMU3026869, THYMU3027251, THYMU3027540, THYMU3027655, THYMU3027671, THYMU3028075, THYMU3028410, THYMU3028461, THYMU3028702, THYMU3029188, THYMU3029318, THYMU3029421, THYMU3029719, THYMU3029774, THYMU3029832, THYMU3030072, THYMU3030231,

[2888] THYMU3030706, THYMU3030710, THYMU3030752, THYMU3031146, THYMU3031402, THYMU3031610, THYMU3031612, THYMU3031868, THYMU3031878, THYMU3032032, THYMU3033402, THYMU3033626, THYMU3033630, THYMU3033649, THYMU3033754, THYMU3033759, THYMU3034078, THYMU3034099, THYMU3034453, THYMU3034616, THYMU3034671, THYMU3034853, THYMU3034867, THYMU3034983, THYMU3036200, THYMU3036310, THYMU3036934, THYMU3036953, THYMU3037052, THYMU3037192, THYMU3037617, THYMU3037772, THYMU3037827, THYMU3037836, THYMU3037856, THYMU3037867, THYMU3037909, THYMU3037980, THYMU3038158, THYMU3038167, THYMU3038214, THYMU3038266, THYMU3038328, THYMU3038347, THYMU3038375, THYMU3038603, THYMU3038687, THYMU3038759, THYMU3038879, THYMU3038970,

[2889] THYMU3039807, THYMU3039846, THYMU3040126, THYMU3040146, THYMU3040168, THYMU3040172, THYMU3040725, THYMU3040746, THYMU3040829, THYMU3040830, THYMU3040986, THYMU3041354, THYMU3041386, THYMU3041573, THYMU3041603, THYMU3041736, THYMU3041918, THYMU3042075, THYMU3042321, THYMU3042372, THYMU3042758, THYMU3042929, THYMU3043200, THYMU3043327, THYMU3043482, THYMU3043597, THYMU3043688, THYMU3043779, THYMU3043883, THYMU3043993, THYMU3044175, THYMU3044188, THYMU3044441, THYMU3044445, THYMU3045673, THYMU3045692, THYMU3045704, THYMU3046140, THYMU3046350, THYMU3046360, THYMU3046856, THYMU3047144, THYMU3047156, THYMU3047366, THYMU3047513, THYMU3047542, THYMU3047760, THYMU3047891, TKIDN1000001, TKIDN1000044,

[2890] TKIDN1000062, TKIDN1000066, TKIDN1000164, TKIDN1000171, TKIDN1000192, TKIDN2000127, TKIDN2000240, TKIDN2000246, TKIDN2000319, TKIDN2000521, TKIDN2000701, TKIDN2001529, TKIDN2001662, TKIDN2002318, TKIDN2002329, TKIDN2002424, TKIDN2002632, TKIDN2003044, TKIDN2003059, TKIDN2003062, TKIDN2003078, TKIDN2003366, TKIDN2003396, TKIDN2003413, TKIDN2003597, TKIDN2003601, TKIDN2004185, TKIDN2004386, TKIDN2004458, TKIDN2004748, TKIDN2005721, TKIDN2005934, TKIDN2005947, TKIDN2005956, TKIDN2006525, TKIDN2006761, TKIDN2006852, TKIDN2007667, TKIDN2007828, TKIDN2008176, TKIDN2008778, TKIDN2009092, TKIDN2009330, TKIDN2009481, TKIDN2009641, TKIDN2009794, TKIDN2009889, TKIDN2010200, TKIDN2010232, TKIDN2010278,

[2891] TKIDN2010602, TKIDN2010812, TKIDN2010934, TKIDN2011051, TKIDN2011160, TKIDN2011324, TKIDN2012034, TKIDN2012771, TKIDN2012824, TKIDN2013134, TKIDN2013287, TKIDN2014570, TKIDN2014757, TKIDN2014771, TKIDN2014964, TKIDN2015025, TKIDN2015071, TKIDN2015161, TKIDN2015263, TKIDN2015285, TKIDN2015423, TKIDN2015788, TKIDN2016309, TKIDN2016399, TKIDN2016846, TKIDN2018926, TKIDN2019116, TLIVE2000023, TLIVE2000142, TLIVE2000292, TLIVE2000762, TLIVE2000979, TLIVE2001327, TLIVE2001616, TLIVE2001684, TLIVE2001828, TLIVE2001927, TLIVE2002046, TLIVE2002336, TLIVE2002338, TLIVE2002562, TLIVE2002882, TLIVE2003197, TLIVE2003200, TLIVE2003225, TLIVE2003381, TLIVE2003737, TLIVE2003961, TLIVE2004110, TLIVE2004320,

[2892] TLIVE2004331, TLIVE2004601, TLIVE2005180, TLIVE2005390, TLIVE2005516, TLIVE2005731, TLIVE2005866, TLIVE2006236, TLIVE2006359, TLIVE2006529, TLIVE2006621, TLIVE2006733, TLIVE2007000, TLIVE2007016, TLIVE2007132, TLIVE2007192, TLIVE2007528, TLIVE2007607, TLIVE2007736, TLIVE2007816, TLIVE2007919, TLIVE2008083, TLIVE2008213, TLIVE2008221, TLIVE2008229, TLIVE2008712, TLIVE2008797, TLIVE2009087, TLIVE2009163, TLIVE2009489, TLIVE2009541, TLUNG2000179, TOVAR2000476, TOVAR2000575, TOVAR2000649, TOVAR2000904, TOVAR2001281, TOVAR2001556, TOVAR2001730, TOVAR2002247, TOVAR2002514, TOVAR2002549, TOVAR2002800, TRACH1000018, TRACH1000057, TRACH1000074, TRACH1000100, TRACH1000125, TRACH1000140, TRACH1000144,

[2893] TRACH1000181, TRACH1000193, TRACH1000205, TRACH1000212, TRACH1000240, TRACH2000002, TRACH2000015, TRACH2000024, TRACH2000032, TRACH2000079, TRACH2000081, TRACH2000083, TRACH2000148, TRACH2000185, TRACH2000196, TRACH2000235, TRACH2000250, TRACH2000259, TRACH2000272, TRACH2000287, TRACH2000289, TRACH2000306, TRACH2000312, TRACH2000336, TRACH2000393, TRACH2000411, TRACH2000420, TRACH2000461, TRACH2000496, TRACH2000497, TRACH2000502, TRACH2000522, TRACH2000559, TRACH2000660, TRACH2000665, TRACH2000675, TRACH2000677, TRACH2000703, TRACH2000767, TRACH2000775, TRACH2000780, TRACH2000807, TRACH2000862, TRACH2000873, TRACH2000894, TRACH2000898, TRACH2000923, TRACH2000926, TRACH2000944, TRACH2000959,

[2894] TRACH2000981, TRACH2000986, TRACH2001037, TRACH2001060, TRACH2001085, TRACH2001101, TRACH2001109, TRACH2001121, TRACH2001147, TRACH2001154, TRACH2001188, TRACH2001192, TRACH2001249, TRACH2001275, TRACH2001314, TRACH2001335, TRACH2001339, TRACH2001341, TRACH2001347, TRACH2001395, TRACH2001400, TRACH2001403, TRACH2001416, TRACH2001443, TRACH2001474, TRACH2001478, TRACH2001525, TRACH2001532, TRACH2001592, TRACH2001612, TRACH2001621, TRACH2001646, TRACH2001651, TRACH2001684, TRACH2001810, TRACH2001898, TRACH2001933, TRACH2001968, TRACH2001996, TRACH2002054, TRACH2002092, TRACH2002100, TRACH2002333, TRACH2002784, TRACH2002840, TRACH2002853, TRACH2002862, TRACH2002954, TRACH2002960, TRACH2002988,

[2895] TRACH2003070, TRACH2003272, TRACH2003484, TRACH2003516, TRACH2003605, TRACH2003736, TRACH2003759, TRACH2003941, TRACH2004039, TRACH2004054, TRACH2004087, TRACH2004170, TRACH2004183, TRACH2004251, TRACH2004292, TRACH2004336, TRACH2004399, TRACH2004428, TRACH2004458, TRACH2004499, TRACH2004521, TRACH2004570, TRACH2004845, TRACH2004887, TRACH2004950, TRACH2005004, TRACH2005017, TRACH2005066, TRACH2005159, TRACH2005314, TRACH2005444, TRACH2005541, TRACH2005666, TRACH2005698, TRACH2005710, TRACH2005720, TRACH2005769, TRACH2005796, TRACH2005800, TRACH2006015, TRACH2006049, TRACH2006097, TRACH2006194, TRACH2006327, TRACH2006331, TRACH2006378, TRACH2006387, TRACH2006528, TRACH2006670, TRACH2006762,

[2896] TRACH2006870, TRACH2006918, TRACH2007059, TRACH2007324, TRACH2007358, TRACH2007483, TRACH2007542, TRACH2007577, TRACH2007674, TRACH2007676, TRACH2007688, TRACH2007733, TRACH2007754, TRACH2007894, TRACH2007969, TRACH2007988, TRACH2008081, TRACH2008112, TRACH2008113, TRACH2008127, TRACH2008130, TRACH2008278, TRACH2008300, TRACH2008583, TRACH2008597, TRACH2008820, TRACH2008891, TRACH2008921, TRACH2009060, TRACH2009107, TRACH2009123, TRACH2009268, TRACH2009291, TRACH2009310, TRACH2009340, TRACH2009348, TRACH2009358, TRACH2009661, TRACH2009730, TRACH2009743, TRACH2009754, TRACH2009851, TRACH2009862, TRACH2009934, TRACH2010159, TRACH2010218, TRACH2010251, TRACH2010272, TRACH2010317, TRACH2010419,

[2897] TRACH2010451, TRACH2010505, TRACH2010587, TRACH2010600, TRACH2010634, TRACH2010639, TRACH2010677, TRACH2010698, TRACH2010771, TRACH2010824, TRACH2010883, TRACH2010965, TRACH2010974, TRACH2011057, TRACH2011093, TRACH2011290, TRACH2011293, TRACH2011302, TRACH2011574, TRACH2011894, TRACH2011956, TRACH2012000, TRACH2012138, TRACH2012242, TRACH2012370, TRACH2012387, TRACH2012536, TRACH2012562, TRACH2012742, TRACH2012811, TRACH2012823, TRACH2012918, TRACH2013081, TRACH2013123, TRACH2013265, TRACH2013369, TRACH2013450, TRACH2013552, TRACH2013585, TRACH2013671, TRACH2013726, TRACH2013902, TRACH2013928, TRACH2013982, TRACH2013991, TRACH2014018, TRACH2014045, TRACH2014046, TRACH2014082, TRACH2014268,

[2898] TRACH2014284, TRACH2014337, TRACH2014356, TRACH2014371, TRACH2014442, TRACH2014483, TRACH2014495, TRACH2014544, TRACH2014573, TRACH2014725, TRACH2014760, TRACH2014815, TRACH2014839, TRACH2014938, TRACH2014950, TRACH2014972, TRACH2014974, TRACH2014997, TRACH2015180, TRACH2015243, TRACH2015316, TRACH2015381, TRACH2015486, TRACH2015654, TRACH2015824, TRACH2015939, TRACH2015987, TRACH2016080, TRACH2016131, TRACH2016286, TRACH2016317, TRACH2016347, TRACH2016380, TRACH2016384, TRACH2016410, TRACH2016481, TRACH2016498, TRACH2016551, TRACH2016554, TRACH2016651, TRACH2016690, TRACH2016709, TRACH2016722, TRACH2016835, TRACH2016980, TRACH2017086, TRACH2017368, TRACH2017498, TRACH2017609, TRACH2017949,

[2899] TRACH2017965, TRACH2017980, TRACH2018034, TRACH2018084, TRACH2018262, TRACH2018273, TRACH2018278, TRACH2018345, TRACH2018380, TRACH2018446, TRACH2018449, TRACH2018512, TRACH2018646, TRACH2018663, TRACH2018718, TRACH2018835, TRACH2018882, TRACH2018914, TRACH2019024, TRACH2019046, TRACH2019080, TRACH2019151, TRACH2019154, TRACH2019176, TRACH2019248, TRACH2019309, TRACH2019473, TRACH2019602, TRACH2019661, TRACH2019672, TRACH2019673, TRACH2019844, TRACH2019879, TRACH2020048, TRACH2020336, TRACH2020525, TRACH2021398, TRACH2021622, TRACH2021635, TRACH2021964, TRACH2022042, TRACH2022113, TRACH2022253, TRACH2022425, TRACH2022553, TRACH2022649, TRACH2022839, TRACH2023246, TRACH2023299, TRACH2023306,

[2900] TRACH2023416, TRACH2023479, TRACH2023684, TRACH2023860, TRACH2023876, TRACH2024139, TRACH2024187, TRACH2024271, TRACH2024408, TRACH2024512, TRACH2024559, TRACH2024647, TRACH2024651, TRACH2024730, TRACH2024735, TRACH2024749, TRACH2024821, TRACH2025057, TRACH2025084, TRACH2025155, TRACH2025224, TRACH2025344, TRACH2025379, TRACH2025507, TRACH2025535, TRACH2025569, TRACH2025705, TRACH2025749, TRACH2025753, TRACH2025810, TRACH2025853, TRACH2025911, TRACH2025932, TRACH3000014, TRACH3000017, TRACH3000043, TRACH3000134, TRACH3000180, TRACH3000342, TRACH3000420, TRACH3000515, TRACH3000530, TRACH3000548, TRACH3000558, TRACH3000586, TRACH3000692, TRACH3000780, TRACH3000892, TRACH3000926, TRACH3001119,

[2901] TRACH3001443, TRACH3001550, TRACH3001759, TRACH3002064, TRACH3002107, TRACH3002168, TRACH3002188, TRACH3002245, TRACH3002293, TRACH3002533, TRACH3002561, TRACH3002567, TRACH3002605, TRACH3002650, TRACH3002752, TRACH3002866, TRACH3002871, TRACH3002876, TRACH3002890, TRACH3003009, TRACH3003037, TRACH3003357, TRACH3003379, TRACH3003586, TRACH3003683, TRACH3003780, TRACH3003805, TRACH3003832, TRACH3003872, TRACH3004068, TRACH3004113, TRACH3004288, TRACH3004303, TRACH3004412, TRACH3004424, TRACH3004456, TRACH3004537, TRACH3004596, TRACH3004651, TRACH3004652, TRACH3004671, TRACH3004721, TRACH3004747, TRACH3004760, TRACH3004783, TRACH3004786, TRACH3004840, TRACH3004931, TRACH3004934, TRACH3005072,

[2902] TRACH3005085, TRACH3005102, TRACH3005173, TRACH3005191, TRACH3005211, TRACH3005274, TRACH3005479, TRACH3005549, TRACH3005699, TRACH3005702, TRACH3005808, TRACH3005852, TRACH3005896, TRACH3006038, TRACH3006149, TRACH3006228, TRACH3006264, TRACH3006336, TRACH3006379, TRACH3006392, TRACH3006395, TRACH3006397, TRACH3006412, TRACH3006470, TRACH3006589, TRACH3006626, TRACH3006699, TRACH3006800, TRACH3006889, TRACH3006985, TRACH3007097, TRACH3007268, TRACH3007274, TRACH3007277, TRACH3007391, TRACH3007479, TRACH3007541, TRACH3007595, TRACH3007625, TRACH3007627, TRACH3007689, TRACH3007766, TRACH3007866, TRACH3007995, TRACH3008042, TRACH3008061, TRACH3008201, TRACH3008508, TRACH3008535, TRACH3008629,

[2903] TRACH3008632, TRACH3008688, TRACH3008697, TRACH3008713, TRACH3008887, TRACH3008902, TRACH3008990, TRACH3009001, TRACH3009059, TRACH3009061, TRACH3009148, TRACH3009455, TRACH3009701, TRACH3009715, TRACH3009894, TRACH3009956, TRACH3010079, TRACH3010167, TRACH3010331, TRACH3010342, TRACH3010382, TRACH3010757, TRACH3010901, TRACH3011004, TRACH3011082, TRACH3011184, TRACH3011282, TRACH3011313, TRACH3011454, TRACH3011485, TRACH3011503, TRACH3011538, TRACH3011542, TRACH3012106, TRACH3012161, TRACH3012232, TRACH3012261, TRACH3012445, TRACH3012460, TRACH3012659, TRACH3012718, TRACH3012864, TRACH3012891, TRACH3012942, TRACH3013043, TRACH3013072, TRACH3013426, TRACH3013454, TRACH3013558, TRACH3013684,

[2904] TRACH3013693, TRACH3013700, TRACH3013766, TRACH3013900, TRACH3013926, TRACH3014063, TRACH3014183, TRACH3014215, TRACH3014316, TRACH3014415, TRACH3014580, TRACH3014641, TRACH3014885, TRACH3015136, TRACH3015336, TRACH3015346, TRACH3015354, TRACH3015467, TRACH3015626, TRACH3015951, TRACH3016051, TRACH3016120, TRACH3016264, TRACH3016277, TRACH3016368, TRACH3016455, TRACH3016614, TRACH3016805, TRACH3016992, TRACH3017171, TRACH3017409, TRACH3017934, TRACH3018108, TRACH3018191, TRACH3018240, TRACH3018261, TRACH3018519, TRACH3018524, TRACH3018606, TRACH3018783, TRACH3018907, TRACH3018933, TRACH3018943, TRACH3019018, TRACH3019058, TRACH3019142, TRACH3019290, TRACH3019347, TRACH3019370, TRACH3019447,

[2905] TRACH3019598, TRACH3019621, TRACH3019662, TRACH3019807, TRACH3019924, TRACH3019977, TRACH3020137, TRACH3020410, TRACH3020563, TRACH3020605, TRACH3020750, TRACH3020769, TRACH3020928, TRACH3020930, TRACH3021023, TRACH3021066, TRACH3021212, TRACH3021335, TRACH3021373, TRACH3021544, TRACH3021778, TRACH3021834, TRACH3021883, TRACH3022170, TRACH3022198, TRACH3022296, TRACH3022482, TRACH3022732, TRACH3022758, TRACH3022875, TRACH3022910, TRACH3022960, TRACH3023063, TRACH3023203, TRACH3023242, TRACH3023373, TRACH3023516, TRACH3023752, TRACH3023945, TRACH3023960, TRACH3024020, TRACH3024081, TRACH3024342, TRACH3024423, TRACH3024428, TRACH3024512, TRACH3024671, TRACH3024823, TRACH3025302, TRACH3025316,

[2906] TRACH3025346, TRACH3025520, TRACH3026148, TRACH3026283, TRACH3026299, TRACH3026303, TRACH3026542, TRACH3026650, TRACH3026676, TRACH3026744, TRACH3026949, TRACH3027229, TRACH3027527, TRACH3027681, TRACH3027701, TRACH3027885, TRACH3028031, TRACH3028164, TRACH3028180, TRACH3028195, TRACH3028441, TRACH3028597, TRACH3028678, TRACH3028837, TRACH3028847, TRACH3028855, TRACH3029139, TRACH3029329, TRACH3029451, TRACH3029462, TRACH3029520, TRACH3029592, TRACH3029629, TRACH3029665, TRACH3029670, TRACH3029800, TRACH3030111, TRACH3030130, TRACH3030176, TRACH3030252, TRACH3030725, TRACH3030855, TRACH3030883, TRACH3031316, TRACH3031400, TRACH3031463, TRACH3031479, TRACH3031518, TRACH3031660, TRACH3031678,

[2907] TRACH3031936, TRACH3032044, TRACH3032065, TRACH3032150, TRACH3032372, TRACH3032480, TRACH3032570, TRACH3032755, TRACH3032827, TRACH3032873, TRACH3033535, TRACH3033680, TRACH3033868, TRACH3034145, TRACH3034414, TRACH3034488, TRACH3034680, TRACH3034731, TRACH3034745, TRACH3034762, TRACH3034903, TRACH3035187, TRACH3035199, TRACH3035235, TRACH3035451, TRACH3035482, TRACH3035526, TRACH3036004, TRACH3036103, TRACH3036193, TRACH3036207, TRACH3036278, TRACH3036309, TRACH3036456, TRACH3036609, TRACH3036638, TRACH3036683, TRACH3036750, TRACH3036792, TRACH3036843, TRACH3036897, TRACH3036932, TRACH3036942, TRACH3036997, TRACH3037063, TRACH3037267, TRACH3037288, TRACH3037505, TRACH3037573, TRACH3037696,

[2908] TRACH3037897, TRACH3038086, TRACH3038399, TSTOM1000135, TSTOM1000186, TSTOM2000139, TSTOM2000235, TSTOM2000442, TSTOM2000553, TSTOM2000569, TSTOM2000588, TSTOM2001195, TSTOM2001274, TSTOM2001571, TSTOM2001996, TSTOM2002265, TSTOM2002505, TSTOM2002561, TSTOM2002611, TSTOM2002672, TSTOM2002682, TUTER1000014, TUTER1000122, TUTER1000137, TUTER2000057, TUTER2000283, TUTER2000425, TUTER2000904, TUTER2000916, TUTER2001286, TUTER2001341, TUTER2001387, TUTER2001433, TUTER2001461, TUTER2002028, TUTER2002074, TUTER2002158, TUTER2002228, TUTER2002323, TUTER2002356, TUTER2002729, UMVEN1000122, UMVEN1000143, UMVEN1000156, UMVEN1000186, UMVEN2000046, UMVEN2000069, UMVEN2000121, UMVEN2000152, UMVEN2000354,

[2909] UTERU1000008, UTERU1000015, UTERU1000024, UTERU1000031, UTERU1000032, UTERU1000057, UTERU1000065, UTERU1000077, UTERU1000093, UTERU1000096, UTERU1000106, UTERU1000109, UTERU1000131, UTERU1000138, UTERU1000148, UTERU1000160, UTERU1000182, UTERU1000183, UTERU1000187, UTERU1000192, UTERU1000249, UTERU1000337, UTERU1000339, UTERU1000384, UTERU2000023, UTERU2000047, UTERU2000074, UTERU2000099, UTERU2000154, UTERU2000197, UTERU2000218, UTERU2000238, UTERU2000243, UTERU2000260, UTERU2000263, UTERU2000300, UTERU2000329, UTERU2000349, UTERU2000377, UTERU2000393, UTERU2000418, UTERU2000465, UTERU2000485, UTERU2000517, UTERU2000524, UTERU2000539, UTERU2000542, UTERU2000546, UTERU2000550, UTERU2000569,

[2910] UTERU2000607, UTERU2000629, UTERU2000649, UTERU2000663, UTERU2000696, UTERU2000794, UTERU2000830, UTERU2000844, UTERU2000922, UTERU2000925, UTERU2001024, UTERU2001110, UTERU2001176, UTERU2001281, UTERU2001389, UTERU2001409, UTERU2001412, UTERU2001504, UTERU2001607, UTERU2001658, UTERU2001747, UTERU2001876, UTERU2002001, UTERU2002011, UTERU2002176, UTERU2002198, UTERU2002332, UTERU2002473, UTERU2002547, UTERU2002662, UTERU2002693, UTERU2002733, UTERU2002736, UTERU2002737, UTERU2002826, UTERU2002841, UTERU2002964, UTERU2002993, UTERU2003035, UTERU2003126, UTERU2003135, UTERU2003321, UTERU2003399, UTERU2003411, UTERU2003577, UTERU2003704, UTERU2003926, UTERU2003973, UTERU2004015, UTERU2004037,

[2911] UTERU2004039, UTERU2004061, UTERU2004073, UTERU2004163, UTERU2004299, UTERU2004461, UTERU2004520, UTERU2004564, UTERU2004688, UTERU2004698, UTERU2004861, UTERU2004929, UTERU2005004, UTERU2005050, UTERU2005069, UTERU2005074, UTERU2005179, UTERU2005346, UTERU2005446, UTERU2005449, UTERU2005450, UTERU2005533, UTERU2005601, UTERU2005664, UTERU2005822, UTERU2005903, UTERU2005905, UTERU2006103, UTERU2006137, UTERU2006182, UTERU2006400, UTERU2006412, UTERU2006429, UTERU2006486, UTERU2006524, UTERU2006547, UTERU2006568, UTERU2006643, UTERU2006651, UTERU2006705, UTERU2006899, UTERU2007004, UTERU2007075, UTERU2007081, UTERU2007128, UTERU2007253, UTERU2007267, UTERU2007444, UTERU2007499, UTERU2007639,

[2912] UTERU2007724, UTERU2007924, UTERU2007942, UTERU2008018, UTERU2008019, UTERU2008027, UTERU2008040, UTERU2008077, UTERU2008130, UTERU2008347, UTERU2008426, UTERU2008516, UTERU2008561, UTERU2008653, UTERU2008705, UTERU2008707, UTERU2008747, UTERU2008785, UTERU2008845, UTERU2008901, UTERU2008930, UTERU2008938, UTERU2008962, UTERU2009094, UTERU2009120, UTERU2009131, UTERU2009147, UTERU2009206, UTERU2009283, UTERU2009335, UTERU2009414, UTERU2009435, UTERU2009483, UTERU2009510, UTERU2009540, UTERU2009776, UTERU2009904, UTERU2009951, UTERU2009972, UTERU2010115, UTERU2010124, UTERU2010164, UTERU2010231, UTERU2010304, UTERU2010320, UTERU2010431, UTERU2010525, UTERU2010651, UTERU2010724, UTERU2010747,

[2913] UTERU2011195, UTERU2011199, UTERU2011220, UTERU2011261, UTERU2011287, UTERU2011410, UTERU2011574, UTERU2011621, UTERU2011657, UTERU2011741, UTERU2011806, UTERU2011811, UTERU2011897, UTERU2011906, UTERU2011962, UTERU2011968, UTERU2012031, UTERU2012101, UTERU2012114, UTERU2012230, UTERU2012252, UTERU2012286, UTERU2012333, UTERU2012407, UTERU2012526, UTERU2012581, UTERU2012610, UTERU2012615, UTERU2012688, UTERU2012703, UTERU2012715, UTERU2012767, UTERU2012786, UTERU2012890, UTERU2012938, UTERU2012976, UTERU2013048, UTERU2013078, UTERU2013231, UTERU2013262, UTERU2013280, UTERU2013322, UTERU2013483, UTERU2013491, UTERU2013502, UTERU2013586, UTERU2013926, UTERU2013976, UTERU2014001, UTERU2014024,

[2914] UTERU2014167, UTERU2014223, UTERU2014398, UTERU2014464, UTERU2014548, UTERU2014601, UTERU2014631, UTERU2014668, UTERU2014678, UTERU2014728, UTERU2014998, UTERU2015062, UTERU2015087, UTERU2015108, UTERU2015198, UTERU2015202, UTERU2015405, UTERU2015640, UTERU2015653, UTERU2015830, UTERU2015880, UTERU2016147, UTERU2016157, UTERU2016426, UTERU2016464, UTERU2016669, UTERU2016757, UTERU2016761, UTERU2016799, UTERU2016896, UTERU2016902, UTERU2016981, UTERU2017123, UTERU2017303, UTERU2017421, UTERU2017492, UTERU2017613, UTERU2017623, UTERU2017632, UTERU2017761, UTERU2017762, UTERU2017810, UTERU2017988, UTERU2018127, UTERU2018180, UTERU2018200, UTERU2018333, UTERU2018364, UTERU2018514, UTERU2018522,

[2915] UTERU2018523, UTERU2018544, UTERU2018566, UTERU2018609, UTERU2018674, UTERU2018712, UTERU2018784, UTERU2018789, UTERU2018811, UTERU2018867, UTERU2018881, UTERU2018884, UTERU2018955, UTERU2019005, UTERU2019038, UTERU2019096, UTERU2019163, UTERU2019257, UTERU2019453, UTERU2019491, UTERU2019534, UTERU2019681, UTERU2019706, UTERU2019710, UTERU2019940, UTERU2019959, UTERU2019964, UTERU2020226, UTERU2020242, UTERU2020292, UTERU2020351, UTERU2020491, UTERU2020718, UTERU2021163, UTERU2021380, UTERU2021649, UTERU2021820, UTERU2022020, UTERU2022773, UTERU2022955, UTERU2022981, UTERU2023039, UTERU2023175, UTERU2023262, UTERU2023651, UTERU2023687, UTERU2023712, UTERU2023941, UTERU2024002, UTERU2024042,

[2916] UTERU2024141, UTERU2024481, UTERU2024656, UTERU2024758, UTERU2024820, UTERU2024881, UTERU2024969, UTERU2025025, UTERU2025041, UTERU2025301, UTERU2025366, UTERU2025415, UTERU2025579, UTERU2025645, UTERU2025891, UTERU2026025, UTERU2026090, UTERU2026142, UTERU2026203, UTERU2026775, UTERU2027023, UTERU2027369, UTERU2027591, UTERU2027616, UTERU2027941, UTERU2028377, UTERU2028734, UTERU2029503, UTERU2029660, UTERU2029742, UTERU2029953, UTERU2030213, UTERU2030270, UTERU2030280, UTERU2031060, UTERU2031268, UTERU2031295, UTERU2031521, UTERU2031611, UTERU2031703, UTERU2031834, UTERU2031851, UTERU2032075, UTERU2032220, UTERU2032279, UTERU2032726, UTERU2033172, UTERU2033375, UTERU2033382, UTERU2033420,

[2917] UTERU2033530, UTERU2033577, UTERU2034053, UTERU2034147, UTERU2034695, UTERU2035114, UTERU2035187, UTERU2035231, UTERU2035306, UTERU2035323, UTERU2035328, UTERU2035331, UTERU2035452, UTERU2035469, UTERU2035503, UTERU2035745, UTERU2035908, UTERU2035926, UTERU2035978, UTERU2036089, UTERU2036347, UTERU2036507, UTERU2036512, UTERU2036530, UTERU2036623, UTERU2036690, UTERU2037224, UTERU2037361, UTERU2037423, UTERU2037577, UTERU2037674, UTERU2037791, UTERU2037843, UTERU2038171, UTERU2038251, UTERU3000226, UTERU3000298, UTERU3000402, UTERU3000645, UTERU3000665, UTERU3000670, UTERU3000727, UTERU3000738, UTERU3000828, UTERU3000844, UTERU3000899, UTERU3000959, UTERU3001029, UTERU3001053, UTERU3001059,

[2918] UTERU3001158, UTERU3001240, UTERU3001394, UTERU3001542, UTERU3001558, UTERU3001571, UTERU3001585, UTERU3001632, UTERU3001652, UTERU3001766, UTERU3001988, UTERU3002209, UTERU3002218, UTERU3002383, UTERU3002600, UTERU3002620, UTERU3002667, UTERU3002701, UTERU3002731, UTERU3002768, UTERU3002786, UTERU3002993, UTERU3003116, UTERU3003135, UTERU3003178, UTERU3003465, UTERU3003495, UTERU3003523, UTERU3003660, UTERU3003774, UTERU3003776, UTERU3004384, UTERU3004418, UTERU3004477, UTERU3004523, UTERU3004616, UTERU3004635, UTERU3004709, UTERU3004938, UTERU3004992, UTERU3005049, UTERU3005159, UTERU3005205, UTERU3005230, UTERU3005264, UTERU3005422, UTERU3005460, UTERU3005536, UTERU3005585, UTERU3005907,

[2919] UTERU3005970, UTERU3006008, UTERU3006228, UTERU3006308, UTERU3006538, UTERU3006640, UTERU3006687, UTERU3006720, UTERU3006798, UTERU3006884, UTERU3007021, UTERU3007104, UTERU3007108, UTERU3007134, UTERU3007419, UTERU3007640, UTERU3007731, UTERU3007913, UTERU3008280, UTERU3008463, UTERU3008660, UTERU3008671, UTERU3008722, UTERU3008917, UTERU3009259, UTERU3009490, UTERU3009517, UTERU3009690, UTERU3009775, UTERU3009871, UTERU3009979, UTERU3009987, UTERU3010029, UTERU3010409, UTERU3010526, UTERU3010604, UTERU3010892, UTERU3010919, UTERU3011063, UTERU3011092, UTERU3011273, UTERU3011398, UTERU3011558, UTERU3011579, UTERU3011795, UTERU3011837, UTERU3012293, UTERU3012414, UTERU3012476, UTERU3012599,

[2920] UTERU3012999, UTERU3013167, UTERU3013302, UTERU3013781, UTERU3014274, UTERU3014446, UTERU3014611, UTERU3014647, UTERU3014791, UTERU3014906, UTERU3015086, UTERU3015299, UTERU3015412, UTERU3015500, UTERU3015647, UTERU3015844, UTERU3016070, UTERU3016273, UTERU3016274, UTERU3016308, UTERU3016789, UTERU3017176, UTERU3017441, UTERU3017626, UTERU3017995, UTERU3018154, UTERU3018172, UTERU3018255, UTERU3018616, UTERU3018711, UTERU3019078

[2921] Of the 17,176 genes that include the cDNAs of the present invention, genes whose expression levels were high enough to detect in each of the SYNOV, T1ESE, TBAES, TCERX, TCOLN, TESOP, and TESTI libraries were analyzed for expression frequency. The analysis results are described below. Each is a relative value, where the expression level over all tissues is taken as 100. The larger this value, the greater the level of expression.

TABLE 38

| Clone Name | SYNOV | T1ESE | TBAES | TCERX | TCOLN | TESOP | TESTI |
|---|---|---|---|---|---|---|---|
| 3NB691000116 | 0 | 0 | 0 | 0 | 34.479 | 0 | 0 |
| 3NB691000173 | 0 | 0 | 5.555 | 0 | 0 | 0 | 2.065 |
| 3NB692000281 | 0 | 4.889 | 0 | 4.646 | 0 | 6.024 | 0 |
| 3NB692000330 | 0.951 | 0 | 0 | 0 | 0 | 0 | 1.153 |
| 3NB692000374 | 0 | 0 | 0 | 0 | 0 | 0 | 0.709 |
| 3NB692000529 | 0 | 0 | 0 | 0 | 0 | 0 | 7.289 |
| 3NB692000545 | 0 | 0 | 0 | 0 | 0 | 0 | 1.844 |
| 3NB692000912 | 1.013 | 0 | 0 | 0 | 0 | 0 | 0 |
| 3NB692001334 | 0 | 0 | 3.777 | 0 | 0 | 0 | 0 |
| 3NB692001366 | 0 | 0 | 0 | 0 | 0 | 0 | 8.225 |
| 3NB692001442 | 0 | 26.830 | 0 | 0 | 0 | 0 | 0.790 |
| 3NB692001496 | 0 | 0 | 0 | 0 | 0 | 0 | 5.032 |
| 3NB692001511 | 0 | 0 | 0 | 0 | 0 | 0 | 5.628 |
| 3NB692001557 | 0 | 0 | 0 | 0 | 0 | 0 | 3.965 |
| 3NB692008178 | 0 | 0 | 0 | 0 | 0 | 0 | 8.225 |
| ADRGL1000018 | 0 | 0 | 0 | 0 | 0 | 0 | 3.161 |
| ADRGL1000065 | 0 | 0 | 0 | 0 | 0 | 0 | 7.373 |
| ADRGL2000006 | 0 | 0 | 0 | 0 | 0 | 0 | 2.039 |
| ADRGL2000042 | 0 | 0 | 0 | 0 | 0 | 0 | 4.980 |
| ADRGL2000097 | 0 | 0 | 15.639 | 0 | 0 | 0 | 0 |
| ADRGL2000117 | 0 | 0 | 0 | 0 | 0 | 0 | 5.579 |
| ADRGL2000328 | 0 | 0 | 0 | 0 | 0 | 0 | 4.401 |
| ADRGL2009273 | 2.996 | 0 | 0 | 0 | 0 | 0 | 1.816 |
| ASTRO2000014 | 0 | 9.121 | 0 | 0 | 0 | 0 | 0 |
| ASTRO2000046 | 0.880 | 0 | 0 | 0 | 0 | 0 | 0.533 |
| ASTRO2000141 | 0 | 0 | 0 | 0 | 32.199 | 0 | 0.993 |
| ASTRO2001029 | 2.705 | 0 | 0 | 0 | 26.586 | 0 | 0 |
| ASTRO2001076 | 3.066 | 0 | 0 | 0 | 0 | 0 | 0 |
| ASTRO2001806 | 0 | 0 | 0 | 0 | 0 | 0 | 5.611 |
| ASTRO2001823 | 0 | 0 | 0 | 0 | 0 | 0 | 1.898 |
| ASTRO2002024 | 0 | 0 | 0 | 0 | 0 | 0 | 8.570 |
| ASTRO2002459 | 0 | 0 | 0 | 0 | 0 | 5.989 | 0 |
| ASTRO2002720 | 0 | 0 | 0 | 0 | 0 | 0 | 15.873 |
| ASTRO2002842 | 0 | 0 | 67.001 | 0 | 0 | 0 | 0 |
| ASTRO2003024 | 0 | 0 | 0 | 0 | 0 | 0 | 1.859 |
| ASTRO2003212 | 0 | 0 | 0 | 0 | 0 | 0 | 9.792 |
| ASTRO2003316 | 0 | 0 | 0 | 0 | 0 | 20.183 | 3.857 |
| ASTRO2003632 | 0 | 0 | 0 | 0 | 8.808 | 0 | 0 |
| ASTRO2003840 | 0 | 0 | 0 | 0 | 0 | 0 | 8.098 |
| ASTRO2004628 | 19.197 | 0 | 0 | 0 | 0 | 0 | 0 |
| ASTRO2005360 | 0 | 0 | 0 | 0 | 0 | 40.816 | 3.900 |
| ASTRO2005687 | 2.404 | 0 | 0 | 0 | 0 | 0 | 0 |
| ASTRO2007047 | 4.507 | 0 | 0 | 0 | 0 | 0 | 0 |
| ASTRO2007948 | 0 | 0 | 0 | 0 | 0 | 17.135 | 0 |
| ASTRO2010819 | 2.903 | 0 | 0 | 0 | 0 | 0 | 7.477 |
| ASTRO2012552 | 0 | 0 | 0 | 0 | 0 | 10.113 | 0 |
| ASTRO2013585 | 0 | 0 | 0 | 0 | 0 | 0 | 1.912 |
| ASTRO2014576 | 0 | 0 | 0 | 0 | 0 | 0 | 7.388 |
| ASTRO2015529 | 0 | 0 | 0 | 0 | 0 | 0 | 7.267 |
| ASTRO2016114 | 0 | 0 | 0 | 0 | 0 | 0 | 9.476 |
| ASTRO2016491 | 2.172 | 0 | 3.542 | 0 | 0 | 3.445 | 1.975 |
| ASTRO2016819 | 0 | 0 | 45.393 | 0 | 0 | 0 | 4.218 |
| ASTRO2018169 | 2.037 | 0 | 0 | 0 | 0 | 0 | 0.617 |
| ASTRO2018540 | 0 | 34.540 | 0 | 0 | 0 | 0 | 0 |
| BGGI11000123 | 1.512 | 0 | 0 | 0 | 0 | 0 | 0.916 |
| BGGI11000193 | 6.438 | 0 | 0 | 0 | 0 | 0 | 0 |
| BGGI12000054 | 0 | 0 | 1.657 | 0 | 0 | 1.611 | 0 |
| BGGI12000616 | 0 | 0 | 0 | 18.869 | 0 | 0 | 0.584 |
| BGGI12000839 | 1.590 | 0 | 0 | 0 | 0 | 0 | 1.446 |
| BGGI12001075 | 0 | 0 | 0 | 0 | 0 | 0 | 2.588 |
| BLADE2002730 | 0 | 0 | 0 | 0 | 0 | 0 | 8.520 |
| BLADE2006830 | 0 | 0 | 0 | 0 | 0 | 0 | 1.099 |
| BNGH41000190 | 0 | 0 | 0 | 0 | 0 | 0 | 1.654 |
| BNGH41000198 | 4.481 | 0 | 0 | 0 | 0 | 0 | 0 |
| BNGH41000235 | 0 | 0 | 0 | 0 | 0 | 0 | 21.303 |
| BNGH42000360 | 0 | 0 | 0 | 0 | 3.335 | 0 | 0.103 |
| BNGH42000739 | 0 | 0 | 0 | 0 | 0 | 0 | 0.407 |
| BNGH42001247 | 0 | 0 | 0 | 0 | 0 | 0 | 3.439 |
| BNGH42001406 | 0 | 0 | 0 | 0 | 0 | 47.011 | 0 |
| BNGH42001576 | 0 | 0 | 0 | 0 | 0 | 0 | 12.758 |
| BNGH42002387 | 0 | 0 | 0 | 0 | 0 | 0 | 6.899 |
| BNGH42004679 | 0 | 0 | 0 | 0 | 0 | 0 | 7.814 |
| BNGH42005968 | 0 | 0 | 0 | 0 | 0 | 0 | 1.501 |
| BNGH42006135 | 1.424 | 0 | 0 | 0 | 13.997 | 0 | 3.884 |
| BNGH42007037 | 0 | 0 | 0 | 0 | 0 | 0 | 4.066 |
| BNGH42007460 | 2.173 | 0 | 0 | 0 | 0 | 0 | 3.952 |
| BNGH42007709 | 0.496 | 0 | 0 | 0 | 0 | 0 | 0.150 |
| BNGH42007798 | 0 | 0 | 0 | 0 | 0 | 0 | 6.420 |
| BNGH42008743 | 3.320 | 34.193 | 0 | 0 | 0 | 0 | 2.013 |
| BNGH42009025 | 0 | 0 | 0 | 0 | 29.557 | 0 | 1.823 |
| BRACE1000073 | 0 | 0 | 0 | 0 | 0 | 0 | 2.756 |
| BRACE1000115 | 0 | 0 | 0 | 3.950 | 0 | 0 | 0.245 |
| BRACE1000131 | 0 | 0 | 7.327 | 0 | 0 | 0 | 1.362 |
| BRACE1000159 | 0 | 0 | 0 | 38.966 | 0 | 0 | 0 |
| BRACE2000077 | 0 | 0 | 0 | 0 | 0 | 0 | 31.530 |
| BRACE2000183 | 0 | 0 | 0 | 96.746 | 0 | 0 | 0 |
| BRACE2000229 | 0 | 0 | 90.835 | 0 | 0 | 0 | 0 |
| BRACE2000347 | 0 | 0 | 18.185 | 0 | 0 | 0 | 3.380 |
| BRACE2000577 | 0 | 0 | 0 | 0 | 0 | 0 | 47.943 |
| BRACE2000885 | 0 | 0 | 0 | 0 | 0 | 0 | 47.943 |
| BRACE2000893 | 0 | 0 | 0 | 0 | 0 | 0 | 2.954 |
| BRACE2000975 | 0 | 0 | 0 | 0 | 0 | 0 | 3.350 |
| BRACE2001107 | 0 | 0 | 0 | 0 | 0 | 0 | 9.621 |
| BRACE2001117 | 0 | 0 | 19.348 | 0 | 0 | 0 | 0 |
| BRACE2001143 | 0 | 0 | 0 | 62.699 | 0 | 0 | 1.942 |
| BRACE2001154 | 0 | 0 | 0 | 0 | 0 | 0 | 6.945 |
| BRACE2001477 | 0 | 0 | 0 | 0 | 0 | 0 | 2.248 |
| BRACE2001497 | 0 | 0 | 0 | 0 | 0 | 12.749 | 0 |
| BRACE2001564 | 0 | 0 | 0 | 0 | 0 | 0 | 31.530 |
| BRACE2001692 | 0 | 0 | 0 | 12.779 | 0 | 0 | 0.396 |
| BRACE2001711 | 0 | 0 | 27.364 | 0 | 0 | 0 | 0 |
| BRACE2001892 | 0 | 0 | 0 | 0 | 0 | 0 | 1.188 |
| BRACE2002050 | 0 | 0 | 0 | 0 | 0 | 0 | 3.791 |
| BRACE2002091 | 0 | 0 | 0 | 0 | 0 | 0 | 6.902 |
| BRACE2002202 | 0 | 0 | 0 | 0 | 0 | 0 | 23.489 |
| BRACE2002356 | 0 | 0 | 0 | 0 | 0 | 0 | 11.877 |
| BRACE2002392 | 0 | 0 | 0 | 0 | 0 | 0 | 1.127 |
| BRACE2002441 | 2.429 | 0 | 0 | 0 | 0 | 0 | 0 |
| BRACE2002649 | 0 | 0 | 0 | 0 | 0 | 0 | 6.921 |
| BRACE2002661 | 0 | 0 | 0 | 0 | 0 | 19.704 | 1.883 |
| BRACE2002677 | 0 | 0 | 0 | 0 | 0 | 0 | 1.262 |
| BRACE2002807 | 0 | 0 | 0 | 0 | 0 | 0 | 21.066 |
| BRACE2002861 | 0 | 0 | 0 | 0 | 55.019 | 0 | 1.696 |
| BRACE2003172 | 2.804 | 0 | 0 | 6.859 | 0 | 0 | 0 |
| BRACE2003527 | 0 | 0 | 0 | 0 | 0 | 0 | 1.685 |
| BRACE2003628 | 0 | 0 | 0 | 0 | 0 | 0 | 4.460 |
| BRACE2003827 | 0 | 0 | 0 | 0 | 0 | 0 | 5.154 |
| BRACE2003846 | 0 | 0 | 0 | 0 | 0 | 4.459 | 0 |
| BRACE2003892 | 4.707 | 0 | 0 | 0 | 0 | 14.932 | 0 |
| BRACE2003904 | 0 | 0 | 18.237 | 0 | 0 | 0 | 0 |
| BRACE2005087 | 0 | 0 | 0 | 0 | 0 | 0 | 3.390 |
| BRACE2005090 | 0 | 0 | 0 | 0 | 0 | 0 | 47.943 |
| BRACE2005151 | 4.532 | 0 | 0 | 0 | 0 | 0 | 0 |
| BRACE2005231 | 0 | 0 | 0 | 0 | 0 | 0 | 2.087 |
| BRACE2005433 | 0 | 0 | 0 | 0 | 0 | 0 | 7.549 |
| BRACE2005434 | 1.487 | 0 | 0 | 0 | 0 | 0 | 2.704 |
| BRACE2006072 | 0 | 0 | 0 | 0 | 0 | 0 | 12.884 |
| BRACE2006105 | 0 | 0 | 0 | 0 | 0 | 0 | 27.736 |
| BRACE2006319 | 0 | 0 | 0 | 0 | 0 | 0 | 11.459 |
| BRACE2006397 | 1.273 | 0 | 0 | 6.229 | 12.516 | 0 | 0 |
| BRACE2006514 | 0 | 0 | 0 | 0 | 0 | 0 | 0.568 |
| BRACE2006547 | 0 | 0 | 0 | 0 | 0 | 0 | 19.561 |
| BRACE2006859 | 0 | 0 | 0 | 0 | 0 | 0 | 6.642 |
| BRACE2006900 | 0 | 0 | 10.859 | 10.859 | 21.818 | 0 | 0.673 |
| BRACE2007064 | 0 | 0 | 0 | 0 | 0 | 11.117 | 0 |
| BRACE2007089 | 0 | 0 | 0 | 0 | 0 | 0 | 0.553 |
| BRACE2007109 | 0 | 0 | 0 | 0 | 0 | 0 | 0.624 |
| BRACE2007191 | 0 | 0 | 4.832 | 0 | 0 | 0 | 0.898 |
| BRACE2007401 | 0 | 0 | 0 | 0 | 38.746 | 0 | 2.389 |
| BRACE2007518 | 4.895 | 0 | 0 | 0 | 0 | 0 | 0 |
| BRACE2007567 | 2.993 | 0 | 0 | 0 | 0 | 0 | 0.907 |
| BRACE2007708 | 0 | 0 | 0 | 0 | 45.054 | 0 | 1.389 |
| BRACE2007801 | 0 | 0 | 0 | 0 | 0 | 0 | 47.943 |
| BRACE2008358 | 0 | 0 | 0 | 0 | 0 | 15.504 | 1.481 |
| BRACE2008385 | 0 | 0 | 0 | 0 | 0 | 0 | 1.365 |
| BRACE2008399 | 0 | 0 | 0 | 0 | 0 | 37.868 | 0 |
| BRACE2008402 | 0 | 0 | 0 | 0 | 0 | 28.691 | 2.741 |
| BRACE2008481 | 6.021 | 0 | 0 | 0 | 0 | 0 | 0 |
| BRACE2008653 | 0 | 0 | 0 | 0 | 0 | 0 | 2.413 |
| BRACE2008706 | 0 | 0 | 0 | 0 | 0 | 0 | 2.148 |
| BRACE2008968 | 0 | 0 | 4.090 | 0 | 0 | 0 | 0.380 |
| BRACE2009037 | 0 | 0 | 0 | 0 | 0 | 0 | 0.764 |
| BRACE2009044 | 0 | 0 | 0 | 0 | 0 | 0 | 13.117 |
| BRACE2009045 | 0 | 0 | 0 | 0 | 0 | 0 | 3.936 |
| BRACE2009291 | 0 | 0 | 0 | 0 | 0 | 0 | 0.865 |
| BRACE2009307 | 0 | 0 | 0 | 0 | 0 | 0 | 29.044 |
| BRACE2009517 | 5.850 | 0 | 0 | 0 | 0 | 0 | 0 |
| BRACE2009558 | 0 | 0 | 0 | 0 | 0 | 0 | 1.880 |
| BRACE2010669 | 0 | 0 | 0 | 0 | 0 | 0 | 4.167 |
| BRACE2012528 | 0 | 0 | 0 | 0 | 0 | 0 | 0.310 |
| BRACE2012814 | 0 | 0 | 0 | 0 | 0 | 0 | 1.002 |
| BRACE2015287 | 0 | 0 | 0 | 0 | 0 | 0 | 1.501 |
| BRACE2016362 | 0 | 0 | 0 | 0 | 0 | 0 | 10.077 |
| BRACE2017397 | 0 | 0 | 0 | 0 | 0 | 0 | 1.542 |
| BRACE2017574 | 0 | 0 | 36.041 | 0 | 0 | 0 | 0 |
| BRACE2018736 | 0 | 0 | 0 | 0 | 0 | 0 | 26.439 |
| BRACE2018847 | 0 | 0 | 0 | 0 | 0 | 0 | 25.504 |
| BRACE2021014 | 0 | 0 | 0 | 0 | 0 | 0 | 11.618 |
| BRACE2021143 | 0 | 0 | 55.669 | 0 | 0 | 0 | 5.173 |
| BRACE2022333 | 0 | 0 | 0 | 0 | 0 | 0 | 5.803 |
| BRACE2022389 | 0 | 0 | 0 | 0 | 0 | 0 | 6.946 |
| BRACE2022638 | 1.608 | 0 | 0 | 0 | 0 | 5.100 | 1.462 |
| BRACE2023718 | 0 | 0 | 0 | 0 | 0 | 0 | 10.491 |
| BRACE2023727 | 0 | 0 | 0 | 0 | 0 | 0 | 12.906 |
| BRACE2024627 | 0 | 0 | 0 | 0 | 0 | 0 | 8.002 |
| BRACE2025437 | 0 | 0 | 0 | 0 | 0 | 0 | 3.991 |
| BRACE2026131 | 0 | 0 | 0 | 0 | 0 | 0 | 47.943 |
| BRACE2030341 | 0 | 0 | 0 | 0 | 0 | 47.323 | 0 |
| BRACE2032477 | 0 | 0 | 0 | 0 | 0 | 38.127 | 0 |
| BRACE2038269 | 0 | 0 | 0 | 0 | 0 | 0 | 47.943 |
| BRACE2039624 | 4.173 | 0 | 0 | 0 | 0 | 0 | 1.265 |
| BRACE2043142 | 0 | 0 | 0 | 0 | 0 | 0 | 47.943 |
| BRACE2043381 | 0 | 0 | 0 | 0 | 0 | 73.638 | 0 |
| BRACE2044105 | 0 | 0 | 0 | 0 | 0 | 0 | 13.155 |
| BRACE3000973 | 0 | 0 | 0 | 0 | 0 | 0 | 35.242 |
| BRACE3004150 | 0 | 0 | 0 | 0 | 0 | 0 | 2.539 |
| BRACE3004205 | 0 | 0 | 0 | 0 | 0 | 0 | 31.530 |
| BRACE3004843 | 0 | 0 | 0 | 0 | 0 | 0 | 20.797 |
| BRACE3005499 | 0 | 0 | 0 | 0 | 0 | 0 | 20.445 |
| BRACE3005938 | 2.375 | 0 | 0 | 0 | 0 | 7.535 | 0.720 |
| BRACE3006553 | 0 | 0 | 0 | 0 | 0 | 0 | 67.311 |
| BRACE3007058 | 0 | 0 | 0 | 0 | 0 | 0 | 47.943 |
| BRACE3009237 | 0 | 0 | 0 | 0 | 0 | 0 | 11.857 |
| BRACE3009416 | 0 | 0 | 0 | 0 | 0 | 0 | 18.656 |
| BRACE3010428 | 0 | 0 | 0 | 0 | 0 | 0 | 0.748 |
| BRACE3010438 | 0 | 39.772 | 0 | 0 | 0 | 0 | 0 |
| BRACE3016884 | 0 | 0 | 90.835 | 0 | 0 | 0 | 0 |
| BRACE3019941 | 0 | 0 | 0 | 0 | 0 | 0 | 15.278 |
| BRACE3021430 | 0 | 0 | 0 | 0 | 0 | 0 | 7.798 |
| BRACE3028895 | 0 | 0 | 0 | 0 | 0 | 0 | 29.749 |
| BRACE3045981 | 0 | 0 | 0 | 0 | 0 | 0 | 17.280 |
| BRALZ2018834 | 0 | 0 | 0 | 0 | 0 | 42.693 | 0 |
| BRAMY2000354 | 0 | 0 | 0 | 0 | 0 | 0 | 0.898 |
| BRAMY2000585 | 0 | 0 | 0 | 0 | 0 | 16.804 | 0 |
| BRAMY2000893 | 0 | 0 | 0 | 0 | 0 | 0 | 0.995 |
| BRAMY2003008 | 0 | 0 | 0 | 0 | 0 | 0 | 17.287 |
| BRAMY2004363 | 4.409 | 0 | 0 | 0 | 0 | 0 | 6.682 |
| BRAMY2005052 | 0 | 0 | 0 | 0 | 0 | 0 | 7.591 |
| BRAMY2005488 | 0 | 0 | 0 | 0 | 0 | 0 | 7.449 |
| BRAMY2006397 | 0 | 0 | 0 | 59.264 | 0 | 0 | 0 |
| BRAMY2007078 | 8.202 | 0 | 0 | 0 | 0 | 0 | 0 |
| BRAMY2007287 | 0 | 0 | 0 | 0 | 0 | 0 | 7.004 |
| BRAMY2008977 | 10.905 | 0 | 0 | 0 | 0 | 0 | 0 |
| BRAMY2009013 | 0 | 0 | 0 | 0 | 0 | 0 | 3.981 |
| BRAMY2009934 | 0 | 0 | 0 | 0 | 0 | 0 | 3.864 |
| BRAMY2011841 | 0 | 0 | 77.624 | 0 | 0 | 0 | 0 |
| BRAMY2012163 | 0 | 0 | 0 | 0 | 0 | 0 | 5.168 |
| BRAMY2012426 | 0 | 0 | 0 | 0 | 0 | 0 | 4.040 |
| BRAMY2012536 | 0 | 0 | 0 | 24.362 | 0 | 0 | 0.377 |
| BRAMY2013756 | 0 | 0 | 0 | 0 | 0 | 0 | 12.344 |
| BRAMY2015833 | 0 | 0 | 0 | 0 | 0 | 0 | 3.013 |
| BRAMY2016325 | 0 | 0 | 26.506 | 0 | 0 | 0 | 0 |
| BRAMY2017864 | 0 | 0 | 0 | 0 | 0 | 0 | 9.032 |
| BRAMY2018635 | 0 | 0 | 0 | 0 | 0 | 0 | 17.756 |
| BRAMY2019468 | 0 | 0 | 0 | 0 | 0 | 0 | 4.966 |
| BRAMY2019554 | 0 | 0 | 0 | 0 | 0 | 5.460 | 1.043 |
| BRAMY2019643 | 0 | 0 | 0 | 0 | 0 | 0 | 39.348 |
| BRAMY2020354 | 0 | 0 | 0 | 0 | 0 | 0 | 39.348 |
| BRAMY2020427 | 0 | 0 | 0 | 0 | 0 | 4.051 | 0.387 |
| BRAMY2020713 | 55.672 | 0 | 0 | 0 | 0 | 0 | 0 |
| BRAMY2021142 | 0 | 0 | 0 | 0 | 0 | 0 | 35.008 |
| BRAMY2023939 | 0 | 0 | 0 | 0 | 0 | 0 | 7.991 |
| BRAMY2024715 | 0 | 0 | 0 | 0 | 0 | 87.164 | 0 |
| BRAMY2026685 | 16.036 | 0 | 0 | 0 | 0 | 16.957 | 0 |
| BRAMY2028740 | 0 | 0 | 0 | 0 | 0 | 0 | 0.609 |
| BRAMY2028796 | 0 | 0 | 0 | 0 | 0 | 0 | 0.972 |
| BRAMY2029988 | 0 | 0 | 0 | 0 | 0 | 0 | 7.700 |
| BRAMY2030098 | 0 | 0 | 0 | 0 | 0 | 0 | 27.569 |
| BRAMY2032087 | 0 | 0 | 0 | 0 | 0 | 0 | 1.583 |
| BRAMY2032317 | 0 | 0 | 0 | 0 | 0 | 0 | 39.348 |
| BRAMY2034187 | 0 | 0 | 87.471 | 0 | 0 | 0 | 0 |
| BRAMY2035869 | 0 | 0 | 0 | 0 | 0 | 0 | 39.348 |
| BRAMY2036459 | 0 | 0 | 0 | 39.773 | 0 | 0 | 0 |
| BRAMY2037823 | 0 | 0 | 0 | 0 | 0 | 0 | 19.391 |
| BRAMY2038904 | 0 | 0 | 0 | 0 | 0 | 0 | 39.348 |
| BRAMY2040095 | 0 | 0 | 2.405 | 0 | 0 | 0 | 0.223 |
| BRAMY2040592 | 7.510 | 0 | 0 | 0 | 0 | 0 | 2.276 |
| BRAMY2047420 | 0 | 0 | 0 | 21.378 | 0 | 0 | 0 |
| BRAMY3002458 | 0 | 0 | 0 | 0 | 0 | 0 | 8.115 |
| BRAMY3003205 | 0 | 0 | 0 | 0 | 0 | 0 | 31.454 |
| BRAMY3004364 | 0 | 0 | 0 | 0 | 0 | 46.478 | 0 |
| BRAMY3004377 | 0 | 0 | 0 | 0 | 0 | 0 | 2.711 |
| BRAMY3008044 | 3.869 | 0 | 0 | 0 | 0 | 0 | 0 |
| BRAMY3009491 | 0 | 0 | 0 | 0 | 0 | 0 | 20.396 |
| BRAMY4000089 | 0 | 0 | 0 | 0 | 0 | 0 | 13.306 |
| BRAWH1000037 | 3.933 | 0 | 0 | 0 | 0 | 0 | 1.192 |
| BRAWH1000040 | 0 | 0 | 4.840 | 0 | 0 | 0 | 0 |
| BRAWH1000083 | 9.772 | 0 | 0 | 0 | 0 | 0 | 2.962 |
| BRAWH1000093 | 1.990 | 0 | 0 | 0 | 0 | 0 | 0 |
| BRAWH2000460 | 1.316 | 0 | 0 | 0 | 0 | 0 | 2.793 |
| BRAWH2000636 | 0 | 0 | 0 | 0 | 0 | 0 | 0.691 |
| BRAWH2000686 | 5.273 | 0 | 0 | 0 | 0 | 0 | 1.598 |
| BRAWH2000697 | 0 | 0 | 7.116 | 0 | 0 | 0 | 0.661 |
| BRAWH2000839 | 0 | 0 | 0 | 0 | 0 | 0 | 0.268 |
| BRAWH2000924 | 0 | 6.374 | 0 | 0 | 0 | 0 | 0 |
| BRAWH2000944 | 0 | 0 | 0 | 0 | 0 | 35.693 | 17.051 |
| BRAWH2001092 | 0.379 | 0 | 1.236 | 0 | 3.726 | 0 | 0.230 |
| BRAWH2001166 | 0 | 0 | 0 | 0 | 0 | 0 | 8.254 |
| BRAWH2001171 | 1.332 | 0 | 0 | 0 | 0 | 0 | 0 |
| BRAWH2001321 | 0 | 0 | 0 | 0 | 0 | 0 | 0.561 |
| BRAWH2001406 | 0 | 0 | 0 | 0 | 0 | 0 | 2.213 |
| BRAWH2001439 | 2.219 | 0 | 0 | 0 | 0 | 0 | 0.673 |
| BRAWH2001461 | 0 | 0 | 0 | 0 | 0 | 0 | 2.324 |
| BRAWH2001940 | 0 | 0 | 0 | 0 | 0 | 0 | 24.447 |
| BRAWH2001973 | 0 | 0 | 0 | 0 | 0 | 0 | 24.447 |
| BRAWH2002601 | 0 | 0 | 0 | 0 | 0 | 0 | 6.502 |
| BRAWH2003025 | 6.540 | 0 | 0 | 0 | 0 | 0 | 0 |
| BRAWH2003818 | 0 | 0 | 21.291 | 0 | 0 | 0 | 0 |
| BRAWH2004095 | 0 | 0 | 0 | 0 | 0 | 0 | 0.773 |
| BRAWH2004136 | 34.318 | 0 | 0 | 0 | 0 | 0 | 0 |
| BRAWH2005068 | 0 | 0 | 0 | 0 | 0 | 0 | 0.263 |
| BRAWH2005661 | 0 | 0 | 0 | 0 | 0 | 10.938 | 0 |
| BRAWH2006044 | 37.947 | 0 | 0 | 0 | 0 | 0 | 0 |
| BRAWH2006395 | 0 | 0 | 87.554 | 0 | 0 | 0 | 0 |
| BRAWH2006405 | 27.990 | 0 | 0 | 0 | 0 | 0 | 0 |
| BRAWH2006450 | 10.830 | 0 | 0 | 0 | 0 | 0 | 0 |
| BRAWH2006493 | 10.970 | 0 | 0 | 0 | 0 | 0 | 0 |
| BRAWH2006996 | 0 | 0 | 23.927 | 0 | 0 | 0 | 0 |
| BRAWH2007605 | 0 | 0 | 0 | 0 | 0 | 0 | 4.022 |
| BRAWH2008219 | 0 | 0 | 0 | 0 | 0 | 0 | 9.419 |
| BRAWH2008366 | 0 | 0 | 0 | 0 | 0 | 87.248 | 0 |
| BRAWH2008706 | 6.202 | 0 | 0 | 0 | 0 | 0 | 0 |
| BRAWH2009238 | 0 | 0 | 0 | 0 | 0 | 0 | 3.408 |
| BRAWH2009307 | 0 | 0 | 14.006 | 0 | 0 | 0 | 0 |
| BRAWH2010364 | 0 | 0 | 0 | 0 | 0 | 0 | 11.264 |
| BRAWH2010980 | 0 | 0 | 49.709 | 0 | 0 | 0 | 0 |
| BRAWH2012077 | 0 | 0 | 0 | 0 | 0 | 0 | 8.190 |
| BRAWH2014053 | 0 | 0 | 0 | 0 | 0 | 0 | 15.180 |
| BRAWH2014188 | 3.088 | 0 | 0 | 0 | 0 | 0 | 0.936 |
| BRAWH2014645 | 0 | 0 | 0 | 0 | 0 | 0 | 0.691 |
| BRAWH2015247 | 0 | 0 | 0 | 0 | 0 | 0 | 6.824 |
| BRAWH2016269 | 0 | 0 | 0 | 0 | 27.951 | 0 | 3.447 |
| BRAWH2016305 | 0 | 95.692 | 0 | 0 | 0 | 0 | 0 |
| BRAWH2016446 | 0 | 0 | 0 | 0 | 0 | 59.524 | 0 |
| BRAWH2017685 | 1.095 | 0 | 0 | 0 | 0 | 0 | 3.317 |
| BRAWH2018526 | 0 | 0 | 2.165 | 0 | 6.525 | 0 | 0.201 |
| BRAWH2018729 | 0 | 0 | 0 | 0 | 0 | 0 | 1.948 |
| BRAWH3001891 | 0 | 0 | 0 | 0 | 0 | 0 | 11.289 |
| BRAWH3002853 | 1.595 | 0 | 5.203 | 0 | 0 | 0 | 0.484 |
| BRAWH3003411 | 0 | 0 | 0 | 0 | 0 | 0 | 15.127 |
| BRAWH3003573 | 0 | 0 | 0 | 0 | 0 | 0 | 26.359 |
| BRAWH3004350 | 0 | 0 | 0 | 0 | 0 | 0 | 10.838 |
| BRAWH3006761 | 0 | 0 | 0 | 0 | 0 | 0 | 13.903 |
| BRAWH3018063 | 0 | 0 | 0 | 0 | 0 | 0 | 5.176 |
| BRAWH3021545 | 0 | 0 | 0 | 0 | 0 | 0 | 11.924 |
| BRAWH3021574 | 0 | 0 | 0 | 0 | 0 | 0 | 6.144 |
| BRAWH3024989 | 0 | 0 | 0 | 0 | 0 | 0 | 4.646 |
| BRAWH3027533 | 0 | 0 | 0 | 0 | 0 | 75.317 | 0 |
| BRAWH3029806 | 0 | 0 | 0 | 0 | 0 | 0 | 11.651 |
| BRCAN1000168 | 0 | 0 | 0 | 0 | 0 | 0 | 0.922 |
| BRCAN2003944 | 0 | 6.255 | 0 | 0 | 5.971 | 1.927 | 0 |
| BRCAN2004653 | 0 | 0 | 0 | 0 | 0 | 0 | 22.174 |
| BRCAN2007409 | 0 | 0 | 0 | 63.318 | 0 | 0 | 0 |
| BRCAN2011946 | 13.639 | 0 | 0 | 0 | 0 | 0 | 4.134 |
| BRCAN2020234 | 0 | 0 | 0 | 0 | 0 | 0 | 16.113 |
| BRCAN2025093 | 0 | 0 | 0 | 0 | 0 | 0 | 28.411 |
| BRCAN2026197 | 3.367 | 0 | 0 | 0 | 0 | 0 | 1.021 |
| BRCAN2027364 | 0 | 0 | 0 | 0 | 0 | 0 | 1.941 |
| BRCAN2028040 | 0 | 0 | 0 | 0 | 0 | 0 | 17.285 |
| BRCOC1000040 | 0 | 0 | 20.746 | 0 | 0 | 0 | 3.856 |
| BRCOC2003125 | 0 | 0 | 39.975 | 0 | 0 | 0 | 0 |
| BRCOC2003187 | 1.696 | 0 | 0 | 0 | 0 | 0 | 0 |
| BRCOC2005903 | 0 | 0 | 0 | 0 | 0 | 60.058 | 0 |
| BRCOC2006189 | 0 | 0 | 0 | 0 | 0 | 0 | 2.170 |
| BRCOC2009937 | 0 | 0 | 0 | 0 | 0 | 0 | 10.502 |
| BRCOC2010123 | 4.726 | 0 | 0 | 0 | 0 | 0 | 0 |
| BRCOC2012172 | 0 | 0 | 0 | 0 | 0 | 0 | 18.387 |
| BRHIP1000104 | 0 | 0 | 0 | 0 | 0 | 0 | 2.136 |
| BRHIP1000174 | 0 | 0 | 0 | 0 | 0 | 0 | 3.314 |
| BRHIP2000163 | 0 | 0 | 0 | 0 | 0 | 0 | 24.447 |
| BRHIP2000534 | 0 | 0 | 2.408 | 0 | 0 | 9.367 | 0.224 |
| BRHIP2000553 | 0 | 0 | 0 | 0 | 0 | 0 | 5.039 |
| BRHIP2001074 | 0 | 0 | 0 | 0 | 0 | 0 | 12.807 |
| BRHIP2003917 | 0 | 0 | 0 | 0 | 0 | 80.343 | 7.676 |
| BRHIP2007305 | 0 | 25.144 | 0 | 0 | 0 | 0 | 1.480 |
| BRHIP2011491 | 0 | 0 | 0 | 0 | 17.524 | 0 | 1.081 |
| BRHIP2011891 | 0 | 0 | 0 | 0 | 0 | 0 | 39.051 |
| BRHIP2013958 | 0 | 0 | 0 | 0 | 0 | 0 | 23.489 |
| BRHIP2014228 | 0 | 0 | 0 | 0 | 0 | 0 | 9.622 |
| BRHIP2015153 | 0 | 0 | 0 | 0 | 0 | 0 | 6.549 |
| BRHIP2015679 | 0 | 0 | 17.647 | 0 | 0 | 0 | 3.280 |
| BRHIP2017010 | 0 | 0 | 0 | 0 | 0 | 0 | 8.986 |
| BRHIP2018635 | 0 | 0 | 0 | 0 | 0 | 0 | 39.051 |
| BRHIP2018712 | 0 | 0 | 0 | 0 | 0 | 13.856 | 1.324 |
| BRHIP2019149 | 0 | 0 | 0 | 0 | 0 | 75.561 | 0 |
| BRHIP2021762 | 0 | 0 | 19.598 | 0 | 0 | 0 | 0 |
| BRHIP2021858 | 0 | 0 | 0 | 70.621 | 0 | 0 | 0 |
| BRHIP2021870 | 19.152 | 0 | 0 | 0 | 0 | 0 | 2.902 |
| BRHIP2022326 | 1.835 | 0 | 0 | 0 | 0 | 0 | 1.112 |
| BRHIP2023762 | 0 | 53.006 | 0 | 0 | 0 | 0 | 0 |
| BRHIP2023869 | 0 | 0 | 0 | 0 | 0 | 0 | 23.489 |
| BRHIP2023888 | 0.794 | 0 | 0 | 0 | 0 | 0 | 2.405 |
| BRHIP2024742 | 0 | 0 | 17.547 | 0 | 0 | 0 | 4.076 |
| BRHIP2024911 | 0 | 0 | 0 | 0 | 0 | 0 | 12.117 |
| BRHIP2027077 | 4.356 | 0 | 0 | 0 | 0 | 0 | 0 |
| BRHIP3000111 | 2.208 | 0 | 7.202 | 0 | 0 | 0 | 0 |
| BRHIP3001481 | 0 | 0 | 0 | 0 | 0 | 0 | 61.565 |
| BRHIP3003306 | 0 | 0 | 0 | 0 | 0 | 0 | 39.051 |
| BRHIP3003961 | 0 | 0 | 0 | 0 | 0 | 0 | 12.398 |
| BRHIP3005037 | 0 | 0 | 0 | 0 | 0 | 0 | 17.599 |
| BRHIP3005142 | 0 | 0 | 0 | 0 | 0 | 0 | 39.051 |
| BRHIP3006294 | 0 | 0 | 0 | 0 | 0 | 0 | 26.066 |
| BRHIP3007183 | 0 | 0 | 0 | 0 | 0 | 0 | 8.961 |
| BRHIP3007195 | 0 | 0 | 0 | 0 | 0 | 0 | 24.263 |
| BRHIP3007223 | 4.349 | 0 | 0 | 0 | 0 | 0 | 3.954 |
| BRHIP3012997 | 0 | 0 | 0 | 0 | 0 | 0 | 0.606 |
| BRHIP3013588 | 0 | 0 | 0 | 0 | 0 | 0 | 39.051 |
| BRHIP3017855 | 0 | 0 | 0 | 0 | 0 | 0 | 7.509 |
| BRHIP3020046 | 2.185 | 0 | 0 | 0 | 0 | 0 | 0 |
| BRSSN2000498 | 2.360 | 0 | 0 | 0 | 0 | 0 | 0.715 |
| BRSSN2000566 | 0 | 0 | 0 | 0 | 0 | 0 | 3.180 |
| BRSSN2000684 | 0 | 0 | 0 | 0 | 0 | 0 | 12.254 |
| BRSSN2001869 | 0 | 0 | 0 | 0 | 0 | 0 | 15.785 |
| BRSSN2004657 | 0 | 0 | 0 | 0 | 0 | 0 | 14.939 |
| BRSSN2009518 | 3.715 | 0 | 0 | 0 | 0 | 0 | 4.504 |
| BRSSN2013696 | 0 | 0 | 0 | 0 | 0 | 0 | 25.682 |
| BRSSN2013702 | 20.460 | 0 | 0 | 0 | 0 | 0 | 0 |
| BRSSN2014299 | 0 | 0 | 0 | 0 | 0 | 0 | 2.415 |
| BRSSN2014610 | 7.700 | 0 | 0 | 0 | 0 | 0 | 0 |
| BRSSN2015238 | 7.384 | 0 | 0 | 0 | 0 | 0 | 0 |
| BRSSN2015497 | 0 | 0 | 0 | 0 | 0 | 0 | 65.450 |
| BRSSN2015982 | 0 | 0 | 0 | 0 | 0 | 0 | 10.620 |
| BRSTN1000083 | 1.377 | 0 | 0 | 0 | 0 | 0 | 0.835 |
| BRSTN2000367 | 0 | 0 | 0 | 0 | 0 | 0 | 15.347 |
| BRSTN2011961 | 0 | 6.433 | 4.075 | 0 | 6.140 | 1.981 | 0.189 |
| BRSTN2012069 | 0.673 | 2.731 | 0.067 | 7.585 | 1.805 | 2.071 | 0.563 |
| BRSTN2012174 | 0 | 4.492 | 0 | 0 | 8.576 | 2.768 | 0.793 |
| BRSTN2013502 | 0 | 0 | 0 | 0 | 0 | 0 | 1.589 |
| BRSTN2015889 | 0 | 0 | 0 | 0 | 0 | 0 | 2.532 |
| BRSTN2016470 | 1.416 | 0 | 0 | 9.238 | 9.281 | 0 | 2.146 |
| BRSTN2016678 | 0 | 0 | 0 | 0 | 0 | 0 | 5.998 |
| BRSTN2017104 | 0 | 0 | 0 | 0 | 0 | 0 | 1.275 |
| BRTHA2006975 | 0 | 50.497 | 0 | 0 | 0 | 0 | 0 |
| BRTHA2008335 | 0 | 0 | 57.267 | 0 | 0 | 0 | 0 |
| BRTHA2012714 | 0 | 27.840 | 0 | 0 | 0 | 0 | 0 |
| BRTHA2013054 | 0 | 0 | 0 | 0 | 0 | 0 | 31.413 |
| BRTHA2016577 | 0 | 0 | 0 | 0 | 0 | 0 | 3.085 |
| BRTHA2016765 | 0 | 0 | 0 | 0 | 0 | 0 | 7.692 |
| BRTHA2018443 | 0 | 0 | 0 | 0 | 0 | 0 | 28.890 |
| BRTHA2035743 | 14.636 | 0 | 0 | 0 | 0 | 0 | 4.436 |
| BRTHA3000456 | 0 | 0 | 0 | 0 | 0 | 0 | 37.085 |
| BRTHA3003074 | 0 | 0 | 0 | 0 | 0 | 0 | 7.360 |
| BRTHA3003490 | 3.501 | 0 | 0 | 0 | 0 | 0 | 1.061 |
| BRTHA3003736 | 0 | 0 | 0 | 0 | 0 | 0 | 1.406 |
| BRTHA3004307 | 0 | 0 | 0 | 0 | 0 | 0 | 1.969 |
| BRTHA3007472 | 0 | 0 | 0 | 0 | 0 | 0 | 7.652 |
| BRTHA3008778 | 0 | 0 | 0 | 0 | 0 | 0 | 16.240 |
| BRTHA3009090 | 25.386 | 0 | 0 | 0 | 0 | 0 | 0 |
| BRTHA3011194 | 0 | 0 | 0 | 0 | 0 | 0 | 2.310 |
| BRTHA3011361 | 0 | 0 | 0 | 0 | 0 | 0 | 37.085 |
| BRTHA3020314 | 0 | 0 | 0 | 0 | 0 | 0 | 13.312 |
| BRTHA3026507 | 0 | 0 | 0 | 0 | 0 | 0 | 9.136 |
| CD34C3000252 | 0 | 0 | 0 | 0 | 0 | 0 | 1.073 |
| CD34C3000424 | 0 | 0 | 0 | 0 | 0 | 0 | 1.497 |
| CHONS2002829 | 0 | 0 | 0 | 0 | 0 | 0 | 5.340 |
| COLON2001721 | 0 | 0 | 0 | 0 | 0 | 0 | 3.616 |
| CTONG1000052 | 1.303 | 0 | 0 | 12.751 | 0 | 0 | 1.580 |
| CTONG1000087 | 0 | 0 | 0 | 0 | 0 | 0 | 9.570 |
| CTONG1000093 | 0 | 0 | 0 | 0 | 0 | 0 | 25.979 |
| CTONG1000218 | 0 | 0 | 3.387 | 0 | 0 | 3.294 | 0.630 |
| CTONG1000241 | 0 | 0 | 0 | 0 | 0 | 0 | 2.773 |
| CTONG2000063 | 4.617 | 0 | 0 | 0 | 0 | 0 | 8.396 |
| CTONG2000201 | 0 | 0 | 13.636 | 0 | 0 | 0 | 0 |
| CTONG2000452 | 0 | 0 | 0 | 0 | 0 | 19.927 | 1.904 |
| CTONG2000469 | 0 | 0 | 0 | 0 | 0 | 0 | 3.818 |
| CTONG2000508 | 0 | 0 | 0 | 0 | 0 | 0 | 1.032 |
| CTONG2001366 | 0 | 0 | 54.528 | 0 | 0 | 0 | 10.134 |
| CTONG2001748 | 0 | 0 | 14.705 | 0 | 0 | 0 | 0 |
| CTONG2001800 | 0 | 0 | 0 | 0 | 0 | 0 | 18.484 |
| CTONG2001858 | 0 | 0 | 0 | 0 | 0 | 50.495 | 0 |
| CTONG2002073 | 3.159 | 0 | 0 | 0 | 0 | 0 | 0.957 |
| CTONG2002095 | 0 | 0 | 0 | 0 | 0 | 0 | 4.578 |
| CTONG2002143 | 0 | 0 | 0 | 0 | 0 | 0 | 25.979 |
| CTONG2002270 | 0 | 0 | 0 | 0 | 0 | 0 | 12.829 |
| CTONG2002744 | 1.270 | 0 | 0 | 0 | 0 | 0 | 0.770 |
| CTONG2002766 | 0 | 0 | 0 | 0 | 0 | 0 | 23.170 |
| CTONG2002803 | 0 | 0 | 0 | 0 | 0 | 0 | 1.925 |
| CTONG2002832 | 24.179 | 0 | 0 | 0 | 0 | 0 | 14.656 |
| CTONG2002841 | 0 | 0 | 0 | 0 | 0 | 0 | 6.924 |
| CTONG2003189 | 0 | 0 | 0 | 0 | 0 | 0 | 25.979 |
| CTONG2003293 | 19.937 | 0 | 0 | 0 | 0 | 0 | 6.042 |
| CTONG2003298 | 1.565 | 16.118 | 0 | 0 | 0 | 0 | 0 |
| CTONG2003361 | 0 | 0 | 0 | 0 | 0 | 0 | 15.360 |
| CTONG2003517 | 24.179 | 0 | 0 | 0 | 0 | 0 | 0 |
| CTONG2003524 | 0 | 0 | 0 | 0 | 0 | 11.025 | 0 |
| CTONG2003945 | 0 | 0 | 0 | 0 | 0 | 73.112 | 6.985 |
| CTONG2004487 | 0 | 0 | 0 | 0 | 0 | 0 | 7.420 |
| CTONG2005278 | 0 | 0 | 20.273 | 0 | 0 | 0 | 0 |
| CTONG2005553 | 1.545 | 0 | 0 | 0 | 0 | 0 | 0.468 |
| CTONG2005615 | 0 | 0 | 0 | 0 | 0 | 0 | 9.325 |
| CTONG2005913 | 0 | 0 | 31.391 | 0 | 0 | 0 | 2.917 |
| CTONG2006004 | 0 | 0 | 0 | 0 | 0 | 0 | 2.070 |
| CTONG2006235 | 0 | 0 | 0 | 0 | 0 | 0 | 1.071 |
| CTONG2006377 | 0 | 0 | 0 | 0 | 0 | 0 | 23.023 |
| CTONG2006412 | 0 | 0 | 0 | 0 | 0 | 0 | 4.058 |
| CTONG2006562 | 0 | 0 | 0 | 0 | 0 | 0 | 0.915 |
| CTONG2006798 | 0 | 0 | 0 | 0 | 0 | 0 | 6.308 |
| CTONG2006932 | 2.373 | 0 | 0 | 0 | 0 | 0 | 0 |
| CTONG2007007 | 0 | 0 | 0 | 0 | 0 | 6.369 | 1.217 |
| CTONG2007072 | 4.640 | 0 | 0 | 0 | 0 | 0 | 0 |
| CTONG2007078 | 2.756 | 0 | 26.969 | 0 | 0 | 0 | 0 |
| CTONG2007104 | 0 | 0 | 0 | 0 | 0 | 0 | 16.263 |
| CTONG2007399 | 0 | 0 | 0 | 0 | 0 | 0 | 53.310 |
| CTONG2007474 | 0 | 0 | 0 | 0 | 0 | 72.676 | 0 |
| CTONG2007500 | 3.244 | 0 | 0 | 0 | 0 | 5.145 | 0.492 |
| CTONG2007586 | 12.963 | 0 | 0 | 0 | 0 | 0 | 0 |
| CTONG2007613 | 18.879 | 0 | 0 | 0 | 0 | 0 | 5.722 |
| CTONG2007776 | 0 | 0 | 0 | 0 | 0 | 0 | 19.462 |
| CTONG2008398 | 0 | 0 | 0 | 0 | 0 | 5.231 | 1.000 |
| CTONG2008405 | 0 | 0 | 0 | 0 | 0 | 0 | 14.385 |
| CTONG2008466 | 0 | 0 | 54.999 | 0 | 0 | 0 | 0 |
| CTONG2008506 | 0 | 0 | 0 | 0 | 0 | 0 | 0.615 |
| CTONG2008518 | 0 | 0 | 0 | 0 | 0 | 0 | 5.035 |
| CTONG2009529 | 0 | 0 | 0 | 0 | 0 | 43.261 | 0 |
| CTONG2009963 | 0 | 0 | 0 | 0 | 0 | 0 | 27.025 |
| CTONG2010652 | 0 | 0 | 0 | 0 | 0 | 0 | 21.013 |
| CTONG2010821 | 4.624 | 0 | 0 | 0 | 0 | 0 | 0.467 |
| CTONG2011801 | 0 | 0 | 0 | 0 | 0 | 20.259 | 1.936 |
| CTONG2012001 | 0 | 0 | 0 | 0 | 0 | 0 | 4.674 |
| CTONG2012050 | 0 | 0 | 0 | 0 | 0 | 0 | 13.931 |
| CTONG2012101 | 34.050 | 0 | 0 | 0 | 0 | 0 | 20.639 |
| CTONG2012452 | 0.768 | 0 | 2.505 | 0 | 0 | 0 | 0.931 |
| CTONG2012607 | 0 | 0 | 0 | 0 | 0 | 0 | 2.261 |
| CTONG2012745 | 0 | 0 | 0 | 0 | 0 | 0 | 3.626 |
| CTONG2012847 | 3.714 | 0 | 0 | 0 | 0 | 0 | 2.251 |
| CTONG2013178 | 0 | 0 | 0 | 0 | 0 | 64.748 | 0 |
| CTONG2013222 | 0 | 0 | 0 | 0 | 79.674 | 0 | 0 |
| CTONG2013348 | 0 | 0 | 0 | 0 | 0 | 0 | 3.596 |
| CTONG2013934 | 0 | 0 | 0 | 0 | 0 | 0 | 4.534 |
| CTONG2014369 | 0 | 0 | 0 | 0 | 0 | 28.473 | 5.441 |
| CTONG2014898 | 12.440 | 0 | 0 | 0 | 0 | 0 | 3.770 |
| CTONG2015091 | 0 | 0 | 0 | 0 | 0 | 0 | 0.531 |
| CTONG2015330 | 0 | 0 | 0 | 0 | 0 | 0 | 18.590 |
| CTONG2015358 | 0 | 0 | 0 | 0 | 0 | 0 | 25.979 |
| CTONG2016185 | 0 | 0 | 0 | 0 | 0 | 17.787 | 0 |
| CTONG2016408 | 7.985 | 0 | 0 | 0 | 0 | 0 | 4.840 |
| CTONG2016575 | 1.072 | 0 | 0 | 0 | 0 | 0 | 2.275 |
| CTONG2016869 | 0 | 0 | 0 | 0 | 0 | 0 | 1.727 |
| CTONG2016931 | 0 | 0 | 0 | 0 | 0 | 0 | 3.990 |
| CTONG2016942 | 0 | 0 | 0 | 0 | 0 | 78.602 | 0 |
| CTONG2017094 | 0 | 0 | 0 | 0 | 0 | 0 | 5.846 |
| CTONG2017429 | 0 | 0 | 0 | 0 | 0 | 0 | 9.435 |
| CTONG2017500 | 0 | 0 | 0 | 0 | 0 | 0 | 10.390 |
| CTONG2017798 | 0 | 0 | 0 | 0 | 0 | 0 | 13.027 |
| CTONG2017998 | 0 | 0 | 0 | 0 | 0 | 0 | 3.275 |
| CTONG2018383 | 9.750 | 0 | 0 | 0 | 0 | 0 | 0 |
| CTONG2018632 | 0 | 0 | 0 | 0 | 0 | 0 | 5.228 |
| CTONG2018637 | 0 | 0 | 0 | 0 | 0 | 0 | 4.288 |
| CTONG2018652 | 0 | 0 | 0 | 0 | 0 | 0 | 25.979 |
| CTONG2018739 | 0 | 0 | 0 | 0 | 0 | 0 | 5.066 |
| CTONG2018808 | 16.987 | 0 | 0 | 0 | 0 | 0 | 10.297 |
| CTONG2018843 | 23.945 | 0 | 0 | 0 | 0 | 0 | 7.257 |
| CTONG2018898 | 2.077 | 0 | 0 | 0 | 0 | 0 | 0 |
| CTONG2019400 | 0 | 0 | 0 | 0 | 0 | 0 | 38.711 |
| CTONG2019788 | 0 | 0 | 0 | 0 | 0 | 0 | 1.999 |
| CTONG2020484 | 0 | 0 | 4.135 | 0 | 0 | 0 | 0 |
| CTONG2020522 | 0 | 0 | 0 | 0 | 0 | 0 | 14.980 |
| CTONG2020560 | 0 | 0 | 0 | 0 | 0 | 10.264 | 4.903 |
| CTONG2020582 | 0 | 0 | 0 | 0 | 0 | 0 | 12.542 |
| CTONG2020638 | 26.704 | 0 | 0 | 0 | 0 | 0 | 0 |
| CTONG2020974 | 0 | 0 | 0 | 0 | 0 | 0 | 25.979 |
| CTONG2021289 | 0 | 0 | 0 | 0 | 0 | 0 | 6.726 |
| CTONG2023449 | 0 | 0 | 0 | 0 | 0 | 78.602 | 0 |
| CTONG2027263 | 0 | 0 | 0 | 0 | 0 | 0 | 21.530 |
| CTONG2028124 | 7.588 | 0 | 0 | 0 | 0 | 0 | 1.314 |
| CTONG2028309 | 15.831 | 0 | 0 | 0 | 0 | 0 | 14.394 |
| CTONG2028758 | 0 | 0 | 0 | 0 | 0 | 0 | 10.513 |
| CTONG3001123 | 0 | 0 | 0 | 0 | 0 | 0 | 15.389 |
| CTONG3002518 | 0 | 0 | 0 | 0 | 0 | 57.732 | 0 |
| CTONG3002835 | 2.370 | 0 | 0 | 0 | 0 | 0 | 5.745 |
| CTONG3006067 | 0 | 0 | 0 | 0 | 0 | 0 | 25.979 |
| CTONG3008894 | 1.568 | 16.146 | 0 | 0 | 0 | 0 | 2.376 |
| CTONG3009028 | 0 | 0 | 0 | 0 | 0 | 0 | 2.104 |
| CTONG3009239 | 0 | 32.069 | 0 | 0 | 0 | 0 | 0 |
| D30ST2001670 | 0 | 0 | 0 | 0 | 0 | 0 | 31.707 |
| D30ST2002068 | 0.463 | 0 | 0 | 0 | 0 | 0 | 0 |
| D30ST2003024 | 0 | 0 | 0 | 0 | 0 | 0 | 5.302 |
| D30ST3000169 | 0 | 0 | 0 | 0 | 0 | 6.696 | 0 |
| D90ST2000031 | 0 | 0 | 0 | 0 | 0 | 0 | 3.088 |
| D90ST2003762 | 0 | 48.412 | 0 | 0 | 0 | 0 | 0 |
| DFNES1000150 | 14.452 | 0 | 0 | 0 | 0 | 0 | 0 |
| DFNES2000011 | 0 | 0 | 0 | 0 | 0 | 0 | 0.357 |
| DFNES2000153 | 0 | 0 | 0 | 0 | 0 | 21.906 | 0 |
| DFNES2000268 | 0 | 24.526 | 0 | 0 | 0 | 0 | 0 |
| DFNES2000335 | 0 | 0 | 0 | 0 | 0 | 0 | 9.291 |
| DFNES2000443 | 0 | 15.077 | 0 | 0 | 0 | 4.644 | 0 |
| DFNES2000526 | 5.960 | 0 | 0 | 0 | 0 | 0 | 0 |
| DFNES2002966 | 0 | 0 | 0 | 0 | 0 | 0 | 9.984 |
| DFNES2003192 | 0 | 66.531 | 0 | 0 | 0 | 0 | 0 |
| DFNES2004346 | 0 | 0 | 0 | 0 | 0 | 0 | 2.046 |
| DFNES2004371 | 0 | 35.042 | 0 | 0 | 0 | 0 | 2.063 |
| DFNES2007113 | 0 | 0 | 0 | 0 | 0 | 45.721 | 0 |
| DFNES2007634 | 5.751 | 0 | 0 | 0 | 0 | 0 | 3.486 |
| DFNES2008088 | 5.670 | 0 | 0 | 0 | 0 | 0 | 0 |
| DFNES2011380 | 0 | 0 | 0 | 0 | 0 | 0 | 7.641 |
| DFNES2011499 | 0 | 0 | 0 | 0 | 0 | 0 | 12.166 |
| FCBBF1000024 | 0 | 0 | 0 | 0 | 0 | 0 | 1.435 |
| FCBBF1000027 | 0.790 | 0 | 0 | 0 | 0 | 2.506 | 0.239 |
| FCBBF1000061 | 0 | 0 | 0 | 0 | 0 | 0 | 1.537 |
| FCBBF1000063 | 0 | 0 | 0 | 0 | 0 | 0 | 3.910 |
| FCBBF1000077 | 0 | 0 | 5.697 | 0 | 0 | 0 | 0 |
| FCBBF1000139 | 0 | 0 | 0 | 0 | 0 | 0 | 1.143 |
| FCBBF1000197 | 0 | 0 | 0 | 0 | 0 | 0 | 2.793 |
| FCBBF1000294 | 0 | 0 | 7.574 | 0 | 0 | 0 | 2.111 |
| FCBBF1000374 | 0 | 0 | 0 | 0 | 0 | 0 | 26.135 |
| FCBBF1000425 | 11.260 | 0 | 0 | 0 | 0 | 0 | 10.238 |
| FCBBF1000563 | 0 | 0 | 0 | 0 | 0 | 0 | 0.982 |
| FCBBF1000574 | 0 | 0 | 0 | 0 | 0 | 0 | 1.357 |
| FCBBF1000760 | 0 | 0 | 0 | 0 | 0 | 0 | 3.425 |
| FCBBF2000087 | 6.222 | 0 | 0 | 0 | 0 | 0 | 0 |
| FCBBF2000195 | 0 | 92.321 | 0 | 0 | 0 | 0 | 0 |
| FCBBF2000199 | 0 | 0 | 0 | 0 | 0 | 0 | 1.829 |
| FCBBF2000576 | 0 | 0 | 79.200 | 0 | 0 | 0 | 0 |
| FCBBF2000591 | 0 | 0 | 0 | 0 | 0 | 0 | 0.375 |
| FCBBF2000885 | 3.311 | 0 | 0 | 0 | 0 | 0 | 2.007 |
| FCBBF2002111 | 0 | 0 | 0 | 0 | 0 | 78.739 | 0 |
| FCBBF2002349 | 0 | 0 | 0 | 0 | 0 | 0 | 7.742 |
| FCBBF2002801 | 0 | 0 | 0 | 0 | 0 | 17.757 | 0 |
| FCBBF2003102 | 0 | 0 | 0 | 0 | 0 | 0 | 13.089 |
| FCBBF2005658 | 0 | 0 | 0 | 0 | 0 | 0 | 5.088 |
| FCBBF3000110 | 13.929 | 0 | 0 | 0 | 0 | 0 | 0 |
| FCBBF3000228 | 38.659 | 0 | 0 | 0 | 0 | 0 | 5.858 |
| FCBBF3000388 | 0 | 0 | 0 | 0 | 0 | 0 | 1.615 |
| FCBBF3000434 | 0 | 0 | 0 | 0 | 0 | 0 | 2.420 |
| FCBBF3000536 | 0 | 0 | 0 | 0 | 0 | 0 | 1.742 |
| FCBBF3001081 | 11.326 | 0 | 18.471 | 0 | 0 | 0 | 0 |
| FCBBF3001281 | 0 | 0 | 0 | 0 | 0 | 0 | 13.310 |
| FCBBF3001377 | 0 | 0 | 0 | 0 | 0 | 0 | 20.193 |
| FCBBF3001470 | 0 | 0 | 0 | 0 | 0 | 0 | 0.887 |
| FCBBF3001632 | 3.330 | 0 | 0 | 0 | 0 | 0 | 1.009 |
| FCBBF3001818 | 0 | 0 | 0 | 0 | 0 | 0 | 5.954 |
| FCBBF3001977 | 0 | 0 | 0 | 0 | 0 | 0 | 4.869 |
| FCBBF3003800 | 0.850 | 0 | 0 | 0 | 0 | 0 | 0.257 |
| FCBBF3004261 | 0 | 0 | 0 | 0 | 0 | 0 | 11.826 |
| FCBBF3004473 | 0 | 0 | 8.082 | 0 | 0 | 0 | 0.751 |
| FCBBF3005330 | 1.494 | 0 | 4.873 | 0 | 0 | 0 | 13.585 |
| FCBBF3005497 | 0 | 0 | 0 | 0 | 0 | 0 | 10.792 |
| FCBBF3006821 | 0 | 0 | 0 | 0 | 0 | 0 | 22.420 |
| FCBBF3007597 | 53.863 | 0 | 0 | 0 | 0 | 0 | 0 |
| FCBBF3008159 | 0 | 0 | 0 | 0 | 0 | 0 | 40.612 |
| FCBBF3008556 | 0 | 0 | 0 | 0 | 0 | 0 | 26.135 |
| FCBBF3009541 | 1.778 | 0 | 0 | 0 | 0 | 0 | 1.347 |
| FCBBF3011485 | 0 | 0 | 0 | 0 | 0 | 0 | 13.111 |
| FCBBF3012288 | 0 | 0 | 0 | 0 | 0 | 0 | 26.135 |
| FCBBF3012347 | 0 | 48.750 | 0 | 0 | 0 | 15.017 | 1.435 |
| FCBBF3013266 | 0 | 0 | 0 | 0 | 0 | 0 | 13.819 |
| FCBBF3013506 | 0 | 0 | 0 | 0 | 0 | 0 | 15.524 |
| FCBBF3014770 | 0 | 0 | 0 | 0 | 0 | 0 | 6.238 |
| FCBBF3015727 | 0 | 0 | 0 | 0 | 0 | 0 | 26.135 |
| FCBBF3016928 | 0 | 19.462 | 0 | 0 | 0 | 0 | 0.573 |
| FCBBF3017396 | 0 | 0 | 0 | 0 | 0 | 0 | 5.338 |
| FCBBF3017531 | 0 | 0 | 0 | 0 | 0 | 10.970 | 0 |
| FCBBF3017918 | 0 | 0 | 0 | 0 | 0 | 0 | 8.560 |
| FCBBF3018796 | 0 | 0 | 21.839 | 0 | 0 | 0 | 2.029 |
| FCBBF3019455 | 0 | 0 | 0 | 0 | 0 | 0 | 10.647 |
| FCBBF3019839 | 0 | 0 | 0 | 0 | 0 | 0 | 2.448 |
| FCBBF3021807 | 9.352 | 0 | 30.500 | 0 | 0 | 0 | 0 |
| FCBBF3021940 | 53.863 | 0 | 0 | 0 | 0 | 0 | 0 |
| FCBBF3023667 | 0 | 0 | 0 | 0 | 0 | 0.909 | 0.434 |
| FCBBF3024002 | 12.241 | 0 | 0 | 0 | 0 | 0 | 3.710 |
| FCBBF3025730 | 0 | 0 | 0 | 0 | 0 | 0 | 38.827 |
| FCBBF3025737 | 0 | 0 | 0 | 0 | 0 | 0 | 4.249 |
| FCBBF3026651 | 0 | 0 | 0 | 0 | 0 | 0 | 19.080 |
| FCBBF3028202 | 0 | 0 | 0 | 0 | 0 | 0 | 15.020 |
| FCBBF3028593 | 0 | 0 | 0 | 0 | 0 | 0 | 2.639 |
| FCBBF4000446 | 0 | 0 | 5.284 | 0 | 0 | 0 | 0 |
| FCBBF4000500 | 0 | 0 | 0 | 0 | 0 | 0 | 5.729 |
| FCBBF4000548 | 31.525 | 0 | 0 | 0 | 0 | 0 | 0 |
| FCBBF5000261 | 0 | 0 | 0 | 0 | 0 | 0 | 6.788 |
| FEBRA1000022 | 11.352 | 0 | 0 | 0 | 0 | 0 | 0 |
| FEBRA1000057 | 0 | 0 | 0 | 0 | 0 | 0 | 28.370 |
| FEBRA1000088 | 0 | 0 | 0 | 0 | 0 | 29.198 | 0 |
| FEBRA2000105 | 0 | 0 | 0 | 0 | 0 | 0 | 0.469 |
| FEBRA2000210 | 0 | 0 | 0 | 14.918 | 0 | 0 | 0 |
| FEBRA2000282 | 0 | 0 | 0 | 0 | 0 | 0 | 20.775 |
| FEBRA2000311 | 0 | 0 | 0 | 0 | 0 | 68.498 | 6.544 |
| FEBRA2000438 | 0 | 0 | 0 | 0 | 0 | 0 | 5.775 |
| FEBRA2000452 | 0 | 0 | 0 | 0 | 0 | 6.862 | 0.656 |
| FEBRA2000510 | 0 | 0 | 0 | 0 | 0 | 25.245 | 0 |
| FEBRA2000532 | 0 | 0 | 0 | 0 | 0 | 21.879 | 0 |
| FEBRA2000733 | 0.727 | 7.486 | 7.113 | 0 | 0 | 1.153 | 0.110 |
| FEBRA2000740 | 0 | 0 | 0 | 0 | 0 | 7.738 | 1.479 |
| FEBRA2000762 | 0 | 0 | 0 | 0 | 0 | 0 | 4.066 |
| FEBRA2000856 | 0 | 0 | 0 | 0 | 0 | 0 | 41.502 |
| FEBRA2000881 | 0 | 0 | 0 | 0 | 0 | 0 | 8.276 |
| FEBRA2000972 | 32.671 | 0 | 0 | 0 | 0 | 0 | 0 |
| FEBRA2001133 | 0 | 0 | 0 | 0 | 0 | 0 | 20.775 |
| FEBRA2001334 | 12.403 | 0 | 0 | 0 | 0 | 0 | 0 |
| FEBRA2001492 | 0 | 0 | 0 | 0 | 0 | 0 | 4.231 |
| FEBRA2001523 | 0 | 0 | 0 | 0 | 0 | 0 | 5.558 |
| FEBRA2001571 | 4.523 | 0 | 0 | 0 | 0 | 0 | 1.371 |
| FEBRA2001752 | 0 | 0 | 0 | 0 | 0 | 0 | 10.296 |
| FEBRA2001828 | 0 | 0 | 0 | 0 | 0 | 0 | 7.113 |
| FEBRA2002429 | 0 | 86.973 | 0 | 0 | 0 | 0 | 0 |
| FEBRA2002527 | 0 | 0 | 0 | 0 | 0 | 0 | 5.616 |
| FEBRA2002707 | 0 | 0 | 0 | 0 | 0 | 0 | 2.355 |
| FEBRA2002933 | 0 | 0 | 2.603 | 0 | 0 | 0 | 0.242 |
| FEBRA2003100 | 1.420 | 0 | 0 | 0 | 0 | 0 | 0.431 |
| FEBRA2003833 | 0 | 0 | 0 | 0 | 0 | 0 | 2.261 |
| FEBRA2003926 | 0 | 15.505 | 4.911 | 0 | 0 | 0 | 0 |
| FEBRA2004023 | 0 | 0 | 0 | 0 | 0 | 0 | 20.775 |
| FEBRA2004191 | 0 | 0 | 0 | 0 | 0 | 0 | 25.927 |
| FEBRA2004224 | 2.497 | 0 | 0 | 0 | 0 | 0 | 0 |
| FEBRA2004293 | 0 | 0 | 0 | 0 | 0 | 0 | 1.738 |
| FEBRA2004412 | 0 | 0 | 0 | 0 | 0 | 0 | 1.919 |
| FEBRA2005416 | 0 | 0 | 0 | 0 | 0 | 0 | 1.404 |
| FEBRA2005734 | 0 | 0 | 5.940 | 0 | 0 | 0 | 0 |
| FEBRA2005752 | 0 | 0 | 0 | 0 | 0 | 0 | 2.721 |
| FEBRA2005995 | 3.024 | 0 | 0 | 0 | 0 | 9.591 | 10.080 |
| FEBRA2006092 | 0 | 0 | 0 | 0 | 0 | 0 | 2.439 |
| FEBRA2006112 | 0 | 0 | 0 | 0 | 0 | 0 | 21.573 |
| FEBRA2006270 | 2.521 | 0 | 0 | 0 | 0 | 0 | 1.528 |
| FEBRA2006368 | 0 | 0 | 0 | 0 | 0 | 0 | 4.062 |
| FEBRA2006372 | 2.897 | 0 | 0 | 0 | 0 | 0 | 0.878 |
| FEBRA2006401 | 0 | 0 | 0 | 0 | 0 | 1.717 | 0 |
| FEBRA2006664 | 0 | 0 | 0 | 0 | 0 | 0 | 20.775 |
| FEBRA2007200 | 0 | 0 | 0 | 0 | 0 | 0 | 20.775 |
| FEBRA2007212 | 0 | 0 | 0 | 0 | 0 | 0 | 10.264 |
| FEBRA2007620 | 0 | 0 | 0 | 0 | 0 | 0 | 20.775 |
| FEBRA2007622 | 2.225 | 0 | 0 | 0 | 0 | 7.059 | 2.023 |
| FEBRA2007708 | 0 | 0 | 0 | 0 | 0 | 0 | 72.628 |
| FEBRA2007801 | 0 | 0 | 0 | 0 | 0 | 0 | 3.227 |
| FEBRA2007900 | 0 | 0 | 0 | 0 | 0 | 0 | 5.067 |
| FEBRA2007901 | 0 | 0 | 0 | 0 | 0 | 0 | 2.423 |
| FEBRA2008036 | 0 | 0 | 0 | 0 | 0 | 0 | 5.602 |
| FEBRA2008081 | 0 | 0 | 9.963 | 0 | 0 | 0 | 0.926 |
| FEBRA2008087 | 1.160 | 0 | 2.522 | 7.566 | 0 | 0 | 0.352 |
| FEBRA2008583 | 0 | 0 | 0 | 0 | 0 | 0.904 | 0.086 |
| FEBRA2008755 | 3.543 | 0 | 0 | 0 | 0 | 0 | 0 |
| FEBRA2008836 | 0 | 0 | 0 | 0 | 0 | 0 | 20.775 |
| FEBRA2009328 | 0 | 0 | 0 | 0 | 0 | 67.807 | 0 |
| FEBRA2009419 | 5.700 | 0 | 0 | 0 | 0 | 0 | 1.727 |
| FEBRA2009514 | 0 | 0 | 0 | 0 | 0 | 45.326 | 2.165 |
| FEBRA2009986 | 0 | 0 | 0 | 0 | 0 | 0 | 4.202 |
| FEBRA2014297 | 0 | 0 | 0 | 0 | 0 | 0 | 2.794 |
| FEBRA2014417 | 0 | 11.993 | 3.798 | 0 | 0 | 0 | 0.353 |
| FEBRA2015085 | 0 | 0 | 0 | 0 | 0 | 0 | 0.997 |
| FEBRA2016572 | 0 | 0 | 0 | 0 | 0 | 0 | 12.844 |
| FEBRA2018476 | 2.357 | 0 | 0 | 23.059 | 0 | 0 | 0.714 |
| FEBRA2018746 | 0 | 0 | 0 | 0 | 0 | 51.169 | 0 |
| FEBRA2019663 | 0 | 0 | 61.269 | 0 | 0 | 0 | 0 |
| FEBRA2019711 | 0 | 0 | 14.875 | 0 | 0 | 0 | 1.382 |
| FEBRA2021339 | 0 | 0 | 0 | 0 | 0 | 0 | 20.775 |
| FEBRA2021966 | 9.304 | 0 | 0 | 0 | 0 | 0 | 0 |
| FEBRA2022013 | 0 | 0 | 66.137 | 0 | 0 | 0 | 0 |
| FEBRA2022055 | 1.148 | 0 | 0 | 0 | 0 | 0 | 0.348 |
| FEBRA2022504 | 0 | 0 | 0 | 0 | 0 | 0 | 3.221 |
| FEBRA2024150 | 0 | 0 | 0 | 0 | 0 | 0 | 44.030 |
| FEBRA2024987 | 0 | 0 | 0 | 0 | 0 | 0 | 6.430 |
| FEBRA2025427 | 0 | 0 | 0 | 0 | 0 | 16.960 | 0 |
| FEBRA2025838 | 0 | 0 | 0 | 17.336 | 0 | 0 | 0.537 |
| FEBRA2026984 | 0 | 0 | 0 | 0 | 0 | 0 | 22.925 |
| FEBRA2028516 | 0 | 0 | 0 | 0 | 0 | 0 | 4.486 |
| FELIV1000153 | 0 | 0 | 1.160 | 0 | 0 | 1.128 | 0.323 |
| HCASM1000115 | 2.236 | 0 | 0 | 0 | 0 | 0 | 0 |
| HCASM2000016 | 0 | 0 | 0 | 0 | 0 | 0 | 0.488 |
| HCASM2000138 | 0 | 0 | 0 | 0 | 0 | 0 | 11.043 |
| HCASM2000363 | 0 | 15.104 | 0 | 14.351 | 0 | 0 | 0 |
| HCASM2003018 | 0 | 0 | 0 | 0 | 0 | 0 | 23.077 |
| HCHON1000030 | 0.782 | 0 | 3.828 | 0 | 3.845 | 0 | 0.356 |
| HCHON1000131 | 0 | 0 | 0 | 0 | 0 | 0 | 5.364 |
| HCHON1000166 | 0 | 0 | 0 | 0 | 0 | 0 | 1.966 |
| HCHON2000056 | 0 | 0 | 1.995 | 0 | 6.013 | 5.822 | 0.371 |
| HCHON2000087 | 1.334 | 0 | 0 | 0 | 0 | 0 | 0 |
| HCHON2000160 | 2.171 | 0 | 0 | 0 | 0 | 0 | 1.316 |
| HCHON2000226 | 0 | 0 | 11.347 | 0 | 17.098 | 0 | 0.264 |
| HCHON2000244 | 0 | 0 | 4.627 | 0 | 0 | 4.501 | 0.430 |
| HCHON2000265 | 0 | 0 | 0 | 0 | 0 | 0 | 1.323 |
| HCHON2000323 | 0 | 0 | 0 | 0 | 0 | 0 | 1.211 |
| HCHON2000373 | 0 | 0 | 0 | 0 | 0 | 6.934 | 0.663 |
| HCHON2000475 | 2.871 | 0 | 0 | 0 | 0 | 9.107 | 0 |
| HCHON2000508 | 4.027 | 0 | 0 | 0 | 0 | 0 | 0 |
| HCHON2000626 | 2.535 | 0 | 0 | 0 | 0 | 0 | 0.768 |
| HCHON2000663 | 18.399 | 0 | 0 | 0 | 0 | 0 | 0 |
| HCHON2000698 | 6.182 | 0 | 0 | 0 | 0 | 0 | 5.621 |
| HCHON2000738 | 0 | 0 | 0 | 0 | 0 | 0 | 5.839 |
| HCHON2000815 | 0 | 0 | 0 | 0 | 0 | 0 | 1.826 |
| HCHON2000826 | 4.631 | 15.897 | 0 | 0 | 0 | 0 | 0.468 |
| HCHON2001039 | 4.813 | 0 | 7.849 | 0 | 0 | 0 | 3.647 |
| HCHON2001099 | 0 | 0 | 0 | 0 | 0 | 0 | 1.783 |
| HCHON2001200 | 0.933 | 0 | 0 | 0 | 0 | 0 | 0 |
| HCHON2001217 | 0 | 0 | 0 | 0 | 0 | 0 | 4.763 |
| HCHON2001359 | 1.836 | 0 | 0 | 0 | 0 | 0 | 0.557 |
| HCHON2001407 | 0 | 0 | 0 | 0 | 0 | 0 | 2.065 |
| HCHON2001505 | 9.692 | 0 | 0 | 0 | 0 | 0 | 2.937 |
| HCHON2001519 | 0 | 0 | 0 | 0 | 0 | 0 | 9.363 |
| HCHON2001535 | 0 | 0 | 0 | 0 | 0 | 0 | 6.028 |
| HCHON2001598 | 0 | 0 | 0 | 0 | 0 | 0 | 1.588 |
| HCHON2001665 | 6.657 | 0 | 0 | 0 | 0 | 10.558 | 1.009 |
| HCHON2002496 | 0 | 0 | 0 | 0 | 0 | 0 | 5.077 |
| HCHON2004002 | 8.467 | 0 | 5.523 | 0 | 0 | 0 | 0 |
| HCHON2005921 | 8.945 | 0 | 0 | 0 | 0 | 0 | 2.711 |
| HCHON2006250 | 0 | 0 | 11.007 | 0 | 0 | 0 | 2.046 |
| HCHON2006770 | 0 | 62.687 | 0 | 0 | 0 | 0 | 0 |
| HEART1000010 | 0 | 0 | 24.034 | 0 | 0 | 0 | 0 |
| HEART1000149 | 0 | 0 | 0 | 0 | 0 | 0 | 0.614 |
| HEART1000185 | 0 | 0 | 0 | 0 | 0 | 0 | 0.517 |
| HEART2000444 | 0 | 0 | 0 | 0 | 0 | 0 | 5.505 |
| HEART2000506 | 3.782 | 0 | 0 | 0 | 0 | 0 | 0 |
| HEART2003836 | 0 | 0 | 0 | 0 | 0 | 0 | 1.345 |
| HEART2004764 | 0 | 0 | 0 | 0 | 0 | 0 | 16.386 |
| HEART2004931 | 0 | 0 | 0 | 0 | 0 | 46.525 | 0 |
| HEART2004941 | 0 | 0 | 0 | 0 | 0 | 0 | 3.105 |
| HEART2005310 | 0 | 0 | 0 | 0 | 0 | 0 | 4.557 |
| HEART2006521 | 5.159 | 0 | 0 | 0 | 0 | 0 | 0 |
| HEART2007696 | 0 | 0 | 0 | 0 | 0 | 0 | 3.256 |
| HHDPC1000083 | 2.111 | 0 | 0 | 0 | 0 | 0 | 0.640 |
| HHDPC1000114 | 0 | 0 | 0 | 0 | 0 | 0 | 0.475 |
| HHDPC1000118 | 0 | 0 | 0 | 0 | 0 | 14.339 | 1.370 |
| HHDPC1000163 | 2.712 | 0 | 0 | 0 | 0 | 0 | 0 |
| HHDPC2000070 | 0 | 0 | 0 | 0 | 0 | 0 | 6.291 |
| HHDPC2000102 | 0 | 0 | 0 | 0 | 0 | 32.486 | 3.104 |
| HHDPC2000104 | 3.990 | 0 | 0 | 0 | 0 | 0 | 0 |
| HHDPC2000115 | 5.642 | 0 | 0 | 0 | 0 | 0 | 0 |
| HHDPC2000455 | 3.556 | 0 | 0 | 0 | 0 | 0 | 0 |
| HHDPC2003439 | 0.549 | 0 | 1.789 | 0 | 0 | 0 | 0.665 |
| HHDPC2003472 | 0 | 0 | 0 | 0 | 0 | 0 | 8.495 |
| HHDPC2003983 | 1.201 | 0 | 0 | 5.877 | 0 | 0 | 1.274 |
| HHDPC2005794 | 0 | 0 | 0 | 0 | 0 | 0 | 5.200 |
| HHDPC2007267 | 0 | 0 | 10.303 | 0 | 0 | 0 | 0.319 |
| HHDPC2009178 | 21.893 | 0 | 0 | 0 | 0 | 0 | 6.635 |
| HHDPC2009528 | 0 | 0 | 0 | 0 | 0 | 0 | 8.497 |
| HLUNG1000037 | 0 | 0 | 0 | 0 | 0 | 0 | 5.744 |
| HLUNG1000055 | 0 | 0 | 3.808 | 0 | 0 | 0 | 1.415 |
| HLUNG1000099 | 0 | 0 | 0 | 0 | 0 | 0 | 28.221 |
| HLUNG1000110 | 0 | 0 | 0 | 0 | 0 | 0 | 15.126 |
| HLUNG2000004 | 0 | 0 | 17.793 | 0 | 0 | 0 | 0 |
| HLUNG2000314 | 0 | 0 | 0 | 0 | 0 | 0 | 1.604 |
| HLUNG2000501 | 0 | 0 | 0 | 0 | 0 | 0 | 1.682 |
| HLUNG2000846 | 0 | 0 | 0 | 0 | 0 | 0 | 2.953 |
| HLUNG2000884 | 0 | 0 | 0 | 0 | 0 | 14.645 | 2.798 |
| HLUNG2001146 | 0 | 0 | 0 | 0 | 0 | 0 | 3.427 |
| HLUNG2001518 | 0 | 0 | 0 | 0 | 0 | 0 | 2.144 |
| HLUNG2002648 | 0 | 0 | 0 | 0 | 0 | 0 | 2.363 |
| HLUNG2003003 | 0 | 0 | 0 | 0 | 0 | 0 | 5.224 |
| HLUNG2003042 | 0 | 0 | 16.745 | 0 | 0 | 0 | 0 |
| HLUNG2004159 | 3.910 | 0 | 0 | 0 | 0 | 0 | 3.555 |
| HLUNG2004534 | 0 | 0 | 20.405 | 0 | 0 | 0 | 0 |
| HLUNG2005133 | 0 | 0 | 0 | 0 | 0 | 0 | 13.892 |
| HLUNG2005230 | 0 | 0 | 16.080 | 0 | 0 | 0 | 0 |
| HLUNG2008139 | 0 | 0 | 0 | 0 | 0 | 0 | 14.983 |
| HLUNG2008225 | 0 | 0 | 0 | 0 | 0 | 0 | 10.785 |
| HLUNG2008637 | 0 | 0 | 11.883 | 0 | 0 | 0 | 2.208 |
| HLUNG2008885 | 0 | 0 | 0 | 0 | 0 | 0 | 7.056 |
| HLUNG2009225 | 6.506 | 0 | 0 | 0 | 0 | 0 | 1.972 |
| HLUNG2017262 | 3.420 | 0 | 0 | 0 | 0 | 0 | 14.513 |
| HSYRA1000062 | 0 | 0 | 0 | 0 | 0 | 0 | 0.280 |
| HSYRA1000119 | 1.983 | 0 | 3.234 | 0 | 0 | 0 | 3.306 |
| HSYRA1000137 | 0 | 0 | 0 | 0 | 0 | 0 | 2.436 |
| HSYRA1000148 | 0 | 0 | 0 | 0 | 0 | 0 | 4.311 |
| HSYRA1000152 | 2.573 | 0 | 0 | 0 | 0 | 0 | 2.339 |
| HSYRA1000178 | 0 | 0 | 0 | 0 | 0 | 0 | 4.917 |
| HSYRA2000159 | 0.520 | 0 | 0 | 0 | 0 | 2.475 | 0 |
| HSYRA2000190 | 0 | 0 | 0 | 0 | 0 | 0 | 4.658 |
| HSYRA2000224 | 3.878 | 0 | 0 | 0 | 0 | 0 | 1.175 |
| HSYRA2000232 | 0 | 0 | 0 | 0 | 0 | 0 | 1.450 |
| HSYRA2000255 | 0 | 29.899 | 0 | 0 | 0 | 0 | 0 |
| HSYRA2000507 | 0 | 0 | 0 | 0 | 0 | 0 | 8.042 |
| HSYRA2000640 | 3.675 | 0 | 0 | 0 | 0 | 5.829 | 2.228 |
| HSYRA2000743 | 3.338 | 0 | 0 | 0 | 0 | 0 | 2.529 |
| HSYRA2000787 | 0 | 0 | 0 | 0 | 0 | 0 | 2.033 |
| HSYRA2001103 | 1.829 | 0 | 0 | 0 | 0 | 0 | 0 |
| HSYRA2001138 | 0 | 0 | 0 | 0 | 0 | 0 | 0.500 |
| HSYRA2001225 | 0 | 0 | 0 | 0 | 0 | 0 | 1.933 |
| HSYRA2001396 | 0 | 0 | 0 | 0 | 0 | 10.394 | 0 |
| HSYRA2001420 | 12.017 | 0 | 0 | 0 | 0 | 0 | 0 |
| HSYRA2001476 | 5.206 | 0 | 0 | 0 | 0 | 0 | 0.316 |
| HSYRA2001567 | 4.834 | 0 | 0 | 0 | 0 | 0 | 0 |
| HSYRA2001595 | 0 | 0 | 4.007 | 0 | 0 | 0 | 2.607 |
| HSYRA2001615 | 0 | 0 | 0 | 0 | 0 | 0 | 1.356 |
| HSYRA2001621 | 0 | 0 | 0 | 0 | 0 | 1.255 | 0 |
| HSYRA2001631 | 0 | 0 | 0 | 0 | 0 | 0 | 3.812 |
| HSYRA2001638 | 4.878 | 0 | 0 | 0 | 0 | 0 | 1.478 |
| IMR321000210 | 0 | 0 | 7.130 | 0 | 0 | 0 | 0.663 |
| IMR321000219 | 1.816 | 6.234 | 0 | 0 | 0 | 0 | 0.183 |
| IMR321000242 | 0 | 0 | 0 | 0 | 0 | 0 | 7.352 |
| IMR321000253 | 2.197 | 0 | 0 | 0 | 0 | 0 | 0.666 |
| IMR321000266 | 0 | 0 | 0 | 0 | 0 | 0 | 1.850 |
| IMR322000010 | 0 | 0 | 66.596 | 0 | 0 | 0 | 0 |
| IMR322000144 | 0 | 0 | 0 | 0 | 0 | 0 | 2.132 |
| IMR322000223 | 0 | 0 | 9.579 | 0 | 0 | 9.317 | 1.780 |
| IMR322000243 | 1.850 | 0 | 0 | 0 | 0 | 0 | 1.682 |
| IMR322000555 | 0 | 0 | 0 | 0 | 0 | 0 | 3.900 |
| IMR322000730 | 0.296 | 3.044 | 0 | 11.570 | 0 | 0.938 | 1.165 |
| IMR322000742 | 0 | 0 | 0 | 0 | 0 | 0 | 1.082 |
| IMR322001332 | 0 | 0 | 0 | 0 | 0 | 18.216 | 6.962 |
| IMR322001380 | 0 | 0 | 0 | 0 | 0 | 0 | 1.296 |
| IMR322001435 | 2.026 | 0 | 0 | 0 | 0 | 0 | 1.228 |
| IMR322001491 | 0 | 0 | 0 | 0 | 0 | 65.975 | 0 |
| IMR322001584 | 0 | 0 | 0 | 0 | 0 | 0 | 0.816 |
| IMR322001600 | 0 | 0 | 1.133 | 0 | 0 | 3.305 | 0 |
| IMR322001710 | 8.366 | 0 | 0 | 0 | 0 | 0 | 6.339 |
| IMR322002993 | 0 | 0 | 0 | 0 | 0 | 0 | 10.175 |
| IMR322019070 | 0 | 0 | 0 | 0 | 0 | 0 | 5.247 |
| KIDNE1000145 | 0 | 0 | 19.453 | 0 | 0 | 0 | 1.808 |
| KIDNE2000085 | 4.436 | 0 | 0 | 0 | 0 | 0 | 0.672 |
| KIDNE2000252 | 1.843 | 0 | 0 | 0 | 0 | 0 | 3.352 |
| KIDNE2000266 | 0 | 0 | 0 | 0 | 0 | 0 | 2.752 |
| KIDNE2000403 | 1.782 | 18.349 | 0 | 0 | 0 | 0 | 1.620 |
| KIDNE2000497 | 0 | 0 | 0 | 0 | 0 | 21.454 | 0 |
| KIDNE2000517 | 0 | 0 | 0 | 0 | 0 | 21.431 | 0 |
| KIDNE2000574 | 0 | 0 | 0 | 0 | 0 | 5.121 | 0.489 |
| KIDNE2000665 | 4.175 | 0 | 0 | 0 | 0 | 0 | 0 |
| KIDNE2000947 | 0 | 0 | 0 | 0 | 0 | 0 | 3.304 |
| KIDNE2001162 | 0 | 0 | 3.283 | 0 | 0 | 0 | 0.610 |
| KIDNE2001467 | 1.124 | 0 | 0 | 0 | 0 | 0 | 2.045 |
| KIDNE2001847 | 0 | 0 | 0 | 0 | 0 | 0 | 2.379 |
| KIDNE2002252 | 0 | 0 | 0 | 0 | 0 | 0 | 14.250 |
| KIDNE2002883 | 4.892 | 0 | 0 | 0 | 0 | 0 | 0 |
| KIDNE2003305 | 0 | 0 | 17.763 | 0 | 0 | 0 | 0 |
| KIDNE2003316 | 0 | 0 | 53.223 | 0 | 0 | 0 | 0 |
| KIDNE2003357 | 31.890 | 0 | 0 | 0 | 0 | 0 | 0 |
| KIDNE2003941 | 0 | 0 | 0 | 0 | 0 | 0 | 0.330 |
| KIDNE2004295 | 0 | 0 | 0 | 0 | 0 | 43.680 | 0 |
| KIDNE2004864 | 0 | 0 | 0 | 0 | 0 | 0 | 6.382 |
| KIDNE2005676 | 0 | 0 | 0 | 0 | 0 | 0 | 3.679 |
| KIDNE2006009 | 0 | 0 | 0 | 0 | 0 | 0 | 9.640 |
| KIDNE2006014 | 0 | 0 | 0 | 0 | 0 | 20.315 | 1.941 |
| KIDNE2006030 | 0 | 0 | 15.012 | 0 | 0 | 0 | 1.395 |
| KIDNE2006248 | 0.671 | 0 | 0 | 0 | 0 | 2.127 | 0 |
| KIDNE2006760 | 0 | 0 | 0 | 0 | 0 | 0 | 4.410 |
| KIDNE2006775 | 0 | 0 | 12.888 | 0 | 0 | 0 | 2.395 |
| KIDNE2007328 | 3.816 | 0 | 0 | 0 | 0 | 0 | 0.578 |
| KIDNE2007352 | 0 | 0 | 0 | 0 | 0 | 0 | 0.543 |
| KIDNE2007910 | 19.546 | 0 | 0 | 0 | 0 | 0 | 0 |
| KIDNE2007954 | 0 | 0 | 29.658 | 0 | 0 | 0 | 0 |
| KIDNE2008022 | 0 | 0 | 0 | 0 | 0 | 0 | 15.790 |
| KIDNE2008048 | 2.314 | 0 | 3.774 | 0 | 0 | 0 | 0.351 |
| KIDNE2009367 | 0 | 0 | 0 | 0 | 0 | 0 | 1.478 |
| KIDNE2010750 | 0 | 0 | 0 | 0 | 0 | 0 | 13.925 |
| KIDNE2013346 | 0 | 0 | 0 | 0 | 0 | 0 | 27.273 |
| KIDNE2013845 | 2.411 | 0 | 0 | 0 | 0 | 0 | 0.731 |
| KIDNE2013866 | 0 | 0 | 0 | 0 | 0 | 0 | 15.790 |
| KIDNE2014290 | 1.512 | 0 | 9.863 | 0 | 0 | 0 | 3.208 |
| KIDNE2015710 | 0 | 0 | 0 | 39.504 | 0 | 0 | 0 |
| KIDNE2016570 | 0 | 0 | 0 | 0 | 0 | 0 | 15.790 |
| KIDNE2018217 | 0 | 0 | 0 | 0 | 0 | 41.518 | 0 |
| KIDNE2018352 | 0 | 0 | 0 | 0 | 0 | 0 | 9.324 |
| LIVER1000079 | 0 | 0 | 0 | 0 | 0 | 0 | 3.436 |
| LIVER1000126 | 0 | 0 | 0 | 0 | 0 | 0 | 5.011 |
| LIVER1000132 | 0 | 11.115 | 0 | 0 | 10.609 | 6.847 | 0.654 |
| LIVER1000542 | 0 | 0 | 0 | 0 | 0 | 0 | 6.883 |
| LIVER2000033 | 0 | 30.726 | 0 | 0 | 0 | 0 | 0 |
| LIVER2000416 | 0 | 0 | 0 | 0 | 0 | 0 | 1.479 |
| LIVER2000446 | 0 | 0 | 0 | 0 | 0 | 28.144 | 0 |
| LIVER2001113 | 0 | 0 | 0 | 0 | 0 | 0 | 7.012 |
| LIVER2001539 | 0 | 0 | 0 | 0 | 0 | 0 | 3.255 |
| LIVER2001608 | 0 | 0 | 0 | 0 | 0 | 8.985 | 0 |
| LIVER2002842 | 0 | 0 | 0 | 0 | 0 | 0 | 1.248 |
| LIVER2003581 | 0 | 0 | 0 | 0 | 70.979 | 0 | 0 |
| LIVER2005789 | 0 | 0 | 6.333 | 37.997 | 0 | 0 | 0 |
| LIVER2007783 | 4.425 | 0 | 0 | 0 | 0 | 0 | 0 |
| LYMPB1000141 | 0 | 0 | 0 | 0 | 0 | 0 | 2.800 |
| MAMGL1000032 | 0.695 | 0 | 1.133 | 6.801 | 0 | 1.102 | 0.421 |
| MAMGL1000035 | 0 | 0 | 0 | 0 | 0 | 0 | 0.658 |
| MAMGL1000100 | 0 | 0 | 0 | 0 | 0 | 0 | 0.193 |
| MAMGL1000173 | 1.143 | 0 | 0 | 0 | 0 | 0 | 0.347 |
| MESAN1000050 | 0 | 0 | 0 | 0 | 0 | 10.983 | 0 |
| MESAN1000080 | 3.079 | 0 | 0 | 0 | 0 | 0 | 1.867 |
| MESAN1000101 | 0 | 0 | 0 | 0 | 0 | 0 | 7.546 |
| MESAN2000092 | 0 | 0 | 0 | 0 | 0 | 0 | 5.784 |
| MESAN2000149 | 0 | 0 | 0 | 0 | 0 | 0 | 1.606 |
| MESAN2000267 | 0 | 0 | 0 | 0 | 0 | 0 | 0.268 |
| MESAN2000291 | 0 | 0 | 0 | 0 | 0 | 0 | 14.987 |
| MESAN2000434 | 0 | 0 | 0 | 0 | 0 | 0 | 14.987 |
| MESAN2000501 | 0 | 66.636 | 0 | 0 | 0 | 0 | 0 |
| MESAN2000909 | 0 | 0 | 0 | 0 | 0 | 0 | 3.610 |
| MESAN2001450 | 0 | 0 | 0 | 0 | 0 | 0 | 1.885 |
| MESAN2002086 | 0.898 | 0 | 0 | 0 | 0 | 2.848 | 0.272 |
| MESAN2002519 | 0 | 0 | 0 | 0 | 0 | 31.731 | 3.032 |
| MESAN2002724 | 25.857 | 0 | 0 | 0 | 0 | 0 | 0.603 |
| MESAN2002790 | 10.550 | 0 | 0 | 0 | 0 | 0 | 0 |
| MESAN2002844 | 0 | 0 | 0 | 0 | 0 | 0 | 4.737 |
| MESAN2002940 | 0 | 0 | 0 | 0 | 0 | 0 | 20.789 |
| MESAN2003444 | 8.035 | 0 | 0 | 0 | 0 | 0 | 4.870 |
| MESAN2003622 | 0 | 0 | 0 | 0 | 0 | 0 | 0.393 |
| MESAN2005633 | 0 | 0 | 0 | 0 | 0 | 0 | 11.221 |
| MESAN2005689 | 0 | 0 | 0 | 0 | 0 | 0 | 4.056 |
| MESAN2005766 | 0 | 0 | 6.937 | 0 | 0 | 0 | 2.578 |
| MESAN2005958 | 5.808 | 0 | 0 | 0 | 0 | 0 | 1.760 |
| MESAN2006563 | 0 | 0 | 0 | 0 | 0 | 0 | 0.451 |
| MESAN2007755 | 0 | 0 | 0 | 0 | 0 | 0 | 5.980 |
| MESAN2008679 | 0 | 0 | 49.292 | 0 | 0 | 0 | 0 |
| MESAN2009580 | 0 | 24.667 | 0 | 0 | 0 | 0 | 0 |
| MESAN2011984 | 3.680 | 0 | 0 | 0 | 0 | 0 | 1.115 |
| MESAN2012054 | 0 | 0 | 35.889 | 0 | 0 | 0 | 1.667 |
| MESAN2013284 | 0 | 0 | 0 | 0 | 0 | 0 | 0.803 |
| MESAN2014412 | 0 | 0 | 0 | 0 | 0 | 0 | 12.581 |
| MESAN2015515 | 0 | 0 | 0 | 0 | 0 | 0 | 1.736 |
| MESAN2016159 | 0 | 0 | 0 | 0 | 0 | 0 | 14.987 |
| NB9N41000121 | 0 | 0 | 0 | 0 | 0 | 5.138 | 1.473 |
| NB9N41000340 | 3.128 | 0 | 0 | 0 | 0 | 0 | 0 |
| NB9N42000104 | 0 | 0 | 0 | 0 | 0 | 0 | 1.626 |
| NB9N42000342 | 0 | 16.015 | 0 | 0 | 15.287 | 4.933 | 0 |
| NHNPC2000187 | 2.928 | 0 | 6.367 | 9.550 | 0 | 0 | 0 |
| NHNPC2000206 | 0 | 0 | 0 | 0 | 0 | 0 | 2.244 |
| NHNPC2000212 | 0 | 0 | 0 | 0 | 0 | 0 | 2.278 |
| NHNPC2001108 | 0 | 0 | 0 | 0 | 0 | 0 | 2.553 |
| NOVAR1000091 | 0 | 0 | 27.245 | 0 | 0 | 0 | 0 |
| NOVAR1000102 | 0 | 0 | 0 | 0 | 0 | 0 | 0.906 |
| NOVAR2000783 | 0 | 0 | 0 | 0 | 0 | 0 | 2.472 |
| NT2NE1000014 | 18.748 | 0 | 0 | 0 | 0 | 0 | 0 |
| NT2NE1000018 | 0 | 0 | 0 | 0 | 0 | 0 | 11.378 |
| NT2NE1000163 | 0 | 0 | 2.849 | 0 | 0 | 0 | 0.265 |
| NT2NE2000056 | 0 | 0 | 0 | 0 | 0 | 0 | 1.027 |
| NT2NE2000174 | 0 | 0 | 2.684 | 0 | 0 | 0 | 0.998 |
| NT2NE2000195 | 0 | 0 | 0 | 0 | 32.590 | 0 | 1.005 |
| NT2NE2000259 | 0 | 0 | 0 | 0 | 0 | 0 | 5.516 |
| NT2NE2000260 | 0 | 0 | 0.850 | 5.099 | 0 | 2.479 | 0 |
| NT2NE2000327 | 0 | 0 | 0 | 0 | 0 | 0 | 27.955 |
| NT2NE2000383 | 0 | 0 | 0 | 0 | 0 | 10.396 | 0.993 |
| NT2NE2000384 | 0 | 0 | 0 | 0 | 0 | 15.747 | 3.009 |
| NT2NE2000575 | 0 | 5.340 | 1.691 | 0 | 0 | 3.290 | 0.943 |
| NT2NE2000707 | 0.722 | 7.433 | 2.354 | 0 | 0 | 0 | 0.656 |
| NT2NE2000763 | 0 | 0 | 0 | 0 | 0 | 0 | 2.353 |
| NT2NE2000809 | 0 | 0 | 0 | 0 | 0 | 0 | 2.216 |
| NT2NE2000950 | 0 | 0 | 0 | 0 | 0 | 0 | 6.852 |
| NT2NE2000963 | 1.484 | 5.095 | 1.614 | 0 | 4.864 | 0 | 0.450 |
| NT2NE2001005 | 0 | 0 | 0 | 0 | 0 | 0 | 15.281 |
| NT2NE2001048 | 0 | 0 | 0 | 0 | 0 | 0 | 1.957 |
| NT2NE2001176 | 2.463 | 0 | 0 | 0 | 0 | 0 | 0 |
| NT2NE2001435 | 0 | 0 | 0 | 0 | 0 | 0 | 2.085 |
| NT2NE2001545 | 0 | 0 | 0 | 0 | 0 | 0 | 2.342 |
| NT2NE2001598 | 0 | 0 | 0 | 0 | 0 | 0 | 8.292 |
| NT2NE2001648 | 0 | 0 | 0 | 0 | 0 | 0 | 5.673 |
| NT2NE2001697 | 0 | 0 | 0 | 0 | 0 | 74.712 | 0 |
| NT2NE2001793 | 2.237 | 0 | 0 | 0 | 0 | 0 | 6.780 |
| NT2NE2002870 | 0 | 0 | 0 | 0 | 0 | 0 | 2.984 |
| NT2NE2003569 | 0 | 0 | 0 | 0 | 0 | 0 | 2.269 |
| NT2NE2003887 | 0 | 0 | 0 | 0 | 0 | 0 | 4.080 |
| NT2NE2003921 | 0 | 0 | 0 | 0 | 0 | 0 | 3.988 |
| NT2NE2004255 | 0 | 0 | 0 | 0 | 0 | 0 | 7.787 |
| NT2NE2005419 | 0 | 0 | 0 | 0 | 0 | 0 | 7.569 |
| NT2NE2005688 | 0 | 0 | 0 | 0 | 0 | 0 | 0.976 |
| NT2NE2006478 | 0 | 0 | 0 | 0 | 0 | 0 | 7.024 |
| NT2NE2006909 | 0 | 0 | 0 | 0 | 0 | 0 | 0.559 |
| NT2NE2008785 | 0 | 0 | 65.999 | 0 | 0 | 0 | 0 |
| NT2NE2010842 | 0 | 0 | 0 | 0 | 0 | 0 | 0.616 |
| NT2NE2010854 | 0 | 0 | 0 | 0 | 0 | 0 | 15.281 |
| NT2NE2011107 | 0 | 0 | 0 | 0 | 0 | 0 | 31.446 |
| NT2NE2011485 | 0 | 0 | 0 | 0 | 0 | 0 | 12.386 |
| NT2NE2012790 | 0 | 0 | 0 | 0 | 0 | 0 | 3.921 |
| NT2NE2014104 | 0 | 0 | 0 | 0 | 0 | 11.484 | 0 |
| NT2NE2017982 | 0 | 0 | 0 | 0 | 0 | 0 | 15.281 |
| NT2NE2018180 | 8.110 | 0 | 0 | 0 | 0 | 0 | 4.916 |
| NT2NE2018490 | 0 | 0 | 0 | 0 | 0 | 0 | 15.281 |
| NT2NE2019091 | 0 | 0 | 0 | 0 | 0 | 12.953 | 0 |
| NT2RI1000027 | 0 | 44.915 | 0 | 0 | 0 | 0 | 0 |
| NT2RI1000048 | 1.831 | 0 | 0 | 0 | 0 | 0 | 0 |
| NT2RI2000064 | 1.161 | 0 | 0 | 0 | 0 | 0 | 1.056 |
| NT2RI2000107 | 0 | 0 | 0 | 0 | 0 | 0 | 4.542 |
| NT2RI2000133 | 0 | 0 | 0 | 0 | 54.324 | 0 | 0 |
| NT2RI2000255 | 0 | 0 | 0 | 0 | 0 | 0 | 0.782 |
| NT2RI2000263 | 0 | 0 | 0 | 0 | 0 | 0 | 2.236 |
| NT2RI2000284 | 1.966 | 0 | 0 | 0 | 0 | 0 | 0.298 |
| NT2RI2000294 | 0 | 0 | 0 | 0 | 0 | 0 | 3.712 |
| NT2RI2000412 | 0 | 0 | 0 | 0 | 0 | 0 | 5.038 |
| NT2RI2000421 | 0 | 0 | 0 | 0 | 0 | 0 | 1.989 |
| NT2RI2000578 | 0 | 0 | 0 | 0 | 0 | 2.288 | 0.874 |
| NT2RI2000685 | 0 | 0 | 6.970 | 0 | 0 | 0 | 8.419 |
| NT2RI2000689 | 0 | 0 | 21.755 | 0 | 0 | 0 | 0 |
| NT2RI2000727 | 0.558 | 0 | 5.460 | 5.460 | 10.970 | 3.540 | 0.338 |
| NT2RI2001091 | 0 | 0 | 0 | 0 | 0 | 0 | 2.298 |
| NT2RI2001167 | 0 | 0 | 0 | 0 | 0 | 0 | 26.455 |
| NT2RI2001230 | 1.664 | 0 | 0 | 0 | 0 | 0 | 0 |
| NT2RI2001342 | 0 | 35.059 | 0 | 0 | 0 | 0 | 0 |
| NT2RI2001422 | 0 | 0 | 0 | 0 | 0 | 0 | 2.430 |
| NT2RI2001540 | 0.859 | 1.264 | 0.801 | 1.201 | 2.414 | 1.168 | 0.707 |
| NT2RI2001621 | 0 | 0 | 0 | 0 | 0 | 0 | 6.003 |
| NT2RI2001657 | 2.308 | 0 | 0 | 0 | 0 | 0 | 0.350 |
| NT2RI2001731 | 0 | 0 | 0 | 0 | 0 | 0 | 1.238 |
| NT2RI2001859 | 0 | 0 | 13.653 | 0 | 0 | 0 | 3.172 |
| NT2RI2001910 | 16.109 | 0 | 0 | 0 | 0 | 0 | 9.765 |
| NT2RI2002091 | 1.215 | 1.192 | 1.698 | 0.849 | 0.853 | 0.734 | 0.123 |
| NT2RI2002117 | 0 | 0 | 0 | 0 | 0 | 0 | 3.080 |
| NT2RI2002152 | 0 | 0 | 0 | 0 | 0 | 0 | 0.822 |
| NT2RI2002243 | 14.189 | 0 | 0 | 0 | 0 | 0 | 0 |
| NT2RI2002266 | 0 | 0 | 0 | 0 | 0 | 0 | 3.277 |
| NT2RI2002316 | 0 | 0 | 11.280 | 0 | 0 | 0 | 0 |
| NT2RI2002554 | 3.911 | 0 | 0 | 0 | 0 | 0 | 3.556 |
| NT2RI2002585 | 0 | 0 | 0 | 0 | 0 | 0 | 50.993 |
| NT2RI2002654 | 0 | 0 | 4.133 | 0 | 0 | 0 | 0 |
| NT2RI2002802 | 0 | 0 | 0 | 0 | 0 | 0 | 18.792 |
| NT2RI2002847 | 0 | 0 | 0 | 0 | 0 | 8.588 | 3.282 |
| NT2RI2002852 | 0 | 0 | 0 | 0 | 0 | 0 | 26.455 |
| NT2RI2003019 | 0 | 0 | 0 | 0 | 0 | 0 | 3.419 |
| NT2RI2003051 | 6.624 | 0 | 0 | 0 | 0 | 0 | 6.692 |
| NT2RI2003205 | 0 | 0 | 0 | 0 | 0 | 22.024 | 0 |
| NT2RI2003304 | 0 | 5.829 | 1.846 | 0 | 0 | 0 | 0.515 |
| NT2RI2003317 | 0 | 0 | 0 | 0 | 0 | 0 | 2.061 |
| NT2RI2003338 | 0 | 0 | 0 | 0 | 0 | 0 | 0.662 |
| NT2RI2003344 | 0 | 0 | 0 | 0 | 0 | 0 | 22.913 |
| NT2RI2003399 | 0 | 0 | 0 | 0 | 0 | 0 | 41.841 |
| NT2RI2003420 | 0 | 0 | 0 | 0 | 0 | 0 | 1.007 |
| NT2RI2003556 | 0 | 0 | 0 | 0 | 0 | 0 | 0.995 |
| NT2RI2003678 | 8.213 | 42.290 | 0 | 0 | 0 | 0 | 1.245 |
| NT2RI2003695 | 0 | 0 | 0 | 16.618 | 0 | 0 | 0.515 |
| NT2RI2003738 | 0 | 0 | 2.461 | 0 | 0 | 0 | 0.114 |
| NT2RI2003921 | 0 | 0 | 0 | 0 | 0 | 0 | 0.310 |
| NT2RI2003993 | 0 | 0 | 0 | 0 | 0 | 0 | 2.482 |
| NT2RI2004188 | 0 | 0 | 0 | 0 | 0 | 0 | 5.631 |
| NT2RI2004209 | 15.835 | 0 | 0 | 0 | 0 | 0 | 0 |
| NT2RI2004398 | 0 | 0 | 0 | 0 | 0 | 0 | 3.256 |
| NT2RI2004410 | 0 | 0 | 0 | 0 | 0 | 0 | 4.891 |
| NT2RI2004535 | 0 | 0 | 0 | 0 | 0 | 0 | 3.754 |
| NT2RI2004608 | 0 | 0 | 0 | 0 | 0 | 0 | 7.255 |
| NT2RI2005061 | 9.409 | 0 | 0 | 0 | 0 | 0 | 2.852 |
| NT2RI2005096 | 0 | 0 | 0 | 0 | 0 | 0 | 26.455 |
| NT2RI2005116 | 11.028 | 0 | 0 | 0 | 0 | 0 | 0.836 |
| NT2RI2005166 | 0 | 0 | 0 | 0 | 0 | 0 | 34.096 |
| NT2RI2005335 | 2.505 | 0 | 0 | 0 | 0 | 0 | 4.555 |
| NT2RI2005405 | 0.605 | 12.470 | 1.975 | 0 | 0 | 1.921 | 0.367 |
| NT2RI2005647 | 0 | 0 | 0 | 0 | 0 | 9.049 | 0 |
| NT2RI2005713 | 0 | 0 | 0 | 0 | 0 | 0 | 0.967 |
| NT2RI2005723 | 1.082 | 0 | 0 | 0 | 0 | 0 | 2.296 |
| NT2RI2005811 | 9.913 | 0 | 0 | 0 | 0 | 0 | 0 |
| NT2RI2005818 | 5.493 | 0 | 0 | 0 | 0 | 0 | 0 |
| NT2RI2006070 | 0 | 0 | 0 | 0 | 0 | 0 | 2.687 |
| NT2RI2006072 | 1.650 | 0 | 0 | 0 | 0 | 0 | 0.500 |
| NT2RI2006412 | 0 | 0 | 0 | 0 | 0 | 0 | 0.536 |
| NT2RI2006506 | 0 | 0 | 0 | 0 | 0 | 0 | 8.806 |
| NT2RI2006553 | 0 | 0 | 26.018 | 0 | 0 | 0 | 0 |
| NT2RI2006647 | 0 | 0 | 0 | 0 | 0 | 0 | 2.997 |
| NT2RI2006735 | 0 | 0 | 0 | 0 | 0 | 0 | 10.288 |
| NT2RI2006825 | 0 | 0 | 0 | 0 | 0 | 0 | 1.792 |
| NT2RI2006855 | 0 | 0 | 0 | 0 | 0 | 0 | 11.270 |
| NT2RI2006856 | 0 | 0 | 0 | 0 | 0 | 0 | 1.531 |
| NT2RI2006943 | 0 | 0 | 0 | 25.667 | 0 | 0 | 0 |
| NT2RI2007054 | 0 | 0 | 0 | 0 | 0 | 0 | 5.941 |
| NT2RI2007133 | 0 | 0 | 0 | 0 | 0 | 0 | 0.256 |
| NT2RI2007148 | 0 | 0 | 0 | 0 | 0 | 0 | 0.617 |
| NT2RI2007384 | 0.934 | 9.619 | 0 | 0 | 0 | 2.963 | 0.849 |
| NT2RI2007445 | 0 | 0 | 0 | 37.840 | 0 | 12.268 | 0 |
| NT2RI2007468 | 0 | 0 | 29.393 | 0 | 0 | 0 | 2.731 |
| NT2RI2007469 | 0 | 0 | 0 | 0 | 0 | 0 | 41.841 |
| NT2RI2007498 | 0 | 9.058 | 0 | 8.606 | 0 | 0 | 0.267 |
| NT2RI2007572 | 3.223 | 0 | 0 | 0 | 0 | 5.112 | 2.930 |
| NT2RI2007589 | 0 | 0 | 0 | 0 | 0 | 0 | 2.792 |
| NT2RI2007723 | 7.630 | 0 | 0 | 0 | 0 | 0 | 0 |
| NT2RI2007729 | 0 | 0 | 0 | 0 | 0 | 79.014 | 0 |
| NT2RI2007853 | 0 | 0 | 15.750 | 0 | 0 | 0 | 0 |
| NT2RI2007879 | 0 | 0 | 0 | 0 | 0 | 10.859 | 0 |
| NT2RI2008007 | 41.744 | 0 | 0 | 0 | 0 | 0 | 0 |
| NT2RI2008045 | 0 | 17.246 | 0 | 0 | 0 | 15.937 | 0 |
| NT2RI2008171 | 0 | 0 | 0 | 0 | 0 | 0 | 5.805 |
| NT2RI2008188 | 0 | 0 | 0 | 0 | 0 | 0 | 18.792 |
| NT2RI2008336 | 1.728 | 8.898 | 5.636 | 0 | 0 | 0 | 0.524 |
| NT2RI2008396 | 2.852 | 0 | 0 | 0 | 9.345 | 0 | 0.576 |
| NT2RI2008526 | 0 | 0 | 5.393 | 0 | 0 | 0 | 0 |
| NT2RI2008656 | 0 | 0 | 0 | 0 | 0 | 0 | 1.775 |
| NT2RI2008724 | 0 | 0 | 0 | 0 | 0 | 0 | 2.401 |
| NT2RI2008749 | 0 | 0 | 0 | 0 | 0 | 0 | 0.370 |
| NT2RI2008808 | 0 | 0 | 0 | 0 | 0 | 0 | 2.963 |
| NT2RI2008942 | 2.262 | 0 | 7.377 | 0 | 0 | 0 | 0.685 |
| NT2RI2009037 | 0 | 0 | 0 | 0 | 0 | 0 | 4.960 |
| NT2RI2009065 | 1.007 | 0 | 0 | 0 | 9.902 | 0 | 0.305 |
| NT2RI2009066 | 0 | 0 | 0 | 0 | 0 | 0 | 16.125 |
| NT2RI2009083 | 0 | 0 | 0 | 0 | 0 | 0 | 26.810 |
| NT2RI2009103 | 0 | 0 | 0 | 0 | 0 | 0 | 41.841 |
| NT2RI2009173 | 0 | 0 | 7.846 | 0 | 0 | 0 | 1.458 |
| NT2RI2009233 | 0 | 0 | 0 | 0 | 0 | 0 | 4.423 |
| NT2RI2009281 | 0 | 0 | 0 | 0 | 0 | 0 | 0.920 |
| NT2RI2009583 | 0 | 0 | 0 | 9.443 | 4.744 | 1.531 | 0.146 |
| NT2RI2012350 | 0.863 | 0 | 0 | 0 | 0 | 0 | 0.262 |
| NT2RI2012726 | 0 | 0 | 0 | 0 | 0 | 0 | 9.097 |
| NT2RI2013357 | 0 | 0 | 0 | 0 | 0 | 0 | 26.455 |
| NT2RI2015342 | 0 | 0 | 0 | 0 | 0 | 10.293 | 0.983 |
| NT2RI2015533 | 0 | 0 | 0 | 0 | 0 | 0 | 4.064 |
| NT2RI2018448 | 0 | 0 | 0 | 0 | 0 | 0 | 4.116 |
| NT2RI2024313 | 0 | 0 | 0 | 0 | 0 | 0 | 28.733 |
| NT2RI2024935 | 0 | 0 | 0 | 0 | 92.105 | 0 | 0 |
| NT2RI3001515 | 0 | 0 | 0 | 0 | 0 | 0 | 7.080 |
| NT2RI3003104 | 0 | 0 | 0 | 0 | 0 | 0 | 71.575 |
| NT2RI3005724 | 0 | 0 | 0 | 0 | 0 | 0 | 7.748 |
| NT2RI3006284 | 8.925 | 0 | 0 | 0 | 0 | 14.156 | 0 |
| NT2RI3006340 | 0 | 0 | 0 | 0 | 0 | 0 | 10.676 |
| NT2RI3007543 | 3.660 | 0 | 0 | 0 | 0 | 0 | 1.109 |
| NT2RI3009158 | 54.273 | 0 | 0 | 0 | 0 | 0 | 0 |
| NT2RP6000017 | 0 | 0 | 0 | 0 | 0 | 0 | 1.956 |
| NT2RP6000039 | 0 | 0 | 0 | 0 | 0 | 0 | 3.516 |
| NT2RP6000043 | 0 | 0 | 26.719 | 0 | 0 | 0 | 0 |
| NT2RP6000072 | 0 | 0 | 11.367 | 0 | 0 | 0 | 1.056 |
| NT2RP6000078 | 6.204 | 0 | 0 | 0 | 0 | 0 | 0 |
| NT2RP6000085 | 0 | 0 | 0 | 0 | 0 | 0 | 27.209 |
| NT2RP6000100 | 47.227 | 0 | 0 | 0 | 0 | 0 | 0 |
| NT2RP6000109 | 4.119 | 0 | 0 | 0 | 0 | 0 | 2.497 |
| NT2RP6000110 | 0 | 0 | 0 | 0 | 0 | 0 | 1.790 |
| NT2RP6000123 | 1.689 | 0 | 0 | 0 | 0 | 0 | 0.768 |
| NT2RP6000130 | 0 | 0 | 0 | 0 | 0 | 0 | 5.232 |
| NT2RP7000069 | 7.265 | 0 | 0 | 0 | 0 | 0 | 13.211 |
| NT2RP7000076 | 0 | 0 | 0 | 0 | 0 | 8.339 | 1.593 |
| NT2RP7000173 | 0 | 12.348 | 0 | 0 | 0 | 0 | 5.088 |
| NT2RP7000238 | 2.792 | 0 | 0 | 0 | 0 | 0 | 0.846 |
| NT2RP7000259 | 0 | 0 | 0 | 0 | 0 | 0 | 8.741 |
| NT2RP7000271 | 0 | 0 | 0 | 0 | 0 | 0 | 3.965 |
| NT2RP7000477 | 0 | 0 | 0 | 0 | 0 | 0 | 1.293 |
| NT2RP7000586 | 0 | 0 | 0 | 0 | 0 | 0 | 7.182 |
| NT2RP7000600 | 4.779 | 0 | 0 | 0 | 0 | 0 | 4.346 |
| NT2RP7000624 | 0 | 0 | 0 | 0 | 0 | 0 | 2.852 |
| NT2RP7000906 | 5.627 | 0 | 0 | 0 | 0 | 0 | 5.969 |
| NT2RP7001080 | 0 | 0 | 0 | 0 | 0 | 0 | 21.879 |
| NT2RP7001156 | 0 | 0 | 0 | 0 | 0 | 0 | 21.336 |
| NT2RP7001166 | 0 | 0 | 5.261 | 0 | 0 | 0 | 4.400 |
| NT2RP7001231 | 0 | 0 | 0 | 0 | 0 | 0 | 2.700 |
| NT2RP7001283 | 0 | 0 | 3.960 | 0 | 0 | 0 | 4.047 |
| NT2RP7001678 | 33.546 | 0 | 0 | 0 | 0 | 0 | 0 |
| NT2RP7001962 | 0 | 0 | 0 | 0 | 0 | 0 | 3.473 |
| NT2RP7002028 | 4.334 | 0 | 0 | 0 | 0 | 0 | 1.314 |
| NT2RP7002379 | 5.429 | 11.181 | 0 | 0 | 0 | 0 | 2.303 |
| NT2RP7002449 | 0 | 0 | 0 | 0 | 0 | 0 | 10.564 |
| NT2RP7002450 | 0 | 0 | 0 | 0 | 0 | 0 | 1.745 |
| NT2RP7002619 | 2.350 | 0 | 0 | 0 | 0 | 7.455 | 2.137 |
| NT2RP7002738 | 0 | 0 | 0 | 0 | 0 | 0 | 3.763 |
| NT2RP7002779 | 0 | 0 | 0 | 0 | 0 | 0 | 21.336 |
| NT2RP7002802 | 7.882 | 0 | 0 | 0 | 0 | 0 | 4.778 |
| NT2RP7002906 | 0 | 0 | 0 | 0 | 0 | 0 | 1.833 |
| NT2RP7002982 | 0 | 0 | 0 | 0 | 0 | 0 | 2.541 |
| NT2RP7003203 | 3.984 | 0 | 0 | 0 | 0 | 0 | 2.415 |
| NT2RP7003261 | 0 | 0 | 0 | 0 | 0 | 0 | 0.888 |
| NT2RP7003319 | 0 | 0 | 0 | 0 | 0 | 0 | 1.193 |
| NT2RP7003629 | 0 | 0 | 0 | 0 | 0 | 0 | 7.396 |
| NT2RP7003647 | 2.538 | 0 | 8.279 | 0 | 0 | 0 | 3.847 |
| NT2RP7003680 | 0 | 0 | 0 | 0 | 0 | 0 | 14.629 |
| NT2RP7003688 | 3.185 | 0 | 0 | 0 | 0 | 5.052 | 3.379 |
| NT2RP7003724 | 0 | 0 | 0 | 0 | 0 | 0 | 12.073 |
| NT2RP7003960 | 0 | 0 | 0 | 0 | 35.126 | 0 | 4.332 |
| NT2RP7004173 | 0 | 0 | 0 | 0 | 0 | 0 | 0.499 |
| NT2RP7004196 | 0 | 0 | 9.217 | 0 | 0 | 0 | 0 |
| NT2RP7004204 | 7.355 | 37.874 | 0 | 0 | 0 | 0 | 2.229 |
| NT2RP7004233 | 0 | 0 | 0 | 0 | 0 | 0 | 15.633 |
| NT2RP7004260 | 0 | 0 | 0 | 0 | 0 | 0 | 16.771 |
| NT2RP7004352 | 0 | 0 | 0 | 0 | 0 | 0 | 4.441 |
| NT2RP7004373 | 5.077 | 0 | 0 | 0 | 0 | 0 | 2.308 |
| NT2RP7004641 | 0 | 0 | 0 | 0 | 0 | 0 | 16.771 |
| NT2RP7004687 | 0 | 0 | 0 | 0 | 0 | 0 | 12.324 |
| NT2RP7004728 | 0 | 0 | 0 | 0 | 0 | 0 | 2.055 |
| NT2RP7004751 | 0 | 0 | 3.293 | 0 | 0 | 3.202 | 0 |
| NT2RP7004911 | 3.802 | 0 | 0 | 0 | 0 | 0 | 5.761 |
| NT2RP7004946 | 1.857 | 0 | 0 | 0 | 0 | 0 | 3.939 |
| NT2RP7005529 | 0 | 0 | 0 | 0 | 0 | 0 | 4.826 |
| NT2RP7005675 | 0 | 0 | 0 | 0 | 0 | 0 | 9.505 |
| NT2RP7005750 | 0 | 0 | 0 | 0 | 0 | 0 | 4.678 |
| NT2RP7006033 | 0 | 0 | 0 | 0 | 0 | 0 | 5.025 |
| NT2RP7006188 | 5.615 | 0 | 0 | 0 | 0 | 0 | 5.105 |
| NT2RP7006223 | 0 | 0 | 0 | 0 | 0 | 0 | 2.762 |
| NT2RP7006296 | 0 | 0 | 0 | 0 | 0 | 0 | 21.336 |
| NT2RP7006304 | 0 | 0 | 0 | 0 | 0 | 0 | 21.336 |
| NT2RP7006539 | 0 | 0 | 0 | 0 | 0 | 39.810 | 0 |
| NT2RP7006547 | 0 | 0 | 0 | 0 | 0 | 0 | 21.336 |
| NT2RP7006717 | 4.257 | 0 | 0 | 0 | 13.948 | 0 | 2.150 |
| NT2RP7007114 | 0 | 0 | 0 | 0 | 0 | 0 | 10.709 |
| NT2RP7007154 | 1.230 | 0 | 0 | 0 | 0 | 0 | 0 |
| NT2RP7007252 | 0 | 0 | 0 | 0 | 0 | 0 | 22.444 |
| NT2RP7007310 | 8.032 | 0 | 0 | 0 | 0 | 0 | 0 |
| NT2RP7007381 | 0 | 0 | 0 | 0 | 0 | 0 | 10.251 |
| NT2RP7007387 | 8.854 | 0 | 0 | 0 | 0 | 0 | 1.342 |
| NT2RP7007537 | 0 | 0 | 0 | 0 | 0 | 0 | 3.215 |
| NT2RP7007580 | 0 | 0 | 0 | 0 | 0 | 0 | 15.624 |
| NT2RP7007643 | 0 | 0 | 0 | 0 | 0 | 0 | 21.336 |
| NT2RP7007842 | 0 | 0 | 0 | 0 | 0 | 0 | 1.254 |
| NT2RP7007930 | 0 | 0 | 0 | 0 | 0 | 0 | 21.336 |
| NT2RP7008167 | 0 | 0 | 0 | 0 | 0 | 0 | 8.306 |
| NT2RP7008190 | 0 | 0 | 0 | 0 | 0 | 9.076 | 3.468 |
| NT2RP7008315 | 0 | 0 | 52.791 | 0 | 0 | 0 | 0 |
| NT2RP7008543 | 11.867 | 0 | 0 | 0 | 0 | 0 | 0 |
| NT2RP7009087 | 0 | 0 | 0 | 0 | 0 | 0 | 4.764 |
| NT2RP7009108 | 1.917 | 0 | 0 | 0 | 0 | 0 | 0 |
| NT2RP7009147 | 0 | 0 | 11.206 | 0 | 0 | 0 | 1.041 |
| NT2RP7009149 | 2.580 | 0 | 0 | 0 | 0 | 0 | 0 |
| NT2RP7009259 | 0 | 0 | 0 | 0 | 0 | 0 | 1.469 |
| NT2RP7009322 | 0 | 0 | 0 | 0 | 0 | 73.950 | 0 |
| NT2RP7009370 | 0 | 0 | 0 | 0 | 0 | 0 | 21.336 |
| NT2RP7009373 | 0 | 0 | 0 | 0 | 0 | 0 | 2.626 |
| NT2RP7009394 | 0 | 0 | 0 | 0 | 25.636 | 0 | 5.533 |
| NT2RP7009481 | 0 | 0 | 0 | 0 | 0 | 0 | 16.063 |
| NT2RP7009482 | 1.000 | 0 | 0 | 0 | 0 | 0 | 0.606 |
| NT2RP7014910 | 0 | 0 | 0 | 0 | 0 | 0 | 1.563 |
| NT2RP7020123 | 0 | 0 | 0 | 89.750 | 0 | 0 | 0 |
| NT2RP8000435 | 0 | 0 | 0 | 0 | 0 | 0 | 8.722 |
| NT2RP8007920 | 4.267 | 0 | 0 | 0 | 0 | 0 | 1.293 |
| NTONG1000033 | 2.643 | 0 | 0 | 0 | 0 | 0 | 4.004 |
| NTONG1000098 | 1.374 | 0 | 0 | 0 | 0 | 0 | 11.245 |
| NTONG1000246 | 0 | 0 | 0 | 0 | 0 | 0 | 6.133 |
| NTONG2000265 | 0 | 0 | 0 | 0 | 0 | 0 | 5.015 |
| NTONG2000334 | 0 | 0 | 0 | 0 | 0 | 0 | 1.336 |
| NTONG2000413 | 0 | 0 | 0 | 0 | 0 | 0 | 7.055 |
| NTONG2000800 | 0 | 0 | 0 | 0 | 0 | 21.737 | 0 |
| NTONG2000878 | 0 | 0 | 8.307 | 0 | 0 | 0 | 0 |
| NTONG2000977 | 2.120 | 0 | 0 | 0 | 0 | 6.726 | 0 |
| NTONG2000985 | 0 | 0 | 0 | 0 | 0 | 0 | 1.219 |
| NTONG2001137 | 2.468 | 25.420 | 0 | 0 | 0 | 7.830 | 0 |
| NTONG2001222 | 0 | 0 | 0 | 0 | 0 | 17.020 | 0 |
| NTONG2001550 | 0 | 0 | 0 | 0 | 0 | 0 | 2.275 |
| NTONG2001567 | 0.661 | 0 | 0 | 0 | 0 | 2.098 | 0.200 |
| NTONG2001587 | 0 | 0 | 0 | 0 | 0 | 12.221 | 0 |
| NTONG2001762 | 3.889 | 0 | 0 | 0 | 0 | 0 | 7.072 |
| NTONG2002582 | 0 | 0 | 0 | 0 | 0 | 0 | 9.834 |
| NTONG2003454 | 0 | 0 | 0 | 0 | 0 | 0 | 1.949 |
| NTONG2003928 | 0 | 0 | 0 | 0 | 0 | 0 | 3.808 |
| NTONG2004844 | 0 | 0 | 0 | 0 | 0 | 0 | 1.059 |
| NTONG2005391 | 0 | 0 | 0 | 0 | 0 | 0 | 7.619 |
| NTONG2005520 | 2.871 | 0 | 0 | 0 | 0 | 4.554 | 2.176 |
| NTONG2005801 | 0 | 0 | 25.065 | 0 | 0 | 0 | 5.823 |
| NTONG2006301 | 11.854 | 0 | 0 | 0 | 0 | 0 | 0 |
| NTONG2006484 | 0 | 0 | 0 | 0 | 0 | 29.574 | 0 |
| NTONG2007658 | 8.632 | 0 | 0 | 0 | 0 | 0 | 0 |
| NTONG2007693 | 0 | 0 | 0 | 0 | 0 | 48.142 | 0 |
| NTONG2008088 | 0 | 0 | 0 | 0 | 0 | 0 | 13.359 |
| NTONG2008483 | 0 | 0 | 0 | 0 | 0 | 0 | 3.133 |
| NTONG2008944 | 0 | 0 | 0 | 0 | 0 | 0 | 7.635 |
| NTONG2009576 | 15.325 | 0 | 0 | 0 | 0 | 0 | 0 |
| OCBBF1000086 | 0 | 0 | 0 | 0 | 0 | 0 | 1.001 |
| OCBBF1000185 | 18.160 | 0 | 0 | 0 | 0 | 0 | 2.752 |
| OCBBF1000188 | 2.246 | 0 | 0 | 0 | 0 | 0 | 2.042 |
| OCBBF1000315 | 0 | 0 | 0 | 0 | 0 | 0 | 22.877 |
| OCBBF2000013 | 4.197 | 0 | 0 | 0 | 0 | 0 | 0 |
| OCBBF2000015 | 0 | 0 | 0 | 0 | 0 | 0 | 0.517 |
| OCBBF2000467 | 0 | 0 | 0 | 0 | 0 | 0 | 1.318 |
| OCBBF2000831 | 0 | 0 | 0 | 0 | 0 | 0 | 9.442 |
| OCBBF2000846 | 0 | 0 | 0 | 0 | 15.515 | 0 | 0 |
| OCBBF2000982 | 0 | 0 | 0 | 0 | 0 | 0 | 1.710 |
| OCBBF2000986 | 6.235 | 0 | 6.779 | 0 | 0 | 0 | 0.630 |
| OCBBF2001140 | 0 | 0 | 0 | 0 | 0 | 0 | 18.479 |
| OCBBF2001166 | 0 | 0 | 0 | 0 | 0 | 0 | 3.583 |
| OCBBF2001186 | 38.181 | 0 | 0 | 0 | 0 | 0 | 0 |
| OCBBF2001210 | 0 | 0 | 0 | 0 | 0 | 0 | 4.740 |
| OCBBF2001252 | 0 | 0 | 0 | 0 | 0 | 0 | 3.009 |
| OCBBF2001408 | 0 | 0 | 0 | 0 | 0 | 0 | 12.622 |
| OCBBF2001416 | 0 | 0 | 0 | 0 | 0 | 0 | 27.283 |
| OCBBF2001492 | 0 | 0 | 9.653 | 0 | 0 | 0 | 0 |
| OCBBF2001528 | 0 | 0 | 0 | 0 | 0 | 0 | 21.673 |
| OCBBF2001586 | 0 | 0 | 0 | 0 | 0 | 0 | 2.344 |
| OCBBF2001687 | 0 | 0 | 0 | 0 | 0 | 0 | 6.287 |
| OCBBF2001794 | 0 | 0 | 0 | 0 | 0 | 0 | 15.452 |
| OCBBF2002083 | 0 | 0 | 0 | 0 | 0 | 0 | 7.183 |
| OCBBF2002086 | 0 | 0 | 0 | 0 | 0 | 0 | 12.636 |
| OCBBF2002656 | 0 | 0 | 0 | 0 | 0 | 0 | 1.081 |
| OCBBF2002865 | 0 | 0 | 0 | 0 | 0 | 0 | 34.478 |
| OCBBF2003052 | 0 | 0 | 0 | 0 | 0 | 0 | 7.449 |
| OCBBF2003518 | 0 | 0 | 0 | 0 | 0 | 0 | 0.674 |
| OCBBF2003819 | 0 | 0 | 0 | 0 | 0 | 0 | 13.773 |
| OCBBF2003925 | 0 | 0 | 0 | 0 | 0 | 0 | 0.545 |
| OCBBF2004273 | 3.867 | 19.909 | 6.305 | 0 | 0 | 0 | 0.586 |
| OCBBF2004757 | 0 | 0 | 0 | 0 | 0 | 0 | 1.620 |
| OCBBF2005476 | 10.083 | 0 | 0 | 0 | 0 | 0 | 0 |
| OCBBF2005956 | 0 | 0 | 0 | 0 | 0 | 0 | 3.711 |
| OCBBF2006005 | 0 | 0 | 0 | 0 | 0 | 0 | 9.349 |
| OCBBF2006151 | 0 | 0 | 0 | 0 | 0 | 0 | 3.769 |
| OCBBF2006987 | 0 | 0 | 0 | 0 | 0 | 0 | 8.449 |
| OCBBF2007028 | 0 | 0 | 0 | 0 | 0 | 0 | 0.903 |
| OCBBF2007224 | 20.365 | 0 | 0 | 0 | 0 | 0 | 6.172 |
| OCBBF2007354 | 2.167 | 0 | 0 | 0 | 0 | 0 | 1.313 |
| OCBBF2007415 | 0 | 0 | 0 | 0 | 0 | 0 | 1.047 |
| OCBBF2007829 | 0 | 0 | 3.862 | 0 | 11.641 | 0 | 0 |
| OCBBF2007892 | 0 | 0 | 0 | 0 | 0 | 0 | 2.785 |
| OCBBF2008041 | 0 | 0 | 0 | 0 | 0 | 0 | 4.099 |
| OCBBF2008144 | 6.220 | 0 | 0 | 0 | 0 | 0 | 1.885 |
| OCBBF2008770 | 0 | 0 | 0 | 0 | 0 | 0 | 8.741 |
| OCBBF2009242 | 0 | 0 | 0 | 0 | 0 | 0 | 3.702 |
| OCBBF2009424 | 0 | 0 | 0 | 0 | 0 | 0 | 9.487 |
| OCBBF2009772 | 0 | 0 | 0 | 0 | 0 | 0 | 0.770 |
| OCBBF2009836 | 0 | 0 | 0 | 0 | 0 | 0 | 2.678 |
| OCBBF2010819 | 0 | 0 | 0 | 0 | 0 | 0 | 8.199 |
| OCBBF2010830 | 0 | 0 | 0 | 0 | 0 | 6.020 | 0.575 |
| OCBBF2011021 | 0 | 0 | 0 | 0 | 0 | 0 | 1.890 |
| OCBBF2011536 | 0 | 0 | 0 | 0 | 0 | 0 | 1.304 |
| OCBBF2011759 | 2.016 | 0 | 0 | 0 | 0 | 0 | 3.054 |
| OCBBF2012001 | 0 | 0 | 0 | 0 | 0 | 0 | 16.277 |
| OCBBF2012553 | 0 | 0 | 0 | 0 | 0 | 0 | 0.767 |
| OCBBF2012821 | 5.397 | 0 | 17.601 | 0 | 0 | 0 | 1.636 |
| OCBBF2014292 | 2.234 | 0 | 0 | 0 | 0 | 0 | 0 |
| OCBBF2014541 | 0 | 0 | 0 | 0 | 0 | 0 | 2.563 |
| OCBBF2014873 | 0 | 0 | 0 | 0 | 0 | 0 | 27.813 |
| OCBBF2015334 | 0 | 0 | 0 | 0 | 0 | 0 | 34.478 |
| OCBBF2015797 | 0 | 0 | 0 | 0 | 0 | 0 | 34.478 |
| OCBBF2016928 | 0 | 0 | 0 | 0 | 0 | 0 | 1.790 |
| OCBBF2017398 | 2.774 | 0 | 0 | 0 | 0 | 0 | 0.841 |
| OCBBF2017458 | 0 | 0 | 0 | 0 | 0 | 0 | 3.639 |
| OCBBF2017754 | 0 | 0 | 0 | 0 | 0 | 0 | 4.909 |
| OCBBF2017791 | 0 | 0 | 0 | 0 | 0 | 0 | 1.675 |
| OCBBF2017815 | 0 | 0 | 0 | 0 | 0 | 0 | 34.478 |
| OCBBF2017893 | 7.482 | 0 | 12.202 | 0 | 0 | 0 | 0 |
| OCBBF2017920 | 0 | 0 | 0 | 0 | 0 | 0 | 8.417 |
| OCBBF2018563 | 0 | 0 | 0 | 0 | 0 | 0 | 26.887 |
| OCBBF2018618 | 0 | 0 | 0 | 0 | 0 | 0 | 10.601 |
| OCBBF2018707 | 0 | 0 | 0 | 0 | 0 | 0 | 1.470 |
| OCBBF2018827 | 10.583 | 0 | 0 | 0 | 0 | 0 | 0 |
| OCBBF2018873 | 0 | 0 | 9.748 | 0 | 0 | 0 | 1.812 |
| OCBBF2018956 | 0 | 0 | 0 | 0 | 0 | 0 | 1.106 |
| OCBBF2020048 | 0 | 0 | 0 | 0 | 0 | 0 | 34.478 |
| OCBBF2021020 | 0 | 0 | 18.756 | 0 | 0 | 0 | 0 |
| OCBBF2024850 | 4.793 | 0 | 0 | 0 | 0 | 0 | 7.263 |
| OCBBF3000296 | 0 | 0 | 0 | 0 | 0 | 0 | 12.384 |
| OCBBF3000323 | 7.173 | 0 | 0 | 0 | 0 | 0 | 0 |
| OCBBF3009244 | 0 | 0 | 0 | 0 | 0 | 0 | 22.513 |
| PEBLM1000066 | 0 | 0 | 0 | 0 | 0 | 32.424 | 0 |
| PEBLM1000144 | 25.871 | 0 | 0 | 0 | 0 | 0 | 0 |
| PEBLM2000030 | 0 | 0 | 0 | 0 | 0 | 0 | 28.870 |
| PEBLM2000222 | 1.253 | 0 | 0 | 0 | 0 | 0 | 0 |
| PEBLM2000267 | 0 | 0 | 0 | 0 | 0 | 0 | 2.757 |
| PEBLM2000308 | 0 | 0 | 0 | 0 | 0 | 0 | 2.592 |
| PEBLM2000326 | 0 | 0 | 0 | 0 | 0 | 0 | 7.097 |
| PEBLM2000338 | 20.527 | 0 | 0 | 0 | 0 | 0 | 0 |
| PEBLM2001072 | 7.823 | 0 | 0 | 0 | 0 | 0 | 0 |
| PEBLM2001803 | 22.296 | 0 | 0 | 0 | 0 | 0 | 0 |
| PEBLM2002749 | 0 | 0 | 48.344 | 0 | 0 | 0 | 0 |
| PEBLM2003914 | 0 | 0 | 0 | 0 | 0 | 0 | 5.556 |
| PEBLM2004452 | 0 | 0 | 0 | 0 | 0 | 0 | 5.293 |
| PEBLM2004666 | 0 | 0 | 26.137 | 0 | 0 | 0 | 2.429 |
| PEBLM2004733 | 0 | 0 | 0 | 0 | 0 | 0 | 6.247 |
| PEBLM2007774 | 0 | 0 | 2.119 | 0 | 0 | 0 | 0.591 |
| PEBLM2008826 | 20.003 | 0 | 0 | 0 | 0 | 0 | 0 |
| PEBLM2008861 | 0 | 0 | 0 | 50.799 | 0 | 0 | 0 |
| PERIC2003794 | 0 | 0 | 0 | 0 | 0 | 0 | 8.846 |
| PERIC2007068 | 0 | 0 | 0 | 0 | 0 | 0 | 6.052 |
| PLACE5000013 | 10.271 | 0 | 0 | 0 | 0 | 0 | 10.376 |
| PLACE5000067 | 0 | 0 | 0 | 0 | 0 | 0 | 26.863 |
| PLACE5000068 | 0 | 0 | 0 | 0 | 0 | 0 | 4.105 |
| PLACE5000113 | 3.711 | 0 | 0 | 0 | 0 | 0 | 8.997 |
| PLACE5000159 | 0 | 0 | 0 | 0 | 0 | 0 | 1.486 |
| PLACE5000170 | 0 | 0 | 0 | 0 | 0 | 0 | 4.545 |
| PLACE6000145 | 0 | 0 | 0 | 0 | 21.972 | 0 | 0 |
| PLACE6000263 | 0 | 0 | 0 | 0 | 0 | 0 | 0.994 |
| PLACE6000379 | 0.762 | 0 | 0 | 0 | 3.745 | 2.417 | 0.808 |
| PLACE6000414 | 11.055 | 0 | 0 | 0 | 0 | 0 | 1.675 |
| PLACE6000463 | 0 | 0 | 0 | 0 | 0 | 0 | 5.100 |
| PLACE6001064 | 2.475 | 0 | 4.036 | 0 | 0 | 3.925 | 2.250 |
| PLACE6001281 | 0 | 0 | 0 | 0 | 0 | 0 | 2.250 |
| PLACE6002084 | 0.797 | 0 | 2.598 | 0 | 0 | 0 | 0.241 |
| PLACE6002102 | 3.046 | 0 | 0 | 0 | 0 | 0 | 2.770 |
| PLACE6002960 | 0 | 0 | 0 | 0 | 0 | 0 | 1.451 |
| PLACE6003038 | 0 | 0 | 0 | 0 | 0 | 0 | 2.359 |
| PLACE6003077 | 54.790 | 0 | 0 | 0 | 0 | 0 | 0 |
| PLACE6003383 | 7.723 | 0 | 0 | 0 | 0 | 0 | 0 |
| PLACE6003393 | 16.378 | 0 | 0 | 0 | 0 | 0 | 0 |
| PLACE6004312 | 0 | 0 | 0 | 0 | 0 | 0 | 0.394 |
| PLACE6004397 | 0 | 0 | 0 | 0 | 0 | 0 | 1.201 |
| PLACE6004578 | 2.674 | 0 | 0 | 0 | 0 | 0 | 1.621 |
| PLACE6005231 | 0 | 0 | 0 | 0 | 0 | 0 | 14.439 |
| PLACE6005482 | 0 | 0 | 0 | 0 | 0 | 0 | 3.457 |
| PLACE6006418 | 5.979 | 0 | 0 | 0 | 0 | 18.968 | 0 |
| PLACE6006549 | 0 | 0 | 22.469 | 0 | 0 | 0 | 0 |
| PLACE6008775 | 0 | 0 | 0 | 0 | 0 | 12.610 | 0 |
| PLACE6008793 | 0 | 0 | 0 | 0 | 0 | 0 | 1.036 |
| PLACE6010077 | 0 | 19.338 | 6.125 | 0 | 0 | 0 | 0 |
| PLACE6010484 | 0 | 0 | 21.747 | 0 | 0 | 0 | 1.010 |
| PLACE6011057 | 0 | 0 | 0 | 0 | 0 | 0 | 5.893 |
| PLACE6011334 | 0 | 0 | 0 | 0 | 0 | 0 | 41.126 |
| PLACE6012028 | 0 | 0 | 0 | 0 | 0 | 0 | 4.103 |
| PLACE6013222 | 0 | 0 | 0 | 0 | 0 | 0 | 9.663 |
| PLACE6015051 | 0 | 0 | 0 | 0 | 0 | 0 | 3.013 |
| PLACE6015513 | 54.790 | 0 | 0 | 0 | 0 | 0 | 0 |
| PLACE6016383 | 13.944 | 0 | 0 | 0 | 0 | 0 | 0 |
| PLACE6017788 | 0 | 0 | 0 | 0 | 0 | 0 | 26.863 |
| PLACE6017791 | 0 | 0 | 0 | 0 | 0 | 0 | 7.180 |
| PLACE6018031 | 0 | 0 | 0 | 0 | 0 | 0 | 4.395 |
| PLACE6018287 | 0 | 0 | 0 | 0 | 0 | 0 | 15.516 |
| PLACE6019195 | 0 | 0 | 0 | 0 | 0 | 0 | 5.547 |
| PLACE7001022 | 0 | 0 | 0 | 0 | 0 | 0 | 18.395 |
| PLACE7004103 | 2.789 | 0 | 0 | 0 | 0 | 0 | 9.299 |
| PROST1000097 | 0 | 0 | 0 | 0 | 12.466 | 4.023 | 0.769 |
| PROST1000144 | 0 | 0 | 0 | 0 | 0 | 0 | 4.099 |
| PROST1000199 | 0 | 0 | 0 | 0 | 0 | 0 | 0.478 |
| PROST1000220 | 0 | 0 | 0 | 0 | 0 | 9.290 | 0 |
| PROST1000226 | 3.859 | 0 | 0 | 0 | 0 | 0 | 0 |
| PROST1000564 | 0 | 0 | 0 | 0 | 0 | 0 | 0.879 |
| PROST2000079 | 0 | 0 | 0 | 0 | 0 | 0 | 1.957 |
| PROST2000138 | 0.374 | 1.925 | 0 | 0 | 0 | 1.186 | 0.567 |
| PROST2000284 | 0 | 0 | 24.634 | 0 | 0 | 0 | 2.289 |
| PROST2000325 | 0 | 0 | 0 | 0 | 0 | 0 | 4.627 |
| PROST2000567 | 0 | 0 | 0 | 0 | 0 | 0 | 18.726 |
| PROST2001180 | 0 | 0 | 0 | 0 | 0 | 0 | 1.623 |
| PROST2001521 | 0 | 0 | 0 | 0 | 25.760 | 0 | 0 |
| PROST2001552 | 0 | 0 | 85.728 | 0 | 0 | 0 | 0 |
| PROST2001883 | 0 | 19.838 | 0 | 0 | 0 | 0 | 0 |
| PROST2001997 | 0 | 0 | 0 | 0 | 0 | 0 | 7.622 |
| PROST2003232 | 2.943 | 0 | 0 | 0 | 0 | 0 | 0.892 |
| PROST2003338 | 0 | 0 | 7.874 | 0 | 0 | 0 | 0 |
| PROST2004095 | 0 | 0 | 0 | 0 | 0 | 3.202 | 0.612 |
| PROST2004258 | 0 | 0 | 0 | 0 | 0 | 0 | 2.494 |
| PROST2004270 | 2.537 | 0 | 0 | 0 | 0 | 0 | 1.538 |
| PROST2004416 | 1.467 | 0 | 4.783 | 0 | 0 | 0 | 0.444 |
| PROST2004739 | 0 | 0 | 0 | 0 | 0 | 0 | 19.443 |
| PROST2005604 | 6.709 | 0 | 0 | 0 | 0 | 0 | 0 |
| PROST2006060 | 14.401 | 0 | 0 | 0 | 0 | 0 | 0 |
| PROST2006282 | 0 | 0 | 0 | 0 | 0 | 0 | 5.807 |
| PROST2006343 | 0 | 0 | 31.103 | 0 | 0 | 0 | 0 |
| PROST2006737 | 0 | 0 | 0 | 0 | 0 | 16.583 | 0 |
| PROST2007317 | 0 | 0 | 0 | 0 | 0 | 0 | 15.564 |
| PROST2007612 | 0 | 0 | 0 | 0 | 0 | 21.849 | 0 |
| PROST2007871 | 0 | 0 | 0 | 0 | 0 | 0 | 7.210 |
| PROST2008489 | 2.794 | 0 | 0 | 0 | 0 | 0 | 0 |
| PROST2008770 | 0 | 0 | 0 | 0 | 0 | 0 | 1.020 |
| PROST2010579 | 0 | 0 | 0 | 0 | 0 | 0 | 12.287 |
| PROST2011105 | 0 | 0 | 0 | 0 | 0 | 0 | 11.632 |
| PROST2011577 | 0 | 0 | 0 | 43.435 | 0 | 0 | 0 |
| PROST2012007 | 0 | 0 | 0 | 23.952 | 0 | 0 | 0.742 |
| PROST2012448 | 0 | 0 | 0 | 0 | 0 | 0 | 10.667 |
| PROST2012745 | 8.341 | 0 | 0 | 0 | 0 | 0 | 0 |
| PROST2013121 | 0 | 0 | 0 | 0 | 0 | 0 | 14.062 |
| PROST2015137 | 0 | 0 | 0 | 0 | 0 | 0 | 12.011 |
| PROST2017203 | 2.801 | 0 | 0 | 0 | 0 | 0 | 0.849 |
| PROST2019164 | 15.906 | 0 | 0 | 0 | 0 | 0 | 0 |
| PROST2019253 | 3.624 | 0 | 0 | 0 | 0 | 0 | 0 |
| PUAEN1000057 | 4.428 | 0 | 0 | 0 | 0 | 0 | 0 |
| PUAEN1000065 | 0 | 0 | 4.712 | 0 | 0 | 0 | 0 |
| PUAEN1000161 | 0 | 0 | 0 | 0 | 0 | 0 | 7.541 |
| PUAEN1000164 | 1.717 | 0 | 0 | 0 | 0 | 0 | 0.260 |
| PUAEN1000239 | 0 | 0 | 0 | 0 | 0 | 0 | 2.026 |
| PUAEN1000322 | 0 | 0 | 0 | 0 | 0 | 8.747 | 0 |
| PUAEN2000152 | 0 | 0 | 0 | 0 | 0 | 0 | 7.759 |
| PUAEN2000247 | 0 | 0 | 0 | 0 | 0 | 0 | 18.058 |
| PUAEN2000374 | 0 | 0 | 0 | 0 | 0 | 0 | 0.628 |
| PUAEN2000535 | 0 | 0 | 0 | 0 | 0 | 0 | 1.577 |
| PUAEN2001586 | 0 | 0 | 0 | 0 | 0 | 0 | 1.867 |
| PUAEN2005502 | 0 | 0 | 0 | 0 | 0 | 0 | 20.989 |
| PUAEN2007044 | 0 | 0 | 0 | 0 | 0 | 0 | 7.496 |
| PUAEN2008985 | 9.570 | 0 | 0 | 0 | 0 | 30.358 | 17.402 |
| RECTM1000051 | 0 | 0 | 0 | 0 | 0 | 15.792 | 0 |
| SALGL1000047 | 0 | 0 | 0 | 0 | 0 | 0 | 0.194 |
| SALGL1000107 | 0 | 0 | 0 | 0 | 0 | 0 | 0.404 |
| SALGL1000157 | 0.561 | 0 | 0 | 0 | 5.514 | 0 | 0 |
| SKMUS1000014 | 0 | 0 | 0 | 0 | 0 | 0 | 4.809 |
| SKMUS1000022 | 0 | 9.245 | 0 | 0 | 0 | 0 | 0 |
| SKMUS1000084 | 0 | 0 | 0 | 0 | 32.651 | 0 | 2.013 |
| SKMUS1000138 | 0 | 0 | 0 | 0 | 0 | 0 | 0.126 |
| SKMUS1000176 | 0 | 0 | 0 | 0 | 18.291 | 0 | 0 |
| SKMUS1000186 | 0.866 | 0 | 0 | 0 | 0 | 0 | 0.787 |
| SKMUS2000243 | 21.758 | 0 | 0 | 0 | 0 | 0 | 0 |
| SKMUS2000361 | 0 | 0 | 0 | 0 | 0 | 0 | 1.398 |
| SKMUS2000484 | 3.787 | 0 | 0 | 0 | 0 | 0 | 0 |
| SKMUS2000679 | 0 | 0 | 0 | 0 | 0 | 0 | 0.438 |
| SKMUS2000902 | 11.665 | 0 | 0 | 0 | 0 | 0 | 0 |
| SKMUS2000931 | 0 | 12.086 | 0 | 0 | 0 | 0 | 0.711 |
| SKMUS2000933 | 13.382 | 0 | 0 | 0 | 0 | 0 | 0 |
| SKMUS2000954 | 7.332 | 0 | 0 | 0 | 0 | 0 | 0 |
| SKMUS2000961 | 0 | 0 | 46.311 | 0 | 0 | 0 | 0 |
| SKMUS2001147 | 0 | 0 | 0 | 0 | 0 | 0 | 1.812 |
| SKMUS2001323 | 0 | 0 | 0 | 37.072 | 0 | 0 | 0 |
| SKMUS2001454 | 0.728 | 0 | 2.374 | 0 | 0 | 0 | 1.324 |
| SKMUS2001528 | 0 | 0 | 8.830 | 0 | 0 | 8.588 | 1.641 |
| SKMUS2001634 | 2.824 | 0 | 0 | 0 | 0 | 0 | 4.279 |
| SKMUS2003194 | 0 | 0 | 0 | 0 | 0 | 0 | 8.489 |
| SKMUS2004044 | 0 | 0 | 0 | 0 | 0 | 0 | 8.489 |
| SKMUS2004908 | 0 | 0 | 0 | 0 | 0 | 0 | 2.147 |
| SKNMC1000137 | 0 | 0 | 0 | 0 | 0 | 0 | 1.386 |
| SKNMC1000159 | 0 | 0 | 0 | 0 | 0 | 0 | 6.903 |
| SKNMC1000168 | 0 | 0 | 0 | 0 | 0 | 0 | 1.095 |
| SKNMC2000065 | 4.657 | 0 | 0 | 0 | 0 | 0 | 2.117 |
| SKNMC2000097 | 0 | 0 | 0 | 0 | 0 | 0 | 0.291 |
| SKNMC2000305 | 0 | 0 | 0 | 0 | 0 | 0 | 4.605 |
| SKNMC2000322 | 0 | 0 | 0 | 0 | 0 | 0 | 3.693 |
| SKNMC2000635 | 0.774 | 3.984 | 0 | 0 | 0 | 0 | 0.117 |
| SKNMC2000649 | 1.968 | 0 | 0 | 0 | 0 | 0 | 0 |
| SKNMC2000877 | 0 | 0 | 0 | 0 | 0 | 0 | 2.324 |
| SKNMC2001324 | 0 | 0 | 0 | 0 | 0 | 0 | 4.221 |
| SKNMC2001623 | 21.672 | 0 | 0 | 0 | 0 | 0 | 0 |
| SKNSH1000101 | 0 | 0 | 0 | 0 | 13.619 | 4.395 | 0 |
| SKNSH2000151 | 0 | 0 | 0 | 0 | 0 | 0 | 3.556 |
| SKNSH2000347 | 0 | 0 | 0 | 0 | 0 | 0 | 1.467 |
| SKNSH2000819 | 0 | 0 | 0 | 0 | 0 | 0 | 4.881 |
| SKNSH2003633 | 0 | 0 | 47.185 | 0 | 0 | 0 | 0 |
| SKNSH2005240 | 0 | 0 | 0 | 0 | 0 | 0 | 8.693 |
| SMINT1000016 | 0 | 0 | 0 | 0 | 0 | 0 | 1.604 |
| SMINT1000057 | 37.935 | 0 | 0 | 0 | 0 | 0 | 0 |
| SMINT1000117 | 0 | 29.214 | 0 | 0 | 0 | 0 | 4.299 |
| SMINT2000018 | 0 | 0 | 29.616 | 0 | 0 | 0 | 0 |
| SMINT2000441 | 0 | 0 | 9.526 | 0 | 0 | 6.176 | 1.180 |
| SMINT2000454 | 0 | 0 | 0 | 0 | 0 | 0 | 11.684 |
| SMINT2000545 | 10.226 | 0 | 0 | 0 | 0 | 0 | 0 |
| SMINT2000629 | 0 | 0 | 0 | 0 | 0 | 0 | 1.755 |
| SMINT2000659 | 0 | 0 | 0 | 0 | 0 | 1.901 | 0.182 |
| SMINT2000694 | 2.564 | 0 | 0 | 0 | 25.200 | 0 | 0 |
| SMINT2000933 | 6.594 | 0 | 0 | 0 | 0 | 0 | 0 |
| SMINT2001812 | 0 | 0 | 0 | 0 | 0 | 0 | 15.682 |
| SMINT2001818 | 2.022 | 0 | 0 | 0 | 0 | 0 | 0 |
| SMINT2002314 | 0 | 0 | 8.514 | 0 | 0 | 0 | 0 |
| SMINT2002689 | 2.535 | 0 | 0 | 0 | 0 | 0 | 0.768 |
| SMINT2002882 | 0 | 0 | 0 | 0 | 0 | 0 | 1.898 |
| SMINT2003074 | 0 | 0 | 0 | 28.929 | 0 | 0 | 0 |
| SMINT2003169 | 0 | 0 | 0 | 0 | 0 | 0 | 0.307 |
| SMINT2003905 | 0 | 0 | 0 | 0 | 0 | 5.297 | 2.024 |
| SMINT2004299 | 0 | 0 | 0 | 0 | 0 | 61.748 | 0 |
| SMINT2004589 | 0 | 0 | 28.193 | 0 | 0 | 0 | 0 |
| SMINT2004872 | 0 | 0 | 29.754 | 0 | 0 | 0 | 0 |
| SMINT2005368 | 2.533 | 26.084 | 0 | 0 | 0 | 8.035 | 0 |
| SMINT2006801 | 0 | 0 | 0 | 0 | 0 | 0 | 10.528 |
| SMINT2007729 | 0 | 0 | 0 | 0 | 0 | 39.345 | 0 |
| SMINT2008921 | 0 | 24.644 | 0 | 0 | 0 | 7.591 | 0.725 |
| SMINT2008960 | 5.902 | 0 | 4.813 | 0 | 0 | 0 | 1.342 |
| SMINT2009292 | 0 | 0 | 0 | 0 | 0 | 24.268 | 4.637 |
| SMINT2010639 | 0 | 0 | 0 | 0 | 0 | 0 | 1.771 |
| SMINT2010901 | 0 | 0 | 0 | 0 | 0 | 0 | 6.887 |
| SMINT2012122 | 7.540 | 0 | 0 | 0 | 0 | 0 | 0 |
| SMINT2013031 | 0 | 0 | 0 | 0 | 0 | 0 | 6.086 |
| SMINT2013032 | 25.797 | 0 | 0 | 0 | 0 | 0 | 0 |
| SMINT2014480 | 0 | 0 | 22.352 | 0 | 0 | 0 | 0 |
| SMINT2015294 | 17.171 | 0 | 0 | 0 | 0 | 0 | 0 |
| SMINT2016412 | 0 | 0 | 0 | 0 | 80.022 | 0 | 0 |
| SPLEN1000106 | 5.020 | 0 | 0 | 0 | 0 | 0 | 6.086 |
| SPLEN1000116 | 0 | 0 | 3.482 | 0 | 0 | 0 | 0 |
| SPLEN1000165 | 0 | 0 | 0 | 0 | 0 | 34.144 | 3.262 |
| SPLEN1000166 | 0 | 0 | 0 | 0 | 0 | 0 | 1.478 |
| SPLEN2000255 | 0 | 0 | 0 | 0 | 0 | 0 | 2.008 |
| SPLEN2000267 | 0 | 0 | 0 | 0 | 0 | 0 | 3.816 |
| SPLEN2000348 | 0 | 0 | 0 | 0 | 0 | 0 | 1.829 |
| SPLEN2000505 | 3.636 | 9.360 | 0 | 0 | 0 | 0 | 0.275 |
| SPLEN2000516 | 25.781 | 0 | 0 | 0 | 0 | 0 | 7.814 |
| SPLEN2000839 | 0 | 0 | 0 | 0 | 0 | 0 | 5.966 |
| SPLEN2000874 | 1.051 | 0 | 0 | 0 | 0 | 0 | 0 |
| SPLEN2000882 | 7.578 | 0 | 0 | 0 | 0 | 12.019 | 0 |
| SPLEN2001141 | 34.624 | 0 | 0 | 0 | 0 | 0 | 1.235 |
| SPLEN2001599 | 0 | 0 | 50.196 | 0 | 0 | 0 | 0 |
| SPLEN2001761 | 22.950 | 0 | 0 | 0 | 0 | 0 | 0 |
| SPLEN2002133 | 0 | 0 | 0 | 0 | 0 | 0 | 27.313 |
| SPLEN2002335 | 0 | 0 | 0 | 0 | 0 | 0 | 0.662 |
| SPLEN2004220 | 0 | 0 | 0 | 0 | 0 | 0 | 1.880 |
| SPLEN2004555 | 0 | 0 | 0 | 0 | 0 | 0 | 4.870 |
| SPLEN2004773 | 0 | 0 | 5.007 | 0 | 0 | 0 | 0 |
| SPLEN2004880 | 0 | 0 | 0 | 0 | 0 | 0 | 0.193 |
| SPLEN2004984 | 11.330 | 0 | 0 | 0 | 0 | 0 | 0 |
| SPLEN2005429 | 0 | 0 | 0 | 0 | 0 | 0 | 2.395 |
| SPLEN2005818 | 24.041 | 0 | 0 | 0 | 0 | 0 | 0 |
| SPLEN2005869 | 13.851 | 0 | 0 | 0 | 0 | 0 | 0 |
| SPLEN2006122 | 0 | 18.706 | 0 | 0 | 0 | 0 | 0.551 |
| SPLEN2006133 | 2.046 | 0 | 0 | 0 | 0 | 0 | 0 |
| SPLEN2006232 | 18.561 | 0 | 0 | 0 | 0 | 0 | 0 |
| SPLEN2006305 | 1.362 | 0 | 4.444 | 0 | 0 | 0 | 1.652 |
| SPLEN2006374 | 0 | 0 | 0 | 0 | 0 | 0 | 0.994 |
| SPLEN2007498 | 0 | 0 | 0 | 0 | 0 | 0 | 3.421 |
| SPLEN2007739 | 0 | 0 | 0 | 0 | 0 | 0 | 3.969 |
| SPLEN2007750 | 10.435 | 0 | 0 | 0 | 0 | 0 | 0 |
| SPLEN2008460 | 2.826 | 0 | 0 | 0 | 0 | 0 | 0 |
| SPLEN2008591 | 0 | 0 | 0 | 0 | 0 | 0 | 27.313 |
| SPLEN2009081 | 0 | 0 | 0 | 0 | 0 | 44.282 | 0 |
| SPLEN2009555 | 18.320 | 0 | 0 | 0 | 0 | 0 | 0 |
| SPLEN2009970 | 10.999 | 0 | 0 | 0 | 0 | 0 | 6.667 |
| SPLEN2010195 | 4.184 | 0 | 2.729 | 0 | 0 | 0 | 0.761 |
| SPLEN2010986 | 0 | 0 | 0 | 0 | 0 | 0 | 13.164 |
| SPLEN2011419 | 5.154 | 0 | 0 | 0 | 0 | 0 | 1.562 |
| SPLEN2012571 | 6.857 | 0 | 0 | 0 | 0 | 0 | 0 |
| SPLEN2012800 | 0.737 | 0 | 2.403 | 0 | 0 | 2.337 | 0 |
| SPLEN2014080 | 0 | 0 | 0 | 0 | 0 | 0 | 3.097 |
| SPLEN2014572 | 13.423 | 0 | 0 | 0 | 0 | 0 | 0 |
| SPLEN2014911 | 0 | 0 | 0 | 0 | 0 | 7.218 | 0 |
| SPLEN2015310 | 0 | 0 | 0 | 0 | 0 | 3.922 | 0.375 |
| SPLEN2015788 | 20.881 | 0 | 0 | 0 | 0 | 0 | 0 |
| SPLEN2016268 | 0.932 | 0 | 0 | 9.118 | 0 | 0 | 1.130 |
| SPLEN2016421 | 4.468 | 0 | 14.573 | 0 | 0 | 14.174 | 1.354 |
| SPLEN2016554 | 0 | 0 | 0 | 0 | 0 | 0 | 12.183 |
| SPLEN2016972 | 0 | 0 | 0 | 0 | 0 | 0 | 2.651 |
| SPLEN2017043 | 0 | 0 | 73.215 | 0 | 0 | 0 | 0 |
| SPLEN2017121 | 0 | 0 | 54.539 | 0 | 0 | 0 | 0 |
| SPLEN2017318 | 0 | 0 | 0 | 0 | 0 | 0 | 3.317 |
| SPLEN2017351 | 6.487 | 0 | 0 | 0 | 0 | 0 | 7.865 |
| SPLEN2019169 | 0 | 0 | 0 | 0 | 0 | 0 | 7.401 |
| SPLEN2019405 | 0 | 0 | 0 | 0 | 0 | 0 | 5.617 |
| SPLEN2021194 | 7.276 | 0 | 0 | 0 | 0 | 0 | 0 |
| SPLEN2022522 | 12.230 | 0 | 0 | 0 | 0 | 0 | 0.927 |
| SPLEN2023160 | 0 | 0 | 0 | 0 | 0 | 0 | 25.698 |
| SPLEN2023733 | 0 | 0 | 0 | 0 | 0 | 0 | 13.161 |
| SPLEN2026411 | 0 | 0 | 80.173 | 0 | 0 | 0 | 0 |
| SPLEN2027113 | 0 | 0 | 0 | 0 | 0 | 0 | 1.070 |
| SPLEN2028466 | 0.892 | 0 | 2.910 | 0 | 0 | 0 | 0 |
| SPLEN2028914 | 6.023 | 0 | 0 | 0 | 0 | 0 | 0 |
| SPLEN2031547 | 3.396 | 0 | 11.076 | 0 | 0 | 0 | 1.029 |
| SPLEN2036076 | 10.630 | 0 | 11.557 | 0 | 0 | 0 | 0 |
| SPLEN2038345 | 0 | 0 | 0 | 0 | 0 | 0 | 19.221 |
| SPLEN2038834 | 0 | 0 | 32.588 | 0 | 0 | 0 | 0 |
| SPLEN2039379 | 0 | 0 | 0 | 0 | 0 | 0 | 7.573 |
| SPLEN2042535 | 0 | 0 | 0 | 0 | 0 | 0 | 4.654 |
| STOMA1000189 | 0 | 0 | 22.002 | 0 | 0 | 0 | 0 |
| STOMA2000121 | 0 | 0 | 0 | 0 | 0 | 8.338 | 0 |
| STOMA2000257 | 4.257 | 0 | 0 | 41.658 | 0 | 0 | 2.581 |
| STOMA2000289 | 0 | 0 | 0 | 0 | 0 | 0 | 3.562 |
| STOMA2000395 | 0 | 0 | 0 | 0 | 0 | 14.605 | 0 |
| STOMA2000396 | 0 | 0 | 0 | 0 | 0 | 0 | 3.369 |
| STOMA2001389 | 0 | 0 | 0 | 0 | 0 | 39.515 | 0 |
| STOMA2002052 | 0 | 0 | 0 | 0 | 0 | 0 | 7.271 |
| STOMA2002166 | 0 | 0 | 0 | 0 | 0 | 0 | 0.765 |
| STOMA2002828 | 0 | 0 | 0 | 0 | 0 | 37.497 | 0 |
| STOMA2003444 | 0 | 0 | 0 | 0 | 0 | 0 | 8.764 |
| STOMA2004893 | 0 | 0 | 50.829 | 0 | 0 | 0 | 0 |
| STOMA2005782 | 0 | 0 | 0 | 0 | 0 | 0 | 8.764 |
| STOMA2006229 | 12.967 | 0 | 0 | 0 | 0 | 0 | 0 |
| STOMA2008638 | 0 | 0 | 0 | 0 | 0 | 50.134 | 0 |
| SYNOV1000045 | 15.151 | 0 | 0 | 0 | 0 | 0 | 0 |
| SYNOV1000049 | 47.227 | 0 | 0 | 0 | 0 | 0 | 0 |
| SYNOV1000118 | 45.640 | 0 | 0 | 0 | 0 | 0 | 0 |
| SYNOV1000124 | 1.200 | 0 | 3.913 | 0 | 0 | 3.806 | 0 |
| SYNOV1000128 | 31.662 | 0 | 0 | 0 | 0 | 0 | 0 |
| SYNOV1000164 | 8.294 | 0 | 0 | 0 | 0 | 0 | 0 |
| SYNOV1000190 | 100 | 0 | 0 | 0 | 0 | 0 | 0 |
| SYNOV1000256 | 100 | 0 | 0 | 0 | 0 | 0 | 0 |
| SYNOV1000374 | 42.798 | 0 | 0 | 0 | 0 | 0 | 12.971 |
| SYNOV2000152 | 100 | 0 | 0 | 0 | 0 | 0 | 0 |
| SYNOV2000171 | 100 | 0 | 0 | 0 | 0 | 0 | 0 |
| SYNOV2000173 | 100 | 0 | 0 | 0 | 0 | 0 | 0 |
| SYNOV2000177 | 100 | 0 | 0 | 0 | 0 | 0 | 0 |
| SYNOV2000178 | 100 | 0 | 0 | 0 | 0 | 0 | 0 |
| SYNOV2000193 | 100 | 0 | 0 | 0 | 0 | 0 | 0 |
| SYNOV2000251 | 100 | 0 | 0 | 0 | 0 | 0 | 0 |
| SYNOV2000279 | 100 | 0 | 0 | 0 | 0 | 0 | 0 |
| SYNOV2000291 | 67.888 | 0 | 0 | 0 | 0 | 0 | 0 |
| SYNOV2000297 | 100 | 0 | 0 | 0 | 0 | 0 | 0 |
| SYNOV2000397 | 51.386 | 0 | 0 | 0 | 0 | 0 | 0 |
| SYNOV2000426 | 100 | 0 | 0 | 0 | 0 | 0 | 0 |
| SYNOV2000601 | 100 | 0 | 0 | 0 | 0 | 0 | 0 |
| SYNOV2000700 | 100 | 0 | 0 | 0 | 0 | 0 | 0 |
| SYNOV2000820 | 75.240 | 0 | 0 | 0 | 0 | 0 | 0 |
| SYNOV2000824 | 100 | 0 | 0 | 0 | 0 | 0 | 0 |
| SYNOV2000923 | 100 | 0 | 0 | 0 | 0 | 0 | 0 |
| SYNOV2001014 | 100 | 0 | 0 | 0 | 0 | 0 | 0 |
| SYNOV2001033 | 1.293 | 13.317 | 4.218 | 0 | 0 | 8.204 | 0.392 |
| SYNOV2001035 | 100 | 0 | 0 | 0 | 0 | 0 | 0 |
| SYNOV2001088 | 100 | 0 | 0 | 0 | 0 | 0 | 0 |
| SYNOV2001111 | 100 | 0 | 0 | 0 | 0 | 0 | 0 |
| SYNOV2001144 | 3.051 | 0 | 0 | 0 | 0 | 9.677 | 0.925 |
| SYNOV2001212 | 23.502 | 0 | 0 | 0 | 0 | 0 | 0 |
| SYNOV2001239 | 0.677 | 0 | 0 | 0 | 0 | 0 | 0 |
| SYNOV2001251 | 100 | 0 | 0 | 0 | 0 | 0 | 0 |
| SYNOV2001262 | 4.500 | 0 | 0 | 0 | 0 | 0 | 1.364 |
| SYNOV2001300 | 100 | 0 | 0 | 0 | 0 | 0 | 0 |
| SYNOV2001356 | 100 | 0 | 0 | 0 | 0 | 0 | 0 |
| SYNOV2001374 | 3.950 | 0 | 0 | 0 | 0 | 0 | 0 |
| SYNOV2001390 | 100 | 0 | 0 | 0 | 0 | 0 | 0 |
| SYNOV2001451 | 100 | 0 | 0 | 0 | 0 | 0 | 0 |
| SYNOV2001457 | 100 | 0 | 0 | 0 | 0 | 0 | 0 |
| SYNOV2001468 | 19.684 | 0 | 0 | 0 | 0 | 0 | 0 |
| SYNOV2001581 | 11.360 | 0 | 0 | 0 | 55.833 | 0 | 0 |
| SYNOV2001648 | 7.012 | 0 | 7.623 | 0 | 22.975 | 0 | 0 |
| SYNOV2001660 | 100 | 0 | 0 | 0 | 0 | 0 | 0 |
| SYNOV2003326 | 100 | 0 | 0 | 0 | 0 | 0 | 0 |
| SYNOV2005216 | 21.061 | 0 | 0 | 0 | 0 | 66.809 | 0 |
| SYNOV2005448 | 100 | 0 | 0 | 0 | 0 | 0 | 0 |
| SYNOV2005541 | 30.878 | 0 | 0 | 0 | 0 | 0 | 0 |
| SYNOV2005673 | 100 | 0 | 0 | 0 | 0 | 0 | 0 |
| SYNOV2005817 | 100 | 0 | 0 | 0 | 0 | 0 | 0 |
| SYNOV2005962 | 100 | 0 | 0 | 0 | 0 | 0 | 0 |
| SYNOV2006430 | 100 | 0 | 0 | 0 | 0 | 0 | 0 |
| SYNOV2006620 | 66.043 | 0 | 0 | 0 | 0 | 0 | 0 |
| SYNOV2007758 | 42.201 | 0 | 0 | 0 | 0 | 0 | 0 |
| SYNOV2007965 | 100 | 0 | 0 | 0 | 0 | 0 | 0 |
| SYNOV2008765 | 3.113 | 0 | 0 | 0 | 0 | 0 | 0 |
| SYNOV2009172 | 1.122 | 0 | 0 | 0 | 0 | 3.560 | 0 |
| SYNOV2011233 | 100 | 0 | 0 | 0 | 0 | 0 | 0 |
| SYNOV2012326 | 100 | 0 | 0 | 0 | 0 | 0 | 0 |
| SYNOV2013365 | 100 | 0 | 0 | 0 | 0 | 0 | 0 |
| SYNOV2013637 | 100 | 0 | 0 | 0 | 0 | 0 | 0 |
| SYNOV2014157 | 76.742 | 0 | 0 | 0 | 0 | 0 | 23.258 |
| SYNOV2014364 | 100 | 0 | 0 | 0 | 0 | 0 | 0 |
| SYNOV2016124 | 100 | 0 | 0 | 0 | 0 | 0 | 0 |
| SYNOV2016837 | 100 | 0 | 0 | 0 | 0 | 0 | 0 |
| SYNOV2017055 | 36.415 | 0 | 0 | 0 | 0 | 0 | 0 |
| SYNOV2017179 | 100 | 0 | 0 | 0 | 0 | 0 | 0 |
| SYNOV2018921 | 100 | 0 | 0 | 0 | 0 | 0 | 0 |
| SYNOV2019280 | 100 | 0 | 0 | 0 | 0 | 0 | 0 |
| SYNOV2020085 | 100 | 0 | 0 | 0 | 0 | 0 | 0 |
| SYNOV2020463 | 9.451 | 0 | 0 | 0 | 0 | 0 | 0 |
| SYNOV2021320 | 100 | 0 | 0 | 0 | 0 | 0 | 0 |
| SYNOV2021953 | 61.927 | 0 | 0 | 0 | 0 | 0 | 31.281 |
| SYNOV3000184 | 100 | 0 | 0 | 0 | 0 | 0 | 0 |
| SYNOV3000231 | 100 | 0 | 0 | 0 | 0 | 0 | 0 |
| SYNOV3000302 | 100 | 0 | 0 | 0 | 0 | 0 | 0 |
| SYNOV3000345 | 100 | 0 | 0 | 0 | 0 | 0 | 0 |
| SYNOV4000249 | 51.386 | 0 | 0 | 0 | 0 | 0 | 0 |
| SYNOV4000472 | 100 | 0 | 0 | 0 | 0 | 0 | 0 |
| SYNOV4000598 | 64.392 | 0 | 0 | 0 | 0 | 0 | 0 |
| SYNOV4000706 | 100 | 0 | 0 | 0 | 0 | 0 | 0 |
| SYNOV4001153 | 5.003 | 0 | 0 | 0 | 0 | 0 | 0 |
| SYNOV4001224 | 64.392 | 0 | 0 | 0 | 0 | 0 | 0 |
| SYNOV4001326 | 65.818 | 0 | 0 | 0 | 0 | 0 | 0 |
| SYNOV4001342 | 100 | 0 | 0 | 0 | 0 | 0 | 0 |
| SYNOV4001395 | 78.340 | 0 | 0 | 0 | 0 | 0 | 0 |
| SYNOV4002001 | 100 | 0 | 0 | 0 | 0 | 0 | 0 |
| SYNOV4002392 | 100 | 0 | 0 | 0 | 0 | 0 | 0 |
| SYNOV4002875 | 100 | 0 | 0 | 0 | 0 | 0 | 0 |
| SYNOV4002883 | 51.635 | 0 | 0 | 0 | 0 | 0 | 0 |
| SYNOV4003174 | 100 | 0 | 0 | 0 | 0 | 0 | 0 |
| SYNOV4003322 | 100 | 0 | 0 | 0 | 0 | 0 | 0 |
| SYNOV4003681 | 100 | 0 | 0 | 0 | 0 | 0 | 0 |
| SYNOV4003981 | 100 | 0 | 0 | 0 | 0 | 0 | 0 |
| SYNOV4004184 | 100 | 0 | 0 | 0 | 0 | 0 | 0 |
| SYNOV4004741 | 100 | 0 | 0 | 0 | 0 | 0 | 0 |
| SYNOV4004823 | 49.051 | 0 | 0 | 0 | 0 | 0 | 0 |
| SYNOV4004914 | 100 | 0 | 0 | 0 | 0 | 0 | 0 |
| SYNOV4005256 | 76.742 | 0 | 0 | 0 | 0 | 0 | 23.258 |
| SYNOV4005570 | 100 | 0 | 0 | 0 | 0 | 0 | 0 |
| SYNOV4005739 | 100 | 0 | 0 | 0 | 0 | 0 | 0 |
| SYNOV4005889 | 100 | 0 | 0 | 0 | 0 | 0 | 0 |
| SYNOV4005981 | 100 | 0 | 0 | 0 | 0 | 0 | 0 |
| SYNOV4005989 | 44.519 | 0 | 0 | 0 | 0 | 0 | 0 |
| SYNOV4006256 | 100 | 0 | 0 | 0 | 0 | 0 | 0 |
| SYNOV4006327 | 33.336 | 0 | 0 | 0 | 0 | 0 | 0 |
| SYNOV4006542 | 87.954 | 0 | 0 | 0 | 0 | 0 | 0 |
| SYNOV4007012 | 72.118 | 0 | 0 | 0 | 0 | 0 | 0 |
| SYNOV4007215 | 100 | 0 | 0 | 0 | 0 | 0 | 0 |
| SYNOV4007360 | 100 | 0 | 0 | 0 | 0 | 0 | 0 |
| SYNOV4007430 | 68.323 | 0 | 0 | 0 | 0 | 0 | 0 |
| SYNOV4007521 | 100 | 0 | 0 | 0 | 0 | 0 | 0 |
| SYNOV4007553 | 72.118 | 0 | 0 | 0 | 0 | 0 | 0 |
| SYNOV4007671 | 1.581 | 0 | 0 | 0 | 0 | 0 | 1.917 |
| SYNOV4007711 | 100 | 0 | 0 | 0 | 0 | 0 | 0 |
| SYNOV4008245 | 19.926 | 0 | 0 | 0 | 0 | 0 | 0 |
| SYNOV4008336 | 100 | 0 | 0 | 0 | 0 | 0 | 0 |
| SYNOV4009129 | 16.744 | 0 | 0 | 0 | 0 | 0 | 0 |
| SYNOV4009139 | 100 | 0 | 0 | 0 | 0 | 0 | 0 |
| SYNOV4009298 | 63.453 | 0 | 0 | 0 | 0 | 0 | 0 |
| SYNOV4009575 | 10.334 | 0 | 0 | 0 | 0 | 0 | 0 |
| T1ESE2000116 | 0 | 96.382 | 0 | 0 | 0 | 0 | 0 |
| T1ESE2000609 | 0 | 50.485 | 0 | 0 | 0 | 0 | 0 |
| T1ESE2000904 | 0 | 51.278 | 0 | 0 | 0 | 0 | 0 |
| T1ESE2002665 | 0 | 92.582 | 0 | 0 | 0 | 0 | 0 |
| TBAES2000004 | 0 | 0 | 100 | 0 | 0 | 0 | 0 |
| TBAES2000059 | 0 | 0 | 84.801 | 0 | 0 | 0 | 0 |
| TBAES2000116 | 0 | 0 | 79.809 | 0 | 0 | 0 | 0 |
| TBAES2000255 | 0 | 0 | 100 | 0 | 0 | 0 | 0 |
| TBAES2000315 | 0 | 0 | 100 | 0 | 0 | 0 | 0 |
| TBAES2000352 | 0 | 0 | 50.050 | 0 | 0 | 0 | 0 |
| TBAES2000932 | 0 | 0 | 100 | 0 | 0 | 0 | 0 |
| TBAES2001171 | 0 | 0 | 100 | 0 | 0 | 0 | 0 |
| TBAES2001220 | 0 | 0 | 100 | 0 | 0 | 0 | 0 |
| TBAES2001229 | 0 | 0 | 100 | 0 | 0 | 0 | 0 |
| TBAES2001258 | 0 | 0 | 66.863 | 0 | 0 | 0 | 0 |
| TBAES2001296 | 0 | 0 | 79.254 | 0 | 0 | 0 | 0 |
| TBAES2001492 | 0 | 0 | 100 | 0 | 0 | 0 | 0 |
| TBAES2001553 | 6.344 | 0 | 20.692 | 62.076 | 0 | 0 | 0 |
| TBAES2001751 | 0 | 0 | 100 | 0 | 0 | 0 | 0 |
| TBAES2003435 | 0 | 0 | 100 | 0 | 0 | 0 | 0 |
| TBAES2003492 | 0 | 0 | 100 | 0 | 0 | 0 | 0 |
| TBAES2003550 | 0 | 0 | 100 | 0 | 0 | 0 | 0 |
| TBAES2003702 | 0 | 0 | 85.503 | 0 | 0 | 0 | 0 |
| TBAES2003917 | 0 | 0 | 100 | 0 | 0 | 0 | 0 |
| TBAES2004055 | 0 | 0 | 100 | 0 | 0 | 0 | 0 |
| TBAES2004105 | 0 | 0 | 100 | 0 | 0 | 0 | 0 |
| TBAES2004939 | 0 | 0 | 100 | 0 | 0 | 0 | 0 |
| TBAES2005157 | 0 | 0 | 100 | 0 | 0 | 0 | 0 |
| TBAES2005361 | 0 | 0 | 100 | 0 | 0 | 0 | 0 |
| TBAES2005543 | 0 | 0 | 100 | 0 | 0 | 0 | 0 |
| TBAES2006568 | 0 | 0 | 100 | 0 | 0 | 0 | 0 |
| TBAES2006881 | 0 | 0 | 100 | 0 | 0 | 0 | 0 |
| TBAES2007379 | 0 | 0 | 100 | 0 | 0 | 0 | 0 |
| TBAES2007428 | 0 | 0 | 37.783 | 0 | 0 | 0 | 0 |
| TBAES2007481 | 0 | 0 | 100 | 0 | 0 | 0 | 0 |
| TBAES2007504 | 0 | 0 | 100 | 0 | 0 | 0 | 0 |
| TBAES2007548 | 0 | 0 | 100 | 0 | 0 | 0 | 0 |
| TBAES2007697 | 0 | 0 | 100 | 0 | 0 | 0 | 0 |
| TBAES2007862 | 0 | 0 | 100 | 0 | 0 | 0 | 0 |
| TBAES2007964 | 0 | 0 | 100 | 0 | 0 | 0 | 0 |
| TBAES2008133 | 0 | 0 | 100 | 0 | 0 | 0 | 0 |
| TBAES2009387 | 0 | 0 | 7.521 | 0 | 0 | 0 | 0.349 |
| TCERX2000171 | 0 | 0 | 0 | 100 | 0 | 0 | 0 |
| TCERX2000431 | 0 | 0 | 0 | 44.331 | 0 | 0 | 0 |
| TCERX2000613 | 0 | 0 | 0 | 85.503 | 0 | 0 | 0 |
| TCERX2000998 | 0 | 0 | 0 | 100 | 0 | 0 | 0 |
| TCERX2002644 | 0 | 0 | 24.136 | 72.407 | 0 | 0 | 0 |
| TCOLN1000037 | 0 | 0 | 0 | 0 | 100 | 0 | 0 |
| TCOLN1000180 | 0 | 0 | 0 | 0 | 51.906 | 0 | 0 |
| TCOLN2000139 | 0 | 0 | 0 | 0 | 100 | 0 | 0 |
| TCOLN2000236 | 0 | 0 | 0 | 0 | 100 | 0 | 0 |
| TCOLN2000641 | 0 | 0 | 0 | 0 | 100 | 0 | 0 |
| TCOLN2001268 | 0 | 0 | 0 | 0 | 100 | 0 | 0 |
| TCOLN2002047 | 0 | 0 | 0 | 0 | 100 | 0 | 0 |
| TCOLN2002278 | 0 | 0 | 0 | 0 | 100 | 0 | 0 |
| TESOP1000035 | 0 | 0 | 0 | 0 | 0 | 30.261 | 0 |
| TESOP1000127 | 0 | 0 | 0 | 0 | 0 | 65.101 | 0 |
| TESOP1000160 | 0 | 0 | 0 | 0 | 0 | 100 | 0 |
| TESOP2000083 | 0 | 0 | 0 | 0 | 0 | 100 | 0 |
| TESOP2000090 | 0 | 0 | 0 | 0 | 0 | 100 | 0 |
| TESOP2000205 | 0 | 0 | 0 | 0 | 0 | 100 | 0 |
| TESOP2000312 | 0 | 0 | 0 | 0 | 0 | 66.097 | 0 |
| TESOP2000390 | 0 | 0 | 0 | 0 | 0 | 100 | 0 |
| TESOP2000400 | 0 | 0 | 0 | 0 | 0 | 100 | 0 |
| TESOP2000510 | 0 | 0 | 0 | 0 | 0 | 100 | 0 |
| TESOP2000527 | 0 | 0 | 0 | 0 | 0 | 70.604 | 0 |
| TESOP2000569 | 0 | 0 | 0 | 0 | 0 | 100 | 0 |
| TESOP2000739 | 0 | 0 | 0 | 0 | 0 | 100 | 0 |
| TESOP2000801 | 0 | 0 | 0 | 0 | 0 | 100 | 0 |
| TESOP2001122 | 0 | 0 | 0 | 0 | 0 | 100 | 0 |
| TESOP2001166 | 0 | 0 | 0 | 0 | 0 | 100 | 0 |
| TESOP2001345 | 0 | 0 | 0 | 0 | 0 | 100 | 0 |
| TESOP2001474 | 0 | 0 | 0 | 0 | 0 | 100 | 0 |
| TESOP2001796 | 0 | 0 | 0 | 0 | 0 | 100 | 0 |
| TESOP2001818 | 0 | 0 | 0 | 0 | 0 | 100 | 0 |
| TESOP2001849 | 0 | 0 | 0 | 0 | 0 | 100 | 0 |
| TESOP2001865 | 0 | 0 | 0 | 0 | 0 | 100 | 0 |
| TESOP2001901 | 0 | 0 | 0 | 0 | 0 | 100 | 0 |
| TESOP2001953 | 0 | 0 | 0 | 0 | 0 | 89.137 | 0 |
| TESOP2002005 | 0 | 0 | 0 | 0 | 0 | 100 | 0 |
| TESOP2002110 | 0 | 0 | 0 | 0 | 0 | 100 | 0 |
| TESOP2002150 | 0 | 0 | 0 | 0 | 0 | 100 | 0 |
| TESOP2002273 | 0 | 0 | 0 | 0 | 0 | 27.770 | 2.653 |
| TESOP2002451 | 0 | 0 | 0 | 0 | 0 | 16.251 | 0 |
| TESOP2002489 | 0 | 0 | 0 | 0 | 0 | 100 | 0 |
| TESOP2002539 | 0 | 0 | 0 | 0 | 0 | 100 | 0 |
| TESOP2002545 | 0 | 0 | 0 | 0 | 0 | 100 | 0 |
| TESOP2002804 | 0 | 0 | 0 | 0 | 0 | 100 | 0 |
| TESOP2002950 | 0 | 0 | 0 | 0 | 0 | 90.601 | 0 |
| TESOP2003273 | 0 | 0 | 0 | 0 | 0 | 100 | 0 |
| TESOP2003308 | 0 | 0 | 0 | 0 | 0 | 100 | 0 |
| TESOP2003553 | 0 | 0 | 0 | 0 | 0 | 100 | 0 |
| TESOP2003753 | 0 | 0 | 0 | 0 | 0 | 100 | 0 |
| TESOP2004110 | 0 | 0 | 0 | 0 | 0 | 100 | 0 |
| TESOP2004114 | 0 | 0 | 0 | 0 | 0 | 100 | 0 |
| TESOP2004173 | 0 | 0 | 0 | 0 | 0 | 100 | 0 |
| TESOP2004214 | 0 | 0 | 0 | 0 | 0 | 100 | 0 |
| TESOP2005199 | 0 | 0 | 0 | 0 | 0 | 100 | 0 |
| TESOP2005285 | 0 | 0 | 0 | 0 | 0 | 100 | 0 |
| TESOP2005485 | 0 | 0 | 0 | 0 | 0 | 100 | 0 |
| TESOP2005498 | 0 | 0 | 0 | 0 | 0 | 100 | 0 |
| TESOP2005579 | 0 | 0 | 0 | 0 | 0 | 100 | 0 |
| TESOP2006041 | 0 | 0 | 0 | 0 | 0 | 100 | 0 |
| TESOP2006053 | 0 | 0 | 0 | 0 | 0 | 50.390 | 0 |
| TESOP2006060 | 0 | 0 | 0 | 0 | 0 | 100 | 0 |
| TESOP2006068 | 0 | 0 | 0 | 0 | 0 | 100 | 0 |
| TESOP2006110 | 0 | 0 | 0 | 0 | 0 | 100 | 0 |
| TESOP2006398 | 0 | 0 | 0 | 0 | 0 | 100 | 0 |
| TESOP2006670 | 0 | 0 | 0 | 0 | 0 | 79.728 | 0 |
| TESOP2006704 | 0 | 0 | 0 | 0 | 0 | 100 | 0 |
| TESOP2006746 | 0 | 0 | 0 | 0 | 0 | 100 | 0 |
| TESOP2006865 | 0 | 0 | 0 | 0 | 0 | 100 | 0 |
| TESOP2006893 | 0 | 0 | 0 | 0 | 0 | 58.778 | 0 |
| TESOP2007041 | 0 | 0 | 0 | 0 | 0 | 100 | 0 |
| TESOP2007052 | 0 | 0 | 0 | 0 | 0 | 100 | 0 |
| TESOP2007262 | 0 | 0 | 0 | 0 | 0 | 100 | 0 |
| TESOP2007384 | 0 | 0 | 0 | 0 | 0 | 13.734 | 0 |
| TESOP2007636 | 0 | 0 | 0 | 0 | 0 | 100 | 0 |
| TESOP2007674 | 0 | 0 | 0 | 0 | 0 | 100 | 0 |
| TESOP2007688 | 0 | 0 | 0 | 0 | 0 | 100 | 0 |
| TESOP2007725 | 0 | 0 | 0 | 0 | 0 | 100 | 0 |
| TESOP2007912 | 0 | 0 | 0 | 0 | 0 | 78.739 | 0 |
| TESOP2007978 | 0 | 0 | 0 | 0 | 0 | 100 | 0 |
| TESOP2008127 | 0 | 0 | 0 | 0 | 0 | 100 | 0 |
| TESOP2008552 | 0 | 0 | 0 | 0 | 0 | 100 | 0 |
| TESOP2008556 | 0 | 0 | 0 | 0 | 0 | 100 | 0 |
| TESOP2008563 | 0 | 0 | 0 | 0 | 0 | 100 | 0 |
| TESOP2008820 | 0 | 0 | 0 | 0 | 0 | 65.779 | 0 |
| TESOP2009121 | 0 | 0 | 0 | 0 | 0 | 100 | 0 |
| TESOP2009201 | 0 | 0 | 0 | 0 | 0 | 100 | 0 |
| TESOP2009247 | 0 | 0 | 0 | 0 | 0 | 100 | 0 |
| TESOP2009555 | 0 | 0 | 0 | 0 | 0 | 100 | 0 |
| TESTI1000018 | 0 | 0 | 0 | 0 | 0 | 0 | 100 |
| TESTI1000019 | 0 | 0 | 0 | 0 | 0 | 0 | 100 |
| TESTI1000023 | 1.809 | 0 | 0 | 0 | 0 | 0 | 1.645 |
| TESTI1000025 | 0 | 0 | 0 | 0 | 0 | 0 | 100 |
| TESTI1000029 | 0 | 0 | 0 | 0 | 0 | 0 | 100 |
| TESTI1000030 | 0 | 0 | 0 | 0 | 0 | 0 | 100 |
| TESTI1000042 | 0 | 0 | 0 | 0 | 0 | 0 | 100 |
| TESTI1000045 | 0 | 0 | 0 | 0 | 0 | 0 | 100 |
| TESTI1000051 | 0 | 0 | 0 | 0 | 0 | 0 | 40.852 |
| TESTI1000055 | 0 | 0 | 0 | 0 | 0 | 0 | 100 |
| TESTI1000064 | 0 | 0 | 0 | 0 | 0 | 0 | 82.736 |
| TESTI1000070 | 0 | 0 | 0 | 0 | 0 | 49.407 | 30.683 |
| TESTI1000085 | 0 | 0 | 0 | 0 | 0 | 0 | 100 |
| TESTI1000088 | 0 | 0 | 0 | 0 | 0 | 0 | 100 |
| TESTI1000093 | 0 | 0 | 0 | 0 | 0 | 0 | 100 |
| TESTI1000094 | 0 | 0 | 0 | 0 | 0 | 0 | 77.371 |
| TESTI1000096 | 0 | 0 | 0 | 0 | 0 | 0 | 11.435 |
| TESTI1000101 | 0 | 0 | 30.131 | 0 | 0 | 0 | 13.999 |
| TESTI1000109 | 0 | 0 | 0 | 0 | 0 | 0 | 100 |
| TESTI1000125 | 0 | 0 | 0 | 0 | 0 | 0 | 100 |
| TESTI1000127 | 0 | 0 | 0 | 0 | 0 | 0 | 100 |
| TESTI1000128 | 0 | 0 | 0 | 0 | 0 | 0 | 100 |
| TESTI1000131 | 0 | 0 | 0 | 0 | 0 | 0 | 100 |
| TESTI1000138 | 0 | 0 | 0 | 0 | 0 | 0 | 19.512 |
| TESTI1000142 | 0 | 0 | 0 | 0 | 0 | 0 | 30.873 |
| TESTI1000157 | 0 | 0 | 0 | 0 | 0 | 0 | 100 |
| TESTI1000163 | 0 | 0 | 0 | 0 | 0 | 0 | 2.693 |
| TESTI1000168 | 0 | 0 | 0 | 0 | 0 | 0 | 51.212 |
| TESTI1000169 | 0 | 0 | 0 | 0 | 0 | 0 | 100 |
| TESTI1000179 | 0 | 0 | 0 | 0 | 0 | 0 | 100 |
| TESTI1000183 | 0 | 0 | 0 | 0 | 0 | 0 | 100 |
| TESTI1000191 | 0 | 0 | 0 | 0 | 0 | 0 | 100 |
| TESTI1000257 | 0 | 0 | 0 | 0 | 0 | 0 | 100 |
| TESTI1000266 | 0 | 0 | 0 | 0 | 0 | 0 | 34.478 |
| TESTI1000319 | 0 | 0 | 0 | 0 | 0 | 0 | 100 |
| TESTI1000330 | 0 | 0 | 0 | 0 | 0 | 0 | 47.943 |
| TESTI1000348 | 0 | 0 | 0 | 0 | 0 | 0 | 100 |
| TESTI1000390 | 0 | 0 | 0 | 0 | 0 | 0 | 100 |
| TESTI1000391 | 0 | 0 | 0 | 0 | 0 | 0 | 100 |
| TESTI1000459 | 0 | 0 | 0 | 0 | 0 | 0 | 100 |
| TESTI1000491 | 0 | 0 | 0 | 0 | 0 | 0 | 100 |
| TESTI1000545 | 0 | 0 | 0 | 0 | 0 | 0 | 100 |
| TESTI2000006 | 0 | 0 | 0 | 0 | 0 | 0 | 6.464 |
| TESTI2000018 | 0 | 0 | 0 | 0 | 0 | 0 | 100 |
| TESTI2000044 | 0 | 0 | 0 | 0 | 0 | 0 | 100 |
| TESTI2000100 | 0 | 0 | 0 | 0 | 0 | 0 | 12.664 |
| TESTI2000117 | 0 | 0 | 0 | 0 | 0 | 0 | 100 |
| TESTI2000120 | 0 | 0 | 0 | 0 | 0 | 0 | 100 |
| TESTI2000147 | 0 | 0 | 0 | 0 | 0 | 0 | 100 |
| TESTI2000154 | 0 | 0 | 0 | 0 | 0 | 0 | 100 |
| TESTI2000172 | 0 | 0 | 0 | 0 | 0 | 0 | 5.592 |
| TESTI2000177 | 0 | 0 | 0 | 0 | 0 | 0 | 47.814 |
| TESTI2000179 | 0 | 0 | 0 | 0 | 0 | 0 | 23.946 |
| TESTI2000184 | 2.438 | 0 | 0 | 0 | 0 | 7.734 | 7.389 |
| TESTI2000207 | 0 | 0 | 0 | 0 | 0 | 0 | 100 |
| TESTI2000208 | 0 | 0 | 0 | 0 | 0 | 0 | 100 |
| TESTI2000221 | 0 | 0 | 0 | 0 | 0 | 0 | 100 |
| TESTI2000238 | 0 | 0 | 0 | 0 | 0 | 0 | 41.440 |
| TESTI2000253 | 0 | 0 | 0 | 0 | 0 | 0 | 61.294 |
| TESTI2000272 | 0 | 0 | 0 | 0 | 0 | 0 | 82.282 |
| TESTI2000278 | 0 | 0 | 0 | 0 | 0 | 0 | 100 |
| TESTI2000349 | 0 | 0 | 0 | 0 | 0 | 0 | 15.564 |
| TESTI2000356 | 0 | 0 | 0 | 0 | 0 | 0 | 22.925 |
| TESTI2000358 | 0 | 0 | 0 | 0 | 0 | 0 | 100 |
| TESTI2000372 | 0 | 0 | 0 | 0 | 0 | 0 | 100 |
| TESTI2000427 | 0 | 0 | 0 | 0 | 0 | 0 | 100 |
| TESTI2000431 | 0 | 0 | 0 | 0 | 0 | 0 | 63.646 |
| TESTI2000435 | 0 | 0 | 0 | 0 | 0 | 0 | 12.571 |
| TESTI2000443 | 0 | 0 | 0 | 0 | 0 | 0 | 100 |
| TESTI2000452 | 0 | 0 | 0 | 0 | 0 | 0 | 100 |
| TESTI2000462 | 0 | 0 | 0 | 0 | 0 | 0 | 100 |
| TESTI2000489 | 0 | 0 | 0 | 0 | 0 | 0 | 42.034 |
| TESTI2000520 | 0 | 0 | 0 | 0 | 79.762 | 0 | 2.459 |
| TESTI2000571 | 0 | 0 | 0 | 0 | 0 | 0 | 100 |
| TESTI2000591 | 0 | 0 | 12.846 | 0 | 0 | 0 | 4.775 |
| TESTI2000598 | 0 | 0 | 0 | 0 | 0 | 0 | 16.418 |
| TESTI2000600 | 0 | 0 | 0 | 0 | 0 | 0 | 24.263 |
| TESTI2000616 | 0 | 0 | 0 | 0 | 0 | 0 | 100 |
| TESTI2000627 | 0 | 0 | 0 | 0 | 0 | 0 | 13.773 |
| TESTI2000644 | 0 | 0 | 0 | 0 | 0 | 0 | 100 |
| TESTI2000671 | 0 | 0 | 0 | 0 | 0 | 0 | 100 |
| TESTI2000683 | 0 | 0 | 0 | 0 | 0 | 0 | 100 |
| TESTI2000689 | 0 | 0 | 0 | 0 | 0 | 0 | 100 |
| TESTI2000695 | 0 | 0 | 0 | 0 | 0 | 0 | 100 |
| TESTI2000699 | 0 | 0 | 0 | 0 | 0 | 0 | 100 |
| TESTI2000707 | 0 | 0 | 0 | 0 | 0 | 0 | 100 |
| TESTI2000745 | 0 | 0 | 0 | 0 | 0 | 0 | 100 |
| TESTI2000756 | 0 | 0 | 0 | 0 | 0 | 0 | 100 |
| TESTI2000762 | 0 | 0 | 0 | 0 | 0 | 0 | 100 |
| TESTI2000784 | 0 | 0 | 15.987 | 0 | 0 | 0 | 26.740 |
| TESTI2000808 | 0 | 0 | 0 | 0 | 0 | 0 | 100 |
| TESTI2000819 | 0 | 0 | 0 | 0 | 0 | 0 | 100 |
| TESTI2000830 | 0 | 0 | 0 | 0 | 0 | 0 | 100 |
| TESTI2000840 | 0 | 0 | 0 | 0 | 0 | 0 | 100 |
| TESTI2000849 | 0 | 0 | 0 | 0 | 0 | 0 | 70.219 |
| TESTI2000850 | 0 | 0 | 0 | 0 | 0 | 0 | 100 |
| TESTI2000874 | 0 | 0 | 0 | 0 | 0 | 0 | 8.171 |
| TESTI2000883 | 0 | 0 | 0 | 0 | 0 | 0 | 14.298 |
| TESTI2000909 | 0 | 0 | 0 | 0 | 0 | 0 | 8.520 |
| TESTI2000951 | 0 | 0 | 0 | 0 | 0 | 0 | 100 |
| TESTI2000970 | 0 | 0 | 0 | 0 | 0 | 0 | 6.355 |
| TESTI2000981 | 0 | 0 | 0 | 0 | 0 | 0 | 100 |
| TESTI2001008 | 0 | 0 | 0 | 0 | 0 | 0 | 100 |
| TESTI2001049 | 0 | 0 | 0 | 0 | 0 | 0 | 100 |
| TESTI2001082 | 0 | 0 | 0 | 0 | 0 | 0 | 100 |
| TESTI2001099 | 1.057 | 0 | 0 | 0 | 0 | 0 | 9.930 |
| TESTI2001120 | 0 | 0 | 0 | 0 | 0 | 0 | 0.632 |
| TESTI2001134 | 0 | 0 | 0 | 0 | 0 | 0 | 100 |
| TESTI2001141 | 0 | 0 | 0 | 0 | 0 | 0 | 49.381 |
| TESTI2001153 | 0 | 0 | 0 | 0 | 0 | 0 | 2.603 |
| TESTI2001180 | 0 | 0 | 0 | 0 | 0 | 0 | 100 |
| TESTI2001208 | 0 | 0 | 0 | 0 | 0 | 0 | 100 |
| TESTI2001229 | 0 | 0 | 0 | 0 | 0 | 0 | 100 |
| TESTI2001236 | 0 | 0 | 0 | 0 | 0 | 0 | 100 |
| TESTI2001237 | 0 | 0 | 0 | 0 | 0 | 0 | 100 |
| TESTI2001269 | 1.177 | 0 | 0 | 0 | 0 | 0 | 1.070 |
| TESTI2001306 | 0 | 0 | 0 | 0 | 0 | 0 | 100 |
| TESTI2001313 | 0 | 0 | 0 | 0 | 0 | 0 | 100 |
| TESTI2001330 | 0 | 0 | 0 | 0 | 0 | 0 | 100 |
| TESTI2001339 | 0 | 0 | 0 | 0 | 0 | 0 | 27.313 |
| TESTI2001345 | 0 | 0 | 0 | 0 | 0 | 0 | 100 |
| TESTI2001352 | 0 | 0 | 0 | 0 | 0 | 0 | 100 |
| TESTI2001364 | 0 | 0 | 0 | 0 | 0 | 0 | 100 |
| TESTI2001412 | 0 | 0 | 0 | 0 | 0 | 0 | 100 |
| TESTI2001420 | 0 | 0 | 0 | 0 | 0 | 0 | 35.404 |
| TESTI2001498 | 0 | 0 | 0 | 0 | 0 | 0 | 100 |
| TESTI2001511 | 0 | 0 | 0 | 0 | 0 | 0 | 1.144 |
| TESTI2001512 | 0 | 0 | 0 | 0 | 0 | 0 | 100 |
| TESTI2001518 | 0 | 0 | 0 | 0 | 0 | 0 | 100 |
| TESTI2001556 | 0 | 0 | 0 | 0 | 0 | 0 | 100 |
| TESTI2001593 | 0 | 0 | 0 | 0 | 0 | 0 | 100 |
| TESTI2001613 | 0 | 0 | 0 | 0 | 0 | 0 | 17.860 |
| TESTI2001621 | 0 | 0 | 0 | 0 | 0 | 0 | 100 |
| TESTI2001661 | 0 | 0 | 0 | 0 | 0 | 0 | 54.042 |
| TESTI2001665 | 0 | 0 | 0 | 0 | 0 | 0 | 100 |
| TESTI2001671 | 0 | 0 | 0 | 0 | 0 | 0 | 100 |
| TESTI2001697 | 0 | 0 | 0 | 0 | 0 | 0 | 100 |
| TESTI2001725 | 0 | 0 | 0 | 0 | 0 | 0 | 100 |
| TESTI2001758 | 0 | 0 | 0 | 0 | 0 | 0 | 100 |
| TESTI2001766 | 0 | 0 | 0 | 0 | 0 | 0 | 100 |
| TESTI2001792 | 0 | 0 | 0 | 0 | 0 | 0 | 100 |
| TESTI2001793 | 0 | 0 | 0 | 0 | 0 | 0 | 100 |
| TESTI2001795 | 0 | 0 | 0 | 0 | 0 | 0 | 100 |
| TESTI2001812 | 0 | 0 | 0 | 0 | 0 | 0 | 100 |
| TESTI2001815 | 76.742 | 0 | 0 | 0 | 0 | 0 | 23.258 |
| TESTI2001823 | 0 | 0 | 0 | 0 | 0 | 0 | 100 |
| TESTI2001826 | 0 | 0 | 0 | 0 | 0 | 0 | 58.511 |
| TESTI2001827 | 0 | 0 | 0 | 0 | 0 | 0 | 100 |
| TESTI2001829 | 0 | 0 | 0 | 0 | 0 | 0 | 1.665 |
| TESTI2001852 | 0 | 0 | 0 | 0 | 0 | 0 | 100 |
| TESTI2001862 | 0 | 0 | 0 | 0 | 0 | 0 | 1.728 |
| TESTI2001869 | 0 | 0 | 0 | 0 | 0 | 0 | 15.600 |
| TESTI2001879 | 0 | 0 | 0 | 0 | 0 | 0 | 36.852 |
| TESTI2001894 | 0 | 0 | 0 | 0 | 0 | 0 | 100 |
| TESTI2001898 | 0 | 0 | 0 | 0 | 0 | 0 | 39.051 |
| TESTI2001915 | 0 | 0 | 0 | 0 | 0 | 0 | 100 |
| TESTI2001950 | 0 | 0 | 0 | 0 | 0 | 0 | 100 |
| TESTI2001959 | 0 | 0 | 0 | 0 | 0 | 0 | 100 |
| TESTI2001968 | 0 | 0 | 0 | 0 | 0 | 0 | 100 |
| TESTI2001985 | 0 | 0 | 0 | 0 | 0 | 0 | 61.396 |
| TESTI2001991 | 0 | 0 | 0 | 0 | 0 | 0 | 100 |
| TESTI2002002 | 0 | 0 | 0 | 0 | 0 | 0 | 100 |
| TESTI2002012 | 0 | 0 | 0 | 0 | 0 | 0 | 100 |
| TESTI2002036 | 0 | 0 | 0 | 0 | 0 | 0 | 100 |
| TESTI2002048 | 0 | 0 | 0 | 0 | 0 | 0 | 100 |
| TESTI2002057 | 0 | 0 | 0 | 0 | 0 | 0 | 100 |
| TESTI2002081 | 0 | 0 | 0 | 0 | 0 | 0 | 100 |
| TESTI2002090 | 0 | 0 | 0 | 0 | 0 | 0 | 100 |
| TESTI2002105 | 0 | 0 | 0 | 0 | 0 | 0 | 85.371 |
| TESTI2002149 | 0 | 0 | 0 | 0 | 0 | 0 | 2.187 |
| TESTI2002216 | 0 | 0 | 0 | 0 | 0 | 0 | 100 |
| TESTI2002223 | 0 | 0 | 0 | 0 | 0 | 0 | 17.976 |
| TESTI2002245 | 0 | 0 | 0 | 0 | 0 | 0 | 100 |
| TESTI2002251 | 0 | 0 | 0 | 0 | 0 | 0 | 100 |
| TESTI2002256 | 0 | 0 | 0 | 0 | 0 | 0 | 22.675 |
| TESTI2002264 | 0 | 0 | 0 | 0 | 0 | 0 | 100 |
| TESTI2002282 | 0 | 0 | 0 | 0 | 0 | 0 | 100 |
| TESTI2002293 | 0 | 0 | 0 | 0 | 0 | 0 | 100 |
| TESTI2002294 | 0 | 0 | 0 | 0 | 0 | 0 | 100 |
| TESTI2002326 | 0 | 0 | 0 | 0 | 0 | 0 | 100 |
| TESTI2002351 | 0 | 0 | 0 | 0 | 0 | 0 | 100 |
| TESTI2002361 | 0 | 0 | 0 | 0 | 0 | 0 | 100 |
| TESTI2002365 | 0 | 0 | 7.682 | 0 | 0 | 0 | 7.138 |
| TESTI2002369 | 0 | 0 | 0 | 0 | 0 | 0 | 19.645 |
| TESTI2002406 | 0 | 0 | 0 | 0 | 0 | 0 | 100 |
| TESTI2002415 | 0 | 0 | 0 | 0 | 0 | 0 | 100 |
| TESTI2002423 | 0 | 0 | 0 | 0 | 0 | 0 | 100 |
| TESTI2002453 | 0 | 0 | 0 | 0 | 0 | 0 | 100 |
| TESTI2002461 | 0 | 0 | 0 | 0 | 0 | 0 | 100 |
| TESTI2002465 | 0 | 0 | 0 | 0 | 0 | 0 | 100 |
| TESTI2002467 | 0 | 0 | 0 | 0 | 0 | 0 | 15.347 |
| TESTI2002498 | 0 | 0 | 0 | 0 | 0 | 0 | 100 |
| TESTI2002516 | 0 | 0 | 0 | 0 | 0 | 0 | 100 |
| TESTI2002544 | 0 | 0 | 0 | 0 | 0 | 0 | 100 |
| TESTI2002578 | 0 | 0 | 0 | 0 | 0 | 0 | 100 |
| TESTI2002580 | 0 | 0 | 0 | 0 | 0 | 0 | 100 |
| TESTI2002618 | 0 | 0 | 0 | 0 | 0 | 0 | 100 |
| TESTI2002632 | 0 | 0 | 0 | 0 | 0 | 0 | 7.077 |
| TESTI2002676 | 0 | 0 | 0 | 0 | 0 | 0 | 100 |
| TESTI2002690 | 0 | 0 | 0 | 0 | 0 | 0 | 100 |
| TESTI2002696 | 0 | 0 | 0 | 0 | 0 | 0 | 8.489 |
| TESTI2002698 | 0 | 0 | 0 | 0 | 0 | 0 | 100 |
| TESTI2002700 | 0 | 0 | 0 | 0 | 0 | 0 | 100 |
| TESTI2002707 | 0 | 0 | 0 | 0 | 0 | 0 | 5.415 |
| TESTI2002724 | 0 | 0 | 0 | 0 | 0 | 0 | 100 |
| TESTI2002729 | 0 | 0 | 0 | 0 | 0 | 0 | 100 |
| TESTI2002752 | 0 | 0 | 0 | 0 | 0 | 0 | 100 |
| TESTI2002753 | 0 | 0 | 0 | 0 | 0 | 0 | 100 |
| TESTI2002789 | 0 | 0 | 0 | 0 | 0 | 0 | 100 |
| TESTI2002802 | 0 | 0 | 0 | 0 | 0 | 0 | 100 |
| TESTI2002806 | 0 | 0 | 0 | 0 | 0 | 0 | 100 |
| TESTI2002840 | 0 | 0 | 0 | 0 | 0 | 0 | 26.135 |
| TESTI2002866 | 0 | 0 | 0 | 0 | 0 | 0 | 13.910 |
| TESTI2002877 | 0 | 0 | 0 | 0 | 0 | 0 | 24.389 |
| TESTI2002910 | 0 | 0 | 0 | 0 | 0 | 0 | 100 |
| TESTI2002912 | 0 | 0 | 0 | 0 | 0 | 0 | 100 |
| TESTI2002928 | 0 | 0 | 0 | 0 | 0 | 0 | 100 |
| TESTI2002937 | 0 | 0 | 0 | 0 | 0 | 0 | 100 |
| TESTI2002965 | 0 | 0 | 0 | 0 | 0 | 0 | 31.989 |
| TESTI2002993 | 0 | 0 | 0 | 0 | 0 | 0 | 100 |
| TESTI2003005 | 0 | 0 | 0 | 0 | 0 | 0 | 1.986 |
| TESTI2003020 | 0 | 0 | 0 | 0 | 0 | 0 | 100 |
| TESTI2003031 | 0 | 0 | 0 | 0 | 0 | 0 | 100 |
| TESTI2003037 | 0 | 0 | 0 | 0 | 0 | 0 | 100 |
| TESTI2003044 | 0 | 0 | 64.204 | 0 | 0 | 0 | 35.796 |
| TESTI2003059 | 0 | 0 | 0 | 0 | 0 | 0 | 100 |
| TESTI2003061 | 0 | 0 | 0 | 0 | 0 | 0 | 67.719 |
| TESTI2003071 | 0 | 0 | 0 | 0 | 0 | 0 | 2.281 |
| TESTI2003074 | 0 | 0 | 0 | 0 | 0 | 0 | 100 |
| TESTI2003089 | 0 | 0 | 0 | 0 | 0 | 0 | 100 |
| TESTI2003104 | 0 | 0 | 0 | 0 | 0 | 0 | 100 |
| TESTI2003109 | 0 | 0 | 0 | 0 | 0 | 0 | 74.476 |
| TESTI2003117 | 0 | 0 | 0 | 0 | 0 | 0 | 100 |
| TESTI2003127 | 0 | 0 | 0 | 0 | 0 | 0 | 6.980 |
| TESTI2003130 | 0 | 0 | 0 | 0 | 0 | 0 | 100 |
| TESTI2003131 | 0 | 0 | 0 | 0 | 0 | 0 | 100 |
| TESTI2003139 | 0 | 0 | 0 | 0 | 0 | 0 | 100 |
| TESTI2003141 | 0 | 0 | 0 | 0 | 0 | 0 | 47.944 |
| TESTI2003152 | 0 | 0 | 0 | 0 | 0 | 0 | 100 |
| TESTI2003181 | 0 | 0 | 0 | 0 | 0 | 0 | 100 |
| TESTI2003193 | 0 | 0 | 0 | 0 | 0 | 0 | 100 |
| TESTI2003196 | 0 | 0 | 0 | 0 | 0 | 0 | 100 |
| TESTI2003228 | 0 | 0 | 0 | 0 | 0 | 0 | 100 |
| TESTI2003236 | 0 | 0 | 0 | 0 | 0 | 0 | 100 |
| TESTI2003255 | 0 | 0 | 0 | 0 | 0 | 0 | 100 |
| TESTI2003258 | 0 | 0 | 0 | 0 | 0 | 0 | 100 |
| TESTI2003277 | 0 | 0 | 0 | 0 | 0 | 0 | 100 |
| TESTI2003280 | 0 | 0 | 0 | 0 | 0 | 0 | 8.044 |
| TESTI2003299 | 0 | 0 | 0 | 0 | 0 | 0 | 100 |
| TESTI2003311 | 0 | 0 | 0 | 0 | 0 | 0 | 100 |
| TESTI2003321 | 0 | 0 | 0 | 0 | 0 | 0 | 100 |
| TESTI2003325 | 0 | 0 | 29.771 | 0 | 0 | 0 | 5.533 |
| TESTI2003327 | 0 | 0 | 0 | 0 | 0 | 0 | 100 |
| TESTI2003330 | 0 | 0 | 0 | 0 | 0 | 0 | 100 |
| TESTI2003347 | 0 | 0 | 0 | 0 | 0 | 0 | 100 |
| TESTI2003354 | 0 | 0 | 0 | 0 | 0 | 0 | 100 |
| TESTI2003356 | 0 | 0 | 0 | 0 | 0 | 0 | 100 |
| TESTI2003372 | 0 | 0 | 0 | 0 | 0 | 0 | 100 |
| TESTI2003376 | 0 | 0 | 0 | 0 | 0 | 0 | 100 |
| TESTI2003413 | 0 | 0 | 0 | 0 | 0 | 0 | 5.106 |
| TESTI2003418 | 0 | 0 | 0 | 0 | 0 | 0 | 100 |
| TESTI2003419 | 0 | 0 | 0 | 0 | 0 | 0 | 100 |
| TESTI2003432 | 0 | 0 | 0 | 0 | 0 | 0 | 100 |
| TESTI2003454 | 0 | 0 | 0 | 0 | 0 | 0 | 3.471 |
| TESTI2003475 | 0 | 0 | 0 | 0 | 0 | 0 | 100 |
| TESTI2003476 | 0 | 0 | 0 | 0 | 0 | 0 | 100 |
| TESTI2003498 | 0 | 0 | 0 | 0 | 0 | 0 | 100 |
| TESTI2003512 | 0 | 0 | 0 | 0 | 0 | 0 | 100 |
| TESTI2003533 | 0 | 0 | 12.198 | 0 | 0 | 0 | 1.133 |
| TESTI2003539 | 0 | 0 | 0 | 0 | 0 | 0 | 15.564 |
| TESTI2003541 | 0 | 0 | 0 | 0 | 0 | 0 | 38.183 |
| TESTI2003545 | 0 | 0 | 0 | 0 | 0 | 0 | 100 |
| TESTI2003551 | 0 | 0 | 0 | 0 | 0 | 0 | 100 |
| TESTI2003574 | 0 | 0 | 0 | 0 | 0 | 0 | 100 |
| TESTI2003579 | 0 | 0 | 0 | 0 | 0 | 0 | 22.717 |
| TESTI2003580 | 0 | 0 | 0 | 0 | 0 | 0 | 100 |
| TESTI2003589 | 0 | 0 | 0 | 0 | 0 | 0 | 100 |
| TESTI2003596 | 8.986 | 0 | 0 | 0 | 0 | 0 | 76.255 |
| TESTI2003598 | 0 | 0 | 0 | 0 | 0 | 0 | 100 |
| TESTI2003615 | 0 | 0 | 0 | 0 | 0 | 0 | 100 |
| TESTI2003625 | 0 | 0 | 0 | 0 | 0 | 0 | 10.007 |
| TESTI2003638 | 0 | 0 | 0 | 0 | 0 | 0 | 100 |
| TESTI2003649 | 0 | 0 | 0 | 0 | 0 | 0 | 100 |
| TESTI2003692 | 0 | 0 | 0 | 0 | 0 | 0 | 39.051 |
| TESTI2003718 | 0 | 0 | 0 | 0 | 0 | 0 | 100 |
| TESTI2003727 | 0 | 0 | 0 | 0 | 0 | 0 | 100 |
| TESTI2003756 | 0 | 0 | 0 | 0 | 0 | 0 | 20.574 |
| TESTI2003768 | 0 | 0 | 0 | 0 | 0 | 0 | 100 |
| TESTI2003781 | 0 | 0 | 0 | 0 | 0 | 0 | 100 |
| TESTI2003787 | 0 | 0 | 0 | 0 | 0 | 0 | 100 |
| TESTI2003824 | 0 | 0 | 0 | 0 | 0 | 0 | 100 |
| TESTI2003827 | 0 | 0 | 0 | 0 | 0 | 0 | 100 |
| TESTI2003894 | 0 | 0 | 0 | 0 | 0 | 0 | 100 |
| TESTI2003911 | 0 | 0 | 0 | 0 | 0 | 0 | 100 |
| TESTI2003914 | 0 | 0 | 0 | 0 | 0 | 0 | 100 |
| TESTI2003940 | 0 | 0 | 0 | 0 | 0 | 0 | 100 |
| TESTI2003962 | 0 | 0 | 0 | 0 | 0 | 0 | 100 |
| TESTI2003998 | 0 | 0 | 0 | 0 | 0 | 0 | 100 |
| TESTI2004000 | 0 | 0 | 0 | 0 | 0 | 0 | 4.583 |
| TESTI2004031 | 0 | 0 | 5.640 | 0 | 0 | 0 | 0.262 |
| TESTI2004073 | 0 | 0 | 0 | 0 | 0 | 0 | 100 |
| TESTI2004080 | 0 | 0 | 0 | 0 | 0 | 0 | 3.190 |
| TESTI2004085 | 0 | 0 | 0 | 0 | 0 | 0 | 100 |
| TESTI2004089 | 0 | 0 | 0 | 0 | 0 | 0 | 100 |
| TESTI2004111 | 0 | 0 | 0 | 0 | 0 | 0 | 100 |
| TESTI2004119 | 0 | 0 | 0 | 0 | 0 | 0 | 100 |
| TESTI2004122 | 0 | 0 | 0 | 0 | 0 | 0 | 9.979 |
| TESTI2004153 | 0 | 0 | 0 | 0 | 0 | 0 | 5.672 |
| TESTI2004163 | 0 | 0 | 0 | 0 | 0 | 0 | 100 |
| TESTI2004169 | 0 | 0 | 0 | 0 | 0 | 0 | 100 |
| TESTI2004207 | 0 | 0 | 0 | 0 | 0 | 0 | 100 |
| TESTI2004215 | 0 | 0 | 0 | 0 | 0 | 0 | 100 |
| TESTI2004227 | 0 | 0 | 0 | 0 | 0 | 0 | 100 |
| TESTI2004229 | 0 | 0 | 0 | 0 | 0 | 0 | 100 |
| TESTI2004243 | 0 | 0 | 0 | 0 | 0 | 0 | 100 |
| TESTI2004255 | 0 | 0 | 0 | 0 | 0 | 0 | 100 |
| TESTI2004287 | 0 | 0 | 0 | 0 | 0 | 0 | 100 |
| TESTI2004295 | 0 | 0 | 0 | 0 | 0 | 0 | 5.353 |
| TESTI2004313 | 0 | 0 | 0 | 0 | 0 | 0 | 100 |
| TESTI2004318 | 0 | 0 | 0 | 0 | 0 | 0 | 100 |
| TESTI2004322 | 0 | 0 | 0 | 0 | 0 | 0 | 100 |
| TESTI2004391 | 0 | 0 | 0 | 0 | 0 | 0 | 71.774 |
| TESTI2004399 | 0 | 0 | 0 | 0 | 0 | 0 | 100 |
| TESTI2004423 | 0 | 0 | 0 | 0 | 0 | 0 | 100 |
| TESTI2004431 | 0 | 0 | 0 | 0 | 0 | 0 | 32.808 |
| TESTI2004432 | 0 | 0 | 0 | 0 | 0 | 0 | 36.852 |
| TESTI2004452 | 0 | 0 | 0 | 0 | 0 | 0 | 100 |
| TESTI2004459 | 0 | 0 | 0 | 0 | 0 | 0 | 100 |
| TESTI2004490 | 0 | 0 | 0 | 0 | 0 | 0 | 100 |
| TESTI2004539 | 0 | 0 | 0 | 0 | 0 | 0 | 100 |
| TESTI2004552 | 0 | 0 | 0 | 0 | 0 | 0 | 100 |
| TESTI2004560 | 0 | 0 | 0 | 0 | 0 | 0 | 100 |
| TESTI2004574 | 0 | 0 | 0 | 0 | 0 | 0 | 100 |
| TESTI2004601 | 0 | 0 | 0 | 0 | 0 | 0 | 100 |
| TESTI2004611 | 0 | 0 | 0 | 0 | 0 | 0 | 100 |
| TESTI2004649 | 0 | 0 | 0 | 0 | 0 | 0 | 100 |
| TESTI2004654 | 0 | 0 | 0 | 0 | 0 | 0 | 100 |
| TESTI2004675 | 0 | 0 | 0 | 0 | 0 | 0 | 100 |
| TESTI2004687 | 0 | 0 | 0 | 0 | 0 | 0 | 100 |
| TESTI2004689 | 0 | 0 | 0 | 0 | 0 | 0 | 100 |
| TESTI2004700 | 0 | 0 | 0 | 0 | 0 | 0 | 100 |
| TESTI2004706 | 0 | 0 | 0 | 0 | 0 | 0 | 100 |
| TESTI2004712 | 0 | 0 | 0 | 0 | 0 | 0 | 0.739 |
| TESTI2004734 | 0 | 0 | 0 | 0 | 0 | 0 | 22.416 |
| TESTI2004737 | 0 | 0 | 24.921 | 0 | 0 | 0 | 5.789 |
| TESTI2004783 | 0 | 0 | 0 | 0 | 0 | 0 | 100 |
| TESTI2004791 | 0 | 0 | 0 | 0 | 0 | 0 | 100 |
| TESTI2004793 | 0 | 0 | 0 | 0 | 0 | 0 | 100 |
| TESTI2004860 | 0 | 0 | 0 | 0 | 0 | 0 | 100 |
| TESTI2004906 | 0 | 0 | 0 | 0 | 0 | 0 | 100 |
| TESTI2004920 | 0 | 0 | 0 | 0 | 0 | 0 | 100 |
| TESTI2004929 | 0 | 0 | 0 | 0 | 0 | 0 | 1.856 |
| TESTI2004936 | 0 | 0 | 0 | 0 | 0 | 0 | 100 |
| TESTI2004941 | 0 | 0 | 0 | 0 | 0 | 0 | 100 |
| TESTI2004971 | 0 | 0 | 0 | 0 | 0 | 0 | 100 |
| TESTI2004982 | 0 | 0 | 0 | 0 | 0 | 0 | 100 |
| TESTI2004993 | 0 | 0 | 0 | 0 | 0 | 0 | 100 |
| TESTI2004994 | 0 | 0 | 0 | 0 | 0 | 0 | 100 |
| TESTI2004999 | 0 | 0 | 0 | 0 | 0 | 0 | 100 |
| TESTI2005017 | 0 | 0 | 0 | 0 | 0 | 0 | 62.603 |
| TESTI2005025 | 0 | 0 | 0 | 0 | 0 | 0 | 100 |
| TESTI2005040 | 0 | 0 | 0 | 0 | 0 | 0 | 41.440 |
| TESTI2005060 | 0 | 0 | 0 | 0 | 0 | 0 | 100 |
| TESTI2005072 | 0 | 0 | 0 | 0 | 0 | 0 | 96.718 |
| TESTI2005085 | 0 | 0 | 0 | 0 | 0 | 0 | 100 |
| TESTI2005112 | 0 | 0 | 0 | 0 | 0 | 0 | 12.718 |
| TESTI2005120 | 0 | 0 | 0 | 0 | 0 | 0 | 100 |
| TESTI2005153 | 0 | 0 | 0 | 0 | 0 | 0 | 100 |
| TESTI2005155 | 0 | 0 | 0 | 0 | 0 | 0 | 100 |
| TESTI2005173 | 0 | 0 | 0 | 0 | 0 | 0 | 47.121 |
| TESTI2005267 | 0 | 0 | 0 | 0 | 0 | 0 | 100 |
| TESTI2005268 | 0 | 0 | 0 | 0 | 0 | 0 | 100 |
| TESTI2005280 | 0 | 0 | 0 | 0 | 0 | 0 | 100 |
| TESTI2005307 | 0 | 0 | 0 | 0 | 0 | 39.547 | 60.453 |
| TESTI2005326 | 0 | 0 | 0 | 0 | 0 | 0 | 14.987 |
| TESTI2005363 | 0 | 0 | 0 | 0 | 0 | 0 | 100 |
| TESTI2005376 | 0 | 0 | 0 | 0 | 0 | 0 | 100 |
| TESTI2005378 | 0 | 0 | 0 | 0 | 0 | 0 | 100 |
| TESTI2005380 | 0 | 0 | 0 | 0 | 0 | 0 | 100 |
| TESTI2005391 | 0 | 0 | 0 | 0 | 0 | 0 | 100 |
| TESTI2005395 | 0 | 0 | 0 | 0 | 0 | 0 | 51.276 |
| TESTI2005396 | 0 | 0 | 0 | 0 | 0 | 0 | 19.291 |
| TESTI2005408 | 3.821 | 0 | 0 | 0 | 0 | 0 | 2.316 |
| TESTI2005415 | 0 | 0 | 0 | 0 | 0 | 0 | 100 |
| TESTI2005470 | 0 | 0 | 0 | 0 | 0 | 0 | 100 |
| TESTI2005492 | 0 | 0 | 0 | 0 | 0 | 0 | 100 |
| TESTI2005564 | 0 | 0 | 25.762 | 0 | 0 | 0 | 11.970 |
| TESTI2005568 | 0 | 0 | 0 | 0 | 0 | 0 | 100 |
| TESTI2005584 | 0 | 0 | 0 | 0 | 0 | 0 | 100 |
| TESTI2005588 | 0 | 0 | 0 | 0 | 0 | 0 | 100 |
| TESTI2005590 | 0 | 0 | 0 | 0 | 0 | 0 | 100 |
| TESTI2005603 | 0 | 0 | 0 | 0 | 0 | 0 | 100 |
| TESTI2005609 | 0 | 0 | 0 | 0 | 0 | 0 | 100 |
| TESTI2005610 | 0 | 0 | 0 | 0 | 0 | 0 | 100 |
| TESTI2005630 | 0 | 0 | 0 | 0 | 0 | 0 | 100 |
| TESTI2005672 | 0 | 0 | 0 | 0 | 0 | 0 | 100 |
| TESTI2005683 | 0 | 0 | 0 | 0 | 0 | 0 | 100 |
| TESTI2005690 | 0 | 0 | 0 | 0 | 0 | 0 | 100 |
| TESTI2005692 | 0 | 0 | 0 | 0 | 0 | 0 | 36.852 |
| TESTI2005703 | 0 | 0 | 0 | 0 | 0 | 0 | 100 |
| TESTI2005720 | 0 | 0 | 0 | 0 | 0 | 0 | 100 |
| TESTI2005731 | 0 | 0 | 0 | 0 | 0 | 0 | 49.675 |
| TESTI2005739 | 0 | 0 | 0 | 0 | 0 | 0 | 100 |
| TESTI2005742 | 0 | 0 | 0 | 0 | 0 | 0 | 13.331 |
| TESTI2005743 | 0 | 0 | 0 | 0 | 0 | 0 | 1.436 |
| TESTI2005759 | 0 | 0 | 0 | 0 | 0 | 6.399 | 3.057 |
| TESTI2005767 | 0 | 0 | 0 | 0 | 0 | 0 | 92.965 |
| TESTI2005775 | 0 | 0 | 0 | 0 | 0 | 0 | 100 |
| TESTI2005784 | 0 | 0 | 0 | 0 | 0 | 0 | 1.944 |
| TESTI2005788 | 0 | 0 | 0 | 0 | 0 | 0 | 21.162 |
| TESTI2005827 | 0 | 0 | 0 | 0 | 0 | 0 | 100 |
| TESTI2005835 | 0 | 0 | 0 | 0 | 0 | 0 | 86.638 |
| TESTI2005860 | 0 | 0 | 0 | 0 | 0 | 0 | 100 |
| TESTI2005892 | 0 | 0 | 0 | 0 | 0 | 0 | 100 |
| TESTI2005908 | 6.792 | 0 | 0 | 0 | 0 | 0 | 1.029 |
| TESTI2005911 | 0 | 0 | 0 | 0 | 0 | 0 | 100 |
| TESTI2005933 | 0 | 0 | 0 | 0 | 0 | 0 | 100 |
| TESTI2005937 | 0 | 0 | 0 | 0 | 0 | 0 | 100 |
| TESTI2005948 | 0 | 0 | 0 | 0 | 0 | 0 | 100 |
| TESTI2005979 | 0 | 0 | 0 | 0 | 0 | 0 | 100 |
| TESTI2005981 | 0 | 0 | 0 | 0 | 0 | 0 | 20.358 |
| TESTI2005982 | 0 | 0 | 0 | 0 | 0 | 0 | 100 |
| TESTI2005984 | 0 | 0 | 0 | 0 | 0 | 0 | 100 |
| TESTI2005986 | 0 | 0 | 0 | 0 | 0 | 0 | 100 |
| TESTI2005987 | 0 | 0 | 0 | 0 | 0 | 0 | 100 |
| TESTI2006007 | 0 | 0 | 0 | 0 | 0 | 91.279 | 8.721 |
| TESTI2006008 | 0 | 0 | 0 | 0 | 0 | 0 | 100 |
| TESTI2006015 | 0 | 0 | 0 | 0 | 0 | 0 | 100 |
| TESTI2006016 | 0 | 0 | 0 | 0 | 0 | 0 | 100 |
| TESTI2006035 | 0 | 0 | 0 | 0 | 0 | 0 | 100 |
| TESTI2006040 | 0 | 0 | 0 | 0 | 0 | 0 | 100 |
| TESTI2006041 | 0 | 0 | 0 | 0 | 0 | 0 | 100 |
| TESTI2006045 | 0 | 0 | 0 | 0 | 0 | 0 | 100 |
| TESTI2006051 | 0 | 0 | 0 | 0 | 8.978 | 0 | 0.554 |
| TESTI2006067 | 0 | 0 | 0 | 0 | 0 | 0 | 100 |
| TESTI2006083 | 0 | 0 | 0 | 0 | 0 | 0 | 100 |
| TESTI2006097 | 0 | 0 | 0 | 0 | 0 | 0 | 13.774 |
| TESTI2006109 | 0 | 0 | 0 | 0 | 0 | 0 | 100 |
| TESTI2006111 | 0 | 0 | 0 | 0 | 0 | 0 | 13.477 |
| TESTI2006120 | 0 | 0 | 0 | 0 | 0 | 0 | 12.690 |
| TESTI2006125 | 0 | 0 | 0 | 0 | 0 | 0 | 100 |
| TESTI2006179 | 0 | 0 | 0 | 0 | 0 | 0 | 100 |
| TESTI2006209 | 0 | 0 | 0 | 0 | 0 | 0 | 100 |
| TESTI2006210 | 0 | 0 | 0 | 0 | 0 | 0 | 33.713 |
| TESTI2006212 | 0 | 0 | 0 | 0 | 0 | 0 | 100 |
| TESTI2006218 | 0 | 0 | 0 | 0 | 0 | 0 | 100 |
| TESTI2006238 | 0 | 0 | 0 | 0 | 0 | 0 | 100 |
| TESTI2006255 | 0 | 0 | 0 | 0 | 0 | 0 | 100 |
| TESTI2006258 | 0 | 0 | 0 | 0 | 0 | 0 | 6.703 |
| TESTI2006278 | 0 | 0 | 0 | 0 | 0 | 0 | 100 |
| TESTI2006333 | 0 | 0 | 0 | 0 | 0 | 0 | 100 |
| TESTI2006341 | 0 | 0 | 0 | 0 | 0 | 0 | 13.362 |
| TESTI2006360 | 0 | 0 | 0 | 0 | 0 | 0 | 100 |
| TESTI2006383 | 8.742 | 0 | 0 | 0 | 0 | 0 | 39.741 |
| TESTI2006409 | 0 | 0 | 0 | 0 | 0 | 0 | 39.051 |
| TESTI2006425 | 0 | 0 | 0 | 0 | 0 | 0 | 100 |
| TESTI2006437 | 0 | 0 | 0 | 0 | 0 | 0 | 100 |
| TESTI2006453 | 3.630 | 0 | 0 | 0 | 0 | 0 | 1.100 |
| TESTI2006457 | 0 | 0 | 0 | 0 | 0 | 0 | 100 |
| TESTI2006460 | 0 | 0 | 0 | 0 | 0 | 0 | 100 |
| TESTI2006465 | 0 | 0 | 0 | 0 | 0 | 0 | 100 |
| TESTI2006483 | 0 | 0 | 0 | 0 | 0 | 0 | 100 |
| TESTI2006499 | 0 | 0 | 0 | 0 | 0 | 0 | 100 |
| TESTI2006523 | 0 | 0 | 0 | 0 | 0 | 0 | 100 |
| TESTI2006543 | 0 | 0 | 0 | 0 | 0 | 0 | 100 |
| TESTI2006565 | 0 | 0 | 0 | 0 | 0 | 0 | 100 |
| TESTI2006572 | 0 | 0 | 0 | 0 | 0 | 0 | 100 |
| TESTI2006588 | 0 | 0 | 0 | 0 | 0 | 0 | 0.708 |
| TESTI2006615 | 0 | 0 | 0 | 0 | 0 | 0 | 72.403 |
| TESTI2006617 | 0 | 0 | 0 | 0 | 0 | 0 | 100 |
| TESTI2006624 | 0 | 0 | 0 | 0 | 0 | 0 | 100 |
| TESTI2006628 | 0 | 0 | 0 | 0 | 0 | 0 | 16.254 |
| TESTI2006633 | 0 | 0 | 0 | 0 | 0 | 0 | 52.424 |
| TESTI2006643 | 0 | 0 | 0 | 0 | 0 | 0 | 100 |
| TESTI2006648 | 0 | 0 | 0 | 0 | 0 | 0 | 100 |
| TESTI2006659 | 0 | 0 | 0 | 0 | 0 | 0 | 100 |
| TESTI2006660 | 0 | 0 | 0 | 0 | 0 | 0 | 100 |
| TESTI2006665 | 0 | 0 | 0 | 0 | 0 | 0 | 100 |
| TESTI2006667 | 0 | 0 | 0 | 0 | 0 | 0 | 100 |
| TESTI2006677 | 0 | 0 | 0 | 0 | 0 | 0 | 100 |
| TESTI2006720 | 0 | 0 | 0 | 0 | 0 | 0 | 43.944 |
| TESTI2006735 | 0 | 0 | 0 | 0 | 0 | 0 | 100 |
| TESTI2006744 | 0 | 0 | 0 | 0 | 0 | 0 | 100 |
| TESTI2006748 | 0 | 0 | 0 | 0 | 0 | 0 | 6.746 |
| TESTI2006774 | 0 | 0 | 0 | 0 | 0 | 0 | 47.943 |
| TESTI2006853 | 0 | 0 | 0 | 0 | 0 | 0 | 100 |
| TESTI2006866 | 0 | 0 | 0 | 0 | 0 | 0 | 100 |
| TESTI2006872 | 0 | 0 | 0 | 0 | 0 | 0 | 21.552 |
| TESTI2006877 | 0 | 0 | 0 | 0 | 0 | 0 | 52.051 |
| TESTI2006879 | 0 | 0 | 0 | 0 | 0 | 0 | 100 |
| TESTI2006894 | 0 | 0 | 0 | 0 | 0 | 0 | 100 |
| TESTI2006940 | 0 | 0 | 0 | 0 | 0 | 0 | 100 |
| TESTI2006955 | 0 | 0 | 0 | 0 | 0 | 0 | 100 |
| TESTI2006978 | 0 | 0 | 0 | 0 | 0 | 0 | 100 |
| TESTI2006979 | 0 | 0 | 0 | 0 | 0 | 0 | 100 |
| TESTI2006990 | 0 | 0 | 0 | 0 | 0 | 0 | 100 |
| TESTI2007040 | 0 | 0 | 0 | 0 | 0 | 0 | 100 |
| TESTI2007074 | 0 | 0 | 0 | 0 | 0 | 0 | 100 |
| TESTI2007078 | 0 | 0 | 0 | 0 | 0 | 0 | 100 |
| TESTI2007113 | 0 | 0 | 0 | 0 | 0 | 0 | 100 |
| TESTI2007152 | 0 | 0 | 0 | 0 | 0 | 0 | 100 |
| TESTI2007163 | 0 | 0 | 0 | 0 | 0 | 0 | 47.943 |
| TESTI2007183 | 0 | 0 | 0 | 0 | 0 | 0 | 100 |
| TESTI2007211 | 0 | 0 | 0 | 0 | 0 | 0 | 2.159 |
| TESTI2007220 | 0 | 0 | 0 | 0 | 0 | 0 | 100 |
| TESTI2007234 | 0 | 0 | 0 | 0 | 0 | 0 | 100 |
| TESTI2007311 | 0 | 0 | 0 | 0 | 0 | 0 | 2.515 |
| TESTI2007320 | 0 | 0 | 0 | 0 | 0 | 0 | 100 |
| TESTI2007346 | 0 | 0 | 0 | 0 | 0 | 0 | 100 |
| TESTI2007358 | 0 | 0 | 0 | 0 | 0 | 0 | 100 |
| TESTI2007402 | 0 | 0 | 0 | 0 | 0 | 0 | 100 |
| TESTI2007405 | 0 | 0 | 0 | 0 | 0 | 0 | 100 |
| TESTI2007407 | 0 | 0 | 0 | 0 | 0 | 0 | 2.006 |
| TESTI2007422 | 0 | 0 | 0 | 0 | 0 | 0 | 20.256 |
| TESTI2007452 | 0 | 0 | 0 | 0 | 0 | 0 | 100 |
| TESTI2007464 | 0 | 0 | 0 | 0 | 0 | 0 | 10.487 |
| TESTI2007466 | 0 | 0 | 0 | 0 | 0 | 0 | 100 |
| TESTI2007480 | 0 | 0 | 0 | 0 | 0 | 0 | 100 |
| TESTI2007490 | 0 | 0 | 0 | 0 | 0 | 0 | 100 |
| TESTI2007502 | 0 | 0 | 0 | 0 | 0 | 0 | 100 |
| TESTI2007524 | 0 | 0 | 0 | 0 | 0 | 0 | 100 |
| TESTI2007533 | 0 | 0 | 0 | 0 | 0 | 0 | 100 |
| TESTI2007576 | 0 | 0 | 0 | 0 | 0 | 0 | 100 |
| TESTI2007613 | 0 | 0 | 0 | 0 | 0 | 0 | 100 |
| TESTI2007657 | 0 | 0 | 0 | 0 | 0 | 0 | 100 |
| TESTI2007685 | 0 | 0 | 0 | 0 | 0 | 0 | 100 |
| TESTI2007692 | 0 | 0 | 0 | 0 | 0 | 0 | 100 |
| TESTI2007749 | 0 | 0 | 0 | 0 | 0 | 0 | 100 |
| TESTI2007750 | 0 | 0 | 0 | 0 | 0 | 0 | 100 |
| TESTI2007808 | 0 | 0 | 0 | 0 | 0 | 0 | 100 |
| TESTI2007814 | 0 | 0 | 0 | 0 | 0 | 0 | 100 |
| TESTI2007829 | 0 | 0 | 0 | 0 | 0 | 0 | 100 |
| TESTI2007864 | 0 | 0 | 0 | 0 | 0 | 0 | 43.944 |
| TESTI2007867 | 0 | 0 | 0 | 0 | 0 | 0 | 100 |
| TESTI2007872 | 0 | 0 | 0 | 0 | 0 | 0 | 100 |
| TESTI2007906 | 0 | 0 | 0 | 0 | 0 | 0 | 100 |
| TESTI2007922 | 0 | 0 | 0 | 0 | 0 | 0 | 10.332 |
| TESTI2007951 | 0 | 0 | 0 | 0 | 0 | 0 | 100 |
| TESTI2007972 | 0 | 0 | 0 | 0 | 0 | 0 | 100 |
| TESTI2007973 | 0 | 0 | 0 | 0 | 0 | 0 | 100 |
| TESTI2007998 | 0 | 0 | 0 | 0 | 0 | 0 | 4.134 |
| TESTI2008014 | 0 | 0 | 0 | 0 | 0 | 0 | 100 |
| TESTI2008020 | 0 | 0 | 0 | 0 | 0 | 0 | 67.687 |
| TESTI2008032 | 0 | 0 | 0 | 0 | 0 | 0 | 100 |
| TESTI2008033 | 0 | 0 | 0 | 0 | 0 | 0 | 100 |
| TESTI2008046 | 0 | 0 | 0 | 0 | 0 | 0 | 100 |
| TESTI2008081 | 0 | 0 | 0 | 0 | 0 | 0 | 100 |
| TESTI2008099 | 0 | 0 | 0 | 0 | 0 | 0 | 100 |
| TESTI2008139 | 0 | 0 | 0 | 0 | 0 | 0 | 100 |
| TESTI2008144 | 0 | 0 | 0 | 0 | 0 | 0 | 100 |
| TESTI2008161 | 0 | 0 | 0 | 0 | 0 | 0 | 100 |
| TESTI2008189 | 0 | 0 | 0 | 0 | 0 | 0 | 100 |
| TESTI2008204 | 0 | 0 | 0 | 0 | 0 | 0 | 100 |
| TESTI2008219 | 0 | 0 | 0 | 0 | 0 | 0 | 100 |
| TESTI2008233 | 28.364 | 0 | 0 | 0 | 0 | 0 | 25.789 |
| TESTI2008234 | 0 | 0 | 0 | 0 | 0 | 0 | 100 |
| TESTI2008237 | 0 | 0 | 0 | 0 | 0 | 0 | 100 |
| TESTI2008240 | 0.539 | 0 | 0 | 0 | 0 | 0 | 1.798 |
| TESTI2008278 | 0 | 0 | 0 | 0 | 0 | 0 | 56.337 |
| TESTI2008320 | 0 | 0 | 0 | 0 | 0 | 0 | 100 |
| TESTI2008331 | 0 | 0 | 0 | 0 | 0 | 0 | 100 |
| TESTI2008343 | 0 | 0 | 0 | 0 | 0 | 0 | 100 |
| TESTI2008387 | 0 | 0 | 0 | 0 | 0 | 0 | 100 |
| TESTI2008389 | 0 | 0 | 0 | 0 | 0 | 0 | 100 |
| TESTI2008394 | 0 | 0 | 0 | 0 | 0 | 0 | 26.135 |
| TESTI2008405 | 0 | 0 | 0 | 0 | 0 | 0 | 3.404 |
| TESTI2008420 | 0 | 0 | 0 | 0 | 0 | 0 | 100 |
| TESTI2008425 | 0 | 0 | 0 | 0 | 0 | 0 | 100 |
| TESTI2008440 | 0 | 0 | 0 | 0 | 0 | 0 | 100 |
| TESTI2008567 | 0 | 0 | 0 | 0 | 0 | 0 | 100 |
| TESTI2008595 | 0 | 0 | 0 | 0 | 0 | 0 | 100 |
| TESTI2008621 | 0 | 0 | 0 | 0 | 0 | 0 | 46.229 |
| TESTI2008636 | 0 | 0 | 0 | 0 | 0 | 0 | 100 |
| TESTI2008657 | 0 | 0 | 0 | 0 | 0 | 0 | 100 |
| TESTI2008684 | 0 | 0 | 0 | 0 | 0 | 0 | 100 |
| TESTI2008699 | 21.003 | 0 | 0 | 0 | 0 | 0 | 12.731 |
| TESTI2008715 | 0 | 0 | 0 | 0 | 0 | 0 | 100 |
| TESTI2008762 | 0 | 0 | 0 | 0 | 0 | 0 | 100 |
| TESTI2008774 | 0 | 0 | 0 | 0 | 0 | 0 | 100 |
| TESTI2008786 | 0 | 0 | 0 | 0 | 0 | 0 | 100 |
| TESTI2008822 | 0 | 0 | 0 | 0 | 0 | 0 | 100 |
| TESTI2008835 | 0 | 0 | 0 | 0 | 0 | 0 | 7.093 |
| TESTI2008840 | 0 | 0 | 0 | 0 | 0 | 0 | 27.035 |
| TESTI2008847 | 0 | 0 | 0 | 0 | 0 | 0 | 56.475 |
| TESTI2008884 | 0 | 0 | 0 | 0 | 0 | 0 | 100 |
| TESTI2008901 | 0 | 0 | 0 | 0 | 0 | 0 | 100 |
| TESTI2008929 | 0 | 0 | 0 | 0 | 0 | 0 | 100 |
| TESTI2008946 | 0 | 0 | 0 | 0 | 0 | 0 | 100 |
| TESTI2008960 | 0 | 0 | 0 | 0 | 0 | 0 | 100 |
| TESTI2009018 | 0 | 0 | 0 | 0 | 0 | 0 | 100 |
| TESTI2009091 | 0 | 0 | 0 | 0 | 0 | 0 | 100 |
| TESTI2009097 | 0 | 0 | 0 | 0 | 0 | 0 | 100 |
| TESTI2009136 | 0 | 0 | 0 | 0 | 0 | 0 | 100 |
| TESTI2009185 | 0 | 0 | 0 | 0 | 0 | 0 | 100 |
| TESTI2009190 | 0 | 0 | 0 | 0 | 0 | 0 | 100 |
| TESTI2009217 | 0 | 0 | 0 | 0 | 0 | 0 | 100 |
| TESTI2009239 | 0 | 0 | 0 | 0 | 0 | 0 | 47.943 |
| TESTI2009325 | 0 | 0 | 0 | 0 | 0 | 0 | 100 |
| TESTI2009388 | 0 | 0 | 0 | 0 | 0 | 0 | 13.106 |
| TESTI2009390 | 0 | 0 | 0 | 0 | 0 | 0 | 100 |
| TESTI2009400 | 0 | 0 | 0 | 0 | 0 | 0 | 100 |
| TESTI2009402 | 0 | 0 | 0 | 0 | 0 | 0 | 5.993 |
| TESTI2009412 | 0 | 0 | 0 | 0 | 0 | 0 | 100 |
| TESTI2009423 | 0 | 0 | 0 | 0 | 0 | 0 | 10.571 |
| TESTI2009447 | 0 | 0 | 0 | 0 | 0 | 0 | 100 |
| TESTI2009462 | 0 | 0 | 0 | 0 | 0 | 0 | 100 |
| TESTI2009474 | 0 | 44.875 | 0 | 0 | 0 | 0 | 2.641 |
| TESTI2009477 | 0 | 0 | 0 | 0 | 0 | 0 | 100 |
| TESTI2009497 | 0 | 0 | 0 | 0 | 0 | 0 | 34.478 |
| TESTI2009502 | 0 | 0 | 0 | 0 | 0 | 0 | 2.954 |
| TESTI2009511 | 0 | 0 | 0 | 0 | 0 | 0 | 100 |
| TESTI2009520 | 0 | 0 | 0 | 0 | 0 | 0 | 6.863 |
| TESTI2009544 | 0 | 0 | 0 | 0 | 0 | 0 | 100 |
| TESTI2009545 | 0 | 0 | 0 | 0 | 0 | 0 | 100 |
| TESTI2009551 | 0 | 0 | 0 | 0 | 0 | 0 | 100 |
| TESTI2009577 | 0 | 0 | 0 | 0 | 0 | 0 | 5.777 |
| TESTI2009585 | 0 | 0 | 0 | 0 | 0 | 0 | 100 |
| TESTI2009588 | 0 | 0 | 0 | 0 | 0 | 0 | 100 |
| TESTI2009683 | 0 | 0 | 0 | 0 | 0 | 0 | 39.348 |
| TESTI2009727 | 0 | 0 | 0 | 0 | 0 | 0 | 100 |
| TESTI2009739 | 0 | 0 | 0 | 0 | 0 | 0 | 100 |
| TESTI2009785 | 0 | 0 | 10.093 | 0 | 0 | 0 | 0.938 |
| TESTI2009812 | 0 | 0 | 0 | 0 | 0 | 0 | 100 |
| TESTI2009835 | 0 | 0 | 0 | 0 | 0 | 0 | 100 |
| TESTI2009853 | 0 | 0 | 0 | 0 | 0 | 0 | 100 |
| TESTI2009935 | 0 | 0 | 0 | 0 | 0 | 0 | 100 |
| TESTI2009977 | 0 | 0 | 0 | 0 | 0 | 0 | 15.790 |
| TESTI2009987 | 0 | 0 | 0 | 0 | 0 | 0 | 10.003 |
| TESTI2010009 | 0 | 0 | 0 | 0 | 0 | 0 | 100 |
| TESTI2010154 | 0 | 0 | 0 | 0 | 0 | 0 | 100 |
| TESTI2010180 | 0 | 0 | 0 | 0 | 0 | 0 | 22.675 |
| TESTI2010239 | 0 | 0 | 0 | 0 | 0 | 0 | 100 |
| TESTI2010280 | 0 | 0 | 0 | 0 | 0 | 0 | 100 |
| TESTI2010354 | 0 | 0 | 0 | 0 | 0 | 0 | 100 |
| TESTI2010396 | 0 | 0 | 0 | 0 | 0 | 0 | 100 |
| TESTI2010400 | 0 | 0 | 0 | 0 | 0 | 0 | 100 |
| TESTI2010409 | 0 | 0 | 0 | 0 | 0 | 0 | 100 |
| TESTI2010513 | 0 | 0 | 0 | 0 | 0 | 0 | 5.136 |
| TESTI2010572 | 0 | 0 | 0 | 0 | 0 | 0 | 100 |
| TESTI2010587 | 0 | 0 | 0 | 0 | 0 | 0 | 100 |
| TESTI2010591 | 0 | 0 | 0 | 0 | 0 | 0 | 100 |
| TESTI2010617 | 0 | 0 | 0 | 0 | 0 | 0 | 4.552 |
| TESTI2010682 | 0 | 0 | 0 | 0 | 0 | 0 | 100 |
| TESTI2010724 | 0 | 0 | 0 | 0 | 0 | 0 | 93.183 |
| TESTI2010732 | 0 | 0 | 0 | 0 | 0 | 0 | 100 |
| TESTI2010734 | 0 | 0 | 0 | 0 | 0 | 0 | 100 |
| TESTI2010755 | 0 | 0 | 0 | 0 | 0 | 0 | 100 |
| TESTI2010793 | 0 | 0 | 0 | 0 | 0 | 0 | 100 |
| TESTI2010806 | 0 | 0 | 0 | 0 | 0 | 0 | 100 |
| TESTI2010833 | 0 | 0 | 0 | 0 | 0 | 0 | 100 |
| TESTI2010872 | 0 | 0 | 0 | 0 | 0 | 0 | 100 |
| TESTI2011009 | 0 | 0 | 0 | 0 | 0 | 0 | 100 |
| TESTI2011020 | 0 | 0 | 0 | 0 | 0 | 0 | 100 |
| TESTI2011028 | 0 | 0 | 0 | 0 | 0 | 0 | 100 |
| TESTI2011033 | 0 | 0 | 0 | 0 | 0 | 0 | 100 |
| TESTI2011254 | 0 | 0 | 0 | 0 | 0 | 0 | 100 |
| TESTI2011286 | 0 | 0 | 0 | 0 | 0 | 0 | 17.123 |
| TESTI2011294 | 0 | 0 | 0 | 0 | 0 | 0 | 100 |
| TESTI2011314 | 0 | 0 | 0 | 0 | 0 | 0 | 100 |
| TESTI2011315 | 0 | 0 | 0 | 0 | 0 | 0 | 100 |
| TESTI2011394 | 0 | 0 | 0 | 0 | 0 | 0 | 100 |
| TESTI2011407 | 0 | 0 | 0 | 0 | 0 | 0 | 100 |
| TESTI2011448 | 0 | 0 | 0 | 0 | 0 | 0 | 100 |
| TESTI2011480 | 0 | 0 | 0 | 0 | 0 | 0 | 100 |
| TESTI2011549 | 0 | 0 | 0 | 0 | 0 | 0 | 39.348 |
| TESTI2011575 | 0 | 0 | 0 | 0 | 0 | 0 | 100 |
| TESTI2011605 | 0 | 0 | 0 | 0 | 0 | 0 | 25.917 |
| TESTI2011612 | 0 | 0 | 0 | 0 | 0 | 0 | 100 |
| TESTI2011665 | 0 | 0 | 0 | 0 | 0 | 0 | 100 |
| TESTI2011680 | 0 | 0 | 0 | 0 | 0 | 0 | 14.670 |
| TESTI2011683 | 0 | 0 | 0 | 0 | 0 | 0 | 21.164 |
| TESTI2011712 | 0 | 0 | 0 | 0 | 0 | 0 | 27.033 |
| TESTI2011750 | 0 | 0 | 0 | 0 | 0 | 0 | 100 |
| TESTI2011840 | 0 | 0 | 0 | 0 | 0 | 0 | 100 |
| TESTI2011846 | 0 | 0 | 0 | 0 | 0 | 0 | 100 |
| TESTI2011915 | 0 | 0 | 0 | 0 | 0 | 0 | 100 |
| TESTI2011928 | 0 | 0 | 0 | 0 | 0 | 0 | 100 |
| TESTI2011971 | 0 | 0 | 0 | 0 | 0 | 0 | 100 |
| TESTI2012019 | 0 | 0 | 0 | 0 | 0 | 0 | 7.602 |
| TESTI2012050 | 0 | 0 | 0 | 0 | 0 | 0 | 100 |
| TESTI2012090 | 0 | 0 | 0 | 0 | 0 | 0 | 100 |
| TESTI2012095 | 0 | 0 | 0 | 0 | 0 | 0 | 100 |
| TESTI2012104 | 0 | 0 | 0 | 0 | 0 | 0 | 6.364 |
| TESTI2012152 | 0 | 0 | 0 | 0 | 0 | 0 | 100 |
| TESTI2012155 | 0 | 0 | 0 | 0 | 0 | 0 | 8.378 |
| TESTI2012171 | 0 | 0 | 0 | 0 | 0 | 0 | 100 |
| TESTI2012207 | 0 | 0 | 0 | 0 | 0 | 0 | 100 |
| TESTI2012231 | 0 | 0 | 0 | 0 | 0 | 0 | 100 |
| TESTI2012244 | 0 | 0 | 0 | 0 | 0 | 0 | 100 |
| TESTI2012289 | 0 | 0 | 0 | 0 | 0 | 0 | 5.642 |
| TESTI2012308 | 0 | 0 | 0 | 0 | 0 | 0 | 100 |
| TESTI2012356 | 0 | 0 | 0 | 0 | 0 | 0 | 1.895 |
| TESTI2012387 | 0 | 0 | 0 | 0 | 0 | 0 | 100 |
| TESTI2012394 | 0 | 0 | 0 | 0 | 0 | 0 | 70.009 |
| TESTI2012444 | 0 | 0 | 0 | 0 | 0 | 0 | 100 |
| TESTI2012511 | 0 | 0 | 0 | 0 | 0 | 0 | 2.806 |
| TESTI2012528 | 0 | 0 | 0 | 0 | 0 | 0 | 100 |
| TESTI2012544 | 0 | 0 | 0 | 0 | 0 | 0 | 100 |
| TESTI2012550 | 0 | 0 | 0 | 0 | 0 | 0 | 100 |
| TESTI2012571 | 0 | 0 | 0 | 0 | 0 | 0 | 26.782 |
| TESTI2012592 | 0 | 0 | 0 | 0 | 0 | 0 | 100 |
| TESTI2012617 | 0 | 0 | 0 | 0 | 0 | 0 | 100 |
| TESTI2012628 | 0 | 0 | 0 | 0 | 0 | 0 | 100 |
| TESTI2012778 | 0 | 4.104 | 0 | 0 | 0 | 0 | 0.845 |
| TESTI2012812 | 0 | 0 | 0 | 0 | 0 | 0 | 100 |
| TESTI2012834 | 0 | 0 | 0 | 0 | 0 | 0 | 100 |
| TESTI2012835 | 0 | 0 | 0 | 0 | 0 | 0 | 100 |
| TESTI2012861 | 0 | 0 | 0 | 0 | 0 | 0 | 100 |
| TESTI2012900 | 0 | 0 | 0 | 0 | 0 | 0 | 100 |
| TESTI2012915 | 0 | 0 | 0 | 0 | 0 | 0 | 100 |
| TESTI2012922 | 0 | 0 | 0 | 0 | 0 | 0 | 100 |
| TESTI2013001 | 0 | 0 | 0 | 0 | 0 | 0 | 100 |
| TESTI2013012 | 0 | 0 | 0 | 0 | 0 | 0 | 100 |
| TESTI2013053 | 0 | 0 | 0 | 0 | 0 | 0 | 100 |
| TESTI2013144 | 0 | 0 | 0 | 0 | 0 | 0 | 100 |
| TESTI2013163 | 0 | 0 | 0 | 0 | 0 | 0 | 100 |
| TESTI2013169 | 0 | 0 | 0 | 0 | 0 | 0 | 100 |
| TESTI2013212 | 0 | 0 | 0 | 0 | 0 | 0 | 100 |
| TESTI2013231 | 0 | 0 | 0 | 0 | 0 | 0 | 1.301 |
| TESTI2013257 | 0 | 0 | 0 | 0 | 0 | 0 | 100 |
| TESTI2013264 | 0 | 0 | 0 | 0 | 0 | 0 | 16.423 |
| TESTI2013268 | 0 | 0 | 0 | 0 | 0 | 0 | 100 |
| TESTI2013295 | 0 | 0 | 0 | 0 | 0 | 0 | 6.964 |
| TESTI2013322 | 0 | 0 | 0 | 0 | 0 | 0 | 100 |
| TESTI2013381 | 0 | 0 | 0 | 0 | 0 | 0 | 100 |
| TESTI2013382 | 0 | 0 | 0 | 0 | 0 | 0 | 100 |
| TESTI2013401 | 0 | 0 | 0 | 0 | 0 | 0 | 100 |
| TESTI2013427 | 0 | 0 | 0 | 0 | 0 | 0 | 100 |
| TESTI2013468 | 0 | 0 | 0 | 0 | 0 | 0 | 100 |
| TESTI2013497 | 0 | 0 | 0 | 0 | 0 | 0 | 100 |
| TESTI2013545 | 0 | 0 | 0 | 0 | 0 | 0 | 100 |
| TESTI2013546 | 0 | 0 | 0 | 0 | 0 | 0 | 100 |
| TESTI2013566 | 0 | 0 | 0 | 0 | 0 | 0 | 100 |
| TESTI2013601 | 0 | 0 | 0 | 0 | 0 | 0 | 100 |
| TESTI2013604 | 0 | 0 | 0 | 0 | 0 | 0 | 100 |
| TESTI2013607 | 0 | 0 | 0 | 0 | 0 | 0 | 100 |
| TESTI2013610 | 0 | 0 | 0 | 0 | 0 | 0 | 100 |
| TESTI2013691 | 0 | 0 | 0 | 0 | 0 | 0 | 100 |
| TESTI2013699 | 0 | 0 | 0 | 0 | 0 | 0 | 100 |
| TESTI2013737 | 0 | 0 | 0 | 0 | 0 | 0 | 100 |
| TESTI2013767 | 0 | 0 | 0 | 0 | 0 | 0 | 100 |
| TESTI2013832 | 0 | 0 | 0 | 0 | 0 | 0 | 100 |
| TESTI2013873 | 0 | 0 | 0 | 0 | 0 | 0 | 100 |
| TESTI2013889 | 0 | 0 | 0 | 0 | 0 | 0 | 100 |
| TESTI2014007 | 0 | 0 | 0 | 0 | 0 | 0 | 100 |
| TESTI2014036 | 0 | 0 | 0 | 0 | 0 | 0 | 100 |
| TESTI2014097 | 0 | 0 | 0 | 0 | 0 | 0 | 100 |
| TESTI2014160 | 0 | 0 | 0 | 0 | 0 | 0 | 100 |
| TESTI2014248 | 0 | 0 | 0 | 0 | 0 | 0 | 100 |
| TESTI2014254 | 0 | 0 | 0 | 0 | 0 | 0 | 100 |
| TESTI2014269 | 0 | 0 | 0 | 0 | 0 | 0 | 100 |
| TESTI2014274 | 0 | 0 | 0 | 0 | 0 | 0 | 100 |
| TESTI2014318 | 0 | 0 | 0 | 0 | 0 | 0 | 18.792 |
| TESTI2014324 | 0 | 0 | 0 | 0 | 0 | 0 | 100 |
| TESTI2014339 | 0 | 0 | 0 | 0 | 0 | 0 | 100 |
| TESTI2014362 | 0 | 0 | 0 | 0 | 0 | 0 | 100 |
| TESTI2014385 | 0 | 0 | 0 | 0 | 0 | 0 | 100 |
| TESTI2014415 | 0 | 0 | 0 | 0 | 0 | 0 | 100 |
| TESTI2014439 | 0 | 0 | 0 | 0 | 0 | 0 | 100 |
| TESTI2014474 | 0 | 0 | 0 | 0 | 0 | 0 | 100 |
| TESTI2014505 | 0 | 0 | 0 | 0 | 0 | 0 | 12.881 |
| TESTI2014577 | 0 | 0 | 0 | 0 | 0 | 0 | 100 |
| TESTI2014578 | 0 | 0 | 0 | 0 | 0 | 0 | 100 |
| TESTI2014716 | 0 | 0 | 0 | 0 | 0 | 0 | 100 |
| TESTI2014780 | 0 | 0 | 0 | 0 | 0 | 0 | 18.563 |
| TESTI2014800 | 0 | 0 | 0 | 0 | 0 | 0 | 100 |
| TESTI2014838 | 0 | 0 | 0 | 0 | 0 | 0 | 77.083 |
| TESTI2014843 | 0 | 0 | 0 | 0 | 0 | 0 | 100 |
| TESTI2014979 | 0 | 0 | 0 | 0 | 0 | 0 | 100 |
| TESTI2014988 | 0 | 0 | 0 | 0 | 0 | 0 | 100 |
| TESTI2015042 | 0 | 0 | 0 | 0 | 0 | 0 | 56.168 |
| TESTI2015092 | 0 | 0 | 0 | 0 | 0 | 0 | 4.331 |
| TESTI2015105 | 0 | 0 | 0 | 0 | 0 | 0 | 100 |
| TESTI2015180 | 0 | 0 | 0 | 0 | 0 | 0 | 100 |
| TESTI2015213 | 0 | 0 | 3.610 | 0 | 0 | 0 | 1.342 |
| TESTI2015246 | 25.535 | 0 | 0 | 0 | 0 | 0 | 15.478 |
| TESTI2015249 | 0 | 0 | 0 | 0 | 0 | 0 | 100 |
| TESTI2015327 | 0 | 0 | 0 | 0 | 0 | 0 | 100 |
| TESTI2015331 | 0 | 0 | 0 | 0 | 0 | 0 | 100 |
| TESTI2015335 | 0 | 0 | 0 | 0 | 0 | 0 | 44.030 |
| TESTI2015350 | 0 | 0 | 0 | 0 | 0 | 0 | 100 |
| TESTI2015375 | 0 | 0 | 0 | 0 | 0 | 0 | 100 |
| TESTI2015437 | 0 | 0 | 0 | 0 | 0 | 0 | 2.669 |
| TESTI2015590 | 0 | 0 | 0 | 0 | 0 | 0 | 100 |
| TESTI2015610 | 0 | 0 | 0 | 0 | 0 | 0 | 100 |
| TESTI2015626 | 0 | 7.305 | 0 | 0 | 0 | 2.250 | 1.720 |
| TESTI2015647 | 0 | 0 | 0 | 0 | 0 | 0 | 100 |
| TESTI2015675 | 0 | 0 | 0 | 0 | 0 | 0 | 100 |
| TESTI2015710 | 0 | 0 | 0 | 0 | 0 | 0 | 100 |
| TESTI2015752 | 0 | 0 | 0 | 0 | 0 | 0 | 100 |
| TESTI2015830 | 0 | 0 | 0 | 0 | 0 | 0 | 100 |
| TESTI2015914 | 0 | 0 | 0 | 0 | 0 | 0 | 100 |
| TESTI2015938 | 0 | 0 | 0 | 0 | 0 | 0 | 100 |
| TESTI2015947 | 0 | 0 | 0 | 0 | 0 | 0 | 100 |
| TESTI2015962 | 0 | 0 | 0 | 0 | 0 | 0 | 2.593 |
| TESTI2015987 | 0 | 0 | 0 | 0 | 0 | 0 | 100 |
| TESTI2016033 | 0 | 0 | 0 | 0 | 0 | 0 | 2.278 |
| TESTI2016046 | 0 | 0 | 0 | 0 | 0 | 0 | 100 |
| TESTI2016101 | 0 | 0 | 0 | 0 | 0 | 0 | 5.668 |
| TESTI2016162 | 0 | 0 | 0 | 0 | 0 | 0 | 100 |
| TESTI2016197 | 0 | 0 | 0 | 0 | 0 | 0 | 100 |
| TESTI2016278 | 0 | 0 | 0 | 0 | 0 | 0 | 37.085 |
| TESTI2016298 | 0 | 0 | 0 | 0 | 0 | 0 | 100 |
| TESTI2016331 | 0 | 0 | 0 | 0 | 0 | 0 | 100 |
| TESTI2016337 | 0 | 0 | 0 | 0 | 0 | 0 | 100 |
| TESTI2016410 | 0 | 0 | 0 | 0 | 0 | 0 | 100 |
| TESTI2016421 | 0 | 0 | 0 | 0 | 0 | 0 | 100 |
| TESTI2016509 | 0 | 0 | 0 | 0 | 0 | 0 | 100 |
| TESTI2016568 | 0 | 0 | 0 | 0 | 0 | 0 | 100 |
| TESTI2016583 | 0 | 0 | 0 | 0 | 0 | 0 | 23.515 |
| TESTI2016599 | 0 | 0 | 0 | 0 | 0 | 0 | 100 |
| TESTI2016629 | 0 | 0 | 0 | 0 | 0 | 0 | 100 |
| TESTI2016663 | 0 | 0 | 0 | 0 | 0 | 0 | 100 |
| TESTI2016667 | 0 | 0 | 0 | 0 | 0 | 0 | 100 |
| TESTI2016688 | 0 | 0 | 0 | 0 | 0 | 0 | 100 |
| TESTI2016701 | 0 | 0 | 0 | 0 | 0 | 0 | 47.943 |
| TESTI2016758 | 0 | 0 | 0 | 0 | 0 | 0 | 100 |
| TESTI2016848 | 0 | 0 | 0 | 0 | 0 | 0 | 100 |
| TESTI2016863 | 0 | 0 | 0 | 0 | 0 | 0 | 100 |
| TESTI2016888 | 0 | 0 | 0 | 0 | 0 | 0 | 100 |
| TESTI2016896 | 0 | 0 | 0 | 0 | 0 | 0 | 56.168 |
| TESTI2016922 | 0 | 0 | 0 | 0 | 0 | 0 | 100 |
| TESTI2016942 | 0 | 0 | 0 | 0 | 0 | 0 | 100 |
| TESTI2016950 | 0 | 0 | 0 | 0 | 0 | 0 | 100 |
| TESTI2016996 | 0 | 0 | 0 | 0 | 0 | 0 | 100 |
| TESTI2017017 | 0 | 0 | 0 | 0 | 0 | 0 | 100 |
| TESTI2017028 | 0 | 0 | 0 | 0 | 0 | 0 | 100 |
| TESTI2017035 | 0 | 0 | 0 | 0 | 0 | 0 | 27.423 |
| TESTI2017069 | 0 | 0 | 0 | 0 | 0 | 0 | 100 |
| TESTI2017089 | 0 | 0 | 0 | 0 | 0 | 0 | 100 |
| TESTI2017102 | 0 | 0 | 0 | 0 | 0 | 0 | 100 |
| TESTI2017107 | 0 | 0 | 0 | 0 | 0 | 0 | 39.348 |
| TESTI2017113 | 0 | 0 | 0 | 0 | 0 | 0 | 100 |
| TESTI2017125 | 0 | 0 | 0 | 0 | 0 | 0 | 100 |
| TESTI2017256 | 0 | 0 | 0 | 0 | 0 | 0 | 100 |
| TESTI2017305 | 0 | 0 | 0 | 0 | 0 | 0 | 100 |
| TESTI2017311 | 0 | 0 | 0 | 0 | 0 | 0 | 100 |
| TESTI2017396 | 0 | 0 | 0 | 0 | 0 | 0 | 100 |
| TESTI2017507 | 0 | 0 | 0 | 0 | 0 | 0 | 100 |
| TESTI2017537 | 0 | 0 | 0 | 0 | 0 | 0 | 100 |
| TESTI2017582 | 0 | 0 | 0 | 0 | 0 | 0 | 100 |
| TESTI2017584 | 0 | 0 | 0 | 0 | 0 | 0 | 100 |
| TESTI2017645 | 0 | 0 | 0 | 0 | 0 | 0 | 21.754 |
| TESTI2017727 | 0 | 0 | 0 | 0 | 0 | 0 | 100 |
| TESTI2017740 | 0 | 0 | 0 | 0 | 0 | 0 | 100 |
| TESTI2017775 | 0 | 0 | 0 | 0 | 0 | 0 | 100 |
| TESTI2017816 | 0 | 0 | 0 | 0 | 0 | 0 | 100 |
| TESTI2017832 | 0 | 0 | 0 | 0 | 0 | 0 | 100 |
| TESTI2017923 | 0 | 0 | 0 | 0 | 0 | 0 | 100 |
| TESTI2017932 | 0 | 0 | 0 | 0 | 0 | 0 | 100 |
| TESTI2017951 | 0 | 0 | 0 | 0 | 0 | 0 | 100 |
| TESTI2017954 | 0 | 14.714 | 0 | 0 | 0 | 0 | 0.866 |
| TESTI2018014 | 0 | 0 | 0 | 0 | 0 | 0 | 5.039 |
| TESTI2018031 | 0 | 0 | 0 | 0 | 0 | 0 | 100 |
| TESTI2018035 | 0 | 0 | 0 | 0 | 0 | 0 | 100 |
| TESTI2018060 | 0 | 0 | 0 | 0 | 0 | 0 | 100 |
| TESTI2018083 | 0 | 0 | 0 | 0 | 0 | 0 | 100 |
| TESTI2018178 | 0 | 0 | 0 | 0 | 0 | 0 | 100 |
| TESTI2018221 | 0 | 0 | 0 | 0 | 0 | 0 | 100 |
| TESTI2018276 | 0 | 0 | 0 | 0 | 0 | 0 | 100 |
| TESTI2018290 | 0 | 0 | 0 | 0 | 0 | 0 | 100 |
| TESTI2018335 | 0 | 0 | 0 | 0 | 0 | 0 | 100 |
| TESTI2018337 | 0 | 0 | 0 | 0 | 0 | 0 | 100 |
| TESTI2018368 | 0 | 0 | 0 | 0 | 0 | 0 | 100 |
| TESTI2018421 | 0 | 0 | 0 | 0 | 0 | 0 | 15.347 |
| TESTI2018428 | 0 | 0 | 0 | 0 | 0 | 0 | 100 |
| TESTI2018462 | 6.095 | 0 | 0 | 0 | 0 | 0 | 9.236 |
| TESTI2018475 | 0 | 0 | 0 | 0 | 0 | 0 | 100 |
| TESTI2018482 | 0 | 0 | 0 | 0 | 0 | 0 | 100 |
| TESTI2018521 | 0 | 0 | 0 | 0 | 0 | 0 | 100 |
| TESTI2018565 | 0 | 0 | 0 | 0 | 0 | 0 | 100 |
| TESTI2018581 | 0 | 0 | 0 | 0 | 0 | 0 | 100 |
| TESTI2018611 | 0 | 0 | 0 | 0 | 0 | 0 | 3.433 |
| TESTI2018687 | 0 | 0 | 0 | 0 | 0 | 0 | 100 |
| TESTI2018697 | 0 | 0 | 0 | 0 | 0 | 0 | 100 |
| TESTI2018838 | 0 | 0 | 0 | 0 | 0 | 0 | 100 |
| TESTI2018867 | 0 | 0 | 0 | 0 | 0 | 0 | 72.596 |
| TESTI2018941 | 0 | 0 | 0 | 0 | 0 | 0 | 100 |
| TESTI2018957 | 0 | 0 | 0 | 0 | 0 | 0 | 100 |
| TESTI2018974 | 0 | 0 | 0 | 0 | 0 | 0 | 100 |
| TESTI2018975 | 0 | 0 | 0 | 0 | 0 | 0 | 100 |
| TESTI2018997 | 0 | 0 | 14.651 | 0 | 0 | 0 | 2.723 |
| TESTI2019042 | 0 | 0 | 0 | 0 | 0 | 0 | 100 |
| TESTI2019077 | 0 | 0 | 0 | 0 | 0 | 0 | 43.944 |
| TESTI2019228 | 0 | 0 | 0 | 0 | 0 | 0 | 100 |
| TESTI2019257 | 0 | 0 | 0 | 0 | 0 | 0 | 100 |
| TESTI2019280 | 0 | 0 | 0 | 0 | 0 | 0 | 100 |
| TESTI2019282 | 0 | 0 | 0 | 0 | 0 | 0 | 100 |
| TESTI2019308 | 0 | 0 | 0 | 0 | 0 | 0 | 100 |
| TESTI2019336 | 0 | 0 | 0 | 0 | 0 | 0 | 100 |
| TESTI2019352 | 0 | 0 | 0 | 0 | 0 | 0 | 100 |
| TESTI2019406 | 0 | 0 | 0 | 0 | 0 | 0 | 100 |
| TESTI2019430 | 0 | 0 | 0 | 0 | 0 | 0 | 100 |
| TESTI2019455 | 0 | 0 | 0 | 0 | 0 | 0 | 100 |
| TESTI2019481 | 0 | 0 | 0 | 0 | 0 | 0 | 100 |
| TESTI2019488 | 0 | 0 | 0 | 0 | 0 | 0 | 100 |
| TESTI2019501 | 0 | 0 | 0 | 0 | 0 | 0 | 100 |
| TESTI2019648 | 0 | 0 | 0 | 0 | 0 | 0 | 100 |
| TESTI2019669 | 0 | 0 | 0 | 0 | 0 | 0 | 100 |
| TESTI2019697 | 0 | 0 | 0 | 0 | 0 | 0 | 100 |
| TESTI2019729 | 0 | 0 | 0 | 0 | 0 | 0 | 25.979 |
| TESTI2019760 | 0 | 0 | 0 | 0 | 0 | 0 | 29.749 |
| TESTI2019787 | 0 | 0 | 0 | 0 | 0 | 0 | 100 |
| TESTI2019794 | 0 | 0 | 0 | 0 | 0 | 0 | 100 |
| TESTI2019854 | 0 | 0 | 0 | 0 | 0 | 0 | 100 |
| TESTI2019859 | 0 | 0 | 0 | 0 | 0 | 0 | 100 |
| TESTI2019860 | 0 | 0 | 0 | 0 | 0 | 0 | 100 |
| TESTI2019872 | 0 | 0 | 0 | 0 | 0 | 0 | 100 |
| TESTI2019911 | 0 | 0 | 0 | 0 | 0 | 0 | 100 |
| TESTI2019917 | 0 | 0 | 0 | 0 | 0 | 0 | 100 |
| TESTI2019975 | 0 | 0 | 0 | 0 | 0 | 0 | 100 |
| TESTI2019998 | 0 | 0 | 0 | 0 | 0 | 0 | 100 |
| TESTI2020012 | 0 | 0 | 0 | 0 | 0 | 0 | 14.939 |
| TESTI2020026 | 0 | 0 | 0 | 0 | 0 | 0 | 8.489 |
| TESTI2020029 | 0 | 0 | 0 | 0 | 0 | 0 | 100 |
| TESTI2020071 | 0 | 0 | 0 | 0 | 0 | 0 | 100 |
| TESTI2020084 | 0 | 0 | 0 | 0 | 0 | 0 | 100 |
| TESTI2020265 | 0 | 0 | 0 | 0 | 0 | 0 | 100 |
| TESTI2020283 | 0 | 0 | 0 | 0 | 0 | 0 | 100 |
| TESTI2020316 | 0 | 0 | 0 | 0 | 0 | 0 | 100 |
| TESTI2020344 | 0 | 0 | 0 | 0 | 0 | 0 | 100 |
| TESTI2020379 | 0 | 0 | 0 | 0 | 0 | 0 | 100 |
| TESTI2020426 | 0 | 0 | 0 | 0 | 0 | 0 | 100 |
| TESTI2020445 | 0 | 0 | 0 | 0 | 0 | 0 | 100 |
| TESTI2020510 | 0 | 0 | 0 | 0 | 0 | 0 | 4.728 |
| TESTI2020515 | 0 | 0 | 0 | 0 | 0 | 0 | 100 |
| TESTI2020525 | 0 | 0 | 0 | 0 | 0 | 0 | 21.336 |
| TESTI2020579 | 0 | 0 | 0 | 0 | 0 | 0 | 100 |
| TESTI2020717 | 0 | 0 | 0 | 0 | 0 | 0 | 100 |
| TESTI2020840 | 0 | 0 | 0 | 0 | 0 | 0 | 74.775 |
| TESTI2020871 | 0 | 0 | 0 | 0 | 0 | 0 | 35.404 |
| TESTI2020905 | 0 | 0 | 0 | 0 | 0 | 0 | 100 |
| TESTI2020906 | 0 | 0 | 0 | 0 | 0 | 0 | 100 |
| TESTI2020946 | 0 | 0 | 0 | 0 | 0 | 0 | 8.001 |
| TESTI2020956 | 0 | 0 | 0 | 0 | 0 | 0 | 2.813 |
| TESTI2020981 | 0 | 0 | 0 | 0 | 0 | 0 | 100 |
| TESTI2020999 | 0 | 0 | 0 | 0 | 0 | 0 | 100 |
| TESTI2021003 | 0 | 0 | 0 | 0 | 0 | 0 | 100 |
| TESTI2021038 | 0 | 0 | 0 | 0 | 0 | 0 | 27.658 |
| TESTI2021057 | 0 | 0 | 0 | 0 | 0 | 0 | 100 |
| TESTI2021077 | 0 | 0 | 0 | 0 | 0 | 0 | 100 |
| TESTI2021112 | 0 | 0 | 0 | 0 | 0 | 0 | 100 |
| TESTI2021114 | 0 | 0 | 0 | 0 | 0 | 0 | 100 |
| TESTI2021116 | 0 | 0 | 0 | 0 | 0 | 0 | 100 |
| TESTI2021118 | 0 | 0 | 0 | 0 | 0 | 0 | 7.012 |
| TESTI2021122 | 0 | 0 | 0 | 0 | 0 | 0 | 100 |
| TESTI2021124 | 0 | 0 | 0 | 0 | 0 | 0 | 3.736 |
| TESTI2021138 | 0 | 0 | 0 | 0 | 0 | 0 | 100 |
| TESTI2021297 | 0 | 0 | 0 | 0 | 0 | 0 | 4.488 |
| TESTI2021315 | 0 | 0 | 0 | 0 | 0 | 0 | 26.494 |
| TESTI2021358 | 0 | 0 | 0 | 0 | 0 | 0 | 22.119 |
| TESTI2021425 | 0 | 0 | 0 | 36.333 | 0 | 0 | 6.752 |
| TESTI2021447 | 0 | 0 | 0 | 0 | 0 | 0 | 67.792 |
| TESTI2021463 | 0 | 0 | 0 | 0 | 0 | 0 | 100 |
| TESTI2021531 | 0 | 0 | 0 | 0 | 0 | 0 | 10.937 |
| TESTI2021599 | 0 | 0 | 0 | 0 | 0 | 0 | 100 |
| TESTI2021637 | 0 | 0 | 0 | 0 | 0 | 0 | 100 |
| TESTI2021654 | 0 | 0 | 0 | 0 | 0 | 0 | 6.389 |
| TESTI2021667 | 0 | 0 | 0 | 0 | 0 | 0 | 100 |
| TESTI2021736 | 0 | 0 | 0 | 0 | 0 | 0 | 100 |
| TESTI2021785 | 0 | 0 | 0 | 0 | 0 | 0 | 100 |
| TESTI2021819 | 0 | 0 | 0 | 0 | 0 | 0 | 100 |
| TESTI2021851 | 0 | 0 | 0 | 0 | 0 | 0 | 12.368 |
| TESTI2021895 | 0 | 0 | 0 | 0 | 0 | 0 | 100 |
| TESTI2021911 | 0 | 0 | 0 | 0 | 0 | 0 | 100 |
| TESTI2021939 | 0 | 0 | 0 | 0 | 0 | 0 | 100 |
| TESTI2021999 | 0 | 0 | 0 | 0 | 0 | 0 | 100 |
| TESTI2022010 | 0 | 0 | 0 | 0 | 0 | 0 | 100 |
| TESTI2022023 | 0 | 0 | 0 | 0 | 0 | 0 | 100 |
| TESTI2022065 | 0 | 0 | 0 | 0 | 0 | 0 | 100 |
| TESTI2022086 | 0 | 0 | 0 | 0 | 0 | 0 | 100 |
| TESTI2022179 | 0 | 0 | 0 | 0 | 0 | 0 | 48.059 |
| TESTI2022203 | 0 | 0 | 0 | 0 | 0 | 0 | 100 |
| TESTI2022246 | 0 | 0 | 0 | 0 | 0 | 0 | 100 |
| TESTI2022323 | 0 | 0 | 0 | 0 | 0 | 0 | 100 |
| TESTI2022338 | 0 | 0 | 0 | 0 | 0 | 0 | 100 |
| TESTI2022400 | 0 | 0 | 0 | 0 | 0 | 0 | 100 |
| TESTI2022462 | 0 | 0 | 0 | 0 | 0 | 0 | 100 |
| TESTI2022495 | 0 | 0 | 0 | 0 | 0 | 0 | 100 |
| TESTI2022623 | 0 | 0 | 0 | 0 | 0 | 0 | 100 |
| TESTI2022649 | 0 | 0 | 0 | 0 | 0 | 0 | 100 |
| TESTI2022652 | 0 | 0 | 0 | 0 | 0 | 0 | 100 |
| TESTI2022738 | 0 | 0 | 0 | 0 | 0 | 0 | 100 |
| TESTI2022798 | 0 | 0 | 0 | 0 | 0 | 0 | 100 |
| TESTI2022812 | 0 | 0 | 0 | 0 | 0 | 0 | 100 |
| TESTI2022814 | 0 | 0 | 0 | 0 | 0 | 0 | 100 |
| TESTI2022874 | 0 | 0 | 0 | 0 | 0 | 0 | 100 |
| TESTI2022940 | 0 | 0 | 0 | 0 | 0 | 0 | 100 |
| TESTI2022952 | 0 | 0 | 0 | 0 | 0 | 0 | 100 |
| TESTI2023025 | 0 | 0 | 0 | 0 | 0 | 0 | 8.225 |
| TESTI2023033 | 0 | 0 | 0 | 0 | 0 | 0 | 35.902 |
| TESTI2023053 | 0 | 0 | 0 | 0 | 0 | 0 | 100 |
| TESTI2023085 | 0 | 0 | 0 | 0 | 0 | 0 | 100 |
| TESTI2023192 | 0 | 0 | 0 | 0 | 0 | 0 | 100 |
| TESTI2023194 | 0 | 0 | 0 | 0 | 0 | 0 | 100 |
| TESTI2023214 | 0 | 0 | 0 | 0 | 0 | 0 | 100 |
| TESTI2023254 | 0 | 0 | 0 | 0 | 0 | 0 | 100 |
| TESTI2023386 | 0 | 0 | 0 | 0 | 0 | 0 | 100 |
| TESTI2023414 | 0 | 0 | 0 | 0 | 0 | 0 | 2.661 |
| TESTI2023427 | 0 | 0 | 0 | 0 | 0 | 0 | 100 |
| TESTI2023436 | 0 | 0 | 0 | 0 | 0 | 0 | 100 |
| TESTI2023599 | 0 | 0 | 0 | 0 | 0 | 0 | 100 |
| TESTI2023752 | 0 | 0 | 0 | 0 | 0 | 0 | 100 |
| TESTI2023800 | 0 | 0 | 0 | 0 | 0 | 0 | 100 |
| TESTI2023861 | 0 | 0 | 0 | 0 | 0 | 0 | 100 |
| TESTI2023903 | 0 | 0 | 0 | 0 | 0 | 0 | 100 |
| TESTI2023942 | 0 | 0 | 0 | 0 | 0 | 0 | 100 |
| TESTI2023947 | 0 | 0 | 0 | 0 | 0 | 0 | 100 |
| TESTI2023951 | 0 | 0 | 0 | 0 | 0 | 0 | 100 |
| TESTI2023968 | 0 | 0 | 0 | 0 | 0 | 0 | 100 |
| TESTI2024009 | 0 | 0 | 0 | 0 | 0 | 0 | 100 |
| TESTI2024090 | 0 | 0 | 0 | 0 | 0 | 0 | 26.863 |
| TESTI2024125 | 76.742 | 0 | 0 | 0 | 0 | 0 | 23.258 |
| TESTI2024153 | 0 | 0 | 0 | 0 | 0 | 0 | 100 |
| TESTI2024192 | 0 | 0 | 0 | 0 | 0 | 0 | 100 |
| TESTI2024267 | 0 | 0 | 0 | 0 | 0 | 0 | 100 |
| TESTI2024283 | 0 | 0 | 0 | 0 | 0 | 0 | 36.852 |
| TESTI2024299 | 0 | 0 | 0 | 0 | 0 | 0 | 100 |
| TESTI2024419 | 0 | 0 | 0 | 0 | 0 | 0 | 100 |
| TESTI2024422 | 0 | 0 | 0 | 0 | 0 | 0 | 100 |
| TESTI2024443 | 0 | 0 | 0 | 0 | 0 | 0 | 100 |
| TESTI2024446 | 0 | 0 | 0 | 0 | 0 | 0 | 100 |
| TESTI2024473 | 0 | 0 | 0 | 0 | 0 | 0 | 100 |
| TESTI2024476 | 0 | 0 | 0 | 0 | 0 | 0 | 100 |
| TESTI2024498 | 0 | 0 | 0 | 0 | 0 | 0 | 100 |
| TESTI2024560 | 0 | 0 | 0 | 0 | 0 | 0 | 100 |
| TESTI2024567 | 0 | 0 | 0 | 0 | 0 | 0 | 100 |
| TESTI2024586 | 0 | 0 | 0 | 0 | 0 | 0 | 100 |
| TESTI2024598 | 0 | 0 | 0 | 0 | 0 | 0 | 39.051 |
| TESTI2024641 | 0 | 0 | 0 | 0 | 0 | 0 | 100 |
| TESTI2024648 | 0 | 0 | 0 | 0 | 0 | 0 | 100 |
| TESTI2024718 | 0 | 0 | 0 | 0 | 0 | 0 | 100 |
| TESTI2024744 | 0 | 0 | 0 | 0 | 0 | 0 | 100 |
| TESTI2024844 | 0 | 0 | 0 | 0 | 0 | 0 | 2.995 |
| TESTI2024864 | 0 | 0 | 0 | 0 | 0 | 0 | 18.051 |
| TESTI2024885 | 0 | 0 | 0 | 0 | 0 | 0 | 8.693 |
| TESTI2024936 | 0 | 0 | 0 | 0 | 0 | 0 | 100 |
| TESTI2024978 | 0 | 0 | 0 | 0 | 0 | 0 | 100 |
| TESTI2024999 | 0 | 0 | 0 | 0 | 0 | 0 | 100 |
| TESTI2025006 | 0 | 0 | 0 | 0 | 0 | 0 | 100 |
| TESTI2025013 | 0 | 0 | 0 | 0 | 0 | 0 | 2.327 |
| TESTI2025022 | 0 | 0 | 0 | 0 | 0 | 0 | 100 |
| TESTI2025063 | 0 | 0 | 0 | 0 | 0 | 0 | 100 |
| TESTI2025117 | 0 | 0 | 0 | 0 | 0 | 0 | 100 |
| TESTI2025144 | 0 | 0 | 0 | 0 | 0 | 0 | 100 |
| TESTI2025161 | 0 | 0 | 0 | 0 | 0 | 0 | 100 |
| TESTI2025174 | 0 | 0 | 0 | 0 | 0 | 0 | 100 |
| TESTI2025229 | 0 | 0 | 0 | 0 | 0 | 0 | 100 |
| TESTI2025269 | 0 | 0 | 0 | 0 | 0 | 0 | 100 |
| TESTI2025365 | 0 | 0 | 0 | 0 | 0 | 0 | 100 |
| TESTI2025403 | 0 | 0 | 0 | 0 | 0 | 0 | 100 |
| TESTI2025409 | 0 | 0 | 0 | 0 | 0 | 0 | 100 |
| TESTI2025422 | 0 | 0 | 0 | 0 | 0 | 0 | 1.622 |
| TESTI2025448 | 0 | 0 | 0 | 0 | 0 | 0 | 100 |
| TESTI2025454 | 0 | 0 | 0 | 0 | 0 | 0 | 7.363 |
| TESTI2025486 | 0 | 0 | 0 | 0 | 0 | 0 | 100 |
| TESTI2025546 | 0 | 0 | 0 | 0 | 0 | 0 | 68.062 |
| TESTI2025582 | 0 | 0 | 0 | 0 | 0 | 0 | 100 |
| TESTI2025609 | 0 | 0 | 0 | 0 | 0 | 0 | 100 |
| TESTI2025656 | 0 | 0 | 0 | 0 | 0 | 0 | 100 |
| TESTI2025757 | 0 | 0 | 0 | 0 | 0 | 0 | 11.084 |
| TESTI2025791 | 0 | 0 | 0 | 0 | 0 | 0 | 100 |
| TESTI2025846 | 0 | 0 | 0 | 0 | 0 | 0 | 13.307 |
| TESTI2025872 | 0 | 0 | 0 | 91.498 | 0 | 0 | 8.502 |
| TESTI2025879 | 0 | 0 | 0 | 0 | 0 | 0 | 100 |
| TESTI2025911 | 0 | 0 | 0 | 0 | 0 | 0 | 100 |
| TESTI2025920 | 0 | 0 | 0 | 0 | 0 | 0 | 100 |
| TESTI2025924 | 0 | 0 | 0 | 0 | 0 | 0 | 100 |
| TESTI2026014 | 0 | 0 | 0 | 0 | 0 | 0 | 100 |
| TESTI2026024 | 0 | 0 | 0 | 0 | 0 | 0 | 15.564 |
| TESTI2026064 | 0 | 0 | 0 | 0 | 0 | 0 | 100 |
| TESTI2026077 | 0 | 0 | 0 | 0 | 0 | 0 | 100 |
| TESTI2026104 | 0 | 0 | 0 | 0 | 0 | 0 | 100 |
| TESTI2026116 | 0 | 0 | 0 | 0 | 0 | 0 | 29.249 |
| TESTI2026134 | 0 | 0 | 0 | 0 | 0 | 0 | 100 |
| TESTI2026168 | 0 | 0 | 0 | 0 | 0 | 0 | 100 |
| TESTI2026196 | 0 | 0 | 0 | 0 | 0 | 0 | 100 |
| TESTI2026215 | 0 | 0 | 48.726 | 0 | 0 | 0 | 4.528 |
| TESTI2026218 | 0 | 0 | 0 | 0 | 0 | 0 | 100 |
| TESTI2026233 | 0 | 0 | 0 | 0 | 0 | 0 | 100 |
| TESTI2026291 | 0 | 0 | 0 | 0 | 0 | 0 | 100 |
| TESTI2026294 | 0 | 0 | 0 | 0 | 0 | 0 | 100 |
| TESTI2026401 | 0 | 0 | 0 | 0 | 0 | 0 | 100 |
| TESTI2026403 | 0 | 0 | 0 | 0 | 0 | 0 | 100 |
| TESTI2026453 | 0 | 0 | 0 | 0 | 0 | 0 | 100 |
| TESTI2026461 | 0 | 0 | 0 | 0 | 0 | 0 | 100 |
| TESTI2026491 | 0 | 0 | 0 | 0 | 0 | 0 | 100 |
| TESTI2026505 | 0 | 0 | 0 | 0 | 0 | 0 | 100 |
| TESTI2026515 | 0 | 0 | 0 | 0 | 0 | 0 | 100 |
| TESTI2026525 | 0 | 0 | 0 | 0 | 0 | 0 | 5.688 |
| TESTI2026534 | 0 | 0 | 0 | 0 | 0 | 0 | 39.051 |
| TESTI2026537 | 0 | 0 | 0 | 0 | 0 | 0 | 100 |
| TESTI2026589 | 0 | 0 | 0 | 0 | 0 | 0 | 100 |
| TESTI2026597 | 0 | 0 | 0 | 0 | 0 | 0 | 100 |
| TESTI2026605 | 0 | 0 | 0 | 0 | 0 | 0 | 100 |
| TESTI2026647 | 0 | 0 | 0 | 0 | 0 | 0 | 7.724 |
| TESTI2026674 | 0 | 0 | 0 | 0 | 0 | 0 | 100 |
| TESTI2026794 | 0 | 0 | 0 | 0 | 0 | 0 | 100 |
| TESTI2026824 | 0 | 0 | 0 | 0 | 0 | 0 | 100 |
| TESTI2026854 | 0 | 0 | 0 | 0 | 0 | 0 | 100 |
| TESTI2026925 | 0 | 0 | 0 | 0 | 0 | 0 | 100 |
| TESTI2026936 | 0 | 0 | 0 | 0 | 0 | 0 | 39.348 |
| TESTI2026957 | 0 | 0 | 0 | 0 | 0 | 0 | 100 |
| TESTI2027013 | 0 | 0 | 0 | 0 | 0 | 0 | 100 |
| TESTI2027019 | 0 | 0 | 0 | 0 | 0 | 0 | 100 |
| TESTI2027108 | 0 | 0 | 0 | 0 | 0 | 0 | 100 |
| TESTI2027165 | 0 | 0 | 0 | 0 | 0 | 0 | 35.404 |
| TESTI2027171 | 0 | 0 | 0 | 0 | 0 | 0 | 100 |
| TESTI2027173 | 0 | 0 | 0 | 0 | 0 | 0 | 100 |
| TESTI2027179 | 0 | 0 | 0 | 0 | 0 | 0 | 100 |
| TESTI2027185 | 0 | 0 | 0 | 0 | 0 | 0 | 100 |
| TESTI2027206 | 0 | 0 | 0 | 0 | 0 | 0 | 100 |
| TESTI2027238 | 0 | 0 | 0 | 0 | 0 | 0 | 100 |
| TESTI2027239 | 0 | 0 | 0 | 0 | 0 | 0 | 100 |
| TESTI2027243 | 0 | 0 | 0 | 0 | 0 | 0 | 100 |
| TESTI2027271 | 0 | 0 | 0 | 0 | 0 | 0 | 6.903 |
| TESTI2027296 | 0 | 0 | 0 | 0 | 0 | 0 | 100 |
| TESTI2027378 | 0 | 0 | 0 | 0 | 0 | 0 | 100 |
| TESTI2027411 | 0 | 0 | 0 | 0 | 0 | 0 | 100 |
| TESTI2027450 | 0 | 0 | 0 | 0 | 0 | 0 | 100 |
| TESTI2027496 | 0 | 0 | 0 | 0 | 0 | 0 | 12.283 |
| TESTI2027503 | 0 | 0 | 0 | 0 | 0 | 0 | 100 |
| TESTI2027562 | 0 | 0 | 0 | 0 | 0 | 0 | 100 |
| TESTI2027615 | 0 | 0 | 0 | 0 | 0 | 0 | 100 |
| TESTI2027645 | 0 | 0 | 0 | 0 | 0 | 0 | 100 |
| TESTI2027730 | 0 | 0 | 0 | 0 | 0 | 0 | 100 |
| TESTI2027736 | 0 | 0 | 0 | 0 | 0 | 0 | 100 |
| TESTI2027791 | 0 | 0 | 0 | 0 | 0 | 0 | 100 |
| TESTI2027820 | 0 | 0 | 0 | 0 | 0 | 0 | 100 |
| TESTI2027828 | 0 | 0 | 0 | 0 | 0 | 0 | 100 |
| TESTI2027840 | 0 | 0 | 0 | 0 | 0 | 0 | 100 |
| TESTI2027909 | 0 | 0 | 0 | 0 | 0 | 0 | 43.944 |
| TESTI2028098 | 0 | 0 | 0 | 0 | 0 | 0 | 100 |
| TESTI2028151 | 0 | 0 | 0 | 0 | 0 | 0 | 100 |
| TESTI2028242 | 0 | 0 | 0 | 0 | 0 | 0 | 100 |
| TESTI2028253 | 0 | 0 | 0 | 0 | 0 | 0 | 100 |
| TESTI2028254 | 0 | 0 | 0 | 0 | 0 | 0 | 100 |
| TESTI2028269 | 0 | 0 | 0 | 0 | 0 | 0 | 100 |
| TESTI2028290 | 0 | 0 | 0 | 0 | 0 | 0 | 100 |
| TESTI2028296 | 0 | 0 | 0 | 0 | 0 | 0 | 1.612 |
| TESTI2028384 | 0 | 0 | 0 | 0 | 0 | 0 | 100 |
| TESTI2028426 | 0 | 0 | 0 | 0 | 0 | 0 | 100 |
| TESTI2028488 | 0 | 0 | 0 | 0 | 0 | 0 | 100 |
| TESTI2028523 | 0 | 0 | 0 | 0 | 0 | 0 | 100 |
| TESTI2028583 | 0 | 0 | 0 | 0 | 0 | 0 | 100 |
| TESTI2028613 | 0 | 0 | 0 | 0 | 0 | 0 | 100 |
| TESTI2028659 | 0 | 0 | 0 | 0 | 0 | 0 | 19.704 |
| TESTI2028662 | 0 | 0 | 0 | 0 | 0 | 0 | 100 |
| TESTI2028670 | 0 | 0 | 0 | 0 | 0 | 0 | 100 |
| TESTI2028705 | 0 | 0 | 0 | 0 | 0 | 0 | 100 |
| TESTI2028776 | 0 | 0 | 0 | 0 | 0 | 0 | 100 |
| TESTI2028811 | 0 | 0 | 0 | 0 | 0 | 0 | 100 |
| TESTI2028891 | 0 | 0 | 0 | 0 | 0 | 0 | 100 |
| TESTI2028985 | 0 | 0 | 0 | 0 | 0 | 0 | 100 |
| TESTI2028997 | 0 | 0 | 0 | 0 | 0 | 0 | 100 |
| TESTI2029131 | 0 | 0 | 0 | 0 | 0 | 0 | 100 |
| TESTI2029162 | 0 | 0 | 0 | 0 | 0 | 0 | 100 |
| TESTI2029196 | 0 | 0 | 0 | 0 | 0 | 0 | 100 |
| TESTI2029201 | 0 | 0 | 0 | 0 | 0 | 0 | 100 |
| TESTI2029227 | 0 | 0 | 0 | 0 | 0 | 0 | 11.641 |
| TESTI2029244 | 0 | 0 | 0 | 0 | 0 | 0 | 100 |
| TESTI2029249 | 0 | 0 | 0 | 0 | 0 | 0 | 100 |
| TESTI2029252 | 0 | 0 | 0 | 0 | 0 | 0 | 100 |
| TESTI2029259 | 0 | 0 | 0 | 0 | 0 | 0 | 2.163 |
| TESTI2029264 | 0 | 0 | 0 | 0 | 0 | 0 | 100 |
| TESTI2029470 | 0 | 0 | 0 | 0 | 0 | 0 | 100 |
| TESTI2029672 | 0 | 0 | 0 | 0 | 0 | 0 | 100 |
| TESTI2029785 | 0 | 0 | 0 | 0 | 0 | 0 | 43.944 |
| TESTI2029880 | 0 | 0 | 0 | 0 | 0 | 0 | 100 |
| TESTI2030136 | 0 | 0 | 0 | 0 | 0 | 0 | 100 |
| TESTI2030322 | 0 | 0 | 0 | 0 | 0 | 0 | 100 |
| TESTI2030336 | 0 | 0 | 0 | 0 | 0 | 0 | 43.944 |
| TESTI2030342 | 0 | 0 | 0 | 0 | 0 | 0 | 100 |
| TESTI2030519 | 0 | 0 | 0 | 0 | 0 | 0 | 100 |
| TESTI2030554 | 0 | 0 | 0 | 0 | 0 | 0 | 70.165 |
| TESTI2030556 | 0 | 0 | 0 | 0 | 0 | 0 | 100 |
| TESTI2030728 | 0 | 0 | 0 | 0 | 0 | 0 | 100 |
| TESTI2030754 | 0 | 0 | 0 | 0 | 0 | 0 | 100 |
| TESTI2030770 | 0 | 0 | 0 | 0 | 0 | 0 | 100 |
| TESTI2030860 | 0 | 0 | 0 | 0 | 0 | 0 | 100 |
| TESTI2030901 | 0 | 0 | 0 | 0 | 0 | 0 | 100 |
| TESTI2030917 | 0 | 0 | 0 | 0 | 0 | 0 | 100 |
| TESTI2030930 | 0 | 0 | 0 | 0 | 0 | 0 | 100 |
| TESTI2031006 | 0 | 0 | 0 | 0 | 0 | 0 | 100 |
| TESTI2031007 | 0 | 0 | 0 | 0 | 0 | 0 | 63.646 |
| TESTI2031060 | 0 | 0 | 0 | 0 | 0 | 0 | 100 |
| TESTI2031129 | 0 | 0 | 0 | 0 | 0 | 0 | 100 |
| TESTI2031356 | 0 | 0 | 0 | 0 | 0 | 0 | 100 |
| TESTI2031418 | 0 | 0 | 0 | 0 | 0 | 0 | 100 |
| TESTI2031504 | 0 | 0 | 0 | 0 | 0 | 0 | 100 |
| TESTI2031529 | 0 | 0 | 0 | 0 | 0 | 0 | 100 |
| TESTI2031687 | 0 | 0 | 0 | 0 | 0 | 0 | 100 |
| TESTI2031760 | 0 | 0 | 0 | 0 | 0 | 0 | 100 |
| TESTI2031809 | 0 | 0 | 0 | 0 | 0 | 0 | 100 |
| TESTI2031919 | 0 | 0 | 0 | 0 | 0 | 0 | 100 |
| TESTI2031935 | 0 | 0 | 0 | 0 | 0 | 0 | 100 |
| TESTI2031986 | 0 | 0 | 0 | 0 | 0 | 0 | 100 |
| TESTI2032044 | 0 | 0 | 0 | 0 | 0 | 0 | 100 |
| TESTI2032067 | 0 | 0 | 0 | 0 | 0 | 0 | 100 |
| TESTI2032079 | 0 | 0 | 0 | 0 | 0 | 0 | 100 |
| TESTI2032643 | 0 | 0 | 0 | 0 | 0 | 0 | 7.949 |
| TESTI2032681 | 0 | 0 | 0 | 0 | 0 | 0 | 100 |
| TESTI2032761 | 0 | 0 | 0 | 0 | 0 | 0 | 100 |
| TESTI2032768 | 0 | 0 | 0 | 0 | 0 | 0 | 100 |
| TESTI2032774 | 0 | 0 | 0 | 0 | 0 | 0 | 100 |
| TESTI2032828 | 0 | 0 | 0 | 0 | 0 | 0 | 100 |
| TESTI2033031 | 0 | 0 | 0 | 0 | 0 | 0 | 40.225 |
| TESTI2033242 | 0 | 0 | 0 | 0 | 0 | 0 | 100 |
| TESTI2033254 | 0 | 0 | 0 | 0 | 0 | 0 | 100 |
| TESTI2033300 | 0 | 0 | 0 | 0 | 0 | 0 | 100 |
| TESTI2033395 | 0 | 0 | 0 | 0 | 0 | 0 | 100 |
| TESTI2033441 | 0 | 0 | 15.439 | 0 | 0 | 7.508 | 1.435 |
| TESTI2033453 | 0 | 0 | 0 | 0 | 0 | 0 | 100 |
| TESTI2033505 | 0 | 0 | 0 | 0 | 0 | 0 | 100 |
| TESTI2033520 | 0 | 0 | 0 | 0 | 0 | 0 | 100 |
| TESTI2033641 | 0 | 0 | 0 | 0 | 0 | 0 | 100 |
| TESTI2033710 | 0 | 0 | 0 | 0 | 0 | 0 | 100 |
| TESTI2033905 | 0 | 0 | 0 | 0 | 0 | 0 | 100 |
| TESTI2034187 | 0 | 0 | 0 | 0 | 0 | 0 | 100 |
| TESTI2034243 | 0 | 0 | 0 | 0 | 0 | 0 | 100 |
| TESTI2034249 | 0 | 0 | 0 | 0 | 0 | 0 | 79.187 |
| TESTI2034307 | 0 | 0 | 0 | 0 | 0 | 0 | 43.944 |
| TESTI2034357 | 0 | 0 | 0 | 0 | 0 | 0 | 100 |
| TESTI2034401 | 0 | 0 | 0 | 0 | 0 | 0 | 100 |
| TESTI2034407 | 0 | 0 | 0 | 0 | 0 | 0 | 100 |
| TESTI2034506 | 0 | 0 | 0 | 0 | 0 | 0 | 100 |
| TESTI2034520 | 0 | 0 | 0 | 0 | 0 | 0 | 100 |
| TESTI2034718 | 0 | 0 | 0 | 0 | 0 | 0 | 100 |
| TESTI2034730 | 0 | 0 | 0 | 0 | 0 | 0 | 100 |
| TESTI2034749 | 0 | 0 | 0 | 0 | 0 | 0 | 100 |
| TESTI2034767 | 0 | 0 | 0 | 0 | 0 | 0 | 100 |
| TESTI2034774 | 0 | 0 | 0 | 0 | 0 | 0 | 100 |
| TESTI2034777 | 0 | 0 | 0 | 0 | 0 | 0 | 100 |
| TESTI2034785 | 0 | 0 | 0 | 0 | 0 | 0 | 100 |
| TESTI2034799 | 0 | 0 | 0 | 0 | 0 | 0 | 100 |
| TESTI2034847 | 0 | 0 | 0 | 0 | 0 | 0 | 100 |
| TESTI2034913 | 0 | 0 | 0 | 0 | 0 | 0 | 100 |
| TESTI2034916 | 0 | 0 | 0 | 0 | 0 | 0 | 9.938 |
| TESTI2034931 | 0 | 0 | 0 | 0 | 0 | 0 | 100 |
| TESTI2034940 | 0 | 0 | 0 | 0 | 0 | 0 | 0.851 |
| TESTI2034953 | 0 | 0 | 0 | 0 | 0 | 0 | 100 |
| TESTI2034997 | 0 | 0 | 0 | 0 | 0 | 0 | 100 |
| TESTI2035003 | 0 | 0 | 0 | 0 | 0 | 0 | 47.943 |
| TESTI2035078 | 0 | 0 | 0 | 0 | 0 | 0 | 100 |
| TESTI2035084 | 0 | 0 | 0 | 0 | 0 | 0 | 100 |
| TESTI2035107 | 0 | 0 | 0 | 0 | 0 | 0 | 100 |
| TESTI2035121 | 0 | 0 | 0 | 0 | 0 | 0 | 100 |
| TESTI2035124 | 0 | 0 | 0 | 0 | 0 | 0 | 100 |
| TESTI2035183 | 0 | 0 | 0 | 0 | 0 | 0 | 100 |
| TESTI2035236 | 0 | 0 | 0 | 0 | 0 | 0 | 16.851 |
| TESTI2035262 | 0 | 0 | 0 | 0 | 0 | 0 | 100 |
| TESTI2035309 | 0 | 0 | 0 | 0 | 0 | 0 | 26.610 |
| TESTI2035688 | 0 | 0 | 0 | 0 | 0 | 0 | 100 |
| TESTI2035775 | 0 | 0 | 0 | 0 | 0 | 0 | 100 |
| TESTI2035793 | 0 | 0 | 0 | 0 | 0 | 0 | 100 |
| TESTI2035898 | 0 | 0 | 0 | 0 | 0 | 0 | 100 |
| TESTI2035962 | 0 | 0 | 0 | 0 | 0 | 0 | 100 |
| TESTI2035981 | 0 | 0 | 0 | 0 | 0 | 0 | 100 |
| TESTI2035997 | 0 | 0 | 0 | 0 | 0 | 0 | 100 |
| TESTI2036114 | 0 | 0 | 0 | 0 | 0 | 0 | 100 |
| TESTI2036129 | 0 | 0 | 0 | 0 | 0 | 0 | 100 |
| TESTI2036285 | 0 | 0 | 0 | 0 | 0 | 0 | 100 |
| TESTI2036288 | 0 | 0 | 0 | 0 | 0 | 0 | 100 |
| TESTI2036513 | 0 | 0 | 0 | 0 | 0 | 0 | 100 |
| TESTI2036589 | 0 | 0 | 0 | 0 | 0 | 0 | 100 |
| TESTI2036650 | 0 | 0 | 0 | 0 | 0 | 0 | 39.348 |
| TESTI2036684 | 0 | 0 | 0 | 0 | 0 | 0 | 100 |
| TESTI2036691 | 0 | 0 | 0 | 0 | 0 | 0 | 15.347 |
| TESTI2036736 | 0 | 0 | 0 | 0 | 0 | 0 | 100 |
| TESTI2036822 | 0 | 0 | 0 | 0 | 0 | 0 | 100 |
| TESTI2036833 | 0 | 0 | 0 | 0 | 0 | 0 | 100 |
| TESTI2036913 | 0 | 0 | 0 | 0 | 0 | 0 | 53.064 |
| TESTI2036922 | 0 | 0 | 0 | 0 | 0 | 0 | 100 |
| TESTI2036951 | 0 | 0 | 0 | 0 | 0 | 0 | 100 |
| TESTI2036965 | 0 | 0 | 0 | 0 | 0 | 0 | 100 |
| TESTI2036969 | 0 | 0 | 0 | 0 | 0 | 0 | 18.789 |
| TESTI2037002 | 0 | 0 | 0 | 0 | 0 | 0 | 100 |
| TESTI2037055 | 0 | 0 | 0 | 0 | 0 | 0 | 100 |
| TESTI2037081 | 0 | 0 | 0 | 0 | 0 | 0 | 100 |
| TESTI2037085 | 0 | 0 | 0 | 0 | 0 | 0 | 100 |
| TESTI2037103 | 0 | 0 | 0 | 0 | 0 | 0 | 100 |
| TESTI2037106 | 0 | 0 | 0 | 0 | 0 | 0 | 100 |
| TESTI2037111 | 0 | 0 | 0 | 0 | 0 | 0 | 100 |
| TESTI2037209 | 0 | 0 | 0 | 0 | 0 | 0 | 100 |
| TESTI2037255 | 0 | 0 | 0 | 0 | 0 | 0 | 100 |
| TESTI2037359 | 0 | 0 | 0 | 0 | 0 | 0 | 100 |
| TESTI2037375 | 0 | 0 | 0 | 0 | 0 | 0 | 100 |
| TESTI2037382 | 0 | 0 | 0 | 0 | 0 | 0 | 100 |
| TESTI2037534 | 0 | 0 | 0 | 0 | 0 | 0 | 100 |
| TESTI2037569 | 0 | 0 | 0 | 0 | 0 | 0 | 100 |
| TESTI2037572 | 0 | 0 | 0 | 0 | 0 | 0 | 100 |
| TESTI2037643 | 0 | 0 | 0 | 0 | 0 | 0 | 100 |
| TESTI2037657 | 0 | 0 | 0 | 0 | 0 | 0 | 100 |
| TESTI2037673 | 0 | 0 | 0 | 0 | 0 | 0 | 100 |
| TESTI2037723 | 0 | 0 | 0 | 0 | 0 | 0 | 100 |
| TESTI2037819 | 0 | 0 | 0 | 0 | 0 | 0 | 100 |
| TESTI2037830 | 0 | 0 | 0 | 0 | 0 | 0 | 100 |
| TESTI2037845 | 0 | 0 | 0 | 0 | 0 | 0 | 100 |
| TESTI2037877 | 0 | 0 | 0 | 0 | 0 | 0 | 100 |
| TESTI2037976 | 0 | 0 | 0 | 0 | 0 | 0 | 100 |
| TESTI2038048 | 0 | 0 | 0 | 0 | 0 | 0 | 100 |
| TESTI2038065 | 0 | 0 | 0 | 0 | 0 | 0 | 100 |
| TESTI2038104 | 0 | 0 | 0 | 0 | 0 | 0 | 100 |
| TESTI2038275 | 0 | 0 | 0 | 0 | 0 | 0 | 100 |
| TESTI2038388 | 0 | 0 | 0 | 0 | 0 | 0 | 100 |
| TESTI2038573 | 0 | 0 | 0 | 0 | 0 | 0 | 100 |
| TESTI2038596 | 0 | 0 | 0 | 0 | 0 | 0 | 100 |
| TESTI2038623 | 0 | 0 | 0 | 0 | 0 | 0 | 100 |
| TESTI2038644 | 0 | 0 | 0 | 0 | 0 | 0 | 100 |
| TESTI2038733 | 0 | 0 | 0 | 0 | 0 | 0 | 100 |
| TESTI2038858 | 0 | 0 | 0 | 0 | 0 | 0 | 100 |
| TESTI2038958 | 0 | 0 | 0 | 0 | 0 | 0 | 100 |
| TESTI2039025 | 0 | 0 | 0 | 0 | 0 | 0 | 100 |
| TESTI2039026 | 0 | 0 | 0 | 0 | 0 | 0 | 100 |
| TESTI2039038 | 0 | 0 | 0 | 0 | 0 | 0 | 100 |
| TESTI2039041 | 0 | 0 | 0 | 0 | 0 | 0 | 100 |
| TESTI2039060 | 0 | 0 | 0 | 0 | 0 | 0 | 100 |
| TESTI2039113 | 0 | 0 | 0 | 0 | 0 | 0 | 100 |
| TESTI2039121 | 0 | 0 | 0 | 0 | 0 | 0 | 100 |
| TESTI2039177 | 0 | 0 | 0 | 0 | 0 | 0 | 16.255 |
| TESTI2039209 | 0 | 0 | 0 | 0 | 0 | 0 | 100 |
| TESTI2039225 | 0 | 0 | 0 | 0 | 0 | 0 | 100 |
| TESTI2039227 | 0 | 0 | 0 | 0 | 0 | 0 | 100 |
| TESTI2039276 | 0 | 0 | 0 | 0 | 0 | 0 | 100 |
| TESTI2039342 | 0 | 0 | 0 | 0 | 0 | 0 | 22.764 |
| TESTI2039353 | 0 | 0 | 0 | 0 | 0 | 0 | 100 |
| TESTI2039544 | 0 | 0 | 0 | 0 | 0 | 0 | 100 |
| TESTI2039613 | 0 | 0 | 0 | 0 | 0 | 0 | 100 |
| TESTI2039707 | 0 | 0 | 0 | 0 | 0 | 0 | 15.009 |
| TESTI2039732 | 0 | 0 | 0 | 0 | 0 | 0 | 100 |
| TESTI2039738 | 0 | 0 | 0 | 0 | 0 | 0 | 100 |
| TESTI2039776 | 0 | 0 | 0 | 0 | 0 | 0 | 100 |
| TESTI2039867 | 0 | 0 | 0 | 0 | 0 | 0 | 100 |
| TESTI2039908 | 0 | 0 | 0 | 0 | 0 | 0 | 100 |
| TESTI2040018 | 0 | 0 | 0 | 0 | 0 | 0 | 100 |
| TESTI2040094 | 0 | 0 | 0 | 0 | 0 | 0 | 8.042 |
| TESTI2040102 | 0 | 0 | 0 | 0 | 0 | 0 | 100 |
| TESTI2040128 | 0 | 0 | 0 | 0 | 0 | 0 | 100 |
| TESTI2040143 | 0 | 0 | 0 | 0 | 0 | 0 | 100 |
| TESTI2040297 | 0 | 0 | 0 | 0 | 0 | 0 | 100 |
| TESTI2040372 | 0 | 0 | 0 | 0 | 0 | 0 | 100 |
| TESTI2040377 | 0 | 0 | 0 | 0 | 0 | 0 | 100 |
| TESTI2040424 | 0 | 0 | 0 | 0 | 0 | 0 | 100 |
| TESTI2040642 | 0 | 0 | 0 | 0 | 0 | 0 | 100 |
| TESTI2040815 | 0 | 0 | 0 | 0 | 0 | 0 | 100 |
| TESTI2040897 | 0 | 0 | 0 | 0 | 0 | 0 | 100 |
| TESTI2040944 | 0 | 0 | 0 | 0 | 0 | 0 | 100 |
| TESTI2040964 | 0 | 0 | 0 | 0 | 0 | 0 | 100 |
| TESTI2040983 | 0 | 0 | 0 | 0 | 0 | 0 | 100 |
| TESTI2040989 | 0 | 0 | 0 | 0 | 0 | 0 | 100 |
| TESTI2041330 | 0 | 0 | 0 | 0 | 0 | 0 | 100 |
| TESTI2041362 | 0 | 0 | 0 | 0 | 0 | 0 | 100 |
| TESTI2041517 | 0 | 0 | 0 | 0 | 0 | 0 | 100 |
| TESTI2041564 | 0 | 0 | 0 | 0 | 0 | 0 | 100 |
| TESTI2041664 | 0 | 0 | 0 | 0 | 0 | 0 | 100 |
| TESTI2041730 | 0 | 0 | 0 | 0 | 0 | 0 | 100 |
| TESTI2041734 | 0 | 0 | 0 | 0 | 0 | 0 | 51.276 |
| TESTI2041778 | 0 | 0 | 0 | 0 | 0 | 0 | 100 |
| TESTI2041800 | 0 | 0 | 0 | 0 | 0 | 0 | 100 |
| TESTI2041947 | 0 | 0 | 0 | 0 | 0 | 0 | 100 |
| TESTI2041956 | 0 | 0 | 0 | 0 | 0 | 0 | 100 |
| TESTI2041976 | 0 | 0 | 0 | 0 | 0 | 0 | 100 |
| TESTI2042062 | 0 | 0 | 0 | 0 | 0 | 0 | 100 |
| TESTI2042149 | 0 | 0 | 0 | 0 | 0 | 0 | 100 |
| TESTI2042264 | 0 | 0 | 0 | 0 | 0 | 0 | 100 |
| TESTI2042295 | 0 | 0 | 0 | 0 | 0 | 0 | 100 |
| TESTI2042302 | 0 | 0 | 0 | 0 | 0 | 0 | 100 |
| TESTI2042326 | 0 | 0 | 0 | 0 | 0 | 0 | 100 |
| TESTI2042400 | 0 | 0 | 0 | 0 | 0 | 0 | 100 |
| TESTI2042450 | 0 | 0 | 0 | 0 | 0 | 0 | 100 |
| TESTI2042473 | 0 | 0 | 0 | 0 | 0 | 0 | 100 |
| TESTI2042507 | 0 | 0 | 0 | 0 | 0 | 0 | 100 |
| TESTI2042508 | 0 | 0 | 0 | 0 | 0 | 0 | 100 |
| TESTI2042750 | 0 | 0 | 0 | 0 | 0 | 0 | 100 |
| TESTI2042783 | 0 | 0 | 0 | 0 | 0 | 0 | 100 |
| TESTI2042806 | 0 | 0 | 0 | 0 | 0 | 0 | 100 |
| TESTI2042928 | 0 | 0 | 0 | 0 | 0 | 0 | 100 |
| TESTI2042946 | 0 | 0 | 0 | 0 | 0 | 0 | 100 |
| TESTI2042958 | 0 | 0 | 0 | 0 | 0 | 0 | 100 |
| TESTI2043275 | 0 | 0 | 62.244 | 0 | 0 | 0 | 5.784 |
| TESTI2043277 | 0 | 0 | 0 | 0 | 0 | 0 | 100 |
| TESTI2043282 | 0 | 0 | 0 | 0 | 0 | 0 | 100 |
| TESTI2043313 | 0 | 0 | 0 | 0 | 0 | 0 | 100 |
| TESTI2043477 | 0 | 0 | 0 | 0 | 0 | 0 | 100 |
| TESTI2043585 | 0 | 0 | 0 | 0 | 0 | 0 | 100 |
| TESTI2043758 | 0 | 0 | 0 | 0 | 0 | 0 | 100 |
| TESTI2043817 | 0 | 0 | 0 | 0 | 0 | 0 | 100 |
| TESTI2043857 | 0 | 0 | 0 | 0 | 0 | 0 | 100 |
| TESTI2043866 | 0 | 0 | 0 | 0 | 0 | 0 | 100 |
| TESTI2043869 | 0 | 0 | 0 | 0 | 0 | 0 | 100 |
| TESTI2044064 | 0 | 0 | 0 | 0 | 0 | 0 | 100 |
| TESTI2044118 | 0 | 0 | 0 | 0 | 0 | 0 | 100 |
| TESTI2044194 | 0 | 0 | 0 | 0 | 0 | 0 | 100 |
| TESTI2044276 | 0 | 0 | 0 | 0 | 0 | 0 | 9.299 |
| TESTI2044306 | 0 | 0 | 0 | 0 | 0 | 0 | 100 |
| TESTI2044309 | 0 | 0 | 0 | 0 | 0 | 0 | 100 |
| TESTI2044413 | 0 | 0 | 0 | 0 | 0 | 0 | 100 |
| TESTI2044418 | 0 | 0 | 0 | 0 | 0 | 0 | 100 |
| TESTI2044754 | 0 | 0 | 0 | 0 | 0 | 0 | 100 |
| TESTI2044788 | 0 | 0 | 0 | 0 | 0 | 0 | 35.404 |
| TESTI2044796 | 0 | 0 | 0 | 0 | 0 | 0 | 100 |
| TESTI2044833 | 0 | 0 | 0 | 0 | 0 | 0 | 100 |
| TESTI2044892 | 0 | 0 | 0 | 0 | 0 | 0 | 100 |
| TESTI2044920 | 0 | 0 | 0 | 0 | 0 | 0 | 100 |
| TESTI2044968 | 0 | 0 | 0 | 0 | 0 | 0 | 100 |
| TESTI2045139 | 0 | 0 | 0 | 0 | 0 | 0 | 100 |
| TESTI2045155 | 0 | 0 | 0 | 0 | 0 | 0 | 7.529 |
| TESTI2045171 | 0 | 0 | 0 | 0 | 0 | 0 | 100 |
| TESTI2045199 | 0 | 0 | 0 | 0 | 0 | 0 | 100 |
| TESTI2045353 | 0 | 0 | 0 | 0 | 0 | 0 | 100 |
| TESTI2045509 | 0 | 0 | 0 | 0 | 0 | 0 | 100 |
| TESTI2045562 | 0 | 0 | 0 | 0 | 0 | 0 | 15.347 |
| TESTI2045611 | 0 | 0 | 0 | 0 | 0 | 0 | 100 |
| TESTI2045819 | 0 | 0 | 0 | 0 | 0 | 0 | 100 |
| TESTI2045850 | 0 | 0 | 0 | 0 | 0 | 0 | 100 |
| TESTI2045920 | 0 | 0 | 0 | 0 | 0 | 0 | 100 |
| TESTI2045964 | 0 | 0 | 0 | 0 | 0 | 0 | 100 |
| TESTI2045983 | 0 | 0 | 0 | 0 | 0 | 0 | 100 |
| TESTI2046100 | 0 | 0 | 0 | 0 | 0 | 0 | 100 |
| TESTI2046188 | 0 | 0 | 0 | 0 | 0 | 0 | 100 |
| TESTI2046347 | 0 | 0 | 0 | 0 | 0 | 0 | 100 |
| TESTI2046352 | 0 | 0 | 0 | 0 | 0 | 0 | 100 |
| TESTI2046358 | 0 | 0 | 0 | 0 | 0 | 0 | 100 |
| TESTI2046439 | 0 | 0 | 0 | 0 | 0 | 0 | 100 |
| TESTI2046456 | 0.998 | 0 | 0 | 0 | 0 | 3.167 | 5.446 |
| TESTI2046535 | 0 | 0 | 0 | 0 | 0 | 0 | 100 |
| TESTI2046536 | 0 | 0 | 0 | 0 | 0 | 0 | 100 |
| TESTI2046552 | 0 | 0 | 0 | 0 | 0 | 0 | 100 |
| TESTI2046569 | 0 | 0 | 0 | 0 | 0 | 0 | 100 |
| TESTI2046686 | 0 | 0 | 0 | 0 | 0 | 0 | 100 |
| TESTI2046721 | 0 | 0 | 0 | 0 | 0 | 0 | 8.001 |
| TESTI2046732 | 0 | 0 | 0 | 0 | 0 | 0 | 100 |
| TESTI2046786 | 0 | 0 | 0 | 0 | 0 | 0 | 100 |
| TESTI2046797 | 0 | 0 | 0 | 0 | 0 | 0 | 100 |
| TESTI2046863 | 0 | 0 | 0 | 0 | 0 | 0 | 100 |
| TESTI2046872 | 0 | 0 | 0 | 0 | 0 | 0 | 100 |
| TESTI2047071 | 0 | 0 | 0 | 0 | 0 | 0 | 100 |
| TESTI2047141 | 0 | 0 | 0 | 0 | 0 | 0 | 100 |
| TESTI2047147 | 0 | 0 | 0 | 0 | 0 | 0 | 100 |
| TESTI2047153 | 0 | 0 | 0 | 0 | 0 | 0 | 100 |
| TESTI2047212 | 0 | 0 | 0 | 0 | 0 | 0 | 100 |
| TESTI2047342 | 0 | 0 | 0 | 0 | 0 | 0 | 100 |
| TESTI2047383 | 0 | 0 | 0 | 0 | 0 | 0 | 100 |
| TESTI2047605 | 31.427 | 0 | 0 | 0 | 0 | 0 | 9.525 |
| TESTI2047792 | 0 | 0 | 0 | 0 | 0 | 0 | 100 |
| TESTI2047801 | 0 | 0 | 0 | 0 | 0 | 0 | 100 |
| TESTI2047818 | 0 | 0 | 0 | 0 | 0 | 0 | 100 |
| TESTI2047824 | 0 | 0 | 0 | 0 | 0 | 0 | 100 |
| TESTI2047885 | 0 | 0 | 0 | 0 | 0 | 0 | 100 |
| TESTI2047930 | 0 | 0 | 0 | 0 | 0 | 0 | 100 |
| TESTI2048105 | 0 | 0 | 0 | 0 | 0 | 0 | 100 |
| TESTI2048109 | 0 | 0 | 0 | 0 | 0 | 0 | 100 |
| TESTI2048465 | 0 | 0 | 0 | 0 | 0 | 0 | 100 |
| TESTI2048603 | 0 | 0 | 0 | 0 | 0 | 0 | 100 |
| TESTI2048898 | 0 | 0 | 0 | 0 | 0 | 0 | 100 |
| TESTI2049041 | 0 | 0 | 0 | 0 | 0 | 0 | 100 |
| TESTI2049062 | 0 | 0 | 0 | 0 | 0 | 0 | 100 |
| TESTI2049206 | 0 | 0 | 0 | 0 | 0 | 0 | 100 |
| TESTI2049246 | 0 | 0 | 0 | 0 | 0 | 0 | 17.188 |
| TESTI2049277 | 0 | 0 | 0 | 0 | 0 | 0 | 100 |
| TESTI2049422 | 0 | 0 | 0 | 0 | 0 | 0 | 100 |
| TESTI2049452 | 0 | 0 | 0 | 0 | 0 | 0 | 100 |
| TESTI2049469 | 0 | 0 | 0 | 0 | 0 | 0 | 100 |
| TESTI2049553 | 0 | 0 | 0 | 0 | 0 | 0 | 100 |
| TESTI2049576 | 0 | 0 | 0 | 0 | 0 | 0 | 100 |
| TESTI2049857 | 0 | 0 | 0 | 0 | 0 | 0 | 100 |
| TESTI2049956 | 0 | 0 | 0 | 0 | 0 | 0 | 100 |
| TESTI2050137 | 0 | 0 | 0 | 0 | 0 | 0 | 100 |
| TESTI2050681 | 0 | 0 | 0 | 0 | 0 | 0 | 100 |
| TESTI2050780 | 0 | 0 | 0 | 0 | 0 | 0 | 100 |
| TESTI2050987 | 0 | 0 | 0 | 0 | 0 | 0 | 100 |
| TESTI2051148 | 0 | 0 | 0 | 0 | 0 | 0 | 100 |
| TESTI2051177 | 0 | 0 | 0 | 0 | 0 | 0 | 15.630 |
| TESTI2051279 | 0 | 0 | 0 | 0 | 0 | 0 | 100 |
| TESTI2051488 | 0 | 0 | 0 | 0 | 0 | 0 | 100 |
| TESTI2051543 | 0 | 0 | 0 | 0 | 0 | 0 | 100 |
| TESTI2051627 | 0 | 0 | 0 | 0 | 0 | 0 | 100 |
| TESTI2051742 | 0 | 0 | 0 | 0 | 0 | 0 | 100 |
| TESTI2051767 | 0 | 0 | 0 | 0 | 0 | 0 | 100 |
| TESTI2051791 | 0 | 0 | 0 | 0 | 0 | 0 | 100 |
| TESTI2051806 | 0 | 0 | 0 | 0 | 0 | 0 | 100 |
| TESTI2051867 | 0 | 0 | 0 | 0 | 0 | 0 | 100 |
| TESTI2051873 | 0 | 0 | 0 | 0 | 0 | 0 | 100 |
| TESTI2052110 | 0 | 0 | 0 | 0 | 0 | 0 | 100 |
| TESTI2052202 | 0 | 0 | 0 | 0 | 0 | 0 | 100 |
| TESTI2052211 | 0 | 0 | 0 | 0 | 0 | 0 | 100 |
| TESTI2052256 | 0 | 0 | 0 | 0 | 0 | 0 | 100 |
| TESTI2052288 | 0 | 0 | 0 | 0 | 0 | 0 | 100 |
| TESTI2052525 | 0 | 0 | 0 | 0 | 0 | 0 | 100 |
| TESTI2052670 | 0 | 0 | 0 | 0 | 0 | 0 | 100 |
| TESTI2052693 | 0 | 0 | 0 | 0 | 35.495 | 0 | 1.094 |
| TESTI2052698 | 0 | 0 | 0 | 0 | 0 | 0 | 100 |
| TESTI2052799 | 0 | 0 | 0 | 0 | 0 | 0 | 100 |
| TESTI2052822 | 0 | 0 | 0 | 0 | 0 | 0 | 100 |
| TESTI2052985 | 0 | 0 | 0 | 0 | 0 | 0 | 100 |
| TESTI2053151 | 0 | 0 | 0 | 0 | 0 | 0 | 100 |
| TESTI2053242 | 0 | 0 | 0 | 0 | 0 | 0 | 100 |
| TESTI2053399 | 0 | 0 | 0 | 0 | 0 | 0 | 100 |
| TESTI2053526 | 0 | 0 | 0 | 0 | 0 | 0 | 100 |
| TESTI2053561 | 0 | 0 | 0 | 0 | 0 | 0 | 100 |
| TESTI2053621 | 0 | 0 | 0 | 0 | 0 | 0 | 100 |
| TESTI2053667 | 0 | 0 | 0 | 0 | 0 | 0 | 36.852 |
| TESTI2053723 | 0 | 0 | 0 | 0 | 0 | 0 | 2.959 |
| TESTI3000002 | 0 | 0 | 0 | 0 | 0 | 0 | 100 |
| TESTI3000005 | 0 | 0 | 0 | 0 | 0 | 0 | 100 |
| TESTI4000014 | 0 | 0 | 1.256 | 0 | 0 | 0 | 3.385 |
| TESTI4000068 | 0 | 0 | 0 | 0 | 0 | 0 | 100 |
| TESTI4000079 | 0 | 0 | 0 | 0 | 0 | 0 | 100 |
| TESTI4000093 | 0 | 0 | 0 | 0 | 0 | 0 | 100 |
| TESTI4000134 | 0 | 0 | 0 | 0 | 0 | 0 | 100 |
| TESTI4000137 | 0 | 0 | 0 | 0 | 0 | 0 | 100 |
| TESTI4000153 | 0 | 0 | 0 | 0 | 0 | 0 | 100 |
| TESTI4000155 | 0 | 0 | 0 | 0 | 0 | 0 | 100 |
| TESTI4000157 | 0 | 0 | 0 | 0 | 0 | 0 | 100 |
| TESTI4000183 | 0 | 0 | 0 | 0 | 0 | 0 | 100 |
| TESTI4000214 | 0 | 0 | 0 | 0 | 0 | 0 | 92.021 |
| TESTI4000215 | 0 | 0 | 0 | 0 | 0 | 0 | 100 |
| TESTI4000228 | 0 | 0 | 0 | 0 | 0 | 0 | 100 |
| TESTI4000250 | 0 | 0 | 0 | 0 | 0 | 0 | 100 |
| TESTI4000288 | 0 | 0 | 0 | 0 | 0 | 0 | 100 |
| TESTI4000319 | 0 | 0 | 0 | 0 | 0 | 0 | 100 |
| TESTI4000349 | 0 | 0 | 0 | 0 | 0 | 0 | 33.984 |
| TESTI4000370 | 0 | 0 | 0 | 0 | 0 | 0 | 100 |
| TESTI4000394 | 0 | 0 | 0 | 0 | 0 | 0 | 100 |
| TESTI4000434 | 0 | 0 | 0 | 0 | 0 | 0 | 59.830 |
| TESTI4000462 | 0 | 0 | 0 | 0 | 0 | 0 | 100 |
| TESTI4000530 | 0 | 0 | 0 | 0 | 0 | 0 | 100 |
| TESTI4000534 | 0 | 0 | 0 | 0 | 0 | 0 | 100 |
| TESTI4000598 | 0 | 0 | 0 | 0 | 0 | 0 | 100 |
| TESTI4000600 | 0 | 0 | 0 | 0 | 0 | 0 | 100 |
| TESTI4000621 | 0 | 0 | 0 | 0 | 0 | 0 | 100 |
| TESTI4000703 | 0 | 0 | 0 | 0 | 0 | 0 | 100 |
| TESTI4000724 | 0 | 0 | 0 | 0 | 0 | 0 | 100 |
| TESTI4000957 | 0 | 0 | 0 | 0 | 0 | 0 | 100 |
| TESTI4000970 | 0 | 0 | 0 | 0 | 0 | 0 | 100 |
| TESTI4001036 | 0 | 0 | 0 | 0 | 0 | 0 | 100 |
| TESTI4001037 | 0 | 0 | 0 | 0 | 0 | 0 | 100 |
| TESTI4001060 | 0 | 0 | 0 | 0 | 0 | 0 | 100 |
| TESTI4001106 | 0 | 0 | 0 | 0 | 0 | 0 | 100 |
| TESTI4001148 | 0 | 0 | 0 | 0 | 0 | 0 | 100 |
| TESTI4001176 | 0 | 0 | 0 | 0 | 0 | 0 | 100 |
| TESTI4001195 | 0 | 0 | 0 | 0 | 0 | 0 | 100 |
| TESTI4001201 | 0 | 0 | 0 | 0 | 0 | 0 | 100 |
| TESTI4001206 | 0 | 0 | 0 | 0 | 0 | 0 | 27.313 |
| TESTI4001348 | 0 | 0 | 0 | 0 | 0 | 0 | 100 |
| TESTI4001441 | 0 | 0 | 0 | 0 | 0 | 0 | 100 |
| TESTI4001467 | 0 | 0 | 0 | 0 | 0 | 0 | 3.619 |
| TESTI4001473 | 0 | 0 | 0 | 0 | 0 | 0 | 100 |
| TESTI4001517 | 0 | 0 | 0 | 0 | 0 | 0 | 100 |
| TESTI4001527 | 0 | 0 | 0 | 0 | 0 | 0 | 100 |
| TESTI4001561 | 0 | 0 | 0 | 0 | 0 | 0 | 26.320 |
| TESTI4001569 | 0 | 0 | 0 | 0 | 0 | 0 | 56.168 |
| TESTI4001604 | 0 | 0 | 0 | 0 | 0 | 0 | 38.043 |
| TESTI4001665 | 0 | 0 | 0 | 0 | 0 | 0 | 100 |
| TESTI4001679 | 0 | 0 | 0 | 0 | 0 | 0 | 100 |
| TESTI4001795 | 0 | 0 | 0 | 0 | 0 | 0 | 100 |
| TESTI4001923 | 0 | 0 | 0 | 0 | 0 | 0 | 100 |
| TESTI4001925 | 0 | 0 | 0 | 0 | 0 | 0 | 100 |
| TESTI4001984 | 0 | 0 | 0 | 0 | 0 | 0 | 39.529 |
| TESTI4002003 | 0 | 0 | 0 | 0 | 0 | 0 | 100 |
| TESTI4002072 | 0 | 0 | 0 | 0 | 0 | 0 | 2.183 |
| TESTI4002141 | 0 | 0 | 0 | 0 | 0 | 0 | 100 |
| TESTI4002195 | 0 | 0 | 0 | 0 | 0 | 0 | 8.747 |
| TESTI4002202 | 0 | 0 | 0 | 0 | 0 | 22.682 | 2.167 |
| TESTI4002290 | 0 | 0 | 0 | 0 | 0 | 0 | 37.085 |
| TESTI4002319 | 0 | 0 | 0 | 0 | 0 | 0 | 100 |
| TESTI4002491 | 0 | 0 | 0 | 0 | 0 | 0 | 100 |
| TESTI4002520 | 0 | 0 | 0 | 0 | 0 | 0 | 100 |
| TESTI4002552 | 0 | 0 | 0 | 0 | 0 | 0 | 100 |
| TESTI4002647 | 0 | 0 | 0 | 0 | 0 | 0 | 34.478 |
| TESTI4002703 | 0 | 0 | 0 | 0 | 0 | 0 | 100 |
| TESTI4002754 | 0 | 0 | 0 | 0 | 0 | 0 | 100 |
| TESTI4002799 | 0 | 0 | 0 | 0 | 0 | 0 | 2.887 |
| TESTI4002868 | 0 | 0 | 0 | 0 | 0 | 0 | 100 |
| TESTI4002878 | 0 | 0 | 0 | 0 | 0 | 0 | 100 |
| TESTI4002889 | 0 | 0 | 0 | 0 | 0 | 0 | 100 |
| TESTI4002988 | 0 | 0 | 0 | 0 | 0 | 0 | 14.176 |
| TESTI4003150 | 0 | 0 | 0 | 0 | 0 | 0 | 19.415 |
| TESTI4003179 | 0 | 0 | 0 | 0 | 0 | 0 | 53.856 |
| TESTI4003279 | 0 | 0 | 0 | 0 | 0 | 0 | 100 |
| TESTI4003319 | 0 | 0 | 0 | 0 | 0 | 0 | 100 |
| TESTI4003404 | 0 | 0 | 0 | 0 | 0 | 0 | 100 |
| TESTI4003565 | 0 | 0 | 0 | 0 | 0 | 0 | 100 |
| TESTI4003574 | 0 | 0 | 0 | 0 | 0 | 0 | 100 |
| TESTI4003579 | 0 | 0 | 0 | 0 | 0 | 0 | 36.852 |
| TESTI4003602 | 0 | 0 | 0 | 0 | 0 | 0 | 33.949 |
| TESTI4003703 | 0 | 0 | 0 | 0 | 0 | 0 | 23.140 |
| TESTI4003733 | 0 | 0 | 0 | 0 | 0 | 0 | 100 |
| TESTI4003796 | 0 | 0 | 0 | 0 | 0 | 0 | 100 |
| TESTI4003944 | 0 | 0 | 0 | 0 | 0 | 0 | 22.803 |
| TESTI4004003 | 0 | 0 | 0 | 0 | 0 | 0 | 100 |
| TESTI4004031 | 0 | 0 | 0 | 0 | 0 | 0 | 100 |
| TESTI4004200 | 0 | 0 | 0 | 0 | 0 | 0 | 100 |
| TESTI4004210 | 0 | 0 | 0 | 0 | 0 | 0 | 23.566 |
| TESTI4004539 | 0 | 0 | 0 | 0 | 0 | 0 | 100 |
| TESTI4004626 | 0 | 0 | 0 | 0 | 0 | 0 | 10.762 |
| TESTI4004653 | 0 | 0 | 0 | 0 | 0 | 0 | 100 |
| TESTI4004695 | 0 | 0 | 0 | 0 | 0 | 0 | 63.878 |
| TESTI4004722 | 0 | 0 | 0 | 0 | 0 | 0 | 100 |
| TESTI4004887 | 0 | 0 | 0 | 0 | 0 | 0 | 100 |
| TESTI4004917 | 0 | 0 | 0 | 0 | 0 | 0 | 100 |
| TESTI4005015 | 0 | 0 | 0 | 0 | 0 | 0 | 100 |
| TESTI4005039 | 0 | 0 | 0 | 0 | 0 | 0 | 100 |
| TESTI4005133 | 0 | 0 | 0 | 0 | 0 | 0 | 7.795 |
| TESTI4005158 | 0 | 0 | 0 | 0 | 0 | 0 | 100 |
| TESTI4005317 | 0 | 0 | 0 | 0 | 0 | 0 | 100 |
| TESTI4005322 | 0 | 0 | 0 | 0 | 0 | 0 | 100 |
| TESTI4005399 | 0 | 0 | 0 | 0 | 0 | 0 | 15.291 |
| TESTI4005470 | 0 | 0 | 0 | 0 | 0 | 0 | 100 |
| TESTI4005500 | 0 | 0 | 0 | 0 | 0 | 0 | 100 |
| TESTI4005534 | 0 | 0 | 0 | 0 | 0 | 0 | 18.229 |
| TESTI4005543 | 0 | 0 | 0 | 0 | 0 | 0 | 100 |
| TESTI4005628 | 0 | 0 | 0 | 0 | 0 | 0 | 100 |
| TESTI4005801 | 0 | 0 | 0 | 0 | 0 | 0 | 100 |
| TESTI4005805 | 0 | 0 | 0 | 0 | 0 | 0 | 100 |
| TESTI4005857 | 0 | 0 | 0 | 0 | 0 | 0 | 20.775 |
| TESTI4005961 | 0 | 0 | 0 | 0 | 0 | 0 | 100 |
| TESTI4006053 | 0 | 0 | 0 | 0 | 0 | 0 | 100 |
| TESTI4006079 | 0 | 0 | 0 | 0 | 0 | 0 | 100 |
| TESTI4006112 | 0 | 0 | 0 | 0 | 0 | 0 | 100 |
| TESTI4006137 | 0 | 0 | 0 | 0 | 0 | 0 | 16.835 |
| TESTI4006148 | 0 | 0 | 0 | 0 | 0 | 0 | 100 |
| TESTI4006219 | 0 | 0 | 0 | 0 | 0 | 0 | 100 |
| TESTI4006234 | 0 | 0 | 0 | 0 | 0 | 0 | 100 |
| TESTI4006308 | 0 | 0 | 0 | 0 | 0 | 0 | 100 |
| TESTI4006326 | 0 | 0 | 0 | 0 | 0 | 0 | 51.276 |
| TESTI4006393 | 0 | 0 | 0 | 0 | 0 | 0 | 100 |
| TESTI4006407 | 0 | 0 | 0 | 0 | 0 | 0 | 37.085 |
| TESTI4006412 | 0 | 0 | 0 | 0 | 0 | 0 | 100 |
| TESTI4006420 | 0 | 0 | 0 | 0 | 0 | 0 | 100 |
| TESTI4006441 | 0 | 0 | 0 | 0 | 0 | 0 | 39.529 |
| TESTI4006473 | 0 | 0 | 0 | 0 | 0 | 0 | 100 |
| TESTI4006539 | 0 | 0 | 0 | 0 | 0 | 0 | 100 |
| TESTI4006546 | 0 | 0 | 0 | 0 | 0 | 0 | 100 |
| TESTI4006567 | 0 | 0 | 0 | 0 | 0 | 0 | 100 |
| TESTI4006704 | 0 | 0 | 0 | 0 | 0 | 0 | 100 |
| TESTI4006728 | 0 | 0 | 0 | 0 | 0 | 0 | 100 |
| TESTI4006802 | 0 | 0 | 0 | 0 | 0 | 0 | 100 |
| TESTI4006819 | 0 | 0 | 0 | 0 | 0 | 0 | 53.856 |
| TESTI4007064 | 0 | 0 | 0 | 0 | 0 | 0 | 100 |
| TESTI4007163 | 0 | 0 | 0 | 0 | 0 | 0 | 100 |
| TESTI4007176 | 0 | 0 | 0 | 0 | 0 | 0 | 100 |
| TESTI4007203 | 0 | 0 | 0 | 0 | 0 | 0 | 100 |
| TESTI4007239 | 0 | 0 | 0 | 0 | 0 | 0 | 100 |
| TESTI4007369 | 0 | 0 | 0 | 0 | 0 | 0 | 8.520 |
| TESTI4007373 | 0 | 0 | 0 | 0 | 0 | 0 | 100 |
| TESTI4007382 | 0 | 0 | 0 | 0 | 0 | 0 | 100 |
| TESTI4007404 | 0 | 0 | 0 | 0 | 0 | 0 | 100 |
| TESTI4007489 | 0 | 0 | 0 | 0 | 0 | 0 | 100 |
| TESTI4007565 | 0 | 0 | 0 | 0 | 0 | 0 | 100 |
| TESTI4007671 | 0 | 0 | 0 | 0 | 0 | 0 | 100 |
| TESTI4007775 | 0 | 0 | 0 | 0 | 0 | 0 | 100 |
| TESTI4007778 | 0 | 0 | 0 | 0 | 0 | 0 | 100 |
| TESTI4007799 | 0 | 0 | 0 | 0 | 0 | 0 | 100 |
| TESTI4007810 | 0 | 0 | 0 | 0 | 0 | 0 | 100 |
| TESTI4007816 | 0 | 0 | 0 | 0 | 0 | 0 | 2.831 |
| TESTI4007965 | 0 | 0 | 0 | 0 | 0 | 0 | 47.189 |
| TESTI4008007 | 0 | 0 | 0 | 0 | 0 | 0 | 100 |
| TESTI4008018 | 0 | 0 | 0 | 0 | 0 | 0 | 25.979 |
| TESTI4008050 | 0 | 0 | 0 | 0 | 0 | 0 | 100 |
| TESTI4008058 | 0 | 0 | 0 | 0 | 0 | 0 | 17.285 |
| TESTI4008086 | 0 | 0 | 0 | 0 | 0 | 0 | 100 |
| TESTI4008097 | 0 | 0 | 0 | 0 | 0 | 0 | 39.529 |
| TESTI4008176 | 0 | 0 | 0 | 0 | 0 | 0 | 100 |
| TESTI4008209 | 0 | 0 | 0 | 0 | 0 | 0 | 100 |
| TESTI4008219 | 0 | 0 | 0 | 0 | 0 | 0 | 100 |
| TESTI4008250 | 0 | 0 | 0 | 0 | 0 | 0 | 100 |
| TESTI4008302 | 0 | 0 | 0 | 0 | 0 | 0 | 100 |
| TESTI4008305 | 0 | 0 | 0 | 0 | 0 | 0 | 100 |
| TESTI4008401 | 0 | 0 | 0 | 0 | 0 | 0 | 100 |
| TESTI4008417 | 0 | 0 | 0 | 0 | 0 | 0 | 100 |
| TESTI4008429 | 0 | 0 | 0 | 0 | 0 | 0 | 100 |
| TESTI4008573 | 0 | 0 | 0 | 0 | 0 | 0 | 100 |
| TESTI4008797 | 0 | 0 | 0 | 0 | 0 | 0 | 32.499 |
| TESTI4008816 | 0 | 0 | 0 | 0 | 0 | 0 | 100 |
| TESTI4008840 | 0 | 0 | 0 | 0 | 0 | 0 | 100 |
| TESTI4008935 | 0 | 0 | 0 | 0 | 0 | 0 | 100 |
| TESTI4008993 | 0 | 0 | 0 | 0 | 0 | 0 | 100 |
| TESTI4009022 | 0 | 0 | 0 | 0 | 0 | 0 | 100 |
| TESTI4009028 | 0 | 0 | 0 | 0 | 0 | 0 | 100 |
| TESTI4009034 | 0 | 0 | 0 | 0 | 0 | 0 | 100 |
| TESTI4009123 | 0 | 0 | 0 | 0 | 0 | 0 | 100 |
| TESTI4009160 | 0 | 0 | 0 | 0 | 0 | 0 | 100 |
| TESTI4009215 | 0 | 0 | 0 | 0 | 0 | 0 | 100 |
| TESTI4009283 | 0 | 0 | 0 | 0 | 0 | 0 | 100 |
| TESTI4009286 | 0 | 0 | 0 | 0 | 0 | 9.920 | 4.265 |
| TESTI4009306 | 0 | 0 | 0 | 0 | 0 | 0 | 100 |
| TESTI4009374 | 0 | 0 | 0 | 0 | 0 | 0 | 100 |
| TESTI4009406 | 0 | 0 | 0 | 0 | 0 | 0 | 100 |
| TESTI4009454 | 0 | 0 | 0 | 0 | 0 | 0 | 2.627 |
| TESTI4009457 | 0 | 0 | 0 | 0 | 0 | 0 | 70.009 |
| TESTI4009501 | 0 | 0 | 0 | 0 | 0 | 0 | 100 |
| TESTI4009563 | 0 | 0 | 0 | 0 | 0 | 0 | 100 |
| TESTI4009608 | 0 | 0 | 0 | 0 | 0 | 0 | 100 |
| TESTI4009638 | 0 | 0 | 0 | 0 | 0 | 0 | 100 |
| TESTI4009752 | 0 | 0 | 0 | 0 | 0 | 0 | 100 |
| TESTI4009881 | 0 | 0 | 0 | 0 | 0 | 0 | 100 |
| TESTI4009886 | 0 | 0 | 0 | 0 | 0 | 0 | 100 |
| TESTI4009928 | 0 | 0 | 0 | 0 | 0 | 0 | 100 |
| TESTI4010076 | 0 | 0 | 0 | 0 | 0 | 0 | 100 |
| TESTI4010082 | 0 | 0 | 0 | 0 | 0 | 0 | 100 |
| TESTI4010095 | 0 | 0 | 0 | 0 | 0 | 0 | 100 |
| TESTI4010211 | 0 | 0 | 0 | 0 | 0 | 0 | 100 |
| TESTI4010377 | 0 | 0 | 0 | 0 | 0 | 0 | 39.051 |
| TESTI4010475 | 0 | 0 | 0 | 0 | 0 | 0 | 100 |
| TESTI4010544 | 0 | 0 | 0 | 0 | 0 | 0 | 100 |
| TESTI4010713 | 0 | 0 | 0 | 0 | 0 | 0 | 100 |
| TESTI4010721 | 0 | 0 | 0 | 0 | 0 | 0 | 100 |
| TESTI4010789 | 0 | 0 | 0 | 0 | 0 | 0 | 100 |
| TESTI4010817 | 0 | 0 | 0 | 0 | 0 | 0 | 100 |
| TESTI4010831 | 0 | 0 | 0 | 0 | 0 | 0 | 100 |
| TESTI4010851 | 3.537 | 12.143 | 0 | 0 | 0 | 3.740 | 4.288 |
| TESTI4010902 | 0 | 0 | 0 | 0 | 0 | 0 | 100 |
| TESTI4010928 | 0 | 0 | 0 | 0 | 0 | 0 | 65.779 |
| TESTI4010979 | 0 | 0 | 0 | 0 | 0 | 0 | 12.844 |
| TESTI4011070 | 0 | 0 | 0 | 0 | 0 | 0 | 100 |
| TESTI4011072 | 0 | 0 | 0 | 0 | 0 | 0 | 100 |
| TESTI4011084 | 0 | 0 | 0 | 0 | 0 | 0 | 39.051 |
| TESTI4011118 | 0 | 0 | 0 | 0 | 0 | 0 | 100 |
| TESTI4011246 | 0 | 0 | 0 | 0 | 0 | 0 | 100 |
| TESTI4011484 | 0 | 0 | 0 | 0 | 0 | 0 | 100 |
| TESTI4011505 | 0 | 0 | 0 | 0 | 0 | 0 | 100 |
| TESTI4011532 | 0 | 0 | 0 | 0 | 0 | 0 | 100 |
| TESTI4011616 | 0 | 0 | 0 | 0 | 0 | 0 | 100 |
| TESTI4011744 | 0 | 0 | 0 | 0 | 0 | 0 | 100 |
| TESTI4011745 | 0 | 0 | 0 | 0 | 0 | 0 | 100 |
| TESTI4011829 | 0 | 0 | 0 | 0 | 0 | 0 | 100 |
| TESTI4011926 | 0 | 0 | 0 | 0 | 0 | 0 | 100 |
| TESTI4011956 | 0 | 0 | 0 | 0 | 0 | 0 | 100 |
| TESTI4012010 | 0 | 0 | 0 | 0 | 0 | 0 | 100 |
| TESTI4012086 | 0 | 0 | 0 | 0 | 0 | 0 | 100 |
| TESTI4012258 | 0 | 0 | 0 | 0 | 0 | 0 | 100 |
| TESTI4012293 | 0 | 0 | 0 | 0 | 0 | 0 | 100 |
| TESTI4012329 | 0 | 0 | 0 | 0 | 0 | 0 | 100 |
| TESTI4012382 | 0 | 0 | 0 | 0 | 0 | 0 | 100 |
| TESTI4012406 | 0 | 0 | 0 | 0 | 0 | 0 | 100 |
| TESTI4012448 | 0 | 0 | 0 | 0 | 0 | 0 | 100 |
| TESTI4012451 | 0 | 0 | 0 | 0 | 0 | 0 | 37.085 |
| TESTI4012505 | 0 | 0 | 0 | 0 | 0 | 0 | 100 |
| TESTI4012556 | 0 | 0 | 0 | 0 | 0 | 0 | 100 |
| TESTI4012623 | 0 | 0 | 0 | 0 | 0 | 0 | 100 |
| TESTI4012646 | 0 | 0 | 0 | 0 | 0 | 0 | 39.529 |
| TESTI4012679 | 0 | 0 | 0 | 0 | 0 | 0 | 100 |
| TESTI4012911 | 0 | 0 | 0 | 0 | 0 | 0 | 100 |
| TESTI4012956 | 0 | 0 | 0 | 0 | 0 | 0 | 100 |
| TESTI4012960 | 0 | 0 | 0 | 0 | 0 | 0 | 9.733 |
| TESTI4013365 | 0 | 0 | 0 | 0 | 0 | 0 | 100 |
| TESTI4013369 | 0 | 0 | 0 | 0 | 0 | 0 | 100 |
| TESTI4013410 | 0 | 0 | 0 | 0 | 0 | 0 | 100 |
| TESTI4013441 | 0.338 | 0 | 0 | 0 | 0 | 2.146 | 0.205 |
| TESTI4013474 | 2.229 | 0 | 0 | 0 | 0 | 0 | 0.675 |
| TESTI4013602 | 0 | 0 | 0 | 0 | 0 | 0 | 100 |
| TESTI4013667 | 0 | 0 | 0 | 0 | 0 | 0 | 100 |
| TESTI4013675 | 0 | 0 | 0 | 0 | 0 | 0 | 32.269 |
| TESTI4013685 | 0 | 0 | 0 | 0 | 0 | 0 | 100 |
| TESTI4013735 | 0 | 0 | 0 | 0 | 0 | 0 | 36.852 |
| TESTI4013742 | 0 | 0 | 0 | 0 | 0 | 0 | 100 |
| TESTI4013774 | 0 | 0 | 0 | 0 | 0 | 0 | 100 |
| TESTI4013817 | 0 | 0 | 0 | 0 | 0 | 0 | 17.756 |
| TESTI4013830 | 0 | 0 | 0 | 0 | 0 | 0 | 100 |
| TESTI4013852 | 0 | 0 | 0 | 0 | 0 | 0 | 100 |
| TESTI4013894 | 0 | 0 | 0 | 0 | 0 | 0 | 18.310 |
| TESTI4013924 | 0 | 0 | 0 | 0 | 0 | 0 | 100 |
| TESTI4013960 | 0 | 0 | 0 | 0 | 0 | 0 | 100 |
| TESTI4013962 | 0 | 0 | 0 | 0 | 0 | 0 | 100 |
| TESTI4014159 | 0 | 0 | 0 | 0 | 0 | 0 | 7.662 |
| TESTI4014175 | 0 | 0 | 0 | 0 | 0 | 0 | 17.462 |
| TESTI4014265 | 0 | 0 | 0 | 0 | 0 | 0 | 100 |
| TESTI4014276 | 0 | 0 | 0 | 0 | 0 | 0 | 100 |
| TESTI4014306 | 0 | 0 | 0 | 0 | 0 | 0 | 47.943 |
| TESTI4014392 | 0 | 0 | 0 | 0 | 0 | 0 | 100 |
| TESTI4014415 | 0 | 0 | 0 | 0 | 0 | 0 | 100 |
| TESTI4014445 | 0 | 0 | 0 | 0 | 0 | 0 | 100 |
| TESTI4014553 | 0 | 0 | 0 | 0 | 0 | 0 | 31.530 |
| TESTI4014661 | 0 | 0 | 0 | 0 | 0 | 0 | 100 |
| TESTI4014694 | 0 | 0 | 0 | 0 | 0 | 0 | 0.728 |
| TESTI4014801 | 0 | 0 | 0 | 0 | 0 | 0 | 100 |
| TESTI4014818 | 0 | 0 | 0 | 0 | 0 | 0 | 39.051 |
| TESTI4014891 | 0 | 0 | 0 | 0 | 0 | 0 | 100 |
| TESTI4014908 | 0 | 0 | 0 | 0 | 0 | 0 | 23.566 |
| TESTI4014924 | 0 | 0 | 0 | 0 | 0 | 0 | 100 |
| TESTI4014932 | 0 | 0 | 0 | 0 | 0 | 0 | 100 |
| TESTI4014977 | 0 | 0 | 0 | 0 | 0 | 0 | 100 |
| TESTI4015012 | 0 | 0 | 0 | 0 | 0 | 0 | 100 |
| TESTI4015129 | 0 | 0 | 0 | 0 | 0 | 0 | 100 |
| TESTI4015145 | 0 | 0 | 0 | 0 | 0 | 0 | 100 |
| TESTI4015204 | 0 | 0 | 0 | 0 | 0 | 0 | 51.491 |
| TESTI4015263 | 0 | 0 | 0 | 0 | 0 | 0 | 100 |
| TESTI4015293 | 0 | 0 | 0 | 0 | 0 | 0 | 100 |
| TESTI4015299 | 0 | 0 | 0 | 0 | 0 | 0 | 100 |
| TESTI4015339 | 0 | 0 | 0 | 0 | 0 | 0 | 100 |
| TESTI4015398 | 0 | 0 | 0 | 0 | 0 | 0 | 100 |
| TESTI4015442 | 0 | 0 | 0 | 0 | 0 | 0 | 26.359 |
| TESTI4015471 | 0 | 0 | 0 | 0 | 0 | 0 | 100 |
| TESTI4015477 | 0 | 0 | 0 | 0 | 0 | 0 | 100 |
| TESTI4015600 | 0 | 0 | 0 | 0 | 0 | 0 | 100 |
| TESTI4015646 | 0 | 0 | 0 | 0 | 0 | 0 | 100 |
| TESTI4015681 | 0 | 0 | 0 | 0 | 0 | 0 | 100 |
| TESTI4015688 | 0 | 0 | 0 | 0 | 0 | 0 | 100 |
| TESTI4015790 | 0 | 0 | 0 | 0 | 0 | 0 | 100 |
| TESTI4016110 | 0 | 0 | 0 | 0 | 0 | 0 | 100 |
| TESTI4016238 | 0 | 0 | 0 | 0 | 0 | 0 | 100 |
| TESTI4016551 | 0 | 0 | 0 | 0 | 0 | 0 | 100 |
| TESTI4016812 | 0 | 0 | 0 | 0 | 0 | 0 | 100 |
| TESTI4016822 | 0 | 0 | 0 | 0 | 0 | 0 | 100 |
| TESTI4016865 | 0 | 0 | 0 | 0 | 0 | 0 | 100 |
| TESTI4016882 | 0 | 0 | 0 | 0 | 0 | 0 | 100 |
| TESTI4016925 | 0 | 0 | 0 | 0 | 0 | 0 | 22.588 |
| TESTI4017001 | 0 | 0 | 0 | 0 | 0 | 0 | 100 |
| TESTI4017116 | 0 | 0 | 0 | 0 | 0 | 0 | 100 |
| TESTI4017137 | 0 | 0 | 0 | 0 | 0 | 0 | 100 |
| TESTI4017229 | 0 | 0 | 0 | 0 | 0 | 0 | 100 |
| TESTI4017254 | 0 | 0 | 0 | 0 | 0 | 0 | 100 |
| TESTI4017269 | 0 | 0 | 0 | 0 | 0 | 0 | 100 |
| TESTI4017380 | 0 | 0 | 0 | 0 | 0 | 0 | 100 |
| TESTI4017382 | 0 | 0 | 0 | 0 | 0 | 0 | 100 |
| TESTI4017543 | 0 | 0 | 0 | 0 | 0 | 0 | 100 |
| TESTI4017575 | 0 | 0 | 0 | 0 | 0 | 0 | 100 |
| TESTI4017647 | 0 | 0 | 0 | 0 | 0 | 0 | 100 |
| TESTI4017714 | 0 | 0 | 0 | 0 | 0 | 0 | 51.276 |
| TESTI4017763 | 0 | 0 | 0 | 0 | 0 | 0 | 100 |
| TESTI4017848 | 0 | 0 | 0 | 0 | 0 | 0 | 100 |
| TESTI4017854 | 0 | 0 | 91.498 | 0 | 0 | 0 | 8.502 |
| TESTI4017901 | 0 | 0 | 0 | 0 | 0 | 0 | 100 |
| TESTI4017961 | 0 | 0 | 0 | 0 | 0 | 0 | 100 |
| TESTI4017984 | 0 | 0 | 0 | 0 | 0 | 0 | 64.813 |
| TESTI4018101 | 0 | 0 | 0 | 0 | 0 | 0 | 100 |
| TESTI4018152 | 0 | 0 | 0 | 0 | 0 | 0 | 28.159 |
| TESTI4018208 | 0 | 0 | 0 | 0 | 0 | 0 | 100 |
| TESTI4018382 | 0 | 0 | 0 | 0 | 0 | 0 | 100 |
| TESTI4018436 | 0 | 0 | 0 | 0 | 0 | 0 | 3.402 |
| TESTI4018506 | 0 | 0 | 0 | 0 | 0 | 0 | 100 |
| TESTI4018555 | 0 | 0 | 0 | 0 | 0 | 0 | 100 |
| TESTI4018751 | 0 | 0 | 0 | 0 | 0 | 0 | 100 |
| TESTI4018806 | 0 | 0 | 0 | 0 | 0 | 0 | 100 |
| TESTI4018835 | 0 | 0 | 0 | 0 | 0 | 0 | 100 |
| TESTI4018859 | 0 | 0 | 0 | 0 | 0 | 0 | 100 |
| TESTI4018881 | 0 | 0 | 0 | 0 | 0 | 0 | 100 |
| TESTI4018886 | 0 | 0 | 0 | 0 | 0 | 0 | 35.404 |
| TESTI4018938 | 0 | 0 | 0 | 0 | 0 | 0 | 45.274 |
| TESTI4019140 | 0 | 0 | 0 | 0 | 0 | 0 | 100 |
| TESTI4019149 | 0 | 0 | 0 | 0 | 0 | 0 | 100 |
| TESTI4019299 | 0 | 0 | 0 | 0 | 0 | 0 | 100 |
| TESTI4019417 | 0 | 0 | 0 | 0 | 0 | 0 | 100 |
| TESTI4019440 | 0 | 0 | 0 | 0 | 0 | 0 | 100 |
| TESTI4019566 | 0 | 0 | 0 | 0 | 0 | 0 | 100 |
| TESTI4019657 | 0 | 0 | 0 | 0 | 0 | 0 | 100 |
| TESTI4019756 | 0 | 0 | 0 | 0 | 0 | 0 | 100 |
| TESTI4019843 | 0 | 0 | 0 | 0 | 0 | 0 | 26.135 |
| TESTI4020092 | 0 | 0 | 0 | 0 | 0 | 0 | 100 |
| TESTI4020102 | 0 | 0 | 0 | 0 | 0 | 0 | 100 |
| TESTI4020342 | 0 | 0 | 0 | 0 | 0 | 0 | 100 |
| TESTI4020460 | 0 | 0 | 0 | 0 | 0 | 0 | 100 |
| TESTI4020596 | 0 | 0 | 0 | 0 | 0 | 0 | 34.478 |
| TESTI4020806 | 0 | 0 | 0 | 0 | 0 | 0 | 100 |
| TESTI4020819 | 0 | 0 | 0 | 0 | 0 | 0 | 100 |
| TESTI4020920 | 0 | 0 | 0 | 0 | 0 | 0 | 100 |
| TESTI4021129 | 0 | 0 | 0 | 0 | 0 | 0 | 100 |
| TESTI4021197 | 0 | 0 | 0 | 0 | 0 | 0 | 100 |
| TESTI4021294 | 0 | 0 | 0 | 0 | 0 | 0 | 100 |
| TESTI4021377 | 0 | 0 | 0 | 0 | 0 | 0 | 100 |
| TESTI4021456 | 0 | 0 | 0 | 0 | 0 | 0 | 100 |
| TESTI4021491 | 0 | 0 | 0 | 0 | 0 | 0 | 100 |
| TESTI4021569 | 0 | 0 | 0 | 0 | 0 | 0 | 100 |
| TESTI4021713 | 0 | 0 | 0 | 0 | 0 | 0 | 100 |
| TESTI4021821 | 0 | 0 | 0 | 0 | 0 | 0 | 100 |
| TESTI4022158 | 0 | 0 | 0 | 0 | 0 | 0 | 8.724 |
| TESTI4022577 | 0 | 0 | 0 | 0 | 0 | 0 | 100 |
| TESTI4022716 | 0 | 0 | 0 | 0 | 0 | 0 | 100 |
| TESTI4022873 | 0 | 0 | 0 | 0 | 0 | 0 | 100 |
| TESTI4023096 | 0 | 0 | 0 | 0 | 0 | 0 | 100 |
| TESTI4023172 | 0 | 0 | 0 | 0 | 0 | 0 | 100 |
| TESTI4023546 | 0 | 0 | 0 | 0 | 0 | 0 | 100 |
| TESTI4023555 | 0 | 0 | 0 | 0 | 0 | 0 | 100 |
| TESTI4023654 | 0 | 0 | 0 | 0 | 0 | 0 | 100 |
| TESTI4023722 | 0 | 0 | 0 | 0 | 0 | 0 | 100 |
| TESTI4023762 | 0 | 0 | 0 | 0 | 0 | 0 | 100 |
| TESTI4023942 | 0 | 0 | 0 | 0 | 0 | 0 | 100 |
| TESTI4024096 | 0 | 0 | 0 | 0 | 0 | 0 | 100 |
| TESTI4024240 | 0 | 0 | 0 | 0 | 0 | 0 | 100 |
| TESTI4024245 | 0 | 0 | 0 | 0 | 0 | 0 | 22.035 |
| TESTI4024294 | 0 | 0 | 0 | 0 | 0 | 0 | 100 |
| TESTI4024344 | 0 | 0 | 0 | 0 | 0 | 0 | 100 |
| TESTI4024387 | 0 | 0 | 0 | 0 | 0 | 0 | 100 |
| TESTI4024420 | 0 | 0 | 0 | 0 | 0 | 0 | 24.447 |
| TESTI4024494 | 0 | 0 | 0 | 0 | 0 | 0 | 100 |
| TESTI4024740 | 0 | 0 | 0 | 0 | 0 | 0 | 23.518 |
| TESTI4024874 | 0 | 0 | 0 | 0 | 0 | 0 | 100 |
| TESTI4024890 | 0 | 0 | 0 | 0 | 0 | 0 | 100 |
| TESTI4024907 | 0 | 0 | 0 | 0 | 0 | 0 | 100 |
| TESTI4024930 | 0 | 0 | 0 | 0 | 0 | 0 | 100 |
| TESTI4025062 | 0 | 0 | 0 | 0 | 0 | 0 | 100 |
| TESTI4025268 | 0 | 0 | 0 | 0 | 0 | 0 | 39.529 |
| TESTI4025401 | 0 | 0 | 0 | 0 | 0 | 0 | 100 |
| TESTI4025494 | 0 | 0 | 0 | 0 | 0 | 0 | 100 |
| TESTI4025547 | 0 | 0 | 0 | 0 | 0 | 0 | 39.051 |
| TESTI4025731 | 0 | 0 | 0 | 0 | 0 | 0 | 100 |
| TESTI4025797 | 0 | 0 | 0 | 0 | 0 | 0 | 100 |
| TESTI4025865 | 0 | 0 | 0 | 0 | 0 | 0 | 100 |
| TESTI4025908 | 0 | 0 | 0 | 0 | 0 | 0 | 100 |
| TESTI4025920 | 0 | 0 | 0 | 0 | 0 | 0 | 100 |
| TESTI4026079 | 54.872 | 0 | 0 | 0 | 0 | 0 | 16.630 |
| TESTI4026080 | 0 | 0 | 0 | 0 | 0 | 0 | 100 |
| TESTI4026192 | 0 | 0 | 0 | 0 | 0 | 0 | 100 |
| TESTI4026207 | 0 | 0 | 0 | 0 | 0 | 0 | 39.051 |
| TESTI4026295 | 0 | 0 | 0 | 0 | 0 | 0 | 100 |
| TESTI4026390 | 0 | 0 | 0 | 0 | 0 | 0 | 47.943 |
| TESTI4026456 | 0 | 0 | 0 | 0 | 0 | 0 | 100 |
| TESTI4026510 | 0 | 0 | 0 | 0 | 0 | 0 | 100 |
| TESTI4026524 | 0 | 0 | 0 | 0 | 0 | 0 | 100 |
| TESTI4026680 | 0 | 0 | 0 | 0 | 0 | 0 | 100 |
| TESTI4026700 | 0 | 0 | 0 | 0 | 0 | 0 | 100 |
| TESTI4026762 | 0 | 0 | 0 | 0 | 0 | 0 | 100 |
| TESTI4026785 | 0 | 0 | 0 | 0 | 0 | 0 | 100 |
| TESTI4027139 | 0 | 0 | 0 | 0 | 0 | 0 | 100 |
| TESTI4027170 | 0 | 0 | 0 | 0 | 0 | 0 | 100 |
| TESTI4027262 | 0 | 0 | 0 | 0 | 0 | 0 | 100 |
| TESTI4027516 | 0 | 0 | 0 | 0 | 0 | 0 | 100 |
| TESTI4027557 | 0 | 0 | 0 | 0 | 0 | 0 | 100 |
| TESTI4027660 | 0 | 0 | 0 | 0 | 0 | 0 | 100 |
| TESTI4027821 | 0 | 0 | 0 | 0 | 0 | 0 | 39.529 |
| TESTI4027969 | 0 | 0 | 0 | 0 | 0 | 0 | 100 |
| TESTI4028042 | 0 | 0 | 0 | 0 | 0 | 0 | 100 |
| TESTI4028059 | 0 | 0 | 0 | 0 | 0 | 0 | 100 |
| TESTI4028062 | 0 | 0 | 0 | 0 | 0 | 0 | 100 |
| TESTI4028182 | 0 | 0 | 0 | 0 | 0 | 0 | 100 |
| TESTI4028429 | 0 | 0 | 0 | 0 | 0 | 0 | 100 |
| TESTI4028612 | 0 | 0 | 0 | 0 | 0 | 0 | 100 |
| TESTI4028692 | 0 | 0 | 0 | 0 | 0 | 0 | 100 |
| TESTI4028809 | 0 | 0 | 0 | 0 | 0 | 0 | 100 |
| TESTI4028823 | 0 | 0 | 0 | 0 | 0 | 0 | 100 |
| TESTI4028880 | 0 | 0 | 0 | 0 | 0 | 0 | 100 |
| TESTI4028904 | 0 | 0 | 0 | 0 | 0 | 0 | 100 |
| TESTI4028938 | 0 | 0 | 0 | 0 | 0 | 0 | 100 |
| TESTI4028958 | 0 | 0 | 0 | 0 | 0 | 0 | 100 |
| TESTI4028983 | 0 | 0 | 0 | 0 | 0 | 0 | 100 |
| TESTI4029023 | 0 | 0 | 0 | 0 | 0 | 0 | 100 |
| TESTI4029348 | 0 | 0 | 0 | 0 | 0 | 0 | 100 |
| TESTI4029370 | 0 | 0 | 0 | 0 | 0 | 0 | 100 |
| TESTI4029528 | 0 | 0 | 0 | 0 | 0 | 0 | 100 |
| TESTI4029651 | 0 | 0 | 0 | 0 | 0 | 0 | 100 |
| TESTI4029671 | 0 | 0 | 0 | 0 | 0 | 0 | 12.158 |
| TESTI4029676 | 0 | 0 | 0 | 0 | 0 | 0 | 100 |
| TESTI4029690 | 0 | 0 | 0 | 0 | 0 | 0 | 100 |
| TESTI4029731 | 0 | 0 | 0 | 0 | 0 | 0 | 100 |
| TESTI4029743 | 0 | 0 | 0 | 0 | 0 | 0 | 100 |
| TESTI4030069 | 0 | 0 | 0 | 0 | 0 | 0 | 100 |
| TESTI4030159 | 0 | 0 | 0 | 0 | 0 | 0 | 100 |
| TESTI4030319 | 0 | 0 | 0 | 0 | 0 | 0 | 100 |
| TESTI4030505 | 0 | 0 | 0 | 0 | 0 | 0 | 100 |
| TESTI4030603 | 0 | 0 | 0 | 0 | 0 | 0 | 100 |
| TESTI4030669 | 0 | 0 | 0 | 0 | 0 | 0 | 100 |
| TESTI4030673 | 0 | 0 | 0 | 0 | 0 | 0 | 100 |
| TESTI4030864 | 0 | 0 | 0 | 0 | 0 | 0 | 100 |
| TESTI4031066 | 0 | 0 | 0 | 0 | 0 | 0 | 100 |
| TESTI4031173 | 0 | 0 | 0 | 0 | 0 | 0 | 100 |
| TESTI4031335 | 0 | 0 | 0 | 0 | 0 | 0 | 100 |
| TESTI4031745 | 0 | 0 | 0 | 0 | 0 | 0 | 100 |
| TESTI4031818 | 0 | 0 | 0 | 0 | 0 | 0 | 100 |
| TESTI4032090 | 0 | 0 | 0 | 0 | 0 | 0 | 39.529 |
| TESTI4032112 | 0 | 0 | 0 | 0 | 0 | 0 | 100 |
| TESTI4032128 | 0 | 0 | 0 | 0 | 0 | 0 | 100 |
| TESTI4032270 | 0 | 0 | 0 | 0 | 0 | 0 | 100 |
| TESTI4032375 | 0 | 0 | 0 | 0 | 0 | 0 | 100 |
| TESTI4032834 | 0 | 0 | 0 | 0 | 0 | 0 | 100 |
| TESTI4032856 | 0 | 0 | 0 | 0 | 0 | 0 | 100 |
| TESTI4032895 | 0 | 0 | 0 | 0 | 0 | 0 | 100 |
| TESTI4032913 | 0 | 0 | 0 | 0 | 0 | 0 | 10.597 |
| TESTI4033146 | 0 | 0 | 0 | 0 | 0 | 0 | 100 |
| TESTI4033177 | 0 | 0 | 0 | 0 | 0 | 0 | 100 |
| TESTI4033433 | 0 | 0 | 0 | 0 | 0 | 0 | 100 |
| TESTI4033690 | 0 | 0 | 0 | 0 | 0 | 0 | 36.852 |
| TESTI4034172 | 0 | 0 | 0 | 0 | 0 | 0 | 100 |
| TESTI4034212 | 0 | 0 | 0 | 0 | 0 | 0 | 100 |
| TESTI4034432 | 0 | 0 | 0 | 0 | 0 | 0 | 100 |
| TESTI4034495 | 0 | 0 | 0 | 0 | 0 | 0 | 100 |
| TESTI4034632 | 0 | 0 | 0 | 0 | 0 | 0 | 100 |
| TESTI4034633 | 0 | 0 | 0 | 0 | 0 | 0 | 100 |
| TESTI4034912 | 0 | 0 | 0 | 0 | 0 | 0 | 100 |
| TESTI4034973 | 0 | 0 | 0 | 0 | 0 | 0 | 100 |
| TESTI4035063 | 0 | 0 | 0 | 0 | 0 | 0 | 100 |
| TESTI4035065 | 0 | 0 | 0 | 0 | 0 | 0 | 100 |
| TESTI4035498 | 0 | 0 | 0 | 0 | 0 | 0 | 100 |
| TESTI4035508 | 0 | 0 | 0 | 0 | 0 | 0 | 100 |
| TESTI4035581 | 0 | 0 | 0 | 0 | 0 | 0 | 100 |
| TESTI4035602 | 0 | 0 | 0 | 0 | 0 | 0 | 100 |
| TESTI4035637 | 0 | 0 | 0 | 0 | 0 | 0 | 100 |
| TESTI4035649 | 0 | 0 | 0 | 0 | 0 | 0 | 100 |
| TESTI4035770 | 0 | 0 | 0 | 0 | 0 | 0 | 34.478 |
| TESTI4035872 | 0 | 0 | 0 | 0 | 0 | 0 | 100 |
| TESTI4035895 | 0 | 0 | 0 | 0 | 0 | 0 | 100 |
| TESTI4035898 | 0 | 0 | 0 | 0 | 0 | 0 | 100 |
| TESTI4035989 | 0 | 0 | 0 | 0 | 0 | 0 | 100 |
| TESTI4036012 | 0 | 0 | 0 | 0 | 0 | 0 | 100 |
| TESTI4036042 | 0 | 0 | 0 | 0 | 0 | 0 | 100 |
| TESTI4036048 | 0 | 0 | 0 | 0 | 0 | 0 | 100 |
| TESTI4036315 | 0 | 0 | 0 | 0 | 0 | 0 | 100 |
| TESTI4036319 | 0 | 0 | 0 | 0 | 0 | 0 | 100 |
| TESTI4036449 | 0 | 0 | 0 | 0 | 0 | 0 | 100 |
| TESTI4036767 | 0 | 0 | 0 | 0 | 0 | 0 | 100 |
| TESTI4036909 | 0 | 0 | 0 | 0 | 0 | 0 | 100 |
| TESTI4037066 | 0 | 0 | 0 | 0 | 0 | 0 | 100 |
| TESTI4037156 | 0 | 0 | 3.893 | 5.840 | 0 | 0 | 0.904 |
| TESTI4037188 | 0 | 0 | 0 | 0 | 0 | 0 | 39.348 |
| TESTI4037228 | 0 | 0 | 0 | 0 | 0 | 0 | 100 |
| TESTI4037244 | 0 | 0 | 0 | 0 | 0 | 0 | 100 |
| TESTI4037727 | 0 | 0 | 0 | 0 | 0 | 0 | 100 |
| TESTI4037949 | 0 | 0 | 0 | 0 | 0 | 0 | 100 |
| TESTI4038047 | 0 | 0 | 0 | 0 | 0 | 0 | 100 |
| TESTI4038099 | 0 | 0 | 0 | 0 | 0 | 0 | 43.258 |
| TESTI4038156 | 0 | 0 | 0 | 0 | 0 | 0 | 100 |
| TESTI4038223 | 0 | 0 | 0 | 0 | 0 | 0 | 100 |
| TESTI4038258 | 0 | 0 | 0 | 0 | 0 | 0 | 100 |
| TESTI4038284 | 0 | 0 | 0 | 0 | 0 | 0 | 7.223 |
| TESTI4038339 | 0 | 0 | 0 | 0 | 0 | 0 | 100 |
| TESTI4038492 | 0 | 0 | 0 | 0 | 0 | 0 | 100 |
| TESTI4038721 | 0 | 0 | 0 | 0 | 0 | 0 | 100 |
| TESTI4038758 | 0 | 0 | 0 | 0 | 0 | 0 | 100 |
| TESTI4038779 | 0 | 0 | 0 | 0 | 0 | 0 | 100 |
| TESTI4038818 | 0 | 0 | 0 | 0 | 0 | 0 | 100 |
| TESTI4039038 | 0 | 0 | 0 | 0 | 0 | 0 | 100 |
| TESTI4039086 | 0 | 0 | 0 | 0 | 0 | 0 | 100 |
| TESTI4039451 | 0 | 0 | 0 | 0 | 0 | 0 | 100 |
| TESTI4039575 | 0 | 0 | 0 | 0 | 0 | 0 | 100 |
| TESTI4039659 | 0 | 0 | 0 | 0 | 0 | 0 | 100 |
| TESTI4039744 | 0 | 0 | 0 | 0 | 0 | 0 | 100 |
| TESTI4039904 | 0 | 0 | 0 | 0 | 0 | 0 | 100 |
| TESTI4040197 | 0 | 0 | 0 | 0 | 0 | 0 | 100 |
| TESTI4040363 | 0 | 0 | 0 | 0 | 0 | 0 | 100 |
| TESTI4040535 | 0 | 0 | 0 | 0 | 0 | 0 | 100 |
| TESTI4040559 | 0 | 0 | 0 | 0 | 0 | 0 | 100 |
| TESTI4040598 | 0 | 0 | 0 | 0 | 0 | 0 | 2.798 |
| TESTI4040800 | 0 | 0 | 0 | 0 | 0 | 0 | 100 |
| TESTI4040804 | 0 | 0 | 0 | 0 | 0 | 0 | 100 |
| TESTI4040939 | 0 | 0 | 0 | 0 | 0 | 0 | 100 |
| TESTI4040956 | 0 | 0 | 0 | 0 | 0 | 0 | 100 |
| TESTI4041049 | 0 | 0 | 0 | 0 | 0 | 0 | 100 |
| TESTI4041053 | 0 | 0 | 0 | 0 | 0 | 0 | 100 |
| TESTI4041086 | 0 | 0 | 0 | 0 | 0 | 0 | 100 |
| TESTI4041099 | 0 | 0 | 0 | 0 | 0 | 0 | 100 |
| TESTI4041143 | 0 | 0 | 0 | 0 | 0 | 0 | 100 |
| TESTI4041482 | 0 | 0 | 0 | 0 | 0 | 0 | 100 |
| TESTI4041519 | 0 | 0 | 0 | 0 | 0 | 0 | 100 |
| TESTI4041624 | 0 | 0 | 0 | 0 | 0 | 0 | 100 |
| TESTI4041629 | 0 | 0 | 0 | 0 | 0 | 0 | 100 |
| TESTI4041832 | 0 | 0 | 0 | 0 | 0 | 0 | 100 |
| TESTI4041844 | 0 | 0 | 0 | 0 | 0 | 0 | 100 |
| TESTI4041903 | 0 | 0 | 0 | 0 | 0 | 0 | 100 |
| TESTI4041954 | 0 | 0 | 0 | 0 | 0 | 0 | 100 |
| TESTI4041984 | 0 | 0 | 0 | 0 | 0 | 0 | 100 |
| TESTI4041985 | 0 | 0 | 0 | 0 | 0 | 0 | 100 |
| TESTI4041986 | 0 | 0 | 0 | 0 | 0 | 0 | 100 |
| TESTI4042098 | 0 | 0 | 0 | 0 | 0 | 0 | 100 |
| TESTI4042420 | 0 | 0 | 0 | 0 | 0 | 0 | 100 |
| TESTI4042440 | 0 | 0 | 0 | 0 | 0 | 0 | 100 |
| TESTI4042444 | 0 | 0 | 0 | 0 | 0 | 0 | 100 |
| TESTI4042711 | 0 | 0 | 0 | 0 | 0 | 0 | 100 |
| TESTI4042846 | 0 | 0 | 0 | 0 | 0 | 0 | 100 |
| TESTI4043067 | 0 | 0 | 0 | 0 | 0 | 0 | 100 |
| TESTI4043129 | 0 | 0 | 0 | 0 | 0 | 0 | 100 |
| TESTI4043140 | 0 | 0 | 0 | 0 | 0 | 0 | 5.438 |
| TESTI4043166 | 0 | 0 | 0 | 0 | 0 | 0 | 100 |
| TESTI4043203 | 0 | 0 | 0 | 0 | 0 | 0 | 100 |
| TESTI4043223 | 0 | 0 | 0 | 0 | 0 | 0 | 18.091 |
| TESTI4043371 | 0 | 0 | 0 | 0 | 0 | 0 | 100 |
| TESTI4043378 | 0 | 0 | 0 | 0 | 0 | 0 | 100 |
| TESTI4043512 | 0 | 0 | 0 | 0 | 0 | 0 | 100 |
| TESTI4043551 | 0 | 0 | 0 | 0 | 0 | 0 | 100 |
| TESTI4043710 | 0 | 0 | 0 | 0 | 0 | 0 | 100 |
| TESTI4043947 | 0 | 0 | 0 | 0 | 0 | 0 | 100 |
| TESTI4044035 | 0 | 0 | 0 | 0 | 0 | 0 | 100 |
| TESTI4044076 | 0 | 0 | 0 | 0 | 0 | 0 | 100 |
| TESTI4044084 | 0 | 0 | 0 | 0 | 0 | 0 | 100 |
| TESTI4044123 | 0 | 0 | 0 | 0 | 0 | 0 | 100 |
| TESTI4044186 | 0 | 0 | 0 | 0 | 0 | 0 | 100 |
| TESTI4044234 | 0 | 0 | 0 | 0 | 0 | 0 | 100 |
| TESTI4044291 | 0 | 0 | 0 | 0 | 0 | 0 | 100 |
| TESTI4044296 | 0 | 0 | 0 | 0 | 0 | 0 | 100 |
| TESTI4044300 | 0 | 0 | 0 | 0 | 0 | 0 | 100 |
| TESTI4044682 | 0 | 0 | 0 | 0 | 0 | 0 | 100 |
| TESTI4044704 | 0 | 0 | 0 | 0 | 0 | 0 | 3.332 |
| TESTI4044770 | 0 | 0 | 0 | 0 | 0 | 0 | 100 |
| TESTI4045168 | 0 | 0 | 0 | 0 | 0 | 0 | 100 |
| TESTI4045312 | 0 | 0 | 0 | 0 | 0 | 0 | 100 |
| TESTI4045330 | 0 | 0 | 0 | 0 | 0 | 0 | 100 |
| TESTI4045470 | 0 | 0 | 0 | 0 | 0 | 0 | 100 |
| TESTI4045701 | 0 | 0 | 0 | 0 | 0 | 0 | 100 |
| TESTI4045908 | 0 | 0 | 0 | 0 | 0 | 0 | 100 |
| TESTI4045955 | 0 | 0 | 0 | 0 | 0 | 0 | 100 |
| TESTI4045982 | 0 | 0 | 0 | 0 | 0 | 0 | 100 |
| TESTI4046073 | 0 | 0 | 0 | 0 | 0 | 0 | 12.411 |
| TESTI4046090 | 0 | 0 | 0 | 0 | 0 | 0 | 100 |
| TESTI4046240 | 0 | 0 | 0 | 0 | 0 | 0 | 100 |
| TESTI4046245 | 0 | 0 | 0 | 0 | 0 | 0 | 100 |
| TESTI4046253 | 0 | 0 | 0 | 0 | 0 | 0 | 100 |
| TESTI4046282 | 0 | 0 | 0 | 0 | 0 | 0 | 100 |
| TESTI4046328 | 0 | 0 | 0 | 0 | 0 | 0 | 100 |
| TESTI4046450 | 0 | 0 | 0 | 0 | 0 | 0 | 100 |
| TESTI4046457 | 0 | 0 | 0 | 0 | 0 | 0 | 100 |
| TESTI4046487 | 0 | 0 | 0 | 0 | 0 | 0 | 100 |
| TESTI4046502 | 0 | 0 | 0 | 0 | 0 | 0 | 56.661 |
| TESTI4046523 | 0 | 0 | 0 | 0 | 0 | 0 | 100 |
| TESTI4046819 | 0 | 0 | 0 | 0 | 0 | 0 | 12.906 |
| TESTI4046873 | 0 | 0 | 0 | 0 | 0 | 0 | 26.863 |
| TESTI4046884 | 0 | 0 | 0 | 0 | 0 | 0 | 100 |
| TESTI4046896 | 0 | 0 | 0 | 0 | 0 | 0 | 100 |
| TESTI4046903 | 0 | 0 | 0 | 0 | 0 | 0 | 100 |
| TESTI4046962 | 0 | 0 | 0 | 0 | 0 | 0 | 100 |
| TESTI4047069 | 0 | 0 | 0 | 0 | 0 | 0 | 100 |
| TESTI4047119 | 0 | 0 | 0 | 0 | 0 | 0 | 100 |
| TESTI4047305 | 0 | 0 | 0 | 0 | 0 | 0 | 100 |
| TESTI4047328 | 0 | 0 | 0 | 0 | 0 | 0 | 100 |
| TESTI4047437 | 0 | 0 | 0 | 0 | 0 | 0 | 100 |
| TESTI4047569 | 0 | 0 | 0 | 0 | 0 | 0 | 100 |
| TESTI4047746 | 0 | 0 | 0 | 0 | 0 | 0 | 100 |
| TESTI4047808 | 0 | 0 | 0 | 0 | 0 | 0 | 100 |
| THYMU1000002 | 0 | 0 | 4.164 | 0 | 0 | 0 | 0 |
| THYMU1000016 | 0.833 | 8.583 | 0 | 0 | 0 | 2.644 | 0.758 |
| THYMU1000083 | 0 | 0 | 0 | 0 | 0 | 0 | 7.840 |
| THYMU1000109 | 1.698 | 0 | 11.073 | 0 | 16.686 | 0 | 0.514 |
| THYMU1000329 | 0 | 0 | 0 | 0 | 0 | 0 | 3.484 |
| THYMU1000331 | 0 | 0 | 0 | 0 | 0 | 0 | 29.749 |
| THYMU1000359 | 3.468 | 0 | 0 | 0 | 0 | 0 | 0 |
| THYMU1000374 | 0 | 0 | 0 | 0 | 0 | 0 | 0.979 |
| THYMU1000428 | 0 | 0 | 3.999 | 0 | 0 | 0 | 1.486 |
| THYMU1000490 | 0 | 0 | 0 | 0 | 0 | 0 | 3.748 |
| THYMU2000382 | 0 | 0 | 0 | 0 | 0 | 4.147 | 0.792 |
| THYMU2000436 | 0 | 0 | 0 | 0 | 0 | 0 | 4.216 |
| THYMU2000946 | 0 | 0 | 10.178 | 0 | 0 | 0 | 0 |
| THYMU2001007 | 11.703 | 0 | 0 | 0 | 0 | 0 | 0 |
| THYMU2001090 | 0 | 0 | 0 | 0 | 0 | 0 | 13.892 |
| THYMU2001381 | 0 | 0 | 47.714 | 0 | 0 | 0 | 0 |
| THYMU2001839 | 33.745 | 0 | 0 | 0 | 0 | 0 | 10.227 |
| THYMU2001926 | 0 | 0 | 0 | 0 | 0 | 0 | 12.687 |
| THYMU2002162 | 23.514 | 0 | 0 | 0 | 0 | 0 | 0 |
| THYMU2002583 | 2.236 | 0 | 0 | 0 | 0 | 0 | 2.371 |
| THYMU2002841 | 0 | 0 | 20.416 | 0 | 0 | 0 | 1.897 |
| THYMU2003012 | 1.890 | 0 | 0 | 0 | 0 | 0 | 0 |
| THYMU2003046 | 4.146 | 0 | 0 | 0 | 0 | 0 | 1.257 |
| THYMU2003419 | 0 | 0 | 0 | 0 | 0 | 0 | 8.207 |
| THYMU2003446 | 0 | 0 | 0 | 0 | 0 | 0 | 3.118 |
| THYMU2003499 | 0 | 0 | 0 | 0 | 0 | 0 | 9.853 |
| THYMU2003891 | 1.888 | 0 | 0 | 0 | 0 | 1.997 | 0 |
| THYMU2003932 | 0 | 0 | 0 | 0 | 0 | 0 | 12.644 |
| THYMU2003981 | 9.011 | 0 | 0 | 0 | 0 | 0 | 0.341 |
| THYMU2004152 | 2.142 | 0 | 0 | 0 | 0 | 0 | 0.649 |
| THYMU2004344 | 0 | 0 | 0 | 0 | 0 | 0 | 1.670 |
| THYMU2004410 | 4.133 | 0 | 0 | 0 | 0 | 0 | 8.767 |
| THYMU2005439 | 0 | 0 | 0 | 0 | 0 | 37.819 | 0 |
| THYMU2005482 | 0 | 0 | 0 | 0 | 0 | 0 | 8.043 |
| THYMU2005546 | 1.180 | 0 | 0 | 0 | 0 | 0 | 0 |
| THYMU2005980 | 0 | 0 | 0 | 0 | 0 | 0 | 10.601 |
| THYMU2006261 | 0 | 0 | 0 | 0 | 0 | 0 | 75.821 |
| THYMU2006813 | 3.413 | 0 | 0 | 0 | 0 | 0 | 1.034 |
| THYMU2007060 | 27.587 | 0 | 0 | 0 | 0 | 0 | 2.787 |
| THYMU2007065 | 0 | 0 | 28.526 | 0 | 0 | 0 | 5.301 |
| THYMU2007112 | 9.864 | 0 | 0 | 0 | 0 | 31.290 | 5.979 |
| THYMU2007146 | 0 | 0 | 0 | 0 | 0 | 0 | 70.165 |
| THYMU2007415 | 5.219 | 0 | 0 | 0 | 0 | 33.113 | 0 |
| THYMU2007467 | 0 | 0 | 56.830 | 0 | 0 | 0 | 0 |
| THYMU2007886 | 2.987 | 0 | 0 | 0 | 0 | 0 | 0 |
| THYMU2008321 | 0 | 0 | 0 | 0 | 0 | 0 | 1.890 |
| THYMU2008383 | 0 | 0 | 0 | 0 | 0 | 0 | 43.944 |
| THYMU2009658 | 0.756 | 7.780 | 2.464 | 0 | 0 | 0 | 0 |
| THYMU2010094 | 0 | 0 | 0 | 0 | 0 | 0 | 7.615 |
| THYMU2010448 | 0 | 0 | 0 | 0 | 0 | 36.228 | 3.461 |
| THYMU2012024 | 0 | 0 | 0 | 0 | 0 | 0 | 1.948 |
| THYMU2012625 | 0 | 0 | 0 | 0 | 0 | 7.107 | 0 |
| THYMU2012826 | 0 | 0 | 0 | 0 | 0 | 0 | 14.477 |
| THYMU2013136 | 1.764 | 0 | 0 | 0 | 0 | 0 | 0 |
| THYMU2013916 | 2.392 | 0 | 0 | 0 | 0 | 0 | 2.175 |
| THYMU2016523 | 0 | 0 | 0 | 0 | 0 | 0 | 21.566 |
| THYMU2017601 | 0 | 0 | 49.678 | 0 | 0 | 0 | 18.465 |
| THYMU2017831 | 0 | 0 | 0 | 0 | 0 | 0 | 43.944 |
| THYMU2017948 | 0 | 0 | 0 | 0 | 0 | 0 | 28.159 |
| THYMU2018126 | 0 | 0 | 0 | 0 | 0 | 4.978 | 0 |
| THYMU2027125 | 1.158 | 3.976 | 0 | 7.555 | 15.180 | 2.449 | 1.521 |
| THYMU2028739 | 0 | 0 | 0 | 0 | 0 | 0 | 43.944 |
| THYMU2031341 | 0 | 0 | 0 | 0 | 0 | 0 | 2.255 |
| THYMU2031368 | 0 | 0 | 0 | 0 | 96.216 | 0 | 0 |
| THYMU2032155 | 0 | 0 | 0 | 0 | 0 | 48.859 | 0 |
| THYMU2032696 | 0 | 0 | 0 | 0 | 0 | 0 | 0.687 |
| THYMU2035735 | 0 | 0 | 0 | 0 | 0 | 0 | 1.725 |
| THYMU2036058 | 0 | 0 | 0 | 0 | 0 | 0 | 43.944 |
| THYMU2039350 | 0 | 0 | 0 | 0 | 0 | 0 | 43.944 |
| THYMU3000776 | 0 | 0 | 0 | 0 | 0 | 0 | 10.200 |
| THYMU3003309 | 0 | 0 | 0 | 0 | 0 | 0 | 19.005 |
| THYMU3003865 | 0 | 0 | 0 | 0 | 0 | 0 | 82.467 |
| THYMU3008883 | 52.467 | 0 | 0 | 0 | 0 | 0 | 0 |
| THYMU3009643 | 0 | 0 | 0 | 0 | 0 | 0 | 79.673 |
| THYMU3012983 | 0 | 0 | 0 | 0 | 0 | 0 | 43.944 |
| THYMU3013386 | 0 | 0 | 5.266 | 0 | 0 | 0 | 1.957 |
| THYMU3015759 | 2.428 | 0 | 0 | 0 | 0 | 0 | 0 |
| THYMU3021586 | 0 | 0 | 0 | 0 | 0 | 0 | 8.100 |
| THYMU3032798 | 4.171 | 0 | 0 | 0 | 0 | 0 | 0 |
| THYMU3033626 | 0 | 0 | 0 | 0 | 0 | 0 | 7.348 |
| THYMU3034671 | 5.144 | 0 | 0 | 0 | 0 | 0 | 0 |
| THYMU3041428 | 0 | 0 | 0 | 0 | 0 | 0 | 0.167 |
| THYMU3047115 | 0 | 0 | 0 | 0 | 0 | 0 | 0.269 |
| TKIDN2000701 | 0 | 0 | 0 | 0 | 0 | 0 | 15.009 |
| TKIDN2005487 | 0 | 0 | 5.054 | 0 | 0 | 4.915 | 0 |
| TKIDN2015423 | 0 | 0 | 0 | 0 | 0 | 0 | 0.832 |
| TLIVE2004110 | 22.269 | 0 | 0 | 0 | 0 | 0 | 6.749 |
| TLIVE2008229 | 0 | 0 | 0 | 0 | 0 | 0 | 8.683 |
| TRACH1000030 | 0 | 0 | 0 | 0 | 0 | 0 | 0.451 |
| TRACH1000038 | 8.123 | 0 | 0 | 0 | 0 | 0 | 9.848 |
| TRACH1000063 | 0 | 0 | 0 | 0 | 0 | 14.715 | 4.218 |
| TRACH1000193 | 0 | 0 | 0 | 0 | 0 | 0 | 14.199 |
| TRACH1000205 | 0 | 0 | 0 | 0 | 0 | 0 | 2.572 |
| TRACH2000079 | 2.337 | 12.032 | 0 | 0 | 0 | 3.706 | 0 |
| TRACH2000237 | 0 | 0 | 0 | 0 | 0 | 0 | 3.515 |
| TRACH2000248 | 3.010 | 0 | 0 | 0 | 0 | 0 | 0 |
| TRACH2000306 | 12.199 | 0 | 0 | 0 | 0 | 0 | 3.697 |
| TRACH2000321 | 1.060 | 0 | 3.456 | 0 | 0 | 0 | 0.963 |
| TRACH2000359 | 0 | 0 | 20.978 | 0 | 0 | 0 | 0 |
| TRACH2000420 | 0 | 0 | 0 | 0 | 0 | 0 | 2.192 |
| TRACH2000461 | 0 | 0 | 0 | 0 | 0 | 0 | 11.208 |
| TRACH2000540 | 3.073 | 0 | 0 | 0 | 0 | 0 | 0 |
| TRACH2000702 | 0 | 0 | 0 | 0 | 0 | 0 | 2.566 |
| TRACH2000780 | 5.655 | 0 | 0 | 0 | 0 | 0 | 7.999 |
| TRACH2000862 | 0 | 0 | 0 | 0 | 0 | 39.606 | 0 |
| TRACH2000920 | 0 | 0 | 0 | 0 | 0 | 0 | 4.334 |
| TRACH2000926 | 0 | 0 | 19.627 | 0 | 0 | 19.089 | 0 |
| TRACH2000959 | 0 | 0 | 0 | 0 | 0 | 0 | 0.160 |
| TRACH2000972 | 0 | 26.327 | 4.169 | 0 | 12.565 | 0 | 0.775 |
| TRACH2001021 | 0 | 0 | 0 | 0 | 0 | 2.865 | 0 |
| TRACH2001101 | 0 | 0 | 0 | 0 | 0 | 18.186 | 0 |
| TRACH2001192 | 0 | 0 | 0 | 0 | 0 | 0 | 22.035 |
| TRACH2001249 | 0 | 0 | 0 | 0 | 0 | 0 | 59.944 |
| TRACH2001289 | 0 | 0 | 0 | 0 | 0 | 0 | 0.222 |
| TRACH2001314 | 0 | 0 | 0 | 0 | 0 | 0 | 11.948 |
| TRACH2001478 | 0 | 0 | 0 | 0 | 0 | 0 | 2.277 |
| TRACH2001607 | 2.166 | 0 | 0 | 0 | 0 | 0 | 7.222 |
| TRACH2001612 | 0 | 0 | 0 | 0 | 0 | 0 | 2.611 |
| TRACH2001810 | 1.675 | 0 | 0 | 0 | 0 | 0 | 0 |
| TRACH2002537 | 0 | 0 | 6.524 | 0 | 0 | 0 | 0.606 |
| TRACH2002664 | 0 | 0 | 10.705 | 0 | 0 | 0 | 0 |
| TRACH2002803 | 0 | 0 | 0 | 0 | 0 | 0 | 5.449 |
| TRACH2003323 | 3.839 | 0 | 0 | 0 | 0 | 0 | 1.163 |
| TRACH2004039 | 0 | 0 | 0 | 0 | 0 | 0 | 36.852 |
| TRACH2004336 | 0 | 0 | 0 | 0 | 0 | 0 | 36.852 |
| TRACH2005541 | 0 | 0 | 68.404 | 0 | 0 | 0 | 0 |
| TRACH2005800 | 2.594 | 0 | 0 | 0 | 0 | 0 | 0 |
| TRACH2005811 | 0 | 0 | 0 | 0 | 0 | 14.431 | 3.447 |
| TRACH2006378 | 0 | 0 | 0 | 0 | 0 | 0 | 5.843 |
| TRACH2006866 | 0 | 0 | 0 | 0 | 21.039 | 0 | 0 |
| TRACH2007399 | 0 | 10.463 | 0 | 0 | 0 | 0 | 0.308 |
| TRACH2007969 | 0 | 0 | 0 | 0 | 0 | 0 | 4.977 |
| TRACH2008081 | 0 | 0 | 0 | 0 | 0 | 0 | 0.835 |
| TRACH2008300 | 0 | 0 | 0 | 0 | 0 | 0 | 1.110 |
| TRACH2008472 | 6.768 | 0 | 11.037 | 0 | 0 | 0 | 4.103 |
| TRACH2008716 | 0 | 0 | 0 | 0 | 0 | 34.708 | 3.316 |
| TRACH2009107 | 0 | 0 | 0 | 0 | 0 | 85.932 | 0 |
| TRACH2009310 | 0 | 0 | 0 | 0 | 0 | 0 | 80.334 |
| TRACH2009340 | 0 | 0 | 0 | 0 | 0 | 67.720 | 12.940 |
| TRACH2009661 | 0 | 0 | 0 | 0 | 0 | 0 | 36.852 |
| TRACH2011113 | 0 | 0 | 0 | 0 | 0 | 0 | 3.086 |
| TRACH2012298 | 0 | 0 | 0 | 0 | 30.085 | 0 | 0 |
| TRACH2012376 | 0 | 0 | 0 | 0 | 0 | 18.363 | 0 |
| TRACH2012387 | 0 | 0 | 0 | 0 | 0 | 0 | 36.852 |
| TRACH2012811 | 0 | 0 | 0 | 0 | 0 | 0 | 5.096 |
| TRACH2014077 | 0 | 0 | 0 | 0 | 0 | 0 | 2.224 |
| TRACH2014124 | 2.226 | 0 | 0 | 0 | 0 | 7.062 | 0 |
| TRACH2015823 | 4.718 | 0 | 0 | 0 | 0 | 0 | 0 |
| TRACH2015824 | 0 | 0 | 16.348 | 0 | 0 | 0 | 0 |
| TRACH2018446 | 9.020 | 0 | 0 | 0 | 0 | 0 | 0 |
| TRACH2018449 | 0 | 0 | 0 | 0 | 0 | 0 | 9.911 |
| TRACH2019080 | 65.818 | 0 | 0 | 0 | 0 | 0 | 0 |
| TRACH2023299 | 0 | 0 | 0 | 0 | 0 | 0 | 4.172 |
| TRACH2025535 | 1.252 | 12.895 | 0 | 0 | 0 | 0 | 3.036 |
| TRACH3002192 | 0 | 0 | 4.387 | 0 | 0 | 0 | 2.446 |
| TRACH3003379 | 0 | 0 | 0 | 0 | 0 | 0 | 15.996 |
| TRACH3003547 | 0 | 0 | 0 | 0 | 0 | 0 | 2.764 |
| TRACH3003832 | 0 | 0 | 0 | 0 | 0 | 0 | 7.937 |
| TRACH3003872 | 5.920 | 0 | 0 | 0 | 0 | 0 | 3.588 |
| TRACH3004068 | 0 | 0 | 10.026 | 0 | 0 | 0 | 0 |
| TRACH3004721 | 0 | 0 | 0 | 0 | 0 | 0 | 5.701 |
| TRACH3005211 | 0 | 0 | 0 | 0 | 0 | 0 | 12.047 |
| TRACH3005479 | 0 | 0 | 0 | 0 | 0 | 0 | 36.852 |
| TRACH3005699 | 0 | 0 | 0 | 0 | 0 | 0 | 6.274 |
| TRACH3006717 | 0 | 0 | 0 | 0 | 0 | 0 | 4.797 |
| TRACH3007479 | 0 | 0 | 0 | 0 | 0 | 0 | 0.703 |
| TRACH3007625 | 0 | 0 | 0 | 0 | 0 | 0 | 2.305 |
| TRACH3008093 | 0 | 0 | 0 | 0 | 0 | 0 | 1.601 |
| TRACH3008508 | 41.320 | 0 | 0 | 0 | 0 | 0 | 0 |
| TRACH3008629 | 0 | 0 | 0 | 0 | 0 | 0 | 2.980 |
| TRACH3009008 | 0 | 0 | 0 | 0 | 0 | 0 | 3.202 |
| TRACH3009148 | 19.345 | 0 | 0 | 0 | 0 | 0 | 0 |
| TRACH3013043 | 0 | 0 | 0 | 0 | 0 | 0 | 53.856 |
| TRACH3016805 | 0 | 0 | 31.673 | 0 | 0 | 0 | 5.886 |
| TRACH3016992 | 0 | 0 | 0 | 0 | 0 | 0 | 46.677 |
| TRACH3019290 | 0 | 0 | 0 | 0 | 0 | 0 | 18.081 |
| TRACH3026303 | 0 | 0 | 0 | 0 | 0 | 0 | 3.664 |
| TRACH3036942 | 0 | 0 | 0 | 0 | 0 | 0 | 0.638 |
| TRACH3037067 | 0 | 35.703 | 0 | 0 | 0 | 0 | 0 |
| TSTOM2000139 | 0 | 0 | 0 | 0 | 0 | 0 | 2.734 |
| TSTOM2000315 | 0 | 0 | 0 | 0 | 0 | 0 | 11.918 |
| TSTOM2000553 | 0 | 0 | 11.859 | 0 | 0 | 0 | 0 |
| TUTER1000122 | 0 | 0 | 0 | 0 | 0 | 0 | 2.134 |
| TUTER2000904 | 0 | 0 | 0 | 0 | 0 | 0 | 3.650 |
| UMVEN1000143 | 1.771 | 0 | 0 | 0 | 0 | 0 | 0 |
| UMVEN2000133 | 1.264 | 0 | 0 | 0 | 0 | 0 | 0.383 |
| UMVEN2000152 | 0 | 0 | 0 | 0 | 0 | 0 | 0.515 |
| UMVEN2000453 | 0 | 0 | 0 | 0 | 0 | 0 | 0.341 |
| UTERU1000182 | 0 | 0 | 5.706 | 0 | 0 | 0 | 0.530 |
| UTERU1000384 | 0 | 0 | 0 | 0 | 0 | 0 | 4.659 |
| UTERU2000023 | 0 | 0 | 0 | 0 | 0 | 0 | 6.692 |
| UTERU2000095 | 3.571 | 0 | 0 | 0 | 0 | 0 | 2.164 |
| UTERU2000263 | 1.105 | 0 | 0 | 0 | 0 | 0 | 0 |
| UTERU2000332 | 0 | 0 | 0 | 0 | 0 | 0 | 3.091 |
| UTERU2000424 | 0 | 0 | 0 | 0 | 0 | 0 | 0.555 |
| UTERU2000542 | 0 | 0 | 0 | 0 | 0 | 0 | 5.902 |
| UTERU2001607 | 3.182 | 0 | 0 | 0 | 0 | 0 | 2.893 |
| UTERU2002198 | 0 | 0 | 0 | 0 | 0 | 0 | 35.404 |
| UTERU2002294 | 0 | 0 | 0 | 0 | 0 | 12.420 | 0 |
| UTERU2002410 | 0 | 0 | 8.261 | 0 | 0 | 0 | 0.384 |
| UTERU2002662 | 0 | 39.520 | 0 | 0 | 0 | 0 | 0 |
| UTERU2002841 | 0 | 0 | 0 | 0 | 0 | 0 | 35.404 |
| UTERU2002993 | 0 | 0 | 0 | 0 | 0 | 0 | 35.404 |
| UTERU2003321 | 0 | 0 | 0 | 0 | 0 | 0 | 52.294 |
| UTERU2004073 | 0 | 0 | 0 | 0 | 0 | 0 | 76.682 |
| UTERU2004197 | 8.674 | 0 | 0 | 0 | 0 | 13.757 | 2.629 |
| UTERU2004664 | 0 | 0 | 11.937 | 0 | 0 | 0 | 0 |
| UTERU2004688 | 0 | 0 | 0 | 70.393 | 0 | 0 | 0 |
| UTERU2004807 | 2.167 | 0 | 0 | 0 | 0 | 0 | 0.657 |
| UTERU2005069 | 0 | 0 | 0 | 0 | 0 | 0 | 35.404 |
| UTERU2005074 | 24.492 | 0 | 0 | 0 | 0 | 0 | 7.423 |
| UTERU2005292 | 0 | 0 | 0 | 0 | 0 | 21.304 | 0 |
| UTERU2005354 | 4.718 | 0 | 0 | 0 | 0 | 0 | 5.720 |
| UTERU2005593 | 0 | 0 | 0 | 0 | 0 | 0 | 2.935 |
| UTERU2005621 | 0 | 0 | 0 | 0 | 0 | 0 | 4.420 |
| UTERU2007444 | 0 | 0 | 0 | 0 | 0 | 0 | 35.404 |
| UTERU2008085 | 0 | 0 | 0 | 0 | 7.659 | 1.854 | 0.708 |
| UTERU2008302 | 0 | 0 | 0 | 0 | 0 | 0 | 0.873 |
| UTERU2008747 | 0 | 0 | 0 | 0 | 0 | 0 | 5.777 |
| UTERU2008938 | 5.308 | 0 | 0 | 0 | 0 | 0 | 0 |
| UTERU2008962 | 0 | 0 | 0 | 0 | 0 | 0 | 35.404 |
| UTERU2009335 | 0 | 0 | 0 | 0 | 0 | 20.751 | 1.983 |
| UTERU2009435 | 0 | 0 | 0 | 0 | 0 | 0 | 3.496 |
| UTERU2010417 | 0 | 0 | 2.218 | 6.653 | 0 | 0 | 0.206 |
| UTERU2012230 | 0 | 0 | 0 | 0 | 0 | 0 | 1.150 |
| UTERU2012286 | 5.464 | 0 | 0 | 0 | 0 | 0 | 1.656 |
| UTERU2013262 | 0 | 0 | 0 | 0 | 0 | 0 | 11.996 |
| UTERU2014024 | 0 | 0 | 0 | 0 | 0 | 0 | 16.943 |
| UTERU2014167 | 0 | 0 | 0 | 19.235 | 0 | 0 | 0 |
| UTERU2014601 | 0 | 0 | 48.719 | 0 | 0 | 0 | 0 |
| UTERU2014898 | 0 | 0 | 0 | 0 | 0 | 0 | 0.995 |
| UTERU2015653 | 1.258 | 0 | 0 | 0 | 0 | 0 | 0 |
| UTERU2016426 | 27.411 | 0 | 0 | 0 | 0 | 0 | 0 |
| UTERU2016822 | 8.670 | 0 | 0 | 0 | 0 | 0 | 0 |
| UTERU2017623 | 0 | 0 | 0 | 0 | 0 | 0 | 35.404 |
| UTERU2017632 | 0 | 0 | 0 | 0 | 0 | 0 | 35.404 |
| UTERU2019096 | 4.968 | 0 | 0 | 0 | 0 | 0 | 1.506 |
| UTERU2020226 | 0 | 0 | 0 | 0 | 0 | 0 | 21.509 |
| UTERU2023175 | 0 | 0 | 0 | 0 | 0 | 10.186 | 0 |
| UTERU2025301 | 0 | 0 | 0 | 91.731 | 0 | 0 | 0 |
| UTERU2030213 | 0 | 0 | 0 | 0 | 0 | 0 | 16.103 |
| UTERU3000844 | 0 | 0 | 0 | 0 | 0 | 0 | 35.404 |
| UTERU3003660 | 0 | 0 | 0 | 0 | 0 | 0 | 4.813 |
| UTERU3005159 | 0 | 0 | 0 | 0 | 0 | 0 | 22.803 |
| UTERU3005767 | 0 | 0 | 0 | 0 | 0 | 8.143 | 0 |
| UTERU3009871 | 0 | 0 | 0 | 0 | 0 | 0 | 23.683 |
| UTERU3010409 | 0 | 0 | 0 | 0 | 0 | 0 | 2.262 |
| UTERU3015011 | 0 | 0 | 0 | 0 | 0 | 48.286 | 0 |
| UTERU3017995 | 0 | 0 | 0 | 0 | 0 | 74.828 | 0 |

[2922] Genes whose expression levels were negligibly low in each of the above-described -libraries are shown with their clone names below.

[2923] 3NB691000018, 3NB691000085, 3NB691000113, 3NB691000129, 3NB691000191, 3NB692000012, 3NB692000029, 3NB692000102, 3NB692000154, 3NB692000276, 3NB692000305, 3NB692000429, 3NB692000484, 3NB692000973, 3NB692001002, 3NB692001022, 3NB692001034, 3NB692001040, 3NB692001123, 3NB692001267, 3NB692.001288, 3NB692001339, 3NB692001349, 3NB692001408, 3NB692001433, 3NB692001459, 3NB692001471, 3NB692001501, 3NB692001507, 3NB692001519, 3NB692001520, 3NB692001528, 3NB692001538, 3NB692001548, 3NB692001637, 3NB692001719, 3NB692001853, 3NB692001861, 3NB692002051, 3NB692002365, 3NB692002685, 3NB692002806, 3NB692003538, 3NB692004045, 3NB692004724, 3NB692005439, 3NB692006952, 3NB692008729, ACTVT2000380, ADIPS1000064,

[2924] ADIPS2000069, ADIPS2000088, ADIPS2000245, ADIPS2000425, ADRGL1000002, ADRGL1000033, ADRGL1000038, ADRGL1000067, ADRGL1000111, ADRGL1000144, ADRGL1000147, ADRGL1000160, ADRGL1000165, ADRGL1000182, ADRGL2000056, ADRGL2000064, ADRGL2000074, ADRGL2000085, ADRGL2000142, ADRGL2000172, ADRGL2000248, ADRGL2000261, ADRGL2000323, ADRGL2000353, ADRGL2000384, ADRGL2000428, ADRGL2000636, ADRGL2000644, ADRGL2000968, ADRGL2001119, ADRGL2001229, ADRGL2001287, ADRGL2001301, ADRGL2001354, ADRGL2001554, ADRGL2001651, ADRGL2001756, ADRGL2001830, ADRGL2001836, ADRGL2001854, ADRGL2002013, ADRGL2002029, ADRGL2002191, ADRGL2002260, ADRGL2002392, ADRGL2002477, ADRGL2002679, ADRGL2002753, ADRGL2002857, ADRGL2003017,

[2925] ADRGL2003329, ADRGL2003552, ADRGL2003585, ADRGL2003638, ADRGL2003684, ADRGL2003773, ADRGL2003785, ADRGL2004031, ADRGL2004077, ADRGL2004451, ADRGL2004459, ADRGL2004676, ADRGL2004708, ADRGL2004724, ADRGL2004749, ADRGL2004770, ADRGL2004777, ADRGL2004833, ADRGL2005336, ADRGL2005564, ADRGL2005756, ADRGL2005838, ADRGL2005926, ADRGL2005961, ADRGL2006034, ADRGL2006124, ADRGL2006177, ADRGL2006193, ADRGL2006377, ADRGL2006677, ADRGL2006732, ADRGL2006767, ADRGL2006817, ADRGL2006846, ADRGL2006886, ADRGL2007080, ADRGL2007125, ADRGL2007283, ADRGL2007313, ADRGL2007357, ADRGL2007636, ADRGL2007651, ADRGL2007810, ADRGL2007877, ADRGL2007906, ADRGL2007974, ADRGL2008023, ADRGL2008331, ADRGL2008337, ADRGL2008535,

[2926] ADRGL2008966, ADRGL2009146, ADRGL2009324, ADRGL2009489, ADRGL2009533, ADRGL2009691, ADRGL2009755, ADRGL2010152, ADRGL2010315, ADRGL2010594, ADRGL2010860, ADRGL2010974, ADRGL2011190, ADRGL2011330, ADRGL2012038, ADRGL2012179, AHMSC1000138, ASTRO1000009, ASTRO1000018, ASTRO1000029, ASTRO1000096, ASTRO1000165, ASTRO2000011, ASTRO2000095, ASTRO2000191, ASTRO2000278, ASTRO2000372, ASTRO2000381, ASTRO2000403, ASTRO2000417, ASTRO2000480, ASTRO2000482, ASTRO2000533, ASTRO2000653, ASTRO2000662, ASTRO2000725, ASTRO2000801, ASTRO2000914, ASTRO2001001, ASTRO2001008, ASTRO2001088, ASTRO2001107, ASTRO2001122, ASTRO2001227, ASTRO2001249, ASTRO2001480, ASTRO2002035, ASTRO2002064, ASTRO2002202, ASTRO2002571,

[2927] ASTRO2002632, ASTRO2002659, ASTRO2002693, ASTRO2002733, ASTRO2002743, ASTRO2003461, ASTRO2003574, ASTRO2003581, ASTRO2003740, ASTRO2003925, ASTRO2003960, ASTRO2004032, ASTRO2004051, ASTRO2004177, ASTRO2004217, ASTRO2004297, ASTRO2004584, ASTRO2004751, ASTRO2004877, ASTRO2004974, ASTRO2005008, ASTRO2005081, ASTRO2005096, ASTRO2005242, ASTRO2005273, ASTRO2005343, ASTRO2005413, ASTRO2005423, ASTRO2005553, ASTRO2005557, ASTRO2005575, ASTRO2005593, ASTRO2005726, ASTRO2005863, ASTRO2005896, ASTRO2005902, ASTRO2006356, ASTRO2006475, ASTRO2006732, ASTRO2006747, ASTRO2006920, ASTRO2006952, ASTRO2007221, ASTRO2007377, ASTRO2007515, ASTRO2007578, ASTRO2007643, ASTRO2007666, ASTRO2007956, ASTRO2007962,

[2928] ASTRO2008040, ASTRO2008216, ASTRO2008239, ASTRO2008409, ASTRO2008425, ASTRO2008508, ASTRO2008777, ASTRO2008895, ASTRO2008960, ASTRO2008972, ASTRO2009068, ASTRO2009118, ASTRO2009177, ASTRO2009333, ASTRO2009458, ASTRO2009526, ASTRO2009879, ASTRO2010072, ASTRO2010582, ASTRO2010615, ASTRO2010799, ASTRO2010962, ASTRO2010996, ASTRO2011149, ASTRO2011422, ASTRO2011426, ASTRO2011437, ASTRO2011461, ASTRO2011834, ASTRO2011893, ASTRO2013124, ASTRO2013671, ASTRO2013802, ASTRO2014135, ASTRO2014174, ASTRO2014211, ASTRO2014363, ASTRO2014392, ASTRO2014498, ASTRO2014561, ASTRO2014863, ASTRO2014923, ASTRO2014961, ASTRO2015162, ASTRO2015185, ASTRO2015328, ASTRO2015987, ASTRO2016044, ASTRO2016148, ASTRO2016681,

[2929] ASTRO2016847, ASTRO2016892, ASTRO2017348, ASTRO2017627, ASTRO2018373, ASTRO2019039, ASTRO2019171, ASTRO3000154, ASTRO3000172, ASTRO3000177, ASTRO3000301, ASTRO3000474, ASTRO3000482, BEAST2000454, BGGI11000285, BGGI12000022, BGGI12000067, BGGI12000161, BGGI12000533, BGGI12000544, BGGI12000684, BGGI12000693, BGGI12001002, BGGI12001097, BGGI12001241, BGGI12001247, BGGI12001682, BGGI12001714, BLADE1000176, BLADE2000181, BLADE2000256, BLADE2000340, BLADE2000389, BLADE2000463, BLADE2000492, BLADE2000579, BLADE2000640, BLADE2000866, BLADE2000938, BLADE2001031, BLADE2001133, BLADE2001138, BLADE2001141, BLADE2001371, BLADE2001458, BLADE2001575, BLADE2001753, BLADE2001935, BLADE2001940, BLADE2001987,

[2930] BLADE2002073, BLADE2002310, BLADE2002738, BLADE2002744, BLADE2002782, BLADE2002947, BLADE2002972, BLADE2003474, BLADE2003916, BLADE2004089, BLADE2004345, BLADE2004389, BLADE2004462, BLADE2004628, BLADE2004670, BLADE2004722, BLADE2004849, BLADE2005036, BLADE2005038, BLADE2005229, BLADE2005459, BLADE2005792, BLADE2006043, BLADE2006412, BLADE2006415, BLADE2006607, BLADE2006826, BLADE2006849, BLADE2006947, BLADE2007033, BLADE2007043, BLADE2007589, BLADE2007666, BLADE2007722, BLADE2007735, BLADE2007744, BLADE2007799, BLADE2007923, BLADE2007935, BLADE2007958, BLADE2008281, BLADE2008398, BLADE2008454, BLADE2008461, BLADE2008479, BLADE2008539, BLADE2008809, BLADE2008995, BLADE2009452, BLADE2009479,

[2931] BLADE2009593, BNGH41000098, BNGH41000104, BNGH41000118, BNGH41000137, BNGH41000153, BNGH41000169, BNGH41000177, BNGH41000216, BNGH42000130, BNGH42000132, BNGH42000405, BNGH42000532, BNGH42000675, BNGH42000791, BNGH42000815, BNGH42000994, BNGH42001724, BNGH42002168, BNGH42002244, BNGH42002487, BNGH42002489, BNGH42003529, BNGH42003570, BNGH42003641, BNGH42004076, BNGH42004291, BNGH42004538, BNGH42005017, BNGH42005235, BNGH42005504, BNGH42006226, BNGH42006234, BNGH42007366, BNGH42007594, BNGH42007788, BNGH42008199, BNGH42008510, BNGH42008603, BNGH42008649, BNGH42008832, BNGH42008850, BNGH42008943, BNGH42009021, BRACE1000020, BRACE1000042, BRACE1000047, BRACE1000051, BRACE1000065, BRACE1000070,

[2932] BRACE1000084, BRACE1000087, BRACE1000092, BRACE1000093, BRACE1000101, BRACE1000114, BRACE1000124, BRACE1000132, BRACE1000166, BRACE1000169, BRACE1000186, BRACE1000187, BRACE1000239, BRACE1000258, BRACE1000451, BRACE1000475, BRACE1000572, BRACE2000061, BRACE2000078, BRACE2000100, BRACE2000109, BRACE2000141, BRACE2000148, BRACE2000232, BRACE2000245, BRACE2000256, BRACE2000266, BRACE2000267, BRACE2000280, BRACE2000300, BRACE2000307, BRACE2000331, BRACE2000332, BRACE2000351, BRACE2000368, BRACE2000392, BRACE2000441, BRACE2000487, BRACE2000489, BRACE2000505, BRACE2000525, BRACE2000526, BRACE2000531, BRACE2000545, BRACE2000553, BRACE2000565, BRACE2000640, BRACE2000650, BRACE2000677, BRACE2000698,

[2933] BRACE2000718, BRACE2000733, BRACE2000743, BRACE2000750, BRACE2000753, BRACE2000815, BRACE2000864, BRACE2000905, BRACE2000936, BRACE2000947, BRACE2000965, BRACE2000969, BRACE2000988, BRACE2001017, BRACE2001065, BRACE2001070, BRACE2001094, BRACE2001151, BRACE2001188, BRACE2001191, BRACE2001197, BRACE2001236, BRACE2001239, BRACE2001269, BRACE2001312, BRACE2001313, BRACE2001330, BRACE2001340, BRACE2001352, BRACE2001353, BRACE2001374, BRACE2001375, BRACE2001423, BRACE2001424, BRACE2001445, BRACE2001453, BRACE2001455, BRACE2001492, BRACE2001496, BRACE2001508, BRACE2001534, BRACE2001543, BRACE2001588, BRACE2001607, BRACE2001626, BRACE2001673, BRACE2001677, BRACE2001705, BRACE2001709, BRACE2001726,

[2934] BRACE2001733, BRACE2001737, BRACE2001742, BRACE2001777, BRACE2001779, BRACE2001834, BRACE2001855, BRACE2001859, BRACE2001865, BRACE2001872, BRACE2001881, BRACE2001898, BRACE2001923, BRACE2001942, BRACE2001944, BRACE2001954, BRACE2001971, BRACE2001972, BRACE2001973, BRACE2002026, BRACE2002034, BRACE2002081, BRACE2002139, BRACE2002142, BRACE2002151, BRACE2002157, BRACE2002176, BRACE2002206, BRACE2002227, BRACE2002260, BRACE2002297, BRACE2002304, BRACE2002394, BRACE2002409, BRACE2002431, BRACE2002444, BRACE2002458, BRACE2002467, BRACE2002468, BRACE2002478, BRACE2002495, BRACE2002582, BRACE2002585, BRACE2002589, BRACE2002590, BRACE2002606, BRACE2002613, BRACE2002614, BRACE2002617, BRACE2002623,

[2935] BRACE2002635, BRACE2002676, BRACE2002682, BRACE2002685, BRACE2002695, BRACE2002707, BRACE2002736, BRACE2002752, BRACE2002755, BRACE2002762, BRACE2002772, BRACE2002792, BRACE2002796, BRACE2002803, BRACE2002812, BRACE2002834, BRACE2002849, BRACE2002857, BRACE2002860, BRACE2002884, BRACE2002896, BRACE2002948, BRACE2003037, BRACE2003078, BRACE2003097, BRACE2003110, BRACE2003168, BRACE2003199, BRACE2003210, BRACE2003217, BRACE2003254, BRACE2003269, BRACE2003285, BRACE2003304, BRACE2003319, BRACE2003398, BRACE2003420, BRACE2003428, BRACE2003431, BRACE2003512, BRACE2003516, BRACE2003539, BRACE2003540, BRACE2003594, BRACE2003598, BRACE2003609, BRACE2003614, BRACE2003639, BRACE2003700, BRACE2003713,

[2936] BRACE2003766, BRACE2003785, BRACE2003788, BRACE2003800, BRACE2003802, BRACE2003825, BRACE2003845, BRACE2003847, BRACE2003848, BRACE2003873, BRACE2003885, BRACE2003887, BRACE2003905, BRACE2003928, BRACE2003944, BRACE2003954, BRACE2003982, BRACE2003987, BRACE2005034, BRACE2005047, BRACE2005063, BRACE2005083, BRACE2005099, BRACE2005118, BRACE2005124, BRACE2005138, BRACE2005160, BRACE2005169, BRACE2005189, BRACE2005193, BRACE2005196, BRACE2005198, BRACE2005216, BRACE2005243, BRACE2005251, BRACE2005253, BRACE2005290, BRACE2005298, BRACE2005328, BRACE2005329, BRACE2005337, BRACE2005348, BRACE2005363, BRACE2005395, BRACE2005408, BRACE2005448, BRACE2005450, BRACE2005453, BRACE2005457, BRACE2005460,

[2937] BRACE2005489, BRACE2005518, BRACE2005556, BRACE2005562, BRACE2005624, BRACE2005642, BRACE2005661, BRACE2005667, BRACE2005681, BRACE2005719, BRACE2005731, BRACE2005742, BRACE2005762, BRACE2005773, BRACE2005787, BRACE2005795, BRACE2005800, BRACE2005858, BRACE2005869, BRACE2005875, BRACE2005881, BRACE2005898, BRACE2005904, BRACE2005906, BRACE2005907, BRACE2005911, BRACE2005937, BRACE2005949, BRACE2005981, BRACE2005991, BRACE2006055, BRACE2006075, BRACE2006084, BRACE2006089, BRACE2006102, BRACE2006122, BRACE2006137, BRACE2006143, BRACE2006162, BRACE2006167, BRACE2006174, BRACE2006240, BRACE2006245, BRACE2006249, BRACE2006258, BRACE2006264, BRACE2006274, BRACE2006281, BRACE2006298, BRACE2006344,

[2938] BRACE2006354, BRACE2006363, BRACE2006378, BRACE2006380, BRACE2006393, BRACE2006413, BRACE2006417, BRACE2006453, BRACE2006459, BRACE2006488, BRACE2006534, BRACE2006537, BRACE2006540, BRACE2006564, BRACE2006587, BRACE2006598, BRACE2006636, BRACE2006685, BRACE2006703, BRACE2006743, BRACE2006753, BRACE2006783, BRACE2006821, BRACE2006833, BRACE2006871, BRACE2006909, BRACE2006911, BRACE2006924, BRACE2006935, BRACE2006937, BRACE2006944, BRACE2006951, BRACE2006982, BRACE2006986, BRACE2007013, BRACE2007068, BRACE2007087, BRACE2007138, BRACE2007174, BRACE2007197, BRACE2007201, BRACE2007203, BRACE2007232, BRACE2007254, BRACE2007262, BRACE2007274, BRACE2007281, BRACE2007295, BRACE2007358, BRACE2007396,

[2939] BRACE2007398, BRACE2007411, BRACE2007447, BRACE2007477, BRACE2007502, BRACE2007503, BRACE2007522, BRACE2007527, BRACE2007538, BRACE2007563, BRACE2007577, BRACE2007621, BRACE2007640, BRACE2007641, BRACE2007646, BRACE2007663, BRACE2007671, BRACE2007682, BRACE2007685, BRACE2007727, BRACE2007749, BRACE2007760, BRACE2007761, BRACE2007764, BRACE2007767, BRACE2007768, BRACE2007769, BRACE2007784, BRACE2007786, BRACE2007798, BRACE2007799, BRACE2007832, BRACE2007836, BRACE2007868, BRACE2007882, BRACE2007888, BRACE2007902, BRACE2007920, BRACE2007937, BRACE2007944, BRACE2007952, BRACE2008008, BRACE2008015, BRACE2008021, BRACE2008097, BRACE2008102, BRACE2008114, BRACE2008144, BRACE2008172, BRACE2008216,

[2940] BRACE2008218, BRACE2008251, BRACE2008276, BRACE2008295, BRACE2008308, BRACE2008336, BRACE2008361, BRACE2008380, BRACE2008401, BRACE2008410, BRACE2008420, BRACE2008443, BRACE2008473, BRACE2008480, BRACE2008488, BRACE2008495, BRACE2008500, BRACE2008553, BRACE2008594, BRACE2008604, BRACE2008615, BRACE2008622, BRACE2008629, BRACE2008655, BRACE2008656, BRACE2008708, BRACE2008710, BRACE2008754, BRACE2008797, BRACE2008847, BRACE2008857, BRACE2008861, BRACE2008867, BRACE2008881, BRACE2008883, BRACE2008917, BRACE2008919, BRACE2008941, BRACE2008948, BRACE2008960, BRACE2008999, BRACE2009014, BRACE2009016, BRACE2009031, BRACE2009053, BRACE2009122, BRACE2009131, BRACE2009185, BRACE2009188, BRACE2009212,

[2941] BRACE2009221, BRACE2009235, BRACE2009238, BRACE2009255, BRACE2009270, BRACE2009272, BRACE2009274, BRACE2009275, BRACE2009293, BRACE2009311, BRACE2009318, BRACE2009323, BRACE2009366, BRACE2009421, BRACE2009428, BRACE2009434, BRACE2009437, BRACE2009483, BRACE2009533, BRACE2009566, BRACE2009591, BRACE2009620, BRACE2009654, BRACE2009721, BRACE2009732, BRACE2009754, BRACE2009828, BRACE2009886, BRACE2009907, BRACE2009957, BRACE2010170, BRACE2010171, BRACE2010203, BRACE2010208, BRACE2010336, BRACE2010348, BRACE2010440, BRACE2010444, BRACE2010477, BRACE2010489, BRACE2010535, BRACE2010550, BRACE2010598, BRACE2010632, BRACE2010642, BRACE2010651, BRACE2010684, BRACE2010753, BRACE2010813, BRACE2010828,

[2942] BRACE2010837, BRACE2010888, BRACE2010937, BRACE2010983, BRACE2011007, BRACE2011025, BRACE2011183, BRACE2011199, BRACE2011265, BRACE2011389, BRACE2011478, BRACE2011545, BRACE2011592, BRACE2011611, BRACE2011646, BRACE2011677, BRACE2011703, BRACE2011747, BRACE2011838, BRACE2011892, BRACE2011904, BRACE2011947, BRACE2012061, BRACE2012062, BRACE2012185, BRACE2012222, BRACE2012232, BRACE2012291, BRACE2012317, BRACE2012510, BRACE2012625, BRACE2012653, BRACE2012833, BRACE2012838, BRACE2012936, BRACE2012947, BRACE2013009, BRACE2013010, BRACE2013126, BRACE2013132, BRACE2013149, BRACE2013369, BRACE2013806, BRACE2013855, BRACE2013911, BRACE2014108, BRACE2014161, BRACE2014232, BRACE2014257, BRACE2014268,

[2943] BRACE2014306, BRACE2014475, BRACE2014657, BRACE2014746, BRACE2014780, BRACE2014818, BRACE2014821, BRACE2014824, BRACE2014850, BRACE2014854, BRACE2015031, BRACE2015058, BRACE2015132, BRACE2015262, BRACE2015270, BRACE2015314, BRACE2015352, BRACE2015368, BRACE2015412, BRACE2015436, BRACE2015741, BRACE2015756, BRACE2015969, BRACE2015995, BRACE2016058, BRACE2016194, BRACE2016315, BRACE2016325, BRACE2016335, BRACE2016366, BRACE2016465, BRACE2016516, BRACE2016583, BRACE2016708, BRACE2016821, BRACE2016896, BRACE2016981, BRACE2017108, BRACE2017124, BRACE2017298, BRACE2017359, BRACE2017410, BRACE2017438, BRACE2017580, BRACE2017587, BRACE2017720, BRACE2017844, BRACE2017872, BRACE2017929, BRACE2017934,

[2944] BRACE2017985, BRACE2017992, BRACE2018337, BRACE2018443, BRACE2018448, BRACE2018568, BRACE2018700, BRACE2018727, BRACE2018759, BRACE2018762, BRACE2018782, BRACE2019004, BRACE2019044, BRACE2019147, BRACE2019244, BRACE2019258, BRACE2019327, BRACE2019348, BRACE2019371, BRACE2019467, BRACE2019510, BRACE2019519, BRACE2019528, BRACE2019618, BRACE2019696, BRACE2019703, BRACE2019843, BRACE2019865, BRACE2019872, BRACE2019877, BRACE2020028, BRACE2020077, BRACE2020097, BRACE2020157, BRACE2020278, BRACE2020358, BRACE2020467, BRACE2020584, BRACE2020652, BRACE2020709, BRACE2020742, BRACE2020756, BRACE2020863, BRACE2020982, BRACE2021148, BRACE2021245, BRACE2021254, BRACE2021264, BRACE2021344, BRACE2021433,

[2945] BRACE2021478, BRACE2021541, BRACE2021670, BRACE2021695, BRACE2021708, BRACE2021721, BRACE2021932, BRACE2021936, BRACE2022030, BRACE2022158, BRACE2022196, BRACE2022270, BRACE2022328, BRACE2022394, BRACE2022435, BRACE2022448, BRACE2022450, BRACE2022549, BRACE2022633, BRACE2022693, BRACE2022848, BRACE2022928, BRACE2022990, BRACE2023069, BRACE2023070, BRACE2023223, BRACE2023268, BRACE2023284, BRACE2023404, BRACE2023451, BRACE2023540, BRACE2023633, BRACE2023744, BRACE2023800, BRACE2023801, BRACE2024074, BRACE2024222, BRACE2024610, BRACE2024781, BRACE2024826, BRACE2025018, BRACE2025316, BRACE2025333, BRACE2025452, BRACE2025492, BRACE2025710, BRACE2025796, BRACE2025992, BRACE2026054, BRACE2026141,

[2946] BRACE2026142, BRACE2026293, BRACE2026294, BRACE2026404, BRACE2026675, BRACE2026725, BRACE2026836, BRACE2026920, BRACE2026971, BRACE2027018, BRACE2027221, BRACE2027258, BRACE2027312, BRACE2027382, BRACE2027389, BRACE2027408, BRACE2027643, BRACE2027767, BRACE2027770, BRACE2027879, BRACE2027896, BRACE2027970, BRACE2028171, BRACE2028392, BRACE2028410, BRACE2028636, BRACE2028741, BRACE2028956, BRACE2028970, BRACE2029112, BRACE2029356, BRACE2029396, BRACE2029581, BRACE2029644, BRACE2029849, BRACE2030039, BRACE2030096, BRACE2030323, BRACE2030326, BRACE2030345, BRACE2030736, BRACE2030883, BRACE2030884, BRACE2031154, BRACE2031232, BRACE2031527, BRACE2031531, BRACE2031553, BRACE2031899, BRACE2032044,

[2947] BRACE2032090, BRACE2032134, BRACE2032148, BRACE2032182, BRACE2032329, BRACE2032385, BRACE2032436, BRACE2032502, BRACE2032538, BRACE2032584, BRACE2032823, BRACE2033128, BRACE2033394, BRACE2033478, BRACE2033720, BRACE2033786, BRACE2034434, BRACE2034523, BRACE2034616, BRACE2034622, BRACE2034870, BRACE2035003, BRACE2035120, BRACE2035124, BRACE2035191, BRACE2035278, BRACE2035381, BRACE2035441, BRACE2035485, BRACE2036005, BRACE2036096, BRACE2036743, BRACE2036830, BRACE2036834, BRACE2036900, BRACE2037132, BRACE2037294, BRACE2037295, BRACE2037299, BRACE2037310, BRACE2037431, BRACE2037692, BRACE2037847, BRACE2038114, BRACE2038271, BRACE2038329, BRACE2038492, BRACE2038551, BRACE2038618, BRACE2039009,

[2948] BRACE2039128, BRACE2039170, BRACE2039249, BRACE2039286, BRACE2039297, BRACE2039327, BRACE2039362, BRACE2039475, BRACE2039600, BRACE2039607, BRACE2039734, BRACE2039823, BRACE2039832, BRACE2039893, BRACE2039986, BRACE2040138, BRACE2040325, BRACE2040514, BRACE2040640, BRACE2040987, BRACE2041009, BRACE2041095, BRACE2041200, BRACE2041264, BRACE2041890, BRACE2041898, BRACE2042394, BRACE2042398, BRACE2042550, BRACE2042620, BRACE2042628, BRACE2042873, BRACE2043036, BRACE2043105, BRACE2043248, BRACE2043349, BRACE2043774, BRACE2043942, BRACE2044057, BRACE2044263, BRACE2044286, BRACE2044304, BRACE2044473, BRACE2044510, BRACE2044640, BRACE2044816, BRACE2044946, BRACE2044949, BRACE2045300, BRACE2045428,

[2949] BRACE2045445, BRACE2045596, BRACE2045772, BRACE2045947, BRACE2045954, BRACE2046251, BRACE2046295, BRACE2046976, BRACE2047011, BRACE2047232, BRACE2047350, BRACE2047377, BRACE2047385, BRACE2047492, BRACE2047558, BRACE2047573, BRACE2047835, BRACE2047893, BRACE2047975, BRACE3000071, BRACE3000404, BRACE3000520, BRACE3000697, BRACE3000840, BRACE3001002, BRACE3001058, BRACE3001066, BRACE3001113, BRACE3001217, BRACE3001299, BRACE3001384, BRACE3001391, BRACE3001403, BRACE3001595, BRACE3001754, BRACE3001948, BRACE3001973, BRACE3002184, BRACE3002298, BRACE3002344, BRACE3002390, BRACE3002420, BRACE3002508, BRACE3002541, BRACE3002756, BRACE3003004, BRACE3003026, BRACE3003053, BRACE3003192, BRACE3003413,

[2950] BRACE3003595, BRACE3003698, BRACE3003866, BRACE3003920, BRACE3004046, BRACE3004058, BRACE3004113, BRACE3004358, BRACE3004371, BRACE3004435, BRACE3004477, BRACE3004767, BRACE3004772, BRACE3004783, BRACE3004862, BRACE3004880, BRACE3004887, BRACE3004981, BRACE3004996, BRACE3004998, BRACE3005103, BRACE3005127, BRACE3005145, BRACE3005217, BRACE3005225, BRACE3005430, BRACE3005760, BRACE3005870, BRACE3005903, BRACE3005989, BRACE3006113, BRACE3006185, BRACE3006226, BRACE3006462, BRACE3006463, BRACE3006872, BRACE3006917, BRACE3007084, BRACE3007085, BRACE3007258, BRACE3007322, BRACE3007472, BRACE3007480, BRACE3007559, BRACE3007625, BRACE3007642, BRACE3007649, BRACE3007767, BRACE3007869, BRACE3008036,

[2951] BRACE3008066, BRACE3008092, BRACE3008095, BRACE3008137, BRACE3008255, BRACE3008337, BRACE3008384, BRACE3008720, BRACE3008772, BRACE3009044, BRACE3009075, BRACE3009090, BRACE3009127, BRACE3009197, BRACE3009265, BRACE3009297, BRACE3009377, BRACE3009392, BRACE3009539, BRACE3009574, BRACE3009701, BRACE3009708, BRACE3009724, BRACE3009993, BRACE3010076, BRACE3010079, BRACE3010086, BRACE3010221, BRACE3010283, BRACE3010315, BRACE3010397, BRACE3010416, BRACE3010435, BRACE3010702, BRACE3010862, BRACE3011271, BRACE3011421, BRACE3011447, BRACE3011505, BRACE3011634, BRACE3011774, BRACE3012357, BRACE3012574, BRACE3012806, BRACE3012930, BRACE3013119, BRACE3013418, BRACE3013576, BRACE3013740, BRACE3013780,

[2952] BRACE3013874, BRACE3013936, BRACE3013986, BRACE3014005, BRACE3014068, BRACE3014231, BRACE3014290, BRACE3014317, BRACE3014523, BRACE3014714, BRACE3014807, BRACE3014942, BRACE3015090, BRACE3015121, BRACE3015262, BRACE3015521, BRACE3015808, BRACE3015829, BRACE3015894, BRACE3015898, BRACE3016020, BRACE3016122, BRACE3016167, BRACE3016170, BRACE3016580, BRACE3016788, BRACE3016810, BRACE3016862, BRACE3017083, BRACE3017253, BRACE3018083, BRACE3018308, BRACE3018963, BRACE3019055, BRACE3019071, BRACE3019084, BRACE3019570, BRACE3019611, BRACE3019817, BRACE3019828, BRACE3020151, BRACE3020194, BRACE3020286, BRACE3020356, BRACE3020594, BRACE3020669, BRACE3020671, BRACE3020890, BRACE3021148, BRACE3021517,

[2953] BRACE3021805, BRACE3022051, BRACE3022303, BRACE3022312, BRACE3022340, BRACE3022847, BRACE3023604, BRACE3023912, BRACE3024073, BRACE3024359, BRACE3024379, BRACE3024444, BRACE3024497, BRACE3024537, BRACE3024659, BRACE3024662, BRACE3024879, BRACE3025153, BRACE3025302, BRACE3025457, BRACE3025531, BRACE3025627, BRACE3025630, BRACE3025719, BRACE3026008, BRACE3026075, BRACE3026161, BRACE3026290, BRACE3026345, BRACE3026456, BRACE3026735, BRACE3026802, BRACE3026844, BRACE3026947, BRACE3026993, BRACE3027242, BRACE3027256, BRACE3027326, BRACE3027478, BRACE3027480, BRACE3027931, BRACE3027976, BRACE3028214, BRACE3028241, BRACE3028360, BRACE3028998, BRACE3029005, BRACE3029021, BRACE3029205, BRACE3029447,

[2954] BRACE3030057, BRACE3030103, BRACE3030538, BRACE3030748, BRACE3030866, BRACE3031161, BRACE3031184, BRACE3031185, BRACE3031315, BRACE3031372, BRACE3031579, BRACE3031728, BRACE3031838, BRACE3031843, BRACE3032427, BRACE3032455, BRACE3032537, BRACE3032538, BRACE3032631, BRACE3032771, BRACE3032980, BRACE3032983, BRACE3033525, BRACE3034159, BRACE3034183, BRACE3034389, BRACE3034964, BRACE3034993, BRACE3035168, BRACE3035227, BRACE3036156, BRACE3036271, BRACE3037612, BRACE3037637, BRACE3037803, BRACE3038012, BRACE3038030, BRACE3038569, BRACE3038570, BRACE3038687, BRACE3038760, BRACE3039288, BRACE3039358, BRACE3039378, BRACE3039454, BRACE3040012, BRACE3040239, BRACE3040504, BRACE3040644, BRACE3040856,

[2955] BRACE3040863, BRACE3041059, BRACE3041162, BRACE3041827, BRACE3042046, BRACE3042210, BRACE3042326, BRACE3042409, BRACE3042432, BRACE3042594, BRACE3043597, BRACE3044090, BRACE3044172, BRACE3044247, BRACE3044377, BRACE3044389, BRACE3044495, BRACE3045011, BRACE3045033, BRACE3045078, BRACE3045145, BRACE3045424, BRACE3045708, BRACE3046049, BRACE3046152, BRACE3046294, BRACE3046450, BRACE3046466, BRACE3046491, BRACE3046609, BRACE3046762, BRACE3046837, BRACE3046855, BRACE3046966, BRACE3047018, BRACE3047482, BRACE3047801, BRALZ1000047, BRALZ1000103, BRALZ2000189, BRALZ2000263, BRALZ2000988, BRALZ2001038, BRALZ2001279, BRALZ2001350, BRALZ2001445, BRALZ2001559, BRALZ2001743, BRALZ2001834, BRALZ2002174,

[2956] BRALZ2002418, BRALZ2002477, BRALZ2003119, BRALZ2003330, BRALZ2003453, BRALZ2003525, BRALZ2004397, BRALZ2005467, BRALZ2005471, BRALZ2005888, BRALZ2005950, BRALZ2005992, BRALZ2006288, BRALZ2006474, BRALZ2006560, BRALZ2006734, BRALZ2006800, BRALZ2006976, BRALZ2007376, BRALZ2007545, BRALZ2007576, BRALZ2007661, BRALZ2007790, BRALZ2007793, BRALZ2007952, BRALZ2008031, BRALZ2008166, BRALZ2008462, BRALZ2008617, BRALZ2008696, BRALZ2008763, BRALZ2008869, BRALZ2008930, BRALZ2009446, BRALZ2009482, BRALZ2009486, BRALZ2010186, BRALZ2010842, BRALZ2011337, BRALZ2011796, BRALZ2011880, BRALZ2012050, BRALZ2012183, BRALZ2012848, BRALZ2013621, BRALZ2013690, BRALZ2014054, BRALZ2014316, BRALZ2014484, BRALZ2014951,

[2957] BRALZ2015168, BRALZ2015811, BRALZ2016085, BRALZ2016498, BRALZ2017359, BRALZ2017531, BRALZ2017607, BRALZ2017620, BRALZ2017844, BRALZ2018342, BRALZ2018492, BRALZ2019047, BRAMY1000095, BRAMY1000098, BRAMY1000130, BRAMY1000157, BRAMY1000173, BRAMY2000021, BRAMY2000025, BRAMY2000052, BRAMY2000076, BRAMY2000086, BRAMY2000151, BRAMY2000181, BRAMY2000196, BRAMY2000231, BRAMY2000277, BRAMY2000388, BRAMY2000411, BRAMY2000508, BRAMY2000562, BRAMY2000653, BRAMY2000814, BRAMY2000946, BRAMY2000981, BRAMY2000987, BRAMY2001068, BRAMY2001114, BRAMY2001203, BRAMY2001282, BRAMY2001367, BRAMY2001427, BRAMY2001473, BRAMY2001678, BRAMY2002005, BRAMY2002044, BRAMY2002072, BRAMY2002158, BRAMY2002311, BRAMY2002339,

[2958] BRAMY2002364, BRAMY2002369, BRAMY2002479, BRAMY2002493, BRAMY2002525, BRAMY2002584, BRAMY2002604, BRAMY2002621, BRAMY2002638, BRAMY2002739, BRAMY2002799, BRAMY2002853, BRAMY2002862, BRAMY2002956, BRAMY2003037, BRAMY2003117, BRAMY2003287, BRAMY2003325, BRAMY2003529, BRAMY2003538, BRAMY2003585, BRAMY2003634, BRAMY2003653, BRAMY2003681, BRAMY2003893, BRAMY2003897, BRAMY2003898, BRAMY2003904, BRAMY2003926, BRAMY2003929, BRAMY2004031, BRAMY2004058, BRAMY2004183, BRAMY2004335, BRAMY2004351, BRAMY2004352, BRAMY2004387, BRAMY2004492, BRAMY2004521, BRAMY2004524, BRAMY2004537, BRAMY2004542, BRAMY2004756, BRAMY2004771, BRAMY2005064, BRAMY2005094, BRAMY2005151, BRAMY2005182, BRAMY2005244, BRAMY2005391,

[2959] BRAMY2005576, BRAMY2005648, BRAMY2005662, BRAMY2005708, BRAMY2005711, BRAMY2006092, BRAMY2006118, BRAMY2006149, BRAMY2006366, BRAMY2006375, BRAMY2006411, BRAMY2006459, BRAMY2006466, BRAMY2006659, BRAMY2006779, BRAMY2006809, BRAMY2006879, BRAMY2007043, BRAMY2007110, BRAMY2007185, BRAMY2007244, BRAMY2007249, BRAMY2007255, BRAMY2007308, BRAMY2007411, BRAMY2007458, BRAMY2007486, BRAMY2007546, BRAMY2007567, BRAMY2007594, BRAMY2007610, BRAMY2007613, BRAMY2007653, BRAMY2007753, BRAMY2007859, BRAMY2008333, BRAMY2008382, BRAMY2008563, BRAMY2008583, BRAMY2008979, BRAMY2009023, BRAMY2009034, BRAMY2009105, BRAMY2009123, BRAMY2009192, BRAMY2009344, BRAMY2009349, BRAMY2009394, BRAMY2009489, BRAMY2009508,

[2960] BRAMY2009528, BRAMY2009557, BRAMY2009612, BRAMY2009693, BRAMY2010068, BRAMY2010135, BRAMY2010145, BRAMY2010171, BRAMY2010208, BRAMY2010239, BRAMY2010272, BRAMY2010290, BRAMY2010357, BRAMY2010366, BRAMY2010395, BRAMY2010441, BRAMY2010442, BRAMY2010464, BRAMY2010581, BRAMY2010798, BRAMY2010808, BRAMY2010919, BRAMY2011064, BRAMY2011105, BRAMY2011178, BRAMY2011196, BRAMY2011216, BRAMY2011253, BRAMY2011446, BRAMY2011480, BRAMY2011639, BRAMY2011679, BRAMY2011811, BRAMY2011846, BRAMY2011849, BRAMY2011872, BRAMY2011961, BRAMY2012017, BRAMY2012091, BRAMY2012119, BRAMY2012162, BRAMY2012277, BRAMY2012340, BRAMY2012497, BRAMY2012517, BRAMY2012555, BRAMY2012568, BRAMY2012581, BRAMY2012691, BRAMY2012721,

[2961] BRAMY2012731, BRAMY2012776, BRAMY2012880, BRAMY2012881, BRAMY2013169, BRAMY2013200, BRAMY2013216, BRAMY2013405, BRAMY2013414, BRAMY2013572, BRAMY2013590, BRAMY2013621, BRAMY2013659, BRAMY2013722, BRAMY2013736, BRAMY2013944, BRAMY2013975, BRAMY2014019, BRAMY2014205, BRAMY2014387, BRAMY2014462, BRAMY2014469, BRAMY2014541, BRAMY2014754, BRAMY2014813, BRAMY2015211, BRAMY2015251, BRAMY2015311, BRAMY2015420, BRAMY2015503, BRAMY2015516, BRAMY2015550, BRAMY2015551, BRAMY2015559, BRAMY2015688, BRAMY2015705, BRAMY2015782, BRAMY2015855, BRAMY2015890, BRAMY2015911, BRAMY2015925, BRAMY2016002, BRAMY2016009, BRAMY2016020, BRAMY2016070, BRAMY2016251, BRAMY2016327, BRAMY2016386, BRAMY2016706, BRAMY2016771,

[2962] BRAMY2016892, BRAMY2016938, BRAMY2016953, BRAMY2017014, BRAMY2017249, BRAMY2017348, BRAMY2017450, BRAMY2017455, BRAMY2017528, BRAMY2018027, BRAMY2018106, BRAMY2018122, BRAMY2018126, BRAMY2018272, BRAMY2018273, BRAMY2018279, BRAMY2018295, BRAMY2018308, BRAMY2018396, BRAMY2018467, BRAMY2018785, BRAMY2019055, BRAMY2019111, BRAMY2019277, BRAMY2019300, BRAMY2019509, BRAMY2019600, BRAMY2019710, BRAMY2019963, BRAMY2019985, BRAMY2019989, BRAMY2020050, BRAMY2020058, BRAMY2020106, BRAMY2020270, BRAMY2020355, BRAMY2020412, BRAMY2020445, BRAMY2020466, BRAMY2020520, BRAMY2020574, BRAMY2020634, BRAMY2021040, BRAMY2021063, BRAMY2021098, BRAMY2021139, BRAMY2021276, BRAMY2021310, BRAMY2021388, BRAMY2021498,

[2963] BRAMY2021523, BRAMY2021710, BRAMY2021732, BRAMY2021746, BRAMY2021825, BRAMY2021867, BRAMY2021962, BRAMY2021982, BRAMY2022052, BRAMY2022160, BRAMY2022168, BRAMY2022263, BRAMY2022301, BRAMY2022320, BRAMY2022383, BRAMY2022445, BRAMY2022454, BRAMY2022493, BRAMY2022525, BRAMY2022532, BRAMY2022723, BRAMY2022786, BRAMY2022796, BRAMY2022929, BRAMY2022980, BRAMY2022984, BRAMY2023060, BRAMY2023110, BRAMY2023115, BRAMY2023161, BRAMY2023172, BRAMY2023238, BRAMY2023327, BRAMY2023358, BRAMY2023406, BRAMY2023482, BRAMY2023514, BRAMY2023719, BRAMY2023729, BRAMY2023786, BRAMY2023852, BRAMY2023863, BRAMY2024004, BRAMY2024073, BRAMY2024312, BRAMY2024374, BRAMY2024390, BRAMY2024416, BRAMY2024449, BRAMY2024489,

[2964] BRAMY2024497, BRAMY2024514, BRAMY2024530, BRAMY2024535, BRAMY2024545, BRAMY2024576, BRAMY2024593, BRAMY2024711, BRAMY2024728, BRAMY2024827, BRAMY2024849, BRAMY2025024, BRAMY2025032, BRAMY2025121, BRAMY2025175, BRAMY2025218, BRAMY2025230, BRAMY2025272, BRAMY2025277, BRAMY2025495, BRAMY2025812, BRAMY2025996, BRAMY2026009, BRAMY2026091, BRAMY2026168, BRAMY2026300, BRAMY2026347, BRAMY2026395, BRAMY2026405, BRAMY2026533, BRAMY2026538, BRAMY2026713, BRAMY2026778, BRAMY2026824, BRAMY2026899, BRAMY2026902, BRAMY2026904, BRAMY2026976, BRAMY2027073, BRAMY2027114, BRAMY2027140, BRAMY2027242, BRAMY2027396, BRAMY2027451, BRAMY2027461, BRAMY2027467, BRAMY2027587, BRAMY2027714, BRAMY2027717, BRAMY2027739,

[2965] BRAMY2027752, BRAMY2027782, BRAMY2028072, BRAMY2028183, BRAMY2028188, BRAMY2028269, BRAMY2028282, BRAMY2028472, BRAMY2028491, BRAMY2028516, BRAMY2028565, BRAMY2028593, BRAMY2028682, BRAMY2028783, BRAMY2028856, BRAMY2028914, BRAMY2029204, BRAMY2029602, BRAMY2030109, BRAMY2030206, BRAMY2030477, BRAMY2030545, BRAMY2030607, BRAMY2030702, BRAMY2030703, BRAMY2030768, BRAMY2030799, BRAMY2030859, BRAMY2030915, BRAMY2031317, BRAMY2031377, BRAMY2031442, BRAMY2031516, BRAMY2032014, BRAMY2032231, BRAMY2032242, BRAMY2032290, BRAMY2032311, BRAMY2032344, BRAMY2032589, BRAMY2032678, BRAMY2032696, BRAMY2032777, BRAMY2032994, BRAMY2033003, BRAMY2033116, BRAMY2033240, BRAMY2033267, BRAMY2033316, BRAMY2033332,

[2966] BRAMY2033506, BRAMY2033594, BRAMY2033895, BRAMY2033914, BRAMY2034072, BRAMY2034185, BRAMY2034305, BRAMY2034561, BRAMY2034920, BRAMY2034993, BRAMY2035070, BRAMY2035449, BRAMY2035545, BRAMY2035606, BRAMY2035718, BRAMY2035719, BRAMY2035801, BRAMY2035923, BRAMY2036076, BRAMY2036079, BRAMY2036254, BRAMY2036266, BRAMY2036387, BRAMY2036396, BRAMY2036567, BRAMY2036615, BRAMY2036699, BRAMY2036913, BRAMY2036918, BRAMY2036968, BRAMY2037147, BRAMY2037328, BRAMY2037609, BRAMY2037629, BRAMY2037800, BRAMY2037971, BRAMY2038100, BRAMY2038128, BRAMY2038317, BRAMY2038475, BRAMY2038484, BRAMY2038516, BRAMY2038832, BRAMY2038846, BRAMY2038887, BRAMY2039287, BRAMY2039300, BRAMY2039314, BRAMY2039341, BRAMY2039630,

[2967] BRAMY2039695, BRAMY2039728, BRAMY2039872, BRAMY2040051, BRAMY2040159, BRAMY2040214, BRAMY2040478, BRAMY2040915, BRAMY2041261, BRAMY2041347, BRAMY2041378, BRAMY2041384, BRAMY2041434, BRAMY2041507, BRAMY2041542, BRAMY2041738, BRAMY2042122, BRAMY2042131, BRAMY2042178, BRAMY2042195, BRAMY2042244, BRAMY2042549, BRAMY2042596, BRAMY2042612, BRAMY2042641, BRAMY2042711, BRAMY2042760, BRAMY2042804, BRAMY2042899, BRAMY2042918, BRAMY2043069, BRAMY2043103, BRAMY2043314, BRAMY2043345, BRAMY2044246, BRAMY2044317, BRAMY2044349, BRAMY2044686, BRAMY2044838, BRAMY2045036, BRAMY2045299, BRAMY2045471, BRAMY2045530, BRAMY2046109, BRAMY2046478, BRAMY2046489, BRAMY2046537, BRAMY2046667, BRAMY2046742, BRAMY2046871,

[2968] BRAMY2046984, BRAMY2046989, BRAMY2047169, BRAMY2047280, BRAMY2047676, BRAMY2047692, BRAMY2047746, BRAMY2047751, BRAMY2047765, BRAMY2047884, BRAMY2047948, BRAMY3000206, BRAMY3000210, BRAMY3000213, BRAMY3000224, BRAMY3000254, BRAMY3000307, BRAMY3000692, BRAMY3001356, BRAMY3001401, BRAMY3001409, BRAMY3001794, BRAMY3002120, BRAMY3002312, BRAMY3002329, BRAMY3002508, BRAMY3002620, BRAMY3002803, BRAMY3002805, BRAMY3002886, BRAMY3002991, BRAMY3003026, BRAMY3003109, BRAMY3003310, BRAMY3003566, BRAMY3003723, BRAMY3004126, BRAMY3004224, BRAMY3004672, BRAMY3004800, BRAMY3004900, BRAMY3004919, BRAMY3005091, BRAMY3005184, BRAMY3005656, BRAMY3005912, BRAMY3005932, BRAMY3006032, BRAMY3006297, BRAMY3006761,

[2969] BRAMY3007078, BRAMY3007206, BRAMY3007311, BRAMY3007350, BRAMY3007449, BRAMY3007471, BRAMY3007609, BRAMY3007723, BRAMY3007968, BRAMY3008088, BRAMY3008096, BRAMY3008335, BRAMY3008466, BRAMY3008505, BRAMY3008650, BRAMY3008937, BRAMY3009158, BRAMY3009207, BRAMY3009556, BRAMY3009782, BRAMY3009811, BRAMY3009904, BRAMY3010008, BRAMY3010264, BRAMY3010321, BRAMY3010411, BRAMY3010492, BRAMY3010603, BRAMY3010654, BRAMY4000095, BRAMY4000229, BRAMY4000277, BRAMY4000915, BRAMY4000962, BRAMY4001173, BRAMY4001200, BRAMY4001234, BRAMY4001449, BRAMY4001652, BRAMY4001863, BRAMY4001913, BRAMY4002575, BRAMY4002628, BRASW1000053, BRASW1000125, BRAWH1000001, BRAWH1000002, BRAWH1000007, BRAWH1000045, BRAWH1000094,

[2970] BRAWH1000116, BRAWH1000127, BRAWH1000130, BRAWH1000157, BRAWH1000162, BRAWH1000164, BRAWH1000168, BRAWH1000174, BRAWH1000180, BRAWH1000369, BRAWH2000034, BRAWH2000048, BRAWH2000071, BRAWH2000082, BRAWH2000093, BRAWH2000109, BRAWH2000131, BRAWH2000142, BRAWH2000169, BRAWH2000177, BRAWH2000218, BRAWH2000232, BRAWH2000248, BRAWH2000256, BRAWH2000274, BRAWH2000323, BRAWH2000353, BRAWH2000370, BRAWH2000409, BRAWH2000417, BRAWH2000443, BRAWH2000471, BRAWH2000476, BRAWH2000482, BRAWH2000488, BRAWH2000494, BRAWH2000500, BRAWH2000503, BRAWH2000522, BRAWH2000554, BRAWH2000588, BRAWH2000595, BRAWH2000633, BRAWH2000643, BRAWH2000651, BRAWH2000682, BRAWH2000752, BRAWH2000859, BRAWH2000866, BRAWH2000892,

[2971] BRAWH2000901, BRAWH2000926, BRAWH2000984, BRAWH2001019, BRAWH2001037, BRAWH2001052, BRAWH2001103, BRAWH2001129, BRAWH2001137, BRAWH2001141, BRAWH2001159, BRAWH2001186, BRAWH2001203, BRAWH2001238, BRAWH2001239, BRAWH2001255, BRAWH2001355, BRAWH2001378, BRAWH2001395, BRAWH2001412, BRAWH2001418, BRAWH2001424, BRAWH2001436, BRAWH2001438, BRAWH2001459, BRAWH2001484, BRAWH2001492, BRAWH2001503, BRAWH2001519, BRAWH2001530, BRAWH2001535, BRAWH2001589, BRAWH2001662, BRAWH2001666, BRAWH2001671, BRAWH2001679, BRAWH2001686, BRAWH2001701, BRAWH2001842, BRAWH2001862, BRAWH2001873, BRAWH2002047, BRAWH2002060, BRAWH2002062, BRAWH2002125, BRAWH2002191, BRAWH2002318, BRAWH2002333, BRAWH2002352, BRAWH2002383,

[2972] BRAWH2002549, BRAWH2002560, BRAWH2002623, BRAWH2002630, BRAWH2002635, BRAWH2002662, BRAWH2002679, BRAWH2002725, BRAWH2002761, BRAWH2002811, BRAWH2002861, BRAWH2002911, BRAWH2002963, BRAWH2002967, BRAWH2002976, BRAWH2003000, BRAWH2003135, BRAWH2003240, BRAWH2003307, BRAWH2003355, BRAWH2003366, BRAWH2003662, BRAWH2003689, BRAWH2003693, BRAWH2003832, BRAWH2003948, BRAWH2003964, BRAWH2004044, BRAWH2004068, BRAWH2004078, BRAWH2004217, BRAWH2004580, BRAWH2004731, BRAWH2004779, BRAWH2004842, BRAWH2004884, BRAWH2004923, BRAWH2005008, BRAWH2005074, BRAWH2005225, BRAWH2005315, BRAWH2005517, BRAWH2005524, BRAWH2005533, BRAWH2005578, BRAWH2005812, BRAWH2005974, BRAWH2005998, BRAWH2006083, BRAWH2006207,

[2973] BRAWH2006301, BRAWH2006526, BRAWH2006543, BRAWH2006622, BRAWH2006760, BRAWH2006960, BRAWH2006989, BRAWH2007069, BRAWH2007308, BRAWH2007406, BRAWH2007550, BRAWH2007570, BRAWH2007591, BRAWH2007658, BRAWH2007664, BRAWH2007800, BRAWH2007808, BRAWH2007825, BRAWH2007862, BRAWH2007890, BRAWH2008058, BRAWH2008128, BRAWH2008255, BRAWH2008292, BRAWH2008297, BRAWH2008380, BRAWH2008540, BRAWH2008577, BRAWH2008790, BRAWH2008903, BRAWH2008956, BRAWH2008993, BRAWH2009112, BRAWH2009227, BRAWH2009261, BRAWH2009263, BRAWH2009298, BRAWH2009304, BRAWH2009360, BRAWH2009393, BRAWH2009485, BRAWH2009490, BRAWH2009558, BRAWH2009590, BRAWH2009626, BRAWH2009678, BRAWH2009695, BRAWH2009907, BRAWH2010000, BRAWH2010069,

[2974] BRAWH2010084, BRAWH2010136, BRAWH2010318, BRAWH2010329, BRAWH2010354, BRAWH2010536, BRAWH2010552, BRAWH2010584, BRAWH2010618, BRAWH2010619, BRAWH2010754, BRAWH2011066, BRAWH2011079, BRAWH2011096, BRAWH2011155, BRAWH2011166, BRAWH2011204, BRAWH2011286, BRAWH2011294, BRAWH2011343, BRAWH2011400, BRAWH2011762, BRAWH2011795, BRAWH2011796, BRAWH2011812, BRAWH2011823, BRAWH2011860, BRAWH2011920, BRAWH2011958, BRAWH2012054, BRAWH2012161, BRAWH2012162, BRAWH2012164, BRAWH2012258, BRAWH2012277, BRAWH2012326, BRAWH2012538, BRAWH2012540, BRAWH2012619, BRAWH2012698, BRAWH2012749, BRAWH2012827, BRAWH2012866, BRAWH2012963, BRAWH2013047, BRAWH2013219, BRAWH2013294, BRAWH2013748, BRAWH2013866, BRAWH2013871,

[2975] BRAWH2013914, BRAWH2013941, BRAWH2013955, BRAWH2014234, BRAWH2014379, BRAWH2014414, BRAWH2014473, BRAWH2014511, BRAWH2014662, BRAWH2014717, BRAWH2014729, BRAWH2014876, BRAWH2014934, BRAWH2014954, BRAWH2015349, BRAWH2015375, BRAWH2015385, BRAWH2015595, BRAWH2015728, BRAWH2015853, BRAWH2015866, BRAWH2016028, BRAWH2016106, BRAWH2016160, BRAWH2016166, BRAWH2016209, BRAWH2016221, BRAWH2016223, BRAWH2016439, BRAWH2016514, BRAWH2016562, BRAWH2016655, BRAWH2016679, BRAWH2016702, BRAWH2016724, BRAWH2016785, BRAWH2016792, BRAWH2016800, BRAWH2017002, BRAWH2017103, BRAWH2017250, BRAWH2017294, BRAWH2017304, BRAWH2017305, BRAWH2017379, BRAWH2017407, BRAWH2017433, BRAWH2017523, BRAWH2017534, BRAWH2017542,

[2976] BRAWH2017635, BRAWH2017913, BRAWH2018206, BRAWH2018267, BRAWH2018282, BRAWH2018317, BRAWH2018506, BRAWH2018514, BRAWH2018527, BRAWH2018601, BRAWH2018745, BRAWH2018875, BRAWH2019053, BRAWH2019055, BRAWH2019198, BRAWH3000078, BRAWH3000088, BRAWH3000100, BRAWH3000166, BRAWH3000314, BRAWH3000329, BRAWH3000410, BRAWH3000446, BRAWH3000491, BRAWH3000604, BRAWH3000884, BRAWH3001053, BRAWH3001319, BRAWH3001326, BRAWH3001475, BRAWH3001636, BRAWH3001638, BRAWH3001712, BRAWH3001760, BRAWH3001783, BRAWH3001833, BRAWH3001879, BRAWH3001918, BRAWH3002433, BRAWH3002467, BRAWH3002513, BRAWH3002574, BRAWH3002600, BRAWH3002819, BRAWH3003019, BRAWH3003136, BRAWH3003244, BRAWH3003343, BRAWH3003522, BRAWH3003598,

[2977] BRAWH3003727, BRAWH3003801, BRAWH3003975, BRAWH3004222, BRAWH3004335, BRAWH3004453, BRAWH3004530, BRAWH3004666, BRAWH3005037, BRAWH3005047, BRAWH3005132, BRAWH3005146, BRAWH3005292, BRAWH3005300, BRAWH3005422, BRAWH3005534, BRAWH3005886, BRAWH3005892, BRAWH3005896, BRAWH3005912, BRAWH3005981, BRAWH3006547, BRAWH3006548, BRAWH3006792, BRAWH3007129, BRAWH3007221, BRAWH3007441, BRAWH3007455, BRAWH3007506, BRAWH3007726, BRAWH3007783, BRAWH3008167, BRAWH3008341, BRAWH3008559, BRAWH3008697, BRAWH3008867, BRAWH3008931, BRAWH3009017, BRAWH3009285, BRAWH3009297, BRAWH3009546, BRAWH3009961, BRAWH3010461, BRAWH3010560, BRAWH3010602, BRAWH3010657, BRAWH3010726, BRAWH3010833, BRAWH3011101, BRAWH3011331,

[2978] BRAWH3011402, BRAWH3011577, BRAWH3011623, BRAWH3011637, BRAWH3011685, BRAWH3011907, BRAWH3011929, BRAWH3012005, BRAWH3012662, BRAWH3012779, BRAWH3013009, BRAWH3013049, BRAWH3013197, BRAWH3013264, BRAWH3013508, BRAWH3014609, BRAWH3014639, BRAWH3015017, BRAWH3015175, BRAWH3015260, BRAWH3015610, BRAWH3015825, BRAWH3016123, BRAWH3016271, BRAWH3016715, BRAWH3017259, BRAWH3017260, BRAWH3017477, BRAWH3017537, BRAWH3017980, BRAWH3018369, BRAWH3018548, BRAWH3018969, BRAWH3019026, BRAWH3019529, BRAWH3019594, BRAWH3019629, BRAWH3019820, BRAWH3020200, BRAWH3020318, BRAWH3020486, BRAWH3020884, BRAWH3020928, BRAWH3021012, BRAWH3021580, BRAWH3021641, BRAWH3021643, BRAWH3021724, BRAWH3022347, BRAWH3022431,

[2979] BRAWH3022459, BRAWH3022542, BRAWH3022719, BRAWH3022866, BRAWH3022900, BRAWH3023156, BRAWH3023168, BRAWH3023172, BRAWH3023274, BRAWH3023421, BRAWH3024231, BRAWH3024242, BRAWH3024469, BRAWH3024506, BRAWH3024613, BRAWH3026349, BRAWH3026394, BRAWH3026529, BRAWH3027420, BRAWH3027440, BRAWH3027574, BRAWH3027607, BRAWH3027616, BRAWH3027675, BRAWH3027806, BRAWH3027880, BRAWH3027927, BRAWH3028202, BRAWH3028223, BRAWH3028306, BRAWH3028461, BRAWH3028645, BRAWH3028754, BRAWH3028796, BRAWH3029254, BRAWH3029313, BRAWH3029538, BRAWH3029556, BRAWH3030613, BRAWH3030772, BRAWH3030810, BRAWH3030892, BRAWH3030910, BRAWH3030950, BRAWH3031054, BRAWH3031710, BRAWH3031902, BRAWH3032298, BRAWH3032340, BRAWH3032571,

[2980] BRAWH3032620, BRAWH3032930, BRAWH3033117, BRAWH3033293, BRAWH3033448, BRAWH3033513, BRAWH3034097, BRAWH3034114, BRAWH3034134, BRAWH3034668, BRAWH3034743, BRAWH3034775, BRAWH3034890, BRAWH3035154, BRAWH3035403, BRAWH3035904, BRAWH3035914, BRAWH3035936, BRAWH3036077, BRAWH3036247, BRAWH3036270, BRAWH3036561, BRAWH3036738, BRAWH3036951, BRAWH3037265, BRAWH3037394, BRAWH3037533, BRAWH3037979, BRAWH3038055, BRAWH3038230, BRAWH3038252, BRAWH3038324, BRCAN1000065, BRCAN1000076, BRCAN1000105, BRCAN1000149, BRCAN2000148, BRCAN2000149, BRCAN2000209, BRCAN2000239, BRCAN2000346, BRCAN2000364, BRCAN2000383, BRCAN2000418, BRCAN2000523, BRCAN2000541, BRCAN2000563, BRCAN2000577, BRCAN2000620, BRCAN2000639,

[2981] BRCAN2000763, BRCAN2000832, BRCAN2000923, BRCAN2001223, BRCAN2001866, BRCAN2002173, BRCAN2002416, BRCAN2002473, BRCAN2002562, BRCAN2002662, BRCAN2002826, BRCAN2002854, BRCAN2002856, BRCAN2002892, BRCAN2002944, BRCAN2002948, BRCAN2003070, BRCAN2003269, BRCAN2003389, BRCAN2003628, BRCAN2003703, BRCAN2003746, BRCAN2003814, BRCAN2003987, BRCAN2004173, BRCAN2004355, BRCAN2004371, BRCAN2004699, BRCAN2005436, BRCAN2005449, BRCAN2006019, BRCAN2006051, BRCAN2006063, BRCAN2006117, BRCAN2006174, BRCAN2006290, BRCAN2006297, BRCAN2006323, BRCAN2006401, BRCAN2006411, BRCAN2006450, BRCAN2006955, BRCAN2007119, BRCAN2007144, BRCAN2007426, BRCAN2007525, BRCAN2007700, BRCAN2008494, BRCAN2008528, BRCAN2008701,

[2982] BRCAN2008894, BRCAN2009156, BRCAN2009168, BRCAN2009203, BRCAN2009432, BRCAN2010374, BRCAN2010376, BRCAN2010547, BRCAN2010581, BRCAN2010665, BRCAN2011254, BRCAN2011316, BRCAN2011602, BRCAN2012110, BRCAN2012355, BRCAN2012402, BRCAN2012408, BRCAN2012481, BRCAN2012613, BRCAN2012713, BRCAN2012929, BRCAN2013655, BRCAN2013660, BRCAN2014143, BRCAN2014229, BRCAN2014370, BRCAN2014602, BRCAN2014652, BRCAN2014788, BRCAN2014881, BRCAN2014952, BRCAN2015371, BRCAN2015402, BRCAN2015464, BRCAN2015719, BRCAN2015757, BRCAN2015886, BRCAN2016025, BRCAN2016046, BRCAN2016174, BRCAN2016433, BRCAN2016619, BRCAN2016762, BRCAN2016814, BRCAN2017442, BRCAN2017905, BRCAN2018240, BRCAN2018269, BRCAN2018490, BRCAN2018566,

[2983] BRCAN2018667, BRCAN2018748, BRCAN2018935, BRCAN2019002, BRCAN2019387, BRCAN2019653, BRCAN2019773, BRCAN2019907, BRCAN2020331, BRCAN2020412, BRCAN2020467, BRCAN2020710, BRCAN2020880, BRCAN2021024, BRCAN2021028, BRCAN2021325, BRCAN2021452, BRCAN2021669, BRCAN2021718, BRCAN2022126, BRCAN2022191, BRCAN2022472, BRCAN2022474, BRCAN2023347, BRCAN2023724, BRCAN2024451, BRCAN2024563, BRCAN2024572, BRCAN2025009, BRCAN2025349, BRCAN2025368, BRCAN2025712, BRCAN2025982, BRCAN2026117, BRCAN2026340, BRCAN2026711, BRCAN2027150, BRCAN2027310, BRCAN2027334, BRCAN2027355, BRCAN2027513, BRCAN2027593, BRCAN2027970, BRCAN2028021, BRCAN2028036, BRCAN2028319, BRCAN2028338, BRCAN2028355, BRCAN2028378, BRCAN2028460,

[2984] BRCAN2028545, BRCAN2028634, BRCAN2028702, BRCOC1000087, BRCOC1000094, BRCOC2000004, BRCOC2000047, BRCOC2000152, BRCOC2000184, BRCOC2000186, BRCOC2000333, BRCOC2000360, BRCOC2000404, BRCOC2000487, BRCOC2000637, BRCOC2000670, BRCOC2000816, BRCOC2000850, BRCOC2001355, BRCOC2002085, BRCOC2002155, BRCOC2002323, BRCOC2002659, BRCOC2002664, BRCOC2002686, BRCOC2002751, BRCOC2002756, BRCOC2002777, BRCOC2002835, BRCOC2003100, BRCOC2003213, BRCOC2003513, BRCOC2003732, BRCOC2003740, BRCOC2004036, BRCOC2004175, BRCOC2004354, BRCOC2004455, BRCOC2004950, BRCOC2005542, BRCOC2005951, BRCOC2006164, BRCOC2006243, BRCOC2006270, BRCOC2006639, BRCOC2006942, BRCOC2007034, BRCOC2007593, BRCOC2007733, BRCOC2007769,

[2985] BRCOC2008064, BRCOC2008225, BRCOC2008642, BRCOC2008993, BRCOC2009052, BRCOC2009196, BRCOC2009380, BRCOC2009638, BRCOC2010115, BRCOC2010510, BRCOC2010730, BRCOC2010980, BRCOC2010994, BRCOC2011010, BRCOC2011398, BRCOC2011418, BRCOC2011506, BRCOC2011769, BRCOC2011996, BRCOC2012229, BRCOC2012386, BRCOC2012551, BRCOC2012813, BRCOC2013448, BRCOC2013573, BRCOC2013675, BRCOC2013780, BRCOC2014013, BRCOC2014033, BRCOC2014400, BRCOC2014748, BRCOC2014833, BRCOC2015597, BRCOC2015824, BRCOC2015908, BRCOC2015944, BRCOC2016525, BRCOC2016661, BRCOC2017061, BRCOC2017652, BRCOC2017856, BRCOC2018775, BRCOC2018877, BRCOC2019255, BRCOC2019549, BRCOC2019841, BRCOC2019896, BRCOC2019903, BRCOC2019910, BRCOC2019934,

[2986] BRCOC2020122, BRCOC2020142, BRHIP1000058, BRHIP1000072, BRHIP1000108, BRHIP1000129, BRHIP1000258, BRHIP2000021, BRHIP2000079, BRHIP2000087, BRHIP2000210, BRHIP2000239, BRHIP2000245, BRHIP2000312, BRHIP2000359, BRHIP2000445, BRHIP2000506, BRHIP2000532, BRHIP2000621, BRHIP2000691, BRHIP2000819, BRHIP2000826, BRHIP2000920, BRHIP2001099, BRHIP2001686, BRHIP2001782, BRHIP2001802, BRHIP2001805, BRHIP2001886, BRHIP2001927, BRHIP2002122, BRHIP2002143, BRHIP2002172, BRHIP2002339, BRHIP2002346, BRHIP2002510, BRHIP2002664, BRHIP2002722, BRHIP2002929, BRHIP2003048, BRHIP2003062, BRHIP2003242, BRHIP2003272, BRHIP2003748, BRHIP2003786, BRHIP2003828, BRHIP2004312, BRHIP2004355, BRHIP2004359, BRHIP2004814,

[2987] BRHIP2004883, BRHIP2004902, BRHIP2005010, BRHIP2005236, BRHIP2005271, BRHIP2005354, BRHIP2005600, BRHIP2005719, BRHIP2005724, BRHIP2005752, BRHIP2005932, BRHIP2006617, BRHIP2006782, BRHIP2006800, BRHIP2006819, BRHIP2006921, BRHIP2007307, BRHIP2007616, BRHIP2007690, BRHIP2007741, BRHIP2007928, BRHIP2007969, BRHIP2008269, BRHIP2008389, BRHIP2008607, BRHIP2008756, BRHIP2008909, BRHIP2009019, BRHIP2009177, BRHIP2009340, BRHIP2009351, BRHIP2009414, BRHIP2009474, BRHIP2009617, BRHIP2009685, BRHIP2010217, BRHIP2010309, BRHIP2010444, BRHIP2010487, BRHIP2010571, BRHIP2010593, BRHIP2010610, BRHIP2010723, BRHIP2010744, BRHIP2011080, BRHIP2011120, BRHIP2011199, BRHIP2011508, BRHIP2011576, BRHIP2011616,

[2988] BRHIP2011783, BRHIP2011838, BRHIP2011933, BRHIP2012054, BRHIP2012059, BRHIP2012141, BRHIP2012314, BRHIP2012360, BRHIP2012545, BRHIP2012580, BRHIP2012627, BRHIP2012642, BRHIP2012750, BRHIP2012922, BRHIP2012923, BRHIP2012972, BRHIP2013286, BRHIP2013447, BRHIP2013510, BRHIP2013699, BRHIP2013723, BRHIP2013972, BRHIP2014063, BRHIP2014285, BRHIP2014291, BRHIP2014373, BRHIP2014386, BRHIP2014387, BRHIP2014954, BRHIP2015224, BRHIP2015245, BRHIP2015356, BRHIP2015360, BRHIP2016005, BRHIP2016125, BRHIP2016788, BRHIP2016968, BRHIP2016990, BRHIP2017315, BRHIP2017385, BRHIP2017404, BRHIP2017542, BRHIP2017553, BRHIP2017642, BRHIP2017714, BRHIP2017780, BRHIP2017945, BRHIP2018014, BRHIP2018369, BRHIP2018612,

[2989] BRHIP2018650, BRHIP2018719, BRHIP2018805, BRHIP2018998, BRHIP2019007, BRHIP2019047, BRHIP2019177, BRHIP2019186, BRHIP2019291, BRHIP2019494, BRHIP2019589, BRHIP2019641, BRHIP2019819, BRHIP2019884, BRHIP2019972, BRHIP2020182, BRHIP2020509, BRHIP2020573, BRHIP2020622, BRHIP2020695, BRHIP2020743, BRHIP2020799, BRHIP2020842, BRHIP2020859, BRHIP2020930, BRHIP2021102, BRHIP2021289, BRHIP2021495, BRHIP2021615, BRHIP2021744, BRHIP2021929, BRHIP2022006, BRHIP2022054, BRHIP2022221, BRHIP2022228, BRHIP2022298, BRHIP2022467, BRHIP2022708, BRHIP2022986, BRHIP2023071, BRHIP2023229, BRHIP2023272, BRHIP2023292, BRHIP2023309, BRHIP2023369, BRHIP2023438, BRHIP2023695, BRHIP2023735, BRHIP2023773, BRHIP2023860,

[2990] BRHIP2024046, BRHIP2024165, BRHIP2024201, BRHIP2024347, BRHIP2024398, BRHIP2024549, BRHIP2024789, BRHIP2024941, BRHIP2025245, BRHIP2025366, BRHIP2025448, BRHIP2025679, BRHIP2025739, BRHIP2025797, BRHIP2026021, BRHIP2026061, BRHIP2026155, BRHIP2026214, BRHIP2026288, BRHIP2026346, BRHIP2026557, BRHIP2026723, BRHIP2026877, BRHIP2027017, BRHIP2027054, BRHIP2027563, BRHIP2027685, BRHIP2027762, BRHIP2028187, BRHIP2028303, BRHIP2028330, BRHIP2028480, BRHIP2028583, BRHIP2028593, BRHIP2029176, BRHIP2029283, BRHIP2029393, BRHIP2029529, BRHIP2029643, BRHIP2029663, BRHIP3000017, BRHIP3000060, BRHIP3000070, BRHIP3000081, BRHIP3000131, BRHIP3000240, BRHIP3000377, BRHIP3000457, BRHIP3000475, BRHIP3000488,

[2991] BRHIP3000526, BRHIP3000626, BRHIP3000859, BRHIP3000907, BRHIP3001076, BRHIP3001079, BRHIP3001141, BRHIP3001283, BRHIP3001338, BRHIP3001360, BRHIP3001878, BRHIP3001964, BRHIP3002114, BRHIP3002124, BRHIP3002141, BRHIP3002363, BRHIP3002691, BRHIP3002920, BRHIP3002931, BRHIP3003063, BRHIP3003126, BRHIP3003340, BRHIP3003395, BRHIP3003484, BRHIP3003644, BRHIP3003688, BRHIP3003795, BRHIP3003984, BRHIP3004193, BRHIP3004215, BRHIP3004416, BRHIP3004710, BRHIP3004725, BRHIP3004774, BRHIP3004786, BRHIP3004863, BRHIP3004968, BRHIP3005137, BRHIP3005231, BRHIP3005307, BRHIP3005574, BRHIP3005673, BRHIP3005768, BRHIP3005801, BRHIP3005944, BRHIP3006279, BRHIP3006390, BRHIP3006449, BRHIP3006683, BRHIP3006717,

[2992] BRHIP3006786, BRHIP3006950, BRHIP3007172, BRHIP3007239, BRHIP3007291, BRHIP3007409, BRHIP3007424, BRHIP3007483, BRHIP3007586, BRHIP3007609, BRHIP3007640, BRHIP3007960, BRHIP3008082, BRHIP3008183, BRHIP3008314, BRHIP3008320, BRHIP3008344, BRHIP3008405, BRHIP3008565, BRHIP3008598, BRHIP3008606, BRHIP3008691, BRHIP3008714, BRHIP3008997, BRHIP3009099, BRHIP3009140, BRHIP3009181, BRHIP3009318, BRHIP3009427, BRHIP3009448, BRHIP3009672, BRHIP3009753, BRHIP3010135, BRHIP3010289, BRHIP3010529, BRHIP3011082, BRHIP3011241, BRHIP3011269, BRHIP3011460, BRHIP3011567, BRHIP3011831, BRHIP3012185, BRHIP3012289, BRHIP3012357, BRHIP3012736, BRHIP3012745, BRHIP3012868, BRHIP3013078, BRHIP3013271, BRHIP3013698,

[2993] BRHIP3013765, BRHIP3013897, BRHIP3014237, BRHIP3014675, BRHIP3015620, BRHIP3015751, BRHIP3015854, BRHIP3016032, BRHIP3016213, BRHIP3016302, BRHIP3016421, BRHIP3017109, BRHIP3017146, BRHIP3017256, BRHIP3017325, BRHIP3017558, BRHIP3017637, BRHIP3018278, BRHIP3018784, BRHIP3019643, BRHIP3019824, BRHIP3019880, BRHIP3019956, BRHIP3020155, BRHIP3020182, BRHIP3020733, BRHIP3021019, BRHIP3021499, BRHIP3021534, BRHIP3021778, BRHIP3021987, BRHIP3022656, BRHIP3023922, BRHIP3024118, BRHIP3024533, BRHIP3024703, BRHIP3024725, BRHIP3024820, BRHIP3025161, BRHIP3025702, BRHIP3025795, BRHIP3025844, BRHIP3026052, BRHIP3026097, BRHIP3026231, BRHIP3026335, BRHIP3026651, BRHIP3027105, BRHIP3027137, BRHIP3027160,

[2994] BRHIP3027191, BRHIP3027501, BRHIP3027594, BRHIP3027651, BRHIP3027854, BRHIP3027947, BRHIP3028570, BRHIP3028742, BRSSN1000056, BRSSN1000059, BRSSN1000092, BRSSN1000153, BRSSN2000097, BRSSN2000175, BRSSN2000197, BRSSN2000244, BRSSN2000293, BRSSN2000295, BRSSN2000312, BRSSN2000518, BRSSN2000561, BRSSN2000715, BRSSN2000832, BRSSN2001213, BRSSN2001275, BRSSN2001342, BRSSN2001426, BRSSN2001503, BRSSN2001579, BRSSN2001758, BRSSN2001810, BRSSN2002857, BRSSN2002859, BRSSN2003012, BRSSN2003086, BRSSN2003093, BRSSN2003820, BRSSN2003841, BRSSN2003937, BRSSN2004142, BRSSN2004303, BRSSN2004304, BRSSN2004496, BRSSN2004679, BRSSN2004686, BRSSN2004710, BRSSN2004719, BRSSN2005847, BRSSN2006133, BRSSN2006390,

[2995] BRSSN2006575, BRSSN2006611, BRSSN2006644, BRSSN2006892, BRSSN2007076, BRSSN2007168, BRSSN2007202, BRSSN2007338, BRSSN2007464, BRSSN2007504, BRSSN2007819, BRSSN2008125, BRSSN2008419, BRSSN2008464, BRSSN2008549, BRSSN2008797, BRSSN2009119, BRSSN2009378, BRSSN2009389, BRSSN2009395, BRSSN2009627, BRSSN2009630, BRSSN2009702, BRSSN2010019, BRSSN2010110, BRSSN2010587, BRSSN2010596, BRSSN2010830, BRSSN2011262, BRSSN2011653, BRSSN2011738, BRSSN2011843, BRSSN2012081, BRSSN2012103, BRSSN2012157, BRSSN2012198, BRSSN2012254, BRSSN2012439, BRSSN2012622, BRSSN2012691, BRSSN2012838, BRSSN2013095, BRSSN2013544, BRSSN2013733, BRSSN2013753, BRSSN2013874, BRSSN2014112, BRSSN2014294, BRSSN2014424, BRSSN2014513,

[2996] BRSSN2014556, BRSSN2014573, BRSSN2014636, BRSSN2014685, BRSSN2015199, BRSSN2015369, BRSSN2015493, BRSSN2015554, BRSSN2015707, BRSSN2015773, BRSSN2015907, BRSSN2016589, BRSSN2016768, BRSSN2016905, BRSSN2017297, BRSSN2017422, BRSSN2017530, BRSSN2017682, BRSSN2017757, BRSSN2018218, BRSSN2018440, BRSSN2018447, BRSSN2018581, BRSSN2018731, BRSSN2018771, BRSSN2018925, BRSTN1000097, BRSTN2000058, BRSTN2000070, BRSTN2000220, BRSTN2000312, BRSTN2000536, BRSTN2000872, BRSTN2001067, BRSTN2001613, BRSTN2001801, BRSTN2002105, BRSTN2002400, BRSTN2002532, BRSTN2002691, BRSTN2003590, BRSTN2003835, BRSTN2004863, BRSTN2004869, BRSTN2004987, BRSTN2005721, BRSTN2006306, BRSTN2006466, BRSTN2006580, BRSTN2006583,

[2997] BRSTN2006638, BRSTN2006865, BRSTN2007000, BRSTN2007118, BRSTN2007284, BRSTN2007765, BRSTN2008052, BRSTN2008283, BRSTN2008367, BRSTN2008418, BRSTN2008457, BRSTN2008475, BRSTN2008930, BRSTN2009247, BRSTN2010089, BRSTN2010107, BRSTN2010363, BRSTN2010416, BRSTN2010500, BRSTN2010569, BRSTN2010750, BRSTN2010923, BRSTN2011211, BRSTN2011597, BRSTN2011688, BRSTN2011799, BRSTN2012089, BRSTN2012284, BRSTN2012320, BRSTN2012380, BRSTN2012451, BRSTN2013171, BRSTN2013354, BRSTN2013931, BRSTN2014490, BRSTN2014633, BRSTN2014751, BRSTN2014770, BRSTN2015015, BRSTN2015978, BRSTN2016066, BRSTN2016335, BRSTN2016892, BRSTN2016918, BRSTN2016992, BRSTN2017151, BRSTN2017237, BRSTN2017379, BRSTN2017761, BRSTN2017771,

[2998] BRSTN2017995, BRSTN2018077, BRSTN2018083, BRSTN2018596, BRSTN2018692, BRSTN2018712, BRSTN2019079, BRSTN2019129, BRTHA1000021, BRTHA1000063, BRTHA1000311, BRTHA2000057, BRTHA2000474, BRTHA2000514, BRTHA2000574, BRTHA2000855, BRTHA2000969, BRTHA2000972, BRTHA2001304, BRTHA2001370, BRTHA2001462, BRTHA2001717, BRTHA2001812, BRTHA2002091, BRTHA2002115, BRTHA2002133, BRTHA2002281, BRTHA2002376, BRTHA2002442, BRTHA2002493, BRTHA2002565, BRTHA2002608, BRTHA2002702, BRTHA2002721, BRTHA2002726, BRTHA2002741, BRTHA2002808, BRTHA2002896, BRTHA2002903, BRTHA2003030, BRTHA2003110, BRTHA2003116, BRTHA2003436, BRTHA2003759, BRTHA2003794, BRTHA2004361, BRTHA2004371, BRTHA2004582, BRTHA2004629, BRTHA2004639,

[2999] BRTHA2004642, BRTHA2004812, BRTHA2004821, BRTHA2004978, BRTHA2004992, BRTHA2005005, BRTHA2005013, BRTHA2005448, BRTHA2005579, BRTHA2005831, BRTHA2005864, BRTHA2005942, BRTHA2005956, BRTHA2006075, BRTHA2006146, BRTHA2006194, BRTHA2006232, BRTHA2006720, BRTHA2006735, BRTHA2006974, BRTHA2007060, BRTHA2007122, BRTHA2007422, BRTHA2007603, BRTHA2007665, BRTHA2007998, BRTHA2008316, BRTHA2008502, BRTHA2008513, BRTHA2008527, BRTHA2008535, BRTHA2008598, BRTHA2008669, BRTHA2008955, BRTHA2009311, BRTHA2009349, BRTHA2009486, BRTHA2009803, BRTHA2009846, BRTHA2009886, BRTHA2009972, BRTHA2010008, BRTHA2010033, BRTHA2010073, BRTHA2010097, BRTHA2010191, BRTHA2010397, BRTHA2010608, BRTHA2010672, BRTHA2010884,

[3000] BRTHA2010907, BRTHA2011062, BRTHA2011194, BRTHA2011321, BRTHA2011351, BRTHA2011500, BRTHA2011641, BRTHA2011691, BRTHA2012129, BRTHA2012183, BRTHA2012189, BRTHA2012351, BRTHA2012392, BRTHA2012466, BRTHA2012555, BRTHA2012562, BRTHA2012980, BRTHA2013262, BRTHA2013275, BRTHA2013426, BRTHA2013460, BRTHA2013515, BRTHA2013540, BRTHA2013595, BRTHA2013610, BRTHA2013707, BRTHA2013942, BRTHA2014287, BRTHA2014334, BRTHA2014381, BRTHA2014578, BRTHA2014647, BRTHA2014663, BRTHA2014792, BRTHA2014828, BRTHA2014909, BRTHA2014975, BRTHA2014997, BRTHA2015406, BRTHA2015478, BRTHA2015696, BRTHA2015700, BRTHA2015853, BRTHA2015878, BRTHA2016179, BRTHA2016215, BRTHA2016267, BRTHA2016318, BRTHA2016496, BRTHA2016543,

[3001] BRTHA2016552, BRTHA2016918, BRTHA2017178, BRTHA2017353, BRTHA2017364, BRTHA2017972, BRTHA2017985, BRTHA2018011, BRTHA2018129, BRTHA2018165, BRTHA2018304, BRTHA2018344, BRTHA2018420, BRTHA2018504, BRTHA2018558, BRTHA2018591, BRTHA2018624, BRTHA2018706, BRTHA2018707, BRTHA2019014, BRTHA2019022, BRTHA2019048, BRTHA2019073, BRTHA2019726, BRTHA2019743, BRTHA2020400, BRTHA2020566, BRTHA2020642, BRTHA2020695, BRTHA2020721, BRTHA2020781, BRTHA2020811, BRTHA2020910, BRTHA2021212, BRTHA2021440, BRTHA2021450, BRTHA2022074, BRTHA2022914, BRTHA2022968, BRTHA2023402, BRTHA2023437, BRTHA2024177, BRTHA2024354, BRTHA2024712, BRTHA2025869, BRTHA2026071, BRTHA2026290, BRTHA2026311, BRTHA2027227, BRTHA2027229,

[3002] BRTHA2027250, BRTHA2027546, BRTHA2028297, BRTHA2029969, BRTHA2030036, BRTHA2030213, BRTHA2031517, BRTHA2031800, BRTHA2031917, BRTHA2032763, BRTHA2032845, BRTHA2033122, BRTHA2033155, BRTHA2033264, BRTHA2033320, BRTHA2033469, BRTHA2033683, BRTHA2034281, BRTHA2034576, BRTHA2034874, BRTHA2035448, BRTHA2036055, BRTHA2036295, BRTHA2036660, BRTHA2037247, BRTHA2038279, BRTHA2038345, BRTHA2038353, BRTHA2038396, BRTHA3000252, BRTHA3000273, BRTHA3000296, BRTHA3000297, BRTHA3000325, BRTHA3000633, BRTHA3000789, BRTHA3001221, BRTHA3001623, BRTHA3002265, BRTHA3002401, BRTHA3002411, BRTHA3002427, BRTHA3002864, BRTHA3002933, BRTHA3002955, BRTHA3003000, BRTHA3003023, BRTHA3003225, BRTHA3003339, BRTHA3003343,

[3003] BRTHA3003417, BRTHA3003449, BRTHA3003474, BRTHA3003704, BRTHA3004432, BRTHA3004475, BRTHA3004502, BRTHA3004610, BRTHA3005046, BRTHA3005735, BRTHA3005988, BRTHA3006318, BRTHA3006593, BRTHA3006856, BRTHA3007113, BRTHA3007130, BRTHA3007148, BRTHA3007319, BRTHA3007469, BRTHA3007532, BRTHA3007662, BRTHA3007685, BRTHA3007769, BRTHA3007922, BRTHA3008143, BRTHA3008293, BRTHA3008310, BRTHA3008386, BRTHA3008520, BRTHA3008608, BRTHA3008694, BRTHA3008826, BRTHA3009037, BRTHA3009291, BRTHA3009858, BRTHA3010135, BRTHA3010366, BRTHA3010469, BRTHA3010530, BRTHA3010540, BRTHA3010717, BRTHA3011149, BRTHA3011187, BRTHA3011229, BRTHA3011265, BRTHA3011510, BRTHA3011892, BRTHA3012265, BRTHA3013860, BRTHA3013882,

[3004] BRTHA3013884, BRTHA3013981, BRTHA3014000, BRTHA3014105, BRTHA3014507, BRTHA3014547, BRTHA3014691, BRTHA3014835, BRTHA3014854, BRTHA3014908, BRTHA3014920, BRTHA3015815, BRTHA3016616, BRTHA3016835, BRTHA3016845, BRTHA3016917, BRTHA3017047, BRTHA3017589, BRTHA3017848, BRTHA3018409, BRTHA3018514, BRTHA3018617, BRTHA3018623, BRTHA3018656, BRTHA3019048, BRTHA3019105, BRTHA3019183, BRTHA3020000, BRTHA3020369, BRTHA3021569, BRTHA3021708, BRTHA3021786, BRTHA3021971, BRTHA3022641, BRTHA3023403, BRTHA3023523, BRTHA3023590, BRTHA3023929, BRTHA3024233, BRTHA3024600, BRTHA3025073, BRTHA3025789, BRTHA3025826, BRTHA3026161, BRTHA3026180, BRTHA3026556, BRTHA3026916, BRTHA3027171, BRTHA3027318, BRTHA3027638,

[3005] BRTHA3027820, BRTHA3027879, BRTHA3027957, BRTHA3028339, BRTHA3028505, BRTHA3028782, CD34C2000051, CD34C2000152, CD34C2000175, CD34C2000443, CD34C3000125, CD34C3000314, CD34C3000494, CERVX1000042, CERVX2000812, CERVX2000968, CERVX2002006, CERVX2002013, CERVX2002430, CERVX2002770, CHONS1000058, CHONS2000172, CHONS2000797, CHONS2001287, CHONS2001382, CHONS2001797, CHONS2001834, CHONS2002419, COLON1000030, COLON1000084, COLON1000135, COLON2000470, COLON2000557, COLON2000568, COLON2001829, COLON2001866, COLON2002443, COLON2002520, COLON2003043, COLON2003529, COLON2004318, COLON2004351, COLON2004478, COLON2004911, COLON2005126, COLON2005623, COLON2005735, COLON2005772, COLON2006263, COLON2006282,

[3006] COLON2006417, COLON2007274, COLON2007733, COLON2008105, COLON2009337, COLON2009499, CORDB1000140, CORDB2000061, CORDB2000127, CORDB2000541, CTONG1000009, CTONG1000010, CTONG1000020, CTONG1000022, CTONG1000040, CTONG1000056, CTONG1000062, CTONG1000086, CTONG1000088, CTONG1000094, CTONG1000097, CTONG1000113, CTONG1000137, CTONG1000165, CTONG1000175, CTONG1000180, CTONG1000181, CTONG1000220, CTONG1000277, CTONG1000283, CTONG1000288, CTONG1000302, CTONG1000341, CTONG1000467, CTONG1000476, CTONG1000488, CTONG1000508, CTONG1000540, CTONG2000031, CTONG2000034, CTONG2000042, CTONG2000218, CTONG2000279, CTONG2000303, CTONG2000330, CTONG2000395, CTONG2000411, CTONG2000465, CTONG2000480, CTONG2000561,

[3007] CTONG2000589, CTONG2000766, CTONG2000771, CTONG2000819, CTONG2000827, CTONG2000846, CTONG2000855, CTONG2000977, CTONG2001139, CTONG2001226, CTONG2001320, CTONG2001413, CTONG2001428, CTONG2001513, CTONG2001524, CTONG2001533, CTONG2001598, CTONG2001681, CTONG2001724, CTONG2001749, CTONG2001820, CTONG2001877, CTONG2001911, CTONG2001932, CTONG2001955, CTONG2002066, CTONG2002395, CTONG2002417, CTONG2002418, CTONG2002453, CTONG2002520, CTONG2002558, CTONG2002590, CTONG2002709, CTONG2002721, CTONG2002816, CTONG2002820, CTONG2002903, CTONG2002965, CTONG2002999, CTONG2003028, CTONG2003094, CTONG2003100, CTONG2003115, CTONG2003245, CTONG2003348, CTONG2003350, CTONG2003372, CTONG2003375, CTONG2003427,

[3008] CTONG2003599, CTONG2003680, CTONG2003699, CTONG2003764, CTONG2003782, CTONG2003889, CTONG2003937, CTONG2004000, CTONG2004062, CTONG2004115, CTONG2004126, CTONG2004264, CTONG2004305, CTONG2004397, CTONG2004423, CTONG2004454, CTONG2004550, CTONG2004669, CTONG2004716, CTONG2004912, CTONG2004941, CTONG2004948, CTONG2005028, CTONG2005049, CTONG2005110, CTONG2005145, CTONG2005265, CTONG2005290, CTONG2005374, CTONG2005399, CTONG2005468, CTONG2005567, CTONG2005585, CTONG2005635, CTONG2005775, CTONG2005795, CTONG2005890, CTONG2005904, CTONG2006129, CTONG2006223, CTONG2006273, CTONG2006310, CTONG2006393, CTONG2006449, CTONG2006515, CTONG2006524, CTONG2006568, CTONG2006611, CTONG2006620, CTONG2006666,

[3009] CTONG2006691, CTONG2006709, CTONG2006836, CTONG2006942, CTONG2006964, CTONG2007009, CTONG2007091, CTONG2007168, CTONG2007175, CTONG2007259, CTONG2007272, CTONG2007293, CTONG2007297, CTONG2007400, CTONG2007417, CTONG2007441, CTONG2007623, CTONG2007681, CTONG2007779, CTONG2007898, CTONG2007959, CTONG2007970, CTONG2008014, CTONG2008184, CTONG2008262, CTONG2008269, CTONG2008321, CTONG2008343, CTONG2008402, CTONG2008521, CTONG2008562, CTONG2008577, CTONG2008595, CTONG2008621, CTONG2008689, CTONG2008720, CTONG2008721, CTONG2008773, CTONG2008792, CTONG2008989, CTONG2009033, CTONG2009108, CTONG2009132, CTONG2009156, CTONG2009181, CTONG2009257, CTONG2009258, CTONG2009268, CTONG2009270, CTONG2009395,

[3010] CTONG2009423, CTONG2009440, CTONG2009527, CTONG2009531, CTONG2009534, CTONG2009570, CTONG2009572, CTONG2009604, CTONG2009643, CTONG2009675, CTONG2009689, CTONG2009725, CTONG2009766, CTONG2009768, CTONG2009844, CTONG2009871, CTONG2009887, CTONG2009891, CTONG2009923, CTONG2009938, CTONG2009955, CTONG2009958, CTONG2010018, CTONG2010024, CTONG2010116, CTONG2010133, CTONG2010148, CTONG2010276, CTONG2010330, CTONG2010348, CTONG2010408, CTONG2010508, CTONG2010566, CTONG2010623, CTONG2010649, CTONG2010803, CTONG2011188, CTONG2011429, CTONG2011474, CTONG2011676, CTONG2011716, CTONG2011765, CTONG2011779, CTONG2011815, CTONG2011822, CTONG2011825, CTONG2011920, CTONG2011985, CTONG2012029, CTONG2012077,

[3011] CTONG2012123, CTONG2012158, CTONG2012230, CTONG2012401, CTONG2012422, CTONG2012425, CTONG2012447, CTONG2012453, CTONG2012473, CTONG2012476, CTONG2012533, CTONG2012554, CTONG2012564, CTONG2012661, CTONG2012724, CTONG2012738, CTONG2012758, CTONG2012843, CTONG2012879, CTONG2012901, CTONG2012996, CTONG2013128, CTONG2013149, CTONG2013156, CTONG2013284, CTONG2013339, CTONG2013352, CTONG2013381, CTONG2013393, CTONG2013511, CTONG2013630, CTONG2013803, CTONG2013907, CTONG2013985, CTONG2013986, CTONG2014032, CTONG2014058, CTONG2014119, CTONG2014165, CTONG2014191, CTONG2014206, CTONG2014234, CTONG2014264, CTONG2014280, CTONG2014389, CTONG2014491, CTONG2014630, CTONG2014635, CTONG2014646, CTONG2014705,

[3012] CTONG2014946, CTONG2014954, CTONG2014959, CTONG2014966, CTONG2014995, CTONG2015204, CTONG2015316, CTONG2015345, CTONG2015434, CTONG2015518, CTONG2015540, CTONG2015596, CTONG2015633, CTONG2015678, CTONG2015717, CTONG2015804, CTONG2015815, CTONG2015866, CTONG2015914, CTONG2015953, CTONG2016056, CTONG2016217, CTONG2016355, CTONG2016499, CTONG2016505, CTONG2016559, CTONG2016658, CTONG2016775, CTONG2016797, CTONG2016824, CTONG2016846, CTONG2016904, CTONG2016953, CTONG2017021, CTONG2017292, CTONG2017409, CTONG2017444, CTONG2017458, CTONG2017604, CTONG2017650, CTONG2017804, CTONG2017814, CTONG2017910, CTONG2017939, CTONG2017989, CTONG2018062, CTONG2018069, CTONG2018147, CTONG2018211, CTONG2018217,

[3013] CTONG2018279, CTONG2018334, CTONG2018343, CTONG2018379, CTONG2018413, CTONG2018483, CTONG2018629, CTONG2018653, CTONG2018655, CTONG2018735, CTONG2018900, CTONG2018976, CTONG2019029, CTONG2019063, CTONG2019144, CTONG2019232, CTONG2019248, CTONG2019590, CTONG2019652, CTONG2019704, CTONG2019822, CTONG2019833, CTONG2020031, CTONG2020108, CTONG2020127, CTONG2020171, CTONG2020374, CTONG2020378, CTONG2020411, CTONG2020445, CTONG2020806, CTONG2020831, CTONG2021024, CTONG2021132, CTONG2021168, CTONG2022153, CTONG2022601, CTONG2022835, CTONG2023021, CTONG2023512, CTONG2024031, CTONG2024206, CTONG2024614, CTONG2024749, CTONG2025496, CTONG2025513, CTONG2025516, CTONG2025610, CTONG2025900, CTONG2026513,

[3014] CTONG2026770, CTONG2026920, CTONG2026987, CTONG2027150, CTONG2027327, CTONG2027361, CTONG2027591, CTONG2027736, CTONG2027783, CTONG2027828, CTONG2027959, CTONG2028097, CTONG2028208, CTONG2028486, CTONG2028518, CTONG2028687, CTONG3000657, CTONG3000686, CTONG3000707, CTONG3000896, CTONG3001420, CTONG3001501, CTONG3001560, CTONG3001605, CTONG3001746, CTONG3002020, CTONG3002127, CTONG3002370, CTONG3002412, CTONG3002433, CTONG3002552, CTONG3002588, CTONG3002674, CTONG3002728, CTONG3002909, CTONG3002947, CTONG3002983, CTONG3003165, CTONG3003179, CTONG3003483, CTONG3003553, CTONG3003598, CTONG3003652, CTONG3003654, CTONG3003669, CTONG3003737, CTONG3003905, CTONG3003972, CTONG3004072, CTONG3004317,

[3015] CTONG3004397, CTONG3004550, CTONG3004576, CTONG3004607, CTONG3004712, CTONG3004726, CTONG3005325, CTONG3005648, CTONG3005713, CTONG3005803, CTONG3005813, CTONG3006073, CTONG3006186, CTONG3006629, CTONG3006650, CTONG3006659, CTONG3007244, CTONG3007444, CTONG3007528, CTONG3007586, CTONG3007870, CTONG3008223, CTONG3008252, CTONG3008258, CTONG3008457, CTONG3008496, CTONG3008566, CTONG3008639, CTONG3008831, CTONG3008951, CTONG3008959, CTONG3009227, CTONG3009287, CTONG3009328, CTONG3009385, D3OST1000066, D3OST1000109, D3OST1000238, D3OST1000267, D3OST1000270, D3OST2000184, D3OST2000618, D3OST2000654, D3OST2000734, D3OST2001328, D3OST2001669, D3OST2001788, D3OST2002182, D3OST2002223, D3OST2002262,

[3016] D3OST2002272, D3OST2002417, D3OST2002436, D3OST2002648, D3OST2003331, D3OST2003607, D3OST2003797, D3OST2004637, D3OST3000195, D3OST3000258, D3OST3000291, D3OST3000388, D3OST3000493, D6OST2000127, D6OST2000169, D6OST2000245, D6OST2000358, D6OST2000464, D6OST2000507, D9OST2000278, D9OST2000440, D9OST2000869, D9OST2001319, D9OST2001433, D9OST2002397, D9OST2002608, D9OST2002673, D9OST2003106, D9OST2003108, D9OST2003137, D9OST2003397, D9OST2003580, D9OST2003594, D9OST2003791, D9OST2003989, D9OST2004018, D9OST2004073, D9OST2004417, DFNES1000003, DFNES1000083, DFNES1000107, DFNES1000185, DFNES2000143, DFNES2000146, DFNES2000212, DFNES2000292, DFNES2000426, DFNES2000432, DFNES2000457, DFNES2000471,

[3017] DFNES2000913, DFNES2001091, DFNES2001096, DFNES2001108, DFNES2001177, DFNES2001404, DFNES2001564, DFNES2001565, DFNES2001647, DFNES2001800, DFNES2001829, DFNES2002220, DFNES2002509, DFNES2002550, DFNES2002588, DFNES2002817, DFNES2003081, DFNES2003255, DFNES2003742, DFNES2004354, DFNES2004383, DFNES2004608, DFNES2004684, DFNES2005266, DFNES2005527, DFNES2005540, DFNES2005690, DFNES2005766, DFNES2005779, DFNES2005875, DFNES2006346, DFNES2006944, DFNES2007299, DFNES2007332, DFNES2007641, DFNES2007757, DFNES2008160, DFNES2008280, DFNES2008881, DFNES2009482, DFNES2010502, DFNES2011192, DFNES2011221, DFNES2011239, DFNES2011245, ERLTF1000021, ERLTF2000324, ERLTF2000465, FCBBF1000023, FCBBF1000025,

[3018] FCBBF1000038, FCBBF1000053, FCBBF1000069, FCBBF1000115, FCBBF1000117, FCBBF1000118, FCBBF1000121, FCBBF1000125, FCBBF1000131, FCBBF1000155, FCBBF1000157, FCBBF1000171, FCBBF1000174, FCBBF1000182, FCBBF1000198, FCBBF1000206, FCBBF1000220, FCBBF1000232, FCBBF1000233, FCBBF1000243, FCBBF1000270, FCBBF1000272, FCBBF1000280, FCBBF1000297, FCBBF1000305, FCBBF1000314, FCBBF1000322, FCBBF1000349, FCBBF1000367, FCBBF1000376, FCBBF1000377, FCBBF1000395, FCBBF1000397, FCBBF1000403, FCBBF1000412, FCBBF1000437, FCBBF1000449, FCBBF1000466, FCBBF1000476, FCBBF1000506, FCBBF1000509, FCBBF1000546, FCBBF1000550, FCBBF1000556, FCBBF1000581, FCBBF1000582, FCBBF1000598, FCBBF1000604, FCBBF1000618, FCBBF1000627,

[3019] FCBBF1000671, FCBBF1000675, FCBBF1000684, FCBBF1000686, FCBBF1000687, FCBBF1000691, FCBBF1000732, FCBBF1000748, FCBBF2000038, FCBBF2000094, FCBBF2000105, FCBBF2000123, FCBBF2000214, FCBBF2000232, FCBBF2000259, FCBBF2000276, FCBBF2000291, FCBBF2000362, FCBBF2000379, FCBBF2000473, FCBBF2000502, FCBBF2000566, FCBBF2000677, FCBBF2000678, FCBBF2000685, FCBBF2000733, FCBBF2000782, FCBBF2000808, FCBBF2000815, FCBBF2000825, FCBBF2000940, FCBBF2000951, FCBBF2001001, FCBBF2001088, FCBBF2001105, FCBBF2001116, FCBBF2001183, FCBBF2001188, FCBBF2001211, FCBBF2001238, FCBBF2001243, FCBBF2001291, FCBBF2001299, FCBBF2001309, FCBBF2001400, FCBBF2001427, FCBBF2001480, FCBBF2001529, FCBBF2001538, FCBBF2001594,

[3020] FCBBF2001672, FCBBF2001675, FCBBF2001718, FCBBF2001720, FCBBF2001817, FCBBF2001868, FCBBF2002044, FCBBF2002281, FCBBF2002370, FCBBF2002541, FCBBF2002626, FCBBF2002897, FCBBF2002898, FCBBF2002904, FCBBF2002928, FCBBF2002953, FCBBF2003083, FCBBF2003269, FCBBF2003293, FCBBF2003297, FCBBF2003395, FCBBF2003528, FCBBF2003543, FCBBF2003549, FCBBF2003567, FCBBF2003636, FCBBF2003823, FCBBF2003895, FCBBF2004066, FCBBF2004090, FCBBF2004138, FCBBF2004217, FCBBF2004256, FCBBF2004373, FCBBF2004448, FCBBF2004671, FCBBF2004707, FCBBF2004788, FCBBF2005069, FCBBF2005122, FCBBF2005428, FCBBF2005439, FCBBF2005538, FCBBF2005637, FCBBF2005645, FCBBF2005733, FCBBF2005909, FCBBF2005966, FCBBF2006131, FCBBF2006380,

[3021] FCBBF2006418, FCBBF2006452, FCBBF2006634, FCBBF2006781, FCBBF2007012, FCBBF2007186, FCBBF2007265, FCBBF2007302, FCBBF2007556, FCBBF2007610, FCBBF2007633, FCBBF2007840, FCBBF3000102, FCBBF3000115, FCBBF3000120, FCBBF3000168, FCBBF3000175, FCBBF3000227, FCBBF3000229, FCBBF3000233, FCBBF3000269, FCBBF3000361, FCBBF3000367, FCBBF3000462, FCBBF3000473, FCBBF3000501, FCBBF3000518, FCBBF3000550, FCBBF3000847, FCBBF3001018, FCBBF3001020, FCBBF3001235, FCBBF3001302, FCBBF3001594, FCBBF3001657, FCBBF3001855, FCBBF3001890, FCBBF3001912, FCBBF3001914, FCBBF3001918, FCBBF3001924, FCBBF3002163, FCBBF3002188, FCBBF3002190, FCBBF3002268, FCBBF3002475, FCBBF3002556, FCBBF3002592, FCBBF3002658, FCBBF3002782,

[3022] FCBBF3002818, FCBBF3002925, FCBBF3003216, FCBBF3003305, FCBBF3003373, FCBBF3003435, FCBBF3003475, FCBBF3003481, FCBBF3003557, FCBBF3003787, FCBBF3003902, FCBBF3004021, FCBBF3004041, FCBBF3004323, FCBBF3004390, FCBBF3004409, FCBBF3004502, FCBBF3004715, FCBBF3004842, FCBBF3004847, FCBBF3004955, FCBBF3005160, FCBBF3005218, FCBBF3005320, FCBBF3005444, FCBBF3005698, FCBBF3005729, FCBBF3006171, FCBBF3006249, FCBBF3006288, FCBBF3006399, FCBBF3006628, FCBBF3007077, FCBBF3007150, FCBBF3007152, FCBBF3007242, FCBBF3007244, FCBBF3007248, FCBBF3007453, FCBBF3007462, FCBBF3007540, FCBBF3007604, FCBBF3007631, FCBBF3007829, FCBBF3007855, FCBBF3007859, FCBBF3007860, FCBBF3008073, FCBBF3008100, FCBBF3008153,

[3023] FCBBF3008251, FCBBF3008311, FCBBF3008362, FCBBF3008382, FCBBF3008475, FCBBF3008644, FCBBF3008689, FCBBF3008748, FCBBF3008870, FCBBF3008938, FCBBF3008944, FCBBF3009069, FCBBF3009101, FCBBF3009152, FCBBF3009256, FCBBF3009317, FCBBF3009428, FCBBF3009464, FCBBF3009479, FCBBF3009526, FCBBF3009703, FCBBF3009717, FCBBF3009888, FCBBF3009949, FCBBF3009978, FCBBF3010008, FCBBF3010012, FCBBF3010124, FCBBF3010130, FCBBF3010142, FCBBF3010149, FCBBF3010211, FCBBF3010361, FCBBF3010508, FCBBF3010544, FCBBF3010586, FCBBF3010601, FCBBF3010665, FCBBF3010695, FCBBF3010729, FCBBF3010733, FCBBF3011003, FCBBF3011418, FCBBF3011523, FCBBF3011570, FCBBF3011592, FCBBF3011867, FCBBF3011889, FCBBF3012170, FCBBF3012182,

[3024] FCBBF3012332, FCBBF3012443, FCBBF3012588, FCBBF3012667, FCBBF3012842, FCBBF3012901, FCBBF3013041, FCBBF3013058, FCBBF3013205, FCBBF3013307, FCBBF3013341, FCBBF3013589, FCBBF3013623, FCBBF3013800, FCBBF3013846, FCBBF3014229, FCBBF3014260, FCBBF3014355, FCBBF3014567, FCBBF3015100, FCBBF3015119, FCBBF3015131, FCBBF3015317, FCBBF3015758, FCBBF3015809, FCBBF3015870, FCBBF3016018, FCBBF3016134, FCBBF3016178, FCBBF3016451, FCBBF3016618, FCBBF3016622, FCBBF3016644, FCBBF3016667, FCBBF3016987, FCBBF3017024, FCBBF3017059, FCBBF3017071, FCBBF3017123, FCBBF3017233, FCBBF3017255, FCBBF3017288, FCBBF3017535, FCBBF3017681, FCBBF3017729, FCBBF3017873, FCBBF3017974, FCBBF3018067, FCBBF3018173, FCBBF3018453,

[3025] FCBBF3018591, FCBBF3018753, FCBBF3018826, FCBBF3018949, FCBBF3019085, FCBBF3019320, FCBBF3019437, FCBBF3019564, FCBBF3019569, FCBBF3019570, FCBBF3019663, FCBBF3019714, FCBBF3019716, FCBBF3019784, FCBBF3019867, FCBBF3019961, FCBBF3020030, FCBBF3020138, FCBBF3020140, FCBBF3020163, FCBBF3020232, FCBBF3020599, FCBBF3021026, FCBBF3021191, FCBBF3021221, FCBBF3021501, FCBBF3021506, FCBBF3021524, FCBBF3021985, FCBBF3022005, FCBBF3022291, FCBBF3022311, FCBBF3022504, FCBBF3022566, FCBBF3022593, FCBBF3022765, FCBBF3022767, FCBBF3022894, FCBBF3023061, FCBBF3023078, FCBBF3023368, FCBBF3023372, FCBBF3023443, FCBBF3023599, FCBBF3023704, FCBBF3023887, FCBBF3023895, FCBBF3024096, FCBBF3024225, FCBBF3024266,

[3026] FCBBF3024364, FCBBF3024623, FCBBF3024793, FCBBF3024911, FCBBF3025098, FCBBF3025252, FCBBF3025280, FCBBF3025285, FCBBF3025417, FCBBF3025528, FCBBF3025568, FCBBF3025650, FCBBF3025674, FCBBF3025905, FCBBF3026021, FCBBF3026048, FCBBF3026251, FCBBF3026308, FCBBF3026678, FCBBF3026692, FCBBF3027104, FCBBF3027199, FCBBF3027328, FCBBF3027559, FCBBF3027717, FCBBF3027755, FCBBF3027768, FCBBF3027854, FCBBF3027863, FCBBF3027903, FCBBF3028102, FCBBF3028143, FCBBF3028188, FCBBF3028244, FCBBF3028472, FCBBF3028528, FCBBF3028582, FCBBF3028671, FCBBF3028794, FCBBF4000017, FCBBF4000061, FCBBF4000076, FCBBF4000142, FCBBF4000173, FCBBF4000192, FCBBF4000193, FCBBF4000268, FCBBF4000282, FCBBF4000399, FCBBF4000415,

[3027] FCBBF4000529, FCBBF5000041, FCBBF5000061, FCBBF5000165, FCBBF5000325, FCBBF5000353, FCBBF5000384, FCBBF5000483, FCBBF5000495, FEBRA1000005, FEBRA1000008, FEBRA1000030, FEBRA1000138, FEBRA1000148, FEBRA1000149, FEBRA1000183, FEBRA1000188, FEBRA1000189, FEBRA1000190, FEBRA2000007, FEBRA2000021, FEBRA2000035, FEBRA2000053, FEBRA2000126, FEBRA2000129, FEBRA2000220, FEBRA2000228, FEBRA2000253, FEBRA2000286, FEBRA2000297, FEBRA2000321, FEBRA2000333, FEBRA2000377, FEBRA2000378, FEBRA2000391, FEBRA2000394, FEBRA2000397, FEBRA2000399, FEBRA2000402, FEBRA2000404, FEBRA2000409, FEBRA2000415, FEBRA2000436, FEBRA2000454, FEBRA2000462, FEBRA2000468, FEBRA2000491, FEBRA2000504, FEBRA2000536, FEBRA2000538,

[3028] FEBRA2000575, FEBRA2000581, FEBRA2000656, FEBRA2000659, FEBRA2000680, FEBRA2000690, FEBRA2000727, FEBRA2000734, FEBRA2000757, FEBRA2000771, FEBRA2000772, FEBRA2000782, FEBRA2000787, FEBRA2000790, FEBRA2000793, FEBRA2000803, FEBRA2000805, FEBRA2000809, FEBRA2000815, FEBRA2000862, FEBRA2000877, FEBRA2000880, FEBRA2000901, FEBRA2000909, FEBRA2000917, FEBRA2000928, FEBRA2000936, FEBRA2000937, FEBRA2000959, FEBRA2001004, FEBRA2001012, FEBRA2001020, FEBRA2001093, FEBRA2001124, FEBRA2001146, FEBRA2001161, FEBRA2001175, FEBRA2001197, FEBRA2001217, FEBRA2001227, FEBRA2001245, FEBRA2001267, FEBRA2001294, FEBRA2001351, FEBRA2001383, FEBRA2001438, FEBRA2001440, FEBRA2001487, FEBRA2001561, FEBRA2001581,

[3029] FEBRA2001584, FEBRA2001590, FEBRA2001591, FEBRA2001610, FEBRA2001620, FEBRA2001659, FEBRA2001669, FEBRA2001698, FEBRA2001705, FEBRA2001706, FEBRA2001715, FEBRA2001745, FEBRA2001772, FEBRA2001790, FEBRA2001814, FEBRA2001867, FEBRA2001914, FEBRA2001974, FEBRA2001989, FEBRA2001990, FEBRA2002009, FEBRA2002027, FEBRA2002086, FEBRA2002109, FEBRA2002191, FEBRA2002260, FEBRA2002352, FEBRA2002399, FEBRA2002410, FEBRA2002442, FEBRA2002456, FEBRA2002508, FEBRA2002525, FEBRA2002552, FEBRA2002574, FEBRA2002601, FEBRA2002611, FEBRA2002628, FEBRA2002662, FEBRA2002682, FEBRA2002727, FEBRA2002781, FEBRA2002783, FEBRA2002792, FEBRA2002818, FEBRA2002858, FEBRA2002882, FEBRA2002897, FEBRA2002908, FEBRA2002931,

[3030] FEBRA2002962, FEBRA2002986, FEBRA2003054, FEBRA2003115, FEBRA2003128, FEBRA2003155, FEBRA2003163, FEBRA2003181, FEBRA2003198, FEBRA2003253, FEBRA2003258, FEBRA2003275, FEBRA2003308, FEBRA2003327, FEBRA2003429, FEBRA2003436, FEBRA2003454, FEBRA2003468, FEBRA2003470, FEBRA2003520, FEBRA2003524, FEBRA2003541, FEBRA2003675, FEBRA2003707, FEBRA2003711, FEBRA2003726, FEBRA2003750, FEBRA2003822, FEBRA2003897, FEBRA2003907, FEBRA2003930, FEBRA2004026, FEBRA2004029, FEBRA2004042, FEBRA2004053, FEBRA2004056, FEBRA2004091, FEBRA2004110, FEBRA2004202, FEBRA2004219, FEBRA2004237, FEBRA2004268, FEBRA2004325, FEBRA2004329, FEBRA2004331, FEBRA2004443, FEBRA2004485, FEBRA2004490, FEBRA2004538, FEBRA2004592,

[3031] FEBRA2004620, FEBRA2004628, FEBRA2004651, FEBRA2004767, FEBRA2004813, FEBRA2004818, FEBRA2004840, FEBRA2004852, FEBRA2004867, FEBRA2004914, FEBRA2004933, FEBRA2004987, FEBRA2005014, FEBRA2005036, FEBRA2005079, FEBRA2005114, FEBRA2005216, FEBRA2005291, FEBRA2005361, FEBRA2005377, FEBRA2005380, FEBRA2005427, FEBRA2005458, FEBRA2005476, FEBRA2005572, FEBRA2005701, FEBRA2005726, FEBRA2005778, FEBRA2005787, FEBRA2005788, FEBRA2005824, FEBRA2005998, FEBRA2006055, FEBRA2006061, FEBRA2006150, FEBRA2006165, FEBRA2006255, FEBRA2006315, FEBRA2006346, FEBRA2006354, FEBRA2006357, FEBRA2006370, FEBRA2006379, FEBRA2006396, FEBRA2006409, FEBRA2006418, FEBRA2006427, FEBRA2006476, FEBRA2006485, FEBRA2006491,

[3032] FEBRA2006519, FEBRA2006521, FEBRA2006553, FEBRA2006627, FEBRA2006667, FEBRA2006726, FEBRA2006736, FEBRA2006793, FEBRA2006808, FEBRA2006817, FEBRA2006873, FEBRA2006890, FEBRA2006942, FEBRA2006977, FEBRA2007017, FEBRA2007176, FEBRA2007247, FEBRA2007280, FEBRA2007414, FEBRA2007436, FEBRA2007449, FEBRA2007458, FEBRA2007534, FEBRA2007544, FEBRA2007551, FEBRA2007566, FEBRA2007589, FEBRA2007613, FEBRA2007714, FEBRA2007793, FEBRA2007818, FEBRA2007823, FEBRA2007880, FEBRA2007931, FEBRA2007957, FEBRA2008009, FEBRA2008086, FEBRA2008134, FEBRA2008135, FEBRA2008159, FEBRA2008165, FEBRA2008172, FEBRA2008201, FEBRA2008210, FEBRA2008255, FEBRA2008265, FEBRA2008266, FEBRA2008282, FEBRA2008287, FEBRA2008302,

[3033] FEBRA2008311, FEBRA2008341, FEBRA2008360, FEBRA2008459, FEBRA2008468, FEBRA2008475, FEBRA2008481, FEBRA2008542, FEBRA2008660, FEBRA2008662, FEBRA2008681, FEBRA2008692, FEBRA2008741, FEBRA2008859, FEBRA2008861, FEBRA2008866, FEBRA2008881, FEBRA2008928, FEBRA2008983, FEBRA2009016, FEBRA2009022, FEBRA2009029, FEBRA2009074, FEBRA2009117, FEBRA2009120, FEBRA2009162, FEBRA2009185, FEBRA2009240, FEBRA2009265, FEBRA2009276, FEBRA2009289, FEBRA2009327, FEBRA2009352, FEBRA2009362, FEBRA2009385, FEBRA2009416, FEBRA2009437, FEBRA2009478, FEBRA2009507, FEBRA2009541, FEBRA2009567, FEBRA2009588, FEBRA2009731, FEBRA2009754, FEBRA2009780, FEBRA2009846, FEBRA2010141, FEBRA2010299, FEBRA2010484, FEBRA2010719,

[3034] FEBRA2010746, FEBRA2010768, FEBRA2010802, FEBRA2011063, FEBRA2011090, FEBRA2011356, FEBRA2011392, FEBRA2011414, FEBRA2011593, FEBRA2011665, FEBRA2012090, FEBRA2012120, FEBRA2012181, FEBRA2012195, FEBRA2012397, FEBRA2012418, FEBRA2012507, FEBRA2012625, FEBRA2013019, FEBRA2013069, FEBRA2013274, FEBRA2013465, FEBRA2013570, FEBRA2013699, FEBRA2013905, FEBRA2013951, FEBRA2014010, FEBRA2014122, FEBRA2014198, FEBRA2014213, FEBRA2014443, FEBRA2014578, FEBRA2014939, FEBRA2015076, FEBRA2015175, FEBRA2015292, FEBRA2015588, FEBRA2016112, FEBRA2016398, FEBRA2016583, FEBRA2016621, FEBRA2016654, FEBRA2016739, FEBRA2017024, FEBRA2017098, FEBRA2017138, FEBRA2017154, FEBRA2017200, FEBRA2017223, FEBRA2017333,

[3035] FEBRA2017502, FEBRA2017533, FEBRA2017680, FEBRA2017736, FEBRA2017780, FEBRA2017811, FEBRA2017850, FEBRA2018051, FEBRA2018203, FEBRA2018407, FEBRA2018433, FEBRA2019172, FEBRA2019242, FEBRA2019298, FEBRA2019389, FEBRA2019457, FEBRA2019519, FEBRA2019582, FEBRA2019637, FEBRA2019690, FEBRA2019867, FEBRA2020406, FEBRA2020566, FEBRA2020582, FEBRA2020668, FEBRA2020801, FEBRA2020845, FEBRA2020886, FEBRA2020977, FEBRA2021032, FEBRA2021134, FEBRA2021171, FEBRA2021431, FEBRA2021497, FEBRA2021550, FEBRA2021571, FEBRA2021636, FEBRA2021864, FEBRA2021892, FEBRA2021908, FEBRA2022148, FEBRA2022204, FEBRA2022255, FEBRA2022322, FEBRA2022601, FEBRA2022696, FEBRA2022729, FEBRA2022787, FEBRA2022911, FEBRA2022956,

[3036] FEBRA2022963, FEBRA2022972, FEBRA2023227, FEBRA2023285, FEBRA2023351, FEBRA2023377, FEBRA2023399, FEBRA2023498, FEBRA2023550, FEBRA2023721, FEBRA2023927, FEBRA2023989, FEBRA2023990, FEBRA2024019, FEBRA2024136, FEBRA2024343, FEBRA2024570, FEBRA2024693, FEBRA2024727, FEBRA2024744, FEBRA2024797, FEBRA2025249, FEBRA2025463, FEBRA2025477, FEBRA2026474, FEBRA2026582, FEBRA2026629, FEBRA2026769, FEBRA2026879, FEBRA2026890, FEBRA2026977, FEBRA2027082, FEBRA2027297, FEBRA2027352, FEBRA2027364, FEBRA2027609, FEBRA2028158, FEBRA2028222, FEBRA2028366, FEBRA2028457, FEBRA2028477, FEBRA2028503, FEHRT2000325, FEHRT2000364, FEKID1000018, FELIV1000101, FELIV1000137, FELIV1000164, FELNG2000241, HCASM1000021,

[3037] HCASM1000050, HCASM1000061, HCASM1000130, HCASM2000156, HCASM2000202, HCASM2000214, HCASM2000266, HCASM2000307, HCASM2000534, HCASM2000536, HCASM2000560, HCASM2000871, HCASM2001285, HCASM2001810, HCASM2001866, HCASM2001890, HCASM2002148, HCASM2002502, HCASM2002754, HCASM2002918, HCASM2003076, HCASM2003099, HCASM2003212, HCASM2003237, HCASM2003357, HCASM2003415, HCASM2005388, HCASM2005484, HCASM2006131, HCASM2006338, HCASM2006359, HCASM2006632, HCASM2007047, HCASM2007317, HCASM2007737, HCASM2007773, HCASM2008154, HCASM2008536, HCASM2009405, HCASM2009424, HCASM2009463, HCASM2009588, HCHON1000015, HCHON1000142, HCHON1000176, HCHON1000191, HCHON2000028, HCHON2000038, HCHON2000062, HCHON2000100,

[3038] HCHON2000156, HCHON2000199, HCHON2000212, HCHON2000271, HCHON2000295, HCHON2000315, HCHON2000322, HCHON2000344, HCHON2000364, HCHON2000395, HCHON2000417, HCHON2000418, HCHON2000473, HCHON2000503, HCHON2000660, HCHON2000673, HCHON2000676, HCHON2000699, HCHON2000705, HCHON2000743, HCHON2000751, HCHON2000817, HCHON2000818, HCHON2000819, HCHON2000832, HCHON2000851, HCHON2000898, HCHON2000935, HCHON2000942, HCHON2000956, HCHON2000994, HCHON2001050, HCHON2001084, HCHON2001108, HCHON2001110, HCHON2001116, HCHON2001161, HCHON2001214, HCHON2001233, HCHON2001269, HCHON2001434, HCHON2001450, HCHON2001453, HCHON2001497, HCHON2001523, HCHON2001546, HCHON2001548, HCHON2001577, HCHON2001604, HCHON2001607,

[3039] HCHON2001646, HCHON2001712, HCHON2001768, HCHON2001801, HCHON2001853, HCHON2002123, HCHON2002194, HCHON2002241, HCHON2002247, HCHON2002354, HCHON2002676, HCHON2002770, HCHON2002964, HCHON2002971, HCHON2003131, HCHON2003134, HCHON2003327, HCHON2003513, HCHON2003532, HCHON2003642, HCHON2003659, HCHON2003676, HCHON2004007, HCHON2004279, HCHON2004359, HCHON2004531, HCHON2004776, HCHON2004858, HCHON2005048, HCHON2005118, HCHON2005166, HCHON2005802, HCHON2005987, HCHON2006459, HCHON2006714, HCHON2006722, HCHON2006786, HCHON2006841, HCHON2006871, HCHON2007046, HCHON2007482, HCHON2007650, HCHON2007674, HCHON2007774, HCHON2007881, HCHON2008112, HCHON2008239, HCHON2008444, HCHON2008582, HCHON2008672,

[3040] HCHON2008856, HCHON2008871, HCHON2008989, HCHON2009191, HCHON2009384, HCHON2009749, HCHON2009766, HCHON2009795, HCHON2010074, HCHON2010543, HEART1000074, HEART1000088, HEART1000099, HEART1000102, HEART1000118, HEART1000132, HEART1000139, HEART1000142, HEART1000151, HEART1000173, HEART2000024, HEART2000035, HEART2000099, HEART2000298, HEART2000306, HEART2000309, HEART2000411, HEART2000418, HEART2000448, HEART2000492, HEART2000520, HEART2000541, HEART2000568, HEART2000611, HEART2000959, HEART2001680, HEART2001756, HEART2002129, HEART2002184, HEART2002220, HEART2002432, HEART2002531, HEART2002598, HEART2002717, HEART2003027, HEART2003168, HEART2003432, HEART2003440, HEART2003781, HEART2003852,

[3041] HEART2004570, HEART2004940, HEART2004980, HEART2005244, HEART2005581, HEART2005610, HEART2006131, HEART2006195, HEART2006310, HEART2006334, HEART2006487, HEART2006557, HEART2006787, HEART2006789, HEART2006909, HEART2007031, HEART2007231, HEART2007443, HEART2007767, HEART2008108, HEART2008111, HEART2008257, HEART2008509, HEART2008994, HEART2009000, HEART2009599, HEART2009680, HEART2010391, HEART2010492, HEART2010495, HELAC2000158, HELAC2000301, HHDPC1000001, HHDPC1000065, HHDPC2000055, HHDPC2000149, HHDPC2000258, HHDPC2000315, HHDPC2000456, HHDPC2000462, HHDPC2000572, HHDPC2000656, HHDPC2000692, HHDPC2001337, HHDPC2001432, HHDPC2001896, HHDPC2002963, HHDPC2003049, HHDPC2003113, HHDPC2003381,

[3042] HHDPC2004757, HHDPC2005185, HHDPC2005513, HHDPC2005742, HHDPC2006460, HHDPC2006862, HHDPC2006927, HHDPC2007302, HHDPC2007775, HHDPC2008123, HHDPC2008185, HHDPC2008279, HHDPC2008297, HHDPC2008414, HHDPC2008474, HHDPC2008816, HHDPC2008843, HHDPC2009114, HHDPC2009208, HHDPC2009272, HLUNG1000017, HLUNG1000024, HLUNG1000030, HLUNG1000034, HLUNG1000053, HLUNG1000064, HLUNG1000076, HLUNG1000084, HLUNG1000091, HLUNG1000104, HLUNG1000105, HLUNG1000151, HLUNG1000169, HLUNG2000014, HLUNG2000027, HLUNG2000063, HLUNG2000068, HLUNG2000116, HLUNG2000125, HLUNG2000130, HLUNG2000142, HLUNG2000174, HLUNG2000176, HLUNG2000217, HLUNG2000232, HLUNG2000255, HLUNG2000281, HLUNG2000315, HLUNG2000340, HLUNG2000362,

[3043] HLUNG2000363, HLUNG2000412, HLUNG2000431, HLUNG2000480, HLUNG2000489, HLUNG2000549, HLUNG2000557, HLUNG2000570, HLUNG2000751, HLUNG2000761, HLUNG2000777, HLUNG2000870, HLUNG2000926, HLUNG2000950, HLUNG2000955, HLUNG2000970, HLUNG2001013, HLUNG2001126, HLUNG2001144, HLUNG2001214, HLUNG2001439, HLUNG2001459, HLUNG2001507, HLUNG2001633, HLUNG2001677, HLUNG2001712, HLUNG2001814, HLUNG2001996, HLUNG2002006, HLUNG2002050, HLUNG2002059, HLUNG2002085, HLUNG2002145, HLUNG2002295, HLUNG2002303, HLUNG2002334, HLUNG2002405, HLUNG2002429, HLUNG2002465, HLUNG2002562, HLUNG2002659, HLUNG2002707, HLUNG2002811, HLUNG2002916, HLUNG2002942, HLUNG2002949, HLUNG2002958, HLUNG2002982, HLUNG2003049, HLUNG2003061,

[3044] HLUNG2003162, HLUNG2003246, HLUNG2003306, HLUNG2003331, HLUNG2003335, HLUNG2003378, HLUNG2003497, HLUNG2003691, HLUNG2003710, HLUNG2003714, HLUNG2003716, HLUNG2003778, HLUNG2003833, HLUNG2003872, HLUNG2003918, HLUNG2003991, HLUNG2004014, HLUNG2004037, HLUNG2004067, HLUNG2004154, HLUNG2004170, HLUNG2004217, HLUNG2004273, HLUNG2004388, HLUNG2004416, HLUNG2004521, HLUNG2004684, HLUNG2004707, HLUNG2004774, HLUNG2004775, HLUNG2005012, HLUNG2005030, HLUNG2005045, HLUNG2005076, HLUNG2005203, HLUNG2005479, HLUNG2005524, HLUNG2005656, HLUNG2005738, HLUNG2005774, HLUNG2005813, HLUNG2005924, HLUNG2006026, HLUNG2006067, HLUNG2006094, HLUNG2006370, HLUNG2006397, HLUNG2006570, HLUNG2006599, HLUNG2006614,

[3045] HLUNG2006671, HLUNG2006781, HLUNG2006812, HLUNG2006843, HLUNG2006852, HLUNG2006935, HLUNG2007041, HLUNG2007163, HLUNG2007210, HLUNG2007219, HLUNG2007245, HLUNG2007433, HLUNG2007931, HLUNG2008066, HLUNG2008153, HLUNG2008235, HLUNG2008247, HLUNG2008333, HLUNG2008348, HLUNG2008384, HLUNG2008396, HLUNG2008439, HLUNG2008479, HLUNG2008480, HLUNG2008521, HLUNG2008833, HLUNG2008875, HLUNG2008958, HLUNG2008959, HLUNG2009067, HLUNG2009215, HLUNG2009253, HLUNG2009303, HLUNG2009413, HLUNG2009729, HLUNG2010181, HLUNG2010464, HLUNG2010562, HLUNG2010845, HLUNG2011041, HLUNG2011298, HLUNG2011461, HLUNG2011833, HLUNG2012049, HLUNG2012287, HLUNG2012315, HLUNG2012546, HLUNG2012600, HLUNG2012727, HLUNG2013097,

[3046] HLUNG2013204, HLUNG2013304, HLUNG2013350, HLUNG2013622, HLUNG2013643, HLUNG2013784, HLUNG2013851, HLUNG2014262, HLUNG2014288, HLUNG2014449, HLUNG2014821, HLUNG2015184, HLUNG2015418, HLUNG2015548, HLUNG2015578, HLUNG2015617, HLUNG2016022, HLUNG2016862, HLUNG2017286, HLUNG2017307, HLUNG2017350, HLUNG2017546, HLUNG2017806, HLUNG2018029, HLUNG2018282, HLUNG2018626, HLUNG2019058, HSYRA1000131, HSYRA2000044, HSYRA2000135, HSYRA2000137, HSYRA2000221, HSYRA2000237, HSYRA2000248, HSYRA2000253, HSYRA2000332, HSYRA2000371, HSYRA2000424, HSYRA2000510, HSYRA2000605, HSYRA2000629, HSYRA2000706, HSYRA2000760, HSYRA2000792, HSYRA2000828, HSYRA2000832, HSYRA2000925, HSYRA2000927, HSYRA2001003, HSYRA2001105,

[3047] HSYRA2001142, HSYRA2001153, HSYRA2001232, HSYRA2001255, HSYRA2001332, HSYRA2001353, HSYRA2001484, HSYRA2001552, HSYRA2001574, HSYRA2001580, HSYRA2001983, HSYRA2002103, HSYRA2002590, HSYRA2002741, HSYRA2003168, HSYRA2004550, HSYRA2004858, HSYRA2005456, HSYRA2005496, HSYRA2005628, HSYRA2005970, HSYRA2006049, HSYRA2006873, HSYRA2007241, HSYRA2007338, HSYRA2007650, HSYRA2007667, HSYRA2008154, HSYRA2008714, HSYRA2009102, IMR321000155, IMR321000158, IMR321000161, IMR321000165, IMR321000193, IMR321000207, IMR321000230, IMR322000072, IMR322000107, IMR322000121, IMR322000127, IMR322000152, IMR322000164, IMR322000178, IMR322000302, IMR322000316, IMR322000374, IMR322000379, IMR322000383, IMR322000418,

[3048] IMR322000518, IMR322000604, IMR322000609, IMR322000656, IMR322000672, IMR322000775, IMR322000791, IMR322000811, IMR322000819, IMR322000838, IMR322000859, IMR322000863, IMR322000917, IMR322000918, IMR322000919, IMR322000935, IMR322000953, IMR322000973, IMR322000984, IMR322001018, IMR322001049, IMR322001167, IMR322001185, IMR322001218, IMR322001245, IMR322001317, IMR322001318, IMR322001322, IMR322001438, IMR322001452, IMR322001534, IMR322001541, IMR322001665, IMR322001670, IMR322001724, IMR322001879, IMR322002035, IMR322002110, IMR322002470, IMR322003675, IMR322004768, IMR322005293, IMR322005833, IMR322006012, IMR322006222, IMR322006495, IMR322006520, IMR322006886, IMR322006947, IMR322007078,

[3049] IMR322007225, IMR322007704, IMR322008651, IMR322009710, IMR322009807, IMR322010295, IMR322010953, IMR322011689, IMR322012314, IMR322012529, IMR322013053, IMR322013396, IMR322013731, IMR322013805, IMR322015523, IMR322016146, IMR322017049, IMR322018117, IMR322018192, JCMLC2000273, KIDNE1000008, KIDNE1000012, KIDNE1000015, KIDNE1000028, KIDNE1000036, KIDNE1000064, KIDNE1000104, KIDNE1000121, KIDNE1000143, KIDNE1000152, KIDNE2000026, KIDNE2000041, KIDNE2000046, KIDNE2000051, KIDNE2000070, KIDNE2000167, KIDNE2000174, KIDNE2000192, KIDNE2000227, KIDNE2000244, KIDNE2000245, KIDNE2000287, KIDNE2000315, KIDNE2000317, KIDNE2000328, KIDNE2000330, KIDNE2000335, KIDNE2000349, KIDNE2000375, KIDNE2000383,

[3050] KIDNE2000394, KIDNE2000422, KIDNE2000493, KIDNE2000510, KIDNE2000513, KIDNE2000519, KIDNE2000555, KIDNE2000624, KIDNE2000678, KIDNE2000717, KIDNE2000721, KIDNE2000722, KIDNE2000777, KIDNE2000801, KIDNE2000832, KIDNE2000833, KIDNE2000846, KIDNE2000867, KIDNE2000909, KIDNE2001117, KIDNE2001140, KIDNE2001269, KIDNE2001361, KIDNE2001373, KIDNE2001636, KIDNE2001713, KIDNE2001802, KIDNE2001840, KIDNE2001857, KIDNE2001873, KIDNE2001897, KIDNE2001931, KIDNE2001979, KIDNE2002015, KIDNE2002162, KIDNE2002168, KIDNE2002191, KIDNE2002198, KIDNE2002262, KIDNE2002265, KIDNE2002438, KIDNE2002483, KIDNE2002725, KIDNE2002768, KIDNE2002795, KIDNE2002798, KIDNE2002839, KIDNE2002845, KIDNE2002872, KIDNE2002882,

[3051] KIDNE2002980, KIDNE2002991, KIDNE2003185, KIDNE2003188, KIDNE2003233, KIDNE2003335, KIDNE2003373, KIDNE2003377, KIDNE2003507, KIDNE2003752, KIDNE2003764, KIDNE2003837, KIDNE2003994, KIDNE2004034, KIDNE2004054, KIDNE2004084, KIDNE2004095, KIDNE2004115, KIDNE2004233, KIDNE2004262, KIDNE2004279, KIDNE2004294, KIDNE2004305, KIDNE2004344, KIDNE2004394, KIDNE2004411, KIDNE2004475, KIDNE2004519, KIDNE2004520, KIDNE2004531, KIDNE2004534, KIDNE2004562, KIDNE2004579, KIDNE2004626, KIDNE2004681, KIDNE2004828, KIDNE2004846, KIDNE2004879, KIDNE2004981, KIDNE2004985, KIDNE2004999, KIDNE2005038, KIDNE2005042, KIDNE2005062, KIDNE2005266, KIDNE2005296, KIDNE2005321, KIDNE2005327, KIDNE2005336, KIDNE2005400,

[3052] KIDNE2005424, KIDNE2005477, KIDNE2005526, KIDNE2005543, KIDNE2005603, KIDNE2005629, KIDNE2005781, KIDNE2005798, KIDNE2005854, KIDNE2005908, KIDNE2005937, KIDNE2006039, KIDNE2006053, KIDNE2006062, KIDNE2006092, KIDNE2006145, KIDNE2006149, KIDNE2006210, KIDNE2006299, KIDNE2006334, KIDNE2006353, KIDNE2006376, KIDNE2006378, KIDNE2006465, KIDNE2006580, KIDNE2006652, KIDNE2006687, KIDNE2006733, KIDNE2006811, KIDNE2006820, KIDNE2006880, KIDNE2007005, KIDNE2007040, KIDNE2007077, KIDNE2007186, KIDNE2007222, KIDNE2007356, KIDNE2007422, KIDNE2007569, KIDNE2007810, KIDNE2007811, KIDNE2007944, KIDNE2008069, KIDNE2008072, KIDNE2008116, KIDNE2008117, KIDNE2008218, KIDNE2008315, KIDNE2008362, KIDNE2008378,

[3053] KIDNE2008403, KIDNE2008404, KIDNE2008446, KIDNE2008473, KIDNE2008480, KIDNE2008649, KIDNE2008666, KIDNE2008697, KIDNE2008758, KIDNE2008788, KIDNE2008795, KIDNE2008824, KIDNE2008832, KIDNE2008869, KIDNE2008914, KIDNE2008975, KIDNE2008987, KIDNE2009019, KIDNE2009109, KIDNE2009180, KIDNE2009191, KIDNE2009332, KIDNE2009426, KIDNE2009467, KIDNE2009490, KIDNE2009553, KIDNE2009605, KIDNE2009628, KIDNE2009647, KIDNE2009676, KIDNE2009723, KIDNE2010007, KIDNE2010049, KIDNE2010052, KIDNE2010084, KIDNE2010137, KIDNE2010151, KIDNE2010264, KIDNE2010265, KIDNE2010271, KIDNE2010419, KIDNE2010430, KIDNE2010574, KIDNE2010674, KIDNE2010739, KIDNE2010762, KIDNE2010863, KIDNE2010973, KIDNE2010989, KIDNE2011200,

[3054] KIDNE2011314, KIDNE2011508, KIDNE2011532, KIDNE2011635, KIDNE2011752, KIDNE2011782, KIDNE2011858, KIDNE2012009, KIDNE2012025, KIDNE2012188, KIDNE2012291, KIDNE2012316, KIDNE2012361, KIDNE2012440, KIDNE2012453, KIDNE2012563, KIDNE2012601, KIDNE2012613, KIDNE2012710, KIDNE2012745, KIDNE2012775, KIDNE2012784, KIDNE2012945, KIDNE2013045, KIDNE2013095, KIDNE2013158, KIDNE2013218, KIDNE2013263, KIDNE2013388, KIDNE2013413, KIDNE2013489, KIDNE2013639, KIDNE2013731, KIDNE2013734, KIDNE2013775, KIDNE2013801, KIDNE2014087, KIDNE2014112, KIDNE2014119, KIDNE2014170, KIDNE2014184, KIDNE2014268, KIDNE2014298, KIDNE2014320, KIDNE2014325, KIDNE2014415, KIDNE2014489, KIDNE2014496, KIDNE2014661, KIDNE2014717,

[3055] KIDNE2014789, KIDNE2014808, KIDNE2014890, KIDNE2014978, KIDNE2015073, KIDNE2015221, KIDNE2015244, KIDNE2015313, KIDNE2015433, KIDNE2015445, KIDNE2015483, KIDNE2015515, KIDNE2015546, KIDNE2015556, KIDNE2015598, KIDNE2015660, KIDNE2015987, KIDNE2016000, KIDNE2016036, KIDNE2016096, KIDNE2016101, KIDNE2016142, KIDNE2016188, KIDNE2016327, KIDNE2016371, KIDNE2016388, KIDNE2016464, KIDNE2016539, KIDNE2016918, KIDNE2017007, KIDNE2017040, KIDNE2017052, KIDNE2017151, KIDNE2017153, KIDNE2017315, KIDNE2017332, KIDNE2017343, KIDNE2017454, KIDNE2017603, KIDNE2017956, KIDNE2018071, KIDNE2018166, KIDNE2018167, KIDNE2018254, KIDNE2018268, KIDNE2018269, KIDNE2018287, KIDNE2018294, KIDNE2018462, KIDNE2018493,

[3056] KIDNE2018617, KIDNE2018678, KIDNE2018727, KIDNE2018863, KIDNE2018891, KIDNE2018989, KIDNE2018996, KIDNE2019074, KIDNE2019187, LIVER1000017, LIVER1000050, LIVER1000055, LIVER1000058, LIVER1000063, LIVER1000067, LIVER1000073, LIVER1000082, LIVER1000099, LIVER1000104, LIVER1000111, LIVER1000139, LIVER1000155, LIVER1000165, LIVER1000175, LIVER1000224, LIVER1000230, LIVER1000278, LIVER1000303, LIVER1000397, LIVER1000421, LIVER1000433, LIVER1000479, LIVER1000482, LIVER2000003, LIVER2000037, LIVER2000158, LIVER2000216, LIVER2000237, LIVER2000247, LIVER2000360, LIVER2000515, LIVER2000592, LIVER2000626, LIVER2000682, LIVER2000769, LIVER2000775, LIVER2001051, LIVER2001076, LIVER2001099, LIVER2001164,

[3057] LIVER2001191, LIVER2001265, LIVER2001329, LIVER2001389, LIVER2001461, LIVER2001835, LIVER2002638, LIVER2002644, LIVER2002660, LIVER2002702, LIVER2003008, LIVER2003065, LIVER2003234, LIVER2003511, LIVER2003524, LIVER2003568, LIVER2003800, LIVER2003854, LIVER2004074, LIVER2004392, LIVER2004514, LIVER2004565, LIVER2005028, LIVER2005198, LIVER2005218, LIVER2005376, LIVER2005385, LIVER2005512, LIVER2005520, LIVER2005527, LIVER2005544, LIVER2005625, LIVER2005728, LIVER2005973, LIVER2005981, LIVER2006006, LIVER2006251, LIVER2006410, LIVER2006469, LIVER2006644, LIVER2006764, LIVER2007415, LIVER2007548, LIVER2007568, LIVER2007721, LIVER2008053, LIVER2008465, LIVER2008473, LIVER2008580, LIVER2008706,

[3058] LIVER2008751, LIVER2008945, LIVER2008998, LIVER2009110, LIVER2009118, LIVER2009554, LYMPB1000158, LYMPB2000083, MAMGL1000017, MAMGL1000083, MAMGL1000096, MAMGL1000132, MAMGL1000151, MAMGL1000178, MAMGL1000182, MAMGL1000184, MESAN1000032, MESAN1000035, MESAN1000079, MESAN1000121, MESAN1000126, MESAN1000147, MESAN1000180, MESAN2000023, MESAN2000026, MESAN2000067, MESAN2000167, MESAN2000264, MESAN2000337, MESAN2000457, MESAN2000462, MESAN2000572, MESAN2000608, MESAN2000620, MESAN2000711, MESAN2000815, MESAN2000894, MESAN2001154, MESAN2001627, MESAN2001770, MESAN2001979, MESAN2001980, MESAN2002113, MESAN2002122, MESAN2002147, MESAN2002186, MESAN2002424, MESAN2002687, MESAN2002709, MESAN2002978,

[3059] MESAN2003035, MESAN2003037, MESAN2003039, MESAN2003058, MESAN2003101, MESAN2003190, MESAN2003322, MESAN2003490, MESAN2003529, MESAN2003646, MESAN2003662, MESAN2003709, MESAN2003851, MESAN2004138, MESAN2004288, MESAN2004575, MESAN2005284, MESAN2005303, MESAN2005371, MESAN2005724, MESAN2005808, MESAN2005811, MESAN2005957, MESAN2006022, MESAN2006043, MESAN2006328, MESAN2006401, MESAN2006580, MESAN2006599, MESAN2006743, MESAN2006953, MESAN2006971, MESAN2007032, MESAN2007440, MESAN2007597, MESAN2008222, MESAN2008334, MESAN2008415, MESAN2008460, MESAN2008536, MESAN2008729, MESAN2008821, MESAN2008926, MESAN2008936, MESAN2009019, MESAN2009081, MESAN2009105, MESAN2009311, MESAN2009418, MESAN2009503,

[3060] MESAN2009522, MESAN2010031, MESAN2010114, MESAN2010312, MESAN2010321, MESAN2010664, MESAN2010681, MESAN2011545, MESAN2011597, MESAN2011627, MESAN2011632, MESAN2011977, MESAN2012113, MESAN2012586, MESAN2012708, MESAN2012735, MESAN2013019, MESAN2013022, MESAN2013183, MESAN2013211, MESAN2013283, MESAN2013611, MESAN2013674, MESAN2013845, MESAN2013908, MESAN2013936, MESAN2014192, MESAN2014295, MESAN2014298, MESAN2014624, MESAN2015277, MESAN2015365, MESAN2015391, MESAN2015401, MESAN2015501, MESAN2015708, MESAN2016304, MESAN2016409, MESAN2016552, MESAN2016965, MESAN2017133, MESAN2017152, MESAN2017373, MESAN2017417, MESAN2018209, MESAN2018576, MESAN2018670, MESAN2018699, MESTC1000042, MESTC1000147,

[3061] MESTC2000150, MESTC2000153, MESTC2000170, N1ESE2000698, NB9N41000011, NB9N41000047, NB9N41000135, NB9N41000142, NB9N41000146, NB9N42000122, NB9N42000196, NB9N42000281, NB9N42000314, NB9N42000430, NB9N42000495, NB9N42001300, NCRRP1000129, NESOP1000010, NESOP1000087, NESOP1000108, NESOP2000231, NESOP2000452, NESOP2000499, NESOP2000504, NESOP2000744, NESOP2001144, NESOP2001433, NESOP2001656, NESOP2001694, NESOP2001752, NESOP2002352, NESOP2002418, NESOP2002487, NESOP2002738, NESOP2002780, NETRP1000034, NETRP1000082, NETRP2000086, NETRP2000182, NETRP2000439, NHNPC1000034, NHNPC1000037, NHNPC1000084, NHNPC1000101, NHNPC1000124, NHNPC2000062, NHNPC2000606, NHNPC2000877, NHNPC2001223, NHNPC2001312,

[3062] NHNPC2001816, NHNPC2001931, NHNPC2002565, NHNPC2002749, NOVAR1000015, NOVAR2000038, NOVAR2000136, NOVAR2000352, NOVAR2000412, NOVAR2000710, NOVAR2000962, NOVAR2001108, NOVAR2001620, NOVAR2001783, NOVAR2001876, NOVAR2002039, NT2NE1000004, NT2NE1000023, NT2NE1000024, NT2NE1000059, NT2NE1000063, NT2NE1000073, NT2NE1000083, NT2NE1000120, NT2NE1000122, NT2NE1000175, NT2NE1000181, NT2NE1000185, NT2NE2000038, NT2NE2000054, NT2NE2000057, NT2NE2000064, NT2NE2000109, NT2NE2000137, NT2NE2000156, NT2NE2000222, NT2NE2000284, NT2NE2000299, NT2NE2000353, NT2NE2000356, NT2NE2000369, NT2NE2000374, NT2NE2000386, NT2NE2000390, NT2NE2000392, NT2NE2000455, NT2NE2000470, NT2NE2000488, NT2NE2000517, NT2NE2000536,

[3063] NT2NE2000546, NT2NE2000548, NT2NE2000550, NT2NE2000586, NT2NE2000612, NT2NE2000636, NT2NE2000658, NT2NE2000706, NT2NE2000802, NT2NE2000808, NT2NE2000864, NT2NE2000909, NT2NE2000913, NT2NE2000951, NT2NE2000980, NT2NE2001000, NT2NE2001021, NT2NE2001040, NT2NE2001049, NT2NE2001142, NT2NE2001156, NT2NE2001180, NT2NE2001181, NT2NE2001188, NT2NE2001191, NT2NE2001247, NT2NE2001252, NT2NE2001324, NT2NE2001326, NT2NE2001337, NT2NE2001364, NT2NE2001372, NT2NE2001397, NT2NE2001403, NT2NE2001428, NT2NE2001432, NT2NE2001442, NT2NE2001524, NT2NE2001530, NT2NE2001617, NT2NE2001623, NT2NE2001626, NT2NE2001634, NT2NE2001655, NT2NE2001660, NT2NE2001666, NT2NE2001677, NT2NE2001698, NT2NE2001723, NT2NE2001725,

[3064] NT2NE2001874, NT2NE2001889, NT2NE2001923, NT2NE2002100, NT2NE2002162, NT2NE2002186, NT2NE2002285, NT2NE2002311, NT2NE2002620, NT2NE2002651, NT2NE2002732, NT2NE2002768, NT2NE2002791, NT2NE2002856, NT2NE2003150, NT2NE2003185, NT2NE2003252, NT2NE2003280, NT2NE2003308, NT2NE2003309, NT2NE2003315, NT2NE2003393, NT2NE2003408, NT2NE2003457, NT2NE2003485, NT2NE2003540, NT2NE2003571, NT2NE2003705, NT2NE2003752, NT2NE2004378, NT2NE2004490, NT2NE2004519, NT2NE2004606, NT2NE2004716, NT2NE2004740, NT2NE2004787, NT2NE2004916, NT2NE2005035, NT2NE2005223, NT2NE2005276, NT2NE2005317, NT2NE2005323, NT2NE2005358, NT2NE2005371, NT2NE2005395, NT2NE2005441, NT2NE2005517, NT2NE2005537, NT2NE2005555, NT2NE2005588,

[3065] NT2NE2005676, NT2NE2005720, NT2NE2005784, NT2NE2005804, NT2NE2005821, NT2NE2005876, NT2NE2005890, NT2NE2005921, NT2NE2005968, NT2NE2006075, NT2NE2006087, NT2NE2006103, NT2NE2006217, NT2NE2006288, NT2NE2006382, NT2NE2006387, NT2NE2006427, NT2NE2006432, NT2NE2006458, NT2NE2006531, NT2NE2006659, NT2NE2006784, NT2NE2006813, NT2NE2006894, NT2NE2006942, NT2NE2006958, NT2NE2007052, NT2NE2007220, NT2NE2007425, NT2NE2007725, NT2NE2007727, NT2NE2007786, NT2NE2007877, NT2NE2007967, NT2NE2008017, NT2NE2008060, NT2NE2008077, NT2NE2008213, NT2NE2008260, NT2NE2008378, NT2NE2008607, NT2NE2008639, NT2NE2008727, NT2NE2008783, NT2NE2008803, NT2NE2008867, NT2NE2008961, NT2NE2008997, NT2NE2009138, NT2NE2009295,

[3066] NT2NE2009426, NT2NE2009523, NT2NE2009608, NT2NE2009691, NT2NE2010056, NT2NE2010105, NT2NE2010150, NT2NE2010400, NT2NE2010632, NT2NE2010633, NT2NE2010654, NT2NE2010688, NT2NE2010781, NT2NE2011033, NT2NE2011036, NT2NE2011119, NT2NE2011154, NT2NE2011221, NT2NE2011411, NT2NE2011650, NT2NE2011684, NT2NE2011687, NT2NE2011691, NT2NE2011758, NT2NE2011823, NT2NE2011896, NT2NE2011998, NT2NE2012113, NT2NE2012199, NT2NE2012243, NT2NE2012361, NT2NE2012448, NT2NE2012457, NT2NE2012493, NT2NE2012505, NT2NE2012533, NT2NE2012603, NT2NE2012747, NT2NE2012847, NT2NE2012928, NT2NE2013019, NT2NE2013081, NT2NE2013189, NT2NE2013217, NT2NE2013547, NT2NE2014013, NT2NE2014028, NT2NE2014113, NT2NE2014176, NT2NE2014221,

[3067] NT2NE2014525, NT2NE2014650, NT2NE2014651, NT2NE2014681, NT2NE2014758, NT2NE2014869, NT2NE2014950, NT2NE2015061, NT2NE2015262, NT2NE2015275, NT2NE2015362, NT2NE2015480, NT2NE2015511, NT2NE2015565, NT2NE2015626, NT2NE2015747, NT2NE2015860, NT2NE2015885, NT2NE2015904, NT2NE2015974, NT2NE2016041, NT2NE2016387, NT2NE2016419, NT2NE2016519, NT2NE2016608, NT2NE2016766, NT2NE2016774, NT2NE2016971, NT2NE2017259, NT2NE2017332, NT2NE2017397, NT2NE2017480, NT2NE2017492, NT2NE2017508, NT2NE2017562, NT2NE2017590, NT2NE2017612, NT2NE2017721, NT2NE2017752, NT2NE2017792, NT2NE2018165, NT2NE2018176, NT2NE2018273, NT2NE2018376, NT2NE2018472, NT2NE2018594, NT2NE2018739, NT2NE2018916, NT2NE2019056, NT2NE2019076,

[3068] NT2NE2019099, NT2RI1000016, NT2RI1000035, NT2RI1000127, NT2RI1000164, NT2RI1000172, NT2RI2000004, NT2RI2000007, NT2RI2000116, NT2RI2000117, NT2RI2000128, NT2RI2000167, NT2RI2000173, NT2RI2000187, NT2RI2000270, NT2RI2000276, NT2RI2000282, NT2RI2000313, NT2RI2000341, NT2RI2000344, NT2RI2000348, NT2RI2000480, NT2RI2000575, NT2RI2000588, NT2RI2000597, NT2RI2000669, NT2RI2000671, NT2RI2000688, NT2RI2000704, NT2RI2000738, NT2RI2000775, NT2RI2000822, NT2RI2000829, NT2RI2000841, NT2RI2000865, NT2RI2000932, NT2RI2000974, NT2RI2000987, NT2RI2001010, NT2RI2001017, NT2RI2001030, NT2RI2001054, NT2RI2001083, NT2RI2001178, NT2RI2001235, NT2RI2001244, NT2RI2001307, NT2RI2001385, NT2RI2001409, NT2RI2001410,

[3069] NT2RI2001425, NT2RI2001449, NT2RI2001450, NT2RI2001474, NT2RI2001519, NT2RI2001595, NT2RI2001624, NT2RI2001726, NT2RI2001769, NT2RI2001782, NT2RI2001836, NT2RI2001846, NT2RI2001866, NT2RI2001952, NT2RI2002022, NT2RI2002041, NT2RI2002120, NT2RI2002153, NT2RI2002179, NT2RI2002252, NT2RI2002260, NT2RI2002270, NT2RI2002334, NT2RI2002359, NT2RI2002391, NT2RI2002447, NT2RI2002481, NT2RI2002507, NT2RI2002517, NT2RI2002530, NT2RI2002540, NT2RI2002549, NT2RI2002564, NT2RI2002592, NT2RI2002602, NT2RI2002699, NT2RI2002729, NT2RI2002819, NT2RI2002822, NT2RI2002865, NT2RI2002923, NT2RI2002926, NT2RI2002958, NT2RI2002970, NT2RI2003011, NT2RI2003067, NT2RI2003184, NT2RI2003222, NT2RI2003301, NT2RI2003360,

[3070] NT2RI2003361, NT2RI2003383, NT2RI2003392, NT2RI2003407, NT2RI2003419, NT2RI2003481, NT2RI2003487, NT2RI2003655, NT2RI2003667, NT2RI2003751, NT2RI2003884, NT2RI2003973, NT2RI2004059, NT2RI2004078, NT2RI2004079, NT2RI2004093, NT2RI2004136, NT2RI2004157, NT2RI2004190, NT2RI2004230, NT2RI2004284, NT2RI2004290, NT2RI2004304, NT2RI2004312, NT2RI2004381, NT2RI2004442, NT2RI2004468, NT2RI2004606, NT2RI2004618, NT2RI2004783, NT2RI2004818, NT2RI2004840, NT2RI2004884, NT2RI2004916, NT2RI2004962, NT2RI2004984, NT2RI2004985, NT2RI2005048, NT2RI2005069, NT2RI2005087, NT2RI2005115, NT2RI2005130, NT2RI2005150, NT2RI2005239, NT2RI2005246, NT2RI2005315, NT2RI2005353, NT2RI2005358, NT2RI2005368, NT2RI2005382,

[3071] NT2RI2005473, NT2RI2005520, NT2RI2005564, NT2RI2005579, NT2RI2005621, NT2RI2005628, NT2RI2005670, NT2RI2005710, NT2RI2005772, NT2RI2005814, NT2RI2005816, NT2RI2005851, NT2RI2005966, NT2RI2006071, NT2RI2006081, NT2RI2006126, NT2RI2006127, NT2RI2006183, NT2RI2006257, NT2RI2006271, NT2RI2006294, NT2RI2006345, NT2RI2006403, NT2RI2006445, NT2RI2006487, NT2RI2006565, NT2RI2006640, NT2RI2006659, NT2RI2006662, NT2RI2006667, NT2RI2006679, NT2RI2006682, NT2RI2006686, NT2RI2006703, NT2RI2006716, NT2RI2006762, NT2RI2006788, NT2RI2006838, NT2RI2006853, NT2RI2006973, NT2RI2007046, NT2RI2007048, NT2RI2007084, NT2RI2007096, NT2RI2007116, NT2RI2007214, NT2RI2007277, NT2RI2007303, NT2RI2007334, NT2RI2007377,

[3072] NT2RI2007386, NT2RI2007406, NT2RI2007439, NT2RI2007507, NT2RI2007593, NT2RI2007629, NT2RI2007751, NT2RI2007754, NT2RI2007827, NT2RI2007877, NT2RI2007884, NT2RI2007891, NT2RI2007956, NT2RI2007965, NT2RI2007987, NT2RI2008050, NT2RI2008141, NT2RI2008204, NT2RI2008221, NT2RI2008233, NT2RI2008455, NT2RI2008481, NT2RI2008502, NT2RI2008566, NT2RI2008598, NT2RI2008622, NT2RI2008714, NT2RI2008791, NT2RI2008801, NT2RI2008812, NT2RI2008841, NT2RI2008952, NT2RI2009005, NT2RI2009101, NT2RI2009144, NT2RI2009151, NT2RI2009194, NT2RI2009215, NT2RI2009239, NT2RI2009259, NT2RI2009269, NT2RI2009289, NT2RI2009301, NT2RI2009402, NT2RI2009406, NT2RI2009517, NT2RI2009585, NT2RI2009595, NT2RI2009855, NT2RI2010283,

[3073] NT2RI2010508, NT2RI2010795, NT2RI2011422, NT2RI2011450, NT2RI2011683, NT2RI2011803, NT2RI2012659, NT2RI2012990, NT2RI2013345, NT2RI2013373, NT2RI2014247, NT2RI2014551, NT2RI2014683, NT2RI2014733, NT2RI2015239, NT2RI2016128, NT2RI2016134, NT2RI2017529, NT2RI2018311, NT2RI2018363, NT2RI2018883, NT2RI2018950, NT2RI2019751, NT2RI2019826, NT2RI2020390, NT2RI2020703, NT2RI2021463, NT2RI2021625, NT2RI2022468, NT2RI2022584, NT2RI2023303, NT2RI2023671, NT2RI2024008, NT2RI2024460, NT2RI2024496, NT2RI2025075, NT2RI2025255, NT2RI2025564, NT2RI2025565, NT2RI2025909, NT2RI2025957, NT2RI2025976, NT2RI2026758, NT2RI2027081, NT2RI2027157, NT2RI2027224, NT2RI2027323, NT2RI2027396, NT2RI2027484, NT2RI2027975,

[3074] NT2RI2028213, NT2RI2028222, NT2RI2028537, NT2RI2028642, NT2RI3000174, NT2RI3000213, NT2RI3000423, NT2RI3000622, NT2RI3001132, NT2RI3001263, NT2RI3001279, NT2RI3001348, NT2RI3001445, NT2RI3001458, NT2RI3001573, NT2RI3001967, NT2RI3002303, NT2RI3002557, NT2RI3002842, NT2RI3003027, NT2RI3003031, NT2RI3003095, NT2RI3003162, NT2RI3003362, NT2RI3003382, NT2RI3003409, NT2RI3003738, NT2RI3003925, NT2RI3004133, NT2RI3004381, NT2RI3004510, NT2RI3005202, NT2RI3005403, NT2RI3005416, NT2RI3005861, NT2RI3005923, NT2RI3005928, NT2RI3006132, NT2RI3006171, NT2RI3006376, NT2RI3006666, NT2RI3006673, NT2RI3006796, NT2RI3007065, NT2RI3007095, NT2RI3007158, NT2RI3007167, NT2RI3007213, NT2RI3007291, NT2RI3007443,

[3075] NT2RI3007684, NT2RI3007757, NT2RI3007878, NT2RI3007978, NT2RI3008055, NT2RI3008162, NT2RI3008179, NT2RI3008228, NT2RI3008442, -NT2RI3008652, NT2RI3008697, NT2RI3008974, NT2RI3009480, NT2RI3009524, NT2RP6000005, NT2RP6000008, NT2RP6000032, NT2RP6000033, NT2RP6000059, NT2RP6000060, NT2RP6000077, NT2RP6000086, NT2RP6000119, NT2RP6000127, NT2RP6000140, NT2RP6000150, NT2RP7000041, NT2RP7000086, NT2RP7000109, NT2RP7000112, NT2RP7000311, NT2RP7000359, NT2RP7000364, NT2RP7000380, NT2RP7000391, NT2RP7000425, NT2RP7000579, NT2RP7000812, NT2RP7000926, NT2RP7001074, NT2RP7001306, NT2RP7001319, NT2RP7001335, NT2RP7001364, NT2RP7001475, NT2RP7001532, NT2RP7001591, NT2RP7001602, NT2RP7001856, NT2RP7002064,

[3076] NT2RP7002151, NT2RP7002163, NT2RP7002243, NT2RP7002282, NT2RP7002376, NT2RP7002478, NT2RP7002554, NT2RP7002594, NT2RP7002603, NT2RP7002650, NT2RP7002829, NT2RP7002841, NT2RP7002875, NT2RP7002978, NT2RP7003025, NT2RP7003050, NT2RP7003055, NT2RP7003084, NT2RP7003091, NT2RP7003107, NT2RP7003134, NT2RP7003148, NT2RP7003439, NT2RP7003511, NT2RP7003632, NT2RP7004027, NT2RP7004080, NT2RP7004114, NT2RP7004123, NT2RP700434.8, NT2RP7004358, NT2RP7004396, NT2RP7004428, NT2RP7004481, NT2RP7004541, NT2RP7004559, NT2RP7004656, NT2RP7004722, NT2RP7004766, NT2RP7004790, NT2RP7004884, NT2RP7004915, NT2RP7004925, NT2RP7004961, NT2RP7004964, NT2RP7004975, NT2RP7005118, NT2RP7005205, NT2RP7005219, NT2RP7005323,

[3077] NT2RP7005468, NT2RP7005493, NT2RP7005513, NT2RP7005629, NT2RP7005631, NT2RP7005669, NT2RP7005846, NT2RP7006075, NT2RP7006141, NT2RP7006160, NT2RP7006162, NT2RP7006263, NT2RP7006374, NT2RP7006395, NT2RP7006408, NT2RP7006457, NT2RP7006490, NT2RP7006601, NT2RP7006619, NT2RP7006621, NT2RP7006636, NT2RP7006701, NT2RP7006853, NT2RP7006886, NT2RP7006887, NT2RP7006980, NT2RP7006986, NT2RP7006995, NT2RP7007177, NT2RP7007221, NT2RP7007226, NT2RP7007269, NT2RP7007359, NT2RP7007406, NT2RP7007480, NT2RP7007504, NT2RP7007530, NT2RP7007594, NT2RP7007610, NT2RP7007617, NT2RP7007766, NT2RP7007925, NT2RP7007975, NT2RP7008013, NT2RP7008015, NT2RP7008133, NT2RP7008137, NT2RP7008142, NT2RP7008144, NT2RP7008161,

[3078] NT2RP7008360, NT2RP7008396, NT2RP7008406, NT2RP7008435, NT2RP7008441, NT2RP7008454, NT2RP7008487, NT2RP7008544, NT2RP7008550, NT2RP7008557, NT2RP7008623, NT2RP7008657, NT2RP7008714, NT2RP7008720, NT2RP7008855, NT2RP7008863, NT2RP7009012, NT2RP7009019, NT2RP7009030, NT2RP7009097, NT2RP7009168, NT2RP7009215, NT2RP7009225, NT2RP7009236, NT2RP7009253, NT2RP7009267, NT2RP7009363, NT2RP7009397, NT2RP7009429, NT2RP7009439, NT2RP7009466, NT2RP7009498, NT2RP7009502, NT2RP7009507, NT2RP7009577, NT2RP7009743, NT2RP7009867, NT2RP7010109, NT2RP7010128, NT2RP7010235, NT2RP7010275, NT2RP7010521, NT2RP7010599, NT2RP7010612, NT2RP7010817, NT2RP7011086, NT2RP7011132, NT2RP7011268, NT2RP7011318, NT2RP7011452,

[3079] NT2RP7011570, NT2RP7011721, NT2RP7011909, NT2RP7012291, NT2RP7012516, NT2RP7012776, NT2RP7013002, NT2RP7013374, NT2RP7013499, NT2RP7013573, NT2RP7013729, NT2RP7013764, NT2RP7013795, NT2RP7013999, NT2RP7014005, NT2RP7014178, NT2RP7014348, NT2RP7014420, NT2RP7014583, NT2RP7014721, NT2RP7014743, NT2RP7014778, NT2RP7014906, NT2RP7015080, NT2RP7015431, NT2RP7015503, NT2RP7015512, NT2RP7015676, NT2RP7015789, NT2RP7015996, NT2RP7016508, NT2RP7016574, NT2RP7016622, NT2RP7016911, NT2RP7017139, NT2RP7017284, NT2RP7017365, NT2RP7017474, NT2RP7017546, NT2RP7017567, NT2RP7017795, NT2RP7017971, NT2RP7018032, NT2RP7018126, NT2RP7018197, NT2RP7018206, NT2RP7018340, NT2RP7018586, NT2RP7018802, NT2RP7018871,

[3080] NT2RP7019064, NT2RP7019135, NT2RP7019273, NT2RP7019367, NT2RP7019401, NT2RP7019445, NT2RP7019543, NT2RP7019682, NT2RP7019835, NT2RP7020112, NT2RP7020343, NT2RP7020379, NT2RP8000137, NT2RP8000296, NT2RP8000483, NT2RP8000521, NT2RP8000633, NT2RP8001363, NT2RP8001407, NT2RP8001584, NT2RP8001604, NT2RP8001605, NT2RP8003490, NT2RP8003657, NT2RP8003787, NT2RP8004306, NT2RP8005546, NT2RP8006452, NT2RP8006521, NT2RP8007416, NT2RP8007503, NT2RP8007715, NT2RP8008057, NT2RP8009248, NTONG1000006, NTONG1000047, NTONG1000052, NTONG1000075, NTONG1000087, NTONG1000123, NTONG1000130, NTONG1000161, NTONG1000172, NTONG1000182, NTONG1000213, NTONG1000214, NTONG1000247, NTONG1000257, NTONG1000264, NTONG2000040,

[3081] NTONG2000107, NTONG2000231, NTONG2000363, NTONG2000492, NTONG2000499, NTONG2000531, NTONG2000583, NTONG2000858, NTONG2000876, NTONG2000966, NTONG2001014, NTONG2001079, NTONG2001157, NTONG2001173, NTONG2001220, NTONG2001362, NTONG2001428, NTONG2001532, NTONG2001612, NTONG2001619, NTONG2001642, NTONG2001657, NTONG2001676, NTONG2002278, NTONG2002807, NTONG2002948, NTONG2002970, NTONG2002985, NTONG2003158, NTONG2003210, NTONG2003316, NTONG2003409, NTONG2003515, NTONG2003805, NTONG2003839, NTONG2003852, NTONG2003897, NTONG2004095, NTONG2004308, NTONG2004521, NTONG2004614, NTONG2004690, NTONG2004806, NTONG2004829, NTONG2004918, NTONG2004991, NTONG2005062, NTONG2005086, NTONG2005137, NTONG2005153,

[3082] NTONG2005265, NTONG2005277, NTONG2005363, NTONG2005373, NTONG2005480, NTONG2005497, NTONG2005577, NTONG2005657, NTONG2005822, NTONG2005897, NTONG2005969, NTONG2006099, NTONG2006187, NTONG2006324, NTONG2006354, NTONG2006440, NTONG2006501, NTONG2006646, NTONG2006709, NTONG2006783, NTONG2007020, NTONG2007028, NTONG2007034, NTONG2007249, NTONG2007517, NTONG2007522, NTONG2007756, NTONG2008093, NTONG2008143, NTONG2008365, NTONG2008522, NTONG2008672, NTONG2008862, NTONG2008939, NTONG2009060, NTONG2009068, NTONG2009229, NTONG2009233, NTONG2009468, OCBBF1000016, OCBBF1000030, OCBBF1000042, OCBBF1000049, OCBBF1000054, OCBBF1000067, OCBBF1000080, OCBBF1000085, OCBBF1000091, OCBBF1000104, OCBBF1000114,

[3083] OCBBF1000118, OCBBF1000119, OCBBF1000122, OCBBF1000130, OCBBF1000138, OCBBF1000145, OCBBF1000146, OCBBF1000153, OCBBF1000175, OCBBF1000192, OCBBF1000254, OCBBF2000126, OCBBF2000178, OCBBF2000231, OCBBF2000277, OCBBF2000287, OCBBF2000323, OCBBF2000452, OCBBF2000522, OCBBF2000677, OCBBF2000703, OCBBF2000712, OCBBF2000719, OCBBF2000824, OCBBF2000904, OCBBF2000998, OCBBF2001075, OCBBF2001101, OCBBF2001124, OCBBF2001176, OCBBF2001196, OCBBF2001307, OCBBF2001323, OCBBF2001389, OCBBF2001402, OCBBF2001473, OCBBF2001494, OCBBF2001527, OCBBF2001639, OCBBF2001681, OCBBF2001706, OCBBF2001749, OCBBF2001910, OCBBF2001931, OCBBF2001961, OCBBF2001983, OCBBF2002015, OCBBF2002124, OCBBF2002161, OCBBF2002290,

[3084] OCBBF2002357, OCBBF2002376, OCBBF2002615, OCBBF2002626, OCBBF2002663, OCBBF2002805, OCBBF2002920, OCBBF2002980, OCBBF2003028, OCBBF2003091, OCBBF2003246, OCBBF2003327, OCBBF2003543, OCBBF2003593, OCBBF2003744, OCBBF2004038, OCBBF2004104, OCBBF2004147, OCBBF2004168, OCBBF2004235, OCBBF2004259, OCBBF2004385, OCBBF2004418, OCBBF2004478, OCBBF2004482, OCBBF2004533, OCBBF2004567, OCBBF2004612, OCBBF2004647, OCBBF2004669, OCBBF2004826, OCBBF2004866, OCBBF2004883, OCBBF2004889, OCBBF2004930, OCBBF2004984, OCBBF2005066, OCBBF2005077, OCBBF2005161, OCBBF2005343, OCBBF2005349, OCBBF2005373, OCBBF2005420, OCBBF2005428, OCBBF2005433, OCBBF2005546, OCBBF2005843, OCBBF2005901, OCBBF2006030, OCBBF2006058,

[3085] OCBBF2006113, OCBBF2006148, OCBBF2006154, OCBBF2006172, OCBBF2006214, OCBBF2006241, OCBBF2006313, OCBBF2006388, OCBBF2006438, OCBBF2006567, OCBBF2006624, OCBBF2006639, OCBBF2006660, OCBBF2006764, OCBBF2006849, OCBBF2006859, OCBBF2006972, OCBBF2007039, OCBBF2007051, OCBBF2007068, OCBBF2007114, OCBBF2007121, OCBBF2007184, OCBBF2007194, OCBBF2007196, OCBBF2007238, OCBBF2007414, OCBBF2007428, OCBBF2007478, OCBBF2007485, OCBBF2007520, OCBBF2007555, OCBBF2007610, OCBBF2007622, OCBBF2007756, OCBBF2007762, OCBBF2007931, OCBBF2007946, OCBBF2008005, OCBBF2008116, OCBBF2008138, OCBBF2008283, OCBBF2008330, OCBBF2008340, OCBBF2008366, OCBBF2008466, OCBBF2008483, OCBBF2008511, OCBBF2008520, OCBBF2008569,

[3086] OCBBF2008586, OCBBF2008640, OCBBF2008691, OCBBF2008701, OCBBF2008724, OCBBF2008760, OCBBF2008768, OCBBF2008775, OCBBF2008790, OCBBF2008814, OCBBF2008822, OCBBF2009095, OCBBF2009115, OCBBF2009301, OCBBF2009352, OCBBF2009391, OCBBF2009536, OCBBF2009571, OCBBF2009583, OCBBF2009603, OCBBF2009788, OCBBF2009920, OCBBF2009926, OCBBF2010040, OCBBF2010140, OCBBF2010281, OCBBF2010313, OCBBF2010404, OCBBF2010416, OCBBF2010420, OCBBF2010557, OCBBF2010604, OCBBF2010709, OCBBF2010792, OCBBF2010841, OCBBF2010843, OCBBF2010858, OCBBF2010863, OCBBF2010871, OCBBF2010931, OCBBF2010945, OCBBF2010978, OCBBF2010989, OCBBF2011073, OCBBF2011137, OCBBF2011160, OCBBF2011177, OCBBF2011228, OCBBF2011232, OCBBF2011283,

[3087] OCBBF2011311, OCBBF2011625, OCBBF2011669, OCBBF2011685, OCBBF2011706, OCBBF2011722, OCBBF2011767, OCBBF2011855, OCBBF2011872, OCBBF2011887, OCBBF2011897, OCBBF2011914, OCBBF2011960, OCBBF2011981, OCBBF2012028, OCBBF2012039, OCBBF2012095, OCBBF2012139, OCBBF2012191, OCBBF2012262, OCBBF2012320, OCBBF2012436, OCBBF2012525, OCBBF2012678, OCBBF2012704, OCBBF2012714, OCBBF2012755, OCBBF2012812, OCBBF2012881, OCBBF2012908, OCBBF2012936, OCBBF2012990, OCBBF2013011, OCBBF2013049, OCBBF2013091, OCBBF2013123, OCBBF2013127, OCBBF2013149, OCBBF2013208, OCBBF2013285, OCBBF2013319, OCBBF2013324, OCBBF2013366, OCBBF2013481, OCBBF2013507, OCBBF2013721, OCBBF2013789, OCBBF2013843, OCBBF2013883, OCBBF2013926,

[3088] OCBBF2014052, OCBBF2014064, OCBBF2014089, OCBBF2014322, OCBBF2014386, OCBBF2014576, OCBBF2014707, OCBBF2014745, OCBBF2014828, OCBBF2014880, OCBBF2014928, OCBBF2015031, OCBBF2015081, OCBBF2015115, OCBBF2015232, OCBBF2015233, OCBBF2015285, OCBBF2015335, OCBBF2015503, OCBBF2015506, OCBBF2015599, OCBBF2015645, OCBBF2015659, OCBBF2015751, OCBBF2015931, OCBBF2015980, OCBBF2016038, OCBBF2016405, OCBBF2016467, OCBBF2016590, OCBBF2016591, OCBBF2016612, OCBBF2016689, OCBBF2016690, OCBBF2016729, OCBBF2016841, OCBBF2017035, OCBBF2017055, OCBBF2017069, OCBBF2017306, OCBBF2017325, OCBBF2017489, OCBBF2017516, OCBBF2017665, OCBBF2017882, OCBBF2017888, OCBBF2018012, OCBBF2018014, OCBBF2018084, OCBBF2018167,

[3089] OCBBF2018206, OCBBF2018229, OCBBF2018234, OCBBF2018362, OCBBF2018380, OCBBF2018581, OCBBF2018663, OCBBF2018687, OCBBF2018828, OCBBF2018934, OCBBF2019108, OCBBF2019195, OCBBF2019327, OCBBF2019684, OCBBF2019761, OCBBF2019823, OCBBF2019950, OCBBF2020318, OCBBF2020343, OCBBF2020453, OCBBF2020741, OCBBF2020801, OCBBF2020825, OCBBF2020838, OCBBF2021214, OCBBF2021286, OCBBF2021323, OCBBF2021518, OCBBF2021788, OCBBF2021833, OCBBF2022351, OCBBF2022573, OCBBF2022574, OCBBF2023162, OCBBF2023598, OCBBF2023643, OCBBF2024463, OCBBF2024589, OCBBF2024719, OCBBF2024779, OCBBF2024781, OCBBF2025028, OCBBF2025115, OCBBF2025198, OCBBF2025451, OCBBF2025458, OCBBF2025527, OCBBF2025631, OCBBF2025730, OCBBF2026025,

[3090] OCBBF2026035, OCBBF2026144, OCBBF2026368, OCBBF2026645, OCBBF2026649, OCBBF2026690, OCBBF2026981, OCBBF2027148, OCBBF2027197, OCBBF2027354, OCBBF2027423, OCBBF2027478, OCBBF2027481, OCBBF2027511, OCBBF2027661, OCBBF2027728, OCBBF2027782, OCBBF2027868, OCBBF2028055, OCBBF2028173, OCBBF2028421, OCBBF2029471, OCBBF2029901, OCBBF2030116, OCBBF2030329, OCBBF2030354, OCBBF2030517, OCBBF2030574, OCBBF2030708, OCBBF2030927, OCBBF2030963, OCBBF2031167, OCBBF2031198, OCBBF2031366, OCBBF2031561, OCBBF2032152, OCBBF2032274, OCBBF2032539, OCBBF2032590, OCBBF2032599, OCBBF2032611, OCBBF2032671, OCBBF2033295, OCBBF2033413, OCBBF2033869, OCBBF2033948, OCBBF2034333, OCBBF2034529, OCBBF2034637, OCBBF2034906,

[3091] OCBBF2035110, OCBBF2035214, OCBBF2035226, OCBBF2035390, OCBBF2035564, OCBBF2035658, OCBBF2035823, OCBBF2035885, OCBBF2035916, OCBBF2036019, OCBBF2036031, OCBBF2036225, OCBBF2036476, OCBBF2036743, OCBBF2036752, OCBBF2037068, OCBBF2037340, OCBBF2037398, OCBBF2037464, OCBBF2037547, OCBBF2037598, OCBBF2037638, OCBBF2038238, OCBBF2038285, OCBBF2038317, OCBBF3000097, OCBBF3000213, OCBBF3000372, OCBBF3000380, OCBBF3000743, OCBBF3000830, OCBBF3001076, OCBBF3001202, OCBBF3001333, OCBBF3001616, OCBBF3002553, OCBBF3002600, OCBBF3002654, OCBBF3003103, OCBBF3003209, OCBBF3003592, OCBBF3003745, OCBBF3003761, OCBBF3004264, OCBBF3004314, OCBBF3004487, OCBBF3004972, OCBBF3005330, OCBBF3005597, OCBBF3005843,

[3092] OCBBF3006802, OCBBF3006986, OCBBF3007078, OCBBF3007704, OCBBF3008230, OCBBF3008392, OCBBF3008835, OCBBF3009192, OCBBF3009279, PANCR1000012, PANCR1000021, PANCR1000081, PANCR1000086, PANCR1000091, PANCR1000185, PEBLM1000024, PEBLM1000029, PEBLM1000034, PEBLM1000062, PEBLM1000068, PEBLM1000071, PEBLM1000083, PEBLM1000147, PEBLM1000174, PEBLM1000180, PEBLM2000112, PEBLM2000126, PEBLM2000147, PEBLM2000170, PEBLM2000180, PEBLM2000213, PEBLM2000248, PEBLM2000270, PEBLM2000321, PEBLM2000333, PEBLM2000395, PEBLM2000479, PEBLM2000502, PEBLM2001312, PEBLM2001465, PEBLM2001488, PEBLM2002432, PEBLM2002455, PEBLM2002594, PEBLM2002887, PEBLM2003426, PEBLM2003765, PEBLM2003935, PEBLM2004015, PEBLM2004216,

[3093] PEBLM2004290, PEBLM2004497, PEBLM2005282, PEBLM2005615, PEBLM2005632, PEBLM2005697, PEBLM2006031, PEBLM2006036, PEBLM2006049, PEBLM2006113, PEBLM2006135, PEBLM2006215, PEBLM2006283, PEBLM2006298, PEBLM2006366, PEBLM2006709, PEBLM2006912, PEBLM2007112, PEBLM2007140, PEBLM2007188, PEBLM2007296, PEBLM2007437, PEBLM2007447, PEBLM2007598, PEBLM2007832, PEBLM2007834, PEBLM2008106, PEBLM2008576, PEBLM2008605, PERIC1000025, PERIC1000147, PERIC2000180, PERIC2000214, PERIC2000386, PERIC2000387, PERIC2000422, PERIC2000473, PERIC2000478, PERIC2000889, PERIC2000914, PERIC2001227, PERIC2001228, PERIC2001379, PERIC2001504, PERIC2001703, PERIC2001764, PERIC2002243, PERIC2002272, PERIC2002452, PERIC2002766,

[3094] PERIC2003001, PERIC2003090, PERIC2003287, PERIC2003349, PERIC2003452, PERIC2003699, PERIC2003720, PERIC2003834, PERIC2003919, PERIC2003957, PERIC2004028, PERIC2004131, PERIC2004259, PERIC2004379, PERIC2004429, PERIC2004510, PERIC2004613, PERIC2004909, PERIC2005111, PERIC2005117, PERIC2005305, PERIC2005347, PERIC2005370, PERIC2005936, PERIC2006035, PERIC2006121, PERIC2006443, PERIC2006945, PERIC2006960, PERIC2007439, PERIC2007914, PERIC2008008, PERIC2008385, PERIC2009001, PERIC2009086, PERIC2009329, PERIC2009566, PLACE5000001, PLACE5000037, PLACE5000058, PLACE5000066, PLACE5000070, PLACE5000080, PLACE5000105, PLACE5000115, PLACE5000116, PLACE5000129, PLACE5000139, PLACE5000153, PLACE5000171,

[3095] PLACE5000172, PLACE5000178, PLACE5000245, PLACE5000260, PLACE5000282, PLACE5000297, PLACE5000372, PLACE5000492, PLACE5000522, PLACE5000527, PLACE6000012, PLACE6000044, PLACE6000055, PLACE6000070, PLACE6000137, PLACE6000191, PLACE6000205, PLACE6000231, PLACE6000296, PLACE6000314, PLACE6000325, PLACE6000348, PLACE6000371, PLACE6000424, PLACE6000426, PLACE6000429, PLACE6000450, PLACE6000523, PLACE6000550, PLACE6000552, PLACE6000555, PLACE6000619, PLACE6000630, PLACE6000953, PLACE6001118, PLACE6001153, PLACE6001185, PLACE6001262, PLACE6001294, PLACE6001443, PLACE6001536, PLACE6001557, PLACE6001712, PLACE6001740, PLACE6001823, PLACE6001886, PLACE6001923, PLACE6001925, PLACE6001933, PLACE6002011,

[3096] PLACE6002016, PLACE6002056, PLACE6002157, PLACE6002312, PLACE6002323, PLACE6002345, PLACE6002419, PLACE6002462, PLACE6002647, PLACE6002668, PLACE6002692, PLACE6002699, PLACE6002710, PLACE6002871, PLACE6002949, PLACE6003004, PLACE6003094, PLACE6003109, PLACE6003204, PLACE6003218, PLACE6003372, PLACE6003399, PLACE6003539, PLACE6003621, PLACE6003705, PLACE6003740, PLACE6003745, PLACE6003771, PLACE6003796, PLACE6003839, PLACE6003850, PLACE6004005, PLACE6004101, PLACE6004219, PLACE6004336, PLACE6004368, PLACE6004380, PLACE6004396, PLACE6004454, PLACE6004464, PLACE6004491, PLACE6004663, PLACE6004687, PLACE6004738, PLACE6004931, PLACE6004966, PLACE6004993, PLACE6005007, PLACE6005029, PLACE6005108,

[3097] PLACE6005234, PLACE6005283, PLACE6005294, PLACE6005328, PLACE6005351, PLACE6005423, PLACE6005487, PLACE6005535, PLACE6005546, PLACE6005559, PLACE6005579, PLACE6005691, PLACE6005786, PLACE6006042, PLACE6006077, PLACE6006137, PLACE6006158, PLACE6006186, PLACE6006217, PLACE6006222, PLACE6006266, PLACE6006287, PLACE6006394, PLACE6006474, PLACE6006566, PLACE6006697, PLACE6006822, PLACE6006871, PLACE6006905, PLACE6006988, PLACE6007050, PLACE6007180, PLACE6007239, PLACE6007242, PLACE6007309, PLACE6007373, PLACE6007380, PLACE6007433, PLACE6007436, PLACE6007482, PLACE6007687, PLACE6007787, PLACE6007798, PLACE6007807, PLACE6007925, PLACE6008036, PLACE6008094, PLACE6008126, PLACE6008285, PLACE6008444,

[3098] PLACE6008453, PLACE6008640, PLACE6008750, PLACE6008768, PLACE6008824, PLACE6008989, PLACE6009006, PLACE6009008, PLACE6009228, PLACE6009237, PLACE6009338, PLACE6009419, PLACE6009430, PLACE6009482, PLACE6009524, PLACE6009527, PLACE6009560, PLACE6009590, PLACE6009821, PLACE6009835, PLACE6009853, PLACE6010463, PLACE6010485, PLACE6010568, PLACE6010701, PLACE6010704, PLACE6010732, PLACE6010765, PLACE6010848, PLACE6010925, PLACE6010936, PLACE6010991, PLACE6011041, PLACE6011102, PLACE6011156, PLACE6011211, PLACE6011260, PLACE6011627, PLACE6011774, PLACE6011881, PLACE6011907, PLACE6011970, PLACE6011975, PLACE6012108, PLACE6012168, PLACE6012297, PLACE6012308, PLACE6012574, PLACE6012908, PLACE6012936,

[3099] PLACE6012942, PLACE6013232, PLACE6013288, PLACE6013386, PLACE6013400, PLACE6013650, PLACE6013672, PLACE6013883, PLACE6013884, PLACE6013885, PLACE6014043, PLACE6014064, PLACE6014516, PLACE6014882, PLACE6015211, PLACE6015322, PLACE6015445, PLACE6015460, PLACE6015591, PLACE6015729, PLACE6015731, PLACE6015939, PLACE6016030, PLACE6016093, PLACE6016105, PLACE6016160, PLACE6016210, PLACE6016254, PLACE6016942, PLACE6016984, PLACE6017002, PLACE6017431, PLACE6017564, PLACE6017578, PLACE6017626, PLACE6017701, PLACE6017714, PLACE6018107, PLACE6018187, PLACE6018235, PLACE6018441, PLACE6018487, PLACE6018497, PLACE6018769, PLACE6018834, PLACE6018843, PLACE6018863, PLACE6018938, PLACE6019385, PLACE6019542,

[3100] PLACE6019600, PLACE6019674, PLACE6019676, PLACE6019701, PLACE6019932, PLACE6020031, PLACE6020145, PLACE7000167, PLACE7000170, PLACE7000266, PLACE7000333, PLACE7000410, PLACE7000502, PLACE7000707, PLACE7001544, PLACE7001759, PLACE7001936, PLACE7002303, PLACE7002641, PLACE7003639, PLACE7003657, PLACE7003684, PLACE7003985, PLACE7004961, PLACE7005169, PLACE7005671, PLACE7005840, PLACE7006051, PLACE7006090, PLACE7006240, PLACE7006268, PLACE7006275, PLACE7006498, PLACE7006540, PLACE7007379, PLACE7007644, PLACE7007973, PLACE7008136, PLACE7008261, PLACE7008431, PLACE7008623, PLACE7008766, PLACE7009563, PROST1000033, PROST1000039, PROST1000065, PROST1000083, PROST1000085, PROST1000110, PROST1000120,

[3101] PROST1000123, PROST1000136, PROST1000145, PROST1000152, PROST1000167, PROST1000184, PROST1000215, PROST1000217, PROST1000246, PROST1000262, PROST1000272, PROST1000298, PROST1000322, PROST1000334, PROST1000343, PROST1000362, PROST1000377, PROST1000383, PROST1000412, PROST1000419, PROST1000451, PROST1000480, PROST1000485, PROST1000493, PROST1000512, PROST1000526, PROST1000527, PROST1000528, PROST1000536, PROST1000559, PROST1000575, PROST2000036, PROST2000053, PROST2000067, PROST2000105, PROST2000143, PROST2000162, PROST2000165, PROST2000176, PROST2000203, PROST2000206, PROST2000212, PROST2000241, PROST2000267, PROST2000273, PROST2000274, PROST2000277, PROST2000337, PROST2000432, PROST2000452,

[3102] PROST2000463, PROST2000470, PROST2000505, PROST2000572, PROST2000717, PROST2000760, PROST2000761, PROST2000835, PROST2000893, PROST2000961, PROST2001002, PROST2001116, PROST2001138, PROST2001213, PROST2001283, PROST2001414, PROST2001415, PROST2001465, PROST2001540, PROST2001599, PROST2001611, PROST2001636, PROST2001739, PROST2001796, PROST2001805, PROST2001823, PROST2001899, PROST2001998, PROST2002078, PROST2002101, PROST2002162, PROST2002212, PROST2002227, PROST2002338, PROST2002425, PROST2002488, PROST2002489, PROST2002527, PROST2002591, PROST2002602, PROST2002633, PROST2002651, PROST2002682, PROST2002685, PROST2002722, PROST2002736, PROST2002842, PROST2002897, PROST2002906, PROST2002927,

[3103] PROST2002960, PROST2003102, PROST2003117, PROST2003210, PROST2003302, PROST2003303, PROST2003324, PROST2003340, PROST2003396, PROST2003428, PROST2003472, PROST2003517, PROST2003537, PROST2003563, PROST2003577, PROST2003583, PROST2003586, PROST2003628, PROST2003635, PROST2003674, PROST2003676, PROST2003725, PROST2003732, PROST2003775, PROST2003922, PROST2003930, PROST2004115, PROST2004142, PROST2004146, PROST2004161, PROST2004251, PROST2004332, PROST2004481, PROST2004526, PROST2004570, PROST2004727, PROST2004742, PROST2004744, PROST2004817, PROST2005039, PROST2005067, PROST2005076, PROST2005093, PROST2005121, PROST2005131, PROST2005143, PROST2005228, PROST2005272, PROST2005285, PROST2005426,

[3104] PROST2005466, PROST2005630, PROST2005683, PROST2005788, PROST2005793, PROST2005880, PROST2005886, PROST2005904, PROST2005919, PROST2005943, PROST2006008, PROST2006020, PROST2006030, PROST2006196, PROST2006201, PROST2006260, PROST2006450, PROST2006491, PROST2006510, PROST2006536, PROST2006579, PROST2006688, PROST2006766, PROST2006782, PROST2006933, PROST2006988, PROST2007122, PROST2007200, PROST2007237, PROST2007248, PROST2007289, PROST2007328, PROST2007382, PROST2007389, PROST2007416, PROST2007528, PROST2007818, PROST2007950, PROST2007956, PROST2007974, PROST2007988, PROST2008079, PROST2008088, PROST2008243, PROST2008245, PROST2008268, PROST2008271, PROST2008360, PROST2008447, PROST2008468,

[3105] PROST2008472, PROST2008516, PROST2008724, PROST2008835, PROST2008993, PROST2009022, PROST2009208, PROST2009222, PROST2009254, PROST2009273, PROST2009320, PROST2009347, PROST2009365, PROST2009388, PROST2009400, PROST2009470, PROST2009483, PROST2009571, PROST2009731, PROST2009736, PROST2009795, PROST2009901, PROST2009909, PROST2010046, PROST2010219, PROST2010250, PROST2010318, PROST2010326, PROST2010382, PROST2010400, PROST2010545, PROST2010606, PROST2010782, PROST2010885, PROST2011012, PROST2011038, PROST2011297, PROST2011410, PROST2011439, PROST2011482, PROST2011631, PROST2011660, PROST2012005, PROST2012016, PROST2012088, PROST2012140, PROST2012157, PROST2012190, PROST2012249, PROST2012353,

[3106] PROST2012400, PROST2012504, PROST2012542, PROST2012550, PROST2012740, PROST2012780, PROST2012888, PROST2012890, PROST2013032, PROST2013053, PROST2013260, PROST2013327, PROST2013531, PROST2013605, PROST2013627, PROST2013873, PROST2013880, PROST2014422, PROST2014585, PROST2014601, PROST2014659, PROST2014862, PROST2014916, PROST2014925, PROST2015124, PROST2015198, PROST2015243, PROST2015246, PROST2015251, PROST2015287, PROST2015332, PROST2015457, PROST2015464, PROST2015537, PROST2015545, PROST2015551, PROST2015636, PROST2015710, PROST2015756, PROST2015877, PROST2015900, PROST2015924, PROST2015932, PROST2016195, PROST2016246, PROST2016351, PROST2016379, PROST2016444, PROST2016462, PROST2016499,

[3107] PROST2016512, PROST2016566, PROST2016582, PROST2016668, PROST2016684, PROST2016777, PROST2016829, PROST2016860, PROST2016918, PROST2016980, PROST2017098, PROST2017128, PROST2017367, PROST2017413, PROST2017441, PROST2017529, PROST2017578, PROST2017612, PROST2017617, PROST2017692, PROST2017700, PROST2017701, PROST2017729, PROST2017836, PROST2017910, PROST2017972, PROST2018030, PROST2018090, PROST2018235, PROST2018437, PROST2018487, PROST2018511, PROST2018583, PROST2018588, PROST2018607, PROST2018788, PROST2018902, PROST2018922, PROST2018977, PROST2019296, PROST2019398, PROST2019487, PROST2019781, PUAEN1000039, PUAEN1000081, PUAEN1000085, PUAEN1000087, PUAEN1000121, PUAEN1000147, PUAEN1000175,

[3108] PUAEN1000275, PUAEN1000276, PUAEN1000288, PUAEN2000080, PUAEN2000175, PUAEN2000312, PUAEN2000394, PUAEN2000497, PUAEN2000594, PUAEN2000684, PUAEN2000942, PUAEN2001260, PUAEN2001345, PUAEN2001526, PUAEN2001882, PUAEN2002473, PUAEN2002489, PUAEN2002552, PUAEN2002568, PUAEN2002616, PUAEN2002758, PUAEN2003018, PUAEN2003079, PUAEN2003116, PUAEN2003408, PUAEN2003517, PUAEN2003954, PUAEN2004067, PUAEN2004083, PUAEN2004400, PUAEN2004511, PUAEN2004525, PUAEN2004875, PUAEN2005110, PUAEN2005247, PUAEN2005588, PUAEN2005930, PUAEN2006029, PUAEN2006328, PUAEN2006335, PUAEN2006578, PUAEN2006639, PUAEN2006761, PUAEN2007350, PUAEN2007785, PUAEN2007898, PUAEN2008123, PUAEN2008228, PUAEN2008314, PUAEN2008515,

[3109] PUAEN2008815, PUAEN2008939, PUAEN2008980, PUAEN2009174, PUAEN2009348, PUAEN2009534, PUAEN2009655, PUAEN2009795, PUAEN2009852, PUAEN2010346, PUAEN2010824, RECTM1000141, RECTM2000220, RECTM2000349, RECTM2000433, RECTM2000510, RECTM2001307, RECTM2001347, RECTM2001519, RECTM2001666, RECTM2001691, RECTM2001749, RECTM2002172, RECTM2002602, RECTM2002632, SALGL1000005, SALGL1000024, SALGL1000028, SALGL1000065, SALGL1000171, SKMUS1000030, SKMUS1000064, SKMUS1000067, SKMUS1000102, SKMUS1000104, SKMUS1000110, SKMUS1000118, SKMUS1000124, SKMUS1000129, SKMUS1000177, SKMUS2000020, SKMUS2000061, SKMUS2000074, SKMUS2000078, SKMUS2000117, SKMUS2000137, SKMUS2000198, SKMUS2000271, SKMUS2000287, SKMUS2000317,

[3110] SKMUS2000330, SKMUS2000339, SKMUS2000343, SKMUS2000365, SKMUS2000380, SKMUS2000390, SKMUS2000416, SKMUS2000458, SKMUS2000467, SKMUS2000468, SKMUS2000515, SKMUS2000690, SKMUS2000701, SKMUS2000705, SKMUS2000710, SKMUS2000724, SKMUS2000726, SKMUS2000757, SKMUS2000774, SKMUS2000780, SKMUS2000821, SKMUS2000847, SKMUS2000863, SKMUS2000873, SKMUS2000894, SKMUS2000898, SKMUS2000945, SKMUS2000973, SKMUS2000980, SKMUS2001008, SKMUS2001014, SKMUS2001129, SKMUS2001157, SKMUS2001164, SKMUS2001199, SKMUS2001201, SKMUS2001215, SKMUS2001247, SKMUS2001254, SKMUS2001271, SKMUS2001287, SKMUS2001364, SKMUS2001398, SKMUS2001402, SKMUS2001412, SKMUS2001492, SKMUS2001501, SKMUS2001543, SKMUS2001580, SKMUS2001585,

[3111] SKMUS2001608, SKMUS2001631, SKMUS2001662, SKMUS2001663, SKMUS2001668, SKMUS2001671, SKMUS2001683, SKMUS2001693, SKMUS2001695, SKMUS2001703, SKMUS2001740, SKMUS2001742, SKMUS2001823, SKMUS2001850, SKMUS2002077, SKMUS2002084, SKMUS2002153, SKMUS2002475, SKMUS2002602, SKMUS2002634, SKMUS2002693, SKMUS2002821, SKMUS2002840, SKMUS2002920, SKMUS2003034, SKMUS2003074, SKMUS2003168, SKMUS2003744, SKMUS2004047, SKMUS2004483, SKMUS2004667, SKMUS2004897, SKMUS2004903, SKMUS2005428, SKMUS2006394, SKMUS2006481, SKMUS2006755, SKMUS2007315, SKMUS2007359, SKMUS2007568, SKMUS2007740, SKMUS2007816, SKMUS2007915, SKMUS2008338, SKMUS2008407, SKMUS2008474, SKMUS2008585, SKMUS2008607, SKMUS2009190, SKMUS2009232,

[3112] SKMUS2009479, SKMUS2009557, SKNMC1000110, SKNMC1000123, SKNMC1000124, SKNMC1000229, SKNMC1000251, SKNMC1000264, SKNMC2000224, SKNMC2000256, SKNMC2000356, SKNMC2000374, SKNMC2000583, SKNMC2000593, SKNMC2000612, SKNMC2000622, SKNMC2000698, SKNMC2000966, SKNMC2001113, SKNMC2001503, SKNMC2001555, SKNMC2001596, SKNMC2002402, SKNMC2003639, SKNMC2003924, SKNMC2003987, SKNMC2004457, SKNMC2004643, SKNMC2004651, SKNMC2005772, SKNMC2006173, SKNMC2006327, SKNMC2006998, SKNMC2007134, SKNMC2007502, SKNMC2007504, SKNMC2007961, SKNMC2009450, SKNSH1000002, SKNSH1000086, SKNSH1000174, SKNSH1000301, SKNSH1000308, SKNSH1000416, SKNSH2000051, SKNSH2000101, SKNSH2000163, SKNSH2000250, SKNSH2000319, SKNSH2000482,

[3113] SKNSH2000516, SKNSH2000550, SKNSH2000716, SKNSH2000971, SKNSH2001222, SKNSH2001875, SKNSH2001931, SKNSH2002054, SKNSH2002325, SKNSH2002768, SKNSH2002866, SKNSH2003064, SKNSH2003174, SKNSH2003422, SKNSH2003466, SKNSH2003483, SKNSH2003528, SKNSH2004039, SKNSH2005061, SKNSH2005120, SKNSH2005194, SKNSH2005792, SKNSH2005816, SKNSH2005981, SKNSH2006234, SKNSH2006304, SKNSH2006432, SKNSH2006822, SKNSH2007142, SKNSH2007149, SKNSH2007429, SKNSH2007739, SKNSH2008043, SKNSH2008940, SKNSH2008969, SKNSH2009197, SKNSH2009357, SKNSH2009435, SKNSH2009991, SKNSH2010015, SMINT1000012, SMINT1000039, SMINT1000042, SMINT1000048, SMINT1000051, SMINT1000054, SMINT1000071, SMINT1000075, SMINT1000078, SMINT1000091,

[3114] SMINT1000100, SMINT1000103, SMINT1000118, SMINT1000131, SMINT1000137, SMINT1000192, SMINT2000007, SMINT2000032, SMINT2000040, SMINT2000060, SMINT2000073, SMINT2000084, SMINT2000145, SMINT2000159, SMINT2000176, SMINT2000185, SMINT2000227, SMINT2000229, SMINT2000232, SMINT2000239, SMINT2000267, SMINT2000277, SMINT2000396, SMINT2000400, SMINT2000468, SMINT2000518, SMINT2000529, SMINT2000530, SMINT2000537, SMINT2000538, SMINT2000541, SMINT2000558, SMINT2000562, SMINT2000568, SMINT2000602, SMINT2000609, SMINT2000747, SMINT2000811, SMINT2000824, SMINT2000984, SMINT2001114, SMINT2001158, SMINT2001183, SMINT2001199, SMINT2001222, SMINT2001348, SMINT2001397, SMINT2001458, SMINT2001461, SMINT2001535,

[3115] SMINT2001559, SMINT2001609, SMINT2001615, SMINT2001683, SMINT2001731, SMINT2001950, SMINT2002126, SMINT2002159, SMINT2002202, SMINT2002210, SMINT2002224, SMINT2002281, SMINT2002311, SMINT2002328, SMINT2002414, SMINT2002457, SMINT2002620, SMINT2002743, SMINT2002778, SMINT2002880, SMINT2002884, SMINT2002899, SMINT2002974, SMINT2002976, SMINT2003003, SMINT2003128, SMINT2003150, SMINT2003317, SMINT2003340, SMINT2003386, SMINT2003423, SMINT2003505, SMINT2003551, SMINT2003569, SMINT2003641, SMINT2003644, SMINT2003866, SMINT2004023, SMINT2004037, SMINT2004047, SMINT2004086, SMINT2004144, SMINT2004280, SMINT2004339, SMINT2004350, SMINT2004414, SMINT2004473, SMINT2004547, SMINT2004583, SMINT2004729,

[3116] SMINT2004781, SMINT2004891, SMINT2004909, SMINT2004972, SMINT2004992, SMINT2005075, SMINT2005161, SMINT2005174, SMINT2005213, SMINT2005330, SMINT2005387, SMINT2005402, SMINT2005405, SMINT2005621, SMINT2005623, SMINT2005624, SMINT2005688, SMINT2005800, SMINT2005956, SMINT2006078, SMINT2006205, SMINT2006331, SMINT2006596, SMINT2006641, SMINT2006648, SMINT2006708, SMINT2006716, SMINT2007062, SMINT2007101, SMINT2007140, SMINT2007187, SMINT2007219, SMINT2007294, SMINT2007365, SMINT2007391, SMINT2007433, SMINT2007508, SMINT2007526, SMINT2007579, SMINT2007647, SMINT2007790, SMINT2007792, SMINT2007796, SMINT2007867, SMINT2007932, SMINT2008042, SMINT2008054, SMINT2008133, SMINT2008277, SMINT2008329,

[3117] SMINT2008455, SMINT2008491, SMINT2008531, SMINT2008545, SMINT2008558, SMINT2008590, SMINT2008625, SMINT2008672, SMINT2008690, SMINT2008715, SMINT2008720, SMINT2008817, SMINT2008844, SMINT2008869, SMINT2008917, SMINT2009119, SMINT2009121, SMINT2009212, SMINT2009216, SMINT2009233, SMINT2009259, SMINT2009272, SMINT2009363, SMINT2009415, SMINT2009468, SMINT2009505, SMINT2009529, SMINT2009832, SMINT2009895, SMINT2009902, SMINT2009973, SMINT2010015, SMINT2010068, SMINT2010076, SMINT2010084, SMINT2010144, SMINT2010200, SMINT2010278, SMINT2010324, SMINT2010326, SMINT2010369, SMINT2010426, SMINT2010500, SMINT2010533, SMINT2010629, SMINT2010672, SMINT2010753, SMINT2010853, SMINT2010897, SMINT2010959,

[3118] SMINT2010997, SMINT2011033, SMINT2011066, SMINT2011273, SMINT2011311, SMINT2011406, SMINT2011509, SMINT2011567, SMINT2011588, SMINT2011656, SMINT2011888, SMINT2011958, SMINT2012040, SMINT2012179, SMINT2012195, SMINT2012285, SMINT2012291, SMINT2012501, SMINT2012734, SMINT2012793, SMINT2013129, SMINT2013170, SMINT2013181, SMINT2013228, SMINT2013613, SMINT2013626, SMINT2013695, SMINT2013833, SMINT2013890, SMINT2014166, SMINT2014282, SMINT2014443, SMINT2014489, SMINT2014721, SMINT2015006, SMINT2015306, SMINT2015326, SMINT2015353, SMINT2015454, SMINT2015518, SMINT2015745, SMINT2015787, SMINT2015810, SMINT2016122, SMINT2016146, SMINT2016286, SMINT2016313, SMINT2016396, SMINT2016440, SMINT2016477,

[3119] SMINT2016544, SMINT2016857, SMINT2017134, SMINT2017319, SMINT2017324, SMINT2017410, SMINT2017431, SMINT2017432, SMINT2017436, SMINT2017599, SMINT2017659, SMINT2017736, SMINT2017781, SMINT2017855, SMINT2017884, SMINT2017964, SMINT2017974, SMINT2018343, SMINT2018353, SMINT2018592, SMINT2018681, SMINT2019017, SMINT2019105, SMINT2019142, SMINT2019153, SMINT2019200, SPLEN1000013, SPLEN1000041, SPLEN1000049, SPLEN1000056, SPLEN1000087, SPLEN1000089, SPLEN1000091, SPLEN1000134, SPLEN1000139, SPLEN1000143, SPLEN1000144, SPLEN1000145, SPLEN1000156, SPLEN1000163, SPLEN1000178, SPLEN2000020, SPLEN2000047, SPLEN2000064, SPLEN2000072, SPLEN2000098, SPLEN2000126, SPLEN2000134, SPLEN2000143, SPLEN2000189,

[3120] SPLEN2000197, SPLEN2000205, SPLEN2000210, SPLEN2000222, SPLEN2000242, SPLEN2000243, SPLEN2000247, SPLEN2000258, SPLEN2000270, SPLEN2000307, SPLEN2000310, SPLEN2000341, SPLEN2000350, SPLEN2000357, SPLEN2000364, SPLEN2000402, SPLEN2000414, SPLEN2000420, SPLEN2000443, SPLEN2000448, SPLEN2000450, SPLEN2000464, SPLEN2000496, SPLEN2000515, SPLEN2000537, SPLEN2000541, SPLEN2000607, SPLEN2000630, SPLEN2000695, SPLEN2000698, SPLEN2001135, SPLEN2001157, SPLEN2001176, SPLEN2001227, SPLEN2001245, SPLEN2001278, SPLEN2001354, SPLEN2001367, SPLEN2001383, SPLEN2001476, SPLEN2001503, SPLEN2001510, SPLEN2001626, SPLEN2001650, SPLEN2001689, SPLEN2001710, SPLEN2001781, SPLEN2001881, SPLEN2001912, SPLEN2001945,

[3121] SPLEN2002007, SPLEN2002053, SPLEN2002147, SPLEN2002166, SPLEN2002175, SPLEN2002223, SPLEN2002272, SPLEN2002314, SPLEN2002343, SPLEN2002354, SPLEN2002385, SPLEN2002419, SPLEN2002451, SPLEN2002462, SPLEN2002463, SPLEN2002467, SPLEN2002477, SPLEN2002493, SPLEN2002662, SPLEN2002695, SPLEN2002707, SPLEN2002744, SPLEN2002917, SPLEN2002931, SPLEN2002957, SPLEN2003160, SPLEN2003204, SPLEN2003219, SPLEN2003297, SPLEN2003396, SPLEN2003678, SPLEN2003878, SPLEN2003918, SPLEN2003924, SPLEN2004060, SPLEN2004078, SPLEN2004124, SPLEN2004148, SPLEN2004181, SPLEN2004343, SPLEN2004346, SPLEN2004368, SPLEN2004611, SPLEN2004662, SPLEN2004844, SPLEN2005009, SPLEN2005227, SPLEN2005272, SPLEN2005342, SPLEN2005416,

[3122] SPLEN2005450, SPLEN2005474, SPLEN2005560, SPLEN2005727, SPLEN2005783, SPLEN2005790, SPLEN2005806, SPLEN2005838, SPLEN2005927, SPLEN2005939, SPLEN2006143, SPLEN2006268, SPLEN2006283, SPLEN2006325, SPLEN2006389, SPLEN2006425, SPLEN2006671, SPLEN2006701, SPLEN2006785, SPLEN2006875, SPLEN2007182, SPLEN2007276, SPLEN2007314, SPLEN2007326, SPLEN2007350, SPLEN2007388, SPLEN2007619, SPLEN2007653, SPLEN2007689, SPLEN2007695, SPLEN2007794, SPLEN2007879, SPLEN2007926, SPLEN2007951, SPLEN2008007, SPLEN2008135, SPLEN2008164, SPLEN2008317, SPLEN2008496, SPLEN2008786, SPLEN2009088, SPLEN2009163, SPLEN2009315, SPLEN2009340, SPLEN2009512, SPLEN2009513, SPLEN2009541, SPLEN2009548, SPLEN2009581, SPLEN2009733,

[3123] SPLEN2009803, SPLEN2009884, SPLEN2009918, SPLEN2010004, SPLEN2010015, SPLEN2010112, SPLEN2010119, SPLEN2010146, SPLEN2010187, SPLEN2010350, SPLEN2010395, SPLEN2010415, SPLEN2010447, SPLEN2010469, SPLEN2010510, SPLEN2010530, SPLEN2010534, SPLEN2010588, SPLEN2010625, SPLEN2010800, SPLEN2010846, SPLEN2010847, SPLEN2010862, SPLEN2010912, SPLEN2010978, SPLEN2011018, SPLEN2011021, SPLEN2011025, SPLEN2011086, SPLEN2011139, SPLEN2011145, SPLEN2011248, SPLEN2011252, SPLEN2011422, SPLEN2011672, SPLEN2011678, SPLEN2011737, SPLEN2011758, SPLEN2011766, SPLEN2011805, SPLEN2011820, SPLEN2011830, SPLEN2011931, SPLEN2011981, SPLEN2012115, SPLEN2012175, SPLEN2012179, SPLEN2012185, SPLEN2012234, SPLEN2012453,

[3124] SPLEN2012523, SPLEN2012524, SPLEN2012525, SPLEN2012606, SPLEN2012611, SPLEN2012619, SPLEN2012624, SPLEN2012725, SPLEN2012743, SPLEN2012756, SPLEN2012846, SPLEN2012889, SPLEN2012961, SPLEN2013108, SPLEN2013195, SPLEN2013503, SPLEN2013644, SPLEN2013648, SPLEN2013670, SPLEN2013673, SPLEN2013690, SPLEN2013714, SPLEN2013753, SPLEN2013821, SPLEN2013857, SPLEN2013860, SPLEN2013910, SPLEN2013923, SPLEN2013936, SPLEN2014041, SPLEN2014063, SPLEN2014073, SPLEN2014119, SPLEN2014136, SPLEN2014199, SPLEN2014210, SPLEN2014293, SPLEN2014318, SPLEN2014381, SPLEN2014452, SPLEN2014454, SPLEN2014486, SPLEN2014543, SPLEN2014645, SPLEN2014669, SPLEN2014711, SPLEN2014739, SPLEN2014860, SPLEN2014865, SPLEN2014919,

[3125] SPLEN2014920, SPLEN2014924, SPLEN2014937, SPLEN2014946, SPLEN2015031, SPLEN2015094, SPLEN2015121, SPLEN2015129, SPLEN2015158, SPLEN2015166, SPLEN2015216, SPLEN2015258, SPLEN2015261, SPLEN2015267, SPLEN2015276, SPLEN2015415, SPLEN2015433, SPLEN2015593, SPLEN2015674, SPLEN2015679, SPLEN2015707, SPLEN2015730, SPLEN2015746, SPLEN2015815, SPLEN2015890, SPLEN2015891, SPLEN2015899, SPLEN2016045, SPLEN2016053, SPLEN2016069, SPLEN2016098, SPLEN2016135, SPLEN2016139, SPLEN2016241, SPLEN2016250, SPLEN2016304, SPLEN2016356, SPLEN2016480, SPLEN2016531, SPLEN2016533, SPLEN2016541, SPLEN2016552, SPLEN2016602, SPLEN2016627, SPLEN2016678, SPLEN2016743, SPLEN2016773, SPLEN2016781, SPLEN2016840, SPLEN2016863,

[3126] SPLEN2016922, SPLEN2016932, SPLEN2016973, SPLEN2017104, SPLEN2017147, SPLEN2017187, SPLEN2017189, SPLEN2017212, SPLEN2017426, SPLEN2017452, SPLEN2017538, SPLEN2017592, SPLEN2017613, SPLEN2017620, SPLEN2017643, SPLEN2017687, SPLEN2017740, SPLEN2017781, SPLEN2017918, SPLEN2017999, SPLEN2018098, SPLEN2018112, SPLEN2018157, SPLEN2018159, SPLEN2018180, SPLEN2018181, SPLEN2018280, SPLEN2018285, SPLEN2018299, SPLEN2018302, SPLEN2018364, SPLEN2018395, SPLEN2018643, SPLEN2018683, SPLEN2018732, SPLEN2018749, SPLEN2018933, SPLEN2019008, SPLEN2019043, SPLEN2019077, SPLEN2019092, SPLEN2019102, SPLEN2019131, SPLEN2019257, SPLEN2019311, SPLEN2019323, SPLEN2019349, SPLEN2019375, SPLEN2019379, SPLEN2019446,

[3127] SPLEN2019471, SPLEN2019480, SPLEN2019505, SPLEN2019571, SPLEN2019575, SPLEN2019709, SPLEN2019774, SPLEN2019793, SPLEN2019811, SPLEN2019839, SPLEN2019956, SPLEN2019985, SPLEN2020007, SPLEN2020034, SPLEN2020153, SPLEN2020154, SPLEN2020166, SPLEN2020183, SPLEN2020223, SPLEN2020359, SPLEN2020417, SPLEN2020427, SPLEN2020467, SPLEN2020512, SPLEN2020608, SPLEN2020777, SPLEN2020805, SPLEN2021057, SPLEN2021122, SPLEN2021157, SPLEN2021231, SPLEN2021273, SPLEN2021295, SPLEN2021298, SPLEN2021383, SPLEN2021417, SPLEN2021440, SPLEN2021458, SPLEN2021463, SPLEN2021560, SPLEN2021701, SPLEN2021795, SPLEN2021983, SPLEN2021991, SPLEN2022040, SPLEN2022162, SPLEN2022227, SPLEN2022591, SPLEN2022785, SPLEN2022920,

[3128] SPLEN2023024, SPLEN2023118, SPLEN2023423, SPLEN2023710, SPLEN2023791, SPLEN2023977, SPLEN2024070, SPLEN2024127, SPLEN2024232, SPLEN2024273, SPLEN2024383, SPLEN2024489, SPLEN2024530, SPLEN2024571, SPLEN2024577, SPLEN2024617, SPLEN2024737, SPLEN2024922, SPLEN2024956, SPLEN2024990, SPLEN2025012, SPLEN2025017, SPLEN2025039, SPLEN2025219, SPLEN2025491, SPLEN2025626, SPLEN2025820, SPLEN2026144, SPLEN2026765, SPLEN2027157, SPLEN2027395, SPLEN2027488, SPLEN2027780, SPLEN2027852, SPLEN2027868, SPLEN2027995, SPLEN2028046, SPLEN2028066, SPLEN2028138, SPLEN2028365, SPLEN2028417, SPLEN2028424, SPLEN2028593, SPLEN2028844, SPLEN2028994, SPLEN2029051, SPLEN2029176, SPLEN2029295, SPLEN2029380, SPLEN2029522,

[3129] SPLEN2029683, SPLEN2029727, SPLEN2029904, SPLEN2029912, SPLEN2030250, SPLEN2030335, SPLEN2030371, SPLEN2030397, SPLEN2030479, SPLEN2030495, SPLEN2030562, SPLEN2030763, SPLEN2030847, SPLEN2031004, SPLEN2031125, SPLEN2031424, SPLEN2031674, SPLEN2031724, SPLEN2031780, SPLEN2032036, SPLEN2032112, SPLEN2032154, SPLEN2032157, SPLEN2032321, SPLEN2032356, SPLEN2032677, SPLEN2032813, SPLEN2032924, SPLEN2033098, SPLEN2033153, SPLEN2033333, SPLEN2033490, SPLEN2033539, SPLEN2033921, SPLEN2033996, SPLEN2034021, SPLEN2034081, SPLEN2034252, SPLEN2034448, SPLEN2034551, SPLEN2034601, SPLEN2034678, SPLEN2034781, SPLEN2034864, SPLEN2034934, SPLEN2035318, SPLEN2035615, SPLEN2036103, SPLEN2036326, SPLEN2036475,

[3130] SPLEN2036501, SPLEN2036579, SPLEN2036608, SPLEN2036702, SPLEN2036712, SPLEN2036821, SPLEN2036932, SPLEN2036953, SPLEN2037077, SPLEN2037194, SPLEN2037319, SPLEN2037444, SPLEN2037580, SPLEN2037630, SPLEN2037678, SPLEN2037722, SPLEN2037891, SPLEN2038055, SPLEN2038180, SPLEN2038407, SPLEN2038473, SPLEN2039311, SPLEN2039672, SPLEN2039697, SPLEN2039845, SPLEN2039936, SPLEN2040222, SPLEN2040237, SPLEN2040824, SPLEN2041304, SPLEN2041306, SPLEN2041310, SPLEN2041585, SPLEN2041645, SPLEN2041700, SPLEN2041720, SPLEN2041977, SPLEN2042051, SPLEN2042303, SPLEN2042521, SPLEN2042598, SPLEN2042714, SPLEN2042920, STOMA1000013, STOMA1000047, STOMA1000052, STOMA1000074, STOMA1000091, STOMA1000117, STOMA1000133,

[3131] STOMA1000175, STOMA1000186, STOMA1000190, STOMA1000191, STOMA2000032, STOMA2000072, STOMA2000088, STOMA2000104, STOMA2000148, STOMA2000168, STOMA2000183, STOMA2000188, STOMA2000279, STOMA2000383, STOMA2000386, STOMA2000478, STOMA2000482, STOMA2000529, STOMA2000539, STOMA2000567, STOMA2000640, STOMA2000678, STOMA2000686, STOMA2000888, STOMA2001025, STOMA2002141, STOMA2002367, STOMA2002688, STOMA2003158, STOMA2003289, STOMA2003477, STOMA2003646, STOMA2003716, STOMA2003781, STOMA2003894, STOMA2004194, STOMA2004294, STOMA2004663, STOMA2004668, STOMA2004852, STOMA2004873, STOMA2004884, STOMA2004925, STOMA2005120, STOMA2005664, STOMA2005667, STOMA2005746, STOMA2006181, STOMA2006213, STOMA2006325,

[3132] STOMA2006330, STOMA2006398, STOMA2006447, STOMA2006780, STOMA2006904, STOMA2007269, STOMA2007680, STOMA2007745, STOMA2008050, STOMA2008361, STOMA2008546, STOMA2008614, STOMA2008838, STOMA2009250, STOMA2009253, STOMA2009256, STOMA2009289, THYMU1000010, THYMU1000017, THYMU1000025, THYMU1000029, THYMU1000032, THYMU1000033, THYMU1000041, THYMU1000060, THYMU1000074, THYMU1000098, THYMU1000103, THYMU1000105, THYMU1000136, THYMU1000142, THYMU1000144, THYMU1000158, THYMU1000176, THYMU1000179, THYMU1000191, THYMU1000198, THYMU1000217, THYMU1000240, THYMU1000242, THYMU1000291, THYMU1000316, THYMU1000318, THYMU1000336, THYMU1000366, THYMU1000382, THYMU1000393, THYMU1000394, THYMU1000399, THYMU1000426,

[3133] THYMU1000440, THYMU1000459, THYMU1000473, THYMU1000491, THYMU1000496, THYMU1000499, THYMU1000527, THYMU1000532, THYMU1000536, THYMU1000554, THYMU1000558, THYMU1000576, THYMU1000600, THYMU1000677, THYMU1000692, THYMU2000022, THYMU2000032, THYMU2000057, THYMU2000120, THYMU2000138, THYMU2000140, THYMU2000155, THYMU2000162, THYMU2000171, THYMU2000176, THYMU2000179, THYMU2000231, THYMU2000236, THYMU2000276, THYMU2000280, THYMU2000300, THYMU2000317, THYMU2000368, THYMU2000369, THYMU2000418, THYMU2000440, THYMU2000489, THYMU2000492, THYMU2000519, THYMU2000570, THYMU2000602, THYMU2000660, THYMU2000671, THYMU2000672, THYMU2000684, THYMU2000702, THYMU2000767, THYMU2000775, THYMU2000800, THYMU2000879,

[3134] THYMU2000932, THYMU2000950, THYMU2000971, THYMU2000982, THYMU2000990, THYMU2001018, THYMU2001053, THYMU2001071, THYMU2001139, THYMU2001195, THYMU2001202, THYMU2001203, THYMU2001256, THYMU2001270, THYMU2001291, THYMU2001314, THYMU2001325, THYMU2001357, THYMU2001422, THYMU2001443, THYMU2001515, THYMU2001521, THYMU2001556, THYMU2001622, THYMU2001727, THYMU2001819, THYMU2001825, THYMU2001868, THYMU2001898, THYMU2001900, THYMU2001916, THYMU2001989, THYMU2002023, THYMU2002037, THYMU2002080, THYMU2002109, THYMU2002147, THYMU2002154, THYMU2002157, THYMU2002177, THYMU2002203, THYMU2002229, THYMU2002242, THYMU2002338, THYMU2002356, THYMU2002376, THYMU2002384, THYMU2002450, THYMU2002490, THYMU2002548,

[3135] THYMU2002695, THYMU2002745, THYMU2002756, THYMU2002789, THYMU2002792, THYMU2002815, THYMU2002852, THYMU2002910, THYMU2002950, THYMU2002983, THYMU2003069, THYMU2003107, THYMU2003124, THYMU2003133, THYMU2003166, THYMU2003232, THYMU2003242, THYMU2003249, THYMU2003270, THYMU2003282, THYMU2003287, THYMU2003336, THYMU2003366, THYMU2003397, THYMU2003440, THYMU2003470, THYMU2003479, THYMU2003542, THYMU2003632, THYMU2003650, THYMU2003700, THYMU2003760, THYMU2003803, THYMU2003855, THYMU2003907, THYMU2004003, THYMU2004008, THYMU2004042, THYMU2004108, THYMU2004111, THYMU2004123, THYMU2004139, THYMU2004169, THYMU2004284, THYMU2004320, THYMU2004336, THYMU2004356, THYMU2004452, THYMU2004508, THYMU2004512,

[3136] THYMU2004635, THYMU2004639, THYMU2004668, THYMU2004677, THYMU2004688, THYMU2004693, THYMU2004733, THYMU2004835, THYMU2004843, THYMU2004906, THYMU2004916, THYMU2004986, THYMU2005001, THYMU2005003, THYMU2005046, THYMU2005134, THYMU2005156, THYMU2005190, THYMU2005225, THYMU2005240, THYMU2005246, THYMU2005270, THYMU2005283, THYMU2005303, THYMU2005321, THYMU2005356, THYMU2005369, THYMU2005480, THYMU2005507, THYMU2005545, THYMU2005574, THYMU2005576, THYMU2005748, THYMU2005759, THYMU2005807, THYMU2005815, THYMU2005855, THYMU2005881, THYMU2005948, THYMU2005997, THYMU2006001, THYMU2006048, THYMU2006098, THYMU2006160, THYMU2006170, THYMU2006252, THYMU2006277, THYMU2006303, THYMU2006324, THYMU2006350,

[3137] THYMU2006357, THYMU2006365, THYMU2006420, THYMU2006468, THYMU2006505, THYMU2006610, THYMU2006666, THYMU2006712, THYMU2006913, THYMU2006946, THYMU2006965, THYMU2007025, THYMU2007036, THYMU2007095, THYMU2007179, THYMU2007258, THYMU2007307, THYMU2007308, THYMU2007339, THYMU2007350, THYMU2007384, THYMU2007493, THYMU2007521, THYMU2007528, THYMU2007530, THYMU2007532, THYMU2007561, THYMU2007571, THYMU2007635, THYMU2007658, THYMU2007667, THYMU2007694, THYMU2007725, THYMU2007729, THYMU2007802, THYMU2007824, THYMU2007854, THYMU2007952, THYMU2007969, THYMU2008035, THYMU2008036, THYMU2008049, THYMU2008072, THYMU2008111, THYMU2008145, THYMU2008149, THYMU2008185, THYMU2008191, THYMU2008207, THYMU2008226,

[3138] THYMU2008282, THYMU2008339, THYMU2008350, THYMU2008351, THYMU2008452, THYMU2008643, THYMU2008686, THYMU2008691, THYMU2008714, THYMU2008725, THYMU2008727, THYMU2008781, THYMU2008799, THYMU2008876, THYMU2008910, THYMU2008917, THYMU2008928, THYMU2008990, THYMU2008994, THYMU2009023, THYMU2009046, THYMU2009101, THYMU2009104, THYMU2009134, THYMU2009157, THYMU2009181, THYMU2009186, THYMU2009338, THYMU2009425, THYMU2009516, THYMU2009526, THYMU2009546, THYMU2009592, THYMU2009596, THYMU2009792, THYMU2009835, THYMU2009906, THYMU2009948, THYMU2010030, THYMU2010041, THYMU2010046, THYMU2010059, THYMU2010082, THYMU2010161, THYMU2010192, THYMU2010519, THYMU2010637, THYMU2010671, THYMU2010699, THYMU2010705,

[3139] THYMU2010779, THYMU2010816, THYMU2010831, THYMU2010848, THYMU2011053, THYMU2011063, THYMU2011072, THYMU2011096, THYMU2011118, THYMU2011142, THYMU2011183, THYMU2011257, THYMU2011259, THYMU2011295, THYMU2011308, THYMU2011390, THYMU2011431, THYMU2011447, THYMU2011482, THYMU2011538, THYMU2011548, THYMU2011551, THYMU2011564, THYMU2011573, THYMU2011585, THYMU2011621, THYMU2011666, THYMU2011736, THYMU2011785, THYMU2011806, THYMU2011852, THYMU2011875, THYMU2011881, THYMU2011937, THYMU2011939, THYMU2012002, THYMU2012073, THYMU2012104, THYMU2012113, THYMU2012273, THYMU2012401, THYMU2012492, THYMU2012507, THYMU2012565, THYMU2012574, THYMU2012631, THYMU2012665, THYMU2012690, THYMU2012701, THYMU2012807,

[3140] THYMU2012882, THYMU2012891, THYMU2012902, THYMU2012919, THYMU2013023, THYMU2013047, THYMU2013051, THYMU2013089, THYMU2013170, THYMU2013364, THYMU2013386, THYMU2013426, THYMU2013578, THYMU2013648, THYMU2013705, THYMU2013757, THYMU2013779, THYMU2013863, THYMU2013950, THYMU2013981, THYMU2014067, THYMU2014068, THYMU2014167, THYMU2014183, THYMU2014204, THYMU2014297, THYMU2014323, THYMU2014327, THYMU2014353, THYMU2014492, THYMU2014500, THYMU2014599, THYMU2014762, THYMU2014777, THYMU2014801, THYMU2014901, THYMU2014923, THYMU2015019, THYMU2015161, THYMU2015316, THYMU2015321, THYMU2015439, THYMU2015441, THYMU2015479, THYMU2015762, THYMU2015775, THYMU2015825, THYMU2015918, THYMU2015943, THYMU2015984,

[3141] THYMU2016113, THYMU2016164, THYMU2016204, THYMU2016219, THYMU2016360, THYMU2016496, THYMU2016840, THYMU2016968, THYMU2017008, THYMU2017010, THYMU2017023, THYMU2017085, THYMU2017099, THYMU2017158, THYMU2017162, THYMU2017215, THYMU2017362, THYMU2017366, THYMU2017398, THYMU2017449, THYMU2017479, THYMU2017522, THYMU2017526, THYMU2017675, THYMU2017707, THYMU2017844, THYMU2017878, THYMU2018028, THYMU2018071, THYMU2018189, THYMU2018197, THYMU2018384, THYMU2018455, THYMU2018547, THYMU2018565, THYMU2018639, THYMU2018673, THYMU2018721, THYMU2018772, THYMU2018819, THYMU2018841, THYMU2018997, THYMU2019021, THYMU2019054, THYMU2019197, THYMU2019210, THYMU2019364, THYMU2019436, THYMU2019442, THYMU2019587,

[3142] THYMU2019599, THYMU2019686, THYMU2019813, THYMU2020198, THYMU2020289, THYMU2020416, THYMU2020491, THYMU2020499, THYMU2020560, THYMU2020667, THYMU2020830, THYMU2020883, THYMU2020959, THYMU2021361, THYMU2021509, THYMU2021597, THYMU2021684, THYMU2021714, THYMU2022213, THYMU2022289, THYMU2022660, THYMU2022854, THYMU2022922, THYMU2023209, THYMU2023264, THYMU2023576, THYMU2023711, THYMU2023900, THYMU2023943, THYMU2023967, THYMU2024071, THYMU2024121, THYMU2024185, THYMU2024207, THYMU2024616, THYMU2024684, THYMU2024748, THYMU2025042, THYMU2025189, THYMU2025319, THYMU2025325, THYMU2025406, THYMU2025557, THYMU2025572, THYMU2025707, THYMU2025849, THYMU2025909, THYMU2025939, THYMU2026182, THYMU2026350,

[3143] THYMU2026530, THYMU2026531, THYMU2026835, THYMU2026904, THYMU2027053, THYMU2027168, THYMU2027249, THYMU2027282, THYMU2027497, THYMU2027695, THYMU2027734, THYMU2027894, THYMU2027975, THYMU2027996, THYMU2028041, THYMU2028368, THYMU2028379, THYMU2028394, THYMU2028412, THYMU2028629, THYMU2028632, THYMU2028724, THYMU2028942, THYMU2028978, THYMU2029134, THYMU2029578, THYMU2029676, THYMU2029688, THYMU2029788, THYMU2030068, THYMU2030226, THYMU2030264, THYMU2030462, THYMU2030543, THYMU2030637, THYMU2030655, THYMU2030796, THYMU2030912, THYMU2030982, THYMU2031046, THYMU2031139, THYMU2031218, THYMU2031249, THYMU2031258, THYMU2031579, THYMU2031847, THYMU2031890, THYMU2031994, THYMU2032014, THYMU2032035,

[3144] THYMU2032080, THYMU2032150, THYMU2032358, THYMU2032437, THYMU2032601, THYMU2032655, THYMU2032715, THYMU2032732, THYMU2032825, THYMU2032976, THYMU2033053, THYMU2033059, THYMU2033070, THYMU2033079, THYMU2033085, THYMU2033104, THYMU2033227, THYMU2033263, THYMU2033308, THYMU2033401, THYMU2033583, THYMU2033755, THYMU2033787, THYMU2033816, THYMU2034182, THYMU2034279, THYMU2034314, THYMU2034338, THYMU2034374, THYMU2034647, THYMU2034917, THYMU2035064, THYMU2035078, THYMU2035101, THYMU2035319, THYMU2035321, THYMU2035388, THYMU2035400, THYMU2035554, THYMU2035710, THYMU2036105, THYMU2036207, THYMU2036215, THYMU2036252, THYMU2036265, THYMU2036366, THYMU2036459, THYMU2036461, THYMU2036604, THYMU2036653,

[3145] THYMU2037081, THYMU2037208, THYMU2037226, THYMU2037233, THYMU2037234, THYMU2037348, THYMU2037406, THYMU2037965, THYMU2038058, THYMU2038189, THYMU2038199, THYMU2038220, THYMU2038301, THYMU2038369, THYMU2038389, THYMU2038615, THYMU2038636, THYMU2038739, THYMU2038772, THYMU2038797, THYMU2038906, THYMU2039305, THYMU2039315, THYMU2039334, THYMU2039411, THYMU2039634, THYMU2039719, THYMU2039780, THYMU2039788, THYMU2039989, THYMU2040029, THYMU2040110, THYMU2040114, THYMU2040140, THYMU2040412, THYMU2040427, THYMU2040824, THYMU2040925, THYMU2041007, THYMU2041015, THYMU2041252, THYMU3000028, THYMU3000036, THYMU3000037, THYMU3000082, THYMU3000194, THYMU3000224, THYMU3000269, THYMU3000306, THYMU3000360,

[3146] THYMU3000390, THYMU3000420, THYMU3000490, THYMU3000504, THYMU3000542, THYMU3000655, THYMU3000826, THYMU3000841, THYMU3001077, THYMU3001082, THYMU3001083, THYMU3001133, THYMU3001151, THYMU3001379, THYMU3001472, THYMU3001593, THYMU3001883, THYMU3001939, THYMU3001991, THYMU3002452, THYMU3002578, THYMU3002661, THYMU3003007, THYMU3003092, THYMU3003212, THYMU3003350, THYMU3003403, THYMU3003565, THYMU3003763, THYMU3003958, THYMU3003965, THYMU3004157, THYMU3004628, THYMU3004632, THYMU3004835, THYMU3004866, THYMU3005050, THYMU3005378, THYMU3005407, THYMU3005415, THYMU3005427, THYMU3005482, THYMU3005491, THYMU3005629, THYMU3005696, THYMU3006118, THYMU3006132, THYMU3006168, THYMU3006172, THYMU3006371,

[3147] THYMU3006485, THYMU3006640, THYMU3006767, THYMU3006811, THYMU3006963, THYMU3007137, THYMU3007308, THYMU3007368, THYMU3007423, THYMU3007559, THYMU3007845, THYMU3008060, THYMU3008105, THYMU3008136, THYMU3008171, THYMU3008216, THYMU3008436, THYMU3008672, THYMU3008935, THYMU3009006, THYMU3009255, THYMU3009391, THYMU3009755, THYMU3010247, THYMU3011012, THYMU3011081, THYMU3011244, THYMU3011360, THYMU3011534, THYMU3011543, THYMU3011556, THYMU3011717, THYMU3011827, THYMU3012402, THYMU3012907, THYMU3013114, THYMU3013197, THYMU3013241, THYMU3013470, THYMU3013785, THYMU3013897, THYMU3014038, THYMU3014173, THYMU3014372, THYMU3014555, THYMU3014620, THYMU3014701, THYMU3015042, THYMU3015457, THYMU3015571,

[3148] THYMU3015592, THYMU3015625, THYMU3015647, THYMU3015962, THYMU3016022, THYMU3016518, THYMU3016797, THYMU3016822, THYMU3016850, THYMU3017562, THYMU3017688, THYMU3017689, THYMU3017761, THYMU3018151, THYMU3018896, THYMU3019095, THYMU3019476, THYMU3019605, THYMU3019916, THYMU3020221, THYMU3020595, THYMU3020713, THYMU3020856, THYMU3020869, THYMU3020970, THYMU3021404, THYMU3021755, THYMU3021900, THYMU3022211, THYMU3022434, THYMU3022528, THYMU3022668, THYMU3022982, THYMU3023107, THYMU3023211, THYMU3023216, THYMU3023394, THYMU3023400, THYMU3023797, THYMU3024164, THYMU3024339, THYMU3024602, THYMU3024879, THYMU3025118, THYMU3025313, THYMU3025642, THYMU3025683, THYMU3025772, THYMU3025865, THYMU3026000,

[3149] THYMU3026350, THYMU3026479, THYMU3026532, THYMU3026783, THYMU3026869, THYMU3027251, THYMU3027540, THYMU3027655, THYMU3027671, THYMU3028075, THYMU3028410, THYMU3028461, THYMU3028702, THYMU3029188, THYMU3029318, THYMU3029421, THYMU3029719, THYMU3029774, THYMU3029832, THYMU3030072, THYMU3030231, THYMU3030706, THYMU3030710, THYMU3030752, THYMU3031146, THYMU3031402, THYMU3031610, THYMU3031612, THYMU3031868, THYMU3031878, THYMU3032032, THYMU3032867, THYMU3033402, THYMU3033630, THYMU3033649, THYMU3033754, THYMU3033759, THYMU3034078, THYMU3034099, THYMU3034453, THYMU3034616, THYMU3034853, THYMU3034867, THYMU3034983, THYMU3036200, THYMU3036310, THYMU3036934, THYMU3036953, THYMU3037052, THYMU3037192,

[3150] THYMU3037617, THYMU3037772, THYMU3037827, THYMU3037836, THYMU3037856, THYMU3037867, THYMU3037909, THYMU3037980, THYMU3038158, THYMU3038167, THYMU3038214, THYMU3038266, THYMU3038328, THYMU3038347, THYMU3038375, THYMU3038603, THYMU3038687, THYMU3038759, THYMU3038879, THYMU3038970, THYMU3039807, THYMU3039846, THYMU3040068, THYMU3040126, THYMU3040146, THYMU3040168, THYMU3040172, THYMU3040725, THYMU3040746, THYMU3040816, THYMU3040829, THYMU3040830, THYMU3040986, THYMU3041354, THYMU3041386, THYMU3041573, THYMU3041603, THYMU3041736, THYMU3041918, THYMU3042075, THYMU3042321, THYMU3042372, THYMU3042758, THYMU3042929, THYMU3043200, THYMU3043327, THYMU3043482, THYMU3043597, THYMU3043688, THYMU3043779,

[3151] THYMU3043883, THYMU3043993, THYMU3044175, THYMU3044188, THYMU3044441, THYMU3044445, THYMU3045510, THYMU3045673, THYMU3045692, THYMU3045704, THYMU3046140, THYMU3046350, THYMU3046360, THYMU3046856, THYMU3047144, THYMU3047156, THYMU3047366, THYMU3047513, THYMU3047542, THYMU3047760, THYMU3047891, TKIDN1000001, TKIDN1000044, TKIDN1000062, TKIDN1000066, TKIDN1000164, TKIDN1000171, TKIDN1000192, TKIDN2000127, TKIDN2000240, TKIDN2000246, TKIDN2000319, TKIDN2000464, TKIDN2000521, TKIDN2001529, TKIDN2001662, TKIDN2002318, TKIDN2002329, TKIDN2002424, TKIDN2002632, TKIDN2002738, TKIDN2003044, TKIDN2003059, TKIDN2003062, TKIDN2003078, TKIDN2003366, TKIDN2003396, TKIDN2003413, TKIDN2003597, TKIDN2003601,

[3152] TKIDN2004185, TKIDN2004386, TKIDN2004458, TKIDN2004748, TKIDN2005721, TKIDN2005934, TKIDN2005947, TKIDN2005956, TKIDN2006525, TKIDN2006761, TKIDN2006852, TKIDN2007605, TKIDN2007667, TKIDN2007828, TKIDN2008176, TKIDN2008778, TKIDN2009092, TKIDN2009330, TKIDN2009481, TKIDN2009641, TKIDN2009794, TKIDN2009889, TKIDN2010200, TKIDN2010232, TKIDN2010278, TKIDN2010602, TKIDN2010812, TKIDN2010934, TKIDN2011051, TKIDN2011160, TKIDN2011289, TKIDN2011324, TKIDN2012034, TKIDN2012771, TKIDN2012824, TKIDN2013134, TKIDN2013287, TKIDN2014570, TKIDN2014757, TKIDN2014771, TKIDN2014964, TKIDN2015025, TKIDN2015071, TKIDN2015161, TKIDN2015263, TKIDN2015285, TKIDN2015788, TKIDN2016309, TKIDN2016399, TKIDN2016846,

[3153] TKIDN2018926, TKIDN2019116, TLIVE2000023, TLIVE2000142, TLIVE2000292, TLIVE2000762, TLIVE2000979, TLIVE2001327, TLIVE2001616, TLIVE2001684, TLIVE2001828, TLIVE2001927, TLIVE2002046, TLIVE2002336, TLIVE2002338, TLIVE2002562, TLIVE2002690, TLIVE2002882, TLIVE2003197, TLIVE2003200, TLIVE2003225, TLIVE2003381, TLIVE2003737, TLIVE2003961, TLIVE2003970, TLIVE2004320, TLIVE2004331, TLIVE2004601, TLIVE2005180, TLIVE2005390, TLIVE2005516, TLIVE2005731, TLIVE2005866, TLIVE2006236, TLIVE2006359, TLIVE2006529, TLIVE2006621, TLIVE2006733, TLIVE2007000, TLIVE2007016, TLIVE2007132, TLIVE2007192, TLIVE2007528, TLIVE2007607, TLIVE2007736, TLIVE2007816, TLIVE2007919, TLIVE2008083, TLIVE2008213, TLIVE2008221,

[3154] TLIVE2008712, TLIVE2008797, TLIVE2009087, TLIVE2009163, TLIVE2009489, TLIVE2009541, TLUNG2000179, TOVAR2000476, TOVAR2000575, TOVAR2000649, TOVAR2000904, TOVAR2001281, TOVAR2001556, TOVAR2001730, TOVAR2002247, TOVAR2002514, TOVAR2002549, TOVAR2002800, TRACH1000011, TRACH1000018, TRACH1000057, TRACH1000074, TRACH1000100, TRACH1000106, TRACH1000125, TRACH1000140, TRACH1000144, TRACH1000181, TRACH1000212, TRACH1000240, TRACH2000002, TRACH2000015, TRACH2000024, TRACH2000032, TRACH2000045, TRACH2000047, TRACH2000081, TRACH2000083, TRACH2000148, TRACH2000185, TRACH2000196, TRACH2000235, TRACH2000243, TRACH2000250, TRACH2000259, TRACH2000272, TRACH2000282, TRACH2000287, TRACH2000289, TRACH2000312,

[3155] TRACH2000336, TRACH2000393, TRACH2000411, TRACH2000472, TRACH2000496, TRACH2000497, TRACH2000502, TRACH2000522, TRACH2000559, TRACH2000660, TRACH2000665, TRACH2000675, TRACH2000677, TRACH2000703, TRACH2000767, TRACH2000775, TRACH2000807, TRACH2000873, TRACH2000894, TRACH2000898, TRACH2000923, TRACH2000944, TRACH2000981, TRACH2000986, TRACH2001037, TRACH2001060, TRACH2001085, TRACH2001109, TRACH2001121, TRACH2001147, TRACH2001154, TRACH2001188, TRACH2001275, TRACH2001335, TRACH2001339, TRACH2001341, TRACH2001347, TRACH2001395, TRACH2001400, TRACH2001403, TRACH2001416, TRACH2001428, TRACH2001432, TRACH2001443, TRACH2001463, TRACH2001474, TRACH2001523, TRACH2001525, TRACH2001532, TRACH2001549,

[3156] TRACH2001592, TRACH2001596, TRACH2001621, TRACH2001646, TRACH2001651, TRACH2001684, TRACH2001898, TRACH2001933, TRACH2001968, TRACH2001996, TRACH2002043, TRACH2002054, TRACH2002092, TRACH2002100, TRACH2002138, TRACH2002333, TRACH2002784, TRACH2002840, TRACH2002847, TRACH2002853, TRACH2002862, TRACH2002954, TRACH2002960, TRACH2002988, TRACH2003070, TRACH2003272, TRACH2003347, TRACH2003484, TRACH2003516, TRACH2003605, TRACH2003736, TRACH2003759, TRACH2003941, TRACH2004054, TRACH2004087, TRACH2004109, TRACH2004170, TRACH2004183, TRACH2004251, TRACH2004292, TRACH2004399, TRACH2004428, TRACH2004458, TRACH2004499, TRACH2004521, TRACH2004570, TRACH2004845, TRACH2004887, TRACH2004950, TRACH2005004,

[3157] TRACH2005017, TRACH2005066, TRACH2005159, TRACH2005314, TRACH2005444, TRACH2005666, TRACH2005698, TRACH2005710, TRACH2005720, TRACH2005769, TRACH2005796, TRACH2006015, TRACH2006049, TRACH2006097, TRACH2006194, TRACH2006327, TRACH2006331, TRACH2006387, TRACH2006528, TRACH2006670, TRACH2006762, TRACH2006870, TRACH2006918, TRACH2007059, TRACH2007324, TRACH2007358, TRACH2007483, TRACH2007542, TRACH2007577, TRACH2007674, TRACH2007676, TRACH2007688, TRACH2007733, TRACH2007754, TRACH2007816, TRACH2007894, TRACH2007988, TRACH2008112, TRACH2008113, TRACH2008127, TRACH2008130, TRACH2008278, TRACH2008478, TRACH2008540, TRACH2008583, TRACH2008597, TRACH2008820, TRACH2008891, TRACH2008921, TRACH2009006,

[3158] TRACH2009060, TRACH2009123, TRACH2009268, TRACH2009291, TRACH2009348, TRACH2009358, TRACH2009730, TRACH2009743, TRACH2009754, TRACH2009851, TRACH2009862, TRACH2009934, TRACH2010159, TRACH2010218, TRACH2010251, TRACH2010272, TRACH2010317, TRACH2010419, TRACH2010451, TRACH2010505, TRACH2010587, TRACH2010600, TRACH2010634, TRACH2010639, TRACH2010677, TRACH2010698, TRACH2010771, TRACH2010824, TRACH2010883, TRACH2010965, TRACH2010974, TRACH2011057, TRACH2011093, TRACH2011290, TRACH2011293, TRACH2011302, TRACH2011500, TRACH2011574, TRACH2011894, TRACH2011956, TRACH2012000, TRACH2012138, TRACH2012242, TRACH2012370, TRACH2012497, TRACH2012536, TRACH2012562, TRACH2012742, TRACH2012823, TRACH2012918,

[3159] TRACH2013081, TRACH2013123, TRACH2013265, TRACH2013369, TRACH2013450, TRACH2013495, TRACH2013552, TRACH2013585, TRACH2013671, TRACH2013726, TRACH2013902, TRACH2013928, TRACH2013982, TRACH2013991, TRACH2014018, TRACH2014045, TRACH2014046, TRACH2014082, TRACH2014268, TRACH2014284, TRACH2014337, TRACH2014356, TRACH2014371, TRACH2014442, TRACH2014483, TRACH2014495, TRACH2014544, TRACH2014573, TRACH2014725, TRACH2014760, TRACH2014815, TRACH2014839, TRACH2014938, TRACH2014950, TRACH2014972, TRACH2014974, TRACH2014997, TRACH2015180, TRACH2015243, TRACH2015316, TRACH2015381, TRACH2015486, TRACH2015654, TRACH2015939, TRACH2015987, TRACH2016080, TRACH2016131, TRACH2016286, TRACH2016317, TRACH2016347,

[3160] TRACH2016380, TRACH2016384, TRACH2016410, TRACH2016481, TRACH2016498, TRACH2016533, TRACH2016551, TRACH2016554, TRACH2016651, TRACH2016690, TRACH2016709, TRACH2016722, TRACH2016835, TRACH2016980, TRACH2017086, TRACH2017368, TRACH2017498, TRACH2017609, TRACH2017949, TRACH2017965, TRACH2017980, TRACH2018034, TRACH2018084, TRACH2018262, TRACH2018273, TRACH2018278, TRACH2018317, TRACH2018345, TRACH2018380, TRACH2018512, TRACH2018646, TRACH2018663, TRACH2018718, TRACH2018835, TRACH2018882, TRACH2018914, TRACH2018950, TRACH2019024, TRACH2019046, TRACH2019151, TRACH2019154, TRACH2019176, TRACH2019248, TRACH2019309, TRACH2019425, TRACH2019473, TRACH2019602, TRACH2019661, TRACH2019672, TRACH2019673,

[3161] TRACH2019844, TRACH2019879, TRACH2020048, TRACH2020336, TRACH2020525, TRACH2021398, TRACH2021622, TRACH2021635, TRACH2021964, TRACH2022042, TRACH2022113, TRACH2022253, TRACH2022425, TRACH2022553, TRACH2022649, TRACH2022839, TRACH2023246, TRACH2023306, TRACH2023416, TRACH2023479, TRACH2023684, TRACH2023860, TRACH2023876, TRACH2024139, TRACH2024187, TRACH2024271, TRACH2024293, TRACH2024408, TRACH2024512, TRACH2024559, TRACH2024647, TRACH2024651, TRACH2024730, TRACH2024735, TRACH2024749, TRACH2024821, TRACH2025057, TRACH2025084, TRACH2025155, TRACH2025224, TRACH2025344, TRACH2025379, TRACH2025507, TRACH2025569, TRACH2025705, TRACH2025749, TRACH2025753, TRACH2025810, TRACH2025853, TRACH2025911,

[3162] TRACH2025932, TRACH3000014, TRACH3000017, TRACH3000043, TRACH3000134, TRACH3000180, TRACH3000342, TRACH3000420, TRACH3000515, TRACH3000530, TRACH3000548, TRACH3000558, TRACH3000586, TRACH3000692, TRACH3000780, TRACH3000892, TRACH3000926, TRACH3001119, TRACH3001443, TRACH3001550, TRACH3001759, TRACH3002064, TRACH3002107, TRACH3002168, TRACH3002188, TRACH3002245, TRACH3002293, TRACH3002533, TRACH3002561, TRACH3002567, TRACH3002605, TRACH3002650, TRACH3002752, TRACH3002866, TRACH3002871, TRACH3002876, TRACH3002890, TRACH3003009, TRACH3003037, TRACH3003357, TRACH3003586, TRACH3003683, TRACH3003780, TRACH3003805, TRACH3004113, TRACH3004288, TRACH3004303, TRACH3004412, TRACH3004424, TRACH3004456,

[3163] TRACH3004537, TRACH3004596, TRACH3004651, TRACH3004652, TRACH3004671, TRACH3004747, TRACH3004760, TRACH3004783, TRACH3004786, TRACH3004840, TRACH3004931, TRACH3004934, TRACH3005072, TRACH3005085, TRACH3005102, TRACH3005173, TRACH3005191, TRACH3005274, TRACH3005294, TRACH3005549, TRACH3005702, TRACH3005808, TRACH3005852, TRACH3005896, TRACH3006038, TRACH3006149, TRACH3006228, TRACH3006264, TRACH3006336, TRACH3006379, TRACH3006392, TRACH3006395, TRACH3006397, TRACH3006412, TRACH3006470, TRACH3006589, TRACH3006626, TRACH3006699, TRACH3006800, TRACH3006889, TRACH3006985, TRACH3007097, TRACH3007268, TRACH3007274, TRACH3007277, TRACH3007391, TRACH3007541, TRACH3007595, TRACH3007627, TRACH3007689,

[3164] TRACH3007766, TRACH3007866, TRACH3007995, TRACH3008042, TRACH3008061, TRACH3008201, TRACH3008535, TRACH3008632, TRACH3008688, TRACH3008697, TRACH3008713, TRACH3008887, TRACH3008902, TRACH3008990, TRACH3009001, TRACH3009059, TRACH3009061, TRACH3009455, TRACH3009701, TRACH3009715, TRACH3009894, TRACH3009956, TRACH3010079, TRACH3010167, TRACH3010331, TRACH3010342, TRACH3010382, TRACH3010757, TRACH3010901, TRACH3011004, TRACH3011082, TRACH3011184, TRACH3011282, TRACH3011313, TRACH3011454, TRACH3011485, TRACH3011503, TRACH3011538, TRACH3011542, TRACH3012106, TRACH3012161, TRACH3012232, TRACH3012261, TRACH3012445, TRACH3012460, TRACH3012659, TRACH3012718, TRACH3012864, TRACH3012891, TRACH3012942,

[3165] TRACH3013072, TRACH3013426, TRACH3013454, TRACH3013558, TRACH3013684, TRACH3013693, TRACH3013700, TRACH3013766, TRACH3013900, TRACH3013926, TRACH3014063, TRACH3014183, TRACH3014215, TRACH3014316, TRACH3014415, TRACH3014580, TRACH3014641, TRACH3014885, TRACH3015136, TRACH3015336, TRACH3015346, TRACH3015354, TRACH3015467, TRACH3015626, TRACH3015951, TRACH3016051, TRACH3016120, TRACH3016264, TRACH3016277, TRACH3016368, TRACH3016455, TRACH3016614, TRACH3017171, TRACH3017409, TRACH3017934, TRACH3018108, TRACH3018191, TRACH3018240, TRACH3018261, TRACH3018519, TRACH3018524, TRACH3018606, TRACH3018783, TRACH3018907, TRACH3018933, TRACH3018943, TRACH3019018, TRACH3019058, TRACH3019142, TRACH3019347,

[3166] TRACH3019370, TRACH3019447, TRACH3019598, TRACH3019621, TRACH3019662, TRACH3019807, TRACH3019924, TRACH3019977, TRACH3020137, TRACH3020410, TRACH3020563, TRACH3020605, TRACH3020750, TRACH3020769, TRACH3020928, TRACH3020930, TRACH3021023, TRACH3021066, TRACH3021212, TRACH3021335, TRACH3021373, TRACH3021544, TRACH3021778, TRACH3021834, TRACH3021883, TRACH3022170, TRACH3022198, TRACH3022296, TRACH3022482, TRACH3022732, TRACH3022758, TRACH3022875, TRACH3022910, TRACH3022960, TRACH3023063, TRACH3023203, TRACH3023242, TRACH3023373, TRACH3023516, TRACH3023752, TRACH3023945, TRACH3023960, TRACH3024020, TRACH3024081, TRACH3024342, TRACH3024423, TRACH3024428, TRACH3024512, TRACH3024671, TRACH3024823,

[3167] TRACH3025302, TRACH3025316, TRACH3025346, TRACH3025520, TRACH3026148, TRACH3026283, TRACH3026299, TRACH3026542, TRACH3026650, TRACH3026676, TRACH3026744, TRACH3026949, TRACH3027229, TRACH3027527, TRACH3027681, TRACH3027701, TRACH3027885, TRACH3028031, TRACH3028164, TRACH3028180, TRACH3028195, TRACH3028441, TRACH3028597, TRACH3028678, TRACH3028837, TRACH3028847, TRACH3028855, TRACH3029139, TRACH3029329, TRACH3029451, TRACH3029462, TRACH3029520, TRACH3029592, TRACH3029629, TRACH3029665, TRACH3029670, TRACH3029800, TRACH3030111, TRACH3030130, TRACH3030176, TRACH3030252, TRACH3030725, TRACH3030855, TRACH3030883, TRACH3031316, TRACH3031400, TRACH3031463, TRACH3031479, TRACH3031518, TRACH3031660,

[3168] TRACH3031678, TRACH3031936, TRACH3032044, TRACH3032065, TRACH3032150, TRACH3032372, TRACH3032480, TRACH3032570, TRACH3032755, TRACH3032827, TRACH3032873, TRACH3033535, TRACH3033680, TRACH3033868, TRACH3034145, TRACH3034414, TRACH3034488, TRACH3034680, TRACH3034731, TRACH3034745, TRACH3034762, TRACH3034903, TRACH3035187, TRACH3035199, TRACH3035235, TRACH3035451, TRACH3035482, TRACH3035526, TRACH3036004, TRACH3036103, TRACH3036193, TRACH3036207, TRACH3036278, TRACH3036309, TRACH3036456, TRACH3036609, TRACH3036638, TRACH3036683, TRACH3036750, TRACH3036792, TRACH3036843, TRACH3036897, TRACH3036932, TRACH3036997, TRACH3037063, TRACH3037267, TRACH3037288, TRACH3037505, TRACH3037573, TRACH3037696,

[3169] TRACH3037897, TRACH3038086, TRACH3038399, TSTOM1000135, TSTOM1000186, TSTOM2000235, TSTOM2000442, TSTOM2000569, TSTOM2000588, TSTOM2001195, TSTOM2001274, TSTOM2001571, TSTOM2001996, TSTOM2002265, TSTOM2002505, TSTOM2002561, TSTOM2002611, TSTOM2002672, TSTOM2002682, TUTER1000014, TUTER1000137, TUTER2000057, TUTER2000283, TUTER2000425, TUTER2000916, TUTER2001286, TUTER2001341, TUTER2001387, TUTER2001433, TUTER2001461, TUTER2002028, TUTER2002074, TUTER2002158, TUTER2002228, TUTER2002323, TUTER2002356, TUTER2002729, UMVEN1000122, UMVEN1000156, UMVEN1000186, UMVEN2000046, UMVEN2000069, UMVEN2000121, UMVEN2000354, UTERU1000008, UTERU1000015, UTERU1000024, UTERU1000031, UTERU1000032, UTERU1000057,

[3170] UTERU1000065, UTERU1000077, UTERU1000093, UTERU1000096, UTERU1000106, UTERU1000109, UTERU1000131, UTERU1000138, UTERU1000148, UTERU1000160, UTERU1000183, UTERU1000187, UTERU1000192, UTERU1000249, UTERU1000337, UTERU1000339, UTERU2000047, UTERU2000074, UTERU2000099, UTERU2000154, UTERU2000197, UTERU2000218, UTERU2000238, UTERU2000243, UTERU2000260, UTERU2000300, UTERU2000329, UTERU2000338, UTERU2000349, UTERU2000377, UTERU2000393, UTERU2000418, UTERU2000465, UTERU2000485, UTERU2000517, UTERU2000524, UTERU2000537, UTERU2000539, UTERU2000541, UTERU2000546, UTERU2000550, UTERU2000569, UTERU2000607, UTERU2000629, UTERU2000649, UTERU2000663, UTERU2000696, UTERU2000794, UTERU2000830, UTERU2000844,

[3171] UTERU2000922, UTERU2000925, UTERU2001024, UTERU2001110, UTERU2001176, UTERU2001281, UTERU2001389, UTERU2001409, UTERU2001412, UTERU2001504, UTERU2001658, UTERU2001747, UTERU2001876, UTERU2002001, UTERU2002011, UTERU2002176, UTERU2002332, UTERU2002473, UTERU2002547, UTERU2002693, UTERU2002733, UTERU2002736, UTERU2002737, UTERU2002826, UTERU2002964, UTERU2003035, UTERU2003057, UTERU2003126, UTERU2003135, UTERU2003399, UTERU2003411, UTERU2003456, UTERU2003577, UTERU2003704, UTERU2003926, UTERU2003973, UTERU2004015, UTERU2004037, UTERU2004039, UTERU2004061, UTERU2004163, UTERU2004299, UTERU2004461, UTERU2004520, UTERU2004564, UTERU2004698, UTERU2004861, UTERU2004929, UTERU2005004, UTERU2005050,

[3172] UTERU2005179, UTERU2005346, UTERU2005446, UTERU2005449, UTERU2005450, UTERU2005533, UTERU2005601, UTERU2005664, UTERU2005822, UTERU2005903, UTERU2005905, UTERU2006103, UTERU2006115, UTERU2006137, UTERU2006182, UTERU2006400, UTERU2006412, UTERU2006429, UTERU2006486, UTERU2006524, UTERU2006547, UTERU2006568, UTERU2006593, UTERU2006643, UTERU2006651, UTERU2006705, UTERU2006899, UTERU2007004, UTERU2007075, UTERU2007081, UTERU2007128, UTERU2007253, UTERU2007267, UTERU2007499, UTERU2007639, UTERU2007724, UTERU2007924, UTERU2007942, UTERU2008018, UTERU2008019, UTERU2008027, UTERU2008040, UTERU2008077, UTERU2008130, UTERU2008347, UTERU2008426, UTERU2008516, UTERU2008561, UTERU2008653, UTERU2008705,

[3173] UTERU2008707, UTERU2008785, UTERU2008845, UTERU2008901, UTERU2008930, UTERU2008939, UTERU2009094, UTERU2009120, UTERU2009131, UTERU2009147, UTERU2009206, UTERU2009283, UTERU2009414, UTERU2009483, UTERU2009510, UTERU2009538, UTERU2009540, UTERU2009776, UTERU2009904, UTERU2009951, UTERU2009972, UTERU2010115, UTERU2010124, UTERU2010164, UTERU2010226, UTERU2010231, UTERU2010304, UTERU2010320, UTERU2010431, UTERU2010525, UTERU2010651, UTERU2010724, UTERU2010747, UTERU2011195, UTERU2011199, UTERU2011220, UTERU2011261, UTERU2011287, UTERU2011410, UTERU2011574, UTERU2011621, UTERU2011657, UTERU2011741, UTERU2011806, UTERU2011811, UTERU2011897, UTERU2011906, UTERU2011962, UTERU2011968, UTERU2012031,

[3174] UTERU2012101, UTERU2012114, UTERU2012252, UTERU2012333, UTERU2012407, UTERU2012526, UTERU2012581, UTERU2012610, UTERU2012615, UTERU2012688, UTERU2012703, UTERU2012715, UTERU2012741, UTERU2012767, UTERU2012786, UTERU2012856, UTERU2012890, UTERU2012938, UTERU2012976, UTERU2013048, UTERU2013078, UTERU2013231, UTERU2013280, UTERU2013322, UTERU2013483, UTERU2013491, UTERU2013502, UTERU2013586, UTERU2013926, UTERU2013976, UTERU2014001, UTERU2014223, UTERU2014398, UTERU2014464, UTERU2014548, UTERU2014631, UTERU2014668, UTERU2014678, UTERU2014728, UTERU2014998, UTERU2015062, UTERU2015087, UTERU2015108, UTERU2015190, UTERU2015198, UTERU2015202, UTERU2015405, UTERU2015640, UTERU2015830, UTERU2015880,

[3175] UTERU2016147, UTERU2016157, UTERU2016464, UTERU2016669, UTERU2016757, UTERU2016761, UTERU2016799, UTERU2016896, UTERU2016902, UTERU2016979, UTERU2016981, UTERU2017123, UTERU2017303, UTERU2017421, UTERU2017492, UTERU2017613, UTERU2017761, UTERU2017762, UTERU2017810, UTERU2017988, UTERU2018127, UTERU2018180, UTERU2018200, UTERU2018333, UTERU2018364, UTERU2018514, UTERU2018522, UTERU2018523, UTERU2018544, UTERU2018566, UTERU2018609, UTERU2018674, UTERU2018712, UTERU2018784, UTERU2018789, UTERU2018811, UTERU2018867, UTERU2018881, UTERU2018884, UTERU2018955, UTERU2019005, UTERU2019038, UTERU2019163, UTERU2019257, UTERU2019453, UTERU2019491, UTERU2019534, UTERU2019681, UTERU2019706, UTERU2019710,

[3176] UTERU2019940, UTERU2019959, UTERU2019964, UTERU2020242, UTERU2020292, UTERU2020351, UTERU2020491, UTERU2020718, UTERU2021163, UTERU2021380, UTERU2021649, UTERU2021820, UTERU2022020, UTERU2022773, UTERU2022955, UTERU2022981, UTERU2023039, UTERU2023045, UTERU2023262, UTERU2023550, UTERU2023651, UTERU2023687, UTERU2023712, UTERU2023941, UTERU2024002, UTERU2024042, UTERU2024141, UTERU2024481, UTERU2024656, UTERU2024758, UTERU2024820, UTERU2024881, UTERU2024969, UTERU2025025, UTERU2025041, UTERU2025366, UTERU2025415, UTERU2025579, UTERU2025645, UTERU2025891, UTERU2026025, UTERU2026090, UTERU2026142, UTERU2026203, UTERU2026775, UTERU2027023, UTERU2027369, UTERU2027591, UTERU2027616, UTERU2027941,

[3177] UTERU2028377, UTERU2028734, UTERU2029503, UTERU2029660, UTERU2029742, UTERU2029953, UTERU2030270, UTERU2030280, UTERU2031060, UTERU2031084, UTERU2031268, UTERU2031295, UTERU2031521, UTERU2031611, UTERU2031703, UTERU2031834, UTERU2031851, UTERU2032075, UTERU2032220, UTERU2032279, UTERU2032726, UTERU2033172, UTERU2033375, UTERU2033382, UTERU2033420, UTERU2033530, UTERU2033577, UTERU2034053, UTERU2034147, UTERU2034695, UTERU2035114, UTERU2035187, UTERU2035231, UTERU2035306, UTERU2035323, UTERU2035328, UTERU2035331, UTERU2035452, UTERU2035469, UTERU2035503, UTERU2035745, UTERU2035908, UTERU2035926, UTERU2035978, UTERU2036089, UTERU2036347, UTERU2036507, UTERU2036512, UTERU2036530, UTERU2036623,

[3178] UTERU2036690, UTERU2037224, UTERU2037361, UTERU2037423, UTERU2037577, UTERU2037674, UTERU2037791, UTERU2037843, UTERU2038171, UTERU2038251, UTERU3000226, UTERU3000298, UTERU3000402, UTERU3000645, UTERU3000665, UTERU3000670, UTERU3000727, UTERU3000738, UTERU3000828, UTERU3000899, UTERU3000959, UTERU3001029, UTERU3001053, UTERU3001059, UTERU3001158, UTERU3001240, UTERU3001394, UTERU3001542, UTERU3001558, UTERU3001571, UTERU3001585, UTERU3001632, UTERU3001652, UTERU3001766, UTERU3001988, UTERU3002209, UTERU3002218, UTERU3002383, UTERU3002600, UTERU3002620, UTERU3002667, UTERU3002701, UTERU3002731, UTERU3002768, UTERU3002786, UTERU3002993, UTERU3003116, UTERU3003135, UTERU3003178, UTERU3003465,

[3179] UTERU3003495, UTERU3003523, UTERU3003774, UTERU3003776, UTERU3004384, UTERU3004418, UTERU3004477, UTERU3004523, UTERU3004616, UTERU3004635, UTERU3004709, UTERU3004938, UTERU3004992, UTERU3005049, UTERU3005205, UTERU3005230, UTERU3005264, UTERU3005422, UTERU3005460, UTERU3005536, UTERU3005585, UTERU3005907, UTERU3005970, UTERU3006008, UTERU3006228, UTERU3006308, UTERU3006538, UTERU3006640, UTERU3006687, UTERU3006720, UTERU3006798, UTERU3006884, UTERU3007021, UTERU3007104, UTERU3007108, UTERU3007134, UTERU3007419, UTERU3007640, UTERU3007731, UTERU3007913, UTERU3008280, UTERU3008463, UTERU3008660, UTERU3008671, UTERU3008722, UTERU3008917, UTERU3009259, UTERU3009490, UTERU3009517, UTERU3009690,

[3180] UTERU3009775, UTERU3009979, UTERU3009987, UTERU3010029, UTERU3010526, UTERU3010604, UTERU3010892, UTERU3010919, UTERU3011063, UTERU3011092, UTERU3011273, UTERU3011398, UTERU3011558, UTERU3011579, UTERU3011795, UTERU3011837, UTERU3012293, UTERU3012414, UTERU3012476, UTERU3012599, UTERU3012999, UTERU3013167, UTERU3013302, UTERU3013781, UTERU3014274, UTERU3014446, UTERU3014611, UTERU3014647, UTERU3014791, UTERU3014906, UTERU3015086, UTERU3015299, UTERU3015412, UTERU3015500, UTERU3015647, UTERU3015844, UTERU3016070, UTERU3016273, UTERU3016274, UTERU3016308, UTERU3016789, UTERU3017176, UTERU3017441, UTERU3017626, UTERU3018154, UTERU3018172, UTERU3018255, UTERU3018616, UTERU3018711, UTERU3019078

[3181] Of the 17,176 genes that include the cDNAs of the present invention, genes whose expression levels were high enough to detect in each of the THYMU, TKIDN, TLIVE, TLUNG, TOVAR, TRACH, and TSTOM libraries were analyzed for expression frequency. The analysis results are described below. Each is a relative value, where the expression level over all tissues is taken as 100. The larger this value, the greater the level of expression.

TABLE 39

| Clone Name | THYMU | TKIDN | TLIVE | TLUNG | TOVAR | TRACH | TSTOM |
|---|---|---|---|---|---|---|---|
| 3NB691000116 | 0 | 0 | 0 | 0 | 0 | 1.822 | 0 |
| 3NB691000173 | 0 | 0 | 5.429 | 0 | 0 | 0 | 0 |
| 3NB692000281 | 0 | 0.815 | 1.513 | 0 | 4.795 | 0.247 | 0 |
| 3NB692000330 | 0.736 | 0 | 3.032 | 0 | 0 | 0.494 | 9.473 |
| 3NB692000374 | 0 | 8.029 | 0 | 0 | 0 | 0 | 0 |
| 3NB692000545 | 2.352 | 0 | 0 | 0 | 0 | 0 | 0 |
| 3NB692000912 | 1.175 | 1.739 | 0 | 0 | 0 | 0 | 0 |
| 3NB692001022 | 0 | 0 | 8.554 | 0 | 0 | 0 | 0 |
| 3NB692001288 | 0 | 22.184 | 0 | 0 | 0 | 1.678 | 0 |
| 3NB692001334 | 0.224 | 2.981 | 0 | 0 | 0 | 0.601 | 0 |
| 3NB692001442 | 2.014 | 0 | 0 | 0 | 0 | 0 | 0 |
| 3NB692001520 | 10.259 | 0 | 0 | 0 | 0 | 0 | 0 |
| 3NB692001538 | 0 | 0 | 0 | 0 | 0 | 2.225 | 0 |
| 3NB692001853 | 0 | 0 | 0 | 0 | 0 | 0 | 56.236 |
| 3NB692002051 | 0 | 31.623 | 0 | 0 | 0 | 0 | 0 |
| ADRGL1000002 | 0 | 6.095 | 0 | 0 | 0 | 0 | 0 |
| ADRGL1000018 | 4.032 | 0 | 0 | 0 | 0 | 0 | 0 |
| ADRGL1000111 | 12.580 | 0 | 0 | 0 | 0 | 0 | 0 |
| ADRGL2000056 | 12.580 | 0 | 0 | 0 | 0 | 0 | 0 |
| ADRGL2000097 | 0 | 0 | 0 | 0 | 0 | 2.490 | 0 |
| ADRGL2002260 | 12.580 | 0 | 0 | 0 | 0 | 0 | 0 |
| ADRGL2002477 | 0 | 6.297 | 0 | 0 | 0 | 3.811 | 0 |
| ADRGL2004676 | 3.635 | 0 | 0 | 0 | 0 | 0 | 0 |
| ADRGL2007313 | 0 | 36.270 | 0 | 0 | 0 | 0 | 0 |
| ADRGL2008535 | 12.580 | 0 | 0 | 0 | 0 | 0 | 0 |
| ADRGL2009273 | 0 | 5.142 | 0 | 0 | 0 | 4.668 | 0 |
| ADRGL2011330 | 12.580 | 0 | 0 | 0 | 0 | 0 | 0 |
| ADRGL2012038 | 1.714 | 0 | 0 | 0 | 0 | 0 | 0 |
| ASTRO2000046 | 0.340 | 3.021 | 0 | 0 | 0 | 11.427 | 0 |
| ASTRO2000141 | 1.266 | 0 | 10.441 | 0 | 0 | 0 | 0 |
| ASTRO2000278 | 32.494 | 0 | 0 | 0 | 0 | 0 | 0 |
| ASTRO2000480 | 4.722 | 0 | 0 | 0 | 0 | 3.171 | 0 |
| ASTRO2000801 | 0 | 3.776 | 0 | 0 | 0 | 0 | 0 |
| ASTRO2000914 | 0 | 0 | 0 | 0 | 0 | 2.180 | 0 |
| ASTRO2001029 | 2.091 | 0 | 0 | 0 | 0 | 0 | 0 |
| ASTRO2001076 | 1.185 | 0 | 0 | 0 | 0 | 0 | 0 |
| ASTRO2001806 | 0 | 0 | 0 | 0 | 0 | 1.603 | 0 |
| ASTRO2001823 | 3.631 | 0 | 0 | 0 | 0 | 0 | 0 |
| ASTRO2002024 | 32.797 | 0 | 0 | 0 | 0 | 0 | 0 |
| ASTRO2002064 | 0 | 51.654 | 0 | 0 | 0 | 0 | 0 |
| ASTRO2002202 | 3.843 | 0 | 0 | 0 | 0 | 5.163 | 0 |
| ASTRO2003024 | 1.581 | 0 | 0 | 0 | 0 | 1.062 | 0 |
| ASTRO2003316 | 2.460 | 0 | 0 | 0 | 0 | 16.521 | 0 |
| ASTRO2003461 | 4.967 | 0 | 0 | 0 | 0 | 6.672 | 0 |
| ASTRO2003632 | 0 | 0 | 0 | 8.597 | 9.049 | 0.931 | 8.922 |
| ASTRO2003840 | 5.165 | 0 | 0 | 0 | 0 | 0 | 0 |
| ASTRO2004628 | 7.422 | 0 | 0 | 0 | 0 | 0 | 0 |
| ASTRO2004974 | 3.240 | 0 | 0 | 0 | 0 | 0 | 0 |
| ASTRO2005360 | 4.974 | 0 | 0 | 0 | 0 | 6.682 | 0 |
| ASTRO2005423 | 2.871 | 0 | 0 | 0 | 0 | 3.857 | 0 |
| ASTRO2005593 | 0 | 51.654 | 0 | 0 | 0 | 0 | 0 |
| ASTRO2005687 | 0 | 0 | 0 | 0 | 0 | 4.994 | 0 |
| ASTRO2006920 | 10.005 | 0 | 0 | 0 | 0 | 0 | 0 |
| ASTRO2007047 | 1.743 | 0 | 0 | 0 | 0 | 0 | 0 |
| ASTRO2007948 | 2.088 | 18.541 | 0 | 0 | 0 | 2.805 | 0 |
| ASTRO2008216 | 2.661 | 0 | 0 | 0 | 0 | 0 | 0 |
| ASTRO2009068 | 4.718 | 20.946 | 0 | 0 | 0 | 0 | 0 |
| ASTRO2009118 | 0 | 0 | 0 | 0 | 0 | 17.497 | 0 |
| ASTRO2010582 | 0 | 0 | 0 | 0 | 0 | 19.388 | 0 |
| ASTRO2010819 | 4.489 | 0 | 0 | 13.924 | 0 | 2.261 | 0 |
| ASTRO2012552 | 1.233 | 0 | 10.162 | 0 | 0 | 0 | 0 |
| ASTRO2013585 | 1.219 | 5.414 | 0 | 0 | 0 | 0 | 0 |
| ASTRO2013671 | 19.399 | 0 | 0 | 0 | 0 | 0 | 0 |
| ASTRO2014135 | 0 | 0 | 0 | 0 | 75.660 | 0 | 0 |
| ASTRO2014561 | 0 | 0 | 60.587 | 0 | 0 | 0 | 0 |
| ASTRO2014863 | 0 | 0 | 0 | 0 | 0 | 3.784 | 0 |
| ASTRO2015529 | 0 | 0 | 0 | 38.341 | 0 | 0 | 0 |
| ASTRO2016491 | 1.260 | 1.864 | 0 | 0 | 0 | 2.256 | 0 |
| ASTRO2018169 | 1.575 | 3.496 | 0 | 0 | 0 | 1.058 | 0 |
| ASTRO2018373 | 0 | 51.654 | 0 | 0 | 0 | 0 | 0 |
| BGGI11000123 | 0.584 | 0 | 0 | 0 | 0 | 1.570 | 0 |
| BGGI12000054 | 0.393 | 4.359 | 1.619 | 4.874 | 0 | 1.319 | 0 |
| BGGI12000533 | 0 | 0 | 0 | 0 | 0 | 2.529 | 0 |
| BGGI12000839 | 0.615 | 0 | 5.070 | 0 | 0 | 0.826 | 15.837 |
| BGGI12001002 | 0 | 0 | 12.205 | 0 | 0 | 0 | 0 |
| BGGI12001075 | 1.651 | 0 | 0 | 0 | 0 | 4.435 | 0 |
| BGGI12001682 | 0 | 3.823 | 0 | 0 | 0 | 0 | 0 |
| BLADE2000492 | 0 | 0 | 0 | 0 | 0 | 0 | 75.368 |
| BLADE2004089 | 0 | 0 | 0 | 0 | 0 | 11.100 | 0 |
| BLADE2006412 | 5.063 | 0 | 0 | 0 | 0 | 0 | 0 |
| BLADE2006830 | 0 | 6.222 | 0 | 0 | 0 | 0 | 0 |
| BLADE2007589 | 12.366 | 0 | 0 | 0 | 0 | 0 | 0 |
| BLADE2007666 | 5.682 | 0 | 0 | 0 | 0 | 0 | 0 |
| BLADE2008398 | 0 | 0 | 0 | 0 | 0 | 6.946 | 0 |
| BLADE2008461 | 6.201 | 0 | 0 | 0 | 0 | 0 | 0 |
| BNGH41000098 | 0 | 0 | 0 | 0 | 0 | 2.839 | 0 |
| BNGH41000137 | 3.618 | 0 | 0 | 0 | 0 | 0 | 0 |
| BNGH41000153 | 0 | 0 | 0 | 0 | 0 | 5.264 | 0 |
| BNGH41000190 | 4.220 | 0 | 0 | 0 | 0 | 5.669 | 0 |
| BNGH41000235 | 5.435 | 0 | 0 | 0 | 0 | 0 | 0 |
| BNGH42000360 | 0.131 | 0 | 0 | 0 | 0 | 0.176 | 0 |
| BNGH42000739 | 0.519 | 2.303 | 0 | 0 | 0 | 1.394 | 0 |
| BNGH42002168 | 0 | 0 | 0 | 0 | 0 | 1.490 | 0 |
| BNGH42005968 | 3.830 | 0 | 0 | 0 | 0 | 5.146 | 0 |
| BNGH42006135 | 2.753 | 0 | 0 | 0 | 14.381 | 2.958 | 0 |
| BNGH42007366 | 0 | 0 | 0 | 0 | 0 | 7.163 | 0 |
| BNGH42007460 | 0 | 3.730 | 0 | 0 | 0 | 0 | 0 |
| BNGH42007709 | 0.192 | 0.852 | 0 | 0 | 0 | 0.516 | 4.943 |
| BNGH42007788 | 2.567 | 0 | 0 | 0 | 0 | 3.448 | 0 |
| BNGH42008603 | 1.206 | 10.708 | 0 | 0 | 0 | 0 | 0 |
| BNGH42008743 | 0 | 0 | 0 | 0 | 0 | 1.724 | 33.061 |
| BRACE1000020 | 0 | 0 | 0 | 0 | 0 | 12.608 | 0 |
| BRACE1000042 | 1.269 | 0 | 0 | 0 | 0 | 0 | 0 |
| BRACE1000070 | 1.491 | 0 | 12.290 | 0 | 0 | 2.002 | 0 |
| BRACE1000073 | 0 | 31.214 | 0 | 0 | 0 | 0 | 0 |
| BRACE1000115 | 0.156 | 0 | 0 | 0 | 0 | 0 | 0 |
| BRACE1000131 | 2.606 | 0 | 0 | 0 | 0 | 2.333 | 0 |
| BRACE1000159 | 1.540 | 6.835 | 0 | 0 | 0 | 0 | 0 |
| BRACE1000166 | 54.019 | 0 | 0 | 0 | 0 | 0 | 0 |
| BRACE1000186 | 0 | 16.007 | 0 | 0 | 0 | 0 | 0 |
| BRACE2000061 | 32.684 | 0 | 0 | 0 | 0 | 0 | 0 |
| BRACE2000245 | 14.749 | 0 | 0 | 0 | 0 | 0 | 0 |
| BRACE2000300 | 0 | 39.353 | 0 | 0 | 0 | 0 | 0 |
| BRACE2000332 | 0 | 0 | 0 | 0 | 0 | 3.040 | 0 |
| BRACE2000347 | 2.156 | 0 | 17.773 | 0 | 0 | 5.791 | 0 |
| BRACE2000487 | 6.842 | 0 | 0 | 0 | 0 | 0 | 0 |
| BRACE2000525 | 0 | 18.043 | 0 | 0 | 0 | 1.820 | 0 |
| BRACE2000565 | 0 | 53.096 | 0 | 0 | 0 | 0 | 0 |
| BRACE2000753 | 25.397 | 0 | 0 | 0 | 0 | 0 | 0 |
| BRACE2000864 | 0 | 9.768 | 0 | 0 | 0 | 0 | 0 |
| BRACE2000893 | 0 | 16.728 | 0 | 0 | 0 | 5.062 | 0 |
| BRACE2000975 | 0 | 9.485 | 0 | 0 | 0 | 0 | 0 |
| BRACE2001065 | 0 | 24.580 | 0 | 0 | 0 | 7.438 | 0 |
| BRACE2001117 | 2.293 | 0 | 0 | 0 | 0 | 0 | 0 |
| BRACE2001143 | 0 | 5.499 | 0 | 0 | 0 | 0 | 0 |
| BRACE2001154 | 8.859 | 39.329 | 0 | 0 | 0 | 0 | 0 |
| BRACE2001188 | 0 | 0 | 0 | 0 | 61.486 | 0 | 0 |
| BRACE2001313 | 25.397 | 0 | 0 | 0 | 0 | 0 | 0 |
| BRACE2001477 | 2.868 | 0 | 0 | 0 | 0 | 3.852 | 0 |
| BRACE2001496 | 0 | 17.958 | 0 | 0 | 0 | 0 | 0 |
| BRACE2001497 | 0 | 13.795 | 0 | 0 | 0 | 2.087 | 0 |
| BRACE2001673 | 0 | 0.868 | 0 | 0 | 0 | 0 | 0 |
| BRACE2001692 | 1.010 | 2.241 | 4.163 | 0 | 0 | 0.678 | 0 |
| BRACE2001709 | 2.706 | 0 | 0 | 0 | 0 | 0 | 0 |
| BRACE2001711 | 0 | 0 | 26.743 | 0 | 0 | 0 | 0 |
| BRACE2001834 | 0 | 14.049 | 0 | 0 | 0 | 0 | 0 |
| BRACE2001855 | 1.919 | 0 | 0 | 0 | 0 | 0 | 0 |
| BRACE2001892 | 0 | 4.485 | 0 | 0 | 0 | 0 | 0 |
| BRACE2001942 | 54.019 | 0 | 0 | 0 | 0 | 0 | 0 |
| BRACE2001944 | 0 | 23.221 | 0 | 0 | 0 | 0 | 0 |
| BRACE2001971 | 0 | 0 | 0 | 0 | 0 | 2.512 | 0 |
| BRACE2002050 | 0 | 0 | 0 | 0 | 0 | 3.248 | 0 |
| BRACE2002081 | 16.001 | 0 | 0 | 0 | 0 | 0 | 0 |
| BRACE2002091 | 5.283 | 0 | 0 | 0 | 0 | 0 | 0 |
| BRACE2002392 | 0 | 6.380 | 0 | 0 | 0 | 0 | 0 |
| BRACE2002649 | 8.829 | 0 | 0 | 0 | 0 | 23.719 | 0 |
| BRACE2002661 | 2.401 | 0 | 19.799 | 0 | 0 | 0 | 0 |
| BRACE2002677 | 1.610 | 0 | 0 | 0 | 0 | 2.162 | 41.460 |
| BRACE2002685 | 0 | 12.688 | 0 | 0 | 0 | 0 | 0 |
| BRACE2002755 | 0 | 0 | 0 | 0 | 0 | 61.213 | 0 |
| BRACE2002812 | 0 | 21.753 | 0 | 0 | 0 | 0 | 0 |
| BRACE2002860 | 4.199 | 0 | 0 | 0 | 0 | 0 | 0 |
| BRACE2003037 | 0 | 7.993 | 0 | 0 | 0 | 0 | 0 |
| BRACE2003172 | 0 | 1.203 | 0 | 0 | 0 | 0.728 | 0 |
| BRACE2003254 | 0 | 0 | 0 | 0 | 0 | 1.014 | 0 |
| BRACE2003304 | 1.823 | 0 | 0 | 0 | 0 | 2.449 | 0 |
| BRACE2003527 | 4.299 | 0 | 0 | 0 | 0 | 0 | 0 |
| BRACE2003594 | 9.736 | 0 | 0 | 0 | 0 | 0 | 0 |
| BRACE2003628 | 5.689 | 0 | 0 | 0 | 0 | 0 | 0 |
| BRACE2003785 | 0 | 3.597 | 0 | 0 | 0 | 0 | 0 |
| BRACE2003788 | 32.523 | 0 | 0 | 0 | 0 | 0 | 0 |
| BRACE2003800 | 0 | 0 | 0 | 0 | 0 | 30.700 | 0 |
| BRACE2003827 | 0.731 | 3.243 | 0 | 0 | 0 | 1.963 | 0 |
| BRACE2003845 | 7.598 | 0 | 0 | 0 | 0 | 0 | 0 |
| BRACE2003846 | 1.087 | 0 | 0 | 0 | 0 | 2.920 | 0 |
| BRACE2003848 | 0 | 0 | 0 | 0 | 0 | 61.213 | 0 |
| BRACE2003892 | 1.820 | 0 | 0 | 0 | 0 | 2.445 | 0 |
| BRACE2003944 | 0 | 0 | 0 | 0 | 0 | 1.740 | 0 |
| BRACE2003982 | 0 | 45.699 | 0 | 0 | 0 | 0 | 0 |
| BRACE2005087 | 4.325 | 0 | 0 | 0 | 0 | 4.648 | 0 |
| BRACE2005099 | 0 | 14.762 | 0 | 0 | 0 | 0 | 0 |
| BRACE2005231 | 2.662 | 0 | 0 | 0 | 0 | 0 | 0 |
| BRACE2005298 | 25.397 | 0 | 0 | 0 | 0 | 0 | 0 |
| BRACE2005395 | 23.586 | 0 | 0 | 0 | 0 | 0 | 0 |
| BRACE2005408 | 15.862 | 35.208 | 0 | 0 | 0 | 10.654 | 0 |
| BRACE2005433 | 9.630 | 0 | 0 | 0 | 0 | 0 | 0 |
| BRACE2006055 | 0 | 7.405 | 0 | 0 | 0 | 0 | 0 |
| BRACE2006084 | 0 | 0 | 0 | 0 | 0 | 0 | 65.917 |
| BRACE2006102 | 70.146 | 0 | 0 | 0 | 0 | 0 | 0 |
| BRACE2006105 | 17.691 | 0 | 0 | 0 | 0 | 0 | 0 |
| BRACE2006162 | 0 | 0 | 0 | 32.021 | 0 | 0 | 0 |
| BRACE2006249 | 54.019 | 0 | 0 | 0 | 0 | 0 | 0 |
| BRACE2006258 | 0 | 0 | 0 | 16.951 | 0 | 0 | 0 |
| BRACE2006264 | 0 | 0 | 0 | 0 | 0 | 9.454 | 0 |
| BRACE2006319 | 8.770 | 0 | 0 | 0 | 0 | 0 | 0 |
| BRACE2006363 | 0 | 0 | 0 | 0 | 0 | 10.381 | 0 |
| BRACE2006378 | 0 | 0 | 0 | 0 | 0 | 61.213 | 0 |
| BRACE2006397 | 0.246 | 1.093 | 0 | 6.108 | 0 | 0.661 | 0 |
| BRACE2006514 | 1.449 | 3.216 | 0 | 0 | 0 | 1.946 | 0 |
| BRACE2006537 | 1.795 | 7.968 | 0 | 0 | 0 | 2.411 | 0 |
| BRACE2006547 | 0 | 0 | 0 | 0 | 0 | 16.759 | 0 |
| BRACE2006564 | 70.146 | 0 | 0 | 0 | 0 | 0 | 0 |
| BRACE2006753 | 0 | 22.762 | 0 | 0 | 0 | 0 | 0 |
| BRACE2006871 | 0.834 | 0 | 0 | 0 | 0 | 1.120 | 0 |
| BRACE2006900 | 2.145 | 0 | 0 | 0 | 11.207 | 0.576 | 0 |
| BRACE2006937 | 0 | 4.954 | 0 | 0 | 0 | 0 | 0 |
| BRACE2006982 | 0 | 4.802 | 0 | 0 | 0 | 0 | 0 |
| BRACE2007064 | 4.065 | 0 | 0 | 0 | 0 | 7.280 | 0 |
| BRACE2007068 | 20.883 | 0 | 0 | 0 | 0 | 0 | 0 |
| BRACE2007089 | 1.412 | 0 | 0 | 0 | 0 | 0 | 0 |
| BRACE2007109 | 0 | 7.067 | 0 | 0 | 0 | 0 | 0 |
| BRACE2007174 | 13.027 | 0 | 0 | 0 | 0 | 0 | 0 |
| BRACE2007191 | 6.300 | 2.543 | 0 | 0 | 0 | 0 | 0 |
| BRACE2007254 | 6.207 | 0 | 0 | 0 | 0 | 8.338 | 0 |
| BRACE2007518 | 0 | 0 | 0 | 0 | 0 | 2.542 | 0 |
| BRACE2007567 | 0 | 5.136 | 0 | 0 | 0 | 0 | 0 |
| BRACE2007767 | 0 | 0 | 0 | 0 | 0 | 0 | 66.860 |
| BRACE2007798 | 0 | 11.487 | 0 | 0 | 0 | 0 | 0 |
| BRACE2008097 | 4.003 | 0 | 0 | 0 | 0 | 0 | 0 |
| BRACE2008358 | 1.890 | 0 | 0 | 0 | 0 | 0 | 0 |
| BRACE2008380 | 0 | 7.232 | 0 | 0 | 0 | 0 | 0 |
| BRACE2008385 | 0 | 15.462 | 0 | 0 | 0 | 0 | 0 |
| BRACE2008399 | 0 | 20.487 | 0 | 0 | 0 | 0 | 0 |
| BRACE2008402 | 0 | 0 | 28.830 | 0 | 0 | 0 | 0 |
| BRACE2008653 | 2.639 | 1.952 | 0 | 0 | 0 | 3.545 | 0 |
| BRACE2008706 | 2.740 | 0 | 0 | 0 | 0 | 0 | 0 |
| BRACE2008968 | 0.485 | 2.152 | 0 | 0 | 0 | 0 | 0 |
| BRACE2009037 | 0.487 | 1.081 | 2.008 | 0 | 0 | 0.327 | 0 |
| BRACE2009044 | 8.366 | 0 | 0 | 0 | 0 | 0 | 0 |
| BRACE2009291 | 1.103 | 0 | 0 | 0 | 0 | 1.482 | 0 |
| BRACE2009483 | 7.327 | 0 | 0 | 0 | 0 | 0 | 0 |
| BRACE2009558 | 2.398 | 0 | 0 | 0 | 0 | 3.221 | 0 |
| BRACE2009620 | 16.001 | 0 | 0 | 0 | 0 | 0 | 0 |
| BRACE2010651 | 0 | 68.405 | 0 | 0 | 0 | 0 | 0 |
| BRACE2010669 | 10.631 | 0 | 0 | 0 | 0 | 0 | 0 |
| BRACE2010684 | 0 | 0 | 0 | 0 | 0 | 61.213 | 0 |
| BRACE2011183 | 0 | 23.795 | 0 | 0 | 0 | 0 | 0 |
| BRACE2011265 | 0 | 0 | 0 | 0 | 0 | 0 | 79.669 |
| BRACE2012317 | 0 | 0 | 0 | 0 | 0 | 2.306 | 0 |
| BRACE2012528 | 0.395 | 14.044 | 0 | 0 | 0 | 0 | 0 |
| BRACE2012814 | 2.557 | 0 | 0 | 0 | 0 | 1.718 | 0 |
| BRACE2013855 | 6.688 | 0 | 0 | 0 | 0 | 0 | 0 |
| BRACE2013911 | 6.268 | 0 | 0 | 0 | 0 | 0 | 0 |
| BRACE2014257 | 20.681 | 0 | 0 | 0 | 0 | 0 | 0 |
| BRACE2014306 | 0 | 18.017 | 0 | 0 | 0 | 0 | 0 |
| BRACE2014746 | 0 | 25.830 | 0 | 0 | 0 | 0 | 0 |
| BRACE2014850 | 6.254 | 0 | 0 | 0 | 0 | 0 | 0 |
| BRACE2015058 | 0 | 16.230 | 0 | 0 | 0 | 0 | 0 |
| BRACE2015287 | 3.830 | 8.501 | 15.788 | 0 | 0 | 0 | 0 |
| BRACE2016362 | 12.854 | 0 | 0 | 0 | 0 | 0 | 0 |
| BRACE2016981 | 0 | 83.911 | 0 | 0 | 0 | 0 | 0 |
| BRACE2017397 | 1.967 | 0 | 0 | 0 | 0 | 2.642 | 0 |
| BRACE2017574 | 4.272 | 0 | 0 | 0 | 0 | 0 | 0 |
| BRACE2017985 | 0 | 0 | 0 | 0 | 0 | 61.213 | 0 |
| BRACE2018337 | 0 | 8.817 | 0 | 0 | 0 | 0 | 0 |
| BRACE2018443 | 54.019 | 0 | 0 | 0 | 0 | 0 | 0 |
| BRACE2019519 | 0 | 0 | 0 | 0 | 0 | 20.849 | 0 |
| BRACE2019877 | 5.065 | 22.483 | 0 | 0 | 0 | 0 | 0 |
| BRACE2021014 | 4.940 | 0 | 0 | 0 | 0 | 6.636 | 0 |
| BRACE2021708 | 49.377 | 0 | 0 | 0 | 0 | 0 | 0 |
| BRACE2022638 | 1.243 | 0 | 0 | 0 | 0 | 0 | 0 |
| BRACE2023727 | 0 | 73.082 | 0 | 0 | 0 | 0 | 0 |
| BRACE2023801 | 31.304 | 0 | 0 | 0 | 0 | 42.051 | 0 |
| BRACE2024074 | 54.019 | 0 | 0 | 0 | 0 | 0 | 0 |
| BRACE2025437 | 2.546 | 11.301 | 0 | 0 | 0 | 3.420 | 65.567 |
| BRACE2026725 | 0 | 0 | 0 | 0 | 0 | 20.538 | 0 |
| BRACE2027643 | 12.010 | 0 | 0 | 0 | 0 | 0 | 0 |
| BRACE2027970 | 54.019 | 0 | 0 | 0 | 0 | 0 | 0 |
| BRACE2029356 | 54.019 | 0 | 0 | 0 | 0 | 0 | 0 |
| BRACE2029644 | 54.019 | 0 | 0 | 0 | 0 | 0 | 0 |
| BRACE2030323 | 0 | 0 | 0 | 0 | 0 | 35.088 | 0 |
| BRACE2030345 | 54.019 | 0 | 0 | 0 | 0 | 0 | 0 |
| BRACE2032477 | 4.647 | 0 | 0 | 0 | 0 | 12.484 | 0 |
| BRACE2035381 | 0 | 0 | 0 | 0 | 0 | 11.400 | 0 |
| BRACE2039624 | 0.807 | 0 | 0 | 0 | 0 | 0 | 0 |
| BRACE2041200 | 0 | 0 | 0 | 0 | 0 | 61.213 | 0 |
| BRACE2044286 | 0 | 0 | 0 | 0 | 0 | 20.910 | 0 |
| BRACE2047350 | 54.019 | 0 | 0 | 0 | 0 | 0 | 0 |
| BRACE3000973 | 22.478 | 0 | 0 | 0 | 0 | 0 | 0 |
| BRACE3001754 | 0 | 0 | 0 | 0 | 0 | 61.213 | 0 |
| BRACE3003413 | 54.019 | 0 | 0 | 0 | 0 | 0 | 0 |
| BRACE3003698 | 54.019 | 0 | 0 | 0 | 0 | 0 | 0 |
| BRACE3004862 | 0 | 0 | 0 | 0 | 0 | 61.213 | 0 |
| BRACE3005499 | 26.080 | 0 | 0 | 0 | 0 | 0 | 0 |
| BRACE3005938 | 0.918 | 4.076 | 0 | 0 | 0 | 2.467 | 0 |
| BRACE3005989 | 0 | 0 | 0 | 0 | 0 | 0.262 | 0 |
| BRACE3006553 | 0 | 0 | 0 | 0 | 0 | 14.418 | 0 |
| BRACE3007258 | 10.851 | 0 | 0 | 0 | 0 | 0 | 0 |
| BRACE3008036 | 0 | 68.309 | 0 | 0 | 0 | 0 | 0 |
| BRACE3008095 | 54.019 | 0 | 0 | 0 | 0 | 0 | 0 |
| BRACE3009416 | 0 | 0 | 0 | 0 | 0 | 31.969 | 0 |
| BRACE3010283 | 0 | 0 | 0 | 0 | 0 | 61.213 | 0 |
| BRACE3010428 | 1.909 | 0 | 0 | 0 | 0 | 0 | 0 |
| BRACE3010438 | 1.493 | 0 | 0 | 0 | 0 | 4.012 | 0 |
| BRACE3011421 | 0 | 0 | 0 | 0 | 0 | 31.645 | 0 |
| BRACE3012806 | 54.019 | 0 | 0 | 0 | 0 | 0 | 0 |
| BRACE3012930 | 0 | 0 | 0 | 0 | 0 | 61.213 | 0 |
| BRACE3017253 | 0 | 0 | 0 | 0 | 0 | 44.106 | 0 |
| BRACE3019941 | 0 | 0 | 0 | 0 | 0 | 3.273 | 0 |
| BRACE3020669 | 0 | 0 | 0 | 0 | 0 | 61.213 | 0 |
| BRACE3022312 | 0 | 0 | 0 | 0 | 0 | 38.115 | 0 |
| BRACE3025719 | 0 | 0 | 0 | 0 | 0 | 20.176 | 0 |
| BRACE3027478 | 0 | 0 | 0 | 0 | 0 | 17.928 | 0 |
| BRACE3027976 | 54.019 | 0 | 0 | 0 | 0 | 0 | 0 |
| BRACE3028895 | 37.949 | 0 | 0 | 0 | 0 | 0 | 0 |
| BRACE3032631 | 10.516 | 0 | 0 | 0 | 0 | 0 | 0 |
| BRACE3035168 | 70.146 | 0 | 0 | 0 | 0 | 0 | 0 |
| BRACE3040863 | 29.832 | 0 | 0 | 0 | 0 | 0 | 0 |
| BRACE3042326 | 0 | 0 | 0 | 0 | 0 | 39.301 | 0 |
| BRALZ2000988 | 4.328 | 19.213 | 0 | 0 | 0 | 0 | 0 |
| BRALZ2001038 | 0 | 0 | 0 | 0 | 0 | 18.205 | 0 |
| BRALZ2009482 | 0.310 | 0 | 2.555 | 7.690 | 0 | 2.914 | 0 |
| BRALZ2011796 | 4.596 | 0 | 0 | 0 | 0 | 0 | 0 |
| BRALZ2011880 | 5.085 | 0 | 0 | 0 | 0 | 0 | 0 |
| BRALZ2017844 | 0 | 50.604 | 0 | 0 | 0 | 0 | 0 |
| BRAMY2000354 | 3.437 | 0 | 0 | 0 | 0 | 0 | 0 |
| BRAMY2000388 | 0 | 45.295 | 0 | 0 | 0 | 0 | 0 |
| BRAMY2000508 | 29.346 | 0 | 0 | 0 | 0 | 0 | 0 |
| BRAMY2000562 | 1.602 | 21.340 | 0 | 0 | 0 | 0 | 0 |
| BRAMY2000585 | 2.048 | 0 | 0 | 0 | 0 | 0 | 0 |
| BRAMY2000814 | 0 | 78.604 | 0 | 0 | 0 | 0 | 0 |
| BRAMY2000893 | 0 | 0 | 0 | 0 | 0 | 1.705 | 0 |
| BRAMY2001678 | 62.337 | 0 | 0 | 0 | 0 | 0 | 0 |
| BRAMY2003008 | 0 | 0 | 0 | 0 | 0 | 29.622 | 0 |
| BRAMY2004363 | 3.409 | 0 | 0 | 0 | 0 | 6.870 | 0 |
| BRAMY2004521 | 5.929 | 0 | 0 | 0 | 0 | 2.655 | 0 |
| BRAMY2005488 | 9.502 | 0 | 0 | 0 | 0 | 0 | 0 |
| BRAMY2005576 | 0 | 78.604 | 0 | 0 | 0 | 0 | 0 |
| BRAMY2006366 | 0 | 0 | 63.335 | 0 | 0 | 0 | 0 |
| BRAMY2006375 | 59.294 | 0 | 0 | 0 | 0 | 0 | 0 |
| BRAMY2009013 | 5.079 | 0 | 0 | 0 | 0 | 0 | 0 |
| BRAMY2009023 | 11.054 | 49.073 | 0 | 0 | 0 | 0 | 0 |
| BRAMY2011105 | 0 | 11.213 | 0 | 0 | 0 | 0 | 0 |
| BRAMY2012091 | 4.951 | 0 | 0 | 0 | 0 | 0 | 0 |
| BRAMY2012536 | 0.963 | 4.273 | 0 | 0 | 0 | 0 | 0 |
| BRAMY2012581 | 0 | 0 | 0 | 0 | 0 | 25.588 | 0 |
| BRAMY2013169 | 0 | 0 | 0 | 0 | 0 | 12.737 | 0 |
| BRAMY2013590 | 18.015 | 0 | 0 | 0 | 0 | 0 | 0 |
| BRAMY2014754 | 1.168 | 5.185 | 0 | 0 | 0 | 0 | 0 |
| BRAMY2014813 | 8.044 | 0 | 0 | 0 | 0 | 0 | 0 |
| BRAMY2015211 | 0 | 0 | 0 | 0 | 0 | 14.550 | 0 |
| BRAMY2015550 | 28.262 | 0 | 0 | 0 | 0 | 0 | 0 |
| BRAMY2015782 | 0 | 0 | 0 | 0 | 85.296 | 0 | 0 |
| BRAMY2015833 | 3.844 | 0 | 0 | 0 | 0 | 0 | 0 |
| BRAMY2016009 | 13.082 | 0 | 0 | 0 | 0 | 0 | 0 |
| BRAMY2016386 | 45.282 | 0 | 0 | 0 | 0 | 0 | 0 |
| BRAMY2016706 | 0 | 0 | 34.076 | 0 | 0 | 0 | 0 |
| BRAMY2017864 | 11.521 | 0 | 0 | 0 | 0 | 0 | 0 |
| BRAMY2018122 | 0 | 0 | 87.217 | 0 | 0 | 0 | 0 |
| BRAMY2018785 | 0 | 25.173 | 0 | 0 | 0 | 0 | 0 |
| BRAMY2019554 | 1.996 | 0 | 0 | 0 | 0 | 1.788 | 0 |
| BRAMY2019600 | 6.733 | 0 | 0 | 0 | 0 | 0 | 0 |
| BRAMY2019963 | 0 | 25.206 | 0 | 0 | 0 | 7.628 | 0 |
| BRAMY2019989 | 3.216 | 3.569 | 0 | 0 | 0 | 1.080 | 0 |
| BRAMY2020412 | 8.951 | 0 | 0 | 0 | 0 | 0 | 0 |
| BRAMY2020427 | 1.481 | 2.192 | 0 | 0 | 0 | 0 | 0 |
| BRAMY2021139 | 0 | 0 | 0 | 0 | 0 | 28.667 | 0 |
| BRAMY2022160 | 10.505 | 0 | 0 | 0 | 0 | 0 | 0 |
| BRAMY2022168 | 11.280 | 0 | 0 | 0 | 0 | 15.152 | 0 |
| BRAMY2022445 | 0 | 0 | 0 | 0 | 0 | 52.645 | 0 |
| BRAMY2022493 | 4.424 | 0 | 0 | 0 | 0 | 2.972 | 0 |
| BRAMY2022786 | 0 | 9.238 | 0 | 0 | 0 | 1.398 | 0 |
| BRAMY2023406 | 0 | 0 | 45.388 | 0 | 0 | 0 | 0 |
| BRAMY2023729 | 0 | 0 | 0 | 0 | 0 | 52.645 | 0 |
| BRAMY2024390 | 29.138 | 0 | 0 | 0 | 0 | 0 | 0 |
| BRAMY2024416 | 0 | 16.750 | 0 | 0 | 0 | 0 | 0 |
| BRAMY2024827 | 1.663 | 0 | 0 | 0 | 0 | 0 | 0 |
| BRAMY2026009 | 0 | 55.048 | 0 | 0 | 0 | 0 | 0 |
| BRAMY2026685 | 8.266 | 0 | 0 | 0 | 0 | 13.881 | 0 |
| BRAMY2027114 | 0 | 63.622 | 0 | 0 | 0 | 0 | 0 |
| BRAMY2027587 | 33.403 | 0 | 0 | 0 | 0 | 0 | 0 |
| BRAMY2027739 | 1.122 | 0 | 0 | 0 | 0 | 0 | 0 |
| BRAMY2028516 | 0 | 0 | 81.346 | 0 | 0 | 0 | 0 |
| BRAMY2028682 | 0 | 78.604 | 0 | 0 | 0 | 0 | 0 |
| BRAMY2028740 | 0.776 | 0 | 0 | 0 | 0 | 5.214 | 0 |
| BRAMY2028796 | 0 | 0 | 0 | 0 | 0 | 1.665 | 0 |
| BRAMY2031516 | 0 | 0 | 0 | 0 | 0 | 16.547 | 0 |
| BRAMY2032087 | 9.088 | 0 | 0 | 0 | 0 | 8.139 | 0 |
| BRAMY2032696 | 0 | 78.604 | 0 | 0 | 0 | 0 | 0 |
| BRAMY2033316 | 45.282 | 0 | 0 | 0 | 0 | 0 | 0 |
| BRAMY2035070 | 45.282 | 0 | 0 | 0 | 0 | 0 | 0 |
| BRAMY2035719 | 12.665 | 0 | 0 | 0 | 0 | 0 | 0 |
| BRAMY2036076 | 0 | 40.038 | 0 | 0 | 0 | 0 | 0 |
| BRAMY2036459 | 1.571 | 0 | 0 | 0 | 0 | 4.222 | 0 |
| BRAMY2038846 | 0 | 0 | 0 | 0 | 0 | 52.645 | 0 |
| BRAMY2039872 | 16.531 | 0 | 0 | 0 | 0 | 0 | 0 |
| BRAMY2040095 | 1.140 | 0 | 2.350 | 0 | 0 | 0 | 0 |
| BRAMY2043069 | 0 | 78.604 | 0 | 0 | 0 | 0 | 0 |
| BRAMY2045530 | 7.866 | 0 | 0 | 0 | 0 | 0 | 0 |
| BRAMY2047420 | 0.845 | 0 | 0 | 0 | 0 | 0 | 0 |
| BRAMY3002120 | 45.282 | 0 | 0 | 0 | 0 | 0 | 0 |
| BRAMY3002458 | 0 | 0 | 0 | 0 | 0 | 13.906 | 0 |
| BRAMY3003205 | 20.062 | 0 | 0 | 0 | 0 | 0 | 0 |
| BRAMY3003310 | 45.282 | 0 | 0 | 0 | 0 | 0 | 0 |
| BRAMY3004364 | 11.329 | 0 | 0 | 0 | 0 | 0 | 0 |
| BRAMY3004377 | 0.692 | 0 | 0 | 0 | 18.065 | 1.858 | 0 |
| BRAMY3007311 | 0 | 29.082 | 0 | 0 | 0 | 0 | 0 |
| BRAMY3008044 | 0 | 0 | 0 | 0 | 0 | 2.009 | 0 |
| BRAMY3009491 | 26.018 | 0 | 0 | 0 | 0 | 0 | 0 |
| BRAMY3010008 | 0.485 | 0 | 0 | 0 | 0 | 0 | 0 |
| BRAMY3010492 | 14.407 | 0 | 0 | 0 | 0 | 0 | 0 |
| BRAMY4000089 | 16.974 | 0 | 0 | 0 | 0 | 5.700 | 0 |
| BRAMY4001234 | 45.282 | 0 | 0 | 0 | 0 | 0 | 0 |
| BRAMY4001863 | 12.491 | 0 | 0 | 0 | 0 | 0 | 0 |
| BRAMY4002628 | 17.768 | 0 | 0 | 0 | 0 | 23.868 | 0 |
| BRAWH1000001 | 2.775 | 0 | 0 | 0 | 0 | 0 | 0 |
| BRAWH1000007 | 7.493 | 0 | 0 | 0 | 0 | 0 | 0 |
| BRAWH1000037 | 0 | 6.750 | 0 | 0 | 0 | 0 | 0 |
| BRAWH1000040 | 0 | 5.094 | 0 | 0 | 0 | 0.771 | 0 |
| BRAWH1000045 | 0 | 7.411 | 0 | 0 | 0 | 0 | 0 |
| BRAWH1000083 | 3.778 | 0 | 0 | 0 | 0 | 0 | 0 |
| BRAWH1000093 | 3.461 | 0 | 0 | 0 | 0 | 0 | 0 |
| BRAWH1000127 | 0 | 11.833 | 0 | 0 | 0 | 0 | 0 |
| BRAWH1000162 | 0 | 20.267 | 0 | 0 | 0 | 0 | 0 |
| BRAWH1000174 | 0 | 10.605 | 0 | 0 | 0 | 0 | 0 |
| BRAWH2000082 | 0 | 9.939 | 0 | 0 | 0 | 0 | 0 |
| BRAWH2000417 | 0 | 18.297 | 0 | 0 | 0 | 0 | 0 |
| BRAWH2000460 | 2.545 | 0 | 0 | 0 | 0 | 0 | 0 |
| BRAWH2000488 | 0 | 0 | 0 | 0 | 0 | 11.293 | 0 |
| BRAWH2000494 | 0 | 33.652 | 0 | 0 | 0 | 0 | 0 |
| BRAWH2000588 | 0 | 0 | 0 | 0 | 0 | 1.405 | 0 |
| BRAWH2000633 | 0 | 0 | 0 | 0 | 0 | 2.970 | 0 |
| BRAWH2000636 | 0 | 7.824 | 0 | 0 | 0 | 6.511 | 0 |
| BRAWH2000686 | 0 | 9.050 | 0 | 0 | 0 | 0 | 0 |
| BRAWH2000697 | 0 | 0 | 0 | 0 | 0 | 2.266 | 0 |
| BRAWH2000839 | 2.055 | 0 | 2.824 | 0 | 0 | 1.380 | 0 |
| BRAWH2000859 | 0 | 0 | 0 | 0 | 0 | 52.833 | 0 |
| BRAWH2000924 | 0.239 | 7.436 | 0 | 0 | 0 | 0 | 0 |
| BRAWH2000944 | 4.350 | 0 | 0 | 0 | 0 | 0 | 0 |
| BRAWH2001019 | 1.902 | 8.442 | 0 | 0 | 0 | 0 | 0 |
| BRAWH2001092 | 0.879 | 1.301 | 3.625 | 0 | 0 | 0.394 | 0 |
| BRAWH2001129 | 0 | 0 | 0 | 0 | 0 | 52.833 | 0 |
| BRAWH2001171 | 0.515 | 0 | 0 | 0 | 0 | 0.692 | 0 |
| BRAWH2001186 | 2.376 | 0 | 0 | 0 | 0 | 0 | 0 |
| BRAWH2001239 | 6.084 | 0 | 0 | 0 | 0 | 0 | 0 |
| BRAWH2001321 | 0 | 12.711 | 0 | 0 | 0 | 0 | 0 |
| BRAWH2001395 | 0 | 9.335 | 0 | 0 | 0 | 0 | 0 |
| BRAWH2001406 | 5.646 | 0 | 0 | 0 | 0 | 0 | 72.702 |
| BRAWH2001412 | 12.538 | 0 | 0 | 0 | 0 | 0 | 0 |
| BRAWH2001418 | 0 | 9.547 | 0 | 0 | 0 | 0 | 0 |
| BRAWH2001424 | 0 | 0 | 0 | 0 | 0 | 5.703 | 0 |
| BRAWH2001439 | 4.290 | 7.617 | 0 | 0 | 0 | 1.153 | 0 |
| BRAWH2001459 | 0 | 18.107 | 0 | 0 | 0 | 0 | 0 |
| BRAWH2001461 | 0 | 0 | 0 | 73.560 | 0 | 0 | 0 |
| BRAWH2001530 | 0 | 0 | 0 | 0 | 0 | 8.550 | 0 |
| BRAWH12001535 | 0 | 12.794 | 0 | 0 | 0 | 0 | 0 |
| BRAWH2001671 | 0 | 14.075 | 0 | 0 | 0 | 0 | 0 |
| BRAWH2002062 | 45.470 | 0 | 0 | 0 | 0 | 0 | 0 |
| BRAWH2002601 | 4.147 | 0 | 0 | 0 | 0 | 5.571 | 0 |
| BRAWH2003240 | 0 | 29.050 | 0 | 0 | 0 | 0 | 0 |
| BRAWH2003689 | 0 | 0 | 0 | 0 | 0 | 52.833 | 0 |
| BRAWH2003693 | 5.706 | 12.664 | 0 | 0 | 0 | 3.832 | 0 |
| BRAWH2003818 | 2.524 | 0 | 0 | 0 | 0 | 0 | 0 |
| BRAWH2004095 | 2.957 | 0 | 0 | 0 | 0 | 0 | 0 |
| BRAWH2004136 | 13.267 | 0 | 0 | 0 | 0 | 0 | 0 |
| BRAWH2004217 | 45.470 | 0 | 0 | 0 | 0 | 0 | 0 |
| BRAWH2004842 | 0 | 14.755 | 0 | 0 | 0 | 0 | 0 |
| BRAWH2005008 | 13.767 | 0 | 0 | 0 | 0 | 0 | 0 |
| BRAWH2005068 | 0.335 | 0 | 2.765 | 0 | 8.761 | 0 | 0 |
| BRAWH2005225 | 19.334 | 0 | 0 | 0 | 0 | 0 | 0 |
| BRAWH2005578 | 0 | 0 | 0 | 0 | 0 | 15.011 | 0 |
| BRAWH2005661 | 5.332 | 5.918 | 0 | 0 | 0 | 0 | 0 |
| BRAWH2006450 | 4.187 | 18.587 | 0 | 0 | 0 | 0 | 0 |
| BRAWH2006493 | 4.241 | 0 | 0 | 0 | 0 | 0 | 0 |
| BRAWH2006526 | 45.470 | 0 | 0 | 0 | 0 | 0 | 0 |
| BRAWH2006543 | 0 | 16.237 | 0 | 0 | 0 | 4.913 | 0 |
| BRAWH2007605 | 8.552 | 0 | 0 | 0 | 0 | 2.298 | 0 |
| BRAWH2007808 | 62.515 | 0 | 0 | 0 | 0 | 0 | 0 |
| BRAWH2008058 | 19.533 | 0 | 0 | 0 | 0 | 0 | 0 |
| BRAWH2008540 | 45.470 | 0 | 0 | 0 | 0 | 0 | 0 |
| BRAWH2008706 | 0 | 0 | 0 | 0 | 0 | 6.442 | 0 |
| BRAWH2008956 | 0 | 0 | 0 | 0 | 0 | 17.441 | 0 |
| BRAWH2009238 | 13.041 | 0 | 0 | 0 | 0 | 0 | 0 |
| BRAWH2009304 | 13.082 | 0 | 0 | 0 | 0 | 0 | 0 |
| BRAWH2009307 | 0 | 7.370 | 0 | 0 | 43.369 | 0 | 0 |
| BRAWH2009360 | 0 | 0 | 0 | 0 | 0 | 9.693 | 0 |
| BRAWH2009678 | 0 | 78.731 | 0 | 0 | 0 | 0 | 0 |
| BRAWH2010329 | 2.086 | 0 | 0 | 0 | 0 | 0 | 0 |
| BRAWH2010354 | 0 | 48.038 | 0 | 0 | 0 | 0 | 0 |
| BRAWH2011096 | 45.470 | 0 | 0 | 0 | 0 | 0 | 0 |
| BRAWH2011343 | 17.548 | 0 | 0 | 0 | 0 | 0 | 0 |
| BRAWH2013219 | 0 | 35.860 | 0 | 0 | 0 | 0 | 0 |
| BRAWH2013294 | 0 | 36.500 | 0 | 0 | 0 | 0 | 0 |
| BRAWH2013871 | 62.515 | 0 | 0 | 0 | 0 | 0 | 0 |
| BRAWH2014053 | 19.364 | 0 | 0 | 0 | 0 | 0 | 0 |
| BRAWH2014188 | 4.179 | 0 | 0 | 0 | 0 | 9.623 | 0 |
| BRAWH2014645 | 7.933 | 3.913 | 0 | 0 | 0 | 3.552 | 22.702 |
| BRAWH2016166 | 0 | 0 | 0 | 0 | 0 | 25.413 | 0 |
| BRAWH2016209 | 6.926 | 0 | 0 | 0 | 0 | 0 | 0 |
| BRAWH2016514 | 29.216 | 0 | 0 | 0 | 0 | 0 | 0 |
| BRAWH2017002 | 0 | 27.634 | 0 | 0 | 0 | 0 | 0 |
| BRAWH2017685 | 1.270 | 0 | 0 | 0 | 0 | 0.568 | 0 |
| BRAWH2018206 | 0 | 40.908 | 0 | 0 | 0 | 0 | 0 |
| BRAWH2018527 | 0 | 31.509 | 0 | 0 | 0 | 0 | 0 |
| BRAWH3000088 | 0 | 8.564 | 0 | 0 | 0 | 0 | 0 |
| BRAWH3000604 | 45.470 | 0 | 0 | 0 | 0 | 0 | 0 |
| BRAWH3001319 | 22.759 | 0 | 0 | 0 | 0 | 30.573 | 0 |
| BRAWH3001918 | 0 | 0 | 0 | 0 | 0 | 15.554 | 0 |
| BRAWH3002853 | 4.317 | 0 | 0 | 0 | 0 | 0 | 0 |
| BRAWH3003411 | 38.592 | 0 | 0 | 0 | 0 | 0 | 0 |
| BRAWH3003573 | 16.812 | 0 | 0 | 0 | 0 | 0 | 0 |
| BRAWH3003727 | 0 | 0 | 0 | 0 | 0 | 33.790 | 0 |
| BRAWH3004350 | 13.825 | 0 | 0 | 0 | 0 | 0 | 0 |
| BRAWH3004530 | 0 | 0 | 0 | 0 | 0 | 19.759 | 0 |
| BRAWH3005146 | 8.444 | 0 | 0 | 0 | 0 | 11.343 | 0 |
| BRAWH3005300 | 0 | 0 | 0 | 0 | 0 | 52.833 | 0 |
| BRAWH3007726 | 45.470 | 0 | 0 | 0 | 0 | 0 | 0 |
| BRAWH3008931 | 8.664 | 0 | 0 | 0 | 0 | 0 | 0 |
| BRAWH3011637 | 0 | 0 | 0 | 0 | 0 | 69.138 | 0 |
| BRAWH3012662 | 0 | 41.917 | 0 | 0 | 0 | 0 | 0 |
| BRAWH3018063 | 0 | 0 | 0 | 0 | 0 | 2.956 | 0 |
| BRAWH3021545 | 15.210 | 0 | 0 | 0 | 0 | 8.173 | 0 |
| BRAWH3021574 | 0 | 17.397 | 0 | 0 | 0 | 0 | 0 |
| BRAWH3024242 | 0 | 0 | 0 | 0 | 0 | 35.669 | 0 |
| BRAWH3024989 | 0 | 0 | 0 | 0 | 0 | 55.728 | 0 |
| BRAWH3029806 | 0 | 0 | 0 | 0 | 0 | 9.982 | 0 |
| BRAWH3035403 | 0 | 0 | 0 | 0 | 0 | 39.582 | 0 |
| BRAWH3035936 | 29.425 | 0 | 0 | 0 | 0 | 0 | 0 |
| BRAWH3036247 | 45.470 | 0 | 0 | 0 | 0 | 0 | 0 |
| BRCAN1000076 | 2.454 | 0 | 0 | 0 | 0 | 0 | 0 |
| BRCAN2000209 | 0 | 61.737 | 0 | 0 | 0 | 0 | 0 |
| BRCAN2002173 | 0 | 14.721 | 0 | 0 | 0 | 0 | 0 |
| BRCAN2002944 | 26.657 | 0 | 0 | 0 | 0 | 0 | 0 |
| BRCAN2003944 | 0.470 | 2.085 | 0 | 0 | 0 | 0.631 | 0 |
| BRCAN2006019 | 0 | 13.906 | 0 | 0 | 0 | 0 | 0 |
| BRCAN2007409 | 5.004 | 0 | 0 | 0 | 0 | 0 | 0 |
| BRCAN2009432 | 2.196 | 0 | 0 | 0 | 0 | 0 | 0 |
| BRCAN2015719 | 0 | 0 | 0 | 0 | 0 | 3.382 | 64.842 |
| BRCAN2019653 | 5.200 | 0 | 0 | 0 | 0 | 0 | 0 |
| BRCAN2020412 | 0 | 0 | 74.979 | 0 | 0 | 0 | 0 |
| BRCAN2021024 | 8.551 | 0 | 0 | 0 | 0 | 0 | 0 |
| BRCAN2022126 | 0 | 17.973 | 0 | 0 | 0 | 0 | 0 |
| BRCAN2026197 | 0 | 11.558 | 0 | 0 | 0 | 0 | 0 |
| BRCAN2028040 | 22.049 | 0 | 0 | 0 | 0 | 0 | 0 |
| BRCAN2028319 | 21.704 | 0 | 0 | 0 | 0 | 0 | 0 |
| BRCAN2028355 | 0 | 0 | 0 | 0 | 0 | 0 | 31.728 |
| BRCOC1000040 | 9.836 | 0 | 0 | 0 | 0 | 0 | 0 |
| BRCOC1000094 | 0 | 10.574 | 0 | 0 | 0 | 0 | 0 |
| BRCOC2000004 | 0 | 6.663 | 0 | 0 | 0 | 0 | 0 |
| BRCOC2000186 | 0 | 0 | 20.450 | 0 | 64.790 | 0 | 0 |
| BRCOC2000487 | 0 | 1.072 | 0 | 0 | 0 | 0 | 0 |
| BRCOC2002155 | 0 | 0 | 0 | 0 | 0 | 24.023 | 0 |
| BRCOC2003187 | 0.656 | 0 | 0 | 0 | 0 | 0.881 | 0 |
| BRCOC2003213 | 8.657 | 0 | 0 | 0 | 0 | 0 | 0 |
| BRCOC2003732 | 0 | 0 | 0 | 0 | 0 | 24.023 | 0 |
| BRCOC2006164 | 0 | 0 | 0 | 0 | 0 | 16.280 | 0 |
| BRCOC2010123 | 0.913 | 0 | 0 | 0 | 0 | 0 | 0 |
| BRCOC2010730 | 18.026 | 0 | 0 | 0 | 0 | 0 | 0 |
| BRCOC2012172 | 0 | 0 | 0 | 0 | 0 | 28.357 | 0 |
| BRCOC2012551 | 6.014 | 0 | 0 | 0 | 0 | 24.237 | 0 |
| BRCOC2014013 | 4.522 | 20.075 | 37.284 | 0 | 0 | 0 | 0 |
| BRCOC2014033 | 13.036 | 0 | 0 | 0 | 0 | 0 | 0 |
| BRCOC2017652 | 0 | 51.098 | 0 | 0 | 0 | 0 | 0 |
| BRCOC2019903 | 13.365 | 0 | 0 | 0 | 0 | 0 | 0 |
| BRCOC2019910 | 0 | 4.627 | 0 | 0 | 0 | 0 | 0 |
| BRHIP1000104 | 0.545 | 9.678 | 0 | 0 | 0 | 0 | 0 |
| BRHIP1000108 | 0 | 15.953 | 0 | 0 | 0 | 0 | 0 |
| BRHIP2000087 | 0 | 24.363 | 0 | 0 | 0 | 0 | 0 |
| BRHIP2000239 | 0 | 0 | 0 | 0 | 0 | 52.334 | 0 |
| BRHIP2000245 | 44.974 | 0 | 0 | 0 | 0 | 0 | 0 |
| BRHIP2000534 | 0.856 | 0 | 0 | 0 | 0 | 0 | 0 |
| BRHIP2000553 | 4.285 | 0 | 0 | 0 | 0 | 0 | 0 |
| BRHIP2000819 | 12.609 | 0 | 0 | 0 | 0 | 0 | 46.392 |
| BRHIP2001099 | 17.341 | 0 | 0 | 0 | 0 | 0 | 0 |
| BRHIP2003062 | 7.921 | 0 | 0 | 0 | 0 | 0 | 0 |
| BRHIP2004359 | 40.602 | 0 | 0 | 0 | 0 | 0 | 0 |
| BRHIP2005271 | 0 | 0 | 0 | 0 | 0 | 63.472 | 0 |
| BRHIP2007305 | 3.776 | 0 | 0 | 0 | 0 | 0 | 0 |
| BRHIP2007741 | 1.447 | 0 | 0 | 0 | 0 | 0 | 0 |
| BRHIP2008269 | 23.203 | 0 | 0 | 0 | 0 | 0 | 0 |
| BRHIP2009685 | 0 | 0 | 0 | 73.716 | 0 | 3.990 | 0 |
| BRHIP2010571 | 12.840 | 0 | 0 | 0 | 0 | 0 | 0 |
| BRHIP2010593 | 0 | 12.963 | 0 | 0 | 0 | 0 | 0 |
| BRHIP2011199 | 44.974 | 0 | 0 | 0 | 0 | 0 | 0 |
| BRHIP2011508 | 54.020 | 0 | 0 | 0 | 0 | 0 | 0 |
| BRHIP2014373 | 28.142 | 0 | 0 | 0 | 0 | 0 | 0 |
| BRHIP2014386 | 44.974 | 0 | 0 | 0 | 0 | 0 | 0 |
| BRHIP2015153 | 0 | 0 | 0 | 0 | 0 | 11.223 | 0 |
| BRHIP2015245 | 9.898 | 0 | 0 | 0 | 0 | 5.318 | 0 |
| BRHIP2015679 | 2.092 | 0 | 0 | 0 | 0 | 0 | 0 |
| BRHIP2017010 | 0 | 0 | 0 | 0 | 0 | 76.989 | 0 |
| BRHIP2017945 | 2.688 | 0 | 0 | 0 | 0 | 0 | 0 |
| BRHIP2018712 | 1.689 | 7.496 | 0 | 0 | 0 | 4.537 | 0 |
| BRHIP2019819 | 0 | 32.096 | 0 | 0 | 0 | 0 | 0 |
| BRHIP2020509 | 15.614 | 0 | 0 | 0 | 0 | 0 | 0 |
| BRHIP2020573 | 0 | 0 | 0 | 0 | 0 | 10.137 | 0 |
| BRHIP2020799 | 4.220 | 0 | 0 | 0 | 0 | 0 | 0 |
| BRHIP2022228 | 7.619 | 0 | 0 | 0 | 0 | 30.706 | 0 |
| BRHIP2022326 | 1.419 | 3.149 | 0 | 0 | 0 | 1.906 | 0 |
| BRHIP2022986 | 2.373 | 0 | 0 | 0 | 0 | 0 | 0 |
| BRHIP2023272 | 0 | 0 | 0 | 0 | 0 | 0 | 72.484 |
| BRHIP2023309 | 0 | 43.183 | 0 | 0 | 0 | 13.067 | 0 |
| BRHIP2023369 | 0 | 64.693 | 0 | 0 | 0 | 0 | 0 |
| BRHIP2023438 | 0 | 0 | 0 | 0 | 0 | 28.574 | 0 |
| BRHIP2023888 | 3.375 | 1.362 | 0 | 0 | 0 | 1.649 | 0 |
| BRHIP2024046 | 0 | 0 | 0 | 0 | 0 | 68.709 | 0 |
| BRHIP2024398 | 14.041 | 0 | 0 | 0 | 0 | 9.431 | 0 |
| BRHIP2024742 | 0 | 0 | 0 | 0 | 0 | 5.588 | 0 |
| BRHIP2025245 | 0 | 0 | 0 | 0 | 0 | 52.334 | 0 |
| BRHIP2027017 | 0 | 0 | 0 | 0 | 0 | 12.895 | 0 |
| BRHIP2027077 | 1.684 | 0 | 0 | 0 | 0 | 4.525 | 0 |
| BRHIP3000017 | 0 | 0 | 0 | 0 | 0 | 9.878 | 0 |
| BRHIP3000111 | 0 | 3.790 | 0 | 0 | 0 | 1.147 | 0 |
| BRHIP3000131 | 9.186 | 0 | 0 | 0 | 0 | 4.113 | 0 |
| BRHIP3000475 | 0 | 0 | 0 | 0 | 0 | 24.219 | 0 |
| BRHIP3002114 | 32.523 | 0 | 0 | 0 | 0 | 0 | 0 |
| BRHIP3002141 | 26.166 | 0 | 0 | 0 | 0 | 0 | 0 |
| BRHIP3002691 | 0 | 30.700 | 0 | 0 | 0 | 0 | 0 |
| BRHIP3005673 | 21.480 | 0 | 0 | 0 | 0 | 0 | 0 |
| BRHIP3006294 | 33.251 | 0 | 0 | 0 | 0 | 0 | 0 |
| BRHIP3007223 | 0 | 0 | 0 | 0 | 0 | 6.775 | 0 |
| BRHIP3008405 | 14.670 | 0 | 0 | 0 | 0 | 19.707 | 0 |
| BRHIP3012997 | 0 | 3.431 | 0 | 0 | 0 | 0 | 0 |
| BRHIP3014675 | 15.812 | 0 | 0 | 0 | 0 | 0 | 0 |
| BRHIP3017855 | 6.386 | 0 | 0 | 0 | 0 | 4.289 | 0 |
| BRHIP3018278 | 32.523 | 0 | 0 | 0 | 0 | 0 | 0 |
| BRHIP3018784 | 5.779 | 0 | 0 | 0 | 0 | 0 | 0 |
| BRHIP3020046 | 0.845 | 3.749 | 0 | 0 | 0 | 1.135 | 0 |
| BRHIP3020733 | 44.974 | 0 | 0 | 0 | 0 | 0 | 0 |
| BRSSN2000097 | 0 | 25.630 | 0 | 0 | 0 | 0 | 0 |
| BRSSN2000197 | 18.303 | 0 | 0 | 0 | 0 | 0 | 0 |
| BRSSN2000244 | 0 | 49.863 | 0 | 0 | 0 | 0 | 0 |
| BRSSN2000295 | 0 | 25.637 | 0 | 0 | 0 | 0 | 0 |
| BRSSN2000498 | 2.737 | 0 | 0 | 0 | 0 | 2.451 | 23.500 |
| BRSSN2000684 | 0 | 17.348 | 0 | 0 | 0 | 0 | 0 |
| BRSSN2000832 | 10.039 | 0 | 0 | 0 | 0 | 0 | 0 |
| BRSSN2001579 | 0 | 49.863 | 0 | 0 | 0 | 0 | 0 |
| BRSSN2001869 | 2.517 | 0 | 0 | 0 | 0 | 6.762 | 0 |
| BRSSN2003012 | 0 | 0 | 0 | 0 | 0 | 4.846 | 0 |
| BRSSN2004719 | 0 | 19.395 | 0 | 0 | 0 | 0 | 0 |
| BRSSN2005847 | 18.303 | 0 | 0 | 0 | 0 | 0 | 0 |
| BRSSN2006892 | 12.911 | 0 | 0 | 0 | 0 | 0 | 0 |
| BRSSN2007338 | 0 | 27.359 | 0 | 0 | 0 | 0 | 0 |
| BRSSN2007464 | 0 | 15.148 | 0 | 0 | 0 | 0 | 0 |
| BRSSN2009518 | 1.436 | 0 | 0 | 0 | 0 | 3.859 | 0 |
| BRSSN2010019 | 0 | 42.961 | 0 | 0 | 0 | 0 | 0 |
| BRSSN2011262 | 7.050 | 0 | 0 | 0 | 0 | 0 | 0 |
| BRSSN2011738 | 8.770 | 0 | 0 | 0 | 0 | 0 | 0 |
| BRSSN2011843 | 9.980 | 0 | 0 | 0 | 0 | 0 | 0 |
| BRSSN2012439 | 18.303 | 0 | 0 | 0 | 0 | 0 | 0 |
| BRSSN2013702 | 0 | 0 | 0 | 0 | 0 | 10.626 | 0 |
| BRSSN2014299 | 3.081 | 0 | 0 | 0 | 0 | 0 | 0 |
| BRSSN2014610 | 2.977 | 0 | 0 | 0 | 0 | 7.998 | 0 |
| BRSSN2014685 | 0 | 0 | 0 | 0 | 0 | 15.906 | 0 |
| BRSSN2015238 | 2.855 | 0 | 0 | 0 | 0 | 3.835 | 0 |
| BRSSN2018447 | 0 | 24.191 | 0 | 0 | 0 | 7.320 | 0 |
| BRSSN2018581 | 0 | 49.863 | 0 | 0 | 0 | 0 | 0 |
| BRSTN1000083 | 1.065 | 0 | 0 | 0 | 0 | 0.715 | 0 |
| BRSTN2000058 | 0 | 8.929 | 0 | 0 | 0 | 0 | 0 |
| BRSTN2001067 | 5.162 | 0 | 0 | 0 | 0 | 6.935 | 0 |
| BRSTN2004869 | 0 | 0 | 0 | 0 | 0 | 23.702 | 0 |
| BRSTN2010089 | 5.501 | 0 | 0 | 0 | 0 | 0 | 0 |
| BRSTN2010107 | 0 | 24.765 | 0 | 0 | 0 | 0 | 0 |
| BRSTN2011961 | 0.241 | 0 | 0 | 0 | 0 | 0.324 | 0 |
| BRSTN2012069 | 0.631 | 0.140 | 0.390 | 0 | 6.386 | 0.095 | 4.062 |
| BRSTN2012089 | 0 | 21.471 | 0 | 0 | 0 | 0 | 0 |
| BRSTN2012174 | 0.506 | 1.497 | 0 | 0 | 0 | 0.680 | 0 |
| BRSTN2012451 | 0 | 0 | 0 | 0 | 17.990 | 0 | 0 |
| BRSTN2013502 | 2.027 | 0 | 0 | 0 | 0 | 0 | 0 |
| BRSTN2013931 | 0 | 0 | 0 | 0 | 0 | 1.082 | 0 |
| BRSTN2014490 | 0 | 34.105 | 0 | 0 | 0 | 0 | 0 |
| BRSTN2015889 | 9.690 | 0 | 0 | 0 | 0 | 0 | 0 |
| BRSTN2015978 | 0 | 10.107 | 0 | 0 | 0 | 0 | 0 |
| BRSTN2016470 | 0.365 | 0.810 | 0 | 0 | 0 | 0 | 0 |
| BRSTN2016992 | 0.410 | 1.822 | 0 | 0 | 0 | 0.551 | 0 |
| BRSTN2017104 | 4.877 | 0 | 0 | 0 | 0 | 0 | 0 |
| BRSTN2017761 | 0 | 0 | 0 | 0 | 0 | 23.702 | 0 |
| BRTHA1000311 | 2.460 | 10.923 | 0 | 0 | 0 | 3.305 | 0 |
| BRTHA2005013 | 9.305 | 0 | 0 | 0 | 0 | 0 | 0 |
| BRTHA2005864 | 9.471 | 0 | 0 | 0 | 0 | 1.817 | 34.846 |
| BRTHA2007998 | 0 | 0 | 0 | 0 | 0 | 0.966 | 0 |
| BRTHA2008335 | 0 | 0 | 0 | 0 | 0 | 9.119 | 0 |
| BRTHA2009886 | 0 | 76.948 | 0 | 0 | 0 | 0 | 0 |
| BRTHA2011691 | 42.920 | 0 | 0 | 0 | 0 | 0 | 0 |
| BRTHA2012714 | 0 | 4.640 | 0 | 0 | 0 | 0 | 0 |
| BRTHA2012980 | 0 | 0 | 86.110 | 0 | 0 | 0 | 0 |
| BRTHA2013054 | 0 | 0 | 0 | 0 | 0 | 13.457 | 0 |
| BRTHA2013275 | 0 | 0 | 0 | 0 | 0 | 50.251 | 0 |
| BRTHA2013540 | 28.262 | 0 | 0 | 0 | 0 | 0 | 0 |
| BRTHA2014663 | 14.773 | 65.580 | 0 | 0 | 0 | 0 | 0 |
| BRTHA2014997 | 42.920 | 0 | 0 | 0 | 0 | 0 | 0 |
| BRTHA2016577 | 1.967 | 0 | 0 | 0 | 0 | 0 | 0 |
| BRTHA2016918 | 0 | 0 | 67.390 | 0 | 0 | 0 | 0 |
| BRTHA2017985 | 0 | 0 | 0 | 0 | 0 | 50.251 | 0 |
| BRTHA2018504 | 28.335 | 0 | 0 | 0 | 0 | 0 | 0 |
| BRTHA2018707 | 42.920 | 0 | 0 | 0 | 0 | 0 | 0 |
| BRTHA2019073 | 42.920 | 0 | 0 | 0 | 0 | 0 | 0 |
| BRTHA2021440 | 42.920 | 0 | 0 | 0 | 0 | 0 | 0 |
| BRTHA2026071 | 30.706 | 0 | 0 | 0 | 0 | 0 | 0 |
| BRTHA2035743 | 11.317 | 0 | 0 | 0 | 0 | 7.601 | 0 |
| BRTHA3000273 | 42.920 | 0 | 0 | 0 | 0 | 0 | 0 |
| BRTHA3002427 | 0 | 10.582 | 19.655 | 0 | 0 | 0 | 0 |
| BRTHA3002864 | 42.920 | 0 | 0 | 0 | 0 | 0 | 0 |
| BRTHA3003417 | 0 | 0 | 0 | 0 | 0 | 34.473 | 0 |
| BRTHA3003490 | 6.768 | 0 | 0 | 0 | 0 | 0 | 34.864 |
| BRTHA3003736 | 5.381 | 0 | 0 | 0 | 0 | 0 | 0 |
| BRTHA3004307 | 5.024 | 0 | 0 | 0 | 0 | 6.749 | 0 |
| BRTHA3007472 | 3.254 | 0 | 0 | 0 | 0 | 0 | 0 |
| BRTHA3010530 | 23.316 | 0 | 0 | 0 | 0 | 0 | 0 |
| BRTHA3011194 | 0 | 0 | 0 | 0 | 0 | 3.959 | 0 |
| BRTHA3011265 | 0 | 0 | 0 | 0 | 0 | 9.557 | 0 |
| BRTHA3020314 | 0 | 0 | 0 | 0 | 0 | 22.812 | 0 |
| BRTHA3021971 | 3.237 | 0 | 0 | 0 | 0 | 0 | 0 |
| BRTHA3022641 | 14.751 | 0 | 0 | 0 | 0 | 0 | 0 |
| CD34C3000252 | 0 | 3.038 | 0 | 0 | 0 | 0.919 | 0 |
| CHONS2000797 | 3.627 | 0 | 0 | 0 | 0 | 0 | 0 |
| CHONS2002829 | 4.087 | 0 | 0 | 0 | 0 | 3.660 | 0 |
| COLON2002443 | 3.760 | 0 | 0 | 0 | 0 | 0 | 0 |
| CTONG1000009 | 8.100 | 0 | 0 | 0 | 0 | 10.881 | 0 |
| CTONG1000010 | 5.406 | 0 | 0 | 0 | 0 | 0 | 0 |
| CTONG1000052 | 8.565 | 0 | 0 | 0 | 0 | 4.061 | 0 |
| CTONG1000087 | 0 | 0 | 0 | 0 | 0 | 3.514 | 0 |
| CTONG1000094 | 0.649 | 1.442 | 0 | 0 | 0 | 0.436 | 0 |
| CTONG1000175 | 9.827 | 0 | 0 | 0 | 0 | 5.658 | 0 |
| CTONG1000218 | 0.803 | 0 | 0 | 0 | 0 | 2.157 | 0 |
| CTONG1000241 | 8.844 | 0 | 0 | 0 | 0 | 0 | 0 |
| CTONG1000288 | 3.805 | 0 | 0 | 0 | 0 | 0 | 0 |
| CTONG1000467 | 0 | 0 | 0 | 0 | 0 | 19.250 | 0 |
| CTONG2000063 | 0 | 7.924 | 0 | 0 | 0 | 4.796 | 0 |
| CTONG2000201 | 0 | 0 | 0 | 0 | 0 | 23.884 | 0 |
| CTONG2000411 | 0 | 0 | 0 | 0 | 0 | 6.446 | 0 |
| CTONG2000465 | 30.924 | 0 | 0 | 0 | 0 | 0 | 0 |
| CTONG2000469 | 0 | 0 | 0 | 0 | 0 | 6.542 | 0 |
| CTONG2000508 | 1.317 | 2.923 | 5.429 | 0 | 0 | 9.730 | 0 |
| CTONG2000561 | 0 | 0 | 0 | 0 | 0 | 8.129 | 0 |
| CTONG2001366 | 6.463 | 0 | 0 | 0 | 0 | 0 | 0 |
| CTONG2001428 | 0 | 0 | 0 | 0 | 0 | 37.554 | 0 |
| CTONG2001748 | 3.486 | 0 | 0 | 0 | 0 | 4.683 | 0 |
| CTONG2001858 | 0 | 0 | 0 | 0 | 0 | 8.267 | 0 |
| CTONG2002073 | 3.664 | 0 | 0 | 0 | 0 | 1.641 | 0 |
| CTONG2002270 | 5.750 | 0 | 0 | 0 | 0 | 6.536 | 0 |
| CTONG2002395 | 30.924 | 0 | 0 | 0 | 0 | 0 | 0 |
| CTONG2002721 | 30.924 | 0 | 0 | 0 | 0 | 0 | 0 |
| CTONG2002744 | 2.946 | 0 | 4.049 | 0 | 0 | 2.639 | 0 |
| CTONG2002803 | 1.228 | 0 | 0 | 0 | 0 | 0 | 0 |
| CTONG2002820 | 9.379 | 0 | 0 | 0 | 0 | 0 | 0 |
| CTONG2002903 | 0 | 0 | 0 | 0 | 0 | 3.450 | 0 |
| CTONG2003094 | 0 | 13.564 | 0 | 0 | 0 | 4.105 | 0 |
| CTONG2003100 | 0 | 0 | 0 | 0 | 0 | 0 | 92.019 |
| CTONG2003298 | 0 | 0 | 0 | 0 | 0 | 7.316 | 0 |
| CTONG2003524 | 1.344 | 5.965 | 0 | 0 | 0 | 7.220 | 0 |
| CTONG2004423 | 0 | 0 | 0 | 0 | 0 | 12.872 | 0 |
| CTONG2004487 | 0.789 | 0 | 6.503 | 0 | 0 | 7.417 | 0 |
| CTONG2005028 | 0 | 0 | 0 | 0 | 0 | 7.668 | 0 |
| CTONG2005278 | 7.209 | 0 | 0 | 0 | 0 | 0 | 0 |
| CTONG2005468 | 0 | 0 | 0 | 0 | 0 | 16.699 | 0 |
| CTONG2005553 | 1.791 | 0 | 0 | 0 | 0 | 1.604 | 0 |
| CTONG2005615 | 0 | 0 | 0 | 0 | 0 | 63.916 | 0 |
| CTONG2006004 | 0.880 | 0 | 0 | 0 | 22.990 | 2.365 | 0 |
| CTONG2006235 | 1.366 | 6.064 | 0 | 0 | 0 | 9.174 | 0 |
| CTONG2006377 | 29.368 | 0 | 0 | 0 | 0 | 0 | 0 |
| CTONG2006562 | 1.167 | 0 | 0 | 0 | 0 | 1.568 | 0 |
| CTONG2006666 | 21.848 | 0 | 0 | 0 | 0 | 29.349 | 0 |
| CTONG2006709 | 2.156 | 0 | 0 | 0 | 0 | 2.897 | 0 |
| CTONG2006798 | 8.046 | 0 | 0 | 0 | 0 | 10.808 | 0 |
| CTONG2006932 | 0 | 0 | 7.565 | 0 | 0 | 0 | 0 |
| CTONG2007007 | 0 | 3.446 | 0 | 0 | 0 | 3.128 | 0 |
| CTONG2007072 | 7.175 | 0 | 0 | 0 | 0 | 9.639 | 0 |
| CTONG2007078 | 3.197 | 0 | 0 | 0 | 0 | 4.294 | 0 |
| CTONG2007168 | 0 | 0 | 0 | 0 | 0 | 20.314 | 0 |
| CTONG2007400 | 0 | 0 | 0 | 0 | 0 | 12.889 | 0 |
| CTONG2007417 | 35.948 | 0 | 0 | 0 | 0 | 0 | 0 |
| CTONG2007441 | 0 | 0 | 0 | 0 | 0 | 23.118 | 0 |
| CTONG2007500 | 1.881 | 0 | 0 | 0 | 0 | 0.842 | 0 |
| CTONG2007586 | 0 | 0 | 0 | 0 | 0 | 6.732 | 0 |
| CTONG2007776 | 3.547 | 0 | 0 | 0 | 0 | 0 | 0 |
| CTONG2008398 | 0 | 0 | 0 | 0 | 0 | 1.713 | 16.419 |
| CTONG2008466 | 6.519 | 0 | 0 | 0 | 0 | 0 | 0 |
| CTONG2008506 | 4.708 | 0 | 0 | 0 | 0 | 4.216 | 0 |
| CTONG2008621 | 0 | 0 | 0 | 0 | 0 | 37.554 | 0 |
| CTONG2008720 | 22.512 | 0 | 0 | 0 | 0 | 0 | 0 |
| CTONG2008792 | 0 | 27.199 | 0 | 0 | 0 | 0 | 0 |
| CTONG2009534 | 0 | 0 | 0 | 0 | 0 | 8.614 | 0 |
| CTONG2009844 | 0 | 66.526 | 0 | 0 | 0 | 0 | 0 |
| CTONG2009938 | 16.683 | 0 | 0 | 0 | 0 | 0 | 0 |
| CTONG2009963 | 34.474 | 0 | 0 | 0 | 0 | 0 | 0 |
| CTONG2010348 | 4.430 | 0 | 0 | 0 | 0 | 1.983 | 0 |
| CTONG2010408 | 14.289 | 0 | 0 | 0 | 0 | 0 | 0 |
| CTONG2010649 | 0 | 5.788 | 0 | 0 | 0 | 1.752 | 0 |
| CTONG2010652 | 13.402 | 0 | 0 | 0 | 0 | 0 | 0 |
| CTONG2010821 | 8.938 | 0 | 0 | 0 | 0 | 0.800 | 0 |
| CTONG2011801 | 2.469 | 0 | 0 | 0 | 0 | 0 | 0 |
| CTONG2011825 | 0 | 0 | 0 | 0 | 0 | 19.233 | 0 |
| CTONG2012001 | 11.925 | 0 | 0 | 0 | 0 | 0 | 0 |
| CTONG2012050 | 0 | 0 | 0 | 0 | 0 | 23.871 | 0 |
| CTONG2012401 | 0 | 0 | 0 | 0 | 0 | 4.712 | 0 |
| CTONG2012422 | 30.924 | 0 | 0 | 0 | 0 | 0 | 0 |
| CTONG2012452 | 0.594 | 1.318 | 0 | 7.369 | 0 | 1.595 | 0 |
| CTONG2012453 | 18.839 | 0 | 0 | 0 | 0 | 0 | 0 |
| CTONG2012607 | 1.442 | 0 | 0 | 0 | 0 | 0 | 0 |
| CTONG2012661 | 34.944 | 0 | 0 | 0 | 0 | 0 | 0 |
| CTONG2012745 | 4.625 | 0 | 0 | 0 | 0 | 0 | 0 |
| CTONG2012847 | 0 | 0 | 0 | 0 | 0 | 3.858 | 0 |
| CTONG2012996 | 7.304 | 0 | 0 | 0 | 0 | 3.271 | 0 |
| CTONG2013348 | 4.587 | 0 | 0 | 0 | 0 | 0 | 0 |
| CTONG2013907 | 0 | 0 | 0 | 0 | 0 | 2.415 | 0 |
| CTONG2013934 | 11.568 | 0 | 0 | 0 | 0 | 7.770 | 0 |
| CTONG2014119 | 60.822 | 0 | 0 | 0 | 0 | 0 | 0 |
| CTONG2014165 | 4.015 | 0 | 0 | 0 | 0 | 0 | 0 |
| CTONG2014280 | 20.963 | 0 | 0 | 0 | 0 | 0 | 0 |
| CTONG2014389 | 0 | 0 | 0 | 0 | 0 | 2.959 | 56.729 |
| CTONG2014491 | 0 | 0 | 0 | 0 | 0 | 37.554 | 0 |
| CTONG2014898 | 4.810 | 0 | 0 | 0 | 0 | 0 | 0 |
| CTONG2014954 | 20.390 | 0 | 0 | 0 | 0 | 13.695 | 0 |
| CTONG2015091 | 0.677 | 6.012 | 0 | 0 | 0 | 0 | 0 |
| CTONG2015345 | 7.118 | 0 | 0 | 0 | 0 | 19.125 | 0 |
| CTONG2015678 | 0 | 0 | 0 | 0 | 0 | 37.554 | 0 |
| CTONG2016056 | 1.658 | 0 | 0 | 0 | 0 | 0 | 0 |
| CTONG2016185 | 0 | 0 | 0 | 0 | 0 | 26.208 | 0 |
| CTONG2016505 | 0 | 66.526 | 0 | 0 | 0 | 0 | 0 |
| CTONG2016575 | 0.829 | 0 | 0 | 0 | 0 | 5.012 | 0 |
| CTONG2016869 | 37.440 | 0 | 0 | 0 | 0 | 2.959 | 0 |
| CTONG2016931 | 2.545 | 0 | 0 | 0 | 0 | 0 | 0 |
| CTONG2017429 | 0 | 0 | 0 | 0 | 0 | 16.168 | 0 |
| CTONG2017500 | 2.209 | 0 | 0 | 0 | 0 | 5.935 | 0 |
| CTONG2017798 | 49.854 | 0 | 0 | 0 | 0 | 0 | 0 |
| CTONG2017998 | 8.355 | 0 | 0 | 0 | 0 | 8.418 | 0 |
| CTONG2018211 | 2.844 | 0 | 0 | 0 | 0 | 0 | 0 |
| CTONG2018334 | 0 | 0 | 0 | 0 | 0 | 8.193 | 0 |
| CTONG2018629 | 0 | 0 | 0 | 0 | 0 | 23.118 | 0 |
| CTONG2018637 | 0 | 0 | 0 | 0 | 0 | 7.349 | 0 |
| CTONG2018735 | 30.924 | 0 | 0 | 0 | 0 | 0 | 0 |
| CTONG2018739 | 22.620 | 0 | 0 | 0 | 0 | 0 | 0 |
| CTONG2018843 | 9.257 | 0 | 0 | 0 | 0 | 0 | 0 |
| CTONG2018898 | 0.402 | 3.565 | 0 | 0 | 0 | 1.618 | 0 |
| CTONG2018976 | 30.924 | 0 | 0 | 0 | 0 | 0 | 0 |
| CTONG2019029 | 0 | 0 | 0 | 0 | 0 | 9.064 | 0 |
| CTONG2019248 | 0 | 0 | 0 | 0 | 0 | 16.946 | 0 |
| CTONG2019590 | 8.973 | 0 | 0 | 0 | 0 | 0 | 0 |
| CTONG2019704 | 0 | 0 | 0 | 0 | 0 | 37.554 | 0 |
| CTONG2019788 | 0 | 0 | 0 | 0 | 0 | 3.425 | 0 |
| CTONG2019822 | 2.711 | 0 | 0 | 0 | 0 | 3.642 | 0 |
| CTONG2020108 | 30.924 | 0 | 0 | 0 | 0 | 0 | 0 |
| CTONG2020378 | 0 | 0 | 0 | 0 | 0 | 18.079 | 0 |
| CTONG2020484 | 0 | 2.176 | 0 | 0 | 0 | 0 | 0 |
| CTONG2020560 | 0 | 0 | 0 | 0 | 0 | 8.402 | 0 |
| CTONG2020582 | 1.600 | 0 | 0 | 0 | 0 | 6.448 | 0 |
| CTONG2020638 | 0 | 0 | 0 | 0 | 0 | 27.737 | 0 |
| CTONG2021024 | 0 | 0 | 0 | 0 | 0 | 37.554 | 0 |
| CTONG2021289 | 34.318 | 0 | 0 | 0 | 0 | 11.525 | 0 |
| CTONG2022835 | 0 | 0 | 0 | 0 | 0 | 1.922 | 0 |
| CTONG2024031 | 0 | 0 | 0 | 0 | 0 | 2.895 | 0 |
| CTONG2027327 | 47.240 | 0 | 0 | 0 | 0 | 0 | 0 |
| CTONG2028124 | 0.838 | 0 | 3.455 | 0 | 0 | 1.689 | 0 |
| CTONG2028309 | 24.482 | 0 | 0 | 0 | 0 | 0 | 0 |
| CTONG2028758 | 0 | 59.532 | 0 | 0 | 0 | 0 | 0 |
| CTONG3000657 | 0 | 14.362 | 0 | 0 | 0 | 0 | 0 |
| CTONG3001123 | 6.543 | 0 | 0 | 0 | 0 | 0 | 0 |
| CTONG3001746 | 0 | 0 | 0 | 0 | 0 | 16.024 | 0 |
| CTONG3002127 | 0 | 0 | 0 | 0 | 0 | 37.554 | 0 |
| CTONG3002518 | 7.036 | 0 | 0 | 0 | 0 | 9.452 | 0 |
| CTONG3002674 | 18.629 | 0 | 0 | 0 | 0 | 0 | 0 |
| CTONG3002835 | 19.238 | 0 | 0 | 0 | 0 | 3.692 | 0 |
| CTONG3003905 | 16.329 | 0 | 0 | 0 | 0 | 0 | 0 |
| CTONG3004072 | 0 | 0 | 0 | 0 | 0 | 43.729 | 0 |
| CTONG3004576 | 0 | 0 | 0 | 0 | 0 | 37.554 | 0 |
| CTONG3008894 | 2.425 | 0 | 0 | 0 | 0 | 0.814 | 0 |
| CTONG3009028 | 4.026 | 0 | 0 | 0 | 0 | 3.605 | 0 |
| D30ST2000734 | 6.666 | 0 | 0 | 0 | 0 | 0 | 0 |
| D30ST2001670 | 3.111 | 0 | 0 | 0 | 0 | 0 | 0 |
| D30ST2001788 | 2.432 | 0 | 0 | 0 | 63.521 | 0 | 0 |
| D30ST2002068 | 0 | 0 | 0 | 0 | 0 | 0 | 4.614 |
| D30ST3000258 | 5.183 | 0 | 0 | 0 | 0 | 0 | 0 |
| D30ST3000291 | 6.666 | 0 | 0 | 0 | 0 | 0 | 0 |
| D60ST2000358 | 0 | 0 | 0 | 0 | 0 | 1.592 | 0 |
| D60ST2000464 | 0.914 | 0 | 0 | 0 | 0 | 0 | 0 |
| D90ST2002608 | 5.573 | 8.247 | 0 | 0 | 0 | 7.487 | 0 |
| D90ST2003791 | 10.203 | 0 | 0 | 0 | 0 | 0 | 0 |
| DFNES1000083 | 0 | 0 | 0 | 0 | 0 | 2.520 | 0 |
| DFNES1000150 | 1.862 | 0 | 7.678 | 0 | 0 | 3.753 | 0 |
| DFNES2000011 | 1.824 | 6.073 | 0 | 0 | 0 | 4.900 | 0 |
| DFNES2000426 | 10.529 | 0 | 0 | 0 | 0 | 0 | 0 |
| DFNES2000443 | 0 | 2.513 | 0 | 0 | 0 | 0 | 0 |
| DFNES2000526 | 2.304 | 0 | 0 | 0 | 0 | 0 | 0 |
| DFNES2001404 | 0 | 38.579 | 0 | 0 | 0 | 0 | 0 |
| DFNES2003742 | 0 | 38.579 | 0 | 0 | 0 | 0 | 0 |
| DFNES2004346 | 0 | 0 | 0 | 0 | 68.168 | 0 | 0 |
| DFNES2004371 | 2.631 | 0 | 0 | 0 | 0 | 5.302 | 0 |
| DFNES2005540 | 2.521 | 0 | 0 | 0 | 0 | 0 | 0 |
| DFNES2005690 | 0 | 0 | 0 | 0 | 0 | 5.687 | 0 |
| DFNES2005766 | 0 | 0 | 0 | 0 | 0 | 2.054 | 0 |
| DFNES2006346 | 0 | 0 | 0 | 0 | 0 | 15.826 | 0 |
| DFNES2007113 | 0 | 0 | 0 | 0 | 0 | 7.485 | 0 |
| DFNES2007332 | 3.095 | 0 | 25.515 | 0 | 0 | 0 | 0 |
| DFNES2007634 | 2.965 | 3.290 | 0 | 0 | 0 | 0 | 0 |
| DFNES2008088 | 0 | 9.731 | 0 | 0 | 0 | 0 | 0 |
| DFNES2008160 | 3.736 | 0 | 0 | 0 | 0 | 0 | 0 |
| DFNES2009482 | 0 | 0 | 0 | 0 | 30.893 | 0 | 0 |
| DFNES2011221 | 0 | 0 | 0 | 0 | 0 | 15.971 | 0 |
| DFNES2011499 | 0 | 0 | 0 | 0 | 0 | 6.949 | 0 |
| FCBBF1000024 | 1.831 | 0 | 0 | 0 | 0 | 4.919 | 0 |
| FCBBF1000025 | 0 | 11.846 | 0 | 0 | 0 | 3.585 | 0 |
| FCBBF1000027 | 2.138 | 2.712 | 0 | 0 | 0 | 1.231 | 0 |
| FCBBF1000038 | 9.368 | 0 | 0 | 0 | 0 | 0 | 0 |
| FCBBF1000053 | 2.257 | 10.018 | 18.606 | 0 | 0 | 3.031 | 0 |
| FCBBF1000061 | 1.961 | 8.706 | 16.169 | 0 | 0 | 2.634 | 0 |
| FCBBF1000063 | 4.987 | 0 | 0 | 0 | 0 | 13.399 | 0 |
| FCBBF1000077 | 0 | 2.998 | 0 | 0 | 0 | 0 | 0 |
| FCBBF1000115 | 0 | 0 | 0 | 0 | 0 | 22.769 | 0 |
| FCBBF1000139 | 0 | 6.471 | 0 | 0 | 0 | 3.916 | 0 |
| FCBBF1000197 | 2.672 | 0 | 0 | 0 | 0 | 4.786 | 0 |
| FCBBF1000294 | 6.284 | 0 | 7.402 | 0 | 0 | 1.206 | 0 |
| FCBBF1000367 | 1.267 | 0 | 0 | 0 | 0 | 0 | 0 |
| FCBBF1000412 | 0 | 0 | 0 | 0 | 0 | 6.503 | 0 |
| FCBBF1000425 | 0 | 0 | 0 | 0 | 0 | 23.391 | 0 |
| FCBBF1000466 | 3.186 | 2.357 | 0 | 0 | 0 | 13.554 | 0 |
| FCBBF1000509 | 0 | 6.907 | 0 | 0 | 0 | 0 | 0 |
| FCBBF1000556 | 0 | 3.946 | 0 | 0 | 0 | 0 | 0 |
| FCBBF1000563 | 0 | 0 | 0 | 0 | 0 | 3.365 | 0 |
| FCBBF1000574 | 12.116 | 0 | 0 | 0 | 0 | 0 | 0 |
| FCBBF1000687 | 0 | 0 | 0 | 0 | 0 | 9.676 | 0 |
| FCBBF1000760 | 2.730 | 0 | 0 | 0 | 0 | 0.734 | 0 |
| FCBBF2000087 | 0 | 0 | 0 | 0 | 0 | 3.231 | 0 |
| FCBBF2000199 | 2.333 | 0 | 0 | 0 | 0 | 0 | 0 |
| FCBBF2000782 | 31.099 | 0 | 0 | 0 | 0 | 0 | 0 |
| FCBBF2000885 | 1.280 | 0 | 0 | 0 | 0 | 5.158 | 0 |
| FCBBF2001088 | 13.520 | 0 | 0 | 0 | 0 | 0 | 0 |
| FCBBF2001183 | 0 | 12.243 | 0 | 0 | 0 | 0 | 0 |
| FCBBF2001291 | 3.173 | 0 | 0 | 0 | 0 | 2.131 | 0 |
| FCBBF2001309 | 3.628 | 16.105 | 0 | 0 | 0 | 0 | 0 |
| FCBBF2001400 | 16.981 | 0 | 0 | 0 | 0 | 22.812 | 0 |
| FCBBF2001538 | 27.955 | 5.641 | 0 | 0 | 0 | 0 | 0 |
| FCBBF2002349 | 0 | 0 | 0 | 0 | 0 | 4.422 | 0 |
| FCBBF2002801 | 6.492 | 0 | 0 | 0 | 0 | 0 | 0 |
| FCBBF2002928 | 0 | 0 | 0 | 0 | 0 | 0 | 66.822 |
| FCBBF2005909 | 5.204 | 0 | 0 | 0 | 0 | 0 | 0 |
| FCBBF2007556 | 7.620 | 0 | 0 | 0 | 0 | 0 | 0 |
| FCBBF3000110 | 0 | 0 | 0 | 0 | 0 | 7.234 | 0 |
| FCBBF3000115 | 13.311 | 0 | 0 | 0 | 0 | 0 | 0 |
| FCBBF3000228 | 7.473 | 0 | 0 | 0 | 0 | 0 | 0 |
| FCBBF3000434 | 1.544 | 6.853 | 0 | 0 | 0 | 0 | 0 |
| FCBBF3000536 | 4.445 | 0 | 0 | 0 | 0 | 2.986 | 0 |
| FCBBF3001081 | 4.379 | 0 | 0 | 0 | 0 | 2.941 | 0 |
| FCBBF3001302 | 2.772 | 0 | 0 | 0 | 0 | 0 | 0 |
| FCBBF3001470 | 2.264 | 0 | 0 | 0 | 0 | 0 | 0 |
| FCBBF3001818 | 0 | 0 | 0 | 0 | 0 | 20.406 | 0 |
| FCBBF3001890 | 0 | 20.364 | 0 | 0 | 0 | 0 | 0 |
| FCBBF3003800 | 0 | 2.916 | 0 | 0 | 0 | 1.765 | 0 |
| FCBBF3004473 | 2.874 | 0 | 0 | 0 | 0 | 0 | 0 |
| FCBBF3004715 | 3.122 | 0 | 0 | 0 | 81.563 | 0 | 0 |
| FCBBF3005320 | 2.275 | 0 | 0 | 0 | 0 | 0 | 0 |
| FCBBF3005330 | 1.733 | 0 | 0 | 0 | 0 | 4.656 | 0 |
| FCBBF3005497 | 5.244 | 0 | 0 | 0 | 0 | 0.881 | 0 |
| FCBBF3006821 | 4.767 | 0 | 0 | 0 | 0 | 12.806 | 0 |
| FCBBF3007244 | 12.945 | 0 | 0 | 0 | 0 | 0 | 0 |
| FCBBF3008153 | 13.686 | 0 | 0 | 0 | 0 | 6.128 | 0 |
| FCBBF3008382 | 0 | 39.870 | 0 | 0 | 0 | 0 | 0 |
| FCBBF3009256 | 31.099 | 0 | 0 | 0 | 0 | 0 | 0 |
| FCBBF3009541 | 0 | 0 | 2.834 | 0 | 0 | 1.847 | 0 |
| FCBBF3010665 | 21.935 | 0 | 0 | 0 | 0 | 29.466 | 0 |
| FCBBF3010695 | 0 | 9.180 | 0 | 0 | 0 | 2.778 | 0 |
| FCBBF3011523 | 0 | 66.707 | 0 | 0 | 0 | 0 | 0 |
| FCBBF3012347 | 1.830 | 0 | 0 | 0 | 0 | 2.459 | 0 |
| FCBBF3013266 | 0 | 0 | 0 | 0 | 0 | 23.680 | 0 |
| FCBBF3016667 | 0 | 47.387 | 0 | 0 | 0 | 0 | 0 |
| FCBBF3016928 | 0 | 3.243 | 0 | 0 | 0 | 3.926 | 0 |
| FCBBF3017024 | 0 | 0 | 0 | 0 | 0 | 11.482 | 0 |
| FCBBF3017531 | 1.337 | 0 | 0 | 0 | 0 | 0 | 0 |
| FCBBF3017918 | 5.460 | 0 | 0 | 0 | 0 | 7.334 | 0 |
| FCBBF3018796 | 2.589 | 11.492 | 0 | 0 | 0 | 0 | 0 |
| FCBBF3019320 | 49.450 | 0 | 0 | 0 | 0 | 0 | 0 |
| FCBBF3019839 | 6.245 | 13.863 | 0 | 0 | 0 | 0 | 0 |
| FCBBF3020140 | 47.443 | 0 | 0 | 0 | 0 | 0 | 0 |
| FCBBF3022504 | 12.995 | 0 | 0 | 0 | 0 | 0 | 0 |
| FCBBF3022593 | 0 | 25.647 | 0 | 0 | 0 | 0 | 0 |
| FCBBF3022767 | 16.981 | 0 | 0 | 0 | 0 | 22.812 | 0 |
| FCBBF3023368 | 0 | 0 | 0 | 0 | 0 | 2.748 | 0 |
| FCBBF3023667 | 0.332 | 0.492 | 0.913 | 0 | 2.893 | 0.149 | 0 |
| FCBBF3024002 | 4.732 | 0 | 0 | 0 | 0 | 6.357 | 0 |
| FCBBF3024793 | 0 | 59.143 | 0 | 0 | 0 | 0 | 0 |
| FCBBF3025737 | 0 | 0 | 0 | 0 | 0 | 3.640 | 0 |
| FCBBF3025905 | 40.015 | 0 | 0 | 0 | 0 | 0 | 0 |
| FCBBF3026308 | 10.657 | 0 | 0 | 0 | 0 | 0 | 0 |
| FCBBF3026651 | 0 | 0 | 0 | 0 | 0 | 8.174 | 0 |
| FCBBF3028202 | 0 | 42.529 | 0 | 0 | 0 | 0 | 0 |
| FCBBF3028244 | 2.323 | 3.437 | 0 | 0 | 0 | 3.120 | 0 |
| FCBBF3028593 | 6.733 | 0 | 0 | 0 | 0 | 0 | 0 |
| FCBBF4000017 | 7.406 | 0 | 0 | 0 | 0 | 0 | 0 |
| FCBBF4000446 | 0 | 2.780 | 0 | 0 | 0 | 1.683 | 0 |
| FCBBF4000548 | 0 | 0 | 0 | 0 | 0 | 16.372 | 0 |
| FCBBF5000261 | 4.329 | 0 | 35.696 | 0 | 0 | 0 | 0 |
| FEBRA1000057 | 0 | 6.426 | 0 | 0 | 0 | 0 | 0 |
| FEBRA2000105 | 1.196 | 0 | 19.724 | 0 | 0 | 2.410 | 0 |
| FEBRA2000129 | 4.335 | 0 | 0 | 0 | 0 | 2.912 | 0 |
| FEBRA2000210 | 1.768 | 0 | 0 | 0 | 0 | 0.792 | 0 |
| FEBRA2000228 | 3.294 | 0 | 0 | 0 | 0 | 4.425 | 0 |
| FEBRA2000253 | 12.206 | 0 | 0 | 0 | 0 | 0 | 0 |
| FEBRA2000377 | 8.342 | 0 | 0 | 0 | 0 | 0 | 0 |
| FEBRA2000402 | 4.622 | 0 | 0 | 0 | 0 | 0 | 0 |
| FEBRA2000438 | 14.734 | 0 | 0 | 0 | 0 | 0 | 0 |
| FEBRA2000452 | 0 | 3.713 | 0 | 0 | 21.846 | 4.494 | 0 |
| FEBRA2000454 | 25.065 | 0 | 0 | 0 | 0 | 0 | 0 |
| FEBRA2000510 | 3.077 | 0 | 0 | 0 | 0 | 4.133 | 0 |
| FEBRA2000532 | 0 | 0 | 0 | 66.176 | 0 | 0 | 0 |
| FEBRA2000536 | 0 | 11.660 | 0 | 0 | 0 | 3.528 | 0 |
| FEBRA2000733 | 0.141 | 0 | 0 | 0 | 0 | 0 | 0 |
| FEBRA2000740 | 3.772 | 0 | 0 | 0 | 0 | 5.067 | 0 |
| FEBRA2000757 | 2.553 | 0 | 0 | 0 | 0 | 0 | 0 |
| FEBRA2000787 | 4.941 | 0 | 0 | 0 | 0 | 0 | 0 |
| FEBRA2000815 | 0 | 13.382 | 0 | 0 | 0 | 0 | 0 |
| FEBRA2000881 | 0 | 0 | 0 | 0 | 0 | 3.546 | 0 |
| FEBRA2001146 | 18.649 | 0 | 0 | 0 | 0 | 12.526 | 0 |
| FEBRA2001227 | 0 | 13.686 | 0 | 0 | 0 | 0 | 0 |
| FEBRA2001294 | 2.015 | 0 | 0 | 0 | 0 | 2.707 | 0 |
| FEBRA2001492 | 2.699 | 0 | 0 | 0 | 0 | 0 | 0 |
| FEBRA2001523 | 0 | 0 | 58.455 | 0 | 0 | 0 | 0 |
| FEBRA2001571 | 1.749 | 15.525 | 0 | 0 | 0 | 2.349 | 0 |
| FEBRA2001581 | 3.419 | 0 | 0 | 0 | 0 | 0 | 0 |
| FEBRA2001669 | 0.893 | 0 | 0 | 0 | 0 | 0 | 0 |
| FEBRA2001698 | 0 | 45.061 | 0 | 0 | 0 | 0 | 0 |
| FEBRA2001715 | 0 | 3.691 | 0 | 0 | 0 | 0 | 0 |
| FEBRA2001745 | 0 | 0 | 0 | 0 | 0 | 1.404 | 0 |
| FEBRA2001814 | 0 | 9.795 | 0 | 0 | 0 | 1.482 | 0 |
| FEBRA2001828 | 4.537 | 0 | 0 | 0 | 0 | 0 | 0 |
| FEBRA2001867 | 6.181 | 13.719 | 0 | 0 | 0 | 0 | 0 |
| FEBRA2001974 | 19.431 | 0 | 0 | 0 | 0 | 13.051 | 0 |
| FEBRA2001989 | 25.065 | 0 | 0 | 0 | 0 | 0 | 0 |
| FEBRA2001990 | 0 | 13.433 | 0 | 0 | 0 | 0 | 0 |
| FEBRA2002352 | 0 | 12.850 | 0 | 0 | 0 | 0 | 0 |
| FEBRA2002429 | 3.265 | 0 | 0 | 0 | 0 | 0 | 0 |
| FEBRA2002456 | 0 | 4.037 | 0 | 0 | 0 | 0 | 0 |
| FEBRA2002574 | 25.065 | 0 | 0 | 0 | 0 | 0 | 0 |
| FEBRA2002601 | 0 | 0 | 73.389 | 0 | 0 | 0 | 0 |
| FEBRA2002707 | 0 | 0 | 0 | 0 | 0 | 4.036 | 0 |
| FEBRA2002792 | 0 | 0 | 9.202 | 0 | 0 | 0 | 0 |
| FEBRA2002933 | 0.309 | 0 | 0 | 0 | 0 | 0.415 | 0 |
| FEBRA2003115 | 0 | 0 | 0 | 0 | 0 | 24.282 | 0 |
| FEBRA2003181 | 25.065 | 0 | 0 | 0 | 0 | 0 | 0 |
| FEBRA2003258 | 0 | 0 | 0 | 0 | 0 | 3.169 | 0 |
| FEBRA2003436 | 4.635 | 0 | 0 | 0 | 0 | 0 | 0 |
| FEBRA2003726 | 0.830 | 0 | 0 | 0 | 0 | 0 | 0 |
| FEBRA2003750 | 0 | 6.758 | 0 | 0 | 0 | 8.179 | 0 |
| FEBRA2003833 | 1.442 | 0 | 0 | 0 | 0 | 3.874 | 0 |
| FEBRA2003926 | 1.164 | 0 | 0 | 0 | 0 | 0.782 | 0 |
| FEBRA2003930 | 1.499 | 0 | 0 | 0 | 0 | 0 | 0 |
| FEBRA2004042 | 1.769 | 0 | 0 | 0 | 0 | 0 | 0 |
| FEBRA2004293 | 6.650 | 0 | 0 | 0 | 0 | 5.955 | 0 |
| FEBRA2004331 | 25.065 | 0 | 0 | 0 | 0 | 0 | 0 |
| FEBRA2004485 | 0 | 25.690 | 0 | 0 | 0 | 0 | 0 |
| FEBRA2004628 | 0 | 10.559 | 0 | 0 | 0 | 0 | 0 |
| FEBRA2004818 | 0 | 0 | 0 | 0 | 0 | 4.576 | 0 |
| FEBRA2005114 | 0 | 24.839 | 0 | 0 | 0 | 0 | 0 |
| FEBRA2005291 | 0 | 0 | 0 | 0 | 0 | 0 | 77.883 |
| FEBRA2005361 | 0 | 5.185 | 0 | 0 | 0 | 0 | 0 |
| FEBRA2005416 | 1.791 | 0 | 0 | 0 | 0 | 0 | 0 |
| FEBRA2005476 | 0 | 0 | 0 | 0 | 0 | 0 | 55.937 |
| FEBRA2005572 | 11.886 | 0 | 0 | 0 | 0 | 1.996 | 0 |
| FEBRA2005734 | 0.704 | 0 | 0 | 0 | 0 | 0 | 0 |
| FEBRA2005778 | 0 | 0 | 0 | 0 | 0 | 3.360 | 0 |
| FEBRA2005787 | 25.065 | 0 | 0 | 0 | 0 | 0 | 0 |
| FEBRA2005824 | 0 | 5.523 | 0 | 0 | 0 | 0 | 0 |
| FEBRA2005995 | 0 | 15.568 | 0 | 0 | 0 | 0 | 0 |
| FEBRA2006092 | 0 | 0 | 0 | 0 | 0 | 1.393 | 0 |
| FEBRA2006255 | 0 | 4.823 | 0 | 0 | 0 | 0 | 0 |
| FEBRA2006270 | 5.849 | 0 | 0 | 0 | 0 | 0 | 0 |
| FEBRA2006357 | 0 | 2.452 | 0 | 0 | 0 | 0 | 0 |
| FEBRA2006368 | 0 | 11.502 | 0 | 0 | 0 | 0 | 0 |
| FEBRA2006372 | 2.240 | 0 | 9.233 | 0 | 0 | 1.504 | 0 |
| FEBRA2006401 | 0 | 0 | 0 | 0 | 0 | 1.125 | 0 |
| FEBRA2006485 | 2.537 | 0 | 0 | 0 | 0 | 3.407 | 0 |
| FEBRA2006491 | 37.148 | 0 | 0 | 0 | 0 | 0 | 0 |
| FEBRA2006553 | 0 | 14.645 | 0 | 0 | 0 | 0 | 0 |
| FEBRA2006808 | 0 | 15.195 | 0 | 0 | 0 | 0 | 0 |
| FEBRA2006873 | 3.744 | 0 | 0 | 0 | 0 | 0 | 0 |
| FEBRA2007212 | 0 | 14.531 | 0 | 0 | 0 | 4.397 | 0 |
| FEBRA2007544 | 0 | 0 | 0 | 0 | 0 | 5.485 | 0 |
| FEBRA2007613 | 5.534 | 12.283 | 0 | 0 | 0 | 7.434 | 0 |
| FEBRA2007622 | 1.721 | 0 | 7.093 | 0 | 0 | 2.311 | 0 |
| FEBRA2007801 | 0 | 0 | 0 | 0 | 0 | 2.765 | 0 |
| FEBRA2007880 | 18.830 | 0 | 0 | 0 | 0 | 0 | 0 |
| FEBRA2007900 | 6.463 | 0 | 0 | 0 | 0 | 8.682 | 0 |
| FEBRA2007901 | 3.090 | 0 | 0 | 0 | 0 | 0 | 0 |
| FEBRA2008036 | 0 | 5.287 | 0 | 0 | 0 | 0 | 0 |
| FEBRA2008081 | 2.362 | 2.621 | 0 | 14.654 | 0 | 3.173 | 0 |
| FEBRA2008087 | 0.299 | 0 | 2.465 | 3.709 | 11.713 | 0 | 0 |
| FEBRA2008201 | 3.999 | 0 | 0 | 0 | 0 | 0 | 0 |
| FEBRA2008266 | 0 | 67.271 | 0 | 0 | 0 | 0 | 0 |
| FEBRA2008287 | 0 | 10.911 | 0 | 0 | 0 | 0 | 0 |
| FEBRA2008302 | 0 | 7.879 | 0 | 0 | 0 | 0 | 0 |
| FEBRA2008341 | 10.955 | 0 | 0 | 0 | 0 | 0 | 0 |
| FEBRA2008583 | 0 | 3.425 | 0 | 0 | 0 | 0.592 | 0 |
| FEBRA2008662 | 0 | 17.626 | 0 | 0 | 0 | 0 | 0 |
| FEBRA2008692 | 0 | 0 | 0 | 0 | 0 | 27.483 | 52.692 |
| FEBRA2008755 | 2.739 | 0 | 0 | 0 | 0 | 0 | 70.553 |
| FEBRA2009185 | 0 | 13.453 | 0 | 0 | 0 | 0 | 0 |
| FEBRA2009419 | 2.204 | 4.891 | 0 | 0 | 0 | 2.960 | 0 |
| FEBRA2009514 | 2.762 | 0 | 0 | 0 | 0 | 0 | 0 |
| FEBRA2009780 | 0 | 0 | 0 | 0 | 0 | 31.003 | 0 |
| FEBRA2009986 | 10.719 | 0 | 0 | 0 | 0 | 0 | 0 |
| FEBRA2011090 | 14.472 | 0 | 0 | 0 | 0 | 0 | 0 |
| FEBRA2012120 | 0 | 59.757 | 0 | 0 | 0 | 0 | 0 |
| FEBRA2012181 | 13.767 | 0 | 0 | 0 | 0 | 0 | 0 |
| FEBRA2013699 | 11.935 | 0 | 0 | 0 | 0 | 0 | 0 |
| FEBRA2014010 | 0 | 59.757 | 0 | 0 | 0 | 0 | 0 |
| FEBRA2014213 | 0 | 0 | 0 | 0 | 85.773 | 4.411 | 0 |
| FEBRA2014297 | 1.782 | 0 | 0 | 0 | 0 | 0 | 45.899 |
| FEBRA2014417 | 0.900 | 1.999 | 3.712 | 0 | 0 | 1.210 | 0 |
| FEBRA2014578 | 18.250 | 0 | 0 | 0 | 0 | 0 | 0 |
| FEBRA2015085 | 1.271 | 0 | 0 | 0 | 0 | 0 | 0 |
| FEBRA2016572 | 16.384 | 0 | 0 | 0 | 0 | 0 | 0 |
| FEBRA2017024 | 0 | 35.715 | 0 | 0 | 0 | 0 | 0 |
| FEBRA2017680 | 0 | 35.198 | 0 | 0 | 0 | 0 | 0 |
| FEBRA2018476 | 1.822 | 0 | 0 | 0 | 0 | 1.224 | 0 |
| FEBRA2018746 | 6.236 | 0 | 0 | 0 | 0 | 0 | 0 |
| FEBRA2019242 | 6.765 | 0 | 0 | 0 | 0 | 0 | 0 |
| FEBRA2019663 | 7.263 | 0 | 0 | 0 | 0 | 9.756 | 0 |
| FEBRA2019690 | 0 | 59.757 | 0 | 0 | 0 | 0 | 0 |
| FEBRA2021032 | 8.941 | 0 | 0 | 0 | 0 | 0 | 0 |
| FEBRA2022504 | 1.369 | 0 | 0 | 0 | 0 | 0 | 0 |
| FEBRA2023227 | 4.271 | 0 | 0 | 0 | 0 | 0 | 0 |
| FEBRA2023927 | 6.792 | 0 | 0 | 0 | 0 | 13.687 | 0 |
| FEBRA2024019 | 0 | 9.928 | 0 | 0 | 0 | 0 | 0 |
| FEBRA2024136 | 28.699 | 0 | 0 | 0 | 0 | 0 | 0 |
| FEBRA2025427 | 0 | 0 | 0 | 0 | 0 | 2.777 | 0 |
| FEBRA2025838 | 0.685 | 0 | 5.648 | 0 | 0 | 0 | 0 |
| FEBRA2028158 | 0 | 0 | 0 | 0 | 0 | 31.003 | 0 |
| FEBRA2028516 | 0 | 4.234 | 0 | 0 | 0 | 2.562 | 0 |
| FEKID1000018 | 0 | 14.612 | 0 | 0 | 0 | 0 | 0 |
| FELIV1000101 | 0.259 | 0 | 0 | 0 | 0 | 0 | 0 |
| FELIV1000137 | 0 | 0 | 0 | 0 | 0 | 0.347 | 0 |
| FELIV1000153 | 0 | 0 | 2.268 | 3.413 | 3.592 | 0 | 0 |
| FELIV1000164 | 0 | 0 | 0 | 0 | 0 | 0.651 | 0 |
| HCASM1000115 | 0.864 | 0 | 0 | 0 | 0 | 0 | 0 |
| HCASM2000016 | 2.489 | 2.763 | 0 | 0 | 0 | 3.344 | 0 |
| HCASM2000138 | 3.522 | 0 | 0 | 0 | 0 | 4.731 | 0 |
| HCASM2000363 | 0.567 | 0 | 0 | 0 | 0 | 0 | 0 |
| HCASM2003018 | 7.359 | 0 | 0 | 0 | 0 | 0 | 0 |
| HCASM2005388 | 2.949 | 0 | 0 | 0 | 0 | 3.962 | 0 |
| HCHON1000030 | 1.210 | 2.686 | 1.247 | 0 | 0 | 0.203 | 3.895 |
| HCHON1000166 | 2.508 | 0 | 0 | 0 | 0 | 0 | 0 |
| HCHON2000028 | 1.323 | 5.873 | 0 | 0 | 0 | 0 | 0 |
| HCHON2000056 | 0.709 | 0 | 1.950 | 0 | 0 | 2.224 | 0 |
| HCHON2000062 | 0 | 0 | 0 | 0 | 0 | 4.695 | 0 |
| HCHON2000087 | 0.516 | 0 | 0 | 0 | 0 | 2.772 | 0 |
| HCHON2000160 | 0.839 | 0 | 0 | 0 | 0 | 1.128 | 0 |
| HCHON2000226 | 0 | 0 | 0 | 0 | 0 | 0.903 | 8.660 |
| HCHON2000265 | 1.687 | 0 | 0 | 0 | 0 | 0 | 0 |
| HCHON2000295 | 0 | 3.243 | 0 | 0 | 0 | 0 | 0 |
| HCHON2000323 | 1.545 | 0 | 0 | 0 | 40.348 | 0 | 0 |
| HCHON2000364 | 0 | 0 | 0 | 0 | 0 | 0.498 | 0 |
| HCHON2000473 | 0 | 0 | 0 | 0 | 0 | 13.113 | 0 |
| HCHON2000508 | 2.180 | 1.382 | 0 | 0 | 0 | 0.837 | 0 |
| HCHON2000626 | 0.980 | 0 | 0 | 0 | 0 | 0 | 0 |
| HCHON2000698 | 2.390 | 0 | 0 | 0 | 0 | 3.211 | 0 |
| HCHON2000699 | 11.644 | 0 | 0 | 0 | 0 | 0 | 0 |
| HCHON2000738 | 0 | 0 | 0 | 0 | 0 | 3.335 | 0 |
| HCHON2000743 | 0 | 0 | 0 | 0 | 0 | 13.678 | 0 |
| HCHON2000751 | 8.931 | 0 | 0 | 0 | 0 | 0 | 0 |
| HCHON2000826 | 1.194 | 0 | 0 | 0 | 0 | 2.405 | 0 |
| HCHON2000832 | 0 | 13.096 | 0 | 0 | 0 | 0 | 0 |
| HCHON2001039 | 22.330 | 0 | 0 | 0 | 0 | 6.249 | 0 |
| HCHON2001084 | 1.915 | 0 | 0 | 0 | 0 | 2.572 | 0 |
| HCHON2001200 | 1.443 | 1.601 | 0 | 0 | 0 | 0.484 | 0 |
| HCHON2001217 | 2.604 | 0 | 0 | 0 | 0 | 3.498 | 0 |
| HCHON2001359 | 1.420 | 0 | 0 | 0 | 0 | 0.954 | 0 |
| HCHON2001434 | 3.821 | 0 | 0 | 0 | 0 | 1.711 | 0 |
| HCHON2001665 | 0 | 0 | 0 | 0 | 0 | 5.186 | 0 |
| HCHON2001712 | 11.644 | 0 | 0 | 0 | 0 | 0 | 0 |
| HCHON2001853 | 0 | 0 | 38.504 | 0 | 0 | 0 | 0 |
| HCHON2002247 | 2.341 | 0 | 0 | 0 | 0 | 0 | 0 |
| HCHON2002354 | 10.594 | 0 | 0 | 0 | 0 | 0 | 0 |
| HCHON2002971 | 11.644 | 0 | 0 | 0 | 0 | 0 | 0 |
| HCHON2004002 | 3.273 | 0 | 0 | 0 | 0 | 3.518 | 0 |
| HCHON2005987 | 0 | 36.909 | 0 | 0 | 0 | 0 | 0 |
| HCHON2006250 | 0 | 0 | 0 | 32.381 | 0 | 0 | 0 |
| HCHON2006459 | 0 | 0 | 0 | 0 | 0 | 12.090 | 0 |
| HCHON2007650 | 5.078 | 0 | 0 | 0 | 0 | 0 | 0 |
| HCHON2008856 | 0 | 36.909 | 0 | 0 | 0 | 0 | 0 |
| HEART1000074 | 3.165 | 0 | 0 | 0 | 0 | 0.850 | 0 |
| HEART1000149 | 0 | 3.476 | 0 | 0 | 0 | 1.052 | 0 |
| HEART2000506 | 0 | 0 | 0 | 0 | 0 | 1.964 | 0 |
| HEART2006195 | 0 | 0 | 0 | 0 | 0 | 10.616 | 0 |
| HEART2006521 | 0 | 0 | 0 | 0 | 0 | 2.679 | 0 |
| HEART2007231 | 8.078 | 0 | 0 | 0 | 0 | 0 | 0 |
| HHDPC1000065 | 7.625 | 0 | 0 | 0 | 0 | 0 | 0 |
| HHDPC1000083 | 0.816 | 0 | 0 | 0 | 0 | 0 | 0 |
| HHDPC1000163 | 0 | 0 | 8.646 | 0 | 0 | 0 | 0 |
| HHDPC2000055 | 0 | 0 | 0 | 0 | 39.829 | 2.048 | 0 |
| HHDPC2000070 | 8.024 | 0 | 0 | 0 | 0 | 0 | 0 |
| HHDPC2000104 | 0 | 0 | 0 | 0 | 0 | 2.072 | 0 |
| HHDPC2000149 | 3.726 | 0 | 0 | 0 | 0 | 0 | 0 |
| HHDPC2000455 | 0.458 | 0 | 0 | 0 | 0 | 1.231 | 0 |
| HHDPC2000456 | 1.295 | 0 | 0 | 0 | 0 | 3.478 | 0 |
| HHDPC2000572 | 0 | 0 | 0 | 0 | 0 | 22.001 | 0 |
| HHDPC2003439 | 0.424 | 0 | 0 | 0 | 0 | 0.285 | 0 |
| HHDPC2003983 | 0.929 | 1.031 | 3.829 | 0 | 0 | 0.936 | 0 |
| HHDPC2005742 | 10.588 | 0 | 0 | 0 | 0 | 0 | 0 |
| HHDPC2007267 | 0 | 0 | 0 | 0 | 10.634 | 3.828 | 0 |
| HHDPC2008123 | 10.588 | 0 | 0 | 0 | 0 | 0 | 0 |
| HHDPC2009272 | 0 | 0 | 0 | 0 | 0 | 13.725 | 0 |
| HLUNG1000037 | 0 | 0 | 0 | 0 | 0 | 9.843 | 0 |
| HLUNG1000055 | 4.062 | 2.004 | 3.721 | 0 | 0 | 0.606 | 11.625 |
| HLUNG1000076 | 0.701 | 0 | 0 | 0 | 0 | 0 | 0 |
| HLUNG1000099 | 0 | 0 | 0 | 0 | 0 | 12.090 | 0 |
| HLUNG2000004 | 0 | 0 | 0 | 0 | 0 | 5.667 | 0 |
| HLUNG2000063 | 4.113 | 0 | 0 | 0 | 0 | 0 | 0 |
| HLUNG2000125 | 0 | 0 | 0 | 73.829 | 0 | 0 | 0 |
| HLUNG2000176 | 18.523 | 0 | 0 | 0 | 0 | 0 | 0 |
| HLUNG2000412 | 8.931 | 0 | 0 | 0 | 0 | 2.999 | 0 |
| HLUNG2000751 | 0 | 0 | 0 | 0 | 0 | 19.353 | 0 |
| HLUNG2000846 | 0 | 0 | 0 | 0 | 0 | 5.061 | 0 |
| HLUNG2000884 | 0 | 0 | 0 | 0 | 0 | 2.398 | 0 |
| HLUNG2000950 | 10.309 | 0 | 0 | 0 | 0 | 0 | 0 |
| HLUNG2001146 | 0 | 0 | 0 | 0 | 0 | 11.743 | 0 |
| HLUNG2001439 | 2.206 | 0 | 0 | 0 | 0 | 0 | 0 |
| HLUNG2001518 | 6.383 | 0 | 0 | 0 | 0 | 4.899 | 0 |
| HLUNG2001633 | 0 | 0 | 0 | 0 | 0 | 17.937 | 0 |
| HLUNG2001677 | 0 | 0 | 0 | 0 | 76.536 | 0 | 0 |
| HLUNG2001712 | 2.749 | 0 | 0 | 0 | 0 | 0 | 0 |
| HLUNG2002059 | 0 | 0 | 0 | 0 | 0 | 12.273 | 0 |
| HLUNG2002465 | 0 | 0 | 0 | 0 | 0 | 1.355 | 0 |
| HLUNG2002648 | 6.028 | 0 | 0 | 0 | 0 | 0 | 0 |
| HLUNG2003003 | 6.664 | 0 | 0 | 0 | 0 | 0 | 0 |
| HLUNG2003042 | 0 | 0 | 0 | 0 | 0 | 2.666 | 0 |
| HLUNG2003306 | 0 | 0 | 0 | 0 | 0 | 14.343 | 0 |
| HLUNG2003378 | 0 | 0 | 0 | 0 | 0 | 10.370 | 0 |
| HLUNG2003497 | 18.523 | 0 | 0 | 0 | 0 | 0 | 0 |
| HLUNG2004154 | 0 | 0 | 0 | 0 | 0 | 23.297 | 0 |
| HLUNG2004159 | 3.024 | 0 | 0 | 0 | 0 | 6.092 | 0 |
| HLUNG2004534 | 0 | 0 | 0 | 0 | 0 | 3.249 | 0 |
| HLUNG2005203 | 0 | 0 | 0 | 0 | 0 | 23.395 | 0 |
| HLUNG2006370 | 10.207 | 0 | 0 | 0 | 0 | 0 | 0 |
| HLUNG2006570 | 0 | 0 | 0 | 0 | 0 | 21.718 | 0 |
| HLUNG2006812 | 2.466 | 0 | 0 | 0 | 0 | 6.624 | 0 |
| HLUNG2007219 | 18.523 | 0 | 0 | 0 | 0 | 0 | 0 |
| HLUNG2008153 | 5.676 | 0 | 0 | 0 | 0 | 0 | 0 |
| HLUNG2008637 | 1.409 | 0 | 11.613 | 0 | 0 | 0 | 0 |
| HLUNG2009225 | 5.030 | 0 | 10.368 | 0 | 0 | 1.689 | 0 |
| HLUNG2011833 | 0 | 0 | 0 | 84.945 | 0 | 0 | 0 |
| HLUNG2014821 | 0 | 0 | 0 | 0 | 0 | 37.919 | 0 |
| HLUNG2015184 | 21.837 | 0 | 0 | 0 | 0 | 0 | 0 |
| HLUNG2015418 | 0 | 0 | 0 | 0 | 0 | 23.395 | 0 |
| HLUNG2017262 | 1.322 | 0 | 0 | 0 | 0 | 7.105 | 0 |
| HLUNG2017546 | 2.943 | 0 | 0 | 0 | 0 | 0 | 0 |
| HSYRA1000062 | 0.714 | 0 | 0 | 0 | 9.330 | 0.960 | 0 |
| HSYRA1000119 | 1.150 | 0 | 0 | 0 | 10.015 | 0.515 | 0 |
| HSYRA1000152 | 0 | 0 | 0 | 0 | 0 | 1.336 | 25.615 |
| HSYRA1000178 | 0 | 0 | 0 | 0 | 0 | 16.852 | 0 |
| HSYRA2000044 | 10.037 | 0 | 0 | 0 | 0 | 0 | 0 |
| HSYRA2000159 | 0.402 | 3.124 | 0.829 | 0 | 0 | 1.350 | 2.589 |
| HSYRA2000224 | 1.499 | 0 | 0 | 0 | 0 | 2.014 | 0 |
| HSYRA2000232 | 1.233 | 0 | 0 | 0 | 0 | 0 | 0 |
| HSYRA2000248 | 0.567 | 2.516 | 0 | 0 | 0 | 0.761 | 0 |
| HSYRA2000253 | 7.045 | 0 | 0 | 0 | 0 | 0 | 0 |
| HSYRA2000255 | 0 | 0 | 0 | 0 | 0 | 1.005 | 0 |
| HSYRA2000424 | 0 | 0 | 0 | 0 | 0 | 13.033 | 0 |
| HSYRA2000629 | 2.783 | 12.354 | 0 | 0 | 0 | 0 | 0 |
| HSYRA2000640 | 2.841 | 6.307 | 0 | 0 | 0 | 4.771 | 0 |
| HSYRA2000743 | 10.325 | 2.865 | 0 | 0 | 0 | 1.734 | 0 |
| HSYRA2000787 | 2.594 | 0 | 0 | 0 | 0 | 3.484 | 0 |
| HSYRA2000828 | 1.188 | 5.274 | 0 | 0 | 0 | 1.596 | 0 |
| HSYRA2000925 | 0.924 | 0 | 0 | 0 | 0 | 0 | 0 |
| HSYRA2001103 | 0 | 0 | 5.831 | 0 | 0 | 1.900 | 36.429 |
| HSYRA2001105 | 2.297 | 0 | 0 | 0 | 0 | 3.086 | 0 |
| HSYRA2001138 | 0.213 | 3.775 | 0 | 0 | 0 | 1.142 | 0 |
| HSYRA2001225 | 0.616 | 0 | 0 | 0 | 0 | 0 | 0 |
| HSYRA2001353 | 0 | 37.564 | 0 | 0 | 0 | 0 | 0 |
| HSYRA2001396 | 2.534 | 0 | 0 | 0 | 33.091 | 0 | 0 |
| HSYRA2001420 | 0 | 0 | 0 | 0 | 0 | 6.241 | 0 |
| HSYRA2001476 | 1.208 | 0 | 3.319 | 0 | 0 | 2.704 | 0 |
| HSYRA2001567 | 3.737 | 0 | 0 | 0 | 0 | 2.510 | 0 |
| HSYRA2001595 | 2.375 | 2.109 | 0 | 0 | 12.408 | 0.638 | 0 |
| HSYRA2001621 | 0 | 2.038 | 0 | 0 | 0 | 0.411 | 3.941 |
| HSYRA2001638 | 5.658 | 0 | 0 | 0 | 0 | 0 | 0 |
| HSYRA2001983 | 0 | 17.866 | 0 | 0 | 0 | 0 | 0 |
| IMR321000161 | 19.114 | 0 | 0 | 0 | 0 | 0 | 0 |
| IMR321000210 | 0 | 3.752 | 0 | 0 | 0 | 0 | 0 |
| IMR321000219 | 1.170 | 1.039 | 0 | 0 | 0 | 1.886 | 0 |
| IMR321000253 | 0 | 0 | 0 | 0 | 0 | 1.141 | 0 |
| IMR321000266 | 0 | 0 | 0 | 0 | 0 | 6.340 | 0 |
| IMR322000121 | 0 | 4.126 | 0 | 0 | 0 | 0 | 0 |
| IMR322000127 | 3.875 | 0 | 0 | 0 | 0 | 0 | 0 |
| IMR322000178 | 1.551 | 0 | 0 | 0 | 0 | 0 | 0 |
| IMR322000223 | 0.568 | 0 | 0 | 0 | 0 | 0.763 | 0 |
| IMR322000243 | 1.431 | 0 | 0 | 0 | 0 | 2.883 | 0 |
| IMR322000316 | 0 | 1.536 | 0 | 0 | 0 | 0.465 | 0 |
| IMR322000374 | 0 | 0 | 0 | 0 | 0 | 6.170 | 0 |
| IMR322000730 | 0.229 | 0 | 1.885 | 2.836 | 2.985 | 0.154 | 5.887 |
| IMR322000918 | 2.444 | 0 | 0 | 0 | 0 | 0 | 0 |
| IMR322000935 | 0 | 5.542 | 0 | 0 | 0 | 1.677 | 0 |
| IMR322000973 | 0.672 | 0 | 0 | 0 | 0 | 0 | 0 |
| IMR322001435 | 2.350 | 0 | 0 | 0 | 0 | 1.052 | 0 |
| IMR322001541 | 2.821 | 0 | 0 | 0 | 0 | 0 | 0 |
| IMR322001584 | 3.123 | 0 | 0 | 0 | 0 | 0 | 0 |
| IMR322001600 | 0.134 | 0 | 0 | 0 | 0 | 0.180 | 6.916 |
| IMR322001710 | 1.617 | 0 | 0 | 0 | 0 | 4.345 | 0 |
| IMR322013805 | 11.264 | 0 | 0 | 0 | 0 | 0 | 0 |
| IMR322019070 | 4.462 | 0 | 0 | 0 | 0 | 5.994 | 0 |
| JCMLC2000273 | 2.577 | 0 | 0 | 0 | 0 | 0 | 0 |
| KIDNE1000104 | 13.829 | 0 | 0 | 0 | 0 | 0 | 0 |
| KIDNE1000145 | 9.224 | 0 | 0 | 0 | 0 | 0 | 0 |
| KIDNE2000085 | 4.287 | 0 | 7.070 | 0 | 0 | 1.152 | 0 |
| KIDNE2000252 | 0.713 | 0 | 0 | 0 | 0 | 0.957 | 0 |
| KIDNE2000266 | 10.533 | 0 | 0 | 0 | 0 | 0 | 0 |
| KIDNE2000349 | 0 | 2.341 | 0 | 0 | 0 | 0 | 0 |
| KIDNE2000383 | 4.107 | 0 | 0 | 0 | 0 | 11.033 | 0 |
| KIDNE2000403 | 2.755 | 0 | 0 | 0 | 0 | 2.776 | 0 |
| KIDNE2000517 | 0 | 5.797 | 0 | 0 | 0 | 0 | 0 |
| KIDNE2000574 | 0 | 2.771 | 0 | 0 | 0 | 0 | 0 |
| KIDNE2000947 | 2.107 | 0 | 0 | 0 | 0 | 0 | 0 |
| KIDNE2001162 | 0.778 | 0 | 3.209 | 0 | 0 | 0.523 | 10.024 |
| KIDNE2001361 | 19.301 | 0 | 0 | 0 | 0 | 0 | 0 |
| KIDNE2001467 | 0.869 | 0 | 0 | 0 | 0 | 2.920 | 0 |
| KIDNE2001636 | 11.821 | 0 | 0 | 0 | 0 | 0 | 0 |
| KIDNE2001713 | 0 | 0 | 0 | 0 | 0 | 17.356 | 0 |
| KIDNE2001847 | 0 | 0 | 0 | 0 | 0 | 0 | 78.156 |
| KIDNE2002252 | 1.818 | 0 | 0 | 0 | 0 | 7.325 | 0 |
| KIDNE2002725 | 0 | 0 | 0 | 0 | 0 | 11.525 | 0 |
| KIDNE2002883 | 1.891 | 0 | 0 | 0 | 0 | 0 | 0 |
| KIDNE2003305 | 2.807 | 0 | 11.573 | 0 | 0 | 0 | 0 |
| KIDNE2003316 | 6.309 | 0 | 0 | 0 | 0 | 0 | 0 |
| KIDNE2003357 | 0 | 0 | 0 | 0 | 0 | 16.562 | 0 |
| KIDNE2003373 | 0 | 0 | 0 | 0 | 0 | 17.356 | 0 |
| KIDNE2003941 | 0 | 3.734 | 0 | 0 | 0 | 1.130 | 0 |
| KIDNE2003994 | 0 | 0 | 0 | 0 | 0 | 9.032 | 0 |
| KIDNE2004295 | 10.647 | 0 | 0 | 0 | 0 | 0 | 0 |
| KIDNE2004344 | 19.301 | 0 | 0 | 0 | 0 | 0 | 0 |
| KIDNE2004411 | 0 | 0 | 0 | 0 | 0 | 9.545 | 0 |
| KIDNE2004475 | 2.146 | 9.528 | 0 | 0 | 0 | 0 | 0 |
| KIDNE2004531 | 19.301 | 0 | 0 | 0 | 0 | 0 | 0 |
| KIDNE2004534 | 3.112 | 0 | 25.661 | 0 | 0 | 0 | 0 |
| KIDNE2004864 | 8.141 | 0 | 0 | 0 | 0 | 0 | 0 |
| KIDNE2005676 | 1.173 | 0 | 0 | 0 | 0 | 4.728 | 0 |
| KIDNE2006009 | 0 | 0 | 0 | 0 | 0 | 4.130 | 0 |
| KIDNE2006014 | 0 | 0 | 0 | 0 | 0 | 3.326 | 0 |
| KIDNE2006248 | 0 | 1.151 | 2.138 | 0 | 6.772 | 0 | 0 |
| KIDNE2006353 | 65.219 | 0 | 0 | 0 | 0 | 0 | 0 |
| KIDNE2006465 | 0 | 11.454 | 0 | 0 | 0 | 0 | 0 |
| KIDNE2006652 | 0 | 0 | 0 | 0 | 0 | 9.674 | 0 |
| KIDNE2006775 | 3.055 | 0 | 0 | 0 | 0 | 0 | 0 |
| KIDNE2006811 | 0 | 0 | 0 | 0 | 0 | 3.645 | 0 |
| KIDNE2006880 | 2.677 | 0 | 0 | 0 | 0 | 0 | 0 |
| KIDNE2007328 | 7.377 | 0 | 0 | 0 | 0 | 7.928 | 0 |
| KIDNE2007352 | 0.693 | 1.539 | 0 | 0 | 0 | 0 | 0 |
| KIDNE2007954 | 5.273 | 0 | 0 | 0 | 0 | 2.361 | 0 |
| KIDNE2008048 | 3.131 | 0 | 0 | 0 | 0 | 3.605 | 0 |
| KIDNE2008403 | 0 | 0 | 0 | 0 | 0 | 10.663 | 0 |
| KIDNE2008987 | 0 | 0 | 0 | 0 | 62.744 | 0 | 0 |
| KIDNE2009367 | 0.628 | 2.790 | 0 | 0 | 0 | 2.533 | 0 |
| KIDNE2009605 | 12.593 | 0 | 0 | 0 | 0 | 0 | 0 |
| KIDNE2010049 | 0 | 0 | 0 | 0 | 0 | 3.851 | 0 |
| KIDNE2011635 | 0 | 51.498 | 0 | 0 | 0 | 0 | 0 |
| KIDNE2012440 | 1.476 | 0 | 0 | 0 | 0 | 0 | 0 |
| KIDNE2012710 | 0 | 0 | 0 | 0 | 0 | 21.213 | 0 |
| KIDNE2013158 | 15.126 | 0 | 0 | 0 | 0 | 0 | 0 |
| KIDNE2013845 | 6.524 | 0 | 0 | 0 | 0 | 5.008 | 0 |
| KIDNE2014290 | 2.923 | 0 | 0 | 0 | 0 | 2.356 | 0 |
| KIDNE2014325 | 6.309 | 0 | 0 | 0 | 0 | 0 | 0 |
| KIDNE2014808 | 0 | 0 | 0 | 0 | 0 | 24.317 | 0 |
| KIDNE2015445 | 0 | 0 | 23.619 | 0 | 0 | 0 | 0 |
| KIDNE2015546 | 0 | 51.498 | 0 | 0 | 0 | 0 | 0 |
| KIDNE2015598 | 19.301 | 0 | 0 | 0 | 0 | 0 | 0 |
| KIDNE2016327 | 0 | 0 | 0 | 0 | 0 | 19.599 | 0 |
| KIDNE2016371 | 7.513 | 0 | 0 | 0 | 0 | 0 | 0 |
| KIDNE2017040 | 2.804 | 0 | 0 | 0 | 0 | 0 | 0 |
| KIDNE2017052 | 19.301 | 0 | 0 | 0 | 0 | 0 | 0 |
| KIDNE2018352 | 0 | 0 | 24.516 | 0 | 0 | 0 | 0 |
| KIDNE2018493 | 8.914 | 0 | 0 | 0 | 0 | 0 | 0 |
| KIDNE2018891 | 10.170 | 0 | 0 | 0 | 0 | 6.831 | 0 |
| LIVER1000017 | 0 | 0 | 19.417 | 0 | 0 | 0 | 0 |
| LIVER1000067 | 0 | 0 | 9.545 | 0 | 0 | 0 | 0 |
| LIVER1000079 | 0 | 0 | 12.046 | 0 | 0 | 1.963 | 0 |
| LIVER1000104 | 0 | 0 | 7.084 | 0 | 0 | 0 | 0 |
| LIVER1000111 | 0 | 23.377 | 0 | 0 | 0 | 0 | 0 |
| LIVER1000132 | 0.835 | 0 | 0 | 0 | 0 | 0 | 0 |
| LIVER1000230 | 0 | 0 | 0 | 0 | 0 | 6.496 | 0 |
| LIVER1000303 | 22.395 | 0 | 0 | 0 | 0 | 0 | 0 |
| LIVER2000037 | 0 | 0 | 7.394 | 0 | 0 | 0 | 0 |
| LIVER2001539 | 4.152 | 0 | 0 | 0 | 0 | 0 | 0 |
| LIVER2001608 | 1.095 | 0 | 9.029 | 0 | 0 | 1.471 | 0 |
| LIVER2002842 | 3.184 | 0 | 0 | 0 | 0 | 2.138 | 0 |
| LIVER2003065 | 0 | 0 | 44.231 | 0 | 0 | 0 | 0 |
| LIVER2004514 | 0 | 0 | 0 | 0 | 0 | 11.443 | 0 |
| LIVER2005789 | 0 | 0 | 6.189 | 0 | 0 | 0 | 0 |
| LIVER2006006 | 0 | 0 | 4.889 | 0 | 0 | 0 | 0 |
| LIVER2007783 | 0 | 7.595 | 0 | 0 | 0 | 0 | 0 |
| LIVER2008706 | 0 | 0 | 61.334 | 0 | 0 | 0 | 0 |
| MAMGL1000017 | 0.254 | 0 | 0 | 0 | 0 | 0 | 0 |
| MAMGL1000032 | 0 | 0 | 0 | 0 | 7.019 | 0 | 0 |
| MAMGL1000035 | 0.504 | 0 | 1.384 | 0 | 0 | 0 | 0 |
| MAMGL1000083 | 0 | 0 | 0 | 0 | 0 | 4.867 | 0 |
| MAMGL1000173 | 0.221 | 0 | 0 | 0 | 0 | 0.297 | 0 |
| MAMGL1000178 | 0.255 | 0 | 0 | 0 | 0 | 0 | 0 |
| MESAN1000050 | 0 | 5.942 | 0 | 0 | 0 | 5.395 | 0 |
| MESAN1000079 | 0 | 0 | 0 | 0 | 0 | 16.100 | 0 |
| MESAN1000101 | 4.813 | 0 | 0 | 0 | 0 | 6.465 | 0 |
| MESAN1000126 | 1.489 | 0 | 0 | 0 | 0 | 2.000 | 0 |
| MESAN2000092 | 0 | 0 | 0 | 0 | 0 | 9.912 | 0 |
| MESAN2000149 | 2.048 | 0 | 0 | 0 | 0 | 2.752 | 0 |
| MESAN2000267 | 1.366 | 0 | 0 | 0 | 0 | 0.459 | 0 |
| MESAN2000572 | 12.788 | 0 | 7.029 | 0 | 0 | 2.290 | 0 |
| MESAN2000608 | 0.656 | 2.911 | 0 | 0 | 0 | 0 | 0 |
| MESAN2000815 | 13.020 | 0 | 0 | 0 | 0 | 0 | 0 |
| MESAN2001450 | 0 | 0 | 0 | 59.680 | 0 | 0 | 0 |
| MESAN2001627 | 0 | 0 | 0 | 0 | 0 | 14.651 | 0 |
| MESAN2002086 | 0.694 | 1.541 | 0 | 0 | 0 | 1.865 | 0 |
| MESAN2002724 | 0 | 0 | 0 | 0 | 0 | 1.033 | 0 |
| MESAN2002790 | 4.079 | 0 | 0 | 0 | 0 | 0 | 0 |
| MESAN2002940 | 0 | 0 | 0 | 0 | 0 | 3.562 | 0 |
| MESAN2003035 | 11.952 | 0 | 0 | 0 | 0 | 0 | 0 |
| MESAN2003058 | 14.982 | 0 | 0 | 0 | 0 | 0 | 0 |
| MESAN2003190 | 14.756 | 0 | 0 | 0 | 0 | 0 | 0 |
| MESAN2003444 | 6.212 | 0 | 0 | 0 | 0 | 0 | 0 |
| MESAN2003622 | 0.501 | 0 | 4.132 | 0 | 0 | 0 | 0 |
| MESAN2005284 | 4.043 | 0 | 0 | 0 | 0 | 5.432 | 0 |
| MESAN2005303 | 0 | 29.326 | 0 | 0 | 0 | 17.748 | 0 |
| MESAN2005633 | 14.314 | 0 | 0 | 0 | 0 | 0 | 0 |
| MESAN2005689 | 2.587 | 0 | 0 | 0 | 0 | 0 | 0 |
| MESAN2005766 | 3.289 | 0 | 0 | 0 | 0 | 2.209 | 0 |
| MESAN2005957 | 0 | 0 | 0 | 0 | 0 | 11.061 | 0 |
| MESAN2005958 | 6.737 | 0 | 0 | 0 | 0 | 0 | 0 |
| MESAN2006401 | 1.508 | 0 | 0 | 0 | 0 | 2.026 | 0 |
| MESAN2006563 | 1.727 | 0 | 0 | 0 | 0 | 0 | 0 |
| MESAN2007755 | 0 | 33.863 | 0 | 0 | 0 | 0 | 0 |
| MESAN2008926 | 2.662 | 0 | 0 | 0 | 0 | 0 | 0 |
| MESAN2008936 | 3.317 | 0 | 0 | 0 | 0 | 4.456 | 0 |
| MESAN2009580 | 0.926 | 0 | 0 | 0 | 0 | 0 | 23.850 |
| MESAN2010664 | 0 | 32.125 | 0 | 0 | 0 | 0 | 0 |
| MESAN2011984 | 7.113 | 0 | 0 | 0 | 0 | 0 | 0 |
| MESAN2012054 | 2.127 | 0 | 0 | 0 | 0 | 0 | 0 |
| MESAN2013284 | 6.145 | 0 | 0 | 0 | 0 | 0 | 0 |
| MESAN2013908 | 5.753 | 0 | 0 | 0 | 0 | 0 | 0 |
| MESAN2014192 | 18.359 | 0 | 0 | 0 | 0 | 0 | 0 |
| MESAN2014412 | 16.049 | 0 | 0 | 0 | 0 | 0 | 0 |
| MESAN2016552 | 10.145 | 0 | 0 | 0 | 0 | 0 | 0 |
| MESAN2017133 | 7.316 | 0 | 0 | 0 | 0 | 0 | 0 |
| N1ESE2000698 | 3.542 | 0 | 0 | 0 | 0 | 0 | 0 |
| NB9N41000121 | 0.626 | 0 | 0 | 0 | 0 | 0 | 0 |
| NB9N41000340 | 0 | 0 | 0 | 0 | 0 | 1.625 | 0 |
| NB9N42000104 | 1.382 | 0 | 0 | 0 | 0 | 0.929 | 0 |
| NESOP2000504 | 3.771 | 0 | 0 | 0 | 0 | 0 | 0 |
| NESOP2001656 | 0 | 14.819 | 0 | 0 | 0 | 0 | 0 |
| NHNPC2000062 | 1.747 | 0 | 0 | 0 | 0 | 0 | 0 |
| NHNPC2000206 | 4.581 | 0 | 0 | 0 | 0 | 0 | 0 |
| NOVAR1000015 | 2.532 | 0 | 0 | 0 | 0 | 0 | 0 |
| NOVAR1000091 | 1.615 | 0 | 0 | 0 | 0 | 2.169 | 0 |
| NOVAR2000038 | 0.518 | 2.299 | 0 | 0 | 0 | 0.696 | 0 |
| NOVAR2000710 | 0 | 0 | 0 | 0 | 0 | 11.838 | 0 |
| NOVAR2002039 | 3.380 | 0 | 0 | 0 | 0 | 0 | 0 |
| NT2NE1000014 | 7.248 | 0 | 0 | 0 | 0 | 9.737 | 0 |
| NT2NE1000122 | 18.705 | 0 | 0 | 0 | 0 | 0 | 0 |
| NT2NE1000163 | 0.338 | 0 | 0 | 0 | 0 | 2.269 | 0 |
| NT2NE1000181 | 15.221 | 0 | 0 | 0 | 0 | 0 | 0 |
| NT2NE2000056 | 0.983 | 2.908 | 0 | 0 | 0 | 4.840 | 0 |
| NT2NE2000174 | 0 | 0 | 0 | 0 | 0 | 0 | 8.195 |
| NT2NE2000195 | 0 | 5.690 | 10.568 | 0 | 0 | 0 | 0 |
| NT2NE2000260 | 0 | 0.447 | 2.491 | 0 | 0 | 0 | 5.189 |
| NT2NE2000356 | 18.705 | 0 | 0 | 0 | 0 | 0 | 0 |
| NT2NE2000383 | 3.801 | 0 | 0 | 0 | 0 | 5.106 | 0 |
| NT2NE2000384 | 1.919 | 0 | 0 | 0 | 0 | 5.156 | 0 |
| NT2NE2000392 | 0 | 3.305 | 0 | 0 | 0 | 0 | 0 |
| NT2NE2000470 | 4.550 | 0 | 0 | 0 | 0 | 0 | 0 |
| NT2NE2000536 | 0 | 0 | 59.169 | 0 | 0 | 9.640 | 0 |
| NT2NE2000575 | 2.205 | 3.559 | 1.653 | 0 | 0 | 0.808 | 0 |
| NT2NE2000707 | 0.837 | 6.194 | 0 | 0 | 0 | 3.748 | 0 |
| NT2NE2000763 | 7.005 | 8.885 | 0 | 0 | 0 | 0 | 0 |
| NT2NE2000809 | 8.479 | 0 | 0 | 0 | 0 | 0 | 0 |
| NT2NE2000909 | 0 | 12.117 | 0 | 0 | 0 | 0 | 0 |
| NT2NE2000950 | 4.370 | 19.401 | 0 | 0 | 0 | 0 | 0 |
| NT2NE2000963 | 0.191 | 0 | 0 | 0 | 4.997 | 0 | 0 |
| NT2NE2001000 | 0.718 | 0 | 0 | 0 | 0 | 0 | 0 |
| NT2NE2001048 | 1.248 | 0 | 0 | 0 | 0 | 1.677 | 0 |
| NT2NE2001326 | 0 | 0 | 0 | 0 | 0 | 23.610 | 0 |
| NT2NE2001403 | 4.326 | 0 | 0 | 0 | 0 | 0 | 0 |
| NT2NE2001435 | 7.978 | 0 | 0 | 0 | 0 | 0 | 0 |
| NT2NE2001545 | 5.976 | 0 | 0 | 0 | 0 | 2.007 | 0 |
| NT2NE2001617 | 0 | 0 | 0 | 0 | 0 | 5.082 | 0 |
| NT2NE2001648 | 0 | 32.127 | 0 | 0 | 0 | 0 | 0 |
| NT2NE2001655 | 0 | 5.182 | 0 | 0 | 0 | 1.568 | 0 |
| NT2NE2001660 | 0 | 28.992 | 0 | 0 | 0 | 8.773 | 0 |
| NT2NE2001793 | 0.865 | 0 | 0 | 0 | 0 | 4.647 | 0 |
| NT2NE2002100 | 18.705 | 0 | 0 | 0 | 0 | 0 | 0 |
| NT2NE2002162 | 10.194 | 0 | 0 | 0 | 0 | 0 | 0 |
| NT2NE2003485 | 1.941 | 0 | 0 | 0 | 0 | 5.215 | 0 |
| NT2NE2003569 | 0 | 0 | 0 | 0 | 0 | 1.944 | 0 |
| NT2NE2003887 | 5.204 | 0 | 0 | 0 | 0 | 0 | 0 |
| NT2NE2004255 | 0 | 0 | 0 | 0 | 0 | 6.672 | 0 |
| NT2NE2004740 | 0 | 0 | 0 | 0 | 0 | 23.610 | 0 |
| NT2NE2005317 | 0 | 0 | 0 | 0 | 0 | 14.244 | 0 |
| NT2NE2005323 | 18.705 | 0 | 0 | 0 | 0 | 0 | 0 |
| NT2NE2005371 | 9.195 | 0 | 0 | 0 | 0 | 0 | 0 |
| NT2NE2005688 | 0 | 0 | 0 | 0 | 0 | 0.836 | 0 |
| NT2NE2005876 | 0 | 5.460 | 0 | 0 | 0 | 0 | 0 |
| NT2NE2006458 | 0 | 0 | 0 | 0 | 30.788 | 0 | 0 |
| NT2NE2006478 | 0 | 0 | 0 | 0 | 0 | 12.036 | 0 |
| NT2NE2006909 | 0.238 | 0 | 0 | 0 | 0 | 0.320 | 0 |
| NT2NE2007786 | 0 | 0 | 0 | 0 | 0 | 0 | 85.561 |
| NT2NE2010842 | 3.145 | 0 | 0 | 0 | 0 | 3.168 | 0 |
| NT2NE2011107 | 10.028 | 0 | 0 | 0 | 0 | 0 | 0 |
| NT2NE2011119 | 0 | 0 | 0 | 0 | 0 | 5.187 | 0 |
| NT2NE2012505 | 0 | 0 | 0 | 0 | 0 | 20.538 | 0 |
| NT2NE2014113 | 0 | 33.588 | 0 | 0 | 0 | 0 | 0 |
| NT2NE2015262 | 18.705 | 0 | 0 | 0 | 0 | 0 | 0 |
| NT2NE2015362 | 0 | 0 | 0 | 0 | 0 | 20.538 | 0 |
| NT2NE2015974 | 6.370 | 0 | 0 | 0 | 0 | 0 | 0 |
| NT2NE2018180 | 3.135 | 0 | 0 | 0 | 0 | 0 | 0 |
| NT2NE2019091 | 0 | 21.023 | 0 | 0 | 0 | 0 | 0 |
| NT2RI1000016 | 0 | 0 | 0 | 0 | 0 | 28.303 | 0 |
| NT2RI1000027 | 1.686 | 0 | 0 | 0 | 0 | 0 | 0 |
| NT2RI1000048 | 2.124 | 0 | 0 | 0 | 0 | 0 | 0 |
| NT2RI1000127 | 0 | 0 | 0 | 0 | 0 | 2.033 | 0 |
| NT2RI2000064 | 0.449 | 0 | 0 | 0 | 0 | 0.603 | 0 |
| NT2RI2000107 | 3.863 | 0 | 0 | 0 | 0 | 5.189 | 0 |
| NT2RI2000116 | 0 | 2.153 | 0 | 0 | 0 | 0 | 0 |
| NT2RI2000167 | 0 | 42.766 | 0 | 0 | 0 | 0 | 0 |
| NT2RI2000255 | 0 | 4.431 | 0 | 0 | 0 | 0 | 0 |
| NT2RI2000263 | 0 | 0 | 0 | 0 | 37.259 | 1.916 | 0 |
| NT2RI2000282 | 0 | 0 | 0 | 0 | 0 | 0.355 | 0 |
| NT2RI2000284 | 0 | 3.375 | 0 | 0 | 0 | 0 | 9.790 |
| NT2RI2000294 | 0 | 0 | 0 | 0 | 41.225 | 0 | 0 |
| NT2RI2000348 | 7.389 | 0 | 0 | 0 | 0 | 0 | 0 |
| NT2RI2000412 | 6.427 | 0 | 0 | 0 | 0 | 0 | 0 |
| NT2RI2000578 | 0 | 1.238 | 0 | 0 | 0 | 0 | 0 |
| NT2RI2000671 | 0.877 | 0 | 0 | 0 | 0 | 1.178 | 0 |
| NT2RI2000685 | 5.783 | 0 | 0 | 0 | 0 | 0 | 0 |
| NT2RI2000727 | 0 | 2.873 | 0 | 0 | 0 | 0.290 | 5.556 |
| NT2RI2000775 | 0 | 0 | 0 | 0 | 0 | 19.103 | 0 |
| NT2RI2000822 | 8.883 | 0 | 0 | 0 | 0 | 0 | 0 |
| NT2RI2000829 | 0 | 28.277 | 0 | 0 | 0 | 0 | 0 |
| NT2RI2000974 | 0 | 0 | 0 | 0 | 0 | 2.416 | 0 |
| NT2RI2001010 | 31.453 | 0 | 0 | 0 | 0 | 0 | 0 |
| NT2RI2001342 | 1.316 | 0 | 0 | 0 | 0 | 0 | 0 |
| NT2RI2001422 | 0 | 13.761 | 0 | 0 | 0 | 0 | 0 |
| NT2RI2001540 | 0.997 | 0 | 0.783 | 0 | 6.200 | 0.255 | 1.223 |
| NT2RI2001657 | 4.015 | 0 | 0 | 0 | 0 | 0 | 0 |
| NT2RI2001726 | 8.805 | 0 | 0 | 0 | 0 | 0 | 0 |
| NT2RI2001731 | 3.158 | 0 | 0 | 0 | 0 | 0 | 0 |
| NT2RI2001846 | 0 | 0 | 0 | 0 | 0 | 11.040 | 0 |
| NT2RI2001859 | 4.855 | 0 | 0 | 0 | 0 | 0 | 0 |
| NT2RI2001866 | 12.100 | 0 | 0 | 0 | 0 | 16.255 | 0 |
| NT2RI2001910 | 6.228 | 0 | 0 | 0 | 0 | 0 | 0 |
| NT2RI2002091 | 0.157 | 0.099 | 0.553 | 1.110 | 0.876 | 0.346 | 0.576 |
| NT2RI2002152 | 0 | 4.655 | 0 | 0 | 0 | 0 | 0 |
| NT2RI2002316 | 0.669 | 0 | 0 | 0 | 0 | 3.592 | 0 |
| NT2RI2002391 | 0 | 0 | 0 | 0 | 0 | 1.817 | 0 |
| NT2RI2002540 | 0 | 6.399 | 0 | 0 | 0 | 0 | 0 |
| NT2RI2002654 | 1.470 | 0 | 0 | 0 | 0 | 0.658 | 0 |
| NT2RI2002847 | 1.047 | 0 | 0 | 0 | 0 | 4.218 | 0 |
| NT2RI2002865 | 0 | 0 | 0 | 0 | 0 | 7.595 | 0 |
| NT2RI2002958 | 0 | 21.383 | 0 | 0 | 0 | 1.078 | 0 |
| NT2RI2003011 | 0 | 0 | 0 | 71.453 | 0 | 0 | 0 |
| NT2RI2003019 | 8.722 | 0 | 0 | 0 | 0 | 0 | 0 |
| NT2RI2003051 | 18.780 | 0 | 0 | 0 | 0 | 0 | 0 |
| NT2RI2003304 | 2.407 | 0 | 0 | 0 | 0 | 1.470 | 0 |
| NT2RI2003317 | 1.314 | 0 | 0 | 0 | 0 | 0 | 0 |
| NT2RI2003338 | 0.844 | 7.496 | 0 | 0 | 0 | 1.134 | 0 |
| NT2RI2003344 | 3.248 | 0 | 0 | 0 | 0 | 4.363 | 0 |
| NT2RI2003407 | 4.037 | 0 | 0 | 0 | 0 | 0 | 25.993 |
| NT2RI2003420 | 2.568 | 0 | 0 | 0 | 0 | 1.725 | 0 |
| NT2RI2003678 | 7.938 | 0 | 0 | 0 | 0 | 2.133 | 0 |
| NT2RI2003695 | 0.657 | 2.915 | 0 | 0 | 0 | 0.882 | 0 |
| NT2RI2003738 | 0.438 | 0 | 2.405 | 0 | 0 | 1.372 | 3.757 |
| NT2RI2003921 | 0.791 | 0 | 0 | 0 | 0 | 0 | 0 |
| NT2RI2004059 | 5.682 | 0 | 0 | 0 | 0 | 0 | 0 |
| NT2RI2004304 | 17.362 | 0 | 0 | 0 | 0 | 4.665 | 0 |
| NT2RI2004535 | 0 | 0 | 0 | 0 | 0 | 2.144 | 0 |
| NT2RI2004608 | 3.085 | 0 | 0 | 0 | 0 | 0 | 0 |
| NT2RI2004884 | 0.644 | 0 | 0 | 0 | 0 | 0 | 0 |
| NT2RI2005061 | 0 | 0 | 0 | 0 | 0 | 4.886 | 0 |
| NT2RI2005116 | 1.066 | 0 | 0 | 0 | 0 | 0 | 0 |
| NT2RI2005150 | 0 | 2.551 | 0 | 0 | 0 | 0.772 | 0 |
| NT2RI2005335 | 3.228 | 2.866 | 0 | 0 | 0 | 3.469 | 0 |
| NT2RI2005353 | 0.961 | 4.264 | 7.919 | 0 | 0 | 0 | 0 |
| NT2RI2005405 | 0.234 | 1.039 | 0 | 0 | 12.229 | 0 | 0 |
| NT2RI2005473 | 0 | 0 | 0 | 0 | 71.141 | 0 | 0 |
| NT2RI2005647 | 0 | 0 | 0 | 0 | 0 | 0.741 | 0 |
| NT2RI2005710 | 0 | 0 | 0 | 0 | 0 | 5.847 | 0 |
| NT2RI2005713 | 1.233 | 0 | 0 | 0 | 0 | 0 | 0 |
| NT2RI2005723 | 2.092 | 0 | 0 | 0 | 0 | 0.562 | 10.777 |
| NT2RI2005811 | 1.277 | 5.671 | 0 | 0 | 0 | 0 | 0 |
| NT2RI2005814 | 0 | 0 | 0 | 0 | 0 | 1.459 | 0 |
| NT2RI2005818 | 2.124 | 0 | 0 | 0 | 0 | 0 | 0 |
| NT2RI2006070 | 8.569 | 0 | 0 | 42.530 | 0 | 0 | 0 |
| NT2RI2006072 | 3.828 | 0 | 0 | 0 | 0 | 0 | 0 |
| NT2RI2006271 | 0 | 10.339 | 0 | 0 | 0 | 0 | 0 |
| NT2RI2006412 | 0 | 3.034 | 0 | 0 | 0 | 0.918 | 0 |
| NT2RI2006565 | 0 | 0 | 0 | 0 | 0 | 13.386 | 0 |
| NT2RI2006640 | 0 | 23.265 | 0 | 0 | 0 | 0 | 0 |
| NT2RI2006682 | 2.052 | 0 | 0 | 0 | 0 | 5.513 | 0 |
| NT2RI2006703 | 13.514 | 0 | 0 | 0 | 0 | 0 | 0 |
| NT2RI2006853 | 0 | 0 | 0 | 0 | 0 | 5.025 | 0 |
| NT2RI2006856 | 1.172 | 0 | 0 | 0 | 0 | 0 | 0 |
| NT2RI2006943 | 0 | 4.502 | 0 | 0 | 0 | 0 | 0 |
| NT2RI2007054 | 1.083 | 4.806 | 0 | 0 | 0 | 0 | 0 |
| NT2RI2007084 | 0.907 | 0 | 0 | 0 | 0 | 0 | 0 |
| NT2RI2007096 | 4.323 | 0 | 0 | 0 | 0 | 0 | 0 |
| NT2RI2007133 | 0.327 | 0 | 2.697 | 0 | 0 | 0.879 | 0 |
| NT2RI2007277 | 0 | 3.629 | 0 | 0 | 0 | 1.098 | 0 |
| NT2RI2007377 | 0.977 | 8.671 | 0 | 0 | 0 | 0 | 0 |
| NT2RI2007384 | 0 | 0 | 0 | 0 | 0 | 0.485 | 0 |
| NT2RI2007445 | 1.495 | 0 | 0 | 0 | 0 | 0 | 0 |
| NT2RI2007468 | 6.968 | 0 | 0 | 0 | 0 | 0 | 0 |
| NT2RI2007572 | 0.623 | 0 | 5.137 | 0 | 0 | 0.837 | 0 |
| NT2RI2007589 | 0 | 3.953 | 0 | 0 | 0 | 0 | 0 |
| NT2RI2007629 | 0 | 7.462 | 0 | 0 | 0 | 0 | 0 |
| NT2RI2007723 | 2.950 | 0 | 0 | 0 | 0 | 0 | 0 |
| NT2RI2007884 | 2.117 | 0 | 0 | 0 | 0 | 0 | 0 |
| NT2RI2007987 | 4.504 | 6.665 | 0 | 0 | 0 | 2.017 | 0 |
| NT2RI2008045 | 0 | 0 | 0 | 0 | 0 | 2.609 | 0 |
| NT2RI2008141 | 0 | 0 | 0 | 0 | 0 | 4.790 | 0 |
| NT2RI2008336 | 0 | 1.483 | 0 | 0 | 8.726 | 0.897 | 0 |
| NT2RI2008396 | 2.205 | 0 | 0 | 0 | 0 | 0.494 | 0 |
| NT2RI2008526 | 1.279 | 0 | 0 | 0 | 0 | 0 | 0 |
| NT2RI2008566 | 7.843 | 0 | 0 | 0 | 0 | 0 | 0 |
| NT2RI2008714 | 0 | 0 | 0 | 0 | 0 | 16.436 | 0 |
| NT2RI2008724 | 3.063 | 0 | 12.626 | 0 | 0 | 0 | 0 |
| NT2RI2008791 | 0 | 0 | 0 | 0 | 0 | 1.307 | 0 |
| NT2RI2008808 | 3.780 | 0 | 0 | 0 | 0 | 5.078 | 0 |
| NT2RI2008942 | 1.749 | 0 | 0 | 0 | 0 | 11.746 | 0 |
| NT2RI2009037 | 2.812 | 0 | 0 | 0 | 18.363 | 1.889 | 0 |
| NT2RI2009065 | 1.558 | 1.729 | 0 | 0 | 0 | 0.523 | 0 |
| NT2RI2009066 | 0 | 0 | 0 | 0 | 0 | 6.140 | 0 |
| NT2RI2009083 | 8.550 | 0 | 0 | 0 | 0 | 0 | 0 |
| NT2RI2009173 | 0.930 | 0 | 0 | 0 | 0 | 0 | 0 |
| NT2RI2009194 | 0 | 3.638 | 0 | 0 | 0 | 0 | 0 |
| NT2RI2009239 | 3.496 | 0 | 0 | 0 | 0 | 0 | 0 |
| NT2RI2009259 | 9.759 | 0 | 0 | 0 | 0 | 0 | 0 |
| NT2RI2009269 | 0 | 7.316 | 0 | 0 | 0 | 0 | 0 |
| NT2RI2009406 | 0 | 0 | 0 | 0 | 0 | 3.151 | 0 |
| NT2RI2009583 | 0 | 0.828 | 4.615 | 13.890 | 0 | 0.752 | 0 |
| NT2RI2010283 | 0 | 0 | 50.879 | 0 | 0 | 0 | 0 |
| NT2RI2011450 | 0 | 0 | 0 | 0 | 0 | 28.449 | 0 |
| NT2RI2012726 | 3.868 | 0 | 0 | 0 | 0 | 0 | 0 |
| NT2RI2015342 | 0 | 5.569 | 0 | 0 | 0 | 0 | 0 |
| NT2RI2015533 | 1.296 | 11.506 | 0 | 0 | 0 | 3.482 | 0 |
| NT2RI2018448 | 0 | 0 | 0 | 0 | 0 | 14.106 | 0 |
| NT2RI2024008 | 0 | 0 | 0 | 0 | 0 | 38.134 | 0 |
| NT2RI2024313 | 12.217 | 0 | 0 | 0 | 0 | 0 | 0 |
| NT2RI2027224 | 0 | 0 | 0 | 0 | 0 | 38.134 | 0 |
| NT2RI3000174 | 0 | 0 | 0 | 0 | 0 | 38.134 | 0 |
| NT2RI3000423 | 8.019 | 0 | 0 | 0 | 0 | 48.475 | 0 |
| NT2RI3001445 | 5.281 | 0 | 0 | 0 | 0 | 0 | 0 |
| NT2RI3003738 | 15.123 | 0 | 0 | 0 | 0 | 0 | 0 |
| NT2RI3005923 | 0 | 0 | 0 | 0 | 0 | 21.835 | 0 |
| NT2RI3006284 | 0 | 0 | 0 | 0 | 0 | 13.906 | 0 |
| NT2RI3006673 | 0 | 0 | 0 | 0 | 0 | 11.178 | 0 |
| NT2RI3007291 | 0 | 0 | 0 | 0 | 0 | 14.020 | 0 |
| NT2RI3007543 | 1.415 | 0 | 0 | 0 | 0 | 2.851 | 0 |
| NT2RI3009480 | 31.453 | 0 | 0 | 0 | 0 | 0 | 0 |
| NT2RP6000017 | 2.495 | 0 | 0 | 0 | 0 | 1.676 | 0 |
| NT2RP6000039 | 1.495 | 0 | 0 | 0 | 0 | 0 | 0 |
| NT2RP6000072 | 12.126 | 5.981 | 0 | 0 | 0 | 0 | 0 |
| NT2RP6000078 | 32.080 | 1.331 | 2.472 | 0 | 0 | 0.805 | 7.722 |
| NT2RP6000085 | 0 | 0 | 0 | 0 | 0 | 10.361 | 0 |
| NT2RP6000110 | 0 | 0 | 0 | 0 | 0 | 6.135 | 0 |
| NT2RP6000123 | 0.979 | 1.449 | 0 | 0 | 0 | 0.877 | 0 |
| NT2RP7000069 | 8.426 | 0 | 0 | 0 | 0 | 7.546 | 0 |
| NT2RP7000076 | 2.541 | 6.768 | 0 | 0 | 0 | 1.365 | 0 |
| NT2RP7000086 | 0 | 0 | 0 | 0 | 0 | 14.324 | 0 |
| NT2RP7000112 | 13.393 | 0 | 0 | 0 | 0 | 0 | 0 |
| NT2RP7000173 | 0.464 | 0 | 0 | 0 | 0 | 2.491 | 0 |
| NT2RP7000238 | 6.476 | 0 | 0 | 0 | 0 | 1.450 | 0 |
| NT2RP7000259 | 0 | 0 | 0 | 0 | 0 | 14.979 | 0 |
| NT2RP7000271 | 5.058 | 0 | 0 | 0 | 0 | 3.397 | 0 |
| NT2RP7000477 | 0 | 0 | 0 | 0 | 0 | 2.216 | 0 |
| NT2RP7000600 | 5.543 | 0 | 0 | 0 | 0 | 4.964 | 0 |
| NT2RP7000906 | 0 | 0 | 0 | 0 | 0 | 7.306 | 0 |
| NT2RP7001166 | 3.118 | 2.768 | 0 | 0 | 0 | 1.675 | 0 |
| NT2RP7001231 | 3.444 | 0 | 0 | 0 | 0 | 9.252 | 0 |
| NT2RP7001283 | 0.469 | 0 | 0 | 0 | 0 | 1.891 | 0 |
| NT2RP7001335 | 0 | 15.467 | 0 | 0 | 0 | 0 | 0 |
| NT2RP7001591 | 2.168 | 0 | 0 | 0 | 0 | 0 | 0 |
| NT2RP7001962 | 0 | 0 | 0 | 0 | 0 | 2.976 | 0 |
| NT2RP7002028 | 3.351 | 7.439 | 0 | 0 | 0 | 2.251 | 0 |
| NT2RP7002282 | 0 | 0 | 0 | 0 | 0 | 17.201 | 0 |
| NT2RP7002376 | 20.234 | 0 | 0 | 0 | 0 | 0 | 0 |
| NT2RP7002379 | 1.679 | 1.863 | 0 | 0 | 0 | 1.128 | 0 |
| NT2RP7002449 | 0 | 7.478 | 0 | 0 | 0 | 2.263 | 0 |
| NT2RP7002450 | 0 | 0 | 0 | 0 | 0 | 2.990 | 0 |
| NT2RP7002619 | 0.909 | 0 | 0 | 0 | 0 | 0 | 0 |
| NT2RP7002802 | 3.047 | 0 | 0 | 0 | 0 | 0 | 0 |
| NT2RP7002829 | 0 | 0 | 0 | 0 | 0 | 9.794 | 0 |
| NT2RP7002875 | 1.539 | 3.416 | 0 | 0 | 0 | 0 | 0 |
| NT2RP7003203 | 1.540 | 0 | 0 | 0 | 0 | 0 | 0 |
| NT2RP7003319 | 0.761 | 0 | 0 | 0 | 0 | 6.132 | 0 |
| NT2RP7003511 | 24.799 | 0 | 0 | 0 | 0 | 0 | 0 |
| NT2RP7003629 | 9.435 | 0 | 0 | 0 | 0 | 12.674 | 0 |
| NT2RP7003632 | 2.716 | 0 | 0 | 0 | 0 | 0 | 0 |
| NT2RP7003647 | 3.925 | 0 | 0 | 0 | 0 | 10.546 | 0 |
| NT2RP7003688 | 4.926 | 0 | 0 | 0 | 0 | 4.963 | 0 |
| NT2RP7003960 | 0 | 0 | 0 | 0 | 0 | 1.856 | 0 |
| NT2RP7004114 | 4.650 | 0 | 0 | 0 | 0 | 6.246 | 0 |
| NT2RP7004123 | 1.600 | 0 | 0 | 0 | 0 | 2.149 | 0 |
| NT2RP7004173 | 0.637 | 0 | 0 | 0 | 0 | 2.566 | 0 |
| NT2RP7004196 | 1.093 | 0 | 0 | 0 | 0 | 0 | 0 |
| NT2RP7004204 | 1.422 | 0 | 0 | 0 | 0 | 0 | 0 |
| NT2RP7004260 | 21.394 | 0 | 0 | 0 | 0 | 0 | 0 |
| NT2RP7004348 | 5.653 | 0 | 0 | 0 | 0 | 2.531 | 0 |
| NT2RP7004352 | 5.665 | 0 | 0 | 0 | 0 | 3.805 | 0 |
| NT2RP7004373 | 5.888 | 0 | 8.092 | 0 | 0 | 7.910 | 0 |
| NT2RP7004428 | 5.624 | 0 | 0 | 0 | 0 | 3.778 | 0 |
| NT2RP7004641 | 21.394 | 0 | 0 | 0 | 0 | 0 | 0 |
| NT2RP7004656 | 0 | 0 | 0 | 0 | 0 | 48.174 | 0 |
| NT2RP7004687 | 0 | 0 | 0 | 0 | 0 | 42.237 | 0 |
| NT2RP7004728 | 2.621 | 0 | 0 | 0 | 0 | 3.521 | 0 |
| NT2RP7004751 | 0 | 1.733 | 0 | 0 | 0 | 0.524 | 0 |
| NT2RP7004884 | 0 | 10.162 | 0 | 0 | 0 | 3.075 | 0 |
| NT2RP7004911 | 2.939 | 6.524 | 0 | 0 | 0 | 0 | 0 |
| NT2RP7004925 | 4.211 | 0 | 0 | 0 | 0 | 5.657 | 0 |
| NT2RP7004946 | 2.871 | 3.187 | 0 | 0 | 0 | 0.964 | 0 |
| NT2RP7004961 | 0 | 0 | 0 | 0 | 0 | 18.856 | 0 |
| NT2RP7005493 | 0 | 0 | 0 | 0 | 0 | 27.110 | 0 |
| NT2RP7005529 | 0 | 0 | 0 | 0 | 0 | 8.270 | 0 |
| NT2RP7005675 | 0 | 0 | 0 | 0 | 0 | 22.803 | 0 |
| NT2RP7005750 | 5.967 | 0 | 0 | 0 | 0 | 0 | 0 |
| NT2RP7006141 | 3.079 | 0 | 15.231 | 15.282 | 0 | 0 | 0 |
| NT2RP7006188 | 4.342 | 0 | 0 | 0 | 0 | 2.916 | 0 |
| NT2RP7006223 | 0 | 0 | 0 | 0 | 0 | 9.466 | 0 |
| NT2RP7006490 | 0 | 0 | 0 | 0 | 0 | 2.404 | 0 |
| NT2RP7006539 | 0 | 0 | 0 | 0 | 0 | 6.518 | 0 |
| NT2RP7006601 | 0 | 0 | 0 | 0 | 0 | 31.730 | 0 |
| NT2RP7006619 | 0 | 8.170 | 0 | 0 | 0 | 0 | 0 |
| NT2RP7006701 | 4.192 | 0 | 0 | 0 | 0 | 0 | 0 |
| NT2RP7006717 | 2.194 | 0 | 0 | 0 | 0 | 3.685 | 0 |
| NT2RP7006886 | 0 | 0 | 0 | 0 | 0 | 10.654 | 0 |
| NT2RP7006986 | 0 | 27.811 | 0 | 0 | 0 | 0 | 0 |
| NT2RP7006995 | 0 | 0 | 0 | 0 | 0 | 48.174 | 0 |
| NT2RP7007154 | 0 | 2.111 | 0 | 0 | 0 | 1.277 | 0 |
| NT2RP7007177 | 5.678 | 0 | 0 | 0 | 0 | 0 | 0 |
| NT2RP7007252 | 5.726 | 0 | 0 | 0 | 0 | 0 | 0 |
| NT2RP7007381 | 0 | 0 | 0 | 0 | 0 | 17.566 | 0 |
| NT2RP7007387 | 1.712 | 0 | 0 | 0 | 0 | 4.598 | 0 |
| NT2RP7007406 | 25.705 | 0 | 0 | 0 | 0 | 0 | 0 |
| NT2RP7007530 | 3.656 | 0 | 0 | 0 | 0 | 4.911 | 0 |
| NT2RP7007537 | 2.051 | 0 | 0 | 0 | 0 | 5.509 | 0 |
| NT2RP7007580 | 0 | 0 | 0 | 0 | 0 | 26.772 | 0 |
| NT2RP7007610 | 2.413 | 21.426 | 0 | 0 | 0 | 3.242 | 0 |
| NT2RP7007766 | 25.705 | 0 | 0 | 0 | 0 | 0 | 0 |
| NT2RP7007975 | 0 | 0 | 0 | 0 | 0 | 1.529 | 29.307 |
| NT2RP7008015 | 1.683 | 0 | 0 | 0 | 0 | 1.130 | 0 |
| NT2RP7008161 | 5.235 | 0 | 0 | 0 | 0 | 0 | 0 |
| NT2RP7008167 | 1.514 | 0 | 0 | 0 | 0 | 6.100 | 0 |
| NT2RP7008315 | 12.515 | 0 | 0 | 0 | 0 | 0 | 0 |
| NT2RP7008543 | 2.294 | 0 | 0 | 0 | 0 | 6.163 | 0 |
| NT2RP7009087 | 6.077 | 0 | 0 | 0 | 0 | 5.442 | 0 |
| NT2RP7009097 | 0 | 13.310 | 0 | 0 | 0 | 0 | 0 |
| NT2RP7009108 | 0 | 3.290 | 0 | 0 | 0 | 0 | 0 |
| NT2RP7009147 | 1.328 | 0 | 0 | 0 | 0 | 7.137 | 0 |
| NT2RP7009149 | 0 | 0 | 0 | 0 | 0 | 1.340 | 0 |
| NT2RP7009259 | 0.468 | 0 | 0 | 0 | 0 | 2.517 | 0 |
| NT2RP7009394 | 0 | 0 | 0 | 0 | 0 | 2.709 | 0 |
| NT2RP7009466 | 25.705 | 0 | 0 | 0 | 0 | 0 | 0 |
| NT2RP7009481 | 0 | 0 | 0 | 0 | 0 | 9.175 | 0 |
| NT2RP7009482 | 1.546 | 0 | 0 | 0 | 0 | 1.557 | 0 |
| NT2RP7009498 | 0.840 | 0 | 0 | 0 | 0 | 0 | 0 |
| NT2RP7010109 | 13.103 | 0 | 0 | 0 | 0 | 0 | 0 |
| NT2RP7013573 | 6.009 | 0 | 0 | 0 | 0 | 0 | 0 |
| NT2RP7013764 | 0 | 0 | 0 | 0 | 0 | 12.717 | 0 |
| NT2RP7013795 | 0 | 0 | 0 | 89.568 | 0 | 0 | 0 |
| NT2RP7014005 | 4.851 | 0 | 0 | 0 | 0 | 6.517 | 0 |
| NT2RP7014583 | 0 | 60.566 | 0 | 0 | 0 | 0 | 0 |
| NT2RP7014910 | 1.994 | 0 | 0 | 0 | 0 | 1.339 | 0 |
| NT2RP8000435 | 11.126 | 0 | 0 | 0 | 0 | 0 | 0 |
| NT2RP8005546 | 40.897 | 0 | 0 | 0 | 0 | 0 | 0 |
| NT2RP8007920 | 1.649 | 0 | 0 | 0 | 0 | 2.216 | 0 |
| NT2RP8008057 | 0 | 0 | 0 | 0 | 0 | 31.730 | 0 |
| NTONG1000033 | 6.130 | 0 | 0 | 0 | 0 | 5.489 | 0 |
| NTONG1000075 | 5.556 | 0 | 0 | 0 | 0 | 0 | 0 |
| NTONG1000098 | 3.188 | 0 | 0 | 0 | 0 | 4.282 | 0 |
| NTONG1000130 | 0 | 0 | 0 | 0 | 0 | 13.193 | 0 |
| NTONG1000182 | 0 | 0 | 0 | 0 | 0 | 1.387 | 0 |
| NTONG1000214 | 9.258 | 0 | 0 | 0 | 0 | 0 | 0 |
| NTONG1000246 | 2.608 | 5.788 | 0 | 0 | 0 | 1.751 | 0 |
| NTONG1000264 | 1.625 | 7.216 | 0 | 0 | 0 | 2.184 | 0 |
| NTONG2000265 | 2.133 | 0 | 0 | 0 | 0 | 1.910 | 0 |
| NTONG2000800 | 0 | 0 | 0 | 0 | 0 | 0.593 | 0 |
| NTONG2000876 | 0 | 5.154 | 0 | 0 | 0 | 0 | 0 |
| NTONG2000977 | 0 | 0 | 0 | 0 | 0 | 1.101 | 21.112 |
| NTONG2000985 | 0 | 0 | 0 | 0 | 0 | 2.088 | 0 |
| NTONG2001137 | 0.954 | 0 | 0 | 0 | 0 | 1.282 | 0 |
| NTONG2001550 | 2.902 | 0 | 0 | 0 | 0 | 3.899 | 0 |
| NTONG2001567 | 0 | 0 | 0 | 0 | 0 | 0.687 | 6.585 |
| NTONG2001612 | 0 | 4.155 | 0 | 0 | 0 | 0 | 0 |
| NTONG2001762 | 1.504 | 0 | 0 | 0 | 0 | 0 | 0 |
| NTONG2002582 | 0 | 0 | 0 | 0 | 0 | 16.852 | 0 |
| NTONG2003454 | 2.486 | 0 | 0 | 0 | 0 | 3.339 | 0 |
| NTONG2003928 | 0 | 43.126 | 0 | 0 | 0 | 0 | 0 |
| NTONG2004095 | 22.967 | 0 | 0 | 0 | 0 | 0 | 0 |
| NTONG2004308 | 0 | 0 | 0 | 0 | 0 | 13.193 | 0 |
| NTONG2004614 | 4.938 | 0 | 0 | 0 | 0 | 0 | 0 |
| NTONG2004918 | 5.400 | 0 | 0 | 0 | 0 | 0 | 0 |
| NTONG2005373 | 0 | 0 | 0 | 0 | 0 | 6.601 | 0 |
| NTONG2005391 | 0 | 0 | 0 | 0 | 0 | 2.611 | 0 |
| NTONG2005520 | 0 | 0 | 0 | 0 | 0 | 1.491 | 0 |
| NTONG2005801 | 1.486 | 0 | 0 | 0 | 0 | 1.996 | 0 |
| NTONG2005969 | 0 | 11.891 | 0 | 0 | 0 | 0 | 0 |
| NTONG2006484 | 0 | 0 | 0 | 0 | 0 | 4.842 | 0 |
| NTONG2008143 | 9.060 | 0 | 0 | 0 | 0 | 0 | 0 |
| NTONG2008483 | 0 | 0 | 0 | 0 | 0 | 1.790 | 0 |
| NTONG2008522 | 0 | 0 | 0 | 0 | 0 | 4.390 | 0 |
| NTONG2008944 | 4.869 | 0 | 0 | 0 | 0 | 3.271 | 0 |
| NTONG2009060 | 0 | 0 | 0 | 0 | 60.694 | 0 | 0 |
| NTONG2009576 | 0 | 0 | 0 | 0 | 0 | 7.959 | 0 |
| OCBBF1000080 | 0 | 0 | 0 | 0 | 0 | 21.417 | 0 |
| OCBBF1000086 | 0.638 | 0 | 0 | 0 | 0 | 0 | 0 |
| OCBBF1000104 | 0 | 0 | 0 | 0 | 0 | 11.536 | 0 |
| OCBBF1000146 | 0 | 6.386 | 0 | 0 | 0 | 0 | 0 |
| OCBBF1000315 | 14.591 | 0 | 0 | 0 | 0 | 0 | 0 |
| OCBBF2000013 | 3.245 | 0 | 0 | 0 | 0 | 0 | 0 |
| OCBBF2000015 | 1.979 | 0 | 0 | 0 | 0 | 4.431 | 0 |
| OCBBF2000126 | 0 | 14.387 | 0 | 0 | 0 | 0 | 0 |
| OCBBF2000178 | 0 | 4.036 | 0 | 0 | 0 | 0 | 0 |
| OCBBF2000231 | 0 | 14.500 | 0 | 0 | 0 | 0 | 0 |
| OCBBF2000522 | 0 | 0 | 0 | 0 | 0 | 2.832 | 0 |
| OCBBF2000677 | 13.583 | 0 | 0 | 0 | 0 | 0 | 0 |
| OCBBF2000831 | 0 | 0 | 0 | 0 | 0 | 5.393 | 0 |
| OCBBF2000846 | 0.610 | 0 | 0 | 0 | 0 | 2.459 | 0 |
| OCBBF2000982 | 0.727 | 0 | 0 | 0 | 0 | 0.977 | 0 |
| OCBBF2000986 | 1.607 | 0 | 0 | 0 | 0 | 0 | 0 |
| OCBBF2001166 | 0 | 0 | 0 | 0 | 0 | 18.418 | 0 |
| OCBBF2001196 | 13.205 | 0 | 0 | 0 | 0 | 0 | 0 |
| OCBBF2001307 | 0 | 6.157 | 0 | 0 | 0 | 0 | 0 |
| OCBBF2001492 | 1.716 | 2.540 | 0 | 0 | 0 | 1.537 | 0 |
| OCBBF2001528 | 0 | 0 | 0 | 0 | 0 | 37.138 | 0 |
| OCBBF2001639 | 3.921 | 17.407 | 0 | 0 | 0 | 0 | 0 |
| OCBBF2001687 | 0 | 0 | 0 | 0 | 0 | 4.309 | 0 |
| OCBBF2001706 | 40.164 | 0 | 0 | 0 | 0 | 0 | 0 |
| OCBBF2001983 | 0 | 26.741 | 0 | 0 | 0 | 0 | 0 |
| OCBBF2002015 | 57.664 | 0 | 0 | 0 | 0 | 0 | 0 |
| OCBBF2002086 | 2.686 | 0 | 0 | 0 | 0 | 0 | 0 |
| OCBBF2002290 | 0 | 37.332 | 0 | 0 | 0 | 0 | 0 |
| OCBBF2002656 | 1.379 | 0 | 11.372 | 0 | 0 | 1.853 | 35.524 |
| OCBBF2003052 | 0 | 14.060 | 0 | 0 | 0 | 0 | 0 |
| OCBBF2003518 | 0 | 0 | 0 | 0 | 0 | 1.155 | 0 |
| OCBBF2003543 | 40.164 | 0 | 0 | 0 | 0 | 0 | 0 |
| OCBBF2003744 | 0 | 0 | 0 | 0 | 0 | 47.415 | 0 |
| OCBBF2003819 | 0 | 0 | 0 | 0 | 0 | 23.601 | 0 |
| OCBBF2003925 | 0 | 3.084 | 0 | 0 | 0 | 0 | 0 |
| OCBBF2004104 | 0 | 10.140 | 0 | 0 | 0 | 0 | 0 |
| OCBBF2004273 | 0 | 3.318 | 0 | 0 | 0 | 1.004 | 0 |
| OCBBF2006660 | 12.586 | 0 | 0 | 0 | 0 | 0 | 0 |
| OCBBF2006849 | 6.741 | 0 | 0 | 0 | 0 | 4.528 | 0 |
| OCBBF2007028 | 1.151 | 0 | 0 | 0 | 0 | 0 | 0 |
| OCBBF2007121 | 0 | 0 | 0 | 0 | 0 | 47.415 | 0 |
| OCBBF2007224 | 0 | 0 | 0 | 0 | 0 | 10.576 | 0 |
| OCBBF2007354 | 0.838 | 0 | 6.907 | 0 | 0 | 3.376 | 0 |
| OCBBF2007414 | 40.164 | 0 | 0 | 0 | 0 | 0 | 0 |
| OCBBF2007415 | 0.668 | 11.856 | 0 | 0 | 0 | 0.897 | 0 |
| OCBBF2007829 | 0.458 | 0 | 0 | 0 | 0 | 0.615 | 0 |
| OCBBF2007892 | 10.657 | 0 | 0 | 0 | 0 | 0 | 0 |
| OCBBF2008005 | 0 | 11.755 | 0 | 0 | 0 | 0 | 0 |
| OCBBF2008041 | 1.743 | 0 | 0 | 0 | 0 | 0 | 0 |
| OCBBF2008822 | 0 | 0 | 16.388 | 0 | 0 | 0 | 0 |
| OCBBF2009242 | 11.805 | 0 | 0 | 0 | 0 | 3.172 | 0 |
| OCBBF2009301 | 0 | 0 | 0 | 0 | 0 | 4.644 | 0 |
| OCBBF2009772 | 0.982 | 8.718 | 0 | 0 | 0 | 0 | 0 |
| OCBBF2009836 | 0 | 15.168 | 0 | 0 | 0 | 0 | 0 |
| OCBBF2010140 | 27.107 | 0 | 0 | 0 | 0 | 0 | 0 |
| OCBBF2010281 | 0 | 0 | 0 | 0 | 0 | 47.415 | 0 |
| OCBBF2010557 | 0 | 0 | 0 | 0 | 0 | 20.524 | 0 |
| OCBBF2010830 | 0 | 0 | 6.049 | 0 | 0 | 0 | 0 |
| OCBBF2010841 | 0 | 0 | 0 | 0 | 0 | 13.925 | 0 |
| OCBBF2011021 | 0 | 0 | 0 | 0 | 0 | 4.857 | 0 |
| OCBBF2011759 | 0.779 | 0 | 0 | 0 | 0 | 5.234 | 0 |
| OCBBF2011767 | 0 | 0 | 0 | 0 | 0 | 33.313 | 0 |
| OCBBF2011887 | 0 | 17.408 | 0 | 0 | 0 | 5.268 | 0 |
| OCBBF2012001 | 0 | 0 | 0 | 0 | 0 | 27.891 | 0 |
| OCBBF2012436 | 40.164 | 0 | 0 | 0 | 0 | 0 | 0 |
| OCBBF2012553 | 0.978 | 4.341 | 0 | 0 | 0 | 0 | 0 |
| OCBBF2012714 | 0 | 0 | 0 | 0 | 0 | 6.502 | 0 |
| OCBBF2012821 | 0 | 0 | 0 | 0 | 0 | 2.803 | 0 |
| OCBBF2013011 | 0 | 27.949 | 0 | 0 | 0 | 0 | 0 |
| OCBBF2013123 | 0 | 0 | 0 | 0 | 0 | 25.558 | 0 |
| OCBBF2013149 | 0 | 34.448 | 0 | 0 | 0 | 0 | 0 |
| OCBBF2013366 | 2.251 | 0 | 0 | 0 | 0 | 0 | 0 |
| OCBBF2013843 | 0.446 | 1.978 | 0 | 0 | 0 | 0.599 | 0 |
| OCBBF2014052 | 0 | 0 | 0 | 0 | 0 | 47.415 | 0 |
| OCBBF2014064 | 0 | 5.056 | 0 | 0 | 0 | 1.530 | 0 |
| OCBBF2016612 | 0 | 0 | 0 | 0 | 0 | 47.415 | 0 |
| OCBBF2016729 | 0 | 0 | 0 | 0 | 0 | 20.422 | 0 |
| OCBBF2017035 | 0 | 4.488 | 0 | 0 | 0 | 0 | 0 |
| OCBBF2017055 | 14.962 | 0 | 0 | 0 | 0 | 0 | 0 |
| OCBBF2017398 | 1.073 | 9.523 | 0 | 0 | 0 | 2.882 | 0 |
| OCBBF2017754 | 6.261 | 0 | 0 | 0 | 0 | 4.206 | 0 |
| OCBBF2017791 | 0 | 0 | 0 | 0 | 0 | 2.869 | 0 |
| OCBBF2017893 | 4.339 | 0 | 0 | 35.895 | 0 | 0 | 0 |
| OCBBF2018012 | 0 | 0 | 0 | 0 | 0 | 6.288 | 0 |
| OCBBF2018563 | 0 | 0 | 0 | 0 | 0 | 23.036 | 0 |
| OCBBF2018581 | 0 | 15.925 | 0 | 0 | 0 | 0 | 0 |
| OCBBF2018827 | 0 | 18.163 | 0 | 0 | 0 | 5.496 | 0 |
| OCBBF2018956 | 1.411 | 0 | 0 | 0 | 0 | 0 | 0 |
| OCBBF2019108 | 57.310 | 0 | 0 | 0 | 0 | 0 | 0 |
| OCBBF2020318 | 40.164 | 0 | 0 | 0 | 0 | 0 | 0 |
| OCBBF2020801 | 40.164 | 0 | 0 | 0 | 0 | 0 | 0 |
| OCBBF2024850 | 0 | 0 | 0 | 0 | 0 | 4.979 | 0 |
| OCBBF2028421 | 0 | 0 | 0 | 0 | 0 | 47.415 | 0 |
| OCBBF2031561 | 26.180 | 0 | 0 | 0 | 0 | 0 | 0 |
| OCBBF2035823 | 57.310 | 0 | 0 | 0 | 0 | 0 | 0 |
| OCBBF2036743 | 9.217 | 0 | 0 | 0 | 0 | 0 | 0 |
| OCBBF3000296 | 0 | 0 | 0 | 0 | 0 | 21.220 | 0 |
| OCBBF3000323 | 16.639 | 0 | 0 | 0 | 0 | 0 | 0 |
| OCBBF3001333 | 16.074 | 0 | 0 | 0 | 0 | 0 | 0 |
| OCBBF3004487 | 3.778 | 16.771 | 0 | 0 | 0 | 10.150 | 0 |
| PANCR1000091 | 0 | 1.114 | 0 | 0 | 0 | 0 | 0 |
| PEBLM1000066 | 3.952 | 0 | 0 | 0 | 0 | 5.308 | 0 |
| PEBLM1000144 | 5.001 | 0 | 0 | 0 | 0 | 0 | 0 |
| PEBLM2000030 | 6.138 | 0 | 0 | 0 | 0 | 28.858 | 0 |
| PEBLM2000147 | 5.319 | 4.722 | 0 | 0 | 0 | 2.858 | 0 |
| PEBLM2000222 | 0.484 | 2.150 | 0 | 0 | 0 | 0 | 12.475 |
| PEBLM2000308 | 6.612 | 7.338 | 0 | 0 | 0 | 0 | 0 |
| PEBLM2000326 | 13.579 | 0 | 0 | 0 | 0 | 0 | 0 |
| PEBLM2000338 | 7.936 | 0 | 0 | 0 | 0 | 0 | 0 |
| PEBLM2000395 | 0 | 6.738 | 0 | 0 | 0 | 1.020 | 0 |
| PEBLM2001072 | 1.512 | 20.138 | 0 | 0 | 0 | 2.031 | 0 |
| PEBLM2003914 | 7.087 | 0 | 0 | 0 | 0 | 7.140 | 0 |
| PEBLM2004452 | 1.125 | 0 | 0 | 0 | 0 | 7.559 | 0 |
| PEBLM2004666 | 3.098 | 0 | 0 | 0 | 0 | 0 | 0 |
| PEBLM2006036 | 9.986 | 0 | 0 | 0 | 0 | 0 | 0 |
| PEBLM2006709 | 0 | 0 | 0 | 0 | 0 | 6.232 | 0 |
| PEBLM2007188 | 7.279 | 0 | 0 | 0 | 0 | 0 | 0 |
| PEBLM2007296 | 4.326 | 0 | 0 | 0 | 0 | 0 | 0 |
| PEBLM2007447 | 9.986 | 0 | 0 | 0 | 0 | 0 | 0 |
| PEBLM2007774 | 0.502 | 0 | 0 | 0 | 6.560 | 0.337 | 0 |
| PERIC2000889 | 14.835 | 0 | 0 | 0 | 0 | 9.964 | 0 |
| PERIC2007068 | 1.287 | 0 | 0 | 0 | 0 | 8.642 | 0 |
| PLACE5000013 | 6.618 | 0 | 0 | 0 | 0 | 1.778 | 0 |
| PLACE5000068 | 0 | 23.246 | 0 | 0 | 0 | 7.034 | 0 |
| PLACE5000113 | 0 | 0 | 0 | 0 | 0 | 1.927 | 0 |
| PLACE5000159 | 0 | 0 | 0 | 0 | 0 | 5.091 | 0 |
| PLACE5000170 | 0 | 0 | 0 | 0 | 0 | 3.894 | 0 |
| PLACE6000145 | 0 | 0 | 0 | 0 | 0 | 1.161 | 0 |
| PLACE6000325 | 6.755 | 0 | 0 | 0 | 0 | 0 | 0 |
| PLACE6000379 | 4.566 | 1.961 | 0 | 0 | 3.847 | 0.791 | 0 |
| PLACE6000414 | 7.479 | 0 | 0 | 0 | 0 | 1.435 | 0 |
| PLACE6000463 | 6.506 | 0 | 0 | 0 | 0 | 0 | 0 |
| PLACE6000630 | 0 | 0 | 0 | 0 | 0 | 4.322 | 0 |
| PLACE6001064 | 0.957 | 0 | 0 | 0 | 0 | 5.784 | 0 |
| PLACE6001281 | 2.871 | 0 | 0 | 0 | 0 | 0 | 0 |
| PLACE6001443 | 1.638 | 14.542 | 0 | 0 | 0 | 0 | 0 |
| PLACE6002084 | 0.924 | 0 | 0 | 7.643 | 0 | 0.414 | 0 |
| PLACE6002102 | 1.178 | 0 | 0 | 0 | 0 | 0 | 0 |
| PLACE6002668 | 0 | 0 | 0 | 0 | 0 | 6.045 | 0 |
| PLACE6002960 | 1.851 | 0 | 0 | 0 | 0 | 6.216 | 0 |
| PLACE6003218 | 0 | 0 | 0 | 0 | 0 | 16.300 | 0 |
| PLACE6003383 | 0.995 | 0 | 0 | 0 | 0 | 5.348 | 0 |
| PLACE6003745 | 0 | 0 | 0 | 0 | 0 | 11.772 | 0 |
| PLACE6004005 | 0 | 7.309 | 0 | 0 | 0 | 0 | 0 |
| PLACE6004312 | 2.012 | 4.465 | 0 | 0 | 0 | 1.351 | 0 |
| PLACE6004397 | 1.533 | 6.804 | 0 | 0 | 0 | 0 | 0 |
| PLACE6005231 | 9.210 | 0 | 0 | 0 | 0 | 0 | 0 |
| PLACE6005294 | 0 | 0 | 0 | 0 | 0 | 13.488 | 0 |
| PLACE6005482 | 2.205 | 0 | 0 | 0 | 0 | 23.695 | 0 |
| PLACE6006042 | 4.539 | 0 | 0 | 0 | 0 | 0 | 0 |
| PLACE6006137 | 0 | 12.643 | 0 | 0 | 0 | 0 | 0 |
| PLACE6006186 | 0 | 0 | 0 | 0 | 0 | 8.102 | 0 |
| PLACE6006549 | 0 | 0 | 5.490 | 0 | 0 | 0.894 | 0 |
| PLACE6007239 | 0 | 0 | 0 | 0 | 0 | 4.618 | 0 |
| PLACE6008775 | 1.537 | 0 | 0 | 0 | 0 | 6.194 | 0 |
| PLACE6008793 | 0 | 5.869 | 0 | 0 | 0 | 0 | 0 |
| PLACE6009237 | 0 | 0 | 0 | 0 | 0 | 0 | 92.347 |
| PLACE6010077 | 0 | 0 | 5.986 | 0 | 0 | 1.951 | 0 |
| PLACE6010484 | 5.155 | 0 | 0 | 0 | 0 | 0 | 0 |
| PLACE6010848 | 6.823 | 0 | 0 | 0 | 0 | 9.166 | 0 |
| PLACE6011057 | 1.879 | 0 | 0 | 0 | 0 | 10.098 | 0 |
| PLACE6011970 | 21.626 | 0 | 0 | 0 | 0 | 0 | 0 |
| PLACE6012028 | 0 | 23.236 | 0 | 0 | 0 | 0 | 0 |
| PLACE6012936 | 31.905 | 0 | 0 | 0 | 0 | 0 | 0 |
| PLACE6013222 | 0 | 18.239 | 0 | 0 | 0 | 0 | 0 |
| PLACE6013232 | 0 | 0 | 79.437 | 0 | 0 | 0 | 0 |
| PLACE6013672 | 23.027 | 0 | 0 | 0 | 0 | 0 | 0 |
| PLACE6016254 | 15.235 | 0 | 0 | 0 | 0 | 20.465 | 0 |
| PLACE6016942 | 0 | 0 | 26.895 | 0 | 0 | 0 | 0 |
| PLACE6016984 | 15.403 | 0 | 0 | 0 | 0 | 0 | 0 |
| PLACE6018031 | 5.606 | 0 | 0 | 0 | 0 | 0 | 0 |
| PLACE6018487 | 0.556 | 0 | 0 | 0 | 0 | 0 | 0 |
| PLACE6018938 | 0 | 0 | 0 | 0 | 0 | 8.594 | 0 |
| PLACE6019195 | 0 | 0 | 0 | 0 | 0 | 9.505 | 0 |
| PLACE7001022 | 0 | 0 | 0 | 0 | 0 | 31.522 | 0 |
| PLACE7004103 | 1.078 | 0 | 0 | 0 | 0 | 7.243 | 0 |
| PLACE7005840 | 31.905 | 0 | 0 | 0 | 0 | 0 | 0 |
| PROST1000097 | 3.432 | 0 | 0 | 0 | 0 | 0.659 | 0 |
| PROST1000120 | 0 | 0 | 0 | 0 | 0 | 3.694 | 0 |
| PROST1000199 | 2.437 | 2.705 | 0 | 0 | 0 | 1.637 | 0 |
| PROST1000215 | 4.265 | 0 | 0 | 0 | 0 | 0 | 0 |
| PROST1000220 | 0 | 0 | 0 | 0 | 0 | 0.761 | 0 |
| PROST1000226 | 5.968 | 0 | 0 | 0 | 0 | 0 | 0 |
| PROST1000246 | 9.161 | 0 | 0 | 0 | 0 | 0 | 0 |
| PROST1000343 | 7.106 | 0 | 0 | 0 | 0 | 3.182 | 0 |
| PROST1000526 | 2.107 | 0 | 0 | 0 | 0 | 2.830 | 0 |
| PROST1000536 | 0 | 0 | 0 | 0 | 0 | 6.735 | 0 |
| PROST1000564 | 5.604 | 0 | 0 | 0 | 0 | 1.506 | 0 |
| PROST2000036 | 2.344 | 10.406 | 0 | 0 | 0 | 0 | 0 |
| PROST2000138 | 0.145 | 0.321 | 2.383 | 0 | 0 | 1.650 | 0 |
| PROST2000241 | 0 | 0 | 0 | 0 | 0 | 6.855 | 0 |
| PROST2000274 | 8.605 | 0 | 0 | 0 | 0 | 11.559 | 0 |
| PROST2000277 | 0 | 0 | 0 | 0 | 0 | 24.004 | 0 |
| PROST2000284 | 8.760 | 0 | 0 | 0 | 0 | 0 | 0 |
| PROST2000567 | 0 | 0 | 0 | 0 | 0 | 16.044 | 0 |
| PROST2000760 | 0 | 10.384 | 0 | 0 | 0 | 0 | 60.243 |
| PROST2000835 | 0 | 0 | 0 | 0 | 0 | 24.004 | 0 |
| PROST2001002 | 16.382 | 0 | 0 | 0 | 0 | 0 | 0 |
| PROST2001116 | 0 | 0 | 0 | 0 | 0 | 24.004 | 0 |
| PROST2001180 | 2.070 | 9.191 | 0 | 0 | 0 | 0 | 0 |
| PROST2001883 | 0 | 3.306 | 0 | 0 | 0 | 0 | 0 |
| PROST2001997 | 0 | 0 | 40.082 | 0 | 0 | 0 | 0 |
| PROST2002651 | 0 | 0 | 0 | 0 | 0 | 3.350 | 0 |
| PROST2002897 | 0 | 0 | 0 | 0 | 0 | 24.004 | 0 |
| PROST2002960 | 11.208 | 0 | 0 | 0 | 0 | 0 | 0 |
| PROST2003232 | 1.707 | 0 | 0 | 0 | 0 | 0 | 0 |
| PROST2003338 | 0.933 | 0 | 0 | 0 | 0 | 1.254 | 0 |
| PROST2003396 | 0 | 0 | 0 | 0 | 0 | 26.768 | 0 |
| PROST2003517 | 2.195 | 0 | 0 | 0 | 0 | 2.949 | 0 |
| PROST2003537 | 0 | 0 | 0 | 0 | 0 | 24.004 | 0 |
| PROST2003725 | 19.037 | 0 | 0 | 0 | 0 | 0 | 0 |
| PROST2004095 | 0.390 | 1.733 | 0 | 0 | 0 | 0.524 | 0 |
| PROST2004270 | 0.981 | 2.177 | 4.043 | 0 | 0 | 0.659 | 0 |
| PROST2004416 | 0.567 | 0 | 0 | 0 | 0 | 1.523 | 0 |
| PROST2004739 | 0 | 0 | 0 | 0 | 0 | 8.329 | 0 |
| PROST2004744 | 4.408 | 0 | 0 | 0 | 0 | 0 | 0 |
| PROST2005067 | 13.451 | 0 | 0 | 0 | 0 | 0 | 0 |
| PROST2005143 | 5.657 | 25.111 | 0 | 0 | 0 | 7.599 | 0 |
| PROST2005272 | 0 | 0 | 0 | 0 | 0 | 9.199 | 0 |
| PROST2005285 | 18.671 | 0 | 0 | 0 | 0 | 0 | 0 |
| PROST2005604 | 5.187 | 0 | 0 | 0 | 0 | 17.421 | 0 |
| PROST2005793 | 0 | 0 | 0 | 0 | 0 | 13.178 | 0 |
| PROST2006030 | 0 | 0 | 0 | 0 | 0 | 12.715 | 0 |
| PROST2006060 | 5.567 | 0 | 0 | 0 | 0 | 0 | 0 |
| PROST2006260 | 0 | 0 | 0 | 0 | 0 | 9.122 | 0 |
| PROST2006343 | 0 | 0 | 0 | 0 | 0 | 4.953 | 0 |
| PROST2006536 | 0 | 0 | 0 | 0 | 0 | 4.971 | 0 |
| PROST2006737 | 2.021 | 0 | 16.663 | 0 | 0 | 2.715 | 0 |
| PROST2007612 | 7.988 | 0 | 0 | 0 | 0 | 0 | 0 |
| PROST2008271 | 6.536 | 0 | 0 | 0 | 0 | 13.169 | 0 |
| PROST2008360 | 1.501 | 0 | 0 | 0 | 0 | 2.016 | 38.653 |
| PROST2008489 | 0.540 | 0 | 0 | 13.402 | 0 | 0 | 0 |
| PROST2008770 | 5.203 | 2.887 | 0 | 0 | 16.991 | 0.874 | 0 |
| PROST2010219 | 0 | 0 | 0 | 0 | 0 | 24.004 | 0 |
| PROST2010545 | 0 | 0 | 0 | 0 | 0 | 14.741 | 0 |
| PROST2010579 | 0 | 0 | 0 | 0 | 0 | 21.054 | 0 |
| PROST2010782 | 0.203 | 0 | 0 | 0 | 0 | 0 | 5.223 |
| PROST2011577 | 0 | 0 | 0 | 0 | 0 | 2.305 | 0 |
| PROST2012007 | 0.946 | 0 | 0 | 0 | 0 | 0 | 0 |
| PROST2012448 | 0 | 0 | 0 | 0 | 0 | 9.139 | 0 |
| PROST2012504 | 19.037 | 0 | 0 | 0 | 0 | 0 | 0 |
| PROST2012745 | 0 | 0 | 0 | 0 | 0 | 4.332 | 0 |
| PROST2013121 | 8.969 | 0 | 0 | 0 | 0 | 12.048 | 0 |
| PROST2015287 | 0 | 0 | 0 | 0 | 0 | 24.050 | 0 |
| PROST2015924 | 16.951 | 0 | 0 | 0 | 0 | 0 | 0 |
| PROST2017128 | 0 | 0 | 0 | 0 | 0 | 9.026 | 0 |
| PROST2017203 | 1.083 | 0 | 0 | 0 | 0 | 1.455 | 0 |
| PROST2017612 | 0 | 0 | 0 | 0 | 0 | 24.004 | 0 |
| PROST2019164 | 3.075 | 0 | 0 | 0 | 0 | 12.391 | 0 |
| PROST2019253 | 0 | 0 | 0 | 0 | 0 | 1.882 | 0 |
| PUAEN1000057 | 0 | 0 | 0 | 0 | 0 | 2.300 | 0 |
| PUAEN1000065 | 0 | 0 | 0 | 0 | 0 | 0.750 | 0 |
| PUAEN1000147 | 7.775 | 0 | 0 | 0 | 0 | 20.890 | 0 |
| PUAEN1000161 | 0 | 0 | 0 | 0 | 0 | 6.461 | 0 |
| PUAEN1000164 | 3.319 | 0 | 0 | 0 | 0 | 1.338 | 0 |
| PUAEN2000152 | 0 | 0 | 0 | 0 | 0 | 6.648 | 0 |
| PUAEN2000312 | 7.382 | 0 | 0 | 0 | 0 | 0 | 0 |
| PUAEN2000374 | 1.334 | 0 | 0 | 0 | 0 | 1.076 | 0 |
| PUAEN2000535 | 2.012 | 0 | 0 | 0 | 0 | 0.901 | 0 |
| PUAEN2001586 | 0 | 0 | 0 | 0 | 62.197 | 6.397 | 0 |
| PUAEN2004400 | 0 | 26.668 | 0 | 0 | 0 | 0 | 0 |
| PUAEN2005930 | 0 | 0 | 0 | 0 | 0 | 10.284 | 0 |
| PUAEN2006328 | 0 | 0 | 0 | 0 | 0 | 0 | 79.193 |
| PUAEN2007044 | 1.195 | 0 | 0 | 0 | 0 | 14.450 | 0 |
| PUAEN2008939 | 0 | 0 | 0 | 0 | 0 | 3.844 | 0 |
| PUAEN2008985 | 3.700 | 0 | 0 | 0 | 0 | 4.970 | 0 |
| PUAEN2009174 | 2.363 | 0 | 0 | 0 | 0 | 0 | 0 |
| PUAEN2010346 | 8.323 | 0 | 0 | 0 | 0 | 0 | 0 |
| RECTM2002172 | 0 | 14.539 | 0 | 0 | 0 | 0 | 0 |
| SALGL1000047 | 0.247 | 0 | 0 | 0 | 0 | 0 | 0 |
| SALGL1000157 | 0.759 | 0 | 5.364 | 0 | 0 | 0.146 | 0 |
| SALGL1000171 | 0.514 | 0 | 0 | 0 | 0 | 0 | 0 |
| SKMUS1000014 | 0 | 27.230 | 0 | 0 | 0 | 0 | 0 |
| SKMUS1000022 | 0 | 0 | 0 | 0 | 0 | 3.730 | 0 |
| SKMUS1000084 | 5.137 | 0 | 0 | 0 | 0 | 1.725 | 0 |
| SKMUS1000110 | 0 | 27.270 | 0 | 0 | 0 | 0 | 0 |
| SKMUS1000177 | 1.969 | 0 | 0 | 0 | 0 | 26.451 | 0 |
| SKMUS1000186 | 1.339 | 4.457 | 0 | 0 | 0 | 0.450 | 0 |
| SKMUS2000343 | 0 | 0 | 0 | 0 | 0 | 8.630 | 0 |
| SKMUS2000484 | 1.464 | 0 | 0 | 0 | 0 | 0 | 0 |
| SKMUS2000679 | 0 | 0 | 18.423 | 0 | 0 | 0 | 0 |
| SKMUS2000757 | 0 | 18.292 | 0 | 0 | 0 | 0 | 0 |
| SKMUS2000931 | 1.361 | 6.043 | 0 | 0 | 0 | 1.829 | 0 |
| SKMUS2000933 | 0 | 0 | 0 | 0 | 0 | 6.950 | 0 |
| SKMUS2000954 | 0 | 0 | 0 | 0 | 37.020 | 0 | 0 |
| SKMUS2001454 | 0.281 | 1.249 | 0 | 0 | 0 | 0.378 | 0 |
| SKMUS2001528 | 0 | 0 | 0 | 0 | 0 | 0 | 26.957 |
| SKMUS2001634 | 0 | 0 | 0 | 0 | 0 | 1.466 | 0 |
| SKMUS2004908 | 0 | 0 | 0 | 0 | 0 | 3.679 | 0 |
| SKNMC1000137 | 0.884 | 0 | 0 | 0 | 0 | 0 | 0 |
| SKNMC1000168 | 0.698 | 0 | 0 | 0 | 0 | 0.938 | 0 |
| SKNMC1000229 | 4.384 | 0 | 0 | 0 | 0 | 0 | 0 |
| SKNMC1000251 | 5.849 | 0 | 0 | 0 | 0 | 0 | 0 |
| SKNMC1000264 | 4.374 | 0 | 0 | 0 | 0 | 0 | 0 |
| SKNMC2000065 | 1.800 | 0 | 0 | 0 | 0 | 0 | 0 |
| SKNMC2000097 | 1.115 | 0 | 0 | 0 | 0 | 0 | 0 |
| SKNMC2000224 | 5.223 | 0 | 0 | 0 | 0 | 0 | 0 |
| SKNMC2000356 | 14.745 | 0 | 0 | 0 | 0 | 0 | 0 |
| SKNMC2000649 | 0 | 0 | 0 | 0 | 0 | 4.088 | 19.593 |
| SKNMC2000698 | 5.167 | 0 | 0 | 0 | 0 | 0 | 0 |
| SKNMC2000877 | 1.976 | 4.386 | 0 | 0 | 0 | 1.327 | 0 |
| SKNMC2006173 | 0 | 0 | 0 | 0 | 0 | 8.620 | 0 |
| SKNSH1000002 | 0 | 0 | 0 | 0 | 31.308 | 0 | 0 |
| SKNSH1000101 | 0.536 | 0 | 0 | 0 | 0 | 0 | 0 |
| SKNSH2000101 | 0 | 0 | 0 | 0 | 0 | 14.763 | 0 |
| SKNSH2000250 | 0 | 5.215 | 0 | 0 | 0 | 0 | 0 |
| SKNSH2000347 | 0 | 0 | 0 | 0 | 0 | 2.513 | 0 |
| SKNSH2000819 | 2.075 | 0 | 0 | 0 | 0 | 2.788 | 0 |
| SKNSH2001222 | 0 | 0 | 0 | 0 | 0 | 7.314 | 0 |
| SKNSH2002325 | 0 | 0 | 0 | 0 | 0 | 4.276 | 0 |
| SKNSH2002768 | 5.923 | 0 | 0 | 0 | 0 | 0 | 0 |
| SKNSH2003528 | 0 | 0 | 0 | 0 | 0 | 3.400 | 0 |
| SKNSH2006234 | 0 | 0 | 0 | 0 | 0 | 3.921 | 0 |
| SMINT1000016 | 0 | 9.081 | 33.733 | 0 | 0 | 0 | 0 |
| SMINT1000042 | 0 | 0 | 0 | 0 | 0 | 6.002 | 0 |
| SMINT1000117 | 1.097 | 0 | 0 | 0 | 0 | 2.947 | 0 |
| SMINT1000192 | 2.483 | 0 | 0 | 0 | 0 | 0 | 0 |
| SMINT2000007 | 10.031 | 0 | 0 | 0 | 0 | 0 | 0 |
| SMINT2000159 | 0 | 20.230 | 0 | 0 | 0 | 6.122 | 0 |
| SMINT2000232 | 11.871 | 0 | 0 | 0 | 0 | 0 | 0 |
| SMINT2000239 | 0 | 0 | 0 | 0 | 0 | 9.395 | 0 |
| SMINT2000277 | 1.512 | 0 | 0 | 0 | 0 | 2.031 | 0 |
| SMINT2000396 | 2.041 | 4.531 | 0 | 0 | 0 | 8.227 | 0 |
| SMINT2000441 | 0.753 | 3.342 | 0 | 0 | 0 | 1.011 | 0 |
| SMINT2000454 | 0 | 0 | 0 | 0 | 0 | 20.021 | 0 |
| SMINT2000468 | 0 | 0 | 0 | 0 | 0 | 2.563 | 0 |
| SMINT2000545 | 21.744 | 0 | 16.298 | 0 | 0 | 7.966 | 0 |
| SMINT2000602 | 0.458 | 0 | 0 | 0 | 0 | 0 | 0 |
| SMINT2000629 | 4.479 | 0 | 0 | 0 | 0 | 3.008 | 0 |
| SMINT2000659 | 0 | 0 | 0 | 0 | 0 | 0.311 | 0 |
| SMINT2000694 | 0.991 | 0 | 0 | 0 | 0 | 0 | 0 |
| SMINT2000747 | 13.665 | 0 | 0 | 0 | 0 | 0 | 0 |
| SMINT2000933 | 0 | 0 | 7.007 | 0 | 0 | 0 | 21.887 |
| SMINT2001818 | 5.472 | 0 | 0 | 0 | 0 | 1.050 | 0 |
| SMINT2002159 | 0 | 0 | 0 | 0 | 0 | 15.360 | 0 |
| SMINT2002224 | 10.556 | 0 | 0 | 0 | 0 | 0 | 0 |
| SMINT2002620 | 1.889 | 0 | 0 | 0 | 0 | 2.538 | 48.656 |
| SMINT2002689 | 5.881 | 0 | 0 | 0 | 0 | 2.633 | 0 |
| SMINT2002882 | 0 | 0 | 0 | 60.089 | 0 | 0 | 0 |
| SMINT2002976 | 4.349 | 0 | 0 | 0 | 0 | 0 | 0 |
| SMINT2003003 | 16.439 | 0 | 0 | 0 | 0 | 0 | 0 |
| SMINT2003074 | 2.286 | 0 | 0 | 0 | 0 | 1.535 | 0 |
| SMINT2003169 | 0 | 1.741 | 0 | 0 | 0 | 0 | 0 |
| SMINT2003340 | 7.350 | 0 | 0 | 0 | 0 | 0 | 0 |
| SMINT2003423 | 9.059 | 0 | 0 | 0 | 0 | 12.169 | 0 |
| SMINT2003505 | 2.626 | 0 | 0 | 0 | 0 | 0 | 0 |
| SMINT2003905 | 0 | 2.866 | 0 | 0 | 0 | 0 | 0 |
| SMINT2004023 | 1.272 | 0 | 0 | 0 | 0 | 0 | 0 |
| SMINT2004037 | 32.093 | 0 | 0 | 0 | 0 | 0 | 0 |
| SMINT2004144 | 0 | 0 | 12.482 | 0 | 0 | 0 | 0 |
| SMINT2004280 | 10.624 | 0 | 0 | 0 | 0 | 0 | 0 |
| SMINT2004589 | 3.342 | 0 | 0 | 0 | 0 | 0 | 0 |
| SMINT2005387 | 19.114 | 0 | 0 | 0 | 0 | 0 | 0 |
| SMINT2005956 | 0 | 19.486 | 0 | 0 | 0 | 2.948 | 0 |
| SMINT2006801 | 13.430 | 0 | 0 | 0 | 0 | 0 | 0 |
| SMINT2007062 | 19.114 | 0 | 0 | 0 | 0 | 0 | 0 |
| SMINT2007187 | 16.793 | 0 | 0 | 0 | 0 | 0 | 0 |
| SMINT2007792 | 6.970 | 0 | 0 | 0 | 0 | 18.725 | 0 |
| SMINT2008921 | 11.102 | 4.107 | 0 | 0 | 0 | 0 | 0 |
| SMINT2008960 | 0.570 | 0 | 4.704 | 0 | 0 | 0 | 0 |
| SMINT2009292 | 5.915 | 0 | 0 | 0 | 0 | 3.973 | 0 |
| SMINT2010084 | 0 | 0 | 0 | 0 | 0 | 15.395 | 0 |
| SMINT2010369 | 19.114 | 0 | 0 | 0 | 0 | 0 | 0 |
| SMINT2010901 | 11.714 | 0 | 0 | 0 | 0 | 0 | 0 |
| SMINT2012179 | 15.491 | 0 | 0 | 0 | 0 | 0 | 0 |
| SMINT2012291 | 3.845 | 0 | 0 | 0 | 0 | 0 | 0 |
| SMINT2013031 | 7.764 | 0 | 0 | 0 | 0 | 0 | 0 |
| SMINT2013032 | 19.946 | 0 | 0 | 0 | 0 | 0 | 0 |
| SMINT2015294 | 0 | 0 | 54.735 | 0 | 0 | 0 | 0 |
| SMINT2017964 | 0 | 0 | 0 | 0 | 0 | 48.865 | 0 |
| SPLEN1000041 | 32.401 | 0 | 0 | 0 | 0 | 0 | 0 |
| SPLEN1000056 | 32.401 | 0 | 0 | 0 | 0 | 0 | 0 |
| SPLEN1000106 | 3.882 | 0 | 0 | 0 | 0 | 20.857 | 0 |
| SPLEN1000116 | 1.238 | 0 | 0 | 0 | 0 | 0.554 | 0 |
| SPLEN1000134 | 0 | 0 | 0 | 0 | 0 | 39.169 | 0 |
| SPLEN1000166 | 0.943 | 0 | 0 | 0 | 0 | 1.266 | 0 |
| SPLEN2000047 | 13.760 | 0 | 0 | 0 | 0 | 0 | 0 |
| SPLEN2000072 | 5.008 | 0 | 0 | 0 | 0 | 0 | 0 |
| SPLEN2000098 | 0 | 0 | 0 | 0 | 0 | 13.492 | 0 |
| SPLEN2000143 | 19.333 | 0 | 0 | 0 | 0 | 0 | 0 |
| SPLEN2000243 | 36.254 | 0 | 0 | 0 | 0 | 0 | 0 |
| SPLEN2000255 | 8.964 | 0 | 0 | 0 | 0 | 0 | 0 |
| SPLEN2000267 | 14.604 | 0 | 0 | 0 | 0 | 6.539 | 0 |
| SPLEN2000505 | 2.460 | 1.560 | 0 | 0 | 0 | 0 | 0 |
| SPLEN2000516 | 9.967 | 0 | 0 | 0 | 0 | 0 | 0 |
| SPLEN2000874 | 0 | 0 | 0 | 0 | 0 | 0.546 | 0 |
| SPLEN2000882 | 4.394 | 0 | 0 | 0 | 0 | 3.935 | 0 |
| SPLEN2001141 | 11.811 | 0 | 0 | 0 | 0 | 0 | 0 |
| SPLEN2001157 | 9.174 | 0 | 0 | 0 | 0 | 0 | 0 |
| SPLEN2001278 | 32.401 | 0 | 0 | 0 | 0 | 0 | 0 |
| SPLEN2001476 | 32.401 | 0 | 0 | 0 | 0 | 0 | 0 |
| SPLEN2001710 | 3.233 | 0 | 0 | 0 | 0 | 0 | 83.275 |
| SPLEN2002223 | 0 | 0 | 0 | 0 | 0 | 39.169 | 0 |
| SPLEN2002335 | 2.533 | 3.748 | 0 | 0 | 0 | 3.403 | 0 |
| SPLEN2002451 | 32.401 | 0 | 0 | 0 | 0 | 0 | 0 |
| SPLEN2002463 | 6.314 | 0 | 0 | 0 | 0 | 8.482 | 0 |
| SPLEN2002493 | 0 | 6.407 | 0 | 0 | 0 | 5.816 | 0 |
| SPLEN2002744 | 1.860 | 0 | 0 | 0 | 0 | 0 | 0 |
| SPLEN2002931 | 0 | 0 | 0 | 0 | 88.828 | 0 | 0 |
| SPLEN2003297 | 22.140 | 0 | 0 | 0 | 0 | 0 | 0 |
| SPLEN2004181 | 6.564 | 0 | 0 | 0 | 0 | 0 | 0 |
| SPLEN2004220 | 2.398 | 0 | 0 | 0 | 0 | 3.222 | 0 |
| SPLEN2004555 | 0.888 | 0 | 0 | 0 | 23.184 | 4.769 | 0 |
| SPLEN2004611 | 32.401 | 0 | 0 | 0 | 0 | 0 | 0 |
| SPLEN2004662 | 0 | 0 | 0 | 0 | 0 | 21.098 | 0 |
| SPLEN2004773 | 0.593 | 5.269 | 4.893 | 0 | 0 | 3.986 | 0 |
| SPLEN2004984 | 2.190 | 0 | 0 | 0 | 0 | 0 | 0 |
| SPLEN2005342 | 17.794 | 0 | 0 | 0 | 0 | 0 | 0 |
| SPLEN2005416 | 0 | 0 | 0 | 0 | 0 | 39.169 | 0 |
| SPLEN2005429 | 6.110 | 0 | 0 | 0 | 0 | 8.208 | 0 |
| SPLEN2005560 | 0.878 | 0 | 0 | 0 | 0 | 1.179 | 0 |
| SPLEN2005783 | 5.436 | 24.131 | 0 | 0 | 0 | 0 | 0 |
| SPLEN2005790 | 32.401 | 0 | 0 | 0 | 0 | 0 | 0 |
| SPLEN2005806 | 0.510 | 0 | 0 | 0 | 0 | 0 | 0 |
| SPLEN2005818 | 37.178 | 0 | 0 | 0 | 0 | 0 | 0 |
| SPLEN2006122 | 0 | 0 | 0 | 0 | 0 | 0.943 | 0 |
| SPLEN2006133 | 2.373 | 0 | 0 | 0 | 0 | 0 | 0 |
| SPLEN2006143 | 5.597 | 0 | 0 | 0 | 0 | 2.506 | 0 |
| SPLEN2006232 | 4.784 | 0 | 0 | 0 | 0 | 3.213 | 0 |
| SPLEN2006305 | 13.695 | 0 | 0 | 0 | 0 | 4.953 | 0 |
| SPLEN2006374 | 3.802 | 0 | 0 | 0 | 0 | 3.405 | 0 |
| SPLEN2007182 | 0 | 0 | 0 | 0 | 0 | 14.317 | 0 |
| SPLEN2007326 | 32.401 | 0 | 0 | 0 | 0 | 0 | 0 |
| SPLEN2007388 | 22.140 | 0 | 0 | 0 | 0 | 0 | 0 |
| SPLEN2007498 | 4.364 | 0 | 0 | 0 | 0 | 2.931 | 0 |
| SPLEN2007739 | 10.126 | 0 | 0 | 0 | 0 | 13.603 | 0 |
| SPLEN2007794 | 8.264 | 0 | 0 | 0 | 0 | 0 | 0 |
| SPLEN2007879 | 24.044 | 0 | 0 | 0 | 0 | 0 | 0 |
| SPLEN2008460 | 5.462 | 0 | 0 | 0 | 0 | 1.467 | 0 |
| SPLEN2009081 | 5.397 | 0 | 0 | 0 | 0 | 0 | 0 |
| SPLEN2009163 | 0 | 68.029 | 0 | 0 | 0 | 0 | 0 |
| SPLEN2009512 | 13.810 | 0 | 0 | 0 | 0 | 0 | 0 |
| SPLEN2009513 | 0 | 0 | 42.623 | 0 | 0 | 0 | 0 |
| SPLEN2009970 | 8.505 | 0 | 0 | 0 | 0 | 0 | 0 |
| SPLEN2010015 | 12.963 | 0 | 0 | 0 | 0 | 0 | 0 |
| SPLEN2010195 | 2.588 | 0 | 0 | 0 | 0 | 3.911 | 0 |
| SPLEN2010625 | 32.401 | 0 | 0 | 0 | 0 | 0 | 0 |
| SPLEN2010846 | 19.155 | 0 | 0 | 0 | 0 | 0 | 0 |
| SPLEN2010912 | 10.327 | 0 | 0 | 0 | 0 | 0 | 0 |
| SPLEN2011021 | 13.665 | 0 | 0 | 0 | 0 | 0 | 0 |
| SPLEN2011737 | 8.690 | 0 | 0 | 0 | 0 | 5.837 | 0 |
| SPLEN2011758 | 0 | 0 | 0 | 0 | 0 | 5.883 | 0 |
| SPLEN2011766 | 13.625 | 0 | 0 | 0 | 0 | 0 | 0 |
| SPLEN2012523 | 0 | 0 | 0 | 0 | 0 | 0 | 22.930 |
| SPLEN2012571 | 2.651 | 0 | 0 | 0 | 0 | 0 | 0 |
| SPLEN2012624 | 21.081 | 0 | 0 | 0 | 0 | 0 | 0 |
| SPLEN2012800 | 0.570 | 0 | 0 | 0 | 0 | 0 | 0 |
| SPLEN2012846 | 22.575 | 0 | 0 | 0 | 0 | 30.326 | 0 |
| SPLEN2012889 | 32.401 | 0 | 0 | 0 | 0 | 0 | 0 |
| SPLEN2013108 | 0 | 0 | 0 | 0 | 0 | 39.169 | 0 |
| SPLEN2013670 | 19.554 | 43.403 | 0 | 0 | 0 | 0 | 0 |
| SPLEN2013753 | 32.401 | 0 | 0 | 0 | 0 | 0 | 0 |
| SPLEN2013923 | 22.575 | 0 | 0 | 0 | 0 | 30.326 | 0 |
| SPLEN2014041 | 32.401 | 0 | 0 | 0 | 0 | 0 | 0 |
| SPLEN2014080 | 3.951 | 0 | 0 | 0 | 0 | 0 | 0 |
| SPLEN2014452 | 0 | 68.029 | 0 | 0 | 0 | 0 | 0 |
| SPLEN2014739 | 24.216 | 0 | 0 | 0 | 0 | 0 | 0 |
| SPLEN2014911 | 5.278 | 0 | 0 | 0 | 0 | 1.182 | 0 |
| SPLEN2015121 | 32.401 | 0 | 0 | 0 | 0 | 0 | 0 |
| SPLEN2015310 | 0.478 | 0 | 0 | 0 | 0 | 0 | 0 |
| SPLEN2015788 | 12.109 | 0 | 0 | 0 | 0 | 0 | 0 |
| SPLEN2016098 | 0 | 68.029 | 0 | 0 | 0 | 0 | 0 |
| SPLEN2016139 | 0 | 0 | 0 | 0 | 0 | 1.435 | 0 |
| SPLEN2016268 | 1.801 | 0 | 0 | 8.941 | 0 | 0 | 0 |
| SPLEN2016421 | 0 | 0 | 0 | 0 | 0 | 4.641 | 0 |
| SPLEN2016678 | 65.722 | 0 | 0 | 0 | 0 | 0 | 0 |
| SPLEN2016743 | 4.781 | 0 | 0 | 0 | 0 | 0 | 0 |
| SPLEN2016781 | 32.401 | 0 | 0 | 0 | 0 | 0 | 0 |
| SPLEN2017043 | 8.679 | 0 | 0 | 0 | 0 | 0 | 0 |
| SPLEN2017318 | 16.924 | 0 | 0 | 0 | 0 | 11.367 | 0 |
| SPLEN2017351 | 5.016 | 0 | 0 | 0 | 0 | 10.107 | 0 |
| SPLEN2018157 | 0 | 0 | 0 | 0 | 0 | 5.404 | 0 |
| SPLEN2018299 | 0 | 0 | 0 | 0 | 0 | 23.049 | 0 |
| SPLEN2018683 | 32.401 | 0 | 0 | 0 | 0 | 0 | 0 |
| SPLEN2019077 | 4.424 | 0 | 0 | 0 | 0 | 0 | 0 |
| SPLEN2019169 | 18.883 | 0 | 0 | 0 | 0 | 6.341 | 0 |
| SPLEN2019405 | 7.165 | 0 | 0 | 0 | 0 | 0 | 0 |
| SPLEN2019446 | 8.677 | 0 | 0 | 0 | 0 | 0 | 0 |
| SPLEN2019505 | 4.088 | 0 | 0 | 0 | 0 | 0 | 0 |
| SPLEN2019956 | 25.397 | 0 | 0 | 0 | 0 | 0 | 0 |
| SPLEN2021194 | 2.813 | 0 | 0 | 0 | 0 | 0 | 0 |
| SPLEN2022522 | 2.364 | 0 | 0 | 0 | 0 | 0 | 0 |
| SPLEN2023118 | 0 | 41.203 | 0 | 0 | 0 | 0 | 0 |
| SPLEN2023733 | 16.788 | 0 | 0 | 0 | 0 | 0 | 0 |
| SPLEN2024232 | 0 | 0 | 45.601 | 0 | 0 | 0 | 0 |
| SPLEN2024489 | 0 | 0 | 0 | 0 | 0 | 12.238 | 0 |
| SPLEN2024922 | 0 | 0 | 0 | 0 | 0 | 28.869 | 0 |
| SPLEN2024990 | 19.333 | 0 | 0 | 0 | 0 | 0 | 0 |
| SPLEN2027113 | 0 | 0 | 0 | 0 | 0 | 5.499 | 0 |
| SPLEN2028466 | 0.690 | 1.531 | 0 | 0 | 0 | 0.463 | 0 |
| SPLEN2028914 | 0 | 0 | 0 | 0 | 0 | 3.128 | 0 |
| SPLEN2029295 | 0 | 0 | 0 | 0 | 0 | 39.169 | 0 |
| SPLEN2029683 | 0 | 0 | 0 | 0 | 0 | 39.169 | 0 |
| SPLEN2029912 | 1.362 | 0 | 0 | 0 | 0 | 0 | 0 |
| SPLEN2031547 | 10.503 | 0 | 0 | 0 | 0 | 3.527 | 0 |
| SPLEN2031674 | 36.926 | 0 | 0 | 0 | 0 | 0 | 0 |
| SPLEN2032157 | 4.765 | 0 | 0 | 0 | 0 | 0 | 0 |
| SPLEN2033098 | 16.597 | 0 | 34.211 | 0 | 0 | 5.574 | 0 |
| SPLEN2034448 | 17.293 | 0 | 0 | 0 | 0 | 5.808 | 0 |
| SPLEN2034781 | 23.334 | 0 | 0 | 0 | 0 | 0 | 0 |
| SPLEN2036076 | 21.918 | 0 | 0 | 0 | 0 | 1.840 | 35.281 |
| SPLEN2036501 | 32.401 | 0 | 0 | 0 | 0 | 0 | 0 |
| SPLEN2037722 | 1.374 | 0 | 0 | 0 | 0 | 1.846 | 0 |
| SPLEN2038834 | 0 | 34.296 | 0 | 0 | 0 | 0 | 0 |
| SPLEN2039379 | 2.415 | 0 | 0 | 0 | 0 | 0 | 0 |
| SPLEN2039672 | 32.401 | 0 | 0 | 0 | 0 | 0 | 0 |
| SPLEN2041306 | 44.955 | 0 | 0 | 0 | 0 | 0 | 0 |
| SPLEN2042303 | 21.853 | 0 | 0 | 0 | 0 | 0 | 0 |
| SPLEN2042535 | 5.937 | 0 | 0 | 0 | 0 | 0 | 0 |
| STOMA1000047 | 13.211 | 0 | 0 | 0 | 0 | 0 | 0 |
| STOMA1000189 | 0 | 0 | 0 | 0 | 0 | 3.503 | 0 |
| STOMA2000121 | 0 | 4.511 | 0 | 0 | 0 | 0 | 0 |
| STOMA2000257 | 0 | 7.307 | 0 | 0 | 0 | 2.211 | 0 |
| STOMA2000395 | 8.900 | 0 | 0 | 0 | 0 | 0 | 0 |
| STOMA2002052 | 4.638 | 0 | 0 | 0 | 0 | 12.460 | 0 |
| STOMA2002166 | 0.488 | 0 | 0 | 12.107 | 0 | 0 | 0 |
| STOMA2002828 | 0 | 0 | 0 | 0 | 0 | 6.139 | 0 |
| STOMA2003158 | 5.104 | 0 | 0 | 0 | 0 | 0 | 0 |
| STOMA2003716 | 9.520 | 0 | 0 | 0 | 0 | 12.788 | 0 |
| STOMA2003781 | 0 | 0 | 0 | 0 | 0 | 14.134 | 0 |
| STOMA2009289 | 0 | 0 | 0 | 0 | 0 | 6.426 | 0 |
| SYNOV1000124 | 0.928 | 0 | 0 | 0 | 12.116 | 1.246 | 0 |
| SYNOV1000164 | 6.413 | 0 | 0 | 0 | 0 | 0 | 0 |
| SYNOV1000374 | 0 | 0 | 0 | 0 | 0 | 22.227 | 0 |
| SYNOV2001033 | 2.000 | 0 | 0 | 0 | 0 | 1.343 | 0 |
| SYNOV2001239 | 7.587 | 0 | 0 | 6.493 | 13.668 | 0 | 6.738 |
| SYNOV2001262 | 6.959 | 0 | 0 | 0 | 0 | 4.674 | 0 |
| SYNOV2001374 | 1.527 | 0 | 0 | 0 | 0 | 0 | 0 |
| SYNOV2001581 | 0 | 9.748 | 0 | 0 | 0 | 0 | 0 |
| SYNOV2001648 | 0 | 0 | 7.450 | 44.851 | 0 | 0 | 0 |
| SYNOV2005541 | 0 | 0 | 0 | 0 | 0 | 16.036 | 0 |
| SYNOV2007758 | 16.315 | 0 | 0 | 0 | 0 | 21.917 | 0 |
| SYNOV2009172 | 0.434 | 0 | 0 | 0 | 0 | 0 | 0 |
| SYNOV2017055 | 14.078 | 0 | 0 | 0 | 0 | 0 | 0 |
| SYNOV4001153 | 5.802 | 0 | 0 | 0 | 0 | 2.598 | 0 |
| SYNOV4001326 | 0 | 0 | 0 | 0 | 0 | 34.182 | 0 |
| SYNOV4004823 | 0 | 0 | 0 | 0 | 0 | 50.949 | 0 |
| SYNOV4005989 | 34.423 | 0 | 0 | 0 | 0 | 0 | 0 |
| SYNOV4006327 | 12.888 | 0 | 0 | 0 | 0 | 0 | 0 |
| SYNOV4006542 | 0 | 0 | 0 | 0 | 0 | 4.153 | 0 |
| SYNOV4007012 | 27.882 | 0 | 0 | 0 | 0 | 0 | 0 |
| SYNOV4007553 | 27.882 | 0 | 0 | 0 | 0 | 0 | 0 |
| SYNOV4007671 | 0 | 5.427 | 0 | 0 | 0 | 0 | 0 |
| SYNOV4008245 | 15.407 | 0 | 0 | 0 | 0 | 10.349 | 0 |
| T1ESE2000116 | 3.618 | 0 | 0 | 0 | 0 | 0 | 0 |
| T1ESE2000609 | 1.895 | 0 | 0 | 0 | 0 | 0 | 0 |
| T1ESE2000904 | 0 | 0 | 0 | 0 | 0 | 2.586 | 0 |
| TBAES2001296 | 9.394 | 0 | 0 | 0 | 0 | 0 | 0 |
| TBAES2001553 | 0 | 10.888 | 0 | 0 | 0 | 0 | 0 |
| TCOLN1000180 | 2.041 | 0 | 0 | 0 | 0 | 0 | 0 |
| TESOP2001953 | 10.863 | 0 | 0 | 0 | 0 | 0 | 0 |
| TESOP2002451 | 0 | 0 | 16.330 | 0 | 0 | 0 | 0 |
| TESOP2007384 | 0 | 0 | 0 | 0 | 0 | 4.497 | 0 |
| TESTI1000023 | 2.098 | 3.104 | 0 | 0 | 0 | 3.758 | 0 |
| TESTI1000051 | 0 | 0 | 0 | 0 | 0 | 17.501 | 0 |
| TESTI1000096 | 14.587 | 0 | 0 | 0 | 0 | 0 | 0 |
| TESTI1000138 | 24.890 | 0 | 0 | 0 | 0 | 0 | 0 |
| TESTI1000142 | 0 | 0 | 0 | 0 | 0 | 22.673 | 0 |
| TESTI1000168 | 0 | 0 | 0 | 0 | 0 | 14.041 | 0 |
| TESTI2000006 | 8.245 | 0 | 0 | 0 | 0 | 0 | 0 |
| TESTI2000177 | 0 | 0 | 0 | 0 | 0 | 27.311 | 0 |
| TESTI2000179 | 30.546 | 0 | 0 | 0 | 0 | 0 | 0 |
| TESTI2000184 | 3.770 | 0 | 0 | 0 | 0 | 11.396 | 0 |
| TESTI2000272 | 0 | 0 | 0 | 0 | 0 | 10.846 | 0 |
| TESTI2000431 | 0 | 0 | 0 | 0 | 0 | 36.354 | 0 |
| TESTI2000520 | 0 | 0 | 0 | 0 | 0 | 4.214 | 0 |
| TESTI2000598 | 4.189 | 0 | 0 | 0 | 0 | 0 | 0 |
| TESTI2000627 | 0 | 0 | 0 | 0 | 0 | 23.601 | 0 |
| TESTI2000784 | 7.580 | 0 | 0 | 0 | 0 | 5.091 | 0 |
| TESTI2000970 | 0 | 17.994 | 0 | 0 | 0 | 0 | 0 |
| TESTI2001099 | 4.495 | 1.814 | 0 | 0 | 0 | 4.391 | 0 |
| TESTI2001120 | 0.806 | 0 | 0 | 0 | 0 | 0 | 0 |
| TESTI2001153 | 0 | 0 | 0 | 0 | 0 | 0.446 | 0 |
| TESTI2001269 | 0.455 | 0 | 0 | 0 | 0 | 2.446 | 0 |
| TESTI2001511 | 0 | 0 | 0 | 0 | 0 | 1.960 | 0 |
| TESTI2001661 | 45.958 | 0 | 0 | 0 | 0 | 0 | 0 |
| TESTI2001862 | 4.410 | 0 | 0 | 0 | 0 | 2.962 | 0 |
| TESTI2001879 | 0 | 0 | 0 | 0 | 0 | 63.148 | 0 |
| TESTI2002105 | 0 | 0 | 0 | 0 | 0 | 14.629 | 0 |
| TESTI2002223 | 0 | 0 | 0 | 0 | 0 | 30.804 | 0 |
| TESTI2002256 | 0 | 0 | 0 | 0 | 0 | 38.856 | 0 |
| TESTI2002365 | 5.463 | 0 | 15.015 | 0 | 23.785 | 1.223 | 0 |
| TESTI2002369 | 0 | 0 | 0 | 0 | 0 | 16.832 | 0 |
| TESTI2002707 | 0 | 0 | 0 | 0 | 0 | 1.856 | 0 |
| TESTI2002866 | 17.744 | 0 | 0 | 0 | 0 | 11.918 | 0 |
| TESTI2002877 | 31.111 | 0 | 0 | 0 | 0 | 0 | 0 |
| TESTI2002965 | 68.011 | 0 | 0 | 0 | 0 | 0 | 0 |
| TESTI2003109 | 0 | 0 | 0 | 0 | 0 | 25.524 | 0 |
| TESTI2003280 | 0 | 15.184 | 0 | 0 | 0 | 0 | 0 |
| TESTI2003413 | 2.171 | 0 | 0 | 0 | 0 | 0 | 0 |
| TESTI2003454 | 4.428 | 0 | 0 | 0 | 0 | 5.948 | 0 |
| TESTI2003533 | 0.723 | 0 | 0 | 0 | 0 | 0 | 0 |
| TESTI2003625 | 0 | 0 | 0 | 0 | 0 | 25.720 | 0 |
| TESTI2004031 | 0.334 | 0 | 0 | 0 | 8.732 | 0 | 0 |
| TESTI2004080 | 0 | 0 | 33.552 | 0 | 0 | 0 | 0 |
| TESTI2004295 | 0 | 0 | 0 | 0 | 0 | 9.172 | 0 |
| TESTI2004432 | 0 | 0 | 0 | 0 | 0 | 63.148 | 0 |
| TESTI2004737 | 2.954 | 0 | 0 | 0 | 0 | 0 | 0 |
| TESTI2005408 | 1.477 | 6.558 | 0 | 0 | 0 | 0 | 0 |
| TESTI2005564 | 0 | 0 | 0 | 0 | 0 | 8.204 | 0 |
| TESTI2005692 | 0 | 0 | 0 | 0 | 0 | 63.148 | 0 |
| TESTI2005731 | 0 | 0 | 0 | 0 | 0 | 37.009 | 0 |
| TESTI2005743 | 1.832 | 0 | 0 | 0 | 0 | 0 | 47.175 |
| TESTI2005759 | 0 | 0 | 0 | 0 | 0 | 1.048 | 0 |
| TESTI2005784 | 0 | 0 | 0 | 0 | 0 | 9.995 | 0 |
| TESTI2005788 | 3.856 | 0 | 31.796 | 0 | 0 | 0 | 0 |
| TESTI2005908 | 0 | 0 | 0 | 0 | 0 | 1.764 | 0 |
| TESTI2006120 | 0 | 17.965 | 0 | 0 | 0 | 0 | 0 |
| TESTI2006258 | 8.550 | 0 | 0 | 0 | 0 | 0 | 0 |
| TESTI2006383 | 0 | 0 | 0 | 0 | 0 | 4.540 | 0 |
| TESTI2006453 | 2.807 | 0 | 0 | 0 | 0 | 0 | 0 |
| TESTI2006588 | 2.257 | 0 | 0 | 0 | 0 | 0.606 | 0 |
| TESTI2006615 | 0 | 0 | 0 | 0 | 0 | 5.170 | 0 |
| TESTI2006720 | 56.056 | 0 | 0 | 0 | 0 | 0 | 0 |
| TESTI2006872 | 4.582 | 0 | 0 | 0 | 0 | 24.621 | 0 |
| TESTI2006877 | 0 | 0 | 0 | 0 | 0 | 14.866 | 0 |
| TESTI2007211 | 8.262 | 12.226 | 0 | 0 | 0 | 0 | 0 |
| TESTI2007407 | 0 | 22.724 | 0 | 0 | 0 | 0 | 0 |
| TESTI2007422 | 25.838 | 0 | 0 | 0 | 0 | 0 | 0 |
| TESTI2007464 | 3.344 | 0 | 0 | 0 | 0 | 0 | 0 |
| TESTI2007864 | 56.056 | 0 | 0 | 0 | 0 | 0 | 0 |
| TESTI2007998 | 1.318 | 0 | 0 | 0 | 0 | 0 | 0 |
| TESTI2008020 | 3.198 | 0 | 0 | 0 | 0 | 4.296 | 0 |
| TESTI2008240 | 0.834 | 0.926 | 0 | 0 | 0 | 1.961 | 0 |
| TESTI2008405 | 0 | 0 | 35.801 | 0 | 0 | 0 | 0 |
| TESTI2009402 | 7.644 | 0 | 0 | 0 | 0 | 20.538 | 0 |
| TESTI2009474 | 5.054 | 0 | 0 | 0 | 0 | 2.263 | 0 |
| TESTI2009502 | 0 | 0 | 0 | 0 | 0 | 0 | 97.046 |
| TESTI2009520 | 2.501 | 0 | 0 | 0 | 0 | 4.200 | 0 |
| TESTI2009577 | 5.895 | 0 | 0 | 0 | 0 | 3.959 | 0 |
| TESTI2009785 | 9.571 | 0 | 0 | 0 | 0 | 3.214 | 0 |
| TESTI2009987 | 0 | 0 | 0 | 0 | 0 | 5.714 | 0 |
| TESTI2010180 | 0 | 0 | 0 | 0 | 0 | 38.856 | 0 |
| TESTI2010513 | 1.966 | 0 | 0 | 0 | 0 | 5.281 | 0 |
| TESTI2012394 | 0 | 0 | 0 | 0 | 0 | 29.991 | 0 |
| TESTI2012778 | 0.616 | 0 | 0 | 0 | 0 | 0 | 0 |
| TESTI2013231 | 0 | 0 | 13.680 | 0 | 0 | 0 | 0 |
| TESTI2013264 | 20.949 | 0 | 0 | 0 | 0 | 0 | 0 |
| TESTI2013295 | 2.221 | 0 | 0 | 0 | 0 | 5.967 | 0 |
| TESTI2014505 | 16.432 | 0 | 0 | 0 | 0 | 0 | 0 |
| TESTI2014838 | 1.105 | 0 | 0 | 0 | 0 | 11.873 | 0 |
| TESTI2015092 | 0 | 0 | 0 | 0 | 0 | 7.422 | 0 |
| TESTI2015213 | 1.284 | 0 | 0 | 0 | 0 | 0 | 11.022 |
| TESTI2015626 | 0.548 | 4.869 | 2.261 | 0 | 7.163 | 1.105 | 0 |
| TESTI2015962 | 0 | 14.684 | 0 | 0 | 0 | 0 | 0 |
| TESTI2016033 | 0 | 0 | 11.978 | 36.053 | 0 | 0 | 37.415 |
| TESTI2017954 | 2.210 | 4.904 | 0 | 0 | 0 | 0.742 | 0 |
| TESTI2018014 | 3.214 | 0 | 0 | 0 | 0 | 4.318 | 0 |
| TESTI2018462 | 0 | 0 | 0 | 0 | 0 | 6.331 | 0 |
| TESTI2018867 | 2.374 | 0 | 0 | 0 | 0 | 0 | 0 |
| TESTI2018997 | 1.737 | 0 | 0 | 0 | 0 | 0 | 0 |
| TESTI2019077 | 56.056 | 0 | 0 | 0 | 0 | 0 | 0 |
| TESTI2019760 | 37.949 | 0 | 0 | 0 | 0 | 0 | 0 |
| TESTI2020510 | 6.032 | 0 | 0 | 0 | 0 | 8.102 | 0 |
| TESTI2020840 | 13.626 | 0 | 0 | 0 | 0 | 0 | 0 |
| TESTI2020956 | 0 | 0 | 0 | 0 | 0 | 0 | 92.415 |
| TESTI2021124 | 0 | 0 | 0 | 0 | 0 | 12.804 | 0 |
| TESTI2021297 | 5.724 | 0 | 0 | 0 | 0 | 0 | 0 |
| TESTI2021425 | 2.871 | 0 | 0 | 0 | 0 | 1.928 | 0 |
| TESTI2022179 | 8.758 | 0 | 0 | 0 | 0 | 0 | 0 |
| TESTI2023414 | 0 | 0 | 0 | 0 | 0 | 50.153 | 0 |
| TESTI2024283 | 0 | 0 | 0 | 0 | 0 | 63.148 | 0 |
| TESTI2024844 | 0 | 4.241 | 0 | 0 | 0 | 0 | 0 |
| TESTI2024864 | 0 | 0 | 0 | 0 | 0 | 30.932 | 0 |
| TESTI2025757 | 14.139 | 0 | 0 | 0 | 0 | 0 | 0 |
| TESTI2027271 | 4.403 | 0 | 0 | 0 | 0 | 0 | 0 |
| TESTI2027909 | 56.056 | 0 | 0 | 0 | 0 | 0 | 0 |
| TESTI2028659 | 25.135 | 0 | 0 | 0 | 0 | 33.765 | 0 |
| TESTI2029227 | 0 | 0 | 0 | 0 | 0 | 13.298 | 0 |
| TESTI2029259 | 2.760 | 0 | 0 | 0 | 0 | 3.707 | 0 |
| TESTI2029785 | 56.056 | 0 | 0 | 0 | 0 | 0 | 0 |
| TESTI2030336 | 56.056 | 0 | 0 | 0 | 0 | 0 | 0 |
| TESTI2030554 | 29.835 | 0 | 0 | 0 | 0 | 0 | 0 |
| TESTI2031007 | 0 | 0 | 0 | 0 | 0 | 36.354 | 0 |
| TESTI2032643 | 10.140 | 0 | 0 | 0 | 0 | 0 | 0 |
| TESTI2033031 | 25.656 | 0 | 0 | 0 | 0 | 0 | 0 |
| TESTI2033441 | 7.320 | 0 | 0 | 0 | 0 | 0 | 0 |
| TESTI2034307 | 56.056 | 0 | 0 | 0 | 0 | 0 | 0 |
| TESTI2034916 | 6.339 | 0 | 0 | 0 | 0 | 8.515 | 0 |
| TESTI2034940 | 1.521 | 1.929 | 0 | 0 | 5.674 | 0.292 | 0 |
| TESTI2036913 | 0 | 0 | 0 | 0 | 0 | 22.732 | 0 |
| TESTI2036969 | 2.996 | 0 | 0 | 0 | 0 | 0 | 0 |
| TESTI2039177 | 0 | 0 | 0 | 0 | 0 | 9.285 | 0 |
| TESTI2039707 | 0 | 84.991 | 0 | 0 | 0 | 0 | 0 |
| TESTI2044276 | 3.954 | 0 | 0 | 0 | 0 | 10.623 | 0 |
| TESTI2046456 | 1.544 | 3.427 | 3.182 | 0 | 0 | 5.185 | 0 |
| TESTI2047605 | 0 | 0 | 0 | 0 | 0 | 16.321 | 0 |
| TESTI2053667 | 0 | 0 | 0 | 0 | 0 | 63.148 | 0 |
| TESTI2053723 | 3.775 | 0 | 0 | 0 | 0 | 0 | 0 |
| TESTI4000014 | 0.596 | 0 | 0 | 0 | 0 | 2.800 | 3.835 |
| TESTI4000349 | 0 | 0 | 0 | 0 | 0 | 29.117 | 0 |
| TESTI4000434 | 0 | 0 | 0 | 0 | 0 | 14.646 | 0 |
| TESTI4001467 | 4.616 | 0 | 0 | 0 | 0 | 0 | 0 |
| TESTI4001561 | 0 | 0 | 0 | 0 | 0 | 45.102 | 0 |
| TESTI4002202 | 0 | 0 | 22.792 | 0 | 0 | 0 | 0 |
| TESTI4002799 | 0.368 | 0 | 0 | 0 | 0 | 1.979 | 0 |
| TESTI4002988 | 0 | 0 | 0 | 0 | 0 | 48.582 | 0 |
| TESTI4003150 | 12.383 | 0 | 0 | 0 | 0 | 0 | 0 |
| TESTI4003179 | 0 | 0 | 0 | 0 | 0 | 46.144 | 0 |
| TESTI4003579 | 0 | 0 | 0 | 0 | 0 | 63.148 | 0 |
| TESTI4003602 | 21.653 | 0 | 0 | 0 | 0 | 0 | 0 |
| TESTI4003703 | 0 | 0 | 0 | 0 | 0 | 4.956 | 0 |
| TESTI4004210 | 0 | 0 | 0 | 0 | 0 | 40.382 | 0 |
| TESTI4005133 | 9.943 | 0 | 0 | 0 | 0 | 13.357 | 0 |
| TESTI4005399 | 6.502 | 0 | 0 | 0 | 0 | 8.734 | 0 |
| TESTI4006137 | 0 | 0 | 0 | 0 | 0 | 28.849 | 0 |
| TESTI4006819 | 0 | 0 | 0 | 0 | 0 | 46.144 | 0 |
| TESTI4007816 | 0 | 0 | 0 | 89.634 | 0 | 0 | 0 |
| TESTI4009286 | 3.627 | 0 | 0 | 0 | 0 | 4.060 | 0 |
| TESTI4009454 | 0 | 0 | 0 | 0 | 0 | 9.004 | 0 |
| TESTI4009457 | 0 | 0 | 0 | 0 | 0 | 29.991 | 0 |
| TESTI4010851 | 3.191 | 0 | 0 | 0 | 0 | 1.837 | 0 |
| TESTI4010979 | 16.384 | 0 | 0 | 0 | 0 | 0 | 0 |
| TESTI4013441 | 0.915 | 0 | 1.078 | 0 | 0 | 0.176 | 0 |
| TESTI4013474 | 8.616 | 0 | 7.104 | 0 | 0 | 0 | 0 |
| TESTI4013735 | 0 | 0 | 0 | 0 | 0 | 63.148 | 0 |
| TESTI4014908 | 0 | 0 | 0 | 0 | 0 | 40.382 | 0 |
| TESTI4016925 | 0 | 0 | 0 | 0 | 0 | 77.412 | 0 |
| TESTI4018152 | 71.841 | 0 | 0 | 0 | 0 | 0 | 0 |
| TESTI4018938 | 0 | 0 | 0 | 0 | 0 | 19.395 | 0 |
| TESTI4024245 | 0 | 0 | 0 | 0 | 0 | 37.759 | 0 |
| TESTI4024740 | 15.000 | 0 | 0 | 0 | 0 | 0 | 0 |
| TESTI4026079 | 0 | 0 | 0 | 0 | 0 | 28.497 | 0 |
| TESTI4029671 | 0 | 0 | 0 | 0 | 0 | 20.833 | 0 |
| TESTI4032913 | 6.759 | 0 | 0 | 0 | 0 | 0 | 0 |
| TESTI4033690 | 0 | 0 | 0 | 0 | 0 | 63.148 | 0 |
| TESTI4037156 | 0.923 | 0 | 0 | 0 | 0 | 0.620 | 0 |
| TESTI4038284 | 0 | 0 | 0 | 0 | 0 | 4.126 | 0 |
| TESTI4043140 | 4.624 | 0 | 0 | 0 | 0 | 3.106 | 0 |
| TESTI4044704 | 4.250 | 0 | 0 | 0 | 0 | 0 | 0 |
| TESTI4046819 | 0 | 73.082 | 0 | 0 | 0 | 0 | 0 |
| THYMU1000002 | 0.494 | 2.191 | 0 | 0 | 0 | 0.663 | 0 |
| THYMU1000010 | 4.496 | 0 | 0 | 0 | 0 | 0 | 0 |
| THYMU1000016 | 1.289 | 0 | 0 | 0 | 0 | 1.299 | 0 |
| THYMU1000017 | 25.065 | 0 | 0 | 0 | 0 | 0 | 0 |
| THYMU1000025 | 100 | 0 | 0 | 0 | 0 | 0 | 0 |
| THYMU1000029 | 44.974 | 0 | 0 | 0 | 0 | 0 | 0 |
| THYMU1000032 | 50.116 | 0 | 0 | 0 | 0 | 0.874 | 0 |
| THYMU1000033 | 100 | 0 | 0 | 0 | 0 | 0 | 0 |
| THYMU1000041 | 11.897 | 0 | 0 | 0 | 0 | 13.318 | 0 |
| THYMU1000060 | 100 | 0 | 0 | 0 | 0 | 0 | 0 |
| THYMU1000074 | 100 | 0 | 0 | 0 | 0 | 0 | 0 |
| THYMU1000083 | 7.501 | 0 | 0 | 0 | 0 | 3.359 | 0 |
| THYMU1000098 | 100 | 0 | 0 | 0 | 0 | 0 | 0 |
| THYMU1000103 | 14.701 | 0 | 0 | 0 | 0 | 1.975 | 0 |
| THYMU1000105 | 12.511 | 55.541 | 0 | 0 | 0 | 0 | 0 |
| THYMU1000109 | 2.625 | 0 | 0 | 0 | 17.143 | 0 | 0 |
| THYMU1000136 | 100 | 0 | 0 | 0 | 0 | 0 | 0 |
| THYMU1000142 | 41.147 | 0 | 0 | 0 | 0 | 0 | 0 |
| THYMU1000144 | 32.353 | 0 | 0 | 0 | 0 | 0 | 0 |
| THYMU1000158 | 100 | 0 | 0 | 0 | 0 | 0 | 0 |
| THYMU1000176 | 100 | 0 | 0 | 0 | 0 | 0 | 0 |
| THYMU1000179 | 42.674 | 0 | 0 | 0 | 0 | 57.326 | 0 |
| THYMU1000191 | 100 | 0 | 0 | 0 | 0 | 0 | 0 |
| THYMU1000198 | 45.282 | 0 | 0 | 0 | 0 | 0 | 0 |
| THYMU1000217 | 100 | 0 | 0 | 0 | 0 | 0 | 0 |
| THYMU1000240 | 100 | 0 | 0 | 0 | 0 | 0 | 0 |
| THYMU1000242 | 100 | 0 | 0 | 0 | 0 | 0 | 0 |
| THYMU1000291 | 100 | 0 | 0 | 0 | 0 | 0 | 0 |
| THYMU1000316 | 41.147 | 0 | 0 | 0 | 0 | 0 | 0 |
| THYMU1000318 | 100 | 0 | 0 | 0 | 0 | 0 | 0 |
| THYMU1000329 | 4.444 | 0 | 0 | 0 | 0 | 0 | 0 |
| THYMU1000331 | 37.949 | 0 | 0 | 0 | 0 | 0 | 0 |
| THYMU1000336 | 100 | 0 | 0 | 0 | 0 | 0 | 0 |
| THYMU1000359 | 12.068 | 0 | 0 | 0 | 0 | 0 | 0 |
| THYMU1000366 | 100 | 0 | 0 | 0 | 0 | 0 | 0 |
| THYMU1000374 | 11.240 | 0 | 0 | 0 | 0 | 3.355 | 0 |
| THYMU1000382 | 100 | 0 | 0 | 0 | 0 | 0 | 0 |
| THYMU1000393 | 100 | 0 | 0 | 0 | 0 | 0 | 0 |
| THYMU1000394 | 12.297 | 0 | 0 | 0 | 0 | 0 | 0 |
| THYMU1000399 | 100 | 0 | 0 | 0 | 0 | 0 | 0 |
| THYMU1000426 | 100 | 0 | 0 | 0 | 0 | 0 | 0 |
| THYMU1000428 | 0.948 | 2.104 | 0 | 0 | 0 | 0.637 | 0 |
| THYMU1000440 | 100 | 0 | 0 | 0 | 0 | 0 | 0 |
| THYMU1000459 | 100 | 0 | 0 | 0 | 0 | 0 | 0 |
| THYMU1000473 | 2.774 | 0 | 0 | 0 | 0 | 0 | 0 |
| THYMU1000490 | 4.781 | 0 | 0 | 0 | 0 | 6.423 | 0 |
| THYMU1000491 | 100 | 0 | 0 | 0 | 0 | 0 | 0 |
| THYMU1000496 | 100 | 0 | 0 | 0 | 0 | 0 | 0 |
| THYMU1000499 | 4.759 | 0 | 0 | 0 | 0 | 0 | 0 |
| THYMU1000527 | 100 | 0 | 0 | 0 | 0 | 0 | 0 |
| THYMU1000532 | 100 | 0 | 0 | 0 | 0 | 0 | 0 |
| THYMU1000536 | 100 | 0 | 0 | 0 | 0 | 0 | 0 |
| THYMU1000554 | 100 | 0 | 0 | 0 | 0 | 0 | 0 |
| THYMU1000558 | 100 | 0 | 0 | 0 | 0 | 0 | 0 |
| THYMU1000576 | 100 | 0 | 0 | 0 | 0 | 0 | 0 |
| THYMU1000600 | 100 | 0 | 0 | 0 | 0 | 0 | 0 |
| THYMU1000677 | 100 | 0 | 0 | 0 | 0 | 0 | 0 |
| THYMU1000692 | 100 | 0 | 0 | 0 | 0 | 0 | 0 |
| THYMU2000022 | 100 | 0 | 0 | 0 | 0 | 0 | 0 |
| THYMU2000032 | 100 | 0 | 0 | 0 | 0 | 0 | 0 |
| THYMU2000057 | 6.785 | 0 | 18.649 | 0 | 0 | 1.519 | 0 |
| THYMU2000120 | 32.401 | 0 | 0 | 0 | 0 | 0 | 0 |
| THYMU2000138 | 53.005 | 0 | 0 | 0 | 0 | 0 | 0 |
| THYMU2000140 | 100 | 0 | 0 | 0 | 0 | 0 | 0 |
| THYMU2000155 | 42.920 | 0 | 0 | 0 | 0 | 0 | 0 |
| THYMU2000162 | 54.019 | 0 | 0 | 0 | 0 | 0 | 0 |
| THYMU2000171 | 100 | 0 | 0 | 0 | 0 | 0 | 0 |
| THYMU2000176 | 100 | 0 | 0 | 0 | 0 | 0 | 0 |
| THYMU2000179 | 100 | 0 | 0 | 0 | 0 | 0 | 0 |
| THYMU2000231 | 100 | 0 | 0 | 0 | 0 | 0 | 0 |
| THYMU2000236 | 18.303 | 0 | 0 | 0 | 0 | 0 | 0 |
| THYMU2000276 | 100 | 0 | 0 | 0 | 0 | 0 | 0 |
| THYMU2000280 | 100 | 0 | 0 | 0 | 0 | 0 | 0 |
| THYMU2000300 | 73.082 | 0 | 0 | 0 | 0 | 0 | 0 |
| THYMU2000317 | 100 | 0 | 0 | 0 | 0 | 0 | 0 |
| THYMU2000368 | 100 | 0 | 0 | 0 | 0 | 0 | 0 |
| THYMU2000369 | 14.991 | 0 | 0 | 0 | 0 | 0 | 0 |
| THYMU2000382 | 1.516 | 2.244 | 0 | 0 | 13.202 | 0 | 0 |
| THYMU2000418 | 100 | 0 | 0 | 0 | 0 | 0 | 0 |
| THYMU2000436 | 3.842 | 3.411 | 0 | 0 | 0 | 0 | 0 |
| THYMU2000440 | 100 | 0 | 0 | 0 | 0 | 0 | 0 |
| THYMU2000489 | 45.282 | 0 | 0 | 0 | 0 | 0 | 0 |
| THYMU2000492 | 100 | 0 | 0 | 0 | 0 | 0 | 0 |
| THYMU2000519 | 100 | 0 | 0 | 0 | 0 | 0 | 0 |
| THYMU2000570 | 100 | 0 | 0 | 0 | 0 | 0 | 0 |
| THYMU2000602 | 100 | 0 | 0 | 0 | 0 | 0 | 0 |
| THYMU2000660 | 100 | 0 | 0 | 0 | 0 | 0 | 0 |
| THYMU2000671 | 100 | 0 | 0 | 0 | 0 | 0 | 0 |
| THYMU2000672 | 18.861 | 0 | 0 | 0 | 0 | 0 | 0 |
| THYMU2000684 | 6.944 | 15.412 | 0 | 0 | 0 | 0 | 0 |
| THYMU2000702 | 2.609 | 0 | 0 | 0 | 0 | 0 | 0 |
| THYMU2000767 | 100 | 0 | 0 | 0 | 0 | 0 | 0 |
| THYMU2000775 | 15.614 | 0 | 0 | 0 | 0 | 0 | 0 |
| THYMU2000800 | 100 | 0 | 0 | 0 | 0 | 0 | 0 |
| THYMU2000879 | 100 | 0 | 0 | 0 | 0 | 0 | 0 |
| THYMU2000932 | 100 | 0 | 0 | 0 | 0 | 0 | 0 |
| THYMU2000946 | 1.206 | 0 | 0 | 0 | 0 | 0 | 0 |
| THYMU2000950 | 18.385 | 81.615 | 0 | 0 | 0 | 0 | 0 |
| THYMU2000971 | 42.920 | 0 | 0 | 0 | 0 | 0 | 0 |
| THYMU2000982 | 100 | 0 | 0 | 0 | 0 | 0 | 0 |
| THYMU2000990 | 100 | 0 | 0 | 0 | 0 | 0 | 0 |
| THYMU2001007 | 15.835 | 0 | 0 | 0 | 0 | 18.233 | 0 |
| THYMU2001018 | 7.531 | 0 | 0 | 0 | 0 | 0 | 0 |
| THYMU2001053 | 100 | 0 | 0 | 0 | 0 | 0 | 0 |
| THYMU2001071 | 100 | 0 | 0 | 0 | 0 | 0 | 0 |
| THYMU2001090 | 17.721 | 0 | 0 | 0 | 0 | 0 | 0 |
| THYMU2001139 | 100 | 0 | 0 | 0 | 0 | 0 | 0 |
| THYMU2001195 | 32.401 | 0 | 0 | 0 | 0 | 0 | 0 |
| THYMU2001202 | 100 | 0 | 0 | 0 | 0 | 0 | 0 |
| THYMU2001203 | 100 | 0 | 0 | 0 | 0 | 0 | 0 |
| THYMU2001256 | 100 | 0 | 0 | 0 | 0 | 0 | 0 |
| THYMU2001270 | 100 | 0 | 0 | 0 | 0 | 0 | 0 |
| THYMU2001291 | 100 | 0 | 0 | 0 | 0 | 0 | 0 |
| THYMU2001314 | 100 | 0 | 0 | 0 | 0 | 0 | 0 |
| THYMU2001325 | 100 | 0 | 0 | 0 | 0 | 0 | 0 |
| THYMU2001357 | 100 | 0 | 0 | 0 | 0 | 0 | 0 |
| THYMU2001381 | 5.656 | 0 | 46.631 | 0 | 0 | 0 | 0 |
| THYMU2001422 | 10.386 | 0 | 0 | 0 | 0 | 0 | 0 |
| THYMU2001443 | 100 | 0 | 0 | 0 | 0 | 0 | 0 |
| THYMU2001515 | 85.122 | 0 | 0 | 0 | 0 | 0 | 0 |
| THYMU2001521 | 16.572 | 0 | 0 | 0 | 0 | 0 | 0 |
| THYMU2001556 | 100 | 0 | 0 | 0 | 0 | 0 | 0 |
| THYMU2001622 | 100 | 0 | 0 | 0 | 0 | 0 | 0 |
| THYMU2001727 | 100 | 0 | 0 | 0 | 0 | 0 | 0 |
| THYMU2001819 | 19.114 | 0 | 0 | 0 | 0 | 0 | 0 |
| THYMU2001825 | 100 | 0 | 0 | 0 | 0 | 0 | 0 |
| THYMU2001839 | 13.046 | 0 | 0 | 0 | 0 | 0 | 0 |
| THYMU2001868 | 26.657 | 0 | 0 | 0 | 0 | 0 | 0 |
| THYMU2001898 | 100 | 0 | 0 | 0 | 0 | 0 | 0 |
| THYMU2001900 | 100 | 0 | 0 | 0 | 0 | 0 | 0 |
| THYMU2001916 | 100 | 0 | 0 | 0 | 0 | 0 | 0 |
| THYMU2001926 | 16.184 | 0 | 0 | 0 | 0 | 0 | 0 |
| THYMU2001989 | 100 | 0 | 0 | 0 | 0 | 0 | 0 |
| THYMU2002023 | 22.349 | 0 | 0 | 0 | 0 | 0 | 0 |
| THYMU2002037 | 100 | 0 | 0 | 0 | 0 | 0 | 0 |
| THYMU2002080 | 12.409 | 0 | 0 | 0 | 0 | 0 | 0 |
| THYMU2002109 | 100 | 0 | 0 | 0 | 0 | 0 | 0 |
| THYMU2002147 | 58.982 | 0 | 0 | 0 | 0 | 0 | 0 |
| THYMU2002154 | 100 | 0 | 0 | 0 | 0 | 0 | 0 |
| THYMU2002157 | 100 | 0 | 0 | 0 | 0 | 0 | 0 |
| THYMU2002162 | 18.182 | 0 | 0 | 0 | 0 | 0 | 0 |
| THYMU2002177 | 100 | 0 | 0 | 0 | 0 | 0 | 0 |
| THYMU2002203 | 100 | 0 | 0 | 0 | 0 | 0 | 0 |
| THYMU2002229 | 18.158 | 0 | 0 | 0 | 0 | 0 | 0 |
| THYMU2002242 | 100 | 0 | 0 | 0 | 0 | 0 | 0 |
| THYMU2002338 | 100 | 0 | 0 | 0 | 0 | 0 | 0 |
| THYMU2002356 | 100 | 0 | 0 | 0 | 0 | 0 | 0 |
| THYMU2002376 | 100 | 0 | 0 | 0 | 0 | 0 | 0 |
| THYMU2002384 | 100 | 0 | 0 | 0 | 0 | 0 | 0 |
| THYMU2002450 | 35.978 | 0 | 0 | 0 | 0 | 24.165 | 0 |
| THYMU2002490 | 100 | 0 | 0 | 0 | 0 | 0 | 0 |
| THYMU2002548 | 100 | 0 | 0 | 0 | 0 | 0 | 0 |
| THYMU2002583 | 2.161 | 1.918 | 3.563 | 0 | 11.289 | 2.322 | 0 |
| THYMU2002695 | 100 | 0 | 0 | 0 | 0 | 0 | 0 |
| THYMU2002745 | 3.192 | 0 | 0 | 0 | 0 | 0 | 0 |
| THYMU2002756 | 12.209 | 0 | 0 | 0 | 0 | 8.200 | 0 |
| THYMU2002789 | 100 | 0 | 0 | 0 | 0 | 0 | 0 |
| THYMU2002792 | 100 | 0 | 0 | 0 | 0 | 0 | 0 |
| THYMU2002815 | 27.551 | 0 | 0 | 0 | 0 | 0 | 0 |
| THYMU2002841 | 4.840 | 0 | 0 | 0 | 0 | 0 | 0 |
| THYMU2002852 | 100 | 0 | 0 | 0 | 0 | 0 | 0 |
| THYMU2002910 | 100 | 0 | 0 | 0 | 0 | 0 | 0 |
| THYMU2002950 | 100 | 0 | 0 | 0 | 0 | 0 | 0 |
| THYMU2002983 | 2.495 | 0 | 0 | 0 | 0 | 0 | 0 |
| THYMU2003012 | 1.461 | 0 | 0 | 0 | 0 | 0.982 | 0 |
| THYMU2003046 | 20.838 | 0 | 0 | 0 | 0 | 0 | 0 |
| THYMU2003069 | 92.134 | 0 | 0 | 0 | 0 | 0 | 0 |
| THYMU2003107 | 100 | 0 | 0 | 0 | 0 | 0 | 0 |
| THYMU2003124 | 100 | 0 | 0 | 0 | 0 | 0 | 0 |
| THYMU2003133 | 14.465 | 0 | 0 | 0 | 0 | 3.886 | 0 |
| THYMU2003166 | 100 | 0 | 0 | 0 | 0 | 0 | 0 |
| THYMU2003232 | 100 | 0 | 0 | 0 | 0 | 0 | 0 |
| THYMU2003242 | 100 | 0 | 0 | 0 | 0 | 0 | 0 |
| THYMU2003249 | 100 | 0 | 0 | 0 | 0 | 0 | 0 |
| THYMU2003270 | 100 | 0 | 0 | 0 | 0 | 0 | 0 |
| THYMU2003282 | 100 | 0 | 0 | 0 | 0 | 0 | 0 |
| THYMU2003287 | 79.316 | 0 | 0 | 0 | 0 | 0 | 0 |
| THYMU2003336 | 100 | 0 | 0 | 0 | 0 | 0 | 0 |
| THYMU2003366 | 100 | 0 | 0 | 0 | 0 | 0 | 0 |
| THYMU2003397 | 100 | 0 | 0 | 0 | 0 | 0 | 0 |
| THYMU2003419 | 6.700 | 0 | 0 | 0 | 0 | 2.250 | 0 |
| THYMU2003440 | 19.399 | 0 | 0 | 0 | 0 | 0 | 0 |
| THYMU2003446 | 5.966 | 0 | 0 | 0 | 0 | 0 | 0 |
| THYMU2003470 | 100 | 0 | 0 | 0 | 0 | 0 | 0 |
| THYMU2003479 | 100 | 0 | 0 | 0 | 0 | 0 | 0 |
| THYMU2003499 | 37.705 | 0 | 0 | 0 | 0 | 0 | 0 |
| THYMU2003542 | 1.802 | 0 | 0 | 0 | 0 | 0 | 0 |
| THYMU2003632 | 100 | 0 | 0 | 0 | 0 | 0 | 0 |
| THYMU2003650 | 100 | 0 | 0 | 0 | 0 | 0 | 0 |
| THYMU2003700 | 100 | 0 | 0 | 0 | 0 | 0 | 0 |
| THYMU2003760 | 100 | 0 | 0 | 0 | 0 | 0 | 0 |
| THYMU2003803 | 100 | 0 | 0 | 0 | 0 | 0 | 0 |
| THYMU2003855 | 100 | 0 | 0 | 0 | 0 | 0 | 0 |
| THYMU2003891 | 4.380 | 0 | 0 | 0 | 0 | 0.163 | 3.134 |
| THYMU2003907 | 9.456 | 0 | 77.967 | 0 | 0 | 0 | 0 |
| THYMU2003932 | 32.257 | 0 | 0 | 0 | 0 | 0 | 0 |
| THYMU2003981 | 2.613 | 0 | 0 | 0 | 0 | 3.510 | 11.216 |
| THYMU2004003 | 100 | 0 | 0 | 0 | 0 | 0 | 0 |
| THYMU2004008 | 100 | 0 | 0 | 0 | 0 | 0 | 0 |
| THYMU2004042 | 100 | 0 | 0 | 0 | 0 | 0 | 0 |
| THYMU2004108 | 11.015 | 0 | 0 | 0 | 0 | 0 | 0 |
| THYMU2004111 | 100 | 0 | 0 | 0 | 0 | 0 | 0 |
| THYMU2004123 | 100 | 0 | 0 | 0 | 0 | 0 | 0 |
| THYMU2004139 | 100 | 0 | 0 | 0 | 0 | 0 | 0 |
| THYMU2004152 | 9.107 | 0 | 0 | 0 | 0 | 0 | 21.324 |
| THYMU2004169 | 100 | 0 | 0 | 0 | 0 | 0 | 0 |
| THYMU2004284 | 5.601 | 0 | 0 | 0 | 0 | 0 | 0 |
| THYMU2004320 | 13.625 | 0 | 0 | 0 | 0 | 0 | 0 |
| THYMU2004336 | 100 | 0 | 0 | 0 | 0 | 0 | 0 |
| THYMU2004344 | 2.130 | 0 | 0 | 0 | 0 | 0 | 0 |
| THYMU2004356 | 100 | 0 | 0 | 0 | 0 | 0 | 0 |
| THYMU2004410 | 3.195 | 0 | 0 | 0 | 0 | 2.146 | 0 |
| THYMU2004452 | 19.272 | 0 | 0 | 0 | 0 | 0 | 0 |
| THYMU2004508 | 54.019 | 0 | 0 | 0 | 0 | 0 | 0 |
| THYMU2004512 | 100 | 0 | 0 | 0 | 0 | 0 | 0 |
| THYMU2004635 | 44.974 | 0 | 0 | 0 | 0 | 0 | 0 |
| THYMU2004639 | 100 | 0 | 0 | 0 | 0 | 0 | 0 |
| THYMU2004668 | 100 | 0 | 0 | 0 | 0 | 0 | 0 |
| THYMU2004677 | 100 | 0 | 0 | 0 | 0 | 0 | 0 |
| THYMU2004688 | 100 | 0 | 0 | 0 | 0 | 0 | 0 |
| THYMU2004693 | 100 | 0 | 0 | 0 | 0 | 0 | 0 |
| THYMU2004733 | 9.340 | 0 | 0 | 0 | 0 | 0 | 0 |
| THYMU2004835 | 100 | 0 | 0 | 0 | 0 | 0 | 0 |
| THYMU2004843 | 100 | 0 | 0 | 0 | 0 | 0 | 0 |
| THYMU2004906 | 10.451 | 0 | 0 | 0 | 0 | 0 | 0 |
| THYMU2004916 | 2.602 | 0 | 0 | 0 | 33.990 | 0 | 0 |
| THYMU2004986 | 100 | 0 | 0 | 0 | 0 | 0 | 0 |
| THYMU2005001 | 100 | 0 | 0 | 0 | 0 | 0 | 0 |
| THYMU2005003 | 11.644 | 0 | 0 | 0 | 0 | 0 | 0 |
| THYMU2005046 | 100 | 0 | 0 | 0 | 0 | 0 | 0 |
| THYMU2005134 | 100 | 0 | 0 | 0 | 0 | 0 | 0 |
| THYMU2005156 | 31.905 | 0 | 0 | 0 | 0 | 0 | 0 |
| THYMU2005190 | 100 | 0 | 0 | 0 | 0 | 0 | 0 |
| THYMU2005225 | 100 | 0 | 0 | 0 | 0 | 0 | 0 |
| THYMU2005240 | 100 | 0 | 0 | 0 | 0 | 0 | 0 |
| THYMU2005246 | 42.674 | 0 | 0 | 0 | 0 | 57.326 | 0 |
| THYMU2005270 | 100 | 0 | 0 | 0 | 0 | 0 | 0 |
| THYMU2005283 | 100 | 0 | 0 | 0 | 0 | 0 | 0 |
| THYMU2005303 | 100 | 0 | 0 | 0 | 0 | 0 | 0 |
| THYMU2005321 | 100 | 0 | 0 | 0 | 0 | 0 | 0 |
| THYMU2005356 | 100 | 0 | 0 | 0 | 0 | 0 | 0 |
| THYMU2005369 | 100 | 0 | 0 | 0 | 0 | 0 | 0 |
| THYMU2005439 | 13.827 | 0 | 0 | 0 | 0 | 0 | 0 |
| THYMU2005480 | 100 | 0 | 0 | 0 | 0 | 0 | 0 |
| THYMU2005482 | 10.260 | 0 | 0 | 0 | 0 | 0 | 0 |
| THYMU2005507 | 100 | 0 | 0 | 0 | 0 | 0 | 0 |
| THYMU2005545 | 100 | 0 | 0 | 0 | 0 | 0 | 0 |
| THYMU2005546 | 2.737 | 0 | 0 | 0 | 0 | 0.613 | 0 |
| THYMU2005574 | 54.019 | 0 | 0 | 0 | 0 | 0 | 0 |
| THYMU2005576 | 100 | 0 | 0 | 0 | 0 | 0 | 0 |
| THYMU2005748 | 100 | 0 | 0 | 0 | 0 | 0 | 0 |
| THYMU2005759 | 100 | 0 | 0 | 0 | 0 | 0 | 0 |
| THYMU2005807 | 54.019 | 0 | 0 | 0 | 0 | 0 | 0 |
| THYMU2005815 | 100 | 0 | 0 | 0 | 0 | 0 | 0 |
| THYMU2005855 | 100 | 0 | 0 | 0 | 0 | 0 | 0 |
| THYMU2005881 | 100 | 0 | 0 | 0 | 0 | 0 | 0 |
| THYMU2005948 | 100 | 0 | 0 | 0 | 0 | 0 | 0 |
| THYMU2005980 | 6.762 | 0 | 0 | 0 | 0 | 0 | 0 |
| THYMU2005997 | 26.854 | 0 | 0 | 0 | 0 | 0 | 0 |
| THYMU2006001 | 100 | 0 | 0 | 0 | 0 | 0 | 0 |
| THYMU2006048 | 100 | 0 | 0 | 0 | 0 | 0 | 0 |
| THYMU2006098 | 100 | 0 | 0 | 0 | 0 | 0 | 0 |
| THYMU2006160 | 100 | 0 | 0 | 0 | 0 | 0 | 0 |
| THYMU2006170 | 100 | 0 | 0 | 0 | 0 | 0 | 0 |
| THYMU2006252 | 100 | 0 | 0 | 0 | 0 | 0 | 0 |
| THYMU2006261 | 24.179 | 0 | 0 | 0 | 0 | 0 | 0 |
| THYMU2006277 | 0.967 | 0 | 0 | 0 | 0 | 0 | 0 |
| THYMU2006303 | 100 | 0 | 0 | 0 | 0 | 0 | 0 |
| THYMU2006324 | 100 | 0 | 0 | 0 | 0 | 0 | 0 |
| THYMU2006350 | 100 | 0 | 0 | 0 | 0 | 0 | 0 |
| THYMU2006357 | 100 | 0 | 0 | 0 | 0 | 0 | 0 |
| THYMU2006365 | 100 | 0 | 0 | 0 | 0 | 0 | 0 |
| THYMU2006420 | 100 | 0 | 0 | 0 | 0 | 0 | 0 |
| THYMU2006468 | 100 | 0 | 0 | 0 | 0 | 0 | 0 |
| THYMU2006505 | 2.277 | 0 | 0 | 0 | 0 | 0 | 0 |
| THYMU2006610 | 22.644 | 0 | 0 | 0 | 0 | 0 | 0 |
| THYMU2006666 | 100 | 0 | 0 | 0 | 0 | 0 | 0 |
| THYMU2006712 | 100 | 0 | 0 | 0 | 0 | 0 | 0 |
| THYMU2006813 | 9.236 | 0 | 0 | 0 | 0 | 3.545 | 0 |
| THYMU2006913 | 100 | 0 | 0 | 0 | 0 | 0 | 0 |
| THYMU2006946 | 100 | 0 | 0 | 0 | 0 | 0 | 0 |
| THYMU2006965 | 100 | 0 | 0 | 0 | 0 | 0 | 0 |
| THYMU2007025 | 100 | 0 | 0 | 0 | 0 | 0 | 0 |
| THYMU2007036 | 6.438 | 0 | 0 | 0 | 0 | 0 | 0 |
| THYMU2007060 | 7.110 | 0 | 0 | 0 | 0 | 0 | 0 |
| THYMU2007065 | 10.144 | 0 | 0 | 0 | 0 | 0 | 0 |
| THYMU2007095 | 100 | 0 | 0 | 0 | 0 | 0 | 0 |
| THYMU2007112 | 3.813 | 0 | 0 | 0 | 0 | 0 | 0 |
| THYMU2007146 | 29.835 | 0 | 0 | 0 | 0 | 0 | 0 |
| THYMU2007179 | 100 | 0 | 0 | 0 | 0 | 0 | 0 |
| THYMU2007258 | 100 | 0 | 0 | 0 | 0 | 0 | 0 |
| THYMU2007307 | 100 | 0 | 0 | 0 | 0 | 0 | 0 |
| THYMU2007308 | 100 | 0 | 0 | 0 | 0 | 0 | 0 |
| THYMU2007339 | 25.705 | 0 | 0 | 0 | 0 | 0 | 0 |
| THYMU2007350 | 100 | 0 | 0 | 0 | 0 | 0 | 0 |
| THYMU2007384 | 100 | 0 | 0 | 0 | 0 | 0 | 0 |
| THYMU2007415 | 8.071 | 0 | 0 | 0 | 0 | 0 | 0 |
| THYMU2007467 | 6.736 | 0 | 0 | 0 | 0 | 0 | 0 |
| THYMU2007493 | 100 | 0 | 0 | 0 | 0 | 0 | 0 |
| THYMU2007521 | 100 | 0 | 0 | 0 | 0 | 0 | 0 |
| THYMU2007528 | 100 | 0 | 0 | 0 | 0 | 0 | 0 |
| THYMU2007530 | 100 | 0 | 0 | 0 | 0 | 0 | 0 |
| THYMU2007532 | 26.053 | 0 | 0 | 0 | 0 | 17.499 | 0 |
| THYMU2007561 | 100 | 0 | 0 | 0 | 0 | 0 | 0 |
| THYMU2007571 | 100 | 0 | 0 | 0 | 0 | 0 | 0 |
| THYMU2007635 | 100 | 0 | 0 | 0 | 0 | 0 | 0 |
| THYMU2007658 | 100 | 0 | 0 | 0 | 0 | 0 | 0 |
| THYMU2007667 | 100 | 0 | 0 | 0 | 0 | 0 | 0 |
| THYMU2007694 | 17.288 | 0 | 0 | 0 | 0 | 0 | 0 |
| THYMU2007725 | 100 | 0 | 0 | 0 | 0 | 0 | 0 |
| THYMU2007729 | 8.151 | 0 | 0 | 0 | 0 | 0 | 0 |
| THYMU2007802 | 25.065 | 0 | 0 | 0 | 0 | 0 | 0 |
| THYMU2007824 | 100 | 0 | 0 | 0 | 0 | 0 | 0 |
| THYMU2007854 | 100 | 0 | 0 | 0 | 0 | 0 | 0 |
| THYMU2007886 | 1.155 | 0 | 0 | 0 | 0 | 0 | 0 |
| THYMU2007952 | 100 | 0 | 0 | 0 | 0 | 0 | 0 |
| THYMU2007969 | 100 | 0 | 0 | 0 | 0 | 0 | 0 |
| THYMU2008035 | 45.470 | 0 | 0 | 0 | 0 | 0 | 0 |
| THYMU2008036 | 45.282 | 0 | 0 | 0 | 0 | 0 | 0 |
| THYMU2008049 | 18.834 | 0 | 0 | 0 | 0 | 0 | 0 |
| THYMU2008072 | 100 | 0 | 0 | 0 | 0 | 0 | 0 |
| THYMU2008111 | 100 | 0 | 0 | 0 | 0 | 0 | 0 |
| THYMU2008145 | 100 | 0 | 0 | 0 | 0 | 0 | 0 |
| THYMU2008149 | 73.674 | 0 | 0 | 0 | 0 | 19.794 | 0 |
| THYMU2008185 | 2.405 | 0 | 0 | 0 | 0 | 0 | 0 |
| THYMU2008191 | 100 | 0 | 0 | 0 | 0 | 0 | 0 |
| THYMU2008207 | 100 | 0 | 0 | 0 | 0 | 0 | 0 |
| THYMU2008226 | 100 | 0 | 0 | 0 | 0 | 0 | 0 |
| THYMU2008282 | 100 | 0 | 0 | 0 | 0 | 0 | 0 |
| THYMU2008321 | 2.411 | 0 | 0 | 0 | 0 | 0 | 0 |
| THYMU2008339 | 100 | 0 | 0 | 0 | 0 | 0 | 0 |
| THYMU2008350 | 100 | 0 | 0 | 0 | 0 | 0 | 0 |
| THYMU2008351 | 100 | 0 | 0 | 0 | 0 | 0 | 0 |
| THYMU2008383 | 56.056 | 0 | 0 | 0 | 0 | 0 | 0 |
| THYMU2008452 | 100 | 0 | 0 | 0 | 0 | 0 | 0 |
| THYMU2008643 | 100 | 0 | 0 | 0 | 0 | 0 | 0 |
| THYMU2008686 | 20.324 | 0 | 0 | 0 | 0 | 0 | 0 |
| THYMU2008691 | 100 | 0 | 0 | 0 | 0 | 0 | 0 |
| THYMU2008714 | 100 | 0 | 0 | 0 | 0 | 0 | 0 |
| THYMU2008725 | 10.873 | 0 | 0 | 0 | 0 | 0 | 0 |
| THYMU2008727 | 12.395 | 0 | 0 | 0 | 0 | 0 | 0 |
| THYMU2008781 | 100 | 0 | 0 | 0 | 0 | 0 | 0 |
| THYMU2008799 | 100 | 0 | 0 | 0 | 0 | 0 | 0 |
| THYMU2008876 | 100 | 0 | 0 | 0 | 0 | 0 | 0 |
| THYMU2008910 | 100 | 0 | 0 | 0 | 0 | 0 | 0 |
| THYMU2008917 | 100 | 0 | 0 | 0 | 0 | 0 | 0 |
| THYMU2008928 | 100 | 0 | 0 | 0 | 0 | 0 | 0 |
| THYMU2008990 | 100 | 0 | 0 | 0 | 0 | 0 | 0 |
| THYMU2008994 | 100 | 0 | 0 | 0 | 0 | 0 | 0 |
| THYMU2009023 | 100 | 0 | 0 | 0 | 0 | 0 | 0 |
| THYMU2009046 | 100 | 0 | 0 | 0 | 0 | 0 | 0 |
| THYMU2009101 | 100 | 0 | 0 | 0 | 0 | 0 | 0 |
| THYMU2009104 | 100 | 0 | 0 | 0 | 0 | 0 | 0 |
| THYMU2009134 | 100 | 0 | 0 | 0 | 0 | 0 | 0 |
| THYMU2009157 | 100 | 0 | 0 | 0 | 0 | 0 | 0 |
| THYMU2009181 | 100 | 0 | 0 | 0 | 0 | 0 | 0 |
| THYMU2009186 | 32.401 | 0 | 0 | 0 | 0 | 0 | 0 |
| THYMU2009338 | 42.920 | 0 | 0 | 0 | 0 | 0 | 0 |
| THYMU2009425 | 100 | 0 | 0 | 0 | 0 | 0 | 0 |
| THYMU2009516 | 100 | 0 | 0 | 0 | 0 | 0 | 0 |
| THYMU2009526 | 100 | 0 | 0 | 0 | 0 | 0 | 0 |
| THYMU2009546 | 100 | 0 | 0 | 0 | 0 | 0 | 0 |
| THYMU2009592 | 46.072 | 0 | 0 | 0 | 0 | 0 | 0 |
| THYMU2009596 | 100 | 0 | 0 | 0 | 0 | 0 | 0 |
| THYMU2009658 | 0.584 | 0 | 0 | 0 | 0 | 0.392 | 7.523 |
| THYMU2009792 | 2.335 | 0 | 0 | 0 | 0 | 0 | 0 |
| THYMU2009835 | 100 | 0 | 0 | 0 | 0 | 0 | 0 |
| THYMU2009906 | 100 | 0 | 0 | 0 | 0 | 0 | 0 |
| THYMU2009948 | 100 | 0 | 0 | 0 | 0 | 0 | 0 |
| THYMU2010030 | 100 | 0 | 0 | 0 | 0 | 0 | 0 |
| THYMU2010041 | 62.190 | 0 | 0 | 0 | 0 | 0 | 0 |
| THYMU2010046 | 100 | 0 | 0 | 0 | 0 | 0 | 0 |
| THYMU2010059 | 100 | 0 | 0 | 0 | 0 | 0 | 0 |
| THYMU2010082 | 100 | 0 | 0 | 0 | 0 | 0 | 0 |
| THYMU2010094 | 24.284 | 0 | 0 | 0 | 0 | 6.524 | 0 |
| THYMU2010161 | 12.580 | 0 | 0 | 0 | 0 | 0 | 0 |
| THYMU2010192 | 42.920 | 0 | 0 | 0 | 0 | 0 | 0 |
| THYMU2010448 | 4.415 | 0 | 0 | 0 | 0 | 0 | 0 |
| THYMU2010519 | 86.171 | 0 | 0 | 0 | 0 | 0 | 0 |
| THYMU2010637 | 100 | 0 | 0 | 0 | 0 | 0 | 0 |
| THYMU2010671 | 100 | 0 | 0 | 0 | 0 | 0 | 0 |
| THYMU2010699 | 100 | 0 | 0 | 0 | 0 | 0 | 0 |
| THYMU2010705 | 100 | 0 | 0 | 0 | 0 | 0 | 0 |
| THYMU2010779 | 70.146 | 0 | 0 | 0 | 0 | 0 | 0 |
| THYMU2010816 | 10.870 | 48.256 | 0 | 0 | 0 | 14.603 | 0 |
| THYMU2010831 | 45.470 | 0 | 0 | 0 | 0 | 0 | 0 |
| THYMU2010848 | 100 | 0 | 0 | 0 | 0 | 0 | 0 |
| THYMU2011053 | 42.674 | 0 | 0 | 0 | 0 | 57.326 | 0 |
| THYMU2011063 | 4.388 | 0 | 0 | 0 | 0 | 0 | 0 |
| THYMU2011072 | 100 | 0 | 0 | 0 | 0 | 0 | 0 |
| THYMU2011096 | 100 | 0 | 0 | 0 | 0 | 0 | 0 |
| THYMU2011118 | 100 | 0 | 0 | 0 | 0 | 0 | 0 |
| THYMU2011142 | 100 | 0 | 0 | 0 | 0 | 0 | 0 |
| THYMU2011183 | 100 | 0 | 0 | 0 | 0 | 0 | 0 |
| THYMU2011257 | 100 | 0 | 0 | 0 | 0 | 0 | 0 |
| THYMU2011259 | 100 | 0 | 0 | 0 | 0 | 0 | 0 |
| THYMU2011295 | 100 | 0 | 0 | 0 | 0 | 0 | 0 |
| THYMU2011308 | 7.001 | 0 | 0 | 0 | 0 | 0 | 0 |
| THYMU2011390 | 100 | 0 | 0 | 0 | 0 | 0 | 0 |
| THYMU2011431 | 100 | 0 | 0 | 0 | 0 | 0 | 0 |
| THYMU2011447 | 100 | 0 | 0 | 0 | 0 | 0 | 0 |
| THYMU2011482 | 10.238 | 0 | 0 | 0 | 0 | 0 | 0 |
| THYMU2011538 | 100 | 0 | 0 | 0 | 0 | 0 | 0 |
| THYMU2011548 | 100 | 0 | 0 | 0 | 0 | 0 | 0 |
| THYMU2011551 | 100 | 0 | 0 | 0 | 0 | 0 | 0 |
| THYMU2011564 | 100 | 0 | 0 | 0 | 0 | 0 | 0 |
| THYMU2011573 | 100 | 0 | 0 | 0 | 0 | 0 | 0 |
| THYMU2011585 | 100 | 0 | 0 | 0 | 0 | 0 | 0 |
| THYMU2011621 | 100 | 0 | 0 | 0 | 0 | 0 | 0 |
| THYMU2011666 | 100 | 0 | 0 | 0 | 0 | 0 | 0 |
| THYMU2011736 | 25.065 | 0 | 0 | 0 | 0 | 0 | 0 |
| THYMU2011785 | 100 | 0 | 0 | 0 | 0 | 0 | 0 |
| THYMU2011806 | 100 | 0 | 0 | 0 | 0 | 0 | 0 |
| THYMU2011852 | 100 | 0 | 0 | 0 | 0 | 0 | 0 |
| THYMU2011875 | 18.705 | 0 | 0 | 0 | 0 | 0 | 0 |
| THYMU2011881 | 8.692 | 0 | 0 | 0 | 0 | 0 | 0 |
| THYMU2011937 | 100 | 0 | 0 | 0 | 0 | 0 | 0 |
| THYMU2011939 | 54.019 | 0 | 0 | 0 | 0 | 0 | 0 |
| THYMU2012002 | 21.171 | 0 | 0 | 0 | 0 | 0 | 0 |
| THYMU2012024 | 9.940 | 0 | 0 | 0 | 0 | 3.338 | 0 |
| THYMU2012073 | 100 | 0 | 0 | 0 | 0 | 0 | 0 |
| THYMU2012104 | 22.558 | 0 | 0 | 0 | 0 | 0 | 0 |
| THYMU2012113 | 100 | 0 | 0 | 0 | 0 | 0 | 0 |
| THYMU2012273 | 100 | 0 | 0 | 0 | 0 | 0 | 0 |
| THYMU2012401 | 19.301 | 0 | 0 | 0 | 0 | 0 | 0 |
| THYMU2012492 | 54.510 | 0 | 0 | 0 | 0 | 0 | 0 |
| THYMU2012507 | 100 | 0 | 0 | 0 | 0 | 0 | 0 |
| THYMU2012565 | 100 | 0 | 0 | 0 | 0 | 0 | 0 |
| THYMU2012574 | 100 | 0 | 0 | 0 | 0 | 0 | 0 |
| THYMU2012625 | 2.599 | 0 | 0 | 0 | 0 | 0 | 22.310 |
| THYMU2012631 | 100 | 0 | 0 | 0 | 0 | 0 | 0 |
| THYMU2012665 | 100 | 0 | 0 | 0 | 0 | 0 | 0 |
| THYMU2012690 | 3.240 | 0 | 0 | 0 | 0 | 0 | 0 |
| THYMU2012701 | 100 | 0 | 0 | 0 | 0 | 0 | 0 |
| THYMU2012807 | 100 | 0 | 0 | 0 | 0 | 0 | 0 |
| THYMU2012826 | 18.467 | 0 | 0 | 0 | 0 | 0 | 0 |
| THYMU2012882 | 100 | 0 | 0 | 0 | 0 | 0 | 0 |
| THYMU2012891 | 100 | 0 | 0 | 0 | 0 | 0 | 0 |
| THYMU2012902 | 100 | 0 | 0 | 0 | 0 | 0 | 0 |
| THYMU2012919 | 100 | 0 | 0 | 0 | 0 | 0 | 0 |
| THYMU2013023 | 100 | 0 | 0 | 0 | 0 | 0 | 0 |
| THYMU2013047 | 100 | 0 | 0 | 0 | 0 | 0 | 0 |
| THYMU2013051 | 18.782 | 0 | 0 | 0 | 0 | 0 | 0 |
| THYMU2013089 | 100 | 0 | 0 | 0 | 0 | 0 | 0 |
| THYMU2013136 | 2.046 | 0 | 0 | 0 | 0 | 2.748 | 0 |
| THYMU2013170 | 19.114 | 0 | 0 | 0 | 0 | 0 | 0 |
| THYMU2013364 | 100 | 0 | 0 | 0 | 0 | 0 | 0 |
| THYMU2013386 | 100 | 0 | 0 | 0 | 0 | 0 | 0 |
| THYMU2013426 | 100 | 0 | 0 | 0 | 0 | 0 | 0 |
| THYMU2013578 | 100 | 0 | 0 | 0 | 0 | 0 | 0 |
| THYMU2013648 | 9.986 | 0 | 0 | 0 | 0 | 0 | 0 |
| THYMU2013705 | 100 | 0 | 0 | 0 | 0 | 0 | 0 |
| THYMU2013757 | 100 | 0 | 0 | 0 | 0 | 0 | 0 |
| THYMU2013779 | 100 | 0 | 0 | 0 | 0 | 0 | 0 |
| THYMU2013863 | 100 | 0 | 0 | 0 | 0 | 0 | 0 |
| THYMU2013916 | 0.925 | 8.211 | 0 | 0 | 0 | 1.242 | 0 |
| THYMU2013950 | 100 | 0 | 0 | 0 | 0 | 0 | 0 |
| THYMU2013981 | 100 | 0 | 0 | 0 | 0 | 0 | 0 |
| THYMU2014067 | 12.580 | 0 | 0 | 0 | 0 | 0 | 0 |
| THYMU2014068 | 100 | 0 | 0 | 0 | 0 | 0 | 0 |
| THYMU2014167 | 4.582 | 0 | 0 | 0 | 0 | 0 | 0 |
| THYMU2014183 | 16.202 | 0 | 0 | 0 | 0 | 0 | 0 |
| THYMU2014204 | 100 | 0 | 0 | 0 | 0 | 0 | 0 |
| THYMU2014297 | 100 | 0 | 0 | 0 | 0 | 0 | 0 |
| THYMU2014323 | 45.282 | 0 | 0 | 0 | 0 | 0 | 0 |
| THYMU2014327 | 100 | 0 | 0 | 0 | 0 | 0 | 0 |
| THYMU2014353 | 62.337 | 0 | 0 | 0 | 0 | 0 | 0 |
| THYMU2014492 | 32.093 | 0 | 0 | 0 | 0 | 0 | 0 |
| THYMU2014500 | 100 | 0 | 0 | 0 | 0 | 0 | 0 |
| THYMU2014599 | 47.240 | 0 | 0 | 0 | 0 | 0 | 0 |
| THYMU2014762 | 100 | 0 | 0 | 0 | 0 | 0 | 0 |
| THYMU2014777 | 100 | 0 | 0 | 0 | 0 | 0 | 0 |
| THYMU2014801 | 100 | 0 | 0 | 0 | 0 | 0 | 0 |
| THYMU2014901 | 100 | 0 | 0 | 0 | 0 | 0 | 0 |
| THYMU2014923 | 100 | 0 | 0 | 0 | 0 | 0 | 0 |
| THYMU2015019 | 22.813 | 0 | 0 | 0 | 0 | 0 | 0 |
| THYMU2015161 | 100 | 0 | 0 | 0 | 0 | 0 | 0 |
| THYMU2015316 | 100 | 0 | 0 | 0 | 0 | 0 | 0 |
| THYMU2015321 | 41.147 | 0 | 0 | 0 | 0 | 0 | 0 |
| THYMU2015439 | 100 | 0 | 0 | 0 | 0 | 0 | 0 |
| THYMU2015441 | 18.750 | 0 | 0 | 0 | 0 | 0 | 0 |
| THYMU2015479 | 100 | 0 | 0 | 0 | 0 | 0 | 0 |
| THYMU2015762 | 0.827 | 3.670 | 0 | 0 | 0 | 0 | 0 |
| THYMU2015775 | 18.523 | 0 | 0 | 0 | 0 | 0 | 0 |
| THYMU2015825 | 100 | 0 | 0 | 0 | 0 | 0 | 0 |
| THYMU2015918 | 44.974 | 0 | 0 | 0 | 0 | 0 | 0 |
| THYMU2015943 | 100 | 0 | 0 | 0 | 0 | 0 | 0 |
| THYMU2015984 | 100 | 0 | 0 | 0 | 0 | 0 | 0 |
| THYMU2016113 | 100 | 0 | 0 | 0 | 0 | 0 | 0 |
| THYMU2016164 | 100 | 0 | 0 | 0 | 0 | 0 | 0 |
| THYMU2016204 | 40.164 | 0 | 0 | 0 | 0 | 0 | 0 |
| THYMU2016219 | 100 | 0 | 0 | 0 | 0 | 0 | 0 |
| THYMU2016360 | 100 | 0 | 0 | 0 | 0 | 0 | 0 |
| THYMU2016496 | 100 | 0 | 0 | 0 | 0 | 0 | 0 |
| THYMU2016523 | 55.019 | 0 | 0 | 0 | 0 | 0 | 0 |
| THYMU2016840 | 18.750 | 0 | 0 | 0 | 0 | 0 | 0 |
| THYMU2016968 | 6.163 | 0 | 0 | 0 | 0 | 0 | 0 |
| THYMU2017008 | 100 | 0 | 0 | 0 | 0 | 0 | 0 |
| THYMU2017010 | 100 | 0 | 0 | 0 | 0 | 0 | 0 |
| THYMU2017023 | 100 | 0 | 0 | 0 | 0 | 0 | 0 |
| THYMU2017085 | 100 | 0 | 0 | 0 | 0 | 0 | 0 |
| THYMU2017099 | 100 | 0 | 0 | 0 | 0 | 0 | 0 |
| THYMU2017158 | 40.164 | 0 | 0 | 0 | 0 | 0 | 0 |
| THYMU2017162 | 100 | 0 | 0 | 0 | 0 | 0 | 0 |
| THYMU2017215 | 100 | 0 | 0 | 0 | 0 | 0 | 0 |
| THYMU2017362 | 100 | 0 | 0 | 0 | 0 | 0 | 0 |
| THYMU2017366 | 100 | 0 | 0 | 0 | 0 | 0 | 0 |
| THYMU2017398 | 100 | 0 | 0 | 0 | 0 | 0 | 0 |
| THYMU2017449 | 100 | 0 | 0 | 0 | 0 | 0 | 0 |
| THYMU2017479 | 100 | 0 | 0 | 0 | 0 | 0 | 0 |
| THYMU2017522 | 100 | 0 | 0 | 0 | 0 | 0 | 0 |
| THYMU2017526 | 100 | 0 | 0 | 0 | 0 | 0 | 0 |
| THYMU2017601 | 5.889 | 0 | 0 | 0 | 0 | 7.910 | 0 |
| THYMU2017675 | 100 | 0 | 0 | 0 | 0 | 0 | 0 |
| THYMU2017707 | 100 | 0 | 0 | 0 | 0 | 0 | 0 |
| THYMU2017831 | 56.056 | 0 | 0 | 0 | 0 | 0 | 0 |
| THYMU2017844 | 100 | 0 | 0 | 0 | 0 | 0 | 0 |
| THYMU2017878 | 54.019 | 0 | 0 | 0 | 0 | 0 | 0 |
| THYMU2017948 | 71.841 | 0 | 0 | 0 | 0 | 0 | 0 |
| THYMU2018028 | 25.065 | 0 | 0 | 0 | 0 | 0 | 0 |
| THYMU2018071 | 100 | 0 | 0 | 0 | 0 | 0 | 0 |
| THYMU2018126 | 1.820 | 0 | 0 | 0 | 15.847 | 0 | 0 |
| THYMU2018189 | 100 | 0 | 0 | 0 | 0 | 0 | 0 |
| THYMU2018197 | 100 | 0 | 0 | 0 | 0 | 0 | 0 |
| THYMU2018384 | 100 | 0 | 0 | 0 | 0 | 0 | 0 |
| THYMU2018455 | 100 | 0 | 0 | 0 | 0 | 0 | 0 |
| THYMU2018547 | 100 | 0 | 0 | 0 | 0 | 0 | 0 |
| THYMU2018565 | 100 | 0 | 0 | 0 | 0 | 0 | 0 |
| THYMU2018639 | 32.401 | 0 | 0 | 0 | 0 | 0 | 0 |
| THYMU2018673 | 100 | 0 | 0 | 0 | 0 | 0 | 0 |
| THYMU2018721 | 100 | 0 | 0 | 0 | 0 | 0 | 0 |
| THYMU2018772 | 100 | 0 | 0 | 0 | 0 | 0 | 0 |
| THYMU2018819 | 100 | 0 | 0 | 0 | 0 | 0 | 0 |
| THYMU2018841 | 100 | 0 | 0 | 0 | 0 | 0 | 0 |
| THYMU2018997 | 100 | 0 | 0 | 0 | 0 | 0 | 0 |
| THYMU2019021 | 8.105 | 0 | 0 | 0 | 0 | 0 | 0 |
| THYMU2019054 | 100 | 0 | 0 | 0 | 0 | 0 | 0 |
| THYMU2019197 | 100 | 0 | 0 | 0 | 0 | 0 | 0 |
| THYMU2019210 | 100 | 0 | 0 | 0 | 0 | 0 | 0 |
| THYMU2019364 | 70.146 | 0 | 0 | 0 | 0 | 0 | 0 |
| THYMU2019436 | 100 | 0 | 0 | 0 | 0 | 0 | 0 |
| THYMU2019442 | 100 | 0 | 0 | 0 | 0 | 0 | 0 |
| THYMU2019587 | 100 | 0 | 0 | 0 | 0 | 0 | 0 |
| THYMU2019599 | 100 | 0 | 0 | 0 | 0 | 0 | 0 |
| THYMU2019686 | 100 | 0 | 0 | 0 | 0 | 0 | 0 |
| THYMU2019813 | 100 | 0 | 0 | 0 | 0 | 0 | 0 |
| THYMU2020198 | 100 | 0 | 0 | 0 | 0 | 0 | 0 |
| THYMU2020289 | 100 | 0 | 0 | 0 | 0 | 0 | 0 |
| THYMU2020416 | 11.429 | 0 | 0 | 0 | 0 | 0 | 0 |
| THYMU2020491 | 100 | 0 | 0 | 0 | 0 | 0 | 0 |
| THYMU2020499 | 100 | 0 | 0 | 0 | 0 | 0 | 0 |
| THYMU2020560 | 100 | 0 | 0 | 0 | 0 | 0 | 0 |
| THYMU2020667 | 58.303 | 0 | 0 | 0 | 0 | 0 | 0 |
| THYMU2020830 | 100 | 0 | 0 | 0 | 0 | 0 | 0 |
| THYMU2020883 | 42.920 | 0 | 0 | 0 | 0 | 0 | 0 |
| THYMU2020959 | 18.487 | 0 | 0 | 0 | 0 | 24.834 | 0 |
| THYMU2021361 | 100 | 0 | 0 | 0 | 0 | 0 | 0 |
| THYMU2021509 | 100 | 0 | 0 | 0 | 0 | 0 | 0 |
| THYMU2021597 | 100 | 0 | 0 | 0 | 0 | 0 | 0 |
| THYMU2021684 | 41.147 | 0 | 0 | 0 | 0 | 0 | 0 |
| THYMU2021714 | 100 | 0 | 0 | 0 | 0 | 0 | 0 |
| THYMU2022213 | 100 | 0 | 0 | 0 | 0 | 0 | 0 |
| THYMU2022289 | 100 | 0 | 0 | 0 | 0 | 0 | 0 |
| THYMU2022660 | 19.114 | 0 | 0 | 0 | 0 | 0 | 0 |
| THYMU2022854 | 100 | 0 | 0 | 0 | 0 | 0 | 0 |
| THYMU2022922 | 100 | 0 | 0 | 0 | 0 | 0 | 0 |
| THYMU2023209 | 100 | 0 | 0 | 0 | 0 | 0 | 0 |
| THYMU2023264 | 45.282 | 0 | 0 | 0 | 0 | 0 | 0 |
| THYMU2023576 | 26.584 | 0 | 0 | 0 | 0 | 0 | 0 |
| THYMU2023711 | 100 | 0 | 0 | 0 | 0 | 0 | 0 |
| THYMU2023900 | 100 | 0 | 0 | 0 | 0 | 0 | 0 |
| THYMU2023943 | 45.470 | 0 | 0 | 0 | 0 | 0 | 0 |
| THYMU2023967 | 25.472 | 0 | 0 | 0 | 0 | 0 | 0 |
| THYMU2024071 | 27.482 | 0 | 0 | 0 | 0 | 0 | 0 |
| THYMU2024121 | 48.944 | 0 | 0 | 0 | 0 | 0 | 0 |
| THYMU2024185 | 100 | 0 | 0 | 0 | 0 | 0 | 0 |
| THYMU2024207 | 100 | 0 | 0 | 0 | 0 | 0 | 0 |
| THYMU2024616 | 100 | 0 | 0 | 0 | 0 | 0 | 0 |
| THYMU2024684 | 100 | 0 | 0 | 0 | 0 | 0 | 0 |
| THYMU2024748 | 32.401 | 0 | 0 | 0 | 0 | 0 | 0 |
| THYMU2025042 | 100 | 0 | 0 | 0 | 0 | 0 | 0 |
| THYMU2025189 | 100 | 0 | 0 | 0 | 0 | 0 | 0 |
| THYMU2025319 | 27.551 | 0 | 0 | 0 | 0 | 0 | 0 |
| THYMU2025325 | 10.860 | 0 | 0 | 0 | 0 | 0 | 0 |
| THYMU2025406 | 100 | 0 | 0 | 0 | 0 | 0 | 0 |
| THYMU2025557 | 100 | 0 | 0 | 0 | 0 | 0 | 0 |
| THYMU2025572 | 100 | 0 | 0 | 0 | 0 | 0 | 0 |
| THYMU2025707 | 7.715 | 0 | 0 | 0 | 0 | 0 | 0 |
| THYMU2025849 | 100 | 0 | 0 | 0 | 0 | 0 | 0 |
| THYMU2025909 | 100 | 0 | 0 | 0 | 0 | 0 | 0 |
| THYMU2025939 | 26.596 | 0 | 0 | 0 | 0 | 53.592 | 0 |
| THYMU2026182 | 100 | 0 | 0 | 0 | 0 | 0 | 0 |
| THYMU2026350 | 40.164 | 0 | 0 | 0 | 0 | 0 | 0 |
| THYMU2026530 | 100 | 0 | 0 | 0 | 0 | 0 | 0 |
| THYMU2026531 | 100 | 0 | 0 | 0 | 0 | 0 | 0 |
| THYMU2026835 | 44.974 | 0 | 0 | 0 | 0 | 0 | 0 |
| THYMU2026904 | 100 | 0 | 0 | 0 | 0 | 0 | 0 |
| THYMU2027053 | 100 | 0 | 0 | 0 | 0 | 0 | 0 |
| THYMU2027125 | 0.299 | 0 | 0 | 0 | 0 | 0 | 0 |
| THYMU2027168 | 100 | 0 | 0 | 0 | 0 | 0 | 0 |
| THYMU2027249 | 100 | 0 | 0 | 0 | 0 | 0 | 0 |
| THYMU2027282 | 100 | 0 | 0 | 0 | 0 | 0 | 0 |
| THYMU2027497 | 100 | 0 | 0 | 0 | 0 | 0 | 0 |
| THYMU2027695 | 100 | 0 | 0 | 0 | 0 | 0 | 0 |
| THYMU2027734 | 100 | 0 | 0 | 0 | 0 | 0 | 0 |
| THYMU2027894 | 100 | 0 | 0 | 0 | 0 | 0 | 0 |
| THYMU2027975 | 3.333 | 0 | 0 | 0 | 0 | 0 | 0 |
| THYMU2027996 | 100 | 0 | 0 | 0 | 0 | 0 | 0 |
| THYMU2028041 | 100 | 0 | 0 | 0 | 0 | 0 | 0 |
| THYMU2028368 | 100 | 0 | 0 | 0 | 0 | 0 | 0 |
| THYMU2028379 | 100 | 0 | 0 | 0 | 0 | 0 | 0 |
| THYMU2028394 | 100 | 0 | 0 | 0 | 0 | 0 | 0 |
| THYMU2028412 | 100 | 0 | 0 | 0 | 0 | 0 | 0 |
| THYMU2028629 | 15.266 | 0 | 0 | 0 | 0 | 0 | 0 |
| THYMU2028632 | 100 | 0 | 0 | 0 | 0 | 0 | 0 |
| THYMU2028724 | 100 | 0 | 0 | 0 | 0 | 0 | 0 |
| THYMU2028739 | 56.056 | 0 | 0 | 0 | 0 | 0 | 0 |
| THYMU2028942 | 100 | 0 | 0 | 0 | 0 | 0 | 0 |
| THYMU2028978 | 100 | 0 | 0 | 0 | 0 | 0 | 0 |
| THYMU2029134 | 100 | 0 | 0 | 0 | 0 | 0 | 0 |
| THYMU2029578 | 22.934 | 0 | 0 | 0 | 0 | 0 | 0 |
| THYMU2029676 | 100 | 0 | 0 | 0 | 0 | 0 | 0 |
| THYMU2029688 | 100 | 0 | 0 | 0 | 0 | 0 | 0 |
| THYMU2029788 | 100 | 0 | 0 | 0 | 0 | 0 | 0 |
| THYMU2030068 | 100 | 0 | 0 | 0 | 0 | 0 | 0 |
| THYMU2030226 | 100 | 0 | 0 | 0 | 0 | 0 | 0 |
| THYMU2030264 | 54.019 | 0 | 0 | 0 | 0 | 0 | 0 |
| THYMU2030462 | 100 | 0 | 0 | 0 | 0 | 0 | 0 |
| THYMU2030543 | 100 | 0 | 0 | 0 | 0 | 0 | 0 |
| THYMU2030637 | 100 | 0 | 0 | 0 | 0 | 0 | 0 |
| THYMU2030655 | 18.385 | 81.615 | 0 | 0 | 0 | 0 | 0 |
| THYMU2030796 | 100 | 0 | 0 | 0 | 0 | 0 | 0 |
| THYMU2030912 | 100 | 0 | 0 | 0 | 0 | 0 | 0 |
| THYMU2030982 | 100 | 0 | 0 | 0 | 0 | 0 | 0 |
| THYMU2031046 | 100 | 0 | 0 | 0 | 0 | 0 | 0 |
| THYMU2031139 | 100 | 0 | 0 | 0 | 0 | 0 | 0 |
| THYMU2031218 | 100 | 0 | 0 | 0 | 0 | 0 | 0 |
| THYMU2031249 | 100 | 0 | 0 | 0 | 0 | 0 | 0 |
| THYMU2031258 | 100 | 0 | 0 | 0 | 0 | 0 | 0 |
| THYMU2031341 | 2.877 | 0 | 0 | 0 | 0 | 0 | 0 |
| THYMU2031368 | 3.784 | 0 | 0 | 0 | 0 | 0 | 0 |
| THYMU2031579 | 100 | 0 | 0 | 0 | 0 | 0 | 0 |
| THYMU2031847 | 30.924 | 0 | 0 | 0 | 0 | 0 | 0 |
| THYMU2031890 | 14.805 | 0 | 0 | 0 | 0 | 0 | 0 |
| THYMU2031994 | 100 | 0 | 0 | 0 | 0 | 0 | 0 |
| THYMU2032014 | 13.760 | 0 | 0 | 0 | 0 | 0 | 0 |
| THYMU2032035 | 100 | 0 | 0 | 0 | 0 | 0 | 0 |
| THYMU2032080 | 100 | 0 | 0 | 0 | 0 | 0 | 0 |
| THYMU2032150 | 100 | 0 | 0 | 0 | 0 | 0 | 0 |
| THYMU2032155 | 5.955 | 0 | 0 | 0 | 0 | 0 | 0 |
| THYMU2032358 | 100 | 0 | 0 | 0 | 0 | 0 | 0 |
| THYMU2032437 | 100 | 0 | 0 | 0 | 0 | 0 | 0 |
| THYMU2032601 | 100 | 0 | 0 | 0 | 0 | 0 | 0 |
| THYMU2032655 | 100 | 0 | 0 | 0 | 0 | 0 | 0 |
| THYMU2032696 | 0.876 | 0 | 0 | 0 | 0 | 0 | 0 |
| THYMU2032715 | 100 | 0 | 0 | 0 | 0 | 0 | 0 |
| THYMU2032732 | 100 | 0 | 0 | 0 | 0 | 0 | 0 |
| THYMU2032825 | 7.752 | 0 | 0 | 0 | 0 | 0 | 0 |
| THYMU2032976 | 100 | 0 | 0 | 0 | 0 | 0 | 0 |
| THYMU2033053 | 100 | 0 | 0 | 0 | 0 | 0 | 0 |
| THYMU2033059 | 18.523 | 0 | 0 | 0 | 0 | 0 | 0 |
| THYMU2033070 | 41.147 | 0 | 0 | 0 | 0 | 0 | 0 |
| THYMU2033079 | 100 | 0 | 0 | 0 | 0 | 0 | 0 |
| THYMU2033085 | 100 | 0 | 0 | 0 | 0 | 0 | 0 |
| THYMU2033104 | 100 | 0 | 0 | 0 | 0 | 0 | 0 |
| THYMU2033227 | 100 | 0 | 0 | 0 | 0 | 0 | 0 |
| THYMU2033263 | 9.276 | 0 | 0 | 0 | 0 | 0 | 0 |
| THYMU2033308 | 11.644 | 0 | 0 | 0 | 0 | 0 | 0 |
| THYMU2033401 | 100 | 0 | 0 | 0 | 0 | 0 | 0 |
| THYMU2033583 | 42.674 | 0 | 0 | 0 | 0 | 57.326 | 0 |
| THYMU2033755 | 100 | 0 | 0 | 0 | 0 | 0 | 0 |
| THYMU2033787 | 42.920 | 0 | 0 | 0 | 0 | 0 | 0 |
| THYMU2033816 | 100 | 0 | 0 | 0 | 0 | 0 | 0 |
| THYMU2034182 | 100 | 0 | 0 | 0 | 0 | 0 | 0 |
| THYMU2034279 | 100 | 0 | 0 | 0 | 0 | 0 | 0 |
| THYMU2034314 | 100 | 0 | 0 | 0 | 0 | 0 | 0 |
| THYMU2034338 | 100 | 0 | 0 | 0 | 0 | 0 | 0 |
| THYMU2034374 | 10.489 | 0 | 0 | 0 | 0 | 0 | 0 |
| THYMU2034647 | 32.401 | 0 | 0 | 0 | 0 | 0 | 0 |
| THYMU2034917 | 16.203 | 0 | 0 | 0 | 0 | 0 | 0 |
| THYMU2035064 | 100 | 0 | 0 | 0 | 0 | 0 | 0 |
| THYMU2035078 | 100 | 0 | 0 | 0 | 0 | 0 | 0 |
| THYMU2035101 | 100 | 0 | 0 | 0 | 0 | 0 | 0 |
| THYMU2035319 | 100 | 0 | 0 | 0 | 0 | 0 | 0 |
| THYMU2035321 | 100 | 0 | 0 | 0 | 0 | 0 | 0 |
| THYMU2035388 | 100 | 0 | 0 | 0 | 0 | 0 | 0 |
| THYMU2035400 | 100 | 0 | 0 | 0 | 0 | 0 | 0 |
| THYMU2035554 | 100 | 0 | 0 | 0 | 0 | 0 | 0 |
| THYMU2035710 | 100 | 0 | 0 | 0 | 0 | 0 | 0 |
| THYMU2035735 | 2.200 | 0 | 0 | 0 | 0 | 5.911 | 28.332 |
| THYMU2036058 | 56.056 | 0 | 0 | 0 | 0 | 0 | 0 |
| THYMU2036105 | 100 | 0 | 0 | 0 | 0 | 0 | 0 |
| THYMU2036207 | 100 | 0 | 0 | 0 | 0 | 0 | 0 |
| THYMU2036215 | 19.182 | 0 | 0 | 0 | 0 | 0 | 0 |
| THYMU2036252 | 100 | 0 | 0 | 0 | 0 | 0 | 0 |
| THYMU2036265 | 100 | 0 | 0 | 0 | 0 | 0 | 0 |
| THYMU2036366 | 100 | 0 | 0 | 0 | 0 | 0 | 0 |
| THYMU2036459 | 100 | 0 | 0 | 0 | 0 | 0 | 0 |
| THYMU2036461 | 12.647 | 0 | 0 | 0 | 0 | 0 | 0 |
| THYMU2036604 | 100 | 0 | 0 | 0 | 0 | 0 | 0 |
| THYMU2036653 | 100 | 0 | 0 | 0 | 0 | 0 | 0 |
| THYMU2037081 | 100 | 0 | 0 | 0 | 0 | 0 | 0 |
| THYMU2037208 | 100 | 0 | 0 | 0 | 0 | 0 | 0 |
| THYMU2037226 | 28.577 | 0 | 0 | 0 | 0 | 19.194 | 0 |
| THYMU2037233 | 100 | 0 | 0 | 0 | 0 | 0 | 0 |
| THYMU2037234 | 100 | 0 | 0 | 0 | 0 | 0 | 0 |
| THYMU2037348 | 100 | 0 | 0 | 0 | 0 | 0 | 0 |
| THYMU2037406 | 100 | 0 | 0 | 0 | 0 | 0 | 0 |
| THYMU2037965 | 100 | 0 | 0 | 0 | 0 | 0 | 0 |
| THYMU2038058 | 100 | 0 | 0 | 0 | 0 | 0 | 0 |
| THYMU2038189 | 100 | 0 | 0 | 0 | 0 | 0 | 0 |
| THYMU2038199 | 100 | 0 | 0 | 0 | 0 | 0 | 0 |
| THYMU2038220 | 16.844 | 0 | 0 | 0 | 0 | 0 | 0 |
| THYMU2038301 | 100 | 0 | 0 | 0 | 0 | 0 | 0 |
| THYMU2038369 | 100 | 0 | 0 | 0 | 0 | 0 | 0 |
| THYMU2038389 | 100 | 0 | 0 | 0 | 0 | 0 | 0 |
| THYMU2038615 | 100 | 0 | 0 | 0 | 0 | 0 | 0 |
| THYMU2038636 | 100 | 0 | 0 | 0 | 0 | 0 | 0 |
| THYMU2038739 | 100 | 0 | 0 | 0 | 0 | 0 | 0 |
| THYMU2038772 | 100 | 0 | 0 | 0 | 0 | 0 | 0 |
| THYMU2038797 | 100 | 0 | 0 | 0 | 0 | 0 | 0 |
| THYMU2038906 | 100 | 0 | 0 | 0 | 0 | 0 | 0 |
| THYMU2039305 | 100 | 0 | 0 | 0 | 0 | 0 | 0 |
| THYMU2039315 | 45.470 | 0 | 0 | 0 | 0 | 0 | 0 |
| THYMU2039334 | 0.947 | 0 | 0 | 0 | 0 | 0 | 0 |
| THYMU2039350 | 56.056 | 0 | 0 | 0 | 0 | 0 | 0 |
| THYMU2039411 | 100 | 0 | 0 | 0 | 0 | 0 | 0 |
| THYMU2039634 | 45.470 | 0 | 0 | 0 | 0 | 0 | 0 |
| THYMU2039719 | 100 | 0 | 0 | 0 | 0 | 0 | 0 |
| THYMU2039780 | 54.019 | 0 | 0 | 0 | 0 | 0 | 0 |
| THYMU2039788 | 100 | 0 | 0 | 0 | 0 | 0 | 0 |
| THYMU2039989 | 100 | 0 | 0 | 0 | 0 | 0 | 0 |
| THYMU2040029 | 100 | 0 | 0 | 0 | 0 | 0 | 0 |
| THYMU2040110 | 100 | 0 | 0 | 0 | 0 | 0 | 0 |
| THYMU2040114 | 26.657 | 0 | 0 | 0 | 0 | 0 | 0 |
| THYMU2040140 | 100 | 0 | 0 | 0 | 0 | 0 | 0 |
| THYMU2040412 | 100 | 0 | 0 | 0 | 0 | 0 | 0 |
| THYMU2040427 | 54.019 | 0 | 0 | 0 | 0 | 0 | 0 |
| THYMU2040824 | 100 | 0 | 0 | 0 | 0 | 0 | 0 |
| THYMU2040925 | 54.019 | 0 | 0 | 0 | 0 | 0 | 0 |
| THYMU2041007 | 100 | 0 | 0 | 0 | 0 | 0 | 0 |
| THYMU2041015 | 100 | 0 | 0 | 0 | 0 | 0 | 0 |
| THYMU2041252 | 100 | 0 | 0 | 0 | 0 | 0 | 0 |
| THYMU3000028 | 100 | 0 | 0 | 0 | 0 | 0 | 0 |
| THYMU3000036 | 100 | 0 | 0 | 0 | 0 | 0 | 0 |
| THYMU3000037 | 100 | 0 | 0 | 0 | 0 | 0 | 0 |
| THYMU3000082 | 100 | 0 | 0 | 0 | 0 | 0 | 0 |
| THYMU3000194 | 100 | 0 | 0 | 0 | 0 | 0 | 0 |
| THYMU3000224 | 100 | 0 | 0 | 0 | 0 | 0 | 0 |
| THYMU3000269 | 100 | 0 | 0 | 0 | 0 | 0 | 0 |
| THYMU3000306 | 100 | 0 | 0 | 0 | 0 | 0 | 0 |
| THYMU3000360 | 32.782 | 0 | 0 | 0 | 0 | 0 | 0 |
| THYMU3000390 | 100 | 0 | 0 | 0 | 0 | 0 | 0 |
| THYMU3000420 | 32.782 | 0 | 0 | 0 | 0 | 0 | 0 |
| THYMU3000490 | 100 | 0 | 0 | 0 | 0 | 0 | 0 |
| THYMU3000504 | 100 | 0 | 0 | 0 | 0 | 0 | 0 |
| THYMU3000542 | 100 | 0 | 0 | 0 | 0 | 0 | 0 |
| THYMU3000655 | 42.674 | 0 | 0 | 0 | 0 | 57.326 | 0 |
| THYMU3000776 | 52.046 | 0 | 0 | 0 | 0 | 0 | 0 |
| THYMU3000826 | 100 | 0 | 0 | 0 | 0 | 0 | 0 |
| THYMU3000841 | 100 | 0 | 0 | 0 | 0 | 0 | 0 |
| THYMU3001077 | 25.065 | 0 | 0 | 0 | 0 | 0 | 0 |
| THYMU3001082 | 100 | 0 | 0 | 0 | 0 | 0 | 0 |
| THYMU3001083 | 54.019 | 0 | 0 | 0 | 0 | 0 | 0 |
| THYMU3001133 | 100 | 0 | 0 | 0 | 0 | 0 | 0 |
| THYMU3001151 | 100 | 0 | 0 | 0 | 0 | 0 | 0 |
| THYMU3001379 | 21.000 | 0 | 0 | 0 | 0 | 0 | 0 |
| THYMU3001472 | 42.153 | 0 | 0 | 0 | 0 | 37.750 | 0 |
| THYMU3001593 | 100 | 0 | 0 | 0 | 0 | 0 | 0 |
| THYMU3001883 | 100 | 0 | 0 | 0 | 0 | 0 | 0 |
| THYMU3001939 | 40.164 | 0 | 0 | 0 | 0 | 0 | 0 |
| THYMU3001991 | 100 | 0 | 0 | 0 | 0 | 0 | 0 |
| THYMU3002452 | 100 | 0 | 0 | 0 | 0 | 0 | 0 |
| THYMU3002578 | 25.509 | 0 | 0 | 0 | 0 | 0 | 0 |
| THYMU3002661 | 100 | 0 | 0 | 0 | 0 | 0 | 0 |
| THYMU3003007 | 47.545 | 0 | 0 | 0 | 0 | 0 | 0 |
| THYMU3003092 | 100 | 0 | 0 | 0 | 0 | 0 | 0 |
| THYMU3003212 | 100 | 0 | 0 | 0 | 0 | 0 | 0 |
| THYMU3003309 | 24.243 | 0 | 0 | 0 | 0 | 0 | 0 |
| THYMU3003350 | 45.470 | 0 | 0 | 0 | 0 | 0 | 0 |
| THYMU3003403 | 100 | 0 | 0 | 0 | 0 | 0 | 0 |
| THYMU3003565 | 48.944 | 0 | 0 | 0 | 0 | 0 | 0 |
| THYMU3003763 | 100 | 0 | 0 | 0 | 0 | 0 | 0 |
| THYMU3003865 | 17.533 | 0 | 0 | 0 | 0 | 0 | 0 |
| THYMU3003958 | 100 | 0 | 0 | 0 | 0 | 0 | 0 |
| THYMU3003965 | 44.974 | 0 | 0 | 0 | 0 | 0 | 0 |
| THYMU3004157 | 100 | 0 | 0 | 0 | 0 | 0 | 0 |
| THYMU3004628 | 100 | 0 | 0 | 0 | 0 | 0 | 0 |
| THYMU3004632 | 100 | 0 | 0 | 0 | 0 | 0 | 0 |
| THYMU3004835 | 16.380 | 0 | 0 | 0 | 0 | 22.003 | 0 |
| THYMU3004866 | 100 | 0 | 0 | 0 | 0 | 0 | 0 |
| THYMU3005050 | 100 | 0 | 0 | 0 | 0 | 0 | 0 |
| THYMU3005378 | 100 | 0 | 0 | 0 | 0 | 0 | 0 |
| THYMU3005407 | 100 | 0 | 0 | 0 | 0 | 0 | 0 |
| THYMU3005415 | 100 | 0 | 0 | 0 | 0 | 0 | 0 |
| THYMU3005427 | 19.680 | 0 | 0 | 0 | 0 | 0 | 0 |
| THYMU3005482 | 100 | 0 | 0 | 0 | 0 | 0 | 0 |
| THYMU3005491 | 42.920 | 0 | 0 | 0 | 0 | 0 | 0 |
| THYMU3005629 | 12.599 | 0 | 0 | 0 | 0 | 0 | 0 |
| THYMU3005696 | 100 | 0 | 0 | 0 | 0 | 0 | 0 |
| THYMU3006118 | 100 | 0 | 0 | 0 | 0 | 0 | 0 |
| THYMU3006132 | 100 | 0 | 0 | 0 | 0 | 0 | 0 |
| THYMU3006168 | 100 | 0 | 0 | 0 | 0 | 0 | 0 |
| THYMU3006172 | 42.674 | 0 | 0 | 0 | 0 | 57.326 | 0 |
| THYMU3006371 | 100 | 0 | 0 | 0 | 0 | 0 | 0 |
| THYMU3006485 | 54.019 | 0 | 0 | 0 | 0 | 0 | 0 |
| THYMU3006640 | 100 | 0 | 0 | 0 | 0 | 0 | 0 |
| THYMU3006767 | 42.674 | 0 | 0 | 0 | 0 | 57.326 | 0 |
| THYMU3006811 | 42.674 | 0 | 0 | 0 | 0 | 57.326 | 0 |
| THYMU3006963 | 100 | 0 | 0 | 0 | 0 | 0 | 0 |
| THYMU3007137 | 62.044 | 0 | 0 | 0 | 0 | 0 | 0 |
| THYMU3007308 | 32.523 | 0 | 0 | 0 | 0 | 0 | 0 |
| THYMU3007368 | 100 | 0 | 0 | 0 | 0 | 0 | 0 |
| THYMU3007423 | 24.596 | 0 | 0 | 0 | 0 | 11.014 | 0 |
| THYMU3007559 | 100 | 0 | 0 | 0 | 0 | 0 | 0 |
| THYMU3007845 | 100 | 0 | 0 | 0 | 0 | 0 | 0 |
| THYMU3008060 | 100 | 0 | 0 | 0 | 0 | 0 | 0 |
| THYMU3008105 | 33.774 | 0 | 0 | 0 | 0 | 0 | 0 |
| THYMU3008136 | 100 | 0 | 0 | 0 | 0 | 0 | 0 |
| THYMU3008171 | 33.638 | 0 | 0 | 0 | 0 | 11.297 | 0 |
| THYMU3008216 | 100 | 0 | 0 | 0 | 0 | 0 | 0 |
| THYMU3008436 | 100 | 0 | 0 | 0 | 0 | 0 | 0 |
| THYMU3008672 | 100 | 0 | 0 | 0 | 0 | 0 | 0 |
| THYMU3008883 | 20.284 | 0 | 0 | 0 | 0 | 27.248 | 0 |
| THYMU3008935 | 100 | 0 | 0 | 0 | 0 | 0 | 0 |
| THYMU3009006 | 46.409 | 0 | 0 | 0 | 0 | 0 | 0 |
| THYMU3009255 | 100 | 0 | 0 | 0 | 0 | 0 | 0 |
| THYMU3009391 | 100 | 0 | 0 | 0 | 0 | 0 | 0 |
| THYMU3009643 | 20.327 | 0 | 0 | 0 | 0 | 0 | 0 |
| THYMU3009755 | 100 | 0 | 0 | 0 | 0 | 0 | 0 |
| THYMU3010247 | 100 | 0 | 0 | 0 | 0 | 0 | 0 |
| THYMU3011012 | 100 | 0 | 0 | 0 | 0 | 0 | 0 |
| THYMU3011081 | 100 | 0 | 0 | 0 | 0 | 0 | 0 |
| THYMU3011244 | 100 | 0 | 0 | 0 | 0 | 0 | 0 |
| THYMU3011360 | 100 | 0 | 0 | 0 | 0 | 0 | 0 |
| THYMU3011534 | 100 | 0 | 0 | 0 | 0 | 0 | 0 |
| THYMU3011543 | 100 | 0 | 0 | 0 | 0 | 0 | 0 |
| THYMU3011556 | 100 | 0 | 0 | 0 | 0 | 0 | 0 |
| THYMU3011717 | 100 | 0 | 0 | 0 | 0 | 0 | 0 |
| THYMU3011827 | 19.368 | 0 | 0 | 0 | 0 | 26.018 | 0 |
| THYMU3012402 | 100 | 0 | 0 | 0 | 0 | 0 | 0 |
| THYMU3012907 | 100 | 0 | 0 | 0 | 0 | 0 | 0 |
| THYMU3012983 | 56.056 | 0 | 0 | 0 | 0 | 0 | 0 |
| THYMU3013114 | 100 | 0 | 0 | 0 | 0 | 0 | 0 |
| THYMU3013197 | 100 | 0 | 0 | 0 | 0 | 0 | 0 |
| THYMU3013241 | 100 | 0 | 0 | 0 | 0 | 0 | 0 |
| THYMU3013386 | 3.121 | 0 | 0 | 0 | 0 | 0 | 0 |
| THYMU3013470 | 100 | 0 | 0 | 0 | 0 | 0 | 0 |
| THYMU3013785 | 100 | 0 | 0 | 0 | 0 | 0 | 0 |
| THYMU3013897 | 100 | 0 | 0 | 0 | 0 | 0 | 0 |
| THYMU3014038 | 100 | 0 | 0 | 0 | 0 | 0 | 0 |
| THYMU3014173 | 100 | 0 | 0 | 0 | 0 | 0 | 0 |
| THYMU3014372 | 100 | 0 | 0 | 0 | 0 | 0 | 0 |
| THYMU3014555 | 100 | 0 | 0 | 0 | 0 | 0 | 0 |
| THYMU3014620 | 100 | 0 | 0 | 0 | 0 | 0 | 0 |
| THYMU3014701 | 100 | 0 | 0 | 0 | 0 | 0 | 0 |
| THYMU3015042 | 100 | 0 | 0 | 0 | 0 | 0 | 0 |
| THYMU3015457 | 100 | 0 | 0 | 0 | 0 | 0 | 0 |
| THYMU3015571 | 26.275 | 0 | 0 | 0 | 0 | 0 | 0 |
| THYMU3015592 | 100 | 0 | 0 | 0 | 0 | 0 | 0 |
| THYMU3015625 | 100 | 0 | 0 | 0 | 0 | 0 | 0 |
| THYMU3015647 | 100 | 0 | 0 | 0 | 0 | 0 | 0 |
| THYMU3015759 | 8.449 | 0 | 0 | 23.299 | 0 | 1.261 | 0 |
| THYMU3015962 | 100 | 0 | 0 | 0 | 0 | 0 | 0 |
| THYMU3016022 | 100 | 0 | 0 | 0 | 0 | 0 | 0 |
| THYMU3016518 | 100 | 0 | 0 | 0 | 0 | 0 | 0 |
| THYMU3016797 | 100 | 0 | 0 | 0 | 0 | 0 | 0 |
| THYMU3016822 | 100 | 0 | 0 | 0 | 0 | 0 | 0 |
| THYMU3016850 | 100 | 0 | 0 | 0 | 0 | 0 | 0 |
| THYMU3017562 | 100 | 0 | 0 | 0 | 0 | 0 | 0 |
| THYMU3017688 | 100 | 0 | 0 | 0 | 0 | 0 | 0 |
| THYMU3017689 | 100 | 0 | 0 | 0 | 0 | 0 | 0 |
| THYMU3017761 | 100 | 0 | 0 | 0 | 0 | 0 | 0 |
| THYMU3018151 | 100 | 0 | 0 | 0 | 0 | 0 | 0 |
| THYMU3018896 | 100 | 0 | 0 | 0 | 0 | 0 | 0 |
| THYMU3019095 | 100 | 0 | 0 | 0 | 0 | 0 | 0 |
| THYMU3019476 | 45.282 | 0 | 0 | 0 | 0 | 0 | 0 |
| THYMU3019605 | 100 | 0 | 0 | 0 | 0 | 0 | 0 |
| THYMU3019916 | 100 | 0 | 0 | 0 | 0 | 0 | 0 |
| THYMU3020221 | 100 | 0 | 0 | 0 | 0 | 0 | 0 |
| THYMU3020595 | 100 | 0 | 0 | 0 | 0 | 0 | 0 |
| THYMU3020713 | 100 | 0 | 0 | 0 | 0 | 0 | 0 |
| THYMU3020856 | 100 | 0 | 0 | 0 | 0 | 0 | 0 |
| THYMU3020869 | 100 | 0 | 0 | 0 | 0 | 0 | 0 |
| THYMU3020970 | 100 | 0 | 0 | 0 | 0 | 0 | 0 |
| THYMU3021404 | 100 | 0 | 0 | 0 | 0 | 0 | 0 |
| THYMU3021586 | 13.776 | 0 | 0 | 0 | 0 | 4.626 | 0 |
| THYMU3021755 | 100 | 0 | 0 | 0 | 0 | 0 | 0 |
| THYMU3021900 | 100 | 0 | 0 | 0 | 0 | 0 | 0 |
| THYMU3022211 | 100 | 0 | 0 | 0 | 0 | 0 | 0 |
| THYMU3022434 | 100 | 0 | 0 | 0 | 0 | 0 | 0 |
| THYMU3022528 | 100 | 0 | 0 | 0 | 0 | 0 | 0 |
| THYMU3022668 | 100 | 0 | 0 | 0 | 0 | 0 | 0 |
| THYMU3022982 | 100 | 0 | 0 | 0 | 0 | 0 | 0 |
| THYMU3023107 | 100 | 0 | 0 | 0 | 0 | 0 | 0 |
| THYMU3023211 | 100 | 0 | 0 | 0 | 0 | 0 | 0 |
| THYMU3023216 | 100 | 0 | 0 | 0 | 0 | 0 | 0 |
| THYMU3023394 | 100 | 0 | 0 | 0 | 0 | 0 | 0 |
| THYMU3023400 | 100 | 0 | 0 | 0 | 0 | 0 | 0 |
| THYMU3023797 | 100 | 0 | 0 | 0 | 0 | 0 | 0 |
| THYMU3024164 | 100 | 0 | 0 | 0 | 0 | 0 | 0 |
| THYMU3024339 | 48.376 | 0 | 0 | 0 | 0 | 0 | 0 |
| THYMU3024602 | 100 | 0 | 0 | 0 | 0 | 0 | 0 |
| THYMU3024879 | 100 | 0 | 0 | 0 | 0 | 0 | 0 |
| THYMU3025118 | 100 | 0 | 0 | 0 | 0 | 0 | 0 |
| THYMU3025313 | 100 | 0 | 0 | 0 | 0 | 0 | 0 |
| THYMU3025642 | 31.905 | 0 | 0 | 0 | 0 | 0 | 0 |
| THYMU3025683 | 100 | 0 | 0 | 0 | 0 | 0 | 0 |
| THYMU3025772 | 100 | 0 | 0 | 0 | 0 | 0 | 0 |
| THYMU3025865 | 100 | 0 | 0 | 0 | 0 | 0 | 0 |
| THYMU3026000 | 20.457 | 0 | 0 | 0 | 0 | 0 | 0 |
| THYMU3026350 | 23.834 | 0 | 0 | 0 | 0 | 0 | 0 |
| THYMU3026479 | 100 | 0 | 0 | 0 | 0 | 0 | 0 |
| THYMU3026532 | 100 | 0 | 0 | 0 | 0 | 0 | 0 |
| THYMU3026783 | 100 | 0 | 0 | 0 | 0 | 0 | 0 |
| THYMU3026869 | 100 | 0 | 0 | 0 | 0 | 0 | 0 |
| THYMU3027251 | 100 | 0 | 0 | 0 | 0 | 0 | 0 |
| THYMU3027540 | 100 | 0 | 0 | 0 | 0 | 0 | 0 |
| THYMU3027655 | 100 | 0 | 0 | 0 | 0 | 0 | 0 |
| THYMU3027671 | 100 | 0 | 0 | 0 | 0 | 0 | 0 |
| THYMU3028075 | 100 | 0 | 0 | 0 | 0 | 0 | 0 |
| THYMU3028410 | 41.147 | 0 | 0 | 0 | 0 | 0 | 0 |
| THYMU3028461 | 100 | 0 | 0 | 0 | 0 | 0 | 0 |
| THYMU3028702 | 100 | 0 | 0 | 0 | 0 | 0 | 0 |
| THYMU3029188 | 100 | 0 | 0 | 0 | 0 | 0 | 0 |
| THYMU3029318 | 100 | 0 | 0 | 0 | 0 | 0 | 0 |
| THYMU3029421 | 100 | 0 | 0 | 0 | 0 | 0 | 0 |
| THYMU3029719 | 100 | 0 | 0 | 0 | 0 | 0 | 0 |
| THYMU3029774 | 100 | 0 | 0 | 0 | 0 | 0 | 0 |
| THYMU3029832 | 100 | 0 | 0 | 0 | 0 | 0 | 0 |
| THYMU3030072 | 100 | 0 | 0 | 0 | 0 | 0 | 0 |
| THYMU3030231 | 100 | 0 | 0 | 0 | 0 | 0 | 0 |
| THYMU3030706 | 100 | 0 | 0 | 0 | 0 | 0 | 0 |
| THYMU3030710 | 100 | 0 | 0 | 0 | 0 | 0 | 0 |
| THYMU3030752 | 100 | 0 | 0 | 0 | 0 | 0 | 0 |
| THYMU3031146 | 100 | 0 | 0 | 0 | 0 | 0 | 0 |
| THYMU3031402 | 100 | 0 | 0 | 0 | 0 | 0 | 0 |
| THYMU3031610 | 100 | 0 | 0 | 0 | 0 | 0 | 0 |
| THYMU3031612 | 100 | 0 | 0 | 0 | 0 | 0 | 0 |
| THYMU3031868 | 100 | 0 | 0 | 0 | 0 | 0 | 0 |
| THYMU3031878 | 100 | 0 | 0 | 0 | 0 | 0 | 0 |
| THYMU3032032 | 100 | 0 | 0 | 0 | 0 | 0 | 0 |
| THYMU3032798 | 17.736 | 0 | 0 | 0 | 0 | 2.166 | 0 |
| THYMU3032867 | 10.732 | 0 | 0 | 0 | 0 | 0 | 0 |
| THYMU3033402 | 100 | 0 | 0 | 0 | 0 | 0 | 0 |
| THYMU3033626 | 9.374 | 0 | 0 | 0 | 0 | 0 | 0 |
| THYMU3033630 | 100 | 0 | 0 | 0 | 0 | 0 | 0 |
| THYMU3033649 | 100 | 0 | 0 | 0 | 0 | 0 | 0 |
| THYMU3033754 | 100 | 0 | 0 | 0 | 0 | 0 | 0 |
| THYMU3033759 | 100 | 0 | 0 | 0 | 0 | 0 | 0 |
| THYMU3034078 | 100 | 0 | 0 | 0 | 0 | 0 | 0 |
| THYMU3034099 | 100 | 0 | 0 | 0 | 0 | 0 | 0 |
| THYMU3034453 | 100 | 0 | 0 | 0 | 0 | 0 | 0 |
| THYMU3034616 | 41.147 | 0 | 0 | 0 | 0 | 0 | 0 |
| THYMU3034671 | 9.943 | 0 | 0 | 0 | 0 | 5.343 | 0 |
| THYMU3034853 | 100 | 0 | 0 | 0 | 0 | 0 | 0 |
| THYMU3034867 | 100 | 0 | 0 | 0 | 0 | 0 | 0 |
| THYMU3034983 | 100 | 0 | 0 | 0 | 0 | 0 | 0 |
| THYMU3036200 | 100 | 0 | 0 | 0 | 0 | 0 | 0 |
| THYMU3036310 | 100 | 0 | 0 | 0 | 0 | 0 | 0 |
| THYMU3036934 | 100 | 0 | 0 | 0 | 0 | 0 | 0 |
| THYMU3036953 | 100 | 0 | 0 | 0 | 0 | 0 | 0 |
| THYMU3037052 | 100 | 0 | 0 | 0 | 0 | 0 | 0 |
| THYMU3037192 | 100 | 0 | 0 | 0 | 0 | 0 | 0 |
| THYMU3037617 | 100 | 0 | 0 | 0 | 0 | 0 | 0 |
| THYMU3037772 | 100 | 0 | 0 | 0 | 0 | 0 | 0 |
| THYMU3037827 | 45.470 | 0 | 0 | 0 | 0 | 0 | 0 |
| THYMU3037836 | 100 | 0 | 0 | 0 | 0 | 0 | 0 |
| THYMU3037856 | 100 | 0 | 0 | 0 | 0 | 0 | 0 |
| THYMU3037867 | 100 | 0 | 0 | 0 | 0 | 0 | 0 |
| THYMU3037909 | 100 | 0 | 0 | 0 | 0 | 0 | 0 |
| THYMU3037980 | 100 | 0 | 0 | 0 | 0 | 0 | 0 |
| THYMU3038158 | 5.135 | 0 | 0 | 0 | 0 | 0 | 0 |
| THYMU3038167 | 100 | 0 | 0 | 0 | 0 | 0 | 0 |
| THYMU3038214 | 32.782 | 0 | 0 | 0 | 0 | 0 | 0 |
| THYMU3038266 | 100 | 0 | 0 | 0 | 0 | 0 | 0 |
| THYMU3038328 | 100 | 0 | 0 | 0 | 0 | 0 | 0 |
| THYMU3038347 | 100 | 0 | 0 | 0 | 0 | 0 | 0 |
| THYMU3038375 | 100 | 0 | 0 | 0 | 0 | 0 | 0 |
| THYMU3038603 | 100 | 0 | 0 | 0 | 0 | 0 | 0 |
| THYMU3038687 | 100 | 0 | 0 | 0 | 0 | 0 | 0 |
| THYMU3038759 | 100 | 0 | 0 | 0 | 0 | 0 | 0 |
| THYMU3038879 | 100 | 0 | 0 | 0 | 0 | 0 | 0 |
| THYMU3038970 | 100 | 0 | 0 | 0 | 0 | 0 | 0 |
| THYMU3039807 | 100 | 0 | 0 | 0 | 0 | 0 | 0 |
| THYMU3039846 | 100 | 0 | 0 | 0 | 0 | 0 | 0 |
| THYMU3040068 | 32.401 | 0 | 0 | 0 | 0 | 0 | 0 |
| THYMU3040126 | 100 | 0 | 0 | 0 | 0 | 0 | 0 |
| THYMU3040146 | 100 | 0 | 0 | 0 | 0 | 0 | 0 |
| THYMU3040168 | 100 | 0 | 0 | 0 | 0 | 0 | 0 |
| THYMU3040172 | 100 | 0 | 0 | 0 | 0 | 0 | 0 |
| THYMU3040725 | 100 | 0 | 0 | 0 | 0 | 0 | 0 |
| THYMU3040746 | 100 | 0 | 0 | 0 | 0 | 0 | 0 |
| THYMU3040816 | 9.663 | 0 | 0 | 0 | 0 | 0 | 0 |
| THYMU3040829 | 100 | 0 | 0 | 0 | 0 | 0 | 0 |
| THYMU3040830 | 100 | 0 | 0 | 0 | 0 | 0 | 0 |
| THYMU3040986 | 100 | 0 | 0 | 0 | 0 | 0 | 0 |
| THYMU3041354 | 100 | 0 | 0 | 0 | 0 | 0 | 0 |
| THYMU3041386 | 100 | 0 | 0 | 0 | 0 | 0 | 0 |
| THYMU3041428 | 0.213 | 0 | 0 | 0 | 0 | 0 | 0 |
| THYMU3041573 | 100 | 0 | 0 | 0 | 0 | 0 | 0 |
| THYMU3041603 | 100 | 0 | 0 | 0 | 0 | 0 | 0 |
| THYMU3041736 | 100 | 0 | 0 | 0 | 0 | 0 | 0 |
| THYMU3041918 | 100 | 0 | 0 | 0 | 0 | 0 | 0 |
| THYMU3042075 | 100 | 0 | 0 | 0 | 0 | 0 | 0 |
| THYMU3042321 | 100 | 0 | 0 | 0 | 0 | 0 | 0 |
| THYMU3042372 | 100 | 0 | 0 | 0 | 0 | 0 | 0 |
| THYMU3042758 | 100 | 0 | 0 | 0 | 0 | 0 | 0 |
| THYMU3042929 | 100 | 0 | 0 | 0 | 0 | 0 | 0 |
| THYMU3043200 | 100 | 0 | 0 | 0 | 0 | 0 | 0 |
| THYMU3043327 | 100 | 0 | 0 | 0 | 0 | 0 | 0 |
| THYMU3043482 | 100 | 0 | 0 | 0 | 0 | 0 | 0 |
| THYMU3043597 | 100 | 0 | 0 | 0 | 0 | 0 | 0 |
| THYMU3043688 | 100 | 0 | 0 | 0 | 0 | 0 | 0 |
| THYMU3043779 | 100 | 0 | 0 | 0 | 0 | 0 | 0 |
| THYMU3043883 | 100 | 0 | 0 | 0 | 0 | 0 | 0 |
| THYMU3043993 | 100 | 0 | 0 | 0 | 0 | 0 | 0 |
| THYMU3044175 | 100 | 0 | 0 | 0 | 0 | 0 | 0 |
| THYMU3044188 | 3.732 | 0 | 0 | 0 | 0 | 0 | 0 |
| THYMU3044441 | 100 | 0 | 0 | 0 | 0 | 0 | 0 |
| THYMU3044445 | 100 | 0 | 0 | 0 | 0 | 0 | 0 |
| THYMU3045510 | 58.982 | 0 | 0 | 0 | 0 | 0 | 0 |
| THYMU3045673 | 100 | 0 | 0 | 0 | 0 | 0 | 0 |
| THYMU3045692 | 100 | 0 | 0 | 0 | 0 | 0 | 0 |
| THYMU3045704 | 100 | 0 | 0 | 0 | 0 | 0 | 0 |
| THYMU3046140 | 100 | 0 | 0 | 0 | 0 | 0 | 0 |
| THYMU3046350 | 5.760 | 0 | 47.489 | 0 | 0 | 0 | 0 |
| THYMU3046360 | 100 | 0 | 0 | 0 | 0 | 0 | 0 |
| THYMU3046856 | 100 | 0 | 0 | 0 | 0 | 0 | 0 |
| THYMU3047115 | 0.343 | 0 | 0 | 0 | 0 | 0 | 0 |
| THYMU3047144 | 100 | 0 | 0 | 0 | 0 | 0 | 0 |
| THYMU3047156 | 100 | 0 | 0 | 0 | 0 | 0 | 0 |
| THYMU3047366 | 100 | 0 | 0 | 0 | 0 | 0 | 0 |
| THYMU3047513 | 100 | 0 | 0 | 0 | 0 | 0 | 0 |
| THYMU3047542 | 100 | 0 | 0 | 0 | 0 | 0 | 0 |
| THYMU3047760 | 100 | 0 | 0 | 0 | 0 | 0 | 0 |
| THYMU3047891 | 100 | 0 | 0 | 0 | 0 | 0 | 0 |
| TKIDN1000001 | 0 | 41.198 | 0 | 0 | 0 | 0 | 0 |
| TKIDN1000044 | 0 | 34.663 | 0 | 0 | 0 | 0 | 0 |
| TKIDN1000062 | 0 | 100 | 0 | 0 | 0 | 0 | 0 |
| TKIDN1000066 | 0 | 35.464 | 0 | 0 | 0 | 0 | 0 |
| TKIDN1000164 | 0 | 22.887 | 0 | 0 | 0 | 0 | 0 |
| TKIDN1000171 | 0 | 100 | 0 | 0 | 0 | 0 | 0 |
| TKIDN1000192 | 0 | 20.450 | 0 | 0 | 0 | 12.377 | 0 |
| TKIDN2000127 | 0 | 67.072 | 0 | 0 | 0 | 0 | 0 |
| TKIDN2000240 | 0 | 100 | 0 | 0 | 0 | 0 | 0 |
| TKIDN2000246 | 0 | 7.882 | 0 | 0 | 0 | 0 | 0 |
| TKIDN2000319 | 0 | 78.393 | 0 | 0 | 0 | 0 | 0 |
| TKIDN2000464 | 0 | 68.029 | 0 | 0 | 0 | 0 | 0 |
| TKIDN2000521 | 0 | 55.069 | 0 | 0 | 0 | 0 | 0 |
| TKIDN2000701 | 0 | 84.991 | 0 | 0 | 0 | 0 | 0 |
| TKIDN2001529 | 0 | 74.873 | 0 | 0 | 0 | 0 | 0 |
| TKIDN2001662 | 18.188 | 40.370 | 0 | 0 | 0 | 0 | 0 |
| TKIDN2002318 | 0 | 39.706 | 0 | 0 | 0 | 0 | 0 |
| TKIDN2002329 | 0 | 100 | 0 | 0 | 0 | 0 | 0 |
| TKIDN2002424 | 0 | 100 | 0 | 0 | 0 | 0 | 0 |
| TKIDN2002632 | 0 | 100 | 0 | 0 | 0 | 0 | 0 |
| TKIDN2002738 | 0 | 1.552 | 0 | 0 | 0 | 0 | 0 |
| TKIDN2003044 | 0 | 100 | 0 | 0 | 0 | 0 | 0 |
| TKIDN2003059 | 0 | 78.393 | 0 | 0 | 0 | 0 | 0 |
| TKIDN2003062 | 0 | 100 | 0 | 0 | 0 | 0 | 0 |
| TKIDN2003078 | 0 | 51.264 | 0 | 0 | 0 | 0 | 0 |
| TKIDN2003366 | 0 | 100 | 0 | 0 | 0 | 0 | 0 |
| TKIDN2003396 | 0 | 100 | 0 | 0 | 0 | 0 | 0 |
| TKIDN2003413 | 0 | 100 | 0 | 0 | 0 | 0 | 0 |
| TKIDN2003597 | 0 | 28.918 | 0 | 0 | 0 | 0 | 0 |
| TKIDN2003601 | 15.897 | 70.571 | 0 | 0 | 0 | 0 | 0 |
| TKIDN2004185 | 0 | 14.684 | 0 | 0 | 0 | 0 | 0 |
| TKIDN2004386 | 0 | 100 | 0 | 0 | 0 | 0 | 0 |
| TKIDN2004458 | 0 | 100 | 0 | 0 | 0 | 0 | 0 |
| TKIDN2004748 | 0 | 35.796 | 0 | 0 | 0 | 0 | 0 |
| TKIDN2005487 | 0 | 2.659 | 0 | 0 | 0 | 0 | 0 |
| TKIDN2005721 | 0 | 100 | 0 | 0 | 0 | 0 | 0 |
| TKIDN2005934 | 0 | 100 | 0 | 0 | 0 | 0 | 0 |
| TKIDN2005947 | 0 | 100 | 0 | 0 | 0 | 0 | 0 |
| TKIDN2005956 | 0 | 100 | 0 | 0 | 0 | 0 | 0 |
| TKIDN2006525 | 0 | 100 | 0 | 0 | 0 | 0 | 0 |
| TKIDN2006761 | 0 | 78.604 | 0 | 0 | 0 | 0 | 0 |
| TKIDN2006852 | 0 | 100 | 0 | 0 | 0 | 0 | 0 |
| TKIDN2007605 | 10.416 | 46.241 | 0 | 0 | 0 | 0 | 0 |
| TKIDN2007667 | 0 | 100 | 0 | 0 | 0 | 0 | 0 |
| TKIDN2007828 | 0 | 24.698 | 0 | 0 | 0 | 0 | 0 |
| TKIDN2008176 | 0 | 78.604 | 0 | 0 | 0 | 0 | 0 |
| TKIDN2008778 | 0 | 100 | 0 | 0 | 0 | 0 | 0 |
| TKIDN2009092 | 0 | 100 | 0 | 0 | 0 | 0 | 0 |
| TKIDN2009330 | 0 | 76.948 | 0 | 0 | 0 | 0 | 0 |
| TKIDN2009481 | 0 | 100 | 0 | 0 | 0 | 0 | 0 |
| TKIDN2009641 | 0 | 21.402 | 0 | 0 | 0 | 0 | 0 |
| TKIDN2009794 | 0 | 53.409 | 0 | 0 | 0 | 16.162 | 0 |
| TKIDN2009889 | 0 | 64.923 | 0 | 0 | 0 | 0 | 0 |
| TKIDN2010200 | 0 | 100 | 0 | 0 | 0 | 0 | 0 |
| TKIDN2010232 | 0 | 100 | 0 | 0 | 0 | 0 | 0 |
| TKIDN2010278 | 0 | 100 | 0 | 0 | 0 | 0 | 0 |
| TKIDN2010602 | 0 | 100 | 0 | 0 | 0 | 0 | 0 |
| TKIDN2010812 | 0 | 39.464 | 0 | 0 | 0 | 0 | 0 |
| TKIDN2010934 | 0 | 74.873 | 0 | 0 | 0 | 0 | 0 |
| TKIDN2011051 | 0 | 100 | 0 | 0 | 0 | 0 | 0 |
| TKIDN2011160 | 0 | 100 | 0 | 0 | 0 | 0 | 0 |
| TKIDN2011289 | 0 | 22.129 | 0 | 0 | 0 | 0 | 0 |
| TKIDN2011324 | 0 | 100 | 0 | 0 | 0 | 0 | 0 |
| TKIDN2012034 | 0 | 100 | 0 | 0 | 0 | 0 | 0 |
| TKIDN2012771 | 0 | 100 | 0 | 0 | 0 | 0 | 0 |
| TKIDN2012824 | 0 | 100 | 0 | 0 | 0 | 0 | 0 |
| TKIDN2013134 | 0 | 100 | 0 | 0 | 0 | 0 | 0 |
| TKIDN2013287 | 14.432 | 64.067 | 0 | 0 | 0 | 0 | 0 |
| TKIDN2014570 | 0 | 78.731 | 0 | 0 | 0 | 0 | 0 |
| TKIDN2014757 | 0 | 100 | 0 | 0 | 0 | 0 | 0 |
| TKIDN2014771 | 0 | 100 | 0 | 0 | 0 | 0 | 0 |
| TKIDN2014964 | 0 | 40.568 | 0 | 0 | 0 | 0 | 0 |
| TKIDN2015025 | 0 | 100 | 0 | 0 | 0 | 0 | 0 |
| TKIDN2015071 | 0 | 48.016 | 0 | 0 | 0 | 0 | 0 |
| TKIDN2015161 | 0 | 100 | 0 | 0 | 0 | 0 | 0 |
| TKIDN2015263 | 0 | 100 | 0 | 0 | 0 | 0 | 0 |
| TKIDN2015285 | 0 | 36.749 | 0 | 0 | 0 | 0 | 0 |
| TKIDN2015423 | 0.531 | 2.357 | 0 | 0 | 0 | 0 | 0 |
| TKIDN2015788 | 2.193 | 9.737 | 0 | 0 | 0 | 2.946 | 0 |
| TKIDN2016309 | 0 | 100 | 0 | 0 | 0 | 0 | 0 |
| TKIDN2016399 | 0 | 34.998 | 65.002 | 0 | 0 | 0 | 0 |
| TKIDN2016846 | 0 | 83.911 | 0 | 0 | 0 | 0 | 0 |
| TKIDN2018926 | 0 | 78.604 | 0 | 0 | 0 | 0 | 0 |
| TKIDN2019116 | 0 | 100 | 0 | 0 | 0 | 0 | 0 |
| TLIVE2000023 | 0 | 0 | 100 | 0 | 0 | 0 | 0 |
| TLIVE2000142 | 0 | 0 | 100 | 0 | 0 | 0 | 0 |
| TLIVE2000292 | 0 | 0 | 100 | 0 | 0 | 0 | 0 |
| TLIVE2000762 | 0 | 0 | 100 | 0 | 0 | 0 | 0 |
| TLIVE2000979 | 0 | 0 | 73.389 | 0 | 0 | 0 | 0 |
| TLIVE2001327 | 0 | 0 | 64.491 | 0 | 0 | 0 | 0 |
| TLIVE2001616 | 0 | 0 | 100 | 0 | 0 | 0 | 0 |
| TLIVE2001684 | 0 | 0 | 100 | 0 | 0 | 0 | 0 |
| TLIVE2001828 | 10.817 | 0 | 89.183 | 0 | 0 | 0 | 0 |
| TLIVE2001927 | 0 | 0 | 100 | 0 | 0 | 0 | 0 |
| TLIVE2002046 | 3.027 | 0 | 12.478 | 0 | 0 | 2.033 | 0 |
| TLIVE2002336 | 0 | 0 | 100 | 0 | 0 | 0 | 0 |
| TLIVE2002338 | 0 | 0 | 100 | 0 | 0 | 0 | 0 |
| TLIVE2002562 | 0 | 0 | 100 | 0 | 0 | 0 | 0 |
| TLIVE2002690 | 0 | 0 | 41.431 | 0 | 0 | 0 | 0 |
| TLIVE2002882 | 0 | 0 | 100 | 0 | 0 | 0 | 0 |
| TLIVE2003197 | 0 | 0 | 100 | 0 | 0 | 0 | 0 |
| TLIVE2003200 | 0 | 0 | 87.078 | 0 | 0 | 0 | 0 |
| TLIVE2003225 | 0 | 0 | 100 | 0 | 0 | 0 | 0 |
| TLIVE2003381 | 0 | 0 | 100 | 0 | 0 | 0 | 0 |
| TLIVE2003737 | 0 | 0 | 100 | 0 | 0 | 0 | 0 |
| TLIVE2003961 | 0 | 0 | 100 | 0 | 0 | 0 | 0 |
| TLIVE2003970 | 0 | 0 | 15.901 | 0 | 0 | 5.181 | 0 |
| TLIVE2004110 | 0 | 0 | 70.982 | 0 | 0 | 0 | 0 |
| TLIVE2004320 | 0 | 0 | 87.217 | 0 | 0 | 0 | 0 |
| TLIVE2004331 | 0 | 0 | 100 | 0 | 0 | 0 | 0 |
| TLIVE2004601 | 0 | 0 | 100 | 0 | 0 | 0 | 0 |
| TLIVE2005180 | 0 | 0 | 100 | 0 | 0 | 0 | 0 |
| TLIVE2005390 | 0 | 0 | 100 | 0 | 0 | 0 | 0 |
| TLIVE2005516 | 0 | 0 | 100 | 0 | 0 | 0 | 0 |
| TLIVE2005731 | 0 | 0 | 100 | 0 | 0 | 0 | 0 |
| TLIVE2005866 | 0 | 0 | 100 | 0 | 0 | 0 | 0 |
| TLIVE2006236 | 0 | 0 | 100 | 0 | 0 | 0 | 0 |
| TLIVE2006359 | 0 | 0 | 100 | 0 | 0 | 0 | 0 |
| TLIVE2006529 | 0 | 0 | 100 | 0 | 0 | 0 | 0 |
| TLIVE2006621 | 0 | 0 | 100 | 0 | 0 | 0 | 0 |
| TLIVE2006733 | 0 | 0 | 100 | 0 | 0 | 0 | 0 |
| TLIVE2007000 | 0 | 0 | 100 | 0 | 0 | 0 | 0 |
| TLIVE2007016 | 0 | 0 | 100 | 0 | 0 | 0 | 0 |
| TLIVE2007132 | 0 | 0 | 100 | 0 | 0 | 0 | 0 |
| TLIVE2007192 | 0 | 0 | 100 | 0 | 0 | 0 | 0 |
| TLIVE2007528 | 0 | 0 | 100 | 0 | 0 | 0 | 0 |
| TLIVE2007607 | 0 | 0 | 100 | 0 | 0 | 0 | 0 |
| TLIVE2007736 | 0 | 0 | 90.642 | 0 | 0 | 0 | 0 |
| TLIVE2007816 | 0 | 0 | 100 | 0 | 0 | 0 | 0 |
| TLIVE2007919 | 0 | 0 | 100 | 0 | 0 | 0 | 0 |
| TLIVE2008083 | 0 | 0 | 100 | 0 | 0 | 0 | 0 |
| TLIVE2008213 | 0 | 0 | 100 | 0 | 0 | 0 | 0 |
| TLIVE2008221 | 0 | 0 | 100 | 0 | 0 | 0 | 0 |
| TLIVE2008229 | 0 | 0 | 91.317 | 0 | 0 | 0 | 0 |
| TLIVE2008712 | 0 | 0 | 100 | 0 | 0 | 0 | 0 |
| TLIVE2008797 | 0 | 0 | 100 | 0 | 0 | 0 | 0 |
| TLIVE2009087 | 0 | 0 | 100 | 0 | 0 | 0 | 0 |
| TLIVE2009163 | 0 | 0 | 100 | 0 | 0 | 0 | 0 |
| TLIVE2009489 | 0 | 0 | 100 | 0 | 0 | 0 | 0 |
| TLIVE2009541 | 0 | 0 | 100 | 0 | 0 | 0 | 0 |
| TLUNG2000179 | 0 | 0 | 0 | 96.684 | 0 | 0 | 0 |
| TOVAR2000476 | 0 | 0 | 0 | 0 | 49.428 | 0 | 0 |
| TOVAR2000575 | 3.687 | 0 | 0 | 0 | 96.313 | 0 | 0 |
| TOVAR2000649 | 0 | 0 | 0 | 0 | 100 | 0 | 0 |
| TOVAR2000904 | 0 | 0 | 0 | 0 | 95.526 | 0 | 0 |
| TOVAR2001281 | 0 | 0 | 0 | 0 | 100 | 0 | 0 |
| TOVAR2001556 | 0 | 0 | 0 | 0 | 100 | 0 | 0 |
| TOVAR2001730 | 0 | 0 | 0 | 0 | 100 | 0 | 0 |
| TOVAR2002247 | 0 | 0 | 0 | 0 | 100 | 0 | 0 |
| TOVAR2002514 | 0 | 0 | 0 | 0 | 100 | 0 | 0 |
| TOVAR2002549 | 0 | 0 | 0 | 0 | 100 | 0 | 0 |
| TOVAR2002800 | 0 | 0 | 0 | 0 | 100 | 0 | 0 |
| TRACH1000011 | 0 | 0 | 0 | 0 | 0 | 8.245 | 0 |
| TRACH1000018 | 0 | 0 | 0 | 0 | 0 | 23.133 | 0 |
| TRACH1000030 | 2.876 | 5.107 | 4.743 | 0 | 0 | 0.773 | 0 |
| TRACH1000038 | 0 | 0 | 0 | 0 | 0 | 21.094 | 0 |
| TRACH1000057 | 0 | 0 | 0 | 0 | 0 | 100 | 0 |
| TRACH1000063 | 0 | 0 | 0 | 0 | 0 | 2.409 | 0 |
| TRACH1000074 | 0 | 0 | 0 | 0 | 0 | 100 | 0 |
| TRACH1000100 | 0 | 0 | 0 | 0 | 0 | 100 | 0 |
| TRACH1000106 | 0 | 0 | 0 | 0 | 0 | 6.650 | 0 |
| TRACH1000125 | 42.674 | 0 | 0 | 0 | 0 | 57.326 | 0 |
| TRACH1000140 | 0 | 0 | 0 | 0 | 0 | 100 | 0 |
| TRACH1000144 | 0 | 0 | 0 | 0 | 0 | 100 | 0 |
| TRACH1000181 | 0 | 0 | 0 | 0 | 0 | 5.307 | 0 |
| TRACH1000193 | 0 | 0 | 0 | 0 | 0 | 48.662 | 0 |
| TRACH1000205 | 0 | 0 | 0 | 0 | 0 | 8.816 | 0 |
| TRACH1000212 | 0 | 0 | 0 | 0 | 0 | 100 | 0 |
| TRACH1000240 | 0 | 0 | 0 | 0 | 0 | 100 | 0 |
| TRACH2000002 | 0 | 0 | 0 | 0 | 0 | 100 | 0 |
| TRACH2000015 | 0 | 0 | 0 | 0 | 0 | 100 | 0 |
| TRACH2000024 | 0 | 0 | 0 | 0 | 0 | 100 | 0 |
| TRACH2000032 | 27.125 | 0 | 0 | 0 | 0 | 72.875 | 0 |
| TRACH2000045 | 0 | 0 | 0 | 0 | 0 | 6.160 | 0 |
| TRACH2000047 | 4.466 | 0 | 0 | 0 | 0 | 11.998 | 0 |
| TRACH2000079 | 0 | 2.005 | 0 | 0 | 0 | 2.427 | 0 |
| TRACH2000081 | 0 | 0 | 0 | 0 | 0 | 14.258 | 0 |
| TRACH2000083 | 0 | 0 | 0 | 0 | 0 | 100 | 0 |
| TRACH2000148 | 0 | 0 | 0 | 0 | 0 | 100 | 0 |
| TRACH2000185 | 0 | 0 | 0 | 0 | 0 | 100 | 0 |
| TRACH2000196 | 0 | 0 | 0 | 0 | 0 | 14.774 | 0 |
| TRACH2000235 | 0 | 0 | 0 | 0 | 0 | 100 | 0 |
| TRACH2000237 | 0 | 0 | 0 | 0 | 0 | 6.022 | 0 |
| TRACH2000243 | 0 | 0 | 0 | 0 | 0 | 0.346 | 0 |
| TRACH2000248 | 0 | 0 | 0 | 0 | 0 | 3.126 | 0 |
| TRACH2000250 | 15.327 | 0 | 0 | 0 | 0 | 20.590 | 0 |
| TRACH2000259 | 0 | 0 | 0 | 0 | 0 | 100 | 0 |
| TRACH2000272 | 0 | 0 | 0 | 0 | 0 | 100 | 0 |
| TRACH2000282 | 0 | 0 | 0 | 0 | 0 | 39.169 | 0 |
| TRACH2000287 | 0 | 0 | 0 | 0 | 0 | 100 | 0 |
| TRACH2000289 | 0 | 0 | 0 | 0 | 0 | 100 | 0 |
| TRACH2000306 | 0 | 0 | 77.769 | 0 | 0 | 6.335 | 0 |
| TRACH2000312 | 0 | 0 | 0 | 0 | 0 | 100 | 0 |
| TRACH2000321 | 1.639 | 0 | 3.378 | 0 | 0 | 1.651 | 0 |
| TRACH2000336 | 0 | 0 | 0 | 0 | 0 | 100 | 0 |
| TRACH2000359 | 0 | 11.039 | 0 | 0 | 0 | 13.362 | 0 |
| TRACH2000393 | 0 | 0 | 0 | 0 | 0 | 38.115 | 0 |
| TRACH2000411 | 0 | 0 | 0 | 0 | 0 | 100 | 0 |
| TRACH2000420 | 0 | 0 | 0 | 0 | 0 | 45.073 | 0 |
| TRACH2000461 | 4.289 | 0 | 0 | 0 | 0 | 5.762 | 0 |
| TRACH2000472 | 0.712 | 0 | 0 | 0 | 0 | 1.913 | 0 |
| TRACH2000496 | 0 | 0 | 0 | 0 | 0 | 100 | 0 |
| TRACH2000497 | 0 | 0 | 0 | 0 | 0 | 100 | 0 |
| TRACH2000502 | 0 | 0 | 0 | 0 | 0 | 52.833 | 0 |
| TRACH2000522 | 0 | 0 | 0 | 0 | 0 | 100 | 0 |
| TRACH2000540 | 2.376 | 0 | 0 | 0 | 0 | 1.596 | 0 |
| TRACH2000559 | 0 | 0 | 0 | 0 | 0 | 4.362 | 0 |
| TRACH2000660 | 21.151 | 0 | 0 | 0 | 0 | 28.413 | 0 |
| TRACH2000665 | 0 | 0 | 0 | 0 | 0 | 100 | 0 |
| TRACH2000675 | 0 | 0 | 0 | 0 | 0 | 100 | 0 |
| TRACH2000677 | 0 | 0 | 0 | 0 | 0 | 31.577 | 0 |
| TRACH2000702 | 0 | 0 | 0 | 0 | 0 | 4.398 | 0 |
| TRACH2000703 | 0 | 0 | 0 | 0 | 0 | 100 | 0 |
| TRACH2000767 | 59.821 | 0 | 0 | 0 | 0 | 40.179 | 0 |
| TRACH2000775 | 0 | 0 | 0 | 0 | 0 | 100 | 0 |
| TRACH2000780 | 2.186 | 0 | 0 | 0 | 0 | 7.832 | 0 |
| TRACH2000807 | 0 | 0 | 0 | 0 | 0 | 100 | 0 |
| TRACH2000862 | 0 | 0 | 0 | 0 | 0 | 6.484 | 0 |
| TRACH2000873 | 0 | 0 | 0 | 0 | 0 | 52.645 | 0 |
| TRACH2000894 | 0 | 0 | 0 | 0 | 0 | 100 | 0 |
| TRACH2000898 | 0 | 0 | 0 | 0 | 0 | 100 | 0 |
| TRACH2000920 | 2.764 | 0 | 0 | 0 | 0 | 3.713 | 0 |
| TRACH2000923 | 0 | 0 | 0 | 0 | 0 | 100 | 0 |
| TRACH2000926 | 0 | 0 | 0 | 0 | 0 | 3.125 | 0 |
| TRACH2000944 | 0 | 0 | 0 | 0 | 0 | 100 | 0 |
| TRACH2000959 | 0.611 | 0 | 0 | 0 | 0 | 0.273 | 0 |
| TRACH2000972 | 0 | 0 | 0 | 0 | 0 | 0.664 | 0 |
| TRACH2000981 | 0 | 0 | 0 | 0 | 0 | 100 | 0 |
| TRACH2000986 | 0 | 0 | 0 | 0 | 0 | 100 | 0 |
| TRACH2001021 | 0.698 | 0 | 5.757 | 0 | 0 | 0.938 | 8.992 |
| TRACH2001037 | 0 | 0 | 0 | 0 | 0 | 100 | 0 |
| TRACH2001060 | 0 | 0 | 0 | 0 | 0 | 37.554 | 0 |
| TRACH2001085 | 0 | 0 | 0 | 0 | 0 | 23.133 | 0 |
| TRACH2001101 | 0 | 0 | 0 | 0 | 0 | 23.819 | 0 |
| TRACH2001109 | 0 | 0.775 | 0 | 0 | 0 | 0.234 | 0 |
| TRACH2001121 | 0 | 0 | 0 | 0 | 0 | 100 | 0 |
| TRACH2001147 | 0 | 0 | 0 | 0 | 0 | 100 | 0 |
| TRACH2001154 | 0 | 0 | 0 | 0 | 0 | 100 | 0 |
| TRACH2001188 | 0 | 0 | 0 | 0 | 0 | 100 | 0 |
| TRACH2001192 | 0 | 0 | 0 | 0 | 0 | 37.759 | 0 |
| TRACH2001249 | 0 | 0 | 0 | 0 | 0 | 30.816 | 0 |
| TRACH2001275 | 0 | 0 | 0 | 0 | 0 | 100 | 0 |
| TRACH2001289 | 0.567 | 0 | 0 | 0 | 0 | 2.665 | 0 |
| TRACH2001314 | 1.524 | 0 | 0 | 0 | 0 | 8.190 | 0 |
| TRACH2001335 | 0 | 0 | 0 | 0 | 0 | 100 | 0 |
| TRACH2001339 | 0 | 0 | 0 | 0 | 0 | 32.807 | 0 |
| TRACH2001341 | 0 | 0 | 0 | 0 | 0 | 7.139 | 0 |
| TRACH2001347 | 0 | 0 | 0 | 0 | 0 | 100 | 0 |
| TRACH2001395 | 0 | 0 | 0 | 0 | 0 | 100 | 0 |
| TRACH2001400 | 0 | 0 | 0 | 0 | 0 | 100 | 0 |
| TRACH2001403 | 0 | 0 | 0 | 0 | 0 | 100 | 0 |
| TRACH2001416 | 0 | 0 | 0 | 0 | 0 | 100 | 0 |
| TRACH2001428 | 2.105 | 0 | 0 | 0 | 0 | 1.414 | 0 |
| TRACH2001432 | 0 | 4.118 | 7.648 | 0 | 0 | 1.246 | 0 |
| TRACH2001443 | 0 | 34.396 | 0 | 0 | 0 | 20.817 | 0 |
| TRACH2001463 | 2.553 | 0 | 0 | 0 | 0 | 3.430 | 0 |
| TRACH2001474 | 0 | 0 | 0 | 0 | 0 | 100 | 0 |
| TRACH2001478 | 0.968 | 0 | 0 | 0 | 0 | 3.251 | 0 |
| TRACH2001523 | 0 | 0 | 0 | 0 | 0 | 1.904 | 0 |
| TRACH2001525 | 0 | 0 | 0 | 0 | 0 | 100 | 0 |
| TRACH2001532 | 0 | 0 | 0 | 0 | 0 | 100 | 0 |
| TRACH2001549 | 3.526 | 0 | 0 | 0 | 0 | 23.681 | 0 |
| TRACH2001592 | 0 | 0 | 0 | 0 | 0 | 100 | 0 |
| TRACH2001596 | 17.065 | 0 | 0 | 0 | 0 | 22.924 | 0 |
| TRACH2001607 | 3.350 | 0 | 0 | 0 | 0 | 1.125 | 0 |
| TRACH2001612 | 0 | 0 | 0 | 0 | 0 | 4.474 | 0 |
| TRACH2001621 | 0 | 0 | 0 | 0 | 0 | 100 | 0 |
| TRACH2001646 | 0 | 0 | 0 | 0 | 0 | 25.331 | 0 |
| TRACH2001651 | 0 | 0 | 0 | 0 | 0 | 100 | 0 |
| TRACH2001684 | 0 | 0 | 0 | 0 | 0 | 19.952 | 0 |
| TRACH2001810 | 1.295 | 0 | 0 | 0 | 0 | 4.349 | 0 |
| TRACH2001898 | 0 | 0 | 0 | 0 | 0 | 1.142 | 0 |
| TRACH2001933 | 0 | 0 | 0 | 0 | 0 | 100 | 0 |
| TRACH2001968 | 0 | 0 | 0 | 0 | 0 | 100 | 0 |
| TRACH2001996 | 0 | 0 | 0 | 0 | 0 | 32.807 | 0 |
| TRACH2002043 | 0 | 0 | 0 | 0 | 0 | 1.188 | 0 |
| TRACH2002054 | 0 | 0 | 0 | 0 | 0 | 48.432 | 0 |
| TRACH2002092 | 0 | 0 | 0 | 0 | 0 | 3.144 | 0 |
| TRACH2002100 | 0 | 0 | 0 | 0 | 0 | 19.210 | 0 |
| TRACH2002138 | 0 | 0 | 0 | 0 | 0 | 24.095 | 0 |
| TRACH2002333 | 0 | 0 | 0 | 0 | 0 | 16.466 | 0 |
| TRACH2002537 | 0 | 0 | 6.376 | 0 | 0 | 2.078 | 0 |
| TRACH2002664 | 0 | 0 | 0 | 0 | 0 | 6.819 | 0 |
| TRACH2002784 | 0 | 0 | 0 | 0 | 0 | 100 | 0 |
| TRACH2002803 | 0 | 7.714 | 0 | 0 | 0 | 23.342 | 0 |
| TRACH2002840 | 0 | 0 | 0 | 0 | 0 | 100 | 0 |
| TRACH2002847 | 0 | 0 | 0 | 0 | 0 | 5.084 | 0 |
| TRACH2002853 | 0 | 0 | 0 | 0 | 0 | 100 | 0 |
| TRACH2002862 | 0 | 0 | 0 | 0 | 0 | 100 | 0 |
| TRACH2002954 | 0 | 0 | 0 | 0 | 0 | 100 | 0 |
| TRACH2002960 | 0 | 0 | 0 | 0 | 0 | 100 | 0 |
| TRACH2002988 | 42.674 | 0 | 0 | 0 | 0 | 57.326 | 0 |
| TRACH2003070 | 42.674 | 0 | 0 | 0 | 0 | 57.326 | 0 |
| TRACH2003272 | 6.179 | 0 | 0 | 0 | 4.150 | 0 | |
| TRACH2003323 | 0 | 0 | 0 | 0 | 0 | 7.974 | 0 |
| TRACH2003347 | 1.325 | 5.881 | 0 | 0 | 0 | 5.339 | 34.119 |
| TRACH2003484 | 0 | 0 | 0 | 0 | 0 | 61.213 | 0 |
| TRACH2003516 | 0 | 0 | 0 | 0 | 0 | 100 | 0 |
| TRACH2003605 | 42.674 | 0 | 0 | 0 | 0 | 57.326 | 0 |
| TRACH2003736 | 0 | 0 | 0 | 0 | 0 | 100 | 0 |
| TRACH2003759 | 0 | 0 | 0 | 0 | 0 | 100 | 0 |
| TRACH2003941 | 0 | 0 | 0 | 0 | 0 | 100 | 0 |
| TRACH2004039 | 0 | 0 | 0 | 0 | 0 | 63.148 | 0 |
| TRACH2004054 | 0 | 0 | 0 | 0 | 0 | 100 | 0 |
| TRACH2004087 | 0 | 0 | 0 | 0 | 0 | 100 | 0 |
| TRACH2004109 | 0 | 0 | 0 | 0 | 0 | 39.169 | 0 |
| TRACH2004170 | 0 | 0 | 0 | 0 | 0 | 100 | 0 |
| TRACH2004183 | 0 | 0 | 0 | 0 | 0 | 100 | 0 |
| TRACH2004251 | 0 | 0 | 0 | 0 | 0 | 100 | 0 |
| TRACH2004292 | 0 | 0 | 0 | 0 | 0 | 100 | 0 |
| TRACH2004336 | 0 | 0 | 0 | 0 | 0 | 63.148 | 0 |
| TRACH2004399 | 24.718 | 0 | 0 | 0 | 0 | 33.204 | 0 |
| TRACH2004428 | 0 | 0 | 0 | 0 | 0 | 100 | 0 |
| TRACH2004458 | 0 | 0 | 0 | 0 | 0 | 23.664 | 0 |
| TRACH2004499 | 0 | 0 | 0 | 0 | 0 | 3.292 | 0 |
| TRACH2004521 | 0 | 0 | 0 | 0 | 0 | 100 | 0 |
| TRACH2004570 | 0 | 0 | 0 | 0 | 0 | 100 | 0 |
| TRACH2004845 | 0 | 0 | 0 | 0 | 0 | 100 | 0 |
| TRACH2004887 | 0 | 0 | 0 | 0 | 0 | 100 | 0 |
| TRACH2004950 | 0 | 0 | 0 | 0 | 0 | 100 | 0 |
| TRACH2005004 | 0 | 0 | 0 | 0 | 0 | 100 | 0 |
| TRACH2005017 | 0 | 0 | 0 | 0 | 0 | 100 | 0 |
| TRACH2005066 | 0 | 0 | 0 | 0 | 0 | 100 | 0 |
| TRACH2005159 | 0 | 0 | 0 | 0 | 0 | 100 | 0 |
| TRACH2005314 | 0 | 0 | 0 | 0 | 0 | 100 | 0 |
| TRACH2005444 | 0 | 0 | 0 | 0 | 0 | 100 | 0 |
| TRACH2005541 | 0 | 0 | 0 | 0 | 0 | 10.892 | 0 |
| TRACH2005666 | 0 | 0 | 0 | 0 | 0 | 100 | 0 |
| TRACH2005698 | 42.674 | 0 | 0 | 0 | 0 | 57.326 | 0 |
| TRACH2005710 | 0 | 0 | 0 | 0 | 0 | 15.040 | 0 |
| TRACH2005720 | 0 | 0 | 0 | 0 | 0 | 100 | 0 |
| TRACH2005769 | 0 | 0 | 0 | 0 | 0 | 100 | 0 |
| TRACH2005796 | 0 | 0 | 0 | 0 | 0 | 50.251 | 0 |
| TRACH2005800 | 0 | 0 | 0 | 0 | 0 | 2.695 | 0 |
| TRACH2005811 | 4.397 | 0 | 0 | 0 | 0 | 3.544 | 22.648 |
| TRACH2006015 | 0 | 0 | 0 | 0 | 0 | 100 | 0 |
| TRACH2006049 | 0 | 0 | 0 | 0 | 0 | 52.833 | 0 |
| TRACH2006097 | 0 | 0 | 0 | 0 | 0 | 100 | 0 |
| TRACH2006194 | 0 | 0 | 0 | 0 | 0 | 100 | 0 |
| TRACH2006327 | 0 | 0 | 0 | 0 | 0 | 100 | 0 |
| TRACH2006331 | 0 | 0 | 0 | 0 | 0 | 100 | 0 |
| TRACH2006378 | 0 | 0 | 0 | 0 | 0 | 20.023 | 0 |
| TRACH2006387 | 0 | 0 | 0 | 0 | 0 | 100 | 0 |
| TRACH2006528 | 0 | 0 | 0 | 0 | 0 | 100 | 0 |
| TRACH2006670 | 0 | 0 | 0 | 0 | 0 | 100 | 0 |
| TRACH2006762 | 0 | 0 | 0 | 0 | 0 | 24.004 | 0 |
| TRACH2006866 | 0 | 0 | 0 | 0 | 0 | 5.558 | 21.311 |
| TRACH2006870 | 0 | 0 | 0 | 0 | 0 | 100 | 0 |
| TRACH2006918 | 0 | 0 | 0 | 0 | 0 | 100 | 0 |
| TRACH2007059 | 0 | 0 | 0 | 0 | 0 | 37.554 | 0 |
| TRACH2007324 | 0 | 0 | 0 | 0 | 0 | 100 | 0 |
| TRACH2007358 | 0 | 0 | 0 | 0 | 0 | 13.193 | 0 |
| TRACH2007399 | 0 | 0 | 0 | 0 | 0 | 3.693 | 0 |
| TRACH2007483 | 0 | 0 | 0 | 0 | 0 | 100 | 0 |
| TRACH2007542 | 0 | 0 | 0 | 0 | 0 | 100 | 0 |
| TRACH2007577 | 0 | 0 | 0 | 0 | 0 | 100 | 0 |
| TRACH2007674 | 0 | 0 | 0 | 0 | 0 | 100 | 0 |
| TRACH2007676 | 0 | 0 | 0 | 0 | 0 | 100 | 0 |
| TRACH2007688 | 0 | 0 | 0 | 0 | 0 | 100 | 0 |
| TRACH2007733 | 0 | 0 | 0 | 0 | 0 | 100 | 0 |
| TRACH2007754 | 0 | 0 | 30.987 | 0 | 0 | 1.683 | 0 |
| TRACH2007816 | 16.648 | 0 | 0 | 0 | 0 | 11.182 | 0 |
| TRACH2007894 | 42.674 | 0 | 0 | 0 | 0 | 57.326 | 0 |
| TRACH2007969 | 2.116 | 0 | 0 | 0 | 55.276 | 5.685 | 0 |
| TRACH2007988 | 0 | 0 | 0 | 0 | 0 | 100 | 0 |
| TRACH2008081 | 2.130 | 0 | 0 | 0 | 0 | 1.431 | 0 |
| TRACH2008112 | 0 | 0 | 0 | 0 | 0 | 100 | 0 |
| TRACH2008113 | 0 | 0 | 0 | 0 | 0 | 20.849 | 0 |
| TRACH2008127 | 0 | 0 | 0 | 0 | 0 | 100 | 0 |
| TRACH2008130 | 0 | 0 | 0 | 0 | 0 | 47.415 | 0 |
| TRACH2008278 | 0 | 0 | 0 | 0 | 0 | 100 | 0 |
| TRACH2008300 | 0 | 6.284 | 0 | 0 | 0 | 1.902 | 0 |
| TRACH2008472 | 6.542 | 0 | 0 | 0 | 0 | 3.515 | 0 |
| TRACH2008478 | 0 | 0 | 0 | 0 | 0 | 20.004 | 0 |
| TRACH2008540 | 0 | 0 | 0 | 0 | 0 | 17.670 | 0 |
| TRACH2008583 | 0 | 0 | 0 | 0 | 0 | 100 | 0 |
| TRACH2008597 | 42.674 | 0 | 0 | 0 | 0 | 57.326 | 0 |
| TRACH2008716 | 0 | 0 | 0 | 0 | 0 | 5.682 | 0 |
| TRACH2008820 | 0 | 0 | 0 | 0 | 0 | 100 | 0 |
| TRACH2008891 | 0 | 0 | 0 | 0 | 0 | 24.300 | 0 |
| TRACH2008921 | 0 | 0 | 0 | 0 | 0 | 100 | 0 |
| TRACH2009006 | 11.705 | 0 | 0 | 0 | 0 | 15.724 | 0 |
| TRACH2009060 | 0 | 0 | 0 | 0 | 0 | 100 | 0 |
| TRACH2009107 | 0 | 0 | 0 | 0 | 0 | 14.068 | 0 |
| TRACH2009123 | 0 | 0 | 0 | 0 | 0 | 100 | 0 |
| TRACH2009268 | 0 | 0 | 0 | 0 | 0 | 100 | 0 |
| TRACH2009291 | 0 | 0 | 0 | 0 | 0 | 23.395 | 0 |
| TRACH2009310 | 0 | 0 | 0 | 0 | 0 | 19.666 | 0 |
| TRACH2009340 | 8.253 | 0 | 0 | 0 | 0 | 11.087 | 0 |
| TRACH2009348 | 0 | 0 | 0 | 0 | 0 | 100 | 0 |
| TRACH2009358 | 0 | 0 | 0 | 0 | 0 | 100 | 0 |
| TRACH2009661 | 0 | 0 | 0 | 0 | 0 | 63.148 | 0 |
| TRACH2009730 | 0 | 0 | 0 | 0 | 0 | 100 | 0 |
| TRACH2009743 | 0 | 0 | 0 | 0 | 0 | 100 | 0 |
| TRACH2009754 | 0 | 0 | 0 | 0 | 0 | 100 | 0 |
| TRACH2009851 | 0 | 0 | 0 | 0 | 0 | 16.843 | 0 |
| TRACH2009862 | 0 | 0 | 0 | 0 | 0 | 100 | 0 |
| TRACH2009934 | 42.674 | 0 | 0 | 0 | 0 | 57.326 | 0 |
| TRACH2010159 | 0 | 0 | 0 | 0 | 0 | 100 | 0 |
| TRACH2010218 | 0 | 0 | 0 | 0 | 0 | 100 | 0 |
| TRACH2010251 | 0 | 0 | 0 | 0 | 0 | 100 | 0 |
| TRACH2010272 | 0 | 0 | 0 | 0 | 0 | 100 | 0 |
| TRACH2010317 | 42.674 | 0 | 0 | 0 | 0 | 57.326 | 0 |
| TRACH2010419 | 0 | 0 | 0 | 0 | 0 | 100 | 0 |
| TRACH2010451 | 0 | 0 | 0 | 0 | 0 | 100 | 0 |
| TRACH2010505 | 0 | 0 | 0 | 0 | 0 | 100 | 0 |
| TRACH2010587 | 0 | 0 | 0 | 0 | 0 | 100 | 0 |
| TRACH2010600 | 0 | 0 | 0 | 0 | 0 | 38.628 | 0 |
| TRACH2010634 | 0 | 0 | 0 | 0 | 0 | 38.834 | 0 |
| TRACH2010639 | 0 | 0 | 0 | 0 | 0 | 100 | 0 |
| TRACH2010677 | 0 | 0 | 0 | 0 | 0 | 100 | 0 |
| TRACH2010698 | 0 | 0 | 0 | 0 | 0 | 100 | 0 |
| TRACH2010771 | 0 | 0 | 0 | 0 | 0 | 38.134 | 0 |
| TRACH2010824 | 14.977 | 0 | 0 | 0 | 0 | 20.120 | 0 |
| TRACH2010883 | 0 | 0 | 0 | 0 | 0 | 100 | 0 |
| TRACH2010965 | 0 | 0 | 0 | 0 | 0 | 100 | 0 |
| TRACH2010974 | 0 | 0 | 0 | 0 | 0 | 100 | 0 |
| TRACH2011057 | 0 | 0 | 0 | 0 | 0 | 100 | 0 |
| TRACH2011093 | 0 | 0 | 0 | 0 | 0 | 100 | 0 |
| TRACH2011113 | 7.874 | 0 | 0 | 0 | 0 | 5.288 | 0 |
| TRACH2011290 | 0 | 0 | 0 | 0 | 0 | 47.415 | 0 |
| TRACH2011293 | 0 | 0 | 0 | 0 | 0 | 5.001 | 0 |
| TRACH2011302 | 0 | 0 | 0 | 0 | 0 | 13.725 | 0 |
| TRACH2011500 | 0 | 0 | 0 | 0 | 0 | 15.124 | 0 |
| TRACH2011574 | 0 | 0 | 0 | 0 | 0 | 100 | 0 |
| TRACH2011894 | 0 | 0 | 0 | 0 | 0 | 9.961 | 0 |
| TRACH2011956 | 0 | 0 | 0 | 0 | 0 | 100 | 0 |
| TRACH2012000 | 0 | 0 | 0 | 0 | 0 | 100 | 0 |
| TRACH2012138 | 0 | 0 | 0 | 0 | 0 | 100 | 0 |
| TRACH2012242 | 0 | 0 | 0 | 0 | 0 | 100 | 0 |
| TRACH2012298 | 0 | 0 | 0 | 0 | 0 | 1.589 | 0 |
| TRACH2012370 | 0 | 0 | 0 | 0 | 0 | 100 | 0 |
| TRACH2012376 | 0 | 0 | 0 | 0 | 0 | 3.006 | 0 |
| TRACH2012387 | 0 | 0 | 0 | 0 | 0 | 63.148 | 0 |
| TRACH2012497 | 0 | 0 | 0 | 0 | 0 | 7.251 | 0 |
| TRACH2012536 | 0 | 0 | 0 | 0 | 0 | 38.628 | 0 |
| TRACH2012562 | 0 | 0 | 0 | 0 | 0 | 100 | 0 |
| TRACH2012742 | 0 | 0 | 0 | 0 | 0 | 100 | 0 |
| TRACH2012811 | 0 | 0 | 0 | 0 | 0 | 8.733 | 0 |
| TRACH2012823 | 0 | 0 | 0 | 0 | 0 | 100 | 0 |
| TRACH2012918 | 0 | 0 | 0 | 0 | 0 | 100 | 0 |
| TRACH2013081 | 0 | 0 | 0 | 0 | 0 | 13.033 | 0 |
| TRACH2013123 | 0 | 0 | 0 | 0 | 0 | 26.942 | 0 |
| TRACH2013265 | 0 | 0 | 0 | 0 | 0 | 100 | 0 |
| TRACH2013369 | 0 | 0 | 0 | 0 | 0 | 100 | 0 |
| TRACH2013450 | 0 | 0 | 0 | 0 | 0 | 100 | 0 |
| TRACH2013495 | 0 | 0 | 0 | 0 | 0 | 12.564 | 0 |
| TRACH2013552 | 0 | 0 | 0 | 0 | 0 | 11.637 | 0 |
| TRACH2013585 | 0 | 0 | 0 | 0 | 0 | 52.582 | 0 |
| TRACH2013671 | 0 | 0 | 0 | 0 | 0 | 100 | 0 |
| TRACH2013726 | 0 | 0 | 0 | 0 | 0 | 100 | 0 |
| TRACH2013902 | 0 | 0 | 0 | 0 | 0 | 100 | 0 |
| TRACH2013928 | 0 | 0 | 0 | 0 | 0 | 100 | 0 |
| TRACH2013982 | 0 | 0 | 0 | 0 | 0 | 100 | 0 |
| TRACH2013991 | 0 | 0 | 0 | 0 | 0 | 14.258 | 0 |
| TRACH2014018 | 0 | 0 | 0 | 0 | 0 | 100 | 0 |
| TRACH2014045 | 0 | 0 | 0 | 0 | 0 | 100 | 0 |
| TRACH2014046 | 0 | 0 | 0 | 0 | 0 | 100 | 0 |
| TRACH2014077 | 0 | 0 | 0 | 0 | 0 | 11.431 | 0 |
| TRACH2014082 | 0 | 0 | 0 | 0 | 0 | 100 | 0 |
| TRACH2014124 | 9.468 | 0 | 0 | 0 | 0 | 1.156 | 0 |
| TRACH2014268 | 0 | 0 | 0 | 0 | 0 | 100 | 0 |
| TRACH2014284 | 0 | 0 | 0 | 0 | 0 | 100 | 0 |
| TRACH2014337 | 0 | 0 | 0 | 0 | 0 | 100 | 0 |
| TRACH2014356 | 0 | 0 | 0 | 0 | 0 | 100 | 0 |
| TRACH2014371 | 0 | 0 | 0 | 0 | 0 | 100 | 0 |
| TRACH2014442 | 0 | 0 | 0 | 0 | 0 | 2.522 | 0 |
| TRACH2014483 | 0 | 0 | 0 | 0 | 0 | 100 | 0 |
| TRACH2014495 | 0 | 0 | 0 | 0 | 0 | 100 | 0 |
| TRACH2014544 | 0 | 0 | 0 | 0 | 0 | 100 | 0 |
| TRACH2014573 | 0 | 0 | 0 | 0 | 0 | 100 | 0 |
| TRACH2014725 | 0 | 0 | 0 | 0 | 0 | 100 | 0 |
| TRACH2014760 | 0 | 0 | 0 | 0 | 0 | 100 | 0 |
| TRACH2014815 | 0 | 0 | 0 | 0 | 0 | 100 | 0 |
| TRACH2014839 | 0 | 0 | 0 | 0 | 0 | 100 | 0 |
| TRACH2014938 | 0 | 0 | 0 | 0 | 0 | 100 | 0 |
| TRACH2014950 | 0 | 0 | 0 | 0 | 0 | 100 | 0 |
| TRACH2014972 | 0 | 0 | 0 | 0 | 0 | 100 | 0 |
| TRACH2014974 | 0 | 0 | 0 | 0 | 0 | 100 | 0 |
| TRACH2014997 | 0 | 0 | 0 | 0 | 0 | 15.851 | 0 |
| TRACH2015180 | 0 | 0 | 0 | 0 | 0 | 100 | 0 |
| TRACH2015243 | 0 | 0 | 0 | 0 | 0 | 100 | 0 |
| TRACH2015316 | 0 | 0 | 0 | 0 | 0 | 100 | 0 |
| TRACH2015381 | 0 | 0 | 0 | 0 | 0 | 100 | 0 |
| TRACH2015486 | 0 | 0 | 0 | 0 | 0 | 100 | 0 |
| TRACH2015654 | 0 | 0 | 0 | 0 | 0 | 23.395 | 0 |
| TRACH2015823 | 10.944 | 0 | 0 | 0 | 0 | 7.351 | 0 |
| TRACH2015824 | 0 | 0 | 0 | 0 | 0 | 2.603 | 0 |
| TRACH2015939 | 14.052 | 0 | 0 | 0 | 0 | 18.877 | 0 |
| TRACH2015987 | 0 | 0 | 0 | 0 | 0 | 100 | 0 |
| TRACH2016080 | 0 | 0 | 0 | 0 | 0 | 100 | 0 |
| TRACH2016131 | 0 | 0 | 0 | 0 | 0 | 32.807 | 0 |
| TRACH2016286 | 0 | 0 | 0 | 0 | 0 | 100 | 0 |
| TRACH2016317 | 0 | 0 | 0 | 0 | 0 | 17.467 | 0 |
| TRACH2016347 | 0 | 0 | 0 | 0 | 0 | 100 | 0 |
| TRACH2016380 | 0 | 0 | 0 | 0 | 0 | 100 | 0 |
| TRACH2016384 | 0 | 0 | 0 | 0 | 0 | 100 | 0 |
| TRACH2016410 | 0 | 0 | 0 | 0 | 0 | 100 | 0 |
| TRACH2016481 | 0 | 0 | 0 | 0 | 0 | 48.432 | 0 |
| TRACH2016498 | 0 | 0 | 0 | 0 | 0 | 100 | 0 |
| TRACH2016533 | 23.903 | 0 | 0 | 0 | 0 | 16.055 | 0 |
| TRACH2016551 | 0 | 0 | 0 | 0 | 0 | 100 | 0 |
| TRACH2016554 | 0 | 0 | 0 | 0 | 0 | 100 | 0 |
| TRACH2016651 | 0 | 0 | 0 | 0 | 0 | 100 | 0 |
| TRACH2016690 | 0 | 0 | 0 | 0 | 0 | 100 | 0 |
| TRACH2016709 | 0 | 0 | 0 | 0 | 0 | 100 | 0 |
| TRACH2016722 | 0 | 0 | 0 | 0 | 0 | 100 | 0 |
| TRACH2016835 | 15.389 | 0 | 0 | 0 | 0 | 20.672 | 0 |
| TRACH2016980 | 0 | 0 | 0 | 0 | 0 | 100 | 0 |
| TRACH2017086 | 0 | 0 | 0 | 0 | 0 | 100 | 0 |
| TRACH2017368 | 0 | 0 | 0 | 0 | 0 | 4.896 | 0 |
| TRACH2017498 | 0 | 0 | 0 | 0 | 0 | 100 | 0 |
| TRACH2017609 | 26.499 | 0 | 0 | 0 | 0 | 35.597 | 0 |
| TRACH2017949 | 0 | 0 | 0 | 0 | 0 | 100 | 0 |
| TRACH2017965 | 0 | 0 | 0 | 0 | 0 | 100 | 0 |
| TRACH2017980 | 0 | 0 | 0 | 0 | 0 | 100 | 0 |
| TRACH2018034 | 0 | 0 | 0 | 0 | 0 | 50.251 | 0 |
| TRACH2018084 | 0 | 0 | 0 | 0 | 0 | 100 | 0 |
| TRACH2018262 | 0 | 0 | 0 | 0 | 0 | 100 | 0 |
| TRACH2018273 | 0 | 0 | 0 | 0 | 0 | 100 | 0 |
| TRACH2018278 | 0 | 0 | 0 | 0 | 0 | 100 | 0 |
| TRACH2018317 | 0 | 10.844 | 0 | 0 | 0 | 3.281 | 0 |
| TRACH2018345 | 0 | 0 | 0 | 0 | 0 | 100 | 0 |
| TRACH2018380 | 0 | 0 | 0 | 0 | 0 | 100 | 0 |
| TRACH2018446 | 6.974 | 0 | 0 | 0 | 0 | 9.369 | 0 |
| TRACH2018449 | 0 | 56.123 | 0 | 0 | 0 | 33.966 | 0 |
| TRACH2018512 | 0 | 0 | 0 | 0 | 0 | 100 | 0 |
| TRACH2018646 | 0 | 0 | 0 | 0 | 0 | 100 | 0 |
| TRACH2018663 | 0 | 0 | 0 | 0 | 0 | 100 | 0 |
| TRACH2018718 | 0 | 0 | 0 | 0 | 0 | 100 | 0 |
| TRACH2018835 | 0 | 0 | 0 | 0 | 0 | 100 | 0 |
| TRACH2018882 | 0 | 0 | 0 | 0 | 0 | 100 | 0 |
| TRACH2018914 | 0 | 0 | 0 | 0 | 0 | 100 | 0 |
| TRACH2018950 | 0 | 0 | 0 | 0 | 0 | 8.413 | 0 |
| TRACH2019024 | 0 | 0 | 0 | 0 | 0 | 100 | 0 |
| TRACH2019046 | 0 | 0 | 0 | 0 | 0 | 100 | 0 |
| TRACH2019080 | 0 | 0 | 0 | 0 | 0 | 34.182 | 0 |
| TRACH2019151 | 0 | 0 | 0 | 0 | 0 | 100 | 0 |
| TRACH2019154 | 0 | 0 | 0 | 0 | 0 | 100 | 0 |
| TRACH2019176 | 0 | 0 | 0 | 0 | 0 | 100 | 0 |
| TRACH2019248 | 0 | 0 | 0 | 0 | 0 | 100 | 0 |
| TRACH2019309 | 0 | 0 | 0 | 0 | 0 | 100 | 0 |
| TRACH2019425 | 0 | 0 | 0 | 0 | 0 | 12.564 | 0 |
| TRACH2019473 | 0 | 0 | 0 | 0 | 0 | 100 | 0 |
| TRACH2019602 | 0 | 0 | 0 | 0 | 0 | 100 | 0 |
| TRACH2019661 | 0 | 0 | 0 | 0 | 0 | 100 | 0 |
| TRACH2019672 | 0 | 0 | 0 | 0 | 0 | 23.395 | 0 |
| TRACH2019673 | 0 | 0 | 0 | 0 | 0 | 100 | 0 |
| TRACH2019844 | 0 | 0 | 0 | 0 | 0 | 100 | 0 |
| TRACH2019879 | 0 | 0 | 0 | 0 | 0 | 100 | 0 |
| TRACH2020048 | 0 | 0 | 0 | 0 | 0 | 100 | 0 |
| TRACH2020336 | 0 | 0 | 0 | 0 | 0 | 100 | 0 |
| TRACH2020525 | 0 | 0 | 0 | 0 | 0 | 100 | 0 |
| TRACH2021398 | 0 | 0 | 0 | 0 | 0 | 100 | 0 |
| TRACH2021622 | 0 | 0 | 0 | 0 | 0 | 100 | 0 |
| TRACH2021635 | 0 | 0 | 0 | 0 | 0 | 100 | 0 |
| TRACH2021964 | 0 | 0 | 0 | 0 | 0 | 100 | 0 |
| TRACH2022042 | 0 | 0 | 0 | 0 | 0 | 100 | 0 |
| TRACH2022113 | 0 | 0 | 0 | 0 | 0 | 100 | 0 |
| TRACH2022253 | 0 | 0 | 0 | 0 | 0 | 100 | 0 |
| TRACH2022425 | 0 | 0 | 0 | 0 | 0 | 100 | 0 |
| TRACH2022553 | 0 | 0 | 0 | 0 | 0 | 100 | 0 |
| TRACH2022649 | 0 | 0 | 0 | 0 | 0 | 100 | 0 |
| TRACH2022839 | 0 | 0 | 0 | 0 | 0 | 100 | 0 |
| TRACH2023246 | 0 | 0 | 0 | 0 | 0 | 100 | 0 |
| TRACH2023299 | 0 | 0 | 0 | 0 | 0 | 7.150 | 0 |
| TRACH2023306 | 0 | 0 | 0 | 0 | 0 | 100 | 0 |
| TRACH2023416 | 0 | 0 | 0 | 0 | 0 | 100 | 0 |
| TRACH2023479 | 0 | 0 | 0 | 0 | 0 | 100 | 0 |
| TRACH2023684 | 0 | 0 | 0 | 0 | 0 | 100 | 0 |
| TRACH2023860 | 0 | 0 | 0 | 0 | 0 | 100 | 0 |
| TRACH2023876 | 0 | 0 | 0 | 0 | 0 | 100 | 0 |
| TRACH2024139 | 0 | 0 | 0 | 0 | 0 | 100 | 0 |
| TRACH2024187 | 0 | 0 | 0 | 0 | 0 | 100 | 0 |
| TRACH2024271 | 0 | 0 | 0 | 0 | 0 | 100 | 0 |
| TRACH2024293 | 53.839 | 0 | 0 | 0 | 0 | 18.081 | 0 |
| TRACH2024408 | 0 | 0 | 0 | 0 | 0 | 100 | 0 |
| TRACH2024512 | 0 | 0 | 0 | 0 | 0 | 100 | 0 |
| TRACH2024559 | 0 | 0 | 0 | 0 | 0 | 100 | 0 |
| TRACH2024647 | 0 | 0 | 0 | 0 | 0 | 100 | 0 |
| TRACH2024651 | 0 | 0 | 0 | 0 | 0 | 100 | 0 |
| TRACH2024730 | 0 | 0 | 0 | 0 | 0 | 100 | 0 |
| TRACH2024735 | 0 | 0 | 0 | 0 | 0 | 100 | 0 |
| TRACH2024749 | 0 | 0 | 0 | 0 | 0 | 100 | 0 |
| TRACH2024821 | 0 | 0 | 0 | 0 | 0 | 100 | 0 |
| TRACH2025057 | 0 | 0 | 0 | 0 | 0 | 100 | 0 |
| TRACH2025084 | 0 | 0 | 0 | 0 | 0 | 100 | 0 |
| TRACH2025155 | 0 | 0 | 0 | 0 | 0 | 100 | 0 |
| TRACH2025224 | 0 | 0 | 0 | 0 | 0 | 100 | 0 |
| TRACH2025344 | 0 | 0 | 0 | 0 | 0 | 11.031 | 0 |
| TRACH2025379 | 0 | 0 | 0 | 0 | 0 | 100 | 0 |
| TRACH2025507 | 0 | 0 | 0 | 0 | 0 | 100 | 0 |
| TRACH2025535 | 0.968 | 0 | 0 | 0 | 0 | 2.601 | 12.468 |
| TRACH2025569 | 0 | 0 | 0 | 0 | 0 | 100 | 0 |
| TRACH2025705 | 0 | 0 | 0 | 0 | 0 | 100 | 0 |
| TRACH2025749 | 0 | 0 | 0 | 0 | 0 | 100 | 0 |
| TRACH2025753 | 0 | 0 | 0 | 0 | 0 | 100 | 0 |
| TRACH2025810 | 0 | 0 | 0 | 0 | 0 | 100 | 0 |
| TRACH2025853 | 0 | 0 | 0 | 0 | 0 | 100 | 0 |
| TRACH2025911 | 0 | 0 | 0 | 0 | 0 | 52.645 | 0 |
| TRACH2025932 | 0 | 0 | 0 | 0 | 0 | 100 | 0 |
| TRACH3000014 | 0 | 0 | 0 | 0 | 0 | 81.453 | 0 |
| TRACH3000017 | 0 | 0 | 0 | 0 | 0 | 100 | 0 |
| TRACH3000043 | 0 | 0 | 0 | 0 | 0 | 100 | 0 |
| TRACH3000134 | 0 | 0 | 0 | 0 | 0 | 20.255 | 0 |
| TRACH3000180 | 0 | 0 | 0 | 0 | 0 | 100 | 0 |
| TRACH3000342 | 0 | 0 | 0 | 0 | 0 | 100 | 0 |
| TRACH3000420 | 0 | 0 | 0 | 0 | 0 | 100 | 0 |
| TRACH3000515 | 0 | 0 | 0 | 0 | 0 | 100 | 0 |
| TRACH3000530 | 0 | 0 | 0 | 0 | 0 | 100 | 0 |
| TRACH3000548 | 0 | 0 | 0 | 0 | 0 | 100 | 0 |
| TRACH3000558 | 0 | 0 | 0 | 0 | 0 | 100 | 0 |
| TRACH3000586 | 0 | 0 | 0 | 0 | 0 | 100 | 0 |
| TRACH3000692 | 0 | 0 | 0 | 0 | 0 | 15.750 | 0 |
| TRACH3000780 | 0 | 0 | 0 | 0 | 0 | 52.334 | 0 |
| TRACH3000892 | 0 | 0 | 0 | 0 | 0 | 100 | 0 |
| TRACH3000926 | 0 | 0 | 0 | 0 | 0 | 100 | 0 |
| TRACH3001119 | 0 | 0 | 0 | 0 | 0 | 100 | 0 |
| TRACH3001443 | 0 | 0 | 0 | 0 | 0 | 100 | 0 |
| TRACH3001550 | 0 | 0 | 0 | 0 | 0 | 52.334 | 0 |
| TRACH3001759 | 0 | 0 | 0 | 0 | 0 | 100 | 0 |
| TRACH3002064 | 0 | 0 | 0 | 0 | 0 | 100 | 0 |
| TRACH3002107 | 0 | 0 | 0 | 0 | 0 | 100 | 0 |
| TRACH3002168 | 0 | 0 | 0 | 0 | 0 | 100 | 0 |
| TRACH3002188 | 0 | 0 | 0 | 0 | 0 | 100 | 0 |
| TRACH3002192 | 2.600 | 0 | 0 | 0 | 0 | 3.493 | 0 |
| TRACH3002245 | 0 | 0 | 0 | 0 | 0 | 100 | 0 |
| TRACH3002293 | 0 | 0 | 0 | 0 | 0 | 100 | 0 |
| TRACH3002533 | 0 | 0 | 0 | 0 | 0 | 100 | 0 |
| TRACH3002561 | 0 | 0 | 0 | 0 | 0 | 100 | 0 |
| TRACH3002567 | 0 | 0 | 0 | 0 | 0 | 100 | 0 |
| TRACH3002605 | 0 | 0 | 0 | 0 | 0 | 52.334 | 0 |
| TRACH3002650 | 0 | 0 | 0 | 0 | 0 | 100 | 0 |
| TRACH3002752 | 0 | 0 | 0 | 0 | 0 | 11.442 | 0 |
| TRACH3002866 | 0 | 0 | 0 | 0 | 0 | 100 | 0 |
| TRACH3002871 | 0 | 0 | 0 | 0 | 0 | 100 | 0 |
| TRACH3002876 | 0 | 0 | 0 | 0 | 0 | 100 | 0 |
| TRACH3002890 | 0 | 0 | 0 | 0 | 0 | 100 | 0 |
| TRACH3003009 | 0 | 0 | 0 | 0 | 0 | 100 | 0 |
| TRACH3003037 | 0 | 0 | 0 | 0 | 0 | 35.900 | 0 |
| TRACH3003357 | 0 | 0 | 0 | 0 | 0 | 100 | 0 |
| TRACH3003379 | 0 | 0 | 0 | 0 | 0 | 54.819 | 0 |
| TRACH3003547 | 3.526 | 0 | 29.074 | 0 | 0 | 9.474 | 0 |
| TRACH3003586 | 0 | 0 | 0 | 0 | 0 | 100 | 0 |
| TRACH3003683 | 0 | 0 | 0 | 0 | 0 | 100 | 0 |
| TRACH3003780 | 0 | 0 | 0 | 0 | 0 | 100 | 0 |
| TRACH3003805 | 0 | 0 | 0 | 0 | 0 | 100 | 0 |
| TRACH3003832 | 0 | 0 | 0 | 0 | 0 | 13.601 | 0 |
| TRACH3003872 | 0 | 0 | 0 | 0 | 0 | 46.116 | 0 |
| TRACH3004068 | 0 | 0 | 0 | 0 | 31.044 | 1.596 | 0 |
| TRACH3004113 | 0 | 0 | 0 | 0 | 0 | 100 | 0 |
| TRACH3004288 | 0 | 0 | 0 | 0 | 0 | 100 | 0 |
| TRACH3004303 | 0 | 0 | 0 | 0 | 0 | 100 | 0 |
| TRACH3004412 | 0 | 0 | 0 | 0 | 0 | 100 | 0 |
| TRACH3004424 | 14.181 | 0 | 0 | 0 | 0 | 19.049 | 0 |
| TRACH3004456 | 0 | 0 | 0 | 0 | 0 | 100 | 0 |
| TRACH3004537 | 0 | 0 | 0 | 0 | 0 | 100 | 0 |
| TRACH3004596 | 0 | 0 | 0 | 0 | 0 | 100 | 0 |
| TRACH3004651 | 0 | 0 | 0 | 0 | 0 | 100 | 0 |
| TRACH3004652 | 0 | 0 | 0 | 0 | 0 | 100 | 0 |
| TRACH3004671 | 0 | 0 | 0 | 0 | 0 | 100 | 0 |
| TRACH3004721 | 2.424 | 0 | 0 | 0 | 0 | 3.256 | 0 |
| TRACH3004747 | 0 | 0 | 0 | 0 | 0 | 100 | 0 |
| TRACH3004760 | 0 | 0 | 0 | 0 | 0 | 100 | 0 |
| TRACH3004783 | 0 | 0 | 0 | 0 | 0 | 100 | 0 |
| TRACH3004786 | 0 | 0 | 0 | 0 | 0 | 100 | 0 |
| TRACH3004840 | 0 | 0 | 0 | 0 | 0 | 100 | 0 |
| TRACH3004931 | 0 | 0 | 0 | 0 | 0 | 100 | 0 |
| TRACH3004934 | 0 | 0 | 0 | 0 | 0 | 100 | 0 |
| TRACH3005072 | 0 | 0 | 0 | 0 | 0 | 100 | 0 |
| TRACH3005085 | 0 | 0 | 0 | 0 | 0 | 100 | 0 |
| TRACH3005102 | 0 | 0 | 0 | 0 | 0 | 100 | 0 |
| TRACH3005173 | 0 | 0 | 0 | 0 | 0 | 100 | 0 |
| TRACH3005191 | 0 | 0 | 0 | 0 | 0 | 100 | 0 |
| TRACH3005211 | 0 | 0 | 0 | 0 | 0 | 20.643 | 0 |
| TRACH3005274 | 0 | 0 | 0 | 0 | 0 | 100 | 0 |
| TRACH3005294 | 0 | 0 | 0 | 0 | 0 | 4.160 | 0 |
| TRACH3005479 | 0 | 0 | 0 | 0 | 0 | 63.148 | 0 |
| TRACH3005549 | 0 | 0 | 0 | 0 | 0 | 100 | 0 |
| TRACH3005699 | 0 | 0 | 0 | 0 | 0 | 53.752 | 0 |
| TRACH3005702 | 0 | 0 | 0 | 0 | 0 | 100 | 0 |
| TRACH3005808 | 0 | 0 | 0 | 0 | 0 | 100 | 0 |
| TRACH3005852 | 0 | 0 | 0 | 0 | 0 | 100 | 0 |
| TRACH3005896 | 0 | 0 | 0 | 0 | 0 | 100 | 0 |
| TRACH3006038 | 0 | 0 | 0 | 0 | 0 | 61.213 | 0 |
| TRACH3006149 | 0 | 0 | 0 | 0 | 0 | 100 | 0 |
| TRACH3006228 | 0 | 0 | 0 | 0 | 0 | 100 | 0 |
| TRACH3006264 | 0 | 0 | 0 | 0 | 0 | 100 | 0 |
| TRACH3006336 | 0 | 0 | 0 | 0 | 0 | 100 | 0 |
| TRACH3006379 | 0 | 0 | 0 | 0 | 0 | 100 | 0 |
| TRACH3006392 | 0 | 0 | 0 | 0 | 0 | 100 | 0 |
| TRACH3006395 | 0 | 0 | 0 | 0 | 0 | 100 | 0 |
| TRACH3006397 | 0 | 0 | 0 | 0 | 0 | 100 | 0 |
| TRACH3006412 | 0 | 0 | 0 | 0 | 0 | 61.213 | 0 |
| TRACH3006470 | 0 | 0 | 0 | 0 | 0 | 100 | 0 |
| TRACH3006589 | 0 | 0 | 0 | 0 | 0 | 100 | 0 |
| TRACH3006626 | 0 | 0 | 0 | 0 | 0 | 100 | 0 |
| TRACH3006699 | 0 | 0 | 0 | 0 | 0 | 100 | 0 |
| TRACH3006717 | 3.060 | 0 | 0 | 0 | 0 | 4.110 | 0 |
| TRACH3006800 | 0 | 0 | 0 | 0 | 0 | 65.258 | 0 |
| TRACH3006889 | 0 | 0 | 0 | 0 | 0 | 100 | 0 |
| TRACH3006985 | 0 | 0 | 0 | 0 | 0 | 100 | 0 |
| TRACH3007097 | 0 | 0 | 0 | 0 | 0 | 100 | 0 |
| TRACH3007268 | 0 | 0 | 0 | 0 | 0 | 100 | 0 |
| TRACH3007274 | 0 | 0 | 0 | 0 | 0 | 100 | 0 |
| TRACH3007277 | 0 | 0 | 0 | 0 | 0 | 100 | 0 |
| TRACH3007391 | 0 | 0 | 0 | 0 | 0 | 100 | 0 |
| TRACH3007479 | 0 | 0 | 0 | 0 | 0 | 26.502 | 0 |
| TRACH3007541 | 42.674 | 0 | 0 | 0 | 0 | 57.326 | 0 |
| TRACH3007595 | 0 | 0 | 0 | 0 | 0 | 100 | 0 |
| TRACH3007625 | 2.941 | 0 | 0 | 0 | 0 | 2.633 | 0 |
| TRACH3007627 | 0 | 0 | 0 | 0 | 0 | 100 | 0 |
| TRACH3007689 | 0 | 0 | 0 | 0 | 0 | 52.833 | 0 |
| TRACH3007766 | 0 | 0 | 0 | 0 | 0 | 100 | 0 |
| TRACH3007866 | 0 | 0 | 0 | 0 | 0 | 100 | 0 |
| TRACH3007995 | 0 | 0 | 0 | 0 | 0 | 61.213 | 0 |
| TRACH3008042 | 0 | 0 | 0 | 0 | 0 | 100 | 0 |
| TRACH3008061 | 0 | 0 | 0 | 0 | 0 | 100 | 0 |
| TRACH3008093 | 2.042 | 0 | 0 | 0 | 0 | 2.744 | 0 |
| TRACH3008201 | 0 | 0 | 0 | 0 | 0 | 52.833 | 0 |
| TRACH3008508 | 15.975 | 0 | 0 | 0 | 0 | 21.459 | 0 |
| TRACH3008535 | 0 | 0 | 0 | 0 | 0 | 31.730 | 0 |
| TRACH3008629 | 0 | 0 | 0 | 0 | 0 | 97.020 | 0 |
| TRACH3008632 | 0 | 0 | 0 | 0 | 0 | 9.465 | 0 |
| TRACH3008688 | 0 | 0 | 0 | 0 | 0 | 100 | 0 |
| TRACH3008697 | 0 | 0 | 0 | 0 | 0 | 100 | 0 |
| TRACH3008713 | 0 | 0 | 0 | 0 | 0 | 31.730 | 0 |
| TRACH3008887 | 0 | 0 | 0 | 0 | 0 | 100 | 0 |
| TRACH3008902 | 0 | 0 | 0 | 0 | 0 | 100 | 0 |
| TRACH3008990 | 0 | 0 | 0 | 0 | 0 | 100 | 0 |
| TRACH3009001 | 0 | 0 | 0 | 0 | 0 | 52.489 | 0 |
| TRACH3009008 | 0 | 0 | 0 | 0 | 0 | 16.463 | 0 |
| TRACH3009059 | 0 | 0 | 0 | 0 | 0 | 100 | 0 |
| TRACH3009061 | 0 | 0 | 0 | 0 | 0 | 100 | 0 |
| TRACH3009148 | 0 | 0 | 0 | 0 | 0 | 20.094 | 0 |
| TRACH3009455 | 0 | 0 | 0 | 0 | 0 | 52.833 | 0 |
| TRACH3009701 | 0 | 0 | 0 | 0 | 0 | 100 | 0 |
| TRACH3009715 | 0 | 0 | 0 | 0 | 0 | 100 | 0 |
| TRACH3009894 | 0 | 0 | 0 | 0 | 0 | 100 | 0 |
| TRACH3009956 | 0 | 0 | 0 | 0 | 0 | 44.106 | 0 |
| TRACH3010079 | 0 | 0 | 0 | 0 | 0 | 27.054 | 0 |
| TRACH3010167 | 0 | 0 | 0 | 0 | 0 | 100 | 0 |
| TRACH3010331 | 0 | 0 | 0 | 0 | 0 | 100 | 0 |
| TRACH3010342 | 0 | 0 | 0 | 0 | 0 | 100 | 0 |
| TRACH3010382 | 0 | 0 | 0 | 0 | 0 | 100 | 0 |
| TRACH3010757 | 0 | 0 | 0 | 0 | 0 | 100 | 0 |
| TRACH3010901 | 0 | 0 | 0 | 0 | 0 | 100 | 0 |
| TRACH3011004 | 0 | 0 | 0 | 0 | 0 | 100 | 0 |
| TRACH3011082 | 0 | 0 | 0 | 0 | 0 | 100 | 0 |
| TRACH3011184 | 0 | 0 | 0 | 0 | 0 | 100 | 0 |
| TRACH3011282 | 0 | 0 | 0 | 0 | 0 | 100 | 0 |
| TRACH3011313 | 0 | 0 | 0 | 0 | 0 | 100 | 0 |
| TRACH3011454 | 0 | 0 | 0 | 0 | 0 | 100 | 0 |
| TRACH3011485 | 0 | 0 | 0 | 0 | 0 | 100 | 0 |
| TRACH3011503 | 0 | 0 | 0 | 0 | 0 | 100 | 0 |
| TRACH3011538 | 0 | 0 | 0 | 0 | 0 | 100 | 0 |
| TRACH3011542 | 0 | 0 | 0 | 0 | 0 | 100 | 0 |
| TRACH3012106 | 0 | 0 | 0 | 0 | 0 | 100 | 0 |
| TRACH3012161 | 0 | 0 | 0 | 0 | 0 | 100 | 0 |
| TRACH3012232 | 0 | 0 | 0 | 0 | 0 | 100 | 0 |
| TRACH3012261 | 0 | 0 | 0 | 0 | 0 | 100 | 0 |
| TRACH3012445 | 0 | 0 | 0 | 0 | 0 | 100 | 0 |
| TRACH3012460 | 0 | 0 | 0 | 0 | 0 | 100 | 0 |
| TRACH3012659 | 0 | 0 | 0 | 0 | 0 | 100 | 0 |
| TRACH3012718 | 0 | 0 | 0 | 0 | 0 | 100 | 0 |
| TRACH3012864 | 0 | 0 | 0 | 0 | 0 | 100 | 0 |
| TRACH3012891 | 0 | 0 | 0 | 0 | 0 | 100 | 0 |
| TRACH3012942 | 0 | 0 | 0 | 0 | 0 | 100 | 0 |
| TRACH3013043 | 0 | 0 | 0 | 0 | 0 | 46.144 | 0 |
| TRACH3013072 | 42.674 | 0 | 0 | 0 | 0 | 57.326 | 0 |
| TRACH3013426 | 0 | 0 | 0 | 0 | 0 | 100 | 0 |
| TRACH3013454 | 0 | 0 | 0 | 0 | 0 | 100 | 0 |
| TRACH3013558 | 0 | 0 | 0 | 0 | 0 | 61.213 | 0 |
| TRACH3013684 | 0 | 0 | 0 | 0 | 0 | 100 | 0 |
| TRACH3013693 | 0 | 0 | 0 | 0 | 0 | 100 | 0 |
| TRACH3013700 | 0 | 0 | 0 | 0 | 0 | 100 | 0 |
| TRACH3013766 | 0 | 0 | 0 | 0 | 0 | 100 | 0 |
| TRACH3013900 | 0 | 0 | 0 | 0 | 0 | 100 | 0 |
| TRACH3013926 | 0 | 0 | 0 | 0 | 0 | 100 | 0 |
| TRACH3014063 | 0 | 0 | 0 | 0 | 0 | 100 | 0 |
| TRACH3014183 | 0 | 0 | 0 | 0 | 0 | 100 | 0 |
| TRACH3014215 | 0 | 0 | 0 | 0 | 0 | 100 | 0 |
| TRACH3014316 | 0 | 0 | 0 | 0 | 0 | 47.415 | 0 |
| TRACH3014415 | 0 | 0 | 0 | 0 | 0 | 100 | 0 |
| TRACH3014580 | 0 | 0 | 0 | 0 | 0 | 100 | 0 |
| TRACH3014641 | 0 | 0 | 0 | 0 | 0 | 100 | 0 |
| TRACH3014885 | 0 | 0 | 0 | 0 | 0 | 100 | 0 |
| TRACH3015136 | 0 | 0 | 0 | 0 | 0 | 100 | 0 |
| TRACH3015336 | 0 | 0 | 0 | 0 | 0 | 100 | 0 |
| TRACH3015346 | 0 | 0 | 0 | 0 | 0 | 100 | 0 |
| TRACH3015354 | 0 | 0 | 0 | 0 | 0 | 100 | 0 |
| TRACH3015467 | 0 | 0 | 0 | 0 | 0 | 100 | 0 |
| TRACH3015626 | 0 | 0 | 0 | 0 | 0 | 100 | 0 |
| TRACH3015951 | 0 | 0 | 0 | 0 | 0 | 100 | 0 |
| TRACH3016051 | 0 | 0 | 0 | 0 | 0 | 100 | 0 |
| TRACH3016120 | 0 | 0 | 0 | 0 | 0 | 100 | 0 |
| TRACH3016264 | 0 | 0 | 0 | 0 | 0 | 100 | 0 |
| TRACH3016277 | 0 | 0 | 0 | 0 | 0 | 100 | 0 |
| TRACH3016368 | 0 | 0 | 0 | 0 | 0 | 100 | 0 |
| TRACH3016455 | 0 | 0 | 0 | 0 | 0 | 100 | 0 |
| TRACH3016614 | 0 | 0 | 0 | 0 | 0 | 100 | 0 |
| TRACH3016805 | 11.263 | 0 | 0 | 0 | 0 | 5.043 | 0 |
| TRACH3016992 | 0 | 0 | 0 | 0 | 0 | 53.323 | 0 |
| TRACH3017171 | 0 | 0 | 0 | 0 | 0 | 100 | 0 |
| TRACH3017409 | 0 | 0 | 0 | 0 | 0 | 100 | 0 |
| TRACH3017934 | 0 | 0 | 0 | 0 | 0 | 100 | 0 |
| TRACH3018108 | 0 | 0 | 0 | 0 | 0 | 100 | 0 |
| TRACH3018191 | 0 | 0 | 0 | 0 | 0 | 100 | 0 |
| TRACH3018240 | 0 | 0 | 0 | 0 | 0 | 100 | 0 |
| TRACH3018261 | 0 | 0 | 0 | 0 | 0 | 100 | 0 |
| TRACH3018519 | 0 | 0 | 0 | 0 | 0 | 100 | 0 |
| TRACH3018524 | 0 | 0 | 0 | 0 | 0 | 100 | 0 |
| TRACH3018606 | 0 | 0 | 0 | 0 | 0 | 100 | 0 |
| TRACH3018783 | 0 | 0 | 0 | 0 | 0 | 100 | 0 |
| TRACH3018907 | 0 | 0 | 0 | 0 | 0 | 100 | 0 |
| TRACH3018933 | 0 | 0 | 0 | 0 | 0 | 100 | 0 |
| TRACH3018943 | 0 | 0 | 0 | 0 | 0 | 100 | 0 |
| TRACH3019018 | 0 | 0 | 0 | 0 | 0 | 100 | 0 |
| TRACH3019058 | 0 | 0 | 0 | 0 | 0 | 100 | 0 |
| TRACH3019142 | 0 | 0 | 0 | 0 | 0 | 100 | 0 |
| TRACH3019290 | 23.065 | 0 | 0 | 0 | 0 | 30.984 | 0 |
| TRACH3019347 | 0 | 0 | 0 | 0 | 0 | 100 | 0 |
| TRACH3019370 | 0 | 0 | 0 | 0 | 0 | 100 | 0 |
| TRACH3019447 | 0 | 0 | 0 | 0 | 0 | 100 | 0 |
| TRACH3019598 | 0 | 0 | 0 | 0 | 0 | 100 | 0 |
| TRACH3019621 | 0 | 0 | 0 | 0 | 0 | 100 | 0 |
| TRACH3019662 | 0 | 0 | 0 | 0 | 0 | 100 | 0 |
| TRACH3019807 | 0 | 0 | 0 | 0 | 0 | 100 | 0 |
| TRACH3019924 | 0 | 0 | 0 | 0 | 0 | 100 | 0 |
| TRACH3019977 | 0 | 0 | 0 | 0 | 0 | 100 | 0 |
| TRACH3020137 | 0 | 0 | 0 | 0 | 0 | 100 | 0 |
| TRACH3020410 | 0 | 0 | 0 | 0 | 0 | 100 | 0 |
| TRACH3020563 | 0 | 0 | 0 | 0 | 0 | 100 | 0 |
| TRACH3020605 | 0 | 0 | 0 | 0 | 0 | 100 | 0 |
| TRACH3020750 | 0 | 0 | 0 | 0 | 0 | 100 | 0 |
| TRACH3020769 | 0 | 0 | 0 | 0 | 0 | 100 | 0 |
| TRACH3020928 | 0 | 0 | 0 | 0 | 0 | 100 | 0 |
| TRACH3020930 | 0 | 0 | 0 | 0 | 0 | 100 | 0 |
| TRACH3021023 | 0 | 0 | 0 | 0 | 0 | 100 | 0 |
| TRACH3021066 | 0 | 0 | 0 | 0 | 0 | 100 | 0 |
| TRACH3021212 | 0 | 0 | 0 | 0 | 0 | 100 | 0 |
| TRACH3021335 | 0 | 0 | 0 | 0 | 0 | 100 | 0 |
| TRACH3021373 | 0 | 0 | 0 | 0 | 0 | 100 | 0 |
| TRACH3021544 | 0 | 0 | 0 | 0 | 0 | 47.415 | 0 |
| TRACH3021778 | 0 | 0 | 0 | 0 | 0 | 100 | 0 |
| TRACH3021834 | 0 | 0 | 0 | 0 | 0 | 100 | 0 |
| TRACH3021883 | 0 | 0 | 0 | 0 | 0 | 100 | 0 |
| TRACH3022170 | 0 | 0 | 0 | 0 | 0 | 100 | 0 |
| TRACH3022198 | 20.791 | 0 | 0 | 0 | 0 | 9.310 | 0 |
| TRACH3022296 | 0 | 0 | 0 | 0 | 0 | 100 | 0 |
| TRACH3022482 | 0 | 0 | 0 | 0 | 0 | 100 | 0 |
| TRACH3022732 | 0 | 0 | 0 | 0 | 0 | 100 | 0 |
| TRACH3022758 | 0 | 0 | 0 | 0 | 0 | 100 | 0 |
| TRACH3022875 | 0 | 0 | 0 | 0 | 0 | 100 | 0 |
| TRACH3022910 | 0 | 0 | 0 | 0 | 0 | 100 | 0 |
| TRACH3022960 | 0 | 0 | 0 | 0 | 0 | 100 | 0 |
| TRACH3023063 | 0 | 0 | 0 | 0 | 0 | 100 | 0 |
| TRACH3023203 | 0 | 0 | 0 | 0 | 0 | 100 | 0 |
| TRACH3023242 | 0 | 0 | 0 | 0 | 0 | 100 | 0 |
| TRACH3023373 | 0 | 0 | 0 | 0 | 0 | 100 | 0 |
| TRACH3023516 | 0 | 0 | 0 | 0 | 0 | 100 | 0 |
| TRACH3023752 | 0 | 0 | 0 | 0 | 0 | 100 | 0 |
| TRACH3023945 | 0 | 0 | 0 | 0 | 0 | 100 | 0 |
| TRACH3023960 | 0 | 0 | 0 | 0 | 0 | 100 | 0 |
| TRACH3024020 | 0 | 0 | 0 | 0 | 0 | 100 | 0 |
| TRACH3024081 | 0 | 0 | 0 | 0 | 0 | 100 | 0 |
| TRACH3024342 | 0 | 0 | 0 | 0 | 0 | 52.833 | 0 |
| TRACH3024423 | 0 | 0 | 0 | 0 | 0 | 100 | 0 |
| TRACH3024428 | 0 | 0 | 0 | 0 | 0 | 100 | 0 |
| TRACH3024512 | 0 | 0 | 0 | 0 | 0 | 100 | 0 |
| TRACH3024671 | 0 | 0 | 0 | 0 | 0 | 52.833 | 0 |
| TRACH3024823 | 0 | 0 | 0 | 0 | 0 | 100 | 0 |
| TRACH3025302 | 0 | 0 | 0 | 0 | 0 | 100 | 0 |
| TRACH3025316 | 0 | 0 | 0 | 0 | 0 | 68.709 | 0 |
| TRACH3025346 | 0 | 0 | 0 | 0 | 0 | 100 | 0 |
| TRACH3025520 | 0 | 0 | 0 | 0 | 0 | 100 | 0 |
| TRACH3026148 | 0 | 0 | 0 | 0 | 0 | 100 | 0 |
| TRACH3026283 | 0 | 0 | 0 | 0 | 0 | 100 | 0 |
| TRACH3026299 | 0 | 0 | 0 | 0 | 0 | 100 | 0 |
| TRACH3026303 | 0 | 0 | 0 | 0 | 0 | 31.391 | 0 |
| TRACH3026542 | 0 | 0 | 0 | 0 | 0 | 100 | 0 |
| TRACH3026650 | 0 | 0 | 0 | 0 | 0 | 100 | 0 |
| TRACH3026676 | 9.699 | 0 | 0 | 0 | 0 | 39.086 | 0 |
| TRACH3026744 | 0 | 0 | 0 | 0 | 0 | 100 | 0 |
| TRACH3026949 | 0 | 0 | 0 | 0 | 0 | 100 | 0 |
| TRACH3027229 | 0 | 0 | 0 | 0 | 0 | 6.069 | 0 |
| TRACH3027527 | 0 | 0 | 0 | 0 | 0 | 100 | 0 |
| TRACH3027681 | 0 | 0 | 0 | 0 | 0 | 100 | 0 |
| TRACH3027701 | 0 | 0 | 0 | 0 | 0 | 100 | 0 |
| TRACH3027885 | 0 | 0 | 0 | 0 | 0 | 100 | 0 |
| TRACH3028031 | 0 | 0 | 0 | 0 | 0 | 100 | 0 |
| TRACH3028164 | 0 | 0 | 0 | 0 | 0 | 100 | 0 |
| TRACH3028180 | 0 | 0 | 0 | 0 | 0 | 100 | 0 |
| TRACH3028195 | 0 | 0 | 0 | 0 | 0 | 100 | 0 |
| TRACH3028441 | 0 | 0 | 0 | 0 | 0 | 100 | 0 |
| TRACH3028597 | 0 | 0 | 0 | 0 | 0 | 100 | 0 |
| TRACH3028678 | 0 | 0 | 0 | 0 | 0 | 100 | 0 |
| TRACH3028837 | 0 | 0 | 0 | 0 | 0 | 100 | 0 |
| TRACH3028847 | 0 | 0 | 0 | 0 | 0 | 100 | 0 |
| TRACH3028855 | 0 | 0 | 0 | 0 | 0 | 49.978 | 0 |
| TRACH3029139 | 0 | 0 | 0 | 0 | 0 | 100 | 0 |
| TRACH3029329 | 0 | 0 | 0 | 0 | 0 | 100 | 0 |
| TRACH3029451 | 0 | 0 | 0 | 0 | 0 | 100 | 0 |
| TRACH3029462 | 0 | 0 | 0 | 0 | 0 | 100 | 0 |
| TRACH3029520 | 0 | 0 | 0 | 0 | 0 | 100 | 0 |
| TRACH3029592 | 0 | 0 | 0 | 0 | 0 | 100 | 0 |
| TRACH3029629 | 0 | 0 | 0 | 0 | 0 | 100 | 0 |
| TRACH3029665 | 0 | 0 | 0 | 0 | 0 | 100 | 0 |
| TRACH3029670 | 0 | 0 | 0 | 0 | 0 | 100 | 0 |
| TRACH3029800 | 0 | 0 | 0 | 0 | 0 | 100 | 0 |
| TRACH3030111 | 0 | 0 | 0 | 0 | 0 | 100 | 0 |
| TRACH3030130 | 0 | 0 | 0 | 0 | 0 | 100 | 0 |
| TRACH3030176 | 0 | 0 | 0 | 0 | 0 | 100 | 0 |
| TRACH3030252 | 0 | 0 | 0 | 0 | 0 | 100 | 0 |
| TRACH3030725 | 0 | 0 | 0 | 0 | 0 | 100 | 0 |
| TRACH3030855 | 0 | 0 | 0 | 0 | 0 | 100 | 0 |
| TRACH3030883 | 0 | 0 | 0 | 0 | 0 | 100 | 0 |
| TRACH3031316 | 0 | 0 | 0 | 0 | 0 | 100 | 0 |
| TRACH3031400 | 0 | 0 | 0 | 0 | 0 | 100 | 0 |
| TRACH3031463 | 0 | 0 | 0 | 0 | 0 | 100 | 0 |
| TRACH3031479 | 0 | 0 | 0 | 0 | 0 | 100 | 0 |
| TRACH3031518 | 0 | 0 | 0 | 0 | 0 | 100 | 0 |
| TRACH3031660 | 0 | 0 | 0 | 0 | 0 | 100 | 0 |
| TRACH3031678 | 0 | 0 | 0 | 0 | 0 | 100 | 0 |
| TRACH3031936 | 0 | 0 | 0 | 0 | 0 | 100 | 0 |
| TRACH3032044 | 0 | 0 | 0 | 0 | 0 | 100 | 0 |
| TRACH3032065 | 0 | 0 | 0 | 0 | 0 | 100 | 0 |
| TRACH3032150 | 0 | 0 | 0 | 0 | 0 | 100 | 0 |
| TRACH3032372 | 0 | 0 | 0 | 0 | 0 | 100 | 0 |
| TRACH3032480 | 0 | 0 | 0 | 0 | 0 | 100 | 0 |
| TRACH3032570 | 0 | 0 | 0 | 0 | 0 | 52.833 | 0 |
| TRACH3032755 | 0 | 0 | 0 | 0 | 0 | 100 | 0 |
| TRACH3032827 | 0 | 0 | 0 | 0 | 0 | 100 | 0 |
| TRACH3032873 | 0 | 0 | 0 | 0 | 0 | 100 | 0 |
| TRACH3033535 | 0 | 0 | 0 | 0 | 0 | 100 | 0 |
| TRACH3033680 | 0 | 0 | 0 | 0 | 0 | 100 | 0 |
| TRACH3033868 | 0 | 0 | 0 | 0 | 0 | 100 | 0 |
| TRACH3034145 | 0 | 0 | 0 | 0 | 0 | 100 | 0 |
| TRACH3034414 | 0 | 0 | 0 | 0 | 0 | 100 | 0 |
| TRACH3034488 | 0 | 0 | 0 | 0 | 0 | 100 | 0 |
| TRACH3034680 | 0 | 0 | 0 | 0 | 0 | 100 | 0 |
| TRACH3034731 | 0 | 0 | 0 | 0 | 0 | 100 | 0 |
| TRACH3034745 | 0 | 0 | 0 | 0 | 0 | 100 | 0 |
| TRACH3034762 | 0 | 0 | 0 | 0 | 0 | 100 | 0 |
| TRACH3034903 | 0 | 0 | 0 | 0 | 0 | 100 | 0 |
| TRACH3035187 | 0 | 0 | 0 | 0 | 0 | 100 | 0 |
| TRACH3035199 | 0 | 0 | 0 | 0 | 0 | 100 | 0 |
| TRACH3035235 | 0 | 0 | 0 | 0 | 0 | 100 | 0 |
| TRACH3035451 | 0 | 0 | 0 | 0 | 0 | 100 | 0 |
| TRACH3035482 | 0 | 0 | 0 | 0 | 0 | 100 | 0 |
| TRACH3035526 | 0 | 0 | 0 | 0 | 0 | 100 | 0 |
| TRACH3036004 | 0 | 0 | 0 | 0 | 0 | 100 | 0 |
| TRACH3036103 | 0 | 0 | 0 | 0 | 0 | 100 | 0 |
| TRACH3036193 | 0 | 0 | 0 | 0 | 0 | 100 | 0 |
| TRACH3036207 | 0 | 0 | 0 | 0 | 0 | 100 | 0 |
| TRACH3036278 | 0 | 0 | 0 | 0 | 0 | 100 | 0 |
| TRACH3036309 | 0 | 0 | 0 | 0 | 0 | 100 | 0 |
| TRACH3036456 | 0 | 0 | 0 | 0 | 0 | 100 | 0 |
| TRACH3036609 | 0 | 0 | 0 | 0 | 0 | 100 | 0 |
| TRACH3036638 | 0 | 0 | 0 | 0 | 0 | 100 | 0 |
| TRACH3036683 | 0 | 0 | 0 | 0 | 0 | 100 | 0 |
| TRACH3036750 | 0 | 0 | 0 | 0 | 0 | 100 | 0 |
| TRACH3036792 | 0 | 0 | 0 | 0 | 0 | 100 | 0 |
| TRACH3036843 | 0 | 0 | 0 | 0 | 0 | 100 | 0 |
| TRACH3036897 | 0 | 0 | 0 | 0 | 0 | 100 | 0 |
| TRACH3036932 | 0 | 0 | 0 | 0 | 0 | 16.420 | 0 |
| TRACH3036942 | 0 | 0 | 0 | 0 | 0 | 0.273 | 0 |
| TRACH3036997 | 0 | 0 | 0 | 0 | 0 | 100 | 0 |
| TRACH3037063 | 0 | 0 | 0 | 0 | 0 | 100 | 0 |
| TRACH3037067 | 1.340 | 0 | 0 | 0 | 0 | 3.601 | 0 |
| TRACH3037267 | 0 | 0 | 0 | 0 | 0 | 100 | 0 |
| TRACH3037288 | 0 | 0 | 0 | 0 | 0 | 100 | 0 |
| TRACH3037505 | 0 | 0 | 0 | 0 | 0 | 100 | 0 |
| TRACH3037573 | 0 | 0 | 0 | 0 | 0 | 100 | 0 |
| TRACH3037696 | 0 | 0 | 0 | 0 | 0 | 100 | 0 |
| TRACH3037897 | 0 | 0 | 0 | 0 | 0 | 100 | 0 |
| TRACH3038086 | 0 | 0 | 0 | 0 | 0 | 100 | 0 |
| TRACH3038399 | 0 | 0 | 0 | 0 | 0 | 41.787 | 0 |
| TSTOM1000135 | 0 | 0 | 0 | 0 | 0 | 0 | 90.639 |
| TSTOM1000186 | 0 | 0 | 0 | 0 | 0 | 0 | 100 |
| TSTOM2000139 | 0 | 0 | 0 | 0 | 0 | 0 | 89.823 |
| TSTOM2000235 | 0 | 0 | 0 | 0 | 0 | 0 | 95.465 |
| TSTOM2000315 | 0 | 0 | 0 | 0 | 0 | 0 | 48.943 |
| TSTOM2000442 | 0 | 0 | 0 | 0 | 0 | 0 | 100 |
| TSTOM2000553 | 0 | 0 | 0 | 0 | 0 | 24.547 | 36.203 |
| TSTOM2000569 | 0 | 0 | 0 | 0 | 0 | 0 | 100 |
| TSTOM2000588 | 0 | 0 | 0 | 0 | 0 | 0 | 100 |
| TSTOM2001195 | 0 | 0 | 0 | 0 | 0 | 0 | 100 |
| TSTOM2001274 | 0 | 0 | 0 | 0 | 0 | 0 | 100 |
| TSTOM2001571 | 0 | 0 | 0 | 0 | 0 | 0 | 100 |
| TSTOM2001996 | 0 | 0 | 0 | 0 | 0 | 0 | 100 |
| TSTOM2002265 | 0 | 0 | 0 | 0 | 0 | 0 | 100 |
| TSTOM2002505 | 0 | 0 | 0 | 0 | 0 | 0 | 100 |
| TSTOM2002561 | 0 | 0 | 0 | 0 | 0 | 0 | 100 |
| TSTOM2002611 | 0 | 0 | 0 | 0 | 0 | 0 | 100 |
| TSTOM2002672 | 0 | 0 | 0 | 0 | 0 | 0 | 100 |
| TSTOM2002682 | 0 | 0 | 0 | 0 | 0 | 0 | 100 |
| TUTER1000122 | 2.722 | 0 | 0 | 0 | 0 | 10.968 | 0 |
| TUTER2000904 | 0 | 0 | 0 | 0 | 0 | 3.127 | 0 |
| TUTER2002323 | 2.716 | 0 | 22.391 | 0 | 0 | 0 | 0 |
| UMVEN1000143 | 0 | 0 | 0 | 0 | 17.888 | 0 | 0 |
| UMVEN2000121 | 0 | 0 | 0 | 0 | 0 | 1.161 | 0 |
| UMVEN2000133 | 0.977 | 0 | 0 | 0 | 0 | 0.657 | 0 |
| UMVEN2000152 | 1.314 | 0 | 0 | 0 | 0 | 0 | 0 |
| UMVEN2000354 | 0 | 3.049 | 0 | 0 | 0 | 0 | 0 |
| UMVEN2000453 | 8.708 | 0 | 0 | 0 | 0 | 0 | 0 |
| UTERU1000008 | 41.147 | 0 | 0 | 0 | 0 | 0 | 0 |
| UTERU1000106 | 4.805 | 0 | 39.618 | 0 | 0 | 0 | 0 |
| UTERU1000182 | 0.676 | 0 | 0 | 0 | 0 | 1.817 | 0 |
| UTERU1000384 | 0 | 0 | 0 | 0 | 0 | 15.967 | 0 |
| UTERU2000095 | 0.690 | 1.532 | 0 | 0 | 0 | 1.854 | 0 |
| UTERU2000260 | 52.081 | 0 | 0 | 0 | 0 | 0 | 0 |
| UTERU2000263 | 0 | 0 | 0 | 0 | 0 | 1.722 | 11.004 |
| UTERU2000424 | 1.416 | 3.144 | 0 | 0 | 18.499 | 0 | 0 |
| UTERU2000537 | 4.278 | 0 | 0 | 0 | 0 | 0 | 0 |
| UTERU2001607 | 1.230 | 0 | 0 | 0 | 0 | 6.609 | 0 |
| UTERU2002294 | 0 | 0 | 12.480 | 0 | 0 | 0 | 0 |
| UTERU2002410 | 0.979 | 2.173 | 4.037 | 0 | 0 | 1.315 | 0 |
| UTERU2002662 | 1.484 | 0 | 0 | 0 | 0 | 1.993 | 0 |
| UTERU2003704 | 0 | 0 | 0 | 0 | 0 | 19.280 | 0 |
| UTERU2004037 | 0 | 0 | 0 | 0 | 0 | 2.456 | 0 |
| UTERU2004197 | 3.353 | 0 | 0 | 0 | 0 | 0 | 0 |
| UTERU2004807 | 2.513 | 0 | 0 | 0 | 0 | 3.376 | 0 |
| UTERU2004861 | 19.728 | 0 | 0 | 0 | 0 | 0 | 0 |
| UTERU2005004 | 58.303 | 0 | 0 | 0 | 0 | 0 | 0 |
| UTERU2005074 | 28.406 | 0 | 0 | 0 | 0 | 0 | 0 |
| UTERU2005292 | 2.596 | 0 | 0 | 0 | 0 | 0 | 0 |
| UTERU2005354 | 5.472 | 8.097 | 0 | 0 | 0 | 0 | 0 |
| UTERU2005449 | 27.302 | 0 | 0 | 0 | 0 | 36.676 | 0 |
| UTERU2005593 | 0.936 | 12.464 | 15.433 | 0 | 0 | 7.543 | 0 |
| UTERU2005601 | 0 | 0 | 0 | 0 | 0 | 88.511 | 0 |
| UTERU2005621 | 1.880 | 0 | 0 | 0 | 0 | 2.525 | 0 |
| UTERU2006115 | 6.535 | 0 | 0 | 0 | 0 | 0 | 0 |
| UTERU2006593 | 0 | 0 | 10.151 | 0 | 0 | 28.116 | 0 |
| UTERU2008085 | 0.527 | 1.003 | 0 | 0 | 1.967 | 0.101 | 1.939 |
| UTERU2008302 | 1.114 | 0 | 0 | 0 | 0 | 1.496 | 0 |
| UTERU2008426 | 0 | 0 | 0 | 0 | 0 | 49.324 | 0 |
| UTERU2009335 | 0 | 0 | 0 | 0 | 0 | 3.397 | 0 |
| UTERU2009435 | 4.459 | 0 | 0 | 0 | 0 | 11.980 | 0 |
| UTERU2009972 | 2.954 | 0 | 0 | 0 | 0 | 7.937 | 0 |
| UTERU2010226 | 19.733 | 0 | 0 | 0 | 0 | 8.836 | 0 |
| UTERU2010417 | 0.263 | 0 | 0 | 0 | 0 | 2.825 | 6.771 |
| UTERU2011220 | 1.632 | 0 | 0 | 0 | 0 | 0 | 0 |
| UTERU2011287 | 27.368 | 0 | 0 | 0 | 0 | 0 | 0 |
| UTERU2011621 | 16.560 | 0 | 0 | 0 | 0 | 0 | 0 |
| UTERU2011741 | 9.823 | 0 | 0 | 0 | 0 | 0 | 0 |
| UTERU2011906 | 11.373 | 0 | 0 | 0 | 0 | 15.277 | 0 |
| UTERU2012230 | 0 | 0 | 0 | 0 | 0 | 1.971 | 0 |
| UTERU2012286 | 2.113 | 0 | 0 | 0 | 0 | 2.838 | 0 |
| UTERU2012688 | 0 | 0 | 0 | 0 | 0 | 48.432 | 0 |
| UTERU2012741 | 15.010 | 0 | 0 | 0 | 0 | 0 | 0 |
| UTERU2012767 | 0 | 0 | 36.610 | 0 | 0 | 5.965 | 0 |
| UTERU2015653 | 0 | 0 | 0 | 0 | 0 | 1.307 | 0 |
| UTERU2015830 | 41.147 | 0 | 0 | 0 | 0 | 0 | 0 |
| UTERU2016799 | 0 | 0 | 0 | 0 | 0 | 13.028 | 0 |
| UTERU2016822 | 0 | 0 | 0 | 0 | 0 | 15.760 | 0 |
| UTERU2018884 | 1.292 | 0 | 0 | 0 | 0 | 3.471 | 0 |
| UTERU2019005 | 0 | 0 | 0 | 0 | 0 | 7.234 | 0 |
| UTERU2019096 | 3.842 | 0 | 0 | 0 | 0 | 2.580 | 0 |
| UTERU2023175 | 2.483 | 0 | 0 | 0 | 0 | 0 | 0 |
| UTERU2023550 | 0 | 31.001 | 0 | 0 | 0 | 0 | 0 |
| UTERU2023651 | 41.897 | 0 | 0 | 0 | 0 | 28.140 | 0 |
| UTERU2024656 | 0 | 0 | 0 | 0 | 0 | 48.432 | 0 |
| UTERU2024969 | 13.389 | 0 | 0 | 0 | 0 | 3.597 | 0 |
| UTERU2028734 | 0 | 0 | 0 | 0 | 0 | 24.591 | 0 |
| UTERU2031084 | 36.254 | 0 | 0 | 0 | 0 | 0 | 0 |
| UTERU2034147 | 41.147 | 0 | 0 | 0 | 0 | 0 | 0 |
| UTERU2035114 | 0 | 0 | 0 | 0 | 0 | 48.432 | 0 |
| UTERU2036347 | 26.499 | 0 | 0 | 0 | 0 | 35.597 | 0 |
| UTERU3000298 | 3.858 | 0 | 0 | 0 | 0 | 20.730 | 0 |
| UTERU3000645 | 0 | 0 | 0 | 0 | 0 | 65.258 | 0 |
| UTERU3000738 | 58.303 | 0 | 0 | 0 | 0 | 0 | 0 |
| UTERU3001542 | 41.147 | 0 | 0 | 0 | 0 | 0 | 0 |
| UTERU3002218 | 0 | 0 | 0 | 0 | 0 | 48.432 | 0 |
| UTERU3002786 | 0 | 0 | 0 | 0 | 0 | 48.432 | 0 |
| UTERU3003135 | 27.368 | 0 | 0 | 0 | 0 | 0 | 0 |
| UTERU3003660 | 0 | 0 | 0 | 0 | 0 | 8.247 | 0 |
| UTERU3005049 | 41.147 | 0 | 0 | 0 | 0 | 0 | 0 |
| UTERU3005422 | 53.061 | 0 | 0 | 0 | 0 | 0 | 0 |
| UTERU3007021 | 0 | 0 | 0 | 0 | 0 | 65.258 | 0 |
| UTERU3007104 | 0 | 0 | 0 | 0 | 0 | 48.432 | 0 |
| UTERU3010409 | 0 | 0 | 0 | 0 | 0 | 7.754 | 0 |
| UTERU3011579 | 0 | 0 | 0 | 0 | 0 | 65.258 | 0 |
| UTERU3013302 | 41.147 | 0 | 0 | 0 | 0 | 0 | 0 |
| UTERU3018172 | 26.594 | 0 | 0 | 0 | 0 | 0 | 0 |
| UTERU3018711 | 0 | 0 | 0 | 0 | 0 | 13.534 | 0 |

[3182] Genes whose expression levels were negligibly low in each of the above-described libraries are shown with their clone names below.

[3183] 3NB691000018, 3NB691000085, 3NB691000113, 3NB691000129, 3NB691000191, 3NB692000012, 3NB692000029, 3NB692000102, 3NB692000154, 3NB692000276, 3NB692000305, 3NB692000429, 3NB692000484, 3NB692000529, 3NB692000973, 3NB692001002, 3NB692001034, 3NB692001040, 3NB692001123, 3NB692001267, 3NB692001339, 3NB692001349, 3NB692001366, 3NB692001408, 3NB692001433, 3NB692001459, 3NB692001471, 3NB692001496, 3NB692001501, 3NB692001507, 3NB692001511, 3NB692001519, 3NB692001528, 3NB692001548, 3NB692001557, 3NB692001637, 3NB692001719, 3NB692001861, 3NB692002365, 3NB692002685, 3NB692002806, 3NB692003538, 3NB692004045, 3NB692004724, 3NB692005439, 3NB692006952, 3NB692008178, 3NB692008729, ACTVT2000380, ADIPS1000064,

[3184] ADIPS2000069, ADIPS2000088, ADIPS2000245, ADIPS2000425, ADRGL1000033, ADRGL1000038, ADRGL1000065, ADRGL1000067, ADRGL1000144, ADRGL1000147, ADRGL1000160, ADRGL1000165, ADRGL1000182, ADRGL2000006, ADRGL2000042, ADRGL2000064, ADRGL2000074, ADRGL2000085, ADRGL2000117, ADRGL2000142, ADRGL2000172, ADRGL2000248, ADRGL2000261, ADRGL2000323, ADRGL2000328, ADRGL2000353, ADRGL2000384, ADRGL2000428, ADRGL2000636, ADRGL2000644, ADRGL2000968, ADRGL2001119, ADRGL2001229, ADRGL2001287, ADRGL2001301, ADRGL2001354, ADRGL2001554, ADRGL2001651, ADRGL2001756, ADRGL2001830, ADRGL2001836, ADRGL2001854, ADRGL2002013, ADRGL2002029, ADRGL2002191, ADRGL2002392, ADRGL2002679, ADRGL2002753, ADRGL2002857, ADRGL2003017,

[3185] ADRGL2003329, ADRGL2003552, ADRGL2003585, ADRGL2003638, ADRGL2003684, ADRGL2003773, ADRGL2003785, ADRGL2004031, ADRGL2004077, ADRGL2004451, ADRGL2004459, ADRGL2004708, ADRGL2004724, ADRGL2004749, ADRGL2004770, ADRGL2004777, ADRGL2004833, ADRGL2005336, ADRGL2005564, ADRGL2005756, ADRGL2005838, ADRGL2005926, ADRGL2005961, ADRGL2006034, ADRGL2006124, ADRGL2006177, ADRGL2006193, ADRGL2006377, ADRGL2006677, ADRGL2006732, ADRGL2006767, ADRGL2006817, ADRGL2006846, ADRGL2006886, ADRGL2007080, ADRGL2007125, ADRGL2007283, ADRGL2007357, ADRGL2007636, ADRGL2007651, ADRGL2007810, ADRGL2007877, ADRGL2007906, ADRGL2007974, ADRGL2008023, ADRGL2008331, ADRGL2008337, ADRGL2008966, ADRGL2009146, ADRGL2009324,

[3186] ADRGL2009489, ADRGL2009533, ADRGL2009691, ADRGL2009755, ADRGL2010152, ADRGL2010315, ADRGL2010594, ADRGL2010860, ADRGL2010974, ADRGL2011190, ADRGL2012179, AHMSC1000138, ASTRO1000009, ASTRO1000018, ASTRO1000029, ASTRO1000096, ASTRO1000165, ASTRO2000011, ASTRO2000014, ASTRO2000095, ASTRO2000191, ASTRO2000372, ASTRO2000381, ASTRO2000403, ASTRO2000417, ASTRO2000482, ASTRO2000533, ASTRO2000653, ASTRO2000662, ASTRO2000725, ASTRO2001001, ASTRO2001008, ASTRO2001088, ASTRO2001107, ASTRO2001122, ASTRO2001227, ASTRO2001249, ASTRO2001480, ASTRO2002035, ASTRO2002459, ASTRO2002571, ASTRO2002632, ASTRO2002659, ASTRO2002693, ASTRO2002720, ASTRO2002733, ASTRO2002743, ASTRO2002842, ASTRO2003212, ASTRO2003574,

[3187] ASTRO2003581, ASTRO2003740, ASTRO2003925, ASTRO2003960, ASTRO2004032, ASTRO2004051, ASTRO2004177, ASTRO2004217, ASTRO2004297, ASTRO2004584, ASTRO2004751, ASTRO2004877, ASTRO2005008, ASTRO2005081, ASTRO2005096, ASTRO2005242, ASTRO2005273, ASTRO2005343, ASTRO2005413, ASTRO2005553, ASTRO2005557, ASTRO2005575, ASTRO2005726, ASTRO2005863, ASTRO2005896, ASTRO2005902, ASTRO2006356, ASTRO2006475, ASTRO2006732, ASTRO2006747, ASTRO2006952, ASTRO2007221, ASTRO2007377, ASTRO2007515, ASTRO2007578, ASTRO2007643, ASTRO2007666, ASTRO2007956, ASTRO2007962, ASTRO2008040, ASTRO2008239, ASTRO2008409, ASTRO2008425, ASTRO2008508, ASTRO2008777, ASTRO2008895, ASTRO2008960, ASTRO2008972, ASTRO2009177, ASTRO2009333,

[3188] ASTRO2009458, ASTRO2009526, ASTRO2009879, ASTRO2010072, ASTRO2010615, ASTRO2010799, ASTRO2010962, ASTRO2010996, ASTRO2011149, ASTRO2011422, ASTRO2011426, ASTRO2011437, ASTRO2011461, ASTRO2011834, ASTRO2011893, ASTRO2013124, ASTRO2013802, ASTRO2014174, ASTRO2014211, ASTRO2014363, ASTRO2014392, ASTRO2014498, ASTRO2014576, ASTRO2014923, ASTRO2014961, ASTRO2015162, ASTRO2015185, ASTRO2015328, ASTRO2015987, ASTRO2016044, ASTRO2016114, ASTRO2016148, ASTRO2016681, ASTRO2016819, ASTRO2016847, ASTRO2016892, ASTRO2017348, ASTRO2017627, ASTRO2018540, ASTRO2019039, ASTRO2019171, ASTRO3000154, ASTRO3000172, ASTRO3000177, ASTRO3000301, ASTRO3000474, ASTRO3000482, BEAST2000454, BGGI11000193, BGGI11000285,

[3189] BGGI12000022, BGGI12000067, BGGI12000161, BGGI12000544, BGGI12000616, BGGI12000684, BGGI12000693, BGGI12001097, BGGI12001241, BGGI12001247, BGGI12001714, BLADE1000176, BLADE2000181, BLADE2000256, BLADE2000340, BLADE2000389, BLADE2000463, BLADE2000579, BLADE2000640, BLADE2000866, BLADE2000938, BLADE2001031, BLADE2001133, BLADE2001138, BLADE2001141, BLADE2001371, BLADE2001458, BLADE2001575, BLADE2001753, BLADE2001935, BLADE2001940, BLADE2001987, BLADE2002073, BLADE2002310, BLADE2002730, BLADE2002738, BLADE2002744, BLADE2002782, BLADE2002947, BLADE2002972, BLADE2003474, BLADE2003916, BLADE2004345, BLADE2004389, BLADE2004462, BLADE2004628, BLADE2004670, BLADE2004722, BLADE2004849, BLADE2005036,

[3190] BLADE2005038, BLADE2005229, BLADE200545-9, BLADE2005792, BLADE2006043, BLADE2006415, BLADE2006607, BLADE2006826, BLADE2006849, BLADE2006947, BLADE2007033, BLADE2007043, BLADE2007722, BLADE2007735, BLADE2007744, BLADE2007799, BLADE2007923, BLADE2007935, BLADE2007958, BLADE2008281, BLADE2008454, BLADE2008479, BLADE2008539, BLADE2008809, BLADE2008995, BLADE2009452, BLADE2009479, BLADE2009593, BNGH41000104, BNGH41000118, BNGH41000169, BNGH41000177, BNGH41000198, BNGH41000216, BNGH42000130, BNGH42000132, BNGH42000405, BNGH42000532, BNGH42000675, BNGH42000791, BNGH42000815, BNGH42000994, BNGH42001247, BNGH42001406, BNGH42001576, BNGH42001724, BNGH42002244, BNGH42002387, BNGH42002487, BNGH42002489,

[3191] BNGH42003529, BNGH42003570, BNGH42003641, BNGH42004076, BNGH42004291, BNGH42004538, BNGH42004679, BNGH42005017, BNGH42005235, BNGH42005504, BNGH42006226, BNGH42006234, BNGH42007037, BNGH42007594, BNGH42007798, BNGH42008199, BNGH42008510, BNGH42008649, BNGH42008832, BNGH42008850, BNGH42008943, BNGH42009021, BNGH42009025, BRACE1000047, BRACE1000051, BRACE1000065, BRACE1000084, BRACE1000087, BRACE1000092, BRACE1000093, BRACE1000101, BRACE1000114, BRACE1000124, BRACE1000132, BRACE1000169, BRACE1000187, BRACE1000239, BRACE1000258, BRACE1000451, BRACE1000475, BRACE1000572, BRACE2000077, BRACE2000078, BRACE2000100, BRACE2000109, BRACE2000141, BRACE2000148, BRACE2000183, BRACE2000229, BRACE2000232,

[3192] BRACE2000256, BRACE2000266, BRACE2000267, BRACE2000280, BRACE2000307, BRACE2000331, BRACE2000351, BRACE2000368, BRACE2000392, BRACE2000441, BRACE2000489, BRACE2000505, BRACE2000526, BRACE2000531, BRACE2000545, BRACE2000553, BRACE2000577, BRACE2000640, BRACE2000650, BRACE2000677, BRACE2000698, BRACE2000718, BRACE2000733, BRACE2000743, BRACE2000750, BRACE2000815, BRACE2000885, BRACE2000905, BRACE2000936, BRACE2000947, BRACE2000965, BRACE2000969, BRACE2000988, BRACE2001017, BRACE2001070, BRACE2001094, BRACE2001107, BRACE2001151, BRACE2001191, BRACE2001197, BRACE2001236, BRACE2001239, BRACE2001269, BRACE2001312, BRACE2001330, BRACE2001340, BRACE2001352, BRACE2001353, BRACE2001374, BRACE2001375,

[3193] BRACE2001423, BRACE2001424, BRACE2001445, BRACE2001453, BRACE2001455, BRACE2001492, BRACE2001508, BRACE2001534, BRACE2001543, BRACE2001564, BRACE2001588, BRACE2001607, BRACE2001626, BRACE2001677, BRACE2001705, BRACE2001726, BRACE2001733, BRACE2001737, BRACE2001742, BRACE2001777, BRACE2001779, BRACE2001859, BRACE2001865, BRACE2001872, BRACE2001881, BRACE2001898, BRACE2001923, BRACE2001954, BRACE2001972, BRACE2001973, BRACE2002026, BRACE2002034, BRACE2002139, BRACE2002142, BRACE2002151, BRACE2002157, BRACE2002176, BRACE2002202, BRACE2002206, BRACE2002227, BRACE2002260, BRACE2002297, BRACE2002304, BRACE2002356, BRACE2002394, BRACE2002409, BRACE2002431, BRACE2002441, BRACE2002444, BRACE2002458,

[3194] BRACE2002467, BRACE2002468, BRACE2002478, BRACE2002495, BRACE2002582, BRACE2002585, BRACE2002589, BRACE2002590, BRACE2002606, BRACE2002613, BRACE2002614, BRACE2002617, BRACE2002623, BRACE2002635, BRACE2002676, BRACE2002682, BRACE2002695, BRACE2002707, BRACE2002736, BRACE2002752, BRACE2002762, BRACE2002772, BRACE2002792, BRACE2002796, BRACE2002803, BRACE2002807, BRACE2002834, BRACE2002849, BRACE2002857, BRACE2002861, BRACE2002884, BRACE2002896, BRACE2002948, BRACE2003078, BRACE2003097, BRACE2003110, BRACE2003168, BRACE2003199, BRACE2003210, BRACE2003217, BRACE2003269, BRACE2003285, BRACE2003319, BRACE2003398, BRACE2003420, BRACE2003428, BRACE2003431, BRACE2003512, BRACE2003516, BRACE2003539,

[3195] BRACE2003540, BRACE2003598, BRACE2003609, BRACE2003614, BRACE2003639, BRACE2003700, BRACE2003713, BRACE2003766, BRACE2003802, BRACE2003825, BRACE2003847, BRACE2003873, BRACE2003885, BRACE2003887, BRACE2003904, BRACE2003905, BRACE2003928, BRACE2003954, BRACE2003987, BRACE2005034, BRACE2005047, BRACE2005063, BRACE2005083, BRACE2005090, BRACE2005118, BRACE2005124, BRACE2005138, BRACE2005151, BRACE2005160, BRACE2005169, BRACE2005189, BRACE2005193, BRACE2005196, BRACE2005198, BRACE2005216, BRACE2005243, BRACE2005251, BRACE2005253, BRACE2005290, BRACE2005328, BRACE2005329, BRACE2005337, BRACE2005348, BRACE2005363, BRACE2005434, BRACE2005448, BRACE2005450, BRACE2005453, BRACE2005457, BRACE2005460,

[3196] BRACE2005489, BRACE2005518, BRACE2005556, BRACE2005562, BRACE2005624, BRACE2005642, BRACE2005661, BRACE2005667, BRACE2005681, BRACE2005719, BRACE2005731, BRACE2005742, BRACE2005762, BRACE2005773, BRACE2005787, BRACE2005795, BRACE2005800, BRACE2005858, BRACE2005869, BRACE2005875, BRACE2005881, BRACE2005898, BRACE2005904, BRACE2005906, BRACE2005907, BRACE2005911, BRACE2005937, BRACE2005949, BRACE2005981, BRACE2005991, BRACE2006072, BRACE2006075, BRACE2006089, BRACE2006122, BRACE2006137, BRACE2006143, BRACE2006167, BRACE2006174, BRACE2006240, BRACE2006245, BRACE2006274, BRACE2006281, BRACE2006298, BRACE2006344, BRACE2006354, BRACE2006380, BRACE2006393, BRACE2006413, BRACE2006417, BRACE2006453,

[3197] BRACE2006459, BRACE2006488, BRACE2006534, BRACE2006540, BRACE2006587, BRACE2006598, BRACE2006636, BRACE2006685, BRACE2006703, BRACE2006743, BRACE2006783, BRACE2006821, BRACE2006833, BRACE2006859, BRACE2006909, BRACE2006911, BRACE2006924, BRACE2006935, BRACE2006944, BRACE2006951, BRACE2006986, BRACE2007013, BRACE2007087, BRACE2007138, BRACE2007197, BRACE2007201, BRACE2007203, BRACE2007232, BRACE2007262, BRACE2007274, BRACE2007281, BRACE2007295, BRACE2007358, BRACE2007396, BRACE2007398, BRACE2007401, BRACE2007411, BRACE2007447, BRACE2007477, BRACE2007502, BRACE2007503, BRACE2007522, BRACE2007527, BRACE2007538, BRACE2007563, BRACE2007577, BRACE2007621, BRACE2007640, BRACE2007641, BRACE2007646,

[3198] BRACE2007663, BRACE2007671, BRACE2007682, BRACE2007685, BRACE2007708, BRACE2007727, BRACE2007749, BRACE2007760, BRACE2007761, BRACE2007764, BRACE2007768, BRACE2007769, BRACE2007784, BRACE2007786, BRACE2007799, BRACE2007801, BRACE2007832, BRACE2007836, BRACE2007868, BRACE2007882, BRACE2007888, BRACE2007902, BRACE2007920, BRACE2007937, BRACE2007944, BRACE2007952, BRACE2008008, BRACE2008015, BRACE2008021, BRACE2008102, BRACE2008114, BRACE2008144, BRACE2008172, BRACE2008216, BRACE2008218, BRACE2008251, BRACE2008276, BRACE2008295, BRACE2008308, BRACE2008336, BRACE2008361, BRACE2008401, BRACE2008410, BRACE2008420, BRACE2008443, BRACE2008473, BRACE2008480, BRACE2008481, BRACE2008488, BRACE2008495,

[3199] BRACE2008500, BRACE2008553, BRACE2008594, BRACE2008604, BRACE2008615, BRACE2008622, BRACE2008629, BRACE2008655, BRACE2008656, BRACE2008708, BRACE2008710, BRACE2008754, BRACE2008797, BRACE2008847, BRACE2008857, BRACE2008861, BRACE2008867, BRACE2008881, BRACE2008883, BRACE2008917, BRACE2008919, BRACE2008941, BRACE2008948, BRACE2008960, BRACE2008999, BRACE2009014, BRACE2009016, BRACE2009031, BRACE2009045, BRACE2009053, BRACE2009122, BRACE2009131, BRACE2009185, BRACE2009188, BRACE2009212, BRACE2009221, BRACE2009235, BRACE2009238, BRACE2009255, BRACE2009270, BRACE2009272, BRACE2009274, BRACE2009275, BRACE2009293, BRACE2009307, BRACE2009311, BRACE2009318, BRACE2009323, BRACE2009366, BRACE2009421,

[3200] BRACE2009428, BRACE2009434, BRACE2009437, BRACE2009517, BRACE2009533, BRACE2009566, BRACE2009591, BRACE2009654, BRACE2009721, BRACE2009732, BRACE2009754, BRACE2009828, BRACE2009886, BRACE2009907, BRACE2009957, BRACE2010170, BRACE2010171, BRACE2010203, BRACE2010208, BRACE2010336, BRACE2010348, BRACE2010440, BRACE2010444, BRACE2010477, BRACE2010489, BRACE2010535, BRACE2010550, BRACE2010598, BRACE2010632, BRACE2010642, BRACE2010753, BRACE2010813, BRACE2010828, BRACE2010837, BRACE2010888, BRACE2010937, BRACE2010983, BRACE2011007, BRACE2011025, BRACE2011199, BRACE2011389, BRACE2011478, BRACE2011545, BRACE2011592, BRACE2011611, BRACE2011646, BRACE2011677, BRACE2011703, BRACE2011747, BRACE2011838,

[3201] BRACE2011892, BRACE2011904, BRACE2011947, BRACE2012061, BRACE2012062, BRACE2012185, BRACE2012222, BRACE2012232, BRACE2012291, BRACE2012510, BRACE2012625, BRACE2012653, BRACE2012833, BRACE2012838, BRACE2012936, BRACE2012947, BRACE2013009, BRACE2013010, BRACE2013126, BRACE2013132, BRACE2013149, BRACE2013369, BRACE2013806, BRACE2014108, BRACE2014161, BRACE2014232, BRACE2014268, BRACE2014475, BRACE2014657, BRACE2014780, BRACE2014818, BRACE2014821, BRACE2014824, BRACE2014854, BRACE2015031, BRACE2015132, BRACE2015262, BRACE2015270, BRACE2015314, BRACE2015352, BRACE2015368, BRACE2015412, BRACE2015436, BRACE2015741, BRACE2015756, BRACE2015969, BRACE2015995, BRACE2016058, BRACE2016194, BRACE2016315,

[3202] BRACE2016325, BRACE2016335, BRACE2016366, BRACE2016465, BRACE2016516, BRACE2016583, BRACE2016708, BRACE2016821, BRACE2016896, BRACE2017108, BRACE2017124, BRACE2017298, BRACE2017359, BRACE2017410, BRACE2017438, BRACE2017580, BRACE2017587, BRACE2017720, BRACE2017844, BRACE2017872, BRACE2017929, BRACE2017934, BRACE2017992, BRACE2018448, BRACE2018568, BRACE2018700, BRACE2018727, BRACE2018736, BRACE2018759, BRACE2018762, BRACE2018782, BRACE2018847, BRACE2019004, BRACE2019044, BRACE2019147, BRACE2019244, BRACE2019258, BRACE2019327, BRACE2019348, BRACE2019371, BRACE2019467, BRACE2019510, BRACE2019528, BRACE2019618, BRACE2019696, BRACE2019703, BRACE2019843, BRACE2019865, BRACE2019872, BRACE2020028,

[3203] BRACE2020077, BRACE2020097, BRACE2020157, BRACE2020278, BRACE2020358, BRACE2020467, BRACE2020584, BRACE2020652, BRACE2020709, BRACE2020742, BRACE2020756, BRACE2020863, BRACE2020982, BRACE2021143, BRACE2021148, BRACE2021245, BRACE2021254, BRACE2021264, BRACE2021344, BRACE2021433, BRACE2021478, BRACE2021541, BRACE2021670, BRACE2021695, BRACE2021721, BRACE2021932, BRACE2021936, BRACE2022030, BRACE2022158, BRACE2022196, BRACE2022270, BRACE2022328, BRACE2022333, BRACE2022389, BRACE2022394, BRACE2022435, BRACE2022448, BRACE2022450, BRACE2022549, BRACE2022633, BRACE2022693, BRACE2022848, BRACE2022928, BRACE2022990, BRACE2023069, BRACE2023070, BRACE2023223, BRACE2023268, BRACE2023284, BRACE2023404,

[3204] BRACE2023451, BRACE2023540, BRACE2023633, BRACE2023718, BRACE2023744, BRACE2023800, BRACE2024222, BRACE2024610, BRACE2024627, BRACE2024781, BRACE2024826, BRACE2025018, BRACE2025316, BRACE2025333, BRACE2025452, BRACE2025492, BRACE2025710, BRACE2025796, BRACE2025992, BRACE2026054, BRACE2026131, BRACE2026141, BRACE2026142, BRACE2026293, BRACE2026294, BRACE2026404, BRACE2026675, BRACE2026836, BRACE2026920, BRACE2026971, BRACE2027018, BRACE2027221, BRACE2027258, BRACE2027312, BRACE2027382, BRACE2027389, BRACE2027408, BRACE2027767, BRACE2027770, BRACE2027879, BRACE2027896, BRACE2028171, BRACE2028392, BRACE2028410, BRACE2028636, BRACE2028741, BRACE2028956, BRACE2028970, BRACE2029112, BRACE2029396,

[3205] BRACE2029581, BRACE2029849, BRACE2030039, BRACE2030096, BRACE2030326, BRACE2030341, BRACE2030736, BRACE2030883, BRACE2030884, BRACE2031154, BRACE2031232, BRACE2031527, BRACE2031531, BRACE2031553, BRACE2031899, BRACE2032044, BRACE2032090, BRACE2032134, BRACE2032148, BRACE2032182, BRACE2032329, BRACE2032385, BRACE2032436, BRACE2032502, BRACE2032538, BRACE2032584, BRACE2032823, BRACE2033128, BRACE2033394, BRACE2033478, BRACE2033720, BRACE2033786, BRACE2034434, BRACE2034523, BRACE2034616, BRACE2034622, BRACE2034870, BRACE2035003, BRACE2035120, BRACE2035124, BRACE2035191, BRACE2035278, BRACE2035441, BRACE2035485, BRACE2036005, BRACE2036096, BRACE2036743, BRACE2036830, BRACE2036834, BRACE2036900,

[3206] BRACE2037132, BRACE2037294, BRACE2037295, BRACE2037299, BRACE2037310, BRACE2037431, BRACE2037692, BRACE2037847, BRACE2038114, BRACE2038269, BRACE2038271, BRACE2038329, BRACE2038492, BRACE2038551, BRACE2038618, BRACE2039009, BRACE2039128, BRACE2039170, BRACE2039249, BRACE2039286, BRACE2039297, BRACE2039327, BRACE2039362, BRACE2039475, BRACE2039600, BRACE2039607, BRACE2039734, BRACE2039823, BRACE2039832, BRACE2039893, BRACE2039986, BRACE2040138, BRACE2040325, BRACE2040514, BRACE2040640, BRACE2040987, BRACE2041009, BRACE2041095, BRACE2041264, BRACE2041890, BRACE2041898, BRACE2042394, BRACE2042398, BRACE2042550, BRACE2042620, BRACE2042628, BRACE2042873, BRACE2043036, BRACE2043105, BRACE2043142,

[3207] BRACE2043248, BRACE2043349, BRACE2043381, BRACE2043774, BRACE2043942, BRACE2044057, BRACE2044105, BRACE2044263, BRACE2044304, BRACE2044473, BRACE2044510, BRACE2044640, BRACE2044816, BRACE2044946, BRACE2044949, BRACE2045300, BRACE2045428, BRACE2045445, BRACE2045596, BRACE2045772, BRACE2045947, BRACE2045954, BRACE2046251, BRACE2046295, BRACE2046976, BRACE2047011, BRACE2047232, BRACE2047377, BRACE2047385, BRACE2047492, BRACE2047558, BRACE2047573, BRACE2047835, BRACE2047893, BRACE2047975, BRACE3000071, BRACE3000404, BRACE3000520, BRACE3000697, BRACE3000840, BRACE3001002, BRACE3001058, BRACE3001066, BRACE3001113, BRACE3001217, BRACE3001299, BRACE3001384, BRACE3001391, BRACE3001403, BRACE3001595,

[3208] BRACE3001948, BRACE3001973, BRACE3002184, BRACE3002298, BRACE3002344, BRACE3002390, BRACE3002420, BRACE3002508, BRACE3002541, BRACE3002756, BRACE3003004, BRACE3003026, BRACE3003053, BRACE3003192, BRACE3003595, BRACE3003866, BRACE3003920, BRACE3004046, BRACE3004058, BRACE3004113, BRACE3004150, BRACE3004205, BRACE3004358, BRACE3004371, BRACE3004435, BRACE3004477, BRACE3004767, BRACE3004772, BRACE3004783, BRACE3004843, BRACE3004880, BRACE3004887, BRACE3004981, BRACE3004996, BRACE3004998, BRACE3005103, BRACE3005127, BRACE3005145, BRACE3005217, BRACE3005225, BRACE3005430, BRACE3005760, BRACE3005870, BRACE3005903, BRACE3006113, BRACE3006185, BRACE3006226, BRACE3006462, BRACE3006463, BRACE3006872,

[3209] BRACE3006917, BRACE3007058, BRACE3007084, BRACE3007085, BRACE3007322, BRACE3007472, BRACE3007480, BRACE3007559, BRACE3007625, BRACE3007642, BRACE3007649, BRACE3007767, BRACE3007869, BRACE3008066, BRACE3008092, BRACE3008137, BRACE3008255, BRACE3008337, BRACE3008384, BRACE3008720, BRACE3008772, BRACE3009044, BRACE3009075, BRACE3009090, BRACE3009127, BRACE3009197, BRACE3009237, BRACE3009265, BRACE3009297, BRACE3009377, BRACE3009392, BRACE3009539, BRACE3009574, BRACE3009701, BRACE3009708, BRACE3009724, BRACE3009993, BRACE3010076, BRACE3010079, BRACE3010086, BRACE3010221, BRACE3010315, BRACE3010397, BRACE3010416, BRACE3010435, BRACE3010702, BRACE3010862, BRACE3011271, BRACE3011447, BRACE3011505,

[3210] BRACE3011634, BRACE3011774, BRACE3012357, BRACE3012574, BRACE3013119, BRACE3013418, BRACE3013576, BRACE3013740, BRACE3013780, BRACE3013874, BRACE3013936, BRACE3013986, BRACE3014005, BRACE3014068, BRACE3014231, BRACE3014290, BRACE3014317, BRACE3014523, BRACE3014714, BRACE3014807, BRACE3014942, BRACE3015090, BRACE3015121, BRACE3015262, BRACE3015521, BRACE3015808, BRACE3015829, BRACE3015894, BRACE3015898, BRACE3016020, BRACE3016122, BRACE3016167, BRACE3016170, BRACE3016580, BRACE3016788, BRACE3016810, BRACE3016862, BRACE3016884, BRACE3017083, BRACE3018083, BRACE3018308, BRACE3018963, BRACE3019055, BRACE3019071, BRACE3019084, BRACE3019570, BRACE3019611, BRACE3019817, BRACE3019828, BRACE3020151,

[3211] BRACE3020194, BRACE3020286, BRACE3020356, BRACE3020594, BRACE3020671, BRACE3020890, BRACE3021148, BRACE3021430, BRACE3021517, BRACE3021805, BRACE3022051, BRACE3022303, BRACE3022340, BRACE3022847, BRACE3023604, BRACE3023912, BRACE3024073, BRACE3024359, BRACE3024379, BRACE3024444, BRACE3024497, BRACE3024537, BRACE3024659, BRACE3024662, BRACE3024879, BRACE3025153, BRACE3025302, BRACE3025457, BRACE3025531, BRACE3025627, BRACE3025630, BRACE3026008, BRACE3026075, BRACE3026161, BRACE3026290, BRACE3026345, BRACE3026456, BRACE3026735, BRACE3026802, BRACE3026844, BRACE3026947, BRACE3026993, BRACE3027242, BRACE3027256, BRACE3027326, BRACE3027480, BRACE3027931, BRACE3028214, BRACE3028241, BRACE3028360,

[3212] BRACE3028998, BRACE3029005, BRACE3029021, BRACE3029205, BRACE3029447, BRACE3030057, BRACE3030103, BRACE3030538, BRACE3030748, BRACE3030866, BRACE3031161, BRACE3031184, BRACE3031185, BRACE3031315, BRACE3031372, BRACE3031579, BRACE3031728, BRACE3031838, BRACE3031843, BRACE3032427, BRACE3032455, BRACE3032537, BRACE3032538, BRACE3032771, BRACE3032980, BRACE3032983, BRACE3033525, BRACE3034159, BRACE3034183, BRACE3034389, BRACE3034964, BRACE3034993, BRACE3035227, BRACE3036156, BRACE3036271, BRACE3037612, BRACE3037637, BRACE3037803, BRACE3038012, BRACE3038030, BRACE3038569, BRACE3038570, BRACE3038687, BRACE3038760, BRACE3039288, BRACE3039358, BRACE3039378, BRACE3039454, BRACE3040012, BRACE3040239,

[3213] BRACE3040504, BRACE3040644, BRACE3040856, BRACE3041059, BRACE3041162, BRACE3041827, BRACE3042046, BRACE3042210, BRACE3042409, BRACE3042432, BRACE3042594, BRACE3043597, BRACE3044090, BRACE3044172, BRACE3044247, BRACE3044377, BRACE3044389, BRACE3044495, BRACE3045011, BRACE3045033, BRACE3045078, BRACE3045145, BRACE3045424, BRACE3045708, BRACE3045981, BRACE3046049, BRACE3046152, BRACE3046294, BRACE3046450, BRACE3046466, BRACE3046491, BRACE3046609, BRACE3046762, BRACE3046837, BRACE3046855, BRACE3046966, BRACE3047018, BRACE3047482, BRACE3047801, BRALZ1000047, BRALZ1000103, BRALZ2000189, BRALZ2000263, BRALZ2001279, BRALZ2001350, BRALZ2001445, BRALZ2001559, BRALZ2001743, BRALZ2001834, BRALZ2002174,

[3214] BRALZ2002418, BRALZ2002477, BRALZ2003119, BRALZ2003330, BRALZ2003453, BRALZ2003525, BRALZ2004397, BRALZ2005467, BRALZ2005471, BRALZ2005888, BRALZ2005950, BRALZ2005992, BRALZ2006288, BRALZ2006474, BRALZ2006560, BRALZ2006734, BRALZ2006800, BRALZ2006976, BRALZ2007376, BRALZ2007545, BRALZ2007576, BRALZ2007661, BRALZ2007790, BRALZ2007793, BRALZ2007952, BRALZ2008031, BRALZ2008166, BRALZ2008462, BRALZ2008617, BRALZ2008696, BRALZ2008763, BRALZ2008869, BRALZ2008930, BRALZ2009446, BRALZ2009486, BRALZ2010186, BRALZ2010842, BRALZ2011337, BRALZ2012050, BRALZ2012183, BRALZ2012848, BRALZ2013621, BRALZ2013690, BRALZ2014054, BRALZ2014316, BRALZ2014484, BRALZ2014951, BRALZ2015168, BRALZ2015811, BRALZ2016085,

[3215] BRALZ2016498, BRALZ2017359, BRALZ2017531, BRALZ2017607, BRALZ2017620, BRALZ2018342, BRALZ2018492, BRALZ2018834, BRALZ2019047, BRAMY1000095, BRAMY1000098, BRAMY1000130, BRAMY1000157, BRAMY1000173, BRAMY2000021, BRAMY2000025, BRAMY2000052, BRAMY2000076, BRAMY2000086, BRAMY2000151, BRAMY2000181, BRAMY2000196, BRAMY2000231, BRAMY2000277, BRAMY2000411, BRAMY2000653, BRAMY2000946, BRAMY2000981, BRAMY2000987, BRAMY2001068, BRAMY2001114, BRAMY2001203, BRAMY2001282, BRAMY2001367, BRAMY2001427, BRAMY2001473, BRAMY2002005, BRAMY2002044, BRAMY2002072, BRAMY2002158, BRAMY2002311, BRAMY2002339, BRAMY2002364, BRAMY2002369, BRAMY2002479, BRAMY2002493, BRAMY2002525, BRAMY2002584, BRAMY2002604, BRAMY2002621,

[3216] BRAMY2002638, BRAMY2002739, BRAMY2002799, BRAMY2002853, BRAMY2002862, BRAMY2002956, BRAMY2003037, BRAMY2003117, BRAMY2003287, BRAMY2003325, BRAMY2003529, BRAMY2003538, BRAMY2003585, BRAMY2003634, BRAMY2003653, BRAMY2003681, BRAMY2003893, BRAMY2003897, BRAMY2003898, BRAMY2003904, BRAMY2003926, BRAMY2003929, BRAMY2004031, BRAMY2004058, BRAMY2004183, BRAMY2004335, BRAMY2004351, BRAMY2004352, BRAMY2004387, BRAMY2004492, BRAMY2004524, BRAMY2004537, BRAMY2004542, BRAMY2004756, BRAMY2004771, BRAMY2005052, BRAMY2005064, BRAMY2005094, BRAMY2005151, BRAMY2005182, BRAMY2005244, BRAMY2005391, BRAMY2005648, BRAMY2005662, BRAMY2005708, BRAMY2005711, BRAMY2006092, BRAMY2006118, BRAMY2006149, BRAMY2006397,

[3217] BRAMY2006411, BRAMY2006459, BRAMY2006466, BRAMY2006659, BRAMY2006779, BRAMY2006809, BRAMY2006879, BRAMY2007043, BRAMY2007078, BRAMY2007110, BRAMY2007185, BRAMY2007244, BRAMY2007249, BRAMY2007255, BRAMY2007287, BRAMY2007308, BRAMY2007411, BRAMY2007458, BRAMY2007486, BRAMY2007546, BRAMY2007567, BRAMY2007594, BRAMY2007610, BRAMY2007613, BRAMY2007653, BRAMY2007753, BRAMY2007859, BRAMY2008333, BRAMY2008382, BRAMY2008563, BRAMY2008583, BRAMY2008977, BRAMY2008979, BRAMY2009034, BRAMY2009105, BRAMY2009123, BRAMY2009192, BRAMY2009344, BRAMY2009349, BRAMY2009394, BRAMY2009489, BRAMY2009508, BRAMY2009528, BRAMY2009557, BRAMY2009612, BRAMY2009693, BRAMY2009934, BRAMY2010068, BRAMY2010135, BRAMY2010145,

[3218] BRAMY2010171, BRAMY2010208, BRAMY2010239, BRAMY2010272, BRAMY2010290, BRAMY2010357, BRAMY2010366, BRAMY2010395, BRAMY2010441, BRAMY2010442, BRAMY2010464, BRAMY2010581, BRAMY2010798, BRAMY2010808, BRAMY2010919, BRAMY2011064, BRAMY2011178, BRAMY2011196, BRAMY2011216, BRAMY2011253, BRAMY2011446, BRAMY2011480, BRAMY2011639, BRAMY2011679, BRAMY2011811, BRAMY2011841, BRAMY2011846, BRAMY2011849, BRAMY2011872, BRAMY2011961, BRAMY2012017, BRAMY2012119, BRAMY2012162, BRAMY2012163, BRAMY2012277, BRAMY2012340, BRAMY2012426, BRAMY2012497, BRAMY2012517, BRAMY2012555, BRAMY2012568, BRAMY2012691, BRAMY2012721, BRAMY2012731, BRAMY2012776, BRAMY2012880, BRAMY2012881, BRAMY2013200, BRAMY2013216, BRAMY2013405,

[3219] BRAMY2013414, BRAMY2013572, BRAMY2013621, BRAMY2013659, BRAMY2013722, BRAMY2013736, BRAMY2013756, BRAMY2013944, BRAMY2013975, BRAMY2014019, BRAMY2014205, BRAMY2014387, BRAMY2014462, BRAMY2014469, BRAMY2014541, BRAMY2015251, BRAMY2015311, BRAMY2015420, BRAMY2015503, BRAMY2015516, BRAMY2015551, BRAMY2015559, BRAMY2015688, BRAMY2015705, BRAMY2015855, BRAMY2015890, BRAMY2015911, BRAMY2015925, BRAMY2016002, BRAMY2016020, BRAMY2016070, BRAMY2016251, BRAMY2016325, BRAMY2016327, BRAMY2016771, BRAMY2016892, BRAMY2016938, BRAMY2016953, BRAMY2017014, BRAMY2017249, BRAMY2017348, BRAMY2017450, BRAMY2017455, BRAMY2017528, BRAMY2018027, BRAMY2018106, BRAMY2018126, BRAMY2018272, BRAMY2018273, BRAMY2018279,

[3220] BRAMY2018295, BRAMY2018308, BRAMY2018396, BRAMY2018467, BRAMY2018635, BRAMY2019055, BRAMY2019111, BRAMY2019277, BRAMY2019300, BRAMY2019468, BRAMY2019509, BRAMY2019643, BRAMY2019710, BRAMY2019985, BRAMY2020050, BRAMY2020058, BRAMY2020106, BRAMY2020270, BRAMY2020354, BRAMY2020355, BRAMY2020445, BRAMY2020466, BRAMY2020520, BRAMY2020574, BRAMY2020634, BRAMY2020713, BRAMY2021040, BRAMY2021063, BRAMY2021098, BRAMY2021142, BRAMY2021276, BRAMY2021310, BRAMY2021388, BRAMY2021498, BRAMY2021523, BRAMY2021710, BRAMY2021732, BRAMY2021746, BRAMY2021825, BRAMY2021867, BRAMY2021962, BRAMY2021982, BRAMY2022052, BRAMY2022263, BRAMY2022301, BRAMY2022320, BRAMY2022383, BRAMY2022454, BRAMY2022525, BRAMY2022532,

[3221] BRAMY2022723, BRAMY2022796, BRAMY2022929, BRAMY2022980, BRAMY2022984, BRAMY2023060, BRAMY2023110, BRAMY2023115, BRAMY2023161, BRAMY2023172, BRAMY2023238, BRAMY2023327, BRAMY2023358, BRAMY2023482, BRAMY2023514, BRAMY2023719, BRAMY2023786, BRAMY2023852, BRAMY2023863, BRAMY2023939, BRAMY2024004, BRAMY2024073, BRAMY2024312, BRAMY2024374, BRAMY2024449, BRAMY2024489, BRAMY2024497, BRAMY2024514, BRAMY2024530, BRAMY2024535, BRAMY2024545, BRAMY2024576, BRAMY2024593, BRAMY2024711, BRAMY2024715, BRAMY2024728, BRAMY2024849, BRAMY2025024, BRAMY2025032, BRAMY2025121, BRAMY2025175, BRAMY2025218, BRAMY2025230, BRAMY2025272, BRAMY2025277, BRAMY2025495, BRAMY2025812, BRAMY2025996, BRAMY2026091, BRAMY2026168,

[3222] BRAMY2026300, BRAMY2026347, BRAMY2026395, BRAMY2026405, BRAMY2026533, BRAMY2026538, BRAMY2026713, BRAMY2026778, BRAMY2026824, BRAMY2026899, BRAMY2026902, BRAMY2026904, BRAMY2026976, BRAMY2027073, BRAMY2027140, BRAMY2027242, BRAMY2027396, BRAMY2027451, BRAMY2027461, BRAMY2027467, BRAMY2027714, BRAMY2027717, BRAMY2027752, BRAMY2027782, BRAMY2028072, BRAMY2028183, BRAMY2028188, BRAMY2028269, BRAMY2028282, BRAMY2028472, BRAMY2028491, BRAMY2028565, BRAMY2028593, BRAMY2028783, BRAMY2028856, BRAMY2028914, BRAMY2029204, BRAMY2029602, BRAMY2029988, BRAMY2030098, BRAMY2030109, BRAMY2030206, BRAMY2030477, BRAMY2030545, BRAMY2030607, BRAMY2030702, BRAMY2030703, BRAMY2030768, BRAMY2030799, BRAMY2030859,

[3223] BRAMY2030915, BRAMY2031317, BRAMY2031377, BRAMY2031442, BRAMY2032014, BRAMY2032231, BRAMY2032242, BRAMY2032290, BRAMY2032311, BRAMY2032317, BRAMY2032344, BRAMY2032589, BRAMY2032678, BRAMY2032777, BRAMY2032994, BRAMY2033003, BRAMY2033116, BRAMY2033240, BRAMY2033267, BRAMY2033332, BRAMY2033506, BRAMY2033594, BRAMY2033895, BRAMY2033914, BRAMY2034072, BRAMY2034185, BRAMY2034187, BRAMY2034305, BRAMY2034561, BRAMY2034920, BRAMY2034993, BRAMY2035449, BRAMY2035545, BRAMY2035606, BRAMY2035718, BRAMY2035801, BRAMY2035869, BRAMY2035923, BRAMY2036079, BRAMY2036254, BRAMY2036266, BRAMY2036387, BRAMY2036396, BRAMY2036567, BRAMY2036615, BRAMY2036699, BRAMY2036913, BRAMY2036918, BRAMY2036968, BRAMY2037147,

[3224] BRAMY2037328, BRAMY2037609, BRAMY2037629, BRAMY2037800, BRAMY2037823, BRAMY2037971, BRAMY2038100, BRAMY2038128, BRAMY2038317, BRAMY2038475, BRAMY2038484, BRAMY2038516, BRAMY2038832, BRAMY2038887, BRAMY2038904, BRAMY2039287, BRAMY2039300, BRAMY2039314, BRAMY2039341, BRAMY2039630, BRAMY2039695, BRAMY2039728, BRAMY2040051, BRAMY2040159, BRAMY2040214, BRAMY2040478, BRAMY2040592, BRAMY2040915, BRAMY2041261, BRAMY2041347, BRAMY2041378, BRAMY2041384, BRAMY2041434, BRAMY2041507, BRAMY2041542, BRAMY2041738, BRAMY2042122, BRAMY2042131, BRAMY2042178, BRAMY2042195, BRAMY2042244, BRAMY2042549, BRAMY2042596, BRAMY2042612, BRAMY2042641, BRAMY2042711, BRAMY2042760, BRAMY2042804, BRAMY2042899, BRAMY2042918,

[3225] BRAMY2043103, BRAMY2043314, BRAMY2043345, BRAMY2044246, BRAMY2044317, BRAMY2044349, BRAMY2044686, BRAMY2044838, BRAMY2045036, BRAMY2045299, BRAMY2045471, BRAMY2046109, BRAMY2046478, BRAMY2046489, BRAMY2046537, BRAMY2046667, BRAMY2046742, BRAMY2046871, BRAMY2046984, BRAMY2046989, BRAMY2047169, BRAMY2047280, BRAMY2047676, BRAMY2047692, BRAMY2047746, BRAMY2047751, BRAMY2047765, BRAMY2047884, BRAMY2047948, BRAMY3000206, BRAMY3000210, BRAMY3000213, BRAMY3000224, BRAMY3000254, BRAMY3000307, BRAMY3000692, BRAMY3001356, BRAMY3001401, BRAMY3001409, BRAMY3001794, BRAMY3002312, BRAMY3002329, BRAMY3002508, BRAMY3002620, BRAMY3002803, BRAMY3002805, BRAMY3002886, BRAMY3002991, BRAMY3003026, BRAMY3003109,

[3226] BRAMY3003566, BRAMY3003723, BRAMY3004126, BRAMY3004224, BRAMY3004672, BRAMY3004800, BRAMY3004900, BRAMY3004919, BRAMY3005091, BRAMY3005184, BRAMY3005656, BRAMY3005912, BRAMY3005932, BRAMY3006032, BRAMY3006297, BRAMY3006761, BRAMY3007078, BRAMY3007206, BRAMY3007350, BRAMY3007449, BRAMY3007471, BRAMY3007609, BRAMY3007723, BRAMY3007968, BRAMY3008088, BRAMY3008096, BRAMY3008335, BRAMY3008466, BRAMY3008505, BRAMY3008650, BRAMY3008937, BRAMY3009158, BRAMY3009207, BRAMY3009556, BRAMY3009782, BRAMY3009811, BRAMY3009904, BRAMY3010264, BRAMY3010321, BRAMY3010411, BRAMY3010603, BRAMY3010654, BRAMY4000095, BRAMY4000229, BRAMY4000277, BRAMY4000915, BRAMY4000962, BRAMY4001173, BRAMY4001200, BRAMY4001449,

[3227] BRAMY4001652, BRAMY4001913, BRAMY4002575, BRASW1000053, BRASW1000125, BRAWH1000002, BRAWH1000094, BRAWH1000116, BRAWH1000130, BRAWH1000157, BRAWH1000164, BRAWH1000168, BRAWH1000180, BRAWH1000369, BRAWH2000034, BRAWH2000048, BRAWH2000071, BRAWH2000093, BRAWH2000109, BRAWH2000131, BRAWH2000142, BRAWH2000169, BRAWH2000177, BRAWH2000218, BRAWH2000232, BRAWH2000248, BRAWH2000256, BRAWH2000274, BRAWH2000323, BRAWH2000353, BRAWH2000370, BRAWH2000409, BRAWH2000443, BRAWH2000471, BRAWH2000476, BRAWH2000482, BRAWH2000500, BRAWH2000503, BRAWH2000522, BRAWH2000554, BRAWH2000595, BRAWH2000643, BRAWH2000651, BRAWH2000682, BRAWH2000752, BRAWH2000866, BRAWH2000892, BRAWH2000901, BRAWH2000926, BRAWH2000984,

[3228] BRAWH2001037, BRAWH2001052, BRAWH2001103, BRAWH2001137, BRAWH2001141, BRAWH2001159, BRAWH2001166, BRAWH2001203, BRAWH2001238, BRAWH2001255, BRAWH2001355, BRAWH2001378, BRAWH2001436, BRAWH2001438, BRAWH2001484, BRAWH2001492, BRAWH2001503, BRAWH2001519, BRAWH2001589, BRAWH2001662, BRAWH2001666, BRAWH2001679, BRAWH2001686, BRAWH2001701, BRAWH2001842, BRAWH2001862, BRAWH2001873, BRAWH2001940, BRAWH2001973, BRAWH2002047, BRAWH2002060, BRAWH2002125, BRAWH2002191, BRAWH2002318, BRAWH2002333, BRAWH2002352, BRAWH2002383, BRAWH2002549, BRAWH2002560, BRAWH2002623, BRAWH2002630, BRAWH2002635, BRAWH2002662, BRAWH2002679, BRAWH2002725, BRAWH2002761, BRAWH2002811, BRAWH2002861, BRAWH2002911, BRAWH2002963,

[3229] BRAWH2002967, BRAWH2002976, BRAWH2003000, BRAWH2003025, BRAWH2003135, BRAWH2003307, BRAWH2003355, BRAWH2003366, BRAWH2003662, BRAWH2003832, BRAWH2003948, BRAWH2003964, BRAWH2004044, BRAWH2004068, BRAWH2004078, BRAWH2004580, BRAWH2004731, BRAWH2004779, BRAWH2004884, BRAWH2004923, BRAWH2005074, BRAWH2005315, BRAWH2005517, BRAWH2005524, BRAWH2005533, BRAWH2005812, BRAWH2005974, BRAWH2005998, BRAWH2006044, BRAWH2006083, BRAWH2006207, BRAWH2006301, BRAWH2006395, BRAWH2006405, BRAWH2006622, BRAWH2006760, BRAWH2006960, BRAWH2006989, BRAWH2006996, BRAWH2007069, BRAWH2007308, BRAWH2007406, BRAWH2007550, BRAWH2007570, BRAWH2007591, BRAWH2007658, BRAWH2007664, BRAWH2007800, BRAWH2007825, BRAWH2007862,

[3230] BRAWH2007890, BRAWH2008128, BRAWH2008219, BRAWH2008255, BRAWH2008292, BRAWH2008297, BRAWH2008366, BRAWH2008380, BRAWH2008577, BRAWH2008790, BRAWH2008903, BRAWH2008993, BRAWH2009112, BRAWH2009227, BRAWH2009261, BRAWH2009263, BRAWH2009298, BRAWH2009393, BRAWH2009485, BRAWH2009490, BRAWH2009558, BRAWH2009590, BRAWH2009626, BRAWH2009695, BRAWH2009907, BRAWH2010000, BRAWH2010069, BRAWH2010084, BRAWH2010136, BRAWH2010318, BRAWH2010364, BRAWH2010536, BRAWH2010552, BRAWH2010584, BRAWH2010618, BRAWH2010619, BRAWH2010754, BRAWH2010980, BRAWH2011066, BRAWH2011079, BRAWH2011155, BRAWH2011166, BRAWH2011204, BRAWH2011286, BRAWH2011294, BRAWH2011400, BRAWH2011762, BRAWH2011795, BRAWH2011796, BRAWH2011812,

[3231] BRAWH2011823, BRAWH2011860, BRAWH2011920, BRAWH2011958, BRAWH2012054, BRAWH2012077, BRAWH2012161, BRAWH2012162, BRAWH2012164, BRAWH2012258, BRAWH2012277, BRAWH2012326, BRAWH2012538, BRAWH2012540, BRAWH2012619, BRAWH2012698, BRAWH2012749, BRAWH2012827, BRAWH2012866, BRAWH2012963, BRAWH2013047, BRAWH2013748, BRAWH2013866, BRAWH2013914, BRAWH2013941, BRAWH2013955, BRAWH2014234, BRAWH2014379, BRAWH2014414, BRAWH2014473, BRAWH2014511, BRAWH2014662, BRAWH2014717, BRAWH2014729, BRAWH2014876, BRAWH2014934, BRAWH2014954, BRAWH2015247, BRAWH2015349, BRAWH2015375, BRAWH2015385, BRAWH2015595, BRAWH2015728, BRAWH2015853, BRAWH2015866, BRAWH2016028, BRAWH2016106, BRAWH2016160, BRAWH2016221, BRAWH2016223,

[3232] BRAWH2016269, BRAWH2016305, BRAWH2016439, BRAWH2016446, BRAWH2016562, BRAWH2016655, BRAWH2016679, BRAWH2016702, BRAWH2016724, BRAWH2016785, BRAWH2016792, BRAWH2016800, BRAWH2017103, BRAWH2017250, BRAWH2017294, BRAWH2017304, BRAWH2017305, BRAWH2017379, BRAWH2017407, BRAWH2017433, BRAWH2017523, BRAWH2017534, BRAWH2017542, BRAWH2017635, BRAWH2017913, BRAWH2018267, BRAWH2018282, BRAWH2018317, BRAWH2018506, BRAWH2018514, BRAWH2018526, BRAWH2018601, BRAWH2018729, BRAWH2018745, BRAWH2018875, BRAWH2019053, BRAWH2019055, BRAWH2019198, BRAWH3000078, BRAWH3000100, BRAWH3000166, BRAWH3000314, BRAWH3000329, BRAWH3000410, BRAWH3000446, BRAWH3000491, BRAWH3000884, BRAWH3001053, BRAWH3001326, BRAWH3001475,

[3233] BRAWH3001636, BRAWH3001638, BRAWH3001712, BRAWH3001760, BRAWH3001783, BRAWH3001833, BRAWH3001879, BRAWH3001891, BRAWH3002433, BRAWH3002467, BRAWH3002513, BRAWH3002574, BRAWH3002600, BRAWH3002819, BRAWH3003019, BRAWH3003136, BRAWH3003244, BRAWH3003343, BRAWH3003522, BRAWH3003598, BRAWH3003801, BRAWH3003975, BRAWH3004222, BRAWH3004335, BRAWH3004453, BRAWH3004666, BRAWH3005037, BRAWH3005047, BRAWH3005132, BRAWH3005292, BRAWH3005422, BRAWH3005534, BRAWH3005886, BRAWH3005892, BRAWH3005896, BRAWH3005912, BRAWH3005981, BRAWH3006547, BRAWH3006548, BRAWH3006761, BRAWH3006792, BRAWH3007129, BRAWH3007221, BRAWH3007441, BRAWH3007455, BRAWH3007506, BRAWH3007783, BRAWH3008167, BRAWH3008341, BRAWH3008559,

[3234] BRAWH3008697, BRAWH3008867, BRAWH3009017, BRAWH3009285, BRAWH3009297, BRAWH3009546, BRAWH3009961, BRAWH3010461, BRAWH3010560, BRAWH3010602, BRAWH3010657, BRAWH3010726, BRAWH3010833, BRAWH3011101, BRAWH3011331, BRAWH3011402, BRAWH3011577, BRAWH3011623, BRAWH3011685, BRAWH3011907, BRAWH3011929, BRAWH3012005, BRAWH3012779, BRAWH3013009, BRAWH3013049, BRAWH3013197, BRAWH3013264, BRAWH3013508, BRAWH3014609, BRAWH3014639, BRAWH3015017, BRAWH3015175, BRAWH3015260, BRAWH3015610, BRAWH3015825, BRAWH3016123, BRAWH3016271, BRAWH3016715, BRAWH3017259, BRAWH3017260, BRAWH3017477, BRAWH3017537, BRAWH3017980, BRAWH3018369, BRAWH3018548, BRAWH3018969, BRAWH3019026, BRAWH3019529, BRAWH3019594, BRAWH3019629,

[3235] BRAWH3019820, BRAWH3020200, BRAWH3020318, BRAWH3020486, BRAWH3020884, BRAWH3020928, BRAWH3021012, BRAWH3021580, BRAWH3021641, BRAWH3021643, BRAWH3021724, BRAWH3022347, BRAWH3022431, BRAWH3022459, BRAWH3022542, BRAWH3022719, BRAWH3022866, BRAWH3022900, BRAWH3023156, BRAWH3023168, BRAWH3023172, BRAWH3023274, BRAWH3023421, BRAWH3024231, BRAWH3024469, BRAWH3024506, BRAWH3024613, BRAWH3026349, BRAWH3026394, BRAWH3026529, BRAWH3027420, BRAWH3027440, BRAWH3027533, BRAWH3027574, BRAWH3027607, BRAWH3027616, BRAWH3027675, BRAWH3027806, BRAWH3027880, BRAWH3027927, BRAWH3028202, BRAWH3028223, BRAWH3028306, BRAWH3028461, BRAWH3028645, BRAWH3028754, BRAWH3028796, BRAWH3029254, BRAWH3029313, BRAWH3029538,

[3236] BRAWH3029556, BRAWH3030613, BRAWH3030772, BRAWH3030810, BRAWH3030892, BRAWH3030910, BRAWH3030950, BRAWH3031054, BRAWH3031710, BRAWH3031902, BRAWH3032298, BRAWH3032340, BRAWH3032571, BRAWH3032620, BRAWH3032930, BRAWH3033117, BRAWH3033293, BRAWH3033448, BRAWH3033513, BRAWH3034097, BRAWH3034114, BRAWH3034134, BRAWH3034668, BRAWH3034743, BRAWH3034775, BRAWH3034890, BRAWH3035154, BRAWH3035904, BRAWH3035914, BRAWH3036077, BRAWH3036270, BRAWH3036561, BRAWH3036738, BRAWH3036951, BRAWH3037265, BRAWH3037394, BRAWH3037533, BRAWH3037979, BRAWH3038055, BRAWH3038230, BRAWH3038252, BRAWH3038324, BRCAN1000065, BRCAN1000105, BRCAN1000149, BRCAN1000168, BRCAN2000148, BRCAN2000149, BRCAN2000239, BRCAN2000346,

[3237] BRCAN2000364, BRCAN2000383, BRCAN2000418, BRCAN2000523, BRCAN2000541, BRCAN2000563, BRCAN2000577, BRCAN2000620, BRCAN2000639, BRCAN2000763, BRCAN2000832, BRCAN2000923, BRCAN2001223, BRCAN2001866, BRCAN2002416, BRCAN2002473, BRCAN2002562, BRCAN2002662, BRCAN2002826, BRCAN2002854, BRCAN2002856, BRCAN2002892, BRCAN2002948, BRCAN2003070, BRCAN2003269, BRCAN2003389, BRCAN2003628, BRCAN2003703, BRCAN2003746, BRCAN2003814, BRCAN2003987, BRCAN2004173, BRCAN2004355, BRCAN2004371, BRCAN2004653, BRCAN2004699, BRCAN2005436, BRCAN2005449, BRCAN2006051, BRCAN2006063, BRCAN2006117, BRCAN2006174, BRCAN2006290, BRCAN2006297, BRCAN2006323, BRCAN2006401, BRCAN2006411, BRCAN2006450, BRCAN2006955, BRCAN2007119,

[3238] BRCAN2007144, BRCAN2007426, BRCAN2007525, BRCAN2007700, BRCAN2008494, BRCAN2008528, BRCAN2008701, BRCAN2008894, BRCAN2009156, BRCAN2009168, BRCAN2009203, BRCAN2010374, BRCAN2010376, BRCAN2010547, BRCAN2010581, BRCAN2010665, BRCAN2011254, BRCAN2011316, BRCAN2011602, BRCAN2011946, BRCAN2012110, BRCAN2012355, BRCAN2012402, BRCAN2012408, BRCAN2012481, BRCAN2012613, BRCAN2012713, BRCAN2012929, BRCAN2013655, BRCAN2013660, BRCAN2014143, BRCAN2014229, BRCAN2014370, BRCAN2014602, BRCAN2014652, BRCAN2014788, BRCAN2014881, BRCAN2014952, BRCAN2015371, BRCAN2015402, BRCAN2015464, BRCAN2015757, BRCAN2015886, BRCAN2016025, BRCAN2016046, BRCAN2016174, BRCAN2016433, BRCAN2016619, BRCAN2016762, BRCAN2016814,

[3239] BRCAN2017442, BRCAN2017905, BRCAN2018240, BRCAN2018269, BRCAN2018490, BRCAN2018566, BRCAN2018667, BRCAN2018748, BRCAN2018935, BRCAN2019002, BRCAN2019387, BRCAN2019773, BRCAN2019907, BRCAN2020234, BRCAN2020331, BRCAN2020467, BRCAN2020710, BRCAN2020880, BRCAN2021028, BRCAN2021325, BRCAN2021452, BRCAN2021669, BRCAN2021718, BRCAN2022191, BRCAN2022472, BRCAN2022474, BRCAN2023347, BRCAN2023724, BRCAN2024451, BRCAN2024563, BRCAN2024572, BRCAN2025009, BRCAN2025093, BRCAN2025349, BRCAN2025368, BRCAN2025712, BRCAN2025982, BRCAN2026117, BRCAN2026340, BRCAN2026711, BRCAN2027150, BRCAN2027310, BRCAN2027334, BRCAN2027355, BRCAN2027364, BRCAN2027513, BRCAN2027593, BRCAN2027970, BRCAN2028021, BRCAN2028036,

[3240] BRCAN2028338, BRCAN2028378, BRCAN2028460, BRCAN2028545, BRCAN2028634, BRCAN2028702, BRCOC1000087, BRCOC2000047, BRCOC2000152, BRCOC2000184, BRCOC2000333, BRCOC2000360, BRCOC2000404, BRCOC2000637, BRCOC2000670, BRCOC2000816, BRCOC2000850, BRCOC2001355, BRCOC2002085, BRCOC2002323, BRCOC2002659, BRCOC2002664, BRCOC2002686, BRCOC2002751, BRCOC2002756, BRCOC2002777, BRCOC2002835, BRCOC2003100, BRCOC2003125, BRCOC2003513, BRCOC2003740, BRCOC2004036, BRCOC2004175, BRCOC2004354, BRCOC2004455, BRCOC2004950, BRCOC2005542, BRCOC2005903, BRCOC2005951, BRCOC2006189, BRCOC2006243, BRCOC2006270, BRCOC2006639, BRCOC2006942, BRCOC2007034, BRCOC2007593, BRCOC2007733, BRCOC2007769, BRCOC2008064, BRCOC2008225,

[3241] BRCOC2008642, BRCOC2008993, BRCOC2009052, BRCOC2009196, BRCOC2009380, BRCOC2009638, BRCOC2009937, BRCOC2010115, BRCOC2010510, BRCOC2010980, BRCOC2010994, BRCOC2011010, BRCOC2011398, BRCOC2011418, BRCOC2011506, BRCOC2011769, BRCOC2011996, BRCOC2012229, BRCOC2012386, BRCOC2012813, BRCOC2013448, BRCOC2013573, BRCOC2013675, BRCOC2013780, BRCOC2014400, BRCOC2014748, BRCOC2014833, BRCOC2015597, BRCOC2015824, BRCOC2015908, BRCOC2015944, BRCOC2016525, BRCOC2016661, BRCOC2017061, BRCOC2017856, BRCOC2018775, BRCOC2018877, BRCOC2019255, BRCOC2019549, BRCOC2019841, BRCOC2019896, BRCOC2019934, BRCOC2020122, BRCOC2020142, BRHIP1000058, BRHIP1000072, BRHIP1000129, BRHIP1000174, BRHIP1000258, BRHIP2000021,

[3242] BRHIP2000079, BRHIP2000163, BRHIP2000210, BRHIP2000312, BRHIP2000359, BRHIP2000445, BRHIP2000506, BRHIP2000532, BRHIP2000621, BRHIP2000691, BRHIP2000826, BRHIP2000920, BRHIP2001074, BRHIP2001686, BRHIP2001782, BRHIP2001802, BRHIP2001805, BRHIP2001886, BRHIP2001927, BRHIP2002122, BRHIP2002143, BRHIP2002172, BRHIP2002339, BRHIP2002346, BRHIP2002510, BRHIP2002664, BRHIP2002722, BRHIP2002929, BRHIP2003048, BRHIP2003242, BRHIP2003272, BRHIP2003748, BRHIP2003786, BRHIP2003828, BRHIP2003917, BRHIP2004312, BRHIP2004355, BRHIP2004814, BRHIP2004883, BRHIP2004902, BRHIP2005010, BRHIP2005236, BRHIP2005354, BRHIP2005600, BRHIP2005719, BRHIP2005724, BRHIP2005752, BRHIP2005932, BRHIP2006617, BRHIP2006782,

[3243] BRHIP2006800, BRHIP2006819, BRHIP2006921, BRHIP2007307, BRHIP2007616, BRHIP2007690, BRHIP2007928, BRHIP2007969, BRHIP2008389, BRHIP2008607, BRHIP2008756, BRHIP2008909, BRHIP2009019, BRHIP2009177, BRHIP2009340, BRHIP2009351, BRHIP2009414, BRHIP2009474, BRHIP2009617, BRHIP2010217, BRHIP2010309, BRHIP2010444, BRHIP2010487, BRHIP2010610, BRHIP2010723, BRHIP2010744, BRHIP2011080, BRHIP2011120, BRHIP2011491, BRHIP2011576, BRHIP2011616, BRHIP2011783, BRHIP2011838, BRHIP2011891, BRHIP2011933, BRHIP2012054, BRHIP2012059, BRHIP2012141, BRHIP2012314, BRHIP2012360, BRHIP2012545, BRHIP2012580, BRHIP2012627, BRHIP2012642, BRHIP2012750, BRHIP2012922, BRHIP2012923, BRHIP2012972, BRHIP2013286, BRHIP2013447,

[3244] BRHIP2013510, BRHIP2013699, BRHIP2013723, BRHIP2013958, BRHIP2013972, BRHIP2014063, BRHIP2014228, BRHIP2014285, BRHIP2014291, BRHIP2014387, BRHIP2014954, BRHIP2015224, BRHIP2015356, BRHIP2015360, BRHIP2016005, BRHIP2016125, BRHIP2016788, BRHIP2016968, BRHIP2016990, BRHIP2017315, BRHIP2017385, BRHIP2017404, BRHIP2017542, BRHIP2017553, BRHIP2017642, BRHIP2017714, BRHIP2017780, BRHIP2018014, BRHIP2018369, BRHIP2018612, BRHIP2018635, BRHIP2018650, BRHIP2018719, BRHIP2018805, BRHIP2018998, BRHIP2019007, BRHIP2019047, BRHIP2019149, BRHIP2019177, BRHIP2019186, BRHIP2019291, BRHIP2019494, BRHIP2019589, BRHIP2019641, BRHIP2019884, BRHIP2019972, BRHIP2020182, BRHIP2020622, BRHIP2020695, BRHIP2020743,

[3245] BRHIP2020842, BRHIP2020859, BRHIP2020930, BRHIP2021102, BRHIP2021289, BRHIP2021495, BRHIP2021615, BRHIP2021744, BRHIP2021762, BRHIP2021858, BRHIP2021870, BRHIP2021929, BRHIP2022006, BRHIP2022054, BRHIP2022221, BRHIP2022298, BRHIP2022467, BRHIP2022708, BRHIP2023071, BRHIP2023229, BRHIP2023292, BRHIP2023695, BRHIP2023735, BRHIP2023762, BRHIP2023773, BRHIP2023860, BRHIP2023869, BRHIP2024165, BRHIP2024201, BRHIP2024347, BRHIP2024549, BRHIP2024789, BRHIP2024911, BRHIP2024941, BRHIP2025366, BRHIP2025448, BRHIP2025679, BRHIP2025739, BRHIP2025797, BRHIP2026021, BRHIP2026061, BRHIP2026155, BRHIP2026214, BRHIP2026288, BRHIP2026346, BRHIP2026557, BRHIP2026723, BRHIP2026877, BRHIP2027054, BRHIP2027563,

[3246] BRHIP2027685, BRHIP2027762, BRHIP2028187, BRHIP2028303, BRHIP2028330, BRHIP2028480, BRHIP2028583, BRHIP2028593, BRHIP2029176, BRHIP2029283, BRHIP2029393, BRHIP2029529, BRHIP2029643, BRHIP2029663, BRHIP3000060, BRHIP3000070, BRHIP3000081, BRHIP3000240, BRHIP3000377, BRHIP3000457, BRHIP3000488, BRHIP3000526, BRHIP3000626, BRHIP3000859, BRHIP3000907, BRHIP3001076, BRHIP3001079, BRHIP3001141, BRHIP3001283, BRHIP3001338, BRHIP3001360, BRHIP3001481, BRHIP3001878, BRHIP3001964, BRHIP3002124, BRHIP3002363, BRHIP3002920, BRHIP3002931, BRHIP3003063, BRHIP3003126, BRHIP3003306, BRHIP3003340, BRHIP3003395, BRHIP3003484, BRHIP3003644, BRHIP3003688, BRHIP3003795, BRHIP3003961, BRHIP3003984, BRHIP3004193,

[3247] BRHIP3004215, BRHIP3004416, BRHIP3004710, BRHIP3004725, BRHIP3004774, BRHIP3004786, BRHIP3004863, BRHIP3004968, BRHIP3005037, BRHIP3005137, BRHIP3005142, BRHIP3005231, BRHIP3005307, BRHIP3005574, BRHIP3005768, BRHIP3005801, BRHIP3005944, BRHIP3006279, BRHIP3006390, BRHIP3006449, BRHIP3006683, BRHIP3006717, BRHIP3006786, BRHIP3006950, BRHIP3007172, BRHIP3007183, BRHIP3007195, BRHIP3007239, BRHIP3007291, BRHIP3007409, BRHIP3007424, BRHIP3007483, BRHIP3007586, BRHIP3007609, BRHIP3007640, BRHIP3007960, BRHIP3008082, BRHIP3008183, BRHIP3008314, BRHIP3008320, BRHIP3008344, BRHIP3008565, BRHIP3008598, BRHIP3008606, BRHIP3008691, BRHIP3008714, BRHIP3008997, BRHIP3009099, BRHIP3009140, BRHIP3009181,

[3248] BRHIP3009318, BRHIP3009427, BRHIP3009448, BRHIP3009672, BRHIP3009753, BRHIP3010135, BRHIP3010289, BRHIP3010529, BRHIP3011082, BRHIP3011241, BRHIP3011269, BRHIP3011460, BRHIP3011567, BRHIP3011831, BRHIP3012185, BRHIP3012289, BRHIP3012357, BRHIP3012736, BRHIP3012745, BRHIP3012868, BRHIP3013078, BRHIP3013271, BRHIP3013588, BRHIP3013698, BRHIP3013765, BRHIP3013897, BRHIP3014237, BRHIP3015620, BRHIP3015751, BRHIP3015854, BRHIP3016032, BRHIP3016213, BRHIP3016302, BRHIP3016421, BRHIP3017109, BRHIP3017146, BRHIP3017256, BRHIP3017325, BRHIP3017558, BRHIP3017637, BRHIP3019643, BRHIP3019824, BRHIP3019880, BRHIP3019956, BRHIP3020155, BRHIP3020182, BRHIP3021019, BRHIP3021499, BRHIP3021534, BRHIP3021778,

[3249] BRHIP3021987, BRHIP3022656, BRHIP3023922, BRHIP3024118, BRHIP3024533, BRHIP3024703, BRHIP3024725, BRHIP3024820, BRHIP3025161, BRHIP3025702, BRHIP3025795, BRHIP3025844, BRHIP3026052, BRHIP3026097, BRHIP3026231, BRHIP3026335, BRHIP3026651, BRHIP3027105, BRHIP3027137, BRHIP3027160, BRHIP3027191, BRHIP3027501, BRHIP3027594, BRHIP3027651, BRHIP3027854, BRHIP3027947, BRHIP3028570, BRHIP3028742, BRSSN1000056, BRSSN1000059, BRSSN1000092, BRSSN1000153, BRSSN2000175, BRSSN2000293, BRSSN2000312, BRSSN2000518, BRSSN2000561, BRSSN2000566, BRSSN2000715, BRSSN2001213, BRSSN2001275, BRSSN2001342, BRSSN2001426, BRSSN2001503, BRSSN2001758, BRSSN2001810, BRSSN2002857, BRSSN2002859, BRSSN2003086, BRSSN2003093,

[3250] BRSSN2003820, BRSSN2003841, BRSSN2003937, BRSSN2004142, BRSSN2004303, BRSSN2004304, BRSSN2004496, BRSSN2004657, BRSSN2004679, BRSSN2004686, BRSSN2004710, BRSSN2006133, BRSSN2006390, BRSSN2006575, BRSSN2006611, BRSSN2006644, BRSSN2007076, BRSSN2007168, BRSSN2007202, BRSSN2007504, BRSSN2007819, BRSSN2008125, BRSSN2008419, BRSSN2008464, BRSSN2008549, BRSSN2008797, BRSSN2009119, BRSSN2009378, BRSSN2009389, BRSSN2009395, BRSSN2009627, BRSSN2009630, BRSSN2009702, BRSSN2010110, BRSSN2010587, BRSSN2010596, BRSSN2010830, BRSSN2011653, BRSSN2012081, BRSSN2012103, BRSSN2012157, BRSSN2012198, BRSSN2012254, BRSSN2012622, BRSSN2012691, BRSSN2012838, BRSSN2013095, BRSSN2013544, BRSSN2013696, BRSSN2013733,

[3251] BRSSN2013753, BRSSN2013874, BRSSN2014112, BRSSN2014294, BRSSN2014424, BRSSN2014513, BRSSN2014556, BRSSN2014573, BRSSN2014636, BRSSN2015199, BRSSN2015369, BRSSN2015493, BRSSN2015497, BRSSN2015554, BRSSN2015707, BRSSN2015773, BRSSN2015907, BRSSN2015982, BRSSN2016589, BRSSN2016768, BRSSN2016905, BRSSN2017297, BRSSN2017422, BRSSN2017530, BRSSN2017682, BRSSN2017757, BRSSN2018218, BRSSN2018440, BRSSN2018731, BRSSN2018771, BRSSN2018925, BRSTN1000097, BRSTN2000070, BRSTN2000220, BRSTN2000312, BRSTN2000367, BRSTN2000536, BRSTN2000872, BRSTN2001613, BRSTN2001801, BRSTN2002105, BRSTN2002400, BRSTN2002532, BRSTN2002691, BRSTN2003590, BRSTN2003835, BRSTN2004863, BRSTN2004987, BRSTN2005721, BRSTN2006306,

[3252] BRSTN2006466, BRSTN2006580, BRSTN2006583, BRSTN2006638, BRSTN2006865, BRSTN2007000, BRSTN2007118, BRSTN2007284, BRSTN2007765, BRSTN2008052, BRSTN2008283, BRSTN2008367, BRSTN2008418, BRSTN2008457, BRSTN2008475, BRSTN2008930, BRSTN2009247, BRSTN2010363, BRSTN2010416, BRSTN2010500, BRSTN2010569, BRSTN2010750, BRSTN2010923, BRSTN2011211, BRSTN2011597, BRSTN2011688, BRSTN2011799, BRSTN2012284, BRSTN2012320, BRSTN2012380, BRSTN2013171, BRSTN2013354, BRSTN2014633, BRSTN2014751, BRSTN2014770, BRSTN2015015, BRSTN2016066, BRSTN2016335, BRSTN2016678, BRSTN2016892, BRSTN2016918, BRSTN2017151, BRSTN2017237, BRSTN2017379, BRSTN2017771, BRSTN2017995, BRSTN2018077, BRSTN2018083, BRSTN2018596, BRSTN2018692,

[3253] BRSTN2018712, BRSTN2019079, BRSTN2019129, BRTHA1000021, BRTHA1000063, BRTHA2000057, BRTHA2000474, BRTHA2000514, BRTHA2000574, BRTHA2000855, BRTHA2000969, BRTHA2000972, BRTHA2001304, BRTHA2001370, BRTHA2001462, BRTHA2001717, BRTHA2001812, BRTHA2002091, BRTHA2002115, BRTHA2002133, BRTHA2002281, BRTHA2002376, BRTHA2002442, BRTHA2002493, BRTHA2002565, BRTHA2002608, BRTHA2002702, BRTHA2002721, BRTHA2002726, BRTHA2002741, BRTHA2002808, BRTHA2002896, BRTHA2002903, BRTHA2003030, BRTHA2003110, BRTHA2003116, BRTHA2003436, BRTHA2003759, BRTHA2003794, BRTHA2004361, BRTHA2004371, BRTHA2004582, BRTHA2004629, BRTHA2004639, BRTHA2004642, BRTHA2004812, BRTHA2004821, BRTHA2004978, BRTHA2004992, BRTHA2005005,

[3254] BRTHA2005448, BRTHA2005579, BRTHA2005831, BRTHA2005942, BRTHA2005956, BRTHA2006075, BRTHA2006146, BRTHA2006194, BRTHA2006232, BRTHA2006720, BRTHA2006735, BRTHA2006974, BRTHA2006975, BRTHA2007060, BRTHA2007122, BRTHA2007422, BRTHA2007603, BRTHA2007665, BRTHA2008316, BRTHA2008502, BRTHA2008513, BRTHA2008527, BRTHA2008535, BRTHA2008598, BRTHA2008669, BRTHA2008955, BRTHA2009311, BRTHA2009349, BRTHA2009486, BRTHA2009803, BRTHA2009846, BRTHA2009972, BRTHA2010008, BRTHA2010033, BRTHA2010073, BRTHA2010097, BRTHA2010191, BRTHA2010397, BRTHA2010608, BRTHA2010672, BRTHA2010884, BRTHA2010907, BRTHA2011062, BRTHA2011194, BRTHA2011321, BRTHA2011351, BRTHA2011500, BRTHA2011641, BRTHA2012129, BRTHA2012183,

[3255] BRTHA2012189, BRTHA2012351, BRTHA2012392, BRTHA2012466, BRTHA2012555, BRTHA2012562, BRTHA2013262, BRTHA2013426, BRTHA2013460, BRTHA2013515, BRTHA2013595, BRTHA2013610, BRTHA2013707, BRTHA2013942, BRTHA2014287, BRTHA2014334, BRTHA2014381, BRTHA2014578, BRTHA2014647, BRTHA2014792, BRTHA2014828, BRTHA2014909, BRTHA2014975, BRTHA2015406, BRTHA2015478, BRTHA2015696, BRTHA2015700, BRTHA2015853, BRTHA2015878, BRTHA2016179, BRTHA2016215, BRTHA2016267, BRTHA2016318, BRTHA2016496, BRTHA2016543, BRTHA2016552, BRTHA2016765, BRTHA2017178, BRTHA2017353, BRTHA2017364, BRTHA2017972, BRTHA2018011, BRTHA2018129, BRTHA2018165, BRTHA2018304, BRTHA2018344, BRTHA2018420, BRTHA2018443, BRTHA2018558, BRTHA2018591,

[3256] BRTHA2018624, BRTHA2018706, BRTHA2019014, BRTHA2019022, BRTHA2019048, BRTHA2019726, BRTHA2019743, BRTHA2020400, BRTHA2020566, BRTHA2020642, BRTHA2020695, BRTHA2020721, BRTHA2020781, BRTHA2020811, BRTHA2020910, BRTHA2021212, BRTHA2021450, BRTHA2022074, BRTHA2022914, BRTHA2022968, BRTHA2023402, BRTHA2023437, BRTHA2024177, BRTHA2024354, BRTHA2024712, BRTHA2025869, BRTHA2026290, BRTHA2026311, BRTHA2027227, BRTHA2027229, BRTHA2027250, BRTHA2027546, BRTHA2028297, BRTHA2029969, BRTHA2030036, BRTHA2030213, BRTHA2031517, BRTHA2031800, BRTHA2031917, BRTHA2032763, BRTHA2032845, BRTHA2033122, BRTHA2033155, BRTHA2033264, BRTHA2033320, BRTHA2033469, BRTHA2033683, BRTHA2034281, BRTHA2034576, BRTHA2034874,

[3257] BRTHA2035448, BRTHA2036055, BRTHA2036295, BRTHA2036660, BRTHA2037247, BRTHA2038279, BRTHA2038345, BRTHA2038353, BRTHA2038396, BRTHA3000252, BRTHA3000296, BRTHA3000297, BRTHA3000325, BRTHA3000456, BRTHA3000633, BRTHA3000789, BRTHA3001221, BRTHA3001623, BRTHA3002265, BRTHA3002401, BRTHA3002411, BRTHA3002933, BRTHA3002955, BRTHA3003000, BRTHA3003023, BRTHA3003074, BRTHA3003225, BRTHA3003339, BRTHA3003343, BRTHA3003449, BRTHA3003474, BRTHA3003704, BRTHA3004432, BRTHA3004475, BRTHA3004502, BRTHA3004610, BRTHA3005046, BRTHA3005735, BRTHA3005988, BRTHA3006318, BRTHA3006593, BRTHA3006856, BRTHA3007113, BRTHA3007130, BRTHA3007148, BRTHA3007319, BRTHA3007469, BRTHA3007532, BRTHA3007662, BRTHA3007685,

[3258] BRTHA3007769, BRTHA3007922, BRTHA3008143, BRTHA3008293, BRTHA3008310, BRTHA3008386, BRTHA3008520, BRTHA3008608, BRTHA3008694, BRTHA3008778, BRTHA3008826, BRTHA3009037, BRTHA3009090, BRTHA3009291, BRTHA3009858, BRTHA3010135, BRTHA3010366, BRTHA3010469, BRTHA3010540, BRTHA3010717, BRTHA3011149, BRTHA3011187, BRTHA3011229, BRTHA3011361, BRTHA3011510, BRTHA3011892, BRTHA3012265, BRTHA3013860, BRTHA3013882, BRTHA3013884, BRTHA3013981, BRTHA3014000, BRTHA3014105, BRTHA3014507, BRTHA3014547, BRTHA3014691, BRTHA3014835, BRTHA3014854, BRTHA3014908, BRTHA3014920, BRTHA3015815, BRTHA3016616, BRTHA3016835, BRTHA3016845, BRTHA3016917, BRTHA3017047, BRTHA3017589, BRTHA3017848, BRTHA3018409, BRTHA3018514,

[3259] BRTHA3018617, BRTHA3018623, BRTHA3018656, BRTHA3019048, BRTHA3019105, BRTHA3019183, BRTHA3020000, BRTHA3020369, BRTHA3021569, BRTHA3021708, BRTHA3021786, BRTHA3023403, BRTHA3023523, BRTHA3023590, BRTHA3023929, BRTHA3024233, BRTHA3024600, BRTHA3025073, BRTHA3025789, BRTHA3025826, BRTHA3026161, BRTHA3026180, BRTHA3026507, BRTHA3026556, BRTHA3026916, BRTHA3027171, BRTHA3027318, BRTHA3027638, BRTHA3027820, BRTHA3027879, BRTHA3027957, BRTHA3028339, BRTHA3028505, BRTHA3028782, CD34C2000051, CD34C2000152, CD34C2000175, CD34C2000443, CD34C3000125, CD34C3000314, CD34C3000424, CD34C3000494, CERVX1000042, CERVX2000812, CERVX2000968, CERVX2002006, CERVX2002013, CERVX2002430, CERVX2002770, CHONS1000058,

[3260] CHONS2000172, CHONS2001287, CHONS2001382, CHONS2001797, CHONS2001834, CHONS2002419, COLON1000030, COLON1000084, COLON1000135, COLON2000470, COLON2000557, COLON2000568, COLON2001721, COLON2001829, COLON2001866, COLON2002520, COLON2003043, COLON2003529, COLON2004318, COLON2004351, COLON2004478, COLON2004911, COLON2005126, COLON2005623, COLON2005735, COLON2005772, COLON2006263, COLON2006282, COLON2006417, COLON2007274, COLON2007733, COLON2008105, COLON2009337, COLON2009499, CORDB1000140, CORDB2000061, CORDB2000127, CORDB2000541, CTONG1000020, CTONG1000022, CTONG1000040, CTONG1000056, CTONG1000062, CTONG1000086, CTONG1000088, CTONG1000093, CTONG1000097, CTONG1000113, CTONG1000137, CTONG1000165,

[3261] CTONG1000180, CTONG1000181, CTONG1000220, CTONG1000277, CTONG1000283, CTONG1000302, CTONG1000341, CTONG1000476, CTONG1000488, CTONG1000508, CTONG1000540, CTONG2000031, CTONG2000034, CTONG2000042, CTONG2000218, CTONG2000279, CTONG2000303, CTONG2000330, CTONG2000395, CTONG2000452, CTONG2000480, CTONG2000589, CTONG2000766, CTONG2000771, CTONG2000819, CTONG2000827, CTONG2000846, CTONG2000855, CTONG2000977, CTONG2001139, CTONG2001226, CTONG2001320, CTONG2001413, CTONG2001513, CTONG2001524, CTONG2001533, CTONG2001598, CTONG2001681, CTONG2001724, CTONG2001749, CTONG2001800, CTONG2001820, CTONG2001877, CTONG2001911, CTONG2001932, CTONG2001955, CTONG2002066, CTONG2002095, CTONG2002143, CTONG2002417,

[3262] CTONG2002418, CTONG2002453, CTONG2002520, CTONG2002558, CTONG2002590, CTONG2002709, CTONG2002766, CTONG2002816, CTONG2002832, CTONG2002841, CTONG2002965, CTONG2002999, CTONG2003028, CTONG2003115, CTONG2003189, CTONG2003245, CTONG2003293, CTONG2003348, CTONG2003350, CTONG2003361, CTONG2003372, CTONG2003375, CTONG2003427, CTONG2003517, CTONG2003599, CTONG2003680, CTONG2003699, CTONG2003764, CTONG2003782, CTONG2003889, CTONG2003937, CTONG2003945, CTONG2004000, CTONG2004062, CTONG2004115, CTONG2004126, CTONG2004264, CTONG2004305, CTONG2004397, CTONG2004454, CTONG2004550, CTONG2004669, CTONG2004716, CTONG2004912, CTONG2004941, CTONG2004948, CTONG2005049, CTONG2005110, CTONG2005145, CTONG2005265,

[3263] CTONG2005290, CTONG2005374, CTONG2005399, CTONG2005567, CTONG2005585, CTONG2005635, CTONG2005775, CTONG2005795, CTONG2005890, CTONG2005904, CTONG2005913, CTONG2006129, CTONG2006223, CTONG2006273, CTONG2006310, CTONG2006393, CTONG2006412, CTONG2006449, CTONG2006515, CTONG2006524, CTONG2006568, CTONG2006611, CTONG2006620, CTONG2006691, CTONG2006836, CTONG2006942, CTONG2006964, CTONG2007009, CTONG2007091, CTONG2007104, CTONG2007175, CTONG2007259, CTONG2007272, CTONG2007293, CTONG2007297, CTONG2007399, CTONG2007474, CTONG2007613, CTONG2007623, CTONG2007681, CTONG2007779, CTONG2007898, CTONG2007959, CTONG2007970, CTONG2008014, CTONG2008184, CTONG2008262, CTONG2008269, CTONG2008321, CTONG2008343,

[3264] CTONG2008402, CTONG2008405, CTONG2008518, CTONG2008521, CTONG2008562, CTONG2008577, CTONG2008595, CTONG2008689, CTONG2008721, CTONG2008773, CTONG2008989, CTONG2009033, CTONG2009108, CTONG2009132, CTONG2009156, CTONG2009181, CTONG2009257, CTONG2009258, CTONG2009268, CTONG2009270, CTONG2009395, CTONG2009423, CTONG2009440, CTONG2009527, CTONG2009529, CTONG2009531, CTONG2009570, CTONG2009572, CTONG2009604, CTONG2009643, CTONG2009675, CTONG2009689, CTONG2009725, CTONG2009766, CTONG2009768, CTONG2009871, CTONG2009887, CTONG2009891, CTONG2009923, CTONG2009955, CTONG2009958, CTONG2010018, CTONG2010024, CTONG2010116, CTONG2010133, CTONG2010148, CTONG2010276, CTONG2010330, CTONG2010508, CTONG2010566,

[3265] CTONG2010623, CTONG2010803, CTONG2011188, CTONG2011429, CTONG2011474, CTONG2011676, CTONG2011716, CTONG2011765, CTONG2011779, CTONG2011815, CTONG2011822, CTONG2011920, CTONG2011985, CTONG2012029, CTONG2012077, CTONG2012101, CTONG2012123, CTONG2012158, CTONG2012230, CTONG2012425, CTONG2012447, CTONG2012473, CTONG2012476, CTONG2012533, CTONG2012554, CTONG2012564, CTONG2012724, CTONG2012738, CTONG2012758, CTONG2012843, CTONG2012879, CTONG2012901, CTONG2013128, CTONG2013149, CTONG2013156, CTONG2013178, CTONG2013222, CTONG2013284, CTONG2013339, CTONG2013352, CTONG2013381, CTONG2013393, CTONG2013511, CTONG2013630, CTONG2013803, CTONG2013985, CTONG2013986, CTONG2014032, CTONG2014058, CTONG2014191,

[3266] CTONG2014206, CTONG2014234, CTONG2014264, CTONG2014369, CTONG2014630, CTONG2014635, CTONG2014646, CTONG2014705, CTONG2014946, CTONG2014959, CTONG2014966, CTONG2014995, CTONG2015204, CTONG2015316, CTONG2015330, CTONG2015358, CTONG2015434, CTONG2015518, CTONG2015540, CTONG2015596, CTONG2015633, CTONG2015717, CTONG2015804, CTONG2015815, CTONG2015866, CTONG2015914, CTONG2015953, CTONG2016217, CTONG2016355, CTONG2016408, CTONG2016499, CTONG2016559, CTONG2016658, CTONG2016775, CTONG2016797, CTONG2016824, CTONG2016846, CTONG2016904, CTONG2016942, CTONG2016953, CTONG2017021, CTONG2017094, CTONG2017292, CTONG2017409, CTONG2017444, CTONG2017458, CTONG2017604, CTONG2017650, CTONG2017804, CTONG2017814,

[3267] CTONG2017910, CTONG2017939, CTONG2017989, CTONG2018062, CTONG2018069, CTONG2018147, CTONG2018217, CTONG2018279, CTONG2018343, CTONG2018379, CTONG2018383, CTONG2018413, CTONG2018483, CTONG2018632, CTONG2018652, CTONG2018653, CTONG2018655, CTONG2018808, CTONG2018900, CTONG2019063, CTONG2019144, CTONG2019232, CTONG2019400, CTONG2019652, CTONG2019833, CTONG2020031, CTONG2020127, CTONG2020171, CTONG2020374, CTONG2020411, CTONG2020445, CTONG2020522, CTONG2020806, CTONG2020831, CTONG2020974, CTONG2021132, CTONG2021168, CTONG2022153, CTONG2022601, CTONG2023021, CTONG2023449, CTONG2023512, CTONG2024206, CTONG2024614, CTONG2024749, CTONG2025496, CTONG2025513, CTONG2025516, CTONG2025610, CTONG2025900,

[3268] CTONG2026513, CTONG2026770, CTONG2026920, CTONG2026987, CTONG2027150, CTONG2027263, CTONG2027361, CTONG2027591, CTONG2027736, CTONG2027783, CTONG2027828, CTONG2027959, CTONG2028097, CTONG2028208, CTONG2028486, CTONG2028518, CTONG2028687, CTONG3000686, CTONG3000707, CTONG3000896, CTONG3001420, CTONG3001501, CTONG3001560, CTONG3001605, CTONG3002020, CTONG3002370, CTONG3002412, CTONG3002433, CTONG3002552, CTONG3002588, CTONG3002728, CTONG3002909, CTONG3002947, CTONG3002983, CTONG3003165, CTONG3003179, CTONG3003483, CTONG3003553, CTONG3003598, CTONG3003652, CTONG3003654, CTONG3003669, CTONG3003737, CTONG3003972, CTONG3004317, CTONG3004397, CTONG3004550, CTONG3004607, CTONG3004712, CTONG3004726,

[3269] CTONG3005325, CTONG3005648, CTONG3005713, CTONG3005803, CTONG3005813, CTONG3006067, CTONG3006073, CTONG3006186, CTONG3006629, CTONG3006650, CTONG3006659, CTONG3007244, CTONG3007444, CTONG3007528, CTONG3007586, CTONG3007870, CTONG3008223, CTONG3008252, CTONG3008258, CTONG3008457, CTONG3008496, CTONG3008566, CTONG3008639, CTONG3008831, CTONG3008951, CTONG3008959, CTONG3009227, CTONG3009239, CTONG3009287, CTONG3009328, CTONG3009385, D3OST1000066, D3OST1000109, D3OST1000238, D3OST1000267, D3OST1000270, D3OST2000184, D3OST2000618, D3OST2000654, D3OST2001328, D3OST2001669, D3OST2002182, D3OST2002223, D3OST2002262, D3OST2002272, D3OST2002417, D3OST2002436, D3OST2002648, D3OST2003024, D3OST2003331,

[3270] D3OST2003607, D3OST2003797, D3OST2004637, D3OST3000169, D3OST3000195, D3OST3000388, D3OST3000493, D6OST2000127, D6OST2000169, D6OST2000245, D6OST2000507, D9OST2000031, D9OST2000278, D9OST2000440, D9OST2000869, D9OST2001319, D9OST2001433, D9OST2002397, D9OST2002673, D9OST2003106, D9OST2003108, D9OST2003137, D9OST2003397, D9OST2003580, D9OST2003594, D9OST2003762, D9OST2003989, D9OST2004018, D9OST2004073, D9OST2004417, DFNES1000003, DFNES1000107, DFNES1000185, DFNES2000143, DFNES2000146, DFNES2000153, DFNES2000212, DFNES2000268, DFNES2000292, DFNES2000335, DFNES2000432, DFNES2000457, DFNES2000471, DFNES2000913, DFNES2001091, DFNES2001096, DFNES2001108, DFNES2001177, DFNES2001564, DFNES2001565,

[3271] DFNES2001647, DFNES2001800, DFNES2001829, DFNES2002220, DFNES2002509, DFNES2002550, DFNES2002588, DFNES2002817, DFNES2002966, DFNES2003081, DFNES2003192, DFNES2003255, DFNES2004354, DFNES2004383, DFNES2004608, DFNES2004684, DFNES2005266, DFNES2005527, DFNES2005779, DFNES2005875, DFNES2006944, DFNES2007299, DFNES2007641, DFNES2007757, DFNES2008280, DFNES2008881, DFNES2010502, DFNES2011192, DFNES2011239, DFNES2011245, DFNES2011380, ERLTF1000021, ERLTF2000324, ERLTF2000465, FCBBF1000023, FCBBF1000069, FCBBF1000117, FCBBF1000118, FCBBF1000121, FCBBF1000125, FCBBF1000131, FCBBF1000155, FCBBF1000157, FCBBF1000171, FCBBF1000174, FCBBF1000182, FCBBF1000198, FCBBF1000206, FCBBF1000220, FCBBF1000232,

[3272] FCBBF1000233, FCBBF1000243, FCBBF1000270, FCBBF1000272, FCBBF1000280, FCBBF1000297, FCBBF1000305, FCBBF1000314, FCBBF1000322, FCBBF1000349, FCBBF1000374, FCBBF1000376, FCBBF1000377, FCBBF1000395, FCBBF1000397, FCBBF1000403, FCBBF1000437, FCBBF1000449, FCBBF1000476, FCBBF1000506, FCBBF1000546, FCBBF1000550, FCBBF1000581, FCBBF1000582, FCBBF1000598, FCBBF1000604, FCBBF1000618, FCBBF1000627, FCBBF1000671, FCBBF1000675, FCBBF1000684, FCBBF1000686, FCBBF1000691, FCBBF1000732, FCBBF1000748, FCBBF2000038, FCBBF2000094, FCBBF2000105, FCBBF2000123, FCBBF2000195, FCBBF2000214, FCBBF2000232, FCBBF2000259, FCBBF2000276, FCBBF2000291, FCBBF2000362, FCBBF2000379, FCBBF2000473, FCBBF2000502, FCBBF2000566,

[3273] FCBBF2000576, FCBBF2000591, FCBBF2000677, FCBBF2000678, FCBBF2000685, FCBBF2000733, FCBBF2000808, FCBBF2000815, FCBBF2000825, FCBBF2000940, FCBBF2000951, FCBBF2001001, FCBBF2001105, FCBBF2001116, FCBBF2001188, FCBBF2001211, FCBBF2001238, FCBBF2001243, FCBBF2001299, FCBBF2001427, FCBBF2001480, FCBBF2001529, FCBBF2001594, FCBBF2001672, FCBBF2001675, FCBBF2001718, FCBBF2001720, FCBBF2001817, FCBBF2001868, FCBBF2002044, FCBBF2002111, FCBBF2002281, FCBBF2002370, FCBBF2002541, FCBBF2002626, FCBBF2002897, FCBBF2002898, FCBBF2002904, FCBBF2002953, FCBBF2003083, FCBBF2003102, FCBBF2003269, FCBBF2003293, FCBBF2003297, FCBBF2003395, FCBBF2003528, FCBBF2003543, FCBBF2003549, FCBBF2003567, FCBBF2003636,

[3274] FCBBF2003823, FCBBF2003895, FCBBF2004066, FCBBF2004090, FCBBF2004138, FCBBF2004217, FCBBF2004256, FCBBF2004373, FCBBF2004448, FCBBF2004671, FCBBF2004707, FCBBF2004788, FCBBF2005069, FCBBF2005122, FCBBF2005428, FCBBF2005439, FCBBF2005538, FCBBF2005637, FCBBF2005645, FCBBF2005658, FCBBF2005733, FCBBF2005966, FCBBF2006131, FCBBF2006380, FCBBF2006418, FCBBF2006452, FCBBF2006634, FCBBF2006781, FCBBF2007012, FCBBF2007186, FCBBF2007265, FCBBF2007302, FCBBF2007610, FCBBF2007633, FCBBF2007840, FCBBF3000102, FCBBF3000120, FCBBF3000168, FCBBF3000175, FCBBF3000227, FCBBF3000229, FCBBF3000233, FCBBF3000269, FCBBF3000361, FCBBF3000367, FCBBF3000388, FCBBF3000462, FCBBF3000473, FCBBF3000501, FCBBF3000518,

[3275] FCBBF3000550, FCBBF3000847, FCBBF3001018, FCBBF3001020, FCBBF3001235, FCBBF3001281, FCBBF3001377, FCBBF3001594, FCBBF3001632, FCBBF3001657, FCBBF3001855, FCBBF3001912, FCBBF3001914, FCBBF3001918, FCBBF3001924, FCBBF3001977, FCBBF3002163, FCBBF3002188, FCBBF3002190, FCBBF3002268, FCBBF3002475, FCBBF3002556, FCBBF3002592, FCBBF3002658, FCBBF3002782, FCBBF3002818, FCBBF3002925, FCBBF3003216, FCBBF3003305, FCBBF3003373, FCBBF3003435, FCBBF3003475, FCBBF3003481, FCBBF3003557, FCBBF3003787, FCBBF3003902, FCBBF3004021, FCBBF3004041, FCBBF3004261, FCBBF3004323, FCBBF3004390, FCBBF3004409, FCBBF3004502, FCBBF3004842, FCBBF3004847, FCBBF3004955, FCBBF3005160, FCBBF3005218, FCBBF3005444, FCBBF3005698,

[3276] FCBBF3005729, FCBBF3006171, FCBBF3006249, FCBBF3006288, FCBBF3006399, FCBBF3006628, FCBBF3007077, FCBBF3007150, FCBBF3007152, FCBBF3007242, FCBBF3007248, FCBBF3007453, FCBBF3007462, FCBBF3007540, FCBBF3007597, FCBBF3007604, FCBBF3007631, FCBBF3007829, FCBBF3007855, FCBBF3007859, FCBBF3007860, FCBBF3008073, FCBBF3008100, FCBBF3008159, FCBBF3008251, FCBBF3008311, FCBBF3008362, FCBBF3008475, FCBBF3008556, FCBBF3008644, FCBBF3008689, FCBBF3008748, FCBBF3008870, FCBBF3008938, FCBBF3008944, FCBBF3009069, FCBBF3009101, FCBBF3009152, FCBBF3009317, FCBBF3009428, FCBBF3009464, FCBBF3009479, FCBBF3009526, FCBBF3009703, FCBBF3009717, FCBBF3009888, FCBBF3009949, FCBBF3009978, FCBBF3010008, FCBBF3010012,

[3277] FCBBF3010124, FCBBF3010130, FCBBF3010142, FCBBF3010149, FCBBF3010211, FCBBF3010361, FCBBF3010508, FCBBF3010544, FCBBF3010586, FCBBF3010601, FCBBF3010729, FCBBF3010733, FCBBF3011003, FCBBF3011418, FCBBF3011485, FCBBF3011570, FCBBF3011592, FCBBF3011867, FCBBF3011889, FCBBF3012170, FCBBF3012182, FCBBF3012288, FCBBF3012332, FCBBF3012443, FCBBF3012588, FCBBF3012667, FCBBF3012842, FCBBF3012901, FCBBF3013041, FCBBF3013058, FCBBF3013205, FCBBF3013307, FCBBF3013341, FCBBF3013506, FCBBF3013589, FCBBF3013623, FCBBF3013800, FCBBF3013846, FCBBF3014229, FCBBF3014260, FCBBF3014355, FCBBF3014567, FCBBF3014770, FCBBF3015100, FCBBF3015119, FCBBF3015131, FCBBF3015317, FCBBF3015727, FCBBF3015758, FCBBF3015809,

[3278] FCBBF3015870, FCBBF3016018, FCBBF3016134, FCBBF3016178, FCBBF3016451, FCBBF3016618, FCBBF3016622, FCBBF3016644, FCBBF3016987, FCBBF3017059, FCBBF3017071, FCBBF3017123, FCBBF3017233, FCBBF3017255, FCBBF3017288, FCBBF3017396, FCBBF3017535, FCBBF3017681, FCBBF3017729, FCBBF3017873, FCBBF3017974, FCBBF3018067, FCBBF3018173, FCBBF3018453, FCBBF3018591, FCBBF3018753, FCBBF3018826, FCBBF3018949, FCBBF3019085, FCBBF3019437, FCBBF3019455, FCBBF3019564, FCBBF3019569, FCBBF3019570, FCBBF3019663, FCBBF3019714, FCBBF3019716, FCBBF3019784, FCBBF3019867, FCBBF3019961, FCBBF3020030, FCBBF3020138, FCBBF3020163, FCBBF3020232, FCBBF3020599, FCBBF3021026, FCBBF3021191, FCBBF3021221, FCBBF3021501, FCBBF3021506,

[3279] FCBBF3021524, FCBBF3021807, FCBBF3021940, FCBBF3021985, FCBBF3022005, FCBBF3022291, FCBBF3022311, FCBBF3022566, FCBBF3022765, FCBBF3022894, FCBBF3023061, FCBBF3023078, FCBBF3023372, FCBBF3023443, FCBBF3023599, FCBBF3023704, FCBBF3023887, FCBBF3023895, FCBBF3024096, FCBBF3024225, FCBBF3024266, FCBBF3024364, FCBBF3024623, FCBBF3024911, FCBBF3025098, FCBBF3025252, FCBBF3025280, FCBBF3025285, FCBBF3025417, FCBBF3025528, FCBBF3025568, FCBBF3025650, FCBBF3025674, FCBBF3025730, FCBBF3026021, FCBBF3026048, FCBBF3026251, FCBBF3026678, FCBBF3026692, FCBBF3027104, FCBBF3027199, FCBBF3027328, FCBBF3027559, FCBBF3027717, FCBBF3027755, FCBBF3027768, FCBBF3027854, FCBBF3027863, FCBBF3027903, FCBBF3028102,

[3280] FCBBF3028143, FCBBF3028188, FCBBF3028472, FCBBF3028528, FCBBF3028582, FCBBF3028671, FCBBF3028794, FCBBF4000061, FCBBF4000076, FCBBF4000142, FCBBF4000173, FCBBF4000192, FCBBF4000193, FCBBF4000268, FCBBF4000282, FCBBF4000399, FCBBF4000415, FCBBF4000500, FCBBF4000529, FCBBF5000041, FCBBF5000061, FCBBF5000165, FCBBF5000325, FCBBF5000353, FCBBF5000384, FCBBF5000483, FCBBF5000495, FEBRA1000005, FEBRA1000008, FEBRA1000022, FEBRA1000030, FEBRA1000088, FEBRA1000138, FEBRA1000148, FEBRA1000149, FEBRA1000183, FEBRA1000188, FEBRA1000189, FEBRA1000190, FEBRA2000007, FEBRA2000021, FEBRA2000035, FEBRA2000053, FEBRA2000126, FEBRA2000220, FEBRA2000282, FEBRA2000286, FEBRA2000297, FEBRA2000311, FEBRA2000321,

[3281] FEBRA2000333, FEBRA2000378, FEBRA2000391, FEBRA2000394, FEBRA2000397, FEBRA2000399, FEBRA2000404, FEBRA2000409, FEBRA2000415, FEBRA2000436, FEBRA2000462, FEBRA2000468, FEBRA2000491, FEBRA2000504, FEBRA2000538, FEBRA2000575, FEBRA2000581, FEBRA2000656, FEBRA2000659, FEBRA2000680, FEBRA2000690, FEBRA2000727, FEBRA2000734, FEBRA2000762, FEBRA2000771, FEBRA2000772, FEBRA2000782, FEBRA2000790, FEBRA2000793, FEBRA2000803, FEBRA2000805, FEBRA2000809, FEBRA2000856, FEBRA2000862, FEBRA2000877, FEBRA2000880, FEBRA2000901, FEBRA2000909, FEBRA2000917, FEBRA2000928, FEBRA2000936, FEBRA2000937, FEBRA2000959, FEBRA2000972, FEBRA2001004, FEBRA2001012, FEBRA2001020, FEBRA2001093, FEBRA2001124, FEBRA2001133,

[3282] FEBRA2001161, FEBRA2001175, FEBRA2001197, FEBRA2001217, FEBRA2001245, FEBRA2001267, FEBRA2001334, FEBRA2001351, FEBRA2001383, FEBRA2001438, FEBRA2001440, FEBRA2001487, FEBRA2001561, FEBRA2001584, FEBRA2001590, FEBRA2001591, FEBRA2001610, FEBRA2001620, FEBRA2001659, FEBRA2001705, FEBRA2001706, FEBRA2001752, FEBRA2001772, FEBRA2001790, FEBRA2001914, FEBRA2002009, FEBRA2002027, FEBRA2002086, FEBRA2002109, FEBRA2002191, FEBRA2002260, FEBRA2002399, FEBRA2002410, FEBRA2002442, FEBRA2002508, FEBRA2002525, FEBRA2002527, FEBRA2002552, FEBRA2002611, FEBRA2002628, FEBRA2002662, FEBRA2002682, FEBRA2002727, FEBRA2002781, FEBRA2002783, FEBRA2002818, FEBRA2002858, FEBRA2002882, FEBRA2002897, FEBRA2002908,

[3283] FEBRA2002931, FEBRA2002962, FEBRA2002986, FEBRA2003054, FEBRA2003100, FEBRA2003128, FEBRA2003155, FEBRA2003163, FEBRA2003198, FEBRA2003253, FEBRA2003275, FEBRA2003308, FEBRA2003327, FEBRA2003429, FEBRA2003454, FEBRA2003468, FEBRA2003470, FEBRA2003520, FEBRA2003524, FEBRA2003541, FEBRA2003675, FEBRA2003707, FEBRA2003711, FEBRA2003822, FEBRA2003897, FEBRA2003907, FEBRA2004023, FEBRA2004026, FEBRA2004029, FEBRA2004053, FEBRA2004056, FEBRA2004091, FEBRA2004110, FEBRA2004191, FEBRA2004202, FEBRA2004219, FEBRA2004224, FEBRA2004237, FEBRA2004268, FEBRA2004325, FEBRA2004329, FEBRA2004412, FEBRA2004443, FEBRA2004490, FEBRA2004538, FEBRA2004592, FEBRA2004620, FEBRA2004651, FEBRA2004767, FEBRA2004813,

[3284] FEBRA2004840, FEBRA2004852, FEBRA2004867, FEBRA2004914, FEBRA2004933, FEBRA2004987, FEBRA2005014, FEBRA2005036, FEBRA2005079, FEBRA2005216, FEBRA2005377, FEBRA2005380, FEBRA2005427, FEBRA2005458, FEBRA2005701, FEBRA2005726, FEBRA2005752, FEBRA2005788, FEBRA2005998, FEBRA2006055, FEBRA2006061, FEBRA2006112, FEBRA2006150, FEBRA2006165, FEBRA2006315, FEBRA2006346, FEBRA2006354, FEBRA2006370, FEBRA2006379, FEBRA2006396, FEBRA2006409, FEBRA2006418, FEBRA2006427, FEBRA2006476, FEBRA2006519, FEBRA2006521, FEBRA2006627, FEBRA2006664, FEBRA2006667, FEBRA2006726, FEBRA2006736, FEBRA2006793, FEBRA2006817, FEBRA2006890, FEBRA2006942, FEBRA2006977, FEBRA2007017, FEBRA2007176, FEBRA2007200, FEBRA2007247,

[3285] FEBRA2007280, FEBRA2007414, FEBRA2007436, FEBRA2007449, FEBRA2007458, FEBRA2007534, FEBRA2007551, FEBRA2007566, FEBRA2007589, FEBRA2007620, FEBRA2007708, FEBRA2007714, FEBRA2007793, FEBRA2007818, FEBRA2007823, FEBRA2007931, FEBRA2007957, FEBRA2008009, FEBRA2008086, FEBRA2008134, FEBRA2008135, FEBRA2008159, FEBRA2008165, FEBRA2008172, FEBRA2008210, FEBRA2008255, FEBRA2008265, FEBRA2008282, FEBRA2008311, FEBRA2008360, FEBRA2008459, FEBRA2008468, FEBRA2008475, FEBRA2008481, FEBRA2008542, FEBRA2008660, FEBRA2008681, FEBRA2008741, FEBRA2008836, FEBRA2008859, FEBRA2008861, FEBRA2008866, FEBRA2008881, FEBRA2008928, FEBRA2008983, FEBRA2009016, FEBRA2009022, FEBRA2009029, FEBRA2009074, FEBRA2009117,

[3286] FEBRA2009120, FEBRA2009162, FEBRA2009240, FEBRA2009265, FEBRA2009276, FEBRA2009289, FEBRA2009327, FEBRA2009328, FEBRA2009352, FEBRA2009362, FEBRA2009385, FEBRA2009416, FEBRA2009437, FEBRA2009478, FEBRA2009507, FEBRA2009541, FEBRA2009567, FEBRA2009588, FEBRA2009731, FEBRA2009754, FEBRA2009846, FEBRA2010141, FEBRA2010299, FEBRA2010484, FEBRA2010719, FEBRA2010746, FEBRA2010768, FEBRA2010802, FEBRA2011063, FEBRA2011356, FEBRA2011392, FEBRA2011414, FEBRA2011593, FEBRA2011665, FEBRA2012090, FEBRA2012195, FEBRA2012397, FEBRA2012418, FEBRA2012507, FEBRA2012625, FEBRA2013019, FEBRA2013069, FEBRA2013274, FEBRA2013465, FEBRA2013570, FEBRA2013905, FEBRA2013951, FEBRA2014122, FEBRA2014198, FEBRA2014443,

[3287] FEBRA2014939, FEBRA2015076, FEBRA2015175, FEBRA2015292, FEBRA2015588, FEBRA2016112, FEBRA2016398, FEBRA2016583, FEBRA2016621, FEBRA2016654, FEBRA2016739, FEBRA2017098, FEBRA2017138, FEBRA2017154, FEBRA2017200, FEBRA2017223, FEBRA2017333, FEBRA2017502, FEBRA2017533, FEBRA2017736, FEBRA2017780, FEBRA2017811, FEBRA2017850, FEBRA2018051, FEBRA2018203, FEBRA2018407, FEBRA2018433, FEBRA2019172, FEBRA2019298, FEBRA2019389, FEBRA2019457, FEBRA2019519, FEBRA2019582, FEBRA2019637, FEBRA2019711, FEBRA2019867, FEBRA2020406, FEBRA2020566, FEBRA2020582, FEBRA2020668, FEBRA2020801, FEBRA2020845, FEBRA2020886, FEBRA2020977, FEBRA2021134, FEBRA2021171, FEBRA2021339, FEBRA2021431, FEBRA2021497, FEBRA2021550,

[3288] FEBRA2021571, FEBRA2021636, FEBRA2021864, FEBRA2021892, FEBRA2021908, FEBRA2021966, FEBRA2022013, FEBRA2022055, FEBRA2022148, FEBRA2022204, FEBRA2022255, FEBRA2022322, FEBRA2022601, FEBRA2022696, FEBRA2022729, FEBRA2022787, FEBRA2022911, FEBRA2022956, FEBRA2022963, FEBRA2022972, FEBRA2023285, FEBRA2023351, FEBRA2023377, FEBRA2023399, FEBRA2023498, FEBRA2023550, FEBRA2023721, FEBRA2023989, FEBRA2023990, FEBRA2024150, FEBRA2024343, FEBRA2024570, FEBRA2024693, FEBRA2024727, FEBRA2024744, FEBRA2024797, FEBRA2024987, FEBRA2025249, FEBRA2025463, FEBRA2025477, FEBRA2026474, FEBRA2026582, FEBRA2026629, FEBRA2026769, FEBRA2026879, FEBRA2026890, FEBRA2026977, FEBRA2026984, FEBRA2027082, FEBRA2027297,

[3289] FEBRA2027352, FEBRA2027364, FEBRA2027609, FEBRA2028222, FEBRA2028366, FEBRA2028457, FEBRA2028477, FEBRA2028503, FEHRT2000325, FEHRT2000364, FELNG2000241, HCASM1000021, HCASM1000050, HCASM1000061, HCASM1000130, HCASM2000156, HCASM2000202, HCASM2000214, HCASM2000266, HCASM2000307, HCASM2000534, HCASM2000536, HCASM2000560, HCASM2000871, HCASM2001285, HCASM2001810, HCASM2001866, HCASM2001890, HCASM2002148, HCASM2002502, HCASM2002754, HCASM2002918, HCASM2003076, HCASM2003099, HCASM2003212, HCASM2003237, HCASM2003357, HCASM2003415, HCASM2005484, HCASM2006131, HCASM2006338, HCASM2006359, HCASM2006632, HCASM2007047, HCASM2007317, HCASM2007737, HCASM2007773, HCASM2008154, HCASM2008536, HCASM2009405,

[3290] HCASM2009424, HCASM2009463, HCASM2009588, HCHON1000015, HCHON1000131, HCHON1000142, HCHON1000176, HCHON1000191, HCHON2000038, HCHON2000100, HCHON2000156, HCHON2000199, HCHON2000212, HCHON2000244, HCHON2000271, HCHON2000315, HCHON2000322, HCHON2000344, HCHON2000373, HCHON2000395, HCHON2000417, HCHON2000418, HCHON2000475, HCHON2000503, HCHON2000660, HCHON2000663, HCHON2000673, HCHON2000676, HCHON2000705, HCHON2000815, HCHON2000817, HCHON2000818, HCHON2000819, HCHON2000851, HCHON2000898, HCHON2000935, HCHON2000942, HCHON2000956, HCHON2000994, HCHON2001050, HCHON2001099, HCHON2001108, HCHON2001110, HCHON2001116, HCHON2001161, HCHON2001214, HCHON2001233, HCHON2001269, HCHON2001407, HCHON2001450,

[3291] HCHON2001453, HCHON2001497, HCHON2001505, HCHON2001519, HCHON2001523, HCHON2001535, HCHON2001546, HCHON2001548, HCHON2001577, HCHON2001598, HCHON2001604, HCHON2001607, HCHON2001646, HCHON2001768, HCHON2001801, HCHON2002123, HCHON2002194, HCHON2002241, HCHON2002496, HCHON2002676, HCHON2002770, HCHON2002964, HCHON2003131, HCHON2003134, HCHON2003327, HCHON2003513, HCHON2003532, HCHON2003642, HCHON2003659, HCHON2003676, HCHON2004007, HCHON2004279, HCHON2004359, HCHON2004531, HCHON2004776, HCHON2004858, HCHON2005048, HCHON2005118, HCHON2005166, HCHON2005802, HCHON2005921, HCHON2006714, HCHON2006722, HCHON2006770, HCHON2006786, HCHON2006841, HCHON2006871, HCHON2007046, HCHON2007482, HCHON2007674,

[3292] HCHON2007774, HCHON2007881, HCHON2008112, HCHON2008239, HCHON2008444, HCHON2008582, HCHON2008672, HCHON2008871, HCHON2008989, HCHON2009191, HCHON2009384, HCHON2009749, HCHON2009766, HCHON2009795, HCHON2010074, HCHON2010543, HEART1000010, HEART1000088, HEART1000099, HEART1000102, HEART1000118, HEART1000132, HEART1000139, HEART1000142, HEART1000151, HEART1000173, HEART1000185, HEART2000024, HEART2000035, HEART2000099, HEART2000298, HEART2000306, HEART2000309, HEART2000411, HEART2000418, HEART2000444, HEART2000448, HEART2000492, HEART2000520, HEART2000541, HEART2000568, HEART2000611, HEART2000959, HEART2001680, HEART2001756, HEART2002129, HEART2002184, HEART2002220, HEART2002432, HEART2002531,

[3293] HEART2002598, HEART2002717, HEART2003027, HEART2003168, HEART2003432, HEART2003440, HEART2003781, HEART2003836, HEART2003852, HEART2004570, HEART2004764, HEART2004931, HEART2004940, HEART2004941, HEART2004980, HEART2005244, HEART2005310, HEART2005581, HEART2005610, HEART2006131, HEART2006310, HEART2006334, HEART2006487, HEART2006557, HEART2006787, HEART2006789, HEART2006909, HEART2007031, HEART2007443, HEART2007696, HEART2007767, HEART2008108, HEART2008111, HEART2008257, HEART2008509, HEART2008994, HEART2009000, HEART2009599, HEART2009680, HEART2010391, HEART2010492, HEART2010495, HELAC2000158, HELAC2000301, HHDPC1000001, HHDPC1000114, HHDPC1000118, HHDPC2000102, HHDPC2000115, HHDPC2000258,

[3294] HHDPC2000315, HHDPC2000462, HHDPC2000656, HHDPC2000692, HHDPC2001337, HHDPC2001432, HHDPC2001896, HHDPC2002963, HHDPC2003049, HHDPC2003113, HHDPC2003381, HHDPC2003472, HHDPC2004757, HHDPC2005185, HHDPC2005513, HHDPC2005794, HHDPC2006460, HHDPC2006862, HHDPC2006927, HHDPC2007302, HHDPC2007775, HHDPC2008185, HHDPC2008279, HHDPC2008297, HHDPC2008414, HHDPC2008474, HHDPC2008816, HHDPC2008843, HHDPC2009114, HHDPC2009178, HHDPC2009208, HHDPC2009528, HLUNG1000017, HLUNG1000024, HLUNG1000030, HLUNG1000034, HLUNG1000053, HLUNG1000064, HLUNG1000084, HLUNG1000091, HLUNG1000104, HLUNG1000105, HLUNG1000110, HLUNG1000151, HLUNG1000169, HLUNG2000014, HLUNG2000027, HLUNG2000068, HLUNG2000116, HLUNG2000130,

[3295] HLUNG2000142, HLUNG2000174, HLUNG2000217, HLUNG2000232, HLUNG2000255, HLUNG2000281, HLUNG2000314, HLUNG2000315, HLUNG2000340, HLUNG2000362, HLUNG2000363, HLUNG2000431, HLUNG2000480, HLUNG2000489, HLUNG2000501, HLUNG2000549, HLUNG2000557, HLUNG2000570, HLUNG2000761, HLUNG2000777, HLUNG2000870, HLUNG2000926, HLUNG2000955, HLUNG2000970, HLUNG2001013, HLUNG2001126, HLUNG2001144, HLUNG2001214, HLUNG2001459, HLUNG2001507, HLUNG2001814, HLUNG2001996, HLUNG2002006, HLUNG2002050, HLUNG2002085, HLUNG2002145, HLUNG2002295, HLUNG2002303, HLUNG2002334, HLUNG2002405, HLUNG2002429, HLUNG2002562, HLUNG2002659, HLUNG2002707, HLUNG2002811, HLUNG2002916, HLUNG2002942, HLUNG2002949, HLUNG2002958, HLUNG2002982,

[3296] HLUNG2003049, HLUNG2003061, HLUNG2003162, HLUNG2003246, HLUNG2003331, HLUNG2003335, HLUNG2003691, HLUNG2003710, HLUNG2003714, HLUNG2003716, HLUNG2003778, HLUNG2003833, HLUNG2003872, HLUNG2003918, HLUNG2003991, HLUNG2004014, HLUNG2004037, HLUNG2004067, HLUNG2004170, HLUNG2004217, HLUNG2004273, HLUNG2004388, HLUNG2004416, HLUNG2004521, HLUNG2004684, HLUNG2004707, HLUNG2004774, HLUNG2004775, HLUNG2005012, HLUNG2005030, HLUNG2005045, HLUNG2005076, HLUNG2005133, HLUNG2005230, HLUNG2005479, HLUNG2005524, HLUNG2005656, HLUNG2005738, HLUNG2005774, HLUNG2005813, HLUNG2005924, HLUNG2006026, HLUNG2006067, HLUNG2006094, HLUNG2006397, HLUNG2006599, HLUNG2006614, HLUNG2006671, HLUNG2006781, HLUNG2006843,

[3297] HLUNG2006852, HLUNG2006935, HLUNG2007041, HLUNG2007163, HLUNG2007210, HLUNG2007245, HLUNG2007433, HLUNG2007931, HLUNG2008066, HLUNG2008139, HLUNG2008225, HLUNG2008235, HLUNG2008247, HLUNG2008333, HLUNG2008348, HLUNG2008384, HLUNG2008396, HLUNG2008439, HLUNG2008479, HLUNG2008480, HLUNG2008521, HLUNG2008833, HLUNG2008875, HLUNG2008885, HLUNG2008958, HLUNG2008959, HLUNG2009067, HLUNG2009215, HLUNG2009253, HLUNG2009303, HLUNG2009413, HLUNG2009729, HLUNG2010181, HLUNG2010464, HLUNG2010562, HLUNG2010845, HLUNG2011041, HLUNG2011298, HLUNG2011461, HLUNG2012049, HLUNG2012287, HLUNG2012315, HLUNG2012546, HLUNG2012600, HLUNG2012727, HLUNG2013097, HLUNG2013204, HLUNG2013304, HLUNG2013350, HLUNG2013622,

[3298] HLUNG2013643, HLUNG2013784, HLUNG2013851, HLUNG2014262, HLUNG2014288, HLUNG2014449, HLUNG2015548, HLUNG2015578, HLUNG2015617, HLUNG2016022, HLUNG2016862, HLUNG2017286, HLUNG2017307, HLUNG2017350, HLUNG2017806, HLUNG2018029, HLUNG2018282, HLUNG2018626, HLUNG2019058, HSYRA1000131, HSYRA1000137, HSYRA1000148, HSYRA2000135, HSYRA2000137, HSYRA2000190, HSYRA2000221, HSYRA2000237, HSYRA2000332, HSYRA2000371, HSYRA2000507, HSYRA2000510, HSYRA2000605, HSYRA2000706, HSYRA2000760, HSYRA2000792, HSYRA2000832, HSYRA2000927, HSYRA2001003, HSYRA2001142, HSYRA2001153, HSYRA2001232, HSYRA2001255, HSYRA2001332, HSYRA2001484, HSYRA2001552, HSYRA2001574, HSYRA2001580, HSYRA2001615, HSYRA2001631, HSYRA2002103,

[3299] HSYRA2002590, HSYRA2002741, HSYRA2003168, HSYRA2004550, HSYRA2004858, HSYRA2005456, HSYRA2005496, HSYRA2005628, HSYRA2005970, HSYRA2006049, HSYRA2006873, HSYRA2007241, HSYRA2007338, HSYRA2007650, HSYRA2007667, HSYRA2008154, HSYRA2008714, HSYRA2009102, IMR321000155, IMR321000158, IMR321000165, IMR321000193, IMR321000207, IMR321000230, IMR321000242, IMR322000010, IMR322000072, IMR322000107, IMR322000144, IMR322000152, IMR322000164, IMR322000302, IMR322000379, IMR322000383, IMR322000418, IMR322000518, IMR322000555, IMR322000604, IMR322000609, IMR322000656, IMR322000672, IMR322000742, IMR322000775, IMR322000791, IMR322000811, IMR322000819, IMR322000838, IMR322000859, IMR322000863, IMR322000917,

[3300] IMR322000919, IMR322000953, IMR322000984, IMR322001018, IMR322001049, IMR322001167, IMR322001185, IMR322001218, IMR322001245, IMR322001317, IMR322001318, IMR322001322, IMR322001332, IMR322001380, IMR322001438, IMR322001452, IMR322001491, IMR322001534, IMR322001665, IMR322001670, IMR322001724, IMR322001879, IMR322002035, IMR322002110, IMR322002470, IMR322002993, IMR322003675, IMR322004768, IMR322005293, IMR322005833, IMR322006012, IMR322006222, IMR322006495, IMR322006520, IMR322006886, IMR322006947, IMR322007078, IMR322007225, IMR322007704, IMR322008651, IMR322009710, IMR322009807, IMR322010295, IMR322010953, IMR322011689, IMR322012314, IMR322012529, IMR322013053, IMR322013396, IMR322013731,

[3301] IMR322015523, IMR322016146, IMR322017049, IMR322018117, IMR322018192, KIDNE1000008, KIDNE1000012, KIDNE1000015, KIDNE1000028, KIDNE1000036, KIDNE1000064, KIDNE1000121, KIDNE1000143, KIDNE1000152, KIDNE2000026, KIDNE2000041, KIDNE2000046, KIDNE2000051, KIDNE2000070, KIDNE2000167, KIDNE2000174, KIDNE2000192, KIDNE2000227, KIDNE2000244, KIDNE2000245, KIDNE2000287, KIDNE2000315, KIDNE2000317, KIDNE2000328, KIDNE2000330, KIDNE2000335, KIDNE2000375, KIDNE2000394, KIDNE2000422, KIDNE2000493, KIDNE2000497, KIDNE2000510, KIDNE2000513, KIDNE2000519, KIDNE2000555, KIDNE2000624, KIDNE2000665, KIDNE2000678, KIDNE2000717, KIDNE2000721, KIDNE2000722, KIDNE2000777, KIDNE2000801, KIDNE2000832, KIDNE2000833,

[3302] KIDNE2000846, KIDNE2000867, KIDNE2000909, KIDNE2001117, KIDNE2001140, KIDNE2001269, KIDNE2001373, KIDNE2001802, KIDNE2001840, KIDNE2001857, KIDNE2001873, KIDNE2001897, KIDNE2001931, KIDNE2001979, KIDNE2002015, KIDNE2002162, KIDNE2002168, KIDNE2002191, KIDNE2002198, KIDNE2002262, KIDNE2002265, KIDNE2002438, KIDNE2002483, KIDNE2002768, KIDNE2002795, KIDNE2002798, KIDNE2002839, KIDNE2002845, KIDNE2002872, KIDNE2002882, KIDNE2002980, KIDNE2002991, KIDNE2003185, KIDNE2003188, KIDNE2003233, KIDNE2003335, KIDNE2003377, KIDNE2003507, KIDNE2003752, KIDNE2003764, KIDNE2003837, KIDNE2004034, KIDNE2004054, KIDNE2004084, KIDNE2004095, KIDNE2004115, KIDNE2004233, KIDNE2004262, KIDNE2004279, KIDNE2004294,

[3303] KIDNE2004305, KIDNE2004394, KIDNE2004519, KIDNE2004520, KIDNE2004562, KIDNE2004579, KIDNE2004626, KIDNE2004681, KIDNE2004828, KIDNE2004846, KIDNE2004879, KIDNE2004981, KIDNE2004985, KIDNE2004999, KIDNE2005038, KIDNE2005042, KIDNE2005062, KIDNE2005266, KIDNE2005296, KIDNE2005321, KIDNE2005327, KIDNE2005336, KIDNE2005400, KIDNE2005424, KIDNE2005477, KIDNE2005526, KIDNE2005543, KIDNE2005603, KIDNE2005629, KIDNE2005781, KIDNE2005798, KIDNE2005854, KIDNE2005908, KIDNE2005937, KIDNE2006030, KIDNE2006039, KIDNE2006053, KIDNE2006062, KIDNE2006092, KIDNE2006145, KIDNE2006149, KIDNE2006210, KIDNE2006299, KIDNE2006334, KIDNE2006376, KIDNE2006378, KIDNE2006580, KIDNE2006687, KIDNE2006733, KIDNE2006760,

[3304] KIDNE2006820, KIDNE2007005, KIDNE2007040, KIDNE2007077, KIDNE2007186, KIDNE2007222, KIDNE2007356, KIDNE2007422, KIDNE2007569, KIDNE2007810, KIDNE2007811, KIDNE2007910, KIDNE2007944, KIDNE2008022, KIDNE2008069, KIDNE2008072, KIDNE2008116, KIDNE2008117, KIDNE2008218, KIDNE2008315, KIDNE2008362, KIDNE2008378, KIDNE2008404, KIDNE2008446, KIDNE2008473, KIDNE2008480, KIDNE2008649, KIDNE2008666, KIDNE2008697, KIDNE2008758, KIDNE2008788, KIDNE2008795, KIDNE2008824, KIDNE2008832, KIDNE2008869, KIDNE2008914, KIDNE2008975, KIDNE2009019, KIDNE2009109, KIDNE2009180, KIDNE2009191, KIDNE2009332, KIDNE2009426, KIDNE2009467, KIDNE2009490, KIDNE2009553, KIDNE2009628, KIDNE2009647, KIDNE2009676, KIDNE2009723,

[3305] KIDNE2010007, KIDNE2010052, KIDNE2010084, KIDNE2010137, KIDNE2010151, KIDNE2010264, KIDNE2010265, KIDNE2010271, KIDNE2010419, KIDNE2010430, KIDNE2010574, KIDNE2010674, KIDNE2010739, KIDNE2010750, KIDNE2010762, KIDNE2010863, KIDNE2010973, KIDNE2010989, KIDNE2011200, KIDNE2011314, KIDNE2011508, KIDNE2011532, KIDNE2011752, KIDNE2011782, KIDNE2011858, KIDNE2012009, KIDNE2012025, KIDNE2012188, KIDNE2012291, KIDNE2012316, KIDNE2012361, KIDNE2012453, KIDNE2012563, KIDNE2012601, KIDNE2012613, KIDNE2012745, KIDNE2012775, KIDNE2012784, KIDNE2012945, KIDNE2013045, KIDNE2013095, KIDNE2013218, KIDNE2013263, KIDNE2013346, KIDNE2013388, KIDNE2013413, KIDNE2013489, KIDNE2013639, KIDNE2013731, KIDNE2013734,

[3306] KIDNE2013775, KIDNE2013801, KIDNE2013866, KIDNE2014087, KIDNE2014112, KIDNE2014119, KIDNE2014170, KIDNE2014184, KIDNE2014268, KIDNE2014298, KIDNE2014320, KIDNE2014415, KIDNE2014489, KIDNE2014496, KIDNE2014661, KIDNE2014717, KIDNE2014789, KIDNE2014890, KIDNE2014978, KIDNE2015073, KIDNE2015221, KIDNE2015244, KIDNE2015313, KIDNE2015433, KIDNE2015483, KIDNE2015515, KIDNE2015556, KIDNE2015660, KIDNE2015710, KIDNE2015987, KIDNE2016000, KIDNE2016036, KIDNE2016096, KIDNE2016101, KIDNE2016142, KIDNE2016188, KIDNE2016388, KIDNE2016464, KIDNE2016539, KIDNE2016570, KIDNE2016918, KIDNE2017007, KIDNE2017151, KIDNE2017153, KIDNE2017315, KIDNE2017332, KIDNE2017343, KIDNE2017454, KIDNE2017603, KIDNE2017956,

[3307] KIDNE2018071, KIDNE2018166, KIDNE2018167, KIDNE2018217, KIDNE2018254, KIDNE2018268, KIDNE2018269, KIDNE2018287, KIDNE2018294, KIDNE2018462, KIDNE2018617, KIDNE2018678, KIDNE2018727, KIDNE2018863, KIDNE2018989, KIDNE2018996, KIDNE2019074, KIDNE2019187, LIVER1000050, LIVER1000055, LIVER1000058, LIVER1000063, LIVER1000073, LIVER1000082, LIVER1000099, LIVER1000126, LIVER1000139, LIVER1000155, LIVER1000165, LIVER1000175, LIVER1000224, LIVER1000278, LIVER1000397, LIVER1000421, LIVER1000433, LIVER1000479, LIVER1000482, LIVER1000542, LIVER2000003, LIVER2000033, LIVER2000158, LIVER2000216, LIVER2000237, LIVER2000247, LIVER2000360, LIVER2000416, LIVER2000446, LIVER2000515, LIVER2000592, LIVER2000626,

[3308] LIVER2000682, LIVER2000769, LIVER2000775, LIVER2001051, LIVER2001076, LIVER2001099, LIVER2001113, LIVER2001164, LIVER2001191, LIVER2001265, LIVER2001329, LIVER2001389, LIVER2001461, LIVER2001835, LIVER2002638, LIVER2002644, LIVER2002660, LIVER2002702, LIVER2003008, LIVER2003234, LIVER2003511, LIVER2003524, LIVER2003568, LIVER2003581, LIVER2003800, LIVER2003854, LIVER2004074, LIVER2004392, LIVER2004565, LIVER2005028, LIVER2005198, LIVER2005218, LIVER2005376, LIVER2005385, LIVER2005512, LIVER2005520, LIVER2005527, LIVER2005544, LIVER2005625, LIVER2005728, LIVER2005973, LIVER2005981, LIVER2006251, LIVER2006410, LIVER2006469, LIVER2006644, LIVER2006764, LIVER2007415, LIVER2007548, LIVER2007568,

[3309] LIVER2007721, LIVER2008053, LIVER2008465, LIVER2008473, LIVER2008580, LIVER2008751, LIVER2008945, LIVER2008998, LIVER2009110, LIVER2009118, LIVER2009554, LYMPB1000141, LYMPB1000158, LYMPB2000083, MAMGL1000096, MAMGL1000100, MAMGL1000132, MAMGL1000151, MAMGL1000182, MAMGL1000184, MESAN1000032, MESAN1000035, MESAN1000080, MESAN1000121, MESAN1000147, MESAN1000180, MESAN2000023, MESAN2000026, MESAN2000067, MESAN2000167, MESAN2000264, MESAN2000291, MESAN2000337, MESAN2000434, MESAN2000457, MESAN2000462, MESAN2000501, MESAN2000620, MESAN2000711, MESAN2000894, MESAN2000909, MESAN2001154, MESAN2001770, MESAN2001979, MESAN2001980, MESAN2002113, MESAN2002122, MESAN2002147, MESAN2002186, MESAN2002424,

[3310] MESAN2002519, MESAN2002687, MESAN2002709, MESAN2002844, MESAN2002978, MESAN2003037, MESAN2003039, MESAN2003101, MESAN2003322, MESAN2003490, MESAN2003529, MESAN2003646, MESAN2003662, MESAN2003709, MESAN2003851, MESAN2004138, MESAN2004288, MESAN2004575, MESAN2005371, MESAN2005724, MESAN2005808, MESAN2005811, MESAN2006022, MESAN2006043, MESAN2006328, MESAN2006580, MESAN2006599, MESAN2006743, MESAN2006953, MESAN2006971, MESAN2007032, MESAN2007440, MESAN2007597, MESAN2008222, MESAN2008334, MESAN2008415, MESAN2008460, MESAN2008536, MESAN2008679, MESAN2008729, MESAN2008821, MESAN2009019, MESAN2009081, MESAN2009105, MESAN2009311, MESAN2009418, MESAN2009503, MESAN2009522, MESAN2010031, MESAN2010114,

[3311] MESAN2010312, MESAN2010321, MESAN2010681, MESAN2011545, MESAN2011597, MESAN2011627, MESAN2011632, MESAN2011977, MESAN2012113, MESAN2012586, MESAN2012708, MESAN2012735, MESAN2013019, MESAN2013022, MESAN2013183, MESAN2013211, MESAN2013283, MESAN2013611, MESAN2013674, MESAN2013845, MESAN2013936, MESAN2014295, MESAN2014298, MESAN2014624, MESAN2015277, MESAN2015365, MESAN2015391, MESAN2015401, MESAN2015501, MESAN2015515, MESAN2015708, MESAN2016159, MESAN2016304, MESAN2016409, MESAN2016965, MESAN2017152, MESAN2017373, MESAN2017417, MESAN2018209, MESAN2018576, MESAN2018670, MESAN2018699, MESTC1000042, MESTC1000147, MESTC2000150, MESTC2000153, MESTC2000170, NB9N41000011, NB9N41000047, NB9N41000135,

[3312] NB9N41000142, NB9N41000146, NB9N42000122, NB9N42000196, NB9N42000281, NB9N42000314, NB9N42000342, NB9N42000430, NB9N42000495, NB9N42001300, NCRRP1000129, NESOP1000010, NESOP1000087, NESOP1000108, NESOP2000231, NESOP2000452, NESOP2000499, NESOP2000744, NESOP2001144, NESOP2001433, NESOP2001694, NESOP2001752, NESOP2002352, NESOP2002418, NESOP2002487, NESOP2002738, NESOP2002780, NETRP1000034, NETRP1000082, NETRP2000086, NETRP2000182, NETRP2000439, NHNPC1000034, NHNPC1000037, NHNPC1000084, NHNPC1000101, NHNPC1000124, NHNPC2000187, NHNPC2000212, NHNPC2000606, NHNPC2000877, NHNPC2001108, NHNPC2001223, NHNPC2001312, NHNPC2001816, NHNPC2001931, NHNPC2002565, NHNPC2002749, NOVAR1000102, NOVAR2000136,

[3313] NOVAR2000352, NOVAR2000412, NOVAR2000783, NOVAR2000962, NOVAR2001108, NOVAR2001620, NOVAR2001783, NOVAR2001876, NT2NE1000004, NT2NE1000018, NT2NE1000023, NT2NE1000024, NT2NE1000059, NT2NE1000063, NT2NE1000073, NT2NE1000083, NT2NE1000120, NT2NE1000175, NT2NE1000185, NT2NE2000038, NT2NE2000054, NT2NE2000057, NT2NE2000064, NT2NE2000109, NT2NE2000137, NT2NE2000156, NT2NE2000222, NT2NE2000259, NT2NE2000284, NT2NE2000299, NT2NE2000327, NT2NE2000353, NT2NE2000369, NT2NE2000374, NT2NE2000386, NT2NE2000390, NT2NE2000455, NT2NE2000488, NT2NE2000517, NT2NE2000546, NT2NE2000548, NT2NE2000550, NT2NE2000586, NT2NE2000612, NT2NE2000636, NT2NE2000658, NT2NE2000706, NT2NE2000802, NT2NE2000808, NT2NE2000864,

[3314] NT2NE2000913, NT2NE2000951, NT2NE2000980, NT2NE2001005, NT2NE2001021, NT2NE2001040, NT2NE2001049, NT2NE2001142, NT2NE2001156, NT2NE2001176, NT2NE2001180, NT2NE2001181, NT2NE2001188, NT2NE2001191, NT2NE2001247, NT2NE2001252, NT2NE2001324, NT2NE2001337, NT2NE2001364, NT2NE2001372, NT2NE2001397, NT2NE2001428, NT2NE2001432, NT2NE2001442, NT2NE2001524, NT2NE2001530, NT2NE2001598, NT2NE2001623, NT2NE2001626, NT2NE2001634, NT2NE2001666, NT2NE2001677, NT2NE2001697, NT2NE2001698, NT2NE2001723, NT2NE2001725, NT2NE2001874, NT2NE2001889, NT2NE2001923, NT2NE2002186, NT2NE2002285, NT2NE2002311, NT2NE2002620, NT2NE2002651, NT2NE2002732, NT2NE2002768, NT2NE2002791, NT2NE2002856, NT2NE2002870, NT2NE2003150,

[3315] NT2NE2003185, NT2NE2003252, NT2NE2003280, NT2NE2003308, NT2NE2003309, NT2NE2003315, NT2NE2003393, NT2NE2003408, NT2NE2003457, NT2NE2003540, NT2NE2003571, NT2NE2003705, NT2NE2003752, NT2NE2003921, NT2NE2004378, NT2NE2004490, NT2NE2004519, NT2NE2004606, NT2NE2004716, NT2NE2004787, NT2NE2004916, NT2NE2005035, NT2NE2005223, NT2NE2005276, NT2NE2005358, NT2NE2005395, NT2NE2005419, NT2NE2005441, NT2NE2005517, NT2NE2005537, NT2NE2005555, NT2NE2005588, NT2NE2005676, NT2NE2005720, NT2NE2005784, NT2NE2005804, NT2NE2005821, NT2NE2005890, NT2NE2005921, NT2NE2005968, NT2NE2006075, NT2NE2006087, NT2NE2006103, NT2NE2006217, NT2NE2006288, NT2NE2006382, NT2NE2006387, NT2NE2006427, NT2NE2006432, NT2NE2006531,

[3316] NT2NE2006659, NT2NE2006784, NT2NE2006813, NT2NE2006894, NT2NE2006942, NT2NE2006958, NT2NE2007052, NT2NE2007220, NT2NE2007425, NT2NE2007725, NT2NE2007727, NT2NE2007877, NT2NE2007967, NT2NE2008017, NT2NE2008060, NT2NE2008077, NT2NE2008213, NT2NE2008260, NT2NE2008378, NT2NE2008607, NT2NE2008639, NT2NE2008727, NT2NE2008783, NT2NE2008785, NT2NE2008803, NT2NE2008867, NT2NE2008961, NT2NE2008997, NT2NE2009138, NT2NE2009295, NT2NE2009426, NT2NE2009523, NT2NE2009608, NT2NE2009691, NT2NE2010056, NT2NE2010105, NT2NE2010150, NT2NE2010400, NT2NE2010632, NT2NE2010633, NT2NE2010654, NT2NE2010688, NT2NE2010781, NT2NE2010854, NT2NE2011033, NT2NE2011036, NT2NE2011154, NT2NE2011221, NT2NE2011411, NT2NE2011485,

[3317] NT2NE2011650, NT2NE2011684, NT2NE2011687, NT2NE2011691, NT2NE2011758, NT2NE2011823, NT2NE2011896, NT2NE2011998, NT2NE2012113, NT2NE2012199, NT2NE2012243, NT2NE2012361, NT2NE2012448, NT2NE2012457, NT2NE2012493, NT2NE2012533, NT2NE2012603, NT2NE2012747, NT2NE2012790, NT2NE2012847, NT2NE2012928, NT2NE2013019, NT2NE2013081, NT2NE2013189, NT2NE2013217, NT2NE2013547, NT2NE2014013, NT2NE2014028, NT2NE2014104, NT2NE2014176, NT2NE2014221, NT2NE2014525, NT2NE2014650, NT2NE2014651, NT2NE2014681, NT2NE2014758, NT2NE2014869, NT2NE2014950, NT2NE2015061, NT2NE2015275, NT2NE2015480, NT2NE2015511, NT2NE2015565, NT2NE2015626, NT2NE2015747, NT2NE2015860, NT2NE2015885, NT2NE2015904, NT2NE2016041, NT2NE2016387,

[3318] NT2NE2016419, NT2NE2016519, NT2NE2016608, NT2NE2016766, NT2NE2016774, NT2NE2016971, NT2NE2017259, NT2NE2017332, NT2NE2017397, NT2NE2017480, NT2NE2017492, NT2NE2017508, NT2NE2017562, NT2NE2017590, NT2NE2017612, NT2NE2017721, NT2NE2017752, NT2NE2017792, NT2NE2017982, NT2NE2018165, NT2NE2018176, NT2NE2018273, NT2NE2018376, NT2NE2018472, NT2NE2018490, NT2NE2018594, NT2NE2018739, NT2NE2018916, NT2NE2019056, NT2NE2019076, NT2NE2019099, NT2RI1000035, NT2RI1000164, NT2RI1000172, NT2RI2000004, NT2RI2000007, NT2RI2000117, NT2RI2000128, NT2RI2000133, NT2RI2000173, NT2RI2000187, NT2RI2000270, NT2RI2000276, NT2RI2000313, NT2RI2000341, NT2RI2000344, NT2RI2000421, NT2RI2000480, NT2RI2000575, NT2RI2000588,

[3319] NT2RI2000597, NT2RI2000669, NT2RI2000688, NT2RI2000689, NT2RI2000704, NT2RI2000738, NT2RI2000841, NT2RI2000865, NT2RI2000932, NT2RI2000987, NT2RI2001017, NT2RI2001030, NT2RI2001054, NT2RI2001083, NT2RI2001091, NT2RI2001167, NT2RI2001178, NT2RI2001230, NT2RI2001235, NT2RI2001244, NT2RI2001307, NT2RI2001385, NT2RI2001409, NT2RI2001410, NT2RI2001425, NT2RI2001449, NT2RI2001450, NT2RI2001474, NT2RI2001519, NT2RI2001595, NT2RI2001621, NT2RI2001624, NT2RI2001769, NT2RI2001782, NT2RI2001836, NT2RI2001952, NT2RI2002022, NT2RI2002041, NT2RI2002117, NT2RI2002120, NT2RI2002153, NT2RI2002179, NT2RI2002243, NT2RI2002252, NT2RI2002260, NT2RI2002266, NT2RI2002270, NT2RI2002334, NT2RI2002359, NT2RI2002447,

[3320] NT2RI2002481, NT2RI2002507, NT2RI2002517, NT2RI2002530, NT2RI2002549, NT2RI2002554, NT2RI2002564, NT2RI2002585, NT2RI2002592, NT2RI2002602, NT2RI2002699, NT2RI2002729, NT2RI2002802, NT2RI2002819, NT2RI2002822, NT2RI2002852, NT2RI2002923, NT2RI2002926, NT2RI2002970, NT2RI2003067, NT2RI2003184, NT2RI2003205, NT2RI2003222, NT2RI2003301, NT2RI2003360, NT2RI2003361, NT2RI2003383, NT2RI2003392, NT2RI2003399, NT2RI2003419, NT2RI2003481, NT2RI2003487, NT2RI2003556, NT2RI2003655, NT2RI2003667, NT2RI2003751, NT2RI2003884, NT2RI2003973, NT2RI2003993, NT2RI2004078, NT2RI2004079, NT2RI2004093, NT2RI2004136, NT2RI2004157, NT2RI2004188, NT2RI2004190, NT2RI2004209, NT2RI2004230, NT2RI2004284, NT2RI2004290,

[3321] NT2RI2004312, NT2RI2004381, NT2RI2004398, NT2RI2004410, NT2RI2004442, NT2RI2004468, NT2RI2004606, NT2RI2004618, NT2RI2004783, NT2RI2004818, NT2RI2004840, NT2RI2004916, NT2RI2004962, NT2RI2004984, NT2RI2004985, NT2RI2005048, NT2RI2005069, NT2RI2005087, NT2RI2005096, NT2RI2005115, NT2RI2005130, NT2RI2005166, NT2RI2005239, NT2RI2005246, NT2RI2005315, NT2RI2005358, NT2RI2005368, NT2RI2005382, NT2RI2005520, NT2RI2005564, NT2RI2005579, NT2RI2005621, NT2RI2005628, NT2RI2005670, NT2RI2005772, NT2RI2005816, NT2RI2005851, NT2RI2005966, NT2RI2006071, NT2RI2006081, NT2RI2006126, NT2RI2006127, NT2RI2006183, NT2RI2006257, NT2RI2006294, NT2RI2006345, NT2RI2006403, NT2RI2006445, NT2RI2006487, NT2RI2006506,

[3322] NT2RI2006553, NT2RI2006647, NT2RI2006659, NT2RI2006662, NT2RI2006667, NT2RI2006679, NT2RI2006686, NT2RI2006716, NT2RI2006735, NT2RI2006762, NT2RI2006788, NT2RI2006825, NT2RI2006838, NT2RI2006855, NT2RI2006973, NT2RI2007046, NT2RI2007048, NT2RI2007116, NT2RI2007148, NT2RI2007214, NT2RI2007303, NT2RI2007334, NT2RI2007386, NT2RI2007406, NT2RI2007439, NT2RI2007469, NT2RI2007498, NT2RI2007507, NT2RI2007593, NT2RI2007729, NT2RI2007751, NT2RI2007754, NT2RI2007827, NT2RI2007853, NT2RI2007877, NT2RI2007879, NT2RI2007891, NT2RI2007956, NT2RI2007965, NT2RI2008007, NT2RI2008050, NT2RI2008171, NT2RI2008188, NT2RI2008204, NT2RI2008221, NT2RI2008233, NT2RI2008455, NT2RI2008481, NT2RI2008502, NT2RI2008598,

[3323] NT2RI2008622, NT2RI2008656, NT2RI2008749, NT2RI2008801, NT2RI2008812, NT2RI2008841, NT2RI2008952, NT2RI2009005, NT2RI2009101, NT2RI2009103, NT2RI2009144, NT2RI2009151, NT2RI2009215, NT2RI2009233, NT2RI2009281, NT2RI2009289, NT2RI2009301, NT2RI2009402, NT2RI2009517, NT2RI2009585, NT2RI2009595, NT2RI2009855, NT2RI2010508, NT2RI2010795, NT2RI2011422, NT2RI2011683, NT2RI2011803, NT2RI2012350, NT2RI2012659, NT2RI2012990, NT2RI2013345, NT2RI2013357, NT2RI2013373, NT2RI2014247, NT2RI2014551, NT2RI2014683, NT2RI2014733, NT2RI2015239, NT2RI2016128, NT2RI2016134, NT2RI2017529, NT2RI2018311, NT2RI2018363, NT2RI2018883, NT2RI2018950, NT2RI2019751, NT2RI2019826, NT2RI2020390, NT2RI2020703, NT2RI2021463,

[3324] NT2RI2021625, NT2RI2022468, NT2RI2022584, NT2RI2023303, NT2RI2023671, NT2RI2024460, NT2RI2024496, NT2RI2024935, NT2RI2025075, NT2RI2025255, NT2RI2025564, NT2RI2025565, NT2RI2025909, NT2RI2025957, NT2RI2025976, NT2RI2026758, NT2RI2027081, NT2RI2027157, NT2RI2027323, NT2RI2027396, NT2RI2027484, NT2RI2027975, NT2RI2028213, NT2RI2028222, NT2RI2028537, NT2RI2028642, NT2RI3000213, NT2RI3000622, NT2RI3001132, NT2RI3001263, NT2RI3001279, NT2RI3001348, NT2RI3001458, NT2RI3001515, NT2RI3001573, NT2RI3001967, NT2RI3002303, NT2RI3002557, NT2RI3002842, NT2RI3003027, NT2RI3003031, NT2RI3003095, NT2RI3003104, NT2RI3003162, NT2RI3003362, NT2RI3003382, NT2RI3003409, NT2RI3003925, NT2RI3004133, NT2RI3004381,

[3325] NT2RI3004510, NT2RI3005202, NT2RI3005403, NT2RI3005416, NT2RI3005724, NT2RI3005861, NT2RI3005928, NT2RI3006132, NT2RI3006171, NT2RI3006340, NT2RI3006376, NT2RI3006666, NT2RI3006796, NT2RI3007065, NT2RI3007095, NT2RI3007158, NT2RI3007167, NT2RI3007213, NT2RI3007443, NT2RI3007684, NT2RI3007757, NT2RI3007878, NT2RI3007978, NT2RI3008055, NT2RI3008162, NT2RI3008179, NT2RI3008228, NT2RI3008442, NT2RI3008652, NT2RI3008697, NT2RI3008974, NT2RI3009158, NT2RI3009524, NT2RP6000005, NT2RP6000008, NT2RP6000032, NT2RP6000033, NT2RP6000043, NT2RP6000059, NT2RP6000060, NT2RP6000077, NT2RP6000086, NT2RP6000100, NT2RP6000109, NT2RP6000119, NT2RP6000127, NT2RP6000130, NT2RP6000140, NT2RP6000150, NT2RP7000041,

[3326] NT2RP7000109, NT2RP7000311, NT2RP7000359, NT2RP7000364, NT2RP7000380, NT2RP7000391, NT2RP7000425, NT2RP7000579, NT2RP7000586, NT2RP7000624, NT2RP7000812, NT2RP7000926, NT2RP7001074, NT2RP7001080, NT2RP7001156, NT2RP7001306, NT2RP7001319, NT2RP7001364, NT2RP7001475, NT2RP7001532, NT2RP7001602, NT2RP7001678, NT2RP7001856, NT2RP7002064, NT2RP7002151, NT2RP7002163, NT2RP7002243, NT2RP7002478, NT2RP7002554, NT2RP7002594, NT2RP7002603, NT2RP7002650, NT2RP7002738, NT2RP7002779, NT2RP7002841, NT2RP7002906, NT2RP7002978, NT2RP7002982, NT2RP7003025, NT2RP7003050, NT2RP7003055, NT2RP7003084, NT2RP7003091, NT2RP7003107, NT2RP7003134, NT2RP7003148, NT2RP7003261, NT2RP7003439, NT2RP7003680, NT2RP7003724,

[3327] NT2RP7004027, NT2RP7004080, NT2RP7004233, NT2RP7004358, NT2RP7004396, NT2RP7004481, NT2RP7004541, NT2RP7004559, NT2RP7004722, NT2RP7004766, NT2RP7004790, NT2RP7004915, NT2RP7004964, NT2RP7004975, NT2RP7005118, NT2RP7005205, NT2RP7005219, NT2RP7005323, NT2RP7005468, NT2RP7005513, NT2RP7005629, NT2RP7005631, NT2RP7005669, NT2RP7005846, NT2RP7006033, NT2RP7006075, NT2RP7006160, NT2RP7006162, NT2RP7006263, NT2RP7006296, NT2RP7006304, NT2RP7006374, NT2RP7006395, NT2RP7006408, NT2RP7006457, NT2RP7006547, NT2RP7006621, NT2RP7006636, NT2RP7006853, NT2RP7006887, NT2RP7006980, NT2RP7007114, NT2RP7007221, NT2RP7007226, NT2RP7007269, NT2RP7007310, NT2RP7007359, NT2RP7007480, NT2RP7007504, NT2RP7007594,

[3328] NT2RP7007617, NT2RP7007643, NT2RP7007842, NT2RP7007925, NT2RP7007930, NT2RP7008013, NT2RP7008133, NT2RP7008137, NT2RP7008142, NT2RP7008144, NT2RP7008190, NT2RP7008360, NT2RP7008396, NT2RP7008406, NT2RP7008435, NT2RP7008441, NT2RP7008454, NT2RP7008487, NT2RP7008544, NT2RP7008550, NT2RP7008557, NT2RP7008623, NT2RP7008657, NT2RP7008714, NT2RP7008720, NT2RP7008855, NT2RP7008863, NT2RP7009012, NT2RP7009019, NT2RP7009030, NT2RP7009168, NT2RP7009215, NT2RP7009225, NT2RP7009236, NT2RP7009253, NT2RP7009267, NT2RP7009322, NT2RP7009363, NT2RP7009370, NT2RP7009373, NT2RP7009397, NT2RP7009429, NT2RP7009439, NT2RP7009502, NT2RP7009507, NT2RP7009577, NT2RP7009743, NT2RP7009867, NT2RP7010128, NT2RP7010235,

[3329] NT2RP7010275, NT2RP7010521, NT2RP7010599, NT2RP7010612, NT2RP7010817, NT2RP7011086, NT2RP7011132, NT2RP7011268, NT2RP7011318, NT2RP7011452, NT2RP7011570, NT2RP7011721, NT2RP7011909, NT2RP7012291, NT2RP7012516, NT2RP7012776, NT2RP7013002, NT2RP7013374, NT2RP7013499, NT2RP7013729, NT2RP7013999, NT2RP7014178, NT2RP7014348, NT2RP7014420, NT2RP7014721, NT2RP7014743, NT2RP7014778, NT2RP7014906, NT2RP7015080, NT2RP7015431, NT2RP7015503, NT2RP7015512, NT2RP7015676, NT2RP7015789, NT2RP7015996, NT2RP7016508, NT2RP7016574, NT2RP7016622, NT2RP7016911, NT2RP7017139, NT2RP7017284, NT2RP7017365, NT2RP7017474, NT2RP7017546, NT2RP7017567, NT2RP7017795, NT2RP7017.971, NT2RP7018032, NT2RP7018126, NT2RP7018197,

[3330] NT2RP7018206, NT2RP7018340, NT2RP7018586, NT2RP7018802, NT2RP7018871, NT2RP7019064, NT2RP7019135, NT2RP7019273, NT2RP7019367, NT2RP7019401, NT2RP7019445, NT2RP7019543, NT2RP7019682, NT2RP7019835, NT2RP7020112, NT2RP7020123, NT2RP7020343, NT2RP7020379, NT2RP8000137, NT2RP8000296, NT2RP8000483, NT2RP8000521, NT2RP8000633, NT2RP8001363, NT2RP8001407, NT2RP8001584, NT2RP8001604, NT2RP8001605, NT2RP8003490, NT2RP8003657, NT2RP8003787, NT2RP8004306, NT2RP8006452, NT2RP8006521, NT2RP8007416, NT2RP8007503, NT2RP8007715, NT2RP8009248, NTONG1000006, NTONG1000047, NTONG1000052, NTONG1000087, NTONG1000123, NTONG1000161, NTONG1000172, NTONG1000213, NTONG1000247, NTONG1000257, NTONG2000040, NTONG2000107,

[3331] NTONG2000231, NTONG2000334, NTONG2000363, NTONG2000413, NTONG2000492, NTONG2000499, NTONG2000531, NTONG2000583, NTONG2000858, NTONG2000878, NTONG2000966, NTONG2001014, NTONG2001079, NTONG2001157, NTONG2001173, NTONG2001220, NTONG2001222, NTONG2001362, NTONG2001428, NTONG2001532, NTONG2001587, NTONG2001619, NTONG2001642, NTONG2001657, NTONG2001676, NTONG2002278, NTONG2002807, NTONG2002948, NTONG2002970, NTONG2002985, NTONG2003158, NTONG2003210, NTONG2003316, NTONG2003409, NTONG2003515, NTONG2003805, NTONG2003839, NTONG2003852, NTONG2003897, NTONG2004521, NTONG2004690, NTONG2004806, NTONG2004829, NTONG2004844, NTONG2004991, NTONG2005062, NTONG2005086, NTONG2005137, NTONG2005153, NTONG2005265,

[3332] NTONG2005277, NTONG2005363, NTONG2005480, NTONG2005497, NTONG2005577, NTONG2005657, NTONG2005822, NTONG2005897, NTONG2006099, NTONG2006187, NTONG2006301, NTONG2006324, NTONG2006354, NTONG2006440, NTONG2006501, NTONG2006646, NTONG2006709, NTONG2006783, NTONG2007020, NTONG2007028, NTONG2007034, NTONG2007249, NTONG2007517, NTONG2007522, NTONG2007658, NTONG2007693, NTONG2007756, NTONG2008088, NTONG2008093, NTONG2008365, NTONG2008672, NTONG2008862, NTONG2008939, NTONG2009068, NTONG2009229, NTONG2009233, NTONG2009468, OCBBF1000016, OCBBF1000030, OCBBF1000042, OCBBF1000049, OCBBF1000054, OCBBF1000067, OCBBF1000085, OCBBF1000091, OCBBF1000114, OCBBF1000118, OCBBF1000119, OCBBF1000122, OCBBF1000130,

[3333] OCBBF1000138, OCBBF1000145, OCBBF1000153, OCBBF1000175, OCBBF1000185, OCBBF1000188, OCBBF1000192, OCBBF1000254, OCBBF2000277, OCBBF2000287, OCBBF2000323, OCBBF2000452, OCBBF2000467, OCBBF2000703, OCBBF2000712, OCBBF2000719, OCBBF2000824, OCBBF2000904, OCBBF2000998, OCBBF2001075, OCBBF2001101, OCBBF2001124, OCBBF2001140, OCBBF2001176, OCBBF2001186, OCBBF2001210, OCBBF2001252, OCBBF2001323, OCBBF2001389, OCBBF2001402, OCBBF2001408, OCBBF2001416, OCBBF2001473, OCBBF2001494, OCBBF2001527, OCBBF2001586, OCBBF2001681, OCBBF2001749, OCBBF2001794, OCBBF2001910, OCBBF2001931, OCBBF2001961, OCBBF2002083, OCBBF2002124, OCBBF2002161, OCBBF2002357, OCBBF2002376, OCBBF2002615, OCBBF2002626, OCBBF2002663,

[3334] OCBBF2002805, OCBBF2002865, OCBBF2002920, OCBBF2002980, OCBBF2003028, OCBBF2003091, OCBBF2003246, OCBBF2003327, OCBBF2003593, OCBBF2004038, OCBBF2004147, OCBBF2004168, OCBBF2004235, OCBBF2004259, OCBBF2004385, OCBBF2004418, OCBBF2004478, OCBBF2004482, OCBBF2004533, OCBBF2004567, OCBBF2004612, OCBBF2004647, OCBBF2004669, OCBBF2004757, OCBBF2004826, OCBBF2004866, OCBBF2004883, OCBBF2004889, OCBBF2004930, OCBBF2004984, OCBBF2005066, OCBBF2005077, OCBBF2005161, OCBBF2005343, OCBBF2005349, OCBBF2005373, OCBBF2005420, OCBBF2005428, OCBBF2005433, OCBBF2005476, OCBBF2005546, OCBBF2005843, OCBBF2005901, OCBBF2005956, OCBBF2006005, OCBBF2006030, OCBBF2006058, OCBBF2006113, OCBBF2006148, OCBBF2006151,

[3335] OCBBF2006154, OCBBF2006172, OCBBF2006214, OCBBF2006241, OCBBF2006313, OCBBF2006388, OCBBF2006438, OCBBF2006567, OCBBF2006624, OCBBF2006639, OCBBF2006764, OCBBF2006859, OCBBF2006972, OCBBF2006987, OCBBF2007039, OCBBF2007051, OCBBF2007068, OCBBF2007114, OCBBF2007184, OCBBF2007194, OCBBF2007196, OCBBF2007238, OCBBF2007428, OCBBF2007478, OCBBF2007485, OCBBF2007520, OCBBF2007555, OCBBF2007610, OCBBF2007622, OCBBF2007756, OCBBF2007762, OCBBF2007931, OCBBF2007946, OCBBF2008116, OCBBF2008138, OCBBF2008144, OCBBF2008283, OCBBF2008330, OCBBF2008340, OCBBF2008366, OCBBF2008466, OCBBF2008483, OCBBF2008511, OCBBF2008520, OCBBF2008569, OCBBF2008586, OCBBF2008640, OCBBF2008691, OCBBF2008701, OCBBF2008724,

[3336] OCBBF2008760, OCBBF2008768, OCBBF2008770, OCBBF2008775, OCBBF2008790, OCBBF2008814, OCBBF2009095, OCBBF2009115, OCBBF2009352, OCBBF2009391, OCBBF2009424, OCBBF2009536, OCBBF2009571, OCBBF2009583, OCBBF2009603, OCBBF2009788, OCBBF2009920, OCBBF2009926, OCBBF2010040, OCBBF2010313, OCBBF2010404, OCBBF2010416, OCBBF2010420, OCBBF2010604, OCBBF2010709, OCBBF2010792, OCBBF2010819, OCBBF2010843, OCBBF2010858, OCBBF2010863, OCBBF2010871, OCBBF2010931, OCBBF2010945, OCBBF2010978, OCBBF2010989, OCBBF2011073, OCBBF2011137, OCBBF2011160, OCBBF2011177, OCBBF2011228, OCBBF2011232, OCBBF2011283, OCBBF2011311, OCBBF2011536, OCBBF2011625, OCBBF2011669, OCBBF2011685, OCBBF2011706, OCBBF2011722, OCBBF2011855,

[3337] OCBBF2011872, OCBBF2011897, OCBBF2011914, OCBBF2011960, OCBBF2011981, OCBBF2012028, OCBBF2012039, OCBBF2012095, OCBBF2012139, OCBBF2012191, OCBBF2012262, OCBBF2012320, OCBBF2012525, OCBBF2012678, OCBBF2012704, OCBBF2012755, OCBBF2012812, OCBBF2012881, OCBBF2012908, OCBBF2012936, OCBBF2012990, OCBBF2013049, OCBBF2013091, OCBBF2013127, OCBBF2013208, OCBBF2013285, OCBBF2013319, OCBBF2013324, OCBBF2013481, OCBBF2013507, OCBBF2013721, OCBBF2013789, OCBBF2013883, OCBBF2013926, OCBBF2014089, OCBBF2014292, OCBBF2014322, OCBBF2014386, OCBBF2014541, OCBBF2014576, OCBBF2014707, OCBBF2014745, OCBBF2014828, OCBBF2014873, OCBBF2014880, OCBBF2014928, OCBBF2015031, OCBBF2015081, OCBBF2015115, OCBBF2015232,

[3338] OCBBF2015233, OCBBF2015285, OCBBF2015334, OCBBF2015335, OCBBF2015503, OCBBF2015506, OCBBF2015599, OCBBF2015645, OCBBF2015659, OCBBF2015751, OCBBF2015797, OCBBF2015931, OCBBF2015980, OCBBF2016038, OCBBF2016405, OCBBF2016467, OCBBF2016590, OCBBF2016591, OCBBF2016689, OCBBF2016690, OCBBF2016841, OCBBF2016928, OCBBF2017069, OCBBF2017306, OCBBF2017325, OCBBF2017458, OCBBF2017489, OCBBF2017516, OCBBF2017665, OCBBF2017815, OCBBF2017882, OCBBF2017888, OCBBF2017920, OCBBF2018014, OCBBF2018084, OCBBF2018167, OCBBF2018206, OCBBF2018229, OCBBF2018234, OCBBF2018362, OCBBF2018380, OCBBF2018618, OCBBF2018663, OCBBF2018687, OCBBF2018707, OCBBF2018828, OCBBF2018873, OCBBF2018934, OCBBF2019195, OCBBF2019327,

[3339] OCBBF2019684, OCBBF2019761, OCBBF2019823, OCBBF2019950, OCBBF2020048, OCBBF2020343, OCBBF2020453, OCBBF2020741, OCBBF2020825, OCBBF2020838, OCBBF2021020, OCBBF2021214, OCBBF2021286, OCBBF2021323, OCBBF2021518, OCBBF2021788, OCBBF2021833, OCBBF2022351, OCBBF2022573, OCBBF2022574, OCBBF2023162, OCBBF2023598, OCBBF2023643, OCBBF2024463, OCBBF2024589, OCBBF2024719, OCBBF2024779, OCBBF2024781, OCBBF2025028, OCBBF2025115, OCBBF2025198, OCBBF2025451, OCBBF2025458, OCBBF2025527, OCBBF2025631, OCBBF2025730, OCBBF2026025, OCBBF2026035, OCBBF2026144, OCBBF2026368, OCBBF2026645, OCBBF2026649, OCBBF2026690, OCBBF2026981, OCBBF2027148, OCBBF2027197, OCBBF2027354, OCBBF2027423, OCBBF2027478, OCBBF2027481,

[3340] OCBBF2027511, OCBBF2027661, OCBBF2027728, OCBBF2027782, OCBBF2027868, OCBBF2028055, OCBBF2028173, OCBBF2029471, OCBBF2029901, OCBBF2030116, OCBBF2030329, OCBBF2030354, OCBBF2030517, OCBBF2030574, OCBBF2030708, OCBBF2030927, OCBBF2030963, OCBBF2031167, OCBBF2031198, OCBBF2031366, OCBBF2032152, OCBBF2032274, OCBBF2032539, OCBBF2032590, OCBBF2032599, OCBBF2032611, OCBBF2032671, OCBBF2033295, OCBBF2033413, OCBBF2033869, OCBBF2033948, OCBBF2034333, OCBBF2034529, OCBBF2034637, OCBBF2034906, OCBBF2035110, OCBBF2035214, OCBBF2035226, OCBBF2035390, OCBBF2035564, OCBBF2035658, OCBBF2035885, OCBBF2035916, OCBBF2036019, OCBBF2036031, OCBBF2036225, OCBBF2036476, OCBBF2036752, OCBBF2037068, OCBBF2037340,

[3341] OCBBF2037398, OCBBF2037464, OCBBF2037547, OCBBF2037598, OCBBF2037638, OCBBF2038238, OCBBF2038285, OCBBF2038317, OCBBF3000097, OCBBF3000213, OCBBF3000372, OCBBF3000380, OCBBF3000743, OCBBF3000830, OCBBF3001076, OCBBF3001202, OCBBF3001616, OCBBF3002553, OCBBF3002600, OCBBF3002654, OCBBF3003103, OCBBF3003209, OCBBF3003592, OCBBF3003745, OCBBF3003761, OCBBF3004264, OCBBF3004314, OCBBF3004972, OCBBF3005330, OCBBF3005597, OCBBF3005843, OCBBF3006802, OCBBF3006986, OCBBF3007078, OCBBF3007704, OCBBF3008230, OCBBF3008392, OCBBF3008835, OCBBF3009192, OCBBF3009244, OCBBF3009279, PANCR1000012, PANCR1000021, PANCR1000081, PANCR1000086, PANCR1000185, PEBLM1000024, PEBLM1000029, PEBLM1000034, PEBLM1000062,

[3342] PEBLM1000068, PEBLM1000071, PEBLM1000083, PEBLM1000147, PEBLM1000174, PEBLM1000180, PEBLM2000112, PEBLM2000126, PEBLM2000170, PEBLM2000180, PEBLM2000213, PEBLM2000248, PEBLM2000267, PEBLM2000270, PEBLM2000321, PEBLM2000333, PEBLM2000479, PEBLM2000502, PEBLM2001312, PEBLM2001465, PEBLM2001488, PEBLM2001803, PEBLM2002432, PEBLM2002455, PEBLM2002594, PEBLM2002749, PEBLM2002887, PEBLM2003426, PEBLM2003765, PEBLM2003935, PEBLM2004015, PEBLM2004216, PEBLM2004290, PEBLM2004497, PEBLM2004733, PEBLM2005282, PEBLM2005615, PEBLM2005632, PEBLM2005697, PEBLM2006031, PEBLM2006049, PEBLM2006113, PEBLM2006135, PEBLM2006215, PEBLM2006283, PEBLM2006298, PEBLM2006366, PEBLM2006912, PEBLM2007112, PEBLM2007140,

[3343] PEBLM2007437, PEBLM2007598, PEBLM2007832, PEBLM2007834, PEBLM2008106, PEBLM2008576, PEBLM2008605, PEBLM2008826, PEBLM2008861, PERIC1000025, PERIC1000147, PERIC2000180, PERIC2000214, PERIC2000386, PERIC2000387, PERIC2000422, PERIC2000473, PERIC2000478, PERIC2000914, PERIC2001227, PERIC2001228, PERIC2001379, PERIC2001504, PERIC2001703, PERIC2001764, PERIC2002243, PERIC2002272, PERIC2002452, PERIC2002766, PERIC2003001, PERIC2003090, PERIC2003287, PERIC2003349, PERIC2003452, PERIC2003699, PERIC2003720, PERIC2003794, PERIC2003834, PERIC2003919, PERIC2003957, PERIC2004028, PERIC2004131, PERIC2004259, PERIC2004379, PERIC2004429, PERIC2004510, PERIC2004613, PERIC2004909, PERIC2005111, PERIC2005117,

[3344] PERIC2005305, PERIC2005347, PERIC2005370, PERIC2005936, PERIC2006035, PERIC2006121, PERIC2006443, PERIC2006945, PERIC2006960, PERIC2007439, PERIC2007914, PERIC2008008, PERIC2008385, PERIC2009001, PERIC2009086, PERIC2009329, PERIC2009566, PLACE5000001, PLACE5000037, PLACE5000058, PLACE5000066, PLACE5000067, PLACE5000070, PLACE5000080, PLACE5000105, PLACE5000115, PLACE5000116, PLACE5000129, PLACE5000139, PLACE5000153, PLACE5000171, PLACE5000172, PLACE5000178, PLACE5000245, PLACE5000260, PLACE5000282, PLACE5000297, PLACE5000372, PLACE5000492, PLACE5000522, PLACE5000527, PLACE6000012, PLACE6000044, PLACE6000055, PLACE6000070, PLACE6000137, PLACE6000191, PLACE6000205, PLACE6000231, PLACE6000263,

[3345] PLACE6000296, PLACE6000314, PLACE6000348, PLACE6000371, PLACE6000424, PLACE6000426, PLACE6000429, PLACE6000450, PLACE6000523, PLACE6000550, PLACE6000552, PLACE6000555, PLACE6000619, PLACE6000953, PLACE6001118, PLACE6001153, PLACE6001185, PLACE6001262, PLACE6001294, PLACE6001536, PLACE6001557, PLACE6001712, PLACE6001740, PLACE6001823, PLACE6001886, PLACE6001923, PLACE6001925, PLACE6001933, PLACE6002011, PLACE6002016, PLACE6002056, PLACE6002157, PLACE6002312, PLACE6002323, PLACE6002345, PLACE6002419, PLACE6002462, PLACE6002647, PLACE6002692, PLACE6002699, PLACE6002710, PLACE6002871, PLACE6002949, PLACE6003004, PLACE6003038, PLACE6003077, PLACE6003094, PLACE6003109, PLACE6003204, PLACE6003372,

[3346] PLACE6003393, PLACE6003399, PLACE6003539, PLACE6003621, PLACE6003705, PLACE6003740, PLACE6003771, PLACE6003796, PLACE6003839, PLACE6003850, PLACE6004101, PLACE6004219, PLACE6004336, PLACE6004368, PLACE6004380, PLACE6004396, PLACE6004454, PLACE6004464, PLACE6004491, PLACE6004578, PLACE6004663, PLACE6004687, PLACE6004738, PLACE6004931, PLACE6004966, PLACE6004993, PLACE6005007, PLACE6005029, PLACE6005108, PLACE6005234, PLACE6005283, PLACE6005328, PLACE6005351, PLACE6005423, PLACE6005487, PLACE6005535, PLACE6005546, PLACE6005559, PLACE6005579, PLACE6005691, PLACE6005786, PLACE6006077, PLACE6006158, PLACE6006217, PLACE6006222, PLACE6006266, PLACE6006287, PLACE6006394, PLACE6006418, PLACE6006474,

[3347] PLACE6006566, PLACE6006697, PLACE6006822, PLACE6006871, PLACE6006905, PLACE6006988, PLACE6007050, PLACE6007180, PLACE6007242, PLACE6007309, PLACE6007373, PLACE6007380, PLACE6007433, PLACE6007436, PLACE6007482, PLACE6007687, PLACE6007787, PLACE6007798, PLACE6007807, PLACE6007925, PLACE6008036, PLACE6008094, PLACE6008126, PLACE6008285, PLACE6008444, PLACE6008453, PLACE6008640, PLACE6008750, PLACE6008768, PLACE6008824, PLACE6008989, PLACE6009006, PLACE6009008, PLACE6009228, PLACE6009338, PLACE6009419, PLACE6009430, PLACE6009482, PLACE6009524, PLACE6009527, PLACE6009560, PLACE6009590, PLACE6009821, PLACE6009835, PLACE6009853, PLACE6010463, PLACE6010485, PLACE6010568, PLACE6010701, PLACE6010704,

[3348] PLACE6010732, PLACE6010765, PLACE6010925, PLACE6010936, PLACE6010991, PLACE6011041, PLACE6011102, PLACE6011156, PLACE6011211, PLACE6011260, PLACE6011334, PLACE6011627, PLACE6011774, PLACE6011881, PLACE6011907, PLACE6011975, PLACE6012108, PLACE6012168, PLACE6012297, PLACE6012308, PLACE6012574, PLACE6012908, PLACE6012942, PLACE6013288, PLACE6013386, PLACE6013400, PLACE6013650, PLACE6013883, PLACE6013884, PLACE6013885, PLACE6014043, PLACE6014064, PLACE6014516, PLACE6014882, PLACE6015051, PLACE6015211, PLACE6015322, PLACE6015445, PLACE6015460, PLACE6015513, PLACE6015591, PLACE6015729, PLACE6015731, PLACE6015939, PLACE6016030, PLACE6016093, PLACE6016105, PLACE6016160, PLACE6016210, PLACE6016383,

[3349] PLACE6017002, PLACE6017431, PLACE6017564, PLACE6017578, PLACE6017626, PLACE6017701, PLACE6017714, PLACE6017788, PLACE6017791, PLACE6018107, PLACE6018187, PLACE6018235, PLACE6018287, PLACE6018441, PLACE6018497, PLACE6018769, PLACE6018834, PLACE6018843, PLACE6018863, PLACE6019385, PLACE6019542, PLACE6019600, PLACE6019674, PLACE6019676, PLACE6019701, PLACE6019932, PLACE6020031, PLACE6020145, PLACE7000167, PLACE7000170, PLACE7000266, PLACE7000333, PLACE7000410, PLACE7000502, PLACE7000707, PLACE7001544, PLACE7001759, PLACE7001936, PLACE7002303, PLACE7002641, PLACE7003639, PLACE7003657, PLACE7003684, PLACE7003985, PLACE7004961, PLACE7005169, PLACE7005671, PLACE7006051, PLACE7006090, PLACE7006240,

[3350] PLACE7006268, PLACE7006275, PLACE7006498, PLACE7006540, PLACE7007379, PLACE7007644, PLACE7007973, PLACE7008136, PLACE7008261, PLACE7008431, PLACE7008623, PLACE7008766, PLACE7009563, PROST1000033, PROST1000039, PROST1000065, PROST1000083, PROST1000085, PROST1000110, PROST1000123, PROST1000136, PROST1000144, PROST1000145, PROST1000152, PROST1000167, PROST1000184, PROST1000217, PROST1000262, PROST1000272, PROST1000298, PROST1000322, PROST1000334, PROST1000362, PROST1000377, PROST1000383, PROST1000412, PROST1000419, PROST1000451, PROST1000480, PROST1000485, PROST1000493, PROST1000512, PROST1000527, PROST1000528, PROST1000559, PROST1000575, PROST2000053, PROST2000067, PROST2000079, PROST2000105,

[3351] PROST2000143, PROST2000162, PROST2000165, PROST2000176, PROST2000203, PROST2000206, PROST2000212, PROST2000267, PROST2000273, PROST2000325, PROST2000337, PROST2000432, PROST2000452, PROST2000463, PROST2000470, PROST2000505, PROST2000572, PROST2000717, PROST2000761, PROST2000893, PROST2000961, PROST2001138, PROST2001213, PROST2001283, PROST2001414, PROST2001415, PROST2001465, PROST2001521, PROST2001540, PROST2001552, PROST2001599, PROST2001611, PROST2001636, PROST2001739, PROST2001796, PROST2001805, PROST2001823, PROST2001899, PROST2001998, PROST2002078, PROST2002101, PROST2002162, PROST2002212, PROST2002227, PROST2002338, PROST2002425, PROST2002488, PROST2002489, PROST2002527, PROST2002591,

[3352] PROST2002602, PROST2002633, PROST2002682, PROST2002685, PROST2002722, PROST2002736, PROST2002842, PROST2002906, PROST2002927, PROST2003102, PROST2003117, PROST2003210, PROST2003302, PROST2003303, PROST2003324, PROST2003340, PROST2003428, PROST2003472, PROST2003563, PROST2003577, PROST2003583, PROST2003586, PROST2003628, PROST2003635, PROST2003674, PROST2003676, PROST2003732, PROST2003775, PROST2003922, PROST2003930, PROST2004115, PROST2004142, PROST2004146, PROST2004161, PROST2004251, PROST2004258, PROST2004332, PROST2004481, PROST2004526, PROST2004570, PROST2004727, PROST2004742, PROST2004817, PROST2005039, PROST2005076, PROST2005093, PROST2005121, PROST2005131, PROST2005228, PROST2005426,

[3353] PROST2005466, PROST2005630, PROST2005683, PROST2005788, PROST2005880, PROST2005886, PROST2005904, PROST2005919, PROST2005943, PROST2006008, PROST2006020, PROST2006196, PROST2006201, PROST2006282, PROST2006450, PROST2006491, PROST2006510, PROST2006579, PROST2006688, PROST2006766, PROST2006782, PROST2006933, PROST2006988, PROST2007122, PROST2007200, PROST2007237, PROST2007248, PROST2007289, PROST2007317, PROST2007328, PROST2007382, PROST2007389, PROST2007416, PROST2007528, PROST2007818, PROST2007871, PROST2007950, PROST2007956, PROST2007974, PROST2007988, PROST2008079, PROST2008088, PROST2008243, PROST2008245, PROST2008268, PROST2008447, PROST2008468, PROST2008472, PROST2008516, PROST2008724,

[3354] PROST2008835, PROST2008993, PROST2009022, PROST2009208, PROST2009222, PROST2009254, PROST2009273, PROST2009320, PROST2009347, PROST2009365, PROST2009388, PROST2009400, PROST2009470, PROST2009483, PROST2009571, PROST2009731, PROST2009736, PROST2009795, PROST2009901, PROST2009909, PROST2010046, PROST2010250, PROST2010318, PROST2010326, PROST2010382, PROST2010400, PROST2010606, PROST2010885, PROST2011012, PROST2011038, PROST2011105, PROST2011297, PROST2011410, PROST2011439, PROST2011482, PROST2011631, PROST2011660, PROST2012005, PROST2012016, PROST2012088, PROST2012140, PROST2012157, PROST2012190, PROST2012249, PROST2012353, PROST2012400, PROST2012542, PROST2012550, PROST2012740, PROST2012780,

[3355] PROST2012888, PROST2012890, PROST2013032, PROST2013053, PROST2013260, PROST2013327, PROST2013531, PROST2013605, PROST2013627, PROST2013873, PROST2013880, PROST2014422, PROST2014585, PROST2014601, PROST2014659, PROST2014862, PROST2014916, PROST2014925, PROST2015124, PROST2015137, PROST2015198, PROST2015243, PROST2015246, PROST2015251, PROST2015332, PROST2015457, PROST2015464, PROST2015537, PROST2015545, PROST2015551, PROST2015636, PROST2015710, PROST2015756, PROST2015877, PROST2015900, PROST2015932, PROST2016195, PROST2016246, PROST2016351, PROST2016379, PROST2016444, PROST2016462, PROST2016499, PROST2016512, PROST2016566, PROST2016582, PROST2016668, PROST2016684, PROST2016777, PROST2016829,

[3356] PROST2016860, PROST2016918, PROST2016980, PROST2017098, PROST2017367, PROST2017413, PROST2017441, PROST2017529, PROST2017578, PROST2017617, PROST2017692, PROST2017700, PROST2017701, PROST2017729, PROST2017836, PROST2017910, PROST2017972, PROST2018030, PROST2018090, PROST2018235, PROST2018437, PROST2018487, PROST2018511, PROST2018583, PROST2018588, PROST2018607, PROST2018788, PROST2018902, PROST2018922, PROST2018977, PROST2019296, PROST2019398, PROST2019487, PROST2019781, PUAEN1000039, PUAEN1000081, PUAEN1000085, PUAEN1000087, PUAEN1000121, PUAEN1000175, PUAEN1000239, PUAEN1000275, PUAEN1000276, PUAEN1000288, PUAEN1000322, PUAEN2000080, PUAEN2000175, PUAEN2000247, PUAEN2000394, PUAEN2000497,

[3357] PUAEN2000594, PUAEN2000684, PUAEN2000942, PUAEN2001260, PUAEN2001345, PUAEN2001526, PUAEN2001882, PUAEN2002473, PUAEN2002489, PUAEN2002552, PUAEN2002568, PUAEN2002616, PUAEN2002758, PUAEN2003018, PUAEN2003079, PUAEN2003116, PUAEN2003408, PUAEN2003517, PUAEN2003954, PUAEN2004067, PUAEN2004083, PUAEN2004511, PUAEN2004525, PUAEN2004875, PUAEN2005110, PUAEN2005247, PUAEN2005502, PUAEN2005588, PUAEN2006029, PUAEN2006335, PUAEN2006578, PUAEN2006639, PUAEN2006761, PUAEN2007350, PUAEN2007785, PUAEN2007898, PUAEN2008123, PUAEN2008228, PUAEN2008314, PUAEN2008515, PUAEN2008815, PUAEN2008980, PUAEN2009348, PUAEN2009534, PUAEN2009655, PUAEN2009795, PUAEN2009852, PUAEN2010824, RECTM1000051, RECTM1000141,

[3358] RECTM2000220, RECTM2000349, RECTM2000433, RECTM2000510, RECTM2001307, RECTM2001347, RECTM2001519, RECTM2001666, RECTM2001691, RECTM2001749, RECTM2002602, RECTM2002632, SALGL1000005, SALGL1000024, SALGL1000028, SALGL1000065, SALGL1000107, SKMUS1000030, SKMUS1000064, SKMUS1000067, SKMUS1000102, SKMUS1000104, SKMUS1000118, SKMUS1000124, SKMUS1000129, SKMUS1000138, SKMUS1000176, SKMUS2000020, SKMUS2000061, SKMUS2000074, SKMUS2000078, SKMUS2000117, SKMUS2000137, SKMUS2000198, SKMUS2000243, SKMUS2000271, SKMUS2000287, SKMUS2000317, SKMUS2000330, SKMUS2000339, SKMUS2000361, SKMUS2000365, SKMUS2000380, SKMUS2000390, SKMUS2000416, SKMUS2000458, SKMUS2000467, SKMUS2000468, SKMUS2000515, SKMUS2000690,

[3359] SKMUS2000701, SKMUS2000705, SKMUS2000710, SKMUS2000724, SKMUS2000726, SKMUS2000774, SKMUS2000780, SKMUS2000821, SKMUS2000847, SKMUS2000863, SKMUS2000873, SKMUS2000894, SKMUS2000898, SKMUS2000902, SKMUS2000945, SKMUS2000961, SKMUS2000973, SKMUS2000980, SKMUS2001008, SKMUS2001014, SKMUS2001129, SKMUS2001147, SKMUS2001157, SKMUS2001164, SKMUS2001199, SKMUS2001201, SKMUS2001215, SKMUS2001247, SKMUS2001254, SKMUS2001271, SKMUS2001287, SKMUS2001323, SKMUS2001364, SKMUS2001398, SKMUS2001402, SKMUS2001412, SKMUS2001492, SKMUS2001501, SKMUS2001543, SKMUS2001580, SKMUS2001585, SKMUS2001608, SKMUS2001631, SKMUS2001662, SKMUS2001663, SKMUS2001668, SKMUS2001671, SKMUS2001683, SKMUS2001693, SKMUS2001695,

[3360] SKMUS2001703, SKMUS2001740, SKMUS2001742, SKMUS2001823, SKMUS2001850, SKMUS2002077, SKMUS2002084, SKMUS2002153, SKMUS2002475, SKMUS2002602, SKMUS2002634, SKMUS2002693, SKMUS2002821, SKMUS2002840, SKMUS2002920, SKMUS2003034, SKMUS2003074, SKMUS2003168, SKMUS2003194, SKMUS2003744, SKMUS2004044, SKMUS2004047, SKMUS2004483, SKMUS2004667, SKMUS2004897, SKMUS2004903, SKMUS2005428, SKMUS2006394, SKMUS2006481, SKMUS2006755, SKMUS2007315, SKMUS2007359, SKMUS2007568, SKMUS2007740, SKMUS2007816, SKMUS2007915, SKMUS2008338, SKMUS2008407, SKMUS2008474, SKMUS2008585, SKMUS2008607, SKMUS2009190, SKMUS2009232, SKMUS2009479, SKMUS2009557, SKNMC1000110, SKNMC1000123, SKNMC1000124, SKNMC1000159, SKNMC2000256,

[3361] SKNMC2000305, SKNMC2000322, SKNMC2000374, SKNMC2000583, SKNMC2000593, SKNMC2000612, SKNMC2000622, SKNMC2000635, SKNMC2000966, SKNMC2001113, SKNMC2001324, SKNMC2001503, SKNMC2001555, SKNMC2001596, SKNMC2001623, SKNMC2002402, SKNMC2003639, SKNMC2003924, SKNMC2003987, SKNMC2004457, SKNMC2004643, SKNMC2004651, SKNMC2005772, SKNMC2006327, SKNMC2006998, SKNMC2007134, SKNMC2007502, SKNMC2007504, SKNMC2007961, SKNMC2009450, SKNSH1000086, SKNSH1000174, SKNSH1000301, SKNSH1000308, SKNSH1000416, SKNSH2000051, SKNSH2000151, SKNSH2000163, SKNSH2000319, SKNSH2000482, SKNSH2000516, SKNSH2000550, SKNSH2000716, SKNSH2000971, SKNSH2001875, SKNSH2001931, SKNSH2002054, SKNSH2002866, SKNSH2003064, SKNSH2003174,

[3362] SKNSH2003422, SKNSH2003466, SKNSH2003483, SKNSH2003633, SKNSH2004039, SKNSH2005061, SKNSH2005120, SKNSH2005194, SKNSH2005240, SKNSH2005792, SKNSH2005816, SKNSH2005981, SKNSH2006304, SKNSH2006432, SKNSH2006822, SKNSH2007142, SKNSH2007149, SKNSH2007429, SKNSH2007739, SKNSH2008043, SKNSH2008940, SKNSH2008969, SKNSH2009197, SKNSH2009357, SKNSH2009435, SKNSH2009991, SKNSH2010015, SMINT1000012, SMINT1000039, SMINT1000048, SMINT1000051, SMINT1000054, SMINT1000057, SMINT1000071, SMINT1000075, SMINT1000078, SMINT1000091, SMINT1000100, SMINT1000103, SMINT1000118, SMINT1000131, SMINT1000137, SMINT2000018, SMINT2000032, SMINT2000040, SMINT2000060, SMINT2000073, SMINT2000084, SMINT2000145, SMINT2000176,

[3363] SMINT2000185, SMINT2000227, SMINT2000229, SMINT2000267, SMINT2000400, SMINT2000518, SMINT2000529, SMINT2000530, SMINT2000537, SMINT2000538, SMINT2000541, SMINT2000558, SMINT2000562, SMINT2000568, SMINT2000609, SMINT2000811, SMINT2000824, SMINT2000984, SMINT2001114, SMINT2001158, SMINT2001183, SMINT2001199, SMINT2001222, SMINT2001348, SMINT2001397, SMINT2001458, SMINT2001461, SMINT2001535, SMINT2001559, SMINT2001609, SMINT2001615, SMINT2001683, SMINT2001731, SMINT2001812, SMINT2001950, SMINT2002126, SMINT2002202, SMINT2002210, SMINT2002281, SMINT2002311, SMINT2002314, SMINT2002328, SMINT2002414, SMINT2002457, SMINT2002743, SMINT2002778, SMINT2002880, SMINT2002884, SMINT2002899, SMINT2002974,

[3364] SMINT2003128, SMINT2003150, SMINT2003317, SMINT2003386, SMINT2003551, SMINT2003569, SMINT2003641, SMINT2003644, SMINT2003866, SMINT2004047, SMINT2004086, SMINT2004299, SMINT2004339, SMINT2004350, SMINT2004414, SMINT2004473, SMINT2004547, SMINT2004583, SMINT2004729, SMINT2004781, SMINT2004872, SMINT2004891, SMINT2004909, SMINT2004972, SMINT2004992, SMINT2005075, SMINT2005161, SMINT2005174, SMINT2005213, SMINT2005330, SMINT2005368, SMINT2005402, SMINT2005405, SMINT2005621, SMINT2005623, SMINT2005624, SMINT2005688, SMINT2005800, SMINT2006078, SMINT2006205, SMINT2006331, SMINT2006596, SMINT2006641, SMINT2006648, SMINT2006708, SMINT2006716, SMINT2007101, SMINT2007140, SMINT2007219, SMINT2007294,

[3365] SMINT2007365, SMINT2007391, SMINT2007433, SMINT2007508, SMINT2007526, SMINT2007579, SMINT2007647, SMINT2007729, SMINT2007790, SMINT2007796, SMINT2007867, SMINT2007932, SMINT2008042, SMINT2008054, SMINT2008133, SMINT2008277, SMINT2008329, SMINT2008455, SMINT2008491, SMINT2008531, SMINT2008545, SMINT2008558, SMINT2008590, SMINT2008625, SMINT2008672, SMINT2008690, SMINT2008715, SMINT2008720, SMINT2008817, SMINT2008844, SMINT2008869, SMINT2008917, SMINT2009119, SMINT2009121, SMINT2009212, SMINT2009216, SMINT2009233, SMINT2009259, SMINT2009272, SMINT2009363, SMINT2009415, SMINT2009468, SMINT2009505, SMINT2009529, SMINT2009832, SMINT2009895, SMINT2009902, SMINT2009973, SMINT2010015, SMINT2010068,

[3366] SMINT2010076, SMINT2010144, SMINT2010200, SMINT2010278, SMINT2010324, SMINT2010326, SMINT2010426, SMINT2010500, SMINT2010533, SMINT2010629, SMINT2010639, SMINT2010672, SMINT2010753, SMINT2010853, SMINT2010897, SMINT2010959, SMINT2010997, SMINT2011033, SMINT2011066, SMINT2011273, SMINT2011311, SMINT2011406, SMINT2011509, SMINT2011567, SMINT2011588, SMINT2011656, SMINT2011888, SMINT2011958, SMINT2012040, SMINT2012122, SMINT2012195, SMINT2012285, SMINT2012501, SMINT2012734, SMINT2012793, SMINT2013129, SMINT2013170, SMINT2013181, SMINT2013228, SMINT2013613, SMINT2013626, SMINT2013695, SMINT2013833, SMINT2013890, SMINT2014166, SMINT2014282, SMINT2014443, SMINT2014480, SMINT2014489, SMINT2014721,

[3367] SMINT2015006, SMINT2015306, SMINT2015326, SMINT2015353, SMINT2015454, SMINT2015518, SMINT2015745, SMINT2015787, SMINT2015810, SMINT2016122, SMINT2016146, SMINT2016286, SMINT2016313, SMINT2016396, SMINT2016412, SMINT2016440, SMINT2016477, SMINT2016544, SMINT2016857, SMINT2017134, SMINT2017319, SMINT2017324, SMINT2017410, SMINT2017431, SMINT2017432, SMINT2017436, SMINT2017599, SMINT2017659, SMINT2017736, SMINT2017781, SMINT2017855, SMINT2017884, SMINT2017974, SMINT2018343, SMINT2018353, SMINT2018592, SMINT2018681, SMINT2019017, SMINT2019105, SMINT2019142, SMINT2019153, SMINT2019200, SPLEN1000013, SPLEN1000049, SPLEN1000087, SPLEN1000089, SPLEN1000091, SPLEN1000139, SPLEN1000143, SPLEN1000144,

[3368] SPLEN1000145, SPLEN1000156, SPLEN1000163, SPLEN1000165, SPLEN1000178, SPLEN2000020, SPLEN2000064, SPLEN2000126, SPLEN2000134, SPLEN2000189, SPLEN2000197, SPLEN2000205, SPLEN2000210, SPLEN2000222, SPLEN2000242, SPLEN2000247, SPLEN2000258, SPLEN2000270, SPLEN2000307, SPLEN2000310, SPLEN2000341, SPLEN2000348, SPLEN2000350, SPLEN2000357, SPLEN2000364, SPLEN2000402, SPLEN2000414, SPLEN2000420, SPLEN2000443, SPLEN2000448, SPLEN2000450, SPLEN2000464, SPLEN2000496, SPLEN2000515, SPLEN2000537, SPLEN2000541, SPLEN2000607, SPLEN2000630, SPLEN2000695, SPLEN2000698, SPLEN2000839, SPLEN2001135, SPLEN2001176, SPLEN2001227, SPLEN2001245, SPLEN2001354, SPLEN2001367, SPLEN2001383, SPLEN2001503, SPLEN2001510,

[3369] SPLEN2001599, SPLEN2001626, SPLEN2001650, SPLEN2001689, SPLEN2001761, SPLEN2001781, SPLEN2001881, SPLEN2001912, SPLEN2001945, SPLEN2002007, SPLEN2002053, SPLEN2002133, SPLEN2002147, SPLEN2002166, SPLEN2002175, SPLEN2002272, SPLEN2002314, SPLEN2002343, SPLEN2002354, SPLEN2002385, SPLEN2002419, SPLEN2002462, SPLEN2002467, SPLEN2002477, SPLEN2002662, SPLEN2002695, SPLEN2002707, SPLEN2002917, SPLEN2002957, SPLEN2003160, SPLEN2003204, SPLEN2003219, SPLEN2003396, SPLEN2003678, SPLEN2003878, SPLEN2003918, SPLEN2003924, SPLEN2004060, SPLEN2004078, SPLEN2004124, SPLEN2004148, SPLEN2004343, SPLEN2004346, SPLEN2004368, SPLEN2004844, SPLEN2004880, SPLEN2005009, SPLEN2005227, SPLEN2005272, SPLEN2005450,

[3370] SPLEN2005474, SPLEN2005727, SPLEN2005838, SPLEN2005869, SPLEN2005927, SPLEN2005939, SPLEN2006268, SPLEN2006283, SPLEN2006325, SPLEN2006389, SPLEN2006425, SPLEN2006671, SPLEN2006701, SPLEN2006785, SPLEN2006875, SPLEN2007276, SPLEN2007314, SPLEN2007350, SPLEN2007619, SPLEN2007653, SPLEN2007689, SPLEN2007695, SPLEN2007750, SPLEN2007926, SPLEN2007951, SPLEN2008007, SPLEN2008135, SPLEN2008164, SPLEN2008317, SPLEN2008496, SPLEN2008591, SPLEN2008786, SPLEN2009088, SPLEN2009315, SPLEN2009340, SPLEN2009541, SPLEN2009548, SPLEN2009555, SPLEN2009581, SPLEN2009733, SPLEN2009803, SPLEN2009884, SPLEN2009918, SPLEN2010004, SPLEN2010112, SPLEN2010119, SPLEN2010146, SPLEN2010187, SPLEN2010350, SPLEN2010395,

[3371] SPLEN2010415, SPLEN2010447, SPLEN2010469, SPLEN2010510, SPLEN2010530, SPLEN2010534, SPLEN2010588, SPLEN2010800, SPLEN2010847, SPLEN2010862, SPLEN2010978, SPLEN2010986, SPLEN2011018, SPLEN2011025, SPLEN2011086, SPLEN2011139, SPLEN2011145, SPLEN2011248, SPLEN2011252, SPLEN2011419, SPLEN2011422, SPLEN2011672, SPLEN2011678, SPLEN2011805, SPLEN2011820, SPLEN2011830, SPLEN2011931, SPLEN2011981, SPLEN2012115, SPLEN2012175, SPLEN2012179, SPLEN2012185, SPLEN2012234, SPLEN2012453, SPLEN2012524, SPLEN2012525, SPLEN2012606, SPLEN2012611, SPLEN2012619, SPLEN2012725, SPLEN2012743, SPLEN2012756, SPLEN2012961, SPLEN2013195, SPLEN2013503, SPLEN2013644, SPLEN2013648, SPLEN2013673, SPLEN2013690, SPLEN2013714,

[3372] SPLEN2013821, SPLEN2013857, SPLEN2013860, SPLEN2013910, SPLEN2013936, SPLEN2014063, SPLEN2014073, SPLEN2014119, SPLEN2014136, SPLEN2014199, SPLEN2014210, SPLEN2014293, SPLEN2014318, SPLEN2014381, SPLEN2014454, SPLEN2014486, SPLEN2014543, SPLEN2014572, SPLEN2014645, SPLEN2014669, SPLEN2014711, SPLEN2014860, SPLEN2014865, SPLEN2014919, SPLEN2014920, SPLEN2014924, SPLEN2014937, SPLEN2014946, SPLEN2015031, SPLEN2015094, SPLEN2015129, SPLEN2015158, SPLEN2015166, SPLEN2015216, SPLEN2015258, SPLEN2015261, SPLEN2015267, SPLEN2015276, SPLEN2015415, SPLEN2015433, SPLEN2015593, SPLEN2015674, SPLEN2015679, SPLEN2015707, SPLEN2015730, SPLEN2015746, SPLEN2015815, SPLEN2015890, SPLEN2015891, SPLEN2015899,

[3373] SPLEN2016045, SPLEN2016053, SPLEN2016069, SPLEN2016135, SPLEN2016241, SPLEN2016250, SPLEN2016304, SPLEN2016356, SPLEN2016480, SPLEN2016531, SPLEN2016533, SPLEN2016541, SPLEN2016552, SPLEN2016554, SPLEN2016602, SPLEN2016627, SPLEN2016773, SPLEN2016840, SPLEN2016863, SPLEN2016922, SPLEN2016932, SPLEN2016972, SPLEN2016973, SPLEN2017104, SPLEN2017121, SPLEN2017147, SPLEN2017187, SPLEN2017189, SPLEN2017212, SPLEN2017426, SPLEN2017452, SPLEN2017538, SPLEN2017592, SPLEN2017613, SPLEN2017620, SPLEN2017643, SPLEN2017687, SPLEN2017740, SPLEN2017781, SPLEN2017918, SPLEN2017999, SPLEN2018098, SPLEN2018112, SPLEN2018159, SPLEN2018180, SPLEN2018181, SPLEN2018280, SPLEN2018285, SPLEN2018302, SPLEN2018364,

[3374] SPLEN2018395, SPLEN2018643, SPLEN2018732, SPLEN2018749, SPLEN2018933, SPLEN2019008, SPLEN2019043, SPLEN2019092, SPLEN2019102, SPLEN2019131, SPLEN2019257, SPLEN2019311, SPLEN2019323, SPLEN2019349, SPLEN2019375, SPLEN2019379, SPLEN2019471, SPLEN2019480, SPLEN2019571, SPLEN2019575, SPLEN2019709, SPLEN2019774, SPLEN2019793, SPLEN2019811, SPLEN2019839, SPLEN2019985, SPLEN2020007, SPLEN2020034, SPLEN2020153, SPLEN2020154, SPLEN2020166, SPLEN2020183, SPLEN2020223, SPLEN2020359, SPLEN2020417, SPLEN2020427, SPLEN2020467, SPLEN2020512, SPLEN2020608, SPLEN2020777, SPLEN2020805, SPLEN2021057, SPLEN2021122, SPLEN2021157, SPLEN2021231, SPLEN2021273, SPLEN2021295, SPLEN2021298, SPLEN2021383, SPLEN2021417,

[3375] SPLEN2021440, SPLEN2021458, SPLEN2021463, SPLEN2021560, SPLEN2021701, SPLEN2021795, SPLEN2021983, SPLEN2021991, SPLEN2022040, SPLEN2022162, SPLEN2022227, SPLEN2022591, SPLEN2022785, SPLEN2022920, SPLEN2023024, SPLEN2023160, SPLEN2023423, SPLEN2023710, SPLEN2023791, SPLEN2023977, SPLEN2024070, SPLEN2024127, SPLEN2024273, SPLEN2024383, SPLEN2024530, SPLEN2024571, SPLEN2024577, SPLEN2024617, SPLEN2024737, SPLEN2024956, SPLEN2025012, SPLEN2025017, SPLEN2025039, SPLEN2025219, SPLEN2025491, SPLEN2025626, SPLEN2025820, SPLEN2026144, SPLEN2026411, SPLEN2026765, SPLEN2027157, SPLEN2027395, SPLEN2027488, SPLEN2027780, SPLEN2027852, SPLEN2027868, SPLEN2027995, SPLEN2028046, SPLEN2028066, SPLEN2028138,

[3376] SPLEN2028365, SPLEN2028417, SPLEN2028424, SPLEN2028593, SPLEN2028844, SPLEN2028994, SPLEN2029051, SPLEN2029176, SPLEN2029380, SPLEN2029522, SPLEN2029727, SPLEN2029904, SPLEN2030250, SPLEN2030335, SPLEN2030371, SPLEN2030397, SPLEN2030479, SPLEN2030495, SPLEN2030562, SPLEN2030763, SPLEN2030847, SPLEN2031004, SPLEN2031125, SPLEN2031424, SPLEN2031724, SPLEN2031780, SPLEN2032036, SPLEN2032112, SPLEN2032154, SPLEN2032321, SPLEN2032356, SPLEN2032677, SPLEN2032813, SPLEN2032924, SPLEN2033153, SPLEN2033333, SPLEN2033490, SPLEN2033539, SPLEN2033921, SPLEN2033996, SPLEN2034021, SPLEN2034081, SPLEN2034252, SPLEN2034551, SPLEN2034601, SPLEN2034678, SPLEN2034864, SPLEN2034934, SPLEN2035318, SPLEN2035615,

[3377] SPLEN2036103, SPLEN2036326, SPLEN2036475, SPLEN2036579, SPLEN2036608, SPLEN2036702, SPLEN2036712, SPLEN2036821, SPLEN2036932, SPLEN2036953, SPLEN2037077, SPLEN2037194, SPLEN2037319, SPLEN2037444, SPLEN2037580, SPLEN2037630, SPLEN2037678, SPLEN2037891, SPLEN2038055, SPLEN2038180, SPLEN2038345, SPLEN2038407, SPLEN2038473, SPLEN2039311, SPLEN2039697, SPLEN2039845, SPLEN2039936, SPLEN2040222, SPLEN2040237, SPLEN2040824, SPLEN2041304, SPLEN2041310, SPLEN2041585, SPLEN2041645, SPLEN2041700, SPLEN2041720, SPLEN2041977, SPLEN2042051, SPLEN2042521, SPLEN2042598, SPLEN2042714, SPLEN2042920, STOMA1000013, STOMA1000052, STOMA1000074, STOMA1000091, STOMA1000117, STOMA1000133, STOMA1000175, STOMA1000186,

[3378] STOMA1000190, STOMA1000191, STOMA2000032, STOMA2000072, STOMA2000088, STOMA2000104, STOMA2000148, STOMA2000168, STOMA2000183, STOMA2000188, STOMA2000279, STOMA2000289, STOMA2000383, STOMA2000386, STOMA2000396, STOMA2000478, STOMA2000482, STOMA2000529, STOMA2000539, STOMA2000567, STOMA2000640, STOMA2000678, STOMA2000686, STOMA2000888, STOMA2001025, STOMA2001389, STOMA2002141, STOMA2002367, STOMA2002688, STOMA2003289, STOMA2003444, STOMA2003477, STOMA2003646, STOMA2003894, STOMA2004194, STOMA2004294, STOMA2004663, STOMA2004668, STOMA2004852, STOMA2004873, STOMA2004884, STOMA2004893, STOMA2004925, STOMA2005120, STOMA2005664, STOMA2005667, STOMA2005746, STOMA2005782, STOMA2006181, STOMA2006213,

[3379] STOMA2006229, STOMA2006325, STOMA2006330, STOMA2006398, STOMA2006447, STOMA2006780, STOMA2006904, STOMA2007269, STOMA2007680, STOMA2007745, STOMA2008050, STOMA2008361, STOMA2008546, STOMA2008614, STOMA2008638, STOMA2008838, STOMA2009250, STOMA2009253, STOMA2009256, SYNOV1000045, SYNOV1000049, SYNOV1000118, SYNOV1000128, SYNOV1000190, SYNOV1000256, SYNOV2000152, SYNOV2000171, SYNOV2000173, SYNOV2000177, SYNOV2000178, SYNOV2000193, SYNOV2000251, SYNOV2000279, SYNOV2000291, SYNOV2000297, SYNOV2000397, SYNOV2000426, SYNOV2000601, SYNOV2000700, SYNOV2000820, SYNOV2000824, SYNOV2000923, SYNOV2001014, SYNOV2001035, SYNOV2001088, SYNOV2001111, SYNOV2001144, SYNOV2001212, SYNOV2001251, SYNOV2001300,

[3380] SYNOV2001356, SYNOV2001390, SYNOV2001451, SYNOV2001457, SYNOV2001468, SYNOV2001660, SYNOV2003326, SYNOV2005216, SYNOV2005448, SYNOV2005673, SYNOV2005817, SYNOV2005962, SYNOV2006430, SYNOV2006620, SYNOV2007965, SYNOV2008765, SYNOV2011233, SYNOV2012326, SYNOV2013365, SYNOV2013637, SYNOV2014157, SYNOV2014364, SYNOV2016124, SYNOV2016837, SYNOV2017179, SYNOV2018921, SYNOV2019280, SYNOV2020085, SYNOV2020463, SYNOV2021320, SYNOV2021953, SYNOV3000184, SYNOV3000231, SYNOV3000302, SYNOV3000345, SYNOV4000249, SYNOV4000472, SYNOV4000598, SYNOV4000706, SYNOV4001224, SYNOV4001342, SYNOV4001395, SYNOV4002001, SYNOV4002392, SYNOV4002875, SYNOV4002883, SYNOV4003174, SYNOV4003322, SYNOV4003681, SYNOV4003981,

[3381] SYNOV4004184, SYNOV4004741, SYNOV4004914, SYNOV4005256, SYNOV4005570, SYNOV4005739, SYNOV4005889, SYNOV4005981, SYNOV4006256, SYNOV4007215, SYNOV4007360, SYNOV4007430, SYNOV4007521, SYNOV4007711, SYNOV4008336, SYNOV4009129, SYNOV4009139, SYNOV4009298, SYNOV4009575, T1ESE2002665, TBAES2000004, TBAES2000059, TBAES2000116, TBAES2000255, TBAES2000315, TBAES2000352, TBAES2000932, TBAES2001171, TBAES2001220, TBAES2001229, TBAES2001258, TBAES2001492, TBAES2001751, TBAES2003435, TBAES2003492, TBAES2003550, TBAES2003702, TBAES2003917, TBAES2004055, TBAES2004105, TBAES2004939, TBAES2005157, TBAES2005361, TBAES2005543, TBAES2006568, TBAES2006881, TBAES2007379, TBAES2007428, TBAES2007481, TBAES2007504,

[3382] TBAES2007548, TBAES2007697, TBAES2007862, TBAES2007964, TBAES2008133, TBAES2009387, TCERX2000171, TCERX2000431, TCERX2000613, TCERX2000998, TCERX2002644, TCOLN1000037, TCOLN2000139, TCOLN2000236, TCOLN2000641, TCOLN2001268, TCOLN2002047, TCOLN2002278, TESOP1000035, TESOP1000127, TESOP1000160, TESOP2000083, TESOP2000090, TESOP2000205, TESOP2000312, TESOP2000390, TESOP2000400, TESOP2000510, TESOP2000527, TESOP2000569, TESOP2000739, TESOP2000801, TESOP2001122, TESOP2001166, TESOP2001345, TESOP2001474, TESOP2001796, TESOP2001818, TESOP2001849, TESOP2001865, TESOP2001901, TESOP2002005, TESOP2002110, TESOP2002150, TESOP2002273, TESOP2002489, TESOP2002539, TESOP2002545, TESOP2002804, TESOP2002950,

[3383] TESOP2003273, TESOP2003308, TESOP2003553, TESOP2003753, TESOP2004110, TESOP2004114, TESOP2004173, TESOP2004214, TESOP2005199, TESOP2005285, TESOP2005485, TESOP2005498, TESOP2005579, TESOP2006041, TESOP2006053, TESOP2006060, TESOP2006068, TESOP2006110, TESOP2006398, TESOP2006670, TESOP2006704, TESOP2006746, TESOP2006865, TESOP2006893, TESOP2007041, TESOP2007052, TESOP2007262, TESOP2007636, TESOP2007674, TESOP2007688, TESOP2007725, TESOP2007912, TESOP2007978, TESOP2008127, TESOP2008552, TESOP2008556, TESOP2008563, TESOP2008820, TESOP2009121, TESOP2009201, TESOP2009247, TESOP2009555, TESTI1000018, TESTI1000019, TESTI1000025, TESTI1000029, TESTI1000030, TESTI1000042, TESTI1000045, TESTI1000055,

[3384] TESTI1000064, TESTI1000070, TESTI1000085, TESTI1000088, TESTI1000093, TESTI1000094, TESTI1000101, TESTI1000109, TESTI1000125, TESTI1000127, TESTI1000128, TESTI1000131, TESTI1000157, TESTI1000163, TESTI1000169, TESTI1000179, TESTI1000183, TESTI1000191, TESTI1000257, TESTI1000266, TESTI1000319, TESTI1000330, TESTI1000348, TESTI1000390, TESTI1000391, TESTI1000459, TESTI1000491, TESTI1000545, TESTI2000018, TESTI2000044, TESTI2000100, TESTI2000117, TESTI2000120, TESTI2000147, TESTI2000154, TESTI2000172, TESTI2000207, TESTI2000208, TESTI2000221, TESTI2000238, TESTI2000253, TESTI2000278, TESTI2000349, TESTI2000356, TESTI2000358, TESTI2000372, TESTI2000427, TESTI2000435, TESTI2000443, TESTI2000452,

[3385] TESTI2000462, TESTI2000489, TESTI2000571, TESTI2000591, TESTI2000600, TESTI2000616, TESTI2000644, TESTI2000671, TESTI2000683, TESTI2000689, TESTI2000695, TESTI2000699, TESTI2000707, TESTI2000745, TESTI2000756, TESTI2000762, TESTI2000808, TESTI2000819, TESTI2000830, TESTI2000840, TESTI2000849, TESTI2000850, TESTI2000874, TESTI2000883, TESTI2000909, TESTI2000951, TESTI2000981, TESTI2001008, TESTI2001049, TESTI2001082, TESTI2001134, TESTI2001141, TESTI2001180, TESTI2001208, TESTI2001229, TESTI2001236, TESTI2001237, TESTI2001306, TESTI2001313, TESTI2001330, TESTI2001339, TESTI2001345, TESTI2001352, TESTI2001364, TESTI2001412, TESTI2001420, TESTI2001498, TESTI2001512, TESTI2001518, TESTI2001556,

[3386] TESTI2001593, TESTI2001613, TESTI2001621, TESTI2001665, TESTI2001671, TESTI2001697, TESTI2001725, TESTI2001758, TESTI2001766, TESTI2001792, TESTI2001793, TESTI2001795, TESTI2001812, TESTI2001815, TESTI2001823, TESTI2001826, TESTI2001827, TESTI2001829, TESTI2001852, TESTI2001869, TESTI2001894, TESTI2001898, TESTI2001915, TESTI2001950, TESTI2001959, TESTI2001968, TESTI2001985, TESTI2001991, TESTI2002002, TESTI2002012, TESTI2002036, TESTI2002048, TESTI2002057, TESTI2002081, TESTI2002090, TESTI2002149, TESTI2002216, TESTI2002245, TESTI2002251, TESTI2002264, TESTI2002282, TESTI2002293, TESTI2002294, TESTI2002326, TESTI2002351, TESTI2002361, TESTI2002406, TESTI2002415, TESTI2002423, TESTI2002453,

[3387] TESTI2002461, TESTI2002465, TESTI2002467, TESTI2002498, TESTI2002516, TESTI2002544, TESTI2002578, TESTI2002580, TESTI2002618, TESTI2002632, TESTI2002676, TESTI2002690, TESTI2002696, TESTI2002698, TESTI2002700, TESTI2002724, TESTI2002729, TESTI2002752, TESTI2002753, TESTI2002789, TESTI2002802, TESTI2002806, TESTI2002840, TESTI2002910, TESTI2002912, TESTI2002928, TESTI2002937, TESTI2002993, TESTI2003005, TESTI2003020, TESTI2003031, TESTI2003037, TESTI2003044, TESTI2003059, TESTI2003061, TESTI2003071, TESTI2003074, TESTI2003089, TESTI2003104, TESTI2003117, TESTI2003127, TESTI2003130, TESTI2003131, TESTI2003139, TESTI2003141, TESTI2003152, TESTI2003181, TESTI2003193, TESTI2003196, TESTI2003228,

[3388] TESTI2003236, TESTI2003255, TESTI2003258, TESTI2003277, TESTI2003299, TESTI2003311, TESTI2003321, TESTI2003325, TESTI2003327, TESTI2003330, TESTI2003347, TESTI2003354, TESTI2003356, TESTI2003372, TESTI2003376, TESTI2003418, TESTI2003419, TESTI2003432, TESTI2003475, TESTI2003476, TESTI2003498, TESTI2003512, TESTI2003539, TESTI2003541, TESTI2003545, TESTI2003551, TESTI2003574, TESTI2003579, TESTI2003580, TESTI2003589, TESTI2003596, TESTI2003598, TESTI2003615, TESTI2003638, TESTI2003649, TESTI2003692, TESTI2003718, TESTI2003727, TESTI2003756, TESTI2003768, TESTI2003781, TESTI2003787, TESTI2003824, TESTI2003827, TESTI2003894, TESTI2003911, TESTI2003914, TESTI2003940, TESTI2003962, TESTI2003998,

[3389] TESTI2004000, TESTI2004073, TESTI2004085, TESTI2004089, TESTI2004111, TESTI2004119, TESTI2004122, TESTI2004153, TESTI2004163, TESTI2004169, TESTI2004207, TESTI2004215, TESTI2004227, TESTI2004229, TESTI2004243, TESTI2004255, TESTI2004287, TESTI2004313, TESTI2004318, TESTI2004322, TESTI2004391, TESTI2004399, TESTI2004423, TESTI2004431, TESTI2004452, TESTI2004459, TESTI2004490, TESTI2004539, TESTI2004552, TESTI2004560, TESTI2004574, TESTI2004601, TESTI2004611, TESTI2004649, TESTI2004654, TESTI2004675, TESTI2004687, TESTI2004689, TESTI2004700, TESTI2004706, TESTI2004712, TESTI2004734, TESTI2004783, TESTI2004791, TESTI2004793, TESTI2004860, TESTI2004906, TESTI2004920, TESTI2004929, TESTI2004936,

[3390] TESTI2004941, TESTI2004971, TESTI2004982, TESTI2004993, TESTI2004994, TESTI2004999, TESTI2005017, TESTI2005025, TESTI2005040, TESTI2005060, TESTI2005072, TESTI2005085, TESTI2005112, TESTI2005120, TESTI2005153, TESTI2005155, TESTI2005173, TESTI2005267, TESTI2005268, TESTI2005280, TESTI2005307, TESTI2005326, TESTI2005363, TESTI2005376, TESTI2005378, TESTI2005380, TESTI2005391, TESTI2005395, TESTI2005396, TESTI2005415, TESTI2005470, TESTI2005492, TESTI2005568, TESTI2005584, TESTI2005588, TESTI2005590, TESTI2005603, TESTI2005609, TESTI2005610, TESTI2005630, TESTI2005672, TESTI2005683, TESTI2005690, TESTI2005703, TESTI2005720, TESTI2005739, TESTI2005742, TESTI2005767, TESTI2005775, TESTI2005827,

[3391] TESTI2005835, TESTI2005860, TESTI2005892, TESTI2005911, TESTI2005933, TESTI2005937, TESTI2005948, TESTI2005979, TESTI2005981, TESTI2005982, TESTI2005984, TESTI2005986, TESTI2005987, TESTI2006007, TESTI2006008, TESTI2006015, TESTI2006016, TESTI2006035, TESTI2006040, TESTI2006041, TESTI2006045, TESTI2006051, TESTI2006067, TESTI2006083, TESTI2006097, TESTI2006109, TESTI2006111, TESTI2006125, TESTI2006179, TESTI2006209, TESTI2006210, TESTI2006212, TESTI2006218, TESTI2006238, TESTI2006255, TESTI2006278, TESTI2006333, TESTI2006341, TESTI2006360, TESTI2006409, TESTI2006425, TESTI2006437, TESTI2006457, TESTI2006460, TESTI2006465, TESTI2006483, TESTI2006499, TESTI2006523, TESTI2006543, TESTI2006565,

[3392] TESTI2006572, TESTI2006617, TESTI2006624, TESTI2006628, TESTI2006633, TESTI2006643, TESTI2006648, TESTI2006659, TESTI2006660, TESTI2006665, TESTI2006667, TESTI2006677, TESTI2006735, TESTI2006744, TESTI2006748, TESTI2006774, TESTI2006853, TESTI2006866, TESTI2006879, TESTI2006894, TESTI2006940, TESTI2006955, TESTI2006978, TESTI2006979, TESTI2006990, TESTI2007040, TESTI2007074, TESTI2007078, TESTI2007113, TESTI2007152, TESTI2007163, TESTI2007183, TESTI2007220, TESTI2007234, TESTI2007311, TESTI2007320, TESTI2007346, TESTI2007358, TESTI2007402, TESTI2007405, TESTI2007452, TESTI2007466, TESTI2007480, TESTI2007490, TESTI2007502, TESTI2007524, TESTI2007533, TESTI2007576, TESTI2007613, TESTI2007657,

[3393] TESTI2007685, TESTI2007692, TESTI2007749, TESTI2007750, TESTI2007808, TESTI2007814, TESTI2007829, TESTI2007867, TESTI2007872, TESTI2007906, TESTI2007922, TESTI2007951, TESTI2007972, TESTI2007973, TESTI2008014, TESTI2008032, TESTI2008033, TESTI2008046, TESTI2008081, TESTI2008099, TESTI2008139, TESTI2008144, TESTI2008161, TESTI2008189, TESTI2008204, TESTI2008219, TESTI2008233, TESTI2008234, TESTI2008237, TESTI2008278, TESTI2008320, TESTI2008331, TESTI2008343, TESTI2008387, TESTI2008389, TESTI2008394, TESTI2008420, TESTI2008425, TESTI2008440, TESTI2008567, TESTI2008595, TESTI2008621, TESTI2008636, TESTI2008657, TESTI2008684, TESTI2008699, TESTI2008715, TESTI2008762, TESTI2008774, TESTI2008786,

[3394] TESTI2008822, TESTI2008835, TESTI2008840, TESTI2008847, TESTI2008884, TESTI2008901, TESTI2008929, TESTI2008946, TESTI2008960, TESTI2009018, TESTI2009091, TESTI2009097, TESTI2009136, TESTI2009185, TESTI2009190, TESTI2009217, TESTI2009239, TESTI2009325, TESTI2009388, TESTI2009390, TESTI2009400, TESTI2009412, TESTI2009423, TESTI2009447, TESTI2009462, TESTI2009477, TESTI2009497, TESTI2009511, TESTI2009544, TESTI2009545, TESTI2009551, TESTI2009585, TESTI2009588, TESTI2009683, TESTI2009727, TESTI2009739, TESTI2009812, TESTI2009835, TESTI2009853, TESTI2009935, TESTI2009977, TESTI2010009, TESTI2010154, TESTI2010239, TESTI2010280, TESTI2010354, TESTI2010396, TESTI2010400, TESTI2010409, TESTI2010572,

[3395] TESTI2010587, TESTI2010591, TESTI2010617, TESTI2010682, TESTI2010724, TESTI2010732, TESTI2010734, TESTI2010755, TESTI2010793, TESTI2010806, TESTI2010833, TESTI2010872, TESTI2011009, TESTI2011020, TESTI2011028, TESTI2011033, TESTI2011254, TESTI2011286, TESTI2011294, TESTI2011314, TESTI2011315, TESTI2011394, TESTI2011407, TESTI2011448, TESTI2011480, TESTI2011549, TESTI2011575, TESTI2011605, TESTI2011612, TESTI2011665, TESTI2011680, TESTI2011683, TESTI2011712, TESTI2011750, TESTI2011840, TESTI2011846, TESTI2011915, TESTI2011928, TESTI2011971, TESTI2012019, TESTI2012050, TESTI2012090, TESTI2012095, TESTI2012104, TESTI2012152, TESTI2012155, TESTI2012171, TESTI2012207, TESTI2012231, TESTI2012244,

[3396] TESTI2012289, TESTI2012308, TESTI2012356, TESTI2012387, TESTI2012444, TESTI2012511, TESTI2012528, TESTI2012544, TESTI2012550, TESTI2012571, TESTI2012592, TESTI2012617, TESTI2012628, TESTI2012812, TESTI2012834, TESTI2012835, TESTI2012861, TESTI2012900, TESTI2012915, TESTI2012922, TESTI2013001, TESTI2013012, TESTI2013053, TESTI2013144, TESTI2013163, TESTI2013169, TESTI2013212, TESTI2013257, TESTI2013268, TESTI2013322, TESTI2013381, TESTI2013382, TESTI2013401, TESTI2013427, TESTI2013468, TESTI2013497, TESTI2013545, TESTI2013546, TESTI2013566, TESTI2013601, TESTI2013604, TESTI2013607, TESTI2013610, TESTI2013691, TESTI2013699, TESTI2013737, TESTI2013767, TESTI2013832, TESTI2013873, TESTI2013889,

[3397] TESTI2014007, TESTI2014036, TESTI2014097, TESTI2014160, TESTI2014248, TESTI2014254, TESTI2014269, TESTI2014274, TESTI2014318, TESTI2014324, TESTI2014339, TESTI2014362, TESTI2014385, TESTI2014415, TESTI2014439, TESTI2014474, TESTI2014577, TESTI2014578, TESTI2014716, TESTI2014780, TESTI2014800, TESTI2014843, TESTI2014979, TESTI2014988, TESTI2015042, TESTI2015105, TESTI2015180, TESTI2015246, TESTI2015249, TESTI2015327, TESTI2015331, TESTI2015335, TESTI2015350, TESTI2015375, TESTI2015437, TESTI2015590, TESTI2015610, TESTI2015647, TESTI2015675, TESTI2015710, TESTI2015752, TESTI2015830, TESTI2015914, TESTI2015938, TESTI2015947, TESTI2015987, TESTI2016046, TESTI2016101, TESTI2016162, TESTI2016197,

[3398] TESTI2016278, TESTI2016298, TESTI2016331, TESTI2016337, TESTI2016410, TESTI2016421, TESTI2016509, TESTI2016568, TESTI2016583, TESTI2016599, TESTI2016629, TESTI2016663, TESTI2016667, TESTI2016688, TESTI2016701, TESTI2016758, TESTI2016848, TESTI2016863, TESTI2016888, TESTI2016896, TESTI2016922, TESTI2016942, TESTI2016950, TESTI2016996, TESTI2017017, TESTI2017028, TESTI2017035, TESTI2017069, TESTI2017089, TESTI2017102, TESTI2017107, TESTI2017113, TESTI2017125, TESTI2017256, TESTI2017305, TESTI2017311, TESTI2017396, TESTI2017507, TESTI2017537, TESTI2017582, TESTI2017584, TESTI2017645, TESTI2017727, TESTI2017740, TESTI2017775, TESTI2017816, TESTI2017832, TESTI2017923, TESTI2017932, TESTI2017951,

[3399] TESTI2018031, TESTI2018035, TESTI2018060, TESTI2018083, TESTI2018178, TESTI2018221, TESTI2018276, TESTI2018290, TESTI2018335, TESTI2018337, TESTI2018368, TESTI2018421, TESTI2018428, TESTI2018475, TESTI2018482, TESTI2018521, TESTI2018565, TESTI2018581, TESTI2018611, TESTI2018687, TESTI2018697, TESTI2018838, TESTI2018941, TESTI2018957, TESTI2018974, TESTI2018975, TESTI2019042, TESTI2019228, TESTI2019257, TESTI2019280, TESTI2019282, TESTI2019308, TESTI2019336, TESTI2019352, TESTI2019406, TESTI2019430, TESTI2019455, TESTI2019481, TESTI2019488, TESTI2019501, TESTI2019648, TESTI2019669, TESTI2019697, TESTI2019729, TESTI2019787, TESTI2019794, TESTI2019854, TESTI2019859, TESTI2019860, TESTI2019872,

[3400] TESTI2019911, TESTI2019917, TESTI2019975, TESTI2019998, TESTI2020012, TESTI2020026, TESTI2020029, TESTI2020071, TESTI2020084, TESTI2020265, TESTI2020283, TESTI2020316, TESTI2020344, TESTI2020379, TESTI2020426, TESTI2020445, TESTI2020515, TESTI2020525, TESTI2020579, TESTI2020717, TESTI2020871, TESTI2020905, TESTI2020906, TESTI2020946, TESTI2020981, TESTI2020999, TESTI2021003, TESTI2021038, TESTI2021057, TESTI2021077, TESTI2021112, TESTI2021114, TESTI2021116, TESTI2021118, TESTI2021122, TESTI2021138, TESTI2021315, TESTI2021358, TESTI2021447, TESTI2021463, TESTI2021531, TESTI2021599, TESTI2021637, TESTI2021654, TESTI2021667, TESTI2021736, TESTI2021785, TESTI2021819, TESTI2021851, TESTI2021895,

[3401] TESTI2021911, TESTI2021939, TESTI2021999, TESTI2022010, TESTI2022023, TESTI2022065, TESTI2022086, TESTI2022203, TESTI2022246, TESTI2022323, TESTI2022338, TESTI2022400, TESTI2022462, TESTI2022495, TESTI2022623, TESTI2022649, TESTI2022652, TESTI2022738, TESTI2022798, TESTI2022812, TESTI2022814, TESTI2022874, TESTI2022940, TESTI2022952, TESTI2023025, TESTI2023033, TESTI2023053, TESTI2023085, TESTI2023192, TESTI2023194, TESTI2023214, TESTI2023254, TESTI2023386, TESTI2023427, TESTI2023436, TESTI2023599, TESTI2023752, TESTI2023800, TESTI2023861, TESTI2023903, TESTI2023942, TESTI2023947, TESTI2023951, TESTI2023968, TESTI2024009, TESTI2024090, TESTI2024125, TESTI2024153, TESTI2024192, TESTI2024267,

[3402] TESTI2024299, TESTI2024419, TESTI2024422, TESTI2024443, TESTI2024446, TESTI2024473, TESTI2024476, TESTI2024498, TESTI2024560, TESTI2024567, TESTI2024586, TESTI2024598, TESTI2024641, TESTI2024648, TESTI2024718, TESTI2024744, TESTI2024885, TESTI2024936, TESTI2024978, TESTI2024999, TESTI2025006, TESTI2025013, TESTI2025022, TESTI2025063, TESTI2025117, TESTI2025144, TESTI2025161, TESTI2025174, TESTI2025229, TESTI2025269, TESTI2025365, TESTI2025403, TESTI2025409, TESTI2025422, TESTI2025448, TESTI2025454, TESTI2025486, TESTI2025546, TESTI2025582, TESTI2025609, TESTI2025656, TESTI2025791, TESTI2025846, TESTI2025872, TESTI2025879, TESTI2025911, TESTI2025920, TESTI2025924, TESTI2026014, TESTI2026024,

[3403] TESTI2026064, TESTI2026077, TESTI2026104, TESTI2026116, TESTI2026134, TESTI2026168, TESTI2026196, TESTI2026215, TESTI2026218, TESTI2026233, TESTI2026291, TESTI2026294, TESTI2026401, TESTI2026403, TESTI2026453, TESTI2026461, TESTI2026491, TESTI2026505, TESTI2026515, TESTI2026525, TESTI2026534, TESTI2026537, TESTI2026589, TESTI2026597, TESTI2026605, TESTI2026647, TESTI2026674, TESTI2026794, TESTI2026824, TESTI2026854, TESTI2026925, TESTI2026936, TESTI2026957, TESTI2027013, TESTI2027019, TESTI2027108, TESTI2027165, TESTI2027171, TESTI2027173, TESTI2027179, TESTI2027185, TESTI2027206, TESTI2027238, TESTI2027239, TESTI2027243, TESTI2027296, TESTI2027378, TESTI2027411, TESTI2027450, TESTI2027496,

[3404] TESTI2027503, TESTI2027562, TESTI2027615, TESTI2027645, TESTI2027730, TESTI2027736, TESTI2027791, TESTI2027820, TESTI2027828, TESTI2027840, TESTI2028098, TESTI2028151, TESTI2028242, TESTI2028253, TESTI2028254, TESTI2028269, TESTI2028290, TESTI2028296, TESTI2028384, TESTI2028426, TESTI2028488, TESTI2028523, TESTI2028583, TESTI2028613, TESTI2028662, TESTI2028670, TESTI2028705, TESTI2028776, TESTI2028811, TESTI2028891, TESTI2028985, TESTI2028997, TESTI2029131, TESTI2029162, TESTI2029196, TESTI2029201, TESTI2029244, TESTI2029249, TESTI2029252, TESTI2029264, TESTI2029470, TESTI2029672, TESTI2029880, TESTI2030136, TESTI2030322, TESTI2030342, TESTI2030519, TESTI2030556, TESTI2030728, TESTI2030754,

[3405] TESTI2030770, TESTI2030860, TESTI2030901, TESTI2030917, TESTI2030930, TESTI2031006, TESTI2031060, TESTI2031129, TESTI2031356, TESTI2031418, TESTI2031504, TESTI2031529, TESTI2031687, TESTI2031760, TESTI2031809, TESTI2031919, TESTI2031935, TESTI2031986, TESTI2032044, TESTI2032067, TESTI2032079, TESTI2032681, TESTI2032761, TESTI2032768, TESTI2032774, TESTI2032828, TESTI2033242, TESTI2033254, TESTI2033300, TESTI2033395, TESTI2033453, TESTI2033505, TESTI2033520, TESTI2033641, TESTI2033710, TESTI2033905, TESTI2034187, TESTI2034243, TESTI2034249, TESTI2034357, TESTI2034401, TESTI2034407, TESTI2034506, TESTI2034520, TESTI2034718, TESTI2034730, TESTI2034749, TESTI2034767, TESTI2034774, TESTI2034777,

[3406] TESTI2034785, TESTI2034799, TESTI2034847, TESTI2034913, TESTI2034931, TESTI2034953, TESTI2034997, TESTI2035003, TESTI2035078, TESTI2035084, TESTI2035107, TESTI2035121, TESTI2035124, TESTI2035183, TESTI2035236, TESTI2035262, TESTI2035309, TESTI2035688, TESTI2035775, TESTI2035793, TESTI2035898, TESTI2035962, TESTI2035981, TESTI2035997, TESTI2036114, TESTI2036129, TESTI2036285, TESTI2036288, TESTI2036513, TESTI2036589, TESTI2036650, TESTI2036684, TESTI2036691, TESTI2036736, TESTI2036822, TESTI2036833, TESTI2036922, TESTI2036951, TESTI2036965, TESTI2037002, TESTI2037055, TESTI2037081, TESTI2037085, TESTI2037103, TESTI2037106, TESTI2037111, TESTI2037209, TESTI2037255, TESTI2037359, TESTI2037375,

[3407] TESTI2037382, TESTI2037534, TESTI2037569, TESTI2037572, TESTI2037643, TESTI2037657, TESTI2037673, TESTI2037723, TESTI2037819, TESTI2037830, TESTI2037845, TESTI2037877, TESTI2037976, TESTI2038048, TESTI2038065, TESTI2038104, TESTI2038275, TESTI2038388, TESTI2038573, TESTI2038596, TESTI2038623, TESTI2038644, TESTI2038733, TESTI2038858, TESTI2038958, TESTI2039025, TESTI2039026, TESTI2039038, TESTI2039041, TESTI2039060, TESTI2039113, TESTI2039121, TESTI2039209, TESTI2039225, TESTI2039227, TESTI2039276, TESTI2039342, TESTI2039353, TESTI2039544, TESTI2039613, TESTI2039732, TESTI2039738, TESTI2039776, TESTI2039867, TESTI2039908, TESTI2040018, TESTI2040094, TESTI2040102, TESTI2040128, TESTI2040143,

[3408] TESTI2040297, TESTI2040372, TESTI2040377, TESTI2040424, TESTI2040642, TESTI2040815, TESTI2040897, TESTI2040944, TESTI2040964, TESTI2040983, TESTI2040989, TESTI2041330, TESTI2041362, TESTI2041517, TESTI2041564, TESTI2041664, TESTI2041730, TESTI2041734, TESTI2041778, TESTI2041800, TESTI2041947, TESTI2041956, TESTI2041976, TESTI2042062, TESTI2042149, TESTI2042264, TESTI2042295, TESTI2042302, TESTI2042326, TESTI2042400, TESTI2042450, TESTI2042473, TESTI2042507, TESTI2042508, TESTI2042750, TESTI2042783, TESTI2042806, TESTI2042928, TESTI2042946, TESTI2042958, TESTI2043275, TESTI2043277, TESTI2043282, TESTI2043313, TESTI2043477, TESTI2043585, TESTI2043758, TESTI2043817, TESTI2043857, TESTI2043866,

[3409] TESTI2043869, TESTI2044064, TESTI2044118, TESTI2044194, TESTI2044306, TESTI2044309, TESTI2044413, TESTI2044418, TESTI2044754, TESTI2044788, TESTI2044796, TESTI2044833, TESTI2044892, TESTI2044920, TESTI2044968, TESTI2045139, TESTI2045155, TESTI2045171, TESTI2045199, TESTI2045353, TESTI2045509, TESTI2045562, TESTI2045611, TESTI2045819, TESTI2045850, TESTI2045920, TESTI2045964, TESTI2045983, TESTI2046100, TESTI2046188, TESTI2046347, TESTI2046352, TESTI2046358, TESTI2046439, TESTI2046535, TESTI2046536, TESTI2046552, TESTI2046569, TESTI2046686, TESTI2046721, TESTI2046732, TESTI2046786, TESTI2046797, TESTI2046863, TESTI2046872, TESTI2047071, TESTI2047141, TESTI2047147, TESTI2047153, TESTI2047212,

[3410] TESTI2047342, TESTI2047383, TESTI2047792, TESTI2047801, TESTI2047818, TESTI2047824, TESTI2047885, TESTI2047930, TESTI2048105, TESTI2048109, TESTI2048465, TESTI2048603, TESTI2048898, TESTI2049041, TESTI2049062, TESTI2049206, TESTI2049246, TESTI2049277, TESTI2049422, TESTI2049452, TESTI2049469, TESTI2049553, TESTI2049576, TESTI2049857, TESTI2049956, TESTI2050137, TESTI2050681, TESTI2050780, TESTI2050987, TESTI2051148, TESTI2051177, TESTI2051279, TESTI2051488, TESTI2051543, TESTI2051627, TESTI2051742, TESTI2051767, TESTI2051791, TESTI2051806, TESTI2051867, TESTI2051873, TESTI2052110, TESTI2052202, TESTI2052211, TESTI2052256, TESTI2052288, TESTI2052525, TESTI2052670, TESTI2052693, TESTI2052698,

[3411] TESTI2052799, TESTI2052822, TESTI2052985, TESTI2053151, TESTI2053242, TESTI2053399, TESTI2053526, TESTI2053561, TESTI2053621, TESTI3000002, TESTI3000005, TESTI4000068, TESTI4000079, TESTI4000093, TESTI4000134, TESTI4000137, TESTI4000153, TESTI4000155, TESTI4000157, TESTI4000183, TESTI4000214, TESTI4000215, TESTI4000228, TESTI4000250, TESTI4000288, TESTI4000319, TESTI4000370, TESTI4000394, TESTI4000462, TESTI4000530, TESTI4000534, TESTI4000598, TESTI4000600, TESTI4000621, TESTI4000703, TESTI4000724, TESTI4000957, TESTI4000970, TESTI4001036, TESTI4001037, TESTI4001060, TESTI4001106, TESTI4001148, TESTI4001176, TESTI4001195, TESTI4001201, TESTI4001206, TESTI4001348, TESTI4001441, TESTI4001473,

[3412] TESTI4001517, TESTI4001527, TESTI4001569, TESTI4001604, TESTI4001665, TESTI4001679, TESTI4001795, TESTI4001923, TESTI4001925, TESTI4001984, TESTI4002003, TESTI4002072, TESTI4002141, TESTI4002195, TESTI4002290, TESTI4002319, TESTI4002491, TESTI4002520, TESTI4002552, TESTI4002647, TESTI4002703, TESTI4002754, TESTI4002868, TESTI4002878, TESTI4002889, TESTI4003279, TESTI4003319, TESTI4003404, TESTI4003565, TESTI4003574, TESTI4003733, TESTI4003796, TESTI4003944, TESTI4004003, TESTI4004031, TESTI4004200, TESTI4004539, TESTI4004626, TESTI4004653, TESTI4004695, TESTI4004722, TESTI4004887, TESTI4004917, TESTI4005015, TESTI4005039, TESTI4005158, TESTI4005317, TESTI4005322, TESTI4005470, TESTI4005500,

[3413] TESTI4005534, TESTI4005543, TESTI4005628, TESTI4005801, TESTI4005805, TESTI4005857, TESTI4005961, TESTI4006053, TESTI4006079, TESTI4006112, TESTI4006148, TESTI4006219, TESTI4006234, TESTI4006308, TESTI4006326, TESTI4006393, TESTI4006407, TESTI4006412, TESTI4006420, TESTI4006441, TESTI4006473, TESTI4006539, TESTI4006546, TESTI4006567, TESTI4006704, TESTI4006728, TESTI4006802, TESTI4007064, TESTI4007163, TESTI4007176, TESTI4007203, TESTI4007239, TESTI4007369, TESTI4007373, TESTI4007382, TESTI4007404, TESTI4007489, TESTI4007565, TESTI4007671, TESTI4007775, TESTI4007778, TESTI4007799, TESTI4007810, TESTI4007965, TESTI4008007, TESTI4008018, TESTI4008050, TESTI4008058, TESTI4008086, TESTI4008097,

[3414] TESTI4008176, TESTI4008209, TESTI4008219, TESTI4008250, TESTI4008302, TESTI4008305, TESTI4008401, TESTI4008417, TESTI4008429, TESTI4008573, TESTI4008797, TESTI4008816, TESTI4008840, TESTI4008935, TESTI4008993, TESTI4009022, TESTI4009028, TESTI4009034, TESTI4009123, TESTI4009160, TESTI4009215, TESTI4009283, TESTI4009306, TESTI4009374, TESTI4009406, TESTI4009501, TESTI4009563, TESTI4009608, TESTI4009638, TESTI4009752, TESTI4009881, TESTI4009886, TESTI4009928, TESTI4010076, TESTI4010082, TESTI4010095, TESTI4010211, TESTI4010377, TESTI4010475, TESTI4010544, TESTI4010713, TESTI4010721, TESTI4010789, TESTI4010817, TESTI4010831, TESTI4010902, TESTI4010928, TESTI4011070, TESTI4011072, TESTI4011084,

[3415] TESTI4011118, TESTI4011246, TESTI4011484, TESTI4011505, TESTI4011532, TESTI4011616, TESTI4011744, TESTI4011745, TESTI4011829, TESTI4011926, TESTI4011956, TESTI4012010, TESTI4012086, TESTI4012258, TESTI4012293, TESTI4012329, TESTI4012382, TESTI4012406, TESTI4012448, TESTI4012451, TESTI4012505, TESTI4012556, TESTI4012623, TESTI4012646, TESTI4012679, TESTI4012911, TESTI4012956, TESTI4012960, TESTI4013365, TESTI4013369, TESTI4013410, TESTI4013602, TESTI4013667, TESTI4013675, TESTI4013685, TESTI4013742, TESTI4013774, TESTI4013817, TESTI4013830, TESTI4013852, TESTI4013894, TESTI4013924, TESTI4013960, TESTI4013962, TESTI4014159, TESTI4014175, TESTI4014265, TESTI4014276, TESTI4014306, TESTI4014392,

[3416] TESTI4014415, TESTI4014445, TESTI4014553, TESTI4014661, TESTI4014694, TESTI4014801, TESTI4014818, TESTI4014891, TESTI4014924, TESTI4014932, TESTI4014977, TESTI4015012, TESTI4015129, TESTI4015145, TESTI4015204, TESTI4015263, TESTI4015293, TESTI4015299, TESTI4015339, TESTI4015398, TESTI4015442, TESTI4015471, TESTI4015477, TESTI4015600, TESTI4015646, TESTI4015681, TESTI4015688, TESTI4015790, TESTI4016110, TESTI4016238, TESTI4016551, TESTI4016812, TESTI4016822, TESTI4016865, TESTI4016882, TESTI4017001, TESTI4017116, TESTI4017137, TESTI4017229, TESTI4017254, TESTI4017269, TESTI4017380, TESTI4017382, TESTI4017543, TESTI4017575, TESTI4017647, TESTI4017714, TESTI4017763, TESTI4017848, TESTI4017854,

[3417] TESTI4017901, TESTI4017961, TESTI4017984, TESTI4018101, TESTI4018208, TESTI4018382, TESTI4018436, TESTI4018506, TESTI4018555, TESTI4018751, TESTI4018806, TESTI4018835, TESTI4018859, TESTI4018881, TESTI4018886, TESTI4019140, TESTI4019149, TESTI4019299, TESTI4019417, TESTI4019440, TESTI4019566, TESTI4019657, TESTI4019756, TESTI4019843, TESTI4020092, TESTI4020102, TESTI4020342, TESTI4020460, TESTI4020596, TESTI4020806, TESTI4020819, TESTI4020920, TESTI4021129, TESTI4021197, TESTI4021294, TESTI4021377, TESTI4021456, TESTI4021491, TESTI4021569, TESTI4021713, TESTI4021821, TESTI4022158, TESTI4022577, TESTI4022716, TESTI4022873, TESTI4023096, TESTI4023172, TESTI4023546, TESTI4023555, TESTI4023654,

[3418] TESTI4023722, TESTI4023762, TESTI4023942, TESTI4024096, TESTI4024240, TESTI4024294, TESTI4024344, TESTI4024387, TESTI4024420, TESTI4024494, TESTI4024874, TESTI4024890, TESTI4024907, TESTI4024930, TESTI4025062, TESTI4025268, TESTI4025401, TESTI4025494, TESTI4025547, TESTI4025731, TESTI4025797, TESTI4025865, TESTI4025908, TESTI4025920, TESTI4026080, TESTI4026192, TESTI4026207, TESTI4026295, TESTI4026390, TESTI4026456, TESTI4026510, TESTI4026524, TESTI4026680, TESTI4026700, TESTI4026762, TESTI4026785, TESTI4027139, TESTI4027170, TESTI4027262, TESTI4027516, TESTI4027557, TESTI4027660, TESTI4027821, TESTI4027969, TESTI4028042, TESTI4028059, TESTI4028062, TESTI4028182, TESTI4028429, TESTI4028612,

[3419] TESTI4028692, TESTI4028809, TESTI4028823, TESTI4028880, TESTI4028904, TESTI4028938, TESTI4028958, TESTI4028983, TESTI4029023, TESTI4029348, TESTI4029370, TESTI4029528, TESTI4029651, TESTI4029676, TESTI4029690, TESTI4029731, TESTI4029743, TESTI4030069, TESTI4030159, TESTI4030319, TESTI4030505, TESTI4030603, TESTI4030669, TESTI4030673, TESTI4030864, TESTI4031066, TESTI4031173, TESTI4031335, TESTI4031745, TESTI4031818, TESTI4032090, TESTI4032112, TESTI4032128, TESTI4032270, TESTI4032375, TESTI4032834, TESTI4032856, TESTI4032895, TESTI4033146, TESTI4033177, TESTI4033433, TESTI4034172, TESTI4034212, TESTI4034432, TESTI4034495, TESTI4034632, TESTI4034633, TESTI4034912, TESTI4034973, TESTI4035063,

[3420] TESTI4035065, TESTI4035498, TESTI4035508, TESTI4035581, TESTI4035602, TESTI4035637, TESTI4035649, TESTI4035770, TESTI4035872, TESTI4035895, TESTI4035898, TESTI4035989, TESTI4036012, TESTI4036042, TESTI4036048, TESTI4036315, TESTI4036319, TESTI4036449, TESTI4036767, TESTI4036909, TESTI4037066, TESTI4037188, TESTI4037228, TESTI4037244, TESTI4037727, TESTI4037949, TESTI4038047, TESTI4038099, TESTI4038156, TESTI4038223, TESTI4038258, TESTI4038339, TESTI4038492, TESTI4038721, TESTI4038758, TESTI4038779, TESTI4038818, TESTI4039038, TESTI4039086, TESTI4039451, TESTI4039575, TESTI4039659, TESTI4039744, TESTI4039904, TESTI4040197, TESTI4040363, TESTI4040535, TESTI4040559, TESTI4040598, TESTI4040800,

[3421] TESTI4040804, TESTI4040939, TESTI4040956, TESTI4041049, TESTI4041053, TESTI4041086, TESTI4041099, TESTI4041143, TESTI4041482, TESTI4041519, TESTI4041624, TESTI4041629, TESTI4041832, TESTI4041844, TESTI4041903, TESTI4041954, TESTI4041984, TESTI4041985, TESTI4041986, TESTI4042098, TESTI4042420, TESTI4042440, TESTI4042444, TESTI4042711, TESTI4042846, TESTI4043067, TESTI4043129, TESTI4043166, TESTI4043203, TESTI4043223, TESTI4043371, TESTI4043378, TESTI4043512, TESTI4043551, TESTI4043710, TESTI4043947, TESTI4044035, TESTI4044076, TESTI4044084, TESTI4044123, TESTI4044186, TESTI4044234, TESTI4044291, TESTI4044296, TESTI4044300, TESTI4044682, TESTI4044770, TESTI4045168, TESTI4045312, TESTI4045330,

[3422] TESTI4045470, TESTI4045701, TESTI4045908, TESTI4045955, TESTI4045982, TESTI4046073, TESTI4046090, TESTI4046240, TESTI4046245, TESTI4046253, TESTI4046282, TESTI4046328, TESTI4046450, TESTI4046457, TESTI4046487, TESTI4046502, TESTI4046523, TESTI4046873, TESTI4046884, TESTI4046896, TESTI4046903, TESTI4046962, TESTI4047069, TESTI4047119, TESTI4047305, TESTI4047328, TESTI4047437, TESTI4047569, TESTI4047746, TESTI4047808, TUTER1000014, TUTER1000137, TUTER2000057, TUTER2000283, TUTER2000425, TUTER2000916, TUTER2001286, TUTER2001341, TUTER2001387, TUTER2001433, TUTER2001461, TUTER2002028, TUTER2002074, TUTER2002158, TUTER2002228, TUTER2002356, TUTER2002729, UMVEN1000122, UMVEN1000156, UMVEN1000186,

[3423] UMVEN2000046, UMVEN2000069, UTERU1000015, UTERU1000024, UTERU1000031, UTERU1000032, UTERU1000057, UTERU1000065, UTERU1000077, UTERU1000093, UTERU1000096, UTERU1000109, UTERU1000131, UTERU1000138, UTERU1000148, UTERU1000160, UTERU1000183, UTERU1000187, UTERU1000192, UTERU1000249, UTERU1000337, UTERU1000339, UTERU2000023, UTERU2000047, UTERU2000074, UTERU2000099, UTERU2000154, UTERU2000197, UTERU2000218, UTERU2000238, UTERU2000243, UTERU2000300, UTERU2000329, UTERU2000332, UTERU2000338, UTERU2000349, UTERU2000377, UTERU2000393, UTERU2000418, UTERU2000465, UTERU2000485, UTERU2000517, UTERU2000524, UTERU2000539, UTERU2000541, UTERU2000542, UTERU2000546, UTERU2000550, UTERU2000569, UTERU2000607,

[3424] UTERU2000629, UTERU2000649, UTERU2000663, UTERU2000696, UTERU2000794, UTERU2000830, UTERU2000844, UTERU2000922, UTERU2000925, UTERU2001024, UTERU2001110, UTERU2001176, UTERU2001281, UTERU2001389, UTERU2001409, UTERU2001412, UTERU2001504, UTERU2001658, UTERU2001747, UTERU2001876, UTERU2002001, UTERU2002011, UTERU2002176, UTERU2002198, UTERU2002332, UTERU2002473, UTERU2002547, UTERU2002693, UTERU2002733, UTERU2002736, UTERU2002737, UTERU2002826, UTERU2002841, UTERU2002964, UTERU2002993, UTERU2003035, UTERU2003057, UTERU2003126, UTERU2003135, UTERU2003321, UTERU2003399, UTERU2003411, UTERU2003456, UTERU2003577, UTERU2003926, UTERU2003973, UTERU2004015, UTERU2004039, UTERU2004061, UTERU2004073,

[3425] UTERU2004163, UTERU2004299, UTERU2004461, UTERU2004520, UTERU2004564, UTERU2004664, UTERU2004688, UTERU2004698, UTERU2004929, UTERU2005050, UTERU2005069, UTERU2005179, UTERU2005346, UTERU2005446, UTERU2005450, UTERU2005533, UTERU2005664, UTERU2005822, UTERU2005903, UTERU2005905, UTERU2006103, UTERU2006137, UTERU2006182, UTERU2006400, UTERU2006412, UTERU2006429, UTERU2006486, UTERU2006524, UTERU2006547, UTERU2006568, UTERU2006643, UTERU2006651, UTERU2006705, UTERU2006899, UTERU2007004, UTERU2007075, UTERU2007081, UTERU2007128, UTERU2007253, UTERU2007267, UTERU2007444, UTERU2007499, UTERU2007639, UTERU2007724, UTERU2007924, UTERU2007942, UTERU2008018, UTERU2008019, UTERU2008027, UTERU2008040,

[3426] UTERU2008077, UTERU2008130, UTERU2008347, UTERU2008516, UTERU2008561, UTERU2008653, UTERU2008705, UTERU2008707, UTERU2008747, UTERU2008785, UTERU2008845, UTERU2008901, UTERU2008930, UTERU2008938, UTERU2008939, UTERU2008962, UTERU2009094, UTERU2009120, UTERU2009131, UTERU2009147, UTERU2009206, UTERU2009283, UTERU2009414, UTERU2009483, UTERU2009510, UTERU2009538, UTERU2009540, UTERU2009776, UTERU2009904, UTERU2009951, UTERU2010115, UTERU2010124, UTERU2010164, UTERU2010231, UTERU2010304, UTERU2010320, UTERU2010431, UTERU2010525, UTERU2010651, UTERU2010724, UTERU2010747, UTERU2011195, UTERU2011199, UTERU2011261, UTERU2011410, UTERU2011574, UTERU2011657, UTERU2011806, UTERU2011811, UTERU2011897,

[3427] UTERU2011962, UTERU2011968, UTERU2012031, UTERU2012101, UTERU2012114, UTERU2012252, UTERU2012333, UTERU2012407, UTERU2012526, UTERU2012581, UTERU2012610, UTERU2012615, UTERU2012703, UTERU2012715, UTERU2012786, UTERU2012856, UTERU2012890, UTERU2012938, UTERU2012976, UTERU2013048, UTERU2013078, UTERU2013231, UTERU2013262, UTERU2013280, UTERU2013322, UTERU2013483, UTERU2013491, UTERU2013502, UTERU2013586, UTERU2013926, UTERU2013976, UTERU2014001, UTERU2014024, UTERU2014167, UTERU2014223, UTERU2014398, UTERU2014464, UTERU2014548, UTERU2014601, UTERU2014631, UTERU2014668, UTERU2014678, UTERU2014728, UTERU2014898, UTERU2014998, UTERU2015062, UTERU2015087, UTERU2015108, UTERU2015190, UTERU2015198,

[3428] UTERU2015202, UTERU2015405, UTERU2015640, UTERU2015880, UTERU2016147, UTERU2016157, UTERU2016426, UTERU2016464, UTERU2016669, UTERU2016757, UTERU2016761, UTERU2016896, UTERU2016902, UTERU2016979, UTERU2016981, UTERU2017123, UTERU2017303, UTERU2017421, UTERU2017492, UTERU2017613, UTERU2017623, UTERU2017632, UTERU2017761, UTERU2017762, UTERU2017810, UTERU2017988, UTERU2018127, UTERU2018180, UTERU2018200, UTERU2018333, UTERU2018364, UTERU2018514, UTERU2018522, UTERU2018523, UTERU2018544, UTERU2018566, UTERU2018609, UTERU2018674, UTERU2018712, UTERU2018784, UTERU2018789, UTERU2018811, UTERU2018867, UTERU2018881, UTERU2018955, UTERU2019038, UTERU2019163, UTERU2019257, UTERU2019453, UTERU2019491,

[3429] UTERU2019534, UTERU2019681, UTERU2019706, UTERU2019710, UTERU2019940, UTERU2019959, UTERU2019964, UTERU2020226, UTERU2020242, UTERU2020292, UTERU2020351, UTERU2020491, UTERU2020718, UTERU2021163, UTERU2021380, UTERU2021649, UTERU2021820, UTERU2022020, UTERU2022773, UTERU2022955, UTERU2022981, UTERU2023039, UTERU2023045, UTERU2023262, UTERU2023687, UTERU2023712, UTERU2023941, UTERU2024002, UTERU2024042, UTERU2024141, UTERU2024481, UTERU2024758, UTERU2024820, UTERU2024881, UTERU2025025, UTERU2025041, UTERU2025301, UTERU2025366, UTERU2025415, UTERU2025579, UTERU2025645, UTERU2025891, UTERU2026025, UTERU2026090, UTERU2026142, UTERU2026203, UTERU2026775, UTERU2027023, UTERU2027369, UTERU2027591,

[3430] UTERU2027616, UTERU2027941, UTERU2028377, UTERU2029503, UTERU2029660, UTERU2029742, UTERU2029953, UTERU2030213, UTERU2030270, UTERU2030280, UTERU2031060, UTERU2031268, UTERU2031295, UTERU2031521, UTERU2031611, UTERU2031703, UTERU2031834, UTERU2031851, UTERU2032075, UTERU2032220, UTERU2032279, UTERU2032726, UTERU2033172, UTERU2033375, UTERU2033382, UTERU2033420, UTERU2033530, UTERU2033577, UTERU2034053, UTERU2034695, UTERU2035187, UTERU2035231, UTERU2035306, UTERU2035323, UTERU2035328, UTERU2035331, UTERU2035452, UTERU2035469, UTERU2035503, UTERU2035745, UTERU2035908, UTERU2035926, UTERU2035978, UTERU2036089, UTERU2036507, UTERU2036512, UTERU2036530, UTERU2036623, UTERU2036690, UTERU2037224,

[3431] UTERU2037361, UTERU2037423, UTERU2037577, UTERU2037674, UTERU2037791, UTERU2037843, UTERU2038171, UTERU2038251, UTERU3000226, UTERU3000402, UTERU3000665, UTERU3000670, UTERU3000727, UTERU3000828, UTERU3000844, UTERU3000899, UTERU3000959, UTERU3001029, UTERU3001053, UTERU3001059, UTERU3001158, UTERU3001240, UTERU3001394, UTERU3001558, UTERU3001571, UTERU3001585, UTERU3001632, UTERU3001652, UTERU3001766, UTERU3001988, UTERU3002209, UTERU3002383, UTERU3002600, UTERU3002620, UTERU3002667, UTERU3002701, UTERU3002731, UTERU3002768, UTERU3002993, UTERU3003116, UTERU3003178, UTERU3003465, UTERU3003495, UTERU3003523, UTERU3003774, UTERU3003776, UTERU3004384, UTERU3004418, UTERU3004477, UTERU3004523,

[3432] UTERU3004616, UTERU3004635, UTERU3004709, UTERU3004938, UTERU3004992, UTERU3005159, UTERU3005205, UTERU3005230, UTERU3005264, UTERU3005460, UTERU3005536, UTERU3005585, UTERU3005767, UTERU3005907, UTERU3005970, UTERU3006008, UTERU3006228, UTERU3006308, UTERU3006538, UTERU3006640, UTERU3006687, UTERU3006720, UTERU3006798, UTERU3006884, UTERU3007108, UTERU3007134, UTERU3007419, UTERU3007640, UTERU3007731, UTERU3007913, UTERU3008280, UTERU3008463, UTERU3008660, UTERU3008671, UTERU3008722, UTERU3008917, UTERU3009259, UTERU3009490, UTERU3009517, UTERU3009690, UTERU3009775, UTERU3009871, UTERU3009979, UTERU3009987, UTERU3010029, UTERU3010526, UTERU3010604, UTERU3010892, UTERU3010919, UTERU3011063,

[3433] UTERU3011092, UTERU3011273, UTERU3011398, UTERU3011558, UTERU3011795, UTERU3011837, UTERU3012293, UTERU3012414, UTERU3012476, UTERU3012599, UTERU3012999, UTERU3013167, UTERU3013781, UTERU3014274, UTERU3014446, UTERU3014611, UTERU3014647, UTERU3014791, UTERU3014906, UTERU3015011, UTERU3015086, UTERU3015299, UTERU3015412, UTERU3015500, UTERU3015647, UTERU3015844, UTERU3016070, UTERU3016273, UTERU3016274, UTERU3016308, UTERU3016789, UTERU3017176, UTERU3017441, UTERU3017626, UTERU3017995, UTERU3018154, UTERU3018255, UTERU3018616, UTERU3019078

[3434] Of the 17,176 genes that include the cDNAs of the present invention, genes whose expression levels were high enough to detect in each of the TUTER, UMVEN, and UTERU libraries were analyzed for expression frequency. The analysis results are described below. Each is a relative value, where the expression level over all tissues is taken as 100. The larger this value, the greater the level of expression.

TABLE 40

| Clone Name | TUTER | UMVEN | UTERU |
|---|---|---|---|
| 3NB691000173 | 0 | 0.000 | 0.942 |
| 3NB692000281 | 9.812 | 0 | 0.525 |
| 3NB692000545 | 0 | 0.000 | 3.365 |
| 3NB692000912 | 0 | 0.000 | 0.560 |
| 3NB692001334 | 5.982 | 0 | 0.000 |
| 3NB692001853 | 0 | 0.000 | 3.123 |
| ADRGL2000006 | 0 | 0.000 | 1.240 |
| ADRGL2000042 | 0 | 0.000 | 3.029 |
| ADRGL2000328 | 0 | 0.000 | 8.029 |
| ADRGL2002013 | 0 | 0.000 | 10.729 |
| ADRGL2004676 | 0 | 0.000 | 5.199 |
| ADRGL2009273 | 0 | 0.000 | 1.657 |
| ASTRO2000046 | 0 | 0.000 | 0.487 |
| ASTRO2000480 | 0 | 0.000 | 3.377 |
| ASTRO2000801 | 0 | 0.000 | 1.217 |
| ASTRO2000914 | 43.380 | 0 | 0.000 |
| ASTRO2001076 | 0 | 0.000 | 1.695 |
| ASTRO2001823 | 0 | 0.000 | 1.731 |
| ASTRO2003024 | 21.123 | 0 | 2.261 |
| ASTRO2003316 | 0 | 0.000 | 10.555 |
| ASTRO2003925 | 0 | 0.000 | 25.609 |
| ASTRO2005863 | 0 | 0.000 | 4.534 |
| ASTRO2006732 | 0 | 0.000 | 18.293 |
| ASTRO2007047 | 0 | 0.000 | 4.985 |
| ASTRO2007948 | 0 | 0.000 | 2.987 |
| ASTRO2008216 | 0 | 0.000 | 3.806 |
| ASTRO2008508 | 0 | 0.000 | 10.726 |
| ASTRO2010582 | 0 | 0.000 | 20.644 |
| ASTRO2010819 | 0 | 0.000 | 3.210 |
| ASTRO2013585 | 0 | 0.000 | 0.581 |
| ASTRO2016491 | 0 | 0.000 | 0.601 |
| BGGI12000054 | 0 | 0.000 | 0.281 |
| BGGI12001002 | 0 | 0.000 | 4.235 |
| BLADE2004722 | 0 | 0.000 | 11.937 |
| BLADE2006412 | 0 | 0.000 | 7.241 |
| BLADE2007589 | 0 | 0.000 | 11.792 |
| BNGH41000137 | 0 | 0.000 | 15.524 |
| BNGH42000739 | 0 | 0.000 | 0.742 |
| BNGH42002487 | 0 | 0.000 | 11.163 |
| BNGH42006135 | 0 | 0.000 | 7.087 |
| BNGH42007460 | 0 | 0.000 | 2.404 |
| BNGH42007709 | 0 | 0.000 | 1.373 |
| BNGH42007788 | 0 | 0.000 | 3.672 |
| BRACE1000042 | 0 | 0.000 | 7.262 |
| BRACE1000070 | 0 | 0.000 | 2.132 |
| BRACE1000131 | 0 | 0.000 | 3.727 |
| BRACE1000186 | 0 | 0.000 | 2.579 |
| BRACE2000347 | 0 | 0.000 | 6.166 |
| BRACE2000750 | 0 | 0.000 | 24.547 |
| BRACE2001065 | 0 | 0.000 | 7.920 |
| BRACE2001143 | 0 | 0.000 | 1.772 |
| BRACE2001188 | 0 | 0.000 | 3.367 |
| BRACE2001692 | 0 | 0.000 | 0.722 |
| BRACE2001855 | 0 | 0.000 | 1.372 |
| BRACE2001971 | 0 | 0.000 | 2.675 |
| BRACE2002176 | 0 | 0.000 | 62.692 |
| BRACE2002409 | 0 | 0.000 | 62.692 |
| BRACE2002478 | 0 | 0.000 | 17.287 |
| BRACE2002649 | 0 | 0.000 | 12.628 |
| BRACE2002677 | 0 | 0.000 | 6.908 |
| BRACE2003172 | 0 | 0.000 | 6.590 |
| BRACE2003254 | 0 | 0.000 | 1.080 |
| BRACE2003512 | 0 | 0.000 | 77.068 |
| BRACE2003516 | 0 | 0.000 | 62.692 |
| BRACE2003527 | 0 | 0.000 | 3.074 |
| BRACE2003785 | 0 | 0.000 | 1.159 |
| BRACE2003846 | 0 | 0.000 | 0.777 |
| BRACE2003892 | 0 | 0.000 | 2.603 |
| BRACE2003904 | 0 | 0.000 | 3.092 |
| BRACE2005087 | 0 | 0.000 | 8.660 |
| BRACE2005196 | 0 | 0.000 | 37.926 |
| BRACE2005231 | 0 | 0.000 | 3.808 |
| BRACE2005290 | 0 | 0.000 | 30.346 |
| BRACE2005719 | 0 | 0.000 | 3.542 |
| BRACE2006084 | 0 | 0.000 | 3.661 |
| BRACE2006354 | 0 | 0.000 | 7.422 |
| BRACE2006397 | 6.578 | 0 | 0.352 |
| BRACE2006537 | 0 | 0.000 | 2.567 |
| BRACE2006636 | 0 | 0.000 | 16.351 |
| BRACE2006900 | 0 | 0.000 | 1.227 |
| BRACE2006944 | 0 | 0.000 | 13.911 |
| BRACE2007064 | 0 | 0.000 | 3.876 |
| BRACE2007174 | 0 | 0.000 | 18.633 |
| BRACE2007518 | 0 | 0.000 | 2.707 |
| BRACE2007798 | 0 | 0.000 | 1.234 |
| BRACE2008653 | 0 | 0.000 | 4.403 |
| BRACE2008941 | 0 | 0.000 | 11.920 |
| BRACE2009037 | 0 | 0.000 | 0.697 |
| BRACE2009517 | 0 | 0.000 | 6.470 |
| BRACE2011183 | 0 | 0.000 | 7.667 |
| BRACE2012528 | 0 | 0.000 | 0.566 |
| BRACE2017397 | 0 | 0.000 | 11.252 |
| BRACE2017574 | 0 | 0.000 | 6.110 |
| BRACE2019147 | 0 | 0.000 | 2.554 |
| BRACE2020584 | 0 | 0.000 | 62.692 |
| BRACE2022333 | 0 | 0.000 | 10.589 |
| BRACE2022638 | 0 | 0.000 | 2.667 |
| BRACE2027896 | 0 | 0.000 | 30.503 |
| BRACE2030341 | 0 | 0.000 | 16.499 |
| BRACE2037310 | 0 | 0.000 | 23.401 |
| BRACE2045445 | 0 | 0.000 | 62.692 |
| BRACE3004371 | 0 | 0.000 | 4.481 |
| BRACE3005938 | 0 | 0.000 | 1.313 |
| BRACE3007258 | 0 | 0.000 | 15.521 |
| BRACE3008772 | 0 | 0.000 | 62.692 |
| BRACE3010428 | 0 | 0.000 | 5.461 |
| BRACE3027478 | 0 | 0.000 | 19.089 |
| BRACE3040863 | 0 | 0.000 | 21.335 |
| BRALZ2009446 | 0 | 0.000 | 5.561 |
| BRALZ2009482 | 0 | 0.000 | 0.443 |
| BRALZ2017359 | 0 | 0.000 | 24.816 |
| BRAMY2000585 | 0 | 0.000 | 2.929 |
| BRAMY2004363 | 0 | 0.000 | 12.191 |
| BRAMY2004521 | 0 | 0.000 | 5.654 |
| BRAMY2006366 | 0 | 0.000 | 10.987 |
| BRAMY2009123 | 0 | 0.000 | 54.206 |
| BRAMY2009934 | 0 | 0.000 | 7.051 |
| BRAMY2011105 | 67.510 | 0 | 0.000 |
| BRAMY2012536 | 0 | 0.000 | 0.688 |
| BRAMY2013659 | 0 | 0.000 | 34.645 |
| BRAMY2019989 | 0 | 0.000 | 1.150 |
| BRAMY2020427 | 0 | 0.000 | 0.706 |
| BRAMY2022168 | 0 | 0.000 | 16.134 |
| BRAMY2026685 | 0 | 0.000 | 2.956 |
| BRAMY2028740 | 0 | 0.000 | 1.110 |
| BRAMY2031516 | 0 | 0.000 | 8.809 |
| BRAMY2032087 | 0 | 0.000 | 4.333 |
| BRAMY2040095 | 0 | 0.000 | 0.815 |
| BRAMY3002458 | 0 | 0.000 | 14.807 |
| BRAMY3005184 | 0 | 0.000 | 26.725 |
| BRAWH1000040 | 0 | 0.000 | 2.462 |
| BRAWH1000093 | 10.279 | 0 | 2.200 |
| BRAWH2000082 | 0 | 0.000 | 0.457 |
| BRAWH2000488 | 0 | 0.000 | 12.025 |
| BRAWH2000588 | 0 | 0.000 | 1.496 |
| BRAWH2000633 | 0 | 0.000 | 1.581 |
| BRAWH2000697 | 0 | 0.000 | 1.206 |
| BRAWH2000839 | 0 | 0.000 | 0.980 |
| BRAWH2001092 | 0 | 0.000 | 1.677 |
| BRAWH2001141 | 0 | 0.000 | 6.061 |
| BRAWH2001412 | 0 | 0.000 | 17.933 |
| BRAWH2001439 | 0 | 0.000 | 1.227 |
| BRAWH2002601 | 0 | 0.000 | 5.932 |
| BRAWH2003693 | 0 | 0.000 | 4.080 |
| BRAWH2004078 | 0 | 0.000 | 6.285 |
| BRAWH2005578 | 0 | 0.000 | 15.983 |
| BRAWH2005661 | 0 | 0.000 | 1.907 |
| BRAWH2007605 | 0 | 0.000 | 2.446 |
| BRAWH2008058 | 0 | 0.000 | 27.939 |
| BRAWH2009238 | 0 | 0.000 | 6.217 |
| BRAWH2011343 | 0 | 0.000 | 8.367 |
| BRAWH2012698 | 0 | 0.000 | 22.868 |
| BRAWH2014188 | 0 | 0.000 | 11.100 |
| BRAWH2014473 | 0 | 0.000 | 54.394 |
| BRAWH2014645 | 0 | 0.000 | 2.522 |
| BRAWH2016166 | 0 | 0.000 | 18.040 |
| BRAWH2017304 | 0 | 0.000 | 19.804 |
| BRAWH2017685 | 0 | 0.000 | 1.211 |
| BRAWH2018526 | 0 | 0.000 | 0.367 |
| BRAWH2018745 | 0 | 0.000 | 54.394 |
| BRAWH3000314 | 0 | 0.000 | 28.447 |
| BRAWH3001326 | 0 | 0.000 | 54.394 |
| BRAWH3002574 | 0 | 0.000 | 7.885 |
| BRAWH3002853 | 0 | 0.000 | 1.764 |
| BRAWH3003727 | 0 | 0.000 | 11.993 |
| BRAWH3004350 | 0 | 0.000 | 19.774 |
| BRAWH3016271 | 0 | 0.000 | 6.433 |
| BRAWH3021545 | 0 | 0.000 | 17.404 |
| BRAWH3026529 | 0 | 0.000 | 54.394 |
| BRAWH3029806 | 0 | 0.000 | 10.629 |
| BRCAN2003944 | 0 | 0.000 | 0.336 |
| BRCAN2009432 | 29.345 | 0 | 3.141 |
| BRCAN2011946 | 0 | 0.000 | 7.542 |
| BRCAN2021024 | 0 | 0.000 | 24.461 |
| BRCAN2022126 | 0 | 0.000 | 5.791 |
| BRCAN2024572 | 0 | 0.000 | 3.257 |
| BRCAN2028355 | 0 | 0.000 | 1.762 |
| BRCOC1000040 | 0 | 0.000 | 14.069 |
| BRCOC2000333 | 0 | 0.000 | 14.286 |
| BRCOC2003187 | 0 | 0.000 | 0.938 |
| BRCOC2010730 | 0 | 0.000 | 12.892 |
| BRCOC2012172 | 0 | 0.000 | 6.710 |
| BRCOC2012551 | 0 | 0.000 | 8.602 |
| BRCOC2015597 | 0 | 0.000 | 25.187 |
| BRHIP2001099 | 0 | 0.000 | 8.268 |
| BRHIP2003062 | 0 | 0.000 | 56.647 |
| BRHIP2007305 | 0 | 0.000 | 1.350 |
| BRHIP2010487 | 91.660 | 0 | 0.000 |
| BRHIP2010571 | 0 | 0.000 | 18.366 |
| BRHIP2011491 | 0 | 0.000 | 0.986 |
| BRHIP2011616 | 0 | 0.000 | 53.896 |
| BRHIP2015245 | 0 | 0.000 | 5.663 |
| BRHIP2018712 | 0 | 0.000 | 9.661 |
| BRHIP2019149 | 0 | 0.000 | 13.172 |
| BRHIP2020799 | 0 | 0.000 | 12.072 |
| BRHIP2021762 | 0 | 0.000 | 6.646 |
| BRHIP2022228 | 0 | 0.000 | 10.898 |
| BRHIP2022326 | 0 | 0.000 | 1.015 |
| BRHIP2023888 | 0 | 0.000 | 0.439 |
| BRHIP2024742 | 0 | 0.000 | 1.487 |
| BRHIP2024911 | 0 | 0.000 | 11.054 |
| BRHIP2027017 | 0 | 0.000 | 13.730 |
| BRHIP3000017 | 0 | 0.000 | 15.777 |
| BRHIP3000377 | 0 | 0.000 | 6.870 |
| BRHIP3001076 | 0 | 0.000 | 53.896 |
| BRHIP3002141 | 0 | 0.000 | 18.713 |
| BRHIP3005307 | 0 | 0.000 | 53.896 |
| BRHIP3007223 | 0 | 0.000 | 2.405 |
| BRHIP3007586 | 0 | 0.000 | 4.116 |
| BRHIP3008344 | 0 | 0.000 | 53.896 |
| BRHIP3008565 | 0 | 0.000 | 53.896 |
| BRHIP3012997 | 0 | 87.379 | 0.000 |
| BRHIP3017855 | 0 | 0.000 | 27.401 |
| BRHIP3020046 | 0 | 0.000 | 1.208 |
| BRSSN2000295 | 0 | 0.000 | 8.260 |
| BRSSN2000498 | 0 | 0.000 | 2.610 |
| BRSSN2001213 | 0 | 0.000 | 24.268 |
| BRSSN2001869 | 0 | 0.000 | 3.600 |
| BRSSN2006892 | 0 | 0.000 | 18.468 |
| BRSSN2009518 | 0 | 0.000 | 2.054 |
| BRSSN2010019 | 0 | 0.000 | 13.842 |
| BRSSN2014685 | 0 | 0.000 | 16.936 |
| BRSSN2017422 | 0 | 0.000 | 17.148 |
| BRSTN2001067 | 0 | 0.000 | 7.384 |
| BRSTN2010089 | 0 | 0.000 | 7.869 |
| BRSTN2011961 | 0 | 0.000 | 0.345 |
| BRSTN2012069 | 3.583 | 1.784 | 0.271 |
| BRSTN2012174 | 0 | 0.000 | 0.482 |
| BRSTN2013502 | 0 | 0.000 | 5.797 |
| BRSTN2013931 | 0 | 0.000 | 3.457 |
| BRSTN2016470 | 0 | 0.000 | 0.522 |
| BRSTN2016892 | 0 | 0.000 | 3.559 |
| BRTHA2000057 | 0 | 0.000 | 51.819 |
| BRTHA2004361 | 0 | 0.000 | 51.819 |
| BRTHA2005831 | 0 | 0.000 | 51.819 |
| BRTHA2005864 | 0 | 0.000 | 1.935 |
| BRTHA2010608 | 0 | 0.000 | 51.819 |
| BRTHA2012183 | 0 | 0.000 | 51.819 |
| BRTHA2012714 | 0 | 0.000 | 5.980 |
| BRTHA2017178 | 0 | 0.000 | 51.819 |
| BRTHA3003023 | 0 | 0.000 | 2.410 |
| BRTHA3003074 | 0 | 0.000 | 13.429 |
| BRTHA3003736 | 0 | 0.000 | 5.131 |
| BRTHA3004307 | 0 | 0.000 | 17.964 |
| BRTHA3011265 | 0 | 0.000 | 10.176 |
| BRTHA3020314 | 0 | 0.000 | 12.144 |
| BRTHA3023403 | 0 | 0.000 | 26.579 |
| BRTHA3026507 | 0 | 0.000 | 4.167 |
| BRTHA3027879 | 0 | 0.000 | 51.819 |
| CHONS2002829 | 0 | 0.000 | 11.691 |
| CTONG1000052 | 0 | 0.000 | 2.162 |
| CTONG1000087 | 0 | 0.000 | 2.494 |
| CTONG1000094 | 0 | 0.000 | 0.464 |
| CTONG1000137 | 0 | 0.000 | 39.037 |
| CTONG1000180 | 0 | 0.000 | 28.641 |
| CTONG1000241 | 0 | 0.000 | 7.590 |
| CTONG1000277 | 0 | 0.000 | 24.668 |
| CTONG1000467 | 0 | 0.000 | 10.248 |
| CTONG2000411 | 0 | 0.000 | 6.864 |
| CTONG2000508 | 0 | 0.000 | 4.709 |
| CTONG2001748 | 0 | 0.000 | 2.493 |
| CTONG2001932 | 0 | 0.000 | 12.322 |
| CTONG2002073 | 32.643 | 0 | 1.747 |
| CTONG2002270 | 0 | 0.000 | 0.633 |
| CTONG2002744 | 0 | 0.000 | 0.702 |
| CTONG2002766 | 0 | 0.000 | 14.092 |
| CTONG2002803 | 32.814 | 0 | 0.000 |
| CTONG2003298 | 0 | 0.000 | 1.731 |
| CTONG2003348 | 0 | 0.000 | 39.037 |
| CTONG2003517 | 0 | 0.000 | 13.371 |
| CTONG2003524 | 0 | 0.000 | 1.922 |
| CTONG2004423 | 0 | 0.000 | 13.705 |
| CTONG2005145 | 0 | 0.000 | 29.265 |
| CTONG2005615 | 0 | 0.000 | 5.671 |
| CTONG2006235 | 0 | 0.000 | 1.954 |
| CTONG2006377 | 0 | 0.000 | 14.002 |
| CTONG2006562 | 0 | 0.000 | 5.010 |
| CTONG2006932 | 0 | 0.000 | 2.625 |
| CTONG2007078 | 0 | 0.000 | 3.048 |
| CTONG2007500 | 0 | 0.000 | 8.072 |
| CTONG2008343 | 0 | 0.000 | 39.037 |
| CTONG2008398 | 0 | 0.000 | 0.912 |
| CTONG2008518 | 0 | 0.000 | 4.593 |
| CTONG2008689 | 0 | 0.000 | 24.924 |
| CTONG2009529 | 0 | 0.000 | 7.541 |
| CTONG2009923 | 0 | 0.000 | 39.037 |
| CTONG2009938 | 0 | 0.000 | 23.863 |
| CTONG2010348 | 0 | 0.000 | 6.336 |
| CTONG2010408 | 0 | 0.000 | 10.219 |
| CTONG2010649 | 0 | 0.000 | 5.595 |
| CTONG2010821 | 0 | 0.000 | 2.557 |
| CTONG2011801 | 0 | 0.000 | 3.532 |
| CTONG2011825 | 0 | 0.000 | 10.239 |
| CTONG2012452 | 7.936 | 0 | 0.000 |
| CTONG2012847 | 38.378 | 0 | 2.054 |
| CTONG2012879 | 0 | 0.000 | 4.056 |
| CTONG2012996 | 0 | 0.000 | 3.482 |
| CTONG2013128 | 0 | 0.000 | 39.037 |
| CTONG2013156 | 0 | 0.000 | 24.668 |
| CTONG2013907 | 0 | 0.000 | 2.571 |
| CTONG2013934 | 0 | 0.000 | 8.273 |
| CTONG2014369 | 0 | 0.000 | 4.963 |
| CTONG2014898 | 0 | 0.000 | 13.759 |
| CTONG2015345 | 0 | 0.000 | 10.182 |
| CTONG2016056 | 0 | 0.000 | 2.372 |
| CTONG2016408 | 0 | 0.000 | 4.416 |
| CTONG2016575 | 0 | 0.000 | 1.779 |
| CTONG2016869 | 0 | 0.000 | 3.150 |
| CTONG2017094 | 0 | 0.000 | 2.666 |
| CTONG2017429 | 0 | 0.000 | 8.607 |
| CTONG2017998 | 0 | 0.000 | 5.976 |
| CTONG2018211 | 0 | 0.000 | 4.068 |
| CTONG2018637 | 0 | 0.000 | 15.649 |
| CTONG2018898 | 0 | 0.000 | 2.298 |
| CTONG2019822 | 0 | 0.000 | 7.755 |
| CTONG2020378 | 0 | 0.000 | 19.250 |
| CTONG2020411 | 0 | 0.000 | 32.844 |
| CTONG2020484 | 0 | 55.423 | 0.000 |
| CTONG2020560 | 0 | 0.000 | 5.368 |
| CTONG2024031 | 0 | 0.000 | 6.165 |
| CTONG2027263 | 0 | 0.000 | 19.641 |
| CTONG2028124 | 0 | 0.000 | 2.997 |
| CTONG3001123 | 0 | 0.000 | 9.359 |
| CTONG3002518 | 0 | 0.000 | 10.064 |
| CTONG3004317 | 0 | 0.000 | 39.037 |
| CTONG3008894 | 0 | 0.000 | 0.867 |
| CTONG3009028 | 0 | 0.000 | 3.839 |
| CTONG3009239 | 0 | 0.000 | 1.722 |
| D3OST3000258 | 0 | 0.000 | 22.242 |
| D6OST2000464 | 0 | 0.000 | 1.307 |
| D9OST2002608 | 0 | 0.000 | 2.657 |
| D9OST2003791 | 0 | 0.000 | 7.297 |
| DFNES1000185 | 29.393 | 0 | 0.000 |
| DFNES2000011 | 0 | 0.000 | 4.565 |
| DFNES2000426 | 0 | 0.000 | 15.059 |
| DFNES2000443 | 0 | 0.000 | 0.810 |
| DFNES2001829 | 0 | 0.000 | 11.006 |
| DFNES2006346 | 0 | 0.000 | 8.425 |
| DFNES2007634 | 0 | 0.000 | 7.421 |
| FCBBF1000024 | 0 | 0.000 | 5.237 |
| FCBBF1000027 | 0 | 0.000 | 2.621 |
| FCBBF1000061 | 0 | 0.000 | 2.805 |
| FCBBF1000182 | 0 | 0.000 | 10.114 |
| FCBBF1000197 | 0 | 0.000 | 2.548 |
| FCBBF1000294 | 0 | 0.000 | 1.284 |
| FCBBF1000367 | 0 | 0.000 | 1.812 |
| FCBBF1000412 | 0 | 0.000 | 2.308 |
| FCBBF1000425 | 0 | 0.000 | 6.226 |
| FCBBF1000466 | 14.193 | 0 | 0.760 |
| FCBBF1000574 | 0 | 0.000 | 4.952 |
| FCBBF1000760 | 0 | 0.000 | 0.781 |
| FCBBF2000087 | 0 | 0.000 | 3.441 |
| FCBBF2000591 | 0 | 0.000 | 0.342 |
| FCBBF2000685 | 0 | 0.000 | 8.114 |
| FCBBF2000885 | 0 | 0.000 | 3.661 |
| FCBBF2001001 | 0 | 0.000 | 11.399 |
| FCBBF2001291 | 0 | 0.000 | 2.269 |
| FCBBF2006380 | 0 | 0.000 | 39.231 |
| FCBBF3000115 | 0 | 0.000 | 9.520 |
| FCBBF3000536 | 0 | 0.000 | 3.179 |
| FCBBF3001470 | 0 | 0.000 | 1.619 |
| FCBBF3003800 | 0 | 0.000 | 1.409 |
| FCBBF3004473 | 25.604 | 0 | 1.370 |
| FCBBF3004847 | 0 | 0.000 | 39.231 |
| FCBBF3006821 | 0 | 0.000 | 13.636 |
| FCBBF3007244 | 0 | 0.000 | 9.258 |
| FCBBF3007859 | 0 | 0.000 | 7.748 |
| FCBBF3008153 | 0 | 0.000 | 6.525 |
| FCBBF3010695 | 0 | 0.000 | 2.958 |
| FCBBF3016928 | 0 | 0.000 | 1.045 |
| FCBBF3017396 | 0 | 0.000 | 7.305 |
| FCBBF3017531 | 0 | 0.000 | 1.912 |
| FCBBF3018796 | 0 | 0.000 | 7.405 |
| FCBBF3019714 | 0 | 0.000 | 2.443 |
| FCBBF3019839 | 0 | 0.000 | 17.866 |
| FCBBF3021807 | 0 | 0.000 | 5.171 |
| FCBBF3023667 | 0 | 0.000 | 0.317 |
| FCBBF3024002 | 0 | 0.000 | 6.769 |
| FCBBF3024623 | 0 | 0.000 | 6.682 |
| FCBBF3025528 | 0 | 0.000 | 5.758 |
| FCBBF3025568 | 0 | 0.000 | 19.615 |
| FCBBF3025737 | 0 | 0.000 | 7.752 |
| FCBBF3025905 | 0 | 0.000 | 19.079 |
| FCBBF4000142 | 0 | 0.000 | 4.360 |
| FCBBF4000446 | 0 | 0.000 | 0.896 |
| FCBBF5000261 | 0 | 0.000 | 6.193 |
| FEBRA1000022 | 0 | 0.000 | 12.554 |
| FEBRA1000088 | 0 | 0.000 | 5.090 |
| FEBRA2000105 | 0 | 0.000 | 1.711 |
| FEBRA2000129 | 0 | 0.000 | 3.100 |
| FEBRA2000210 | 0 | 0.000 | 0.843 |
| FEBRA2000462 | 0 | 0.000 | 6.733 |
| FEBRA2000510 | 0 | 0.000 | 4.401 |
| FEBRA2000536 | 0 | 0.000 | 3.757 |
| FEBRA2000581 | 0 | 0.000 | 0.949 |
| FEBRA2000680 | 0 | 0.000 | 33.628 |
| FEBRA2000733 | 3.756 | 0 | 1.206 |
| FEBRA2000740 | 0 | 0.000 | 9.442 |
| FEBRA2000757 | 0 | 0.000 | 3.652 |
| FEBRA2000856 | 0 | 0.000 | 18.931 |
| FEBRA2000880 | 0 | 0.000 | 12.639 |
| FEBRA2001745 | 0 | 0.000 | 1.495 |
| FEBRA2001828 | 0 | 0.000 | 6.489 |
| FEBRA2002527 | 0 | 0.000 | 3.416 |
| FEBRA2003436 | 0 | 0.000 | 6.630 |
| FEBRA2003750 | 0 | 0.000 | 19.596 |
| FEBRA2003833 | 0 | 0.000 | 14.436 |
| FEBRA2003926 | 0 | 0.000 | 4.163 |
| FEBRA2004042 | 47.274 | 0 | 0.000 |
| FEBRA2004412 | 0 | 0.000 | 3.502 |
| FEBRA2004852 | 0 | 0.000 | 32.361 |
| FEBRA2005752 | 0 | 0.000 | 4.964 |
| FEBRA2006092 | 0 | 0.000 | 2.225 |
| FEBRA2007714 | 0 | 0.000 | 9.952 |
| FEBRA2007818 | 0 | 0.000 | 6.669 |
| FEBRA2007901 | 0 | 0.000 | 4.420 |
| FEBRA2008081 | 0 | 0.000 | 0.845 |
| FEBRA2008087 | 3.995 | 0 | 0.214 |
| FEBRA2008210 | 0 | 0.000 | 15.999 |
| FEBRA2008255 | 0 | 0.000 | 6.035 |
| FEBRA2008302 | 0 | 0.000 | 1.269 |
| FEBRA2008583 | 0 | 0.000 | 0.315 |
| FEBRA2009419 | 0 | 0.000 | 1.576 |
| FEBRA2011090 | 0 | 0.000 | 20.700 |
| FEBRA2011392 | 0 | 0.000 | 32.361 |
| FEBRA2014417 | 0 | 0.000 | 1.288 |
| FEBRA2022055 | 0 | 0.000 | 5.712 |
| FEBRA2022504 | 0 | 0.000 | 1.959 |
| FEBRA2023927 | 0 | 0.000 | 4.858 |
| FEBRA2025838 | 0 | 0.000 | 0.980 |
| FEBRA2026984 | 0 | 0.000 | 20.914 |
| FEBRA2028516 | 0 | 0.000 | 1.364 |
| FELIV1000153 | 0 | 0.000 | 0.197 |
| HCASM2000016 | 0 | 0.000 | 1.780 |
| HCASM2000138 | 0 | 0.000 | 10.075 |
| HCASM2000363 | 0 | 0.000 | 0.811 |
| HCASM2001890 | 0 | 0.000 | 15.228 |
| HCASM2008536 | 0 | 0.000 | 15.228 |
| HCHON1000030 | 0 | 0.000 | 0.216 |
| HCHON1000131 | 0 | 0.000 | 9.787 |
| HCHON1000142 | 0 | 0.000 | 15.860 |
| HCHON2000056 | 0 | 0.000 | 1.353 |
| HCHON2000087 | 0 | 58.329 | 0.738 |
| HCHON2000160 | 0 | 0.000 | 1.201 |
| HCHON2000226 | 0 | 0.000 | 0.962 |
| HCHON2000244 | 0 | 0.000 | 1.569 |
| HCHON2000265 | 0 | 0.000 | 2.413 |
| HCHON2000295 | 0 | 0.000 | 1.045 |
| HCHON2000323 | 0 | 0.000 | 2.209 |
| HCHON2000418 | 0 | 0.000 | 15.860 |
| HCHON2000475 | 0 | 0.000 | 3.175 |
| HCHON2000626 | 0 | 0.000 | 5.608 |
| HCHON2000698 | 0 | 0.000 | 10.256 |
| HCHON2000738 | 0 | 0.000 | 3.551 |
| HCHON2000743 | 0 | 0.000 | 7.282 |
| HCHON2000826 | 0 | 0.000 | 0.854 |
| HCHON2001039 | 0 | 0.000 | 2.662 |
| HCHON2001084 | 0 | 0.000 | 2.739 |
| HCHON2001200 | 0 | 40.779 | 1.032 |
| HCHON2001217 | 0 | 0.000 | 4.966 |
| HCHON2001434 | 0 | 0.000 | 3.644 |
| HCHON2001505 | 0 | 0.000 | 16.079 |
| HCHON2001598 | 0 | 0.000 | 5.796 |
| HCHON2001665 | 0 | 0.000 | 1.840 |
| HCHON2001853 | 0 | 0.000 | 6.680 |
| HCHON2002247 | 0 | 0.000 | 3.348 |
| HCHON2004002 | 0 | 0.000 | 0.936 |
| HCHON2005921 | 0 | 0.000 | 24.732 |
| HCHON2006250 | 34.872 | 0 | 0.000 |
| HCHON2007650 | 0 | 0.000 | 7.263 |
| HCHON2008444 | 0 | 0.000 | 15.860 |
| HEART1000149 | 0 | 0.000 | 4.480 |
| HEART1000185 | 0 | 0.000 | 5.657 |
| HEART2000506 | 0 | 0.000 | 4.183 |
| HEART2004931 | 0 | 0.000 | 8.110 |
| HEART2007231 | 0 | 0.000 | 11.555 |
| HHDPC1000114 | 0 | 0.000 | 0.867 |
| HHDPC1000163 | 0 | 0.000 | 1.500 |
| HHDPC2000455 | 0 | 0.000 | 3.932 |
| HHDPC2000572 | 0 | 0.000 | 7.809 |
| HHDPC2000656 | 0 | 0.000 | 10.195 |
| HHDPC2003439 | 0 | 0.000 | 1.517 |
| HHDPC2003983 | 0 | 0.000 | 2.657 |
| HHDPC2007267 | 0 | 0.000 | 0.582 |
| HHDPC2007775 | 0 | 0.000 | 12.888 |
| HLUNG1000055 | 0 | 0.000 | 1.937 |
| HLUNG1000064 | 0 | 0.000 | 8.121 |
| HLUNG1000076 | 0 | 0.000 | 1.003 |
| HLUNG2000004 | 0 | 0.000 | 3.017 |
| HLUNG2000063 | 0 | 0.000 | 5.883 |
| HLUNG2000314 | 0 | 0.000 | 5.852 |
| HLUNG2000412 | 0 | 0.000 | 3.194 |
| HLUNG2000501 | 0 | 0.000 | 1.023 |
| HLUNG2000846 | 0 | 0.000 | 5.388 |
| HLUNG2000884 | 0 | 0.000 | 2.553 |
| HLUNG2001146 | 0 | 0.000 | 6.252 |
| HLUNG2001507 | 0 | 0.000 | 5.972 |
| HLUNG2001518 | 0 | 0.000 | 5.217 |
| HLUNG2001677 | 0 | 0.000 | 4.191 |
| HLUNG2002648 | 0 | 0.000 | 4.311 |
| HLUNG2002811 | 0 | 0.000 | 2.906 |
| HLUNG2003003 | 0 | 0.000 | 28.594 |
| HLUNG2004159 | 0 | 0.000 | 2.162 |
| HLUNG2004170 | 0 | 0.000 | 7.349 |
| HLUNG2004684 | 75.236 | 0 | 0.000 |
| HLUNG2006812 | 0 | 0.000 | 7.053 |
| HLUNG2008333 | 0 | 0.000 | 24.539 |
| HLUNG2008637 | 0 | 0.000 | 2.015 |
| HLUNG2009225 | 0 | 0.000 | 5.396 |
| HLUNG2015184 | 0 | 0.000 | 15.617 |
| HLUNG2017262 | 0 | 0.000 | 3.783 |
| HSYRA1000062 | 0 | 0.000 | 0.511 |
| HSYRA1000152 | 0 | 0.000 | 1.423 |
| HSYRA1000178 | 0 | 0.000 | 2.991 |
| HSYRA2000159 | 0 | 0.000 | 0.719 |
| HSYRA2000224 | 0 | 0.000 | 2.145 |
| HSYRA2000232 | 0 | 0.000 | 0.882 |
| HSYRA2000248 | 0 | 0.000 | 4.053 |
| HSYRA2000255 | 0 | 0.000 | 2.141 |
| HSYRA2000640 | 0 | 0.000 | 4.064 |
| HSYRA2000743 | 0 | 0.000 | 10.153 |
| HSYRA2001105 | 0 | 0.000 | 3.286 |
| HSYRA2001138 | 0 | 0.000 | 0.304 |
| HSYRA2001396 | 0 | 0.000 | 5.436 |
| HSYRA2001476 | 0 | 0.000 | 5.182 |
| HSYRA2001567 | 0 | 0.000 | 2.673 |
| HSYRA2001574 | 0 | 0.000 | 0.897 |
| HSYRA2001580 | 0 | 0.000 | 13.073 |
| HSYRA2001615 | 0 | 0.000 | 2.473 |
| HSYRA2001621 | 0 | 17.301 | 0.000 |
| HSYRA2007650 | 0 | 0.000 | 5.673 |
| IMR321000158 | 0 | 0.000 | 1.816 |
| IMR321000210 | 0 | 0.000 | 1.209 |
| IMR321000219 | 0 | 0.000 | 3.013 |
| IMR321000242 | 0 | 0.000 | 6.707 |
| IMR321000266 | 0 | 0.000 | 3.375 |
| IMR322000121 | 0 | 0.000 | 1.330 |
| IMR322000730 | 3.055 | 0 | 0.327 |
| IMR322000935 | 0 | 0.000 | 1.786 |
| IMR322001049 | 0 | 0.000 | 6.909 |
| IMR322001435 | 0 | 0.000 | 3.361 |
| IMR322001534 | 0 | 0.000 | 9.855 |
| IMR322001600 | 0 | 15.181 | 0.960 |
| IMR322001710 | 0 | 0.000 | 2.313 |
| IMR322001879 | 0 | 0.000 | 11.495 |
| IMR322019070 | 0 | 0.000 | 3.191 |
| KIDNE1000036 | 0 | 0.000 | 25.490 |
| KIDNE1000145 | 0 | 0.000 | 16.491 |
| KIDNE2000085 | 0 | 0.000 | 3.679 |
| KIDNE2000330 | 76.084 | 0 | 0.000 |
| KIDNE2000403 | 0 | 0.000 | 1.971 |
| KIDNE2001162 | 0 | 0.000 | 1.670 |
| KIDNE2001467 | 0 | 0.000 | 0.933 |
| KIDNE2001979 | 0 | 0.000 | 7.027 |
| KIDNE2002252 | 0 | 0.000 | 2.600 |
| KIDNE2003305 | 0 | 0.000 | 1.004 |
| KIDNE2003941 | 0 | 0.000 | 0.602 |
| KIDNE2005321 | 0 | 0.000 | 11.785 |
| KIDNE2005676 | 0 | 0.000 | 5.034 |
| KIDNE2006014 | 0 | 0.000 | 3.541 |
| KIDNE2006030 | 0 | 0.000 | 7.636 |
| KIDNE2006248 | 0 | 0.000 | 1.112 |
| KIDNE2006465 | 0 | 0.000 | 3.690 |
| KIDNE2007040 | 0 | 0.000 | 25.490 |
| KIDNE2007328 | 0 | 0.000 | 2.110 |
| KIDNE2007352 | 0 | 0.000 | 0.992 |
| KIDNE2007811 | 0 | 0.000 | 10.218 |
| KIDNE2007954 | 0 | 0.000 | 2.514 |
| KIDNE2008048 | 0 | 0.000 | 3.839 |
| KIDNE2009367 | 0 | 0.000 | 9.888 |
| KIDNE2009605 | 0 | 0.000 | 18.012 |
| KIDNE2010049 | 76.623 | 0 | 4.101 |
| KIDNE2012784 | 0 | 0.000 | 40.625 |
| KIDNE2013158 | 0 | 0.000 | 21.635 |
| KIDNE2013845 | 0 | 0.000 | 2.666 |
| KIDNE2014290 | 0 | 0.000 | 3.345 |
| KIDNE2014325 | 0 | 0.000 | 4.512 |
| KIDNE2017040 | 0 | 0.000 | 4.011 |
| LIVER1000079 | 0 | 0.000 | 2.090 |
| LIVER1000132 | 0 | 0.000 | 0.597 |
| LIVER2000033 | 0 | 0.000 | 1.650 |
| LIVER2001539 | 0 | 0.000 | 5.939 |
| LIVER2001608 | 29.267 | 0 | 1.566 |
| LIVER2002842 | 0 | 0.000 | 9.107 |
| LIVER2003234 | 0 | 0.000 | 12.095 |
| LIVER2005218 | 0 | 0.000 | 5.883 |
| LIVER2007783 | 0 | 0.000 | 4.894 |
| LIVER2008465 | 0 | 0.000 | 7.893 |
| MAMGL1000083 | 0 | 0.000 | 0.346 |
| MESAN2000264 | 0 | 0.000 | 2.350 |
| MESAN2000267 | 0 | 0.000 | 2.930 |
| MESAN2000894 | 0 | 0.000 | 24.337 |
| MESAN2001154 | 0 | 0.000 | 1.589 |
| MESAN2002086 | 0 | 0.000 | 2.482 |
| MESAN2002424 | 0 | 0.000 | 24.337 |
| MESAN2002724 | 0 | 0.000 | 5.499 |
| MESAN2002844 | 0 | 0.000 | 8.642 |
| MESAN2003039 | 0 | 0.000 | 19.415 |
| MESAN2003058 | 0 | 0.000 | 7.143 |
| MESAN2003444 | 0 | 0.000 | 8.886 |
| MESAN2003709 | 0 | 0.000 | 9.892 |
| MESAN2005303 | 0 | 0.000 | 9.449 |
| MESAN2005957 | 0 | 0.000 | 17.666 |
| MESAN2006043 | 0 | 0.000 | 9.499 |
| MESAN2006580 | 0 | 0.000 | 24.337 |
| MESAN2006743 | 0 | 0.000 | 13.792 |
| MESAN2009580 | 0 | 0.000 | 1.325 |
| MESAN2013284 | 0 | 0.000 | 2.930 |
| MESAN2014295 | 0 | 0.000 | 24.337 |
| MESAN2016552 | 0 | 0.000 | 14.511 |
| MESAN2017152 | 0 | 0.000 | 24.337 |
| NB9N41000121 | 16.735 | 0 | 0.000 |
| NB9N42000281 | 0 | 0.000 | 2.280 |
| NOVAR1000015 | 0 | 0.000 | 3.622 |
| NOVAR1000091 | 0 | 0.000 | 2.310 |
| NOVAR2000710 | 0 | 0.000 | 4.201 |
| NT2NE1000163 | 0 | 0.000 | 2.899 |
| NT2NE2000056 | 8.755 | 0 | 3.280 |
| NT2NE2000327 | 0 | 0.000 | 3.000 |
| NT2NE2000383 | 0 | 0.000 | 5.437 |
| NT2NE2000384 | 0 | 0.000 | 2.745 |
| NT2NE2000455 | 0 | 0.000 | 24.761 |
| NT2NE2000575 | 0 | 0.000 | 1.720 |
| NT2NE2000707 | 0 | 0.000 | 1.596 |
| NT2NE2000963 | 5.112 | 0 | 0.547 |
| NT2NE2001000 | 0 | 0.000 | 2.053 |
| NT2NE2001176 | 0 | 0.000 | 1.362 |
| NT2NE2001337 | 0 | 0.000 | 5.420 |
| NT2NE2001435 | 0 | 0.000 | 5.072 |
| NT2NE2001545 | 0 | 0.000 | 2.137 |
| NT2NE2001617 | 0 | 0.000 | 5.411 |
| NT2NE2001660 | 0 | 0.000 | 9.341 |
| NT2NE2001793 | 0 | 0.000 | 7.422 |
| NT2NE2002620 | 0 | 90.183 | 0.000 |
| NT2NE2003185 | 0 | 0.000 | 4.521 |
| NT2NE2003485 | 0 | 0.000 | 5.552 |
| NT2NE2003569 | 0 | 0.000 | 2.070 |
| NT2NE2004519 | 0 | 0.000 | 2.137 |
| NT2NE2004716 | 0 | 0.000 | 4.578 |
| NT2NE2005358 | 0 | 0.000 | 24.761 |
| NT2NE2006458 | 0 | 0.000 | 3.372 |
| NT2NE2006659 | 0 | 0.000 | 21.581 |
| NT2NE2009295 | 0 | 0.000 | 2.379 |
| NT2NE2015974 | 0 | 0.000 | 9.111 |
| NT2NE2017492 | 0 | 0.000 | 20.127 |
| NT2RI1000127 | 0 | 0.000 | 2.165 |
| NT2RI2000007 | 0 | 0.000 | 39.625 |
| NT2RI2000064 | 0 | 0.000 | 3.210 |
| NT2RI2000282 | 0 | 0.000 | 0.378 |
| NT2RI2000294 | 0 | 0.000 | 2.257 |
| NT2RI2000344 | 0 | 76.334 | 0.000 |
| NT2RI2000578 | 7.452 | 31.528 | 0.399 |
| NT2RI2000671 | 0 | 0.000 | 1.255 |
| NT2RI2000685 | 0 | 0.000 | 3.545 |
| NT2RI2000689 | 34.460 | 0 | 1.844 |
| NT2RI2000727 | 0 | 0.000 | 0.617 |
| NT2RI2001091 | 0 | 0.000 | 4.193 |
| NT2RI2001230 | 0 | 0.000 | 0.920 |
| NT2RI2001540 | 1.269 | 0 | 1.494 |
| NT2RI2001657 | 0 | 0.000 | 1.914 |
| NT2RI2001859 | 0 | 0.000 | 1.157 |
| NT2RI2002091 | 0.897 | 2.529 | 0.976 |
| NT2RI2002152 | 0 | 0.000 | 3.000 |
| NT2RI2002316 | 0 | 0.000 | 0.956 |
| NT2RI2002391 | 18.073 | 0 | 0.000 |
| NT2RI2002654 | 13.092 | 0 | 0.000 |
| NT2RI2002865 | 0 | 0.000 | 8.087 |
| NT2RI2003304 | 5.848 | 0 | 0.000 |
| NT2RI2003317 | 0 | 0.000 | 3.760 |
| NT2RI2003338 | 0 | 0.000 | 4.831 |
| NT2RI2003344 | 0 | 0.000 | 6.968 |
| NT2RI2003407 | 0 | 0.000 | 1.444 |
| NT2RI2003420 | 0 | 0.000 | 1.837 |
| NT2RI2003556 | 0 | 0.000 | 0.908 |
| NT2RI2003695 | 0 | 0.000 | 0.939 |
| NT2RI2003738 | 0 | 0.000 | 1.252 |
| NT2RI2003751 | 0 | 0.000 | 1.652 |
| NT2RI2004157 | 0 | 0.000 | 39.625 |
| NT2RI2004188 | 0 | 0.000 | 3.425 |
| NT2RI2004230 | 0 | 0.000 | 6.843 |
| NT2RI2004535 | 0 | 0.000 | 2.283 |
| NT2RI2005116 | 0 | 0.000 | 1.525 |
| NT2RI2005335 | 0 | 0.000 | 3.232 |
| NT2RI2005358 | 0 | 0.000 | 24.478 |
| NT2RI2005405 | 0 | 0.000 | 1.004 |
| NT2RI2005713 | 0 | 0.000 | 1.764 |
| NT2RI2005723 | 11.184 | 0 | 1.197 |
| NT2RI2005811 | 0 | 0.000 | 1.827 |
| NT2RI2005814 | 0 | 0.000 | 1.553 |
| NT2RI2005818 | 0 | 0.000 | 3.038 |
| NT2RI2006412 | 0 | 0.000 | 0.978 |
| NT2RI2006825 | 0 | 0.000 | 3.270 |
| NT2RI2007054 | 0 | 0.000 | 3.097 |
| NT2RI2007148 | 0 | 0.000 | 2.253 |
| NT2RI2007277 | 0 | 0.000 | 1.169 |
| NT2RI2007384 | 9.651 | 0 | 1.033 |
| NT2RI2007445 | 0 | 0.000 | 2.139 |
| NT2RI2007498 | 0 | 0.000 | 0.486 |
| NT2RI2007589 | 23.800 | 0 | 0.000 |
| NT2RI2007629 | 0 | 0.000 | 2.404 |
| NT2RI2007987 | 0 | 0.000 | 2.147 |
| NT2RI2008007 | 0 | 0.000 | 23.084 |
| NT2RI2008045 | 0 | 0.000 | 0.926 |
| NT2RI2008336 | 0 | 0.000 | 0.956 |
| NT2RI2008481 | 0 | 0.000 | 2.646 |
| NT2RI2008526 | 17.086 | 0 | 0.000 |
| NT2RI2008724 | 0 | 0.000 | 2.190 |
| NT2RI2008749 | 0 | 0.000 | 2.023 |
| NT2RI2008791 | 0 | 0.000 | 1.392 |
| NT2RI2008942 | 0 | 0.000 | 16.259 |
| NT2RI2009037 | 0 | 0.000 | 1.005 |
| NT2RI2009065 | 10.408 | 0 | 0.000 |
| NT2RI2009269 | 0 | 0.000 | 1.179 |
| NT2RI2009402 | 0 | 0.000 | 7.482 |
| NT2RI2009406 | 0 | 0.000 | 3.356 |
| NT2RI2009583 | 0 | 0.000 | 0.267 |
| NT2RI2014247 | 0 | 0.000 | 18.191 |
| NT2RI2014733 | 0 | 0.000 | 29.743 |
| NT2RI2017529 | 0 | 0.000 | 1.157 |
| NT2RI2022468 | 0 | 0.000 | 7.995 |
| NT2RI2024313 | 0 | 0.000 | 17.475 |
| NT2RI2027323 | 0 | 0.000 | 39.625 |
| NT2RI3001445 | 0 | 0.000 | 7.554 |
| NT2RI3005724 | 0 | 0.000 | 7.069 |
| NT2RI3005923 | 0 | 0.000 | 23.249 |
| NT2RI3006284 | 46.111 | 0 | 0.000 |
| NT2RI3006340 | 0 | 0.000 | 19.479 |
| NT2RI3006666 | 0 | 0.000 | 24.901 |
| NT2RI3006673 | 0 | 0.000 | 11.902 |
| NT2RI3007291 | 0 | 0.000 | 14.928 |
| NT2RI3007543 | 0 | 0.000 | 1.012 |
| NT2RP6000017 | 0 | 0.000 | 3.569 |
| NT2RP6000039 | 0 | 0.000 | 4.277 |
| NT2RP6000059 | 0 | 0.000 | 25.869 |
| NT2RP6000077 | 0 | 0.000 | 30.666 |
| NT2RP6000078 | 0 | 0.000 | 0.429 |
| NT2RP6000085 | 0 | 0.000 | 11.032 |
| NT2RP6000123 | 0 | 0.000 | 0.467 |
| NT2RP7000069 | 0 | 0.000 | 8.035 |
| NT2RP7000076 | 0 | 0.000 | 0.727 |
| NT2RP7000173 | 0 | 0.000 | 0.663 |
| NT2RP7000477 | 0 | 0.000 | 2.360 |
| NT2RP7000586 | 0 | 0.000 | 13.104 |
| NT2RP7000600 | 0 | 0.000 | 7.929 |
| NT2RP7000906 | 0 | 0.000 | 3.112 |
| NT2RP7001166 | 0 | 0.000 | 2.676 |
| NT2RP7001962 | 0 | 0.000 | 3.168 |
| NT2RP7002028 | 0 | 0.000 | 7.190 |
| NT2RP7002376 | 0 | 0.000 | 14.471 |
| NT2RP7002379 | 0 | 0.000 | 2.402 |
| NT2RP7002449 | 0 | 0.000 | 2.409 |
| NT2RP7002802 | 0 | 0.000 | 8.717 |
| NT2RP7002875 | 0 | 0.000 | 1.101 |
| NT2RP7002982 | 0 | 0.000 | 9.273 |
| NT2RP7003055 | 0 | 0.000 | 12.585 |
| NT2RP7003203 | 0 | 0.000 | 4.406 |
| NT2RP7003319 | 0 | 0.000 | 31.557 |
| NT2RP7003632 | 0 | 0.000 | 1.942 |
| NT2RP7003647 | 0 | 0.000 | 5.615 |
| NT2RP7003688 | 0 | 0.000 | 0.881 |
| NT2RP7004114 | 0 | 0.000 | 6.650 |
| NT2RP7004123 | 0 | 0.000 | 2.289 |
| NT2RP7004196 | 0 | 0.000 | 1.563 |
| NT2RP7004348 | 0 | 0.000 | 2.695 |
| NT2RP7004352 | 0 | 0.000 | 6.077 |
| NT2RP7004373 | 0 | 0.000 | 2.807 |
| NT2RP7004559 | 0 | 0.000 | 10.166 |
| NT2RP7004728 | 0 | 0.000 | 1.875 |
| NT2RP7004751 | 0 | 44.129 | 1.116 |
| NT2RP7004915 | 0 | 0.000 | 17.708 |
| NT2RP7004925 | 0 | 0.000 | 1.506 |
| NT2RP7004946 | 0 | 0.000 | 2.053 |
| NT2RP7005513 | 0 | 0.000 | 2.016 |
| NT2RP7005529 | 0 | 0.000 | 8.806 |
| NT2RP7005675 | 0 | 0.000 | 10.406 |
| NT2RP7005750 | 0 | 0.000 | 4.268 |
| NT2RP7006223 | 0 | 0.000 | 5.039 |
| NT2RP7006490 | 0 | 0.000 | 2.560 |
| NT2RP7006539 | 0 | 0.000 | 10.410 |
| NT2RP7006619 | 0 | 0.000 | 2.633 |
| NT2RP7006717 | 0 | 0.000 | 5.493 |
| NT2RP7006886 | 0 | 0.000 | 11.344 |
| NT2RP7007114 | 0 | 0.000 | 19.540 |
| NT2RP7007154 | 0 | 0.000 | 1.360 |
| NT2RP7007252 | 0 | 0.000 | 8.190 |
| NT2RP7007310 | 82.993 | 0 | 0.000 |
| NT2RP7007381 | 0 | 0.000 | 18.704 |
| NT2RP7007537 | 27.403 | 0 | 0.000 |
| NT2RP7007610 | 0 | 0.000 | 3.452 |
| NT2RP7008161 | 0 | 0.000 | 7.488 |
| NT2RP7008167 | 0 | 0.000 | 2.165 |
| NT2RP7008190 | 0 | 0.000 | 1.582 |
| NT2RP7008315 | 0 | 0.000 | 8.950 |
| NT2RP7008543 | 0 | 0.000 | 3.281 |
| NT2RP7009087 | 0 | 0.000 | 2.897 |
| NT2RP7009097 | 40.067 | 0 | 0.000 |
| NT2RP7009147 | 0 | 0.000 | 1.900 |
| NT2RP7009259 | 0 | 0.000 | 2.010 |
| NT2RP7009482 | 0 | 0.000 | 5.527 |
| NT2RP7010612 | 0 | 0.000 | 25.799 |
| NT2RP7013573 | 0 | 0.000 | 8.594 |
| NT2RP7017474 | 0 | 0.000 | 22.450 |
| NTONG1000033 | 0 | 0.000 | 1.461 |
| NTONG1000098 | 0 | 0.000 | 0.760 |
| NTONG1000182 | 0 | 0.000 | 1.477 |
| NTONG1000246 | 0 | 0.000 | 1.865 |
| NTONG2000265 | 0 | 0.000 | 1.017 |
| NTONG2000876 | 0 | 0.000 | 1.661 |
| NTONG2001550 | 0 | 0.000 | 4.151 |
| NTONG2001567 | 0 | 0.000 | 1.097 |
| NTONG2002582 | 0 | 0.000 | 13.457 |
| NTONG2003454 | 0 | 0.000 | 24.889 |
| NTONG2003839 | 0 | 0.000 | 6.254 |
| NTONG2004844 | 0 | 0.000 | 1.933 |
| NTONG2005363 | 0 | 0.000 | 13.929 |
| NTONG2005391 | 0 | 0.000 | 13.902 |
| NTONG2005520 | 0 | 0.000 | 0.794 |
| NTONG2005801 | 0 | 0.000 | 4.250 |
| NTONG2005897 | 0 | 0.000 | 8.187 |
| NTONG2008944 | 0 | 0.000 | 6.965 |
| OCBBF1000086 | 0 | 0.000 | 1.826 |
| OCBBF1000175 | 0 | 0.000 | 8.591 |
| OCBBF2000015 | 17.632 | 0 | 3.774 |
| OCBBF2000467 | 0 | 0.000 | 2.406 |
| OCBBF2000677 | 0 | 0.000 | 19.428 |
| OCBBF2000986 | 0 | 0.000 | 1.149 |
| OCBBF2001166 | 0 | 0.000 | 6.537 |
| OCBBF2001210 | 0 | 0.000 | 4.324 |
| OCBBF2001323 | 0 | 0.000 | 10.255 |
| OCBBF2001586 | 0 | 0.000 | 8.553 |
| OCBBF2001961 | 0 | 0.000 | 48.981 |
| OCBBF2002086 | 0 | 0.000 | 15.370 |
| OCBBF2002656 | 0 | 0.000 | 1.973 |
| OCBBF2003246 | 0 | 0.000 | 11.672 |
| OCBBF2003925 | 0 | 0.000 | 0.994 |
| OCBBF2004273 | 19.976 | 0 | 0.000 |
| OCBBF2004757 | 0 | 0.000 | 2.956 |
| OCBBF2005476 | 0 | 0.000 | 16.727 |
| OCBBF2005956 | 0 | 0.000 | 3.386 |
| OCBBF2006313 | 0 | 0.000 | 6.810 |
| OCBBF2006849 | 0 | 0.000 | 2.410 |
| OCBBF2007028 | 0 | 0.000 | 8.234 |
| OCBBF2007415 | 0 | 0.000 | 0.955 |
| OCBBF2007829 | 0 | 0.000 | 7.203 |
| OCBBF2008005 | 0 | 0.000 | 3.787 |
| OCBBF2008144 | 0 | 0.000 | 3.440 |
| OCBBF2009242 | 0 | 0.000 | 3.377 |
| OCBBF2009301 | 46.196 | 0 | 0.000 |
| OCBBF2009424 | 0 | 0.000 | 8.655 |
| OCBBF2009772 | 0 | 0.000 | 1.404 |
| OCBBF2010313 | 0 | 0.000 | 16.359 |
| OCBBF2010557 | 0 | 0.000 | 43.708 |
| OCBBF2010830 | 0 | 0.000 | 2.099 |
| OCBBF2010945 | 0 | 0.000 | 48.981 |
| OCBBF2011021 | 0 | 0.000 | 1.724 |
| OCBBF2011228 | 0 | 0.000 | 25.500 |
| OCBBF2011232 | 0 | 0.000 | 9.556 |
| OCBBF2011536 | 0 | 0.000 | 2.379 |
| OCBBF2011759 | 0 | 0.000 | 3.344 |
| OCBBF2013149 | 0 | 0.000 | 1.850 |
| OCBBF2013843 | 0 | 50.379 | 0.637 |
| OCBBF2014064 | 0 | 0.000 | 3.258 |
| OCBBF2014292 | 0 | 0.000 | 3.706 |
| OCBBF2017398 | 0 | 0.000 | 3.068 |
| OCBBF2017754 | 0 | 0.000 | 8.956 |
| OCBBF2017791 | 0 | 0.000 | 9.166 |
| OCBBF2017882 | 0 | 0.000 | 8.510 |
| OCBBF2018012 | 0 | 0.000 | 10.043 |
| OCBBF2018563 | 0 | 0.000 | 24.528 |
| OCBBF2018873 | 0 | 0.000 | 6.611 |
| OCBBF2018956 | 0 | 0.000 | 2.019 |
| OCBBF2020741 | 0 | 0.000 | 33.655 |
| OCBBF2021833 | 0 | 0.000 | 17.297 |
| OCBBF2024850 | 0 | 0.000 | 26.505 |
| OCBBF2026368 | 0 | 0.000 | 19.710 |
| OCBBF2027148 | 0 | 0.000 | 27.753 |
| OCBBF2036743 | 0 | 0.000 | 13.183 |
| OCBBF3001333 | 0 | 0.000 | 3.832 |
| OCBBF3004487 | 0 | 0.000 | 5.404 |
| PEBLM1000144 | 0 | 0.000 | 7.153 |
| PEBLM2000030 | 0 | 0.000 | 4.390 |
| PEBLM2000147 | 0 | 0.000 | 1.522 |
| PEBLM2000326 | 0 | 0.000 | 6.474 |
| PEBLM2004452 | 0 | 0.000 | 6.439 |
| PEBLM2006366 | 0 | 0.000 | 3.301 |
| PEBLM2006709 | 0 | 0.000 | 6.636 |
| PERIC2006443 | 0 | 0.000 | 5.792 |
| PERIC2007068 | 0 | 0.000 | 5.521 |
| PLACE5000013 | 0 | 0.000 | 9.466 |
| PLACE5000113 | 0 | 0.000 | 10.260 |
| PLACE5000159 | 0 | 0.000 | 8.132 |
| PLACE5000170 | 0 | 0.000 | 4.147 |
| PLACE5000372 | 0 | 0.000 | 40.126 |
| PLACE6000145 | 23.096 | 0 | 0.000 |
| PLACE6000263 | 0 | 0.000 | 1.813 |
| PLACE6000379 | 0 | 0.000 | 1.264 |
| PLACE6000414 | 0 | 0.000 | 6.113 |
| PLACE6001064 | 0 | 0.000 | 3.421 |
| PLACE6001185 | 0 | 0.000 | 25.473 |
| PLACE6001281 | 0 | 0.000 | 4.106 |
| PLACE6001443 | 0 | 0.000 | 11.713 |
| PLACE6001886 | 0 | 0.000 | 40.398 |
| PLACE6002084 | 0 | 0.000 | 0.881 |
| PLACE6002102 | 0 | 0.000 | 6.738 |
| PLACE6002668 | 0 | 0.000 | 6.437 |
| PLACE6002960 | 0 | 0.000 | 2.647 |
| PLACE6003218 | 0 | 0.000 | 17.355 |
| PLACE6003383 | 0 | 0.000 | 1.424 |
| PLACE6004005 | 0 | 0.000 | 1.178 |
| PLACE6004312 | 0 | 0.000 | 0.719 |
| PLACE6004397 | 0 | 0.000 | 2.192 |
| PLACE6004491 | 0 | 0.000 | 40.126 |
| PLACE6004738 | 0 | 0.000 | 25.098 |
| PLACE6005482 | 0 | 0.000 | 22.076 |
| PLACE6006042 | 0 | 0.000 | 6.493 |
| PLACE6006137 | 0 | 0.000 | 4.074 |
| PLACE6006186 | 0 | 0.000 | 25.880 |
| PLACE6006549 | 0 | 0.000 | 1.905 |
| PLACE6008775 | 0 | 0.000 | 6.595 |
| PLACE6008824 | 0 | 0.000 | 40.126 |
| PLACE6009338 | 0 | 0.000 | 29.967 |
| PLACE6010077 | 0 | 0.000 | 2.077 |
| PLACE6011057 | 0 | 0.000 | 2.688 |
| PLACE6012942 | 0 | 0.000 | 40.126 |
| PLACE6015731 | 0 | 0.000 | 18.307 |
| PLACE6016383 | 0 | 0.000 | 7.710 |
| PLACE6017431 | 0 | 0.000 | 40.126 |
| PLACE6018938 | 0 | 0.000 | 18.301 |
| PLACE7006240 | 0 | 0.000 | 30.024 |
| PROST1000097 | 0 | 0.000 | 7.013 |
| PROST1000199 | 16.283 | 0 | 4.357 |
| PROST1000220 | 0 | 0.000 | 0.810 |
| PROST1000226 | 0 | 0.000 | 2.134 |
| PROST1000246 | 0 | 0.000 | 13.104 |
| PROST1000526 | 0 | 0.000 | 3.013 |
| PROST1000564 | 0 | 0.000 | 1.603 |
| PROST2000138 | 5.795 | 0 | 5.479 |
| PROST2000273 | 0 | 0.000 | 25.167 |
| PROST2002651 | 0 | 0.000 | 7.133 |
| PROST2003232 | 0 | 0.000 | 0.814 |
| PROST2003338 | 0 | 0.000 | 4.005 |
| PROST2003396 | 0 | 0.000 | 7.125 |
| PROST2004095 | 0 | 0.000 | 1.116 |
| PROST2004258 | 0 | 0.000 | 9.101 |
| PROST2004270 | 0 | 0.000 | 2.104 |
| PROST2004416 | 0 | 0.000 | 0.811 |
| PROST2005285 | 0 | 0.000 | 8.902 |
| PROST2005604 | 0 | 0.000 | 7.420 |
| PROST2006030 | 0 | 0.000 | 4.513 |
| PROST2006536 | 0 | 0.000 | 2.647 |
| PROST2006737 | 0 | 0.000 | 8.672 |
| PROST2007200 | 0 | 0.000 | 14.088 |
| PROST2008271 | 0 | 0.000 | 4.674 |
| PROST2008489 | 14.433 | 0 | 0.772 |
| PROST2008770 | 0 | 0.000 | 0.930 |
| PROST2010318 | 0 | 0.000 | 14.395 |
| PROST2010545 | 0 | 0.000 | 15.696 |
| PROST2010782 | 0 | 0.000 | 0.290 |
| PROST2012007 | 0 | 0.000 | 1.354 |
| PROST2012448 | 0 | 0.000 | 9.731 |
| PROST2012890 | 0 | 0.000 | 18.191 |
| PROST2014916 | 0 | 0.000 | 4.345 |
| PROST2015924 | 0 | 0.000 | 8.082 |
| PROST2016918 | 0 | 0.000 | 15.159 |
| PROST2017203 | 0 | 0.000 | 1.549 |
| PROST2017617 | 0 | 0.000 | 25.167 |
| PROST2017692 | 0 | 0.000 | 0.879 |
| PROST2018977 | 0 | 0.000 | 15.499 |
| PUAEN1000057 | 0 | 0.000 | 7.346 |
| PUAEN1000065 | 0 | 0.000 | 1.598 |
| PUAEN1000164 | 0 | 0.000 | 0.475 |
| PUAEN1000239 | 0 | 0.000 | 3.697 |
| PUAEN2000374 | 0 | 0.000 | 1.145 |
| PUAEN2001586 | 0 | 0.000 | 3.406 |
| PUAEN2007044 | 0 | 0.000 | 1.710 |
| PUAEN2008228 | 0 | 0.000 | 17.449 |
| PUAEN2009655 | 0 | 0.000 | 4.359 |
| SALGL1000157 | 0 | 0.000 | 0.465 |
| SKMUS1000014 | 0 | 0.000 | 8.773 |
| SKMUS1000022 | 0 | 0.000 | 0.496 |
| SKMUS1000084 | 0 | 0.000 | 3.674 |
| SKMUS1000138 | 0 | 0.000 | 0.344 |
| SKMUS1000177 | 0 | 0.000 | 14.082 |
| SKMUS1000186 | 0 | 0.000 | 0.479 |
| SKMUS2000020 | 0 | 0.000 | 4.393 |
| SKMUS2000343 | 0 | 0.000 | 18.379 |
| SKMUS2000361 | 0 | 0.000 | 1.275 |
| SKMUS2000380 | 0 | 0.000 | 2.586 |
| SKMUS2000873 | 0 | 0.000 | 1.312 |
| SKMUS2000902 | 0 | 0.000 | 12.901 |
| SKMUS2000931 | 0 | 0.000 | 0.649 |
| SKMUS2000954 | 0 | 0.000 | 2.027 |
| SKMUS2001129 | 0 | 0.000 | 12.130 |
| SKMUS2001454 | 7.522 | 0 | 0.403 |
| SKMUS2001501 | 0 | 0.000 | 2.600 |
| SKNMC1000110 | 0 | 0.000 | 4.318 |
| SKNMC1000137 | 0 | 0.000 | 1.264 |
| SKNMC1000168 | 0 | 0.000 | 1.997 |
| SKNMC1000251 | 0 | 0.000 | 8.366 |
| SKNMC2000065 | 0 | 0.000 | 2.575 |
| SKNMC2000097 | 0 | 0.000 | 1.063 |
| SKNMC2000305 | 0 | 0.000 | 4.201 |
| SKNMC2000635 | 0 | 0.000 | 0.856 |
| SKNMC2000649 | 0 | 0.000 | 2.176 |
| SKNMC2000877 | 0 | 0.000 | 2.827 |
| SKNSH1000086 | 0 | 0.000 | 10.184 |
| SKNSH2000347 | 0 | 0.000 | 8.028 |
| SKNSH2000482 | 0 | 0.000 | 23.251 |
| SKNSH2000819 | 0 | 0.000 | 5.937 |
| SKNSH2002325 | 0 | 0.000 | 4.553 |
| SKNSH2003528 | 0 | 0.000 | 3.621 |
| SKNSH2008043 | 0 | 0.000 | 12.076 |
| SMINT1000042 | 59.707 | 0 | 6.391 |
| SMINT1000100 | 0 | 0.000 | 6.640 |
| SMINT1000117 | 0 | 0.000 | 1.569 |
| SMINT1000131 | 0 | 0.000 | 3.277 |
| SMINT2000159 | 0 | 0.000 | 6.518 |
| SMINT2000277 | 0 | 0.000 | 2.162 |
| SMINT2000396 | 0 | 0.000 | 5.840 |
| SMINT2000441 | 0 | 0.000 | 1.615 |
| SMINT2000468 | 0 | 0.000 | 5.458 |
| SMINT2000545 | 0 | 0.000 | 2.827 |
| SMINT2000629 | 0 | 0.000 | 3.203 |
| SMINT2001950 | 0 | 0.000 | 12.743 |
| SMINT2002159 | 0 | 0.000 | 8.177 |
| SMINT2002314 | 53.944 | 0 | 0.000 |
| SMINT2002689 | 0 | 0.000 | 51.875 |
| SMINT2002778 | 0 | 0.000 | 25.261 |
| SMINT2002976 | 0 | 0.000 | 6.221 |
| SMINT2003169 | 0 | 0.000 | 0.561 |
| SMINT2004589 | 0 | 0.000 | 4.780 |
| SMINT2005368 | 0 | 0.000 | 1.401 |
| SMINT2005956 | 0 | 0.000 | 6.278 |
| SMINT2006801 | 0 | 0.000 | 19.209 |
| SMINT2007187 | 0 | 0.000 | 8.007 |
| SMINT2008960 | 0 | 0.000 | 0.816 |
| SMINT2010959 | 0 | 0.000 | 18.459 |
| SMINT2011033 | 0 | 0.000 | 25.261 |
| SMINT2012122 | 0 | 0.000 | 4.169 |
| SMINT2013031 | 0 | 0.000 | 7.403 |
| SMINT2013695 | 0 | 0.000 | 25.261 |
| SMINT2014480 | 35.406 | 0 | 0.000 |
| SMINT2018681 | 0 | 0.000 | 4.988 |
| SPLEN1000106 | 0 | 0.000 | 13.880 |
| SPLEN1000116 | 0 | 0.000 | 0.590 |
| SPLEN1000166 | 0 | 0.000 | 2.696 |
| SPLEN2000243 | 0 | 0.000 | 25.928 |
| SPLEN2000255 | 0 | 0.000 | 5.495 |
| SPLEN2000505 | 0 | 0.000 | 0.503 |
| SPLEN2000839 | 0 | 0.000 | 10.886 |
| SPLEN2001141 | 0 | 0.000 | 2.253 |
| SPLEN2001157 | 0 | 0.000 | 3.280 |
| SPLEN2001689 | 0 | 0.000 | 16.646 |
| SPLEN2002335 | 0 | 0.000 | 6.038 |
| SPLEN2002463 | 0 | 0.000 | 9.032 |
| SPLEN2003297 | 0 | 0.000 | 31.668 |
| SPLEN2004220 | 0 | 0.000 | 3.430 |
| SPLEN2005009 | 0 | 0.000 | 10.253 |
| SPLEN2005429 | 0 | 0.000 | 17.478 |
| SPLEN2005927 | 0 | 0.000 | 5.136 |
| SPLEN2006122 | 18.769 | 0 | 0.000 |
| SPLEN2006133 | 21.141 | 0 | 2.263 |
| SPLEN2006143 | 0 | 0.000 | 2.668 |
| SPLEN2006232 | 0 | 0.000 | 3.421 |
| SPLEN2006305 | 0 | 0.000 | 1.507 |
| SPLEN2006374 | 0 | 0.000 | 5.438 |
| SPLEN2007388 | 0 | 0.000 | 31.668 |
| SPLEN2007498 | 0 | 0.000 | 3.121 |
| SPLEN2009315 | 0 | 0.000 | 40.674 |
| SPLEN2010195 | 0 | 0.000 | 4.164 |
| SPLEN2011419 | 0 | 0.000 | 2.850 |
| SPLEN2011737 | 0 | 0.000 | 3.107 |
| SPLEN2012571 | 0 | 0.000 | 3.792 |
| SPLEN2012800 | 0 | 0.000 | 0.407 |
| SPLEN2013690 | 0 | 0.000 | 12.880 |
| SPLEN2014080 | 0 | 0.000 | 5.651 |
| SPLEN2014572 | 0 | 0.000 | 7.423 |
| SPLEN2016268 | 9.628 | 0 | 0.000 |
| SPLEN2016421 | 0 | 0.000 | 2.471 |
| SPLEN2016554 | 0 | 0.000 | 22.228 |
| SPLEN2016972 | 0 | 0.000 | 4.837 |
| SPLEN2017318 | 0 | 0.000 | 6.052 |
| SPLEN2017918 | 0 | 0.000 | 3.262 |
| SPLEN2018098 | 0 | 0.000 | 40.674 |
| SPLEN2018157 | 0 | 0.000 | 5.754 |
| SPLEN2019169 | 0 | 0.000 | 6.752 |
| SPLEN2019311 | 0 | 0.000 | 57.827 |
| SPLEN2019405 | 0 | 0.000 | 3.416 |
| SPLEN2021194 | 0 | 0.000 | 8.047 |
| SPLEN2021273 | 0 | 0.000 | 17.589 |
| SPLEN2022522 | 0 | 0.000 | 1.691 |
| SPLEN2027113 | 0 | 0.000 | 1.952 |
| SPLEN2028466 | 0 | 0.000 | 0.987 |
| SPLEN2031547 | 0 | 0.000 | 5.633 |
| SPLEN2036932 | 0 | 0.000 | 3.497 |
| SPLEN2039379 | 0 | 0.000 | 10.362 |
| SPLEN2041585 | 0 | 0.000 | 40.674 |
| SPLEN2042714 | 0 | 0.000 | 40.674 |
| STOMA1000186 | 0 | 0.000 | 14.912 |
| STOMA1000189 | 0 | 0.000 | 1.865 |
| STOMA2000289 | 0 | 0.000 | 6.498 |
| STOMA2000395 | 0 | 0.000 | 5.092 |
| STOMA2000396 | 0 | 0.000 | 6.147 |
| STOMA2002052 | 0 | 0.000 | 6.634 |
| STOMA2004925 | 0 | 0.000 | 14.912 |
| SYNOV1000124 | 0 | 0.000 | 1.327 |
| SYNOV2001033 | 0 | 0.000 | 0.715 |
| SYNOV2001239 | 6.992 | 0 | 0.374 |
| SYNOV2001262 | 0 | 0.000 | 4.977 |
| SYNOV2017055 | 0 | 0.000 | 20.136 |
| SYNOV4000598 | 0 | 0.000 | 35.608 |
| SYNOV4001224 | 0 | 0.000 | 35.608 |
| SYNOV4001395 | 0 | 0.000 | 21.660 |
| SYNOV4009575 | 0 | 0.000 | 5.715 |
| T1ESE2000904 | 0 | 0.000 | 2.754 |
| TBAES2000059 | 0 | 0.000 | 1.797 |
| TBAES2003702 | 0 | 0.000 | 14.497 |
| TBAES2009387 | 0 | 0.000 | 0.638 |
| TCERX2000613 | 0 | 0.000 | 14.497 |
| TESOP2002273 | 0 | 0.000 | 4.841 |
| TESOP2006893 | 0 | 0.000 | 10.246 |
| TESTI1000023 | 0 | 0.000 | 2.000 |
| TESTI2000184 | 0 | 0.000 | 4.045 |
| TESTI2000356 | 0 | 0.000 | 20.914 |
| TESTI2000784 | 0 | 0.000 | 5.421 |
| TESTI2000970 | 0 | 0.000 | 5.798 |
| TESTI2001099 | 0 | 0.000 | 4.091 |
| TESTI2001153 | 0 | 0.000 | 5.699 |
| TESTI2001420 | 0 | 0.000 | 64.596 |
| TESTI2001829 | 0 | 0.000 | 1.013 |
| TESTI2001862 | 0 | 0.000 | 3.154 |
| TESTI2002149 | 0 | 0.000 | 3.990 |
| TESTI2002365 | 0 | 0.000 | 3.907 |
| TESTI2002632 | 0 | 0.000 | 12.913 |
| TESTI2002877 | 0 | 0.000 | 44.500 |
| TESTI2003005 | 0 | 0.000 | 3.623 |
| TESTI2003533 | 0 | 0.000 | 1.034 |
| TESTI2004031 | 8.934 | 0 | 0.478 |
| TESTI2004295 | 0 | 0.000 | 9.766 |
| TESTI2004737 | 0 | 0.000 | 2.113 |
| TESTI2004929 | 0 | 0.000 | 3.386 |
| TESTI2005731 | 0 | 0.000 | 3.941 |
| TESTI2005759 | 0 | 0.000 | 2.231 |
| TESTI2005908 | 0 | 0.000 | 1.878 |
| TESTI2006051 | 0 | 0.000 | 0.505 |
| TESTI2006111 | 0 | 0.000 | 24.590 |
| TESTI2006588 | 0 | 0.000 | 4.520 |
| TESTI2007211 | 0 | 0.000 | 3.939 |
| TESTI2007407 | 0 | 0.000 | 7.322 |
| TESTI2008240 | 0 | 0.000 | 2.982 |
| TESTI2008835 | 0 | 0.000 | 12.941 |
| TESTI2009520 | 0 | 0.000 | 0.894 |
| TESTI2009577 | 0 | 0.000 | 2.108 |
| TESTI2009785 | 0 | 0.000 | 6.845 |
| TESTI2010513 | 8.756 | 0 | 1.874 |
| TESTI2011683 | 0 | 0.000 | 38.615 |
| TESTI2014838 | 0 | 0.000 | 3.160 |
| TESTI2015213 | 0 | 0.000 | 0.612 |
| TESTI2015626 | 7.329 | 0 | 0.784 |
| TESTI2017954 | 0 | 0.000 | 0.790 |
| TESTI2018462 | 0 | 0.000 | 3.370 |
| TESTI2020871 | 0 | 0.000 | 64.596 |
| TESTI2021124 | 0 | 0.000 | 6.816 |
| TESTI2021358 | 0 | 0.000 | 40.357 |
| TESTI2021425 | 0 | 0.000 | 4.107 |
| TESTI2027165 | 0 | 0.000 | 64.596 |
| TESTI2029259 | 73.757 | 0 | 3.947 |
| TESTI2033441 | 0 | 0.000 | 2.618 |
| TESTI2034940 | 0 | 0.000 | 1.864 |
| TESTI2036913 | 0 | 0.000 | 24.204 |
| TESTI2036969 | 0 | 0.000 | 4.285 |
| TESTI2039177 | 0 | 0.000 | 4.943 |
| TESTI2044788 | 0 | 0.000 | 64.596 |
| TESTI2046456 | 0 | 0.000 | 1.104 |
| TESTI2047605 | 0 | 0.000 | 17.379 |
| TESTI2053723 | 0 | 0.000 | 5.399 |
| TESTI4000014 | 0 | 0.000 | 0.639 |
| TESTI4001467 | 0 | 0.000 | 6.603 |
| TESTI4002072 | 0 | 0.000 | 3.983 |
| TESTI4002195 | 0 | 0.000 | 15.959 |
| TESTI4002799 | 9.842 | 0 | 1.053 |
| TESTI4003703 | 0 | 0.000 | 5.277 |
| TESTI4003944 | 0 | 0.000 | 41.606 |
| TESTI4005399 | 0 | 0.000 | 9.300 |
| TESTI4005534 | 0 | 0.000 | 33.259 |
| TESTI4008797 | 0 | 0.000 | 14.824 |
| TESTI4009286 | 0 | 0.000 | 2.594 |
| TESTI4013441 | 0 | 14.788 | 0.374 |
| TESTI4013675 | 0 | 0.000 | 35.326 |
| TESTI4013894 | 0 | 0.000 | 33.408 |
| TESTI4014159 | 0 | 0.000 | 13.979 |
| TESTI4018886 | 0 | 0.000 | 64.596 |
| TESTI4024245 | 0 | 0.000 | 40.205 |
| TESTI4029671 | 0 | 0.000 | 22.183 |
| TESTI4037156 | 0 | 0.000 | 1.320 |
| TESTI4038284 | 41.043 | 0 | 0.000 |
| THYMU1000002 | 13.191 | 0 | 0.000 |
| THYMU1000016 | 0 | 0.000 | 2.304 |
| THYMU1000041 | 0 | 0.000 | 5.672 |
| THYMU1000083 | 0 | 0.000 | 10.729 |
| THYMU1000103 | 0 | 0.000 | 2.103 |
| THYMU1000109 | 0 | 0.000 | 0.939 |
| THYMU1000142 | 0 | 0.000 | 58.853 |
| THYMU1000316 | 0 | 0.000 | 58.853 |
| THYMU1000359 | 0 | 0.000 | 1.918 |
| THYMU1000374 | 0 | 0.000 | 3.573 |
| THYMU1000394 | 0 | 0.000 | 11.726 |
| THYMU1000428 | 0 | 0.000 | 0.678 |
| THYMU2000382 | 0 | 0.000 | 2.892 |
| THYMU2000436 | 20.534 | 0 | 1.099 |
| THYMU2000684 | 0 | 0.000 | 4.966 |
| THYMU2001007 | 0 | 0.000 | 6.471 |
| THYMU2001422 | 0 | 0.000 | 14.855 |
| THYMU2002583 | 0 | 0.000 | 0.618 |
| THYMU2002815 | 0 | 0.000 | 39.408 |
| THYMU2003012 | 0 | 0.000 | 2.090 |
| THYMU2003046 | 0 | 0.000 | 4.585 |
| THYMU2003419 | 0 | 0.000 | 3.594 |
| THYMU2003446 | 0 | 0.000 | 2.845 |
| THYMU2003891 | 0 | 0.000 | 0.174 |
| THYMU2003981 | 0 | 0.000 | 2.491 |
| THYMU2004152 | 0 | 0.000 | 1.184 |
| THYMU2004410 | 0 | 0.000 | 2.285 |
| THYMU2005546 | 12.190 | 0 | 0.000 |
| THYMU2006505 | 0 | 0.000 | 6.513 |
| THYMU2006813 | 0 | 0.000 | 1.887 |
| THYMU2007415 | 0 | 0.000 | 8.658 |
| THYMU2007467 | 0 | 0.000 | 4.818 |
| THYMU2007886 | 30.859 | 0 | 0.000 |
| THYMU2008686 | 0 | 0.000 | 14.535 |
| THYMU2008725 | 0 | 0.000 | 15.552 |
| THYMU2009658 | 0 | 0.000 | 0.418 |
| THYMU2010094 | 0 | 0.000 | 6.947 |
| THYMU2010448 | 0 | 0.000 | 6.315 |
| THYMU2012024 | 0 | 0.000 | 3.554 |
| THYMU2013916 | 0 | 0.000 | 2.646 |
| THYMU2015321 | 0 | 0.000 | 58.853 |
| THYMU2019021 | 0 | 0.000 | 5.796 |
| THYMU2020667 | 0 | 0.000 | 41.697 |
| THYMU2021684 | 0 | 0.000 | 58.853 |
| THYMU2024071 | 0 | 0.000 | 39.309 |
| THYMU2025319 | 0 | 0.000 | 39.408 |
| THYMU2031890 | 0 | 0.000 | 21.176 |
| THYMU2033070 | 0 | 0.000 | 58.853 |
| THYMU2034917 | 0 | 0.000 | 23.175 |
| THYMU2035735 | 0 | 0.000 | 11.014 |
| THYMU2036461 | 0 | 0.000 | 18.090 |
| THYMU3001472 | 0 | 0.000 | 20.097 |
| THYMU3002578 | 0 | 0.000 | 36.487 |
| THYMU3013386 | 0 | 0.000 | 1.786 |
| THYMU3021586 | 0 | 0.000 | 4.926 |
| THYMU3026350 | 0 | 0.000 | 17.045 |
| THYMU3028410 | 0 | 0.000 | 58.853 |
| THYMU3032798 | 0 | 0.000 | 2.306 |
| THYMU3034616 | 0 | 0.000 | 58.853 |
| THYMU3034671 | 0 | 0.000 | 19.911 |
| TOVAR2000476 | 50.572 | 0 | 0.000 |
| TRACH1000030 | 0 | 0.000 | 5.760 |
| TRACH1000038 | 0 | 0.000 | 8.984 |
| TRACH1000063 | 0 | 0.000 | 2.565 |
| TRACH1000181 | 0 | 0.000 | 5.650 |
| TRACH1000205 | 0 | 0.000 | 4.694 |
| TRACH2000079 | 0 | 0.000 | 0.646 |
| TRACH2000237 | 0 | 0.000 | 6.412 |
| TRACH2000248 | 0 | 0.000 | 2.496 |
| TRACH2000321 | 0 | 0.000 | 2.344 |
| TRACH2000359 | 0 | 0.000 | 3.557 |
| TRACH2000461 | 0 | 0.000 | 2.045 |
| TRACH2000472 | 0 | 0.000 | 9.166 |
| TRACH2000780 | 0 | 0.000 | 5.212 |
| TRACH2000959 | 0 | 0.000 | 0.582 |
| TRACH2001021 | 9.332 | 0 | 1.498 |
| TRACH2001192 | 0 | 0.000 | 40.205 |
| TRACH2001289 | 0 | 0.000 | 1.622 |
| TRACH2001432 | 0 | 0.000 | 1.327 |
| TRACH2001443 | 0 | 0.000 | 11.083 |
| TRACH2001463 | 0 | 0.000 | 3.652 |
| TRACH2001549 | 0 | 0.000 | 5.043 |
| TRACH2001596 | 0 | 0.000 | 24.409 |
| TRACH2001612 | 0 | 0.000 | 4.764 |
| TRACH2001810 | 0 | 0.000 | 0.926 |
| TRACH2002054 | 0 | 0.000 | 51.568 |
| TRACH2002537 | 0 | 0.000 | 2.212 |
| TRACH2003272 | 0 | 0.000 | 4.419 |
| TRACH2003323 | 0 | 0.000 | 2.123 |
| TRACH2005811 | 0 | 0.000 | 1.258 |
| TRACH2007399 | 0 | 0.000 | 1.685 |
| TRACH2008300 | 0 | 0.000 | 2.025 |
| TRACH2014124 | 0 | 0.000 | 3.693 |
| TRACH2014442 | 50.173 | 0 | 0.000 |
| TRACH2014997 | 0 | 0.000 | 25.316 |
| TRACH2015823 | 0 | 0.000 | 5.218 |
| TRACH2016481 | 0 | 0.000 | 51.568 |
| TRACH2017609 | 0 | 0.000 | 37.903 |
| TRACH2018950 | 0 | 0.000 | 17.915 |
| TRACH3000692 | 0 | 0.000 | 5.590 |
| TRACH3002192 | 0 | 0.000 | 4.463 |
| TRACH3003379 | 0 | 0.000 | 29.185 |
| TRACH3003547 | 0 | 0.000 | 5.044 |
| TRACH3003872 | 0 | 0.000 | 9.820 |
| TRACH3004068 | 0 | 0.000 | 1.700 |
| TRACH3004721 | 0 | 0.000 | 3.467 |
| TRACH3005699 | 0 | 0.000 | 22.893 |
| TRACH3006800 | 0 | 0.000 | 34.742 |
| TRACH3007479 | 0 | 0.000 | 3.848 |
| TRACH3008632 | 0 | 0.000 | 20.157 |
| TRACH3009008 | 0 | 0.000 | 5.843 |
| TRACH3009148 | 0 | 0.000 | 10.698 |
| TUTER1000014 | 100.000 | 0 | 0.000 |
| TUTER1000122 | 72.738 | 0 | 0.000 |
| TUTER1000137 | 95.706 | 0 | 0.000 |
| TUTER2000057 | 92.461 | 0 | 0.000 |
| TUTER2000283 | 100.000 | 0 | 0.000 |
| TUTER2000425 | 100.000 | 0 | 0.000 |
| TUTER2000904 | 62.217 | 0 | 3.330 |
| TUTER2000916 | 100.000 | 0 | 0.000 |
| TUTER2001286 | 100.000 | 0 | 0.000 |
| TUTER2001341 | 100.000 | 0 | 0.000 |
| TUTER2001387 | 100.000 | 0 | 0.000 |
| TUTER2001433 | 100.000 | 0 | 0.000 |
| TUTER2001461 | 100.000 | 0 | 0.000 |
| TUTER2002028 | 100.000 | 0 | 0.000 |
| TUTER2002074 | 100.000 | 0 | 0.000 |
| TUTER2002158 | 100.000 | 0 | 0.000 |
| TUTER2002228 | 100.000 | 0 | 0.000 |
| TUTER2002323 | 72.582 | 0 | 0.000 |
| TUTER2002356 | 100.000 | 0 | 0.000 |
| TUTER2002729 | 100.000 | 0 | 0.000 |
| UMVEN1000122 | 0 | 92.143 | 0.000 |
| UMVEN1000143 | 0 | 77.431 | 0.000 |
| UMVEN1000156 | 0 | 97.424 | 0.000 |
| UMVEN1000186 | 0 | 74.732 | 0.630 |
| UMVEN2000046 | 0 | 100.000 | 0.000 |
| UMVEN2000069 | 0 | 100.000 | 0.000 |
| UMVEN2000121 | 0 | 97.690 | 0.000 |
| UMVEN2000133 | 0 | 55.263 | 2.097 |
| UMVEN2000152 | 0 | 74.264 | 0.000 |
| UMVEN2000354 | 0 | 77.661 | 0.000 |
| UMVEN2000453 | 0 | 49.229 | 1.245 |
| UTERU100000$$ | 0 | 0.000 | 58.$$53 |
| UTERU1000015 | 0 | 0.000 | 100.000 |
| UTERU1000024 | 0 | 0.000 | 100.000 |
| UTERU1000031 | 0 | 0.000 | 100.000 |
| UTERU1000032 | 0 | 0.000 | 100.000 |
| UTERU1000057 | 0 | 0.000 | 100.000 |
| UTERU1000065 | 0 | 0.000 | 100.000 |
| UTERU1000077 | 0 | 0.000 | 100.000 |
| UTERU1000093 | 0 | 0.000 | 100.000 |
| UTERU1000096 | 0 | 0.000 | 24.268 |
| UTERU1000106 | 0 | 0.000 | 6.873 |
| UTERU1000109 | 0 | 0.000 | 100.000 |
| UTERU1000131 | 0 | 0.000 | 100.000 |
| UTERU1000138 | 0 | 0.000 | 100.000 |
| UTERU1000148 | 0 | 0.000 | 100.000 |
| UTERU1000160 | 0 | 0.000 | 100.000 |
| UTERU1000182 | 0 | 0.000 | 1.935 |
| UTERU1000183 | 0 | 0.000 | 100.000 |
| UTERU1000187 | 0 | 0.000 | 100.000 |
| UTERU1000192 | 0 | 0.000 | 100.000 |
| UTERU1000249 | 0 | 0.000 | 100.000 |
| UTERU1000337 | 0 | 0.000 | 100.000 |
| UTERU1000339 | 0 | 0.000 | 100.000 |
| UTERU1000384 | 0 | 0.000 | 8.500 |
| UTERU2000023 | 0 | 0.000 | 24.419 |
| UTERU2000047 | 0 | 0.000 | 100.000 |
| UTERU2000074 | 0 | 0.000 | 62.692 |
| UTERU2000095 | 0 | 0.000 | 0.987 |
| UTERU2000099 | 0 | 0.000 | 100.000 |
| UTERU2000154 | 0 | 0.000 | 100.000 |
| UTERU2000197 | 0 | 0.000 | 39.231 |
| UTERU2000218 | 0 | 0.000 | 100.000 |
| UTERU2000238 | 0 | 0.000 | 100.000 |
| UTERU2000243 | 0 | 0.000 | 100.000 |
| UTERU2000260 | 0 | 0.000 | 24.831 |
| UTERU2000263 | 0 | 0.000 | 2.444 |
| UTERU2000300 | 0 | 0.000 | 11.765 |
| UTERU2000329 | 0 | 0.000 | 68.264 |
| UTERU2000332 | 0 | 0.000 | 5.640 |
| UTERU2000338 | 0 | 0.000 | 3.979 |
| UTERU2000349 | 0 | 0.000 | 100.000 |
| UTERU2000377 | 0 | 0.000 | 100.000 |
| UTERU2000393 | 0 | 0.000 | 100.000 |
| UTERU2000418 | 0 | 0.000 | 34.205 |
| UTERU2000424 | 0 | 0.000 | 1.013 |
| UTERU2000465 | 0 | 0.000 | 100.000 |
| UTERU2000485 | 0 | 0.000 | 15.228 |
| UTERU2000517 | 0 | 0.000 | 100.000 |
| UTERU2000524 | 0 | 0.000 | 100.000 |
| UTERU2000537 | 0 | 0.000 | 12.239 |
| UTERU2000539 | 0 | 0.000 | 100.000 |
| UTERU2000541 | 0 | 0.000 | 7.522 |
| UTERU2000542 | 0 | 0.000 | 10.769 |
| UTERU2000546 | 0 | 0.000 | 100.000 |
| UTERU2000550 | 0 | 0.000 | 100.000 |
| UTERU2000569 | 0 | 0.000 | 100.000 |
| UTERU2000607 | 0 | 0.000 | 100.000 |
| UTERU2000629 | 0 | 0.000 | 100.000 |
| UTERU2000649 | 0 | 0.000 | 100.000 |
| UTERU2000663 | 0 | 0.000 | 100.000 |
| UTERU2000696 | 63.416 | 0 | 3.394 |
| UTERU2000794 | 0 | 0.000 | 100.000 |
| UTERU2000830 | 0 | 0.000 | 100.000 |
| UTERU2000844 | 0 | 0.000 | 100.000 |
| UTERU2000922 | 0 | 0.000 | 100.000 |
| UTERU2000925 | 0 | 0.000 | 12.420 |
| UTERU2001024 | 0 | 0.000 | 100.000 |
| UTERU2001110 | 0 | 0.000 | 24.268 |
| UTERU2001176 | 0 | 0.000 | 100.000 |
| UTERU2001281 | 0 | 0.000 | 100.000 |
| UTERU2001389 | 0 | 0.000 | 100.000 |
| UTERU2001409 | 0 | 0.000 | 100.000 |
| UTERU2001412 | 0 | 0.000 | 100.000 |
| UTERU2001504 | 0 | 0.000 | 100.000 |
| UTERU2001607 | 0 | 0.000 | 1.759 |
| UTERU2001658 | 0 | 0.000 | 10.564 |
| UTERU2001747 | 0 | 0.000 | 100.000 |
| UTERU2001876 | 0 | 0.000 | 100.000 |
| UTERU2002001 | 0 | 0.000 | 40.126 |
| UTERU2002011 | 0 | 0.000 | 100.000 |
| UTERU2002176 | 0 | 0.000 | 100.000 |
| UTERU2002198 | 0 | 0.000 | 64.596 |
| UTERU2002294 | 0 | 0.000 | 2.165 |
| UTERU2002332 | 0 | 0.000 | 100.000 |
| UTERU2002410 | 13.085 | 0 | 0.700 |
| UTERU2002473 | 0 | 0.000 | 100.000 |
| UTERU2002547 | 0 | 0.000 | 100.000 |
| UTERU2002662 | 0 | 0.000 | 4.244 |
| UTERU2002693 | 0 | 0.000 | 100.000 |
| UTERU2002733 | 0 | 0.000 | 100.000 |
| UTERU2002736 | 0 | 0.000 | 100.000 |
| UTERU2002737 | 0 | 0.000 | 100.000 |
| UTERU2002826 | 82.260 | 0 | 4.402 |
| UTERU2002841 | 0 | 0.000 | 64.596 |
| UTERU2002964 | 0 | 0.000 | 25.187 |
| UTERU2002993 | 0 | 0.000 | 64.596 |
| UTERU2003035 | 0 | 0.000 | 100.000 |
| UTERU2003057 | 0 | 0.000 | 3.085 |
| UTERU2003126 | 0 | 0.000 | 100.000 |
| UTERU2003135 | 0 | 0.000 | 100.000 |
| UTERU2003321 | 0 | 0.000 | 47.706 |
| UTERU2003399 | 0 | 0.000 | 100.000 |
| UTERU2003411 | 0 | 0.000 | 0.360 |
| UTERU2003456 | 0 | 0.000 | 12.899 |
| UTERU2003577 | 0 | 0.000 | 100.000 |
| UTERU2003704 | 0 | 0.000 | 20.529 |
| UTERU2003926 | 0 | 0.000 | 40.126 |
| UTERU2003973 | 0 | 0.000 | 100.000 |
| UTERU2004015 | 0 | 0.000 | 100.000 |
| UTERU2004037 | 0 | 0.000 | 5.230 |
| UTERU2004039 | 0 | 0.000 | 100.000 |
| UTERU2004061 | 0 | 0.000 | 100.000 |
| UTERU2004073 | 0 | 0.000 | 23.318 |
| UTERU2004163 | 0 | 0.000 | 100.000 |
| UTERU2004197 | 0 | 0.000 | 4.796 |
| UTERU2004299 | 0 | 0.000 | 100.000 |
| UTERU2004461 | 0 | 0.000 | 32.361 |
| UTERU2004520 | 0 | 0.000 | 39.037 |
| UTERU2004564 | 0 | 0.000 | 100.000 |
| UTERU2004664 | 0 | 0.000 | 4.048 |
| UTERU2004688 | 0 | 0.000 | 6.630 |
| UTERU2004698 | 0 | 0.000 | 100.000 |
| UTERU2004807 | 0 | 0.000 | 17.972 |
| UTERU2004861 | 0 | 0.000 | 56.434 |
| UTERU2004929 | 0 | 0.000 | 13.845 |
| UTERU2005004 | 0 | 0.000 | 41.697 |
| UTERU2005050 | 0 | 0.000 | 100.000 |
| UTERU2005069 | 0 | 0.000 | 64.596 |
| UTERU2005074 | 0 | 0.000 | 27.087 |
| UTERU2005179 | 0 | 0.000 | 100.000 |
| UTERU2005292 | 0 | 0.000 | 3.714 |
| UTERU2005346 | 0 | 0.000 | 100.000 |
| UTERU2005354 | 0 | 0.000 | 2.609 |
| UTERU2005446 | 0 | 0.000 | 24.816 |
| UTERU2005449 | 0 | 0.000 | 19.526 |
| UTERU2005450 | 0 | 0.000 | 100.000 |
| UTERU2005533 | 0 | 0.000 | 100.000 |
| UTERU2005593 | 0 | 0.000 | 4.016 |
| UTERU2005601 | 0 | 0.000 | 3.040 |
| UTERU2005621 | 0 | 0.000 | 5.377 |
| UTERU2005664 | 0 | 0.000 | 13.328 |
| UTERU2005822 | 0 | 0.000 | 100.000 |
| UTERU2005903 | 0 | 0.000 | 100.000 |
| UTERU2005905 | 0 | 0.000 | 100.000 |
| UTERU2006103 | 0 | 0.000 | 100.000 |
| UTERU2006115 | 0 | 0.000 | 9.347 |
| UTERU2006137 | 0 | 0.000 | 9.269 |
| UTERU2006182 | 0 | 0.000 | 100.000 |
| UTERU2006400 | 0 | 0.000 | 15.228 |
| UTERU2006412 | 0 | 0.000 | 100.000 |
| UTERU2006429 | 0 | 0.000 | 100.000 |
| UTERU2006486 | 0 | 0.000 | 51.819 |
| UTERU2006524 | 0 | 0.000 | 53.896 |
| UTERU2006547 | 0 | 0.000 | 24.268 |
| UTERU2006568 | 0 | 0.000 | 100.000 |
| UTERU2006593 | 0 | 0.000 | 3.522 |
| UTERU2006643 | 0 | 0.000 | 10.128 |
| UTERU2006651 | 0 | 0.000 | 100.000 |
| UTERU2006705 | 0 | 0.000 | 100.000 |
| UTERU2006899 | 0 | 0.000 | 100.000 |
| UTERU2007004 | 0 | 0.000 | 24.856 |
| UTERU2007075 | 0 | 0.000 | 100.000 |
| UTERU2007081 | 0 | 0.000 | 17.449 |
| UTERU2007128 | 0 | 0.000 | 100.000 |
| UTERU2007253 | 0 | 0.000 | 12.290 |
| UTERU2007267 | 0 | 0.000 | 100.000 |
| UTERU2007444 | 0 | 0.000 | 64.596 |
| UTERU2007499 | 0 | 0.000 | 100.000 |
| UTERU2007639 | 0 | 0.000 | 100.000 |
| UTERU2007724 | 0 | 0.000 | 15.672 |
| UTERU2007924 | 0 | 0.000 | 3.190 |
| UTERU2007942 | 0 | 0.000 | 100.000 |
| UTERU2008018 | 0 | 0.000 | 24.856 |
| UTERU2008019 | 0 | 0.000 | 100.000 |
| UTERU2008027 | 0 | 0.000 | 4.562 |
| UTERU2008040 | 0 | 0.000 | 14.037 |
| UTERU2008077 | 0 | 0.000 | 100.000 |
| UTERU2008085 | 0 | 0.000 | 0.323 |
| UTERU2008130 | 0 | 0.000 | 53.896 |
| UTERU2008302 | 0 | 0.000 | 3.187 |
| UTERU2008347 | 0 | 0.000 | 100.000 |
| UTERU2008426 | 0 | 0.000 | 26.260 |
| UTERU2008516 | 0 | 0.000 | 100.000 |
| UTERU2008561 | 0 | 0.000 | 100.000 |
| UTERU2008653 | 0 | 0.000 | 48.981 |
| UTERU2008705 | 0 | 0.000 | 100.000 |
| UTERU2008707 | 0 | 0.000 | 100.000 |
| UTERU2008747 | 0 | 0.000 | 10.541 |
| UTERU2008785 | 0 | 0.000 | 100.000 |
| UTERU2008845 | 0 | 0.000 | 100.000 |
| UTERU2008901 | 0 | 0.000 | 100.000 |
| UTERU2008930 | 0 | 0.000 | 100.000 |
| UTERU2008938 | 0 | 0.000 | 8.806 |
| UTERU2008939 | 0 | 0.000 | 17.716 |
| UTERU2008962 | 0 | 0.000 | 64.596 |
| UTERU2009094 | 0 | 0.000 | 100.000 |
| UTERU2009120 | 0 | 0.000 | 100.000 |
| UTERU2009131 | 0 | 0.000 | 100.000 |
| UTERU2009147 | 0 | 0.000 | 100.000 |
| UTERU2009206 | 0 | 0.000 | 100.000 |
| UTERU2009283 | 0 | 0.000 | 100.000 |
| UTERU2009335 | 0 | 0.000 | 10.852 |
| UTERU2009414 | 0 | 0.000 | 100.000 |
| UTERU2009435 | 0 | 0.000 | 12.756 |
| UTERU2009483 | 0 | 0.000 | 100.000 |
| UTERU2009510 | 0 | 0.000 | 17.926 |
| UTERU2009538 | 0 | 0.000 | 40.674 |
| UTERU2009540 | 0 | 0.000 | 100.000 |
| UTERU2009776 | 0 | 0.000 | 100.000 |
| UTERU2009904 | 0 | 0.000 | 100.000 |
| UTERU2009951 | 0 | 0.000 | 100.000 |
| UTERU2009972 | 0 | 0.000 | 16.901 |
| UTERU2010115 | 0 | 0.000 | 100.000 |
| UTERU2010124 | 0 | 0.000 | 100.000 |
| UTERU2010164 | 0 | 0.000 | 100.000 |
| UTERU2010226 | 0 | 0.000 | 9.408 |
| UTERU2010231 | 0 | 0.000 | 100.000 |
| UTERU2010304 | 0 | 0.000 | 100.000 |
| UTERU2010320 | 0 | 0.000 | 25.187 |
| UTERU2010417 | 7.026 | 0 | 1.128 |
| UTERU2010431 | 0 | 0.000 | 100.000 |
| UTERU2010525 | 0 | 0.000 | 14.053 |
| UTERU2010651 | 0 | 0.000 | 100.000 |
| UTERU2010724 | 0 | 0.000 | 100.000 |
| UTERU2010747 | 0 | 0.000 | 62.692 |
| UTERU2011195 | 0 | 0.000 | 100.000 |
| UTERU2011199 | 0 | 0.000 | 100.000 |
| UTERU2011220 | 0 | 0.000 | 4.669 |
| UTERU2011261 | 0 | 0.000 | 100.000 |
| UTERU2011287 | 0 | 0.000 | 39.146 |
| UTERU2011410 | 0 | 0.000 | 100.000 |
| UTERU2011574 | 0 | 0.000 | 100.000 |
| UTERU2011621 | 0 | 0.000 | 11.843 |
| UTERU2011657 | 0 | 0.000 | 100.000 |
| UTERU2011741 | 0 | 0.000 | 14.051 |
| UTERU2011806 | 0 | 0.000 | 49.807 |
| UTERU2011811 | 0 | 0.000 | 100.000 |
| UTERU2011897 | 0 | 0.000 | 100.000 |
| UTERU2011906 | 0 | 0.000 | 16.267 |
| UTERU2011962 | 0 | 0.000 | 100.000 |
| UTERU2011968 | 0 | 0.000 | 100.000 |
| UTERU2012031 | 0 | 0.000 | 53.896 |
| UTERU2012101 | 0 | 0.000 | 100.000 |
| UTERU2012114 | 0 | 0.000 | 100.000 |
| UTERU2012230 | 0 | 0.000 | 18.890 |
| UTERU2012252 | 0 | 0.000 | 25.609 |
| UTERU2012286 | 0 | 0.000 | 3.022 |
| UTERU2012333 | 0 | 0.000 | 100.000 |
| UTERU2012407 | 0 | 0.000 | 29.356 |
| UTERU2012526 | 0 | 0.000 | 11.013 |
| UTERU2012581 | 0 | 0.000 | 100.000 |
| UTERU2012610 | 0 | 0.000 | 100.000 |
| UTERU2012615 | 0 | 0.000 | 100.000 |
| UTERU2012688 | 0 | 0.000 | 51.568 |
| UTERU2012703 | 0 | 0.000 | 24.539 |
| UTERU2012715 | 0 | 0.000 | 34.205 |
| UTERU2012741 | 0 | 0.000 | 21.469 |
| UTERU2012767 | 0 | 0.000 | 6.351 |
| UTERU2012786 | 0 | 0.000 | 100.000 |
| UTERU2012856 | 0 | 0.000 | 8.416 |
| UTERU2012890 | 0 | 0.000 | 100.000 |
| UTERU2012938 | 0 | 0.000 | 48.981 |
| UTERU2012976 | 0 | 0.000 | 100.000 |
| UTERU2013048 | 0 | 0.000 | 100.000 |
| UTERU2013078 | 0 | 0.000 | 16.358 |
| UTERU2013231 | 0 | 0.000 | 100.000 |
| UTERU2013262 | 0 | 0.000 | 43.775 |
| UTERU2013280 | 0 | 0.000 | 100.000 |
| UTERU2013322 | 0 | 0.000 | 100.000 |
| UTERU2013483 | 0 | 0.000 | 100.000 |
| UTERU2013491 | 0 | 0.000 | 13.929 |
| UTERU2013502 | 0 | 0.000 | 40.214 |
| UTERU2013586 | 0 | 0.000 | 7.858 |
| UTERU2013926 | 0 | 0.000 | 100.000 |
| UTERU2013976 | 0 | 0.000 | 100.000 |
| UTERU2014001 | 0 | 0.000 | 100.000 |
| UTERU2014024 | 0 | 0.000 | 15.457 |
| UTERU2014167 | 0 | 0.000 | 1.087 |
| UTERU2014223 | 0 | 0.000 | 100.000 |
| UTERU2014398 | 0 | 0.000 | 100.000 |
| UTERU2014464 | 0 | 0.000 | 16.101 |
| UTERU2014548 | 0 | 0.000 | 39.231 |
| UTERU2014601 | 0 | 0.000 | 16.520 |
| UTERU2014631 | 0 | 0.000 | 100.000 |
| UTERU2014668 | 0 | 0.000 | 39.231 |
| UTERU2014678 | 0 | 0.000 | 48.981 |
| UTERU2014728 | 0 | 0.000 | 100.000 |
| UTERU2014898 | 0 | 0.000 | 1.815 |
| UTERU2014998 | 0 | 0.000 | 100.000 |
| UTERU2015062 | 0 | 0.000 | 17.070 |
| UTERU2015087 | 0 | 0.000 | 100.000 |
| UTERU2015108 | 0 | 0.000 | 7.526 |
| UTERU2015190 | 0 | 0.000 | 40.674 |
| UTERU2015198 | 0 | 0.000 | 100.000 |
| UTERU2015202 | 0 | 0.000 | 100.000 |
| UTERU2015405 | 0 | 0.000 | 100.000 |
| UTERU2015640 | 0 | 0.000 | 100.000 |
| UTERU2015653 | 0 | 0.000 | 4.175 |
| UTERU2015830 | 0 | 0.000 | 58.853 |
| UTERU2015880 | 0 | 0.000 | 100.000 |
| UTERU2016147 | 0 | 0.000 | 100.000 |
| UTERU2016157 | 0 | 0.000 | 100.000 |
| UTERU2016426 | 0 | 0.000 | 15.158 |
| UTERU2016464 | 0 | 0.000 | 100.000 |
| UTERU2016669 | 0 | 0.000 | 9.848 |
| UTERU2016757 | 0 | 0.000 | 54.394 |
| UTERU2016761 | 0 | 0.000 | 100.000 |
| UTERU2016799 | 0 | 0.000 | 10.404 |
| UTERU2016822 | 0 | 0.000 | 19.178 |
| UTERU2016896 | 0 | 0.000 | 100.000 |
| UTERU2016902 | 0 | 0.000 | 100.000 |
| UTERU2016979 | 0 | 0.000 | 12.336 |
| UTERU2016981 | 0 | 0.000 | 100.000 |
| UTERU2017123 | 0 | 0.000 | 100.000 |
| UTERU2017303 | 0 | 0.000 | 100.000 |
| UTERU2017421 | 0 | 0.000 | 100.000 |
| UTERU2017492 | 0 | 0.000 | 5.197 |
| UTERU2017613 | 0 | 0.000 | 12.264 |
| UTERU2017623 | 0 | 0.000 | 64.596 |
| UTERU2017632 | 0 | 0.000 | 64.596 |
| UTERU2017761 | 0 | 0.000 | 62.692 |
| UTERU2017762 | 0 | 0.000 | 39.037 |
| UTERU2017810 | 0 | 0.000 | 100.000 |
| UTERU2017988 | 0 | 0.000 | 100.000 |
| UTERU2018127 | 0 | 0.000 | 100.000 |
| UTERU2018180 | 0 | 0.000 | 100.000 |
| UTERU2018200 | 0 | 0.000 | 28.946 |
| UTERU2018333 | 0 | 0.000 | 100.000 |
| UTERU2018364 | 0 | 0.000 | 53.896 |
| UTERU2018514 | 0 | 0.000 | 100.000 |
| UTERU2018522 | 0 | 0.000 | 100.000 |
| UTERU2018523 | 0 | 0.000 | 40.126 |
| UTERU2018544 | 0 | 0.000 | 100.000 |
| UTERU2018566 | 0 | 0.000 | 21.258 |
| UTERU2018609 | 0 | 0.000 | 100.000 |
| UTERU2018674 | 0 | 0.000 | 100.000 |
| UTERU2018712 | 0 | 0.000 | 54.206 |
| UTERU2018784 | 0 | 0.000 | 100.000 |
| UTERU2018789 | 0 | 0.000 | 100.000 |
| UTERU2018811 | 0 | 0.000 | 100.000 |
| UTERU2018867 | 0 | 0.000 | 100.000 |
| UTERU2018881 | 0 | 0.000 | 100.000 |
| UTERU2018884 | 0 | 0.000 | 1.848 |
| UTERU2018955 | 0 | 0.000 | 100.000 |
| UTERU2019005 | 0 | 0.000 | 7.703 |
| UTERU2019038 | 0 | 0.000 | 100.000 |
| UTERU2019096 | 0 | 0.000 | 5.495 |
| UTERU2019163 | 0 | 0.000 | 100.000 |
| UTERU2019257 | 0 | 0.000 | 57.271 |
| UTERU2019453 | 0 | 0.000 | 100.000 |
| UTERU2019491 | 0 | 0.000 | 100.000 |
| UTERU2019534 | 0 | 0.000 | 100.000 |
| UTERU2019681 | 0 | 0.000 | 100.000 |
| UTERU2019706 | 0 | 0.000 | 54.394 |
| UTERU2019710 | 0 | 0.000 | 100.000 |
| UTERU2019940 | 0 | 0.000 | 51.819 |
| UTERU2019959 | 0 | 0.000 | 100.000 |
| UTERU2019964 | 0 | 0.000 | 100.000 |
| UTERU2020226 | 0 | 0.000 | 78.491 |
| UTERU2020242 | 0 | 0.000 | 100.000 |
| UTERU2020292 | 0 | 0.000 | 100.000 |
| UTERU2020351 | 0 | 0.000 | 100.000 |
| UTERU2020491 | 0 | 0.000 | 100.000 |
| UTERU2020718 | 0 | 0.000 | 100.000 |
| UTERU2021163 | 0 | 0.000 | 53.896 |
| UTERU2021380 | 0 | 0.000 | 100.000 |
| UTERU2021649 | 0 | 0.000 | 100.000 |
| UTERU2021820 | 0 | 0.000 | 29.732 |
| UTERU2022020 | 0 | 0.000 | 100.000 |
| UTERU2022773 | 0 | 0.000 | 100.000 |
| UTERU2022955 | 0 | 0.000 | 100.000 |
| UTERU2022981 | 0 | 0.000 | 100.000 |
| UTERU2023039 | 0 | 0.000 | 54.394 |
| UTERU2023045 | 0 | 0.000 | 10.794 |
| UTERU2023175 | 0 | 0.000 | 7.103 |
| UTERU2023262 | 0 | 0.000 | 15.042 |
| UTERU2023550 | 0 | 0.000 | 9.988 |
| UTERU2023651 | 0 | 0.000 | 29.963 |
| UTERU2023687 | 0 | 0.000 | 100.000 |
| UTERU2023712 | 0 | 0.000 | 100.000 |
| UTERU2023941 | 0 | 0.000 | 100.000 |
| UTERU2024002 | 0 | 0.000 | 100.000 |
| UTERU2024042 | 0 | 0.000 | 100.000 |
| UTERU2024141 | 0 | 0.000 | 100.000 |
| UTERU2024481 | 0 | 0.000 | 100.000 |
| UTERU2024656 | 0 | 0.000 | 51.568 |
| UTERU2024758 | 0 | 0.000 | 100.000 |
| UTERU2024820 | 0 | 0.000 | 100.000 |
| UTERU2024881 | 0 | 0.000 | 100.000 |
| UTERU2024969 | 0 | 0.000 | 11.490 |
| UTERU2025025 | 0 | 0.000 | 100.000 |
| UTERU2025041 | 0 | 0.000 | 100.000 |
| UTERU2025301 | 0 | 0.000 | 5.184 |
| UTERU2025366 | 0 | 0.000 | 100.000 |
| UTERU2025415 | 0 | 0.000 | 100.000 |
| UTERU2025579 | 0 | 0.000 | 100.000 |
| UTERU2025645 | 0 | 0.000 | 100.000 |
| UTERU2025891 | 0 | 0.000 | 100.000 |
| UTERU2026025 | 0 | 0.000 | 100.000 |
| UTERU2026090 | 0 | 0.000 | 100.000 |
| UTERU2026142 | 0 | 0.000 | 100.000 |
| UTERU2026203 | 0 | 0.000 | 54.394 |
| UTERU2026775 | 0 | 0.000 | 100.000 |
| UTERU2027023 | 0 | 0.000 | 100.000 |
| UTERU2027369 | 0 | 0.000 | 39.231 |
| UTERU2027591 | 0 | 0.000 | 100.000 |
| UTERU2027616 | 0 | 0.000 | 100.000 |
| UTERU2027941 | 0 | 0.000 | 100.000 |
| UTERU2028377 | 0 | 0.000 | 100.000 |
| UTERU2028734 | 0 | 0.000 | 26.183 |
| UTERU2029503 | 0 | 0.000 | 100.000 |
| UTERU2029660 | 0 | 0.000 | 100.000 |
| UTERU2029742 | 0 | 0.000 | 100.000 |
| UTERU2029953 | 0 | 0.000 | 100.000 |
| UTERU2030213 | 0 | 0.000 | 58.763 |
| UTERU2030270 | 0 | 0.000 | 100.000 |
| UTERU2030280 | 0 | 0.000 | 51.819 |
| UTERU2031060 | 0 | 0.000 | 100.000 |
| UTERU2031084 | 0 | 0.000 | 25.928 |
| UTERU2031268 | 0 | 0.000 | 100.000 |
| UTERU2031295 | 0 | 0.000 | 100.000 |
| UTERU2031521 | 0 | 0.000 | 100.000 |
| UTERU2031611 | 0 | 0.000 | 100.000 |
| UTERU2031703 | 0 | 0.000 | 100.000 |
| UTERU2031834 | 0 | 0.000 | 100.000 |
| UTERU2031851 | 0 | 0.000 | 100.000 |
| UTERU2032075 | 0 | 0.000 | 100.000 |
| UTERU2032220 | 0 | 0.000 | 100.000 |
| UTERU2032279 | 0 | 0.000 | 100.000 |
| UTERU2032726 | 0 | 0.000 | 100.000 |
| UTERU2033172 | 0 | 0.000 | 100.000 |
| UTERU2033375 | 0 | 0.000 | 1.385 |
| UTERU2033382 | 0 | 0.000 | 100.000 |
| UTERU2033420 | 0 | 0.000 | 100.000 |
| UTERU2033530 | 0 | 0.000 | 100.000 |
| UTERU2033577 | 0 | 0.000 | 100.000 |
| UTERU2034053 | 0 | 0.000 | 100.000 |
| UTERU2034147 | 0 | 0.000 | 58.853 |
| UTERU2034695 | 0 | 0.000 | 100.000 |
| UTERU2035114 | 0 | 0.000 | 51.568 |
| UTERU2035187 | 0 | 0.000 | 100.000 |
| UTERU2035231 | 0 | 0.000 | 100.000 |
| UTERU2035306 | 0 | 0.000 | 100.000 |
| UTERU2035323 | 0 | 0.000 | 100.000 |
| UTERU2035328 | 0 | 0.000 | 100.000 |
| UTERU2035331 | 0 | 0.000 | 100.000 |
| UTERU2035452 | 0 | 0.000 | 100.000 |
| UTERU2035469 | 0 | 0.000 | 100.000 |
| UTERU2035503 | 0 | 0.000 | 100.000 |
| UTERU2035745 | 0 | 0.000 | 100.000 |
| UTERU2035908 | 0 | 0.000 | 100.000 |
| UTERU2035926 | 0 | 0.000 | 100.000 |
| UTERU2035978 | 0 | 0.000 | 100.000 |
| UTERU2036089 | 0 | 0.000 | 100.000 |
| UTERU2036347 | 0 | 0.000 | 37.903 |
| UTERU2036507 | 0 | 0.000 | 100.000 |
| UTERU2036512 | 0 | 0.000 | 100.000 |
| UTERU2036530 | 0 | 0.000 | 100.000 |
| UTERU2036623 | 0 | 0.000 | 100.000 |
| UTERU2036690 | 0 | 0.000 | 100.000 |
| UTERU2037224 | 0 | 0.000 | 100.000 |
| UTERU2037361 | 0 | 0.000 | 100.000 |
| UTERU2037423 | 0 | 0.000 | 100.000 |
| UTERU2037577 | 0 | 0.000 | 100.000 |
| UTERU2037674 | 0 | 0.000 | 100.000 |
| UTERU2037791 | 0 | 0.000 | 100.000 |
| UTERU2037843 | 0 | 0.000 | 100.000 |
| UTERU2038171 | 0 | 0.000 | 100.000 |
| UTERU2038251 | 0 | 0.000 | 100.000 |
| UTERU3000226 | 0 | 0.000 | 62.692 |
| UTERU3000298 | 0 | 0.000 | 11.036 |
| UTERU3000402 | 0 | 0.000 | 100.000 |
| UTERU3000645 | 0 | 0.000 | 34.742 |
| UTERU3000665 | 0 | 0.000 | 100.000 |
| UTERU3000670 | 0 | 0.000 | 83.447 |
| UTERU3000727 | 0 | 0.000 | 26.926 |
| UTERU3000738 | 0 | 0.000 | 41.697 |
| UTERU3000828 | 0 | 0.000 | 100.000 |
| UTERU3000844 | 0 | 0.000 | 64.596 |
| UTERU3000899 | 0 | 0.000 | 33.654 |
| UTERU3000959 | 0 | 0.000 | 100.000 |
| UTERU3001029 | 0 | 0.000 | 100.000 |
| UTERU3001053 | 0 | 0.000 | 100.000 |
| UTERU3001059 | 0 | 0.000 | 100.000 |
| UTERU3001158 | 0 | 0.000 | 39.606 |
| UTERU3001240 | 0 | 0.000 | 100.000 |
| UTERU3001394 | 0 | 0.000 | 100.000 |
| UTERU3001542 | 0 | 0.000 | 58.853 |
| UTERU3001558 | 0 | 0.000 | 100.000 |
| UTERU3001571 | 0 | 0.000 | 51.819 |
| UTERU3001585 | 0 | 0.000 | 100.000 |
| UTERU3001632 | 0 | 0.000 | 100.000 |
| UTERU3001652 | 0 | 0.000 | 100.000 |
| UTERU3001766 | 0 | 0.000 | 54.206 |
| UTERU3001988 | 0 | 0.000 | 100.000 |
| UTERU3002209 | 0 | 0.000 | 100.000 |
| UTERU3002218 | 0 | 0.000 | 51.568 |
| UTERU3002383 | 0 | 0.000 | 100.000 |
| UTERU3002600 | 0 | 0.000 | 100.000 |
| UTERU3002620 | 0 | 0.000 | 100.000 |
| UTERU3002667 | 0 | 0.000 | 100.000 |
| UTERU3002701 | 0 | 0.000 | 100.000 |
| UTERU3002731 | 0 | 0.000 | 100.000 |
| UTERU3002768 | 0 | 0.000 | 100.000 |
| UTERU3002786 | 0 | 0.000 | 51.568 |
| UTERU3002993 | 0 | 0.000 | 100.000 |
| UTERU3003116 | 0 | 0.000 | 100.000 |
| UTERU3003135 | 0 | 0.000 | 39.146 |
| UTERU3003178 | 0 | 0.000 | 100.000 |
| UTERU3003465 | 0 | 0.000 | 100.000 |
| UTERU3003495 | 0 | 0.000 | 100.000 |
| UTERU3003523 | 0 | 0.000 | 100.000 |
| UTERU3003660 | 0 | 0.000 | 8.781 |
| UTERU3003774 | 0 | 0.000 | 100.000 |
| UTERU3003776 | 0 | 0.000 | 100.000 |
| UTERU3004384 | 0 | 0.000 | 53.896 |
| UTERU3004418 | 0 | 0.000 | 34.722 |
| UTERU3004477 | 0 | 0.000 | 57.271 |
| UTERU3004523 | 0 | 0.000 | 100.000 |
| UTERU3004616 | 0 | 0.000 | 100.000 |
| UTERU3004635 | 0 | 0.000 | 100.000 |
| UTERU3004709 | 0 | 0.000 | 51.819 |
| UTERU3004938 | 0 | 0.000 | 100.000 |
| UTERU3004992 | 0 | 0.000 | 100.000 |
| UTERU3005049 | 0 | 0.000 | 58.853 |
| UTERU3005159 | 0 | 0.000 | 41.606 |
| UTERU3005205 | 0 | 0.000 | 100.000 |
| UTERU3005230 | 0 | 0.000 | 58.249 |
| UTERU3005264 | 0 | 0.000 | 100.000 |
| UTERU3005422 | 0 | 0.000 | 25.298 |
| UTERU3005460 | 0 | 0.000 | 62.692 |
| UTERU3005536 | 0 | 0.000 | 62.692 |
| UTERU3005585 | 0 | 0.000 | 100.000 |
| UTERU3005767 | 26.525 | 0 | 7.098 |
| UTERU3005907 | 0 | 0.000 | 15.610 |
| UTERU3005970 | 0 | 0.000 | 62.692 |
| UTERU3006008 | 0 | 0.000 | 100.000 |
| UTERU3006228 | 0 | 0.000 | 100.000 |
| UTERU3006308 | 0 | 0.000 | 62.692 |
| UTERU3006538 | 0 | 0.000 | 100.000 |
| UTERU3006640 | 0 | 0.000 | 100.000 |
| UTERU3006687 | 0 | 0.000 | 100.000 |
| UTERU3006720 | 0 | 0.000 | 100.000 |
| UTERU3006798 | 0 | 0.000 | 100.000 |
| UTERU3006884 | 0 | 0.000 | 100.000 |
| UTERU3007021 | 0 | 0.000 | 34.742 |
| UTERU3007104 | 0 | 0.000 | 51.568 |
| UTERU3007108 | 0 | 0.000 | 100.000 |
| UTERU3007134 | 0 | 0.000 | 100.000 |
| UTERU3007419 | 0 | 0.000 | 62.692 |
| UTERU3007640 | 0 | 0.000 | 54.394 |
| UTERU3007731 | 0 | 0.000 | 100.000 |
| UTERU3007913 | 0 | 0.000 | 87.049 |
| UTERU3008280 | 0 | 0.000 | 37.121 |
| UTERU3008463 | 0 | 0.000 | 100.000 |
| UTERU3008660 | 0 | 0.000 | 100.000 |
| UTERU3008671 | 0 | 0.000 | 100.000 |
| UTERU3008722 | 0 | 0.000 | 100.000 |
| UTERU3008917 | 0 | 0.000 | 100.000 |
| UTERU3009259 | 0 | 0.000 | 53.896 |
| UTERU3009490 | 0 | 0.000 | 100.000 |
| UTERU3009517 | 0 | 0.000 | 54.206 |
| UTERU3009690 | 0 | 0.000 | 100.000 |
| UTERU3009775 | 0 | 0.000 | 100.000 |
| UTERU3009871 | 0 | 0.000 | 21.605 |
| UTERU3009979 | 0 | 0.000 | 100.000 |
| UTERU3009987 | 0 | 0.000 | 100.000 |
| UTERU3010029 | 0 | 0.000 | 100.000 |
| UTERU3010409 | 0 | 0.000 | 53.665 |
| UTERU3010526 | 0 | 0.000 | 100.000 |
| UTERU3010604 | 0 | 0.000 | 40.126 |
| UTERU3010892 | 0 | 0.000 | 100.000 |
| UTERU3010919 | 0 | 0.000 | 100.000 |
| UTERU3011063 | 0 | 0.000 | 100.000 |
| UTERU3011092 | 0 | 0.000 | 100.000 |
| UTERU3011273 | 0 | 0.000 | 100.000 |
| UTERU3011398 | 0 | 0.000 | 100.000 |
| UTERU3011558 | 0 | 0.000 | 100.000 |
| UTERU3011579 | 0 | 0.000 | 34.742 |
| UTERU3011795 | 0 | 0.000 | 100.000 |
| UTERU3011837 | 0 | 0.000 | 100.000 |
| UTERU3012293 | 0 | 0.000 | 100.000 |
| UTERU3012414 | 0 | 0.000 | 51.819 |
| UTERU3012476 | 0 | 0.000 | 100.000 |
| UTERU3012599 | 0 | 0.000 | 100.000 |
| UTERU3012999 | 0 | 0.000 | 100.000 |
| UTERU3013167 | 0 | 0.000 | 54.394 |
| UTERU3013302 | 0 | 0.000 | 58.853 |
| UTERU3013781 | 0 | 0.000 | 100.000 |
| UTERU3014274 | 0 | 0.000 | 100.000 |
| UTERU3014446 | 0 | 0.000 | 100.000 |
| UTERU3014611 | 0 | 0.000 | 100.000 |
| UTERU3014647 | 0 | 0.000 | 100.000 |
| UTERU3014791 | 0 | 0.000 | 100.000 |
| UTERU3014906 | 0 | 0.000 | 100.000 |
| UTERU3015011 | 0 | 0.000 | 16.834 |
| UTERU3015086 | 0 | 0.000 | 100.000 |
| UTERU3015299 | 0 | 0.000 | 100.000 |
| UTERU3015412 | 0 | 0.000 | 100.000 |
| UTERU3015500 | 0 | 0.000 | 100.000 |
| UTERU3015647 | 0 | 0.000 | 100.000 |
| UTERU3015844 | 0 | 0.000 | 100.000 |
| UTERU3016070 | 0 | 0.000 | 100.000 |
| UTERU3016273 | 0 | 0.000 | 53.896 |
| UTERU3016274 | 0 | 0.000 | 100.000 |
| UTERU3016308 | 0 | 0.000 | 100.000 |
| UTERU3016789 | 0 | 0.000 | 100.000 |
| UTERU3017176 | 0 | 0.000 | 100.000 |
| UTERU3017441 | 0 | 0.000 | 100.000 |
| UTERU3017626 | 0 | 0.000 | 100.000 |
| UTERU3017995 | 0 | 0.000 | 13.044 |
| UTERU3018154 | 0 | 0.000 | 100.000 |
| UTERU301$$172 | 0 | 0.000 | 3$$.038 |
| UTERU3018255 | 0 | 0.000 | 100.000 |
| UTERU3018616 | 0 | 0.000 | 25.167 |
| UTERU3018711 | 0 | 0.000 | 86.466 |
| UTERU3019078 | 0 | 0.000 | 100.000 |

[3435] Genes whose expression levels were negligibly low in each of the above-described libraries are shown with their clone names below.

[3436] 3NB691000018, 3NB691000085, 3NB691000113; 3NB691000116, 3NB691000129, 3NB691000191, 3NB692000012, 3NB692000029, 3NB692000102, 3NB692000154, 3NB692000276, 3NB692000305, 3NB692000330, 3NB692000374, 3NB692000429, 3NB692000484, 3NB692000529, 3NB692000973, 3NB692001002, 3NB692001022, 3NB692001034, 3NB692001040, 3NB692001123, 3NB692001267, 3NB692001288, 3NB692001339, 3NB692001349, 3NB692001366, 3NB692001408, 3NB692001433, 3NB692001442, 3NB692001459, 3NB692001471, 3NB692001496, 3NB692001501, 3NB692001507, 3NB692001511, 3NB692001519, 3NB692001520, 3NB692001528, 3NB692001538, 3NB692001548, 3NB692001557, 3NB692001637, 3NB692001719, 3NB692001861, 3NB692002051, 3NB692002365, 3NB692002685, 3NB692002806,

[3437] 3NB692003538, 3NB692004045, 3NB692004724, 3NB692005439, 3NB692006952, 3NB692008178, 3NB692008729, ACTVT2000380, ADIPS1000064, ADIPS2000069, ADIPS2000088, ADIPS2000245, ADIPS2000425, ADRGL1000002, ADRGL1000018, ADRGL1000033, ADRGL1000038, ADRGL1000065, ADRGL1000067, ADRGL1000111, ADRGL1000144, ADRGL1000147, ADRGL1000160, ADRGL1000165, ADRGL1000182, ADRGL2000056, ADRGL2000064, ADRGL2000074, ADRGL2000085, ADRGL2000097, ADRGL2000117, ADRGL2000142, ADRGL2000172, ADRGL2000248, ADRGL2000261, ADRGL2000323, ADRGL2000353, ADRGL2000384, ADRGL2000428, ADRGL2000636, ADRGL2000644, ADRGL2000968, ADRGL2001119, ADRGL2001229, ADRGL2001287, ADRGL2001301, ADRGL2001354, ADRGL2001554, ADRGL2001651, ADRGL2001756,

[3438] ADRGL2001830, ADRGL2001836, ADRGL2001854, ADRGL2002029, ADRGL2002191, ADRGL2002260, ADRGL2002392, ADRGL2002477, ADRGL2002679, ADRGL2002753, ADRGL2002857, ADRGL2003017, ADRGL2003329, ADRGL2003552, ADRGL2003585, ADRGL2003638, ADRGL2003684, ADRGL2003773, ADRGL2003785, ADRGL2004031, ADRGL2004077, ADRGL2004451, ADRGL2004459, ADRGL2004708, ADRGL2004724, ADRGL2004749, ADRGL2004770, ADRGL2004777, ADRGL2004833, ADRGL2005336, ADRGL2005564, ADRGL2005756, ADRGL2005838, ADRGL2005926, ADRGL2005961, ADRGL2006034, ADRGL2006124, ADRGL2006177, ADRGL2006193, ADRGL2006377, ADRGL2006617, ADRGL2006732, ADRGL2006767, ADRGL2006817, ADRGL2006846, ADRGL2006886, ADRGL2007080, ADRGL2007125, ADRGL2007283, ADRGL2007313,

[3439] ADRGL2007357, ADRGL2007636, ADRGL2007651, ADRGL2007810, ADRGL2007877, ADRGL2007906, ADRGL2007974, ADRGL2008023, ADRGL2008331, ADRGL2008337, ADRGL2008535, ADRGL2008966, ADRGL2009146, ADRGL2009324, ADRGL2009489, ADRGL2009533, ADRGL2009691, ADRGL2009755, ADRGL2010152, ADRGL2010315, ADRGL2010594, ADRGL2010860, ADRGL2010974, ADRGL2011190, ADRGL2011330, ADRGL2012038, ADRGL2012179, AHMSC1000138, ASTRO1000009, ASTRO1000018, ASTRO1000029, ASTRO1000096, ASTRO1000165, ASTRO2000011, ASTRO2000014, ASTRO2000095, ASTRO2000141, ASTRO2000191, ASTRO2000278, ASTRO2000372, ASTRO2000381, ASTRO2000403, ASTRO2000417, ASTRO2000482, ASTRO2000533, ASTRO2000653, ASTRO2000662, ASTRO2000725, ASTRO2001001, ASTRO2001008,

[3440] ASTRO2001029, ASTRO2001088, ASTRO2001107, ASTRO2001122, ASTRO2001227, ASTRO2001249, ASTRO2001480, ASTRO2001806, ASTRO2002024, ASTRO2002035, ASTRO2002064, ASTRO2002202, ASTRO2002459, ASTRO2002571, ASTRO2002632, ASTRO2002659, ASTRO2002693, ASTRO2002720, ASTRO2002733, ASTRO2002743, ASTRO2002842, ASTRO2003212, ASTRO2003461, ASTRO2003574, ASTRO2003581, ASTRO2003632, ASTRO2003740, ASTRO2003840, ASTRO2003960, ASTRO2004032, ASTRO2004051, ASTRO2004177, ASTRO2004217, ASTRO2004297, ASTRO2004584, ASTRO2004628, ASTRO2004751, ASTRO2004877, ASTRO2004974, ASTRO2005008, ASTRO2005081, ASTRO2005096, ASTRO2005242, ASTRO2005273, ASTRO2005343, ASTRO2005360, ASTRO2005413, ASTRO2005423, ASTRO2005553, ASTRO2005557,

[3441] ASTRO2005575, ASTRO2005593, ASTRO2005687, ASTRO2005726, ASTRO2005896, ASTRO2005902, ASTRO2006356, ASTRO2006475, ASTRO2006747, ASTRO2006920, ASTRO2006952, ASTRO2007221, ASTRO2007377, ASTRO2007515, ASTRO2007578, ASTRO2007643, ASTRO2007666, ASTRO2007956, ASTRO2007962, ASTRO2008040, ASTRO2008239, ASTRO2008409, ASTRO2008425, ASTRO2008777, ASTRO2008895, ASTRO2008960, ASTRO2008972, ASTRO2009068, ASTRO2009118, ASTRO2009177, ASTRO2009333, ASTRO2009458, ASTRO2009526, ASTRO2009879, ASTRO2010072, ASTRO2010615, ASTRO2010799, ASTRO2010962, ASTRO2010996, ASTRO2011149, ASTRO2011422, ASTRO2011426, ASTRO2011437, ASTRO2011461, ASTRO2011834, ASTRO2011893, ASTRO2012552, ASTRO2013124, ASTRO2013671, ASTRO2013802,

[3442] ASTRO2014135, ASTRO2014174, ASTRO2014211, ASTRO2014363, ASTRO2014392, ASTRO2014498, ASTRO2014561, ASTRO2014576, ASTRO2014863, ASTRO2014923, ASTRO2014961, ASTRO2015162, ASTRO2015185, ASTRO2015328, ASTRO2015529, ASTRO2015987, ASTRO2016044, ASTRO2016114, ASTRO2016148, ASTRO2016681, ASTRO2016819, ASTRO2016847, ASTRO2016892, ASTRO2017348, ASTRO2017627, ASTRO2018169, ASTRO2018373, ASTRO2018540, ASTRO2019039, ASTRO2019171, ASTRO3000154, ASTRO3000172, ASTRO3000177, ASTRO3000301, ASTRO3000474, ASTRO3000482, BEAST2000454, BGGI11000123, BGGI11000193, BGGI11000285, BGGI12000022, BGGI12000067, BGGI12000161, BGGI12000533, BGGI12000544, BGGI12000616, BGGI12000684, BGGI12000693, BGGI12000839, BGGI12001075,

[3443] BGGI12001097, BGGI12001241, BGGI12001247, BGGI12001682, BGGI12001714, BLADE1000176, BLADE2000181, BLADE2000256, BLADE2000340, BLADE2000389, BLADE2000463, BLADE2000492, BLADE2000579, BLADE2000640, BLADE2000866, BLADE2000938, BLADE2001031, BLADE2001133, BLADE2001138, BLADE2001141, BLADE2001371, BLADE2001458, BLADE2001575, BLADE2001753, BLADE2001935, BLADE2001940, BLADE2001987, BLADE2002073, BLADE2002310, BLADE2002730, BLADE2002738, BLADE2002744, BLADE2002782, BLADE2002947, BLADE2002972, BLADE2003474, BLADE2003916, BLADE2004089, BLADE2004345, BLADE2004389, BLADE2004462, BLADE2004628, BLADE2004670, BLADE2004849, BLADE2005036, BLADE2005038, BLADE2005229, BLADE2005459, BLADE2005792, BLADE2006043,

[3444] BLADE2006415, BLADE2006607, BLADE2006826, BLADE2006830, BLADE2006849, BLADE2006947, BLADE2007033, BLADE2007043, BLADE2007666, BLADE2007722, BLADE2007735, BLADE2007744, BLADE2007799, BLADE2007923, BLADE2007935, BLADE2007958, BLADE2008281, BLADE2008398, BLADE2008454, BLADE2008461, BLADE2008479, BLADE2008539, BLADE2008809, BLADE2008995, BLADE2009452, BLADE2009479, BLADE2009593, BNGH41000098, BNGH41000104, BNGH41000118, BNGH41000153, BNGH41000169, BNGH41000177, BNGH41000190, BNGH41000198, BNGH41000216, BNGH41000235, BNGH42000130, BNGH42000132, BNGH42000360, BNGH42000405, BNGH42000532, BNGH42000675, BNGH42000791, BNGH42000815, BNGH42000994, BNGH42001247, BNGH42001406, BNGH42001576, BNGH42001724,

[3445] BNGH42002168, BNGH42002244, BNGH42002387, BNGH42002489, BNGH42003529, BNGH42003570, BNGH42003641, BNGH420040.76, BNGH42004291, BNGH42004538, BNGH42004679, BNGH42005017, BNGH42005235, BNGH42005504, BNGH42005968, BNGH42006226, BNGH42006234, BNGH42007037, BNGH42007366, BNGH42007594, BNGH42007798, BNGH42008199, BNGH42008510, BNGH42008603, BNGH42008649, BNGH42008743, BNGH42008832, BNGH42008850, BNGH42008943, BNGH42009021, BNGH42009025, BRACE1000020, BRACE1000047, BRACE1000051, BRACE1000065, BRACE1000073, BRACE1000084, BRACE1000087, BRACE1000092, BRACE1000093, BRACE1000101, BRACE1000114, BRACE1000115, BRACE1000124, BRACE1000132, BRACE1000159, BRACE1000166, BRACE1000169, BRACE1000187, BRACE1000239,

[3446] BRACE1000258, BRACE1000451, BRACE1000475, BRACE1000572, BRACE2000061, BRACE2000077, BRACE2000078, BRACE2000100, BRACE2000109, BRACE2000141, BRACE2000148, BRACE2000183, BRACE2000229, BRACE2000232, BRACE2000245, BRACE2000256, BRACE2000266, BRACE2000267, BRACE2000280, BRACE2000300, BRACE2000307, BRACE2000331, BRACE2000332, BRACE2000351, BRACE2000368, BRACE2000392, BRACE2000441, BRACE2000487, BRACE2000489, BRACE2000505, BRACE2000525, BRACE2000526, BRACE2000531, BRACE2000545, BRACE2000553, BRACE2000565, BRACE2000577, BRACE2000640, BRACE2000650, BRACE2000677, BRACE2000698, BRACE2000718, BRACE2000733, BRACE2000743, BRACE2000753, BRACE2000815, BRACE2000864, BRACE2000885, BRACE2000893, BRACE2000905,

[3447] BRACE2000936, BRACE2000947, BRACE2000965, BRACE2000969, BRACE2000975, BRACE2000988, BRACE2001017, BRACE2001070, BRACE2001094, BRACE2001107, BRACE2001117, BRACE2001151, BRACE2001154, BRACE2001191, BRACE2001197, BRACE2001236, BRACE2001239, BRACE2001269, BRACE2001312, BRACE2001313, BRACE2001330, BRACE2001340, BRACE2001352, BRACE2001353, BRACE2001374, BRACE2001375, BRACE2001423, BRACE2001424, BRACE2001445, BRACE2001453, BRACE2001455, BRACE2001477, BRACE2001492, BRACE2001496, BRACE2001497, BRACE2001508, BRACE2001534, BRACE2001543, BRACE2001564, BRACE2001588, BRACE2001607, BRACE2001626, BRACE2001673, BRACE2001677, BRACE2001705, BRACE2001709, BRACE2001711, BRACE2001726, BRACE2001733, BRACE2001737,

[3448] BRACE2001742, BRACE2001777, BRACE2001779, BRACE2001834, BRACE2001859, BRACE2001865, BRACE2001872, BRACE2001881, BRACE2001892, BRACE2001898, BRACE2001923, BRACE2001942, BRACE2001944, BRACE2001954, BRACE2001972, BRACE2001973, BRACE2002026, BRACE2002034, BRACE2002050, BRACE2002081, BRACE2002091, BRACE2002139, BRACE2002142, BRACE2002151, BRACE2002157, BRACE2002202, BRACE2002206, BRACE2002227, BRACE2002260, BRACE2002297, BRACE2002304, BRACE2002356, BRACE2002392, BRACE2002394, BRACE2002431, BRACE2002441, BRACE2002444, BRACE2002458, BRACE2002467, BRACE2002468, BRACE2002495, BRACE2002582, BRACE2002585, BRACE2002589, BRACE2002590, BRACE2002606, BRACE2002613, BRACE2002614, BRACE2002617, BRACE2002623,

[3449] BRACE2002635, BRACE2002661, BRACE2002676, BRACE2002682, BRACE2002685, BRACE2002695, BRACE2002707, BRACE2002736, BRACE2002752, BRACE2002755, BRACE2002762, BRACE2002772, BRACE2002792, BRACE2002796, BRACE2002803, BRACE2002807, BRACE2002812, BRACE2002834, BRACE2002849, BRACE2002857, BRACE2002860, BRACE2002861, BRACE2002884, BRACE2002896, BRACE2002948, BRACE2003037, BRACE2003078, BRACE2003097, BRACE2003110, BRACE2003168, BRACE2003199, BRACE2003210, BRACE2003217, BRACE2003269, BRACE2003285, BRACE2003304, BRACE2003319, BRACE2003398, BRACE2003420, BRACE2003428, BRACE2003431, BRACE2003539, BRACE2003540, BRACE2003594, BRACE2003598, BRACE2003609, BRACE2003614, BRACE2003628, BRACE2003639, BRACE2003700,

[3450] BRACE2003713, BRACE2003766, BRACE2003788, BRACE2003800, BRACE2003802, BRACE2003825, BRACE2003827, BRACE2003845, BRACE2003847, BRACE2003848, BRACE2003873, BRACE2003885, BRACE2003887, BRACE2003905, BRACE2003928, BRACE2003944, BRACE2003954, BRACE2003982, BRACE2003987, BRACE2005034, BRACE2005047, BRACE2005063, BRACE2005083, BRACE2005090, BRACE2005099, BRACE2005118, BRACE2005124, BRACE2005138, BRACE2005151, BRACE2005160, BRACE2005169, BRACE2005189, BRACE2005193, BRACE2005198, BRACE2005216, BRACE2005243, BRACE2005251, BRACE2005253, BRACE2005298, BRACE2005328, BRACE2005329, BRACE2005337, BRACE2005348, BRACE2005363, BRACE2005395, BRACE2005408, BRACE2005433, BRACE2005434, BRACE2005448, BRACE2005450,

[3451] BRACE2005453, BRACE2005457, BRACE2005460, BRACE2005489, BRACE2005518, BRACE2005556, BRACE2005562, BRACE2005624, BRACE2005642, BRACE2005661, BRACE2005667, BRACE2005681, BRACE2005731, BRACE2005742, BRACE2005762, BRACE2005773, BRACE2005787, BRACE2005795, BRACE2005800, BRACE2005858, BRACE2005869, BRACE2005875, BRACE2005881, BRACE2005898, BRACE2005904, BRACE2005906, BRACE2005907, BRACE2005911, BRACE2005937, BRACE2005949, BRACE2005981, BRACE2005991, BRACE2006055, BRACE2006072, BRACE2006075, BRACE2006089, BRACE2006102, BRACE2006105, BRACE2006122, BRACE2006137, BRACE2006143, BRACE2006162, BRACE2006167, BRACE2006174, BRACE2006240, BRACE2006245, BRACE2006249, BRACE2006258, BRACE2006264, BRACE2006274,

[3452] BRACE2006281, BRACE2006298, BRACE2006319, BRACE2006344, BRACE2006363, BRACE2006378, BRACE2006380, BRACE2006393, BRACE2006413, BRACE2006417, BRACE2006453, BRACE2006459, BRACE2006488, BRACE2006514, BRACE2006534, BRACE2006540, BRACE2006547, BRACE2006564, BRACE2006587, BRACE2006598, BRACE2006685, BRACE2006703, BRACE2006743, BRACE2006753, BRACE2006783, BRACE2006821, BRACE2006833, BRACE2006859, BRACE2006871, BRACE2006909, BRACE2006911, BRACE2006924, BRACE2006935, BRACE2006937, BRACE2006951, BRACE2006982, BRACE2006986, BRACE2007013, BRACE2007068, BRACE2007087, BRACE2007089, BRACE2007109, BRACE2007138, BRACE2007191, BRACE2007197, BRACE2007201, BRACE2007203, BRACE2007232, BRACE2007254, BRACE2007262,

[3453] BRACE2007274, BRACE2007281, BRACE2007295, BRACE2007358, BRACE2007396, BRACE2007398, BRACE2007401, BRACE2007411, BRACE2007447, BRACE2007477, BRACE2007502, BRACE2007503, BRACE2007522, BRACE2007527, BRACE2007538, BRACE2007563, BRACE2007567, BRACE2007577, BRACE2007621, BRACE2007640, BRACE2007641, BRACE2007646, BRACE2007663, BRACE2007671, BRACE2007682, BRACE2007685, BRACE2007708, BRACE2007727, BRACE2007749, BRACE2007760, BRACE2007761, BRACE2007764, BRACE2007767, BRACE2007768, BRACE2007769, BRACE2007784, BRACE2007786, BRACE2007799, BRACE2007801, BRACE2007832, BRACE2007836, BRACE2007868, BRACE2007882, BRACE2007888, BRACE2007902, BRACE2007920, BRACE2007937, BRACE2007944, BRACE2007952, BRACE2008008,

[3454] BRACE2008015, BRACE2008021, BRACE2008097, BRACE2008102, BRACE2008114, BRACE2008144, BRACE2008172, BRACE2008216, BRACE2008218, BRACE2008251, BRACE2008276, BRACE2008295, BRACE2008308, BRACE2008336, BRACE2008358, BRACE2008361, BRACE2008380, BRACE2008385, BRACE2008399, BRACE2008401, BRACE2008402, BRACE2008410, BRACE2008420, BRACE2008443, BRACE2008473, BRACE2008480, BRACE2008481, BRACE2008488, BRACE2008495, BRACE2008500, BRACE2008553, BRACE2008594, BRACE2008604, BRACE2008615, BRACE2008622, BRACE2008629, BRACE2008655, BRACE2008656, BRACE2008706, BRACE2008708, BRACE2008710, BRACE2008754, BRACE2008797, BRACE2008847, BRACE2008857, BRACE2008861, BRACE2008867, BRACE2008881, BRACE2008883, BRACE2008917,

[3455] BRACE2008919, BRACE2008948, BRACE2008960, BRACE2008968, BRACE2008999, BRACE2009014, BRACE2009016, BRACE2009031, BRACE2009044, BRACE2009045, BRACE2009053, BRACE2009122, BRACE2009131, BRACE2009185, BRACE2009188, BRACE2009212, BRACE2009221, BRACE2009235, BRACE2009238, BRACE2009255, BRACE2009270, BRACE2009272, BRACE2009274, BRACE2009275, BRACE2009291, BRACE2009293, BRACE2009307, BRACE2009311, BRACE2009318, BRACE2009323, BRACE2009366, BRACE2009421, BRACE2009428, BRACE2009434, BRACE2009437, BRACE2009483, BRACE2009533, BRACE2009558, BRACE2009566, BRACE2009591, BRACE2009620, BRACE2009654, BRACE2009721, BRACE2009732, BRACE2009754, BRACE2009828, BRACE2009886, BRACE2009907, BRACE2009957, BRACE2010170,

[3456] BRACE2010171, BRACE2010203, BRACE2010208, BRACE2010336, BRACE2010348, BRACE2010440, BRACE2010444, BRACE2010477, BRACE2010489, BRACE2010535, BRACE2010550, BRACE2010598, BRACE2010632, BRACE2010642, BRACE2010651, BRACE2010669, BRACE2010684, BRACE2010753, BRACE2010813, BRACE2010828, BRACE2010837, BRACE2010888, BRACE2010937, BRACE2010983, BRACE2011007, BRACE2011025, BRACE2011199, BRACE2011265, BRACE2011389, BRACE2011478, BRACE2011545, BRACE2011592, BRACE2011611, BRACE2011646, BRACE2011677, BRACE2011703, BRACE2011747, BRACE2011838, BRACE2011892, BRACE2011904, BRACE2011947, BRACE2012061, BRACE2012062, BRACE2012185, BRACE2012222, BRACE2012232, BRACE2012291, BRACE2012317, BRACE2012510, BRACE2012625,

[3457] BRACE2012653, BRACE2012814, BRACE2012833, BRACE2012838, BRACE2012936, BRACE2012947, BRACE2013009, BRACE2013010, BRACE2013126, BRACE2013132, BRACE2013149, BRACE2013369, BRACE2013806, BRACE2013855, BRACE2013911, BRACE2014108, BRACE2014161, BRACE2014232, BRACE2014257, BRACE2014268, BRACE2014306, BRACE2014475, BRACE2014657, BRACE2014746, BRACE2014780, BRACE2014818, BRACE2014821, BRACE2014824, BRACE2014850, BRACE2014854, BRACE2015031, BRACE2015058, BRACE2015132, BRACE2015262, BRACE2015270, BRACE2015287, BRACE2015314, BRACE2015352, BRACE2015368, BRACE2015412, BRACE2015436, BRACE2015741, BRACE2015756, BRACE2015969, BRACE2015995, BRACE2016058, BRACE2016194, BRACE2016315, BRACE2016325, BRACE2016335,

[3458] BRACE2016362, BRACE2016366, BRACE2016465, BRACE2016516, BRACE2016583, BRACE2016708, BRACE2016821, BRACE2016896, BRACE2016981, BRACE2017108, BRACE2017124, BRACE2017298, BRACE2017359, BRACE2017410, BRACE2017438, BRACE2017580, BRACE2017587, BRACE2017720, BRACE2017844, BRACE2017872, BRACE2017929, BRACE2017934, BRACE2017985, BRACE2017992, BRACE2018337, BRACE2018443, BRACE2018448, BRACE2018568, BRACE2018700, BRACE2018727, BRACE2018736, BRACE2018759, BRACE2018762, BRACE2018782, BRACE2018847, BRACE2019004, BRACE2019044, BRACE2019244, BRACE2019258, BRACE2019327, BRACE2019348, BRACE2019371, BRACE2019467, BRACE2019510, BRACE2019519, BRACE2019528, BRACE2019618, BRACE2019696, BRACE2019703, BRACE2019843,

[3459] BRACE2019865, BRACE2019872, BRACE2019877, BRACE2020028, BRACE2020077, BRACE2020097, BRACE2020157, BRACE2020278, BRACE2020358, BRACE2020467, BRACE2020652, BRACE2020709, BRACE2020742, BRACE2020756, BRACE2020863, BRACE2020982, BRACE2021014, BRACE2021143, BRACE2021148, BRACE2021245, BRACE2021254, BRACE2021264, BRACE2021344, BRACE2021433, BRACE2021478, BRACE2021541, BRACE2021670, BRACE2021695, BRACE2021708, BRACE2021721, BRACE2021932, BRACE2021936, BRACE2022030, BRACE2022158, BRACE2022196, BRACE2022270, BRACE2022328, BRACE2022389, BRACE2022394, BRACE2022435, BRACE2022448, BRACE2022450, BRACE2022549, BRACE2022633, BRACE2022693, BRACE2022848, BRACE2022928, BRACE2022990, BRACE2023069, BRACE2023070,

[3460] BRACE2023223, BRACE2023268, BRACE2023284, BRACE2023404, BRACE2023451, BRACE2023540, BRACE2023633, BRACE2023718, BRACE2023727, BRACE2023744, BRACE2023800, BRACE2023801, BRACE2024074, BRACE2024222, BRACE2024610, BRACE2024627, BRACE2024781, BRACE2024826, BRACE2025018, BRACE2025316, BRACE2025333, BRACE2025437, BRACE2025452, BRACE2025492, BRACE2025710, BRACE2025796, BRACE2025992, BRACE2026054, BRACE2026131, BRACE2026141, BRACE2026142, BRACE2026293, BRACE2026294, BRACE2026404, BRACE2026675, BRACE2026725, BRACE2026836, BRACE2026920, BRACE2026971, BRACE2027018, BRACE2027221, BRACE2027258, BRACE2027312, BRACE2027382, BRACE2027389, BRACE2027408, BRACE2027643, BRACE2027767, BRACE2027770, BRACE2027879,

[3461] BRACE2027970, BRACE2028171, BRACE2028392, BRACE2028410, BRACE2028636, BRACE2028741, BRACE2028956, BRACE2028970, BRACE2029112, BRACE2029356, BRACE2029396, BRACE2029581, BRACE2029644, BRACE2029849, BRACE2030039, BRACE2030096, BRACE2030323, BRACE2030326, BRACE2030345, BRACE2030736, BRACE2030883, BRACE2030884, BRACE2031154, BRACE2031232, BRACE2031527, BRACE2031531, BRACE2031553, BRACE2031899, BRACE2032044, BRACE2032090, BRACE2032134, BRACE2032148, BRACE2032182, BRACE2032329, BRACE2032385, BRACE2032436, BRACE2032477, BRACE2032502, BRACE2032538, BRACE2032584, BRACE2032823, BRACE2033128, BRACE2033394, BRACE2033478, BRACE2033720, BRACE2033786, BRACE2034434, BRACE2034523, BRACE2034616, BRACE2034622,

[3462] BRACE2034870, BRACE2035003, BRACE2035120, BRACE2035124, BRACE2035191, BRACE2035278, BRACE2035381, BRACE2035441, BRACE2035485, BRACE2036005, BRACE2036096, BRACE2036743, BRACE2036830, BRACE2036834, BRACE2036900, BRACE2037132, BRACE2037294, BRACE2037295, BRACE2037299, BRACE2037431, BRACE2037692, BRACE2037847, BRACE2038114, BRACE2038269, BRACE2038271, BRACE2038329, BRACE2038492, BRACE2038551, BRACE2038618, BRACE2039009, BRACE2039128, BRACE2039170, BRACE2039249, BRACE2039286, BRACE2039297, BRACE2039327, BRACE2039362, BRACE2039475, BRACE2039600, BRACE2039607, BRACE2039624, BRACE2039734, BRACE2039823, BRACE2039832, BRACE2039893, BRACE2039986, BRACE2040138, BRACE2040325, BRACE2040514, BRACE2040640,

[3463] BRACE2040987, BRACE2041009, BRACE2041095, BRACE2041200, BRACE2041264, BRACE2041890, BRACE2041898, BRACE2042394, BRACE2042398, BRACE2042550, BRACE2042620, BRACE2042628, BRACE2042873, BRACE2043036, BRACE2043105, BRACE2043142, BRACE2043248, BRACE2043349, BRACE2043381, BRACE2043774, BRACE2043942, BRACE2044057, BRACE2044105, BRACE2044263, BRACE2044286, BRACE2044304, BRACE2044473, BRACE2044510, BRACE2044640, BRACE2044816, BRACE2044946, BRACE2044949, BRACE2045300, BRACE2045428, BRACE2045596, BRACE2045772, BRACE2045947, BRACE2045954, BRACE2046251, BRACE2046295, BRACE2046976, BRACE2047011, BRACE2047232, BRACE2047350, BRACE2047377, BRACE2047385, BRACE2047492, BRACE2047558, BRACE2047573, BRACE2047835,

[3464] BRACE2047893, BRACE2047975, BRACE3000071, BRACE3000404, BRACE3000520, BRACE3000697, BRACE3000840, BRACE3000973, BRACE3001002, BRACE3001058, BRACE3001066, BRACE3001113, BRACE3001217, BRACE3001299, BRACE3001384, BRACE3001391, BRACE3001403, BRACE3001595, BRACE3001754, BRACE3001948, BRACE3001973, BRACE3002184, BRACE3002298, BRACE3002344, BRACE3002390, BRACE3002420, BRACE3002508, BRACE3002541, BRACE3002756, BRACE3003004, BRACE3003026, BRACE3003053, BRACE3003192, BRACE3003413, BRACE3003595, BRACE3003698, BRACE3003866, BRACE3003920, BRACE3004046, BRACE3004058, BRACE3004113, BRACE3004150, BRACE3004205, BRACE3004358, BRACE3004435, BRACE3004477, BRACE3004767, BRACE3004772, BRACE3004783, BRACE3004843,

[3465] BRACE3004862, BRACE3004880, BRACE3004887, BRACE3004981, BRACE3004996, BRACE3004998, BRACE3005103, BRACE3005127, BRACE3005145, BRACE3005217, BRACE3005225, BRACE3005430, BRACE3005499, BRACE3005760, BRACE3005870, BRACE3005903, BRACE3005989, BRACE3006113, BRACE3006185, BRACE3006226, BRACE3006462, BRACE3006463, BRACE3006553, BRACE3006872, BRACE3006917, BRACE3007058, BRACE3007084, BRACE3007085, BRACE3007322, BRACE3007472, BRACE3007480, BRACE3007559, BRACE3007625, BRACE3007642, BRACE3007649, BRACE3007767, BRACE3007869, BRACE3008036, BRACE3008066, BRACE3008092, BRACE3008095, BRACE3008137, BRACE3008255, BRACE3008337, BRACE3008384, BRACE3008720, BRACE3009044, BRACE3009075, BRACE3009090, BRACE3009127,

[3466] BRACE3009197, BRACE3009237, BRACE3009265, BRACE3009297, BRACE3009377, BRACE3009392, BRACE3009416, BRACE3009539, BRACE3009574, BRACE3009701, BRACE3009708, BRACE3009724, BRACE3009993, BRACE3010076, BRACE3010079, BRACE3010086, BRACE3010221, BRACE3010283, BRACE3010315, BRACE3010397, BRACE3010416, BRACE3010435, BRACE3010438, BRACE3010702, BRACE3010862, BRACE3011271, BRACE3011421, BRACE3011447, BRACE3011505, BRACE3011634, BRACE3011774, BRACE3012357, BRACE3012574, BRACE3012806, BRACE3012930, BRACE3013119, BRACE3013418, BRACE3013576, BRACE3013740, BRACE3013780, BRACE3013874, BRACE3013936, BRACE3013986, BRACE3014005, BRACE3014068, BRACE3014231, BRACE3014290, BRACE3014317, BRACE3014523, BRACE3014714,

[3467] BRACE3014807, BRACE3014942, BRACE3015090, BRACE3015121, BRACE3015262, BRACE3015521, BRACE3015808, BRACE3015829, BRACE3015894, BRACE3015898, BRACE3016020, BRACE3016122, BRACE3016167, BRACE3016170, BRACE3016580, BRACE3016788, BRACE3016810, BRACE3016862, BRACE3016884, BRACE3017083, BRACE3017253, BRACE3018083, BRACE3018308, BRACE3018963, BRACE3019055, BRACE3019071, BRACE3019084, BRACE3019570, BRACE3019611, BRACE3019817, BRACE3019828, BRACE3019941, BRACE3020151, BRACE3020194, BRACE3020286, BRACE3020356, BRACE3020594, BRACE3020669, BRACE3020671, BRACE3020890, BRACE3021148, BRACE3021430, BRACE3021517, BRACE3021805, BRACE3022051, BRACE3022303, BRACE3022312, BRACE3022340, BRACE3022847, BRACE3023604,

[3468] BRACE3023912, BRACE3024073, BRACE3024359, BRACE3024379, BRACE3024444, BRACE3024497, BRACE3024537, BRACE3024659, BRACE3024662, BRACE3024879, BRACE3025153, BRACE3025302, BRACE3025457, BRACE3025531, BRACE3025627, BRACE3025630, BRACE3025719, BRACE3026008, BRACE3026075, BRACE3026161, BRACE3026290, BRACE3026345, BRACE3026456, BRACE3026735, BRACE3026802, BRACE3026844, BRACE3026947, BRACE3026993, BRACE3027242, BRACE3027256, BRACE3027326, BRACE3027480, BRACE3027931, BRACE3027976, BRACE3028214, BRACE3028241, BRACE3028360, BRACE3028895, BRACE3028998, BRACE3029005, BRACE3029021, BRACE3029205, BRACE3029447, BRACE3030057, BRACE3030103, BRACE3030538, BRACE3030748, BRACE3030866, BRACE3031161, BRACE3031184,

[3469] BRACE3031185, BRACE3031315, BRACE3031372, BRACE3031579, BRACE3031728, BRACE3031838, BRACE3031843, BRACE3032427, BRACE3032455, BRACE3032537, BRACE3032538, BRACE3032631, BRACE3032771, BRACE3032980, BRACE3032983, BRACE3033525, BRACE3034159, BRACE3034183, BRACE3034389, BRACE3034964, BRACE3034993, BRACE3035168, BRACE3035227, BRACE3036156, BRACE3036271, BRACE3037612, BRACE3037637, BRACE3037803, BRACE3038012, BRACE3038030, BRACE3038569, BRACE3038570, BRACE3038687, BRACE3038760, BRACE3039288, BRACE3039358, BRACE3039378, BRACE3039454, BRACE3040012, BRACE3040239, BRACE3040504, BRACE3040644, BRACE3040856, BRACE3041059, BRACE3041162, BRACE3041827, BRACE3042046, BRACE3042210, BRACE3042326, BRACE3042409,

[3470] BRACE3042432, BRACE3042594, BRACE3043597, BRACE3044090, BRACE3044172, BRACE3044247, BRACE3044377, BRACE3044389, BRACE3044495, BRACE3045011, BRACE3045033, BRACE3045078, BRACE3045145, BRACE3045424, BRACE3045708, BRACE3045981, BRACE3046049, BRACE3046152, BRACE3046294, BRACE3046450, BRACE3046466, BRACE3046491, BRACE3046609, BRACE3046762, BRACE3046837, BRACE3046855, BRACE3046966, BRACE3047018, BRACE3047482, BRACE3047801, BRALZ1000047, BRALZ1000103, BRALZ2000189, BRALZ2000263, BRALZ2000988, BRALZ2001038, BRALZ2001279, BRALZ2001350, BRALZ2001445, BRALZ2001559, BRALZ2001743, BRALZ2001834, BRALZ2002174, BRALZ2002418, BRALZ2002477, BRALZ2003119, BRALZ2003330, BRALZ2003453, BRALZ2003525, BRALZ2004397,

[3471] BRALZ2005467, BRALZ2005471, BRALZ2005888, BRALZ2005950, BRALZ2005992, BRALZ2006288, BRALZ2006474, BRALZ2006560, BRALZ2006734, BRALZ2006800, BRALZ2006976, BRALZ2007376, BRALZ2007545, BRALZ2007576, BRALZ2007661, BRALZ2007790, BRALZ2007793, BRALZ2007952, BRALZ2008031, BRALZ2008166, BRALZ2008462, BRALZ2008617, BRALZ2008696, BRALZ2008763, BRALZ2008869, BRALZ2008930, BRALZ2009486, BRALZ2010186, BRALZ2010842, BRALZ2011337, BRALZ2011796, BRALZ2011880, BRALZ2012050, BRALZ2012183, BRALZ2012848, BRALZ2013621, BRALZ2013690, BRALZ2014054, BRALZ2014316, BRALZ2014484, BRALZ2014951, BRALZ2015168, BRALZ2015811, BRALZ2016085, BRALZ2016498, BRALZ2017531, BRALZ2017607, BRALZ2017620, BRALZ2017844, BRALZ2018342,

[3472] BRALZ2018492, BRALZ2018834, BRALZ2019047, BRAMY1000095, BRAMY1000098, BRAMY1000130, BRAMY1000157, BRAMY1000173, BRAMY2000021, BRAMY2000025, BRAMY2000052, BRAMY2000076, BRAMY2000086, BRAMY2000151, BRAMY2000181, BRAMY2000196, BRAMY2000231, BRAMY2000277, BRAMY2000354, BRAMY2000388, BRAMY2000411, BRAMY2000508, BRAMY2000562, BRAMY2000653, BRAMY2000814, BRAMY2000893, BRAMY2000946, BRAMY2000981, BRAMY2000987, BRAMY2001068, BRAMY2001114, BRAMY2001203, BRAMY2001282, BRAMY2001367, BRAMY2001427, BRAMY2001473, BRAMY2001678, BRAMY2002005, BRAMY2002044, BRAMY2002072, BRAMY2002158, BRAMY2002311, BRAMY2002339, BRAMY2002364, BRAMY2002369, BRAMY2002479, BRAMY2002493, BRAMY2002525, BRAMY2002584, BRAMY2002604,

[3473] BRAMY2002621, BRAMY2002638, BRAMY2002739, BRAMY2002799, BRAMY2002853, BRAMY2002862, BRAMY2002956, BRAMY2003008, BRAMY2003037, BRAMY2003117, BRAMY2003287, BRAMY2003325, BRAMY2003529, BRAMY2003538, BRAMY2003585, BRAMY2003634, BRAMY2003653, BRAMY2003681, BRAMY2003893, BRAMY2003897, BRAMY2003898, BRAMY2003904, BRAMY2003926, BRAMY2003929, BRAMY2004031, BRAMY2004058, BRAMY2004183, BRAMY2004335, BRAMY2004351, BRAMY2004352, BRAMY2004387, BRAMY2004492, BRAMY2004524, BRAMY2004537, BRAMY2004542, BRAMY2004756, BRAMY2004771, BRAMY2005052, BRAMY2005064, BRAMY2005094, BRAMY2005151, BRAMY2005182, BRAMY2005244, BRAMY2005391, BRAMY2005488, BRAMY2005576, BRAMY2005648, BRAMY2005662, BRAMY2005708, BRAMY2005711,

[3474] BRAMY2006092, BRAMY2006118, BRAMY2006149, BRAMY2006375, BRAMY2006397, BRAMY2006411, BRAMY2006459, BRAMY2006466, BRAMY2006659, BRAMY2006779, BRAMY2006809, BRAMY2006879, BRAMY2007043, BRAMY2007078, BRAMY2007110, BRAMY2007185, BRAMY2007244, BRAMY2007249, BRAMY2007255, BRAMY2007287, BRAMY2007308, BRAMY2007411, BRAMY2007458, BRAMY2007486, BRAMY2007546, BRAMY2007567, BRAMY2007594, BRAMY2007610, BRAMY2007613, BRAMY2007653, BRAMY2007753, BRAMY2007859, BRAMY2008333, BRAMY2008382, BRAMY2008563, BRAMY2008583, BRAMY2008977, BRAMY2008979, BRAMY2009013, BRAMY2009023, BRAMY2009034, BRAMY2009105, BRAMY2009192, BRAMY2009344, BRAMY2009349, BRAMY2009394, BRAMY2009489, BRAMY2009508, BRAMY2009528, BRAMY2009557,

[3475] BRAMY2009612, BRAMY2009693, BRAMY2010068, BRAMY2010135, BRAMY2010145, BRAMY2010171, BRAMY2010208, BRAMY2010239, BRAMY2010272, BRAMY2010290, BRAMY2010357, BRAMY2010366, BRAMY2010395, BRAMY2010441, BRAMY2010442, BRAMY2010464, BRAMY2010581, BRAMY2010798, BRAMY2010808, BRAMY2010919, BRAMY2011064, BRAMY2011178, BRAMY2011196, BRAMY2011216, BRAMY2011253, BRAMY2011446, BRAMY2011480, BRAMY2011639, BRAMY2011679, BRAMY2011811, BRAMY2011841, BRAMY2011846, BRAMY2011849, BRAMY2011872, BRAMY2011961, BRAMY2012017, BRAMY2012091, BRAMY2012119, BRAMY2012162, BRAMY2012163, BRAMY2012277, BRAMY2012340, BRAMY2012426, BRAMY2012497, BRAMY2012517, BRAMY2012555, BRAMY2012568, BRAMY2012581, BRAMY2012691, BRAMY2012721,

[3476] BRAMY2012731, BRAMY2012776, BRAMY2012880, BRAMY2012881, BRAMY2013169, BRAMY2013200, BRAMY2013216, BRAMY2013405, BRAMY2013414, BRAMY2013572, BRAMY2013590, BRAMY2013621, BRAMY2013722, BRAMY2013736, BRAMY2013756, BRAMY2013944, BRAMY2013975, BRAMY2014019, BRAMY2014205, BRAMY2014387, BRAMY2014462, BRAMY2014469, BRAMY2014541, BRAMY2014754, BRAMY2014813, BRAMY2015211, BRAMY2015251, BRAMY2015311, BRAMY2015420, BRAMY2015503, BRAMY2015516, BRAMY2015550, BRAMY2015551, BRAMY2015559, BRAMY2015688, BRAMY2015705, BRAMY2015782, BRAMY2015833, BRAMY2015855, BRAMY2015890, BRAMY2015911, BRAMY2015925, BRAMY2016002, BRAMY2016009, BRAMY2016020, BRAMY2016070, BRAMY2016251, BRAMY2016325, BRAMY2016327, BRAMY2016386,

[3477] BRAMY2016706, BRAMY2016771, BRAMY2016892, BRAMY2016938, BRAMY2016953, BRAMY2017014, BRAMY2017249, BRAMY2017348, BRAMY2017450, BRAMY2017455, BRAMY2017528, BRAMY2017864, BRAMY2018027, BRAMY2018106, BRAMY2018122, BRAMY2018126, BRAMY2018272, BRAMY2018273, BRAMY2018279, BRAMY2018295, BRAMY2018308, BRAMY2018396, BRAMY2018467, BRAMY2018635, BRAMY2018785, BRAMY2019055, BRAMY2019111, BRAMY2019277, BRAMY2019300, BRAMY2019468, BRAMY2019509, BRAMY2019554, BRAMY2019600, BRAMY2019643, BRAMY2019710, BRAMY2019963, BRAMY2019985, BRAMY2020050, BRAMY2020058, BRAMY2020106, BRAMY2020270, BRAMY2020354, BRAMY2020355, BRAMY2020412, BRAMY2020445, BRAMY2020466, BRAMY2020520, BRAMY2020574, BRAMY2020634, BRAMY2020713,

[3478] BRAMY2021040, BRAMY2021063, BRAMY2021098, BRAMY2021139, BRAMY2021142, BRAMY2021276, BRAMY2021310, BRAMY2021388, BRAMY2021498, BRAMY2021523, BRAMY2021710, BRAMY2021732, BRAMY2021746, BRAMY2021825, BRAMY2021867, BRAMY2021962, BRAMY2021982, BRAMY2022052, BRAMY2022160, BRAMY2022263, BRAMY2022301, BRAMY2022320, BRAMY2022383, BRAMY2022445, BRAMY2022454, BRAMY2022493, BRAMY2022525, BRAMY2022532, BRAMY2022723, BRAMY2022786, BRAMY2022796, BRAMY2022929, BRAMY2022980, BRAMY2022984, BRAMY2023060, BRAMY2023110, BRAMY2023115, BRAMY2023161, BRAMY2023172, BRAMY2023238, BRAMY2023327, BRAMY2023358, BRAMY2023406, BRAMY2023482, BRAMY2023514, BRAMY2023719, BRAMY2023729, BRAMY2023786, BRAMY2023852, BRAMY2023863,

[3479] BRAMY2023939, BRAMY2024004, BRAMY2024073, BRAMY2024312, BRAMY2024374, BRAMY2024390, BRAMY2024416, BRAMY2024449, BRAMY2024489, BRAMY2024497, BRAMY2024514, BRAMY2024530, BRAMY2024535, BRAMY2024545, BRAMY2024576, BRAMY2024593, BRAMY2024711, BRAMY2024715, BRAMY2024728, BRAMY2024827, BRAMY2024849, BRAMY2025024, BRAMY2025032, BRAMY2025121, BRAMY2025175, BRAMY2025218, BRAMY2025230, BRAMY2025272, BRAMY2025277, BRAMY2025495, BRAMY2025812, BRAMY2025996, BRAMY2026009, BRAMY2026091, BRAMY2026168, BRAMY2026300, BRAMY2026347, BRAMY2026395, BRAMY2026405, BRAMY2026533, BRAMY2026538, BRAMY2026713, BRAMY2026778, BRAMY2026824, BRAMY2026899, BRAMY2026902, BRAMY2026904, BRAMY2026976, BRAMY2027073, BRAMY2027114,

[3480] BRAMY2027140, BRAMY2027242, BRAMY2027396, BRAMY2027451, BRAMY2027461, BRAMY2027467, BRAMY2027587, BRAMY2027714, BRAMY2027717, BRAMY2027739, BRAMY2027752, BRAMY2027782, BRAMY2028072, BRAMY2028183, BRAMY2028188, BRAMY2028269, BRAMY2028282, BRAMY2028472 BRAMY2028491, BRAMY2028516, BRAMY2028565, BRAMY2028593, BRAMY2028682, BRAMY2028783, BRAMY2028796, BRAMY2028856, BRAMY2028914, BRAMY2029204, BRAMY2029602, BRAMY2029988, BRAMY2030098, BRAMY2030109, BRAMY2030206, BRAMY2030477, BRAMY2030545, BRAMY2030607, BRAMY2030702, BRAMY2030703, BRAMY2030768, BRAMY2030799, BRAMY2030859, BRAMY2030915, BRAMY2031317, BRAMY2031377, BRAMY2031442, BRAMY2032014, BRAMY2032231, BRAMY2032242, BRAMY2032290, BRAMY2032311,

[3481] BRAMY2032317, BRAMY2032344, BRAMY2032589, BRAMY2032678, BRAMY2032696, BRAMY2032777, BRAMY2032994, BRAMY2033003, BRAMY2033116, BRAMY2033240, BRAMY2033267, BRAMY2033316, BRAMY2033332, BRAMY2033506, BRAMY2033594, BRAMY2033895, BRAMY2033914, BRAMY2034072, BRAMY2034185, BRAMY2034187, BRAMY2034305, BRAMY2034561, BRAMY2034920, BRAMY2034993, BRAMY2035070, BRAMY2035449, BRAMY2035545, BRAMY2035606, BRAMY2035718, BRAMY2035719, BRAMY2035801, BRAMY2035869, BRAMY2035923, BRAMY2036076, BRAMY2036079, BRAMY2036254, BRAMY2036266, BRAMY2036387, BRAMY2036396, BRAMY2036459, BRAMY2036567, BRAMY2036615, BRAMY2036699, BRAMY2036913, BRAMY2036918, BRAMY2036968, BRAMY2037147, BRAMY2037328, BRAMY2037609, BRAMY2037629,

[3482] BRAMY2037800, BRAMY2037823, BRAMY2037971, BRAMY2038100, BRAMY2038128, BRAMY2038317, BRAMY2038475, BRAMY2038484, BRAMY2038516, BRAMY2038832, BRAMY2038846, BRAMY2038887, BRAMY2038904, BRAMY2039287, BRAMY2039300, BRAMY2039314, BRAMY2039341, BRAMY2039630, BRAMY2039695, BRAMY2039728, BRAMY2039872, BRAMY2040051, BRAMY2040159, BRAMY2040214, BRAMY2040478, BRAMY2040592, BRAMY2040915, BRAMY2041261, BRAMY2041347, BRAMY2041378, BRAMY2041384, BRAMY2041434, BRAMY2041507, BRAMY2041542, BRAMY2041738, BRAMY2042122, BRAMY2042131, BRAMY2042178, BRAMY2042195, BRAMY2042244, BRAMY2042549, BRAMY2042596, BRAMY2042612, BRAMY2042641, BRAMY2042711, BRAMY2042760, BRAMY2042804, BRAMY2042899, BRAMY2042918, BRAMY2043069,

[3483] BRAMY2043103, BRAMY2043314, BRAMY2043345, BRAMY2044246, BRAMY2044317, BRAMY2044349, BRAMY2044686, BRAMY2044838, BRAMY2045036, BRAMY2045299, BRAMY2045471, BRAMY2045530, BRAMY2046109, BRAMY2046478, BRAMY2046489, BRAMY2046537, BRAMY2046667, BRAMY2046742, BRAMY2046871, BRAMY2046984, BRAMY2046989, BRAMY2047169, BRAMY2047280, BRAMY2047420, BRAMY2047676, BRAMY2047692, BRAMY2047746, BRAMY2047751, BRAMY2047765, BRAMY2047884, BRAMY2047948, BRAMY3000206, BRAMY3000210, BRAMY3000213, BRAMY3000224, BRAMY3000254, BRAMY3000307, BRAMY3000692, BRAMY3001356, BRAMY3001401, BRAMY3001409, BRAMY3001794, BRAMY3002120, BRAMY3002312, BRAMY3002329, BRAMY3002508, BRAMY3002620, BRAMY3002803, BRAMY3002805, BRAMY3002886,

[3484] BRAMY3002991, BRAMY3003026, BRAMY3003109, BRAMY3003205, BRAMY3003310, BRAMY3003566, BRAMY3003723, BRAMY3004126, BRAMY3004224, BRAMY3004364, BRAMY3004377, BRAMY3004672, BRAMY3004800, BRAMY3004900, BRAMY3004919, BRAMY3005091, BRAMY3005656, BRAMY3005912, BRAMY3005932, BRAMY3006032, BRAMY3006297, BRAMY3006761, BRAMY3007078, BRAMY3007206, BRAMY3007311, BRAMY3007350, BRAMY3007449, BRAMY3007471, BRAMY3007609, BRAMY3007723, BRAMY3007968, BRAMY3008044, BRAMY3008088, BRAMY3008096, BRAMY3008335, BRAMY3008466, BRAMY3008505, BRAMY3008650, BRAMY3008937, BRAMY3009158, BRAMY3009207, BRAMY3009491, BRAMY3009556, BRAMY3009782, BRAMY3009811, BRAMY3009904, BRAMY3010008, BRAMY3010264, BRAMY3010321, BRAMY3010411,

[3485] BRAMY3010492, BRAMY3010603, BRAMY3010654, BRAMY4000089, BRAMY4000095, BRAMY4000229, BRAMY4000277, BRAMY4000915, BRAMY4000962, BRAMY4001173, BRAMY4001200, BRAMY4001234, BRAMY4001449, BRAMY4001652, BRAMY4001863, BRAMY4001913, BRAMY4002575, BRAMY4002628, BRASW1000053, BRASW1000125, BRAWH1000001, BRAWH1000002, BRAWH1000007, BRAWH1000037, BRAWH1000045, BRAWH1000083, BRAWH1000094, BRAWH1000116, BRAWH1000127, BRAWH1000130, BRAWH1000157, BRAWH1000162, BRAWH1000164, BRAWH1000168, BRAWH1000174, BRAWH1000180, BRAWH1000369, BRAWH2000034, BRAWH2000048, BRAWH2000071, BRAWH2000093, BRAWH2000109, BRAWH2000131, BRAWH2000142, BRAWH2000169, BRAWH2000177, BRAWH2000218, BRAWH2000232, BRAWH2000248, BRAWH2000256,

[3486] BRAWH2000274, BRAWH2000323, BRAWH2000353, BRAWH2000370, BRAWH2000409, BRAWH2000417, BRAWH2000443, BRAWH2000460, BRAWH2000471, BRAWH2000476, BRAWH2000482, BRAWH2000494, BRAWH2000500, BRAWH2000503, BRAWH2000522, BRAWH2000554, BRAWH2000595, BRAWH2000636, BRAWH2000643, BRAWH2000651, BRAWH2000682, BRAWH2000686, BRAWH2000752, BRAWH2000859, BRAWH2000866, BRAWH2000892, BRAWH2000901, BRAWH2000924, BRAWH2000926, BRAWH2000944, BRAWH2000984, BRAWH2001019, BRAWH2001037, BRAWH2001052, BRAWH2001103, BRAWH2001129, BRAWH2001137, BRAWH2001159, BRAWH2001166, BRAWH2001171, BRAWH2001186, BRAWH2001203, BRAWH2001238, BRAWH2001239, BRAWH2001255, BRAWH2001321, BRAWH2001355, BRAWH2001378, BRAWH2001395, BRAWH2001406,

[3487] BRAWH2001418, BRAWH2001424, BRAWH2001436, BRAWH2001438, BRAWH2001459, BRAWH2001461, BRAWH2001484, BRAWH2001492, BRAWH2001503, BRAWH2001519, BRAWH2001530, BRAWH2001535, BRAWH2001589, BRAWH2001662, BRAWH2001666, BRAWH2001671, BRAWH2001679, BRAWH2001686, BRAWH2001701, BRAWH2001842, BRAWH2001862, BRAWH2001873, BRAWH2001940, BRAWH2001973, BRAWH2002047, BRAWH2002060, BRAWH2002062, BRAWH2002125, BRAWH2002191, BRAWH2002318, BRAWH2002333, BRAWH2002352, BRAWH2002383, BRAWH2002549, BRAWH2002560, BRAWH2002623, BRAWH2002630, BRAWH2002635, BRAWH2002662, BRAWH2002679, BRAWH2002725, BRAWH2002761, BRAWH2002811, BRAWH2002861, BRAWH2002911, BRAWH2002963, BRAWH2002967, BRAWH2002976, BRAWH2003000, BRAWH2003025,

[3488] BRAWH2003135, BRAWH2003240, BRAWH2003307, BRAWH2003355, BRAWH2003366, BRAWH2003662, BRAWH2003689, BRAWH2003818, BRAWH2003832, BRAWH2003948, BRAWH2003964, BRAWH2004044, BRAWH2004068, BRAWH2004095, BRAWH2004136, BRAWH2004217, BRAWH2004580, BRAWH2004731, BRAWH2004779, BRAWH2004842, BRAWH2004884, BRAWH2004923, BRAWH2005008, BRAWH2005068, BRAWH2005074, BRAWH2005225, BRAWH2005315, BRAWH2005517, BRAWH2005524, BRAWH2005533, BRAWH2005812, BRAWH2005974, BRAWH2005998, BRAWH2006044, BRAWH2006083, BRAWH2006207, BRAWH2006301, BRAWH2006395, BRAWH2006405, BRAWH2006450, BRAWH2006493, BRAWH2006526, BRAWH2006543, BRAWH2006622, BRAWH2006760, BRAWH2006960, BRAWH2006989, BRAWH2006996, BRAWH2007069, BRAWH2007308,

[3489] BRAWH2007406, BRAWH2007550, BRAWH2007570, BRAWH2007591, BRAWH2007658, BRAWH2007664, BRAWH2007800, BRAWH2007808, BRAWH2007825, BRAWH2007862, BRAWH2007890, BRAWH2008128, BRAWH2008219, BRAWH2008255, BRAWH2008292, BRAWH2008297, BRAWH2008366, BRAWH2008380, BRAWH2008540, BRAWH2008577, BRAWH2008706, BRAWH2008790, BRAWH2008903, BRAWH2008956, BRAWH2008993, BRAWH2009112, BRAWH2009227, BRAWH2009261, BRAWH2009263, BRAWH2009298, BRAWH2009304, BRAWH2009307, BRAWH2009360, BRAWH2009393, BRAWH2009485, BRAWH2009490, BRAWH2009558, BRAWH2009590, BRAWH2009626, BRAWH2009678, BRAWH2009695, BRAWH2009907, BRAWH2010000, BRAWH2010069, BRAWH2010084, BRAWH2010136, BRAWH2010318, BRAWH2010329, BRAWH2010354, BRAWH2010364,

[3490] BRAWH2010536, BRAWH2010552, BRAWH2010584, BRAWH2010618, BRAWH2010619, BRAWH2010754, BRAWH2010980, BRAWH2011066, BRAWH2011079, BRAWH2011096, BRAWH2011155, BRAWH2011166, BRAWH2011204, BRAWH2011286, BRAWH2011294, BRAWH2011400, BRAWH2011762, BRAWH2011795, BRAWH2011796, BRAWH2011812, BRAWH2011823, BRAWH2011860, BRAWH2011920, BRAWH2011958, BRAWH2012054, BRAWH2012077, BRAWH2012161, BRAWH2012162, BRAWH2012164, BRAWH2012258, BRAWH2012277, BRAWH2012326, BRAWH2012538, BRAWH2012540, BRAWH2012619, BRAWH2012749, BRAWH2012827, BRAWH2012866, BRAWH2012963, BRAWH2013047, BRAWH2013219, BRAWH2013294, BRAWH2013748, BRAWH2013866, BRAWH2013871, BRAWH2013914, BRAWH2013941, BRAWH2013955, BRAWH2014053, BRAWH2014234,

[3491] BRAWH2014379, BRAWH2014414, BRAWH2014511, BRAWH2014662, BRAWH2014717, BRAWH2014729, BRAWH2014876, BRAWH2014934, BRAWH2014954, BRAWH2015247, BRAWH2015349, BRAWH2015375, BRAWH2015385, BRAWH2015595, BRAWH2015728, BRAWH2015853, BRAWH2015866, BRAWH2016028, BRAWH2016106, BRAWH2016160, BRAWH2016209, BRAWH2016221, BRAWH2016223, BRAWH2016269, BRAWH2016305, BRAWH2016439, BRAWH2016446, BRAWH2016514, BRAWH2016562, BRAWH2016655, BRAWH2016679, BRAWH2016702, BRAWH2016724, BRAWH2016785, BRAWH2016792, BRAWH2016800, BRAWH2017002, BRAWH2017103, BRAWH2017250, BRAWH2017294, BRAWH2017305, BRAWH2017379, BRAWH2017407, BRAWH2017433, BRAWH2017523, BRAWH2017534, BRAWH2017542, BRAWH2017635, BRAWH2017913, BRAWH2018206,

[3492] BRAWH2018267, BRAWH2018282, BRAWH2018317, BRAWH2018506, BRAWH2018514, BRAWH2018527, BRAWH2018601, BRAWH2018729, BRAWH2018875, BRAWH2019053, BRAWH2019055, BRAWH2019198, BRAWH3000078, BRAWH3000088, BRAWH3000100, BRAWH3000166, BRAWH3000329, BRAWH3000410, BRAWH3000446, BRAWH3000491, BRAWH3000604, BRAWH3000884, BRAWH3001053, BRAWH3001319, BRAWH3001475, BRAWH3001636, BRAWH3001638, BRAWH3001712, BRAWH3001760, BRAWH3001783, BRAWH3001833, BRAWH3001879, BRAWH3001891, BRAWH3001918, BRAWH3002433, BRAWH3002467, BRAWH3002513, BRAWH3002600, BRAWH3002819, BRAWH3003019, BRAWH3003136, BRAWH3003244, BRAWH3003343, BRAWH3003411, BRAWH3003522, BRAWH3003573, BRAWH3003598, BRAWH3003801, BRAWH3003975, BRAWH3004222,

[3493] BRAWH3004335, BRAWH3004453, BRAWH3004530, BRAWH3004666, BRAWH3005037, BRAWH3005047, BRAWH3005132, BRAWH3005146, BRAWH3005292, BRAWH3005300, BRAWH3005422, BRAWH3005534, BRAWH3005886, BRAWH3005892, BRAWH3005896, BRAWH3005912, BRAWH3005981, BRAWH3006547, BRAWH3006548, BRAWH3006761, BRAWH3006792, BRAWH3007129, BRAWH3007221, BRAWH3007441, BRAWH3007455, BRAWH3007506, BRAWH3007726, BRAWH3007783, BRAWH3008167, BRAWH3008341, BRAWH3008559, BRAWH3008697, BRAWH3008867, BRAWH3008931, BRAWH3009017, BRAWH3009285, BRAWH3009297, BRAWH3009546, BRAWH3009961, BRAWH3010461, BRAWH3010560, BRAWH3010602, BRAWH3010657, BRAWH3010726, BRAWH3010833, BRAWH3011101, BRAWH3011331, BRAWH3011402, BRAWH3011577, BRAWH3011623,

[3494] BRAWH3011637, BRAWH3011685, BRAWH3011907, BRAWH3011929, BRAWH3012005, BRAWH3012662, BRAWH3012779, BRAWH3013009, BRAWH3013049, BRAWH3013197, BRAWH3013264, BRAWH3013508, BRAWH3014609, BRAWH3014639, BRAWH3015017, BRAWH3015175, BRAWH3015260, BRAWH3015610, BRAWH3015825, BRAWH3016123, BRAWH3016715, BRAWH3017259, BRAWH3017260, BRAWH3017477, BRAWH3017537, BRAWH3017980, BRAWH3018063, BRAWH3018369, BRAWH3018548, BRAWH3018969, BRAWH3019026, BRAWH3019529, BRAWH3019594, BRAWH3019629, BRAWH3019820, BRAWH3020200, BRAWH3020318, BRAWH3020486, BRAWH3020884, BRAWH3020928, BRAWH3021012, BRAWH3021574, BRAWH3021580, BRAWH3021641, BRAWH3021643, BRAWH3021724, BRAWH3022347, BRAWH3022431, BRAWH3022459, BRAWH3022542,

[3495] BRAWH3022719, BRAWH3022866, BRAWH3022900, BRAWH3023156, BRAWH3023168, BRAWH3023172, BRAWH3023274, BRAWH3023421, BRAWH3024231, BRAWH3024242, BRAWH3024469, BRAWH3024506, BRAWH3024613, BRAWH3024989, BRAWH3026349, BRAWH3026394, BRAWH3027420, BRAWH3027440, BRAWH3027533, BRAWH3027574, BRAWH3027607, BRAWH3027616, BRAWH3027675, BRAWH3027806, BRAWH3027880, BRAWH3027927, BRAWH3028202, BRAWH3028223, BRAWH3028306, BRAWH3028461, BRAWH3028645, BRAWH3028754, BRAWH3028796, BRAWH3029254, BRAWH3029313, BRAWH3029538, BRAWH3029556, BRAWH3030613, BRAWH3030772, BRAWH3030810, BRAWH3030892, BRAWH3030910, BRAWH3030950, BRAWH3031054, BRAWH3031710, BRAWH3031902, BRAWH3032298, BRAWH3032340, BRAWH3032571, BRAWH3032620,

[3496] BRAWH3032930, BRAWH3033117, BRAWH3033293, BRAWH3033448, BRAWH3033513, BRAWH3034097, BRAWH3034114, BRAWH3034134, BRAWH3034668, BRAWH3034743, BRAWH3034775, BRAWH3034890, BRAWH3035154, BRAWH3035403, BRAWH3035904, BRAWH3035914, BRAWH3035936, BRAWH3036077, BRAWH3036247, BRAWH3036270, BRAWH3036561, BRAWH3036738, BRAWH3036951, BRAWH3037265, BRAWH3037394, BRAWH3037533, BRAWH3037979, BRAWH3038055, BRAWH3038230, BRAWH3038252, BRAWH3038324, BRCAN1000065, BRCAN1000076, BRCAN1000105, BRCAN1000149, BRCAN1000168, BRCAN2000148, BRCAN2000149, BRCAN2000209, BRCAN2000239, BRCAN2000346, BRCAN2000364, BRCAN2000383, BRCAN2000418, BRCAN2000523, BRCAN2000541, BRCAN2000563, BRCAN2000577, BRCAN2060620, BRCAN2000639,

[3497] BRCAN2000763, BRCAN2000832, BRCAN2000923, BRCAN2001223, BRCAN2001866, BRCAN2002173, BRCAN2002416, BRCAN2002473, BRCAN2002562, BRCAN2002662, BRCAN2002826, BRCAN2002854, BRCAN2002856, BRCAN2002892, BRCAN2002944, BRCAN2002948, BRCAN2003070, BRCAN2003269, BRCAN2003389, BRCAN2003628, BRCAN2003703, BRCAN2003746, BRCAN2003814, BRCAN2003987, BRCAN2004173, BRCAN2004355, BRCAN2004371, BRCAN2004653, BRCAN2004699, BRCAN2005436, BRCAN2005449, BRCAN2006019, BRCAN2006051, BRCAN2006063, BRCAN2006117, BRCAN2006174, BRCAN2006290, BRCAN2006297, BRCAN2006323, BRCAN2006401, BRCAN2006411, BRCAN2006450, BRCAN2006955, BRCAN2007119, BRCAN2007144, BRCAN2007409, BRCAN2007426, BRCAN2007525, BRCAN2007700, BRCAN2008494,

[3498] BRCAN2008528, BRCAN2008701, BRCAN2008894, BRCAN2009156, BRCAN2009168, BRCAN2009203, BRCAN2010374, BRCAN2010376, BRCAN2010547, BRCAN2010581, BRCAN2010665, BRCAN2011254, BRCAN2011316, BRCAN2011602, BRCAN2012110, BRCAN2012355, BRCAN2012402, BRCAN2012408, BRCAN2012481, BRCAN2012613, BRCAN2012713, BRCAN2012929, BRCAN2013655, BRCAN2013660, BRCAN2014143, BRCAN2014229, BRCAN2014370, BRCAN2014602, BRCAN2014652, BRCAN2014788, BRCAN2014881, BRCAN2014952, BRCAN2015371, BRCAN2015402, BRCAN2015464, BRCAN2015719, BRCAN2015757, BRCAN2015886, BRCAN2016025, BRCAN2016046, BRCAN2016174, BRCAN2016433, BRCAN2016619, BRCAN2016762, BRCAN2016814, BRCAN2017442, BRCAN2017905, BRCAN2018240, BRCAN2018269, BRCAN2018490,

[3499] BRCAN2018566, BRCAN2018667, BRCAN2018748, BRCAN2018935, BRCAN2019002, BRCAN2019387, BRCAN2019653, BRCAN2019773, BRCAN2019907, BRCAN2020234, BRCAN2020331, BRCAN2020412, BRCAN2020467, BRCAN2020710, BRCAN2020880, BRCAN2021028, BRCAN2021325, BRCAN2021452, BRCAN2021669, BRCAN2021718, BRCAN2022191, BRCAN2022472, BRCAN2022474, BRCAN2023347, BRCAN2023724, BRCAN2024451, BRCAN2024563, BRCAN2025009, BRCAN2025093, BRCAN2025349, BRCAN2025368, BRCAN2025712, BRCAN2025982, BRCAN2026117, BRCAN2026197, BRCAN2026340, BRCAN2026711, BRCAN2027150, BRCAN2027310, BRCAN2027334, BRCAN2027355, BRCAN2027364, BRCAN2027513, BRCAN2027593, BRCAN2027970, BRCAN2028021, BRCAN2028036, BRCAN2028040, BRCAN2028319, BRCAN2028338,

[3500] BRCAN2028378, BRCAN2028460, BRCAN2028545, BRCAN2028634, BRCAN2028702, BRCOC1000087, BRCOC1000094, BRCOC2000004, BRCOC2000047, BRCOC2000152, BRCOC2000184, BRCOC2000186, BRCOC2000360, BRCOC2000404, BRCOC2000487, BRCOC2000637, BRCOC2000670, BRCOC2000816, BRCOC2000850, BRCOC2001355, BRCOC2002085, BRCOC2002155, BRCOC2002323, BRCOC2002659, BRCOC2002664, BRCOC2002686, BRCOC2002751, BRCOC2002756, BRCOC2002777, BRCOC2002835, BRCOC2003100, BRCOC2003125, BRCOC2003213, BRCOC2003513, BRCOC2003732, BRCOC2003740, BRCOC2004036, BRCOC2004175, BRCOC2004354, BRCOC2004455, BRCOC2004950, BRCOC2005542, BRCOC2005903, BRCOC2005951, BRCOC2006164, BRCOC2006189, BRCOC2006243, BRCOC2006270, BRCOC2006639, BRCOC2006942,

[3501] BRCOC2007034, BRCOC2007593, BRCOC2007733, BRCOC2007769, BRCOC2008064, BRCOC2008225, BRCOC2008642, BRCOC2008993, BRCOC2009052, BRCOC2009196, BRCOC2009380, BRCOC2009638, BRCOC2009937, BRCOC2010115, BRCOC2010123, BRCOC2010510, BRCOC2010980, BRCOC2010994, BRCOC2011010, BRCOC2011398, BRCOC2011418, BRCOC2011506, BRCOC2011769, BRCOC2011996, BRCOC2012229, BRCOC2012386, BRCOC2012813, BRCOC2013448, BRCOC2013573, BRCOC2013675, BRCOC2013780, BRCOC2014013, BRCOC2014033, BRCOC2014400, BRCOC2014748, BRCOC2014833, BRCOC2015824, BRCOC2015908, BRCOC2015944, BRCOC2016525, BRCOC2016661, BRCOC2017061, BRCOC2017652, BRCOC2017856, BRCOC2018775, BRCOC2018877, BRCOC2019255, BRCOC2019549, BRCOC2019841, BRCOC2019896,

[3502] BRCOC2019903, BRCOC2019910, BRCOC2019934, BRCOC2020122, BRCOC2020142, BRHIP1000058, BRHIP1000072, BRHIP1000104, BRHIP1000108, BRHIP1000129, BRHIP1000174, BRHIP1000258, BRHIP2000021, BRHIP2000079, BRHIP2000087, BRHIP2000163, BRHIP2000210, BRHIP2000239, BRHIP2000245, BRHIP2000312, BRHIP2000359, BRHIP2000445, BRHIP2000506, BRHIP2000532, BRHIP2000534, BRHIP2000553, BRHIP2000621, BRHIP2000691, BRHIP2000819, BRHIP2000826, BRHIP2000920, BRHIP2001074, BRHIP2001686, BRHIP2001782, BRHIP2001802, BRHIP2001805, BRHIP2001886, BRHIP2001927, BRHIP2002122, BRHIP2002143, BRHIP2002172, BRHIP2002339, BRHIP2002346, BRHIP2002510, BRHIP2002664, BRHIP2002722, BRHIP2002929, BRHIP2003048, BRHIP2003242, BRHIP2003272,

[3503] BRHIP2003748, BRHIP2003786, BRHIP2003828, BRHIP2003917, BRHIP2004312, BRHIP2004355, BRHIP2004359, BRHIP2004814, BRHIP2004883, BRHIP2004902, BRHIP2005010, BRHIP2005236, BRHIP2005271, BRHIP2005354, BRHIP2005600, BRHIP2005719, BRHIP2005724, BRHIP2005752, BRHIP2005932, BRHIP2006617, BRHIP2006782, BRHIP2006800, BRHIP2006819, BRHIP2006921, BRHIP2007307, BRHIP2007616, BRHIP2007690, BRHIP2007741, BRHIP2007928, BRHIP2007969, BRHIP2008269, BRHIP2008389, BRHIP2008607, BRHIP2008756, BRHIP2008909, BRHIP2009019, BRHIP2009177, BRHIP2009340, BRHIP2009351, BRHIP2009414, BRHIP2009474, BRHIP2009617, BRHIP2009685, BRHIP2010217, BRHIP2010309, BRHIP2010444, BRHIP2010593, BRHIP2010610, BRHIP2010723, BRHIP2010744,

[3504] BRHIP2011080, BRHIP2011120, BRHIP2011199, BRHIP2011508, BRHIP2011576, BRHIP2011783, BRHIP2011838, BRHIP2011891, BRHIP2011933, BRHIP2012054, BRHIP2012059, BRHIP2012141, BRHIP2012314, BRHIP2012360, BRHIP2012545, BRHIP2012580, BRHIP2012627, BRHIP2012642, BRHIP2012750, BRHIP2012922, BRHIP2012923, BRHIP2012972, BRHIP2013286, BRHIP2013447, BRHIP2013510, BRHIP2013699, BRHIP2013723, BRHIP2013958, BRHIP2013972, BRHIP2014063, BRHIP2014228, BRHIP2014285, BRHIP2014291, BRHIP2014373, BRHIP2014386, BRHIP2014387, BRHIP2014954, BRHIP2015153, BRHIP2015224, BRHIP2015356, BRHIP2015360, BRHIP2015679, BRHIP2016005, BRHIP2016125, BRHIP2016788, BRHIP2016968, BRHIP2016990, BRHIP2017010, BRHIP2017315, BRHIP2017385,

[3505] BRHIP2017404, BRHIP2017542, BRHIP2017553, BRHIP2017642, BRHIP2017714, BRHIP2017780, BRHIP2017945, BRHIP2018014, BRHIP2018369, BRHIP2018612, BRHIP2018635, BRHIP2018650, BRHIP2018719, BRHIP2018805, BRHIP2018998, BRHIP2019007, BRHIP2019047, BRHIP2019177, BRHIP2019186, BRHIP2019291, BRHIP2019494, BRHIP2019589, BRHIP2019641, BRHIP2019819, BRHIP2019884, BRHIP2019972, BRHIP2020182, BRHIP2020509, BRHIP2020573, BRHIP2020622, BRHIP2020695, BRHIP2020743, BRHIP2020842, BRHIP2020859, BRHIP2020930, BRHIP2021102, BRHIP2021289, BRHIP2021495, BRHIP2021615, BRHIP2021744, BRHIP2021858, BRHIP2021870, BRHIP2021929, BRHIP2022006, BRHIP2022054, BRHIP2022221, BRHIP2022298, BRHIP2022467, BRHIP2022708, BRHIP2022986,

[3506] BRHIP2023071, BRHIP2023229, BRHIP2023272, BRHIP2023292, BRHIP2023309, BRHIP2023369, BRHIP2023438, BRHIP2023695, BRHIP2023735, BRHIP2023762, BRHIP2023773, BRHIP2023860, BRHIP2023869, BRHIP2024046, BRHIP2024165, BRHIP2024201, BRHIP2024347, BRHIP2024398, BRHIP2024549, BRHIP2024789, BRHIP2024941, BRHIP2025245, BRHIP2025366, BRHIP2025448, BRHIP2025679, BRHIP2025739, BRHIP2025797, BRHIP2026021, BRHIP2026061, BRHIP2026155, BRHIP2026214, BRHIP2026288, BRHIP2026346, BRHIP2026557, BRHIP2026723, BRHIP2026877, BRHIP2027054, BRHIP2027077, BRHIP2027563, BRHIP2027685, BRHIP2027762, BRHIP2028187, BRHIP2028303, BRHIP2028330, BRHIP2028480, BRHIP2028583, BRHIP2028593, BRHIP2029176, BRHIP2029283, BRHIP2029393,

[3507] BRHIP2029529, BRHIP2029643, BRHIP2029663, BRHIP3000060, BRHIP3000070, BRHIP3000081, BRHIP3000111, BRHIP3000131, BRHIP3000240, BRHIP3000457, BRHIP3000475, BRHIP3000488, BRHIP3000526, BRHIP3000626, BRHIP3000859, BRHIP3000907, BRHIP3001079, BRHIP3001141, BRHIP3001283, BRHIP3001338, BRHIP3001360, BRHIP3001481, BRHIP3001878, BRHIP3001964, BRHIP3002114, BRHIP3002124, BRHIP3002363, BRHIP3002691, BRHIP3002920, BRHIP3002931, BRHIP3003063, BRHIP3003126, BRHIP3003306, BRHIP3003340, BRHIP3003395, BRHIP3003484, BRHIP3003644, BRHIP3003688, BRHIP3003795, BRHIP3003961, BRHIP3003984, BRHIP3004193, BRHIP3004215, BRHIP3004416, BRHIP3004710, BRHIP3004725, BRHIP3004774, BRHIP3004786, BRHIP3004863, BRHIP3004968,

[3508] BRHIP3005037, BRHIP3005137, BRHIP300-5142, BRHIP3005231, BRHIP3005574, BRHIP3005673, BRHIP3005768, BRHIP3005801, BRHIP3005944, BRHIP3006279, BRHIP3006294, BRHIP3006390, BRHIP3006449, BRHIP3006683, BRHIP3006717, BRHIP3006786, BRHIP3006950, BRHIP3007172, BRHIP3007183, BRHIP3007195, BRHIP3007239, BRHIP3007291, BRHIP3007409, BRHIP3007424, BRHIP3007483, BRHIP3007609, BRHIP3007640, BRHIP3007960, BRHIP3008082, BRHIP3008183, BRHIP3008314, BRHIP3008320, BRHIP3008405, BRHIP3008598, BRHIP3008606, BRHIP3008691, BRHIP3008714, BRHIP3008997, BRHIP3009099, BRHIP3009140, BRHIP3009181, BRHIP3009318, BRHIP3009427, BRHIP3009448, BRHIP3009672, BRHIP3009753, BRHIP3010135, BRHIP3010289, BRHIP3010529, BRHIP3011082,

[3509] BRHIP3011241, BRHIP3011269, BRHIP3011460, BRHIP3011567, BRHIP3011831, BRHIP3012185, BRHIP3012289, BRHIP3012357, BRHIP3012736, BRHIP3012745, BRHIP3012868, BRHIP3013078, BRHIP3013271, BRHIP3013588, BRHIP3013698, BRHIP3013765, BRHIP3013897, BRHIP3014237, BRHIP3014675, BRHIP3015620, BRHIP3015751, BRHIP3015854, BRHIP3016032, BRHIP3016213, BRHIP3016302, BRHIP3016421, BRHIP3017109, BRHIP3017146, BRHIP3017256, BRHIP3017325, BRHIP3017558, BRHIP3017637, BRHIP3018278, BRHIP3018784, BRHIP3019643, BRHIP3019824, BRHIP3019880, BRHIP3019956, BRHIP3020155, BRHIP3020182, BRHIP3020733, BRHIP3021019, BRHIP3021499, BRHIP3021534, BRHIP3021778, BRHIP3021987, BRHIP3022656, BRHIP3023922, BRHIP3024118, BRHIP3024533,

[3510] BRHIP3024703, BRHIP3024725, BRHIP3024820, BRHIP3025161, BRHIP3025702, BRHIP3025795, BRHIP3025844, BRHIP3026052, BRHIP3026097, BRHIP3026231, BRHIP3026335, BRHIP3026651, BRHIP3027105, BRHIP3027137, BRHIP3027160, BRHIP3027191, BRHIP3027501, BRHIP3027594, BRHIP3027651, BRHIP3027854, BRHIP3027947, BRHIP3028570, BRHIP3028742, BRSSN1000056, BRSSN1000059, BRSSN1000092, BRSSN1000153, BRSSN2000097, BRSSN2000175, BRSSN2000197, BRSSN2000244, BRSSN2000293, BRSSN2000312, BRSSN2000518, BRSSN2000561, BRSSN2000566, BRSSN2000684, BRSSN2000715, BRSSN2000832, BRSSN2001275, BRSSN2001342, BRSSN2001426, BRSSN2001503, BRSSN2001579, BRSSN2001758, BRSSN2001810, BRSSN2002857, BRSSN2002859, BRSSN2003012, BRSSN2003086,

[3511] BRSSN2003093, BRSSN2003820, BRSSN2003841, BRSSN2003937, BRSSN2004142, BRSSN2004303, BRSSN2004304, BRSSN2004496, BRSSN2004657, BRSSN2004679, BRSSN2004686, BRSSN2004710, BRSSN2004719, BRSSN2005847, BRSSN2006133, BRSSN2006390, BRSSN2006575, BRSSN2006611, BRSSN2006644, BRSSN2007076, BRSSN2007168, BRSSN2007202, BRSSN2007338, BRSSN2007464, BRSSN2007504, BRSSN2007819, BRSSN2008125, BRSSN2008419, BRSSN2008464, BRSSN2008549, BRSSN2008797, BRSSN2009119, BRSSN2009378, BRSSN2009389, BRSSN2009395, BRSSN2009627, BRSSN2009630, BRSSN2009702, BRSSN2010110, BRSSN2010587, BRSSN2010596, BRSSN2010830, BRSSN2011262, BRSSN2011653, BRSSN2011738, BRSSN2011843, BRSSN2012081, BRSSN2012103, BRSSN2012157, BRSSN2012198,

[3512] BRSSN2012254, BRSSN2012439, BRSSN2012622, BRSSN2012691, BRSSN2012838, BRSSN2013095, BRSSN2013544, BRSSN2013696, BRSSN2013702, BRSSN2013733, BRSSN2013753, BRSSN2013874, BRSSN2014112, BRSSN2014294, BRSSN2014299, BRSSN2014424, BRSSN2014513, BRSSN2014556, BRSSN2014573, BRSSN2014610, BRSSN2014636, BRSSN2015199, BRSSN2015238, BRSSN2015369, BRSSN2015493, BRSSN2015497, BRSSN2015554, BRSSN2015707, BRSSN2015773, BRSSN2015907, BRSSN2015982, BRSSN2016589, BRSSN2016768, BRSSN2016905, BRSSN2017297, BRSSN2017530, BRSSN2017682, BRSSN2017757, BRSSN2018218, BRSSN2018440, BRSSN2018447, BRSSN2018581, BRSSN2018731, BRSSN2018771, BRSSN2018925, BRSTN1000083, BRSTN1000097, BRSTN2000058, BRSTN2000070, BRSTN2000220,

[3513] BRSTN2000312, BRSTN2000367, BRSTN2000536, BRSTN2000872, BRSTN2001613, BRSTN2001801, BRSTN2002105, BRSTN2002400, BRSTN2002532, BRSTN2002691, BRSTN2003590, BRSTN2003835, BRSTN2004863, BRSTN2004869, BRSTN2004987, BRSTN2005721, BRSTN2006306, BRSTN2006466, BRSTN2006580, BRSTN2006583, BRSTN2006638, BRSTN2006865, BRSTN2007000, BRSTN2007118, BRSTN2007284, BRSTN2007765, BRSTN2008052, BRSTN2008283, BRSTN2008367, BRSTN2008418, BRSTN2008457, BRSTN2008475, BRSTN2008930, BRSTN2009247, BRSTN2010107, BRSTN2010363, BRSTN2010416, BRSTN2010500, BRSTN2010569, BRSTN2010750, BRSTN2010923, BRSTN2011211, BRSTN2011597, BRSTN2011688, BRSTN2011799, BRSTN2012089, BRSTN2012284, BRSTN2012320, BRSTN2012380, BRSTN2012451,

[3514] BRSTN2013171, BRSTN2013354, BRSTN2014490, BRSTN2014633, BRSTN2014751, BRSTN2014770, BRSTN2015015, BRSTN2015889, BRSTN2015978, BRSTN2016066, BRSTN2016335, BRSTN2016678, BRSTN2016918, BRSTN2016992, BRSTN2017104, BRSTN2017151, BRSTN2017237, BRSTN2017379, BRSTN2017761, BRSTN2017771, BRSTN2017995, BRSTN2018077, BRSTN2018083, BRSTN2018596, BRSTN2018692, BRSTN2018712, BRSTN2019079, BRSTN2019129, BRTHA1000021, BRTHA1000063, BRTHA1000311, BRTHA2000474, BRTHA2000514, BRTHA2000574, BRTHA2000855, BRTHA2000969, BRTHA2000972, BRTHA2001304, BRTHA2001370, BRTHA2001462, BRTHA2001717, BRTHA2001812, BRTHA2002091, BRTHA2002115, BRTHA2002133, BRTHA2002281, BRTHA2002376, BRTHA2002442, BRTHA2002493, BRTHA2002565,

[3515] BRTHA2002608, BRTHA2002702, BRTHA2002721, BRTHA2002726, BRTHA2002741, BRTHA2002808, BRTHA2002896, BRTHA2002903, BRTHA2003030, BRTHA2003110, BRTHA2003116, BRTHA2003436, BRTHA2003759, BRTHA2003794, BRTHA2004371, BRTHA2004582, BRTHA2004629, BRTHA2004639, BRTHA2004642, BRTHA2004812, BRTHA2004821, BRTHA2004978, BRTHA2004992, BRTHA2005005, BRTHA2005013, BRTHA2005448, BRTHA2005579, BRTHA2005942, BRTHA2005956, BRTHA2006075, BRTHA2006146, BRTHA2006194, BRTHA2006232, BRTHA2006720, BRTHA2006735, BRTHA2006974, BRTHA2006975, BRTHA2007060, BRTHA2007122, BRTHA2007422, BRTHA2007603, BRTHA2007665, BRTHA2007998, BRTHA2008316, BRTHA2008335, BRTHA2008502, BRTHA2008513, BRTHA2008527, BRTHA2008535, BRTHA2008598,

[3516] BRTHA2008669, BRTHA2008955, BRTHA2009311, BRTHA2009349, BRTHA2009486, BRTHA2009803, BRTHA2009846, BRTHA2009886, BRTHA2009972, BRTHA2010008, BRTHA2010033, BRTHA2010073, BRTHA2010097, BRTHA2010191, BRTHA2010397, BRTHA2010672, BRTHA2010884, BRTHA2010907, BRTHA2011062, BRTHA2011194, BRTHA2011321, BRTHA2011351, BRTHA2011500, BRTHA2011641, BRTHA2011691, BRTHA2012129, BRTHA2012189, BRTHA2012351, BRTHA2012392, BRTHA2012466, BRTHA2012555, BRTHA2012562, BRTHA2012980, BRTHA2013054, BRTHA2013262, BRTHA2013275, BRTHA2013426, BRTHA2013460, BRTHA2013515, BRTHA2013540, BRTHA2013595, BRTHA2013610, BRTHA2013707, BRTHA2013942, BRTHA2014287, BRTHA2014334, BRTHA2014381, BRTHA2014578, BRTHA2014647, BRTHA2014663,

[3517] BRTHA2014792, BRTHA2014828, BRTHA2014909, BRTHA2014975, BRTHA2014997, BRTHA2015406, BRTHA2015478, BRTHA2015696, BRTHA2015700, BRTHA2015853, BRTHA2015878, BRTHA2016179, BRTHA2016215, BRTHA2016267, BRTHA2016318, BRTHA2016496, BRTHA2016543, BRTHA2016552, BRTHA2016577, BRTHA2016765, BRTHA2016918, BRTHA2017353, BRTHA2017364, BRTHA2017972, BRTHA2017985, BRTHA2018011, BRTHA2018129, BRTHA2018165, BRTHA2018304, BRTHA2018344, BRTHA2018420, BRTHA2018443, BRTHA2018504, BRTHA2018558, BRTHA2018591, BRTHA2018624, BRTHA2018706, BRTHA2018707, BRTHA2019014, BRTHA2019022, BRTHA2019048, BRTHA2019073, BRTHA2019726, BRTHA2019743, BRTHA2020400, BRTHA2020566, BRTHA2020642, BRTHA2020695, BRTHA2020721, BRTHA2020781,

[3518] BRTHA2020811, BRTHA2020910, BRTHA2021212, BRTHA2021440, BRTHA2021450, BRTHA2022074, BRTHA2022914, BRTHA2022968, BRTHA2023402, BRTHA2023437, BRTHA2024177, BRTHA2024354, BRTHA2024712, BRTHA2025869, BRTHA2026071, BRTHA2026290, BRTHA2026311, BRTHA2027227, BRTHA2027229, BRTHA2027250, BRTHA2027546, BRTHA2028297, BRTHA2029969, BRTHA2030036, BRTHA2030213, BRTHA2031517, BRTHA2031800, BRTHA2031917, BRTHA2032763, BRTHA2032845, BRTHA2033122, BRTHA2033155, BRTHA2033264, BRTHA2033320, BRTHA2033469, BRTHA2033683, BRTHA2034281, BRTHA2034576, BRTHA2034874, BRTHA2035448, BRTHA2035743, BRTHA2036055, BRTHA2036295, BRTHA2036660, BRTHA2037247, BRTHA2038279, BRTHA2038345, BRTHA2038353, BRTHA2038396, BRTHA3000252,

[3519] BRTHA3000273, BRTHA3000296, BRTHA3000297, BRTHA3000325, BRTHA3000456, BRTHA3000633, BRTHA3000789, BRTHA3001221, BRTHA3001623, BRTHA3002265, BRTHA3002401, BRTHA3002411, BRTHA3002427, BRTHA3002864, BRTHA3002933, BRTHA3002955, BRTHA3003000, BRTHA3003225, BRTHA3003339, BRTHA3003343, BRTHA3003417, BRTHA3003449, BRTHA3003474, BRTHA3003490, BRTHA3003704, BRTHA3004432, BRTHA3004475, BRTHA3004502, BRTHA3004610, BRTHA3005046, BRTHA3005735, BRTHA3005988, BRTHA3006318, BRTHA3006593, BRTHA3006856, BRTHA3007113, BRTHA3007130, BRTHA3007148, BRTHA3007319, BRTHA3007469, BRTHA3007472, BRTHA3007532, BRTHA3007662, BRTHA3007685, BRTHA3007769, BRTHA3007922, BRTHA3008143, BRTHA3008293, BRTHA3008310, BRTHA3008386,

[3520] BRTHA3008520, BRTHA3008608, BRTHA3008694, BRTHA3008778, BRTHA3008826, BRTHA3009037, BRTHA3009090, BRTHA3009291, BRTHA3009858, BRTHA3010135, BRTHA3010366, BRTHA3010469, BRTHA3010530, BRTHA3010540, BRTHA3010717, BRTHA3011149, BRTHA3011187, BRTHA3011194, BRTHA3011229, BRTHA3011361, BRTHA3011510, BRTHA3011892, BRTHA3012265, BRTHA3013860, BRTHA3013882, BRTHA3013884, BRTHA3013981, BRTHA3014000, BRTHA3014105, BRTHA3014507, BRTHA3014547, BRTHA3014691, BRTHA3014835, BRTHA3014854, BRTHA3014908, BRTHA3014920, BRTHA3015815, BRTHA3016616, BRTHA3016835, BRTHA3016845, BRTHA3016917, BRTHA3017047, BRTHA3017589, BRTHA3017848, BRTHA3018409, BRTHA3018514, BRTHA3018617, BRTHA3018623, BRTHA3018656, BRTHA3019048,

[3521] BRTHA3019105, BRTHA3019183, BRTHA3020000, BRTHA3020369, BRTHA3021569, BRTHA3021708, BRTHA3021786, BRTHA3021971, BRTHA3022641, BRTHA3023523, BRTHA3023590, BRTHA3023929, BRTHA3024233, BRTHA3024600, BRTHA3025073, BRTHA3025789, BRTHA3025826, BRTHA3026161, BRTHA3026180, BRTHA3026556, BRTHA3026916, BRTHA3027171, BRTHA3027318, BRTHA3027638, BRTHA3027820, BRTHA3027957, BRTHA3028339, BRTHA3028505, BRTHA3028782, CD34C2000051, CD34C2000152, CD34C2000175, CD34C2000443, CD34C3000125, CD34C3000252, CD34C3000314, CD34C3000424, CD34C3000494, CERVX1000042, CERVX2000812, CERVX2000968, CERVX2002006, CERVX2002013, CERVX2002430, CERVX2002770, CHONS1000058, CHONS2000172, CHONS2000797, CHONS2001287, CHONS2001382,

[3522] CHONS2001797, CHONS2001834, CHONS2002419, COLON1000030, COLON1000084, COLON1000135, COLON2000470, COLON2000557, COLON2000568, COLON2001721, COLON2001829, COLON2001866, COLON2002443, COLON2002520, COLON2003043, COLON2003529, COLON2004318, COLON2004351, COLON2004478, COLON2004911, COLON2005126, COLON2005623, COLON2005735, COLON2005772, COLON2006263, COLON2006282, COLON2006417, COLON2007274, COLON2007733, COLON2008105, COLON2009337, COLON2009499, CORDB1000140, CORDB2000061, CORDB2000127, CORDB2000541, CTONG1000009, CTONG1000010, CTONG1000020, CTONG1000022, CTONG1000040, CTONG1000056, CTONG1000062, CTONG1000086, CTONG1000088, CTONG1000093, CTONG1000097, CTONG1000113, CTONG1000165, CTONG1000175,

[3523] CTONG1000181, CTONG1000218, CTONG1000220, CTONG1000283, CTONG1000288, CTONG1000302, CTONG1000341, CTONG1000476, CTONG1000488, CTONG1000508, CTONG1000540, CTONG2000031, CTONG2000034, CTONG2000042, CTONG2000063, CTONG2000201, CTONG2000218, CTONG2000279, CTONG2000303, CTONG2000330, CTONG2000395, CTONG2000452, CTONG2000465, CTONG2000469, CTONG2000480, CTONG2000561, CTONG2000589, CTONG2000766, CTONG2000771, CTONG2000819, CTONG2000827, CTONG2000846, CTONG2000855, CTONG2000977, CTONG2001139, CTONG2001226, CTONG2001320, CTONG2001366, CTONG2001413, CTONG2001428, CTONG2001513, CTONG2001524, CTONG2001533, CTONG2001598, CTONG2001681, CTONG2001724, CTONG2001749, CTONG2001800, CTONG2001820, CTONG2001858,

[3524] CTONG2001877, CTONG2001911, CTONG2001955, CTONG2002066, CTONG2002095, CTONG2002143, CTONG2002395, CTONG2002417, CTONG2002418, CTONG2002453, CTONG2002520, CTONG2002558, CTONG2002590, CTONG2002709, CTONG2002721, CTONG2002816, CTONG2002820, CTONG2002832, CTONG2002841, CTONG2002903, CTONG2002965, CTONG2002999, CTONG2003028, CTONG2003094, CTONG2003100, CTONG2003115, CTONG2003189, CTONG2003245, CTONG2003293, CTONG2003350, CTONG2003361, CTONG2003372, CTONG2003375, CTONG2003427, CTONG2003599, CTONG2003680, CTONG2003699, CTONG2003764, CTONG2003782, CTONG2003889, CTONG2003937, CTONG2003945, CTONG2004000, CTONG2004062, CTONG2004115, CTONG2004126, CTONG2004264, CTONG2004305, CTONG2004397, CTONG2004454,

[3525] CTONG2004487, CTONG2004550, CTONG2004669, CTONG2004716, CTONG2004912, CTONG2004941, CTONG2004948, CTONG2005028, CTONG2005049, CTONG2005110, CTONG2005265, CTONG2005278, CTONG2005290, CTONG2005374, CTONG2005399, CTONG2005468, CTONG2005553, CTONG2005567, CTONG2005585, CTONG2005635, CTONG2005775, CTONG2005795, CTONG2005890, CTONG2005904, CTONG2005913, CTONG2006004, CTONG2006129, CTONG2006223, CTONG2006273, CTONG2006310, CTONG2006393, CTONG2006412, CTONG2006449, CTONG2006515, CTONG2006524, CTONG2006568, CTONG2006611, CTONG2006620, CTONG2006666, CTONG2006691, CTONG2006709, CTONG2006798, CTONG2006836, CTONG2006942, CTONG2006964, CTONG2007007, CTONG2007009, CTONG2007072, CTONG2007091, CTONG2007104,

[3526] CTONG2007168, CTONG2007175, CTONG2007259, CTONG2007272, CTONG2007293, CTONG2007297, CTONG2007399, CTONG2007400, CTONG2007417, CTONG2007441, CTONG2007474, CTONG2007586, CTONG2007613, CTONG2007623, CTONG2007681, CTONG2007776, CTONG2007779, CTONG2007898, CTONG2007959, CTONG2007970, CTONG2008014, CTONG2008184, CTONG2008262, CTONG2008269, CTONG2008321, CTONG2008402, CTONG2008405, CTONG2008466, CTONG2008506, CTONG2008521, CTONG2008562, CTONG2008577, CTONG2008595, CTONG2008621, CTONG2008720, CTONG2008721, CTONG2008773, CTONG2008792, CTONG2008989, CTONG2009033, CTONG2009108, CTONG2009132, CTONG2009156, CTONG2009181, CTONG2009257, CTONG2009258, CTONG2009268, CTONG2009270, CTONG2009395, CTONG2009423,

[3527] CTONG2009440, CTONG2009527, CTONG2009531, CTONG2009534, CTONG2009570, CTONG2009572, CTONG2009604, CTONG2009643, CTONG2009675, CTONG2009689, CTONG2009725, CTONG2009766, CTONG2009768, CTONG2009844, CTONG2009871, CTONG2009887, CTONG2009891, CTONG2009955, CTONG2009958, CTONG2009963, CTONG2010018, CTONG2010024, CTONG2010116, CTONG2010133, CTONG2010148, CTONG2010276, CTONG2010330, CTONG2010508, CTONG2010566, CTONG2010623, CTONG2010652, CTONG2010803, CTONG2011188, CTONG2011429, CTONG2011474, CTONG2011676, CTONG2011716, CTONG2011765, CTONG2011779, CTONG2011815, CTONG2011822, CTONG2011920, CTONG2011985, CTONG2012001, CTONG2012029, CTONG2012050, CTONG2012077, CTONG2012101, CTONG2012123, CTONG2012158,

[3528] CTONG2012230, CTONG2012401, CTONG2012422, CTONG2012425, CTONG2012447, CTONG2012453, CTONG2012473, CTONG2012476, CTONG2012533, CTONG2012554, CTONG2012564, CTONG2012607, CTONG2012661, CTONG2012724, CTONG2012738, CTONG2012745, CTONG2012758, CTONG2012843, CTONG2012901, CTONG2013149, CTONG2013178, CTONG2013222, CTONG2013284, CTONG2013339, CTONG2013348, CTONG2013352, CTONG2013381, CTONG2013393, CTONG2013511, CTONG2013630, CTONG2013803, CTONG2013985, CTONG2013986, CTONG2014032, CTONG2014058, CTONG2014119, CTONG2014165, CTONG2014191, CTONG2014206, CTONG2014234, CTONG2014264, CTONG2014280, CTONG2014389, CTONG2014491, CTONG2014630, CTONG2014635, CTONG2014646, CTONG2014705, CTONG2014946, CTONG2014954,

[3529] CTONG2014959, CTONG2014966, CTONG2014995, CTONG2015091, CTONG2015204, CTONG2015316, CTONG2015330, CTONG2015358, CTONG2015434, CTONG2015518, CTONG2015540, CTONG2015596, CTONG2015633, CTONG2015678, CTONG2015717, CTONG2015804, CTONG2015815, CTONG2015866, CTONG2015914, CTONG2015953, CTONG2016185, CTONG2016217, CTONG2016355, CTONG2016499, CTONG2016505, CTONG2016559, CTONG2016658, CTONG2016775, CTONG2016797, CTONG2016824, CTONG2016846, CTONG2016904, CTONG2016931, CTONG2016942, CTONG2016953, CTONG2017021, CTONG2017292, CTONG2017409, CTONG2017444, CTONG2017458, CTONG2017500, CTONG2017604, CTONG2017650, CTONG2017798, CTONG2017804, CTONG2017814, CTONG2017910, CTONG2017939, CTONG2017989, CTONG2018062,

[3530] CTONG2018069, CTONG2018147, CTONG2018217, CTONG2018279, CTONG2018334, CTONG2018343, CTONG2018379, CTONG2018383, CTONG2018413, CTONG2018483, CTONG2018629, CTONG2018632, CTONG2018652, CTONG2018653, CTONG2018655, CTONG2018735, CTONG2018739, CTONG2018808, CTONG2018843, CTONG2018900, CTONG2018976, CTONG2019029, CTONG2019063, CTONG2019144, CTONG2019232, CTONG2019248, CTONG2019400, CTONG2019590, CTONG2019652, CTONG2019704, CTONG2019788, CTONG2019833, CTONG2020031, CTONG2020108, CTONG2020127, CTONG2020171, CTONG2020374, CTONG2020445, CTONG2020522, CTONG2020582, CTONG2020638, CTONG2020806, CTONG2020831, CTONG2020974, CTONG2021024, CTONG2021132, CTONG2021168, CTONG2021289, CTONG2022153, CTONG2022601,

[3531] CTONG2022835, CTONG2023021, CTONG2023449, CTONG2023512, CTONG2024206, CTONG2024614, CTONG2024749, CTONG2025496, CTONG2025513, CTONG2025516, CTONG2025610, CTONG2025900, CTONG2026513, CTONG2026770, CTONG2026920, CTONG2026987, CTONG2027150, CTONG2027327, CTONG2027361, CTONG2027591, CTONG2027736, CTONG2027783, CTONG2027828, CTONG2027959, CTONG2028097, CTONG2028208, CTONG2028309, CTONG2028486, CTONG2028518, CTONG2028687, CTONG2028758, CTONG3000657, CTONG3000686, CTONG3000707, CTONG3000896, CTONG3001420, CTONG3001501, CTONG3001560, CTONG3001605, CTONG3001746, CTONG3002020, CTONG3002127, CTONG3002370, CTONG3002412, CTONG3002433, CTONG3002552, CTONG3002588, CTONG3002674, CTONG3002728, CTONG3002835,

[3532] CTONG3002909, CTONG3002947, CTONG3002983, CTONG3003165, CTONG3003179, CTONG3003483, CTONG3003553, CTONG3003598, CTONG3003652, CTONG3003654, CTONG3003669, CTONG3003737, CTONG3003905, CTONG3003972, CTONG3004072, CTONG3004397, CTONG3004550, CTONG3004576, CTONG3004607, CTONG3004712, CTONG3004726, CTONG3005325, CTONG3005648, CTONG3005713, CTONG3005803, CTONG3005813, CTONG3006067, CTONG3006073, CTONG3006186, CTONG3006629, CTONG3006650, CTONG3006659, CTONG3007244, CTONG3007444, CTONG3007528, CTONG3007586, CTONG3007870, CTONG3008223, CTONG3008252, CTONG3008258, CTONG3008457, CTONG3008496, CTONG3008566, CTONG3008639, CTONG3008831, CTONG3008951, CTONG3008959, CTONG3009227, CTONG3009287, CTONG3009328,

[3533] CTONG3009385, D3OST1000066, D3OST1000109, D3OST1000238, D3OST1000267, D3OST1000270, D3OST2000184, D3OST2000618, D3OST2000654, D3OST2000734, D3OST2001328, D3OST2001669, D3OST2001670, D3OST2001788, D3OST2002068, D3OST2002182, D3OST2002223, D3OST2002262, D3OST2002272, D3OST2002417, D3OST2002436, D3OST2002648, D3OST2003024, D3OST2003331, D3OST2003607, D3OST2003797, D3OST2004637, D3OST3000169, D3OST3000195, D3OST3000291, D3OST3000388, D3OST3000493, D6OST2000127, D6OST2000169, D6OST2000245, D6OST2000358, D6OST2000507, D9OST2000031, D9OST2000278, D9OST2000440, D9OST2000869, D9OST2001319, D9OST2001433, D9OST2002397, D9OST2002673, D9OST2003106, D9OST2003108, D9OST2003137, D9OST2003397, D9OST2003580,

[3534] D9OST2003594, D9OST2003762, D9OST2003989, D9OST2004018, D9OST2004073, D9OST2004417, DFNES1000003, DFNES1000083, DFNES1000107, DFNES1000150, DFNES2000143, DFNES2000146, DFNES2000153, DFNES2000212, DFNES2000268, DFNES2000292, DFNES2000335, DFNES2000432, DFNES2000457, DFNES2000471, DFNES2000526, DFNES2000913, DFNES2001091, DFNES2001096, DFNES2001108, DFNES2001177, DFNES2001404, DFNES2001564, DFNES2001565, DFNES2001647, DFNES2001800, DFNES2002220, DFNES2002509, DFNES2002550, DFNES2002588, DFNES2002817, DFNES2002966, DFNES2003081, DFNES2003192, DFNES2003255, DFNES2003742, DFNES2004346, DFNES2004354, DFNES2004371, DFNES2004383, DFNES2004608, DFNES2004684, DFNES2005266, DFNES2005527, DFNES2005540,

[3535] DFNES2005690, DFNES2005766, DFNES2005779, DFNES2005875, DFNES2006944, DFNES2007113, DFNES2007299, DFNES2007332, DFNES2007641, DFNES2007757, DFNES2008088, DFNES2008160, DFNES2008280, DFNES2008881, DFNES2009482, DFNES2010502, DFNES2011192, DFNES2011221, DFNES2011239, DFNES2011245, DFNES2011380, DFNES2011499, ERLTF1000021, ERLTF2000324, ERLTF2000465, FCBBF1000023, FCBBF1000025, FCBBF1000038, FCBBF1000053, FCBBF1000063, FCBBF1000069, FCBBF1000077, FCBBF1000115, FCBBF1000117, FCBBF1000118, FCBBF1000121, FCBBF1000125, FCBBF1000131, FCBBF1000139, FCBBF1000155, FCBBF1000157, FCBBF1000171, FCBBF1000174, FCBBF1000198, FCBBF1000206, FCBBF1000220, FCBBF1000232, FCBBF1000233, FCBBF1000243, FCBBF1000270,

[3536] FCBBF1000272, FCBBF1000280, FCBBF1000297, FCBBF1000305, FCBBF1000314, FCBBF1000322, FCBBF1000349, FCBBF1000374, FCBBF1000376, FCBBF1000377, FCBBF1000395, FCBBF1000397, FCBBF1000403, FCBBF1000437, FCBBF1000449, FCBBF1000476, FCBBF1000506, FCBBF1000509, FCBBF1000546, FCBBF1000550, FCBBF1000556, FCBBF1000563, FCBBF1000581, FCBBF1000582, FCBBF1000598, FCBBF1000604, FCBBF1000618, FCBBF1000627, FCBBF1000671, FCBBF1000675, FCBBF1000684, FCBBF1000686, FCBBF1000687, FCBBF1000691, FCBBF1000732, FCBBF1000748, FCBBF2000038, FCBBF2000094, FCBBF2000105, FCBBF2000123, FCBBF2000195, FCBBF2000199, FCBBF2000214, FCBBF2000232, FCBBF2000259, FCBBF2000276, FCBBF2000291, FCBBF2000362, FCBBF2000379, FCBBF2000473,

[3537] FCBBF2000502, FCBBF2000566, FCBBF2000576, FCBBF2000677, FCBBF2000678, FCBBF2000733, FCBBF2000782, FCBBF2000808, FCBBF2000815, FCBBF2000825, FCBBF2000940, FCBBF2000951, FCBBF2001088, FCBBF2001105, FCBBF2001116, FCBBF2001183, FCBBF2001188, FCBBF2001211, FCBBF2001238, FCBBF2001243, FCBBF2001299, FCBBF2001309, FCBBF2001400, FCBBF2001427, FCBBF2001480, FCBBF2001529, FCBBF2001538, FCBBF2001594, FCBBF2001672, FCBBF2001675, FCBBF2001718, FCBBF2001720, FCBBF2001817, FCBBF2001868, FCBBF2002044, FCBBF2002111, FCBBF2002281, FCBBF2002349, FCBBF2002370, FCBBF2002541, FCBBF2002626, FCBBF2002801, FCBBF2002897, FCBBF2002898, FCBBF2002904, FCBBF2002928, FCBBF2002953, FCBBF2003083, FCBBF2003102, FCBBF2003269,

[3538] FCBBF2003293, FCBBF2003297, FCBBF2003395, FCBBF2003528, FCBBF2003543, FCBBF2003549, FCBBF2003567, FCBBF2003636, FCBBF2003823, FCBBF2003895, FCBBF2004066, FCBBF2004090, FCBBF2004138, FCBBF2004217, FCBBF2004256, FCBBF2004373, FCBBF2004448, FCBBF2004671, FCBBF2004707, FCBBF2004788, FCBBF2005069, FCBBF2005122, FCBBF2005428, FCBBF2005439, FCBBF2005538, FCBBF2005637, FCBBF2005645, FCBBF2005658, FCBBF2005733, FCBBF2005909, FCBBF2005966, FCBBF2006131, FCBBF2006418, FCBBF2006452, FCBBF2006634, FCBBF2006781, FCBBF2007012, FCBBF2007186, FCBBF2007265, FCBBF2007302, FCBBF2007556, FCBBF2007610, FCBBF2007633, FCBBF2007840, FCBBF3000102, FCBBF3000110, FCBBF3000120, FCBBF3000168, FCBBF3000175, FCBBF3000227,

[3539] FCBBF3000228, FCBBF3000229, FCBBF3000233, FCBBF3000269, FCBBF3000361, FCBBF3000367, FCBBF3000388, FCBBF3000434, FCBBF3000462, FCBBF3000473, FCBBF3000501, FCBBF3000518, FCBBF3000550, FCBBF3000847, FCBBF3001018, FCBBF3001020, FCBBF3001081, FCBBF3001235, FCBBF3001281, FCBBF3001302, FCBBF3001377, FCBBF3001594, FCBBF3001632, FCBBF3001657, FCBBF3001818, FCBBF3001855, FCBBF3001890, FCBBF3001912, FCBBF3001914, FCBBF3001918, FCBBF3001924, FCBBF3001977, FCBBF3002163, FCBBF3002188, FCBBF3002190, FCBBF3002268, FCBBF3002475, FCBBF3002556, FCBBF3002592, FCBBF3002658, FCBBF3002782, FCBBF3002818, FCBBF3002925, FCBBF3003216, FCBBF3003305, FCBBF3003373, FCBBF3003435, FCBBF3003475, FCBBF3003481, FCBBF3003557,

[3540] FCBBF3003787, FCBBF3003902, FCBBF3004021, FCBBF3004041, FCBBF3004261, FCBBF3004323, FCBBF3004390, FCBBF3004409, FCBBF3004502, FCBBF3004715, FCBBF3004842, FCBBF3004955, FCBBF3005160, FCBBF3005218, FCBBF3005320, FCBBF3005330, FCBBF3005444, FCBBF3005497, FCBBF3005698, FCBBF3005729, FCBBF3006171, FCBBF3006249, FCBBF3006288, FCBBF3006399, FCBBF3006628, FCBBF3007077, FCBBF3007150, FCBBF3007152, FCBBF3007242, FCBBF3007248, FCBBF3007453, FCBBF3007462, FCBBF3007540, FCBBF3007597, FCBBF3007604, FCBBF3007631, FCBBF3007829, FCBBF3007855, FCBBF3007860, FCBBF3008073, FCBBF3008100, FCBBF3008159, FCBBF3008251, FCBBF3008311, FCBBF3008362, FCBBF3008382, FCBBF3008475, FCBBF3008556, FCBBF3008644, FCBBF3008689,

[3541] FCBBF3008748, FCBBF3008870, FCBBF3008938, FCBBF3008944, FCBBF3009069, FCBBF3009101, FCBBF3009152, FCBBF3009256, FCBBF3009317, FCBBF3009428, FCBBF3009464, FCBBF3009479, FCBBF3009526, FCBBF3009541, FCBBF3009703, FCBBF3009717, FCBBF3009888, FCBBF3009949, FCBBF3009978, FCBBF3010008, FCBBF3010012, FCBBF3010124, FCBBF3010130, FCBBF3010142, FCBBF3010149, FCBBF3010211, FCBBF3010361, FCBBF3010508, FCBBF3010544, FCBBF3010586, FCBBF3010601, FCBBF3010665, FCBBF3010729, FCBBF3010733, FCBBF3011003, FCBBF3011418, FCBBF3011485, FCBBF3011523, FCBBF3011570, FCBBF3011592, FCBBF3011867, FCBBF3011889, FCBBF3012170, FCBBF3012182, FCBBF3012288, FCBBF3012332, FCBBF3012347, FCBBF3012443, FCBBF3012588, FCBBF3012667,

[3542] FCBBF3012842, FCBBF3012901, FCBBF3013041, FCBBF3013058, FCBBF3013205, FCBBF3013266, FCBBF3013307, FCBBF3013341, FCBBF3013506, FCBBF3013589, FCBBF3013623, FCBBF3013800, FCBBF3013846, FCBBF3014229, FCBBF3014260, FCBBF3014355, FCBBF3014567, FCBBF3014770, FCBBF3015100, FCBBF3015119, FCBBF3015131, FCBBF3015317, FCBBF3015727, FCBBF3015758, FCBBF3015809, FCBBF3015870, FCBBF3016018, FCBBF3016134, FCBBF3016178, FCBBF3016451, FCBBF3016618, FCBBF3016622, FCBBF3016644, FCBBF3016667, FCBBF3016987, FCBBF3017024, FCBBF3017059, FCBBF3017071, FCBBF3017123, FCBBF3017233, FCBBF3017255, FCBBF3017288, FCBBF3017535, FCBBF3017681, FCBBF3017729, FCBBF3017873, FCBBF3017918, FCBBF3017974, FCBBF3018067, FCBBF3018173,

[3543] FCBBF3018453, FCBBF3018591, FCBBF3018753, FCBBF3018826, FCBBF3018949, FCBBF3019085, FCBBF3019320, FCBBF3019437, FCBBF3019455, FCBBF3019564, FCBBF3019569, FCBBF3019570, FCBBF3019663, FCBBF3019716, FCBBF3019784, FCBBF3019867, FCBBF3019961, FCBBF3020030, FCBBF3020138, FCBBF3020140, FCBBF3020163, FCBBF3020232, FCBBF3020599, FCBBF3021026, FCBBF3021191, FCBBF3021221, FCBBF3021501, FCBBF3021506, FCBBF3021524, FCBBF3021940, FCBBF3021985, FCBBF3022005, FCBBF3022291, FCBBF3022311, FCBBF3022504, FCBBF3022566, FCBBF3022593, FCBBF3022765, FCBBF3022767, FCBBF3022894, FCBBF3023061, FCBBF3023078, FCBBF3023368, FCBBF3023372, FCBBF3023443, FCBBF3023599, FCBBF3023704, FCBBF3023887, FCBBF3023895, FCBBF3024096,

[3544] FCBBF3024225, FCBBF3024266, FCBBF3024364, FCBBF3024793, FCBBF3024911, FCBBF3025098, FCBBF3025252, FCBBF3025280, FCBBF3025285, FCBBF3025417, FCBBF3025650, FCBBF3025674, FCBBF3025730, FCBBF3026021, FCBBF3026048, FCBBF3026251, FCBBF3026308, FCBBF3026651, FCBBF3026678, FCBBF3026692, FCBBF3027104, FCBBF3027199, FCBBF3027328, FCBBF3027559, FCBBF3027717, FCBBF3027755, FCBBF3027768, FCBBF3027854, FCBBF3027863, FCBBF3027903, FCBBF3028102, FCBBF3028143, FCBBF3028188, FCBBF3028202, FCBBF3028244, FCBBF3028472, FCBBF3028528, FCBBF3028582, FCBBF3028593, FCBBF3028671, FCBBF3028794, FCBBF4000017, FCBBF4000061, FCBBF4000076, FCBBF4000173, FCBBF4000192, FCBBF4000193, FCBBF4000268, FCBBF4000282, FCBBF4000399,

[3545] FCBBF4000415, FCBBF4000500, FCBBF4000529, FCBBF4000548, FCBBF5000041, FCBBF5000061, FCBBF5000165, FCBBF5000325, FCBBF5000353, FCBBF5000384, FCBBF5000483, FCBBF5000495, FEBRA1000005, FEBRA1000008, FEBRA1000030, FEBRA1000057, FEBRA1000138, FEBRA1000148, FEBRA1000149, FEBRA1000183, FEBRA1000188, FEBRA1000189, FEBRA1000190, FEBRA2000007, FEBRA2000021, FEBRA2000035, FEBRA2000053, FEBRA2000126, FEBRA2000220, FEBRA2000228, FEBRA2000253, FEBRA2000282, FEBRA2000286, FEBRA2000297, FEBRA2000311, FEBRA2000321, FEBRA2000333, FEBRA2000377, FEBRA2000378, FEBRA2000391, FEBRA2000394, FEBRA2000397, FEBRA2000399, FEBRA2000402, FEBRA2000404, FEBRA2000409, FEBRA2000415, FEBRA2000436, FEBRA2000438, FEBRA2000452,

[3546] FEBRA2000454, FEBRA2000468, FEBRA2000491, FEBRA2000504, FEBRA2000532, FEBRA2000538, FEBRA2000575, FEBRA2000656, FEBRA2000659, FEBRA2000690, FEBRA2000727, FEBRA2000734, FEBRA2000762, FEBRA2000771, FEBRA2000772, FEBRA2000782, FEBRA2000787, FEBRA2000790, FEBRA2000793, FEBRA2000803, FEBRA2000805, FEBRA2000809, FEBRA2000815, FEBRA2000862, FEBRA2000877, FEBRA2000881, FEBRA2000901, FEBRA2000909, FEBRA2000917, FEBRA2000928, FEBRA2000936, FEBRA2000937, FEBRA2000959, FEBRA2000972, FEBRA2001004, FEBRA2001012, FEBRA2001020, FEBRA2001093, FEBRA2001124, FEBRA2001133, FEBRA2001146, FEBRA2001161, FEBRA2001175, FEBRA2001197, FEBRA2001217, FEBRA2001227, FEBRA2001245, FEBRA2001267, FEBRA2001294, FEBRA2001334,

[3547] FEBRA2001351, FEBRA2001383, FEBRA2001438, FEBRA2001440, FEBRA2001487, FEBRA2001492, FEBRA2001523, FEBRA2001561, FEBRA2001571, FEBRA2001581, FEBRA2001584, FEBRA2001590, FEBRA2001591, FEBRA2001610, FEBRA2001620, FEBRA2001659, FEBRA2001669, FEBRA2001698, FEBRA2001705, FEBRA2001706, FEBRA2001715, FEBRA2001752, FEBRA2001772, FEBRA2001790, FEBRA2001814, FEBRA2001867, FEBRA2001914, FEBRA2001974, FEBRA2001989, FEBRA2001990, FEBRA2002009, FEBRA2002027, FEBRA2002086, FEBRA2002109, FEBRA2002191, FEBRA2002260, FEBRA2002352, FEBRA2002399, FEBRA2002410, FEBRA2002429, FEBRA2002442, FEBRA2002456, FEBRA2002508, FEBRA2002525, FEBRA2002552, FEBRA2002574, FEBRA2002601, FEBRA2002611, FEBRA2002628, FEBRA2002662,

[3548] FEBRA2002682, FEBRA2002707, FEBRA2002727, FEBRA2002781, FEBRA2002783, FEBRA2002792, FEBRA2002818, FEBRA2002858, FEBRA2002882, FEBRA2002897, FEBRA2002908, FEBRA2002931, FEBRA2002933, FEBRA2002962, FEBRA2002986, FEBRA2003054, FEBRA2003100, FEBRA2003115, FEBRA2003128, FEBRA2003155, FEBRA2003163, FEBRA2003181, FEBRA2003198, FEBRA2003253, FEBRA2003258, FEBRA2003275, FEBRA2003308, FEBRA2003327, FEBRA2003429, FEBRA2003454, FEBRA2003468, FEBRA2003470, FEBRA2003520, FEBRA2003524, FEBRA2003541, FEBRA2003675, FEBRA2003707, FEBRA2003711, FEBRA2003726, FEBRA2003822, FEBRA2003897, FEBRA2003907, FEBRA2003930, FEBRA2004023, FEBRA2004026, FEBRA2004029, FEBRA2004053, FEBRA2004056, FEBRA2004091, FEBRA2004110,

[3549] FEBRA2004191, FEBRA2004202, FEBRA2004219, FEBRA2004224, FEBRA2004237, FEBRA2004268, FEBRA2004293, FEBRA2004325, FEBRA2004329, FEBRA2004331, FEBRA2004443, FEBRA2004485, FEBRA2004490, FEBRA2004538, FEBRA2004592, FEBRA2004620, FEBRA2004628, FEBRA2004651, FEBRA2004767, FEBRA2004813, FEBRA2004818, FEBRA2004840, FEBRA2004867, FEBRA2004914, FEBRA2004933, FEBRA2004987, FEBRA2005014, FEBRA2005036, FEBRA2005079, FEBRA2005114, FEBRA2005216, FEBRA2005291, FEBRA2005361, FEBRA2005377, FEBRA2005380, FEBRA2005416, FEBRA2005427, FEBRA2005458, FEBRA2005476, FEBRA2005572, FEBRA2005701, FEBRA2005726, FEBRA2005734, FEBRA2005778, FEBRA2005787, FEBRA2005788, FEBRA2005824, FEBRA2005995, FEBRA2005998, FEBRA2006055,

[3550] FEBRA2006061, FEBRA2006112, FEBRA2006150, FEBRA2006165, FEBRA2006255, FEBRA2006270, FEBRA2006315, FEBRA2006346, FEBRA2006354, FEBRA2006357, FEBRA2006368, FEBRA2006370, FEBRA2006372, FEBRA2006379, FEBRA2006396, FEBRA2006401, FEBRA2006409, FEBRA2006418, FEBRA2006427, FEBRA2006476, FEBRA2006485, FEBRA2006491, FEBRA2006519, FEBRA2006521, FEBRA2006553, FEBRA2006627, FEBRA2006664, FEBRA2006667, FEBRA2006726, FEBRA2006736, FEBRA2006793, FEBRA2006808, FEBRA2006817, FEBRA2006873, FEBRA2006890, FEBRA2006942, FEBRA2006977, FEBRA2007017, FEBRA2007176, FEBRA2007200, FEBRA2007212, FEBRA2007247, FEBRA2007280, FEBRA2007414, FEBRA2007436, FEBRA2007449, FEBRA2007458, FEBRA2007534, FEBRA2007544, FEBRA2007551,

[3551] FEBRA2007566, FEBRA2007589, FEBRA2007613, FEBRA2007620, FEBRA2007622, FEBRA2007708, FEBRA2007793, FEBRA2007801, FEBRA2007823, FEBRA2007880, FEBRA2007900, FEBRA2007931, FEBRA2007957, FEBRA2008009, FEBRA2008036, FEBRA2008086, FEBRA2008134, FEBRA2008135, FEBRA2008159, FEBRA2008165, FEBRA2008172, FEBRA2008201, FEBRA2008265, FEBRA2008266, FEBRA2008282, FEBRA2008287, FEBRA2008311, FEBRA2008341, FEBRA2008360, FEBRA2008459, FEBRA2008468, FEBRA2008475, FEBRA2008481, FEBRA2008542, FEBRA2008660, FEBRA2008662, FEBRA2008681, FEBRA2008692, FEBRA2008741, FEBRA2008755, FEBRA2008836, FEBRA2008859, FEBRA2008861, FEBRA2008866, FEBRA2008881, FEBRA2008928, FEBRA2008983, FEBRA2009016, FEBRA2009022, FEBRA2009029,

[3552] FEBRA2009074, FEBRA2009117, FEBRA2009120, FEBRA2009162, FEBRA2009185, FEBRA2009240, FEBRA2009265, FEBRA2009276, FEBRA2009289, FEBRA2009327, FEBRA2009328, FEBRA2009352, FEBRA2009362, FEBRA2009385, FEBRA2009416, FEBRA2009437, FEBRA209478, FEBRA2009507, FEBRA2009514, FEBRA2009541, FEBRA2009567, FEBRA2009588, FEBRA2009731, FEBRA2009754, FEBRA2009780, FEBRA2009846, FEBRA2009986, FEBRA2010141, FEBRA2010299, FEBRA2010484, FEBRA2010719, FEBRA2010746, FEBRA2010768, FEBRA2010802, FEBRA2011063, FEBRA2011356, FEBRA2011414, FEBRA2011593, FEBRA2011665, FEBRA2012090, FEBRA2012120, FEBRA2012181, FEBRA2012195, FEBRA2012397, FEBRA2012418, FEBRA2012507, FEBRA2012625, FEBRA2013019, FEBRA2013069, FEBRA2013274,

[3553] FEBRA2013465, FEBRA2013570, FEBRA2013699, FEBRA2013905, FEBRA2013951, FEBRA2014010, FEBRA2014122, FEBRA2014198, FEBRA2014213, FEBRA2014297, FEBRA2014443, FEBRA2014578, FEBRA2014939, FEBRA2015076, FEBRA2015085, FEBRA2015175, FEBRA2015292, FEBRA2015588, FEBRA2016112, FEBRA2016398, FEBRA2016572, FEBRA2016583, FEBRA2016621, FEBRA2016654, FEBRA2016739, FEBRA2017024, FEBRA2017098, FEBRA2017138, FEBRA2017154, FEBRA2017200, FEBRA2017223, FEBRA2017333, FEBRA2017502, FEBRA2017533, FEBRA2017680, FEBRA2017736, FEBRA2017780, FEBRA2017811, FEBRA2017850, FEBRA2018051, FEBRA2018203, FEBRA2018407, FEBRA2018433, FEBRA2018476, FEBRA2018746, FEBRA2019172, FEBRA2019242, FEBRA2019298, FEBRA2019389, FEBRA2019457,

[3554] FEBRA2019519, FEBRA2019582, FEBRA2019637, FEBRA2019663, FEBRA2019690, FEBRA2019711, FEBRA2019867, FEBRA2020406, FEBRA2020566, FEBRA2020582, FEBRA2020668, FEBRA2020801, FEBRA2020845, FEBRA2020886, FEBRA2020977, FEBRA2021032, FEBRA2021134, FEBRA2021171, FEBRA2021339, FEBRA2021431, FEBRA2021497, FEBRA2021550, FEBRA2021571, FEBRA2021636, FEBRA2021864, FEBRA2021892, FEBRA2021908, FEBRA2021966, FEBRA2022013, FEBRA2022148, FEBRA2022204, FEBRA2022255, FEBRA2022322, FEBRA2022601, FEBRA2022696, FEBRA2022729, FEBRA2022787, FEBRA2022911, FEBRA2022956, FEBRA2022963, FEBRA2022972, FEBRA2023227, FEBRA2023285, FEBRA2023351, FEBRA2023377, FEBRA2023399, FEBRA2023498, FEBRA2023550, FEBRA2023721, FEBRA2023989,

[3555] FEBRA2023990, FEBRA2024019, FEBRA2024136, FEBRA2024150, FEBRA2024343, FEBRA2024570, FEBRA2024693, FEBRA2024727, FEBRA2024744, FEBRA2024797, FEBRA2024987, FEBRA2025249, FEBRA2025427, FEBRA2025463, FEBRA2025477, FEBRA2026474, FEBRA2026582, FEBRA2026629, FEBRA2026769, FEBRA2026879, FEBRA2026890, FEBRA2026977, FEBRA2027082, FEBRA2027297, FEBRA2027352, FEBRA2027364, FEBRA2027609, FEBRA2028158, FEBRA2028222, FEBRA2028366, FEBRA2028457, FEBRA2028477, FEBRA2028503, FEHRT2000325, FEHRT2000364, FEKID1000018, FELIV1000101, FELIV1000137, FELIV1000164, FELNG2000241, HCASM1000021, HCASM1000050, HCASM1000061, HCASM1000115, HCASM1000130, HCASM2000156, HCASM2000202, HCASM2000214, HCASM2000266, HCASM2000307,

[3556] HCASM2000534, HCASM2000536, HCASM2000560, HCASM2000871, HCASM2001285, HCASM2001810, HCASM2001866, HCASM2002148, HCASM2002502, HCASM2002754, HCASM2002918, HCASM2003018, HCASM2003076, HCASM2003099, HCASM2003212, HCASM2003237, HCASM2003357, HCASM2003415, HCASM2005388, HCASM2005484, HCASM2006131, HCASM2006338, HCASM2006359, HCASM2006632, HCASM2007047, HCASM2007317, HCASM2007737, HCASM2007773, HCASM2008154, HCASM2009405, HCASM2009424, HCASM2009463, HCASM2009588, HCHON1000015, HCHON1000166, HCHON1000176, HCHON1000191, HCHON2000028, HCHON2000038, HCHON2000062, HCHON2000100, HCHON2000156, HCHON2000199, HCHON2000212, HCHON2000271, HCHON2000315, HCHON2000322, HCHON2000344, HCHON2000364, HCHON2000373,

[3557] HCHON2000395, HCHON2000417, HCHON2000473, HCHON2000503, HCHON2000508, HCHON2000660, HCHON2000663, HCHON2000673, HCHON2000676, HCHON2000699, HCHON2000705, HCHON2000751, HCHON2000815, HCHON2000817, HCHON2000818, HCHON2000819, HCHON2000832, HCHON2000851, HCHON2000898, HCHON2000935, HCHON2000942, HCHON2000956, HCHON2000994, HCHON2001050, HCHON2001099, HCHON2001108, HCHON2001110, HCHON2001116, HCHON2001161, HCHON2001214, HCHON2001233, HCHON2001269, HCHON2001359, HCHON2001407, HCHON2001450, HCHON2001453, HCHON2001497, HCHON2001519, HCHON2001523, HCHON2001535, HCHON2001546, HCHON2001548, HCHON2001577, HCHON2001604, HCHON2001607, HCHON2001646, HCHON2001712, HCHON2001768, HCHON2001801, HCHON2002123,

[3558] HCHON2002194, HCHON2002241, HCHON2002354, HCHON2002496, HCHON2002676, HCHON2002770, HCHON2002964, HCHON2002971, HCHON2003131, HCHON2003134, HCHON2003327, HCHON2003513, HCHON2003532, HCHON2003642, HCHON2003659, HCHON2003676, HCHON2004007, HCHON2004279, HCHON2004359, HCHON2004531, HCHON2004776, HCHON2004858, HCHON2005048, HCHON2005118, HCHON2005166, HCHON2005802, HCHON2005987, HCHON2006459, HCHON2006714, HCHON2006722, HCHON2006770, HCHON2006786, HCHON2006841, HCHON2006871, HCHON2007046, HCHON2007482, HCHON2007674, HCHON2007774, HCHON2007881, HCHON2008112, HCHON2008239, HCHON2008582, HCHON2008672, HCHON2008856, HCHON2008871, HCHON2008989, HCHON2009191, HCHON2009384, HCHON2009749, HCHON2009766,

[3559] HCHON2009795, HCHON2010074, HCHON2010543, HEART1000010, HEART1000074, HEART1000088, HEART1000099, HEART1000102, HEART1000118, HEART1000132, HEART1000139, HEART1000142, HEART1000151, HEART1000173, HEART2000024, HEART2000035, HEART2000099, HEART2000298, HEART2000306, HEART2000309, HEART2000411, HEART2000418, HEART2000444, HEART2000448, HEART2000492, HEART2000520, HEART2000541, HEART2000568, HEART2000611, HEART2000959, HEART2001680, HEART2001756, HEART2002129, HEART2002184, HEART2002220, HEART2002432, HEART2002531, HEART2002598, HEART2002717, HEART2003027, HEART2003168, HEART2003432, HEART2003440, HEART2003781, HEART2003836, HEART2003852, HEART2004570, HEART2004764, HEART2004940, HEART2004941,

[3560] HEART2004980, HEART2005244, HEART2005310, HEART2005581, HEART2005610, HEART2006131, HEART2006195, HEART2006310, HEART2006334, HEART2006487, HEART2006521, HEART2006557, HEART2006787, HEART2006789, HEART2006909, HEART2007031, HEART2007443, HEART2007696, HEART2007767, HEART2008108, HEART2008111, HEART2008257, HEART2008509, HEART2008994, HEART2009000, HEART2009599, HEART2009680, HEART2010391, HEART2010492, HEART2010495, HELAC2000158, HELAC2000301, HHDPC1000001, HHDPC1000065, HHDPC1000083, HHDPC1000118, HHDPC2000055, HHDPC2000070, HHDPC2000102, HHDPC2000104, HHDPC2000115, HHDPC2000149, HHDPC2000258, HHDPC2000315, HHDPC2000456, HHDPC2000462, HHDPC2000692, HHDPC2001337, HHDPC2001432, HHDPC2001896,

[3561] HHDPC2002963, HHDPC2003049, HHDPC2003113, HHDPC2003381, HHDPC2003472, HHDPC2004757, HHDPC2005185, HHDPC2005513, HHDPC2005742, HHDPC2005794, HHDPC2006460, HHDPC2006862, HHDPC2006927, HHDPC2007302, HHDPC2008123, HHDPC2008185, HHDPC2008279, HHDPC2008297, HHDPC2008414, HHDPC2008474, HHDPC2008816, HHDPC2008843, HHDPC2009114, HHDPC2009178, HHDPC2009208, HHDPC2009272, HHDPC2009528, HLUNG1000017, HLUNG1000024, HLUNG1000030, HLUNG1000034, HLUNG1000037, HLUNG1000053, HLUNG1000084, HLUNG1000091, HLUNG1000099, HLUNG1000104, HLUNG1000105, HLUNG1000110, HLUNG1000151, HLUNG1000169, HLUNG2000014, HLUNG2000027, HLUNG2000068, HLUNG2000116, HLUNG2000125, HLUNG2000130, HLUNG2000142, HLUNG2000174, HLUNG2000176,

[3562] HLUNG2000217, HLUNG2000232, HLUNG2000255, HLUNG2000281, HLUNG2000315, HLUNG2000340, HLUNG2000362, HLUNG2000363, HLUNG2000431, HLUNG2000480, HLUNG2000489, HLUNG2000549, HLUNG2000557, HLUNG2000570, HLUNG2000751, HLUNG2000761, HLUNG2000777, HLUNG2000870, HLUNG2000926, HLUNG2000950, HLUNG2000955, HLUNG2000970, HLUNG2001013, HLUNG2001126, HLUNG2001144, HLUNG2001214, HLUNG2001439, HLUNG2001459, HLUNG2001633, HLUNG2001712, HLUNG2001814, HLUNG2001996, HLUNG2002006, HLUNG2002050, HLUNG2002059, HLUNG2002085, HLUNG2002145, HLUNG2002295, HLUNG2002303, HLUNG2002334, HLUNG2002405, HLUNG2002429, HLUNG2002465, HLUNG2002562, HLUNG2002659, HLUNG2002707, HLUNG2002916, HLUNG2002942, HLUNG2002949, HLUNG2002958,

[3563] HLUNG2002982, HLUNG2003042, HLUNG2003049, HLUNG2003061, HLUNG2003162, HLUNG2003246, HLUNG2003306, HLUNG2003331, HLUNG2003335, HLUNG2003378, HLUNG2003497, HLUNG2003691, HLUNG2003710, HLUNG2003714, HLUNG2003716, HLUNG2003778, HLUNG2003833, HLUNG2003872, HLUNG2003918, HLUNG2003991, HLUNG2004014, HLUNG2004037, HLUNG2004067, HLUNG2004154, HLUNG2004217, HLUNG2004273, HLUNG2004388, HLUNG2004416, HLUNG2004521, HLUNG2004534, HLUNG2004707, HLUNG2004774, HLUNG2004775, HLUNG2005012, HLUNG2005030, HLUNG2005045, HLUNG2005076, HLUNG2005133, HLUNG2005203, HLUNG2005230, HLUNG2005479, HLUNG2005524, HLUNG2005656, HLUNG2005738, HLUNG2005774, HLUNG2005813, HLUNG2005924, HLUNG2006026, HLUNG2006067, HLUNG2006094,

[3564] HLUNG2006370, HLUNG2006397, HLUNG2006570, HLUNG2006599, HLUNG2006614, HLUNG2006671, HLUNG2006781, HLUNG2006843, HLUNG2006852, HLUNG2006935, HLUNG2007041, HLUNG2007163, HLUNG2007210, HLUNG2007219, HLUNG2007245, HLUNG2007433, HLUNG2007931, HLUNG2008066, HLUNG2008139, HLUNG2008153, HLUNG2008225, HLUNG2008235, HLUNG2008247, HLUNG2008348, HLUNG2008384, HLUNG2008396, HLUNG2008439, HLUNG2008479, HLUNG2008480, HLUNG2008521, HLUNG2008833, HLUNG2008875, HLUNG2008885, HLUNG2008958, HLUNG2008959, HLUNG2009067, HLUNG2009215, HLUNG2009253, HLUNG2009303, HLUNG2009413, HLUNG2009729, HLUNG2010181, HLUNG2010464, HLUNG2010562, HLUNG2010845, HLUNG2011041, HLUNG2011298, HLUNG2011461, HLUNG2011833, HLUNG2012049,

[3565] HLUNG2012287, HLUNG2012315, HLUNG2012546, HLUNG2012600, HLUNG2012727, HLUNG2013097, HLUNG2013204, HLUNG2013304, HLUNG2013350, HLUNG2013622, HLUNG2013643, HLUNG2013784, HLUNG2013851, HLUNG2014262, HLUNG2014288, HLUNG2014449, HLUNG2014821, HLUNG2015418, HLUNG2015548, HLUNG2015578, HLUNG2015617, HLUNG2016022, HLUNG2016862, HLUNG2017286, HLUNG2017307, HLUNG2017350, HLUNG2017546, HLUNG2017806, HLUNG2018029, HLUNG2018282, HLUNG2018626, HLUNG2019058, HSYRA1000119, HSYRA1000131, HSYRA1000137, HSYRA1000148, HSYRA2000044, HSYRA2000135, HSYRA2000137, HSYRA2000190, HSYRA2000221, HSYRA2000237, HSYRA2000253, HSYRA2000332, HSYRA2000371, HSYRA2000424, HSYRA2000507, HSYRA2000510, HSYRA2000605, HSYRA2000629,

[3566] HSYRA2000706, HSYRA2000760, HSYRA2000787, HSYRA2000792, HSYRA2000828, HSYRA2000832, HSYRA2000925, HSYRA2000927, HSYRA2001003, HSYRA2000103, HSYRA2001142, HSYRA2001153, HSYRA2001225, HSYRA2001232, HSYRA2001255, HSYRA2001332, HSYRA2001353, HSYRA2001420, HSYRA2001484, HSYRA2001552, HSYRA2001595, HSYRA2001631, HSYRA2001638, HSYRA2001983, HSYRA2002103, HSYRA2002590, HSYRA2002741, HSYRA2003168, HSYRA2004550, HSYRA2004858, HSYRA2005456, HSYRA2005496, HSYRA2005628, HSYRA2005970, HSYRA2006049, HSYRA2006873, HSYRA2007241, HSYRA2007338, HSYRA2007667, HSYRA2008154, HSYRA2008714, HSYRA2009102, IMR321000155, IMR321000161, IMR321000165, IMR321000193, IMR321000207, IMR321000230, IMR321000253, IMR322000010,

[3567] IMR322000072, IMR322000107, IMR322000127, IMR322000144, IMR322000152, IMR322000164, IMR322000178, IMR322000223, IMR322000243, IMR322000302, IMR322000316, IMR322000374, IMR322000379, IMR322000383, IMR322000418, IMR322000518, IMR322000555, IMR322000604, IMR322000609, IMR322000656, IMR322000672, IMR322000742, IMR322000775, IMR322000791, IMR322000811, IMR322000819, IMR322000838, IMR322000859, IMR322000863, IMR322000917, IMR322000918, IMR322000919, IMR322000953, IMR322000973, IMR322000984, IMR322001018, IMR322001167, IMR322001185, IMR322001218, IMR322001245, IMR322001317, IMR322001318, IMR322001322, IMR322001332, IMR322001380, IMR322001438, IMR322001452, IMR322001491, IMR322001541, IMR322001584,

[3568] IMR322001665, IMR322001670, IMR322001724, IMR322002035, IMR322002110, IMR322002470, IMR322002993, IMR322003675, IMR322004768, IMR322005293, IMR322005833, IMR322006012, IMR322006222, IMR322006495, IMR322006520, IMR322006886, IMR322006947, IMR322007078, IMR322007225, IMR322007704, IMR322008651, IMR322009710, IMR322009807, IMR322010295, IMR322010953, IMR322011689, IMR322012314, IMR322012529, IMR322013053, IMR322013396, IMR322013731, IMR322013805, IMR322015523, IMR322016146, IMR322017049, IMR322018117, IMR322018192, JCMLC2000273, KIDNE1000008, KIDNE1000012, KIDNE1000015, KIDNE1000028, KIDNE1000064, KIDNE1000104, KIDNE1000121, KIDNE1000143, KIDNE1000152, KIDNE2000026, KIDNE2600041, KIDNE2000046,

[3569] KIDNE2000051, KIDNE2000070, KIDNE2000167, KIDNE2000174, KIDNE2000192, KIDNE2000227, KIDNE2000244, KIDNE2000245, KIDNE2000252, KIDNE2000266, KIDNE2000287, KIDNE2000315, KIDNE2000317, KIDNE2000328, KIDNE2000335, KIDNE2000349, KIDNE2000375, KIDNE2000383, KIDNE2000394, KIDNE2000422, KIDNE2000493, KIDNE2000497, KIDNE2000510, KIDNE2000513, KIDNE2000517, KIDNE2000519, KIDNE2000555, KIDNE2000574, KIDNE2000624, KIDNE2000665, KIDNE2000678, KIDNE2000717, KIDNE2000721, KIDNE2000722, KIDNE2000777, KIDNE2000801, KIDNE2000832, KIDNE2000833, KIDNE2000846, KIDNE2000867, KIDNE2000909, KIDNE2000947, KIDNE2001117, KIDNE2001140, KIDNE2001269, KIDNE2001361, KIDNE2001373, KIDNE2001636, KIDNE2001713, KIDNE2001802,

[3570] KIDNE2001840, KIDNE2001847, KIDNE2001857, KIDNE2001873, KIDNE2001897, KIDNE2001931, KIDNE2002015, KIDNE2002162, KIDNE2002168, KIDNE2002191, KIDNE2002198, KIDNE2002262, KIDNE2002265, KIDNE2002438, KIDNE2002483, KIDNE2002725, KIDNE2002768, KIDNE2002795, KIDNE2002798, KIDNE2002839, KIDNE2002845, KIDNE2002872, KIDNE2002882, KIDNE2002883, KIDNE2002980, KIDNE2002991, KIDNE2003185, KIDNE2003188, KIDNE2003233, KIDNE2003316, KIDNE2003335, KIDNE2003357, KIDNE2003373, KIDNE2003377, KIDNE2003507, KIDNE2003752, KIDNE2003764, KIDNE2003837, KIDNE2003994, KIDNE2004034, KIDNE2004054, KIDNE2004084, KIDNE2004095, KIDNE2004115, KIDNE2004233, KIDNE2004262, KIDNE2004279, KIDNE2004294, KIDNE2004295, KIDNE2004305,

[3571] KIDNE2004344, KIDNE2004394, KIDNE2004411, KIDNE2004475, KIDNE2004519, KIDNE2004520, KIDNE2004531, KIDNE2004534, KIDNE2004562, KIDNE2004579, KIDNE2004626, KIDNE2004681, KIDNE2004828, KIDNE2004846, KIDNE2004864, KIDNE2004879, KIDNE2004981, KIDNE2004985, KIDNE2004999, KIDNE2005038, KIDNE2005042, KIDNE2005062, KIDNE2005266, KIDNE2005296, KIDNE2005327, KIDNE2005336, KIDNE2005400, KIDNE2005424, KIDNE2005477, KIDNE2005526, KIDNE2005543, KIDNE2005603, KIDNE2005629, KIDNE2005781, KIDNE2005798, KIDNE2005854, KIDNE2005908, KIDNE2005937, KIDNE2006009, KIDNE2006039, KIDNE2006053, KIDNE2006062, KIDNE2006092, KIDNE2006145, KIDNE2006149, KIDNE2006210, KIDNE2006299, KIDNE2006334, KIDNE2006353, KIDNE2006376,

[3572] KIDNE2006378, KIDNE2006580, KIDNE2006652, KIDNE2006687, KIDNE2006733, KIDNE2006760, KIDNE2006775, KIDNE2006811, KIDNE2006820, KIDNE2006880, KIDNE2007005, KIDNE2007077, KIDNE2007186, KIDNE2007222, KIDNE2007356, KIDNE2007422, KIDNE2007569, KIDNE2007810, KIDNE2007910, KIDNE2007944, KIDNE2008022, KIDNE2008069, KIDNE2008072, KIDNE2008116, KIDNE2008117, KIDNE2008218, KIDNE2008315, KIDNE2008362, KIDNE2008378, KIDNE2008403, KIDNE2008404, KIDNE2008446, KIDNE2008473, KIDNE2008480, KIDNE2008649, KIDNE2008666, KIDNE2008697, KIDNE2008758, KIDNE2008788, KIDNE2008795, KIDNE2008824, KIDNE2008832, KIDNE2008869, KIDNE2008914, KIDNE2008975, KIDNE2008987, KIDNE2009019, KIDNE2009109, KIDNE2009180, KIDNE2009191,

[3573] KIDNE2009332, KIDNE2009426, KIDNE2009467, KIDNE2009490, KIDNE2009553, KIDNE2009628, KIDNE2009647, KIDNE2009676, KIDNE2009723, KIDNE2010007, KIDNE2010052, KIDNE2010084, KIDNE2010137, KIDNE2010151, KIDNE2010264, KIDNE2010265, KIDNE2010271, KIDNE2010419, KIDNE2010430, KIDNE2010574, KIDNE2010674, KIDNE2010739, KIDNE2010750, KIDNE2010762, KIDNE2010863, KIDNE2010973, KIDNE2010989, KIDNE2011200, KIDNE2011314, KIDNE2011508, KIDNE2011532, KIDNE2011635, KIDNE2011752, KIDNE2011782, KIDNE2011858, KIDNE2012009, KIDNE2012025, KIDNE2012188, KIDNE2012291, KIDNE2012316, KIDNE2012361, KIDNE2012440, KIDNE2012453, KIDNE2012563, KIDNE2012601, KIDNE2012613, KIDNE2012710, KIDNE2012745, KIDNE2012775, KIDNE2012945,

[3574] KIDNE2013045, KIDNE2013095, KIDNE2013218, KIDNE2013263, KIDNE2013346, KIDNE2013388, KIDNE2013413, KIDNE2013489, KIDNE2013639, KIDNE2013731, KIDNE2013734, KIDNE2013775, KIDNE2013801, KIDNE2013866, KIDNE2014087, KIDNE2014112, KIDNE2014119, KIDNE2014170, KIDNE2014184, KIDNE2014268, KIDNE2014298, KIDNE2014320, KIDNE2014415, KIDNE2014489, KIDNE2014496, KIDNE2014661, KIDNE2014717, KIDNE2014789, KIDNE2014808, KIDNE2014890, KIDNE2014978, KIDNE2015073, KIDNE2015221, KIDNE2015244, KIDNE2015313, KIDNE2015433, KIDNE2015445, KIDNE2015483, KIDNE2015515, KIDNE2015546, KIDNE2015556, KIDNE2015598, KIDNE2015660, KIDNE2015710, KIDNE2015987, KIDNE2016000, KIDNE2016036, KIDNE2016096, KIDNE2016101, KIDNE2016142,

[3575] KIDNE2016188, KIDNE2016327, KIDNE2016371, KIDNE2016388, KIDNE2016464, KIDNE2016539, KIDNE2016570, KIDNE2016918, KIDNE2017007, KIDNE2017052, KIDNE2017151, KIDNE2017153, KIDNE2017315, KIDNE2017332, KIDNE2017343, KIDNE2017454, KIDNE2017603, KIDNE2017956, KIDNE2018071, KIDNE2018166, KIDNE2018167, KIDNE2018217, KIDNE2018254, KIDNE2018268, KIDNE2018269, KIDNE2018287, KIDNE2018294, KIDNE2018352, KIDNE2018462, KIDNE2018493, KIDNE2018617, KIDNE2018678, KIDNE2018727, KIDNE2018863, KIDNE2018891, KIDNE2018989, KIDNE2018996, KIDNE2019074, KIDNE2019187, LIVER1000017, LIVER1000050, LIVER1000055, LIVER1000058, LIVER1000063, LIVER1000067, LIVER1000073, LIVER1000082, LIVER1000099, LIVER1000104, LIVER1000111,

[3576] LIVER1000126, LIVER1000139, LIVER1000155, LIVER1000165, LIVER1000175, LIVER1000224, LIVER1000230, LIVER1000278, LIVER1000303, LIVER1000397, LIVER1000421, LIVER1000433, LIVER1000479, LIVER1000482, LIVER1000542, LIVER2000003, LIVER2000037, LIVER2000158, LIVER2000216, LIVER2000237, LIVER2000247, LIVER2000360, LIVER2000416, LIVER2000446, LIVER2000515, LIVER2000592, LIVER2000626, LIVER2000682, LIVER2000769, LIVER2000775, LIVER2001051, LIVER2001076, LIVER2001099, LIVER2001113, LIVER2001164, LIVER2001191, LIVER2001265, LIVER2001329, LIVER2001389, LIVER2001461, LIVER2001835, LIVER2002638, LIVER2002644, LIVER2002660, LIVER2002702, LIVER2003008, LIVER2003065, LIVER2003511, LIVER2003524, LIVER2003568,

[3577] LIVER2003581, LIVER2003800, LIVER2003854, LIVER2004074, LIVER2004392, LIVER2004514, LIVER2004565, LIVER2005028, LIVER2005198, LIVER2005376, LIVER2005385, LIVER2005512, LIVER2005520, LIVER2005527, LIVER2005544, LIVER2005625, LIVER2005728, LIVER2005789, LIVER2005973, LIVER2005981, LIVER2006006, LIVER2006251, LIVER2006410, LIVER2006469, LIVER2006644, LIVER2006764, LIVER2007415, LIVER2007548, LIVER2007568, LIVER2007721, LIVER2008053, LIVER2008473, LIVER2008580, LIVER2008706, LIVER2008751, LIVER2008945, LIVER2008998, LIVER2009110, LIVER2009118, LIVER2009554, LYMPB1000141, LYMPB1000158, LYMPB2000083, MAMGL1000017, MAMGL1000032, MAMGL1000035, MAMGL1000096, MAMGL1000100, MAMGL1000132, MAMGL1000151,

[3578] MAMGL1000173, MAMGL1000178, MAMGL1000182, MAMGL1000184, MESAN1000032, MESAN1000035, MESAN1000050, MESAN1000079, MESAN1000080, MESAN1000101, MESAN1000121, MESAN1000126, MESAN1000147, MESAN1000180, MESAN2000023, MESAN2000026, MESAN2000067, MESAN2000092, MESAN2000149, MESAN2000167, MESAN2000291, MESAN2000337, MESAN2000434, MESAN2000457, MESAN2000462, MESAN2000501, MESAN2000572, MESAN2000608, MESAN2000620, MESAN2000711, MESAN2000815, MESAN2000909, MESAN2001450, MESAN2001627, MESAN2001770, MESAN2001979, MESAN2001980, MESAN2002113, MESAN2002122, MESAN2002147, MESAN2002186, MESAN2002519, MESAN2002687, MESAN2002709, MESAN2002790, MESAN2002940, MESAN2002978, MESAN2003035, MESAN2003037, MESAN2003101,

[3579] MESAN2003190, MESAN2003322, MESAN2003490, MESAN2003529, MESAN2003622, MESAN2003646, MESAN2003662, MESAN2003851, MESAN2004138, MESAN2004288, MESAN2004575, MESAN2005284, MESAN2005371, MESAN2005633, MESAN2005689, MESAN2005724, MESAN2005766, MESAN2005808, MESAN2005811, MESAN2005958, MESAN2006022, MESAN2006328, MESAN2006401, MESAN2006563, MESAN2006599, MESAN2006953, MESAN2006971, MESAN2007032, MESAN2007440, MESAN2007597, MESAN2007755, MESAN2008222, MESAN2008334, MESAN2008415, MESAN2008460, MESAN2008536, MESAN2008679, MESAN2008729, MESAN2008821, MESAN2008926, MESAN2008936, MESAN2009019, MESAN2009081, MESAN2009105, MESAN2009311, MESAN2009418, MESAN2009503, MESAN2009522, MESAN2010031, MESAN2010114,

[3580] MESAN2010312, MESAN2010321, MESAN2010664, MESAN2010681, MESAN2011545, MESAN2011597, MESAN2011627, MESAN2011632, MESAN2011977, MESAN2011984, MESAN2012054, MESAN2012113, MESAN2012586, MESAN2012708, MESAN2012735, MESAN2013019, MESAN2013022, MESAN2013183, MESAN2013211, MESAN2013283, MESAN2013611, MESAN2013674, MESAN2013845, MESAN2013908, MESAN2013936, MESAN2014192, MESAN2014298, MESAN2014412, MESAN2014624, MESAN2015277, MESAN2015365, MESAN2015391, MESAN2015401, MESAN2015501, MESAN2015515, MESAN2015708, MESAN2016159, MESAN2016304, MESAN2016409, MESAN2016965, MESAN2017133, MESAN2017373, MESAN2017417, MESAN2018209, MESAN2018576, MESAN2018670, MESAN2018699, MESTC1000042, MESTC1000147, MESTC2000150,

[3581] MESTC2000153, MESTC2000170, N1ESE2000698, NB9N41000011, NB9N41000047, NB9N41000135, NB9N41000142, NB9N41000146, NB9N41000340, NB9N42000104, NB9N42000122, NB9N42000196, NB9N42000314, NB9N42000342, NB9N42000430, NB9N42000495, NB9N42001300, NCRRP1000129, NESOP1000010, NESOP1000087, NESOP1000108, NESOP2000231, NESOP2000452, NESOP2000499, NESOP2000504, NESOP2000744, NESOP2001144, NESOP2001433, NESOP2001656, NESOP2001694, NESOP2001752, NESOP2002352, NESOP2002418, NESOP2002487, NESOP2002738, NESOP2002780, NETRP1000034, NETRP1000082, NETRP2000086, NETRP2000182, NETRP2000439, NHNPC1000034, NHNPC1000037, NHNPC1000084, NHNPC1000101, NHNPC1000124, NHNPC2000062, NHNPC2000187, NHNPC2000206, NHNPC2000212,

[3582] NHNPC2000606, NHNPC2000877, NHNPC2001108, NHNPC2001223, NHNPC2001312, NHNPC2001816, NHNPC2001931, NHNPC2002565, NHNPC2002749, NOVAR1000102, NOVAR2000038, NOVAR2000136, NOVAR2000352, NOVAR2000412, NOVAR2000783, NOVAR2000962, NOVAR2001108, NOVAR2001620, NOVAR2001783, NOVAR2001876, NOVAR2002039, NT2NE1000004, NT2NE1000014, NT2NE1000018, NT2NE1000023, NT2NE1000024, NT2NE1000059, NT2NE1000063, NT2NE1000073, NT2NE1000083, NT2NE1000120, NT2NE1000122, NT2NE1000175, NT2NE1000181, NT2NE1000185, NT2NE2000038, NT2NE2000054, NT2NE2000057, NT2NE2000064, NT2NE2000109, NT2NE2000137, NT2NE2000156, NT2NE2000174, NT2NE2000195, NT2NE2000222, NT2NE2000259, NT2NE2000260, NT2NE2000284, NT2NE2000299, NT2NE2000353,

[3583] NT2NE2000356, NT2NE2000369, NT2NE2000374, NT2NE2000386, NT2NE2000390, NT2NE2000392, NT2NE2000470, NT2NE2000488, NT2NE2000517, NT2NE2000536, NT2NE2000546, NT2NE2000548, NT2NE2000550, NT2NE2000586, NT2NE2000612, NT2NE2000636, NT2NE2000658, NT2NE2000706, NT2NE2000763, NT2NE2000802, NT2NE2000808, NT2NE2000809, NT2NE2000864, NT2NE2000909, NT2NE2000913, NT2NE2000950, NT2NE2000951, NT2NE2000980, NT2NE2001005, NT2NE2001021, NT2NE2001040, NT2NE2001048, NT2NE2001049, NT2NE2001142, NT2NE2001156, NT2NE2001180, NT2NE2001181, NT2NE2001188, NT2NE2001191, NT2NE2001247, NT2NE2001252, NT2NE2001324, NT2NE2001326, NT2NE2001364, NT2NE2001372, NT2NE2001397, NT2NE2001403, NT2NE2001428, NT2NE2001432, NT2NE2001442,

[3584] NT2NE2001524, NT2NE2001530, NT2NE2001598, NT2NE2001623, NT2NE2001626, NT2NE2001634, NT2NE2001648, NT2NE2001655, NT2NE2001666, NT2NE2001677, NT2NE2001697, NT2NE2001698, NT2NE2001723, NT2NE2001725, NT2NE2001874, NT2NE2001889, NT2NE2001923, NT2NE2002100, NT2NE2002162, NT2NE2002186, NT2NE2002285, NT2NE2002311, NT2NE2002651, NT2NE2002732, NT2NE2002768, NT2NE2002791, NT2NE2002856, NT2NE2002870, NT2NE2003150, NT2NE2003252, NT2NE2003280, NT2NE2003308, NT2NE2003309, NT2NE2003315, NT2NE2003393, NT2NE2003408, NT2NE2003457, NT2NE2003540, NT2NE2003571, NT2NE2003705, NT2NE2003752, NT2NE2003887, NT2NE2003921, NT2NE2004255, NT2NE2004378, NT2NE2004490, NT2NE2004606, NT2NE2004740, NT2NE2004787, NT2NE2004916,

[3585] NT2NE2005035, NT2NE2005223, NT2NE2005276, NT2NE2005317, NT2NE2005323, NT2NE2005371, NT2NE2005395, NT2NE2005419, NT2NE2005441, NT2NE2005517, NT2NE2005537, NT2NE2005555, NT2NE2005588, NT2NE2005676, NT2NE2005688, NT2NE2005720, NT2NE2005784, NT2NE2005804, NT2NE2005821, NT2NE2005876, NT2NE2005890, NT2NE2005921, NT2NE2005968, NT2NE2006075, NT2NE2006087, NT2NE2006103, NT2NE2006217, NT2NE2006288, NT2NE2006382, NT2NE2006387, NT2NE2006427, NT2NE2006432, NT2NE2006478, NT2NE2006531, NT2NE2006784, NT2NE2006813, NT2NE2006894, NT2NE2006909, NT2NE2006942, NT2NE2006958, NT2NE2007052, NT2NE2007220, NT2NE2007425, NT2NE2007725, NT2NE2007727, NT2NE2007786, NT2NE2007877, NT2NE2007967, NT2NE2008017, NT2NE2008060,

[3586] NT2NE2008077, NT2NE2008213, NT2NE2008260, NT2NE2008378, NT2NE2008607, NT2NE2008639, NT2NE2008727, NT2NE2008783, NT2NE2008785, NT2NE2008803, NT2NE2008867, NT2NE2008961, NT2NE2008997, NT2NE2009138, NT2NE2009426, NT2NE2009523, NT2NE2009608, NT2NE2009691, NT2NE2010056, NT2NE2010105, NT2NE2010150, NT2NE2010400, NT2NE2010632, NT2NE2010633, NT2NE2010654, NT2NE2010688, NT2NE2010781, NT2NE2010842, NT2NE2010854, NT2NE2011033, NT2NE2011036, NT2NE2011107, NT2NE2011119, NT2NE2011154, NT2NE2011221, NT2NE2011411, NT2NE2011485, NT2NE2011650, NT2NE2011684, NT2NE2.011687, NT2NE2011691, NT2NE2011758, NT2NE2011823, NT2NE2011896, NT2NE2011998, NT2NE2012113, NT2NE2012199, NT2NE2012243, NT2NE2012361, NT2NE2012448,

[3587] NT2NE2012457, NT2NE2012493, NT2NE2012505, NT2NE2012533, NT2NE2012603, NT2NE2012747, NT2NE2012790, NT2NE2012847, NT2NE2012928, NT2NE2013019, NT2NE2013081, NT2NE2013189, NT2NE2013217, NT2NE2013547, NT2NE2014013, NT2NE2014028, NT2NE2014104, NT2NE2014113, NT2NE2014176, NT2NE2014221, NT2NE2014525, NT2NE2014650, NT2NE2014651, NT2NE2014681, NT2NE2014758, NT2NE2014869, NT2NE2014950, NT2NE2015061, NT2NE2015262, NT2NE2015275, NT2NE2015362, NT2NE2015480, NT2NE2015511, NT2NE2015565, NT2NE2015626, NT2NE2015747, NT2NE2015860, NT2NE2015885, NT2NE2015904, NT2NE2016041, NT2NE2016387, NT2NE2016419, NT2NE2016519, NT2NE2016608, NT2NE2016766, NT2NE2016774, NT2NE2016971, NT2NE2017259, NT2NE2017332, NT2NE2017397,

[3588] NT2NE2017480, NT2NE2017508, NT2NE2017562, NT2NE2017590, NT2NE2017612, NT2NE2017721, NT2NE2017752, NT2NE2017792, NT2NE2017982, NT2NE2018165, NT2NE2018176, NT2NE2018180, NT2NE2018273, NT2NE2018376, NT2NE2018472, NT2NE2018490, NT2NE2018594, NT2NE2018739, NT2NE2018916, NT2NE2019056, NT2NE2019076, NT2NE2019091, NT2NE2019099, NT2RI1000016, NT2RI1000027, NT2RI1000035, NT2RI1000048, NT2RI1000164, NT2RI1000172, NT2RI2000004, NT2RI2000107, NT2RI2000116, NT2RI2000117, NT2RI2000128, NT2RI2000133, NT2RI2000167, NT2RI2000173, NT2RI2000187, NT2RI2000255, NT2RI2000263, NT2RI2000270, NT2RI2000276, NT2RI2000284, NT2RI2000313, NT2RI2000341, NT2RI2000348, NT2RI2000412, NT2RI2000421, NT2RI2000480, NT2RI2000575,

[3589] NT2RI2000588, NT2RI2000597, NT2RI2000669, NT2RI2000688, NT2RI2000704, NT2RI2000738, NT2RI2000775, NT2RI2000822, NT2RI2000829, NT2RI2000841, NT2RI2000865, NT2RI2000932, NT2RI2000974, NT2RI2000987, NT2RI2001010, NT2RI2001017, NT2RI2001030, NT2RI2001054, NT2RI2001083, NT2RI2001167, NT2RI2001178, NT2RI2001235, NT2RI2001244, NT2RI2001307, NT2RI2001342, NT2RI2001385, NT2RI2001409, NT2RI2001410, NT2RI2001422, NT2RI2001425, NT2RI2001449, NT2RI2001450, NT2RI2001474, NT2RI2001519, NT2RI2001595, NT2RI2001621, NT2RI2001624, NT2RI2001726, NT2RI2001731, NT2RI2001769, NT2RI2001782, NT2RI2001836, NT2RI2001846, NT2RI2001866, NT2RI2001910, NT2RI2001952, NT2RI2002022, NT2RI2002041, NT2RI2002117, NT2RI2002120,

[3590] NT2RI2002153, NT2RI2002179, NT2RI2002243, NT2RI2002252, NT2RI2002260, NT2RI2002266, NT2RI2002270, NT2RI2002334, NT2RI2002359, NT2RI2002447, NT2RI2002481, NT2RI2002507, NT2RI2002517, NT2RI2002530, NT2RI2002540, NT2RI2002549, NT2RI2002554, NT2RI2002564, NT2RI2002585, NT2RI2002592, NT2RI2002602, NT2RI2002699, NT2RI2002729, NT2RI2002802, NT2RI2002819, NT2RI2002822, NT2RI2002847, NT2RI2002852, NT2RI2002923, NT2RI2002926, NT2RI2002958, NT2RI2002970, NT2RI2003011, NT2RI2003019, NT2RI2003051, NT2RI2003067, NT2RI2003184, NT2RI2003205, NT2RI2003222, NT2RI2003301, NT2RI2003360, NT2RI2003361, NT2RI2003383, NT2RI2003392, NT2RI2003399, NT2RI2003419, NT2RI2003481, NT2RI2003487, NT2RI2003655, NT2RI2003667,

[3591] NT2RI2003678, NT2RI2003884, NT2RI2003921, NT2RI2003973, NT2RI2003993, NT2RI2004059, NT2RI2004078, NT2RI2004079, NT2RI2004093, NT2RI2004136, NT2RI2004190, NT2RI2004209, NT2RI2004284, NT2RI2004290, NT2RI2004304, NT2RI2004312, NT2RI2004381, NT2RI2004398, NT2RI2004410, NT2RI2004442, NT2RI2004468, NT2RI2004606, NT2RI2004608, NT2RI2004618, NT2RI2004783, NT2RI2004818, NT2RI2004840, NT2RI2004884, NT2RI2004916, NT2RI2004962, NT2RI2004984, NT2RI2004985, NT2RI2005048, NT2RI2005061, NT2RI2005069, NT2RI2005087, NT2RI2005096, NT2RI2005115, NT2RI2005130, NT2RI2005150, NT2RI2005166, NT2RI2005239, NT2RI2005246, NT2RI2005315, NT2RI2005353, NT2RI2005368, NT2RI2005382, NT2RI2005473, NT2RI2005520, NT2RI2005564,

[3592] NT2RI2005579, NT2RI2005621, NT2RI2005628, NT2RI2005647, NT2RI2005670, NT2RI2005710, NT2RI2005772, NT2RI2005816, NT2RI2005851, NT2RI2005966, NT2RI2006070, NT2RI2006071, NT2RI2006072, NT2RI2006081, NT2RI2006126, NT2RI2006127, NT2RI2006183, NT2RI2006257, NT2RI2006271, NT2RI2006294, NT2RI2006345, NT2RI2006403, NT2RI2006445, NT2RI2006487, NT2RI2006506, NT2RI2006553, NT2RI2006565, NT2RI2006640, NT2RI2006647, NT2RI2006659, NT2RI2006662, NT2RI2006667, NT2RI2006679, NT2RI2006682, NT2RI2006686, NT2RI2006703, NT2RI2006716, NT2RI2006735, NT2RI2006762, NT2RI2006788, NT2RI2006838, NT2RI2006853, NT2RI2006855, NT2RI2006856, NT2RI20069.43, NT2RI2006973, NT2RI2007046, NT2RI2007048, NT2RI2007084, NT2RI2007096,

[3593] NT2RI2007116, NT2RI2007133, NT2RI2007214, NT2RI2007303, NT2RI2007334, NT2RI2007377, NT2RI2007386, NT2RI2007406, NT2RI2007439, NT2RI2007468, NT2RI2007469, NT2RI2007507, NT2RI2007572, NT2RI2007593, NT2RI2007723, NT2RI2007729, NT2RI2007751, NT2RI2007754, NT2RI2007827, NT2RI2007853, NT2RI2007877, NT2RI2007879, NT2RI2007884, NT2RI2007891, NT2RI2007956, NT2RI2007965, NT2RI2008050, NT2RI2008141, NT2RI2008171, NT2RI2008188, NT2RI2008204, NT2RI2008221, NT2RI2008233, NT2RI2008396, NT2RI2008455, NT2RI2008502, NT2RI2008566, NT2RI2008598, NT2RI2008622, NT2RI2008656, NT2RI2008714, NT2RI2008801, NT2RI2008808, NT2RI2008812, NT2RI2008841, NT2RI2008952, NT2RI2009005, NT2RI2009066, NT2RI2009083, NT2RI2009101,

[3594] NT2RI2009103, NT2RI2009144, NT2RI2009151, NT2RI2009173, NT2RI2009194, NT2RI2009215, NT2RI2009233, NT2RI2009239, NT2RI2009259, NT2RI2009281, NT2RI2009289, NT2RI2009301, NT2RI2009517, NT2RI2009585, NT2RI2009595, NT2RI2009855, NT2RI2010283, NT2RI2010508, NT2RI2010795, NT2RI2011422, NT2RI2011450, NT2RI2011683, NT2RI2011803, NT2RI2012350, NT2RI2012659, NT2RI2012726, NT2RI2012990, NT2RI2013345, NT2RI2013357, NT2RI2013373, NT2RI2014551, NT2RI2014683, NT2RI2015239, NT2RI2015342, NT2RI2015533, NT2RI2016128, NT2RI2016134, NT2RI2018311, NT2RI2018363, NT2RI2018448, NT2RI2018883, NT2RI2018950, NT2RI2019751, NT2RI2019826, NT2RI2020390, NT2RI2020703, NT2RI2021463, NT2RI2021625, NT2RI2022584, NT2RI2023303,

[3595] NT2RI2023671, NT2RI2024008, NT2RI2024460, NT2RI2024496, NT2RI2024935, NT2RI2025075, NT2RI2025255, NT2RI2025564, NT2RI2025565, NT2RI2025909, NT2RI2025957, NT2RI2025976, NT2RI2026758, NT2RI2027081, NT2RI2027157, NT2RI2027224, NT2RI2027396, NT2RI2027484, NT2RI2027975, NT2RI2028213, NT2RI2028222, NT2RI2028537, NT2RI2028642, NT2RI3000174, NT2RI3000213, NT2RI3000423, NT2RI3000622, NT2RI3001132, NT2RI3001263, NT2RI3001279, NT2RI3001348, NT2RI3001458, NT2RI3001515, NT2RI3001573, NT2RI3001967, NT2RI3002303, NT2RI3002557, NT2RI3002842, NT2RI3003027, NT2RI3003031, NT2RI3003095, NT2RI3003104, NT2RI3003162, NT2RI3003362, NT2RI3003382, NT2RI3003409, NT2RI3003738, NT2RI3003925, NT2RI3004133, NT2RI3004381,

[3596] NT2RI3004510, NT2RI3005202, NT2RI3005403, NT2RI3005416, NT2RI3005861, NT2RI3005928, NT2RI3006132, NT2RI3006171, NT2RI3006376, NT2RI3006796, NT2RI3007065, NT2RI3007095, NT2RI3007158, NT2RI3007167, NT2RI3007213, NT2RI3007443, NT2RI3007684, NT2RI3007757, NT2RI3007878, NT2RI3007978, NT2RI3008055, NT2RI3008162, NT2RI3008179, NT2RI3008228, NT2RI3008442, NT2RI3008652, NT2RI3008697, NT2RI3008974, NT2RI3009158, NT2RI3009480, NT2RI3009524, NT2RP6000005, NT2RP6000008, NT2RP6000032, NT2RP6000033, NT2RP6000043, NT2RP6000060, NT2RP6000072, NT2RP6000086, NT2RP6000100, NT2RP6000109, NT2RP6000110, NT2RP6000119, NT2RP6000127, NT2RP6000130, NT2RP6000140, NT2RP6000150, NT2RP7000041, NT2RP7000086, NT2RP7000109,

[3597] NT2RP7000112, NT2RP7000238, NT2RP7000259, NT2RP7000271, NT2RP7000311, NT2RP7000359, NT2RP7000364, NT2RP7000380, NT2RP7000391, NT2RP7000425, NT2RP7000579, NT2RP7000624, NT2RP7000812, NT2RP7000926, NT2RP7001074, NT2RP7001080, NT2RP7001156, NT2RP7001231, NT2RP7001283, NT2RP7001306, NT2RP7001319, NT2RP7001335, NT2RP7001364, NT2RP7001475, NT2RP7001532, NT2RP7001591, NT2RP7001602, NT2RP7001678, NT2RP7001856, NT2RP7002064, NT2RP7002151, NT2RP7002163, NT2RP7002243, NT2RP7002282, NT2RP7002450, NT2RP7002478, NT2RP7002554, NT2RP7002594, NT2RP7002603, NT2RP7002619, NT2RP7002650, NT2RP7002738, NT2RP7002779, NT2RP7002829, NT2RP7002841, NT2RP7002906, NT2RP7002978, NT2RP7003025, NT2RP7003050, NT2RP7003084,

[3598] NT2RP7003091, NT2RP7003107, NT2RP7003134, NT2RP7003148, NT2RP7003261, NT2RP7003439, NT2RP7003511, NT2RP7003629, NT2RP7003680, NT2RP7003724, NT2RP7003960, NT2RP7004027, NT2RP7004080, NT2RP7004173, NT2RP7004204, NT2RP7004233, NT2RP7004260, NT2RP7004358, NT2RP7004396, NT2RP7004428, NT2RP7004481, NT2RP7004541, NT2RP7004641, NT2RP7004656, NT2RP7004687, NT2RP7004722, NT2RP7004766, NT2RP7004790, NT2RP7004884, NT2RP7004911, NT2RP7004961, NT2RP7004964, NT2RP7004975, NT2RP7005118, NT2RP7005205, NT2RP7005219, NT2RP7005323, NT2RP7005468, NT2RP7005493, NT2RP7005629, NT2RP7005631, NT2RP7005669, NT2RP7005846, NT2RP7006033, NT2RP7006075, NT2RP7006141, NT2RP7006160, NT2RP7006162, NT2RP7006188, NT2RP7006263,

[3599] NT2RP7006296, NT2RP7006304, NT2RP7006374, NT2RP7006395, NT2RP7006408, NT2RP7006457, NT2RP7006547, NT2RP7006601, NT2RP7006621, NT2RP7006636, NT2RP7006701, NT2RP7006853, NT2RP7006887, NT2RP7006980, NT2RP7006986, NT2RP7006995, NT2RP7007177, NT2RP7007221, NT2RP7007226, NT2RP7007269, NT2RP7007359, NT2RP7007387, NT2RP7007406, NT2RP7007480, NT2RP7007504, NT2RP7007530, NT2RP7007580, NT2RP7007594, NT2RP7007617, NT2RP7007643, NT2RP7007766, NT2RP7007842, NT2RP7007925, NT2RP7007930, NT2RP7007975, NT2RP7008013, NT2RP7008015, NT2RP7008133, NT2RP7008137, NT2RP7008142, NT2RP7008144, NT2RP7008360, NT2RP7008396, NT2RP7008406, NT2RP7008435, NT2RP7008441, NT2RP7008454, NT2RP7008487, NT2RP7008544, NT2RP7008550,

[3600] NT2RP7008557, NT2RP7008623, NT2RP7008657, NT2RP7008714, NT2RP7008720, NT2RP7008855, NT2RP7008863, NT2RP7009012, NT2RP7009019, NT2RP7009030, NT2RP7009108, NT2RP7009149, NT2RP7009168, NT2RP7009215, NT2RP7009225, NT2RP7009236, NT2RP7009253, NT2RP7009267, NT2RP7009322, NT2RP7009363, NT2RP7009370, NT2RP7009373, NT2RP7009394, NT2RP7009397, NT2RP7009429, NT2RP7009439, NT2RP7009466, NT2RP7009481, NT2RP7009498, NT2RP7009502, NT2RP7009507, NT2RP7009577, NT2RP7009743, NT2RP7009867, NT2RP7010109, NT2RP7010128, NT2RP7010235, NT2RP7010275, NT2RP7010521, NT2RP7010599, NT2RP7010817, NT2RP7011086, NT2RP7011132, NT2RP7011268, NT2RP7011318, NT2RP7011452, NT2RP7011570, NT2RP7011721, NT2RP7011909, NT2RP7012291,

[3601] NT2RP7012516, NT2RP7012776, NT2RP7013002, NT2RP7013374, NT2RP7013499, NT2RP7013729, NT2RP7013764, NT2RP7013795, NT2RP7013999, NT2RP7014005, NT2RP7014178, NT2RP7014348, NT2RP7014420, NT2RP7014583, NT2RP7014721, NT2RP7014743, NT2RP7014778, NT2RP7014906, NT2RP7014910, NT2RP7015080, NT2RP7015431, NT2RP7015503, NT2RP7015512, NT2RP7015676, NT2RP7015789, NT2RP7015996, NT2RP7016508, NT2RP7016574, NT2RP7016622, NT2RP7016911, NT2RP7017139, NT2RP7017284, NT2RP7017365, NT2RP7017546, NT2RP7017567, NT2RP7017795, NT2RP7017971, NT2RP7018032, NT2RP7018126, NT2RP7018197, NT2RP7018206, NT2RP7018340, NT2RP7018586, NT2RP7018802, NT2RP7018871, NT2RP7019064, NT2RP7019135, NT2RP7019273, NT2RP7019367, NT2RP7019401,

[3602] NT2RP7019445, NT2RP7019543, NT2RP7019682, NT2RP7019835, NT2RP7020112, NT2RP7020123, NT2RP7020343, NT2RP7020379, NT2RP8000137, NT2RP8000296, NT2RP8000435, NT2RP8000483, NT2RP8000521, NT2RP8000633, NT2RP8001363, NT2RP8001407, NT2RP8001584, NT2RP8001604, NT2RP8001605, NT2RP8003490, NT2RP8003657, NT2RP8003787, NT2RP8004306, NT2RP8005546, NT2RP8006452, NT2RP8006521, NT2RP8007416, NT2RP8007503, NT2RP8007715, NT2RP8007920, NT2RP8008057, NT2RP8009248, NTONG1000006, NTONG1000047, NTONG1000052, NTONG1000075, NTONG1000087, NTONG1000123, NTONG1000130, NTONG1000161, NTONG1000172, NTONG1000213, NTONG1000214, NTONG1000247, NTONG1000257, NTONG1000264, NTONG2000040, NTONG2000107, NTONG2000231, NTONG2000334,

[3603] NTONG2000363, NTONG2000413, NTONG2000492, NTONG2000499, NTONG2000531, NTONG2000583, NTONG2000800, NTONG2000858, NTONG2000878, NTONG2000966, NTONG2000977, NTONG2000985, NTONG2001014, NTONG2001079, NTONG2001137, NTONG2001157, NTONG2001173, NTONG2001220, NTONG2001222, NTONG2001362, NTONG2001428, NTONG2001532, NTONG2001587, NTONG2001612, NTONG2001619, NTONG2001642, NTONG2001657, NTONG2001676, NTONG2001762, NTONG2002278, NTONG2002807, NTONG2002948, NTONG2002970, NTONG2002985, NTONG2003158, NTONG2003210, NTONG2003316, NTONG2003409, NTONG2003515, NTONG2003805, NTONG2003852, NTONG2003897, NTONG2003928, NTONG2004095, NTONG2004308, NTONG2004521, NTONG2004614, NTONG2004690, NTONG2004806, NTONG2004829,

[3604] NTONG2004918, NTONG2004991, NTONG2005062, NTONG2005086, NTONG2005137, NTONG2005153, NTONG2005265, NTONG2005277, NTONG2005373, NTONG2005480, NTONG2005497, NTONG2005577, NTONG2005657, NTONG2005822, NTONG2005969, NTONG2006099, NTONG2006187, NTONG2006301, NTONG2006324, NTONG2006354, NTONG2006440, NTONG2006484, NTONG2006501, NTONG2006646, NTONG2006709, NTONG2006783, NTONG2007020, NTONG2007028, NTONG2007034, NTONG2007249, NTONG2007517, NTONG2007522, NTONG2007658, NTONG2007693, NTONG2007756, NTONG2008088, NTONG2008093, NTONG2008143, NTONG2008365, NTONG2008483, NTONG2008522, NTONG2008672, NTONG2008862, NTONG2008939, NTONG2009060, NTONG2009068, NTONG2009229, NTONG2009233, NTONG2009468, NTONG2009576,

[3605] OCBBF1000016, OCBBF1000030, OCBBF1000042, OCBBF1000049, OCBBF1000054, OCBBF1000067, OCBBF1000080, OCBBF1000085, OCBBF1000091, OCBBF1000104, OCBBF1000114, OCBBF1000118, OCBBF1000119, OCBBF1000122, OCBBF1000130, OCBBF1000138, OCBBF1000145, OCBBF1000146, OCBBF1000153, OCBBF1000185, OCBBF1000188, OCBBF1000192, OCBBF1000254, OCBBF1000315, OCBBF2000013, OCBBF2000126, OCBBF2000178, OCBBF2000231, OCBBF2000277, OCBBF2000287, OCBBF2000323, OCBBF2000452, OCBBF2000522, OCBBF2000703, OCBBF2000712, OCBBF2000719, OCBBF2000824, OCBBF2000831, OCBBF2000846, OCBBF2000904, OCBBF2000982, OCBBF2000998, OCBBF2001075, OCBBF2001101, OCBBF2001124, OCBBF2001140, OCBBF2001176, OCBBF2001186, OCBBF2001196, OCBBF2001252,

[3606] OCBBF2001307, OCBBF2001389, OCBBF2001402, OCBBF2001408, OCBBF2001416, OCBBF2001473, OCBBF2001492, OCBBF2001494, OCBBF2001527, OCBBF2001528, OCBBF2001639, OCBBF2001681, OCBBF2001687, OCBBF2001706, OCBBF2001749, OCBBF2001794, OCBBF2001910, OCBBF2001931, OCBBF2001983, OCBBF2002015, OCBBF2002083, OCBBF2002124, OCBBF2002161, OCBBF2002290, OCBBF2002357, OCBBF2002376, OCBBF2002615, OCBBF2002626, OCBBF2002663, OCBBF2002805, OCBBF2002865, OCBBF2002920, OCBBF2002980, OCBBF2003028, OCBBF2003052, OCBBF2003091, OCBBF2003327, OCBBF2003518, OCBBF2003543, OCBBF2003593, OCBBF2003744, OCBBF2003819, OCBBF2004038, OCBBF2004104, OCBBF2004147, OCBBF2004168, OCBBF2004235, OCBBF2004259, OCBBF2004385, OCBBF2004418,

[3607] OCBBF2004478, OCBBF2004482, OCBBF2004533, OCBBF2004567, OCBBF2004612, OCBBF2004647, OCBBF2004669, OCBBF2004826, OCBBF2004866, OCBBF2004883, OCBBF2004889, OCBBF2004930, OCBBF2004984, OCBBF2005066, OCBBF2005077, OCBBF2005161, OCBBF2005343, OCBBF2005349, OCBBF2005373, OCBBF2005420, OCBBF2005428, OCBBF2005433, OCBBF2005546, OCBBF2005843, OCBBF2005901, OCBBF2006005, OCBBF2006030, OCBBF2006058, OCBBF2006113, OCBBF2006148, OCBBF2006151, OCBBF2006154, OCBBF2006172, OCBBF2006214, OCBBF2006241, OCBBF2006388, OCBBF2006438, OCBBF2006567, OCBBF2006624, OCBBF2006639, OCBBF2006660, OCBBF2006764, OCBBF2006859, OCBBF2006972, OCBBF2006987, OCBBF2007039, OCBBF2007051, OCBBF2007068, OCBBF2007114, OCBBF2007121,

[3608] OCBBF2007184, OCBBF2007194, OCBBF2007196, OCBBF2007224, OCBBF2007238, OCBBF2007354, OCBBF2007414, OCBBF2007428, OCBBF2007478, OCBBF2007485, OCBBF2007520, OCBBF2007555, OCBBF2007610, OCBBF2007622, OCBBF2007756, OCBBF2007762, OCBBF2007892, OCBBF2007931, OCBBF2007946, OCBBF2008041, OCBBF2008116, OCBBF2008138, OCBBF2008283, OCBBF2008330, OCBBF2008340, OCBBF2008366, OCBBF2008466, OCBBF2008483, OCBBF2008511, OCBBF2008520, OCBBF2008569, OCBBF2008586, OCBBF2008640, OCBBF2008691, OCBBF2008701, OCBBF2008724, OCBBF2008760, OCBBF2008768, OCBBF2008770, OCBBF2008775, OCBBF2008790, OCBBF2008814, OCBBF2008822, OCBBF2009095, OCBBF2009115, OCBBF2009352, OCBBF2009391, OCBBF2009536, OCBBF2009571, OCBBF2009583,

[3609] OCBBF2009603, OCBBF2009788, OCBBF2009836, OCBBF2009920, OCBBF2009926, OCBBF2010040, OCBBF2010140, OCBBF2010281, OCBBF2010404, OCBBF2010416, OCBBF2010420, OCBBF2010604, OCBBF2010709, OCBBF2010792, OCBBF2010819, OCBBF2010841, OCBBF2010843, OCBBF2010858, OCBBF2010863, OCBBF2010871, OCBBF2010931, OCBBF2010978, OCBBF2010989, OCBBF2011073, OCBBF2011137, OCBBF2011160, OCBBF2011177, OCBBF2011283, OCBBF2011311, OCBBF2011625, OCBBF2011669, OCBBF2011685, OCBBF2011706, OCBBF2011722, OCBBF2011767, OCBBF2011855, OCBBF2011872, OCBBF2011887, OCBBF2011897, OCBBF2011914, OCBBF2011960, OCBBF2011981, OCBBF2012001, OCBBF2012028, OCBBF2012039, OCBBF2012095, OCBBF2012139, OCBBF2012191, OCBBF2012262, OCBBF2012320,

[3610] OCBBF2012436, OCBBF2012525, OCBBF2012553, OCBBF2012678, OCBBF2012704, OCBBF2012714, OCBBF2012755, OCBBF2012812, OCBBF2012821, OCBBF2012881, OCBBF2012908, OCBBF2012936, OCBBF2012990, OCBBF2013011, OCBBF2013049, OCBBF2013091, OCBBF2013123, OCBBF2013127, OCBBF2013208, OCBBF2013285, OCBBF2013319, OCBBF2013324, OCBBF2013366, OCBBF2013481, OCBBF2013507, OCBBF2013721, OCBBF2013789, OCBBF2013883, OCBBF2013926, OCBBF2014052, OCBBF2014089, OCBBF2014322, OCBBF2014386, OCBBF2014541, OCBBF2014576, OCBBF2014707, OCBBF2014745, OCBBF2014828, OCBBF2014873, OCBBF2014880, OCBBF2014928, OCBBF2015031, OCBBF2015081, OCBBF2015115, OCBBF2015232, OCBBF2015233, OCBBF2015285, OCBBF2015334, OCBBF2015335, OCBBF2015503,

[3611] OCBBF2015506, OCBBF2015599, OCBBF2015645, OCBBF2015659, OCBBF2015751, OCBBF2015797, OCBBF2015931, OCBBF2015980, OCBBF2016038, OCBBF2016405, OCBBF2016467, OCBBF2016590, OCBBF2016591, OCBBF2016612, OCBBF2016689, OCBBF2016690, OCBBF2016729, OCBBF2016841, OCBBF2016928, OCBBF2017035, OCBBF2017055, OCBBF2017069, OCBBF2017306, OCBBF2017325, OCBBF2017458, OCBBF2017489, OCBBF2017516, OCBBF2017665, OCBBF2017815, OCBBF2017888, OCBBF2017893, OCBBF2017920, OCBBF2018014, OCBBF2018084, OCBBF2018167, OCBBF2018206, OCBBF2018229, OCBBF2018234, OCBBF2018362, OCBBF2018380, OCBBF2018581, OCBBF2018618, OCBBF2018663, OCBBF2018687, OCBBF2018707, OCBBF2018827, OCBBF2018828, OCBBF2018934, OCBBF2019108, OCBBF2019195,

[3612] OCBBF2019327, OCBBF2019684, OCBBF2019761, OCBBF2019823, OCBBF2019950, OCBBF2020048, OCBBF2020318, OCBBF2020343, OCBBF2020453, OCBBF2020801, OCBBF2020825, OCBBF2020838, OCBBF2021020, OCBBF2021214, OCBBF2021286, OCBBF2021323, OCBBF2021518, OCBBF2021788, OCBBF2022351, OCBBF2022573, OCBBF2022574, OCBBF2023162, OCBBF2023598, OCBBF2023643, OCBBF2024463, OCBBF2024589, OCBBF2024719, OCBBF2024779, OCBBF2024781, OCBBF2025028, OCBBF2025115, OCBBF2025198, OCBBF2025451, OCBBF2025458, OCBBF2025527, OCBBF2025631, OCBBF2025730, OCBBF2026025, OCBBF2026035, OCBBF2026144, OCBBF2026645, OCBBF2026649, OCBBF2026690, OCBBF2026981, OCBBF2027197, OCBBF2027354, OCBBF2027423, OCBBF2027478, OCBBF2027481, OCBBF2027511,

[3613] OCBBF2027661, OCBBF2027728, OCBBF2027782, OCBBF2027868, OCBBF2028055, OCBBF2028173, OCBBF2028421, OCBBF2029471, OCBBF2029901, OCBBF2030116, OCBBF2030329, OCBBF2030354, OCBBF2030517, OCBBF2030574, OCBBF2030708, OCBBF2030927, OCBBF2030963, OCBBF2031167, OCBBF2031198, OCBBF2031366, OCBBF2031561, OCBBF2032152, OCBBF2032274, OCBBF2032539, OCBBF2032590, OCBBF2032599, OCBBF2032611, OCBBF2032671, OCBBF2033295, OCBBF2033413, OCBBF2033869, OCBBF2033948, OCBBF2034333, OCBBF2034529, OCBBF2034637, OCBBF2034906, OCBBF2035110, OCBBF2035214, OCBBF2035226, OCBBF2035390, OCBBF2035564, OCBBF2035658, OCBBF2035823, OCBBF2035885, OCBBF2035916, OCBBF2036019, OCBBF2036031, OCBBF2036225, OCBBF2036476, OCBBF2036752,

[3614] OCBBF2037068, OCBBF2037340, OCBBF2037398, OCBBF2037464, OCBBF2037547, OCBBF2037598, OCBBF2037638, OCBBF2038238, OCBBF2038285, OCBBF2038317, OCBBF3000097, OCBBF3000213, OCBBF3000296, OCBBF3000323, OCBBF3000372, OCBBF3000380, OCBBF3000743, OCBBF3000830, OCBBF3001076, OCBBF3001202, OCBBF3001616, OCBBF3002553, OCBBF3002600, OCBBF3002654, OCBBF3003103, OCBBF3003209, OCBBF3003592, OCBBF3003745, OCBBF3003761, OCBBF3004264, OCBBF3004314, OCBBF3004972, OCBBF3005330, OCBBF3005597, OCBBF3005843, OCBBF3006802, OCBBF3006986, OCBBF3007078, OCBBF3007704, OCBBF3008230, OCBBF3008392, OCBBF3008835, OCBBF3009192, OCBBF3009244, OCBBF3009279, PANCR1000012, PANCR1000021, PANCR1000081, PANCR1000086, PANCR1000091,

[3615] PANCR1000185, PEBLM1000024, PEBLM1000029, PEBLM1000034, PEBLM1000062, PEBLM1000066, PEBLM1000068, PEBLM1000071, PEBLM1000083, PEBLM1000147, PEBLM1000174, PEBLM1000180, PEBLM2000112, PEBLM2000126, PEBLM2000170, PEBLM2000180, PEBLM2000213, PEBLM2000222, PEBLM2000248, PEBLM2000267, PEBLM2000270, PEBLM2000308, PEBLM2000321, PEBLM2000333, PEBLM2000338, PEBLM2000395, PEBLM2000479, PEBLM2000502, PEBLM2001072, PEBLM2001312, PEBLM2001465, PEBLM2001488, PEBLM2001803, PEBLM2002432, PEBLM2002455, PEBLM2002594, PEBLM2002749, PEBLM2002887, PEBLM2003426, PEBLM2003765, PEBLM2003914, PEBLM2003935, PEBLM2004015, PEBLM2004216, PEBLM2004290, PEBLM2004497, PEBLM2004666, PEBLM2004733, PEBLM2005282, PEBLM2005615,

[3616] PEBLM2005632, PEBLM2005697, PEBLM2006031, PEBLM2006036, PEBLM2006049, PEBLM2006113, PEBLM2006135, PEBLM2006215, PEBLM2006283, PEBLM2006298, PEBLM2006912, PEBLM2007112, PEBLM2007140, PEBLM2007188, PEBLM2007296, PEBLM2007437, PEBLM2007447, PEBLM2007598, PEBLM2007774, PEBLM2007832, PEBLM2007834, PEBLM2008106, PEBLM2008576, PEBLM2008605, PEBLM2008826, PEBLM2008861, PERIC1000025, PERIC1000147, PERIC2000180, PERIC2000214, PERIC2000386, PERIC2000387, PERIC2000422, PERIC2000473, PERIC2000478, PERIC2000889, PERIC2000914, PERIC2001227, PERIC2001228, PERIC2001379, PERIC2001504, PERIC2001703, PERIC2001764, PERIC2002243, PERIC2002272, PERIC2002452, PERIC2002766, PERIC2003001, PERIC2003090, PERIC2003287,

[3617] PERIC2003349, PERIC2003452, PERIC2003699, PERIC2003720, PERIC2003794, PERIC2003834, PERIC2003919, PERIC2003957, PERIC2004028, PERIC2004131, PERIC2004259, PERIC2004379, PERIC2004429, PERIC2004510, PERIC2004613, PERIC2004909, PERIC2005111, PERIC2005117, PERIC2005305, PERIC2005347, PERIC2005370, PERIC2005936, PERIC2006035, PERIC2006121, PERIC2006945, PERIC2006960, PERIC2007439, PERIC2007914, PERIC2008008, PERIC2008385, PERIC2009001, PERIC2009086, PERIC2009329, PERIC2009566, PLACE5000001, PLACE5000037, PLACE5000058, PLACE5000066, PLACE5000067, PLACE5000068, PLACE5000070, PLACE5000080, PLACE5000105, PLACE5000115, PLACE5000116, PLACE5000129, PLACE5000139, PLACE5000153, PLACE5000171, PLACE5000172,

[3618] PLACE5000178, PLACE5000245, PLACE5000260, PLACE5000282, PLACE5000297, PLACE5000492, PLACE5000522, PLACE5000527, PLACE6000012, PLACE6000044, PLACE6000055, PLACE6000070, PLACE6000137, PLACE6000191, PLACE6000205, PLACE6000231, PLACE6000296, PLACE6000314, PLACE6000325, PLACE6000348, PLACE6000371, PLACE6000424, PLACE6000426, PLACE6000429, PLACE6000450, PLACE6000463, PLACE6000523, PLACE6000550, PLACE6000552, PLACE6000555, PLACE6000619, PLACE6000630, PLACE6000953, PLACE6001118, PLACE6001153, PLACE6001262, PLACE6001294, PLACE6001536, PLACE6001557, PLACE6001712, PLACE6001740, PLACE6001823, PLACE6001923, PLACE6001925, PLACE6001933, PLACE6002011, PLACE6002016, PLACE6002056, PLACE6002157, PLACE6002312,

[3619] PLACE6002323, PLACE6002345, PLACE6002419, PLACE6002462, PLACE6002647, PLACE6002692, PLACE6002699, PLACE6002710, PLACE6002871, PLACE6002949, PLACE6003004, PLACE6003038, PLACE6003077, PLACE6003094, PLACE6003109, PLACE6003204, PLACE6003372, PLACE6003393, PLACE6003399, PLACE6003539, PLACE6003621, PLACE6003705, PLACE6003740, PLACE6003745, PLACE6003771, PLACE6003796, PLACE6003839, PLACE6003850, PLACE6004101, PLACE6004219, PLACE6004336, PLACE6004368, PLACE6004380, PLACE6004396, PLACE6004454, PLACE6004464, PLACE6004578, PLACE6004663, PLACE6004687, PLACE6004931, PLACE6004966, PLACE6004993, PLACE6005007, PLACE6005029, PLACE6005108, PLACE6005231, PLACE6005234, PLACE6005283, PLACE6005294, PLACE6005328,

[3620] PLACE6005351, PLACE6005423, PLACE6005487, PLACE6005535, PLACE6005546, PLACE6005559, PLACE6005579, PLACE6005691, PLACE6005786, PLACE6006077, PLACE6006158, PLACE6006217, PLACE6006222, PLACE6006266, PLACE6006287, PLACE6006394, PLACE6006418, PLACE6006474, PLACE6006566, PLACE6006697, PLACE6006822, PLACE6006871, PLACE6006905, PLACE6006988, PLACE6007050, PLACE6007180, PLACE6007239, PLACE6007242, PLACE6007309, PLACE6007373, PLACE6007380, PLACE6007433, PLACE6007436, PLACE6007482, PLACE6007687, PLACE6007787, PLACE6007798, PLACE6007807, PLACE6007925, PLACE6008036, PLACE6008094, PLACE6008126, PLACE6008285, PLACE6008444, PLACE6008453, PLACE6008640, PLACE6008750, PLACE6008768, PLACE6008793, PLACE6008989,

[3621] PLACE6009006, PLACE6009008, PLACE6009228, PLACE6009237, PLACE6009419, PLACE6009430, PLACE6009482, PLACE6009524, PLACE6009527, PLACE6009560, PLACE6009590, PLACE6009821, PLACE6009835, PLACE6009853, PLACE6010463, PLACE6010484, PLACE6010485, PLACE6010568, PLACE6010701, PLACE6010704, PLACE6010732, PLACE6010765, PLACE6010848, PLACE6010925, PLACE6010936, PLACE6010991, PLACE6011041, PLACE6011102, PLACE6011156, PLACE6011211, PLACE6011260, PLACE6011334, PLACE6011627, PLACE6011774, PLACE6011881, PLACE6011907, PLACE6011970, PLACE6011975, PLACE6012028, PLACE6012108, PLACE6012168, PLACE6012297, PLACE6012308, PLACE6012574, PLACE6012908, PLACE6012936, PLACE6013222, PLACE6013232, PLACE6013288, PLACE6013386,

[3622] PLACE6013400, PLACE6013650, PLACE6013672, PLACE6013883, PLACE6013884, PLACE6013885, PLACE6014043, PLACE6014064, PLACE6014516, PLACE6014882, PLACE6015051, PLACE6015211, PLACE6015322, PLACE6015445, PLACE6015460, PLACE6015513, PLACE6015591, PLACE6015729, PLACE6015939, PLACE6016030, PLACE6016093, PLACE6016105, PLACE6016160, PLACE6016210, PLACE6016254, PLACE6016942, PLACE6016984, PLACE6017002, PLACE6017564, PLACE6017578, PLACE6017626, PLACE6017701, PLACE6017714, PLACE6017788, PLACE6017791, PLACE6018031, PLACE6018107, PLACE6018187, PLACE6018235, PLACE6018287, PLACE6018441, PLACE6018487, PLACE6018497, PLACE6018769, PLACE6018834, PLACE6018843, PLACE6018863, PLACE6019195, PLACE6019385, PLACE6019542,

[3623] PLACE6019600, PLACE6019674, PLACE6019676, PLACE6019701, PLACE6019932, PLACE6020031, PLACE6020145, PLACE7000167, PLACE7000170, PLACE7000266, PLACE7000333, PLACE7000410, PLACE7000502, PLACE7000707, PLACE7001022, PLACE7001544, PLACE7001759, PLACE7001936, PLACE7002303, PLACE7002641, PLACE7003639, PLACE7003657, PLACE7003684, PLACE7003985, PLACE7004103, PLACE7004961, PLACE7005169, PLACE7005671, PLACE7005840, PLACE7006051, PLACE7006090, PLACE7006268, PLACE7006275, PLACE7006498, PLACE7006540, PLACE7007379, PLACE7007644, PLACE7007973, PLACE7008136, PLACE7008261, PLACE7008431, PLACE7008623, PLACE7008766, PLACE7009563, PROST1000033, PROST1000039, PROST1000065, PROST1000083, PROST1000085, PROST1000110,

[3624] PROST1000120, PROST1000123, PROST1000136, PROST1000144, PROST1000145, PROST1000152, PROST1000167, PROST1000184, PROST1000215, PROST1000217, PROST1000262, PROST1000272, PROST1000298, PROST1000322, PROST1000334, PROST1000343, PROST1000362, PROST1000377, PROST1000383, PROST1000412, PROST1000419, PROST1000451, PROST1000480, PROST1000485, PROST1000493, PROST1000512, PROST1000527, PROST1000528, PROST1000536, PROST1000559, PROST1000575, PROST2000036, PROST2000053, PROST2000067, PROST2000079, PROST2000105, PROST2000143, PROST2000162, PROST2000165, PROST2000176, PROST2000203, PROST2000206, PROST2000212, PROST2000241, PROST2000267, PROST2000274, PROST2000277, PROST2000284, PROST2000325, PROST2000337,

[3625] PROST2000432, PROST2000452, PROST2000463, PROST2000470, PROST2000505, PROST2000567, PROST2000572, PROST2000717, PROST2000760, PROST2000761, PROST2000835, PROST2000893, PROST2000961, PROST2001002, PROST2001116, PROST2001138, PROST2001180, PROST2001213, PROST2001283, PROST2001414, PROST2001415, PROST2001465, PROST2001521, PROST2001540, PROST2001552, PROST2001599, PROST2001611, PROST2001636, PROST2001739, PROST2001796, PROST2001805, PROST2001823, PROST2001883, PROST2001899, PROST2001997, PROST2001998, PROST2002078, PROST2002101, PROST2002162, PROST2002212, PROST2002227, PROST2002338, PROST2002425, PROST2002488, PROST2002489, PROST2002527, PROST2002591, PROST2002602, PROST2002633, PROST2002682,

[3626] PROST2002685, PROST2002722, PROST2002736, PROST2002842, PROST2002897, PROST2002906, PROST2002927, PROST2002960, PROST2003102, PROST2003117, PROST2003210, PROST2003302, PROST2003303, PROST2003324, PROST2003340, PROST2003428, PROST2003472, PROST2003517, PROST2003537, PROST2003563, PROST2003577, PROST2003583, PROST2003586, PROST2003628, PROST2003635, PROST2003674, PROST2003676, PROST2003725, PROST2003732, PROST2003775, PROST2003922, PROST2003930, PROST2004115, PROST2004142, PROST2004146, PROST2004161, PROST2004251, PROST2004332, PROST2004481, PROST2004526, PROST2004570, PROST2004727, PROST2004739, PROST2004742, PROST2004744, PROST2004817, PROST2005039, PROST2005067, PROST2005076, PROST2005093,

[3627] PROST2005121, PROST2005131, PROST2005143, PROST2005228, PROST2005272, PROST2005426, PROST2005466, PROST2005630, PROST2005683, PROST2005788, PROST2005793, PROST2005880, PROST2005886, PROST2005904, PROST2005919, PROST2005943, PROST2006008, PROST2006020, PROST2006060, PROST2006196, PROST2006201, PROST2006260, PROST2006282, PROST2006343, PROST2006450, PROST2006491, PROST2006510, PROST2006579, PROST2006688, PROST2006766, PROST2006782, PROST2006933, PROST2006988, PROST2007122, PROST2007237, PROST2007248, PROST2007289, PROST2007317, PROST2007328, PROST2007382, PROST2007389, PROST2007416, PROST2007528, PROST2007612, PROST2007818, PROST2007871, PROST2007950, PROST2007956, PROST2007974, PROST2007988,

[3628] PROST2008079, PROST2008088, PROST2008243, PROST2008245, PROST2008268, PROST2008360, PROST2008447, PROST2008468, PROST2008472, PROST2008516, PROST2008724, PROST2008835, PROST2008993, PROST2009022, PROST2009208, PROST2009222, PROST2009254, PROST2009273, PROST2009320, PROST2009347, PROST2009365, PROST2009388, PROST2009400, PROST2009470, PROST2009483, PROST2009571, PROST2009731, PROST2009736, PROST2009795, PROST2009901, PROST2009909, PROST2010046, PROST2010219, PROST2010250, PROST2010326, PROST2010382, PROST2010400, PROST2010579, PROST2010606, PROST2010885, PROST2011012, PROST2011038, PROST2011105, PROST2011297, PROST2011410, PROST2011439, PROST2011482, PROST2011577, PROST2011631, PROST2011660,

[3629] PROST2012005, PROST2012016, PROST2012088, PROST2012140, PROST2012157, PROST2012190, PROST2012249, PROST2012353, PROST2012400, PROST2012504, PROST2012542, PROST2012550, PROST2012740, PROST2012745, PROST2012780, PROST2012888, PROST2013032, PROST2013053, PROST2013121, PROST2013260, PROST2013327, PROST2013531, PROST2013605, PROST2013627, PROST2013873, PROST2013880, PROST2014422, PROST2014585, PROST2014601, PROST2014659, PROST2014862, PROST2014925, PROST2015124, PROST2015137, PROST2015198, PROST2015243, PROST2015246, PROST2015251, PROST2015287, PROST2015332, PROST2015457, PROST2015464, PROST2015537, PROST2015545, PROST2015551, PROST2015636, PROST2015710, PROST2015756, PROST2015877, PROST2015900,

[3630] PROST2015932, PROST2016195, PROST2016246, PROST2016351, PROST2016379, PROST2016444, PROST2016462, PROST2016499, PROST2016512, PROST2016566, PROST2016582, PROST2016668, PROST2016684, PROST2016777, PROST2016829, PROST2016860, PROST2016980, PROST2017098, PROST2017128, PROST2017367, PROST2017413, PROST2017441, PROST2017529, PROST2017578, PROST2017612, PROST2017700, PROST2017701, PROST2017729, PROST2017836, PROST2017910, PROST2017972, PROST2018030, PROST2018090, PROST2018235, PROST2018437, PROST2018487, PROST2018511, PROST2018583, PROST2018588, PROST2018607, PROST2018788, PROST2018902, PROST2018922, PROST2019164, PROST2019253, PROST2019296, PROST2019398, PROST2019487, PROST2019781, PUAEN1000039,

[3631] PUAEN1000081, PUAEN1000085, PUAEN1000087, PUAEN1000121, PUAEN1000147, PUAEN1000161, PUAEN1000175, PUAEN1000275, PUAEN1000276, PUAEN1000288, PUAEN1000322, PUAEN2000080, PUAEN2000152, PUAEN2000175, PUAEN2000247, PUAEN2000312, PUAEN2000394, PUAEN2000497, PUAEN2000535, PUAEN2000594, PUAEN2000684, PUAEN2000942, PUAEN2001260, PUAEN2001345, PUAEN2001526, PUAEN2001882, PUAEN2002473, PUAEN2002489, PUAEN2002552, PUAEN2002568, PUAEN2002616, PUAEN2002758, PUAEN2003018, PUAEN2003079, PUAEN2003116, PUAEN2003408, PUAEN2003517, PUAEN2003954, PUAEN2004067, PUAEN2004083, PUAEN2004400, PUAEN2004511, PUAEN2004525, PUAEN2004875, PUAEN2005110, PUAEN2005247, PUAEN2005502, PUAEN2005588, PUAEN2005930, PUAEN2006029,

[3632] PUAEN2006328, PUAEN2006335, PUAEN2006578, PUAEN2006639, PUAEN2006761, PUAEN2007350, PUAEN2007785, PUAEN2007898, PUAEN2008123, PUAEN2008314, PUAEN2008515, PUAEN2008815, PUAEN2008939, PUAEN2008980, PUAEN2008985, PUAEN2009174, PUAEN2009348, PUAEN2009534, PUAEN2009795, PUAEN2009852, PUAEN2010346, PUAEN2010824, RECTM1000051, RECTM1000141, RECTM2000220, RECTM2000349, RECTM2000433, RECTM2000510, RECTM2001307, RECTM2001347, RECTM2001519, RECTM2001666, RECTM2001691, RECTM2001749, RECTM2002172, RECTM2002602, RECTM2002632, SALGL1000005, SALGL1000024, SALGL1000028, SALGL1000047, SALGL1000065, SALGL1000107, SALGL1000171, SKMUS1000030, SKMUS1000064, SKMUS1000067, SKMUS1000102, SKMUS1000104, SKMUS1000110,

[3633] SKMUS1000118, SKMUS1000124, SKMUS1000129, SKMUS1000176, SKMUS2000061, SKMUS2000074, SKMUS2000078, SKMUS2000117, SKMUS2000137, SKMUS2000198, SKMUS2000243, SKMUS2000271, SKMUS2000287, SKMUS2000317, SKMUS2000330, SKMUS2000339, SKMUS2000365, SKMUS2000390, SKMUS2000416, SKMUS2000458, SKMUS2000467, SKMUS2000468, SKMUS2000484, SKMUS2000515, SKMUS2000679, SKMUS2000690, SKMUS2000701, SKMUS2000705, SKMUS2000710, SKMUS2000724, SKMUS2000726, SKMUS2000757, SKMUS2000774, SKMUS2000780, SKMUS2000821, SKMUS2000847, SKMUS2000863, SKMUS2000894, SKMUS2000898, SKMUS2000933, SKMUS2000945, SKMUS2000961, SKMUS2000973, SKMUS2000980, SKMUS2001008, SKMUS2001014, SKMUS2001147, SKMUS2001157, SKMUS2001164, SKMUS2001199,

[3634] SKMUS2001201, SKMUS2001215, SKMUS2001247, SKMUS2001254, SKMUS2001271, SKMUS2001287, SKMUS2001323, SKMUS2001364, SKMUS2001398, SKMUS2001402, SKMUS2001412, SKMUS2001492, SKMUS2001528, SKMUS2001543, SKMUS2001580, SKMUS2001585, SKMUS2001608, SKMUS2001631, SKMUS2001634, SKMUS2001662, SKMUS2001663, SKMUS2001668, SKMUS2001671, SKMUS2001683, SKMUS2001693, SKMUS2001695, SKMUS2001703, SKMUS2001740, SKMUS2001742, SKMUS2001823, SKMUS2001850, SKMUS2002077, SKMUS2002084, SKMUS2002153, SKMUS2002475, SKMUS2002602, SKMUS2002634, SKMUS2002693, SKMUS2002821, SKMUS2002840, SKMUS2002920, SKMUS2003034, SKMUS2003074, SKMUS2003168, SKMUS2003194, SKMUS2003744, SKMUS2004044, SKMUS2004047, SKMUS2004483, SKMUS2004667,

[3635] SKMUS2004897, SKMUS2004903, SKMUS2004908, SKMUS2005428, SKMUS2006394, SKMUS2006481, SKMUS2006755, SKMUS2007315, SKMUS2007359, SKMUS2007568, SKMUS2007740, SKMUS2007816, SKMUS2007915, SKMUS2008338, SKMUS2008407, SKMUS2008474, SKMUS2008585, SKMUS2008607, SKMUS2009190, SKMUS2009232, SKMUS2009479, SKMUS2009557, SKNMC1000123, SKNMC1000124, SKNMC1000159, SKNMC1000229, SKNMC1000264, SKNMC2000224, SKNMC2000256, SKNMC2000322, SKNMC2000356, SKNMC2000374, SKNMC2000583, SKNMC2000593, SKNMC2000612, SKNMC2000622, SKNMC2000698, SKNMC2000966, SKNMC2001113, SKNMC2001324, SKNMC2001503, SKNMC2001555, SKNMC2001596, SKNMC2001623, SKNMC2002402, SKNMC2003639, SKNMC2003924, SKNMC2003987, SKNMC2004457, SKNMC2004643,

[3636] SKNMC2004651, SKNMC2005772, SKNMC2006173, SKNMC2006327, SKNMC2006998, SKNMC2007134, SKNMC2007502, SKNMC2007504, SKNMC2007961, SKNMC2009450, SKNSH1000002, SKNSH1000101, SKNSH1000174, SKNSH1000301, SKNSH1000308, SKNSH1000416, SKNSH2000051, SKNSH2000101, SKNSH2000151, SKNSH2000163, SKNSH2000250, SKNSH2000319, SKNSH2000516, SKNSH2000550, SKNSH2000716, SKNSH2000971, SKNSH2001222, SKNSH2001875, SKNSH2001931, SKNSH2002054, SKNSH2002768, SKNSH2002866, SKNSH2003064, SKNSH2003174, SKNSH2003422, SKNSH2003466, SKNSH2003483, SKNSH2003633, SKNSH2004039, SKNSH2005061, SKNSH2005120, SKNSH2005194, SKNSH2005240, SKNSH2005792, SKNSH2005816, SKNSH2005981, SKNSH2006234, SKNSH2006304, SKNSH2006432, SKNSH2006822,

[3637] SKNSH2007142, SKNSH2007149, SKNSH2007429, SKNSH2007739, SKNSH2008940, SKNSH2008969, SKNSH2009197, SKNSH2009357, SKNSH2009435, SKNSH2009991, SKNSH2010015, SMINT1000012, SMINT1000016, SMINT1000039, SMINT1000048, SMINT1000051, SMINT1000054, SMINT1000057, SMINT1000071, SMINT1000075, SMINT1000078, SMINT1000091, SMINT1000103, SMINT1000118, SMINT1000137, SMINT1000192, SMINT2000007, SMINT2000018, SMINT2000032, SMINT2000040, SMINT2000060, SMINT2000073, SMINT2000084, SMINT2000145, SMINT2000176, SMINT2000185, SMINT2000227, SMINT2000229, SMINT2000232, SMINT2000239, SMINT2000267, SMINT2000400, SMINT2000454, SMINT2000518, SMINT2000529, SMINT2000530, SMINT2000537, SMINT2000538, SMINT2000541, SMINT2000558,

[3638] SMINT2000562, SMINT2000568, SMINT2000602, SMINT2000609, SMINT2000659, SMINT2000694, SMINT2000747, SMINT2000811, SMINT2000824, SMINT2000933, SMINT2000984, SMINT2001114, SMINT2001158, SMINT2001183, SMINT2001199, SMINT2001222, SMINT2001348, SMINT2001397, SMINT2001458, SMINT2001461, SMINT2001535, SMINT2001559, SMINT2001609, SMINT2001615, SMINT2001683, SMINT2001731, SMINT2001812, SMINT2001818, SMINT2002126, SMINT2002202, SMINT2002210, SMINT2002224, SMINT2002281, SMINT2002311, SMINT2002328, SMINT2002414, SMINT2002457, SMINT2002620, SMINT2002743, SMINT2002880, SMINT2002882, SMINT2002884, SMINT2002899, SMINT2002974, SMINT2003003, SMINT2003074, SMINT2003128, SMINT2003150, SMINT2003317, SMINT2003340,

[3639] SMINT2003386, SMINT2003423, SMINT2003505, SMINT2003551, SMINT2003569, SMINT2003641, SMINT2003644, SMINT2003866, SMINT2003905, SMINT2004023, SMINT2004037, SMINT2004047, SMINT2004086, SMINT2004144, SMINT2004280, SMINT2004299, SMINT2004339, SMINT2004350, SMINT2004414, SMINT2004473, SMINT2004547, SMINT2004583, SMINT2004729, SMINT2004781, SMINT2004872, SMINT2004891, SMINT2004909, SMINT2004972, SMINT2004992, SMINT2005075, SMINT2005161, SMINT2005174, SMINT2005213, SMINT2005330, SMINT2005387, SMINT2005402, SMINT2005405, SMINT2005621, SMINT2005623, SMINT2005624, SMINT2005688, SMINT2005800, SMINT2006078, SMINT2006205, SMINT2006331, SMINT2006596, SMINT2006641, SMINT2006648, SMINT2006708, SMINT2006716,

[3640] SMINT2007062, SMINT2007101, SMINT2007140, SMINT2007219, SMINT2007294, SMINT2007365, SMINT2007391, SMINT2007433, SMINT2007508, SMINT2007526, SMINT2007579, SMINT2007647, SMINT2007729, SMINT2007790, SMINT2007792, SMINT2007796, SMINT2007867, SMINT2007932, SMINT2008042, SMINT2008054, SMINT2008133, SMINT2008277, SMINT2008329, SMINT2008455, SMINT2008491, SMINT2008531, SMINT2008545, SMINT2008558, SMINT2008590, SMINT2008625, SMINT2008672, SMINT2008690, SMINT2008715, SMINT2008720, SMINT2008817, SMINT2008844, SMINT2008869, SMINT2008917, SMINT2008921, SMINT2009119, SMINT2009121, SMINT2009212, SMINT2009216, SMINT2009233, SMINT2009259, SMINT2009272, SMINT2009292, SMINT2009363, SMINT2009415, SMINT2009468,

[3641] SMINT2009505, SMINT2009529, SMINT2009832, SMINT2009895, SMINT2009902, SMINT2009973, SMINT2010015, SMINT2010068, SMINT2010076, SMINT2010084, SMINT2010144, SMINT2010200, SMINT2010278, SMINT2010324, SMINT2010326, SMINT2010369, SMINT2010426, SMINT2010500, SMINT2010533, SMINT2010629, SMINT2010639, SMINT2010672, SMINT2010753, SMINT2010853, SMINT2010897, SMINT2010901, SMINT2010997, SMINT2011066, SMINT2011273, SMINT2011311, SMINT2011406, SMINT2011509, SMINT2011567, SMINT2011588, SMINT2011656, SMINT2011888, SMINT2011958, SMINT2012040, SMINT2012179, SMINT2012195, SMINT2012285, SMINT2012291, SMINT2012501, SMINT2012734, SMINT2012793, SMINT2013032, SMINT2013129, SMINT2013170, SMINT2013181, SMINT2013228,

[3642] SMINT2013613, SMINT2013626, SMINT2013833, SMINT2013890, SMINT2014166, SMINT2014282, SMINT2014443, SMINT2014489, SMINT2014721, SMINT2015006, SMINT2015294, SMINT2015306, SMINT2015326, SMINT2015353, SMINT2015454, SMINT2015518, SMINT2015745, SMINT2015787, SMINT2015810, SMINT2016122, SMINT2016146, SMINT2016286, SMINT2016313, SMINT2016396, SMINT2016412, SMINT2016440, SMINT2016477, SMINT2016544, SMINT2016857, SMINT2017134, SMINT2017319, SMINT2017324, SMINT2017410, SMINT2017431, SMINT2017432, SMINT2017436, SMINT2017599, SMINT2017659, SMINT2017736, SMINT2017781, SMINT2017855, SMINT2017884, SMINT2017964, SMINT2017974, SMINT2018343, SMINT2018353, SMINT2018592, SMINT2019017, SMINT2019105, SMINT2019142,

[3643] SMINT2019153, SMINT2019200, SPLEN1000013, SPLEN1000041, SPLEN1000049, SPLEN1000056, SPLEN1000087, SPLEN1000089, SPLEN1000091, SPLEN1000134, SPLEN1000139, SPLEN1000143, SPLEN1000144, SPLEN1000145, SPLEN1000156, SPLEN1000163, SPLEN1000165, SPLEN1000178, SPLEN2000020, SPLEN2000047, SPLEN2000064, SPLEN2000072, SPLEN2000098, SPLEN2000126, SPLEN2000134, SPLEN2000143, SPLEN2000189, SPLEN2000197, SPLEN2000205, SPLEN2000210, SPLEN2000222, SPLEN2000242, SPLEN2000247, SPLEN2000258, SPLEN2000267, SPLEN2000270, SPLEN2000307, SPLEN2000310, SPLEN2000341, SPLEN2000348, SPLEN2000350, SPLEN2000357, SPLEN2000364, SPLEN2000402, SPLEN2000414, SPLEN2000420, SPLEN2000443, SPLEN2000448, SPLEN2000450, SPLEN2000464,

[3644] SPLEN2000496, SPLEN2000515, SPLEN2000516, SPLEN2000537, SPLEN2000541, SPLEN2000607, SPLEN2000630, SPLEN2000695, SPLEN2000698, SPLEN2000874, SPLEN2000882, SPLEN2001135, SPLEN2001176, SPLEN2001227, SPLEN2001245, SPLEN2001278, SPLEN2001354, SPLEN2001367, SPLEN2001383, SPLEN2001476, SPLEN2001503, SPLEN2001510, SPLEN2001599, SPLEN2001626, SPLEN2001650, SPLEN2001710, SPLEN2001761, SPLEN2001781, SPLEN2001881, SPLEN2001912, SPLEN2001945, SPLEN2002007, SPLEN2002053, SPLEN2002133, SPLEN2002147, SPLEN2002166, SPLEN2002175, SPLEN2002223, SPLEN2002272, SPLEN2002314, SPLEN2002343, SPLEN2002354, SPLEN2002385, SPLEN2002419, SPLEN2002451, SPLEN2002462, SPLEN2002467, SPLEN2002477, SPLEN2002493, SPLEN2002662,

[3645] SPLEN2002695, SPLEN2002707, SPLEN2002744, SPLEN2002917, SPLEN2002931, SPLEN2002957, SPLEN2003160, SPLEN2003204, SPLEN2003219, SPLEN2003396, SPLEN2003678, SPLEN2003878, SPLEN2003918, SPLEN2003924, SPLEN2004060, SPLEN2004078, SPLEN2004124, SPLEN2004148, SPLEN2004181, SPLEN2004343, SPLEN2004346, SPLEN2004368, SPLEN2004555, SPLEN2004611, SPLEN2004662, SPLEN2004773, SPLEN2004844, SPLEN2004880, SPLEN2004984, SPLEN2005227, SPLEN2005272, SPLEN2005342, SPLEN2005416, SPLEN2005450, SPLEN2005474, SPLEN2005560, SPLEN2005727, SPLEN2005783, SPLEN2005790, SPLEN2005806, SPLEN2005818, SPLEN2005838, SPLEN2005869, SPLEN2005939, SPLEN2006268, SPLEN2006283, SPLEN2006325, SPLEN2006389, SPLEN2006425, SPLEN2006671,

[3646] SPLEN2006701, SPLEN2006785, SPLEN2006875, SPLEN2007182, SPLEN2007276, SPLEN2007314, SPLEN2007326, SPLEN2007350, SPLEN2007619, SPLEN2007653, SPLEN2007689, SPLEN2007695, SPLEN2007739, SPLEN2007750, SPLEN2007794, SPLEN2007879, SPLEN2007926, SPLEN2007951, SPLEN2008007, SPLEN2008135, SPLEN2008164, SPLEN2008317, SPLEN2008460, SPLEN2008496, SPLEN2008591, SPLEN2068786, SPLEN2009081, SPLEN2009088, SPLEN2009163, SPLEN2009340, SPLEN2009512, SPLEN2009513, SPLEN2009541, SPLEN2009548, SPLEN2009555, SPLEN2009581, SPLEN2009733, SPLEN2009803, SPLEN2009884, SPLEN2009918, SPLEN2009970, SPLEN2010004, SPLEN2010015, SPLEN2010112, SPLEN2010119, SPLEN2010146, SPLEN2010187, SPLEN2010350, SPLEN2010395, SPLEN2010415,

[3647] SPLEN2010447, SPLEN2010469, SPLEN201051-0, SPLEN2010530, SPLEN2010534, SPLEN2010588, SPLEN2010625, SPLEN2010800, SPLEN2010846, SPLEN2010847, SPLEN2010862, SPLEN2010912, SPLEN2010978, SPLEN2010986, SPLEN2011018, SPLEN2011021, SPLEN2011025, SPLEN2011086, SPLEN2011139, SPLEN2011145, SPLEN2011248, SPLEN2011252, SPLEN2011422, SPLEN2011672, SPLEN2011678, SPLEN2011758, SPLEN2011766, SPLEN2011805, SPLEN2011820, SPLEN2011830, SPLEN2011931, SPLEN2011981, SPLEN2012115, SPLEN2012175, SPLEN2012179, SPLEN2012185, SPLEN2012234, SPLEN2012453, SPLEN2012523, SPLEN2012524, SPLEN2012525, SPLEN2012606, SPLEN2012611, SPLEN2012619, SPLEN2012624, SPLEN2012725, SPLEN2012743, SPLEN2012756, SPLEN2012846, SPLEN2012889,

[3648] SPLEN2012961, SPLEN2013108, SPLEN2013195, SPLEN2013503, SPLEN2013644, SPLEN2013648, SPLEN2013670, SPLEN2013673, SPLEN2013714, SPLEN2013753, SPLEN2013821, SPLEN2013857, SPLEN2013860, SPLEN2013910, SPLEN2013923, SPLEN2013936, SPLEN2014041, SPLEN2014063, SPLEN2014073, SPLEN2014119, SPLEN2014136, SPLEN2014199, SPLEN2014210, SPLEN2014293, SPLEN2014318, SPLEN2014381, SPLEN2014452, SPLEN2014454, SPLEN2014486, SPLEN2014543, SPLEN2014645, SPLEN2014669, SPLEN2014711, SPLEN2014739, SPLEN2014860, SPLEN2014865, SPLEN2014911, SPLEN2014919, SPLEN2014920, SPLEN2014924, SPLEN2014937, SPLEN2014946, SPLEN2015031, SPLEN2015094, SPLEN2015121, SPLEN2015129, SPLEN2015158, SPLEN2015166, SPLEN2015216, SPLEN2015258,

[3649] SPLEN2015261, SPLEN2015267, SPLEN2015276, SPLEN2015310, SPLEN2015415, SPLEN2015433, SPLEN2015593, SPLEN2015674, SPLEN2015679, SPLEN2015707, SPLEN2015730, SPLEN2015746, SPLEN2015788, SPLEN2015815, SPLEN2015890, SPLEN2015891, SPLEN2015899, SPLEN2016045, SPLEN2016053, SPLEN2016069, SPLEN2016098, SPLEN2016135, SPLEN2016139, SPLEN2016241, SPLEN2016250, SPLEN2016304, SPLEN2016356, SPLEN2016480, SPLEN2016531, SPLEN2016533, SPLEN2016541, SPLEN2016552, SPLEN2016602, SPLEN2016627, SPLEN2016678, SPLEN2016743, SPLEN2016773, SPLEN2016781, SPLEN2016840, SPLEN2016863, SPLEN2016922, SPLEN2016932, SPLEN2016973, SPLEN2017043, SPLEN2017104, SPLEN2017121, SPLEN2017147, SPLEN2017187, SPLEN2017189, SPLEN2017212,

[3650] SPLEN2017351, SPLEN2017426, SPLEN2017452, SPLEN2017538, SPLEN2017592, SPLEN2017613, SPLEN2017620, SPLEN2017643, SPLEN2017687, SPLEN2017740, SPLEN2017781, SPLEN2017999, SPLEN2018112, SPLEN2018159, SPLEN2018180, SPLEN2018181, SPLEN2018280, SPLEN2018285, SPLEN2018299, SPLEN2018302, SPLEN2018364, SPLEN2018395, SPLEN2018643, SPLEN2018683, SPLEN2018732, SPLEN2018749, SPLEN2018933, SPLEN2019008, SPLEN2019043, SPLEN2019077, SPLEN2019092, SPLEN2019102, SPLEN2019131, SPLEN2019257, SPLEN2019323, SPLEN2019349, SPLEN2019375, SPLEN2019379, SPLEN2019446, SPLEN2019471, SPLEN2019480, SPLEN2019505, SPLEN2019571, SPLEN2019575, SPLEN2019709, SPLEN2019774, SPLEN2019793, SPLEN2019811, SPLEN2019839, SPLEN2019956,

[3651] SPLEN2019985, SPLEN2020007, SPLEN2020034, SPLEN2020153, SPLEN2020154, SPLEN2020166, SPLEN2020183, SPLEN2020223, SPLEN2020359, SPLEN2020417, SPLEN2020427, SPLEN2020467, SPLEN2020512, SPLEN2020608, SPLEN2020777, SPLEN2020805, SPLEN2021057, SPLEN2021122, SPLEN2021157, SPLEN2021231, SPLEN2021295, SPLEN2021298, SPLEN2021383, SPLEN2021417, SPLEN2021440, SPLEN2021458, SPLEN2021463, SPLEN2021560, SPLEN2021701, SPLEN2021795, SPLEN2021983, SPLEN2021991, SPLEN2022040, SPLEN2022162, SPLEN2022227, SPLEN2022591, SPLEN2022785, SPLEN2022920, SPLEN2023024, SPLEN2023118, SPLEN2023160, SPLEN2023423, SPLEN2023710, SPLEN2023733, SPLEN2023791, SPLEN2023977, SPLEN2024070, SPLEN2024127, SPLEN2024232, SPLEN2024273,

[3652] SPLEN2024383, SPLEN2024489, SPLEN2024530, SPLEN2024571, SPLEN2024577, SPLEN2024617, SPLEN2024737, SPLEN2024922, SPLEN2024956, SPLEN2024990, SPLEN2025012, SPLEN2025017, SPLEN2025039, SPLEN2025219, SPLEN2025491, SPLEN2025626, SPLEN2025820, SPLEN2026144, SPLEN2026411, SPLEN2026765, SPLEN2027157, SPLEN2027395, SPLEN2027488, SPLEN2027780, SPLEN2027852, SPLEN2027868, SPLEN2027995, SPLEN2028046, SPLEN2028066, SPLEN2028138, SPLEN2028365, SPLEN2028417, SPLEN2028424, SPLEN2028593, SPLEN2028844, SPLEN2028914, SPLEN2028994, SPLEN2029051, SPLEN2029176, SPLEN2029295, SPLEN2029380, SPLEN2029522, SPLEN2029683, SPLEN2029727, SPLEN2029904, SPLEN2029912, SPLEN2030250, SPLEN2030335, SPLEN2030371, SPLEN2030397,

[3653] SPLEN2030479, SPLEN2030495, SPLEN2030562, SPLEN2030763, SPLEN2030847, SPLEN2031004, SPLEN2031125, SPLEN2031424, SPLEN2031674, SPLEN2031724, SPLEN2031780, SPLEN2032036, SPLEN2032112, SPLEN2032154, SPLEN2032157, SPLEN2032321, SPLEN2032356, SPLEN2032677, SPLEN2032813, SPLEN2032924, SPLEN2033098, SPLEN2033153, SPLEN2033333, SPLEN2033490, SPLEN2033539, SPLEN2033921, SPLEN2033996, SPLEN2034021, SPLEN2034081, SPLEN2034252, SPLEN2034448, SPLEN2034551, SPLEN2034601, SPLEN2034678, SPLEN2034781, SPLEN2034864, SPLEN2034934, SPLEN2035318, SPLEN2035615, SPLEN2036076, SPLEN2036103, SPLEN2036326, SPLEN2036475, SPLEN2036501, SPLEN2036579, SPLEN2036608, SPLEN2036702, SPLEN2036712, SPLEN2036821, SPLEN2036953,

[3654] SPLEN2037077, SPLEN2037194, SPLEN2037319, SPLEN2037444, SPLEN2037580, SPLEN2037630, SPLEN2037678, SPLEN2037722, SPLEN2037891, SPLEN2038055, SPLEN2038180, SPLEN2038345, SPLEN2038407, SPLEN2038473, SPLEN2038834, SPLEN2039311, SPLEN2039672, SPLEN2039697, SPLEN2039845, SPLEN2039936, SPLEN2040222, SPLEN2040237, SPLEN2040824, SPLEN2041304, SPLEN2041306, SPLEN2041310, SPLEN2041645, SPLEN2041700, SPLEN2041720, SPLEN2041977, SPLEN2042051, SPLEN2042303, SPLEN2042521, SPLEN2042535, SPLEN2042598, SPLEN2042920, STOMA1000013, STOMA1000047, STOMA1000052, STOMA1000074, STOMA1000091, STOMA1000117, STOMA1000133, STOMA1000175, STOMA1000190, STOMA1000191, STOMA2000032, STOMA2000072, STOMA2000088, STOMA2000104,

[3655] STOMA2000121, STOMA2000148, STOMA2000168, STOMA2000183, STOMA2000188, STOMA2000257, STOMA2000279, STOMA2000383, STOMA2000386, STOMA2000478, STOMA2000482, STOMA2000529, STOMA2000539, STOMA2000567, STOMA2000640, STOMA2000678, STOMA2000686, STOMA2000888, STOMA2001025, STOMA2001389, STOMA2002141, STOMA2002166, STOMA2002367, STOMA2002688, STOMA2002828, STOMA2003158, STOMA2003289, STOMA2003444, STOMA2003477, STOMA2003646, STOMA2003716, STOMA2003781, STOMA2003894, STOMA2004194, STOMA2004294, STOMA2004663, STOMA2004668, STOMA2004852, STOMA2004873, STOMA2004884, STOMA2004893, STOMA2005120, STOMA2005664, STOMA2005667, STOMA2005746, STOMA2005782, STOMA2006181, STOMA2006213, STOMA2006229, STOMA2006325,

[3656] STOMA2006330, STOMA2006398, STOMA2006447, STOMA2006780, STOMA2006904, STOMA2007269, STOMA2007680, STOMA2007745, STOMA2008050, STOMA2008361, STOMA2008546, STOMA2008614, STOMA2008638, STOMA2008838, STOMA2009250, STOMA2009253, STOMA2009256, STOMA2009289, SYNOV1000045, SYNOV1000049, SYNOV1000118, SYNOV1000128, SYNOV1000164, SYNOV1000190, SYNOV1000256, SYNOV1000374, SYNOV2000152, SYNOV2000171, SYNOV2000173, SYNOV2000177, SYNOV2000178, SYNOV2000193, SYNOV2000251, SYNOV2000279, SYNOV2000291, SYNOV2000297, SYNOV2000397, SYNOV2000426, SYNOV2000601, SYNOV2000700, SYNOV2000820, SYNOV2000824, SYNOV2000923, SYNOV2001014, SYNOV2001035, SYNOV2001088, SYNOV2001111, SYNOV2001144, SYNOV2001212, SYNOV2001251,

[3657] SYNOV2001300, SYNOV2001356, SYNOV2001374, SYNOV2001390, SYNOV2001451, SYNOV2001457, SYNOV2001468, SYNOV2001581, SYNOV2001648, SYNOV2001660, SYNOV2003326, SYNOV2005216, SYNOV2005448, SYNOV2005541, SYNOV2005673, SYNOV2005817, SYNOV2005962, SYNOV2006430, SYNOV2006620, SYNOV2007758, SYNOV2007965, SYNOV2008765, SYNOV2009172, SYNOV2011233, SYNOV2012326, SYNOV2013365, SYNOV2013637, SYNOV2014157, SYNOV2014364, SYNOV2016124, SYNOV2016837, SYNOV2017179, SYNOV2018921, SYNOV2019280, SYNOV2020085, SYNOV2020463, SYNOV2021320, SYNOV2021953, SYNOV3000184, SYNOV3000231, SYNOV3000302, SYNOV3000345, SYNOV4000249, SYNOV4000472, SYNOV4000706, SYNOV4001153, SYNOV4001326, SYNOV4001342, SYNOV4002001, SYNOV4002392,

[3658] SYNOV4002875, SYNOV4002883, SYNOV4003174, SYNOV4003322, SYNOV4003681, SYNOV4003981, SYNOV4004184, SYNOV4004741, SYNOV4004823, SYNOV4004914, SYNOV4005256, SYNOV4005570, SYNOV4005739, SYNOV4005889, SYNOV4005981, SYNOV4005989, SYNOV4006256, SYNOV4006327, SYNOV4006542, SYNOV4007012, SYNOV4007215, SYNOV4007360, SYNOV4007430, SYNOV4007521, SYNOV4007553, SYNOV4007671, SYNOV4007711, SYNOV4008245, SYNOV4008336, SYNOV4009129, SYNOV4009139, SYNOV4009298, T1ESE2000116, T1ESE2000609, T1ESE2002665, TBAES2000004, TBAES2000116, TBAES2000255, TBAES2000315, TBAES2000352, TBAES2000932, TBAES2001171, TBAES2001220, TBAES2001229, TBAES2001258, TBAES2001296, TBAES2001492, TBAES2001553, TBAES2001751, TBAES2003435,

[3659] TBAES2003492, TBAES2003550, TBAES2003917, TBAES2004055, TBAES2004105, TBAES2004939, TBAES2005157, TBAES2005361, TBAES2005543, TBAES2006568, TBAES2006881, TBAES2007379, TBAES2007428, TBAES2007481, TBAES2007504, TBAES2007548, TBAES2007697, TBAES2007862, TBAES2007964, TBAES2008133, TCERX2000171, TCERX2000431, TCERX2000998, TCERX2002644, TCOLN1000037, TCOLN1000180, TCOLN2000139, TCOLN2000236, TCOLN2000641, TCOLN2001268, TCOLN2002047, TCOLN2002278, TESOP1000035, TESOP1000127, TESOP1000160, TESOP2000083, TESOP2000090, TESOP2000205, TESOP2000312, TESOP2000390, TESOP2000400, TESOP2000510, TESOP2000527, TESOP2000569, TESOP2000739, TESOP2000801, TESOP2001122, TESOP2001166, TESOP2001345, TESOP2001474,

[3660] TESOP2001796, TESOP2001818, TESOP2001849, TESOP2001865, TESOP2001901, TESOP2001953, TESOP2002005, TESOP2002110, TESOP2002150, TESOP2002451, TESOP2002489, TESOP2002539, TESOP2002545, TESOP2002804, TESOP2002950, TESOP2003273, TESOP2003308, TESOP2003553, TESOP2003753, TESOP2004110, TESOP2004114, TESOP2004173, TESOP2004214, TESOP2005199, TESOP2005285, TESOP2005485, TESOP2005498, TESOP2005579, TESOP2006041, TESOP2006053, TESOP2006060, TESOP2006068, TESOP2006110, TESOP2006398, TESOP2006670, TESOP2006704, TESOP2006746, TESOP2006865, TESOP2007041, TESOP2007052, TESOP2007262, TESOP2007384, TESOP2007636, TESOP2007674, TESOP2007688, TESOP2007725, TESOP2007912, TESOP2007978, TESOP2008127, TESOP2008552,

[3661] TESOP2008556, TESOP2008563, TESOP2008820, TESOP2009121, TESOP2009201, TESOP2009247, TESOP2009555, TESTI1000018, TESTI1000019, TESTI1000025, TESTI1000029, TESTI1000030, TESTI1000042, TESTI1000045, TESTI1000051, TESTI1000055, TESTI1000064, TESTI1000070, TESTI1000085, TESTI1000088, TESTI1000093, TESTI1000094, TESTI1000096, TESTI1000101, TESTI1000109, TESTI1000125, TESTI1000127, TESTI1000128, TESTI1000131, TESTI1000138, TESTI1000142, TESTI1000157, TESTI1000163, TESTI1000168, TESTI1000169, TESTI1000179, TESTI1000183, TESTI1000191, TESTI1000257, TESTI1000266, TESTI1000319, TESTI1000330, TESTI1000348, TESTI1000390, TESTI1000391, TESTI1000459, TESTI1000491, TESTI1000545, TESTI2000006, TESTI2000018,

[3662] TESTI2000044, TESTI2000100, TESTI2000117, TESTI2000120, TESTI2000147, TESTI2000154, TESTI2000172, TESTI2000177, TESTI2000179, TESTI2000207, TESTI2000208, TESTI2000221, TESTI2000238, TESTI2000253, TESTI2000272, TESTI2000278, TESTI2000349, TESTI2000358, TESTI2000372, TESTI2000427, TESTI2000431, TESTI2000435, TESTI2000443, TESTI2000452, TESTI2000462, TESTI2000489, TESTI2000520, TESTI2000571, TESTI2000591, TESTI2000598, TESTI2000600, TESTI2000616, TESTI2000627, TESTI2000644, TESTI2000671, TESTI2000683, TESTI2000689, TESTI2000695, TESTI2000699, TESTI2000707, TESTI2000745, TESTI2000756, TESTI2000762, TESTI2000808, TESTI2000819, TESTI2000830, TESTI2000840, TESTI2000849, TESTI2000850, TESTI2000874,

[3663] TESTI2000883, TESTI2000909, TESTI2000951, TESTI2000981, TESTI2001008, TESTI2001049, TESTI2001082, TESTI2001120, TESTI2001134, TESTI2001141, TESTI2001180, TESTI2001208, TESTI2001229, TESTI2001236, TESTI2001237, TESTI2001269, TESTI2001306, TESTI2001313, TESTI2001330, TESTI2001339, TESTI2001345, TESTI2001352, TESTI2001364, TESTI2001412, TESTI2001498, TESTI2001511, TESTI2001512, TESTI2001518, TESTI2001556, TESTI2001593, TESTI2001613, TESTI2001621, TESTI2001661, TESTI2001665, TESTI2001671, TESTI2001697, TESTI2001725, TESTI2001758, TESTI2001766, TESTI2001792, TESTI2001793, TESTI2001795, TESTI2001812, TESTI2001815, TESTI2001823, TESTI2001826, TESTI2001827, TESTI2001852, TESTI2001869, TESTI2001879,

[3664] TESTI2001894, TESTI2001898, TESTI2001915, TESTI2001950, TESTI2001959, TESTI2001968, TESTI2001985, TESTI2001991, TESTI2002002, TESTI2002012, TESTI2002036, TESTI2002048, TESTI2002057, TESTI2002081, TESTI2002090, TESTI2002105, TESTI2002216, TESTI2002223, TESTI2002245, TESTI2002251, TESTI2002256, TESTI2002264, TESTI2002282, TESTI2002293, TESTI2002294, TESTI2002326, TESTI2002351, TESTI2002361, TESTI2002369, TESTI2002406, TESTI2002415, TESTI2002423, TESTI2002453, TESTI2002461, TESTI2002465, TESTI2002467, TESTI2002498, TESTI2002516, TESTI2002544, TESTI2002578, TESTI2002580, TESTI2002618, TESTI2002676, TESTI2002690, TESTI2002696, TESTI2002698, TESTI2002700, TESTI2002707, TESTI2002724, TESTI2002729,

[3665] TESTI2002752, TESTI2002753, TESTI2002789, TESTI2002802, TESTI2002806, TESTI2002840, TESTI2002866, TESTI2002910, TESTI2002912, TESTI2002928, TESTI2002937, TESTI2002965, TESTI2002993, TESTI2003020, TESTI2003031, TESTI2003037, TESTI2003044, TESTI2003059, TESTI2003061, TESTI2003071, TESTI2003074, TESTI2003089, TESTI2003104, TESTI2003109, TESTI2003117, TESTI2003127, TESTI2003130, TESTI2003131, TESTI2003139, TESTI2003141, TESTI2003152, TESTI2003181, TESTI2003193, TESTI2003196, TESTI2003228, TESTI2003236, TESTI2003255, TESTI2003258, TESTI2003277, TESTI2003280, TESTI2003299, TESTI2003311, TESTI2003321, TESTI2003325, TESTI2003327, TESTI2003330, TESTI2003347, TESTI2003354, TESTI2003356, TESTI2003372,

[3666] TESTI2003376, TESTI2003413, TESTI2003418, TESTI2003419, TESTI2003432, TESTI2003454, TESTI2003475, TESTI2003476, TESTI2003498, TESTI2003512, TESTI2003539, TESTI2003541, TESTI2003545, TESTI2003551, TESTI2003574, TESTI2003579, TESTI2003580, TESTI2003589, TESTI2003596, TESTI2003598, TESTI2003615, TESTI2003625, TESTI2003638, TESTI2003649, TESTI2003692, TESTI2003718, TESTI2003727, TESTI2003756, TESTI2003768, TESTI2003781, TESTI2003787, TESTI2003824, TESTI2003827, TESTI2003894, TESTI2003911, TESTI2003914, TESTI2003940, TESTI2003962, TESTI2003998, TESTI2004000, TESTI2004073, TESTI2004080, TESTI2004085, TESTI2004089, TESTI2004111, TESTI2004119, TESTI2004122, TESTI2004153, TESTI2004163, TESTI2004169,

[3667] TESTI2004207, TESTI2004215, TESTI2004227, TESTI2004229, TESTI2004243, TESTI2004255, TESTI2004287, TESTI2004313, TESTI2004318, TESTI2004322, TESTI2004391, TESTI2004399, TESTI2004423, TESTI2004431, TESTI2004432, TESTI2004452, TESTI2004459, TESTI2004490, TESTI2004539, TESTI2004552, TESTI2004560, TESTI2004574, TESTI2004601, TESTI2004611, TESTI2004649, TESTI2004654, TESTI2004675, TESTI2004687, TESTI2004689, TESTI2004700, TESTI2004706, TESTI2004712, TESTI2004734, TESTI2004783, TESTI2004791, TESTI2004793, TESTI2004860, TESTI2004906, TESTI2004920, TESTI2004936, TESTI2004941, TESTI2004971, TESTI2004982, TESTI2004993, TESTI2004994, TESTI2004999, TESTI2005017, TESTI2005025, TESTI2005040, TESTI2005060,

[3668] TESTI2005072, TESTI2005085, TESTI2005112, TESTI2005120, TESTI2005153, TESTI2005155, TESTI2005173, TESTI2005267, TESTI2005268, TESTI2005280, TESTI2005307, TESTI2005326, TESTI2005363, TESTI2005376, TESTI2005378, TESTI2005380, TESTI2005391, TESTI2005395, TESTI2005396, TESTI2005408, TESTI2005415, TESTI2005470, TESTI2005492, TESTI2005564, TESTI2005568, TESTI2005584, TESTI2005588, TESTI2005590, TESTI2005603, TESTI2005609, TESTI2005610, TESTI2005630, TESTI2005672, TESTI2005683, TESTI2005690, TESTI2005692, TESTI2005703, TESTI2005720, TESTI2005739, TESTI2005742, TESTI2005743, TESTI2005767, TESTI2005775, TESTI2005784, TESTI2005788, TESTI2005827, TESTI2005835, TESTI2005860, TESTI2005892, TESTI2005911,

[3669] TESTI2005933, TESTI2005937, TESTI2005948, TESTI2005979, TESTI2005981, TESTI2005982, TESTI2005984, TESTI2005986, TESTI2005987, TESTI2006007, TESTI2006008, TESTI2006015, TESTI2006016, TESTI2006035, TESTI2006040, TESTI2006041, TESTI2006045, TESTI2006067, TESTI2006083, TESTI2006097, TESTI2006109, TESTI2006120, TESTI2006125, TESTI2006179, TESTI2006209, TESTI2006210, TESTI2006212, TESTI2006218, TESTI2006238, TESTI2006255, TESTI2006258, TESTI2006278, TESTI2006333, TESTI2006341, TESTI2006360, TESTI2006383, TESTI2006409, TESTI2006425, TESTI2006437, TESTI2006453, TESTI2006457, TESTI2006460, TESTI2006465, TESTI2006483, TESTI2006499, TESTI2006523, TESTI2006543, TESTI2006565, TESTI2006572, TESTI2006615,

[3670] TESTI2006617, TESTI2006624, TESTI2006628, TESTI2006633, TESTI2006643, TESTI2006648, TESTI2006659, TESTI2006660, TESTI2006665, TESTI2006667, TESTI2006677, TESTI2006720, TESTI2006735, TESTI2006744, TESTI2006748, TESTI2006774, TESTI2006853, TESTI2006866, TESTI2006872, TESTI2006877, TESTI2006879, TESTI2006894, TESTI2006940, TESTI2006955, TESTI2006978, TESTI2006979, TESTI2006990, TESTI2007040, TESTI2007074, TESTI2007078, TESTI2007113, TESTI2007152, TESTI2007163, TESTI2007183, TESTI2007220, TESTI2007234, TESTI2007311, TESTI2007320, TESTI2007346, TESTI2007358, TESTI2007402, TESTI2007405, TESTI2007422, TESTI2007452, TESTI2007464, TESTI2007466, TESTI2007480, TESTI2007490, TESTI2007502, TESTI2007524,

[3671] TESTI2007533, TESTI2007576, TESTI2007613, TESTI2007657, TESTI2007685, TESTI2007692, TESTI2007749, TESTI2007750, TESTI2007808, TESTI2007814, TESTI2007829, TESTI2007864, TESTI2007867, TESTI2007872, TESTI2007906, TESTI2007922, TESTI2007951, TESTI2007972, TESTI2007973, TESTI2007998, TESTI2008014, TESTI2008020, TESTI2008032, TESTI2008033, TESTI2008046, TESTI2008081, TESTI2008099, TESTI2008139, TESTI2008144, TESTI2008161, TESTI2008189, TESTI2008204, TESTI2008219, TESTI2008233, TESTI2008234, TESTI2008237, TESTI2008278, TESTI2008320, TESTI2008331, TESTI2008343, TESTI2008387, TESTI2008389, TESTI2008394, TESTI2008405, TESTI2008420, TESTI2008425, TESTI2008440, TESTI2008567, TESTI2008595, TESTI2008621,

[3672] TESTI2008636, TESTI2008657, TESTI2008684, TESTI2008699, TESTI2008715, TESTI2008762, TESTI2008774, TESTI2008786, TESTI2008822, TESTI2008840, TESTI2008847, TESTI2008884, TESTI2008901, TESTI2008929, TESTI2008946, TESTI2008960, TESTI2009018, TESTI2009091, TESTI2009097, TESTI2009136, TESTI2009185, TESTI2009190, TESTI2009217, TESTI2009239, TESTI2009325, TESTI2009388, TESTI2009390, TESTI2009400, TESTI2009402, TESTI2009412, TESTI2009423, TESTI2009447, TESTI2009462, TESTI2009474, TESTI2009477, TESTI2009497, TESTI2009502, TESTI2009511, TESTI2009544, TESTI2009545, TESTI2009551, TESTI2009585, TESTI2009588, TESTI2009683, TESTI2009727, TESTI2009739, TESTI2009812, TESTI2009835, TESTI2009853, TESTI2009935,

[3673] TESTI2009977, TESTI2009987, TESTI2010009, TESTI2010154, TESTI2010180, TESTI2010239, TESTI2010280, TESTI2010354, TESTI2010396, TESTI2010400, TESTI2010409, TESTI2010572, TESTI2010587, TESTI2010591, TESTI2010617, TESTI2010682, TESTI2010724, TESTI2010732, TESTI2010734, TESTI2010755, TESTI2010793, TESTI2010806, TESTI2010833, TESTI2010872, TESTI2011009, TESTI2011020, TESTI2011028, TESTI2011033, TESTI2011254, TESTI2011286, TESTI2011294, TESTI2011314, TESTI2011315, TESTI2011394, TESTI2011407, TESTI2011448, TESTI2011480, TESTI2011549, TESTI2011575, TESTI2011605, TESTI2011612, TESTI2011665, TESTI2011680, TESTI2011712, TESTI2011750, TESTI2011840, TESTI2011846, TESTI2011915, TESTI2011928, TESTI2011971,

[3674] TESTI2012019, TESTI2012050, TESTI2012090, TESTI2012095, TESTI2012104, TESTI2012152, TESTI2012155, TESTI2012171, TESTI2012207, TESTI2012231, TESTI2012244, TESTI2012289, TESTI2012308, TESTI2012356, TESTI2012387, TESTI2012394, TESTI2012444, TESTI2012511, TESTI2012528, TESTI2012544, TESTI2012550, TESTI2012571, TESTI2012592, TESTI2012617, TESTI2012628, TESTI2012778, TESTI2012812, TESTI2012834, TESTI2012835, TESTI2012861, TESTI2012900, TESTI2012915, TESTI2012922, TESTI2013001, TESTI2013012, TESTI2013053, TESTI2013144, TESTI2013163, TESTI2013169, TESTI2013212, TESTI2013231, TESTI2013257, TESTI2013264, TESTI2013268, TESTI2013295, TESTI2013322, TESTI2013381, TESTI2013382, TESTI2013401, TESTI2013427,

[3675] TESTI2013468, TESTI2013497, TESTI2013545, TESTI2013546, TESTI2013566, TESTI2013601, TESTI2013604, TESTI2013607, TESTI2013610, TESTI2013691, TESTI2013699, TESTI2013737, TESTI2013767, TESTI2013832, TESTI2013873, TESTI2013889, TESTI2014007, TESTI2014036, TESTI2014097, TESTI2014160, TESTI2014248, TESTI2014254, TESTI2014269, TESTI2014274, TESTI2014318, TESTI2014324, TESTI2014339, TESTI2014362, TESTI2014385, TESTI2014415, TESTI2014439, TESTI2014474, TESTI2014505, TESTI2014577, TESTI2014578, TESTI2014716, TESTI2014780, TESTI2014800, TESTI2014843, TESTI2014979, TESTI2014988, TESTI2015042, TESTI2015092, TESTI2015105, TESTI2015180, TESTI2015246, TESTI2015249, TESTI2015327, TESTI2015331, TESTI2015335,

[3676] TESTI2015350, TESTI2015375, TESTI2015437, TESTI2015590, TESTI2015610, TESTI2015647, TESTI2015675, TESTI2015710, TESTI2015752, TESTI2015830, TESTI2015914, TESTI2015938, TESTI2015947, TESTI2015962, TESTI2015987, TESTI2016033, TESTI2016046, TESTI2016101, TESTI2016162, TESTI2016197, TESTI2016278, TESTI2016298, TESTI2016331, TESTI2016337, TESTI2016410, TESTI2016421, TESTI2016509, TESTI2016568, TESTI2016583, TESTI2016599, TESTI2016629, TESTI2016663, TESTI2016667, TESTI2016688, TESTI2016701, TESTI2016758, TESTI2016848, TESTI2016863, TESTI2016888, TESTI2016896, TESTI2016922, TESTI2016942, TESTI2016950, TESTI2016996, TESTI2017017, TESTI2017028, TESTI2017035, TESTI2017069, TESTI2017089, TESTI2017102,

[3677] TESTI2017107, TESTI2017113, TESTI2017125, TESTI2017256, TESTI2017305, TESTI2017311, TESTI2017396, TESTI2017507, TESTI2017537, TESTI2017582, TESTI2017584, TESTI2017645, TESTI2017727, TESTI2017740, TESTI2017775, TESTI2017816, TESTI2017832, TESTI2017923, TESTI2017932, TESTI2017951, TESTI2018014, TESTI2018031, TESTI2018035, TESTI2018060, TESTI2018083, TESTI2018178, TESTI2018221, TESTI2018276, TESTI2018290, TESTI2018335, TESTI2018337, TESTI2018368, TESTI2018421, TESTI2018428, TESTI2018475, TESTI2018482, TESTI2018521, TESTI2018565, TESTI2018581, TESTI2018611, TESTI2018687, TESTI2018697, TESTI2018838, TESTI2018867, TESTI2018941, TESTI2018957, TESTI2018974, TESTI2018975, TESTI2018997, TESTI2019042,

[3678] TESTI2019077, TESTI2019228, TESTI2019257, TESTI2019280, TESTI2019282, TESTI2019308, TESTI2019336, TESTI2019352, TESTI2019406, TESTI2019430, TESTI2019455, TESTI2019481, TESTI2019488, TESTI2019501, TESTI2019648, TESTI2019669, TESTI2019697, TESTI2019729, TESTI2019760, TESTI2019787, TESTI2019794, TESTI2019854, TESTI2019859, TESTI2019860, TESTI2019872, TESTI2019911, TESTI2019917, TESTI2019975, TESTI2019998, TESTI2020012, TESTI2020026, TESTI2020029, TESTI2020071, TESTI2020084, TESTI2020265, TESTI2020283, TESTI2020316, TESTI2020344, TESTI2020379, TESTI2020426, TESTI2020445, TESTI2020510, TESTI2020515, TESTI2020525, TESTI2020579, TESTI2020717, TESTI2020840, TESTI2020905, TESTI2020906, TESTI2020946,

[3679] TESTI2020956, TESTI2020981, TESTI2020999, TESTI2021003, TESTI2021038, TESTI2021057, TESTI2021077, TESTI2021112, TESTI2021114, TESTI2021116, TESTI2021118, TESTI2021122, TESTI2021138, TESTI2021297, TESTI2021315, TESTI2021447, TESTI2021463, TESTI2021531, TESTI2021599, TESTI2021637, TESTI2021654, TESTI2021667, TESTI2021736, TESTI2021785, TESTI2021819, TESTI2021851, TESTI2021895, TESTI2021911, TESTI2021939, TESTI2021999, TESTI2022010, TESTI2022023, TESTI2022065, TESTI2022086, TESTI2022179, TESTI2022203, TESTI2022246, TESTI2022323, TESTI2022338, TESTI2022400, TESTI2022462, TESTI2022495, TESTI2022623, TESTI2022649, TESTI2022652, TESTI2022738, TESTI2022798, TESTI2022812, TESTI2022814, TESTI2022874,

[3680] TESTI2022940, TESTI2022952, TESTI2023025, TESTI2023033, TESTI2023053, TESTI2023085, TESTI2023192, TESTI2023194, TESTI2023214, TESTI2023254, TESTI2023386, TESTI2023414, TESTI2023427, TESTI2023436, TESTI2023599, TESTI2023752, TESTI2023800, TESTI2023861, TESTI2023903, TESTI2023942, TESTI2023947, TESTI2023951, TESTI2023968, TESTI2024009, TESTI2024090, TESTI2024125, TESTI2024153, TESTI2024192, TESTI2024267, TESTI2024283, TESTI2024299, TESTI2024419, TESTI2024422, TESTI2024443, TESTI2024446, TESTI2024473, TESTI2024476, TESTI2024498, TESTI2024560, TESTI2024567, TESTI2024586, TESTI2024598, TESTI2024641, TESTI2024648, TESTI2024718, TESTI2024744, TESTI2024844, TESTI2024864, TESTI2024885, TESTI2024936,

[3681] TESTI2024978, TESTI2024999, TESTI2025006, TESTI2025013, TESTI2025022, TESTI2025063, TESTI2025117, TESTI2025144, TESTI2025161, TESTI2025174, TESTI2025229, TESTI2025269, TESTI2025365, TESTI2025403, TESTI2025409, TESTI2025422, TESTI2025448, TESTI2025454, TESTI2025486, TESTI2025546, TESTI2025582, TESTI2025609, TESTI2025656, TESTI2025757, TESTI2025791, TESTI2025846, TESTI2025872, TESTI2025879, TESTI2025911, TESTI2025920, TESTI2025924, TESTI2026014, TESTI2026024, TESTI2026064, TESTI2026077, TESTI2026104, TESTI2026116, TESTI2026134, TESTI2026168, TESTI2026196, TESTI2026215, TESTI2026218, TESTI2026233, TESTI2026291, TESTI2026294, TESTI2026401, TESTI2026403, TESTI2026453, TESTI2026461, TESTI2026491,

[3682] TESTI2026505, TESTI2026515, TESTI2026525, TESTI2026534, TESTI2026537, TESTI2026589, TESTI2026597, TESTI2026605, TESTI2026647, TESTI2026674, TESTI2026794, TESTI2026824, TESTI2026854, TESTI2026925, TESTI2026936, TESTI2026957, TESTI2027013, TESTI2027019, TESTI2027108, TESTI2027171, TESTI2027173, TESTI2027179, TESTI2027185, TESTI2027206, TESTI2027238, TESTI2027239, TESTI2027243, TESTI2027271, TESTI2027296, TESTI2027378, TESTI2027411, TESTI2027450, TESTI2027496, TESTI2027503, TESTI2027562, TESTI2027615, TESTI2027645, TESTI2027730, TESTI2027736, TESTI2027791, TESTI2027820, TESTI2027828, TESTI2027840, TESTI2027909, TESTI2028098, TESTI2028151, TESTI2028242, TESTI2028253, TESTI2028254, TESTI2028269,

[3683] TESTI2028290, TESTI2028296, TESTI2028384, TESTI2028426, TESTI2028488, TESTI2028523, TESTI2028583, TESTI2028613, TESTI2028659, TESTI2028662, TESTI2028670, TESTI2028705, TESTI2028776, TESTI2028811, TESTI2028891, TESTI2028985, TESTI2028997, TESTI2029131, TESTI2029162, TESTI2029196, TESTI2029201, TESTI2029227, TESTI2029244, TESTI2029249, TESTI2029252, TESTI2029264, TESTI2029470, TESTI2029672, TESTI2029785, TESTI2029880, TESTI2030136, TESTI2030322, TESTI2030336, TESTI2030342, TESTI2030519, TESTI2030554, TESTI2030556, TESTI2030728, TESTI2030754, TESTI2030770, TESTI2030860, TESTI2030901, TESTI2030917, TESTI2030930, TESTI2031006, TESTI2031007, TESTI2031060, TESTI2031129, TESTI2031356, TESTI2031418,

[3684] TESTI2031504, TESTI2031529, TESTI2031687, TESTI2031760, TESTI2031809, TESTI2031919, TESTI2031935, TESTI2031986, TESTI2032044, TESTI2032067, TESTI2032079, TESTI2032643, TESTI2032681, TESTI2032761, TESTI2032768, TESTI2032774, TESTI2032828, TESTI2033031, TESTI2033242, TESTI2033254, TESTI2033300, TESTI2033395, TESTI2033453, TESTI2033505, TESTI2033520, TESTI2033641, TESTI2033710, TESTI2033905, TESTI2034187, TESTI2034243, TESTI2034249, TESTI2034307, TESTI2034357, TESTI2034401, TESTI2034407, TESTI2034506, TESTI2034520, TESTI2034718, TESTI2034730, TESTI2034749, TESTI2034767, TESTI2034774, TESTI2034777, TESTI2034785, TESTI2034799, TESTI2034847, TESTI2034913, TESTI2034916, TESTI2034931, TESTI2034953,

[3685] TESTI2034997, TESTI2035003, TESTI2035078, TESTI2035084, TESTI2035107, TESTI2035121, TESTI2035124, TESTI2035183, TESTI2035236, TESTI2035262, TESTI2035309, TESTI2035688, TESTI2035775, TESTI2035793, TESTI2035898, TESTI2035962, TESTI2035981, TESTI2035997, TESTI2036114, TESTI2036129, TESTI2036285, TESTI2036288, TESTI2036513, TESTI2036589, TESTI2036650, TESTI2036684, TESTI2036691, TESTI2036736, TESTI2036822, TESTI2036833, TESTI2036922, TESTI2036951, TESTI2036965, TESTI2037002, TESTI2037055, TESTI2037081, TESTI2037085, TESTI2037103, TESTI2037106, TESTI2037111, TESTI2037209, TESTI2037255, TESTI2037359, TESTI2037375, TESTI2037382, TESTI2037534, TESTI2037569, TESTI2037572, TESTI2037643, TESTI2037657,

[3686] TESTI2037673, TESTI2037723, TESTI2037819, TESTI2037830, TESTI2037845, TESTI2037877, TESTI2037976, TESTI2038048, TESTI2038065, TESTI2038104, TESTI2038275, TESTI2038388, TESTI2038573, TESTI2038596, TESTI2038623, TESTI2038644, TESTI2038733, TESTI2038858, TESTI2038958, TESTI2039025, TESTI2039026, TESTI2039038, TESTI2039041, TESTI2039060, TESTI2039113, TESTI2039121, TESTI2039209, TESTI2039225, TESTI2039227, TESTI2039276, TESTI2039342, TESTI2039353, TESTI2039544, TESTI2039613, TESTI2039707, TESTI2039732, TESTI2039738, TESTI2039776, TESTI2039867, TESTI2039908, TESTI2040018, TESTI2040094, TESTI2040102, TESTI2040128, TESTI2040143, TESTI2040297, TESTI2040372, TESTI2040377, TESTI2040424, TESTI2040642,

[3687] TESTI2040815, TESTI2040897, TESTI2040944, TESTI2040964, TESTI2040983, TESTI2040989, TESTI2041330, TESTI2041362, TESTI2041517, TESTI2041564, TESTI2041664, TESTI2041730, TESTI2041734, TESTI2041778, TESTI2041800, TESTI2041947, TESTI2041956, TESTI2041976, TESTI2042062, TESTI2042149, TESTI2042264, TESTI2042295, TESTI2042302, TESTI2042326, TESTI2042400, TESTI2042450, TESTI2042473, TESTI2042507, TESTI2042508, TESTI2042750, TESTI2042783, TESTI2042806, TESTI2042928, TESTI2042946, TESTI2042958, TESTI2043275, TESTI2043277, TESTI2043282, TESTI2043313, TESTI2043477, TESTI2043585, TESTI2043758, TESTI2043817, TESTI2043857, TESTI2043866, TESTI2043869, TESTI2044064, TESTI2044118, TESTI2044194, TESTI2044276,

[3688] TESTI2044306, TESTI2044309, TESTI2044413, TESTI2044418, TESTI2044754, TESTI2044796, TESTI2044833, TESTI2044892, TESTI2044920, TESTI2044968, TESTI2045139, TESTI2045155, TESTI2045171, TESTI2045199, TESTI2045353, TESTI2045509, TESTI2045562, TESTI2045611, TESTI2045819, TESTI2045850, TESTI2045920, TESTI2045964, TESTI2045983, TESTI2046100, TESTI2046188, TESTI2046347, TESTI2046352, TESTI2046358, TESTI2046439, TESTI2046535, TESTI2046536, TESTI2046552, TESTI2046569, TESTI2046686, TESTI2046721, TESTI2046732, TESTI2046786, TESTI2046797, TESTI2046863, TESTI2046872, TESTI2047071, TESTI2047141, TESTI2047147, TESTI2047153, TESTI2047212, TESTI2047342, TESTI2047383, TESTI2047792, TESTI2047801, TESTI2047818,

[3689] TESTI2047824, TESTI2047885, TESTI2047930, TESTI2048105, TESTI2048109, TESTI2048465, TESTI2048603, TESTI2048898, TESTI2049041, TESTI2049062, TESTI2049206, TESTI2049246, TESTI2049277, TESTI2049422, TESTI2049452, TESTI2049469, TESTI2049553, TESTI2049576, TESTI2049857, TESTI2049956, TESTI2050137, TESTI2050681, TESTI2050780, TESTI2050987, TESTI2051148, TESTI2051177, TESTI2051279, TESTI2051488, TESTI2051543, TESTI2051627, TESTI2051742, TESTI2051767, TESTI2051791, TESTI2051806, TESTI2051867, TESTI2051873, TESTI2052110, TESTI2052202, TESTI2052211, TESTI2052256, TESTI2052288, TESTI2052525, TESTI2052670, TESTI2052693, TESTI2052698, TESTI2052799, TESTI2052822, TESTI2052985, TESTI2053151, TESTI2053242,

[3690] TESTI2053399, TESTI2053526, TESTI2053561, TESTI2053621, TESTI2053667, TESTI3000002, TESTI3000005, TESTI4000068, TESTI4000079, TESTI4000093, TESTI4000134, TESTI4000137, TESTI4000153, TESTI4000155, TESTI4000157, TESTI4000183, TESTI4000214, TESTI4000215, TESTI4000228, TESTI4000250, TESTI4000288, TESTI4000319, TESTI4000349, TESTI4000370, TESTI4000394, TESTI4000434, TESTI4000462, TESTI4000530, TESTI4000534, TESTI4000598, TESTI4000600, TESTI4000621, TESTI4000703, TESTI4000724, TESTI4000957, TESTI4000970, TESTI4001036, TESTI4001037, TESTI4001060, TESTI4001106, TESTI4001148, TESTI4001176, TESTI4001195, TESTI4001201, TESTI4001206, TESTI4001348, TESTI4001441, TESTI4001473, TESTI4001517, TESTI4001527,

[3691] TESTI4001561, TESTI4001569, TESTI4001604, TESTI4001665, TESTI4001679, TESTI4001795, TESTI4001923, TESTI4001925, TESTI4001984, TESTI4002003, TESTI4002141, TESTI4002202, TESTI4002290, TESTI4002319, TESTI4002491, TESTI4002520, TESTI4002552, TESTI4002647, TESTI4002703, TESTI4002754, TESTI4002868, TESTI4002878, TESTI4002889, TESTI4002988, TESTI4003150, TESTI4003179, TESTI4003279, TESTI4003319, TESTI4003404, TESTI4003565, TESTI4003574, TESTI4003579, TESTI4003602, TESTI4003733, TESTI4003796, TESTI4004003, TESTI4004031, TESTI4004200, TESTI4004210, TESTI4004539, TESTI4004626, TESTI4004653, TESTI4004695, TESTI4004722, TESTI4004887, TESTI4004917, TESTI4005015, TESTI4005039, TESTI4005133, TESTI4005158,

[3692] TESTI4005317, TESTI4005322, TESTI4005470, TESTI4005500, TESTI4005543, TESTI4005628, TESTI4005801, TESTI4005805, TESTI4005857, TESTI4005961, TESTI4006053, TESTI4006079, TESTI4006112, TESTI4006137, TESTI4006148, TESTI4006219, TESTI4006234, TESTI4006308, TESTI4006326, TESTI4006393, TESTI4006407, TESTI4006412, TESTI4006420, TESTI4006441, TESTI4006473, TESTI4006539, TESTI4006546, TESTI4006567, TESTI4006704, TESTI4006728, TESTI4006802, TESTI4006819, TESTI4007064, TESTI4007163, TESTI4007176, TESTI4007203, TESTI4007239, TESTI4007369, TESTI4007373, TESTI4007382, TESTI4007404, TESTI4007489, TESTI4007565, TESTI4007671, TESTI4007775, TESTI4007778, TESTI4007799, TESTI4007810, TESTI4007816, TESTI4007965,

[3693] TESTI4008007, TESTI4008018, TESTI4008050, TESTI4008058, TESTI4008086, TESTI4008097, TESTI4008176, TESTI4008209, TESTI4008219, TESTI4008250, TESTI4008302, TESTI4008305, TESTI4008401, TESTI4008417, TESTI4008429, TESTI4008573, TESTI4008816, TESTI4008840, TESTI4008935, TESTI4008993, TESTI4009022, TESTI4009028, TESTI4009034, TESTI4009123, TESTI4009160, TESTI4009215, TESTI4009283, TESTI4009306, TESTI4009374, TESTI4009406, TESTI4009454, TESTI4009457, TESTI4009501, TESTI4009563, TESTI4009608, TESTI4009638, TESTI4009752, TESTI4009881, TESTI4009886, TESTI4009928, TESTI4010076, TESTI4010082, TESTI4010095, TESTI4010211, TESTI4010377, TESTI4010475, TESTI4010544, TESTI4010713, TESTI4010721, TESTI4010789,

[3694] TESTI4010817, TESTI4010831, TESTI4010851, TESTI4010902, TESTI4010928, TESTI4010979, TESTI4011070, TESTI4011072, TESTI4011084, TESTI4011118, TESTI4011246, TESTI4011484, TESTI4011505, TESTI4011532, TESTI4011616, TESTI4011744, TESTI4011745, TESTI4011829, TESTI4011926, TESTI4011956, TESTI4012010, TESTI4012086, TESTI4012258, TESTI4012293, TESTI4012329, TESTI4012382, TESTI4012406, TESTI4012448, TESTI4012451, TESTI4012505, TESTI4012556, TESTI4012623, TESTI4012646, TESTI4012679, TESTI4012911, TESTI4012956, TESTI4012960, TESTI4013365, TESTI4013369, TESTI4013410, TESTI4013474, TESTI4013602, TESTI4013667, TESTI4013685, TESTI4013735, TESTI4013742, TESTI4013774, TESTI4013817, TESTI4013830, TESTI4013852,

[3695] TESTI4013924, TESTI4013960, TESTI4013962, TESTI4014175, TESTI4014265, TESTI4014276, TESTI4014306, TESTI4014392, TESTI4014415, TESTI4014445, TESTI4014553, TESTI4014661, TESTI4014694, TESTI4014801, TESTI4014818, TESTI4014891, TESTI4014908, TESTI4014924, TESTI4014932, TESTI4014977, TESTI4015012, TESTI4015129, TESTI4015145, TESTI4015204, TESTI4015263, TESTI4015293, TESTI4015299, TESTI4015339, TESTI4015398, TESTI4015442, TESTI4015471, TESTI4015477, TESTI4015600, TESTI4015646, TESTI4015681, TESTI4015688, TESTI4015790, TESTI4016110, TESTI4016238, TESTI4016551, TESTI4016812, TESTI4016822, TESTI4016865, TESTI4016882, TESTI4016925, TESTI4017001, TESTI4017116, TESTI4017137, TESTI4017229, TESTI4017254,

[3696] TESTI4017269, TESTI4017380, TESTI4017382, TESTI4017543, TESTI4017575, TESTI4017647, TESTI4017714, TESTI4017763, TESTI4017848, TESTI4017854, TESTI4017901, TESTI4017961, TESTI4017984, TESTI4018101, TESTI4018152, TESTI4018208, TESTI4018382, TESTI4018436, TESTI4018506, TESTI4018555, TESTI4018751, TESTI4018806, TESTI4018835, TESTI4018859, TESTI4018881, TESTI4018938, TESTI4019140, TESTI4019149, TESTI4019299, TESTI4019417, TESTI4019440, TESTI4019566, TESTI4019657, TESTI4019756, TESTI4019843, TESTI4020092, TESTI4020102, TESTI4020342, TESTI4020460, TESTI4020596, TESTI4020806, TESTI4020819, TESTI4020920, TESTI4021129, TESTI4021197, TESTI4021294, TESTI4021377, TESTI4021456, TESTI4021491, TESTI4021569,

[3697] TESTI4021713, TESTI4021821, TESTI4022158, TESTI4022577, TESTI4022716, TESTI4022873, TESTI4023096, TESTI4023172, TESTI4023546, TESTI4023555, TESTI4023654, TESTI4023722, TESTI4023762, TESTI4023942, TESTI4024096, TESTI4024240, TESTI4024294, TESTI4024344, TESTI4024387, TESTI4024420, TESTI4024494, TESTI4024740, TESTI4024874, TESTI4024890, TESTI4024907, TESTI4024930, TESTI4025062, TESTI4025268, TESTI4025401, TESTI4025494, TESTI4025547, TESTI4025731, TESTI4025797, TESTI4025865, TESTI4025908, TESTI4025920, TESTI4026079, TESTI4026080, TESTI4026192, TESTI4026207, TESTI4026295, TESTI4026390, TESTI4026456, TESTI4026510, TESTI4026524, TESTI4026680, TESTI4026700, TESTI4026762, TESTI4026785, TESTI4027139,

[3698] TESTI4027170, TESTI4027262, TESTI4027516, TESTI4027557, TESTI4027660, TESTI4027821, TESTI4027969, TESTI4028042, TESTI4028059, TESTI4028062, TESTI4028182, TESTI4028429, TESTI4028612, TESTI4028692, TESTI4028809, TESTI4028823, TESTI4028880, TESTI4028904, TESTI4028938, TESTI4028958, TESTI4028983, TESTI4029023, TESTI4029348, TESTI4029370, TESTI4029528, TESTI4029651, TESTI4029676, TESTI4029690, TESTI4029731, TESTI4029743, TESTI4030069, TESTI4030159, TESTI4030319, TESTI4030505, TESTI4030603, TESTI4030669, TESTI4030673, TESTI4030864, TESTI4031066, TESTI4031173, TESTI4031335, TESTI4031745, TESTI4031818, TESTI4032090, TESTI4032112, TESTI4032128, TESTI4032270, TESTI4032375, TESTI4032834, TESTI4032856,

[3699] TESTI4032895, TESTI4032913, TESTI4033146, TESTI4033177, TESTI4033433, TESTI4033690, TESTI4034172, TESTI4034212, TESTI4034432, TESTI4034495, TESTI4034632, TESTI4034633, TESTI4034912, TESTI4034973, TESTI4035063, TESTI4035065, TESTI4035498, TESTI4035508, TESTI4035581, TESTI4035602, TESTI4035637, TESTI4035649, TESTI4035770, TESTI4035872, TESTI4035895, TESTI4035898, TESTI4035989, TESTI4036012, TESTI4036042, TESTI4036048, TESTI4036315, TESTI4036319, TESTI4036449, TESTI4036767, TESTI4036909, TESTI4037066, TESTI4037188, TESTI4037228, TESTI4037244, TESTI4037727, TESTI4037949, TESTI4038047, TESTI4038099, TESTI4038156, TESTI4038223, TESTI4038258, TESTI4038339, TESTI4038492, TESTI4038721, TESTI4038758,

[3700] TESTI4038779, TESTI4038818, TESTI4039038, TESTI4039086, TESTI4039451, TESTI4039575, TESTI4039659, TESTI4039744, TESTI4039904, TESTI4040197, TESTI4040363, TESTI4040535, TESTI4040559, TESTI4040598, TESTI4040800, TESTI4040804, TESTI4040939, TESTI4040956, TESTI4041049, TESTI4041053, TESTI4041086, TESTI4041099, TESTI4041143, TESTI4041482, TESTI4041519, TESTI4041624, TESTI4041629, TESTI4041832, TESTI4041844, TESTI4041903, TESTI4041954, TESTI4041984, TESTI4041985, TESTI4041986, TESTI4042098, TESTI4042420, TESTI4042440, TESTI4042444, TESTI4042711, TESTI4042846, TESTI4043067, TESTI4043129, TESTI4043140, TESTI4043166, TESTI4043203, TESTI4043223, TESTI4043371, TESTI4043378, TESTI4043512, TESTI4043551,

[3701] TESTI4043710, TESTI4043947, TESTI4044035, TESTI4044076, TESTI4044084, TESTI4044123, TESTI4044186, TESTI4044234, TESTI4044291, TESTI4044296, TESTI4044300, TESTI4044682, TESTI4044704, TESTI4044770, TESTI4045168, TESTI4045312, TESTI4045330, TESTI4045470, TESTI4045701, TESTI4045908, TESTI4045955, TESTI4045982, TESTI4046073, TESTI4046090, TESTI4046240, TESTI4046245, TESTI4046253, TESTI4046282, TESTI4046328, TESTI4046450, TESTI4046457, TESTI4046487, TESTI4046502, TESTI4046523, TESTI4046819, TESTI4046873, TESTI4046884, TESTI4046896, TESTI4046903, TESTI4046962, TESTI4047069, TESTI4047119, TESTI4047305, TESTI4047328, TESTI4047437, TESTI4047569, TESTI4047746, TESTI4047808, THYMU1000010, THYMU1000017,

[3702] THYMU1000025, THYMU1000029, THYMU1000032, THYMU1000033, THYMU1000060, THYMU1000074, THYMU1000098, THYMU1000105, THYMU1000136, THYMU1000144, THYMU1000158, THYMU1000176, THYMU1000179, THYMU1000191, THYMU1000198, THYMU1000217, THYMU1000240, THYMU1000242, THYMU1000291, THYMU1000318, THYMU1000329, THYMU1000331, THYMU1000336, THYMU1000366, THYMU1000382, THYMU1000393, THYMU1000399, THYMU1000426, THYMU1000440, THYMU1000459, THYMU1000473, THYMU1000490, THYMU1000491, THYMU1000496, THYMU1000499, THYMU1000527, THYMU1000532, THYMU1000536, THYMU1000554, THYMU1000558, THYMU1000576, THYMU1000600, THYMU1000677, THYMU1000692, THYMU2000022, THYMU2000032, THYMU2000057, THYMU2000120, THYMU2000138, THYMU2000140,

[3703] THYMU2000155, THYMU2000162, THYMU2000171, THYMU2000176, THYMU2000179, THYMU2000231, THYMU2000236, THYMU2000276, THYMU2000280, THYMU2000300, THYMU2000317, THYMU2000368, THYMU2000369, THYMU2000418, THYMU2000440, THYMU2000489, THYMU2000492, THYMU2000519, THYMU2000570, THYMU2000602, THYMU2000660, THYMU2000671, THYMU2000672, THYMU2000702, THYMU2000767, THYMU2000775, THYMU2000800, THYMU2000879, THYMU2000932, THYMU2000946, THYMU2000950, THYMU2000971, THYMU2000982, THYMU2000990, THYMU2001018, THYMU2001053, THYMU2001071, THYMU2001090, THYMU2001139, THYMU2001195, THYMU2001202, THYMU2001203, THYMU2001256, THYMU2001270, THYMU2001291, THYMU2001314, THYMU2001325, THYMU2001357, THYMU2001381, THYMU2001443,

[3704] THYMU2001515, THYMU2001521, THYMU2001556, THYMU2001622, THYMU2001727, THYMU2001819, THYMU2001825, THYMU2001839, THYMU2001868, THYMU2001898, THYMU2001900, THYMU2001916, THYMU2001926, THYMU2001989, THYMU2002023, THYMU2002037, THYMU2002080, THYMU2002109, THYMU2002147, THYMU2002154, THYMU2002157, THYMU2002162, THYMU2002177, THYMU2002203, THYMU2002229, THYMU2002242, THYMU2002338, THYMU2002356, THYMU2002376, THYMU2002384, THYMU2002450, THYMU2002490, THYMU2002548, THYMU2002695, THYMU2002745, THYMU2002756, THYMU2002789, THYMU2002792, THYMU2002841, THYMU2002852, THYMU2002910, THYMU2002950, THYMU2002983, THYMU2003069, THYMU2003107, THYMU2003124, THYMU2003133, THYMU2003166, THYMU2003232, THYMU2003242,

[3705] THYMU2003249, THYMU2003270, THYMU2003282, THYMU2003287, THYMU2003336, THYMU2003366, THYMU2003397, THYMU2003440, THYMU2003470, THYMU2003479, THYMU2003499, THYMU2003542, THYMU2003632, THYMU2003650, THYMU2003700, THYMU2003760, THYMU2003803, THYMU2003855, THYMU2003907, THYMU2003932, THYMU2004003, THYMU2004008, THYMU2004042, THYMU2004108, THYMU2004111, THYMU2004123, THYMU2004139, THYMU2004169, THYMU2004284, THYMU2004320, THYMU2004336, THYMU2004344, THYMU2004356, THYMU2004452, THYMU2004508, THYMU2004512, THYMU2004635, THYMU2004639, THYMU2004668, THYMU2004677, THYMU2004688, THYMU2004693, THYMU2004733, THYMU2004835, THYMU2004843, THYMU2004906, THYMU2004916, THYMU2004986, THYMU2005001, THYMU2005003,

[3706] THYMU2005046, THYMU2005134, THYMU2005156, THYMU2005190, THYMU2005225, THYMU2005240, THYMU2005246, THYMU2005270, THYMU2005283, THYMU2005303, THYMU2005321, THYMU2005356, THYMU2005369, THYMU2005439, THYMU2005480, THYMU2005482, THYMU2005507, THYMU2005545, THYMU2005574, THYMU2005576, THYMU2005748, THYMU2005759, THYMU2005807, THYMU2005815, THYMU2005855, THYMU2005881, THYMU2005948, THYMU2005980, THYMU2005997, THYMU2006001, THYMU2006048, THYMU2006098, THYMU2006160, THYMU2006170, THYMU2006252, THYMU2006261, THYMU2006277, THYMU2006303, THYMU2006324, THYMU2006350, THYMU2006357, THYMU2006365, THYMU2006420, THYMU2006468, THYMU2006610, THYMU2006666, THYMU2006712, THYMU2006913, THYMU2006946, THYMU2006965, THYMU2007025, THYMU2007036, THYMU2007060, THYMU2007065, THYMU2007095, THYMU2007112, THYMU2007146, THYMU2007179, THYMU2007258, THYMU2007307, THYMU2007308, THYMU2007339, THYMU2007350, THYMU2007384, THYMU2007493, THYMU2007521, THYMU2007528, THYMU2007530, THYMU2007532, THYMU2007561, THYMU2007571, THYMU207635, THYMU2007658, THYMU2007667, THYMU2007694, THYMU2007725, THYMU2007729, THYMU2007802, THYMU2007824, THYMU2007854, THYMU2007952, THYMU2007969, THYMU2008035, THYMU2008036, THYMU2008049, THYMU2008072, THYMU2008111, THYMU2008145, THYMU2008149, THYMU2008185, THYMU2008191, THYMU2008207, THYMU2008226, THYMU2008282, THYMU2008321, THYMU2008339, THYMU2008350, THYMU2008351, THYMU2008383, THYMU2008452,

[3707] THYMU2008643, THYMU2008691, THYMU2008714, THYMU2008727, THYMU2008781, THYMU2008799, THYMU2008876, THYMU2008910, THYMU2008917, THYMU2008928, THYMU2008990, THYMU2008994, THYMU2009023, THYMU2009046, THYMU2009101, THYMU2009104, THYMU2009134, THYMU2009157, THYMU2009181, THYMU2009186, THYMU2009338, THYMU2009425, THYMU2009516, THYMU2009526, THYMU2009546, THYMU2009592, THYMU2009596, THYMU2009792, THYMU2009835, THYMU2009906, THYMU2009948, THYMU2010030, THYMU2010041, THYMU2010046, THYMU2010059, THYMU2010082, THYMU2010161, THYMU2010192, THYMU2010519, THYMU2010637, THYMU2010671, THYMU2010699, THYMU2010705, THYMU2010779, THYMU2010816, THYMU2010831, THYMU2010848, THYMU2011053, THYMU2011063, THYMU2011072,

[3708] THYMU2011096, THYMU2011118, THYMU2011142, THYMU2011183, THYMU2011257, THYMU2011259, THYMU2011295, THYMU2011308, THYMU2011390, THYMU2011431, THYMU2011447, THYMU2011482, THYMU2011538, THYMU2011548, THYMU2011551, THYMU2011564, THYMU2011573, THYMU2011585, THYMU2011621, THYMU2011666, THYMU2011736, THYMU2011785, THYMU2011806, THYMU2011852, THYMU2011875, THYMU2011881, THYMU2011937, THYMU2011939, THYMU2012002, THYMU2012073, THYMU2012104, THYMU2012113, THYMU2012273, THYMU2012401, THYMU2012492, THYMU2012507, THYMU2012565, THYMU2012574, THYMU2012625, THYMU2012631, THYMU2012665, THYMU2012690, THYMU2012701, THYMU2012807, THYMU2012826, THYMU2012882, THYMU2012891, THYMU2012902, THYMU2012919, THYMU2013023,

[3709] THYMU2013047, THYMU2013051, THYMU2013089, THYMU2013136, THYMU2013170, THYMU2013364, THYMU2013386, THYMU2013426, THYMU2013578, THYMU2013648, THYMU2013705, THYMU2013757, THYMU2013779, THYMU2013863, THYMU2013950, THYMU2013981, THYMU2014067, THYMU2014068, THYMU2014167, THYMU2014183, THYMU2014204, THYMU2014297, THYMU2014323, THYMU2014327, THYMU2014353, THYMU2014492, THYMU2014500, THYMU2014599, THYMU2014762, THYMU2014777, THYMU2014801, THYMU2014901, THYMU2014923, THYMU2015019, THYMU2015161, THYMU2015316, THYMU2015439, THYMU2015441, THYMU2015479, THYMU2015762, THYMU2015775, THYMU2015825, THYMU2015918, THYMU2015943, THYMU2015984, THYMU2016113, THYMU2016164, THYMU2016204, THYMU2016219, THYMU2016360,

[3710] THYMU2016496, THYMU2016523, THYMU2016840, THYMU2016968, THYMU2017008, THYMU2017010, THYMU2017023, THYMU2017085, THYMU2017099, THYMU2017158, THYMU2017162, THYMU2017215, THYMU2017362, THYMU2017366, THYMU2017398, THYMU2017449, THYMU2017479, THYMU2017522, THYMU2017526, THYMU2017601, THYMU2017675, THYMU2017707, THYMU2017831, THYMU2017844, THYMU2017878, THYMU2017948, THYMU2018028, THYMU2018071, THYMU2018126, THYMU2018189, THYMU2018197, THYMU2018384, THYMU2018455, THYMU2018547, THYMU2018565, THYMU2018639, THYMU2018673, THYMU2018721, THYMU2018772, THYMU2018819, THYMU2018841, THYMU2018997, THYMU2019054, THYMU2019197, THYMU2019210, THYMU2019364, THYMU2019436, THYMU2019442, THYMU2019587, THYMU2019599,

[3711] THYMU2019686, THYMU2019813, THYMU2020198, THYMU2020289, THYMU2020416, THYMU2020491, THYMU2020499, THYMU2020560, THYMU2020830, THYMU2020883, THYMU2020959, THYMU2021361, THYMU2021509, THYMU2021597, THYMU2021714, THYMU2022213, THYMU2022289, THYMU2022660, THYMU2022854, THYMU2022922, THYMU2023209, THYMU2023264, THYMU2023576, THYMU2023711, THYMU2023900, THYMU2023943, THYMU2023967, THYMU2024121, THYMU2024185, THYMU2024207, THYMU2024616, THYMU2024684, THYMU2024748, THYMU2025042, THYMU2025189, THYMU2025325, THYMU2025406, THYMU2025557, THYMU2025572, THYMU2025707, THYMU2025849, THYMU2025909, THYMU2025939, THYMU2026182, THYMU2026350, THYMU2026530, THYMU2026531, THYMU2026835, THYMU2026904, THYMU2027053,

[3712] THYMU2027125, THYMU2027168, THYMU2027249, THYMU2027282, THYMU2027497, THYMU2027695, THYMU2027734, THYMU2027894, THYMU2027975, THYMU2027996, THYMU2028041, THYMU2028368, THYMU2028379, THYMU2028394, THYMU2028412, THYMU2028629, THYMU2028632, THYMU2028724, THYMU2028739, THYMU2028942, THYMU2028978, THYMU2029134, THYMU2029578, THYMU2029676, THYMU2029688, THYMU2029788, THYMU2030068, THYMU2030226, THYMU2030264, THYMU2030462, THYMU2030543, THYMU2030637, THYMU2030655, THYMU2030796, THYMU2030912, THYMU2030982, THYMU2031046, THYMU2031139, THYMU2031218, THYMU2031249, THYMU2031258, THYMU2031341, THYMU2031368, THYMU2031579, THYMU2031847, THYMU2031994, THYMU2032014, THYMU2032035, THYMU2032080, THYMU2032150,

[3713] THYMU2032155, THYMU2032358, THYMU2032437, THYMU2032601, THYMU2032655, THYMU2032696, THYMU2032715, THYMU2032732, THYMU2032825, THYMU2032976, THYMU2033053, THYMU2033059, THYMU2033079, THYMU2033085, THYMU2033104, THYMU2033227, THYMU2033263, THYMU2033308, THYMU2033401, THYMU2033583, THYMU2033755, THYMU2033787, THYMU2033816, THYMU2034182, THYMU2034279, THYMU2034314, THYMU2034338, THYMU2034374, THYMU2034647, THYMU2035064, THYMU2035078, THYMU2035101, THYMU2035319, THYMU2035321, THYMU2035388, THYMU2035400, THYMU2035554, THYMU2035710, THYMU2036058, THYMU2036105, THYMU2036207, THYMU2036215, THYMU2036252, THYMU2036265, THYMU2036366, THYMU2036459, THYMU2036604, THYMU2036653, THYMU2037081, THYMU2037208,

[3714] THYMU2037226, THYMU2037233, THYMU2037234, THYMU2037348, THYMU2037406, THYMU2037965, THYMU2038058, THYMU2038189, THYMU2038199, THYMU2038220, THYMU2038301, THYMU2038369, THYMU2038389, THYMU2038615, THYMU2038636, THYMU2038739, THYMU2038772, THYMU2038797, THYMU2038906, THYMU2039305, THYMU2039315, THYMU2039334, THYMU2039350, THYMU2039411, THYMU2039634, THYMU2039719, THYMU2039780, THYMU2039788, THYMU2039989, THYMU2040029, THYMU2040110, THYMU2040114, THYMU2040140, THYMU2040412, THYMU2040427, THYMU2040824, THYMU2040925, THYMU2041007, THYMU2041015, THYMU2041252, THYMU3000028, THYMU3000036, THYMU3000037, THYMU3000082, THYMU3000194, THYMU3000224, THYMU3000269, THYMU3000306, THYMU3000360, THYMU3000390,

[3715] THYMU3000420, THYMU3000490, THYMU3000504, THYMU3000542, THYMU3000655, THYMU3000776, THYMU3000826, THYMU3000841, THYMU3001077, THYMU3001082, THYMU3001083, THYMU3001133, THYMU3001151, THYMU3001379, THYMU3001593, THYMU3001883, THYMU3001939, THYMU3001991, THYMU3002452, THYMU3002661, THYMU3003007, THYMU3003092, THYMU3003212, THYMU3003309, THYMU3003350, THYMU3003403, THYMU3003565, THYMU3003763, THYMU3003865, THYMU3003958, THYMU3003965, THYMU3004157, THYMU3004628, THYMU3004632, THYMU3004835, THYMU3004866, THYMU3005050, THYMU3005378, THYMU3005407, THYMU3005415, THYMU3005427, THYMU3005482, THYMU3005491, THYMU3005629, THYMU3005696, THYMU3006118, THYMU3006132, THYMU3006168, THYMU3006172, THYMU3006371,

[3716] THYMU3006485, THYMU3006640, THYMU3006767, THYMU3006811, THYMU3006963, THYMU3007137, THYMU3007308, THYMU3007368, THYMU3007423, THYMU3007559, THYMU3007845, THYMU3008060, THYMU3008105, THYMU3008136, THYMU3008171, THYMU3008216, THYMU3008436, THYMU3008672, THYMU3008883, THYMU3008935, THYMU3009006, THYMU3009255, THYMU3009391, THYMU3009643, THYMU3009755, THYMU3010247, THYMU3011012, THYMU3011081, THYMU3011244, THYMU3011360, THYMU3011534, THYMU3011543, THYMU3011556, THYMU3011717, THYMU3011827, THYMU3012402, THYMU3012907, THYMU3012983, THYMU3013114, THYMU3013197, THYMU3013241, THYMU3013470, THYMU3013785, THYMU3013897, THYMU3014038, THYMU3014173, THYMU3014372, THYMU3014555, THYMU3014620, THYMU3014701,

[3717] THYMU3015042, THYMU3015457, THYMU3015571, THYMU3015592, THYMU3015625, THYMU3015647, THYMU3015759, THYMU3015962, THYMU3016022, THYMU3016518, THYMU3016797, THYMU3016822, THYMU3016850, THYMU3017562, THYMU3017688, THYMU3017689, THYMU3017761, THYMU3018151, THYMU3018896, THYMU3019095, THYMU3019476, THYMU3019605, THYMU3019916, THYMU3020221, THYMU3020595, THYMU3020713, THYMU3020856, THYMU3020869, THYMU3020970, THYMU3021404, THYMU3021755, THYMU3021900, THYMU3022211, THYMU3022434, THYMU3022528, THYMU3022668, THYMU3022982, THYMU3023107, THYMU3023211, THYMU3023216, THYMU3023394, THYMU3023400, THYMU3023797, THYMU3024164, THYMU3024339, THYMU3024602, THYMU3024879, THYMU3025118, THYMU3025313, THYMU3025642,

[3718] THYMU3025683, THYMU3025772, THYMU3025865, THYMU3026000, THYMU3026479, THYMU3026532, THYMU3026783, THYMU3026869, THYMU3027251, THYMU3027540, THYMU3027655, THYMU3027671, THYMU3028075, THYMU3028461, THYMU3028702, THYMU3029188, THYMU3029318, THYMU3029421, THYMU3029719, THYMU3029774, THYMU3029832, THYMU3030072, THYMU3030231, THYMU3030706, THYMU3030710, THYMU3030752, THYMU3031146, THYMU3031402, THYMU3031610, THYMU3031612, THYMU3031868, THYMU3031878, THYMU3032032, THYMU3032867, THYMU3033402, THYMU3033626, THYMU3033630, THYMU3033649, THYMU3033754, THYMU3033759, THYMU3034078, THYMU3034099, THYMU3034453, THYMU3034853, THYMU3034867, THYMU3034983, THYMU3036200, THYMU3036310, THYMU3036934, THYMU3036953,

[3719] THYMU3037052, THYMU3037192, THYMU3037617, THYMU3037772, THYMU3037827, THYMU3037836, THYMU3037856, THYMU3037867, THYMU3037909, THYMU3037980, THYMU3038158, THYMU3038167, THYMU3038214, THYMU3038266, THYMU3038328, THYMU3038347, THYMU3038375, THYMU3038603, THYMU3038687, THYMU3038759, THYMU3038879, THYMU3038970, THYMU3039807, THYMU3039846, THYMU3040068, THYMU3040126, THYMU3040146, THYMU3040168, THYMU3040172, THYMU3040725, THYMU3040746, THYMU3040816, THYMU3040829, THYMU3040830, THYMU3040986, THYMU3041354, THYMU3041386, THYMU3041428, THYMU3041573, THYMU3041603, THYMU3041736, THYMU3041918, THYMU3042075, THYMU3042321, THYMU3042372, THYMU3042758, THYMU3042929, THYMU3043200, THYMU3043327, THYMU3043482,

[3720] THYMU3043597, THYMU3043688, THYMU3043779, THYMU3043883, THYMU3043993, THYMU3044175, THYMU3044188, THYMU3044441, THYMU3044445, THYMU3045510, THYMU3045673, THYMU3045692, THYMU3045704, THYMU3046140, THYMU3046350, THYMU3046360, THYMU3046856, THYMU3047115, THYMU3047144, THYMU3047156, THYMU3047366, THYMU3047513, THYMU3047542, THYMU3047760, THYMU3047891, TKIDN1000001, TKIDN1000044, TKIDN1000062, TKIDN1000066, TKIDN1000164, TKIDN1000171, TKIDN1000192, TKIDN2000127, TKIDN2000240, TKIDN2000246, TKIDN2000319, TKIDN2000464, TKIDN2000521, TKIDN2000701, TKIDN2001529, TKIDN2001662, TKIDN2002318, TKIDN2002329, TKIDN2002424, TKIDN2002632, TKIDN2002738, TKIDN2003044, TKIDN2003059, TKIDN2003062, TKIDN2003078,

[3721] TKIDN2003366, TKIDN2003396, TKIDN2003413, TKIDN2003597, TKIDN2003601, TKIDN2004185, TKIDN2004386, TKIDN2004458, TKIDN2004748, TKIDN2005487, TKIDN2005721, TKIDN2005934, TKIDN2005947, TKIDN2005956, TKIDN2006525, TKIDN2006761, TKIDN2006852, TKIDN2007605, TKIDN2007667, TKIDN2007828, TKIDN2008176, TKIDN2008778, TKIDN2009092, TKIDN2009330, TKIDN2009481, TKIDN2009641, TKIDN2009794, TKIDN2009889, TKIDN2010200, TKIDN2010232, TKIDN2010278, TKIDN2010602, TKIDN2010812, TKIDN2010934, TKIDN2011051, TKIDN2011160, TKIDN2011289, TKIDN2011324, TKIDN2012034, TKIDN2012771, TKIDN2012824, TKIDN2013134, TKIDN2013287, TKIDN2014570, TKIDN2014757, TKIDN2014771, TKIDN2014964, TKIDN2015025, TKIDN2015071, TKIDN2015161,

[3722] TKIDN2015263, TKIDN2015285, TKIDN2015423, TKIDN2015788, TKIDN2016309, TKIDN2016399, TKIDN2016846, TKIDN2018926, TKIDN2019116, TLIVE2000023, TLIVE2000142, TLIVE2000292, TLIVE2000762, TLIVE2000979, TLIVE2001327, TLIVE2001616, TLIVE2001684, TLIVE2001828, TLIVE2001927, TLIVE2002046, TLIVE2002336, TLIVE2002338, TLIVE2002562, TLIVE2002690, TLIVE2002882, TLIVE2003197, TLIVE2003200, TLIVE2003225, TLIVE2003381, TLIVE2003737, TLIVE2003961, TLIVE2003970, TLIVE2004110, TLIVE2004320, TLIVE2004331, TLIVE2004601, TLIVE2005180, TLIVE2005390, TLIVE2005516, TLIVE2005731, TLIVE2005866, TLIVE2006236, TLIVE2006359, TLIVE2006529, TLIVE2006621, TLIVE2006733, TLIVE2007000, TLIVE2007016, TLIVE2007132, TLIVE2007192,

[3723] TLIVE2007528, TLIVE2007607, TLIVE2007736, TLIVE2007816, TLIVE2007919, TLIVE2008083, TLIVE2008213, TLIVE2008221, TLIVE2008229, TLIVE2008712, TLIVE2008797, TLIVE2009087, TLIVE2009163, TLIVE2009489, TLIVE2009541, TLUNG2000179, TOVAR2000575, TOVAR2000649, TOVAR2000904, TOVAR2001281, TOVAR2001556, TOVAR2001730, TOVAR2002247, TOVAR2002514, TOVAR2002549, TOVAR2002800, TRACH1000011, TRACH1000018, TRACH1000057, TRACH1000074, TRACH1000100, TRACH1000106, TRACH1000125, TRACH1000140, TRACH1000144, TRACH1000193, TRACH1000212, TRACH1000240, TRACH2000002, TRACH2000015, TRACH2000024, TRACH2000032, TRACH2000045, TRACH2000047, TRACH2000081, TRACH2000083, TRACH2000148, TRACH2000185, TRACH2000196, TRACH2000235,

[3724] TRACH2000243, TRACH2000250, TRACH2000259, TRACH2000272, TRACH2000282, TRACH2000287, TRACH2000289, TRACH2000306, TRACH2000312, TRACH2000336, TRACH2000393, TRACH2000411, TRACH2000420, TRACH2000496, TRACH2000497, TRACH2000502, TRACH2000522, TRACH2000540, TRACH2000559, TRACH2000660, TRACH2000665, TRACH2000675, TRACH2000677, TRACH2000702, TRACH2000703, TRACH2000767, TRACH2000775, TRACH2000807, TRACH2000862, TRACH2000873, TRACH2000894, TRACH2000898, TRACH2000920, TRACH2000923, TRACH2000926, TRACH2000944, TRACH2000972, TRACH2000981, TRACH2000986, TRACH2001037, TRACH2001060, TRACH2001085, TRACH2001101, TRACH2001109, TRACH2001121, TRACH2001147, TRACH2001154, TRACH2001188, TRACH2001249, TRACH2001275,

[3725] TRACH2001314, TRACH2001335, TRACH2001339, TRACH2001341, TRACH2001347, TRACH2001395, TRACH2001400, TRACH2001403, TRACH2001416, TRACH2001428, TRACH2001474, TRACH2001478, TRACH2001523, TRACH2001525, TRACH2001532, TRACH2001592, TRACH2001607, TRACH2001621, TRACH2001646, TRACH2001651, TRACH2001684, TRACH2001898, TRACH2001933, TRACH2001968, TRACH2001996, TRACH2002043, TRACH2002092, TRACH2002100, TRACH2002138, TRACH2002333, TRACH2002664, TRACH2002784, TRACH2002803, TRACH2002840, TRACH2002847, TRACH2002853, TRACH2002862, TRACH2002954, TRACH2002960, TRACH2002988, TRACH2003070, TRACH2003347, TRACH2003484, TRACH2003516, TRACH2003605, TRACH2003736, TRACH2003759, TRACH2003941, TRACH2004039, TRACH2004054,

[3726] TRACH2004087, TRACH2004109, TRACH2004170, TRACH2004183, TRACH2004251, TRACH2004292, TRACH2004336, TRACH2004399, TRACH2004428, TRACH2004458, TRACH2004499, TRACH2004521, TRACH2004570, TRACH2004845, TRACH2004887, TRACH2004950, TRACH2005004, TRACH2005017, TRACH2005066, TRACH2005159, TRACH2005314, TRACH2005444, TRACH2005541, TRACH2005666, TRACH2005698, TRACH2005710, TRACH2005720, TRACH2005769, TRACH2005796, TRACH2005800, TRACH2006015, TRACH2006049, TRACH2006097, TRACH2006194, TRACH2006327, TRACH2006331, TRACH2006378, TRACH2006387, TRACH2006528, TRACH2006670, TRACH2006762, TRACH2006866, TRACH2006870, TRACH2006918, TRACH2007059, TRACH2007324, TRACH2007358, TRACH2007483, TRACH2007542, TRACH2007577,

[3727] TRACH2007674, TRACH2007676, TRACH2007688, TRACH2007733, TRACH2007754, TRACH2007816, TRACH2007894, TRACH2007969, TRACH2007988, TRACH2008081, TRACH2008112, TRACH2008113, TRACH2008127, TRACH2008130, TRACH2008278, TRACH2008472, TRACH2008478, TRACH2008540, TRACH2008583, TRACH2008597, TRACH2008716, TRACH2008820, TRACH2008891, TRACH2008921, TRACH2009006, TRACH2009060, TRACH2009107, TRACH2009123, TRACH2009268, TRACH2009291, TRACH2009310, TRACH2009340, TRACH2009348, TRACH2009358, TRACH2009661, TRACH2009730, TRACH2009743, TRACH2009754, TRACH2009851, TRACH2009862, TRACH2009934, TRACH2010159, TRACH2010218, TRACH2010251, TRACH2010272, TRACH2010317, TRACH2010419, TRACH2010451, TRACH2010505, TRACH2010587,

[3728] TRACH2010600, TRACH2010634, TRACH2010639, TRACH2010677, TRACH2010698, TRACH2010771, TRACH2010824, TRACH2010883, TRACH2010965, TRACH2010974, TRACH2011057, TRACH2011093, TRACH2011113, TRACH2011290, TRACH2011293, TRACH2011302, TRACH2011500, TRACH2011574, TRACH2011894, TRACH2011956, TRACH2012000, TRACH2012138, TRACH2012242, TRACH2012298, TRACH2012370, TRACH2012376, TRACH2012387, TRACH2012497, TRACH2012536, TRACH2012562, TRACH2012742, TRACH2012811, TRACH2012823, TRACH2012918, TRACH2013081, TRACH2013123, TRACH2013265, TRACH2013369, TRACH2013450, TRACH2013495, TRACH2013552, TRACH2013585, TRACH2013671, TRACH2013726, TRACH2013902, TRACH2013928, TRACH2013982, TRACH2013991, TRACH2014018, TRACH2014045,

[3729] TRACH2014046, TRACH2014077, TRACH2014082, TRACH2014268, TRACH2014284, TRACH2014337, TRACH2014356, TRACH2014371, TRACH2014483, TRACH2014495, TRACH2014544, TRACH2014573, TRACH2014725, TRACH2014760, TRACH2014815, TRACH2014839, TRACH2014938, TRACH2014950, TRACH2014972, TRACH2014974, TRACH2015180, TRACH2015243, TRACH2015316, TRACH2015381, TRACH2015486, TRACH2015654, TRACH2015824, TRACH2015939, TRACH2015987, TRACH2016080, TRACH2016131, TRACH2016286, TRACH2016317, TRACH2016347, TRACH2016380, TRACH2016384, TRACH2016410, TRACH2016498, TRACH2016533, TRACH2016551, TRACH2016554, TRACH2016651, TRACH2016690, TRACH2016709, TRACH2016722, TRACH2016835, TRACH2016980, TRACH2017086, TRACH2017368, TRACH2017498,

[3730] TRACH2017949, TRACH2017965, TRACH2017980, TRACH2018034, TRACH2018084, TRACH2018262, TRACH2018273, TRACH2018278, TRACH2018317, TRACH2018345, TRACH2018380, TRACH2018446, TRACH2018449, TRACH2018512, TRACH2018646, TRACH2018663, TRACH2018718, TRACH2018835, TRACH2018882, TRACH2018914, TRACH2019024, TRACH2019046, TRACH2019080, TRACH2019151, TRACH2019154, TRACH2019176, TRACH2019248, TRACH2019309, TRACH2019425, TRACH2019473, TRACH2019602, TRACH2019661, TRACH2019672, TRACH2019673, TRACH2019844, TRACH2019879, TRACH2020048, TRACH2020336, TRACH2020525, TRACH2021398, TRACH2021622, TRACH2021635, TRACH2021964, TRACH2022042, TRACH2022113, TRACH2022253, TRACH2022425, TRACH2022553, TRACH2022649, TRACH2022839,

[3731] TRACH2023246, TRACH2023299, TRACH2023306, TRACH2023416, TRACH2023479, TRACH2023684, TRACH2023860, TRACH2023876, TRACH2024139, TRACH2024187, TRACH2024271, TRACH2024293, TRACH2024408, TRACH2024512, TRACH2024559, TRACH2024647, TRACH2024651, TRACH2024730, TRACH2024735, TRACH2024749, TRACH2024821, TRACH2025057, TRACH2025084, TRACH2025155, TRACH2025224, TRACH2025344, TRACH2025379, TRACH2025507, TRACH2025535, TRACH2025569, TRACH2025705, TRACH2025749, TRACH2025753, TRACH2025810, TRACH2025853, TRACH2025911, TRACH2025932, TRACH3000014, TRACH3000017, TRACH3000043, TRACH3000134, TRACH3000180, TRACH3000342, TRACH3000420, TRACH3000515, TRACH3000530, TRACH3000548, TRACH3000558, TRACH3000586, TRACH3000780,

[3732] TRACH3000892, TRACH3000926, TRACH3001119, TRACH3001443, TRACH3001550, TRACH3001759, TRACH3002064, TRACH3002107, TRACH3002168, TRACH3002188, TRACH3002245, TRACH3002293, TRACH3002533, TRACH3002561, TRACH3002567, TRACH3002605, TRACH3002650, TRACH3002752, TRACH3002866, TRACH3002871, TRACH3002876, TRACH3002890, TRACH3003009, TRACH3003037, TRACH3003357, TRACH3003586, TRACH3003683, TRACH3003780, TRACH3003805, TRACH3003832, TRACH3004113, TRACH3004288, TRACH3004303, TRACH3004412, TRACH3004424, TRACH3004456, TRACH3004537, TRACH3004596, TRACH3004651, TRACH3004652, TRACH3004671, TRACH3004747, TRACH3004760, TRACH3004783, TRACH3004786, TRACH3004840, TRACH3004931, TRACH3004934, TRACH3005072, TRACH3005085,

[3733] TRACH3005102, TRACH3005173, TRACH3005191, TRACH3005211, TRACH3005274, TRACH3005294, TRACH3005479, TRACH3005549, TRACH3005702, TRACH3005808, TRACH3005852, TRACH3005896, TRACH3006038, TRACH3006149, TRACH3006228, TRACH3006264, TRACH3006336, TRACH3006379, TRACH3006392, TRACH3006395, TRACH3006397, TRACH3006412, TRACH3006470, TRACH3006589, TRACH3006626, TRACH3006699, TRACH3006717, TRACH3006889, TRACH3006985, TRACH3007097, TRACH3007268, TRACH3007274, TRACH3007277, TRACH3007391, TRACH3007541, TRACH3007595, TRACH3007625, TRACH3007627, TRACH3007689, TRACH3007766, TRACH3007866, TRACH3007995, TRACH3008042, TRACH3008061, TRACH3008093, TRACH3008201, TRACH3008508, TRACH3008535, TRACH3008629, TRACH3008688,

[3734] TRACH3008697, TRACH3008713, TRACH3008887, TRACH3008902, TRACH3008990, TRACH3009001, TRACH3009059, TRACH3009061, TRACH3009455, TRACH3009701, TRACH3009715, TRACH3009894, TRACH3009956, TRACH3010079, TRACH3010167, TRACH3010331, TRACH3010342, TRACH3010382, TRACH3010757, TRACH3010901, TRACH3011004, TRACH3011082, TRACH3011184, TRACH3011282, TRACH3011313, TRACH3011454, TRACH3011485, TRACH3011503, TRACH3011538, TRACH3011542, TRACH3012106, TRACH3012161, TRACH3012232, TRACH3012261, TRACH3012445, TRACH3012460, TRACH3012659, TRACH3012718, TRACH3012864, TRACH3012891, TRACH3012942, TRACH3013043, TRACH3013072, TRACH3013426, TRACH3013454, TRACH3013558, TRACH3013684, TRACH3013693, TRACH3013700, TRACH3013766,

[3735] TRACH3013900, TRACH3013926, TRACH3014063, TRACH3014183, TRACH3014215, TRACH3014316, TRACH3014415, TRACH3014580, TRACH3014641, TRACH3014885, TRACH3015136, TRACH3015336, TRACH3015346, TRACH3015354, TRACH3015467, TRACH3015626, TRACH3015951, TRACH3016051, TRACH3016120, TRACH3016264, TRACH3016277, TRACH3016368, TRACH3016455, TRACH3016614, TRACH3016805, TRACH3016992, TRACH3017171, TRACH3017409, TRACH3017934, TRACH3018108, TRACH3018191, TRACH3018240, TRACH3018261, TRACH3018519, TRACH3018524, TRACH3018606, TRACH3018783, TRACH3018907, TRACH3018933, TRACH3018943, TRACH3019018, TRACH3019058, TRACH3019142, TRACH3019290, TRACH3019347, TRACH3019370, TRACH3019447, TRACH3019598, TRACH3019621, TRACH3019662,

[3736] TRACH3019807, TRACH3019924, TRACH3019977, TRACH3020137, TRACH3020410, TRACH3020563, TRACH3020605, TRACH3020750, TRACH3020769, TRACH3020928, TRACH3020930, TRACH3021023, TRACH3021066, TRACH3021212, TRACH3021335, TRACH3021373, TRACH3021544, TRACH3021778, TRACH3021834, TRACH3021883, TRACH3022170, TRACH3022198, TRACH3022296, TRACH3022482, TRACH3022732, TRACH3022758, TRACH3022875, TRACH3022910, TRACH3022960, TRACH3023063, TRACH3023203, TRACH3023242, TRACH3023373, TRACH3023516, TRACH3023752, TRACH3023945, TRACH3023960, TRACH3024020, TRACH3024081, TRACH3024342, TRACH3024423, TRACH3024428, TRACH3024512, TRACH3024671, TRACH3024823, TRACH3025302, TRACH3025316, TRACH3025346, TRACH3025520, TRACH3026148,

[3737] TRACH3026283, TRACH3026299, TRACH3026303, TRACH3026542, TRACH3026650, TRACH3026676, TRACH3026744, TRACH3026949, TRACH3027229, TRACH3027527, TRACH3027681, TRACH3027701, TRACH3027885, TRACH3028031, TRACH3028164, TRACH3028180, TRACH3028195, TRACH3028441, TRACH3028597, TRACH3028678, TRACH3028837, TRACH3028847, TRACH3028855, TRACH3029139, TRACH3029329, TRACH3029451, TRACH3029462, TRACH3029520, TRACH3029592, TRACH3029629, TRACH3029665, TRACH3029670, TRACH3029800, TRACH3030111, TRACH3030130, TRACH3030176, TRACH3030252, TRACH3030725, TRACH3030855, TRACH3030883, TRACH3031316, TRACH3031400, TRACH3031463, TRACH3031479, TRACH3031518, TRACH3031660, TRACH3031678, TRACH3031936, TRACH3032044, TRACH3032065,

[3738] TRACH3032150, TRACH3032372, TRACH3032480, TRACH3032570, TRACH3032755, TRACH3032827, TRACH3032873, TRACH3033535, TRACH3033680, TRACH3033868, TRACH3034145, TRACH3034414, TRACH3034488, TRACH3034680, TRACH3034731, TRACH3034745, TRACH3034762, TRACH3034903, TRACH3035187, TRACH3035199, TRACH3035235, TRACH3035451, TRACH3035482, TRACH3035526, TRACH3036004, TRACH3036103, TRACH3036193, TRACH3036207, TRACH3036278, TRACH3036309, TRACH3036456, TRACH3036609, TRACH3036638, TRACH3036683, TRACH3036750, TRACH3036792, TRACH3036843, TRACH3036897, TRACH3036932, TRACH3036942, TRACH3036997, TRACH3037063, TRACH3037067, TRACH3037267, TRACH3037288, TRACH3037505, TRACH3037573, TRACH3037696, TRACH3037897, TRACH3038086,

[3739] TRACH3038399, TSTOM1000135, TSTOM1000186, TSTOM2000139, TSTOM2000235, TSTOM2000315, TSTOM2000442, TSTOM2000553, TSTOM2000569, TSTOM2000588, TSTOM2001195, TSTOM2001274, TSTOM2001571, TSTOM2001996, TSTOM2002265, TSTOM2002505, TSTOM2002561, TSTOM2002611, TSTOM2002672, TSTOM2002682

Homology Search Data

[3740] Homology search data for full-length nucleotide sequences and the deduced amino acid sequences are shown below. The search results contain two types of length unit for the sequences compared: aa and bb.

[3741] Each piece of data is punctuated with a double slash mark (//) and shown in order: Sequence Name, Definition of hit data, P value, Length of sequence compared, Homology, and Accession Number of hit data. Sequences which did not show hit data in the homology search list only the Clone name.

3NB692002685//Homo sapiens sperm acrosomal protein mRNA, complete cds.//
7.3E−117//227aa//100%//AF047437
3NB692002806//Dihydropteridine reductase (EC 1.6.99.7) (HDHPR) (Quinoid
dihydropteridine reductase).//1.00E−105//192aa//78%//P09417
3NB692008729
ACTVT2000380
ADIPS2000088//Human (hybridoma H210) anti-hepatitis A IgG variable region,
constant region, complementarity-determining regions mRNA, complete cds.//
3.5E−236//477aa//90%//M87789
ADRGL2000172
ADRGL2003329
ADRGL2009146
ADRGL2009691//Mus musculus D11Igp1 mRNA, complete cds.//5.1E−17//75aa//
60%//AF316996
ADRGL2009755//Homo sapiens brain and reproductive organ-expressed protein
(BRE) mRNA, complete cds.//2.2E−156//308aa//93%//AF015767
ADRGL2012038
ADRGL2012179
ASTRO1000009//BAND 4.1-LIKE PROTEIN 4 (NBL4 PROTEIN).//2.50E−45//309aa//
38%//O57457
ASTRO2002842//sentrin/SUMO-specific protease [Mus musculus]//2.00E−84//
148aa//54%//NM_030702
ASTRO2003960
ASTRO2014923//hypothetical protein//2.6E−66//133aa//100%//CAB70760
ASTRO2018373
ASTRO3000172
ASTRO3000177//Drosophila melanogaster BcDNA.GH03694 (BcDNA.GH03694) mRNA,
complete cds.//1.30E−89//385aa//47%//AF181626
ASTRO3000301//G2 [Homo sapiens]//0//1073aa//96%//AAA21253
ASTRO3000482
BLADE1000176
BLADE2001371
BLADE2001987
BLADE2002073
BLADE2002782//Rattus norvegicus clone C53 CDK5 activator-binding protein
mRNA, complete cds.//1.90E−24//70aa//82%//AF177476
BLADE2002947
BLADE2003474
BLADE2004089//Mus musculus PDZ domain actin binding protein Shroom mRNA,
complete cds.//4.20E−244//784aa//64%//AF199421
BLADE2004462
BLADE2004670
BLADE2005036//CARBOXYPEPTIDASE A1 PRECURSOR (EC 3.4.17.1).//1.20E−81//
168aa//93%//P15085
BLADE2005459
BLADE2007666
BLADE2007958//Homo sapiens U5 snRNP-specific 40 kDa protein mRNA, complete
cds//6.0E−91//190aa//99%//NP_004805
BLADE2008281
BLADE2008398//Homo sapiens LRR FLI-I interacting protein 2 (LRRFIP2) mRNA,
complete cds.//2.00E−98//200aa//99%//AF115509
BLADE2008539//tumor antigen SLP-8p [Homo sapiens]//0//427aa//95%//
NM_016516
BNGH42003570//Mus musculus mRNA for thrombospondin type 1 domain, complete
cds.//2.30E−44//239aa//39%//AB016768
BNGH42007798//VEGETATIBLE INCOMPATIBILITY PROTEIN HET-E-1.//4.1E−40//
242aa//37%//Q00808
BRACE1000186//g20 protein [Homo sapiens]//3.00E−74//138aa//85%//
NM_016210
BRACE1000258
BRACE1000533
BRACE1000572
BRACE2003639
BRACE2005457//PENDRIN.//1.30E−61//371aa//35%//O43511
BRACE2006319//Homo sapiens mRNA for Fln29, complete cds.//3E−157//283aa//
99%//AB007447
BRACE2008594//Human protein serine/threonine kinase stk2 mRNA, complete
cds.//1.90E−39//190aa//44%//L20321
BRACE2010489//Mus musculus nucleolar protein C7 mRNA, complete cds.//1.70E−149
//391aa//76%//AF324899
BRACE2011747
BRACE2014306//Chromaffin granule amine transporter (Vesicular amine
transporter 1) (VAT1).//1.00E−15//80aa//22%//P54219
BRACE2014475
BRACE2014657
BRACE2015058
BRACE2015314
BRACE2016981//Sarcolemmal-associated protein [Homo sapiens]//7.00E−18//
72aa//29%//NM_007159
BRACE2018762//Homer, neuronal immediate early gene, 3 [Homo sapiens]//
1.00E−144//267aa//77%//NM_004838
BRACE2024627
BRACE2026836//Mus musculus mRNA for smoothelin L1, large isoform.//8.00E−66
//220aa//55%//AJ010305
BRACE2027258//Homo sapiens E2a-Pbx1-associated protein (EB-1) mRNA, partial
cds.//5.80E−163//302aa//99%//AF145204
BRACE2027970
BRACE2028970
BRACE2029112//Homo sapiens mRNA for plexin-B1 plasma membrane receptor,
splice variant R (plexin-B1/SEP gene)//4.0E−99//119aa//62%//AJ011415
BRACE2029849
BRACE2030326//OOCYTE ZINC FINGER PROTEIN XLCOF6 (FRAGMENT).//1.40E−07//
106aa//33%//P18749
BRACE2030341//Homo sapiens protein kinase STK10 mRNA, partial cds.//2.60E−66
//129aa//100%//AF170723
BRACE2030884
BRACE2031154
BRACE2031389
BRACE2031527
BRACE2031531
BRACE2031899
BRACE2032044
BRACE2032329
BRACE2032385
BRACE2032538
BRACE2032823
BRACE2033720
BRACE2035381//Homo sapiens phospholipase A2, group IVB (cytosolic)
(PLA2G4B), mRNA//0//446aa//96%/NM_005090
BRACE2035441
BRACE2036005
BRACE2036096
BRACE2036830
BRACE2036834
BRACE2037847
BRACE2038114
BRACE2038329//Rattus norvegicus CBL-B (Cbl-b) mRNA, partial cds.//3.4E−96//
198aa//92%//AF199504
BRACE2038551//PROTEIN ARGININE N-METHYLTRANSFERASE 2 (EC 2.1.1.—).//6.40E−53
//102aa//100%//P55345
BRACE2039249//POLYPEPTIDE N-ACETYLGALACTOSAMINYLTRANSFERASE (EC 2.4.1.41)
(PROTEIN-UDP ACETYLGALACTOSAMINYLTRANSFERASE) (UDP-GALNAC: POLYPEPTIDE, N-
ACETYLGALACTOSAMINYLTRANSFERASE) (GALNAC-T1).//5.1E−99//199aa//88%//
Q10472
BRACE2039327//hypothetical protein FLJ20241//6.3E−47//97aa//100%//
XP_012789
BRACE2039475
BRACE2039734
BRACE2040138
BRACE2040325
BRACE2041009
BRACE2041200//PROTEIN-ARGININE DEIMINASE TYPE II (EC 3.5.3.15)
(PEPTIDYLARGININE DEIMINASE II) (KIAA0994).//5.9E−98//181aa//98%//Q9Y2J8
BRACE2041264
BRACE2042550//Bos taurus mRNA for SCO-spondin, partial.//1.8E−154//319aa//
80%//AJ133488
BRACE2043142
BRACE2043248//Human I(3)mbt protein homolog mRNA, complete cds.//7.1E−71//
140aa//98%//U89358
BRACE2043349
BRACE2043665
BRACE2044286//GUANINE NUCLEOTIDE EXCHANGE FACTOR DBS (DBL'S BIG SISTER)
(MCF2 TRANSFORMING SEQUENCE-LIKE PROTEIN).//7.20E−154//578aa//50%//Q64096
BRACE2044816
BRACE2044949
BRACE2045300//COFILIN, NON-MUSCLE ISOFORM.//3.9E−85//166aa//100%//P23528
BRACE2045428
BRACE2045596//CTD-BINDING SR-LIKE PROTEIN RA4 (FRAGMENT).//1.6E−08//
160aa//32%//Q63627
BRACE2045772//2-AMINO-3-KETOBUTYRATE COENZYME A LIGASE, MITOCHONDRIAL
PRECURSOR (EC 2.3.1.29) (AKB LIGASE) (GLYCINE ACETYLTRANSFERASE).//1.3E−107
//142aa//98%//O75600
BRACE2045947
BRACE2045954
BRACE2046251//Homo sapiens hucep-10 mRNA for cerebral protein-10, complete
cds.//4.3E−135//264aa//97%//AB000782
BRACE2046295//NTAK PROTEIN (NEURAL-AND THYMUS-DERIVED ACTIVATOR FOR ERBB
KINASES).//1.80E−165//304aa//99%//O14511
BRACE2047011
BRACE2047350
BRACE2047377//ras inhibitor [Homo sapiens]//4.40E−11//60aa//58%//
AAA36553
BRACE2047385
BRACE3000071
BRACE3000697
BRACE3000787
BRACE3000840//Baculoviral IAP repeat-containing protein 1 (Neuronal
apoptosis inhibitory protein).//0//979aa//96%//Q13075
BRACE3000973
BRACE3001002//Zinc finger X-linked protein ZXDB.//1.00E−45//97aa//70%//
P98169
BRACE3001217
BRACE3001391//Polycystin precursor (Autosomal dominant polycystic kidney
disease protein 1).//0//388aa//84%//P98161
BRACE3001595
BRACE3001754//Surfeit locus protein 5.//2.00E−87//166aa//83%//Q15528
BRACE3002298
BRACE3002390
BRACE3002508//WD40 repeat domain 11 protein [Homo sapiens]//1.00E−113//
200aa//98%//NM_018117
BRACE3003004
BRACE3003192//latent transforming growth factor beta binding protein 3 [Homo
sapiens]//0//670aa//91%//NM_021070
BRACE3003595//CRK-associated substrate (p130Cas) (Breast cancer anti-
estrogen resistance 1 protein).//0//712aa//84%//P56945
BRACE3003698
BRACE3004058//NADH-cytochrome B5 reductase (EC 1.6.2.2) (B5R).//1.00E−129//
220aa//96%//P00387
BRACE3004113
BRACE3004150//Heterogeneous nuclear ribonucleoprotein H (hnRNP H).//0//
390aa//86%//P31943
BRACE3004358
BRACE3004435
BRACE3004772//protein tyrosine phosphatase, receptor type, f polypeptide
(PTPRF), interacting protein (liprin), alpha 2 [Homo sapiens]//1.00E−101//
168aa//80%//NM_003625
BRACE3004783
BRACE3004843
BRACE3004880
BRACE3005145
BRACE3005225
BRACE3005430//DNA repair protein rad18.//4.00E−21//48aa//38%//P53692
BRACE3005499
BRACE3006185
BRACE3006226
BRACE3006462
BRACE3006872//Echinoderm microtubule-associated protein-like 2 (EMAP-2)
(HuEMAP-2).//1.00E−46//94aa//34%//O95834
BRACE3007322
BRACE3007472
BRACE3007480
BRACE3007559
BRACE3007625//espin [Rattus norvegicus]//1.00E−101//178aa//54%//
NM_019622
BRACE3007642
BRACE3007767
BRACE3008036
BRACE3008092
BRACE3008137//Interleukin-16 precursor (IL-16) (Lymphocyte chemoattractant
factor) (LCF).//0//530aa//83%//Q14005
BRACE3008384//rhomboid (veinlet, Drosophila)-like; Rhomboid, drosophila,
homolog of [Homo sapiens]//7.00E−94//158aa//51%//NM_003961
BRACE3008720//SPO0B-associated GTP-binding protein.//5.00E−33//80aa//
43%//P20964
BRACE3008772
BRACE3009090
BRACE3009237
BRACE3009297//mdgl-1 [Mus musculus]//6.00E−54//110aa//84%//AAG17143
BRACE3009377
BRACE3009574
BRACE3009701
BRACE3009708//Sodium/potassium-transporting ATPase alpha-2 chain precursor
(EC 3.6.3.9) (Sodium pump 2) (Na+/K+ ATPase 2).//0//868aa//98%//P50993
BRACE3009724
BRACE3009747//DAZ associated protein 1 [Homo sapiens]//2.00E−18//43aa//
57%//NM_018959
BRACE3010397//Glioma pathogenesis-related protein (RTVP-1 protein).//4.00E−29
//65aa//37%//P48060
BRACE3010428
BRACE3011271//Patched protein homolog 1 (PTC1) (PTC).//5.00E−84//147aa//
72%//Q13635
BRACE3011421//Diacylglycerol kinase, zeta (EC 2.7.1.107) (Diglyceride
kinase) (DGK-zeta) (DAG kinase zeta).//0//839aa//91%//Q13574
BRACE3011505
BRACE3012364
BRACE3012930
BRACE3013119
BRACE3013576
BRACE3013740
BRACE3013780
BRACE3014005//thymic stromal cotransporter: putative thymic stromal co-
transporter TSCOT [Mus musculus]//4.00E−21//71aa//23%//NM_021053
BRACE3014068
BRACE3014231
BRACE3014317
BRACE3014807//homolog 1; tweety homolog [Homo sapiens]//3.00E−38//75aa//
46%//NM_020659
BRACE3015027//Ras GTPase-activating protein nGAP.//3.00E−75//214aa//35%//
Q9UJF2
BRACE3015121
BRACE3015262//espin [Mus musculus]//1.00E−10//55aa//40%//AAF98134
BRACE3015521//EH-domain containing protein 1 (Testilin) (hPAST1).//1.00E−121
//215aa//93%//Q9H4M9
BRACE3015894
BRACE3016884//Glucoamylase S1/S2 precursor (EC 3.2.1.3) (Glucan 1,4-alpha-
glucosidase) (1,4-alpha-D-glucan glucohydrolase).//8.00E−07//87aa//17%//
P08640
BRACE3018308
BRACE3018963//Exostosin-like 3 (Putative tumour suppressor protein EXTL3)
(Multiple exostosis-like protein 3) (Hereditary multiple exostoses gene
isolog) (EXT-related protein 1).//6.00E−39//69aa//98%//O43909
BRACE3019055
BRACE3019084//protein tyrosine phosphatase, receptor type, f polypeptide
(PTPRF), interacting protein (liprin), alpha 1 [Homo sapiens]//1.00E−130//
226aa//93%//NM_003626
BRACE3020194
BRACE3020286
BRACE3020594//cytokine receptor-like factor 2; cytokine receptor CRL2
precusor [Homo sapiens]//1.00E−27//53aa//73%//NM_022148
BRACE3022769
BRACE3023912
BRACE3024073//hypothetical protein similar to small G proteins, especially
RAP-2A [Homo sapiens]//8.00E−36//77aa//48%//NM_021183
BRACE3024659
BRACE3024662
BRACE3025153
BRACE3025457//testis-specific protein TSP-NY [Homo sapiens]//0//413aa//
97%//NM_032573
BRACE3025531
BRACE3025630//Alkaline serine exoprotease A precursor (EC 3.4.21.—).//
4.00E−18//53aa//33%//P16588
BRACE3026008
BRACE3026075
BRACE3026735
BRACE3027242
BRACE3027326//RAP1 GTPase activating protein 1 (RAP1GAP).//1.00E−177//
331aa//50%//P47736
BRACE3027478
BRACE3030103
BRACE3031838
BRACE3032983
BRACE3040856//Golgi Transport; Got1p [Saccharomyces cerevisiae]//2.00E−13//
100aa//45%//NP_014020
BRACE3045033//polyamine-modulated factor 1; polyamine modulated factor 1
[Homo sapiens]//1.00E−41//82aa//100%//NM_007221
BRALZ2011796
BRALZ2012183
BRALZ2012848
BRALZ2014484
BRALZ2016085//MONOCARBOXYLATE TRANSPORTER 3 (MCT 3) (RETINAL EPITHELIAL
MEMBRANE PROTEIN).//4.2E−49//244aa//33%//Q90632
BRALZ2016498//Homo sapiens FKSG76 (FKSG76) mRNA, complete cds.//4.8E−65//
127aa//99%//AF345564
BRALZ2017359//Homo sapiens RNA helicase HDB/DICE1 mRNA, partial cds.//4.4E−62//
318aa//47%//AF141326
BRAMY2001473//Rattus norvegicus transmembrane receptor Unc5H2 mRNA, complete
cds.//3.00E−115//501aa//44%//U87306
BRAMY2003008
BRAMY2004771//CHONDROADHERIN PRECURSOR (CARTILAGE LEUCINE-RICH PROTEIN) (38 KDA
BONE PROTEIN).//2.30E−36//293aa//34%//Q27972
BRAMY2005052//COXSACKIEVIRUS AND ADENOVIRUS RECEPTOR PRECURSOR
(COXSACKIEVIRUS B-ADENOVIRUS RECEPTOR) (HCAR) (CVB3 BINDING PROTEIN).//
3.10E−37//200aa//35%//P78310
BRAMY2017528
BRAMY2019300//CHONDROADHERIN PRECURSOR (CARTILAGE LEUCINE-RICH PROTEIN) (38 KDA
BONE PROTEIN).//8.10E−32//350aa//28%//Q27972
BRAMY2019963
BRAMY2019985
BRAMY2020058
BRAMY2020270
BRAMY2021498//Mus musculus papilin mRNA, complete cds.//3E−89//546aa//
37%//AF314171
BRAMY2028856
BRAMY2028914
BRAMY2029602
BRAMY2030098
BRAMY2030109//Homo sapiens hucep-4 mRNA for cerebral protein-4, complete
cds.//7.6E−83//280aa//55%//D88259
BRAMY2030702
BRAMY2030703
BRAMY2030799
BRAMY2031317//Mus musculus semaphorin cytoplasmic domain-associated protein
3A (Semcap3) mRNA, complete cds.//2.6E−169//682aa//50%//AF127084
BRAMY2031377
BRAMY2031442
BRAMY2032014
BRAMY2032242
BRAMY2032317
BRAMY2033003//solute carrier family 22 (organic anion transporter), member
8//5.1E−25//60aa//100%//XP_006015
BRAMY2033116
BRAMY2033267//Rattus norvegicus mRNA for acetoacetyl-CoA synthetase,
complete//1.7E−42//148aa//66%//AB026291
BRAMY2033594
BRAMY2034185
BRAMY2034920
BRAMY2034993
BRAMY2036387
BRAMY2036396
BRAMY2036567//GUANINE NUCLEOTIDE EXCHANGE FACTOR DBS (DBL'S BIG SISTER)
(MCF2 TRANSFORMING SEQUENCE-LIKE PROTEIN).//5.3E−47//113aa//83%//Q64096
BRAMY2036699
BRAMY2036913
BRAMY2037823
BRAMY2038100
BRAMY2038484//Homo sapiens MDC-3. 13 isoform 2 mRNA, complete cds.//3.8E−65
//194aa//60%//AF099935
BRAMY2038846
BRAMY2038904//Homo sapiens mRNA for X-like 1 protein.//2.7E−199//738aa//
55%//AJ005821
BRAMY2039872//Homo sapiens protein phosphatase methylesterase-1 (PME-1) mRNA,
complete cds.//4.1E−43//84aa//98%//AF157028
BRAMY2040478
BRAMY2040592//Homo sapiens hucep-11 mRNA for cerebral protein-11, complete
cds.//2.20E−101//327aa//64%//AB001596
BRAMY2041261
BRAMY2041378
BRAMY2041542
BRAMY2042612
BRAMY2042641
BRAMY2042760
BRAMY2042918
BRAMY2044078
BRAMY2044246
BRAMY2045036
BRAMY2046478
BRAMY2046742
BRAMY2046989//Protein bimA.//4.00E−07//60aa//20%//P17885
BRAMY2047169
BRAMY2047420
BRAMY2047676
BRAMY2047746//nasopharyngeal carcinoma susceptibility protein [Homo
sapiens]//3.00E−18//50aa//42%//NM_013275
BRAMY2047751//REGULATOR OF G-PROTEIN SIGNALING 12 (RGs12).//1.3E−178//
336aa//100%//014924
BRAMY2047765
BRAMY2047884
BRAMY3000206
BRAMY3000213//Homo sapiens RaP2 interacting protein 8 (RPIP8) mRNA, complete
cds.//5.7E−85//167aa//99%//U93871
BRAMY3001401
BRAMY3001794//Rattus norvegicus Circadian Oscillatory Protein (SCOP)
(Scop)//1.00E−117//206aa//59%//NM_021657
BRAMY3002312
BRAMY3002620
BRAMY3002803//p21-activated protein kinase 6 [Homo sapiens]//0//598aa//
87%//NM_020168
BRAMY3002805
BRAMY3004224
BRAMY3004672
BRAMY3004900
BRAMY3004919//Adenylate cyclase, type V (EC 4.6.1.1) (ATP pyrophosphatelyase)
(Adenylyl cyclase).//0//831aa//91%//Q04400
BRAMY3005091//Phosphatidylinositol 4-kinase alpha (EC 2.7.1.67) (PI4-kinase)
(PtdIns-4-kinase) (PI4K-alpha).//1.00E−111//192aa//100%//P42356
BRAMY3005932//Diacylglycerol kinase, zeta (EC 2.7.1.107) (Diglyceride
kinase) (DGK-zeta) (DAG kinase zeta) (DGK-IV) (104 kDa diacylglycerol
kinase).//1.00E−35//71aa//98%//008560
BRAMY3006297
BRAMY3007206
BRAMY3007609//nuclear RNA export factor 2; TAP like protein 2 [Homo
sapiens]//2.00E−80//155aa//60%//NM_017809
BRAMY3008466//kinesin family member 21A [Mus musculus]//1.00E−167//277aa//
94%//NM_016705
BRAMY3008505
BRAMY3008650
BRAMY3009811
BRAMY3010411
BRAMY4000095//ERBB-3 receptor protein-tyrosine kinase precursor (EC
2.7.1.112) (Tyrosine kinase-type cell surface receptor HER3).//0//469aa//
80%//P21860
BRAMY4000229//CORONIN 2A (WD-REPEAT PROTEIN 2) (IR10).//2.40E−87//167aa//
71%//Q92828
BRAMY4000277//Alpha-1B-glycoprotein.//1.00E−163//276aa//100%//P04217
BRASW1000053
BRASW1000125
BRAWH1000127//Mus musculus mRNA for thrombospondin type 1 domain, complete
cds.//8.30E−49//204aa//43%//AB016768
BRAWH2001395//MYELIN BASIC PROTEIN (MBP).//7.90E−26//64aa//90%//P02686
BRAWH2001671
BRAWH2001940//H. sapiens gene from PAC 1026E2, partial.//0//640aa//98%//
AL035289
BRAWH2001973
BRAWH2002560//deleted in bladder cancer chromosome region candidate 1 [Homo
sapiens].//0//770aa//52%//NP_055433
BRAWH2002761
BRAWH2005315//neuronal-STOP protein//5.5E−119//441aa//56%//CAA75930
BRAWH2007658//COXSACKIEVIRUS AND ADENOVIRUS RECEPTOR HOMOLOG PRECURSOR
(MCAR).//8.80E−14//366aa//24%//P97792
BRAWH2010000//golgi autoantigen, golgin subfamily a, 3; golgin-160 [Homo
sapiens]//5.00E−15//148aa//23%//NM_005895
BRAWH2010084
BRAWH2010536//paraneoplastic antigen MA1//5.00E−18//100aa//42%//
NP_006020
BRAWH2012162//KE03 protein [Homo sapiens]//2.00E−97//330aa/55%//
AAC17109
BRAWH2012326
BRAWH2013294
BRAWH2013871
BRAWH2014414//Cadherin-4 precursor (Retinal-cadherin) (R-cadherin) (R-
CAD).//0//761aa//90%//P55283
BRAWH2014645
BRAWH2014662
BRAWH2014876
BRAWH2014954//Mus musculus neuronal IL-16 mRNA, complete cds.//4.40E−271//
604aa//84%//AF175292
BRAWH2016221//T-CELL RECEPTOR BETA CHAIN ANA 11.//2.90E−07//80aa//46%//
P06333
BRAWH2016439
BRAWH2016702
BRAWH2016724//MAP2 = HMW-MAP2 {alternatively spliced} [rats, brain, mRNA
Partial, 267 nt].//3.8E−24//74aa//77%//S81002
BRAWH3000078//Mus musculus adult male tongue cDNA, RIKEN full-length
enriched library, clone: 2310010M24, full insert sequence.//1.20E−29//
111aa//52%//AK009282
BRAWH3000100//dedicator of cyto-kinesis 1 [Homo sapiens]//1.00E−10//67aa//
20%//NM_001380
BRAWH3000314
BRAWH3000345
BRAWH3000491//40S ribosomal protein S12.//5.00E−42//90aa//84%//P46405
BRAWH3001326//5-azacytidine resistance protein azr1.//4.00E−27//74aa//
31%//Q09189
BRAWH3001475
BRAWH3001891
BRAWH3002574//Calpain 2, large [catalytic] subunit precursor (EC 3.4.22.17)
(Calcium-activated neutral proteinase) (CANP) (M-type) (M-calpain)
(Millimolar-calpain).//1.00E−84//156aa//91%//P17655
BRAWH3002600//cadherin 23; waltzer; otocadherin [Mus musculus]//3.00E−30//
139aa//28%//NM_023370
BRAWH3002819
BRAWH3002821//synaptotagmin-like 2 [Mus musculus]//0//358aa//78%//
NM_031394
BRAWH3003522
BRAWH3003555
BRAWH3003727
BRAWH3003801
BRAWH3003992
BRAWH3004453
BRAWH3004666
BRAWH3005132
BRAWH3005422
BRAWH3005912//MIC1 protein.//1.00E−29//71aa//28%//P53258
BRAWH3005981
BRAWH3006548
BRAWH3006792
BRAWH3007221
BRAWH3007506
BRAWH3007592
BRAWH3007726
BRAWH3007783
BRAWH3008341//Ubiquitin carboxyl-terminal hydrolase 6 (EC 3.1.2.15)
(Ubiquitin thiolesterase 6) (Ubiquitin-specific processing protease 6)
(Deubiquitinating enzyme 6) (Proto-oncogene TRE-2).//3.00E−63//123aa//
67%//P35125
BRAWH3008634
BRAWH3008697
BRAWH3008931
BRAWH3009297
BRCAN2002562//Splicing factor, arginine/serine-rich 2 (Splicing factor SC35)
(SC-35) (Splicing component, 35 kDa) (PR264 protein).//6.00E−47//88aa//
88%//Q62093
BRCAN2002856//AMYLOID BETA A4 PRECURSOR PROTEIN-BINDING FAMILY A MEMBER 2
(NEURON-SPECIFIC X11L PROTEIN) (NEURONAL MUNC18-1-INTERACTING PROTEIN 2)
(MINT-2) (ADAPTER PROTEIN X11BETA).//2.20E−89//191aa//93%//Q99767
BRCAN2002944//Mus musculus huntington yeast partner C (Hypc) mRNA, complete
cds.//2.1E−36//83aa//87%//AF135440
BRCAN2002948//Homo sapiens mRNA for gamma2-adaptin, complete cds.//6.6E−53
//117aa//97%//AB015318
BRCAN2003703//Homo sapiens mRNA for putative serine/threonine protein kinase,
partial.//1.4E−81//187aa//89%//AJ006701
BRCAN2003746//PHOSPHORYLASE B KINASE ALPHA REGULATORY CHAIN, SKELETAL MUSCLE
ISOFORM (PHOSPHORYLASE KINASE ALPHA M SUBUNIT).//5.9E−105//213aa//94%//
P46020
BRCAN2003987
BRCAN2004355
BRCAN2005436
BRCAN2006063//COCHL IN PRECURSOR (COCH-5B2).//5.7E−123//230aa//100%//
O43405
BRCAN2006290
BRCAN2006297
BRCAN2006450
BRCAN2007144
BRCAN2007409
BRCAN2007426
BRCAN2008528
BRCAN2009203//Homo sapiens liprin-alpha2 mRNA, complete cds.//1.2E−235//
273aa//93%//AF034799
BRCAN2009432//hypothetical protein similar to small G proteins, especially
RAP-2A [Homo sapiens]//1.00E−93//170aa//92%//NM_021183
BRCAN2010376
BRCAN2011254
BRCAN2011602
BRCAN2012355
BRCAN2012481
BRCAN2013655
BRCAN2013660//Arabidopsis thaliana putative protein (F4F15. 330) mRNA,
complete cds.//1.1E−24//138aa//44%//AF370547
BRCAN2014143
BRCAN2014602//DIACYLGLYCEROL KINASE, ZETA (EC 2.7.1.107) (DIGLYCERIDE
KINASE) (DGK-ZETA) (DAG KINASE ZETA).//6.5E−38//74aa//94%//Q13574
BRCAN2014881
BRCAN2015371
BRCAN2015464
BRCAN2016433
BRCAN2016619//CRK-associated substrate (p130Cas) (Breast cancer anti-
estrogen resistance 1 protein).//0//735aa//84%//P56945
BRCAN2017442//sarcosine dehydrogenase; dimethylglycine dehydrogenase-like 1
[Homo sapiens]//5.00E−20//51aa//59%//NM_007101
BRCAN2017717
BRCAN2017905
BRCAN2018935
BRCAN2019387
BRCAN2020710
BRCAN2021028
BRCAN2024451//REGULATOR OF G-PROTEIN SIGNALING 14 (RGS14) (FRAGMENT).//
1.5E−131//324aa//83%//O43566
BRCAN2024563
BRCAN2025712
BRCAN2028355//Ca2+/calmodulin-dependent protein kinase (EC 2.7.1.123) II
gamma-E//3E−254//479aa//98%//JC5636
BRCOC2000670
BRCOC2001505//MYELIN BASIC PROTEIN (MBP).//8.50E−26//64aa//90%//P02686
BRCOC2003213//Histidyl-tRNA synthetase (EC 6.1.1.21) (Histidine-tRNA
ligase) (HiaRS).//0//421aa//95%//P12081
BRCOC2007034
BRCOC2014033
BRCOC2016525
BRCOC2019934
BRCOC2020142
BRHIP2000691
BRHIP2000819//Human mRNA for actin binding protein p57, complete cds.//
1.3E−48//96aa//100%//D44497
BRHIP2000826
BRHIP2000920
BRHIP2001074
BRHIP2001805//Homo sapiens TREK-1 potassium channel (KCNK2) mRNA, complete
cds.//1.8E−49//134aa//80%//AF129399
BRHIP2001927//Mus musculus mRNA for HS1 binding protein 3.//2.7E−30//
102aa//68%//AJ132192
BRHIP2002122//Homo sapiens B aggressive lymphoma long isoform (BAL) mRNA,
complete cds.//1.8E−97//189aa//100%//AF307338
BRHIP2002172//Mus musculus urea transporter isoform UTA-3 mRNA, complete
cds.//6.9E−208//452aa//82%//AF258602
BRHIP2002346
BRHIP2003242
BRHIP2003786//CCA3 [Rattus norvegicus]//2.60E−199//603aa//61%//BAA19969
BRHIP2003917
BRHIP2004312
BRHIP2004359//ELAC PROTEIN.//6.80E−20//111aa//37%//Q47012
BRHIP2004814//Homo sapiens gibbon ape leukemia virus receptor 1 (SLC20A1)
gene, exon 11 and complete cds.//1.8E−188//346aa//99%//AF102063
BRHIP2004883
BRHIP2005236//latrophilin 2 splice variant baaae//1.3E−203//250aa//
97%//AAD05305
BRHIP2005354
BRHIP2005600
BRHIP2005719
BRHIP2005752//NG5 [Homo sapiens]//5.0E−61//200aa//100%//AAB47496
BRHIP2005932
BRHIP2006800
BRHIP2007616//plexin 2//7.5E−137//423aa//59%//BAA13189
BRHIP2007741
BRHIP2009340
BRHIP2009414//Bax inhibitor-1 (BI-1) (Testis enhanced gene transcript).//
3.00E−97//177aa//77%//P55061
BRHIP2009474
BRHIP2013699
BRHIP2014228
BRHIP2021615//Homo sapiens CUG-BP and ETR-3 like factor 4 (CELF4) mRNA,
complete cds.//9.60E−115//349aa//65%//AF329265
BRHIP2022221
BRHIP2024146
BRHIP2024165//Synthase [Homo sapiens]//5.00E−44//83aa//94%//NM_003896
BRHIP2026061
BRHIP2026288//Protein bem46.//2.00E−47//110aa//41%//P54069
BRHIP2029176
BRHIP2029393//COBW-like protein [Homo sapiens]//3.00E−89//158aa//98%//
NM_018491
BRHIP3000339//MYELIN BASIC PROTEIN (MBP).//8.5E−26//64aa//90%//P02686
BRHIP3000526
BRHIP3001283
BRHIP3006683
BRHIP3007483
BRHIP3007586
BRHIP3008183
BRHIP3008313//testis specific ankyrin-like protein 1 [Homo sapiens]//1.00E−120
//210aa//92%//NM_016552
BRHIP3008344
BRHIP3008405//Dynamin 2 (EC 3.6.1.50) (Dynamin UDNM).//1.00E−56//108aa//
90%//P39054
BRHIP3008565
BRHIP3008598
BRHIP3008997
BRHIP3009099
BRHIP3009448//2-19 protein precursor.//1.00E−102//179aa//99%//P98173
BRHIP3011241
BRHIP3013765
BRHIP3013897
BRHIP3015751
BRHIP3016213
BRHIP3018797
BRHIP3020182
BRHIP3024118//Monocarboxylate transporter 4 (MCT 4) (MCT 3).//1.00E−36//
108aa//30%//O35910
BRHIP3024533
BRHIP3024725
BRHIP3025161//Putative Rho/Rac guanine nucleotide exchange factor (Rho/Rac
GEF) (Faciogenital dysplasia protein homolog).//2.00E−75//175aa//30%//
P52734
BRHIP3025702
BRHIP3026097
BRHIP3027137//10-formyltetrahydrofolate dehydrogenase (EC 1.5.1.6) (10-
FTHFDH).//1.00E−119//208aa//93%//O75891
BRHIP3027854//Homo sapiens ectonucleotide pyrophosphatase/phosphodiesterase
2 (autotaxin) (ENPP2)//1.00E−130//222aa//94%//NM_006209
BRSSN2000684//CDC14 homolog B, isoform 3 [Homo sapiens]//3.00E−12//52aa//
30%//NM_033332
BRSSN2003086
BRSSN2004496//TASP for testis-specific adriamycin sensitivity protein [Homo
sapiens]//5.00E−45//101aa//39%//NM_018697
BRSSN2004719//SHC transforming protein.//4.00E−39//89aa//53%//P29353
BRSSN2006892
BRSSN2008549//oxysterol binding protein 2 [Mus musculus]//1.00E−149//
252aa//75%//NM_024289
BRSSN2008797
BRSSN2011262
BRSSN2011738
BRSSN2013874//TEMO [Rattus norvegicus]//2.00E−53//99aa//98%//NM_023986
BRSSN2014299//TPA inducible gene-1; TPA inducible protein [Homo sapiens]//
2.00E−47//93aa//86%//NM_015889
BRSSN2014424//transporter-like protein [Homo sapiens]//0//413aa//92%//
NM_022109
BRSSN2014556
BRSSN2018581
BRSSN2018925
BRSTN2000872//Protein disulfide isomerase A2 precursor (EC 5.3.4.1)
(PDIp).//0//341aa//92%//Q13087
BRSTN2001067
BRSTN2001613//HETEROGENEOUS NUCLEAR RIBONUCLEOPROTEINS C1/C2 (HNRNP C1 AND
HNRNP C2).//2.8E−34//214aa//43%//P07910
BRSTN2002400
BRSTN2003835
BRSTN2004863//Drosophila melanogaster polypeptide N-
acetylgalactosaminyltransferase mRNA, complete cds.//5.60E−126//526aa//
47%//AF158747
BRSTN2004987//Homo sapiens mRNA for mitochondrial tryptophanyl-tRNA
synthetase (WARS2 gene).//1.20E−162//360aa//86%//AJ242739
BRSTN2005721
BRSTN2006865
BRSTN2007000
BRSTN2007284
BRSTN2008052
BRSTN2008283
BRSTN2008418//Breakpoint cluster region protein (EC 2.7.1.—).//7.00E−33//
70aa//75%//P11274
BRSTN2008457
BRSTN2009899
BRSTN2010363
BRSTN2010500
BRSTN2010750
BRSTN2012320
BRSTN2012380
BRSTN2013741//Ras-related protein M-Ras (Ras-related protein R-Ras3).//
1.00E−105//189aa//90%//O14807
BRSTN2015015
BRSTN2016470
BRSTN2016678
BRSTN2017084
BRSTN2017110
BRSTN2017237
BRSTN2017771//Homo sapiens putative BTK-binding protein mRNA, complete
cds.//1.0E−41//90aa//99%//AF235049
BRSTN2018083
BRSTN2019129
BRTHA1000311
BRTHA2000855
BRTHA2001462
BRTHA2002115
BRTHA2002281//Rho guanine nucleotide exchange factor 10 [Homo sapiens].//
5.0E−26//123aa//39%//NP_055444.1
BRTHA2002376
BRTHA2002442
BRTHA2002493
BRTHA2002608//aldehyde dehydrogenase 1A3//2.00E−19//46aa//88%//NP_000684
BRTHA2002808//GAMMA-INTERFERON-INDUCIBLE PROTEIN IP-30 PRECURSOR.//7.8E−65
//141aa//90%//P13284
BRTHA2003030
BRTHA2003110//Protein Clorf8 precursor (Liver membrane-bound protein)
(HSPC001).//1.00E−98//17888//92%//Q9BXS4
BRTHA2003116
BRTHA2003461
BRTHA2004821
BRTHA2004978
BRTHA2005579//Xenopus laevis mRNA for Kielin, complete cds.//1.3E−190//
659aa//47%//AB026192
BRTHA2005956
BRTHA2006075
BRTHA2006146
BRTHA2006194
BRTHA2007122//ANKYRIN 2 (BRAIN ANKYRIN) (ANKYRIN B) (ANKYRIN,
NONERYTHROID).//6.1E−18//203aa//32%//Q01484
BRTHA2007422
BRTHA2007603//H. sapiens mRNA for BCL7B protein.//1.8E−56//116aa//98%//
X89985
BRTHA2008316
BRTHA2008335
BRTHA2008527//LUTROPIN-CHORIOGONADOTROPIC HORMONE RECEPTOR PRECURSOR (LH/CG-
R) (LSH-R) (LUTEINIZING HOROMINE RECEPTOR).//7.5E−66//189aa//73%//P22888
BRTHA2008535
BRTHA2008955
BRTHA2009311//EOSINOPHIL LYSOPHOSPHOLIPASE//1.0E−30//64aa//91%//P97400
BRTHA2009846
BRTHA2009972
BRTHA2010073
BRTHA2010608
BRTHA2010884
BRTHA2010907
BRTHA2011194
BRTHA2011351
BRTHA2011500
BRTHA2011641
BRTHA2012392//Homo sapiens HCDI (HCDI) mRNA, complete cds.//8.0E−95//
194aa//95%//AF226050
BRTHA2012562
BRTHA201298//INTERLEUKIN-13 RECEPTOR ALPHA-1 CHAIN PRECURSOR (IL-13R-ALPHA-
1) (IL-13RA-1).//1.5E−44//91aa//100%//P78552
BRTHA2013262
BRTHA2013460
BRTHA2013707
BRTHA2014792//ENHANCER OF ZESTE HOMOLOG 1 (ENX-2) (KIAA0388).//7.1E−21//
184aa//35%//Q92800
BRTHA2014828
BRTHA2015406//Homo sapiens mRNA for putative serine/threonine protein kinase,
partial.//1.90E−86//268aa//67%//AJ006701
BRTHA2015478
BRTHA2015696
BRTHA2015878
BRTHA2016215
BRTHA2016496//Vacuolar processing enzyme precursor (EC 3.4.22.—) (VPE).//
0//370aa//79%//P49043
BRTHA2016543
BRTHA2017353
BRTHA2017985
BRTHA2018165
BRTHA2018344
BRTHA2018591
BRTHA2018624//Oncorhynchus mykiss stl3 mRNA for rhamnose binding lectin STL3,
complete cds.//7.40E−21//167aa//34%//AB039024
BRTHA2018707
BRTHA2019014
BRTHA2019022
BRTHA2019048
BRTHA3000273
BRTHA3000297
BRTHA3000633//single-pass transmembrane protein [Rattus norvegicus]//5.00E−48
//220aa//54%//BAA90767
BRTHA3001721//TATA box binding protein (TBP)-associated factor, RNA
polymerase III, GTF3B subunit 2; TATA box binding protein (TBP)-associated
factor, RNA polymerase III, C, 90 kD; general transcription factor IIIB, 90 kD
[Homo sapiens]//4.00E−71//135aa//85%//NM_001519
BRTHA3002401
BRTHA3002427//Sodium- and chloride-dependent betaine transporter (Na+/Cl−
betaine/GABA transporter) (BGT-1).//0//553aa//96%//P48065
BRTHA3002933//uroplakin 3 [Homo sapiens]//1.00E−158//260aa//99%//
XP_001216
BRTHA3003074//putative prostate cancer susceptibility protein; hypothetical
protein FLJ10530 [Homo sapiens]//0//435aa//94%//NM_018127
BRTHA3003343//DAZ associated protein 1 [Homo sapiens]//1.00E−95//223aa//
92%//NP_061832
BRTHA3003449//MYOSIN HEAVY CHAIN, SMOOTH MUSCLE ISOFORM (SMMHC)
(FRAGMENT).//4.70E−215//400aa//100%//P35749
BRTHA3003474
BRTHA3003490
BRTHA3004475
BRTHA3005046
BRTHA3006856
BRTHA3007113
BRTHA3007148
BRTHA3007319
BRTHA3007769
BRTHA3008143
BRTHA3008310//Mus musculus mRNA for iroquois homeobox protein 6 (Irx6
gene).//1.20E−176//444aa//76%//AJ271055
BRTHA3008386
BRTHA3008520//sporulation-induced transcript 4-associated protein;
hypothetical protein FLJ11058 [Homo sapiens]//1.00E−164//287aa//87%//
NM_018312
BRTHA3008778//Acetyl-coenzyme A synthetase (EC 6.2.1.1) (Acetate-CoA
ligase) (Acyl-activating enzyme).//1.00E−168//286aa//51%//068040
BRTHA3009037//Regulator of G-protein signaling 3 (RGS3) (RGP3).//0//
479aa//92%//P49796
BRTHA3009090//neuropathy target esterase [Homo sapiens]//0//784aa//60%//
NM_006702
BRTHA3009291
BRTHA3010366
BRTHA3013884//Sorting nexin 14 (Fragment).//0//359aa//95%//Q9Y5W7
BRTHA3015815//Selenide,water dikinase 1 (EC 2.7.9.3) (Selenophosphate
synthetase 1) (Selenium donor protein 1).//1.00E−159//275aa//99%//P49903
BRTHA3015910
BRTHA3016845
BRTHA3016917//Valyl-tRNA synthetase 2 (EC 6.1.1.9) (Valine-tRNA ligase 2)
(VALRS 2).//4.00E−82//169aa//43%//P26640
BRTHA3017047
BRTHA3017589//junctional adhesion molecule 3 [Homo sapiens]//1.00E−119//
213aa//74%//NM_031470
BRTHA3017848//Organic cation/carnitine transporter 2 (Solute carrier family
22, member 5) (High-affinity sodium-dependent carnitine cotransporter).//
2.00E−42//105aa//35%//076082
BRTHA3018514
BRTHA3018617
BRTHA3018656
BRTHA3019105
CERVX1000042
CERVX2002006
COLON1000030
COLON2000470//Rattus norvegicus nucleolar protein C7C mRNA, complete cds.//
5.9E−51//187aa//49%//AF333986
COLON2000568//Ig alpha-2 chain C region.//0//324aa//95%//P01877
COLON2001721//GLUT4 vesicle protein [Mus musculus]//8.00E−36//160aa//
39%//AAD10190
COLON2002443
COLON2002520//Myosin heavy chain, nonmuscle type B (Cellular myosin heavy
chain, type B) (Nonmuscle myosin heavy chain-B) (NMMHC-B).//0//447aa//
70%//Q27991
COLON2003043
COLON2004478//protein Tro alpha1 H, myeloma//3.2E−233//475aa//88%//
0501254A
COLON2005126
COLON2005772//Homo sapiens candidate taste receptor T2R14 gene, complete
cds.//3.9E−54//112aa//97%//AF227138
COLON2006282
COLON2009499
CORDB1000140
CORDB2000061
CORDB2000541//F-actin capping protein beta subunit (CAPZ beta).//1.00E−126
//217aa//99%//P79136
CTONG1000087
CTONG1000088
CTONG1000288
CTONG1000302
CTONG1000341//THROMBOMODULIN PRECURSOR (FETOMODULIN) (TM) (CD141 ANTIGEN).//
1.0E−283//488aa//99%//P07204
CTONG1000467//Mus musculus mRNA for Deltex3, complete cds.//5.00E−54//
203aa//52%//AB015425
CTONG1000488
CTONG1000508
CTONG1000540
CTONG2000042//ALPHA-2-MACROGLOBULIN PRECURSOR (ALPHA-2-M).//2E−132//
841aa//35%//P01023
CTONG2001877
CTONG2004062//ATPase subunit 6 [Homo sapiens].//3.00E−71//226aa//91%//
BAA07295
CTONG2006798//putative serine/threonine protein kinase [Schizosaccharomyces
pombe]//5.80E−69//581aa//27%//CAB66438
CTONG2008233//Bos taurus DnaJ1 protein mRNA, complete cds.//0//1376 bp//
85%//AF308815
CTONG2009423//5-HYDROXYTRYPTAMINE 7 RECEPTOR (5-HT-7) (5-HT-X) (SEROTONIN
RECEPTOR) (5HT7).//2.40E−44//113aa//78%//P34969
CTONG2009531
CTONG2010803//Regulator of G-protein signaling 3 (RGS3) (RGP3).//0//
323aa//92%//P49796
CTONG2013178//Homo sapiens serine protease DESC1 (DESC1) mRNA, complete
cds.//2E−90//421aa//43%//AF064819
CTONG2017500//Homo sapiens muscle disease-related protein mRNA, complete
cds.//1.30E−59//239aa//47%//AF204674
CTONG2019248
CTONG2019652
CTONG2019704
CTONG2019788
CTONG2019833
CTONG2020026//Drosophila melanogaster BcDNA. GH09358 (BcDNA. GH09358) mRNA,
complete cds.//4.2E−187//669aa//45%//AF181639
CTONG2020127
CTONG2020522
CTONG2020638
CTONG2020806
CTONG2021132
CTONG2022153
CTONG2022601
CTONG2023021//H. sapiens mRNA for TFG protein.//2.3E−88//160aa//100%//
Y07968
CTONG2023512//Homo sapiens PIG-T mRNA for phosphatidyl inositol glycan class
T, complete cds.//7.1E−158//289aa//100%//AB057724
CTONG2024206
CTONG2024749//ALPHA-2-MACROGLOBULIN PRECURSOR (ALPHA-2-M).//1.1E−174//
699aa//46%//P06238
CTONG2025496//ALPHA-2-MACROGLOBULIN PRECURSOR (ALPHA-2-M).//1.2E−218//
977aa//45%//P01023
CTONG2025516//general transcription factor II, i, isoform 3; BTK-associated
protein, 135 kD; Williams-Beuren syndrome chromosome region 6; Bruton tyrosine
kinase-associated protein 135; TFII-I protein; SPIN protein [Homo sapiens]//
2.00E−28//57aa//89%//NM_033001
CTONG2025900
CTONG2026920
CTONG2027327
CTONG2028124//very long-chain acyl-CoA synthetase homolog 1; VLCS-H1 protein
[Homo sapiens]//5.00E−86//156aa//48%//NM_014031
CTONG2028687
CTONG3000084//PROBABLE GUANINE NUCLEOTIDE REGULATORY PROTEIN TIM (ONCOGENE
TIM) (P60 TIM) (TRANSFORMING IMMORTALIZED MAMMARY ONCOGENE).//4.3E−276//
519aa//100%//Q12774
CTONG3000657
CTONG3000686
CTONG3000707
CTONG3000896
CTONG3001123//Mus musculus Pax transcription activation domain interacting
protein PTIP mRNA, complete cds.//0//965aa//84%//AF104261
CTONG3001370//ALPHA-2-MACROGLOBULIN PRECURSOR (ALPHA2M).//1.5E−267//
1008aa//38%//Q61838
CTONG3001420
CTONG3001560
CTONG3002020
CTONG3002127//granuphilin [Mus musculus]//1.00E−104//204aa//49%//
NM_013757
CTONG3002412//Human DOCK180 protein mRNA, complete cds.//4.5E−236//678aa//
66%//D50857
CTONG3002674
CTONG3003179
CTONG3003483
CTONG3003652
CTONG3003654
CTONG3003737//PLATELET GLYCOPROTEIN V PRECURSOR (GPV) (CD42D).//1.80E−73//
434aa//37%//O08770
CTONG3003905
CTONG3003972
CTONG3004072//GL002 protein [Homo sapiens]//3.00E−80//152aa//88%//
NM_020193
CTONG3004712
CTONG3005325
CTONG3005648
CTONG3005713
CTONG3005813
CTONG3006067
CTONG3006186//syntaxin binding protein 4 [Mus musculus]//0//427aa//76%//
NM_011505
CTONG3006650
CTONG3007444
CTONG3007528
CTONG3007586
CTONG3007870
CTONG3008252
CTONG3008258//Homo sapiens GROS1-L protein mRNA, complete cds.//7.70E−177//
680aa//51%//AF097432
CTONG3008496
CTONG3008566
CTONG3008639//Human non-lens beta gamma-crystallin like protein (AIM1) mRNA,
partial cds.//0//836aa//99%//U83115
CTONG3008831//Rattus norvegicus PGC1 mRNA for PPAR gamma coactivator,
complete cds.//2.9E−69//176aa//46%//AB025784
CTONG3008894//Mus musculus SH3-domain binding protein 5//3.00E−42//89aa//
40%//NM_011894
CTONG3008951
CTONG3009028//sno gene product [Drosophila melanogaster]//1.00E−148//
1000aa//46%//AAF48240
CTONG3009227
CTONG3009239
CTONG3009328
CTONG3009385//Homo sapiens ARG99 mRNA, complete cds.//2.4E−77//153aa//
100%//AF319520
D3OST2002182//Homo sapiens mRNA for acetylglucosaminyltransferase-like
protein.//6.50E−11//265aa//23%//AJ007583
D3OST2002648//PUTATIVE G PROTEIN-COUPLED RECEPTOR GPR17 (R12).//3E−24//
184aa//28%//Q13304
D3OST3000169//Homo sapiens SH3-SAM adaptor protein (HACS1) mRNA, complete
cds.//2.40E−189//354aa//99%//AF218085
DFNES1000107
DFNES2000146//Mus musculus mRNA for thrombospondin type 1 domain, complete
cds.//4.10E−31//135aa//41%//AB016768
DFNES2001108//Homo sapiens nuclear dual-specificity phosphatase (SBF1) mRNA,
partial cds.//4.5E−41//134aa//63%//U93181
DFNES2005266//ADAM-TS 1 PRECURSOR (EC 3.4.24.—) (A DISINTEGRIN AND
METALLOPROTEINASE WITH THROMBOSPONDIN MOTIFS 1) (ADAMTS-1) (ADAM-TS1).//
4.80E−15//118aa//30%//P97857
DFNES2010502
DFNES2011239
DFNES2011499
ERLTF2000324
FCBBF1000297//Human protein immuno-reactive with anti-PTH polyclonal
antibodies mRNA, partial cds.//7.5E−186//359aa//99%//U28831
FCBBF2001183
FCBBF2007510
FCBBF3001977
FCBBF3002163//chromosome condensation-related SMC-associated protein 1;
chromosome condensation-related SMC-associated protein 1; KIAA0159 gene
product [Homo sapiens]//0//840aa//97%//NM_014865
FCBBF3003435
FCBBF3004502
FCBBF3004847
FCBBF3006171
FCBBF3007242
FCBBF3007540//GUANINE NUCLEOTIDE EXCHANGE FACTOR DBS (DBL'S BIG SISTER)//
5.00E−46//300aa//38%//O15068
FCBBF3008944
FCBBF3009888//Homo sapiens prostate stem cell antigen (PSCA) mRNA, complete
cds.//5.30E−06//122aa//32%//AF043498
FCBBF3012170//Mus musculus rostral cerebellar malformation protein (rcm)
mRNA, complete cds.//1.00E−80//325aa//51%//U72634
FCBBF3012288
FCBBF3013307//Homo sapiens RNA helicase-related protein mRNA, complete
cds.//0//644aa//99%//AF083255
FCBBF3013846
FCBBF3021576
FCBBF3021940//SYNAPSIN I (FRAGMENT).//5.00E−06//128aa//35%//O62732
FCBBF3023443
FCBBF3023895//contains simiarity to tubulin-tyrosine ligase [Caenorhabditis
elegans].//1.00E−54//220aa//39%//AAF39893
FCBBF3025730
FCBBF3027717
FCBBF4000076
FEBRA1000030//T-CELL RECEPTOR BETA CHAIN ANA 11.//2.7E−11//131aa//38%//
P06333
FEBRA2000253
FEBRA2006396
FEBRA2007544//transcription factor [Homo sapiens]//0//400aa//99%//
AAG33674
FEBRA2007708//DRA PROTEIN (DOWN-REGULATED IN ADENOMA).//2.60E−72//511aa//
34%//P40879
FEBRA2007793
FEBRA2007801//Homo sapiens TRIAD3 mRNA, partial cds.//2.3E−207//358aa//
99%//AF228527
FEBRA2008287
FEBRA2008311//GALANIN RECEPTOR TYPE 1 (GAL1-R) (GALR1).//1E−23//299aa//
27%//P56479
FEBRA2008360
FEBRA2008468//LYSOSOMAL ACID LIPASE/CHOLESTERYL ESTER HYDROLASE PRECURSOR
(EC 3.1.1.13) (LAL) (ACID CHOLESTERYL ESTER HYDROLASE) (STEROL ESTERASE)
(LIPASE A) (CHOLESTERYL ESTERASE).//1.20E−179//330aa//97%//P38571
FEBRA2010719
FEBRA2014213
FEBRA2015588
FEBRA2020484
FEBRA2020582
FEBRA2020668
FEBRA2020886
FEBRA2021339
FEBRA2021571
FEBRA2021908
FEBRA2021966
FEBRA2024136
FEBRA2024150
FEBRA2024343
FEBRA2024744//Homo sapiens Cat Eye Syndrome critical region protein isoform
1 mRNA, complete cds.//1.3E−126//252aa//94%//AF273270
FEBRA2025427
FEBRA2026984//TYROSYL-TRNA SYNTHETASE (EC 6.1.1.1) (TYROSYL-TRNA LIGASE)
(TYRRS) (FRAGMENT).//7.80E−271//528aa//94%//Q29465
FEBRA2027082
FEBRA2027297
FEBRA2027352
FEBRA2028366
FEBRA2028477
FEBRA2028618
HCASM2001301//MITOGEN-ACTIVATED PROTEIN KINASE 12 (EC 2.7.1.—)
(EXTRACELLULAR SIGNAL-REGULATED KINASE 6) (EC 2.7.1.—) (ERK6) (ERK5) (STRESS-
ACTIVATED PROTEIN KINASE-3) (MITOGEN-ACTIVATED PROTEIN KINASE P38 GAMMA) (MAP
KINASE P38 GAMMA).//2.2E−52//104aa//100%//P53778
HCASM2002502
HCASM2002918
HCASM2003212
HCASM2003415
HCASM2007047
HCASM2007737//SEC14-LIKE PROTEIN 1.//8.30E−09//162aa//24%//Q92503
HCHON2000028//Homo sapiens 7h3 protein mRNA, partial cds.//2.1E−94//
228aa//82%//AF209931
HCHON2000212
HCHON2000244
HCHON2000418
HCHON2000626//X-linked protein STS1769.//2.00E−47//89aa//83%//Q99871
HCHON2001084//ARABINOSE-PROTON SYMPORTER (ARABINOSE TRANSPORTER).//3E−66//
321aa//36%//P09830
HCHON2001217//Homo sapiens cullin CUL4B (CUL4B) mRNA, complete cds.//0//
782aa//99%//AF212995
HCHON2001548
HCHON2001577//Human elastin gene, exon 1.//1.5E−265//585aa//88%//M17282
HCHON2001712//Neutral amino acid transporter B(0) (ATB(0)).//0//369aa//
85%//Q15758
HCHON2002676//ALPHA-L-IDURONIDASE PRECURSOR (EC 3.2.1.76).//3.20E−274//
330aa//99%//P35475
HCHON2003532//PHOSPHORYLASE B KINASE BETA REGULATORY CHAIN (PHOSPHORYLASE
KINASE BETA SUBUNIT).//2.0E−159//312aa//95%//Q93100
HCHON2004007//Potential phospholipid-transporting ATPase IK (EC 3.6.3.13)
(Fragment).//1.00E−160//273aa//93%//O60423
HCHON2004531//UV excision repair protein RAD23 homolog B (HHR23B) (XP-C
repair complementing complex 58 kDa protein) (P58).//1.00E−142//270aa//
66%//P54727
HCHON2004776//transmembrane protein (63 kD), endoplasmic reticulum/Golgi
intermediate compartment [Homo sapiens]//0//500aa//86%//NP_006816
HCHON2005921//lipoma HMGIC fusion partner [Homo sapiens]//1.00E−15//52aa//
25%//NM_005780
HCHON2006250//Mus musculus SETA binding protein 1 (Sb1) mRNA, complete
cds.//3.9E−269//544aa//91%//AF246218
HCHON2006714
HCHON2007881
HCHON2008112//Homo sapiens HERC2 (HERC2) mRNA, complete cds.//1.80E−24//
79aa//70%//AF071172
HCHON2008444//28S ribosomal protein S15, mitochondrial precursor (MPR-S15)
(DC37).//5.00E−39//76aa//76%//P82914
HEART1000010//Hepatocyte growth factor-like protein precursor (Macrophage
stimulatory protein) (MSP) (Macrophage stimulating protein).//5.00E−18//
40aa//93%//P26927
HEART1000074//BANP homolog; putative transcription factor; Btg3 associated
nulcear protein [Mus musculus]//0//420aa//82%//NM_016812
HEART1000088
HEART1000139//TROPONIN T, CARDIAC MUSCLE ISOFORMS (TNTC).//1.40E−112//
221aa//98%//P45379
HEART2001680//Ig alpha-1 chain C region.//0//324aa//91%//P01876
HEART2001756
HEART2006131//2-hydroxyphytanoyl-CoA lyase [Mus musculus]//1.00E−138//
263aa//45%//NM_019975
HEART2006909//Hemolysin C.//3.00E−40//88aa//33%//Q54318
HEART2007031
HEART2010391
HEART2010492//GLYCEROL-3-PHOSPHATE ACYLTRANSFERASE, MITOCHONDRIAL PRECURSOR
(EC 2.3.1.15) (GPAT) (P90).//3.6E−47//462aa//32%//Q61586
HEART2010495//MICROTUBULE-ASSOCIATED PROTEIN 4.//2.00E−159//579aa//62%//
P27816
HHDPC1000118//Threonine synthase (EC 4.2.99.2).//3.00E−70//178aa//35%//
Q9ZMX5
HHDPC2001337
HLUNG1000017
HLUNG2000014//Mus musculus strain BALB/c dectin-2 alpha isoform mRNA,
complete cds.//2.80E−55//211aa//50%//AF240357
HLUNG2001996
HLUNG2002465//Homo sapiens Asef mRNA for APC-stimulated guanine nucleotide
exchange factor, complete cds.//1.30E−183//557aa//62%//AB042199
HLUNG2002958
HLUNG2003003
HLUNG2003872
HLUNG2010464
HLUNG2011041//basic proline-rich peptide IB-8a - human (fragments)//9.7E−07
//113aa//35%//D38355
HLUNG2011298//Homo sapiens cytochrome b5 reductase 1 (B5R.1) mRNA, complete
cds.//1.6E−27//79aa//78%//AF169481
HLUNG2012049
HLUNG2012287
HLUNG2012727
HLUNG2013204//phytoene dehydrogenase-like [Arabidopsis thaliana]//4.0E−53//
97aa//55%//BAB10768
HLUNG2013304
HLUNG2013622
HLUNG2013851
HLUNG2014262
HLUNG2014288//Mus musculus RP42 mRNA, complete cds.//2.4E−40//189aa//
43%//AF198092
HLUNG2014449
HLUNG2015617
HLUNG2017350//GAP JUNCTION ALPHA-3 PROTEIN (CONNEXIN 44) (CX44.//2.60E−53
//262aa//41%//P41987
HLUNG2017546
HLUNG2017806
HLUNG2019058
HSYRA2004858
HSYRA2005456
HSYRA2005496//ENDOGLIN PRECURSOR (CD105 ANTIGEN).//2.4E−117//245aa//92%//
P17813
HSYRA2006873
HSYRA2007667
HSYRA2008376
HSYRA2008714//POTENTIAL PHOSPHOLIPID-TRANSPORTING ATPASE ID (EC 3.6.1.—)
(FRAGMENT).//6.2E−158//412aa//70%//P98198
HSYRA2009075
HSYRA2009102//UDP-galactose transporter related [Homo sapiens].//3.0E−26//
280aa//32%//NP_005818
IMR322000127//ZINC FINGER PROTEIN 135.//3.30E−130//426aa//50%//P52742
IMR322000917//ZINC FINGER PROTEIN 29 (ZFP-29).//1.50E−34//197aa//40%//
Q07230
IMR322001380//Homo sapiens leucine-rich repeats containing F-box protein
FBL3 mRNA, complete cds.//7.00E−21//216aa//32%//AF186273
IMR322002035
IMR322002110
IMR322003675
IMR322006222
IMR322006495//Homo sapiens mRNA for kinetochore protein CENP-H, complete
cds.//3.1E−61//183aa//73%//AB035124
IMR322006886//Homo sapiens hepatocellular carcinoma-associated antigen 127
(HCA127) mRNA, complete cds.//2.5E−107//207aa//99%//AF270491
IMR322007225
IMR322016146
IMR322018117
KIDNE1000064//Mus musculus mRNA for RST, complete cds.//6.70E−219//552aa//
73%//AB005451
KIDNE2000665
KIDNE2000722
KIDNE2000832
KIDNE2000846//Mus musculus orphan transporter isoform A12 (Xtrp2) mRNA,
alternatively spliced, complete cds.//1.2E−54//203aa//50%//AF075262
KIDNE2001361//Mus musculus catp mRNA for cation-transporting atpase,
complete cds.//4.1E−123//273aa//91%//AB035381
KIDNE2001847//H. sapiens graf gene.//4.10E−98//300aa//55%//Y10388
KIDNE2002252//Drosophila melanogaster BcDNA. GH09358 (BcDNA. GH09358) mRNA,
complete cds.//6.30E−145//763aa//42%//AF181639
KIDNE2002991
KIDNE2003837
KIDNE2005543
KIDNE2006580//CYTOCHROME P450 4C1 (EC 1.14.14.1) (CYPIVC1).//1.10E−119//
496aa//49%//P29981
KIDNE2010264
KIDNE2011314
KIDNE2011532//similar to melanoma-associated chondroitin sulfate
proteoglycan 4//7.00E−30//54aa//60%//XP_000655
KIDNE2011635//Rabbit mRNA for sodium-glucose cotransporter, complete cds.//
2.1e−313//670aa//80%//D16226
KIDNE2012945//PROCOLLAGEN C-PROTEINASE ENHANCER PROTEIN PRECURSOR (PCPE)
(TYPE I PROCOLLAGEN COOH-TERMINAL PROTEINASE ENHANCER) (TYPE 1 PROCOLLAGEN C-
PROTEINASE ENHANCER PROTEIN).//2.00E−14//113aa//41%//Q15113
KIDNE2013095
LIVER2007415
LYMPB1000141
LYMPB2000083//HLA CLASS I HISTOCOMPATIBILITY ANTIGEN, ALPHA CHAIN F
PRECURSOR (HLAF ANTIGEN) (LEUKOCYTE ANTIGEN F).//4.80E−131//158aa//93%//
P33617
MESAN2001979
MESAN2006563
MESAN2012054
MESAN2014295
MESAN2015515
MESAN2018576
MESTC1000042
MESTC2000153
NB9N41000340
NCRRP1000129
NESOP2000744
NESOP2001433//ALC1_HUMAN Ig alpha-1 chain C region//0//353aa//100%//
P01876
NESOP2001656
NESOP2001694//H. sapiens graf gene.//7.4E−53//162aa//66%//Y10388
NESOP2001752
NESOP2002738
NHNPC2000606
NHNPC2000877
NHNPC2001223
NHNPC2001816
NHNPC2002565
NHNPC2002749
NOVAR2000136//Calsequestrin, skeletal muscle isoform precursor (Aspartactin)
(Laminin-binding protein).//1.00E−142//235aa//66%//P07221
NOVAR2000710
NOVAR2000962
NOVAR2001108//Human (hybridoma H210) anti-hepatitis A IgG variable region,
constant region, complementarity-determining regions mRNA, complete cds.//
3.0E−230//482aa//88%//M87789
NOVAR2001783
NT2NE2003252//Human putative serine/threonine protein kinase PRK (prk) mRNA,
complete cds.//3.00E−44//234aa//38%//U56998
NT2NE2005890
NT2NE2006531//ZINC FINGER PROTEIN 184 (FRAGMENT).//4.10E−113//437aa//
47%//Q99676
NT2NE2006909//Methionine aminopeptidase 2 (EC 3.4.11.18) (MetAP 2)
(Peptidase M2) (Initiation factor 2 associated 67 kDa glycoprotein) (P67).//
1.00E−147//258aa//80%//P50579
NT2NE2008060
NT2RI2003993
NT2RI2004618//Cytosolic acyl coenzyme A thioester hydrolase (EC 3.1.2.2)
(Long chain acyl-CoA thioester hydrolase) (CTE-II) (Brain acyl-CoA hydrolase)
(BACH).//1.00E−126//222aa//88%//O00154
NT2RI2005166//VEGETATIBLE INCOMPATIBILITY PROTEIN HET-E-1.//7.70E−14//
300aa//26%//Q00808
NT2RI2006686//E1A-ASSOCIATED PROTEIN P300.//1.30E−18//421aa//26%//Q09472
NT2RI2008724
NT2RI2009855
NT2RI2011422//Homo sapiens partial mRNA for transport-secretion protein 2.1
(TTS-2.1 gene).//6.4E−70//428aa//40%//AJ278475
NT2RI2011683
NT2RI2012659
NT2RI2012990//76.5 KDA PROTEIN C210RF13.//1.8E−73//149aa//100%//O95447
NT2RI2013357
NT2RI2014247
NT2RI2014551
NT2RI2014733
NT2RI2016128
NT2RI2018311
NT2RI2018883
NT2RI2019751
NT2RI2023303
NT2RI2025909//carnitine/acylcarnitine translocase//3.0E−32//260aa//37%//
NP_000378
NT2RI2025957//LU1 protein [Homo sapiens]//0//630aa//99%//AAF74512
NT2RI2027081
NT2RI2027396
NT2RI3000622
NT2RI3001263
NT2RI3001515//ALEX1 protein [Homo sapiens]//2.0E−25//220aa//29%//
NP_057692
NT2RI3002303
NT2RI3002842
NT2RI3002892
NT2RI3003031
NT2RI3003095
NT2RI3003162
NT2RI3003382
NT2RI3003409
NT2RI3004381
NT2RI3004510
NT2RI3005202
NT2RI3005403
NT2RI3005724
NT2RI3006132
NT2RI3006171//CARCINOEMBRYONIC ANTIGEN PRECURSOR (CEA) (MECONIUM ANTIGEN
100) (CD66E ANTIGEN).//1.3E−54//294aa//39%//P06731
NT2RI3006284//Homo sapiens chorea-acanthocytosis (CHAC) mRNA, complete
cds.//1.2E−144//538aa//51%//AF337532
NT2RI3006340//Myomesin 1 (Skelemin).//0//1390aa//81%//Q62234
NT2RI3006376
NT2RI3006673//LAR protein precursor (Leukocyte antigen related) (EC
3.1.3.48).//0//1151aa//90%//P10586
NT2RI3006796
NT2RI3007065
NT2RI3007158
NT2RI3007291
NT2RI3007543
NT2RI3007757//breast cancer nuclear receptor-binding auxiliary protein//
1.00E−172//295aa//94%//AAD21311
NT2RI3007978//CTP synthase II; CTP synthetase type 2 [Homo sapiens]//0//
536aa//91%//NM_019857
NT2RI3008055
NT2RI3008162
NT2RI3008652//Homo sapiens mRNA for CDEP, complete cds.//6.10E−113//
443aa//52%//AB008430
NT2RI3008697//erythroblast macrophage protein [Mus musculus]//2.00E−14//
70aa//25%//NM_021500
NT2RI3008974//probable transposase - human transposon MER37//1.20E−52//
165aa//69%//S72481
NT2RI3009158//Iroquois-class homeodomain protein IRX-3.//4.00E−16//52aa//
36%//P81067
NT2RP7000359//PROTEIN-TYROSINE PHOSPHATASE D1 (EC 3.1.3.48).//6.80E−25//
319aa//28%//Q16825
NT2RP7000466//Cegp1 protein//0//482aa//89%//NP_064436
NT2RP7004027//BONE MORPHOGENETIC PROTEIN 1 PRECURSOR (EC 3.4.24.—) (BMP-
1).//9.50E−33//301aa//30%//P98063
NT2RP7004123
NT2RP7005118//RAS GTPASE-ACTIVATING-LIKE PROTEIN IQGAP1 (P195) (KIAA0051).//
0//1034aa//58%//P46940
NT2RP7005529//PROBABLE GUANINE NUCLEOTIDE REGULATORY PROTEIN TIM (ONCOGENE
TIM) (P60 TIM) (TRANSFORMING IMMORTALIZED MAMMARY ONCOGENE).//5.40E−56//
364aa//37%//Q12774
NT2RP7005846
NT2RP7009030
NT2RP7009147//CHE-2 protein [Caenorhabditis elegans]//1.00E−177//740aa//
41%//CAB38019
NT2RP7009867
NT2RP7010128
NT2RP7010599//Homo sapiens endothelial lipase mRNA, complete cds.//5.60E−174
//321aa//98%//AF118767
NT2RP7011570
NT2RP7013795//VEGETATIBLE INCOMPATIBILITY PROTEIN HET-E-1.//4.90E−11//
129aa//34%//Q00808
NT2RP7014005//CTP synthase II; CTP synthetase type 2 [Homo sapiens]//0//
536aa//91%//NM_019857
NT2RP7015512
NT2RP7017365
NT2RP7017474
NT2RP7017546
NT2RP8000137
NT2RP8000296//similar to Kelch proteins//0//600aa//99%//AAF03529
NT2RP8000483//Rattus norvegicus mRNA for Nadrin E2, complete cds.//2.00E−208
//548aa//75%//AB060557
NTONG2000413//MATRIX METALLOPROTEINASE-16 PRECURSOR (EC 3.4.24.—) (MMP-16)
(MEMBRANE-TYPE MATRIX METALLOPROTEINASE 3) (MT-MMP 3) (MTMMP3) (MMP-X2).//
5.60E−62//290aa//37%//P51512
NTONG2003852
NTONG2005277//ANKYRIN 1 (ERYTHROCYTE ANKYRIN).//8.20E−31//363aa//31%//
Q02357
NTONG2005969
NTONG2006354
NTONG2007249
NTONG2007517//RING CANAL PROTEIN (KELCH PROTEIN).//9.10E−32//295aa//28%//
Q04652
NTONG2008088
NTONG2008672//final exon in repeat region; similar to long tandem repeat
region of sialidase (SP: TCNA_TRYCR, P23253) and neurofilament H protein//
1.9E−15//559aa//25%//AAC48204
OCBBF1000254
OCBBF2001794
OCBBF2002124//p40 [Homo sapiens]//3.00E−63//103aa//88%//AAC51270
OCBBF2003819
OCBBF2004826//T-cell lymphoma invasion and metastasis 2 [Homo sapiens]//0//
580aa//99%//NP_036586
OCBBF2004883
OCBBF2005428
OCBBF2006005//Bos taurus phosphatidic acid-preferring phospholipase A1 mRNA,
complete cds.//0//885aa//90%//AF045022
OCBBF2006058//Homo sapiens acyl-Coenzyme A dehydrogenase-8 precursor, mRNA,
complete cds.//5.40E−57//109aa//100%//AF126245
OCBBF2006151//Mus musculus protein tyrosine phosphatase-like protein PTPLB
(PtpIb) mRNA, complete cds.//3.40E−126//258aa//93%//AF169286
OCBBF2006567
OCBBF2006764//seizure related gene 6 [Mus musculus]//0//780aa//89%//
NP_067261
OCBBF2007028//Homo sapiens mRNA for NESCA, complete cds.//1.50E−169//
176aa//98%//AB026894
OCBBF2007068//ankyrin 1 [Bos taurus].//1.00E−68//800aa//32%//AAF61702
OCBBF2007114
OCBBF2007428
OCBBF2007478
OCBBF2007610//PSD-95/SAP90-associated protein-4 [Rattus norvegicus].//
1.00E−137//226aa//90%//AAB48590
OCBBF2008770
OCBBF2009788
OCBBF2009926
OCBBF2010140
OCBBF2010416
OCBBF2017516
OCBBF2019327
OCBBF2019823//lactate dehydrogenase A-like [Homo sapiens]//1.00E−164//
273aa//82%//NM_033195
OCBBF2020343
OCBBF2020453
OCBBF2020639
OCBBF2020741
OCBBF2020801//Ataxin 7 (Spinocerebellar ataxia type 7 protein).//5.00E−67//
116aa//100%//O15265
OCBBF2020838//FORKHEAD BOX PROTEIN D4 (FORKHEAD-RELATED PROTEIN FKHL9)
(FORKHEAD-RELATED TRANSCRIPTION FACTOR 5) (FREAC-5) (TRANSCRIPTION FACTOR
FKH-2).//1.70E−114//371aa//63%//Q60688
OCBBF2021020//Homo sapiens mRNA for vascular Rab-GAP/TBC-containing protein,
complete cds.//1.8E−24//107aa//47%//AB024057
OCBBF2021286
OCBBF2021323//Mus musculus GTRGEO22 (Gtrgeo22) mRNA, complete cds.//7.80E−49
//115aa//88%//AF303106
OCBBF2021788//Homo sapiens mRNA for B-cell CLL/lymphoma 9 (BCL9 gene).//
1.30E−92//600aa//42%//Y13620
OCBBF2022351//TIPD PROTEIN.//1.1E−54//263aa//40%//O15736
OCBBF2022574
OCBBF2023162
OCBBF2023643
OCBBF2024719
OCBBF2024781
OCBBF2024850
OCBBF2025028
OCBBF2025458
OCBBF2025527//GLYCEROL-3-PHOSPHATE DEHYDROGENASE [NAD+], CYTOPLASMIC (EC
1.1.1.8) (GPD-C) (GPDH-C).//8.60E−49//116aa//78%//P13707
OCBBF2025730
OCBBF2026645
OCBBF2027423
OCBBF2027478
OCBBF2028173//JM11 protein [Homo sapiens]//1.00E−131//304aa//97%//
AAF05832
OCBBF2028935
OCBBF2029901
OCBBF2030354//Mus musculus pantothenate kinase 1 beta (panK1beta) mRNA,
complete cds.//9.50E−195//372aa//96%//AF200357
OCBBF2030517
OCBBF2030574
OCBBF2030708
OCBBF2031167//Homo sapiens mRNA for MDC2 alpha, MDC2 beta, complete cds.//
0//813aa//99%//AB009671
OCBBF2031366
OCBBF2032590//H. sapiens mRNA for melanoma-associated chondroitin sulfate
proteoglycan (MCSP).//1.80E−11//151aa//39%//X96753
OCBBF2032599
OCBBF2032611
OCBBF2032671
OCBBF2033869//PROCOLLAGEN C-PROTEINASE ENHANCER PROTEIN PRECURSOR (PCPE)
(TYPE I PROCOLLAGEN COOH-TERMINAL PROTEINASE ENHANCER) (TYPE 1 PROCOLLAGEN C-
PROTEINASE ENHANCER PROTEIN).//6.6E−21//151aa//38%//Q15113
OCBBF2035110
OCBBF2035214
OCBBF2035564
OCBBF2035885
OCBBF2035916
OCBBF2036476
OCBBF2036743//ZINC FINGER PROTEIN 133.//9.00E−157//639aa//48%//P52736
OCBBF2037068//BCL2/adenovirus E1B 19-kDa protein-interacting protein 2.//
3.00E−74//122aa//66%//O54940
OCBBF2037340//Sacsin.//0//356aa//100%//Q9NZJ4
OCBBF2037398
OCBBF2037547//T-cell lymphoma invasion and metastasis 2 [Homo sapiens]//0//
1024aa//92%//NM_012454
OCBBF2037598//axonal-associated cell adhesion molecule [Mus musculus]//0//
366aa//89%//NP_031544
OCBBF2037638
OCBBF2038317//VPS10 domain receptor protein SORCS [Mus musculus]//0//
986aa//91%//NM_021377
OCBBF3000296
OCBBF3000483
OCBBF3002553
OCBBF3002600
OCBBF3003320//Potential phospholipid-transporting ATPase IS (EC 3.6.3.13)
(Fragment).//1.00E−110//179aa//62%//P98196
OCBBF3003592//Dynein beta chain, flagellar outer arm.//2.00E−54//222aa//
21%//Q39565
OCBBF3004314//Fas apoptotic inhibitory molecule [Mus musculus]//8.00E−67//
117aa//90%//NM_011810
OCBBF3006802
OCBBF3007516
OCBBF3008230
OCBBF3009279
PEBLM2000170//Sprouty homolog 3 (Spry-3).//1.00E−31//64aa//100%//O43610
PEBLM2000338
PEBLM2001465//diphthamide biosynthesis; Dph5p [Saccharomyces cerevisiae]//
9.00E−65//160aa//57%//NP_013273
PEBLM2001488
PEBLM2002594//ATP-binding cassette, sub-family A member 8 [Homo sapiens]//
4.50E−156//469aa//64%//XP_016390
PEBLM2002749
PEBLM2002887//ZINC FINGER PROTEIN 195.//1.50E−08//62aa//58%//O14628
PEBLM2004497
PEBLM2004666
PEBLM2005183//5′-3′ exonuclease//0//804aa//92%//CAA62819
PEBLM2005697
PEBLM2006113
PEBLM2007112
PEBLM2007140
PEBLM2007834
PERIC1000147
PERIC2000889//Rattus norvegicus dynamin-like protein variant 4 mRNA,
alternatively spliced, partial cds.//3.1E−22//51aa//98%//AF107048
PERIC2000914
PERIC2001227
PERIC2001228
PERIC2002766
PERIC2003090
PERIC2003452
PERIC2003699
PERIC2003720//kinectin 1; CG-1 antigen [Homo sapiens].//2.00E−92//270aa//
90%//NP_004977
PERIC2003834
PERIC2004028//Mus musculus erythroblast macrophage protein EMP mRNA,
complete cds.//3.80E−33//65aa//100%//AF263247
PERIC2004259
PERIC2004379
PERIC2004429
PERIC2004909
PERIC2005347//alpha 1C adrenergic receptor isoform 2//3.30E−22//74aa//
70%//BAA06901
PERIC2005370
PERIC2006035
PERIC2007914//Ubiquitously transcribed TPR gene on Y chromosome [Homo
sapiens]//1.0E−22//84aa//67%//NP_009056
PERIC2008385//sarcosine dehydrogenase; dimethylglycine dehydrogenase-like 1
[Homo sapiens]//4.00E−17//47aa//51%//NM_007101
PERIC2009086//Homo sapiens melanoma-associated antigen MG50 mRNA, partial
cds.//5.00E−189//508aa//66%//AF200348
PLACE5000001
PLACE5000171//E-SELECTIN PRECURSOR (ENDOTHELIAL LEUKOCYTE ADHESION MOLECULE
1) (ELAM-1) (LEUKOCYTE-ENDOTHELIAL CELL ADHESION MOLECULE 2) (LECAM2)
(CD62E).//1.50E−28//242aa//30%//P98110
PLACE5000260
PLACE5000282//elastin [Homo sapiens]//8.00E−08//420aa//97%//NP_000492
PLACE6001185
PLACE6009006
PLACE6012574
PLACE6019385//MITOGEN-ACTIVATED PROTEIN KINASE KINASE KINASE 5 (EC 2.7.1.—)
(MAPK/ERK KINASE KINASE 5) (MEK KINASE 5) (MEKK 5) (APOPTOSIS SIGNAL-
REGULATING KINASE 1) (ASK-1).//2E−57//92aa//63%//Q99683
PLACE6019932//Ictalurus punctatus NCC receptor protein 1 (NCCRP-1) mRNA,
complete cds.//1.2E−34//124aa//50%//AF208795
PLACE6020031//ANKYRIN HOMOLOG PRECURSOR.//2.70E−06//156aa//35%//Q06527
PLACE7000514//Mus musculus mRNA for ER protein 58 (EP58 gene).//3.80E−111//
366aa//55%//AJ404004
PLACE7001022
PLACE7001936
PLACE7002641//Ring assembly protein 3.//2.00E−13//79aa//26%//074994
PLACE7006051//cytoplasmic dynein heavy chain 2 [Rattus norvegicus]//0//
987aa//90%//NM_023024
PLACE7008431//Phosphatidylinositol-4-phosphate 5-kinase type II alpha (EC
2.7.1.68) (PIP5KII-alpha) (1-phosphatidylinositol-4-phosphate kinase)
(PtdIns(4)P-5-kinase B isoform) (Diphosphoinositide kinase).//1.00E−109//
200aa//56%//070172
PLACE7008623
PROST1000184//VASOACTIVE INTESTINAL POLYPEPTIDE RECEPTOR 1 PRECURSOR (VIP-R-
1) (PITUITARY ADENYLATE CYCLASE ACTIVATING POLYPEPTIDE TYPE II RECEPTOR)
(PACAP TYPE II RECEPTOR) (PACAP-R-2).//7.0E−63//125aa//98%//P32241
PROST1000528
PROST1000559//predicted osteoblast protein [Homo sapiens]//6.00E−33//
227aa//38%//NP_055703
PROST2003428//Protein pM5 precursor.//9.00E−47//91aa//89%//Q15155
PROST2008993//Mus musculus Pax transcription activation domain interacting
protein PTIP mRNA, complete cds.//1.10E−211//542aa//77%//AF104261
PROST2015243
PROST2016462//N-chimaerin (NC) (N-chimerin) (Alpha chimerin) (A-
chimaerin).//6.00E−26//65aa//34%//P30337
PROST2017367//PROTEIN-GLUTAMINE GLUTAMYLTRANSFERASE 4 (EC 2.3.2.13)
(PROSTATE TRANSGLUTAMINASE) (PROSTATE TRANSGLUTAMINASE) (TGP).//1.30E−52//
102aa//99%//P49221
PROST2017413
PROST2017700
PROST2018030
PROST2018090//SUSHI REPEAT-CONTAINING PROTEIN SRPX PRECURSOR.//9.50E−244//
414aa//99%//P78539
PROST2018511//Growth factor receptor-bound protein 7 (GRB7 adapter protein)
(Epidermal growth factor receptor GRB-7) (B47).//0//495aa//99%//Q14451
PROST2018902
PROST2018922
PROST2019296
PROST2019781
PUAEN2002489//Homo sapiens putative seven pass transmembrane protein
(TM7SF1) mRNA, complete cds.//1.0E−48//189aa//53%//AF027826
PUAEN2002616
PUAEN2003079//nasopharyngeal carcinoma susceptibility protein [Homo
sapiens]//3.00E−36//75aa//96%//NP_037407
PUAEN2005588
PUAEN2005930
PUAEN2006328//vascular Rab-GAP/TBC-containing [Homo sapiens]//8.0E−99//
360aa//53%//NP_008994
PUAEN2006701
PUAEN2007044//TRNA PSEUDOURIDINE SYNTHASE B (EC 4.2.1.70) (TRNA
PSEUDOURIDINE 55 SYNTHASE) (PSI55 SYNTHASE) (PSEUDOURIDYLATE SYNTHASE)
(URACIL HYDROLYASE).//7.90E−15//129aa//34%//P45142
PUAEN2007785
PUAEN2009174
PUAEN2009655//Bos taurus phosphatidic acid-preferring phospholipase A1 mRNA,
complete cds.//0//565aa//96%//AF045022
PUAEN2009795//Endothelial cell multimerin precursor.//1.00E−161//296aa//
78%//Q13201
PUAEN2009852//serine/threonine protein kinase Kp78 splice variant CTAK75a//
3.00E−33//86aa//36%//AAD48007
RECTM2000433//ZG-16p [Rattus norvegicus] //1.60E−64//148aa//85%//
CAA83059
RECTM2001347//sphingosine kinase type 2 isoform [Homo sapiens]//4.00E−46//
87aa//80%//NM_020126
SKMUS2000757
SKMUS2003074
SKMUS2004047
SKMUS2006394//Mus musculus ankyrin repeat-containing protein Asb-4 mRNA,
partial cds.//6.40E−54//405aa//34%//AF155355
SKNMC1000124//putative nuclear protein [Homo sapiens].//3.00E−12//398aa//
37%//NP_057689
SKNMC2002402
SKNMC2004457
SKNMC2004643
SKNMC2005772
SKNMC2006998//PROTEIN PHOSPHATASE INHIBITOR 1 (IPP-1) (I-1).//9.9E−32//
113aa//64%//Q13522
SKNMC2007504//DNA-directed RNA polymerase II largest subunit (EC 2.7.7.6)
(RPB1).//1.00E−16//76aa//26%//P08775
SKNMC2007961
SKNMC2009450
SKNSH2000482
SKNSH2009991
SKNSH2010015
SMINT1000192//PUTATIVE ATP-DEPENDENT RNA HELICASE KIAA0134.//4.00E−12//
37aa//100%//Q14147
SMINT2001818
SMINT2002743
SMINT2006641
SMINT2007391
SMINT2009902
SMINT2010076//Ig alpha-1 chain C region.//0//319aa//91%//P01876
SMINT2010897
SMINT2011311
SMINT2011888//protein Tro alpha1 H, myeloma//8.9E−215//481aa//82%//
0501254A
SMINT2015787//immunoglobulin lambda light chain [Homo sapiens]//1.40E−60//
164aa//77%//CAA40954
SPLEN2001599//Homo sapiens sialic acid binding immunoglobulin-like lectin 8
long splice variant (Siglec8) gene, complete cds.//4.00E−71//294aa//38%//
AF287892
SPLEN2002147//Halocynthia roretzi mRNA for HrPET-3, complete cds.//1.20E−09
//78aa//41%//AB029335
SPLEN2002467//Homo sapiens leucine-rich repeats containing F-box protein
FBL3 mRNA, complete cds.//1.60E−187//422aa//77%//AF186273
SPLEN2002707
SPLEN2006122//Homo sapiens RNA-binding region (RNP1, RRM) containing 2
(RNPC2)//2.00E−81//147aa//84%//NM_004902
SPLEN2009548
SPLEN2010912//putative nucleolar RNA helicase [Homo sapiens]//0//339aa//
90%//NM_019082
SPLEN2011422//CALDESMON (CDM).//5.3E−12//165aa//37%//Q05682
SPLEN2012624//BRCA1-associated RING domain protein 1 (BARD-1).//6.00E−14//
48aa//39%//Q9QZH2
SPLEN2012889//putative Na+-dependent inorganic phosphate cotransporter//
9.00E−19//70aa//32%//AAC35230
SPLEN2014946
SPLEN2015158
SPLEN2015267//Homo sapiens IGHG3 gene for immunoglobulin heavy chain gamma 3
constant region, 4-exon hinge, isolate Lib-A2.//1.0E−213//377aa//100%//
AJ390247
SPLEN2015679//Oryctolagus cuniculus sarcolemmal associated protein-3 mRNA,
complete cds.//4.90E−30//266aa//31%//U21157
SPLEN2016554
SPLEN2016863
SPLEN2017104
SPLEN2021701//HLA CLASS I HISTOCOMPATIBILITY ANTIGEN, A-2 ALPHA CHAIN
PRECURSOR.//4.40E−128//173aa//86%//P01892
SPLEN2023733
SPLEN2023791
SPLEN2024127
SPLEN2025491
SPLEN2027268
SPLEN2028844
SPLEN2028914
SPLEN2029051
SPLEN2029176
SPLEN2029522
SPLEN2029683
SPLEN2029727
SPLEN2029912
SPLEN2030335//Mus musculus fatty acid transport protein 3 mRNA, partial
cds//9.7E−251//275aa//81%//AF072758
SPLEN2030479
SPLEN2031125
SPLEN2031424
SPLEN2031547//Triose phosphate/phosphate translocator, non-green plastid
precursor (CTPT).//4.00E−20//76aa//25%//P52178
SPLEN2031724
SPLEN2031780
SPLEN2032154//NDRG1 PROTEIN (DIFFERENTIATION-RELATED GENE 1 PROTEIN) (DRG1)
(REDUCING AGENTS AND TUNICAMYCIN-RESPONSIVE PROTEIN) (RTP) (NICKEL-SPECIFIC
INDUCTION PROTEIN CAP43).//1.0E−22//80aa//57%//Q92597
SPLEN2032321
SPLEN2032813
SPLEN2033098//tumor necrosis factor receptor superfamily, member 14//1.7E−99
//183aa//100%//NP_003811
SPLEN2033153
SPLEN2033539
SPLEN2033921
SPLEN2034021
SPLEN2034081
SPLEN2034678
SPLEN2034781
SPLEN2036103
SPLEN2036326//CLAUDIN-5 (TRANSMEMBRANE PROTEIN DELETED IN VCFS) (TMDVCF).//
2.6E−118//218aa//100%//O00501
SPLEN2036712
SPLEN2036821//MITOCHONDRIAL CARNITINE/ACYLCARNITINE CARRIER PROTEIN
(CARNITINE/ACYLCARNITINE TRANSLOCASE) (CAC).//6.5E−10//104aa//33%//O43772
SPLEN2036932//Homo sapiens calcium and DAG-regulated guanine nucleotide
exchange factor I mRNA, complete cds.//3.9E−63//124aa//100%//AF081194
SPLEN2037194//NORQ PROTEIN.//5.5E−11//127aa//38%//Q51664
SPLEN2037580
SPLEN2037630
SPLEN2037722//lymphocyte antigen 108 [Mus musculus]//3.00E−63//137aa//
42%//NM_030710
SPLEN2038055
SPLEN2038180
SPLEN2038345
SPLEN2038407//basement membrane-induced gene//2.1E−33//283aa//34%//
XP_001646
SPLEN2039697
SPLEN2039936
SPLEN2040222
SPLEN2041304
SPLEN2041310
SPLEN2041645
SPLEN2041720
SPLEN2041977
SPLEN2042303
SPLEN2042598
STOMA1000189
STOMA2003444
STOMA2004294//Ig lambda chain V-IV region Bau.//1.00E−41//79aa//73%//
P01715
STOMA2004925
STOMA2008546//CDM PROTEIN (6C6-AG TUMOR-ASSOCIATED ANTIGEN) (DXS1357E).//
5.00E−124//246aa//100%//P51572
SYNOV1000374
SYNOV2005216//Homo sapiens laryngeal carcinoma related protein 1 mRNA,
complete cds.//2.5E−36//70aa//98%//AF268387
SYNOV2005448
SYNOV2005817//CYTOKINE RECEPTOR CLASS-II CRF2-4 PRECURSOR.//7.6E−176//
314aa//98%//Q08334
SYNOV2006430
SYNOV2007965//Homo sapiens mRNA for H-I(3)mbt-like protein, alternative
variant a.//3.1E−118//429aa//54%//AJ305226
SYNOV2012326//PUTATIVE PROTEIN-TYROSINE PHOSPHATASE TPTE (EC 3.1.3.48).//
6.7E−24//112aa//58%//P56180
SYNOV2014400//FIBULIN-1, ISOFORM C PRECURSOR.//4.0E−31//198aa//37%//
P23144
SYNOV2016124
SYNOV2017055
SYNOV2018921
SYNOV2021320//SH3 DOMAIN-BINDING PROTEIN 3BP-2.//2.3E−238//429aa//98%//
P78314
SYNOV3000231//Ig gamma-1 chain C region.//0//315aa//95%//P01857
SYNOV3000302//Ig gamma-1 chain C region.//1.00E−173//294aa//89%//P01857
SYNOV4000472
SYNOV4000706//B cell phosphoinositide 3-kinase adaptor [Mus musculus]//0//
633aa//79%//NM_031376
SYNOV4001326
SYNOV4001395
SYNOV4002346
SYNOV4002392
SYNOV4002883//S-adenosylmethionine decarboxylase proenzyme (EC 4.1.1.50)
(AdoMetDC) (SamDC) [Contains: S-adenosylmethionine decarboxylase alpha chain;
S-adenosylmethionine decarboxylase beta chain].//4.00E−72//129aa//99%//
P17707
SYNOV4003322
SYNOV4004184
SYNOV4004741//BENE protein (Fragment).//2.00E−77//140aa//94%//Q13021
SYNOV4004823
SYNOV4004914
SYNOV4006256
SYNOV4007012
SYNOV4007215
SYNOV4007360//SSXT protein (SYT protein).//5.00E−24//70aa//36%//Q62280
SYNOV4007430
SYNOV4007521//fibroblast growth factor receptor-like 1 precursor [Homo
sapiens]//7.00E−11//53aa//29%//NM_021923
SYNOV4007553//toll-like receptor2 [Homo sapiens]//0//740aa//94%//
NM_003264
SYNOV4007671//Syntaxin 3.//1.00E−144//262aa//99%//Q13277
SYNOV4008336
SYNOV4008440//Protein BAP28.//0//1119aa//85%//Q9H583
T1ESE2000116
TBAES2001171
TBAES2001220
TBAES2001229//60S ribosomal protein L23a.//8.00E−48//92aa//82%//P29316
TBAES2001258//SERINE PROTEASE HEPSIN (EC 3.4.21.—) (TRANSMEMBRANE PROTEASE,
SERINE 1).//6.40E−19//55aa//87%//P05981
TBAES2001492
TBAES2001751
TBAES2002197
TBAES2003550
TBAES2004055//NY-REN-50 antigen//1.00E−155//290aa//99%//AAD42878.
TBAES2005157
TBAES2005543
TBAES2006568
TBAES2007964
TCERX2000613
TCOLN2002278
TESOP1000127
TESOP2000801//PROTO-ONCOGENE TYROSINE-PROTEIN KINASE YES (EC 2.7.1.112)
(P61-YES) (C-YES).//3.9E−46//159aa//57%//Q04736
TESOP2001122//Caenorhabditis elegans LIN-9S (lin-9) mRNA, complete cds.//
5.60E−25//222aa//28%//AF269694
TESOP2001166//Mus musculus SOCS-5 mRNA, complete cds.//1.2E−114//439aa//
53%//AF033187
TESOP2001345
TESOP2001605//Homo sapiens laryngeal carcinoma related protein 1 mRNA,
complete cds.//2.5E−36//70aa//98%//AF268387
TESOP2001818
TESOP2001849
TESOP2001865
TESOP2001953//ooplasm [Mus musculus]//7.00E−08//58aa//26%//NM_011860
TESOP2002273
TESOP2002451
TESOP2002489
TESOP2002539
TESOP2002950
TESOP2003273
TESOP2003753
TESOP2004114//PROCOLLAGEN-LYSINE, 2-OXOGLUTARATE 5-DIOXYGENASE 2 PRECURSOR
(EC 1.14.11.4) (LYSYL HYDROXYLASE 2) (LH2).//1.70E−202//237aa//99%//
O00469
TESOP2005285//Homo sapiens partial mRNA for chr2 synaptotagmin (CHR2SYT
gene).//1.1E−21//54aa//96%//AJ303365
TESOP2005485//Ig delta chain C region.//2.00E−77//136aa//100%//P01880
TESOP2005579
TESOP2006041
TESOP2006060
TESOP2006068
TESOP2006670
TESOP2006746
TESOP2007052
TESOP2007262
TESOP2007636
TESOP2007688
TESOP2009121//Homo sapiens centromere protein E (312 kD) (CENPE), mRNA//
2.00E−10//155aa//20%//NM_001813
TESOP2009555
TESTI1000257//GLUCOSE TRANSPORTER TYPE 3, BRAIN.//7.4E−249//493aa//95%//
P11169
TESTI1000319//Putative eukaryotic translation initiation factor 3 subunit
(elF-3) (Fragment).//0//683aa//97%//O75153
TESTI1000330
TESTI1000348
TESTI1000390
TESTI1000491
TESTI1000545//Ring assembly protein 3.//2.00E−14//92aa//26%//O74994
TESTI2000443
TESTI2000644//SMALL INDUCIBLE CYTOKINE A14 PRECURSOR (CHEMOKINE CC-1/CC-3)
(HCC-1/HCC-3) (NCC-2).//2.80E−36//69aa//98%//Q16627
TESTI2002036//DIHYDROPYRIDINE-SENSITIVE L-TYPE, SKELETAL MUSCLE CALCIUM
CHANNEL ALPHA-1 SUBUNIT.//1.70E−18//398aa//24%//P22316
TESTI2002618//ADAM 2 PRECURSOR (A DISINTEGRIN AND METALLOPROTEINASE DOMAIN
2) (FERTILIN BETA SUBUNIT) (PH-30) (PH30).//1.10E−57//253aa//47%//Q99965
TESTI2002928
TESTI2003347//Homo sapiens connexin 59 (CX59) gene, complete cds.//1.80E−243
//440aa//100%//AF179597
TESTI2003573//Mus musculus cell cycle checkpoint control protein Mrad9 gene,
complete cds.//2.4E−38//325aa//30%//AF045662
TESTI2004215//Maackia amurensis early nodulin (ENOD2) mRNA, partial cds.//
1.3E−34//390aa//31%//AF039708
TESTI2004700
TESTI2005376
TESTI2005610//H. sapiens encoding CLA-1 mRNA.//5.9E−234//425aa//99%//
Z22555
TESTI2005739//Drosophila melanogaster Rho-kinase (Rhk) mRNA, complete cds.//
1.7E−09//383aa//24%//AF151375
TESTI2005986
TESTI2006041
TESTI2006643
TESTI2006648//ATP-binding cassette, sub-family C, member 5a//9E−109//
452aa//39%//NP_038818
TESTI2009474
TESTI2009477//TRICHOHYALIN.//1.9E−18//124aa//39%//P37709
TESTI2009511
TESTI2009812
TESTI2010400
TESTI2013381
TESTI2013382
TESTI2014716//G-RICH SEQUENCE FACTOR-1 (GRSF-1).//2.6E−228//391aa//99%//
Q12849
TESTI2014843
TESTI2016046//Homo sapiens HOTTL protein mRNA, complete cds.//2.8E−20//
242aa//26%//AF078842
TESTI2017727
TESTI2018838
TESTI2019042
TESTI2019648
TESTI2023254
TESTI2023599
TESTI2024567//METABOTROPIC GLUTAMATE RECEPTOR 8 PRECURSOR.//1.10E−130//
243aa//99%//000222
TESTI2026505//PUTATIVE RHO/RAC GUANINE NUCLEOTIDE EXCHANGE FACTOR (RHO/RAC
GEF) (FACIOGENITAL DYSPLASIA PROTEIN).//1.40E−50//378aa//29%//P98174
TESTI2027019//Homo sapiens leucine-rich repeat-containing G protein-coupled
receptor 6 (LGR6) mRNA, partial cds.//4.80E−125//137aa//100%//AF190501
TESTI2031529
TESTI2034520//Rattus norvegicus SMC (segregation of mitotic chromosomes 1)-
like 1 (yeast) (Smc1l1), mRNA//1.00E−145//250aa//53%//NM_031683
TESTI2034749
TESTI2034767//Homo sapiens collagen type IX alpha 1 chain (COL9A1) gene,
long and short alternatively spliced forms, exon 38 and complete cds.//
1.40E−191//484aa//73%//AF036130
TESTI2034953//Homo sapiens 88-kDa Golgi protein (GM88) mRNA, complete cds.//
2.00E−27//91aa//64%//AF204231
TESTI2034997
TESTI2035107
TESTI2035997
TESTI2036513
TESTI2036684
TESTI2037643
TESTI2040018//Homo sapiens ZNF258 (ZNF258) mRNA, complete cds.//7.80E−97//
461aa//49%//AF055470
TESTI2042450
TESTI2044796//ring finger protein 3 [Homo sapiens]//9.00E−41//92aa//38%//
NM_006315
TESTI2044833
TESTI2045920
TESTI2045983
TESTI2046347
TESTI2047071
TESTI2048465
TESTI2048603
TESTI2048898
TESTI2049206
TESTI2049246
TESTI2049277
TESTI2049422
TESTI2049452
TESTI2049469
TESTI2049576
TESTI2049857//golgi stacking protein homolog GRASP55 [Rattus norvegicus]//
5.00E−163//410aa//89%//AAD55350
TESTI2050137//SHC transforming protein.//1.00E−113//232aa//54%//P98083
TESTI2050681
TESTI2050987//RET finger protein-like 1.//4.00E−35//94aa//34%//075677
TESTI2051279
TESTI2051488
TESTI2051543
TESTI2051767
TESTI2051806
TESTI2051867//60S ribosomal protein L4 (L1).//1.00E−126//222aa//86%//
P36578
TESTI2052211
TESTI2052693//brk kinase substrate [Homo sapiens].//0//341aa//87%//
CAB65105
TESTI2052698
TESTI2052822
TESTI2053242
TESTI2053399//Homo sapiens pescadillo homolog 1, containing BRCT domain
(zebrafish) (PES1), mRNA//9.00E−33//63aa//100%//NM_014303
TESTI2053526
TESTI2053621//Guanylyl cyclase activating protein 1 (GCAP 1) (Guanylate
cyclase activator 1A).//7.00E−96//170aa//92%//P43080
TESTI4000014//130 kDa leucine-rich protein (LRP 130) (GP130).//0//1210aa//
96%//P42704
TESTI4000068
TESTI4000079//nuclear dual-specificity phosphatase [Homo sapiens]//6.00E−07
//80aa//36%//AAC39675
TESTI4000209//Homo sapiens F-BOX domain protein mRNA, complete cds.//5.5E−103
//194aa//99%//AF248640
TESTI4000215
TESTI4000250
TESTI4000288//Dynamin-1 (EC 3.6.1.50) (D100) (Dynamin, brain) (B-dynamin).//
2.00E−13//38aa//77%//P21575
TESTI4000349//thyroid hormone receptor interactor 12//1.00E−39//180aa//
40%//NP_004229
TESTI4000462
TESTI4000530
TESTI4000724//solute carrier family 16 (monocarboxylic acid transporters)//
5.00E−47//490aa//28%//NP_004687
TESTI4000970
TESTI4001100//protein tyrosine phosphatase, receptor type, f polypeptide
(PTPRF), interacting protein (liprin), alpha 1 [Homo sapiens]//3.00E−21//
50aa//40%//NM_003626
TESTI4001106//ubiquitin-protein ligase e3 componen n-recognin [Mus
musculus]//1.00E−124//228aa//45%//NM_009461
TESTI4001148//Dynein beta chain, ciliary.//1.00E−152//282aa//45%//P39057
TESTI4001176//Regulator of nonsense transcripts 1 (Nonsense mRNA reducing
factor 1) (NORF1) (Up-frameshift suppressor 1 homolog).//3.00E−46//90aa//
92%//Q92900
TESTI4001201
TESTI4001206
TESTI4001527//UDP-glucuronosyltransferase 2C1 microsomal (EC 2.4.1.17)
(UDPGT) (Fragment).//9.00E−24//64aa//36%//P36514
TESTI4001561//1-acyl-sn-glycerol-3-phosphate acyltransferase gamma (EC
2.3.1.51) (1-AGP acyltransferase 3) (1-AGPAT 3) (Lysophosphatidic acid
acyltransferase-gamma) (LPAAT-gamma) (1-acylglycerol-3-phosphate 0-
acyltransferase 3).//0//319aa//93%//Q9NRZ7
TESTI4001665
TESTI4001923
TESTI4002290
TESTI4002491//Beta-soluble NSF attachment protein (SNAP-beta) (N-
ethylmaleimide-sensitive factor attachment protein, beta) (Brain protein
I47) (Fragment).//1.00E−52//99aa//93%//P28663
TESTI4002552//Sodium/potassium-transporting ATPase alpha-4 chain (EC
3.6.3.9) (Sodium pump 4) (Na+/K+ ATPase 4) (Fragment).//0//505aa//94%//
Q13733
TESTI4002647
TESTI4002703
TESTI4002754
TESTI4002878
TESTI4004200
TESTI4005628
TESTI4005805
TESTI4005857
TESTI4005961
TESTI4006053
TESTI4006079//MUF1 protein; likely ortholog of mouse MUF1; elongin BC-
interacting leucine-rich repeat protein [Homo sapiens]//0//365aa//80%//
NM_006369
TESTI4006112
TESTI4006137
TESTI4006148//putative NADH oxidoreductase complex I subunit//2.00E−18//
40aa//56%//AAD37863.
TESTI4006219
TESTI4006326
TESTI4006393//neural specific sr protein NSSR 2 [Mus musculus]//7.00E−19//
70aa//80%//BAA35093
TESTI4006412
TESTI4006420//SH3-domain binding protein 5 (BTK-associated); SH3 binding
protein [Homo sapiens]//8.00E−25//61aa//41%//NM_004844
TESTI4006546//colon cancer antigen NY-CO-45 [Homo sapiens].//0//723aa//
99%//AAC18034
TESTI4006802//mesothelin; megakaryocyte potentiating factor [Mus musculus]//
2.00E−06//92aa//23%//NM_018857
TESTI4006819//Alpha enolase (EC 4.2.1.11) (2-phospho-D-glycerate hydrolyase)
(NON-neural enolase) (NNE) (Phosphopyruvate hydratase).//1.00E−33//
72aa//66%//P06733
TESTI4007064
TESTI4007163//Sodium- and chloride-dependent creatine transporter 2 (CT2)
(Fragment).//2.00E−92//153aa//84%//P53796
TESTI4007203
TESTI4007239
TESTI4007373
TESTI4007382
TESTI4007404
TESTI4007489
TESTI4007775
TESTI4007778//Alpha-actinin 3 (Alpha actinin skeletal muscle isoform 3) (F-
actin cross linking protein).//0//853aa//94%//Q08043
TESTI4007799
TESTI4007810//DNA ligase III (EC 6.5.1.1) (Polydeoxyribonucleotide synthase
[ATP]).//1.00E−112//197aa//86%//P49916
TESTI4008007
TESTI4008018//DAZ associated protein 2; KIAA0058 gene product [Homo
sapiens]//6.00E−41//82aa//75%//NM_014764
TESTI4008050//Translocation protein SEC63 homolog.//1.00E−175//314aa//
82%//Q9UGP8
TESTI4008219
TESTI4008401
TESTI4008429//Probable cation-transporting ATPase 2 (EC 3.6.3.—) (CGI-
152).//1.00E−136//249aa//94%//Q9HD20
TESTI4008573
TESTI4008797
TESTI4008816
TESTI4008935
TESTI4008993
TESTI4009022
TESTI4009034
TESTI4009123
TESTI4009160//Kinesin-like protein KIF2.//6.00E−06//39aa//37%//P28740
TESTI4009215
TESTI4009283
TESTI4009286//Homo sapiens HOTTL protein mRNA, complete cds//2.00E−78//
180aa//96%//AF078842
TESTI4009374//Apobec-1 complementation factor; APOBEC-1 stimulating protein;
apobec-1 complementation factor [Homo sapiens]//1.00E−120//203aa//68%//
NM_014576
TESTI4009406
TESTI4009457//p53-inducible p53DINP1 [Homo sapiens]//3.00E−80//140aa//
88%//NM_033285
TESTI4009563//testis specific ankyrin-like protein 1 [Homo sapiens]//1.00E−140
//239aa//94%//NM_017844
TESTI4009608//putative T1/ST2 receptor binding protein [Homo sapiens]//
1.00E−41//125aa//57%//NP_006849
TESTI4009638
TESTI4009881//Dynein heavy chain, cytosolic (DYHC) (Cytoplasmic dynein heavy
chain).//5.00E−30//176aa//21%//Q9JHU4
TESTI4010211
TESTI4010377
TESTI4010713
TESTI4010789
TESTI4010817
TESTI4010831//yeast Sec31p homolog; ABP125 [Homo sapiens]//0//780aa//
81%//NM_016211
TESTI4010851//Probable ubiquitin carboxyl-terminal hydrolase FAF-X (EC
3.1.2.15) (Ubiquitin thiolesterase FAF-X) (Ubiquitin-specific processing
protease FAF-X) (Deubiquitinating enzyme FAF-X) (Fat facets protein related,
X-linked) (Ubiquitin-specific protease 9, X chromosome).//2.00E−67//213aa//
25%//Q93008
TESTI4010928
TESTI4011118
TESTI4011161
TESTI4011246
TESTI4011484//Sec23-interacting protein p125 [Homo sapiens]//0//387aa//
52%//NM_007190
TESTI4011505
TESTI4011745//WD-repeat protein 9 (Fragment).//0//674aa//82%//Q9NSI6
TESTI4011956//Ciliary dynein heavy chain (Axonemal dynein heavy chain)
(Dynein heavy chain 9).//1.00E−170//340aa//39%//Q9NYC9
TESTI4012086
TESTI4012329
TESTI4012406//Apolipoprotein(A) (EC 3.4.21.—) (Apo(A)) (LP(A)) (Fragment).//
2.00E−25//50aa//79%//P14417
TESTI4012448//Stromelysin-3 precursor (EC 3.4.24.—) (Matrix
metalloproteinase-11) (MMP-11) (ST3) (SL-3).//0//375aa//99%//P24347
TESTI4012505//Tumor suppressor p53-binding protein 2 (p53-binding protein 2)
(53BP2) (Bcl2-binding protein) (Bbp).//1.00E−81//220aa//34%//Q13625
TESTI4012556
TESTI4012679//Homo sapiens cryptochrome 1 (photolyase-like) (CRY1), mRNA//
0//330aa//97%//NM_004075
TESTI4012702
TESTI4013369//ATP synthase lipid-binding protein, mitochondrial precursor
(EC 3.6.1.34) (ATP synthase proteolipid P3) (ATPase protein 9) (ATPase
subunit C).//7.00E−60//119aa//83%//P48201
TESTI4013667
TESTI4013675
TESTI4013685
TESTI4013735
TESTI4013817//novel AMP-binding enzyme similar to acetyl-coenzyme A
synthethase (acetate-coA ligase)//8.00E−38//99aa//100%//CAB75500
TESTI4013830//Integral membrane glycoprotein gp210 precursor.//0//652aa//
41%//P11654
TESTI4013924//Intracellular protein transport protein USO1.//8.00E−20//
125aa//20%//P25386
TESTI4014159
TESTI4014175//Chromodomain helicase-DNA-binding protein 3 (CHD-3) (Mi-2
autoantigen 240 kDa protein) (Mi2-alpha).//0//410aa//75%//Q12873
TESTI4014306
TESTI4014392
TESTI4014445
TESTI4014694
TESTI4014818//AD-012 protein [Homo sapiens]//1.00E−123//217aa//70%//
NM_018449
TESTI4014924//selective hybridizing clone [Mus musculus]//0//1153aa//
92%//NM_011370
TESTI4015263
TESTI4015293
TESTI4015471
TESTI4015600
TESTI4015646
TESTI4015681
TESTI4015688
TESTI4016110//DnaJ homolog subfamily B member 8 (mDJ6).//1.00E−91//165aa//
71%//Q9QYI7
TESTI4016238
TESTI4016551
TESTI4016812
TESTI4016822//Protein phosphatase inhibitor 2 (IPP-2).//9.00E−72//133aa//
83%//P41236
TESTI4016882
TESTI4016925//Dynein beta chain, ciliary.//0//533aa//34%//P39057
TESTI4017001
TESTI4017137
TESTI4017254
TESTI4017543//ubinuclein 1 [Homo sapiens]//1.00E−124//286aa//38%//
NM_016936
TESTI4017575
TESTI4017848
TESTI4017901//alpha-1A-adrenergic receptor, isoform 2; adrenergic, alpha-
1A-, receptor; adrenergic, alpha-1C-, receptor; alpha 1A-adrenoceptor [Homo
sapiens]//9.00E−21//51aa//72%//NM_033303
TESTI4017961
TESTI4018152//protein tyrosine phosphatase, non-receptor type 13 [Mus
musculus]//3.00E−18//130aa//33%//NP_035334.
TESTI4018208//MYOSINIC HEAVY CHAIN.//6.10E−07//112aa//40%//P10569
TESTI4018382
TESTI4018555
TESTI4018806
TESTI4018835//Potential phospholipid-transporting ATPase IK (EC 3.6.3.13)
(Fragment).//0//514aa//88%//060423
TESTI4018881//early endosome antigen 1, 162 kD; early endosome-associated
protein [Homo sapiens]//2.00E−14//101aa//22%//NM_003566
TESTI4018886//M-protein, striated muscle.//4.00E−81//146aa//46%//Q02173
TESTI4019140//Mi-2 histone deacetylase complex protein 66 [Xenopus laevis]//
2.00E−98//410aa//71%//AAD55392
TESTI4019299
TESTI4019417
TESTI4019566//Dosage compensation regulator (Male-less protein) (No action
potential protein).//8.00E−49//165aa//29%//P24785
TESTI4019843//Rattus norvegicus huntingtin-associated protein interacting
protein (duo) (Hapip), mRNA.//0//698aa//91%//NM_032062
TESTI4020092//Laminin alpha-2 chain precursor (Laminin M chain) (Merosin
heavy chain).//3.00E−40//74aa//96%//P24043
TESTI4020102
TESTI4020806
TESTI4020920
TESTI4021294
TESTI4021456
TESTI4021478//Potential phospholipid-transporting ATPase IS (EC 3.6.3.13)
(Fragment).//0//433aa//54%//P98196
TESTI4021491
TESTI4022716//RNA helicase [Homo sapiens]//0//817aa//95%//NM_014314
TESTI4022873//Dynein gamma chain, flagellar outer arm.//3.00E−09//106aa//
19%//Q39575
TESTI4022936
TESTI4023546//Sialidase (EC 3.2.1.18) (Neuraminidase) (NA) (Major surface
antigen).//6.00E−32//134aa//23%//P23253
TESTI4023555
TESTI4023722
TESTI4023762//Trichohyalin.//5.00E−12//94aa//22%//P37709
TESTI4023942
TESTI4024344
TESTI4024420//multidomain presynaptic cytomatrix protein Piccolo [Rattus
norvegicus]//0//789aa//82%//NM_020098
TESTI4024874
TESTI4024890
TESTI4024907
TESTI4025731
TESTI4025797
TESTI4025920//B29 protein [Homo sapiens]//2.00E−34//73aa//38%//NM_031939
TESTI4026079
TESTI4026192
TESTI4026295
TESTI4026456
TESTI4026510//RNA helicase [Homo sapiens]//0//445aa//89%//NM_016130
TESTI4026524//Chromodomain helicase-DNA-binding protein 4 (CHD-4) (Mi-2
autoantigen 218 kDa protein) (Mi2-beta).//0//388aa//59%//Q14839
TESTI4026700
TESTI4026762
TESTI4026785
TESTI4027516
TESTI4027557//Galectin-9 (HOM-HD-21) (Ecalectin).//1.00E−176//306aa//
86%//000182
TESTI4027821
TESTI4028059//6-phosphofructokinase, muscle type (EC 2.7.1.11)
(Phosphofructokinase 1) (Phosphohexokinase) (Phosphofructo-1-kinase isozyme
A) (PFK-A).//0//450aa//96%//P08237
TESTI4028062
TESTI4028429//Eppin precursor.//2.00E−32//61aa//76%//O95925
TESTI4028612
TESTI4028809
TESTI4028823//Niemann-Pick C1 protein precursor.//6.00E−22//127aa//22%//
P56941
TESTI4028880//Glucose transporter type 3, brain.//0//436aa//88%//P11169
TESTI4028983
TESTI4029370
TESTI4029671
TESTI4029836//Potential phospholipid-transporting ATPase IB (EC 3.6.3.13).//
0//888aa//93%//P98200
TESTI4030069//fer-1 (C. elegans)-like 3 (myoferlin); fer-1 (C. elegans)-like
3 [Homo sapiens]//4.00E−22//64aa//38%//NM_013451
TESTI4030159
TESTI4030505
TESTI4030603
TESTI4030669
TESTI4032895
TESTI4033433
TESTI4033690
TESTI4034172
TESTI4034212
TESTI4034432
TESTI4034632//polypeptide N-acetylgalactosaminyltransferase 9; UDP-GalNAc:
polypeptide N-acetylgalactosaminyltransferase 9; GalNAc transferase 9;
protein-UDP acetylgalactosaminyltransferase 9 [Homo sapiens]//1.00E−113//
182aa//60%//NM_021808
TESTI4034912//Intracellular protein transport protein US01.//6.00E−38//
219aa//21%//P25386
TESTI4035063//Restin (Cytoplasmic linker protein-170 alpha-2) (CLIP-170)
(Reed-Sternberg intermediate filament associated protein).//1.00E−17//
72aa//27%//P30622
TESTI4035065
TESTI4035498//Septin-like protein KIAA0202 (Fragment).//7.00E−58//112aa//
49%//Q92599
TESTI4035602
TESTI4035637
TESTI4035649
TESTI4036042
TESTI4036909//Regulator of nonsense transcripts 1 homolog.//9.00E−50//
140aa//32%//Q9FJR0
TESTI4037066
TESTI4037156//WHSC2 protein [Homo sapiens]//0//425aa//80%//NM_005663
TESTI4037188
TESTI4037244
TESTI4037727//Dynein beta chain, ciliary.//0//573aa//73%//P39057
TESTI4038156
TESTI4038223
TESTI4038258
TESTI4038339
TESTI4038492
TESTI4038818
TESTI4039038
TESTI4039086
TESTI4039659//DnaJ homolog subfamily B member 8 (mDJ6).//1.00E−91//165aa//
71%//Q9QY17
TESTI4040363//Surfeit locus protein 5.//3.00E−62//120aa//100%//Q15528
TESTI4040800
TESTI4040939
TESTI4040956
TESTI4041053
TESTI4041099
TESTI4041143
TESTI4041519
TESTI4041624
TESTI4041903
TESTI4041954
TESTI4042098
TESTI4042444
TESTI4042711
TESTI4043129
TESTI4043203
TESTI4043551
TESTI4043947
TESTI4044035
TESTI4044084
TESTI4044123
TESTI4044186//leucine-rich, glioma inactivated 1 [Mus musculus]//6.00E−65//
110aa//60%//NM_020278
TESTI4044234
TESTI4044296
TESTI4044682
TESTI4045312
TESTI4046253
TESTI4046282
TESTI4046487//plexin 1 [Mus musculus]//0//433aa//97%//NM_008881
TESTI4046819//Glucoamylase S1/S2 precursor (EC 3.2.1.3) (Glucan 1,4-alpha-
glucosidase) (1,4-alpha-D-glucan glucohydrolase).//4.00E−12//134aa//21%//
P08640
TESTI4046884
TESTI4047069
THYMU1000496//KINESIN-LIKE PROTEIN KIF1C.//6.40E−61//210aa//53%//O43896
THYMU1000600
THYMU2000932
THYMU2001053
THYMU2001090
THYMU2003397
THYMU2003632
THYMU2003760
THYMU2004693
THYMU2005003
THYMU2005190
THYMU2005303//T-CELL SURFACE GLYCOPROTEIN CD8 ALPHA CHAIN PRECURSOR (T-
LYMPHOCYTE DIFFERENTIATION ANTIGEN T8/LEU-2).//4.2E−56//111aa//100%//
P01732
THYMU2005321
THYMU2006420//TRANSCRIPTION FACTOR-LIKE PROTEIN MRGX (KIAA0026).//2.00E−129
//268aa//92%//Q15014
THYMU2007060//Mus musculus Cdc42 GTPase-activating protein mRNA, complete
cds.//1.50E−37//270aa//40%//AF151363
THYMU2007179
THYMU2007658
THYMU2008282
THYMU2008725//PROTEIN-TYROSINE PHOSPHATASE BETA PRECURSOR (EC 3.1.3.48) (R-
PTP-BETA).//5.90E−192//358aa//98%//P23467
THYMU2009134
THYMU2009157//Mus musculus MRPS18b mRNA for mitochondrial ribosomal protein
S18b, complete cds.//5.00E−38//97aa//77%//AB049954
THYMU2009425//OLFACTORY RECEPTOR-LIKE PROTEIN HGMP07J.//4.90E−46//1 73aa//
53%//P30954
THYMU2011548//olfactory receptor 67 [Mus musculus]//2.50E−56//307aa//
39%//NP_038647
THYMU2011736//latent transforming growth factor beta binding protein 3//0//
200aa//99%//NP_066548
THYMU2013386//COTE1 PROTEIN.//2.50E−25//269aa//28%//P81408
THYMU2014353
THYMU2016204
THYMU2016523
THYMU2019210//HLA CLASS I HISTOCOMPATIBILITY ANTIGEN, B-40 B*4002 ALPHA
CHAIN PRECURSOR.//2.1E−195//248aa//100%//Q04826
THYMU2019587
THYMU2023711//Homo sapiens mRNA for immunoglobulin lambda heavy chain.//
2.50E−233//477aa//89%//Y14737
THYMU2023967
THYMU2025707
THYMU2027497//5-HYDROXYTRYPTAMINE 3 RECEPTOR PRECURSOR (5-HT-3) (SEROTONIN-
GATED ION CHANNEL RECEPTOR) (5-HT3R).//2E−10//186aa//24%//P46098
THYMU2027695//Ig gamma-1 chain C region.//1.00E−169//295aa//78%//P01857
THYMU2027734//Homo sapiens SA hypertension-associated homolog (rat) (SAH),
mRNA.//2.00E−39//72aa//42%//NM_005622
THYMU2028978
THYMU2029676
THYMU2029688
THYMU2030068
THYMU2030226
THYMU2030264
THYMU2030637
THYMU2030796
THYMU2031046//Copine III.//4.00E−28//60aa//75%//O75131
THYMU2031218
THYMU2031258//Homo sapiens oxysterol-binding protein-related protein (ORP1)
mRNA, complete cds.//4.0E−45//125aa//64%//AF274714
THYMU2031341
THYMU2031368
THYMU2031579
THYMU2031847
THYMU2031890
THYMU2032014//src homology 3 domain-containing protein HIP-55; HIP-55
protein [Homo sapiens]//2.00E−84//147aa//90%//NM_014063
THYMU2032035
THYMU2032080
THYMU2032358
THYMU2032437
THYMU2032655
THYMU2032696
THYMU2032825//Mus musculus mRNA for Drctnnb1a, complete cds.//2.3E−74//
202aa//71%//AB030242
THYMU2033070
THYMU2033079//ATP-binding cassette protein [Mus musculus].//2.00E−53//
105aa//91%//AAF31421
THYMU2033104//nuclear prelamin A recognition factor, isoform a [Homo
sapiens]//5.00E−34//111aa//47%//NP_036468
THYMU2033308
THYMU2033787
THYMU2033816
THYMU2034314
THYMU2034374//Homo sapiens MAID protein mRNA, complete cds.//1.5E−75//
146aa//100%//AF113535
THYMU2034647
THYMU2035064
THYMU2035101
THYMU2035319//Homo sapiens RNA-binding region (RNP1, RRM) containing 2
(RNPC2)//0//354aa//81%//NM_004902
THYMU2035388
THYMU2035400
THYMU2035735//Oryctolagus cuniculus sarcolemmal associated protein-3 mRNA,
complete cds.//3.6E−154//350aa//90%//U21157
THYMU2036058
THYMU2036085
THYMU2036252
THYMU2036265
THYMU2036459//240 KDA PROTEIN OF ROD PHOTORECEPTOR CNG-CHANNEL [CONTAINS:
GLUTAMIC ACID-RICH PROTEIN (GARP); CYCLIC-NUCLEOTIDE-GATED CATION CHANNEL 4
(CNG CHANNEL 4) (CNG-4) (CYCLIC NUCLEOTIDE-GATED CATION CHANNEL MODULATORY
SUBUNIT)].//1.40E−13//527aa//24%//Q28181
THYMU2036653
THYMU2037081
THYMU2037208
THYMU2037226
THYMU2037233//RNA polymerase I transcription factor RRN3 [Homo sapiens]//
1.00E−71//143aa//95%//NP_060897
THYMU2037348
THYMU2037965
THYMU2038189
THYMU2038301//Homo sapiens mRNA for PRP8 protein, complete cds.//3.90E−52//
112aa//98%//AB007510
THYMU2038369//Mus musculus GTRGE022 (Gtrgeo22) mRNA, complete cds.//1.10E−111
//262aa//83%//AF303106
THYMU2038615
THYMU2038636
THYMU2038739
THYMU2038772
THYMU2038797//B locus C type Lectin [Gallus gallus]//2.90E−15//147aa//
34%//CAA18961
THYMU2039305//70 KDA WD-REPEAT TUMOR-SPECIFIC ANTIGEN (FRAGMENT).//6.90E−40
//98aa//83%//O35828
THYMU2039315//Caenorhabditis elegans LIN-9L (lin-9) mRNA, complete cds.//
8.70E−66//444aa//34%//AF269693
THYMU2039350
THYMU2039411
THYMU2039780
THYMU2039989
THYMU2040140
THYMU2040412
THYMU2040824
THYMU2040975//PTB-ASSOCIATED SPLICING FACTOR (PSF).//1.30E−08//119aa//
36%//P23246
THYMU2041007
THYMU2041015//Monocarboxylate transporter 8 (MCT 8) (X-linked PEST-
containing transporter) (MCT 7).//1.00E−132//230aa//54%//P36021
THYMU2041252
THYMU3000028//Rat Tamm-Horsfall protein mRNA, complete cds.//1.3E−21//
253aa//28%//M63510
THYMU3000036
THYMU3000133
THYMU3000655
THYMU3000826
THYMU3001083//Tubulin epsilon chain (Epsilon tubulin).//5.00E−26//58aa//
98%//Q9UJT0
THYMU3001234//Dynamin 2 (EC 3.6.1.50) (Dynamin UDNM).//1.00E−56//108aa//
90%//P39054
THYMU3001379//116 kDa U5 small nuclear ribonucleoprotein component (U5
snRNP-specific protein, 116 kDa) (U5-116 kDa).//0//492aa//100%//Q15029
THYMU3001472
THYMU3001991//ART-4 protein [Homo sapiens]//2.00E−46//88aa//97%//
NM_014062
THYMU3002452
THYMU3002661
THYMU3003212//Saccharomyces cerevisiae TAD2 gene for tRNA-specific
adenosine-34 deaminase subunit Tad2p.//1.10E−21//135aa//40%//AJ242667
THYMU3003309//putative tumor antigen [Homo sapiens]//2.00E−52//105aa//
66%//NM_018666
THYMU3003763
THYMU3004157//peroxisomal acyl-CoA thioesterase [Homo sapiens]//3.00E−44//
85aa//82%//NM_005469
THYMU3004835//Probable beta-1,3-galactosyltransferase 8 (EC 2.4.1.—) (Beta-
1,3-GalTase 8) (Beta3Gal-T8) (b3Gal-T8) (UDP-galactose:beta-N-
acetylglucosamine beta-1,3-galactosyltransferase 8) (UDP-Gal:beta-GlcNAc
beta-1,3-galactosyltransferase 8) (Beta-3-Gx-T8).//2.00E−78//146aa//43%//
Q9Y2A9
THYMU3004866//TPA inducible gene-1; TPA inducible protein [Homo sapiens]//
3.00E−47//93aa//86%//NM_015889
THYMU3005696
THYMU3006118//molybdenum cofactor synthesis 2 [Homo sapiens]//3.00E−60//
112aa//100%//NM_004531
THYMU3006132
THYMU3006168
THYMU3006172//membrane bound C2 domain containing protein [Rattus
norvegicus]//1.00E−145//460aa//52%//NP_058945
THYMU3006371
THYMU3006485
THYMU3006811//ATP-binding cassette, sub-family A, member 7, isoform a//
3.00E−11//82aa//41%//NP_061985
THYMU3006963
THYMU3007137//Interleukin-16 precursor (IL-16) (Lymphocyte chemoattractant
factor) (LCF).//0//528aa//83%//Q14005
THYMU3007368
THYMU3007845
THYMU3008171
THYMU3008436//6-phosphofructokinase, muscle type (EC 2.7.1.11)
(Phosphofructokinase 1) (Phosphohexokinase) (Phosphofructo-1-kinase isozyme
A) (PFK-A).//0//764aa//98%//P08237
THYMU3009255
TKIDN2000701//ankyrin G//1.6E−90//178aa//100%//AAA64834
TKIDN2002424
TKIDN2002632
TKIDN2003044
TKIDN2004386
TKIDN2005934
TKIDN2005947
TKIDN2006525
TKIDN2006852//Homo sapiens cytosolic phospholipase A2 gamma (cPLA2 gamma)
mRNA, complete cds.//4.3E−103//192aa//100%//AF065214
TKIDN2007667
TKIDN2009092
TKIDN2009641
TKIDN2009889
TKIDN2010934
TKIDN2012824
TKIDN2013287
TKIDN2014757
TKIDN2014771
TKIDN2015263
TKIDN2015788
TKIDN2016309
TKIDN2019116
TLIVE2000023
TLIVE2001327//Human DOCK180 protein mRNA, complete cds.//0//961aa//63%//
D50857
TLIVE2001828
TLIVE2001927
TLIVE2002336//ectonucleotide pyrophosphatase/phosphodiesterase 5 [Mus
musculus]//7.00E−69//144aa//36%//NM_032003
TLIVE2002338
TLIVE2002690
TLIVE2003197
TLIVE2003225//CUB and Sushi multiple domains 1 [Homo sapiens]//1.00E−129//
199aa//58%//NM_033225
TLIVE2003381//taste receptor, type 1, member 3; saccharin preference [Mus
musculus]//8.00E−65//112aa//79%//NM_031872
TLIVE2003970
TLIVE2004110
TLIVE2004320//Homo sapiens PC2-glutamine-rich-associated protein (PCQAP)
mRNA, complete cds.//4.7E−201//368aa//99%//AF328769
TLIVE2004601
TLIVE2005180
TLIVE2006236
TLIVE2006529
TLIVE2007132
TLIVE2007528
TLIVE2007816
TLIVE2008083
TLIVE2008229//SIGNAL RECOGNITION PARTICLE 68 KDA PROTEIN (SRP68).//1.00E−299
//506aa//96%//Q00004
TLIVE2009541
TOVAR2000649
TOVAR2001281
TOVAR2001730
TOVAR2002247//Homo sapiens partial partial mRNA for NICE-4 protein, clone
3114f17.//1.0E−117//218aa//100%//AJ243670
TOVAR2002549
TRACH1000205
TRACH2001443
TRACH2001549//Homo sapiens mRNA for neuropathy target esterase.//1.10E−94//
295aa//65%//AJ004832
TRACH2001684
TRACH2003070
TRACH2004170
TRACH2005066
TRACH2005811
TRACH2006049
TRACH2006387//P2Y PURINOCEPTOR 1 (ATP RECEPTOR) (P2Y1) (PURINERGIC
RECEPTOR).//2E−56//307aa//36%//P49650
TRACH2007059//Folate hydrolase (Prostate-specific membrane antigen 1).//
2.00E−37//127aa//26%//Q04609
TRACH2007834
TRACH2008300
TRACH2009310//PUTATIVE SERINE/THREONINE-PROTEIN KINASE D1044.3 IN CHROMOSOME
III (EC 2.7.1.—).//9.40E−85//407aa//38%//P41951
TRACH2019248
TRACH2019473
TRACH2020525
TRACH2021398
TRACH2021964
TRACH2022042
TRACH2022425//Ig alpha-1 chain C region.//0//319aa//91%//P01876
TRACH2022553//Human germline IgD-chain gene, C-region, second domain of
membrane terminus.//1.70E−234//429aa//99%//K02882
TRACH2022649//Ig gamma-1 chain C region.//0//315aa//95%//P01857
TRACH2023299//growth factor receptor bound protein 2-associated protein 2
[Mus musculus]//5.00E−40//77aa//58%//NM_010248
TRACH2023306
TRACH2025344
TRACH2025507//tumor suppressing subtransferable candidate 1; tumor-
supressing STF cDNA 1 [Homo sapiens]//4.00E−48//87aa//74%//NM_003310
TRACH2025535//evectin-2 [Mus musculus]//2.00E−75//230aa//90%//AAF01332
TRACH2025749
TRACH2025911
TRACH2025932
TRACH3000014
TRACH3000342
TRACH3000558//CREB-BINDING PROTEIN.//1.9E−90//120aa//100%//Q92793
TRACH3000586
TRACH3000926//cardiac morphogenesis [Mus musculus]//0//417aa//63%//
NM_011724
TRACH3001427//p47 [Homo sapiens]//2.00E−85//167aa//49%//NM_016143
TRACH3002064
TRACH3002168//Cell surface glycoprotein MUC18 precursor (Melanoma-associated
antigen MUC18) (Melanoma-associated antigen A32) (S-endo 1 endothelial-
associated antigen) (CD146 antigen) (Melanoma adhesion molecule).//0//
341aa//94%//P43121
TRACH3002192
TRACH3002650
TRACH3002866
TRACH3002871
TRACH3003379
TRACH3004068
TRACH3004537
TRACH3004721//80 kda MCM3-associated protein (GANP protein).//0//474aa//
77%//060318
TRACH3004786//Claudin-4 (Clostridium perfringens enterotoxin receptor) (CPE-
receptor) (CPE-R).//2.00E−90//162aa//77%//014493
TRACH3004840
TRACH3005294
TRACH3005479
TRACH3005549//Ig heavy chain V region IR2 precursor.//4.00E−47//89aa//
61%//P01805
TRACH3006038
TRACH3006149
TRACH3006228
TRACH3006412//Homo sapiens COP9 constitutive photomorphogenic homolog
subunit 7B//3.00E−57//105aa//99%//NM_022730
TRACH3006470
TRACH3006889
TRACH3007391
TRACH3007479//Nedd-4-like ubiquitin-protein ligase; WW domain-containing
protein 2 [Homo sapiens]//0//320aa//93%//NM_007014
TRACH3008093
TRACH3008535
TRACH3008629//Cadherin-related tumor suppressor homolog precursor (Fat
protein homolog).//6.00E−36//143aa//28%//Q14517
TRACH3008713//Beta-soluble NSF attachment protein (SNAP-beta) (N-
ethylmaleimide-sensitive factor attachment protein, beta) (Brain protein
I47) (Fragment).//4.00E−52//98aa//92%//P28663
TRACH3009455//Phosphatidylinositol 3-kinase regulatory alpha subunit (PI3-
kinase P85-alpha subunit) (PtdIns-3-kinase P85-alpha) (PI3K).//0//386aa//
95%//P27986
TRACH3034731//Ras association (RaIGDS/AF-6) domain family 2//7.00E−56//
320aa//40%//NP_055552
TRACH3034762
TRACH3035199//antigen identified by monoclonal antibody MRC OX-2 receptor
[Rattus norvegicus]//1.00E−86//170aa//51%//NM_023953
TRACH3035235
TRACH3035482
TRACH3035526//Ig alpha-2 chain C region.//0//324aa//95%//P01877
TRACH3036193//Genome polyprotein [Contains: Coat proteins VP1 TO VP4; Core
proteins P2A TO P2C, P3A; Genome-linked protein VPG; Picornain 3C (EC
3.4.22.28) (Protease 3C) (P3C); RNA-directed RNA polymerase P3D (EC
2.7.7.48)].//0//1073aa//69%//Q82122
TRACH3036207
TRACH3036309
TRACH3036456
TRACH3036609//J kappa-recombination signal binding protein (RBP-J kappa).//
1.00E−158//271aa//89%//P31266
TSTOM1000135
TSTOM2000442//Ig gamma-1 chain C region.//1.00E−168//292aa//77%//P01857
TSTOM2000553//SYNAPTOTAGMIN IV.//3.00E−08//150aa//28%//P40749
TSTOM2002672
TUTER1000122
TUTER2000425//zinc finger protein SBZF3 [Homo sapiens]//4.00E−36//74aa//
81%//NM_020394
TUTER2000904//Unc-119 protein homolog (Retinal protein 4) (RRG4).//7.00E−72
//129aa//70%//Q62885
TUTER2000916
TUTER2001387
TUTER2002729//D6MM5E protein [Mus musculus]//1.00E−107//191aa//68%//
NM_033079
UTERU1000024
UTERU1000031//G. gallus mRNA for tom-1B protein.//2.1E−149//535aa//59%//
Y08741
UTERU1000148
UTERU1000249
UTERU1000337//Putative protein phosphatase 2C (EC 3.1.3.16) (PP2C).//1.00E−156
//271aa//94%//P49593
UTERU1000339
UTERU2000649
UTERU2001409
UTERU2002410
UTERU2002841
UTERU2004688
UTERU2004929
UTERU2005004
UTERU2005621//CDC14 homolog B, isoform 2 [Homo sapiens]//0//423aa//94%//
NM_033331
UTERU2006115//ALPHA-ADAPTIN A (CLATHRIN ASSEMBLY PROTEIN COMPLEX 2 ALPHA-A
LARGE CHAIN) (100 KDA COATED VESICLE PROTEIN A) (PLASMA MEMBRANE ADAPTOR
HA2/AP2 ADAPTIN ALPHA A SUBUNIT).//9.0E−141//268aa//99%//P17426
UTERU2006137
UTERU2006568
UTERU2007444
UTERU2007520
UTERU2007724//Calponin H2, smooth muscle (Neutral calponin).//1.00E−144//
253aa//86%//Q99439
UTERU2008347//Chlamydomonas reinhardtii vegetative cell wall protein gp1
(GP1) gene, complete cds.//1.0E−19//199aa//30%//AF309494
UTERU2014678
UTERU2017762//plexin B1; KIAA0407 protein; plexin 5 [Homo sapiens]//0//
383aa//60%//NM_002673
UTERU2019491//Homo sapiens mRNA for 41-kDa phosphoribosylpyrophosphate
synthetase-associated protein, complete cds.//4.30E−48//101aa//100%//
AB007851
UTERU2019681
UTERU2019706//T-COMPLEX PROTEIN 1, GAMMA SUBUNIT (TCP-1-GAMMA) (CCT-
GAMMA).//9.80E−273//426aa//99%//P49368
UTERU2019940//mitochondrial ribosomal protein L30 [Homo sapiens]//2.00E−44
//82aa//97%//NM_016503
UTERU2020491
UTERU2020718
UTERU2021163
UTERU2021380
UTERU2022020
UTERU2022981
UTERU2023039
UTERU2023175
UTERU2023651
UTERU2023712
UTERU2024002
UTERU2024656
UTERU2025025//High affinity nerve growth factor receptor precursor (EC
2.7.1.112) (TRK1 transforming tyrosine kinase protein) (p140-TrkA) (Trk-A).//
0//479aa//95%//P04629
UTERU2025645
UTERU2025891
UTERU2026025//SPLICING FACTOR, ARGININE/SERINE-RICH 2 (SPLICING FACTOR SC35)
(SC-35) (SPLICING COMPONENT, 35 KDA) (PR264 PROTEIN).//8.00E−30//61aa//
100%//P30352
UTERU2026090//Cartilage-associated protein precursor.//1.00E−180//309aa//
87%//O75718
UTERU2026203//phosphoinositide phosphatase SAC1 [Rattus norvegicus].//
1.00E−107//221aa//95%//AAG29810
UTERU2027591//calcium-activated potassium channel//7.8E−33//79aa//94%//
AAA50216
UTERU2029953
UTERU2030213
UTERU2030280
UTERU2031084
UTERU2031268//NY-REN-25 antigen [Homo sapiens].//1.00E−41//330aa//49%//
AAD42869
UTERU2031521
UTERU2031703
UTERU2031851
UTERU2033375
UTERU2033382
UTERU2035114
UTERU2035323
UTERU2035328//Homo sapiens putative transcription factor CA150 mRNA,
complete cds.//1.80E−271//796aa//70%//AF017789
UTERU2035331
UTERU2035452//NG3 [Homo sapiens]//1.00E−136//150aa//99%//AAB47494
UTERU2035469//Mus musculus microfibril-associated glycoprotein-2 (Magp2)
mRNA, complete cds.//1.2E−52//164aa//66%//AF180805
UTERU2035503
UTERU2035745//MYOSIN IA HEAVY CHAIN (MYOSIN-LIKE PROTEIN ABMA).//1.30E−11//
101aa//31%//P22467
UTERU2036089//SH3-BINDING PROTEIN 3BP-1.//4.1E−168//369aa//86%//P55194
UTERU2037361
UTERU2037577
UTERU2038251
UTERU3000226
UTERU3000645//Claudin-4 (Clostridium perfringens enterotoxin receptor) (CPE-
receptor) (CPE-R).//3.00E−89//161aa//77%//O14493
UTERU3000665//Snf2-related CBP activator protein [Homo sapiens].//7.00E−59
//500aa//97%//NP_006653
UTERU3000828//116 kDa U5 small nuclear ribonucleoprotein component (U5
snRNP-specific protein, 116 kDa) (U5-116 kDa).//0//931aa//95%//Q15029
UTERU3000899//hTGN51 [Homo sapiens].//1.00E−101//281aa//72%//AAC39542
UTERU3001059//ABC1 protein homolog, mitochondrial precursor.//2.00E−99//
188aa//48%//Q92338
UTERU3001240//Adenylate cyclase, type IV (EC 4.6.1.1) (ATP pyrophosphate-
lyase) (Adenylyl cyclase).//1.00E−176//308aa//81%//P26770
UTERU3001542
UTERU3001571
UTERU3001572//Neuroblast differentiation associated protein AHNAK
(Desmoyokin) (Fragments).//6.00E−19//213aa//21%//Q09666
UTERU3001585//Cytochrome P450 4c3 (EC 1.14.—.—) (CYPIVC3).//1.00E−125//
230aa//49%//Q9VA27
UTERU3001652//64 KDA AUTOANTIGEN D1 (THYROID-ASSOCIATED OPHTHALMOPATHY
AUTOANTIGEN).//1.00E−219//416aa//99%//P29536
UTERU3001766
UTERU3001988//COATOMER EPSILON SUBUNIT (EPSILON-COAT PROTEIN) (EPSILON-
COP).//1.70E−126//159aa//94%//Q28104
UTERU3002209
UTERU3002218
UTERU3002383
UTERU3002667
UTERU3002731
UTERU3002768
UTERU3002786
UTERU3002993
UTERU3003116//ADAM 12 precursor (EC 3.4.24.—) (A disintegrin and
metalloproteinase domain 12) (Meltrin alpha).//1.00E−20//48aa//44%//
O43184
UTERU3003135//Splicing factor 3B subunit 2 (Spliceosome associated protein
145) (SAP 145) (SF3b150) (Pre-mRNA splicing factor SF3b 145 kDa subunit).//
6.00E−29//62aa//83%//Q13435
UTERU3003178//Kinesin light chain 2 (KLC 2).//0//312aa//88%//Q9H0B6
UTERU3003465
UTERU3003523
UTERU3003776
UTERU3004523
UTERU3004616
UTERU3004709
UTERU3004992//Aortic preferentially expressed protein 1 (APEG-1).//3.00E−61
//113aa//100%//Q15772
UTERU3005049
UTERU3005205
UTERU3005230
UTERU3005460
UTERU3005585//rhophilin-like protein [Homo sapiens]//0//380aa//91%//
NM_033103
UTERU3005907//PROTEIN-GLUTAMINE GAMMA-GLUTAMYLTRANSFERASE (EC 2.3.2.13)
(TISSUE TRANSGLUTAMINASE) (TGASE C) (TGC) (TGASE-H).//1.30E−75//152aa//
98%//P21980
UTERU3005970
UTERU3006008
UTERU3006308//SEMAPHORIN 4C PRECURSOR (SEMAPHORIN I)//1.00E−128//330aa//
86%//Q64151
UTERU3007134
UTERU3007419//Rattus norvegicus Ca2+-dependent activator protein (CAPS) mRNA,
complete cds.//0//1223aa//78%//U16802
UTERU3007640//N-ethylmaleimide-sensitive factor attachment protein, alpha;//
5.00E−54//110aa//87%//NP_003818
UTERU3007913
UTERU3008660
UTERU3008671//SPARC precursor (Secreted protein acidic and rich in cysteine)
(Osteonectin) (ON) (Basement membrane protein BM-40).//4.00E−25//49aa//
96%//P09486
UTERU3009259
UTERU3009490//LYSP100 protein (Lymphoid-restricted homolog of Sp100)
(Nuclear autoantigen Sp-140) (Speckled 140 kDa) (Nuclear body protein
Sp140).//4.00E−33//67aa//61%//Q13342
UTERU3009517
UTERU3009690//alpha-1A-adrenergic receptor, isoform 2; adrenergic, alpha-
1A-, receptor; adrenergic, alpha-1C-, receptor; alpha 1A-adrenoceptor [Homo
sapiens]//5.00E−16//41aa//67%//NM_033303
UTERU3009871//feminization 1 homolog a (C. elegans)//0//588aa//85%//
NP_034322
UTERU3009979//growth arrest-specific 6; AXL stimulatory factor [Homo
sapiens]//0//572aa//97%//NM_000820
UTERU3011063//Transmembrane 9 superfamily protein member 4.//0//402aa//
89%//Q92544
UTERU3015086
UTERU3015500//G protein-coupled receptor 49//1.00E−15//350aa//29%//
NP_003658
UTERU3016789//SH3 domain-binding protein 3BP-2.//1.00E−146//261aa//75%//
P78314
UTERU3018081
UTERU3018154
UTERU3018616
UTERU3018711
3NB692004724
ADRGL2000042//Homo sapiens CTCL tumor antigen se20-4 mRNA, complete cds.//
6.20E−143//269aa//100%//AF273046
ADRGL2000056
BLADE2000579
BLADE2006830
BRACE2002589
BRACE2003609//endothelial zinc finger protein induced by tumor necrosis
factor alpha [Homo sapiens]//0//310aa//67%//NM_021216
BRACE2009318
BRACE2011677
BRACE2029396
BRACE2037299
BRACE2039823//CDP-DIACYLGLYCEROL-INOSITOL 3-PHOSPHATIDYLTRANSFERASE (EC
2.7.8.11) (PHOSPHATIDYLINOSITOL SYNTHASE) (PTDINS SYNTHASE) (PI SYNTHASE).//
2.10E−79//154aa//100%//O14735
BRACE2039832
BRACE2043105
BRACE3001058//zinc finger protein 347; zinc finger 1111 [Homo sapiens]//0//
382aa//52%//NM_032584
BRACE3001113//Zinc finger protein 91 (Zinc finger protein HTF10) (HPF7).//
6.00E−92//226aa//26%//Q05481
BRACE3003026
BRACE3003053
BRACE3005107// // // // //
BRACE3009127//oxysterol binding protein 2; oxysterol binding protein-like 1
[Homo sapiens]//0//670aa//95%//NM_030758
BRACE3010076//Vigilin (High density lipoprotein-binding protein) (HDL-
binding protein).//0//464aa//92%//Q00341
BRACE3015829
BRACE3021148//DC12 protein [Homo sapiens]//1.00E−16//60aa//30%//
NM_020187
BRALZ2017844//HOMEOBOX PROTEIN CHOX-E (CHOX E) (FRAGMENT).//2.80E−59//
157aa//75%//Q91975
BRAMY2019111//POLYCYSTIN 2.//6.30E−18//204aa//27%//O35245
BRAMY2035070//Homo sapiens zinc finger 1111 mRNA, complete cds.//1.70E−213
//723aa//53%//AY029765
BRAMY2035449//Mus musculus zinc finger protein ZFP113 mRNA, complete cds.//
2.70E−95//356aa//44%//AF167320
BRAMY2035718//NUCLEAR FACTOR 1-B (NFI-B) (CCAAT BOX-BINDING TRANSCRIPTION
FACTOR) (CTF) (TGGCA-BINDING PROTEIN).//5.60E−228//418aa//97%//P97863
BRAMY2038516//PROBABLE PROTEIN DISULFIDE ISOMERASE P5 PRECURSOR (EC
5.3.4.1).//7.00E−237//434aa//99%//Q15084
BRAMY2039341//ZINC FINGER PROTEIN 135.//7.30E−84//227aa//62%//P52742
BRAMY2040159//Homo sapiens MRIP-1 mRNA, complete cds.//6.00E−234//345aa//
91%//AF359283
BRAMY2041434
BRAMY2045471//Homo sapiens CGI-89 protein mRNA, complete cds.//6.00E−45//
147aa//44%//CAB82308
BRAMY3004800//Huntingtin-associated protein-interacting protein (Duo
protein).//0//751aa//91%//O60229
BRAWH1000369//Homo sapiens putative DNA polymerase mRNA, partial cds.//
5.40E−150//199aa//97%//AF044578
BRAWH2006207//ZINC FINGER PROTEIN 91 (ZINC FINGER PROTEIN HTF10) (HPF7).//
8.90E−32//83aa//81%//Q05481
BRAWH2006395//transmembrane receptor UNC5H1//1.00E−141//292aa//88%//
AAB57678
BRAWH2008993
BRAWH2009393
BRAWH2010552
BRAWH3007441//CAT56 protein [Homo sapiens]//1.00E−44//78aa//84%//
NM_025263
BRAWH3009017//SEL-10 protein.//6.00E−38//73aa//61%//Q93794
BRCAN2002473//Tropomyosin, fibroblast isoform 2 (TM-2).//1.00E−114//
230aa//70%//P19354
BRCAN2002854//Human Hsp27 ERE-TATA-binding protein (HET) mRNA, complete
cds.//2.60E−21//240aa//35%//U72355
BRCAN2003070//ubiquitin carrier protein E2-C [Homo sapiens]//9.00E−51//
80aa//78%//NP_008950
BRCAN2014229
BRCOC2019841
BRHIP2002722
BRHIP2003272
BRHIP2005271//protein tyrosine phosphatase//7.00E−39//190aa//42%//
NP_006255
BRHIP2005724//Homo sapiens mRNA for NDRG4-B, complete cds.//3.10E−182//
301aa//98%//AB044944
BRHIP2006617//NUCLEAR AUTOANTIGENIC SPERM PROTEIN (NASP).//1.20E−156//
313aa//97%//P49321
BRHIP2008389//Drosophila melanogaster furry protein short isoform mRNA,
partial cds.//1.70E−29//179aa//44%//AF351187
BRHIP2012360//XPG_XENLA//4.00E−17//70aa//41%//P14629
BRHIP2017553//Zinc finger protein 184.//1.00E−164//272aa//49%//Q99676
BRHIP2026877//Tyrosine-protein kinase receptor TYRO3 precursor (EC
2.7.1.112) (Tyrosine-protein kinase RSE) (Tyrosine-protein kinase SKY)
(Tyrosine-protein kinase DTK) (Protein-tyrosine kinase byk).//3.00E−56//
104aa//80%//Q06418
BRHIP3000017
BRHIP3000240//Homo sapiens potassium channel beta 2 subunit (HKvbeta2.2)
mRNA, alternatively spliced, complete cds.//1.70E−172//347aa//95%//
AF044253
BRHIP3008314//sirtuin 2, isoform 2; silencing information regulator 2-like;
sir2-like 2; silent mating type information regulation 2, S. cerevisiae,
homolog 2; sir2-related protein type 2 [Homo sapiens]//2.00E−48//86aa//
98%//NM_030593
BRHIP3026052//Serine/threonine protein phosphatase 2A, 56 kDa regulatory
subunit, gamma isoform (PP2A, B subunit, B′ gamma isoform) (PP2A, B subunit,
B56 gamma isoform) (PP2A, B subunit, PR61 gamma isoform) (PP2A, B subunit, R5
gamma isoform).//0//424aa//83%//Q13362
BRSTN2013354//ETS-related protein PE-1 (ETS translocation variant 3)
(Fragment).//4.00E−61//109aa//84%//P41162
BRTHA2002133
BRTHA2002702
BRTHA2007060//EUKARYOTIC TRANSLATION INITIATION FACTOR 3 SUBUNIT 10 (EIF-3
THETA) (EUKARYOTIC TRANSLATION INITIATION FACTOR 3 LARGE SUBUNIT) (PNLA-
35).//0//963aa//74%//Q40554
BRTHA2010033
BRTHA2011321
BRTHA2013426
BRTHA2013610//deoxyguanosine kinase, putative [Arabidopsis thaliana]//
1.00E−142//360aa//78%//NP_565032*
BRTHA2016318//WTAP protein//9.00E−87//240aa//100%//CAC10188
BRTHA2017364//PUTATIVE ATP-DEPENDENT RNA HELICASE T26G10.1 IN CHROMOSOME
III.//1.10E−33//207aa//34%//P34580
BRTHA2017972//Homo sapiens MAD-related gene SMAD7 (SMAD7) mRNA, complete
cds.//5.30E−114//207aa//99%//AF010193
BRTHA2018011//EPITHIN (EC 3.4.21.—).//1.70E−53//242aa//45%//P56677
BRTHA2018443//POTENTIAL PHOSPHOLIPID-TRANSPORTING ATPASE IS (EC 3.6.1.—)
(FRAGMENT).//3.10E−195//581aa//61%//P98196
BRTHA3000296
BRTHA3003000//apoptosis-associated tyrosine kinase [Homo sapiens]//1.00E−161
//300aa//64%//NM_004920
BRTHA3008826
CERVX2002013//TRANSCRIPTION FACTOR BTEB2 (BASIC TRANSCRIPTION ELEMENT
BINDING PROTEIN 2) (GC BOX BINDING PROTEIN 2).//3.30E−33//81aa//81%//
Q13887
CTONG1000113//ZINC FINGER PROTEIN 184 (FRAGMENT).//0//641aa//85%//Q99676
CTONG2003348//Mus musculus mRNA for OASIS protein, complete cds.//9.60E−87
//392aa//51%//AB017614
CTONG2004000
CTONG2008721//Homo sapiens CAGH44 mRNA, partial cds.//2.70E−94//215aa//
91%//U80741
CTONG2015596
CTONG2015633
CTONG2016942//Homo sapiens serine protease DESC1 (DESC1) mRNA, complete
cds.//2.00E−95//425aa//43%//AF064819
CTONG2019822
CTONG2020374
CTONG2020378//ZINC FINGER PROTEIN 35 (ZFP-35).//5.70E−100//322aa//55%//
P15620
CTONG2020411//BASONUCLIN.//1.30E−139//616aa//48%//Q01954
CTONG2020974//Homo sapiens mRNA for putative progesterone binding protein.//
8.10E−118//223aa//100%//AJ002030
CTONG2024031
CTONG2028758//Mus musculus zfh-4 mRNA for zinc-finger homeodomain protein 4,
complete cds.//0//907aa//91%//AB024499
CTONG3001501//Mus musculus glucocorticoid-induced gene 1 mRNA, complete
cds.//3.60E−202//413aa//89%//AF292939
CTONG3002552
CTONG3003598
CTONG3004550//SH3-domain binding protein 4 [Homo sapiens]//1.00E−179//
351aa//42%//NM_014521
CTONG3004726//ZINC FINGER PROTEIN 91 (ZINC FINGER PROTEIN HTF10) (HPF7).//
4.20E−230//663aa//55%//Q05481
CTONG3009287
DFNES2011192//Homo sapiens ZNF140-like transcription factor mRNA, complete
cds.//1.10E−221//396aa//99%//AF326206
FCBBF1000509//Homo sapiens mRNA for photolyase, complete cds.//9.80E−280//
500aa//99%//D83702
FCBBF3010361//Danio rerio mRNA for winged helix nude (whn gene).//2.10E−107
//336aa//64%//AJ252024
FCBBF3027854//contains similarity to Arabidopsis thaliana DNA-damage-
repair/tolerance resistance protein DRT111 (SW: P42698//9.60E−12//87aa//
37%//AAC13593
FEBRA2000790
FEBRA2001990//SON OF SEVENLESS PROTEIN HOMOLOG 2 (SOS-2) (MSOS-2)
(FRAGMENT).//4.00E−09//175aa//20%//Q02384
FEBRA2006519//Mus musculus papilin mRNA, complete cds.//4.90E−58//327aa//
37%//AF314171
FEBRA2008692//Homo sapiens IRE1b mRNA for protein kinase/ribonuclease IRE1
beta, complete cds.//0//926aa//96%//AB047079
FEBRA2014122//wizL [Mus musculus]//0//661aa//88%//BAA32790
FEBRA2027609//ZINC FINGER PROTEIN 91 (ZINC FINGER PROTEIN HTF10) (HPF7).//
5.60E−196//688aa//51%//Q05481
FEBRA2028256//FIBRILLIN 2 PRECURSOR.//2.90E−231//527aa//62%//Q61555
FEBRA2028516
HCASM2002754
HCASM2003018//Homo sapiens nuclear transcription factor NFX2 (NFX2) mRNA,
complete cds.//3.90E−70//666aa//31%//AF332009
HCASM2003099//HISTONE DEACETYLASE CLR3.//5.00E−19//108aa//49%//P56523
HCASM2003357
HCASM2008536//DNA-REPAIR PROTEIN XRCC1.//2.00E−12//119aa//36%//P18887
HCASM2009424//regulatory factor (trans-acting) 2 [Mus musculus]//7.00E−24//
60aa//48%//NP_033082
HCHON2000508//Homo sapiens prostate antigen PARIS-1 mRNA, complete cds.//
0//686aa//99%//AY026527
HCHON2000743
HCHON2004858//Zinc finger protein 29 (Zfp-29).//1.00E−124//208aa//60%//
Q07230
HEART2009680//Vasoactive intestinal polypeptide receptor 2 precursor (VIP-R-
2) (Pituitary adenylate cyclase activating polypeptide type III receptor)
(PACAP type III receptor) (PACAP-R-3) (Helodermin-preferring VIP receptor).//
0//309aa//96%//P41587
HLUNG2013350//Mus musculus mRNA for synaptotagmin VIII, complete cds.//
1.70E−39//126aa//67%//AB026805
HLUNG2015418//similar to cadherin and Drosophila Fat protein; similar to
CAA60685 (PID: g1107687) [Homo sapiens].//1.00E−139//500aa//91%//AAD28068
HLUNG2015548//INOSINE-5′ - MONOPHOSPHATE DEHYDROGENASE 1 (EC 1.1.1.205) (IMP
DEHYDROGENASE 1) (IMPDH-I) (IMPD 1).//3.30E−253//521aa//94%//P20839
HLUNG2016862
HSYRA2005628//ZINC FINGER PROTEIN 195.//1.30E−237//426aa//78%//014628
IMR322001879
IMR322007078
IMR322008651//DNA REPAIR PROTEIN RAD51 HOMOLOG 1.//8.40E−154//340aa//
89%//Q06609
IMR322013396//Homo sapiens cone photoreceptor cGMP-gated channel alpha
subunit (CNGA3) mRNA, complete cds.//0//638aa//98%//AF065314
IMR322013731//TAT-BINDING HOMOLOG 7.//1.90E−74//187aa//47%//P54816
LIVER2000247//RENAL SODIUM/DICARBOXYLATE COTRANSPORTER (NA (+)/DICARBOXYLATE
COTRANSPORTER).//2.70E−57//243aa//48%//Q13183
MESAN2001770//EUKARYOTIC TRANSLATION INITIATION FACTOR 4 GAMMA (EIF-4-GAMMA)
(EIF-4G) (EIF4G) (P220).//4.70E−185//420aa//86%//Q04637
MESAN2005303//DNA BINDING PROTEIN URE-B1 (EC 6.3.2.—).//2.80E−36//171aa//
46%//P51593
MESAN2014412//Mus musculus zfh-4 mRNA for zinc-finger homeodomain protein 4,
complete cds.//2.8e−317//606aa//92%//AB024499
MESAN2015501//ZINC FINGER PROTEIN 91 (ZINC FINGER PROTEIN HTF10) (HPF7).//
7.80E−222//753aa//52%//Q05481
NT2RI2005772//Rattus norvegicus mRNA for DLG6 alpha, complete cds.//4.30E−176
//273aa//75%//AB030499
NT2RI2008952//ZINC FINGER PROTEIN 84 (ZINC FINGER PROTEIN HPF2).//1.40E−131
//393aa//55%//P51523
NT2RI2009583//Homo sapiens orphan G-protein coupled receptor (GPRC5C) mRNA,
complete cds.//3.70E−241//441aa//100%//AF207989
NT2RI2018448//AE-binding protein 2 [Mus musculus]//1.00E−153//258aa//
92%//NM_009637
NT2RI2027157//Mouse SDR2 mRNA, complete cds.//3.20E−233//539aa//77%//
D50464
NT2RI3000174//Homo sapiens HepA-related protein HARP mRNA, complete cds.//
1.00E−38//136aa//46%//NP_054859.1
NT2RI3001132//Mus musculus Arkadia (Arkadia) mRNA, complete cds.//0//
994aa//90%//AF330197
NT2RI3002557
NT2RI3005928
NT2RI3007167
NT2RI3007443//MITOGEN-ACTIVATED PROTEIN KINASE KINASE KINASE 5 (EC 2.7.1.—)
(MAPK/ERK KINASE KINASE 5) (MEK KINASE 5) (MEKK 5) (APOPTOSIS SIGNAL-
REGULATING KINASE 1) (ASK-1).//9.50E−244//606aa//66%//Q99683
NT2RP7008435//EPITHIN (EC 3.4.21.—).//6.60E−79//354aa//43%//P56677
NT2RP8000521
NTONG2008093//6PF-2-K/FRU-2, 6-P2ASE BRAIN/PLACENTA-TYPE ISOZYME [INCLUDES:
6-PHOSPHOFRUCTO-2-KINASE (EC 2.7.1.105); FRUCTOSE-2, 6-BISPHOSPHATASE (EC
3.1.3.46)].//1.60E−72//143aa//97%//Q16875
OCBBF2003327//ADAM-TS 6 precursor (EC 3.4.24.—) (A disintegrin and
metalloproteinase with thrombospondin motifs 6) (ADAMTS-6) (ADAM-TS6).//
2.00E−63//108aa//51%//Q9UKP5
OCBBF2005433//N-CHIMAERIN (NC) (N-CHIMERIN) (ALPHA CHIMERIN) (A-
CHIMAERIN).//7.70E−24//213aa//33%//P30337
OCBBF2006987
OCBBF2008144//ZINC FINGER PROTEIN 91 (ZINC FINGER PROTEIN HTF10) (HPF7).//
5.50E−244//757aa//56%//Q05481
OCBBF2009583//ZINC FINGER PROTEIN 184 (FRAGMENT).//1.20E−75//345aa//36%//
Q99676
OCBBF2011669//Zinc finger protein 91 (Zinc finger protein HTF10) (HPF7).//
1.00E−90//222aa//26%//Q05481
OCBBF2019684//ZINC FINGER PROTEIN 29 (ZFP-29).//6.90E−246//465aa//90%//
Q07230
OCBBF2020048//95 kDa retinoblastoma protein binding protein; KIAA0661 gene
product//9.90E−97//339aa//63%//XP_010492
OCBBF2024284//GUANINE NUCLEOTIDE-BINDING PROTEIN BETA SUBUNIT-LIKE PROTEIN
12.3 (P205) (RECEPTOR OF ACTIVATED PROTEIN KINASE C 1) (RACK1).//1.60E−72//
135aa//99%//P25388
OCBBF2030116
OCBBF2032274//Zinc finger protein 93 (Zinc finger protein HTF34)
(Fragment).//1.00E−145//247aa//67%//P35789
OCBBF2034637//microtubule associated testis specific serine/threonine
protein kinase [Mus musculus]//0//450aa//79%//NP_032667
OCBBF3000167//ZINC FINGER PROTEIN 83 (ZINC FINGER PROTEIN HPF1).//5.00E−156
//405aa//62%//P51522
OCBBF3002654//Triple functional domain protein (PTPRF interacting
protein).//0//510aa//93%//O75962
OCBBF3003761
OCBBF3004972
PERIC2007068//Mus musculus mRNA for 1A13 protein.//3.30E−121//385aa//
62%//X83587
PLACE7000333
PLACE7000502//Human Notch4 (hNotch4) mRNA, complete cds.//0//666aa//99%//
U95299
PROST2000452//TRANSMEMBRANE PROTEASE, SERINE 2 (EC 3.4.21.—).//1.60E−47//
186aa//50%//O15393
PROST2009320//enigma protein; LIM domain protein [Homo sapiens]//6.00E−42//
77aa//71%//NM_005451
PROST2019487
PUAEN2006335
SKMUS2003194
SPLEN2004611//Homo sapiens transcription factor 7-like 2 (T-cell specific,
HMG-box) (TCF7L2),//1.00E−19//50aa//47%//NM_030756
SPLEN2016135//Zinc finger protein 2 (Zfp-2) (mKR2 protein).//6.00E−27//
64aa//39%//P08043
SPLEN2016781//zinc finger transcription factor REST protein//5.00E−18//
80aa//33%//AAB94893
SPLEN2016932
SPLEN2030847//Mus musculus Kif21b (Kif21b) mRNA, complete cds.//1.00E−85//
110aa//94%//AF202893
SPLEN2033490
SPLEN2036702//TENSIN.//8.30E−175//409aa//54%//Q04205
SPLEN2037319
SPLEN2039311//Pro-Pol-dUTPasepolyprotein.*//2.70E−15//93aa//53%//O02711*
SPLEN2039379//Homo sapiens phosphatidylinositol 4-kinase 230 (pi4K230) mRNA,
complete cds.//0//645aa//99%//AF012872
STOMA2003158//DEOXYRIBONUCLEASE GAMMA PRECURSOR (EC 3.1.21.—) (DNASE GAMMA)
(DEOXYRIBONUCLEASE I-LIKE 3) (DNASE I HOMOLOGOUS PROTEIN DHP2) (LIVER AND
SPLEEN DNASE) (LS-DNASE) (LSD).//5.40E−143//267aa//99%//Q13609
STOMA2004893
SYNOV1000256//Human preferentially expressed antigen of melanoma (PRAME)
mRNA, complete cds.//2.80E−29//275aa//35%//U65011
SYNOV2001660
SYNOV2006620
SYNOV2013637//Homo sapiens putative renal organic anion transporter 1
(hROAT1) mRNA, complete cds.//2.40E−54//213aa//53%//AF057039
SYNOV2021953//hematopoietic zinc finger [Mus musculus]//1.00E−63//300aa//
51%//NP_038894
SYNOV4002744//Zinc finger protein 84 (Zinc finger protein HPF2).//2.00E−26
//75aa//30%//P51523
SYNOV4003981//megakaryocyte stimulating factor [Homo sapiens]//0//400aa//
74%//NM_005807
SYNOV4005739
SYNOV4005889
TBAES2000932//sirtuin 7; sirtuin type 7; silent mating type information
regulation 2, S. cerevisiae, homolog 7; sir2-related protein type 7 [Homo
sapiens]//1.00E−69//120aa//93%//NM_016538
TESOP2000390//Mitogen-activated protein kinase kinase kinase 14 (EC
2.7.1.37) (NF-kappa beta-inducing kinase) (Serine/threonine protein kinase
NIK) (HsNIK).//0//354aa//81%//Q99558
TESOP2001796//RING finger protein 19 (Dorfin) (Double ring-finger protein)
(p38 protein).//0//320aa//69%//Q9NV58
TESOP2005199//ZINC FINGER PROTEIN 7 (ZINC FINGER PROTEIN KOX4) (ZINC FINGER
PROTEIN HF.16).//8.40E−104//317aa//49%//P17097
TESOP2006398//zinc finger-like; similar to P52742 (PID: g1731411) [Homo
sapiens].//4.00E−22//100aa//97%//AAC36300
TESOP2006865//ZINC FINGER PROTEIN MFG-3.//5.30E−29//116aa//55%//P16374
TESOP2007384//Mus musculus putative purine nucleotide binding protein mRNA,
complete cds.//1.00E−78//288aa//55%//U44731
TESTI1000266
TESTI2008901
TESTI2015626//Human mRNA for phosphoribosypyrophosphate synthetase-
associated protein 39, complete cds.//1.00E−181//356aa//99%//D61391
TESTI2025924//CASEIN KINASE I, EPSILON ISOFORM (EC 2.7.1.—) (CKI-EPSILON).//
1.80E−42//265aa//36%//P49674
TESTI2026647//PROBABLE ATP-DEPENDENT RNA HELICASE DDX10 (DEAH BOX PROTEIN
10).//6.40E−48//226aa//45%//Q13206
TESTI2029252//Homo sapiens mRNA for LAK-4p, complete cds.//2.40E−79//
410aa//38%//AB002405
TESTI2032643//ADENYLATE CYCLASE, TYPE IV (EC 4.6.1.1) (ATP PYROPHOSPHATE-
LYASE) (ADENYLYL CYCLASE).//1.00E−176//155aa//75%//P26770
TESTI2034251//ZINC FINGER PROTEIN 91 (ZINC FINGER PROTEIN HTF10) (HPF7).//
3.10E−186//546aa//57%//Q05481
TESTI2035981
TESTI2036288//PROSTAGLANDIN-F SYNTHASE 1 (EC 1.1.1.188) (PGF SYNTHASE 1)
(PGF 1) (PROSTAGLANDIN-D2 11 REDUCTASE 1) (PGFSI).//1.10E−41//120aa//69%//
P05980
TESTI2037830
TESTI2039060//MALTASE-GLUCOAMYLASE, INTESTINAL [INCLUDES: MALTASE (EC
3.2.1.20) (ALPHA-GLUCOSIDASE); GLUCOAMYLASE (EC 3.2.1.3) (GLUCAN 1,4-ALPHA-
GLUCOSIDASE)].//8.60E−287//641aa//77%//O43451
TESTI2049956//Vegetatible incompatibility protein HET-E-1.//5.00E−43//
107aa//34%//Q00808
TESTI2050780//organic anion transporter OATP-E [Homo sapiens]//4.00E−28//
71aa//34%//NM_016354
TESTI4000137
TESTI4000155
TESTI4000183//ZINC FINGER PROTEIN 177.//4.60E−66//299aa//43%//Q13360
TESTI4000214//similar to human transcription factor TFIIS (S34159)//7.00E−40
//400aa//32%//BAA13438
TESTI4000319//GUANINE NUCLEOTIDE DISSOCIATION STIMULATOR RALGDS FORM B
(RALGEF).//4.70E−50//256aa//48%//Q03386
TESTI4001984
TESTI4005317//Homo sapiens rab6 GTPase activating protein (GAP and
centrosome-associated) (GAPCENA), mRNA//0//536aa//95%//NM_012197
TESTI4006473//ATP-dependent RNA helicase A (Nuclear DNA helicase II) (NDH
II) (DEAD-box protein 9).//5.00E−72//208aa//33%//Q28141
TESTI4008058
TESTI4008302//zinc finger protein [Homo sapiens]//0//382aa//89%//
NM_014347
TESTI4010382//cytoplasmic dynein heavy chain 2 [Rattus norvegicus]//0//
1171aa//90%//NM_023024
TESTI4011070//Glucoamylase S1/S2 precursor (EC 3.2.1.3) (Glucan 1,4-alpha-
glucosidase) (1,4-alpha-D-glucan glucohydrolase).//5.00E−18//148aa//20%//
P08640
TESTI4011072//tudor domain containing 1 [Mus musculus]//1.00E−38//201aa//
22%//NM_031387
TESTI4011829
TESTI4013365//S-antigen protein precursor.//6.00E−07//109aa//20%//Q03400
TESTI4013602
TESTI4013894//mitsugumin 29 [Mus musculus]//1.00E−117//200aa//92%//
NM_008596
TESTI4014801//novel protein similar to archaeal, yeast and worm N2,N2-
dimethylguanosine tRNA methyltransferase [Homo sapiens]//0//312aa//89%//
NM_030934
TESTI4015012
TESTI4015442//zinc finger homeodomain 4 [Mus musculus]//0//875aa//79%//
NM_030708
TESTI4017714//Protease II (EC 3.4.21.83) (Oligopeptidase B).//4.00E−52//
175aa//25%//Q59536
TESTI4019657//cyclin G associated kinase [Homo sapiens]//1.00E−138//
311aa//88%//NP_005246
TESTI4021482//RAC-alpha serine/threonine kinase (EC 2.7.1.—) (RAC-PK-alpha)
(Protein kinase B) (PKB) (C-AKT).//3.00E−28//58aa//98%//P31749
TESTI4024387//RAB GDP dissociation inhibitor alpha (RAB GDI alpha) (GDI-
1).//1.00E−102//179aa//98%//P50398
TESTI4025268//77 kDa echinoderm microtubule-associated protein.//1.00E−45//
119aa//31%//Q26613
TESTI4025494//Zinc finger protein 33A (Zinc finger protein KOX31)
(HA0946).//0//384aa//49%//Q06730
TESTI4025547//double-stranded RNA-binding zinc finger protein JAZ [Homo
sapiens]//1.00E−161//279aa//87%//NM_012279
TESTI4025865
TESTI4026207//Kinesin-like protein KLP1.//1.00E−83//167aa//43%//P46870
TESTI4028938//Zinc finger protein 85 (Zinc finger protein HPF4) (HTF1).//
0//373aa//66%//Q03923
TESTI4028958
TESTI4029348
TESTI4029528
TESTI4029690
TESTI4031745//Mitogen-activated protein kinase kinase kinase 5 (EC 2.7.1.—)
(MAPK/ERK kinase kinase 5) (MEK kinase 5) (MEKK 5) (Apoptosis signal-
regulating kinase 1) (ASK-1).//0//447aa//58%//Q99683
TESTI4032090
TESTI4032112//Homo sapiens general transcription factor IIIC, polypeptide 1
(alpha subunit, 220 kD) (GTF3C1), mRNA//1.00E−121//213aa//82%//NM_001520
TESTI4036767
TESTI4038721
TESTI4041086
TESTI4046240//sirtuin 7//1.00E−115//44aa//98%//NP_057622
THYMU2004139//WEE1-LIKE PROTEIN KINASE (EC 2.7.1.112).//2.80E−137//534aa//
54%//P47817
THYMU2004284//UBIQUITIN-ACTIVATING ENZYME E1 (A1S9 PROTEIN).//9.00E−63//
122aa//100%//P22314
THYMU2006001//ZINC-BINDING PROTEIN A33.//8.40E−51//476aa//27%//Q02084
THYMU2028739//ZINC FINGER PROTEIN 263 (ZINC FINGER PROTEIN FPM315).//1.10E−39
//291aa//40%//O14978
THYMU2030462
THYMU2031139//Homo sapiens zinc metalloprotease ADAMTS7 (ADAMTS7) mRNA,
complete cds.//3.30E−105//504aa//42%//AF140675
THYMU2031249//SERINE/THREONINE-PROTEIN KINASE PCTAIRE-1 (EC 2.7.1.—).//
1.20E−138//291aa//92%//Q00536
THYMU2032976
THYMU2033401
THYMU2034279
THYMU2035078//LRP16 protein [Homo sapiens]//3.00E−50//80aa//55%//
NP_054786
THYMU2035710//Tyrosine-protein kinase-like 7 [Precursor]//1.00E−50//
121aa//80%//Q13308
THYMU2040925//CDP-DIACYLGLYCEROL-INOSITOL 3-PHOSPHATIDYLTRANSFERASE (EC
2.7.8.11) (PHOSPHATIDYLINOSITOL SYNTHASE) (PTDINS SYNTHASE) (PI SYNTHASE).//
4.60E−50//118aa//86%//O14735
THYMU3000269//SUCCINATE DEHYDROGENASE [UBIQUINONE] FLAVOPROTEIN SUBUNIT,
MITOCHONDRIAL PRECURSOR (EC 1.3.5.1) (FP) (FLAVOPROTEIN SUBUNIT OF COMPLEX
II).//2.80E−130//245aa//99%//P31040
THYMU3000360
THYMU3001428
TKIDN2008778
TKIDN2012771//DPY-19 PROTEIN.//5.30E−49//314aa//35%//P34413
TKIDN2018926
TLIVE2001684//complement component 3 precursor [Homo sapiens]//5.00E−59//
110aa//32%//NP_000055
TLIVE2002046//DELTA-AMINOLEVULINIC ACID DEHYDRATASE (EC 4.2.1.24)
(PORPHOBILINOGEN SYNTHASE) (ALADH).//3.10E−156//317aa//93%//P13716
TLIVE2007607//CYTOCHROME P450 4A4 (EC 1.14.14.1) (CYPIVA4) (PROSTAGLANDIN
OMEGA-HYDROXYLASE) (P450-P-2).//6.90E−127//448aa//49%//P10611
TRACH1000212
TRACH2000862//Mus musculus putative purine nucleotide binding protein mRNA,
complete cds.//5.40E−224//619aa//68%//U44731
TRACH2007483//GASTRULA ZINC FINGER PROTEIN XLCGF7.1 (FRAGMENT).//6.30E−12//
98aa//37%//P18735
TRACH2019672//Rattus norvegicus mRNA for 45 kDa secretory protein,
partial.//5.80E−163//303aa//96%//AJ132352
TRACH2024408//ankyrin 2, isoform 2; ankyrin-2, nonerythrocytic; ankyrin-B;
ankyrin, brain; ankyrin, neuronal; ankyrin, nonerythroid [Homo sapiens]//
1.00E−06//119aa//20%//NM_020977
TRACH2024559//Homo sapiens myosin 5c (MYO5C) mRNA, complete cds.//1.70E−59
//151aa//86%//AF272390
TRACH3000134//ZINC FINGER PROTEIN 84 (ZINC FINGER PROTEIN HPF2).//2.30E−215
//733aa//53%//P51523
TRACH3000420//Homo sapiens ATP-binding cassette transporter family A member
12 (ABCA12) mRNA, complete cds.//7.00E−253//745aa//41%//AY033486
TRACH3002561//UNR protein.//2.00E−34//66aa//95%//P18395
TRACH3003683//Lactoperoxidase precursor (EC 1.11.1.7) (LPO) (Salivary
peroxidase) (SPO).//1.00E−39//77aa//86%//P22079
TRACH3003832//PHD finger protein 2 [Mus musculus]//1.00E−153//321aa//
39%//NM_011078
TRACH3007866//dipeptidyl peptidase 8; hypothetical protein FLJ20283 [Homo
sapiens]//1.00E−105//172aa//53%//NM_017743
TUTER2000057//Mus musculus AE-1 binding protein AEBP2 mRNA, complete cds.//
1.10E−26//60aa//93%//AF090326
UTERU2004299
UTERU2008040//Mus musculus mRNA for stac, complete cds.//3.30E−82//405aa//
47%//D86639
UTERU2011220
UTERU2019534//Golgi apparatus protein 1 [Homo sapiens]//5.10E−61//118aa//
100%//XP_012515
UTERU2021820//dipeptidylpeptidase VI [Homo sapiens]//8.00E−23//50aa//
89%//NP_001927
UTERU2028734//Mus musculus slp2-a mRNA for synaptotagmin-like protein 2-a
delta 2S-III, complete cds.//2.30E−216//464aa//86%//AB057762
UTERU2032279//47 KDA HEAT SHOCK PROTEIN PRECURS0R (COLLAGEN-BINDING PROTEIN
1) (COLLIGIN 1).//6.90E−95//207aa//93%//P29043
UTERU2033577//Homo sapiens mRNA for repressor protein, partial cds.//1.80E−65
//209aa//65%//D30612
UTERU2035978
UTERU3000402
UTERU3000738//Beta-adrenergic receptor kinase 1 (EC 2.7.1.126) (Beta-ARK-1)
(G-protein coupled receptor kinase 2).//5.00E−76//139aa//94%//P26817
UTERU3001053//zinc finger protein [Homo sapiens]//0//319aa//91%//
NM_018651
UTERU3014791
UTERU3015069
UTERU3015412
UTERU3017176
TESTI4038779//zinc finger protein RIN ZF [Rattus norvegicus]//3.00E−73//
190aa//36%//NM_024489

[3742] LENGTHY TABLE
The patent application contains a lengthy table section. A copy of the table is available in electronic form from the USPTO web site (http://seqdata.uspto.gov/?pageRequest=docDetail&DocID=US20070020637A1) An electronic copy of the table will also be available from the USPTO upon request and payment of the fee set forth in 37 CFR 1.19(b)(3).

The application's sequence listing, which the Patent Office published only in electronic form, follows.

SEQUENCE LISTING (4994 sequences)

SEQ ID NO: 1 - DNA, 1802 bp, Homo sapiens
aaaaaaactcactctacaatcccgtttttaatgtaagcttactacttagctacacagcgcatcagggagaaagatgatgactatagagaaagctagtgcttgttgcttgcttttttaacctcaactttgtgcttcactgtgctctgtttattctgaagcttccccaattttatatatgagtttataagaaaactttctagctaagattggtgatgatgataataatattacttaaaatttgtaaagcaattattactggagagtaaaaagaactacgtggatcttgacccttggaagacttgttaggagacattaagattaagattggtatccaattataacaagtgatggataggcagcttttcctctccctccttctttttttcctcccctcttcacatttctctccttcctttctttctttttcatcattcctctttcttcatagggctgctatttctgctctgatagcctgggtttctcacagtgctattatgcaattaaataacacataagaaactgttttaaactttaaagaaccctatggaattgttttgtgattataatgatcacttttgtgctattttgggatgacaatcaaagatgatatcatggatgaaaatacagcaattgactcatgaatatttctttctttctatccagcacatgaaactgaagtacagatagtaatggacttttcatactgtttttattaattgattgatagcagcagtaatacctttgtctccattctgtttcagggtttctgtaaacacatgcacacacacacacacacacacacaactcccaagatggcggacctactgggctccatcctgagctccatggagaagccacccagcctcggtgaccaggagactcggcgcaaggcccgagaacaggccgcccgcctgaagaaactacaagagcaagagaaacaacagaaagtggagtttcgtaaaaggatggagaaggaggtgtcagatttcattcaagacagtgggcagatcaagaaaaagtttcagccaatgaacaagatcgagaggagcatactacatgatgtggtggaagtggctggcctgacatccttctcctttggggaagatgatgactgtcgctatgtcatgatcttcaaaaaggagtttgcaccctcagatgaagagctagactcttaccgtcgtggagaggaatgggacccccagaaggctgaggagaagcggaagctgaaggagctggcccagaggcaagaggaggaggcagcccagcaggggcctgtggtggtgagccctgccagcgactacaaggacaagtacagccacctcatcggcaagggagcagccaaagacgcagcccacatgctacaggccaataagacctacggctgtgtgcccgtggccaataagagggacacacgctccattgaagaggctatgaatgagatcagagccaagaagcgtctgcggcagagtggggaagagttgccgccaacctcctaggcgccccgcccagctccctttgacccctggggcagggcagggggcagggagagacaaggctgctgctattagagcccatcctggagccccacctctgaaccacctcctaccagctgtccctcaggctgggggaaaacaggtgtttgatttgtcaccgttggagcttggatatgtgcgtggcatgtgtgtgtgtgtgtgagagtgtgaatgcacaggtgggtatttaatctgtattattccccgttcttggaattttcttccccatggggctggggtacttcacattcaataaatactgtttaaccc

SEQ ID NO: 2 - DNA, 1278 bp, Homo sapiens
ggagctgcgggagccgggctggcaggagcaggatggcggcggcggcggctgcaggcgaggcgcgccgggtgctggtgtacggcggcaggggcgctctgggttctcgatgcgtgcaggcttttcgggcccgcaactgggtgactgctgaggttggaaagctcttgggtgaagagaaggtggatgcaattctttgcgttgctggaggatgggccgggggcaatgccaaatccaagtctctctttaagaactgtgacctgatgtggaagcagagcatatggacatcgaccatctccagccatctggctaccaagcatctcaaggaaggaggcctcctgaccttggctggcgcaaaggctgccctggatgggactcctggtatgatcgggtacggcatggccaagggtgctgttcaccagctctgccagagcctggctgggaagaacagcggcatgccgcccggggcagccgccatcgctgtgctcccggttaccctggataccccgatgaacaggaaatcaatgcctgaggctgacttcagctcctggacacccttagaattcctagttgaaactttccatgactggatcacagggaaaaaccgaccgagctcaggaagcctaatccaggtggtaaccacagaaggaaggacggaactcaccccagcatatttttaggcctcatctcagtgcctatgaggggcctgccagaaaagtcactaacctgtctcagtgtggccttgtccagccttgtgttttctgtaacccctgtttgtggtacgagataatgagtcctatttttctctcacataatatgcatttgctctcctaggacagtgtaatacatttatgtgaagtaaagacatgcgagactggtggcctgcaaatagcatccgttgatctgtgttaactgcatagggagggctctgcatagcacctgctatagcggtgtcatgttggatcgcttttgtgactgttcatctgtccttgacagtggctgtcatcttgactactttgttgatttgttggtattggggacattttaaaggctgagttatttttgaatgtcatgtttatgtcatagacgtagttttcgcatccttgaattaaactgccttaactccttttgtggtataagcaaaactacatggactctgtcctggtatccttttcctgtgtggttgccccgtgtcctctggcctagggttaagtgtgcaagataactactcgtgagtattcagaatgttgttcctaataaatgcacttgttgtctgtcttcttt

SEQ ID NO: 3 - DNA, 1369 bp, Homo sapiens
tatatcgcagtggaaggcgctgtgggttgaggtcgccgcccacctctcctaggggaactatggagctggcagctgaaagactcagtgaagcaacgaggatgccggggagagggaaggggctgggctctgggcggtgccaagtctgtgagggggcgcggtcaccgcccagggttcccacgaacgccaaggcggccacgtcctgctccccctggtgaagaagctgccctgggcttgtcgtcctagggtctccagacatgtctgaggtgaagagccggaagaagtcggggcccaagggagcccctgctgcggagcccgggaagcggagcgagggcgggaagacccccgtggcccggagcagcggaggcgggggctgggcagacccccgaacgtgcctgagcctgctgtcgctggggacgtgcctgggcctggcctgtggcagaaatctgaagctatcatggaacaattgaagtcttttcaaataattgctcatctaaagcgtctacaggaagaaattaatgaggtaaaaacttggtccaataggataactgaaaaacaggatatactgaacaacagtctgacgacgctttctcaagacattacaaaagtagaccaaagtacaacttccatggcaaaagatgttggtctcaagattacaagtgtaaaaacagatatacgacggatttcaggtttagtaactgatgtaatatcattgacagattctgtgcaagaactagaaaataaaatagagaaagtagaaaaaaatacagtaaaaaatataggtgatcttctttcaagcagtattgatcgaacagcaacgctccgaaagacagcatctgaaaattcacaaagaattaactctgttaagaagacgctaaccgaactaaagagtgacttcgacaaacatacagatagatttctaagcttagaaggtgacagagccaaagttctgaagacagtgacttttgcaaatgatctaaaaccaaaggtgtataatctaaagaaggacttttcccgtttagaaccattagtaaatgatttaacactacgcattgggagattggttaccgacttactacaaagagagaaagaaattgctttcttaagtgaaaaaatatctaatttaacaatagtccaagctgagattaaggatattaaagatgaaatagcacacatttcagatatgaattagtttgacattattgagattagactaaggtaatttttttaatgggacctctcatgagaagactggtaaatcaaaaataatgatattttggagcaaaagtcattttatatttaatcctattttgtacagtaaaaataaaactttaaaacaggttgattttccaaaataaatatgctaaaacct

SEQ ID NO: 4 - DNA, 2551 bp, Homo sapiens
aaacagttgctgtggggattgaatgactagtgcatgtgaagctgccagtgtggtgcctgcctcggggttcatcaaaaacaggaagtcaaaggtctgaatactcttcctgtgaatcaacagagaaagctttctcatctgagcccatgaatacgcagcctagggccactgacttgtaagaatggagagttgcaagctggaccctggggtatcagacaggcagaatcccttgcagctagagtcatggaagcgaagaagtttccacaattagatgtgcctatgcaagatttgaaaagaggaaatgtgacaaaagggcagagttctgcagctttgactacttttgctggcatgcaaggtcttgaagatgctgtgctttcctgcagccaaattctactgtatagccacaagcttcatgaaaacctttggagtcattttctttggagcgggagttgggatggtttgctgcagacacccagatgtttgatgctatgtccttttatcttcacctgcatgaggccgcttgatattgatctcactgcagtcctcactacatagctcattggagtccacaccatggcttcgtacgagtgtgcacatgcagtcaaaggcacccttaatgcctgctgctctgcgtccttcgatgtctcctgctcagcagtccagctattacaagaggcacagagctgagcatattgcttcagacccagaagaatctcctccatcccaattgggtacaattgtgaaggaaatgtgttggaggaagtcaccttctgtgagctgcttatccatcaagttgcactctgtgtgggtgtgtatccttcctatcttggctgtcttaggtctccgtatcctaggcagtagccgggtcagtattccttaccatgcacatttgggcaatagaggtactggacaatataggtaaattcacaaccaattctttccctgcattttctccaaatctgtggaccaaatcctacttacccatggccctacaaagttgtctttcctatcaacactaacacaccacaccttgtttctcctaaccttcccagaattccttgaaggctttctgatatttgaggcttgacaaaatttattcatgcattgattaagcagctaggatttattaaccactgtgaaacagaaattttgccaggcaatgaagatatttagttgagtaagacagtgcttctgtattcaagaagtctacctgtgacctattttaactgtatgtttccctgaatttggggcattcgaatggtatgtactaaatgtcttattggatggttcatcctggaggagcggctaatggaggctggagtcaagctaggtgtctgggctcatgtctaccttcttctgagtatcagagggcagactctgatgttctcagagatagatgttctcatagtcttcggctggaggaaatgcccttgttcatgccatctgttgacctgtagctaccatgtagacctctctgagggcctgtggctcatcaggagatccgatggacacctgaatctcagaaaaactgacctatggcactgttgtgatgcacaggtataggcacatctcaaaacatacccgtaaatgtcccaagtttgaatattttcaaaattataagcttgtatatagcttatatatttgcattgtaatccatttgtacagtacctaattcaatgcgagcaattactaatttggaaattgtactgatataaataattcctctctttattgcatgtaacactgtgtcagtgatataaaagctatgtgtgtatatatatacatatatataatatacagatgtattgaaataacttttctatttgtaaacataatggaattactgtagaatatcaccctcaagggaaggaagaaatacatgtgagcactttcagggtagtttgcctgcatctgagcagttgtagatactttggtggtataactggtgatgaagaagaaggagggaagttgcagaggaaagaagcttggagatgtttgggatagctttttaaattttcactggagtcgattgtgctagggcttggttttgaggatctgtgggtaaatgctgagaggggtgggtgcagttgcctaggcacaaatatctgaatagagcagatatggatgagtggttcaggggaggaaatattatctgccttcttttcattctgcttcatgctaggcagggcaatgatgattggttttcattcagcttgtgctccaagagtacctcagaaaatggggagccatttttccccagttttggtttttagaggtttatatccccaactggctatggttggctggcagcctttagcttcagtgtagccacacatgatttcacgtcctctgtacattcttcggcaggaacctgctccttttacttccagtggacacagagcacttcagctatgggcatccataactacttcctcctggatctgaggctttcttggctctgagagcttcctggttttgctgacctcacccctgtgaggaggaggattggcccggctgctgaaaacatacgtgtaattgaaggaattctattaag

SEQ ID NO: 5 - DNA, 1612 bp, Homo sapiens
atcacataacaaccactttccccctctaaagaagcccctgggagcacagctcgccaccatggactggacctggagggtcctctttgtggtggccgcatctacaggtgtccagtcccaggtgcagctgatgcagtctggggctgaggtgaagaagcctgggtcctcggttaaggtctcctgcaagacttccggagccagcttcgccagctatactatcagctgggtgcgacaggcccctggacaaggtcttgagtggatgggaggcatcatccccgtctttcgtacaccaaactacgcacaaaagttccagggccgactcacgattaccgcggacgattccacgggcacagcctacatggagctgagcagcctgagatatgaggacacggccgtctactactgtgcgagtttggcatgtggtgatgattgttctttcctgtaccactactacatggccgcctggggcagagggaccgcggtcaccgtctcctcagcctccaccaagggcccatcggtcttccccctggcaccctcctccaagagcacctctgggggcacagcggccctgggctgcctggtcaaggactacttccccgaaccggtgacggtgtcgtggaactcaggcgccctgaccagcggcgtgcacaccttcccggctgtcctacagtcctcaggactctactccctcagcagcgtggtgaccgtgccctccagcagcttgggcacccagacctacatctgcaacgtgaatcacaagcccagcaacaccaaggtggacaagaaagttgagcccaaatcttgtgacaaaactcacacatgcccaccgtgcccagcacctgaactcctggggggaccgtcagtcttcctcttccccccaaaacccaaggacaccctcatgatctcccggacccctgaggtcacatgcgtggtggtggacgtgagccacgaagaccctgaggtcaagttcaactggtacgtggacggcgtggaggtgcataatgccaagacaaagccgcgggaggagcagtacaacagcacgtaccgtgtggtcagcgtcctcaccgtcctgcaccaggactggctgaatggcaaggagtacaagtgcaaggtctccaacaaagccctcccagcccccatcgagaaaaccatctccaaagccaaagggcagccccgagaaccacaggtgtacaccctgcccccatcccgggatgagctgaccaagaaccaggtcagcctgacctgcctggtcaaaggcttctatcccagcgacatcgccgtggagtgggagagcaatgggcagccggagaacaactacaagaccacgcctcccgtgctggactccgacggctccttcttcctctacagcaagctcaccgtggacaagagcaggtggcagcaggggaacgtcttctcatgctccgtgatgcatgagggtctgcacaaccactacacgcagaagagcctctccctgtctccgggtaaatgagtgcgacggccggcaagcccccgctccccgggctctcgcggtcgcacgaggatgcttggcacgtaccccgtgtacatacttcccgggcgcccagcatggaaataaagcacccagcgctgccctggg

SEQ ID NO: 6 - DNA, 2107 bp, Homo sapiens
gtgccaactctctttttctttattaatatagatgtctactacttaatcttttcaaataaacagcttgttcttatctatatttttgtttttcattatttttacctttatctacatttcttctgtttctagctacttgaattcatgcctagcttactttttgtttttcagtaaatttatttaaatctataaatttacctctaaatactgctttagctacatcatgcaagttttaacccatgtgtggtgttatgatatatgttttcttttttgagatgggatggagtctcgctctgtcacccaggctggagtgcagtggtgtgatcttggctcactgcaacctctgcctcctgggttcaagcgatcttcctgcctcagcctcctcagtagctgggactacaggggcatgccagcacaccaggctaatttttgtatttttagtagaaactaaagttcctgggctcaaacgatcaatgggcctcagctttctaaagtgctgggattacaggcgtgagccactgtatacatttaaccttatttcttgcatgtactacacgcctgatttcaaattttataggccactcattttctactctttgcccaagcagatgacaaggtttctggctgttttctcaggttagtaaatgatgttcctctagacctatttcacatatggagcagctttttatgacctccagctttttgtaagtgcctcactaacagctcatggtgtaaggtgaccatctcctggaccccctcactgcatgtatggtcattaaagccccagctcgcaggtatttaggcctcttgctgcggtggatttctctatgagccccttggcctcagcttccatacattgacctaacttccacttccctctgtttctggtacctggagatttctactttatctaggttttagatgatatttttgttatcatatttttgttcagtgttttgaagtgtttggatgggaggatgtggtgttatgatatatactggtttttatccatggttcctggctcataacaccccacagcccttgttacagtttttgttgttataatactgggtgtgttaggcctcagaggcagccctctgaccttctgccctcctttcacttaccccaaggcaggactctaatgttccgcctgtgagagtgttgatgcacccaatgccctggaggaaggaatgctgacattgtgaagcttccataaaaacccaggaggaccgggttgatggagcttctgaatagctgaacacagggaggttcctggaggatggtgcacccaggcagagcatggaagggctgtgcccctttcctcatactgccctacacatccgcttatctgtatctttcgcagtattctttatagtaaaccagtaaacctaagtaactttccctgagttctgtgagctgctccagcaaattcgctgaacccaaagacggcgctcttgagcctcaacttgaagtgggtcagtcagaagttcctgaggctcagacttgtgactggcatgtggggaggggcagtcttgggaactagccctcagcctatgggatctgacactatctcagagtagatagttcattagaggacacccagctggtgtctgttgcttggtgtatttggaaaaagcccccacacatttggtcacaagaagtcttctgtgttggtgattattatggtgtgagagtggaggaaaaacatggttagagagtttttcctatacagagggatatttctacccaatccgtcatactgactgaggttcttaactcctaattaacttaattaaattaactcctaatttaaaagtttattttgggccgggcacagtggctcacgcctgtaatcccagaactttgggaggctgaggcgggcagatagcttgaggttggggagttcaagaccagcctggccaacatggtgaagccctgtctctgctaagagtgcaaagattagctgggcatggtgttgtatgactataatcccagcactcaggaggctgaggcaggacagtcacttgaacctaagctggggcggaggttgaagtgagctgagatcctgctactgcaccccagcctgggagacagtgtgagactccatctc

SEQ ID NO: 7 - DNA, 2352 bp, Homo sapiens
ttgtttggaattaaacttctagcaatcatttacctttatggttctcttaacttcaggtcacactgttgtttagtcaatgtgagaatctttcagatgttctgcactttgcaaaaggatattcacagccaatgtgtgcggcagtgaaggacacttgttgattccttatttattgtctgctgttccagggaccggggactagaggtgaataaagccttgtttgggctgtctaggatgttgtgatcgacacaggaaacagacatgaaagccaaattggcgcagtgggtgaagtattgtaatactggtctctgtttatgatatatggaagaagtttcctagtagcagggtgggtgagagagtccatcatcattgcagattggtgcctctgtggacatgcaggtatgttaggccagaggtggggagtgggagagagagggagagagagagcacgacaaagagagagagagagagtgagcaagagagagggagggagagagacagagagagagagagagagagagagagtgagcaagagagagggagggagagagacagagagagagagagagagagaggttttgaaagcattgatatggggtctacatattccccccggcccccattccctattatcatagaagcatgctgccctccaaggcttttgaatttgccaccgtgaagagcatgcatggaatcttcggctgtggccttgcattgccccctgtcttcacagcggagcttctttatctgacccgtgcatgtgcctctgatgagcagcccttcatcacagctctgcggcctcctcctaggcccccgccttcagctctccagttcatttcccgccttgttcccattgccacctgcgggcttggagggccacctgacattctgtcctttgggtcccctgtgactccagagctccttcccttctggggcgcccacatctgcgacacacttgtttgcccagtgcattttctacacttagagttcctctcgtgctctcatatttccatttaaagccctctcgagaggtctgtctcctgccagcagcattccttctagtttactagaactccatttctcatcctgccaggaatccagccgtggagtgagcttcagcaagcctctctgcagtctcttgtctgctccaaaactgtggcctctggttgtgagaaatgggcatcctgagtcagtgagagcagtagttagcttgcagcagcttcccctctccccctgagtgagcctttcttcctcttcctcctctttcattcagcctcatcctgcgttgggtccatttgacagataatggcaccttgaggccttgtcttttgcatggcatctgtgcctgactggtcagaaattacttgtgaagcaacatagggggttgttggttgggtccacttttaggatgaagtcagaagggatcgtgagtgatgcttggccaataagaatgtattgatttgatttactaattaatttcatttccagacaccaatatatgcatagccttgtttgaagaaaattaaggagaaccattttgtaaatggcaatgagtgtaagacacttaactatcttcctgctctccctggcgtgggcttccgcgctccctgactctgcttttattaaaggtgtctgggaaggcatttgtccttcggcttcccagctggcttcttgccttctcactcactgcctcccgtagcctgtgggcagaatccctcaccgtgcccaccttgccctgctctcgtctgacctcacctctgtttccaggatttgctatggctgtcccctgccagtcatgctctgtgcttgctactctgagtgtgtccctggtcccactctcttgcagcctctgtgtcttagcacatgctgccctgatggcccaagggcccttcccctttgtttctgtctggggaatgttctgtctcctctttcttgaacctccttatattccctcaagaagacttaaggcaaaaacaaacctgaacttactatgtgtggtatttttgtgttataagtgtaggacctagtcatagtaacacatttcaaaaatatggaaccgtataaagaaaatgagcatcactcataaatcactatttagacacaagcattgtttacgtttctaatattctttctttagtggtgcttttcatgattttatgtgcatttgcattttactgactaaatattactatacaaacattttcatatcttgccacttcacctaacaatacagcacaagcagcttctcatggcattaagaattgtttgtggcgtgaacccgggaggcggagcttgcagtgagccgagatcgcgccactgcactccagcctgggcgacagagcgagactccgtctc

SEQ ID NO: 8 - DNA, 2400 bp, Homo sapiens
acttgcttatgctttggtggcgttgctacttggagtggtctttaaggtgtaaacctcaggccactctgccttctcccagagcaaggacagagagatggccgtagcccactgcctagcgtgggcctcacacattgataccatgcagtaatcagtatatgttttttgcatgatgagtacatgcatgtacaagcagggactgcacgttagtttgccattttaataagataactccttattggggaaatatcgcttgtaaagcttagaagaaatggaaatatcacttggagcaattttaaagcacgtggtaaaatcatgaagagaggctaccctcatccctctgagggcctctctgtgggtctgcaagcaccactcgccagctgtctcctggtgggaacatcaggtgcagcccactgtcaggtgcagctgtctcggccctgctgtgtctggggtcagtgggcactggagtcatcttcgcagactgcacctggagctgtgccccttagcctcctgctcctgccccgacccagatgcagcctcagcgtcctgcagcacagagctctcgactgtccctgcccagcagggggcgccgggcagcactggtcccactccctcaggtggtgtcactcctcacccgaggagctgagttccaggcacagaattcctcctgtcaccatagggagacaagacacacaggacttgggtggctgtggaacatcagaaagaaggggctaatattgcatgaccgttgcctaaaatgcagtgtgaaaattgccatgccttcagctcgaaatcagccacccccagcatcacttcagcaagtggagaagagcagggctgactgaatgcctctagggatccacactctgttccccagtacattctccttcggaggttcccccagctcctcggtgatggtctccttggagcttgagttcttcccatcctctcctaccccccatcagagtgtagaccgattccagcctccacaagggccccaccctccaaagcccagcctcggtattccgcagtgactgcccagtggtaggtgcggcaggacatgtaagggaaaagtcacccaagaacgaggggcagatctcgccagaaggggcacaggtgtgtgtccatgtctgcaggagaggacaacgggctcagccacttctgcctggcagggccaggtgctccctgtcactaggctctgtgcagatggccctgcaaagaaacaccccattgtccacctgagaagcagacacctgtggggccgtctcctcgtctggggcacccagggtcccgagtggcccatcctccctccctgggctcggttcattttgttttggagagtggttaatctcagtgtcacacccggtaccaccgcacgtcccagtgcacgccacatgtcacctctcaggacaatgggacagctttatcaagagtatttcaattccaaaacccctcagttaggcacggctttgctcgaggaacaatctgattctgggaaaaggttatctgcatcttctaagagtgttaccacgataccaggaatacaaagatgagtttgagcatcatcctttcgggaaatgtaaatacctaaagcaaaggattctagggcaactgtttttcttccccattatcaactccataaagagtcttttctgacttctttttcaattgtcccctcctggccttttaataacatagatatgctgtgtatctgtttatgttctatatgtgtacttagactttgtttagaaaagagtaagatttttccacctccaagaaccagtgatcactcccttgagggctctgtcacccctgtggagaatgcagcacggtcaggcatgtaaaagggtctcttaccgggtcctctttcaggtggtggacttagattagtagataatccttcctgggccacgggcctcatgactggtcagtagtgttgccagatttcacaaactgtatatatagaatgtccagttaaacttgaatttcagacaaacaaatccttttttaagtaaaagtatgtcctatgccatatttagacatcgtttgttgtatctggcaatgctacttgtaaggatcctactcttctgaggatagaaagtgcacttcccattaagtaagaattttcattaacaggaagaacgtgagcctccatttaataggctgggcaaaaggatgccaaatgacttttgatgtagtttttattttcatgagcttatttcaacaaaggatgttaaaaacagccaaacatcagcagggcgcagtggctcacatctgtaatcccagtactttcggaggccgaggcgggtggatgatttgagtccaggagttcgtgaccagcctgggcaacgtggcaaaaccctgtctctataaaaaaataaaataaaacagtcaaacatttgc

SEQ ID NO: 9 - DNA, 2463 bp, Homo sapiens
gggatgtgtgctgagacccagagtcacccaggggtctccgtcacgtgccaggagtaggcagaagtgggctgtgacagatcaggaaacagagctcagtgcagcccactaaattgctcagggccctacagctaacaagcggcagaggcaggatctgcactcaggagctgcttggagatgctgctgtggccactgctgctgctgctgctgctgctgccaacattggccctgctcaggcagcagcggtcccaggatgccaggctgtcctggcttgctggcctccagcaccgagtgtcatggggggccctggtctgggcagccacctcagcggcggaggctggagcagagcacgctccatgtgcacccctggaaccaaggaccctagggccctgctgctggacgcactgaggtccccgacctcaaaccaggaccttggggaggcctctctgcaggccaccttgctgggtctggcagccctaaacaaggcctacccagaagtgctggctcagggacgcactgcccgtgtgacgcttacatccccttggccccgacccctgccttggcctgggaataccctgggccaggtgggcacccctggaaccaaggccctgaggtggtgtctacagggagcccagcgcccccactgttccctcagaaggagcacagacataagcaccttccggaatcatctccctctgaccaaggccagccagacccagcaggaagacagtggagagcagccactgcccccgacctcaaaccagggctgagggcactggaggctgggacggctgtcgaacttctggatgttttcttgggcctggagactgatggtgaagagctagctggggcgatagctgccgggaaccctggagcgcctctccgtgaacgggcagctgagctccgggaggccctagagcaggggccacggggactggcccttcggctctggccaaagctgcaggtggtggtgactctggatgcaggaggccaggccgaggctgtggctgccctcggggccttgtggtgccaaggactagccttcttctctcctgcttatgctgcctcgggaggggtgctgggcctaaacctacagccagagcagccccatgggctctaccttctgccccctggggccccctttatcgagctgctcccagtcaaggaaggcacccaggaggaagctgcctccaccctccttttggccgaggcccagcagggcaaggagtatgagctggtgctgacggaccgcgccagcctcaccaggtgccgcctgggtgatgtggtgcgagtggttggtgcctacaatcagtgtccagtcgtcaggttcatctgcaggtaggtgaccccggggagctgaagggccatccttgtgtcctgggctccactgcctctcccttcctcctcttcaggctggaccagaccctgagtgtgcgaggggaagatattggtgaagacctgttctctgaggccctgggccgggcagtggggcagtgggcgggggccaagctgctggaccatggctgtgtggagagcagcattctggattcctctgcgggctctgctccccactacgaggtgtttgtggcgctgagggggctgaggaatctgtcagaggaaaatcgagacaagctggaccactgccttcaggaagcctctccccgctacaagtccctgcggttctggggcagcgtgggccctgccagagtccacctggtggggcagggagccttccgagcactccgggcagccctcgctgcctgcccctcctcccccttcccccctgcgatgccccgggtccttcggcacaggcacctggcccagtgtctgcaggagagggtggtgtcctgagtcaagtcctgccccaccgcccagctccccccagaggccacctcgcccctccctctgggacctctccggatggggagtccttggccagggtctctgactctgtgtcacctgacatttgcccatgagagccgctgggccttagagaggccttggcccagctgaccggttctgaagtatgggcctccggggttagcagatgccagcagtgcctgcccgtgtccccatgtcccggcatgaaggacactgctagagagttaccatgcacaccgatggtttcctgtatcacagcccaaagaggttctctggtggccacagctgtgtgctcagtcagtgcactgggcaagctagaagtgttggggggttaatgtccccaggagcagcaaccctgagtcaataaggagcaggacctcagcttcattgtccttgagcaggacaattctgaagtgtattctacataaactctcagaggatgcccagcaggatggagtcccagttgcccgcagcagtaacccactcattcatgtacttcctgcgggggctctcccttccctctcttccccactcccccgccttgggcttcctgggatggctcccaaataaacctcttgcacccag

SEQ ID NO: 10 - DNA, 1650 bp, Homo sapiens
actgccactctcatcttgtgatgtgcctgctctcccttcacctcctgccatgattgtaagcctgctgaggtctttgccagaagcagatgctggcaccatgcttcctgtacagcctgcagaactgggatatcattttcaatgcccaatacccagaactgcctcccgattttatctttggagaagatgctgaattcctgccagacccctcagctttgcagaatcttgcctcctggaatccttcaaatcctgaatgtctcttacttgtggtgaaggaacttgtgcaacaatatcaccaattccaatgtagccgcctccgggagagctcccgcctcatgtttgaataccagacattactggaggagccacagtatggagagaacatggaaatttatgctgggaaaaaaaacaactggaatcttgcctcctggaatccttcaaatcctgaatgtctcttacttgtggtgaaggaacttgtgcaacaatatcaccaattccaatgtagccgcctccgggagagctcccgcctcatgtttgaataccagacattactggaggagccacagtatggagagaacatggaaatttatgctgggaaaaaaaacaactggactggtgaattttcagctcgtttccttttgaagctgcccgtagatttcagcaatatccccacataccttctcaaggatgtaaatgaagaccctggagaagatgtggccctcctctctgttagttttgaggacactgaagccacccaggtgtaccccaagctgtacttgtcacctcgaattgagcatgcacttggaggctcctcagctcttcatatcccagcttttccaggaggaggatgtctcattgattacgttcctcaagtatgccacctgctcaccaacaaggtgcagtacgtgattcaagggtatcacaaaagaagagagtatattgctgcttttctcagtcactttggcacaggtgtcgtggaatatgatgcagaaggctttacaaaactcactctgctgctgatgtggaaagatttttgttttcttgtacacattgacctgcctctgtttttccctcgagaccagccaactctcacatttcagtccgtttatcactttaccaacagtggacagctttactcccaggcccaaaaaaattatccgtacagccccagatgggatggaaatgaaatggccaaaagagcaaaggcttatttcaaaacctttgtccctcagttccaggaggcagcatttgccaatggaaagctctaggaaacaccagtcttgagaggtggccagccagactgcctgtccacatgcgtgtcagcacatacagccgcttcctggaagccgcctggaatgtcttcacggcagcgttttgctcacacagcagcttttgcacgccccaggcagccccgactgctgaaatccaacttgagctggctggtggtccctggatcctagagcccttcacttcgggttactccctctttcttgcctctatttcttagttggaagaaataaactcacaaattatggtgcagtaattttccggggaaagtaaagcctcaggaatgcccacgcctttcttccaaagcctttgtctctgagacctcttaagttctaagattaaatgcccctcgctgttcttcctctg

SEQ ID NO: 11 - DNA, 1590 bp, Homo sapiens
gagaagaaacagggcttggaggaggcaagactgttcagcatgaattagaactgatttatgagcttgctgtagcacttggaatagaaaaactcttcagcgcctttgatccctctcacactacaccagggttcgattgagaaaacaacagcgctgaccacccgtccttctcgatccttggggaaaaaacttttttggacggtagagtcagatgaggccgcattttccaccagggaacactaactgctgcgggaagatcccagcttctggctaaagctggggcggtaggagctgccggccagctcgccatctagtccccagagcccgggctttagggcgcccggatgcaaaccagttttgccgccaaggaacccggacaggcgcgcctcctccccggcctcgcaaggaacaggttaaggagacatttcccactttctctgcccggccctgaacgctcgccgcccctgcccagccgcccactgtctggcagcctgcaagtctccattcagaagcggctccgtgctgcccagcgatggcgccctggcggcgcggaagcccgcggccaaatgacacgacttgggggcaaaggaggacaacagttcccaccaggacaaaaaataatatccaaagatattttggcactaacggcgctatctgtagcaagaaagttgagcagtgtgaactgttgagacttccaaggagacttcagacaaccaagacagtgtaaaggaaaacagagaaaaagacttgttagacattattaagggcacgaaagttgaattgagcacagtaaatgtacaaacaacaaagccacccaacagaagttcacttaaaagctacaactggcgggcctcaaagagctttaggacatgctccaaagaagagaaatgagcccctgagtcctgagttggtggcagctgcatctgctgctctgttttgacaagcaaacaagccagaactgctcaggcagctccgtagcatgaggaagagtcaggggcacagagagatggagagagacctagttagtttcaataacaaaatatcagatatgaaaattgccaggtgtgctacagctagaattaatataaggccagagcatcagattcagtttgaccaaggctatgacaattatcctggcctggagaagactgctgatcttagaaacaggtatcaggctttgtagtctgctgggttttgtttgtatagtttggttttaccttgactgtagatttaccttattgtgggtgtgtatgattgctgttggatatgtgagcattatgaatgcatttacatctgtgttcttactctctgtataccacttcctagagagggaaccatgtgctggagttagccagtcctgcatttttctataccttaaatcaaaataggccatgcttcatatctacccatgatgaatagggttcctttgatttagaataaatagagctgactgaattctgaacaagtgagtattttgtaagaaacattatttttcattttaaatatcaatgcctaatactgtgtattcatttaccctttatatctctatacatgcttatcttttgttacaccttagagaaatgacccaccatc

SEQ ID NO: 12 - DNA, 3306 bp, Homo sapiens
ggagcctccattccctgccttggtaccaaagtcttgcttggtagcagaatcagctgtcagcaagctcctgctttcagcctctgagttccaggttcgtggattggatgagctggatggtgtgaaagcagcatgcccctgcccacagagcagccccccagaacagaaagaggctgagccagagaagaggccaaagaaagtctcacagattcgcatccggaaaaccattcctaggccagatcctaatcttacccccatgggccttcctcgacccaaaaggttaaagaagaaggagtttagtttagaagagatatataccaacaagaattataaatctcctcctgcaaacaggtgtttagagaccatctttgaggaacccaaggaacgaaatggtacactaatctcaatcagccaacagaagaggaagcgagttctagaatttcaggattttacagtcccgcgaaagaggagagctcgaggcaaagtcaaggtggcaggcagctttaccagggcccagaaggcagctgtgcagagtcgagagctggatgctcttttgatacagaaactaatggaactggagaccttctttgccaaggaagaggagcaggaacaatcatcaggctgttgagaagcgattcagtttgagggtctcaattttagggtttttttgttttgttttgtttttgggttttttttttttttggacctccttggaaaaggttgcctaattttgccctaccgccaaaccactcaaaaatgcacagtccatgaatttttacctatttcaaggtgcaacctttttagaaactggtgaaggagggtcctctacttttactgctgagtatagaacctcaggaatgctccctttctcctggaaatggacctgaacgacatccagccacctcctcagtctctgccatccacaggaggaagcagcagcctatcttcagtaacactaggattccaaggacacacaggatttgcacgtccatatgaaagttccgctttgtttacggtggtgctagaccaagattattagaaacgtggcctagggagggggacctggcgtcctgtcctgtgtggtctcactggctcatttcagtagttgaggaaagatgagctgttgtgttttcttatcttttgtctgcccaggacctattgatgtgagtgtatgtgagagtgtttgtgtgtgtgtggctttttcccatcgttttctcccctctgtgactgggtcactagtgccagaggagcccgtccaggccccattcgaagtaagttgcactttttaatgttgtggtgtggattattttcatttgttttattttcttttttgttgttgtttttgtactattattgctgcatgtgtggagcctttaaatgtgattttaaaacatttttttaaggagaaaaacaatacatgtcttaagaatacatgataggcatttgacccagttgatcgctgcatggaagagacatttttcctatccatgtgtttcaggcaatcccttccccatctccagcttctagtgtaactcattagagggagcactttttttcatctgggttctcattcttgcccaccaaatacatgtatttattttagtgatttaagtaagagcaggtttctctcccgatcattgaaaaactactatggttgggtgtggtcttaatggtttttatctgaaatggtgttaggtaacaaaattgagtacaacggcttgggcagtgatacaggctgacccacagtatttgtggctttccaggcagcccgcttcaagtgtggggagagagtcggggtcatgtttcagacccagagatgtgttcctgcagtgggatctcaaaaatccccagccagccttctttgagggccacctcattgtactctgggctcctatgtcacatctaccggaactgtcaaatgctggagttagccgagtttctgggtttgtgcctgcaggagtctgtgggcagagggatgctgtgggtcagcagcctcgaggtcttgttccttttccactgaagtcctgtgtgtccatatcctgctccccttcccctccttctctaggggtttctctttctctctcaaaacaagagtttagagaattaacattccatggctagtgagtgggatgcaaaagtcatcgtcaggacaccagcatcacctcttcttatcctcctgggagccactggcatggagcagccgccgatgggaaccgtcagagttctagggacatttccaagtcagtctattagagaagagtgagtggcacgtcctggaatgttggccaactctcctaggtttcttttgcttccccatttgctagtggatggggagatgggttgggggtggggggtctctatgtgccttgcttttgcaggttgacagtctatgccacactggagcagaaaaactgacatgagccagagggaaaagtgtgccacggctatgttctaggcccactgcctcagacatagcattgagacgagtgaaatacacacttggtcatccacggaggcttccaaggccgcggtgcagccaatgaatgcacggccgtcgctccgtctccaggctggaattccgtctcataatcaatgccatgtacattaagatctgcgaaagaccaacttttaggcagtgatacttttctcccattccctggggtggggggagtatgcagttggtgctttctgtaattcccttgttctgttttgtttctgtaagcttttcccctggtgtcatggaagggacttcttaaataaccacattgtgggtggctgtatccaaagtttaaataattggccagaagtgcagagtatcctttcctggattcgtgtcagaaaagggctccttgccacaactgaacttactgtataaaaacctggctagggagatttaattttactaaaattacagtttaatgttaccgtctagccacaaatcaagcagcaaaagctattttgatgatgaaagggggtccccgttgagctggtcatctagtgcagtgtgctctcagattccatgtttgttgattgtgtgtcttcacaagcccctctctggtgctgaattggatttgaattcttggtgagaggcctcagcatctccttgggctggtctgggccagtaaaaatagctgcctgacatgtttatatattatcatggtcagtagttcaatgaaatttgtacatttttggtaacattggtatacatgatgcccctgcagttccttttctgtttggtagtttgtgactctaagatttccactgttatgtgtgttaatttatgaaaataaatttttttgaaaacctttc

SEQ ID NO: 13 - DNA, 2317 bp, Homo sapiens
agaactgaacgcgcagcccatgcggagtggcctattgaaggaagcccagtcctctgggttttagagatttaggccccctcccgccttttgatccccaaattttattgtgttgggcggttctaggggacgtgaggtaaagatttagcaacaagtcccagcgatttggggcttggaagtggccaggaagaatcggcgacttaggaaaaacgccaacaatacggagtttcagaatcatctgtaagaggcctggaatccagaggcacccaagggaattagcaacaagaaatacataagagatgccaaaggccagtacctgtttgaccttctttgccaccatctgaacctacttgagaaagactattttggtatccgctttgtagacccagataagcagcggcattggctggaatttacaaagtctgtggtgaaacaattgagatcccagcctccattcaccatgtgcttccgtgtgaagttttatcctgcagaccctgctgctctgaaagaagaaataaccaggtatttagtcttcctgcagatcaaaagggatctctaccatggccgactcctctgtaaaacatcggatgctgccttgttagcagcttacatccttcaagcggagattggggattatgactcagggaaacaccctgaaggctacagctccaagttccagtttttccctaaacattcagagaagctggaaaggaaaattgctgagattcacaagacggaactgagtggtcaaacaccagcaacatcagagctgaacttcttaagaaaagcacagacattggaaacatatggagtggatcctcacccatgtaaggacgtgtcaggaaatgctgcatttctggccttcactccttttgggtttgttgttcttcaaggaaacaagagggtccacttcattaaatggaatgaggtgaccaagctgaaatttgaaggaaagactttctatttatacgaaaagaaaattattcttacatattttgctccaactcctgaagcgtgtaagcacctctggaaatgtggaatcgagaaccaagccttctacaagctggagaagtcaagccaagtccgcacagtgtccagcagcaatttattctttaaagggagccggttccgatacagtggccgagttgcaaaggaagtcatggaatcaagtgctaagatcaaacgggagccaccggaaatacacagagcagggatggttcccagccggagctgtccctccataacccatggcccaaggctgagcagcgtccccaggacccgcagaagagctgttcacatctccatcatggaaggcctagagtccttacgggacagtgcccattccacaccagtgcgttccacttcccatggggacaccttcctgcctcacgtgagaagcagccggacagatagcaatgagcgagtagctgtgattgcagacgaggcctacagccctgcagacagcgtgctgcccacccctgtggctgagcacagcctggagctgatgttgctttcccggcagatcaatggagccacctgcagcattgaggagtagaaggaatctgaagccagcaccccaactgctacagaggtggaggcccttgggggagagctgagggccctgtgtcaggggcacagcgggcccgaggaggaacaggcgatggtttgcctgcaaaatccgctcagtggtgagcctgctcattgacacctgagaaggcatgactcctcccaaaaactagccaggtggaccaaggaacccggctacccattcccagcaatgggacccatcgcggaaccatcggcacatataccaagtcctcctctcatgactcaaagtccactgcagcctaggagggtgtttcccagaagaagaatggataggctcatgccctgtctaaacaaactgggaaaactcattttcttcagaagttatttcaagaaaggctcagcgactctgtttctcatctttccaatttgcaggataatttttggttttgaattttgatttttcatagatgtatattattttgaagtatcaaataaaaataatttattttactattactgattattgcagtagtatcacctagcagaggggacactagttgaaaactagagagctgctgtcctctgtattctgcaggagcttttcctgctggtgccactgggttccagtagactcatcactgcagcctcagcagggcaggccagggatctggacaatggggactgtttagttttttgtttgttttttttgccagccagaacttttaaaaaagtaaacatccatgtagaatgattaaatggaaagttgcttctt

SEQ ID NO: 14 - DNA, 1965 bp, Homo sapiens
taagaaaagcccagcgaagctgggtacagaaagtcactggggaccatcaagagacccgtagggagaacggtgagggtggcagttgcagcccatttccttccccagaacctaaagacccttcttgtcggcatcagccgtactttccagatatggacagcagtgctgtggtgaaggggacgaactctcatgtgcctgattgccacactaaaggaagctctttcttgggcaaggagcttagtttagacgaagcattccctgaccaacagaatggcagtgccacaaacgcctgggaccagtcatcctgttcttctcctaagtgggagtgtacagagctgattcatgacatccccttaccagaacatcgttctaataccatgttcatttcagaaactgaaagagaaattatgactctgggtcaggaaaatcagacaagttctgtcagtgatgacagagtaaaactgtcagtgtctggagcagatacatctgtgagtagcgtagatgggcctgtgtcccaaaaggctgttcaaaatgagaactcataccagatggaggaggatggatctctcaagcagagcattcttagttctgagttgctggaccacccttactgtaaaagtccactggaggctcccttggtgtgcagtggactcaaactagaaaatcaagtaggaggtggaaagaacagtcagaaagcctctccagtggatgatgaacagctgtcagtctgtctttctggattcctagatgaggttatgaagaagtatggcagtttggttccactcagtgaaaaagaagtccttggaagattaaaagatgtctttaatgaagacttttctaatagaaaaccatttatcaatagggaaataacaaactatcgggccagacatcaaaaatgtaacttccgtatcttctataataaacacatgctggatatggacgacctggcgactctggatggtcagaactggctgaatgaccaggtcattaatatgtatggtgagctgataatggatgcagtcccagacaaagttcacttcttcaacagcttttttcatagacagctggtaaccaaaggatataatggagtaaaaagatggactaaaaaggtggatttgtttaaaaagagtcttctgttgattcctattcacctggaagtccactggtctctcattactgtgacactctctaatcgaattatttcattttatgattcccaaggcattcattttaagttttgtgtagagaatataagaaagtatttgctgactgaagccagagaaaaaaatagacctgaatttcttcagggttggcagactgctgttacgaagtgtattccacaacagaaaaacgacagtgactgtggagtctttgtgctccagtactgcaagtgcctcgccttagagcagcctttccagttttcacaagaagacatgccccgagtgcggaagaggatttacaaggagctatgtgagtgccggctcatggactgaaactcagcagggactctgggaagtctgaccaagttggagcagatggtttgttacttgaatctccaaacacttagttgaatttttacagatatttcagatcagtggtgttgggccactattgttacctcaaatttattttttgcccttattcatttctccagctaccatgtactattgtttaatgttcagtttggtttcatttttaattttatggttctgtgcgtcccccatatttaatatttattattcaaacgcatgcatatagacagagcatgcagtgaagagtattaaaaaaaaaagcttagtagatttgggcagctctctctcggcgttgattttcttacaggaacaattctgtctcttctgcatgccaggttctgtcactgaggaactgaaacacttcctcactctgaagtacaagacattttgaactgacagcccagtgactggctactttggtataccacacccccac

SEQ ID NO: 15 - DNA, 2281 bp, Homo sapiens
aattccccctcgggtcacccgggacctggagctggaaatttcacggatcagggttccctaagacccttggaagaggggacgatcgccccaagttagaaatccttctgccagctcataagcgtggttcaatttaaactagggttttggccccttgaccccaaccaagccccgccccttcctggttgtcttagcgacggcggtggcgtcccaagatggcgtcgtggctgccggagactctctttgaaactgtaggacaaggcccgccgcctagcaaagactattaccagttactggtcacccggtctcagaaaaattgagtttacatagccgggcgcagtggcttacgcctgtaatcccagcactttgggaggccgagccaggtggatcacgacgtctggagttggagaccagcctgacaaacatggtaatctttagatggtggaagatctctctaaggagtgagtatcgatcaacaaaacctggagaagcaaaagaaacccatgaagacttcctagagaattcacatcttcaaggtcaaactgccttaatatttggtgcaagaatattagactatgtcatcaatttgtgcaaaggtaaatttgacttccttgaacggctctcagacgatttgctcctgactatcatttcttatctggatcttgaagatattgccaggctttgtcaaacatcacacagatttgcaaagctgtgcatgtctgataaactgtgggaacagatagtccagtcgacctgcgacaccatcactcctgacgtgagggccctggcggaggacacaggctggagacagctgttcttcaccaacaagctccagctccagcggcagctccgcaagaggaaacaaaaatatggaaacctgagagaaaagcaaccttaggcacacattttcctaccagcagggagctcaggcatggctgtgtttctcttcagtgtccaaatctcttctgtctccttttcttaagaactaagaggttttgttgatgcgtggagccatttgaaactcgtaggggatttgcacacaaatgcagcagagtctggctccccagtgccttgctagagtcaccgtcattctgaggtcaaatcatggcccgaggacaagggctgtaagacagggagccccataggccatcatcatccttatcccacacccattataaaagaggtttctattgtatataaacaaacaataaatgattattagcaggtttttattagacatctattttatctaggcattagaaagggtaatggggcttttgaattttttcctggcattgtgtcgtctgcgtccagccatgaagctggtggctgagtgtccccaccaggaactgtgaagggcacgtaccacgggaggcactcagggtgggtgcagctgccttcccaactttgttctgctaagtccatattcagggccctatccttgtgagcccaggatgccagggtccatccccgcatgtagacagcttccgacctggtgctggagcatgactggagaagtgcaggcatcctgcttgcggaccttgctcaaagtacaacttcccaggactacttcacattgttaaataaacctataaacatttcttttcttttctttttttttttttttttttgtattttctttttagtagaggtggagtttcgccatgtaggccaggctggtcttgaactcctgacctcaagtgatctacctgctctggcttccaaagtgctgggattacaggcatgagccactatgtctggctaaaacctataaacatttcttagagaaatgctgttccccaaaggaatgtgaacagctaccacttttaacaaggatatttaagaaaacagactatgagttaactaagtaaaaatgtaaatatggtttgcatgctgttaacatggcagaggggtaaaaagaatacagtcctggggagaaaggtcacttcactgagaaggcttacttaaaaatgtttttctccctgcactttcatgattattaagtacccctagaaaatgaactcatagcagcaaataatctaatgactccttttaggttacagagcaaagtagctttctacttccacatcacattataatatagccttataatttcttctttcctgcaaccttcactttcctacctaggaaaactcacctccggtgccagagaaacttcccaggatgcactagggccctgtgaacaatacagaagttgtggactctggctctttgtcccacctaagtccttccagaagggctctacagcatggcttagtgacac

SEQ ID NO: 16 - DNA, 2175 bp, Homo sapiens
agtgaagctgggcgccttcggggcttgagcttctgagggtcgggtccagcgcgtgggctgctggatggcggaaccccaggcggagtcggagcccctgctgggcggggcccgcggcggtggcggcgactggccggcggggctgaccacttaccgcagcatccgagtcggccctggtgccgcggccaggtgggacctctgcattgatcaggctgtggtcttcatcgaagatgctattcagggttacctgttcgggtgggcccatttccagaaaaacctttggctgctgggctacctcgtggtgctggtggtgtctctggtggactggaccgtgtccctgagtctcgtgtgtcatgagcccctgcggatccgccggcttctccgtcccttcttcctgctgcagaactcctctatgatgaagaagaccttgaaatgcatccgctggtcgctgccggaaatggccagcgtcgggctgctgctggccatccacctgtgcctcttcaccatgttcggaatgctgctgttcgctggtgggaagcaggatgatgggcaggacagggagaggctgacctacttccagaacctgcctgagtctctgacttccctcctggtgctgctgaccacggccaacaaccccgatgtgatgattcctgcgtattccaagaaccgggcctatgccatcttcttcatagtcttcactgtgataggaagcctgtttctgatgaacctgctgacagccatcatctacagtcagttccggggctacctgatgaaatctctccagacctcgctgtttcggaggcggctgggaacccgggctgcctttgaagtcctatcctccatggtgggggagggaggagccttccctcaggcagttggggtgaagccccagaacttgctgcaggtgcttcagaaggtccagctggacagctcccacaaacaggccatgatggagaaggtgcgttcctacggcagtgttctgctgtcagctgaggagtttcagaagctcttcaacgagcttgacagaagtgtggttaaagagcacccgccgaggcccgagtaccagtctccgtttctgcagagcgcccagttcctcttcggccactactactttgactacctggggaacctcatcgccctggcaaacctggtgtccatttgcgtgttcctggtgctggatgcagatgtgctgcctgctgagcgtgatgacttcatcctggggattctcaactgcgtcttcattgtgtactacctgttggagatgctgctcaaggtctttgccctgggcctgcgagggtacctgtcctaccccagcaacgtgtttgacgggctcctcaccgttgtcctgctggtaaagtaggcgcatccgaggccggcctctcctgggcgggtgggtgagcgccacctgggctctgtgctggcccatctcaggcctcccctgaggactagaggctgtaggaaggtgggcttctgctctcagtggtgagggctggcttccctgctggccgagttgctcagtgggcagccggtgaggtctttaggaggctgggtttctactgcatccgagtgtcatggggggcaggctgcccctcccgacccccaggggaagccctgaaggacttgtagccctggccagcgactccagcccggggaacagcctcttaaacgtcactgatagacggtgtgacctcagcatgggtggagcgaggggccagggggctctcaggcaccagggtgttcttgggaaacgcttacacttcctttccccagacccagtgggagtgagggcatgccacacttggtgtgtgtgtcacaagcagccacatgagagtgacgtttgctgtagccagcaggcccctcggcacatgggtgaagagaaatttgaaaagggccctgcagtctgtccttgactcagtatcttctctgccacctctgccaccccaatctgtgcagtcccccgattcctgaggccagggtgtctttccagctgaaagaagtcccgacatctggaaccaacccgtggggtccaggaccaagctctgatttctccccaaaagccccttttggggagaatgtgttagagatgagctttataataattcctttaagggccgcccagattagtgttgctgtagcgaagccttcttttcttttgtaattaaaggttttggagatctc

SEQ ID NO: 17 - DNA, 2092 bp, Homo sapiens
atttgtgtaaaagttccatgagagcagaggttttgtttcctttatccctccatacacagcaactggaacaatacaatgcatagagtaaacatgcaacagataacctgaaggaatgctgtttcatgccttcattccttcctatacattattgctcccctaatgttctctgtgtttggactgccataacctcatctaccttttctccttactaccttctcattcttcaaaattcagctcatccccaaattcctctgagaagtccttcaggttgttcctctccatctaatctgaataagatgtcctttcttggagctctaatagcgtttagactagacactggtcctcagagtgaggtttctgcatggacagcatcaccgtcatctgggaattcattagaaatgcaaattatgaggccctaccctagacctcctgaaacagaaactctgggagtggggccaacaacctgcgttttaacaagccctgcaggtgactgtgacgaacacaaagtttgaggaccactagaatatagtcactgtagaatatatctccaggatctgacacaacgcctagagcaggattattgtgaagatcgacctgaaatctatcttcctgtagcctcatcaatcctggttgagaatatgaaaaactagttgagttgcatctctgttaggcagctttacaacatttgaggatagcgattatctctacttctccacctctcatccctagctcctctggtttaatgtcttttttttcttatgtgctataactttgaatcccttcactttcttccttggacttatctggacaattccaacttacttcatatccatcttaagtgtatattcaaaatatccttttagcttttaacctacaattctgaaaggtggaactatacatgtctgtaatcaccccagcaagacagagttcacaatgaacatagttagaattccatttgtacagttggaggtgttcctaggtgggcggattgcttgaggtcaggagttcaagaccagtctggccaacatgacgaaaccccgtctctactaaaaatacaaaattcagccaggtatggtggcatacgcctgtaatcctagctacttgggaggctgaggcatgagaatcaattgaacccggtagaggcggaggttgcagtgagccgagatcgcgccactgcactccagcctaggtgacagagggagactctgcctcaaaaacaaaccatccctgtcgctcccatcctagaccaatctaattgcaagtatctcacagggagcccaagtatcaatgtttttttgaacagctttatggaggtataatctatataccataaaatccacttattttaatatatgattttagtaaatttaaagacttgtgcagcccttaccacatcatacaaaccagaatgtttccatcacccaaaaagaaacttcatgtctatttagtcactccctgtttctactcccagctctaggtggccattaatctgagtatctctagatttgtcttttctagacctaaacatcaggtttttgtttttctgcagccagagttgagaaccataattctaaatgcattatgagaaataatggtttttaaagattatatataatattttacgtattttcatatttatgactcccatccttacagtgaatgcgtctatcaccagtaagacaaagatcattaatttgataatggaacttaacagaccattctttccttttatacattttagtatcatattcacaatggcctcccattctgtccccaagttattttaaaacatctccagtcttgcttttttcccctttagctcataaatgaatagtgctggaagatatctcaggagcattctccctgagatgatgtcttcagtaatgatcgcacgtattggtgttgattccatccttgaagttactttcctttatctttcacagtggtgtttcttcactagaggttttgctgtctgattaacttctctgccaaataaatggacttttgcttcataggtacacaaacatttctaaaactttttttggaaaatatatttctttcttaaaaaaacaaatagtgcatgcacattttt

SEQ ID NO: 18 - DNA, 4680 bp, Homo sapiens
tatccacattgtttttgttctttttaacataaatttacttagttaaaattaaatccagtattgagaatgcactttatagatggcatgtgaaagtttcaaaggaatttctttctgcactttaaaatgtcctgtctgctaggtcctgaaagacagctcccagggggaaccctgccttcattgcttgtggtttggttgctcgatttctgggaacgttccccactagcagttccaaagacatgttcagggcccccaagagctgagcatgggcatcaaacaagagccctgcattcttgttagggtttccccacccgctgtgggtaataggactattaggactgtttagcagtaacttgttatggaaggcctaaaatccatgtggacagacctgggcaagagcctactcctttgttttctgccctctggtgatggtgaagatgacttgggggtgggaatgctgacagagacatctttgtctgctagacttttcttcctctttctccctcctgtcttcagtatccagtttcactccccagttgccctgacgcaggcctgaggaggtgcttggcagctctgaaacccagggcttgtctgtgtagaacagccatgttggcaggcttggtgtcctcgctgccggtgggctgggtggtttcagggagggcctggggcagaagccaaggtcaagtgcagtctcctgcctcccagctgcctcctggatgagaatgtcccccaggaagcctttgtcttgtctctgtccctctacctgcagggtgaaggaggtgtacagactggaagagatggagaagatttttgtcaggtgagtgacttgaccggtgaagctcagattcaagaggaggtgggggtgcggccgtgtcctgtagtcatcctccgtttcataagatgggtcgggggcggggggtggtgagctgcctccagcggtcccctcacctcatctgcctcgctgcagcactgcttgcagtcaagagtcccccagctgacagctgcttcagcatcctatcaggagggagccaggcgggctgtgtcaggcagaaatacgggctcattgatgctgtcatagttacgatgggccctgcgaggggcagagcagcaagctgcttgaaataccataaatcccagctcccgctgctgagagagaaattgagcctggaggggtagaaggggcataaatgcgtccttatattcttagtggtgtgcgggtgctcacagaactcagtctccttctgggtgtgcttatgtagaggttacattaactcttcagtggctgcagtgttgccatgggcacccgtggtgtcagatctcacccttactggtgtcaccctgaaatccctcaagcagcagtgacacagcagggtcatttgttactcccctgcctccactgcctgagtgggaattcagggcctgaattctaaactcagcatggccacccactcggctgtgtgcctcagtttcatcttaagtcaaaccaggatcagatactgcagttggggtgattttattagtcagagactaattttatcagccagggccttttctctctcatgcacgtaccttctcggggaaatcaggttggagatgaagatcatcaagggctccagtggcaccccaaagctcagctacacagggcgtgatgaccggcactttgtacccatgggcctctacatcgtcaggacagtgaatgatgggtgaggagggactgttcccgccatcccctcccctctcccctctcctcgccaggtgatgggtccagaccctacctgagccagagcgaagggctcccagctaaggtgggtagcagccaggctggcatttctctgaggcatatgttaggggacagtgttccctgagcctcttctgttcttccgtgggccctgggagttggttaggcaatagggagaggagctcaacttgtacacacgcacgtgttgttctcatggcaggaaaagggccttctcagtagacagcagcaaatccagaaagtcaagcttggtttctgtccatttgcatccccctttcttcagagcgctctggctaacagagtcctacatctgtcagagtcctagagatgttaccctgatggagggttggcaggactggggtggggtcgttgagaagaagtcatcgcgtagtcattctcctgcagcccctttgggctggtgatgaaggctgctgcctcacgggctattccctgcttgcttttggtgggaggcaggaataggaccaccgggagtggaggaaggtacacgcctgtcctccacaagtgctttgtgtcccttctgggcttcatcccctcttcctcccatcagagccctggactatgggattcagcaaaagcttcaagaagaagttcttctacaacaagaaaaccaaggactctacttttgacctccctgcagactccattgccccatttcagtaagtagctctcctccaagcctgccctccttagcagcctcaaatactcctgcaggatgccagccagctgtcttgggggcacaccctgggtcctgagactgttgcccatgcaggggttcccctgagcacaggcctgagaatacttgtggggatggcagccccctgcaggtgtggctggacctgggtagagctggtgagggaagcacgatgcctggacctgctaatggttacgggcctggctgtgaaggcccatctgggcagcgtatccaccccatggagcagccacgtttcggtgacattccaacactggcctgatggtgggaacctgctgagggcccacagccctgccccttggcactcaaggtcccagctgtccctcattaggacccggtgtccattagtcagactgttggtcataggcttccccagcagccctaatgtgcctgtaattagccactgacattttctgtcaccacactactaatactgtatattagagaagcacagacagataagtcaggaatatcagtcactgtaggaatccagttggatgcaattagcagcaacagctgtttgttgggaaaagttggttctgggaggcaggggagttagggcctaccgggtaccttttgcctgccgggggaagaacctcaactaaagtcattgacagacccctccgccccacacccttaagaacacatgaccctgtgccatctgggtgcagtcctgacctctttcccatccctctcctccccagcatttgctactatggccggctcttctgggagtggggggatggcattcgtgtgcatgactcccagaagccccaggaccaggacaagctgtccaaggaggacgtcctctccttcatccagatgcacagggcctaagagcctcagaatgtgccacccctgcagaatgccctgtcattcctgagatggggccacctggggcccacagtgctggcttcttccccctcttgaaaagggactggggagcattgcacctggcatgaggagtgggtggcctcctctccatcccctgaagagctcaggcagggccctgcagagaacactcatgttccttctgggacacctgcctgggaactttcccctgccaggactcagcctgaaggagctgctcctgaggcaggtatgaggtcagtgcctagggcacgtgggactgatggaggacatatcagagtggcagagctgtgggctctgctgttctctcctgcatcctgtagactcacttttctgagttccatgcactgccctgagggtagccatgcccttgctttgcccaactttttattgggccatccctgagtgggtggagacctgctgtcatgagctggccaggagaacctgctataaaaaaatcaaggttttgtttctttgaacttactctgttttgatgccaaattggagaccattttcttgtctccttcccccactcatcctggccttccctggagttcttcctagcccagagctctgacagtccagcagggtgggaaggagggagtttgggcaaactctcatccctgataccacattgagatcctgggagccctcttttcgtactgagtatggagttgtagagccatcctaggtgccatccccttttggtccaaacattgggcagcgctagatggcaggaagcagccttgaagacccgtctttcccccacagcagcaggggccccagcagtaacaaagggtacctccaggggtttgggtagcgctgccctctggcagtcatgcaccgctgtctgccatagccgctctagggtcttggcagaattctgagcttgaagtgcagctcccttactaccctttcccttcctttttcttccctaataggaggtacaatctgcttttgtttgtcgttaagtggtcactcccatttcctttatcttggccgacaacacagagaggagggggagctgggcagtagcttggggtgggggtgggcacctgtgtttgtttttaatgggaaatacctctcagagatgttcatgcaggctctctagggccccatcccagtgccaggctggtttccatggagatagggcactgaggctcccgtgaggttggaatcgacttcaccatgggggtccttcagccagcatccagctccccacccccaggctggcagtagcactgctgagatgctgtatttccacccaattctgggtatatcagtgtgtcttgcagaatcttggatcattaaagataaacatattttt

SEQ ID NO: 19 - DNA, 4096 bp, Homo sapiens
aaacattagctagtttagtcatttagacttagaaggaattaagtaagtactccagttcatagtagtagcaggatagaatggtaataaatcaccacaaaactttataagaaaaatagtctgtaacaaaaaaataagcaaaaataagtaagaaagaaaactaaaaaaatgagcatcaaaatatatttcccaaagccaggaactttgaaagctattggacttgtttgcctctttgtgcatattttaatagtatcgacaaattataggaatgtacttgactggaaagggagagatgacatcagcaggctaattgttgccacaagtgatagctgatggtgagagacagataactgttaaattccagcacaggcactgaagaagatactggtctaccatgccatgtggagataaagaatacaaaacaacctgtagtcctttgaagggtcgtgtgtgacagttcagttaagttggcattgacccagcactctactgcagctatttgatgccagggatttaaaattttaggtatttagctacttattactaagtaacttgtgaaacatctcctaattgcacccttgaatttcaccttaattctgattcacacccaaagaataggaatgaaggataaggtgtggagtaagtaaagatgaagccacacgatttggatcactgggacagatactgtatagaatgatacttttttccatagttgtccaccttagaaagggccctcaggaattttaaacaaaatgcctgttggttctctttagagttagttcacttttatttcaagtgggtttttttctcagattctctgctcttcttcccaccctcctaacacaaattacattggtcaaacatttatttccaattgataagtagataatgtctgctataatagaatttaagtctgtttttcatttgagaatctgaaggatgaatacctgatttgtaagttttatttcatttactttatttgattgtatgtgtattagccacagaatggaggcaaattcagcatctttctttaactctatgctgtttgttttagaggaagtccacaaatgaaggggacaccccattttaaggaagaacagtgtgctccagcattaaatttggagatgaggaaaatactggatttacaagcacccatcatgagtttgcagtctgtgttggaagatctcctggttgctacttctgatgaacttcttcatcttattcactgggaaggaatgacaaatggaaggaaagccattaatctttgcgcagtacccttttcagtagacctgcagtcatctagagtaggttcattcctgggcttcacagacgtacacatcagagacatggaatactgtgccacacttgatgggtttgctgttgtatttaatgatggtaaagttggatttattacaccagtgtcaagtagatttactgcagagcagcttcatggagtttggccacaagatgttgttgacggaacgtgtgtagcagtaaataacaagtatcgactaatggcatttggctgtgtgagtggttctgtgcaggtctatacaatagataacagcactggagccatgctgctatctcataaattagagctaacagcaaaacagtatcctgacatttggaataaaacaggagctgttaaattgatgagatggtctcctgacaatagtgttgtaatagtgacctgggaatacggaggcctttctttatggagtgtttttggagcacagctgatttgtacacttggaggagattttgcttataggtctgatggcaccaaaaaagatccccttaagatcaactctatgagctggggtgcagaaggctatcacctatgggtaatcagcggatttggttctcaaaacactgaaattgagtctgacctcaggagtgtagttaaacagcccagcatcctgttatttcagtttattaagagtgtactcactgtaaacccttgtatgagtaaccaagagcaggtgttgcttcagggtgaggatcgcttgtacttgaactgtggagaggcttcacaaacccagaatcccaggagttcttcaacacactctgagcataagcccagtcgagaaaagagcccatttgcagatggaggtttagagtctcagggattaagcactttacttggacatcggcattggcatgttgtacagccatttctctgctattttcatttccccatactttgaactattcattctacactgacctagcatcaatgccagttctgcctagccaggtctgtgttaccagagagccaagtagagcagaggatcaaagaaggagcaaaatatgatcgtgacaggtggcttagcctggtggaatgattttatggtccttgcgtgttataacataaatgaccgtcaagaagagcttagagtatacttgcgaacatcaaatctggacaatgcctttgctcatgtcaccaaagcacaagcagaaacattactgcttagtgtcttccaggacatggtaatagtatttagagcagactgttcaatatgcctttacagtattgaaagaaaatctgatggtccaaatactactgctggtattcaagttcttcaggaggtttccatgtcacgctacattcctcaccctttcctggtggtatctgtcactctgacatcagtgagtacagagaatggaatcaccttgaaaatgccacagcaggctcgtggtgcagagagcattatgttaaacctggcaggacagctcatcatgatgcagagggacaggtcaggcccacagatccgggagaaggacagtaaccctaataaccaaaggaaacttctgccattctgtcctcctgttgtactagcccagtctgttgaaaatgtctggacaacgtgtcgagcaaataaacagaaacgtcaccttctggaggccctctggctgagctgtggtggtgcagggatgaaagtttggctccctctcttccctagggatcaccgcaagccccattccttcttgtcccagcggatcatgctgcctttccacatcaacatttacccgctagctgttctgtttgaagatgctttagtccttggtgctgtcaatgacactttgctctatgattctttatatactcggaacaatgctagagaacagctggaggtgctcttccctttctgtgttgtggagagaacctctcagatctacctccaccacattctacgtcaacttctggtcagaaaccttggggagcaagccttgctcttggcccagtcctgtgccacattaccttacttccctcatgtgctggagctcatgctccatgaagtactggaagaagaagctacctcacgggagcccattcccgaccctctgcttcccactgtggcaaaatttatcactgagttccccctcttcctgcagacagttgtccattgtgccaggaagaccgaatatgccctgtggaattacctttttgcagctgttggaaaccctaaggacttgtttgaggagtgtttgatggctcaggatttggacacagctgcctcttaccttattatcttacagaatatggaagtccctgcaataagtaggcaacatgctacccttctattcaacacagcactagaacaaggcaagtgggacctttgtcgacacatgattcgatttcttaaagccattggctctggagaatctgagacacctccatccacacccacagctcaggaacccagttcaagtggtggatttgagttcttcaggaatcgaagcatcagtttatcccagtcagctgaaaatgttcctgccagtaaattcagtttacagaaaacactaagtatgccatctggtccctctggaaaaagatggagcaaagacagtgactgtgctgagaacatgtatattgacatgatgctctggagacatgctcggcgcctcttagaagatgtgaggttaaaggaccttggctgctttgcagcccagctgggctttgaactaattagttgatattcaaggaattattttcattccaaacttaggaatggataaaagccaactttttgtacatgagttggaatgcccactgtttgaccaaagatgtaaataaagtagaacctatgtctct

SEQ ID NO: 20 - DNA, 4492 bp, Homo sapiens
tcattccatcatctctgagccagcagagcaatcccccaaagtgctgttagttccccaaacagctccagccgacccctctttaggtcagaacatagctaatcccttaatcccattttctgatgaaatggaccacactgcatcccaaaatgcccaggatctcataggcatccctcatctaggtgtttctggatcctcaacaaaatggcattccgagctgtccccaacagagggtccccattcagcaggttcatccacacctgggtttttgagccccatggcagaactgtcccatccgtctccccctcccccagcacttggaagtcttcttcagcttccagatggaagcccctcatggtcaatgttggaagtggcttcaggtcctgcatccacccagcagatcaaagctggggtgcctggaagagtgcacaatggggtgtctttgccaacttttaagaatacagaaacagcgacccatgaggctgagcctccacttttccagactgcagaatcaggggccatagaaatgaccagcagaaagctagcctctgccactgcaaatgactctgctaacccgctgcatttgtcagcagctccagagaattccagagggcccgccctttcggcagaacacacctcttctttggtgccttctctgcatatcaccacactgggtcaagagcaagccatcctttctggggcggttcccgcatcaccatcaactgggacagccgactttccctccatacttactttcctccagcccacagagaatcatgcctccccatctcctgtgccagaaatgcccactcttccagcagagggcagtgatgggtcccctcctgcaactagagacttgctcctctcaagcaaagttcctaatcttctttccacatcttggacatttccccggtggaaaaaggacagtgtgacagccattttagggaagaatgaagaggcaaatgtgacgattcctctccaggcctttccaaggaaagaggttttgagtcttcacactgtaaatggatttgtctctgatttcagcaccggtagtgtctcatctcccatcattacagcaccaaggacgaatccccttccttcaggaccacctctaccttccatactctccatacaagccacccagactgttttcccatctcttggcttttccagcaccaagccagaggcttatgcagctgctgtggaccattctgggttgccagcttcagcttccaaacaggtgagagcatcgccctcctccatggatgtatatgattccttaacaataggagacatgaaaaagccagcaaccacagatgttttctggagttctctttcagcagaaactggatctctttccacagaatcaataatatctggcttgcagcagcaaacaaattatgatttaaatggacacacaattagcaccacaagttgggaaactcatttagctccaacagctcctcccaatggtttaacttcagctgccgatgccataaaatctcaggatttcaaagatactgctgggcattcagtgactgcagaagggtttagtattcaggatctagtcctcggtacaagcattgagcagcctgtgcaacagtcagacatgaccatggttggaagccatatagacctctggcccacaagcaataacaaccattccagagacttccaaacagctgaagttgcatattactcacccacaactcgacattccgtgtctcatcctcagctacagttgcccaaccagccagcacatcctcttttgctaacctcaccaggaccaacttctacaggtagcttgcaggaaatgctttcagatggaacagatacaggttctgaaatttccagtgacatcaattcatcacctgagagaaatgcttccacaccattccagaacatcttgggatatcactctgctgctgaatcttctatatcgaccagtgtctttcccaggacctcctccagagtgctgcgggcttctcagcaccccaagaaatggacaggtgcagccactaatgcagcggacacagtatcatctaaggtacagccaacagcagcagctgccgtcacattgtttctgaggaaatcaagtccacctgcactgtctgcagccctggttgctaagggcaccagcagcagccctttggccgtggcctcaggaccagctaagagcagttcgatgactactcttgctaaaaatgtcacaaacaaggccgcatctggcccaaagaggacaccaggggcagtccatacagccttcccattcacaccaacctacatgtatgcaagaacaggacataccacgagcacacatacagccatgcaaggaaacatggacactgcctctggcctgttgtctacaacttacctccccaggaaaccacaagccatgcacaccggcctcccaaaccccaccaacctggagatgcccagagcatccacgccacgcccactgacagtcacggccgcgctgacatccattacagcctcagtgaaggccacccggttgccaccattgcgagcagaaaacacagatgctgtcctccctgctgcatcggctgcagtggtcacgactggcaaaatggcatccaacctggagtgtcagatgtccagtaagctcctggtgaagacagttctctttctcacccaaaggagagtgcagatcagtgaatccttgaagttcagtatcgccaaagggctcacacaggcattgcggaaggctttccaccagaacgatgtctcagctcacgtggacattctggaatattctcataatgtcacagttggttattatgctaccaaagggaagttggtgtatttgcctgctgtggtgatcgaaatgctgggtgtgtatggagtcagcaacgtcactgcagacctgaagcaacacaccccacacttacagtctgtggcagtacttgcctccccatggaatccccagcctgcaggctacttccagctaaaaacagtgctgcagtttgtgagccaagcggacaacatacagtcctgcaagtttgctcagacaatggaacagaggctgcagaaggcattccaggatgccgagaggaaagtcctgaataccaaaagcaacttgacaattcagattgtgagcacgtccaatgcctcccaggcagtcaccttggtgtacgtcgtgggcaatcagagcacattcctcaacggcaccgtcgccagcagcctcctcagccagctctcggctgagctggtgggattctacctcacctatccgccgctaaccattgctgaaccactggaatatcccaaccttgacatatcagaaacaaccagagactattgggtaattacagtgctgcagggtgtggacaattcgctggtgggcctgcacaaccagagctttgcccgggtcatggagcagcgcctggcccagctattcatgatgtcccagcaacaaggccggcggtttaaacgggccaccaccctgggaagctacactgtgcagatggtgaagatgcagcgtgtcccaggcccgaaggacccagcggagctgacttactataccctgtacaacgggaagcctttgttggggaccgcagctgccaagatcctgagcaccattgattcccaaaggatggccttgacccttcatcacgttgtccttctgcaagctgaccccgtggtgaagaacccgcccaataacctgtggatcatcgctgcagtgctggcgcccattgccgtggtcacggtcatcatcatcatcatcactgccgtgctctgcaggaagaacaagaacgacttcaagcctgacaccatgataaacctgccgcagagagcaaagcaggtcgcccagtgagaatggctctgtcatcagcaacgaatcagggaagcccagctcagggagacgctcaccccagaatgtaatggcacagcagaaagtgacaaaggaggaggcaaggaagagaaatggtgagaagccttccctccaagaaccacccccagctgctcccacgcgtgcccgcacacacatgcgtgcacacgtgtgcacaaactcacacacagccactgggctctgaccctcagtcgttctttctattctgccccacaagggccagtagtctgtatgtaccccttgggttctcaccttaccccttgtctgaattgtcctgtctcacttcctccgcccctgttcttatgaaatggtgtagttccttaggaaaaaccttttgcggaatgaactgatgtttgcttagaggtttttctaattctctagttagaaatcctctaaaatttctaatttctaatcacatgaattgacgcaatttcttgcaccagttccactaaggcagcagatctctgaaataactgctcatcttggagattcctctcattttcctgccctgactcccctgataagtttcatgggttcagtctgtgccactgagtccagatattgcaactccacttctcccaggaaaaaactaacccaaaacaataaaggaacagatctgtcatc

SEQ ID NO: 21 - DNA, 3416 bp, Homo sapiens
ttacatgtcaattttattaataatatttaggggtttttttaaattataaaaatggcacatgctttttataaaatgttttaataccacagatgagtatcacatccacagtcaaggcatccctttgttctggtgttgtgtcccacttcccaaaaataaatacggttaacactgatgaacactgttgcttgtatgtgatgtcagaaataccccatccgttcatgcacaagtatgtatgtatatacgcatatacatttacacacatatatagacatttatttatatacacatgcaagtatgtatactatattcatgtatattgcataggtttagaaaagagcaaacattttaaaagcatgctgatcatttgtatatgtctagtgaacaccagtaggcaaagacaggttaaacagagaagttccatttatttttttgtttccaccattgctaggcttagatctgttatggcattactacaattgcacttagcattttctattacctgtgtcataaaattcatgaccaagagttcctgtaattgtttatgttgccttccatgaagcatgaaacctaccatagccccaagacttatctatgctatgtttgtatttcaagtaaaggagagttctttcctctgtgatgcttacaccactttacaaggctgtttgtaacactaacactcagtaggttgcctagtgatatttaattagggcaggctacttccgggaaggtgtaacttcagtgtagtatgggggtctgagcagcttgtcttccttccagaaggagtagctaatgaaatcactgagaacagcatattttattcaattatgctatttaaaaatgggactttgttaaaatggctcatcataaccatcaaataaaactactaattgttctatttaaatgaattatattcattttaggaaaagaagtagaaaaacatctaataaattagctttctgattaatctttaacacttatttaatataaaatggcttctgcctgcatcttaattgaaccacctttgaatctctcaactcctttcactctgaatctcatactcagctgattagaagtcctacaggtccttctctgccaggtctgtcagatcgacttggaccctacccttttctgtgtccccagtcatccattatctcttgtctctctaagttttgggccatagcggcagtcctgtccctgaactttctgcctactactgtcaataattttgtcacgcagttgcaaaaatcttccccagatattatgctcaaaatacatcaaaatgaaattaccctctgggacaagtataccttttactcaaaggacacatggatgtccactgaccttgatcatcttatagaattatggcaagcatgattctgaaaatctatcaggtttagcaaatatctgtcttagtcccatgagggtacacaatcacggctgctgcttcctcattcaacaatgtaagccacatgcctctttgacggcacctggaggactaggttatagattttacactgctgagggccatctttggttttacactgtctcctcacagcttaatgagaaacctgaaaataagaaccaagaaaagagtcatgcccttggacaacctcctctcccaggacactgagatttactgaccaggtcccagaaagaaagcagaaaaataattcttaggctcttgtagcatggattttaaaatagaaacgtgaaaattgaatggtatcttcataatgcatagactccagagtctatttacatatgtattcagttatgcatgtaatcatatgtccatgaatcaatcataagtgcatgtatttaatcattatttgaaaaatatttgtcactctgaggcaggcatcatactaaggatataacaatgaatgtaatagacaaaactcttgatttcatgaagctggcatctagaagaaaagacaaattccaatgtgataagtgcagtgcaggagaaccccagggtgtccagcatgggctggaaattcaaccaaggctttattgtaccagccactcattagccagcaatgttttggttcaatgaaaacataagtaggaagagaataatattttgcatttccattttactggagtcatagtagatttctaaaaatgtatctgaaactaagattttaaaacaagacttagaaacactattaaaatgaaagctaagactgatttattctagctctcaggatagaactaggaaaaataagcagagttttcagtgggttttgactaaatataaagaagatgaagtacaaataatatgtaatagtggagtggatatcacagttataaactttcagcctctgttagcatttaaacagaggatacctgaccactctgaggggtgttgtgattaggaatatgtgatttgagggggctaaaattagatgctgtgatttttcaaaagatattttttaatggctttgttgaatggcaggattttattttaaaaactcatgaaaatcttgatttttgatttgttaatctttgctttataactgagaattttaaaaatatctaggggaatggccgttagttatcatttaaaaaattttaaactaagcatgaatttaagagctagtcaaaagaaaacatactaaaaggtgtaatttaattaaaaatacttctggaagcttataaattttgatcagtattcttagtcattgtcaagtaaaattctattagaaatctgtcttactgtccatccaatataaaaaagtgctgtggtttgatattctaagagttaagtgtaatctagtataaccacagaagaaaattctgcctgtaaggtatttgggagccaagtaaatgtacatgaaaggcaatcatggaaaactctttggcttctgccaccagcgtggcaaccacaagggaggtcctacccatggaaataagaaaatagtgatccaagttttcacccaacttttgaaatttcaatattttgagccaaatgccttctgaaatgggaggctttgatagtgggaaatactgaaattatcttttccctcagacctttagtgaaacacacatatagttttcactctatgacagtataaacaactcaaatctatactgtttgttaagaacagtttcaagaattaaaaagtgctttagcgttatgatgtattgacatgtttgagcttcagttggggttcaaaacaaccccaacgaggtgaataatgcatataatacattttagatgaatgcactgaatctcagagcagtgaattcagcctgtgcagattcatatagcaaatgatagtgctgcagccagaactgggtctttagaaattacatattaacatgttttctaagtaagtcattttccatcattgccttcaaggatgttttatatcaattgttcagatttccataatatagaagatgcctccatg

SEQ ID NO: 22 - DNA, 3235 bp, Homo sapiens
tgctcgacaaaggtgtcatcattaacgtacgtacctcttggctgcgatttcccgacttcgcgacctgggctggtgacatcagcaggtgtgaaggcagatgtcgtcctgccagaaactgagcggggggaggaggggggaaggtgccaccagcttacacccttctttttcttggtgttacatgagtgttggataaaggagcccacgccaatatgcacagagaattttctgcagagggacgtgtgctgctgtgagacctttaccaggtgttaatgtggatcaactgagtcttttccttcccaagtctcatccagccttgcctcttctctgggaggtcacatgtcatttggaggcagatgggggctccttgtcctaatgagacataggcatcctttgacttgtgaatttcatgctgtggagccttgtcacagtgtgggggaatttcattattcatgcagtcaaaaagactcgatctgcatcttgactctgccacatacctcctccagactgtgggcaaactgtgtatccttcctgaacctcagtcttcttatctacaaaataggaatgatagtttctgcctgaaagggttcttggaaggagcaaacagaagatatatatagagcacctggcacagtgcccggcagagggtgggtttgtagattccctctgtaacttctcagccttgtttgcacactggcttttttgtcctgctggcttcctggcctctgcttcgtggccttgcgacttcatgcttaagcacggagcagggttggaaggaagaaacatggagtagtggcccctgactggaagcttcttcggacaggtgtacaacccttccagagcccctgtagttgctgccactgtcactgctgctgctgcaacctcaagataaggatcacactgcccaagttcagcctgctgtctgggtgtcagcctggagcccaggcagcacggtggccattcattgctgcttgtcagagaagaatgcagctatcttctttcctgcgtgtgctggcagccgtctgggtggcattagtaacccagccaccccgtgggccttctccacttcagctcaggtctttgctgagagcctgagttgtagacggaggctgtgaatgcgggcttggtgaagtgggctgagcacgccagcagatgggtgggcgatgggcttcagcagtgtcccactgctgactgtcagtctgggagtggtggcgtccccttcttccctctgcctcacagaagttgcctcctgaagttgccgccttagtctgaaactggggggtgcaggggtgtaggggtagcgggcagctttgcagaggagaggttaggcaggcaggcaaagcttgatgggttttgtgttttgcagagcaccgtggcctcctgggatgctaaggtcaccctcaggtcatcccaggtgtttgctcatggcaactcgcttccctggcggttgtcaaagcccctccaggcccatgcttgtcttcaccaaggcctttctttctccttcagaggcccctgggagcagctcctgagctggtgctgaggagcctcaaggtacaagatgggaaagaaattggaggccacaggctggacacctgattggaacaagagctatagcctgagcgtccaggtgtccagccaagttcccaacccatcttccctgagccgcttaaatttacattgttctcttgctccctggaggaatggcaagttttctgttttcctctccctacatggatccatatcttcctatagccacacagaaggtgccaagtaaatgtttgttgaatgaatgactgacctctggacaagaggttttcctgcttccccattgattccagctgatctctgggcttctttccatggctaccgaaggaagagtaaagtttctcttcaagcagccgtgcctctgggctctcagctgtgcccatctttctcttccccacagggaggatgtcccatcccagagcctccctgggcccctgcctctgctggcccatacgtgtgtgggctgggattctgtcctcctgtccttgtcctcatctgctccctatggttttgctccttcttccatccccccactcatctgggaccctccagccactaagagactccacagcagccctaggccagctctagcctagtgtcttccctttgctaggtccccactctcctgcatgaggcgtccacgccaggcactgtcttcactgtgtaatgtcacccactccatcttagggatgcttgggtcatattttgaagggggggtgtttgagacctctcccttctctcttcccccatctcacctccacgccttcggagagagaagtgatcatgtgaccgcggaaacagggatcagaaaggaaatcaaataacaggaattccatcctggacactggggcctgacaaagagctcttggaccagtgctggatgcaatttgggcggtttggtttgaatgggggaaatatgagtttccagaacagggtatttgaaatcatggctactcagaaaattgaggcagtggtcactctggctgtaaatgcggcactctgtgattgtcaagacctttgtaattgagggtgccttggctgggtccaggatatacttcatcataagccatatctggagccagcatgaattacaggggacaggaattcccattcatcggtcacttcccacatggggctagggatttcgtgtgtacactcattccatcttctcatgtggctctgtgaagtaggttttgatattccctttttacagatgagagagtggagactctgaaaagttaaataactggcccagatttagttagtaaacagcagaggtggactttgacccgttgctctcactggccccaaagcctgtgttcatgttacacactggtcccctcccactccaggtgtctgtactttttgtgtcacctttgagaaaggtggtcttttagtttctttagccacacggtgagcagcttggactctggggatacactaaacttgccagctctcttcaatcctcacatcctgtgtttcattgctagtgtccctccaggatggatattccagtcctcgcagctcagggctccgcactccccatgaaagaagcataacaattagcaccaaaagcaagctactggggaggctgaggcaggagaattgcttgaacctgggaggcggaggttgcagtgagccaaaatcacaccattgctctctaacctgggagacaagagcgaaactccatctc

SEQ ID NO: 23 - DNA, 3562 bp, Homo sapiens
aggtgtgtccatggcggcgcttgacctgcgagcggagctggattcgctggtcctgcagctgcttggggacctggaggagctggaggggaaacgaacggtgttgaacgcccgggtggaggaggtaggcgcctggggcgggcaggagggtacacgggcgtaaactgagtctcaccgctttcctctccctgcagggctggctctcgctcgccaaggctcgctacgcgatgggcgccaagtcggtagggcccctgcagtatgcttcccacatggagccccaggtctgcctccacgccaggtgaggaagcttccatgctgggctgggtgggcgggcgggcgcgttctaggcccgggctgccaaagctccatcctcccttctcgtccttcagcgaggcccaggagggactccagaagttcaaggtggtgagagctggtgtccacgccccagaggaggtggggcctcgcgaagcaggtgagccccctcttccttctgcagaaccccttcccagtgtcaaagacaaaatgcaaattatggagatgatttaaattaggtttttgcgataagagagagcatcccagagcagaagaacagaatgtttttgtagggtggttttgccttagacttttataggaagtagagaaattgttggtgagttgctttacactgggaatagatttacaatcacatacatttcagtcagctgaacagaaaatatttatctgtgtgtctagctagtttcagagggacaaacttctaatcccagttaatcatcctgagacaaagaatggggagttggaacgtctatgcctggtctgttggcatgttcaggtacaatgggtaagatcagtgtcacaggcaaacagggtcatcagtgggtcttacaggagtcacgggaaagagtggacaaacagtctcatctgaatcacaaggggaaaggctgtgttttgtggtaagctgtttcctggaaccccaaagttggaattttccaaccaacagtgttttatagaatcatgagctcagatcaagctcaacattgtcaccaagatgataaaggtcagggagtaagatcccagcctcctccaacctttctttcctcaggtctgcggaggcgcaagggccccactaagaccccagaaccggagtcctctgaggcccctcaggaccccctgaactggtttggaatcctagttcctcacagtctacgtcaggctcaagcaagcttccgggatggtgagtggaccgtgttgtttggctctgtggccctcagaccctctatccacagggaacacttgagcactgctgccatggctggggttagtctgtgaaaggctttgcaggttttcctccatccaaacttccgttgtacacccattattttttccaaaagcatttactggttgttggcagcattcgggttcatgctagctgctggggatacagcagggaacaaaagagacaaacacttttcatgtaatgtttagaagcagacaaaggcaacgtgcaaataagtaggcccttaacataagtcaggctgtgaaaattgttatgaaagacacataatggagtgggacaggagtgggccaggggaggtctctctgaggaggtgaaggaaaagctttgtgggtgattttggggaacagtgctctagatggaggaaccagccaggacaaaagccctgaagccagatatatctggtatgtgccgaggccggtggcctagagtggagtcaggtgatgtaagccctgatgaagactgtgggacccacagagaggctctgagcagaggatggtgcaactggctgtacagggtcacaggaatgcttgggtgctgggcggggacacagagcagagggaggaagtaggtgtcagggagcagccagtgtgagaagcagatagcgtcactggaggaggaggtaagtggtgggaacctgcacaggttttaagaatagaagccccagaatttgctgacagataagatatgggagtaagggaaggaaaggagtccaggagagcctgcggtctccacccagaacccctgggaggatggagcgaccctcacctgctgtgggcagctgagaggattccagaaggcaggagttggtgtggtctgtgtggtatccaccgacgccctgctggagagtctgagtgggcacttgggcacatgtatctggagtttgggagaggcctgggctggagagagatttgggagtccactgcatagcactggtgtttaaattccaaagtttttgacacaaacactggtttaaagctgagataggatgagatcagcagagggcctggggagtatggacgggaggtgagggagaagaggggagaagccagtcaaggaaactgaggagcaacacctgggggcaggtgtcctggaggccaagaagagaaagtgtttcctggagcgagtgatccaatgtgtggtcagccctgctgctgaacaggaggccgaagacgagagctgcccggaggactgggcagcagctgttccagcagagacatcagcaaaagccatctagaggtggatccagagtgtggactaacagagaaaagaagtggagggagagcaggcctgcagctggccgcagacatagccagcctccagaaccgcattgactggggtcgaagccagctccggggactccaagagaaactcaagcagctggagcctggggctgcctgacatgcgcgcaaagaggcagggcagcgagcacagctgttctccgacatggctacgtgatctcaggccttcttccttcacaattagctcttgcccctaccccacgccagctaatgccccttctgtgtccctgctctgcatgtttccattttccttaggtgtgaagtttgaagaggcaaacagtaattttgaaagccactactttgaaaccattctaaggcctgagttcccataggacacactcacataggcaggtacacgttagtcaacaattggaactgcctcttggatcactcagctgtgctttcatggctggatgatggaacactgtgcgaagagagatgggggccaggaagtagcgcttcatgcttagtacatcctccaaattgtctttgctggaggagaaaaccgtactcagccaaaagatcaggacaatatgacttgagtccacaaggacacaaacacctgagtagctgggcagcccttggcagggtctaagccaggaagtaaaaatgatctggcctagatatttaagggaactctaggaagaggcctaggtttttaaaatcctgtctctttgtcttaccataagaggctgagcctctcttcatttttttgaagggccacttgtgttttctgttctgggaacttcattcatttttctactgggttgttgatctttgcagtaatttctaggagctgtttatgtttggaggtaattggtcctttgtccatatatatgagatgtaagtcttattttccagtttatctttttgcttattttttttgactttttattgtaaaataaaacatcaaactgcacagaacagttgaatagcttaatgaataactacagtaaaagctatggtaaccact

SEQ ID NO: 24 - DNA, 2131 bp, Homo sapiens
gaagatgcgctgttccaggggcctgggtgggagcagcccaggagcctgcgtctcccctcctcggccctgggaggcggctggactgtgccacacgggacgggtgctgagggaccgctgggtgcccacctccctgacccctcctgcaggggtgcctgccaagcagcctgggcactgccgtctggaagatgcgccgtgccggttctacacggtgttcccttgctccaggcagaaaggcagaggagcctggcaaccatgtcccaagttggaaggaagctctgagaaccctgctccccagaaatcctgagcaaaggctggctggcctacaggagcagtctagagtaagagctgtttcctggcagaggatcaagtatccaggtcacattgaagagacatgtgaggactccaatggagaacaatttgagagtgagaaaccagttctggaggccaggaagttcaagatcaaggtgttggcaagttcagtgtctgctgaggacctgatctctcttctttcaagatggcatcttgttgctcttccctccagagagtagaaatgctggaacctcacatggaggaaaaaatgaaaaggaccaatgctagttcccttcagcctttttatgaactcactaattcccattgagggctccacatacatgacttaatcacctcctaaatgcctgacttcctaatactctcattttgaagattaaatttcaacatatgaatttgggggtcatattcagaacatagcacttatgatactatctcaaatcatagactgctttctcggtgggcatctatctcagtttcttttctgttgttattacagagtacctgagcctgagtaatttataaagaaaatacatttattttggctcatggctctataggctgggaagtccaagattgggcggttacatctggttggctcctggtgcgggcctcctgccgcatcataacaaggtagagaagtgaaagggaaggtgggcttgtaggaagggggcaaagcatgaagggcaggcttgctttatagaaactgggacacagcaccccacaggatgagtgtataaaggctagacagacaaggggattgttgtgttgaacctgaaaagtcccctcacctggcaatgctctctgttccctgtgagaagaaggggtttcttttcttctgggatgattcatcccttcacctgtggccttccctagagcccatccttgtgccattctgctctccaggcacatctctctcagatgaattccctcttccctcttcctctggcccctcctgtttatttatctgtttcctcaccactgtgtaatcaggtaggccccactgctgtgacctctggaataatgattgaatctgccctatcctctccacagtgatgcctgggacccagctgagatctccatcatctctcaaaacaactgtgcactgacctcctgacctaagcccagcctctgcccactcagactgaccttcacgcagctgcacaatgctgcatttggaagccggacctgaccacattcgtttccctctgttgagattcatgttctggagaaatgaaaatgctgtctcagtggaatgttgattagctggagtggagacccaagatctctgtccaggcagggccatcaaaacatagaagtgctcttggctttccaaaatctgcacatctccaacttttcttttagctagaggtggccctgtgattgatgagtgaccagccatgtgtggagaaaagcaatgtgaacaacttctgacttcgctgttaaagaaaattggtctgtcccccatttccttgcattcccattcttactggctgaaattcaaagctgataaatggagctagagcagatagctgggaaaatgagttgagggtcttacattaagacttgccagcaagaagaagaatttttccagggttcctgacaccaccaaattgttcgatcagctctgaactctatactgagattctttaagtatgagagacatgaactttgactggcttaagtgagctattgaggtctctttgctattgtgacctaactcaggggtcagcaaataacactctgtgcgcaaaatctgacctacgatctgtttttgtaactaaataaaatttcactgaaacac

SEQ ID NO: 25 - DNA, 2110 bp, Homo sapiens
gtgctaagattacagttgtgagcaactatactccactaaagcagatagaattataatgcttggagcccaatatgcttatattttcctattttctgagtttggatttgggtctggaaaggtatctttatcagttaggatgtctagtaacttgcttgcttttttttcctgttaccttttctcccttaaatattttttttttttttttgagacagagtctcgctctgtctcttgtgggtctcaggctggattgcagttgcgcaatcatgatctcggctgactgcaacctttaccttctggattcaatcaattctcctgcctcagcttcctgagtagatgggactacaggcgggcaccaccatgcccggctaatttttgtatttttagaagagacggggtttcaccgtgttggtcaggctggtctcaaactgctgatctcatgatccacttgcctcggcttcccaaagtgctgggatcacaggcatgagccaccacgcccggctttccctcttaaattttaggactataactgtatacttttattttttaaattaccatatagtaaaattggctctttggttgtgtagctttatgtgttttgatgtgtgtatagatggatgtcataatcaggagagagaacattcccctaagcccagagatgtccatggtgctatcctccacagcatgtttctcggcagtcactctgcccccagccccaaacatggggcacctgcctgtaggtgccacagaaggcaacatcatggcctgttaaatacagtaagacattcttcttcaaagggttaacttgttgaactctccttgtcctttgttccctgctttcaaggccagactcccttactctctgtgttcctttgccctgggaaacaaccttcctcttggtctttatctatagagtccacattccacatctgctcctcactctgtaaatcatccctccggtcgaaacactctctgtctccactaaaactgttttctcactattgtaaccacatccctgcacttctcaaattagccaattgggttcagcttagattgtgcagtccaactctagccaacagatactggacatggcagtaggagcccaatgaattaaagataaagtgactgctttcctttgttcagagtgctttcatggtgaccaaactaatgagcagcacccttctgcagaggtaaactttgccttgctgagaaaccaattgttggcgtgtttatttcatttatgactttgagctttatttctaacatggcccaaagtaatcctcttttcttgaacacatggtagaatgccctaggtgaatccctccagtcttccagtaccatccttgactcctctctctgatgacacatgaactttatgcttttgcacacttcaggcaacaccaaaagaaaggaaaagaacagcttagcttcttaatgtgtgtaagaaaccacagtgaaaaaaaaatcaggtgtgttgttgaggctgctaaaagctttccttttttttctgtgccagttctcgctgcctcattggttgagatgggatgtcctttttgatgtcctctttagagagtgttatcctcacctttttgcatagtcctaccaaaagacacctcacatgcaaagtgtaacagaaaattacagtcatgactttagttttaaaaacaggacgtatattcatgaagaatgtttgctgttttcccagtgggttaatcatatgaatataaaacagactaaaagtatcaagttgtttttgcatttatttattgtagaaataaaatggattgctacctctgagcttctgagaagctgttaacctgtgttttactttgggtcataatgtcgctttctgtgatctcatatgaagtgacgttttctagaataatccttattctggtatttcggggtcttttattctgcctgaagtggttgtgtgaagtcacagaatatgtgcatgtcctcctatgtagagttaaagggctgaaagagtggcctcaagccttcccctccctcccaggtgtgaaaatttggatttcaaggtctgggaggccatgtttttttcagaccggttaaggatgatcattttatgttaaataaacattgggataaactt

SEQ ID NO: 26 - DNA, 2455 bp, Homo sapiens
aataaaatatgcaggatgctagatggcaccaaatgccacggagaaagagaaagtaggggaggatgacgaggatgttggaaagggctatggttttgtatctggtggtcagggaaggcctcattgagaaggtgacctgtaatcaagactgcaggcggtgcagagagaaccatgcagatgtctggcagaagggcttcccaggcagagagagcaagtgcagaggtcccgaggtgggagcagaccttgcacagttgaccagcaacatggaggctggtgtggctgaggagagagagctggtggggagtagaagagctcagagatgtagcgtctgaaccttggtttgcctctgagtgaactgggaagctgttggaggtttcgagcaggttaggaacatgatctcatttgtgtttaaggacgatccctgtggctaaggtgttgagcagcccagcgtaaggagccagcgttcttggacctttgttgtaaggctgggaggacggggtcctgtctttgttaatctctgtatctgctcccttcccagtagcctgctggttcggagagcctcctgaaagttctgtcctcacccagttctctcctctttctgcccagaggctcctcccagcctcaaggggagaggacaaaagatatctgtgaagttttaacggcagaataggattgataagttaatatggctggctcttgtattcttttcagccttgccttaatccagtgcttctcaaacatgtatttctgttccctgaatctctttcctcccatggagacaaaataaataccttccctgggcagagagaaccctttgagtctctgtattctcagttatctgatcccaggctggggagaaaggacagaggtctggggttaggatgagataggaggtggggactgaagggtgacagtagtctctcctagcgcttacagtgttcagaggaaactccttacccagagtctagccctcatgtctcatttttgcatttcgagtagtccgagggcttagattctgagttcttctctcagtttgaaccaatttatcttctttttttctttcttcctttttttttaaaaagagtttctctgtcgcccagtctggagtgcagtgcagcaatcatagctcactataacctcaaactcctgggctcaagtgatcctcccgcctcagcctcctgagtagctgggactacaggcatacaccaccatgtttggctaattttaaacatttctgtagagacagggtctcatcgtttcccaggctggtcttgaactcctggcctcaagcgatcctcctgccttggcctcccacagtgctggaattgcaagtgtgagccatcatgtacagcctgaaccaatctttcttctgtcctcagcttgagatcttcttagcccagagagcagtggagttgagtgaggaggcagatgtcctgtctgtgagccagttccagctggctccagccatcctgcagggccagaccaaagagaagatggttaccatggtgtcagtgctggaggatctgattggcaagcttaccagtcttcagctgcaacacctgtttatgatcctggcctcaccaaggtctggcttccccttgatgcaaggctctgccatcttgagcagctctgcctccttgtattcctcctcttgttccatgaccccttaaaccccatccctgcctcctggccattgccatccactggggataggggttctctttgggacaagagggggaggtttcacatatacaggaagaatctgcttgcttcctgagtaggacaggggaactgggagtgggttttccttaaaaggaaagggtttaaggatgtgagggtaagcggccagttgggggtttggtttcccgagcctctcacctccccagcagctgaatgggaatgctcaggatgcacagctaacccagcactcacctgagtgccccgcacaggtatgtggaccgagtgactgaattcctccagcaaaagctgaagcagtcccagctgctggctttgaagaaagagctgatggtgcagaagcagcaggaggcacttgaggagcaggcggctctggagcctaagctggacctgctactggagaagaccaaggagctgcagaagctgattgaagctgacatctccaagaggtacagcgggcgccctgtgaacctgatgggaacctctctgtgacaccctccgtgttcttgcctgcccatcttctccgcttttgggatgaagatgatagccagggctgttgttttggggcccttcaaggcaaaagaccaggctgactggaagatggaaagccacaggaaggaagcggcacctgatggtgatcttggcactctccatgttctctacaagaagctgtggtgattggccctgtggtctatcaggcgaaaaccacagattctccttctagttagtatagcggacttaataaaagaggaaaaaactcttg

SEQ ID NO: 27 - DNA, 2262 bp, Homo sapiens
gtatagatgcatcacagttggctcattcatccacttcttgatgggcatttggcttgtttccaggtttttgctgtttcagacacagcttctatagattgctttctttctgtatctgagcctctttctaggcttctaggaaagcagtgtccttccttttttccttctttttggattggatttcttcctgctgaggtcttgggtgtctggtttggacatggctgtgggtctacctggagtctgagctctggcctgatacagaggggtaggagtggtgaggagggcagtgtccaaggcaagtcgaggctgggacatggcgtctctcttgttggtcagtgagctctcggtccctgtgggtcaatgccttcattcattcttggcgagtctgatttgcaggcttgggggccaagcaagccactgtggaccctcagagcatacccttatttattgactccactcacgtcctaggtgggtagagatgattcctgggagagctgtcctcagacagcccaggctgtgatttggaagggcccatccatccttctgaccagtggtgagttatttggggacccaggagatgagtgcaggcttgatgctgagacttagggtaattcattgcccagagtgtctgctgtctttgctctccttctaaagtggctggcataattagattggggacttgcttgtcttttgtgatgtacaaacttgtctcttctggtattgacaacaggctgtttgacttcacagatgggggtgggcgtgggaaacctaagcgtgatactcatctatatagttctgtctgcagttggttattggaattgggggactgcgttccctagcacttctagatgtcttgccccaagagagactctcggcaggctcaacgtgtgctgtgatcattggagcttctattgaacaggattgccctgaaatggagggtgaatggcaaccgttggatatctccgcgtgcgcacctgcttaggtggaagacaagaaacggtgcaggaaagcccctttcattttatttattttggtctttgtccagcattcaaagttaactcaacttttcagaaaggttttatatatgagtggtgagagcagagtcgaccaagatgttgcttatgatcatccttgaaatttatgattaaaaaaagaagataaaatttgcaaagaacttgctgccttggcagctcccaagagaattcagttcctgaggttgagagggagctggttttagggtgctttcccacggagagctgccggagggctcctctgtgcttctgtagacaatctgcaggccagacattccaactgtcttcacgaaataggttctccttttttctttgcccccacctgggagagtggggccagcctggcagcaatctcaccaagggagtagcaggatcaacaggctgttacagtctgtcctaagttgaaaagaagattaattttttttaagttacagtttcaattaaaggaagatggaggaatgtaataacatgcaataagatttatgataagtacaaactgtgcttgaatacctacatttaaagcatttcatgctttcagaagtaatagagctgtgggcccaaagacgggatggaggagagaagagggtaacatttcaaaggtgccctctctttgtactgttaatggttattttgatggattacttcatagaccaacgagttgatgactgggggtccagagtgtgcatgattgatgtagatgattgcgttagaagatgattacctagttattgcagtgtttagaaccaatggaagaaaaatgctttgaaaatgacaaattccacaaattatacaaagtttctaagaagaactcctggagattatttatagaagctctggtaatataggatgagtgtggccagagtagaaaaaaatctacttttatcaaagcaaaattatttaaaattccatctcacaattatacattaaagaattttataacaatacaaattttggccaggcatggtggctcatgcctgtaatcccagcactttggaaggctgaggtgggtggatcaccagaggtcaggtgttcgagatcagcctggccaacatgatgaaaccctgtttctactaaaaatacaaaaattagctgggcatggtggtgagtgcctataatcccagctactctggaggctgaggcaggagaatcgcttgaacctaggaggtggaggttgcagtgagccaagatcgcactattgcactccagcctggatgacagagtgagactccatctc

SEQ ID NO: 28 - DNA, 1894 bp, Homo sapiens
attatttaaagggaccacagagtgtccaaaagcaggcgagagctggagagtttgctcctataaagcagcagttgcagtgggtttgaactgggagcctgtggctttcttgccaaagggtttttcataatctccacactacagtggtatgagacatagtctttattatcctgaggtggtagaggagatagtccaggacttaaagaatactggaaatttaacaggaaaatcccagaagcaagaaaactaccaagtggtgaggcccgaatctgagcaggaactgcccaaatctcaggccgacaactaaactacacatgcacagtggcaatcccagagaacctggcaaaagggtaagcagagaccaaagagaaatctacccctgaaagacgggggaaccatgtgagatttttaagttttttgcttttcaactgaggcatttcccgaactgctgcagcacagatgacagaaagcagctgcctccctgccttgcgatgggtatcagggctgctgggaattgaggcgggccaggggtgtgggggtcccctgaagcaagggaaccatagagaagacaacattagagtgtccataaaacatcctaaggaacccacagagaacccactagaactaataagtaaagttagcaaggttgaagaattcaaggtcagtatacaaagaccaattgtatttctgtgtattagcaataaacaattggaaaatgaaattttaaaaattcaatttcattagcaatttcagtagcatctaaaaactcgaaatatggaggaataaatttaagaaaatatttgtaggacatgcacattgataacaagccctaaataaaaatagaggtggactttgctcatggagtgttacatcagttctcccaaaactaattgataatttcagtgcaatctctggtaattatagcagatttttttttgtggaaattgagaagctgaatctaaaaccgatatggaaatacaaatgagtaagagtagccaaaacagtaagttactcatcccagtattaagactgtgcagctacagtgatgagagtgtagtgctggtaagaggactggcacgcaggccagtggggtggaatggagcccggaaagtgaaccacaaacttttggttcacagaggtaccaggataattcaagggggaggaattgtcttatctacaggtggttctggcaacagagtattcacaggaaaaatggtgaacgttaacccttgcatcatatgcaaaaaattatttgaaacaggtcataagaactaaaaccatcaaacttctaggagaaaatacagggaaaaatctctgtggccttgaccatgcaaaaatttcttgggacacaaaaagcatgagccacaaaagaaaacgttgataggtgggatctcatcaaaatttcaaactctctttctttgaaagacagttaagaaaataaaaaggcaagccacgccctccaaaaatacatgcagtacatatacaggacaaaggacttatttctagaacctgtaaagaactcttagaactcaataataagaaaacaacccagtaaaacaatgggcgaaagatttaaacatgcatttcccagaaggtatatgagtgggcattaagcacacacagggtatcattatttatcagggacatgcaaattcacccatgagctacctgaacatacttgctagaatggttaaaatgaagaagagacagtcttcattgttgataaggatatggagcagttgaaacgctcacacgttattgataggaatgtaaaatggggccaggtacagtggctcatgcctgtaatcccagcactttgggacgccgaggcaggcggatcacttgaggttaggagtttgagaccagcctggctaacgtggcgaaacctgtctctact

SEQ ID NO: 29 - DNA, 2486 bp, Homo sapiens
taccttccctggagccacactttgcccaggtgcctcagccttctgtgagtagcaacggtatgctctaccctgcactggccaaggagagtggatacatagcccctcagggagcatgcaacaagatggctaccattgatgagaatgggaaccagaatggatctggcaggcctgggtttgccttctgccagcccttagaacatgacttgctgtccccagtggagaagaaaccagaagctacagccaagtatgtcccctccaaagtccatttctgttcagtgcctgaaaatgaggaggatgcctccctgaagagacatctcacacctccccaaggcaacagcccacattccaatgagagaaagagcacccacagtaacaaaccatcttctcatccccacagcctcaaatgccctcaggctcaggcctggcaagcgggtgaagacaagagatcttccaggctctcagagccctgggagggcgatttccaggaagaccacaatgccaacctctggaggaggctggagagagaaggcctaggccagagcctgtcaggcaactttggcaagaccaagtcagccttctcatctctccagaacattcctgagagtctgagaagacacagcagcctggagctaggccggggaacccaggagggttaccccgggggcaggcccacctgtgcagtcaacaccaaggcagaagaccctgggaggaaagccgctcctgacctcgggagccatctggaccggcaggtttcctacccgcggcccgaggggaggaccggtgcctcggcttctttcaacagcacagacccaagtcccgaagagccgcctgccccctcgcacccgcacacatccagtctgggccggagggggcccggcccaggcagcgcctcggctcttcagggctttcagtacgggaagccccactgctcggtgctggagaaggtctccaaattcgagcagcgagagcaagggagccagagaccgagtgtgggcggctctggttttggccataactataggccccacaggaccgtctcaacttccagtacttctgggaatgacttcgaggagacaaaagcacacattcgtttctctgagtcagctgaacccctaggcaacggggagcagcacttcaaaaacggggagctgaagttggaagaggcttcccggcagccctgcggtcagcagctgagcggaggagcgtcggacagcggccgtggcccccagaggccggacgctcggctcctccgtagccagagcaccttccagctctccagcgagccagagagggagcccgagtggcgggacaggcccggctcgcccgaatcgcccctgctggatgcccccttcagccgcgcctaccggaacagcatcaaggacgcacagtcccgtgtcttgggggccacctcctttcgacgtcgagacctggagctgggggcgcccgtggcgtcgaggtcctggcggccacggccttcctcggcccacgtggggctgcggagccccgaggcgtcggcctccgcctccccgcacacgccccgggagtggcacagcgtgacccctgctgagggcgacctggccaggcccgtgccccctgccgcccggagaggtgctcgccggcgcctgactcccgagcagaagaagcgctcctactcggagcccgagaagatgaacgaggtggggatcgtggaggaggccgaaccggcacccctgggcccgcagagaaatgggatgcgtttcccggagagcagcgtggccgaccggcgccgtctcttcgagcgcgatggcaaggcctgctccacgctcagcctgtcggggcccgagctgaagcagttccagcagagcgccctggcggactacatccagcgcaagaccggcaagcggcctacctccgccgccggctgcagcctccaggagcccgggccactgcgtgagcgcgcccagagtgcctacctccagcccggccccgcggcgctcgaaggctccggcctcgcctcggcctccagcttgagctcactgcgggagcccagcctgcagccccgcagggaggccacgctcctgccggccacagttgcagaaacccagcaggctccccgagatcgcagcagctccttcgccggtggccgccgcctcggggaacggcgacgcggggacctgcttagcggagcaaacggtggaacaaggggcacccagagaggggatgagacccccagggagccatcctcctggggggccagggccgggaagtccatgtcggccgaggacctgctggaacgctcggacgtccttgcgggccctgtccatgtgaggtccaggtcatctcccgccaccgcagacaagcgccaggtacgtgcaaccagcaagtcctggcctcgaactgtcccttcctccctagaagctttagtggggctccccaaccccccacactctcacccgctctcccagttcagttttccttgtgattacagaaaagtagcatttgttttc

SEQ ID NO: 30 - DNA, 3164 bp, Homo sapiens
catttattattttgttagtctctattcatgacaaagcatcaccatttttcacacacgattgcaacacaatggtaaagtaacaaataccaaatccaatggtcatttttcagttcatctcatgtgacctttctgctgtatttaatgttcttaatttctttatttttagaaacagagtctcgctatgctgcccatgttggtctcaaactcctggtctcaagtgctcctgcctcggtctgcccaagcattgggattacaggcatgagccactgctgcctggcctatgtttaatgttcttgactggtcttctcttaaactcttttaatttggcttccttgattccacttgcccctgtttctctgctacctcccagagaattgctgtgcccacctttgttcccaaattatgggcatgtcattaaagctttttttcctaggccacttctacctagatgtgactatctccacagctcagatctcatctacactccagacttacttcagactgtcttctgaagtttttattgatggactaatggatacctcaggctgactatatgattaattaaattcctctctgcactttttttttttttttgagacagagtcttgctctgttgcccaggctggagtgcagtggcatggtcatgactcactgcagcctcaaattcctgggctcaagcgatcctcccacctcagcctcccgagtagctgggaccaaggcatgtgcccctacagatggctaatttaaaaaatttttttgtagagacagtgttttcctacgttgcccagcctggtctcgaacttctaggctcaagcgatcctcctacctcagcctcccaaaatgctgggattacaggtgtgagccactgcacctagccctcaaactcttaagtgttcttccatccttgtagcttacttactgtaccaccagagttatgtggaaaatgatcttatcatgtcccttgccacttaaatcagtagacctgtatctgcaggtaaaagatcaaactctctagaaggatagccaaagcaattgggatcggtttctaatctttacagatttatccctcatcatttaatatttaccctgctttctaacaaaactgagctacttgcaattcctttaaagcaacatgaatgttcacattgtcagtctaatccctctcttcatcagatgcttggtcacccacttatttatcagtaatgataacattcactaatttatatgcacctactttgttctggcttcttactaggcagacggtatctttgatcctcacaataattttgcagagtagattttttttttttgttcctgttttgcagatagagccaaggcccaaataggcgaacaaaggttcaaattatgttagcagctggggataataatctgcgctctcaatgaacttaaggttcagtagagaagacagacttaaaaatcaacaaatacacatttaagaaataactgtatttgaggtatttataatttttgaggtaggtataattaaagtatggggacaaaagtgggaaaagacatttcacagagtaagtgcaccttgaactggtcttcaagaataagtaggaagaagaatgccagccaaagggaaacagctggagcgcattcttgagaaaaacacgtgcaaaggcacagaagaatcatgtaaaactgctaataattttgcttggctagagcaggagagtgatctaggtagataaacttgaatgtagatatagttgtgagaattagatctgggagacaaatttaacccagagaccccccatattcaacaccaggtctctggttttggtgactggatagatggtagtagtattttctgattctgggaattttgtaggcaaagcaaattttagagggaagatgatgagctctgttatggacatgctgagtgtgaaaagcctgtgggatatccatatatttatattaagataattgaatataggaaactagagctaagaagagagaagcttgagggaaatatggatttgaaagttaccagtatgttgggaccacagcagagaatatgaagattatatagcaaaatagaggtcaaggaagtaggaggagaattaagacaagtgaatgagtttcaagaaagggtatatagtctaaaagtagtctgagaacaagaaacagccctctccatctccagtttccgcatctccagtttctggcaaccactctcttccttagctccctaaagcctaggaatgctaatggagcacattttatgctggttctacacacgtctttatgatagcacccctacaccctgtccacacctttgtaaatattctctttatcaaattatcccagtttgagtatatcattgattcctgctggaacccatataatgaagttatattttaccctatggtgagtatggggagacacataggaattgtaagaaagagagatactgatcagatttgcttttcagaaagattattggtgatgattcgaagaatagattagagaggtgtaatactggaagcaaggagaagaagaagtaggaaacttgcacaaggaccaaagaagatacaggcttaaaatgggctgggaggagtagagagggatttaaattttagtgatgttagaaaaaaagaattctagcactcagtcactgagtgttagggttgatgaaggaagaattgagaatgtctcctaagcttatgacttgagtgacaagggacaagctggtacaattaaccatactggtaataaagaattaattttgagggaaagatagagttcacttttggacatttagaatgctgggaagatacctaaaggtttatgcccaagagatagatatagtgacctggagctacattgtctgatagaatattctgtgataatagaaacgtttcatacttatgctgtccgatgtggtaactagtagccgtatgtggcttttgaacatttgaaaatgttgctagtgtgactgaggaacaatttaaattgtatttaattttgatttagttaaatactcacatatgctgctttattgaacaatgcaggtatagagctgagaacggtttttgcacttttgaaggattaaagaatcaagaatattttgtgatattaaaattatatgaaatttagaattcaatatgtagaaataaagccatttttaattgaaacat

SEQ ID NO: 31 - DNA, 2574 bp, Homo sapiens
cagcataatgcgaggcaatgtccagccgttccacccggcatacaagcttatggagcagccccctttgaagatctccaggtggacttcacagagatgtcaaagtgtagagatcttcttcctagatttgaactgcccttacggatcggctcagataacaggccggcatttgtggctgacttagtacagaaggcggcaaagatattacggatcacatggaaactgcatgctgcctactggcctcagagttccggaaaggtgatcgagtgtggatcaagaactggaacgtagcctctttgtgtccactgtggaaaggaccccagactgtcgttctgagccctcccaccgctgtgaaggtagaaggaatcccagcctggatccaccacagccatgtaaaacctgcagcgcgtgaaacctgggaggcaagaccaagcccagacaaccctttcagagtgaccctgaagaagacgacaagccctgctccagtcacacccggaagctgactggtccacgcacggccgaagcctgaggaagctcatcgtgagattcatttttcttaaattttggacttatacagtaagggcttcaactgatcttactcaaactggggactgttcccagtgtattcatcaggtcaccgaagtaggacagcaaattaaaacaatctttctgttctatagttattatgaatgtgtggaaacaataaaagaaacttgtttgtataatgccactcagtgcaaggtatgtagcccgagaaatgaccgacctgatgtgtgttataacccatctgagccctccgcaaccaccgtttttgaaataagaataagaactggccttttcctagatgatacaagtaaaataataactagaacagaagaaaaagaaattcccaagcaaataactttaagatttgatgcttgtgcagccattaatagtaaaaagctagaaataggatgtggttctcttaactgagaaaggagctaaagagtagaaaataaatatgtttgtcatgagtcaggggtttgtaaaaattgtgcctattggccatgtgttatttaggctacttaaaaaaagaacaaaaaggaaccggtttatcttcagaagggggaagccaacccctcctgtgctgccagtcactgtaacccactagaactaataattaccaatcccctagatccccgttggaaaaagggagaacgtgtaaccctggggatcaataggacagggttaaaccctcaagttgccattgtaattagaggggaggtccacaagtgctctcccaaaccagtatttcaaaccttttatgaggagctgaatgtgccagcaccagaacttctgaaaaagacaaaaaatttgtttctccaattagcagaaaatgtaattttcttacttacataactgttacttcttgttatgtaagcggaggaaccactatcggagacagatggccttgggaagcccaagagttggtgcctactgatccagctcctgatataattccagttcagaaggccgaagctagcaacttctaggtcctaaaaacctcaattattagacaatactgtagagctagagaagggaaagactttatcatccctgtaggaaagcttaattgtataggacagaagttgtataacagcacaacacagacaattacttagtagggcctaaaccacactgaaaagaatccatttagtaaattttctaaattaaaaactgcttaggctcatccagaatctcatcaggactggacggttcccgctggactatactagatatgtaggcacagagcctacattcggttacctaataaatgggcaggcagttgtgttattgacactattaagccatcctttttcttattacccataaaaacgggtgagctcctaggtttccctgtctacgccgcccgagaaaagaaaggcatagttataggaaactggaaggagaatgagtggccccctgaaaggatcattcagtattatgggcctgccacatgggcacaagacggctcatggggataccgaacccccatctacatgctcaattggatcatacggttgcaggccatcttagaaataattactaatgaaactggcagagctttgactgttttagcttggcaagaaacccaaatgaggaatgctatctatcagaatagactggccttagactacttgctagtagctgaaggaggagtttgtggaaaatttaacttaaccaattgctgcctacaaataaatgatcaaggacaggtggttaaaaacatagtcagggacatgacaaaggtggcacatgtgcctgtacaggtttggcacgagtttaatcctgagtccttatttgaaaaatggtttccagctatagcaggatttaaaaccctcattgtaggtggactgctagtgataggagcttgcttgctgctcccctgtgtattacccttgctttttcaaatgataaaaggttttgtagctactttggttcatcagaaaacttcagcacacgtgtgttatataaatcagtatcgctctatctcaccaatagactcaaaaagtaaagatgagagtgagaactcccact

SEQ ID NO: 32 - DNA, 1934 bp, Homo sapiens
cgcacagcacggtaccggccttctcctgtccttgggggaagcaggatgggcctctggcttctaagctgcacaagtagttcacccctaatctcaagccccagaagtcaagggaggggcaatcagacctgtgctcctagccgagggtgtctcaacagtggcgtgattggcatttggggtgaatgattctttgtcatgggggctgtcctgtgcatccacggtgtttctagcatcctaaccttacacccattcaatgccagtaggagcccccctctccagtggtgacaaccaaaatgtcttcagatattgcaaaatatcgcaggggagggtcaagattgtccccagtggaggcccactgccccagaccttacttcctggtcctacttctgtttttacggcaaataaaacatctgaccaatgacatggggccacagtggtggtggaggacacctcgcagcttcttcgccatatagaaccctctggccaaatgccatcgtatggccttccccactctctttcacccgatgccccctctgctgatcttcctccccgacaaccagctgggagtggatcccatcccaagctgtgcctgcagctcagcttccaatcagggcacttgtgttgagggcttccacctccagggagccctcccctcagtccactctgctctctgcagcctctgaaccacccccccccacccagcactgtgacaagcgtcacacgtgcctcggggtggctgatcccatttccttcctcagaatcgcatgtggcgcaagactcggtcccacacagcaggctccctctgtattggcgtggaccccaacaggaactgggacgctggctttgggtgtaaggcccagagtgtcttgggagcaaggatgggatggcctcgaatggctcctcaccactgctcttgctccccgcctctctcctgcccctgcagtgaggggagggttgggggtggcagctctgcctctgagggctcttggggatggaggctgtgctctgagagttggttgttactcgcctgcaaaaggcaagttgcttgcaaatgggctaaggtctgaaatcctacctaggggccttctagcttaacctcaagtcctcccgccttggccacgtctctgtgagaactggtctccactgaggagcccgtcttccctccctgggtgtgtccatcagctctgcccaaaccaggctgggagggcagttcccccaggttatagaaggcctttgggctttcctgaatccaggggtgggagtgagcccttccataccacctcacccccaactccatgcaaagaactggattccagaagccacagaagctggaggagccacaccgccatgccctctgtccccccacagtgtccggagccagcagtaacccctgctcggagacttaccacggcaagtttgccaattccgaagtggaggtcaagtccattgtagactttgtgaaggaccatgggaacatcaaggccttcatctccatccacagctactcccagctcctcatgtatccctatggctacaaaacagaaccagtccctgaccaggatgagctggatctgctttccaaggctgctgtgacagccctggcctctctctacgggaccaagttcaactatggcagcatcatcaaggcaatttatcaagccagtggaagcactattgactggacctacagccagggcatcaagtactccttcaccttcgagctccgggacactgggcgctatggcttcctgctgccagcctcccagatcatccccacagccaaggagacgtggctggcgcttctgaccatcatggagcacaccctgaatcacccctactgagctgaccctttgacacccttcttgtcctcctctctggccccatccaggcaaccaaataaagtttgagtgtaccaggaacagaatcctggggcttgc

SEQ ID NO: 33 - DNA, 1875 bp, Homo sapiens
ccggtagaagctaggcctttagaagacacgccctgagttccttctctgtttgatttttccaaggggaagggcagatctgataactgaacctaacctattctctcctccaggttggttaggacctgatagaatctgggccagacacccagattcccaccctcaggacaacccaccctccggctgacagccctctctacgtagctccctctccccaaacgcctctgcctcccctggcctccaggcctagcctaccccatctaccgctctggctccagcctgagccccccgccctcctcggggaacagatgggagctggcggaggctctcagcacgggctccgccaggtgtccaggatggagatgggaggaggcccgtcgggctcggctatgtgcagtgaagctggggttggggtaaggactccgccccagggcgcaggtgcgcagtcctggctaggcagcctgccagggtgcggagcgggagcgggtccttgggctgcacttgggcggcgccggatcggacgcttggcactctgggcggccccccggcggagtggtggtcccaggagaacctccgaggtgggagggtcccgcccgcatagagggatgttctggagaagccgggagcagagtccgcgggcacgcggtgggcgagggacagtgcaggtgccgggtgcgggggtctccgggacagtccccggcacgcgctggtccgccgtggggccctgcggtgagcggcgccccctggcgcgggggaggaggacggaagcgggaggtgagggcgaaccgggaagagggacggtggtccccggcgcggcgctccgcgtcgggacctggaggagctgcgccccctggcgcgggggcggagaggcgggcgagaggccctggctcttacctcccggggtcccgcgggtgacggcggcagcggccattctacccaacaccgacccccccccagcgccggctgacagcggcgtctaacgtcactgcgcacggggcggggcctcccaattaaggggatgagggtcaggaagggaacctggggtcagcacacgtggagttctgggtggggcgctgggcagagggactcggcttctagggctctgagccaggccgagggacagactgctgggaagtccccaaaagggcagcagcactgaggggcaggattccagggtcctggaggcggaagctcggccgactgactcccagttcgagagaacggggcgggggcagcccaccagtgctggaacccgaggggccgggcgaggaacgctggactgggagcaggacccttctcgcctcggacaagactccttgtctggggacccagcccgacttcattgtagctgggtcctcgagaaagcgaaaggagccctccttccccattggcctctccatcgctgcatcccaagaagaaagacaactcgggctccacttgcttgctttttaataacagagcagagagaatacaaggccaggagcggggcctggaggaaaacaggacttggggtgctcctgtgagagcggtgggttgagatgggagcccacgggggctgttaatgcctagttcagaggatgggaaaggcagttggagagacgaaggaaggggaaacgccttcatgtcagcaatgagggtgactctagtgacggaactagtcttgggtccctggggcaccactagcctctcggcatcggtggtttctccttactcttcagacgctgccaactccatcccccagggattgtgaagggggttccttctggctgtgacagtgctgaacgaggccagagagtgcagctgcctggaggcacaagcctcctcctgatccagggggctccagggagaccaaagcagctgtcaagatgagagaaattg

SEQ ID NO: 34 - DNA, 2879 bp, Homo sapiens
gttttgtttcactaagatgataaaatagagagttaaagcagaagttccatgtctgaacaattaacttgtgaaaaggcaaatgtagtagaaaagagacattaggcagatggctgtgcatgttggccacacagaagcagcattggccatgaccagtgtgggtcctggttaggggaagagaactgggtttgacaacaacagggtatctctgaggttataaaaagttgggttctgatcatttggagatgaggtccctatggatagggcaccatatctaaaggttcaccatttacattgcaaatatacattcagttctctgagagtgagcagagaaggcagaggttctcagtcttctgacaaggtcctggagcatcaggggagagcccattcttacaaaactccacaccagcatgcaagcccttacatgcacataagcactcacaacacaccaagagcctccaggtgacatctgccacctccaaatccccatatcccacatgctcaatgcacttgcagtctccatcccccagcagactgcaaatctgacatgcctcatccgaacggcaagggggagaggtacgtatggtacacacactgctgatggcataggcccctttggaaggggtagtgtgagtctcttggggctatggcaagcacccctggacaagcaggaagagaggtggtggaggcatgtctcacggtagcatctccttctaggtcctaatgggacacttcattaatggaactaccatttaagtgagtttaaactggatgcttctgattgagccccagagccagtgctccactgccaccacctgcaccctcacttccccttgtttaagcatcttccaacccagtaaggctgaagagggaagcttcctgccttcccacttctcttagcagagtagattgatatgattattcagattgtacaagaatctattccctctgaagtattgcttgatgaatgagcccctttttctaatttgctcaaagaaatcatttgagcttgaggaaaactgtccagagggcacgaggaccagccgttgtgatatgtaacaaggtagagaaacaaaagctaaatgaagaagagtgagcctcagaatcaaagaactggatttggatccctttaaaccattttacaggggcctgaatgtaattaacttctctgaaattcagtttccttatcaatatgctggtgataagtgactattgtttgaagacagcataagcaaagcatgcagtacttaggagatgtgttcttccttcaattcctctattattaaaagatgggcacagggcaggggcttcagctcagaaggccttgttgagaatagaatggagagcaggaacaagagagaggggcaaaggcattgccagcattctctgttcggctgttctccacccactgcctttcctcctgcttccctctaagtccagggcattttcccttttgataaacttccccttttacaacccatccaagggtgaaaaacaaagtcattacttttttttcagtacctctaaggcaaagcagcagaaacaggcagtcaccactacgaataagtgactacaacaagagctaggccaaactctgccatgtgggctgcattttattgggccggcaagtaactttaaatcccagctcacactctactgagtgaaagtctgatgaacccgcatcttcttgtgaacaactgcgcctgagatcagtcatgcaagaagtagcacccccacccccagacaactaacttcccaggctgtgaccaacaagcagccaagaggccaggacagggaagtctcaggacctttctaggaaatcaatacctttctctgggtttgttctgcctgaaataataccaatctccctccaacagcttagcatgtgtggagcatttgatactaacagcaaccctgcaaggcaggaaggcagtagggagaggcccaagaggaattcagcattaaggcagtgagactgacagaggggaccccctgaggacattctggaaggtcttagccagggccaggatgcagacccttcatgtcactgtagctgagacaaggtgcaaggttcacagcatataacctaattttattacaagaatgaagactcagagtttaaatactcctgctttggggctcattagtaacaagttctccaatattcaaaaggcaaagtggatgtgttttagtgtaaaattaacactagctgctgtaacaaataagcccccaaacatatgatatctcaaacaccgtaggtttatttctcactcacatcagagtcaaaatggatgtttctaacctgcagctggggcttctcccagcagtattcggggcactttccatcttgtggctccaccgtctgtaatgcaggactccaagtggcggaagaggacggagcagaggagtcacacatgggtgtgtgtctggcccagggtggaagtggatgtgcatttcttctgcccacctcactcacaaggccacaccccactgcaagagaggctggagaatgcggactggatttaaacccaagaagaagaaatggttttctgaatagttggccatttactgacacaaaaagggtcaaagtgacttgcagaggagatgaattttaaatactataattatttccttggctgccctttagacagaatttatttctttttcttttccagttaaacctgaggctccttttgacctgagtgtcatctatcgggaaggagccaatgactttgtggtgacatttaatacatcacacttgcaaaagaagtatgtaaaagttttaatgcacgatgtagcttaccgccaggaaaaggatgaaaacaaatggacggtatgtagttcaactacattaataaaataaaaacttatgaatgttttct

SEQ ID NO: 35 - DNA, 1927 bp, Homo sapiens
catagatagatagatagccaggaatatgtcggtgcttttcgaagctcttattccccaaattgtctccttccccagcccttcctcccaaggtttttggtttgtatttttgccccaactgtttttccttgcccccaggaaccagaggctaataatgtcctttcctttaaatgttttcaagggaagttccaagttaggcaaaataaatgtaagtcctttgggctcatccttcagagagccaccagacaggtaaaaataaacaatttttattgtttattctttgacaataagaaataggccccctttgcttcctcagtactaggaaaccatactgggaatatgggttatcttcaaagctgttgctgagcaggagacagagccagcacaagttaaaacactacaaagcccttttactgggactcagggagttttttgtttcctttttcctcattaagggtttgccgggttactataaacttttgattagttttgagagttccaacagttgattctgacagattttgctggttaatttgctgctttcgtggagggacaagcttttgtcattgtttattatactattttcactgacataccctctatttttttaaatgtgggttgcagcctactaatgaattagtctctacggtttgaaaaaattgtctgatatccttgttgttctaaaaaatatatgaactaagtagttaggggaattccattctaagagtatgttgatttaactctgttcacttcaacaaagaagtctgaaaatataaccgaagttttgtttcaccagccttcaaatgtcttggcaaaattgagcacactgcttaccatgtgtgttattaggatatccaggagttagtgatataggatcccaattatagatgtgttcatgtccacaaagtcctcgtacttaagggatatttgtactgtgcaattgcttcttagaatgatgttgctgatagactgtcttgtcctttgcttcagctttgggacatccggaagaaagcagccatccagacatttcagaacacgtaccaggtgttagctgtgaccttcaatgacacaagtgatcagattatttctggtggaatagacaatgatatcaaggtctgggacctgcgccagaacaagctaacctacaccatgagaggccatgcagattcagtgactggcctgagtttaagttctgaaggctcttatcttttgtccaatgcaatggacaatacagttcgtgtctgggatgtccggccatttgcccccaaagagagatgtgtaaagatatttcaaggaaatgtgcacaactttgaaaagaaccttctgagatgttcttggtcacctgatggaagcaaaatagcagctggctcagccgacaggtttgtttatgtgtgggataccacaagcaggagaatattgtataagctgcccggccatgctggctccatcaatgaagtggctttccaccctgatgagcccatcattatctcagcatcgagtgacaagagactgtatatgggagagattcagtgaagatatggactggaagactccaaggccgcttgtctttgagacctcagactgcataagtgatgccaaatgttggatgtccaggctagcaccctcccttcagatgaccattgctagcaagaaacaggaggcggtggccatattccaaaaaccacttctgtcccatttcaccaggatgactaaggcaagctccctgtggcctctaaaaaccacctgccagatttcagggactttttttttttttctttttcttttttcctgttttctaatgcaggcccaatgtgacaaatttgttggttgggatttttttttttttttgtaactggcttgtatgatattttctttctgtatttctctatatcattttgtattaaaagccaaatagatgcctttttacaag

SEQ ID NO: 36 - DNA, 2780 bp, Homo sapiens
gtgtgtacacctgcagagttgtaacatgcgggcatttctcccctcagcccgccattctggcttcttaacttgcaccctaacagctcgacagaaccttggcgtccacaaaaaggacttgaggtgggacatggaagaacagggacccctcctggtttgtccacccagcccacacctccattcctcacccaacctaccacttcagagccgggaaaagacctcagagaacatccgctccgactctaccgaggctcagacaggacaacaagagtgtgctggacactgggaaatgtggtccaggagcagtcacagtccctacagacctcccacaaattaccgtaatgcaaagagtgctcagcccctgccgacatgagcaatgggcagcgcgtccagctgggttcctgccccatgagaagcacacagcctggtttggtaggtggggctccatcagggctgtttggatacctgggtggagcccacagaccagcccccaccttgtgtggttagggctttgctaggaaggcccatctgtgcgccatgaccttggaactcgatgtgagatctctggaccggcagcagcacctggaagcttgttggaaatgctgatctcaggtgggactccagaattcccgcatctgcacctgcactcccaaaatacctccccaccaggtgatccgaggccatggggcagtctgaagggcactgtgctggggcgtcccaccactagaaatccagtccggtaatctgaagatgtaagtgcccccaggaggagtgacggagtgacacaaatgacacaaggggaggggacttgtcaggtgtccactcctgactgcaagttcccagggcagaaggcaatgcccccacagggacttttccagacactccgagtgcacctgaattgcattttgagtgatgctacctgctaagcaggaagatccctccagagcctcgaaaagcagagtggaagtggtggtgcccaggacgcatgggctctgatgggaagagggaggtgggcctgagcatgggccttcttctccccaggtcagaggggcctggatgcccctggagggaacactgaggtcacctctggccaaatcttcctgttctgccagtacccagccctgttcagtgacgtcaagcttttgggtccctgtcctggggccctccacgctggccgggctgtgtagagacgcccttctctccactttattgggtccagattgttgtgtggcttctcccctcctctgcagcctggggtctgaaaacagcgatgccaacagacagacagatttccaaaagaaaggtccggctcagccaaggacaaaggggccttgcagaggctcctgggggtcagaaagctgagagtctaccgggcaggtgccttctccacccacaggcacaagctacaacagctttccaaggagtgcatccacatcgtccccaggtccagatgcccacatcgccctgcagggaccaagaccacactcgggctgcttggacaggatgtagctggtcactgttctggagctggcccctctgtagcctgtgacaatcagcttgagtctctctgccaagtctccgccttctgttcttcttgccgaccttgaagcagagttgacgtttcaggtttttccagcagacaaagctcactcaatctgatactgtggaggttgttaatttaacaaccaacccatcctcatgttgagaaaccagctccaaatgctcacctggctgtcagggatggggagcctcatcggtgaaagagggttgtgatggcataatttaaaccaaaagaggcattcgcggttgcccgtgttgcctcaggcctgctggcctcctgctgtgaacattttgggcaataccgtctctgccagtgacccccaattgtccacttgtctccagcaagatcgaaccatgtaagtgccatttctgacaagttgggtgaacgttggtttcaaatcatcagctctgcattcaagtgccctgctacaattctggctcactctgtgggaataactgcctgcctgggcacgttgctgttgctgcctcccaaacggcagtttctggggtcccaggtcatccaggctggatgtggcttgggagagacctgtggcaccaggttggagggaggtctcacctctcctttctgagctgtggactgcagcttcaggaccctatggatgaggccgaatgtcatgaagataatggaatttggagtctcaacaaagccaagccacatgccagagattcaccacctggggcccaggatcagaagtgtgcccttaggaggccaaacatccacctgtctaccaactagacatttggtctcagacagcaagaaaggctgcgtttatgtcattagggggaacaccacggtcttcggcatgagagaggtgtaattctcaagttcatcagagctcggcttcccccatgaggggaaacaatttgccaggttgaagaacacacgctttgagggttctcagaggctgacatctgttgtgaatcttggaaactcaagccccagtgcaaacggccttgaaggaggtcgagcatcatggttccaacaagtgactcgctttgataacccgatgtgtaagcagaatcgcaatgcatccgtccttccctaatcatcacgtggctgtcatctggtcaatgaactgaggcccgaaggcttgagtcaaactggttttcaaggctgtgctcatgggatttatatgtttcttgagccctgttggaggctcttggcaggtctgaacattaaacatttcttttcttccttttgc

SEQ ID NO: 37 - DNA, 3586 bp, Homo sapiens
tgcccaaaagttcagcccattatacacatccttttggcttccgggtggtaggatttgaggttaggtcagggataaagagttattttgaactctacaagcgtgtactttttaccctaaaaaaaatctactgtaggagctattgttgcacacaaacacaagggtagtggttatatggtcaggtaatacagagggttttagatccagcttgaatacatttgatccaattataaggtattttagtagtcttcaaactttgtggtgaagtgggtgaatttacaggatgtattttattttctcatctgtaattatgggaagaggaaattaaaaagtccgaaggtaaaaataaaacccagtgcaatacgatgtggaagaagagcaaatgtcatgtatatcatttgctagaattcctagtttcaaattggcctgttcctcagaggtcttttttattcagtgttgttgtttatgtagagcatgttgtgacagtgatcatttacccacttatatgtggtgatacatgacataactatgcatgcagataccagtaaccaaaaatacctaatccataaagtgacactcaacacatgggaaagtattgttgtgctttgttttcccaatgtttcagttattattaattattaacataatggagtgttaacactagctagatggtgctagaaatgcacattgttaattcacaggcagacttgagacacatcatatagtgtgaatgtaaattgttgaaaagaagtcagatattgacattgcagtttggataagtaaagagtaggatttgccgtatggactcctttcctagcatcatctgggctaacaataagggaatataatgtggccttcatagagctgtgatatttaaaaaactatttaagggctttggaaacaaaaacaaccagattcattttctggttttgccacttactgtgactttgggcgaaaaaatataaccactgtgagcctcaattttctgatctgttaaatggggataatacaagtacctcacaggatatgtagaggtttcaaatgtaaaataatgtataagagagaaattatataaaatagtgcctgccatataatttgtgctatacaaatcgtagttgctatcatcccttatttacttgctccctatttggttgcaaaacaggattataatgattttttgaattgcccagctattcagctatcaatttctcagcaattcgctgtcccacttccaaacccagtgaactgagaggaaagttacctgatatagtttaacttcttggattaatgggaatgctaacagaagacattaaatatatgaacaaaaatatttggggaaaggctttttcaaataggccagtaatcagattcctgcatagactacttaccttgggtgtatttttaattctgggttattttcttttacaatagattttattttttcatagtagattttatttttcattgatgaccaaagtatgttcctgcttctgcattgtcctcagctgacagttgtgagattaaggaaatggcagggaatttacaaatgaaatcaccaacctgattctcctgaactgtccctgctatctaggcattacaggcaatgctttaccttgatttatgcctctgcccttgggatgggtgctattatcccttctgtttttccagtgaggaaactgaggcataggacaagtatgtgccagaacccaaaagcctgattctgaaatccatattctgtaactcttcatagcttggctgtatttattttgtcagtgtttatttttgtttttcacattttgggagtataacagaaagccaaatgagtctcagttatatttaattaagttgtcagaagttgatctttgaatccttttggaggttaactattttgaattaagtggtatttgagtattttgccacactacttggagaaaaatctacagccaatattaaattaaaatacctatgtataatagttatttttattccagaactattttttaaaaaatcaactgtattcttgaataaactagtttagttaaacatgaaatgtggggttttttttgttcaccaaataaaaatgcacttaggcagtcagtaaggaaagctttattttactctggcttctctctttatcttccttttcctgttttatttttttcattgactggaaaagatttatttccctgcttgatgtgattaaacatgttttgccaaattgatgcatgagaaccagtttctatgagaagtctcttctggagatgtatatccatgtaactctgtatttcctcccatatctgactgtttgtttccaatcttttgactgctttcttgctttttaatgcctttatctttgcttatttgaattaggtacttctctgctacctttcacctgctctttttctgtgccattgtttcccttgctaccttacctaaaaccaggccctagagaaacagaaagaatacattgcctgccttaggaatgagcgagatatgctcagagaggagctggctgacctgcaggagacagtgaagacgggagaggtatgttagcattagcctggaattcaggtccctcactgttttactctctatcttccttcctttcatcctgccatctttcctagcctaaatacaaactacagtgtttattctctaatccagatttggtaggttgaagctatttcttacacagagctatatttcatgtaactgattctaaccaggttttacctgtagcaaacatgtattgttgcagagtgacctcacagagcttacagcttccatacgggccttctgtgatggtgggtttttcccccctgcagaaacatggcttagttataatccccgatggcactcccaatggtgatgtcagtcatgaaccagtggctggagccatcactgttgtgtctcaggaagctgctcaggtcttggagtcagcaggagaagggccattagatgtaaggctacgaaaacttgctggagagaaggaagaactactgtcacagattagaaaactgaagcttcagttagaggaggaacgacagaaatgctccaggaatgatggcacagtgggtgacctggcaggactgcagaatggctcagacttgcagttcatcgaaatgcagagagatgccaatagacaaattagcgaatacaaatttaagctttcaaaagcagaacaggatataactaccttggagcaaagtattagccggcttgagggacaggttctgagatataaaactgctgctgagaatgctgagaaagttgaagatgaattgaaagcagaaaaacggaagctacaacgagagttacgaacagcactggacaagattgaggagatggagatgaccaacagccacctggccaagcggctggagaagatgaaggccaataggacagcacttctggcccagcagtaggaaaaccacccttcaacctgggtgatgctccttggggccctacctagagggactgacttttgtccattgacacaaaccccttttagtactgttttgagttttgtcattaaaacagccacctttgtattttataatttatgacagaatgaagtcattttgaatct

SEQ ID NO: 38 - DNA, 4773 bp, Homo sapiens
ttacgattgtattttgactttttattaaattcttgtttattgttagcaccctatagattaggctaatttttataggtaagaaagataacagcctttaaatgcagcttaccttcttttcaaggaattcttagcttttaaatttcattttgttgtatggataaataatcctagtctgtcatttcagaatgacaatatcagttgtcattatggttatcaatatggctaccagatatttcattaactccattctcaagattggaaaattatatttggcttagctgtcctggtgtttttgaaacatgaacttgtctatagactgtgtaatagttcagaaagtaaaccatgtatctactgttgaaagtattatgtattttaaaatcttattttttggataccagtcttctggcattcttaagaatggctttggatttggaaaaaataatcagcaaatctttaaaagtgtagatacggtgaaaacagcaaagaagaatccctagaatacctgatatactttatgtggaaaattttaataactgtataagcgaagatgttattaaaaggaatgaagtattcaaatcaaactggtttaaacagtacaaggaatgtattggctctgggaattaaagaaaagtccaagactaggaagggcttcatgcatggttttgtcttggttctccagcttagtttctctgtttccaattcagctttgcctttctctttcctcttggcttcatcagttctaggtctgccacatttgccacaattctataccacctagaagttttctattttttacttagagttttccttcctcagtcaccaaatgaaattcctttatcgattaagccaaatttagaatttttcacctggagtttttcttcttcagtcatcaaatgaaagtccttggctttaattgattgaaccagtttaggtcacatgtccagtcactgtgatcaggaaaatgctgtgcactgattattagtttaaatctggattttcttctcatctctaagctaaacattaggcaaggaggttgggagtacactgagtgggctatttagaactgatacttgaagctggaaagtgggcttatttctacccaaattatatggctgttgtaccatgggaaaagtgatgtagaatagatgttggataggtctgtcatgtctttttattttaaaaggttaagaaagaaaattagcaagacagaagagataaggaaaaagacgcaaaacaagatgggggaactaagtatatccaagattggacagcagtgaggattaaagcagcagtagtggagcagcaaatttgtgacaatacagaagaagctagtgagcaatgaagaaagaaaaaaaatgcagtatccatagtagacactttggtcctaaagctcttgaaggctctatcttcggtatactgtatgggctattgactcatttaaaatgctttcagttccaaataacaggaaacacaactcagagggtctcaaacagttaagaggatttattagctcatacaactaaaaaaatacacagaggtaggtcagccttaaggtctttcataaagaggttgttggtgtcatcaagctttggctttatttctttgcaattctctcttctatgtaccttactaataattaagctcagattgtggtggttccatgtactaattggactagcttagatccttttgttgattttggagacccgaagttagagtctgcttccctagaaccatgtagattccaaaaaaactaaccaagcgttttgagaaagggagaaacagttgtaagactgcaactgtgaatgttaaaataggcaagcagtcctttatttcttaattgtccataaagacattagtttacataaatttactcttcatttgcctagctttcaatatttactgagcacctcctatttgccaggcactattctaggcattaggattacagtgtcatggaatggagctgacattctaatagaaggagacctagaataaacaaagataattgtacataatgataaatgggtttttttgttttttgtttttattttttttacaaaaactggataatgggatagagttgctgggtggagattcagggaaggcctctgaggaagtgaccactggagccagaacctcagtgatgagaaggaaatatgtgcaaagatcaaggtgaaaagcattccggatagaggaaacagcagaggcactgaggtgggaacaatcctggaatgagggaagagtagaaagagaactagaatgtctggagagtagtgaataagtgagagaagatacgagaaaaggagaaagagaggtaggggctaggcatggtaagtaacacagattccttttcttttagacaggcatatcaatgtatatgattctctgatgggcaagttatgtttagtgtaacctttttaagaggtcagagaaatatgcaacatattttagggagatttccattttaaaaattagttaaaatataggaagtttatttctaagctttagtgaacccatttctcctggccagttctttttcacatcacttttcctatgtaataaaagatcggtagaaattctgatatacatgactttgactcatttatgattatagatgtccaaaattacatgcacagaattctcttttgggaacttcaggtaagagacattttacgtcccttaaaagtgtgtcctattttcttgtaggcaacattaaatatcattcacagtgttgttctctcagttcttgacaaaaaccaaaggactagagaattggaagagatttcacaacagaagaatgctgcaaaagataattcactggacacagaggtggcttatttaatccatgaaggcatgtttataagtgatgcattcggtgagggtgagctaacacctatagcagttgacactacctctcaaagaaatgcatctccaaatagtgagccctgcagcagtgattctgtatccgagccagaatgtactactgattcttcatccagcaaagagcacacatcatcatctgctattccaggaggtgtggatattatggtcagtgaagatatgaaattaactgactcagagctaggaaagctggcaaataatatccaggaattattatatagtgcctcagatatatgccatgatcgagctgtcaaatttctcatgtcaagagcaaaggatggttttcttgagaagctaaattccatggaattcataacactttctagattaatggaaacattcattttagacaccgaacagatctgtggaagaaaaagcacgtcattacttggagcacttcagagccaagctattaagtttgtaaataggtttcatgaagagagaaaaaccaagctcagcctcctcttagacaatgagcgctggaagcaagcagatgttcctgcagaatttcaggatcttgttgattctctgtcagatgggaagattgctttacctgaaaaaaaatcaggagccacagaagaaaggaaaccagctgaagttcttattgtcgagggacaacagtatgcagttgttggaaccgtattgctgttaataagaattatccttgaatattgccagtgtgtggataacatcccatctgttactactgacatgcttactcgtctgtcagatttattgaagtacttcaattcaagaagttgccagttagttcttggagctggtgcactgcaagttgttggactaaaaacgataactacaaaaaatttggctctttcttcacgatgtttgcagttaattgtgcactacattcctgtgatccgggctcattttgaagctcgactaccacctaagcaatatagcatgcttaggcattttgatcatatcactaaggactaccatgatcacatagctgaaatatcagctaagcttgtagcgataatggatagcttatttgacaagctgttatctaagtatgaagtgaaggctcctgttccttctgcctgtttcaggaatatttgtaagcaaatgacaaaaatgcacgaagctatatttgatctccttccagaagaacaaacacagatgttatttttaagaattaatgcaagttataaactccacttgaaaaagcagttatctcacttaaatgtgataaatgatggaggacctcaaaatgggttggtcacagcagatgtagctttttacactggaaatcttcaagccttaaaaggccttaaagatttggacctaaatatggccgaaatttgggagcagaagaggtgatgtcatcctggaaaactgggtagttcatctgaccatgggatgtgtttgttatgaagaaaatctggatgcctgtgattcgagaattgaacctgaaacccaaagtgaactggggtgggggaagggaaaaaggaaagtatcaagtgttgggaaactggattcagtgggatctacaaggaatgtcatttttgtgcatcctacagtgaggagtaactgatcaggtgtctataacatttttcattctctctggaaacagactcaggtttctttggaccaaatccaaaagaacacatagctgtaacacagctgtagttgactagaatgctctgtatactttatattaaaaaatgctttgcatttcttccagtgcaatgaaattcatatggtgtcccaccttatttaatgatggtacaatttaaaatcttagtcaacttctgtagaaagttttctctatgaaagtaaagctgtttgaaaaattattatttttttacagatctttctataaaaaataaacatcttttgattgcttgg

SEQ ID NO: 39 - DNA, 2703 bp, Homo sapiens
cacagcagcccccgcgcccgccgtgccgccgccgggacgtggggcccttgggccgtcgggccgcctggggagcgccagcccggatccggctgcccagatgcgggcgccactctgcctgctcctgctcgtcgcccacgccgtggacatgctcgccctgaaccgaaggaagaagcaagtgggcactggcctggggggcaactgcacaggctgtatcatctgctcagaggagaacggctgttccacctgccagcagaggctcttcctgttcatccgccgggaaggcatccgccagtacggcaagtgcctgcacgactgtccccctgggtacttcggcatccgcggccaggaggtcaacaggtgcaaaaaatgtggggccacttgtgagagctgcttcagccaggacttctgcatccggtgcaagaggcagttttacttgtacaaggggaagtgtctgcccacctgcccgccgggcactttggcccaccagaacacacgggagtgccagggggagtgtgaactgggtccctggggcggctggagcccctgcacacacaatggaaagacctgcggctcggcttggggcctggagagccgggtacgagaggctggccgggctgggcatgaggaggcagccacctgccaggtgctttctgagtcaaggaaatgtcccatccagaggccctgcccaggagagaggagccccggccagaagaagggcaggaaggaccggcgcccacgcaaggacaggaagctggaccgcaggctggacgtgaggccgcgccagcccggcctgcagccctgaccgccggctctcccgactctctggtcctagtcctcggcccctgcacacctcctcctgctccttctcctcctctcctcttactctttctcctctgtcttctccatttgtcctctctttctttccacccttctatcatttttctgtcagtctaccttccctttctttttcttttttatttcctttatttcttccacctccattctcctctcctttctccctccctccttcccttccttcctcttctttctcacttatcttttatctttccttttctttcttcctgtgtttcttcctgtccttcaccgcatccttctctctctccctcctcttgtctccctctcacacacactttaagagggaccatgagcctgtgccctcccctgcagctttctctatctacaacttaaagaaagcaaacatcttttcccaggcctttccctgaccccatctttgcagagaaagggttccagagggcaaagctgggacacagcacaggtgaatcctgaaggccctgcttctgctctgggggaggctccaggaccctgagctgtgagcacctggttctctggacagtccccagaggccatttccacagccttcagccaccagccaccccgaggagctggctggacaaggctccaaggcttccagaggcctggcttggacacctcccccagctggccgtggagggtcacaacctggcctctgggtgggcagccagccctggagggcatcctctgcaagctgcctgccaccctcatcggcactcccccacaggcctccctctcatgggttccatgcccctttttcccaagccggatcaggtgagctgtcactgctgggggatccacctgcccagcccagaagaggccactgaaacggaaagggaagctgagattatccagcagctctgttccccacctcagcgcttcctgcccatgtggggaaacaggtctgagaaggaaggggcttgcccagggtcacacaggaagccttcaggctctgcttctgcctgatggctctgctcagcacattcacggtggagaggagaatttgggggtcacttgaggggggaaatgtagggaattgtgggtggggagcaagggaagatccgtgcactcgtccacacccaccaccacactcgctgacacccacccccacacgctgacacccacccccacacttgcccacacccatcaccgcactcgcccacacccaccaccacactgccccacacccaccaccacactcccccacacccaccaccacactcgcccacacccaccaccagtgacttgagcatctgtgcttcgctgtgacgcccctcgccctaggcaggaacgacgctgggaggagtctccaggtcagacccagcttggaagcaagtctgtcctcactgcctatccttctgccatcataacacccccttcctgctctgctccccggaatcctcagaaacgggatttgtatttgccgtgactggttggcctgaacacgtagggctccgtgactgggacaggaatgggcaggagaagcaagagtcggagctccaaggggcccaggggtggcctggggaaggaagatggtcagcaggctgggggagaggctctaggtgatgaaatattacattcccgaccccaagagagcacccaccctcagacctgccctccacctggcagctggggagccctggcctgaacccccccctcccagcaggcccaccctctctctgacttccctgctctcacctccccgagaacagctagagccccctcctccgcctggccaggccaccagcttctcttctgcaaacgtttgtgcctctgaaatgctccgttgttattgtttcaagaccctaacttttttttaaaactttcttaataaagggaaaagaaacttgt

SEQ ID NO: 40 - DNA, 2039 bp, Homo sapiens
taaaaaaaaaaaagtaccaaagccgaggcgcatcctcgcacctgcctgccttgggccagcgggcggggcccgggaacgtgcatttcaaaggggccgcggttcctgcgatgcgctggactctgggaagcgcgaacagagcgttttgcgggctctgcggggagagctggcgccggcgtctccctgtagcaggactgggcgccgcgcccgtgggtgggctgctgcccggccccgccgcccagccaagccgccgcctgggtggccattcccgagccggactccggggaagtggcagcgtggatcccagccgccagaattcgaggtctgcggcggctttcaaaacttgacaactttcctttccaggaggaccccgttctggagcgttatttcaaaggccacaaagctgcgatcacctccttggacctcagccccaacggcaagcaacttgctactgcttcttgggatacctttctcatgctatggaatttcaagccacatgctagagcttacagatatgtgggtcacaaggatgttgtaaccagcgtgcagttttctccacatggaaacttattggcgtctgcctcacgagacagaaccgtgagactctggattcctgataagagaggaaaattctcagaatttaaagctcatacagctccagttcgaagtgtagacttttcagctgatggccagtttctagctacagcttctgaagacaaatccataaaagtatggagcatgtatcgccagcgcttcctgtattccttgtatcgacatacacactgggtacgctgtgccaaattttcacccgatggaagactaattgtgtcatgtagtgaggataaaactattaaaatttgggataccacaaataagcaatgtgttaataacttctcagattccgttggatttgcaaattttgtggactttaaccctagtggtacatgcatagcttcagcaggttctgatcaaactgtgaaagtctgggatgtaagagtgaacaaattactacagcattaccaagttcacagcggtggagttaattgcatatcattccatccttcgggtaactatctcatcacagcttcttcagatggtacccttaagattctggacctcttagaaggaaggctcatctatacacttcaaggacatacgggacctgcctttactgtttcattttcaaaaggtggagagctatttgcatcaggaggtgcagacacacaggtcttattatggaggactaactttgatgaattgcattgtaaaggtcttaccaaaagaaatctcaaaagattacattttgattcaccaccacatcttcttgatatctacccaagaacaccacatccccatgaggaaaaagttgagactgtagaaattaatccaaagcttgaggtaatcgatttgcagatctctactccccctgttatggatatcctttcttttgattctaccacaacaacagaaaccagtggtaggactctgccagacaagggtgaagaggcctgtggatatttcttgaacccttccttaatgtcaccagaatgtttgccaacaaccacgaaaaagaaaacagaagacatgagtgacctcccctgtgaaagtcaaaggagcatacctctcgctgtgactgatgctttagagcatattatggaacaactcaatgttttgacacagactgtttcaatcttggagcagcgactgactttgacagaggataagctgaaagactgccttgaaaatcagcaaaagcttttcagtgctgtccaacagaaaagctgaataaaaaattcattttcatttgttgggcagaggcccaataaatgaacaaatgtacatacactcaggaaggtagtacaagatactccatacaacacaaccatgtgctatttatcatggcatttcttaaaagggtgagcaacagaacaaaaggcagaaaaggcatacctaaggactaatttaaacacatatcaatgtgaaggactaatttaaattactatcatttatgattgcagtaataaagtgataagcattcaagc

SEQ ID NO: 41 - DNA, 2452 bp, Homo sapiens
gtgcgcagtagcgggcctggccagcggctcggggcttgcagggagggcggatctcgggtcggacccgcagccccagacgccgggcttgggggttccccccgccccggcctcctgccagtcactaccacccctagcctctccaactgagctcggcgccgggagaggattaacacccaggaaggcagggggctccctttatccaaggaggtggctgtgcaggtggccaccacaggtggcaggaaccacaggctggggcactccggagtcaggagtgagtgggcaggttgactggcatcaggcagcctctcagccagggccctctccgcatcagcatgaactccaggaccgcatctgctaggggctggttcagcagccgcccacccacctctgagtctgacctggaacctgccacagatgggccagcctccgagaccactaccctcagcccagaggccaccacctttaatgacaccagaatccctgatgcagctggtggcacggccggcgtgggtaccatgcttctgtcctttgggatcatcacggtgataggcctggctgtggccttggttttgtacatcaggaagaagaagaggctggagaagctacgccaccagctcatgcccatgtacaacttcgaccccacggaggaacaagatgagttggagcaggagctgctggagcatgggcgggacgccgcctctgtacaggctgctacttctgtgcaggccatgcagggcaagactactctgccctcccagggcccactgcagagacccagccggctggtgtttaccgatgtggccaatgccatccatgtgtgagtggcctgggacaagcctggacttctgatagagacccatcacggtgcctacagagctccccactccctgattgtcaagacctactctgaagatcttccctgccaagacacaagagggctgagccaggtcctagctgttctccagacccacctgctgactttagactctaagagagggccctagccaggctggacttctgaccactgacttctcctgacctgagggccctggcacagagggcatccctcatgctgagaaggtcaagagcctctgctggcttcctcatcccctgtccagatccctcacatcagggtctgccccgctaatgtggaggaaatgagggagatacggagtgggagggattgggggaggaaaggggaggtttccctctgttagggagagacctgttttttggaatctggagcctcctctggggtggggagaggaaaccacccaagttatagggacagggtagggcagcatctgttatgggccctgagaagcccagagatggagctgaaactgtccagtatgcaaggatgccaggagaagggcaattcacacccagggtccatccatactacggagggtccaggaggtctcccagccacccatccttggcaaccagatgttactggggccaagctaggatgggagctgagggggaaggaagtaggggaatggaagtggaaggatgcagcccccccagacctgccgagaggcctcatgcatgtgcatgagtgtgcccatgggcagacatgtgcctgtcccagcacagcgggcagaatgagattgtccacactggccccaccctccaagtcgacctctaccccatggtatgtagtggagcatcagggtaggctatcttctctgccttcaatcttcagggactgcagggaagagggaagcacgcacagcacggttcctctctccactgcactgtttcactgggctcacctgcttctgaaaacggctccctgtcttgggctctaatgaggatctggggttgggagaggctgttggtctgagggcagtaatcacaggctgcaggctagagggggcagttatgactgcctgaaagtgggtgagggattgcacttcagaaaaacatctaaaaaacttagtctatgtttgaattccccacctccatcccatctatgggaagagccgttcagtgtttagagagtggggagatgggtccctgcacttggcctctccataagccttggagggtcagggctgataccaggggtcctggcaagccattgggcagagacagaccacaagagcagggcatttttttacgctgggcatacatatgcacacaagcatgcacagaggcatgtcccgtgcccagcctctccaccgtcactgtccgctgctggctggaggggatgcaggggtagtgtatgcagaccttccactgggcaaatgccatgtgtcaggagggaaaggcctaggaagcccccatggggaaggttctggatttattccctcctctaaatgctataaatacgttagcacttgagtcgactggaggctgccaggaattcaggatgcatacagctgtaatttaacccagagcagctccacgtgagagcattaaagatgtaatgaagatgtttacatgg

SEQ ID NO: 42 - DNA, 3421 bp, Homo sapiens
gtggccccgatggagcggtacaaagccctggaacagctgctgacagagttggatgacttcctcaagattcttgaccaggagaacctgagcagcacagcactggtgaagaagagctgcctggcggagctcctccggctttacaccaaaagcagcagctctgatgaggagtacatttatatgaacaaagtgaccatcaacaagcaacagaatgcagagtctcaaggcaaagcgcctgaggagcagggcctgctacccaatggggagcccagccagcactcctcggcccctcagaagagccttccagacctcccgccacccaagatgattccagaacggaaacagcttgccatcccaaagacggagtctccagagggctactatgaagaggctgagccatatgacacatccctcaatggtcactctggcggatttctccccactggagtccccagatgggtgcaggtgcccgaaagagtcatttatgccacgatcaccttggaggacggagaggctgtgagcagctcctacgagtcctacgatgaagaggacggcagcaagggcaagtcggccccttaccagtggccctcgccggaggccggcatcgagctgatgcgtgacgcccgcatctgcgccttcctgtggcgcaagaagtggctgggacagtgggccaagcagctctgtgtcatcaaggacaacaggcttctgtgctacaaatcctccaaggaccacagccctcagctggacgtgaacctactgggcagcagcgtcattcacaaggagaagcaagtgcggaagaaggagcacaagctgaagatcacaccgatgaatgccgatgtgattgtgctgggcctgcagagcaaggaccaggctgagcagtggctcagggtcatccaggaagtgagcggcctgccttccgaaggagcatctgaaggaaaccagtacaccccggatgcccagcgctttaactgccagaaaccagatatagctgagaagtacctgtcggcttcagagtatgggagctccgtggatggccaccctgaggtcccagaaaccaaagacgtcaagaagaaatgttctgctggcctcaaactgagcaacctaatgaatctgggcaggaagaaatccacctcactggagcctgtggagaggtccctcgagacatccagttacctgaacgtgctggtgaacagccagtggaagtctcgctggtgctctgtcagggacaatcacctgcacttctaccaggaccggaaccggagcaaggtggcccagcaacccctcagcctggtgggctgcgaggtggtcccagaccccagccccgaccacctctactccttccgcatcctccacaagggcgaggagctggccaagcttgaggccaagtcttccgaggaaatgggccactggctgggtctcctgctctctgagtcaggctccaagacagacccagaagagttcacctacgactatgtggatgccgatagggtctcctgtattgtgagtgcggccaaaaactctctcttactgatgcagagaaagttctcagagcccaacacttacatcgatggcctgcctagccaggaccgccaggaggagctgtatgacgacgtggacctgtcagagctcacagctgcggtggagcctaccgaggaagccacccctgttgcagatgacccaaatgagagagaatctgaccgagtgtacctggacctcacacctgtcaagtcctttctgcatggccccagcagtgcacaggcccaggcctcctccccgacgttgtcctgcctggacaatgcaactgaggccctcccggcagactcaggcccaggtcccaccccagatgagccctgcataaagtgtccagagaacctgggagaacagcagctggagagtttggagccagaggatccttccctgagaatcaccaccgtcaaaatccagacggaacagcagagaatctccttcccaccgagctgcccggatgccgtggtggccaccccacctggtgccagcccacctgtgaaggacaggttgcgcgtgaccagtgcagagatcaagcttggcaagaatcggacagaagctgaggtgaagcggtacacagaggagaaggagaggcttgaaaagaagaaggaagaaatccgggggcacctggctcagctccggaaagagaaacgggagctaaaggaaaccctactgaaatgcacagacaaggaagtcctggcgagcctggagcagaagctgaaggaaattgacgaggagtgccggggcgaggagagcaggcgcgtggacctggagctcagcatcatggaggtgaaggacaacctgaagaaggctgaggcagggcctgtgacgttaggcaccaccgtggacaccacccacctggagaatcccaaagctgtcacacctgcctctgccccagactgtaccccagtcaactctgcaaccacactcaagaacaggcctctctcggtcgtggtcacaggcaaaggcactgtactccagaaagccaaggaatgggagaagaaaggagcaagttagaaaacaagcttcatctaaagactctcatgtcaatgtggaccttggtgacaatcctgctttgttaaagcaaaaactatgcgaaagggtgagtctgtttagaagaaaaagcaaagactgaggtactgtgaatggagagcttcagctaagaggaggctctgtcccttttcagagccaaaggaaataatacaacaaaaaggaggcttctttggagacctaagtctattggatgtaaacaagacgttgtatttagggatgttctgtgtttctttcttttttgaagttgtcatcaattgctttactaagatttttaaatagtgaaaacctcctgtttagactttggtggaagatgaatcaaggaagcagggccctgtcttatgggtcacgtgtctttggtgagtgagaagacctaaactcctggccatcatctcttatccaatacttagcagttggggattaaaccatccttgccttcagttctctccaatattaccaggcccaactcagtcttcagtgattttaaacagcattgacatcatctgtaaaaccatcatctgtaaaaccatctatgacatgagttttgagaaacaataatggggaaaatatttgggaccaagctgaagcactaatcccactaagttaaagacttctttccagtccaaggcaggcctgaatcaactgtctttaaataaaattttaagtgatgctgtattatatataggaaaaaatgcttaaaatcctgtcatttagaacagtgaaaagtatcttttgagattaaagtgactctttactgtaggaaaaatattactctgtgtttacagattcattgctgtggtcaggccatttttaagggaagagttatttaatataaatagtctctgatttt

SEQ ID NO: 43 - DNA, 4834 bp, Homo sapiens
ctccagaacaaaactcgtacattgctggtcccaaaagggaggtggccaagtggggcagggctgtggtggaagccctgagtcccctttctgaccttgcaaggccttgattttcctttctgtcatttccccctgacggtgtcacttctctgcctttccttcccgccgtgcaagtgtgtcggccccgtggccccagagtcgtgtgtcccctagacttcctaggacgtatctattgtacacacctataaatacctgtgttttatgttgatagagatatatactgtaaatagcatatatacttgagcaatatatatgttaatatatactgtgtgcgcagtccgtggacacagccccccgctgtgtgtgcacacgtgtatgggcgtgacggcctccaccccgcaccgtctgccatacacgcgggcacatttgagccaccatatatttttaattcaagtatataggcaatacgattattacagaagccgatgggttccctcagacctgacttgagagaacaaagccagcagctcaaagagcctgtgacatgggacgtgggaagggtgctgagagcccgctgtggcgtgggtcatgccttctgcaccccactttccccaggcaagatccctgggcgcccttatttggggggatgttgatcccgagggaggagtatttggaatttcttgcttttaaccagaatgccccctctcccctgccctcgccagcagcctcaccctgaagacctgggcctgctgaatgggccacacgctgcctgtgtcctgcctccgtgggtggcactttttacgcaggcagcttctctgttttttttgttttttgtaacctgcaagcttagaaatctcaggttgtgctcctggggctgctcctggggactggcctcgtgtcatggagaaaagcatgtgtgtcggggcgcgctggggccagggtatggctctccgccctggctggctctgcaggggtggtccctgttcaagcccgctccgtgggagctgccccctggggaccctgctcctcggtcacagggggcccctttagttttcccatccccatcctgctcgtgtaaagcttggtttatcttctcggcgttctgtgtgtagcgtagtcttggtttggtctccacagctcttcggggtggggtgtgagtgtggtttttcccaggcaggggccgtctgcccttgtcccccagctatctcctggtctgctgggtgggagggtctctccaggccccagaccccacttggaggggcatgtgtttctcagaggggctccatccgcagttgcatggaactccttacctgtttgccgtccatcccccggaggtaatcagaggagtgggcctgttgtcttggcgctggcggatggggcaggtgcctggcgggggaggaagagggctctctatgatgtggaatttttttttttttttttttgagacggagtcttgctctgtcgcccaggctggagtgctgtggcatgatctcagctcactgcagcaacctccacttcctgggttcaagcgagtctcctacattggcctcccaagtaggtgagattacaggcactcaccaccacacgcggctaatttttgtatttttggtagagacggggtttcaccatgttggccacgctggtcttgaactcctgacctcaagtgatccacccaccttggcctcccgaagtgctgggattacaggcatgagccaccgtgcccggcctcatggaatttctaggggtgagcaggtgaccctggggctgccacttgagctcctggagtgtgtgtcttggcccctgtgtggttctccattaagaaaagctcagatagtctcaaccccaccctctccccttgctgcactcagagtaccagtgggagctgaaggatggggaggaacagagcagtgaccacccctccctgccactgataagttctgcctcgtcgtggggctcccctggttcccaagacaccccttcctccctcagcccgtcgtcctaacccagcaaagatctgggcattgctgactctgcacctccttcctccatgggcatctccaggaccgccctccttcaaggggcactgcccacaccaccgtcctcagcccgaggcatgcatctgagctggagaggcttgcaggcctgaccctggtagcttcccctccccaagattcagaggcggggacccaaagcctcactccaaaccactggcattctcacctcctctcacctccaggcaccaggctgctggtgggaaaggaaggagctgggggatcagaggcttccagtgtggcctccggaagcagcagcgtagccagggtgacatttgttcagcaggaggaggcttggtctggaggggcttgcccctctgaggtgacagaggatgccctggaggtcaggagagaagactgggaagacaggaagggccaggcccctgttaaagcccagggcactatttggtgatcttcaaaggtgaacacaggccacctcccactggccccctcctcctggccacattttccagggataccctggggagtcctaaggccaccctgggcccctttctgagcctagagatctggatgtggtgacaaccagggcttttcccagccccagctaagagagggggctttagggcaagagcacctcagccctgcaatggggggatcttttttttttttttttttttgagacaggctggagtgcagtggtgcgatctcggttcgctgcaacctctgcttcccaggttcaagtgattctcctgcctcagcctcccaagtagctgggattacaggcacccaccaccacgctcggctaatttttgtatttttagtagagacagggtttcactatgttggccaggctgttcttgaactcctgacctcaggtgatccgcccaccttggcctcccaaagtgctgggattacaggcatgagataccccgcctggccaatgggatttttgacgccacttcctgagtgaagcgctttgcatggggatgggaagaagcacccccaaccttctagtccgctccgagcagggcctggagcattggagacattggttagtgtaataggcagagcctgagtgaggccggggggcttctccaacagagaaaagacattggctttgggtaccatgctgagggagggggttaggcctggtgggggcccattcaaaggaggccgggctcggtggcttaggcctgtcatcccagcactttgggagaccaaggtgggaggatagcttgaggccaagatagcaagaccaccctggtcaacatagcaagaccctgcctctacaagaaaataacgaaagaggccccagggaaggaagccagccaggagcagcctggagcagaggcaggagcctgaggcctgagccatggcatccagggacagcctggtggccgagagagcttgtggctgtcactataagggaagaggagctatggaaattggaagtgcagggtggcctgtgtgctaggagtgggggtgcaggcctaggtgtgtttatgcacacgtttgtgcatgtacgtgtgagcgtggatgtgttcctatgcattagagtgtgtgcgtgcacgtgtgcagagcccacacctgagatatgggactggctcttggagtattttgagttctcagtagcagtcttgttgtcaggccttgagtgcagaaatgattaggtgagtgagggcaggactcgaatgcagaccctggctccaggggagagggtggggcgtctctggtaggacggcctcaccccacttgtcagaactactctggaggggggcaaaggtgtcaggaacagtttgagcagttctggctcagggtcactcatgaggttgctgttgtctgaaatcttagctaaggattggaggatgcacttctaagtgaggcctggctgtaggcaggaggcctcagtccttccccaggtgggccaacccacagggctgcttgagtgtcttcacaatatggcgctcggcttccccccagagcaagagattcaagggcccagggtaaaagccaacgtgttatttttatccctagcctcagaattcacacgccgttgcctccaccatgctctggtttgatacagcccagctctgattggaaggggctggggctgcccgtgctgactcttcaaaggcatcccatcctgcagatggtgttcacagggagagtttgtgggggccggcactccctcatctactggggctcattctggaagaaggtccagaagaattggagacccctgcccctcacccaaactttggaggtggcagggtgaacagcaggccaagttcaggtcccaagacaggccaaggccagtgcggtttcccttccactgcctcagtttacctgtattcagaagacagtctaggaagagttgagcagagttccctctaaaagagtagggagctgataacagtcccaagccctcctctttctctatgccaaaatcatttccgttatcctgagatgggggtgagtggatggatggtgtactgaggggcctctgccctgcccagagcccccaccatcgtagtgggggcaggggacttcctgcccacaaccccctccaaccctcacctggcgtgcccgggtcaccagcagcagcagcggcgctccatcgctcccaagatctgggtgaaggggagaacctgccatcttatccctacccccccggggccctcaagcttattttcttgttgaagaaacacaaaaccctcgagattcatgtactgtatgttggagaaaaaaaattacctaatgttcccccaaaaaagacagtatattttgtactttgtaaagtgttaattaaaatgaaaaaaaaaaac

SEQ ID NO: 44 - DNA, 3619 bp, Homo sapiens
agagctgctcggctgatgatgatgggcactaggacacgcagagctgcccggctgacgatgatgggcactaggacactcagagctgctcggctgatgatgatgggcactaggacacgcagagctgcccggctgacgatgatgggcactaggacactcagagctgctcggctgatgatgatgggcactaggacacacagaactgcttggctgatgatcatgggcactaggacactcagaactgcccggctgatgatgaggggcactaggacactcagagctgctcggctgatgataatgggcactaggacacgcagagctgcccggctgacgatgatgggcactaggacacacagaactgcccggctgacgatgatgggcactaggacacacagaactgcccggctgacgatgatgggcactaggacacacagagctgctcggctgacgatgatgggcactaggacactcagagctgcttggctgatggtgatgggcactaggacacgcagagctgctcggctgatgataatgggcactaggacactcagagctgctcggctgatgatcatgggcactaggacacacagaactgcccggctgatgatgaggggcactaggacactcagaagtgcccggctgatgatgaggggcactaggacactcagagctgcccgggtgatgataatgggcactaggacacgcagagctgctcggctgatgataatgggcactaggacactcagagctgctcagctgatgatgatgggcactaggacacacagagctgctcggctgatgatgatgggcactaggacacacagaactgctcggctgatgatgatgggcactaggacactcagagctgcccggctgatgatgatgggcactaggacactcagagctgctcggctgatgataatgggcactaggacacacagaactgcccggctgatgatgaggggcactaggacactcagaactgcccggctgatgatgagaggcactaggacactcagagctgctcggctgacgataatgggcactaggacacacagagctgctcggctgacgataatgggcactaggacacacagaactgcccggctgacgatgatgggcactaggacactcagagctgctcggctgacgatgatgggcactaggacactcagagctgctcggctgatgatcatgggcactaggacacacagagctgctcggctgatgatgatgggcactaggacactcagagctgcccggctgatgatgatgggcactaggacactcagagctgcccggctgatgatgatgggcactaggacactcagagctgctcggctgatgatgatgggcactaggacactcagagctgctcggctgatgatgatgggcactaggacacacagagctgctcggctgatgaggggcactaggacacacagaactgcccggctgatgatgaggggcactaggacactcagagctgctcggctgacgatgatgggcactaggacacacagagctgctcggctgacgatgatgggcactaggacacacagagctgctcggctgacgatgatgggcactaggacactcagagctgctcggctgacgatgatgggcactaggacacacagaactgcccggctgacgatgatgggcactaggacactcagagctgctcggctgatgatgatgggcactaggacactcagagctgctcggctgatgatgatgggcactaggacacacagagctgcttggctgatgatgatgggcactaggacactcagagctgcccggctgacgatgatgggcactaggacactcagagctgctcggctgatgatgatgggcagtaggacactcagagctgctcagctgatgatgatgggcactaggacacacagaactgcttggctgatgatcatgggcactaggacactcagaactgcccggctgatgatgaggggcactaggacactcagagctgcccggctgatgataatgggcactaggacacgcagagctgctcggctgatgataatgggcactaggacactcagagctgctcggctgacgataatgggcactaggacacacagagctgctcggctgatgatgatgggcactaggacactcagagctgctcggctgacgataatgggcactcggacacacagaactgcccggctgacgatgatgggcactaggacactcagagctgctcggctgatgatgatgggcactaggacactcagagctgctcggctgatgatgatgggcactaggacacacagagctgctcggctgatgatgatgggcactaggacactcagagctgcccggctgatgatgatgggcactaggacactcagagctgctcggctgatgatgatgggcactaggacactcagagctgctcggctgatgatgatgggcactaggacacacagaactgctcggctgatgatgaggggcactaggacactcagaactgcccggctgatgatgaggggcactaggacacgcagagctgctcggctgacgataatgggcactaggacacgcagaactgcccggctgacgatgatgggcactaggacacacagaactgcccggctgacgatgatgggcactaggacactcagagctgctcggctgacgatgatgggcactaggacacacagaactgcccggctgacgatgatgggcactaggacactcagagctgctcggctgatgatgatgggcactaggacactcagagctgctcggctgatgatgatgggcactaggacacacagagctgctcggctgatgatgatgggcactaggacactcagagctgctcggctgatgatgatgggcactaggacacgcagagctgctcggctgatgatgatgggcagtaggacactcagagctgcccggctgatgatgatgggcactaggacacacagaactgctcggctgacgatgatgggcactaggacacacagaactgcccggctgacgatgatgggcactaggacactcagagctgctcggctgacgatgatgggcactaggacacacagagctgctcggctgacgatgatgggcactaggacacacagagctgctcggctgacgatgatgggcactaggacactcagagctgctcggctgacgatgatgggcactaggacacacagaactgcccggctgacgatgatgggcactaggacactcagagctgctcggctgatgatgatgggcactaggacagacagaactgccaggctgacgatgatgggcactaggacactcagagctgctcggctgatgatgatgggcactaggacactcagaactgctcggctgatgatcatgggcactaggacactcagagctgctcggtctacagtggcagaaaccaggccgggggcttgagagggcagcgggggttgcctgtggagcacggggactttctagggtgctgggactgttctcagtcttgactggcgcagcgttacaagattatatatgcttgtccaaatgtatcaaactgcacacttgaagtgtatgcatttattccatataaagtatacctcaatagaggtgatttttaaaaagt

SEQ ID NO: 45 - DNA, 1883 bp, Homo sapiens
gatgcagcgtcaggcagccgctggggaggacgcggcgggagcctcagatgccacctactccccggcctctctcccagttgatgcttctattttaggcagcacattatttcctgctgtgattttttcagccttctaatttgggctctgagaccacctcataattccgtgtgtgttccttgacggaaggggcagcagagcacccagcactggatactcagtgtcagatgagtgaacaagcaaatggctgatgtctggtttcaatgtttgcctacgaggagatgtactccgctcccagctcttagcctcaccatgcagtggaagggaaggaggcttctgaactggcagctctacattcttcccctctctgtgcaacttgtttagatcacagaactggaagggaccccaaaaatcccattctcccacccctccgattagagaggaagaaacagaggcccagactcaacagacttgccaaaacccatggacctggttgggggcccacatctagcactttccccagcctcacagcctgccttgtttatttgttcagcagtttttgtttcgccatggcacagcttgttccgactctggaacatttatgagatgagccaatttttaaaaatcatagaaaataaatggtttgctcttggagctgaagggcggggcagccagggtaggagacaggttccaggccagttctggggcagaattttggcttatcctttgctgtgtttttttattctcctgccttgggaaccaaaaggatttcagtgggatttcctgcctcgatttctccagtactatgatatggaaagactagaacattcaaccatacactttctgattctcacctccaccatcattagttccattccaaactctggctcctacccattgagttcaagctacagcctgattcaactgatcaacctggggatggtggtgtcaggactagcacctggaccattctgcctcctctgcctgcaacatcctctctatctgcttgtgaactcttctccttcaaaacccagcggttacgtcaccacttctaaaaccttgaactgattccccacgtagtcggccagctactttttaaatttaaaaaagcccaaccagaataaacaggatagctaaaatgctgaatttctttgcttttttttgactggatattaactcagtgtactaatgttagctattatcttgtgttatttgatcataatttatttgcagatatgtaaatatgtgattaccaaaaacttgtaaatgaatacttgctaaattcaatttttttggccaacaaaaataatttatttaaacgttaattatgtccaggatggtagagggagtgggataaggatgacacaaggactcctggtggtaaaaaggtgactctaaggtcctatctagccttttgatacaacatggctggctcatttccccaaaaggcctggtacatagtaggtgctcaaaaagtatgcattatatgtataagtccgtgaggacgattacactctctgaccctggggtcaatgaagcttctgtcaaccccagttgaatgtcccatgaggggccaggctaagaatccattcaagagctgtcctaggccagatacagtggctcacacctgtaatcccagcactttgggaggccaaggcaagcagatcacctgaggtcaggagtttaagaccagtctggccaacatggtgaaaccctgtctctactaaaaatacaaaaattagccaggcatggtggcgggcgcctgtaatcccagctactcgggaggctgaggcatgagaatcccttgaaccaggaggtggagattgcagtgagccaaaatcactccactgcactcaatcctgggcaacagagcgagactctttctc

SEQ ID NO: 46 - DNA, 1819 bp, Homo sapiens
ttttgctctcctggcctccgtgcccccggtgtttggactctacacttctttcttccccgtcctcatctacagcttgctaggtactgggagacacctgtccacaggaactttcgccatactcagcctcatgacaggctcggccgtcgagcggctggtgccggaacccctcgtggggaatctgagcggaatcgagaaggagcagctggacgctcaacgggttggggtagccgcggccgtggccttcgggagcggggcgttgatgctggggatgttcgtgctgcagctcggcgtcttgtccacctttttgtccgagcctgtggtcaaggcgctgaccagcggggccgcgctgcacgtgctcttgtcccagctgccgagcctcttggggttgtccctcccgcgccagatcggctgcttctctctcttcaagacgctggcctccttgctgactacgctgcctcggagcagtccggccgaactgaccatctccgcgctcagcctggcgctgctcgtgccggtcaaggaattgaacgtgagattccgagaccggctacccacgccgatcccgggggaagtcgtcttggtgcttctggcctccgtgctctgcttcacctcttctgtggacacaagataccaagtccagatagtggggctgttgcctggaggatttccccaacccctcctccccaacctggctgagctgcccaggattctggctgactcgctgcccattgcactggttagttttgcggtgtctgcctccctggcctccatccatgcagacaagtatagctacactattgactccaaccaggagttcctggcacatggtgcctccaacctcatctcctccctcttctcttgctttcccaactcggctacgctggccaccaccaatctactggtggatgctggtgggaaaacacagctggcaggcctcttctcctgcacagtggtcctgtcggtgctgctgtggctggggcccttcttttactatctgcccaaggctgtcctggcttgcatcaacatctccagcatgcgccaggtgttctgccagatgcaggaacttccacaactatggcacatcagccgagtggactttgctgtgtggatggtcacctgggtggcagtagtgaccctgagtgtggatttgggcctggctgtgggtgtggtcttctccatgatgactgtggtctgccgcacccggagctcctccaggtcccggggctctgcatcctgagctatccaacaccactgtactttgggacccgtgggcagtttcgctgcaacctggagtggcacctggggctcggagaaggagaaaaggagacttcaaagccagatggcccaatggttgcagttgctgagcctgtcagggtggtggtcctagacttcagtggtgtcacctttgcagatgctgctggggccagagaagtggtgcagctggccagccgatgtcgagatgctaggatccgcctcctcctggctcagtgtaatgccttggtgcaggggacactgacccgggtaggactcctggacagggtgactccagatcagctgtttgtgagtgtgcaggatgcagctgcttatgccctggggagcctggtaaggggcagtagcaccaggagcgggagccaggaggcactgggctgcggcaagtgaggcaggggagctcactgacccaaagatttgcaccgtgtgggtctgacctcatcatgtggagtgcagagggccctgatgacatgtgtgtgatgaggaccatgacccttgaacccccttacctaacgtaactaataaaatgaagctgagagctttggaatcc

SEQ ID NO: 47 - DNA, 3162 bp, Homo sapiens
agaggaggctccgtgtctgcagctagtgtgtcaactcagcgtttctcctctcgtccctggtgaggtgtagcggcggcacgcggctggagatcccctgtggcctccagtttaggaagggtccagcatcccaagggaggggtgtgtgggcgaggggtctctgggcccggggtcgcggctgtgaggagaggatgcccgcgcggcggcatctcaggcacctggaggaggccgcgctttctcctcagggaaccggcgccttggcagcccccggcgacgccgcccccttcgcggcctaggttggtctggtgagccgggaagcgggcgtcgttcgcagcgccgctgtgaccaccgcgtcccgggcggagctgggctcagtgccggcctgggcctagagtccgagcctcgagctgccggcgtggggggtcgcgagtggcctaatacggcctcgaagccgaaggacccgagtccgagctcgcactccgacccgctggtgctgtggaaaactcaggtggccttccgctttcgtagcctctaaagtggggaccaagactttcacctcttaggattgtagtcgggattaaaagattttcccggaagagctaaagatggctgaatttctagatgaccaggaaactcgactgtgtgacaactgcaaaaaagaaattcctgtgtttaactttaccatccatgagatccactgtcaaaggaacattggtatgtgtcctacctgtaaggaaccatttcccaaatctgacatggagactcacatggctgcagaacactgtcaggtgacctgcaaatgtaacaagaagttggagaagaggctgttaaagaagcatgaggagactgagtgccctttgcggcttgctgtctgccagcactgtgatttagaactttccattctcaaactgaaggaacatgaagattattgtggtgcccggacggaactatgtggcaactgtggtcgcaatgtccttgtgaaagatctgaagactcaccctgaagtttgtgggagagagggggaggaaaagagaaatgaggttgccatacctcctaatgcatatgatgaatcttggggtcaggatggaatctggattgcatcccaactcctcagacaaattgaggctctggacccacccatgaggctgccgcgaaggcccctgagagcctttgaatcagatgttttccacaatagaactaccaaccaaaggaacattacagcccaggtttcaattcagaataatctgtttgaagaacaagagaggcaggaaaggaatagaggccaacagccccccaaagagggtggtgaagagagtgcaaacttggacttcatgttggccctaagtctgcaaaatgaaggccaagcctccagtgtggcagagcaggacttctggagggccgtatgtgaggccgaccagtctcatggcggtcccaggtctctcagtgacataagggtgcagctgacgagatcatgttgccttgtgaattttgtgaggagctctacccagaggaactgctgattgaccatcagacaagctgtaacccttcacgtgccttaccttcactcaatactggcagctcttcccccagaggggtggaggaacctgatgtcatcttccagaacttcttgcaacaggctgcaagtaaccagttagactctttgatgggcctgagcaattcacaccctgtggaggagagcatcattatcccatgtgaattctgtggggtacagctggaagaggaggtgctgttccatcaccaggaccagtgtgaccaacgcccagccactgcaaccaaccatgtgacagaggggattcctagactggattcccagcctcaagagacctcaccagagctgcccaggaggcgtgtcagacaccagggagacctgtcttctggttacctggatgatactaagcaggaaacagctaatgggcccacctcctgtctgcctcccagccgacccattaacaatatgacagctacctataaccagctatcgagatcaacatcaggccccagacctgggtgccagcccagctctccttgtgtgccgaagctcagcaactcagacagccaggacatccaggggcggaatcgagacagccagaatggggccatagcccctgggcacgtttcagtgattcgccctcctcaaaatctctacccagaaaacattgtgccctctttctcccctgggccttcagggagatacggagctagtggtaggagtgaaggtggcaggaattcccgggtcacccctgcagctgccaactaccgcagcagaactgcaaaggcaaagccttccaagcaacagggagctggggatgcagaagaggaagaggaggagtaatggtgtctccagagactttacatcggttcctgtcttctgtgcacagcagcacttgccgctgtgcaggcccacctctttggctctttgggtgggagagtttttccagattttagatttttctaggttatggccattttgtgtcttttgaggttgtgctgtgggggtttgggtttgagggaagggagcagggtggcggttgaggaacgcttcagccttagctgctacctttcggcagcagtgaaatacaagctgcagcctcggctgccagggctcccttttgacttattgtcgccactgccccttggtgctgtgtggtcccagtggaaggaggggaagattttggaaacctggtagccaccagtaaggtgattctccgccctgttggggcctaaatttgggggcttttgggcaacctctccgtgtactgcgtctgtccacactcgattgggccccaggtgtgtatgaggcgctctggtaaggtgctcaggccagttgcaatgtctgtcagtaacgaggcttttgatgtgttgagctggaggtgagtggaccgggggctgtgttttaagctgcttccttggcatttggcatcactgccttctgttcccgggggagcatggatcttttgtcctcactgctttctaatggggagggctgagggctccctgtccccacagcaggtatgttgggctctgccccagccccacacttgctctgaaaaccaagtgtcagagccccttccccttgtttttattttactgttataataattattaacttccttgtaatagaaataaagtttgtacttggagttc

SEQ ID NO: 48 - DNA, 2189 bp, Homo sapiens
ggttccaaacagccgtggcccgcggtgtctggcgctcggtgggtgtggttgcccctagtttgaggcctgcccgattacccgcaagacttgggcagccccgggcgccgctccgaccacgacagggaaaggtaaagcgaactgtcctccttggggctagccaggctcccctgcgagggggaaggtaatggtttcaagctgcccgggctgggttccgaatctctaggacgccatggctgcgatctcctcgctttcctggacatcttacctccggatgtactccagtctcagtgcccctcaataaacgttaacctgctttgccaaaatgtaaatgtttaaaaaggtgaagaagcaaggaattgttcgttttaccttaaggttaagatttactttaaaggtagatttgtgctgtagcagaaactggtgacaaattgccttcctcttattacctgggaagataactactggttttcaacttgtgataaatactccttccgttgtcttttgcccccagccagatctgtttcaccgagaaggggtagtttgcacaaggtagtaactttctccaagttcccatctagctttcttaactaaccttttttctctcctttgggcggcagttgatctgctggacacttacttgccttaacaaggtttgttaaacacctagtatatgccaggaggtatgccagggattggggatgcagaaataaagaagatgtgttcgcagtgcccaagttcactcaaacctcgagggggagcgtgttgtcaagtgaacagatagttctagaatctagacaatgcgacacattcttgggtaggtttatggttgcgcagaggagactaatggaatggatgacctaaaagtggactgggatgggggtggcagggctgagtctgtgagggtgggcgggagggaacctagtcccagagtcttctgcagcctggaccagactacttaagcactgctgggtttagactgtcctttaaaataagagccgctagaagtgaacttctcattctgtccgtccctaattctgtccttctctaaaaggaaccttaatctcatctttaaaataaggagaattactgagtgacctgaaggacccttttcagctggaaagtctgaactgaccaacactggatgaatttgaccatttcttaggagactggaatgttaagtttctataaatgaatgaaccagttctctcttgtttggagcaatgctgaaattccaagaggcagctaagtgtgtgagtggatcaacagccatttccacttatccaaagaccttgattgcaagaagatacgtgcttcaacaaaaacttggcagtggaagttttggaactgtctatctggtttcagacaagaaagccaaacgaggagaggaattaaaggtacttaaggaaatatctgttggagaactaaatccaaatgaaactgtacaggccaatttggaagcccaactcctctccaagctggaccacccagccattgtcaagttccatgcaagttttgtggagcaagataatttctgcattatcacggagtactgtgagggccgagatctggacgataaaattcaggaatataaacaagctggaaaaatctttccagaaaatcaaataatagaatggtttatccagctgctgctgggagttgactacatgcatgagaggaggatacttcatcgagacttaaagtcaaagaatgtatttctgaaaaataatctccttaaaattggagattttggagtttctcgacttctaatgggatcctgtgacctggccacaactttaactggaactccccattatatgagtcctgaggctctgaaacaccaaggctatgacacaaagtcggacatctggtgagtgggctagtgggctagactcttcatctgcttccctaaaagaatggtacattttgtctttcagctcatttacttactgcatacattcactttatccctttgacatgaatatttctgtgaccagagtaaaagaaggtcttttgcatttagaactcaatatatttcattaaactagtttcaaaaattctttttattcagtgataattggttggttttggatttttggttcctgaatcacaagggaaagttcttaatgtaccataagcattaaattttaatacatttctgttaacctattaaataaagtatttgtaaccct

SEQ ID NO: 49 - DNA, 1693 bp, Homo sapiens
attcacctcgcggccacaggagctcagcgccggcgccgcgccgcccagccccgccgagaggggcgcactcgccgccgcggggcccgccgccgctcaccgcagccccctcctggcgacccgcaagtcctctcaaactgtgagtaactaagtggtttgtgcatcattccagaagcaaagctaaaatttttagcggtgttgtcgacttgacctgctaatttcctgttctggaatcgagagaagactcctcaacaagttgctgcaatgtctgtgtctaatctatcatggctgaagaaaaagtcccagtcggtggatattaatgctccagggttcaaccctttggctggtgcaggaaagcaaacaccacaagccagtaagcccccggcacccaagacccccatcattgaagaagagcagaacaatgcagcaaatactcagaaacatccttccagaaggagcgaactgaagaggttctacacaattgacactggccaaaagaagaccctagacaagaaagatggaagacgaatgtcttttcagaaacctaaagggactattgagtatactgttgaatcaagggattctttgaatagcatagccctgaagtttgatacaacacctaacgaacttgttcaattaaataagttattctcccgagcagttgttactggacaggttctgtatgttcctgatcctgaatatgtctccagtgttgagagctctccatctctaagccccgtaagtcctctgtcaccaacatcatctgaggctgaatttgataagaccactaatcctgatgtccatccaacagaagcaactccctcatctactttcactggtattcgacctgcacgagttgtatcttcaacttctgaggaggaggaagcatttactgagaaatttcttaaaattaattgcaaatatattaccagtggcaagggcacagtcagtggtgtgctgctagttacaccaaataatataatgtttgatccacataaaaatgaccctttggttcaagagaatggctgtgaggaatatggcatcatgtgtccaatggaagaggtgatgtcagctgcaatgtacaaagaaattttggatagcaaaataaaggaatctttacccatagatatagatcagctatcaggaagggacttctgccattcaaagaaaatgacaggaagtaacactgaggaaatagactcaagaatccgagatgcaggtaatgatagtgccagcactgctcctaggagcactgaggagtctctttctgaagatgtgttcacagaatcagaactttcccctatacgagaggagcttgtatcttcagatgaactgcgacaagataaatcttctggtgcgtcatcagaatctgtgcaaactgtcaatcaggctgaagtagaaagtctgacagtcaaatcagaatctactggtactcctggtcacttaagatctgatactgaacattctacaaatgaagttgggactttatgtcataaaactgatttaaataatcttgaaatggccattaaggaagatcagattgcagataactttcaaggaatatcaggtcctaaagaagacagcacaagtataaaaggtaattcagaccaggattcttttcttcatgagaattcgttacaccaagaagagagtcaaaaagaaaatatgccttgtggggaaacagcagaatttaaac

SEQ ID NO: 50 - DNA, 2028 bp, Homo sapiens
atgcggaaggggcggtagccggccgggcctgggaacgtggctggttggaggaggtagatcaccctttctgcgggggacgatttcgtcggtggctgctaccatgaggttgaatcagaacaccttgctgctggggaagaaggtggtccttgtaccctacacctcggagcatgtgcccagcaggtaccacgagtggatgaaatcagaggagctgcagcgtttgacagcctcggagccgctgaccctggagcaggagtatgccatgcagtgcagctggcaggaagatgcagacaagtgtaccttcattgtgctggatgccgagaagtggcaggcccagccaggcgccaccgaagagagctgcatggtgggagatgtgaacctcttcctcacagatctagaagacctcaccttgggggagatcgaggtcatgattgcagaatggtaatgatagtagcaacttcagagttgttgagaattaaatgagatggtgtctgccaagtgcccgcactggagcctggcacacggcgtcagcgccgctcctgttgtctctcctagagcccagctgcaggggtaagggccttggcactgaggccgttctcgcgatgctgtcttacggtaagaaagtgtgagcagacaatgcgggaagtgggcaggccccaggtgaactttgttcaggtgtgagggttgggggcaggtgaaggttcctcctctgcagcttgggacaggagggtgggggcaggcgcctccttacttgcccctgtctcatctcctctgcgaggagtgaccacgctaggtctgaccaagtttgaggctaaaattgggcaaggaaatgaaccaagcatccggatgttccagaaacttcactttgagcaggtggctacgagcagtgtttttcaggaggtgaccctcagactgacagtgagtgagtccgagcatcagtggcttctggagcagaccagccacgtggaagagaagccttacagagatgggtcggcagagccctgctgatggctgggccttgtgggcagccactctgtgtgagcagggtgttgggcccatacacttcaaagaccagagccctgcactgggagagtgctcctggcccaggctgggaatcacctttcgaggcccttcagactctggcggggcttgctgtggcctccctccagctagtggtgtggctgagcagactccagggccagggccagttcccttctcccctcccggccaaacccagacccagactctaggaggctggaatggagggcagggatccatgggagatgtcgggatgaaggtgggagccggaggtgcagggggacctggaacatggatgggagtggacaggcctttctccttagaggccagaagtgctgccctggctgggagtgaagctccaggcactaccagctttcctgattttcccgtttggtccgtgtgaagagctaccacgagccccagcctcacagtgtccactcaagggcagcttggtcctcttgtcctgcagaggcaggctggaaaacacccctctgctgataaagctcagggggcactgaggaagcagaggccccttgggggtgccctcctgaagagagcgtcaggccatcagctctgtccctctggtgctcccacgtctgttcctcaccctccatctctgggagcagctgcacctgactggccacgcgggggcagtggaggcacaggctcagggtggccgggctacctggcaccttatggcttacaaagtagagttggcccagtttccttccacctgaggggagcactctgactcctaacagtcttccttgccctgccatcatctggggtggctggctgtcaagaaaggccgggcatgctttctaaacacagccacaggaggcttgtagggcatcttccaggtggggaaacagtcttagataagtaaggtgacttgcctaaggcctcccagcacccttgatcttggagtctcacagcagactgcatgtgaacaactggaaccgaaaacatgcctcagtataaaacaaacattat

SEQ ID NO: 51 - DNA, 2294 bp, Homo sapiens
gagctggggcgccggagtccacgcaccggggatggaggcgctgggtgacctggagggaccacgcgcaccaggaggtgatgatcctgcaggaagtgcaggagagacccccgggtggctttcgagagaacaggtttttgtactgatatcggcagcttcggtgaacttaggttccatgatgtgctattctatacttggaccgtttttccccaaagaggctgaaaagaagggagccagcaatacaattatcggtatgatctttggatgttttgctttgttcgagttgctggcatccttggtatttggaaactatcttgtacatattggagcaaaatttatgtttgtagcaagaatgtttgtctcaggaggagttacaattctctttggtgtattggaccgagttccagatgggccagtatttattgctatgtgttttctagtgagagtaatggatgcagttagctttgctgcagcaatgactgcatcttcttctatcctggcaaaggcttttccaaataacgtggctacggtattgggaagtcttgagactttttctggactggggctaatactaggtcctcctgtaggtggctttttgtatcaatcctttggctatgaagtgccttttattgttctgggatgcgtcgttttgctgatggtaccactcaatatgtatattttacccaattacgagtctgatccaggtgaacactcattctggaaactgatcgctttacccaaagttggccttatagccttcgtcatcaactcactcagctcgtgttttggcttcctcgatcctactctgtctctctttgttttggagaagttcaatttaccagctggatatgtgggactagtattcctgggtatggcactgtcctatgccatctcttcaccactatttggtctcctaagtgataaaaggccacctctaaggaaatggcttctggtgtttggcaacttaatcacagccgggtgctacatgctcttagggcctgtcccaatcttgcatattaaaagtcagctctggctgctggtgctgatattagttgtaagtggcctctctgctggaatgagtataattccaactttcccggaaattctcagttgtgcacatgaaaatgggtttgaagagggattaagtacattgggacttgtatcaggtctttttagtgcaatgtggtcaattggtgcttttatgggaccaacgctgggtggatttctgtatgagaaaattggttttgaatgggcagcagctatacaaggtctatgggctctgataagtggattagccatgggcttgttttatctactggagtattcaaggagaaaaaggtctaaatctcaaaacatcctcagcacagaggaggaacgaactactctcttgcctaatgaaacctagtccgatggatcctggattgatacaaggttgagaaatgaatgctcctggccttaaacatcaccgtaggaagggtttttaaaattttacgcgcaaaactccgtggaccccgtgccagtgtcttggaagtgtcaacgtgtttttggatgatcctgtattgggctgtacttactgtgatactgaaaagctgtcctgctgaagcagctatatttgaaatattaagtatgaaaggagtaattaaaaacaagcaaaacaaaacaagacttagtttttaaatgaccaaacttgtccttaaagatgttgttattaactcgagttagttcttatttcctctgtttattttttattctaagtacactgattctgtgaatgtaccttttttattaacagggaaagaaatgaattaatttgatatgctctaaatacataaaggtgcttcaaaatatgtagaaacattactatgaaatcagtttttaaaagatatactttctctttgtcctgaggtttttcggtcttgttcaaaaggaagaattcttgcctgccatacagaaactctctagcactccctgaccttaagcttttctaaaaattctgtttgtgtgaaaagtacaagaataacaatacttacaacttccatttttgtaacctacgttcacttatgatctggatttataaacattacttggtataacgtttttcatttcctttaatgtctctgttttttggctctaccatctgttttgtttttgtttttatctatatcttggtagatgtatttcatccctagagcaggtcagcctccttcccctaatgcgaatgcttgttttgttagggaagggcttcctccaacttcgtgtgaaattgtgatgttgaagtgaataaatgtctattgtgt

SEQ ID NO: 52 - DNA, 2894 bp, Homo sapiens
ttcaggcaaacagtccacttactagggcgccagtttattacaaaggatatgttacaggatacacatgaacagccagatgaagagataggtagggtgaggtctggaagggtcccgagcatgggagcttctgaccctgtggagttgggagtgagccaccctcccagcacatgggtgcgttcttaatcaccaagggaagctcctcaaaccctgtagttccaaatttttacggaggcttcatcacataggcatgatggattattaactcagtctctagcttccctcccataccgggagggtagggggtggggctgaaagttcccagcttctaatcatgccttgctctttctgtgatcagcccccatccaggacctcattgcctcattggaaccaaagatgcccctgtcacccaggaaattccaaaggatttaggagctctgcgtcaggagccaggatcacagaccagataatagaacaaaagatgctcctggcacccctgctgcttaggaaatgacacaggttttaggatctctgtgtcaggaactggaggctgagaccaacacatatgttatcatttcacagtgataggtcaaacaggtcatggtaatggtgggagctacctcactgggggcctatgggggtgaaaggagatcatgggtgccctcagcacaccacttgggtgaagggttagtaccagaccccacttctggttttgtctgccagcctggggcttttttttccccttacctattagattatttcataactcttttcctaccagaaatgcatctcctgctagactggtccagatcaaaaccctgctctttcactgaggctctcccggttggcatatcctgcagaatccctccgtccagagatcagtcggtcctgtggttgtttcacaagtgactcctctgtccagagatcagtcggtcctgtggttgtttcacaggtgacacctccgtccagagatcagttggccctgtggttgtttcacaggtgacccctccatccagagatcagttggtcctgtggttctttacccctggtggtcatttcactcaccctcatatgcagtcgttcctgtgtccatcttccttcctggagcccacattcctccaggccaggactgtggcttctctctgaattgccccacagcttttttccaagtgctctgctcacagtagacatcaaatagatgcttgttgagtcatggtgcgggaatgagggagcctagagaatatctttctggatcctctactgttgatactagaaggagcctaagaagccacccggctgatggttttctgaccctgcctttatcagcagagccttttttcaaatgaggtgttgcacaaaagcctgatgtgtggctgtgtaaaacagaaataaacaatcttctagccaaagccccattcccacagttcagggggccataggcccaggaattccataggatgtcactgcccaactaggaaactgctcagttagctgaaccccttctgagggccagaggaggacaggatttgtcccaatccagacactcggccagggaataagggctgaaactcatctctcaacctagtccagccctccccctctttggattgtcattatcaagttgattgattgtatattatcaggactctcttaaccacaggtgccagaagcccatgccagaagcccaacccaaagtggcttaaaccaaagagaaatttataggctggtataactaaaagattcagaggtagcactggctcatgcatgagtggaccggggtgacaagatatcagatggcacctgactgtcaccaccacaggcagactgttcaccatctcagctctgtccccttcctttgtcacaatgacgaagccaccgcatctcccggctaatggtgtaccagcctggaaagacagcctccctctctgattggcttcagcacaagtcacaggaatgactgcctggtctgacccgtctcctgtgtgctttctttgggagtaaagagttaacaggcccttcccccttccacagagagtgcttcccttatcctgcggaagctctgcccctggatgaaggaggagagcggctatgttagtgctgatgactggcacactgcacttgcgctaggaagacagcatgaactgcacccctccagggaagccacggcctgggctcccctgcatacagtggttccttaactgggcacgagtcccttgctgggacttaggaaaactctgcctaaagtccattgcaagaaatactgatccctgtgggatgtatatgtggctggttcccttgctcactgagagactagaaaacagcacctggacccctgggctggttccctctgaggaaaggatctgtgtcatgagtgaagcccgggcaggtgtggtctgttcaactttgatcatctggttgagcctaaggtgaccaagagtgggcggtgcacccctgattctgttgctgtgactgaggaaatgctaagctctgtttggccaggcctgggcagcctgcctctggagtaggggtggagagccatcctgcaacacgaggttaccaggagaaggagttttggttgggcacagacatccagtgtccactccaggatgtttgggagacaccttgagaactcttcctaaaagctgcacttaaccaagctcctggtggttctgtgatcccttacattttctccagaggcagagagttggctgactgacttttgcccttgggcagattgtgaggctctacccagcatgctggtatattatgttccctcagatgggggtgagacccttggcctgggggctgtaaaatgatctgtttctgtgaggagactttccatggtgagattgctagtgtctcagagaataaaggacagaaccagtccaagtcaaagc

SEQ ID NO: 53 - DNA, 1727 bp, Homo sapiens
cgctggcccgatgatatcgcctgagccgtgaatcctcctggccaacgccagggcttcctcaggctttgtcattgcagggacacttccctccctccctccttctctgtctctctccccactgcctctctttctagcttaagccaatttgagatggattttctgtcacttgctgttgaaggagtcctggtccagcccaggtggatttcgtgcaaatgaaacccacataatgcaagtctgtgtggaagtgatcgtctgcgatcggcgcgtgcccttcgccttatgaacaggagccatgggtgacacgagcgcctcggctgggccgccggggtccgtctgaggtccatctgtctccagggcacagaccccaggcctggacagagccgggcacgtgtgaaacgggaagatgtcagctggggaaccggccgcagctcccaaccttgatgaggaaagaaacctggtagctgttcctgcagaaaagccacatggctcgccgcatatctccacgatggtacctggcttctcccatcctcaccgtccacgtctactcccttcccatcccagacccgagacgcagaaggctttagacagagcagcttcatcaggaatctggactgggctgaggtacctgctcccagctcctcaaagtgccatccggcacatccacccacgtgggacaagatgcagcttccgtggctgcttgcaggggatggaagactcccacagacgcctgctaacatcacatgcccaagtgtcaccgcgatgccacgtccagtctgagccattcctcgcccatgtccctgtccttgttgcatagccggcctccagcgtgtggcttcgtgcagcgaccagaccgtcgtgtgactttctgccacggttgctggggttggcactggggcagacctgctggggggttctgggttgcagctggagcgctgggactggcaggacgcctctcttcgtgctgccccagggcccatccacgtcgactcccggcgtgaagcgtgtgggctgcctcacagcctggcagctccaggactgctgggggctccccccgcggccccggctctgctggcagcactgggccagaagcaactcaccttcacacagccgccctgaaggcacgtaggttccggaagggaaccttgggaaatgggattcgtgccatactcatgggagtcccaagctccctcgcccatttcactccatgaggataggaggggacagctgctgacgacctggcagagaccctgcgccaggccccaccccaccggcaccctgatcttgcacttccggcctcgagaatggtgagaaactcctcgtgttgtttataagccacccggtcagtggccctctgaccagggccagcagctctgaggccctccccccgccccggccccctccccctcactcccacacccaccctctctggtttttctaaactcctcctccccattctaacccctctctctggcccctgcgggctctggggaagccccggggacagtaggcaggggccaggctgctgggctccccgaggcccccgggggctgggagtgggttaaagccgtccagggcttcgctagggaggggctccagcaagaccctgtttaaacctccttcccaccacagcgtgggcgccacgtcgcactctctgggtatgtctcaaggtgtggataatgcagacttctgagtttaaaaaaataccaaaaataaaataatcaggcatc

SEQ ID NO: 54 - DNA, 2705 bp, Homo sapiens
gacggcaagcgctccgggaagcagaagaggacagaccgcgtcaagggcaaatgcaccctcatgtgagcccggaacgcccgcctgcccgccgcccacccccactgacccccgctgcctcccccaacaccgacaccctcctcggcctcctcctcttctctcatccttcctccgacacctcggctggggaaaccgaggccaccgcccccccctccgctgcccctgcccaccccgaggcagggctggggcttttcttcctcccctgctctctctccaccctcctgttctgtctgtaccctccaaaaccaagagccggaggtggcccccttgtcctgcagatgggaaaacaggatggggagctggcaagaggagctgcttgttcccaccaggaccagaggaggctgcgtttccccgtttccatctctttccctggggtgtccccagccagacctgcgcgtcctgtccctcacatttgatcactgtgaccttctgggggaggggggagttgaaaatgcacatcggcctcagatatttttttcttttttctcctatttggtgttaacatacacccaagcccacccggcccgtcgtgacctctgatctgtgcccactcctccggttccagacgcacctctctcctctgtcttcacagtggggtgtggggcccgtgggatgggcctcaggccaccaggcaataaccacagggcctgcagcagtgcccctgccagccccgaatcccacccccgggaccagccacatccacagcacaactgccccgctggagaggcaccatgggcgtggaggggcttcccggacaccgcccacccgggacccgcctcttccaccaagacagagacgttagcaacgcatggcgggtggggacctggggtgctcaggagggggtacccggggccccggccagagatacatcaattacacccccgtggggggacagccgatgggagccagcaccagcaggatccgagggcgccccggacagaggtctgccccacccacttcctccccaccacctgtgccccagagagcagggcctgcccgggaaggtggcgtcctggagtcgagtgtacctgcagccatgaggttctgggtgttttttgagagagtctgagtgacaccacactcgtgtgaccccacagggttgtgtccaacatacacggaagtggctatgggatggtgtatttgtgcaacctggggtgcgcggatgggtgacttgtatctaagtgcatctgcgtgtatacctgtgtgtgtctgtctgggatgatatgtttttgtggcagtctgtgtgtgtaatagtggtgtagggtatacagagaggtgggtagttgtagatacctgtgtgtggttgtcagcaagactggatatgtgtgaggtgtctgtgtgaatctttgtgcctgtatgagcatgactatattttggggagtgggtgatatggtttatctgagagcatttatctgtaaatatgtttgtcctgattgagggacacgatctgtgttccactctatagcaacatgactctagcaatgtgactttcggttccaaatctgtatcagtcagctactgctgtgtaacaaatgaccacaaatgtagcaaccagaaacaacacatgcttattatctcatagattctgtgggtcaagagcctgggtgcaggttggctgggtcctctacttgggatctcaggaggctgcaatcaaagcattcgccaggcagaggtctcatctgaaggcctgatcggggaaggatttgcttcttagaagctcatgtggttgttgcagcattcagttccttgctgttgcaagactgaaggcctcagttcctcgctggctgttggctggaagctgccctttgttctgtaccatgtgggtctctccacagcggggctcggagcatggcagctaagttagtgagggaaggtgagatggaggttttggtcttattgggtgtgaggaagcaacgtgtgtgtgtgcgcacgcccttttgtgcagtgagagagagagagagattgcacacatgtgtctctgtagtcatgtggccaggtgggactatgtaggtaacagattgctcgtgtctgatttggtacaagcatgtttgttttcctctgtgttcgtgtgagtgtttactcaacaaatgtttattggacacactcagagagagggagtgtgcacacgtgcgtgtgtgttgctatccagcacgtggaccgggctcccagaagagctggcattgtgtctgagcagagctgggtccccccaaaacttgggctggcccagggcccaccagcagctgatgttgcctcctctcctgtcctggcagtagcttctgggttctgaaggtgccggagagagtgaggctgggcaggggtctgcggccctttctcagggacacaccctgatagcacaatctccttggggccctgcccacctccaggcctctcccacctcaggccctgcccgaccctggggagagagggcatctgcaataggaggggacccgagcctgtcctggctgctggcccatcctgcctgggcatccctggtgctggggactgtgccaggccatgcttgctgtgactccgcccctgccccctctccccccgcatgtgggtgcccccactcccccatcgtggggtctgtgtagccttcgctctagacatagtcttcctgcaataaaaaagtggatcctgcattcccc

SEQ ID NO: 55 - DNA, 2249 bp, Homo sapiens
agtgctgaggtggggtgaaggaggaaaggccgagctgggagaggagcatgcgctcgccacaaccacccccaccctgctctccacgcgccaggtcctgcacgctgggtgggagggtgacgacaaggatggaggagcagggccccacccccgccctcccagggcgcaccatctgcagcagagagggccttgagctgcgtgggaaatgcgaatctccttcaaggcaggggtttatgtcccccaccccacgggccatgtgacatttataactctttggtggaatgagaagaaaggtatttgggatatgatcaactccggcaatgccattgtgtgtttacggcaacagcgggacagtggttccagggggcggccccgggcctccgtgacgtcaccggattgtcgcgtcaccgtcgcctaccccggcggcgcaacgcgccctgcaggaaagatgacgtcaccgtcggagctcctgcagaccagtgcgcgctcggggagttggcgagcgggtggcggctgggagacgtcccgagcgcacgggactgacaggcggcagaagccgggcggggtccgctgggctccggacccgtgcccccccagttccagggcggccccgggcggccccgccccctcggtgaatgccgcgggccggccaatccgggcaggccgcggcgccgcgcagcctatcagcggccagagctcgcgtgcgcttccgcgttcgcgtgcgcttccgcgttctcgtgagctcccggcccgctgccgcagggactgggagcgggctccgcagcgcactctagcccgcggctcggctcagtcggtctgcgaggatccggcccgccgccccccgggggacccgatggcctcggagggcctggcgggggcgctggcttccgtgctggctggccaggggtccagcgtgcacagctgcgactcggcgccggccggggagccgccggcgcccgtgcggctgcggaagaacgtgtgctacgtggtgctggccgtgttcctcagcgagcaggatgaggtgctactgatccaggaggccaagagggagtgccgggggtcgtggtacctgcctgcggggagaatggagccaggggagaccatcgtggaggcgctgcagcgggaggtgaaggaggaggcggggctgcactgtgagcccgagacactgctgtccgtggaggagcggggcccctcctgggtccgcttcgtgttcctcgctcgccccacaggtggaattctcaagacttccaaggaggccgatgcggagtccctgcaggctgcctggtacccacggacctccctgcccactccgctgcgagcccatgacatcctgcacctggttgaactagccgcccagtatcgccagcaagccaggcaccctctcattctgccccaagagctaccctgtgatctggtctgccagcggctcgtggctacctttaccagcgcccagacagtgtgggtgttagtgggcacagtggggatgcctcacttgcctgtcactgcctgtggcctcgaccctgtggagcagaggggtggcatgaagatggccgtcctgcggctgctgcaggagtgtctgaccctgcaccacttggtggtggagatcaaggggttgcttggactgcagcacctgggccgagatcacagtgatggcatctgtttgaatgtgctggtgaccgtggcttttcggagcccagggatccaggatgaacccccaaaagttcggggtgagaacttctcttggtggaaggtgatggaggaagacctgcaaagccagctcctccagcggcttcagggatcctctgttgtcccagtgaacagatagagaggtggaggaggtgacagggagctaggcagccgtgctccctccagtgcggacttgtctccctctgagggaggcaagaggctggcgatcagggatcttgttgcattgggagcaggggcggctctcctggtccccaggagagatgctttgaggagcattcctctagattgcacaagggacagtgcctttaaccaagcgaggagtccaaagctcaggacctgactaccctgagggcacgctgacgcctctccccagggggatggggagctttctgcacccccagtggcatctcctcatcacgttctgtgccgtccttgggaaaggcctgcattctgatccttccaggcccttcgagcatggaggggcactggggaaggtcccccgagggaggagcacgttgctgagtaaagaggtgttactcaccttg

SEQ ID NO: 56 - DNA, 1689 bp, Homo sapiens
gcggctgcggcttctgctcagggaggcggaaggcggcggcgggagcggtcatggaggcgggcgccggagccggcgcgggagccgcgggctggagctgcccgggcccaggacccacagtgaccactctaggctcctatgaggcttccgagggctgtgagaggaagaagggccaacgctgggggtccctggaacgacgggggatgcaagctatggagggggaggtgttactcccagctctctatgaggaggaagaggaagaggaagaggaggaagaagaggtggaagaagaagaagaacaagtgcagaaaggtggcagtgttggctctctgtcagtcaacaagcaccggggactgagcctcacggagacagagctggaggagctgcgggctcaggtgctgcagctggtggcagaactggaggagacccgggaactggcagggcagcatgaggatgactccttggagctacaggggctcctggaggatgaacggctagccagcgcccagcaggcagaggtgttcaccaagcagatccagcagctccaaggtgagctgcgttctctacgggaggagatttccctgttagagcatgagaaagaaagcgaacttaaggaaatagaacaggaattgcatttggcccaggctgagatccagagtctgcggcaagcagcagaggattccgcaactgaacatgagagtgacatagcatccctgcaggaggatctctgccggatgcagaatgaacttgaagacatggaacgcattcggggagattatgagatggagatcgcctccctccgtgcagaaatggaaatgaagagctctgaaccatccgaagaactgcaggagctgcgggaacgctaccatttcctgaatgaggaataccgggccctgcaggagagcaacagcagcctcacggggcagcttgcagatctggagagtgagaggacacagagagcaacagagagatggctgcagtcccaaacactgagtatgacgtcagcagagtctcagacttcagaaatggatttcttagagcctgatcctgaaatgcagttgttacggcagcagctacgggatgctgaagagcagatgcatggcatgaagaacaagtgtcaggaattgtgttgtgagttggaagagctacagcatcatcgccaggtcagtgaggaggagcagaggcggctgcagagggagctcaagtgtgctcagaatgaggtgcttcggtttcagacctcccacagtgtcacccagtcatcccctacccccaatccccccatcttctccttgcctcttgtaggcctggtggtcatctcggctttgctctggtgctggtgggctgagacgtcgtcctaatgcagaacatgtttgggttgtggaagcctatggtattcttggctattgcagctgtggctctgtatgtgttacccaacatgcgacagcaggagtcagagttctgcctcatggagtgatggcagaccttggccagcgcgagggcagatccccagtggccaccaccctcagctttgggcaggacacactgtgccagaaccctccccatatgttccatgtgtccccatctcctcagcctcagtcacccaggctgaaaaggcttgtggggagcggctgacttccatctcctgccttgtgtaagaacctgagttccttgtaattaaatatcaactgaatt

SEQ ID NO: 57 - DNA, 1979 bp, Homo sapiens
caataaccaggacaatgagaaatttacatctggatgtcagcggccaccaggctcctctcagagggccatctcctgtacagggtgttgtgggggcttcccctagacaaagaaagatggggtctgcttgctctgagttatctataataattatcttacctttttgtttctttttataatttctttcttttttgagacagggtctcactctcttgtccaggctggagtgcagtggcctgaccatagctcactgcactgcagccttgacctcctgggctcaagtgatcctcccacctcagcctccccagtagctgggacggcaggcacatgccaccacacccagctaattgtttaaatttttggtagagatggggtctcgccatgttgctcaggatggtctcgaactcctgggctcaaaggatcctcctgactcagcctcccaaagcaccaggtgtactttgggcctctcctgcctttttgattgaaagttccatgacgggcacacctggtgatgggtcctgagatggaacctgcttggcctccctcagcctggcctgagggacactcatagtccctcctctctccctaggggccaaaccagtgctcctgccacctctctggctgccccctagagcctgcccatcccagcctgaccaatgtccacagccagggagcagccaatcttcagcacacgggcgcacgtgttccaaattgacccagccaccaagcgaaactggatcccagcgggcaagcacgcactcactgtctcctatttctacgatgccacccgcaatgtgtaccgcatcatcagcatcggaggcgccaaggccatcatcaacagcactgtcactcccaacatgaccttcaccaaaacttcccagaagttcgggcagtgggccgacagtcgcgccaacacagtctatggcctgggctttgcctctgaacagcatctgacacagtttgccgagaagttccaggaagtgaaggaagcagccaggctggccagggagaaatctcaggatggcggggagctcaccagtccagccctggggctcgcctcccaccaggtgcccccgagccctctcgtcagtgccaacggccccggcgaggaaaaactgttccgcagccagagcgctgatgcccccggccccacagagcgcgagcggctaaagaagatgttgtctgagggctccgtgggcgaggtacagtgggaggccgagtttttcgcactgcaggacagcaacaacaagctggcaggcgccctgcgagaggccaacgccgccgcagcccagtggaggcagcagctggaggctcagcgtgcagaggccgagcggctgcggcagcgggtggctgagctggaggctcaggcagcttcagaggtgacccccaccggtgagaaggaggggctgggccagggccagtcgctggaacagctggaagctctggtgcaaaccaaggaccaggagattcagaccctgaagagtcagactggggggccccgcgaggccctggaggctgccgagcgtgaggagactcagcagaaggtgcaggacctggagacccgcaatgcggagttggagcaccagctgcgggcgatggagcgcagcctggaggaggcacgggcagagcgggagcgggcgcgggctgaggtgggccgggcagcgcagctgctggacgtcaggctgtttgagctgagtgagctgcgtgagggcctggcccgcctggctgaggctgcgccctgagccggggctggttttctatgaacgattccggcctgggatgcgggccaggctgcaggcggcatagttgggcccattcgtcctggaaagggactggggggtcccaacttagccctgggtgggccgggccgggctgggctggggtgggccccggtcggctctggttgttggcagctttggggctgtttttgagcttctcattgtgtagaatttctagatcccccgattacatttctaagcgtg

SEQ ID NO: 58 - DNA, 1736 bp, Homo sapiens
gtgtgcgggggccgccattttccgggagtgggaggtgcactttacttcctgactcctttcctttttccagtggttatcgcggcgcccaccggcctctgatctctgagtcttctccaacccacagacgttttttgttgctctggttccaggaccttctccacaactaggccattttccctgccaggtgtcctttttgacctcttgacctctgactcaaagggcctgctccccgtcatgtcttcggcctggagaagagccagctcctgaaggaggcctttgataaggccggcccggtccccaagggcagagaagatgtgaagaggcttctgaaactacacaaggaccggttccgaggtgacctgcggtggatcctcttctgtgcagacctgccgtccctcatccaagaaggccctcaatgcgggctggtggccttgtggatggcaggtactctcctgtcgccccccagtggcgtccccctggagagactcatacgggtggccacggaaagaggctacacggcccagggagagatgttctcagtggccgatatgggcaggctggcccaggaggtgctgggctgccaggccaagctgctctctggtggcctgggcggtcccaacagagacctcgtcctgcagcacctggtcactggacatcccctgctcatcccctacgacgaggacttcaaccatgagccgtgtcagaggaagggccacaaggcacactgggcggggtcctgctgggtgttcgggctgtgcccagtctcggctacactgaggaccctgagctgccgggcctgttccacccagtgctgggcacgccctgccaaccaccatccctgccagaggagggctccccgggagctgtctacctgctgtccaagcagggcaagagttggcactatcagctgtgggactacgaccaggtccgggagagcaacctgcagctgacggacttctcgccctcacgggccactgacggccgggtttttaaagcccatctgggagcagttacctgtgccagcccctctacctgtgttagcagatctggcaaccctgtaaggggggtgctagatggacccgatttgacagatggcaagactgaggcctggagaagtggaatcactggcctgaggtcacatgactagcacatggcaagatggagtctcgttctgtcgtccaggctggagtgcggtggcgtgatctcagctcactccagcctccacttcccaggttcaagtgattctcctgcctcagccccccaagtaactgggattacaggcatgcaccaccatgcctggctaattttttgtatttttagtagagacggggctttgccatgttggccaggctggtctcgaactcctgaccttgagtaatccacccgcctcggcctcccaaagtgctgggattacaggtgtgagccactgagcccggccacagtgcagtatttctaaccagtgatcagggtaaagaggatgcgtgtccaccatcccagccctgatcagcctgtctgtgcatcccccatcccagccagggcttggagcagccttgctcaccactgtgtcccctgcattgtaacacatccaggcacaagaatagccgcccagtgactgccaagtgagtgaaccagcctgcttggagcctgcctctttcccaaactgctcattatcctgttaccccacccagcccacgtgtccaaatacactccagatgcaaaataaaaagctctacgac

SEQ ID NO: 59 - DNA, 1919 bp, Homo sapiens
gacagcgcgtagtcgcagagtcagggaggggacctcaccacctgtctcctccctgaggtcttagaacagatacaagaaattccaggcgaaggtcccacagagtttggatcacgatgaggccagtgagtcggagatgagaaagacctcaaactcctgcatcatggaaaatgggcaccagccggggacaggtccaggcgatggaccccctgagattgcccaaaacttctcagcaccagatccccccaggcctcgtcctgtgagcctctccttgcggctgccccaccagccagtcacggccatcacccgagtctctgacaggttctctggggagacctcagctgcggctctatcacccatgtctgctgccaccctggggggcctcaacccaagccccagcgaggtcatcacgccctggactcccagtcctagcgagaagaattcctctttcacgtggtctgtgccaagctctggctacggggcagtgacagcaagcaaacacagcaatagcccaccgctggtgacaccaccccagtcgcccgtgtccccgcagccgccagccataactcaggtccatcggcagggggagcgtcgcagggagctggtgaggtcgcagacgctgccccgcacctcggaggcgcaggcccggaaagcattgtttgagaagtgggagcaggaaacggcggccggcaaggggaaaggcgaggcccgggccaggctgaagcggtcgcagagcttcggcgtggccagcgccagcagcatcaagcagatcctgctcgagtggtgccgcagcaagacgctgggctaccagcacgtggacctgcagaacttctcctccagctggagcgacggcatggccttctgcgccctggtacactccttcttccccgatgcctttgactacaactccctgagccccacgcagaggcagaagaacttcgagctggctttcaccatggccgagaatctggccaactgtgagcgcctcatcgaagtggaggacatgatggtgatgggccgcaagccggaccccatgtgtgtcttcacctacgtccagtcgctgtacaaccacctgcgtcgcttcgagtaaagcccctgagcctggattgccaaagagcagccccaggaagaggccgggggtccgcttgcgattccccagccaggatgcccccaggagccttgccgtttggtgtgagcgcgctgtttgttctgtggcatgtgacggcactccccttcgagcccagctgtgttactgattaaaagtactgctgagctgtggtccgacagcactgatcacagccaagggcttggaggaaaaggaaaaattatgagagagagagagacattggtgctaagtaatgatcttcctaaagaaatgcttgtgtttatagcttccagaatgctaatctacaattttccctctggtgaattcgatacatcggctttacagggttacagtgattaccaagtgtttttttttatcaaaatacccagagttttttacttcctcacgcgattgtaggttcctctcctccctccctctgggccactgccaggaaacagagagaccgcttaatcagcagcttgacaaagaagacctcaagtcttgggaagaaacagtttaatcactcccaagtcctgggcaacagatgaccttcaagtcacctccgctctccggggagatgggaaggctctcctctcggtcccaaagtcctcctgttcttcccaggaggcctcacaagtgtttggctaagcacaggctctcgggaatttaacacttttggggaaggaataggccctttgtgctgagagagagtttttattcacatcttttttaggggatttgctgcagatatttataaaaagtaactccctctgtaccactgacccatttatacataaaaaagatgtgttgaattttg

SEQ ID NO: 60 - DNA, 1851 bp, Homo sapiens
agagtcgtgctccctgcctggggctgcagggagctctccgtgctgaagctcttgcattattttagggtggggcgaagagggccctggattttggggagtgggggtgggtggggaggaggacccgaggggggcaaggactctgtgggggagtcggtgagagactatggggaaggaccaggagctgctggaagctgctcgcactggaaatgtggctctggtggagaaactcctgtctggcaggaaaggagggatcctgggcggtggatccggacccctgcccctgtctaatctgctaagcatctggcgaggccccaatgtgaactgcacagacagttcgggttacactgctttacaccacgcagccttaaatggacataaggacatagttctcaaactacttcagtatgaggcatcaacaaatgtagcagacaacaaagggtattttcctattcacctggctgcctggaaaggagatgtggaaattgtgaagattcttattcatcatggaccatcacattccagggtcaatgaacagaacaatgaaaatgaaactgccctacactgtgcagctcaatatggacactcagaagtagttgctgttctcctagaagagctcactgacccgacaattagaaatagcaagctggaaacacctttggacttggcggcactctacggacggcttagagtggtaaaaatgatcatcagtgcacatcctaacttaatgagctgcaacactcgcaagcacacgccacttcaccttgctgcgcgcaatggccacaaagcagtcgtgcaggtgctgctggaggcaggaatggatgtgagctgtcaaacagaaaaggggagtgcacttcatgaagcagctttgtttggaaaggtggatgttgtacgagttctgttagaaacagagtatttagaaggcgtgggaagatctacagtccccgaagagcctgtacaggaagatgcaacacaagaaacacacatttcatctcctgttgagtctccttcccaaaagaccaaaagtgaaaccgtcactggagaattatcaaaactcttggatgaaataaaactctgtcaagaaaaggattattcgtttgaagacttgtgccacacaatatcagaccactacttagataatttgagcaagatttcagaggaagaacttgggaaaaatggaagccagagtgtaagaacctcatctacaatcaatttgtcaccaggagaagtggaagaagaggatgatgatgaaaatacgtgtgggccatcaggactttgggaagcattaactccgtgtaatggatgtaggaaccttggcttccccacgcttgcccaggagtcctacccaaagaagagaaattacactatggaaattgtaccatctgcttctctggatacatttccttcagaaaatgagaactttctgtgtgatctcatggacacagctgttacaaagaaaccttgctccttagaaattgcaagggcaccttccccaagaactgataatgcctctgaggtagcagttactactccaggaactagtaaccatagaaacagctcaacaggcccaacacctgattgttcacctccatcccctgatactgccctcaaaaatattgtaaaagtcattcgaccccagcctaaacagcgaacatccattgtgtcttctctggattttcaccgaatgaatcacaaccaagaatattttgaaaccaacacatctacagggtgcacaagctttactgccagtcctcctgctagtccacccacctcttctgtgggaaccacagaagtcaagaatgagggaactaaccatacagatgacctctcccgacaggatgacaatgatccccc

SEQ ID NO: 61 - DNA, 2619 bp, Homo sapiens
tttgcatataatttcggcggctttgtgactcttccctgcccatctcccctgccaaccctgacgaagaacctctgctcctcggctctggttgggcttcctgaggctgtggaaagaacagggcactagagtcagacagagcaagcatggcttagaatcccagcttctccactaagaagctgtgtgaccctaaacaagttatataaccttggtttcctcatctataaaatgggaattataacatccacctgctgtggaaattaatgagtaatgcatataaaatgtctggcccactagaaatgctcaacaatattagtttaatgaatgcttagtctcgactgccaggagtgaacttgaggacatttcatgagccgttagggggtcagctcccctcactgatgtccagcacctggcccagggtcagctacacagtgggtgcacatcttcagtggggtgggtccccctctcccaaaaggtggccacctctggctgggagctggcaggacccttctcagccagcagggggcagagtcggtccactggaccctggccgccggctcaggctccctgtggccagatgccagcccttttccctgcaactggagagatgtgaggagcagaggactagggcagggactgttgtccccagagcactggtcctgtctgggtgtcaaggctcttcccacagctgacagagcctgtgattggagctgggaggataaggctccctggagcccttcctgtcattttgttcctaagcctcttaaccctacactgggaactcctagataggcaggcaagcactcagcaacaattggcttaggggatgaatggggagatggaggcacagaggcagagcccagattccctctcaggtctccagttccctagaccaggcctctccccaaaggccccaggtcagcagtgtggtaagcagggatctaaaggcagggcgtcctgcggtctgggccacgtgtgtgggaggacgctgccttttcctcagactctcctttcagggagtgtgcgggtccctgctctggtttgagagggaaccaactactcctctggtctgtgcggcacctcctgtcttggggcccatacccctagagtgccctgggcatggggacccgcacccactttgaacctggtatttctggccaggtccgtgggccacatccacaggcgagtcactgaccacctgggtgtcgtctactatgtgggagacactttctccgaagagtacacaggctccagcctcaaaacagtcgagcggaatgtggaagatgattatatcgccaacctccggaacaactgctggaaggagaagcagcagaaggaaggcttgctgtaccgggcacgctactttggcgacacagatatgtaccacagagcacagaagatgggcacccccagctgcagccgactgtcagaggtgcaggcctccctgcatggatagtcctgggccagccacaccaccgaggtccaagtatgagccagggctgcctccaccctgcaactcctggcagctttggccctggtcatgagcagaggagggagggggagaaagggaggaagcctggtgattgtggcaaagactcctgtccccagcctgacctccagcctccagagaccgagcagctgtggggcctgctgggaaaccaaggtcggtttccgccctctagcgatgctgtcctccccactcctccgctctgctccctggctccaggggtgtgggggaccccagaaccaggcagagtgggaacttgaaactgttgctgagggccacccggggcttcttggtccactccagccatcagtcagcacggccctttctccagcacagcagactattgtccgtgccctggtatttaggccatcacatatggtggggcccaagagagccccatatgcacactgcctgcctgataccaggaagaaccatgtgggaataggtgggccaagagccctcccctttctccatccctccagctaggaggaaatggagcaagatgaacaggcagccacgaggtgggtgggagctggcagtcttggtggcggcaggggccgcgggccctgaccacccccctctggtgggatctgaggcactctctcgaatgccgtcacacctggcagcctggaagccacaggcatccggccttgcccaggcatctcgcctgcggtctgaggaagggaacagaaggtcatgagttcagccaagcccggagaagtgtgggcagaagcagtgaaggttcttctctgtgtgggtgccctgcccaccccctcctttgcctgtgtcctcccggcctggatccatggctgactctgcctggaggccatttgtgcctgcctctgtgctgccgcaggagggcaggccgcaagtggggttggtgggggtcgagcgggcagcacggtgcagcggtgcagtggcaaggggggctacttgtgtggcataagctagaggagccggtgccgcctgaatgccgagctaactgttgccactctcctccccagactatgaaatccctggagaatttttggtgacatgcactgagccaaggtgatggactgtatatttgaggaaagacaaacaaagaaacaaaattaaaatggaattggaggccg

SEQ ID NO: 62 - DNA, 3345 bp, Homo sapiens
tttcgtattctggagacagtgttttcctgagtgtcaaactttttggaaggcccccaagaggcctggcctggggcccgtggctggccagccgggcagccaaagctccacccgggttctcagcgagactctgctactgaccggctgagactgggcaggccctgtctctcctaagccctgtctctctgtgggcagggccgaggggttggaggctcttgctgatttggagctgatgttcacattcctggcacttcctgggcaccccttagtgcccagcccactgctgtgcagggctttgcatgcatccttcatgacacaccccaaccacccaagaggcaagtactgtcacccccgattttacagcccaggaaacaggcccagggaagctgacaggactagaatccagggtggcttcaaggagaggcaccatagggactccccctggtgccgggacacaaccaggcctcttggtgcaggggagccaaggcctcgggggactgggtgcgtgctgagctggtcacagctctccagccctgacccgggccaccccactgacctagaacctgccacccctcagggctgtggagatggggactgtgctgcaggattctgacggagtggaggcagggcagcctcccgccctgaatgctggtgcaggggacctgggggctgctggcagcccacccagtgacaggaggcccaaggtgggaggggcagggtgtcagtggccaagtttggggatcagggcctggtcagcctggaagtgtgggaaagaggctctgcagctgccagggcctcaccaaccttccctccctgggtgtgtgaggggtgctccctgaggctctgccgagactcagataccccgagaagtcatgtgtgtgtggtggccatgaggagtttgtggatcctgagtccagtgaaaggaagttggggcccagtaggcgcaggaaggccaggaagctgtcttctggaggtctctttggggctggccttagatactctcacagatcctgcgggtggggagtcagcccagtagcctttcccaagccaaaccaggaatcctttattcctattccgtcctccatatgtcccaagaggcagcactgccagccccgttcacagccagggaagctgaggctgtggcagatggggcaagataactcaggaaatccaggcagcggaagacaagcctgccgtggccttccacccaaaaccggggaagcccttctgcatgcaggccctgtcccttccctgggagcccctgcctggggtgggctggggagggccgtcgtgagggaaaggagacagagggcgaacaacccaaggagaatgtaaggctgggtggggctcagaggatggggcaggaatgagatgcaccctgggggtcccagagtggcatagagaggtcctcccagagtagggtggggggactgggctccccagggaaggaggctggagatgtctgccccctccctcctagctttcattggtgcccattggacaggtcctggctctggggaagggcagggcagggctgggcaggagcttgtgcccatggaaagctccctggagatgccacaccctgcgggggacctgccctacagaaggggacatggcccatgccctgcagggcttgggtccaactggctgacctgagccacgtcctccccactcctcaaccacccctgagactccatgggcactggtgcctgccggcactgacccaagatgcctctgcccatcttgggaaggacaagttgagacccgtgggtgtagagaccctgccaactgcaggtgggaccagtgcccctatcccccaggggctccagacctctcctggcagggctccaggcccacctgcagccatctgggccaggccaacatcacctccaggcctctcctggctgctccctccccttccctctcctcctgccattgctggccgatgcctccagtacctccctccctagctgcagcccagccctcagtcatccatcgcctcctgcagcttctcctcccaaccccaactccttcctgctcccccaggcagtggtgcccacactaccaggcaaggtttgagcccagggacaccagggaagtgcttggtcctcagtgtggtggggaggtgagggtgagtccttaaatggcctaaattgaggctaaaaatctcttagactggggtagcatgcaggtgcctccccatagacacacctgcgcacctgtgctgcccactgccacacagaacaaatctcttggcccatggcaggaagggggcgtgcactattcccagcaggtgcacttgtactaggccaggtgtccgctttagctgtcggcagcaactcacccagtggccaaagcagggatggggcaactttgcaaaatgctcatccccaagtggagagctgggtccccagagcccaaacccaccctgctcctccccagacttgggcacctttctttaccatgcacagctctgagcagccatgcagacaaacctggagggcctcagtgctgagttcttgtgaggggctctgccttgggccctggcgtcactgtggggcgggaacaggaagggcccctgctaacatcaagggggttgtctcaatgtccatgcagggctgtctcatagcagtgtccgagttccccactgggtcctgcagggctctgtgggaacacacattattctgaagcccacaccacaggcttacacccagcaggaccagccaggccaggaggctctggcctctgcattcctatagccctgagccgtgtgtggcagcactaatctccattctgctgagatttctgggagaccccagcaaatccctgagcgtctagtcccatgtcctgatctgcaagccgggcatgcaaaacacagggagatgcacacgaagctttcacaggagtcctggtgctgaggttttgcattttttgttcagtttcattgccagcagcagcccctgtgtcccactgagtacttctggaggggtccagccaccttatgcccccacactctccagcctgcggggcctggcccttggcacatccaggccaccaacctcaaaaatcaaatcagtgagatgggtcgggcgaggtggctcacacctgtaatcccagaactttgggaggccgaggcgggcggatcacgaggtcaggagatccagaccatccatggtgaaaccccatctctactaaaaatacaaaaattagctgggcgtggtggcacgcgcctgtagtcccagctacttgggaggctgaggcaggggaatcgcttgaacccgggaggcggaggttgcagtgaactgacatcacgccactgcattccagcctgggcaacagagccgtctc

SEQ ID NO: 63 - DNA, 1916 bp, Homo sapiens
ctgcccgtctgcacacaggcgcccatgtgcctggcctgtgtcctggggcggtatcctgcctggccagctttctcatatgggagtggtgggcagtgggaggaacctgggtggctggggcccaagctgggctgtctcttcccccagagtggcgtccgggctccacagcgcagatcctgtcggacctggacctgacgtcacagcgggagggccggtggaagcgcgtcaacacccttatgcactacaatgtgagcgtgtaggccggggcgggcgagaactgggcaccctgggggcacagcccaccctcaccgccgtgttccccaggtccgggatggagccacccgcatcctgtccaaggtgggggtctcccagcagccggaggacagccagcaggacctgcctggggagcgccatgccctcctggaggaggagaaccgggtgtggcacctggtgcggccgaccgacgaggtggacgagggcaagtccaagagaggcagcgtgaaagagaaggagcggacgaaggccatcaccgagatctacctgacgcggctgctctcagtcaagggcacactgcagcagtttgtggacaacttcttccagagcgtgctggcgcctgggcacgcggtgccacctgcagtcaagtacttcttcgacttcctggacgagcaggcagagaagcacaacatccaggatgaagacaccatccacatctggaagacgaacagtttaccgctccggttctgggtgaacatcctcaagaacccccacttcatctttgacgtgcatgtccacgaggtggtggacgcctcgctgtcagtcatcgcgcagaccttcatggatgcctgcacgcgcacggagcataagctgagccgcgattctcccagcaacaagctgctgtacgccaaggagatctccacctacaagaagatggtggaggattactacaaggggatccggcagatggtgcaggtcagcgaccaggacatgaacacacacctggcagagatttcccgggcgcacacggactccttgaacaccctcgtggcactccaccagctctaccaatacacgcagaagtactatgacgagatcatcaatgccttggaggaggatcctgccgcccagaagatgcagctggccttccgcctgcagcagattgccgctgcactggagaacaaggtcactgacctctgacctacaatctccagtgctgccttgggacataggtacctgaggtacctgagagcccctcaggggaggaggccgagtggctgtggctgaggcccccaccctcccctggaacgcgccccaagccggagtgggtgcagccggaacccgcccagcgtctagactgtagcatcttcctctgagcaataccgccgggcaccgcaccagcaccagccccagccccagctccctccggccgcagaaccagcatcgggtgttcactgtcgagtctcgagtgatttgaaaacgtgccttacgctgccacgctgggggcagctggcctccgcctccgcccacgcaccagcagccgcctccatgccctaggttgggcccctgggggatctgagggcctgtggcccccagggcaagttcccagatcctatgtctgtctgtccaccacgagatggggggaggagaaaaagcggtacgatgccttcctgacctcaccggcctccccaagggtgccggcactctgggtggactcacggctgctgggccccacgtcaaaggtcaagtgagacgtaggtcaagtcctacgtcggggcccagacatcctggggtcctggtctgtcagacaggctgccctagagccccacccagtccggggggactgggagcagttccaagaccaccccacccctttttgtaaatcttgttcattgtaaatcaaatacagcgtctttttcactctg

SEQ ID NO: 64 - DNA, 1919 bp, Homo sapiens
gatcctcgatcggccttctgctggctcagacggcgaaacagagatgcaggaaataagtgacgttgctcaagaaaaacctgacgcagtgaatcatgctgaatattaatattggatgcactgtgcttggcagacttgaagacttcatctcacatggaccagtggacagtcagagtgtggttggtcccctcgtgaaaacatgggtcctggctctgctttgcagctctttactgaatggaggcagtgagagtgggttgagcctctgtggccgtgtgctcacatgcttcaagcagcctgcaacaggaaagaattagggcacagctgaaatccaaaggggagaagaagcaggctgaaatccacagggagcaatgtctatttcttagtctgtctcctgccccaaatagcccctctctcctttcccagcttgtgttgatgcgtgtctttccctggcagcagatgtcaccgggacgtaaactaggacgcagagggtggtgatgagccacaggccacatcctgccctgccctgactccccaggctccctggcctggagttcagagtacagaccccaagcgaccgcctgctcaccaggacgtgccagcagggtccttctcccgagagccacagcgagtgaggggacactctgtctatcctgggagtgggctggggtcctgttcctgagctggtgggcagatgcgatagtgccaggtagagctgcagccattctgtccatccctaccctgtccacccgtttcattccctcccactgtggccctgctgagccctctcagggacatccatttaccctcggggacagccagggagccatgcttacctgctgtttcccctgggagagctttggggccagtttcaaacagacccacagcgtccaaaccagggcccccaacatgcacttgggatggcaggggtgtgggggtagagtgtaagttactgatttaaaaatctgatataaacctgatttcagttcccagtcaactgaggcacagcaaggtaagtccctgcccagcgtcactccacttggaatgcggagagcccggcctaaaggggacccactgcacatcccaagccacgcgtctgctcactgcagccctggcccctcagtgccacccctcgcaggtgctgtctctctagcatgggagctgatggcgcctttctgtgtccccacaggttctttcagagcacggcttcggccccatcactaccgacatccgggagggacagactttctactatgcggaagactaccaccagcagtacctgagcaagaaccccaatggctactgcggccttgggggcaccggcgtgtcctgcccagtgggtattaaaaaataattgctccccacatggtgggcctttgaggttccagtaaaaatgctttcaacaaattgggcaatgcttgtgtgattcacaatcgtggcatttaaagtgcacaaagtacaaaggaatttatacagattgggtttaccgaagtataatctataggaggcgcgatggcaagttgataaaatgtgacttatctcctaataagttatggtgggagtggagctgtgcggtttcctgtgtcttctggggtctgagtgaagatagcagggatgctgtgttcacccttcttggtagaagctaaggtgtgagctgggaggttgctggacaggatgggggaccccagaagtcctttatctgtgctctctgcccgccagtgccttacaatttgcaaacgtgtatagcctcagtgactcattcgctgaaatccttcgctttaccaaatctagacatacataagggactttctctcccttttcagccctctctgtgcagagaaaagatgtgagtccgcttgatgaattctaatgctttgcttagagctatgagaaatgtttgttttaataaaaacctacagtccaat

SEQ ID NO: 65 - DNA, 2510 bp, Homo sapiens
ttatggtgaagaccaccttttcagatgtgacatggctcacagtaagagcacttttcagttcatgcacagcaaaattcataagtgagaggactcaagggccaggcatttgtgaaggctttccagggtaactacccccttccagcactggagtaccagaataatgagaagctcaaaagagaatgtggaaaggccttcctttctccatcaccagagtactcatggcacagggaagccatgaagaagagctgagtgagaagatgctgccacacagctctaacatcagataacaccgggcaggccatgatagggagaagcccttcaagagcagtggctatgggaagacatgaagacttttgccctcttcaaccacctaagaacccacactgaagagagatctttaaatacttggtatgaagaaagaccctcaagaagaaatcgattcttatctataaccaaaaaattcacagtagagaaaacccctgcatctaaggaatgtgggatggtcttcagtcacctctcctatgtgagaaagctatataaagtacctatgggaaaaaggcattacaaatgcagtgaaaatgggaaagccttcagctataggcacccccttttaagaaaaatcaccagagaattcacaagagagttatgggcaacaaatgtgggaaagccacagctcccagaatcttaggcggcactgtattactgctattgcagaagccatctgtattagttacctattgctgtgtaacaaattactcaaaacctagtggcttaaaacaatagtcactatttcacagtctctataggtcaggaactttggtgcagctagctgactcctctttagggtttctcacaaggctaacatcaagatgtcagctgggggtgtatcatctgaaggcttgactagggaaggctctgcttccaagcaaactcatgtaattggcagcattcagttttttgtgggctgctggactgaggacccgtctgttggtctgagacctcctccagttctctgccacatgggcctctccaaaatggcagcttgtcaatcaaagcttgcaagctgatcatgcagtggagaataccaacaagtcagtcatttgtaacctaataacagaagtgagatcccatcatctttgctaaatttagttagaagcaagtcacttggtccagcccacagtcaaggggagagcattacacaagagcatgaataccagagggcagagatcattggaagccatgtccaaagctgcctgccatactgtctcatctctgccacctggcaagatctcatgatatgtatcagtctccctcactgtgctaagggaaagcagactatactcccttttccattctctagagagaattacataggctttgagtaccttcattttctttcccactgatggctttagattttggtatgacaattcttgctaagatctgagctggtgtcttctggagctttccagaaaaggtttcttggccgggcacagtggctcatgcctataatcccagcactttgggaagctgaggcaggcagatcatgaggtcaggagatcgagaccatcctggctaacatggtgaaaacccacctctactaaaaatacaaaaaattagccaggtgtggtggcgggtgcctgtagtcccagctacttaggaggctgaggcaggagaatggtgtgaacctgggaggcagggtgtgcagtgagccgagatcgtgccactgcactccagcctgggcgacagtgtgagactccatctaaaatagaagaaaaggtttctcttcatggacattgtttgcatctacatgtgacacttaggaatgatctgtttagtctcaatcactcactcctggatctgcctgtctctctctgagataacaaaggccttaatgtttagccacctgcatcagagttggtgaggtggtttgaaacaattcatcctaatataaaaagaacagcttttgtaagggggcactgagtgtctcaaacagccgcatgggcaggaagagtgctcagtccagttttggttgaatttgtcttgttgccctaaggcctcctatgaaagactgacaggcttggactgaatcttgtgatctggacaccaagggtcacctgtgggcccagagctagctctgaagaatggggtagtttctttgagaacctccacagcaaaagtttggtcctctgttcccaatgcatgtcccactttaccagctacatcccccagtacctgcccatggctcatgactcatgaaatataaaactcagtaggcaggcataactggttcagacctgccagggctatgtgggaactatcattggtacaaaaactctaagtgtggagaagactgtggtagacaagaggggacatgtctgttctaaacgcacatcagaaacttccaatgactatggccaagtgagataagggtgtacagaacttctcaggacatgcagacctatgtgtcactcataactgaaattcaaataaatattttgtggatttcc

SEQ ID NO: 66 - DNA, 2294 bp, Homo sapiens
aatgtacaattaatgattatccacaggcatgcaaaaggtaagtattagttgtgttatttttatttcactgaggatggaattagcaaaaggctttaaaatgacaggaaaattagctaatacagaaaacaagcataaaattcaaagctacagcctcatttgatttggctttttcagaaattaaaatgtgaacagctgcgtagcagaaatgttttaatattttcagagttgaaagccactttccagcaaccactgaagaaagagtatctcattatttttacttaaagcactacagaaagtggtgttctgattttattaatattttttaggccaggcatggtggcttatgcctgtaatcccagcactttgggcggatcacttgagcccaggagttcaagaccatcctggacaacatggcaaaaccccgcctctacaaataatataaaaattagccgggcatggtggcacgcatctgtggtcccagctactcaggaggctgaggcaggaggatcacctgagccctgggaggtcaaggttgcagtgagccatgatcatgccactgtgctccagcctaggggagtgagaccctgcctcaaaaaagaaaaacatattttttgatggtgataatcaagaaaccaaaaatattgctttcttaatgcacacatgaggcaggaaatctttcctgaagggctacattgtacctgtgcctctcaagtcaccagaaggccaagctgcaggtcaaaactgcgggaaaagcactttcttcctgttggcagttccattctattattattttttaattgatcttcccacttgtctgatttttccttggacagaacaggtaataactgaatatagaatccagctgatagcctcattggcttttaattggaaacccattatactgtgtggcacaattagaaagtgagaataaccccattctgaggccgagtgtgctcaggctgaagagccagcaggagtgcccgctgtgcgtgcgtggtgtgcggtgtgtgcagcagtgtgtgcagtgtgcagcgtgcagcggtatggcatgcaatgtgtgtgatgtatgcagtgtgcagcatggagctggcccctgtgcacacccctgcagccttgtggaagaaggtagcgctggctcagtcaaatgagaggaagagttttcataagcccggctggtgtttaaaacgtgttttggctttgttcattttatggtgttggtgttggtattggtggtcatgtgctggcatgtaagatttcttttctctttccctcttctctctgcttctacattctgttcattgaggcttccaactgaatatgagaggaacgggagatatgagggctcaagtcgcaatgtatctgctgagcaaaaagatgaaaacaaagaagcaaagcctcgatccctacgcttcacctggagcatgaaaaccactagttcaatggatcccggggacatgatgcgggaaatccgcaaagtgttggacgccaataactgcgactatgagcagagggagcgcttcttgctcttctgcgtccacggagatgggcacgcggagaacctcgtgcagtgggaaatggaagtgtgcaagctgccaagactgtctctgaacggggtccggtttaagcggatatcggggacatccatagccttcaaaaatattgcttccaaaattgccaatgagctaaagctgtaacccagtgattatgatgtaaattaagtagcaattaaagtgttttcctgaacactgatggaaatgtatagaataatatttaggcaataacgtctgcatcttctaaatcatgaaattaaagtctgaggacgagagcacgcctgggagcgaaagctggccttttttctacgaatgcactacattaaagatgtgcaacctatgcgccccctgccctacttccgttaccctgagagtcggcgtgtggccccatctccatgtgcctcccgtctgggtgggtgtgagagtggacggtatgtgtgtgaagtggtgtatatggaagcatctccctacactggcagccagtcattactagtacctctgcgggagatcatccggtgctaaaacattacagttgccaaggaggaaaatactgaatgactgctaagaattaaccttaagaccagttcatagttaatacaggtttacagttcatgcctgtggttttgtgtttgttgttttgtgtttttttagtgcaaaaggtttaaatttatagttgtgaacattgcttgtgtgtgtttttctaagtagattcacaagataattaaaaattcactttttctcagt

SEQ ID NO: 67 - DNA, 1972 bp, Homo sapiens
atagccgggtattgagcggtccgggtctctgctgctcaaagtaaagaccgtttgagaaggcggggagagatcgaagaagctgctttatcttacagtcacccaagggggagcgccttcttccttcccagagtggagtggcagtgggtccgggattctgggatatgcacagggtctgcgccctgcgccctgtccgcgctgaagctgaacttgtcattggtttgcaacagcatggtgaagaagtgtggtgtggatggatggacgggcctctcaggcacatgaaatactcaaagcccagtattaaccaaacatgtttctctgttttgtctttgatctttgtgcagtgtgttggcttttttcctttaatgatgtcacttgtattttatttttggtttatttgtagactgtctccctccttggccatggctttacttttatgtccacccaaggagagtttcaccagtttaggtttaagaaattactgacaagttaacaataataatttcaaaattgaacagtaataacttaaaccgtgccttggacatagtagatctccaacagtttttcttgaatgtggctacctaatgtggaacaagatttttcataattacatgttgctatttttaataccttttgggaggttctttagtcccccccgccctttctccctacgttgcacaaagagactggtctacaaggggtcctgttagttttctggttttgtggggtcctggaatattgtttgggcttattgagagttaacaaggatgtattttgtgagtttctccaaagtcttatttagagtaatagtatttcaaagcaagaagtgttttagagagaacatcattctgcctcttgtttaacaggtgaggaaactgaggaaaaaccagcttacctggctaatcaaccacaagtacagatagttccacaatgactcaatggatattacttcaactttgttccctcaagaaacttttgtgattaagcttgttgatttgtggcttgatggtttacaggaatggtcatttttaatatctaggaccctgcttgcttgctcttgcttgcttgcttactagactggctgcatagtcagtcttccacgtgtaaacaacagtgtgtgctttagtggataagagatgttgagtgctgagatttcaaggctcagcactgagtagacctagagcatttttatttatactaaattaatgccatggtaacataagttagacagcaagtgaatatggcatcaaatgtacaaagttgagtatctctttactagtcaatgtataaggaatttatttacccaagcaattatcttaaaaacagcattacaagtggtatgcgaaacatttccagaatttatttccacatctgctctttcagtggcatcatccattcctgagctcaagaaaaggcctctgccaaccgccagtaatcctgcttttttagtaatcctactatttttttttaactttaagttctgggatacatgtgcagaacatgcaggtttgttacataggtatacatgtgcctatgtatacctatgtaacatggtggttacagtaaacatggtggtttactgcatctatcaacccgtcatctaggttttaagccctgcattcattagatatttgtcctaatgctctccctcccctttcccccacgccccgacaggccccagtatgtgatattaccctccctgtgtccatgtgttctcatcgttcaactcccacttataagtgagaatatgcagagtttggttttctgttgtgttactttgcttagaatgatggctcccagcttcatccatgtccctgcaaatgacatgaactcattcttttttatggctgcatagtattccatggtgtatatgtgccacattgtctttatccagtctatcatcgatggcatttgggttggttccaagtctttgctattgtaaatagcactgcaataaacatacatgtgcatgtgt

SEQ ID NO: 68 - DNA, 2617 bp, Homo sapiens
catgatggggaggggggtgcgatggggaagccgggcatgggagaggatggctcatgccctgaaagtccatgagaggcctcctctccccacatctgcagaaaccagcctggacaccaagtctgtgtcagaaggccacctcaagaggaacatcgtggtgaagaccgtggagatgcgggatggagaggtaaggagggatttgggcccagtcaggctctggctggccccagggattctcaaggccaggccatggaggaaagcctggggctggcacatagaaggttcccagcaactcccagtagctccccagggaattctggaggagagcaaggaaactgaatgtaattccgtttcctcagtccctccataggctgttctaaggggagccttggtaccaaagccactagatgggaccctaatacacactctctctttctcaccctcaaactcgggggccttgcttgccagggagagaaagagaattaaagttagtagctttcacttccaactctggcagacacagttggggatggggagggctttccatttccagcttggtaaaaggaaactaccaggggaatgggaagaggggatttggcgtatccgccacgccactccaaccacagtgggagctcatcttactccagcagcttaccactcgccaggcatgacgctaaatgctttcccagtgttatctcaccaccccctctgtccaccacgcaaggcagctgtggttactatcaagaaaagtaagacctgggaagtcggggacttcccaaggttacacagcctcgtggtggtggacctggggtctgtgtgaactcctaactgttgcactgtgcacgttccctgtcccctgcaggtcattaaggagtccaagcaggagcacaaggatgtgatgtgaggcaggacccacctggtggcctctgccccgtctcatgaggggcccgagcagaagcaggatagttgctccgcctctgctggcacatttccccagacctgagctccccaccaccccagctgctcccctccctcctctgtccctaggtcagcttgctgccctaggctccgtcagtatcaggcctgccagacggcacccacccagcacccagcaactccaactaacaagaaactcacccccaaggggcagtctggaggggcatggccagcagcttgcgttagaatgaggaggaaggagagaaggggaggagggcggggggcacctactacatcgccctccacatccctgattcctgttgttatggaaactgttgccagagatggaggttctctcggagtatctgggaactgtgcctttgagtttcctcaggctgctggaggaaaactgagactcagacaggaaagggaaggccccacagacaaggtagccctggccagaggcttgttttgtcttttggtttttatgaggtgggatatccctatgctgcctaggctgaccttgaactcctgggctcaagcagtctacccacctcagcctcctgtgtagctgggattatagattggagccaccatgcccagctcagagggttgttctcctagactgaccctgatcagtctaagatgggtggggacgtcctgccacctggggcagtcacctgcccagatcccagaaggacctcctgagcgatgactcaagtgtctcagtccacctgagctgccatccagggatgccatctgtgggcacgctgtgggcaggtgggagcttgattctcagcacttgggggatctgttgtgtacgtggagagggatgaggtgctgggagggatagaggggggctgcctggcccccagctgtgggtacagagaggtcaagcccaggaggactgccccgtgcagactggaggggacgctggtagagatggaggaggaggcaattgggatggcgctaggcatacaagtaggggttgtgggtgaccagttgcacttggcctctggattgtgggaattaaggaagtgactcatcctcttgaagatgctgaaacaggagagaaaggggatgtatccatgggggcagggcatgactttgtcccatttctaaaggcctcttccttgctgtgtcataccaggccgccccagcctctgagcccctgggactgctgcttcttaaccccagtaagccactgccacacgtctgaccctctccaccccatagtgaccggctgcttttccctaagccaagggcctcttgcggtcccttcttactcacacacaaaatgtacccagtattctaggtagtgccctattttacaattgtaaaactgaggcacgagcaaagtgaagacactggctcatattcctgcagcctggaggccgggtgctcagggctgacacgtccaccccagtgcacccactctgctttgactgagcagactggtgagcagactggtgggatctgtgcccagagatgggactgggagggcccacttcagggttctcctctcccctctaaggccgaagaagggtccttccctctccccaagacttggtgtcctttccctccactccttcctgccacctgctgctgctgctgctgctaatcttcagggcactgctgctgcctttagtcgctgaggaaaaataaagacaaatgctgcgccctt

SEQ ID NO: 69 - DNA, 1826 bp, Homo sapiens
tttacataacaaaaaggtgaaaaaaaggaaaaaaaaacttctttgccacaaactgagccgcagaaccccccttctccccccacccacctcccctgctccctcccttctctgcgccggcctagggctctgcaccaaagccataggatggaggagcaggagctggtgtgccccggagaggtgcggccagccctccatcagctccaggcaccaaatcttggtggcaaggagggcaccccgctgcccgttgccccagagctgttctctggcaggggaggacaggcattgggcttcatggtgccagggtgttcagaggggctgagaaatagaacagtgtgtgtaggggcttcgggcagggggttctggaacgtcagatgaggtgcagcccaggggaggacagaggtgttagtgcccccaactcctgccagagccccagtccagccacagagtggctcagaaaggccattcctagagggctgcggccctcccttctcccttgcccatgcccccagagctgcctgccgggcagggtggcaccattgcaggagaggagcttggcctccgggggtcaggcaggaggcgcctggctagccagtgctggctccactgggcaggaagccctggacccccaggtatgaggagggggtggtcttagggttctgttccaggtctgccccgcccccctcccagccatgccccaggcagaacttggaattcaggtgtgcacctgcaggctgaggggctctgtgagcaggtgctgctcacacagggagttcaggcgccagccaagcccctgtgctgctgggataggcctgcttcacttagggagcactgcctcaagacaggtaaagccccctcgtttgcccccacccccatggggccgctcaggagagaaactccctttcacccctttcccagggtgctctctctctaggtggcatgccagcccccaaacacaagtggcttttgggcccaggtgggtcagcctgctgcccctgccccataccccctcgggccattgggacccctgcccttcagatgtcctagggtctaggagtggggccagtcactgtgggaagaggccaggggcttggccggagaggcagcccagggcaggacccagtcctgagtcctggagcagggccagggaggcgcccatcccgccccggccagccgccctctctgctgtttcttctatttgttcttcttttcacccactggttgggcccccttctcccttcccccttccccttgtcccttctgcaggccgttgaggggggctgtctgtctcagtctgtctctgctcccactcttgaggcactggttaccgcaaagtgagcagccagcaggggggcgaaggtcctgtgttggccactgcctcctccagtgctgcaggaggcgggctgaggccccacctggtggctttcacctgacccagccctgagtcctctccaagcctctctccggcccctcccacctggccactgcctcctccagtgctgcgggaggcgggccagggccccacctggtggctttcacctgacccagccctgagtcctctccaagcctctctccggcccctcccacctggccactgcctggcattgggatcgccccaaaatggacccggcccctcctgttatttgctgggaagcccagcggaggagagggtgcaggtcccccgctgagcctccagtctctgtagactgggctgccggcccttcagccccccttggagcccctcccgccacagccgcaccttctgctcccggcccctccctttgtatttggagacaatgtgttgtaataaagcttaaagtggatgtttt

SEQ ID NO: 70 - DNA, 2110 bp, Homo sapiens
ttgaaacacattaaatatttctttcagagcaaagtaaacctttaaaatgctcccaatatataaatgtgcatatgcagtacattttaacagaaaaatgttgattaggaagctttcagaagatttgtcccaccgttgctttaaatttcaatggcttttggggttgcaagtgttttttcgttacgtggatgaatcctatagtggtgctgagattttagcgcaccatcactcaagcagcatacactgtacccaatatgtagtctttcatccctcacccccctccccaaactccccaccccaagtccccaaagtttatgaaatcactgtgtctttttgtcctcatagtttagtgcccacttagtgaaaactatggtatttggttttccattcctgagttacttcactgagaataatggcctccagctccatccaagctgctgcaaaagacatcattttgttcccttttatggctgtgtagtattccatggtgtatatacatcacgttttctttatctactcattggtcgatgggcacttaaattggctccatgtatttgcaattgtgaactgtgctgctgtaaacgtgtgtgcatgtgtctttttcatatagtgacttcttttcctttgaccagacttcagattatactacgaggctacagttaccaaaacagggtggcactggtttaaaaataggcacttagaccaatggaacaaaacagaaataaagccaaatacttacagccacccgatcttcaacaaagcatataaaaacgtaaactggggaaaggactccctattcaataaatggtgctggaaaaactggatccctatctctcaccttatacaaaaatcaactcaaattaagtttatgacctgaaactaaaaattcaaaatgaaaacattggaaaaacttctggacatcagcctaggcaaagaattcttactaaggccctgaaagcaaatgcaacaaaaatagaaataaataaatgggacctaattaaactaaaaagcttctgcacagcaaaagaaataatcagcagagtaaacagacaacccagagagtgggagaaaatactggcacattatgcatccaataaagaatgtatatccaggatctacagggaactcagatcagcaagaaaaaaacaatccatcgaaaagtgggcaaaggatatgaacagacatttctcagaagatatacaaatggccaaaaaacatgaaacaatgctcaacaccacccttgcatttccaatcttattcacacctagaatccaggcattttcagccacatgaagtacctacttgaatagaggttcattggtatgctggcactgatggattttcagctgctgatgtttcttaaaggtcttcttacagtcttcaaaactgcactgttaaattgtaaaggctcgttagtcttatggaaagtcaaaacaaaatgaacagttcgtaacagaatcctcaagataaaacaattttggagactgtataaaatttctgctttcacccattttgttactgtaaaattctgctttatctcaaaaaggtttgaagaatcatataacatttgaaaaagcaaaactgtttcagttggaatagtctcccaatacactaatttgcacaatgtctgcttccaaattaaaacctttatcattatgatggcattaagtaaattcagacatttggcagacaaaatttggttgacgaaaactttatttttcacctttattttttagagacagggtctctgttaccccaaaattttttgttttgttttctgtttttgtttttttttttcagagacagcatttcactatgtttcccaggctggtctcaaattcctggcctcaagctacgattataggcttgagccaccgcacctggctgaaaatgtcagaaacataggcagtaagtgtaaaaatactcaaaaaatttaagcatataaaatcatacttactatatattgtttttgttgattttcatgtttgcgttcaaaatgtttcttcaagtttgattttgtgttgaatttttgatcacagccattggctgcacaactgtaagaagttatataaaccaaaatattaataaaccaagggagaagaagttttaagac

SEQ ID NO: 71 - DNA, 1686 bp, Homo sapiens
taaagtgttaaagttccttaactccattcagccctgcgccaggatcgttagctattgatctgggcccctccggcacttaactccagccagcatattggcaattcaattagcaccagtcaatgctgcgtgttcctggctcctgctgcccatgccctcgcccttgcccaccactggctctgcaaagcccgacgcccatgcccacctctggcagccccttgcaggctcttctcctgtaccctctggatcaatggtgcctggctggctgttcccggcctctgctggtacaacctcagctgcctaagggtgactctaagcccagccttagggctgaagacctcctaggagacaggaagaggctgggaagcttgtcaggggcctcttcccatccctgctgcctttggatcatgcccacagctcctatctccttccaagaagccctggcccagcacaaaacaggttctctctccttcctacccagctccagcctgccaccctccagcattaccaggacactagtcactactcagaatcactgggtggttcctcttcaccctcttcctgttctatgtcatccacccagcaaagcccctgcccttctttgcccctccactcaaggtagcctccacagtgcctgacacgctcattctgtcttatcccttcgcagcttcttcccatttagtataggtggcctacaggccctcttcgccttccttgtatctctaactccgcagcccccctgctccccacatcctgctgccctccctgcccagctcttattctccagtcccttcttcctcaccgggagtccggagctgcccgtggctgaagctcaggatgctctgaagagctgcgagtccttcctcagtggttgggccattctgtagcagctgcagacgcctctgggcctgggcatcgcggtgggcaggtgtgcgcaggtgttgcagcacagccaagcgggagggtgtctcccacgcacacaacaggcagtggtatagccccagctctgcccctgcctccgctccctccatgtccagcagaaactagaaccatgggaagaggctggctcaggcccagaagggacatgccagacctcaggggactttttttttttttctagagagagtcttgccctgttgcccaggctggagtgcagtggcatgatctctactcactgaagcctctacctcctgggttcagtgattctcatgcctcagcctcccgagtagctgggattacaggcatgcgcaccacacctggctaatttttgtatttttagtacagatggggtttcaccatgttggccaggctggtctcgaactcctgacttcaagtgatcctcccgcctcggcctcccaaagtgccgggactacaggcgtgagccaccgcacctagcctcaggggacttctttgccttccctaagggagactgactagcagcagccccctccccacccctcgcttcctgctcctgaaaccccccctttccctcctatggccacctaagtattattgcttgctctccccaaccctttctctttctcctaccactcctggactccctcccagcatgcaaatggagtctggttccatcctcttgaacctctggtgacatgacaaactgagctgataccacccctccctccagggccaaacaccagaagagctgaataaagtctgtttcacttg

SEQ ID NO: 72 - DNA, 3039 bp, Homo sapiens
attgcataccagagaacagtgtagatgctgggcagtgcctagaagatgcgagatctgactcgcggtcatgtctcagcatctaggtttattgtgtgtcttggatggcctcttgaagctctggacctcattgttcctgtctggaaatttctgaatatagaaaatataattcacatgatgacttttttttttttaagtgaagatacgttgatatttgcgattgcaagatttagaaatccaactcagactggcttaagcaaagagggtgtttattgttcatgttcctgggaagcttggacagggctgggcccaggtgcgctcacatcctcccagcttggccagcaagtggagagggggcttctccttcccagtggctgccactgaagtcctggggccaatgcttgtgggtactgtgggcctgacttgggtcctcttcccacccccagagatattctggaccgattggcctggcccgcatgacaaatctatgctacagtggctccctcagtaaaaaatgagatgcgtttatcagaagcaaggggcagggatgctgggccagcagaaatagcagatttccccctagaaagtcacactgtatttctgggtactccccttctctctcaaggccatcttctgccatcctattttgagatagacatgcggctcttttctcttccacattatttcttctctagaagctcctttcattgtccctagatccacggacttatcgacagatggacatggtgactcttaaggaaagagatgctgacactctgcctctgcataccctgccaatcccattttagtagtgaaattttgactttaaaagacggggaaaatacaggagtaaaaaaggcatgtggtcacgaggcacagttttgccatgacccaatttggatatggcattagtgtgtattgttttgttgttgttgttgttattttttataaatgcagcacccagaattcacacctcctccagatttaagctcagacaaggaagttgtgtgaaatgaatgtgcacccctaacccatccactcccttccccagtctacagaggaatttgctctgcctcaggtcccaagtaatgggtgactcttctgcaaccaagaaatcacagggcccctaaatttgcagaaattaaatactaaaaaaagaaggatatcatcgtccctgtaggcaaagaagcattcactctgcccaggaaggcagacttcctagggtacgtgcttgttttttagcttgcccttgagtctgaaaggacagttatctcttttggaatttacttagagcagtaacttaataagcatatcctagggactgaatccttcaaactcctcatgtaaaaatagggctggactactgtttttttgcctatggaaaaagtaattgcccggactcaccttcaaagcctactcatttgttgaaattccagcaagggcatgaagtaaagatgataggcctttgaacctgccaggttagctgggtttgagagggtacctgggagtttagagacccatctttgcctttttctttttcttttggaagtctctactgaaatgggatgaaacctggcctcatttccagctcctctttcaaaattagagccagccccaggcctggcagtgtcttggttggggcaagccagggactgactatcggagagttgagatctgaatcccagctctgcccctgaacagctgtgtggctctgggcaagtaattgccctctctgcacttctccacctatagaggggacttcctaatgcctgggcctcagattgtcataagtgagaacatcaacactgtagcgttcagcatgtgacacaggagctttctacgaaccctggccaaggtggagggcagagtgaggcgctcgaacagcaatttgagtgtggttgcatgacctccacttgggcaccaagcacgtttctgtgggacccgtttctctgttaatttctacagctagtaagtgagcttagtgagtgtgcaggtgagtatgtgtgtgagagtgagtgtgtttgtatgtatgtgtgtgtgtaatggtgggaagagagggagaagaaggatcagcaggcccaggcgctgcagtagagagatgttgtggggctgtcaggttttcagatgggcttaactgggataaggaggagaattagaggtgaattaggacaaagcctctgaagagcaacttcccgaaaacagttctcaactcaatctcctgctgggcagtagaagataataaaaaaacaaaggaagggctgcccccagtacttagagcacttagcgcacacactctcggtcgttgtcaggggctgtttgcttcttgaaattctgctaaaaagccagccaattacatgcaggctgtcccttatatcctaggtaaccagccaggcatctttccccttagccttcctttgaaggtcttattcccctcttgccatcttttttcagtctgtccttgctgtgatcgctggaatatggaacacagagggcaactgagaaaatccttgaatttgtgaagtcaaagactattgggaggccatgcctgccatttccctgaaaagcacttcatttaccaaatactaatcagattcgaatggacatcagcccgggcgagttgttaaattattgctgtaatttgaaaaatgagtgtgtcagagtatcagggaagctcaagaatctggccagagctgtcatttagagaggcagaagtggacgtccttgggtgctgagggccctcaggactctcctggcccacaccagtgcctccccacataggcactagttggacaacaagtggaaagatgtggccttccctgctccctttttttttcctttttttaaacttatggtaaaatacgtataacaaaatttaccatctgaatcatttctaagtgcacatttcagtagtgttaagtacattcggctgggtgcggtggttcacgcctgtaatcccagcactttgggaggccgaggtgggcagatcacaaggtcaggagatcgagaccctcctggccaacacagtgaaaccccgtctctact

SEQ ID NO: 73 - DNA, 1707 bp, Homo sapiens
ttatatcaaaagtaatacaggtgaatttcaggaaatttgtaaaacacagcttcaaagagagaggtggagagagagagagagagagaaatctatcatctatcactcaccactattaacattttagtgtcatcttcccatgtttttgtttatgcatagatatgcatatctattttgcaaagataagaaattactatatcttttaaacgtttttatttgataatgtactatgaatatttcccattcaattaaatacctctacagtgacactgaatgcttatgatactgtattgatattaatattgtagaatacatcaggaagatattattacaatatgtttaaccaatcccctggatgctagatatttgggtttctaacatttcatctttttaaataattctgtgatgaacacctgttcgcagggtaccctccatgaccagttgtgtttcagagaaggcagatctagtccattcaaggccaggatcccccggaggtcagtacattatttgcccagtgaattgtgggcatatctatactttttgcacttttccaggcaggaaggaggaagtagtactgagaacccactgtcttgggttaaggagcattctctgggctgcttaggggagaagatttctatcccaaggtcctgcagccttggggtaagatgggagcagagaagacagagtgtggggccactgtggaggcagcagggaggggttccttgtggccactgatcggagccctcatattccttgtggggaggctctaatttctccagagatgcttctctacttggaggtctgccctgtgtcgggagcattagtggccctgcagagaggtgggacattatttggatactcttgctcgtagggagtttgttgcctcccaaaaggtgtgtggcatttgtaagttgttctccttttccaaggttcttcagaagacttgaatatggtttgtaatctaggcaccaaaattgaaattccctccaaagagccacacaaataaatgacctcccataccattaagttctctctatgcatggcaatccctagttaacctcagacaggtaagaagagagagtgtttttcatcaatgacaaggaaagttttttctggctaatgtggtatagtagcaaatgcaactaaaaaggacacccccaagcatgtctttaattcatttgtacacatccaacaacatcacttttaagtacacataggtaggataaatatttagtcattaagtatctgaagttattgtaattctatttcagcactattcttttccctacattaaaaaaaaatttctagactgtgcttcaacctcaaaggacataccttggacagaatattccattaaagacattgttggagcaacttttattattcattagtgtgttttaaagtggacctgaacagaaatgctttttgctaaagtaaaaatacatccgtttctatgatctaattgtgcaattggttagaatttctatctatcagttcaaagggaaacttggtttcagtgaatttgtttttaataaaaatgtgctatctatgataaatatatttcactttgttcaaatggatttgattgggaaaacacattgagcagaagtactggtacagcttaatttcattgctttgagaaaacgtattgaatgctggtttgaattaaattctatttgttttaataaaagtgtattggcctgagtgtac

SEQ ID NO: 74 - DNA, 2587 bp, Homo sapiens
atttattcccgcctgcccagtccctctctaggcatggacagtctaggcctccacgctgatcctcttactgcaaaagaagctgaagggaacacttcactccaaggctcaaggggttacagctctccccaaatttccccaataggtttggagttcaagagctattttatcataccagtaataagagaatttggggtctcacatccccgccctggggtcacacaggaattctctttgaacaaaagagaaaaagatacaagaaattatgctgtgtgaccctgaaaggtggtcgtagagccccttgaagggcagtagggactttttaggaggagcataggcaacaaaaggagagtgcagagcaagcaggcgggtagcatgcttcctgtccctgctggtcctgccaaaccctgcgcttgcagactgcacagccacctttctcaaccaggacttccaccatccacgcaccaatgggaatgccgctctggcccgcaggggctcccttgagcactggccaggtcttccctcagccacaatcccctcccacaatctgggcaactttagttctgccagcagctgccttggcctctccgttcctcaccatacattacttttcattctctgcctgccctgccctccatatccccctgccaccatccacacaccaatgggaatgccgctctggcccacagaggctcctctccctcccagcatccatgtgacgtgtgtcataccgcaccgtggcaggctggggaaggggcacagggtcaccctgaaactgtggaatgcacctcctccccctgcaatcccctccccaacccagaggggaaaatgaaggtcaccctgatttgactctccatgtaaaatggcattttcttccataacatcccatatcaatgtgtcaattttctattaattttactggggaagtgtcttccccttgtttctcactctgcctcctcctctgtgttattatgggcttgaggggcaggggtagctattgctcatgacttttactacaagataaccagacttcctaagccctccatattgggaccaatttctgctgaatgccaggtgatgagaggtttcagcccctggcgtgggtggatgacgtcagaccagggcagcagaggactctcattccacaagctccctcaggactgagcacttgctccgggtctcctgaagccccatgtccatctccttgtctgccctgccagtctagcagacttgggctgagaaccagacctttgcccttggcccagcctcaccttccccactgggtctctagatttctagattccccatagggtatgccagcaaggagaggatatgagggcccaagcaaactcaggaaagtttctatcaccaagggcagaacacgaacatcttgaggctaaaggagctgcatggttgctaccaacaaaggagaccgacggtgtgcagttgattcccatgtttttactgcacttcacccccaaattcccagcaaggtctaaggcttcgccaggaacccttgtcttcttgccaaaggcatctcagggccatcctgcaatactcatgaggttgcctgtcccttcatgcccctcaccccaccccaggattaatcatcaaagaaggactgtctacatgtcctcctccctgtgcttaggaagagagacaaataagagaatgagaaggctgggaaggcccttagcggtcacatcaagcaactgtccttgccaaggttttatggaggaggaaactgaggccgccttgtgctgagtggcttacccgtgagcagccggcactccatagggccacagcagagactgtttcttcgtggcgcggaaggacatctctgcttgctggtcccacaggctaggacagcccctattgaccttgtactatagctgcatgtgacctttaaccaatggtaaaatagccggatttgtttccacctccttctgaggttctgacctgtagtagagaaaagaaatagacaagcgtgggtgggccacatcctgatcagctgccaaaatgcgtgtggcccttgttacccctgtcctgcccacttggtggaccattgcaggaagtctgagccctctgccttcctttctctttgcagggcgaagatggcttaccagtccaaggctgctggaacaagtgatgcctctaaccttggattggcctgtgtgtgtgtttgtacatagaatatttatttttatacagttttcactttttgaaaatgccagaagtatgatgcatcttacagattattaaaaaagaaagaaaaacttgcatattttgtacagaaaatatcaacctcttcccttttgtttacaagatgttttgtataagcctatgtctctaatacattttttgtttggtcgtaatgtctgcatgatatttgtgcatatttattaagtatcgaagcttaataaattattgtgtcctggtgccaaagggggccagccagaactgaggtgctggctggctcatgtgtgaattcacataaatgtagaggtccatgatatttgctaagctaggtgtgtctaagagtattttaaacccttatggattttcattattaaaggaaatgaaacatggc

SEQ ID NO: 75 - DNA, 1623 bp, Homo sapiens
gctctcgcccgggccggccatggcgctcaacaatttccttttcgctcagtgcgcctgctacttcttggccttcctgttcagcttcgtggtggtggtcccgctgtccgagaacggccacgacttccgcggccgctgcctgctcttcaccgagggcatgtggctgagcgccaacctcacggtgcaggagcgcgagcgcttcacggtgcaggagtggggcccgccggccgcctgccgcttcagcctgctcgccagcctcctgtctctgctgctggccgccgcgcacgcctggcgcacgctcttcttcctatgcaagggacacgagggctccttcttctccgccttcctgaacctcctggtcagcgccttcgtggtcttcctggtcttcattgccagcaccatcgtgagcgtgggcttcaccatgtggtgcgacaccatcaccgagaagggcaccgtaccccacagctgtgaagagctccaggacatcgacttggagctgggcgtggacaactccgccttctacgatcagtttgcaattgcccaggtagggggctctgggcaagaagggaggcttgcaatgctgggagggggccatttactgctggacatttgctgagctctcccccatccagaggaggaggcaggctcctgtgtggataaggtagttagcaatgggaccaggcagtgggagcagtcgggaaggcttcctgcaggaggtgggggagagctgggcttttgtaggtgggtttggggaggagatggccacagtgagttagaatcaggaagtggcaaggccctggggtctggggtgggaagtgtgggggtgtggggggaggtggtgccagaaacgaaaccaggcatcagatcctgggggtccagtgtagggacaagggctttggactttggtgctggcgctgggtgggcctgttcagatcagagctggaggcttagaggagtcccctagccagggggaagctgatacagagtccaaggaaggaggcaggggatcccacttgtgaattcagatttgccaccctgcccttgtataagctgcgtcccccgccccctaggagacttggtggagggcgatggtggcccccactctgagggacgctatttgctgaaatgcaggcatgtggggacacatcagtggcccgtgagggccggagggggaaccctggaattgggtttgccccttgaaatctgcagatgtgccccagacggagatgaggcagatgaggggtgccgggtgggggtggctgagaccagacacctggctcctgccagcactgatcagggcccgctggcttcaggtccaattccggaccccaggctggcctctgaaggctcttgctggccgtggctggcctgaggacgcttctcctggccaggagccctccaagggtgctggacgtgggtgggcctgaatgctctttgccgagatgaactggacctgtcaaagacaccttcatgcaaatttagtgagtggaagaggcctcaggcctaatttgtgccagttggattaaggtgtgagtgcagtctgatggcaaatacgctcaaatgagaatcagcttaatgtagctcaggcctggttctgattaaattgtttctccttcaactgtttgg

SEQ ID NO: 76 - DNA, 1984 bp, Homo sapiens
actccccccgccccgtagccatctggacctctgcagctagtttctgtcttgggaggtcccctgggctttccaccatggccctagctctgctccagggccagagcctgagtgggcacccagcacagatgctgtgcttgggcgaggtgtgggcaagtgtggccactctacaggagggctgagccaaggccatgggaaacgtctgttcaccgtactccaggtgcctatgcctcactctgggcgcgtgcccagctcccttccagcccccgcttccctgctgttcacccccctcctctggcttatccacagacttgaaggctccattagggcaaatccctccagaaagcctttcccacccacagggcacccaggccaggcccagctggagctcctggactgtgcttcaggaggcagcacagcagcgcctctgggaccagcagtgtcagaccactgtcttcacctgctcccctcacggtgtcctgatgtgtggctggccccttgctgcccctgagcagtaacctgcaggggtttgttcagggagcagtggtcaccagagcgcccagtttctgaccacagcctctagaaatgtcactcaggcccaacgagctccatctagagtcaggtataaatgttgcccacatctgatgctttaaatgccaggggctcagtgctcccaggaaatgctggcttcctgccaggaaggcaggcccgcagggtgaggcaggcagggcagctcccacagtgtggccagctacccattgtctccaggcagctaccaggggctcgtccaccaggaggcgggcacctgctcagggccctcagcagcatcaaggtctggatgccggagctcaggaggggctggggagagtggcgtctgtctttgctcggccactgacacgcgagccagccgtctgggtgatgggatttttccctggtgttgagatgctaccctcccctctactcaaggagagagaagagaataggaggtgactttgagtcctcacagcaatgcagtgaagtagaaaattggccctattatccatattcagaggagaaacggaggcttggagaaattgggtgggaacagcagtgcgtcctgatgaccctgttgagttttctcgccacagctatggaattctgctgatttttgacctggagagaaaatgccaccaggctatcaaaggagcagaggagactgaaatgggtttcccatgatgaaaggaagcttgtctgtctgtctcaaccattaatcctggcaaaggcttaggctcctgctgagtccccagtagggataggagctcatgaatgcctgagccacatctgccacctgttggctaagtaggatctgcaaatggcattcttatctcaaaatgaattggcatgattattcagttctgttctccaatctctgtgtaaccagcactgggcatcttatctgtaaaacatctgacttgactgtcaggcacactgagtgacagaggctgacctgtcgcgggggctctagtatccccaccactacccacttctctcaattgagttacatttgctgaacctggtcccaaactgacagattcccattgtacttgttattgtaattacatcatttaatatgaagtagactcatgaattacatgaattatgaacatgaaaaggtagggaattgattcatcgaaaccctagaatgctttagacagactcagtagaggcacgttgctaaaaaatattgtcaaattaagcatggatgagtgaaacatgcaatagcgagaaatgggaagaatctgggattctgctctcagaatacttcaacagtgtcgtaaaacttgtgtttgactttaaagaaatactggaaattgtgaatgtctcactaaaaaaacaaagagttgtcttatgttaaaagaataacaaatgaatgcacatgttctttaaagttaaaatacaattttatgggtatgtgtgtgtgagaaacagaaatagaaagaaaaggaag

SEQ ID NO: 77 - DNA, 2234 bp, Homo sapiens
tgttttggtgactatggccttatagcatagtttgaaatcaggtagtgtgatgcctgcagatttgttctttttgcttagtcttgctttgtctatatgggctcttttttgtttccatatgaattttagaattgttttttctaatgctgtgaagaatgatggtggtattttgatggagattgcattgaatttgtagattgcttttggcagtatggtcatttttacaatattgattctacccatttatgagcatggcatgtgtttccatttgtttgtgtcatctatgatttctttcagcagtgttttatagttttccttgatttgattctccacttggtcactgttggtgtacagaaaagctactgatttgtgtacattaatcttgtatccagaaactttgctgaattattttatcagttctaggagctttctggaggagtccttaggattttcaaggtaaatgattatatcattagtaaacagggacagtttgagttcctctttactgatttggatgccttttatttatttctcttgtctgattgctctggctagatcttccaatactatgatgaagaggagtggtgatatagtgacagtccttgtcttgtttccattctcagagggaatgctttcaacttttccccattcagtattttgttgactctgggtttgtcatagatgtcttttactacattaaggtatgtcccttgtatgccaattttgctgggggttttaatctaaagcgatgctggattttgtcaaatgctttttctgcatctattgagatgatcatgtgatttttgttttaaattctgtttatatggtgtatcacatttattgagttgcatatctttaaccacccctgcatccctggtatgaaacccacttgattgtggtggattaccttttagatatgttgttggattcagttagctagtattctgttaaggactttagcatctatgttcatcaaggatagtggtctgtagttttcctttttggttatgttctctcctggttttggtattagggtgatgctggcttcagagaatgaattagggagggttccttctctatatatcttgtggaataatgtccacgggattggtaccagttcttccttgaatgtatggtagaattctgctgtgaatctgtttggtcctggactttttttatgttggtaatttttaaattatcatttaaatctcgctgcttgttattggtctcttcagggtatctacttcttgctgattaagctaggtgtaagattgtccccatggcctgaaagcttaaggagatatataactcctcgcttctcaggcccagtcccaaggcgcaaggccacttgcgtcagcagtgtgtgcggcagcatgcaccagcaagatagcagaggcagaaaaatagccagtcagaagacacctacccctgaagattgagaaagaggccatatgggtaaaacatagcagttacgtcagactaggacacttcctgtttacaggagactgtaaaacatttgtcccatcctcacttggtgctaacgccattttaagcctcagcccgcctgcacccaggcactcattaagacagcatgttgctccacactgcctcgtgttgtctgttggtgcactctcggggttcaaactgttacaagaaccttatattttggtgctgaaatctgggaggggctcaggtctgcatcccccatggacctagccctccaccccaaagagcaggccacagcagctggacaaaggaaggtcctcagcctccagtcgcctctctgtgcatgcagtcggtcactgatctcgcctactggcacagacgtgtttccagacaatccagatgatgcttctgctacagcgacatgacaggaatgtaagattctcccggggcctgaaagcttaaggagatgaataactcctcccttctcaggcccagtcccaaggcgcaagggccacttgtgtcagcagtgtgcaccagcagcgtgcgccggcaagatagcagaagcatgaaaagggccggccagaagacacctactctggctggaagacacgtacccctgaagatcaagaaagaagctatctgggaacaatgtagcagttacgtcagaccaggacacttcctgtttacaggagactataaaacctttgtcctatcatcacttgatgtggacgccattttaggcctcagcccgcctgcacccaggcactgattaaaacagcatgttgctccac

SEQ ID NO: 78 - DNA, 2482 bp, Homo sapiens
ttaaaaatcacatgcaaaatcaaaaccatgaactcactccatgctgggagacagcaagctttccaggaagacccaggaccgacgggccttggaaaggacacaagcgcagggaggagaacacgctcgaccgaggccctgcagagcgccctgagtgcgaagctgatcggcaggggaggggggctcccgaacggctgcacagggacccccaccacctgccacctcccagggcagtacctggggaccgaactcagccccaagtccaagaacatctcgaaacacactgtggagaagtggaggcttgaggtcaccgtacacagggagcctgcatggaatctttgggctgggacaagggcgggacaattccagacacgcgggtccaggaagcagacccaaccccgcccgctgccacgtacacacctgctgccacctcctaccccaaggcgtccccatcaggagagccatccctgggcccccacaatgcaccagacagcacattactgccggcgaaacgccactcgggacaagcccccggcgtgagggcagcagagtagccctgaacactgagatggtgacgccccgggcgcacccctgccggctggaaggctccatcccctctttgctgagacccctcgtcctggctcgctgactttcaggctgtcaggctctgcggggcacttgccggtgaccactgccttgagcacaagcagccgctggcccggccgacaatgccacagtccacatgcccaggctttcctttaagacacaccctggcagagacaccagcactgcccagcttgaggggacccgtgggaacgaggaggccgcatgggcacttgtgatagcgccttgggtccatgcctcatccatgagggggcagcgcatgcagtgaccaaatcccagtctgtggctgccacgtgccaggagtgtgtgtgagcacctttcacttctgtgccagagccagggcgggaacacggacccagcagcagcagcgggcactgggcatgtggaagcagcacagcattcactgaagtccccaaggcagctgtgagaactctgccggggactgggccacagacaccacggagtggacgccgcagtccccgaggacagggtgggtgccaggctcccccgtgcttgtcctgccactggagtgtgggaatccaaccacgggacgtgtgacatagacaagggaacggtcagtagttccctcggaatcccgaataagggcgtaagtggagttctgcacagacgggatggccgggaacttggggggcctgtggggagcacagcggctgcccagcctcagtggcgggggaagcccacggagccccagcccagcctccagccctgtacttccagcacagcttcctgcacagcctaagaacttcctttgaggacgcggtcattcaacggaccagcgtgccagacacctggtttcagagcaccccgtgactttcatttcggcagttatcagatcaatacagccgcagaaccggccagcaggaggaatgcaagcccactccagacgtctcacctgagcttggaaaatccaggggcctgaccaggggccgcgcactgcccggatcgtagcaccctcccccggagaagtgatcagggcctccagacacacaagccgtcgctgactcaaatgcagagagaagcaccaggggcaggggagaaaacactcactttcactccacacatgtagaaagtgcacaagtccacgctctgcacttcagccataaaaagcacagctggaggtgggggctctggctgctctgcaccacgcgcctcgatttgggtctcagggcagcccagctggcatccaggcaccacccagcaaggccccgagcctcagcaggccttgggggtcctctctggttacaagcagatgccccgctggtggctcgtgtctgagagtcgcagtgtgcatttcactgcatcttccaagagcaggggccagctttcaggcctttcagggactgctgccctctgggcgcacccgtgaggcagcctcccgcgccccagggatctgtcctctgagtggccctcaggcaccttctaagccacctgctgctacactccctcatggttccagggcagcaggaccaaagccccagcctcactcaggactggagagaccctcaactttctgactttcaaaataaagaaccaaacagggcgggcgtggtggctcgcacctgtaatcccagcactttgggaggccggggcgagtggatcacctgaggtcaggagtgttcaagaccggcctggccaacatggtgaaaccgtgtctctaccaggggtgcaaaaaattagccaggtgtggtggcgcacgcctgtaatcccagctactcgggaggctgaggctggacaatcacttgagcccgggaggcggagcttgcagtgagctgagatcacaccactgcaccccagcctgggcgacagagcgagactctgtctcaaaaaataaaaaaagaac

SEQ ID NO: 79 - DNA, 3038 bp, Homo sapiens
cagagttcagcttgtggttcctgggtcctgtgagggtccgcaggaggcctctgtgggcactggcaccttccgcttccactgcccagcctgctgggagcaggagctgagtattcgcctgcaggatgcccccgaggagcaactaaaggcgccactgagtgccctgccctctggtcaagtggtgaggcttgtcttccccacgtcccaggtactggcctcccagggaaggaagcaaggcgcctggatggggctgggatccaggccacaaagggaggggcctgcttcccgcttctccgtgggtcacaccctgagcaggtgctggggccaggctctttggggagtgtcctctgagcatccctgcttcaggcctggcgcctgtggagacagtggcggggcgggggtggtgcgccggggatcagggtaagaggaccagagctgggtggaggtggccgaccttttgtgactggggccttcacggttttcaggagcccctgatgagagtggagctgaaaaaagaagcagggtgagaggcctggctggggactgggcaaggccctggaaaacaaccagggcgcggggctggaggaggcctggaggagtgagggggagaaacagccgcccctcatcctcatgctctctgaaggggctcaggcttgcgctcgatggggcacgaagtactgggaggagtactgggaggagtcttagcacctatggtcagaggggcgagtgaccggcccagtgccaggcacccggggagcacttgataaatgtttggctggaaaacgcagggaggcaaggatggaaaatggtaacatggtttggggcgcagagagggcaggaaaaccaagggagagaagaggggaaattgcgcccttttgggtggaagctgttatggctggaccttaaatgatcttcgtagagttgtcgcccaccctggccctctgtcttgagagagtggcttctcacctcacagacacaggattattggtccttttctgccccgccccctgccctttttttttttttttgagatggagtggagtctctctctgtcgcccaggctggagtgcaatggcgtgatcttggctcactgcaacctccgcctctggggttcaagcgattctcctgcctcagcctcccgagtagctgggattacagactgagggagctggccgtgcgactgggcttcgggccctgtgcagaggagcaggccttcctgagcaggaggaagcaggtggtggccgcggccttgaggcaggccctgcagctggatggagacctgcaggaggatgagatcccagtggtagctattatggccactggtggtgggatccgggcaatgacttccctgtatgggcagctggctggcctgaaggagctgggcctcttggattgcgtctcctacatcaccggggcctcgggctccacctgggccttggccaacctttatgaggacccagagtggtctcagaaggacctggcagggcccactgagttgctgaagacccaggtgaccaagaacgagctgggtgtgctggcccccagccagctgcagcggtaccggcaggagctggccgagcgtgcccgcttgggctacccaagctgcttcaccaacctgtgggcccccatcaacgaggcgctgctgcatgatgagccccatgatcacaagctctcagatcaacgggaggccctgagtcatggccagaaccctctgcccatctactgtgccctcaacaccaaagggcagagcctgaccacttttgaatttggggagtggtgcgagttctctccctacgaggtcggcttccccaagtacggggccttcatcccctctgagctctttggctccgagttctttatggggcagctgatgaagaggcttcctgagtcccgcatctgcttcttagaaggtatctggagcaacctgtatgcagccaacctccaggacagcttatactgggcctcagagcccagccagttctgggaccgctgggtcaggaaccaggccaacctggacaaggagcaggtcccccttctgaagatagaagaaccaccctcaacagccggcaggatagctgagtttttcaccgatcttctgacgtggcgtccactggcccaggccacacataatttcctgcgtggcctccatttccacaaagactactttcagcatcctcacttctccacatggaaagctaccactctggatgggctccccaaccagctgacaccctcggagccccacctgtgcctgctggatgttggctacctcatcaataccagctgcctgcccctcctgcagcccactcgggacgtggacctcatcctgtcattggactacaacctccacggagccttccagcagttgcagctcctgggccggttctgccaggagcaggggatcccgttcccacccatctcgcccagccccgaagagcagctccagcctcgggagtgccacaccttctccgaccccacctgccccggagcccctgcggtgctgcaccttcctctggtcagcgactccttccgggagtactcggcccctggggtccggcggacacccgaggaggcggcagctggggaggtgaacctgtcttcatcggactctccctaccactacacgaaggtgacctacagccaggaggacgtggacaagctgctgcacctgacacattacaatgtctgcaacaaccaggagcagctgctggaggctctgcgccaggcagtgcagcggaggcggcagcgcaggccccactgatggccggggcccctgccacccctaactctcattcattccctggctgctgagttgcaggtgggaactgtcatcacgcagtgcttcagagcctcgggctcaggtggcactgtcccagggtccaggctgagggctgggagctcccttgcgcctcagcagtttgcagtggggtaaggaggccaagcccatttgtgtaatcacccaaaaccccccggcctgtgcctgttttcccttctgcgctaccttgagtagttggagcacttgatacatcacagactcatac

SEQ ID NO: 80 - DNA, 1968 bp, Homo sapiens
agaaaatgccagcagtgtgattgtaaccagaactaccataaaagatcaggaggatcttaaatgggctttttccaagcatgaaactgccaagaacaaaatgaattacaaacagaaagacttggataactttaccagcaaaggaaaacacttgttatctgagctgaagaaaattcacagtagtgatttcagcttggtgaaaacagacatggagagcaccgtggacaaatggctggatgtatcagagaaacttgaagaaaacatggataggctgagagtaagcctgtccatttgggatgatgtactgtcaactagagatgagattgagggatggtcaaacaactgcgttccacagatggcagaaaacatcagcaacctggataaccacctcagagctgaagaactgcttaaagaatttgagtctgaagttaaaaacaaagcattgagattggaagaactgcattccaaagttaatgatctgaaagaattaactaaaaatctagaaacaccgccagaccttcagtttatagaagcagacttaatgcagaaactggagcatgccaaagaaataactgaagtagcaaaaggaaccctgaaggatttcacggctcaaagtacacaagtggagaagtttattaatgacataacaacatggttcacaaaagtggaagaatcgttgatgaactgtgcccaaaatgagacttgtgaagcattgaaaaaagtcaaggatatacaaaaagaacttcaaagtcaacaaagcaacatcagctctacccaagaaaatctcaatagcttgtgccgcaagtaccacccagctgagttggagagcctgggccgtgcaatgactggtctgataaagaaacatgaagccgtgagccagttgtgctccaaaacccaggccagcctgcaggaatctctggaaaaacacttcagtgagtctatgcaggaattccaagaatggtttttgggagcaaaggcagcagcaaaagaatcatcagatcgcaccggtgacagcaaagttctagaagcaaagctccatgatcttcagaacattttggactcagtcagtgatgggcagagcaaacttgatgcagtgactcaagaaggacaaactttgtatgcacatttgtctaaacaaattgtcagtagcattcaagaacaaatcacaaaggccaatgaagagtttcaagcatttctgaaacaatgccttaaagataagcaggctcttcaagactgtgcttcagaacttggaagctttgaagatcagcacagaaaactgaacttatggatccatgaaatggaagaaaggttcaatacggaaaacttgggagagagtaaacagcacattcctgagaagaaaaatgaagttcataaagttgaaatgtttttgggagaactgctggctgcaagagagtctcttgatgagctttcccagagagggcagcttctgagtgaagaaggccacggtgctgggcaggagggccgcctgtgttcccagctcctcacaagccaccagaacctacttagaatgaccaaagagaaactccggagctgccaggtggcccttcaggagcacgaagccctggaggaagcactgcaaagcatgtggttctgggtgaaggccattcaggacagactggcctgtgcagtctttactccctaacccgtttcccgaaaaaggtgctacctcctttccagacagatgagagagggcaggacttcaggctggatccaccactgggctctccctcccccagcctggagcacgggaggggaggtgacggctggtgactgatggatgggtagtgggctgagaagaggggactaggaagggctattccaggctcagccctgctcctgcagctttgccgctgagtgtaggaaaaacaggcatgacagaccagggtgagggttgtgcccagctgggccacggccatgcgtggggtggcccaataaacaccgtggactccc

SEQ ID NO: 81 - DNA, 2018 bp, Homo sapiens
tcttactatgaagctgatctgcacaaaacaggctgttgttttaaaatggagcaacgatctgtactcgttcttttttttttttttttttttttttttgagccagggtctcgctctgtcgcccaagctagagtgcaatggcacaaacttggctcaccgcagcaagcaaacctgcctcagtggctgagactgcaggcacgggccaccatgcccagctaatctttccatttttttgtagagtctcactcaaagggtctcactatgttgctcatgctggcctcggactcctgggctcaagcaatcctccctccacgcctgtaatcccagcaccttgggaggccaaggcaggtggatcgcttgagcccagtttgagaccagcctgggcaacatcacaaaaccctgtctctacaaaatatatacaaaactaagctgggcgtggtggtgtgcgcctgtaatcccagctacttgggaggctgaggcaggaaaattgcttgaacctgagaggtggaggttgcagtgaacaaagtgtaccacacgccagcctgggcgacagagtgagactccatctaaaaaaaaaaaaaagaatacaggctttctaagtgaaaaggtgttctggaattattaacagtgatggttgcaaaaccctgtgaatatatctaaaaatcactgaaatgtacactttaaatgggtgaagtttatggtatgtgaataacatttcaataaagctattttaaaaataaactgtaagccgggtgtggtggctcacgcctgtaatcccaaaactttggtagactgaagcatgcggattgcttgagcccaggagttcgggaccggcttgggcaacatagtgaaaccccatctttaaaaaaaaaacattaaccaggcatggtggcacgcgcctgtggttccagctactcaggaggctgaggtgagaagatcagttgagcccaggaggtcaaggctgcggtgagctgttatcacaccactgccctctagcctgggtgacaacaaagcaagaccctgtctcaaaaaaacacaaagagactgtagttgctttaaaaatatgacttctgtatgctatgtggttacagaaaataagatcatgtcaattttttcttttttagaatgccaaaagtttctttaaggggaaaaaaatggaactatagtaaacagactataaactatcttactgaagagtctaaaatgaagcaggtctatcagtgtaccttaacacagcttgaaataacaatcaactcttaaatgcttttggtctaagactgttgccaagtaatatggtttggatttgtgtccctacccaaatctcatgttgaactgtaatccccaatgttggaggaggggcctggtgggaagtgattgtatcatgggggtggaatccccctggctgttctcatgatagtgagctctcacgagatctggttaagtgtgtgacaactccccctcactgttctcatgatagtgagctctcatgagatctggttaagtgtgtgacaactccccttcgctgttgtcatgatagtgagctctcacgagatgtggttgtgtgacaactccccctcactgttctcatgatagtgagctctcaacaagatctggttaagtgtgtggcaactcaccctcgctgttctcatgatagtgagctctcaggagatctggttaagtgtgtggaaactcccccttgctgttctcatgaaagtgagcctcgcgagacctggttaagtgtgcagcacctcccccttgctgtcctcattacagtgagctgtcacgagatctggttgtttagaagtgtgtggcacctcccactttgctgttctcatgatagtgagctctcacgagatctggttaagcatgtggcatctcccccttctctctctcttcctcctgctttggccatgtaagacatgcctccctccccttagccttccaccatgattgtgggtttcctgaggcctccccagccatgcttcctgtacagccgagccaattaaacctctttataaagt

SEQ ID NO: 82 - DNA, 1795 bp, Homo sapiens
cccttcctcacacacccacctcagacctgggagaggactgtgtgtcccccactgccccatcggatgctctgggctctgcctcagggaactcgggtttggggaaatgtctatttcagaagtactggagtggccagtgtggcagtggccactcagggtgggctgggtcctgagacccatccccgacacctctcctgctgaaccctcaggctgctccccacaccagggtgtgactgaggggtacacaggcctggatttctggtgtgaggaaggggctagcacctcccctgttgtgtagccagcacaggcacaatttgtgggtttggtggcaggtaggtggtgcgtgggagaaaggacagtgttagaggtccccactccgtggtctaggatcatgaaaggtgaacacacaagtacacaaatgtgccatgccctggcatggggcttatgtgtgcacaggcaaggcactcggtgtgtgtgtgcggaccccagggtcccaggtcatgtgaagcgtacgtgtgtgtgcattgtatgtgagtgtacattgtgtgtgcattgtgtgtgcatgtggccaaacagatgtgacctcccagaacacagtacccctccacctctacccgagctcagacagccgagctctcccttgtcctgtgtgtgtgtcagtgtggccacgtgcgtaaccccaggtgggctgtcctgagctgggggcctgcctgtcccttcccagaacgcccctctgcaggacaggaagtctgccccaagtctggccacggccctcctgctcccatctcgggctgcttgggagacatcagagcaggccccagcccccagtcccctcttccggccgcctggacaggacccccattcagcccaggtgtttccggaagtcccacggccttggggccacaggagaagggttgaagcgtggctggggcaccactccccccacctggagtggcattgggcccacagctgcccatctctgggcctcaggtggaccaggggatctctaagggtctgctgtgccctttctatgcgtcctccacatcctatgatgtgcctgcttgttggctgctgtctgtgtgcgtcctggcatgttgtctggaggctggtgtcttttgcatgttcttggacaaatgtgtgctacctgcccaggcgcctgcaaccattgagcccacatgtgccccacgtgtgccctgcgggtggtcccgggcctggccagggctcagtgctcctcttccccctcctccctgttcccacccctcatgaagcacactgcgtgtccatcccatgtacccgtgggtcgacgcacgctcttgccacgccctgagcgtgtacacatgatgtgttctatgcattcaccctgccccccagcccgccctgcagaggacaagatgggtggccccggctccctttcccctaaccgcccctgcccgctgtgcagccgtgtgcgttggcgtgtgtttctgtgtcactggcgtgtcacgtgatgtagccgtgtttgctgacatgagcccctgcccccttctctgtttctccgttggtttctagagctctctccctccccttctcagaggggacaggactcctggggtctggctggggcccagagccaggccgccctctcctgttagccctcagagtcccatttctattggtgaccaacttgcaaatggataaaacacaggaaaatcctgccccccccttcctccctgcatgtcctgtccccagagccccccaccccaccctgggccaggtcaggccctgtgggacgggagaaatagcaaccaatccaacagcg

SEQ ID NO: 83 - DNA, 2594 bp, Homo sapiens
attagcaataacttaacctaaagaaaaatattctaatagcaaaccttaagtgcttagtttgtgccagttattattttaagcaatttttatacattatgtcatttcatccttacaacaaccccatatgctaggaactagttatattcccattttatatatgaggaaatgaggtacagagaaaatttaatgatttgcaaggttaccaccactgttaagtactggaaaatttgaacccatgtagcctgtctcttgtactactatactttgtagggactccaaatacaatcttactcgtttaatgcttaacaacagtagaatttatattggttaggtaaattacagacctcctcagttttacttaatagaattatttgtaaaactagcttatttatgagacagagtcttgttctgtcacccaagctggagtgcagtggcacaatctcaggtcactgcaaccaccgcctcccatgttcaaacaattctcctgcctcagcccccagagtagctgggattacaagtgtgtgccaccacgcccagctcatttttgtatttttagtagagactgggttttaccacgttggccaggctggtcttgaactcctgacctcaagtgatctgccctcctcggcctcccaaagtgctgggattacaggtgtgagccaccacacctggccaaaactagtttatatacggaccaggtgaatggtccatatataaatcataaatgattcctcaacactcatgagtgaaaaaagtatgaaataatccctgtcatacttacatttgcctgtgagtacttcatggcaaatgtcttaatctgtttgatgtagatgttgttgtagaactgaatgaggtctcccctctcctcttcttccatgtcactgttggcacctgtgaggcgagtaggtgtgggaggagcactgctgggctgtggaactggcaaggtgctgcttgacctcataactggactggagtctctactggctgcagccaggagaacaaaggctgtcagtacaaaggctgctaatattgactgttttaattttttaaaagtaggagaaagggaacagctacctgcactacttgctaataacagtgaataggcactctgttcttcacaccaaaaagcaaagctcagctaggatattaactttctccctatgccataaccatagcaagggctttctgagtagtgtccattaataagttacaccaaattttctaggacctaagccctgtactaagtggtacaaagcaacaggcaggggatggtatttccatagcatggttccaattgacatatcagacctttctggaactcaggcaagcagattcctccctgaaagctctaattctcctggagaaaaatgttacataatatgtgccccaaagctatgtaatggacagttttgccagctagaatatggtttactgatctataaaacactttcatagtttctatagttatttcatttagtaatgcttagttacttcttcaaggcctaaaaagtaagaaaagctcctaattttgtcttgtagttcacaaagatcccacttacttctatctttgtttagttctgttggagaattctgatggcttctgctatcactgctgccagaatttcttctttttcttttcccttttatcaaaacacttctatacacctttagagaaacaatgagaaggggacataaactagtatttgttgagcacacccttggtgataggaccttcacatatgttacttggttttcacaataacctgtatagcaatagttgtcctcagaacaggttgagaaacataactcaaattataacagatccaggattcaatcagagcccatctagcatcacatgccaagtactacctgcagtactacactgcagtgacagcacccaaccataatgtcaagtcattctaagtaagatacacagatctggccgatttgcctctcagagatgaatggtaataaaggcaaagtgggttttaaatttccatgtgacattctgttggttaaacctacagtatgtttactaaaccagaatgaaaggtgacatagaaaccaagtaacttcttaattcctatcttgtgatttttctgaattaagaaggcaatcaaatatttaacattgttgccttttgaggaaaagagaccttaatcaacatgtgacatcaagaataaagattaaagtagaaacttcccttaagtagagtcccaggtgtttatcttggaaaaaaggccacagagtcaactatggttaattttttgtattcatcacagactttaagctttatttttcagcccatagagaaaatgtagttacctggctccgggcctgcggctgagtcctataacaacgcataatgttctggaaggacttatcttcttttgtgacctggcaaacaataagagtgctctgagagacatggcaactaccaccataatagtgtgaggagctctgtgaacctgctgcccagtaaaaggggtgaaaattatataaaagctatttaaagtctctggaaatggtattaacggcatatagcaaatgaagatacatcgattcaagaatatctattaaaattcaataaaaac

SEQ ID NO: 84 - DNA, 1901 bp, Homo sapiens
gtgcgtaggtccagtgaggacgagggtgaaatttatatctctgcccaggtctcggtgcctgcaccgccatagacaccaccagggcactggggacgctgggtgcactggagcccgagacccctcttcctggccatggctgtcctggtcgccagtactgtgggctgtgattctgagtatcctattgtccaaggcctccacggagcgcgcggcgctgctcggctgccaggacctgctgaggacaaacggtgtgtgcagagccgggcgcctgggcgcccggggcgtgtgcggcgggagcgtctgagaccccagagatggagtcctgggctcggggacgcaggcgctgctgcagaccacgagcgcggagcttggggaggcgcaggcgaagctgatggagcaggagagagccctgcgggaactgctgacccatggcttggctgaagccggcagggaccgcgaggacgtcagcaccgagctgtaccgggcgctggaggccgtgaggctgcagaacagtgagggttcctgtgagccgtgccctacgtcgtggctgcccttcgggggctcctgctactatttctctgtgccgaagaccacgtgggcagaggcgcagggccactgcgccgatgccagcgcacatctggcgatgtagggggcctgggggagcaggacttcctgagtcgtgacactagtgcccgtgaatactggatcggccgcagggccgtgcaacacctgcgcaaggttcagggctactcgtgggtggacggagtcccactcagcttcaggtaggggaagggctcctggtgaaacctgggggccacaggttagactctagaggacatgttttgaggccgaggtgggcggatcacctgaggtcaggagttcaagaccagcatgggaaacgtggcgaaaccccatctctactaaaaatacaaaaaattagccgggcgtggtggcacacgcctgtaatcccagctaaccctggatgctgaggcacgagaatcacttgaacccaggaggcagaggttgcagtgagccgagattgcgccactgcactccagcctgggagacagagttagactccgtctcaaaaaaaaaaaaaaaaaaaaaaaaaaaaaaaagacatgctttggccagatctcagggaccccttggctggggctccatgcttagggatgggcaggctggaccctaggaagtgtccttgggttaaattctgggcgttagtaagttatatcccaggtgtatactcaggttagacacttggggtgtctagcgtagacccaggcaataaacaggctagagcctgggaaggaagtgggggccccgggtccatccttagcttagattcccagcatcaccccccgcccggccattcaaccactgcagccactggttacagggggaacgcaatgaattttgggggtgcgaggcctgtgtcatgattctgggcatggggctgtggatagacccaccacgtgatgagaaggctggccggatctgtcagcagaggcacggtgctgaccccgcccggtgccccagagccgtgcccagtgcccaaaggggtgctgtgcaccatcccggctactggaacccactgccaaggattttcttttccccatccaccactgctgagaaccaatcggccaggcccagccctgtccggtgcctgcactctgggacctctgctctgacttcatgcaaacctaacctaaccttcactggctccaaaatctccatttctggatcccagtggtctgaccccacctctcctcctagccaaggtcagacaactgaggaatggagctatttggttttcctgcactttcccgcaaaggggaaaatggtacttcctgcaaagctctctttgcagcctgggggagcatcaataaaggtttgagaaatgg

SEQ ID NO: 85 - DNA, 2375 bp, Homo sapiens
attcacttgatatactgtttcctttcaacctccacattctcaccacctgtttctttgtttgagcaccaataaatagtgtgggctcccagagctcggggcctttgcagcttccaccctcacgatggctccctggtcctactttctctctcaaactttttctcattcctttgacttgattcaagatttcaaaatcttgaaatccagccctgccaagggaaggatggggggacatgtcaatgacaaacaacgccggacactagtaaatgacaaggacagatttttgccagtaatgcactattgcaatcaggaaaggagtccagcacgagctgattttgatttgtgcagaggtgactgggtgctttcaagggagaatgaggggaccaggtgtggtggctcatgcatgcctgtaatcccagcactttgggaggccgatgtggtcggatcgcttgggatcgggagtttgagaccggcctggctaacattttttttcccatctctaccaaaaaaaacaaaaaacaaaaattggccggctgcggtggcacggcctgtggtcccagctactcggggggctgaggtgggagagttgcttgggcctgggaggcggaggttgcggtgagccgaggtcccaccactgcactccagtctgggcaacagagcaagactccatctctaaataaataaataaagaaagaatgaggggatagggagagggtaagcaagtcatggaagtgagaaattatagaatgtggggagagggctttgtccatgggaaacccatctgggtttgatgacgggcttattgaagttaggctcctgtattcccacagagactggaagacaggggccctgtcttcagttgttggctggaacaaacagtaaattcttctgacagccttgagttttctcaagtaggcactttaggcaggcggtgacaggggccctcaggtcatcacaggggtgagctgttagagactatgatagtgtttgttcaagtccttataagccaaggttgaggcctaatagagaagggggctcagaggagcccggccgaagtttggacaaggagagaatctttggcagaggagatgtcaccaggctctcgggaggaggcagtaatattgttgcacaaccagagggaagcctgcaagcccagcctgtggaaacagaggtcctgagagcacagcccaacactacggaactggcctgtggcagagactagaatgattaggtgggcacctgctcccctgaataagaccacacttcccactctctctcacagacagaaacattcctcaatgggatgtgaacataagtgcttcgcaccacttccaggtcacacactcacagggaaagtgttctccttctctttttctttccccttcccactggctggaataccacccccacacacagacaaggacatgaccctggaaaggtggaatggaaagatagaaggagcctggcccactgatggctctgtgaagcagagcctccataccaactcaaacttctacacacagaagaaaaccagttctcttgttttaaaccaatttattctgggtctcttttgccccagccaaatttacatccaactaatgtaatgcctatcctcaccaaaggatgggcagcctgacaggtcatttcagagcatccagagaacagagtgggtggcagaaagagatcaaggacaaggccaggcacagtgcctcatgcctctgatcccagcactttgggaggctgaggcgggcagatcgcttgaggccgggagttcatgactagcctgtcagcatggcaaaacatcatctctaaaaataaagagagggagatcaaggacaatacaaattgcaatctaatgaagatattgctgcaaggggagtagacagtcatccgttggcctctgcaatcaaatatttccccagagaatcagggagggaggagtctcatgctgggtgccggccctgtgccactgctgaaaatctcactgccacagcgtcctgagctggcagtggcttccacggtatctgggagccaggagagcgtgaacctgcgagccccacccatgagggctgattaggaacactggaagaactgcaagaggggctgggctcggtggctcacacctgtaatcccagcactttgggaggccgaggcgggtggatcatctgaggtcaggagttcgagaccagcctgaccaacatggtgaaaccccatctctactaaataaaaaattattggatgtggtggtgcatgcctatagtcccagctacttgggaggctgaggcaggagaatcgcttgaacctgggaggcggaggttgcagtgagccaagatggtgccattgcactccagcctgggcaacaaaagcgaaaccctgtc

SEQ ID NO: 86 - DNA, 1734 bp, Homo sapiens
agcatccaggcaggacggcagcagctgagcagaggagagaggaggaatgagtcccccgttctcaccccggggagcggttgcctcgtgagtccaaggagaatccgccctttcgttttgcgcaggtggagatctcgcgggcccagttcggagtcctgcaaactgtggaggagatgccgctgtcccgtcggtctggggacagcccagctccccggatcccgggctggagagacgcgtcgcggccccggggcctggtggcacgagcaggaaggaggacccggcggcgggctctgcctgggcttgcctgggcttgttccgagccgggctgcttctcggtgaccacgcagatcgggggcatttggagattttgcgggagtcctgcagccaagctccggggcaggagaggcctggaagcctgcactacctgctcgccccgtcccagcatgcacccaggctggaatgcagtggtgcaaacaaggctcgctgcagccttcacctcctgggctcaagcgctcctcccgcctcagccttgcaagtagctgagactacagattacaggaggcagcagaagagcgggtttctcccacctccccccggacgccggagacaccgcggagcctgatgtccctcagagctttaatcttcccctcagtcgcctttcccctcacccgcctctaattaagtcagaaaggccctgtatttatttgcccatgaactgacacagcaaaccaacagcagccattgtagtgtgaacggatttgcgaccaggcaaggggcttcagccgggattacccgccccgcagccggatgaatgtgctgagcacaaagtctgctcaaagccgagcaaacggactatttgtgaaaatgccatcctggctcaagtctgattaagaccgggggtccccaggccgtttgatcttcgctcatcaaagagagtctttaaacaagcttcattttacactactgtatgctagcgacgggttgtgacacccaagtgcagccaccgtgagcacccggcactgggagcgcgtgaacaataatgggggattcgccgtgctgcgccgtgcagggcgcggggcctgcgcgctgggaaacgcgcccgcactggaggcagggccgttgcggaaggactcaggcttgggagcccctaggtttgccagccaggtagttccctgacgtgactcctgccacggactcctagactcctctgaaaattattttacttttgtaacttaagggtgatgaagaatccttacacgagttaattatacatccctcctgctcttccccgccaaaagttaatagttctatttaatagcctacatcttccactcttcagcatttctaagactgggtgtcaagactaaagtgtttttaaggtcctactttctacttttcaccttaaggtcctttacaattcaccagttggagaactggtgatagctgaaaacatcagctttaaatattacaaccaattttgtgatgggaaaacaacctccacacacacacacatacacacacacacacacacactttttaaaaagtcgcctggtccaagtaattcaccttatttccaggcacttaatacttacatgctagtctcttcaaaatcgacatgctcagtatcagtgtcaatgattattacttgatctttaggctgcataaaagaacagactccttgcaggatgttcttatttaacctgagtacaaaaggccttctcttggcagtgctgaaag

SEQ ID NO: 87 - DNA, 1493 bp, Homo sapiens
caggttctattgaattcttccacagagataagttaattttacatagtgtttaggatatcaacaatttttgtggcccttgtaattcttggttatagtttaaaaaaagagagactgtgttacttgagatacttacttctacattttaaaataagggatgagtatcttgatgttattactggtaattttgagaaaagaaaaatatatgttcaaactttattaaataaacaggaatactagttccctctacctctcaagttacttttaattggaaagtattctccttatataattttactctgaactgtcctttaggtcttgtgataatggtcactgtatgctgaatggaacacatggtccatcttcagagaagaaatcaaacatccctgacttaagcatatatttaaagggtgaagatgcttttgatgccctccctccatctctcccacctcccccacctcctgcaaggcatagtctcattgaacattcaaaacctcctggctccagtagccggccatcctcaggacaggatcttcttcttcttccttcagatccctttgttgatctagcaagtggccaagttcctttgcctcctgctagaaggttaccaggtgaaaatgtcaaaactaacagaacatcacaggactatgatcagcttccttcatgttcagatggttcacaggcaccagccagaccccctaaaccacgaccgcgcaggactgcaccagaaattcaccacagaaaaccccatgggcctgaggcggcattggaaaatgtcgatgcaaaaattgcaaaactcatgggagagggttatgcctttgaagaggtgaagagagccttagagatagcccagaataatgtcgaagttgcccggagcatcctccgagaatttgccttccctcctccagtatccccacgtctaaatctatagcagccagaactgtagacaccaaaatggaaagcaatcgatgtattccaagagtgtggaaataaagagaactgagatggaattcaagagagaagtgtctcctcctcgtgtagcagcttgagaagaggcttgggagtgcagcttctcaaaggagaccgatgcttgctcaggatgtcgacagctgtggcttccttgtttttgctagccatatttttaaatcagggttgaactgacaaaaataatttaaagacgtttacttcccttgaactttgaacctgtgaaatgctttaccttgtttacagtttggcaaagttgcagtttgttcttgtttttagtttagttttgttttggtgttttgatacctgtactgtgttcttcacagaccctttgtagcgtggtcaggtctgctgtaacatttcccaccaactctcttgctgtccacatcaacagctaaatcatttattcatatggatctctaccatccccatgccttgcccaggtccagttccatttctctcattcacaagatgctttgaaggttctgattttcaactgatcgaactaatgc

SEQ ID NO: 88 - DNA, 2531 bp, Homo sapiens
tttcatcaaaactaaaaatgactgctctgcaaaaggatgatgctaagagaataaaaaagacaagctaagattaggagaaaatattgcaaagaacatatccagtgtgtgttctgaatatacagagaaatctcaaaactcaacaggaagaaaacaagccaattgaaaatgggcaaaatacttgaacagacactttaccaaagtggatatacagatatcaaatacacacatgaaaagatgttcagcatagccatcagggaaatgcacattaaagccacagtgagatatcacttacacccattgaaaaatgactacaataaaaaaaaaatctgatagtaataccaactgtcatcgaggatgaggaacagctgaaagtcatgcattgctggagggaacatgccactgtggaaacaggtgggtgctttcttatagacttgtatgtgcactcaccttatgcccaggagtccctctcctgtgtgttcaacccagagatatgcaagctgtgttcacacaaaaacctgtatgtgaatgattatactagctctctttataattgcaaaaaaaaaaaaaaacctggaaacaacccaagtgtccttcatctggataatccttaaggataaactggtgcgtccacacagtggaataccactgagcagtgaagaggagccagttattgaaacaggtaatttggaggaaccccagaaacggtacggtgagtgaaagaaacttgtcttgaaaggttatgtactgtttggttccatttgtatgatattctcaaaaagacacaagaccatggggatggagaccagatcggtggctggagaggctggggtcggggagggcatgaccaccagagaaaagggtgaagagtgttttgggtggcagagctgtgtgtatgctggctgtggttgtgaggacaaaatccacacaagcgctcaagttcgtaggctgtacgccagaaaagctgtttcactacataactgaaaaaataagattgaaaaataagatgtatatattttttgtgtgcgtgtgtagaaaaatacttgaaggtaaactgcagagtgataacagtggttccttctaggtactgggttaatatgtgatttttatgtttgtttgagcttttctaagttttctacattttccgtacaaaacatgtattacttctgtaataaaagcagcttgagattatttaaggaagcaaaacacttctgttgtttctcatcaactacaggatgaagtgcaggctccctgggtggcttgcaagggccacaggccttggccccacctcgctggtgctccctctactcctttctgtgtttgaagcaagttctggttcagacagaaagcctggcctttgagggcgttgggtccccacttcctcagtcatagatgtgatgtgcttcccttgacttgggaccttctgagggatgcaaggtggaccaaaggacccgtgaatggccagggcatgcctgcctggctttcggtttcttaagcagtgatttcagtccacttaaagggtgtgaaaattctgagaatgctacggaccaaatatattttatgtaacagttgggacccggcaacacttcagggctctttcaaaatctggtagctacgagctcttccgtgactgagatgggacaagagtgaagatttgtccttgcttttagctctgctccagttcatagttctaatgggaaattatgtgacttaaacccaggctgtgagatgcatcagtgacgtgtgggcataaaataaaccctcgagatgttctcttgcatggtacactggcctaggcaggaatattcttgaggctaaaactgtagaactgtcagactagtgttacgaatgtggtggtgagaggcctgtgcagccgcggggcctgtgatgtgtctcctgtgtgtctttcactcctatgcagtttgagttcatgatcgagtccatcctgtatgcccgggatgcctggctgaaggaggacggggtcatttggcccaccatggctgcgttgcaccttgtgccctgcagtgctgataaggattatcgtagcaaggtgctcttctgggacaacgcgtacgagttcaacctcagcgctctgaaatctttagcagttaaggagtttttttcaaagcccaagtataaccacattttgaaaccagaagactgtctctctgaaccgtgcactatattgcagttggacatgagaaccgtgcaaatttctgatctagaggtgagaaaaagatgaattgctccttacattcgataatcagtgaccacgaaacactcagaccagagcctggcttatcaaaaaccttcagtgagtgctgggggtgtgagtgaataactaattattttattatgcaaataagtgaatttataaaacgtttgctactgattttttccagtcttttttcttttttacgttctattttgattctttcatattgtacaccattttatgtctccagcgtcttcattttagatttatgtttaatattctcagcatcttcaaaatcaaataaattatatttcgtttc

SEQ ID NO: 89 - DNA, 2116 bp, Homo sapiens
tttattttactcattttcactggtatgtagtaatatttcataatgattttaatttgcgtttttctaagagctaatgatgctgaacattttttcatgtacttatttgccatttgtatattctcttcagagtagtacccacatcttttgcctatttttaaattgacttgttcatattcttattttgagtttttagagttcgttttctatcctagatgcaagtcctttattggatatgtgtcttgcaaatattttctcccagtctgtggcttgtttcttcaatattttaatagtgtctttgtcagagcaagagtttttaatgttaatgaaatccaacttaccagtttcttcttttatggagtctgcttttggttacatgtataaaaactctttgcctaatcccaggtcacaaagatatccggctgtgttttattctaaacagtttaaacatttttgtacaaaatgtgaggtttagattgaggtttgtttattcattttgcttattgatgttcaatgtttagtgttcagtgtccagtcctatatattgaaaagactgtcctcgcttcattgaattgattttatttcttttgcaaaatcgattggccatatttgtgtggagacagggtctcacgctgttgtccagcctagagtccagtagcacgatcatggctcacttgcagcctcaaactcctgggctcaagcaaacctcctgtctcaacctcccaaggagctgggacacaacagttgtgcaccatcatggctggcaattttttctttttttttttttctagagacaagatctcgtgatactgaccttgctggtctcgaactcctggcctcaagtgatcctcctgcctcggcctcccaaagtgctgggattacaggcttgaaccaccatgcctggctgctttatagtatttcttaaagttcatttgattcctctaactttattcttccctttcagaattattttagctcttccagttcctttggctttctgtataaattttaaaattagcttgtctatattttaaaatatctgagattttgactgaatttccgctggtatcctgttccccaaagagaaatggacaggaggaaaggagacagaacattacctgtcaggacccctactatggctggtggcctattttctattgacagaaactactttgaagagataggaacttacgatgcaggaatggatatctggggtggagagaatcttgaaatgtcttttaggatttggcaatgtggaggctccttggagattgttacttgctcccatgttggtcatgtttttcggaaggcaactccatacacttttcctggtggcactggtcatgtcatcaacaagaacaacaggagactggcagaagtttggatggatgaatttaaagatttcttctacatcatatccccaggtgttgtcaaagtggattatggagatgtgtcagtcagaaaaacactaagagaaaatctgaagtgtaagcccttttcttggtacctagaaaacatctatccggactcccagatcccaagacgttattactcacttggtgagataagaaatgttgaaaccaatcagtgtttagacaacatgggccgcaaagaaaatgaaaaagtgggtatattcaactgtcatggtatgggaggaaatcagactcaatggacctgtaatcatgttaaaatgccaccatatgagaggaaatcagttatgggaatatgatgctgagagactcacgttgcgacatgttaacagtaaccaatgtctcgatgaaccttctgaagaagacaaaatggtgcctacaatgcaggactgtagtggaagcagatcccaacagtggctgctaaggaacatgaccttgggcacatgaagatcatgtcctccaagccatgaaagtgtctacgcttttgtttttccattatttcaattgggggaaaatattaactttgctgaattgaaagttttaaaaatccttttagtattctaaaacacaattgtttctaattcgtttctagaaatgtttgcttatttccctactaaaatttgtatctgatcaaagcacataagaatataaataatagcaaactactattaaacaacagaacaacttgt

SEQ ID NO: 90 - DNA, 1841 bp, Homo sapiens
agtttcggctcggcagacccggcgagcccagtggccgcgctccggtgcggcggcgcccgaggcccgaggcggaagtgggacggccaagcagggaagcgagggctcgggatcgacggccgcggggcgccgacgaggagtgcaggactcaggaagggcgagtgcgcggcgacagagcccggggaaggaggcagggcaaggccgggcttgggggcaggtggtccgggcatccagccttgaagatgcacaagaggaaaggacccccgggacccccgggcagaggcgccgcggccgcccgccagctgggcctgctggttgacctctccccagatggcctgatgatccctgaggacggggctaacgatgaagaactggaggctgagttcttggctttggtcgggggccagcccccagccctggagaagctcaaaggcaaagccgaggcctgaggcccctcatccggggctggagaccaccttgcaggagaggctggcgctctatcagacagcaattgaaagcgccagacaagctggagacagcgccaagatgcggcgctacgatcgggggcttaaaacactggaaaacctgctcgcctccatccgtaagggcaatgccattgacgaagcggacatcccgccgccagtggccataggaaaaggcccggcgtccacgcctacctacagccctgcacccacccagccggcccctagaatcgcgtcagccccagagcccagggtcaccctggagggaccttctgccaccgccccagcctcatctccaggcttggctaagccccagatgcccccaggtccctgcagccctggtcctctggcccagttgcagagccgccagcgcgactacaagctggctgccctccacgccaagcagcagggagataccactgctgccgctagacacttccgcgtggctaagagctttgatgctgtcttggaggccctgagccggggtgagcccgtggacctctcctgcctgccccctccacccgaccagctgcccccagacccaccgtcaccaccgtcgcagcctccgacccccgctacggcgccctccacaacagaggtgcccccacccccgaggaccctgctggaggcgctggagcagcggatggagcggtaccaggtggccgcagcccaggccaagagcaagggggaccagcggaaagctcgaatgcacgagcgcatcgtcaagcaataccaagatgccatccgagcccacaaggctggccgagccgtggatgtcgctgaattgcccgtgcccccaggcttccccccaatccagggcctggaggccaccaagcccacccagcagagtctggtgggtgtcctggagactgccatgaagctggccaaccaggatgaaggcccagaggatgaagaggatgaggtgcctaagaaggtttgagggttggggccgggcgcagtggctcacacctgtagtcccagcactttgggaatccaagatgggaggatcgcttgaggccaggagtttgagaccatcctgggccacacagtgagacccccgtctctacaaaaaaattttttaaaattagccaggcatggtgggactcacctgtagtccctgctacttgggagactgaggtgggaggatcacctgaactaaggagttcaaggctgcagtgagccatggtcatgccactgtacgccagtctgggtgacagagcaagacctcatctccaagacaattaaaaaaaaaaaagtgtttggtgagaattgcttgaaccgggaggcagaggttgcagtgagccaagatcgtgctactgcactccagcctggacgatacagtgatactctgtctcaaaaaag

SEQ ID NO: 91 - DNA, 1955 bp, Homo sapiens
acactttgcgttccgcggccccggccccttggtttcctagtcctggctccattcccctctcaggcctagggctgggacccctccccgcccccggtcttggccctgcccccttcaacagacggtccgccccggcccctccccctcgtcccgcccggccctggcaggccccgccccctgcggcctctacctttgacgtcttcccccgggaggtggcgggggtctgcgaccgaatgccggcgggactctgggtcagggcttctggcgggccctgcggggggcagcgaggtgaccgtgaacctgcggctcatggcgcggaaaggagccaggcggccgcggcaaggtccgggatcgcacaagtggctgcaaccaggctctaggagggagaaagagcggatcccccaaccccctccgcccgcccgccccccgcgagacgcggcgccgcgcagggtcctagtgcccgctgtgcgaagggttcctgaatctggccacttcgctgggaggccctgggctccccagtgccacccgaagggcctgaggaggccatctgcagaatctcactctgtcgcccaggccggagtgcagtgtcatgatcttggctcactgcaacctccgcctcccagttcaggagattctcctgcctcagcctcccgggtggctgggattacaagcacagtgcctggcacattatcggcacttgatgactgttgtctaataactgagcttccatacaaaccacctgccgtcctgtactgaaggagaaagagcttccagccggggaggcaggaaatctgggtcctggtcttggttgcatccctgacttcctaaatgacctggagaaggcctctgcctctgctgggatcttgtctgtgctggggcatttgtttccatttccaagggctttttcttcctcgctcagaatttgaccactcactaagaggagcttagtgtggtgtctcacgaagggatcctcctcagccctcacctcggtactggaagacgtcgtgcgtgtccaaaggcaccccggggaacatccggtccacctcgctggcgctccggggatccaccatctgcgccttcacgtcgaacctgcgggcaggcgcggaggagacaggtgctgagccggctagcggacggaccgacggcgcccgggctccccctgccggcggccgcggcggcgctcacctccagaggcgccgcccgctgaacagcagcatcttccccctgccactccggagggccccggtcacctgggccacgtcggcgcccaggcccagcttgtccagacgcctcgggcccagcaccgacgcgcctgtgtacacccacacctggcgccctgcaggggaggagggtcacgtcggtttgggggcgcagagggagcacgtactcctagaacgcgaggagggagattccggcgaggcctttcctagcccgcgtgcccgcagtccctgcaacccaggggcagaggcgctgggtagagcgacgcgagggcgtggagaggagggggcagaaactcagccgcccctacgtttgctaaactgcgtccgccagggggcgtatttttctaaaacgcacaagacgtttcgtgggttatcgatggtctcttgagcctccttgactgatggggattgaccgggcgggggagggaaagtaggtaactaaccagagaagaagaaaagcttcttggagagcggctcctcaaagaccgagtccagcttgcggggcagcgcgggccacttgtcggcgataaggaaggggccctgcggccggctccccctgccctcagagaatcgccagtacttcctgagaaagcgaggagggaaaggacgggctctaagccttggacacagggccagtgggcgggaagggacgggcagcccctccgcaaagccccctcccgcatccacacaaccccgcctcctcacccatccttgaacaaatacagctggttcccaatc

SEQ ID NO: 92 - DNA, 1730 bp, Homo sapiens
cagcagagtcccagcatggcaccttccttgcgtcactcggtgcagcagttccatcaccacccctctactgctctccatggagaatccgttgcccacagccccagattctccccgaatcctccccaacaaggggctgttaggccgcaaacccttaactttagttctcggagccagacagtcccctctcctactataaacaactcagggcagtattctcgatatccttacagtaacctaaatcagggattagttaacaatacagggatgaatcaaaatttaggccttacaaataatactccaatgaatcagtccgtaccaagataccccaatgctgtaggattcccatcaaacagtggtcaaggactaatgcaccagcagcccatccaccccagtggctcacttaaccaaatgaacacacaaactatgcatccttcacagcctcagggaacttatgcctctccacctcccatgtcacccatgaaagcaatgagtaatccagcaggcactcctcctccacaagtcaggccgggaagtgctgggataccaatggaagttggcagttatccaaatataccccatcctcagccatctcaccagccccctggtgccatgggaatcggacagaggaatatgggccccagaaacatgcagcagtctcgtccatttataggcatgtcctcggcaccaagggaattgactgggcacatgaggccaaatggttgtcctggtgttggccttggagacccacaagcaatccaggaacgactgatacctggccaacaacatcctggtcaacagccatcttttcagcagttgccaacctgtcctccactgcagcctcacccgggcttgcaccaccagtcttcacctccacaccctcatcaccagccttgggcacagctccacccatcaccccagaacaccccgcagaaagtgcctgtgcatcagcattccccgtcggagccctttctagagaaaccagtgccggatatgactcaggttagtggaccgaatgctcaactagtgaagagtgatgattacctgccatcaatagaacagcagccacaacaaaagaagaagaaaaagaaaaacaaccacattgtagcagaggatcccagtaaaggttttggtaaagatgacttccctggtggggtagataaccaagaactaaataggaactcactggatgggtcccaagaagaaaaaaagaaaaagaaaaggtcaaaggcaaaaaaagacccgaaggaaccgaaagaacccaaggagaaaaaagagcccaaggaacccaagaccccgaaagcccctaagattcccaaagagccaaaggaaaagaaagcaaaaactgccacgccaaaacccaaatccagcaaaaagtcaagtaataagaaacctgactcagaagcaagtgctttgaagaaaaaggtcaacaagggaaaaacagaaggtcctgaaaattcagacttagacaaaacacccccaccatctcctcctcctgaagaagatgaggacccaggtgttcagaagagacggtccagcagacaggtgaagagaaagcgctacactgaagacctggagttcaagatttctgatgaggaggcagatgatgcagatgctgctgggagggattccccctccaacacctcccagtcagaacagcaggaatctgttgatgcagaaggcccagtggtagaaaaaattatgagcagtcgttcagtaaaaaaaaaaaaaac

SEQ ID NO: 93 - DNA, 2924 bp, Homo sapiens
aatcctgcccctcagtcacattctttttgtggcttgatggcttttattcctttccgcatttcctttgtgaatattgctttcttcgttatgcctttatctggaatgagtgacgattctgggatccttggtttagcagaaacctcatgacagaatcttctatacctaggtggcctcttttagtctctgagcaataaccatgtcatccaggtggaatcacaaccatcattttatatacacgaagtcctcacttcgttttggaattccctgaaaactgactttatggaaacaatgtacagaaggtcctccaacagcattggttgttcaaagtcgtgtagttatactgttgatgaaaaataagtggtttcactgtacataattttgcttcaaggtgaagtttccaagagactttcaaagatgttaagtgaggacatactgtacatcaaattcatatcctcttccacagttcatgtggaatttctttataaacttcttctagagaatctatttaggcaggttctgtgtagatatccatgtcgccgttcctcaatcttggctttgagtcaaatcacctgggcagcttacacatgatgaggactggttctcaatatctgagattctgatttccttgcacctgtgtgagtgtgtggatttttttttttcttttaaagcaccagagatggttccaatgacgaagtttttagaggcatcaagctgcaatgagtaagaacagaaattaattgtaatatgatttcttcaaatattatcttcaaatgcattgtccatcaacgccatacaaatgtttattatgctgttttttcttaccatttcgcattttctatttccttcttgtcctttttttttttttttttttttttttgagtcagagtttcactcttgttgcccaggctggatttcggtggcgcggtctcggctcactgaaacctctgcctcccgtattcaagcgattctcctgtctcggccttccaggtggctgggattgcaggcatgcgctaccatgcctggctatcttgttgttgttgttgttgttgtattgttagtagagacgatgtttctccattttggtcaggctggtcttgaactcctgacctcaggtgatccggccgcttccgcctcccaaagtactgggattacacgcatgagggaccgcgcccagccaccacttagcatttacattttgcaattgttgaagttatagatttatacacacatcaattgctgctttgttatacacttgcatatacataagatgggaaatagaaaagaataaaatgggcacggtatccctgaagtttcacattctgagactttaaaaatatttgctctttagaaatttgtttcaataaagaaactgtggtatacacacccaatgaagtattattcagcctaaagaggaagaaaatcctctctgctgcagacaaaatggatgtgattgcaggtctgtatattaaatgaaataagccaggcacagaatgtcaaatatttcatgtcctcacttctacgtaggaagaaaaaaggaaacctcccagggtgctgggattacaggcgtgagcgacgcgcccagcccatgctgtaacattatctgttgtctgctgttgtttgtttattttggagcccagaaataacttgtcacctgtatgttcaaatgatttttaacatgagtggtaagaaagctcattggtggaaaaacagccttttcaagaaatggtgttggagaaacttgatttccacatgcagaagattgaaggtggaccctatgtcacaccaggggcaaaaattaacacaaactggatcaaagacctcaccccaagcgctaaaagaatcattcgcctaaaggaaaacattggccatgctttcatgacatcagattgggcaatgttctctgggatgtgacaccaaaagcataggcaacaaaagaaaattagattccttggattacatcgaaatgacagacacttttgtgcagcaaaatcacggcaaactgagtgaaaagataacccatggattaggaaaaatattttcaaagcgtatatctgaaaagaggctgatatccatcatacataaagaacaggcagaactaaacaacaagaaacccaaagcatcccatcaacaatggtcagaagactcaagtagacgtgttcctaaagaagatatagcagtggccaataagcatctaaaatgatgttcaaaatcactcatcatagggaagcgcaaatcaaaccaagaatgtgacaccacacattaggatggatatgataaacaaacaggattggtgagactagagggaagtaggaatgctcgaatctgatcagagggaatgtaaaaccgtgaaggaacggggaaaatagtatggtgtctactggaaaaattagaaacaggatgatcagatgttgccgcagttgcatttgtgggtacctacaaaaaagaagccaggagtggaagacagatttgtgtacacccatattcatagcagcattattcacaagagccaaaatgtggaagcaacccaagggttcgtggacagatgaatgaaaaagcacactgcagttccttcatacaatggaagactattcagccttcaaaaggcaggcacttctggccggtgcggtggttcacgcctgtaatcgcagcgtcttggaggaccgaggtgggcggatcacctgaggtcaggagttcaagaccagcctggccatcttggggaaaccctgtccctactgaaaatgcaaaaaatgagatgagcatggaggcgtgtgcctgtagtcccagctactcgggaggatgtggcacaagaatcactggaacccgggaagcggaggtgagcccagattgtgccactgtactccagcctgtgcgacagagtgagactccatggaaacacaaaacaaaacaaagtcaaacgaacaaac

SEQ ID NO: 94 - DNA, 2617 bp, Homo sapiens
ggtcgcgaggctgaggcgggagaatcaccagaaggtggaggttgcagtgagccgggattgcgccactgcactccagcctgggcaacagaggagactctgtctcaaaaaaaacaaaaacagataacaaaaaacagtgactgtcctctagagaccaagcttaggcggcctgcccggtgttacacagggccatagctcagactttaatgtccaggctgaatggtttcaaaggccttatcattcttgctactcacagcagcgaccccctcagcctgagctacacgttagaatcatgaccggaaatgagtttaaaacaaagacccgtgcctggaccccactctcggaacaatgaaaaaagatgctttgggagtggggtgtgtgctttggggtttccgacaagttcccgggtgactgcatcgtgcagccacagtcaaggaccagcacaccaggatcactcctctcccccacagtatgctacggagcactcagtgttacaagtttaatcgctgtcaccaaggacagaacccagacaatctgggtgactctaggggctgatgaacaggtgcctgggagaaagggtttgggatcagaagacctggggtgtgaccttctacaaatagtaattggtctggccttgagtacatgggaacagagggagcttgaggccagtccagcctgtctcgggtggaaggcaggattcccattcgcagccggctggctcccctttctcaccttgagcctccagagctacaacacgtaaattagcttagcaatgcctagctggcaatgcacacttgaggagggtgagaaacatcgcgatcccaggtgagtggcgctcttcccttccgcttgttgtggcagcccagcccggactgctggctggaacctcgcttgcaggtggaaacatgcggcagcccggctgcttctagggctcctggctgggagacccccctgtctccctctcttctaaagggaaaaacatgaaaaacacagctactgagggacatgtttcttcctctgtgattagacacaggcaattgaaagtagccactggcttctctggccacacccactgctgtcccgatgtgttttcccatctcttccatttggcggccttcctcttcacctgtttctctactcagctgtggcagaaggggaaacaaggttgttgagtgcccttcatgtgccagatactgcacatacccacagaggagaaactgaggctatgagaggctaagggacttgcccaaggtcccgagggtgcaaactcctggcacggagtcctaaatcctcagcttttctgaagctagggtccttgttcttctttgcccagttagacatctattgctccttaacatatcctagatgtgctcttgtccccaccccactagtcccattgctttgggacattttgcttcattcactatccacgatcaattctagtgacccacctgtctctgtgacatcactcaaaacacaagagcctcaaagtcacttgcccccttctgcctagcaagtctttttttttggacagggtcttgttctgttgtcttggctggagtgcactggcgcgacctaggctcactgcagcccccgcctcccaggttcaagtgatcctcccgcctcggcctctcaaatggctgggactataggtgtgcgccaccacgctcggctagtttgtttgtttggtggagacaacgcctcactatgttgctcaggctggtctcgggctccttggctcaagcaatcctccccgctcggcttcccgaagtgctgggattacaggcgtgggccaccgagcctggcctaagtctttctttacaacagatgacctcaccacttcactctggttttcagcaagatcctttatttatcttctgttccccagacatgtcacatgaatgcaggtagctaggtacctgcgcgggctgttggttttgtaaacgcagagcagagcagtcacgatgtgtagaaatcatgcacctcagtgattctttaacaagataatgagtaaaaagacttcaggtatgtttgaaatgtctgccttttcctgcattctcatcactgacaaatatctgtgtagacattttactcaaatgtagacgtgctctttgcacacttgctagtacctgcctggtgcatttcaactgtgttttcttccaacagttgtacctcttagaagctgctgttttccatttggatctaaacactggacctgcacctgcgaccagctgtatattccaaaccactcctcggctttataaatctgacactgctcataatacattattcagaaaaggcatctctagtgtggctggccggctacgctttcacacatcagctaacacaagctatttctagagtgagtgcctcaaactggtctcctgggaccttttccttcgggaagagatccacatgttcttcacaggagaccagaaaaccagcacaacggccacgggtcctctgggcatgtaggtcttctctgtctcctcactagcacacactggcttgggtcattgtcacgcagtgcacacctttgtgccatgacaaagacacagggccaactcttccactatctccaagtctagtgtttgaacatttatgtacagacaaataaatg

SEQ ID NO: 95 - DNA, 2472 bp, Homo sapiens
agccagcttggacagccacctgcaccggatgttgcacagggactcaaccatcagcaatgagtcctcccagagctgcagttcgggccgccagaacatccgcctgcacagcgactccagcagcagcacacaggtgtttgagtctgtggatgaggtggagcaggtggaggctgaaggcagattggaggagaaacagcccaagatccccaatgggaacctagtgaacggcacttgttccccagactcgggtcatccttcctcccataacttctcctcgggcctctcagagcactcagagcccagtctgagcacagaagacagtgtcttggacgcccagcggaacacccccacggtgctgcgacctagggatggcagcgtggatgacaggcagagcagcgaggccaccacatctcaggatgaggctccccgggaggagctggccgtgcaggacagcctggagagtgacctcctggccaacgagagcatggacgagttcatgtccatcacgggcagcctggacatggccctgcctgaaaaggacgatgttgtgatggagggctggaggagcagcgagacagagaaacatggccaggcggacagtgaggacaacctctcggaggagcctgagatggaaagtctcttccctgccctggcttctctggctgtgactacttctgccaacgaggtgtcccctgtgtcttccagcggcgtcacctactctccagagctgctggatctgtacacggtgaacctgcaccgcatcgagaaggatgtgcagaggtgcgaccgcaactactggtacttcacgcccgccaacttggagaagctgcgtaacatcatgtgcagctacatctggcagcacattgagatcggctatgtccagggcatgtgtgatcttctggctccactgctggtcattctggatgatgaggcccttgccttcagctgcttcacggagctcatgaagaggatgaaccagaacttcccccacggaggcgccatggacacgcactttgcaaacatgagatcgttgatccagatcctggactcagagctgtttgagctgatgcatcagaacggggactatactcacttctacttctgctaccgctggttcctgctggatttcaagcgagaactcgtctatgatgacgtcttcttggtctgggagaccatctgggcagccaaacacgtctcctctgcgcactacgtcctgttcattgcgctggctctggtggaagtctaccgtgacatcattttggagaacaacatggatttcacagacatcatcaaattctttaatgaaatggctgagcgacacaacaccaagcaagtcctgaagctggcgcgggacctcgtgtacaaggtgcagactctgattgagaacaagtgaggggcacctcaccccggcagcctcagccaagctgcccctgccccgctcctctgcttacttttcctcctggctggatgggcaccccgggagcggggtcctggtgtctgttcacaagcgtggagttcagtgcgcaaagaaactaccctgacttttacttctgggcagatggggtggagggagtaccccttcaattcagccttacattttcctgtttgaccaaagattgcccaagtctggcgttcctcccttgcaggaggtggaggttgttggtggaggaggagccatctttgtttgctggtgcccggaatggtctcctcttcttctttccctatccctccaaactgtcttgtaagatgagacctggggaggaaacttctttttggaaattggtgtagaagaggtgtgtggggctacctctatgctcctctgcaaggggcctttggcgatgttctggacatggctgaagattgacttagagattgaccctccacctcgacattactgacatttggggccaggtgattctttttgaggggactgtcccctgcattgtaggatgctgagcagcatcccgggcctcaccagatgccagtagtgccatcccccaaccatacccctggttgtgacagcccccaaaaatgtctctagacattgcgaaatgttccctgcagggcaaaattgcccccatttgagaaccactggcttggagaagggactacaaatgtacttcctcccccattcttttgacgctaagccaccctggtcctgacgcctcccctcacttagaaaaggcatacaggaggccgggcatggtggctcacacctgtaatcccagcactttgggaggctaaggtgggcggatcacaaggtcaggagttttgagaccagcctggccaacatggtgaaaccccatctctactaaaaatacaaaaattagctgggtgtggtggcgggtgcctgtaatcccagctacttgggaggctgaggcaggagaatcacttgaacctgggaggtggaggttgcagtgagttgagatcacgccactgcactccagcccgggcgacagttcaagactccatctc

SEQ ID NO: 96 - DNA, 2388 bp, Homo sapiens
agtcacataaggctagtggctattgtgttggcggtaatgctttagagagaaatagggtatgcacctgtggcactggaaagaggttctttcattttcttatgggtacgacttcataccctggaaattctctgcaaattgtgtggctgcttggcaacttggagatgtcctgtccaagtccacctttgactctgagccttgatctggtgacattgctgaggtagaggaaaggtgagaaatattcctctgaagcagagaacaccctccccgtcagcctttgccactcggcatgggaggcctgaggcaatgagcaggcaaggcactgggtcctcagcgcagggcctccccgtgctccttgggtgccttcccactgctgactctgtccctctggactgtctcttgcagaaattcctgctactcatggccagcacctcggcctgctacaagctcttccgagagaagcagaaggacggccatggagaggccatcatgttcaaaggcttgggtgggatgagcagcaagcgaatcaccatcaacaagattctgtccaacgagagccttgtgcaggataacctgtacttccagcgctgcctagactggaaccgtgacatcctcaagaaggagctgggactgacagagcaggacatcattgacctgcccgctctgttcaagatggacgaggaccaccgtgccagagccttcttcccaaacatggtgaacatgatcgtgctggacaaggacctgggcatccccaagccattcgggccacaggttgaggaggaatgctgcctggagatgcacgtgcgtggcctcctggagcccctgggcctcgaatgcaccttcatcgacgacatttctgcctaccacaaatttctgggggaagtccactgtggcaccaacgtccgcaggaagcccttcaccttcaagtggtggcacatggtgccctgacctgccaggggccctggcgtttgcctccttcgcttagttctccagaccctccctcacacgcccagagccttctgctgacatggactggacagccccgctgggagacctttgggacgtggggtggaatttggggtatctgtgccttgccctccctgagaggggcctcagtgtcctctgaagccatccccagtgagcctcgactctgtccctgctgaaaatagctgggccagtgtctctgtagccctgacataaggaacagaacacaacaaaacacagcaaaccatgtgcccaaactgctccccaaagaattttgagtctctaatctgacactgaatgaggggagaagggaaggagattctgggattgccagttcttccagcagccatgctctgaaaatcaaggtagaatccatggaaagggaccccaggaccccgggaccctagacgtatcttgaactgccatcgtcatttcaaatacatctccctcagggtttccaggtggccacccccaattattcattccttaccaacctctcaaatcctcttggctttctctctgcagtgtggacactgttggctagtcctccccactccctgagggtccagtaagttagcttagaaccttcctggaaacatttcatctgagcaggtttccccacgtgtgggatgctccttttgcctcatctgtctcagggatgcaggctcccccgcatgcatggggatttctccccagaccagcatacttgtgacctgagagttcaatgcgtaaagatgcccctggtcagccatatccatcttctcttgcctggtccttgattctctggccgctccctgaccttcctccttccactgccttgactttcttcctttttattcctggtgccatctgtccaggcagctagacaagaacttgttcgccagcagccagattcaggccttcccaggggcataataagtgaccagcccctcctctccggacatcagatccaacacataaggaccctggcctaccctccagcccaacagccagttctgggtcagctgccaacttaggggtggtttgattatcccattgaaattcaccagtgcctttgccaaagaccctctcatttggacatacccagattcattccctggctccaactgaaaagactcagtttcaatcgttaaaagttcctttagggccagaagaataaatgaattataatcccatttgaagaaccgatttataaccaatgaaaaggttataatgtaatttatattcttggaggaacaagattttcatttgggattatttccttcaaccattcaacaaacatttgttgtatgccactaagcgccaggcacggcgttgggctctgcaaacacagtggttagtagcagtctggacctggtccctactggcatggaacccatcactccccaacatgcaaagcccacattt

SEQ ID NO: 97 - DNA, 1725 bp, Homo sapiens
ttgagtgagcttggctatcctctttagctcttctttcgaacctttggccgaaggctccaaccctcccaaaggcagaagggagcttaatttgtcctgaaatggatgggacaagtgtgcaggcactaggtgggatgggagctttatctcagtttgggaggagagggaactcagggccagggccagcgattgtacagtcccactcagagggcggagtggctggaggctgacccttctcccagggagcaggcgctggatggaccctgacactggggagaatgaaaggaaaattgtatcatgcctattgtgtgccaggcagagctagcagttcccctttcatctgggcaatgtcccgggcgggtgatgtcagttcctcattgtgcagacaaggaaactgagacctggggcccatcccatccacgatcagggcccaggcagctccgactcaatgttcagtgctctctgcaggcgtccgggcacttgccatgcagagcagtgaccaaggatcacagatgcagtgggccggggggggatggcagaaaacaaagggttagggtacccggatgccaggttctcagtgctggtgtcctcacaactggctatccctatgcccctgctgtcctcagtgggtggacactggacctggactgacccctgggacaggaggattcaaggtgtcttgttctcttttgatttcttttatcttttctctgccaggaaagatactgatctctgttcttggttaagttccaagaaccatctaagtttcgtgcccctcagctgtaaaagggaagtacatttcatttgtttattctgtaaaactctcggtgtgtgccatggccatgcactgatgatgagcacatgtgtgcggcccctgcccccgtggagcgcatgcatggtcctccagccagagaccgcgctgggagaaatcaggggttcactcctggtcggaggtgagcatctgcctctgcatgcaggaaggcatctcatgaaaccccaaaggcctggcagcccctgcacatggaaggagtcactctcctccatgtggggtgagccacgctggccttgtggcattcacgtgttccctccacctgcttctccagcgtgaaggggacctcaatgtcctctgatgaccttcttgaagagagacatttccttccttcattggaggctttagacggagccagtgacagctcagctctggctgtttcccatctgtgaaatgggaagagggaggatggcacgagtcccttgccctcaccaaactggccgctagagagaggaaagatgtttccattctgatccccactcacctccaccccatccttccaggcttctgatcctcattgtaattttggagctatttggtgatattgtctttgtccttggatccgaggcttctcctaccaactcattgttttttcaacgtgacaaaataaaagccctgagctgggcgcggtggctcacgcctgtaatcccagcactttgggaggccgaggcaggtggatgacgaggtcaggagttcaagaccagcctgaccaacatggtgaaaccccgtctctactaaaaatacaaaaaattagctgggcatggtggcatgcacctgtaatcccagctactcaggaggctgaggcaggagaatcgcttgaacccgggagccggaggttgcagtgagtcgagatcatgccactgcactccagcctgggcaacaagagtgagactccatct

SEQ ID NO: 98 - DNA, 2609 bp, Homo sapiens
cctgcccctgcctgatggccaaggccgaccccacctgcaacagcaccttcctccacctggacacccagggctgctactcagggccctgcccagaggagtgtgtgtggagcagctggagcagctggacgcgctgctcttgccgggtgctggtgcagcagcgctaccgacaccagggcccggcgtcccgaggggccagggcaggcgccccctgcacgcggctggatggccacttccggccttgccttatcagcaactgctctgaggacagctgcacgcctccctttgagttccatgcctgcggctccccctgtgctgggctctgtgccacacacctgagccatcagctctgccaggacctgccaccctgccagccgggctgctactgccccaaggggctgctggagcaggctgggggctgcattcccccagaggagtgtaactgctggcatacctcagcagcaggagccgggatgaccctggcccctggggaccgcctgcagctgggctgtaaggagtgtgaatgccagcgtggggagctgcactgcaccagccagggctgtcaaggtcttctgcctctgagtgagtggtccgagtggtcgccctgtgggccctgcctgccgcccagtgccctggcccctgcctccaggactgccctagaggagcactggctccgagacccaactggcctctcccccaccttggccccgctgctggcttcagagcagcaccgccaccggctctgtctggatcctgcgacagggaggccctggactggagcccctcacctctgcaccgcacccctcagccagcagcgcctctgccctgaccctggagcctgccctgactcatgccagtggagtctgtgggggccatggagcccctgccaggtgccctgcagtggggggttcaggctacgctggagagaggcagaggccctctgtggaggaggcttccgggagccatgggctcaagacagaaagctgcaacggagggccctgcccaggtgagagctgcgaggcccaagacactgtattcaccctggactgtgccaaccagtgcccacacagctgtgccgacctctgggaccgcgttcagtgtctgcagggaccctgccgcccaggctgccgctgtccccctggccagctggtccaggatgggcgctgtgtgccgatctcctcttgccgctgtggcctccccagtgccaatgcctcttgggagctggccccggcccaggcggtgcagctggactgccaaaactgcacctgtgtcaacgagtccctggtgtgcccacaccaggagtgtccagtccttgggccttggtcagcctggagcagttgctcggccccctgtggtgggggcactatggagcgacgtcggacttgtgaggggggtcctggggtggcaccatgccaggcccaggacacagagcaacggcaggagtgtaacctgcagccctgccctgagtgcccccctggccaggtgcttagtgcctgtgccacctcatgcccgtgcctctgctggcatctgcagcctggtgccatctgtgtgcaggagccctgccagcctggctgtggctgccctggagggcagctgctgcacaatggcacgtgtgtgcctcccactgcctgcccctgcacccagcattctctgccctggggcctcaccctgaccctggaagagcaggcccaggagctgcccccagggactgtgctcacccggaactgcacccgctgtgtctgccacggtggagccttcagctgctccctcgttgactgtcaggagtgccccctggggaaacgtggcagcaggtggccccgggggagctggggctctgcgagcagacgtgcctggagatgaacgccacaaagacccagagtaactgcagttcagctcgagcctcgggctgcgtgtgccagcccgggcacttccgcagccaggcaggcccctgcgtccccgaagaccactgcgagtgctggcaccttgggcgtccccacctgcctggatctgaatggcaggaggcctgtgagagctgcctctgcctcagtgggaggcctgtctgcacccagcactgctccccactcacctgtgctcagggcgaggagatggtgctggagccagggagctgctgtccctcttgccgcagggaggctccggaggagcagtcgccctcctgccagctcctcacggagctttgaaacttcaccaaagggacctgttacctggaccaggtagaagtgagctactgcagtgggtactgcccatccagcacccatgtcatgccagaggagccatacctgcagagccagtgtgactgctgcagctaccgtctagacccggagagccctgtgcggatcctgaacctgcgctgtctgggtggccacacagagcccgtggtgctgccggtcatccacagctgccagtgcagctcctgccagggaggtgacttctcaaagcgctaacaggctccgctgggtgagtccacagctgtccctcttgtgatcatgggactcagcagcactgaccacgtccttccacgctctctcacctgcccccaactgggggcccatgacttggcattagcatgttccaaataaagtgatactggcaac

SEQ ID NO: 99 - DNA, 1643 bp, Homo sapiens
gcttcaaggcagtgctcttcctcactgggttgctgtttggctcgggggtcatcttcctcctctgctaccgagagcgggtgctagagacacagctgagtgctggggcgagcgcgggcatcgctctgggcatcgggctgctctgcgggctggtggccatgctagtgcgcagcgtgggcctcttcctggtggggctgctgctcggcctgctgctcgcagctgctgccctgctgggctccgcaccctactaccagccaggctccgtgtggggtccactggggctgttgctggggggcggcctgctctgtgccctgctcactctgcgctggccccgcccactcaccaccctggccaccgccgtgactggtgctgcgctgatcgccactgccgctgactacttcgccgagctgctactgctggggcgctacgtggtggagcgactccgggctgctcctgtgcccccactctgctggcgaagctgggccctgctggcactctggcccctgctcagcctgatgggcgttctggtgcagtggagggtgacagctgagggggactcccacacggaagtggtcatcagccggcagcgccgacgcgtgcaactgatgcggattcggcagcaggaagatcgcaaggagaaaaggcggaaaaagagacctcctcgggctcccctcagaggtccccgggctcctcccaggcctgggccaccagatcctgcttatcggcgcaggccagtgcccatcaaacgcttcaatggagacgtcctctccccgagctatatccagagcttccgagaccggcagaccgggagctccctgagctccttcatggcctcacccacagatgcggactatgagtatgggtcccggggacctctgacagcctgctcaggccccccagtgcgggtatagccatatctgtctgtctagactctgcagtcaccagctctgccagctcgaggaggcctgctaggctgccactcagcctcctggctttggctgtccctctccccagcctggagagggctggcctggtcactagaagggaggattgtctcaggcgagtcttggcctgagaggaaagccccctcccaagctcccaagaggctcctgaggaactcggggtgtgaaccccattggggtgtgctcagggttgtgagtgtgttgcccgtgtgtctgtgtgtatgtgtgtgggggtgggcaggcttggaggggacgctgggacccttgccttagatttctgactggtagggtttctccaggctcagccccacctcttcactccctgccaaggtcccatgggccacctcctgcatgtctccgcggaggggctaccttccttcccatcgccctgcctcgcagccagactcatctaagggttcttgtccttgtctatggggcaaactgtagcatccctcaccctggtcccctggcctctgtaaagccaccagcctgagggcagtggcaggagatgggggtgggggggtgctgctctgggctgggttgggaagggagttggggaggggtttaaatgcacggtgcatgtctggtgtctgtcatgccaacctagacacctcatgcttctgtctcccccaccccactctgttttacatcttttataaatgtgccaaactgtgtggcctctgc

SEQ ID NO: 100 - DNA, 2347 bp, Homo sapiens
gcagggagatggggctgtctggggtatgggcaggtattaggatttcgctgatgaacagagagagcagcaggaaggcagtggcacagaagtgtggttggtagggctgaggatggaatcccagaggctttgtgggtgaatggaggtggaaaagccaggctgaaaggctgacactcagggagagagggcaggacaatctgtgaccaacagggagggtctttgacaagagggcacttggaggtgctgcattgatgagcatctggaattagcaccaggagaataaagagccaatgctcctggaccatggacagaggctgggaaaccccttgggaaagtggccacattgcacaaggccggccaaggctgacagcagtgagtggggccaggtttgtcaaagcagccagagggggatgaagtccaagttggcacgtgccaggccccaccaagggggaggccaagctgagcagcatcggtcatcagctcagtacagctgcttgaggtaggaggttggggccagtgatcccagaggcagaccaggaagcaaagccacaggcaacatggagctggggagtgggtcagggatcaccctctagtgctggagtacagaccgggctggtggaggaaggggaggaactggagcttgaggcaatggcagtggccagaggggtggtcttcagcctggtcagggggactgtgattctgaagcagaatcaccctggctctgagaaagttggtcgtggcccggaaggactcatgagaagaagagtaaacagagtggacttctgacatcgaggctgagcttgtttggatgttaaggacccttttgatggttggcatctagaaaattatgtctttagagatgctgcagcagctccaagagagtatccttgcagggcccagggtggtgcagcctcagagagacggggtgagggtcattccgaatagctgacctgagagtctttaagagagtcactttaccagcaggagtgaacactgtgtgaggagtcaggagatacggctcaccctcttgactctacaggctgtcagaaggggcccggagtcctgtctactctgccagccagtctcctgagtggtgtgggtatgcatgggcttcgggaacagtttagtcatcctcgttggcctgccagcctctgcctctgctttccagccctcacgcccgatgtcgtgcaccagtccctcttcatgtcagccctgtcggcccaccctgaccgctcactctcagtgtgctgggagcagcactgcaagctcctgccaggagtagcgggcatctcagcctcgacagtcgccaagtggaccatcgatgaggtcttcggctttgttcagaccctgacaggttgtgaggaccaagcacgcctcttcaaagacgaggcaagaatagtcagagtgacccatgtatctgggaagactctagtctggactgtggcccagcttggggaccttgtgtgctcagatcatcttcaggaaggaaaaggcatcctggagacaggagtccattcactcctctgctctctacccactcatttgcttgccaaacttagctttgccagtgatagtcaatattaaagtgtacttttttcccctttaatccaatatagttgataattaaagtgtattttgaatgacacagatattgtgatttactgcaaggatcctaacacacacttaaaatcaagagccaaggagtagtgagttgtagataaaaaaagaatgtcagctttggagacagtctgggtttaaatcccagttctgtcaatttgagctgtttactgtctctgagcctacatcttcttgtctgtaaaatggagataaaatgggtttaatgaggtctaccttgcagagccattgtgagcattggaaatgatgaatgaatcataccagaacgtctagtataattacagtcatgcattgcttaacgatggggatacattcttagaaatgtgtcactaggcaattctgtcattgtgtaaacattatagaatgtacttacacaaacctagatgttatatgtatttttatttacatgtatattttcacatgaaataccaaatgtcacagcattattactgaatgtcagtcatttcccctacttgatctgcaatgccaatatcaagggccatgtatcaggtttctgtatatgttccactataatcttatgggaccatggttttaaatgtggaatcattgacagaaatgtctttatgtagcatatggctgtgtatcactagtatataatagagcaatattatggaggaatatgtagatccaatcactttacctatacaaaatgactgctatggtgggaacacaataaacaccagttttgactttt

SEQ ID NO: 101 - DNA, 1947 bp, Homo sapiens
agagcctgtttgcgcagtacccccggagggcggaaggccgccgagagaaacagcaagtgacagagcagaggaacggctggcccagccaatcctggagctgctgttgcagcacttgttccccaaacaagtgctcctacattctggtaggaggacagagaggagggggctactggtccacacccctcccctgccgaggaccccatggctgctcccctgcaggaaaggcagctaggctgccttaggccggatgggcagaggctgccatggcccagggtggtgacggttttgcggcccctccgtgctgcccagagtgggaagaagagcgcagagcctggcaagtttctctctgtgtcctctgggctggaaggagcaggtatagacagggccgaggcagccagggcctggtgctgctttggcattggtggcaggagggctgaacctccagccccttgggtttggttccacccctggcctgtccctggcactcgacaactgctcctgtgtgcttattggtgccaccatgttatataacgcttatataatcttccagggcgagcactgtgtctccgctctcaggtcacgcagacacggtgtccgtgtgggaggcaggatctgtggaagcctgtgggtgaacctactcccccgatccccaacctggctccttctcctgatctcagccataggaggggggctgggagagccaggtccctctccacaccagctgtgtgggatgagaacacggttggctgggcagttttcctcaccttcctgccccactagtcccacttgccctgtctggtagagcagatgccatccttgtgctttgataccagctctttgttttgggggacccctggcatggcaggtggcatggcgagatgaaccccaaaatgttgcagtggaagaacacatggtacttagggttggataaagagagggagaaattagctctgcctttgaggagcaagggtaactagaaggatggtggtggcattataagagatttggagcaggcctggggctaggggatggtcagggaagggtgtacagggaagtagatcagacagcaaagataaacatggtgttcttttactgtactctccactgggctgtccctggttaccggggcaacagaagcagtgatgaaaatcatgcctttcgttcagtggaaaaatttggctcctcctcccggctcttccttctctaaatcgcctgtgacccattgagagggttatgcttccaaggatcagagagagaccccagcatgttttcatcatgctcccctttccccagtcttctttatcatctcccctcttcctgcatcccctgtctccccccacagctcggcagttggcagttgcgtaggagttggagtagatgcagggggaagggcatggacgtcatcacagggcagggtgagcagagcgtgggcagagatgtggatgcaggaatgcctggcacatgaggagggtccagcattgatgagctagatggagccaaaagcctgtttctgggctggtaggagctgaggtgggcagggtgagatgatggtgggccttcagagttcagcagtctgggttcgagggagtaggaactaggaagggcctgaggtttcttgtgcagatatcttgtgatgaaaactaccaaaccgtatccctttttgaagttaagatttttgttaagttttttctttcatcttgtgatgaaaaccgtgattcattcattcagcatttattgtgtgccccccatattaggtgaggttctgggaactgggaagccgaaggtgagtagcactggaccttgaccttgaagagactgtggtgaatggaaggaggatgagtatatgggggaagatctggcattgttgcaagcctggaatctggggtccccagcaggagactagcaacataccagatcggaggtgataggttagggtggagcgtgtgg

SEQ ID NO: 102 - DNA, 3122 bp, Homo sapiens
actagaggtggggttagcgcttggaagcaccgaccaacgtgagcgcaacgcggcagggacacctgaccccggcggcgcccagcccctcggattgccagtcactgctcgctttggggcacggaggtgcccagtcctgcggggcacccgacgtcctgtcgccgacagggtccgggagtcagtatagctgggttctagtcccatcacaggcaaaaactccgcgggagcctggcccgctttttacctgggcctcagtttccccatccgtaaaatagaacgggttggatctcccgagcgctaacattccagaactcggatggggcgaaggggagggagggatgggccacccacacgtgacctccccgcgtggagccccgcctaccactgatccagggggtggcagctccggccgggacgagcggggtgggcgggtcctaggaaaccctacccggccgcccttggcagcgcctaaggcggagcgcgcggctctgcagcctgcttgccccggagttggcacccacggaggatggggaccgcaccctcagcttcgcagggagccaccgtggaggccagggcggtgcagagacacgacgtgtgactcggagtgcgcctggggaggatggacgagggagcgggggaccgctaacggggctccctctgcgcgccccgtccgcagaggcgcacgtcgagggtcccgggcgggctccgtggacgttggcggtagcgccgagcgagtcacggaccatgaagagcgttcgtgccgcgcggcccaaggccgggatgggggttagccacatcctgccgcgctgagggggaggctaacgggcgcgggcggccgggcccagccggagcccaccgcgatggcgagggaggagtgcaaggcgctgctggacgggctcaacaagacgactgcgtgctaccaccacctggtgctgaccgtcggtggctcggcggactcgcagaacctgcggcaggagctgcaaaagacgcgccagaaggcgcaggagctggcggtgtccacctgcgcccggctgactgctgtgctgcgcgaccggggcctggccgccgacgagcgcgccgagttcgagcggctctgggtggccttctcgggctgcctggacctgctggaagcggacatgcgacgctcgctggagctgggcgccgcgttcccgctgcacgcgccgcggcgaccgctggtgcgcacaggtgtggctggcgcctcctccggcgtggcggcgcgcgcgctgagcacccgcagcctgcggctcgaggcggagggcgacttcgacgtcgcggacctgcgggagctggagcgcgaggtccttcaggtgggcgagatgatcgacaacatggagatgaaggtcaacgtgccccgctggaccgtgcaagcccggcaggcggcgggcgccgagctcctgtccacggtcagcgccggcccctcctcggtcgtgtccttgcaggagcgcggggggggttgcgaccccaggaaggccctggccgccatccttttcggcgccgtgctgctggcggctgtggccctagccgtgtgcgtggcgaagctgagctgacagacacccgacggccgcctgctgctgccgctccctcccctgagaaaagactcgggatgggtgtggggtctggcctgtgcaaggggagtggtcctaaaaccccgtgtgtgcatgggtacacgcgcgtttccagtgcacatctgcctgggcaggacacggttttcctcttgctggcccgggagaagttaactttgcgccggccgtcagggcattaccgctaacgtctgcaggagctttattccctattaatagaaaaccgtcacagtgaccctagatccctccgagttaatgagttaacacatgtgctgttggggcgtctttacagggagtccgagttcggtgcccacccctgccagcgtcgccccctttctgcgtgggacagtttgaaaaggtgggtggggtggagtgaagtttggagagggacgctgtttggttctatgtggttggtctgtttcccggacaagaaaaattgcaatcaaatgtcagcagcttttattaccttaatctttcagggcctaaatttaggagagtgtcctgagagcagttcatacaaagggctttctctaagacgcgctacagcccttcctagcagagtttatccattcgtccccaagagcagctagaagagatttgaggtcatgacctcccactgccgctcaggggctgaccctatttaggaaaccaaagagggtgggttgaacctactctcacggacttggatccagtgcgcacacttgcctgcggaaaagggctctccccagccacccggagatgggggtaagaggaagagcagaggcttggggtagggccacctggtgtttaaacaggcactttctccttctctggggcttatttttgttcagaactagaccagagtgtttgaacctcctttgcaggagggctgggaatcctctttagagcacttaatcctatttatcccctggaatgtgcgtgctggccagtaggagggctggctttggcagctccctgacccccgcgctgcccgcccctccggggtaatgtggcattactggcccacagaggttttgagccaatcagctctgagactgggttagaatgtaacagctttaacttgggatttaagaagcttttaaaaggtaataatcctctgaaagaaaaatgacgtaaccacagcgtgtactatgaaagctgttattttaataaagaacgctgggccatgaactcatacctgccaatgagtcaaacatagtatctttatgtagatacttagattactaaatatatatttcatctacttctgaagttgatagtcttccccccccccccacttttttcttttttgaggcaggtggatcacctgaggccaggagttcgagaccagcctggccaacatagcgaaacccgatctctactaaaaaatataaaaattggccgggcatggtggcgcatgcctgtggtcccagctactcgggaggttgaggcaggagagtcgcttgaatgcaggaggtggaggttgcaatgagcaagattgtgccactgcactccagcctgggcaacagagcaagactctgtctc

SEQ ID NO: 103 - DNA, 3031 bp, Homo sapiens
ggagagccaggaagagggcgagggcagagcatccttgggcggagatgcctttaaaaaatcatccaccgcagcggtagaaacagttttgtttggctttatttatacggaatggtttttcagtgaaatgctgtcttgcttaaaagaagagatgcctccccaggagctcacccggcgactggccacagtgatcactcatgtcgatgaaattatgcagcaggaagtcagacccctgatggcggtggagataatagaacaacttcacagacaatttgccattctttcaggaggccgaggggaggatggcgcccccatcatcacgttcccagagttttcggggttcaaacacatcccagatgaagacttcctgaatgtcatgacctacctgactagcatccccagtgtggaggctgccagcattggattcattgttgttatcgacagacgaagagacaagtggagctccgtaaaggcatccttgacacgaatagctgtggcatttccaggaaacttacagctcatattcatccttcgtccatctcgctttatccagaggacattcactgacattggcattaaatactatcgaaatgagtttaaaacgaaagtgccgatcatcatggtaaactctgtctctgaccttcacggctacatcgacaaaagccaactgacccgggaattaggggggactttggaatatcgccacggtcagtgggtaaatcaccgcactgccatcgaaaactttgccttgaccttgaagaccactgcccagatgctgcagacgtttgggtcctgcctggccacagcagagctgcccagaagcatgctatccacggaagaccttctcatgtcccacacaaggcagcgggacaagctgcaggatgagctgaaattacttggaaagcaggggaccacattgctgtcatgcatccaagaaccagcaaccaaatgtcccaacagcaaactcaatctcaaccaacttgagaatgtaactaccatggaaaggttattagttcaactggatgaaacagaaaaagcctttagtcacttttggtctgagcatcatctgaagcttaaccagtgcctacaactacagcattttgagcacgatttttgtaaggctaagcttgccctggataatttgctggaagagcaagcagagtttacaggcattggagacagcgtgatgcacgtggagcagcttcttaaggaacacaaaaaactggaggaaaaaagccaggagcccctggaaaaggcccagctgctggcactggttggggaccagctcatccaaagccaccattatgcagcagatgccatcaggccccggtgtgtggagctcaggcacctctgtgacgatttcatcaatggaaacaagaaaaaatgggacattttaggaaagtccttagagttccatagacagctggacaaggtcagccaatggtgtgaggcaggaatctacctcttggcttcccaagctgtagacaagtgccagtctcgagaaggggttgatatcgccttgaacgacattgcgacattcctgggcacagtcaaggagtacccgttgctcagccccaaggagttttacaacgagtttgagttgctgctcaccctcgatgcaaaggccaaagcccagaaagttttgcagaggctggatgatgtccaggaaatatttcacaagaggcaagtgagtctgatgaaactggcagccaaacagactcgtccagtgcaacctgtggccccacatcctgagtcttcaccaaaatgggtgtcatcaaaaaccagccagccctccacctcggtccctctagctcgtcctctgagaacgtctgaggaaccttatacggagacagagttgaactcccggggaaaggaagatgatgagactaaatttgaagtcaagagtgaagaaatctttgaaagccatcatgaaagggggaaccctgagctggagcagcaggccaggctcggagacctttccccccgcagatactcttctcagtactttaagtaagtgtgatgaaggaatcatctagcaacttccttcttagaaaaaaaggaagtgccttcatatttccttgaaatttaaacttgttccattctattctaagcaaaaattaaaaggacacagttcagaagagctctttcagcaaataaataattgtttcacaaaagcactgctgtaaacaagatcactttgatggccagagacacttatgttttcaaccaatggcaaccttaaacacttccaagtatagatacacagggtatatatgggcaaaaggcaatacatcattaatcaatcaactaataaaaattaattataagcttgttgcttggtcaaatatgcttttgttctctatgtttttttaattggtcagaaaacttaaactgtaatgatctaaaaccctgtatctactctgaaagtaactacaacctagaatgtttgacactgtagttttgacattagttaaaaattctaaattatctaagcaatgtaaacaagcctcaaatttcaaaatagaaaaaaattaaaatttctgtaaacattaaaaagctacctgctaaaaattgtaagtatcatcattcagttgtgtatactgagaaatcttttttcgttttgttttgcgtgtttccgacatcaccttattatatgagacatctgattttccctaacaggtgcctctgcagtcaaaggccttagagtgagttcagtcactcttgctgaagtcattattttggccttcatataatctccctagcagtagacaccacctagttctttctgtagtgaagggaggtagtgtgtattatagccacatttttatcctgctttgtaaaataaatgtaacttactctattagatctcagacacatctctttgattacaaggaacatgcagctttaaaaatgctttaaccccaaactggcaacttttctatcacttttttactctgttttcaagtttgaaatatttagaaaataaagatcacctctgacagttattgatgaaaaataaattgttttagatatt

SEQ ID NO: 104 - DNA, 1945 bp, Homo sapiens
agcttacggccgacaaaccactcttctctatcagtatgcccttgaatagatgaggttgtgcaaagtcctttgctcttaaatgtattgctgtcattgagaatatttggaggttttctcttgggtttgtttggattttttttttcagcttttgtctgaattttggttttatttttctggggcagagaaaatggctttccttatgaaaagtatgataagtaaccaggtaaagaatttaggatttggtggtgggtctgaagaaaataaagaagaaggaggtgcatctgatcctgcagcagctcaagggatgactagagaggagtatgaggagtatcaaaagcaaatgattgaggagaagatggaaagagatgctgcatttacacagaaaaaggcagaaagggcatgcctcagagttcatctcagagaaaaatacaggctcccaaagagtgaaatggatgagaatcaaatccagatggctggagatgatgtggatttacctgaagatctccggaaaatggtagatgaagatcaagaagaggaagaagataaagattctattcttgggcagatacagaatctccagaacatggacttggataccataaaagaaaaagcccaggccaccttcactgaaatcaagcagacagcggagcagaagtgttccgtgatgtgaggggtgggaggggtggagggagggaaccagccatccttggaaaagaccactctcttgtgggacgtttcaagcagtacatgttttaatgtagtgaacacagttaggaaaaccacgatgatccattgacagacaataatttggttgttctaaatattcctggcagagcatttagctaacaccttgcagcgggaaccttactttccttttagttataaatgagataaactggaaaatttcagttgtaaatgatgatgcagaacacatatctgcttaaagaccttgagatgagccaggaagaaacaaaagcaaggggcatttcctctccaactttcttccttggaggccaagttctcaccctgtccaactattcgcaggacaccaggtcccttcagagagaaatgtggagagtcaaggtgtctactgggagccgggtttcccacagggagctgagtctacagactccagggcaatcaaaggtcaccacccccacccctcacctctaggatccttgaatttgtcaatgatactcatcaagtatgcttggatcctttggtccttggatgcttctcagccaagtggcggtagcacagatgtggtgaacaatgacgaattgaggcagggaatagacctcactagccctttgcaatggagatcatcgttctagtggccatgtgaagaatggaaccaagggaggcacaattagaggcagagggaaaccaggcagacggctgctctttttgagttgagcttaactctccttgtctgaacttggtgatagcaatgggaacaaagtgggtagactaacagagagcattaagaagttaaatcaatctctctctgtctcctcccaacctctctctctctttcatccccttctctccctatctctcttttttttttcttctcctgtcccttcccatcccacccctttagactaccttccagtaaatcacactgtcatttggtgccacaagctttcagggtagacactgatttttcccccctaatatctgctctctttcaaaaggaataattcaaaagacttaggacaattaccactgaaacacttcgagctatttagctaaagcccaccaaatcaaaacaaaatactgattttttttttttttttggtgactctgttcatacagtgaataaagatctatcaaaggaaaaggaaactgagaccgaaaacttagggtctaagttgttctaaacccagggttctcaaatgtgttgtacaaaaagtttcatgtaataaaattaagcaaataaaac

SEQ ID NO: 105 - DNA, 1686 bp, Homo sapiens
atcgctcaggctgtaggagggaaatggaaggatgtcctcccgggctctggctggcgctgggtgtccgagtcagcggagcgcccccagcagtctccccgaggcagagtcatgggggtgctggcgcctggacgctgtctcatcccggggagccgctttcccaccggctccctgggctccagccgccccacgcgagcccccggctggttctggggccaggaccgcccctctccaaggcagacttcccttcattccacgacaaagacgcgcagccccgtttccctggggctctagcccgtgagatcgccgggtgtatcccgactcccgccggcacgtgcgctcccccagggcagggcctgcctgtccccttccgcgggtcgccagcagccagcacaggccgcaaacggcggtccgcagagcggaccaacggagccgaccctcgcaggcttggagccggacgcggcggggcagagcccccgaggctgcagctcgccggaacccgcgggagggcagccgggctgggcggagcgcacagcgccacggaccgaccgcgcaggctctgccggccacttccggtgtcgcgcggcggctcccggcaggaggcagagggcacaccgccagccccaggccaggctgcgagggccgcggacccgagccgggaaggaccttgggcggacgagccgcgcgtcccgcagccatggagcaggacgacccggtcgaggcgctgacggagctgcgcgagcggcggctgggcgcgctggagctgctgcaggcggcggccggctcgggcttggcagcctacgcggtgtgggcgctgctgctccagcccggcttccggcgcgtgccgctgcggctgcaggtgcggggcggggccaggccgggcaggggagctcggctgccgctcagggtctcaaggtctgggcgtggccggggtgagctccgccccgccgtgtggtagttcgggccgggctgcgggcggggcgggagcggccagtggactctcgccgccacccggtccaggtgccctacgtcggcgcgagcgcgcggcaggtggagcacgtgttgtcgctgctgcgaggacgccccggaaaaacggtggatctgggctctggcgacggcaggatcgtgctggcggcccacaggtgcggcctccgcccggccgtgggctacgagctgaacccctggctggtggcgctggcgcggctgcacgcctggagggccggctgtgccggcagcgtctgctatcgccgcaaggatctctggaaggtaacctggggatccctggccacccgctgacagcccaaggtgcggctgacacctgcgagggctgggggccgggactcggaagctgcgatgacccggtgcccaccaggcctctccccggccggggcgacttctcttccggcagctcccgctgctggaggacaagctgcggacagagctgcctgctggggcccgcgtggtgtctgggcgcttcccactccccacctggcagcctgtgaccgcggttggcgagggcctggaccgagtatgggcttatgatgttcctgagggtgggcaggctggggaggccgcctcctcgcggatacccatccaggctgcccccggacctagttctgcccccatcccggggggccttatttctcaggccagctgagtattagacacgataaagactctgtgggttct

SEQ ID NO: 106 - DNA, 2276 bp, Homo sapiens
acggaagccggctttggccctgcggctgctaccgtcgccgcggagaaattgttggatctggcagtctaggaatggtgagacctcgcggttcgcctctgagggttctcagaggagttggggatgaaatggagttttgcagagtgccgccggggacgaccaccccccaagtttggggccccgccccagtggcgccccgaaaagctgcgcatgcgtgggccggaccgggttagaatctggctcgaagtgttacgcatgcgcaaaggcatggagaccgtggggtgagaatgggcttgcgagtttgccctcacctccccagccaccagcctgtgggtctcaaaccaaggctacttggtgctctgctttgagttgcagaggtgacttcatcaatgctcctaccccgagttcttgagacagacctggaccgatcccctaccttgggtgtgcactcttgggagaacgaggggcggagggtccggtaaggaaggggcacagaccctacctcagtttgccggcaagctcgggccccttcgccctctcctcagatgtcaagattcttagtcgtagcctatggagcggagagcgacaggctcacctggggacagggctagaacactgagctaagagccaccctggttagaagtggggactcacgagaggagcgccccgagaaagtccagtacctgggttctctaggggttgttggggcacagcgtggttgataatcacgcagttcccaaacagtggtttttggtttccacgagatggtatctcatggaaataccacttactaaatcttcagtaaaaaccccaaatggaaaagaaaaacaaaaaaaaaacgagatggactggttggagttttgtctccctttcttttttcctgctttggcctgggaggggaaggctggtgctgctgagctgagtggacagctgaagtaaagaaaaatgtgggccaaagaatcccttgtctcttgctagtttatagtcaaggcgcttaacctaggagataccagtagaattaaagggtctatgaaccctctaaaatagtatgtgtttgcacccttttctgcagtccatagctgttatcatactctgaaaggtgccagtgaccttcacaagactgatgtctaaggctattattggcagagtggggccttatgcctctttcctgtccttatgtcttccctagcttatgggaccctgggggacctgagccagtataaggaagtgaggctggccagttggaaatctgagcctcagggagcctcatttctcctttgcagagttcagtcgggtcccggcagcggctgcagcgctctcgtcttctgcggctctcggtgccctctccttttcgtttccggaaacatggcctccggtgtggctgtctctgatggtgtcatcaaggtgttcaacgacatgaaggtgcgtaagtcttcaacgccagaggaggtgaagaagcgcaagaaggcggtgctcttctgcctgagtgaggacaagaagaacatcatcctggaggagggcaaggagatcctggtgggcgatgtgggccagactgtcgacgacccctacgccacctttgtcaagatgctgccagataaggactgccgctatgccctctatgatgcaacctatgagaccaaggagagcaagaaggaggatctggtgtttatcttctgggcccccgagtctgcgccccttaagagcaaaatgatttatgccagctccaaggacgccatcaagaagaagctgacagggatcaagcatgaattgcaagcaaactgctacgaggaggtcaaggaccgctgcaccctggcagagaagctggggggcagtgccgtcatctccctggagggcaagcctttgtgagccccttctggccccctgcctggagcatctggcagccccacacctgcccttgggggttgcaggctgcccccttcctgccagaccggaggggctggggggatcccagcagggggagggcaatcccttcaccccagttgccaaacagaccccccaccccctggattttccttctccctccatcccttgacggttctggccttcccaaactgcttttgatcttttgattcctcttgggctgaagcagaccaagttccccccaggcaccccagttgtgggggagcctgtattttttttaacaacatccccattccccacctggtcctcccccttcccatgctgccaacttctaaccgcaatagtgactctgtgcttgtctgtttagttctgtgtataaatggaatgttgtggagatg

SEQ ID NO: 107 - DNA, 1793 bp, Homo sapiens
caaatgagagtgaccccagacccagcaaggctgtgtggctgagtgggcagaggagtgcgagtggtgagaggtgggaggagagggtgcaggcaggactgtgcctggccccgcagcccacagctcagtggaaggcacgtgcaggggctgagcagggataggtctggctgctcggtgagggtgaagcagggactccaagcaggaaacttgcatggttggggcaggagatgatggagcgccaggcgtggggatgaggaaggagccaagaaatgggtacattttggagacagaacttactggacttggcagtgagttgaatttgtgggaagagggagagatagaggcacagctggctttcagaggggatgtagctaataaggtgcctggagggattgtttacccacatgaaggatgcagagggaagagcagggtttctcggagagtggagatgtcgggagatctgcttggacacattatgattgaaaaagtgggtttaggccgggggtggtggctcatgtctgtaatcccagcactttgggaggccgaggtggatcacctgaggtcaggagttggagaccaacctggccaacatggtgaaaccccgtccctactaaaaatacaaaattagccgggcatggtggggcatacctgtaagcccagctacttgagaagctgaggcaggagaatcacttgaacccaggaggcggaggttgcagtgagccgagatgccactactgcactccagcctgtttaaaaagagtgaaactctgtctcaaaaaaaaaaaaaaaaaaaaaaaaaggaaaagaaaagaaattgggtttgttctgatggtaaccagcaagaccactagctccttgctccaaactcacccctaggggaagaatagagtgaaaccaatgagacagcagatggagggggtgaggggtttcaaatcattgtgcatggggctatggctttggcctggagcaggggtgggccaaacacagctatgggagaataagcgtgaaggggaatgtttgatgtctgttcttacttagcccagctccagccactattgccttgggacaaaccatgcctgtctatacctgtggctatgcagggctcaggtgcaggtgttaatacagcacagcagcagagggacctgtgctcacagggagccaagcaaaacaggtgcagcccacctgaccccagcagtcacttccccgcttttctgcagacgaccaggagactgcactatttcaggcttggggaggtccctctgaatgccgcatctctcaggagggggaaggtgaagctctgatctaaggaggaatttggtggagtggatggggttgactgtgattttttggagcctctccacttggagtacattcacccaccgctctctgagatcactcaggcttactgggctacccacctctcagacagggcagggcagagtagcagacttccactggagggaatgagctggcaggcaaaataacaaggtattcgagaagcacaagcattttttttaaggcaacaaactgagttacagcttccagattctatcagaatagagataccagaacagagggaccaattttaaaaataagcttaataaacctcctaaatgagataagggacatattagcaatgtgaaataagatcaagaagatatacaaaggaaccgagtagaaattgttggtgttaaggtatagctgtggaaataatgcgatacaggagaaaagtactagaataaataactgaggaatgcatttgtgaattggaggaccagcttgatgtatcagccaag

SEQ ID NO: 108 - DNA, 1659 bp, Homo sapiens
agaaggagcctctgctcttcagctgcgccggctccaacaccaagtaccgccggctctgcccctgccgcgacttccgcaagggccaggtggccttgtgccagggctgtctgtgaatccgcctctgccgccctgcctggcacccacgctggctctctcctgccgcgggagaaagcaccagcaggttctgagccctggctgcttgtcctcctcgcaacccccccaggccggagcttccttccttagccgggaagctggcagaggagagccgtgcccgggaataggaggaggcagcatgccgagcccctgggacctcccaggcaggctccggttctctcctggggactcacagcagcatcgtggccaagcaggtgtcggactgctcagagtccgcatggcccaggagcaggtggtcggaggcccctggctttgtgcaaggccggatctgggccaggtggcgaaaggggcccagtcgttcttgggcccaggatggggcctctagacttgcaagggagaggaacagggaccaggctgccccacggtccctgaagggtccaaggaggggccctccccatggccctggagagtgggcctgggtggtacctgctccaggcagggaaactgggggctcgcccttctcctgtgaggggagccaggcacacagggcccattggtgtttgggatgtggacagaggggcagggggctgggagaaggctaagccgaggggtcctgtttgtgcctccccttagtcccttccctcccgatttcccgattcccccaccctccctctacacttgaggaccacagttgggggtgtagggaccacccagaccctggttgaattgtttctctctcctgcttgttccaacccttttcactctgggcttctcccaaaacccatcctggcatgacctgcaactccaggtggtggatttgttccaaagcctcaatccctaccccctccaaggggcaggtttccagtccagcctcagagatcaggctctgggacccctgcctggggggtggccttcatgcaccagccacttccgcaggtgctgactcccgcactccctggcattttttgcggacaagggcttgggatggaccctcagccccatggtacgccctgcccagtttccagttgccctgtccacttaccctaggtagccccccaccccatcagtgccgagtccttgtccctacctccagcttcctccagcctcaaaccgcctctggatctagctgtccttctccgagtggcacgcctgccccaggatgccccctttccctcccccccatgcccagagccccgcctgcctcagcgggtcaggccttcagaacactgccacccacccagttttataatcccgctccctctccaggcaaccccacccaccagcctaggcctgctcctccacccttcccgggaggcagccccgggatgctgagagttggtggaggggccaggctggacgcttcctgtgggagtcccctccagacctggctggcccctgcagccacagaaaccacgatggcaaaaaatctcattggttctcaaggactaacccgtgggggaaagcaatagagacactctttttctctctctttttaaagatttatttcttgaaataataaatattttattgggatgtgaggtgcag

SEQ ID NO: 109 - DNA, 1624 bp, Homo sapiens
aggcaggcgcgctcgggcgaggtaggagcgatgtggcctgggaacgcctggcgcgccgcactcttctgggtgccccgcggccgccgcgcacagtcagcgctggcccagctgcgtggcattctggagggggagctggaaggcatccgcggagctggcacttggaagagtgagcgggtcatcacgtcccgtcaggggccgcacatccgcgtggacggcgtctccggagggcctggcactgtcatctttccaggcctgccctcgccccacctgagctgctgtatccatctcctctccttcacctcaggaatccttaacttctgtgccaacaactacctgggcctgagcagccaccctgaggtgatccaggcaggtctgcaggctctggaggagtttggagctggcctcagctctgtccgctttatctgtggaacccagagcatccacaagaatctagaagcaaaaatagcccgcttccaccagcgggaggatgccatcctctatcccagctgttatgacgccaacgccggcctctttgaggccctgctgaccccagaggacgcagtcctgtcggacgagctgaaccatgcctccatcatcgacggcatccggctgtgcaaggcccacaagtaccgctatcgccacctggacatggccgacctagaagccaagctgcaggaggcccagaagcatcggctgcgcctggtggccactgatggggcctttttccatggatggcgacatcgcacccctgcaggagatctgctgcctcgcctctagatatggtgccctggtcttcatggatgaatgccatgccactggcttcctggggcccacaggacggggcacagatgagctgctgggtgtgatggaccaggtcaccatcatcaactccaccctggggaaggccctgggtggagcatcagggggctacacgacagggcctgggcccctggtgtccctgctgcggcagcgcgcccggccatacctcttctccaacagtctgccacctgctgtcgttggctgcgcctccaaggccctagatctgctgatggggagtaacaccattgtccagtctatggctgccaagacccagaggttccgtagtaagatggaagctgctggcttcactatctcgggagccagtcaccccatctgccctgtgatgctgggtgatgcccggctggcctctcgcatggcggatgacatgctgaagagaggcatctttgtcatcgggttcagctaccccgtggtccccaagggcaaggcccggatccgggtacagatctcagcagtgcatagcgaggaagacattgaccgctgcgtggaggccttcgtggaagtggggcgactgcacggggcactgccctgagctctgggcccagtcctgtggccggttgaagaatcaggcaggagccagggctctgaggggaggcgcctgaggactgcagatctccactgacctctttccctagattaagatgggacccagtggccgggcacggtggctcaggcctgtaatcccagcactttgggaggccaaggtaggcggatcacctgaggtcgggagtttgagaccagcctgaccaacatggagaaaccccgtctctactaaaaatacgaaatt

SEQ ID NO: 110 - DNA, 1829 bp, Homo sapiens
taggacccattttgggggggaaaaaccaacacattccagagctttccaagtcctttgaacttcaggttcacattcagggatcacacagttctgcctgttctcagggcacagcaactgccaatcccgctgaagaggcctccctgggcacagcacaggctgcacggtgcacgcatttccctgaaggcagccccttcttcggaagcagctgttccaggcctcggaacagggcctgggtatccgcgtggtgggctggcagctgacggcctgctcagtggagccaggagctaactcagaccccaaagcaagcagggggccagtggcggggcccagcgcccagcaggacacccatgcaagaggctgagccccccaacatccaaggacaggagagacatggagtggcgctggacagtcacgacaaggacttgcctccagcactggacacacctgtgttaagaccagccctctgcttcccagtcccgccagcctggggcatcctccatgggctcagcactgagaggtcttgggtctgccacgttctctagctctccagtcacccactcatccagggtaggaggggttctccctgcccccccccgtggccttgggatctcaccctctccatgtcctggggacagcctcgccctcagccggactgcatccctcctgggcctgagcctcgggactcagtggacaccaaagtcaagaccagcacccaccacgggccctgccagcctctgccttccccagctggcctgggttctggcctgggtgaggatctggaagctgttggcaggactcaaccaagcactgctctctagctccagggcactaagccacaggaggcagcgccctgcagcctcccgtccacactgccagcaatgcccctggcccagtgagcccagacgctcctccaccccttccagaccaagctcaacgcctccaagaccagcaggccaaggccaagccctgccccagatcctcataggcagagaagcccttctgacatttcccccaggaggcagggggtggtctgagtctcctcacagcagagagacccaccggagccccctcaactttgcagatgcccacctggaaaatgggctgagctgcaccagaccctcacacaccacagcactgcaagctgatggaatgttccagttatgatggacacttcgtgatctgcaatgactgttgattcagcacattagcatctgacacagccaacctgaatacttcctgccccaggcggtcagggttatggcacgatgcaggtggcactcaggggctaacttcaggctgatgagtgtgtggggtatggggcagcagaggcagccagccagcaaagaggggccactgagcaccagggccctggtggaggctgctgtgggacggtcaggccaccaccgcaaagaggcagccggagcttctgcacaggatgtccctggccccaggtcctgcagcaccttagtccatactaccagccccacccaccttccttcctcttccctcttctaggacacaggctgtggaccccttcaggtgcactataatggggctggaggggcccccacatctctcagccccactaatgcagaatcccactaccagtgagctagaaggtgctcagaggccaggggtctctactgcccatgccgggcggccttccagtcattgcacagcaaagccatgtgcagggcgtccccctcaaccctgccctgaacatgccccagggcactgaggggcgaagccagtgcttgggctctgctgctgggagtctctggtctgtgtctgtgtgtgcctgtaagtgtgaaataaacctctctgatggc

SEQ ID NO: 111 - DNA, 3086 bp, Homo sapiens
gttcaggcctttgcctgtccttccctcagcaaaaatactgtgttttggaaaacattaccaataaaggagctgggaggtggaattggatcaaaatacctttagatgaaagcagcagcacaagccattccctttaaatgagctggcctcacctctggggcctatgaagaaaagcctgcttcaaggtgatagttttcattttgcttcccagcacctctgcagtcataaccaaagtgaaggacaatattgcatgacttcagaagaaagccatccagccaccttgcaacatgttcaggaaattctggactcccttggggcttgcaaaactccctatgtcttgcagaccaaaagcaagttctcagtcacctagctctagtttgcataattaaagaaagtggaagctggttcttttctgggtgacccttcacccaaccaagctcataaggacttgtgacaaaaataagatagcaataaaatgaagttttaacagtgaaaacttctatcacttagataagcaggaaaagccagtcccctagatgcccatctgaccctaccttactggggtcatacagccaaagcagtgtccacttcaggtactgtaatgttttgaagttgacacatataatttaatgtaatttcatgtcataagttataagacttttcagagaaacaatttagtaatatcttctgtaatacccatcttcattttttatatgaaaaagcatagcctatgatctgtcaccttgctcactcccacatccttacctcttatccttctcacatcgtcccattaacacattatccatctttggggggaaaaaatacactaaattttagacagagtcactttcactatggccacaatgggagaaaagacagtccaccttcaaagtcaaccagaatgactcttaacctctcttgtctgggttgggcatccagataagattttcttcgtacaaagagtcttgctactaggaaaaagagtttgaaaatcactagtctaactaaatatctcactttaaaaaaagcacaaactaagactcaatgaggtttatcttccacaagatcagccagttttagcagagcagttgctaaaacccaggtctcaaactccttgtctatggctcatctaactaagcaacaaaaagcccaatgagctctggagagagagagggagctaaaacaggactcaatcaaaacccacttgggattagggaagccaccctctgtgagtgagttaaactgagattccctccccttcaccctggcttcctttgcagaacaagggtcaccgccagagggaaagctgagtttacggaggggatcctggttggagtcagagtataccttggtttggttttgtggggttttttgagacagggtctcactgtcacccaggctggagcacagtgacagtcatggctcactgtggcctcagactcctggcctcaggcgatcctcccacctcaacctccagagtatctgggactataggcacgtaccaccatacccagctaatattttttttaattttatattttttggagacggggtgtcactatgttacccaggtctcaatcactatgttactccttgcctcaagcgatcctctcaccttggcctcccaaagtgctgagcttacaggtgtcaaccactgtggccagccacgcattggttttaaggtccagaatttttctgtttggagccttcacaattagttttaggttgggagaccgtgaacccaccaagcagccctttagaggctggaaaaagagtttggaaaaagaactctgtggctttaggaatttctctcggaaatcctctagggcagagaaggaaaatttaccaaatgggagagtgtattagtctattcttacattgctataaggaaataccccagactgggtaatttataaaggaaagagttttaattgactcacagttccacatggctgggaaagcctcaggaaacttacaatcatagcagaaggcaaaggggaagaaaggcaccttcttcacagggcggcaggaaggagaagtgcagagcaaagtggggcaaagcctctataaagccatcagatctcatgagaactcactatcacgagaacagcaggggagaaccacccccatgatccaatcaccttccacgaggtccctcccccaacacgtggggatcacaatttggattacaattcaagatgagatttgggtgaggacacagagccggaccatatcagagagaaagctattactgaagacctttctaactcacttctgtaaagatcaattcaataaaagcagcaaacacacatactttgctttccttgtgattaatgccttgacttttttgtggaaagtaacaccccaagaaagccagctactcatgttggcaataaaggtaaaagtatctatggaataaggaccatttttaggacaatactttccctactacttagttctagtcccttttttgtagaattctgaggactttctacatacacaatcatgtcatcagcaaataaagattattgtacttgttctttgccaacccatatgtcttgccttactgccctggttaggaccttcagaacaatactggatataagtggtgaaagcacatatcctccccttgttcctaattttagagggaaagtactcagtctttcgccattaagtacaatgtcagctgtaagttttcctagagaccctttctcagcttgaagatgttccctggtattcatagtttgctaaaaggtttttgtcattttaaatcataaatgggtgttgaattttgtcaaaggcttttaatgcatctatggagatgatccaagtttttttcctccttatttctgctaaggttgtataattatgctcattggtattttaaatgttaaattaaccttgcgttcctgggataagacccactgatcatgatgcattttcctctttgtaaattgctgtattcattttagtttcttcaggattttgcctatgtttgaaggatattggtttgtaatttttcttgtaacatctttgtctggttttgaaatcaaagtaatactggcctaataaaatgagttggaatgtgt

SEQ ID NO: 112 - DNA, 2204 bp, Homo sapiens
gagcacctggcgccgcctgcctgacgtcacggtcactgacagcgtgagcccgcggcggctgctgccatggtggctggcggccgggtaagggtctgagtggatctcctgccaggccagagcgccttcgggggccgcggcggaaggccaggagtttgcagccagggcgccgggtttgtggtctgcagtgtcgtgaggctgaggtgcagcatgtctagactgggagccctgggtggtgcccgtgccgggctgggactgttgctgggtaccgccgccggccttggattcctgtgcctcctttacagccagcgatggaaacggacccagcgtcatggccgcagccagagcctgcccaactccctggactatacgcagacttcagatcccggacgccacgtgatgctcctgcgggctggaccgcctggactttgtgctgaccagccttgtggcgctgcggcgggaggtggaggagctgagaagcagcctgcgagggcttgcgggggagattgttggggaggtccgatgccacatggaagagaaccagagagtggctcggcggcgaaggtttccgtttgtccgggagaggagtgactccactggctccagctctgtctacttcacggcctcctcgggagccacgttcacagatgctgagagtgaagggggttacacaacagccaatgcggagtctgacaatgagcgggactctgacaaagaaagtgaggacggggaagatgaagtgagctgtgagactgtgaagatggggagaaaggattctcttgacttggaggaagaggcagcttcaggtgcctccagtgccctggaggctggaggttcctcaggcttggaggatgtgctgcccctcctgcagcaggccgacgagctgcacaggggtgatgagcaaggcaagcgggagggcttccagctgctgctcaacaacaagctggtgtatggaagccggcaggactttctctggcgcctggcccgagcctacagtgacatgtgtgagctcactgaggaggtgagcgagaagaagtcatatgccctagatggaaaagaagaagcagaggctgctctggagaagggggatgagagtgctgactgtcacctgtggtatgcggtgctttgtggtcagctggctgagcatgagagcatccagaggcgcatccagagtggctttagcttcaaggagcatgtggacaaagccattgctctccagccagaaaaccccatggctcactttcttcttggcaggtggtgctatcaggtctctcacctgagctggctagaaaaaaaactgctacagccttgcttgaaagccctctcagtgccactgtggaagatgccctccagagcttcctaaaggctgaagaactacagccaggattttccaaagcaggaagggtatatatttccaagtgctacagagaactagggaaaaactctgaagctagatggtggatgaagttggccctggagctgccagatgtcacgaaggaggatttggctatccagaaggacctggaagaactggaagtcattttacaagactaaccacgtttcactggccttcatgacttgatgccactatttaaggtgggggggcggggaggcttttttccttagaccttgctgagatcaggaaaccacacaaatctgtctcctgggtctgactgctacccactaccactccccattagttaatttattctaacctctaacctaatctagaattggggcagtactcatggcttccgtttctgttgttctctcccttgagtaatctcttaaaaaaatcaagattcacacctgccccaggattacacatgggtagagcctgcaagacctgagaccttccaattgctggtgaggtggatgaacttcaaagctataggaacaaagcacataacttgtcactttaatctttttcactgactaataggactcagtacatatagtcttaagatcataccttacctaccaaggtaaaaagagggatcagagtggcccacagacattgctttcttatcacctatcatgtgaattctacctgtattcctgggctggaccacttgataacttccagtgtcctggcagcttttggaatgacagcagtggtatggggtttatgatgctataaaacaatgtctgaaaagttgcctagaatatattttgttacaaacttgaaataaaccaaatttgatgtt

SEQ ID NO: 113 - DNA, 2613 bp, Homo sapiens
atcctcctccaggtcctggcgcacagggtgggagcgctgcgctgcgccgcgctgcgcatcgcggcccgcttgccgcctgccccctgccctagctgggccacctccccgggctgccggtggagggctaagaggcgctaacgttacgctgtttccggttttccagcgggctctgtttcccctcccaaggcggcggcggctgagcggcggagccccccaaatggcctggccagatgcggcaggtttgctgctcagcgctgccgccgccgccactggagaagggtcggtgcagcagctacagcgacagcagcagcagcagcagcgagaggagcagcagcagcagcagcagcagcagcgagagcggcagcagcagcaggagcagcagcaacaacagcagcaacagccgccgcccgttcgcgagccgcagccgccggcggcatgaggcgcgacccggcccccggcttctccatgctgctcttcggtgtgttgctcgcctgctactcgcccagcctcaagtcagtgcaggaccaggcgtacaaggcacccgtggtggtggagggcaaggtacaggggctggtcccagccggcggctccagctccaacagcacccgagagccgcccgcctcgggtcgggtggcgttggtaaaggtgctggacaagtggccgctccggagcggggggctgcagcgcgagcaggtgatcagcgtgggctcctgtgtgccgctcgaaaggaaccagcgctacatctttttcctggagcccacggaacagcccttagtctttaagacggcctttgcccccctcgataccaacggcaaaaatctcaagaaagaggtgggcaagatcctgtgcactgactgcgccacccggcccaagttgaagaagatgaagagccagacgggacaggtgggtgagaagcaatcgctgaagtgtgaggcagcagccggtaatccccagccttcctaccgttggttcaaggatggcaaggagctcaaccgcagccgagacattcgcatcaaatatggcaacggcagaaagaactcacgactacagttcaacaaggtgaaggtggaggacgctggggagtatgtctgcgaggccgagaacatcctggggaaggacaccgtccggggccggctttacgtcaacagcgtgagcaccaccctgtcatcctggtcggggcacgcccggaagtgcaacgagacagccaagtcctattgcgtcaatggaggcgtctgctactacatcgagggcatcaaccagctctcctgcaaatgtccaaatggattcttcggacagagatgtttggagaaactgcctttgcgattgtacatgccagatcctaagcaaagtgtcctgtgggatacaccggggacaggtgtcagcagttcgcaatggtcaacttctccaagcaccttggatttgaattaaaggaagccgaggagctgtaccagaagagggtcctgaccatcacgggcatctgcgtggctctgctggtcgtgggcatcgtctgtgtggtggcctactgcaagaccaaaaaacagcggaagcagatgcacaaccacctccggcagaacatgtgcccggcccatcagaaccggagcttggccaatgggcccagccacccccggctggacccagaggagatccagatggcagattatatttccaagaacgtgccagccacagaccatgtcatcaggagagaaactgagaccaccttctctgggagccactcctgttctccttctcaccactgctccacagccacacccacctccagccacagacacgagagccacacgtggagcctggaacgttctgagagcctgacttctgactcccagtcggggatcatgctatcatcagtgggtaccagcaaatgcaacagcccagcatgtgtggaggcccgggcaaggcgggcagcagcctacaacctggaggagcggcgcagggccaccgcgccaccctatcacgattccgtggactcccttcgcgactccccacacagcgagaggtcagttcctaccccctgacctattccccgcttagccagagggctggcaccactggcccaaggctgacccttagggcccctcagaaacactccaaagagcctcatctccatttttcatatgggaaaacaaggtcctagagaaggtgaaatggcctgctcagagccatcggcatgttaatgacagactgggactagagttgggccagtggaccctggtggacagtgaccatctaatttaattgtcctcccaggacacttttcacactagaaaaaggacattattaatagttacactggaacatcaagaacaaacaggcagccgggcgcggtggctcacacctgtaatcccagcacttgggaggccaaggcggatggatcacctgaggtcaggagtttgagactagtctggccaacatggtgaaacccccatctttactaaaaatacaaaaattagccaggcatggtggcacatgcctgtaatcacagctacttgggaggctgaggcaagagcatcccttcacctgggaggcggaggttgcagtgagctgagatggcgccactgcactccaacctcagcaacagagcaagactccctttac

SEQ ID NO: 114 - DNA, 2086 bp, Homo sapiens
tttgaggtatgttcttcagtgcctagtttgttgagggtttttatcatgaagggatgttggattttatcaaaggctttttcgcatctattgagataatcacatggtttttgtgtttaattctgtttgtgtggagaatcacatttattgatttgcgtatgttgaaccctatatatatgttttttgactggcttatttcattcagaatgtcctcacatttcatccatgttgtagcatatgccagaatttccttccattttaaggctgaatagtattccattgtatgtatataccacattgtgctgatccattgtctgttggactcttgggttgcttccatgttttaattattgtgaataatatgccgtgaacatgggtgttcaaatatctcttcaaaaccctgcatttaattcttatgaaaatatagccggaagtggaattgttggatcatatggtaatttcatttttaattttttgaggaactgctataccagtttccacagtggctatcccagtttacatgcccgcccacagtgcgcaggagtttcagtttctccacatcctctttagcgtttgttattttctgtttttttttcagcagtagccatcctaatggatatgggttggttcctgttttctatttggaactttaaaaaaaattaaagcaggtaatcggttctttcttttggtaatcatttctgagttagagtaggttaagcccaggtggggcacggtagctcatgcctgtcccaacactttgggaggctgaggatcacttgaggacaggagtttgaaaccagcctgggcaacatagcaagacccctgactacaaaaaaaaaaaaaaaaaagaacagctgcccatgatgtttttcctttgaccttggctgctaattttccaccttgtggatgatccaattaaacttaagttcagggatttcagcttcatgttttcagtgtaataattagttttatggctatatctgttaaatttgaaattttttttcacaacttctggtttcatttcattgtttagtttttttttcagccagctattaagaaaaaagcaatctatattcacactaatatgagactaatgaccctttaaccctcagaataatatacattttaaaataataagccaattctcttaattggtagaatttcatctgaacaaaatgagttgttaatttcgagaatgtggcgaaaatatttgaagtcaggcttattaatataagcaagctgtttctgctttagtgcttatttccgggattgggtctcttgaggcttcctgcttttctcctgaacctgtaggttctctaaatactactgataacttgctgaatatcttaaatcattgaattagaaagctttgtctcaagtttaataatttgcctgaggtcacacagctggttaatggttaacatacttctctgataaaggtcactagaggttcttatgaagatacttttaggtggcgtaacaaatgtgtttatgcatattcaagacactcttgtatccacaggttgcactgctgtgatccatcctcatctcctaaagatgcatcctgacttatctccacacttgcacactgaagaatgcaacgtcttgattaacttgcttaaggaatgtcacaaaaatcacaacattctgaaattttttggttattgtaatgatgttgatcgggagttgagaaaatgcctgaagaatgagtacgtagaaaacaggaccaagagcagggagcatggcattgcaatgcgaaagaaactttttaatcctccagaggaatccgaaaaataaattgtattttcactcgatgccttggctgagagaagacctaaagactctgggttgatacctgaaagaatcctgtcttatttggtctccataatcctttgaatggaaagtgacctgtgagagattgaaccatggagaaatatgaaaaccctggattctgagtatttgttgggcagggcgtttagtactgtctcccctttaccagcaaacctgacttcaccatgtttattccctttgcctacaaccagttaatatctgagtaacttatctccttcaataaaataatttaaataat

SEQ ID NO: 115 - DNA, 3517 bp, Homo sapiens
tttttaaggaaagacccatttaccccaatgcactgttatgcaatctgcaccccagtgtgatgaccacaccaagcacccaggggtctgagcctggactcgtgggtcactgcaagtgtttggcaggtgggacaaagaccgtgaaggcggcggcaggctttggttcctgcacgtctgagggtcccctgccaggccctgggaggcgctgcgtcaggagccccgtgacctttgatgacccgggaagccgaggctgtttgtgcctctcccacctctggaaacacctgggggttctggccacatgctctgttagttgagcatctctgtggaggtctccatccctggctgcgtgtagtgttgggtttcagagcaccagcaggtggggcagggtgccatgtgcccttgccgggtgccttcggtccaaatactgcagacgcgcagggctcgcctctgaggggggcgggcatttgagtcacagccggctgcaggaacaggctgccccgcactgaaggcagccaggccgggctggggcaggtcccgcagccaggctgctcctgcacgggagctcctcctcctcagcccatccgcggcctcctgccttcaccgcagctgctgccggcactaccaggctggcccagctctagggcaacaggggcctcttgtggcaaggggcgggacaagtaaagaggctggcttttgtcctgcgcttttccttcccaagctttgcaattctggggcacctgcaaactaaggctagtgtcacccaagggtctctgtgcttggtaactgatgtgagccacgtaccaggatttccccgttttctgagaaacccagcccagtgcccactcagcctccacctaccatgcgccacctgccatactccacggtcatgcttcacccgcgaagcctgatgagctagtcaccacccacatgactgatgggtaaactgaggcacaagagattcctcacgcacctatagttgtatggtctgcagtgaggtagccgatgccagagctgtgtcctccctccatagaagctaggagaaaggccagactgaagtgacctgctgaagcctttgtcttttgacattgaattccgtttgcccaccgccatcaagactgcttttaaggagcttctgcgacatgatctcttacaggaacctgaagggccgagaagtcctgctgtgtttggtgccatcatctcttactttgaacagttttttgaaactgttggaatttctctggcaaatcaacaggtaggtcctattattttaaatgcttaattctggaattttctccatgttgggacaataacctttacccttttaacttggaatagagcattatgatgccacactaatgtatttacctgtttaaaaacatgttactttcctggaaaaataaacacactcagagccaatacttattaattggaattgcacaattctacttctgcagttggcaaactctcgtgcgcagaaccagagatgagtccatctcagcaacagaatgtcgccagctctgcacacacgtttatgttcaaagactctcagaatgtgcagaagtcacaggcacagtaagagaacattttttcctgacccatttgagggcaagttggcgacctgagcccccttgcctggcacatgttttgtacggacaggacgggctccccgacaggcacgagtcacctgcaccttcccagcgaggctcaccctggctgtgcagtgaaggtggacgctgccaggcttctccacattccttctcttccgttgtaactcaagagcatttttgcaaagagacttggatcctatgaaaatgtcctcttccttatcaggctcacctgaaactcgtttattctatcaatacagatttgaggtttcctgccttattcttaaagtccccaccatcactttgtatgtggctgacagaggccccttggggctggcgctgtgtccctgaacatccctgtcattctttggacacccttgtagaattctcagcacaaggcgctctggctcttttggggtgtggctcggctgctgctgcctggacgggggctgccactctagaccagctgcccagcaccccgagggtcccgccgcttgggactggggcccaagcaggtgtgctgaaggcctggctctgggccaaacatgtctcgctggctctcaacagagaactatagtgtcttttccaagtttggctcatttgtatacctgttgatcacctggtagacttagttcccctttccagcagtccggcgtctgttgccaatcacataaaagtcgactggtgtgagatgacccaagtttttgcaatgtacatgttcatttttaggggtggctttccggagtctgttttgagtaagaaaagtgggatctggccaagctctgcctagcccttgtcaaagatatctcattcaccttcctctggccgcaaggcccaatgtctgggcccactctgggctcatatttctgtaataacaaaaactgtcttttatcatggaagcaataactgaggggtgtgtgaggtttaagtagtttgacaccaaggtcaaatgttgtgtctgtttcttattttacacacatggatttaacaaataggtacagctgccccttccacaccgccccaggatctgttctcagtgggaggacagcgcgaggccttctgcgcaaatcccgtcctcagcacctgaggctgtgaatctcagaccatttgccgaaacacacgtgtgcaagcgctcagtcgctgccccccagcctcatcctcaggttgctcctgatacctcggccacaattgcgtgaggtctggaagccagggagcgtttgtgttcagggcggggcggcatgcagcccccagccctttcttccaactcccgagtgaggatcactcagccttgcttggacgacagatgctcagagttgagtggagccttgcccagagcccagcgctcgcgggctgtacccatccctgccagacccagaaagaggcccagctgcagggaatcagggaagcccagggctgggtgggtgtcggcccagagcccaaccacggggtggggaggggggcatccacaatccacagtctccgggggacgtaaccgcgccctgctggcttcagtacgtttcaggagacggcagcgaggctaccttgcatggtgtggtggacgagctggtgcggttccggcagaaggtccggcagtttgcgctggccatgcccgaggccacgcgggacgcccggcggcagcagctcctagaaaggcagcccctgctggaagcatgcgacaccctgcgccggggcctgactgcccacggcatcaacatcaaggacagaagcagtacaacatccacgtgggaactgctggatcaaaggacaaaagaccaaaaatcagcgggctgaggatggagcacagccatgaacctgctcacgacaagacgcacccatgcttctcagggtcaaggctttatgttaaagcttcctgtcggggctgctaggtcagcattaaagtaaggcaaccaacagtg

SEQ ID NO: 116 - DNA, 1748 bp, Homo sapiens
gatgtctatgcgggcctggctcgaggcgagaaccaagatcccctgggggccgacgccttcctgccggcgctgaccgaggaactcatctggagcccggacattggggacgcgcagctggacgtagagtttcttatggagctcttagatccagatgagctgcggggagaggctgggtactacctgaccacgtggtttggggcgctgcaccacattgcccactaccagcccgaaacagaccgcgctccccgggggctcagctccgaggcccgcgcctccctgcaccagtggcaccgcaggcggacgctgcacagaaaggatcatcccagagcccaggtgactgcccatctggctgcaagtagaagggagggtgagacctggtgcccttctgacccagctcccacctctccccacaggccaacctgccctttaaggagccatgggcagaagagactgtgacagggaccagtgacaactaggggtttcacacccctccgttcatgcctgtaatcccaacattttgggaggccaaggtgggaggattgcttgagcccaggagtttgagaccagcctgggcaaaacagtgggacccccatctaccaaaaaaaaaaaaaaaaacaaaaattagccgggcgtggtggcgtactcctgtggtaccagctactcaggaggctttgcagttttagacaggcgtatcagagaaagcctcactgaggtgacatctgcagaaaggcctgaaggaggggaggggaagggaggagcagagtgggtattaggaagagcattccgagaagcaggatgagccagtgcaaaggcccagaggtaggctgttcccttttcctgggacccctccctcctccttgctgctcctaaaccacataggtcaggagtctggactgacccaggtacgtctggcatcttgcttgaggaacagggggttttgttttgttttgaaagaacgtctctgtctgttgcccaggctggagtgtagtggcatgatctcggctcactgcagccttaacctcctggctcaaacaagccccctgcctctgcctaccaagtagctgagactacaggcacctaccaccgtgcctgtctaatttttaaaattttttataaagatgaggtctctctttgttgcccaggctggtctcaaactcctaacctcaagcaatctgcccacgtcggcctcccaaggtgctgagattataggcgtgagccaccgtgcccaattgtgatcgtttttcccaaagaatgtatcacatgctaacaaaccatatatttatgtatttcattgttcatagtaactacaatttaaaaaactaaaaagaaacaagtgaggccgggtgcggttgctcatgcctgtaatcccagcactttgggaggccaaggtgggcagatcacctgaggtcgggagttcaagaccagcctgacaaacatggagaaacccgtctctactaaaaatacaaacttagccgggcatggtggcgcatgcctgtaatcccagctactccggaggctaaggcaggagaatggcttgaacccgggaggcgaagattgcggtgagcggagattgcgccattgcactccagcctgggcaacaagagtgaaacaccatctcaaaaataaataaataaataaaaagaaacaagtgaagttaacgttaataataatatatttgatttaacacaatgtatcccaaatattatcacttcaacatgtatccatattaaaaagttactgacatattt

SEQ ID NO: 117 - DNA, 2816 bp, Homo sapiens
ccgaggcgcgagggcgtcctaagcagtgggacttgggtagttgaaagaaagctgaaaaacagccattttgatccatgattttgaaaaaagggcctcatttcccaggtgaggcggatccccgctgcgtggtggggagcccaggggctggcgacaggaggtgcgcgtgtgcagcggccggcacaggggcctcgcgtttaggcgtggcccggggagtgccaggccagccggggccacacccggggccgcttgttccctgcccctcctcactgccaatcctcccgcatctgcccagcaccactgtcgccgctgcgggaagtgcttctgcgacaggtgctgcagccagaaggtgccgctgcggcgcatgtgctttgtggaccccgtgcggcagtgcgcggagtgcgccctggtgtccctcaaggaggcggagttctacgacaagcagctcaaagtgctcctgagcgatacttgtttctggatggagacagccactatgaaatcgaaattgtacacatttccaccgtgcagatcctcacagaaggcttccctcctggaggtaaatgccagcacgtcctttcctaagccaggagggtttggtgccatgcgtgggtgacaagaggagcatgcacttttgggatcaggcagccgccctgaggagtggggtctgctgggtttccaggacaatctgcctttcctcttttgcggggcgtgtatttactcagtggctttagaactcgccaggtgagtggagacttaaactgtaagacaacaaagggacatttgcctcagcatgtcataatgatttcctctgctctaaatgctctaacgtatcattcggtttattgttggattcaaaccaaggataaagccccaaatgcaataactgagatccccaaaaaggtctgaatggtggctcatcgggagccagcacttcagccctcctcctgcaggcgtctgtgcagactaaacccctggtgcatttcctggtgagctttggcccatcctgggcctctccactaaactctgctgacggggagctcgcatcccgttatctgcaaactgtgctgacagatgcgtgtgccgtaacccatgttgctttccttccgttctctcaccggctcttggttgctccttctcgccactgcctgcccaccttcttgccatagaaaaagacattcacgcttacaccagcctccgggggagccagcctgcctctgaaggtcagcctcttcctcctcaccggggctccccgcatgcagcgggcccgttcctcccctcgccacctggcttctgtccacggggtggtccatgccaaggttctttgtgaaacctgaattcacttactttggttgacttaagagagatgttggatctgataagtgggtttataaagcataaatgaagataccgcagcagatgtactttctcagttctgtctcagggggagggttacccagcaattgacagctctctgtcagtacctgccagccctgaacaggctgaggccagggggcgtgggggctcacctgcccttgggagcctctgccaacactgcccttccccccgaggcctgctgctccccagctcagtgtggcctcctgggacccctgactctcctggcacttctgtcagcctcctggatgatgaggtgagatgcccaggccagtgttctgtcctgagctcagggatgtgtgtggagccgggatggcatcaagctggttgccttgagcaggctgcaaggtatagatgcccaggtgcaaagggtagggtctggagaagcgggggtcaccccaggcacccctctctgcctgcctcctcctggggagcctgaggctcagatgaaggccagtgtttaggggcatcagatgaaggccagtgcctcaggaggccagggcaacacagcctcccggactgctctcccgggcagaccctccccagggcttctggcactgtgtcccccttgtggtggcttggggggtgcagtgagccccgctctgcccagtctcagtagagcccttcagaccccagcgccctgtcttccggtgggggtggggacaataggaacagtcccctgacctgaaggcagccaaggggccgcctgccagcctgggccctgtagggcaggccacacactcattctttcaaggccagatagtaaacctttgccagccacgtgtgctgtggtgaaggcggaggcggctgcagaagacagggtgacagacggccatggctatgatccagtggtgctttatcaggcaaatgcaggcggtaggcagagccatggtcgccctgctctagagcctaggcaggacgttacactgacaggcaaggttccccagtgttgggggtgggggtgcgtgccctaaccacagaaccgggcttatgaaagtgtggttctagaggcccggcatggtggcccacgcctgtaaccccagcactttgggagactgaggcgggcagatcacctgaggtcaggagttcgagaccagcctgggcaacatggtgaaaccctgtctgtactaaaaatacaaaaattagctgggtgtggtggtgggtgcctgtagtcccagctactcgggaggctgaggcaggagaatcgcttgaacccaggaggcggaggttgcagtgagctgagatggcaccactgcactccagcctgggcaacagagactcaaaaaataattaaaataaagccaggcacggtggctcatgcctataatcctagcactttgggaggttaaggcgggcagatcacctgaggttgggagttcgaaaccagcctgaccatcatggagaaaccccgtctctactaacaatac

SEQ ID NO: 118 - DNA, 3597 bp, Homo sapiens
tggtcatggacccccactgttcctagatcccagtactgtgctgttctttgtagatgccctacacccaggcctcagcttaatagtctctttattacactttcttccaattatcccaatctgaatgtaccatctgttccttgccagaactcgggctgctgtcaagtcttgggcatctgtgaactggccatcttggtcttatttgggttttacggggctggttcctacatcacagtgggaaaactgtagggcagaaacaccagttgtcaccgtggccaacacggagaaacccgcctctactaaaaatacaaaaattagctgggcgtggtggcaggcgcctgtaatcccagctactcaggaggctgaggcaagagaatcacttgaacctgggaggcgggggttgcagtgagctgagatcgtgccatcccactccagcctgggaggcgagacttcgactcaaaaaaaaaaaataccatagagcaccactaagaagccattagctttttgttacttcgttacttcgttactttaccgatactttttacataaagccaacaagactttcacaaaactagcatggccattgacagaagtcaacaaaagccagatgacagcctaacattgaattatcgtaatgttattttaatatctaacacttactgaacgaatatctaccattactatgttaaccatattgcctgacttatctcattcagtaatttaatcaggtggatacttttattattcccccatatttcagatgaagagaatgagacttaagggttacatgatgtgcccaagatcatactgtcagtgactactcagcaatactgccttcctacaaaatcccgtagatgaaaataacacgaagcctccaaaattcacttaattaccctatacctaatgagcctcccctgtgtgcagagtcacctgtctctctcatcatccacttctgagcagcaggttgctgaatatgcagaggtggtagctaagattacaatttcaagtgcttgaaaacaactgtaagtcaaactgcaaatgcccacttcaattagaagggtccatatcacatggtacacctcaggtccttgaatcttaaagctgggacagactttggtgatcatcccatccaaccgctcattttaaaaatgaaataaatgagtccaagtaattgtaagcaacttgcccaggttacactgttggtcagtgacagctacctgggtttagcccccacagctcctgactctcaactctgtagtctctcatttcacctggtgccatacatctttacctgaatcattttgaagatgaagacttttaaatatggaaaatcagatggtaccatttaatttttcttttgcattaatagcaatgttttggctcaggaatcatttaataggaatcataaaatgagagcaatatatcatcgctgccttaaaatgcagtaactatggttcatttggactgtgcttctgaaggtaatggaagtaagtgaatttttacatcgaaaattccaacctcagcaatttgtcactttgctttttcccatctaggctgcatgatgagattattcatgaccacttttatcactgcagggaattttgcccttggatgtgttctgagtggagctgacatctctgcagcatcttctctaggacccttctctctgacatagcagtggcttaactcttcatctgtctctcctccatccagcatggcaccacactcctgatggttgctgcctacgctggccacatagactgtgtgagggaactggttctgcaaggagcagacatcaatctccagagagaggacgggggcaccgccctgttggctgccagtcagtacgggcacatgcaggtggtggagaccttgctgaagcacggagcaaacatccatgaccaactttatgatggagccactgccctcttcctagctgcccaaggtggttacttggatgttattcgattactgctggcttcaggagcaaaagtcaaccagccaaggacgggacagcgcccctgtggatcgcgtcccagatgggccacagcgaggtggtgcgggtgttgctgctgcgcggagccgaccgcgacgctgcgcggaacgatggcacaacagcattattgaaagcagccaacaaagggtataatgatgtcataaaagagttgcttaaattctcacccactcttggtattttgaagaatgggacatcagcgctccatgcagcagtgctcagtggaaacattaaaacagttgcgctgctcctagaagcaggggcagacccatccctgagaaacaaggccaatgaacttccggcagaactaaccaaaaatgaacgtatattgcgtctcctgagaagtaaagaaggtcccagaaagagctaacttagctccatatttgacagaaagatagaaagcttaaccacattgtccaaaaagaaattgcatttcaagcagtgttggaaattcttttatgaaaaaaaaagatgcccagaatgcccatcctgtgggtccctgacaaagaagagctacgctctgtgcacgaagtcaaaaaccaaacagctcagggaccctcttgccccttcaccatggacttctcatggtgtcctgtaactcatctcccggggggcctggcatgttcacagattccacagaaacccattttcaacaatgctaacttggacctgtcagttaaactctaaggtggacagggttctcagtactaagcaaggagacagaatgctttgttcctttaaaagactgaaaagctgaccttcaatggattgaggcacttttgcttttgtgttaaatgtagatgtgctaaaatatatagatctatcatattttacctacatatgtatgtcattccagtataaaacattctcctctacccaagaaccatagccatgattgttataaatcaatgaagtgtaaacatacattattaaaaaaccacttctgacattccattatgtgctattcaaagatggactattgaactatagaaaagacagactgtgcatttgttcgttgatcctcatcttattcctgacatgtaaaaatcaattttacgtagagtcaacattgtaggtaggttaaaataccagtggcaaatttggaaattcagaaacttataaaccacgagaaatatataggcttgtctctttggtcttttattttggctctattgttgggaatctatttcctattccataagtaagtatacctaacatgctgtggaatcttgagtttccaacaccgtgctgcttgatagaatgactttgaggtccttggataaaatgtgatatatgcaagtacagtatgttgctattactattgcaggaatataaataataaaagactgttattagcacttagtaagtcttcatctatgcatgtttttgagttgactgattccaagaatgaaatatgaggtttattgaattattcctttgaaagggatcaaaacttatattcaatgcactttataattaatggtgtctaaatgcctcagtcagtgcctaactgcacatacaaaaataaaaccttctttctgtaatctaccaaaataaacgcaatggtatttttgctatttaaacac

SEQ ID NO: 119 - DNA, 3808 bp, Homo sapiens
tttttaatcccaataatgaagttacatagaaaatacttaatggtgtgtgaagagaatgataatatgaaaatacagacagtggctggtattttggcatctttttcttcagacaagctctttaaactcgcatatgttattcacacatgcctctttaacaattatgacaaaaatattcttcctggcttgcattctgtcacaatctgtgcagtatatagggcttaaggtattgtggaagagcttatgtagatcaatcatctgtgttaaaaaaaaaaaaaaacccaaaaaacaaaaaaaaaaaacctttgacctcagcagacacatagaggcacaattaactgctagttttgcaggaatatggttttacttcctgttcagatttataatagactctacctccattagcttagactgtttttttgtcattgttggtcaggttagtatttcgattaatagtatcctgagtcttaactcttcatttcacactagttttgacactttagttgccctgtctttcatacttcttgtttttgttttgagacagagtctggccctgccgctcaggctggagtgcagtggcacgatcacggcacactgcagcctctacctcctgggcccaagcagtgctctcgactcaggcatgcccaactcagtagctgggactacaagtctcactatattgcccgggttggtcttgaacccctgagcttaaatgatccttctgccatggtccgcaaagtgttggtattacaggagtgagccaccatgcccaacctccttcatgcttcatagcagtcatctgttagttgtaatatctttttgcactcttgaagttaatgaaaacagataaatgattgtatcaagactgtagtccggaaataaagcagacttagaaggcagacgtctacatacaacatttcccccaaatgtctattttgcctttttattatttttgttactaattggccatctgttaaataatcacaattgttacagcagtatgttctttattgactttcagaagagggattcaggacatcttaattaaagaacagtttcaacggcacaagaaatttgtcaaaagccacatataaatgaaaaacaagcataaaaatacaacctttttaatactaaaatagttgagctctcctttcattcctaaaagctacaggataaagtctagaagaacagctgagtgtacagtagcaagacaagtttaattgcctttattcaattgtagtccgcaaaactttggtttttctaaggtaagccagacataatgtgtttaagtgctcctcctaaccctcatctttcccctccaccccaagcctctagttctgttgcaggggctgttggcatgaccacctctggggagagtgaatcagatgattccgagatgggacgtttgcaaggtaaaaacagttattgagcctataagaaaccattaccatgagctacctgttaataccattctttattgaaattaatttagttaaattcatttgaccataatctagcagtgcctgcacctccaagaaaaaaaaatttttagtagcaatttcatgatttggaattggaagatgagctgtccgcctcttcgtgtttactgtttcactagatgaagccttacatatttatttttgtttaaaatttttaaattgtggttgcatgtgtagctggtttcagtaataaataagttaaaaatcttgaaaaatgggtaccttaatatatttttgtctggtatccagtagcattatgaatgcatttaacccacttaggcctagtgttccattattggaacactaagaatgtgggagttatttatatcctactgctcaaggccatcaccaaggtcggacttttcactcatgcaaaaattcaaaaaattgcaacctgcagcataaatgggttttaataaggcgtttggccatggttttttgtcttcttgatcatgtttcaaaatgaatgtatagtgtatacacaaattgtagggtttttttaatgttacaaatgcttttacaaaagcagcctaatactatgtatggatgggtatgtatttttatctcatttgatttataacagatctcagtgtgaggcttacaataaatgtattatttataaatcattttttattgcttttaaattcctgagggaacatacaagtatctctaggactcggactctcaggaacacatagtttttgtttgtttgattgttttgagaccgaatctcactctgttgcccaggctggagtgcaatggcacgatctcagctcactgcaaactccacctcccgtgttcaaatgattctcctgcttcatcctcctgagtagctagaattacaggtgcctgccactgcacctggctaatttttgtatttttagtagaggcgggctttcatcatgttggccaggctggtcttgagctcctgacctcaggtgatcctcccgtctcggcctcccaaagtgctgggattacaggtgtgagccactatgcctggcctgttttgttttgttttcactttttggaactaataaaaatcatactgttttcatatggttttataggttctgatgaccaatatctgattgggaaataatgtcatacagaaaacagagcaagggtgcttaacatattagctcttcaaaatatcaaaatatttaccttagatttttcttgaaatatttacacattcctgctggcactgatttaatatattagggtggtcttgaaagtttgtagcttctcttaaaagtccagaaagcaaagtaacattgactgaatcagttaagcgagatgaatcagttacttgaaatttttagatacatcagttgcatgaagtcatcttagttgttcactctgcccttcttttttctttagctttgttagaggcaaggggtcttccccctcacctatttggtcctcttggtcctcggatgtcacagcttttccatagaacaattggaagtggagctagtaagtaaaaatgttccttccctgaaatccctcaataattagccaactgctattgttacttgtaacctattgatgtaagtattaagaagtttttcatcaactttaacccatttttaaaaataaggctgtgtacaatcacaccttaaatacagctttcattgctgaattatccagattttgtagcgagattgattctgtttgaacaaaataagaataaagaatctcaaacaattacattgataattatggcacctgatggcatgttttgcatagatttgaatcttgagtttgtcataatgatgtatttgtcaaggtgagaggataaaatattaaacagtttgctagctgaattttttataactttaaatatttggacataaggatgttggttttcatgtgtactttttatatatatatatattttttgagatggagtcttgctctgtcgtccaggcgggagtgcagtggcgtgatctcagcttactgcaacctctgcctctcgggtccagtcctcccacctcagcctcctgagtagctgggattacaggtgtgtgccatcaagcccggctaatttttgtatttttagtagagatggggtttcactatgttggatggctgatctcgatctcctgacctcaggtgatccgcccaccttggcctcccaaagtgctgggattacaggcatgagccactgtgcctggcctgtttccttgaattggatcaaaatatgatctatacattacaatcaggtaatgtttcttacctgatttttgtttgtttgtttgtttttaagagaaatttgattttatttatcactggggagaagcctggaaagg

SEQ ID NO: 120 - DNA, 3667 bp, Homo sapiens
gtatgggattttggtgctttctcagggtctctccccacactcactcttctcacccatatcccacagactcactcatggagacccccttgtcaatatcccctctacctttactcctttgccctttcccaattcatcttctaccacctggattcttttccattcatgaacttcattcagcccttccaaagcccaagatttgcattcccttgacagggaggaaaggcaatggtaggaacctctggtggtctgggtgtctatgtgcctggtgaccagggctggatttttattactctgagcccactgctagtgaggagccttgaggggtggggacaggttgctgagtgattttgaacgttgacaccagtgtggagccagtgtgggtgtggggagcagtgccttcctcaggtcccagctggtcctgatatgccacgtagtggatggcatctgtcttggtccatgggcttggtgggaacatgcttctgcttgtgtgttttccatacctgagggctgacgtagcttaaaccacagggcatcatgccaaacactcactgctgggcaggtttatttctggggatgtcagggtactggggtgtaggcactaagcaggatagagttagggtgtctggctagtaaggggttctgaacgcctctggggctgtgagttttcatctcaaagtctgttccagagaaaggaaagtagtatagaggtgatttttagagaagctgagaccatgaaaacaagcctaatcccatccagaaactggggtaaagtctgaaagttcgttttcttcttcctccctgaataattgttccagaagggatgctaactctgccagagctacaggcagatttttgggctttggaagtggaagctgaggcctggggaaggctgggtaaggaatgctggggcaatctcagacagtaggcaggtgcttggcatgaatgagaagtgactttcctggagtccctcagtagaggatgagatagcagggattaggccacagtctcagatcctgatcttttttcttcctaggaaagcatacataacttgtgtctgcagaatcagtgtgggatgattttgctggcccaaggcttcagcgagagggagaagagaggtcactacagccctcctgtgggtaaaagcagctctcttataaacctgcctccatgcagtggggtgggggtaagggtgggtgacagcaaagaggttgaggaacctccctgggtttggggagtgagagcttccatgttcccttaatgtcctaggttaattcataaggcatctgagtcctgggtctcacccagcctcacagagagaaaaactgtccctgagggtgtcccctcccactcaaaggtagaaagagattgagccaggaactgccctcatatcctctgctctgccccttcccttccctttcctctgcccctcccacctaaagctgtttggggccctttctcagagccctgggtggtggcaggcagggaggagtcccaagatcctggtggccctgagccccatgctatggttgccagatttggcaaataaaaatgcaggatgtccggttacatttgaatttcagttcaacaacaaacaattattaagtgtaaatatgtcctaggcaaatagttgggacatatactaaaaaataatttgttgtttatctgaaattcaagtgtaactggtcatcctgcattgtgtctgggaaccctaccctatgacttttccccctctccctttggtcccaaggggccaggaaccccaaggatttgacttaaccagttttttgaactgcaatattgagaaggggacactgtgacttgaagacacatgaattactttattttttaagcaacaacaaaataagaaccttctgaagccatttgagcctcatctgcccccatccgtgtatatttaattatatataaaagaagataattacctagaaacatatgaacagaatcttgtttaatcaagatgcatgtctataactttctgtaaatagccgcatggcaatgctgagagtccccttgatccccaacctcaaacccattttacagaactggttgaggctgctcctttgattttatgtcgtgtaaagtctttgttccccagccccacccctgcctcctcccatcgggaaaccccccatgggagtcatcagtgggcgggagtcggtgcctgctccagtccagccctgccttgggagatgctggaggaccctgtcgccctgaaggcctgtttgctgcacatctgcctgcagagccaaacctcagggcccggtgcagtgtccagcctggtatctggcatcccagtagcttccatgttctgtgtatgtgtgtggtgtgccccttcctcccactgtttgaattcactgaaaagccataaagggggcctcctgctggagatttggcctcccttggctcctcccaggagcccccatgtctctccaactggctccccacagaccacttctgaagggctcacctgttgtcactccctcctgctccctcagtcccgtgtcatgagaatggacggtgtccagggcttccggtggggtctcaggagatgcccatgctggccctgcccgagctggctttctcggcctgggttcacagttcagctccatctctacgctgggcgaggagcagacagcagtgggactccatggttctggatacctttcctggggtccctgtggaggcaaccaggattttcaggagcagccagtcagcagctcagccagggatgacagaaccatccctgcttactcacctctgtagtgtgagggtctgtgggtggtgatggaggagggactcagggagaggccggtgaatacaggggctgacgctcttccctcgtgcatcctcctgcctgcggcccctggccccatgggcacctgagggcagtactgcatgggaagagcccaggatgcctcaggcctggcaactgtgacaagtatgaggaaggagagagaacgggaggggaatcaggcagggcgcattcgaggaggccagaggtggcgaggcaggcttgccctgcacaaaccacaacagaagttgcacacagaagtcccagggacctttgtgctgggaactgaaagagtggggaaggtggaggggaccatttcagagcaggctggaatcaggtgcttggaccagtgaagacatgtcttgcttcctccagctctctctggggccctcccactctccacacccacagcagagacaaattgaggcaagagttgagagagcatctgtctggtgaggtgatgggagcagtgtgcatggggcaccaggagttcctccatcccacctgccttagcgatcaggactttaggggggcctcttcaaagatagtgacccttctgccctgactcctgcccatctaaggacttgatttgctgctttctgaaaaccctggggctgaaaacttcaaaatcagggcctggcagagcctagcttcgccaaggtcagcccaccaggagccctgccttcgtctccataggaaggacacatgtacagcccttgcccccggccctctcattcccacttctgcttggcaatgctctccatctcccttatgtggactcttgttcttgtctgatctcttgtcaaattgttattttgtaatgaactgcgtctccttattaaagaaatgagctgaaag

SEQ ID NO: 121 - DNA, 3734 bp, Homo sapiens
tttatttgagacagggtcttactttgtcacccaggctggaatgcaatggcaagatcatggctcactgcagcgtcgacctcccaggctcaagtgatcctcccatctcagcctccccagtagctgggaccacaagcatgtgccaccacacctggctaattttttgtattttttgtagagacagggttttgccatgttggccaggctggtcttgaactcctaggctcaagcaattcgcctgcctcggtctcccacagtgctgggattacaggcatgagtcactttgcctggcctctttcctgagatgcatggtgcttatgataagcacacattatgtctaggtccctgcttcaagtgtggcactttggacacatgcttcccacattccgattttgtgccaaaacctatgagatgatcgcaatgtgggaatcatggatggctgtggaaaatcctaacacattcatagtagacaggcagaatcatggaatgaaaaggcatggcgttcagactgagggagatgtgactatgaatccctgttgtgcccccctttctttctctccacagaaatggcacagggtgaagcccagtggtttcaagaggcaaagaatctgaatgagcagctgagagcagcttataccagcgccagtttccgccacatgtctttgcttgatatctcttccgatctggccacggaccacttgctgggctgtgatctgtctattgcttcaaaacacatcagcaaacctgtgcaagaacctctggtgctgcctgaggtctttggcaacttgaactctgtcatgtgtgtggagggtgaagctggaagtggaaagacggtcctcctgaagaaaatagcttttctgtgggcatctggatgctgtcccctgttaaacaggttccagctggttttctacctctcccttagttccaccagaccagacgaggggctggccagtatcatctgtgaccagctcctagagaaagaaggatctgttactgaaatgtgcatgaggaacattatccagcagttaaagaatcaggtcttattccttttagatgactacaaagaaatatgttcaatccctcaagtcataggaaaactgattcaaaaaaaccacttatcccggacctgcctattgattgctgtccgtacaaacagggccagggacatccgccgatacctagagaccattctagagatcaaagcatttcccttttataatactgtctgtatattacggaagctcttttcacataatatgactcgtctgcgaaagtttatggtttactttggaaagaaccaaagtttgcagaagatacagaaaactcctctctttgtggcggcgatctgtgctcattggtttcagtatccttttgacccatcctttgatgatgtggctgttttcaagtcctatatggaacgcctttccttaaggaacaaagcgacagctgaaattctcaaagcaactgtgtcctcctgtggtgagctggccttgaaagggtttttttcatgttgctttgagtttaatgatgatgatctcgcagaagcaggggttgatgaagatgaagatctaaccatgtgcttgatgagcaaatttacagcccagagactaagaccattctaccggtttttaagtcctgccttccaagaatttcttgcggggatgaggctgattgaactcctggattcagataggcaggaacatcaagatttgggactgtatcatttgaaacaaatcaactcacccattatgactgtaagcgcctacaacaattttttgaactatgtctccagcctcccttcaacaaaagcagggcccaaaattgtgtctcatttgctccatttagtggataacaaagagtcattggagaatatatctgaaaatgatgactacttaaagcaccagccagaaatttcactgcagatgcagttacttaggggattgtggcaaatttgtccacaagcttacttttcaatggtttcagaacatttactggttcttgccctgaaaactgcttatcaaagcaacactgttgctgcgtgttctccatttgttttgcaattccttcaagggagaacactgactttgggtgcgcttaacttacagtactttttcgaccacccagaaagcttgtcattgttgaggagcatccacttcccaatacgaggaaataagacatcacccagagcacatttttcagttctggaaacatgttttgacaaatcacaggtgccaactatagatcaggactatgcttctgcctttgaacctatgaatgaatgggagcgaaatttagctgaaaaagaggataatgtaaagagctatatggatatgcagcgcagggcatcaccagaccttagtactggctattggaaactttctccaaagcagtacaagattccctgtctagaagtcgatgtgaatgatattgatgttgtaggccaggatatgcttgagattctaatgacagttttctcagcttcacagcgcatcgaactccatttaaaccacagcagaggctttatagaaagcatccgcccagctcttgagctgtctaaggcctctgtcaccaagtgctccataagcaagttggaactcagcgcagccgaacaggaactgcttctcaccctgccttccctggaatctcttgaagtctcagggacaatccagtcacaagaccaaatctttcctaatctggataagttcctgtgcctgaaagaactgtctgtggatctggagggcaatataaatgttttttcagtcattcctgaagaatttccaaacttccaccatatggagaaattattgatccaaatttcagctgagtatgatccttccaaactagtaaaattaattcaaaattctccaaaccttcatgttttccatctgaagtgtaacttcttttcggattttgggtctctcatgactatgcttgtttcctgtaagaaactcacagaaattaagttttcggattcattttttcaagccgtcccatttgttgccagtttgccaaattttatttctctgaagatattaaatcttgaaggccagcaatttcctgatgaggaaacatcagaaaaatttgcctacattttaggttctcttagtaacctggaagaattgatccttcctactggggatggaatttatcgagtggccaaactgatcatccagcagtgtcagcagcttcattgtctccgagtcctctcatttttcaagactttgaatgatgacagcgtggtggaaattgccaaagtagcaatcagtggaggtttccagaaacttgagaacctaaagctttcaatcaatcacaagattacagaggaaggatacagaaatttctttcaagcactggacaacatgccaaacttgcaggagttggacatctccaggcatttcacagagtgtatcaaagctcaggccacaacagtcaagtctttgagtcaatgtgtgttacgactaccaaggctcattagactgaacatgttaagttggctcttggatgcagatgatattgcattgcttaatgtcatgaaagaaagacatcctcaatctaagtacttaactattctccagaaatggatactgccgttctctccaatcattcagaaataaaagattcagctaaaaactgctggatcaataatttgtcttggggcatattgaggatgtaaaaaaagttgttgattaatgctaaaaaccaaattatccaaaattattttattaaatattgcatac

SEQ ID NO: 122 - DNA, 3134 bp, Homo sapiens
gaccgcgctccgttaacggaagaaacaaaatggcggctgaaggcgatccgcagtggggccccagccattcggattgagccttctccctccaaccgcttccgcaggccagccccctcctgccctgcccctctggcctccccacctggccccggccgcccccactgcgcccgccccttcccagccgctttcccttctccctctgcctcggctccaacatgaggggccggcggggcaggccgacgaagcagtccgcggctccctctgcggagcgctgcgccccggccctgccgccgccgctgctgcccacgtccggacccatccggggttccgctcgcggcaacgcggtagcagccggggcaggtgggccaccgccaggctgaggcgcccaagacacggctgagctcgcccaggatgggcagcagtagccggagaaagccgccgccgccggccccaccccagcaccagcgccccggccggggggaggcgggggcagccacctggcccggacggctgcggtccggagggctgtcaacaaagtggtgtaggaggacgccagttactgcacggaaagcagcgtcaggagccatagtacctacagcagcactccagaaatttccaaggaaactatatttcttacattgatggaaatgtatggaaagcatacagttggaccgagaaactaattctcagagaaaataacttgactgaattacacaaggattcatttgaaggcctgctatccctccagtatttagatttatcctgcaataaaatacagtctattgaaagacatacatttgaaccactaccatttttgaagtttataaatcttagttgcaatgtaattacagaactcagctttggaacatttcaggcctggcacggaatgcagtttttacataagttaattctcaatcacaatcctctgacaactgttgaagatccgtatctctttaaattgccagcattaaaatatctagacatgggaacaacgctagtcccacttacaacacttaagaacattctcatgatgactgttgaactggaaaaactgatcttacctagccatatggcctgctgcctctgccaatttaaaaacagcattgaggctgtctgcaagacagtcaagctgcattgcaacagtgcatgtctgacaaacaccacacattgtcctgaagaagcatcggtagggaatccagaaggagcgttcatgaaggtgttacaagcccggaagaactacacaagcactgagctgattgttgagccagaggagccctcagacagcagtggcatcaacttgtcaggctttgggagtgagcagctagacaccaatgacgagagtgattttatcagtacactaagttacatcttgccttatttctcagcggtaaacctagatgtgaaatcactgttactaccgttaattaaactgccaaccacaggaaacagcctggcaaagattcaaactgtaggccaaaaccggcagagagtgaagagagtcctcatgggcccaaggagcatccagaaaaggcacttcaaagaggtaggaaggcagagcatcaggagggaacagggtgcccaggcatctgtggagaacgctgccgaagaaaaaaggctcgggagtccagccccaacggaggaggaggagagtgaagccctgccataggaggagaacacagcccacctcaggcctcctgcaaaaatacatagaataaacaacaacagttactaaatgaatgaaaattgtgattccgatgaagcctgccagagaaaaaaagcattttttaaaagaggaaataaggtgatatctgattagggcaaacatgatgcagacaagaaatgcaccggttcagaggagggaaggtcaggccgcctggggagagtccatgaaaaagatggaacgtgccagatgctgtacctggtgctgggaaagagttgactaggccagcatccctttcctcaaagggggggctcctagactggggggagggctggacatctgaatacatcctgaggagacagtgtgggacagcatggtggcagtggaaccagccgtggttctgctcttggtcggctggaaaggagtagatgtaagggatggtttagaagaagggaagtggaagaaaagttttctgagctgacaagaggaaggaaaggccgcctagaaggacactaaaaaggcaagagaagccctaagcagagtgagcaccagactccacaggttaagggctcagtcacacaggaccatccccatgtcagaccccaggtgcaaggccaagcatcacctatgcatctgaccaactggctgtaaattggaggtccccacaactccctcctcaggtttgaacatttgctagaacagctcatggaacccaggaaaacagttttcttactagtgctgatttattacaaaggatattttaaaggacacaaatgatgaagccagttgaaaagatacacagggtgaggtttggaagggtccttgtggagttggggtgcaccactctcctggaacatggatgtgttcgccaacccgaaagctctccaagtcctgtcttttaaggagttttctggaggctttatcacataggcatgattgagctccagctctactccccacgccagaggatggggaatggggctgacagcacaacgcttccaaccataggtctttttggtgaccagtccccaaataaggagcccaccaagagtcacctcatgagaacaaaggacgcttctatcacccagaaaattccaagggatttaggagctctgtgtcaggaaccaggtttaaggaccaaatgttagaacaaaagatgtgcaaccataaaaaacagcgagatcatgtcttttgcaggaacacagatggagctagaggccattatcctcagcaaactaagacaggaacagaaaaccaaatactgtatgttcttttaagtgggagcaaaatgatgagaactcataaacaacagacactgggccctacctgagggtggagggtgggaggagggagaggagcagaaaaaactattgggtactaggcttggtacctgggtgatgaaataatctgtacaacaaacccccatgacacaagtttagctatataacgaacgtgcatatgtaccccctaacct

SEQ ID NO: 123 - DNA, 3638 bp, Homo sapiens
gttaaaaggcataaggtgggccaggatctcttagctcagctagaagcagcaaattctctcacacccagcagtgaacttaccagccagagacagaatgatctcagtgatgcagagatagtgtctctcttctctgatgtacctgacagtacttctgctgcattgctggacacagcattggtgaactctggaatcttgactattgatgtggcttctgtgagctcgactctggcagggcacctccctgctaataataataattccgtagggcaggctgtggaccctccgtccttgatggccaccagcgaccctcctcaaagtctggatacctctctcttttttggaacggtggccatgaaaaactccagtccagagcctcaggctttgacacccagcagtaagctaacagtggacacagatgctctgactccttcgagcaccctttgtgaaaacagtgtctcagaactactgacaccaaccaaagcggagtggaacgtacatcctgactctgacttctttggacaggagggagaaacccagtttggattccccaatgcagcaggaaaccatggttctcagaaagaaacagatcttatcactgtgactggcagctcatttttggtatgaaccaactctattcattcctcatcatgtggcttacttttattacagtcaattttgaggatattctggactaaatatttaagtgcagtcatttctttttggtttgcaaaaggagcacagccctggactacaagtttggagatttaaattctgatcttgagtttggaactgacaagttgtgtgaccctgagcaagtcagttaacctatctgagccttaatttccttatttataaattgaggtggtttgaatagattgcttttaaggtctttctgctctgtgattccttgataatacatttctttccttgaaaaatatgaggacgtttttcagtgatgtggcatgcgttttttttaactgcccccccagccctgacatgttctttttttggcaaacatacataatgttacatcatactatgatgaacatccatgtacttttcactcaatttcagcaattatgaatccatgaacaatcttttttaacttagcctcactcactccccatgttctagtattattttgtaacaaatagcagacatctgatcattttatccataaatattctttatatatctctgaaagctatgggatgatatggaaaaaaatgataattccattatcgcaagtgatatttacagtaattctttaatatcagtaaatatccagtgagggttcaaacttccaattgcctcataaatgctacttgttttattatttttaattagtagaatcccgtaaatctcctaagtgtcttcttaatccgtatgtttccctttcatctttctttttttccttgcgattttgtttatgaaatgaggttgtttcacatgtagcatttgccacaatttaagttttgctaattgcatccctatggtaatgtttgctttcctctatcctctgtttctttaatttgctagttatgtctagagacttgatgagattgaaacatggcttttggcatgaatgtttcataggttatgttgtgttcatttagtaggtggcgcataatctgtggttttctctctttttgtggtattagcagctgctgcagataaatgcattaattcatgatgcttctgatatgatgagtcatctttgtagagttactaagcattagcaaaggaggaaatgctatgtaatagaaatattattcaatgccaaaatattttcttaaatagtcatagaactaacaagaaaaaatagacagcaaaaaaatgtgttggctgttctcactgtttatcttcctaacttcttttgatgatggaaggcagttttgtggaaattgccagccaggactttgacatgaaacagacccagggctaaattttggctctgtggtgttggataagtggccttgaataaattagttattaagcttcagttttctagcttttaactgattataacaatgcacacacatacctgacacactgttaaattttcttctcttcctgtttcttatgttaaggaaagatactctgtgttttggcatatgttggtgaatttgtaccatttttatcctctcagtccttccttttataagacaataattggagtagtttaatcttattcatgtgcagataaaagaggtttatgaagtttagggtgaagtaggcaagggaatctgtttactccctcttccctctactgaataattttccctctactgaataattttccctctaagaattgctgtgggtaataccaggagtggggacattgcccacatgcataagagcgtatctctccattcgatcagtttgtcaccgtctttgctctgttttgaaagtcaggcttctctgtgactgtgaagcctgctgttccctgaaaatctgataatggagcagtggaggtttttttctttctgtgctctgtagatctcattgtttgcacttgtaatttcccagagttgaaaggaaagattgaactggaatattgtgtaaactatctgtcttacattagtgtagcattttgcaatttggggaacatcttcacaatttgtgtctcgttgttcagaacaaccctgtgaagtagttttggcaatgtctgtgttacatttcatgtaatttagccaactcccattccaactaggctttggctaaatctgacaattttatatatagcttaaaacaaagaatatacattcttttcacccctcccagtctacccatccagccttcatgattcattcctgtgtcaaggttagtcgctgtttcccatttgaattggtttcttttatggtcagtttactttcttccctctcccctccctttcctgcacatccccatccttgctatgcctttctgtcctcttttataatggatatatctttttcctgccattatccctcagacattctcctcatggcacattttcttcaaatgctaacatttactgagtgtacattgaagttctgtgcatacaggaagaagttattttctgagcttagataatactatgtgtatatgtgattaaaatgaagattattttctaaagccttcaaattagaagtggatttctgtttcattacttccgttttaaaagtttttgccagagagttttgctaaatactctcttatttgctctagtgtactagtccagtagtgtttgcatgtggatgtctgtggatgacagttattgtagcactttggcagtgcactaaaattttgccactatgaaatgtttctttattgtgtgtgcgtgtgtgttttgaaatacgcacacagccacacccacatatatattaaaagtggttgtattcatttagtgaaaaacaaaaagtagatgtacttctgtaaatcagataaatgcttggaatttgattgtctacccaatcaacagttttccctctttgctctggaaatatttgtactcatatagcatatttcaaaaatgttgtcattcattaaggcctcttaaatagaccactattttttgtgtctggcagatgagtatgtcaaggattgagatgaacacataagtcttggaaattaaataaatttataaacataaagat

SEQ ID NO: 124 - DNA, 3862 bp, Homo sapiens
ttggtttcatgaacggggccacatatttcgggaagcactcgggcattgtcaccagctatggcaagtgtcgctggtgtagtagcctctccagcatgggcggtgctggggctttacagaggaggctccggaagcctgttctggcaccactgggttcttgacctataatctatgctgagtactgaagattttcctatctactttccttccttctgtatgttcataatgccccaacaggctgtcattgcagtagacagggctttccgggacttagagctccgcttcacacatctggtatactgccctgttggcttgaacctctgaagagaggcagggtaggaacggtgactgctgtaaaggcacagacctgcacggccgggcgatacagactgagcaaagaaaagagtacccgttgaaggggtgtccactcttttggcttccctgggccacactggaagaagaagaattgtcttgggccacacatgaaatacactaacactaatgatagctgatgagcttaaaaaaaaaacacaaaatgttttaagaaagtttatgaatttgtgttgggctgcattcaaagccatcctgggccgcctgtagcccatgagctgtgggttgaacaagtttgcattagaaagtgaagaagtgggggcaagcccagtgtcatggcttgacactggaagccagtggaaggtgcccaggaagagttgtggggaatgtccttagactggcatcacacacccacgtgggatggaaggtgtcttccttttgtctcactcacggtggccctggccatctcctgccagcggtgctgaaacagggcctcctgcagagactgcatggctggtgactggccctggtgtcttgcagactatgatgcagtgctcacggaggctggagattacacagaaaaatatctgaagcttcaaaaactctttcaatctgtctcaggtactcagcacccatttaacttacgggccagccctcctcatgtggagtctctgttctgtggaaaagtgaggaaggcgtgggtctcccttgtgggcagcagttacaccaagctcctgagaacaagggcaaccttaacttcgaaccctgggcttaaaatctgtgtgattttttaaaatcagggtttctaagcattttataagcctcagtttcttcactgaagcataaaggtagtaaccttggtctcctgtgatgactgcgaagattgagttactctttgtaaagctcttataccatggatgacatagtaacccccaatatgaaaggaaaagccatgctggataggcatggggggcttagagaaggcagtggtcatctcaggcactttttgccctgtgccccatctccattgcagcaactcccctgccccgagtacccaaacttcctcccaaggctgtgtatccccccgtgagaccgtcgctgtacctcccgctgtgggacgccctatcctacttaaatgaggtgcgtgctgcctggccacaggaggcggagtggccattggagggatgggggagggattccttcaggaaacttcttattaggaagtgggaaaacaaatcctctgcatttcattcaaatttagaactgtgggacaagagccaccagctccttccgggtggactgtgaaggggtttgaccttggagtcagtgtgcaggggaggggcagcaggacgtcggaggatcccgggttcccgcttagatgaacctgtctggagatgctcttgtttggactgcgtggtccttacggaatccacgtaggaaaagctgctgagctggaatcgggagactagcttctgcccgtgcttcaccagcagctgggcctgaacttcctgggtcactgctcccccttttccatcagccttcctgtcctattttgaagaaaggtgaaagctgtttggaactgaaactgtagcccttggattcacattggttttacctctgctatcactattttagagaaaaggtagtgactggtacactaaagaaactacatttatttaatgtaactaaatttaatttaatgaaataaacatttgcttggtgcctcattcattgctagacttcaactattttagaatacaatttatttactctttttttttcttgagacagggtcttgcttggtggctgtggctggaatgcggtggcacaatcatggctcactgcagccttgaactcctgggctgaagcaatcctccggcctcagcctcttgagtagctgggattacaggagggcaccaccacgcccagctacatttttaagttttttgtagatgtgggtctcactatgttgcccaggctgctctcaaactcctggcctcaagtgatgcacctgctgcggcctcccaaagtgctgggattacaggcgtgagcccctgcgccccatccatttcctctgttaatcagttcttaggattataacgattgctccctcgtcaccatgccctgcatttccctgagtttccttcctgggcagtggagacgtaagcacagagcagtgtcacatggcatctgtttcatcatttcccattcgaagaacccttggggaccattaggcaggaccaaatgacagggtcttaggaaggaggatcctgactgctcagcccttggacttctgctcttgccatttctcctcatagccagtcaggtcgcgtcagcccgtcaacatggagaaccttcccataaacaatgggagcggccagtcctatgggcttgtcctgtatgagaagtccatctgctccggaggccgcctccgtgcccacgctcatgacatggcacaggtgtttttggatgagacaatgatagggattctgaatgagaataataaggacctgcacattcctgaactcagggaataactggatctgtcagcatcaataactcttccctggagggctttaccatctattccctggagatgaaaatgagcttctttgagaggctccgctctgccacctggaagcctgtcccagacagccaccagggcccggccttctactgtgggaccttgaaggctggcccttctcccaaggacaccttcctgagcctgctgaactggaattatggatttgtgttcatcaatggacgtaaccttgggcgatattggaatattgggcctcagaaaacactgtaccttcctggagtttggcttcatccagaagacaatgaggtcatcttgtttgagaagatgatgagtggctcagatatcaaatctacagacaagcccacgccgtaaaactgtgtctgaacatttttttttttttttgagatggagtctcactttgtcgcccaggctggagtgcagtggcacaatctccgctcactgcaagctcagcctctcgggttcacgccattctcctgcctcagcctccccagcagctgggactacaggtgcacgccaccacgcctggctaattttttgtatttttagtagagatggggtttcaccaagttagccaggatggtcccaatctcctgaccttgtgatctgctctcctcagcctcccaaagtactgggattacaggcgtgagccaccactcccggccgtgaacatattttttgggttgctggagttcatctataagtcatttttgaggaataagatttatgttaagactatcaaacacagtgttgcctacaatagcaaaaatgtgaaaataacaacaacaacaaaacagcagaggaattgttatgtattttgtagtctatctatatgatgcctatttttaggctttaaaaagtcttcaaaatctttaatgactgatttatctagttaaatgcttaatccttagcaggctcttattctttaattaaacgtgcctttgagtagatgtgaataaaataaaaacaagtttc

SEQ ID NO: 125 - DNA, 4528 bp, Homo sapiens
cagggagtcccagtgaggtacagccccgtggtggaggccggctcggacatggtcttccggtggaccatcaacgacaagcagtccctgaccttccagaacgtggtcttcaatgtcatttatcagagcgcggtggtcttcaagctctcacccgaggacgctgccatggctgtgctgacggcctccaaccacgtgagcaacgtcaccgtgaactacaacatcaccgtggagcggatgaacaggatgcagggcctgcgggtctctacagtgccagccgtgctgtcccccaatgccacgctggcactgacggcgggcgtgctggtggactcggccgtggaggtggccttcctgtggacctttggggatggggagcaggccctccaccagttccagcctccgtacaacgagtccttcccggttccagacccctcggtggcccaggtgctggtggagcacaatgtcacccacacctacgctgccccaggtgctgatccgcagtggccgggtgcccattgtgtccttggagtgtgtgtcctgcaaggcacaggccgtgtacgaagtgagccgcagctcctacgtgtacctggagggccgctgcctcaattgcagcagcggctccaagcgagggcggtgggctgcacgtacgttcagcaacaagacgctggtgctggatgagaccaccacatccacgggcagcgcaggcatgtgactggtgctgcggcggggcgtgctgcgggacggcgagggatacaccttcacgctgacggtgctgggccgctctggcgaggaggagggctgcgcctccatccccctgtcccccaaccgcccgccgctggggggctcttgctgcctcttcccactgggcgctgtgcacgctctcaccaccaaggtgcacttcgaatgcatgggctggcatgacgcggaggatgctggcgccccgctggtgtacgccctgctgctgcagcgctgtcgccagggccactgcgaggagttctgtgtctacaagggcagcctctccggctacggagccgtgctgcccccgggtttcaggccacacttcgaggtgggcctggccgtggtggtgcaggaccagctgggagccgctgtggtcgccctcaacaggtctctggccatcaccctcccagagcccaacggcagcgcaatggggctcacagtctggctgcacgggctcaccgctagtgtgctcccggggctgctgcggcaggccgatccccagcacgtcatcgagtactcgctggccctggtcactgtgctgaacgagtacgagcgggccctggacgtggcggcagagcccaagcacgagcggcagcgccgagcccagatacgcaagaacatcacggagactctggtgtccctgagggtccacactgtggatgacatccagcagatcgctgctgcgctggcccagtgcatggggcccagcagggagctcgtatgccgctcgtgcctgaagcagacgctgcacaagctggaggccatgatgcgcatcctgcaggcagagaccaccgcgggcaccgtgacgcccaccgccatcggagacagcatcctcaacatcacaggagacctcatccacctggccagctcagacgtgcgggcaccacagcgctcagagctgggagccgagtcaccatcgcggatggtggcgtcccaggcctacaacctgacctctgccctcacgcccatcgtcacgcgctcccgcgtgctcaacgaggagcccctgacgctggcgggtgaggagatcgtggcccagggcaagcgctcggacccgcggagcctgctgtgctatggcggcgccccagggcctggctgccacttctccatcccctaggctttcagcagggccccggccaacctcagtgacgtggtgcagctcatctttctggtggactccaatccctttccctttggctatatcagcaactacaccgtctccaccaaggtggcctcgatggcgttccagacacaggccggcgcccagatccccatcgagcggctggcctcagagcgcgcctcaccgtgaaggccgctacctgtctgaggaacccgagccctacctggcagtctacctgcactcggagccccggcccaatgagcgcaactgctcggctagcaggaggatccgcccagagtccctccagggtgccgaccaccggccctacaccttcttcatttccccggggaccagagacccagtggggagttaccgtctgaacctctccagccacttccgctggtcggcgctggaggtgtccgtgggcttgtacacgtccctgtgccagtacttcagcgaggaggacgtggtgtggcggacagaggggctgctgcccctggaggagacctcgccccgccaggccgtctgcctcacccgccacctcaccgccttcggcaccagcctcttcatgcccccaagccatgtacgctttgtgtttcctgagccaacagcggatgtaaactacatcgtcatgctgacatgtgctgtgtgcctggtgacctacatggtcatggccgccatcctgcacaagctggaccagttggatgccagccggggctgcgccatccccttctgtgggcagcggggccgcttcaagtacgagatcctcgtcaagacaggctggggccggggctcaggtaccacggcccacgtgggcatcatgctgtatggggtggacagccggagcggccaccggcacctggacggcgacagagccttccaccgcaacagtctggacatcttccagatcgccaccccgcacagcctgggtagcgtgtggaagatccgagtgtggcacgacaacaaagggctcagccctgcctggttcctgcagcacatcatcgtcagggacctgcagacggcacgcagcaccttcttcctggtcaatgactggctttcggtggagacggaggccaacgggggcctggtggagaaggaggtgctggccgcgagtcacgcagccctgttgcgcttccggcgcctgctggtggctgagctgcagcgtggcttctttgacaagcacatctggctctccatatgggaccggccgcctcggagctgtttcactcgcatccagagggccacctgctgcgttctcctcatctgtctcttcctgggcgccaacgccgtgtggtacggggctgttggagactctgcctacagcacggggcgtgtgtccaggctgaacccgctgagcgtcgacacagtcgctgttggcctggtgtccagcgtggttgtctatcccgtctacctggtcatcctctttctcttccggatgtcccggagcaaggtggctgggagcccgagccccacacctgccgggcagcaggtgctggacgtcgacagctgcctggactcatccgtgctggacagctccttcctcacgttctcaggcctccacgctgaggtgagggctctactgggggtcctgccgccttggcgcagcttggactcaagaccctgtgcacctctcagcaggcctttgctggacagatgaagagtgacttgtttctggatgattctaagagtgaccttgaggaaccctgggagctcaggaaggaaggagcacccagaagcagggacagggagctggttggggaggaccagaaatcaggttatcaatactctggctgaccatcgtcatcgtgggactgactttggtggaagtccttggttacttatcattactgtgtttctgagaagttataaatttgccatctccctctgcacaagttacctttgtgtgtctttcctgaagactatcttcccgtctcaaaatggacatgatggatccacggatgtacagcagagagccaggaggtccaactgccgtagacaggaaggaattaaaattgtcctggaagacatctttactttatggagacaggtggaaaccaaagttcgagctaaaatccgtaagatgaaggtgacaacaaaagtcaaccgtcatgacaaaatcaatggaaagaggaagaccgccaaagaacaatcaccccttctgcaagaaagcctctttgcaaccgggtcagaatggcggcagtggagcatcgtcattcttcaggattgccctactggccctacctcacagctgaaactttaaaaaacaggatgggccaccagccacctcctccaactcaacaacattctataattgataactccctgagcctcaagacaccttccgagtgtgtgctctatccccttccaccctcagcggatgataatctcaagacgcctcccgagtgtctgctcactccccttccaccctcagctctaccctcagcggatgataatctcaagacacctgccgagtgcctgctctatccccttccaccctcagcggatgataatctcaagacacctcccgagtgtctgctcactccccttccaccctcagctccaccctcagcggatgataatctcaagacacctcctgagtgtgtctgctcactccccttccaccctcagcggatgataatctcaagaaactaaggaagaataaataaataatataaaaat

SEQ ID NO: 126 - DNA, 1023 bp, Homo sapiens
ggctgatatgccaaagtcacctttcaaaaggaaaagaactaccaatgaaataaaaaatcttcagtacctacctcgaacaagtgagccccgtgagatgctctttgaagacaggacaagagctcatgcagatcatataggacaaggttttgaacgacagactacagctgctgttggagtgctgaaggctgtgcactgtggagagtggcctgatcaaccccgtataaccaaagatgtaatttgttttcatgctgaagatttcttagaagtagttcaacgaatgcagttagatttacatgaacctccactgtcccagtgtgtccaatgggttgatgatgcaaaactgaatcaactgaggagggaaggcattcgctatgccaggattcagctatatgataatgacatttattttattccaaggaatgttgttcatcagttcaagacagtttcagctgtatgcagtttagcatggcatattcggctcaaattatatcactcagaggaggacacttctcagaatacagctactcatgaaacaggcacatcatcagattccacatcatctgttcttggacctcacactgacaacatgatttgtgctgtaagcaaagcctccttggattctgttttttcagataaacttcattctaaatatgaattacagcagattaaacatgaacctattgcatctgtaagaatcaaggaagaacctgtgaatgttaatattcctgaaaagactacagcactgaataatatggatggcaagaatgttaaagcaaaattggatcatgttcaatttgcagaatttaagattgacatggattctaaatttgaaagtagcaacaaagatttaaaggaagaattgtgccctggaaatctaagtctagttgatacaaggcaacacagttcagcacattcaaatcaagataaaaaagacgatgacattttgtgctaaatttgcatataccatctaaaatccttttttaaaaaaatttaatgtaataaagattcatgaattctgaaagc

SEQ ID NO: 127 - DNA, 4370 bp, Homo sapiens
ctgagcaccgcgcgcaaaggcccggccccagggccaggcaactccagcgccgaggccgtccagtgcggctggagggcagaggccgagaggcgcggcgcggaacttgagccccttgtcccggcgcaccggggaaccatgagggatgttaagcgagggagtggaattacccccctttttttttttttcttttggagacgtagtctccccctgtcgcccaggctggagtgcagtggcgcgatctcggctcactgcgacctgtgcttcccgggttcaagcgattctcctgcctcagcctcccgagtagctgggattacaggcgcctgccatcacgcccggctaatttttgtatttttagtagagttggggtttcaccatgttggtcaggctagtctcaaactcctgacctcaggtgatccctgcctcggcctcccaaagtgctgggattacaggcgtgagccaccgcgcccggttggaatgaccactttttaggacctcttccctgccgcgcagagactggagggagcggggcccgcagtgcagggatgaggtcccaggtctccccgctgcgctgcttgaggctcggccatggcccagcagagagccctgccccagagcaaggagacgctgctgcagtcctacaacaagcggctgaaggacgacattaagtccatcatggacaacttcaccgagatcatcaagaccgccaagattgaggacgagacgcaggtgtcacgggccactcagggtgaacaggacaattacgagatgcatgtgcgagccgccaacatcgtccgagccggcgagtccctgatgaagctggtgtccgacctcaagcagttcctgatcctcaatgacttcccctccgtgaacgaggccattgaccagcgcaaccagcagctgcgcacactgcaggaggagtgcgaccggaagctcatcacgctgcgagacgagatctccattgacctctacgagctggaggaggagtattactcgtccagctcaagcctttgcgaagctaatgacctgcctctgtgcgaagcttacgggaggctggacctcgacacagactctgctgatggcctctcggcccctctgctggcgtccccggagcccagtgctggccccctacaggtggcagcccctgcccactcccatgctggtggccctggccccactgagcacgcctgagcctccggggccacgcttcgttctcaggaacaaaacctgaggcagccctttggatgccctcacagccttgcttctctcagcctaggttcccatttggggacttcaggaccccagagccactaggacttccttgggaagcccgttagcccagggtgggtcccgccaggacagtagggaaacagttgtttccctagccatttccgaatagcccatcattccgagtcatcatctctgtttgctgccttcctggccagccaggtggaagaaagtttccaagctaggtctggcccgttggggatctcagcagtggggcaggagggtgcctgatttcggggagtcctgacccgagcctgttgtcagagttgggaggggctctgagcagtgttgggcaggccgggtctcccatcccgaggccagcgttcctgtgcagagccccatccactggttcttgccctgagccacatatgtctgtgccatgggctgagtgccacgacaggcccgtgtgacagctgctgcccacgcatgtggaagctaggtgggactcattcctaattctgccgttgtaatgagacttgattaaaacaccgccacttttttgcattgctgctctttcttcctcattccttgtcagtccaggaccatccttggtctcccagcagttgtccgagcagcagctcctcagctctgcctggacagcctggcccaaggtcactctctcctcattggcacctggtaggtccccagtattcagtgaatggacctgctgccatcattgcacatccaggcacctgtgcctctgctggcatctcatcctcactgctaccagagccggtgctcctagtgccggtattttagagaggagaggatgtggacttagaaggggtgaggtgtaccacggccacagagctaggaagtgaagtggcaggaatcagaacttgaacctgatggaagtctagacccagtgtcttttggtgccaggctcaccttagaaatgcagaagtcacaacactgggcaggaagtgaggggggagcacagttcgtccacaggaagtgtgggggagcaccccaccccagttcctccagcaccatccatgtgcttcatcttctcatgggggaggccatcatctttcccgatgtatgaatgaggtgacagcccaggatccagccttggggacaggtaagaacacagctgacccatcaccacctgaaccagagaaccccacagccaagcagaaggcaccagacagacaggagcttgaggcccagtcctggctctggacctggcttctggggtggcctagggaagttgcttcccctctgagggagaatttccccattgatacgtgtggtgatctgttcccgcactattttagctgtggaaatgccttgtacttaaccactgaggaagaaaaagattacaaccagatggaagcatatatgaagcgagagcccggaaggaactggccagactttgtggtgggatcccacttaccctgttcctaaaatcctgagcgataagacctgccatcagcttcattttctgcttggccaggaccatcattcccatgtgaaaatcaagttatttctccttcttaaagccaagccgctctgctgaccttttttcctctccagctcatggccttggcagcagagctccacggggaagcagctgataaccatttgcagttctctcttgggcctacgtcagacaggttttgtctccatgactctagcaaaactacacctattaaggtcaccagtggcctccacattgctaagccccggcccattctcagtccatgtaactcttttatcccaagctttttattttgagggcagtggaactcatggaagtacttgtcagtttgcctctctgagcacattctccttcgtccatcaccacaaccagaatggatgatgattgcatatcctctggtatctagctgtattcagatttcttcagttgttccccaaatagtttttttaatgcctattttttttctttctagtccagaggtcttttatttttttaacacccacgatgccatgaattcatagggaagaggttccagcagctcaggctccttcccattggttctcacagtgtgctgctctgggtggagcaggctggcgcttcagttgaatccaggtacctttctctttggcttccctctttttctgatcattttccttcacgcgtttcaggaagctctctcggctcttagagtgcttagtgtgctgaatatgcacattcattctcttggcaagaatcttgcccttacttgtttacaacagtgccaacagcatgctggggaacactgtagactctcccagtctagccatggtgacatttgtggggcattcctttttgaacagtacccattcccttgatatctacaatatcacctttctcatcaatttgcatatacttggccaaaggaacaactgcatgttttctgaaaggcctagagaacatatattgggtgcctctcctctttccctttgtgttcgtcattttggcgaattactggaaggtggcggttccagctgaaaggcttttatgcctgtttttattgtgtgttgcatttggttgttattttggagtcttaaaatctaaaacaggaccaggtcaggcccagtggctcctgctgtaatcccagcgctttgagaggccaaggcgggtggatcacttgtggtcagaagttttgagaccagcctgggcaacatggagaaaccccgtctctactaaaaagtatagaaatcggccgggcgcggtggcttacgcctgcaaccccagcactttgggaggccaaggcgggcggatcacctgaggtcgggatttccagaccagcctgaccaacatggagaaaccctgtctctactaaaaagtatagaaattggccgggcgcggtggctcacgcctgtaatcccagcactttgggaggccgaggcgggcagatcacctgaggtcgggagttccagaccagcctgaccaacatggagaaaccctgtctctactaaaaatacaaaaattagccgggcgtgctggtccatgcctataatcccagctacttggtaggcggaggcaggagaatcgcttgaacccgggaggcggaggttgcagtgagccgagatcgggccactgcactccagcttgggcaacaagagcgaaactccacctc

SEQ ID NO: 128 - DNA, 3586 bp, Homo sapiens
gaccctggctgggagcgcggcggtgccggcgggaggccgagcggggctcgacagagcaggatcgagatgaccacagccacccctctgggggataccaccttcttctcactgaacatgaccaccaggggagaagacttcctgtataagagttctggagccattgttgctgccgttgtggtggttgtcatcatcatcttcaccgtggttctgatcctgctgaagatgtacaacaggaaaatgaggacgaggcgggaactagagcccaagggccccaagccaaccgccccttctgccgtgggcccaaacagcaacggcagccaacacccagcaactgtgaccttcagtcctgttgacgtccaggtggagacgcgatgacctctaccctggcgctatctccaccactgtccaaagagcctctccagagtcaagacccagaggcacactctctggcagcttcacaatgagcttcttctggtcaggtcgacagagacatctttgacgcaatctctgatgcttccagcaatcctcaaccttgtctgccctgccctaccccaactgtgtccacatccctgccgccaccccaccaaaaagctgcagaacattcttttgtcatctgatgaggtagagctatgttgggaatccaccaatgtgggcttggctttcccccacactgtagttagacagatagacagatagcccaggagccaggtgtcagggagcactgctgagagtatcacaataggatctgtcacggggttcatatcagatgaagcgccgtatccactgcttcacagagcaaaacattcaatcccataaccaggcacaggggaactaacttggactaactaaccagaaaaccttgttaacgtataacttgttccagtactacatctctgcctgctggctcatgacaattgctcagcacattttcccctcttgaagaaaggttgcaagaagaactaaattatcctcaaaagatttctgcttcattagtaaagagtcagtgatggaatagggtgactctgcagaatagtggcctctagggtaggagcttgttgtgttgtccgtgggcctggaatgatcctggtggctgatcagggtccttctcccactctgggctgtatcaaccctgacggtcttggtctttggctcccctttatctggattctgagcacgctgactgtcctgttaatgccttccctccaaggaccagtatttggagattaattagattacaactctatctatgttacctttgtccttcctggtcaccttgcagattcaagacatgttcaaagcaacacattcacaacccatttctattctatagcaacctcgtctgtgactccttagcctggagaacaatctaccaagaagagaaagtatctggaattaagaagtcctaccatccaagccctacttcctggttgtgtggccttggaaaagtgactcaacctctttatattcagtttcctaaccatgaagtggaaatgataacacctgcctcattggggcactataacaagtgaaggacttaggaaaacatctggagtatagcgcctggcacccaggagatgcttaataaatgggaaccaggattctttttcttttcttttttcttttctttttttttttttttttttgagacagggcctcaatctgtcacctgggctggagtgcagtggcacgctcacagctcgctgcagccttgaactcctgggctcaggggatgctccctcctcagcctccagagtagctgggactacaggtatgtgtcacctcaccaggctaatttttttattttttatttttgtagagatggggtctcgctgtgttgcccaggctggtcttgaacccctggcctcaagtaatcccagcactttgggaggctgaggcaggcgggtcacttgaggtcaggagtttgagaccagcctggccaacatggcaaaaccctgtctctactaataatacaaaatttagctgggcatggtggcatgcacctgtaatcccactactagggaggctgtggcatgagaatcacttgaacctggaaggcagaggttgcagtgtgccaagatcgtgccactgcactccagcctgggcaacagagtgaaactgcatctcaaaaaaagaaaaatccattatgaggggaaatcaagagtcagggaggtaagaggtcttacccagggtcacacagctcatgatatcccactgtaaaaatactccgtggaatagctctggagaaatactggcacattcttcctctctggtcattatttcttcctactgtgtttaaatatccaccaagtgtcaaggactttgtaagatgctttcacataaattatctcataggattaaattttcccaaaaacctggggaggaattattttttccaaaacagatgataatttctgattcaaagagaaagaaaacaaagtacttttccaaagtcacacagctagtaagtcacaaagacaagactcaaaaccaggtctcttgactccaaagtctgtcttttttgtgaagtcacactcctctgctggcccagctcaaagcagcacagattctttatgggctgaacaaggggagtacgggtttgtccatgtgtttgagtagagatcagggttctggcttccaggctgaaggtgagggaaaagccacttctaactcctttgggcatccatgctcacggccaaaagagccccttctcaacacatccaagtgctaaggattcctgcttcattcaagctactacttaggcccaaggagcaaggggtagaatggcatctaaccagagcaaagccatttctttgagggctcaagccataaacaaatatgctcccctaaacatattcggcttgaaaaagttgttttggggcagctgtggtggtgcacccctgtaatcccagccctttgggagtcagaggcagtcagtcacttgagcccaggagttcaagactagcctgggcaacacggcgaaacctcgtctctacaaaaaatacaaaaattgaccaagcgtggtagtgcacgcctgtattcccagctacttgggaggctgaggtgggaggatggcttgagcctgggaggcagaggttgcagtgagctgagatcgcgccactgcactccagccggggtgacggagccagaccctgtctcaaagcatatttcaaccctaaaactagactcttctgcccacagtgcagtcttctaagggttaccctctggtatatgttcttttgctaaatgaaggcttggagttggagggaagaaggggagatggagtggtgagggcgagtcaaataaaaggatttgagtgtctcgtttttgactaatgaagatgattcaataaacatcctgtaagaagggttcctatgtgcaagttgaggtgctactaagtacattaagacacaattgctgctctcaaggagttagcagctggtctcatgcagggatctcaccacgtggttatgtattttgtttctgatgaggtgcctttcttagcagatgctgccttatttggccactgaaacaatcaaagctaataaatgcttaaagaaaaatatctgacaataaaaaggtttaaatc

SEQ ID NO: 129 - DNA, 4136 bp, Homo sapiens
acaagagacaatgacaaatatgagcctgaaggaagatgagctgatggcattcccagcttattaccactccttgggggccttatcttacatacatggattcaattcgtagattcagctgggatttactgcctcaagatggttatgttggaggattccaatagttctactggatgtggagccagaaattgtgtggaatgcctggtgtttctttcagttcttggatgccaatctgagaggaaaggccagatgaggacacagcaagcaggcagatggctgcgagctggaagggaagcgtcatcagaaaccaaccctgagggtaccttgatcttggacttccagtctccagaactgcccctggcagctcgtggttggcaagagcacgaacccgtggtcagatgcaacgtcctgcctcatgcattttcctcttggtgctttggtcagaacttccccaagtggagtgaaactcaggagctgagaaaccgagtcactgtgaaaagatgggaaattatctcctgcgaaaactcaggcaggaaatgactacatttgaaagaaaacttcaagatcaagataagaaaagccaagaagtttcatccacttctaatcaggaaaacgagaatggcagtggttctgaagaagtgtgctacactgtcattaatcacatcccccatcagaaatcctccctgagctccaatgatgatggctatgagaacattgactccctcacaaggaaagtgagacagtttagagaaaggtcagagacagaatatgcccttcttaggacttctgttagtaggccttgttcctgcacccatgagcatgattatgaagttgtgtttccacactaaaatcctcaagctgctttatcaccttccagcaatgaagacaatgcagaatagcagactctggcgaagttgttcaccctgagcagtgcatgaaacattcctttctggctaaagtttagaaatattatcttattatatatccttaggcaactctgatatgtggcatctctgtggcttaggtgaaatcatagaaattgacacaatgacctaaaatattctatgtgtttttgcttgtaaagtttgaggacatggaggtgataaaaaaaactttcttaggacaataatgtaaaatgaaaataaatttctaatccccctgactaactgaatggaccctcttctaggccaaagagacctcagatgaacctgaaagactgaattctggccatgataggaagggaggtgagacacaccttgttataccccttcccttttggagtttatgcacaagtgaccaggatgagtcataagactgatgaaatagactgattgtggcaataagagtcccaattccaacctgactctggtgtagatcacacactgtctgagggattccatctatgagactttgtctacataacagagaccttggtttccacaacccctttattttagctaaagcattcttttctactgacttcttaagtctttagacaaagcttaactctttcaaccaattgccaatcagacaaactttgaatctacctatgacctgtaagctctctcctgcttcaagatcttgcctctttaagctgaaccgatgtgcactttccatttaatgatttatgtctttgcttgtaactcctgtctccctaaaatgtataaaagtaaacggtgacctgaccacctcaggcacactttctcaggacctcctgagagtgtatcccaggccatggtaagtcatgttggctcagaatcaacctctttaaatattttacagaatttgggttttggttaccaataagtctccacaaatatatgtccaagaatcttcaattccaagcctgctcaccaaatttcaaatgccaacatctccccatccaattacctatttcatctttgaggtgtaatctactcaataaactgtgtaagaccagtgaccagaccctttgctaacctgacatttacttcaatttttctttttctatgtactggatatttttgcatataaacttgcagtaatagttcaaaaattaatagtttttgacattggcttttctgagaagagaaattgaaagtgtcacaaaataaaaaaagatgaaatgaagcatatataattgtcaattttttcaattttctagccaacagagaatcgaaggattctgttcaaatattagtaaaaattgaaaataaacttgtgcttatattttgtttgcaacacactagttaatttaacctgtgactagttatctctaccgaaggtggatgtgtagtttctggttttaaaattcaagcaaactggaaaataatccatctaattatgctttctttcccaagaagttttttaatgatatgccagcttcctaatttggagacaaaagccttaattgacaatgcattcattatatatttttttgtatagttacagtatacgagttgagtatcccttagatgagatgcttgggaccagaagtgttttggatttcagatttatttttggattttggaatatttccatacatataatgagagagttggaaaatgggattcaagtctaatcataaaattcacttatgtttgatatacaccttatctgaatagcctgaaggtaattttatacaatattttaaataattttatgcctgaaacagagtttgcgcacattggaccatcagaaagcagaagtgtcactatttcaagtcagtgctcaaaaagtttcagatgttaagctggtgatgcagttcatgccagtgatccgagtactttgggaagccaagacaggtggatctcttgagcccaggagtttgaggccagactgcacaacacagtgagacctcgtttctacaaataattaaaaaattagccaggtgtggtggtgcacacctgtagtcccaggtactcaggaggctgaggtagtaggattgtttgagactgggaggttgaggctgaactgagccaggatcttgccaccacattccagcttgggcaacagagtgagaccctgtctcaaaaaaaaaaaaaaaaaaagtttcagattttggagcatttcagatcttcagattagggattttcaacctgtactgaccttttagtcattgacaagcattaatcaataggtggactccagataactcatttgctgtatacacattttgcctctctattcaacgaattcttatgccctcttgtggtgattttaatgtgcggaagggaaacaatagaaattttgcaattctagaaaagtcattctgtcaaaatatgtcagtcctgtagatattagccaattttaggaaaatgacaaaattttttacttttcgtctgcctttgtagctgttttatgatataaataccttatttgtaataaaattaattttaatttgagtaacaatctggaattatcagagaaggggcaagcaataggttaataaacagtattgattggtagaaggaacgttgaaatccaagagcatcaatgtcttctggtggttcaccataagccacagcagatgtcttaatctttccgagatctagtttttcagcaaagcaggatttaagaaatgtaactatcttatgtggttatgaagaacaatagaatcattgctgtataagtgctttttaacctgtaaattttgtgaagcttatcttttatgcatataaatatttgaacattttacattgtttatatttttaatcagttttactcaagtgtgattatatacaagaaaatgtaaccactgtaagggtagagttataagaattttgtcaaatgtattcacccatgtagtcacctccttatgaagagacagaacacgtacatcctcccagaaagttccacagtgctccttttccctgagtttcaccagtcctggcaaccaatgatctgcttcgtataattataactgttctagatatttgtagcaatgtaccctttccatatttattttgtgtgtgtaaggcttcttttagtcattataatatttttgagattcatctatgtttaatgttctatcagtagttgtacatcttacttgtctcagcatatcaccatatagatatactataatttgttaatctaatcactgatggatatgtaggatatttaagtttttgacattatgaataaagtggctataaatg

SEQ ID NO: 130 - DNA, 4910 bp, Homo sapiens
ttcaaaataaagaatttgaaaatataataaggaaagagtttcaaattattttctggtgtatgcagtagtttcaaagaggtttttttaaaaataaaattgtgatgagtttctttaaaatggtatagcaacacgaatcatatgtagatgatcttaaccaatgagagcatgtgtatgtatgtgtaaaatgaattaaatcaaataaatggttgtaaatcaagtaagttgtaaataaatgaagtacatggttgcttttttatgttctccatatgtattttcaagctctcaaagatccagttgttcttacttctcagggtatgttgctgaacttccaggaatcattcccgtctttagtccagtgttgctgttctagtctcattggaagtgacctgtccactgactctcatccccaagttcctaatttgccagcagaatggtactggccctgtgtctagtgatcccagggataaaatgctgttgtctagtatcattgacttaaaaaaaagaaaaaaaatccctgttttatttgttttggtcagctcaagttcaggactgttagataacttaaaatctgctttgcacagatgtatttttaaggaacaaacatctacagtaacagttacagatttccttaagtgggatatttgagttcatagatggtagacttttatagcctgggcttctaaggagggcagcagactagtgcagtcaggacaggacatgggctgtttggggtataataatagtgagtatagtgagattccacatgatggaatctcaacaaagagtaggaaggcgtttaggccttcagttgtccttgaattgagtatgttctctcttttgtttaatgtagataaaaatctaacacaagatactaaaacatacaaggtagaatttatactttttttattcacagaaaatcatgtaacttcctttgcgggtaactcattctttcacagcatacatgaacaccgtagttattccctagtttccagtttataaagatgttttgagaggaacatgttcaaaatatttaactagtattttgcacatgggacaagaagatcttaaatacatgtttcaagagtttttcccccactagttagtatttggaaacatgggaatgtttgtattaaatattactttaaataagtagttttcgcaccagacaattgctgtaccataaatatcttaaaacttaacattgtttttttaaatttctaaaattgaattatagaattcaagaaactgtgtgacaaatgaaaatgcctttttacaaaataaatatctgaatatgtgatatattattgatcattagtttgtaacacttttaagaatattctttgaacttacattattagaaacagcttagaaggaactgggcgccgtggctcacacctgtaatcccagtgctttgggaggctgaggcagatggatcactagaggttaggagatcgagaccagcctggccaacatggtgaaaccccatctctactaggagtacaaaaatgagctggcgtggtggcgagcgcctgtaatcccagctactcgggatgctaaggtaggagcattgcttttcgtggtgaaagaggcaatgatgaatctgccatcgaaatgattaaagtatctcatttgaagcagtatttggcagtcgtattcagagataaacccctggagctatgggatgttaggacttgtacccttcttagagagatgtccaaaaacttccctacaataactgctttggagtggtcaccatctcacaacttgaagagcctgagaaagaagcaacttgcaactcgagaggccatggcccgccagaccgtagtctcagacacagagctgagtattgttgaatcatctgtgatcagcttgctgcaggaggcagaaagtaaatctgaacttagtcagaacatctctgcccgggaacattttgtatttaccgatattgatggccaagtgtatcatctcactgttgaaggaaactcagtaaaaggcagtgctcggattccaccagatggaagtatgggtagtattacctgcatcgcttggaaaggtgatacattagtgcttggagatatggatggaaatttaaatttctgggacttgaaaggcagagtatccaggtataagccaagaatgaaatcttgttatttcattaaaaaaaagaaatgaaatctttttgttttgttttgttgagatggtgtcttgctctgtcgcccaggctggagtgcagtggtgcaatctcggctcactgcaagctctgactcccgggttcatgccattctcctgcctcagccacccgagtagctgggactacaggcacccaccaccacgcccggctaatttttttgtatttttttagtagagacgggatttcaccatgttggccgggatggtctcgatctcctgacctcgtgatccgcccacctcggcctcccaaagtgctgggattacaggcaggagccagcacacccggccaaaaaatgacatcttgatatggttccattagaggcttgtgacttggcaagaaggatcagtaaactcgtggaggtgtagcttggacccttgggtcccttcacctaaacttgggaggatgggccttgagccaagcattcttaggagatagttatctgcaagtggcccctgcagaagtcttagctgaccttaaagggcaggccctttctgtcagatgtggcccccagtcccagcaagtaaagggttctcccatcatcagacctgttagaaatggaaatagtgagagatgttagacatagcttctggtgaccagatctcactctacattgtattgatgtttttgtttctttgtcttcagaggaatacccacacaccgaagttgggtgaggaagattcgttttgctcctggtaaaggaaatcaaaaattaatagcaatgtacaatgatggagctgaagtgtgggatactaaagagagcctgtgtggtgcccctatctccttgttccaagggcctctcttgccttgaaagccttcttattacaccagccttggaatggacagtattctttggacatttctcatgttgactatccagaaaatgaagaaataaagaatctcctccaagaacagttgaattcattgtctaatgacataaagaaactgttgcttgatccagaattcactctcttgcagaggtgcctgcttgtttcaaggctctatggtgatgaatcggagctgcacttctggactgtcgctgcccactacctgcacagcttatcccaggaaaagtcagccagcacaacagctcctaaagaagctgctcctcgagacaaactgagcaacccactggatatatgctatgacgtgctctgtgaaaatgcctactttcagaaatttcagctagaaagggttaatctgcaggaagtgaaacggtcaacttatgatcatacaaggaaatgtacagaccagctactgctcttgggtcaaacagagctgtgcagttgctgttggaaacaagtgcagataaccagcattattactgtgattcactgaaagcctgtttagtcactactgtcacctcgtcaggcccctctcagagcaccattaagttggtggcaacgaatatgattgccaatggcaaattggcagagggcgttcagttgctctgcctgatagataaggctgcagacgcctgccgctacctgcagacatacggcgagtggaatcgggctgcatggctggcaaaagtccgtttgaatcctgaggagtgtgccgatgttttaaggcggtgggttgaccacctttgttctccacaagtcaatcagaaatcaaaggctctcctggttctcctctctctgggctgcttttttagcgtggcagagacgcttcacagcatgagatactttgatagagcagccttatttgtggaagcttgcctcaagtatggagcatttgaagtcactgaggacacagagaaactcatcactgctatatatgcagattatgcccggagttcgaagaacctcggttttaagcagggagcagttctctttgcttcaaaagccggagcagctggcaaagacttattgaatgagcttgagtcccccaaggaagaacccattgaagagtgacagcttaataaatgccagggaatctgacctggaaggcagatgggagggggctggtctggctgtggccaccgtcacagtccaggatgaagaggagtacagggtcctgtgagctgtttgaccactgttctaagactatgtgtgcccaaaagcacataagcatctatgttgagagtaagtttgtatcctgcgttggtctcagaaagaacgtgaatgcttaagattttgaaagtacataatattttatactttgggagagagctttaagagtccctggaaatactttttaatttttttaacttaaaattcaagagactgaatcacttttctcattgattaaatgtaaagattattgagaaacctatagtaaatgaaatttgtgagatgttttctcaaatatatgctgtgcctgtacttatatacagtctttcaagagagatacaaacaaggcagaaacatttaaactagtattaaaggtagtttaccaaagcattttttgttttcttaccttgaaaacacagaaccgttaattccttggtttaagcagttgctaagttttgtaattttaggctcagaggaccataggaggttttaagatttatgtttagtccgataggtgaggtctttgatattttgaattttaactccttttatgatacatcacagtaacctcatttttgaagtctttctttgtactttaatgttctctctgttctaatagttgaagtatgagatgtaactattataaactgttgctgaaaacataaatgtctgtaacttacaaacatgataaataaattaaaaattcc

SEQ ID NO: 131 - DNA, 3692 bp, Homo sapiens
caatggtaggttctctgaactctttctgcctttcttagaaagaaatcagaaaaagttgaaaatgaaaaaaaatttatgagacatcatcaagctataatcaaatcaccatttttgtgttatcatatggggtttcttgattattttccatggtgaatgtcacttgtgccttctttccccactagtgtgtgcttgctgctgatgaagtagtatttaatcagaaggaactggaggttaaggaactgaagaatcaagtgcagatgatggtacaggaaaacaaagggcatgctgtatctttgaaagaagcgcaaaaagtgaatagactgcaggatctcattctgttgctcaggctggtgtgcgctggcacaatcacagctcactgcagtctcgaccttccaggctcaagtgatcctcccgcctcagcctcctaactgtgaccacaggtgcatgccaccgcgcccggctaattttctgatttttttgtggagacggggtctcactgtgttgctcaagctggtctcgaactcctgggctcagtgatcctaccacctcagcttcccaaagtgctgagattgattacagaatgaaaaaataatagaacaacaacttcttgtggatcaactgagtgaagaactaacaaaacttaacctgtcagtgacttcttcagctaaagaaaattgtggagacgggccagatgccaggatccctgaaaagagaccatatactgtaccatttgatactcatttggggcattatatttatatcccatcaagacaagattccaggagggggaatcacttgcaaggtccacacaagtccgcctatgtactctctggatcgaatatttgctggatttcgaacacaaagtcagatgctgttggatcacgtagaagaacgagatgaggtcctccactgccaattttctgataacagtgatgatgaagaatcagaaggccaagagaaatctggaactagatgtagaagtcgttcatggattcagaagccagactctgttcccttgttgaattgagtgatactcaggatgaaacacaaaagtcagattcggagaatgaagatttaaagattgattgtctccaggagagtcaagaattgaatttgcaaaaattaaagaattcagaacgcatacttactgaagccaaacaaaaaatgagagaacttacagttaacatcaagatgaaggaagatctgattaaagaattaataaaaacaggtaatagtatcttgtgaaccagcttatatgagaaagaaaacttctaaaattgcttctgatgtggtaacagttactttagtttttgaagctcaggtctatccacttagcttggattggtgtaacaaggtgagtttttaggccaatatgtggaggttagttatcagaagaatttttttcttttgggatttcacctctgaattgttctaaccggtgtgaactctgcattccagcctgggtgacagagcaagactgtctcaaaaaaataaaataaacatgttgttattggcactgtatatttttttactggttcataaaatattggtgtattgaacaattaatgaatagtccaaaatgatttgttaaaatatagtagttgtatgtattctaaagttagtcaagtaatcataaattagagtcagaggacagttcacactacatttagttaaataacttttatcaaaaaatgatgagtatttttggatagcagtataaccagctatataaatagtataataggctgggcgcggtggctcacgcctgtaatcccagcactttgggaggccaaggcaggcggatcatttgaggtcaggagttcgagaccagcctggccaacatggtgaaaccctgtctctactaaaaatacaaaaattagctgggcatggtggcgtgtgcctgtaatcccagctactcaggaggctgtggcaggagaattgctggaacccaggaggcggaggtggcagtgagcttacgttgtaccactgcactctagcctgggtgacagagcgagactctgtctaaataaataaatagtataataaactgtctctggtgattattcaccccctgagccttagactcctgttttctactgccacgagtttgccagtctagttcagggacggttgcctattcagagcaaatcaaaaccaagcttttagggtcactagctggacttagaatcaaaagagatacagaaatatctttattctattttttctgttctatatattaataagaaaagaatttaaaaggaattaatcttgaataagttcaggttagtgaaaaaggagagagttagctttggatgaaaagattcttaagagacataacaaatcaaatgtattgtggaccttgtttagatcctgatttaaataaaccaattgtgagacacattttgaggcagttggggacgtctgaatatggactgattggtgttaatattgttagtgtgataatgactttttggttatgtccatattttgtgtgaatgccgattgcagtatgtataagtaaaaagaggaatttaacaaaatgaagtatgtataggtgagatgagtgacatctgggattgctttacaatatttaagcaaagtaaaaagacatatttgaagcagctgtgacaaaatcttgataacttttaaatctgggtgatgggggttcattttattatttcttttgttatatttaaaaattttcataataatttgaaaaaggaattcaagcagacagattattggtagcaggaggctggagtatactaagcaagaggacagtcactccaaatatccttcttaactgagtttgatgccagcaaagctcaactacaaattcagaggaccagaaatgtcactgtaaaatgccaaagattgaaccagtgagactgactggcagcagatgggaacagtcattaaggaactaattattaagaggcctgatggcaagctgtgtttgatgggggtgggtggggacaactgggtttttaatgctatgccttaaatagtatcactgcctggctggattttagagtagagtatttttatgtttttgatgtttaacttctttttacataatttatactaatagtaattattattacggttaaggtaacgatgccaagtctgtaagcaagcagtatactttgaaagtaacaaagctagagcatgatgcagaacaggcaaaagtcgaactaactgaaacacaaaagcagctacaggagctggaaaacaaagatctttctgatgttgcaatgaaggtaaaattacagaaagagtttcgtaaaaaggtggatgctgcaaagctgagagttcaggtcttacagaagaagcaacaagatagtaagaaactggcatcactgtcaatccaaaatgagaaacgtgctaatgaactagagcagagtgtagatcacatgaaatatcaaaagatacagctacaaagaaaactacaagaagaaaatgaaaaaaggaagcaactggatgcagtaattaagcgggaccagcaaaaaatcaaagtaatattgtcatacattcctgctaagtataatatgaaatgttaaacggctcagagctaacgaatccatggtcttcattcagttggcttgtgaagtatctatccttgacttgcccttcactgctgtccttattcactttaaagctttgttcatctacatagtaaaacctatttattg

SEQ ID NO: 132 - DNA, 3506 bp, Homo sapiens
ttctcatactctgcaaagtgagcgttgttagcctcgttttccagatgagaaagctgagcctcaaagaggttcagtaacctgccccaggtcacacagctgagccgtgttcaagcccatgcctgtgtgggcttcaaaagcacaagggaactgccaacccagctgaaaccctgatcctccatgagctcctagggttagggctcaggtgggagatggctgttcttgggggctttgggaatgtggacaaggcccctcaaaggaggggctgttaaggaagcctaaggagaggtactccaggcaaagagaacagcctgcaaagcccactggccaggtgagtttggggcagagcagagttcactgttatggcccaggctgcatggcaggagtgagggggaaggggtgtgggaaatgaaactggtgagcagtgaggatccaaaggaggggagaggctggaggcagggagtcctgggcttggtgacaaagagagtgaggggggtggttcctggatctgactgcctgtgcacagctttggcactagttaggattcccaggaaaccagctcctgctagtcttgggagggggtaatcaacccttctggaatagggggtcgggtccctggggcaagggcttatggggtcactgggctagaggacactggtgtgaccgaggctatagagtttaaggtattgaggcgactggggagaaaggagttttagtcccttgggtgggagtactgggacgactgaggggccctgaggggatgtggtttggtttgaggtgagtggggtcagggtcttggagtgaaccgggaatggaagtatccgggcctgggtgtggggtgatacggctgtcaggggcctggagtcctagtttggagctttctggggtcttgatattggggttatctaaaagagagaaataggacatcctggagttggagtatgggcgtacaggaacctgaggtcatggtgtgactggggtgttgaggtctgccctggggatatggcagaaggtgagcgctccctgctctgccgcttgacctggccatgcccgcagagactgatgagtgccgactgaaccagaacatctgtggccacggagagtgcgtgccgggcccccctgactactcctgctactgcaaccccggctaccggtcacatccccagcaccgctactgcgtggatgtgaacgagtgcgaggcagagccctgtggcccggggaggggcatctgcatgaacaccggcggctcctacaattgccactgcaaccgcggctaccgcctgcacgtgggcgccggggggcgctcgtgcgtggacctgaacgaatgcgccaagccccacctgtgcggcgacggcggcttctgcatcaactttcccggtcactacaagtgcaactgctaccccggctaccggctcaaagcctcccggcctcctgtgtgcgaagacatcgacgagtgccgggacccaagctcttgcccggatggcaaatgcgagaacaagcccgggagcttcaagtgcatcgcctgtcagcctggctaccgcagccaggggggcggggcctgtcgcgacgtgaacgagtgcgccgagggcagcccctgctcgcctggctggtgcgagaacctcccgggctccttccgctgcacctgtgcccagggctacgcgcccgcgcccgacggccgcagttgcttggatgtggacgagtgtgaggctggggacgtgtgtgacaatggcatctgcagcaacacgccaggatctttccagtgtcagtgcctctctggctaccatctgtccagggaccggagccactgcgaggacattgatgagtgtgacttccctgcagcctgcattgggggtgactgcatcaataccaatggctcctacagatgtctttgcccccaggggcatcggctggtgggtggcaggaaatgccaagacatagatgagtgcagccaggacccgagcctgtgccttccccatggggcctgcaagaaccttcagggctcctatgtgtgtgtctgcgatgagggcttcactcccacccaggaccagcacggttgtgaggaggtggagcagccccaccacaagaaggagtgctacctgaacttcgatgacacagtgttctgcgacagcgtattggccaccaacgtgacccagcaggagtgctgctgctctctgggggccggctggggcgaccactgcgaaatctacccctgcccagtctacagctcagccgagttccacagcctctgcccagacggaaagggctacacccaggacaacatcatcgtcaactacggcatcccagcccaccgtgacatcgacgagtgcatgttgttcgggtcggagatttgcaaggagggcaagtgcgtgaacacgcagcctggctacgagtgctactgcaagcagggcttctactacgacgggaacctgctggaatgcgtggacgtggacgagtgcctggacgagtccaactgccggaacggagtgtgtgagaacacgcgcggcggctaccgctgtgcctgcacgccccctgccgagtacagtcccgcgcagcgccagtgcctgagcccggaagagatggacgtggacgagtgccaggacccggcagcctgccgccctggccgctgcgtcaacctgccgggctcctaccgctgcgagtgtcgcccgccctgggtgcccgggccctccggccgcgattgccagctccccgagagcccggccgagcgtgccccggagcggcgcgacgtgtgctggagccagcgcggagaggacggcatgtgcgctggccccctggccgggcctgccctcaccttcgacgactgctgctgccgccagggccgcggctggggcgcccaatgccgaccgtgcccgccgcgcggcgcggggtcccattgcccgacatcgcagagcgagagcaattccttctgggacacaagccccctgctgttggggaagcccccaagagatgaggacagttcagaggaggattcagacgagtgtcgctgcgtgagtggccgctgcgtgccgcggccgggcggcgccgtgtgcgagtgtcccggcggcttccagctcgacgcctcccgcgcccgctgcgtggatatcgacgagtgccgagagctgaaccagcgcgggctgctgtgcaagagcgagcgctgcgtgaacaccagcggctccttccgctgcgtctgcaaagccggcttcgcgcgcagccgcccgcacggggcctgcgttccccagcgccgccgctgacgccgccgacgccgccctcggcccagacctcggtgatcactgagggatttccgcgagctcggcctcacttctgccccgacttgtggctcggacccagggaccttcagggcccgcagaccctcccggcgccttgagacccgaggcgcccctaccggcccccctccccggttagcgggcggttgtaaggtctccggcgggcgctgcctgccttcctcccagagggtgtttcctagaaactgataaatcagatcgtgcctcttt

SEQ ID NO: 133 - DNA, 4659 bp, Homo sapiens
actttcctgggaagttttcctctcgctgcggaacccccggggccctgactggccgcttcctccccgctggccgtagggagttttctgtccgacaccccctcttcctggccgggcagcctggcttcggcagacccccgggccatgtttccacacttgggcactggcatctctgagcatctcagtctcacctcctgaggacagcaagtgatcctggctaccccgggtaaccaggcctcaggtgcaggccccacatgacagatggacagactgaagtgggaggtgggaggcggacaccccggcgtcctgccaggaagggacaccatctgcacctggcgagctgtggcctccagccatcgtttccctgcctagttaggggcttttccctccagagccctgtccactctggccttgtttctggaactgctcctcacccggaggaccccatcctttccgtgaagcaggcagtgggggctttctggcaagtggcctcttcattaactatcccagagtgagtgcagatgaccagagggaagctggccaagtgcaaagcattgttattgtggaattaaagagcccgctcctgctcgcctccagaagtggtaatgtatttacagatgaaaaaatgagggcttccagactgtgctgatgtgagccccgccatccgttctggttcagagcataatcgtctcgtcttcagaaagaaggaagacagaacatgcctgccaagcccttcctctcttctgttctgctctcctggaaagttctggacttctctggcccagggcctcaggggactggccagccctgctcctgtgggcactgggcagagggacaaggcggaccacctgagcctgctggagggccggtatcccagggcagtagtgattagggaatgtcactctggccacatcccagcctgggcgggcctctatggggaggtccccgtttgatttggtttggttgtccacagtcagagccaagctctgggcatggagtctgggatggcaccctgaccccttgccttacaggactttgggcagccttctttggcactgtgcctcatctgtaacaagagaggaacagcgggctgggtaggacttggacagataggcactgtcgtggggacctgcagcctggccacaccatcacgggctctgagtcatctcctaccctctcccttgtagtcacagcccaggagaattctgctgggggtgggcagaggtctttgccatctgccccctacgtggctggctggcagatcaccgtggctctctctcctgggaccttgggcagtgtgtgaggtggtggggccaagaggagaattcatttttggaacagtcttgaagtgttcggaaaattgctttcatgtgctgaggaggccctgcggaggcttccagactgagctgcctgctcaagccctgcccttggaacccagagtggcgactgctcagggacacgtctgggttttaagcacacccatccatttgggcagtcttttcctagatgggctgacgcagcaggcactttggcccacagaaattataagatgcttcagaaggggatgggaggggaagcaggaacgtgctggccaaagcgctctatgacaatttggccgagtccccggatgagctctccttccgcaagggtgacatcatgacggtgctggagcaggacacgcagggcctggacggctggtggctctgctcgctgcatgggcgccagggcatcgtgcctgggaaccgcctcaagatcttggtgggcatgtatgataagaagccagcagggcctggctccggccctcccgccaccccggcccagcctcagcctggcctccatgccccagcgcctccggcctcccagtacacgcccatgctccccaacacctaccagccccagccagacagcgtctacctggtgcccactcccagcaaggctcagcaaggcctctaccaagtcccgggtcccagccctcagttccagtctcccccagccaagcagacatccaccttctcgaagcagacaccccatcacccgtttcccagcccggccacagacctgtaccaggtgcccccagggcctggaggccctgcccaggatatttaccaggtgccaccttctgccgggatggggcatgacatctaccaggtccccccgtccatggacacacgcagctgggagggcacgaagcccccggcaaaggtggtggtgcccacccgcgtggggcagggctatgtatacgaggccgcccagccggagcaggacgagtacgacatcccgcgacacctgctggccccggggccacaggacatctatgatgtgcccccggttcgggggctgcttcccagccagtatggccaggaggtgtatgacacaccccccatggctgtcaagggtcccaatggccgagacccgttgctggaggtgtatgacgtgccccccagtgtggagaagggcctgccaccgtccaaccaccacgcagtctacgacgttcctccatcggtgagcaaggatgtgcccgatggcccactgctgcgtgaggagacctacgatgtgccccccgccttcgccaaggccaagccctttgacccggcccgcaccccactggtactggctgcgccccctccagactccccgccggccgaggacgtgtatgacgtgccgcccccggctcctgacctctacgacgtgccccctggcttgcggcggcctggcccgggcaccctgtacgatgtgccccgtgaacgggtgcttcctcctgaggtggctgatggtggcgtggtcgacagtggtgtgtatgcggtgcctcccccagctgaacgtgaagccccagcagagggcaagcgcctgtcggcctccagcaccggcagcacacgcagcagccagtctgcgtcctccttggaggtggcagggccgggccgggaacccctggagctggaagttgctgtggaggccctggcacggctgcagcagggtgtgagcgccaccgttgcccaccttctggacctggcaggcagcgccggtgcgactgggagctggcgtagcccctctgagccacaggagccgctggtgcaggacctgcaggctgctgtggccgccgtccagagtgccgtccacgagctgttggagtttgcccgcagcgcggtgggcaatgctgcccacacatctgaccgtgccctgcatgccaagcttagccggcagctgcagaagatggaggacgtgcaccagacgctggtggcacatggtcaggccctcgacgctggccggggaggctctggagccacccttgaggacctggaccggctggtggcctgctcgcgggctgtgcccgaggacgccaagcagctggcctccttcctgcacggcaatgcctcactgctcttcagacggaccaaggccactgccccggggcctgaggggggtggcaccctgcaccccaaccccactgacaagaccagcagcatccagtcacgacccctgccctcaccccctaagttcacctcccaggactcgccagatgggcagtacgagaacagcgaggggggctggatggaggactatgactacgtccacctacaggggaaggaggagtttgagaagacccagaaggagctgctggaaaagggcagcatcacgcggcagggcaagagccagctggagttgcagcagctgaagcagtttgaacgactggaacaggaggtgtcacggcccatagaccacgacctggccaactggacgccagcccaacccctggccccggggcgaacaggcggcctggggccctcggaccggcagctgctgctcttctacctggagcagtgtgaggccaacctgaccacactgaccaacgccgtggacgccttctttaccgccgtggccaccaaccagccgcccaagatctttgtggcgcacagcaagttcgtcatcctcagcgcccacaagctggtgttcatcggggacacactgtcacggcaggccaaggctgctgacgtgcgcagccaggtgacccactacagcaacctgctgtgcgacctcctgcgcggcatcgtggccaccaccaaggccgctgccttgcagtacccatcgccttccgcggcccaggacatggtggagagggtcaaggagctgggccacagcacccagcagttccgccgcgtcctaggccagctggcagccgcctgagggtggtgaccccaggagggaggcaggggaggggtgcggcggtcccagctccctggctcccatgtcaagagtcgctgtgccacaggcttagggacaggaccccagctctgcgtcggtcctggtgccctggatgcccaggaatctgtatatatttatggccgggcagggtgtggggccatgcctcctcaggagccgaagcccaggggccggccagtggccttccccagcatgcaccacgggcccgggttgggtcaccagacggggctggagtgtgagggtcctgcagcctgcaggacctcgtgccaccccgagggctgagcctggtcccacgagggtgccgtgtcccctgacagggccagtgcagtttggtgtgtcctccgcctttccaggagaagaacctgaagaactatttttcgttattggttttccaatcatttgactaagagtctccatttaaataaagtttttaaaaggaagagc

SEQ ID NO: 134 - DNA, 3722 bp, Homo sapiens
aaatacagtaatgaaaactcattgaatgggtttaataacagattgaacagagcacagcccagaattggtgaactagaaaaatatacagacagaaccacagagaaaataagggagtgtggggattgataagagcataagaaacgtgatggaaaaactccaaagatctaacatacatataattagggtctgggagatagagaagtaacagaatcgggcagaagtgatatttgaagaaatgggctagaatgttccaaaatggatgaaaggtagcctacagattctagaagctcagcagaccccaagcagaataggtacaatgaaaagcacatctaggaaaattaaaagcttaagagccaggaggaaaaatattatctctgtatcagttacctattgttacaaacaaacaaatggctgtttactattacagaacttaacagccacttatttgtttgtaattctgctgtctgggctgggctcagccgggcacttcttctgctgatctcacatgaagtcacttatgttgctggggctacacacccaagagctcttgactctcatgtttggtgcctctggggaatcctggaagagtgggagctgtccaggctccatctctacatggtctcttaagtaccatgtgatccctccaagtccatctggtctctccagctccccatggtctctctggcacagtaataagcacgtgatgggtcagggcttcagaagggtgaaaaacagaatctgcctggcttctcaaagcctagaaactcatagagcatcatttcaactgcattcttgttggtcagagccagtcatcacaaagccagctgagattcaaggaaacagatagaacttcacttcttgataagacatgggtgaagaggagggcagatagaattttagggcatctctcatttgcctgagtcttcctactggctcacattgcttaaattcctccgacatgcaaaatgacacccaccccaagaaccccacagtcccatccaattatggcatcaggctcagagtctacttgtgtacagtagttccccctcaactgtggtttcgctttccacagttttcagttacccacagtcaactgaggttcaaaaatagatgagtacagtattaataagacattttgaggtagagaaagatgcagaccacatccacacaacttctattacagtgtattattttaattgttctgttttattattattaatctcttactgtgtctaatttataaattaaactttatcatgggtatgtatataggaaaaaataatagtttgtataaggttcgaatagtttgtataaggttcggtactatccacagtttcaggcatacaccgggggtcttggaacatattcccctcagataagagagaattcctgtgtatggaagagactcctcagatacagcttctcttcaactgtaaacctatgaattaaaaaaaagttattggtcctatccacccccgcacatacaacctacattgttatggcaaggatacgatgtcacatgaattgactaagtttacaagagaggaaattgaaggcatgtagcaatcccatggcagttgtgaaatccatctgcctatatgtcaccaattcccccaattccaggggtagggaacatttgattagtctactttggttctctgaagttggctcccttttctttttctcagttcttgacttttttctttgagctgtctttccttttccatgagaaatgtcctctttttgtagctttctcagcctgcttctaggctctgtcccaactggcacagttatccacactggcacaacttctttaaaaagctttgtggactttcaaattataaaccactcactccaccagagagaagccacacccacaaatttcttcaagaagtcctctatgtactttgaatgtcaatcagggaatgataccctttagagtcatatatgtcttttgtctacctgagagcgtcagctagacactggcttaaatctttctgaagtacaggtggtcgtccacttatgatggttcaacttagaattcttttactttaggatggtatgaaagctatatgcattcagtagcaaccatacttcaagtacccatacaaccattctattttttacattcagtacagtattcagtaaatcatgaaatattcagcacttcattataaaataggctttgtgttagattactttgttcaatataacataatgcaagtgttctgagcacatttaagcaatgacaggttgggctgtgatgtatggtaggttacgtgtactattcaacttaatattttcagcttacgatgggtttatcaggacataaccccattgtaagtcagggagcatctgtagtagtaacaaggttgtattgcatgtgctttattttatcttgatcctcagaccataatcttacagttaacaccctggatttttttttttttaacttcagaaccttttgctgaagaagctggtaacgagaaagttttattttgtaaccctgcaagtcccaggttgaaagtaatttcctctaaattctgcttgaaactgagcagttccttgtttagttcttctctcttttaatacctttctacaggtgttttttgaaaaattgcttatcactttcagcatttttcctggaaaccttagccagatctataacttcaataggtactttttctatcttccaagatactgtctcacttgttttgtcagtagattacatggcttctgtccagcctgaaataccaatttcctcagtggttttccagcctccgttagtagtctctttgccgctcttccaccaaatgtctataacccagtccccaaactagtgctacatgtcttaagtttctgtcatggcaatgccctgtttaaataccaaatactatttcagttatctttttctgcctaacaaatcaccccaaaatttactaccttaaaacaaaactattctttgcttaagattctactgtctgaactggactcagctgggcatttcttctggtctcacctggagtcatttatgcaactgcagacatgtggggactccaccaaagatggctttactcaaatgtctggggcctcaactggggtggctgcattagctctggcacagctgcagttccctctccagcagggtcctgggccatttcacatgatgactgagggctccaagagggtgaaagcagaagcatctgggctaggcctcttagagcctgtgcataaaactgaaacagcactacttcatccatgctgcctttcaaagcaagtcccggggcctgctcaaaattacaggcagggaaaatatcctctacctgatggtagtgacaaagaatatgtgtcccatcgttaattcaccagttgccttcacagttgcaacaatgagactgttagcttttaaacagaaatgataaaaactagaagccggccgggcgcggtggctcacgcctgtaatcccagcactttgggaggccgaggcgggtggatcaggaggtcaggagattgagaccgtcctggctaacaaggtgaaaccccgtctctactaaaaatacaaaaaattagccgggcgcagtggcgggcgcctgtagtcccggctactcgggaggctgaggcaggagaatggcgtgaacccgggaagcggagcttgcagtgagccgagattgcgccactgcagtccgcagtccggcctgggcgacagagcgaaactccgtctc

SEQ ID NO: 135 - DNA, 3938 bp, Homo sapiens
atgtgggtatcacgttcatacacgggtgtgtggaggtgcgggtgtgtgcacactcagtttctttttttgataacctggttttgtagccagccatacaacatggatccttttagtatttcatcatagggatgttacacaagggagcatgtggcagatgtcctaggattgcagctttgccccctcattgtgcccatggtggctttgcggggtccgcagcgggcctgctctgggtgctctgtgctttgccccaccctgctgccctactagaggttggccagcaccataattgttcatctcttgtcctcatttctattcttttttttgagacagagtttcactcttgttgcccaggctggagtgcaatggtgcgatctcagctcactgcaaccttgcctcccaggttcaagtgattctcctgcctcagcctcctgagtagctgggattacaggcatgcgccaccacgcctggctaacattgtagttttagtagagacgggatttctccatgttgttcagactggtctcgaacttccgacctcagatgattcgcccacctcggcctcccaaagtgctgggattacaggcatgagccaccacgcctggccatctcatttctattcttcctccaaatattttctggtacatgggtgtctgaccttgacccttaggaccagttgatagtcctggaatccacttccagaaggccttggggctctgtttgcccctaatgcagaagcttctggtagaggcagctttgaggcctgggctgcctgggagaggttggtgggccccctgcacacctgatcctgagtggcgtttgcaccgtctttcctgcgatttgcctctgctcacacgtgtagggacgggtctctccttgaggcagctgctctgtgctggaacactgctcaggtcggagagttctcgtactgagccgagatgggcatctgtgatgtcctgccctgttggagaggtctgttgtccccctctaagtgatgacaccatccacatgtggactttgccacgtttggatgtaagcgcctctgcagcgccgaccttccgcatggcttcttcacactccctctcctggccatgctgggtactggggaccccacagggagtgcaccctcaggacgctgggtttggttccagctccgactggaactgattatgtgatcgtccctggcctgagcgtaagacccacttaacaagacctcaggggttttagtctcagctccttccctggcccaatctggctcttagccagcccccctcctcctctgccactgtcccagccactgaccatgccctgggtgcccaccctgtgcagggtggaagcctggctttgggctcttggagttcctgggcagggaaggctcccactttctgccctgtgaagcccacctcagtcctggctgccccatttcccaaggggctctcaggtgcagtggcttctgcagcccctctcttgggatgcaggcctgggcacgtgcagccttgtctagctctgccccagtttgcccatccagccctcaagttcttcctgccccttcaggccactgcttgagctgatggcagagatggattcctccctccccgtcctgtctggcatcctccctttgggaccctgggttcattccctgttctggccaccttgtttgtggcccctctaggccagcaggacagacacacccagcgtgcgcctggcctcagcacctcacacgcagcgtgcatgtgtgtgcatctgtgcttggcgtcggcgtcacgtcttacaaggacaagcaggcactggggaagggtggggacacaaaggaggaacgggatgggggctccgaggcctgggagccgccctgggaggcctctgccctggggaccgttcagcagctttgggcctctctccagatcatcagccatgacacccggcgcttccgctctgccctgccgtcaccccagcacatcctgggcctccctgtcggtgagtcacgcccctgctgggcccattcggagcccggcaggctgctggggcactagatcagagagatggaagctttacatttccaccagggagagcagggaagccttcaggaggaggtgacagctgccctgggcctttgagggcgagtctgttggaatgagagtgggaaggcccagagtccctggcagtggcaccagcaggagtgaaggcatggaggcaggaagctgggacgtgaggggaatccccgggaggggtgggagggggccgtgggagctgacgccaggccaggctttgaatgccgggtggggtgcaggggagtgggttgacaagacccaggggtcacccgcaggatgatctctggcccagagtgaccccgttctgtcctgcaggccagcacatctacctctcggctcgaattgatggaaacctggtcgtccggccctatacacccatctccagcgatgatgacaagggcttcgtggacctggtcatcaaggtttacttcaaggacacccatcccaagtttcccgctggagggaagatgtctcagtacctggagagcatgcagattggagacaccattgagttccggggccccagtgggctgctggtctaccagggcaaagggaagttcgccatccgacctgacaaaaagtccaaccctatcatcaggacagtgaagtctgtgggcatgatcgcgggagggacaggcatcaccccgatgctgcaggtgatccgcgccatcatgaaggaccctgatgaccacactgtgtgccacctgctctttgccaaccagaccgagaaggacatcctgctgcgacctgagctggaggaactcaggaacaaacattctgcacgcttcaagctctggtacacgctggacagagcccctgaagcctgggactacggccagggcttcgtgaatgaggagatgatccgggaccaccttccacccccagaggaggagccgctggtgctgatgtgtggccccccacccatgatccagtacgcctgccttcccaacctggaccacgtgggccaccccacggagcgctgcttcgtcttctgagggccgggcacggtcacacggccacccgccccgcgcaccccacgccctgttcacgctcacccagtcacctccccacatcgcacactggggccccgggttcagcctggcctgcccgtgccctggtgaatcacctggctgagcagttcccctggagccccttcgggagcagggctgtgtcccagatgggccacggctgagccttcagagtacgtcctgcctggcacttactggtccttaccagagacgcccagccccatccctgtcctcatgacccctcgtccaccccccacacacactataaggctgagggctgccagcagccccgtctgcccaccattcccggccgtggaccatagtcgggatgtcagcagacacacatgggcagcccaaagctgcaggtgccagggcccaccccagcctcgcctgtcacccccactcccgcctcagggccaggcccaggcctcaccacctgacgctgcatgagacattgacaccagaaagccctcttgggggcactgctccctaccccagggccctggccagccgggagcttggctctcctctggctagagtgggaagagggggctggccatggggccctcccagaacctcagcatttccttccagcccatccaaacactgaggcagccttggggaaccccgagctggggggttggcagcccactgcaccgcctcagggttttggggtcctgggctggggccaccatccctgatggcagaactcccacaaccacatgtatttattcctctgtcctaaaccgtcccctccttccctcacccccagcacagggggattctgagcagtgcctcttgtctgagggacatatcagtgacctcgacgttgcctttagactacagttgtgttagcctcttgcgt

SEQ ID NO: 136 - DNA, 3633 bp, Homo sapiens
atggatgtgaggagccaggttggacctgtgtgcattcattagatgggtgggaggctgaggaattcacaggacgctaacctggccctctggacatctgtgtgtgctgcttaggtgcatgcaggagcgggggcaggggctgctggtgtggcagcaggaggagccctctgagtttgacttggcctacgccaatttcctctccctggatatcagcatgctgcggctctttgagaccttggagacggcaccacagctcacgctggtgctggccatcatgctgcagagtggctgggctgagtactaccagtgtgagtgaaggccaatggttggtccccctgtcgtggcttgggaggtctctctcaaatgtcagaactgtttttattcttttataaaggctgcttagaaaacaggataacaggctttagtcaggcagatctggcttgaaacctaaagtcattctgcagctgtttgcgtttggacaaatgccttgacctctctgagtatgtttgttctcatctgaaaaatggacataaatcctcctgcctcataaggttgatgaaaggattaagtgaggtgatgcaaagaaagcccatttcctggtacataagttcctggtacagagtctcactctgtcgtcacccatagtggagtacagtggcctgatcattgctcactgcagcctcgacctcccaggctcagttgatcctcctgtctcagcctcctgagtagctgggactacaggcatgtgtcaaccatgctggctaacttttcttttcttttcctttgtttggtagagacgaggtcccacgttgttacctaggctggtcttgaactcctgagctcaagtaacctcctacctcagcctcctaaggtgctgggattacaggtgtcggccactgtgcctggcccacaagtcttaattgtaacttttataattttgaagataataaagtgtgtaaggtgcctgatacagagtaggtaacttttttgttaagaaacaatttaatacgttgggatgtgcacaggttgcgtgaggccagagttggagaccatcctgggtaacagagtgagacctcgtctcttcaaatttttaaaaaaagaaacaagaaacaatatattgaatgccttcatccagtcgggttttcattgtgcctctcttttctgcctgttactgtgctggggacacagcagtgaacaagatgaacccagcccctgcgctgccaggatgatagactaaaacaagtagctactgtatagcatgttgagtgactggaaaagggagaggcaggtggcagaggctcacagggccccctaagcatgggtgaagtttatagtgaggagctttgggagggtttttgcccataaagggaaggtgacttgcctgttttcacagactcagacagtggccaagctaaagagggcccccacccacatccaactcagggtccaagccttcccctttgccttcctccaccgctgccataaatgccagagcctctcaaggaaccagtcctcattctaccgtcacttgctgtgtgacccggagagccttcctgtggaagatggaggttggactcaatctccaagggccctttcatcttgttagtctgagtctatgtattgattgaaaaaacaataatagcagctgtcactgttagccaggtgccagctattagccaggcccggtgggaagcacttacagtcatcattgctcatgttcacagcagccctataggtttgtgctaggttgatctccatttttaaagaggtgcagaaaggtgagtgacttgctctgggtcactgggcactcactgggcacatgtttttgtctgttgagggtgggggaggtctagaaccagggccaagtgcagacagtctgcactgcatgtatggcagggggtaagggggcgaaacagattttccctactttttatttagcaaacctctctttcgctgctgttatgtgccaggtactgggctgctgggggatcccaagtgagcagagtctgttttctaccctcgaggagctcagagaaaaggaaatagataattactgtgtgatgagactccagacagaggggttggcatctgcacatccttcctgggcatctcgtgggcactgctcgattaccaccaggccttgcacacctgcctcccctccaagcccctcctgggcctgggctcctctgtgatctacgtcctgtggaacctgctgctactgtggccccgagtcctagctgtggccctgttctcagccctcttccccagtatgtagccctgcatttcctgggcctgtggctggtactgctgctctgggtttggcttcaaggcacagacttcatgctggaccccagttccgagtatcctctatttctcctggttcaacgtggctgagggccacacccgaggccgggccaccatccacttggctttcctcctgagtgacagcattctcctggtggccacctgggtgacttacagctcctggctgcccagcaggattccactgcagctgtggctgcctgtaggaggcggatgcttctttctgggcctggctctgtggcttgtgtgctactgctggctgcaccctagctgatgctgggagcccaaccctgaccaggtggacaggacccagagtctactttcctcagaggggtatcagctgcctcagacccagttagcacagaacttttttcccaagggtaaggctgaggctgcttcgccagtgaagggagaggtgaacggcgtcctttgaagcaggatcagacccagccagcagagatggagagtgactgctggcagaaggcaggcgaggataagctaacgatgctgctgtggcctccatgcactcagcaagagtgggatgcctctgctgggccgtgcaccagggatggtgctgagtggggcagaggcctgccttcaaggagttcacagtgaacaagatgagaagggctgggccctgcagggtcaagagccccaattacgtacaagacactttgggaggaaagaagactaccttttcttttccccctgccattggtatagctggtgccccaaaactttcacctccctccctggccacctctaaaatgattggtataggggcttccccaccccttagctcccctatcctgggctagaaggccacagggactgtcctctagaattcttcctcccctcccccacaccattcattcaattcgtgaaacaaatcttcaccgagagcagtttatgtgctaggaacatcattctatccttgcaacctggaacaagaccagctaccaccttagcttcatcccctacttgcaccaaccagtcccaggttagatctcaaatgccggaagtcagggatgcccaactctgggcagccccagtcagaacctctgggatctcagtgaagctggcctggcctctgctcttgctctcaaggggctgcttttcaaccaagagccttgtgagcctggtctgagccttgcacagccactgagtattttttattccttagccagtgtacctcctacctcagagtctatgtgagaggaagagaatgtgtgtccctgtgggtctctgcaagtgacagatgtgttgtttttaacagtattattaggttatgattaaagcctcatgaaatcctct

SEQ ID NO: 137 - DNA, 3667 bp, Homo sapiens
gtgctgctagaaaccacgaacattagtcatctcgcagcatgtgtgcacatggggtgacccgggggcctcctcgaatgcagcgtctacgcctggtgaatggacgcactcttaccaattctgctctgggagatgcagcggtaacctaccgagcgcagaggccggcgcgcacccgtggagcccgcgctcgcgatccctcctcgtgccagggccccagggcagtcaaggcctgccgaccgttaggcgggtcaaggggtacacagggtgcgaattcgttaggcaaaagctgggtacaggcgcgagccacaggcacggaaacctcgcgccgaccggggccctaggcccgacgacggcaggtaaggggaagtggaggcacacagggctgggacgtgccccaggcaccatccgggtggcttcgggcgcgggacgtccgcagccccgcagctcccaggacgttcgacaatctgcagctgaccagcttcggccggtttggggataaagggaagacaggcggcgcggggagtgggaacgcctgaaggccgcgcccctcctttcaggtcggccaggagcgcgccggtaagagcctgggggcaaggggtagaaagacgcccacctcatcacaacccagagctcgggactcctatacagtcccatagagaacaggcggccgccattcccctcccccacgctggcgggtaaggctagagaacggtttcaaggaagacgcatgcgcatgaaataattataaaccgctaggactccgaagttcaatattcgcgggaaggcgcaggcgcaacaaaaagcccggcgggtttatgggtgggggtgctgagcccaaaacccaagcgtgtaataatccgccggcgggaggtgggctggctcttgaaattacgcatgcgccagagctctttgtgacgcaacggggcggtgcgggcagctggctgcgcgtgcgcagaactcgcacaagggaccttatttaggttgcgcaggcgcccgctggccatttcgtcttagccacgcagaagtcgcgtgtctaggtgagtcgcggtgggtcctcgcttgcagttcagcgaccacggtgggtaccgtttttgcgaggattgtttgtccccatatctctgggagggccacggggaccttggcgagctgcaggctgccgtcgagagccgcgagtggttcgctgaatctcggcaccgccgctgaggcctgcaggccgcgccgactctattgtgtgagaagtcggaggaggcggagcggaagcggccgccgccatttcctttcctctacgctggctctcggcccgggcccccacggttcggggcgccgacagctgttgctcaggacagctttgggggtccggtcgccggacgaggaggtgttggagtcgccggggtgggtgcatccgcccggtttttgctccgtgggggggcggtgcgggcccgggcgcgcctcggaggcgaaggacagcttaattggcgctctcagttctggtcctccccgctttgcagtttgtttcgacgccggaccgcgtaagagacgatgatgttgggcacggaaggtggagagggattcgtggtgaaggtccggggcttgccctggtcttgctcggccgatgaagtgcagaggtttttttctgactgcaaaattcaaaatggggctcaaggtattcgtttcatctacaccagagaaggcagaccaagtggcgaggcttttgttgaacttgaatcagaagatgaagtcaaattggccctgaaaaaagacagagaaactatgggacacagatatgttgaagtattcaagtcaaacaacgttgaaatggattgggtgttgaagcatactggtccaaatagtcctgacacggccaatgatggctttgtacggcttagaggacttccctttggatgtagcaaggaagaaattgttcagttcttctcagggttggaaatcgtgccaaatgggataacattgccggtggacttccaggggaggagtacgggggaggccttcgtgcagtttgcttcacaggaaatagctgaaaaggctctaaagaaacacaaggaaagaatagggcacaggtatattgaaatctttaagagcagtagagctgaagttagaactcattatgatccaccacgaaagcttatggccatgcagcggccaggtccttatgacagacctggggctggtagagggtataacagcattggcagaggagctggctttgagaggatgaggcgtggtgcttatggtggaggctatggaggctatgatgattacaatggctataatgatggctatggatttgggtcagatagatttggaagagacctcaattactgtttttcaggaatgtctgatcacagatacggggatggtggctctactttccagagcacaacaggacactgtgtacacatgcggggattaccttacagagctactgagaatgacatttataattttttttcaccgctcaaccctgtgagagtacacattgaaattggtcctgatggcagagtaactggtgaagcagatgtcgagttcgcaactcatgaagatgctgtggcagctatgtcaaaagacaaagcaaatatgcaacacagatatgtagaactcttcttgaattctacagcaggagcaagcggtggtgcttacgaacacagatatgtagaactcttcttgaattctacagcaggagcaagcggtggtgcttatggtagccaaatgatgggaggcatgggcttgtcaaaccagtccagctacgggggcccagccagccagcagctgagtgggggttacggaggcggctacggtggccagagcagcatgagtggatacgaccaagttttacaggaaaactccagtgattttcaatcaaacattgcataggtaaccaaggagcagtgaacagcagctactacagtagtggaagccgtgcatctatgggcgtgaacggaatgggagggttgtctagcatgtccagtatgagtggtggatggggaatgtaattgatcgatcctgatcactgactcttggtcaacctttttttttttttttttttttttctttaagaaaacttcagtttaacagtttctgcaatacaagcttgtgatttatgcttactctaagtggaaatcaggattgttatgaagacttaaggcccagtatttttgaatacaatactcatctaggatgtaacagtgaagctgagtaaactataactgttaaacttaagttccagcttttctcaagttagttataggatgtacttaagcagtaagcgtatttaggtaaaagcagttgaattatgttaaatgttgccctttgccacgttaaattgaacactgttttggatgcatgttgaaagacatgcttttatttttttgtaaaacaatataggagctgtgtctactattaaaagtgaaacattttggcatgtttgttaattctagtttcatttaataacctgtaaggcacgtaagtttaagcttttttttttttaagttaatgggaaaaatttgagacgcaataccaatacttaggattttggtcttggtgtttgtatgaaattctgaggccttgatttaaatctttcattgtattgtgatttccttttaggtatattgcgctaagtgaaacttgtcaaataaatcctccttttaaaaactgc

SEQ ID NO: 138 - DNA, 5063 bp, Homo sapiens
actaactttgaaattgccttcatgcccatatattggggctaatacatgttaactggctgtatgcaatctcacaacagactccaagcttaatgggcaatctgaattggtgctttgtaaaattgcaaatgatcttgtagaagatcataggagcagaggttgttttcagaggggcaaaaaaactttgatttcctacacactctaaaaatataacgaaggatgatatggacattccaaaatgctatcctccttgcaaagtctcttggcctccaaaactggaagacgtcactgatccaccccttcccaacacagaaggctcatgctgctgttcacatggtcatccattcactcaaccagcatccctcaagtgccggctcccatcacaccccagcctgaaggcaccagtgcttgtgacattgccaatcactgcccaaaccagagcccattatgtcccagaggcagaagattttcaaaggaattatttatttgttaaaatacaatccaacatatatataacatatttgtaccaccaatattgcctacatatgttttaagtatctctttgaggaattaaatcagggaaaaacaattaacactatcagtgcttagtggatgacataatggttaaaggtaaatttgtctgaagtattagctttatttatttaatttaattttttttttttttgagacagagtctcactctgtcacccaggctggagtgcattggtgttatcttcactcactgcaacctctgctttctgggttcaagtgattctcctgcctcagcctcccaagcagctgggactaccggcgtgcgccagcacacccggctaatttttgtatttttagtagagacagggtttcaccatgttggccaggctggtctcgatctcctgacctcaggtgatccgcccgtctcggcctcccaaagtgctgggattacaggtgtgagccacaataccagctttattttgattctaaaacttttttttctttttttttttttctgagaggatctgctctgtcacctaggctggagtgcagtgatgtgatcatagctcattgcagccttcaactcctgggctcatgtgagattctcctgcctcagcctcccaaaattctaggattacaggcatgaaccactgtactcggcctgattctagaacttggttgtaagatgcatataatgtccttcattttaatttggaattaatatgatttggaagacacaaaggggccacagctccaaagagctcccctttggtcttgccacggggccacaggtgggagagagtcctgggtctgctgggcctcctgagcatcttcctccggtacaggccccaggcagatgcactcccgttttcttccctcctcccaccctgatcaccagaggtaggaacaggccttgcagtctatctttatcctcatcgctgctgcttgccaggcattctgttgtttgttttggtgttttccccacctgtttagacaaaatggcatatgcagagtgtgccttaaaagaaaacaaaaaattgacacttgcttgaaatgtttaaagttcaaagtctgttttgtgcttgaacaaggcctagaaataacatgatgtggcaccgccattcttgccgcctggtatcaggaagtctggcggccctctgggcggtgagaaccctgatgccgccttttctggtaactttaagagcagggcagatttgccacacattctgagtgaaatgttatgacggtcttgggtcagggatcacaaggcactggttgatacaggtgcaaggaaacagctatttaataattggctttttagccctgtgcacagtaacctaagaacatgtctcttttcgtattcaaaaacctagtccaatcccctgaatctaaagtagaagttggaaaaacaaactcagtcaaattattatgattatcagctgtcatttatggaagacgtattatgtgccaggtactataagcaagcatgtggctcacattaatcccttttaatccctctagaatttctgtaaagcagatattattatcccattttgcagataaagaaacagtagtacagagatactaaattactttctctgagtggcacaactataactgttgaaacagaaatttgaactcatgcctgtctaacttctcttcttaagatcttagagtagctaagctgctggccaagcagcgtggaccatgattccaagtcccaaagatcttggggaagctgttttaaatttcacttaaattttataccttacattagttatttctcctctgatcatttctcctctatttattttgagtatatttcacaaatttataatctaaacagctttaataattaccgtttagtaagagtaagatattttcatttcatctgtttactgttaataccctgcctactttgaaaacatatttaacatagctttcagtatggaaaagatactcccaaaacaaaaaccttgaagcaagaataaaaaacatcagctgctagatgaaagccaggggctaattatggcagaaacctaatcagaaggacacttagttttgcacttcctctcagccaagtcaacagggaaaaaatggcaggtgacccatcctgtattcataagacagcttgccaagtcaggaaaacagtgctttcttgttttatcaatgtttggaaaattaataattttcacaagataacatttaagttaaaattccaattttatttttacttcatcacaaactttgaatgtgtgaccacttaaaattgctaaaacaatataatgttgtcatttgcctgaaaaataatggaagaaaatagccacaagcctaccttctacatacaaggatctacaatcacttttgtgttttcctttttgttctttttcagaaaacacatttctctcttttttccctagttgtaaacatagtaggaatgccacattgttctctgctgtcagtgatacaagtattttccatgtagaaacagtgttcataattatcactttcctgaccacataatgtgccattaaataggggtggcatattttcattaagtatttctctgttggcggccatctaggtcacttcttattttatagtaaaggtaaggattacaatgagtaattagttcaaccttcagtttaattataatttacattaaatttataaaattaccttcactaaaaatctatatgcataaaaaagaaatttgttgaaggcagaaacaacctgttttccaattttactttccctagaatatagtgtcttaaaaatatgaagtactttctcaataacttaatgaataaataaaatgtaggtagcatcaggtagctcaaaagtggctgaaatcgatggcctgggatgtcccctctaagtcggaaagaacatgaatagtagtaatcctatacctacccccaagaaaactttacattgaaatacttaaactaaagatccagaatagcacttgaagaaatcagaatattagaagattgagggggtgggggatgcatatctgccacagcttccccagcccctccctcctttttgtgctgccatttggagtttcaagcacagagagaagtgatgcccattgatactgctctgaataaaagcccatgctgtaaacgtgtgatcgcctatctatgggcagaaagggacccttctctggtactgcatgtaattgttgaaggcatctgtgcgctcacttaaggcccatctgtaccctgctccccagtgagccgcccgctctctcccagtgaagtcaggtgctcagagcagcaggctgggcgcaggatgcaggaaagcgcctcttttaaacattaggagtaattgactcgaaatgtataatcgtaacaactcctagaatctatcattgtcttaatggactatttagaatttttgcctgtaaaaactaaaatatatattagtcttgtcttggaagagttgatatttttcagagaaatcgaatctgcactatttatgggttttgcactataaaactctgcagcccagtcacatggcttctttttcctaagccatctgtcacagaggtctggaattttatgtgaatgttggttgtgcagtcttaacccaagtttttttttatttttttatgaaaaatgtcagcaactacaatatttagcattttactttacgttggtcattaaacttgattactatagctctgtttcattgctatttacatatcagctacgaagccaaaaattgttttgatgcgctcctggcagaatacattgtgagatcatggagagagagcacacgtggcactgatatggttaatatcttggatttttgtaactaaggtttattaatgctggtataaaaatgtatttgatattatacagatggcataagatgttgtggttactaagttattatcccggataagctgtactgccaaattccgggcttaaaactatcacgagagattaaactatttactaaaaagggacagaaagatacggccaaagcatcttagtacaacatattagaagcgtatttacctcccacaaatatagtaaagcatatctatctcataggctgagagattgaaaatacaaactttgcaggtaaaataagcaaataaaagaagggcttttattttctaagtcgggcacaagcagcaagcccagctgatgcagcccagtggcgcctgtttgggggttgggagtggggggttgtttaaagggaagagttaaaacaaatcccctgggaagtagctggttaccacaagagttaaggatcttgctaaatattcaaagaagagtggccagccaagagaaaaaaagagagtagccaaattgtcaagaagttaattttaaattgatggatgatggcgaaaataccagaaaggtgttattcgacccatttagaaaaatgacaggcagcttcctcctaccttctgagaatgactgcacagtaatgttcacaattcatgacaccacatgagccatcccagtgtgcgaatcttgtagaacatacgaggcacgtgagcagtttgctggagcttgaaccaaatacagaatggggtactgttcctcccgacacag

SEQ ID NO: 139 - DNA, 4378 bp, Homo sapiens
ttttcagcttttcttctctggtttctccccatctttgtggttttatctacctttggtctttgatgtcggtgacctacagatggggttttggtgtggatgtccattttgttgatgttgatgctattcctttctgtttgttagttttccttctaacagtcaggtccctcagctgcaggtctgttggaatttgctggaggtccactccagaccctgtttgcctgggtatcaccagcggaggctgcagaacagcaaatattacagaacagcaaatattgatgccttatccttcctctggaagcttcgtcccagaggagcacctgcctgtatgaagtgtcagtcagcccctactgggagatgtctcctagttaggctacacgggggtcagggacccacttgaggaggcagtctgtcctcagagctcaaacgccatgttgggagaacacagctctccagagctgtcagacagggacgtttaagtctgcagaagtttctgctgccttttgttcagctatgccctgcccccagaggtggagtcaacagaggcagcaggccttgctgagctgtggtgggctccacccagttcaagcttccccagctgctttgtttacctactcaagccttagcaatggcggacgcccctgccgctgccaggctgctgcctcacaggtcgatctcagactgctgcgctagcagtgagcaaggctccgtgggcgtgggacccgccaagccaggcgcgggatataatctcctggtgtgccatttgctaagaccattggaaaagtgtagtatttaggcgggagtgtcccatttttccaggcacagtctgtcatggctgcccttggctaggaaagggaaatcccctgaccccttgggcttcctgggtgaggtgatgccctgccctgctttggctcaccctctgtgggctgcacccactgtccaaccagtcccaatgagatgaaccaggtacctcagttggaaatgcggaaatcacccgtcttctgtgtcgatcacgctgggagctgcagactggagctgttcctattcggccatcttggaaccaagcggaaattttttaatataaagtgtttcctcctctcccaatgtcccatgtccctaataatgagaatttgtgattacaataattttaagaggaaagaatacagttgctagcagaaagccatgcaaattagggagactggagtgtgagatctcccccctcctccagctgtttttcttctactgacagctggcagcagggtggggttacaggagcctctgccttctctgggctggatgtgtcaaacctttctaactccaaggaaaccatcagcagaggccccctacttcctgcctgtgtctgtctgccagtatgcagacaccatgagataggagcagtgctcaaagaactatgcatttgctttggtatcttaatcccaaatccacttcaagatttgggggaaaatgagcaacctccagtgttaagtgtgaaaagtcagttctttgtggaaagcatgattgaattttcacaattgaggaacttgtcacagtgtgtgatctgcccagaggcactctccaaaacaccaaaaattctccaggaatgttttcatctttttgaaactccagtttgcatttccaggagccaggctgacctgtgtgcacagtgttctgtaaaggcagtttgttttttcagttaaaggtggtgggaggaacactggagtggtgtccactgttgagaaagagatgggaactcattcctgaaggaaagatgggcgtagagagcattaggctgcccaggcatgtgggcaagcagtgagaacagaagtctttggggacaaaagtcctgtgctagatttgccaagagaaatatcaactgatctctttaaaatgagatccctcccaccccctacttggggcctggaaaatgtggtctgctaggtatggagacaccaaataaacagtactgaggctccctgtgtgtcagtcaccacccctggcaaatgccaaaatgcctcactttgctcgaggaatttacaactcaaggtgtttgtgtcacaggccaagacgggagtggaggatctgtccatcagagggcagaatgcttcccctatgccaaggcgcctcctcttgtattcacgcacagcattttcctgaaactggttactgagcctggaatttctgttaacgttcaaaggcaaatgagaattaccaagctgagacgagggctgggggtatgctatcttcctttagtccctttcataaaagcccttgtgctgtccagctgcctttctttccagaaggtggtggtccagttttaattatgttaacagagggagtatagctaaaaaacgacttactccatcaaaatctcttccgctaccaagagcacggagaccagcaggtttggctgtttgaatcctccctgctctgcatggcttttcggaacctcggatccttcgccttaaactcaggggttaaaaccctaagaattaaacgaaataaagtatctaaagtgagcacagggcctggcctagagggttgagtttcctcctcctcccggataagggaagcggtgatgaggccaggtggagcccgagggccttcctcggaggcggtgcgggcagcaggtgagggctgcgcccaggagggtccgggaagggtccctgggtgggggagggggaaaggggctgcggctccggccagcggggagccctggcccgccctctcccttttcggacctccgagggagaccggccgagagctgggccaggtgggctgcaccgaatggggagaagcggctgcgggagccgcggcggaatcctcagctggagggcgccccagaggtctccgggatccttgtctccctggctccttggtaggcgcgggaggcgcccatggggctccagccggggcctaggaggcggtgacagatggctggggatggaggaggctaagccccgggctttctccccggcgcccgcaggggacttccaggcaccctcgacggcggaccgagctagggcgcggggccgatggtgcggggacctccctgggctttggggtcatgaaaggctcccagacgctctggccccgcaggcgctgctcgtcactgggaccgggcttggttcgatctgggcaacagcagttacactgcggccgctgctccgcccaggccagggcagtgtgggggcggggaggaaggggacgcatagtttcctcggggctcctgtgtggccagcctaaaagtggggttttcgtcgcctgtggtgaaatatctgcgcctcttccatcctcagtaaccagtactgattttccttagcgtctcctgttatccaaagcgaccacaacctacatgacagccccactagaagctttgaggtgacattctctggaatctcgatttagctgtgcaacacttggcaaattgacttcctgttcctcggatttctcacttgtaaaacagacactgtaataccatctactttgtagggtgaatgtcaatattacatgaaatcatgggagtaaagcatttggtagatggtcactcaatgaatgtgatgattatggcaaggagttgtttttcaagggaaacttgcctgtgaaattggtttaatacatttattcatctgcattctttgtttcttttctgtcctaagtaactacacaacaatgagcaggcttaagaaaatatcaactttggtagatgctaaatactgcttaggacgaagtaagacatctttgacaaggcaagtcgcttttaattcaaaagaattttgagaaaaaataatttagccccccttccaaagataagagattacagtggtagtttctatattcattaaaaaacttatgtttttaaaatggaaaaaatgctctgaccggtgacaggtttaggggagttcatttcacaagtgtctggagcaacagttaacttcaaggtcaacgtccagacatttggccaggtaaagaatcatttcccaatcatttgctgtgccagtgtggaatgtaaacatgctgaataattgaaaacagctgttgttactgtaatagtcaccctctgcgtcctttcctgctgttttccacgtgctctatcccccaaatctaaaaggctgtaagccaatatcactaatagcaaaggtggtcatgagggcatttttcctccttctgtgactcatttctttctgtgtgagatgactccgtagacacaacacaattgagtcttgcatgttatctacccctttatttaaaacccaaagaggacttacaaaaagagaagaaatctctttaaaggtgaacaatgcagtcaagttacttgctcacaatcatatttgtaggctagcttgagaggactttgtattataataaaaagtttctgaattgc

SEQ ID NO: 140 - DNA, 4546 bp, Homo sapiens
tggttggtgtccactgttgctaacttcatttatatgcttcataatgggcacattacatatagtcttgtatgtatcagctattacattgtaaaagagaacaaaatagactttttctatctgaaaacatcaagtaagggtaaggaaagagtgaggtagggtcgctatgaaaactaaagctttctcaagttgggtggtcacggagcaccctgcccaggtcaggaggccacgtccacatggcacaggccctgcaggaccacacggcagggtgtgcgtgggaaagcaacagaggacctggagtgttcttggagcagaggctcaggccttagagaatgagtgctgctggctattcaggcacaggccaccaccctttatttttttcagtcttctgccaacatttaacttccttgcttcctccatgaagccagccttgtcccggagtgagacaggcttcctttgccacgctgcaggtcctctgtaacacagcctctcccctgggctcagcgggcttgaggctcactgagagtcaggaaggcacgtctgctgcacaataccgcaaatgcaacccagagtcaacaggaaggatttcatattagctgctgccgggatagctacttctgttcattagtgtagataattgatatgtgagtggaaccgtatcatttcgagatcttaaaaagttccatttaaaatcctcacctcccaccactaccagcccccttattgaagatgaactgaaattgtattggactgcccttcctccctcatgggtggaggatggattcatgtgtctcccgaccagctataccagcctcagcctgctggctctaccttcctcccccataatagcctcctgcatctcatttccctagaccctggcctatggggacatgaaccatgagtggattgggaatgaatggctacccagcctggggctcccgcagtaccgcagctacttcatggagtgcctggtggacgcccgcatgctggaccacctcaccaagaaggacctgcgggtccacctgaagatggtggacagcttccatcgaaccagtcttcagtatggcatcatgtgtctgaagaggctgaattatgaccggaaggagctggagaagaggcgagaggagagccagcatgagatcaaggatgtgttagtctggaccaacgaccaggtggttcattgggtccagtctattgggctccgggactacgcaggaaacctgcatgagagtggtgtgcatggagccttgctggccctggacgagaacttcgaccacaacacactggccctgatcctccagatccccacacagaacacccaggcacgccaagtgatggaaagagagttcaataacctgttggccttgggcacagaccggaagctggatgacggggatgacaaggtgtttcgccgcgcgccctcctggaggaagcgcttccggccgcgggagcaccacggtcgcggcggcatgctcagcgcttccgcggagaccctcccggcgggcttccgtgtgtccaccctggggaccctgcagcccccaccggccccgccaaagaagatcatgcctgaaggtgagtaacaggcgggctgggcatggccgaggcccagccgagcgcgggcttcttcctggcaccccagggccgggccgggtggagaggggcgaggccgaggctggtgccccgcgctcctgcgctgcagctgcactaacgctccgcggggagcgtgtgcgcgcactaacccgccgctctgtgtgttctcccgcggctgccgacttctcccagccgggacggcggggtcgcagagactggagacctccacggttcggacctactcctgctgaccccccatcctcccgccccgggtctgacgggggtgtgcccgtggctcggggtaagtgggccaggcccggggacgcgggcaccttgctgctggccctcggccccacgcacctgcccttggctgccggcctggccctgccgctccagtcccgcttaccagcactgcctggcttgccccttcctgcttcgtctggcctggggcgctttgcgcttggagcacgctgcgttgccgctgtcgcacacatcctacaacctctctctcagatgccctgcaacctgcctcacagtgcgatgcctgtctctctctctccctcagctcactcccactatctctacggacacatgctctccgccttccgggactagccatggcccccagggctggcttcctccttctgggtttcacaggctcctctggccctgacccctcctgctcgttccccttccttccgcagctcctagtctcgtccgtgactttccggttgccctggatctcagaatatattcgtccaccccctcggcaccccattaccccgagtcccaccgtgtgtccgttgtaagtccggtggatgtggctggggtttcctggtattgtggaggcacccaggttgtccatgcttgggattctgggggaaggagagaagggcagctcagggtggatgtgaagccacccttcctcttctggacccagcctggtctgcactgcaacctccaccaggaccaggatcctgggccacaggctgggatgttccttccaagaaagggtcatttcagacgcagccctgcttgggctattcaatcttagggtgtctatccacgtctggctgtgccaaatggtctggcagctggttttggcatccccagcatcaccactctcccaacccatcaccgtgactgcagttcctgcccccattctcttggggtcagggaggggctgggaagggctactgaaggccccattctcccacaggatggtgaggctgggaggaggaagactgaggtagagattccaggccctggcataagctgaatcccaaatttgggtttgggaagaaccagagagaaatggatccctgagctctgagccaagggtgaggatggggaaactctaagctcccacctaataagaagcataggcagaccagccagagggagagccaatggcctctggtagccttaagcccaaagggcagtgggaatgtcccctgccccaaccatcgggtggagctcctgctgggctatggggaagggaggttgtgcggatcttgactctagggcagaacagatctaaccatgcattgctagctctgctcccagcatcccttccccttctctcctcctctgcctcacttctttagtaatcccaaccctataaaaatgaacctaatgggtggattgaatatacattgagcccaaagtcaagtttggggaaaaggcagactaaggcctcctttctctgacctcccaggaagaaaatagcttctcctacagtgattcatgtcccaggtccaggaaatccaatgttggtgaaggcagccactctcttgcttgtccccaaatcacctaaccctcatccagggctattttggtgggcagggactgcctcctcccggaattcctaagatccgcccagctgccaccattttcattgctttccccagcagcatgatgggaacccaagctgagggatacaggtcctgatttggtaggaatattattcccaagaaatacccgctcctcacctactccctcatcctaccaaggtgcctgaaaatgttcaagacttatgttcagggtgggatgatggaaccgagggcttcatcaaagtgagaggaaaggaaaagcatctggcatgtgtttcttggataggggccagtgcagtgccatcctacaggtggctggagcagctgctttgcaacctgatcaccttgagttctgagcagggactaggcttgcaggtgagataatgggccagggcacccagtccagaaggagcaatggcacctgggcagtgccagggcttaaagcccgctgctccttttcggtagaggagaggcccatcactggtgtggtggggtgggctctcccttaggcttgggcaaggcagccacctgcccttgctctcccttagtgttccctggcctccctgccatcaggttgctgggagtggagatggagggattattgagcagaaaatgagttggatggagataaacagctcccatccctgggtaatggatggtaagatgatggagattcctaagattggtggagttgggcaatgcatagccatctgactccttcagggtgctcttgatgggctggctgtaagggagactcagtcccagcctctcccctctacaactcctgccactgttggccatgtcgtaaggcagcagctgtgccaggatagctgggtccattcagagcaccttgagaagtgttgcagggaggtgttaagaagagaaatctgtgcaaacagtgatggaaggctgttgtcttggtgtatcccttgcctcatagtcaatatatttttttttggcgagtcaccagtgacccgagccctccacaccagcctcctgtatctcatcaggtcccttctcagtactgtatttgctcagtgcatcaggaatgggtgtatgggtgtgtgtgggtgggtgtgagtgtgggtgtgtacgtaccaataaacaacctggttttaagacaatgt

SEQ ID NO: 141 - DNA, 3891 bp, Homo sapiens
aagaagctgctaatcactggcacagagcagttcaatcagaaaccaaagaaggggcaggaacaagttactcctatagcctactgaggtgcagcccgctggcactaggcaaaaagcacttatggcaccttttgatgaacagacttcttttttttaagagtcagggtcttgctctgttgcccaggctgaagtgcagtggtgcaatcatagctcactgcaattttgaacttctgggctcaagcaattttcctgacttggcctctgaaagggctgggactacagcctttgggacagtagttttgattaggctctccaaccacatagctatgctctgggacttctggagaagaaaacaaacaatttggtcaacaaggactctcaatcatcaccatctagtctcatgcattagttttattattatttttgagacagagtctcactctgtcacccaggctggagtgcagtggtgcaatctcagctcactgcaacctccacctcctgggttcaagcgattctcctgcctcaccctcccgactagctgggactacatgcaaatgccaccatgcctggctaatttttgtatttttagtagagatggagtttcaccatattggccaggctggtctcgaactcctgactgcaggtaatctacccacctcggcctcccaaagtgctgggattacaggcgtgagccaccgcgcccagctcgtgcattagttttaatacaacaagggctggttttataatctattttacctctaagcacttttgtatgtttttttcaaaattcttcacattttccccctgccttttcaccccaaatccattttcagccaacccatttttctcttcctgtgttgttcacaataacaaaaaggaaaaaacaccaacaaaaacccgttgcacctcataataggtctctggacgaatacaatagatacacaaactgacatatgccaatgcaaaaattacaaatattgtatcaaaatgttatcttgtggcacaaaacattgaattacaaaaaacttacagattctaaaacatgctgaaaaagatgaccaaatagcacaaataaatggagcagacgtaattaatgtgaaaattgaggaatatggtaactctcatggttttcaaggtttccccaaatcctttggacctttcaaaaacttctattaaaaagtaatgtatagtgctcacttcgccagcacatatcctaaaaccggaacaacacagagaagattagcatggctcctgcgcaaggatggcacgcacattcgtgaagcgttccatatgtttacatcacacaccagggcctctcggcggggtgggggccaaggggaaggagaacgttaggacaaatacctaatgcatgctgggcttaaaacctagatgacgggctgatgggtgcagcaaaccaccatgacacatgtatacctatgtaacaaacctgcacattctgcacatgtatcccagaacttaaagaaaaaaaagaaatgtataatgataaaaagttggaaaactcagatatggaaaaagaccatgaagaatacccataactatataaataagtacatttatatataaacacacactacatgatgagcagactttttttcatacacgattttatacacgattgtgtatgaaaagaatatttcaggaagaatacatatccatgtaattgcctttggcgagtggactgagaatgagtgtaagaggtgaaattcctcttcattgtgcagccatctgtgctacttgaactttctctatcgtatattcagataaataaatgaaatcaacaatccttctaattccacacatgcagaggcaactcctgttgccaccttcagatgtaactttccacaccctcgtctatcaatgtgcacccatcatattttacagagataggatcaggatgttcacattgtttcacagcttgtaagactttatttttaaaaatgttaagtgacacacaaaatgttgaaaaaaaatcaccactctatgtgatgcaagtccaaatacaaaacattaaaacaaacaacttccttcccaaagccaggtatgggtttattttattttttttttaaccaggttgccattatgaagaaattgctgtgctcatcaacttactttgaaccaagctgttctttactgaatgccctgaagtcattggaaagtcaccctaccttgctttaaagtgaagaattagaattgtttctctgaagatgagggaggtgcacgaaggatgtcaggtaccacagtggtacggtttggatcttaaatttctaaagccacgtaggccttgattcaaactccagtgtgaatattcagttgaatgaatctaaacagtttctgaagcagtttaaggctcagtttttacattgatggtaaaagtaacatctctcctgcaggacggctctgtgaatggaaggaaacagctcgatccaggtctctagacgtgacaagcattgactcagtggaaagtcctgctatttttgtggtttttagaccaggcagatctgggcatgactagaggaggtttttcctgggacgcagaaggcggttgtaatcccagagtccggatgccctcgttagaattctgggcctgtaattcgccttgctggggtgtcctccgcaagactttcagcttctctgatcctcatttttcttatctgaaataggcctgtctcacagagctaattcccaaaacttctgtgtttctgtggcagccgtgtgtatgctattgagaactggacgggagtgaaagagagtgatgaagacaacagtctatacagcatctcctattacctgttagctcagtgcttcatgtgcattacctcactgaattctcgcaacagcccaaaaaggtaggaactcttactattcccatgttacacatgaggacatcggaaaaggcacaggcacgggggatacctcttgccgaggtcacacaggcagttcaagtaggggagccaggagggagactgggtcatctgacttcagagcctgcacccctaaccactgcccctcattgtctcccttttgttacagaggacctgttcttttaagatcttacagacgatctgcactgggttgaatagtatcgtcccaaaattcatgtcgacccagaacctcagaatgtgacctcatttggaaatagatcctttacagatataattagttaaattaagatgaggtcatagtggattgaaatagaccctaatccagtgacccagcagaagtaattcctccgactgccccagaacccatcggggccgacagctgggggtgtgggggcggccctggaataggggctgtggtggtacgcctggctgcagtggttgtcaggctgcagtggttgtggctgcagtggttgtggggctgatgggaaactactaaagtttgggggaagcaagtagaatttcctaagaacataatggatggagaggggaaaacctgtggtggctgtgaaggtcctgatgccgtgtatgtctaattaatatcgtccgatggccatgaatttactgtaaaaatagaacgtgcgttaacttcaagcatgataaaagccatgttaagcttaaaaagcttaaaagcttttgaaacagctcccaggccaggcgtggtggctcacacctgtaatctccgcactttgggaggccgacgtgggtggatcagctgaggtcaagagttcaagaccagcctggccaacatggtgaaaccctgtctgtactaaaaataaaaataaaaaaaatttagccaggcatggtggcgtgtgcctgtaatcccagatactagggggactgaggcaggaggatcacttgaacccgggaggcggaggttgcaatgagccgagatctgcactccagcctggtcaacagagcaagactccgtctc

SEQ ID NO: 142 - DNA, 3537 bp, Homo sapiens
gttatgttaataaaaataaatgttaaaatgcttattattttgaaaataagcggttttggattgtgtagtgagtgacttcagagaccttcagcccaccaccgcccacccctagagtgctgacctccctgtgtgggcagtacaggtctggccactccagagtcaaggggtgtgggaaggagagcatgcctgtacctggacttccacagagggcagagcaggtctgttttattttcggcctcttgctactagaatgtttgaccctgtttgttgttctgttcccctggtacctggcacctagtggatgttttatcatttgtggattgaatgttgaagactcagcaggcgagccagtggaggtagagaccggcggtgaaaggatgctgctgggctgtgggaatggttttctgaagtgctggaacttctttcatggccccttatcgtcagtggggcgcaatccacaggcctaccctgtgtttgtatttcagaattacagttattaaaatagtttgtgcaggcaagaactggtcacaaaccaatcaaaggtgcaaaatcaagaggccagaaatagacctcagtgtatctggggacttggtgacaaaggtggcatctcagattagtgcagagaagacatggtgctcaataaatgatgctggtacccctggctgaccttttggaaaaaggtaatgcagactctctgccttattctttacaacaatatcaatccaggtcaaagcatgttaacgtctttaaaagactacagtatggaaaattctggatgtagaacggtagtcacagtcgtataataaacccccaagtccagcttcaccagttactggccaattacagccaatcttctttcatccgtgcccacactcatttcccttctcctttattatttggaagcagacctctaaaaggtacgtgctctttacccccataatcttgatacccttatcacatttaaaaaatagtgttaattccttaatatcactgagtagtgttcatatctctaatatctgtttctctctctttaggtgtttcagcttgtttgaatcaggctacaaataagaccatacactgtgatttgtttatgtgtctcttaagtctctgtaaatctgtaggtccccagccccaaaactctttgctttactacagtttactcgtgcacatttccttcttgagacctacagtcagcgatttctccaggatgccctgcttctttttagtggaaggtggtatttcaagatcactgtctcagagctaccagtgctagctctgagtggttggtcattgtttctagacagaaagaagaaattgttttaagataaaatgatcttgtgtttgtatcgattcaccttcaaaactgtaaaatgacttcttaggtcttacatctgtactttcttcttcctaagtttagaatcttggttgtcagcaactccagatatgatagaattagcatatcacataatgactcattggctttatcccgcaatagacacgcaacagtctcagaataacaatgccagtgctgccactaccagtatgagggtcaaaagcaatttaaggtgggtttgtttttgtctttgtgttttattttttgtgtcagctcaaagcacttaatgtaagaaaatactagaagaaagaagtactggaagaaaacggccacactggagtggaaggttctttctaagcatgacctagaagccgtcattagagagttggccaagacctgattaataaatttgaccaaattaaaaactcgctacaaaaaacttaccacaatcaaagtaaaacctccccagactcacacctgagtatctaaagacacctcacgcaccacctaccctgagtagccgtccctgtggcctcttggcgccctgccggtgtacgttgaattccagggtgtggagctgtttgctgtctttacagatgaaaacacttcgaccaagttgagtttctgctccgaaatcatagtggatggtggcagagcagtggcctaggcccatggtgctgacatcacagccattcttgcaaggagatggtaggatagccactcactgttcaggcttgagctttagccagcaggcagatgtccagcttgtccaagttgattagagcacccggcccagctgaacctgcctcattctgcgctcccctatagaagcacccacagctgcccaggagccgtgaagggtttattttctccatgagcaacagcatgtgtgctcgtagagggcagagcatgggatgctccaaatccagagggtccgggctgtcagcgatcccagcctcacttcattctccggttggctgttgaccttgccaaagtgacagtccctccgtgtctgcgggaccacctgcttcctctgtgttcagcccatgctccgtagcccttactgtatggaattcctcacatgagcctctctcgcagcctgttgcaggctactgaaggaaagacaccgtccctggcatagaatgggttcggtaactatcaacacagcaagcacaggaggtgattcctgtacgattctgtgttgagtggtgtgaagagacggatcatttggctcatgttagttgtagaaggtctaattcaagaatgagtaccatcttacactttctagaagtctgttacttaaaatgttttctttcttctaggtgatatccgacatccaaagcacgtccaacagacggatgtggctgcgacactggcgatagcacttggcttaccgattccaaaagacagtgtagggagcctcctattcccagttgtggaaggaagaccaatgagagagcagttgagatttttacatttgaatacagtgcagcttagtaaactgttgcaagagaatgtgccgtcatatgaaaaaggtcagtcaactcaccgtttcgagctctgtcagagctgtgtgtttccactgagctcgggtttctccgatgtgtttctgtggtatgcagtttgtcacaggagtattttttcatcactactctttgatgatacagattgtgtttctgttttcttagaactttgaactatcaccattggcagcaccctcagatgcagttatctaaagttctttcataaatttattcattcaacaactatttaccaggatcttgttatgaatgagaggctgttaacaggcactggagacagagcaggtacggggctctgccctcatggaaccttccagagggaggagggaaaaggaagtgatcgatggccgatggtgacgagtaccttaggaaaagaataaacagggctgggtgcggtggctcacgcctgtaatcccagcactttgggaggccaaggcaggcggatcatgaagtcaggaattgaagaccagcctgactaacacagtgaaaccccgtctctactaaaaatacaaaaattagccaggcatggtggcgggcacctgtaatcccagctactcaggaggctgaggcaggagaatcgcttgaaccctggaggtggaggttgcagtgaactgagatcgcgctactgcactccagcctggcaacagagcaagactctgcctc

SEQ ID NO: 143 - DNA, 4199 bp, Homo sapiens
cctttctgtcccttttgcaccctggctccctctctaggctgcggtgcagtgaggacgctgctcagggctggaggctggcgggaggttgggtgtgatgcgaggctgtgttgccggctgttctggggatgctgacaacattagcgtggctcatgtttatcgtgggtctagctcctcttgtacagacatggtcctcttcccttcctccacgaaagcagaaccctgatgcgtggcggggcatgtagctggccggaatgaaaacctgcatctcccagcttcctccctgacgctaagtggagctgagctgctaagtcgtggccagtgggttaaaggcagaagtgctgtaggagacttccaggaagatggctaaaaacaagctgactcagctgggacttctgggatgggcccttttctgccctgtacttttccagcttccttccacctgtcctgtggtcttgatggctggagcaccagcagccaccttggaccatggagtggctttgaggctagacaccatgcgtggaggatgaggagcaggacagccaggatctgggtccctgaggacatcgaggagctgccacctcaccctcaatcagtcatccccagattctcccttcagaaagaaatcagcttctttcttgtttatgcttcttttgctgggattgtcatatgcagcgaaaccaaactgtggagtcccaatcagctgatagaaatgaggaaggggctccctcctctgcacaactccatggcaccacaggccctagctggcaagaacatgaactagggtgggggagagccattgttctaagaaatggataaccacaagcagcctgcttgcacaacctcctgttaccaaatacctagctctgcacgttagctccagcagcatgaccctgtctgcatggggcctctccagcgtgaccctgtctgcatggggcctctccagcgtgaccctgtctgcatggggcctctccagcgtgaccctgtctgcatggggcctctccagcgtgaccctgtctgcatggggcctctccagcgtgaccctgtctgcatggggcctctccagcgtgaccctgtctgcatgtggcctctccagcgtgaccctgtctgcatggggcctctccagcgtgaccctgtctgcatggggcctctccagcgtgaccctgtctgcatggggcctctccagcgtgaccctgtctgcatggggcctctccagcgtgaccctgtctgcctgttgcctctccagcatgaccctgtctgcatgtggcctctccagcacgaccctgtttgcatgtcgcctctccagtgtgaccgtttccacatgtagcctctccagcgtgaccctgtctgcatgcggcctctccagagtgaccctgtctgcatgtggcctctccagcatgaccccgtctgcatgtggcctctccagagtgaccctgtctgcatgtcacctctccagcatgaccgtatccacatgtggcctctccagcatgactctgtttgcatgtggcctctccagcatgaccctgtctgcatgtcgcctctccaatgtgaccctatcaaacttccccctggcctctgcccctggggaggtggccttctctctgccatgctgcctgctgttctcttgcaaggtgtcttcagactttctttacccatgactgtctcggtaaattcttttaccacccgtgacaccagccccagccagttgcacctgcaacactggctgcagtggattccttgttgttgatactccacataaccttgctaggtgtcatatatgatcattctttaacagaggggcaagctgaggctcagagaggttaaggcacttgctcaaggtcacacagcagagaggttgtgggtaagccaggctgctggcttagaacactgccatggcatttctcagatcacctcgctcagggactcctggcagttccccctgtgtcatagcggtgagtctgtccaggacgagccactccaggctaccgagggccagctggagggcctgcagacacttgctgtggagtcaaggtccacaccatcagctggaagagaggtctcaggaggggcattagtgtttgtcctcgctgtgattgcaccaactgacaaatcagctgtgggacaatggaaaacacagcagcagcttgttactgagaagggaggactcagggtggacctgacccctctgcagatggcttggtgagaacgtggcctgccctgttggctcctccctctgggtattggaattgctgggcagccagaggcttacctgggcttactggcacccagggaggagaagccctgagctgtgcggctgctgaggaaggctgtctgcaggggagagcccaagcgctgaaggaggccagtgggctcagcctgatgtctccattctccttcctacagcaaccagggtgctttggaaagggtcaattgccccaccttaccaggtagggatgcaggagggagagcgagccattcctctaacgtcagtgaccatgtcttggttccaaaaccccttaagccttgggttgtctatcagcaaaaagagaagggatgtgctcagggggtcttcgtggagatcctctgctcccctcgccttgaatgtggagagggcccaagactccctagggaaggcagttgatacagactccaggtgtgccctgctctctcctcggcaccactctgcagcaccacaggcagtctggggtgcagataacatctctctgggcacagctttgcaccagggcatgctgggggtagagccacacttgcatggcctgtggatccctgcagcctggggattgggctgctattcccactgcagggagggaggtggttggaggtaggggctgctcctacctaggtacttctggcctcaccagaagaagggggagggtttgcacattgagtggcacctgctccatctttgtccctgtatttacatcattattctgaaggccaagagattggacctgccggagctccatgcacagaccctgggcaggtgcatgtgggcttctggcttcctggtgtgcacagccccttctctcccttctggactgtggcagtgtactagggacattgtagccactgtgtaaagtctcccgctttctgggacagttttattcactcatgtgtgttgagagctcgttttgtgctggggtccctggggagaacgctgggttcactcatagttccacaacaagggacctgtggcctttgttgtggacaggggccaagagcatgtagagaaggcactgaatgctccttggcttccaggggaaagatcaggactggaaggatgtgggaactgcccaaagctacaggatctgctgtctcaatggctgagcagggtgcagagtgcatgcggctgtttgttctgtggcactggtaaccttggcacttctccaggtgtgaaggacagcatgggagtgagcctgtgaagttataggcagagtccaggcagccccaagcctgggtgggttgtagctgtcagagtggcagcaggtggacagaggggatgggctcggggggaggcggggggacccgcttgaatgggagtcagcctgggggcatctcaatccctctgatgcctggtttgggtccccagcactacttagcccaccccactgagcctgtctgtgcctggcctggcactggtgatgcagggactgagtcaggcagggcctgacccagagagcccatgggcagacagtcttggtgctgcatgcccgggcttaaaccaacaagcctgattctgaatgtccacaagctcttggctggtggggccacaggactgggacccaagcctcctagcgacatggctgaggccatctgtcatgggtccttctctcaggccacctggttccctgtgactcacttggtgttgaccaggtgcatggatgcagagctgagcagacagtccctgtgtccccagtctggttgggggtgcaggggtctggagcccatgtgagcctggtgagagcctgggaaggaaccactttttccatggcagagctgagtgcaaagcacgctgttgcactgctctggtggtggcattttactctgtaacctattcatccacatactcatgtatttctccacccacccattcatctacttatccacccattcacccatccatccacttatccatccaccctaccacacattcgaagaacccgtatacataaaatctagac

SEQ ID NO: 144 - DNA, 3479 bp, Homo sapiens
ttaccctgcccccacaccaccctcagcctttctgtttccagcacttcctggtcatgaccctgagcccctcctgcctgtccaccagggtctctgggcccaggggtggtcactgggaagggcacccacaccctgtccttccaggtcttctgcctctgagtgagtggtccgagtggtcgccctgtgggccctgcctgccgcccagtgccctggcccctgcctccaggactgccctagaggagcactggctccgagacccaactggcctctcccccaccttggccccgctgctggcttcagagcagcaccgccaccggctctgtctggatcctgcgacagggaggccctggactggagcccctcacctctgcaccgcacccctcagccagcagcgcctctgccctgaccctggagcctgccctggtaatggggagaggcagaggccaggggacaggacgggcctggagtgcaggttggggggacctggccgggaggggctaggctatagagcacattgacctgctacccctcctgcttgtctctaaggcctgcaggatttgaagctgggggtggggtccaggcagcagctagaaagagaagcgggagagcctagagggctttaaggcctgccggagcgtttgcgacgacagagctcaaggcttgagggggaggcaagaggtgggcctgggtactgactccatcataccttccccagactcatgccagtggagtctgtgggggccatggagcccctgccaggtgccctgcagtggggggttcaggctacgctggagagaggcagaggccctctgtggaggaggcttccgggagccatgggctcaagacagaaagctgcaacggagggccctgcccaggtgagagctgcgaggcccaagacactgtattcaccctggactgtgccaaccagtgcccacacagctgtgccgacctctgggaccgcgttcagtgtctgcagggaccctgccgcccaggctgccgctgtccccctggccagctggtccaggatgggcgctgtgtgccgatctcctcttgccgctgtggcctccccagtgccaatgcctcttgggagctggccccggcccaggcggtgcagctggactgccaaaactgcacctgtgtcaacgagtccctggtgtgcccacaccaggagtgtccagtccttgggccttggtcagcctggagcagttgctcggccccctgtggtgggggcactatggagcgacgtcggacttgtgaggggggtcctggggtggcaccatgccaggcccaggacacagagcaacggcaggagtgtaacctgcagccctgccctgagtgcccccctggccaggtgcttagtgcctgtgccacctcatgcccgtgcctctgctggcatctgcagcctggtgccatctgtgtgcaggagccctgccagcctggctgtggctgccctggagggcaggtgggtacggggtgctgtgtcctgactccctgtgggggaagccggcaggtggggagggaagaggcggtggtctgagtgtcactgagcctgccctgctgcagctgctgcacaatggcacgtgtgtgcctcccactgcctgcccctgcacccagcattctctgccctggggcctcaccctgaccctggaagagcaggcccaggagctgcccccagggactgtgctcacccggaactgcacccgctggtgagggcctggccctggggtggggagcagggatgaggaagggtagggaggaggacatgggaggcatctgagtgtgcttctgtcttctcagtgtctgtcacggtggagccttcagctgctccctcgttgactgtcagggtgagatgtggctgtccatgccctgctgcacctccaaagtcaaggcccgggactggcactgaggaggagagacgggccctgctcacagactagacagagcttcagaaagccctcccctgtctgtccacactgacctctctctaactggagacccagcaccccctgccgagggctccctgggcactcagtgtggtctgccccacttgtgggggcattccctagcacacagtatacacagagccagggctgtgatgccaggaagtggaaggttctttccctgccagtgaggaaactgaggtctggaggggtgagcggaaatgaggggcctggcctggcagcccccgggctgatagcatttgccctgtggggtgcagtgttacccccatctgatcaagaccaagggcccacccaccgtgttcccagctctgccacgctgggctctgtgaatgcagacatgcagcatggccagcctccgggcagaccacccacccccagaacaggcagagacagggcacagtctctaggtctctgacaggcaggtagaaccccagagggtgagacatcagtgctgagaatagaggccgagtggacaggattggtcagggagccttttctggaggaggtgagacctggcctgggtccagctagtgtttgggtgggtggataagaaagatcaggaggtgtggttggaggctgctgtggctgagaaggcaagatggggacgtgtgggtgctcagcttgggaggggaggaatcgaggctggatccagggctgacctgaaagctgggttggatggtcttccctggcagagtgccccctggggaaacgtggcagcaggtggccccgggggagctggggctctgcgagcagacgtgcctggagatgaacgccacaaagacccagagtaactgcagttcagctcgagcctcgggctgcgtgtgccagcccgggcacttccgcagccaggcaggcccctgcgtccccgaagaccactgcgagtgctggcaccttgggcgtccccacctgcctggatctgaatggcaggaggcctgtgagagctgcctctgcctcagtgggaggcctgtctgcacccagcactgctccccactcacctgtgctcagggcgaggagatggtgctggagccagggagctgctgtccctcttgccgcagggaggctccggaggagcagtcgccctcctgccagctcctcacggagctttgaaacttcaccaaagggacctgttacctggaccaggtagaagtgagctactgcagtgggtactgcccatccagcacccatgtcatgccagaggagccatacctgcagagccagtgtgactgctgcagctaccgtctagacccggagagccctgtgcggatcctgaacctgcgctgtctgggtggccacacagagcccgtggtgctgccggtcatccacagctgccagtgcagctcctgccagggaggtgacttctcaaagcgctaacaggctccgctgggtgagtccacagctgtccctcttgtgatcatgggactcagcagcactgaccacgtccttccacgctctctcacctgcccccaactgggggcccatgacttggcattagcatgttccaaataaagtgatactggcaac

SEQ ID NO: 145 - DNA, 4016 bp, Homo sapiens
aagttggggaggcccaaagtctggccctccccggggctgcccttggctgcgcgtcccccacgctgcagccgcgcgatggcccgggctggggtggacgtggggctgggagaggaaggggctcacggacgggcgccccatctcccaggcgggctcctcggctgctttctttgggaacagctggtgcacgtccccgcgcgcccctctccctccggaattcggcgaggattcagctggaccctttggccaccacctccgccccgggcgcgggtcaaagagcacccctcgcccttggtaacggagacaaaacgttcggggccgtctagacaggtcaaggtgcaggatgcggcgtccccgcggctccttccggaagggggcgtggagccgccaagggcgccggaccgcgccgcagcccgggcctttgcgggctttttccctctccaccctctgctgatcaaagtaggaagtttgcatgacaaccgcagtgaaaggggctgaatcacaaatgaactcgatttctgcagtgttgatctatccagcctccattgtcccctttcaggcgcagtatgaacccttccggtgccagcggccgcgctacattcacaggcgcgctcggggcgcacaaagggtctccgcgcttcaccgccatctggccacaaatctcatcagcggcgcggcggcgtccccttgaaagcgcgggcggagggtgcgcttgtgttcttgagacccaggttccattacaaaccacccagcatcgccaccggcgccccccgtttcaataaggaagccactttgtcaaaacattctaaaagaaacttgggaagaggacgcgtcagagaaataccgccgccgattaactatcagctgcgcctcccctgtgcacaggtaacatccctccttctcccccacgactcggctggagcttgattttgagctgctctcaaggcccaggcactcgaatcggaagttaaatagcttatggactatttaatagaatataccaccacacgtatctaatcactcaaataccacgcttttaaaactcatgaatgttttaatcgctaaaaatgtctacagtcaaaaactgcagcctaagtggctcaaagtgcacatttcaaacacaagtagcgttctacttacgctttaattatgccgttcattaattttcattaagttgtaaaacatgcaaagaatacgtagattaacaaacaaaactgaaaatttgttttattaatttacagaaacaaataattaaacacgtattaatcactgggaaaactataaaatgcagaggcagattttaaaatgtaatttaatcaagacagatcattagcggaaagattacggaggttttctttttctgtgatgcatgtattttaggtattatttccttagctgatacatatacaatatattcatagtagtttctggatgtcaacagagtagcattttacttgaaagtgaagagtagacgctgtcatttaaaaatatctaactgtaatcaagaaattcattctctctctcctttccttcctccctcccccactctcgtttcccatctgaaaagtaaacatacttgatacttggggggatggggacagagccaggaggaaccagggtctgatcgctgggggctttcagaaacttaggccttccttccattagaacaccaaattccatcctaatacaccacttaattcatgttgagtagaggccacgctgaaaactaatttttcaattcacagaacattgtgagctatttgcaaaagttgctgagcatataagttttgagcaaaattgtaatgtttgtgtgtggaaggccttccacaacttacttctgtgggccacttgatttatttcctaggttgcaccttttggaaaccgttccccatgttaaaactttctacctaccagtggattgtttttattttgaaagtgtaatttgacatgtttgaatatgctactgttttgcctattttaacacaaatatgttatggcaaggtacaaacgtgtgaatttctacaattttgtcagtctatgaaggctgactggctttttgatgtgattcgctagccctttagagtaaacattctttaaaagtagaaaatgtttgctggcagctagctcggagacactaccttacgatgttcgttaaaaacaggaaagggaaaacagccagcatgagacgagtggagttcatttttgcagaagattaagaaaaattttgatcctgaaatcccaaagcatcaatttttttgagaaagtatttaagaaaaagatacttatgcattacagctctttatacatttattcaaatgtacatgattagagtttaaaatgattctaagtagctgaactgcgttcagtacatttaaagactgttcacagaataactgggcttttttttccccctcaaagtgttttgattataagaggccaataaggattgggacaagtggaataaaacgaagtctttctatactgtgaagattttgaatagtacttgtcaataaagcacctcctattgtaatcttagggagccttgcctctgccctccaaggactgtctcagagatactaacctcattaaaatatgaatgagaaggcctgtgtagccagagaaaacccacgcactggcacagttttcttatctgccattgcttttacatatggacttgtttggtacaagttataagtagaaaaatgatccatgataatttcattgctatcttagagtacccaagcactccaagtcaatcctaacttttcccagatttgaaccccacctataactcttaatcatacttcctaaatgtagtgcctatttctccccctttacgtttcttctgaccctgtgcttgttgtgtgagcaatggaatgggggtggggagatacccatagccctactttagagtggaaagaagtacttgaaagttctggctttggcttctccagaagagaagagctagggagtttattacagacctctatgataacactttaataacggccaattacagcatgcctccatgtttgttcattactgtgtctctgttaatcttgtagtaaatttcttgcttgatagctgtcacaatcagcaggaatacaattatgttacagtggaaactgtcgttgtggtatatctgtctctcccattacagtctgacaacctccaataaatttcactcatctttatcgttattttggagtgtccttcagatatgaaaccagtacttaacctgtttagtgactgataattaatttcacattgtagcaaagactttctttctagaggtttagttaatgtaaaattttaattgcattgtagcaatattgcatctagtttaatcactaacttttcatccataaaaattgaaatcactgctgatattagttaaaagtcaatatttagaagtgaaaattcaaagctcctttgctctaggctacaacaggggaagcatgaattcagaaactcttgtaagctgatgagatatataattagcttttatgttaattgactgctatgagtttgttgtatgacacttcttcatataatatgcaaatagcattgactgtttagttttattagacaatataattagaaatctaaaggcactcatttcgatgaggaataataaaggctgatacatttccagtgttctgtatatcagaaaaaaatgaattgcatctggacgtaataagagaggttttagctagacattatttagggagcccaaaccacatataacggaattaataggagtgcttccagccaccgtaaactccatatttaaacacgtgaatttgtggtgtccataagaccttggggggaaaacacaaatgtttcactacaatttaccacaaataataatatacttaatgaaaataatacctaaatgttgcctgctataattaaagtgaaataagtcattcttatttaaaacaaaatagtttgcgagtaagtgttccagttcttgttactcacagacattaccagtaacatatatgcttaggttgttc

SEQ ID NO: 146 - DNA, 3897 bp, Homo sapiens
cagaaatttgtatttaaaaggtttttttaaagtactgatcttacagtttacaggcatacctcattttactgcagttcactttactgcactttacaaatatttcattttttacaaattgaaggtttatggcaagcctgcttcaaccaagtctgtcagcaccatttatccaacagcatatgatccctttatgtctctgtgtcatattttgtttaatttttgcaatatttcagactttttcattattattaatctgttgtagtgatctgtcatcagtgatctttgttactgttcaaattgttttcgggtgccacagactgtccatataagacagcagacttcatcaacaaatgttgtgtgtgttcttcctgctccactgactggctattgattccctcatctctctgtccccttgggtctccctattccctgagacacagcaatattgaaattaggctagttaatagccttacagtgacctctgagtgtccaagtgaaaggaagagtaggatttctatcactttaaatcaaaagctagaaatgattaagcttagtgaggaaggtatgtcaaaagccaagataagccaaaagctagacctcttgtgccagttagccaagttgtaaatgcaaaggaaaagttcttgaaggaaattaaaagtgctattccagtgaatacactaatgataagaaaattaaacagccttattgttgatatgaagaaagttccaatggtctggatagaagatcaaagcagctacaacattcccttaagtcaaaacctaatccagagcaatgccttaactctccaattcgatgaaggctgagaaaggtgaggaagctgcagaagaaaagtatgacgctagcagaggtttgttcatgaggttgaaggaaagaggccgtctttgtaatataaaagtgcaaggtgaaacagcaagcgctgatgtagaagctgcacattatccagaagaactgactaagataactgatgaaagtggctacactaaacaatggattttcaacacagacaaaacagccttgtattagaagatacgatctacggctttcatagctggaaaggagaagtcaattcctggctttgtaggacaggccaaatctcttattagaggcaaatgaggctagtgactttaagtttaagccaatgtttatttaccattctgaaaatcctaggacccttaagaattgtgctaaatctactttgtatgtgctctacaaatggaaaaacaaagcctgatgagagcacatctgtttatagtatcatggattactgaatattttaagcccactattgagtcctacggctcagaagaaaatatttctttgaaaatgttactgctcattgacagtacacctggtcacccaagagctgatatgatatacaaggagattaatgttgttttcttgcctactaacatctattcgtaacccatagatcaaggagtaattttaactttcaagtcttttatttgagaaatatattttgtaagaccatagctgctgtacgtagtgatacctttaatcgatctgagcaaagtaaattgaaaaccttctggaaaggactcatcattctagatagcattaagaacatttatgattcatgggaggaagtcaaaatatcaacaacagtgtaaacaaaacttttgtatgcagtgggaaaccaaaaaatgtgtgtgactcactttattgcaatattcgccttttttgtggtagtctggaactgaacctgcagtatttctgaagtatgctgtattaccttcatatgattcttcaccactgacatatttcatattgtttacccagtcttagaaggggagtaaaaatgacctaatttttaaaattgtttatgtctttactctggagaactttgccattttatgacaacagtctcttttagacatcccatgaatggaagcaatgaatgaatacatatctgtattgaaagaaaagttaacagaaaactctgaaaaccagctagcagtggttgctgtggcagcagaaggaaactcaggctatcagtgatttctagtgtgggaatttaatgcagttcagggagggaaataggaaggaaaagagtaccagagaaatgagccttaggtttactagggagcaaagatgttatgaaaccacagccagtgacttaccatgcagattttattttctaaataccattccccactaaaaggaaccagggctccatggagaaatggcgattccagagctgggcagggaaggtacagatgagcctcatactatggcagagaggaaggaagggctgagaaaaaaaaagggggacacatccagcttgaaggggtgcccattggaaaaatctaggacagtctgaggatctcaataaggatagtaatagatggtgtgaataatgtaaaaataaagccaatgaatatcagactccctaatctattctgataaatagaaagttagataaggaaataaagaactgaggaagaagggaaagttccttacagtaaaatgccatctaatatatagagaaggaaagatagagtttgcattgtgccaagcaaagtgtaaggcattagaggtacccagtgcttaagagagtgcccttagcttttttgctactgtgaagttagaaggaggcaaataaatagatactttgtccatttatcttgtcaccattacagttaatcctctcaaggacaagatacctttataatgtattagggtaatgccttagattattaattagttgaatgactgatgcattcctaagcactgactgtggtataatgggttatattaaatgtgagatgactctttaattcatttcattaatttttttgttataaaagtaaatgaactggtgaaagtgtagggacataaatgaatataaagacacaaggcaaaaaatactacctaaaactcaactattaaatgagtaaccaatgtttacattttggcatatttccatctggttttctcacatgcttagatcatgctgaatatagtttttaaaaaacctttgccctctttttaatgtgcctaatttttaaatttcaaggtgtttgactttacgatgcaaattatactttgacaacttactatctcagcgggcctattgtggaaaaatgaattttgaccacaagaatgaaactctaagtatatcagttcagcctggagaaggaaataaagctgctttcaatgacatgagagccttgtctggaggtgaacgttctttctccacagtgtgttttattctttccctgtggtccatcgcagaatctcctttcagatgcctggatgaatttgatgtctacatggatatggttaataggagaattgccatggacttgatactgaagatggcagattcccagcgttttagacagtttatcttgctcacacctcaaagcatgagttcacttccatccagtaaactgataagaattctccgaatgtctgatcctgaaagaggacaaactacattgcctttcagacctgtgactcaagaagaagatgatgaccaaaggtgatttgtaacttaacatgccttgtcctgatgttgaaggatttgtgaagggaaaaaaaattctggactctttgatataataaaatgagactggaggcattctgaaatgaaagaaactcctttatatatccaaccacaatcaaacatataaataagcctggaaaaccaactacaaccagcaatttaagattactattactttaagaaaatcaatttcatagtattggttttaaatctttttaagtttttttaatacgatctatttttataggttctttttcagaagtaaaattttgtacatatatacatgtacatatctgtttagtttgggttcatttctataacattttgtaagaaaataaaagtttgagcacctg

SEQ ID NO: 147 - DNA, 3292 bp, Homo sapiens
taggaatttcagtgcaattccgtgaggtggtgctgaccttagatgagaaatacgtggccaggctataaggactacatgtagaattgagatgggacagtgtacgtatggactgtgaggggaaagaaaaggtaaatgtgtgaaaggaaagagattggtgcatggtcatgacagtctgacagcttagacatttcagaggcattgtttatgagaaaggggatagggacacataggtctgatgacaaccaaagccctttgatgatgccatctgtcactcaaggctccccacagcctgcccaacctgactctcctgcctgcttctccactgcctaccttcaacaatcaaactgtatttttgttacagcaaactacattccatttgcctttaaatgcttgcattttagttattgtactggctacctgtttttgtctgcccagcatcctgtttcccctccttttggatcctctcctagccaattccatgtcttgaatcctttcctgctccttgttaaaattattttctgctttgtgtgagtccctgtaagcaccagcagctcaatcagcactgtctgtaccatggtcaagagatgagtacatgactcaggtcagaccttatttcccaccccataagccacaatgattagacaagaaataggcacagaaccctaactagatagggcagaagccttccataggattttatttgctggccctgaaatgcaggtagccttctatggctgttaaacacaatccagtggcacatggggtgatatgaggatggagccatccatggcaaaactccaccctttcctgtgacatggattatgtgcatctgccatgaaaaggaagcatacacaagaaatgagcaaagagttcctggagaactgaagcaagtatcacctccagatcagttgtacttttatttgcttacactattctgaggtgggtctctgtctcttggatccaaaagagttcaaattaataatcatttgacaaaaaattacctccacattcctaatgaagttgtctttgaagataatgtcttgtgatcccctggttgaagttaattactgcttgtgagcccccattaacaacgtgttcctttccccattgcttgcttgtatcagctttgctgaagatctattggctgtaggtgtgcagctttatttctgtgttctctattgtgttccattggtctacgtgtctgttattgtaccagtgccgtgctgttttggttactgtggtcttatagtttgaagccacatctgtgtgatgctgctggctttgttctttctgctttgggttgctttggctattcaggctctttctttggttccatctgaattttagaatagttgttttctaattctgtgaaaatgttccaacctctgtgaaaaatgaggttggtagtttgataggacagcattgattctgtaaattgctttgggcagtatggccatttttaaactatattggttcttccaatccatgaacatggaatgtttttccattttttggtttcatccctgatttctttctgccatgttttgtagttctccttgtagagatctttcacctccttggttaggtgtatttttaagtatttcagtttttttatggctactgtaaatggtattgggttcttgatttgctctcagcttgaacgttattggtgtatagaaatgctcctaatttttgtgcattgattttgtatcctgaaacttgactaaagttgtttatcagtctaggagcttttggcagagtcttcggggttttctaggtataaaatcatatcagcgaagagagctagtttgatttcttttcccagttggatgccttttatttatttctcttgcctgattgctctaagttgaatgggagcgatgagactgggcatcctcttcttattccagttctcagaaggaatagttccagcttttgctcatccagtatgatgtctgtgggttggttgtagatggctcttattattttgagatatgttcctttgatacctagtctgttgaggggttttatcatgagggatgttggattttatccgtattcaataaatggtgttgggataactggctagccctatgcagaagaatgaaactggaccccccacctttcaccgtatatgaaaattaactcaagatggattaaagatttaaatgtaagacctcaaactgtaaaaatcctagaagaaaacctaggaaatacccttatcaacatcagccttggcaaagaacttttggctaagtccccaaaggcaattgcaacaaaacagaaattggcaagtggggacctaattaaagcactctgcacagcaaaagacactatcaacagagtaaacagacaacatacagaattggagaaaatatttgcaaactagacatccaacaaagatctgacatccagaatcaataaggaacttaacaagcaaaaaacaaccccattaaaaaatgggtgaaggacatgaacagacacttctcaaaagaagacatacaagcaatcaacaaacgtgaaaaaatgctcatcactaatcatcagagaaatgcaaatcaaaaccacaataagataccatctcacaccagttagaatggctattgtaaagaagtctaataacatgccagtaaggtttcagagaaaagagaacatttatacactgttgtgggaatgtaaattagttcagtcactgtggaaagcagtttggagatttctcaaataacttaaaacagatctaccattcaacccagcatatgggtttatttcccaaaaggaaataaatccttctaccaaaaacacatatggtcatcacagtgctattcacagtagcaaagacagatcaacgtggctgcccatcaacagtggactggataaagaaaatgtggtacatataaatcatggagtattaggcagccataaaaagaacaaaatcatgtcctttgcagccagccacatggatgcagctggaagccataatctaagcaaattaagaacagaaaaccaagtactgcatgttctaacaaatgggagctaaatattgagtacctcaggatgcaaaggtgggaacaacagacactgcagactggaacactgtgggtgaggagggcagaaggataggttgaaaaactacctattgggtactatgctcactacctgggtgatgggatctgtacctcaaacctcagcatcacacaatatacccttgtaacaaacttgcacatttacccactgtttctaaatgaaaagttgaaatattttttattaaaaacacaaaagcaatatgtttctc

SEQ ID NO: 148 - DNA, 1528 bp, Homo sapiens
ttatggaaaaataaaataataataataaaaagaaagttaagccaacaggatttatgatccaacacagcatccgactccactgtataaatcttgggtctccaataggaaagcacagctccgaaggggtctgggctggtgagcgttgcaggctgaattgtgccccccaccaaattgatgtcctaaccccagtacttcccaatacagtgactgtattgggagatggggcctttaaccaggtggtcaaggtcaaatgaggtcacaagagccagccctaatccaatctgctggtgtaattacaaggagattaggactcagacatgtacagagggtcgaccatccacaagccaaggagggaggcctccgggaaaccaaccctgccaacaaatgatggtgtgtcccttcggggctaaaccccaggaggcctctgtgctctctcttactctcgggtccctgctcagccgtgtgcgctggcttgggctggcttgctggaggttgacaggcccatgggggaagtcatcctggtcaaaggtattctgggccagccagcacaacccccagcccacagtccaagctgtggacagatacaggagcaagtccagccaagatcagccaaattcagatcagcagaactgtctagctggttcataacttcatgaactataataaataatggttgtttctgttttaagcttctaaatgttgccatggttggttatacagcaataactaactgatagaccttcccagagcaatgtctttattggtactcccaccaccaatgtataagaacacttatctcagttactccctgacccatcctgaggaataactgcaaacttctgattttttagatcttcaagggtccagggtgggtgtgtagagactgcttattgttccccaacatctggtctctccttcttccatagtactagaacccttacattttagctgcatttcccagtctcccttgctgctaggtgtggccatgtgactaggttccaaccaatgaggtataagtagcaacatcatattgccacttccaggagatggactactgcattcagattctggttttgccacttctctgttgaggaactttggaaaggtgacttagtttctctggtgcatcagtttcctcatctgtagagtggggataacgatagtatctgccttatagtgttgtcaagaagtgaagtaacacaatgatgcatttagaacatgcttatggctgaatgtggtggctaacagccagatgtggtggctaacgcttgcaatccgagcgctttgggaggccaaggtgggcagatcgcttgaggtcaggagcttgagaccggcctgggcagcatggtgaagccctgtttctactaaaaatacaaaagttagctgggtgtgctggtgcacacctgtggtccctgctgctcagggggctgaggcatgagaatcacttgaacccagaggataaaggttgcagtgggccaatattgtgccactgcaatccagcctaagcagcagagtgagactctgtctc

SEQ ID NO: 149 - DNA, 3904 bp, Homo sapiens
taattcctgcaccagctgcggcctttatctgcagccagaaagcagggtttaccgctggccccacagcgccatacggtctggggaaaagaaggaaacccaatagtacacaaacaaaggcccaaagagaaaccttccaagtgctctatgcctcgcggtttagcagaaaatatcaagcaactctcaacctagctggtctgtagcttccacaaatgaaatactgtattcattgcagcctttctggttgagatatttcaaatatttggtggggcttttaatgagacggagagacactctcgagtgtggaagaaaaacgtgagggggtgtgaggataaggcgactttaggacagaaaaaacaaagagacaaggaagccacgtaaacgttttcgggtaggcgtgaggcgatgtcagttttgaaccccgttatgttaggtagagagcgcagccctcttctagcacaaacaccgtttcccacattgaagaggtcgcagagatcagcaactctagagtgcgatgaaggagcttcgctctgggagaacccccttcgtgaccacggtctctttcctgccaggtaagtgggaatgagcgcatgccctgcagggacagcacagcgtcctcgccctggtcggacgctcagggtcaccaccctacccactgcccccctcgccattcttccaaaccactctctgccaaagattccaccgacagtcaccccacacgacaacccaggccgcctttcagcagtggctcccgccccgcaaccacgcgccctctcacccccgcggttctgcccgccgcctctgtccagtctgtgcacttcacctccctggctcccgctctcccctgagcttacagtggacgcggggttcttccaaacccctcttgggaatactgaatggaaaagggggagcgtgcgcaagtgcttggtagagtgtagacattgtgggatttgactgtggtaccatcgctttgacgtcctagtgctaatttttacacctgcattctgcttagggcaccggcaacagttttccgtttgtgcctactccacctgctgtctttgttgggtcagcgaacatcgcctccctctaccgctcaatcagcaaaagggaccgcccttgaggacctcacccgcggctcactcccctcccaacttcgcgggcatcgcctccggtcgcctcttccgaaggcctaacgagcatgttagctgcgaacggaggtgaggaggctccgctgactgaccggtgcccatgtccagggcacgcacaaacgccatgacttggcttggcctctctcttagttattcacaagctcagcccgataggcacctctggggcggcgacggcaaagagggtgcgcttattaagtgcagctccacggggactggcctctgcacggctgtgtacacctgagcgagacgctcagtcgctctctaaagccgcttctgcggatgacagacacggagataaacgtgagaggtggcccaccacgacttgccctcctttgcccgggtttgcccctcgctgcggaggctgttctacatctggcccttggagcaggccggctgacagcgtggtaaaggaagatttctgcgggagggcggccagtgcaaaacaattccctgaccgggaatcgaacccgggccgtggcgctttcagcaccgaatcctagccactagacaaccatgcagatgcggaaagctgctttctctcccttcttcgacctgaagcgacactttcctgtgctctaggaggacttgggtcttgtgagagtctccctttgctcctggagtcgtctcacaaggccgttcactccctgctttcttcaaaaaaagaacctgcaggcgacacaccaagggctccacgagggagtcctgagtactggagcgagttgcggccacgcggccgcagctcaccactggcctagagatgccctttgccaggcggcagcaactgacaagatggtcgcgggtcgccgggtccggagccgcccaccaggttgccaggaggaggcgggagcggggaggcgcccgaggtgagacgggggcaccctctgcatcataaaggacccagaccccggcaccctcaacatcataaggaatcagacggatgcggaaaccgaggcgggctggataggaaactctttccaggaaggctccggggcactcaactggtctccaaccttcccctgcaacctgtgacgcctgccattttcccattttaggcgatggcaacgcaacccctccgtttgctctgggcaaaacttcgagagttccctctgaagctggagctttttcctcagatccaagatccaattggtcaccaattcgtgatttccgtcggccaagtgcgtgggcattgatctacacgcgagtttctccacctctgccgaatggctacttcggggtgggggaggggccctcccaccgtggattgcaaggtgtttagcagcatctgtctcctccgctgactagacacatgccagggggataacattctccctcccgcttcccccagccgcggcctagtgtcccagcggggttgggagaggcatgtgagggcgaagttgccccctgttgagaaccattgctgcgcgtagtccttctctctgaacttgtgcagaggactctccaggtgaaggctcaagggtggatccagctcgagacaccctcgctccccctcacagtcggaccttaggatttaggctttaacatctccacatcatgagattcgaaacctttaggtcttgtcttccgttctgtcctccaaatcggcctcttccgagcctgttgaccagggccagccgggcagagggctgggctcgctcaacgaggctcctctcgcacctcctggagcttcaggcttctttccgttgcagagaagctttatgggccaattcgttcggcatccccgggggcaggtgcgcggtgcgcggggaagaagaggatttgactgcggttctccacccccggcgcccaacctccaccccggtgcgcgcgctcttccaggctcctgctggtcccacttgccaggagttaggtctcaggtcagcctgagctcctgggacgcccaggcccggaaagacacgtaggggaaaccatctgctcacttctgtcctgtccggaagggatccctttctgacgggaaagaaaggcggtgagtcctgtcctgttgagtaggcggaagagagatcaaagggaagacaagaaaaatcctgtgagttttcaggatctaaagttaccatgaggtcgacctaacctcctctggaggtcctcccggtcctcccgtggctgtcgaaggtgaatctagcttccgtctccagttcgccaaggcggacaaagccgacgacaatgggcctgtccactatcttctttcatatgcacaaaatgtcagctcttcttgtttctaacttgcaacatcccacctgatgaccagctcagcaaattagagaccctccatgggattccatctctgtcttagttcgggcttccataactatataccataaactgggtggctaattcacgacagaaatttatttctcacagttctggaggttggaagtccgagatcaaggtgccaacatggtagggttatgatgagggacttttttctggttgtagactgccaccttctcattgtatcctcagggggcagagagagctccctggggtcccttttatagtggcattagtcccactcagactaacgggactaaatccagacccagttattgcaatgtgtgcaaaagaacaaggacttgtactatctgacttcaaggcttactataagctattacagacaaggcatcaggagggacaaatagataaacagactgagttaagagacctgaaactgatccacagccatacagtcaataaatgagctttcaatgaaagcagttcaatag

SEQ ID NO: 150 - DNA, 3564 bp, Homo sapiens
ttctctaacattccagcctttcccttctgacttgaaattctttctcatcagtggcgcccaagtagataccaggtttccatctgagcccaggatcctgtgcaagggtagggtgggagcacctcccaggaaggcctcgcacgtgggggctgaaaagggagcaggtggtgggagggggacaggtgcgtctgccagggaggaggtgtggaagtaggaggaagctgtctgcctataggagcatgggaggagcaggactgaggagagcagaaaggctctggaaggcaggaccaggacagtcagggtgtgagggggtcttgtacagtcctgcccctcacccaaattggcagagcccgtgcactcctcccatttggggccccctcctcaccccagttgtccgtctgcctgcacacgcctgcgtgcccacgtcggcatggcctggccctccttcttgtaggggcccggcctgggagcctgtgtggccctggtgtagacgaggtgtggtcagagctgagctgagcagcgcccacgctgcagcaggaggggagggaggaactcactgggagctgtgttggccacactgagggcccagggcttcgtggacaccagcagcactcctggccacactccagccctcctctgggtacaggtggcataggtggcatccacccacccccagcattctaatagcccaggcatctcctcctccaggccctggtgcccttccacaacctgggccttctcatcggcctcttctccccacggtgtgcggacctgtggcctgccacccgccaggaggccgtggactgtgtctactccctgctgtacctccagctcggctatgagggcttctcccgggactaccgcgatgacgtggcggagcggctcctcagcctcaaggacggcctcgtgcaccctgaccccgccattctcttccacacctgccacagtgtaggccagattattgccaagcgcctccccccagaccagctcatcagcctcttgctaaccatgtttgaggccctgggagaccccgaaaagaactgctcccgagcagctaccgtcatgatcaactgcctgctgcaggagcggggcggtgtgctccaggagaaggtgcccgagatcgtgagcgtcctgcgctccaagcttcaggaggcccagggagagcacgtcctgccggccgcccagcacagcgtgtacctcctggccacccagcactgcgcagccgtggtgtccagcctcctgggcagccccttgcccttggacaggtacccagctcagactccaggcttaggggtccctctggaatgatgctccccctggaatgatgctccccgagccctccacccggctctgcaccccgactttctgcatgagttcccatggctgtaggccacgtgggacagaaagtgacatggagccaggccccagtctctcaggtacccacggggacctctcctctccaggcgttttgggatcctcactggctccggtgggccctgcacagcacccccacagggaagctgctgtttctgccttcctctaaggtcccaaaactgcctggctgctctgttggccccaggctccagcacacactggaggctgcccctcaccctgtgtcttggttccggctactccaagccttgtcctctgcagggcatccactgctgcctgtgagcagacccctgggaactgcctgatctgagccccctcaggagcccaaggacaaccttgtctgtaccatacatcactatgtcttcccaagctcacacctcccagctcccagcaaagggcagggcgtgtctaccacccaccagcccactggggtcccccttcctcgccgaggcctccggagcatgggtctgctggcccttcctttctttgccatcttagtcatggacagaggctggcccaggggcacctggcttcctgtgacctccgggagactccatgctgggcaaggcagagtggcccttcccctggcaggcgggggcatgaggctgccacggggaacacaggtttccttgcacctggccccttaccctgtcagctttgctgttttcatgtgctctgacgccctcccattaggtgcatccaagctgcaatgcccacttcctcctggcaggggggacccgcaggcaccttctgctcagaggtgcacttgtctggtggccctgctccttcctggtactgttgacctttctgtgtgtttgttttaaatctcttgcatggtaaatagctgcattttgttactgataagagtgagtttaaatccactgtcatatcttttgcgtctttgttacacattttgttttttaaaaatcttctttcttgtccttttttagattgacagtgtccctcttacctcactttctccactcagtttgtaatcctgcagtctgttgcttttcttttagcgtttgccctaaaggtggctgcatgtgtcctcactgaagtccagcatgggccccaaatgcaggctgaggtctgggtctggctgggctgctgggcgcccgagtcatcatgaccattgttcctgggcacagccggcgttgacttgtatttcctccgtgattaccgcctggctcatcaatcactgttttcgttttccgtggaggcgtggctcacacaaagggcaagcacggagtcactgggtcctgcaggactttccaggtcaaggcagaggaggtgtccggtccccagcaggctcctgtgtgcccctcagtcccctagagggtcacggccacctgaccgccaccactagaggttttggcgattgtgctgtgtggtgggtcttcccggcctctgcttagcacagcagtgctgctgcccatccttcctccttgccaggtagtgccgggtgctgctgcccatccttcctctgccgggcagtgccgggtgctgctgcccatcctttctccttgccgggtagtgccgggtgctgctgcccatcctttctccttgccggacagtgctgggtgccgtgtgggctgcactgtgtgtgtgtttctaggtgatggacattcagattgttttttggtttggggctgctggggatggcgatgctttgaatgttcctgggagtgtctgttggtgggtagagcatgcatttctctttcgtgtgtatataggagtggaatcaaggccgggcactgtggctcatacctgtaatcccagcagtgtgggaggctgaggcaggaggattacctgaggtcagaagtttgcgaccagcctggccaacatggcaaaaccccgtctctactgaaaatataaaaattggccaggcatggccaggcgcagtggctcacccctgtaatcccagcactttgggaggctgaggtgggtggatcacgaggtcaggagatcgagaccatcctggctaacatggtaaaaccccgtctctactaaaaatataaaaaattagccaggcgaggtggcaggcgcctgtagtcccagctactcgggaggctgaggcaggagaatggtgtgaacccaggaggcggagcttgcagtgagttgagattgcaccactgcactccagcctgggcgacagagcaagaactctgtctc

SEQ ID NO: 151 - DNA, 3880 bp, Homo sapiens
gaggagtcagacaccgacgtggaagaggatggaggctatgacagcgatgttgctagagaaaaggccattgactacaccaccaagatttatgctgtgagcatcagggaaatggaaggcaccaagccacaccagcagctgaaggaagtttccgtggaagaaagggaattgtcaagggatcaagaccacccgttagccgagcagctccccagcctgagaaactgcagaagaacaatatcaccaaaaaaaagaaactggttgaggagctggctctagaccacgtgtttggctacagaggtttcgactgtcgaaataacctgcattaccttaatgatggcgctgacatcatcttccacacagcagcggctggcatcgttcagaacctctccacagggagccagagcttctatctggagcacacagatgacatcctctgtctcacagtgaaccagcaccccaagtacagaaacgtggtggccaccagccagatagggacaacaccttccatccacatatgggacgccatgaccaaacacaccctctccatgctgcggtgcttccactccaagggggtgaattacatcaacttcagtgcaactggaaagctcctggtgtcggtgggagtggaccctgagcacaccatcactgtctggcgatggcaggaaggtgccaaggttgccagccgagggggtcacctggagcgcatatttgtggtggaatttcgccccgactcagacacgcagtttgtatctgtcggggtcaaacatatgaagttctggaccctggcaggcagcgccttgctttacaagaaaggggtcatcgggtccctgggagctgccaaaatgcagacgatgctctccgtggccttcggtgctaacaatctcactttcacgggtgccatcaatggagatgtctacgtctggaaggaccacttcctcatccggctggtggccaaggctcacacaggccccgtgttcacaatgtacacaacccttcgggatggactcatagtgaccggcggaaaagagcggccgaccaaagaaggaggtgctgtaaaatcttagtgggaaccaaagacggagaaataattgaagttggtgaaaaaaatgctgcttctaacatcctgattgatggtcacatggaaggggagatctggggcctggccactcacccttccaaggacctcttcatctctgccagcaacgatggcacagcccggatctgggacctggctgacaagaagctgttaaacaaggtgagcttgggccatgcggccaggtgtgcagcctacagccctgatggggagatggtggccattggcatgaagaatggagagtttgtcatcttgttggtgaacagcctgaaagtttgggggaaaaaacgagaccggaaatctgctatccaagatatcagaatcagcccagacaaccgattcttagccgttggttcttctgaacacacagttgacttctatgacctcactcagggcacaaatctgaaccgcattggctactgcaaagatatcccaagctttgtcattcagatggatttttctgcggatggcaaatacattcaggtgtcaacaggtgcctataagcgccaggtgcatgaggtccccctggggaagcaggtaactgaagccgtggtcattgagaagatcacctgggcctcctggacaagcgtcctgggagatgaagtcattggaatctggccacgaaatgcagacaaggccgatgtcaactgcgcatgtgtgacccacgctggcctgaacattgtcacaggagatgactttgggctggtgaagctctttgattttccatgcacagaaaaatttgccaaacataagcgatacttcggtcactcggctcacgtgacgaacatccgtttctcttatgatgacaagtatgtggtcagcactggaggagacgactgcagtgtatttgtgtggcgatgtctgtaaaatgccagaagcctcttatgttattgctgctgctgctaccagccagcaactgcagaggccatgctgaggtgcctccttgccaccagccgttgggaaatgcctaccatgctgccccggatgcacaagctcaaaacgctgcagaagttacacaactgctcccataatctggactctccaaaaccgtgatgccacgaaggaaggtcaagttttaaaatgttaaagactgcttgcctctgttcctgagactaaacagtatacatactaactacattgacaaagaaatcctatctgataatgtagcccgctgacgaattttgaagcctcggttaccctaaccaatatgtagcttttaatttgcatcaaaacttttacaaagatgttttgctattgtttctatatacttcaagaatgttcatttttacaaataagttgaacaagacagcctaagttagatgcaccgaagtactagaaatatcgctagcctctgttctccagtttagctttcaaaaccaaatgagccatgtataaaggagttgagaaacttaatttttaaatgtttcatttgcagagttttatatccattaagtgcctttgaaagtttccagttgtgtgggctgctgtctcacctcccaccaatttctcctttctccatatggtgctaaaacctcaaagctgaggagggctgcaggacccttagcagattcagtgtgtcacccttgtcctgtgttcacgccaaggcttcctaaatgaaagacatcggttacctgcttatgggaaggtgagcagcaaaggaattgaagttcgggacagggtagaattatgggttttcattgtgtttcatgccaaacccacaaaatccaaaatagaattcaagttaaacaaacttctactacaaaatggaaggggaaaaaggctcaggaaggtctatgagaatgagctgacttatctcgttaaatcttaagataaatgagggtaacccaaggctgcaccttggtgtaccaccctgagtggagttgaggtgacttcatttgattgcttcaggcgaactatataggtcaagtccagattataaaaaaattatctgcagaacaaattgtaaacccaaggaatagctggtaaatcaaaattataaagtgagttagagttccttggatttggttgtatgacagaatatgacttggacaatctttaccagaagccatccgtaagcccctcagtcacactttccatgtagctgaccagtgactacaggatgtggctgacagtgctcactgaaaggagagttggtgcgggactggtggttctgagcacatagacgcctattagtccttctggtcagtgaacgaaaattctagacctacagttactggctacttgcatttgtcagtttagagaaaaggtaaaatgaggcattttcaattgtagaatacactaacatttaccacagaagtgcttcagcattctaaatggattagatcactcattaagctatttttatatgccaatttactaatgccttacatcaatccactaataggttgttgggcccgcagtagagtccctatgcagtcccaattctgttttctgtaaccatgtgactggtgatgcagagtgataaccatgtctgcctatcttgtactagactcttcatgctgatcggatcttgcattgaaataaccatgtggaagaacaatgaatcgattaatgatgacatgtacaaccatatttaaagagcaatagtgtccgtgtgtcatgaaaaacttatttgtaaacgtttatatggtatgattttgattttatgtatgttcataaatcctgcactgtatgatatatgtgggttaaaacattggtgcatgaatttattttcaaagtataaaacacatcacttaaacattttatgtgtcaaataaaatttgattatgt

SEQ ID NO: 152 - DNA, 3227 bp, Homo sapiens
aggaaatgagccatgggtgagcaagcattaccacctgagctccgccttctgtcagatcactgggggcattagattctcactggagcacaaaccctgttgtgaactgtgcatgtaagggatctagtttgcatgctccttataaggagcatatatctaatgcccgatctgtcactgtctcccatcacctccagatgggactgtctagttgcaggaaaacaagctcagggctcccaactgattctacgttatggtgagttgtataattacttcattatatattacaatgtaataataatagaaataaagtgtgcaataaatgtcatgtgcttgaatcatcctgaaaccatctcccgtttctcctgcctggtccgtggaaaaagtgtcttccatgaaaccggtccctggtgccaaaaaggttggggaccactgccctaacagatggaaaaggcctagaagccaggtccctgcagcactctcccctggcctcccattggactttctagaggtcagagtacagagcgcattccctaacaaggagcccatggcaggtggcctctcctgggattacctgtctcctgtgtaaggatgagggcagttacaggaagctcctttgggggagaggatgcaagttccaccttccaggcagggtgcaaaagtacagttctcccttccttgttcacagtgcttcccagagaactgtgggggacatttgcagacatagcctaggagaaaaagaagggaggtgagagaccgcactggcctagcagttaaaggagacctggcattggcagtctggtgtgtttgtgcagccgttcagttaccatttatttatttggttgctcccctctgtgcccaataccgtgctgggcattggtgccctgctgaaccaagagcactttggtccctgccctcaaacagcttacagcccaccagagacaacagtcacctaaagaacagtaataaacaggataacaaccatagacactaacttagtgctagtcactgttccaaggatcttcctgtgttggctcatttgatcctcacgatgaccctgaggttggtgactgtcatcatcctcatcaggggacaggtacaaagggatggcagatgaggaaaggaggcacagagaatggacagaatttgctcaagccagtaaatggcaaagctggggttcaaacctagacagctagctataatatcagtatctcagtaattataataaaattagttttattgaagggaaatgctgggaggggtgggggatgaggctagcttactctagggatctgggagctatttcatttgagatctgaaggatgagtagaaattagctaggcaagaagctagagggcaaagagaaaggtgtttcaggcggaagagaagagtgtgtgcaaaggctagggaagggtgtggcatggtcaaggaactcaaaccacaccagggtgggccagcctggtgagggacagggagagtttgaactatggcctgggaggtgcaggagccacatgcagggattgggactctatcctagcagcatggcggccactgagcagttctcagcagaagagtgccatgcacaggtctgtgctggataaagatcaccccggctcctgctggaaggtggaaggccgggatagaagctggagaacagggaggaggctggtgccagggtgagaggtgatgggggcttgggacagagggacagcaatggggaaagagagaagtgatggattccttggatattttgcaggtagaaatgacatgattagccagacaaaaatcagaaaaaggggtaatgcgaagtgttgacaggcatgtcacatgttgacaggcatgcgggtacataggaacctctcatgttgtgtgtgatgtatagaatagatggctgagaggcatgtgggtacacaggaacctctcatgttgcatgtgatgtatagaatagccatgctgagagcaatgtatccctatttagtcaaaataattatttgcatactgtgagcctgtgacttccacccctgggtgtcgggtgtgtgtgtgtgaaggaaactctcacacagcttcacaaggagacatataggagaatgctccctgcagcattgatgatggagatgggtgtttggagtgcgagggtggagagggaaaatgtgagtgcgtgtacatcatggagtactgagccacagttagaagcaattaatgagaattgctcatggcagcattgacagatcttaaaaatatggtgctgagcgaaagcgtaaacaacatataccacttatataaattggaaattcaagcatatgaaaaacaacatgtattttgcaagaactcattcaaaaactgtaaatgtttgcctctagtgttagggaaggggaagggagtggaatataagttaaaggggaatgagaaggagactgtgcatagaccagtgatgacactaaggtatgtgattaattcaaccctctgcccctgaggtccccattcatatcctccctcatccccccagaagtagaaagatagtttttgttgagagggaaggaagactcctggcttcccctagtctagatattgcagattccaacctgttactcacaagttaggggaagagagagaaatttggaaccaggaggctctgagatctccaccctgacatgcctttcccacctgaagagccttctgggataaaccctgggttcagcctggcaccccagccctcacctgccccgtgggtccatgagcacttcccaccattgaggcatgtgttctggctgcagtagtcactgtggaggcagcactgggtgagggcttgtgtctccagcaagcctgccaccgtcttgccaggggccagcagatctagagcctcttcgttgaccacgacagcatccaggcagccttcaaagccctgggagacattcgaggaagaatgcaacagaatgaggccgcccagcaagaggtgcctttcgggcctcagaccacggcagttctctgggaccacaagggaggtgttgcccatgctgtcaaccatcaggcgaatggaagcgtccatctcctccaccaggatggagtgccactcgtggtcattcacatggcgctgggaggaaaggtttccatagaaaccacccagacagtggtattccagctggggcactccactggccagctgcaaaggaaatccaaacagccatcagcaaagccaaggagtccttgtaaacctgctaagaggctgccagttc

(The sequence listing continues in the following parts.)

What is claimed is:

1. A polynucleotide selected from the group consisting of:
(a) a polynucleotide comprising a protein-coding region of the nucleotide sequence according to any one of SEQ ID NOs: 1-2188 and SEQ ID NOs: 4377-4683;
(b) a polynucleotide comprising the nucleotide sequence encoding a polypeptide that comprises the amino acid sequence of any one of SEQ ID NOs: 2189-4376 and SEQ ID NOs: 4684-4990;
(c) a polynucleotide comprising a nucleotide sequence encoding a polypeptide, which comprises the amino acid sequence selected from SEQ ID NO: SEQ ID NOs: 2189-4376 and SEQ ID NOs: 4684-4990 wherein one or more amino acids have been substituted, deleted, inserted, and/or added, and which is functionally equivalent to the polypeptide comprising the selected amino acid sequence as described above;
(d) a polynucleotide which hybridizes to a polynucleotide comprising the nucleotide sequence selected from SEQ ID NOs: 1-2188 and SEQ ID NOs: 4377-4683, and which comprises the nucleotide sequence encoding a polypeptide functionally equivalent to a polypeptide encoded by the selected nucleotide sequence as described above;
(e) a polynucleotide comprising a nucleotide sequence encoding a partial amino acid sequence of a polypeptide encoded by the polynucleotides according to any one of (a)-(d);
(f) a polynucleotide comprising a nucleotide sequence having at least 70% identity to the nucleotide sequence of any one of SEQ ID NOs: 1-2188 and SEQ ID NOs: 4377-4683; and
(g) a polynucleotide comprising a nucleotide sequence having at least 90% identity to the nucleotide sequence of any one of SEQ ID NOs: 1-2188 and SEQ ID NOs: 4377-4683.

2. A polypeptide encoded by the polynucleotide according to claim 1, or a partial peptide thereof.

3. An antibody which binds to the polypeptide or the peptide according to claim 2.

4. An immunoassay method for the polypeptide or the peptide according to claim 2, which comprises the steps of:
(a) contacting the polypeptide or the peptide according to claim 2 with the antibody according to claim 3; and
(b) observing the binding between the two.

5. A vector comprising the polynucleotide according to claim 1.

6. A transformant comprising the polynucleotide according to claim 1 or the vector according to claim 5.

7. A transformant which comprises the polynucleotide according to claim 1 or vector according to claim 5 in an expressible manner.

8. A method for producing the polypeptide or the peptide according to claim 2, which comprises the steps of:
(a) culturing the transformant according to claim 7; and
(b) recovering the expression product.

9. An oligonucleotide comprising 15 or more nucleotides, which comprises the nucleotide sequence according to any one of SEQ ID NOs: 1-2188 and SEQ ID NOs: 4377-4683, or a nucleotide sequence complementary to the complementary strand thereof.

10. A primer for synthesizing a polynucleotide, which comprises the oligonucleotide according to claim 9.

11. A probe for detecting a polynucleotide, which comprises the oligonucleotide according to claim 9.

12. A polynucleotide according to any one of:
(a) an antisense polynucleotide comprising a nucleotide sequence complementary to the transcript of the polynucleotide according to claim 1;
(b) a polynucleotide with the ribozyme activity for specifically cleaving the transcript of the polynucleotide according to claim 1; and
(c) a polynucleotide which downregulates the expression of the polynucleotide of claim 1 due to RNAi activity in a host cell.

13. A method for detecting the polynucleotide according to claim 1, which comprises the steps of:
(a) incubating a target polynucleotide with the oligonucleotide according to claim 9 under conditions ensuring hybridization; and
(b) detecting the hybridization between the target polynucleotide and the oligonucleotide according to claim 9.

14. A database of polynucleotides and/or polypeptides, which comprises information on at least one of the nucleotide sequences of SEQ ID NOs: 1-2188 and SEQ ID NOs: 4377-4683 and/or on at least one of the amino acid sequences of SEQ ID NOs: 2189-4376 and SEQ ID NOs: 4684-4990.
